(19) United States
(12) Patent Application Publication
(10) Pub. No.: US 2018/0126003 A1
(43) Pub. Date: May 10, 2018

(54) NEW TARGETS FOR RNA THERAPEUTICS

(71) Applicant: CureVac AG, Tubingen (DE)

(72) Inventor: Ingmar HOERR, Tübingen (DE)

(21) Appl. No.: 15/585,561

(22) Filed: May 3, 2017

(30) Foreign Application Priority Data
May 4, 2016 (EP) 16001039.3

(51) Int. Cl. A61K 48/00; A61K 9/00

(52) U.S. Cl. CPC A61K 48/00; A61K 9/0014; A61K 48/0075

(57) ABSTRACT

The present invention relates to a method for treating or preventing a disease, disorder or condition by administration of a polynucleotide, e.g. a modified RNA, encoding a peptide or protein related to this disease, disorder or condition. The present invention also relates to pharmaceutical compositions for use in such method.

[0001] This application claims priority to European Application No. 16001039.3, filed May 4, 2016, the entire contents of which are hereby incorporated by reference.

### INCORPORATION OF SEQUENCE LISTING

[0002] The sequence listing that is contained in the file named “CRVCP0220US-ST25.txt”, which is 873 MB (as measured in Microsoft Windows®) and was created on May 3, 2017, is filed concurrently herewith on compact discs by Priority Express Mail and is incorporated by reference herein. The file was separated into two concatenated files for copy to two CD-ROMs.

### FIELD OF THE INVENTION

[0003] The present invention relates to a method for treating or preventing a disease, disorder or condition by administration of a polynucleotide, e.g. a modified RNA, encoding a peptide or protein related to this disease, disorder or condition. The present invention also relates to pharmaceutical compositions for use in such method.

### BACKGROUND OF THE INVENTION

[0004] Gene therapy and genetic vaccination belong to the most promising and quickly developing methods of modern medicine. Both methods are based on the introduction of nucleic acids into cells or into tissues of the patient and on subsequent processing of the information encoded by the nucleic acids introduced, i.e. expression of the desired protein or peptide.

[0005] While DNA is known to be relatively stable and easy to handle, the use of DNA in therapy bears the risk of undesired insertion of the administered DNA fragments into the patient's genome potentially resulting in loss of function of the genes. As a further risk, the undesired generation of anti-DNA antibodies has emerged. Another drawback is the limited expression level of the encoded peptide or protein that can be achieved by DNA administration and its subsequent transcription/translation.

[0006] By using RNA molecules instead of DNA molecules for gene therapy or genetic vaccination, the risk of undesired genomic integration and generation of anti-DNA antibodies is minimized or is even prevented completely. For many years it was generally accepted that mRNA is too unstable to be efficiently used for gene therapy purposes. In the last decade, however, several research groups faced this challenge and not only proved the feasibility of mRNA-mediated transfection with surprising results regarding transfection efficiency and duration of protein expression, but were also able to demonstrate major advantages over the use of DNA. One of these advantages is that mRNA does not need to cross the nuclear barrier for its encoded proteins to be expressed (reviewed in Tavernier et al., J Control Release. (2011); 150(3):238-47.

[0007] Although progress has been made in this field, there is a continuing need for methods of specifically treating diseases, disorders or conditions by using a polynucleotide encoding a specific protein or peptide as medicament.

### SUMMARY OF THE INVENTION

[0008] The present invention relates to a method for treating or preventing a disease, disorder or condition in a subject in need thereof by increasing the level of at least one peptide or protein related to this disease, disorder or condition comprising administering to the subject a pharmaceutical composition comprising at least one polynucleotide encoding said at least one peptide or protein,

wherein said at least one peptide or protein is selected from the group consisting of peptides and proteins listed in column 1 (c1) of Table 1 and wherein the disease, disorder or condition to which said at least one peptide or protein relates is selected from the group consisting of diseases, disorders and conditions listed in column 7 (c7) of Table 1,
wherein the at least one peptide or protein and the disease, disorder or condition to which said at least one peptide or protein relates are listed in Table 1 in the following order: c1(Peptide or protein or gene) c2(NCBI RefSeq ID) c3(NCBI RefSeq description) c4(Protein SEQ ID NO) c5(DNA SEQ ID NOs) c6(RNA SEQ ID NOs) c7(Related disease, disorder or condition); proteins are separated by #.

[0009] The present invention further relates to a method for reducing and/or ameliorating at least one symptom of a disease, disorder or condition in a subject in need thereof by increasing the level of at least one peptide or protein related to this disease, disorder or condition comprising administering to the subject a pharmaceutical composition comprising a polynucleotide encoding said at least one peptide or protein,

wherein said at least one peptide or protein is selected from the group consisting of peptides and proteins listed in column 1 (c1) of Table 1 and wherein the disease, disorder or condition to which said peptide or protein relates is selected from the group consisting of diseases, disorders and conditions listed in column 7 (c7) of Table 1, wherein the at least one peptide or protein and the disease, disorder or condition to which said at least one peptide or protein relates are listed in Table 1 in the following order: c1(Peptide or protein or gene) c2(NCBI RefSeq ID) c3(NCBI RefSeq description) c4(Protein SEQ ID NO) c5(DNA SEQ ID NOs) c6(RNA SEQ ID NOs) c7(Related disease, disorder or condition); proteins are separated by #. As Table 1 is depicted as running text the term “a row” is used herein for all information associated to one peptide or protein. Consequently, an entry beginning with a number sign and ending with a semicolon resembles a “row” presenting a specific peptide or protein or gene and also its specific features like f.e. NCBI RefSeq ID, NCBI RefSeq description, Protein SEQ ID NO, DNA SEQ ID NOs, RNA SEQ ID NOs, and related disease(s), disorder(s) or condition(s).

[0010] In other words, all information comprised in column 1 (c1) (Peptide or protein or gene), column 2 (c2)(NCBI RefSeq ID), column 3 (c3) (NCBI RefSeq description), column 4 (c4) (Protein SEQ ID NO), column 5 (c5) (DNA SEQ ID NOs), column 6 (c6) (RNA SEQ ID NOs) and column 7 (c7) (Related disease, disorder or condition) relating to one peptide or protein (as named in column 1 (c1)) corresponds to the information which would have been disclosed in one row if depicted as table. The term “column 1” accordingly equals the term “c1”, “column 2” equals the term “c2”, “column 3” equals the term “c3”, “column 4” equals the term “c4”, “column 5” equals the term “c5”, “column 6” equals the term “c6”, and “column 7” equals the term “c7” and vice versa. As Table 1 is depicted as a running text, each peptide or protein or gene entry (i.e. peptide or protein or gene of the invention) is separated by a semicolon and, for ease of readability, each entry is preluded by the number sign (#).

[0011] Table 1 accordingly starts with entry “c1(A1BG) c2(NP_570602) c3(alpha-1B-glycoprotein precursor) c4(234076) c5(234077, 234078, 234079, 234080, 234081, 234082) c6( ) c7(b, d, c, e, h, g, i, f)” and ends with entry “c1(ZZZ3) c2(XP_011539507) c3(ZZ-type zinc finger-containing protein 3 isoform X3) c4(337706) c5(337707, 337708, 337709, 337710, 337711, 337712, 337713) c6( ) c7(v)” (all in accordance with the formula and the Abbreviation Dictionary as described above; number signs (#) and semicolons were introduced for ease of readability to separate the different entries from another).

[0012] According to this, exemplarily the third entry of a peptide or protein gene as disclosed in Table 1 i.e. “#c1(A1CF) c2(NP_001185749) c3(APOBEC1 complementation factor isoform 3) c4(76200, 76201) c5(76202, 76203, 76204, 76205, 76206, 76207, 76208, 76209, 76210, 76211, 76212, 76213) c6( ) c7(x, y, I, A, c, s, u, w, z, r, h, n, v, j, m, k, g, t, q, o, p)” resembles the third entry (peptide or protein or gene) shown in Table A1.

TABLE A1
Exemplary depiction from the third entry as disclosed in Table 1 (c1, c2, c3, c4, c5, c6 and c7 correspond to the corresponding
entry under column 1, column 2, column 3, column 4, column 5, column 6 and column 7) in accordance with formula column 1 (c1)
(Peptide or protein or gene), column 2 (c2)(NCBI RefSeq ID), column 3 (c3) (NCBI RefSeq description), column 4 (c4) (Protein
SEQ ID NO), column 5 (c5) (DNA SEQ ID NOs), column 6 (c6) (RNA SEQ ID NOs) and column 7 (c7) (Related disease, disorder or
condition) and the Abbreviation Dictionary as disclosed in Table C - emphasis added for corresponding entry data (italics
and underlined). Each of the recited sequences are also provided in the sequence listing of the priority document European
Application No. 16001039.3, filed May 4, 2016, the entire contents of which is hereby incorporated by reference.

| column 1 | | column 3 | | | | column 7 |
|---|---|---|---|---|---|---|
| (i.e. feature c1) | column 2 | (i.e. feature c3) | column 4 | column 5 | column 6 | (i.e. feature 7) |
| Peptide or | (i.e. feature c2) | NCBI RefSeq | (i.e. feature c4) | (i.e. feature c5) | (i.e. feature c6) | Related disease, disorder |
| protein or gene | NCBI RefSeq ID | description | Protein SEQ ID NO | DNA SEQ ID NOs | RNA SEQ ID NOs | or condition |
| A1CF | NP_{—}001185749 | APOBEC1 | 76200, 76201 | 76202, 76203, | | coronary artery |
| | | complementation | | 76204, 76205, | | disease; precursor |
| | | factor isoform 3 | | 76206, 76207, | | cell lymphoblastic |
| | | | | 76208, 76209, | | leukemia-lymphoma; |
| | | | | 76210, 76211, | | cholelithiasis; ovarian |
| | | | | 76212, 76213 | | carcinoma; recurrent |
| | | | | | | malignant neoplasm; |
| | | | | | | juvenile rheumatoid |
| | | | | | | arthritis; |
| | | | | | | mitochondrial |
| | | | | | | cardiomyopathy; large |
| | | | | | | intestine cancer; |
| | | | | | | amyotrophyic lateral |
| | | | | | | sclerosis; colorectal |
| | | | | | | cancer; adenoma; |
| | | | | | | ovarian cancer; |
| | | | | | | cholecystolithiasis; |
| | | | | | | obesity; fibrodysplasia |
| | | | | | | ossificans |
| | | | | | | progressive; |
| | | | | | | adenocarcinoma; |
| | | | | | | human |
| | | | | | | immunodeficiency |
| | | | | | | virus infectious |
| | | | | | | disease; acute |
| | | | | | | lymphocytic leukemia; |
| | | | | | | rheumatoid arthritis; |
| | | | | | | allergic asthma; type 1 |
| | | | | | | diabetes mellitus |

[0013] Moreover, the invention relates to a pharmaceutical composition comprising a polynucleotide encoding at least one peptide or protein for use in treating or preventing a disease, disorder or condition in a subject, wherein the at least one peptide or protein is related to said disease, disorder or condition and is selected from the group consisting of peptides and proteins listed in column 1 (c1) of Table 1 and wherein the disease, disorder or condition to which said at least one peptide or protein relates is selected from the group consisting of diseases, disorders and conditions listed in column 7 (c7) of Table 1, wherein the disease-, disorder- or condition-related peptide or protein and the disease, disorder or condition to which the at least one peptide or protein relates are listed in Table 1 in the following order: c1(Peptide or protein or gene) c2(c1 RefSeq ID) c3(c1 RefSeq description) c4(Protein SEQ ID NO) c5(DNA SEQ ID NOs) c6(RNA SEQ ID NOs) c7(Related disease, disorder or condition); proteins are separated by #. In a further aspect, the invention relates to a pharmaceutical composition comprising a polynucleotide encoding at least one peptide or protein for use in reducing and/or ameliorating at least one symptom of a disease, disorder or condition a disease, disorder or condition in a subject, wherein the at least one peptide or protein is related to said disease and is selected from the group consisting of peptides and proteins listed in column 1 (c1) of Table 1 and wherein the disease, disorder or condition to which said at least one peptide or protein relates is selected from the group consisting of diseases, disorders and conditions listed in column 7 (c7) of Table 1, wherein the at least one peptide or protein and the disease, disorder or condition to which the peptide or protein relates are listed in Table 1 in the following order: c1(Peptide or protein or gene) c2(NCBI RefSeq ID) c3(NCBI RefSeq description) c4(Protein SEQ ID NO) c5(DNA SEQ ID NOs) c6(RNA SEQ ID NOs) c7(Related disease, disorder or condition); proteins are separated by #.

[0014] In one aspect, the invention relates to a pharmaceutical composition comprising a polynucleotide encoding a disease-, disorder- or condition-related peptide or protein, wherein the disease-, disorder- or condition-related peptide or protein is selected from the group consisting of peptides and proteins listed in column 1 (c1) of Table 1.

[0015] In a further aspect, the invention relates to a polynucleotide encoding a disease-, disorder- or condition-related peptide or protein, wherein the disease-, disorder- or condition-related peptide or protein is selected from the group consisting of peptides and proteins listed in column 1 (c1) of Table 1.

[0016] The disease-, disorder- or condition-related peptide or protein may have an amino acid sequence of any of SEQ ID NOs listed in column 4 (c4) of Table 1, and/or may be encoded by a nucleic acid sequence of any of SEQ ID NOs listed in column 5 (c5) and column 6 (c6) of Table 1, wherein the disease-, disorder- or condition-related peptide or protein and its corresponding SEQ ID NO are listed in Table 1 in the following order: c1(Peptide or protein or gene) c2(NCBI RefSeq ID) c3(NCBI RefSeq description) c4(Protein SEQ ID NO) c5(DNA SEQ ID NOs) c6(RNA SEQ ID NOs) c7(Related disease, disorder or condition); proteins are separated by #.

[0017] The pharmaceutical composition may comprise a lipid which is selected from the group consisting of DLin-DMA, DLin-K-DMA, DLin-KC2-DMA, 98N12-5, C12-200, DLin-MC3-DMA, PLGA, PEG, PEG-DMG and PEGylated lipids and mixtures thereof.

[0018] The pharmaceutical composition may further comprise a pharmaceutically acceptable excipient.

[0019] The pharmaceutically acceptable excipient may be selected from the group consisting of a solvent, aqueous solvent, nonaqueous solvent, dispersion media, diluent, dispersion, suspension aid, surface active agent, isotonic agent, thickening or emulsifying agent, preservative, lipid, lipidoid, liposome, lipid nanoparticle, core-shell nanoparticles, polymer, lipoplex, peptide, protein, cell, hyaluronidase, and mixtures thereof.

[0020] The pharmaceutical composition may be administered by injection, topical administration, intranasal administration or ophthalmic administration. The injection may include intradermal injection, subcutaneous injection and intramuscular injection. The pharmaceutical composition administered by topical administration may further comprise a penetration enhancer. This penetration enhancer may be selected from the group consisting of surfactants, fatty acids, bile salts, chelating agents, non-chelating non-surfactants, polyoxyethylene-9-lauryl ether, polyoxyethylene-20-cetyl ether, fatty acids and/or salts in combination with bile acids and/or salts, sodium salt in combination with lauric acid, capric acid and UDCA, and the like.

[0021] The pharmaceutical composition may be administered at a total daily dose of between 0.001 μg and 150 μg. Further, the pharmaceutical composition may be administered two or more times.

[0022] The polynucleotide according to the present invention may comprise at least one modification.

[0023] The at least one modification may be a modification selected from the group consisting of codon optimization, UTR modification, addition of a poly(A) tail, addition of a 5′-CAP structure, and incorporation of at least one chemically modified nucleotide.

[0024] The 5′-CAP structure may be selected from the group consisting of Cap1, ARCA, inosine, N1-methyl-guanosine, 2′-fluoro-guanosine, 7-deaza-guanosine, 8-oxo-guanosine, 2-amino-guanosine, LNA-guanosine, and 2-azido-guanosine. The at least one modification may be the addition of a chemically modified ARCA-CAP. The ARCA-CAP may be modified with phosphorothioate.

[0025] The chemically modified nucleotide may be selected from the group consisting of pyridin-4-one ribonucleoside, 5-aza-uridine, 2-thio-5-aza-uridine, 2-thiouridine, 4-thio-pseudouridine, 2-thio-pseudouridine, 5-hydroxyuridine, 3-methyluridine, 5-carboxymethyl-uridine, 1-carboxymethyl-pseudouridine, 5-propynyl-uridine, 1-propynyl-pseudouridine, 5-taurinomethyluridine, 1-taurinomethyl-pseudouridine, 5-taurinomethyl-2-thio-uridine, 1-taurinomethyl-4-thio-uridine, 5-methyl-uridine, 1-methyl-pseudouridine, 4-thio-1-methyl-pseudouridine, 2-thio-1-methyl-pseudouridine, 1-methyl-1-deaza-pseudouridine, 2-thio-1-methyl-1-deaza-pseudouridine, dihydrouridine, dihydropseudouridine, 2-thio-dihydrouridine, 2-thio-dihydropseudouridine, 2-methoxyuridine, 2-methoxy-4-thio-uridine, 4-methoxy-pseudouridine, 4-methoxy-2-thio-pseudouridine, 5-aza-cytidine, pseudoisocytidine, 3-methyl-cytidine, N4-acetylcytidine, 5-formylcytidine, N4-methylcytidine, 5-hydroxymethylcytidine, 1-methyl-pseudoisocytidine, pyrrolo-cytidine, pyrrolo-pseudoisocytidine, 2-thio-cytidine, 2-thio-5-methyl-cytidine, 4-thio-pseudoisocytidine, 4-thio-1-methyl-pseudoisocytidine, 4-thio-1-methyl-1-deaza-pseudoisocytidine, 1-methyl-1-deaza-pseudoisocytidine, zebularine, 5-aza-zebularine, 5-methyl-zebularine, 5-aza-2-thio-zebularine, 2-thio-zebularine, 2-methoxy-cytidine, 2-methoxy-5-methyl-cytidine, 4-methoxy-pseudoisocytidine, 4-methoxy-1-methyl-pseudoisocytidine, 2-aminopurine, 2,6-diaminopurine, 7-deaza-adenine, 7-deaza-8-aza-adenine, 7-deaza-2-aminopurine, 7-deaza-8-aza-2-aminopurine, 7-deaza-2,6-diaminopurine, 7-deaza-8-aza-2,6-diaminopurine, 1-methyladenosine, N6-methyladenosine, N6-isopentenyladenosine, N6-(cis-hydroxyisopentenyl)adenosine, 2-methylthio-N6-(cis-hydrogisopentenyl)adenosine, N6-glycinylcarbamoyladenosine, N6-threonylcarbamoyladenosine, 2-methylthio-N6-threonylcarbamoyladenosine, N6,N6-dimethyladenosine, 7-methyladenine, 2-methylthio-adenine, 2-methoxy-adenine, inosine, 1-methyl-inosine, wyosine, wybutosine, 7-deaza-guanosine, 7-deaza-8-aza-guanosine, 6-thio-guanosine, 6-thio-7-deaza-guanosine, 6-thio-7-deaza-8-aza-guanosine, 7-methyl-guanosine, 6-thio-7-methyl-guanosine, 7-methylinosine, 6-methoxy-guanosine, 1-methylguanosine, N2-methylguanosine, N2,N2-dimethylguanosine, 8-oxo-guanosine, 7-methyl-8-oxo-guanosine, 1-methyl-6-thio-guanosine, N2-methyl-6-thio-guanosine, and N2,N2-dimethyl-6-thio-guanosine.

[0026] In one embodiment, the polynucleotide comprises at least two modifications.

[0027] In a further embodiment, the polynucleotide is substantially purified.

### DETAILED DESCRIPTION OF THE INVENTION

[0028] The present invention as illustratively described in the following may suitably be practiced in the absence of any element or elements, limitation or limitations, not specifically disclosed herein.

[0029] The present invention will be described with respect to particular aspects and embodiments, but the invention is not limited thereto. Terms as set forth hereinafter are generally to be understood in their common sense unless indicated otherwise.

[0030] Where the term “comprising” is used in the present description and claims, it does not exclude other elements. For the purposes of the present invention, the term “consisting of” is considered to be a preferred embodiment of the term “comprising of”. If hereinafter e.g. a group is defined to comprise at least a certain number of elements, this is to be understood to always also disclose a group which preferably consists only of these elements. If an aspect or embodiment of the invention is defined to comprise at least certain compositional, structural and/or functional features, this is to be understood to always also disclose an aspect and embodiment, which preferably consists only of these features.

[0031] Where an indefinite or definite article is used when referring to a singular noun, e.g. “a”, “an” or “the”, this includes a plural of that noun unless something else is specifically stated.

[0032] All documents (including all patents, patent applications, scientific publications, manufacturer's specifications, instructions, etc.) specifically mentioned herein are incorporated by reference in their entirety for all purposes including describing and disclosing the chemicals, instruments, and methodologies which are reported in the publications which might be used in connection with the invention. All references cited in this specification are to be taken as indicative of the level of skill in the art. Nothing herein is to be construed as an admission that the invention is not entitled to antedate such disclosure by virtue of prior invention.

[0033] The present inventors have related more than 29 000 human proteins and peptides to specific diseases, disorders or conditions (see Table 1). Thus, the present invention provides pharmaceutical compositions comprising a polynucleotide or a plurality of polynucleotides encoding a specific disease-, disorder- and condition-related peptide or protein that provide highly specific and individual treatments of a large variety of diseases, disorders and conditions, e.g. in the field of gene therapy or genetic vaccination. In addition, administering to a subject pharmaceutical compositions comprising polynucleotides encoding such specific disease-, disorder- and condition-related peptides and proteins may prevent (early) onset of such specific diseases, disorders and conditions. Further, such compositions may be used for reducing and/or ameliorating at least one symptom of such specific diseases, disorders or conditions.

[0034] The peptides and proteins and the diseases, disorders and/or conditions related thereto are shown in Table 1 below wherein each row of the Table provides information for one specific protein, i.e. information on its function (column 3 (c3)), the amino acid sequence (column 4 (c4)), the DNA sequence encoding the protein (column 5 (c5)) and the sequence of the corresponding RNA (column 6 (c6)). Finally and importantly, column 7 (c7) lists diseases, disorders and/or conditions related to the protein of column 1 (c1).

[0035] Based on this information, it is within the ordinary skills of those in the art to select a protein or peptide which relates to a particular disease, disorder or condition and therefore can be used to treat this disease, disorder or condition and to create a polynucleotide, preferably an RNA, encoding this protein or peptide based on the sequence information in columns 5 (c5) and 6 (c6) of Table 1. If several different proteins or peptides are related to the same disease, disorder or condition, a mixture of different polynucleotides can be created, wherein each type of polynucleotide encodes one of said proteins or peptides related to the specific disease, disorder or condition.

[0036] For instance, according to entry 1 of Table 1, i.e. “#c1(A1BG) c2(NP_570602) c3(alpha-1B-glycoprotein precursor) c4(234076) c5(234077, 234078, 234079, 234080, 234081, 234082) c6( ) c7(b, d, c, e, h, g, i, f)”, the alpha-1B-glycoprotein precursor (A1BG) (see columns 1 (c1) and 3 (c3) of Table 1) is related to the following abbreviated diseases, disorders or conditions which are indicated in column 7 (c7) of Table 1): “b, d, c, e, h, g, i, f”. The abbreviations “b, d, c, e, h, g, i, f” as disclosed under feature c7 are to be read from the Abbreviation Dictionary for the “Related disease, disorder or condition” as shown in Table C, whereby each abbreviation is depicted with a specific “Related disease, disorder or condition” in written form, f.e. prostate cancer corresponds to “A”. Accordingly, Table C disclosed the following “Related diseases, disorders or conditions” for entry 1 i.e. alpha-1B-glycoprotein precursor: spots on skin, amyotrophyic lateral sclerosis, glioblastoma multiforme, cardiovascular system disease, down syndrome, adenocarcinoma, human immunodeficiency virus infectious disease, and exanthema. The SEQ ID Nos of the amino acid sequences of the disease-, disorder- or condition-related peptide or protein are listed in column 4 (c4) of Table 1, while columns 5 (c5) and 6 (c6) show the corresponding DNA and RNA sequences, respectively. Additionally, the NCBI RefSeq IDs of the disease-, disorder- or condition-related peptide or protein and information on the function of the protein are shown in columns 2 (c2) and 3 (c3) of Table 1, respectively.

[0037] Likewise, the following entries 2 to 29710 of Table 1 (as described above, each entry is preluded by the number sign # and ends with a semicolon) represent the other peptides and proteins that were found and the related specific diseases, disorders and conditions. Accordingly, if one wishes to match a specific peptide or protein with a disease, disorder or condition, he may find this peptide or protein in column 1 (c1) of Table 1 and the related disease, disorder or condition in column 7 (c7) in the same entry of Table 1. The nucleic acid sequences needed to construct the polynucleotide therapeutic can be identified in columns 5 (c5) and/or 6 (c6) of that entry in Table 1.

[0038] In the following, the elements of the present invention will be described. These elements are listed with specific embodiments, however, it should be understood that they may be combined in any manner and in any number to create additional embodiments. The variously described examples and preferred embodiments should not be construed to limit the present invention to only the explicitly described embodiments. This description should be understood to support and encompass embodiments which combine the explicitly described embodiments with any number of the disclosed and/or preferred elements. Furthermore, any permutations and combinations of all described elements in this application should be considered as disclosed by the description of the present application, unless the context indicates otherwise.

[0039] Where nucleic acid sequences are reported in the context of the present invention, these sequences generally comprise both, the specific RNA or DNA sequence as well as its corresponding DNA or RNA counterpart, respectively. For example, where a DNA sequence is provided, the skilled person knows that the corresponding RNA sequence is obtained by exchange of thymine by uracil residues and vice versa.

[0040] Generally, the nomenclature used herein and the laboratory procedures are those well known and commonly employed in the art. Standard techniques are used for nucleic acid synthesis. The techniques and procedures are generally performed according to conventional methods in the art and various general references (e.g., Sambrook et al., 1989, Molecular Cloning: A Laboratory Manual, 2d ed. Cold Spring Harbor Laboratory Press, Cold Spring Harbor, N.Y.), which are provided throughout this document.

[0041] Gene therapy: Gene therapy may typically be understood to mean a treatment of a patient's body or isolated elements of a patient's body, for example isolated tissues/cells, by nucleic acids encoding a peptide or protein. It typically may comprise at least one of the steps of a) administration of a nucleic acid, preferably a polynucleotide molecule as defined herein, directly to the patient—by whatever administration route—or in vitro to isolated cells/tissues of the patient, which results in transfection of the patient's cells either in vivo/ex vivo or in vitro; b) transcription and/or translation of the introduced nucleic acid molecule; and optionally c) re-administration of isolated, transfected cells to the patient, if the nucleic acid has not been administered directly to the patient.

[0042] Genetic vaccination: Genetic vaccination may typically be understood to be vaccination by administration of a nucleic acid molecule encoding an antigen or an immunogen or fragments thereof. The nucleic acid molecule may be administered to a subject's body or to isolated cells of a subject. Upon transfection of certain cells of the body or upon transfection of the isolated cells, the antigen or immunogen may be expressed by those cells and subsequently presented to the immune system, eliciting an adaptive, i.e. antigen-specific immune response. Accordingly, genetic vaccination typically comprises at least one of the steps of a) administration of a nucleic acid, preferably a polynucleotide molecule as defined herein, to a subject, preferably a patient, or to isolated cells of a subject, preferably a patient, which usually results in transfection of the subject's cells either in vivo or in vitro, b) transcription and/or translation of the introduced nucleic acid molecule; and optionally c) re-administration of isolated, transfected cells to the subject, preferably the patient, if the nucleic acid has not been administered directly to the patient.

[0043] According to the invention, the polynucleotide is designed to encode one or more disease-, disorder- or condition-related peptides or proteins as listed in column 1 (c1) of Table 1 and is used to treat or prevent a related disease, disorder or condition as listed in column 7 (c7) of the same entry in Table 1. Further, such polynucleotide can be used for reducing and/or ameliorating a symptom of a disease, disorder or condition.

[0044] According to the invention, the term “protein” refers to a polypeptide having at least 20 amino acids. A “peptide” is understood to contain typically less than 20 amino acids. Fragments, functional protein domains and variants are also considered to be within the scope of peptides or proteins of this invention.

[0045] The term “fragment” as used herein refers to a peptide or protein which has the identical amino acid sequence, i.e. the identical succession of amino acid residues, as the reference sequence, but the amino acid sequence is at least one amino acid residue shorter than a native or reference sequence. Generally, fragments of a peptide or protein will have at least about 10%, 20%, 30%, 40%, 45%, 50%, 55%, 60%, 65%, 70%, 75%, 80%, 85%, 90%, 91%, 92%, 93%, 94%, 95%, 96%, 97%, 98%, 99% but less than 100% of the length of the disease-, disorder- or condition-related peptide or protein as listed in column 1 (c1) of Table 1 or the amino acid sequence of the peptide or protein as shown in column 4 (c4) of Table 1.

[0046] The term “variant” as used herein refers to proteins or peptides which differ in their amino acid sequence from a native or reference sequence. The variants may possess substitutions, deletions, and/or insertions at certain positions within the amino acid sequence, as compared to a native or reference sequence. Generally, variants of a disease-, disorder- or condition-related peptide or protein as listed in column 1 (c1) of Table 1 will have at least about 40%, 45%, 50%, 55%, 60%, 65%, 70%, 75%, 80%, 85%, 90%, 91%, 92%, 93%, 94%, 95%, 96%, 97%, 98%, 99% but less than 100% sequence identity (homology) to the reference sequence, i.e. the amino acid sequence of the peptide or protein as shown in column 4 (c4) of Table 1. Methods and computer programs for calculating sequence identity and homology, respectively, are well known in the art.

[0047] The term “polynucleotide” as used herein refers to a polymer of nucleotides. Examples for polynucleotides according to the invention are ribonucleic acids (RNAs), deoxyribonucleic acids (DNAs), threose nucleic acids (TNAs), glycol nucleic acids (GNAs), peptide nucleic acids (PNAs), locked nucleic acids (LNAs, including LNA having a β-D-ribo configuration, α-LNA having an α-L-ribo configuration (a diastereomer of LNA), 7-amino-LNA having a 2′-amino functionalization, and 2′-amino-α-LNA having a 2′-amino functionalization), ethylene nucleic acids (ENA), cyclohexenyl nucleic acids (CeNA) and hybrids and combinations thereof. Preferably, the polynucleotide to be used in the present invention is RNA.

[0048] RNA: RNA is the usual abbreviation for ribonucleic acid. It is a nucleic acid molecule, i.e. a polymer consisting of nucleotide monomers. These nucleotides are usually adenosine-monophosphate (AMP), uridine-monophosphate (UMP), guanosine-monophosphate (GMP) and cytidine-monophosphate (CMP) monomers or analogs thereof, which are connected to each other along a so-called backbone. The backbone is formed by phosphodiester bonds between the sugar, i.e. ribose, of a first and a phosphate moiety of a second, adjacent monomer. The specific order of the monomers, i.e. the order of the bases linked to the sugar/phosphate-backbone, is called the RNA sequence. Usually RNA may be obtainable by transcription of a DNA sequence, e.g., inside a cell. In eukaryotic cells, transcription is typically performed inside the nucleus or the mitochondria. In vivo, transcription of DNA usually results in the so-called premature RNA which has to be processed into so-called messenger-RNA, usually abbreviated as mRNA. Processing of the premature RNA, e.g. in eukaryotic organisms, comprises a variety of different post-transcriptional modifications such as splicing, 5′-capping, polyadenylation, export from the nucleus or the mitochondria and the like. The sum of these processes is also called maturation of RNA. The mature messenger RNA usually provides the nucleotide sequence that may be translated into an amino acid sequence of a particular peptide or protein. Typically, a mature mRNA comprises a 5′-cap, optionally a 5′UTR, a coding sequence, optionally a 3′UTR and a poly(A) sequence.

[0049] Suitable RNA sequences for use in the present invention are shown in column 6 (c6) of Table 1. Further, it is possible to create a suitable RNA sequence based on the sequence of the corresponding DNA which is shown in column 5 (c5) of Table 1.

[0050] Fragments and variants of the RNA sequences are also considered to be within the scope of RNA sequences of this invention.

[0051] The term “fragment” as used herein refers to an RNA which has the identical nucleic acid sequence, i.e. the identical succession of nucleotides, as the reference sequence, but the nucleic acid sequence is at least one nucleotide shorter than a native or reference sequence. Generally, fragments of an RNA will have at least about 10%, 20%, 30%, 40%, 45%, 50%, 55%, 60%, 65%, 70%, 75%, 80%, 85%, 90%, 91%, 92%, 93%, 94%, 95%, 96%, 97%, 98%, 99% but less than 100% of the length of the RNA sequence listed in column 6 (c6) of Table 1 or of the corresponding DNA sequence listed in column 5 (c5) of Table 1.

[0052] The term “variant” as used herein refers to RNAs which differ in their nucleic acid sequence from a native or reference sequence. The variants may possess substitutions, deletions, and/or insertions at certain positions within the nucleic acid sequence, as compared to a native or reference sequence. Generally, variants of an RNA sequence as listed in column 6 (c6) of Table 1 or of the corresponding DNA sequence listed in column 5 (c5) of Table 1 will have at least about 40%, 45%, 50%, 55%, 60%, 65%, 70%, 75%, 80%, 85%, 90%, 91%, 92%, 93%, 94%, 95%, 96%, 97%, 98%, 99% but less than 100% sequence identity (homology) to the reference sequence, i.e. the RNA sequence as listed in column 6 (c6) of Table 1 or of the corresponding DNA sequence listed in column 5 (c5) of Table 1. Methods and computer programs for calculating sequence identity and homology, respectively, are well known in the art.

[0053] Bicistronic RNA, multicistronic RNA: A bicistronic or multicistronic RNA is typically an RNA, that typically may have two (bicistronic) or more (multicistronic) open reading frames (ORF). An open reading frame in this context is a sequence of codons that is translatable into a peptide or protein.

[0054] Pharmaceutical composition: In one aspect, the present invention relates to the use of a polynucleotide encoding a disease-, disorder- or condition-related peptide or protein as defined herein for the preparation of a pharmaceutical composition. In a particular preferred embodiment, a pharmaceutical composition according to the invention comprises a plurality of polynucleotides as defined herein. As discussed above, the pharmaceutical composition may also comprise two or more different polynucleotides encoding two or more different peptides or proteins wherein the different peptides or proteins relate to the same disease, disorder or condition.

[0055] Pharmaceutical compositions according to the invention comprise a polynucleotide as described herein and additionally may comprise other components. Components suitable for the manufacture of pharmaceutical compositions comprising a polynucleotide as described herein are known in the art and are e.g. described in WO 2013/052523 A1, WO 2013/090648, WO 2013/142958 A1, WO 2013/151736 A1, WO2014/081507 A1, WO 2014/093924 A1, WO 2014/164253 A1, WO 2013/151663 A1, WO 2013/151664 A1, WO 2013/151665 A2, WO 2013/151666 A1, WO 2013/151667 A1, WO 2013/151668 A2, WO 2013/151669 A1, WO 2013/151670 A2, WO 2013/151671 A1, and WO 2013/151672 A1.

[0056] In a preferred aspect, the present invention provides a pharmaceutical composition comprising a polynucleotide as defined herein, or a pharmaceutical composition comprising a plurality of polynucleotides as defined herein and optionally a pharmaceutically acceptable lipid. In a particular preferred embodiment the lipid is selected from the group consisting of DLin-DMA, DLin-K-DMA, DLin-KC2-DMA, 98N12-5, C12-200, DLin-MC3-DMA, PLGA poly(lactic acid-co-glycolic acid, PEG (polyethyleneglycol), PEG-DMG (1,2-dimyristoyl-sn-glycero-3-phosphoethanol-amine-N-methoxy(polyethyleneglycol)) and PEGylated lipids and mixtures thereof. Synthesis and structures of DLin-DMA, DLin-K-DMA, DLin-KC2-DMA, 98N12-5, C12-200 and DLin-MC3-DMA are described in WO 2013/151672 A2.

[0057] In a further preferred embodiment, the present invention also provides a pharmaceutical composition, comprising a polynucleotide as defined herein or a composition comprising a plurality of polynucleotides as defined herein and a pharmaceutically acceptable carrier for the polynucleotide.

[0058] Carrier/polymeric carrier: A carrier in the context of the invention may typically be a compound that facilitates transport and/or complexation of another compound (cargo). A polymeric carrier is typically a carrier that is formed of a polymer. A carrier may be associated to its cargo by covalent or non-covalent interaction. A carrier may transport nucleic acids, e.g. a polynucleotide or DNA, to the target cells.

[0059] As a first ingredient, the pharmaceutical composition comprises at least one polynucleotide as defined herein.

[0060] As a second ingredient the pharmaceutical composition may optionally comprise at least one additional pharmaceutically active component. A pharmaceutically active component in this connection is a compound that has a therapeutic effect to treat, ameliorate or prevent a particular indication or disease as mentioned herein. Such compounds include, without implying any limitation, peptides or proteins, preferably as defined herein, nucleic acids, preferably as defined herein, (therapeutically active) low molecular weight organic or inorganic compounds (molecular weight less than 5000, preferably less than 1000), sugars, antigens or antibodies, preferably as defined herein, therapeutic agents already known in the prior art, antigenic cells, antigenic cellular fragments, cellular fractions; cell wall components (e.g. polysaccharides), attenuated or de-activated (e.g. chemically or by irradiation) pathogens (virus, bacteria etc.), adjuvants, preferably as defined herein, etc.

[0061] Furthermore, the pharmaceutical composition may comprise a pharmaceutically acceptable excipient. In the context of the present invention, a pharmaceutically acceptable excipient includes a solvent, aqueous solvent, nonaqueous solvent, dispersion media, diluent, dispersion, suspension aid, surface active agent, isotonic agent, thickening or emulsifying agent, preservative, lipid, lipidoid, liposome, lipid nanoparticle, core-shell nanoparticles, polymer, lipoplex, peptide, protein, cell, hyaluronidase, etc.

[0062] The pharmaceutical composition according to the present invention may be administered to a subject in need thereof, for example, a patient, by any suitable administration route, such as by oral, topical, rectal, vaginal, dermal, intra-tumoural, nasal, lingual, ophthalmic, parenteral administration or administration by inhalation, insufflation, injection, infusion or by enema. Thus, pharmaceutical composition according to the present invention may be adapted, for example, for oral, topical, rectal, vaginal, dermal, intra-tumoural, nasal, lingual, ophthalmic, parenteral administration or administration by inhalation, insufflation, injection, infusion or by enema. Furthermore, the method of treatment according to the present invention may comprise oral, topical, rectal, vaginal, dermal, intra-tumoural, nasal, lingual, parenteral administration or administration by inhalation, insufflation, injection, infusion or by enema. Preferred administration routes are oral and parenteral administration, such as intravenous, intramuscular, subcutaneous, intranodal, intralymphatic, intra-tumoural or intraperitoneal injection or transdermal delivery.

[0063] The polynucleotide of the present invention may be administered at a total daily dose of between 0.001 μg and 150 μg.

[0064] The pharmaceutical composition for topical administration may be a cream, lotion, ointment, gel, spray, solution and the like. The pharmaceutical composition for topical administration may further include a penetration enhancer such as surfactants, fatty acids, bile salts, chelating agents, non-chelating non-surfactants, polyoxyethylene-9-lauryl ether, polyoxyethylene-20-cetyl ether, fatty acids and/or salts in combination with bile acids and/or salts, sodium salt in combination with lauric acid, capric acid and UDCA, and the like.

[0065] In the context of the present invention, a total daily dose is an amount given or prescribed in a 24 hour period. It may be administered as a single unit dose. In one embodiment, the polynucleotides used in the present invention are administered to a subject in split doses. In the context of the present invention, a split dose is the division of single unit dose or total daily dose into two or more doses, e.g, two or more administrations of the single unit dose. In the context of the present invention, a single unit dose is a dose of any therapeutic administered in one dose/at one time/single route/single point of contact, i.e., in a single administration event.

[0066] The term subject as used herein refers to any organism to which a composition in accordance with the invention may be administered. Typical subjects include animals, preferably mammals such as mice, rats, rabbits, non-human primates, and humans. Preferably, the subject is a human.

[0067] The term “symptom” as used herein is a signal or a sign of a disease, disorder or condition. Examples of symptoms include, but are not limited to, weakness, aches and pins, fever, fatigue, weight loss, blood clots, increased blood calcium levels, etc.

[0068] The term “treating” as used herein refers to partially or completely alleviating, ameliorating, improving, relieving, inhibiting progression of, and/or reducing severity of a disease, disorder, or condition.

[0069] The term “preventing” as used herein refers to partially or completely delaying onset of and/or reducing incidence of a disease, disorder, or condition

[0070] The term “purified” as used herein is understood to mean that the desired polynucleotide in a sample is separated and/or isolated from impurities, intermediates, byproducts and/or reaction components present therein or that the impurities, intermediates, byproducts and/or reaction components are at least depleted from the sample comprising the polynucleotide. Non-limiting examples of undesired constituents of polynucleotide-containing samples which therefore need to be depleted may comprise degraded fragments or fragments which have arisen as a result of premature termination of transcription, or also excessively long transcripts if plasmids are not completely linearized. Furthermore, intermediates may be depleted from the sample such as e.g. template DNA. Additionally, reaction components such as enzymes, proteins, bacterial DNA and RNA, small molecules such as spermidine, buffer components etc. may have to be depleted from the polynucleotide sample. In addition, impurities such as organic solvents and nucleotides or other small molecules may be separated. The purity may be determined by methods commonly known to the skilled person, e.g. by gas chromatography, quantitative PER, analytical HPLC or gel electrophoresis. By “substantially purified” is meant that the polynucleotide is substantially separated from the environment in which it was formed. Substantial purification may include samples containing at least about 50%, at least about 60%, at least about 70%, at least about 80%, at least about 90%, at least about 95%, at least about 97%, or at least about 99% by weight of the polynucleotide of the present invention or salt thereof.

[0071] In a particularly preferred aspect of the present invention, the polynucleotide as defined herein is a modified polynucleotide comprising at least one modification. In an even more preferred embodiment, the modified polynucleotide is a modified RNA and in a most preferred embodiment the modified polynucleotide is chemically modified RNA.

[0072] Suitable modifications of polynucleotide are known in the art and e.g. described in WO 2013/052523 A1, WO 2013/090648, WO 2013/142958 A1, WO 2013/151736 A1, WO2014/081507 A1, WO 2014/093924 A1, WO 2014/164253 A1, WO 2013/151663 A1, WO 2013/151664 A1, WO 2013/151665 A2, WO 2013/151666 A1, WO 2013/151667 A1, WO 2013/151668 A2, WO 2013/151669 A1, WO 2013/151670 A2, WO 2013/151671 A1, and WO 2013/151672 A1.

[0073] Chemical modifications: The term “chemical modification” as used herein refer to modification with respect to adenosine (A), guanosine (G), uridine (U), thymidine (T) or cytidine (C) ribo- or deoxyribonucleotides in one or more of their position, pattern, percent or population. Generally, herein, these terms are not intended to refer to the ribonucleotide modifications in naturally occurring terminal mRNA cap moieties.

[0074] The modifications may be various distinct modifications. In some embodiments, the polynucleotides may contain one, two, or more (optionally different) nucleoside or nucleotide modifications. In some embodiments, a modified polynucleotide, introduced to a cell may exhibit reduced degradation in the cell, as compared to an unmodified polynucleotide.

[0075] Modifications which are useful in the present invention include, but are not limited to, those in Table A. Noted in the table are the symbol of the modification, the nucleobase type and whether the modification is naturally occurring or not.

TABLE A
Modifications

| | | | Naturally |
|---|---|---|---|
| Name | Symbol | Base | occouring |
| 2-methylthio-N6-(cishydroxyisopentenyl)adenosine | ms2i6A | A | Yes |
| 2-methylthio-N6-methyladenosine | ms2m6A | A | Yes |
| 2-methylthio-N6-threonyl-carbamoyladenosine | ms2t6A | A | Yes |
| N6-glycinylcarbamoyladenosine | g6A | A | Yes |
| N6-isopentenyladenosine | i6A | A | Yes |
| N6-methyladenosine | m6A | A | Yes |
| N6-threonylcarbamoyladenosine | t6A | A | Yes |
| 1,2′-O-dimethyladenosine | mlAm | A | Yes |
| 1-methyladenosine | mlA | A | Yes |
| 2′-O-methyladenosine | Am | A | Yes |
| 2′-O-ribosyladenosine(phosphate) | Ar(p) | A | Yes |
| 2-methyladenosine | m2A | A | Yes |
| 2-methylthio-N6 isopentenyladenosine | ms2i6A | A | Yes |
| 2-methylthio-N6-hydroxynorvaly1 carbamoyladenosine | ms2hn6A | A | Yes |
| 2′-O-methyladenosine | m6A | A | Yes |
| isopentenyladenosine | Iga | A | Yes |
| N6-(cis-hydroxyisopentenyl)adenosine | io6A | A | Yes |
| N6,2′-O-dimethyladenosine | m6Am | A | Yes |
| N⁶,2′-O-dimethyladenosine | m⁶Am | A | Yes |
| N6,N6,2′-O-trimethyladenosine | m62Am | A | Yes |
| N6,N6-dimethyladenosine | m62A | A | Yes |
| N6-acetyladenosine | ac6A | A | Yes |
| N6-hydroxynorvalylcarbamoyladenosine | hn6A | A | Yes |
| N6-methyl-N6-threonylcarbamoyladenosine | m6t6A | A | Yes |
| 2-methyladenosine | m²A | | |
| 2-methylthio-N⁶-isopentenyladenosine | ms²i⁶A | A | Yes |
| N1-methyl-adenosine | — | A | Yes |
| N6,N6-(dimethyl)adenine | — | A | Yes |
| N6-cis-hydroxy-isopentenyladenosine | — | A | Yes |
| α-thio-adenosine | — | A | Yes |
| 2-(amino)adenine | — | A | Yes |
| 2-(aminopropyl)adenine | — | A | Yes |
| 2-(methylthio)-N6-(isopentenyl)adenine | — | A | Yes |
| 2-(alkyl)adenine | — | A | Yes |
| 2-(aminoalkyl)adenine | — | A | Yes |
| 2-(aminopropyl)adenine | — | A | Yes |
| 2-(halo)adenine | — | A | Yes |
| 2-(propyl)adenine | — | A | Yes |
| 2′-Amino-2′-deoxy-ATP | — | A | Yes |
| 2′-Azido-2′-deoxy-ATP | — | A | Yes |
| 2′-Deoxy-2′-a-aminoadenosine TP | — | A | Yes |
| 2′-Deoxy-2′-a-azidoadenosine TP | — | A | Yes |
| 6-(alkyl)adenine | — | A | Yes |
| 6-(methyl)adenine | — | A | Yes |
| 6-(alkyl)adenine | — | A | Yes |
| 6-(methyl)adenine | — | A | Yes |
| 7-(deaza)adenine | — | A | Yes |
| 8-(alkenyl)adenine | — | A | Yes |
| 8-(amino)adenine | — | A | Yes |
| 8-(halo)adenine | — | A | Yes |
| 8-(hydroxyl)adenine | — | A | Yes |
| 8-(thioalkyl)adenine | — | A | Yes |
| 8-(thiol)adenine | — | A | Yes |
| 8-azido-adenosine | — | A | Yes |
| aza adenine | — | A | Yes |
| deaza adenine | — | A | Yes |
| N6-(methyl)adenine | — | A | Yes |
| N6-(isopentyl)adenine | — | A | Yes |
| 7-deaza-8-aza-adenosine | — | A | Yes |
| 7-methyladenine | — | A | NO |
| 1-Deazaadenosine TP | — | A | NO |
| 2′-Fluoro-N6-Bz-deoxyadenosine TP | — | A | NO |
| 2′-OMe-2-Amino-ATP | — | A | NO |
| 2′O-methyl-N6-Bz-deoxyadenosine TP | — | A | NO |
| 2′-a-Ethynyladenosine TP | — | A | NO |
| 2-aminoadenine | — | A | NO |
| 2-Aminoadenosine TP | — | A | NO |
| 2-Amino-ATP | — | A | NO |
| 2′-a-Trifluoromethyladenosine TP | — | A | NO |
| 2-Azidoadenosine TP | — | A | NO |
| 2′-b-Ethynyladenosine TP | — | A | NO |
| 2-Bromoadenosine TP | — | A | NO |
| 2′-b-Trifluoromethyladenosine TP | — | A | NO |
| 2-Chloroadenosine TP | — | A | NO |
| 2′-Deoxy-2′,2′-difluoroadenosine TP | — | A | NO |
| 2′-Deoxy-2′-a-mercaptoadenosine TP | — | A | NO |
| 2′-Deoxy-2′-a-thiomethoxyadenosine TP | — | A | NO |
| 2′-Deoxy-2′-b-aminoadenosine TP | — | A | NO |
| 2′-Deoxy-2′-b-azidoadenosine TP | — | A | NO |
| 2′-Deoxy-2′-b-bromoadenosine TP | — | A | NO |
| 2′-Deoxy-2′-b-chloroadenosine TP | — | A | NO |
| 2′-Deoxy-2′-b-fluoroadenosine TP | — | A | NO |
| 2′-Deoxy-2′-b-iodoadenosine TP | — | A | NO |
| 2′-Deoxy-2′-b-mercaptoadenosine TP | — | A | NO |
| 2′-Deoxy-2′-b-thiomethoxyadenosine TP | — | A | NO |
| 2-Fluoroadenosine TP | — | A | NO |
| 2-Iodoadenosine TP | — | A | NO |
| 2-Mercaptoadenosine TP | — | A | NO |
| 2-methoxy-adenine | — | A | NO |
| 2-methylthio-adenine | — | A | NO |
| 2-Trifluoromethyladenosine TP | — | A | NO |
| 3-Deaza-3-bromoadenosine TP | — | A | NO |
| 3-Deaza-3-chloroadenosine TP | — | A | NO |
| 3-Deaza-3-fluoroadenosine TP | — | A | NO |
| 3-Deaza-3-iodoadenosine TP | — | A | NO |
| 3-Deazaadenosine TP | — | A | NO |
| 4′-Azidoadenosine TP | — | A | NO |
| 4′-Carbocyclic adenosine TP | — | A | NO |
| 4′-Ethynyladenosine TP | — | A | NO |
| 5′-Homo-adenosine TP | — | A | NO |
| 8-Aza-ATP | — | A | NO |
| 8-bromo-adenosine TP | — | A | NO |
| 8-Trifluoromethyladenosine TP | — | A | NO |
| 9-Deazaadenosine TP | — | A | NO |
| 2-aminopurine | — | A/G | NO |
| 7-deaza-2,6-diaminopurine | — | A/G | NO |
| 7-deaza-8-aza-2,6-diaminopurine | — | A/G | NO |
| 7-deaza-8-aza-2-aminopurine | — | A/G | NO |
| 2,6-diaminopurine | — | A/G | NO |
| 7-deaza-8-aza-adenine | — | A/G | NO |
| 7-deaza-2-aminopurine | — | A/G | NO |
| 2-thiocytidine | s2C | C | YES |
| 3-methylcytidine | m3C | C | YES |
| 5-formylcytidine | f5C | C | YES |
| 5-hydroxymethylcytidine | hm5C | C | YES |
| 5-methylcytidine | m5C | C | YES |
| N4-acetylcytidine | ac4C | C | YES |
| 2′-O-methylcytidine | Cm | C | YES |
| 2′-O-methylcytidine | Cm | C | YES |
| 5,2′-O-dimethylcytidine | m5Cm | C | YES |
| 5-formyl-2′-O-methylcytidine | f5Cm | C | YES |
| lysidine | k2C | C | YES |
| N4,2′-O-dimethylcytidine | m4Cm | C | YES |
| N4-acetyl-2′-O-methylcytidine | ac4Cm | C | YES |
| N4-methylcytidine | m4C | C | YES |
| N4,N4-dimethyl-2′-OMe-cytidine TP | — | C | YES |
| 4-methylcytidine | — | C | NO |
| 5-aza-cytidine | — | C | NO |
| Pseudo-iso-cytidine | — | C | NO |
| pyrrolo-cytidine | — | C | NO |
| α-thio-cytidine | — | C | NO |
| 2-(thio)cytosine | — | C | NO |
| 2′-Amino-2′-deoxy-CTP | — | C | NO |
| 2′-Azido-2′-deoxy-CTP | — | C | NO |
| 2′-Deoxy-2′-a-aminocytidine TP | — | C | NO |
| 2′-Deoxy-2′-a-azidocytidine TP | — | C | NO |
| 3-(deaza)-5-(aza)cytosine | — | C | NO |
| 3-(methyl)cytosine | — | C | NO |
| 3-(alkyl)cytosine | — | C | NO |
| 3-(deaza)-5-(aza)cytosine | — | C | NO |
| 3-(methyl)cytidine | — | C | NO |
| 4,2′-O-dimethylcytidine | — | C | NO |
| 5-(halo)cytosine | — | C | NO |
| 5-(methyl)cytosine | — | C | NO |
| 5-(propynyl)cytosine | — | C | NO |
| 5-(trifluoromethyl)cytosine | — | C | NO |
| 5-(alkyl)cytosine | — | C | NO |
| 5-(alkynyl)cytosine | — | C | NO |
| 5-(halo)cytosine | — | C | NO |
| 5-(propynyl)cytosine | — | C | NO |
| 5-(trifluoromethyl)cytosine | — | C | NO |
| 5-bromo-cytidine | — | C | NO |
| 5-iodo-cytidine | — | C | NO |
| 5-propynyl cytosine | — | C | NO |
| 6-(azo)cytosine | — | C | NO |
| 6-aza-cytidine | — | C | NO |
| aza cytosine | — | C | NO |
| deaza cytosine | — | C | NO |
| N4 (acetyl)cytosine | — | C | NO |
| 1-methyl-1-deaza-pseudoisocytidine | — | C | NO |
| 1-methyl-pseudoisocytidine | — | C | NO |
| 2-methoxy-5-methyl-cytidine | — | C | NO |
| 2-methoxy-cytidine | — | C | NO |
| 2-thio-5-methyl-cytidine | — | C | NO |
| 4-methoxy-1-methyl-pseudoisocytidine | — | C | NO |
| 4-methoxy-pseudoisocytidine | — | C | NO |
| 4-thio-1-methyl-1-deaza-pseudoisocytidine | — | C | NO |
| 4-thio-1-methyl-pseudoisocytidine | — | C | NO |
| 4-thio-pseudoisocytidine | — | C | NO |
| 5-aza-zebularine | — | C | NO |
| 5-methyl-zebularine | — | C | NO |
| pyrrolo-pseudoisocytidine | — | C | NO |
| zebularine | — | C | NO |
| (E)-5-(2-Bromo-vinyl)cytidine TP | — | C | NO |
| 2,2′-anhydro-cytidine-TP-hydrochloride | — | C | NO |
| 2′Fluor-N4-Bz-cytidine TP | — | C | NO |
| 2′Fluoro-N4-Acetyl-cytidine TP | — | C | NO |
| 2′-O-Methyl-N4-Acetyl-cytidine TP | — | C | NO |
| 2′-O-methyl-N4-Bz-cytidine TP | — | C | NO |
| 2′-a-Ethynylcytidine TP | — | C | NO |
| 2′-a-Trifluoromethylcytidine TP | — | C | NO |
| 2′-b-Ethynylcytidine TP | — | C | NO |
| 2′-b-Trifluoromethylcytidine TP | — | C | NO |
| 2′-Deoxy-2′,2′-difluorocytidine TP | — | C | NO |
| 2′-Deoxy-2′-a-mercaptocytidine TP | — | C | NO |
| 2′-Deoxy-2′-a-thiomethoxycytidine TP | — | C | NO |
| 2′-Deoxy-2′-b-aminocytidine TP | — | C | NO |
| 2′-Deoxy-2′-b-azidocytidine TP | — | C | NO |
| 2′-Deoxy-2′-b-bromocytidine TP | — | C | NO |
| 2′-Deoxy-2′-b-chlorocytidine TP | — | C | NO |
| 2′-Deoxy-2′-b-fluorocytidine TP | — | C | NO |
| 2′-Deoxy-2′-b-iodocytidine TP | — | C | NO |
| 2′-Deoxy-2′-b-mercaptocytidine TP | — | C | NO |
| 2′-Deoxy-2′-b-thiomethoxycytidine TP | — | C | NO |
| 2′-O-Methyl-5-(1-propynyl)cytidine TP | — | C | NO |
| 3′-Ethynylcytidine TP | — | C | NO |
| 4′-Azidocytidine TP | — | C | NO |
| 4′-Carbocyclic cytidine TP | — | C | NO |
| 4′-Ethynylcytidine TP | — | C | NO |
| 5-(1-Propynyl)ara-cytidine TP | — | C | NO |
| 5-(2-Chloro-phenyl)-2-thiocytidine TP | — | C | NO |
| 5-(4-Amino-phenyl)-2-thiocytidine TP | — | C | NO |
| 5-Aminoallyl-CTP | — | C | NO |
| 5-Cyanocytidine TP | — | C | NO |
| 5-Ethynylara-cytidine TP | — | C | NO |
| 5-Ethynylcytidine TP | — | C | NO |
| 5′-Homo-cytidine TP | — | C | NO |
| 5-Methoxycytidine TP | — | C | NO |
| 5-Trifluoromethyl-cytidine TP | — | C | NO |
| N4-Amino-cytidine TP | — | C | NO |
| N4-Benzoyl-cytidine TP | — | C | NO |
| 7-methylguanosine | m7G | G | YES |
| N2,2′-O-dimethylguanosine | m2Gm | G | YES |
| N2-methylguanosine | m2G | G | YES |
| wyosme | imG | G | YES |
| 1,2′-O-dimethylguanosine | m1Gm | G | YES |
| 1-methylguanosine | m1G | G | YES |
| 2′-O-ribosylguanosine (phosphate) | Gr(p) | G | YES |
| 2′-O-methylguanosine | Gm | G | YES |
| 7-aminomethyl-7-deazaguanosine | preQ1 | G | YES |
| 7-cyano-7-deazaguanosine | preQ0 | G | YES |
| archaeosine | G+ | G | YES |
| methylwyosine | mimG | G | YES |
| N2,7-dimethylguanosine | m2,7G | G | YES |
| N2,N2,2′-O-trimethylguanosine | m22Gm | G | YES |
| N2,N2,7-trimethylguanosine | m2,2,7G | G | YES |
| N2,N2-dimethylguanosine | m22G | G | YES |
| N²,7,2′-O-trimethylguanosine | m^{2.7}Gm | G | YES |
| 6-thio-guanosine | — | G | NO |
| 7-deaza-guanosine | — | G | NO |
| 8-oxo-guanosine | — | G | NO |
| N1-methyl-guanosine | — | G | NO |
| α-thio-guanosine | — | G | NO |
| 2-(propyl)guanine | — | G | NO |
| 2-(alkyl)guanine | — | G | NO |
| 2′-Amino-2′-deoxy-GTP | — | G | NO |
| 2′-Azido-2′-deoxy-GTP | — | G | NO |
| 2′-Deoxy-2′-a-aminoguanosine TP | — | G | NO |
| 2′-Deoxy-2′-a-azidoguanosine TP | — | G | NO |
| 6-(methyl)guanine | — | G | NO |
| 6-(alkyl)guanine | — | G | NO |
| 6-(methyl)guanine | — | G | NO |
| 6-methyl-guanosine | — | G | NO |
| 7-(alkyl)guanine | — | G | NO |
| 7-(deaza)guanine | — | G | NO |
| 7-(methyl)guanine | — | G | NO |
| 7-(alkyl)guanine | — | G | NO |
| 7-(deaza)guanine | — | G | NO |
| 7-(methyl)guanine | — | G | NO |
| 8-(alkyl)guanine | — | G | NO |
| 8-(alkynyl)guanine | — | G | NO |
| 8-(halo)guanine | — | G | NO |
| 8-(thioalkyl)guanine | — | G | NO |
| 8-(alkenyl)guanine | — | G | NO |
| 8-(alkyl)guanine | — | G | NO |
| 8-(alkynyl)guanine | — | G | NO |
| 8-(amino)guanine | — | G | NO |
| 8-(halo)guanine | — | G | NO |
| 8-(hydroxyl)guanine | — | G | NO |
| 8-(thioalkyl)guanine | — | G | NO |
| 8-(thiol)guanine | — | G | NO |
| azaguamne | — | G | NO |
| deaza guanine | — | G | NO |
| N (methyl)guanine | — | G | NO |
| N-(methyl)guanine | — | G | NO |
| 1-methyl-6-thio-guanosine | — | G | NO |
| 6-methoxy-guanosine | — | G | NO |
| 6-thio-7-deaza-8-aza-guanosine | — | G | NO |
| 6-thio-7-deaza-guanosine | — | G | NO |
| 6-thio-7-methyl-guanosine | — | G | NO |
| 7-deaza-8-aza-guanosine | — | G | NO |
| 7-methyl-8-oxo-guanosine | — | G | NO |
| N2,N2-dimethyl-6-thio-guanosine | — | G | NO |
| N2-methyl-6-thio-guanosine | — | G | NO |
| 1-Me-GTP | — | G | NO |
| 2′Fluoro-N2-isobutyl-guanosine TP | — | G | NO |
| 2′O-methyl-N2-isobutyl-guanosine TP | — | G | NO |
| 2′-a-Ethynylguanosine TP | — | G | NO |
| 2′-a-Trifluoronmethylguanosine TP | — | G | NO |
| 2′-b-Ethynylguanosine TP | — | G | NO |
| 2′-b-Trifluoromethylguanosine TP | — | G | NO |
| 2′-Deoxy-2′,2′-difluoroguanosine TP | — | G | NO |
| 2′-Deoxy-2′-a-mercaptoguanosine TP | — | G | NO |
| 2′-Deoxy-2′-a-thiomethoxyguanosine TP | — | G | NO |
| 2′-Deoxy-2′-b-aminoguanosine TP | — | G | NO |
| 2′-Deoxy-2′-b-azidoguanosine TP | — | G | NO |
| 2′-Deoxy-2′-b-bromoguanosine TP | — | G | NO |
| 2′-Deoxy-2′-b-chloroguanosine TP | — | G | NO |
| 2′-Deoxy-2′-b-fluoroguanosine TP | — | G | NO |
| 2′-Deoxy-2′-b-iodoguanosine TP | — | G | NO |
| 2′-Deoxy-2′-b-mercaptoguanosine TP | — | G | NO |
| 2′-Deoxy-2′-b-thiomethoxyguanosine TP | — | G | NO |
| 4′-Azidoguanosine TP | — | G | NO |
| 4′-Carbocyclic guanosine TP | — | G | NO |
| 4′-Ethynylguanosine TP | — | G | NO |
| 5′-Homo-guanosine TP | — | G | NO |
| 8-bromo-guanosine TP | — | G | NO |
| 9-Deazaguanosine TP | — | G | NO |
| N2-isobutyl-guanosin TP | — | G | NO |
| 1-methylinosine | mlI | I | YES |
| mosme | I | I | YES |
| 1,2′-O-dimethylinosine | mlIm | I | YES |
| 7-methylinosine | — | I | NO |
| 2′-O-methylinosine | lm | I | YES |
| epoxyqueuosme | oQ | Q | YES |
| galactosyl-queuosine | galQ | Q | YES |
| mannosylqueuosine | manQ | Q | YES |
| queuosme | Q | Q | YES |
| allyamino-thymidine | — | T | NO |
| aza thymidine | — | T | NO |
| deaza thymidine | — | T | NO |
| deoxy-thymidine | — | T | NO |
| 2-thiouridine | s2U | U | YES |
| 3-methyluridine | m3U | U | YES |
| 5-carboxymethyluridine | cm5U | U | YES |
| 5-hydroxyuridine | ho5U | U | YES |
| 5-methyluridine | m5U | U | YES |
| 5-taurinomethyl-2-thiouridine | τm5s2U | U | YES |
| 5-taurinomethyluridine | τm5U | U | YES |
| dihydrouridine | D | U | YES |
| pseudouridine | Ψ | U | YES |
| (3-(3-amino-5-carboxypropyl)uridine | acp3U | | |
| 1-methyl-3-(3-amino-5-carboxypropyl)pseudouridine | m1acp3Ψ | U | YES |
| 1-methylpseudouridine | m1Ψ | U | YES |
| 1-methyl-pseudouridine | m1Ψ | U | YES |
| 2′-O-methylpseudouridine | Ψm | U | YES |
| 2′-O-methyluridine | Um | U | YES |
| 2-thio-2′-O-methyluridine | s2Um | U | YES |
| 3-(3-amino-3-carboxypropyl)uridine | acp3U | U | YES |
| 3,2′-O-dimethyluridine | m3Um | U | YES |
| 3-methyl-pseudouridine TP | — | U | YES |
| 4-thiouridine | s4U | U | YES |
| 5-(carboxyhydroxymethyl)uridine | chm5U | U | YES |
| 5-(carboxyhydroxymethyl)uridine methyl ester | mchm5U | U | YES |
| 5,2′-O-dimethyluridine | m5Um | U | YES |
| 5,6-dihydro-uridine | — | U | YES |
| 5-aminomethyl-2-thiouridine | nm5s2U | U | YES |
| 5-carbamoylmethyl-2′-O-methyluridine | ncm5Um | U | YES |
| 5-carbamoylmethyluridine | ncm5U | U | YES |
| 5-carboxyhydroxymethyluridine | — | U | YES |
| 5-carboxyhydroxymethyluridine methyl ester | — | U | YES |
| 5-carboxymethylaminomethyl-2′-O-methvluridine | cmnm5Um | U | YES |
| 5-carboxymethylaminomethyl-2-thiouridine | cmnm5s2U | U | YES |
| 5-carboxymethylaminomethyluridine | cmnm5U | U | YES |
| 5-Carbamoylmethyluridine TP | — | U | YES |
| 5-methoxycarbonylmethyl-2′-O-methyluridine | mcm5Um | U | YES |
| 5-methoxycarbonylmethyl-2-thiouridine | mcm5s2U | U | YES |
| 5-methoxycarbonylmethyluridine | mcm5U | U | YES |
| 5-methoxyuridine | mo5U | U | YES |
| 5-methyl-2-thiouridine | m5s2U | U | YES |
| 5-methylaminomethyl-2-selenouridine | mnm5se2U | U | YES |
| 5-methylaminomethyl-2-thiouridine | mnm5s2U | U | YES |
| 5-methylaminomethyluridine | mnm5U | U | YES |
| 5-Methyldihydrouridine | — | U | YES |
| 5-Oxyacetic acid-uridine TP | — | U | YES |
| 5-Oxyacetic acid-methyl ester-uridine TP | — | U | YES |
| N1-methyl-pseudo-uridine | — | U | YES |
| Uridine-5-oxyacetic acid | cmo5U | U | YES |
| uridine 5-oxyacetic acid methyl ester | mcmo5U | U | YES |
| 3-(3-Amino-3-carboxypropyl)-uridine TP | — | U | YES |
| 5-(iso-Pentenylaminomethyl)-2-thiouridine TP | — | U | YES |
| 5-(iso-Pentenylaminomethyl)-2′-O-methyluridine TP | — | U | YES |
| 5-(iso-Pentenylaminomethyl)uridine TP | — | U | YES |
| 5-propynyluracil | — | U | NO |
| α-thio-uridine | — | U | NO |
| 1-(aminoalkylamino-carbonylethylenyl)-2(thio)-pseudouracil | — | U | NO |
| 1-(aminoalkylaminocarbonylethylenyl)-2,4-(dithio)pseudouracil | — | U | NO |
| 1-(aminoalkylaminocarbonylethylenyl)-4(thio)pseudouracil | — | U | NO |
| 1-(aminoalkylaminocarbonylethylenyl)-pseudouracil | — | U | NO |
| 1-(aminocarbonylethylenyl)-2(thio)-pseudouracil | — | U | NO |
| 1-(aminocarbonylethylenyl)-2,4-(dithio)pseudouracil | — | U | NO |
| 1-(aminocarbonylethylenyl)-4(thio)pseudouracil | — | U | NO |
| 1-(aminocarbonylethylenyl)-pseudouracil | — | U | NO |
| 1 substituted 2(thio)-pseudouracil | — | U | NO |
| 1 substituted 2,4-(dithio)pseudouracil | — | U | NO |
| 1 substituted 4 (thio)pseudouracil | — | U | NO |
| 1 substituted pseudouracil | — | U | NO |
| 1-(aminoalkylamino-carbonylethylenyl)-2-(thio)-pseudouracil | — | U | NO |
| 1-Methyl-3-(3-amino-3-carboxypropyl)pseudouridine TP | — | U | NO |
| 1-Methyl-3-(3-amino-3-carboxypropyl)pseudo-UTP | — | U | NO |
| 1-Methyl-pseudo-UTP | — | U | NO |
| 2-(thio)pseudouracil | — | U | NO |
| 2′-deoxyuridine | 2′dU | U | NO |
| 2′-fluorouridine | — | U | NO |
| 2-(thio)uracil | — | U | NO |
| 2,4-(dithio)psuedouracil | — | U | NO |
| 2′-methyl-2′-amino-2′-azido-2′fluro-guanosine | — | U | NO |
| 2′-Amino-2′-deoxy-UTP | — | U | NO |
| 2′-Azido-2′-deoxy-UTP | — | U | NO |
| 2′-Azido-deoxyuridine TP | — | U | NO |
| 2′-O-methylpseudouridine | — | U | NO |
| 2′-Deoxy-2′-a-aminouridine TP | — | U | NO |
| 2′-Deoxy-2′-a-azidouridine TP | — | U | NO |
| 2-methylpseudouridine | m3Ψ | U | NO |
| 3-(3-amino-3-carboxypropyl)uracil | — | U | NO |
| 4-(thio)pseudouracil | — | U | NO |
| 4-(thio)pseudouracil | — | U | NO |
| 4-(thio)uracil | — | U | NO |
| 4-thiouracil | — | U | NO |
| 5-(1,3-diazole-1-alkyl)uracil | — | U | NO |
| 5-(2-aminopropyl)uracil | — | U | NO |
| 5-(aminoalkyl)uracil | — | U | NO |
| 5-(dimethylaminoalkyl)uracil | — | U | NO |
| 5-(guanidiniumalkyl)uracil | — | U | NO |
| 5-(methoxycarbonylmethyl)-2-(thio)uracil | — | U | NO |
| 5-(methoxycarbonyl-methyl)uracil | — | U | NO |
| 5-(methyl)-2-(thio)uracil | — | U | NO |
| 5-(methyl)-2,4-(dithio)uracil | — | U | NO |
| 5-(methyl)-4-(thio)uracil | — | U | NO |
| 5-(methylaminomethyl)-2-(thio)uracil | — | U | NO |
| 5-(methylaminomethyl)-2,4-(dithio)uracil | — | U | NO |
| 5-(methylaminomethyl)-4-(thio)uracil | — | U | NO |
| 5-(propynyl)uracil | — | U | NO |
| 5-(trifluoromethyl)uracil | — | U | NO |
| 5-(2-aminopropyl)uracil | — | U | NO |
| 5-(alkyl)-2-(thio)pseudouracil | — | U | NO |
| 5-(alkyl)-2,4-(dithio)pseudouracil | — | U | NO |
| 5-(alkyl)-4-(thio)pseudouracil | — | U | NO |
| 5-(alkyl)pseudouracil | — | U | NO |
| 5-(alkyl)uracil | — | U | NO |
| 5-(alkynyl)uracil | — | U | NO |
| 5-(allylamino)uracil | — | U | NO |
| 5-(cyanoalkyl)uracil | — | U | NO |
| 5-(dialkylaminoalkyl)uracil | — | U | NO |
| 5-(dimethylaminoalkyl)uracil | — | U | NO |
| 5-(guanidiniumalkyl)uracil | — | U | NO |
| 5-(halo)uracil | — | U | NO |
| 5-(1,3-diazole-1-alkyl)uracil | — | U | NO |
| 5-(methoxy)uracil | — | U | NO |
| 5-(methoxycarbonylmethyl)-2-(thio)uracil | — | U | NO |
| 5-(methoxycarbony-1-methyl)uracil | — | U | NO |
| 5-(methyl)-2(thio)uracil | — | U | NO |
| 5-(methyl)-2,4-(dithio)uracil | — | U | NO |
| 5-(methyl)-4-(thio)uracil | — | U | NO |
| 5-(methyl)-2-(thio)pseudouracil | — | U | NO |
| 5-(methyl)-2,4-(dithio)pseudouracil | — | U | NO |
| 5-(methyl)-4-(thio)pseudouracil | — | U | NO |
| 5-(methyl)pseudouracil | — | U | NO |
| 5-(methylaminomethyl)-2-(thio)uracil | — | U | NO |
| 5-(methylaminomethyl)-2,4(dithio)uracil | — | U | NO |
| 5-(methylaminomethyl)-4-(thio)uracil | — | U | NO |
| 5-(propynyl)uracil | — | U | NO |
| 5-(trifluoromethyl)uracil | — | U | NO |
| 5-aminoally-1-uridine | — | U | NO |
| 5-bromo-uridine | — | U | NO |
| 5-iodo-uridine | — | U | NO |
| 5-uracil | — | U | NO |
| 6-(azo)uracil | — | U | NO |
| 6-(azo)uracil | — | U | NO |
| 6-aza-uridine | — | U | NO |
| allyamino-uracil | — | U | NO |
| aza uracil | — | U | NO |
| deaza uracil | — | U | NO |
| N3-(methyl)uracil | — | U | NO |
| Pseudo-UTP-1-2-ethanoic | — | U | NO |
| pseudouracil | — | U | NO |
| 4-Thio-pseudo-UTP | — | U | NO |
| 1-carboxymethyl-pseudouridine | — | U | NO |
| 1-methyl-1-deaza-pseudouridine | — | U | NO |
| 1-propynyl-uridine | — | U | NO |
| 1-taurinomethyl-1-methyl-uridine | — | U | NO |
| 1-taurinomethyl-4-thio-uridine | — | U | NO |
| 1-taurinomethy-1-pseudouridine | — | U | NO |
| 2-methoxy-4-thio-pseudouridine | — | U | NO |
| 2-thio-1-methyl-1-deaza-pseudouridine | — | U | NO |
| 2-thio-1-methyl-pseudouridine | — | U | NO |
| 2-thio-5-aza-uridine | — | U | NO |
| 2-thio-dihydropseudouridine | — | U | NO |
| 2-thio-dihydrouridine | — | U | NO |
| 2-thio-pseudouridine | — | U | NO |
| 4-methoxy-2-thio-pseudouridine | — | U | NO |
| 4-methoxy-pseudouridine | — | U | NO |
| 4-thio-1-methyl-pseudouridine | — | U | NO |
| 4-thio-pseudouridine | — | U | NO |
| 5-aza-uridine | — | U | NO |
| dihydropseudouridine | — | U | NO |
| (±)1-(2-Hydroxypropyl)pseudouridine TP | — | U | NO |
| (2R)-1-(2-Hydroxypropyl)pseudouridine TP | — | U | NO |
| (2S)-1-(2-Hydroxypropyl)pseudouridine TP | — | U | NO |
| €-5-(2-Bromo-vinyl)ara-undine TP | — | U | NO |
| €-5-(2-Bromo-vinyl)uridine TP | — | U | NO |
| (Z)-5-(2-Bromo-vinyl)ara-uridine TP | — | U | NO |
| (Z)-5-(2-Bromo-vinyl)uridine TP | — | U | NO |
| 1-(2,2,2-Trifluoroethyl)-pseudo-UTP | — | U | NO |
| 1-(2,2,3,3,3-Pentafluoropropyl)pseudouridine TP | — | U | NO |
| 1-(2,2-Diethoxyethyl)pseudouridine TP | — | U | NO |
| 1-(2,4,6-Trimethylbenzyl)pseudouridine TP | — | U | NO |
| 1-(2,4,6-Trimethyl-benzyl)pseudo-UTP | — | U | NO |
| 1-(2,4,6-Trimethyl-phenyl)pseudo-UTP | — | U | NO |
| 1-(2-Amino-2-carboxyethyl)pseudo-UTP | — | U | NO |
| 1-(2-Amino-ethyl)pseudo-UTP | — | U | NO |
| 1-(2-Hydroxyethyl)pseudouridine TP | — | U | NO |
| 1-(2-Methoxyethyl)pseudouridine TP | — | U | NO |
| 1-(3,4-Bis-trifluoromethoxybenzyl)pseudouridine TP | — | U | NO |
| 1-(3,4-Dimethoxybenzyl)pseudouridine TP | — | U | NO |
| 1-(3-Amino-3-carboxypropyl)pseudo-UTP | — | U | NO |
| 1-(3-Amino-propyl)pseudo-UTP | — | U | NO |
| 1-(3-Cyclopropyl-prop-2-ynyl)pseudouridine TP | — | U | NO |
| 1-(4-Amino-4-carboxybutyl)pseudo-UTP | — | U | NO |
| 1-(4-Amino-benzyl)pseudo-UTP | — | U | NO |
| 1-(4-Amino-butyl)pseudo-UTP | — | U | NO |
| 1-(4-Amino-phenyl)pseudo-UTP | — | U | NO |
| 1-(4-Azidobenzyl)pseudouridine TP | — | U | NO |
| 1-(4-Bromobenzyl)pseudouridine TP | — | U | NO |
| 1-(4-Chlorobenzyl)pseudouridine TP | — | U | NO |
| 1-(4-Fluorobenzyl)pseudouridine TP | — | U | NO |
| 1-(4-Iodobenzyl)pseudouridine TP | — | U | NO |
| 1-(4-Methanesulfonylbenzyl)pseudouridine TP | — | U | NO |
| 1-(4-Methoxybenzyl)pseudouridine TP | — | U | NO |
| 1-(4-Methoxy-benzyl)pseudo-UTP | — | U | NO |
| 1-(4-Methoxy-phenyl)pseudo-UTP | — | U | NO |
| 1-(4-Methylbenzyl)pseudouridine TP | — | U | NO |
| 1-(4-Methyl-benzyl)pseudo-UTP | — | U | NO |
| 1-(4-Nitrobenzyl)pseudouridine TP | — | U | NO |
| 1-(4-Nitro-benzyl)pseudo-UTP | — | U | NO |
| 1-(4-Nitro-phenyl)pseudo-UTP | — | U | NO |
| 1-(4-Thiomethoxybenzyl)pseudouridine TP | — | U | NO |
| 1-(4-Trifluoromethoxybenzyl)pseudouridine TP | — | U | NO |
| 1-(4-Trifluoromethyibenzyl)pseudouridine TP | — | U | NO |
| 1-(5-Amino-pentyl)pseudo-UTP | — | U | NO |
| 1-(6-Amino-hexyl)pseudo-UTP | — | U | NO |
| 1,6-Dimethyl-pseudo-UTP | — | U | NO |
| 1-[3-(2-{2-[2-(2-Aminoethoxy)-ethoxy]-ethoxy}-ethoxy)- | — | U | NO |
| propionyl]pseudouridine TP | | | |
| 1-{3-[2-(2-Aminoethoxy)-ethoxy]-propionyl}pseudouridine TP | — | U | NO |
| 1-Acetylpseudouridine TP | — | U | NO |
| 1-Alkyl-6-(1-propynyl)-pseudo-UTP | — | U | NO |
| 1-Alkyl-6-(2-propynyl)-pseudo-UTP | — | U | NO |
| 1-Alkyl-6-allyl-pseudo-UTP | — | U | NO |
| 1-Alkyl-6-ethynyl-pseudo-UTP | — | U | NO |
| 1-Alkyl-6-homoallyl-pseudo-UTP | — | U | NO |
| 1-Alkyl-6-vinyl-pseudo-UTP | — | U | NO |
| 1-Allylpseudouridine TP | — | U | NO |
| 1-Aminornethyl-pseudo-UTP | — | U | NO |
| 1-Benzoylpseudouridine TP | — | U | NO |
| 1-Benzyloxymethylpseudouridine TP | — | U | NO |
| 1-Benzyl-pseudo-UTP | — | U | NO |
| 1-Biotinyl-PEG2-pseudouridine TP | — | U | NO |
| 1-Biotinylpseudouridine TP | — | U | NO |
| 1-Butyl-pseudo-UTP | — | U | NO |
| 1-Cyanomethylpseudouridine TP | — | U | NO |
| 1-Cyclobutylmethyl-pseudo-UTP | — | U | NO |
| 1-Cyclobutyl-pseudo-UTP | — | U | NO |
| 1-Cycloheptylmethyl-pseudo-UTP | — | U | NO |
| 1-Cycloheptyl-pseudo-UTP | — | U | NO |
| 1-Cyclohexylmethyl-pseudo-UTP | — | U | NO |
| 1-Cyclohexyl-pseudo-UTP | — | U | NO |
| 1-Cyclooctylmethyl-pseudo-UTP | — | U | NO |
| 1-Cyclooctyl-pseudo-UTP | — | U | NO |
| 1-Cyclopentylmethyl-pseudo-UTP | — | U | NO |
| 1-Cyclopentyl-pseudo-UTP | — | U | NO |
| 1-Cyciopropyimethyl-pseudo-UTP | — | U | NO |
| 1-Cyclopropyl-pseudo-UTP | — | U | NO |
| 1-Ethyl-pseudo-UTP | — | U | NO |
| 1-Hexyl-pseudo-UTP | — | U | NO |
| 1-Homoallylpseudouridine TP | — | D | NO |
| 1-Hydroxymethylpseudouridine TP | — | D | NO |
| 1-iso-propyl-pseudo-UTP | — | D | NO |
| 1-Me-2-thio-pseudo-UTP | — | D | NO |
| 1-Me-4-thio-pseudo-UTP | — | D | NO |
| 1-Me-alpha-thio-pseudo-UTP | — | D | NO |
| 1-Methanesuifonyimethyipseudouridine TP | — | D | NO |
| 1-Methoxymethylpseudouridine TP | — | D | NO |
| 1-Methyl-6-(2,2,2-Trifluoroethyl)pseudo-UTP | — | D | NO |
| 1-Methyl-6-(4-morphoiino)-pseudo-UTP | — | D | NO |
| 1-Methyl-6-(4-thiomorphoiino)-pseudo-UTP | — | D | NO |
| 1-Methyl-6-(substituted phenyl)pseudo-UTP | — | D | NO |
| 1-Methyl-6-amino-pseudo-UTP | — | D | NO |
| 1-Methyl-6-azido-pseudo-UTP | — | D | NO |
| 1-Methyl-6-bromo-pseudo-UTP | — | D | NO |
| 1-Methyl-6-butyl-pseudo-UTP | — | D | NO |
| 1-Methyl-6-chioro-pseudo-UTP | — | D | NO |
| 1-Methyl-6-cyano-pseudo-UTP | — | D | NO |
| 1-Methyl-6-dimethyiamino-pseudo-UTP | — | D | NO |
| 1-Methyl-6-ethoxy-pseudo-UTP | — | D | NO |
| 1-Methyl-6-ethylcarboxyiate-pseudo-UTP | — | D | NO |
| 1-Methyl-6-ethyl-pseudo-UTP | — | D | NO |
| 1-Methyl-6-fluoro-pseudo-UTP | — | D | NO |
| 1-Methyl-6-formyl-pseudo-UTP | — | D | NO |
| 1-Methyl-6-hydroxyamino-pseudo-UTP | — | D | NO |
| 1-Methyl-6-hydroxy-pseudo-UTP | — | D | NO |
| 1-Methyl-6-iodo-pseudo-UTP | — | D | NO |
| 1-Methyl-6-iso-propyl-pseudo-UTP | — | D | NO |
| 1-Methyl-6-methoxy-pseudo-UTP | — | D | NO |
| 1-Methyl-6-methylamino-pseudo-UTP | — | D | NO |
| 1-Methyl-6-phenyl-pseudo-UTP | — | D | NO |
| 1-Methyl-o-propyl-pseudo-UTP | — | D | NO |
| 1-Methyl-6-tert-butyl-pseudo-UTP | — | D | NO |
| 1-Methyl-6-trifluoromethoxy-pseudo-UTP | — | D | NO |
| 1-Methyl-6-trifluoromethyl-pseudo-UTP | — | D | NO |
| 1-Morphoiinomethyipseudouridine TP | — | D | NO |
| 1-Pentyl-pseudo-UTP | — | D | NO |
| 1-Phenyl-pseudo-UTP | — | D | NO |
| 1-Pivaloylpseudouridine TP | — | D | NO |
| 1-Propargylpseudouridine TP | — | D | NO |
| 1-Propyl-pseudo-UTP | — | D | NO |
| 1-propynyl-pseudouridine | — | D | NO |
| 1-p-tolyl-pseudo-UTP | — | D | NO |
| 1-tert-Butyl-pseudo-UTP | — | U | NO |
| 1-Thiomethoxymethyipseudouridine TP | — | U | NO |
| 1-Thiomorphoiinomethyipseudouridine TP | — | U | NO |
| 1-Trifluoroacetylpseudouridine TP | — | U | NO |
| 1-Trifluoromethyl-pseudo-UTP | — | U | NO |
| 1-Vinylpseudouridine TP | — | U | NO |
| 2,2′-anhydro-uridine TP | — | U | NO |
| 2′-bromo-deoxyuridine TP | — | U | NO |
| 2′-F-5-Methyl-2′-deoxy-UTP | — | U | NO |
| 2′-Ome-5-Me-UTP | — | U | NO |
| 2′-Ome-pseudo-UTP | — | U | NO |
| 2′-a-Ethynyiuridine TP | — | U | NO |
| 2′-a-Trifluoromethyiuridine TP | — | U | NO |
| 2′-b-Ethynyiuridine TP | — | U | NO |
| 2′-b-Trifluoromethyiuridine TP | — | U | NO |
| 2′-Deoxy-2′,2′-difluorouridine TP | — | U | NO |
| 2′-Deoxy-2′-a-mercaptouridine TP | — | U | NO |
| 2′-Deoxy-2′-a-thiomethoxyuridine TP | — | U | NO |
| 2′-Deoxy-2′-b-aminouridine TP | — | U | NO |
| 2′-Deoxy-2′-b-azidouridine TP | — | U | NO |
| 2′-Deoxy-2′-b-bromouridine TP | — | U | NO |
| 2′-Deoxy-2′-b-chiorouridine TP | — | U | NO |
| 2′-Deoxy-2′-b-fluorouridine TP | — | U | ND |
| 2′-Deoxy-2′-b-iodouridine TP | — | U | NO |
| 2′-Deoxy-2′-b-mercaptouridine TP | — | U | NO |
| 2′-Deoxy-2′-b-thiomethoxyuridine TP | — | U | NO |
| 2-methoxy-4-thio-uridine | — | U | NO |
| 2-methoxyuridine | — | U | NO |
| 2′-O-Methyl-5-(1-propynyl)uridine TP | — | U | NO |
| 3-Alkyl-pseudo-UTP | — | U | NO |
| 4′-Azidouridine TP | — | U | NO |
| 4′-Carbocyclic uridine TP | — | U | NO |
| 4′-Ethynyiuridine TP | — | U | NO |
| 5-(1-Propynyl)ara-uridine TP | — | U | NO |
| 5-(2-Furanyl)uridine TP | — | U | NO |
| 5-Cyanouridine TP | — | U | NO |
| 5-Dimethylaminouridine TP | — | U | NO |
| 5′-Homo-uridine TP | — | U | NO |
| 5-iodo-2′-fluoro-deoxyuridine TP | — | U | NO |
| 5-Phenyiethynyiuridine TP | — | U | NO |
| 5-Trideuteromethyl-6-deuterouridine TP | — | U | NO |
| 5-Trifluoromethyl-Uridine TP | — | U | NO |
| 5-Vinyiarauridine TP | — | U | NO |
| 6-(4-Morpholino)-pseudo-UTP | — | D | NO |
| 6-(4-Thiomorpholino)-pseudo-UTP | — | D | NO |
| 6-(Substituted-Phenyl)-pseudo-UTP | — | D | NO |
| 6-Amino-pseudo-UTP | — | D | NO |
| 6-Azido-pseudo-UTP | — | D | NO |
| 6-Bromo-pseudo-UTP | — | D | NO |
| 6-Butyl-pseudo-UTP | — | D | NO |
| 6-Chloro-pseudo-UTP | — | D | NO |
| 6-Cyano-pseudo-UTP | — | D | NO |
| 6-Dimethylamino-pseudo-UTP | — | D | NO |
| 6-Ethoxy-pseudo-UTP | — | D | NO |
| 6-Ethylcarboxylate-pseudo-UTP | — | D | NO |
| 6-Ethyl-pseudo-UTP | — | D | NO |
| 6-Fluoro-pseudo-UTP | — | D | NO |
| 6-Formyl-pseudo-UTP | — | D | NO |
| 6-Hydroxyamino-pseudo-UTP | — | D | NO |
| 6-Hydroxy-pseudo-UTP | — | D | NO |
| 6-Iodo-pseudo-UTP | — | D | NO |
| 6-iso-Propyl-pseudo-UTP | — | D | NO |
| 6-Methoxy-pseudo-UTP | — | D | NO |
| 6-Methylamino-pseudo-UTP | — | D | NO |
| 6-Methyl-pseudo-UTP | — | D | NO |
| 6-Phenyl-pseudo-UTP | — | D | NO |
| 6-Phenyl-pseudo-UTP | — | D | NO |
| 6-Propyl-pseudo-UTP | — | D | NO |
| 6-tert-Butyl-pseudo-UTP | — | D | NO |
| 6-Trifluoromethoxy-pseudo-UTP | — | D | NO |
| 6-Trifluoromethyl-pseudo-UTP | — | D | NO |
| Alpha-thio-pseudo-UTP | — | D | NO |
| Pseudouridine-1-(4-methylbenzenesulfonic acid) TP | — | D | NO |
| Pseudouridine-1-(4-methylbenzoic acid) TP | — | D | NO |
| Pseudouridine-TP-1-[3-(2-ethoxy)]propionic acid | — | D | NO |
| Pseudouridine-TP-1-[3-{2-(2-[2-(2-ethoxy)-ethoxv]-ethoxv)- | — | D | NO |
| ethoxv}]propionic acid | | | |
| Pseudouridine-TP-1-[3-{2-(2-[2-{2(2-ethoxy)-ethoxy}-ethoxy]-ethoxy)- | — | D | NO |
| ethoxy}]propionic acid | | | |
| Pseudouridine TP-1-[3-{2-(2-[2-ethoxy]-ethoxvr-ethoxv}]propionic acid | — | D | NO |
| Pseudouridine-TP-1-[3-{2-(2-ethoxy)-ethoxy}]propionic acid | — | D | NO |
| Pseudouridine-TP-1-methylphosphonic acid | — | D | NO |
| Pseudouridine-TP-1-methylphosphonic acid diethyl ester | — | U | NO |
| Pseudo-UTP-N1-3-propionic acid | — | U | NO |
| Pseudo-UTP-N1-4-butanoicacid | — | U | NO |
| Pseudo-UTP-N1-5-pentanoic acid | — | U | NO |
| Pseudo-UTP-N1-6-hexanoicacid | — | U | NO |
| Pseudo-UTP-N1-7-heptanoic acid | — | U | NO |
| Pseudo-UTP-N1-methyl-p-benzoic acid | — | U | NO |
| Pseudo-UTP-N1-p-benzoic acid | — | U | NO |
| wybutosine | yW | W | Yes |
| hydroxywybutosine | OhyW | W | Yes |
| Isowyosine | imG2 | W | Yes |
| peroxywybutosine | o2yW | W | Yes |
| undermodified hydroxywybutosine | OHyW* | W | Yes |
| 4-demethylwyosine | imG-14 | W | Yes |

[0076] Other modifications which may be useful in the polynucleotides of the present invention are listed in Table B1.

TABLE B1
Additional Modification types

| Name | Type |
|---|---|
| 2,6-(diamino)purine | Other |
| 1-(aza)-2-(thio)-3-(aza)-phenoxazin-1-yl | Other |
| 1,3-(diaza)-2-(oxo)-phenthiazin-1-yl | Other |
| 1,3-(diaza)-2-(oxo)-phenoxazin-1-yl | Other |
| 1,3,5-(triaza)-2,6-(dioxa)-naphthalene | Other |
| 2-(amino)purine | Other |
| 2,4,5-(trimethyl)phenyl | Other |
| 2′ methyl, 2′amino, 2′azido, 2′fluro-cytidine | Other |
| 2′ methyl, 2′amino, 2′azido, 2′fluro-adenine | Other |
| 2′methyl, 2′amino, 2′azido, 2′fluro-uridine | Other |
| 2′-amino-2′-deoxyribose | Other |
| 2-amino-6-chloro-purine | Other |
| 2-aza-inosinyl | Other |
| 2′-azido-2′-deoxyribose | Other |
| 2′-fluoro-2′-deoxyribose | Other |
| 2′-fluoro-modified bases | Other |
| 2′-O-methyl-ribose | Other |
| 2-oxo-7-aminopyridopyrimidin-3-yl | Other |
| 2-oxo-pyridopyrimidine-3-yl | Other |
| 2-pyridinone | Other |
| 3-nitropyrrole | Other |
| 3-(methyl)-7-(propynyl)isocarbostyrilyl | Other |
| 3-(methy l)isocarbostyrilyl | Other |
| 4-(fluoro)-6-(methyl)benzimidazole | Other |
| 4-(methyl)benzimidazole | Other |
| 4-(methyl)indolyl | Other |
| 4,6-(dimethyl)indolyl | Other |
| 5-nitroindole | Other |
| 5-substituted pyrimidines | Other |
| 5-(methyl)isocarbostyrilyl | Other |
| 5-nitroindole | Other |
| 6-(aza)pyrimidine | Other |
| 6-(azo)thymine | Other |
| 6-(methyl)-7-(aza)indolyl | Other |
| 6-chloro-purine | Other |
| 6-phenyl-pyrrolo-pyrimidin-2-on-3-yl | Other |
| 7-(aminoalkylhydroxy)-1-(aza)-2-(thio)-3-(aza)-phenthiazin-1-yl | Other |
| 7-(aminoalkylhydroxy)-1-(aza)-2-(thio)-3-(aza)-phenoxazin-1-yl | Other |
| 7-(aminoalkylhydroxy)-1,3-(diaza)-2-(oxo)-phenoxazin-1-yl | Other |
| 7-(aminoalkylhydroxy)-1,3-(diaza)-2-(oxo)-phenthiazin-1-yl | Other |
| 7-(aza)indolyl | Other |
| 7-(guanidiniumalkylhydroxy)-1-(aza)-2-(thio)-3-(aza)-phenoxazin-1-yl | Other |
| 7-(guanidiniumalkylhydroxy)-1-(aza)-2-(thio)-3-(aza)-phenthiazin-1-yl | Other |
| 7-(guanidiniumalkylhydroxy)-1-(aza)-2-(thio)-3-(aza)-phenoxazin-1-yl | Other |
| 7-(guanidiniumalkylhydroxy)-1,3-(diaza)-2-(oxo)-phenoxazin-1-yl | Other |
| 7-(guanidiniumalkyl-hydroxy)-1,3-(diaza)-2-(oxo)-phenthiazin-1-yl | Other |
| 7-(guanidiniumalkylhydroxy)-1,3-(diaza)-2-(oxo)-phenoxazin-1-yl | Other |
| 7-(propynyl)isocarbostyrilyl | Other |
| 7-(propynyl)isocarbostyrilyl, propynyl-7-(aza)indolyl | Other |
| 7-deaza-inosinyl | Other |
| 7-substituted 1-(aza)-2-(thio)-3-(aza)-phenoxazin-1-yl | Other |
| 7-substituted 1,3-(diaza)-2-(oxo)-phenoxazin-1-yl | Other |
| 9-(methy 1)-imidizopyridinyl | Other |
| aminoindolyl | Other |
| anthracenyl | Other |
| bis-ortho-(aminoalkylhydroxy)-6-phenyl-pyrrolo-pyrimidin-2-on-3-yl | Other |
| bis-ortho-substituted-6-phenyl-pyrrolo-pyrimidin-2-on-3-yl | Other |
| difluorotolyl | Other |
| hypoxanthine | Other |
| imidizopyridinyl | Other |
| inosinyl | Other |
| isocarbostyrilyl | Other |
| isoguamsme | Other |
| N2-substituted purines | Other |
| N6-methyl-2-amino-purine | Other |
| 6-substituted purines | Other |
| N-alkylated derivative | Other |
| napthalenyl | Other |
| nitrobenzimidazolyl | Other |
| nitroimidazolyl | Other |
| nitroindazolyl | Other |
| nitropyrazolyl | Other |
| nubularine | Other |
| O6-substituted purines | Other |
| O-alkylated derivative | Other |
| ortho-(aminoalkylhydroxy)-6-phenyl-pyrrolo-pyrimidin-2-on-3-yl | Other |
| ortho-substituted-6-phenyl-pyrrolo-pyrimidin-2-on-3-yl | Other |
| Oxoformycin TP | Other |
| para-(aminoalkylhydroxy)-6-phenyl-pyrrolo-pyrimidin-2-on-3-yl | Other |
| para-substituted-6-phenyl-pyrrolo-pyrimidin-2-on-3-yl | Other |
| pentacenyl | Other |
| phenanthracenyl | Other |
| phenyl | Other |
| propynyl-7-(aza)indolyl | Other |
| pyrenyl | Other |
| pyridopyrimidin-3-yl | Other |
| pyridopyrimidin-3-yl,2-oxo-7-amino-pyridopyrimidin-3-yl | Other |
| pyrrolo-pyrimidin-2-on-3-yl | Other |
| pyrrolopyrimidinyl | Other |
| pyrrolopyrizinyl | Other |
| stilbenzyl | Other |
| substituted 1,2,4-triazoles | Other |
| tetracenyl | Other |
| tubercidine | Other |
| xanthine | Other |
| Xanthosine-5′-TP | Other |
| 2-thio-zebularine | Other |
| 5-aza-2-thio-zebularine | Other |
| 7-deaza-2-amino-purine | Other |
| pyridin-4-one ribonucleoside | Other |
| 2-Amino-riboside TP | Other |
| Formycin A TP | Other |
| Formycin B TP | Other |
| Pyrrolosine TP | Other |
| 2′-OH-ara-adenosine TP | Other |
| 2′-OH-ara-cytidine TP | Other |
| 2′-OH-ara-uridine TP | Other |
| 2′-OH-ara-guanosine TP | Other |
| 5-(2-carbomethoxyvinyl)uridine TP | Other |
| N6-(19-Amino-pentaoxanonadecyl)adenosine TP | Other |

[0077] The polynucleotides can include any useful linker between the nucleosides. Such linkers, including backbone modifications are given in Table B2.

TABLE B2
Linker modifications

| Name | Type |
|---|---|
| 3′-alkylene phosphonates | Linker |
| 3′-amino phosphoramidate | Linker |
| alkene containing backbones | Linker |
| aminoalkylphosphoramidates | Linker |
| aminoalkylphosphotriesters | Linker |
| boranophosphates | Linker |
| —CH2—O—N(CH3)—CH2— | Linker |
| —CH2—N(CH3)—N(CH3)—CH2— | Linker |
| —CH2—NH—CH2— | Linker |
| chiral phosphonates | Linker |
| chiral phosphorothioates | Linker |
| formacetyl and thioformacetyl backbones | Linker |
| methylene (methylimino) | Linker |
| methylene formacetyl and thioformacetyl backbones | Linker |
| methyleneimino and methylenehydrazino backbones | Linker |
| morpholino linkages | Linker |
| —N(CH3)—CH2—CH2— | Linker |
| oligonucleosides with heteroatom intemucleoside linkage | Linker |
| phosphinates | Linker |
| phosphoramidates | Linker |
| phosphorodithioates | Linker |
| phosphorothioate intemucleoside linkages | Linker |
| phosphorothioatesphosphotriesters | Linker |
| PNA | Linker |
| siloxane backbones | Linker |
| sulfamate backbones | Linker |
| sulfide sulfoxide and sulfone backbones | Linker |
| sulfonate and sulfonamide backbones | Linker |
| thionoalkylphosphonates | Linker |
| thionoalkylphosphotriesters | Linker |
| thionophosphoramidates | Linker |

[0078] The polynucleotide can include any useful modification, such as to the sugar, the nucleobase, or the internucleoside linkage (e.g. to a linking phosphate/to a phosphodiester linkage/to the phosphodiester backbone). One or more atoms of a pyrimidine nucleobase may be replaced or substituted with optionally substituted amino, optionally substituted thiol, optionally substituted alkyl (e.g., methyl or ethyl), or halo (e.g., chloro or fluoro). In certain embodiments, modifications (e.g., one or more modifications) are present in each of the sugar and the internucleoside linkage. Modifications according to the present invention may be modifications of ribonucleic acids (RNAs) to deoxyribonucleic acids (DNAs), threose nucleic acids (TNAs), glycol nucleic acids (GNAs), peptide nucleic acids (PNAs), locked nucleic acids (LNAs) or hybrids thereof). Additional modifications are described herein.

[0079] In some embodiments, the modified polynucleotides to be used in the present invention do not substantially induce an innate immune response of a cell into which the mRNA is introduced. Features of an induced innate immune response include 1) increased expression of pro-inflammatory cytokines, 2) activation of intracellular PRRs (RIG-I, MDA5, etc., and/or 3) termination or reduction in protein translation.

[0080] In certain embodiments, it may be desirable to intracellularly degrade a polynucleotide introduced into the cell. For example, degradation of a polynucleotide may be preferable if precise timing of protein production is desired. Thus, in some embodiments, the invention provides a polynucleotide containing a degradation domain, which is capable of being acted on in a directed manner within a cell.

[0081] Any of the regions of the polynucleotides may be chemically modified as taught herein or as taught in International Publication Number WO2013052523 and International Publication Number WO2014093924 the contents of each of which are incorporated herein by reference in its entirety.

[0082] Sugar Modifications: The modified nucleosides and nucleotides, which may be incorporated into a modified polynucleotide molecule as described herein, can be modified in the sugar moiety. For example, the 2′ hydroxyl group (OH) can be modified or replaced with a number of different substituents.

[0083] The modified nucleosides and nucleotides (e.g., building block molecules), which may be incorporated into a polynucleotide (e.g., RNA or mRNA, as described herein), can be modified on the sugar of the ribonucleic acid. For example, the 2′ hydroxyl group (OH) can be modified or replaced with a number of different substituents. Exemplary substitutions at the 2′-position include, but are not limited to, H, halo, optionally substituted C1-6 alkyl; optionally substituted C1-6 alkoxy; optionally substituted C6-10 aryloxy; optionally substituted C3-8 cycloalkyl; optionally substituted C3-8 cycloalkoxy; optionally substituted C6-10 aryloxy; optionally substituted C6-10 aryl-C1-6 alkoxy, optionally substituted C1-12 (heterocyclyl)oxy; a sugar (e.g., ribose, pentose, or any described herein); a polyethyleneglycol (PEG), —O(CH2CH2O)nCH2CH2OR, where R is H or optionally substituted alkyl, and n is an integer from 0 to 20 (e.g., from 0 to 4, from 0 to 8, from 0 to 10, from 0 to 16, from 1 to 4, from 1 to 8, from 1 to 10, from 1 to 16, from 1 to 20, from 2 to 4, from 2 to 8, from 2 to 10, from 2 to 16, from 2 to 20, from 4 to 8, from 4 to 10, from 4 to 16, and from 4 to 20); “locked” nucleic acids (LNA) in which the 2′-hydroxyl is connected by a C1-6 alkylene or C1-6 heteroalkylene bridge to the 4′-carbon of the same ribose sugar, where exemplary bridges included methylene, propylene, ether, or amino bridges; aminoalkyl, as defined herein; aminoalkoxy, as defined herein; amino as defined herein; and amino acid, as defined herein.

[0084] Generally, RNA includes the sugar group ribose, which is a 5-membered ring having an oxygen. Exemplary, non-limiting modified nucleotides include replacement of the oxygen in ribose (e.g., with S, Se, or alkylene, such as methylene or ethylene); addition of a double bond (e.g., to replace ribose with cyclopentenyl or cyclohexenyl); ring contraction of ribose (e.g., to form a 4-membered ring of cyclobutane or oxetane); ring expansion of ribose (e.g., to form a 6- or 7-membered ring having an additional carbon or heteroatom, such as for anhydrohexitol, altritol, mannitol, cyclohexanyl, cyclohexenyl, and morpholino that also has a phosphoramidate backbone); multicyclic forms (e.g., tricyclo; and “unlocked” forms, such as glycol nucleic acid (GNA) (e.g., R-GNA or S-GNA, where ribose is replaced by glycol units attached to phosphodiester bonds), threose nucleic acid (TNA, where ribose is replace with α-L-threofuranosyl-(3′→2′)), and peptide nucleic acid (PNA, where 2-amino-ethyl-glycine linkages replace the ribose and phosphodiester backbone). The sugar group can also contain one or more carbons that possess the opposite stereochemical configuration than that of the corresponding carbon in ribose. Thus, a polynucleotide molecule can include nucleotides containing, e.g., arabinose, as the sugar. Such sugar modifications are taught in International Publication No. WO 2013/052523 and International Publication No. WO 2014/093924 the contents of each of which are incorporated herein by reference in its entirety.

[0085] Building blocks, e.g., modified ribonucleotides, and modified ribonucleotides, of polynucleotide molecules useful for preparing the modified polynucleotides for use in the present invention are taught in International Publication Number WO 2013/052523 and International Publication Number WO 2014/093924 the contents of each of which are incorporated herein by reference in its entirety.

### Base Modifications:

[0086] The present disclosure provides for modified nucleosides and nucleotides. As described herein “nucleoside” is defined as a compound containing a sugar molecule (e.g., a pentose or ribose) or a derivative thereof in combination with an organic base (e.g., a purine or pyrimidine) or a derivative thereof (also referred to herein as “nucleobase”). As described herein, “nucleotide” is defined as a nucleoside including a phosphate group. The modified nucleotides may be synthesized by any useful method, as described herein (e.g., chemically, enzymatically, or recombinantly to include one or more modified or non-natural nucleosides). The polynucleotides may comprise a region or regions of linked nucleosides. Such regions may have variable backbone linkages. The linkages may be standard phosphoester linkages, in which case the polynucleotides would comprise regions of nucleotides.

[0087] The modified nucleotide base pairing encompasses not only the standard adenosine-thymine, adenosine-uracil, or guanosine-cytosine base pairs, but also base pairs formed between nucleotides and/or modified nucleotides comprising non-standard or modified bases, wherein the arrangement of hydrogen bond donors and hydrogen bond acceptors permits hydrogen bonding between a non-standard base and a standard base or between two complementary non-standard base structures. One example of such non-standard base pairing is the base pairing between the modified nucleotide inosine and adenine, cytosine or tired.

[0088] The modified nucleosides and nucleotides can include a modified nucleobase. Examples of nucleobases found in RNA include, but are not limited to, adenine, guanine, cytosine, and tired. Examples of nucleobase found in DNA include, but are not limited to, adenine, guanine, cytosine, and thymine. Such modified nucleobases (including the distinctions between naturally occurring and non-naturally occurring) are taught in International Publication No. WO 2013/052523 and International Publication No. WO 2014/093924 the contents of each of which are incorporated herein by reference in its entirety.

[0089] The polynucleotides of the invention can include a combination of modifications to the sugar, the nucleobase, and/or the internucleoside linkage. These combinations can include any one or more modifications described herein.

[0090] Examples of modified nucleotides and modified nucleotide combinations are provided below in Tables D and E. These combinations of modified nucleotides can be used to form the modified polynucleotides for use in the present invention. Unless otherwise noted, the modified nucleotides may be completely substituted for the natural nucleotides of the polynucleotides of the invention. As a non-limiting example, the natural nucleotide uridine may be substituted with a modified nucleoside described herein. In another non-limiting example, the natural nucleotide uridine may be partially substituted (e.g., about 0.1%, 1%, 5%, 10%, 15%, 20%, 25%, 30%, 35%, 40%, 45%, 50%, 55%, 60%, 65%, 70%, 75%, 80%, 85%, 90%, 95% or 99.9%) with at least one of the modified nucleoside disclosed herein. Any combination of base/sugar or linker may be incorporated into the modified polynucleotides for use in the present invention and such modifications are taught in International Publication Number WO 2013/052523 and in International Publication Number WO 2014/093924 the contents of each of which are incorporated herein by reference in its entirety.

TABLE D
Combinations

| Modified | |
|---|---|
| Nucleotide | Modified Nucleotide Combination |
| α-thio-cytidine | α-thio-cytidine/5-iodo-uridine |
| | α-thio-cytidine/N1-methyl-pseudouridine |
| | α-thio-cytidine/α-thio-uridine |
| | α-thio-cytidine/5-methyl-uridine |
| | α-thio-cytidine/pseudo-uridine |
| | about 50% of the cytosines are α-thio-cytidine |
| pseudoisocytidine | pseudoisocytidine/5-iodo-uridine |
| | pseudoisocytidine/N1-methyl-pseudouridine |
| | pseudoisocytidine/α-thio-uridine |
| | pseudoisocytidine/5-methyl-uridine |
| | pseudoisocytidine/pseudouridine |
| | about 25% of cytosines are pseudoisocytidine |
| | pseudoisocytidine/about 50% ofuridines are N1- |
| | methyl-pseudouridine and about 50% of uridine |
| | are pseudouridine |
| | pseudoisocytidine/about 25% of uridines are N1- |
| | methyl-pseudouridine and about 25% ofuridines |
| | are pseudouridine |
| pyrrolo-cytidine | pyrrolo-cytidine/5-iodo-uridine |
| | pyrrolo-cytidine/N1-methyl-pseudouridine |
| | pyrrolo-cytidine/α-thio-uridine |
| | pyrrolo-cytidine/5-methyl-uridine |
| | pyrrolo-cytidine/pseudouridine |
| | about 50% of the cytosines are pyrrolo-cytidine |
| 5-methyl-cytidine | 5-methyl-cytidine/5-iodo-uridine |
| | 5-methyl-cytidine/N1-methyl-pseudouridine |
| | 5-methyl-cytidine/α-thio-uridine |
| | 5-methyl-cytidine/5-methyl-uridine |
| | 5-methyl-cytidine/pseudouridine |
| | about 25% of cytosines are 5-methyl-cytidine |
| | about 50% of cytosines are 5-methyl-cytidine |
| | 5-methyl-cytidine/5-methoxy-uridine |
| | 5-methyl-cytidine/5-bromo-uridine |
| | 5-methyl-cytidine/2-thio-uridine |
| | 5-methyl-cytidine/about 50% of uridines are |
| | 2-thio-uridine |
| | about 50% of uridines are 5-methyl-cytidine/ |
| | about 50% of uridines are 2-thio-uridine |
| N4-acetyl-cytidine | N4-acetyl-cytidine/5-iodo-uridine |
| | N4-acetyl-cytidine/N1-methyl-pseudouridine |
| | N4-acetyl-cytidine/α-thio-uridine |
| | N4-acetyl-cytidine/5-methyl-uridine |
| | N4-acetvl-cytidine/pseudouridine |
| | about 50% of cytosines are N4-acetyl-cytidine |
| | about 25% of cytosines are N4-acetyl-cytidine |
| | N4-acetyl-cytidine/5-methoxy-uridine |
| | N4-acetyl-cytidine/5-bromo-uridine |
| | N4-acetyl-cytidine/2-thio-uridine |
| | about 50% of cytosines are N4-acetyl-cytidine/ |
| | about 50% of uridines are 2-thio-uridine |

TABLE E
Combinations
Combination

1-(2,2,2-Trifluoroethyl)pseudo-UTP
1-Ethyl-pseudo-UTP
1-Methyl-pseudo-U-alpha-thio-TP
1-methyl-pseudouridine TP, ATP, GTP, CTP
1-methyl-pseudo-UTP/5-methyl-CTP/ATP/GTP
1-Propyl-pseudo-UTP
25% 5-Aminoallyl-CTP + 75% CTP/25% 5-Methoxy-UTP + 75% UTP
25% 5-Aminoallyl-CTP + 75% CTP/75% 5-Methoxy-UTP + 25% UTP
25% 5-Bromo-CTP + 75% CTP/25% 5-Methoxy-UTP + 75% UTP
25% 5-Bromo-CTP + 75% CTP/75% 5-Methoxy-UTP + 25% UTP
25% 5-Bromo-CTP + 75% CTP/1-Methyl-pseudo-UTP
25% 5-Carboxy-CTP + 75% CTP/25% 5-Methoxy-UTP + 75% UTP
25% 5-Carboxy-CTP + 75% CTP/75% 5-Methoxy-UTP + 25% UTP
25% 5-Ethyl-CTP + 75% CTP/25% 5-Methoxy-UTP + 75% UTP
25% 5-Ethyl-CTP + 75% CTP/75% 5-Methoxy-UTP + 25% UTP
25% 5-Ethynyl-CTP + 75% CTP/25% 5-Methoxy-UTP + 75% UTP
25% 5-Ethynyl-CTP + 75% CTP/75% 5-Methoxy-UTP + 25% UTP
25% 5-Fluoro-CTP + 75% CTP/25% 5-Methoxy-UTP + 75% UTP
25% 5-Fluoro-CTP + 75% CTP/75% 5-Methoxy-UTP + 25% UTP
25% 5-Formyl-CTP + 75% CTP/25% 5-Methoxy-UTP + 75% UTP
25% 5-Formyl-CTP + 75% CTP/75% 5-Methoxy-UTP + 25% UTP
25% 5-Hydroxymethyl-CTP + 75% CTP/25% 5-Methoxy-UTP + 75% UTP
25% 5-Hydroxymethyl-CTP + 75% CTP/75% 5-Methoxy-UTP + 25% UTP
25% 5-Iodo-CTP + 75% CTP/25% 5-Methoxy-UTP + 75% UTP
25% 5-Iodo-CTP + 75% CTP/75% 5-Methoxy-UTP + 25% UTP
25% 5-Methoxy-CTP + 75% CTP/25% 5-Methoxy-UTP + 75% UTP
25% 5-Methoxy-CTP + 75% CTP/75% 5-Methoxy-UTP + 25% UTP
25% 5-Methyl-CTP + 75% CTP/25% 5-Methoxy-UTP + 75% 1-Methyl-pseudo-UTP
25% 5-Methyl-CTP + 75% CTP/25% 5-Methoxy-UTP + 75% UTP
25% 5-Methyl-CTP + 75% CTP/50% 5-Methoxy-UTP + 50% 1-Methyl-pseudo-UTP
25% 5-Methyl-CTP + 75% CTP/50% 5-Methoxy-UTP + 50% UTP
25% 5-Methyl-CTP + 75% CTP/5-Methoxy-UTP
25% 5-Methyl-CTP + 75% CTP/75% 5-Methoxy-UTP + 25% 1-Methyl-pseudo-UTP
25% 5-Methyl-CTP + 75% CTP/75% 5-Methoxy-UTP + 25% UTP
25% 5-Phenyl-CTP + 75% CTP/25% 5-Methoxy-UTP + 75% UTP
25% 5-Phenyl-CTP + 75% CTP/75% 5-Methoxy-UTP + 25% UTP
25% 5-Trifluoromethyl-CTP + 75% CTP/25% 5-Methoxy-UTP + 75% UTP
25% 5-Trifluoromethyl-CTP + 75% CTP/75% 5-Methoxy-UTP + 25% UTP
25% 5-Trifluoromethyl-CTP + 75% CTP/1-Methyl-pseudo-UTP
25% N4-Ac-CTP + 75% CTP/25% 5-Methoxy-UTP + 75% UTP
25% N4-Ac-CTP + 75% CTP/75% 5-Methoxy-UTP + 25% UTP
25% N4-Bz-CTP + 75% CTP/25% 5-Methoxy-UTP + 75% UTP
25% N4-Bz-CTP + 75% CTP/75% 5-Methoxy-UTP + 25% UTP
25% N4-Methyl-CTP + 75% CTP/25% 5-Methoxy-UTP + 75% UTP
25% N4-Methyl-CTP + 75% CTP/75% 5-Methoxy-UTP + 25% UTP
25% Pseudo-iso-CTP + 75% CTP/25% 5-Methoxy-UTP + 75% UTP
25% Pseudo-iso-CTP + 75% CTP/75% 5-Methoxy-UTP + 25% UTP
25% 5-Bromo-CTP/75% CTP/Pseudo-UTP
25% 5-methoxy-UTP/25% 5-methyl-CTP/ATP/GTP
25% 5-methoxy-UTP/5-methyl-CTP/ATP/GTP
25% 5-methoxy-UTP/75% 5-methyl-CTP/ATP/GTP
25% 5-methoxy-UTP/CTP/ATP/GTP
25% 5-metoxy-UTP/50% 5-methyl-CTP/ATP/GTP
2-Amino-ATP
2-Thio-CTP
2-thio-pseudouridine TP, ATP, GTP, CTP
2-Thio-pseudo-UTP
2-Thio-UTP
3-Methyl-CTP
3-Methyl-pseudo-UTP
4-Thio-UTP
50% 5-Bromo-CTP + 50% CTP/1-Methyl-pseudo-UTP
50% 5-Hydroxymethyl-CTP + 50% CTP/1-Methyl-pseudo-UTP
50% 5-methoxy-UTP/5-methyl-CTP/ATP/GTP
50% 5-Methyl-CTP + 50% CTP/25% 5-Methoxy-UTP + 75% 1-Methyl-pseudo-UTP
50% 5-Methyl-CTP + 50% CTP/25% 5-Methoxy-UTP + 75% UTP
50% 5-Methyl-CTP + 50% CTP/50% 5-Methoxy-UTP + 50% 1-Methyl-pseudo-UTP
50% 5-Methyl-CTP + 50% CTP/50% 5-Methoxy-UTP + 50% UTP
50% 5-Methyl-CTP + 50% CTP/5-Methoxy-UTP
50% 5-Methyl-CTP + 50% CTP/75% 5-Methoxy-UTP + 25% 1-Methyl-pseudo-UTP
50% 5-Methyl-CTP + 50% CTP/75% 5-Methoxy-UTP + 25% UTP
50% 5-Trifluoromethyl-CTP + 50% CTP/1-Methyl-pseudo-UTP
50% 5-Bromo-CTP/50% CTP/Pseudo-UTP
50% 5-methoxy-UTP/50% 5-methyl-CTP/ATP/GTP
50% 5-methoxy-UTP/75% 5-methyl-CTP/ATP/GTP
5-Aminoallyl-CTP
5-Aminoallyl-CTP/5-Methoxy-UTP
5-Aminoallyl-UTP
5-Bromo-CTP
5-Bromo-CTP/5-Methoxy-UTP
5-Bromo-CTP/1-Methyl-pseudo-UTP
5-Bromo-CTP/Pseudo-UTP
5-bromocytidine TP, ATP, GTP, UTP
5-Bromo-UTP
5-Carboxy-CTP/5-Methoxy-UTP
5-Ethyl-CTP/5-Methoxy-UTP
5-Ethynyl-CTP/5-Methoxy-UTP
5-Fluoro-CTP/5-Methoxy-UTP
5-Formyl-CTP/5-Methoxy-UTP
5-Hydroxy-methyl-CTP/5-Methoxy-UTP
5-Hydroxymethyl-CTP
5-Hydroxymethyl-CTP/1-Methyl-pseudo-UTP
5-Hydroxymethyl-CTP/5-Methoxy-UTP
5-hydroxymethyl-cytidine TP, ATP, GTP, UTP
5-Iodo-CTP/5-Methoxy-UTP
5-Me-CTP/5-Methoxy-UTP
5-Methoxy carbonyl methyl-UTP
5-Methoxy-CTP/5-Methoxy-UTP
5-methoxy-uridine TP, ATP, GTP, UTP
5-methoxy-UTP
5-Methoxy-UTP
5-Methoxy-UTP/N6-Isopentenyl-ATP
5-methoxy-UTP/25% 5-methyl-CTP/ATP/GTP
5-methoxy-UTP/5-methyl-CTP/ATP/GTP
5-methoxy-UTP/75% 5-methyl-CTP/ATP/GTP
5-methoxy-UTP/CTP/ATP/GTP
5-Methyl-2-thio-UTP
5-Methylaminomethyl-UTP
5-Methyl-CTP/5-Methoxy-UTP
5-Methyl-CTP/5-Methoxy-UTP(cap 0)
5-Methyl-CTP/5-Methoxy-UTP(No cap)
5-Methyl-CTP/25% 5-Methoxy-UTP + 75% 1-Methyl-pseudo-UTP
5-Methyl-CTP/25% 5-Methoxy-UTP + 75% UTP
5-Methyl-CTP/50% 5-Methoxy-UTP + 50% 1-Methyl-pseudo-UTP
5-Methyl-CTP/50% 5-Methoxy-UTP + 50% UTP
5-Methyl-CTP/5-Methoxy-UTP/N6-Me-ATP
5-Methyl-CTP/75% 5-Methoxy-UTP + 25% 1-Methyl-pseudo-UTP
5-Methyl-CTP/75% 5-Methoxy-UTP + 25% UTP
5-Phenyl-CTP/5-Methoxy-UTP
5-Trifluoro-methyl-CTP/5-Methoxy-UTP
5-Trifluoromethyl-CTP
5-Trifluoromethyl-CTP/5-Methoxy-UTP
5-Trifluoromethyl-CTP/1-Methyl-pseudo-UTP
5-Trifluoromethyl-CTP/Pseudo-UTP
5-Trifluoromethyl-UTP
5-trifluromethylcytidine TP, ATP, GTP, UTP
75% 5-Aminoallyl-CTP + 25% CTP/25% 5-Methoxy-UTP + 75% UTP
75% 5-Aminoallyl-CTP + 25% CTP/75% 5-Methoxy-UTP + 25% UTP
75% 5-Bromo-CTP + 25% CTP/25% 5-Methoxy-UTP + 75% UTP
75% 5-Bromo-CTP + 25% CTP/75% 5-Methoxy-UTP + 25% UTP
75% 5-Carboxy-CTP + 25% CTP/25% 5-Methoxy-UTP + 75% UTP
75% 5-Carboxy-CTP + 25% CTP/75% 5-Methoxy-UTP + 25% UTP
75% 5-Ethyl-CTP + 25% CTP/25% 5-Methoxy-UTP + 75% UTP
75% 5-Ethyl-CTP + 25% CTP/75% 5-Methoxy-UTP + 25% UTP
75% 5-Ethynyl-CTP + 25% CTP/25% 5-Methoxy-UTP + 75% UTP
75% 5-Ethynyl-CTP + 25% CTP/75% 5-Methoxy-UTP + 25% UTP
75% 5-Fluoro-CTP + 25% CTP/25% 5-Methoxy-UTP + 75% UTP
75% 5-Fluoro-CTP + 25% CTP/75% 5-Methoxy-UTP + 25% UTP
75% 5-Formyl-CTP + 25% CTP/25% 5-Methoxy-UTP + 75% UTP
75% 5-Formyl-CTP + 25% CTP/75% 5-Methoxy-UTP + 25% UTP
75% 5-Hydroxymethyl-CTP + 25% CTP/25% 5-Methoxy-UTP + 75% UTP
75% 5-Hydroxymethyl-CTP + 25% CTP/75% 5-Methoxy-UTP + 25% UTP
75% 5-Iodo-CTP + 25% CTP/25% 5-Methoxy-UTP + 75% UTP
75% 5-Iodo-CTP + 25% CTP/75% 5-Methoxy-UTP + 25% UTP
75% 5-Methoxy-CTP + 25% CTP/25% 5-Methoxy-UTP + 75% UTP
75% 5-Methoxy-CTP + 25% CTP/75% 5-Methoxy-UTP + 25% UTP
75% 5-methoxy-UTP/5-methyl-CTP/ATP/GTP
75% 5-Methyl-CTP + 25% CTP/25% 5-Methoxy-UTP + 75% 1-Methyl-pseudo-UTP
75% 5-Methyl-CTP + 25% CTP/25% 5-Methoxy-UTP + 75% UTP
75% 5-Methyl-CTP + 25% CTP/50% 5-Methoxy-UTP + 50% 1-Methyl-pseudo-UTP
75% 5-Methyl-CTP + 25% CTP/50% 5-Methoxy-UTP + 50% UTP
75% 5-Methyl-CTP + 25% CTP/5-Methoxy-UTP
75% 5-Methyl-CTP + 25% CTP/75% 5-Methoxy-UTP + 25% 1-Methyl-pseudo-UTP
75% 5-Methyl-CTP + 25% CTP/75% 5-Methoxy-UTP + 25% UTP
75% 5-Phenyl-CTP + 25% CTP/25% 5-Methoxy-UTP + 75% UTP
75% 5-Phenyl-CTP + 25% CTP/75% 5-Methoxy-UTP + 25% UTP
75% 5-Trifluoromethyl-CTP + 25% CTP/25% 5-Methoxy-UTP + 75% UTP
75% 5-Trifluoromethyl-CTP + 25% CTP/75% 5-Methoxy-UTP + 25% UTP
75% 5-Trifluoromethyl-CTP + 25% CTP/1-Methyl-pseudo-UTP
75% N4-Ac-CTP + 25% CTP/25% 5-Methoxy-UTP + 75% UTP
75% N4-Ac-CTP + 25% CTP/75% 5-Methoxy-UTP + 25% UTP
75% N4-Bz-CTP + 25% CTP/25% 5-Methoxy-UTP + 75% UTP
75% N4-Bz-CTP + 25% CTP/75% 5-Methoxy-UTP + 25% UTP
75% N4-Methyl-CTP + 25% CTP/25% 5-Methoxy-UTP + 75% UTP
75% N4-Methyl-CTP + 25% CTP/75% 5-Methoxy-UTP + 25% UTP
75% Pseudo-iso-CTP + 25% CTP/25% 5-Methoxy-UTP + 75% UTP
75% Pseudo-iso-CTP + 25% CTP/75% 5-Methoxy-UTP + 25% UTP
75% 5-Bromo-CTP/25% CTP/1-Methyl-pseudo-UTP
75% 5-Bromo-CTP/25% CTP/Pseudo-UTP
75% 5-methoxy-UTP/25% 5-methyl-CTP/ATP/GTP
75% 5-methoxy-UTP/50% 5-methyl-CTP/ATP/GTP
75% 5-methoxy-UTP/75% 5-methyl-CTP/ATP/GTP
75% 5-methoxy-UTP/CTP/ATP/GTP
8-Aza-ATP
Alpha-thio-CTP
CTP/25% 5-Methoxy-UTP + 75% 1-Methyl-pseudo-UTP
CTP/25% 5-Methoxy-UTP + 75% UTP
CTP/50% 5-Methoxy-UTP + 50% 1-Methyl-pseudo-UTP
CTP/50% 5-Methoxy-UTP + 50% UTP CTP/5-Methoxy-UTP
CTP/5-Methoxy-UTP (cap 0)
CTP/5-Methoxy-UTP(No cap)
CTP/75% 5-Methoxy-UTP + 25% 1-Methyl-pseudo-UTP
CTP/75% 5-Methoxy-UTP + 25% UTP
CTP/UTP(No cap)
N1-Me-GTP
N4-Ac-CTP
N4Ac-CTP/1-Methyl-pseudo-UTP
N4Ac-CTP/5-Methoxy-UTP
N4-acetyl-cytidine TP, ATP, GTP, UTP
N4-Bz-CTP/5-Methoxy-UTP
N4-methyl CTP
N4-Methyl-CTP/5-Methoxy-UTP
Pseudo-iso-CTP/5-Methoxy-UTP
PseudoU-alpha-thio-TP
pseudouridine TP, ATP, GTP, CTP
pseudo-UTP/5-methyl-CTP/ATP/GTP
UTP-5-oxyacetic acid Me ester
Xanthosine

[0091] According to the invention, the modified polynucleotides for use in the present invention may be synthesized to comprise the combinations or single modifications of Tables D or E.

[0092] Where a single modification is listed, the listed nucleoside or nucleotide represents 100 percent of that A, U, G or C nucleotide or nucleoside having been modified. Where percentages are listed, these represent the percentage of that particular A, U, G or C nucleobase triphosphate of the total amount of A, U, G, or C triphosphate present. For example, the combination: 25% 5-Aminoallyl-CTP+75% CTP/25% 5-Methoxy-UTP+75% UTP refers to a polynucleotide where 25% of the cytosine triphosphates are 5-Aminoallyl-CTP while 75% of the cytosines are CTP; whereas 25% of the uracils are 5-methoxy UTP while 75% of the uracils are UTP. Where no modified UTP is listed then the naturally occurring ATP, UTP, GTP and/or CTP is used at 100% of the sites of those nucleotides found in the polynucleotide. In this example all of the GTP and ATP nucleotides are left unmodified.

[0093] In a preferred embodiment, the modifications are selected from base modifications, which are preferably selected from pyridin-4-one ribonucleoside, 5-aza-uridine, 2-thio-5-aza-uridine, 2-thiouridine, 4-thio-pseudouridine, 2-thio-pseudouridine, 5-hydroxyuridine, 3-methyluridine, 5-carboxymethyl-uridine, 1-carboxymethyl-pseudouridine, 5-propynyl-uridine, 1-propynyl-pseudouridine, 5-taurinomethyluridine, 1-taurinomethyl-pseudouridine, 5-taurinomethyl-2-thio-uridine, 1-taurinomethyl-4-thio-uridine, 5-methyl-uridine, 1-methyl-pseudouridine, 4-thio-1-methyl-pseudouridine, 2-thio-1-methyl-pseudouridine, 1-methyl-1-deaza-pseudouridine, 2-thio-1-methyl-1-deaza-pseudouridine, dihydrouridine, dihydropseudouridine, 2-thio-dihydrouridine, 2-thio-dihydropseudouridine, 2-methoxyuridine, 2-methoxy-4-thio-uridine, 4-methoxy-pseudouridine, 4-methoxy-2-thio-pseudouridine, 5-aza-cytidine, pseudoisocytidine, 3-methyl-cytidine, N4-acetylcytidine, 5-formylcytidine, N4-methylcytidine, 5-hydroxymethylcytidine, 1-methyl-pseudoisocytidine, pyrrolo-cytidine, pyrrolo-pseudoisocytidine, 2-thio-cytidine, 2-thio-5-methyl-cytidine, 4-thio-pseudoisocytidine, 4-thio-1-methyl-pseudoisocytidine, 4-thio-1-methyl-1-deaza-pseudoisocytidine, 1-methyl-1-deaza-pseudoisocytidine, zebularine, 5-aza-zebularine, 5-methyl-zebularine, 5-aza-2-thio-zebularine, 2-thio-zebularine, 2-methoxy-cytidine, 2-methoxy-5-methyl-cytidine, 4-methoxy-pseudoisocytidine, 4-methoxy-1-methyl-pseudoisocytidine, 2-aminopurine, 2, fi-diaminopurine, 7-deaza-adenine, 7-deaza-8-aza-adenine, 7-deaza-2-aminopurine, 7-deaza-8-aza-2-aminopurine, 7-deaza-2,5-diaminopurine, 7-deaza-8-aza-2,5-diaminopurine, 1-methyladenosine, N6-methyladenosine, N6-isopentenyladenosine, N6-(cis-hydrogisopentenyl)adenosine, 2-methylthio-N6-(cis-hydrogisopentenyl)adenosine, N6-glycinylcarbamoyladenosine, N6-threonylcarbamoyladenosine, 2-methylthio-N6-threonylcarbamoyladenosine, N6,N6-dimethyladenosine, 7-methyladenine, 2-methylthio-adenine, 2-methoxy-adenine, inosine, 1-methyl-inosine, wyosine, wybutosine, 7-deaza-guanosine, 7-deaza-8-aza-guanosine, 6-thio-guanosine, 6-thio-7-deaza-guanosine, 6-thio-7-deaza-8-aza-guanosine, 7-methyl-guanosine, 6-thio-7-methyl-guanosine, 7-methylinosine, 6-methoxy-guanosine, 1-methylguanosine, N2-methylguanosine, N2,N2-dimethylguanosine, 8-oxo-guanosine, 7-methyl-8-oxo-guanosine, 1-methyl-6-thio-guanosine, N2-methyl-6-thio-guanosine, and N2,N2-dimethyl-6-thio-guanosine.

[0094] Lipid modification: According to a further embodiment, the modified polynucleotide as defined herein can contain a lipid modification. Such a lipid-modified polynucleotide typically comprises a polynucleotide as defined herein. Such a lipid-modified polynucleotide as defined herein typically further comprises at least one linker covalently linked with that polynucleotide, and at least one lipid covalently linked with the respective linker. Alternatively, the lipid-modified polynucleotide comprises at least one polynucleotide as defined herein and at least one (bifunctional) lipid covalently linked (without a linker) with that polynucleotide. According to a third alternative, the lipid-modified polynucleotide comprises an polynucleotide as defined herein, at least one linker covalently linked with that polynucleotide, and at least one lipid covalently linked with the respective linker, and also at least one (bifunctional) lipid covalently linked (without a linker) with that polynucleotide molecule. In this context, it is particularly preferred that the lipid modification is present at the terminal ends of a linear polynucleotide sequence.

[0095] Modification of the 5-end of the modified polynucleotide: According to another preferred embodiment of the invention, the modified polynucleotide as defined herein can be modified by the addition of a so-called “5′ CAP” structure.

[0096] A 5′-cap is an entity, typically a modified nucleotide entity, which generally “caps” the 5′-end of polynucleotide. A 5′-cap may typically be formed by a modified nucleotide, particularly by a derivative of a guanine nucleotide. Preferably, the 5′-cap is linked to the 5′-terminus via a 5′-5′-triphosphate linkage. A 5′-cap may be methylated, e.g. m7GpppN, wherein N is the terminal 5′ nucleotide of the nucleic acid carrying the 5′-cap, typically the 5′-end of a polynucleotide. m7GpppN is the 5′-CAP structure which naturally occurs in mRNA transcribed by polymerase II and is therefore not considered as modification comprised in the modified polynucleotide according to the invention. This means that the modified polynucleotide to be used according to the present invention may comprise a m7GpppN as 5′-CAP, but additionally the modified polynucleotide comprises at least one further modification as defined herein. Further examples of 5′cap structures include glyceryl, inverted deoxy abasic residue (moiety), 4′, 5′-methylene nucleotide, 1-(beta-D-erythrofuranosyl) nucleotide, 4′-thio nucleotide, carbocyclic nucleotide, 1,5-anhydrohexitol nucleotide, L-nucleotides, alpha-nucleotide, modified base nucleotide, threo-pentofuranos I nucleotide, acyclic 3′, 4′-seco nucleotide, acyclic 3,4-dihydroxybutyl nucleotide, acyclic 3,5-dihydroxypentyl nucleotide, 3′-3′-inverted nucleotide moiety, 3′-3′-inverted abasic moiety, 3′-2′-inverted nucleotide moiety, 3′-2′-inverted abasic moiety, 1,4-butanediol phosphate, 3′-phosphoramidate, hexylphosphate, aminohexyl phosphate, 3′-phosphate, 3′phosphorothioate, phosphorodithioate, or bridging or non-bridging methylphosphonate moiety. These modified 5′-CAP structures are regarded as at least one modification comprised in the modified polynucleotide for use according to the present invention.

[0097] Particularly preferred modified 5′-CAP structures are CAP1 (methylation of the ribose of the adjacent nucleotide of m7G), CAP2 (methylation of the ribose of the 2nd nucleotide downstream of the m7G), CAP3 (methylation of the ribose of the 3rd nucleotide downstream of the m7G), CAP4 (methylation of the ribose of the 4th nucleotide downstream of the m7G), ARCA (anti-reverse CAP analogue, modified ARCA (e.g. phosphothioate modified ARCA), inosine, N1-methyl-guanosine, 2′-fluoro-guanosine, 7-deaza-guanosine, 8-oxo-guanosine, 2-amino-guanosine, LNA-guanosine, and 2-azido-guanosine.

[0098] Codon optimization: A further preferred modification of the coding region encoding at least one peptide or protein of the polynucleotide as defined herein is based on the finding that the translation efficiency is also determined by a different frequency in the occurrence of tRNAs in cells. Thus, if so-called “rare codons” are present in the coding region of the wild type RNA sequence to an increased extent, the mRNA is translated to a significantly poorer degree than in the case where codons coding for relatively “frequent” tRNAs are present.

[0099] In this context, the coding region of the polynucleotide to be used in the present invention is preferably modified compared to the corresponding wild-type coding region such that at least one codon of the wild-type sequence, which codes for a tRNA which is relatively rare in the cell, is exchanged for a codon, which codes for a tRNA which is relatively frequent in the cell and carries the same amino acid as the relatively rare tRNA. By this modification, the coding region of the polynucleotide as defined herein, is modified such that codons, for which frequently occurring tRNAs are available, are inserted. In other words, according to the invention, by this modification all codons of the wild type coding region, which code for a tRNA which is relatively rare in the cell, can in each case be exchanged for a codon, which codes for a tRNA which is relatively frequent in the cell and which, in each case, carries the same amino acid as the relatively rare tRNA.

[0100] Which tRNAs occur relatively frequently in the cell and which, in contrast, occur relatively rarely is known to a person skilled in the art; cf. e.g. Akashi, Curr. Opin. Genet. Dev. 2001, 11(6): 660-666. The codons which use for the particular amino acid the tRNA which occurs most frequently in the (human) cell, are particularly preferred.

[0101] In a preferred embodiment, the polynucleotide as defined herein may include at least two stop codons before the 3′ untranslated region (UTR). In a more preferred embodiment, the polynucleotide comprises two stop codons. In an even more preferred embodiment, the polynucleotide comprises a first stop codon “TGA” and a second stop codon selected from the group consisting of “TAA,” “TGA” and “TAG.”

[0102] Modification of the 3′-end of the modified polynucleotide: Furthermore, in the modified polynucleotide, the region 3′ of the coding region may be modified, e.g. by insertion or addition of stretches of multiple repeats of adenine or cytosine residues. In a preferred embodiment of the invention, the 3′ end of a polynucleotide molecule is modified by addition of a series of adenine nucleotides (“poly(A) tail”).

[0103] The length of the poly(A) tail has a major impact on translation efficiency of the respective construct. To be translated efficiently, the poly(A) tail of exogenously delivered mRNAs should consist of at least 20 adenosine residues. Moreover, it has been described that mRNA expression positively correlates with poly(A) tail length (reviewed in Tavernier et al., J Control Release. 2011 Mar. 30; 150 (3):238-47. PMID: 20970469). In this context Holtkamp et al, showed that a poly(A) tail measuring 120 nucleotides compared with a shorter one, enhanced mRNA stability and translational efficiency (Holtkamp et al., Blood. 2000 Dec. 15; 108(13):4009-17. PMID: 16940422). In one embodiment of the invention, the modified polynucleotide comprises (optionally in combination with other modifications) a poly(A) tail, wherein the poly(A) tail comprises at least 30, preferably more than 50, more preferably more than 100, even more preferably more than 200 adenine nucleotides. Most preferably the polynucleotide comprises a poly(A) tail consisting of 64 adenine nucleotides.

[0104] In specific embodiments a poly(A) tail is only considered as at least one modification comprised in the modified polynucleotide according to the present invention if the poly(A) tail is longer than 30 adenosines, preferably longer than 50 adenosines, more preferably longer than 100 adenosines and even more preferably longer than 200 adenosines.

[0105] In a preferred embodiment, the polynucleotide may comprise a ply (A)-G quartet as a 3′ tailing sequence. The G-quartet is a cyclic hydrogen bonded array of four guanine nucleotides that can be formed by G-rich sequences. In a particular preferred embodiment, the 3′ tailing sequence is selected from the group consisting of a poly(A) tail of approximately 160 nucleotides and a poly(A)-G quartet.

[0106] UTR modification: Preferably, the modified polynucleotide according to the invention has at least one modified 5′ and/or 3′ UTR sequence (UTR modification). These modifications in the 5′ and/or 3′ untranslated regions (UTR) may have the effect of increasing the half-life of the polynucleotide in the cytosol or may increase the translational efficiency and may thus enhance the expression of the encoded protein or peptide. These UTR sequences can have 100% sequence identity to naturally occurring sequences which occur in viruses, bacteria and eukaryotes, but can also be partly or completely synthetic. The untranslated sequences (UTR) of the (alpha-) or beta globin gene, e.g. from Homo sapiens or Xenopus laevis may be mentioned as an example of stabilizing sequences which can be used for a stabilized polynucleotide. Another example of a stabilizing sequence has the general formula (C/U)CCANxCCC(U/A)PyxUC(C/U)CC which is contained in the 3′UTR of the very stable RNA which codes for (alpha-)globin, type(I)-collagen, 15-lipoxygenase or for tyrosine hydroxylase (cf. Holcik et al., Proc. Natl. Acad. Sci. USA 1997, 94: 2410 to 2414). Such introduced UTR sequences can, of course, be used individually or in combination with one another and also in combination with other sequence modifications known to a person skilled in the art.

[0107] Preferably, decay signals, such as Adenylate Uridylate Rich Elements (AREs) are removed from the 3′ untranslated regions (3′ UTRs) of a polynucleotide for use in the invention. In a preferred embodiment, a combination of two or more of the modifications described above are present in the modified polynucleotide according to the invention.

[0108] In a preferred embodiment of the present invention, the modified polynucleotide comprises at least two modifications. In a more preferred embodiment, the modifications are located on one or more of a nucleoside and/or the backbone of the modified polynucleotide. In an even more preferred embodiment, the modifications are located on both a nucleoside and a backbone linkage.

[0109] In another preferred embodiment, the at least two modifications are located on the backbone linkage. In a more preferred embodiment, the at least two modifications of the backbone linkage comprise replacing of one or more oxygen atoms. In another preferred embodiment, the at least two modifications of the backbone linkage comprise replacing at least one phosphodiester linkage with a phosphorothioate linkage.

[0110] In another preferred embodiment, the at least two modifications are located on a nucleoside.

[0111] In yet another preferred embodiment, the at least two modifications are located on a sugar of the nucleoside.

[0112] In still another preferred embodiment, the at least two modifications are located on a nucleobase. In a particular preferred embodiment, the modifications on the nucleobase are selected from the group consisting of cytosine, guanine, adenine, thymine and uracil.

### Example

[0113] The following example is intended to illustrate the invention in a further way. It is merely illustrative and not intended to limit the subject matter of the invention.

### I. Synthesis of Polynucleotide

[0114] The person skilled in the art is aware of methods to produce a polynucleotide for use in accordance with the present invention. The polynucleotide may be prepared according to any available technique including, but not limited to chemical synthesis, enzymatic synthesis (in vitro transcription) or enzymatic or chemical cleavage of a longer precursor.

[0115] In the following synthesis of RNA by using RNA in vitro transcription is described in more detail:

### a) Providing Template DNA

[0116] A DNA template for RNA in vitro transcription may be obtained by cloning of a nucleic acid, in particular cDNA corresponding to the respective RNA to be transcribed in vitro, and introducing it into an appropriate vector for in vitro transcription, for example into plasmid DNA. The cDNA may be obtained by reverse transcription of mRNA or chemical synthesis. Moreover, the DNA template for in vitro RNA synthesis may also be obtained by gene synthesis.

[0117] The template DNA comprises all elements necessary for RNA in vitro transcription, particularly a promoter element for binding of a DNA dependent RNA polymerase as e.g. T3, T7 and SP6 RNA polymerases 5′ of the DNA sequence encoding the target RNA sequence. Further, the template DNA may comprise primer binding sites 5′ and/or 3′ of the DNA sequence encoding the target RNA sequence to determine the identity of the DNA sequence encoding the target RNA sequence e.g. by KR or DNA sequencing.

### b) In Vitro Transcription

[0118] Methods for in vitro transcription are known in the art (Geall et al. (2013) Semin. Immunol. 25(2): 152-159; Brunelle et al. (2013) Methods Enzymol. 530:101-14).

[0119] Reagents used in said method typically include:

1) a linearized DNA template with a promoter sequence that has a high binding affinity for its respective RNA polymerase such as bacteriophage-encoded RNA polymerases;
2) ribonucleoside triphosphates (NTPs) for the four bases (adenine, cytosine, guanine and uracil);
3) optionally a cap analog as defined below (e.g. m7G(5′)ppp(5′)G (m7G));
4) a DNA-dependent RNA polymerase capable of binding to the promoter sequence within the linearized DNA template (e.g. T7, T3 or SP6 RNA polymerase);
5) optionally a ribonuclease (RNase) inhibitor to inactivate any contaminating RNase;
6) optionally a pyrophosphatase to degrade pyrophosphate, which may inhibit transcription;
7) MgCl2, which supplies Mg2+ ions as a co-factor for the polymerase;
8) a buffer to maintain a suitable pH value, which can also contain antioxidants (e.g. DTT), and/or polyamines such as spermidine at optimal concentrations.

[0120] If only one template DNA is present in the in vitro transcription reaction, the sample comprising in vitro transcribed RNA will only comprise one RNA species. If two or more different template DNAs are present in the in vitro transcription reaction, the sample comprising in vitro transcribed RNA will comprise two or more different RNA species.

### c) Purification

[0121] After in vitro transcription, the desired RNA is purified. Preferably, the RNA is purified by a HPLC procedure as described in WO 2008/077592 A1. Ideally, the RNA has a higher purity and/or integrity after purification than the starting material. The purity may be determined by methods commonly known to the skilled person, e.g. by gas chromatography, quantitative PER, analytical HPLC or gel electrophoresis.

[0122] Table 1: shows characteristic features of each peptide or protein of the invention, whereby each peptide or protein is represented by the above defined formula “c1(Peptide or protein or gene) c2(NCBI RefSeq ID) c3(NCBI RefSeq description) c4(Protein SEQ ID NO) c5(DNA SEQ ID NOs) c6(RNA SEQ ID NOs) c7(Related disease, disorder or condition)”—for feature 0 specific reference is made to Table C, i.e. the Abbreviation Dictionary for the feature “Related disease, disorder or condition” (corresponding to feature “c7”), whereby each Related disease, disorder or condition is depicted with a specific abbreviation and its written form as described herein (cf. detailed explanation of Table 1 and its corresponding formula above). Each of the recited sequences are also provided in the sequence listing of the priority document European Application No. 16001039.3, filed May 4, 2016, the entire contents of which are hereby incorporated by reference.

[0123] #c1(A1BG) c2(NP_570602) c3(alpha-1B-glycoprotein precursor) c4(234076) c5(234077, 234078, 234079, 234080, 234081, 234082) c6( ) c7(b, d, c, e, h, g, i, f); #c1(A1CF) c2(NP_001185747) c3(APOBEC1 complementation factor isoform 1) c4(76183) c5(76184, 76185, 76186, 76187, 76188, 76189, 76190, 76191, 76192, 76193, 76194, 76195, 76196, 76197, 76198, 76199) c6( ) c7(x, y, I, A, c, s, u, w, z, r, h, n, v, j, m, k, g, t, q, o, p); #c1(A1CF) c2(NP_001185749) c3(APOBEC1 complementation factor isoform 3) c4(76200, 76201) c5(76202, 76203, 76204, 76205, 76206, 76207, 76208, 76209, 76210, 76211, 76212, 76213) c6( ) c7(x, y, I, A, c, s, u, w, z, r, h, n, v, j, m, k, g, t, q, o, p); #c1(A1CF) c2(XP_005269777) c3(APOBEC1 complementation factor isoform X1) c4(282807, 282808, 282809) c5(282810, 282811, 282812, 282813, 282814, 282815, 282816, 282817, 282818, 282819, 282820, 282821, 282822, 282823, 282824, 282825) c6( ) c7(x, y, I, A, c, s, u, w, z, r, h, n, v, j, m, k, g, t, q, o, p); #c1(A1CF) c2(XP_011538031) c3(APOBEC1 complementation factor isoform X2) c4(335589) c5(335590, 335591, 335592, 335593, 335594, 335595) c6( ) c7(x, y, I, A, c, s, u, w, z, r, h, n, v, j, m, k, g, t, q, o, p); #c1(A1CF) c2(XP_011538032) c3(APOBEC1 complementation factor isoform X3) c4( ) c5(335596) c6( ) c7(x, y, I, A, c, s, u, w, z, r, h, n, v, j, m, k, g, t, q, o, p); #c1(A2M) c2(NP_000005) c3(alpha-2-macroglobulin precursor) c4(1, 2, 3) c5(4, 5, 6, 7, 8, 9, 10, 11, 12, 13, 14, 15, 16, 17, 18, 19, 20, 21) c6( ) c7(P, G, T, am, aw, al, I, O, aj, ah, C, V, ai, J, ad, av, F, M, ab, K, an, H, ae, af, N, aa, ak, Y, ap, aq, S, as, Z, ar, D, W, ac, ag, au, X, U, at, E, R, Q, y, B, ao, L); #c1(A2ML1) c2(NP_653271) c3(alpha-2-macroglobulin-like protein 1 isoform 1 precursor) c4(239450, 239451, 239452) c5(239453, 239454, 239455, 239456, 239457, 239458, 239459, 239460, 239461, 239462, 239463, 239464, 239465, 239466, 239467, 239468, 239469, 239470) c6( ) c7(ax, af, ay); #c1(A4GNT) c2(NP_057245) c3(alpha-1,4-N-acetylglucosaminyltransferase) c4(189701) c5(189702, 189703, 189704, 189705, 189706, 189707) c6( ) c7(T, aC, aE, aD, az, aA, n, aF, aB); #c1(AAAS) c2(NP_001166937) c3(aladin isoform 2) c4(68679) c5(68680, 68681, 68682, 68683, 68684, 68685) c6( ) c7(T, aG, aO, e, aZ, l, aj, v, j, bh, C, bd, aY, aR, J, aV, aX, aN, aT, aU, h, bj, aQ, K, bl, aH, af, bc, aK, bf, bn, aJ, Y, aM, aW, aP, bg, aq, bp, ba, bb, bo, U, bm, bk, aL, aS, be, bi, aI, B); #c1(AAAS) c2(NP_056480) c3(aladin isoform 1) c4(187708) c5(187709, 187710, 187711, 187712, 187713, 187714) c6( ) c7(T, aG, aO, e, aZ, l, aj, v, j, bh, C, bd, aY, aR, J, aV, aX, aN, aT, aU, h, bj, aQ, K, bl, aH, af, bc, aK, bf, bn, aJ, Y, aM, aW, aP, bg, aq, bp, ba, bb, bo, U, bm, bk, aL, aS, be, bi, aI, B); #c1(AAAS) c2(XP_006719682) c3(aladin isoform X6) c4( ) c5(292882) c6( ) c7(T, aG, aO, e, aZ, l, aj, v, j, bh, C, bd, aY, aR, J, aV, aX, aN, aT, aU, h, bj, aQ, K, bl, aH, af, bc, aK, bf, bn, aJ, Y, aM, aW, aP, bg, aq, bp, ba, bb, bo, U, bm, bk, aL, aS, be, bi, aI, B); #c1(AACS) c2(NP_076417) c3(acetoacetyl-CoA synthetase) c4(214105) c5(214106, 214107, 214108, 214109, 214110, 214111) c6( ) c7(v, bq); #c1(AACS) c2(XP_005253667) c3(acetoacetyl-CoA synthetase isoform X2) c4(272615) c5(272616, 272617, 272618, 272619, 272620, 272621, 272622) c6( ) c7(v, bq); #c1(AACS) c2(XP_011536994) c3(acetoacetyl-CoA synthetase isoform X3) c4(334738) c5(334739, 334740, 334741, 334742, 334743) c6( ) c7(v, bq); #c1(AADAC) c2(NP_001077) c3(arylacetamide deacetylase) c4(37900) c5( ) c6( ) c7(bv, d, aW, aT, bs, bw, m, bu, t, bt, br); #c1(AAGAB) c2(NP_078942) c3(alpha- and gamma-adaptin-binding protein p34 isoform 1) c4(216202) c5(216203, 216204, 216205, 216206, 216207, 216208) c6( ) c7(bF, bE, by, bx, bB, bC, bD, bz, bG, bA); #c1(AAK1) c2(NP_055726) c3(AP2-associated protein kinase 1) c4(183130, 183131) c5(183132, 183133, 183134, 183135, 183136, 183137, 183138, 183139, 183140, 183141, 183142, 183143, 183144) c6( ) c7(bH, C, an); #c1(AANAT) c2(NP_001160051) c3(serotonin N-acetyltransferase isoform 1) c4(65057) c5(65058, 65059, 65060, 65061, 65062, 65063) c6( ) c7(bL, bM, bP, bI, aW, Y, bO, aT, r, bQ, bK, bq, Z, q, bN, bJ); #c1(AANAT) c2(XP_011522723) c3(serotonin N-acetyltransferase isoform X2) c4(317253) c5( ) c6( ) c7(bL, bM, bP, bI, aW, Y, bO, aT, r, bQ, bK, bq, Z, q, bN, bJ); #c1(AANAT) c2(XP_011522724) c3(serotonin N-acetyltransferase isoform X3) c4( ) c5(317254) c6( ) c7(bL, bM, bP, bI, aW, Y, bO, aT, r, bQ, bK, bq, Z, q, bN, bJ); #c1(AANAT) c2(XP_011522725) c3(serotonin N-acetyltransferase isoform X1) c4( ) c5(317255, 317256, 317257, 317258, 317259) c6( ) c7(bL, bM, bP, bI, aW, Y, bO, aT, r, bQ, bK, bq, Z, q, bN, bJ); #c1(AARD) c2(NP_001020528) c3(alanine and arginine-rich domain-containing protein) c4(28835) c5(28836, 28837, 28838, 28839, 28840, 28841) c6( ) c7(bM); #c1(AARS) c2(NP_001596) c3(alanine-tRNA ligase, cytoplasmic) c4(119003) c5(119004, 119005, 119006, 119007, 119008, 119009) c6( ) c7(bT, bR, bW, bS, bX, bU, bV, p); #c1(AARS2) c2(NP_065796) c3(alanine-tRNA ligase, mitochondrial) c4(205487) c5(205488, 205489, 205490, 205491, 205492, 205493) c6( ) c7(cc, bU, bY, cb, bW, aw, bZ, ca, bV, p); #c1(AASDH) c2(NP_001273597) c3(acyl-CoA synthetase family member 4 isoform 2) c4(105405, 105406) c5( ) c6( ) c7(g); #c1(AASDH) c2(NP_001273599) c3(acyl-CoA synthetase family member 4 isoform 4) c4( ) c5(105407, 105408, 105409, 105410, 105411, 105412) c6( ) c7(g); #c1(AASDH) c2(NP_001273600) c3(acyl-CoA synthetase family member 4 isoform 5) c4(105413) c5(105414, 105415, 105416, 105417, 105418, 105419) c6( ) c7(g); #c1(AASDH) c2(NP_001273601) c3(acyl-CoA synthetase family member 4 isoform 6) c4(105420) c5(105421, 105422, 105423, 105424, 105425, 105426) c6( ) c7(g); #c1(AASDH) c2(XP_005265778) c3(acyl-CoA synthetase family member 4 isoform X1) c4(279718) c5(279719, 279720, 279721, 279722, 279723, 279724, 279725, 279726, 279727, 279728, 279729, 279730, 279731) c6( ) c7(g); #c1(AASDH) c2(XP_005265784) c3(acyl-CoA synthetase family member 4 isoform X5) c4( ) c5(279732) c6( ) c7(g); #c1(AASDHPPT) c2(NP_056238) c3(L-aminoadipate-semialdehyde dehydrogenase-phosphopantetheinyl transferase) c4(186653) c5(186654, 186655, 186656, 186657, 186658, 186659) c6( ) c7(h, cd, ac); #c1(AASS) c2(NP_005754) c3(alpha-aminoadipic semialdehyde synthase, mitochondrial) c4(159041) c5(159042, 159043, 159044, 159045, 159046, 159047, 159048, 159049, 159050, 159051) c6( ) c7(ce, cf, cg); #c1(AATF) c2(NP_036270) c3(protein AATF) c4(172739) c5(172740, 172741, 172742, 172743, 172744, 172745, 172746) c6( ) c7(ck, co, T, bE, aW, cj, aT, cm, v, ci, cl, ch, en); #c1(AATK) c2(NP_001073864) c3(serine/threonine-protein kinase LMTK1 isoform 1) c4(36168) c5(36169, 36170, 36171, 36172, 36173, 36174) c6( ) c7(cd, Y, cq, cr, cp); #c1(AATK) c2(XP_005257912) c3(serine/threonine-protein kinase LMTK1 isoform X7) c4(275417) c5(275418, 275419, 275420, 275421, 275422, 275423) c6( ) c7(cd, Y, cq, cr, cp); #c1(AATK) c2(XP_006722259) c3(serine/threonine-protein kinase LMTK1 isoform X2) c4(294670) c5( ) c6( ) c7(cd, Y, cq, cr, cp); #c1(AATK) c2(XP_011523811) c3(serine/threonine-protein kinase LMTK1 isoform X1) c4( ) c5(318349, 318350, 318351, 318352, 318353, 318354) c6( ) c7(cd, Y, cq, cr, cp); #c1(ABAT) c2(XP_011520703) c3(4-aminobutyrate aminotransferase, mitochondrial isoform X1) c4(315740) c5(315741, 315742, 315743, 315744, 315745, 315746, 315747, 315748, 315749, 315750, 315751, 315752, 315753, 315754) c6( ) c7(cw, cF, cs, cA, cE, cC, cz, cD, cy, cu, ct, bq, cx, cB, bN, cv); #c1(ABCA1) c2(NP_005493) c3(ATP-binding cassette sub-family A member 1) c4(156773, 156774) c5(156775, 156775, 156777, 156778, 156779, 156780, 156781, 156782, 156783, 156784, 156785, 156786) c6( ) c7(bM, T, ef, ea, e, eb, bB, fd, cL, ci, aR, x, dY, aE, dE, dv, M, dV, K, dQ, H, cN, dF, ex, eL, eN, dj, eG, dH, aW, az, fc, da, dg, aB, cJ, g, eE, eF, cm, eV, eM, dc, cj, cX, dW, m, du, eg, de, cZ, dt, dD, aw, cV, ez, fg, cQ, aj, ot, ee, eh, ai, eW, do, oc, ep, eT, cU, h, eV, dL, dU, ey, dd, db, dx, cY, A, fe, aq, dw, cM, bJ, ej, W, dC, cO, dB, eD, fa, at, el, en, eQ, dI, B, ek, L, bL, ed, dA, eR, dK, eX, ew, aA, cR, cz, v, j, bX, dp, V, q, J, o, er, eA, eJ, di, eO, dn, aT, dz, bK, ae, af, dl, eu, eC, Y, ev, r, eS, en, t, el, fi, dS, ck, cT, cK, cI, ac, dh, cG, dT, cS, dy, bt, eP, dM, df, em, bS, dG, ah, eq, ad, dZ, dP, av, ds, dk, dm, fb, et, cH, cW, ff, eH, eZ, dN, dq, aF, Z, bz, dr, eK, dR, es, eU, bE, dJ, dO, eB, dX, aS, cP, ei, y, fh); #c1(ABCA1) c2(XP_005251833) c3(ATP-binding cassette sub-family A member 1 isoform X4) c4(271201) c5( ) c6( ) c7(bM, T, ef, ea, e, eb, bB, fd, cL, ci, aR, x, dY, aE, dE, dv, M, dV, K, dQ, H, cN, dF, ex, eL, eN, dj, eG, dH, aW, az, fc, da, dg, aB, cJ, g, eE, eF, cm, eY, eM, dc, cj, cX, dW, m, du, eg, de, cZ, dt, dD, aw, cV, ez, fg, cQ, aj, ct, ee, eh, ai, eW, do, ec, ep, eT, cU, h, eV, dL, dU, ey, dd, db, dx, cY, A, fe, aq, dw, cM, bJ, ej, W, dC, cO, dB, eD, fa, at, el, en, eQ, dI, B, ek, L, bL, ed, dA, eR, dK, eX, ew, aA, cR, cz, v, j, bX, dp, V, q, J, o, er, eA, eJ, di, eO, dn, aT, dz, bK, ae, af, dl, eu, eC, Y, ev, r, eS, en, t, el, fi, dS, ck, cT, cK, cI, ac, dh, cG, dT, cS, dy, bt, eP, dM, df, em, bS, dG, ah, eq, ad, dZ, dP, av, ds, dk, dm, fb, et, cH, cW, ff, eH, eZ, dN, dq, aF, Z, bz, dr, eK, dR, es, eU, bE, dJ, dO, eB, dX, aS, cP, ei, y, fh); #c1(ABCA1) c2(XP_011516642) c3(ATP-binding cassette sub-family A member 1 isoform X1) c4( ) c5(310070, 310071, 310072, 310073, 310074) c6( ) c7(bM, T, ef, ea, e, eb, bB, fd, cL, ci, aR, x, dY, aE, dE, dv, M, dV, K, dQ, H, cN, dF, ex, eL, eN, dj, eG, dH, aW, az, fc, da, dg, aB, cJ, g, eE, eF, cm, eY, eM, dc, cj, cX, dW, m, du, eg, de, cZ, dt, dD, aw, ez, fg, cQ, aj, ct, ee, eh, ai, eW, do, ec, ep, eT, cU, h, eV, dL, dU, ey, dd, db, dx, cY, A, fe, aq, dw, cM, bJ, ej, W, dC, cO, dB, eD, fa, at, el, eo, eQ, dI, B, ek, L, bL, ed, dA, eR, dK, eX, ew, aA, cR, cz, v, j, bX, dp, V, q, J, o, er, eA, eJ, di, eO, dn, aT, dz, bK, ae, af, dl, eu, eC, Y, ev, r, eS, en, t, el, fi, dS, ck, cT, cK, cI, ac, dh, cG, dT, cS, dy, bt, eP, dM, df, em, bS, dG, ah, eq, ad, dZ, dP, av, ds, dk, dm, fb, et, cH, cW, ff, eH, eZ, dN, dq, aF, Z, bz, dr, eK, dR, es, eU, bE, dJ, dO, eB, dX, aS, cP, ei, y, fh); #c1(ABCA1) c2(XP_011516646) c3(ATP-binding cassette sub-family A member 1 isoform X7) c4( ) c5(310075) c6( ) c7(bM, T, ef, ea, e, eb, bB, fd, cL, ci, aR, x, dY, aE, dE, dv, M, dV, K, dQ, H, cN, dF, ex, eL, eN, dj, eG, dH, aW, az, fc, da, dg, aB, cJ, g, eE, eF, cm, eY, eM, dc, cj, cX, dW, m, du, eg, de, cZ, dt, dD, aw, cV, ez, fg, cQ, aj, ct, ee, eh, ai, eW, do, oc, ep, eT, cU, h, eV, dL, dU, ey, dd, db, dx, cY, A, fe, aq, dw, cM, bJ, ej, W, dC, cO, dB, eD, fa, at, el, en, eQ, dI, B, ek, L, bL, ed, dA, eR, dK, eX, ew, aA, cR, cz, v, j, bX, dp, V, q, J, o, er, eA, eJ, di, eO, dn, aT, dz, bK, ae, af, dl, eu, eC, Y, ev, r, eS, en, t, el, fi, dS, ck, cT, cK, cI, ac, dh, cG, dT, cS, dy, bt, eP, dM, df, em, bS, dG, ah, eq, ad, dZ, dP, av, ds, dk, dm, fb, et, cH, cW, ff, eH, eZ, dN, dq, aF, Z, bz, dr, eK, dR, es, eU, bE, dJ, dO, eB, dX, aS, cP, ei, y, fh); #c1(ABCA12) c2(NP_056472) c3(ATP-binding cassette sub-family A member 12 isoform b) c4(187662) c5(187663, 187664, 187665, 187666, 187667, 187668) c6( ) c7(fj, dD, fk, fm, Y, aW, ea, aT, cm, fn, fo, eq, K, fp, fl, af, dr); #c1(ABCA12) c2(NP_775099) c3(ATP-binding cassette sub-family A member 12 isoform a) c4(249508) c5(249509, 249510, 249511, 249512, 249513, 249514) c6( ) c7(fj, dD, fk, fm, Y, aW, ea, aT, cm, fn, fo, eq, K, fp, fl, af, dr); #c1(ABCA13) c2(NP_689914) c3(ATP-binding cassette sub-family A member 13) c4(244350) c5(244351, 244352, 244353, 244354, 244355, 244356) c6( ) c7(bS, fr, bK, ct, Z, fq); #c1(ABCA13) c2(XP_011513433) c3(ATP-binding cassette sub-family A member 13 isoform X2) c4( ) c5(305696) c6( ) c7(bS, fr, bK, ct, Z, fq); #c1(ABCA13) c2(XP_011513434) c3(ATP-binding cassette sub-family A member 13 isoform X3) c4(305697) c5(305698, 305699, 305700, 305701, 305702, 305703) c6( ) c7(bS, fr, bK, ct, Z, fq); #c1(ABCA2) c2(NP_001597) c3(ATP-binding cassette sub-family A member 2 isoform a) c4(119010, 119011, 119012) c5(119013, 119014, 119015, 119016, 119017, 119018, 119019, 119020, 119021, 119022, 119023, 119024) c6( ) c7(T, ft, af, dB, eZ, K, m, fu, cm, fs, B, aR); #c1(ABCA2) c2(NP_997698) c3(ATP-binding cassette sub-family A member 2 isoform b) c4(265689) c5(265690, 265691, 265692, 265693, 265694, 265695, 265696, 265697, 265698, 265699, 265700, 265701) c6( ) c7(T, ft, af, dB, eZ, K, m, fu, cm, fs, B, aR); #c1(ABCA2) c2(XP_006717059) c3(ATP-binding cassette sub-family A member 2 isoform X2) c4(290657) c5(290658, 290659, 290660, 290661, 290662, 290663) c6( ) c7(T, ft, af, dB, eZ, K, m, fu, cm, fs, B, aR); #c1(ABCA3) c2(NP_001080) c3(ATP-binding cassette sub-family A member 3) c4(38164, 38165) c5(38166, 38167, 38168, 38169, 38170, 38171, 38172, 38173, 38174, 38175, 38176, 38177) c6( ) c7(fE, fx, eM, bW, fG, bt, fz, fF, fH, fo, fw, fC, fI, fD, fA, fy, fv, fj, fB, aa); #c1(ABCA5) c2(NP_758424) c3(ATP-binding cassette sub-family A member 5) c4(249129, 249130) c5(249131, 249132, 249133, 249134, 249135, 249136, 249137, 249138, 249139, 249140, 249141, 249142) c6( ) c7(at, dL, X, an); #c1(ABCA6) c2(NP_525023) c3(ATP-binding cassette sub-family A member 6) c4(231172, 231173) c5(231174, 231175, 231176, 231177, 231178, 231179, 231180) c6( ) c7(at, dL, fJ); #c1(ABCA6) c2(XP_006721856) c3(ATP-binding cassette sub-family A member 6 isoform X3) c4( ) c5(294322, 294323, 294324, 294325, 294326) c6( ) c7(at, dL, fJ); #c1(ABCA7) c2(NP_061985) c3(ATP-binding cassette sub-family A member 7) c4(201763) c5(201764, 201765, 201766, 201767, 201768, 201769, 201770, 201771, 201772, 201773) c6( ) c7(fM, W, af, fN, at, dL, j, fL, y, V, fK); #c1(ABCA7) c2(XP_00 6722679) c3(ATP-binding cassette sub-family A member 7 isoform X3) c4(294827) c5( ) c6( ) c7(fM, W, af, fN, at, dL, j, fL, y, V, fK); #c1(ABCA7) c2(XP_011525937) c3(ATP-binding cassette sub-family A member 7 isoform X9) c4( ) c5(320342, 320343, 320344, 320345, 320346, 320347) c6( ) c7(fM, W, af, fN, at, dL, j, fL, y, V, fK); #c1(ABCA9) c2(NP_525022) c3(ATP-binding cassette sub-family A member 9) c4(231166) c5(231167, 231168, 231169, 231170, 231171) c6( ) c7(t, ac, m); #c1(ABCA9) c2(XP_005256994) c3(ATP-binding cassette sub-family A member 9 isoform X5) c4(27433) c5(27434, 27435, 27436, 27437, 27438, 27439) c6( ) c7(t, ac, m); #c1(ABCA9) c2(XP_006721696) c3(ATP-binding cassette sub-family A member 9 isoform X3) c4( ) c5(294242) c6( ) c7(t, ac, m); #c1(ABCA9) c2(XP_011522489) c3(ATP-binding cassette sub-family A member 9 isoform X4) c4(317127) c5(317128, 317129, 317130, 317131, 317132, 317133) c6( ) c7(t, ac, m); #c1(ABCB1) c2(NP_000918) c3(multidrug resistance protein 1) c4(17181, 17182, 17183, 17184, 17185) c5(17186, 17187, 17188, 17189, 17190, 17191, 17192, 17193, 17194, 17195, 17196, 17197, 17198, 17199, 17200, 17201, 17202, 17203, 17204, 17205, 17206, 17207, 17208, 17209, 17210, 17211, 17212, 17213, 17214) c6( ) c7(gh, T, bM, aC, fR, hV, fV, if, e, al, bO, fd, bB, cL, gf, gA, ci, aY, gF, aR, ip, x, bv, gJ, aE, gH, iI, iX, fS, M, dV, iv, ja, gs, K, hu, dQ, hH, eL, bc, hm, gr, eG, iE, aW, hC, az, hl, ih, hN, aB, g, ir, hJ, eF, cm, bw, iP, ix, y, fT, gt, eM, ii, iA, iT, go, cj, iS, k, m, gn, hh, eg, in, ik, gD, iu, fW, gL, gU, iB, gp, aw, ht, n, aj, fr, ct, cd, br, eW, ft, hw, oc, gd, ic, h, eV, hn, gl, hg, dL, hB, is, he, dx, fY, hi, ia, hT, gi, iw, ge, fQ, hQ, aq, fe, gG, cM, iN, cv, hq, in, gY, dB, hk, hL, hj, gw, hs, hR, at, gv, gg, bD, jd, it, B, bL, jc, fM, dA, iH, eR, hU, hx, eX, fZ, aA, cz, hy, v, j, hz, bX, iI, V, q, o, er, eA, ga, gM, hW, hb, aT, dz, gz, bK, jj, bq, hK, an, gS, ae, af, jf, gc, hM, iF, gP, s, iU, iZ, Y, ev, fO, r, iy, gm, en, hf, cl, gQ, t, ho, f, iK, bN, dS, ck, hY, iM, ac, iQ, hA, ig, hc, au, gX, fP, hr, hO, dy, ij, im, gT, bt, gO, ao, hS, gx, gV, hI, id, ie, aD, iW, ha, gN, bs, jh, iD, bS, ah, fu, iG, hF, gb, iJ, ad, hX, iC, fU, av, hd, fX, ib, ds, io, hD, iY, hP, ji, fb, iL, iz, hZ, gj, d, je, hG, cH, et, ff, gK, gC, eH, eZ, gI, gE, hp, gu, aF, iV, gW, Z, iR, bz, jb, jg, iq, bF, es, gk, bE, gR, dJ, X, eB, gZ, gy, gB, dX, hE, gq, hv); #c1(ABCB11) c2(NP_003733) c3(bile salt export pump) c4(140518) c5(140519, 140520, 140521, 140522, 140523, 140524, 140525) c6( ) c7(T, jv, jn, jl, jp, al, jx, n, jA, j, bX, jw, l, jm, F, u, jz, ju, jk, aT, jy, dL, jo, dF, bc, aW, fc, hI, dq, hN, aq, hJ, jt, js, t, dr, jq, gk, at, m, ei, B, jr); #c1(ABCB4) c2(NP_000434) c3(multidrug resistance protein 3 isoform A) c4(8945) c5(8946, 8947, 8948, 8949, 8950, 8951, 8952, 8953, 8954, 8955, 8956) c6( ) c7(jD, T, jv, jl, al, jC, jN, fd, n, j, jE, jG, bX, jO, hF, iI, jw, jF, by, x, l, jm, F, u, jL, aT, jH, jI, bK, bq, jJ, bc, jK, d, aW, hI, jB, hQ, hN, aq, hJ, t, ho, cm, jq, ck, gk, dB, cj, m, jM, hE, B, ao); #c1(ABCB4) c2(NP_061337) c3(multidrug resistance protein 3 isoform B) c4(200145) c5(200146, 200147, 200148, 200149, 200150, 200151, 200152, 200153, 200154, 200155, 200156, 200157, 200158, 200159, 200160, 200161, 200162, 200163, 200164, 200165, 200166, 200167, 200168, 200169, 200170, 200171, 200172, 200173, 200174, 200175, 200176, 200177, 200178, 200179, 200180, 200181, 200182, 200183, 200184, 200185, 200186, 200187, 200188, 200189, 200190, 200191, 200192, 200193, 200194, 200195, 200196, 200197, 200198, 200199, 200200, 200201, 200202, 200203, 200204, 200205, 200206, 200207, 200208, 200209, 200210, 200211, 200212, 200213, 200214, 200215, 200216, 200217, 200218, 200219, 200220, 200221, 200222, 200223, 200224, 200225, 200226, 200227, 200228, 200229, 200230, 200231, 200232, 200233, 200234, 200235, 200236, 200237, 200238, 200239, 200240, 200241, 200242, 200243, 200244, 200245, 200246, 200247, 200248, 200249, 200250, 200251, 200252, 200253, 200254, 200255, 200256, 200257, 200258, 200259, 200260, 200261, 200262, 200263, 200264, 200265, 200266, 200267, 200268, 200269, 200270, 200271, 200272, 200273, 200274, 200275, 200276, 200277, 200278, 200279, 200280, 200281, 200282, 200283, 200284, 200285, 200286, 200287, 200288, 200289, 200290, 200291, 200292, 200293, 200294, 200295, 200296, 200297, 200298, 200299, 200300, 200301, 200302, 200303, 200304, 200305, 200306, 200307, 200308, 200309, 200310, 200311, 200312, 200313, 200314, 200315, 200316, 200317, 200318, 200319, 200320, 200321, 200322, 200323) c6( ) c7(jD, T, jv, jl, al, jC, jN, fd, n, j, jE, jG, bX, jO, hF, iI, jw, jF, by, x, l, jm, F, u, jL, aT, jH, jI, bK, bq, jJ, bc, jK, d, aW, hI, jB, hQ, hN, aq, hJ, t, ho, cm, jq, ck, gk, dB, cj, m, jM, hE, B, ao); #c1(ABCB4) c2(NP_061338) c3(multidrug resistance protein 3 isoform C) c4(200324, 200325) c5(200326, 200327, 200328, 200329, 200330, 200331, 200332, 200333, 200334, 200335, 200336, 200337, 200338, 200339, 200340, 200341, 200342) c6( ) c7(jD, T, jv, jl, al, jC, jN, fd, n, j, jE, jG, bX, jO, hF, iI, jw, jF, by, x, l, jm, F, u, jL, aT, jH, jI, bK, bq, jJ, bc, jK, d, aW, hI, jB, hQ, hN, aq, hJ, t, ho, cm, jq, ck, gk, dB, cj, m, jM, hE, B, ao); #c1(ABCB4) c2(XP_011514616) c3(multidrug resistance protein 3 isoform X7) c4( ) c5(307306, 307307) c6( ) c7(jD, T, jv, jl, al, jC, jN, fd, n, j, jE, jG, bX, jO, hF, iI, jw, jF, by, x, l, jm, F, u, jL, aT, jH, jI, bK, bq, jJ, bc, jK, d, aW, hI, jB, hQ, hN, aq, hJ, t, ho, cm, jq, ck, gk, dB, cj, m, jM, hE, B, ao); #c1(ABCB5) c2(NP_001157413) c3(ATP-binding cassette sub-family B member 5 isoform 1) c4(62171) c5(62172, 62173, 62174, 62175, 62176, 62177, 62178, 62179, 62180, 62181, 62182, 62183) c6( ) c7(T, ha, jh, fd, n, v, j, ee, hF, x, aT, hH, iU, aW, Y, aq, cJ, iR, ck, cj, k, hE, bt, B); #c1(ABCB5) c2(NP_001157414) c3(ATP-binding cassette sub-family B member 5 isoform 3) c4( ) c5(62184, 62185, 62186, 62187, 62188) c6( ) c7(T, ha, jh, fd, n, v, j, ee, hF, x, aT, hH, iU, aW, Y, aq, cJ, iR, ck, cj, k, hE, bt, B); #c1(ABCB5) c2(NP_001157465) c3(ATP-binding cassette sub-family B member 5 isoform 4) c4(62224) c5(62225, 62226, 62227, 62228, 62229) c6( ) c7(T, ha, jh, fd, n, v, j, ee, hF, x, aT, hH, iU, aW, Y, aq, cJ, iR, ck, cj, k, hE, bt, B); #c1(ABCB5) c2(NP_848654) c3(ATP-binding cassette sub-family B member 5 isoform 2) c4(254088) c5( ) c6( ) c7(T, ha, jh, fd, n, v, j, ee, hF, x, aT, hH, iU, aW, Y, aq, cJ, iR, ck, cj, k, hE, bt, B); #c1(ABCB5) c2(XP_006715785) c3(ATP-binding cassette sub-family B member 5 isoform X2) c4(289789) c5(289790, 289791) c6( ) c7(T, ha, jh, fd, n, v, j, ee, hF, x, aT, hH, iU, aW, Y, aq, cJ, iR, ck, cj, k, hE, bt, B); #c1(ABCB6) c2(NP_005680) c3(ATP-binding cassette sub-family B member 6, mitochondrial) c4(158477, 158478, 158479) c5(158480, 158481, 158482, 158483, 158484, 158485, 158486, 158487, 158488, 158489, 158490, 158491, 158492, 158493, 158494, 158495, 158496, 158497) c6( ) c7(T, jW, ea, al, bB, fo, kb, ci, jY, ku, dV, aU, K, dF, eL, aW, hI, kt, cJ, eE, cm, jV, ki, m, cZ, dt, dD, gp, n, ko, kv, jX, ke, cc, h, dL, dd, kj, kw, jP, ks, aq, kp, kk, jT, kn, dB, B, fI, bL, ka, jx, aA, eA, ed, hb, jZ, aT, kf, kr, af, dl, kl, iU, Y, en, t, jU, dS, cK, kc, km, jQ, ao, jR, kh, ha, eq, hX, dP, ds, ff, aF, hp, iV, iR, bz, dr, jS, gk, kg, bE, kq, ei, hE, kd); #c1(ABCB7) c2(NP_001258625) c3(ATP-binding cassette sub-family B member 7, mitochondrial isoform 2) c4(96199, 96200) c5(96201, 96202, 96203, 96204, 96205, 96206) c6( ) c7(kx, ky, kB, kA, kz, kD, kC); #c1(ABCB7) c2(NP_001258626) c3(ATP-binding cassette sub-family B member 7, mitochondrial isoform 3) c4(96207) c5(96208, 96209, 96210, 96211, 96212, 96213) c6( ) c7(kx, ky, kB, kA, kz, kD, kC); #c1(ABCB7) c2(NP_001258627) c3(ATP-binding cassette sub-family B member 7, mitochondrial isoform 4) c4(96214, 96215) c5(96216, 96217, 96218, 96219, 96220, 96221, 96222, 96223, 96224, 96225, 96226, 96227) c6( ) c7(kx, ky, kB, kA, kz, kD, kC); #c1(ABCB7) c2(NP_004290) c3(ATP-binding cassette sub-family B member 7, mitochondrial isoform 1) c4(144887) c5(144888, 144889, 144890, 144891, 144892, 144893) c6( ) c7(kx, ky, kB, kA, kz, kD, kC); #c1(ABCB8) c2(NP_001269220) c3(ATP-binding cassette sub-family B member 8, mitochondrial isoform a) c4(100801, 100802) c5(100803, 100804, 100805, 100806, 100807, 100808, 100809, 100810, 100811, 100812, 100813, 100814) c6( ) c7(T, Y); #c1(ABCB8) c2(NP_001269221) c3(ATP-binding cassette sub-family B member 8, mitochondrial isoform c) c4(100815, 100816) c5(100817, 100818, 100819, 100820, 100821, 100822, 100823, 100824, 100825, 100826, 100827, 100828) c6( ) c7(T, Y); #c1(ABCB8) c2(NP_001269222) c3(ATP-binding cassette sub-family B member 8, mitochondrial isoform d) c4(100829) c5(100830, 100831, 100832, 100833, 100834, 100835) c6( ) c7(T, V); #c1(ABCB8) c2(NP_009119) c3(ATP-binding cassette sub-family B member 8, mitochondrial isoform b) c4(170823, 170824) c5(170825, 170826, 170827, 170828, 170829, 170830, 170831, 170832, 170833, 170834, 170835, 170836) c6( ) c7(T, Y); #c1(ABCB9) c2(NP_001229942) c3(ATP-binding cassette sub-family B member 9 isoform 6) c4(85520) c5(85521, 85522, 85523, 85524, 85525, 85526) c6( ) c7(eM); #c1(ABCB9) c2(NP_001229943) c3(ATP-binding cassette sub-family B member 9 isoform 5) c4( ) c5(85527, 85528, 85529, 85530, 85531, 85532) c6( ) c7(eM); #c1(ABCB9) c2(NP_062570) c3(ATP-binding cassette sub-family B member 9 isoform 2) c4(202005) c5(202006, 202007, 202008, 202009, 202010, 202011) c6( ) c7(eM); #c1(ABCB9) c2(NP_062571) c3(ATP-binding cassette sub-family B member 9 isoform 1) c4(202012, 202013, 202014) c5(202015, 202016, 202017, 202018, 202019, 202020, 202021, 202022, 202023, 202024, 202025, 202026, 202027, 202028, 202029, 202030, 202031, 202032, 202033, 202034) c6( ) c7(eM); #c1(ABCB9) c2(NP_982269) c3(ATP-binding cassette sub-family B member 9 isoform 4) c4(263241) c5(263242, 263243, 263244, 263245, 263246, 263247) c6( ) c7(eM); #c1(ABCC1) c2(NP_004987) c3(multidrug resistance-associated protein 1) c4(151717, 151718, 151719, 151720, 151721) c5(151722, 151723, 151724, 151725, 151726, 151727, 151728, 151729, 151730, 151731, 151732, 151733, 151734, 151735, 151736, 151737, 151738, 151739, 151740, 151741, 151742, 151743, 151744, 151745, 151746, 151747, 151748, 151749, 151750, 151751, 151752, 151753, 151754, 151755, 151756, 151757, 151758, 151759, 151760, 151761, 151762, 151763, 151764) c6( ) c7(bM, T, aC, bO, fd, bB, fo, ci, x, by, aE, dV, K, hu, eL, bc, kF, aW, as, g, eF, kJ, ir, cm, eM, cj, iS, m, k, gn, ik, gD, iu, dD, iB, ht, n, kM, fr, kO, ft, kI, kH, h, dL, ia, kE, kK, hQ, aq, cM, dB, hL, at, B, fI, aA, cz, hy, bX, q, er, eA, aT, ae, af, jf, gc, iU, iZ, Y, ev, r, en, hf, cl, t, kC, ho, hY, ck, iM, ac, gX, bt, ao, kG, hS, gV, hl, ha, jh, eq, hF, iJ, ad, kL, av, ib, fb, d, je, hG, ff, eH, cr, eZ, kD, aF, iR, bz, kN, dr, bE, gZ, y, X); #c1(ABCC1) c2(XP_011520799) c3(multidrug resistance-associated protein 1 isoform X1) c4(315808, 315809) c5( ) c6( ) c7(bM, T, aC, bO, fd, bB, fo, ci, x, by, aE, dV, K, hu, eL, bc, kF, aW, as, g, eF, kJ, ir, cm, eM, cj, iS, m, k, gn, ik, gD, iu, dD, iB, ht, n, kM, fr, kO, ft, kI, kH, h, dL, ia, kE, kK, hQ, aq, cM, dB, hL, at, B, fI, aA, cz, hy, bX, q, er, eA, aT, ae, af, jf, gc, iU, iZ, Y, ev, r, en, hf, cl, t, kC, ho, hY, ck, iM, ac, gX, bt, ao, kG, hS, gV, hl, ha, jh, eq, hF, iJ, ad, kL, av, ib, fb, d, je, hG, ff, eH, cr, eZ, kD, aF, iR, bz, kN, dr, bE, gZ, y, X); #c1(ABCC10) c2(NP_001185863) c3(multidrug resistance-associated protein 7 isoform MRP7) c4(76594) c5(76595, 76596, 76597, 76598, 76599, 76600) c6( ) c7(av, kP, eM, aW, kQ, aT, h, gA, hy, K, g); #c1(ABCC10) c2(NP_258261) c3(multidrug resistance-associated protein 7 isoform MRP7A) c4(228690) c5(228691, 228692, 228693, 228694, 228695, 228696) c6( ) c7(av, kP, eM, aW, kQ, aT, h, gA, hy, K, g); #c1(ABCC10) c2(XP_011513282) c3(multidrug resistance-associated protein 7 isoform X6) c4( ) c5(305551) c6( ) c7(av, kP, eM, aW, kQ, aT, h, gA, hy, K, g); #c1(ABCC11) c2(NP_115972) c3(ATP-binding cassette sub-family C member 11 isoform a) c4(225013) c5(225014, 225015, 225016, 225017, 225018, 225019, 225020, 225021, 225022, 225023, 225024, 225025, 225026, 225027) c6( ) c7(kV, bL, aj, v, C, kW, kY, J, ft, lg, ld, aT, K, jj, kU, H, ao, li, le, A, hG, aW, kX, lb, lh, la, eS, lc, bz, kR, ck, kT, y, iT, dh, cj, cX, dy, kZ, lf, bt, kS, hy, L); #c1(ABCC11) c2(NP_660187) c3(ATP-binding cassette sub-family C member 11 isoform b) c4(240489, 240490) c5(240491, 240492, 240493, 240494, 240495, 240496, 240497, 240498, 240499, 240500, 240501, 240502) c6( ) c7(kV, bL, aj, v, C, kW, kY, J, ft, lg, ld, aT, K, jj, kU, H, ao, li, le, A, hG, aW, kX, lb, lh, la, eS, lc, bz, kR, ck, kT, y, iT, dh, cj, cX, dy, kZ, lf, bt, kS, hy, L); #c1(ABCC12) c2(NP_150229) c3(multidrug resistance-associated protein 9) c4(227795, 227796, 227797, 227798, 227799, 227800) c5(227801, 227802, 227803, 227804, 227805, 227806, 227807, 227808, 227809, 227810, 227811, 227812, 227813, 227814, 227815, 227816, 227817, 227818, 227819, 227820, 227821, 227822, 227823, 227824, 227825, 227826, 227827, 227828, 227829, 227830, 227831, 227832, 227833, 227834, 227835, 227836) c6( ) c7(aW, aT); #c1(ABCC2) c2(NP_000383) c3(canalicular multispecific organic anion transporter 1) c4(8350) c5(8351, 8352, 8353, 8354, 8355, 8356) c6( ) c7(bL, gV, T, jv, fM, lk, aC, eR, fV, ha, jx, lr, it, ll, n, lj, jh, fr, ci, bX, lu, aY, jw, q, aR, av, gJ, F, ft, ib, aE, lt, jz, fS, jL, aT, h, dL, hg, jo, bq, bc, ln, ls, eG, hG, aW, Y, kK, hC, hI, eZ, r, fc, ff, lo, aF, lq, en, hf, lm, t, hJ, bz, g, iK, jq, es, iO, eM, iA, lp, go, lQ, X, gZ, at, dy, m, hE, bt, cB, B, y, hS); #c1(ABCC2) c2(XP_006717694) c3(canalicular multispecific organic anion transporter 1 isoform X3) c4( ) c5(291299, 291300, 291301, 291302, 291303, 291304) c6( ) c7(bL, gV, T, jv, fM, lk, aC, eR, fV, ha, jx, lr, it, ll, n, lj, jh, fr, ci, bX, lu, aY, jw, q, aR, av, gJ, F, ft, ib, aE, lt, jz, fS, jL, aT, h, dL, hg, jo, bq, bc, ln, ls, eG, hG, aW, Y, kK, hC, hI, eZ, r, fc, ff, lo, aF, lq, en, hf, lm, t, hJ, bz, g, iK, jq, es, iO, eM, iA, lp, go, kQ, X, gZ, at, dy, m, hE, bt, cB, B, y, hS); #c1(ABCC2) c2(XP_011537593) c3(canalicular multispecific organic anion transporter 1 isoform X2) c4(335186) c5( ) c6( ) c7(bL, gV, T, jv, fM, lk, aC, eR, fV, ha, jx, lr, it, ll, n, lj, jh, fr, ci, bX, lu, aY, jw, q, aR, av, gJ, F, ft, ib, aE, lt, jz, fS, jL, aT, h, dL, hg, jo, bq, bc, ln, ls, eG, hG, aW, Y, kK, hC, hI, eZ, r, fc, ff, lo, aF, lq, en, hf, lm, t, hJ, bz, g, iK, jq, es, iO, eM, iA, lp, go, kQ, X, gZ, at, dy, m, hE, bt, cB, B, y, hS); #c1(ABCC3) c2(NP_001137542) c3(canalicular multispecific organic anion transporter 2 isoform 2) c4(56007) c5(56008, 56009, 56010, 56011, 56012, 56013) c6( ) c7(T, aC, eR, aI, jh, aA, bB, n, cL, ci, bX, hF, q, o, eA, x, av, l, ft, ib, u, aE, lv, jL, aT, dL, hP, K, eL, bc, ls, d, je, s, hG, iE, aW, Y, kK, hC, hI, eH, r, eZ, aq, fc, aF, g, as, hJ, t, eF, bz, cm, iK, jq, ck, gk, iM, eM, dB, bE, cj, dy, k, lw, hE, bt, B, y); #c1(ABCC3) c2(NP_003777) c3(canalicular multispecific organic anion transporter 2 isoform 1) c4(140748, 140749) c5(140750, 140751, 140752, 140753, 140754, 140755, 140756, 140757, 140758, 140759, 140760, 140761) c6( ) c7(T, aC, eR, aI, jh, aA, bB, n, cL, ci, bX, hF, q, o, eA, x, av, l, ft, ib, u, aE, lv, jL, aT, dL, hP, K, eL, bc, ls, d, je, s, hG, iE, aW, Y, kK, hC, hI, eH, r, eZ, aq, fc, aF, g, as, hJ, t, eF, bz, cm, iK, jq, ck, gk, iM, eM, dB, bE, cj, dy, k, lw, hE, bt, B, y); #c1(ABCC3) c2(XP_011523725) c3(canalicular multispecific organic anion transporter 2 isoform X3) c4( ) c5(318184) c6( ) c7(T, aC, eR, aI, jh, aA, bB, n, cL, ci, bX, hF, q, o, eA, x, av, l, ft, ib, u, aE, lv, jL, aT, dL, hP, K, eL, bc, ls, d, je, s, hG, iE, aW, Y, kK, hC, hI, eH, r, eZ, aq, fc, aF, g, as, hJ, t, eF, bz, cm, iK, jq, ck, gk, iM, eM, dB, bE, cj, dy, k, lw, hE, bt, B, y); #c1(ABCC4) c2(NP_001098985) c3(multidrug resistance-associated protein 4 isoform 2) c4(41569) c5(41570, 41571, 41572, 41573, 41574, 41575) c6( ) c7(lD, aC, aA, n, gA, bX, aY, q, ad, dP, av, x, ft, ib, lz, aT, h, dL, H, ae, bc, ly, d, B, lE, hG, ev, ge, r, aF, g, iV, hJ, lA, cm, bz, lx, ck, kQ, bt, lF, at, aS, k, dy, lC, lB, it, X, L); #c1(ABCC4) c2(NP_001288758) c3(multidrug resistance-associated protein 4 isoform 3) c4(113979) c5(113980, 113981, 113982, 113983, 113984, 113985) c6( ) c7(lD, aC, aA, n, gA, bX, aY, q, ad, dP, av, x, ft, ib, lz, aT, h, dL, H, ae, bc, ly, d, B, lE, hG, ev, ge, r, aF, g, iV, hJ, lA, cm, bz, lx, ck, kQ, bt, IF, at, aS, k, dy, lC, lB, it, X, L); #c1(ABCC4) c2(NP_001288759) c3(multidrug resistance-associated protein 4 isoform 4) c4(113986, 113987) c5(113988, 113989, 113990, 113991, 113992, 113993) c6( ) c7(lD, aC, aA, n, gA, bX, aY, q, ad, dP, av, x, ft, ib, lz, aT, h, dL, H, ae, bc, ly, d, B, lE, hG, ev, ge, r, aF, g, iV, hJ, lA, cm, bz, lx, ck, kQ, bt, IF, at, aS, k, dy, lC, lB, it, X, L); #c1(ABCC4) c2(NP_005836) c3(multidrug resistance-associated protein 4 isoform 1) c4(159778) c5(159779, 159780, 159781, 159782, 159783, 159784, 159785, 159786, 159787, 159788, 159789, 159790) c6( ) c7(lD, aC, aA, n, gA, bX, aY, q, ad, dP, av, x, ft, ib, lz, aT, h, dL, H, ae, bc, ly, d, B, lE, hG, ev, ge, r, aF, g, iV, hJ, lA, cm, bz, lx, ck, kQ, bt, lF, at, aS, k, dy, lC, lB, it, X, L); #c1(ABCC5) c2(NP_001018881) c3(multidrug resistance-associated protein 5 isoform 2) c4(27570) c5(27571, 27572, 27573, 27574, 27575, 27576, 27577, 27578, 27579, 27580, 27581, 27582, 27583, 27584, 27585, 27586, 27587, 27588, 27589, 27590, 27591, 27592, 27593, 27594, 27595, 27596, 27597, 27598, 27599, 27800) c6( ) c7(aC, lH, ha, ci, bX, eA, eJ, ip, x, ft, cc, aE, gd, aT, lG, K, bc, d, aW, g, t, bz, eM, lI, bt, m, k, lJ, X); #c1(ABCC5) c2(NP_005679) c3(multidrug resistance-associated protein 5 isoform 1) c4(158453, 158454, 158455, 158456, 158457, 158458) c5(158459, 158460, 158461, 158462, 158463, 158464, 158465, 158466, 158467, 158468, 158469, 158470, 158471, 158472, 158473, 158474, 158475, 158476) c6( ) c7(aC, lH, ha, ci, bX, eA, eJ, ip, x, ft, cc, aE, gd, aT, lG, K, bc, d, aW, g, t, bz, eM, lI, bt, m, k, lJ, X); #c1(ABCC5) c2(XP_011510617) c3(multidrug resistance-associated protein 5 isoform X2) c4(301075) c5( ) c6( ) c7(aC, lH, ha, ci, bX, eA, eJ, ip, x, ft, cc, aE, gd, aT, lG, K, bc, d, aW, g, t, bz, eM, lI, bt, m, k, lJ, X); #c1(ABCC6) c2(NP_001072996) c3(URG7 protein isoform 2) c4(35547) c5(35548, 35549, 35550, 35551, 35552, 35553) c6( ) c7(bL, e, cz, aj, fo, j, jE, bX, eA, J, lK, lT, M, K, lQ, bc, hm, gc, lR, lL, ih, lP, eZ, jP, ax, dq, g, dr, lU, ck, lN, lO, dX, aS, lS, ei, lM, y, bt, fl); #c1(ABCC6) c2(XP_011520781) c3(multidrug resistance-associated protein 6 isoform X2) c4(315792) c5( ) c6( ) c7(bL, e, cz, aj, fo, j, jE, bX, eA, J, lK, lT, M, K, lQ, bc, hm, gc, lR, lL, ih, lP, eZ, jP, ax, dq, g, dr, lU, ck, lN, lO, dX, aS, lS, ei, lM, y, bt, fl); #c1(ABCC6) c2(XP_011520783) c3(multidrug resistance-associated protein 6 isoform X1) c4(315793) c5( ) c6( ) c7(bL, e, cz, aj, fo, j, jE, bX, eA, J, lK, lT, M, K, lQ, bc, hm, gc, lR, lL, ih, lP, eZ, jP, ax, dq, g, dr, lU, ck, lN, lO, dX, aS, lS, ei, lM, y, bt, fl); #c1(ABCC6) c2(XP_011520784) c3(multidrug resistance-associated protein 6 isoform X3) c4(315794) c5(315795, 315796, 315797, 315798, 315799, 315800) c6( ) c7(bL, e, cz, aj, fo, j, jE, bX, eA, J, lK, lT, M, K, lQ, bc, hm, gc, lR, lL, ih, lP, eZ, jP, ax, dq, g, dr, lU, ck, lN, lO, dX, aS, lS, ei, lM, y, bt, fl); #c1(ABCC6) c2(NP_000343) c3(ATP-binding cassette sub-family C member 8 isoform 2) c4(7431, 7432, 7433) c5(7434, 7435, 7436, 7437, 7438, 7439, 7440, 7441, 7442, 7443, 7444, 7445, 7446, 7447, 7448, 7449, 7450, 7451) c6( ) c7(kV, bL, eR, lV, e, ha, ml, aj, dG, v, mc, C, kY, cd, J, me, md, mj, mh, lg, ld, aT, jy, K, jo, jj, kU, H, af, ao, li, le, A, s, hG, aW, lW, kX, lb, lh, la, lY, aq, kp, mb, bz, dr, eK, ck, kT, y, ac, mi, ma, iT, bo, dh, mg, lZ, cj, lX, mf, dy, mk, ei, kZ, lf, kS, B, hv, L); #c1(ABCC8) c2(NP_001274103) c3(ATP-binding cassette sub-family C member 8 isoform 1) c4(106022) c5(106023, 106024, 106025, 106026, 106027, 106028) c6( ) c7(kV, bL, eR, lV, e, ha, ml, aj, dG, v, mc, C, kY, cd, J, me, md, mj, mh, lg, ld, aT, jy, K, jo, jj, kU, H, af, ao, li, le, A, s, hG, aW, lW, kX, lb, lh, la, lY, aq, kp, mb, bz, dr, eK, ck, kT, y, ac, mi, ma, iT, bo, dh, mg, lZ, cj, lX, mf, dy, mk, ei, kZ, lf, kS, B, hv, L); #c1(ABCC9) c2(NP_005682) c3(ATP-binding cassette sub-family C member 9 isoform SUR2A) c4(158512, 158513) c5(158514, 158515, 158516, 158517, 158518, 158519, 158520, 158521, 158522, 158523, 158524, 158525) c6( ) c7(mr, ms, e, aw, cV, cz, mw, bS, gf, ct, mp, cd, dP, cc, mm, af, hm, mu, mq, mo, Z, my, mx, hL, gZ, mt, mn); #c1(ABCC9) c2(NP_064693) c3(ATP-binding cassette sub-family C member 9 isoform SUR2B) c4(203465, 203466) c5(203467, 203468, 203469, 203470, 203471, 203472) c6( ) c7(mr, ms, e, aw, cV, cz, mw, bS, gf, ct, mp, cd, dP, cc, mm, af, hm, mu, mq, mo, Z, my, mx, hL, gZ, mt, mn); #c1(ABCC9) c2(XP_005253347) c3(ATP-binding cassette sub-family C member 9 isoform X5) c4( ) c5(272430, 272431, 272432, 272433, 272434, 272435) c6( ) c7(mr, ms, e, aw, cV, cz, mw, bS, gf, ct, mp, cd, dP, cc, mm, af, hm, mu, mq, mo, Z, my, mx, hL, gZ, mt, mn); #c1(ABCD1) c2(NP_000024) c3(ATP-binding cassette sub-family D member 1) c4(225, 226, 227) c5(228, 229, 230, 231, 232, 233, 234, 235, 236, 237, 238, 239, 240, 241, 242, 243, 244, 245) c6( ) c7(cZ, T, dD, jx, cz, eq, ml, bX, mF, ee, mC, aR, x, aX, h, mL, K, dd, he, dF, af, mJ, mH, ao, iU, mD, mA, eZ, dq, mB, dr, mK, dR, ck, mG, U, mE, mz, my, fL, hh, jr); #c1(ABCD2) c2(XP_011536329) c3(ATP-binding cassette sub-family D member 2 isoform X1) c4(333673) c5(333674, 333675, 333676, 333677, 333678, 333679) c6( ) c7(mD, aW, U, aT, mL, dF, B); #c1(ABCD3) c2(XP_011540179) c3(ATP-binding cassette sub-family D member 3 isoform X3) c4( ) c5(338557, 338558, 338559, 338560, 338561, 338562) c6( ) c7(mD, dF, mL, ci); #c1(ABCD4) c2(NP_005041) c3(ATP-binding cassette sub-family D member 4) c4(152388) c5(152389, 152390, 152391, 152392, 152393, 152394, 152395, 152396, 152397, 152398, 152399, 152400) c6( ) c7(mD, mN, dF, mU, mM); #c1(ABCD4) c2(XP_005268010) c3(ATP-binding cassette sub-family D member 4 isoform X6) c4(281413) c5(281414, 281415, 281416, 281417, 281418, 281419) c6( ) c7(mD, mN, dF, mO, mM); #c1(ABCD4) c2(XP_006720286) c3(ATP-binding cassette sub-family D member 4 isoform X1) c4(293343) c5( ) c6( ) c7(mD, mN, dF, mU, mM); #c1(ABCE1) c2(NP_002931) c3(ATP-binding cassette sub-family E member 1) c4(133693, 133694) c5(133695, 133696, 133697, 133698, 133699, 133700, 133701, 133702, 133703, 133704, 133705, 133706) c6( ) c7(T, F, dA, hl, jh, h, ey, X, ad); #c1(ABCF1) c2(NP_001020262) c3(ATP-binding cassette sub-family F member 1 isoform a) c4(28399, 28400, 28401, 28402, 28403) c5(28404, 28405, 28406, 28407, 28408, 28409, 28410, 28411, 28412, 28413, 28414, 28415, 28416, 28417, 28418, 28419, 28420, 28421, 28422, 28423, 28424, 28425, 28426, 28427, 28428, 28429, 28430, 28431, 28432, 28433, 28434, 28435, 28436, 28437, 28438, 28439, 28440, 28441, 28442, 28443, 28444, 28445, 28446, 28447, 28448, 28449, 28450, 28451, 28452, 28453, 28454, 28455, 28456, 28457, 28458, 28459, 28460, 28461, 28462, 28463, 28464, 28465, 28466, 28467, 28468, 28469, 28470, 28471, 28472, 28473, 28474, 28475, 28476, 28477, 28478, 28479, 28480) c6( ) c7(ar, mR, mP, mQ, eZ, hD, fD); #c1(ABCF1) c2(NP_001081) c3(ATP-binding cassette sub-family F member 1 isoform b) c4(38178) c5(38179, 38180, 38181, 38182, 38183, 38184, 38185, 38186, 38187, 38188, 38189, 38190, 38191, 38192, 38193, 38194, 38195, 38196, 38197, 38198, 38199, 38200, 38201, 38202, 38203, 38204, 38205, 38206, 38207, 38208, 38209, 38210, 38211, 38212, 38213, 38214, 38215, 38216, 38217, 38218, 38219, 38220, 38221, 38222, 38223, 38224, 38225, 38226) c6( ) c7(ar, mR, mP, mu, eZ, hD, fD); #c1(ABCF2) c2(NP_005683) c3(ATP-binding cassette sub-family F member 2 isoform b) c4(1585266) c5(158527, 158528, 158529, 158530, 158531, 158532, 158533) c6( ) c7(T, hw, hL, g, ir, lu, el); #c1(ABCF2) c2(NP_009120) c3(ATP-binding cassette sub-family F member 2 isoform a) c4(170837, 170838, 170839) c5(170840, 170841, 170842, 170843, 170844, 170845, 170846, 170847, 170848, 170849, 170850, 170851, 170852, 170853, 170854, 170855, 170856) c6( ) c7(T, hw, hL, g, ir, lu, cl); #c1(ABCG1) c2(NP_004905) c3(ATP-binding cassette sub-family G member 1 isoform 4) c4(150684, 150685) c5(150686, 150687, 150688, 150689, 150690, 150691, 150692, 150693, 150694, 150695, 150695, 150697, 150698, 150699, 150700, 150701, 150702, 150703) c7(bL, dD, eR, ea, e, aw, cR, mS, j, eq, bX, ad, cF, ib, mW, dn, aT, dz, bK, dQ, mY, mV, ae, af, na, aa, mU, et, cH, aW, kp, f, mZ, dr, mX, W, nb, dT, aS, mT); #c1(ABCG1) c2(NP_05819 8) c3(ATP-binding cassette sub-family G member 1 isoform 2) c4(192667) c5(192668, 192669, 192670, 192671, 192672, 192673) c6( ) c7(bL, dD, eR, ea, e, aw, cR, mS, j, eq, bX, ad, cF, ib, mW, dn, aT, dz, bK, dQ, mY, mV, ae, af, na, aa, mU, et, cH, aW, kp, f, mZ, dr, mX, W, nb, dT, aS, mT); #c1(ABCG1) c2(NP_997057) c3(ATP-binding cassette sub-family G member 1 isoform 3) c4(265005) c5(265005, 265007, 265008, 265009, 265010, 265011) c6( ) c7(bL, dD, eR, ea, e, aw, cR, mS, j, eq, bX, ad, cF, ib, mW, dn, aT, dz, bK, dQ, mY, mV, ae, af, na, aa, mU, et, cH, aW, kp, f, mZ, dr, mX, W, nb, dT, aS, mT); #c1(ABCG1) c2(NP_997510) c3(ATP-binding cassette sub-family G member 1 isoform 5) c4(265572) c5(265573, 265574, 265575, 265576, 265577, 265578) c6( ) c7(bL, dD, eR, ea, e, aw, cR, mS, j, eq, bX, ad, cF, ib, mW, dn, aT, dz, bK, dQ, mY, mV, ae, af, na, aa, mU, et, cH, aW, kp, f, mZ, dr, mX, W, nb, dT, aS, mT); #c1(ABCG1) c2(NP_997512) c3(ATP-binding cassette sub-family G member 1 isoform 7) c4(265579) c5(265580, 265581, 265582, 265583, 265584, 265585) c6( ) c7(bL, dD, eR, ea, e, aw, cR, mS, j, eq, bX, ad, cF, ib, mW, dn, aT, dz, bK, dQ, mY, mV, ae, af, na, aa, mU, et, cH, aW, kp, f, mZ, dr, mX, W, nb, dT, aS, mT); #c1(ABCG1) c2(XP_01152810 8) c3(ATP-binding cassette sub-family G member 1 isoform X1) c4(323199) c5( ) c6( ) c7(bL, dD, eR, ea, e, aw, cR, mS, j, eq, bX, ad, cF, ib, mW, dn, aT, dz, bK, dQ, mY, mV, ae, af, na, aa, mU, et, cH, aW, kp, f, mZ, dr, mX, W, nb, dT, aS, mT); #c1(ABCG2) c2(NP_001244315) c3(ATP-binding cassette sub-family G member 2 isoform 2) c4(92132) c5(92133, 92134, 92135, 92136, 92137, 92138) c6( ) c7(ng, gh, T, aC, fV, ea, e, al, fd, nq, bB, gA, fo, ci, mF, aR, x, gJ, aE, M, K, H, dF, bc, eG, aW, g, lm, nr, hJ, cm, eM, nB, iT, nF, cj, nw, k, m, gD, iu, nD, dD, aw, n, fr, nA, nE, ee, cd, ft, no, cc, eT, gd, h, lG, nm, ni, cY, nP, ny, kK, fe, aq, kp, nN, jq, nu, W, bP, dB, nj, gw, mE, nL, nz, cB, B, fl, it, L, bL, fM, nx, aA, hy, v, j, V, nt, q, eA, kx, nc, nv, hb, ns, aT, cy, bq, ae, ne, af, eu, nn, s, nO, iU, Y, fO, r, lo, gm, en, hf, t, nC, f, iK, ck, nM, ac, nG, np, im, bt, ao, gV, nI, ha, jh, iD, eq, hF, ad, kL, iC, av, nH, l, ib, nd, nl, iY, lQ, fb, nJ, iL, iz, d, lR, hG, ff, nh, nK, nf, cr, aF, nk, iV, bz, dr, iq, es, gk, nb, bE, aS, i, hE, X, nQ); #c1(ABCG2) c2(NP_004818) c3(ATP-binding cassette sub-family G member 2 isoform 1) c4(150033) c5(150034, 150035, 150036, 150037, 150038, 150039) c6( ) c7(ng, gh, T, aC, fV, ea, e, al, fd, nq, bB, gA, fo, ci, mF, aR, x, gJ, aE, M, K, H, dF, bc, eG, aW, g, lm, nr, hJ, cm, eM, nB, iT, nF, cj, nw, k, m, gD, iu, nD, dD, aw, n, fr, nA, nE, ee, cd, ft, no, cc, eT, gd, h, lG, nm, ni, cY, nP, ny, kK, fe, aq, kp, nN, jq, nu, W, bP, dB, nj, gw, mE, nL, nz, cB, B, fl, it, L, bL, fM, nx, aA, hy, v, j, V, nt, q, eA, kx, nc, nv, hb, ns, aT, cy, bq, ae, ne, af, eu, nn, s, nO, iU, Y, fO, r, lo, gm, en, hf, t, nC, f, iK, ck, nM, ac, nG, np, im, bt, ao, gV, nl, ha, jh, iD, eq, hF, ad, kL, iC, av, nH, l, ib, nd, nl, iY, lQ, fb, nJ, iL, iz, d, lR, hG, ff, nh, nK, nf, cr, aF, nk, iV, bz, dr, iq, es, gk, nb, bE, aS, i, hE, X, nQ); #c1(ABCG4) c2(NP_001135977) c3(ATP-binding cassette sub-family G member 4) c4(53916) c5(53917, 53918, 53919, 53920, 53921, 53922, 53923, 53924, 53925, 53926, 53927, 53928, 53929, 53930) c6( ) c7(cH, eq, dD, af); #c1(ABCG5) c2(NP_071881) c3(ATP-binding cassette sub-family G member 5) c4(212049) c5(212050, 212051, 212052, 212053, 212054, 212055) c6( ) c7(dD, ea, e, n, j, eq, nS, ad, jF, l, nV, u, oc, bq, dQ, af, nU, cH, Y, da, hJ, dC, nR, nT, ei); #c1(ABCG5) c2(XP_011531328) c3(ATP-binding cassette sub-family G member 5 isoform X4) c4(327327, 327328) c5(327329, 327330, 327331, 327332, 327333, 327334) c6( ) c7(dD, ea, e, n, j, eq, nS, ad, jF, l, nV, u, oc, bq, dQ, af, nU, cH, Y, da, hJ, dC, nR, nT, ei); #c1(ABCG5) c2(XP_011531330) c3(ATP-binding cassette sub-family G member 5 isoform X7) c4( ) c5(327335, 327336, 327337, 327338, 327339, 327340) c6( ) c7(dD, ea, e, n, j, eq, nS, ad, jF, l, nV, u, oc, bq, dQ, af, nU, cH, Y, da, hJ, dC, nR, nT, ei); #c1(ABCG8) c2(NP_071882) c3(ATP-binding cassette sub-family G member 8) c4(212056) c5(212057, 212058, 212059, 212060, 212061, 212062) c6( ) c7(bL, nZ, dD, ea, e, n, dG, j, eq, nS, jF, l, u, ec, lt, nX, io, dL, bq, dQ, hB, eu, cH, nY, da, S, hJ, W, dC, nR, nW, nT, ei); #c1(ABHD12) c2(NP_001035937) c3(monoacylglycerol lipase ABHD12 isoform a) c4(33485, 33486) c5(33487, 33488, 33489, 33490, 33491, 33492, 33493, 33494, 33495, 33496, 33497, 33498) c6( ) c7(nk, ob, oa, U, nw, oc); #c1(ABHD12) c2(NP_056415) c3(monoacylglycerol lipase ABHD12 isoform b) c4(187504) c5(187505, 187506, 187507, 187508, 187509, 187510) c6( ) c7(nk, ob, oa, U, nw, oc); #c1(ABHD12) c2(XP_005260756) c3(monoacylglycerol lipase ABHD12 isoform X3) c4( ) c5(276862, 276863, 276864, 276865, 276866, 276867) c6( ) c7(nk, ob, oa, U, nw, oc); #c1(ABHD12) c2(XP_011527516) c3(monoacylglycerol lipase ABHD12 isoform X2) c4(322337) c5( ) c6( ) c7(nk, ob, oa, U, nw, oc); #c1(ABHD12B) c2(NP_001193602) c3(abhydrolase domain-containing protein 12B isoform a) c4(82348) c5(82349, 82350, 82351, 82352, 82353, 82354) c6( ) c7(fq); #c1(ABHD12B) c2(NP_861535) c3(abhydrolase domain-containing protein 12B isoform c) c4(255664) c5(255665, 255666, 255667, 255668, 255669, 255670) c6( ) c7(fq); #c1(ABHD12B) c2(XP_005267413) c3(abhydrolase domain-containing protein 12B isoform X3) c4( ) c5(280972, 280973, 280974, 280975, 280976) c6( ) c7(fq); #c1(ABHD12B) c2(XP_011534776) c3(abhydrolase domain-containing protein 12B isoform X5) c4(331223) c5(331224) c6( ) c7(fq); #c1(ABHD16A) c2(NP_001170986) c3(abhydrolase domain-containing protein 16A isoform b) c4(69648, 69649) c5(69650, 69651, 69652, 69653, 69654, 69655, 69656, 69657, 69658, 69659, 69660, 69661, 69662, 69663, 69664, 69665, 69666, 69667, 69668, 69669, 69670, 69671, 69672, 69673, 69674, 69675, 69676, 69677, 69678, 69679, 69680, 69681, 69682, 69683, 69684, 69685, 69686, 69687, 69688, 69689, 69690, 69691, 69692, 69693, 69694, 69695, 69696, 69697, 69698, 69699, 69700, 69701, 69702, 69703, 69704, 69705, 69706, 69707, 69708, 69709, 69710, 69711, 69712, 69713, 69714, 69715, 69716, 69717, 69718, 69719, 69720, 69721, 69722, 69723, 69724, 69725) c6( ) c7(lf, y, iQ, od, eZ); #c1(ABHD16A) c2(NP_066983) c3(abhydrolase domain-containing protein 16A isoform a) c4(207966, 207967, 207968) c5(207969, 207970, 207971, 207972, 207973, 207974, 207975, 207976, 207977, 207978, 207979, 207980, 207981, 207982, 207983, 207984, 207985, 207986, 207987, 207988, 207989, 207990, 207991, 207992, 207993, 207994, 207995, 207996, 207997, 207998, 207999, 208000, 208001, 208002, 208003, 208004, 208005, 208006, 208007, 208008, 208009, 208010, 208011, 208012, 208013, 208014, 208015, 208016, 208017) c6( ) c7(lf, y, iQ, od, eZ); #c1(ABHD17B) c2(NP_001020951) c3(alpha/beta hydrolase domain-containing protein 17B isoform 2 precursor) c4(29116) c5(29117, 29118, 29119, 29120, 29121, 29122, 29123, 29124) c6(29125, 29126) c7(oe); #c1(ABHD17B) c2(NP_057098) c3(alpha/beta hydrolase domain-containing protein 17B isoform 1 precursor) c4(188898) c5(188899, 188900, 188901, 188902, 188903, 188904, 188905, 188906) c6(188907, 188908) c7(oe); #c1(ABHD2) c2(XP_005254890) c3(abhydrolase domain-containing protein 2 isoform X1) c4(273369) c5(273370, 273371, 273372, 273373, 273374, 273375, 273376, 273377, 273378, 273379) c6( ) c7(of, e); #c1(ABHD5) c2(NP_057090) c3(1-acylglycerol-3-phosphate O-acyltransferase ABHD5) c4(188883) c5(188884, 188885, 188886, 188887, 188888, 188889) c6( ) c7(ok, d, ol, fc, oj, fn, oh, v, cP, du, oi, og, cd, dr); #c1(ABHD6) c2(NP_065727) c3(monoacylglycerol lipase ABHD6) c4(205077, 205078) c5(205079, 205080, 205081, 205082, 205083, 205084, 205085, 205086, 205087, 205088, 205089, 205090, 205091, 205092, 205093, 205094, 205095, 205096, 205097, 205098, 205099, 205100, 205101, 205102, 205103, 205104, 205105, 205106) c6( ) c7(bL, om, v); #c1(ABHD6) c2(XP_005265392) c3(monoacylglycerol lipase ABHD6 isoform X2) c4(279525, 279526) c5( ) c6( ) c7(bL, om, v); #c1(ABI1) c2(NP_001012768) c3(abl interactor 1 isoform b) c4(25268, 25269) c5(25270, 25271, 25272, 25273, 25274, 25275, 25276, 25277, 25278, 25279, 25280, 25281) c6( ) c7(ck, ac, iZ, oo, aW, bt, aT, r, n, ey, ci, m, t, on, q); #c1(ABI1) c2(NP_001012769) c3(abl interactor 1 isoform c) c4(25282) c5(25283, 25284, 25285, 25286, 25287, 25288) c6( ) c7(ck, ac, iZ, oo, aW, bt, aT, r, n, ey, ci, m, t, on, q); #c1(ABI1) c2(NP_001012770) c3(abl interactor 1 isoform d) c4(25289) c5(25290, 25291, 25292, 25293, 25294, 25295) c6( ) c7(ck, ac, iZ, oo, aW, bt, aT, r, n, ey, ci, m, t, on, q); #c1(ABI1) c2(NP_001171587) c3(abl interactor 1 isoform e) c4(70656) c5(70657, 70659, 70660, 70661, 70662) c6( ) c7(ck, ac, iZ, oo, aW, bt, aT, r, n, ey, ci, m, t, on, q); #c1(ABI1) c2(NP_001171590) c3(abl interactor 1 isoform f) c4(70670) c5(70671, 70672, 70673, 70674, 70675, 70676) c6( ) c7(ck, ac, iZ, oo, aW, bt, aT, r, n, ey, ci, m, t, on, q); #c1(ABI1) c2(NP_001171591) c3(abl interactor 1 isoform g) c4(70677) c5(70678, 70679, 70680, 70681, 70682, 70683) c6( ) c7(ck, ac, iZ, oo, aW, bt, aT, r, n, ey, ci, m, t, on, q); #c1(ABI1) c2(NP_001171592) c3(abl interactor 1 isoform h) c4(70684) c5(70685, 70686, 70687, 70688 70689, 70690) c6( ) c7(ck, ac, iZ, oo, aW, bt, aT, r, n, ey, ci, m, t, on, q); #c1(ABI1) c2(NP_001171593) c3(abl interactor 1 isoform i) c4(70691) c5(70692, 70693, 70694, 71695, 70696, 70697) c6( ) c7(ck, ac, iZ, oo, aW, bt, aT, r, n, ey, ci, m, t, on, q); #c1(ABI1) c2(NP_001171594) c3(abl interactor 1 isoform j) c4(70698) c5(70699, 70700, 70701, 70702, 70703, 70704) c6( ) c7(ck, ac, iZ, oo, aW, bt, aT, r, n, ey, ci, m, t, on, q); #c1(ABI1) c2(NP_001171596) c3(abl interactor 1 isoform 1) c4(70705) c5(70706, 70707, 70708, 70709, 70710, 70711) c6( ) c7(ck, ac, iZ, oo, aW, bt, aT, r, n, ey, ci, m, t, on, q); #c1(ABI1) c2(NP_005461) c3(abl interactor 1 isoform a) c4(156369, 156370) c5(156371, 156372, 156373, 156374, 156375, 156376, 156377, 156378, 156379, 156380, 156381, 156382) c6( ) c7(ck, ac, iZ, oo, aW, bt, aT, r, n, ey, ci, m, t, on, q); #c1(ABI1) c2(XP_005252390) c3(abl interactor 1 isoform X4) c4(271683) c5(271684, 271685, 271686, 271687, 271688, 271689) c6( ) c7(ck, ac, iZ, oo, aW, bt, aT, r, n, ey, ci, m, t, on, q); #c1(ABI2) c2(NP_001269854) c3(abl interactor 2 isoform a) c4(102955, 102956, 102957) c5(102958, 102959, 102960, 102961, 102962, 102963, 102964, 102965, 102966, 102967, 102968, 102969, 102970, 102971, 102972, 102973, 102974, 102975) c6( ) c7(dY, op, iU); #c1(ABI2) c2(NP_001269855) c3(abl interactor 2 isoform b) c4(102976) c5(102977, 102978, 102979, 102980, 102981, 102982) c6( ) c7(dY, op, iU); #c1(ABI2) c2(NP_001269856) c3(abl interactor 2 isoform d) c4(102983) c5(102984, 102985, 102986, 102987, 102988, 102989) c6( ) c7(dY, op, iU); #c1(ABI2) c2(NP_005750) c3(abl interactor 2 isoform c) c4(158989) c5(158990, 158991, 158992, 158993, 158994, 158995) c6( ) c7(dY, op, iU); #c1(ABI2) c2(XP_0052426282) c3(abl interactor 2 isoform X11) c4(267008, 267009) c5(267010, 267011, 267012, 267013, 267014, 267015, 267016, 267017, 267018, 267019, 267020, 267021) c6( ) c7(dY, op, iU); #c1(ABI3) c2(NP_001128658) c3(ABI gene family member 3 isoform 2) c4(50454) c5(50455, 50456, 50457, 50458, 50459, 50460) c6( ) c7(bE, T, bz, ci, nB); #c1(ABI3) c2(NP_057512) c3(ABI gene family member 3 isoform 1) c4(191193) c5(191194, 191195, 191196, 191197, 191198, 191199) c6( ) c7(bE, T, bz, ci, nB); #c1(ABI3BP) c2(NP_056244) c3(target of Nesh-SH3 precursor) c4(186683) c5(186684, 186685, 186686, 186687, 186688, 186689, 186690, 186691) c6(186692, 186693) c7(dP, av, oq, hd, T, cA, nB, aw, j, ci, bz); #c1(ABI3BP) c2(XP_005247340) c3(target of Nesh-SH3 isoform X4) c4(267812) c5(267813, 267814, 267815, 267816, 267817, 267818, 267819, 267820) c6(267821, 267822) c7(dP, av, oq, hd, T, cA, nB, aw, j, ci, bz); #c1(ABI3BP) c2(XP_005247366) c3(target of Nesh-SH3 isoform X50) c4(267823) c5(267824, 267825, 267826, 267827, 267828, 267829, 267830) c6(267831, 267832) c7(dP, av, oq, hd, T, cA, nB, aw, j, ci, bz); #c1(ABI3BP) c2(XP_011510949) c3(target of Nesh-SH3 isoform X22) c4( ) c5(301415) c6( ) c7(dP, av, oq, hd, T, cA, nB, aw, j, ci, bz); #c1(ABI3BP) c2(XP_011510959) c3(target of Nesh-SH3 isoform X44) c4(30140) c5(301417, 301418, 301419, 301420, 301421, 301422, 301423, 301424) c6(301425, 301426) c7(dP, av, oq, hd, T, nB, aw, j, ci, bz); #c1(ABI3BP) c2(XP_011510961) c3(target of Nesh-SH3 isoform X46) c4( ) c5(301427) c6( ) c7(dP, av, oq, hd, T, cA, nB, aw, j, ci, bz); #c1(ABL1) c2(NP_005148) c3(tyrosine-protein kinase ABL1 isoform a) c4(153388, 153389, 153390) c5(153391, 153392, 153393, 153394, 153395, 153396, 153397, 153398, 153399, 153400, 153401, 153402, 153403, 153404, 153405, 153406, 153407, 153408) c6( ) c7(oO, T, os, fR, pf, fd, oJ, x, oB, pp, oG, K, hu, or, pk, oP, pr, aW, g, bw, ou, iT, oy, U, cj, k, m, gn, gp, ht, oE, n, oY, pn, eW, br, pe, oC, oN, h, hn, ox, pj, on, pi, oS, aq, po, pm, oU, bP, pg, ph, oM, fM, dA, oD, ol, v, pd, q, er, eA, oT, aT, dz, oF, an, ae, af, iU, oV, r, lo, hf, t, f, pb, ok, ov, pa, nM, iM, dT, oX, bt, ps, hl, ow, aD, oA, jh, oR, oZ, pI, oH, oL, hF, ad, av, hd, fX, ot, oz, oW, hD, fb, pq, iL, d, je, et, kD, bz, oK, eU, pc, oQ, kS, iu); #c1(ABL1) c2(NP_009297) c3(tyrosine-protein kinase ABL1 isoform b) c4(171806, 171807) c5(171808, 171809, 171810, 171811, 171812, 171813, 171814, 171815, 171816, 171817, 171818, 171819) c6( ) c7(oO, T, os, fR, pf, fd, oJ, x, oB, pp, oG, K, hu, or, pk, oP, pr, aW, g, bw, ou, iT, oy, U, cj, k, m, gn, gp, ht, oE, n, oY, pn, eW, br, pe, oC, oN, h, hn, ox, pj, on, pi, oS, aq, po, pm, oU, bP, pg, ph, oM, fM, dA, oD, oI, v, pd, q, er, eA, oT, aT, dz, oF, an, ae, af, iU, oV, r, lo, hf, t, f, pb, ck, ov, pa, nM, iM, dT, oX, bt, ps, hl, ow, aD, oA, jh, oR, oZ, pI, oH, oL, hF, ad, av, hd, fX, ot, oz, oW, hD, fb, pq, iL, d, je, et, kD, bz, oK, eU, pc, oQ, kS, iu); #c1(ABL2) c2(NP_001129472) c3(Abelson tyrosine-protein kinase 2 isoform d) c4(51540) c5(51541, 51542, 51543, 51544, 51545, 51546) c6( ) c7(T, j, ci, pz, ad, py, aT, h, K, jj, ae, af, iU, aW, ff, kp, en, px, pt, fq, ck, pv, pu, z, pw, bt); #c1(ABL2) c2(NP_001129473) c3(Abelson tyrosine-protein kinase 2 isoform e) c4(51547) c5(51548, 51549, 51550, 51551, 51552, 51553) c6( ) c7(T, j, ci, pz, ad, py, aT, h, K, jj, ae, af, iU, aW, ff, kp, en, px, pt, fq, ck, pv, pu, z, pw, bt); #c1(ABL2) c2(NP_001161708) c3(Abelson tyrosine-protein kinase 2 isoform f) c4(65835) c5(65836, 65837, 65838, 65839, 65840, 65841) c6( ) c7(T, j, ci, pz, ad, py, aT, h, K, jj, ae, af, iU, aW, ff, kp, en, px, pt, fq, ck, pv, pu, z, pw, bt); #c1(ABL2) c2(NP_001161709) c3(Abelson tyrosine-protein kinase 2 isoform g) c4(65842) c5(65843, 65844, 65845, 65846, 65847, 65848) c6( ) c7(T, j, ci, pz, ad, py, aT, h, K, jj, ae, af, iU, aW, ff, kp, en, px, pt, fq, ck, pv, pu, z, pw, bt); #c1(ABL2) c2(NP_001161710) c3(Abelson tyrosine-protein kinase 2 isoform h) c4(65849) c5(65850, 65851, 65852, 65853, 65854, 65855) c6( ) c7(T, j, ci, pz, ad, py, aT, h, K, jj, ae, af, iU, aW, ff, kp, en, px, pt, fq, ck, pv, pu, z, pw, bt); #c1(ABL2) c2(NP_001161711) c3(Abelson tyrosine-protein kinase 2 isoform i) c4(65856) c5(65857, 65858, 65859, 65860, 65861, 65862) c6( ) c7(T, j, ci, pz, ad, py, aT, h, K, jj, ae, af, iU, aW, ff, kp, en, px, pt, fq, ck, pv, pu, z, pw, bt); #c1(ABL2) c2(NP_005149) c3(Abelson tyrosine-protein kinase 2 isoform c) c4(153409) c5(153410, 153411, 153412, 153413, 153414, 153415) c6( ) c7(T, j, ci, pz, ad, py, aT, h, K, jj, ae, af, iU, aW, ff, kp, en, px, pt, fq, ck, pv, pu, z, pw, bt); #c1(ABL2) c2(NP_09298) c3(Abelson tyrosine-protein kinase 2 isoform b) c4(171820) c5(171821, 171822, 171823, 171824, 171825, 171826) c6( ) c7(T, j, ci, pz, ad, py, aT, h, K, jj, ae, af, iU, aW, ff, kp, en, px, pt, fq, ck, pv, pu, z, pw, bt); #c1(ABL2) c2(XP_005245145) c3(Abelson tyrosine-protein kinase 2 isoform X1) c4(266325) c5(266326, 266327, 266328, 266329, 266330, 266331) c6( ) c7(T, j, ci, pz, ad, py, aT, h, K, jj, ae, af, iU, aW, ff, kp, en, px, pt, fq, ck, pv, pu, z, pw, bt); #c1(ABLIM1) c2(NP_001003407) c3(actin-binding LIM protein 1 isoform b) c4(19823, 19824, 19825) c5(19826, 19827, 19828, 19829, 19830, 19831, 19832, 19833, 19834, 19835, 19836, 19837, 19838, 19839, 19840, 19841, 19842) c6( ) c7(bL, T, A, cz, j, y, lB); #c1(ABLIM1) c2(NP_001003408) c3(actin-binding LIM protein 1 isoform c) c4(19843) c5(19844, 19845, 19846, 19847, 19848, 19849, 19850, 19851) c6( ) c7(bL, T, A, cz, j, y, lB); #c1(ABLIM1) c2(NP_002304) c3(actin-binding LIM protein 1 isoform a) c4(127425, 127426, 127427) c5(127428, 127429, 127430, 127431, 127432, 127433, 127434, 127435, 127436, 127437, 127438, 127439, 127440) c6( ) c7(bL, T, A, cz, j, y, lB); #c1(ABLIM1) c2(NP_006711) c3(actin-binding LIM protein 1 isoform s) c4(167330, 167331) c5(167332, 167333, 167334, 167335, 167336, 167337, 167338, 167339, 167340, 167341) c6( ) c7(bL, T, A, cz, j, y, lB); #c1(ABLIM1) c2(XP_005269881) c3(actin-binding LIM protein 1 isoform X10) c4(282954) c5(282955, 282956, 282957, 282958, 282959, 282960) c6( ) c7(bL, T, A, cz, j, y, lB); #c1(ABLIM1) c2(XP_005269885) c3(actin-binding LIM protein 1 isoform X14) c4(282961) c5(282962, 282963, 282964, 282965, 282966) c6( ) c7(bL, T, A, cz, j, y, lB); #c1(ABLIM1) c2(XP_005269887) c3(actin-binding LIM protein 1 isoform X15) c4( ) c5(282967, 282968, 282969, 282970, 282971, 282972, 282973, 282974, 282975, 282976, 282977) c6( ) c7(bL, T, A, cz, j, y, lB); #c1(ABLIM1) c2(XP_006717901) c3(actin-binding LIM protein 1 isoform X4) c4(291386, 291387) c5( ) c6( ) c7(bL, T, A, cz, j, y, lB); #c1(ABLIM1) c2(XP_006717909) c3(actin-binding LIM protein 1 isoform X11) c4( ) c5(291388, 291389, 291390, 291391, 291392) c6( ) c7(bL, T, A, cz, j, y, lB); #c1(ABLIM1) c2(XP_011538103) c3(actin-binding LIM protein 1 isoform X1) c4(335668) c5(335669, 335670, 335671, 335672, 335673, 335674, 335675, 335676, 335677, 335678, 335679, 335680) c6( ) c7(bL, T, A, cz, j, y, lB); #c1(ABLIM1) c2(XP_011538105) c3(actin-binding LIM protein 1 isoform X5) c4( ) c5(335681, 335682, 335683, 335684, 335685, 335686) c6( ) c7(bL, T, A, cz, j, y, lB); #c1(ABLIM1) c2(XP_011538106) c3(actin-binding LIM protein 1 isoform X7) c4(335687) c5(335688) c6( ) c7(bL, T, A, cz, j, y, lB); #c1(ABLIM1) c2(XP_011538107) c3(actin-binding LIM protein 1 isoform X8) c4( ) c5(335689) c6( ) c7(bL, T, A, cz, j, y, lB); #c1(ABLIM1) c2(XP_011538108) c3(actin-binding LIM protein 1 isoform X9) c4(335690) c5(335691) c6( ) c7(bL, T, A, cz, j, y, lB); #c1(ABLIM2) c2(NP_001123555) c3(actin-binding LIM protein 2 isoform 1) c4(47537, 47538) c5(47539, 47540, 47541, 47542, 47543, 47544, 47545, 47546, 47547, 47548, 47549, 47550) c6( ) c7(j, ad); #c1(ABLIM2) c2(NP_001123556) c3(actin-binding LIM protein 2 isoform 2) c4(47551) c5(47552, 47553, 47554, 47555, 47556, 47557) c6( ) c7(j, ad); #c1(ABLIM2) c2(NP_001123557) c3(actin-binding LIM protein 2 isoform 3) c4(47558, 47559, 47560) c5(47561, 47562, 47563, 47564, 47565, 47566, 47567, 47568, 47569, 47570, 47571, 47572, 47573, 47574, 47575, 47576, 47577, 47578) c6( ) c7(j, ad); #c1(ABLIM2) c2(NP_001123558) c3(actin-binding LIM protein 2 isoform 4) c4(47579) c5(47580, 47581, 47582, 47583, 47584, 47585) c6( ) c7(j, ad); #c1(ABLIM2) c2(NP_001123559) c3(actin-binding LIM protein 2 isoform 5) c4(47586, 47587) c5(47588, 47589, 47590, 47591, 47592, 47593, 47594, 47595, 47596, 47597, 47598, 47599) c6( ) c7(j, ad); #c1(ABLIM2) c2(NP_001123560) c3(actin-binding LIM protein 2 isoform 7) c4(47600) c5(47601, 47602, 47603, 47604, 47605, 47606) c6( ) c7(j, ad); #c1(ABLIM2) c2(NP_001273617) c3(actin-binding LIM protein 2 isoform 8) c4(105449) c5(105450, 105451, 105452, 105453, 105454, 105455, 105456, 105457, 105458) c6( ) c7(j, ad); #c1(ABLIM2) c2(NP_115808) c3(actin-binding LIM protein 2 isoform 6) c4(224010) c5(224011, 224012, 224013, 224014, 224015, 224016) c6( ) c7(j, ad); #c1(ABLIM2) c2(XP_011511887) c3(actin-binding LIM protein 2 isoform X10) c4( ) c5(302603) c6( ) c7(j, ad); #c1(ABO) c2(NP_065202) c3(histo-blood group ABO system transferase) c4(204568) c5(204569, 204570, 204571, 204572, 204573, 204574) c6( ) c7(bM, T, qn, go, aC, ea, e, fd, qj, ci, aE, pX, M, dV, K, eL, aa, dH, aW, hC, az, fc, kt, pD, aB, pL, bw, fT, gr, cj, m, eg, pJ, qm, dD, pG, pA, aw, aj, pM, pU, cd, qg, pN, qI, h, dL, pI, A, aq, mo, cA, lf, mg, pV, qq, it, gc, bL, pF, qd, pQ, aA, cz, v, j, qf, J, jZ, qp, aT, qv, qk, dl, eu, qw, pR, en, t, qs, bN, ck, pH, pa, pO, ac, pZ, pS, dy, ao, hl, id, pY, qb, jN, eq, qi, hF, pW, ad, kL, hX, oz, qh, oW, hD, nJ, cH, cW, qt, ff, aF, pT, Z, bz, qa, qe, pE, ag, pP, gZ, dX, aS, qu, ei, pK, pB, y, pC); #c1(ABR) c2(NP_001153218) c3(active breakpoint cluster region-related protein isoform c) c4(60550) c5( ) c6( ) c7(jf, T, dD, qz, ea, mG, qx, hl, qy, aq, eq, K, aR, ad); #c1(ABR) c2(NP_001243776) c3(active breakpoint cluster region-related protein isoform d) c4(91696) c5(91697, 91698, 91699, 91700, 91701, 91702) c6( ) c7(jf, T, dD, qz, ea, mG, qx, hl, qy, aq, eq, K, aR, ad); #c1(ABR) c2(NP_001286078) c3(active breakpoint cluster region-related protein isoform e) c4(100389) c5(100390, 100391, 100392, 100393, 100394, 100395) c6( ) c7(jf, T, dD, qz, ea, mG, qx, hl, qy, aq, eq, K, aR, ad); #c1(ABR) c2(NP_068781) c3(active breakpoint cluster region-related protein isoform a) c4(210541) c5(210542, 210543, 210544, 210545, 210546, 210547, 210548, 210549, 210550, 210551, 210552, 210553, 210554) c6( ) c7(jf, T, dD, qz, ea, mG, qx, hl, qy, aq, eq, K, aR, ad); #c1(ABR) c2(XP_011522113) c3(active breakpoint cluster region-related protein isoform X1) c4( ) c5(316747, 316748, 316749, 316750, 316751) c6( ) c7(jf, T, dD, qz, ea, mG, qx, hl, qy, aq, eq, K, aR, ad); #c1(ABRA) c2(NP_631905) c3(actin-binding Rho-activating protein) c4(238282) c5(238283, 238284, 238285, 238286, 238287, 238288) c6( ) c7(W, fq, K, mx); #c1(ABT1) c2(NP_037507) c3(activator of basal transcription 1) c4(175910) c5(175911, 175912, 175913, 175914, 175915, 175916, 175917, 175918) c6( ) c7(eZ, aA); #c1(ACAA1) c2(NP_001123882) c3(3-ketoacyl-CoA thiolase, peroxisomal isoform b) c4(47955) c5(47956, 47957, 47958, 47959, 47980, 47981, 47982, 47983, 47984, 47985, 47986, 47987, 47988) c6( ) c7(bL, z, r, cS, aL, qA, bq, dF, q); #c1(ACAA1) c2(NP_001598) c3(3-ketoacyl-CoA thiolase, peroxisomal isoform a) c4(119025, 119026, 119027) c5(119028, 119029, 119030, 119031, 119032, 119033, 119034, 119035, 119036, 119037, 119038, 119039) c6( ) c7(bL, z, r, cS, aL, qA, bq, dF, q); #c1(ACAA1) c2(XP_006713186) c3(3-ketoacyl-CoA thiolase, peroxisomal isoform X3) c4( ) c5(287051, 287052, 287053, 287054, 287055) c6( ) c7(bL, z, r, cS, aL, qA, bq, dF, q); #c1(ACAA1) c2(XP_011531952) c3(3-ketoacyl-CoA thiolase, peroxisomal isoform X2) c4(327982) c5( ) c6( ) c7(bL, z, r, cS, aL, qA, bq, dF, q); #c1(ACAA2) c2(NP_006102) c3(3-ketoacyl-CoA thiolase, mitochondrial) c4(161894) c5(161895, 161896, 161897, 161898, 161899, 161900) c6( ) c7(bL, dF, qA); #c1(ACACA) c2(NP_942131) c3(acetyl-CoA carboxylase 1 isoform 1) c4(260494, 260495, 260496) c5(260497, 260498, 260499, 260500, 260501, 260502, 260503, 260504, 260505, 260506, 260507, 260508, 260509, 260510, 260511, 260512, 260513, 260514, 260515, 260516, 260517, 260518, 260519, 260520, 260521, 260522, 260523, 260524, 260525, 260526, 260527, 260528, 260529, 260530, 260531, 260532, 260533, 260534, 2600535) c6( ) c7(bL, T, eR, aD, qB, fF, bB, n, cL, bS, j, ci, v, aY, o, ad, hX, qC, dP, qH, ft, ib, qK, aT, iv, jy, qG, dQ, qD, ae, qE, hm, iU, nO, cH, aW, fc, iw, cr, qL, eZ, fe, my, t, fq, ck, qJ, qI, cO, bE, m, qF, i, B, hS); #c1(ACACA) c2(NP_942134) c3(acetyl-CoA carboxylase 1 isoform 3) c4(260536) c5(260537, 2600538, 2600539, 2600540, 2600541, 2600542, 2600543, 2600544) c6( ) c7(bL, T, eR, aD, qB, fF, bB, n, cL, bS, j, ci, v, aY, o, ad, hX, qC, dP, qH, ft, ib, qK, aT, iv, jy, qG, dQ, qD, ae, qE, hm, iU, nO, cH, aW, fc, iw, cr, qL, eZ, fe, my, t, fq, ck, qJ, qI, cO, bE, m, qF, B, hS); #c1(ACACA) c2(XP_006721916) c3(acetyl-CoA carboxylase 1 isoform X1) c4(294398, 294399) c5(294400, 294401) c6( ) c7(bL, T, eR, aD, qB, fF, bB, n, cL, bS, j, ci, v, aY, o, ad, hX, qC, dP, qH, ft, ib, qK, aT, iv, jy, qG, dQ, qD, ae, qE, hm, iU, nO, cH, aW, fc, iw, cr, qL, eZ, fe, my, t, fq, ck, qJ, qI, cO, bE, m, qF, i, B, hS); #c1(ACACA) c2(XP_006725383) c3(acetyl-CoA carboxylase 1 isoform X2) c4(296804, 296805) c5( ) c6( ) c7(bL, T, eR, aD, qB, fF, bB, n, cL, bS, j, ci, v, aY, o, ad, hX, qC, dP, qH, ft, ib, qK, aT, iv, jy, qG, dQ, qD, ae, qE, hm, iU, nO, cH, aW, fc, iw, cr, qL, eZ, fe, my, t, fq, ck, qJ, qI, cO, bE, m, qF, i, B, hS); #c1(ACACA) c2(XP_011523003) c3(acetyl-CoA carboxylase 1 isoform X3) c4(31742) c5( ) c6( ) c7(bL, T, eR, aD, qB, fF, bB, n, cL, bS, j, ci, v, aY, o, ad, hX, qC, dP, qH, ft, ib, qK, aT, iv, jy, qG, dQ, qD, ae, qE, hm, iU, nO, cH, aW, fc, iw, cr, qL, eZ, fe, my, t, fq, ck, qJ, qI, cO, bE, m, qF, i, B, hS); #c1(ACACA) c2(XP_011523005) c3(acetyl-CoA carboxylase 1 isoform X4) c4(317463, 317464, 317465) c5(317466, 317467, 317468, 317469, 317470) c6( ) c7(bL, T, eR, aD, qB, fF, bB, n, bS, j, ci, v, aY, o, ad, hX, qC, dP, qH, ft, ib, qK, aT, iv, jy, qG, dQ, qD, ae, qE, hm, iU, nO, cH, aW, fc, iw, cr, qL, eZ, fe, my, t, fq, ck, qJ, qI, cO, bE, m, qF, i, B, hS); #c1(ACACA) c2(XP_011523006) c3(acetyl-CoA carboxylase 1 isoform X5) c4( ) c5(317471, 317472, 317473, 317474, 317475, 317476, 317477, 317478, 317479, 317480, 317481, 317482, 317483, 317484, 317485, 317486, 317487, 317488, 317489, 317490, 317491) c6( ) c7(bL, T, eR, aD, qB, fF, bB, n, cL, bS, j, ci, v, aY, o, ad, hX, qC, dP, qH, ft, ib, qK, aT, iv, jy, qG, dQ, qD, ae, qE, hm, iU, nO, cH, aW, fc, iw, cr, qL, eZ, fe, my, t, fq, ck, qJ, qI, cO, bE, m, qF, i, B, hS); #c1(ACACB) c2(XP_01153564) c3(acetyl-CoA carboxylase 2 isoform X1) c4(334039, 334040, 334041) c5(334042, 334043, 334044, 334045, 334046, 334047, 334048, 334049, 334050, 334051) c6( ) c7(bL, cH, if, qK, fc, aj, v, dy, ci, qM, ei, dQ, qN, af, J); #c1(ACACB) c2(XP_011536565) c3(acetyl-CoA carboxylase 2 isoform X2) c4(334052, 334053) c5(334054, 334055, 334056, 334057, 334058, 334059) c6( ) c7(bL, cH, if, qK, fc, aj, v, dy, ci, qM, ei, dQ, qN, af, J); #c1(ACACB) c2(XP_011536566) c3(acetyl-CoA carboxylase 2 isoform X4) c4( ) c5(334060, 334061, 334062, 334063, 334064, 334065, 334066, 334067, 334068, 334069, 334070, 334071) c6( ) c7(bL, cH, if, qK, fc, aj, v, dy, ci, qM, ei, dB, qN, af, J); #c1(ACACB) c2(XP_011536567) c3(acetyl-CoA carboxylase 2 isoform X5) c4( ) c5(334072, 334073, 334074, 334075, 334076, 334077) c6( ) c7(bL, cH, if, qK, fc, aj, v, dy, ci, qM, ei, dQ, qN, af, J); #c1(ACAD10) c2(NP_001130010) c3(acyl-CoA dehydrogenase family member 10 isoform a) c4(52419, 52420) c5(52421, 52422, 52423, 52424, 52425, 52426, 52427, 52428, 52429, 52430, 52431, 52432) c6( ) c7(bL, qO, ht, AT); #c1(ACAD10) c2(NP_079523) c3(acyl-CoA dehydrogenase family member 10 isoform b) c4(218576, 218577, 218578) c5(218579, 218580, 218581, 218582, 218583, 218584, 218585, 218586, 218587, 218588, 218589, 218590, 218591, 218592, 218593, 218594, 218595, 218596) c6( ) c7(bL, qO, ht, aT); #c1(ACAD8) c2(NP_055199) c3(isobutyryl-CoA dehydrogenase, mitochondrial) c4(179733, 179734, 179735) c5(179736, 179737, 179738, 179739, 179740, 179741, 179742, 179743, 179744, 179745, 179746, 179747, 179748, 179749, 179750, 179751, 179752) c6( ) c7(bL, T, qX, qP, qT, qQ, aA, aj, v, qW, ai, q, J, oz, ju, qV, qU, ji, K, qk, af, A, qZ, qS, qY, cr, r, fe, hp, iV, dr, bN, ag, gX, ra, y, qR); #c1(ACAD8) c2(XP_005271558) c3(isobutyryl-CoA dehydrogenase, mitochondrial isoform X2) c4(283473) c5(283474, 283475, 283476, 283477, 283478, 283479) c6( ) c7(bL, T, qX, qP, qT, qQ, aA, aj, v, qW, ai, q, J, oz, ju, qV, qU, ji, K, qk, af, A, qZ, qS, qY, cr, r, fe, hp, iV, dr, bN, ag, gX, ra, y, qR); #c1(ACAD8) c2(XP_011541052) c3(isobutyryl-CoA dehydrogenase, mitochondrial isoform X1) c4( ) c5(339576) c6( ) c7(bL, T, qX, qP, qT, qQ, aA, aj, v, qW, ai, q, J, oz, ju, qV, qU, ji, K, qk, af, A, qZ, qS, qY, cr, r, fe, hp, iV, dr, bN, ag, gX, ra, y, qR); #c1(ACAD9) c2(NP_054768) c3(acyl-CoA dehydrogenase family member 9, mitochondrial) c4(177711) c5(177712, 177713, 177714, 177715, 177716, 177717, 177718, 177719, 177720, 177721, 177722, 177723, 177724) c6( ) c7(dd, cZ, aM, rb); #c1(ACAD9) c2(XP_011511044) c3(acyl-CoA dehydrogenase family member 9, mitochondrial isoform X1) c4(301467) c5( ) c6( ) c7(dd, cZ, aM, rb); #c1(ACADL) c2(NP_001599) c3(long-chain specific acyl-CoA dehydrogenase, mitochondrial precursor) c4(119040) c5(119041, 119042, 119043, 119044, 119045, 119046) c6( ) c7(bo, K); #c1(ACADS) c2(NP_000008) c3(short-chain specific acyl-CoA dehydrogenase, mitochondrial isoform 1 precursor) c4(22) c5(23, 24, 25, 26, 27, 28) c6( ) c7(bL, b, oj, bK, K, ei, i, rc); #c1(ACADSB) c2(NP_001600) c3(short/branched chain specific acyl-CoA dehydrogenase, mitochondrial precursor) c4(119047, 119048) c5(119049, 119050, 119051, 119052, 119053, 119054, 119055, 119056, 119057, 119058, 119059, 119060) c6( ) c7(aW, cz, aT, aj, re, dQ, rd, B, qa, bN); #c1(ACADVL) c2(NP_000009) c3(very long-chain specific acyl-CoA dehydrogenase, mitochondrial isoform 1 precursor) c4(29, 30) c5(31, 32, 33, 34, 35, 36, 37, 38, 39, 40, 41, 42, 43, 44, 45, 46) c6( ) c7(iv, cc, hl, rf); #c1(ACADVL) c2(NP_001029031) c3(very long-chain specific acyl-CoA dehydrogenase, mitochondrial isoform 2 precursor) c4(30736) c5(30737, 30738, 30739, 30740, 30741, 30742) c6( ) c7(iv, cc, hl, rf); #c1(ACADVL) c2(NP_001257376) c3(very long-chain specific acyl-CoA dehydrogenase, mitochondrial isoform 3) c4(95268) c5(95269, 95270, 95271, 95272, 95273, 95274) c6( ) c7(iv, cc, hl, rf); #c1(ACAN) c2(NP_001126) c3(aggrecan core protein isoform 1 precursor) c4(49214) c5(49215, 49216, 49217, 49218, 49219, 49220, 49221, 49222) c6( ) c7(rt, oq, kh, dD, pG, ea, rr, eq, rm, rj, ai, rw, rn, rl, ld, ry, rC, rg, rD, rB, K, rE, rz, rv, af, A, rh, rs, bQ, pL, bN, rq, ru, ri, rx, ro, R, rF, y, rA, ik, rk, rp); #c1(ACAN) c2(NP_037359) c3(aggrecan core protein isoform 2 precursor) c4(174979, 174980, 174981) c5(174982, 174983, 174984, 174985, 174986, 174987, 174988, 174989, 174990, 174991, 174992, 174993, 174994, 174995, 174996, 174997, 174998, 174999, 175000, 175001, 175002, 175003, 175004) c6( ) c7(rt, oq, kh, dD, pG, ea, rr, eq, rm, rj, ai, rw, rn, rl, ld, ry, rC, rg, rD, rB, K, rE, rz, rv, af, A, rh, rs, bQ, pL, bN, rq, ru, ri, rx, ro, R, rF, y, rA, ik, rk, rp); #c1(ACAN) c2(XP_006720482) c3(aggrecan core protein isoform X1) c4( ) c5(293523) c6( ) c7(rt, oq, kh, dD, pG, ea, rr, eq, rm, rj, ai, rw, rn, rl, ld, ry, rC, rg, rD, rB, K, rE, rz, rv, af, A, rh, rs, bQ, pL, bN, rq, ru, ri, rx, ro, R, rF, y, rA, ik, rk, rp); #c1(ACAN) c2(XP_011519616) c3(aggrecan core protein isoform X3) c4(314276) c5(314277, 314278, 314279, 314280, 314281, 314282, 314283, 314284) c6( ) c7(rt, oq, kh, dD, pG, ea, rr, eq, rm, rj, ai, rw, rn, rl, ld, ry, rC, rg, rD, rB, K, rE, rz, rv, af, A, rh, rs, bQ, pL, bN, rq, ru, ri, rx, ro, R, rF, y, rA, ik, rk, rp); #c1(ACAT1) c2(NP_000010) c3(acetyl-CoA acetyltransferase, mitochondrial precursor) c4(47) c5(48, 49, 50, 51, 52, 53) c6( ) c7(T, dD, rG, eR, ea, rQ, rl, cz, ah, ci, eq, rP, eA, ad, nV, rJ, aT, rN, rO, dQ, ae, af, rL, rM, cm, mO, ac, cO, qA, rH, rK, bC, B); #c1(ACAT2) c2(NP_001290182) c3(acetyl-CoA acetyltransferase, cytosolic isoform 2) c4(115107) c5(115108, 115109, 115110, 115111, 115112, 115113) c6( ) c7(iu, l, u, cH, aq, v, qA, j, fr, iV, dQ, B, ad); #c1(ACAT2) c2(NP_005882) c3(acetyl-CoA acetyltransferase, cytosolic isoform 1) c4(160092) c5(160093, 160094, 160095, 160096, 160097, 160098) c6( ) c7(iu, l, u, cH, aq, v, qA, j, fr, iV, dQ, B, ad); #c1(ACBD3) c2(NP_073572) c3(Golgi resident protein GCP60) c4(212896) c5(212897, 212898, 212899, 212900, 212901, 212902) c6( ) c7(eV, iW, rR, eX); #c1(ACBD4) c2(NP_001129176) c3(acyl-CoA-binding domain-containing protein 4 isoform 1) c4(51108) c5(51109, 51110, 51111, 51112, 51113, 51114, 51115, 51116, 51117, 51118) c6( ) c7(oe); #c1(ACBD4) c2(NP_001129179) c3(acyl-CoA-binding domain-containing protein 4 isoform 3) c4(51119) c5(51120, 51121, 51122, 51123, 51124, 51125, 51126) c6( ) c7(oe); #c1(ACBD4) c2(NP_078998) c3(acyl-CoA-binding domain-containing protein 4 isoform 2) c4(216523) c5(216524, 216525, 216526, 216527, 216528, 216529) c6( ) c7(oe); #c1(ACBD4) c2(XP_011523558) c3(acyl-CoA-binding domain-containing protein 4 isoform X2) c4( ) c5(318064) c6( ) c7(oe); #c1(ACBD5) c2(NP_001035938) c3(acyl-CoA-binding domain-containing protein 5 isoform 2) c4(33499) c5(33500) c6( ) c7(nx, hq); #c1(ACBD5) c2(NP_001258441) c3(acyl-CoA-binding domain-containing protein 5 isoform 3) c4( ) c5(96075, 96076, 96077, 96078, 96079, 96080) c6( ) c7(nx, hq); #c1(ACBD5) c2(NP_001288182) c3(acyl-CoA-binding domain-containing protein 5 isoform 4) c4(113682) c5(113683, 113684, 113685, 113686, 113687) c6( ) c7(nx, hq); #c1(ACBD5) c2(NP_001288183) c3(acyl-CoA-binding domain-containing protein 5 isoform 5) c4(113688) c5(113689, 113690, 113691, 113692, 113693) c6( ) c7(nx, hq); #c1(ACBD5) c2(NP_663736) c3(acyl-CoA-binding domain-containing protein 5 isoform 1) c4(241523) c5(241524, 241525, 241526, 241527, 241528, 241529) c6( ) c7(nx, hq); #c1(ACBD5) c2(XP_000717593) c3(acyl-CoA-binding domain-containing protein 5 isoform X2) c4(291217) c5(291218, 291219, 291220, 291221, 291222, 291223) c6( ) c7(nx, hq); #c1(ACBD5) c2(XP_006717594) c3(acyl-CoA-binding domain-containing protein 5 isoform X3) c4(291224, 291225) c5(291226, 291227, 291228, 291229, 291230, 291231, 291232, 291233, 291234, 291235, 291236, 291237, 291238) c6( ) c7(nx, hq); #c1(ACBD5) c2(XP_006717598) c3(acyl-CoA-binding domain-containing protein 5 isoform X1) c4(291239) c5(291240, 291241, 291242, 291243, 291244) c6( ) c7(nx, hq); #c1(ACBD5) c2(XP_011518061) c3(acyl-CoA- binding domain-containing protein 5 isoform X5) c4( ) c5(312106) c6( ) c7(nx, hq); #c1(ACBD6) c2(NP_115736) c3(acyl-CoA-binding domain-containing protein 6) c4(223752) c5(223753, 223754, 223755, 223756, 223757, 223758) c6( ) c7(oe, nA); #c1(ACCS) c2(NP_115981) c3(1-aminocyclopropane-1-carboxylate synthase-like protein 1) c4(225071, 225072, 225073, 225074) c5(225075, 225076, 225077, 225078, 225079, 225080, 225081, 225082, 225083, 225084, 225085, 225086, 225087, 225088, 225089, 225090, 225091, 225092, 225093, 225094, 225095) c6( ) c7(T, rS, qK, ff, h, j, fr, en, hm); #c1(ACCS) c2(XP_005253227) c3(1-aminocyclopropane-1-carboxylate synthase-like protein 1 isoform X1) c4( ) c5(272287, 272288) c6( ) c7(T, rS, qK, ff, h, j, fr, en, hm); #c1(ACCS) c2(XP_011518708) c3(1-aminocyclopropane-1-carboxylate synthase-like protein 1 isoform X2) c4( ) c5(313127) c6( ) c7(T, rS, qK, ff, h, j, fr, en, hm); #c1(ACD) c2(NP_001075955) c3(adrenocortical dysplasia protein homolog isoform 1) c4(37279) c5(37280, 37281, 37282, 37283, 37284, 37285) c6( ) c7(bL, sc, T, rV, aG, e, fr, M, aT, rX, h, aa, sb, Y, rU, rY, rZ, ac, rT, rW, cj, sa, B); #c1(ACD) c2(NP_001075956) c3(adrenocortical dysplasia protein homolog isoform 3) c4( ) c5(37286, 37287) c6( ) c7(bL, sc, T, rV, aG, e, fr, M, aT, rX, h, aa, sb, Y, rU, rY, rZ, ac, rT, rW, cj, sa, B); #c1(ACD) c2(NP_075065) c3(adrenocortical dysplasia protein homolog isoform 2) c4(213641) c5(213642, 213643, 213644, 213645, 213646, 213647) c6( ) c7(bL, sc, T, rV, aG, e, fr, M, aT, rX, h, aa, sb, Y, rU, rY, rZ, ac, rT, rW, cj, sa, B); #c1(ACE) c2(NP_000780) c3(angiotensin-converting enzyme isoform 1 precursor) c4(15665, 15666, 15667) c5(15668, 15669, 15670, 15671, 15672, 15673, 15674, 15675, 15676, 15677, 15678, 15679, 15680, 15681, 15682, 15683, 15684, 15685) c6( ) c7(uB, T, uK, ea, bO, ci, aY, ui, aE, rw, dV, hu, hH, aa, wp, uY, vs, tU, iA, wE, lS, vF, fy, uL, cE, sr, wi, vE, vX, ht, sh, cQ, aj, ww, cd, tD, td, vM, sW, lG, ey, uc, mR, sp, vu, go, sm, f e, hq, vU, se, vL, E, mT, jv, cz, aA, bX, wy, nS, q, oT, tL, vz, tF, cy, jj, sR, sX, dI, eu, bA, wr, su, bf, fO, iy, sV, lo, uU, pb, tI, tR, sk, cT, rR, vK, tW, ua, ac, ig, hr, tz, sx, bt, ao, gV, wi, tS, iW, uG, jh, sJ, mw, dG, uu, fu, sg, tO, ad, wD, tX, wv, vJ, tT, oW, lQ, uN, wm, vP, qZ, ue, cH, cW, ff, tZ, tv, iV, bz, uP, ag, oQ, lC, lf, tJ, bM, vS, if, e, bB, cL, ur, ss, sD, ub, vV, ws, vh, fS, bc, uM, eG, up, dH, sP, hl, kt, pD, sz, mZ, vA, mx, vy, tV, tG, wx, dD, gU, wu, n, uE, md, sd, do, ec, eV, mV, hi, mU, A, fJ, ty, vo, sE, sf, jq, dC, cA, hL, tl, at, ut, en, tm, fL, sZ, B, tq, vQ, ul, tf, dA, mr, wL, eX, fF, ti, vv, v, V, gM, wN, rS, sy, sl, ld, ae, to, tN, hM, tn, tA, vT, vR, uh, sK, vk, ck, vW, gX, hO, sL, vi, dM, vG, uj, eq, od, vc, uD, sj, mu, d, wc, th, un, Z, dr, bF, D, gk, ll, wz, gZ, y, kS, sC, sH, pC, fR, vf, al, I, qj, gF, wa, tg, wM, bW, M, vg, ta, K, wt, wF, aB, g, ve, uC, uy, U, uo, vn, uf, uH, sQ, sw, aw, pM, eh, fK, tB, vC, vd, wb, uV, sq, gi, tx, wd, cM, ar, kT, W, uk, wl, wk, bo, mg, gg, lB, L, wj, ug, fG, oe, jx, wo, uZ, mS, j, vp, sl, il, uW, J, o, hb, nX, bq, kl, Y, r, wl, tu, en, wA, tj, sn, tY, hc, dh, tM, uS, cS, dy, fD, sY, aZ, uO, bS, ah, gb, vN, sB, dP, fU, sN, vB, tt, vl, tH, uX, lR, tb, vj, cr, si, iR, qa, dR, sG, ei, sT, vt, st, tQ, wH, eb, sA, fw, aR, dY, iI, qM, dQ, eN, tE, tw, hm, aW, eM, wK, wB, sU, sv, uJ, pw, vl, tp, wh, ct, qN, vY, ai, cc, wG, ql, h, jy, dL, ux, mY, db, he, vx, wn, wC, aq, mo, gG, dw, op, mX, tk, vD, sF, uw, vb, bm, uz, te, va, bD, um, bL, eR, dK, uv, sM, cR, ft, tC, C, so, ga, uT, qp, aT, vH, bK, an, af, uA, ak, s, wf, sS, wg, pZ, vZ, fP, wq, mf, ud, vq, uq, qb, aD, vr, vm, tK, mC, dZ, av, F, ot, oz, mW, sO, ul, ts, vw, jo, vO, uQ, eZ, aF, uF, eK, es, bE, pE, dJ, uR, aS, tr, be, pK, tP, we, gq, us); #c1(ACE) c2(NP_001171528) c3(angiotensin-converting enzyme isoform 3 precursor) c4(70458, 70459) c5(70460, 70461, 70642, 70643, 70644, 70645, 70466, 70467, 70468, 70469, 70470) c6( ) c7(uB, T, uK, ea, bO, ci, aY, ui, aE, rw, dV, hu, hH, aa, wp, uY, vs, tU, iA, wE, lS, vF, fy, uL, cE, sr, wJ, vE, vX, ht, sh, cQ, aj, ww, cd, tD, td, vM, sW, lG, ey, uc, mR, sp, vu, ge, sm, fe, hq, vU, se, vL, E, mT, jv, cz, aA, bX, wy, nS, q, oT, tL, vz, tF, cy, jj, sR, sX, dI, eu, bA, wr, su, bf, fO, iy, sV, lo, uU, pb, tl, tR, sk, cT, rR, vK, tW, ua, ac, ig, hr, tz, sx, bt, ao, gV, wi, tS, iW, uG, jh, sJ, mw, dG, uu, fu, sg, tO, ad, wD, tX, wv, vJ, tT, oW, lQ, uN, wm, vP, qZ, ue, cH, cW, ff, tZ, tv, iV, bz, uP, ag, oQ, lC, lf, tJ, bM, vS, if, e, bB, cL, ur, ss, sD, ub, vV, ws, vh, fS, bc, uM, eG, up, dH, sP, hI, kt, pD, sz, mZ, vA, mx, vy, tV, tG, wx, dD, gU, wu, n, uE, md, sd, do, ec, eV, mV, hi, mU, A, fJ, ty, vo, sE, sf, jq, dC, cA, hL, tl, at, ut, eo, tm, fL, sZ, B, tq, vQ, ul, tf, dA, mr, wL, eX, fF, ti, vv, v, V, gM, wN, rS, sy, sl, ld, ae, to, tN, hM, tn, tA, vT, vR, uh, sK, vk, ck, vW, gX, hO, sL, vi, dM, vG, uj, eq, od, vc, uD, sj, mu, d, wc, th, un, Z, dr, bF, D, gk, ll, wz, gZ, y, kS, sC, sH, pC, fR, vf, al, I, qj, gF, wa, tg, wM, bW, M, vg, ta, K, wt, wF, aB, g, ve, uC, uy, U, uo, vn, uf, uH, sQ, sw, aw, pM, eh, fK, tB, vC, vd, wb, uV, sq, gi, tx, wd, cM, ar, kT, W, uk, wl, wk, bo, mg, gg, lB, L, wj, ug, fG, oe, jx, wo, uZ, mS, j, vp, sl, il, uW, J, o, hb, nX, bq, kl, Y, r, wl, tu, en, wA, tj, sn, tY, hc, dh, tM, uS, cS, dy, fD, sY, aZ, uO, bS, ah, gb, vN, sB, dP, fU, sN, vB, tt, vl, tH, uX, lR, tb, vj, cr, si, iR, qa, dR, sG, ei, sT, vt, st, tQ, wH, eb, sA, fw, aR, dY, iI, qM, eN, tE, tw, hm, aW, eM, wK, wB, sU, sv, uJ, pw, vl, tp, wh, ot, qN, vY, ai, cc, wG, ql, h, jy, dL, ux, mY, db, he, vx, wn, wC, aq, mo, gG, dw, op, mX, tk, vD, sF, uw, vb, bm, uz, te, va, bD, um, bL, eR, dK, uv, sM, cR, ft, tC, C, so, ga, uT, qp, aT, vH, bK, an, af, uA, ak, s, wf, sS, wg, pZ, vZ, fP, wq, mf, ud, vq, uq, qb, aD, vr, vm, tK, mC, dZ, av, F, ot, oz, mW, sO, ul, ts, vw, jo, vO, uQ, eZ, aF, uF, eK, es, bE, pE, dJ, uR, aS, tr, be, pK, tP, we, gq, us); #c1(ACE) c2(NP_690043) c3(angiotensin-converting enzyme isoform 2 precursor) c4(244807) c5(244808, 244809, 244810, 244811, 244812, 244813) c6( ) c7(uB, T, uK, ea, bO, ci, aY, ui, aE, rw, dV, hu, hH, aa, wp, uY, vs, tU, iA, wE, lS, vF, fy, uL, cE, sr, wa vE, vX, ht, sh, cQ, aj, ww, cd, tD, td, vM, sW, lG, ey, uc, mR, sp, vu, ge, sm, fe, hq, vU, se, vL, E, mT, jv, cz, aA, bX, wy, nS, q, oT, tL, vz, tF, cy, jj, sR, sX, dI, eu, bA, wr, su, bf, fO, iy, sV, in, uU, pb, tl, tR, sk, cT, rR, vK, tW, ua, ac, ig, hr, tz, sx, bt, ao, gV, wi, tS, iW, uG, jh, sJ, mw, dG, uu, fu, sg, tO, ad, wD, tX, wv, vJ, tT, oW, lQ, uN, wm, vP, qZ, ue, cH, cW, ff, tZ, tv, iV, bz, uP, ag, oQ, lC, lf, tJ, bM, vS, if, e, bB, cL, ur, ss, sD, ub, vV, ws, vh, fS, bc, uM, eG, up, dH, sP, hl, kt, pD, sz, mZ, vA, mx, vy, tV, tG, wx, dD, gU, wu, n, uE, md, sd, do, ec, eV, mV, hi, mU, A, fJ, ty, vo, sE, sf, jq, dC, cA, hL, tl, at, ut, eo, tm, fL, sZ, B, tq, vQ, ul, tf, dA, mr, wL, eX, fF, ti, vv, v, V, gM, wN, rS, sy, sl, ld, ae, to, tN, hM, tn, tA, vT, vR, uh, sK, vk, ck, vW, gX, hO, sL, vi, dM, vG, uj, eq, od, vc, uD, sj, mu, d, wc, th, un, Z, dr, bF, D, gk, ll, wz, gZ, y, kS, sC, sH, pC, fR, vf, al, I, qj, gF, wa, tg, wM, bW, M, vg, ta, K, wt, wF, aB, g, ve, uC, uy, U, uo, vn, uf, uH, sQ, sw, aw, pM, eh, fK, tB, vC, vd, wb, uV, sq, gi, tx, wd, cM, ar, kT, W, uk, wl, wk, bo, mg, gg, lB, L, wj, ug, fG, no, jx, wo, uZ, mS, j, vp, sl, il, uW, J, o, hb, nX, bq, kl, Y, r, wl, tu, en, wA, tj, sn, tY, ho, dh, tM, uS, cS, dy, fD, sY, aZ, uO, bS, ah, gb, vN, sB, dP, fU, sN, vB, tt, vI, tH, uX, lR, tb, vj, or, si, iR, qa, dR, sG, ei, sT, vt, st, tQ, wH, eb, sA, fw, aR, dY, iI, qM, dQ, eN, tE, tw, hm, aW, eM, wK, wB, sU, sv, uJ, pw, vl, tp, wh, ot, qN, vY, ai, cc, wG, ql, h, jy, dL, ux, mY, db, he, vx, wn, wC, aq, mo, gG, dw, op, mX, tk, vD, sF, uw, vb, bm, uz, te, va, bD, um, bL, eR, dK, uv, sM, oR, to, tC, C, so, ga, uT, qp, aT, vH, bK, an, af, uA, ak, s, wf, sS, wg, pZ, vZ, fP, wq, mf, ud, vq, uq, qb, aD, vr, vm, tK, mC, dZ, av, F, ot, oz, mW, sO, ul, ts, vw, jo, vO, uQ, eZ, aF, uF, eK, es, bE, pE, dJ, uR, aS, tr, be, pK, tP, we, gq, us); #c1(ACE) c2(XP_006721800) c3(angiotensin-converting enzyme isoform X2) c4( ) c5(294278) c6( ) c7(uB, T, uK, ea, bO, ci, aY, ui, aE, rw, dV, hu, hH, aa, wp, uY, vs, tU, iA, wE, lS, vF, fy, uL, oE, sr, wi, vE, vX, ht, sh, cQ, aj, ww, cd, tD, td, vM, sW, lG, ey, uc, mR, sp, vu, go, sm, fe, hq, vU, se, vL, E, mT, jv, cz, aA, bX, wy, nS, q, oT, tL, vz, tF, oy, jj, sR, sX, dI, eu, bA, wr, su, bf, fO, iy, sV, lo, uU, pb, tl, tR, sk, cT, rR, yK, tW, ua, ac, ig, hr, tz, sx, bt, ao, gV, wi, tS, iW, uG, jh, sJ, mw, dG, uu, fu, sg, a ad, wD, tX, wv, vJ, tT, oW, lQ, uN, wm, vP, qZ, ue, cH, cW, ff, tZ, tv, iV, bz, uP, ag, oQ, lC, lf, tJ, bM, vS, if, e, bB, cL, ur, ss, sD, ub, vV, ws, vh, fS, bc, uM, eG, up, dH, sP, hl, kt, pD, sz, mZ, vA, mx, vy, tV, tG, wx, dD, gU, wu, n, uE, md, sd, do, ec, eV, mV, hi, mU, A, fJ, ty, vo, sE, sf, jq, dC, oA, hL, tl, at, ut, en, tm, fL, sZ, B, tq, vQ, ul, tf, dA, mr, wL, eX, fF, ti, vv, v, V, gM, wN, rS, sy, sl, ld, ae, to, tN, hM, tn, tA, vT, vR, uh, sK, vk, ck, vW, gX, hO, sL, vi, dM, vG, uj, eq, od, vc, uD, sj, mu, d, wc, th, un, Z, dr, bF, D, gk, ll, wz, gZ, y, kS, sC, sH, pC, fR, vf, al, I, qj, gF, wa, tg, wM, bW, M, vg, ta, K, wt, wF, aB, g, ve, uC, uy, U, uo, vn, uf, uH, sQ, sw, aw, pM, eh, fK, tB, vC, vd, wb, uV, sq, gi, tx, wd, cM, ar, kT, W, uk, wl, wk, bo, mg, gg, lB, L, wj, ug, fG, oe, jx, wo, uZ, mS, j, vp, sl, il, uW, J, o, hb, nX, bq, kl, Y, r, wl, tu, en, wA, tj, sn, tY, hc, dh, tM, uS, cS, dy, fD, sY, aZ, uO, bS, ah, gb, vN, sB, dP, fU, sN, vB, tt, vI, tH, uX, lR, tb, vj, or, si, iR, qa, dR, sG, ei, sT, vt, st, tQ, wH, eb, sA, fw, aR, dY, iI, qM, dQ, eN, tE, tw, hm, aW, eM, wK, wB, sU, sv, uJ, pw, vl, tp, wh, ct, qN, vY, ai, cc, wG, ql, h, jy, dL, ux, mY, db, he, vx, wn, wC, aq, mo, gG, dw, op, mX, tk, vD, sF, uw, vb, bm, uz, te, va, bD, um, bL, eR, dK, uv, sM, cR, tc, tC, C, so, ga, uT, qp, aT, vH, bK, an, af, uA, ak, s, wf, sS, wg, pZ, vZ, fP, wq, mf, ud, vq, uq, qb, aD, vr, vm, tK, mC, dZ, av, F, ot, oz, mW, sO, uI, ts, vw, jo, vO, uQ, eZ, aF, uF, eK, es, bE, pE, dJ, uR, aS, tr, be, pK, tP, we, gq, us); #c1(ACE2) c2(NP_068576) c3(angiotensin-converting enzyme 2 precursor) c4(209554, 209555) c5(209556, 209557, 209558, 209559, 209560, 209561, 209562, 209563, 209564, 209565, 209566, 209567, 209568, 209569, 209570, 209571, 209572, 209573, 209574, 209575, 209576, 209577, 209578, 209579, 209580, 209581, 209582, 209583, 209584, 209585, 209586, 209587, 209588, 209589, 209590, 209591, 209592, 209593, 209594, 209595, 209596, 209597, 209598, 209599, 209600, 209601, 209602, 209603, 209604, 209605, 209606, 209607, 209608, 209609, 209610, 209611, 209612, 209613, 209614, 209615, 209616, 209617, 209618, 209619, 209620, 209621, 209622, 209623, 209624, 209625, 209626, 209627, 209628, 209629, 209630, 209631, 209632, 209633, 209634, 209635, 209636, 209637, 209638, 209639, 209640, 209641, 209642, 209643, 209644, 209645, 209646, 209647, 209648, 209649, 209650, 209651, 209652) c6(209653) c7(bL, eq, T, dD, wi, fR, mr, wJ, ea, fG, oe, e, aw, wL, cz, cR, tc, fF, dG, uu, aj, C, sl, j, v, vp, eh, cd, J, cc, aE, do, ws, sN, wG, sy, M, dV, wP, cy, us, vc, K, vB, bq, wt, bc, hm, aa, uQ, A, wc, sP, hI, cr, fQ, si, mo, dw, uC, bz, wU, qa, eK, wT, wQ, eM, wO, lI, gZ, te, wR, aS, dy, fD, wV, hh, wS, jr, vQ); #c1(ACER2) c2(NP_001010887) c3(alkaline ceramidase 2) c4(23975) c5(23976, 23977, 23978, 23979, 23980, 23981) c6( ) c7(T); #c1(ACER2) c2(XP_011516160) c3(alkaline ceramidase 2 isoform X3) c4(309401) c5(309402, 309403, 309404, 309405, 309406, 309407) c6( ) c7(T); #c1(ACER3) c2(NP_001287882) c3(alkaline ceramidase 3 isoform b) c4(113125) c5(113126, 113127, 113128, 113129, 113130, 113131) c6( ) c7(Y); #c1(ACER3) c2(NP_001287884) c3(alkaline ceramidase 3 isoform c) c4( ) c5(113132, 113133, 113134, 113135, 113136, 113137, 113138, 113139, 113140, 113141, 113142) c6( ) c7(Y); #c1(ACER3) c2(NP_060837) c3(alkaline ceramidase 3 isoform a) c4(198059, 198060) c5(198061, 198062, 198063, 198064, 198065, 198066, 198067, 198068) c6( ) c7(Y); #c1(ACER3) c2(XP_011543454) c3(alkaline ceramidase 3 isoform X2) c4(342349, 342350) c5(342351, 342352, 342353, 342354, 342355) c6( ) c7(Y); #c1(ACHE) c2(NP_001269378) c3(acetylcholinesterase isoform 3 precursor) c4(101363) c5(101364, 101365, 101366, 101367, 101368, 101369, 101370, 101371, 101372, 101373, 101374) c6( ) c7(xo, al, bO, qj, aR, xm, xy, dV, K, H, xa, aW, as, cm, bw, xd, eM, U, m, R, xh, cZ, xn, xu, aw, n, fr, xr, xC, ke, ft, no, xc, dd, he, xf, wX, xi, xq, fQ, fe, wZ, xe, hq, xA, ky, cA, dB, kz, xj, L, bL, wY, xk, j, eA, xx, mP, aT, cy, bq, an, af, jf, qw, hM, Y, xl, t, xw, wA, dS, ck, ac, xB, gT, bt, xb, ao, xt, ad, av, ot, rN, xp, xz, xs, eZ, xv, wW, es, gk, kq, xg, X); #c1(ACHE) c2(NP_001289550) c3(acetylcholinesterase isoform E4-E5 precursor) c4(114231, 114232) c5(114233, 114234, 114235, 114236, 114237, 114238, 114239, 114240, 114241, 114242, 114243, 114244, 114245, 114246, 114247, 114248) c6( ) c7(xo, al, bO, qj, aR, xm, xy, dV, K, H, xa, aW, as, cm, bw, xd, eM, U, m, R, xh, cZ, xn, xu, aw, n, fr, xr, xC, ke, ft, no, xc, dd, he, xf, wX, xi, xq, fQ, fe, wZ, xe, hq, xA, ky, cA, dB, kz, xj, L, bL, wY, xk, j, eA, xx, mP, aT, cy, bq, an, af, jf, qw, hM, Y, xl, t, xw, wA, dS, ck, ac, xB, gT, bt, xb, ao, xt, ad, av, ot, rN, xp, xz, xs, eZ, xv, wW, es, gk, kq, xg, X); #c1(ACHE) c2(NP_001289551) c3(acetylcholinesterase isoform E4-E6 precursor) c4(114249, 114250, 114251) c5(114252, 114253, 114254, 114255, 114256, 114257, 114258, 114259, 114260, 114261, 114262, 114263, 114264, 114265, 114266) c6( ) c7(xo, al, bO, qj, aR, xm, xy, dV, K, H, xa, aW, as, cm, bw, xd, eM, U, m, R, xh, cZ, xn, xu, aw, n, fr, xr, xC, ke, ft, no, xc, dd, he, xf, wX, xi, xq, fQ, fe, wZ, xe, hq, xA, ky, cA, dB, kz, xj, L, bL, wY, xk, j, eA, xx, mP, aT, cy, bq, an, af, jf, qw, hM, Y, xl, t, xw, wA, dS, ck, ac, xB, gT, bt, xb, ao, xt, ad, av, ot, rN, xp, xz, xs, eZ, xv, wW, es, gk, kq, xg, X); #c1(ACHE) c2(XP_011514527) c3(acetylcholinesterase isoform X2) c4(307226) c5( ) c6( ) c7(xo, al, bO, qj, aR, xm, xy, dV, K, H, xa, aW, as, cm, bw, xd, eM, U, m, R, xh, cZ, xn, xu, aw, n, fr, xr, xC, ke, ft, no, xc, dd, he, xf, wX, xi, xq, fQ, fe, wZ, xe, hq, xA, ky, cA, dB, kz, xj, L, bL, wY, xk, j, eA, xx, mP, aT, cy, bq, an, af, jf, qw, hM, Y, xl, t, xw, wA, dS, ck, ac, xB, gT, bt, xb, ao, xt, ad, av, ot, rN, xp, xz, xs, eZ, xv, wW, es, gk, kq, xg, X); #c1(ACHE) c2(XP_011514528) c3(acetylcholinesterase isoform X3) c4( ) c5(307227, 307228, 307229, 307230, 307231, 307232) c6( ) c7(xo, al, bO, qj, aR, xm, xy, dV, K, H, xa, aW, as, cm, bw, xd, eM, U, m, R, xh, a, xn, xu, aw, n, fr, xr, xC, ke, ft, no, xc, dd, he, xf, wX, xi, xq, fQ, fe, wZ, xe, hq, xA, ky, cA, dB, kz, xj, L, bL, wY, xk, j, eA, xx, mP, aT, cy, bq, an, af, jf, qw, hM, Y, xl, t, xw, wA, dS, ck, ac, xB, gT, bt, xb, ao, xt, ad, av, ot, rN, xp, xz, xs, eZ, xv, wW, es, gk, kq, xg, X); #c1(ACIN1) c2(NP_001158286) c3(apoptotic chromatin condensation inducer in the nucleus isoform 2) c4(63544) c5(63545, 63546, 63547, 63548, 63549, 63550) c6( ) c7(cm, oV, iu, g, iE); #c1(ACIN1) c2(NP_001158287) c3(apoptotic chromatin condensation inducer in the nucleus isoform 3) c4(63551) c5(63552, 63553, 63554, 63555, 63556, 63557) c6( ) c7(cm, oV, iu, g, iE); #c1(ACIN1) c2(NP_001158288) c3(apoptotic chromatin condensation inducer in the nucleus isoform 4) c4(63558) c5(63559, 63560, 63561, 63562, 63563, 63564) c6( ) c7(cm, oV, iu, g, iE); #c1(ACIN1) c2(NP_055792) c3(apoptotic chromatin condensation inducer in the nucleus isoform 1) c4(183533) c5(183534, 183535, 183536, 183537, 183538, 183539) c6( ) c7(cm, oV, iu, g, iE); #c1(ACIN1) c2(XP_005267475) c3(apoptotic chromatin condensation inducer in the nucleus isoform X1) c4(281004) c5(281005, 281006, 281007, 281008, 281009, 281010, 281011, 281012, 281013, 281014, 281015) c6( ) c7(cm, oV, iu, g, iE); #c1(ACKR1) c2(NP_001116423) c3(atypical chemokine receptor 1 isoform a) c4(43804, 43805) c5(43806, 43807, 43808, 43809, 43810, 43811, 43812, 43813, 43814, 43815, 43816, 43817) c6( ) c7(gV, bM, qb, xF, aw, qd, xM, gA, xJ, fu, V, eA, aR, eW, xE, xI, dV, aT, h, mL, lQ, bU, xL, hH, wt, aa, hG, aW, cr, fe, xH, wT, xK, qI, xD, dc, qu, dy, xG, fD, oQ, lf); #c1(ACKR1) c2(NP_002027) c3(atypical chemokine receptor 1 isoform b) c4(123434) c5(123435, 123436, 123437, 123438, 123439, 123440, 123441, 123442, 123443, 123444, 123445, 123446, 123447, 123448) c6( ) c7(gV, bM, qb, xF, aw, qd, xM, gA, xJ, fu, V, eA, aR, eW, xE, xI, dV, aT, h, mL, lQ, bU, xL, hH, wt, aa, hG, aW, cr, fe, xH, wT, xK, qI, xD, dc, qu, dy, xG, fD, oQ, lf); #c1(ACKR2) c2(NP_001287) c3(atypical chemokine receptor 2) c4(113358) c5( ) c6( ) c7(bM, xN, T, dD, xS, ea, iW, al, j, eq, ad, dP, x, F, kH, aT, qU, h, lQ, ae, xP, xQ, je, xR, iZ, aW, Y, fJ, eZ, dN, hp, t, ek, xT, eU, iM, z, xO, hk, ej, m, k, y, vi); #c1(ACKR3) c2(XP_005246155) c3(atypical chemokine receptor 3 isoform X1) c4(266949, 266950) c5(266951, 266952, 266953, 266954, 266955, 266956, 266957, 266958, 266959, 266960, 266961, 266962) c6( ) c7(bM, T, ya, ea, fd, bB, ci, ye, xY, ip, x, bv, rJ, K, eL, yo, aW, eF, cm, iP, yd, eM, iA, cj, k, m, ym, dD, n, fr, cd, yn, ql, h, dL, yi, A, yc, aq, yq, jq, ok, yf, bP, hj, tl, B, bL, iH, yk, hU, cz, v, yp, q, eA, eJ, hb, xW, yg, aT, xV, bK, yb, yj, ae, xU, s, oV, Y, r, t, nC, iK, ck, nM, yl, dy, ha, eq, ad, av, yh, xX, d, eH, eZ, iR, bz, dR, es, xZ, bE, y); #c1(ACKR4) c2(NP_848540) c3(atypical chemokine receptor 4) c4(253785, 253786) c5(253787, 253788, 253789, 253790, 253791, 253792, 253793, 253794, 253795, 253796, 253797, 253798) c6( ) c7(xS, yr, eU, iM, je, xR, xT, xO, Y, aW, ha, nl, nh, aT, dN, fJ, h, lQ, xP); #c1(ACLY) c2(NP_001290203) c3(ATP-citrate synthase isoform 3) c4(115146) c5(115147, 115148, 115149, 115150, 115151, 115152, 115153, 115154) c6( ) c7(av, T, iu, eM, fe, r, v, ci, K, q, bz, B); #c1(ACLY) c2(NP_001290204) c3(ATP-citrate synthase isoform 4) c4(115155) c5(115156, 115157, 115158, 115159, 115160, 115161, 115162, 115163, 115164, 115165, 115166, 115167, 115168, 115169, 115170, 115171) c6( ) c7(av, T, iu, eM, fc, r, v, ci, K, q, bz, B); #c1(ACLY) c2(NP_942127) c3(ATP-citrate synthase isoform 2) c4(260480) c5( ) c6( ) c7(av, T, iu, eM, fe, r, v, ci, K, q, bz, B); #c1(ACLY) c2(XP_005257452) c3(ATP-citrate synthase isoform X1) c4(275127) c5(275128, 275129, 275130, 275131, 275132, 275133, 275134, 275135) c6( ) c7(av, T, iu, eM, fc, r, v, ci, K, q, bz, B); #c1(ACMSD) c2(NP_612199) c3(2-amino-3-carboxymuconate-6-semialdehyde decarboxylase) c4(236182) c5(236183, 236184, 236185, 236186, 236187, 236188) c6( ) c7(ys, ha, aq, an, B, aR); #c1(ACO1) c2(NP_002188) c3(cytoplasmic aconitate hydratase) c4(126402, 126403, 126404, 126405) c5(126406, 126407, 126408, 126409, 126410, 126411, 126412, 126413, 126414, 126415, 126416, 126417, 126418, 126419, 126420, 126421, 126422, 126423, 126424, 126425, 126426, 126427, 126428, 126429, 126430, 126431, 126432, 126433) c6( ) c7(T, py, yw, af, yt, hk, Y, yx, aw, r, yy, yu, cd, j, f, q, ad, yv); #c1(ACO2) c2(NP_001089) c3(aconitate hydratase, mitochondrial precursor) c4(38324, 38325, 38326, 38327) c5(38328, 38329, 38330, 38331, 38332, 38333, 38334, 38335, 38336, 38337, 38338, 38339, 38340, 38341, 38342, 38343, 38344, 38345, 38346, 38347, 38348, 38349, 38350, 38351) c6( ) c7(B, yz); #c1(ACOT1) c2(NP_001032238) c3(acyl-coenzyme A thioesterase 1) c4(31118) c5(31119, 31120, 31121, 31122, 31123) c6( ) c7(h, aq, if, qN, bq); #c1(ACOT13) c2(NP_001153566) c3(acyl-coenzyme A thioesterase 13 isoform 2) c4(60650) c5(60651, 60652, 60653, 60654, 60655, 60656) c6( ) c7(aj, yA, J, aT); #c1(ACOT13) c2(NP_060943) c3(acyl-coenzyme A thioesterase 13 isoform 1) c4(198833) c5(198834, 198835, 198836, 198837, 198838, 198839) c6( ) c7(aj, yA, J, aT); #c1(ACOT2) c2(NP_006812) c3(acyl-coenzyme A thioesterase 2, mitochondrial) c4(168299) c5(168300, 168301, 168302, 168303, 168304, 168305, 168306) c6( ) c7(bL, j, bq); #c1(ACOT9) c2(NP_001028755) c3(acyl-coenzyme A thioesterase 9, mitochondrial isoform b precursor) c4(30641) c5(30642, 30643, 30644, 30645, 30646, 30647, 30648) c6( ) c7(fc); #c1(ACOT9) c2(NP_001032248) c3(acyl-coenzyme A thioesterase 9, mitochondrial isoform a precursor) c4(31168) c5(31169, 31170, 31171, 31172, 31173, 31174) c6( ) c7(fc); #c1(ACOT9) c2(XP_005274529) c3(acyl-coenzyme A thioesterase 9, mitochondrial isoform X2) c4(285122) c5(285123, 285124, 285125, 285126, 285127) c6( ) c7(fc); #c1(ACOX1) c2(NP_001171968) c3(peroxisomal acyl-coenzyme A oxidase 1 isoform c) c4(72104) c5(72105, 72106, 72107, 72108, 72109) c6( ) c7(yD, fc, U, yB, K, cP, yC, B, bq); #c1(ACOX1) c2(NP_004026) c3(peroxisomal acyl-coenzyme A oxidase 1 isoform a) c4(142930) c5(142931, 142932, 142933, 142934, 142935, 142936, 142937, 142938, 142939, 142940, 142941) c6( ) c7(yD, fc, U, yB, K, cP, yC, B, bq); #c1(ACOX1) c2(NP_009223) c3(peroxisomal acyl-coenzyme A oxidase 1 isoform b) c4(171570) c5(171571, 171572, 171573, 171574, 171575, 171576) c6( ) c7(yD, fe, U, yB, K, cP, yC, B, bq); #c1(ACOX1) c2(XP_011523170) c3(peroxisomal acyl-coenzyme A oxidase 1 isoform X1) c4(317704) c5(317705, 317706, 317707, 317708, 317709, 317710) c6( ) c7(yD, fe, U, yB, K, cP, yC, B, bq); #c1(ACOX2) c2(NP_003491) c3(peroxisomal acyl-coenzyme A oxidase 2) c4(138740, 138741) c5(138742, 138743, 138744, 138745, 138746, 138747, 138748, 138749, 138750, 138751) c6( ) c7(mL, e, B, K); #c1(ACOX2) c2(XP_011532449) c3(peroxisomal acyl-coenzyme A oxidase 2 isoform X2) c4( ) c5(328518, 328519) c6( ) c7(mL, e, B, K); #c1(ACOX3) c2(NP_001095137) c3(peroxisomal acyl-coenzyme A oxidase 3 isoform b) c4(40808) c5(40809, 40810, 40811, 40812, 40813, 40814) c6( ) c7(cF, ae, ad); #c1(ACOX3) c2(NP_003492) c3(peroxisomal acyl-coenzyme A oxidase 3 isoform a) c4(138752) c5(138753, 138754, 138755, 138756, 138757, 138758, 138759, 138750, 138751, 138752) c6( ) c7(cF, ae, ad); #c1(ACOXL) c2(NP_001136279) c3(acyl-coenzyme A oxidase-like protein) c4(54798, 54799) c5(54800, 54801, 54802, 54803, 54804, 54805, 54806, 54807, 54808, 54809, 54810, 54811) c6( ) c7(ey, aw, cj, ad, pN); #c1(ACOXL) c2(XP_011509712) c3(acyl-coenzyme A oxidase-like protein isoform X5) c4(300285) c5( ) c6( ) c7(ey, aw, cj, ad, pN); #c1(ACOXL) c2(XP_011509717) c3(acyl-coenzyme A oxidase-like protein isoform X10) c4( ) c5(300286) c6( ) c7(ey, aw, cj, ad, pN); #c1(ACOXL) c2(XP_011509718) c3(acyl-coenzyme A oxidase-like protein isoform X11) c4(300287) c5(300288, 300289, 300290, 300291, 300292) c6( ) c7(ey, aw, cj, ad, pN); #c1(ACOXL) c2(XP_011509737) c3(acyl-coenzyme A oxidase-like protein isoform X25) c4(300293) c5(300294, 300295, 300296, 300297, 300298, 300299, 300300, 300301, 300302, 300303, 300304, 300305) c6( ) c7(ey, aw, cj, ad, pN); #c1(ACP1) c2(NP_001035739) c3(low molecular weight phosphotyrosine protein phosphatase isoform d) c4(33011, 33012) c5(33013, 33014, 33015, 33016, 33017, 33018, 33019, 33020, 33021, 33022, 33023) c6( ) c7(ta T, bM, yS, e, yY, fd, bB, cL, qj, ci, yM, aE, fm, dE, dV, K, aW, az, yK, mQ, kt, g, pL, cm, yX, yI, eM, vA, cj, m, yJ, yG, aj, ko, fr, hw, h, yT, yZ, bI, hg, A, fe, op, yR, yN, yP, mg, fL, bD, B, bL, aA, hz, v, j, yO, yV, yU, V, q, o, J, eA, mj, nv, aT, dz, ae, iU, Y, yL, r, en, cl, iK, pb, ck, cT, yW, gX, mf, yH, oH, hF, mC, ad, kL, dP, py, yQ, hD, bj, lQ, pq, yF, d, lR, et, ff, cr, eZ, aF, iV, dr, qa, es, yE, bE, qu, ei, y, X, pC); #c1(ACP1) c2(NP_004291) c3(low molecular weight phosphotyrosine protein phosphatase isoform c) c4(144894) c5(144895, 144896, 144897, 144898, 144899, 144900) c6( ) c7(tJ, T, bM, yS, e, yY, fd, bB, cL, qj, ci, yM, aE, fm, dE, dV, K, aW, az, yK, mQ, kt, g, pL, cm, yX, yI, eM, vA, cj, m, yJ, yG, aj, ko, fr, hw, h, yT, yZ, bI, hg, A, fe, op, yR, yN, yP, mg, fL, bD, B, bL, aA, hz, v, j, yO, yV, yU, V, q, o, J, eA, mj, nv, aT, dz, ae, iU, Y, yL, r, en, cl, iK, pb, ck, cT, yW, gX, mf, yH, oH, hF, mC, ad, kL, dP, py, yQ, hD, bj, lQ, pq, yF, d, lR, et, ff, cr, eZ, aF, iV, dr, qa, es, yE, bE, qu, ei, y, X, pC); #c1(ACP1) c2(NP_009030) c3(low molecular weight phosphotyrosine protein phosphatase isoform b) c4(170318) c5(170319, 170320, 170321, 170322, 170323, 170324, 170325) c6( ) c7(tJ, T, bM, yS, e, yY, fd, bB, cL, qj, ci, yM, aE, fm, dE, dV, K, aW, az, yK, mQ, kt, g, pL, cm, yX, yI, eM, vA, cj, m, yJ, yG, aj, ko, fr, hw, h, yT, yZ, bI, hg, A, fe, op, yR, yN, yP, mg, fL, bD, B, bL, aA, hz, v, j, yO, yV, yU, V, q, o, J, eA, mj, nv, aT, dz, ae, iU, Y, yL, r, en, cl, iK, pb, ck, cT, yW, gX, mf, yH, oH, hF, mC, ad, kL, dP, py, yQ, hD, bj, lQ, pq, yF, d, lR, et, ff, cr, eZ, aF, iV, dr, qa, es, yE, bE, qu, ei, y, X, pC); #c1(ACP2) c2(NP_001289419) c3(lysosomal acid phosphatase isoform 4 precursor) c4(114185) c5(114186, 114187, 114188, 114189, 114190, 114191) c6( ) c7(ck, za, dA, pc, cj, ab, aT, ji, bt, ad); #c1(ACP2) c2(NP_001289420) c3(lysosomal acid phosphatase isoform 5 precursor) c4( ) c5(114192, 114193, 114194, 114195, 114196, 114197, 114198) c6( ) c7(ck, za, dA, pc, cj, ab, aT, ji, bt, ad); #c1(ACP2) c2(NP_001289421) c3(lysosomal acid phosphatase isoform 5) c4(114199) c5(114200, 114201, 114202, 114203, 114204) c6( ) c7(ck, za, dA, pc, cj, ab, aT, ji, bt, ad); #c1(ACP2) c2(NP_001601) c3(lysosomal acid phosphatase isoform 1 precursor) c4(119061, 119062, 119063) c5(119064, 119065, 119065, 119067, 119068, 119069, 119070, 119071, 119072, 119073, 119074, 119075, 119076) c6( ) c7(ck, za, dA, pc, cj, ab, aT, ji, bt, ad); #c1(ACP5) c2(NP_001104506) c3(tartrate-resistant acid phosphatase type 5 precursor) c4(42133) c5(42134, 42135, 42136, 42137, 42138, 42139, 42140, 42141, 42142, 42143, 42144, 42145, 42146, 42147, 42148, 42149, 42150, 42151) c6( ) c7(T, zm, zs, zt, iW, aA, zj, fd, v, zh, jE, ze, fr, zd, zo, ad, ai, zn, ft, ib, xE, zi, aE, zw, zf, dV, aT, zg, zp, bq, zu, ae, hi, d, kj, Y, zb, vj, eH, ff, zq, aF, en, pL, t, ye, bz, eF, vU, zr, yE, zl, zv, zc, k, eg, zk, B, y, vQ); #c1(ACP5) c2(XP_011507903) c3(lysophosphatidic acid phosphatase type 6 isoform X1) c4(298170) c5(298171, 298172, 298173, 298174, 298175, 298176, 298177, 298178) c6(298179, 298180) c7(dY); #c1(ACPP) c2(NP_001090) c3(prostatic acid phosphatase isoform PAP precursor) c4(38352) c5(38353, 38354, 38355, 38356, 38357, 38358) c6( ) c7(T, dA, iW, aA, cz, bB, aj, v, zx, zF, cd, ad, ai, eA, b, i, aT, h, zy, ae, d, zH, aW, zD, r, zC, S, uF, g, zE, bw, zz, ck, bE, cj, wq, dT, zG, m, zI, zB, bt, zA, ao); #c1(ACPP) c2(NP_001127666) c3(prostatic acid phosphatase isoform TM-PAP precursor) c4(49223) c5(49224, 49225, 49226, 49227, 49228, 49229, 49230) c6( ) c7(T, dA, iW, aA, cz, bB, aj, v, zx, zF, cd, ad, ai, eA, b, i, aT, h, zy, ae, d, zH, aW, zD, r, zC, S, uF, g, zE, bw, zz, ck, bE, cj, wq, dT, zG, m, zI, zB, bt, zA, ao); #c1(ACR) c2(NP_001088) c3(acrosin precursor) c4(38317) c5(38318, 38319, 38320, 38321, 38322, 38323) c6( ) c7(ck, iU, oW, eZ, jh, oY, cQ, dy, S, fL, pb, y, bt, mC); #c1(ACRBP) c2(NP_115878) c3(acrosin-binding protein precursor) c4(224432) c5(224433, 224434, 224435, 224436, 224437, 224438, 224439, 224440) c6(224441, 224442) c7(T, bB, m, bu, t, ad); #c1(ACRC) c2(XP_011529367) c3(acidic repeat-containing protein isoform X1) c4(324746) c5( ) c6( ) c7(aU); #c1(ACRC) c2(XP_011529369) c3(acidic repeat-containing protein isoform X4) c4( ) c5(324747, 324748, 324749, 324750, 324751, 324752, 324753, 324754, 324755, 324756) c6( ) c7(aU); #c1(ACRV1) c2(NP_001603) c3(acrosomal protein SP-10 isoform a precursor) c4(119077, 119078) c5(119079, 119080, 119081, 119082, 119083, 119084) c6( ) c7(wc); #c1(ACRV1) c2(NP_064454) c3(acrosomal protein SP-10 isoform b precursor) c4(202554, 202555) c5(202556, 202557, 202558, 202559, 202560, 202561, 202562, 202563, 202564, 202565, 202566, 202567, 202568, 202569, 202570, 202571) c6( ) c7(wc); #c1(ACRV1) c2(NP_064492) c3(acrosomal protein SP-10 isoform precursor) c4(202580, 202581) c5(202582, 202583, 202584, 202585, 202586, 202587, 202588, 202589, 202590, 202591, 202592, 202593, 202594, 202595, 202596, 202597) c6( ) c7(wc); #c1(ACRV1) c2(NP_064493) c3(acrosomal protein SP-10 isoform d precursor) c4(202598, 202599, 202600, 202601) c5(202602, 202603, 202604, 202605, 202606, 202607, 202608, 202609, 202610, 202611, 202612, 202613, 202614, 202615, 202616, 202617, 202618, 202619, 202620, 202621, 202622, 202623, 202624, 202625, 202626, 202627, 202628, 202629, 202630, 202631, 202632, 202633, 202634, 202635) c6( ) c7(wc); #c1(ACSBG1) c2(NP_055977) c3(long-chain-fatty-acid-CoA ligase ACSBG1 isoform 1) c4(184850) c5(184851, 184852, 184853, 184854, 184855, 184856) c6( ) c7(dA, jh, eW, eA, zn, F, zK, aT, hH, dF, aW, lo, zL, zM, bz, zJ, bE, U, cj, pw, im, y, B); #c1(ACSBG1) c2(XP_011519691) c3(long-chain-fatty-acid-CoA ligase ACSBG1 isoform X1) c4(314369) c5( ) c6( ) c7(dA, jh, eW, eA, zn, F, zK, aT, hH, dF, aW, lo, zL, zM, bz, zJ, bE, U, cj, pw, im, y, B); #c1(ACSBG1) c2(XP_011519693) c3(long-chain-fatty-acid-CoA ligase ACSBG1 isoform X3) c4( ) c5(314370, 314371, 314372, 314373, 314374, 314375) c6( ) c7(dA, jh, eW, eA, zn, F, zK, aT, hH, dF, aW, lo, zL, zM, bz, zJ, bE, U, cj, pw, im, y, B); #c1(ACSBG2) c2(NP_001276107) c3(long-chain-fatty-acid-CoA ligase ACSBG2 isoform a) c4(108011) c5(108012, 108013, 108014, 108015, 108016, 108017) c6( ) c7(dF, gU); #c1(ACSF3) c2(NP_777577) c3(acyl-CoA synthetase family member 3, mitochondrial isoform 1 precursor) c4(251223) c5(251224, 251225, 251226, 251227, 251228, 251229, 251230, 251231, 251232, 251233) c6( ) c7(zN, zO, dq, fM, jh); #c1(ACSF3) c2(XP_011521245) c3(acyl-CoA synthetase family member 3, mitochondrial isoform X1) c4(316155) c5( ) c6( ) c7(zN, zO, dq, fM, jh); #c1(ACSF3) c2(XP_011521246) c3(acyl-CoA synthetase family member 3, mitochondrial isoform X2) c4( ) c5(316156, 316157, 316158, 316159, 316160, 316161) c6( ) c7(zN, zO, dq, fM, jh); #c1(ACSL1) c2(NP_001273640) c3(long-chain-fatty-acid-CoA ligase 1 isoform c) c4(105519) c5(105520, 105521, 105522, 105523, 105524, 105525) c6( ) c7(zQ, ac, uT, fO, zR, aj, v, ey, K, ci, bq, ei, zP, J); #c1(ACSL1) c2(NP_001273641) c3(long-chain-fatty-acid-CoA ligase 1 isoform d) c4(105526) c5( ) c6( ) c7(zQ, ac, uT, fO, zR, aj, v, ey, K, ci, bq, ei, zP, J); #c1(ACSL1) c2(XP_011530044) c3(long-chain-fatty- acid-CoA ligase 1 isoform X1) c4(325822) c5(325823, 325824, 325825, 325826, 325827, 325828, 325829, 325830, 325831, 325832, 325833, 325834, 325835, 325836, 325837, 325838, 325839, 325840, 325841, 325842, 325843, 325844, 325845, 325846) c6( ) c7(zQ, ac, uT, fO, zR, aj, v, ey, K, ci, bq, ei, zP, J); #c1(ACSL3) c2(NP_976251) c3(long-chain-fatty-acid—CoA ligase 3) c4(263070, 263071, 263072) c5(263073, 263074, 263075, 263076, 263077, 263078, 263079, 263080, 263081, 263082, 263083, 263084, 263085, 263086, 263087, 263088, 263089, 263090, 263091, 263092, 263093, 263094) c6( ) c7(zT, ae, bM, rV, dQ, zS, jx, aq, j, zV, bz, pM, zU, eA, zW, fq, B, ad); #c1(ACSL5) c2(NP_057318) c3(long-chain-fatty-acid—CnA ligase 5 isoform a) c4(190085) c5(190086, 190087, 190088, 190089, 190090, 190091, 190092, 190093, 190094, 190095) c6( ) c7(T, zY, s, zX, fO, eZ, r, ci, fL, g, dQ, eA, q); #c1(ACSL5) c2(NP_976314) c3(long-chain-fatty-acid—CnA ligase 5 isoform b) c4(263103, 263104, 263105) c5(263106, 263107, 263108, 263109, 263110, 263111, 263112, 263113, 263114, 263115, 263116, 263117, 263118, 263119, 263120, 263121, 263122, 263123, 263124, 263125, 263126, 263127) c6( ) c7(T, zY, s, zX, fO, eZ, r, ci, fL, g, dQ, eA, q); #c1(ACSL6) c2(NP_001009185) c3(long-chain-fatty-acid—CnA ligase 6 isoform b) c4(23564, 23565) c5(23566, 23567, 23568, 23569, 23570, 23571, 23572) c6( ) c7(iH, zZ, il, pm, bq, he, xa, ad); #c1(ACSL6) c2(NP_001192177) c3(long-chain-fatty-acid—CnA ligase 6 isoform d) c4( ) c5(81959, 81960, 81961, 81962, 81963, 81964, 81965, 81966, 81967, 81968, 81969, 81970, 81971) c6( ) c7(iH, zZ, il, pm, bq, he, xa, ad); #c1(ACSL6) c2(NP_001192179) c3(long-chain-fatty-acid—CnA ligase 6 isoform e) c4(81972, 81973, 81974) c5(81975, 81976, 81977, 81978, 81979, 81980, 81981, 81982, 81983, 81984, 81985, 81986, 81987, 81988, 81989, 81990, 81991, 81992, 81993, 81994, 81995, 81996, 81997) c6( ) c7(iH, zZ, il, pm, bq, he, xa, ad); #c1(ACSL6) c2(NP_001192180) c3(long-chain-fatty-acid—CoA ligase 6 isoform f) c4(81998) c5(81999, 82000, 82001, 82002, 82003, 82004) c6( ) c7(iH, zZ, il, pm, bq, he, xa, ad); #c1(ACSL6) c2(NP_056071) c3(long-chain-fatty-acid—CnA ligase 6 isoform a) c4(185506, 185507, 185508) c5(185509, 185510, 185511, 185512, 185513, 185514, 185515, 185516, 185517) c6( ) c7(iH, zZ, il, pm, bq, he, xa, ad); #c1(ACSM1) c2(XP_005255141) c3(acyl-coenzyme A synthetase ACSM1, mitochondrial isoform X1) c4(273550, 273551) c5(273552, 273553, 273554, 273555, 273556, 273557, 273558, 273559, 273560, 273561, 273562) c6( ) c7(qa, av, ci, ei, cz); #c1(ACSM1) c2(XP_011544032) c3(acyl-coenzyme A synthetase ACSM1, mitochondrial isoform X5) c4(343197) c5(343198, 343199, 343200, 343201, 343202, 343203) c6( ) c7(qa, av, ci, ei, cz); #c1(ACSM1) c2(XP_011544034) c3(acyl-coenzyme A synthetase ACSM1, mitochondrial isoform X7) c4( ) c5(343204, 343205, 343206, 343207, 343208) c6( ) c7(qa, av, ci, ei, cz); #c1(ACSM2B) c2(NP_001098539) c3(acyl-coenzyme A synthetase ACSM2B, mitochondrial) c4(41350, 41351) c5(41352, 41353, 41354, 41355, 41356, 41357) c6( ) c7(om); #c1(ACSM2B) c2(XP_005255361) c3(acyl-coenzyme A synthetase ACSM2B, mitochondrial isoform X2) c4( ) c5(273614, 273615, 273616, 273617, 273618, 273619, 273620, 273621, 273622, 273623, 273624, 273625) c6( ) c7(om); #c1(ACSM3) c2(NP_005613) c3(acyl-coenzyme A synthetase ACSM3, mitochondrial isoform 1) c4(157942) c5(157943, 157944, 157945, 157946, 157947, 157948) c6( ) c7(qa, T, ac, eR, oe, wF, cz, v, aS, Aa, dy, ei, dQ, nS, uC, ad, bJ); #c1(ACSM3) c2(NP_973729) c3(acyl-coenzyme A synthetase ACSM3, mitochondrial isoform 2) c4(262694) c5(262695, 262696, 262697, 262698, 262699, 262700) c6( ) c7(qa, T, ac, eR, oe, wF, cz, v, aS, Aa, dy, ei, dQ, nS, uC, ad, bJ); #c1(ACSM3) c2(XP_011544213) c3(acyl-coenzyme A synthetase ACSM3, mitochondrial isoform X1) c4(343343) c5(343344, 343345, 343346, 343347, 343348, 343349) c6( ) c7(qa, T, ac, eR, oe, wF, cz, v, aS, Aa, dy, ei, dQ, nS, uC, ad, bJ); #c1(ACSS1) c2(NP_001239605) c3(acetyl-coenzyme A synthetase 2-like, mitochondrial isoform 3) c4(88569) c5(88570, 88571, 88572, 88573, 88574, 88575, 88576, 88577, 88578, 88579, 88580, 88581) c6( ) c7(dy, ac); #c1(ACSS1) c2(NP_001239606) c3(acetyl-coenzyme A synthetase 2-like, mitochondrial isoform 4 precursor) c4(88582) c5(88583, 88584, 88585, 88586, 88587, 88588) c6( ) c7(dy, ac); #c1(ACSS1) c2(NP_115890) c3(acetyl-coenzyme A synthetase 2-like, mitochondrial isoform 1 precursor) c4(224540, 224541, 224542) c5(224543, 224544, 224545, 224546, 224547, 224548) c6( ) c7(dy, ac); #c1(ACSS1) c2(XP_006723722) c3(acetyl-coenzyme A synthetase 2-like, mitochondrial isoform X1) c4(295306) c5(295307, 295308, 295309, 295310, 295311, 295312, 295313, 295314, 295315, 295316, 295317, 295318) c6( ) c7(dy, ac); #c1(ACSS2) c2(NP_001070020) c3(acetyl-coenzyme A synthetase, cytoplasmic isoform 2) c4(34580) c5(34581, 34582, 34583, 34584, 34585, 34586) c6( ) c7(bL, T, rS, h, fr, j, B, hm); #c1(ACSS2) c2(NP_001229322) c3(acetyl-coenzyme A synthetase, cytoplasmic isoform 3) c4(84199) c5(84200, 84201, 84202, 84203, 84204, 84205) c6( ) c7(bL, T, rS, h, fr, j, B, hm); #c1(ACSS2) c2(NP_061147) c3(acetyl-coenzyme A synthetase, cytoplasmic isoform 1) c4(199545, 199546, 199547) c5(199548, 199549, 199550, 199551, 199552, 199553, 199554, 199555, 199556, 199557, 199558, 199559, 199560) c6( ) c7(bL, T, rS, h, fr, j, B, hm); #c1(ACSS2) c2(XP_011527211) c3(acetyl-coenzyme A synthetase, cytoplasmic isoform X7) c4( ) c5(321755, 321756) c6( ) c7(bL, T, rS, h, fr, j, B, hm); #c1(ACSS2) c2(XP_011527213) c3(acetyl-coenzyme A synthetase, cytoplasmic isoform X9) c4( ) c5(321757, 321758, 321759, 321760, 321761, 321762) c6( ) c7(bL, T, rS, h, fr, j, B, hm); #c1(ACSS3) c2(NP_078836) c3(acyl-CoA synthetase short-chain family member 3, mitochondrial precursor) c4(215654) c5(215655, 215656, 215657, 215658, 215659, 215660) c6( ) c7(fq, dy); #c1(ACSS3) c2(XP_005269207) c3(acyl-CoA synthetase short-chain family member 3, mitochondrial isoform X1) c4(282484) c5(282485) c6( ) c7(fq, dy); #c1(ACSS3) c2(XP_011537042) c3(acyl-CoA synthetase short-chain family member 3, mitochondrial isoform X3) c4( ) c5(334825, 334826, 334827, 334828, 334829) c6( ) c7(fq, dy); #c1(ACTA1) c2(NP_001091) c3(actin, alpha skeletal muscle) c4( ) c5( ) c6( ) c7(bM, dD, Ah, if, Am, aw, aj, eq, qN, Ac, Aj, cc, no, Ae, Ag, vJ, il, nj, Ak, vc, bl, rz, af, Af, Ad, An, Ah, Ai, Al); #c1(ACTA2) c2(XP_011538318) c3(actin, aortic smooth muscle isoform X1) c4(335996, 335997, 335998) c5(335999, 336000, 336001, 336002, 336003, 336004, 336005, 336006, 336007, 336008, 336009, 336010, 336011, 336012, 336013, 336014, 336015, 336016, 336017, 336018, 336019, 336020, 336021, 336022, 336023, 336024) c6( ) c7(T, Ap, vl, Am, al, Aq, Av, j, fr, bd, Ao, dP, av, iu, cc, M, vw, cy, vc, At, rz, bf, As, aJ, hl, Au, g, eF, ac, Ar, gY, mx, aS, dy, be, vF, X); #c1(ACTB) c2(NP_001092) c3(actin, cytoplasmic 1) c4(39786, 39787, 39788, 39789, 39790, 39791, 39792, 39793) c5( ) c6( ) c7(bM, T, pf, al, bB, ci, zW, ip, x, aE, AI, aU, eL, li, zQ, AP, aW, Az, g, as, bw, eM, AM, vA, mx, iS, k, wu, ht, nA, zP, eW, tD, co, ft, Ax, h, dL, ey, AT, AQ, fe, op, kn, iO, bP, sZ, AN, B, AB, fM, dA, AL, AS, Aw, aA, v, j, AE, il, AO, q, eJ, AK, aT, kf, AJ, bK, ae, kl, s, iU, Y, r, lo, en, f, AA, mG, AH, hr, AU, AG, gT, bt, vi, yv, jh, Ay, ad, dP, av, yt, AD, ds, qh, ab, ji, wm, AF, ff, aF, bz, dr, bF, gk, bE, AR, gZ, bC, ei, hE, AG); #c1(ACTBL2) c2(NP_001017992) c3(beta-actin-like protein 2) c4(26739) c5(26740, 26741, 26742, 26743, 26744, 26745) c6( ) c7(bL, bM, T, aw, ct, eA, ad, qH, AW, sO, gd, aT, dV, iv, bK, an, af, A, aW, cm, AV, at, eg, qc); #c1(ACTC1) c2(NP_005150) c3(actin, alpha cardiac muscle 1 proprotein) c4(153416, 153417) c5(153418, 153419, 153420, 153421, 153422, 153423, 153424, 153425, 153426, 153427, 153428, 153429) c6( ) c7(AY, oe, Am, aA, cz, j, cd, cc, Bc, vc, Ba, K, jo, rz, Bb, AX, me, AZ, cl, gY, mx, Be, bD, Bd); #c1(ACTG1) c2(NP_001605) c3(actin, cytoplasmic 2) c4(119085, 119086, 119087) c5(119088, 119089, 119090, 119091, 119092, 119093, 119094, 119095, 119096, 119097, 119098, 119099, 119100, 119101, 119102, 119103, 119104, 119105, 119106, 119107, 119108, 119109, 119110, 119111, 119112, 119113, 119114, 119115, 119116) c6( ) c7(bL, bM, T, aw, j, ct, nA, ci, zW, zP, eA, qH, x, AW, AD, sO, Bj, gd, aT, dV, iv, Bi, h, bK, an, af, bA, A, zQ, Bf, aW, Az, cm, Bg, ck, kn, dc, AV, mG, at, k, eg, Bh); #c1(ACTG2) c2(NP_001186822) c3(actin, gamma-enteric smooth muscle isoform 2 precursor) c4(78686) c5(78687, 78688, 78689, 78690, 78691, 78692) c6( ) c7(bL, bM, T, Bl, Bk, aw, Bm, ct, fu, eA, qH, AW, hW, sO, gd, Bn, aT, dV, iv, bK, an, af, A, aW, Bo, hJ, uC, AV, at, eg, X); #c1(ACTG2) c2(NP_001606) c3(actin, gamma-enteric smooth muscle isoform 1 precursor) c4(H9H7) c5(H9H8, 119119, 119120, 119121, 119122, 119123, 119124, 119125, 119126, 119127) c6( ) c7(bL, bM, T, Bl, Bk, aw, Bm, ct, fu, eA, gH, AW, hW, sO, gd, Bn, aT, dV, iv, bK, an, af, A, aW, Bo, hJ, uC, AV, at, eg, X); #c1(ACTL6A) c2(NP_004292) c3(actin-like protein 6A isoform 1) c4(144901) c5(144902, 144903, 144904, 144905, 144906, 144907, 144908, 144909, 144910) c6( ) c7(bv, T, aF, Bp, aA); #c1(ACTL6A) c2(NP_817126) c3(actin-like protein 6A isoform 2) c4(253121, 253122) c5(253123, 253124, 253125, 253126, 253127, 253128, 253129, 253130, 253131, 253132, 253133, 253134, 253135) c6( ) c7(bv, T, aF, Bp, aA); #c1(ACTL6B) c2(NP_057272) c3(actin-like protein 68) c4(189783) c5(189784, 189785, 189786, 189787, 189788, 189789, 189790, 189791) c6(189792, 189793) c7(Bp); #c1(ACTL8) c2(XP_011540513) c3(actin-like protein 8 isoform X2) c4(338987) c5(338988) c6( ) c7(cd, bX); #c1(ACTL9) c2(NP_848620) c3(actin-like protein 9) c4(254001) c5(254002, 254003, 254004, 254005, 254006, 254007) c6( ) c7(eE); #c1(ACTN1) c2(NP_001093) c3(alpha-actinin-1 isoform b) c4(40559) c5( ) c6( ) c7(dP, Br, dX, j, K, cl, y, Bq); #c1(ACTN1) c2(NP_001123476) c3(alpha-actinin-1 isoform a) c4(47121) c5(47122, 47123, 47124, 47125, 47126, 47127) c6( ) c7(dP, Br, dX, j, K, cl, y, Bq); #c1(ACTN1) c2(NP_001123477) c3(alpha-actinin-1 isoform c) c4(47128) c5(47129, 47130, 47131, 47132, 47133, 47134) c6( ) c7(dP, Br, dX, j, K, cl, y, Bq); #c1(ACTN2) c2(NP_001094) c3(alpha-actinin-2 isoform 1) c4(40786) c5( ) c6( ) c7(AY, cc, Bs, mx, vc, bS, bl, he, Bt); #c1(ACTN2) c2(NP_001265272) c3(alpha-actinin-2 isoform 2) c4(98106) c5(98107, 98108, 98109, 98110, 98111, 98112, 98113) c6( ) c7(AY, cc, Bs, mx, vc, bS, bl, he, Bt); #c1(ACTN2) c2(NP_001265273) c3(alpha-actinin-2 isoform 3) c4(98114, 98115) c5(98116, 98117, 98118, 98119, 98120, 98121, 98122, 98123, 98124, 98125, 98126) c6( ) c7(AY, cc, Bs, mx, vc, bS, bl, he, Bt); #c1(ACTN3) c2(NP_001095) c3(alpha-actinin-3 isoform 1) c4(40966, 40967) c5( ) c6( ) c7(Bv, sF, lb, Bw, m, t, Bu, af); #c1(ACTN3) c2(NP_001245300) c3(alpha-actinin-3 isoform 2) c4(93032) c5(93033, 93034) c6( ) c7(Bv, sF, lb, Bw, m, t, Bu, af); #c1(ACTN4) c2(NP_004915) c3(alpha-actinin-4) c4(150729, 150730) c5(150731, 150732, 150733, 150734, 150735, 150736, 150737, 150738, 150739, 150740, 150741, 150742, 150743, 150744, 150745, 150746, 150747, 150748, 150749, 150750, 150751, 150752, 150753, 150754) c6( ) c7(T, dA, eR, dK, cz, n, ah, ci, lu, zP, aY, ye, q, cd, uW, er, dP, BB, ft, aE, aT, vw, h, By, dL, Bz, wt, eL, A, zQ, qt, aW, Y, gi, r, g, t, cm, bz, Bx, sk, vW, go, dy, m, uL, iu, BA); #c1(ACTN4) c2(XP_005259338) c3(alpha-actinin-4 isoform X2) c4(276067) c5( ) c6( ) c7(T, dA, eR, dK, cz, n, ah, ci, lu, zP, aY, ye, q, cd, uW, er, dP, BB, ft, aE, aT, vw, h, By, dL, Bz, wt, eL, A, zQ, qt, aW, Y, gi, r, g, t, cm, bz, Bx, sk, vW, go, dy, m, uL, iu, BA); #c1(ACTN4) c2(XP_006723469) c3(alpha-actinin-4 isoform X1) c4(295221) c5( ) c6( ) c7(T, dA, eR, dK, cz, n, ah, ci, lu, zP, aY, ye, q, cd, uW, er, dP, BB, ft, aE, aT, vw, h, By, dL, Bz, wt, eL, A, zQ, qt, aW, Y, gi, r, g, t, cm, bz, Bx, sk, vW, go, dy, m, uL, iu, BA); #c1(ACTR1A) c2(NP_005727) c3(alpha-centractin) c4(158896, 158897, 158898) c5(158899, 158900, 158901, 158902, 158903, 158904, 158905, 158906, 158907, 158908, 158909, 158910, 158911, 158912, 158913, 158914, 158915, 158916) c6( ) c7(ck, BC, BD, ib, oV, fd, aq, hF, B); #c1(ACTR1B) c2(NP_005726) c3(beta-centractin) c4(158889) c5(158890, 158891, 158892, 158893, 158894, 158895) c6( ) c7(dL, B, ac); #c1(ACTR2) c2(NP_001005386) c3(actin-related protein 2 isoform a) c4(21603, 21604, 21605) c5(21606, 21607, 21608, 21609, 21610, 21611, 21612) c6( ) c7(T, iQ, dA, aE, r, aA, h, By, lo, wR, BF, ey, BE, BG, t, ae, q, ad); #c1(ACTR2) c2(NP_005713) c3(actin-related protein 2 isoform b) c4(158780) c5(158781, 158782, 158783, 158784, 158785, 158786, 158787, 158788, 158789, 158790, 158791, 158792, 158793, 158794, 158795, 158796, 158797) c6( ) c7(T, iQ, dA, aE, r, aA, h, By, lo, wR, BF, ey, BE, BG, t, ae, q, ad); #c1(ACTR3) c2(NP_001264069) c3(actin-related protein 3 isoform 2) c4(97475) c5(97476, 97477, 97478, 97479, 97480, 97481, 97482, 97483, 97484, 97485, 97486, 97487, 97488, 97489, 97490, 97491, 97492) c6( ) c7(h, t, BG); #c1(ACTR3) c2(NP_005712) c3(actin-related protein 3 isoform 1) c4(158770, 158771, 158772) c5(158773, 158774, 158775, 158776, 158777, 158778, 158779) c6( ) c7(h, t, BG); #c1(ACTR3B) c2(NP_001035225) c3(actin-related protein 38 isoform 2) c4(32638, 32639) c5(32640, 32641, 32642, 32643, 32644, 32645) c6( ) c7(aw, cd, aF, bK, aA); #c1(ACTR3B) c2(NP_065178) c3(actin-related protein 38 isoform 1) c4(204469, 204470) c5(204471, 204472, 204473, 204474, 204475, 204476, 204477, 204478, 204479, 204480, 204481, 204482, 204483, 204484, 204485, 204486) c6( ) c7(aw, cd, aF, bK, aA); #c1(ACTR3B) c2(XP_006716128) c3(actin-related protein 38 isoform X1) c4( ) c5(290088) c6( ) c7(aw, cd, aF, bK, aA); #c1(ACTR3B) c2(XP_011514729) c3(actin-related protein 38 isoform X6) c4( ) c5(307385) c6( ) c7(aw, cd, aF, bK, aA); #c1(ACTR5) c2(NP_079131) c3(actin-related protein 5) c4(217194) c5(217195, 217196, 217197, 217198, 217199, 217200) c6( ) c7(c); #c1(ACTRT1) c2(NP_612146) c3(actin-related protein T1) c4(236057) c5(236058, 236059, 236060, 236061, 236062, 236063) c6( ) c7(h, ea, Y, bz); #c1(ACVR1) c2(NP_001096) c3(activin receptor type-1 precursor) c4(41277, 41278, 41279, 41280, 41281) c5( ) c6( ) c7(bM, T, kh, aC, BH, ci, BM, q, ad, eA, BI, cF, BJ, aT, dz, ey, rz, ae, kl, et, ff, r, en, as, t, dr, sn, ac, BL, gY, w, BK, m, bD, us); #c1(ACVR1B) c2(NP_004293) c3(activin receptor type-IB isoform a precursor) c4(144911, 144912, 144913, 144914) c5(144915, 144916, 144917, 144918, 144919, 144920, 144921, 144922, 144923, 144924, 144925, 144926, 144927, 144928, 144929, 144930, 144931, 144932, 144933) c6( ) c7(BI, hd, BN, aE, nB, aW, hR, hy, j, qF, ne); #c1(ACVR1B) c2(NP_064732) c3(activin receptor type-IB isoform b) c4( ) c5(203566, 203567, 203568, 203569, 203570) c6( ) c7(BI, hd, BN, aE, nB, aW, hR, hy, j, qF, ne); #c1(ACVR1B) c2(NP_064733) c3(activin receptor type-IB isoform c precursor) c4(203571) c5(203572, 203573, 203574, 203575, 203576, 203577) c6( ) c7(BI, hd, BN, aE, nB, aW, hR, hy, j, qF, ne); #c1(ACVRIC) c2(NP_001104501) c3(activin receptor type-1C isoform 2) c4( ) c5(42114, 42115, 42116, 42117, 42118) c6( ) c7(t, v, B, m, aq); #c1(ACVRIC) c2(NP_001104502) c3(activin receptor type-1C isoform 3 precursor) c4(42119) c5(42120, 42121, 42122, 42123, 42124, 42125) c6( ) c7(t, v, B, m, aq); #c1(ACVRIC) c2(NP_001104503) c3(activin receptor type-1C isoform 4 precursor) c4(42126) c5(42127, 42128, 42129, 42130, 42131, 42132) c6( ) c7(t, v, B, m, aq); #c1(ACVRIC) c2(NP_660302) c3(activin receptor type-1C isoform 1 precursor) c4(240799, 240800) c5(240801, 240802, 240803, 240804, 240805, 240806, 240807) c6( ) c7(t, v, B, m, aq); #c1(ACVR2A) c2(NP_001265508) c3(activin receptor type-2A isoform 1 precursor) c4(98715) c5(98716, 98717, 98718, 98719, 98720, 98721, 98722, 98723, 98724, 98725, 98726) c6( ) c7(T, wu, aZ, eh, bB, q, ad, aE, oW, aT, wm, cp, kl, BO, vj, r, uC, bE, BP, gX, m, X); #c1(ACVR2A) c2(NP_001265509) c3(activin receptor type-2A isoform 2) c4(98727) c5(98728, 98729, 98730, 98731, 98732) c6( ) c7(T, wu, aZ, eh, bB, q, ad, aE, oW, aT, wm, cp, kl, BO, vj, r, uC, bE, BP, gX, m, X); #c1(ACVR2B) c2(NP_001097) c3(activin receptor type-28 precursor) c4(41282) c5(41283, 41284, 41285, 41286, 41287, 41288) c6( ) c7(bL, BI, T, BO, BS, BT, BQ, BV, BR, vj, fc, aj, mf, bl, er, J); #c1(ACVRL1) c2(NP_001070869) c3(serine/threonine-protein kinase receptor R3 precursor) c4(34872, 34873) c5(34874, 34875, 34876, 34877, 34878, 34879, 34880, 34881, 34882, 34883, 34884, 34885, 34886, 34887, 34888, 34889) c6( ) c7(ID, T, aC, Cl, e, al, jh, cz, Cg, fr, BW, Cd, Cb, BY, Cj, aE, Cc, pX, kl, Cf, lC, aT, BZ, wC, ly, Ck, xR, aW, vj, hl, Ce, kp, Ca, Ch, Ci, pb, lx, rR, ac, uo, gZ, hR, aS, BX, bC, pB, bt); #c1(ACVRL1) c2(XP_011537310) c3(serine/threonine-protein kinase receptor R3 isoform X2) c4(335009, 335010) c5(335011, 335012, 335013, 335014, 335015, 335016, 335017, 335018, 335019, 335020, 335021, 335022) c6( ) c7(ID, T, aC, Cl, e, al, jh, cz, Cg, fr, BW, Cd, Cb, BY, Cj, aE, Cc, pX, kl, Cf, lC, aT, BZ, wC, ly, Ck, xR, aW, vj, hl, Ce, kp, Ca, Ch, Ci, pb, lx, rR, ac, uo, gZ, hR, aS, BX, bC, pB, bt); #c1(ACY1) c2(NP_001185824) c3(aminoacylase-1 isoform a) c4(76460) c5(76461, 76462, 76463, 76464, 76465) c6( ) c7(mO, ft, bP, eM, Cn, Cm, dq, fr, cm, eC, X, bN); #c1(ACY1) c2(NP_001185825) c3(aminoacylase-1 isoform b) c4(76466) c5(76467, 76468, 76469, 76470, 76471, 76472) c6( ) c7(mO, ft, bP, eM, Cn, Cm, dq, fr, cm, eC, X, bN); #c1(ACY1) c2(NP_001185826) c3(aminoacylase-1 isoform c) c4(76473) c5(76474, 76475, 76476, 76477, 76478, 76479) c6( ) c7(mO, ft, bP, eM, Cn, Cm, dq, fr, cm, eC, X, bN); #c1(ACY1) c2(NP_001185827) c3(aminoacylase-1 isoform d) c4(76480) c5(76481, 76482, 76483, 76484, 76485, 76486) c6( ) c7(mO, ft, bP, eM, Cn, Cm, dq, fr, cm, eC, X, bN); #c1(ACY3) c2(NP_542389) c3(N-acyl-aromatic-L-amino acid amidohydrolase (carboxylate-forming)) c4(232323) c5(232324, 232325, 232326, 232327, 232328, 232329) c6( ) c7(cm, aq, T, B, fr); #c1(ACYP2) c2(NP_612457) c3(acylphosphatase-2) c4(236550, 236551) c5(236552, 236553, 236554, 236555, 236556, 236557, 236558, 236559, 236560, 236561, 236562, 236563) c6( ) c7(ff, ht, ac, en); #c1(ADA) c2(NP_000013) c3(adenosine deaminase) c4(54) c5(55, 56, 57, 58, 59, 60) c6( ) c7(bM, T, CR, CH, x, Bc, Co, dV, mH, aa, CG, aW, az, CT, aB, nr, uC, CC, tV, cj, CD, zv, k, Cl, Cx, aj, nA, h, Cr, A, CN, Cs, Cw, Cu, CM, CQ, bL, dA, eR, jx, qQ, cz, ti, v, j, J, zn, aT, cy, bq, Cy, ae, CB, iU, oV, Y, r, bN, Cv, ck, CU, iQ, c, CP, Cz, mf, oX, fD, gT, bt, zA, ps, CS, qb, iW, oA, dG, ah, Ct, hF, ad, av, CJ, F, dk, rN, CL, CA, CK, wc, eZ, CF, CE, S, jg, dr, qa, Cq, z, uR, eB, CO, ei, y, xg, X, jr, Cp); #c1(ADAD1) c2(NP_001152757) c3(adenosine deaminase domain-containing protein 1 isoform 2) c4(60143, 60144) c5(60145, 60146, 60147, 60148, 60149, 60150, 60151, 60152, 60153, 60154, 60155, 60156) c6( ) c7(bL, A, cz, hp, j, iV, y, V); #c1(ADAD1) c2(NP_001152767) c3(adenosine deaminase domain-containing protein 1 isoform 3) c4(60173) c5(60174, 60175, 60176, 60177, 60178) c6( ) c7(bL, A, cz, hp, j, iV, y, V); #c1(ADAD1) c2(NP_640336) c3(adenosine deaminase domain-containing protein 1 isoform 1) c4(238436) c5(238437, 238438, 238439, 238440, 238441, 238442, 238443) c6( ) c7(bL, A, cz, hp, j, iV, y, V); #c1(ADAD1) c2(XP_005262802) c3(adenosine deaminase domain-containing protein 1 isoform X3) c4(278094) c5(278095, 278096, 278097, 278098, 278099, 278100) c6( ) c7(bL, A, cz, hp, j, iV, y, V); #c1(ADAM10) c2(NP_001101) c3(disintegrin and metalloproteinase domain-containing protein 10 precursor) c4(41818, 41819) c5(41820, 41821, 41822, 41823, 41824, 41825) c6( ) c7(CV, CX, T, dD, ea, wL, eX, fZ, aA, aj, j, ci, eq, fr, vN, J, ad, eA, cF, Db, qK, aT, h, eV, dL, ey, K, H, ae, af, eL, CB, ye, A, d, B, CY, Y, aW, ff, hl, pR, en, t, cm, eK, ck, es, pu, ac, iA, iT, dh, X, U, CZ, dy, m, be, Da, rF, cB, GW, Dc, L); #c1(ADAM10) c2(XP_005254174) c3(disintegrin and metalloproteinase domain-containing protein 10 isoform X1) c4( ) c5(273043, 273044, 273045, 273046, 273047, 273048) c6( ) c7(CV, CX, T, dD, ea, wL, eX, fZ, aA, aj, j, ci, eq, fr, vN, J, ad, eA, cF, Db, qK, aT, h, eV, dL, ey, K, H, ae, af, eL, CB, ye, A, d, B, CY, Y, aW, ff, hl, pR, en, t, cm, eK, ck, es, pu, ac, iA, iT, dh, X, U, CZ, dy, m, be, Da, rF, cB, GW, Dc, L); #c1(ADAM11) c2(NP_002381) c3(disintegrin and metalloproteinase domain-containing protein 11 preproprotein) c4(127994) c5(127995, 127996, 127997, 127998, 127999, 128000) c6( ) c7(T, iM, ac, je, aW, aw, eX, M, aT, kH, cz, h, eV, i, eA, wD); #c1(ADAM11) c2(XP_005257430) c3(disintegrin and metalloproteinase domain-containing protein 11 isoform X1) c4(275106) c5(275107, 275108, 275109, 275110, 275111, 275112) c6( ) c7(T, iM, ac, je, aW, aw, eX, M, aT, kH, cz, h, eV, i, eA, wD); #c1(ADAM11) c2(XP_011523119) c3(disintegrin and metalloproteinase domain-containing protein 11 isoform X4) c4(317623) c5(317624, 317625, 317626, 317627, 317628, 317629) c6( ) c7(T, iM, ac, je, aW, aw, eX, M, aT, kH, cz, h, eV, i, eA, wD); #c1(ADAM12) c2(NP_001275904) c3(disintegrin and metalloproteinase domain-containing protein 12 isoform 5 preproprotein) c4(107311) c5(107312, 107313, 107314, 107315, 107316, 107317) c6( ) c7(T, Dd, ht, al, aA, eh, v, ci, av, aT, vc, dL, ey, Df, af, cY, d, De, qt, aW, ff, ag, aF, en, g, f, uC, iK, D, kP, eM, m, B); #c1(ADAM12) c2(NP_003465) c3(disintegrin and metalloproteinase domain-containing protein 12 isoform 1 preproprotein) c4(138555) c5(138556, 138557, 138558, 138559, 138560, 138561) c6( ) c7(T, Dd, ht, al, aA, eh, v, ci, av, aT, vc, dL, ey, Df, af, cY, d, De, qt, aW, ff, aq, aF, en, g, f, uC, iK, D, kP, eM, m, B); #c1(ADAM12) c2(NP_067673) c3(disintegrin and metalloproteinase domain-containing protein 12 isoform 2 preproprotein) c4(209254) c5(209255, 209256, 209257, 209258, 209259, 209260) c6( ) c7(T, Dd, ht, al, aA, eh, v, ci, av, aT, vc, dL, ey, Df, af, cY, d, De, qt, aW, ff, aq, aF, en, g, f, uC, iK, D, kP, eM, m, B); #c1(ADAM15) c2(NP_001248393) c3(disintegrin and metalloproteinase domain-containing protein 15 isoform 7 preproprotein) c4(93950) c5(93951, 93952, 93953, 93954, 93955, 93956) c6( ) c7(CX, T, kh, dD, Dh, ea, wL, aA, eq, ci, q, ad, aT, Dj, K, ae, Dg, Di, aW, Y, ff, fe, aF, en, g, t, bz, bE, y); #c1(ADAM15) c2(NP_001248394) c3(disintegrin and metalloproteinase domain-containing protein 15 isoform 8 preproprotein) c4(93957) c5(93958, 93959, 93960, 93961, 93962, 93963) c6( ) c7(CX, T, kh, dD, Dh, ea, wL, aA, eq, ci, q, ad, aT, Dj, K, ae, Dg, Di, aW, Y, ff, fe, aF, en, g, t, bz, bE, y); #c1(ADAM15) c2(NP_003806) c3(disintegrin and metalloproteinase domain-containing protein 15 isoform 2 preproprotein) c4(141022, 141023) c5(141024, 141025, 141026, 141027, 141028, 141029, 141030, 141031141032, 141033, 141034, 141035) c6( ) c7(CX, T, kh, dD, Dh, ea, wL, aA, eq, ci, q, ad, aT, Dj, K, ae, Dg, Di, aW, Y, ff, fe, aF, en, g, t, bz, bE, y); #c1(ADAM15) c2(NP_997074) c3(disintegrin and metalloproteinase domain-containing protein 15 isoform 1 preproprotein) c4(265026) c5(265027, 265028, 265029, 265030, 265031, 265032) c6( ) c7(CX, T, kh, dD, Dh, ea, wL, aA, eq, ci, q, ad, aT, Dj, K, ae, Dg, Di, aW, Y, ff, fe, aF, en, g, t, bz, bE, y); #c1(ADAM15) c2(NP_997077) c3(disintegrin and metalloproteinase domain-containing protein 15 isoform 3 preproprotein) c4(265033) c5(265034, 265035, 265036, 265037, 265038, 265039) c6( ) c7(CX, T, kh, dD, Dh, ea, wL, aA, eq, ci, q, ad, aT, Dj, K, ae, Dg, Di, aW, Y, ff, fe, aF, en, g, t, bz, bE, y); #c1(ADAM15) c2(NP_997078) c3(disintegrin and metalloproteinase domain-containing protein 15 isoform 4 preproprotein) c4(265040) c5(265041, 265042, 265043, 265044, 265045, 265046) c6( ) c7(CX, T, kh, dD, Dh, ea, wL, aA, eq, ci, q, ad, aT, Dj, K, ae, Dg, Di, aW, Y, ff, fe, aF, en, g, t, bz, bE, y); #c1(ADAM15) c2(NP_997079) c3(disintegrin and metalloproteinase domain-containing protein 15 isoform 5 preproprotein) c4(265047) c5(265048, 265049, 265050, 265051, 265052, 265053) c6( ) c7(CX, T, kh, dD, Dh, ea, wL, aA, eq, ci, q, ad, aT, Dj, K, ae, Dg, Di, aW, Y, ff, fe, aF, en, g, t, bz, bE, y); #c1(ADAM15) c2(NP_997080) c3(disintegrin and metalloproteinase domain-containing protein 15 isoform 6 preproprotein) c4(265054) c5(265055, 265056, 265057, 265058, 265059, 265060) c6( ) c7(CX, T, kh, dD, Dh, ea, wL, aA, eq, ci, q, ad, aT, Dj, K, ae, Dg, Di, aW, Y, ff, fe, aF, en, g, t, bz, bE, y); #c1(ADAM17) c2(NP_003174) c3(disintegrin and metalloproteinase domain-containing protein 17 preproprotein) c4(135885, 135886, 135887) c5(135888, 135889, 135890, 135891, 135892, 135893, 135894, 135895, 135896, 135897, 135898, 135899) c6( ) c7(Dk, gh, T, bL, dD, tp, ea, aw, iW, fd, aA, cz, tc, aj, v, j, ci, C, bB, eq, wV, V, fr, q, cd, ad, ai, eA, aE, do, Do, ju, aT, dz, vc, K, Dn, fb, ae, af, hm, Dl, B, aW, oV, ff, wc, hl, cr, r, fe, kp, aF, en, eE, t, cm, bz, Dm, pb, ck, es, kP, ac, eM, dB, hk, bE, iA, dh, mx, uz, CZ, dy, m, fD, be, fy, gq, y); #c1(ADAM19) c2(NP_150377) c3(disintegrin and metalloproteinase domain-containing protein 19 preproprotein) c4(228096, 228097) c5(228098, 228099, 228100, 228101, 228102, 228103, 228104, 228105, 228106, 228107, 228108, 228109) c6( ) c7(D, Bv, dB, Dq, jh, fZ, at, Dp, he, dy, m, bK, eA, t, fy, cd, aa); #c1(ADAM19) c2(XP_005266060) c3(disintegrin and metalloproteinase domain-containing protein 19 isoform X1) c4(279899, 279900) c5(279901, 279902, 279903, 279904, 279905, 279906, 279907) c6( ) c7(D, Bv, dB, Dq, jh, fZ, at, Dp, he, dy, m, bK, eA, t, fy, cd, aa); #c1(ADAM19) c2(XP_011532984) c3(disintegrin and metalloproteinase domain-containing protein 19 isoform X2) c4( ) c5(329211, 329212, 329213, 329214, 329215) c6( ) c7(D, Bv, dB, Dq, jh, fZ, at, Dp, he, dy, m, bK, eA, t, fy, cd, aa); #c1(ADAM2) c2(NP_001265042) c3(disintegrin and metalloproteinase domain-containing protein 2 isoform 2 precursor) c4(97713) c5(97714, 97715, 97716, 97717, 97718, 97719) c6( ) c7(es, T, iA, bu); #c1(ADAM2) c2(NP_001455) c3(disintegrin and metalloproteinase domain-containing protein 2 isoform 1 preproprotein) c4(117956) c5(117957, 117958, 117959, 117960, 117961, 117962) c6( ) c7(es, T, iA, bu); #c1(ADAM20) c2(XP_005268209) c3(disintegrin and metalloproteinase domain-containing protein 20 isoform X1) c4( ) c5(281631, 281632, 281633, 281634, 281635) c6( ) c7(aF); #c1(ADAM20) c2(XP_011535574) c3(disintegrin and metalloproteinase domain-containing protein 20 isoform X2) c4(332717) c5(332718) c6( ) c7(aF); #c1(ADAM21) c2(NP_003804) c3(disintegrin and metalloproteinase domain-containing protein 21 preproprotein) c4(141015) c5(141016, 141017, 141018, 141019, 141020, 141021) c6( ) c7(je, iM, kH); #c1(ADAM22) c2(NP_057435) c3(disintegrin and metalloproteinase domain-containing protein 22 isoform 3 preproprotein) c4(190780) c5(190781, 190782, 190783, 190784, 190785, 190786) c6( ) c7(aW, ha, eA, aT); #c1(ADAM22) c2(NP_068368) c3(disintegrin and metalloproteinase domain-containing protein 22 isoform 2 preproprotein) c4(209332, 209333) c5(209334, 209335, 209336, 209337, 209338, 209339, 209340, 209341, 209342, 209343, 209344, 209345) c6( ) c7(aW, ha, eA, aT); #c1(ADAM22) c2(NP_068369) c3(disintegrin and metalloproteinase domain-containing protein 22 isoform 1 preproprotein) c4(209346) c5(209347, 209348, 209349, 209350, 209351, 209352) c6( ) c7(aW, ha, eA, aT); #c1(ADAM22) c2(XP_011514624) c3(disintegrin and metalloproteinase domain-containing protein 22 isoform X7) c4(307309) c5(307310, 307311, 307312, 307313, 307314, 307315) c6( ) c7(aW, ha, eA, aT); #c1(ADAM23) c2(NP_003803) c3(disintegrin and metalloproteinase domain-containing protein 23 preproprotein) c4(141008) c5(141009, 141010, 141011, 141012, 141013, 141014) c6( ) c7(bM, T, dB, aW, oV, aT, r, aA, fd, aF, q, sj); #c1(ADAM23) c2(XP_005246989) c3(disintegrin and metalloproteinase domain-containing protein 23 isoform X1) c4(267574, 267575, 267576) c5(267577, 267578, 267579, 267580, 267581, 267582, 267583, 267584, 267585, 267586, 267587, 267588) c6( ) c7(bM, T, dB, aW, oV, aT, r, aA, fd, aF, q, sj); #c1(ADAM23) c2(XP_011510388) c3(disintegrin and metalloproteinase domain-containing protein 23 isoform X2) c4(300919) c5(300920, 300921, 300922, 300923, 300924, 300925, 300926, 300927, 300928, 300929, 300930, 300931, 300932, 300933) c6( ) c7(bM, T, dB, aW, oV, aT, r, aA, fd, aF, q, sj); #c1(ADAM28) c2(NP_055080) c3(disintegrin and metalloproteinase domain-containing protein 28 isoform 1 preproprotein) c4(178846) c5(178847, 178848, 178849, 178850, 178851, 178852) c6( ) c7(bL, T, fd, aA, n, v, ci, q, Dr, aT, aW, oV, ff, r, aF, en, g, bz, eM, dB, cj, ei, B); #c1(ADAM28) c2(NP_068547) c3(disintegrin and metalloproteinase domain-containing protein 28 isoform 3 preproprotein) c4(209393, 209394) c5(209395, 209396, 209397, 209398, 209399, 209400, 209401, 209402, 209403, 209404, 209405, 209406) c6( ) c7(bL, T, fd, aA, n, v, ci, q, Dr, aT, aW, oV, ff, r, aF, en, g, bz, eM, dB, cj, ei, B); #c1(ADAM28) c2(XP_005273437) c3(disintegrin and metalloproteinase domain-containing protein 28 isoform X4) c4(284588) c5(284589, 284590, 284591, 284592, 284593, 284594) c6( ) c7(bL, T, fd, aA, n, v, ci, q, Dr, aT, aW, oV, ff, r, aF, en, g, bz, eM, dB, cj, ei, B); #c1(ADAM28) c2(XP_011542668) c3(disintegrin and metalloproteinase domain-containing protein 28 isoform X1) c4(341226) c5( ) c6( ) c7(bL, T, fd, aA, n, v, ci, q, Dr, aT, aW, oV, ff, r, aF, en, g, bz, eM, dB, cj, ei, B); #c1(ADAM29) c2(NP_001265056) c3(disintegrin and metalloproteinase domain-containing protein 29 preproprotein) c4(97720, 97721, 97722, 97723) c5(97724, 97725, 97726, 97727, 97728, 97729, 97730, 97731, 97732, 97733, 97734, 97735, 97736, 97737, 97738, 97739, 97740, 97741, 97742, 97743, 97744, 97745, 97746, 97747, 97748, 97749, 97750, 97751, 97752, 97753, 97754, 97755, 97756) c6( ) c7(Y, ff, en, cj); #c1(ADAM33) c2(NP_001269376) c3(disintegrin and metalloproteinase domain-containing protein 33 isoform gamma preproprotein) c4(101353, 101354, 101355, 101356) c5(101357, 101358, 101359, 101360, 101361, 101362) c6( ) c7(bM, Dw, dD, ea, aA, v, j, eq, pM, eA, aT, Ds, A, aW, sp, Du, cr, aF, mo, eE, cT, dB, z, at, Dt, k, Dv); #c1(ADAM33) c2(NP_079496) c3(disintegrin and metalloproteinase domain-containing protein 33 isoform alpha preproprotein) c4(218393) c5(218394, 218395, 218396, 218397, 218398, 218399) c6( ) c7(bM, Dw, dD, ea, aA, v, j, eq, pM, eA, aT, Ds, A, aW, sp, Du, cr, aF, mo, eE, cT, dB, z, at, Dt, k, Dv); #c1(ADAM33) c2(NP_694882) c3(disintegrin and metalloproteinase domain-containing protein 33 isoform beta preproprotein) c4(245420) c5(245421, 245422, 245423, 245424, 245425, 245426) c6( ) c7(bM, Dw, dD, ea, aA, v, j, eq, pM, eA, aT, Ds, A, aW, sp, Du, cr, aF, mo, eE, cT, dB, z, at, Dt, k, Dv); #c1(ADAM33) c2(XP_006723702) c3(disintegrin and metalloproteinase domain-containing protein 33 isoform X2) c4( ) c5(295298, 295299, 295300, 295301, 295302, 295303) c6( ) c7(bM, Dw, dD, ea, aA, v, j, eq, pM, eA, aT, Ds, A, aW, sp, Du, cr, aF, mo, eE, cT, dB, z, at, Dt, k, Dv); #c1(ADAM33) c2(XP_006723703) c3(disintegrin and metalloproteinase domain-containing protein 33 isoform X4) c4(295304) c5( ) c6( ) c7(bM, Dw, dD, ea, aA, v, j, eq, pM, eA, aT, Ds, A, aW, sp, Du, cr, aF, mo, eE, cT, dB, z, at, Dt, k, Dv); #c1(ADAM33) c2(XP_006723707) c3(disintegrin and metalloproteinase domain-containing protein 33 isoform X9) c4(295305) c5( ) c6( ) c7(bM, Dw, dD, ea, aA, v, j, eq, pM, eA, aT, Ds, A, aW, sp, Du, cr, aF, mo, eE, cT, dB, z, at, Dt, k, Dv); #c1(ADAM33) c2(XP_011527669) c3(disintegrin and metalloproteinase domain-containing protein 33 isoform X5) c4(322566) c5(322567, 322568, 322569, 322570, 322571, 322572) c6( ) c7(bM, Dw, dD, ea, aA, v, j, eq, pM, eA, aT, Ds, A, aW, sp, Du, cr, aF, mo, eE, cT, dB, z, at, Dt, k, Dv); #c1(ADAM33) c2(XP_011527673) c3(disintegrin and metalloproteinase domain-containing protein 33 isoform X8) c4(322573, 322574) c5( ) c6( ) c7(bM, Dw, dD, ea, aA, v, j, eq, pM, eA, aT, Ds, A, aW, sp, Du, cr, aF, mo, eE, cT, dB, z, at, Dt, k, Dv); #c1(ADAM33) c2(XP_011527674) c3(disintegrin and metalloproteinase domain-containing protein 33 isoform X10) c4( ) c5(322575, 322576, 322577, 322578, 322579, 322580, 322581, 322582, 322583, 322584, 322585, 322586, 322587, 322588, 322589, 322590, 322591, 322592, 322593, 322594, 322595, 322596, 322597, 322598, 322599, 322600) c6( ) c7(bM, Dw, dD, ea, aA, v, j, eq, pM, eA, aT, Os, A, aW, sp, Du, cr, aF, mo, eE, cT, dB, z, at, Dt, k, Dv); #c1(ADAM33) c2(XP_011527675) c3(disintegrin and metalloproteinase domain-containing protein 33 isoform X11) c4( ) c5(322601, 322602, 322603, 322604, 322605, 322606, 322607, 322608, 322609, 322610) c6( ) c7(bM, Dw, dD, ea, aA, v, j, eq, pM, eA, aT, Ds, A, aW, sp, Du, cr, aF, mo, eE, cT, dB, z, at, Dt, k, Dv); #c1(ADAM7) c2(NP_003808) c3(disintegrin and metalloproteinase domain-containing protein 7 preproprotein) c4(141043) c5(141044, 141045, 141046, 141047, 141048, 141049, 141050) c6( ) c7(Y); #c1(ADAM7) c2(XP_005273727) c3(disintegrin and metalloproteinase domain-containing protein 7 isoform X3) c4(284821) c5( ) c6( ) c7(Y); #c1(ADAM7) c2(XP_005273730) c3(disintegrin and metalloproteinase domain-containing protein 7 isoform X6) c4( ) c5(284822, 284823, 284824, 284825, 284826) c6( ) c7(Y); #c1(ADAM8) c2(NP_001100) c3(disintegrin and metalloproteinase domain-containing protein 8 isoform 1 precursor) c4(41611) c5(41612, 41813, 41814, 41815, 41816, 41817) c6( ) c7(bM, T, dD, aC, ea, IH, aw, n, zh, j, eq, eA, ad, ke, av, aE, aT, ae, cW, ff, mQ, kp, en, g, pL, t, bz, cT, kP, zr, dB, y); #c1(ADAM8) c2(NP_001157961) c3(disintegrin and metalloproteinase domain-containing protein 8 isoform 2 precursor) c4(62959) c5(62960, 62961, 62962, 62963, 62964, 62965) c6( ) c7(bM, T, dD, aC, ea, IH, aw, n, zh, j, eq, eA, ad, ke, av, aE, aT, ae, cW, ff, mQ, kp, en, g, pL, t, bz, cT, kP, zr, dB, y); #c1(ADAM8) c2(NP_001157962) c3(disintegrin and metalloproteinase domain-containing protein 8 isoform 3 precursor) c4(62966) c5(62967, 62968, 62969, 62970, 62971, 62972) c6( ) c7(bM, T, dD, aC, ea, IH, aw, n, zh, j, eq, eA, ad, ke, av, aE, aT, ae, cW, ff, mQ, kp, en, g, pL, t, bz, cT, kP, zr, dB, y); #c1(ADAM8) c2(XP_011537418) c3(disintegrin and metalloproteinase domain-containing protein 8 isoform X1) c4( ) c5(335071) c6( ) c7(bM, T, dD, aC, ea, IH, aw, n, zh, j, eq, eA, ad, ke, av, aE, aT, ae, cW, ff, mQ, kp, en, g, pL, t, bz, cT, kP, zr, dB, y); #c1(ADAM9) c2(NP_003807) c3(disintegrin and metalloproteinase domain-containing protein 9 precursor) c4(141036) c5(141037, 141038, 141039, 141040, 141041, 141042) c6( ) c7(T, dD, id, ea, aA, bB, eq, ci, fr, ad, av, iu, aE, qK, aT, dL, ey, K, Dz, ae, af, eL, IR, aW, Y, ff, Dx, ag, aF, en, g, nC, bz, es, Dy, eM, iA, bE, nw, cB, B); #c1(ADAMDEC1) c2(NP_001138743) c3(ADAM DEC1 isoform 2) c4( ) c5(57511, 57512, 57513, 57514, 57515, 57516, 57517, 57518) c6( ) c7(fe, T, vB, ey, uQ); #c1(ADAMDEC1) c2(NP_055294) c3(ADAM DEC1 isoform 1 precursor) c4(180336, 180337) c5(180338, 180339, 180340, 180341, 180342, 180343, 180344, 180345) c6( ) c7(fe, T, vB, ey, uQ); #c1(ADAMTS1) c2(NP_008919) c3(A disintegrin and metalloproteinase with thrombospondin motifs 1 preproprotein) c4(169562) c5(169563, 169564, 169565, 169566, 169567, 169568) c6( ) c7(T, dD, aZ, ea, e, aw, aA, j, ci, eq, V, ad, av, fX, aE, yt, aT, cy, ey, jo, ae, eu, DA, A, aW, eH, vs, aF, cl, eE, f, ac, eM, AM, wO, hL, B, DB); #c1(ADAMTS10) c2(NP_112219) c3(A disintegrin and metalloproteinase with thrombospondin motifs 10 isoform 1 preproprotein) c4(220876, 220877) c5(220878, 220879, 220880, 220881, 220882, 220883, 220884, 220885, 220886, 220887, 220888, 220889) c6( ) c7(dH, DD, eE, DC, DE, K, dw); #c1(ADAMTS10) c2(XP_011526635) c3(A disintegrin and metalloproteinase with thrombospondin motifs 10 isoform X1) c4(320935) c5(320936, 320937, 320938, 320939, 320940, 320941) c6( ) c7(dH, DD, eE, DC, DE, K, dw); #c1(ADAMTS12) c2(NP_112217) c3(A disintegrin and metalloproteinase with thrombospondin motifs 12 preproprotein) c4(220862, 220863) c5(220864, 220865, 220866, 220867, 220868, 220869, 220870, 220871, 220872, 220873, 220874, 220875) c6( ) c7(ai, T, bM, bE, aW, sp, oV, aT, bB, ci, y, bz, cd, DF); #c1(ADAMTS12) c2(XP_011512449) c3(A disintegrin and metalloproteinase with thrombospondin motifs 12 isoform X3) c4(303135) c5( ) c6( ) c7(ai, T, bM, bE, aW, sp, oV, aT, bB, ci, y, bz, cd, DF); #c1(ADAMTS12) c2(XP_011512451) c3(A disintegrin and metalloproteinase with thrombospondin motifs 12 isoform X5) c4( ) c5(303136, 303137, 303138, 303139, 303140, 303141) c6( ) c7(ai, T, bM, bE, aW, sp, oV, aT, bB, ci, y, bz, cd, DF); #c1(ADAMTS13) c2(NP_620594) c3(A disintegrin and metalloproteinase with thrombospondin motifs 13 isoform 1 preproprotein) c4(237864) c5(237865, 237866, 237867, 237868, 237869, 237870, 237871, 237872, 237873, 237874, 237875, 237876, 237877, 237878, 237879, 237880, 237881, 237882, 237883, 237884, 237885, 237886, 237887, 237888, 237889, 237890, 237891, 237892, 237893, 237894, 237895, 237896, 237897, 237898, 237899, 237900, 237901, 237902, 237903, 237904, 237905, 237906, 237907, 237908, 237909, 237910, 237911, 237912, 237913, 237914, 237915, 237916, 237917, 237918, 237919, 237920, 237921, 237922, 237923, 237924, 237925, 237926, 237927, 237928, 237929, 237930, 237931, 237932, 237933, 237934, 237935, 237936, 237937, 237938, 237939, 237940, 237941, 237942, 237943, 237944, 237945, 237946, 237947, 237948, 237949, 237950, 237951, 237952, 237953, 237954, 237955, 237956, 237957, 237958, 237959, 237960, 237961, 237962, 237963, 237964, 237965, 237966, 237967) c6(237968, 237969, 237970, 237971, 237972) c7(P, DS, oD, DM, T, uH, PA, sQ, eR, e, al, DV, jx aw, n, oY, bS, j, DP, C, v, fr, aY, eh, zo, ai, DJ, DK, ql, M, aT, oW, nm, DO, dV, DU, DG, K, h, DY, DX, jj, qk, vl, eu, s, aW, Y, DN, ev, aq, DR, S, as, iR, cm, uC, DL, iK, Dl, dr, eK, ck, ar, DT, ac, xK, iA, dB, ag, DW, AH, X, fP, DQ, ei, eg, pJ, kS, B, DH); #c1(ADAMTS13) c2(NP_620595) c3(A disintegrin and metalloproteinase with thrombospondin motifs 13 isoform 3 preproprotein) c4(237973, 237974) c5(237975, 237976, 237977, 237978, 237979, 237980, 237981, 237982, 237983) c6(237984, 237985) c7(P, OS, oO, DM, T, uH, pA, sQ, eR, e, al, DV, jx, aw, n, oY, bS, j, DP, C, v, fr, aY, eh, zo, ai, DJ, DK, ql, M, aT, oW, nm, DO, dV, DU, DG, K, h, DY, DX, jj, qk, vl, eu, s, aW, Y, DN, ev, aq, DR, S, as, iR, cm, uC, DL, iK, Dl, dr, eK, ck, ar, DT, ac, xK, iA, dB, ag, DW, AH, X, fP, DQ, ei, eg, pJ, kS, B, DH); #c1(ADAMTS13) c2(NP_620596) c3(A disintegrin and metalloproteinase with thrombospondin motifs 13 isoform 2 preproprotein) c4(237986) c5(237987, 237988, 237989, 237990, 237991, 237992, 237993, 237994, 237995) c6(237996, 237997) c7(P, DS, oO, DM, T, uH, pA, sQ, eR, e, al, DV, jx, aw, n, oY, bS, j, DP, C, v, fr, aY, eh, zo, ai, DJ, DK, ql, M, aT, oW, nm, DO, dV, DU, DG, K, h, DY, DX, jj, qk, vl, eu, s, aW, Y, DN, ev, aq, DR, S, as, iR, cm, uC, DL, iK, Dl, dr, eK, ck, ar, DT, ac, xK, iA, dB, ag, DW, AH, X, fP, DQ, ei, eg, pJ, kS, B, DH); #c1(ADAMTS13) c2(XP_011516477) c3(A disintegrin and metalloproteinase with thrombospondin motifs 13 isoform X2) c4( ) c5(309830, 309831, 309832, 309833, 309834, 309835, 309836, 309837, 309838) c6(309839, 309840) c7(P, DS, oO, DM, T, uH, PA, sQ, eR, e, al, DV, jx, aw, n, oY, bS, j, DP, C, v, fr, aY, eh, zo, ai, DJ, DK, ql, M, aT, oW, nm, DO, dV, DU, DG, K, h, DY, DX, jj, qk, vl, eu, s, aW, Y, DN, ev, aq, DR, S, as, iR, cm, uC, DL, iK, Dl, dr, eK, ck, ar, DT, ac, xK, iA, dB, ag, DW, AH, X, fP, DQ, ei, eg, pJ, kS, B, DH); #c1(ADAMTS13) c2(XP_011516478) c3(A disintegrin and metalloproteinase with thrombospondin motifs 13 isoform X3) c4(309841) c5(309842, 309843, 309844, 309845, 309846, 309847, 309848, 309849, 309850) c6(309851, 309852) c7(P, DS, oO, DM, T, uH, pA, sQ, eR, e, al, DV, jx, aw, n, oY, bS, j, DP, C, v, fr, aY, eh, zo, ai, DJ, DK, ql, M, aT, oW, nm, DO, dV, DU, DG, K, h, DY, DX, jj, qk, vl, eu, s, aW, Y, DN, ev, aq, DR, S, as, iR, cm, uC, DL, iK, Dl, dr, eK, ck, ar, DT, ac, xK, iA, dB, ag, DW, AH, X, fP, DQ, ei, eg, pJ, kS, B, DH); #c1(ADAMTS13) c2(XP_011516479) c3(A disintegrin and metalloproteinase with thrombospondin motifs 13 isoform X4) c4( ) c5(309853) c6( ) c7(P, DS, oO, DM, T, uH, pA, sQ, eR, e, al, DV, jx, aw, n, oY, bS, j, DP, C, v, fr, aY, eh, zo, ai, DJ, DK, ql, M, aT, oW, nm, DO, dV, DU, DG, K, h, DY, DX, jj, qk, vl, eu, s, aW, Y, DN, ev, aq, DR, S, as, iR, cm, uC, DL, iK, Dl, dr, eK, ck, ar, DT, ac, xK, iA, dB, ag, DW, AH, X, fP, DQ, ei, eg, pJ, kS, B, DH); #c1(ADAMTS13) c2(XP_011516482) c3(A disintegrin and metalloproteinase with thrombospondin motifs 13 isoform X7) c4(309854, 309855, 309856) c5(309857, 309858, 309859, 309860, 309861, 309862, 309863, 309864, 309865, 309866, 309867, 309868, 309869, 309870, 309871, 309872, 309873, 309874, 309875, 309876, 309877, 309878, 309879, 309880, 309881) c6(309882, 309883, 309884, 309885, 309886, 309887) c7(P, DS, oO, DM, T, uH, pA, sQ, eR, e, al, DV, jx, aw, n, oY, bS, j, DP, C, v, fr, aY, eh, zo, ai, DJ, DK, ql, M, aT, oW, nm, DO, dV, DU, DG, K, h, DY, DX, jj, qk, vl, eu, s, aW, Y, DN, ev, aq, DR, S, as, iR, cm, uC, DL, iK, Dl, dr, eK, ck, ar, DT, ac, xK, iA, dB, ag, DW, AH, X, fP, DQ, ei, eg, pJ, kS, B, DH); #c1(ADAMTS14) c2(NP_542453) c3(A disintegrin and metalloproteinase with thrombospondin motifs 14 isoform 2 preproprotein) c4(232986) c5(232987, 232988, 232989, 232990, 232991, 232992, 232993, 232994) c6(232995, 232996) c7(V, dt, bK, c, DZ); #c1(ADAMTS14) c2(NP_631894) c3(A disintegrin and metalloproteinase with thrombospondin motifs 14 isoform 1 preproprotein) c4(238191) c5(238192, 238193, 238194, 238195, 238196, 238197, 238198, 238199) c6(238200, 238201) c7(V, dt, bK, c, DZ); #c1(ADAMTS14) c2(XP_011537611) c3(A disintegrin and metalloproteinase with thrombospondin motifs 14 isoform X7) c4( ) c5(335189) c6( ) c7(V, dt, bK, c, DZ); #c1(ADAMTS15) c2(NP_620686) c3(A disintegrin and metalloproteinase with thrombospondin motifs 15 preproprotein) c4(238011) c5(238012, 238013, 238014, 238015, 238016, 238017, 238018, 238019) c6(238020, 238021) c7(bE, aW, oV, r, aT, bB, ci, Ea, q, ad); #c1(ADAMTS16) c2(NP_620687) c3(A disintegrin and metalloproteinase with thrombospondin motifs 16 preproprotein) c4(238022, 238023) c5(238024, 238025, 238026, 238027, 238028, 238029, 238030, 238031, 238032, 238033, 238034, 238035) c6( ) c7(kh, c, ht, cz, hu, an, it); #c1(ADAMTS17) c2(NP_620688) c3(A disintegrin and metalloproteinase with thrombospondin motifs 17 preproprotein) c4(238036) c5(238037, 238038, 238039, 238040, 238041, 238042, 238043) c6( ) c7(Ec, W, DE, aq, Eh); #c1(ADAMTS18) c2(NP_955387) c3(A disintegrin and metalloproteinase with thrombospondin motifs 18 preproprotein) c4(261646, 261647) c5(261648, 261649, 261650, 261651, 261652, 261653, 261654, 261655, 261656, 261657, 261658, 261659) c6( ) c7(T, Y, Be, aT, Ee, ci, j, Ed, fq, bA); #c1(ADAMTS19) c2(NP_598377) c3(A disintegrin and metalloproteinase with thrombospondin motifs 19 preproprotein) c4(235464) c5(235465, 235466, 235467, 235468, 235469, 235470, 235471, 235472) c6(235473, 235474) c7(at, zZ, il, Ef); #c1(ADAMTS2) c2(NP_055059) c3(A disintegrin and metalloproteinase with thrombospondin motifs 2 isoform 1 preproprotein) c4(178653) c5(178654, 178655, 178656, 178657, 178658, 178659, 178660) c6( ) c7(ck, Eg, aW, ds, Ei, aT, cj, fd, gf, bS, K, j, ct, Z, Eh, DZ); #c1(ADAMTS2) c2(NP_067610) c3(A disintegrin and metalloproteinase with thrombospondin motifs 2 isoform 2 preproprotein) c4(209045) c5(209046, 209047, 209048, 209049, 209050, 209051) c6( ) c7(ck, Eg, aW, ds, Ei, aT, cj, fd, gf, bS, K, j, ct, Z, Eh, DZ); #c1(ADAMTS20) c2(NP_079279) c3(A disintegrin and metalloproteinase with thrombospondin motifs 20 preproprotein) c4(217666, 217667, 217668, 217669) c5(217670, 217671, 217672, 217673, 217674, 217675, 217676, 217677, 217678, 217679, 217680, 217681, 217682, 217683, 217684, 217685, 217686, 217687, 217688, 217689, 217690, 217691, 217692, 217693) c6( ) c7(Y); #c1(ADAMTS3) c2(NP_055058) c3(A disintegrin and metalloproteinase with thrombospondin motifs 3 preproprotein) c4(178646) c5(178647, 178648, 178649, 178650, 178651, 178652) c6( ) c7(bL, dD, pG, ea, Ej, eo, eq, V, ai, DZ); #c1(ADAMTS4) c2(NP_005090) c3(A disintegrin and metalloproteinase with thrombospondin motifs 4 preproprotein) c4(152805, 152806) c5(152807, 152808, 152809, 152810, 152811, 152812, 152813, 152814, 152815, 152816, 152817, 152818) c6( ) c7(ai, T, dD, d, PG, ea, Eh, Ej, eo, eq, eA, pL, y, V, eN, af, Ek, DZ); #c1(ADAMTS5) c2(NP_008969) c3(A disintegrin and metalloproteinase with thrombospondin motifs 5 preproprotein) c4(169971) c5(169972, 169973, 169974, 169975, 169976, 169977) c6( ) c7(rt, T, dD, d, ea, Ej, eq, eA, y, rA, ai, ad); #c1(ADAMTS6) c2(NP_922932) c3(A disintegrin and metalloproteinase with thrombospondin motifs 6 preproprotein) c4(258654) c5(258655, 258656, 258657, 258658, 258659, 258660, 258661, 258662, 258663, 258664, 258665, 258666, 258667) c6( ) c7(aw); #c1(ADAMTS6) c2(XP_011541418) c3(A disintegrin and metalloproteinase with thrombospondin motifs 6 isoform X3) c4(340023) c5(340024, 340025, 340026, 340027, 340028, 340029) c6( ) c7(aw); #c1(ADAMTS6) c2(XP_011541422) c3(A disintegrin and metalloproteinase with thrombospondin motifs 6 isoform X7) c4(340030) c5( ) c6( ) c7(aw); #c1(ADAMTS7) c2(NP_055087) c3(A disintegrin and metalloproteinase with thrombospondin motifs 7 preproprotein) c4(178867) c5(178868, 178869, 178870, 178871, 178872, 178873, 178874, 178875, 178876, 178877, 178878, 178879) c6( ) c7(dD, kl, W, BL, cW, ea, ds, e, aw, j, eq, y, ai); #c1(ADAMTS7) c2(XP_005254194) c3(A disintegrin and metalloproteinase with thrombospondin motifs 7 isoform X1) c4(273051) c5( ) c6( ) c7(dD, kl, W, BL, cW, ea, ds, e, aw, j, eq, y, ai); #c1(ADAMTS7) c2(XP_011519468) c3(A disintegrin and metalloproteinase with thrombospondin motifs 7 isoform X2) c4( ) c5(314137, 314138) c6( ) c7(dD, kl, W, BL, cW, ea, ds, e, aw, j, eq, y, ai); #c1(ADAMTS8) c2(NP_008968) c3(A disintegrin and metalloproteinase with thrombospondin motifs 8 preproprotein) c4(169957, 169958) c5(169959, 169960, 169961, 169962, 169963, 169964, 169965, 169966, 169967, 169968, 169969, 169970) c6( ) c7(B, aE, dB, aW, aT, ci, K, eA, q); #c1(ADAMTS9) c2(NP_891550) c3(A disintegrin and metalloproteinase with thrombospondin motifs 9 preproprotein) c4(257274) c5(257275, 257276, 257277, 257278, 257279, 257280, 257281, 257282, 257283, 257284, 257285, 257286, 257287, 257288, 257289, 257290) c6( ) c7(bL, T, El, ht, aw, ja, aA, h, fd, aj, v, aF, ci, hu, hH, it, af, J, ad); #c1(ADAMTS9) c2(XP_005265386) c3(A disintegrin and metalloproteinase with thrombospondin motifs 9 isoform X1) c4(279473, 279474) c5(279475, 279476, 279477, 279478, 279479, 279480, 279481, 279482, 279483) c6( ) c7(bL, T, El, ht, aw, ja, aA, h, fd, aj, v, aF, ci, hu, hH, it, af, J, ad); #c1(ADAMTSL1) c2(NP_001035362) c3(ADAMTS-like protein 1 isoform 4 precursor) c4(32787, 32788, 32789) c5(32790, 32791, 32792, 32793, 32794, 32795, 32796, 32797, 32798, 32799, 32800, 32801, 32802, 32803, 32804, 32805, 32806, 32807, 32808, 32809, 32810, 32811, 32812, 32813, 32814) c6( ) c7(bM, aw, an); #c1(ADAMTSL1) c2(NP_443098) c3(ADAMTS-like protein 1 isoform 2 precursor) c4(229409) c5(229410, 229411, 229412, 229413, 229414, 229415, 229416, 229417, 229418, 229419, 229420, 229421, 229422, 229423, 229424, 229425, 229426, 229427) c6( ) c7(bM, aw, an); #c1(ADAMTSL1) c2(XP_011516366) c3(ADAMTS-like protein 1 isoform X2) c4(309587) c5( ) c6( ) c7(bM, aw, an); #c1(ADAMTSL1) c2(XP_011516368) c3(ADAMTS-like protein 1 isoform X4) c4(309588) c5( ) c6( ) c7(bM, aw, an); #c1(ADAMTSL1) c2(XP_011516372) c3(ADAMTS-like protein 1 isoform X6) c4( ) c5(309589, 309590, 309591, 309592, 309593, 309594, 309595, 309596, 309597) c6( ) c7(bM, aw, an); #c1(ADAMTSL2) c2(NP_001138792) c3(ADAMTS-like protein 2 precursor) c4( ) c5(57755, 57756, 57757, 57758, 57759, 57760, 57761, 57762, 57763) c6( ) c7(mO, xb, DT, up, Em, Eo, DE, Ep, En, rv); #c1(ADAMTSL2) c2(XP_005272294) c3(ADAMTS-like protein 2 isoform X2) c4(283992, 283993) c5(283994, 283995, 283996, 283997, 283998, 283999, 284000, 284001) c6( ) c7(mO, xb, DT, up, Em, Eo, DE, Ep, En, rv); #c1(ADAMTSL2) c2(XP_005272295) c3(ADAMTS-like protein 2 isoform X5) c4(284002) c5( ) c6( ) c7(mO, xb, DT, up, Em, Eo, DE, Ep, En, rv); #c1(ADAMTSL2) c2(XP_011517543) c3(ADAMTS-like protein 2 isoform X3) c4( ) c5(311341, 311342, 311343, 311344, 311345, 311346, 311347) c6( ) c7(mO, xb, DT, up, Em, Eo, DE, Ep, En, rv); #c1(ADAMTSL3) c2(NP_997400) c3(ADAMTS-like protein 3 isoform a precursor) c4(265500) c5(265501, 265502, 265503, 265504, 265505, 265506) c6( ) c7(T, dH, bE, hk, aw, r, bB, ti, bK, q); #c1(ADAMTSL3) c2(XP_011520127) c3(ADAMTS-like protein 3 isoform X5) c4( ) c5(315017, 315018, 315019, 315020) c6( ) c7(T, dH, bE, hk, aw, r, bB, ti, bK, q); #c1(ADAMTSL4) c2(XP_011507946) c3(ADAMTS-like protein 4 isoform X2) c4(298299) c5(298300, 298301) c6( ) c7(x, Et, DT, Eu, Er, Eq, DE, m, k, Ep, t, dr, Es); #c1(ADAMTSL4) c2(XP_011507947) c3(ADAMTS-like protein 4 isoform X3) c4(298302) c5(298303, 298304, 298305) c6( ) c7(x, Et, DT, Eu, Er, Eq, DE, m, k, Ep, t, dr, Es); #c1(ADAMTSL4) c2(XP_011507952) c3(ADAMTS-like protein 4 isoform X5) c4( ) c5(298306) c6( ) c7(x, Et, DT, Eu, Er, Eq, DE, m, k, Ep, t, dr, Es); #c1(ADAMTSL4) c2(XP_011507954) c3(ADAMTS-like protein 4 isoform X6) c4(298307) c5(298308, 298309, 298310, 298311, 298312, 298313, 298314) c6( ) c7(x, Et, DT, Eu, Er, Eq, DE, m, k, Ep, t, dr, Es); #c1(ADAMTSL5) c2(NP_998769) c3(ADAMTS-like protein 5 precursor) c4(265882) c5(265883, 265884, 265885, 265886, 265887, 265888, 265889, 265890, 265891) c6(265892, 265893) c7(ac); #c1(ADAMTSL5) c2(XP_005259606) c3(ADAMTS-like protein 5 isoform X2) c4(276189) c5(276190, 276191, 276192, 276193, 276194, 276195, 276196, 276197) c6(276198, 276199) c7(ac); #c1(ADAMTSL5) c2(XP_011526264) c3(ADAMTS-like protein 5 isoform X3) c4(320536) c5( ) c6( ) c7(ac); #c1(ADAMTSL5) c2(XP_011526265) c3(ADAMTS-like protein 5 isoform X4) c4( ) c5(320537, 320538, 320539, 320540, 320541, 320542, 320543) c6(320544, 320545) c7(ac); #c1(ADAP1) c2(NP_001271237) c3(arf-GAP with dual PH domain-containing protein 1 isoform 2) c4(103693) c5(103694, 103695, 103696, 103697, 103698, 103699) c6( ) c7(cm, af, L); #c1(ADAP1) c2(NP_001271239) c3(arf-GAP with dual PH domain-containing protein 1 isoform 3) c4( ) c5(103700, 103701, 103702, 103703, 103704, 103705) c6( ) c7(cm, af, L); #c1(ADAP1) c2(NP_001271240) c3(arf-GAP with dual PH domain-containing protein 1 isoform 4) c4(103706) c5(103707, 103708, 103709, 103710, 103711, 103712, 103713, 103714, 103715, 103716, 103717, 103718) c6( ) c7(cm, af, L); #c1(ADAP1) c2(NP_006860) c3(arf-GAP with dual PH domain-containing protein 1 isoform 1) c4(168686, 168687, 168688) c5(168689, 168690, 168691, 168692, 168693, 168694) c6( ) c7(cm, af, L); #c1(ADAP2) c2(NP_060874) c3(arf-GAP with dual PH domain-containing protein 2) c4(198223) c5(198224, 198225, 198226, 198227, 198228, 198229) c6( ) c7(T, Ew, nX, Az, Ev, hP, bD, xb, xt); #c1(ADAR) c2(NP_001020278) c3(double-stranded RNA-specific adenosine deaminase isoform d) c4(28529) c5(28530, 28531, 28532, 28533, 28534) c6( ) c7(bM, T, Ez, Ik, fR, al, jx, pi, jE, EA, hX, EB, F, ds, aU, h, IQ, cp, kw, Y, eZ, r, Io, CQ, as, Ey, f, ps, EC, c, dB, AH, Da, rF, it, B, Ex); #c1(ADAR) c2(NP_001102) c3(double-stranded RNA-specific adenosine deaminase isoform a) c4(41826) c5(41827, 41828, 41829, 41830, 41831, 41832) c6( ) c7(bM, T, Ez, Ik, fR, al, jx, pi, jE, EA, hX, EB, F, ds, aU, h, IQ, cp, kw, Y, eZ, r, Io, CQ, as, Ey, f, ps, EC, c, dB, AH, Da, rF, it, B, Ex); #c1(ADAR) c2(NP_056655) c3(double-stranded RNA-specific adenosine deaminase isoform b) c4(188112) c5( ) c6( ) c7(bM, T, Ez, Ik, fR, al, jx, pi, jE, EA, hX, EB, F, ds, aU, h, IQ, cp, kw, Y, eZ, r, Io, CQ, as, Ey, f, ps, EC, c, dB, AH, Da, rF, it, B, Ex); #c1(ADAR) c2(XP_011507362) c3(double-stranded RNA-specific adenosine deaminase isoform X2) c4(297193) c5(297194, 297195, 297196, 297197, 297198, 297199, 297200) c6( ) c7(bM, T, Ez, Ik, fR, al, jx, pi, jE, EA, hX, EB, F, ds, aU, h, IQ, cp, kw, Y, eZ, r, Io, CQ, as, Ey, f, ps, EC, c, dB, AH, Da, rF, it, B, Ex); #c1(ADAR) c2(XP_011507363) c3(double-stranded RNA-specific adenosine deaminase isoform X3) c4( ) c5(297201, 297202, 297203, 297204, 297205, 297206) c6( ) c7(bM, T, Ez, Ik, fR, al, jx, pi, jE, EA, hX, EB, F, ds, aU, h, IQ, cp, kw, Y, eZ, r, Io, CQ, as, Ey, f, ps, EC, c, dB, AH, Da, rF, it, B, Ex); #c1(ADARB1) c2(NP_056649) c3(double-stranded RNA-specific editase 1 isoform 3) c4(188099) c5(188100, 188101, 188102, 188103, 188104) c6( ) c7(T, al, eX, bO, n, eV, bK, oi, he, hH, kl, d, eZ, aq, as, bz, c, cA, dB, eM, B, EB); #c1(ADARB1) c2(XP_006724017) c3(double-stranded RNA-specific editase 1 isoform X4) c4( ) c5(295599, 295600, 295601, 295602, 295603, 295604, 295605) c6( ) c7(T, al, eX, bO, n, eV, bK, oi, he, hH, kl, d, eZ, aq, as, bz, c, cA, dB, eM, B, EB); #c1(ADARB1) c2(XP_006724019) c3(double-stranded RNA-specific editase 1 isoform X2) c4(295606) c5(295607, 295608, 295609, 295610, 295611, 295612, 295613, 295614, 295615, 295616, 295617, 295618, 295619, 295620, 295621, 295622) c6( ) c7(T, al, eX, bO, n, eV, bK, oi, he, hH, kl, d, eZ, aq, as, bz, c, cA, dB, eM, B, EB); #c1(ADARB1) c2(XP_011527727) c3(double-stranded RNA-specific editase 1 isoform X3) c4(322685) c5(322686, 322687, 322688, 322689) c6( ) c7(T, al, eX, bO, n, eV, bK, oi, he, hH, kl, d, eZ, aq, as, bz, c, cA, dB, eM, B, EB); #c1(ADARB1) c2(XP_011527729) c3(double-stranded RNA-specific editase 1 isoform X1) c4(322690, 322691) c5(322692, 322693, 322694, 322695, 322696, 322697) c6( ) c7(T, al, eX, bO, n, eV, bK, oi, he, hH, kl, d, eZ, aq, as, bz, c, cA, dB, eM, B, EB); #c1(ADARB1) c2(XP_011527733) c3(double-stranded RNA-specific editase 1 isoform X7) c4( ) c5(322698, 322699, 322700, 322701, 322702) c6( ) c7(T, al, eX, bO, n, eV, bK, oi, he, hH, kl, d, eZ, aq, as, bz, c, cA, dB, eM, B, EB); #c1(ADARB2) c2(NP_061172) c3(double-stranded RNA-specific editase 82) c4(199733, 199734, 199735) c5(199736, 199737, 199738, 199739, 199740, 199741, 199742, 199743, 199744, 199745, 199746, 199747, 199748, 199749, 199750, 199751, 199752, 199753) c6( ) c7(T, d, ac, c, dB, fq, Ea, IB, sD); #c1(ADAT2) c2(NP_001273188) c3(tRNA-specific adenosine deaminase 2 isoform b) c4( ) c5(104526, 104527, 104528, 104529, 104530) c6( ) c7(nM); #c1(ADAT2) c2(NP_872309) c3(tRNA-specific adenosine deaminase 2 isoform a) c4(256079, 256080) c5(256081, 256082, 256083, 256084, 256085, 256086) c6( ) c7(nM); #c1(ADAT2) c2(XP_011533741) c3(tRNA-specific adenosine deaminase 2 isoform X2) c4( ) c5(329846, 329847) c6( ) c7(nM); #c1(ADAT2) c2(XP_011533745) c3(tRNA-specific adenosine deaminase 2 isoform X3) c4(329848) c5(329849, 329850, 329851, 329852, 329853) c6( ) c7(nM); #c1(ADAT3) c2(NP_612431) c3(probable inactive tRNA-specific adenosine deaminase-like protein 3) c4(236453, 236454) c5(236455, 236456, 236457, 236458, 236459, 236460, 236461, 236462, 236463, 236464, 236465, 236466, 236467) c6( ) c7(ED); #c1(ADCK3) c2(NP_064632) c3(chaperone activity of bc1 complex-like, mitochondrial) c4(203405, 203406, 203407, 203408, 203409, 203410, 203411) c5(203412, 203413, 203414, 203415, 203416, 203417, 203418, 203419, 203420, 203421, 203422, 203423, 203424, 203425, 203426, 203427, 203428, 203429, 203430, 203431, 203432, 203433, 203434, 203435, 203436, 203437, 203438, 203439, 203440, 203441, 203442, 203443, 203444, 203445, 203446, 203447, 203448, 203449, 203450, 203451, 203452, 203453, 203454, 203455, 203456, 203457) c6( ) c7(EG, EE, EH, ky, EE); #c1(ADCK4) c2(NP_001136027) c3(aarF domain-containing protein kinase 4 isoform b) c4(54058) c5(54059, 54060, 54061, 54062, 54063, 54064, 54065, 54066, 54067, 54068) c6( ) c7(dy, ah, gi, El, If); #c1(ADCK4) c2(XP_005259327) c3(aarF domain-containing protein kinase 4 isoform X2) c4( ) c5(276061) c6( ) c7(dy, ah, gi, El, If); #c1(ADCK4) c2(XP_006723456) c3(aarF domain-containing protein kinase 4 isoform X1) c4(295208) c5(295209, 295210, 295211, 295212, 295213) c6( ) c7(dy, ah, gi, El, If); #c1(ADCY1) c2(NP_066939) c3(adenylate cyclase type 1 isoform 1) c4(207601, 207602) c5(207603, 207604, 207605, 207606, 207607, 207608, 207609, 207610, 207611, 207612, 207613, 207614, 207615) c6( ) c7(ft, cA, hr, hR, bS, ct, Z); #c1(ADCY10) c2(NP_001161221) c3(adenylate cyclase type 10 isoform 2) c4( ) c5(65514, 65515, 65516, 65517, 65518) c6( ) c7(T, s, DD, zs, EK, cr, r, cz, Ej, ci, IQ, EL, eA, q, bA, EJ); #c1(ADCY10) c2(NP_001284701) c3(adenylate cyclase type 10 isoform 3) c4(112342, 112343) c5(112344, 112345, 112346, 112347, 112348, 112349) c6( ) c7(T, s, DD, zs, EK, cr, r, cz, Ej, ci, IQ, EL, eA, q, bA, EJ); #c1(ADCY10) c2(NP_060887) c3(adenylate cyclase type 10 isoform 1) c4(198396) c5(198397, 198398, 198399, 198400, 198401, 198402, 198403, 198404, 198405, 198406, 198407, 198408) c6( ) c7(T, s, DD, zs, EK, cr, r, cz, Ej, ci, IQ, EL, eA, q, bA, EJ); #c1(ADCY10) c2(XP_006711512) c3(adenylate cyclase type 10 isoform X6) c4(286046) c5( ) c6( ) c7(T, s, DD, zs, EK, cr, r, cz, Ej, ci, IQ, EL, eA, q, bA, EJ); #c1(ADCY10) c2(XP_011508066) c3(adenylate cyclase type 10 isoform X7) c4( ) c5(298533) c6( ) c7(T, s, DD, zs, EK, cr, r, cz, Ej, ci, IQ, EL, eA, q, bA, EJ); #c1(ADCY2) c2(NP_065433) c3(adenylate cyclase type 2) c4(204759, 204760, 204761, 204762) c5(204763, 204764, 204765, 204766, 204767, 204768, 204769, 204770, 204771, 204772, 204773, 204774, 204775, 204776, 204777, 204778, 204779, 204780, 204781, 204782, 204783) c6( ) c7(bM, T, EM, ac, bE, bB, at, pM, cm, eN, eA); #c1(ADCY2) c2(XP_011512244) c3(adenylate cyclase type 2 isoform X1) c4( ) c5(302818, 302819, 302820, 302821, 302822) c6( ) c7(bM, T, EM, ac, bE, bB, at, pM, cm, eN, eA); #c1(ADCY3) c2(NP_004027) c3(adenylate cyclase type 3) c4(142942, 142943) c5(142944, 142945, 142946, 142947, 142948, 142949, 142950, 142951, 142952, 142953, 142954, 142955) c6( ) c7(EN, bL, T, bO, aA, dq, v, bK, aF, fq); #c1(ADCY3) c2(XP_005264161) c3(adenylate cyclase type 3 isoform X7) c4(278677) c5( ) c6( ) c7(EN, bL, T, bO, aA, dq, v, bK, aF, fq); #c1(ADCY3) c2(XP_011530796) c3(adenylate cyclase type 3 isoform X9) c4( ) c5(326850, 326851, 326852, 326853, 326854, 326855) c6( ) c7(EN, bL, T, bO, aA, dq, v, bK, aF, fq); #c1(ADCY5) c2(NP_001186571) c3(adenylate cyclase type 5 isoform 2) c4(77869) c5(77870, 77871, 77872, 77873, 77874, 77875) c6( ) c7(bL, cc, zQ, mg, cz, EO, aU, bO, bS, v, ct, K, ci, Z, zP, xw, bA); #c1(ADCY5) c2(NP_899200) c3(adenylate cyclase type 5 isoform 1) c4(258012) c5(258013, 258014, 258015, 258016, 258017, 258018) c6( ) c7(bL, cc, zQ, mg, cz, EO, aU, bO, bS, v, ct, K, ci, Z, zP, xw, bA); #c1(ADCY5) c2(XP_006713546) c3(adenylate cyclase type 5 isoform X6) c4(287223) c5(287224, 287225, 287226, 287227, 287228, 287229) c6( ) c7(bL, cc, zQ, mg, cz, EO, aU, bO, bS, v, ct, K, ci, Z, zP, xw, bA); #c1(ADCY6) c2(NP_056085) c3(adenylate cyclase type 6 isoform a) c4(185603, 185604) c5(185605, 185606, 185607, 185608, 185609, 185610, 185611, 185612, 185613, 185614, 185615, 185616, 185617, 185618, 185619, 185620, 185621) c6( ) c7(qb, EP, cd); #c1(ADCY6) c2(XP_011536115) c3(adenylate cyclase type 6 isoform X4) c4( ) c5(333433) c6( ) c7(qb, EP, cd); #c1(ADCY7) c2(NP_001105) c3(adenylate cyclase type 7 isoform 1) c4(42311) c5(42312, 42313, 42314, 42315, 42316, 42317, 42318, 42319, 42320, 42321) c6( ) c7(cA, bO, bS, ct, Z, he, bt); #c1(ADCY7) c2(XP_005255843) c3(adenylate cyclase type 7 isoform X1) c4(273886, 273887) c5(273888, 273889, 273890, 273891, 273892, 273893) c6( ) click bO, bS, ct, Z, he, bt); #c1(ADCY7) c2(XP_011521146) c3(adenylate cyclase type 7 isoform X5) c4( ) c5(316102, 316103, 316104, 316105, 316106, 316107) c6( ) click bO, bS, ct, Z, he, bt); #c1(ADCY8) c2(NP_001106) c3(adenylate cyclase type 8) c4(42787) c5( ) c6( ) c7(kT, dD, cF, cA, ea, aw, EQ, bS, bK, ct, eq, Z, af); #c1(ADCY9) c2(NP_001107) c3(adenylate cyclase type 9) c4( ) c5( ) c6( ) c7(bM, gj, ac, qe, cA, nX, eh, dV, cz, fF, Ir, bK, ER, eg, fq, cd); #c1(ADCYAP1) c2(NP_001093203) c3(pituitary adenylate cyclase-activating polypeptide preproprotein) c4( ) c5(39919, 39920, 39921, 39922, 39923, 39924, 39925, 39926, 39927, 39928, 39929, 39930, 39931, 39932) c6( ) c7(bL, gh, T, aw, fd, aj, uu, aY, V, eA, J, ad, av, mj, cc, dY, aE, IG, cy, bK, K, bq, he, ae, hM, EX, EV, ES, EU, kD, EZ, cm, bz, hq, ET, EW, ac, c, bP, dB, Ei, U, dX, EY, ei, it, X); #c1(ADCYAP1) c2(XP_005258138) c3(pituitary adenylate cyclase-activating polypeptide isoform X1) c4(275518, 275519) c5(275520, 275521, 275522, 275523, 275524, 275525) c6( ) c7(bL, gh, T, aw, fd, aj, uu, aY, V, eA, J, ad, av, mj, cc, dY, aE, IG, cy, bK, K, bq, he, ae, hM, EX, EV, ES, EU, kD, EZ, cm, bz, hq, ET, EW, ac, c, bP, dB, Ei, U, dX, EY, ei, it, X); #c1(ADCYAP1R1) c2(NP_001109) c3(pituitary adenylate cyclase-activating polypeptide type I receptor isoform 3 precursor) c4(43278, 43279) c5(43280, 43281, 43282, 43283, 43284, 43285) c6( ) c7(bM, ul, EQ, fd, bS, uu, ct, Fb, pM, hF, Fc, eA, ad, av, pX, IG, bK, K, he, ae, Fa, kp, Z, cm, bz, hq, W, bP, Ei, m, EY, pK, X); #c1(ADCYAP1R1) c2(NP_001186564) c3(pituitary adenylate cyclase-activating polypeptide type I receptor isoform 1 precursor) c4(77835) c5(77836, 77837, 77838, 77839, 77840, 77841) c6( ) c7(bM, ul, EQ, fd, bS, uu, ct, Fb, pM, hF, Fc, eA, ad, av, PX, IG, bK, K, he, ae, Fa, kp, Z, cm, bz, hq, W, bP, Ei, m, EY, pK, X); #c1(ADCYAP1R1) c2(NP_001186566) c3(pituitary adenylate cyclase-activating polypeptide type I receptor isoform 4 precursor) c4(77842) c5(77843, 77844, 77845, 77846, 77847, 77848, 77849, 77850, 77851, 77852, 77853, 77854) c6( ) c7(bM, ul, EQ, fd, bS, uu, ct, Fb, pM, hF, Fc, eA, ad, av, pX, IG, bK, K, he, ae, Fa, kp, Z, cm, bz, hq, W, bP, Ei, m, EY, pK, X); #c1(ADCYAP1R1) c2(XP_006715708) c3(pituitary adenylate cyclase-activating polypeptide type I receptor isoform X4) c4(289733) c5(289734, 289735, 289736, 289737, 289738, 289739) c6( ) c7(bM, ul, EQ, fd, bS, uu, ct, Fb, pM, hF, Fc, eA, ad, av, pX, IG, bK, K, he, ae, Fa, kp, Z, cm, bz, hq, W, bP, Ei, m, EY, pK, X); #c1(ADCYAP1R1) c2(XP_011513419) c3(pituitary adenylate cyclase-activating polypeptide type I receptor isoform X1) c4(305659) c5(305660, 305661, 305662, 305663, 305664, 305665, 305666) c6( ) c7(bM, ul, EQ, fd, bS, uu, ct, Fb, pM, hF, Fc, eA, ad, av, pX, IG, bK, K, he, ae, Fa, kp, Z, cm, bz, hq, W, bP, Ei, m, EY, pK, X); #c1(ADCYAP1R1) c2(XP_011513422) c3(pituitary adenylate cyclase-activating polypeptide type I receptor isoform X5) c4(305667) c5(305668, 305669, 305670, 305671, 305672) c6( ) c7(bM, ul, EQ, fd, bS, uu, ct, Fb, pM, hF, Fc, eA, ad, av, pX, IG, bK, K, he, ae, Fa, kp, Z, cm, bz, hq, W, bP, Ei, m, EY, pK, X); #c1(ADD1) c2(NP_001110) c3(alpha-adducin isoform a) c4(43286) c5(43287, 43288, 43289, 43290, 43291, 43292, 43293, 43294, 43295, 43296) c6( ) c7(bL, dD, Fj, eR, ea, oe, e, uv, aw, cz, eX, oR, aj, v, j, eq, il, aY, cd, J, dY, ec, M, eV, ey, Fg, eu, sj, FI, A, Fe, Ff, pD, cM, uC, qa, D, kT, rR, ac, Fd, c, Fh, Fi, wB, Fk, aS, dy, bt, B); #c1(ADD1) c2(NP_001273574) c3(alpha-adducin isoform e) c4(105324) c5(105325, 105326, 105327, 105328, 105329, 105330) c6( ) c7(bL, dD, Fj, eR, ea, oe, e, uv, aw, cz, eX, oR, aj, v, j, eq, il, aY, cd, J, dY, ec, M, eV, ey, Fg, eu, sj, FI, A, Fe, Ff, pD, cM, uC, qa, D, kT, rR, ac, Fd, c, Fh, Fi, wB, Fk, aS, dy, bt, B); #c1(ADD1) c2(NP_054908) c3(alpha-adducin isoform b) c4(178279, 178280) c5(178281, 178282, 178283, 178284, 178285, 178286, 178287, 178288, 178289, 178290, 178291, 178292) c6( ) c7(bL, dD, Fj, eR, ea, oe, e, uv, aw, cz, eX, oR, aj, v, j, eq, il, aY, cd, J, dY, ec, M, eV, ey, Fg, eu, sj, FI, A, Fe, Ff, pD, cM, uC, qa, D, kT, rR, ac, Fd, c, Fh, Fi, wB, Fk, aS, dy, bt, B); #c1(ADD1) c2(NP_054909) c3(alpha-adducin isoform c) c4(178293) c5(178294, 178295, 178296, 178297, 178298, 178299, 178300, 178301, 178302, 178303, 178304, 178305, 178306, 178307, 178308, 178309, 178310, 178311) c6( ) c7(bL, dD, Fj, eR, ea, oe, e, uv, aw, cz, eX, oR, aj, v, j, eq, il, aY, cd, J, dY, ec, M, eV, ey, Fg, eu, sj, FI, A, Fe, Ff, pD, cM, uC, qa, D, kT, rR, ac, Fd, c, Fh, Fi, wB, Fk, aS, dy, bt, B); #c1(ADD1) c2(NP_789771) c3(alpha-adducin isoform d) c4(252232) c5(252233, 252234, 252235, 252236, 252237, 252238, 252239, 252240, 252241, 252242) c6( ) c7(bL, dD, Fj, eR, ea, oe, e, uv, aw, cz, eX, oR, aj, v, j, eq, il, aY, cd, J, dY, ec, M, eV, ey, Fg, eu, sj, FI, A, Fe, Ff, pD, cM, uC, qa, D, kT, rR, ac, Fd, c, Fh, Fi, wB, Fk, aS, dy, bt, B); #c1(ADD1) c2(XP_005247992) c3(alpha-adducin isoform X2) c4(268172) c5( ) c6( ) c7(bL, dD, Fj, eR, ea, oe, e, uv, aw, cz, eX, oR, aj, v, j, eq, il, aY, cd, J, dY, ec, M, eV, ey, Fg, eu, sj, FI, A, Fe, Ff, pD, cM, uC, qa, D, kT, rR, ac, Fd, c, Fh, Fi, wB, Fk, aS, dy, bt, B); #c1(ADD1) c2(XP_005247993) c3(alpha-adducin isoform X3) c4(268173) c5( ) c6( ) c7(bL, dD, Fj, eR, ea, oe, e, uv, aw, cz, eX, oR, aj, v, j, eq, il, aY, cd, J, dY, ec, M, eV, ey, Fg, eu, sj, FI, A, Fe, Ff, pD, cM, uC, qa, D, kT, rR, ac, Fd, c, Fh, Fi, wB, Fk, aS, dy, bt, B); #c1(ADD2) c2(NP_001171984) c3(beta-adducin isoform f) c4(72110) c5(72111, 72112, 72113, 72114, 72115, 72116, 72117, 72118, 72119, 72120, 72121, 72122) c6( ) c7(Fl, Fp, A, Fn, Fd, Fh, Fm, oe, Fo, yL, cz, ey, S, bt, qa); #c1(ADD2) c2(NP_001608) c3(beta-adducin isoform a) c4(119128, 119129, 119130, 119131, 119132, 119133) c5(119134, 119135, 119136, 119137, 119138, 119139, 119140, 119141, 119142, 119143, 119144, 119145, 119146, 119147, 119148, 119149, 119150, 119151, 119152) c6( ) c7(Fl, Fp, A, Fn, Fd, Fh, Fm, oe, Fo, yL, cz, ey, S, bt, qa); #c1(ADD2) c2(NP_059516) c3(beta-adducin isoform b) c4(193338) c5(193339, 193340, 193341, 193342, 193343, 193344, 193345, 193346, 193347, 193348, 193349, 193350, 193351, 193352, 193353, 193354, 193355, 193356, 193357, 193358, 193359, 193360, 193361, 193362, 193363) c6( ) c7(Fl, Fp, A, Fn, Fd, Fh, Fm, oe, Fo, yL, cz, ey, S, bt, qa); #c1(ADD2) c2(NP_059522) c3(beta-adducin isoform e) c4(193364, 193365) c5(193366, 193367, 193368, 193369, 193370, 193371, 193372, 193373, 193374, 193375, 193376, 193377) c6( ) c7(Fl, Fp, A, Fn, Fd, Fh, Fm, oe, Fo, yL, cz, ey, S, bt, qa); #c1(ADD3) c2(NP_058432) c3(gamma-adducin isoform a) c4(192702) c5(192703, 192704, 192705, 192706, 192707, 192708) c6( ) c7(Fp, d, W, Fr, Fh, Ft, U, cz, oR, Fq, eu, iq, Fs); #c1(ADGB) c2(NP_078970) c3(androglobin) c4(216347) c5(216348, 216349, 216350, 216351, 216352, 216353, 216354, 216355, 216356, 216357, 216358, 216359) c6( ) c7(AW); #c1(ADGB) c2(XP_011534433) c3(androglobin isoform X7) c4(330935) c5( ) c6( ) c7(AW); #c1(ADGB) c2(XP_011534436) c3(androglobin isoform X10) c4(330936) c5( ) c6( ) c7(AW); #c1(ADGB) c2(XP_011534437) c3(androglobin isoform X11) c4( ) c5(330937, 330938, 330939, 330940, 330941, 330942) c6( ) c7(AW); #c1(ADGRA1) c2(NP_001077378) c3(probable G-protein coupled receptor 123 isoform 1) c4(37788, 37789) c5(37790, 37791, 37792, 37793, 37794, 37795, 37796, 37797, 37798, 37799, 37800, 37801) c6( ) c7(bM, mQ); #c1(ADGRA1) c2(XP_005252752) c3(probable G-protein coupled receptor 123 isoform X1) c4(272039, 272040) c5(272041, 272042, 272043, 272044, 272045, 272046, 272047, 272048, 272049, 272050, 272051, 272052) c6( ) c7(bM, mQ); #c1(ADGRA2) c2(NP_116166) c3(G-protein coupled receptor 124 precursor) c4(225501, 225502, 225503) c5(225504, 225505, 225506, 225507, 225508, 225509, 225510, 225511, 225512, 225513, 225514, 225515) c6( ) c7(gv, cY); #c1(ADGRA2) c2(XP_005273528) c3(G-protein coupled receptor 124 isoform X4) c4( ) c5(284669, 284670, 284671, 284672, 284673, 284674) c6( ) c7(gv, cY); #c1(ADGRA2) c2(XP_011542783) c3(G-protein coupled receptor 124 isoform X1) c4( ) c5(341391) c6( ) c7(gv, cY); #c1(ADGRA3) c2(NP_660333) c3(probable G-protein coupled receptor 125 precursor) c4(240972, 240973) c5(240974, 240975, 240976, 240977, 240978, 240979, 240980, 240981, 240982, 240983, 240984, 240985) c6( ) c7(aj, cF, Fu); #c1(ADGRA3) c2(XP_011512113) c3(probable G-protein coupled receptor 125 isoform X2) c4(302726) c5(302727, 302728, 302729, 302730, 302731, 302732) c6( ) c7(aj, cF, Fu); #c1(ADGRB1) c2(XP_011515501) c3(brain-specific angiogenesis inhibitor 1 isoform X1) c4(308342) c5(308343, 308344, 308345, 308346, 308347, 308348, 308349, 308350, 308351, 308352) c6( ) c7(T, d, dB, r, aA, cy, aF, aS, K, q, eA, B); #c1(ADGRB1) c2(XP_011515503) c3(brain-specific angiogenesis inhibitor 1 isoform X3) c4( ) c5(308353) c6( ) c7(T, d, dB, r, aA, cy, aF, aS, K, q, eA, B); #c1(ADGRB1) c2(XP_011515504) c3(brain-specific angiogenesis inhibitor 1 isoform X4) c4( ) c5(308354, 308355, 308356, 308357) c6( ) c7(T, d, dB, r, aA, cy, aF, aS, K, q, eA, B); #c1(ADGRB2) c2(NP_001281264) c3(brain-specific angiogenesis inhibitor 2 isoform 1 preproprotein) c4(111614) c5(111615, 111616, 111617, 111618, 111619, 111620) c6( ) c7(dB, cy, cF, eK); #c1(ADGRB2) c2(NP_001281265) c3(brain-specific angiogenesis inhibitor 2 isoform 2 preproprotein) c4(111621) c5(111622, 111623, 111624, 111625, 111626, 111627, 111628, 111629, 111630, 111631) c6( ) c7(dB, cy, cF, eK); #c1(ADGRB2) c2(XP_011540150) c3(brain-specific angiogenesis inhibitor 2 isoform X1) c4(338505) c5(338506, 338507, 338508, 338509, 338510, 338511) c6( ) c7(dB, cy, cF, eK); #c1(ADGRB2) c2(XP_011540152) c3(brain-specific angiogenesis inhibitor 2 isoform X3) c4(338512) c5(338513, 338514, 338515, 338516, 338517, 338518) c6( ) c7(dB, cy, cF, eK); #c1(ADGRB2) c2(XP_011540154) c3(brain-specific angiogenesis inhibitor 2 isoform X5) c4(338519, 338520) c5(338521, 338522, 338523, 338524, 338525, 338526, 338527, 338528, 338529, 338530, 338531, 338532) c6( ) c7(dB, cy, cF, eK); #c1(ADGRB2) c2(XP_011540156) c3(brain-specific angiogenesis inhibitor 2 isoform X7) c4(338533) c5(338534, 338535, 338536, 338537, 338538, 338539) c6( ) c7(dB, cy, cF, eK); #c1(ADGRB2) c2(XP_011540157) c3(brain-specific angiogenesis inhibitor 2 isoform X8) c4(338540) c5(338541, 338542, 338543, 338544, 338545, 338546) c6( ) c7(dB, cy, cF, eK); #c1(ADGRB2) c2(XP_011540158) c3(brain-specific angiogenesis inhibitor 2 isoform X9) c4(338547) c5(338548, 338549, 338550, 338551, 338552, 338553) c6( ) c7(dB, cy, cF, eK); #c1(ADGRB3) c2(NP_001695) c3(brain-specific angiogenesis inhibitor 3) c4( ) c5(120101, 120102, 120103, 120104, 120105, 120106, 120107, 120108, 120109, 120110, 120111, 120112) c6( ) c7(Fv, bM, cF, ft, ac, dB, cy, ci, cm, eA); #c1(ADGRB3) c2(XP_005248809) c3(brain-specific angiogenesis inhibitor 3 isoform X1) c4(268587) c5(268588, 268589, 268590, 268591, 268592, 268593) c6( ) c7(Fv, bM, cF, ft, ac, dB, cy, ci, cm, eA); #c1(ADGRB3) c2(XP_011534313) c3(brain-specific angiogenesis inhibitor 3 isoform X5) c4(330681, 330682) c5( ) c6( ) c7(Fv, bM, cF, ft, ac, dB, cy, ci, cm, eA); #c1(ADGRB3) c2(XP_011534315) c3(brain-specific angiogenesis inhibitor 3 isoform X7) c4( ) c5(330683) c6( ) c7(Fv, bM, cF, ft, ac, dB, cy, ci, cm, eA); #c1(ADGRD1) c2(NP_942122) c3(probable G-protein coupled receptor 133 precursor) c4(260466) c5(260467, 260468, 260469, 260470, 260471, 260472) c6( ) c7(EQ, mu); #c1(ADGRD1) c2(XP_011536505) c3(probable G-protein coupled receptor 133 isoform X1) c4(333865) c5(333866, 333867, 333868, 333869, 333870, 333871) c6( ) c7(EQ, mu); #c1(ADGRD1) c2(XP_011536510) c3(probable G-protein coupled receptor 133 isoform X7) c4( ) c5(333872) c6( ) c7(EQ, mu); #c1(ADGRD1) c2(XP_011536511) c3(probable G-protein coupled receptor 133 isoform X8) c4(333873) c5(333874, 333875, 333876, 333877, 333878, 333879) c6( ) c7(EQ, mu); #c1(ADGRD2) c2(XP_006717411) c3(probable G-protein coupled receptor 144) c4(291043, 291044, 291045) c5(291046, 291047, 291048, 291049, 291050, 291051, 291052, 291053, 291054, 291055, 291056, 291057, 291058, 291059, 291060, 291061, 291062, 291063, 291064, 291065, 291066, 291067, 291068, 291069) c6( ) c7(kl); #c1(ADGRE1) c2(NP_001243181) c3(EGF-like module-containing mucin-like hormone receptor-like 1 isoform 2 precursor) c4(90055) c5(90056, 90057, 90058, 90059, 90060, 90061) c6( ) c7(vj, oW, ao, Fw, eh, cd, ad); #c1(ADGRE1) c2(NP_001243182) c3(EGF-like module-containing mucin-like hormone receptor-like 1 isoform 3 precursor) c4(90062) c5(90063, 90064, 90065, 90066, 90067, 90068, 90069, 90070, 90071, 90072) c6( ) c7(vj, oW, ao, Fw, eh, cd, ad); #c1(ADGRE1) c2(NP_001243183) c3(EGF-like module-containing mucin-like hormone receptor-like 1 isoform 4 precursor) c4(90073) c5(90074, 90075, 90076, 90077, 90078, 90079) c6( ) c7(vj, oW, ao, Fw, eh, cd, ad); #c1(ADGRE1) c2(NP_001243184) c3(EGF-like module-containing mucin-like hormone receptor-like 1 isoform 5 precursor) c4(90080) c5(90081, 90082, 90083, 90084, 90085, 90086) c6( ) c7(vj, oW, ao, Fw, eh, cd, ad); #c1(ADGRE1) c2(NP_001965) c3(EGF-like module-containing mucin-like hormone receptor-like 1 isoform 1 precursor) c4(122686) c5(122687, 122688, 122689, 122690, 122691, 122692) c6( ) c7(vj, oW, ao, Fw, eh, cd, ad); #c1(ADGRE2) c2(NP_001257981) c3(EGF-like module-containing mucin-like hormone receptor-like 2 isoform h precursor) c4(95881) c5(95882, 95883, 95884, 95885, 95886, 95887, 95888, 95889, 95890, 95891, 95892, 95893) c6( ) c7(d, q, ci, g); #c1(ADGRE2) c2(NP_038475) c3(EGF-like module-containing mucin-like hormone receptor-like 2 isoform a precursor) c4(176656) c5(176657, 176658, 176659, 176660, 176661, 176662, 176663, 176664, 176665, 176666) c6( ) c7(d, q, ci, g); #c1(ADGRE2) c2(XP_011526251) c3(EGF-like module-containing mucin-like hormone receptor-like 2 isoform X2) c4(320493) c5(320494, 320495, 320496, 320497, 320498, 320499) c6( ) c7(d, q, ci, g); #c1(ADGRE2) c2(XP_011526253) c3(EGF-like module-containing mucin-like hormone receptor-like 2 isoform X4) c4(320500, 320501) c5(320502, 320503, 320504, 320505, 320506, 320507, 320508, 320509, 320510, 320511, 320512, 320513, 320514) c6( ) c7(d, q, ci, g); #c1(ADGRE2) c2(XP_011526254) c3(EGF-like module-containing mucin-like hormone receptor-like 2 isoform X5) c4(320515) c5( ) c6( ) c7(d, q, ci, g); #c1(ADGRE2) c2(XP_011526255) c3(EGF-like module-containing mucin-like hormone receptor-like 2 isoform X6) c4(320516, 320517, 320518) c5(320519, 320520, 320521, 320522, 320523, 320524, 320525, 320526, 320527, 320528, 320529, 320530) c6( ) c7(d, q, ci, g); #c1(ADGRE2) c2(XP_011526257) c3(EGF-like module-containing mucin-like hormone receptor-like 2 isoform X8) c4( ) c5(320531, 320532, 320533, 320534, 320535) c6( ) c7(d, q, ci, g); #c1(ADGRE5) c2(NP_001020331) c3(CD97 antigen isoform 3 preproprotein) c4(28610, 28611) c5(28612, 28613, 28614, 28615, 28616, 28617, 28618, 28619, 28620, 28621, 28622, 28623) c6( ) c7(ai, eG, hd, d, nB, tT, gX, aA, aF, Ex, ci, g, eA, y, q, er, aa); #c1(ADGRE5) c2(NP_001775) c3(CD97 antigen isoform 2 preproprotein) c4(121019) c5(121020, 121021, 121022, 121023, 121024, 121025) c6( ) c7(ai, eG, hd, d, nB, tT, gX, aA, aF, Ex, ci, g, eA, y, q, er, aa); #c1(ADGRE5) c2(NP_510966) c3(CD97 antigen isoform 1 preproprotein) c4(231093) c5(231094, 231095, 231096, 231097, 231098, 231099) c6( ) c7(ai, eG, hd, d, nB, tT, gX, aA, aF, Ex, ci, g, eA, y, q, er, aa); #c1(ADGRF5) c2(NP_056049) c3(probable G-protein coupled receptor 116 precursor) c4(185301, 185302, 185303) c5(185304, 185305, 185306, 185307, 185308, 185309, 185310, 185311, 185312, 185313, 185314, 185315, 185316, 185317, 185318, 185319, 185320, 185321, 185322, 185323, 185324, 185325, 185326, 185327, 185328, 185329, 185330, 185331, 185332, 185333, 185334, 185335) c6( ) c7(gZ, aW, K, aT); #c1(ADGRF5) c2(XP_005248951) c3(probable G-protein coupled receptor 116 isoform X2) c4(268804) c5( ) c6( ) c7(gZ, aW, K, aT); #c1(ADGRF5) c2(XP_011512655) c3(probable G-protein coupled receptor 116 isoform X4) c4( ) c5(303628, 303629, 303630, 303631, 303632, 303633) c6( ) c7(gZ, aW, K, aT); #c1(ADGRF5) c2(XP_011512656) c3(probable G-protein coupled receptor 116 isoform X5) c4(303634) c5( ) c6( ) c7(gZ, aW, K, aT); #c1(ADGRG1) c2(NP_001277071) c3(G-protein coupled receptor 56 isoform d precursor) c4(109004) c5(109005, 109006, 109007, 109008, 109009, 109010) c6( ) c7(T, aC, no, yf, FA, hb, Y, FB, Fz, vj, ED, ff, EC, Fy, en, it, cp); #c1(ADGRG1) c2(NP_001277073) c3(G-protein coupled receptor 56 isoform f) c4(109011) c5( ) c6( ) c7(T, aC, no, yf, FA, hb, Y, FB, Fz, vj, ED, ff, EC, Fy, en, it, cp); #c1(ADGRG1) c2(XP_005256312) c3(G-protein coupled receptor 56 isoform X2) c4(274065) c5(274066, 274067, 274068, 274069, 274070, 274071, 274072, 274073, 274074, 274075, 274076, 274077, 274078, 274079, 274080, 274081, 274082, 274083, 274084, 274085, 274086, 274087, 274088, 274089, 274090, 274091, 274092, 274093) c6( ) c7(T, aC, no, yf, FA, hb, Y, FB, Fz, vj, ED, ff, EC, Fy, en, it, cp); #c1(ADGRG1) c2(XP_006721409) c3(G-protein coupled receptor 56 isoform X1) c4(293979) c5(293980, 293981, 293982, 293983, 293984, 293985, 293986, 293987, 293988, 293989, 293990, 293991, 293992, 293993) c6( ) c7(T, aC, no, yf, FA, hb, Y, FB, Fz, vj, ED, ff, EC, Fy, en, it, cp); #c1(ADGRG2) c2(NP_001073327) c3(G-protein coupled receptor 64 isoform 1 precursor) c4(35852, 35853) c5(35854, 35855, 35856, 35857, 35858) c6( ) c7(af, ci); #c1(ADGRG2) c2(NP_001073328) c3(G-protein coupled receptor 64 isoform 2 precursor) c4(35859) c5(35860, 35861, 35862, 35863, 35864) c6( ) c7(af, ci); #c1(ADGRG2) c2(NP_001073329) c3(G-protein coupled receptor 64 isoform 3 precursor) c4(35865) c5(35866, 35867, 35868, 35869, 35870) c6( ) c7(af, ci); #c1(ADGRG2) c2(NP_001171762) c3(G-protein coupled receptor 64 isoform 5 precursor) c4(71619, 71620) c5(71621, 71622, 71623, 71624, 71625, 71626, 71627, 71628, 71629, 71630) c6( ) c7(af, ci); #c1(ADGRG2) c2(NP_001171763) c3(G-protein coupled receptor 64 isoform 6 precursor) c4(71631) c5(71632, 71633, 71634, 71635, 71636, 71637, 71638, 71639, 71640, 71641, 71642) c6( ) c7(af, ci); #c1(ADGRG2) c2(NP_001171764) c3(G-protein coupled receptor 64 isoform 7 precursor) c4( ) c5(71643, 71644, 71645, 71646, 71647, 71648) c6( ) c7(af, ci); #c1(ADGRG2) c2(NP_001171765) c3(G-protein coupled receptor 64 isoform 8 precursor) c4(71649) c5(71650, 71651, 71652, 71653, 71654) c6( ) c7(af, ci); #c1(ADGRG2) c2(NP_001171766) c3(G-protein coupled receptor 64 isoform 9 precursor) c4(71655, 71656) c5(71657, 71658, 71659, 71660, 71661) c6( ) c7(af, ci); #c1(ADGRG2) c2(NP_005747) c3(G-protein coupled receptor 64 isoform 4 precursor) c4(158983) c5(158984, 158985, 158986, 158987, 158988) c6( ) c7(af, ci); #c1(ADGRG2) c2(XP_011543735) c3(G-protein coupled receptor 64 isoform X2) c4( ) c5(342787, 342788, 342789, 342790, 342791, 342792, 342793, 342794) c6( ) c7(af, ci); #c1(ADGRG2) c2(XP_011543738) c3(G-protein coupled receptor 64 isoform X3) c4( ) c5(342795) c6( ) c7(af, ci); #c1(ADGRG3) c2(NP_740746) c3(probable G-protein coupled receptor 97 precursor) c4(247437, 247438, 247439) c5(247440, 247441, 247442, 247443, 247444, 247445, 247446, 247447) c6( ) c7(FE, ac); #c1(ADGRG6) c2(NP_001027566) c3(G-protein coupled receptor 126 isoform alpha 2 precursor) c4(30294) c5(30295, 30296, 30297, 30298, 30299, 30300) c6( ) c7(FF, Dp, cF, EG, aa); #c1(ADGRG6) c2(NP_001027567) c3(G-protein coupled receptor 126 isoform beta 2 precursor) c4(30301) c5(30302, 30303, 30304, 30305, 30306, 30307) c6( ) c7(FF, Dp, cF, EG, aa); #c1(ADGRG6) c2(NP_065188) c3(G-protein coupled receptor 126 isoform alpha 1 precursor) c4(204494) c5(204495, 204496, 204497, 204498, 204499, 204500) c6( ) c7(FF, Dp, cF, EG, aa); #c1(ADGRG6) c2(NP_940971) c3(G-protein coupled receptor 126 isoform beta 1 precursor) c4(260216) c5(260217, 260218, 260219, 260220, 260221, 260222) c6( ) c7(FF, Dp, cF, EG, aa); #c1(ADGRG7) c2(NP_116176) c3(probable G-protein coupled receptor 128 precursor) c4(225614) c5(225615, 225616, 225617, 225618, 225619, 225620) c6( ) c7(jh, nB); #c1(ADGRL1) c2(NP_001008701) c3(latrophilin-1 isoform 1 precursor) c4(23363) c5(23364, 23365, 23366, 23367, 23368, 23369) c6( ) c7(IG, EH, e); #c1(ADGRL1) c2(NP_055736) c3(latrophilin-1 isoform 2 precursor) c4(183181) c5(183182, 183183, 183184, 183185, 183186, 183187) c6( ) c7(IG, EH, e); #c1(ADGRL3) c2(NP_056051) c3(latrophilin-3 precursor) c4(185370, 185371, 185372) c5(185373, 185374, 185375, 185376, 185377, 185378, 185379, 185380, 185381, 185382, 185383, 185384, 185385, 185386, 185387, 185388, 185389, 185390, 185391, 185392, 185393, 185394, 185395, 185396, 185397) c6( ) c7(IG, cF, FI, K); #c1(ADGRL3) c2(XP_011530086) c3(latrophilin-3 isoform X2) c4(325920) c5( ) c6( ) c7(IG, cF, FI, K); #c1(ADGRL3) c2(XP_011530087) c3(latrophilin-3 isoform X3) c4(325921, 325922, 325923) c5(325924, 325925, 325926, 325927, 325928, 325929, 325930, 325931, 325932, 325933, 325934, 325935, 325936, 325937, 325938, 325939, 325940, 325941, 325942, 325943, 325944, 325945, 325946, 325947) c6( ) c7(IG, cF, FI, K); #c1(ADGRL3) c2(XP_011530088) c3(latrophilin-3 isoform X4) c4(325948, 325949, 325950, 325951) c5(325952, 325953, 325954, 325955, 325956, 325957, 325958, 325959, 325960, 325961, 325962, 325963, 325964, 325965, 325966, 325967, 325968, 325969, 325970, 325971, 325972, 325973, 325974, 325975) c6( ) c7(IG, cF, FI, K); #c1(ADGRL3) c2(XP_011530092) c3(latrophilin-3 isoform X8) c4(325976) c5(325977, 325978, 325979, 325980, 325981, 325982) c6( ) c7(IG, cF, FI, K); #c1(ADGRL3) c2(XP_011530093) c3(latrophilin-3 isoform X9) c4(325983) c5(325984, 325985, 325986, 325987, 325988, 325989) c6( ) c7(IG, cF, FI, K); #c1(ADGRL3) c2(XP_011530095) c3(latrophilin-3 isoform X10) c4(325990, 325991, 325992, 325993, 325994) c5(325995, 325996, 325997, 325998, 325999, 326000, 326001, 326002, 326003, 326004, 326005, 326006, 326007, 326008, 326009, 326010, 326011, 326012, 326013, 326014, 326015, 326016, 326017, 326018, 326019, 326020, 326021, 326022, 326023, 326024) c6( ) c7(IG, cF, FI, K); #c1(ADGRV1) c2(NP_115495) c3(G-protein coupled receptor 98 precursor) c4(222901, 222902, 222903) c5(222904, 222905, 222906, 222907, 222908, 222909, 222910, 222911, 222912, 222913, 222914, 222915) c6( ) c7(ha, vr, j, oc, FR, dY, FL, FO, FN, jy, FQ, d, IR, An, FS, nk, nC, op, FK, vA, FP, FJ, EM, Bh); #c1(ADGRV1) c2(XP_011541979) c3(G-protein coupled receptor 98 isoform X3) c4( ) c5(340461) c6( ) c7(ha, vr, j, oc, FR, dY, FL, FO, FN, jy, FQ, d, IR, An, FS, nk, nC, op, FK, vA, FP, FJ, EM, Bh); #c1(ADGRV1) c2(XP_011541981) c3(G-protein coupled receptor 98 isoform X5) c4( ) c5(340462, 340463, 340464, 340465, 340466) c6( ) c7(ha, vr, j, oc, FR, dY, FL, FO, FN, jy, FQ, d, IR, An, FS, nk, nC, op, FK, vA, FP, FJ, EM, Bh); #c1(ADH1A) c2(NP_000658) c3(alcohol dehydrogenase 1A) c4(14270) c5(14271, 14272, 14273, 14274, 14275, 14276) c6( ) c7(T, cl, aE, eM, FV, r, aA, FU, na, m, j, an, aF, cm, af, FT); #c1(ADH1B) c2(NP_000659) c3(alcohol dehydrogenase IB isoform 1) c4(14277, 14278, 14279) c5(14280, 14281, 14282, 14283, 14284, 14285, 14286, 14287, 14288, 14289, 14290, 14291, 14292) c6( ) c7(Gk, T, uK, fR, e, al, ci, Gt, aE, fS, Gb, Gr, dV, K, hu, aW, mQ, hl, da, Gs, uo, cX, uJ, FW, dD, sQ, aw, ht, aj, FY, Gm, Gw, gl, Go, wb, Gc, hi, ny, FZ, Gh, aq, Gi, hq, ar, ok, Gq, FV, te, ut, jd, it, B, bL, oe, aA, cz, hy, v, j, Ge, q, J, Gj, qp, aT, r, eS, en, iK, FT, ac, Cz, mf, Gg, rA, GL nb, Gd, bS, eq, fu, uu, Gn, iG, tK, kL, nH, ib, IQ, IR, Gf, Gv, ff, aE, EX, Ga, eK, D, gk, Gu, Gp); #c1(ADH1B) c2(NP_001273579) c3(alcohol dehydrogenase IB isoform 2) c4( ) c5(105360, 105361, 105362, 105363, 105364) c6( ) c7(Gk, T, uK, fR, e, al, ci, Gt, aE, fS, Gb, Gr, dV, K, hu, aW, mQ, hl, da, Gs, uo, cX, uJ, FW, dD, sQ, aw, ht, aj, FY, Gm, Gw, gl, Go, wb, Gc, hi, ny, FZ, Gh, aq, Gi, hq, ar, ok, Gq, FV, te, ut, jd, it, B, bL, oe, aA, cz, hy, v, j, Ge, q, J, Gj, qp, aT, r, eS, en, iK, FT, ac, Cz, mf, Gg, rA, GL nb, Gd, bS, eq, fu, uu, Gn, iG, tK, kL, nH, ib, IQ, IR, Gf, Gv, ff, aE, EX, Ga, eK, D, gk, Gu, Gp); #c1(ADH4) c2(NP_000661) c3(alcohol dehydrogenase 4) c4(14293) c5(14294, 14295, 14296, 14297, 14298, 14299) c6( ) c7(ar, T, Gx, FV, ht, an, Gs, fQ, da, Gd, hy, gl, m, Go, hu, iG, t, B, FT); #c1(ADH5) c2(NP_000662) c3(alcohol dehydrogenase class-3) c4(14300) c5(14301, 14302, 14303, 14304, 14305, 14306) c6( ) c7(bM, T, aC, iW, hy, Gn, av, cF, aT, K, Gz, dF, B, Gy, BN, aW, GA, da, hJ, bz, FT, rA, ne); #c1(ADH6) c2(NP_000663) c3(alcohol dehydrogenase 6 isoform 2) c4(14307) c5(14308, 14309, 14310, 14311, 14312, 14313) c6( ) c7(FV, hy, ne, BN, FT); #c1(ADH6) c2(NP_001095940) c3(alcohol dehydrogenase 6 isoform 1) c4(40952, 40953) c5(40954, 40955, 40956, 40957, 40958, 40959, 40960, 40961, 40962, 40963, 40964, 40965) c6( ) c7(FV, hy, ne, BN, FT); #c1(ADH7) c2(NP_000664) c3(alcohol dehydrogenase class 4 mu/sigma chain isoform 2) c4(14314, 14315, 14316) c5(14317, 14318, 14319, 14320, 14321, 14322, 14323, 14324, 14325, 14326, 14327, 14328, 14329, 14330, 14331, 14332, 14333, 14334) c6( ) c7(GI, T, aZ, oe, nx, ht, aA, cz, Gd, aj, hy, j, GC, q, ad, Gw, ae, Gv, ff, r, aE, en, cl, iK, fq, Ga, GB, FT, Gs, hL, m, Gu, IB, it); #c1(ADH7) c2(NP_001159976) c3(alcohol dehydrogenase class 4 mu/sigma chain isoform 1) c4(65014) c5(65015, 65016, 65017, 65018, 65019, 65020) c6( ) c7(GI, T, aZ, oe, nx, ht, aA, cz, Gd, aj, hy, j, GC, q, ad, Gw, ae, Gv, ff, r, aF, en, cl, iK, fq, Ga, GB, FT, Gs, hL, m, Gu, IB, it); #c1(ADHFE1) c2(NP_653251) c3(hydroxyacid-oxoacid transhydrogenase, mitochondrial) c4(239343, 239344) c5(239345, 239346, 239347, 239348, 239349, 239350, 239351, 239352, 239353, 239354, 239355, 239356) c6( ) c7(T, s, GD, r, qG, q); #c1(ADII) c2(NP_060739) c3(1,2-dihydroxy-3-keto-5-methylthiopentene dioxygenase) c4(197555) c5(197556, 197557, 197558, 197559, 197560, 197561) c6( ) c7(aM, dV, t, ae, y, ad); #c1(ADIG) c2(NP_001018092) c3(adipogenin) c4(27312, 27313) c5(27314, 27315, 27316, 27317, 27318, 27319, 27320, 27321, 27322, 27323, 27324, 27325) c6( ) c7(GE); #c1(ADIPOQ) c2(NP_001171271) c3(adiponectin precursor) c4(70013) c5(70014, 70015, 70016, 70017, 70018, 70019, 70020, 70021, 70022, 70023, 70024, 70025, 70026, 70027) c6( ) c7(T, fR, pf, ea, e, al, bB, aY, ip, GK, aE, Bc, rw, iX, M, K, GO, qM, dQ, hH, wt, aa, aW, fc, hl, g, uC, GR, mx, vy, dD, wh, aw, ht, fN, aj, fr, qN, zP, cd, rc, td, ec, h, IG, jy, GT, uV, A, fQ, aq, bJ, ar, kT, GG, Fi, bo, mg, hL, at, bm, GN, jd, B, bL, jv, eR, oe, gQ, aA, cR, tc, GP, cz, j, fF, C, si, v, nS, GS, q, J, GL, aT, GQ, cy, bq, Fg, ae, af, kl, wr, iU, fO, GJ, r, iy, GM, cl, sK, ck, wg, ac, hr, fP, mf, dy, bt, aZ, jh, GH, dG, eq, ad, dP, av, nH, F, ts, hD, ji, jo, fb, d, cW, eZ, dq, aF, bz, GL ga, bE, aS, cP, ei, GF, hE, y); #c1(ADIPOR1) c2(NP_001277558) c3(adiponectin receptor protein 1) c4(109355, 109356, 109357, 109358) c5(109359, 109360, 109361, 109362, 109363, 109364, 109365, 109366, 109367, 109368, 109369, 109370, 109371, 109372, 109373, 109374, 109375, 109376, 109377, 109378, 109379, 109380, 109381, 109382, 109383, 109384, 109385, 109386) c6( ) c7(bL, T, GV, dD, eR, pf, aZ, ea, e, al, wh, aA, cz, bB, aj, dG, j, ci, v, si, eh, nS, aY, eq, cd, q, J, ad, rc, F, py, aT, jy, fb, ae, af, kl, d, iQ, cW, aW, fc, hl, r, dq, aF, g, cl, fr, GU, bE, go, hL, at, mf, cP, ei, y); #c1(ADIPOR2) c2(XP_006719081) c3(adiponectin receptor protein 2 isoform X1) c4(292203) c5(292204, 292205, 292206, 292207, 292208, 292209) c6( ) c7(bL, T, dD, eR, pf, ea, e, al, aA, bB, tc, aj, v, j, eq, nS, cd, q, J, ad, rc, F, iX, aT, jy, K, bq, fb, ae, af, kl, d, iU, aW, fc, hl, r, aF, g, cl, bE, hL, at, mf, ei, y, ao); #c1(ADIRF) c2(NP_006820) c3(adipogenesis regulatory factor) c4(168386, 168387, 168388) c5(168389, 168390, 168391, 168392, 168393, 168394, 168395, 168396, 168397, 168398, 168399, 168400, 168401, 168402, 168403, 168404, 168405, 168406) c6( ) c7(T, af); #c1(ADK) c2(NP_001114) c3(adenosine kinase isoform a) c4(43361) c5(43362, 43363, 43364, 43365, 43366, 43367) c6( ) c7(T, A, GX, wg, GY, GZ, fO, ha, fd, GW, nA, bq, il, Cr, gD, cB); #c1(ADK) c2(NP_001189378) c3(adenosine kinase isoform c) c4(79305) c5(79306, 79307, 79308, 79309, 79310, 79311) c6( ) c7(T, A, GX, wg, GY, GZ, fO, ha, fd, GW, nA, bq, il, Cr, gD, cB); #c1(ADK) c2(NP_001189379) c3(adenosine kinase isoform d) c4(79312) c5(79313, 79314, 79315, 79316, 79317, 79318) c6( ) c7(T, A, GX, wg, GY, GZ, fO, ha, fd, GW, nA, bq, il, Cr, gD, cB); #c1(ADK) c2(NP_006712) c3(adenosine kinase isoform b) c4(167342) c5(167343, 167344, 167345, 167346, 167347, 167348) c6( ) c7(T, A, GX, wg, GY, GZ, fO, ha, fd, GW, nA, bq, il, Cr, gD, cB); #c1(ADM) c2(NP_001115) c3(ADM precursor) c4(43368) c5(43369, 43370, 43371, 43372, 43373, 43374, 43375, 43376, 43377, 43378, 43379, 43380, 43381, 43382) c6( ) c7(bM, T, aC, fR, ea, if, e, eh, bB, fd, zh, ci, aY, Hr, aE, bW, M, iv, K, wt, dQ, eL, hm, Hd, DA, aW, g, as, eF, cm, uC, y, iT, ki, uo, Hb, m, hh, fy, Ht, dD, uH, Hm, aw, qy, aj, Ea, qN, qW, cd, BI, Hf, jL, IG, dL, ey, ux, vx, Ha, A, lb, fQ, mo, W, dB, hk, If, hL, at, sa, B, bL, ka, dA, AL, Hj, oe, He, cz, tc, v, j, C, GS, q, J, eA, eJ, ns, rS, aT, cy, bK, bq, ae, dl, Hi, r, en, cl, t, bN, ck, ac, wO, hc, fP, mf, dy, bt, He, Hn, oR, dG, eq, Fc, ad, dZ, Ho, av, F, Hk, vc, hP, ji, nJ, vP, uX, d, Hq, Hh, ff, eH, zR, eZ, uF, HL bz, qa, eK, Hp, Ew, bE, pP, gZ, Hs, aS, Hg, ei, IC, X, AG); #c1(ADM2) c2(NP_001240774) c3(ADM2 preproprotein) c4(88777) c5(88778, 88779, 88780, 88781, 88782, 88783, 88784, 88785, 88786, 88787, 88788, 88789, 88790, 88791, 88792, 88793, 88794, 88795, 88796) c6(88797, 88798, 88799, 88800) c7(T, B, tc, Hu, aS, j, eE, cd); #c1(ADNP) c2(XP_011527049) c3(activity-dependent neuroprotector homeobox protein isoform X1) c4(321365) c5(321366, 321367, 321368, 321369, 321370, 321371, 321372) c6(321373, 321374) c7(Hx, Hw, wg, cy, nA, xg, Hv, bN); #c1(ADNP) c2(XP_011527050) c3(activity-dependent neuroprotector homeobox protein isoform X2) c4(321375) c5(321376, 321377, 321378, 321379, 321380, 321381, 321382, 321383, 321384, 321385, 321386, 321387, 321388, 321389, 321390, 321391, 321392, 321393, 321394, 321395, 321396, 321397, 321398, 321399, 321400, 321401, 321402, 321403, 321404, 321405, 321406, 321407, 321408, 321409, 321410, 321411, 321412, 321413, 321414, 321415, 321416, 321417, 321418, 321419, 321420, 321421, 321422, 321423, 321424, 321425, 321426, 321427, 321428, 321429, 321430, 321431, 321432, 321433, 321434, 321435, 321436, 321437, 321438, 321439, 321440, 321441, 321442, 321443, 321444, 321445, 321446, 321447, 321448, 321449, 321450, 321451, 321452, 321453, 321454, 321455, 321456, 321457, 321458, 321459, 321460, 321461, 321462, 321463, 321464, 321465, 321466, 321467, 321468, 321469, 321470, 321471, 321472, 321473, 321474, 321475, 321476, 321477, 321478, 321479, 321480, 321481, 321482, 321483, 321484, 321485, 321486, 321487, 321488, 321489, 321490) c6(321491, 321492, 321493, 321494, 321495, 321496, 321497, 321498, 321499) c7(Hx, Hw, wg, cy, nA, xg, Hv, bN); #c1(AD0) c2(NP_116193) c3(2-aminoethanethiol dioxygenase) c4(225673) c5(225674, 225675, 225676, 225677, 225678, 225679) c6( ) c7(zw, zs, Hz, HA, HB, Hy, ji, dr); #c1(ADORA1) c2(NP_000665) c3(adenosine receptor A1) c4(14335, 14336) c5(14337, 14338, 14339, 14340, 14341, 14342, 14343, 14344, 14345, 14346, 14347, 14348, 14349, 14350, 14351, 14352, 14353, 14354, 14355) c6( ) c7(bM, FW, wi, dA, fV, aw, cz, aj, v, j, ww, J, cc, fS, HC, aT, cy, bK, K, bq, HD, Cr, aa, A, iU, aW, vs, qa, eK, hq, bb, mx); #c1(ADORA1) c2(XP_005244959) c3(adenosine receptor A1 isoform X1) c4( ) c5(266166) c6( ) c7(bM, FW, wi, dA, fV, aw, cz, aj, v, j, ww, J, cc, fS, HC, aT, cy, bK, K, bq, HD, Cr, aa, A, iU, aW, vs, qa, eK, hq, bb, mx); #c1(ADORA2A) c2(NP_001265429) c3(adenosine receptor A2a) c4(98540, 98541, 98542, 98543, 98544) c5(98545, 98546, 98547, 98548, 98549, 98550, 98551, 98552, 98553, 98554, 98555, 98556, 98557, 98558, 98559, 98560, 98561, 98562, 98563, 98564, 98565, 98566, 98567, 98568, 98569, 98570, 98571, 98572, 98573, 98574, 98575, 98576, 98577, 98578, 98579, 98580, 98581, 98582) c6( ) c7(bM, dD, fV, eX, cz, HE, ur, uu, eq, ww, HH, cd, HE, cc, wv, HJ, hb, fS, HG, IG, cy, eV, bq, an, Cr, xa, aa, DA, tb, Di, HI, fQ, HL, wA, pb, qa, lx, hq, bN, pa, rR, cA, mx, Be, HK, at, sv, y, cB); #c1(ADORA2B) c2(NP_000667) c3(adenosine receptor A2b) c4(14356) c5(14357, 14358, 14359, 14360, 14361, 14362) c6( ) c7(bL, bM, T, dD, qb, cz, bB, aj, dG, j, eq, q, J, fS, aT, cy, K, s, Y, fe, g, uC, bE, mg, at, fD, IC); #c1(ADPGK) c2(NP_112574) c3(ADP-dependent glucokinase precursor) c4(221449, 221450) c5(221451, 221452, 221453, 221454, 221455, 221456, 221457, 221458, 221459, 221460, 221461, 221462, 221463) c6( ) c7(Ea); #c1(ADPGK) c2(XP_006720775) c3(ADP-dependent glucokinase isoform X1) c4(293679) c5(293680, 293681, 293682, 293683, 293684, 293685, 293686) c6( ) c7(Ea); #c1(ADPGK) c2(XP_006720776) c3(ADP-dependent glucokinase isoform X2) c4(293687) c5(293688, 293689, 293690, 293691, 293692) c6( ) c7(Ea); #c1(ADPRH) c2(NP_001278878) c3(ADP-ribosylarginine hydrolase isoform 1) c4(110750, 110751) c5(110752, 110753, 110754, 110755, 110756, 110757, 110758, 110759, 110760, 110761, 110762, 110763, 110764, 110765, 110766, 110767, 110768, 110769, 110770, 110771, 110772, 110773, 110774, 110775) c6( ) c7(cH, HM); #c1(ADPRHL1) c2(NP_612439) c3([Protein ADP-ribosylarginine] hydrolase-like protein 1 isoform 1) c4(236505, 236506, 236507) c5(236508, 236509, 236510, 236511, 236512, 236513, 236514, 236515) c6( ) c7(HN); #c1(ADPRHL1) c2(NP_954631) c3([Protein ADP-ribosylarginine] hydrolase-like protein 1 isoform 2) c4( ) c5(261093, 261094, 261095, 261096, 261097, 261098, 261099, 261100, 261101, 261102) c6( ) c7(HN); #c1(ADPRHL2) c2(XP_011539938) c3(poly(ADP-ribose) glycohydrolase ARH3 isoform X1) c4(338296) c5(338297, 338298, 338299, 338300, 338301) c6( ) c7(aT); #c1(ADRA1A) c2(NP_000671) c3(alpha-1A adrenergic receptor isoform 1) c4(14377) c5(14378, 14379, 14380, 14381, 14382, 14383, 14384, 14385, 14386, 14387) c6( ) c7(bL, bM, G, T, HQ, qX, vS, iH, eR, yk, oe, ha, e, EQ, cz, hx, al, hU, v, j, fd, yp, xY, ye, cd, ad, eA, yn, av, ot, ec, DK, gH, nX, xW, sy, aT, h, xV, bK, K, yb, bq, yh, HR, yj, ae, af, HO, an, yi, xX, d, xU, kl, aW, sp, Y, yL, yc, yq, t, nC, bz, iK, qa, iP, cv, jq, dR, D, ok, yf, bP, yl, xZ, HP, cj, tl, m, ei, y, B); #c1(ADRA1A) c2(NP_150645) c3(alpha-1A adrenergic receptor isoform 3) c4(228225) c5(228226, 228227, 228228, 228229, 228230, 228231, 228232, 228233, 228234, 228235, 228236) c6( ) c7(bL, bM, G, T, HQ, qX, vS, iH, eR, yk, oe, ha, e, EQ, cz, hx, al, hU, v, j, fd, yp, xY, ye, cd, ad, eA, yn, av, ot, ec, DK, gH, nX, xW, sy, aT, h, xV, bK, K, yb, bq, yh, HR, yj, ae, af, HO, an, yi, xX, d, xU, kl, aW, sp, Y, yL, yc, yq, t, nC, bz, iK, qa, iP, cv, jq, dR, D, ok, yf, bP, yl, xZ, HP, cj, tl, m, ei, y, B); #c1(ADRA1A) c2(NP_150646) c3(alpha-1A adrenergic receptor isoform 2) c4(228237, 228238, 228239) c5(228240, 228241, 228242, 228243, 228244, 228245, 228246) c6( ) c7(bL, bM, G, T, HQ, qX, vS, iH, eR, yk, oe, ha, e, EQ, cz, hx, al, hU, v, j, fd, yp, xY, ye, cd, ad, eA, yn, av, ot, ec, DK, gH, nX, xW, sy, aT, h, xV, bK, K, yb, bq, yh, HR, yj, ae, af, HO, an, yi, xX, d, xU, kl, aW, sp, Y, yL, yc, yq, t, nC, bz, iK, qa, iP, cv, jq, dR, D, ok, yf, bP, yl, xZ, HP, cj, tl, m, ei, y, B); #c1(ADRA1A) c2(NP_150647) c3(alpha-1A adrenergic receptor isoform 4) c4(228247) c5(228248, 228249, 228250, 228251, 228252, 228253) c6( ) c7(bL, bM, G, T, HQ, qX, vS, iH, eR, yk, oe, ha, e, EQ, cz, hx, al, hU, v, j, fd, yp, xY, ye, cd, ad, eA, yn, av, ot, ec, DK, gH, nX, xW, sy, aT, h, xV, bK, K, yb, bq, yh, HR, yj, ae, af, HO, an, yi, xX, d, xU, kl, aW, sp, Y, yL, yc, yq, t, nC, bz, iK, ga, iP, cv, jq, dR, D, ok, yf, bP, yl, xZ, HP, cj, tl, m, ei, y, B); #c1(ADRA1A) c2(XP_011542713) c3(alpha-1A adrenergic receptor isoform X4) c4(341261) c5(341262, 341263, 341264, 341265, 341266, 341267, 341268, 341269, 341270, 341271, 341272, 341273) c6( ) c7(bL, bM, G, T, HQ, qX, vS, iH, eR, yk, oe, ha, e, EQ, cz, hx, al, hU, v, j, fd, yp, xY, ye, cd, ad, eA, yn, av, ot, ec, DK, gH, nX, xW, sy, aT, h, xV, bK, K, yb, bq, yh, HR, yj, ae, af, HO, an, yi, xX, d, xU, kl, aW, sp, Y, yL, yc, yq, t, nC, bz, iK, qa, iP, cv, jq, dR, D, ok, yf, bP, yl, xZ, HP, cj, tl, m, ei, y, B); #c1(ADRA1A) c2(XP_011542714) c3(alpha-1A adrenergic receptor isoform X5) c4(341274, 341275) c5(341276, 341277, 341278, 341279, 341280, 341281, 341282, 341283, 341284, 341285, 341286, 341287) c6( ) c7(bL, bM, G, T, HQ, qX, vS, iH, eR, yk, oe, ha, e, EQ, cz, hx, al, hU, v, j, fd, yp, xY, ye, cd, ad, eA, yn, av, ot, ec, DK, gH, nX, xW, sy, aT, h, xV, bK, K, yb, bq, yh, HR, yj, ae, af, HO, an, yi, xX, d, xU, kl, aW, sp, Y, yL, yc, yq, t, nC, bz, iK, qa, iP, cv, jq, dR, D, ok, yf, bP, yl, xZ, HP, cj, tl, m, ei, y, B); #c1(ADRA1B) c2(NP_000670) c3(alpha-1B adrenergic receptor) c4(14370) c5(14371, 14372, 14373, 14374, 14375, 14376) c6( ) c7(bM, kl, eR, cA, oe, hx, HC, r, aA, cz, v, dy, K, bK, aF, q, qa, iq); #c1(ADRA1D) c2(NP_000669) c3(alpha-1D adrenergic receptor) c4(14363) c5(14364, 14365, 14366, 14367, 14368, 14369) c6( ) c7(bM, T, uK, IP, ea, al, IL, bB, cL, zh, HS, ci, ur, IK, IN, HU, IR, aR, IS, IF, bv, IE, HV, aE, lu, dv, HR, K, IQ, N, IZ, uM, kF, IB, Ih, aW, IW, Ih, az, hl, ih, g, as, eF, cm, Ik, DL, ly, It, Iq, mx, cj, wx, m, Ic, cZ, dD, IG, IT, Io, aw, cV, lb, n, aj, BF, Id, cd, tD, sd, h, jy, HX, ey, pj, dd, A, HY, aq, Hu, xe, HT, IJ, vU, iO, bP, cA, IX, In, Be, hR, ER, IA, cB, B, If, L, II, Ip, fM, eR, fG, hx, jx, DV, aA, Ij, cz, j, C, Eh, pd, q, J, o, ID, mj, hW, Ig, aT, zp, kU, IM, ae, af, Ir, bA, hM, kl, s, rh, HZ, Y, yL, ev, IC, r, IH, Is, bQ, t, qs, iK, pb, Iv, vk, IY, ck, sS, BU, c, kB, II, IV, HW, hr, wq, dy, EY, Iw, gT, FI, ao, am, kh, id, ob, ha, li, ID, wV, bS, uu, jE, dG, ah, eq, tK, ad, hX, F, le, oj, oW, ab, vw, Im, ji, Iz, d, lx, IU, Fz, eH, eZ, hp, la, S, uF, Z, iV, bz, dr, Ek, qa, dR, gk, DT, qe, mi, bE, dJ, aS, ei, y, fh, wS, us); #c1(ADRA2A) c2(NP_000672) c3(alpha-2A adrenergic receptor) c4(14388) c5(14389, 14390, 14391, 14392, 14393, 14394) c6( ) c7(bL, HQ, oe, ha, al, bO, cz, jh, BH, Ja, j, ct, C, bS, Jd, aj, v, ww, J, xt, mj, I, DK, Jb, Fo, io, K, jo, qM, hB, an, ae, af, Jc, yL, gC, iV, Z, bJ, hq, cA, HP, gZ, qq, ei, ra, FI, Je); #c1(ADRA2B) c2(NP_000673) c3(alpha-2B adrenergic receptor) c4(14395) c5(14396, 14397, 14398, 14399, 14400, 14401) c6( ) c7(bL, bM, T, dD, HQ, iH, ea, yk, oe, ha, e, EQ, cz, hU, aw, aj, v, j, eq, nA, yp, fd, Jf, ye, xY, J, cd, ad, eA, yn, av, uT, xW, aT, h, xV, bK, K, yb, yh, yj, ae, hm, aa, yi, xX, d, xU, kl, aW, Y, yc, yq, t, nC, bz, iK, qa, iP, bJ, jq, dR, ok, yf, pO, yl, bP, xZ, Ei, cj, tl, mf, m, ei, y, gq); #c1(ADRA2C) c2(NP_000674) c3(alpha-2C adrenergic receptor) c4(14402) c5(14403, 14404, 14405, 14406, 14407, 14408) c6( ) c7(bL, HQ, oe, bO, cz, bS, uj, ct, cd, xt, DK, he, mu, Jj, Jg, Z, jb, bN, Jh, cA, HP, Ji, mx, sv, ra); #c1(ADRB1) c2(NP_000675) c3(beta-1 adrenergic receptor) c4(14409) c5(14410, 14411, 14412, 14413, 14414, 14415) c6( ) c7(HQ, T, dD, eR, mr, ea, wL, oe, e, aw, EQ, aA, cz, tc, aj, dG, j, v, vp, bO, eq, uW, Cb, ye, cd, Jm, cc, ec, Bc, IC, hD, IG, Jn, K, qM, bq, dQ, vP, af, hm, mu, A, fQ, pD, mo, Jk, Jl, dw, qa, bJ, ac, pZ, cA, mx, II, gZ, uz, at, pK, fy, iu, rk); #c1(ADRB2) c2(NP_000015) c3(beta-2 adrenergic receptor) c4(G9) c5(70, 71, 72, 73, 74, 75) c6( ) c7(bM, T, aC, vS, JN, fR, Js, pf, ea, e, al, EQ, fd, cL, gf, IN, Jx, Jt, aY, aR, x, aE, Bc, JD, Gb, M, Ds, K, qM, dQ, eN, aa, dH, JI, aW, mQ, fc, JF, pD, g, eE, cm, uC, Jr, JA, Jp, mx, U, cj, uo, wx, k, gn, FW, dD, sQ, JC, JE, aw, aj, ct, pM, cd, JB, cc, ec, Jv, cU, IG, jy, Jn, h, A, sp, xi, fQ, po, dw, cM, fq, bJ, kT, GG, cA, cO, bo, JM, at, E, Dp, ut, eo, JJ, sZ, B, Jo, bL, Dw, jv, wj, eR, DD, wL, oe, Ju, qQ, uv, aA, cz, tc, v, j, C, bX, uW, V, eA, J, o, mP, Ig, Jw, nX, aT, cy, bK, sR, af, eu, hM, kl, Y, r, en, f, bN, ck, JG, cT, ac, c, pZ, II, hr, uS, JL, mf, dy, JH, fD, gT, JO, ao, HQ, sY, qX, qb, aZ, iW, uG, Jy, oR, wV, bS, Jz, uu, eq, Fb, ad, Jm, fU, av, Jq, hD, JK, IQ, sj, mu, gj, IR, cH, ff, dq, aF, un, iV, Z, bz, qa, DF, D, gk, z, ag, uR, ei, oQ, pK, y, iu, rk); #c1(ADRB3) c2(NP_000016) c3(beta-3 adrenergic receptor) c4(76) c5(77, 78, 79, 80, 81, 82) c6( ) c7(T, e, bO, bB, IN, st, GK, wM, u, iX, qM, dQ, aW, fc, hl, uC, ha, vy, wx, aw, aj, cd, cc, ec, jy, uV, vx, A, ES, fQ, dw, cM, fq, JR, JP, bJ, kT, GG, cA, JQ, mg, hL, at, bL, eR, wL, oe, gQ, cz, v, j, nS, J, jF, nX, aT, cy, bq, af, dl, kl, bq, r, cl, c, II, JL, mf, HQ, qX, aZ, iW, uG, dG, tK, Jm, nH, I, ji, JS, sj, eZ, d, qa, bE, ei, y, vt, X); #c1(ADRBK1) c2(NP_001610) c3(beta-adrenergic receptor kinase 1) c4(119185) c5(119186, 119187, 119188, 119189, 119190, 119191, 119192) c6( ) c7(T, JC, aw, uG, cz, cR, tc, aj, dG, j, ci, v, Cb, JW, cd, aR, J, ad, Hx, hd, cc, oz, JT, aT, cy, bK, K, yb, an, ae, af, ak, ye, JU, s, aW, Y, JV, f J, fQ, dq, aq, iR, cm, ac, nB, xZ, mx, II, tV, gZ, hR, Da, IC, B, y); #c1(ADRBK2) c2(NP_005151) c3(beta-adrenergic receptor kinase 2) c4(153430, 153431) c5(153432, 153433, 153434, 153435, 153436, 153437, 153438, 153439, 153440, 153441, 153442, 153443) c6( ) c7(gV, ai, JX, d, bP, hG, mx, II, gZ, he, bK, K, an, gT, cd); #c1(ADRM1) c2(XP_011526804) c3(proteasomal ubiquitin receptor ADRM1 isoform X1) c4(321101, 321102) c5( ) c6( ) c7(T, y, aW, aT, aA, n, h, aF, ci, m, t, ae, ad); #c1(ADRM1) c2(XP_011526805) c3(proteasomal ubiquitin receptor ADRM1 isoform X2) c4( ) c5(321103, 321104, 321105, 321106, 321107, 321108, 321109, 321110, 321111, 321112, 321113, 321114) c6( ) c7(T, y, aW, aT, aA, n, h, aF, ci, m, t, ae, ad); #c1(ADSL) c2(NP_000017) c3(adenylosuccinate lyase isoform a) c4(83, 84) c5(85, 86, 87, 88, 89, 90, 91, 92, 93, 94, 95, 96) c6( ) c7(T, mO, d, JZ, jp, JY, aT, dg, Ka, aq, K, nA, bq, aR, bN); #c1(ADSL) c2(NP_001116850) c3(adenylosuccinate lyase isoform b) c4(43993) c5(43994, 43995, 43996, 43997, 43998, 43999, 44000, 44001, 44002, 44003, 44004, 44005) c6( ) c7(T, mO, d, JZ, jp, JY, aT, dg, Ka, aq, K, nA, bq, aR, bN); #c1(ADSL) c2(XP_011528281) c3(adenylosuccinate lyase isoform X4) c4(323354) c5( ) c6( ) c7(T, mO, d, JZ, jp, JY, aT, dg, Ka, aq, K, nA, bq, aR, bN); #c1(ADSS) c2(NP_001117) c3(adenylosuccinate synthetase isozyme 2) c4(44033, 44034) c5(44035, 44036, 44037, 44038, 44039, 44040, 44041, 44042, 44043, 44044, 44045, 44046) c6( ) c7(eE, Io, ey, ac, Kb); #c1(ADSSL1) c2(NP_689541) c3(adenylosuccinate synthetase isozyme 1 isoform 2) c4(243041) c5(243042, 243043, 243044, 243045, 243046, 243047) c6( ) c7(bz, bq); #c1(ADSSL1) c2(NP_954634) c3(adenylosuccinate synthetase isozyme 1 isoform 1) c4(261103) c5(261104, 261105, 261106, 261107, 261108, 261109) c6( ) c7(bz, bq); #c1(ADTRP) c2(NP_001137420) c3(androgen-dependent TFPI-regulating protein isoform 1) c4(55672) c5(55673, 55674, 55675, 55676, 55677, 55678) c6( ) c7(cd, j); #c1(ADTRP) c2(NP_116133) c3(androgen-dependent TFPI-regulating protein isoform 2) c4(225465) c5(225466, 225467, 225468, 225469, 225470, 225471) c6( ) c7(cd, j); #c1(ADTRP) c2(XP_011513258) c3(androgen-dependent TFPI-regulating protein isoform X2) c4(305503) c5(305504, 305505, 305506, 305507, 305508, 305509) c6( ) c7(cd, j); #c1(ADTRP) c2(XP_011513260) c3(androgen-dependent TFPI-regulating protein isoform X3) c4(305510) c5( ) c6( ) c7(cd, j); #c1(ADTRP) c2(XP_011513261) c3(androgen-dependent TFPI-regulating protein isoform X4) c4(305511) c5(305512, 305513, 305514, 305515, 305516, 305517, 305518, 305519, 305520, 305521, 305522, 305523) c6( ) c7(cd, j); #c1(AEBP2) c2(NP_001107648) c3(zinc finger protein AEBP2 isoform b) c4(42946, 42947, 42948, 42949) c5(42950, 42951, 42952, 42953, 42954, 42955, 42956, 42957, 42958) c6( ) c7(Kc); #c1(AEBP2) c2(NP_001253972) c3(zinc finger protein AEBP2 isoform c) c4( ) c5(94335, 94336, 94337, 94338, 94339, 94340) c6( ) c7(Kc); #c1(AEBP2) c2(NP_694939) c3(zinc finger protein AEBP2 isoform a) c4( ) c5(245434, 245435, 245436, 245437, 245438, 245439, 245440, 245441, 245442, 245443) c6( ) c7(Kc); #c1(AEN) c2(NP_073604) c3(apoptosis-enhancing nuclease) c4(213037, 213038) c5(213039, 213040, 213041, 213042, 213043, 213044, 213045, 213046, 213047, 213048, 213049, 213050) c6( ) c7(af); #c1(AES) c2(NP_945320) c3(amino-terminal enhancer of split isoform a) c4(260811) c5(260812, 260813, 260814, 260815, 260816, 260817) c6( ) c7(Kd, Ke, j, yb, bt, iu); #c1(AFAP1) c2(NP_001128119) c3(actin filament-associated protein 1 isoform A) c4( ) c5(49551, 49552, 49553, 49554, 49555, 49556) c6( ) c7(bF, cZ, dH, aW, aT, r, Kf, ci, K, dd, ae, ad); #c1(AFAP1) c2(XP_006713971) c3(actin filament-associated protein 1 isoform X2) c4(287464) c5( ) c6( ) c7(bF, cZ, dH, aW, aT, r, Kf, ci, K, dd, ae, ad); #c1(AFAP1) c2(XP_006713972) c3(actin filament-associated protein 1 isoform X4) c4(287465) c5(287466, 287467, 287468, 287469, 287470, 287471, 287472, 287473, 287474, 287475) c6( ) c7(bF, cZ, dH, aW, aT, r, Kf, ci, K, dd, ae, ad); #c1(AFAPIL1) c2(NP_001139809) c3(actin filament-associated protein 1-like 1 isoform 2) c4(59990) c5(59991, 59992, 59993, 59994, 59995, 59996) c6( ) c7(Kg); #c1(AFAPIL1) c2(NP_689619) c3(actin filament-associated protein 1-like 1 isoform 1) c4(243310) c5(243311, 243312, 243313, 243314, 243315, 243316) c6( ) c7(Kg); #c1(AFAPIL2) c2(NP_001001936) c3(actin filament-associated protein 1-like 2 isoform 1) c4(19178) c5(19179, 19180, 19181, 19182, 19183, 19184) c6( ) c7(T, hd, nB, aA, it, n, aF, bz); #c1(AFAPIL2) c2(NP_001274753) c3(actin filament-associated protein 1-like 2 isoform 3) c4(106773) c5(106774, 106775, 106776, 106777, 106778, 106779) c6( ) c7(T, hd, nB, aA, it, n, aF, bz); #c1(AFAPIL2) c2(NP_115939) c3(actin filament-associated protein 1-like 2 isoform 2) c4(224794, 224795) c5(224796, 224797, 224798, 224799, 224800, 224801, 224802, 224803, 224804, 224805, 224806, 224807) c6( ) c7(T, hd, nB, aA, it, n, aF, bz); #c1(AFAPIL2) c2(XP_005270290) c3(actin filament-associated protein 1-like 2 isoform X9) c4(283322) c5(283323, 283324, 283325, 283326, 283327, 283328, 283329, 283330, 283331, 283332) c6( ) c7(T, hd, nB, aA, it, n, aF, bz); #c1(AFF1) c2(NP_001160165) c3(AF4/FMR2 family member 1 isoform 1) c4(65171, 65172) c5(65173) c6( ) c7(ck, x, T, eX, eZ, eV, j, k, fL, hF, bt, mC); #c1(AFF1) c2(NP_005926) c3(AF4/FMR2 family member 1 isoform 2) c4(160486) c5(160487, 160488, 160489, 160490, 160491, 160492, 160493) c6( ) c7(ck, x, T, eX, eZ, eV, j, k, fL, hF, bt, mC); #c1(AFF1) c2(XP_005263066) c3(AF4/FMR2 family member 1 isoform X2) c4(278301, 278302) c5( ) c6( ) c7(ck, x, T, eX, eZ, eV, j, k, fL, hF, bt, mC); #c1(AFF1) c2(XP_005263070) c3(AF4/FMR2 family member 1 isoform X5) c4( ) c5(278303, 278304, 278305, 278306, 278307, 278308, 278309, 278310, 278311, 278312, 278313, 278314, 278315, 278316, 278317, 278318, 278319) c6( ) c7(ck, x, T, eX, eZ, eV, j, k, fL, hF, bt, mC); #c1(AFF2) c2(NP_001162593) c3(AF4/FMR2 family member 2 isoform 2) c4(66435, 66436) c5(66437, 66438, 66439, 66440, 66441, 66442, 66443, 66444, 66445, 66446, 66447, 66448, 66449, 66450, 66451) c6( ) c7(oe, Kk, Kn, Kh, Kw, nA, hF, Kx, aR, xt, x, Ks, il, nd, yZ, Ko, rz, Kq, Kt, nf, Ku, zZ, Kp, Kl, dR, ck, Ki, Kv, Kr, Km, Kj); #c1(AFF2) c2(NP_001162596) c3(AF4/FMR2 family member 2 isoform 5) c4(66452) c5(66453, 66454, 66455, 66456, 66457, 66458) c6( ) c7(oe, Kk, Kn, Kh, Kw, nA, hF, Kx, aR, xt, x, Ks, il, nd, yZ, Ko, rz, Kq, Kt, nf, Ku, zZ, Kp, Kl, dR, ck, Ki, Kv, Kr, Km, Kj); #c1(AFF2) c2(NP_001164099) c3(AF4/FMR2 family member 2 isoform 6) c4(66584) c5(66585, 66586, 66587, 66588, 66589, 66590) c6( ) c7(oe, Kk, Kn, Kh, Kw, nA, hF, Kx, aR, xt, x, Ks, il, nd, yZ, Ko, rz, Kq, Kt, nf, Ku, zZ, Kp, Kl, dR, ck, Ki, Kv, Kr, Km, Kj); #c1(AFF2) c2(NP_002016) c3(AF4/FMR2 family member 2 isoform 1) c4(123324) c5(123325, 123326, 123327, 123328, 123329, 123330, 123331, 123332, 123333) c6( ) c7(oe, Kk, Kn, Kh, Kw, nA, hF, Kx, aR, xt, x, Ks, il, nd, yZ, Ko, rz, Kq, Kt, nf, Ku, zZ, Kp, Kl, dR, ck, Ki, Kv, Kr, Km, Kj); #c1(AFF3) c2(NP_001020279) c3(AF4/FMR2 family member 3 isoform 2) c4(28535) c5(28536, 28537, 28538, 28539, 28540, 28541, 28542, 28543, 28544, 28545) c6( ) c7(T, eR, IB, oe, cL, Ea, nA, hF, aY, o, wD, x, aT, A, aW, ck, ou, iT, Jr, k, y, bt); #c1(AFF3) c2(NP_002276) c3(AF4/FMR2 family member 3 isoform 1) c4(127171, 127172, 127173, 127174, 127175, 127176, 127177, 127178) c5(127179, 127180, 127181, 127182, 127183, 127184, 127185, 127186, 127187, 127188, 127189, 127190, 127191, 127192, 127193, 127194, 127195, 127196, 127197, 127198, 127199, 127200, 127201, 127202, 127203, 127204, 127205, 127206, 127207, 127208, 127209, 127210, 127211, 127212, 127213, 127214, 127215, 127216, 127217, 127218, 127219, 127220, 127221) c6( ) c7(T, eR, IB, oe, cL, Ea, nA, hF, aY, o, wD, x, aT, A, aW, ck, ou, iT, Jr, k, y, bt); #c1(AFF3) c2(XP_011509471) c3(AF4/FMR2 family member 3 isoform X3) c4(300046) c5( ) c6( ) c7(T, eR, IB, oe, cL, Ea, nA, hF, aY, o, wD, x, aT, A, aW, ck, ou, iT, Jr, k, y, bt); #c1(AFF3) c2(XP_011509472) c3(AF4/FMR2 family member 3 isoform X4) c4(300047) c5(300048, 300049, 300050, 300051, 300052, 300053, 300054, 300055, 300056, 300057, 300058, 300059, 300060, 300061, 300062, 300063, 300064) c6( ) c7(T, eR, IB, oe, cL, Ea, nA, hF, aY, o, wD, x, aT, A, aW, ck, ou, iT, Jr, k, y, bt); #c1(AFF4) c2(NP_055238) c3(AF4/FMR2 family member 4) c4(179996) c5(179997, 179998, 179999, 180000, 180001, 180002, 180003) c6( ) c7(ck, x, ou, T, h, hn, k); #c1(AFF4) c2(XP_006714650) c3(AF4/FMR2 family member 4 isoform X2) c4(287933) c5(287934, 287935, 287936, 287937, 287938, 287939) c6( ) c7(ck, x, ou, T, h, hn, k); #c1(AFG3L2) c2(NP_006787) c3(AFG3-like protein 2) c4(168069, 168070) c5(168071, 168072, 168073, 168074, 168075, 168076, 168077, 168078, 168079, 168080, 168081, 168082) c6( ) c7(KC, KG, yr, KE, KB, ky, lu, KD, kB, aV, Ky, aN, U, Kz, KA, yZ, rf, fu, yU, KF); #c1(AFM) c2(NP_001124) c3(afamin precursor) c4( ) c5( ) c6( ) c7(T, Ki, jx, hl, aq, m, nA, t, B, hX); #c1(AFP) c2(NP_001125) c3(alpha-fetoprotein precursor) c4(49207) c5(49208, 49209, 49210, 49211, 49212, 49213) c6( ) c7(T, KK, al, bB, ci, aE, PX, KP, K, Jl, aW, hl, KX, La, g, DL, Ip, dc, m, gn, Le, wu, fg, n, aj, zP, eW, KL, ft, jz, KN, KV, Df, Lg, Ck, KH, Lh, Ff, fQ, aq, LI, cM, Ld, iO, ky, eD, bo, KT, B, Kl, jp, KR, jx, aA, bX, aT, rO, s, vT, Lf, Io, Lc, bu, f, KQ, xw, vW, Li, kD, KA, dy, KY, ao, vi, mL KW, jh, Hn, KD, jE, fu, hX, F, tT, wm, KU, cH, KS, Lk, aF, xH, Fq, KJ, iR, KM, dr, bF, gk, mi, bE, Lj, KZ, Lb, bC, be, hE, KF); #c1(AGA) c2(NP_000018) c3(N(4)-(beta-N-acetylglucosaminyl)-L-asparaginase isoform 1 preproprotein) c4(97) c5(98, 99, 100, 101, 102, 103) c6( ) c7(bM, aA, ad, Lr, dv, h, nm, jy, ae, mR, Ln, Lm, aF, hp, cl, ac, of, hL, Lp, hO, Lq, Ln); #c1(AGAP1) c2(NP_001032208) c3(arf-GAP with GTPase, ANK repeat and PH domain-containing protein 1 isoform 1) c4(31085, 31086) c5(31087, 31088, 31089, 31090, 31091, 31092) c6( ) c7(fq, bN); #c1(AGAP1) c2(NP_001231817) c3(arf-GAP with GTPase, ANK repeat and PH domain-containing protein 1 isoform 3) c4(87557) c5(87558, 87559, 87560, 87561, 87562, 87563) c6( ) c7(fq, bN); #c1(AGAP1) c2(NP_055729) c3(arf-GAP with GTPase, ANK repeat and PH domain-containing protein 1 isoform 2) c4(183152) c5(183153, 183154, 183155, 183156, 183157, 183158) c6( ) c7(fq, bN); #c1(AGAP1) c2(XP_011508849) c3(arf-GAP with GTPase, ANK repeat and PH domain-containing protein 1 isoform X3) c4( ) c5(299437, 299438, 299439, 299440, 299441, 299442) c6( ) c7(fq, bN); #c1(AGAP1) c2(XP_011508851) c3(arf-GAP with GTPase, ANK repeat and PH domain-containing protein 1 isoform X5) c4(299443) c5(299444, 299445, 299446, 299447, 299448, 299449) c6( ) c7(fq, bN); #c1(AGAP2) c2(NP_001116244) c3(arf-GAP with GTPase, ANK repeat and PH domain-containing protein 2 isoform PIKE-L) c4(43711) c5(43712, 43713, 43714, 43715, 43716, 43717) c6( ) c7(T, d, Ew, Ls, ae, ad); #c1(AGAP2) c2(NP_055585) c3(arf-GAP with GTPase, ANK repeat and PH domain-containing protein 2 isoform PIKE-A) c4(182115) c5(182116, 182117, 182118, 182119, 182120, 182121) c6( ) c7(T, d, Ew, Ls, ae, ad); #c1(AGAP2) c2(XP_005268682) c3(arf-GAP with GTPase, ANK repeat and PH domain-containing protein 2 isoform X1) c4( ) c5(282053) c6( ) c7(T, d, Ew, Ls, ae, ad); #c1(AGAP3) c2(NP_001036000) c3(arf-GAP with GTPase, ANK repeat and PH domain-containing protein 3 isoform b) c4(33649) c5(33650, 33651, 33652, 33653, 33654, 33655) c6( ) c7(fq); #c1(AGAP3) c2(NP_001268229) c3(arf-GAP with GTPase, ANK repeat and PH domain-containing protein 3 isoform c) c4(99705) c5(99706, 99707, 99708, 99709, 99710, 99711, 99712, 99713, 99714, 99715, 99716) c6( ) c7(fq); #c1(AGAP3) c2(NP_114152) c3(arf-GAP with GTPase, ANK repeat and PH domain-containing protein 3 isoform a) c4(222367, 222368, 222369) c5(222370, 222371, 222372, 222373, 222374, 222375, 222376, 222377, 222378, 222379, 222380, 222381, 222382) c6( ) c7(fq); #c1(AGAP3) c2(XP_005250000) c3(arf-GAP with GTPase, ANK repeat and PH domain-containing protein 3 isoform X3) c4( ) c5(269991, 269992, 269993) c6( ) c7(fq); #c1(AGAP4) c2(NP_597703) c3(arf-GAP with GTPase, ANK repeat and PH domain-containing protein 4 isoform 2) c4(235058, 235059, 235060) c5(235061, 235062, 235063, 235064, 235065, 235066, 235067, 235068, 235069, 235070, 235071, 235072, 235073, 235074, 235075, 235076, 235077, 235078) c6( ) c7(T, 8); #c1(AGAP4) c2(XP_005271857) c3(arf-GAP with GTPase, ANK repeat and PH domain-containing protein 4 isoform X2) c4(283610, 283611) c5(283612, 283613) c6( ) c7(T, B); #c1(AGAP4) c2(XP_011537571) c3(arf-GAP with GTPase, ANK repeat and PH domain-containing protein 4 isoform X1) c4( ) c5(335154, 335155, 335156, 335157, 335158) c6( ) c7(T, B); #c1(AGBL1) c2(NP_689549) c3(cytosolic carboxypeptidase 4) c4(243083, 243084) c5(243085, 243086, 243087, 243088, 243089, 243090, 243091, 243092, 243093, 243094, 243095, 243096) c6( ) c7(hb, vo, Lu, gv, Lt); #c1(AGBL1) c2(XP_011519528) c3(cytosolic carboxypeptidase 4 isoform X1) c4(314178) c5( ) c6( ) c7(hb, vo, Lu, gv, Lt); #c1(AGBL1) c2(XP_011519529) c3(cytosolic carboxypeptidase 4 isoform X2) c4( ) c5(314179, 314180, 314181, 314182, 314183, 314184) c6( ) c7(hb, vo, Lu, gv, Lt); #c1(AGBL2) c2(NP_079059) c3(cytosolic carboxypeptidase 2) c4(216823, 216824) c5(216825, 216826, 216827, 216828, 216829, 216830, 216831, 216832, 216833, 216834, 216835, 216836, 216837, 216838, 216839, 216840) c6( ) c7(nv, y, ai, CQ); #c1(AGBL2) c2(XP_006718390) c3(cytosolic carboxypeptidase 2 isoform X4) c4(291816) c5(291817) c6( ) c7(nv, y, ai, CQ); #c1(AGBL2) c2(XP_006718391) c3(cytosolic carboxypeptidase 2 isoform X8) c4( ) c5(291818, 291819, 291820, 291821, 291822) c6( ) c7(nv, y, ai, CQ); #c1(AGBL3) c2(NP_848658) c3(cytosolic carboxypeptidase 3) c4(254096, 254097, 254098) c5(254099, 254100, 254101, 254102, 254103, 254104, 254105, 254106, 254107, 254108, 254109, 254110) c6( ) c7(Hr); #c1(AGBL3) c2(XP_011514424) c3(cytosolic carboxypeptidase 3 isoform X3) c4( ) c5(307127, 307128, 307129, 307130, 307131, 307132) c6( ) c7(Hr); #c1(AGBL4) c2(XP_011540611) c3(cytosolic carboxypeptidase 6 isoform X2) c4(339108) c5( ) c6( ) c7(IB, W); #c1(AGBL4) c2(XP_011540613) c3(cytosolic carboxypeptidase 6 isoform X5) c4( ) c5(339109, 339110, 339111, 339112, 339113, 339114) c6( ) c7(IB, W); #c1(AGER) c2(NP_001127) c3(advanced glycosylation end product-specific receptor isoform 1 precursor) c4( ) c5( ) c6( ) c7(bM, T, aC, ea, e, ci, Lw, bv, dY, Bc, M, K, H, aa, aW, vs, g, y, eM, vy, Hb, R, m, vF, dD, Ly, Hm, aw, fN, BH, cQ, aj, Lv, eV, A, kT, mg, at, uz, Dp, B, bL, eR, fG, Lx, eX, cz, cR, fF, wo, v, j, si, V, J, uT, ns, aT, cy, bq, ae, af, eu, bA, ak, bf, iU, Y, r, en, bu, wA, rY, bN, rR, ac, mf, dy, fD, ao, kh, wi, dG, eq, ad, av, sN, LA, sj, uQ, uX, IR, cW, ff, cr, eZ, aF, iV, bz, LB, Bv, aS, Lz, IC, X, us); #c1(AGER) c2(NP_001193858) c3(advanced glycosylation end product-specific receptor isoform 2 precursor) c4(82771, 82772, 82773, 82774) c5( ) c6( ) c7(bM, T, aC, ea, e, ci, Lw, bv, dY, Bc, M, K, H, aa, aW, vs, g, y, eM, vy, Hb, R, m, vF, dD, Ly, Hm, aw, fN, BH, cQ, aj, Lv, eV, A, kT, mg, at, uz, Dp, B, bL, eR, fG, Lx, eX, cz, cR, fF, wo, v, j, si, V, J, uT, ns, aT, cy, bq, ae, af, eu, bA, ak, bf, iU, Y, r, en, bu, wA, rY, bN, rR, ac, mf, dy, fD, ao, kh, wi, dG, eq, ad, av, sN, LA, sj, uQ, uX, IR, cW, ff, cr, eZ, aF, iV, bz, LB, Bv, aS, Lz, IC, X, us); #c1(AGER) c2(NP_001193861) c3(advanced glycosylation end product-specific receptor isoform 3 precursor) c4( ) c5(82775, 82776, 82777, 82778, 82779, 82780, 82781, 82782, 82783, 82784, 82785, 82786, 82787, 82788, 82789, 82790, 82791, 82792, 82793, 82794, 82795, 82796, 82797, 82798, 82799, 82800, 82801, 82802, 82803, 82804, 82805, 82806, 82807, 82808, 82809, 82810, 82811, 82812, 82813, 82814, 82815, 82816, 82817, 82818, 82819, 82820, 82821, 82822) c6( ) c7(bM, T, aC, ea, e, ci, Lw, bv, dY, Bc, M, K, H, aa, aW, vs, g, y, eM, vy, Hb, R, m, vF, dD, Ly, Hm, aw, fN, BH, cQ, aj, Lv, eV, A, kT, mg, at, uz, Dp, B, bL, eR, fG, Lx, eX, cz, cR, fF, wo, v, j, si, V, J, uT, ns, aT, cy, bq, ae, af, eu, bA, ak, bf, iU, Y, r, en, bu, wA, rY, bN, rR, ac, mf, dy, fD, ao, kh, wi, dG, eq, ad, av, sN, LA, sj, uQ, uX, IR, cW, ff, cr, eZ, aF, iV, bz, LB, Bv, aS, Lz, IC, X, us); #c1(AGER) c2(NP_001193863) c3(advanced glycosylation end product-specific receptor isoform 4 precursor) c4(82823, 82824, 82825, 82826, 82827, 82828) c5(82829, 82830, 82831, 82832, 82833, 82834, 82835, 82836, 82837, 82838, 82839, 82840, 82841, 82842, 82843, 82844, 82845, 82846, 82847, 82848, 82849, 82850, 82851, 82852, 82853, 82854, 82855, 82856, 82857, 82858, 82859, 82860, 82861, 82862, 82863, 82864, 82865, 82866, 82867, 82868, 82869, 82870, 82871, 82872, 82873, 82874, 82875, 82876, 82877, 82878, 82879, 82880, 82881, 82882, 82883, 82884) c6( ) c7(bM, T, aC, ea, e, ci, Lw, bv, dY, Bc, M, K, H, aa, aW, vs, g, y, eM, vy, Hb, R, m, vF, dD, Ly, Hm, aw, fN, BH, cQ, aj, Lv, eV, A, kT, mg, at, uz, Dp, B, bL, eR, fG, Lx, eX, cz, cR, fF, wo, v, j, si, V, J, uT, ns, aT, cy, bq, ae, af, eu, bA, ak, bf, iU, Y, r, en, bu, wA, rY, bN, rR, ac, mf, dy, fD, ao, kh, wi, dG, eq, ad, av, sN, LA, sj, uQ, uX, IR, cW, ff, cr, eZ, aF, iV, bz, LB, Bv, aS, Lz, IC, X, us); #c1(AGER) c2(NP_001193883) c3(advanced glycosylation end product-specific receptor isoform 8 precursor) c4( ) c5(82910, 82911, 82912, 82913, 82914, 82915, 82916, 82917, 82918, 82919, 82920, 82921, 82922, 82923, 82924, 82925, 82926, 82927, 82928, 82929, 82930, 82931, 82932, 82933, 82934, 82935, 82936, 82937, 82938, 82939, 82940, 82941, 82942, 82943, 82944, 82945, 82946, 82947, 82948, 82949, 82950, 82951, 82952, 82953, 82954, 82955, 82956, 82957, 82958, 82959, 82960, 82961, 82962, 82963, 82964, 82965, 82966, 82967, 82968, 82969, 82970, 82971, 82972, 82973, 82974, 82975, 82976, 82977, 82978, 82979, 82980, 82981, 82982, 82983, 82984, 82985, 82986, 82987, 82988, 82989, 82990, 82991, 82992, 82993, 82994, 82995, 82996, 82997, 82998, 82999, 83000, 83001, 83002, 83003, 83004, 83005, 83006, 83007, 83008, 83009, 83010, 83011, 83012, 83013, 83014, 83015, 83016, 83017, 83018, 83019, 83020, 83021) c6( ) c7(bM, T, aC, ea, e, ci, Lw, bv, dY, Bc, M, K, H, aa, aW, vs, g, y, eM, vy, Hb, R, m, vF, dD, Ly, Hm, aw, fN, BH, cQ, aj, Lv, eV, A, kT, mg, at, uz, Dp, B, bL, eR, fG, Lx, eX, cz, cR, fF, wo, v, j, si, V, J, uT, ns, aT, cy, bq, ae, af, eu, bA, ak, bf, iU, Y, r, en, bu, wA, rY, bN, rR, ac, mf, dy, fD, ao, kh, wi, dG, eq, ad, av, sN, LA, sj, uQ, uX, IR, cW, ff, cr, eZ, aF, iV, bz, LB, Bv, aS, Lz, IC, X, us); #c1(AGER) c2(NP_001193895) c3(advanced glycosylation end product-specific receptor isoform 6 precursor) c4(83069, 83070, 83071) c5(83072, 83073, 83074, 83075, 83076, 83077, 83078, 83079, 83080, 83081, 83082, 83083, 83084, 83085, 83086, 83087, 83088, 83089, 83090, 83091, 83092, 83093, 83094, 83095, 83096, 83097, 83098, 83099) c6( ) c7(bM, T, aC, ea, e, ci, Lw, bv, dY, Bc, M, K, H, aa, aW, vs, g, y, eM, vy, Hb, R, m, vF, dD, Ly, Hm, aw, fN, BH, cQ, aj, Lv, eV, A, kT, mg, at, uz, Dp, B, bL, eR, fG, Lx, eX, cz, cR, fF, wo, v, j, sl, V, J, uT, ns, aT, cy, bq, ae, af, eu, bA, ak, bf, iU, Y, r, eu, bu, wA, rY, bN, rR, ac, mf, dy, fD, ao, kh, wi, dG, eq, ad, av, sN, LA, sj, uQ, uX, IR, cW, ff, cr, eZ, aF, iV, bz, LB, Bv, aS, Lz, IC, X, us); #c1(AGER) c2(NP_751947) c3(advanced glycosylation end product-specific receptor isoform 7 precursor) c4(248573, 248574) c5(248575, 248576, 248577, 248578, 248579, 248580, 248581, 248582, 248583, 248584, 248585, 248586, 248587, 248588, 248589, 248590, 248591, 248592, 248593, 248594, 248595, 248596, 248597, 248598, 248599, 248600, 248601, 248602) c6( ) c7(bM, T, aC, ea, e, ci, Lw, bv, dY, Bc, M, K, H, aa, aW, vs, g, y, eM, vy, Hb, R, m, vF, dD, Ly, Hm, aw, fN, BH, cQ, aj, Lv, eV, A, kT, mg, at, uz, Dp, B, bL, eR, fG, Lx, eX, cz, cR, fF, wo, v, j, sl, V, J, uT, ns, aT, cy, bq, ae, af, eu, bA, ak, bf, iU, Y, r, en, bu, wA, rY, bN, rR, ac, mf, dy, fD, ao, kh, wi, dG, eq, ad, av, sN, LA, sj, uQ, uX, IR, cW, ff, cr, eZ, aF, iV, bz, LB, Bv, aS, Lz, IC, X, us); #c1(AGFG1) c2(NP_001128659) c3(arf-GAP domain and FG repeat-containing protein 1 isoform 1) c4(50461, 50462) c5(50463, 50464, 50465, 50466, 50467, 50468, 50469, 50470, 50471, 50472, 50473, 50474) c6( ) c7(AT, T, dA, eM, aW, nx, yG, bo, aT aj, dL, k, nA, EA, y, eL, J, oU); #c1(AGFG1) c2(NP_001128660) c3(arf-GAP domain and FG repeat-containing protein 1 isoform 3) c4(50475) c5(50476, 50477, 50478, 50479, 50480, 50481) c6( ) c7(AT, T, dA, eM, aW, nx, yG, bo, aT, aj, dL, k, nA, EA, y, eL, J, oU); #c1(AGFG1) c2(NP_001128661) c3(arf-GAP domain and FG repeat-containing protein 1 isoform 4) c4(50482) c5(50483, 50484, 50485, 50486, 50487, 50488) c6( ) c7(AT, T, dA, eM, aW, nx, yG, bo, aT, aj, dL, k, nA, EA, y, eL, J, oU); #c1(AGFG1) c2(NP_004495) c3(arf-GAP domain and FG repeat-containing protein 1 isoform 2) c4(146929) c5(146930, 146931, 146932, 146933, 146934, 146935) c6( ) c7(AT, T, dA, eM, aW, nx, yG, bo, aT, aj, dL, k, nA, EA, y, eL, J, oU); #c1(AGFG2) c2(NP_006067) c3(arf-GAP domain and FG repeat-containing protein 2) c4(161629) c5(161630, 161631, 161632, 161633, 161634, 161635, 161636, 161637, 161638, 161639, 161640, 161641) c6( ) c7(ck, T, iT, iU, h, bw, m, hf, hF, bt, br); #c1(AGFG2) c2(XP_005250363) c3(arf-GAP domain and FG repeat-containing protein 2 isoform X1) c4(270267) c5( ) c6( ) c7(ck, T, iT, iU, h, bw, m, hf, hF, bt, br); #c1(AGGF1) c2(NP_060516) c3(angiogenic factor with G patch and FHA domains 1) c4(196321, 196322) c5(196323, 196324, 196325, 196326, 196327, 196328, 196329, 196330, 196331, 196332, 196333, 196334) c6( ) c7(bE, LC, bB, aS, LD, Cd, Cb); #c1(AGK) c2(XP_005250080) c3(acylglycerol kinase, mitochondrial isoform X2) c4( ) c5(270085, 270086, 270087, 270088, 270089, 270090, 270091, 270092, 270093, 270094, 270095, 270096, 270097, 270098, 270099, 270100) c6( ) c7(ae, T, cc, aW, aT, it, h, LE, LF, og, ad); #c1(AGK) c2(XP_011514699) c3(acylglycerol kinase, mitochondrial isoform X1) c4(307339, 307340, 307341) c5(307342, 307343, 307344, 307345, 307346, 307347) c6( ) c7(ae, T, cc, aW, aT, it, h, LE, LF, og, ad); #c1(AGM0) c2(NP_001004320) c3(alkylglycerol monooxygenase) c4(20584) c5(20585, 20586, 20587, 20588, 20589, 20590) c6( ) c7(bL, us); #c1(AGO2) c2(NP_001158095) c3(protein argonaute-2 isoform 2) c4(63134) c5(63135, 63136, 63137, 63138, 63139, 63140) c6( ) c7(gh, T, e, jx, aA, fd, fr, ci, zU, LI, ad, LH, hX, aE, ec, aT, vw, hP, K, LG, ae, eL, aW, Y, r, aq, cu, LJ, t, bz, es, cA, ig, iT, zG, m, bt, B); #c1(A602) c2(NP_036286) c3(protein argonaute-2 isoform 1) c4(172840) c5(172841, 172842, 172843, 172844, 172845, 172846) c6( ) c7(gh, T, e, jx, aA, fd, fr, ci, zU, LI, ad, LH, hX, aE, ec, aT, vw, hP, K, LG, ae, eL, aW, Y, r, aq, cu, LJ, t, bz, es, cA, ig, iT, zG, m, bt, B); #c1(AGPAT1) c2(XP_005248862) c3(1-acyl-sn-glycerol-3-phosphate acyltransferase alpha isoform X1) c4(268672, 268673, 268674) c5(268675, 268676, 268677, 268678, 268679, 268680, 268681, 268682, 268683, 268684, 268685, 268686, 268687, 268688, 268689, 268690, 268691, 268692, 268693, 268694, 268695, 268696, 268697, 268698) c6( ) c7(bL, T, A, aE, W, fc, cr, eZ, cP, GR); #c1(AGPAT1) c2(XP_011512536) c3(1-acyl-sn-glycerol-3-phosphate acyltransferase alpha isoform X2) c4( ) c5(303200, 303201, 303202, 303203, 303204, 303205, 303206, 303207, 303208, 303209, 303210, 303211, 303212, 303213, 303214, 303215, 303216, 303217, 303218, 303219, 303220, 303221, 303222, 303223, 303224, 303225, 303226, 303227, 303228, 303229, 303230, 303231, 303232, 303233, 303234, 303235, 303236, 303237, 303238, 303239, 303240, 303241, 303242, 303243, 303244, 303245, 303246, 303247, 303248, 303249, 303250, 303251, 303252, 303253, 303254, 303255, 303256, 303257, 303258, 303259, 303260, 303261, 303262, 303263, 303264, 303265, 303266, 303267, 303268, 303269, 303270, 303271, 303272, 303273, 303274, 303275, 303276, 303277, 303278, 303279, 303280, 303281, 303282, 303283, 303284, 303285, 303286, 303287, 303288, 303289, 303290, 303291, 303292, 303293, 303294, 303295, 303296, 303297, 303298, 303299, 303300, 303301, 303302, 303303, 303304, 303305, 303306, 303307, 303308, 303309, 303310, 303311, 303312, 303313, 303314, 303315, 303316, 303317, 303318, 303319, 303320, 303321, 303322, 303323, 303324, 303325, 303326, 303327, 303328, 303329, 303330, 303331, 303332, 303333, 303334, 303335, 303336, 303337, 303338, 303339, 303340, 303341, 303342, 303343, 303344, 303345, 303346, 303347, 303348, 303349, 303350, 303351, 303352, 303353, 303354, 303355, 303356, 303357, 303358, 303359, 303360, 303361, 303362, 303363, 303364, 303365, 303366, 303367, 303368, 303369, 303370, 303371, 303372, 303373, 303374, 303375) c6( ) c7(bL, T, A, aE, W, fc, cr, eZ, cP, GR); #c1(AGPAT2) c2(NP_001012745) c3(1-acyl-sn-glycerol-3-phosphate acyltransferase beta isoform b precursor) c4(25253) c5(25254, 25255, 25256, 25257, 25258, 25259) c6( ) c7(T, aj, v, nA, eJ, J, LL, LN, vc, iU, LO, eH, fc, cl, eF, LK, t, GR, dr, JP, LM, hL, IZ, m, cP); #c1(AGPAT2) c2(NP_006403) c3(1-acyl-sn-glycerol-3-phosphate acyltransferase beta isoform a precursor) c4(164746) c5(164747, 164748, 164749, 164750, 164751, 164752, 164753, 164754, 164755, 164756) c6( ) c7(T, aj, v, nA, eJ, J, LL, LN, vc, iU, LO, eH, fc, cl, eF, LK, t, GR, dr, JP, LM, hL, IZ, m, cP); #c1(AGPAT3) c2(XP_006724093) c3(1-acyl-sn-glycerol-3-phosphate acyltransferase gamma isoform X1) c4(295705, 295706, 295707) c5(295708, 295709, 295710, 295711, 295712, 295713, 295714, 295715, 295716, 295717, 295718, 295719, 295720, 295721, 295722, 295723, 295724, 295725, 295726, 295727, 295728, 295729, 295730, 295731, 295732, 295733, 295734, 295735, 295736, 295737, 295738, 295739, 295740, 295741, 295742, 295743, 295744, 295745, 295746, 295747, 295748, 295749, 295750) c6( ) c7(U); #c1(AGPAT3) c2(XP_006724094) c3(1-acyl-sn-glycerol-3-phosphate acyltransferase gamma isoform X7) c4( ) c5(295751) c6( ) c7(U); #c1(AGPAT3) c2(XP_011527963) c3(1-acyl-sn-glycerol-3-phosphate acyltransferase gamma isoform X3) c4( ) c5(323020, 323021, 323022) c6( ) c7(U); #c1(AGPAT3) c2(XP_011527964) c3(1-acyl-sn-glycerol-3-phosphate acyltransferase gamma isoform X4) c4(323023, 323024, 323025) c5(323026, 323027, 323028, 323029, 323030, 323031, 323032, 323033, 323034, 323035, 323036, 323037, 323038) c6( ) c7(U); #c1(AGPAT3) c2(XP_011527965) c3(1-acyl-sn-glycerol-3-phosphate acyltransferase gamma isoform X5) c4( ) c5(323039, 323040) c6( ) c7(U); #c1(AGPAT3) c2(XP_011527966) c3(1-acyl-sn-glycerol-3-phosphate acyltransferase gamma isoform X6) c4( ) c5(323041) c6( ) c7(U); #c1(AGPAT4) c2(NP_064518) c3(1-acyl-sn-glycerol-3-phosphate acyltransferase delta) c4(202838, 202839, 202840, 202841) c5(202842, 202843, 202844, 202845, 202846, 202847, 202848) c6( ) c7(pN); #c1(AGPAT4) c2(XP_005267111) c3(1-acyl-sn-glycerol-3-phosphate acyltransferase delta isoform X3) c4(280755, 280756) c5(280757, 280758, 280759, 280760, 280761, 280762, 280763, 280764, 280765, 280766, 280767, 280768) c6( ) c7(pN); #c1(AGPAT4) c2(XP_006715577) c3(1-acyl-sn-glycerol-3-phosphate acyltransferase delta isoform X2) c4(289616) c5( ) c6( ) c7(pN); #c1(AGPAT4) c2(XP_006715578) c3(1-acyl-sn-glycerol-3-phosphate acyltransferase delta isoform X4) c4( ) c5(289617, 289618, 289619, 289620, 289621, 289622, 289623, 289624, 289625, 289626, 289627, 289628, 289629, 289630, 289631, 289632, 289633, 289634, 289635, 289636, 289637, 289638, 289639) c6( ) c7(pN); #c1(AGPAT9) c2(NP_001243350) c3(glycerol-3-phosphate acyltransferase 3) c4(90471) c5(90472, 90473, 90474, 90475, 90476, 90477, 90478, 90479, 90480, 90481) c6( ) c7(aW, yx, aw, aT, v, j, K); #c1(AGPS) c2(NP_003650) c3(alkyldihydroxyacetonephosphate synthase, peroxisomal precursor) c4(139932, 139933) c5(139934, 139935, 139936, 139937, 139938, 139939) c6( ) c7(LQ, jp, sO, LP, ey, LR, af); #c1(AGPS) c2(XP_011510344) c3(alkyldihydroxyacetonephosphate synthase, peroxisomal isoform X1) c4( ) c5(300893, 300894, 300895, 300896, 300897, 300898) c6( ) c7(LQ, jp, sO, LP, ey, LR, af); #c1(AGR2) c2(NP_006399) c3(anterior gradient protein 2 homolog precursor) c4(164718, 164719, 164720) c5(164721, 164722, 164723, 164724, 164725, 164726, 164727, 164728, 164729, 164730, 164731, 164732, 164733, 164734, 164735, 164736, 164737, 164738) c6( ) c7(bM, T, aC, LX, n, Fb, j, ci, q, ad, dP, BI, aE, LY, LW, aT, K, ae, s, aW, LZ, r, fe, kp, LU, g, iV, LV, t, LS, DF, ar, gX, m, cE, B, LT); #c1(AGR3) c2(NP_789783) c3(anterior gradient protein 3 homolog precursor) c4(252287) c5(252288, 252289, 252290, 252291, 252292, 252293) c6( ) c7(Mb, Ma, aT, fe, ci, m, t, ae, B, ad); #c1(AGRN) c2(XP_011539733) c3(agrin isoform X5) c4( ) c5(337955) c6( ) c7(xA, Me, Md, bt, fq, af, bN); #c1(AGRP) c2(XP_011521229) c3(agouti-related protein isoform X1) c4(316146) c5(316147, 316148, 316149, 316150, 316151, 316152) c6( ) c7(bL, T, gU, jx, Me, ml, cz, aj, gf, v, rc, J, Mg, iX, dV, h, qM, rz, d, oV, LO, gC, Mf, Lk, LI, GR, bJ, xK, dc, mf, ei, eg, bt); #c1(AGT) c2(NP_000020) c3(angiotensinogen preproprotein) c4(104, 105) c5(106, 107, 108, 109, 110, 111, 112, 113, 114, 115, 116, 117) c6( ) c7(Mh, bM, T, Fj, tQ, wH, ea, if, e, al, Av, eh, MF, ur, ci, aY, GK, wM, dY, aE, ws, il, Bc, M, dV, Mx, iv, K, qM, wt, dQ, eL, bc, eN, hm, tw, zQ, Mq, Hl, aW, Fe, az, hl, fc, vt, vs, pD, zC, aB, g, ve, uC, cm, mZ, fT, wE, mx, vy, wB, uo, Hb, m, IS, fy, MI, dD, uH, Ly, vI, wJ, My, aw, cQ, aj, Mi, ct, Ms, qN, fr, zP, ww, eh, cd, JW, Mo, cc, no, Mm, do, Mv, ql, ec, we, wG, zf, sW, jy, dL, ey, wo, bl, mV, mY, mU, A, MD, fQ, aq, wd, kp, Hu, fe, dw, ty, cM, sf, mX, hq, kT, W, dC, vb, FV, wk, bm, bo, tl, uz, at, va, gv, eo, gg, bD, mT, B, um, vQ, bL, jv, tf, eR, mr, wL, dK, oe, uv, fG, yk, aA, cR, tc, sM, mS, j, cz, C, sl, fF, uW, V, v, Mk, J, q, vp, il, Mp, ga, uT, hb, nX, qp, rS, aT, yu, cy, bK, bq, sR, Fg, ae, af, eu, bA, DX, kl, su, Mr, s, bf, Y, r, iy, wl, uU, en, cl, wA, Mu, t, pb, sk, wg, ac, c, pZ, jx, hc, MB, dh, fP, hO, cS, Mn, dy, ud, Mt, Mj, vi, vq, sY, wi, qb, aZ, dM, uG, vr, oR, vG, bS, uu, jE, dG, ah, MA, eq, tK, MC, ad, dZ, kL, dP, fU, hX, F, sN, mW, oz, vJ, IC, ts, oW, vw, vc, uD, nJ, vP, vI, sj, mu, uQ, uX, ME, d, IR, tb, cH, cW, ff, wc, gC, eZ, Mz, dq, yy, aF, si, Z, iR, bz, qa, eK, LB, D, gk, pE, ag, gZ, Mw, tr, cP, aS, bC, hE, tP, be, ei, us); #c1(AGTPBP1) c2(NP_001273644) c3(cytosolic carboxypeptidase 1 isoform a) c4( ) c5(105527, 105528, 105529, 105530, 105531, 105532, 105533) c6( ) c7(bM, HC, n, CQ, cm, nC, fq, MG); #c1(AGTPBP1) c2(NP_001273646) c3(cytosolic carboxypeptidase 1 isoform c) c4(105534, 105535) c5(105536, 105537, 105538, 105539, 105540, 105541, 105542) c6( ) c7(bM, HC, n, CQ, cm, nC, fq, MG); #c1(AGTPBP1) c2(NP_056054) c3(cytosolic carboxypeptidase 1 isoform b) c4(185405) c5(185406, 185407, 185408, 185409, 185410, 185411) c6( ) c7(bM, HC, n, CQ, cm, nC, fq, MG); #c1(AGTPBP1) c2(XP_005251905) c3(cytosolic carboxypeptidase 1 isoform X1) c4(271276) c5(271277, 271278, 271279, 271280, 271281, 271282) c6( ) c7(bM, HC, n, CQ, cm, nC, fq, MG); #c1(AGTPBP1) c2(XP_011516721) c3(cytosolic carboxypeptidase 1 isoform X4) c4(310179) c5( ) c6( ) c7(bM, HC, n, CQ, cm, nC, fq, MG); #c1(AGTPBP1) c2(XP_011516723) c3(cytosolic carboxypeptidase 1 isoform X6) c4(310180) c5(310181, 310182, 310183, 310184, 310185, 310186, 310187, 310188, 310189, 310190, 310191, 310192, 310193, 310194) c6( ) c7(bM, HC, n, CQ, cm, nC, fq, MG); #c1(AGTR1) c2(NP_004826) c3(type-1 angiotensin II receptor isoform 2) c4( ) c5(150101, 150102, 150103) c6( ) c7(ID, bM, T, Fj, ea, e, al, eh, ur, ci, Lw, aY, dY, aE, il, Bc, M, iv, K, wt, dQ, MO, eL, eN, hm, tw, ly, aW, fc, Au, pD, aB, g, uC, wT, AM, wE, mx, vy, wB, uo, m, sr, dD, vl, sQ, wJ, aw, cQ, aj, fr, ct, uE, zP, JW, cd, BI, b, cc, ec, wG, ql, jy, dL, ey, A, MQ, aq, wd, kp, Hu, dw, ty, cM, ML, lx, sf, kT, W, vb, bo, lf, hL, MM, hR, uz, at, bm, gg, bD, sZ, B, um, bL, tf, eR, mr, wL, oe, uv, aA, cR, tc, cz, fF, j, v, MN, wo, AO, J, MK, ga, uT, nX, rS, MP, tF, MI, aT, cy, sR, Fg, ae, af, eu, su, tA, s, bf, Y, r, wl, sV, uU, cI, Mu, t, f, pb, wg, ac, c, ig, hc, fP, cS, dy, sY, MH, aZ, dM, aD, uG, vr, oR, vG, bS, uu, dG, ah, eq, tK, ad, tX, fU, dP, F, oz, vJ, vw, vc, vB, tt, uD, vP, sj, mu, uQ, uX, IR, qZ, cH, cW, eZ, dq, aF, Z, iR, qa, eK, LB, D, gk, ag, uR, gZ, nT, MJ, aS, tr, ei, ME, i, IC, vt, BA); #c1(AGTR1) c2(NP_033611) c3(type-1 angiotensin II receptor isoform 1) c4( ) c5(172267, 172268, 172269, 172270, 172271, 172272, 172273, 172274, 172275, 172276, 172277, 172278, 172279, 172280, 172281, 172282, 172283, 172284, 172285, 172286, 172287, 172288, 172289, 172290, 172291, 172292, 172293, 172294, 172295) c6( ) c7(ID, bM, T, Fj, ea, e, al, eb, ur, ci, Lw, aY, dY, aE, il, Bc, M, iv, K, wt, dQ, MO, eL, eN, hm, tw, ly, aW, fc, Au, pD, aB, g, uC, wT, AM, wE, mx, vy, wB, uo, m, sr, dD, vl, sQ, wJ, aw, cQ, aj, fr, ct, uE, zP, JW, cd, Bl, b, cc, ec, wG, ql, jy, dL, ey, A, MQ, aq, wd, kp, Hu, dw, ty, cM, ML, lx, sf, kT, W, vb, bo, lf, hL, MM, hR, uz, at, bm, gg, bD, sZ, B, um, bL, tf, eR, mr, wL, oe, uv, aA, cR, tc, cz, fF, j, v, MN, wo, AO, J, MK, ga, uT, nX, rS, MP, tF, MI, aT, cy, sR, Fg, ae, af, eu, su, tA, s, bf, Y, r, wl, sV, uU, cl, Mu, t, f, pb, wg, ac, c, ig, hc, fP, cS, dy, sY, MH, aZ, dM, aD, uG, vr, oR, vG, bS, uu, dG, ah, eq, tK, ad, tX, fU, dP, F, oz, vJ, vw, vc, vB, tt, uD, vP, sj, mu, uQ, uX, IR, qZ, cH, cW, eZ, dq, aF, Z, iR, qa, eK, LB, D, gk, ag, uR, gZ, nT, MJ, aS, tr, ei, ME, i, IC, vt, BA); #c1(AGTR1) c2(NP_114438) c3(type-1 angiotensin II receptor isoform 3) c4(222795) c5(222796, 222797, 222798, 222799, 222800, 222801) c6( ) c7(ID, bM, T, Fj, ea, e, al, eb, ur, ci, Lw, aY, dY, aE, il, Bc, M, iv, K, wt, dQ, MO, eL, eN, hm, tw, ly, aW, fc, Au, pD, aB, g, uC, wT, AM, wE, mx, vy, wB, uo, m, sr, dD, vl, sQ, wJ, aw, cQ, aj, fr, ct, uE, zP, JW, cd, Bl, b, cc, ec, wG, ql, jy, dL, ey, A, MQ, aq, wd, kp, Hu, dw, ty, cM, ML, lx, sf, kT, W, vb, bo, lf, hL, MM, hR, uz, at, bm, gg, bD, sZ, B, um, bL, tf, eR, mr, wL, oe, uv, aA, cR, tc, cz, fF, j, v, MN, wo, AO, J, MK, ga, uT, nX, rS, MP, tF, MI, aT, cy, sR, Fg, ae, af, eu, su, tA, s, bf, Y, r, wl, sV, uU, cl, Mu, t, f, pb, wg, ac, c, ig, hc, fP, cS, dy, sY, MH, aZ, dM, aD, uG, vr, oR, vG, bS, uu, dG, ah, eq, tK, ad, tX, fU, dP, F, oz, vJ, vw, vc, vB, tt, uD, vP, sj, mu, uQ, uX, IR, qZ, cH, cW, eZ, dq, aF, Z, iR, qa, eK, LB, D, gk, ag, uR, gZ, nT, MJ, aS, tr, ei, ME, i, IC, vt, BA); #c1(AGTR2) c2(XP_011535835) c3(type-2 angiotensin II receptor isoform X1) c4(333040) c5(333041, 333042, 333043, 333044, 333045, 333046) c6( ) c7(bM, T, ea, e, ci, il, K, dQ, aW, zE, uC, vA, mx, vy, fy, in, dD, aw, aj, nA, zP, MT, cd, wG, h, IG, ey, uV, A, sm, Hu, dw, zZ, op, hq, bo, gg, B, vQ, bL, eR, oe, aA, cz, v, j, C, sl, il, MR, tL, aT, cy, jj, bq, ae, af, kl, s, Mu, ac, ig, hc, dy, ao, HQ, MH, aZ, uO, dG, eq, ad, dP, fU, av, fX, MS, vw, jo, vP, sj, uQ, uX, nf, Z, Hv, qa, LB, D, ei, kS); #c1(AGXT) c2(NP_000021) c3(serine-pyruvate aminotransferase) c4(118) c5(119, 120, 121, 122, 123, 124, 125, 126, 127, 128, 129, 130, 131, 132, 133, 134, 135, 136, 137, 138, 139, 140, 141, 142, 143, 144, 145, 146, 147, 148, 149, 150, 151, 152, 153, 154, 155, 156, 157, 158, 159, 160, 161, 162, 163, 164, 165, 166, 167, 168, 169, 170, 171, 172, 173, 174, 175, 176, 177, 178, 179, 180, 181, 182, 183, 184, 185, 186, 187, 188, 189, 190, 191, 192, 193, 194, 195, 196, 197, 198, 199, 200, 201, 202, 203, 204, 205, 206, 207, 208, 209, 210) c6( ) c7(Mh, bL, T, bM, eR, wH, wJ, aZ, yk, e, if, aw, cz, fF, eb, cQ, aj, j, ci, ur, uu, ah, aY, tK, v, vm, aR, J, hX, qN, no, hW, vJ, il, M, aT, MU, K, Cy, hm, kl, d, Mq, xU, IR, cH, cW, aW, MD, MX, fe, dq, uU, g, MV, fr, bz, dr, qa, hq, mO, Dy, ac, dC, z, MB, uz, MW, cS, aS, dy, ei, hE, tP, B); #c1(AGXT2) c2(NP_114106) c3(alanine-glyoxylate aminotransferase 2, mitochondrial precursor) c4(222176) c5(222177, 222178, 222179, 222180, 222181, 222182) c6( ) c7(mO, cz); #c1(AHCY) c2(NP_000678) c3(adenosylhomocysteinase isoform 1) c4(14416, 14417) c5(14418, 14419, 14420, 14421, 14422, 14423, 14424) c6( ) c7(T, dD, ea, jx, cz, bB, fd, aj, eq, J, Na, MZ, Nc, DY, MY, Cr, eu, rL, bf, fO, hl, r, cm, ac, lp, bE, wE, Nb, bm, at, X); #c1(AHCY) c2(XP_011526962) c3(adenosylhomocysteinase isoform X1) c4( ) c5(321263, 321264, 321265, 321266, 321267) c6( ) c7(T, dD, ea, jx, cz, bB, fd, aj, eq, J, Na, MZ, Nc, DY, MY, Cr, eu, rL, bf, fO, hl, r, cm, ac, lp, bE, wE, Nb, bm, at, X); #c1(AHCYL2) c2(NP_001124192) c3(putative adenosylhomocysteinase 3 isoform b) c4(48489) c5(48490, 48491, 48492, 48493, 48494, 48495) c6( ) c7(cd, ci); #c1(AHCYL2) c2(NP_001124194) c3(putative adenosylhomocysteinase 3 isoform c) c4(48496) c5(48497, 48498, 48499, 48500, 48501, 48502) c6( ) c7(cd, ci); #c1(AHCYL2) c2(NP_001124195) c3(putative adenosylhomocysteinase 3 isoform d) c4(48503) c5(48504, 48505, 48506, 48507, 48508, 48509) c6( ) c7(cd, ci); #c1(AHCYL2) c2(NP_056143) c3(putative adenosylhomocysteinase 3 isoform a) c4(185931) c5(185932, 185933, 185934, 185935, 185936, 185937) c6( ) c7(cd, ci); #c1(AHCYL2) c2(XP_011514288) c3(putative adenosylhomocysteinase 3 isoform X1) c4(306896) c5(306897, 306898, 306899, 306900, 306901, 306902) c6( ) c7(cd, ci); #c1(AHCYL2) c2(XP_011514290) c3(putative adenosylhomocysteinase 3 isoform X2) c4(306903, 306904) c5(306905, 306906, 306907, 306908, 306909, 306910, 306911, 306912, 306913, 306914, 306915, 306916) c6( ) c7(cd, ci); #c1(AHI1) c2(NP_001128304) c3(jouberin isoform b) c4(49815, 49816) c5(49817, 49818, 49819, 49820, 49821, 49822, 49823, 49824, 49825, 49826, 49827, 49828, 49829, 49830, 49831, 49832, 49833, 49834) c6( ) c7(bL, fM, dA, nx, jh, Hn, vm, v, nA, V, pd, Nh, hb, Ne, h, By, Nf, bK, K, Nj, rz, Nd, Ng, eG, je, IR, iU, Ni, gI, pR, nC, bN, ck, y, eU, iM, iT, Nk, FB, nw, dy, hE, xg, jr); #c1(AHI1) c2(XP_011534213) c3(jouberin isoform X1) c4(330548, 330549) c5(330550, 330551, 330552, 330553, 330554, 330555, 330556, 330557, 330558, 330559, 330560, 330561, 330562, 330563) c6( ) c7(bL, fM, dA, nx, jh, Hn, vm, v, nA, V, pd, Nh, hb, Ne, h, By, Nf, bK, K, Nj, rz, Nd, Ng, eG, je, IR, iU, Ni, gI, pR, nC, bN, ck, y, eU, iM, iT, Nk, FB, nw, dy, hE, xg, jr); #c1(AHI1) c2(XP_011534215) c3(jouberin isoform X2) c4( ) c5(330564, 330565, 330566, 330567, 330568) c6( ) c7(bL, fM, dA, nx, jh, Hn, vm, v, nA, V, pd, Nh, hb, Ne, h, By, Nf, bK, K, Nj, rz, Nd, Ng, eG, je, IR, iU, Ni, gl, pR, nC, bN, ck, y, eU, iM, iT, Nk, FB, nw, dy, hE, xg, jr); #c1(AHI1) c2(XP_011534217) c3(jouberin isoform X4) c4( ) c5(330569) c6( ) c7(bL, fM, dA, nx, jh, Hn, vm, v, nA, V, pd, Nh, hb, Ne, h, By, Nf, bK, K, Nj, rz, Nd, Ng, eG, je, IR, iU, Ni, gl, pR, nC, bN, ck, y, eU, iM, iT, Nk, FB, nw, dy, hE, xg, jr); #c1(AHI1) c2(XP_011534218) c3(jouberin isoform X5) c4(330570) c5( ) c6( ) c7(bL, fM, dA, nx, jh, Hn, vm, v, nA, V, pd, Nh, hb, Ne, h, By, Nf, bK, K, Nj, rz, Nd, Ng, eG, je, IR, iU, Ni, gl, pR, nC, bN, ck, y, eU, iM, iT, Nk, FB, nw, dy, hE, xg, jr); #c1(AHNAK) c2(NP_076965) c3(neuroblast differentiation-associated protein AHNAK isoform 2) c4(214496, 214497) c5(214498, 214499, 214500, 214501, 214502, 214503, 214504, 214505, 214506, 214507, 214508, 214509, 214510, 214511, 214512, 214513, 214514, 214515, 214516, 214517, 214518, 214519, 214520, 214521) c6( ) c7(bM, ib, Nl, fr, K, Nm); #c1(AHNAK) c2(XP_005274298) c3(neuroblast differentiation-associated protein AHNAK isoform X1) c4(285040, 285041) c5(285042, 285043, 285044, 285045, 285046, 285047, 285048, 285049, 285050, 285051, 285052, 285053) c6( ) c7(bM, ib, Nl, fr, K, Nm); #c1(AHNAK) c2(XP_005274300) c3(neuroblast differentiation-associated protein AHNAK isoform X4) c4(285054, 285055) c5( ) c6( ) c7(bM, ib, Nl, fr, K, Nm); #c1(AHNAK) c2(XP_011543552) c3(neuroblast differentiation-associated protein AHNAK isoform X7) c4(342464) c5(342465, 342466, 342467, 342468, 342469, 342470) c6( ) c7(bM, ib, Nl, fr, K, Nm); #c1(AHR) c2(NP_001612) c3(aryl hydrocarbon receptor precursor) c4(119193) c5(119194, 119195, 119196, 119197, 119198, 119199, 119200, 119201, 119202, 119203, 119204) c6( ) c7(bM, T, aC, ea, if, fd, bB, qj, ci, NF, x, xE, il, dV, K, aa, li, xQ, yo, aW, Nz, fc, Np, hl, g, eE, cm, y, eM, iA, nF, vA, Nl, uJ, k, m, dD, gU, NA, zX, aw, n, Nv, ai, ft, Nn, No, Lv, dL, Nr, Nu, fe, aq, po, zZ, op, W, dB, hL, hR, at, bD, NB, it, B, oe, Nt, aA, cz, hy, Ns, bX, eA, jZ, Nw, aT, vH, NG, ae, af, jf, ND, NE, iU, Y, fO, r, cl, t, iK, ck, ov, iM, kP, dh, gX, Nx, fD, xb, LS, Gl, id, iW, uO, jh, dG, Jz, eq, ad, dP, av, py, iY, ji, IQ, nJ, uX, d, BN, je, cr, dN, Ej, aF, iV, iR, bz, Nq, es, NC, bE, Ny, pP, cP, ei, hE, iu, rk, pC); #c1(AHRR) c2(NP_001229341) c3(aryl hydrocarbon receptor repressor isoform 2) c4(84240) c5(84241, 84242, 84243, 84244, 84245, 84246) c6( ) c7(ck, dP, T, av, gU, ND, aW, NH, aT, vH, at, dL, Ns, bz); #c1(AHRR) c2(NP_065782) c3(aryl hydrocarbon receptor repressor isoform 1) c4(205413) c5(205414, 205415, 205416, 205417, 205418, 205419) c6( ) c7(ck, dP, T, av, gU, ND, aW, NH, aT, vH, at, dL, Ns, bz); #c1(AHSA1) c2(NP_036243) c3(activator of 90 kDa heat shock protein ATPase homolog 1) c4(172602, 172603) c5(172604, 172605, 172606, 172607, 172608, 172609, 172610, 172611, 172612, 172613, 172614, 172615) c6( ) c7(T, aC, ea, if, fd, bB, gf, IR, Lw, bv, xE, aE, rw, dV, K, aW, zC, g, as, eF, cm, bw, eM, cj, NO, Hb, m, NN, NK, dD, NJ, aj, BF, ct, qN, fr, cd, ai, Hx, jz, cU, h, fe, aq, NL, w, hR, B, bL, Dw, NQ, fM, yk, IH, jx, aA, cR, cz, v, C, V, q, eA, eJ, yw, aT, kf, cy, ae, af, hM, wr, iU, Y, r, lo, en, t, iK, pb, ck, im, bt, ao, kh, jh, dG, eq, NI, iJ, ad, dP, av, CJ, F, MS, ds, ji, IQ, NM, NP, d, ff, eH, cr, aF, bz, dr, bE, y, iu); #c1(AHSA2) c2(NP_689605) c3(activator of 90 kDa heat shock protein ATPase homolog 2) c4( ) c5(243237, 243238, 243239, 243240, 243241, 243242, 243243, 243244) c6( ) c7(hp); #c1(AHSA2) c2(XP_006712006) c3(activator of 90 kDa heat shock protein ATPase homolog 2 isoform X3) c4(286336, 286337) c5(286338, 286339, 286340, 286341, 286342, 286343, 286344, 286345) c6( ) c7(hp); #c1(AHSG) c2(NP_001613) c3(alpha-2-HS-glycoprotein preproprotein) c4(119205, 119206) c5(119207, 119208, 119209, 119210, 119211, 119212, 119213, 119214, 119215, 119216, 119217, 119218) c6( ) c7(bL, T, dD, eR, fR, ea, e, aw, NT, eX, aj, v, j, eq, fo, q, J, dP, fU, NS, M, aT, dV, eV, K, af, bA, d, cW, aW, wc, ih, fc, r, aq, NR, rR, ac, U, mg, aS, dy, IS, ei, B, fl); #c1(AICDA) c2(NP_065712) c3(single-stranded DNA cytosine deaminase) c4(205034) c5(205035, 205036, 205037, 205038, 205039, 205040) c6( ) c7(bM, T, fR, pf, al, fd, aR, x, aE, u, K, qD, pk, aW, lW, hC, az, ih, kt, g, fT, Kv, Oa, cj, k, pw, jM, NU, wu, BF, Oe, jz, ec, kH, h, eV, By, hn, NX, NV, Gw, sp, zb, fe, aq, Og, BE, hk, B, Ob, fM, dA, hU, jx, eX, aA, bX, V, q, eA, NW, aT, ae, iU, oV, Y, r, lo, en, t, ck, cT, iM, iQ, wR, zA, vi, gV, aD, jh, ad, hX, I, F, NY, oW, NZ, wm, Od, ji, d, je, hG, Oc, xs, Of, ff, aF, BG, jg, iV, bz, z, bC, y, iu, jr); #c1(AIDA) c2(NP_073742) c3(axin interactor, dorsalization-associated protein) c4(213405, 213406, 213407) c5(213408, 213409, 213410, 213411, 213412, 213413, 213414, 213415, 213416, 213417, 213418, 213419, 213420, 213421, 213422, 213423, 213424, 213425) c6( ) c7(jj); #c1(AIF1) c2(NP_001614) c3(allograft inflammatory factor 1 isoform 3) c4(119219, 119220) c5(119221, 119222, 119223, 119224, 119225, 119226, 119227, 119228, 119229, 119230, 119231, 119232, 119233, 119234, 119235, 119236, 119237, 119238, 119239, 119240, 119241, 119242, 119243, 119244, 119245) c6( ) c7(cZ, T, dD, On, MH, OI, ea, iW, oR, v, eq, uE, V, qW, eA, eW, dP, b, dV, aT, IG, Oi, dd, an, H, af, eu, Ok, ak, A, d, LG, Oj, aW, eZ, as, pb, Hv, Oh, dS, wg, jV, c, W, Om, yW, hc, i, y, cB, ao, L); #c1(AIF1) c2(NP_116573) c3(allograft inflammatory factor 1 isoform 1) c4( ) c5(226264, 226265, 226266, 226267, 226268, 226269, 226270, 226271, 226272, 226273, 226274, 226275, 226276, 226277, 226278, 226279, 226280, 226281, 226282, 226283, 226284, 226285, 226286) c6( ) c7(cZ, T, dD, On, MH, OI, ea, iW, oR, v, eq, uE, V, qW, eA, eW, dP, b, dV, aT, IG, Oi, dd, an, H, af, eu, Ok, ak, A, d, LG, Oj, aW, eZ, as, pb, Hv, Oh, dS, wg, jV, c, W, Dm, yW, hc, i, y, cB, ao, L); #c1(AIF1) c2(XP_005248928) c3(allograft inflammatory factor 1 isoform X2) c4(268782) c5(268783, 268784, 268785, 268786, 268787, 268788, 268789, 268790, 268791, 268792, 268793, 268794, 268795, 268796, 268797, 268798, 268799, 268800, 268801, 268802, 268803) c6( ) c7(cZ, T, dD, On, MH, OI, ea, iW, oR, v, eq, uE, V, qW, eA, eW, dP, b, dV, aT, IG, Oi, dd, an, H, af, eu, Ok, ak, A, d, LG, Oj, aW, eZ, as, pb, Hv, Oh, dS, wg, jV, c, W, Dm, yW, hc, i, y, cB, ao, L); #c1(AIFM1) c2(NP_001124318) c3(apoptosis-inducing factor 1, mitochondrial isoform 4) c4( ) c5(48548, 48549, 48550, 48551, 48552, 48553, 48554, 48555, 48556, 48557, 48558, 48559, 48560, 48561, 48562, 48563, 48564, 48565, 48566, 48567, 48568, 48569, 48570, 48571, 48572, 48573, 48574, 48575, 48576, 48577, 48578, 48579, 48580, 48581, 48582, 48583, 48584, 48585, 48586, 48587, 48588, 48589, 48590, 48591, 48592, 48593, 48594, 48595, 48596, 48597, 48598, 48599, 48600, 48601, 48602, 48603, 48604, 48605, 48606, 48607, 48608, 48609, 48610, 48611, 48612, 48613, 48614, 48615, 48616, 48617, 48618, 48619, 48620, 48621, 48622, 48623, 48624, 48625, 48626, 48627, 48628, 48629, 48630, 48631, 48632, 48633, 48634, 48635, 48636, 48637, 48638, 48639, 48640, 48641, 48642, 48643, 48644, 48645) c6(48646) c7(T, sw, Or, fu, eA, ad, av, aT, cy, bU, bq, ae, eu, Oq, A, B, iU, Op, bT, Y, Oo, aW, as, LK, bz, vk, rR, ac, ql, bE, bk, bt, it, X); #c1(AIFM1) c2(NP_001124319) c3(apoptosis-inducing factor 1, mitochondrial isoform 5 precursor) c4(48647, 48648) c5(48649, 48650, 48651, 48652, 48653, 48654, 48655, 48656, 48657, 48658, 48659) c6( ) c7(T, sw, Or, fu, eA, ad, av, aT, cy, bU, bq, ae, eu, Oq, A, B, iU, Op, bT, Y, Oo, aW, as, LK, bz, vk, rR, ac, ql, bE, bk, bt, it, X); #c1(AIFM1) c2(NP_004199) c3(apoptosis-inducing factor 1, mitochondrial isoform 1 precursor) c4(144294, 144295, 144296) c5(144297, 144298, 144299, 144300, 144301, 144302) c6( ) c7(T, sw, Or, fu, eA, ad, av, aT, cy, bU, bq, ae, eu, Oq, A, B, iU, Op, bT, Y, Oo, aW, as, LK, bz, vk, rR, ac, ql, bE, bk, bt, it, X); #c1(AIFM1) c2(NP_665811) c3(apoptosis-inducing factor 1, mitochondrial isoform 2 precursor) c4(241730, 241731, 241732, 241733) c5(241734, 241735, 241736, 241737, 241738, 241739, 241740, 241741, 241742, 241743, 241744, 241745, 241746, 241747) c6( ) c7(T, sw, Or, fu, eA, ad, av, aT, cy, bU, bq, ae, eu, Oq, A, B, iU, Op, bT, Y, Oo, aW, as, LK, bz, vk, rR, ac, ql, bE, bk, bt, it, X); #c1(AIFM2) c2(NP_001185625) c3(apoptosis-inducing factor 2) c4(75997, 75998) c5(75999, 76000, 76001, 76002, 76003, 76004, 76005, 76006, 76007, 76008, 76009, 76010, 76011, 76012, 76013, 76014) c6( ) c7(t, m); #c1(AIFM3) c2(NP_001018070) c3(apoptosis-inducing factor 3 isoform 2) c4(27062, 27063, 27064) c5(27065, 27066, 27067, 27068, 27069, 27070, 27071, 27072, 27073, 27074, 27075, 27076, 27077, 27078, 27079, 27080, 27081, 27082, 27083, 27084, 27085, 27086, 27087, 27088, 27089, 27090, 27091, 27092) c6( ) c7(X); #c1(AIFM3) c2(NP_001139760) c3(apoptosis-inducing factor 3 isoform 3) c4(59901) c5(59902, 59903, 59904, 59905, 59906, 59907) c6( ) c7(X); #c1(AIFM3) c2(NP_653305) c3(apoptosis-inducing factor 3 isoform 1) c4(239538, 239539) c5(239540, 239541, 239542, 239543, 239544, 239545, 239546, 239547, 239548, 239549) c6( ) c7(X); #c1(AIG1) c2(NP_001273516) c3(androgen-induced gene 1 protein isoform b) c4( ) c5(105111, 105112, 105113, 105114, 105115, 105116) c6( ) c7(aw); #c1(AIG1) c2(NP_001273517) c3(androgen-induced gene 1 protein isoform c) c4(105117) c5(105118, 105119, 105120, 105121, 105122, 105123, 105124, 105125, 105126, 105127, 105128, 105129) c6( ) c7(aw); #c1(AIG1) c2(NP_001273518) c3(androgen-induced gene 1 protein isoform d) c4(105130) c5( ) c6( ) c7(aw); #c1(AIG1) c2(NP_057192) c3(androgen-induced gene 1 protein isoform a) c4(189405, 189406, 189407, 189408, 189409) c5(189410, 189411, 189412, 189413, 189414, 189415, 189416, 189417, 189418, 189419, 189420, 189421, 189422, 189423, 189424, 189425, 189426, 189427) c6( ) c7(aw); #c1(AIG1) c2(XP_005267067) c3(androgen-induced gene 1 protein isoform X2) c4(280661) c5(280662, 280663, 280664, 280665, 280666, 280667) c6( ) c7(aw); #c1(AIG1) c2(XP_011534185) c3(androgen-induced gene 1 protein isoform X4) c4(330485) c5( ) c6( ) c7(aw); #c1(AIG1) c2(XP_011534186) c3(androgen-induced gene 1 protein isoform X5) c4( ) c5(330486, 330487, 330488, 330489, 330490, 330481, 330492, 330493, 330494, 330495, 330496, 330497) c6( ) c7(aw); #c1(AIM1) c2(NP_001615) c3(absent in melanoma 1 protein) c4(119246) c5(119247, 119248, 119249, 119250, 119251, 119252) c6( ) c7(ac, Y, eu, n, ae, ad, cp); #c1(AIM1) c2(XP_005266896) c3(absent in melanoma 1 protein isoform X1) c4(280376, 280377, 280378) c5(280379, 280380, 280381, 280382, 280383, 280384, 280385, 280386, 280387, 280388, 280389, 280390, 280391, 280392, 280393, 280394, 280395, 280396) c6( ) c7(ac, Y, eu, n, ae, ad, cp); #c1(AIM2) c2(NP_004824) c3(interferon-inducible protein AIM2) c4(150079, 150080, 150081) c5(150082, 150083, 150084, 150085, 150086, 150087, 150088, 150089, 150090, 150091, 150092, 150093) c6( ) c7(T, bB, ci, q, mC, ad, Ot, dV, Os, aT, Ou, ey, K, ae, d, bf, aW, Y, eZ, r, cT, pu, bE, fL); #c1(AIM2) c2(XP_005245673) c3(interferon-inducible protein AIM2 isoform X1) c4( ) c5(266876) c6( ) c7(T, bB, ci, q, mC, ad, Ot, dV, Os, aT, Ou, ey, K, ae, d, bf, aW, Y, eZ, r, cT, pu, bE, fL); #c1(AIM2) c2(XP_005245674) c3(interferon-inducible protein AIM2 isoform X2) c4( ) c5(266877, 266878, 266879, 266880, 266881) c6( ) c7(T, bB, ci, q, mC, ad, Ot, dV, Os, aT, Ou, ey, K, ae, d, bf, aW, Y, eZ, r, cT, pu, bE, fL); #c1(AIMP1) c2(NP_001135887) c3(aminoacyl tRNA synthase complex-interacting multifunctional protein 1 isoform a precursor) c4( ) c5(53499, 53500, 53501, 53502, 53503, 53504, 53505, 53506, 53507, 53508, 53509, 53510, 53511, 53512, 53513, 53514, 53515, 53516) c6( ) c7(T, dD, ea, oe, aw, eq, ci, qW, hX, aE, Ov, aT, h, an, yo, d, aW, Y, kp, fq, U, cj, uJ, y); #c1(AIMP1) c2(NP_001135888) c3(aminoacyl tRNA synthase complex-interacting multifunctional protein 1 isoform b precursor) c4(53517, 53518, 53519, 53520) c5(53521, 53522, 53523, 53524, 53525, 53526, 53527, 53528, 53529, 53530) c6( ) c7(T, dD, ea, oe, aw, eq, ci, qW, hX, aE, Ov, aT, h, an, yo, d, aW, Y, kp, fq, U, cj, uJ, y); #c1(AIMP2) c2(NP_006294) c3(aminoacyl tRNA synthase complex-interacting multifunctional protein 2) c4(163759) c5(163760, 163761, 163762, 163763, 163764, 163765) c6( ) c7(T, aC, ea, if, fd, bB, gf, IR, Lw, bv, xE, aE, rw, dV, K, aW, zC, g, as, eF, cm, bw, eM, cj, NO, Hb, m, NN, NK, dD, NJ, aj, BF, ct, qN, fr, cd, ai, Hx, jz, cU, h, dL, fe, aq, NL, w, hR, at, B, bL, Dw, NQ, fM, yk, IH, jx, aA, cR, cz, v, C, V, q, eA, eJ, yw, aT, kf, cy, ae, af, hM, wr, iU, Y, r, lo, en, t, iK, pb, ck, im, bt, ao, kh, jh, dG, eq, iJ, ad, dP, av, CJ, F, ds, ji, IQ, NM, NP, d, ff, eH, cr, aF, iR, bz, bE, y, iu); #c1(AIP) c2(NP_003968) c3(AH receptor-interacting protein isoform 1) c4(142509) c5(142510, 142511, 142512, 142513, 142514, 142515) c6( ) c7(T, OF, PY, Oy, IT, OE, n, OA, OH, JW, ad, hX, Do, ae, yo, Oz, BO, s, Ow, Ox, aq, OB, HI, cm, OC, OG, W, nB, iS, hR, OD, B); #c1(AIPL1) c2(NP_001028226) c3(aryl-hydrocarbon-interacting protein-like 1 isoform 2) c4(30389) c5(30390, 30391, 30392, 30393, 30394, 30395) c6( ) c7(li, IR, bP, OI, nx, U, ab, nw, eQ, OL, Nh, OJ, OK, nC, de); #c1(AIPL1) c2(NP_001028227) c3(aryl-hydrocarbon-interacting protein-like 1 isoform 3) c4(30396) c5(30397, 30398, 30399, 30400, 30401, 30402, 30403, 30404, 30405, 30406) c6( ) c7(li, IR, bP, OI, nx, U, ab, nw, eQ, OL, Nh, OJ, OK, nC, de); #c1(AIPL1) c2(NP_055151) c3(aryl-hydrocarbon-interacting protein-like 1 isoform 1) c4(179470, 179471) c5(179472, 179473, 179474, 179475, 179476, 179477, 179478, 179479, 179480, 179481, 179482, 179483) c6( ) c7(li, IR, bP, OI, nx, U, ab, nw, eQ, OL, Nh, OJ, OK, nC, de); #c1(AIRE) c2(NP_000374) c3(autoimmune regulator) c4(8242, 8243, 8244, 8245) c5(8246, 8247, 8248, 8249, 8250, 8251, 8252, 8253, 8254, 8255, 8256, 8257, 8258, 8259, 8260, 8261, 8262, 8263, 8264, 8265, 8266, 8267, 8268, 8269, 8270, 8271, 8272, 8273) c6( ) c7(dA, e, aw, fN, n, OY, ON, j, ml, bX, qj, BF, bh, pd, eW, OO, xy, mP, vJ, il, nX, OP, Bh, IQ, jj, OM, hK, bc, hM, OV, A, oV, Y, OX, OQ, hl, OS, OZ, kt, eZ, aF, OR, zZ, f, OU, dr, pb, mK, OW, Pa, Lj, OT, CZ, yH, bD, HE, kS, y, pC); #c1(AIRE) c2(XP_011527853) c3(autoimmune regulator isoform X1) c4( ) c5(322815) c6( ) c7(dA, e, aw, fN, n, OY, ON, j, ml, bX, qj, BF, bh, pd, eW, OO, xy, mP, vJ, il, nX, OP, Bh, IQ, jj, OM, hK, be, hM, OV, A, oV, Y, OX, OQ, hl, OS, OZ, kt, eZ, aF, OR, zZ, f, OU, dr, pb, mK, OW, Pa, Lj, OT, CZ, yH, bD, hE, kS, y, pC); #c1(AJAP1) c2(XP_011540088) c3(adherens junction-associated protein 1 isoform X1) c4(338428) c5(338429, 338430, 338431, 338432, 338433, 338434, 338435, 338436, 338437, 338438) c6( ) c7(ka, d, ki, oe, aA, aj, cm, Fc, eA); #c1(AJUBA) c2(NP_116265) c3(LIM domain-containing protein ajuba isoform 1) c4(226034, 226035, 226036, 226037) c5(226038, 226039, 226040, 226041, 226042, 226043, 226044, 226045, 226046, 226047, 226048, 226049, 226050, 226051) c6( ) c7(it, q, r, aT); #c1(AJUBA) c2(NP_932352) c3(LIM domain-containing protein ajuba isoform 2) c4( ) c5(258979, 258980, 258981, 258982, 258983, 258984, 258985, 258986, 258987, 258988, 258989, 258990, 258991, 258992, 258993, 258994, 258995, 258996) c6( ) c7(it, q, r, aT); #c1(AKI) c2(NP_000467) c3(adenylate kinase isoenzyme 1) c4(9286) c5(9287, 9288, 9289, 9290, 9291, 9292, 9293, 9294, 9295, 9296) c6( ) c7(bL, wi, sF, Pb, j, S, Pc); #c1(AK3) c2(NP_001186781) c3(GTP:AMP phosphotransferase AK3, mitochondrial isoform b) c4(78565) c5(78566, 78567, 78568, 78569, 78570, 78571) c6( ) c7(NK, ag, qh, oh, dX, Pd); #c1(AK3) c2(NP_001186785) c3(GTP:AMP phosphotransferase AK3, mitochondrial isoform c) c4( ) c5(78572, 78573, 78574, 78575, 78576, 78577, 78578, 78579) c6( ) c7(NK, ag, qh, oh, dX, Pd); #c1(AK3) c2(NP_057366) c3(GTP:AMP phosphotransferase AK3, mitochondrial isoform a) c4(190380, 190381) c5(190382, 190383, 190384, 190385, 190386, 190387, 190388, 190389) c6( ) c7(NK, ag, qh, oh, dX, Pd); #c1(AK6) c2(NP_001015891) c3(adenylate kinase isoenzyme 6 isoform c) c4(26245) c5(26246, 26247, 26248, 26249, 26250, 26251) c6( ) c7(LB, sb, pc, iT, cj, Pe, dz, K, ra, hF, ae, ad); #c1(AK6) c2(NP_057367) c3(adenylate kinase isoenzyme 6 isoform b) c4(190390) c5(190391, 190392, 190393, 190394, 190395, 190396) c6( ) c7(LB, sb, pc, iT, cj, Pe, dz, K, ra, hF, ae, ad); #c1(AK7) c2(NP_689540) c3(adenylate kinase 7) c4(243034) c5(243035, 243036, 243037, 243038, 243039, 243040) c6( ) c7(Pf, MG); #c1(AK8) c2(NP_689785) c3(adenylate kinase 8) c4(243946) c5(243947, 243948, 243949, 243950, 243951, 243952) c6( ) c7(fr); #c1(AK9) c2(NP_659462) c3(adenylate kinase 9 isoform 2) c4( ) c5(240064, 240065, 240066, 240067, 240068, 240069, 240070, 240071, 240072, 240073, 240074, 240075) c6( ) c7(vi); #c1(AK9) c2(XP_006715439) c3(adenylate kinase 9 isoform X2) c4(289559) c5(289560, 289561, 289562, 289563, 289564, 289565) c6( ) c7(vi); #c1(AK9) c2(XP_011533856) c3(adenylate kinase 9 isoform X5) c4(330087) c5( ) c6( ) c7(vi); #c1(AK9) c2(XP_011533858) c3(adenylate kinase 9 isoform X7) c4( ) c5(330088) c6( ) c7(vi); #c1(AK9) c2(XP_011533859) c3(adenylate kinase 9 isoform X8) c4(330089) c5( ) c6( ) c7(vi); #c1(AK9) c2(XP_011533860) c3(adenylate kinase 9 isoform X9) c4( ) c5(330090, 330091, 330092, 330093, 330094) c6( ) c7(vi); #c1(AK9) c2(XP_011533861) c3(adenylate kinase 9 isoform X10) c4(330095, 330096) c5(330097, 330098, 330099, 330100, 330101, 330102) c6( ) c7(vi); #c1(AKAP1) c2(NP_003479) c3(A-kinase anchor protein 1, mitochondrial precursor) c4(138677, 138678) c5(138679, 138680, 138681, 138682, 138683, 138684, 138685, 138686, 138687, 138688, 138689, 138690, 138691, 138692, 138693, 138694) c6( ) c7(cF, aW, aT, v, ae, eu, ad); #c1(AKAP1) c2(XP_011523620) c3(A-kinase anchor protein 1, mitochondrial isoform X2) c4(318107) c5(318108, 318109, 318110, 318111, 318112, 318113) c6( ) c7(cF, aW, aT, v, ae, eu, ad); #c1(AKAP10) c2(NP_009133) c3(A-kinase anchor protein 10, mitochondrial precursor) c4(171001) c5(171002, 171003, 171004, 171005, 171006, 171007) c6( ) c7(eR, aW, aw, cz, r, aT, K, ei, q); #c1(AKAP10) c2(XP_006721495) c3(A-kinase anchor protein 10, mitochondrial isoform X2) c4(294003) c5(294004, 294005, 294006, 294007, 294008, 294009) c6( ) c7(eR, aW, aw, cz, r, aT, K, ei, g); #c1(AKAP12) c2(NP_005091) c3(A-kinase anchor protein 12 isoform 1) c4(152819) c5(152820, 152821, 152822, 152823, 152824, 152825, 152826, 152827, 152828, 152829) c6( ) c7(G, T, pf, ht, aA, ci, hF, q, ad, aT, hu, ae, eG, iU, ff, r, kp, aF, en, bw, ac, bP, dy, bt, it, B); #c1(AKAP12) c2(NP_653080) c3(A-kinase anchor protein 12 isoform 2) c4(238824) c5(238825, 238826, 238827, 238828, 238829, 238830) c6( ) c7(G, T, pf, ht, aA, ci, hF, q, ad, aT, hu, ae, eG, iU, ff, r, kp, aF, en, bw, ac, bP, dy, bt, it, B); #c1(AKAP12) c2(XP_005267292) c3(A-kinase anchor protein 12 isoform X2) c4(280875) c5(280876, 280877, 280878, 280879, 280880, 280881) c6( ) c7(G, T, pf, ht, aA, ci, hF, q, ad, aT, hu, ae, eG, iU, ff, r, kp, aF, en, bw, ac, bP, dy, bt, it, B); #c1(AKAP13) c2(NP_001257475) c3(A-kinase anchor protein 13 isoform 4) c4(95477) c5(95478, 95479, 95480, 95481, 95482, 95483, 95484, 95485, 95486, 95487, 95488) c6( ) c7(dP, bM, T, iV, ra, aW, hF, ht, Pg, r, aT, fe, bw, fr, m, bu, t, bt, ae, q, ad); #c1(AKAP13) c2(NP_006729) c3(A-kinase anchor protein 13 isoform 1) c4(167492, 167493, 167494, 167495, 167496, 167497) c5(167498, 167499, 167500, 167501, 167502, 167503, 167504, 167505, 167506, 167507, 167508, 167509, 167510, 167511, 167512, 167513, 167514, 167515, 167516, 167517, 167518, 167519, 167520, 167521, 167522, 167523, 167524, 167525) c6( ) c7(dP, bM, T, iV, ra, aW, hF, ht, Pg, r, aT, fe, bw, fr, m, bu, t, bt, ae, q, ad); #c1(AKAP13) c2(NP_009131) c3(A-kinase anchor protein 13 isoform 2) c4(170970, 170971, 170972, 170973) c5(170974, 170975, 170976, 170977, 170978, 170979, 170980, 170981, 170982, 170983, 170984, 170985, 170986, 170987, 170988, 170989, 170990, 170991, 170992, 170993, 170994, 170995, 170996, 170997, 170998, 170999, 171000) c6( ) c7(dP, bM, T, iV, ra, aW, hF, ht, Pg, r, aT, fe, bw, fr, m, bu, t, bt, ae, q, ad); #c1(AKAP17A) c2(NP_005079) c3(A-kinase anchor protein 17A isoform 1) c4(152706, 152707) c5(152708, 152709, 152710, 152711, 152712, 152713, 152714, 152715, 152716, 152717, 152718, 152719, 152720) c6( ) c7(T, fM); #c1(AKAP2) c2(NP_001004065) c3(A-kinase anchor protein 2 isoform 1) c4(20415) c5(20416, 20417, 20418, 20419, 20420, 20421) c6( ) c7(ff, ht, en); #c1(AKAP2) c2(NP_001185585) c3(A-kinase anchor protein 2 isoform 3) c4(75965) c5(75966, 75967, 75968, 75969, 75970, 75971) c6( ) c7(ff, ht, en); #c1(AKAP3) c2(NP_001265238) c3(A-kinase anchor protein 3) c4( ) c5(98026, 98027, 98028, 98029, 98030, 98031) c6( ) c7(t, n, m, bu); #c1(AKAP3) c2(XP_011519212) c3(A-kinase anchor protein 3 isoform X1) c4(313791, 313792) c5(313793, 313794, 313795, 313796, 313797, 313798, 313799, 313800, 313801, 313802) c6( ) c7(t, n, m, bu); #c1(AKAP4) c2(NP_003877) c3(A-kinase anchor protein 4 isoform 1) c4(141719, 141720, 141721, 141722, 141723) c5(141724, 141725, 141726, 141727, 141728, 141729, 141730, 141731, 141732, 141733, 141734, 141735, 141736, 141737, 141738, 141739, 141740, 141741, 141742) c6( ) c7(aW, if, aT, Ph, qN, bu, in); #c1(AKAP4) c2(NP_647450) c3(A-kinase anchor protein 4 isoform 2) c4( ) c5(238602, 238603, 238604, 238605, 238606, 238607, 238608, 238609, 238610, 238611, 238612, 238613, 238614, 238615, 238616, 238617, 238618, 238619) c6( ) c7(aW, if, aT, Ph, qN, bu, in); #c1(AKAP5) c2(NP_004848) c3(A-kinase anchor protein 5) c4(150292) c5(150293, 150294, 150295, 150296, 150297, 150298, 150299, 150300, ISOSOL 150302) c6( ) c7(zB, ot, Pi); #c1(AKAP6) c2(NP_004265) c3(A-kinase anchor protein 6) c4(144712, 144713) c5(144714, 144715, 144716, 144717, 144718, 144719, 144720) c6( ) c7(bM, cF, wK, iX, lr, j, fq); #c1(AKAP6) c2(XP_005268276) c3(A-kinase anchor protein 6 isoform X1) c4( ) c5(281660, 281661, 281662, 281663, 281664, 281665, 281666, 281667, 281668) c6( ) c7(bM, cF, wK, iX, lr, j, fq); #c1(AKAP7) c2(NP_004833) c3(A-kinase anchor protein 7 isoform gamma isoform alpha) c4(150151) c5(150152, 150153, 150154, 150155, 150156, 150157) c6( ) c7(vr, IB, cd, bA); #c1(AKAP7) c2(NP_057461) c3(A-kinase anchor protein 7 isoform gamma isoform gamma) c4(191047, 191048) c5(191049, 191050, 191051, 191052, 191053, 191054, 191055, 191056, 191057, 191058, 191059, 191060) c6( ) c7(vr, IB, cd, bA); #c1(AKAP7) c2(NP_619539) c3(A-kinase anchor protein 7 isoform gamma isoform beta) c4(236867) c5(236868, 236869, 236870, 236871, 236872, 236873) c6( ) c7(vr, IB, cd, bA); #c1(AKAP9) c2(NP_005742) c3(A-kinase anchor protein 9 isoform 2) c4(158967) c5(158968, 158969, 158970, 158971, 158972, 158973) c6( ) c7(T, hd, Pj, nB, Db, aW, aT, r, vc, IQ, Pk, q, mu); #c1(AKAP9) c2(XP_011514014) c3(A-kinase anchor protein 9 isoform X4) c4(306426) c5( ) c6( ) c7(T, hd, Pj, nB, Db, aW, aT, r, vc, IQ, Pk, q, mu); #c1(AKAP9) c2(XP_011514018) c3(A-kinase anchor protein 9 isoform X7) c4( ) c5(306427) c6( ) c7(T, hd, Pj, nB, Db, aW, aT, r, vc, IQ, Pk, q, mu); #c1(AKAP9) c2(XP_011514020) c3(A-kinase anchor protein 9 isoform X9) c4(306428, 306429) c5(306430, 306431, 306432, 306433, 306434, 306435, 306436, 306437, 306438, 306439, 306440, 306441) c6( ) c7(T, hd, Pj, nB, Db, aW, aT, r, vc, IQ, Pk, q, mu); #c1(AKAP9) c2(XP_011514021) c3(A-kinase anchor protein 9 isoform X10) c4(306442) c5(306443, 306444, 306445, 306446, 306447) c6( ) c7(T, hd, Pj, nB, Db, aW, aT, r, vc, IQ, Pk, q, mu); #c1(AKAP9) c2(XP_011514022) c3(A-kinase anchor protein 9 isoform X12) c4( ) c5(306448, 306449, 306450, 306451, 306452, 306453) c6( ) c7(T, hd, Pj, nB, Db, aW, aT, r, vc, IQ, Pk, q, mu); #c1(AKAP9) c2(XP_011514024) c3(A-kinase anchor protein 9 isoform X14) c4(306454) c5(306455, 306456, 306457, 306458, 306459, 306460) c6( ) c7(T, hd, Pj, nB, Db, aW, aT, r, vc, IQ, Pk, q, mu); #c1(AKIP1) c2(NP_001193575) c3(A-kinase-interacting protein 1 isoform b) c4(82264) c5(82265, 82266, 82267, 82268, 82269, 82270, 82271, 82272, 82273, 82274) c6( ) c7(aW, if, Pl, qN, aT); #c1(AKIP1) c2(NP_001193576) c3(A-kinase-interacting protein 1 isoform c) c4(82275) c5(82276, 82277, 82278, 82279, 82280, 82281) c6( ) c7(aW, if, Pl, qN, aT); #c1(AKIP1) c2(NP_065693) c3(A-kinase-interacting protein 1 isoform a) c4(204986) c5(204987, 204988, 204989, 204990, 204991, 204992, 204993, 204994, 204995, 204996) c6( ) c7(aW, if, Pl, qN, aT); #c1(AKIRIN2) c2(NP_060534) c3(akirin-2) c4(196448) c5(196449, 196450, 196451, 196452, 196453, 196454) c6( ) c7(Dl, ff, aq, en, y, ae, B, Pm, ad); #c1(AKNA) c2(NP_110394) c3(AT-hook-containing transcription factor) c4(220014, 220015) c5(220016, 220017, 220018, 220019, 220020, 220021, 220022, 220023, 220024, 220025, 220026, 220027, 220028, 220029, 220030, 220031, 220032) c6( ) c7(T, if, qN); #c1(AKNA) c2(XP_005252305) c3(AT-hook-containing transcription factor isoform X2) c4(271654) c5( ) c6( ) c7(T, if, qN); #c1(AKNA) c2(XP_006717358) c3(AT-hook-containing transcription factor isoform X10) c4( ) c5(290973, 290974, 290975, 290976, 290977, 290978) c6( ) c7(T, if, qN); #c1(AKNA) c2(XP_011517362) c3(AT-hook-containing transcription factor isoform X3) c4( ) c5(311090) c6( ) c7(T, if, qN); #c1(AKNA) c2(XP_011517364) c3(AT-hook-containing transcription factor isoform X5) c4(311091) c5(311092, 311093, 311094, 311095, 311096) c6( ) c7(T, if, qN); #c1(AKNA) c2(XP_011517366) c3(AT-hook-containing transcription factor isoform X7) c4(311097) c5( ) c6( ) c7(T, if, qN); #c1(AKNA) c2(XP_011517367) c3(AT-hook-containing transcription factor isoform X8) c4(311098) c5( ) c6( ) c7(T, if, qN); #c1(AKR1B1) c2(NP_001619) c3(aldose reductase) c4(119273, 119274) c5(119275, 119276, 119277, 119278, 119279, 119280, 119281, 119282, 119283, 119284, 119285, 119286) c6( ) c7(bM, T, ea, if, e, bB, ci, aY, x, Pq, fm, iv, Pn, K, dQ, aW, mQ, cm, vA, vy, m, k, cZ, dD, cQ, aj, qN, pM, cd, ft, ju, dd, vx, A, iw, aq, Pp, op, kT, FV, hL, Pr, Po, B, tq, bL, aA, cR, cz, v, j, bX, eA, J, uT, aT, cy, bq, s, ev, cl, t, ho, ck, cT, ac, fP, dy, fD, bt, HQ, gV, Pt, dG, eq, ah, fu, fU, ts, Ps, tt, uX, IR, hG, aF, iR, bz, DF, bE, aS, ra, X, hv); #c1(AKR1B10) c2(NP_064695) c3(aldo-keto reductase family 1 member B10) c4(203473) c5(203474, 203475, 203476, 203477, 203478, 203479) c6( ) c7(Kd, T, dD, pf, if, bB, eq, ci, qN, q, Pu, eJ, av, iu, Pv, F, aE, jz, aT, K, Pw, s, Gv, Y, ff, iw, LZ, r, aq, kp, en, cl, g, LV, iR, bz, eM, bE, vy, hL, dy, cP, B); #c1(AKR1C1) c2(NP_001344) c3(aldo-keto reductase family 1 member C1) c4(117150, 117151, 117152) c5(117153, 117154, 117155, 117156, 117157, 117158, 117159, 117160, 117161, 117162, 117163, 117164, 117165, 117166, 117167, 117168, 117169, 117170, 117171, 117172, 117173, 117174, 117175, 117176, 117177, 117178) c6( ) c7(dP, av, T, kl, eM, vT, aW, aZ, iW, ff, hL, aT, r, gE, m, q, en, Px, bz, B, cl); #c1(AKR1C2) c2(NP_001128713) c3(aldo-keto reductase family 1 member C2 isoform 2) c4(50572) c5(50573, 50574, 50575, 50576, 50577, 50578) c6( ) c7(T, pf, v, Pz, ad, dP, Py, aT, dL, ae, kl, vT, aW, ff, PA, NH, LZ, aq, en, g, iR, Px, eM, it, B); #c1(AKR1C2) c2(NP_001345) c3(aldo-keto reductase family 1 member C2 isoform 1) c4(117179) c5(117180, 117181, 117182, 117183, 117184, 117185, 117186, 117187, 117188, 117189, 117190, 117191, 117192) c6( ) c7(T, pf, v, Pz, ad, dP, Py, aT, dL, ae, kl, vT, aW, ff, PA, NH, LZ, aq, en, g, iR, Px, eM, it, B); #c1(AKR1C2) c2(XP_011517644) c3(aldo-keto reductase family 1 member C2 isoform X1) c4(311484) c5(311485, 311486, 311487, 311488, 311489, 311490) c6( ) c7(T, pf, v, Pz, ad, dP, Py, aT, dL, ae, kl, vT, aW, ff, PA, NH, LZ, aq, en, g, iR, Px, eM, it, B); #c1(AKR1C3) c2(NP_001240837) c3(aldo-keto reductase family 1 member C3 isoform 2) c4(88924) c5(88925, 88926, 88927, 88928, 88929, 88930) c6( ) c7(G, T, aZ, if, iW, aA, n, v, oH, ci, Fb, qN, AO, PB, eA, ad, PC, dP, av, Bj, aT, iv, PD, dL, K, uV, ae, eL, kl, iU, vT, aW, ff, cr, dN, dq, en, cl, g, t, Px, bz, as, eE, ck, kP, JQ, hL, at, k, bt); #c1(AKR1C3) c2(NP_001240838) c3(aldo-keto reductase family 1 member C3 isoform 3) c4( ) c5(88931, 88932, 88933, 88934, 88935, 88936) c6( ) c7(G, T, aZ, if, iW, aA, n, v, oH, ci, Fb, qN, AO, PB, eA, ad, PC, dP, av, Bj, aT, iv, PD, dL, K, uV, ae, eL, kl, iU, vT, aW, ff, cr, dN, dq, en, cl, g, t, Px, bz, as, eE, ck, kP, JQ, hL, at, k, bt); #c1(AKR1C3) c2(NP_003730) c3(aldo-keto reductase family 1 member C3 isoform 1) c4(140487) c5(140488, 140489, 140490, 140491, 140492, 140493, 140494, 140495, 140496) c6( ) c7(G, T, aZ, if, iW, aA, n, v, oH, ci, Fb, qN, AO, PB, eA, ad, PC, dP, av, Bj, aT, iv, PD, dL, K, uV, ae, eL, kl, iU, vT, aW, ff, cr, dN, dq, en, cl, g, t, Px, bz, as, eE, ck, kP, JQ, hL, at, k, bt); #c1(AKR1C4) c2(NP_001809) c3(aldo-keto reductase family 1 member C4) c4(121304, 121305) c5(121306, 121307, 121308, 121309, 121310, 121311, 121312, 121313, 121314, 121315, 121316, 121317, 121318, 121319, 121320, 121321, 121322, 121323, 121324, 121325, 121326, 121327, 121328, 121329, 121330, 121331, 121332, 121333) c6( ) c7(oO, T, aw, fd, br, ad, Py, sO, aT, h, dL, bK, ae, eL, MG, PE, aW, Io, PG, pm, bw, PE, ac, pc, cj, at, rH, bt, L); #c1(AKR1C4) c2(XP_011517605) c3(aldo-keto reductase family 1 member C4 isoform X1) c4(311396, 311397) c5( ) c6( ) c7(oO, T, aw, fd, hr, ad, Py, sO, aT, h, dL, bK, ae, eL, MG, PE, aW, Io, PG, pm, bw, PF, ac, pc, cj, at, rH, bt, L); #c1(AKRID1) c2(NP_001177835) c3(3-oxo-5-beta-steroid 4-dehydrogenase isoform 2) c4(73075) c5(73076, 73077, 73078, 73079, 73080, 73081) c6( ) c7(yy, PH); #c1(AKRID1) c2(NP_001177836) c3(3-oxo-5-beta-steroid 4-dehydrogenase isoform 3) c4(73082, 73083) c5(73084, 73085, 73086, 73087, 73088, 73089, 73090, 73091, 73092, 73093, 73094, 73095) c6( ) c7(yy, PH); #c1(AKRID1) c2(NP_005980) c3(3-oxo-5-beta-steroid 4-dehydrogenase isoform 1) c4(160953) c5(160954, 160955, 160956, 160957, 160958, 160959) c6( ) c7(yy, PH); #c1(AKR1E2) c2(NP_001035267) c3(1,5-anhydro-D-fructose reductase isoform 1) c4(32726) c5(32727, 32728, 32729, 32730, 32731, 32732) c6( ) c7(aR, PI, B, gP, vT); #c1(AKR1E2) c2(NP_001257950) c3(1,5-anhydro-D-fructose reductase isoform 2) c4(95843, 95844) c5(95845, 95846, 95847, 95848, 95849, 95850, 95851, 95852, 95853, 95854, 95855, 95856) c6( ) c7(aR, Pl, B, gP, vT); #c1(AKR1E2) c2(NP_001257954) c3(1,5-anhydro-D-fructose reductase isoform 3) c4(95865) c5(95866, 95867, 95868, 95869, 95870, 95871) c6( ) c7(aR, Pl, B, gP, vT); #c1(AKR7A3) c2(XP_011539349) c3(aflatoxin B1 aldehyde reductase member 3 isoform X2) c4( ) c5(337437) c6( ) c7(T); #c1(AKT1) c2(NP_001014431) c3(RAC-alpha serine/threonine-protein kinase) c4(25825, 25826) c5(25827, 25828, 25829, 25830, 25831, 25832, 25833, 25834, 25835, 25836, 25837, 25838, 25839, 25840, 25841, 25842, 25843, 25844, 25845, 25846, 25847, 25848, 25849, 25850, 25851, 25852, 25853, 25854, 25855, 25856, 25857, 25858, 25859, 25860, 25861) c6( ) c7(oO, gh, T, ID, aC, fR, ea, if, al, fd, bB, ci, Qp, QG, aR, ip, x, bv, aE, Bc, fm, pX, Fo, Qk, iv, DO, HR, K, hu, pk, eL, xa, cp, Qe, li, ly, xQ, yo, zQ, PP, iE, LC, aW, Ls, az, hl, QB, Qv, Qq, CT, Qb, Qm, PQ, g, as, eF, cm, bw, Qx, Qt, Qn, QA, iP, qJ, eM, nB, iA, iT, go, vA, mx, U, cj, PV, Qw, sv, nw, PO, m, uJ, QI, QF, ik, iu, dD, Qj, ht, qy, n, aj, oY, fr, PY, Qh, PJ, qN, kv, PR, cd, ai, eW, co, BI, ft, jz, hw, cc, zf, gd, kH, h, jy, QE, dL, bl, eV, Qc, dx, wC, PT, MD, PX, hQ, aq, kp, yq, CQ, pm, PU, cM, fs, wU, op, lx, cv, Ld, iO, ok, Qy, Qf, cA, bP, dB, hk, Qu, hL, hR, at, Qz, it, B, AN, vQ, bL, fM, Qs, yk, jx, eX, rf, aA, cR, zN, cz, v, j, yO, Qn, Iu, AO, pd, q, J, qH, eA, eJ, PW, Ig, hW, PS, nv, Qg, BJ, yg, aT, kf, cy, bK, jj, an, ch, ae, af, eu, jf, kl, PK, s, vT, Qr, oV, Y, PL, iU, r, Io, HL, en, hf, bu, t, ho, f, pb, cl, bN, iK, ck, Qi, sS, rR, kP, c, ac, ig, nM, iM, au, dh, mf, dy, PN, im, bt, kG, LS, On, nZ, hi, kh, id, Mb, qb, ha, Me, jh, KO, bS, dG, eq, Fb, hF, ad, hX, Jm, dP, HF, hd, ib, av, py, Db, NS, oj, hD, bj, iY, fb, PZ, Qd, uX, PM, d, je, cW, ff, eH, cr, gl, aF, iR, jb, bz, Hp, bF, es, gk, eU, Qa, bE, X, II, QC, QD, cP, bC, ei, y, xg, ne, jr); #c1(AKT1) c2(XP_011534846) c3(RAC-alpha serine/threonine-protein kinase isoform X2) c4(331362) c5(331363, 331364, 331365, 331366, 331367, 331368) c6( ) c7(oO, gh, T, ID, aC, fR, ea, if, al, fd, bB, ci, Qp, QG, aR, ip, x, bv, aE, Bc, fm, pX, Fo, Qk, iv, DO, HR, K, hu, pk, eL, xa, cp, Qe, li, ly, xQ, yo, zQ, PP, iE, LG, aW, Ls, az, hl, QB, Qv, Qq, CT, Qb, Qm, PQ, g, as, eF, cm, bw, Qx, Qt, Qn, QA, iP, qJ, eM, nB, iA, iT, go, vA, mx, U, cj, PV, Qw, sv, nw, PO, m, uJ, QI, QF, ik, iu, dD, Qj, ht, qy, n, aj, oY, fr, PY, Qh, PJ, qN, kv, PR, cd, ai, eW, co, Bl, ft, jz, hw, cc, zf, gd, kH, h, jy, QE, dL, hl, eV, Qc, dx, wC, PT, MD, PX, hQ, aq, kp, yq, CQ, pm, PU, cM, fs, wU, op, lx, cv, Ld, iO, ok, Qy, Qf, cA, bP, dB, hk, Qu, hL, hR, at, Qz, it, B, AN, vQ, bL, fM, Qs, yk, jx, eX, rf, aA, cR, zN, cz, v, j, yO, Qo, Iu, AD, pd, q, J, qH, eA, eJ, PW, Ig, hW, PS, nv, Qg, BJ, yg, aT, kf, cy, bK, jj, an, ch, ae, af, eu, jf, kl, PK, s, vT, Qr, oV, Y, PL, iU, r, Io, HL, en, hf, bu, t, ho, f, pb, cl, bN, iK, ck, Qi, sS, rR, kP, c, ac, ig, nM, iM, au, dh, mf, dy, PN, im, bt, kG, LS, On, nZ, hl, kh, id, Mb, qb, ha, Me, jh, KO, bS, dG, eq, Fb, hF, ad, hX, Jm, dP, HF, hd, ib, av, py, Db, NS, oj, hD, bj, iY, fb, PZ, Qd, uX, PM, d, je, cW, ff, eH, cr, gl, aF, iR, jb, bz, Hp, bF, es, gk, eU, Qa, bE, X, II, QC, QD, cP, bC, ei, y, xg, ne, jr); #c1(AKTIS1) c2(NP_001092103) c3(proline-rich AKT1 substrate 1 isoform b) c4( ) c5(39355, 39356, 39357, 39358, 39359, 39360, 39361, 39362, 39363, 39364, 39365, 39366, 39367, 39368, 39369, 39370, 39371, 39372, 39373, 39374, 39375, 39376) c6( ) c7(es, iA, Y, aw, IG, eA, dx, eK); #c1(AKTIS1) c2(NP_115751) c3(proline-rich AKT1 substrate 1 isoform a) c4(223816, 223817, 223818) c5(223819, 223820, 223821, 223822, 223823, 223824, 223825, 223826, 223827, 223828, 223829, 223830) c6( ) c7(es, iA, Y, aw, IG, eA, dx, eK); #c1(AKT2) c2(NP_001229957) c3(RAC-beta serine/threonine-protein kinase isoform 2) c4(85533) c5(85534, 85535, 85536, 85537, 85538, 85539) c6( ) c7(bL, gh, T, dD, fM, aC, qb, aZ, ea, jh, aA, cz, bB, aj, dG, v, ci, Qh, eq, eA, J, ad, Ql, fU, iu, ft, LL, hw, aE, Bc, QJ, ju, aT, h, cy, jy, dL, bK, K, fb, ae, eL, QH, yo, kl, d, aW, Y, Ls, AQ, ff, Qq, dq, kp, aF, en, cl, g, t, cm, bz, GR, sS, QG, eM, nB, bE, bo, dh, X, hL, QC, m, ei, B); #c1(AKT2) c2(XP_011524923) c3(RAC-beta serine/threonine-protein kinase isoform X1) c4(319321, 319322, 319323, 319324, 319325, 319326, 319327, 319328, 319329, 319330) c5(319331, 319332, 319333, 319334, 319335, 319336, 319337, 319338, 319339, 319340, 319341, 319342, 319343, 319344, 319345, 319346) c6( ) c7(bL, gh, T, dD, fM, aC, qb, aZ, ea, jh, aA, cz, bB, aj, dG, v, ci, Qh, eq, eA, J, ad, Ql, fU, iu, ft, LL, hw, aE, Bc, QJ, ju, aT, h, cy, jy, dL, bK, K, fb, ae, eL, QH, yo, kl, d, aW, Y, Ls, AQ, ff, Qq, dq, kp, aF, en, cl, g, t, cm, bz, GR, sS, QG, eM, nB, bE, bo, dh, X, hL, QC, m, ei, B); #c1(AKT2) c2(XP_011524924) c3(RAC-beta serine/threonine-protein kinase isoform X2) c4(319347) c5(319348, 319349, 319350, 319351, 319352, 319353, 319354, 319355, 319356, 319357, 319358, 319359, 319360, 319361, 319362, 319363, 319364, 319365, 319366, 319367, 319368, 319369, 319370, 319371, 319372, 319373, 319374, 319375, 319376, 319377, 319378, 319379, 319380, 319381, 319382, 319383, 319384, 319385, 319386, 319387, 319388, 319389, 319390, 319391, 319392, 319393, 319394, 319395, 319396, 319397, 319398, 319399, 319400, 319401, 319402, 319403, 319404, 319405) c6( ) c7(bL, gh, T, dD, fM, aC, qb, aZ, ea, jh, aA, cz, bB, aj, dG, v, ci, Qh, eq, eA, J, ad, Ql, fU, iu, ft, LL, hw, aE, Bc, QJ, ju, aT, h, cy, jy, dL, bK, K, fb, ae, eL, QH, yo, kl, d, aW, Y, Ls, AQ, ff, Qg, dq, kp, aF, en, cl, g, t, cm, bz, GR, sS, QG, eM, nB, bE, bo, dh, X, hL, QC, m, ei, 8); #c1(AKT3) c2(NP_001193658) c3(RAC-gamma serine/threonine-protein kinase isoform 2) c4(82419) c5(82420, 82421, 82422, 82423, 82424, 82425, 82426, 82427, 82428, 82429) c6( ) c7(gh, T, ha, EQ, QL, fr, PY, ci, PJ, V, eA, ad, hw, pN, aT, h, dL, ae, uQ, PM, d, aW, Y, ff, Qq, aq, en, iR, t, QK, kP, c, nB, Dy, eM, FB, Gs, bo, m, B); #c1(AKT3) c2(XP_006725023) c3(RAC-gamma serine/threonine-protein kinase isoform X1) c4(296526) c5(296527, 296528, 296529, 296530, 296531, 296532, 296533, 296534, 296535, 296536) c6( ) c7(gh, T, ha, EQ, QL, fr, PY, ci, PJ, V, eA, ad, hw, pN, aT, h, dL, ae, uQ, PM, d, aW, Y, ff, Qg, ag, en, iR, t, QK, kP, c, nB, Dy, eM, FB, Gs, bo, m, B); #c1(AKT3) c2(XP_006725026) c3(RAC-gamma serine/threonine-protein kinase isoform X7) c4( ) c5(296537, 296538, 296539, 296540, 296541, 296542) c6( ) c7(gh, T, ha, EQ, QL, fr, PY, ci, PJ, V, eA, ad, hw, pN, aT, h, dL, ae, uQ, PM, d, aW, Y, ff, Qg, aq, en, iR, t, QK, kP, c, nB, Dy, eM, FB, Gs, bo, m, B); #c1(AKT3) c2(XP_011544728) c3(RAC-gamma serine/threonine-protein kinase isoform X5) c4(343807) c5( ) c6( ) c7(gh, T, ha, EQ, QL, fr, PY, ci, PJ, V, eA, ad, hw, pN, aT, h, dL, ae, uQ, PM, d, aW, Y, ff, Qq, aq, en, iR, t, QK, kP, c, nB, Dy, eM, FB, Gs, bo, m, B); #c1(AKTIP) c2(NP_071921) c3(AKT-interacting protein) c4(212317) c5(212318, 212319, 212320, 212321, 212322, 212323, 212324, 212325, 212326, 212327) c6( ) c7(QO, if, QM, bK, ci, qN, t, QN); #c1(ALAD) c2(NP_000022) c3(delta-aminolevulinic acid dehydratase) c4(211) c5(212, 213, 214, 215, 216) c6( ) c7(T, QR, fR, QW, cz, ww, fr, eA, ad, ip, PW, Gt, QU, dL, bq, ae, B, tb, Ow, QP, OC, hq, c, dB, QQ, yP, Pk, QV, QT, at, E, dy, gT, cB, QS); #c1(ALAD) c2(XP_011516665) c3(delta-aminolevulinic acid dehydratase isoform X1) c4( ) c5(310076, 310077, 310078, 310079, 310080, 310081, 310082) c6( ) c7(T, QR, fR, QW, cz, ww, fr, eA, ad, ip, PW, Gt, QU, dL, bq, ae, B, tb, Ow, QP, OC, hq, c, dB, QQ, yP, Pk, QV, QT, at, E, dy, gT, cB, QS); #c1(ALAD) c2(XP_011516666) c3(delta-aminolevulinic acid dehydratase isoform X3) c4(310083, 310084) c5(310085, 310086, 310087, 310088, 310089, 310090, 310091, 310092, 310093, 310094) c6( ) c7(T, QR, fR, QW, cz, ww, fr, eA, ad, ip, PW, Gt, QU, dL, bq, ae, B, tb, Ow, QP, OC, hq, c, dB, QQ, yP, Pk, QV, QT, at, E, dy, gT, cB, QS); #c1(ALAS1) c2(NP_001291372) c3(5-aminolevulinate synthase, nonspecific, mitochondrial isoform 1 precursor) c4(115762, 115763) c5(115764, 115765, 115766, 115767, 115768, 115769, 115770, 115771, 115772, 115773, 115774, 115775, 115776, 115777, 115778) c6( ) c7(QX, kA, QV, aq, aj, C, bq, nE, IC, J, ae, B, ad); #c1(ALAS1) c2(NP_001291373) c3(5-aminolevulinate synthase, nonspecific, mitochondrial isoform 2) c4( ) c5(115779, 115780, 115781, 115782) c6( ) c7(QX, kA, QV, aq, aj, C, bq, nE, IC, J, ae, B, ad); #c1(ALAS1) c2(XP_011531780) c3(5-aminolevulinate synthase, nonspecific, mitochondrial isoform X2) c4( ) c5(327867, 327868, 327869, 327870, 327871) c6( ) c7(QX, kA, QV, aq, aj, C, bq, nE, IC, J, ae, B, ad); #c1(ALAS2) c2(NP_000023) c3(5-aminolevulinate synthase, erythroid-specific, mitochondrial isoform a precursor) c4(217, 218) c5(219, 220, 221, 222, 223, 224) c6( ) c7(jp, kA, QZ, nE, Rc, Ra, nd, oW, yu, K, hl, QY, nf, KX, Rb, kD, CE, S, yy, dr, Gq, Rd, kB, kg, kz, Lq); #c1(ALAS2) c2(NP_001033056) c3(5-aminolevulinate synthase, erythroid-specific, mitochondrial isoform b precursor) c4(31531) c5( ) c6( ) c7(jp, kA, QZ, nE, Rc, Ra, nd, oW, yu, K, hl, QY, nf, KX, Rb, kD, CE, S, yy, dr, Gq, Rd, kB, kg, kz, Lq); #c1(ALAS2) c2(NP_001033057) c3(5-aminolevulinate synthase, erythroid-specific, mitochondrial isoform c precursor) c4(31532) c5(31533, 31534, 31535, 31536, 31537, 31538, 31539, 31540, 31541, 31542, 31543, 31544) c6( ) c7(jp, kA, QZ, nE, Rc, Ra, nd, oW, yu, K, hl, QY, nf, KX, Rb, kD, CE, S, yy, dr, Gq, Rd, kB, kg, kz, Lq); #c1(ALAS2) c2(XP_005262052) c3(5-aminolevulinate synthase, erythroid-specific, mitochondrial isoform X1) c4( ) c5(277728, 277729, 277730, 277731, 277732, 277733) c6( ) c7(jp, kA, QZ, nE, Rc, Ra, nd, oW, yu, K, hl, QY, nf, KX, Rb, kD, CE, S, yy, dr, Gq, Rd, kB, kg, kz, Lq); #c1(ALB) c2(NP_000468) c3(serum albumin preproprotein) c4(9297, 9298, 9299, 9300, 9301, 9302, 9303, 9304) c5(9305, 9306, 9307, 9308, 9309, 9310, 9311, 9312, 9313, 9314, 9315, 9316, 9317, 9318, 9319, 9320, 9321, 9322, 9323, 9324, 9325, 9326, 9327, 9328, 9329, 9330, 9331, 9332, 9333, 9334, 9335, 9336, 9337, 9338, 9339, 9340, 9341, 9342, 9343, 9344, 9345, 9346, 9347, 9348, 9349, 9350, 9351, 9352, 9353, 9354, 9355, 9356, 9357, 9358, 9359, 9360, 9361, 9362, 9363, 9364, 9365, 9366, 9367, 9368, 9369, 9370, 9371, 9372, 9373, 9374, 9375, 9376, 9377, 9378, 9379, 9380, 9381, 9382, 9383, 9384, 9385, 9386, 9387, 9388, 9389, 9390, 9391, 9392, 9393, 9394, 9395, 9396, 9397, 9398, 9399, 9400, 9401, 9402, 9403, 9404, 9405, 9406, 9407, 9408, 9409, 9410, 9411, 9412, 9413, 9414, 9415, 9416) c6( ) c7(xS, T, ef, Rz, fV, ea, e, al, fd, bB, ci, aY, fw, RL, Iv, Bc, iv, K, wt, dQ, H, RG, bc, Rw, Rh, aW, RK, Rr, hl, mQ, fc, dg, g, eE, y, ii, dc, vy, wx, m, Re, fy, Rg, Ro, dD, Rx, RC, Ri, fN, n, BH, cQ, aj, ct, uE, fr, qW, cd, RD, eW, co, jz, no, pe, ec, Ru, vM, ql, RN, cU, IG, jy, h, DU, yZ, RM, bV, RA, db, RE, cY, A, Rj, iw, fQ, aq, Rl, jT, cM, Rn, ar, iO, ok, RB, W, dB, Fi, If, mg, RJ, E, va, B, tq, L, Rf, bL, dA, eR, dK, jx, Rt, aA, cz, fF, Ry, v, j, hz, OY, nS, V, uW, q, J, Rl, uT, hb, aT, GQ, cy, af, eu, kl, s, vT, oV, Y, ev, RF, Io, wA, Rp, t, ck, cl, ac, vW, hc, DW, mf, dy, vi, Ke, ob, RH, ha, dG, ah, jE, fu, eq, pz, tK, Rk, hX, fU, F, Rs, Rq, od, oz, ds, qh, oj, oW, vw, uD, fb, sj, uQ, uX, IR, cH, yy, aF, xH, iV, iR, HI, KM, dr, qa, LB, gk, Fd, Rv, ag, uR, gZ, Rm, dX, aS, ei, hE, we, iu, rk); #c1(ALCAM) c2(NP_001230209) c3(CD166 antigen isoform 2 precursor) c4(86117) c5(86118, 86119, 86120, 86121, 86122, 86123) c6( ) c7(T, ht, NT, aA, bB, n, aj, ci, zP, V, AO, q, J, ad, eJ, nv, aT, dL, hu, ae, Qe, zQ, d, s, aW, Y, ff, r, aq, aF, en, iR, t, iK, iP, bF, nM, eM, nB, dB, bE, m, it, iu, hS); #c1(ALCAM) c2(NP_001618) c3(CD166 antigen isoform 1 precursor) c4(119253, 119254, 119255) c5(119256, 119257, 119258, 119259, 119260, 119261, 119262, 119263, 119264, 119265, 119266, 119267, 119268, 119269, 119270, 119271, 119272) c6( ) c7(T, ht, NT, aA, bB, n, aj, ci, zP, V, AO, q, J, ad, eJ, nv, aT, dL, hu, ae, Qe, zQ, d, s, aW, Y, ff, r, aq, aF, en, iR, t, iK, iP, bF, nM, eM, nB, dB, bE, m, it, iu, hS); #c1(ALDH16A1) c2(NP_001138868) c3(aldehyde dehydrogenase family 16 member A1 isoform 2) c4(57963) c5(57964, 57965, 57966, 57967, 57968, 57969, 57970) c6( ) c7(RO, nD, nH); #c1(ALDH16A1) c2(NP_699160) c3(aldehyde dehydrogenase family 16 member A1 isoform 1) c4(245728, 245729, 245730) c5(245731, 245732, 245733, 245734, 245735, 245736, 245737, 245738, 245739, 245740, 245741, 245742, 245743, 245744, 245745, 245746, 245747, 245748) c6( ) c7(RO, nD, nH); #c1(ALDH18A1) c2(NP_001017423) c3(delta-1-pyrroline-5-carboxylate synthase isoform 2) c4(26479) c5(26480, 26481, 26482, 26483, 26484, 26485) c6( ) c7(RQ, RR, BN, RP, uo, dq, hy, ne); #c1(ALDH18A1) c2(NP_002851) c3(delta-1-pyrroline-5-carboxylate synthase isoform 1) c4(132786) c5(132787, 132788, 132789, 132790, 132791, 132792) c6( ) c7(RQ, RR, BN, RP, uo, dq, hy, ne); #c1(ALDH1A1) c2(NP_000680) c3(retinal dehydrogenase 1) c4(14425, 14426, 14427, 14428, 14429) c5(14430, 14431, 14432, 14433, 14434, 14435, 14436, 14437, 14438, 14439, 14440, 14441, 14442, 14443, 14444, 14445, 14446, 14447, 14448, 14449, 14450, 14451, 14452, 14453, 14454, 14455, 14456, 14457, 14458, 14459) c6( ) c7(T, aC, dA, zX, ht, NT, fd, n, aj, v, fr, ci, bX, lu, q, J, ad, GK, RU, ft, hd, aE, aT, cy, K, hu, ae, RS, xQ, RT, MD, aW, hl, r, fQ, aq, g, cl, eE, t, cm, bz, iK, op, ck, RV, kP, eM, nB, vA, Gs, RW, PV, Rm, Lb, m, ik, B); #c1(ALDH1A2) c2(NP_001193826) c3(retinal dehydrogenase 2 isoform 4) c4(82695) c5(82696, 82697, 82698, 82699, 82700, 82701, 82702) c6( ) c7(Mg, jW, rq, s, nB, nO, RX, cz, bD, n, ti, Fx, K, m, ci, dy, ae, ad, IU); #c1(ALDH1A2) c2(NP_003879) c3(retinal dehydrogenase 2 isoform 1) c4(141750, 141751, 141752, 141753, 141754) c5(141755, 141756, 141757, 141758, 141759, 141760, 141761, 141762, 141763, 141764, 141765, 141766, 141767, 141768, 141769, 141770, 141771, 141772, 141773, 141774, 141775, 141776, 141777, 141778) c6( ) c7(Mg, jW, rq, s, nB, nO, RX, cz, bD, n, ti, Fx, K, m, ci, dy, ae, ad, IU); #c1(ALDH1A2) c2(NP_733797) c3(retinal dehydrogenase 2 isoform 2) c4(247139, 247140) c5(247141, 247142, 247143, 247144, 247145, 247146, 247147, 247148) c6( ) c7(Mg, jW, rq, s, nB, nO, RX, cz, bD, n, ti, Fx, K, m, ci, dy, ae, ad, IU); #c1(ALDH1A2) c2(NP_733798) c3(retinal dehydrogenase 2 isoform 3) c4( ) c5(247149, 247150, 247151, 247152, 247153, 247154, 247155, 247156, 247157, 247158) c6( ) c7(Mg, jW, rq, s, nB, nO, RX, cz, bD, n, ti, Fx, K, m, ci, dy, ae, ad, IU); #c1(ALDH1A3) c2(NP_000684) c3(aldehyde dehydrogenase family 1 member A3 isoform 1) c4(14526, 14527) c5(14528, 14529, 14530, 14531, 14532, 14533, 14534, 14535, 14536, 14537, 14538, 14539) c6( ) c7(T, d, kj, RY, nO, aW, Y, aZ, eL, aT, aA, n, RZ, dL, bD, bz); #c1(ALDH1B1) c2(NP_000683) c3(aldehyde dehydrogenase X, mitochondrial precursor) c4(14512, 14513) c5(14514, 14515, 14516, 14517, 14518, 14519, 14520, 14521, 14522, 14523, 14524, 14525) c6( ) c7(fQ, aj, fS, j); #c1(ALDH1L1) c2(NP_001257293) c3(cytosolic 10-formyltetrahydrofolate dehydrogenase isoform 1) c4(95081, 95082, 95083, 95084, 95085) c5(95086, 95087, 95088, 95089, 95090, 95091, 95092, 95093, 95094) c6( ) c7(T, fM, iW, oe, v, ad, Na, av, M, aT, Nc, dL, K, r, fQ, as, bz, Hp, ac, eM, lp, at); #c1(ALDH1L1) c2(NP_001257294) c3(cytosolic 10-formyltetrahydrofolate dehydrogenase isoform 3) c4(95095, 95096) c5(95097, 95098, 95099, 95100, 95101, 95102, 95103, 95104, 95105, 95106, 95107) c6( ) c7(T, fM, iW, oe, v, ad, Na, av, M, aT, Nc, dL, K, r, fQ, as, bz, Hp, ac, eM, lp, at); #c1(ALDH1L1) c2(NP_036322) c3(cytosolic 10-formyltetrahydrofolate dehydrogenase isoform 2) c4(172989) c5(172990, 172991, 172992, 172993, 172994, 172995, 172996, 172997, 172998, 172999, 173000, 173001, 173002, 173003, 173004, 173005, 173006, 173007, 173008) c6( ) c7(T, fM, iW, oe, v, ad, Na, av, M, aT, Nc, dL, K, r, fQ, as, bz, Hp, ac, eM, lp, at); #c1(ALDH1L1) c2(XP_011510658) c3(cytosolic 10-formyltetrahydrofolate dehydrogenase isoform X2) c4(301094) c5(301095, 301096, 301097, 301098, 301099, 301100, 301101, 301102, 301103, 301104, 301105, 301106, 301107, 301108, 301109, 301110, 301111, 301112, 301113) c6( ) c7(T, fM, iW, oe, v, ad, Na, av, M, aT, Nc, dL, K, r, fQ, as, bz, Hp, ac, eM, lp, at); #c1(ALDH2) c2(NP_000681) c3(aldehyde dehydrogenase, mitochondrial isoform 1 precursor) c4(14460) c5(14461, 14462, 14463, 14464, 14465, 14466) c6( ) c7(Gk, bM, T, os, uK, aC, ea, Sg, e, al, ci, aE, Bc, fS, Gb, Gr, K, hu, oi, Se, aW, az, hl, mQ, fc, kt, da, aB, g, ha, fT, nF, Gs, mx, vy, cX, dD, gD, aw, ht, NT, n, aj, cd, md, FY, Gm, cc, jy, Gw, dL, wb, Go, RS, hi, ny, rk, FZ, A, Sa, fQ, aq, Gi, ar, Sc, Gq, Sk, at, uz, te, bD, jd, it, B, bL, eR, oe, He, aA, cz, hy, v, j, Ge, q, J, Mg, Si, qp, aT, cy, bK, an, af, bA, Sh, s, bg, r, eS, Sf, en, Sj, Sl, kC, iK, bN, tR, ac, Cz, gX, mf, cS, np, oX, vq, Gl, ob, Gd, oZ, bS, dG, fu, eq, iG, Sd, tK, ad, kL, av, nH, ib, yt, NS, Sb, na, Jc, BN, IR, Gv, ff, Sn, aF, Sm, bz, qa, D, gk, wz, gZ, aS, tr, ei, Gu, Gp, zk, vt, X, us); #c1(ALDH2) c2(NP_001191818) c3(aldehyde dehydrogenase, mitochondrial isoform 2 precursor) c4(81841) c5(81842, 81843, 81844, 81845, 81846, 81847) c6( ) c7(Gk, bM, T, os, uK, aC, ea, Sg, e, al, ci, aE, Bc, fS, Gb, Gr, K, hu, oi, Se, aW, az, hl, mQ, fc, kt, da, aB, g, ha, fT, nF, Gs, mx, vy, cX, dD, gU, aw, ht, NT, n, aj, cd, md, FY, Gm, cc, jy, Gw, dL, wb, Go, RS, hi, ny, rk, FZ, A, Sa, fQ, aq, Gi, ar, Sc, Gq, Sk, at, uz, te, bD, jd, it, B, bL, eR, oe, He, aA, cz, hy, v, j, Ge, q, J, Mg, Si, qp, aT, cy, bK, an, af, bA, Sh, s, bg, r, eS, Sf, en, Sj, Sl, kC, iK, bN, tR, ac, Cz, gX, mf, cS, np, oX, vq, Gl, ob, Gd, oZ, bS, dG, fu, eq, iG, Sd, tK, ad, kL, av, nH, ib, yt, NS, Sb, na, Jc, BN, IR, Gv, ff, Sn, aF, Sm, bz, qa, D, gk, wz, gZ, aS, tr, ei, Gu, Gp, zk, vt, X, us); #c1(ALDH3A1) c2(NP_000682) c3(aldehyde dehydrogenase, dimeric NADP-preferring) c4(14467, 14468, 14469, 14470, 14471, 14472) c5(14473, 14474, 14475, 14476, 14477, 14478, 14479, 14480, 14481, 14482, 14483, 14484, 14485, 14486, 14487, 14488, 14489, 14490, 14491, 14492, 14493, 14494, 14495, 14496, 14497, 14498, 14499, 14500, 14501, 14502, 14503, 14504, 14505, 14506, 14507, 14508, 14509, 14510, 14511) c6( ) c7(av, T, iu, d, eM, aT, n, aq, Lb, ci, im, t, ae, B, ad, bN); #c1(ALDH3A1) c2(XP_011522033) c3(aldehyde dehydrogenase, dimeric NADP-preferring isoform X2) c4( ) c5(316710, 316711, 316712, 316713, 316714) c6( ) c7(av, T, iu, d, eM, aT, n, aq, Lb, ci, im, t, ae, B, ad, bN); #c1(ALDH3A2) c2(NP_000373) c3(fatty aldehyde dehydrogenase isoform 2) c4(8225) c5(8226, 8227, 8228, 8229, 8230, 8231, 8232, 8233, 8234, 8235, 8236, 8237, 8238, 8239, 8240, 8241) c6( ) c7(cF, Gy, W, Ig, Sr, KA, So, fn, Sq, K, nA, Ss, Gz, Sp, nC, vN, Nh, hX); #c1(ALDH3A2) c2(NP_001026976) c3(fatty aldehyde dehydrogenase isoform 1) c4(30025, 30026) c5(30027, 30028, 30029, 30030, 30031, 30032) c6( ) c7(cF, Gy, W, Ig, Sr, KA, So, fn, Sq, K, nA, Ss, Gz, Sp, nC, vN, Nh, hX); #c1(ALDH3B1) c2(NP_000685) c3(aldehyde dehydrogenase family 3 member B1 isoform a) c4( ) c5(14540, 14541) c6( ) c7(bL, qi, fr, K); #c1(ALDH4A1) c2(XP_011540654) c3(delta-1-pyrroline-5-carboxylate dehydrogenase, mitochondrial isoform X1) c4(339213) c5(339214, 339215, 339216, 339217, 339218, 339219) c6( ) c7(St); #c1(ALDH4A1) c2(XP_011540655) c3(delta-1-pyrroline-5-carboxylate dehydrogenase, mitochondrial isoform X2) c4(339220) c5(339221, 339222, 339223, 339224, 339225, 339226, 339227, 339228, 339229, 339230, 339231, 339232, 339233, 339234, 339235, 339236, 339237, 339238, 339239, 339240, 339241, 339242, 339243) c6( ) c7(St); #c1(ALDH5A1) c2(NP_733936) c3(succinate-semialdehyde dehydrogenase, mitochondrial isoform 1 precursor) c4(247285) c5(247286, 247287, 247288, 247289, 247290, 247291) c6( ) c7(Sw, nX, GD, ha, aU, Sz, Sv, K, nA, Sx, Sy, dr, xt, Su); #c1(ALDH6A1) c2(NP_005580) c3(methylmalonate-semialdehyde dehydrogenase [acylating], mitochondrial isoform 1 precursor) c4(157622) c5(157623, 157624, 157625, 157626, 157627, 157628) c6( ) c7(rL, v, SA, j, SB); #c1(ALDH7A1) c2(NP_001173) c3(alpha-aminoadipic semialdehyde dehydrogenase isoform 1 precursor) c4(72416) c5(72417, 72418, 72419, 72420, 72421, 72422) c6( ) c7(bL, bM, T, lD, Dd, ha, bO, aA, cz, n, bS, ct, Lw, ad, BY, zw, aT, SD, he, ae, bA, aW, Fm, Y, nk, Z, nC, bz, Ld, lx, ck, kn, cT, rR, eM, SE, bo, SC, pP, cj, U, nw, fD); #c1(ALDH7A1) c2(NP_001189333) c3(alpha-aminoadipic semialdehyde dehydrogenase isoform 3) c4(79276) c5(79277, 79278, 79279, 79280, 79281, 79282) c6( ) c7(bL, bM, T, lD, Dd, ha, bO, aA, cz, n, bS, ct, Lw, ad, BY, zw, aT, SD, he, ae, bA, aW, Fm, Y, nk, Z, nC, bz, Ld, lx, ck, kn, cT, rR, eM, SE, bo, SC, pP, cj, U, nw, fD); #c1(ALDH7A1) c2(XP_011541719) c3(alpha-aminoadipic semialdehyde dehydrogenase isoform X1) c4(340271) c5(340272, 340273, 340274, 340275, 340276, 340277) c6( ) c7(bL, bM, T, ID, Dd, ha, bO, aA, cz, n, bS, ct, Lw, ad, BY, zw, aT, SD, he, ae, bA, aW, Fm, Y, nk, Z, nC, bz, Ld, lx, ck, kn, cT, rR, eM, SE, bo, SC, pP, cj, U, nw, fD); #c1(ALDH9A1) c2(NP_000687) c3(4-trimethylaminobutyraldehyde dehydrogenase) c4(14542, 14543) c5(14544, 14545, 14546, 14547, 14548, 14549, 14550) c6( ) c7(fr, cz, bA, cv); #c1(ALDH9A1) c2(XP_011507596) c3(4-trimethylaminobutyraldehyde dehydrogenase isoform X1) c4( ) c5(297506, 297507, 297508, 297509, 297510) c6( ) c7(fr, cz, bA, cv); #c1(ALDOA) c2(NP_001230106) c3(fructose-bisphosphate aldolase A isoform 2) c4(85920, 85921) c5(85922, 85923, 85924, 85925, 85926, 85927, 85928, 85929, 85930, 85931, 85932, 85933, 85934, 85935, 85936, 85937) c6(85938) c7(yt, Id, eH, oW, aT, SE, IG, j, Cl, jo, eF, iu, bN); #c1(ALDOA) c2(NP_908930) c3(fructose-bisphosphate aldolase A isoform 1) c4( ) c5(258109, 258110, 258111, 258112, 258113, 258114, 258115, 258116, 258117, 258118, 258119, 258120, 258121, 258122, 258123, 258124, 258125, 258126, 258127, 258128, 258129, 258130, 258131, 258132, 258133, 258134, 258135, 258136, 258137, 258138, 258139, 258140, 258141, 258142, 258143, 258144, 258145, 258146, 258147, 258148, 258149, 258150, 258151, 258152, 258153, 258154, 258155, 258156, 258157, 258158, 258159, 258160, 258161, 258162, 258163, 258164, 258165, 258166, 258167, 258168, 258169, 258170, 258171, 258172, 258173, 258174, 258175, 258176, 258177, 258178, 258179, 258180, 258181, 258182, 258183, 258184, 258185, 258186, 258187, 258188, 258189, 258190, 258191, 258192, 258193, 258194, 258195, 258196, 258197, 258198, 258199, 258200, 258201, 258202, 258203, 258204, 258205, 258206, 258207, 258208, 258209, 258210, 258211) c6( ) c7(yt, Id, eH, oW, aT, SF, IG, j, Cl, jo, eF, iu, bN); #c1(ALDOB) c2(NP_000026) c3(fructose-bisphosphate aldolase 8) c4(246, 247, 248) c5(249, 250, 251, 252, 253, 254, 255, 256, 257, 258, 259, 260, 261, 262, 263, 264, 265, 266) c6( ) c7(bL, iV, ht, jx, aA, aq, SG, bh, bq, B); #c1(ALDOC) c2(NP_005156) c3(fructose-bisphosphate aldolase C) c4(153466, 153467) c5(153468, 153469, 153470, 153471, 153472, 153473, 153474, 153475, 153476, 153477, 153478, 153479, 153480, 153481, 153482, 153483) c6( ) c7(cm, SH, B); #c1(ALG1) c2(NP_061982) c3(chitobiosyldiphosphodolichol beta-mannosyltransferase) c4(201609, 201610) c5(201611, 201612, 201613, 201614, 201615, 201616, 201617) c6( ) c7(bL, eM, aW, iW, dv, aT, aU, Km, PJ, SI, X, dS); #c1(ALG1) c2(XP_011520867) c3(chitobiosyldiphosphodolichol beta-mannosyltransferase isoform X1) c4( ) c5(315886, 315887, 315888, 315889, 315890) c6( ) c7(bL, eM, aW, iW, dv, aT, aU, Km, PJ, SI, X, dS); #c1(ALG10) c2(NP_116223) c3(dol-P-Glc:Glc(2)Man(9)GlcNAc(2)-PP-Dol alpha-1,2-glucosyltransferase) c4(225851) c5(225852, 225853, 225854, 225855, 225856, 225857) c6( ) c7(SJ, Mk, af, mu); #c1(ALG10B) c2(NP_001013642) c3(putative Dol-P-Glc:Glc(2)Man(9)GlcNAc(2)-PP-Dol alpha-1,2-glucosyltransferase) c4(25639) c5(25640, 25641, 25642, 25643, 25644, 25645) c6( ) c7(Mk, mu); #c1(ALG11) c2(NP_001004127) c3(GDP-Man:Man(3)GlcNAc(2)-PP-Dol alpha-1,2-mannosyltransferase) c4(20448, 20449) c5(20450, 20451, 20452, 20453, 20454, 20455, 20456, 20457, 20458, 20459, 20460) c6( ) c7(SK, SL); #c1(ALG12) c2(NP_077010) c3(dol-P-Man:Man(7)GlcNAc(2)-PP-Dol alpha-1,6-mannosyltransferase) c4(214729) c5(214730, 214731, 214732, 214733, 214734, 214735, 214736, 214737, 214738, 214739, 214740) c6( ) c7(SN, Lo, Km, SM); #c1(ALG13) c2(NP_001093392) c3(putative bifunctional UDP-N-acetylglucosamine transferase and deubiquitinase ALG13 isoform 1) c4(40258) c5(40259, 40260, 40261, 40262, 40263, 40264) c6( ) c7(lm, SO); #c1(ALG13) c2(NP_001244163) c3(putative bifunctional UDP-N-acetylglucosamine transferase and deubiquitinase ALG13 isoform 5) c4( ) c5(92020, 92021, 92022, 92023, 92024) c6( ) c7(lm, SO); #c1(ALG13) c2(NP_060936) c3(putative bifunctional UDP-N-acetylglucosamine transferase and deubiquitinase ALG13 isoform 2) c4(198777) c5(198778, 198779, 198780, 198781, 198782, 198783) c6( ) c7(lm, SO); #c1(ALG13) c2(XP_006724758) c3(putative bifunctional UDP-N-acetylglucosamine transferase and deubiquitinase ALG13 isoform X6) c4(296323) c5(296324) c6( ) c7(lm, SO); #c1(ALG1L) c2(NP_001015050) c3(putative glycosyltransferase ALG1-like isoform 2) c4( ) c5(26152, 26153, 26154, 26155, 26156) c6( ) c7(iR, aq, cd); #c1(ALG1L) c2(NP_001182152) c3(putative glycosyltransferase ALG1-like isoform 1) c4( ) c5(74623) c6( ) c7(iR, aq, cd); #c1(ALG1L) c2(XP_011510831) c3(putative glycosyltransferase ALG1-like isoform X1) c4(301293) c5( ) c6( ) c7(iR, aq, cd); #c1(ALG2) c2(NP_149078) c3(alpha-1,3/1,6-mannosyltransferase ALG2) c4(227034, 227035) c5(227036, 227037, 227038, 227039, 227040, 227041, 227042, 227043, 227044, 227045, 227046, 227047) c6( ) c7(xA, T, Y, SP); #c1(ALG3) c2(NP_001006942) c3(dol-P-Man:Man(5)GlcNAc(2)-PP-Dol alpha-1,3-mannosyltransferase isoform d) c4(22359) c5(22360, 22361, 22362, 22363, 22364, 22365, 22366, 22367, 22368, 22369, 22370, 22371) c6( ) c7(Lo, SQ, SL); #c1(ALG3) c2(NP_005778) c3(dol-P-Man:Man(5)GlcNAc(2)-PP-Dol alpha-1,3-mannosyltransferase isoform a) c4(159260) c5(159261, 159262, 159263, 159264, 159265, 159266) c6( ) c7(Lo, SQ, SL); #c1(ALG3) c2(XP_011510624) c3(dol-P-Man:Man(5)GlcNAc(2)-PP-Dol alpha-1,3-mannosyltransferase isoform X1) c4(301082) c5( ) c6( ) c7(Lo, SQ, SL); #c1(ALG8) c2(NP_001007028) c3(probable dolichyl pyrophosphate Glc1Man9GlcNAc2 alpha-1,3-glucosyltransferase isoform b) c4(22436) c5(22437, 22438, 22439, 22440, 22441) c6( ) c7(bL, Lo, SR); #c1(ALG8) c2(NP_076984) c3(probable dolichyl pyrophosphate Glc1Man9GlcNAc2 alpha-1,3-glucosyltransferase isoform a) c4(214593) c5(214594, 214595, 214596, 214597, 214598, 214599, 214600) c6( ) c7(bL, Lo, SR); #c1(ALG9) c2(NP_001071158) c3(alpha-1,2-mannosyltransferase ALG9 isoform b) c4(35320, 35321) c5(35322, 35323, 35324, 35325, 35326, 35327, 35328) c6( ) c7(SS, yL, gl, K, dv); #c1(ALG9) c2(NP_001071159) c3(alpha-1,2-mannosyltransferase ALG9 isoform c precursor) c4( ) c5(35329, 35330, 35331, 35332, 35333) c6( ) c7(SS, yL, gl, K, dv); #c1(ALG9) c2(NP_001071160) c3(alpha-1,2-mannosyltransferase ALG9 isoform d precursor) c4( ) c5(35334, 35335, 35336, 35337, 35338) c6( ) c7(SS, yL, gl, K, dv); #c1(ALG9) c2(NP_079016) c3(alpha-1,2-mannosyltransferase ALG9 isoform a) c4(216592) c5(216593) c6( ) c7(SS, yL, gl, K, dv); #c1(ALK) c2(NP_004295) c3(ALK tyrosine kinase receptor precursor) c4(144934, 144935) c5(144936, 144937, 144938, 144939, 144940, 144941, 144942, 144943, 144944, 144945, 144946, 144947, 144948, 144949, 144950, 144951) c6( ) c7(T, aC, Tb, bB, ci, x, bv, aE, Td, Tm, pX, SV, K, iE, aW, Qm, g, cm, Qx, Qt, eM, nB, cj, zv, k, m, Th, n, aj, fr, pU, Tl, SW, b, ft, Tf, ju, Nn, h, eV, hn, dx, Fp, MD, aq, kp, Ca, fg, Qy, Qf, bP, dB, Qu, Tk, SZ, Te, B, fM, eX, fZ, ST, j, V, q, eA, aT, Tj, ae, ne, jf, Qr, NE, iU, oV, Y, xR, r, en, t, ck, Ta, sS, nM, iM, QG, iW, jh, Gd, SY, hF, ad, Tg, av, hd, fX, SU, Ti, IQ, d, je, ff, kD, zL, bz, SX, i, iu, jr, Tc); #c1(ALKBH1) c2(NP_006011) c3(alkylated DNA repair protein alkB homolog 1) c4(161144) c5(161145, 161146, 161147, 161148, 161149, 161150) c6( ) c7(T, aR, id, Om, eL, mA, e, az, jN, wf, aj, dL, aB, ci, Tn, qW, J, dR); #c1(ALKBH2) c2(NP_001001655) c3(alpha-ketoglutarate-dependent dioxygenase alkB homolog 2 isoform 1) c4(18890, 18891, 18892, 18893) c5(18894, 18895, 18896, 18897, 18898, 18899, 18900, 18901, 18902, 18903, 18904, 18905, 18906, 18907, 18908, 18909, 18910, 18911, 18912, 18913, 18914, 18915, 18916, 18917, 18918, 18919, 18920, 18921, 18922, 18923, 18924, 18925) c6( ) c7(eL, Bl, dL, id, ci); #c1(ALKBH2) c2(NP_001192109) c3(alpha-ketoglutarate-dependent dioxygenase alkB homolog 2 isoform 2) c4(81917) c5(81918, 81919, 81920, 81921, 81922, 81923) c6( ) c7(eL, Bl, dL, id, ci); #c1(ALKBH3) c2(NP_631917) c3(alpha-ketoglutarate-dependent dioxygenase alkB homolog 3) c4(238335, 238336, 238337) c5(238338, 238339, 238340, 238341, 238342, 238343, 238344, 238345, 238346, 238347, 238348, 238349, 238350, 238351, 238352, 238353, 238354, 238355) c6( ) c7(ae, T, id, aE, eM, eL, ff, oW, dV, fd, n, dL, ci, en, g, bz, iu, ad, zn); #c1(ALKBH7) c2(NP_115682) c3(alpha-ketoglutarate-dependent dioxygenase alkB homolog 7, mitochondrial precursor) c4(223534) c5(223535, 223536, 223537, 223538, 223539, 223540) c6( ) c7(GE); #c1(ALKBH8) c2(NP_001287939) c3(alkylated DNA repair protein alkB homolog 8 isoform 1) c4(113247) c5(113248, 113249, 113250, 113251, 113252, 113253, 113254, 113255, 113256, 113257, 113258, 113259, 113260, 113261, 113262, 113263) c6( ) c7(Bl, T, id, dL, ci, eL); #c1(ALKBH8) c2(NP_620130) c3(alkylated DNA repair protein alkB homolog 8 isoform 2) c4(237323) c5( ) c6( ) c7(BI, T, id, dL, ci, eL); #c1(ALKBH8) c2(XP_005271789) c3(alkylated DNA repair protein alkB homolog 8 isoform X4) c4( ) c5(283591, 283592, 283593, 283594, 283595, 283596) c6( ) c7(Bl, T, id, dL, ci, eL); #c1(ALKBH8) c2(XP_011541369) c3(alkylated DNA repair protein alkB homolog 8 isoform X3) c4(339981) c5( ) c6( ) c7(Bl, T, id, dL, ci, eL); #c1(ALLC) c2(NP_060906) c3(probable allantoicase) c4(198573) c5(198574, 198575, 198576, 198577, 198578, 198579) c6( ) c7(uK, Y, jh, cj, h, To); #c1(ALMS1) c2(NP_055935) c3(Alstrom syndrome protein 1) c4(184518, 184519) c5(184520, 184521, 184522, 184523, 184524, 184525, 184526, 184527, 184528, 184529, 184530, 184531, 184532) c6( ) c7(bL, A, cc, IR, eR, aw, mx, aj, v, Tp, Tq, J); #c1(ALOX12) c2(NP_000688) c3(arachidonate 12-lipoxygenase, 12S-type) c4(14551) c5(14552, 14553, 14554, 14555, 14556, 14557) c6( ) c7(bL, bM, T, dD, ea, e, aw, NT, aA, cz, v, eq, ci, bX, fr, cd, q, ad, aT, IG, dL, bK, IQ, is, ae, af, eu, bA, IR, s, aW, Y, Tr, yx, ff, r, aF, en, bu, t, cm, qa, ac, hk, at, gv, m, y, bt, it); #c1(ALOX12B) c2(NP_001130) c3(arachidonate 12-lipoxygenase, 12R-type) c4(52509) c5( ) c6( ) c7(ac, Tt, Ts, e, aw, ff, aT, fn, j, m, bz, en, fg, eu); #c1(ALOX15) c2(NP_001131) c3(arachidonate 15-lipoxygenase) c4(52637, 52638) c5( ) c6( ) c7(bL, bM, T, dD, aC, eX, ea, e, ht, NT, oA, aA, cz, bB, aj, v, j, ci, uE, bX, eq, hF, AO, fr, q, J, cd, ad, dP, ai, av, aw, dY, uT, aE, sN, sO, M, aT, h, cy, dz, dL, eV, K, hu, is, ae, af, eu, bA, A, IR, s, et, iU, LC, sp, Y, aW, bg, r, aF, g, t, cm, bz, ck, ba, es, bF, ac, bE, wO, hc, hk, dh, at, m, y, in, it, X, ao); #c1(ALOX15B) c2(NP_001034219) c3(arachidonate 15-lipoxygenase B isoform a) c4(31588) c5(31589, 31590, 31591, 31592, 31593, 31594) c6( ) c7(ae, G, T, dD, cF, s, ea, ht, r, aT, iv, eq, m, hu, IC, iK, bz, q, ad); #c1(ALOX15B) c2(NP_001034220) c3(arachidonate 15-lipoxygenase B isoform b) c4(31595) c5(31596, 31597, 31598, 31599, 31600, 31601, 31602, 31603, 31604, 31605) c6( ) c7(ae, G, T, dD, cF, s, ea, ht, r, aT, iv, eq, m, hu, IC, iK, bz, q, ad); #c1(ALOX5) c2(NP_000689) c3(arachidonate 5-lipoxygenase isoform 1) c4(14558) c5(14559, 14560, 14561, 14562, 14563, 14564) c6( ) c7(ID, bM, T, aC, fR, tQ, ea, e, al, I, fd, bB, ci, aY, Tz, dY, aE, Bc, bW, M, Ds, K, dQ, aW, g, as, eF, ou, U, m, R, dD, aw, ht, NT, aj, pM, fK, ai, ec, Lv, IG, eV, dL, sp, lb, fe, aq, dB, JM, bm, at, E, B, vQ, bL, Dw, eR, oe, eX, aA, cz, v, j, C, q, eA, cF, aT, cy, jj, ae, af, eu, bf, s, iU, Tv, r, hu, t, pb, ck, rR, nM, ac, Ty, c, ig, hc, gX, fP, Da, cS, Tu, dy, fD, ht, wi, uG, jh, ah, eq, ad, BY, hX, yt, oz, Tx, ji, jo, gj, d, IR, eH, si, TA, es, gk, Bv, bE, uR, aS, Tw, IC, kS, X, y); #c1(ALOX5) c2(NP_001243083) c3(arachidonate 5-lipoxygenase isoform 3) c4(89743) c5(89744, 89745, 89746, 89747, 89748, 89749) c6( ) c7(ID, bM, T, aC, fR, tQ, ea, e, al, I, fd, bB, ci, aY, Tz, dY, aE, Bc, bW, M, Ds, K, dQ, aW, q, as, eF, ou, U, m, R, dD, aw, ht, NT, aj, pM, fK, ai, ec, Lv, IG, eV, dL, sp, lb, fe, aq, dB, JM, bm, at, E, B, vQ, bL, Dw, eR, oe, eX, aA, cz, v, j, C, q, eA, cF, aT, cy, jj, ae, af, eu, bf, s, iU, Tv, r, hu, t, pb, ck, rR, nM, ac, Ty, c, ig, hc, gX, fP, Da, cS, Tu, dy, fD, ht, wi, uG, jh, ah, eq, ad, BY, hX, yt, oz, Tx, ji, jo, gj, d, IR, eH, si, TA, es, gk, Bv, bE, uR, aS, Tw, IC, kS, X, y); #c1(ALOX5AP) c2(NP_001191335) c3(arachidonate 5-lipoxygenase-activating protein isoform 2) c4( ) c5(81419) c6( ) c7(bM, dD, ea, e, aw, NT, cz, oR, bS, j, ct, v, eq, zP, TB, Mp, nV, dY, ec, M, aT, Lv, h, ey, wt, af, eu, TC, bf, s, cW, aW, mQ, hl, iy, kp, Z, sK, sE, eK, iq, kT, cT, ac, hc, JM, ei, IC); #c1(ALOX5AP) c2(NP_001620) c3(arachidonate 5-lipoxygenase-activating protein isoform 1) c4(119287) c5(119288, 119289, 119290, 119291, 119292) c6( ) c7(bM, dD, ea, e, aw, NT, cz, oR, bS, j, ct, v, eq, zP, TB, Mp, nV, dY, ec, M, aT, Lv, h, ey, wt, af, eu, TC, bf, s, cW, aW, mQ, hl, iy, kp, Z, sK, sE, eK, iq, kT, cT, ac, hc, JM, ei, IC); #c1(ALOXE3) c2(NP_001159432) c3(hydroperoxide isomerase ALOXE3 isoform 1 precursor) c4(63997, 63998) c5(63999, 64000, 64001, 64002, 64003, 64004, 64005, 64006, 64007, 64008, 64009, 64010, 64011) c6( ) c7(Ts, TD, fn, TE, m, ad); #c1(ALOXE3) c2(NP_067641) c3(hydroperoxide isomerase ALOXE3 isoform 2) c4(209170) c5(209171, 209172, 209173, 209174, 209175) c6( ) c7(Ts, TD, fn, TE, m, ad); #c1(ALP1) c2(NP_001622) c3(intestinal-type alkaline phosphatase precursor) c4(119293) c5(119294, 119295, 119296, 119297, 119298, 119299) c6( ) c7(T, if, eX, jh, fd, ci, qN, PJ, ai, ad, aE, dv, aT, kf, vH, eV, K, ae, cp, d, MD, nO, aW, Y, hl, aq, iV, iR, bw, bz, LB, ck, kP, iT, bE, HN, ht, B); #c1(ALPK1) c2(NP_001095876) c3(alpha-protein kinase 1 isoform 1) c4(40875) c5(40876, 40877, 40878, 40879, 40880, 40881, 40882, 40883, 40884, 40885, 40886, 40887, 40888, 40889, 40890, 40891) c6( ) c7(fU, nZ, iU, hG, ht, fe, aj, bS, v, ct, g, Z); #c1(ALPK1) c2(NP_001240813) c3(alpha-protein kinase 1 isoform 2) c4(88873) c5( ) c6( ) c7(fU, nZ, iU, hG, ht, fe, aj, bS, v, ct, g, Z); #c1(ALPK1) c2(XP_006714389) c3(alpha-protein kinase 1 isoform X2) c4(287819) c5(287820, 287821, 287822, 287823, 287824, 287825) c6( ) c7(fU, nZ, iU, hG, ht, fe, aj, bS, v, ct, g, Z); #c1(ALPK2) c2(NP_443179) c3(alpha-protein kinase 2) c4(229740) c5(229741, 229742, 229743, 229744, 229745, 229746) c6( ) c7(T, B, eM); #c1(ALPK3) c2(NP_065829) c3(alpha-protein kinase 3) c4(205713) c5(205714, 205715, 205716, 205717, 205718, 205719) c6( ) c7(TF, nC, nw, IR); #c1(ALPP) c2(NP_001623) c3(alkaline phosphatase, placental type preproprotein) c4(119300) c5(119301, 119302, 119303, 119304, 119305, 119306) c6( ) c7(T, wu, fd, bB, Tl, h, wm, nJ, bc, vT, HY, TH, eH, aq, eF, TJ, bE, TG, au, rx, y, B); #c1(ALPPL2) c2(NP_112603) c3(alkaline phosphatase, placental-like preproprotein) c4(221540) c5(221541, 221542, 221543, 221544, 221545, 221546) c6( ) c7(nJ, Bl, ac, IR, vT, bE, wu, ev, TK, bB, wm, an, on, nC); #c1(ALS2) c2(NP_001129217) c3(alsin isoform 2) c4(51217, 51218, 51219) c5(51220, 51221, 51222, 51223, 51224, 51225, 51226, 51227, 51228, 51229, 51230, 51231, 51232, 51233, 51234, 51235, 51236, 51237) c6( ) c7(c, lu, TL, TN, TP, aV, OI, TO, U, TQ, aU, TM, K, PJ, xw, On); #c1(ALS2) c2(NP_065970) c3(alsin isoform 1) c4(206506) c5(206507, 206508, 206509, 206510, 206511, 206512, 206513, 206514, 206515, 206516, 206517, 206518, 206519, 206520, 206521, 206522, 206523) c6( ) c7(c, lu, TL, TN, TP, aV, OI, TO, U, TQ, aU, TM, K, PJ, xw, Qn); #c1(ALS2) c2(XP_011509832) c3(alsin isoform X3) c4(300434, 300435) c5( ) c6( ) c7(c, lu, TL, TN, TP, aV, OI, TO, U, TO, aU, TM, K, PJ, xw, Qn); #c1(ALS2CL) c2(NP_001177636) c3(ALS2 C-terminal-like protein isoform 1) c4(72799) c5(72800, 72801, 72802, 72803, 72804, 72805, 72806, 72807, 72808, 72809) c6( ) c7(AW, c); #c1(ALS2CL) c2(NP_877576) c3(ALS2 C-terminal-like protein isoform 3) c4( ) c5(256912, 256913, 256914, 256915, 256916) c6( ) c7(AW, c); #c1(ALS2CL) c2(XP_005265082) c3(ALS2 C-terminal-like protein isoform X6) c4(279425) c5(279426) c6( ) c7(AW, c); #c1(ALS2CR12) c2(NP_001120863) c3(amyotrophic lateral sclerosis 2 chromosomal region candidate gene 12 protein isoform b) c4(44858) c5(44859, 44860, 44861, 44862, 44863, 44864) c6( ) c7(Y, dL, ht, ff, en); #c1(ALS2CR12) c2(NP_631902) c3(amyotrophic lateral sclerosis 2 chromosomal region candidate gene 12 protein isoform a) c4(238264) c5(238265, 238266, 238267, 238268, 238269, 238270, 238271, 238272, 238273, 238274) c6( ) c7(Y, dL, ht, ff, en); #c1(ALS2CR12) c2(XP_006712336) c3(amyotrophic lateral sclerosis 2 chromosomal region candidate gene 12 protein isoform X5) c4( ) c5(286597, 286598, 286599, 286600, 286601, 286602) c6( ) c7(Y, dL, ht, ff, en); #c1(ALS2CR12) c2(XP_011508908) c3(amyotrophic lateral sclerosis 2 chromosomal region candidate gene 12 protein isoform X1) c4(299483) c5( ) c6( ) c7(Y, dL, ht, ff, en); #c1(ALX1) c2(XP_005269222) c3(ALX homeobox protein 1 isoform X1) c4(282493) c5(282494, 282495, 282496, 282497, 282498, 282499, 282500) c6( ) c7(T, kj, lp, TU, TR, aW, Az, TS, aT, m, t, TT); #c1(ALX4) c2(NP_068745) c3(homeobox protein aristaless-like 4) c4(210156) c5(210157, 210158, 210159, 210160, 210161, 210162) c6( ) c7(bL, T, TV, aw, bB, aj, TZ, j, q, jz, pN, h, pl, jf, TW, s, TY, Az, r, aq, g, bz, bE, gX, TX, zG); #c1(ALYREF) c2(NP_005773) c3(THO complex subunit 4) c4(159235, 159236) c5(159237, 159238, 159239, 159240, 159241, 159242, 159243, 159244, 159245, 159246, 159247, 159248) c6( ) c7(dA, c, ds, ff, h, en, cd); #c1(AMACR) c2(NP_001161067) c3(alpha-methylacyl-CoA racemase isoform 3) c4(65258) c5(65259, 65260, 65261, 65262, 65263, 65264) c6( ) c7(Ua, G, T, fM, Uc, LX, bO, aA, bB, n, v, Fb, ci, fr, rP, iJ, q, ad, fX, NS, aT, dL, AN, bV, ae, B, s, Ub, vT, aW, hl, LZ, r, fQ, fe, aF, g, cm, bz, Qx, Qi, es, gl, iA, bE, ln, nG, hj, mE, gZ, at, X); #c1(AMACR) c2(NP_055139) c3(alpha-methylacyl-CoA racemase isoform 1) c4(179242) c5(179243, 179244, 179245, 179246, 179247, 179248, 179249, 179250, 179251, 179252, 179253, 179254, 179255, 179256, 179257, 179258, 179259, 179260, 179261, 179262, 179263, 179264, 179265, 179266, 179267, 179268, 179269, 179270, 179271, 179272, 179273, 179274, 179275, 179276, 179277, 179278, 179279, 179280, 179281, 179282, 179283, 179284, 179285, 179286, 179287, 179288, 179289, 179290, 179291, 179292, 179293, 179294, 179295, 179296, 179297, 179298, 179299, 179300, 179301, 179302, 179303, 179304, 179305, 179306, 179307, 179308, 179309, 179310, 179311, 179312, 179313, 179314, 179315, 179316, 179317, 179318, 179319, 179320, 179321, 179322, 179323, 179324, 179325, 179326, 179327, 179328, 179329, 179330, 179331, 179332, 179333, 179334, 179335, 179336, 179337, 179338, 179339, 179340, 179341, 179342, 179343, 179344, 179345, 179346, 179347, 179348, 179349, 179350, 179351, 179352, 179353, 179354, 179355, 179356, 179357, 179358, 179359, 179360, 179361, 179362, 179363, 179364, 179365, 179366, 179367, 179368, 179369, 179370, 179371, 179372, 179373, 179374, 179375, 179376, 179377, 179378, 179379, 179380, 179381, 179382, 179383, 179384, 179385, 179386, 179387) c6(179388) c7(Ua, G, T, fM, Uc, LX, bO, aA, bB, n, v, Fb, ci, fr, rP, iJ, q, ad, fX, NS, aT, dL, AN, bV, ae, B, s, Ub, vT, aW, hl, LZ, r, fQ, fe, aF, g, cm, bz, Qx, Qi, es, ql, iA, bE, ln, nG, hj, mE, gZ, at, X); #c1(AMACR) c2(NP_976316) c3(alpha-methylacyl-CoA racemase isoform 2) c4(263128, 263129) c5(263130, 263131, 263132, 263133, 263134, 263135, 263136, 263137, 263138, 263139, 263140, 263141) c6( ) c7(Ua, G, T, fM, Uc, LX, bO, aA, bB, n, v, Fb, ci, fr, rP, iJ, q, ad, fX, NS, aT, dL, AN, bV, ae, B, s, Ub, vT, aW, hl, LZ, r, fQ, fe, aF, g, cm, bz, Qx, Qi, es, ql, iA, bE, ln, nG, hj, mE, gZ, at, X); #c1(AMBN) c2(NP_057603) c3(ameloblastin precursor) c4(191586, 191587, 191588) c5(191589, 191590, 191591, 191592, 191593, 191594, 191595, 191596, 191597, 191598, 191599, 191600, 191601, 191602, 191603, 191604, 191605, 191606, 191607, 191608, 191609, 191610, 191611, 191612, 191613, 191614, 191615, 191616, 191617, 191618, 191619, 191620, 191621, 191622, 191623, 191624, 191625, 191626, 191627, 191628, 191629, 191630, 191631, 191632, 191633, 191634, 191635, 191636, 191637, 191638, 191639, 191640, 191641, 191642, 191643, 191644, 191645, 191646, 191647, 191648, 191648, 191650, 191651, 191652, 191653, 191654, 191655, 191656, 191657, 191658, 191659, 191660, 191661, 191662, 191663, 191664, 191665, 191666, 191667, 191668, 191669, 191670, 191671, 191672, 191673, 191674, 191675, 191676, 191677, 191678, 191679, 191680, 191681, 191682, 191683, 191684, 191685, 191686, 191687, 191688, 191689, 191690, 191691, 191692, 191693, 191694, 191695, 191696, 191697, 191698, 191699) c6(191700, 191701, 191702, 191703, 191704, 191705, 191706) c7(ki, Ud); #c1(AMBP) c2(NP_001624) c3(protein AMBP preproprotein) c4(119307, 119308) c5(119309, 119310, 119311, 119312, 119313, 119314, 119315, 119316, 119317, 119318, 119319, 119320) c6( ) c7(T, dD, id, qb, ea, e, rf, cz, fd, n, eq, ci, fr, eA, ad, wG, yt, Uh, aT, Uf, aW, Ue, Is, uF, nN, t, fq, dr, Ta, Ui, dB, Nk, Ug, wq, E, m, EY, Tc); #c1(AMBRA1) c2(NP_001254711) c3(activating molecule in BECN1-regulated autophagy protein 1 isoform 1) c4(94805, 94806, 94807, 94808, 94809, 94810, 94811, 94812, 94813, 94814, 94815, 94816, 94817, 94818, 94819, 94820, 94821, 94822, 94823) c5(94824, 94825, 94826, 94827, 94828, 94829, 94830, 94831, 94832, 94833, 94834, 94835, 94836, 94837, 94838, 94839, 94840, 94841, 94842, 94843, 94844, 94845, 94846, 94847, 94848, 94849, 94850, 94851, 94852, 94853, 94854, 94855, 94856, 94857, 94858, 94859, 94860, 94861, 94862, 94863, 94864, 94865, 94866, 94867, 94868, 94869, 94870, 94871, 94872, 94873, 94874, 94875, 94876, 94877, 94878, 94879, 94880, 94881, 94882) c6( ) c7(q, r); #c1(AMBRA1) c2(NP_001254712) c3(activating molecule in BECN1-regulated autophagy protein 1 isoform 3) c4(94883) c5(94884, 94885, 94886, 94887, 94888, 94889) c6( ) c7(q, r); #c1(AMBRA1) c2(NP_001287660) c3(activating molecule in BECN1-regulated autophagy protein 1 isoform 4) c4(112466) c5(112467, 112468, 112469, 112470, 112471, 112472, 112473, 112474, 112475, 112476) c6( ) c7(q, r); #c1(AMBRA1) c2(XP_005253068) c3(activating molecule in BECN1-regulated autophagy protein 1 isoform X3) c4(272115) c5(272116, 272117, 272118, 272119, 272120, 272121, 272122, 272123, 272124, 272125) c6( ) c7(q, r); #c1(AMBRA1) c2(XP_005253071) c3(activating molecule in BECN1-regulated autophagy protein 1 isoform X1) c4(272126) c5(272127, 272128, 272129, 272130, 272131, 272132) c6( ) c7(q, r); #c1(AMBRA1) c2(XP_006718322) c3(activating molecule in BECN1-regulated autophagy protein 1 isoform X2) c4(291705) c5(291706, 291707, 291708, 291709, 291710, 291711) c6( ) c7(q, r); #c1(AMBRA1) c2(XP_011518516) c3(activating molecule in BECN1-regulated autophagy protein 1 isoform X5) c4(312629) c5( ) c6( ) c7(q, r); #c1(AMBRA1) c2(XP_011518517) c3(activating molecule in BECN1-regulated autophagy protein 1 isoform X6) c4( ) c5(312630) c6( ) c7(q, r); #c1(AMD1) c2(NP_001274143) c3(S-adenosylmethionine decarboxylase proenzyme isoform 3) c4(106062) c5(106063, 106064, 106065, 106066, 106067, 106068) c6( ) c7(T, qQ, v, ad, Ul, aT, bK, K, vd, Um, ae, cY, Ii, IR, aW, r, Un, Uk, W, Uj, Ip, nw, lC); #c1(AMD1) c2(NP_001274144) c3(S-adenosylmethionine decarboxylase proenzyme isoform 4) c4( ) c5(106069, 106070, 106071, 106072, 106073, 106074, 106075, 106076, 106077, 106078, 106079) c6( ) c7(T, qQ, v, ad, Ul, aT, bK, K, vd, Um, ae, cY, Ii, lR, aW, r, Un, Uk, W, Uj, Ip, nw, lC); #c1(AMD1) c2(NP_001274145) c3(S-adenosylmethionine decarboxylase proenzyme isoform 5) c4(106080) c5(106081, 106082, 106083, 106084, 106085, 106086) c6( ) c7(T, qQ, v, ad, Ul, aT, bK, K, vd, Um, ae, cY, Ii, IR, aW, r, Un, Uk, W, Uj, Ip, nw, lC); #c1(AMD1) c2(NP_001625) c3(S-adenosylmethionine decarboxylase proenzyme isoform 1) c4(119321, 119322, 119323) c5(119324, 119325, 119326, 119327, 119328, 119329, 119330) c6( ) c7(T, qQ, v, ad, Ul, aT, bK, K, vd, Um, ae, cY, Ii, IR, aW, r, Un, Uk, W, Uj, Ip, nw, lC); #c1(AMELX) c2(NP_001133) c3(amelogenin, X isoform isoform 1 precursor) c4(52814) c5(52815, 52816, 52817, 52818, 52819, 52820, 52821, 52822) c6(52823, 52824) c7(Uo, ka, T, dA, ec, pN, aW, ki, aT, bh, Ud, bt, ae, ai, ad, bc); #c1(AMELX) c2(NP_872622) c3(amelogenin, X isoform isoform 2 precursor) c4(256539) c5(256540, 256541, 256542, 256543, 256544, 256545, 256546, 256547, 256548) c6(256549, 256550) c7(Uo, ka, T, dA, ec, pN, aW, ki, aT, bh, Ud, bt, ae, ai, ad, bc); #c1(AMELX) c2(XP_011543791) c3(amelogenin, X isoform isoform X1) c4(342897) c5(342898, 342899, 342900, 342901, 342902, 342903, 342904, 342905) c6(342906, 342907) c7(Un, ka, T, dA, ec, pN, aW, ki, aT, bh, Ud, bt, ae, ai, ad, bc); #c1(AMELY) c2(NP_001134) c3(amelogenin, Y isoform precursor) c4(52825) c5(52826, 52827, 52828, 52829, 52830, 52831) c6( ) c7(Un, B); #c1(AMELY) c2(XP_011529774) c3(amelogenin, Y isoform isoform X1) c4(325463, 325464) c5(325465, 325466, 325467, 325468, 325469, 325470, 325471, 325472, 325473, 325474, 325475, 325476, 325477, 325478, 325479, 325480, 325481, 325482, 325483, 325484, 325485, 325486, 325487, 325488, 325489, 325490, 325491, 325492, 325493, 325494, 325495, 325496, 325497, 325498, 325499, 325500, 325501, 325502, 325503, 325504, 325505, 325506, 325507, 325508, 325509, 325510, 325511, 325512, 325513, 325514, 325515, 325516, 325517, 325518, 325519, 325520, 325521, 325522, 325523, 325524, 325525, 325526, 325527, 325528, 325529, 325530, 325531, 325532, 325533, 325534, 325535, 325536, 325537, 325538, 325539, 325540, 325541, 325542, 325543, 325544, 325545, 325546, 325547, 325548, 325549, 325550, 325551, 325552, 325553, 325554, 325555, 325556, 325557, 325558, 325559, 325560, 325561, 325562, 325563) c6(325564) c7(Uo, B); #c1(AMER1) c2(NP_689637) c3(APC membrane recruitment protein 1) c4(243376, 243377) c5(243378, 243379, 243380, 243381, 243382, 243383, 243384, 243385, 243386, 243387, 243388, 243389, 243390, 243391, 243392) c6( ) c7(bF, es, T, aC, B, iO, Rq, Qr, iA, mI, r, Up, nA, bt, q, er); #c1(AMER2) c2(NP_689917) c3(APC membrane recruitment protein 2 isoform 1) c4(244357) c5(244358, 244359, 244360, 244361, 244362, 244363) c6( ) c7(bF, er); #c1(AMER2) c2(XP_006719833) c3(APC membrane recruitment protein 2 isoform X2) c4(293019) c5(293020, 293021, 293022, 293023, 293024, 293025, 293026, 293027, 293028, 293029) c6( ) c7(bF, er); #c1(AMER3) c2(NP_001098663) c3(APC membrane recruitment protein 3) c4(41388, 41389, 41390) c5(41391, 41392, 41393, 41394, 41395, 41396, 41397, 41398, 41399, 41400, 41401, 41402, 41403, 41404, 41405, 41406, 41407, 41408, 41409, 41410, 41411, 41412) c6( ) c7(bF, q, r); #c1(AMFR) c2(NP_001135) c3(E3 ubiquitin-protein ligase AMFR) c4(53966) c5( ) c6( ) c7(av, T, eG, af, Y, Uq, dL, K, g, bz, B); #c1(AMFR) c2(XP_005255946) c3(E3 ubiquitin-protein ligase AMFR isoform X1) c4(273902) c5(273903, 273904, 273905, 273906, 273907, 273908) c6( ) c7(av, T, eG, af, Y, Uq, dL, K, g, bz, B); #c1(AMH) c2(NP_000470) c3(muellerian-inhibiting factor precursor) c4(9417) c5(9418, 9419, 9420, 9421, 9422, 9423) c6( ) c7(T, Ut, UH, ea, if, cL, bh, Ul, ip, gJ, iI, Pl, dV, K, hH, eL, bc, Us, Ur, hm, UC, yo, aW, az, HA, UJ, pD, cm, eM, U, cj, QF, uJ, m, Ux, eg, Uz, Uw, UA, dD, aw, aj, nA, qN, yn, PD, UD, dL, yi, A, fe, Pp, dB, Uv, at, eo, Pr, bL, pF, pQ, aA, fF, v, j, C, Ns, V, o, J, UE, er, Ig, BJ, aT, cy, ae, kl, s, vT, Y, bu, t, pb, ua, ac, fD, UF, aZ, dM, aD, jh, eq, ah, Uy, ad, qC, dP, vJ, UG, hD, ji, uQ, d, cr, eZ, aF, hp, Fq, iV, js, Uu, UB, be, lf, y); #c1(AMHR2) c2(NP_001158162) c3(anti-Muellerian hormone type-2 receptor isoform 2 precursor) c4(63225) c5(63226, 63227, 63228, 63229, 63230, 63231) c6( ) c7(Le, T, pY, aZ, if, nA, qN, ad, dP, hW, vJ, il, BJ, aT, PD, UK, Ur, yi, kl, UL, aW, UJ, g, t, bE, UB, Uv, m, Th); #c1(AMHR2) c2(NP_001158163) c3(anti-Muellerian hormone type-2 receptor isoform 3 precursor) c4(63232) c5(63233, 63234, 63235, 63236, 63237, 63238) c6( ) c7(Le, T, pY, aZ, if, nA, qN, ad, dP, hW, vJ, il, BJ, aT, PD, UK, Ur, yi, kl, UL, aW, UJ, g, t, bE, UB, Uv, m, Th); #c1(AMHR2) c2(NP_065434) c3(anti-Muellerian hormone type-2 receptor isoform 1 precursor) c4(204784) c5(204785, 204786, 204787, 204788, 204789, 204790) c6( ) c7(Le, T, pY, aZ, if, nA, qN, ad, dP, hW, vJ, il, BJ, aT, PD, UK, Ur, yi, kl, UL, aW, UJ, g, t, bE, UB, Uv, m, Th); #c1(AMHR2) c2(XP_011536483) c3(anti-Muellerian hormone type-2 receptor isoform X9) c4( ) c5(333829) c6( ) c7(Le, T, pY, aZ, if, nA, qN, ad, dP, hW, vJ, il, BJ, aT, PD, UK, Ur, yi, kl, UL, aW, UJ, g, t, bE, UB, Uv, m, Th); #c1(AMICA1) c2(NP_001091996) c3(junctional adhesion molecule-like isoform 1 precursor) c4(39215) c5(39216, 39217, 39218, 39219, 39220, 39221) c6( ) c7(iT); #c1(AMICA1) c2(NP_694938) c3(junctional adhesion molecule-like isoform 2) c4(245427) c5(245428, 245429, 245430, 245431, 245432, 245433) c6( ) c7(iT); #c1(AMICA1) c2(XP_005271464) c3(junctional adhesion molecule-like isoform X2) c4(283429) c5( ) c6( ) c7(iT); #c1(AMICA1) c2(XP_011540909) c3(junctional adhesion molecule-like isoform X3) c4(339451) c5(339452, 339453, 339454, 339455, 339456, 339457, 339458, 339459, 339460, 339461, 339462, 339463) c6( ) c7(iT); #c1(AMIGO2) c2(NP_862830) c3(amphoterin-induced protein 2 precursor) c4(255811) c5(255812, 255813, 255814, 255815, 255816, 255817, 255818, 255819, 255820, 255821, 255822, 255823, 255824, 255825, 255826, 255827, 255828, 255829) c6( ) c7(JI, af, g, an); #c1(AMMECR1) c2(NP_001020751) c3(AMME syndrome candidate gene 1 protein isoform 2) c4(28989) c5(28990, 28991, 28992, 28993, 28994, 28995, 28996) c6( ) c7(UM); #c1(AMMECR1) c2(NP_001165160) c3(AMME syndrome candidate gene 1 protein isoform 3) c4( ) c5(67523, 67524, 67525, 67526, 67527) c6( ) c7(UM); #c1(AMMECR1) c2(NP_056180) c3(AMME syndrome candidate gene 1 protein isoform 1) c4(186169, 186170) c5(186171, 186172, 186173, 186174, 186175, 186176, 186177) c6( ) c7(UM); #c1(AMN) c2(NP_112205) c3(protein amnionless precursor) c4(220782) c5(220783, 220784, 220785, 220786, 220787, 220788) c6( ) c7(ck, x, UO, UP, iU, mD, mA, E, mz, my, UN, dF, ao, mH); #c1(AMOT) c2(XP_005262147) c3(angiomotin isoform X2) c4(277754, 277755) c5(277756, 277757, 277758, 277759, 277760, 277761, 277762, 277763, 277764, 277765, 277766) c6( ) c7(T, d, py, aW, aT, GQ, aj, ci, fq, af); #c1(AMOT) c2(XP_011529177) c3(angiomotin isoform X1) c4(324553, 324554, 324555) c5(324556, 324557, 324558, 324559, 324560, 324561, 324562, 324563, 324564, 324565, 324566, 324567, 324568, 324569, 324570, 324571, 324572, 324573, 324574, 324575, 324576, 324577, 324578, 324579) c6( ) c7(T, d, py, aW, aT, GQ, aj, ci, fq, af); #c1(AMOTL1) c2(NP_001287936) c3(angiomotin-like protein 1 isoform 2) c4(113240) c5(113241, 113242, 113243, 113244, 113245, 113246) c6( ) c7(aT); #c1(AMOTL1) c2(NP_570899) c3(angiomotin-like protein 1 isoform 1) c4(234372, 234373, 234374) c5(234375, 234376, 234377, 234378, 234379, 234380, 234381, 234382, 234383, 234384, 234385, 234386, 234387, 234388, 234389, 234390, 234391, 234392) c6( ) c7(aT); #c1(AMPD2) c2(XP_011539550) c3(AMP deaminase 2 isoform X3) c4( ) c5(337758) c6( ) c7(dD, UQ, fc, U, UR, eq, C); #c1(AMPD3) c2(NP_000471) c3(AMP deaminase 3 isoform 1A) c4(9424, 9425, 9426, 9427) c5(9428, 9429, 9430, 9431, 9432, 9433, 9434) c6( ) c7(UT, US, X, K); #c1(AMPD3) c2(NP_001020560) c3(AMP deaminase 3 isoform 1B) c4(28920) c5(28921, 28922, 28923, 28924, 28925, 28926, 28927, 28928, 28929, 28930) c6( ) c7(UT, US, X, K); #c1(AMPD3) c2(NP_001020561) c3(AMP deaminase 3 isoform 1C) c4(28931) c5(28932, 28933, 28934, 28935, 28936, 28937, 28938, 28939, 28940, 28941, 28942, 28943, 28944, 28945, 28946, 28947, 28948, 28949, 28950, 28951, 28952, 28953, 28954) c6( ) c7(UT, US, X, K); #c1(AMPH) c2(NP_001626) c3(amphiphysin isoform 1) c4(119331) c5(119332, 119333, 119334, 119335, 119336, 119337) c6( ) c7(IF, T, UW, av, aW, UU, xz, oj, aT, aA, bK, UX, f, fb, UV); #c1(AMPH) c2(NP_647477) c3(amphiphysin isoform 2) c4(238649, 238650) c5(238651, 238652, 238653, 238654, 238655, 238656, 238657, 238658, 238659, 238660, 238661, 238662) c6( ) c7(IF, T, UW, av, aW, UU, xz, oj, aT, aA, bK, UX, f, fb, UV); #c1(AMPH) c2(XP_006715752) c3(amphiphysin isoform X1) c4(289757) c5( ) c6( ) c7(IF, T, UW, av, aW, UU, xz, oj, aT, aA, bK, UX, f, fb, UV); #c1(AMPH) c2(XP_006715753) c3(amphiphysin isoform X3) c4(289758, 289759) c5(289760, 289761, 289762, 289763, 289764, 289765, 289766, 289767, 289768, 289769, 289770, 289771) c6( ) c7(IF, T, UW, av, aW, UU, xz, oj, aT, aA, bK, UX, f, fb, UV); #c1(AMPH) c2(XP_006715754) c3(amphiphysin isoform X4) c4( ) c5(289772, 289773, 289774, 289775, 289776, 289777) c6( ) c7(IF, T, UW, av, aW, UU, xz, oj, aT, aA, bK, UX, f, fb, UV); #c1(AMT) c2(NP_000472) c3(aminomethyltransferase, mitochondrial isoform 1 precursor) c4(9435) c5(9436, 9437, 9438, 9439, 9440, 9441, 9442) c6( ) c7(ar, hl, UY, Ip, ha, jh, vG, at, y, UZ); #c1(AMT) c2(NP_001158182) c3(aminomethyltransferase, mitochondrial isoform 2 precursor) c4(63267) c5(63268, 63269, 63270, 63271, 63272, 63273) c6( ) c7(ar, hl, UY, Ip, ha, jh, vG, at, y, UZ); #c1(AMT) c2(NP_001158183) c3(aminomethyltransferase, mitochondrial isoform 3 precursor) c4(63274, 63275) c5(63276, 63277, 63278, 63279, 63280, 63281, 63282, 63283, 63284, 63285, 63286) c6( ) c7(ar, hl, UY, Ip, ha, jh, vG, at, y, UZ); #c1(AMT) c2(NP_001158184) c3(aminomethyltransferase, mitochondrial isoform 4 precursor) c4(63287, 63288) c5(63289, 63290, 63291, 63292, 63293, 63294, 63295, 63296, 63297, 63298, 63299, 63300) c6( ) c7(ar, hl, UY, Ip, ha, jh, vG, at, y, UZ); #c1(AMZ1) c2(XP_011513452) c3(archaemetzincin-1 isoform X1) c4(305704) c5(305705, 305706, 305707, 305708, 305709, 305710) c6( ) c7(Va); #c1(ANAPC1) c2(NP_073153) c3(anaphase-promoting complex subunit 1) c4(212829) c5(212830, 212831, 212832, 212833, 212834, 212835) c6( ) c7(X, Vb); #c1(ANAPC1) c2(XP_011509939) c3(anaphase-promoting complex subunit 1 isoform X5) c4( ) c5(300544) c6( ) c7(X, Vb); #c1(ANAPC10) c2(NP_001243638) c3(anaphase-promoting complex subunit 10 isoform 2) c4( ) c5(91273, 91274, 91275, 91276) c6( ) c7(T, s, r, m, t, q); #c1(ANAPC10) c2(NP_001243641) c3(anaphase-promoting complex subunit 10 isoform 4) c4( ) c5(91277, 91278, 91279, 91280, 91281) c6( ) c7(T, s, r, m, t, q); #c1(ANAPC10) c2(NP_055700) c3(anaphase-promoting complex subunit 10 isoform 1) c4( ) c5(182861, 182862, 182863, 182864, 182865, 182866, 182867, 182868, 182869, 182870, 182871, 182872, 182873, 182874, 182875, 182876, 182877, 182878, 182879) c6( ) c7(T, s, r, m, t, q); #c1(ANAPC10) c2(XP_011529823) c3(anaphase-promoting complex subunit 10 isoform X3) c4( ) c5(325629, 325630) c6( ) c7(T, s, r, m, t, q); #c1(ANAPC10) c2(XP_011529834) c3(anaphase-promoting complex subunit 10 isoform X12) c4( ) c5(325631, 325632, 325633, 325634, 325635) c6( ) c7(T, s, r, m, t, q); #c1(ANAPC11) c2(NP_001002244) c3(anaphase-promoting complex subunit 11 isoform 1) c4(19441) c5(19442, 19443, 19444, 19445, 19446, 19447) c6( ) c7(iR, aq, T, bt); #c1(ANAPC11) c2(NP_001276346) c3(anaphase-promoting complex subunit 11 isoform 2) c4(108203) c5(108204, 108205, 108206, 108207, 108208, 108209, 108210, 108211, 108212, 108213) c6( ) c7(iR, aq, T, bt); #c1(ANAPC11) c2(NP_001276349) c3(anaphase-promoting complex subunit 11 isoform 4) c4( ) c5(108214) c6( ) c7(iR, aq, T, bt); #c1(ANAPC13) c2(NP_001229304) c3(anaphase-promoting complex subunit 13) c4(84172) c5(84173, 84174, 84175, 84176, 84177, 84178, 84179, 84180, 84181, 84182, 84183, 84184, 84185, 84186, 84187, 84188, 84189, 84190) c6( ) c7(xb); #c1(ANAPC2) c2(NP_037498) c3(anaphase-promoting complex subunit 2) c4(175859) c5(175860, 175861, 175862, 175863, 175864, 175865) c6( ) c7(bF, T, K, m, g, t, iu); #c1(ANAPC4) c2(NP_001273685) c3(anaphase-promoting complex subunit 4 isoform 1) c4(105615, 105616) c5(105617, 105618, 105619, 105620, 105621, 105622) c6( ) c7(aW, y, aT); #c1(ANAPC4) c2(NP_037499) c3(anaphase-promoting complex subunit 4 isoform 2) c4(175866) c5(175867, 175868, 175869, 175870, 175871, 175872) c6( ) c7(aW, y, aT); #c1(ANAPC4) c2(XP_011512141) c3(anaphase-promoting complex subunit 4 isoform X2) c4( ) c5(302733, 302734, 302735, 302736, 302737, 302738) c6( ) c7(aW, y, aT); #c1(ANAPC5) c2(NP_001131031) c3(anaphase-promoting complex subunit 5 isoform b) c4(52545) c5(52546, 52547, 52548, 52549, 52550, 52551, 52552, 52553, 52554, 52555, 52556) c6( ) c7(K); #c1(ANAPC5) c2(NP_057321) c3(anaphase-promoting complex subunit 5 isoform a) c4(190096, 190097, 190098, 190099) c5(190100, 190101, 190102, 190103, 190104, 190105, 190106) c6( ) c7(K); #c1(ANAPC5) c2(XP_005253957) c3(anaphase-promoting complex subunit 5 isoform X1) c4(272772) c5(272773, 272774, 272775, 272776, 272777, 272778, 272779, 272780, 272781, 272782, 272783, 272784, 272785, 272786, 272787, 272788, 272789) c6( ) c7(K); #c1(ANAPC5) c2(XP_006719512) c3(anaphase-promoting complex subunit 5 isoform X2) c4( ) c5(292627, 292628, 292629, 292630, 292631) c6( ) c7(K); #c1(ANAPC7) c2(NP_001131136) c3(anaphase-promoting complex subunit 7 isoform b) c4(52599) c5(52600, 52601, 52602, 52603, 52604, 52605) c6( ) c7(aW, AQ, Dz, aT); #c1(ANAPC7) c2(NP_057322) c3(anaphase-promoting complex subunit 7 isoform a) c4(190107) c5(190108, 190109, 190110, 190111, 190112, 190113) c6( ) c7(aW, AO, Dz, aT); #c1(ANG) c2(NP_001091046) c3(angiogenin precursor) c4(38359) c5(38360, 38361, 38362, 38363, 38364, 38365, 38366, 38367, 38368, 38369) c6( ) c7(sY, Ve, T, eR, Ol, iW, fd, jh, aA, cz, n, bB, Fb, Vd, ci, fr, PJ, nE, aY, Vh, q, ad, ai, ip, Jm, dP, av, iu, no, aE, Vf, aT, lG, Jn, Vc, K, an, nJ, ae, eG, Di, Jl, aW, Y, ev, Vg, r, TQ, aq, Qm, g, cl, cm, uC, Vi, bw, ac, c, zr, bE, U, cj, m, y, bt, Vj, B); #c1(ANGPT1) c2(NP_001137) c3(angiopoietin-1 isoform 1 precursor) c4(56038, 56039, 56040, 56041) c5( ) c6( ) c7(lD, bM, T, aC, ea, if, al, eh, bB, fd, ci, Vp, xE, aE, Iv, fm, pX, M, dV, K, hu, hm, ly, aW, Ls, hl, g, as, bw, Vm, y, eM, iT, uJ, m, dD, Vo, aw, ht, n, aj, fr, qN, cd, ai, Vs, Bl, gd, Jn, cY, wC, A, fQ, aq, op, lx, dB, If, va, B, tq, jv, fM, fG, yk, jx, aA, cz, fF, v, j, C, q, o, J, eA, eJ, hb, Vr, jZ, aT, cy, bq, ae, dl, nO, oV, r, t, Vk, Vq, Vn, ck, ac, wO, dh, dy, fD, bt, gx, kh, eq, hF, ad, Jm, dP, av, py, yt, iY, uD, fb, d, IR, xs, cr, aF, Vl, Fg, bz, eK, gk, bE, lI, aS, bC, ei, lC, iu, us); #c1(ANGPT1) c2(NP_001186788) c3(angiopoietin-1 isoform 2 precursor) c4(78580, 78581, 78582) c5(78583, 78584, 78585, 78586, 78587, 78588, 78589, 78590, 78591, 78592, 78593) c6(78594, 78595) c7(ID, bM, T, aC, ea, if, al, eh, bB, fd, ci, Vp, xE, aE, Iv, fm, pX, M, dV, K, hu, hm, ly, aW, Ls, hl, g, as, bw, Vm, y, eM, iT, uJ, m, dD, Vo, aw, ht, n, aj, fr, qN, cd, ai, Vs, Bl, gd, Jn, cY, wC, A, fQ, aq, op, lx, dB, If, va, B, tq, jv, fM, fG, yk, jx, aA, cz, fF, v, j, C, q, o, J, eA, eJ, hb, Vr, jZ, aT, cy, bq, ae, dl, nO, oV, r, t, Vk, Vq, Vn, ck, ac, wO, dh, dy, fD, bt, gx, kh, eq, hF, ad, Jm, dP, av, py, yt, iY, uD, fb, d, IR, xs, cr, aF, Vl, Fq, bz, eK, gk, bE, lI, aS, bC, ei, lC, iu, us); #c1(ANGPT2) c2(NP_001112359) c3(angiopoietin-2 isoform b precursor) c4(43312) c5(43313, 43314, 43315, 43316, 43317, 43318) c6( ) c7(lD, T, aC, UH, ea, e, fd, ci, bv, xE, aE, Iv, Be, pX, M, dV, Vv, K, eL, tw, ly, aW, Ls, Qm, g, as, cm, uC, bw, xK, eM, nB, AM, vA, mx, vy, cj, Hb, m, eg, fy, dD, vl, sw, aw, n, aj, ww, Mi, fr, eh, cd, hr, El, ai, Vs, ft, jz, do, wG, gd, h, dL, ey, bl, cY, A, fQ, Vt, aq, kp, yq, mo, cM, op, lx, hq, Vu, Vy, lf, bm, at, va, bD, B, fM, jx, aA, cR, tc, cz, fF, j, v, C, wo, AO, q, J, eA, eJ, mj, rS, aT, cy, bq, ae, dl, eu, fO, r, cl, t, Vn, ov, ck, wg, kP, ac, nM, wO, DW, dh, dy, bt, gx, sY, kh, uG, Vz, dG, eq, jE, tK, ad, wD, hX, Jm, dP, av, py, Cj, sN, vw, fb, d, IR, tb, Vx, cr, aF, Fq, bz, qa, Hp, bE, lI, Vw, ei, IC, vt, y); #c1(ANGPT2) c2(NP_001112360) c3(angiopoietin-2 isoform c precursor) c4(43319) c5(43320, 43321, 43322, 43323, 43324, 43325) c6( ) c7(ID, T, aC, UH, ea, e, fd, ci, bv, xE, aE, Iv, Bc, pX, M, dV, Vv, K, eL, tw, ly, aW, Ls, Qm, g, as, cm, uC, bw, xK, eM, nB, AM, vA, mx, vy, cj, Hb, m, eg, fy, dD, vl, sw, aw, n, aj, ww, Mi, fr, eh, cd, hr, El, ai, Vs, ft, jz, do, wG, gd, h, dL, ey, bl, cY, A, fQ, Vt, aq, kp, yq, mo, cM, op, lx, hq, Vu, Vy, If, hm, at, va, bD, B, fM, jx, aA, cR, tc, cz, fF, j, v, C, wo, AO, q, J, eA, eJ, mj, rS, aT, cy, bq, ae, dl, eu, fO, r, cl, t, Vn, ov, ck, wg, kP, ac, nM, wO, DW, dh, dy, bt, gx, sY, kh, uG, Vz, dG, eq, jE, tK, ad, wD, hX, Jm, dP, av, py, Cj, sN, vw, fb, d, IR, tb, Vx, cr, aF, Fq, bz, qa, Hp, bE, lI, Vw, ei, lC, vt, y); #c1(ANGPT2) c2(NP_001138) c3(angiopoietin-2 isoform a precursor) c4(58597) c5( ) c6( ) c7(lD, T, aC, UH, ea, e, fd, ci, bv, xE, aE, Iv, Bc, pX, M, dV, Vv, K, eL, tw, ly, aW, Ls, Qm, g, as, cm, uC, bw, xK, eM, nB, AM, vA, mx, vy, cj, Hb, m, eg, fy, dD, vl, sw, aw, n, aj, ww, Mi, fr, eh, cd, hr, El, ai, Vs, ft, jz, do, wG, gd, h, dL, ey, bl, cY, A, fQ, Vt, aq, kp, yq, mo, cM, op, lx, hg, Vu, Vy, If, hm, at, va, bD, B, fM, jx, aA, cR, tc, cz, fF, j, v, C, wo, AD, q, J, eA, eJ, mj, rS, aT, cy, bq, ae, dl, eu, fO, r, cl, t, Vn, ov, ck, wg, kP, ac, nM, wO, DW, dh, dy, bt, gx, sY, kh, uG, Vz, dG, eq, jE, tK, ad, wD, hX, Jm, dP, av, py, Cj, sN, vw, fb, d, IR, tb, Vx, cr, aF, Fq, bz, qa, Hp, bE, lI, Vw, ei, lC, vt, y); #c1(ANGPT4) c2(NP_057069) c3(angiopoietin-4 precursor) c4(188761) c5(188762, 188763, 188764, 188765, 188766, 188767) cG( ) c7(eG, d, BN, af, Hl, hc, Ls, hy, yq, aS, ci, eA, fr, wA, fb, ne, op, El); #c1(ANGPT4) c2(XP_005260777) c3(angiopoietin-4 isoform X3) c4(276871) c5(276872, 276873, 276874, 276875, 276876, 276877) c6( ) c7(eG, d, BN, af, Hl, hc, Ls, hy, yq, aS, ci, eA, fr, wA, fb, ne, op, El); #c1(ANGPTL1) c2(NP_004664) c3(angiopoietin-related protein 1 precursor) c4(148644, 148645, 148646) c5(148647, 148648, 148649, 148650, 148651, 148652, 148653, 148654, 148655, 148656, 148657, 148658, 148659, 148660, 148661, 148662, 148663, 148664, 148665, 148666, 148667, 148668, 148669, 148670, 148671, 148672, 148673, 148674, 148675, 148676) c6(148677, 148678, 148679, 148680, 148681, 148682, 148683, 148684) c7(T, BC, BD, fd, hy, ci, hF, eA, El, av, aT, eG, B, BN, aW, Y, oV, aq, bz, eK, ck, ac, VA, ne); #c1(ANGPTL2) c2(NP_036230) c3(angiopoietin-related protein 2 precursor) c4(172476, 172477) c5(172478, 172479, 172480, 172481, 172482, 172483, 172484, 172485, 172486, 172487, 172488, 172489, 172490, 172491, 172492, 172493) c6(172494, 172495, 172496, 172497) c7(T, dD, dA, ea, e, aA, cR, V, j, BF, eq, q, Pu, ad, Pv, aE, h, By, ae, Pw, eH, r, lo, BG, BE, eF, t, iQ, dh, bm, wR, m); #c1(ANGPTL4) c2(NP_001034756) c3(angiopoietin-related protein 4 isoform b precursor) c4(32256) c5(32257, 32258, 32259, 32260, 32261, 32262) c6( ) c7(bL, T, dD, aC, nz, sw, ea, e, aw, aA, cR, zN, v, j, ci, ah, bX, eq, fr, q, Pu, ai, eA, Pv, py, xE, Rl, yt, nX, kl, aT, cy, jy, K, Pw, PK, NE, aW, ev, eH, fc, r, dq, aq, aF, yq, g, eF, t, iK, es, c, dh, mf, m, cP, ei, gT, B, VB); #c1(ANGPTL4) c2(NP_647475) c3(angiopoietin-related protein 4 isoform a precursor) c4(238635, 238636) c5(238637, 238638, 238639, 238640, 238641, 238642, 238643, 238644, 238645, 238646, 238647, 238648) c6( ) c7(bL, T, dD, aC, nz, sw, ea, e, aw, aA, cR, zN, v, j, ci, ah, bX, eq, fr, q, Pu, ai, eA, Pv, py, xE, Rl, yt, nX, kl, aT, cy, jy, K, Pw, PK, NE, aW, ev, eH, fc, r, dq, aq, aF, yq, g, eF, t, iK, es, c, dh, mf, m, cP, ei, gT, B, VB); #c1(ANGPTL6) c2(NP_114123) c3(angiopoietin-related protein 6 precursor) c4( ) c5(222253, 222254, 222255, 222256, 222257) c6( ) c7(LC, nm, v, q, r); #c1(ANGPTL6) c2(XP_011526651) c3(angiopoietin-related protein 6 isoform X3) c4(320960) c5(320961) c6( ) c7(LC, om, v, q, r); #c1(ANK1) c2(NP_000028) c3(ankyrin-1 isoform 3) c4(267, 268, 269) c5(270, 271, 272, 273, 274, 275, 276, 277, 278, 279, 280, 281) c6( ) c7(bL, bM, T, ai, sg, ad, Bc, rw, Vl, aT, VD, af, VF, VC, mR, Fm, zD, vs, VE, t, VH, VJ, c, VG, m, IS, VK); #c1(ANK1) c2(NP_001135917) c3(ankyrin-1 isoform 10 precursor) c4(53545) c5(53546, 53547, 53548, 53549, 53550, 53551) c6( ) c7(bL, bM, T, ai, sg, ad, Bc, rw, Vl, aT, VD, af, VF, VC, mR, Fm, zD, vs, VE, t, VH, VJ, c, VG, m, IS, VK); #c1(ANK1) c2(NP_001135918) c3(ankyrin-1 isoform 9) c4(53552) c5(53553, 53554, 53555, 53556, 53557, 53558) c6( ) c7(bL, bM, T, ai, sg, ad, Bc, rw, Vl, aT, VD, af, VF, VC, mR, Fm, zD, vs, VE, t, VH, VJ, c, VG, m, IS, VK); #c1(ANK1) c2(NP_065208) c3(ankyrin-1 isoform 4) c4( ) c5(204595, 204596, 204597, 204598, 204599) c6( ) c7(bL, bM, T, ai, sg, ad, Bc, rw, VI, aT, VD, af, VF, VC, mR, Fm, zD, vs, VE, t, VH, VJ, c, VG, m, IS, VK); #c1(ANK1) c2(NP_065209) c3(ankyrin-1 isoform 1) c4(204600, 204601, 204602) c5(204603, 204604, 204605, 204606, 204607, 204608, 204609, 204610, 204611, 204612, 204613, 204614, 204615, 204616, 204617, 204618, 204619, 204620, 204621) c6( ) c7(bL, bM, T, ai, sg, ad, Bc, rw, Vl, aT, VD, af, VF, VC, mR, Fm, zD, vs, VE, t, VH, VJ, c, VG, m, IS, VK); #c1(ANK1) c2(NP_065211) c3(ankyrin-1 isoform 5 precursor) c4(204622) c5(204623, 204624, 204625, 204626, 204627, 204628) c6( ) c7(bL, bM, T, ai, sg, ad, Bc, rw, Vl, aT, VD, af, VF, VC, mR, Fm, zD, vs, VE, t, VH, VJ, c, VG, m, IS, VK); #c1(ANK1) c2(NP_065213) c3(ankyrin-1 isoform 7 precursor) c4(204629) c5(204630, 204631, 204632, 204633, 204634, 204635, 204636, 204637, 204638, 204639) c6( ) c7(bL, bM, T, ai, sg, ad, Bc, rw, VI, aT, VD, af, VF, VC, mR, Fm, zD, vs, VE, t, VH, VJ, c, VG, m, IS, VK); #c1(ANK1) c2(XP_011542799) c3(ankyrin-1 isoform X8) c4(341431) c5(341432, 341433, 341434, 341435, 341436, 341437) c6( ) c7(bL, bM, T, ai, sg, ad, Bc, rw, VI, af, VD, af, VF, VC, mR, Fm, zD, vs, VE, t, VH, VJ, c, VG, m, IS, VK); #c1(ANK2) c2(NP_001120965) c3(ankyrin-2 isoform 3) c4(44996, 44997) c5(44998, 44999, 45000, 45001, 45002, 45003, 45004, 45005, 45006, 45007, 45008, 45009, 45010, 45011, 45012, 45013, 45014, 45015, 45016) c6( ) c7(VJ, aw, Bc, Fm, oe, VL, ha, HC, cV, gZ, e, cy, vs, j, pw, VM, cm, cd, HO, ad, mu); #c1(ANK2) c2(NP_001139) c3(ankyrin-2 isoform 1) c4( ) c5( ) c6( ) c7(VJ, aw, Bc, Fm, oe, VL, ha, HC, cV, gZ, e, cy, vs, j, pw, VM, cm, cd, HO, ad, mu); #c1(ANK2) c2(NP_066187) c3(ankyrin-2 isoform 2) c4(206810) c5(206811, 206812, 206813, 206814, 206815, 206816, 206817) c6( ) c7(VJ, aw, Bc, Fm, oe, VL, ha, HC, cV, gZ, e, cy, vs, j, pw, VM, cm, cd, HO, ad, mu); #c1(ANK2) c2(XP_005263002) c3(ankyrin-2 isoform X4) c4(278198) c5(278199, 278200, 278201, 278202, 278203, 278204) c6( ) c7(VJ, aw, Bc, Fm, oe, VL, ha, HC, cV, gZ, e, cy, vs, j, pw, VM, cm, cd, HO, ad, mu); #c1(ANK2) c2(XP_006714255) c3(ankyrin-2 isoform X9) c4(287664) c5(287665, 287666, 287667, 287668, 287669, 287670) c6( ) c7(VJ, aw, Bc, Fm, oe, VL, ha, HC, cV, gZ, e, cy, vs, j, pw, VM, cm, cd, HO, ad, mu); #c1(ANK3) c2(NP_001191332) c3(ankyrin-3 isoform 3) c4(81405) c5(81406, 81407, 81408, 81409, 81410, 81411) c6( ) c7(uK, bO, bS, uu, xg, aR, rC, bK, K, he, VN, VP, af, gl, vo, bN, hq, sk, VO, cA, Ei, uJ, IB, cB); #c1(ANK3) c2(NP_001191333) c3(ankyrin-3 isoform 4) c4(81412) c5(81413, 81414, 81415, 81416, 81417, 81418) c6( ) c7(uK, bO, bS, uu, xg, aR, rC, bK, K, he, VN, VP, af, gl, vo, bN, hq, sk, VO, cA, Ei, uJ, IB, cB); #c1(ANK3) c2(NP_066267) c3(ankyrin-3 isoform 1) c4(206849, 206850, 206851, 206852, 206853) c5(206854, 206855, 206856, 206857, 206858, 206859) c6( ) c7(uK, bO, bS, uu, xg, aR, rC, bK, K, he, VN, VP, af, gl, vo, bN, hq, sk, VO, cA, Ei, uJ, IB, cB); #c1(ANK3) c2(XP_005269772) c3(ankyrin-3 isoform X23) c4(282787, 282788, 282789) c5(282790, 282791, 282792, 282793, 282794, 282795) c6( ) c7(uK, bO, bS, uu, xg, aR, rC, bK, K, he, VN, VP, af, gl, vo, bN, hq, sk, VO, cA, Ei, uJ, IB, cB); #c1(ANK3) c2(XP_005269773) c3(ankyrin-3 isoform X25) c4(282796) c5(282797, 282798, 282799, 282800, 282801, 282802) c6( ) c7(uK, bO, bS, uu, xg, aR, rC, bK, K, he, VN, VP, af, gl, vo, bN, hq, sk, VO, cA, Ei, uJ, IB, cB); #c1(ANK3) c2(XP_011538017) c3(ankyrin-3 isoform X20) c4( ) c5(335563, 335564, 335565, 335566, 335567, 335568) c6( ) c7(uK, bO, bS, uu, xg, aR, rC, bK, K, he, VN, VP, af, gl, vo, bN, hq, sk, VO, cA, Ei, uJ, IB, cB); #c1(ANK3) c2(XP_011538020) c3(ankyrin-3 isoform X26) c4( ) c5(335569, 335570, 335571, 335572, 335573, 335574, 335575, 335576, 335577, 335578, 335579, 335580, 335581, 335582, 335583, 335584, 335585, 335586) c6( ) c7(uK, bO, bS, uu, xg, aR, rC, bK, K, he, VN, VP, af, gl, vo, bN, hq, sk, VO, cA, Ei, uJ, IB, cB); #c1(ANKFN1) c2(NP_694960) c3(ankyrin repeat and fibronectin type-III domain-containing protein 1) c4(245492) c5(245493, 245494, 245495, 245496, 245497, 245498) c6( ) c7(jb, V, Nc); #c1(ANKFN1) c2(XP_011522734) c3(ankyrin repeat and fibronectin type-III domain-containing protein 1 isoform X7) c4( ) c5(317267) c6( ) c7(jb, V, Nc); #c1(ANKFY1) c2(NP_057460) c3(rabankyrin-5 isoform 1) c4(191036) c5(191037, 191038, 191039, 191040, 191041, 191042, 191043, 191044, 191045, 191046) c6( ) c7(eR); #c1(ANKFY1) c2(XP_005256736) c3(rabankyrin-5 isoform X3) c4(274305) c5( ) c6( ) c7(eR); #c1(ANKFY1) c2(XP_011522233) c3(rabankyrin-5 isoform X5) c4(316856) c5(316857, 316858, 316859, 316860, 316861, 316862) c6( ) c7(eR); #c1(ANKFY1) c2(XP_011522234) c3(rabankyrin-5 isoform X6) c4( ) c5(316863, 316864, 316865, 316866, 316867, 316868) c6( ) c7(eR); #c1(ANKFY1) c2(XP_011522235) c3(rabankyrin-5 isoform X7) c4( ) c5(316869) c6( ) c7(eR); #c1(ANKH) c2(NP_473368) c3(progressive ankylosis protein homolog) c4(230451, 230452) c5(230453, 230454, 230455, 230456, 230457, 230458, 230459, 230460, 230461, 230462, 230463, 230464) c6( ) c7(dP, VC, bA, ai, mR, cc, rw, ha, Az, VI, U, v, VG, VD, IS, VK, VQ, VH, sg, VF); #c1(ANKHD1) c2(NP_060217) c3(ankyrin repeat and KH domain-containing protein 1 isoform 1) c4(194781, 194782, 194783) c5(194784, 194785, 194786, 194787, 194788, 194789, 194790, 194791, 194792, 194793, 194794, 194795, 194796, 194797, 194798, 194799, 194800, 194801, 194802, 194803, 194804, 194805, 194806, 194807, 194808, 194809, 194810, 194811, 194812, 194813, 194814, 194815, 194816, 194817, 194818) c6( ) c7(ck, T, fd, hF, ae, ad); #c1(ANKHD1) c2(NP_060448) c3(ankyrin repeat and KH domain-containing protein 1 isoform 2) c4(195986) c5(195987, 195988, 195989, 195990, 195991, 195992) c6( ) c7(ck, T, fd, hF, ae, ad); #c1(ANKHD1) c2(NP_078944) c3(ankyrin repeat and KH domain-containing protein 1 isoform 3) c4(216216) c5(216217, 216218, 216219, 216220, 216221, 216222) c6( ) c7(ck, T, fd, hF, ae, ad); #c1(ANKHD1-EIF4EBP3) c2(NP_065741) c3(ANKHD1-EIF4EBP3 protein) c4(205137, 205138, 205139, 205140) c5(205141, 205142, 205143, 205144, 205145, 205146, 205147, 205148, 205149, 205150, 205151, 205152, 205153) c6( ) c7(hF, T, ae, ad, fd); #c1(ANKK1) c2(NP_848605) c3(ankyrin repeat and protein kinase domain-containing protein 1) c4(253949) c5(253950, 253951, 253952, 253953, 253954, 253955) c6( ) c7(GI, uK, VR, rG, jd, He, ht, VT, bO, Gd, hy, bS, uu, ct, v, VV, aR, no, il, Gw, dL, bK, K, oi, he, na, hZ, Jj, kl, Gv, Y, Z, jb, tl, FT, hq, pH, VS, ag, Gs, VU, sv, Gu, IB); #c1(ANKLE1) c2(NP_001265373) c3(ankyrin repeat and LEM domain-containing protein 1 isoform 3) c4(98383) c5(98384, 98385, 98386, 98387, 98388, 98389, 98390, 98391, 98392, 98393, 98394, 98395, 98396, 98397, 98398) c6( ) c7(t, aT); #c1(ANKLE1) c2(NP_689576) c3(ankyrin repeat and LEM domain-containing protein 1 isoform 1) c4(243111, 243112) c5(243113, 243114, 243115, 243116, 243117, 243118, 243119, 243120, 243121, 243122) c6( ) c7(t, aT); #c1(ANKLE2) c2(NP_055929) c3(ankyrin repeat and LEM domain-containing protein 2) c4(184497) c5(184498, 184499, 184500, 184501, 184502, 184503, 184504) c6( ) c7(y, TC); #c1(ANKLE2) c2(XP_005266216) c3(ankyrin repeat and LEM domain-containing protein 2 isoform X1) c4(279950) c5(279951, 279952, 279953, 279954, 279955) c6( ) c7(y, TC); #c1(ANKLE2) c2(XP_011533090) c3(ankyrin repeat and LEM domain-containing protein 2 isoform X3) c4(329281) c5(329282, 329283, 329284, 329285, 329286, 329287) c6( ) c7(y, TC); #c1(ANKMY1) c2(NP_001269700) c3(ankyrin repeat and MYND domain-containing protein 1 isoform 3) c4( ) c5(102602) c6( ) c7(af); #c1(ANKMY1) c2(NP_001269710) c3(ankyrin repeat and MYND domain-containing protein 1 isoform 5) c4(102676) c5(ID2677, 102678, 102679, 102680, 102681) c6( ) c7(af); #c1(ANKMY1) c2(NP_057636) c3(ankyrin repeat and MYND domain-containing protein 1 isoform 1) c4( ) c5(191994, 191995, 191996, 191997, 191998, 191999, 192000, 192001) c6( ) c7(af); #c1(ANKMY1) c2(NP_060314) c3(ankyrin repeat and MYND domain-containing protein 1 isoform 2) c4( ) c5(195372, 195373, 195374, 195375, 195376, 195377, 195378, 195379, 195380, 195381, 195382, 195383, 195384, 195385, 195386, 195387) c6( ) c7(af); #c1(ANKMY1) c2(XP_011509603) c3(ankyrin repeat and MYND domain-containing protein 1 isoform X2) c4(300177) c5(300178) c6( ) c7(af); #c1(ANKMY1) c2(XP_011509615) c3(ankyrin repeat and MYND domain-containing protein 1 isoform X12) c4(300179, 300180) c5( ) c6( ) c7(af); #c1(ANKMY1) c2(XP_011509620) c3(ankyrin repeat and MYND domain-containing protein 1 isoform X18) c4(300181) c5(300182, 300183) c6( ) c7(af); #c1(ANKMY1) c2(XP_011509621) c3(ankyrin repeat and MYND domain-containing protein 1 isoform X19) c4( ) c5(300184, 300185, 300186, 300187, 300188, 300189, 300190, 300191, 300192, 300193, 300194, 300195, 300196) c6( ) c7(af); #c1(ANKMY1) c2(XP_011509624) c3(ankyrin repeat and MYND domain-containing protein 1 isoform X22) c4(300197, 300198) c5(300199, 300200, 300201, 300202, 300203, 300204) c6( ) c7(af); #c1(ANKRD1) c2(NP_055206) c3(ankyrin repeat domain-containing protein 1) c4(179819) c5(179820, 179821, 179822, 179823, 179824, 179825) c6( ) c7(T, nA, cd, dP, bv, cc, Bc, dE, vc, K, aq, VW, g, t, c, wK, hc, mx, II, m, im, bD, B); #c1(ANKRD10) c2(NP_001273650) c3(ankyrin repeat domain-containing protein 10 isoform 2) c4(105550) c5(105551, 105552, 105553, 105554, 105555) c6( ) c7(ey); #c1(ANKRD10) c2(NP_060134) c3(ankyrin repeat domain-containing protein 10 isoform 1) c4(194347) c5(194348, 194349, 194350, 194351, 194352, 194353, 194354) c6( ) c7(ey); #c1(ANKRD11) c2(NP_037407) c3(ankyrin repeat domain-containing protein 11) c4(175341, 175342) c5(175343, 175344, 175345, 175346, 175347, 175348, 175349, 175350, 175351, 175352) c6( ) c7(VY, VX, aW, aT, nA, rz, cd, bN); #c1(ANKRD11) c2(XP_006721247) c3(ankyrin repeat domain-containing protein 11 isoform X5) c4( ) c5(293896, 293897, 293898, 293899, 293900, 293901, 293902, 293903, 293904) c6( ) c7(VY, VX, aW, aT, nA, rz, cd, bN); #c1(ANKRD11) c2(XP_011521359) c3(ankyrin repeat domain-containing protein 11 isoform X4) c4(316188) c5(316189, 316190, 316191, 316192, 316193, 316194) c6( ) c7(VY, VX, aW, aT, nA, rz, cd, bN); #c1(ANKRD12) c2(NP_001190985) c3(ankyrin repeat domain-containing protein 12 isoform 2) c4(80400, 80401) c5(80402, 80403, 80404, 80405, 80406, 80407, 80408, 80409, 80410, 80411, 80412, 80413) c6( ) c7(aW, aC, aT); #c1(ANKRD12) c2(NP_056023) c3(ankyrin repeat domain-containing protein 12 isoform 1) c4(185207) c5(185208, 185209, 185210, 185211, 185212, 185213, 185214) c6( ) c7(aW, aC, aT); #c1(ANKRD12) c2(XP_005258153) c3(ankyrin repeat domain-containing protein 12 isoform X3) c4(275526) c5( ) c6( ) c7(aW, aC, aT); #c1(ANKRD12) c2(XP_011523940) c3(ankyrin repeat domain-containing protein 12 isoform X4) c4(318465) c5(318466, 318467, 318468, 318469, 318470, 318471) c6( ) c7(aW, aC, aT); #c1(ANKRD12) c2(XP_011523941) c3(ankyrin repeat domain-containing protein 12 isoform X5) c4(318472) c5(318473, 318474, 318475, 318476, 318477, 318478, 318479, 318480, 318481, 318482, 318483) c6( ) c7(aW, aC, aT); #c1(ANKRD18A) c2(NP_671728) c3(ankyrin repeat domain-containing protein 18A) c4(242167) c5(242168, 242169, 242170, 242171, 242172, 242173) c6( ) c7(av); #c1(ANKRD18A) c2(XP_011516135) c3(ankyrin repeat domain-containing protein 18A isoform X4) c4(309355) c5( ) c6( ) c7(av); #c1(ANKRD18A) c2(XP_011516142) c3(ankyrin repeat domain-containing protein 18A isoform X11) c4(309356) c5( ) c6( ) c7(av); #c1(ANKRD18A) c2(XP_011516143) c3(ankyrin repeat domain-containing protein 18A isoform X12) c4( ) c5(309357, 309358, 309359, 309360, 309361, 309362, 309363, 309364, 309365, 309366, 309367, 309368) c6( ) c7(av); #c1(ANKRD2) c2(NP_001123453) c3(ankyrin repeat domain-containing protein 2 isoform b) c4(47100, 47101) c5(47102, 47103, 47104, 47105, 47106, 47107, 47108, 47109, 47110, 47111, 47112) c6( ) c7(bv, VZ, c, oe, aj, fr, J); #c1(ANKRD2) c2(NP_001278147) c3(ankyrin repeat domain-containing protein 2 isoform c) c4( ) c5(109484, 109485) c6( ) c7(bv, VZ, c, oe, aj, fr, J); #c1(ANKRD2) c2(NP_001278148) c3(ankyrin repeat domain-containing protein 2 isoform d) c4( ) c5(109486) c6( ) c7(bv, VZ, c, oe, aj, fr, J); #c1(ANKRD2) c2(NP_065082) c3(ankyrin repeat domain-containing protein 2 isoform a) c4(203764, 203765) c5(203766, 203767, 203768, 203769, 203770, 203771, 203772, 203773, 203774, 203775) c6( ) c7(bv, VZ, c, oe, aj, fr, J); #c1(ANKRD23) c2(NP_659431) c3(ankyrin repeat domain-containing protein 23) c4(239842, 239843) c5(239844, 239845, 239846, 239847, 239848, 239849, 239850, 239851, 239852, 239853, 239854, 239855, 239856, 239857, 239858, 239859) c6( ) c7(bL); #c1(ANKRD26) c2(NP_055730) c3(ankyrin repeat domain-containing protein 26 isoform 1) c4(183159, 183160) c5(183161, 183162, 183163, 183164, 183165, 183166) c6( ) c7(ck, hF, dX, v, Wa); #c1(ANKRD26) c2(XP_006717491) c3(ankyrin repeat domain-containing protein 26 isoform X10) c4(291147) c5(291148, 291149, 291150, 291151, 291152, 291153) c6( ) c7(ck, hF, dX, v, Wa); #c1(ANKRD26) c2(XP_011517725) c3(ankyrin repeat domain-containing protein 26 isoform X9) c4(311508) c5( ) c6( ) c7(ck, hF, dX, v, Wa); #c1(ANKRD26) c2(XP_011517726) c3(ankyrin repeat domain-containing protein 26 isoform X12) c4( ) c5(311509, 311510, 311511, 311512, 311513, 311514, 311515, 311516, 311517, 311518, 311519, 311520) c6( ) c7(ck, hF, dX, v, Wa); #c1(ANKRD28) c2(NP_056014) c3(serine/threonine-protein phosphatase 6 regulatory ankyrin repeat subunit A isoform a) c4(185140) c5(185141, 185142, 185143, 185144, 185145, 185146, 185147, 185148, 185149, 185150) c6( ) c7(bt); #c1(ANKRD28) c2(XP_011531842) c3(serine/threonine-protein phosphatase 6 regulatory ankyrin repeat subunit A isoform X2) c4(327911) c5(327912, 327913, 327914, 327915, 327916, 327917) c6( ) c7(bt); #c1(ANKRD30A) c2(NP_443723) c3(ankyrin repeat domain-containing protein 30A) c4(230017) c5(230018, 230019, 230020, 230021, 230022, 230023) c6( ) c7(T, aW, aT, ci, AO, ad); #c1(ANKRD36) c2(NP_001157787) c3(ankyrin repeat domain-containing protein 36A) c4(62652, 62653, 62654) c5(62655, 62656, 62657, 62658, 62659, 62660, 62661, 62662, 62663, 62664, 62665, 62666, 62667, 62668, 62669, 62670, 62671) c6( ) c7(fq, VM); #c1(ANKRD36) c2(XP_006712577) c3(ankyrin repeat domain-containing protein 36A isoform X1) c4(286729) c5(286730) c6( ) c7(fq, VM); #c1(ANKRD36) c2(XP_006712579) c3(ankyrin repeat domain-containing protein 36A isoform X2) c4(286731) c5( ) c6( ) c7(fq, VM); #c1(ANKRD36) c2(XP_011509437) c3(ankyrin repeat domain-containing protein 36A isoform X6) c4(300020) c5( ) c6( ) c7(fq, VM); #c1(ANKRD36) c2(XP_011509438) c3(ankyrin repeat domain-containing protein 36A isoform X7) c4(300021) c5( ) c6( ) c7(fq, VM); #c1(ANKRD36) c2(XP_011509439) c3(ankyrin repeat domain-containing protein 36A isoform X8) c4(300022) c5( ) c6( ) c7(fq, VM); #c1(ANKRD36) c2(XP_011509447) c3(ankyrin repeat domain-containing protein 36A isoform X13) c4( ) c5(300023, 300024, 300025, 300026, 300027, 300028, 300029, 300030, 300031, 300032, 300033, 300034, 300035, 300036, 300037, 300038) c6( ) c7(fq, VM); #c1(ANKRD368) c2(NP_079466) c3(ankyrin repeat domain-containing protein 36B) c4( ) c5(218208) c6( ) c7(T, dA, v, ci, eA, q, hd, aT, d, aW, Y, oV, ff, r, aq, en, bu, bz, iP, eM, nB, eD, B); #c1(ANKRD36B) c2(XP_011509847) c3(ankyrin repeat domain-containing protein 36B isoform X4) c4(300436) c5( ) c6( ) c7(T, dA, v, ci, eA, q, hd, aT, d, aW, Y, oV, ff, r, aq, en, bu, bz, iP, eM, nB, eD, B); #c1(ANKRD368) c2(XP_011509854) c3(ankyrin repeat domain-containing protein 36B isoform X11) c4( ) c5(300437, 300438, 300439, 300440, 300441, 300442, 300443, 300444, 300445, 300446, 300447) c6( ) c7(T, dA, v, ci, eA, q, hd, aT, d, aW, Y, oV, ff, r, aq, en, bu, bz, iP, eM, nB, eD, B); #c1(ANKRD37) c2(NP_859077) c3(ankyrin repeat domain-containing protein 37) c4(255515, 255516) c5(255517, 255518, 255519, 255520, 255521, 255522, 255523, 255524, 255525, 255526, 255527, 255528) c6( ) c7(rx); #c1(ANKRD44) c2(NP_001182073) c3(serine/threonine-protein phosphatase 6 regulatory ankyrin repeat subunit B isoform A) c4(74559, 74560) c5(74561, 74562, 74563, 74564, 74565, 74566, 74567, 74568, 74569, 74570, 74571, 74572, 74573, 74574, 74575, 74576, 74577, 74578, 74579, 74580, 74581, 74582, 74583, 74584, 74585, 74586, 74587, 74588, 74589, 74590, 74591, 74592, 74593, 74594) c6( ) c7(Wb, Ea); #c1(ANKRD44) c2(NP_710181) c3(serine/threonine-protein phosphatase 6 regulatory ankyrin repeat subunit B isoform B) c4( ) c5(246548, 246549, 246550, 246551, 246552, 246553) c6( ) c7(Wb, Ea); #c1(ANKRD44) c2(XP_005247002) c3(serine/threonine-protein phosphatase 6 regulatory ankyrin repeat subunit B isoform X1) c4(267589) c5( ) c6( ) c7(Wb, Ea); #c1(ANKRD44) c2(XP_005247003) c3(serine/threonine-protein phosphatase 6 regulatory ankyrin repeat subunit B isoform X2) c4(267590, 267591, 267592) c5( ) c6( ) c7(Wb, Ea); #c1(ANKRD45) c2(XP_011507772) c3(ankyrin repeat domain-containing protein 45 isoform X1) c4(297836) c5(297837, 297838, 297839, 297840, 297841, 297842) c6( ) c7(W); #c1(ANKRD46) c2(NP_001257308) c3(ankyrin repeat domain-containing protein 46 isoform 2) c4(95114, 95115, 95116, 95117, 95118) c5(95119, 95120, 95121, 95122, 95123, 95124) c6( ) c7(T); #c1(ANKRD46) c2(XP_006716572) c3(ankyrin repeat domain-containing protein 46 isoform X1) c4(290380) c5(290381, 290382, 290383, 290384, 290385, 290386, 290387, 290388, 290389, 290390, 290391, 290392, 290393, 290394, 290395, 290396, 290397, 290398, 290399, 290400, 290401, 290402, 290403, 290404, 290405, 290406, 290407, 290408, 290409, 290410, 290411, 290412, 290413, 290414, 290415, 290416, 290417, 290418) c6( ) c7(T); #c1(ANKRD50) c2(NP_001161354) c3(ankyrin repeat domain-containing protein 50 isoform 2) c4(65631) c5(65632, 65633, 65634, 65635, 65636, 65637) c6( ) c7(fq); #c1(ANKRD50) c2(NP_065070) c3(ankyrin repeat domain-containing protein 50 isoform 1) c4(203609) c5(203610, 203611, 203612, 203613, 203614, 203615, 203616, 203617) c6( ) c7(fq); #c1(ANKRD55) c2(NP_078945) c3(ankyrin repeat domain-containing protein 55) c4(216223, 216224) c5(216225, 216226, 216227, 216228, 216229, 216230, 216231, 216232, 216233, 216234) c6( ) c7(bL, cz, NI, y, V, ad); #c1(ANKRD55) c2(XP_006714754) c3(ankyrin repeat domain-containing protein 55 isoform X1) c4( ) c5(288099, 288100, 288101, 288102, 288103, 288104) c6( ) c7(bL, cz, NI, y, V, ad); #c1(ANKRD6) c2(NP_001229738) c3(ankyrin repeat domain-containing protein 6 isoform a) c4(85008, 85009, 85010) c5(85011, 85012, 85013, 85014, 85015, 85016, 85017, 85018, 85019, 85020) c6( ) c7(aw, ac, eM); #c1(ANKRD6) c2(NP_001229742) c3(ankyrin repeat domain-containing protein 6 isoform c) c4(85021) c5(85022, 85023, 85024, 85025, 85026, 85027, 85028, 85029, 85030, 85031, 85032, 85033, 85034, 85035, 85036, 85037, 85038, 85039) c6( ) c7(aw, ac, eM); #c1(ANKRD6) c2(NP_001229743) c3(ankyrin repeat domain-containing protein 6 isoform d) c4(85040, 85041) c5(85042, 85043, 85044, 85045, 85046, 85047, 85048, 85049, 85050, 85051, 85052, 85053, 85054, 85055, 85056, 85057, 85058, 85059) c6( ) c7(aw, ac, eM); #c1(ANKRD6) c2(NP_055757) c3(ankyrin repeat domain-containing protein 6 isoform b) c4(183322) c5(183323, 183324, 183325, 183326, 183327, 183328) c6( ) c7(aw, ac, eM); #c1(ANKRD6) c2(XP_011533901) c3(ankyrin repeat domain-containing protein 6 isoform X9) c4(330103) c5( ) c6( ) c7(aw, ac, eM); #c1(ANKRD7) c2(NP_062618) c3(ankyrin repeat domain-containing protein 7) c4(202035, 202036, 202037) c5(202038, 202039, 202040, 202041, 202042, 202043, 202044, 202045, 202046, 202047, 202048, 202049, 202050, 202051, 202052, 202053, 202054, 202055) c6( ) c7(aC, fq, j, Ea, sj); #c1(ANKS1A) c2(NP_056060) c3(ankyrin repeat and SAM domain-containing protein 1A) c4(185439, 185440, 185441, 185442) c5(185443, 185444, 185445, 185446, 185447, 185448, 185449, 185450, 185451, 185452, 185453, 185454, 185455, 185456, 185457, 185458, 185459, 185460, 185461, 185462, 185463, 185464, 185465) c6( ) c7(j, eZ); #c1(ANKS1A) c2(XP_011512739) c3(ankyrin repeat and SAM domain-containing protein 1A isoform X9) c4( ) c5(303768) c6( ) c7(j, eZ); #c1(ANKS1B) c2(NP_001190995) c3(ankyrin repeat and sterile alpha motif domain-containing protein 1B isoform e) c4(80455, 80456) c5(80457, 80458, 80459, 80460, 80461, 80462, 80463, 80464, 80465, 80466, 80467) c6( ) c7(ck, bF, ou, FO, e, aw, FP, EQ, r, aj, k, jj, fq); #c1(ANKS1B) c2(NP_001190996) c3(ankyrin repeat and sterile alpha motif domain-containing protein 1B isoform f) c4( ) c5(80468, 80469, 80470, 80471, 80472, 80473) c6( ) c7(ck, bF, ou, FO, e, aw, FP, EQ, r, aj, k, jj, fq) #c1(ANKS1B) c2(NP_001190997) c3(ankyrin repeat and sterile alpha motif domain-containing protein 1B isoform g) c4(80474) c5(80475, 80476, 80477, 80478, 80479, 80480) c6( ) c7(ck, bF, ou, FO, e, aw, FP, EQ, r, aj, k, jj, fq); #c1(ANKS1B) c2(NP_001190998) c3(ankyrin repeat and sterile alpha motif domain-containing protein 1B isoform h) c4(80481, 80482) c5(80483, 80484, 80485, 80486, 80487, 80488, 80489, 80490, 80491, 80492, 80493, 80494, 80495) c6( ) c7(ck, bF, ou, FO, e, aw, FP, EQ, r, aj, k, jj, fq); #c1(ANKS1B) c2(NP_001190999) c3(ankyrin repeat and sterile alpha motif domain-containing protein 1B isoform i) c4(80496) c5(80497, 80498, 80499, 80500, 80501, 80502) c6( ) c7(ck, bF, ou, FO, e, aw, FP, EQ, r, aj, k, jj, fq); #c1(ANKS1B) c2(NP_001191010) c3(ankyrin repeat and sterile alpha motif domain-containing protein 1B isoform 1) c4( ) c5(80544, 80545, 80546, 80547, 80548) c6( ) c7(ck, bF, ou, FO, e, aw, FP, EQ, r, aj, k, jj, fq); #c1(ANKS1B) c2(NP_064525) c3(ankyrin repeat and sterile alpha motif domain-containing protein 1B isoform c) c4(202864) c5(202865, 202866, 202867, 202868, 202869, 202870) c6( ) c7(ck, bF, ou, FO, e, aw, FP, EQ, r, aj, k, jj, fq); #c1(ANKS1B) c2(NP_690001) c3(ankyrin repeat and sterile alpha motif domain-containing protein 1B isoform a) c4(244688, 244689, 244690) c5(244691, 244692, 244693, 244694, 244695, 244696, 244697, 244698, 244699, 244700, 244701, 244702, 244703) c6( ) c7(ck, bF, ou, FO, e, aw, FP, EQ, r, aj, k, jj, fq); #c1(ANKS1B) c2(NP_858056) c3(ankyrin repeat and sterile alpha motif domain-containing protein 1B isoform b) c4(255319) c5(255320, 255321, 255322, 255323, 255324, 255325) c6( ) c7(ck, bF, ou, FO, e, aw, FP, EQ, r, aj, k, jj, fq); #c1(ANKS1B) c2(XP_006719576) c3(ankyrin repeat and sterile alpha motif domain-containing protein 1B isoform X16) c4(292639) c5( ) c6( ) c7(ck, bF, ou, FO, e, aw, FP, EQ, r, aj, k, jj, fq); #c1(ANKS1B) c2(XP_006719577) c3(ankyrin repeat and sterile alpha motif domain-containing protein 1B isoform X17) c4(292640, 292641) c5(292642, 292643, 292644, 292645, 292646, 292647, 292648, 292649, 292650, 292651, 292652, 292653) c6( ) c7(ck, bF, ou, FO, e, aw, FP, EQ, r, aj, k, jj, fq); #c1(ANKS4B) c2(NP_665872) c3(ankyrin repeat and SAM domain-containing protein 4B) c4(241878) c5(241879, 241880, 241881, 241882, 241883, 241884) c6( ) c7(Pw, Pv, Pu); #c1(ANKS6) c2(NP_775822) c3(ankyrin repeat and SAM domain-containing protein 6) c4(250425, 250426) c5(250427, 250428, 250429, 250430, 250431, 250432, 250433, 250434, 250435, 250436, 250437, 250438) c6( ) c7(Na, eR, BV, al, vm, Nc, aY, Wc); #c1(ANKS6) c2(XP_006717061) c3(ankyrin repeat and SAM domain-containing protein 6 isoform X3) c4(290671) c5(290672, 290673, 290674, 290675, 290676, 290677) c6( ) c7(Na, eR, BV, al, vm, Nc, aY, Wc); #c1(ANLN) c2(NP_001271230) c3(actin-binding protein anillin isoform 2) c4(103666) c5(103667, 103668, 103669, 103670, 103671, 103672) c6( ) c7(eM, kl, fq, B, bz); #c1(ANLN) c2(NP_061155) c3(actin-binding protein anillin isoform 1) c4(199631) c5(199632, 199633, 199634, 199635, 199636, 199637) c6( ) c7(eM, kl, fq, B, bz); #c1(ANO1) c2(NP_060513) c3(anoctamin-1) c4(196302, 196303) c5(196304, 196305, 196306, 196307, 196308, 196309, 196310, 196311, 196312, 196313, 196314, 196315) c6( ) c7(bM, T, pa, QG, hW, op, aW, iW, Wf, Ls, vA, aT, aA, Wd, ao, aF, ci, fb, iK, iJ, We); #c1(ANO1) c2(XP_006718668) c3(anoctamin-1 isoform X12) c4(291951) c5(291952, 291953, 291954, 291955, 291956, 291957, 291958, 291959, 291960, 291961, 291962, 291963, 291964, 291965) c6( ) c7(bM, T, pa, QG, hW, op, aW, iW, Wf, Ls, vA, aT, aA, Wd, ao, aF, ci, fb, iK, iJ, We); #c1(ANO1) c2(XP_011543429) c3(anoctamin-1 isoform X7) c4(342320) c5(342321, 342322, 342323, 342324, 342325, 342326) c6( ) c7(bM, T, pa, QG, hW, op, aW, iW, Wf, Ls, vA, aT, aA, Wd, ao, aF, ci, fb, iK, iJ, We); #c1(ANO1) c2(XP_011543430) c3(anoctamin-1 isoform X8) c4( ) c5(342327, 342328) c6( ) c7(bM, T, pa, QG, hW, op, aW, iW, Wf, Ls, vA, aT, aA, Wd, ao, aF, ci, fb, iK, iJ, We); #c1(ANO1) c2(XP_011543432) c3(anoctamin-1 isoform X11) c4(342329) c5( ) c6( ) c7(bM, T, pa, QG, hW, op, aW, iW, Wf, Ls, vA, aT, aA, Wd, ao, aF, ci, fb, iK, iJ, We); #c1(ANO1) c2(XP_011543433) c3(anoctamin-1 isoform X13) c4(342330) c5(342331, 342332, 342333, 342334, 342335, 342336) c6( ) c7(bM, T, pa, QG, hW, op, aW, iW, Wf, Ls, vA, aT, aA, Wd, ao, aF, ci, fb, iK, iJ, We); #c1(ANO10) c2(NP_001191760) c3(anoctamin-10 isoform 2) c4(81670) c5(81671, 81672, 81673, 81674, 81675, 81676) c6( ) c7(Wg, ac, ky); #c1(ANO10) c2(NP_001191761) c3(anoctamin-10 isoform 3) c4(81677) c5(81678, 81679, 81680, 81681, 81682, 81683) c6( ) c7(Wg, ac, ky); #c1(ANO10) c2(NP_001191762) c3(anoctamin-10 isoform 4) c4(81684) c5(81685, 81686, 81687, 81688, 81689, 81690) c6( ) c7(Wg, ac, ky); #c1(ANO10) c2(NP_001191763) c3(anoctamin-10 isoform 5) c4(81691, 81692, 81693, 81694, 81695, 81696) c5(81697, 81698, 81699, 81700, 81701, 81702, 81703, 81704, 81705, 81706, 81707, 81708, 81709, 81710, 81711, 81712, 81713, 81714, 81715, 81716, 81717, 81718, 81719, 81720, 81721, 81722, 81723, 81724, 81725, 81726, 81727, 81728, 81729, 81730, 81731, 81732, 81733, 81734, 81735, 81736, 81737, 81738) c6( ) c7(Wg, ac, ky); #c1(ANO10) c2(NP_060545) c3(anoctamin-10 isoform 1) c4(196492) c5(196493, 196494, 196495, 196496, 196497, 196498) c6( ) c7(Wg, ac, ky); #c1(ANO10) c2(XP_011532185) c3(anoctamin-10 isoform X1) c4(328232) c5( ) c6( ) c7(Wg, ac, ky); #c1(ANO2) c2(NP_001265525) c3(anoctamin-2 isoform 1) c4(98733) c5(98734, 98735, 98736, 98737, 98738, 98739) c6( ) c7(qk, Wh, ww); #c1(ANO2) c2(NP_001265526) c3(anoctamin-2 isoform 2) c4(98740, 98741, 98742) c5(98743, 98744, 98745, 98746, 98747, 98748, 98749, 98750, 98751, 98752, 98753, 98754, 98755, 98756, 98757, 98758, 98759, 98760) c6( ) c7(qk, Wh, ww); #c1(ANO2) c2(XP_011519280) c3(anoctamin-2 isoform X5) c4(313920) c5( ) c6( ) c7(qk, Wh, ww); #c1(ANO2) c2(XP_011519287) c3(anoctamin-2 isoform X11) c4( ) c5(313921, 313922, 313923, 313924, 313925, 313926) c6( ) c7(qk, Wh, ww); #c1(ANO3) c2(NP_113606) c3(anoctamin-3) c4(221689, 221690, 221691) c5(221692, 221693, 221694, 221695, 221696, 221697) c6( ) c7(Gt, Wi, Wk, aU, v, j, Wl, Wm, Wj, fq, aH); #c1(ANO4) c2(NP_001273545) c3(anoctamin-4 isoform 1) c4( ) c5(105153, 105154, 105155, 105156, 105157, 105158, 105159, 105160, 105161, 105162, 105163, 105164, 105165, 105166) c6( ) c7(dP, IB, fq, cd); #c1(ANO4) c2(NP_849148) c3(anoctamin-4 isoform 2) c4(254294) c5(254295, 254296, 254297, 254298, 254299) c6( ) c7(dP, IB, fq, cd); #c1(ANO4) c2(XP_011536214) c3(anoctamin-4 isoform X2) c4(333527) c5(333528, 333529, 333530, 333531) c6( ) c7(dP, IB, fq, cd); #c1(ANO4) c2(XP_011536217) c3(anoctamin-4 isoform X4) c4(333532, 333533) c5( ) c6( ) c7(dP, IB, fq, cd); #c1(ANO4) c2(XP_011536218) c3(anoctamin-4 isoform X5) c4( ) c5(333534, 333535, 333536, 333537) c6( ) c7(dP, IB, fq, cd); #c1(ANO4) c2(XP_011536220) c3(anoctamin-4 isoform X8) c4( ) c5(333538, 333539, 333540, 333541, 333542) c6( ) c7(dP, IB, fq, cd); #c1(ANO5) c2(NP_998764) c3(anoctamin-5 isoform a) c4(265875) c5(265876, 265877, 265878, 265879, 265880, 265881) c6( ) c7(cc, Rk, Wo, Wn, Ws, FB, xs, mx, oj, Ak, km, Wd, Wp, R, Wr, H, Wq, If); #c1(ANO6) c2(NP_001020527) c3(anoctamin-6 isoform a) c4(28828) c5(28829, 28830, 28831, 28832, 28833, 28834) c6( ) c7(dY, mR, jC); #c1(ANO6) c2(NP_001136150) c3(anoctamin-6 isoform b) c4(54425) c5(54426, 54427, 54428, 54429, 54430, 54431) c6( ) c7(dY, mR, jC); #c1(ANO6) c2(NP_001136151) c3(anoctamin-6 isoform c) c4(54432) c5(54433, 54434, 54435, 54436, 54437, 54438, 54439, 54440, 54441, 54442) c6( ) c7(dY, mR, jC); #c1(ANO6) c2(NP_001191732) c3(anoctamin-6 isoform d) c4(81627) c5(81628, 81629, 81630, 81631, 81632, 81633, 81634) c6( ) c7(dY, mR, jC); #c1(ANO7) c2(NP_001001666) c3(anoctamin-7 isoform NGEP-short) c4(18943) c5(18944, 18945, 18946, 18947, 18948, 18949) c6( ) c7(T, ae, ad, g); #c1(ANO7) c2(NP_001001891) c3(anoctamin-7 isoform NGEP-long) c4(19105) c5(19106, 19107, 19108, 19109, 19110, 19111, 19112) c6( ) c7(T, ae, ad, g); #c1(AN07) c2(XP_011509558) c3(anoctamin-7 isoform X1) c4( ) c5(300136) c6( ) c7(T, ae, ad, g); #c1(ANO7) c2(XP_011509565) c3(anoctamin-7 isoform X8) c4(300137) c5(300138, 300139, 300140, 300141, 300142, 300143) c6( ) c7(T, ae, ad, g); #c1(ANO7) c2(XP_011509572) c3(anoctamin-7 isoform X15) c4( ) c5(300144) c6( ) c7(T, ae, ad, g); #c1(ANO7) c2(XP_011509575) c3(anoctamin-7 isoform X18) c4( ) c5(300145, 300146, 300147, 300148, 300149) c6( ) c7(T, ae, ad, g); #c1(ANP32A) c2(NP_006296) c3(acidic leucine-rich nuclear phosphoprotein 32 family member A) c4(163773, 163774) c5(163775, 163776, 163777, 163778, 163779, 163780, 163781, 163782, 163783, 163784, 163785, 163786, 163787) c6( ) c7(ae, T, av, aE, aW, aT, aq, Kh, ci, AO, KM, B, ad); #c1(ANP32B) c2(NP_006392) c3(acidic leucine-rich nuclear phosphoprotein 32 family member B) c4(164649, 164650) c5(164651, 164652, 164653, 164654, 164655, 164656, 164657, 164658, 164659, 164660, 164661, 164662) c6( ) c7(bM, T, fM, aw, eX, fd, j, V, eA, q, Wu, h, eV, ji, d, s, cW, ff, eZ, r, aF, en, eE, ve, Wt, bE, cj, eo, If, y); #c1(ANP32D) c2(NP_036536) c3(acidic leucine-rich nuclear phosphoprotein 32 family member D) c4(174271) c5(174272, 174273, 174274, 174275, 174276, 174277) c6( ) c7(ae, ci, ad); #c1(ANPEP) c2(NP_001141) c3(aminopeptidase N precursor) c4(60068, 60069, 60070) c5(60071, 60072, 60073, 60074, 60075, 60076) c6( ) c7(Wx, T, dD, dA, fR, Wz, ea, rQ, WA, oA, bs, cz, bB, bO, v, eq, ci, Ww, pl, fd, aY, hF, cd, br, ad, ip, x, av, eW, hd, GL, Wy, WB, aT, aU, cy, iY, ji, ox, jj, ae, bc, iL, cY, iU, xR, aW, Y, xs, hl, eH, aq, lo, jh, hp, g, Fu, hJ, eF, iR, bw, Wv, ck, eM, nB, bE, cj, m, k, y, bt, B, ps); #c1(ANPEP) c2(XP_011519776) c3(aminopeptidase N isoform X2) c4( ) c5(314455, 314456, 314457, 314458, 314459, 314460, 314461, 314462, 314463, 314464, 314465, 314466) c6( ) c7(Wx, T, dD, dA, fR, Wz, ea, rQ, WA, oA, bs, cz, bB, bO, v, eq, ci, Ww, pl, fd, aY, hF, cd, br, ad, ip, x, av, eW, hd, GL, Wy, WB, aT, aU, cy, iY, ji, ox, jj, ae, bc, iL, cY, iU, xR, aW, Y, xs, hl, eH, aq, lo, jh, hp, g, Fu, hJ, eF, iR, bw, Wv, ck, eM, nB, bE, cj, m, k, y, bt, B, ps); #c1(ANTXR1) c2(NP_060623) c3(anthrax toxin receptor 1 isoform 3 precursor) c4(196877) c5(196878, 196879, 196880, 196881, 196882, 196883) c6( ) c7(DS, T, os, dD, aC, fR, id, ea, aw, ew, aA, bB, WD, oZ, jh, j, eq, nA, WC, q, ad, hb, WG, aT, h, ey, K, WF, cY, sb, d, kj, wr, aW, WE, Y, ff, r, nf, kp, aF, WJ, en, t, bz, WH, W, qe, bE, WK, cj, Km, m, ER, np, WI, bC, WL); #c1(ANTXR1) c2(NP_115584) c3(anthrax toxin receptor 1 isoform 1 precursor) c4(223281) c5(223282, 223283, 223284, 223285, 223286, 223287) c6( ) c7(DS, T, os, dD, aC, fR, id, ea, aw, ew, aA, bB, WD, oZ, jh, j, eq, nA, WC, q, ad, hb, WG, aT, h, ey, K, WF, cY, sb, d, kj, wr, aW, WE, Y, ff, r, nf, kp, aF, WJ, en, t, bz, WH, W, qe, bE, WK, cj, Km, m, ER, np, WI, bC, WL); #c1(ANTXR1) c2(NP_444262) c3(anthrax toxin receptor 1 isoform 2 precursor) c4(230168) c5(230169, 230170, 230171, 230172, 230173, 230174) c6( ) c7(DS, T, os, dD, aC, fR, id, ea, aw, ew, aA, bB, WD, oZ, jh, j, eq, nA, WC, q, ad, hb, WG, aT, h, ey, K, WF, cY, sb, d, kj, wr, aW, WE, Y, ff, r, nf, kp, aF, WJ, en, t, bz, WH, W, qe, bE, WK, cj, Km, m, ER, np, WI, bC, WL); #c1(ANTXR2) c2(NP_001139266) c3(anthrax toxin receptor 2 isoform 2 precursor) c4(59036, 59037) c5(59038, 59039, 59040, 59041, 59042, 59043) c6( ) c7(DS, T, if, jh, aA, cz, qN, hX, lg, aT, pk, qk, bA, cY, mR, je, aW, lo, aF, WM, iM, wR, WN, bt); #c1(ANTXR2) c2(NP_477520) c3(anthrax toxin receptor 2 isoform 1 precursor) c4(230800, 230801) c5(230802, 230803, 230804, 230805, 230806, 230807, 230808, 230809, 230810, 230811, 230812, 230813, 230814, 230815, 230816, 230817, 230818, 230819) c6( ) c7(DS, T, if, jh, aA, cz, qN, hX, lg, aT, pk, qk, bA, cY, mR, je, aW, lo, aF, WM, iM, wR, WN, bt); #c1(ANXA1) c2(XP_011516910) c3(annexin A1 isoform X2) c4(310403, 310404) c5(310405, 310406, 310407, 310408, 310409, 310410, 310411, 310412, 310413) c6( ) c7(T, aC, pf, WV, ci, aR, Bc, dV, hu, eL, aa, zQ, aW, Nz, Az, hl, Ku, g, as, eF, cm, WO, nB, WS, U, sw, ht, NT, fr, zP, qW, cd, BI, ft, ju, h, dL, A, fQ, fe, fq, kT, E, it, B, ek, bL, fM, Dh, fG, oe, WT, fZ, aA, cz, eA, zn, hb, aT, Oi, cy, bq, ae, af, eu, jf, Y, ev, fO, WQ, Pg, en, ck, ac, WP, hr, WU, dy, gT, rA, bt, ao, Gl, hl, id, jh, vr, Fb, Gn, Fc, ad, hX, dP, av, iC, hd, Db, yt, WR, ji, d, ff, xs, eH, eZ, Ej, Sm, iV, bz, eK, LB, D, y, xg, iu); #c1(ANXA1) c2(XP_011516911) c3(annexin A1 isoform X1) c4(310414) c5(310415, 310416, 310417, 310418, 310419, 310420, 310421, 310422, 310423, 310424, 310425, 310426, 310427) c6( ) c7(T, aC, pf, WV, ci, aR, Bc, dV, hu, eL, aa, zQ, aW, Nz, Az, hl, Ku, g, as, eF, cm, WO, nB, WS, U, sw, ht, NT, fr, zP, qW, cd, Bl, ft, ju, h, dL, A, fQ, fe, fq, kT, E, it, B, ek, bL, fM, Dh, fG, oe, WT, fZ, aA, cz, eA, zn, hb, aT, Oi, cy, bq, ae, af, eu, jf, Y, ev, fO, WQ, Pg, en, ck, ac, WP, hr, WU, dy, gT, rA, bt, ao, Gl, hl, id, jh, vr, Fb, Gn, Fc, ad, hX, dP, av, iC, hd, Db, yt, WR, ji, d, ff, xs, eH, eZ, Ej, Sm, iV, bz, eK, LB, D, y, xg, iu); #c1(ANXA10) c2(NP_009124) c3(annexin A10) c4(170882, 170883) c5(170884, 170885, 170886, 170887, 170888, 170889, 170890, 170891, 170892, 170893, 170894, 170895) c6( ) c7(B, BO, s, bE, pf, aA, bB, n, aF, ci, g, q, WW); #c1(ANXA10) c2(XP_011529873) c3(annexin A10 isoform X1) c4( ) c5(325647) c6( ) c7(B, BO, s, bE, pf, aA, bB, n, aF, ci, g, q, WW); #c1(ANXA11) c2(NP_001265336) c3(annexin A11 isoform 1) c4(98282) c5( ) c6( ) c7(A, cL, hp, m, t, gb, o, uQ); #c1(ANXA11) c2(NP_001265338) c3(annexin A11 isoform 2) c4(98283, 98284) c5(98285, 98286, 98287, 98288, 98289, 98290, 98291, 98292, 98293, 98294, 98295, 98296, 98297, 98298, 98299, 98300, 98301, 98302, 98303, 98304, 98305, 98306, 98307, 98308, 98309, 98310, 98311, 98312, 98313, 98314, 98315, 98316, 98317, 98318, 98319, 98320, 98321, 98322, 98323, 98324, 98325, 98326, 98327, 98328, 98329, 98330, 98331, 98332, 98333, 98334, 98335, 98336, 98337, 98338, 98339, 98340, 98341, 98342, 98343, 98344, 98345) c6( ) c7(A, cL, hp, m, t, gb, o, uQ); #c1(ANXA11) c2(XP_005269798) c3(annexin A11 isoform X2) c4(282866, 282867) c5(282868) c6( ) c7(A, cL, hp, m, t, gb, o, uQ); #c1(ANXA11) c2(XP_005269799) c3(annexin A11 isoform X3) c4(282869, 282870) c5(282871, 282872, 282873, 282874, 282875, 282876) c6( ) c7(A, cL, hp, m, t, gb, o, uQ); #c1(ANXA13) c2(NP_001003954) c3(annexin A13 isoform b) c4(20352) c5(20353, 20354, 20355, 20356, 20357, 20358) c6( ) c7(T, aC, ac, dV, kk, ad); #c1(ANXA13) c2(NP_004297) c3(annexin A13 isoform a) c4(144959) c5(144960, 144961, 144962, 144963, 144964, 144965) c6( ) c7(T, aC, ac, dV, kk, ad); #c1(ANXA2) c2(NP_001002858) c3(annexin A2 isoform 1) c4(19651, 19652, 19653, 19654, 19655) c5(19656, 19657, 19658, 19659, 19660, 19661, 19662, 19663, 19664, 19665, 19666, 19667, 19668, 19669, 19670, 19671, 19672, 19673, 19674, 19675, 19676, 19677, 19678) c6( ) c7(bM, T, aC, ea, fd, bB, ci, x, AW, aE, dV, ja, K, hu, dF, zQ, aW, Du, hl, g, as, eF, cm, bw, eM, iA, iT, vy, k, m, dD, zt, ht, qy, ez, n, aj, fr, uE, cd, ft, cU, db, Um, pi, hi, ge, aq, kp, mo, dB, Vy, bm, gg, Xa, fL, B, Dw, dA, aA, j, eA, J, eJ, Mp, WY, aT, jj, bq, ae, bA, iZ, Y, en, cl, t, iK, ck, kP, WP, bt, vi, id, qb, eq, mC, ad, hX, dP, av, py, yt, pq, WZ, uQ, gj, d, IR, cH, ff, xs, eH, cr, eZ, aF, bz, bE, ag, dX, aS, y, WX); #c1(ANXA2) c2(XP_011519778) c3(annexin A2 isoform X1) c4(314467, 314468, 314469, 314470, 314471, 314472, 314473, 314474) c5(314475, 314476, 314477, 314478, 314479, 314480, 314481, 314482, 314483, 314484, 314485, 314486, 314487, 314488, 314489, 314490, 314491, 314492, 314493, 314494, 314495, 314496, 314497, 314498, 314499, 314500, 314501, 314502, 314503, 314504, 314505, 314506, 314507, 314508, 314509, 314510, 314511, 314512, 314513, 314514, 314515, 314516, 314517, 314518, 314519, 314520, 314521, 314522, 314523, 314524, 314525, 314526, 314527, 314528, 314529, 314530, 314531, 314532, 314533, 314534, 314535, 314536, 314537, 314538, 314539, 314540, 314541, 314542, 314543, 314544, 314545, 314546, 314547, 314548, 314549) c6( ) c7(bM, T, aC, ea, fd, bB, ci, x, AW, aE, dV, ja, K, hu, dF, zQ, aW, Du, hl, g, as, eF, cm, bw, eM, iA, iT, vy, k, m, dD, zt, ht, qy, ez, n, aj, fr, uE, cd, ft, cU, db, Um, pi, hi, ge, aq, kp, mo, dB, Vy, bm, qq, Xa, fL, B, Dw, dA, aA, j, eA, J, eJ, Mp, WY, aT, jj, bq, ae, bA, iZ, Y, en, cl, t, iK, ck, kP, WP, bt, vi, id, qb, eq, mC, ad, hX, dP, av, py, yt, pq, WZ, uQ, gj, d, IR, cH, ff, xs, eH, cr, eZ, aF, bz, bE, ag, dX, aS, y, WX); #c1(ANXA2R) c2(NP_001014301) c3(annexin-2 receptor) c4(25797) c5(25798, 25799, 25800, 25801, 25802, 25803) c6( ) c7(ad, fd); #c1(ANXA3) c2(NP_005130) c3(annexin A3) c4(153099, 153100, 153101, 153102) c5(153103, 153104, 153105, 153106, 153107, 153108, 153109, 153110, 153111, 153112, 153113, 153114, 153115, 153116, 153117, 153118, 153119, 153120, 153121, 153122, 153123, 153124, 153125, 153126) c6( ) c7(T, y, s, aW, eZ, aT, aA, hD, aF, m, dw, t, ad); #c1(ANXA4) c2(XP_011531107) c3(annexin A4 isoform X1) c4(327070, 327071, 327072) c5(327073, 327074, 327075, 327076, 327077, 327078, 327079, 327080, 327081, 327082, 327083, 327084, 327085, 327086, 327087, 327088, 327089, 327090) c6( ) c7(T, Xd, Hc, aA, fr, ci, lu, zP, ad, jz, Xc, ds, dV, cy, Xb, zQ, aq, aF, g, bz, xK, m, bt, B); #c1(ANXA5) c2(NP_001145) c3(annexin A5) c4(60091) c5(60092, 60093, 60094, 60095, 60096, 60097) c6( ) c7(T, Js, ea, fd, eh, ci, x, K, aW, g, eF, uC, eY, iA, cj, k, Xf, m, pw, dD, aw, ez, n, qN, cd, jz, Xe, h, IG, dL, ey, cY, OV, A, aq, kT, qq, at, it, B, Jo, bL, jv, fM, eR, aA, j, q, eA, zn, aT, cy, Y, r, en, cl, t, iK, kP, hc, rA, bt, ao, kh, qb, jN, Jy, jh, oR, Gn, eq, gb, hX, fU, fb, d, ff, bz, es, pc, pE, ag, gZ, ei, y, iu); #c1(ANXA6) c2(NP_001146) c3(annexin AG isoform 1) c4( ) c5( ) c6( ) c7(bL, bM, T, hl, Xi, bB, n, gb, cd, mC, ad, eA, x, ds, aT, Xh, ae, uQ, iU, aW, Y, ff, iw, Xg, cr, eZ, aq, Xj, en, iR, iK, bE, Vy, k, fL, ym, bt); #c1(ANXA6) c2(NP_001180473) c3(annexin A6 isoform 2) c4(74153, 74154) c5(74155, 74156, 74157, 74158, 74159, 74160, 74161, 74162, 74163, 74164, 74165) c6( ) c7(bL, bM, T, hl, Xi, bB, n, gb, cd, mC, ad, eA, x, ds, aT, Xh, ae, uQ, iU, aW, Y, ff, iw, Xg, cr, eZ, aq, Xj, en, iR, iK, bE, Vy, k, fL, ym, bt); #c1(ANXA6) c2(XP_005268489) c3(annexin A6 isoform X1) c4(281842) c5(281843, 281844, 281845, 281846, 281847, 281848, 281849, 281850, 281851, 281852, 281853, 281854) c6( ) c7(bL, bM, T, hl, Xi, bB, n, gb, cd, mC, ad, eA, x, ds, aT, Xh, ae, uQ, iU, aW, Y, ff, iw, Xg, cr, eZ, aq, Xj, en, iR, iK, bE, Vy, k, fL, ym, bt); #c1(ANXA7) c2(NP_001147) c3(annexin A7 isoform 1) c4(60105, 60106, 60107) c5( ) c6( ) c7(T, d, iU, iR, dB, aW, aT, cj, r, By, aA, aq, q, g, eA, aF, ae, B, LS, ad); #c1(ANXA7) c2(NP_004025) c3(annexin A7 isoform 2) c4(142929) c5( ) c6( ) c7(T, d, iU, iR, dB, aW, aT, cj, r, By, aA, aq, q, g, eA, aF, ae, B, LS, ad); #c1(ANXA7) c2(XP_005269795) c3(annexin A7 isoform X1) c4( ) c5(282849, 282850, 282851, 282852, 282853, 282854) c6( ) c7(T, d, iU, iR, dB, aW, aT, cj, r, By, aA, aq, q, g, eA, aF, ae, B, LS, ad); #c1(ANXA7) c2(XP_005269796) c3(annexin A7 isoform X2) c4( ) c5(282855, 282856, 282857, 282858, 282859, 282860, 282861, 282862, 282863, 282864, 282865) c6( ) c7(T, d, iU, iR, dB, aW, aT, cj, r, By, aA, aq, q, g, eA, aF, ae, B, LS, ad); #c1(ANXA8) c2(NP_001035173) c3(annexin A8 isoform 2) c4(32545) c5(32546, 32547, 32548, 32549, 32550, 32551, 32552, 32553, 32554, 32555) c6( ) c7(ck, T, aE, ff, jh, aT, ci, Xk, en, g, hF, bt, kS, jj); #c1(ANXA8) c2(NP_001258632) c3(annexin A8 isoform 3) c4(96228, 96229) c5(96230, 96231, 96232, 96233, 96234, 96235, 96236, 96237, 96238, 96239, 96240, 96241, 96242, 96243, 96244, 96245) c6( ) c7(ck, T, aE, ff, jh, aT, ci, Xk, en, g, hF, bt, kS, jj); #c1(ANXA8) c2(XP_011538398) c3(annexin A8 isoform X5) c4(336062) c5(336063, 336064, 336065, 336066) c6( ) c7(ck, T, aE, ff, jh, aT, ci, Xk, en, g, hF, bt, kS, jj); #c1(ANXA8) c2(XP_011538399) c3(annexin A8 isoform X6) c4( ) c5(336067) c6( ) c7(ck, T, aE, ff, jh, aT, ci, Xk, en, g, hF, bt, kS, jj); #c1(ANXA8) c2(XP_011538402) c3(annexin A8 isoform X9) c4( ) c5(336068) c6( ) c7(ck, T, aE, ff, jh, aT, ci, Xk, en, g, hF, bt, kS, jj); #c1(ANXA8) c2(XP_011538403) c3(annexin A8 isoform X11) c4(336069, 336070) c5(336071, 336072, 336073, 336074, 336075, 336076, 336077, 336078, 336079, 336080, 336081, 336082, 336083, 336084, 336085) c6( ) c7(ck, T, aE, ff, jh, aT, ci, Xk, en, g, hF, bt, kS, jj); #c1(ANXA8L1) c2(NP_001092315) c3(annexin A8-like protein 1 isoform 1) c4(39550, 39551) c5(39552, 39553, 39554, 39555, 39556) c6( ) c7(ck, T, aE, ff, jh, ci, Xk, en, g, hF, bt, kS, jj); #c1(ANXA8L1) c2(NP_001265853) c3(annexin A8-like protein 1 isoform 2) c4(99492, 99493, 99494) c5(99495, 99496, 99497, 99498, 99499, 99500, 99501, 99502, 99503, 99504, 99505, 99506, 99507, 99508, 99509, 99510, 99511, 99512) c6( ) c7(ck, T, aE, ff, jh, ci, Xk, en, g, hF, bt, kS, jj); #c1(AOAH) c2(NP_001170977) c3(acyloxyacyl hydrolase isoform 2 preproprotein) c4(69620, 69621) c5(69622, 69623, 69624, 69625, 69626, 69627, 69628, 69629, 69630, 69631, 69632, 69633, 69634) c6( ) c7(bM, oe, cz, ey, C, an, xa); #c1(AOAH) c2(NP_001170978) c3(acyloxyacyl hydrolase isoform 3 preproprotein) c4(69635) c5(69636, 69637, 69638, 69639, 69640, 69641, 69642, 69643, 69644, 69645, 69646, 69647) c6( ) c7(bM, oe, cz, ey, C, an, xa); #c1(AOAH) c2(NP_001628) c3(acyloxyacyl hydrolase isoform 1 preproprotein) c4(119352, 119353) c5(119354, 119355, 119356, 119357, 119358, 119359) c6( ) c7(bM, oe, cz, ey, C, an, xa); #c1(AOC1) c2(XP_011514310) c3(amiloride-sensitive amine oxidase [copper-containing] isoform X2) c4(306999, 307000, 307001) c5(307002, 307003, 307004, 307005, 307006, 307007) c6( ) c7(bM, T, EQ, cz, ti, Fo, aT, dL, bK, an, bq, oi, rz, Xl, eL, Nr, aW, Xm, iV, Nq, cT, JM); #c1(AOC1) c2(XP_011514311) c3(amiloride-sensitive amine oxidase [copper-containing] isoform X1) c4(307008, 307009, 307010) c5(307011, 307012, 307013, 307014, 307015, 307016, 307017, 307018, 307019, 307020, 307021, 307022, 307023, 307024, 307025, 307026, 307027, 307028, 307029, 307030, 307031, 307032, 307033, 307034, 307035, 307036, 307037, 307038, 307039, 307040, 307041, 307042, 307043, 307044, 307045, 307046, 307047, 307048) c6( ) c7(bM, T, EQ, cz, ti, Fo, aT, dL, bK, an, bq, oi, rz, Xl, eL, Nr, aW, Xm, iV, Nq, cT, JM); #c1(AOC2) c2(NP_001149) c3(retina-specific copper amine oxidase isoform a precursor) c4( ) c5( ) c6( ) c7(bL, A, oz, cz, dq, aj, aS, fD, J); #c1(AOC2) c2(NP_033720) c3(retina-specific copper amine oxidase isoform b precursor) c4(172316) c5(172317, 172318, 172319, 172320, 172321, 172322) c6( ) c7(bL, A, oz, cz, dq, aj, aS, fD, J); #c1(AOC3) c2(NP_003725) c3(membrane primary amine oxidase isoform 1) c4(140465) c5(140466, 140467, 140468, 140469, 140470, 140471) c6( ) c7(bL, cz, wo, aj, v, qW, ai, J, oz, lG, bq, vx, uX, Dl, A, lx, bf, Y, fO, hl, dq, W, WP, aS, dy, fD, GF, us); #c1(AOX1) c2(NP_001150) c3(aldehyde oxidase) c4(60108) c5(60109, 60110, 60111, 60112, 60113, 60114, 60115, 60116, 60117, 60118, 60119, 60120) c6( ) c7(Xn, fe, dq, ci, ad, bA); #c1(AOX1) c2(XP_011509364) c3(aldehyde oxidase isoform X1) c4(299953) c5( ) c6( ) c7(Xn, fe, dq, ci, ad, bA); #c1(AP1AR) c2(NP_001121898) c3(AP-1 complex-associated regulatory protein isoform b) c4(46279) c5(46280, 46281, 46282, 46283, 46284, 46285) c6( ) c7(ey); #c1(AP1AR) c2(NP_061039) c3(AP-1 complex-associated regulatory protein isoform a) c4(199097) c5(199098, 199099, 199100, 199101, 199102, 199103) c6( ) c7(ey); #c1(AP1B1) c2(NP_001159491) c3(AP-1 complex subunit beta-1 isoform c) c4(64170) c5(64171, 64172, 64173, 64174, 64175, 64176) c6( ) c7(jx, ip); #c1(AP1B1) c2(NP_663782) c3(AP-1 complex subunit beta-1 isoform b) c4(241562, 241563) c5(241564, 241565, 241566, 241567, 241568, 241569, 241570, 241571, 241572, 241573, 241574, 241575, 241576, 241577) c6( ) c7(jx, ip); #c1(AP1G1) c2(NP_001025178) c3(AP-1 complex subunit gamma-1 isoform a) c4(29430, 29431, 29432, 29433) c5(29434, 29435, 29436, 29437, 29438, 29439, 29440, 29441, 29442, 29443, 29444, 29445, 29446, 29447, 29448, 29449, 29450, 29451) c6( ) c7(vi); #c1(AP1M1) c2(NP_001123996) c3(AP-1 complex subunit mu-1 isoform 1) c4(48221) c5(48222, 48223, 48224, 48225, 48226, 48227) c6( ) c7(an); #c1(AP1M1) c2(NP_115882) c3(AP-1 complex subunit mu-1 isoform 2) c4(224464, 224465, 224466) c5(224467, 224468, 224469, 224470, 224471, 224472, 224473, 224474, 224475, 224476, 224477, 224478) c6( ) c7(an); #c1(AP1M1) c2(XP_011526702) c3(AP-1 complex subunit mu-1 isoform X1) c4( ) c5(321015, 321016, 321017, 321018, 321019, 321020) c6( ) c7(an); #c1(AP1M2) c2(NP_005489) c3(AP-1 complex subunit mu-2 isoform 2) c4(156745) c5(156746, 156747, 156748, 156749, 156750, 156751) c6( ) c7(Uc, wV, fr); #c1(AP1S1) c2(NP_001274) c3(AP-1 complex subunit sigma-1A) c4(106780) c5( ) c6( ) c7(du, Xp, nA, Xo); #c1(AP1S2) c2(NP_001259000) c3(AP-1 complex subunit sigma-2 isoform 1) c4( ) c5(96914, 96915, 96916, 96917, 96918, 96919, 96920, 96921, 96922, 96923, 96924) c6( ) c7(ul, aT, nf, Xr, nA, Xq, bN); #c1(AP1S2) c2(NP_003907) c3(AP-1 complex subunit sigma-2 isoform 2) c4(142085) c5(142086, 142087, 142088, 142089, 142090, 142091) c6( ) c7(ul, aT, nf, Xr, nA, Xq, bN); #c1(AP1S2) c2(XP_005274671) c3(AP-1 complex subunit sigma-2 isoform X2) c4(285314, 285315, 285316) c5(285317, 285318, 285319, 285320, 285321, 285322, 285323, 285324, 285325, 285326, 285327, 285328, 285329) c6( ) c7(ul, aT, nf, Xr, nA, Xq, bN); #c1(AP1S2) c2(XP_011543901) c3(AP-1 complex subunit sigma-2 isoform X1) c4(343077, 343078, 343079) c5(343080, 343081, 343082, 343083, 343084, 343085, 343086, 343087, 343088, 343089, 343090, 343091) c6( ) c7(ul, aT, nf, Xr, nA, Xq, bN); #c1(AP1S3) c2(NP_001034658) c3(AP-1 complex subunit sigma-3) c4(31983, 31984, 31985) c5(31986, 31987, 31988, 31989, 31990, 31991, 31992, 31993, 31994, 31995, 31996, 31997, 31998, 31999, 32000, 32001, 32002, 32003) c6( ) c7(Xs, aw, lQ); #c1(AP1S3) c2(XP_011508902) c3(AP-1 complex subunit sigma-3 isoform X1) c4(299476) c5(299477, 299478, 299479, 299480, 299481, 299482) c6( ) c7(Xs, aw, lQ); #c1(AP2A1) c2(NP_055018) c3(AP-2 complex subunit alpha-1 isoform 1) c4(178320) c5(178321, 178322, 178323, 178324, 178325, 178326) c6( ) c7(bv, T, aE, Jl, aW, Y, ff, aT, dN, kp, ci, en, Xt, bt); #c1(AP2A1) c2(NP_570603) c3(AP-2 complex subunit alpha-1 isoform 2) c4(234083) c5(234084, 234085, 234086, 234087, 234088, 234089) c6( ) c7(bv, T, aE, Jl, aW, Y, ff, aT, dN, kp, ci, en, Xt, bt); #c1(AP2B1) c2(NP_001025177) c3(AP-2 complex subunit beta isoform a) c4(29412, 29413) c5(29414, 29415, 29416, 29417, 29418, 29419, 29420, 29421, 29422, 29423, 29424, 29425, 29426, 29427, 29428, 29429) c6( ) c7(gf, bS, ct, Xu, Z, ip); #c1(AP2M1) c2(NP_001020376) c3(AP-2 complex subunit mu isoform b) c4(28693, 28694) c5(28695, 28696, 28697, 28698, 28699, 28700, 28701, 28702, 28703, 28704, 28705, 28706, 28707, 28708, 28709, 28710, 28711, 28712, 28713, 28714, 28715, 28716) c6( ) c7(eR, Qu, ff, jx, wV, en); #c1(AP2M1) c2(NP_004059) c3(AP-2 complex subunit mu isoform a) c4(143208, 143209, 143210) c5(143211, 143212, 143213, 143214, 143215, 143216, 143217, 143218, 143219, 143220, 143221, 143222) c6( ) c7(eR, Qu, ff, jx, wV, en); #c1(AP2S1) c2(NP_004060) c3(AP-2 complex subunit sigma isoform AP17) c4(143223) c5(143224, 143225, 143226, 143227, 143228, 143229) c6( ) c7(Xw, OX, TG, HI, Xv); #c1(AP2S1) c2(NP_067586) c3(AP-2 complex subunit sigma isoform AP17delta) c4(209034) c5(209035, 209036, 209037, 209038, 209039, 209040, 209041, 209042, 209043, 209044) c6( ) c7(Xw, OX, TG, HI, Xv); #c1(AP3B1) c2(NP_001258698) c3(AP-3 complex subunit beta-1 isoform 2) c4(96368) c5(96369, 96370, 96371, 96372, 96373, 96374) c6( ) c7(gV, fG, e, aw, Xx, j, pz, q, XB, Tl, dY, XD, bW, h, eu, aa, IE, hG, XA, oV, Y, XE, fc, XC, r, aq, Xz, Xy, KM, ac, hk, IF, cP, B); #c1(AP3B1) c2(NP_003655) c3(AP-3 complex subunit beta-1 isoform 1) c4(139995) c5(139996, 139997, 139998, 139999, 140000, 140001, 140002, 140003, 140004, 140005, 140006, 140007) c6( ) c7(gV, fG, e, aw, Xx, j, pz, q, XB, Tl, dY, XD, bW, h, eu, aa, IE, hG, XA, oV, Y, XE, fc, XC, r, aq, Xz, Xy, KM, ac, hk, IF, cP, B); #c1(AP3B1) c2(XP_005248676) c3(AP-3 complex subunit beta-1 isoform X2) c4(268511) c5( ) c6( ) c7(gV, fG, e, aw, Xx, j, pz, q, XB, Tl, dY, XD, bW, h, eu, aa, IE, hG, XA, oV, Y, XE, fc, XC, r, aq, Xz, Xy, KM, ac, hk, IF, cP, B); #c1(AP3D1) c2(NP_001248755) c3(AP-3 complex subunit delta-1 isoform 3) c4(93995, 93996) c5(93997, 93998, 93999, 94000, 94001, 94002, 94003, 94004, 94005, 94006, 94007, 94008) c6( ) c7(IE, ac, fR, XE, IF, Xx, fq); #c1(AP3D1) c2(NP_003929) c3(AP-3 complex subunit delta-1 isoform 2) c4(142240, 142241) c5(142242, 142243, 142244, 142245, 142246, 142247, 142248, 142249, 142250, 142251, 142252, 142253) c6( ) c7(IE, ac, fR, XE, IF, Xx, fq); #c1(AP3D1) c2(XP_006722995) c3(AP-3 complex subunit delta-1 isoform X1) c4(294957) c5(294958, 294959, 294960, 294961, 294962, 294963) c6( ) c7(IE, ac, fR, XE, IF, Xx, fq); #c1(AP3M2) c2(NP_006794) c3(AP-3 complex subunit mu-2) c4(168107, 168108, 168109) c5(168110, 168111, 168112, 168113, 168114, 168115, 168116, 168117, 168118, 168119, 168120, 168121, 168122, 168123, 168124, 168125, 168126, 168127, 168128, 168129, 168130, 168131, 168132, 168133, 168134, 168135, 168136, 168137, 168138, 168139) c6( ) c7(ha); #c1(AP3S1) c2(NP_001275) c3(AP-3 complex subunit sigma-1) c4(107711) c5( ) c6( ) c7(bL); #c1(AP3S2) c2(NP_005820) c3(AP-3 complex subunit sigma-2) c4(159681, 159682) c5(159683, 159684, 159685, 159686, 159687, 159688, 159689, 159690, 159691, 159692, 159693, 159694, 159695, 159696, 159697, 159698) c6( ) c7(bL, dY); #c1(AP4B1) c2(XP_011538826) c3(AP-4 complex subunit beta-1 isoform X1) c4(336792) c5(336793, 336794, 336795, 336796, 336797, 336798) c6( ) c7(sc, T, e, ha, jN, fN, XJ, jh, n, ci, nA, XM, XH, Fc, hr, ft, aE, Ig, aT, dL, K, ae, eL, hM, Jg, XK, d, A, aW, ff, Io, en, g, cm, XI, bz, pb, dr, bw, es, XG, XO, XN, X, XL, L); #c1(AP4B1) c2(XP_011538827) c3(AP-4 complex subunit beta-1 isoform X2) c4(336799) c5(336800, 336801, 336802, 336803, 336804, 336805) c6( ) c7(sc, T, e, ha, jN, fN, XJ, jh, n, ci, nA, XM, XH, Fc, br, ft, aE, Ig, aT, dL, K, ae, eL, hM, Jg, XK, d, A, aW, ff, Io, en, g, cm, XI, bz, pb, dr, bw, es, XG, XO, XN, X, XL, L); #c1(AP4E1) c2(NP_031373) c3(AP-4 complex subunit epsilon-1 isoform 1) c4(172031) c5(172032, 172033, 172034, 172035, 172036, 172037) c6( ) c7(WI, oR, XP, aV, nA); #c1(AP4M1) c2(NP_004713) c3(AP-4 complex subunit mu-1) c4(149011) c5(149012, 149013, 149014, 149015, 149016, 149017, 149018, 149019, 149020, 149021) c6( ) c7(WI, oR, XQ, nA); #c1(AP4S1) c2(NP_001121598) c3(AP-4 complex subunit sigma-1 isoform 2) c4(45804, 45805, 45806) c5(45807, 45808, 45809, 45810, 45811, 45812, 45813, 45814, 45815, 45816, 45817, 45818, 45819, 45820, 45821, 45822, 45823, 45824) c6( ) c7(XR); #c1(AP4S1) c2(NP_001241655) c3(AP-4 complex subunit sigma-1 isoform 3) c4(88980) c5(88981, 88982, 88983, 88984, 88985, 88986, 88987, 88988, 88989, 88990, 88331, 88992) c6( ) c7(XR); #c1(AP4S1) c2(NP_001241656) c3(AP-4 complex subunit sigma-1 isoform 4) c4(88993) c5(88994, 88995, 88996, 88997, 88998, 88999) c6( ) c7(XR); #c1(AP4S1) c2(NP_009008) c3(AP-4 complex subunit sigma-1 isoform 1) c4(170214, 170215) c5(170216, 170217, 170218, 170219, 170220, 170221) c6( ) c7(XR); #c1(AP5M1) c2(NP_060699) c3(AP-5 complex subunit mu-1) c4(197286) c5(197287, 197288, 197289, 197290, 197291, 197292) c6( ) c7(hF, bt, fX); #c1(AP5Z1) c2(NP_055670) c3(AP-5 complex subunit zeta-1) c4(182634, 182635) c5(182636, 182637, 182638, 182639, 182640, 182641, 182642, 182643, 182644, 182645, 182646, 182647) c6( ) c7(x, T, d, qe, aV, XS, eZ, k, ER, as, Fc); #c1(APAF1) c2(NP_001151) c3(apoptotic protease-activating factor 1 isoform b) c4(60128) c5( ) c6( ) c7(T, id, jx, bO, aA, bB, n, fd, jh, fr, ci, zP, hF, q, ad, eA, XX, XW, x, py, IG, dL, bl, K, XU, pk, ae, eL, eu, cp, d, lx, s, vT, iU, Y, eH, Az, XV, r, g, eF, t, cm, bz, XT, vk, ck, es, Dy, eM, iA, dB, Ip, bE, iT, U, cj, at, oh, k, m, bt); #c1(APAF1) c2(NP_037361) c3(apoptotic protease-activating factor 1 isoform a) c4(175005) c5(175006, 175007, 175008, 175009, 175010, 175011) c6( ) c7(T, id, jx, bO, aA, bB, n, fd, jh, fr, ci, zP, hF, q, ad, eA, XX, XW, x, py, IG, dL, bl, K, XU, pk, ae, eL, eu, cp, d, lx, s, vT, iU, Y, eH, Az, XV, r, g, eF, t, cm, bz, XT, vk, ck, es, Dy, eM, iA, dB, Ip, bE, iT, U, cj, at, oh, k, m, bt); #c1(APAF1) c2(NP_863651) c3(apoptotic protease-activating factor 1 isoform c) c4(255830) c5(255831, 255832, 255833, 255834, 255835, 255836) c6( ) c7(T, id, jx, bO, aA, bB, n, fd, jh, fr, ci, zP, hF, q, ad, eA, XX, XW, x, py, IG, dL, bl, K, XU, pk, ae, eL, eu, cp, d, lx, s, vT, iU, Y, eH, Az, XV, r, g, eF, t, cm, bz, XT, vk, ck, es, Dy, eM, iA, dB, Ip, bE, iT, U, cj, at, oh, k, m, bt); #c1(APAF1) c2(NP_863658) c3(apoptotic protease-activating factor 1 isoform d) c4(255837, 255838) c5(255839, 255840, 255841, 255842, 255843, 255844, 255845, 255846, 255847, 255848, 255849, 255850, 255851, 255852, 255853, 255854, 255855, 255856, 255857, 255858) c6( ) c7(T, id, jx, bO, aA, bB, n, fd, jh, fr, ci, zP, hF, q, ad, eA, XX, XW, x, py, IG, dL, bl, K, XU, pk, ae, eL, eu, cp, d, lx, s, vT, iU, Y, eH, Az, XV, r, g, eF, t, cm, bz, XT, vk, ck, es, Dy, eM, iA, dB, Ip, bE, iT, U, cj, at, eh, k, m, bt); #c1(APAF1) c2(NP_863659) c3(apoptotic protease-activating factor 1 isoform e) c4(255859) c5(255860, 255861, 255862, 255863, 255864, 255865, 255866, 255867, 255868, 255869) c6( ) c7(T, id, jx, bO, aA, bB, n, fd, jh, fr, ci, zP, hF, g, ad, eA, XX, XW, x, py, IG, dL, bl, K, XU, pk, ae, eL, eu, cp, d, lx, s, vT, iU, Y, eH, Az, XV, r, g, eF, t, cm, bz, XT, vk, ck, es, Dy, eM, iA, dB, Ip, bE, iT, U, cj, at, oh, k, m, bt); #c1(APBA1) c2(XP_011516919) c3(amyloid beta A4 precursor protein-binding family A member 1 isoform X1) c4(310434) c5(310435, 310436, 310437, 310438, 310439, 310440) c6( ) c7(bF, s, dJ, r, q, g, iV, fb, af); #c1(APBA2) c2(XP_006725606) c3(amyloid beta A4 precursor protein-binding family A member 2 isoform X1) c4(296914) c5(296915, 296916, 296917, 296918, 296919, 296920, 296921, 296922, 296923, 296924) c6( ) c7(bF, T, s, rz, yL, ha, hE, aA, kt, uJ, aF, ci, g, H, fb, bN, L); #c1(APBA2) c2(XP_011545700) c3(amyloid beta A4 precursor protein-binding family A member 2 isoform X2) c4(344613, 344614, 344615, 344616) c5(344617, 344618, 344619, 344620, 344621, 344622, 344623, 344624, 344625, 344626, 344627, 344628, 344629, 344630, 344631, 344632, 344633, 344634, 344635, 344636, 344637, 344638, 344639, 344640) c6( ) c7(bF, T, s, rz, yL, ha, hE, aA, kt, uJ, aF, ci, g, H, fb, bN, L); #c1(APBA2) c2(XP_011545702) c3(amyloid beta A4 precursor protein-binding family A member 2 isoform X4) c4(344641, 344642) c5(344643, 344644, 344645, 344646, 344647, 344648, 344649, 344650, 344651, 344652, 344653, 344654, 344655, 344656, 344657, 344658, 344659, 344660, 344661) c6( ) c7(bF, T, s, rz, yL, ha, hE, aA, kt, uJ, aF, ci, g, H, fb, bN, L); #c1(APBA3) c2(NP_004877) c3(amyloid beta A4 precursor protein-binding family A member 3) c4(150488) c5(150489, 150490, 150491, 150492, 150493, 150494) c6( ) c7(cF, af); #c1(APBB1) c2(NP_001244248) c3(amyloid beta A4 precursor protein-binding family B member 1 isoform g) c4( ) c5(92060) c6( ) c7(aW, XY, lb, U, aT, kS, af, L); #c1(APBB1) c2(NP_001244252) c3(amyloid beta A4 precursor protein-binding family B member 1 isoform f) c4( ) c5(92061, 92062, 92063, 92064, 92065, 92066) c6( ) c7(aW, XY, lb, U, aT, kS, af, L); #c1(APBB1) c2(NP_001244254) c3(amyloid beta A4 precursor protein-binding family B member 1 isoform e) c4(92067) c5(92068, 92069, 92070, 92071, 92072, 92073) c6( ) c7(aW, XY, lb, U, aT, kS, af, L); #c1(APBB1) c2(NP_663722) c3(amyloid beta A4 precursor protein-binding family B member 1 isoform b) c4(241445) c5(241446, 241447, 241448, 241449, 241450, 241451, 241452, 241453, 241454, 241455) c6( ) c7(aW, XY, lb, U, aT, kS, af, L); #c1(APBB1) c2(XP_006718277) c3(amyloid beta A4 precursor protein-binding family B member 1 isoform X6) c4(291653) c5( ) c6( ) c7(aW, XY, lb, U, aT, kS, af, L); #c1(APBB1) c2(XP_006718278) c3(amyloid beta A4 precursor protein-binding family B member 1 isoform X1) c4(291654, 291655, 291656) c5(291657, 291658, 291659, 291660, 291661, 291662, 291663, 291664, 291665, 291666, 291667, 291668) c6( ) c7(aW, XY, lb, U, aT, kS, af, L); #c1(APBB1) c2(XP_011518343) c3(amyloid beta A4 precursor protein-binding family B member 1 isoform X2) c4( ) c5(312344, 312345, 312346, 312347, 312348) c6( ) c7(aW, XY, lb, U, aT, kS, af, L); #c1(APBB11P) c2(XP_006717514) c3(amyloid beta A4 precursor protein-binding family B member 1-interacting protein isoform X1) c4(291161, 291162) c5(291163, 291164, 291165, 291166, 291167, 291168, 291169, 291170, 291171, 291172, 291173, 291174) c6( ) c7(dA, W, Y, ae, af, ad); #c1(APBB11P) c2(XP_011517816) c3(amyloid beta A4 precursor protein-binding family B member 1-interacting protein isoform X2) c4(311753) c5(311754, 311755, 311756, 311757, 311758, 311759) c6( ) c7(dA, W, Y, ae, af, ad); #c1(APBB2) c2(NP_001159522) c3(amyloid beta A4 precursor protein-binding family B member 2 isoform b) c4(64203, 64204) c5(64205, 64206, 64207, 64208, 64209, 64210, 64211, 64212, 64213, 64214, 64215, 64216) c6( ) c7(cF, fK, af, L); #c1(APBB2) c2(NP_001159525) c3(amyloid beta A4 precursor protein-binding family B member 2 isoform d) c4( ) c5(64217, 64218, 64219, 64220, 64221, 64222, 64223, 64224, 64225, 64226, 64227) c6( ) c7(cF, fK, af, L); #c1(APBB2) c2(NP_004298) c3(amyloid beta A4 precursor protein-binding family B member 2 isoform a) c4(144966) c5(144967, 144968, 144969, 144970, 144971, 144972) c6( ) c7(cF, fK, af, L); #c1(APBB2) c2(NP_775098) c3(amyloid beta A4 precursor protein-binding family B member 2 isoform c) c4(249501) c5(249502, 249503, 249504, 249505, 249506, 249507) c6( ) c7(cF, fK, af, L); #c1(APBB2) c2(XP_005248158) c3(amyloid beta A4 precursor protein-binding family B member 2 isoform X6) c4(268255, 268256) c5(268257, 268258, 268259, 268260, 268261, 268262, 268263) c6( ) c7(cF, fK, af, L); #c1(APBB2) c2(XP_006714072) c3(amyloid beta A4 precursor protein-binding family B member 2 isoform X1) c4( ) c5(287526, 287527, 287528, 287529, 287530, 287531, 287532, 287533, 287534) c6( ) c7(cF, fK, af, L); #c1(APBB2) c2(XP_006714073) c3(amyloid beta A4 precursor protein-binding family B member 2 isoform X2) c4(287535) c5( ) c6( ) c7(cF, fK, af, L); #c1(APBB2) c2(XP_006714075) c3(amyloid beta A4 precursor protein-binding family B member 2 isoform X4) c4( ) c5(287536, 287537) c6( ) c7(cF, fK, af, L); #c1(APBB2) c2(XP_011511989) c3(amyloid beta A4 precursor protein-binding family B member 2 isoform X5) c4(302656) c5(302657, 302658, 302659, 302660, 302661, 302662) c6( ) c7(cF, fK, af, L); #c1(APBB2) c2(XP_011511990) c3(amyloid beta A4 precursor protein-binding family B member 2 isoform X7) c4(302663) c5(302664, 302665, 302666, 302667, 302668, 302669, 302670) c6( ) c7(cF, fK, af, L); #c1(APBB3) c2(NP_006042) c3(amyloid beta A4 precursor protein-binding family B member 3 isoform d) c4(161418, 161419) c5(161420, 161421, 161422, 161423, 161424, 161425, 161426, 161427, 161428, 161429, 161430, 161431, 161432) c6( ) c7(aW, aT, ag, mf, XZ, ae, af, ad); #c1(APBB3) c2(NP_573418) c3(amyloid beta A4 precursor protein-binding family B member 3 isoform c) c4(234497, 234498, 234499) c5(234500, 234501, 234502, 234503, 234504, 234505) c6( ) c7(aW, aT, ag, mf, XZ, ae, af, ad); #c1(APBB3) c2(NP_573419) c3(amyloid beta A4 precursor protein-binding family B member 3 isoform b) c4(234506, 234507) c5(234508, 234509, 234510, 234511, 234512, 234513, 234514, 234515, 234516, 234517, 234518, 234519, 234520) c6( ) c7(aW, aT, aq, mf, XZ, ae, af, ad); #c1(APBB3) c2(NP_573420) c3(amyloid beta A4 precursor protein-binding family B member 3 isoform a) c4(234521) c5(234522, 234523, 234524, 234525, 234526, 234527, 234528, 234529, 234530, 234531, 234532, 234533, 234534, 234535, 234536, 234537, 234538) c6( ) c7(aW, aT, aq, mf, XZ, ae, af, ad); #c1(APC) c2(NP_001120982) c3(adenomatous polyposis coli protein isoform b) c4(45049, 45050, 45051, 45052) c5(45053, 45054, 45055, 45056, 45057, 45058, 45059, 45060, 45061, 45062, 45063, 45064, 45065, 45066, 45067, 45068, 45069, 45070, 45071, 45072, 45073, 45074, 45075, 45076, 45077, 45078, 45079, 45080, 45081, 45082, 45083, 45084) c6( ) c7(uB, T, aC, Fj, pf, YU, if, al, Yb, bB, ci, QG, YD, ip, aE, pX, Yy, Yk, iv, gs, K, hu, dQ, eL, Qe, Ys, YL, yo, zQ, Jl, aW, YC, nY, LZ, YG, Yp, NR, g, eF, zE, bw, iP, qJ, y, fT, eM, nB, AM, cj, iS, YP, m, YS, YK, cE, P, Qj, iB, ht, NT, fN, n, aj, fr, nA, qN, eh, eW, Bl, ft, no, jz, Yc, It, By, dL, he, KV, YT, pl, YI, YO, A, MD, sq, Yd, iw, ge, fe, aq, YE, Yr, hq, Ye, Yf, Yl, iO, YE, bP, dB, se, hk, hL, at, pg, YH, it, B, YJ, YN, aA, cR, j, C, AD, q, J, Yh, YA, er, eJ, Yn, Yv, nX, yg, aT, yu, rz, ae, jf, Uf, Yw, s, vT, Ya, Y, NE, r, lo, en, Yx, cl, t, Ym, bN, YW, Yq, Dy, ac, VJ, nM, iM, Li, au, YV, gX, Yz, LS, VB, hS, Mb, hl, Yu, df, YM, ml, jh, KO, Fc, iJ, ad, hX, av, Yt, hd, ib, NS, Yn, qV, IC, YB, ji, YQ, fb, nJ, iL, Yi, WW, MG, Yj, d, je, BO, qt, Fm, ff, xs, eH, Kf, hp, aF, iV, bz, dr, YR, bF, es, gk, bE, ag, AR, pP, Yg, MC, hE, X, jr); #c1(APC2) c2(XP_005259532) c3(adenomatous polyposis coli protein 2 isoform X3) c4(276121) c5(276122, 276123) c6( ) c7(bF, T, bE, aT, bB, Hn, fe, K, m, g, t, iu); #c1(APC2) c2(XP_006722672) c3(adenomatous polyposis coli protein 2 isoform X1) c4( ) c5(294797, 294798, 294799, 294800, 294801, 294802, 294803, 294804, 294805, 294806, 294807, 294808, 294809, 294810) c6( ) c7(bF, T, bE, aT, bB, Hn, fe, K, m, g, t, iu); #c1(APC2) c2(XP_006722673) c3(adenomatous polyposis coli protein 2 isoform X2) c4(294811) c5(294812) c6( ) c7(bF, T, bE, aT, bB, Hn, fe, K, m, g, t, iu); #c1(APCDD1) c2(NP_694545) c3(protein APCDD1 precursor) c4(245097, 245098) c5(245099, 245100, 245101, 245102, 245103, 245104, 245105, 245106, 245107, 245108, 245109, 245110) c6( ) c7(ck, T, ac, bE, YX, bB, oX, Df); #c1(APCDD1L) c2(NP_001291716) c3(protein APCDD1-like isoform 2) c4(116376) c5(116377, 116378, 116379, 116380, 116381, 116382) c6( ) c7(af); #c1(APCDD1L) c2(NP_699191) c3(protein APCDD1-like isoform 1 precursor) c4(245842) c5(245843, 245844, 245845, 245846, 245847, 245848) c6( ) c7(af); #c1(APCS) c2(NP_001630) c3(serum amyloid P-component precursor) c4(119382, 119383) c5(119384, 119385, 119386, 119387, 119388, 119389, 119390, 119391, 119392, 119393, 119394, 119395, 119396, 119397, 119398, 119399, 119400, 119401, 119402, 119403, 119404, 119405, 119406, 119407, 119408, 119409, 119410, 119411, 119412, 119413, 119414, 119415, 119416, 119417, 119418, 119419, 119420, 119421, 119422, 119423, 119424, 119425, 119426, 119427, 119428, 119429, 119430, 119431, 119432, 119433, 119434, 119435, 119436, 119437, 119438, 119439, 119440, 119441, 119442, 119443, 119444, 119445, 119446, 119447, 119448, 119449, 119450, 119451, 119452, 119453, 119454, 119455, 119456, 119457, 119458, 119459, 119460, 119461, 119462, 119463, 119464, 119465, 119466, 119467, 119468, 119469, 119470, 119471, 119472, 119473, 119474, 119475, 119476) c6(119477) c7(oO, T, dt, fM, dD, fR, IT, e, aw, jh, aj, v, j, eq, C, pz, Za, mC, J, cd, hX, F, ql, ds, iY, H, pk, Zd, hm, yo, YY, oV, Zc, Zf, ih, eZ, aq, Io, YZ, Zb, dr, Wt, ck, OG, Zg, hc, CZ, yH, fL, Lz, R, pJ, Ze, B, L); #c1(APEH) c2(NP_001631) c3(acylamino-acid-releasing enzyme) c4(119478) c5(119479, 119480, 119481, 119482, 119483, 119484) c6( ) c7(T, ft, nB, aT, Zh, fr, iV, cm, bz); #c1(APEX1) c2(XP_005267638) c3(DNA-(apurinic or apyrimidinic site) lyase isoform X1) c4(281136, 281137, 281138, 281139, 281140) c5(281141, 281142, 281143, 281144, 281145, 281146, 281147, 281148, 281149, 281150, 281151, 281152, 281153, 281154, 281155, 281156, 281157, 281158, 281159, 281160, 281161, 281162, 281163, 281164, 281165, 281166, 281167, 281168, 281169, 281170, 281171, 281172, 281173, 281174, 281175, 281176, 281177, 281178) c6( ) c7(T, aC, fR, Zq, ea, if, fd, bB, Vd, ci, qj, ip, aE, u, Bc, Qk, K, hu, eL, bc, Zm, aa, Jl, aW, az, hl, nY, Zr, uY, La, g, eF, uC, fT, bb, eM, nB, iT, wE, vA, U, Zn, m, Xu, Vj, Zo, dD, gU, wu, sw, aw, ht, n, fr, qN, h, IG, eV, dL, Gw, Lh, aq, Zj, op, Sc, bP, dB, hk, hL, at, el, cB, B, it, eX, aA, sM, cz, hy, j, il, Zk, V, q, eA, Zp, hW, aT, ae, af, eu, bA, Sh, s, vT, Qr, Y, Lf, RF, r, en, bu, cl, t, iK, ck, rR, VJ, Dy, c, ac, dy, JH, fD, bt, Kd, Gl, Zl, aD, eq, ad, dP, av, I, Yo, hD, rN, wm, NM, d, Fm, ff, eH, aF, iV, iR, bz, qa, bF, Zi, bE, gZ, Gu, Pk, iu, pC); #c1(APEX2) c2(NP_055296) c3(DNA-(apurinic or apyrimidinic site) lyase 2 isoform 1) c4(180346) c5(180347, 180348, 180349, 180350, 180351, 180352) c6( ) c7(f, V, U); #c1(APH1B) c2(NP_001139118) c3(gamma-secretase subunit APH-1B isoform 2) c4(58712, 58713) c5(58714, 58715, 58716, 58717, 58718, 58719, 58720, 58721, 58722, 58723, 58724) c6( ) c7(cW, j, af, h); #c1(APH1B) c2(NP_112591) c3(gamma-secretase subunit APH-1B isoform 1) c4(221518) c5(221519, 221520, 221521, 221522, 221523, 221524, 221525) c6( ) c7(cW, j, af, h); #c1(API5) c2(NP_001136402) c3(apoptosis inhibitor 5 isoform a) c4(54880, 54881) c5(54882, 54883, 54884, 54885, 54886, 54887, 54888, 54889, 54890, 54891, 54892, 54893) c6( ) c7(T, eM, iR, if, ff, eZ, aq, qN, en, g, B); #c1(API5) c2(NP_001136403) c3(apoptosis inhibitor 5 isoform c) c4(54894) c5(54895, 54896, 54897, 54898, 54899, 54900) c6( ) c7(T, eM, iR, if, ff, eZ, aq, qN, en, g, B); #c1(API5) c2(NP_006586) c3(apoptosis inhibitor 5 isoform b) c4(166418) c5(166419, 166420, 166421, 166422, 166423, 166424) c6( ) c7(T, eM, iR, if, ff, eZ, aq, qN, en, g, B); #c1(APIP) c2(NP_057041) c3(methylthioribulose-1-phosphate dehydratase) c4(188606) c5(188607, 188608, 188609, 188610, 188611, 188612) c6( ) c7(T, oe, eM); #c1(APIP) c2(XP_011518456) c3(methylthioribulose-1-phosphate dehydratase isoform X1) c4(312525) c5(312526, 312527, 312528, 312529, 312530, 312531) c6( ) c7(T, oe, eM); #c1(APLN) c2(NP_059109) c3(apelin preproprotein) c4(193055) c5(193056, 193057, 193058, 193059, 193060, 193061, 193062, 193063) c6( ) c7(bL, T, dB, al, mx, cz, aj, v, j, ci, g, eA, ji, uC, cd, J); #c1(APLNR) c2(NP_005152) c3(apelin receptor) c4(153444, 153445, 153446) c5(153447, 153448, 153449, 153450, 153451, 153452, 153453, 153454, 153455, 153456, 153457, 153458, 153459, 153460, 153461, 153462, 153463, 153464, 153465) c6( ) c7(bL, dD, ea, cz, aj, v, j, eq, cd, J, eA, Zs, JD, h, K, vx, cY, mo, uC, qa, wg, ac, dB, mx, mg, eo, IC, vQ); #c1(APLP1) c2(NP_001019978) c3(amyloid-like protein 1 isoform 1 precursor) c4(27972) c5(27973, 27974, 27975, 27976, 27977, 27978) c6( ) c7(vW, PX, U, cm, K, H, Yi, L); #c1(APLP1) c2(NP_005157) c3(amyloid-like protein 1 isoform 2 precursor) c4(153484) c5(153485, 153486, 153487, 153488, 153489, 153490) c6( ) c7(vW, PX, U, cm, K, H, Yi, L); #c1(APLP2) c2(NP_001135748) c3(amyloid-like protein 2 isoform 2 precursor) c4(53026, 53027) c5(53028, 53029, 53030, 53031, 53032, 53033, 53034, 53035, 53036, 53037, 53038) c6( ) c7(dx, T, d, aE, el, fc, rU, HC, cm, QL, j, K, cP, qF, eA, H, af, Yi, L); #c1(APLP2) c2(NP_001135749) c3(amyloid-like protein 2 isoform 3 precursor) c4(53039, 53040, 53041, 53042) c5(53043, 53044, 53045, 53046, 53047, 53048, 53049, 53050, 53051, 53052, 53053, 53054) c6( ) c7(dx, T, d, aE, el, fc, rU, HC, cm, QL, j, K, cP, qF, eA, H, af, Yi, L); #c1(APLP2) c2(NP_001135750) c3(amyloid-like protein 2 isoform 4 precursor) c4(53055) c5(53056, 53057, 53058, 53059, 53060, 53061, 53062, 53063, 53064, 53065, 53066, 53067, 53068, 53069, 53070, 53071, 53072, 53073) c6( ) c7(dx, T, d, aE, el, fc, rU, HC, cm, QL, j, K, cP, qF, eA, H, af, Yi, L); #c1(APLP2) c2(NP_001230228) c3(amyloid-like protein 2 isoform 5) c4(86137) c5(86138, 86139, 86140, 86141, 86142, 86143) c6( ) c7(dx, T, d, aE, el, fc, rU, HC, cm, QL, j, K, cP, qF, eA, H, af, Yi, L); #c1(APLP2) c2(NP_001633) c3(amyloid-like protein 2 isoform 1 precursor) c4(119485) c5(119486, 119487, 119488, 119489, 119490, 119491) c6( ) c7(dx, T, d, aE, el, fc, rU, HC, cm, QL, j, K, cP, qF, eA, H, af, Yi, L); #c1(APOA1BP) c2(NP_658985) c3(NAD(P)H-hydrate epimerase precursor) c4(239620, 239621, 239622, 239623) c5(239624, 239625, 239626, 239627, 239628, 239629, 239630, 239631, 239632, 239633, 239634, 239635, 239636, 239637, 239638, 239639, 239640, 239641, 239642, 239643, 239644, 239645, 239646, 239647, 239648, 239649, 239650, 239651, 239652, 239653, 239654, 239655) c6(239656, 239657, 239658, 239659, 239660, 239661, 239662, 239663) c7(eq, dD, j); #c1(APOA2) c2(NP_001634) c3(apolipoprotein A-II preproprotein) c4(119492, 119493) c5(119494, 119495, 119496, 119497, 119498, 119489) c6( ) c7(bL, dD, ef, ea, iW, oe, jx, aw, Zv, dG, j, fu, aj, v, ee, nS, eq, J, GK, Zu, ec, jy, dL, rB, bU, dQ, cW, Zt, Px, bJ, cl, cO, Fi, hr, at, R, ei, hE, B); #c1(APOA4) c2(NP_000473) c3(apolipoprotein A-IV precursor) c4(9443) c5(9444, 9445, 9446, 9447, 9448, 9449) c6( ) c7(bL, Kd, T, dD, jp, ea, iW, oe, e, aw, aj, bS, j, ct, ah, v, eq, nS, J, fU, nH, I, u, ec, aT, dL, ji, K, dQ, H, ex, RE, uX, A, cH, cW, aW, fO, fe, aq, iV, Z, YZ, cM, bJ, kT, ac, c, cO, Fi, ag, at, wx, cS, dy, ei, Zw, cE, B); #c1(APOA5) c2(NP_001160070) c3(apolipoprotein A-V precursor) c4(65064, 65065, 65066) c5(65067, 65068, 65069, 65070, 65071, 65072, 65073, 65074, 65075, 65076, 65077, 65078, 65079, 65080, 65081, 65082, 65083) c6( ) c7(bL, T, jv, dD, eR, Zz, ea, e, jx, aw, cz, vG, aj, v, j, eq, J, ad, dZ, dY, ec, M, h, jy, K, dQ, ae, af, Zx, hm, RE, eu, cH, Zy, fc, dq, aq, Z, eK, bJ, ar, ac, dC, cO, Fi, cS, aS, cP, ei, gT, B); #c1(APOB) c2(NP_000375) c3(apolipoprotein B-100 precursor) c4(8274, 8275) c5(8276, 8277, 8278, 8279, 8280, 8281, 8282, 8283, 8284, 8285, 8286, 8287) c6( ) c7(T, ef, fR, Zz, ea, e, al, ci, GK, Gt, dY, u, vh, ZX, M, ZQ, K, dQ, H, hH, ex, eN, Bp, hm, ZH, aW, fc, nY, da, cJ, ZJ, uC, ZB, ZT, sU, k, pw, IS, dD, gU, ZP, ZF, ZK, aw, ZA, Wb, aj, ko, ee, ZS, cc, Zu, ec, It, h, jy, dL, hB, ZN, db, RE, hi, CN, ZC, fe, aq, cM, kT, ZL, W, dC, cO, Fi, at, ZR, ZG, B, L, bL, vQ, ZV, eR, oe, jx, aA, cz, v, j, bX, so, nS, J, jF, ga, uT, aT, vH, cy, bK, DG, bq, sR, ZM, af, eu, ND, r, Io, wA, nC, fi, cl, ac, c, ZO, hr, tz, mf, cS, dy, Zl, gT, nZ, sY, qb, iW, HM, jN, vr, vG, ah, eq, gb, kL, hX, I, F, oz, ts, io, ZU, jo, vl, uX, ZE, cH, cW, cr, si, hp, Z, Hv, dr, qa, eK, gk, Ew, ZD, gZ, aS, cP, ei, y, ZW); #c1(APOBEC1) c2(NP_001291495) c3(C->U-editing enzyme APOBEC-1 isoform a) c4(116288) c5(116289, 116290, 116291, 116292, 116293, 116294) c6( ) c7(dD, ea, jx, bB, v, eq, ci, q, l, u, aT, h, dQ, Qe, B, s, cH, aW, r, aq, aF, eK, ck, Ew, bE, wO, gX, X); #c1(APOBEC2) c2(NP_006780) c3(probable C->U-editing enzyme APOBEC-2) c4(167999, 168000) c5(168001, 168002, 168003, 168004, 168005, 168006, 168007, 168008, 168009, 168010, 168011, 168012) c6( ) c7(ck, av, BC, BD, oV, e, fd, aq, hF, B); #c1(APOBEC3A_B) c2(XP_011545347) c3(probable DNA dC->dU-editing enzyme APOBEC-3A isoform X2) c4(344117) c5(344118, 344119, 344120, 344121, 344122, 344123, 344124, 344125, 344126, 344127, 344128, 344129, 344130, 344131) c6( ) c7(T, aW, yk, aT, ZQ, gl, h, t); #c1(APOBEC3B) c2(NP_001257340) c3(DNA dC->dU-editing enzyme APOBEC-3B isoform b) c4(95230) c5(95231, 95232, 95233, 95234, 95235, 95236) c6( ) c7(T, if, jh, aA, hy, jE, hX, iu, aE, dV, aT, h, dL, ey, aW, Y, ff, aq, aF, en, iR, f, t, ck, eM, gn, m, eg, bt, B, hS); #c1(APOBEC3B) c2(NP_004891) c3(DNA dC->dU-editing enzyme APOBEC-3B isoform a) c4(150601) c5(150602, 150603, 150604, 150605, 150606, 150607) c6( ) c7(T, if, jh, aA, hy, jE, hX, iu, aE, dV, aT, h, dL, ey, aW, Y, ff, aq, aF, en, iR, f, t, ck, eM, gn, m, eg, bt, B, hS); #c1(APOBEC3C) c2(NP_055323) c3(DNA dC->dU-editing enzyme APOBEC-3C) c4(180483) c5(180484, 180485, 180486, 180487, 180488, 180489) c6( ) c7(ck, gl, fR, h); #c1(APOBEC3F) c2(NP_001006667) c3(DNA dC->dU-editing enzyme APOBEC-3F isoform b) c4(22345) c5(22346, 22347, 22348, 22349, 22350, 22351) c6( ) c7(ck, Kd, fR, cz, h, hX); #c1(APOBEC3F) c2(NP_660341) c3(DNA dC->dU-editing enzyme APOBEC-3F isoform a) c4(241014) c5(241015, 241016, 241017, 241018, 241019, 241020) c6( ) c7(ck, Kd, fR, cz, h, hX); #c1(APOBEC3G) c2(NP_068594) c3(DNA dC->dU-editing enzyme APOBEC-3G) c4(209750) c5(209751, 209752, 209753, 209754, 209755, 209756, 209757, 209758, 209759, 209760) c6( ) c7(ck, Kd, iQ, fR, hX, gN, r, h, aq, Io, jh, gn, jE, q, iR, bt, B, vi); #c1(APOBEC3H) c2(NP_001159474) c3(DNA dC->dU-editing enzyme APOBEC-3H isoform SV-182) c4(64148) c5(64149, 64150, 64151, 64152, 64153, 64154) c6( ) c7(h, fR); #c1(APOBEC3H) c2(NP_001159476) c3(DNA dC->dU-editing enzyme APOBEC-3H isoform SV-154) c4(64155) c5(64156, 64157, 64158, 64159, 64160, 64161) c6( ) c7(h, fR); #c1(APOBEC3H) c2(NP_861438) c3(DNA dC->dU-editing enzyme APOBEC-3H isoform SV-183) c4(255565) c5(255566, 255567, 255568, 255569, 255570, 255571) c6( ) c7(h, fR); #c1(APOBEC3H) c2(XP_011528294) c3(DNA dC->dU-editing enzyme APOBEC-3H isoform X1) c4(323366) c5(323367, 323368, 323369, 323370, 323371, 323372) c6( ) c7(h, fR); #c1(APOBR) c2(NP_061160) c3(apolipoprotein B receptor) c4(199653, 199654, 199655) c5(199656, 199657, 199658, 199659, 199660, 199661, 199662, 199663, 199664, 199665, 199666, 199667, 199668, 199669, 199670, 199671, 199672, 199673) c6( ) c7(bM, dD, cH, ea, v, eq); #c1(APOC1) c2(NP_001636) c3(apolipoprotein C-I precursor) c4(119500, 119501) c5(119502, 119503, 119504, 119505, 119506, 119507, 119508, 119509, 119510, 119511, 119512, 119513) c6( ) c7(bL, aC, dD, fR, Zz, e, jx, cz, Zv, v, j, eq, C, fr, nS, V, fK, I, aE, u, jy, iY, ey, dQ, af, li, A, qt, fc, kp, eE, dR, es, bb, tm, cP, ei, ZY, ZZ); #c1(APOC2) c2(NP_000474) c3(apolipoprotein C-II precursor) c4(9450) c5(9451, 9452, 9453, 9454, 9455, 9456) c6( ) c7(bL, T, dD, ZV, rG, Zz, jp, ea, aaa, e, jx, vG, j, eq, nS, V, eA, iu, mj, ec, sO, K, dQ, aab, af, Zx, aae, aad, aq, g, t, aac, dr, dR, bF, ar, cO, mf, m, ei, ZG, B); #c1(APOC3) c2(NP_000031) c3(apolipoprotein C-III precursor) c4(282, 283, 284) c5(285, 286, 287, 288, 289, 290, 291, 292, 293, 294, 295, 296, 297, 298, 299, 300, 301, 302, 303, 304, 305, 306) c6(307, 308) c7(bL, sY, T, dD, eR, Zz, aag, ea, oe, e, jx, aw, cz, vG, Zv, dG, j, aj, v, eq, J, GK, td, hX, nH, I, F, Zu, Mm, u, ec, TB, av, aah, dv, aT, h, cy, dQ, af, A, IR, aai, cH, aW, fc, hl, r, aaf, aq, cJ, cM, uC, GR, bJ, iO, kT, GG, W, c, ac, cO, Fi, hr, gZ, cS, aS, cP, dy, bC, gT, ei, B); #c1(APOC4) c2(NP_001637) c3(apolipoprotein C-IV precursor) c4(119514) c5(119515, 119516, 119517, 119518, 119519, 119520, 119521, 119522, 119523, 119524, 119525, 119526, 119527, 119528, 119529, 119530, 119531, 119532) c6( ) c7(bL, e, jx, fc, aq, j, cP, ei, nS, B); #c1(APOD) c2(NP_001638) c3(apolipoprotein D precursor) c4(119533, 119534) c5(119535, 119536, 119537, 119538, 119539, 119540, 119541, 119542, 119543, 119544, 119545, 119546) c6( ) c7(bL, T, rG, qy, v, j, ci, V, cd, xt, q, fK, aR, st, ad, Hx, eA, aT, PD, jy, aaj, K, an, he, ae, af, Uf, RT, s, Vx, aW, eH, fc, r, eF, cm, Hp, ac, PI, U, cP, hh, cB, B); #c1(APOE) c2(NP_001289617) c3(apolipoprotein E isoform a precursor) c4(114316) c5(114317, 114318, 114319, 114320, 114321, 114322, 114323, 114324, 114325, 114326, 114327) c6( ) c7(T, ef, abr, ea, abM, bO, Vd, aY, aao, fm, dV, hH, nY, abn, vs, GR, jV, wE, cj, IS, act, eg, nD, dt, aaJ, cQ, aj, cd, sW, KN, Ak, acb, aaL, ey, dd, aaK, sm, fe, hq, iO, abl, dB, Fi, Ei, Be, abR, Wl, abW, jv, abc, cz, aA, bX, abC, q, PW, aas, kf, yu, cy, aaw, eu, bA, bf, abs, abo, bg, iy, Io, aby, pb, sk, rR, iQ, ac, mG, tz, aan, aaX, wi, acv, aag, iW, jN, jh, Hn, dG, uu, fu, xt, ad, hX, abZ, HF, Dq, Ot, abq, ZU, Aa, HD, cH, cW, aal, ff, gC, dq, EZ, iV, acx, bz, abA, ag, dX, IC, iu, oO, bM, aaM, Zz, xo, e, bB, ur, abD, sD, vh, Gb, bc, KC, up, dH, fc, hl, as, Eg, cm, eY, bb, Kv, xD, abS, mx, vy, wx, hh, abh, dD, n, QL, nA, ee, Za, jw, acf, Mo, b, no, Hx, ec, acm, RN, Xe, acA, eV, abK, acd, abf, A, lb, ax, yq, vo, aap, abV, dC, cA, cO, fa, aar, at, eo, tm, sa, B, ek, tq, vQ, aba, wL, eX, GC, ti, v, aco, V, di, DK, WY, wN, rS, wP, ae, Ir, hM, HL, uh, acB, aaO, t, sK, acp, el, ck, cl, xb, vi, HQ, nZ, aat, acl, vG, oR, eq, abe, aaq, abP, sj, Jc, abz, d, abB, kD, xH, Z, Hv, dr, gk, yE, aam, aaG, gZ, MJ, y, aax, CW, sH, abT, abY, aC, fR, aaH, al, I, gf, abv, Ul, abH, u, Iu, acc, wM, M, K, GO, wt, mH, aci, aaC, Zc, abx, g, aaD, uC, Uk, aaS, acw, aau, ZB, abw, Gs, U, m, abX, FW, ZF, OI, aw, NT, fN, Zv, abQ, JW, fK, nV, xc, It, acg, aaA, vd, wb, ZN, RE, tx, ack, cM, ar, kT, W, bo, abt, gv, abd, ZG, L, ach, fM, ZV, oe, jx, qQ, Nt, abN, wo, j, acn, il, J, jF, Mg, MR, Ig, hb, nX, jZ, bq, abu, kl, Y, r, en, wA, bN, Qi, tj, sn, c, hc, dh, Da, cS, dy, gT, sY, aaT, Pt, aaz, aal, bS, ah, iG, vN, dP, fU, acu, oj, xp, abm, cx, abU, vl, uX, IR, cr, FX, qa, dR, nb, sG, ei, xg, tQ, acz, abJ, eb, aR, acs, dY, aU, abj, aaW, qM, dQ, H, eN, Bp, hm, EN, acr, zQ, aW, ace, aaN, da, PG, abE, aaQ, abL, abl, nw, mk, pw, abp, abG, abG, R, gD, cZ, QR, wh, My, xM, Wb, mN, Mi, ct, fr, acy, eW, abb, ke, Gm, Zu, kl, h, jy, dL, hB, he, db, Df, Um, wC, Fn, ZC, aq, aay, dw, bJ, aaR, vD, bm, el, bD, bL, rG, eR, dK, sM, cR, hy, OY, C, so, aaV, ga, aaF, acj, uT, aaY, HC, aT, Wk, HG, acq, bK, an, af, ak, s, abi, la, aaE, f, dS, pH, wg, pZ, fP, mf, Kd, gb, abF, ha, vr, dZ, kL, av, abk, I, F, ot, aaU, aaZ, oz, sO, NS, nH, ts, abg, vw, aak, aca, aaB, aav, aaP, eZ, yy, gl, aF, eK, es, bE, pE, dJ, nT, aS, tr, pK, Zw, X, us); #c1(APOE) c2(NP_001289618) c3(apolipoprotein E isoform b precursor) c4(114328, 114329, 114330) c5(114331, 114332, 114333, 114334, 114335, 114336, 114337, 114338, 114339, 114340, 114341, 114342, 114343, 114344, 114345, 114346, 114347, 114348, 114349, 114350, 114351) c6( ) c7(T, ef, abr, ea, abM, bO, Vd, aY, aao, fm, dV, hH, nY, abn, vs, GR, jV, wE, cj, IS, act, eg, nD, dt, aaJ, cQ, aj, cd, sW, KN, Ak, acb, aaL, ey, dd, aaK, sm, fe, hq, iO, abl, dB, Fi, Ei, Be, abR, WI, abW, jv, abc, cz, aA, bX, abC, q, PW, aas, kf, yu, cy, aaw, eu, bA, bf, abs, abo, bg, iy, Io, aby, pb, sk, rR, iQ, ac, mG, tz, aan, aaX, wi, acv, aag, iW, jN, jh, Hn, dG, uu, fu, xt, ad, hX, abZ, HF, Dq, Ot, abq, ZU, Aa, HD, cH, cW, aal, ff, gC, dg, EZ, iV, acx, bz, abA, ag, dX, IC, iu, oO, bM, aaM, Zz, xo, e, bB, ur, abD, sD, vh, Gb, bc, KC, up, dH, fc, hl, as, Eg, cm, eY, bb, Kv, xD, abS, mx, vy, wx, hh, abh, dD, n, QL, nA, ee, Za, jw, acf, Mo, b, no, Hx, ec, acm, RN, Xe, acA, eV, abK, acd, abf, A, lb, ax, yq, vo, aap, abV, dC, cA, cO, fa, aar, at, eo, tm, sa, B, ek, tq, vQ, aba, wL, eX, GC, ti, v, aco, V, di, DK, WY, wN, rS, wP, ae, Ir, hM, HL, uh, acB, aaO, t, sK, acp, el, ck, cl, xb, vi, HQ, nZ, aat, acl, vG, oR, eq, abe, aaq, abP, sj, Jc, abz, d, abB, kD, xH, Z, Hv, dr, gk, yE, aam, aaG, gZ, MJ, y, aax, CW, sH, abT, abY, aC, fR, aaH, al, I, gf, abv, Ul, abH, u, lu, acc, wM, M, K, GO, wt, mH, aci, aaC, Zc, abx, g, aaD, uC, Uk, aaS, acw, aau, ZB, abw, Gs, U, m, abX, FW, ZF, OI, aw, NT, fN, Zv, abQ, JW, fK, nV, xc, It, acg, aaA, vd, wb, ZN, RE, tx, ack, cM, ar, kT, W, bo, abt, gv, abd, ZG, L, ach, fM, ZV, oe, jx, qQ, Nt, abN, wo, j, acn, il, J, jF, Mg, MR, Ig, hb, nX, jZ, bq, abu, kl, Y, r, en, wA, bN, Qi, tj, sn, c, hc, dh, Da, cS, dy, gT, sY, aaT, Pt, aaz, aal, bS, ah, iG, vN, dP, fU, acu, oj, xp, abm, cx, abU, vl, uX, IR, cr, EX, qa, dR, nb, sG, ei, xg, tQ, acz, abJ, eb, aR, acs, dY, aU, abj, aaW, qM, dQ, H, eN, Bp, hm, EN, acr, zQ, aW, ace, aaN, da, PG, abE, aaQ, abL, abl, nw, mk, pw, abp, abG, abO, R, gD, cZ, QR, wh, My, xM, Wb, mN, Mi, ct, fr, acy, eW, abb, ke, Gm, Zu, kl, h, jy, dL, hB, he, db, Df, Um, wC, Fn, ZC, aq, aay, dw, bJ, aaR, vD, bm, el, bD, bL, rG, eR, dK, sM, cR, hy, OY, C, so, aaV, ga, aaF, acj, uT, aaY, HC, aT, Wk, HG, acq, bK, an, af, ak, s, abi, la, aaE, f, dS, pH, wg, pZ, fP, mf, Kd, qb, abF, ha, vr, dZ, kL, av, abk, I, F, ot, aaU, aaZ, oz, sO, NS, nH, ts, abg, vw, aak, aca, aaB, aav, aaP, eZ, yy, gl, aF, eK, es, bE, pE, dJ, nT, aS, tr, pK, Zw, X, us); #c1(APOF) c2(NP_001629) c3(apolipoprotein F precursor) c4(119360, 119361) c5(119362, 119363, 119364, 119365, 119366, 119367, 119368, 119369, 119370, 119371, 119372, 119373, 119374, 119375, 119376, 119377) c6(119378, 119379, 119380, 119381) c7(W, cH, j, dQ, af, vi); #c1(APOH) c2(NP_000033) c3(beta-2-glycoprotein 1 precursor) c4(309) c5(310, 311, 312, 313, 314, 315) c6( ) c7(dD, eR, fR, ea, iW, Hc, e, DV, al, cz, cR, fN, aj, vr, eq, ez, mC, J, aw, ec, K, jj, hH, OV, Y, sq, eZ, kD, aq, YG, iV, kk, acD, eK, acC, ac, cj, dX, aS, fL, ei, B); #c1(APOL1) c2(NP_001130013) c3(apolipoprotein L1 isoform c) c4(52433) c5(52434, 52435, 52436, 52437, 52438, 52439, 52440, 52441, 52442) c6( ) c7(bL, T, dD, eR, qb, ea, e, cz, vG, cQ, dG, j, ah, aj, eq, fr, aY, ye, J, fU, acE, vw, h, ey, XZ, CG, acF, eZ, Io, qa, sk, cO, MM, dy, DQ); #c1(APOL1) c2(NP_003652) c3(apolipoprotein L1 isoform a precursor) c4(139940, 139941) c5(139942, 139943, 139944, 139945, 139946, 139947, 139948, 139949, 139950, 139951, 139952, 139953, 139954, 139955, 139956, 139957, 139958, 139959, 139960, 139961, 139962, 139963, 139964, 139965, 139966, 139967, 139968, 139969, 139970, 139971, 139972, 139973, 139974, 139975, 139976, 139977, 139978, 139979, 139980, 139981, 139982, 139983) c6( ) c7(bL, T, dD, eR, qb, ea, e, cz, vG, cQ, dG, j, ah, aj, eq, fr, aY, ye, J, fU, acE, vw, h, ey, XZ, CG, acF, eZ, Io, qa, sk, cO, MM, dy, DQ); #c1(APOL1) c2(NP_663318) c3(apolipoprotein L1 isoform b precursor) c4(241198, 241199, 241200) c5(241201, 241202, 241203, 241204, 241205, 241206, 241207, 241208, 241209, 241210, 241211, 241212, 241213, 241214, 241215, 241216, 241217, 241218, 241219, 241220, 241221, 241222, 241223) c6( ) c7(bL, T, dD, eR, qb, ea, e, cz, vG, cQ, dG, j, ah, aj, eq, fr, aY, ye, J, fU, acE, vw, h, ey, XZ, CG, acF, eZ, Io, qa, sk, cO, MM, dy, DQ); #c1(APOL1) c2(XP_011528780) c3(apolipoprotein L1 isoform X2) c4(324084) c5(324085, 324086, 324087, 324088, 324089, 324090, 324091) c6( ) c7(bL, T, dD, eR, qb, ea, e, cz, vG, cQ, dG, j, ah, aj, eq, fr, aY, ye, J, fU, acE, vw, h, ey, XZ, CG, acF, eZ, Io, qa, sk, cO, MM, dy, DQ); #c1(APOL2) c2(NP_663612) c3(apolipoprotein L2) c4(241224, 241225, 241226, 241227) c5(241228, 241229, 241230, 241231, 241232, 241233, 241234, 241235, 241236, 241237, 241238, 241239, 241240, 241241, 241242, 241243, 241244, 241245, 241246, 241247, 241248, 241249, 241250, 241251, 241252, 241253, 241254, 241255, 241256, 241257, 241258, 241259, 241260, 241261, 241262, 241263) c6(241264) c7(jb, cu, acH, acI, acG); #c1(APOL3) c2(NP_663615) c3(apolipoprotein L3 isoform 1) c4(241317) c5(241318, 241319, 241320, 241321, 241322, 241323, 241324, 241325, 241326, 241327) c6( ) c7(T, ae, ad); #c1(APOL3) c2(NP_663617) c3(apolipoprotein L3 isoform 3) c4( ) c5(241328, 241329, 241330, 241331, 241332, 241333, 241334, 241335, 241336, 241337, 241338) c6( ) c7(T, ae, ad); #c1(APOL4) c2(NP_085146) c3(apolipoprotein L4 isoform 1) c4(219417, 219418, 219419, 219420, 219421, 219422) c5(219423, 219424, 219425, 219426, 219427, 219428, 219429, 219430, 219431, 219432, 219433, 219434, 219435, 219436, 219437, 219438, 219439, 219440, 219441, 219442, 219443, 219444, 219445, 219446, 219447, 219448, 219449, 219450, 219451, 219452, 219453, 219454, 219455, 219456, 219457, 219458, 219459, 219460, 219461, 219462, 219463, 219464, 219465, 219466, 219467, 219468, 219469, 219470, 219471, 219472, 219473, 219474, 219475, 219476) c6(219477, 219478, 219479, 219480) c7(oe, eR); #c1(APOL4) c2(NP_663693) c3(apolipoprotein L4 isoform 2 precursor) c4(241403, 241404) c5(241405, 241406, 241407, 241408, 241409, 241410, 241411, 241412, 241413, 241414, 241415, 241416, 241417, 241418, 241419, 241420) c6( ) c7(oe, eR); #c1(APOL6) c2(NP_085144) c3(apolipoprotein L6) c4(219409) c5(219410, 219411, 219412, 219413, 219414, 219415, 219416) c6( ) c7(ds, e); #c1(APOLD1) c2(NP_001123887) c3(apolipoprotein L domain-containing protein 1 isoform 1) c4(47969) c5(47970, 47971, 47972, 47973, 47974, 47975) c6( ) c7(g); #c1(APOLD1) c2(NP_110444) c3(apolipoprotein L domain-containing protein 1 isoform 2) c4(220390) c5(220391, 220392, 220393, 220394, 220395, 220396) c6( ) c7(g); #c1(APOM) c2(NP_001243098) c3(apolipoprotein M isoform 2) c4( ) c5(89869, 89870, 89871, 89872, 89873, 89874, 89875, 89876, 89877, 89878, 89879, 89880, 89881, 89882, 89883, 89884, 89885, 89886, 89887, 89888, 89889, 89890, 89891, 89892, 89893, 89894, 89895, 89896, 89897, 89898, 89899, 89900, 89901, 89902, 89903, 89904, 89905, 89906, 89907, 89908, 89909, 89910, 89911, 89912, 89913, 89914, 89915, 89916, 89917, 89918, 89919, 89920, 89921, 89922, 89923, 89924, 89925, 89926, 89927, 89928, 89929, 89930, 89931, 89932, 89933, 89934, 89935, 89936, 89937, 89938, 89939, 89940, 89941) c6(89942, 89943, 89944, 89945, 89946, 89947, 89948, 89949, 89950, 89951, 89952, 89953, 89954, 89955, 89956, 89957, 89958, 89959, 89960, 89961, 89962, 89963, 89964, 89965, 89966, 89967, 89968) c7(bL, iu, dD, A, fR, af, ea, e, M, IG, aj, dG, j, eq, y, B, J, vi); #c1(APOM) c2(NP_061974) c3(apolipoprotein M isoform 1) c4(201363, 201364, 201365) c5(201366, 201367, 201368, 201369, 201370, 201371, 201372, 201373, 201374, 201375, 201376, 201377, 201378, 201379, 201380, 201381, 201382, 201383, 201384, 201385, 201386, 201387, 201388, 201389, 201390, 201391, 201392, 201393, 201394, 201395, 201396, 201397, 201398, 201399, 201400, 201401, 201402, 201403, 201404, 201405, 201406, 201407, 201408) c6(201409, 201410, 201411, 201412, 201413, 201414, 201415, 201416, 201417, 201418, 201419, 201420, 201421, 201422) c7(bL, iu, dD, A, fR, af, ea, e, M, IG, aj, dG, j, eq, y, B, J, vi); #c1(APOO) c2(NP_077027) c3(apolipoprotein O precursor) c4(214813, 214814) c5(214815, 214816, 214817, 214818, 214819, 214820, 214821, 214822, 214823, 214824, 214825, 214826, 214827, 214828, 214829, 214830, 214831, 214832) c6( ) c7(v, af, cc, EQ); #c1(APOO) c2(XP_011543888) c3(apolipoprotein O isoform X1) c4(343062) c5( ) c6( ) c7(v, af, cc, EQ); #c1(APOPT1) c2(NP_115750) c3(apoptogenic protein 1, mitochondrial isoform 1) c4(223802, 223803) c5(223804, 223805, 223806, 223807, 223808, 223809, 223810, 223811, 223812, 223813, 223814, 223815) c6( ) c7(kC, acJ); #c1(APP) c2(NP_000475) c3(amyloid beta A4 protein isoform a precursor) c4(9457) c5(9458, 9459, 9460, 9461, 9462, 9463, 9464, 9465, 9466, 9467, 9468, 9469) c6( ) c7(T, fR, aaH, ea, e, I, ci, bh, aY, aR, aao, dE, Fo, aU, K, GO, H, be, mH, acN, aW, acO, bp, Ku, cm, ba, bb, acS, U, aL, R, bi, hh, dt, gU, dD, acT, aO, OI, aj, bd, PJ, fK, eW, aN, h, OV, A, acR, aJ, aq, kk, acM, hq, W, fa, bm, al, B, ek, L, acL, aA, cz, v, j, C, J, di, MR, hb, WY, HC, aT, vH, aaw, bK, UN, an, aH, Ir, af, ak, bf, vT, Y, aM, bg, acP, wA, f, bN, ck, ac, c, hr, mf, gT, bt, hl, aZ, aal, acU, eq, xt, acK, ot, aV, sO, Dq, oj, bj, aQ, acQ, ji, d, BO, aP, cr, gl, aF, KM, wQ, dJ, X, aS, be, ei, Gp, y, xg, CW); #c1(APP) c2(NP_001129488) c3(amyloid beta A4 protein isoform d) c4(51595) c5(51596, 51597, 51598, 51599, 51600, 51601, 51602, 51603, 51604, 51605, 51606, 51607) c6( ) c7(T, fR, aaH, ea, e, I, ci, bh, aY, aR, aao, dE, Fo, aU, K, GO, H, bc, mH, acN, aW, acO, bp, Ku, cm, ba, bb, acS, U, aL, R, hi, hh, dt, gU, dD, acT, aO, OI, aj, bd, PJ, fK, eW, aN, h, OV, A, acR, aJ, aq, kk, acM, hq, W, fa, bm, al, B, ek, L, acL, aA, cz, v, j, C, J, di, MR, hb, WY, HC, aT, vH, aaw, bK, UN, an, aH, Ir, af, ak, bf, vT, Y, aM, bg, acP, wA, f, bN, ck, ac, c, hr, mf, gT, bt, hl, aZ, aal, acU, eq, xt, acK, ot, aV, sO, Dq, oj, bj, aQ, acQ, ji, d, BO, aP, cr, gl, aF, KM, wQ, dJ, X, aS, be, ei, Gp, y, xg, CW); #c1(APP) c2(NP_001129601) c3(amyloid beta A4 protein isoform e precursor) c4(51984) c5(51985, 51986, 51987, 51988, 51989, 51990, 51991, 51992, 51993, 51994, 51995, 51996, 51997, 51998, 51999, 52000, 52001, 52002) c6( ) c7(T, fR, aaH, ea, e, I, ci, bh, aY, aR, aao, dE, Fo, aU, K, GO, H, bc, mH, acN, aW, acO, bp, Ku, cm, ba, bb, acS, U, aL, R, bi, hh, dt, gU, dD, acT, aO, OI, aj, bd, PJ, fK, eW, aN, h, OV, A, acR, aJ, aq, kk, acM, hq, W, fa, bm, al, B, ek, L, acL, aA, cz, v, j, C, J, di, MR, hb, WY, HC, aT, vH, aaw, bK, UN, an, aH, Ir, af, ak, bf, vT, Y, aM, bg, acP, wA, f, bN, ck, ac, c, hr, mf, gT, bt, hl, aZ, aal, acU, eq, xt, acK, ot, aV, sO, Dq, oj, bj, aQ, acQ, ji, d, BO, aP, cr, gl, aF, KM, wQ, dJ, X, aS, be, ei, Gp, y, xg, CW); #c1(APP) c2(NP_001129602) c3(amyloid beta A4 protein isoform f precursor) c4(52003, 52004) c5(52005, 52006, 52007, 52008, 52009, 52010) c6( ) c7(T, fR, aaH, ea, e, I, ci, bh, aY, aR, aao, dE, Fo, aU, K, GO, H, bc, mH, acN, aW, acO, bp, Ku, cm, ba, bb, acS, U, aL, R, bi, hh, dt, gU, dD, acT, aO, OI, aj, bd, PJ, fK, eW, aN, h, OV, A, acR, aJ, aq, kk, acM, hq, W, fa, bm, al, B, ek, L, acL, aA, cz, v, j, C, J, di, MR, hb, WY, HC, aT, vH, aaw, bK, UN, an, aH, Ir, af, ak, bf, vT, Y, aM, bg, acP, wA, f, bN, ck, ac, c, hr, mf, gT, bt, hl, aZ, aal, acU, eq, xt, acK, ot, aV, sO, Dq, oj, bj, aQ, acQ, ji, d, BO, aP, cr, gl, aF, KM, wQ, dJ, X, aS, be, ei, Gp, y, xg, CW); #c1(APP) c2(NP_001129603) c3(amyloid beta A4 protein isoform g) c4(52011) c5( ) c6( ) c7(T, fR, aaH, ea, e, I, ci, bh, aY, aR, aao, dE, Fo, aU, K, GO, H, bc, mH, acN, aW, acO, bp, Ku, cm, ba, bb, acS, U, aL, R, bi, hh, dt, gU, dD, acT, aO, OI, aj, bd, PJ, fK, eW, aN, h, OV, A, acR, aJ, aq, kk, acM, hq, W, fa, bm, al, B, ek, L, acL, aA, cz, v, j, C, J, di, MR, hb, WY, HC, aT, vH, aaw, bK, UN, an, aH, Ir, af, ak, bf, vT, Y, aM, bg, acP, wA, f, bN, ck, ac, c, hr, mf, gT, bt, hl, aZ, aal, acU, eq, xt, acK, ot, aV, sD, Dq, oj, bj, aQ, acQ, ji, d, BO, aP, cr, gl, aF, KM, wQ, dJ, X, aS, be, ei, Gp, y, xg, CW); #c1(APP) c2(NP_001191230) c3(amyloid beta A4 protein isoform h precursor) c4(81170) c5(81171, 81172, 81173, 81174, 81175, 81176) c6( ) c7(T, fR, aaH, ea, e, I, ci, bh, aY, aR, aao, dE, Fo, aU, K, GO, H, bc, mH, acN, aW, acO, bp, Ku, cm, ba, bb, acS, U, aL, R, bi, hh, dt, gD, dD, acT, aO, OI, aj, bd, PJ, fK, eW, aN, h, OV, A, acR, aJ, aq, kk, acM, hq, W, fa, bm, al, B, ek, L, acL, aA, cz, v, j, C, J, di, MR, hb, WY, HC, aT, vH, aaw, bK, UN, an, aH, Ir, af, ak, bf, vT, Y, aM, bg, acP, wA, f, bN, ck, ac, c, hr, mf, gT, bt, hl, aZ, aal, acU, eq, xt, acK, ot, aV, sO, Dq, oj, bj, aQ, acQ, ji, d, BO, aP, cr, gl, aF, KM, wQ, dJ, X, aS, be, ei, Gp, y, xg, CW); #c1(APP) c2(NP_958816) c3(amyloid beta A4 protein isoform b precursor) c4(262218) c5( ) c6( ) c7(T, fR, aaH, ea, e, I, ci, bh, aY, aR, aao, dE, Fo, aU, K, GO, H, bc, mH, acN, aW, acO, bp, Ku, cm, ha, bb, acS, U, aL, R, bi, hh, dt, gU, dD, acT, aO, OI, aj, bd, PJ, fK, eW, aN, h, OV, A, acR, aJ, aq, kk, acM, hq, W, fa, bm, al, B, ek, L, acL, aA, cz, v, j, C, J, di, MR, hb, WY, HC, aT, vH, aaw, bK, UN, an, aH, Ir, af, ak, bf, vT, Y, aM, bg, acP, wA, f, bN, ck, ac, c, hr, mf, gT, bt, hl, aZ, aal, acU, eq, xt, acK, ot, aV, sO, Dq, oj, bj, aQ, acQ, ji, d, BO, aP, cr, gl, aF, KM, wQ, dJ, X, aS, be, ei, Gp, y, xg, CW); #c1(APP) c2(NP_958817) c3(amyloid beta A4 protein isoform c precursor) c4(262219) c5( ) c6( ) c7(T, fR, aaH, ea, e, I, ci, bh, aY, aR, aao, dE, Fo, aU, K, GO, H, bc, mH, acN, aW, acO, bp, Ku, cm, ba, bb, acS, U, aL, R, bi, hh, dt, gU, dD, acT, aO, OI, aj, bd, PJ, fK, eW, aN, h, OV, A, acR, aJ, aq, kk, acM, hq, W, fa, bm, al, B, ek, L, acL, aA, cz, v, j, C, J, di, MR, hb, WY, HC, aT, vH, aaw, bK, UN, an, aH, Ir, af, ak, bf, vT, Y, aM, bg, acP, wA, f, bN, ck, ac, c, hr, mf, gT, bt, hl, aZ, aal, acU, eq, xt, acK, ot, aV, sO, Dq, oj, bj, aQ, acQ, ji, d, BO, aP, cr, gl, aF, KM, wQ, dJ, X, aS, be, ei, Gp, y, xg, CW); #c1(APPBP2) c2(NP_006371) c3(amyloid protein-binding protein 2 isoform 1) c4(164447) c5(164448, 164449, 164450, 164451, 164452, 164453, 164454, 164455) c6( ) c7(aW, cz, aT, lu, cd, ad); #c1(APPL1) c2(NP_036228) c3(DCC-interacting protein 13-alpha) c4(172460) c5(172461, 172462, 172463, 172464, 172465, 172466) c6( ) c7(bL, dD, ea, fc, cR, Mz, aj, dG, v, m, cP, eq, t, J); #c1(APPL2) c2(NP_001238833) c3(DCC-interacting protein 13-beta isoform 2) c4(87942) c5(87943, 87944, 87945, 87946, 87947, 87948) c6( ) c7(d, fc, ey, qF, cP, IB, eA, ad); #c1(APPL2) c2(NP_060641) c3(DCC-interacting protein 13-beta isoform 1) c4(196952) c5(196953, 196954, 196955, 196956, 196957, 196958) c6( ) c7(d, fc, ey, qF, cP, IB, eA, ad); #c1(APRT) c2(NP_000476) c3(adenine phosphoribosyltransferase isoform a) c4(9470, 9471) c5(9472, 9473, 9474, 9475, 9476, 9477) c6( ) c7(bM, T, ea, if, bO, bB, fo, ci, aY, add, x, acX, aE, ws, dv, K, EL, zy, adn, aW, Bw, fc, Ku, g, eE, eF, cm, DL, GR, iP, eM, nB, iT, wB, cj, k, m, IS, dD, OI, vX, adk, aj, fr, ct, qN, adb, cd, adf, cc, A, fe, aq, CQ, Ld, JR, hq, bP, acY, bo, hR, HB, acZ, Po, B, it, tq, bL, fM, mr, jx, aA, cR, adi, v, ada, j, q, J, eA, nv, adl, aT, adm, jj, bq, ae, af, acV, kl, s, nO, RO, oV, Y, r, lo, t, kC, bN, EJ, ck, acW, ac, c, iM, MB, HK, fP, fD, ao, Kd, hl, iW, jh, Hn, bS, dG, jE, ade, eq, Fb, adg, MC, ad, hX, fU, hd, ib, vc, ji, IQ, nJ, d, je, eH, cr, dq, aF, Z, adj, HI, bz, dr, eK, adc, Ew, kg, bE, cP, ei, pK, IC, adh, kS, iu); #c1(APRT) c2(NP_001025189) c3(adenine phosphoribosyltransferase isoform b) c4( ) c5(29485, 29486, 29487, 29488, 29489, 29490) c6( ) c7(bM, T, ea, if, bO, bB, fo, ci, aY, add, x, acX, aE, ws, dv, K, EL, zy, adn, aW, Bw, fc, Ku, g, eE, eF, cm, DL, GR, iP, eM, nB, iT, wB, cj, k, m, IS, dD, OI, vX, adk, aj, fr, ct, qN, adh, cd, adf, cc, A, fe, aq, CQ, Ld, JR, hq, bP, acY, bo, hR, HB, acZ, Po, B, it, tq, bL, fM, mr, jx, aA, cR, adi, v, ada, j, q, J, eA, nv, adl, aT, adm, jj, bq, ae, af, acV, kl, s, nO, RO, oV, Y, r, lo, t, kC, bN, EJ, ck, acW, ac, c, iM, MB, HK, fP, fD, ao, Kd, hl, iW, jh, Hn, bS, dG, jE, ade, eq, Fb, adg, MC, ad, hX, fU, hd, ib, vc, ji, IQ, nJ, d, je, eH, cr, dq, aF, Z, adj, HI, bz, dr, eK, adc, Ew, kg, bE, cP, ei, pK, IC, adh, kS, iu); #c1(APTX) c2(NP_001182177) c3(aprataxin isoform e) c4(74640, 74641, 74642) c5(74643, 74644, 74645, 74646, 74647, 74648, 74649, 74650, 74651, 74652, 74653, 74654, 74655, 74656, 74657, 74658, 74659) c6( ) c7(aC, ads, qy, GC, EF, n, fu, hX, ado, aR, ad, aU, Sq, DG, K, KU, bV, EG, adt, d, adr, cH, KH, adp, EH, kC, adq, wT, ky, kB, U, KA, bC, bt, KF); #c1(APTX) c2(NP_001182179) c3(aprataxin isoform f) c4(74660) c5(74661, 74662, 74663, 74664, 74665, 74666) c6( ) c7(aC, ads, qy, GC, EF, n, fu, bX, ado, aR, ad, aU, Sq, DG, K, KU, bV, EG, adt, d, adr, cH, KH, adp, EH, kC, adq, wT, ky, kB, U, KA, bC, bt, KF); #c1(APTX) c2(NP_001182180) c3(aprataxin isoform g) c4( ) c5(74667, 74668, 74669, 74670, 74671) c6( ) c7(aC, ads, qy, GC, EF, n, fu, bX, ado, aR, ad, aU, Sq, DG, K, KU, bV, EG, adt, d, adr, cH, KH, adp, EH, kC, adq, wT, ky, kB, U, KA, bC, bt, KF); #c1(APTX) c2(NP_001182181) c3(aprataxin isoform i) c4(74672) c5(74673, 74674, 74675, 74676, 74677, 74678) c6( ) c7(aC, ads, qy, GC, EF, n, fu, bX, ado, aR, ad, aU, Sq, DG, K, KU, bV, EG, adt, d, adr, cH, KH, adp, EH, kC, adq, wT, ky, kB, U, KA, bC, bt, KF); #c1(APTX) c2(NP_778239) c3(aprataxin isoform b) c4(251505, 251506) c5(251507, 251508, 251509, 251510, 251511, 251512, 251513, 251514, 251515) c6( ) c7(aC, ads, qy, GC, EF, n, fu, hX, ado, aR, ad, aU, Sq, DG, K, KU, bV, EG, adt, d, adr, cH, KH, adp, EH, kC, adq, wT, ky, kB, U, KA, bC, bt, KF); #c1(APTX) c2(XP_006716854) c3(aprataxin isoform X1) c4( ) c5(290521, 290522, 290523, 290524, 290525, 290526, 290527, 290528, 290529, 290530, 290531) c6( ) c7(aC, ads, qy, GC, EF, n, fu, bX, ado, aR, ad, aU, Sq, DG, K, KU, bV, EG, adt, d, adr, cH, KH, adp, EH, kC, adq, wT, ky, kB, U, KA, bC, bt, KF); #c1(AQP1) c2(NP_001171989) c3(aquaporin-1 isoform 2) c4( ) c5(72150, 72151, 72152, 72153, 72154) c6( ) c7(cZ, T, dD, ul, ea, adv, ha, al, cz, fF, bB, aj, eq, ci, fr, zP, Rk, q, ad, qW, eA, ip, ady, aaF, ib, Rl, jz, Qk, qK, aT, K, dd, bq, yj, ae, af, adx, ak, nP, zQ, d, nO, aW, Y, vj, xs, adw, cr, ff, kD, en, cl, g, t, as, bz, adz, adA, dS, adu, gk, pZ, zr, dB, Fh, bE, eM, uR, hr, cj, hL, dy, mk, y, cB); #c1(AQP1) c2(NP_001171990) c3(aquaporin-1 isoform 3) c4(72155, 72156) c5(72157, 72158, 72159, 72160, 72161, 72162, 72163) c6( ) c7(cZ, T, dD, ul, ea, adv, ha, al, cz, fF, bB, aj, eq, ci, fr, zP, Rk, q, ad, qW, eA, ip, ady, aaF, ib, Rl, jz, Qk, qK, aT, K, dd, bq, yj, ae, af, adx, ak, nP, zQ, d, nO, aW, Y, vj, xs, adw, cr, ff, kD, en, cl, g, t, as, bz, adz, adA, dS, adu, gk, pZ, zr, dB, Fh, bE, eM, uR, hr, cj, hL, dy, mk, y, cB); #c1(AQP1) c2(NP_001171991) c3(aquaporin-1 isoform 4) c4(72164) c5(72165, 72166, 72167, 72168, 72169, 72170) c6( ) c7(cZ, T, dD, ul, ea, adv, ha, al, cz, fF, bB, aj, eq, ci, fr, zP, Rk, q, ad, qW, eA, ip, ady, aaF, ib, Rl, jz, Qk, qK, aT, K, dd, bq, yj, ae, af, adx, ak, nP, zQ, d, nO, aW, Y, vj, xs, adw, cr, ff, kD, en, cl, g, t, as, bz, adz, adA, dS, adu, gk, pZ, zr, dB, Eh, bE, eM, uR, hr, cj, hL, dy, mk, y, cB); #c1(AQP1) c2(NP_932766) c3(aquaporin-1 isoform 1) c4(258997, 258998, 258999, 259000, 259001) c5(259002, 259003, 259004, 259005, 259006, 259007, 259008, 259009, 259010, 259011, 259012, 259013, 259014, 259015, 259016, 259017, 259018, 259019, 259020, 259021, 259022, 259023, 259024, 259025, 259026, 259027, 259028, 259029, 259030, 259031, 259032) c6(259033, 259034) c7(cZ, T, dD, ul, ea, adv, ha, al, cz, fF, bB, aj, eq, ci, fr, zP, Rk, q, ad, qW, eA, ip, ady, aaF, ib, Rl, jz, Qk, qK, aT, K, dd, bq, yj, ae, af, adx, ak, nP, zQ, d, nO, aW, Y, vj, xs, adw, cr, ff, kD, en, cl, g, t, as, bz, adz, adA, dS, adu, gk, pZ, zr, dB, Fh, bE, eM, uR, hr, cj, hL, dy, mk, y, cB); #c1(AQP10) c2(NP_536354) c3(aquaporin-10) c4(231281, 231282) c5(231283, 231284, 231285, 231286, 231287, 231288, 231289, 231290, 231291, 231292, 231293, 231294) c6( ) c7(ac, aw, e, j, af, eu); #c1(AQP2) c2(NP_000477) c3(aquaporin-2) c4(9478) c5(9479, 9480, 9481, 9482, 9483, 9484) c6( ) c7(bL, sY, eR, Hm, al, cz, nA, cd, dP, cc, adC, adD, adB, bq, yj, adF, dq, adE, cl, Rp, uC, Fh, mG, dy, fy, adG); #c1(AQP3) c2(NP_004916) c3(aquaporin-3) c4(150755) c5(150756, 150757, 150758, 150759, 150760, 150761) c6( ) c7(T, sw, yk, Hc, ht, aA, dG, v, ci, qj, Lw, ad, co, ft, hd, adC, nv, qK, oW, aT, dV, dL, K, IQ, yj, ae, eu, Jl, gT, Y, aW, az, AQ, ff, aF, en, Sm, g, t, eE, iV, fy, eM, nB, Fh, hk, adH, uz, adg, nz, iu, pC); #c1(AQP4) c2(NP_001641) c3(aquaporin-4 isoform a) c4( ) c5(119574, 119575, 119576, 119577, 119578, 119579, 119580, 119581, 119582, 119583) c6( ) c7(ul, wi, adP, dA, AS, sC, ha, Ir, cz, aj, uu, adK, mF, il, V, Rk, qW, aR, eA, pd, ip, ke, Mo, aaF, Vp, hd, adL, Db, nv, adN, Qk, hD, IG, cy, abW, K, adJ, bq, H, adO, NM, Wq, bc, hm, adx, eu, ak, hM, nP, d, IR, xs, adM, uY, EZ, g, as, dw, f, bN, dS, adu, Hp, Hw, It, ac, c, nB, dB, wD, Fh, eM, km, adl, vy, mk, hh, cB, gD); #c1(AQP5) c2(NP_001642) c3(aquaporin-5) c4(119584) c5(119585, 119586, 119587, 119588, 119589, 119590, 119591, 119592, 119593, 119594, 119595, 119596, 119597, 119598, 119599, 119600, 119601, 119602, 119603, 119604, 119605, 119606, 119607, 119608, 119609, 119610, 119611, 119612, 119613, 119614, 119615, 119616, 119617, 119618, 119619, 119620, 119621, 119622, 119623, 119624, 119625, 119626, 119627, 119628, 119629, 119630, 119631, 119632, 119633, 119634, 119635, 119636, 119637, 119638, 119639, 119640, 119641, 119642, 119643, 119644, 119645, 119646, 119647, 119648, 119649, 119650, 119651, 119652, 119653, 119654, 119655, 119656, 119657, 119658, 119659, 119660, 119661, 119662, 119663, 119664, 119665, 119666, 119667, 119668, 119669, 119670, 119671, 119672, 119673, 119674, 119675, 119676, 119677, 119678, 119679) c6(119680, 119681, 119682) c7(T, bB, j, C, q, ip, co, qK, aT, ab, adQ, K, eu, iU, iE, aW, ff, r, en, t, bz, eM, bE, wk, at, adR, mk, m, it); #c1(AQP6) c2(NP_001643) c3(aquaporin-6) c4(119683) c5(119684, 119685, 119686, 119687, 119688, 119689) c6( ) c7(rE, Qk, qc, adS); #c1(AQP7) c2(NP_001161) c3(aquaporin-7) c4(66316, 66317, 66318, 66319) c5( ) c6( ) c7(bL, d, dB, aZ, Y, Kk, cz, fQ, nm, mf, dG, qM, v, eA, jj, adT); #c1(AQP7) c2(XP_011516167) c3(aquaporin-7 isoform X2) c4( ) c5(309413) c6( ) c7(bL, d, dB, aZ, Y, Kk, cz, fQ, nm, mf, dG, qM, v, eA, jj, adT); #c1(AQP7) c2(XP_011516169) c3(aquaporin-7 isoform X3) c4( ) c5(309414, 309415, 309416, 309417, 309418, 309419) c6( ) c7(bL, d, dB, aZ, Y, Kk, cz, fQ, nm, mf, dG, qM, v, eA, jj, adT); #c1(AQP7) c2(XP_011516170) c3(aquaporin-7 isoform X4) c4(309420, 309421) c5( ) c6( ) c7(bL, d, dB, aZ, Y, Kk, cz, fQ, nm, mf, dG, qM, v, eA, jj, adT); #c1(AQP8) c2(NP_001160) c3(aguapnrin-8) c4( ) c5( ) c6( ) c7(kl, aZ, vj, qN, iV, eu); #c1(AQP9) c2(NP_066190) c3(aquaporin-9) c4(206831) c5(206832, 206833, 206834, 206835, 206836, 206837, 206838, 206839, 206840, 206841) c6( ) c7(bL, aZ, adU, dG, v, eA, nm, hn, jj, uV, adT, kl, d, iU, Y, vj, aq, dw, bz, ck, Hw, iT, dB, mf, Pk, bt, B); #c1(AR) c2(NP_000035) c3(androgen receptor isoform 1) c4(331, 332, 333, 334, 335, 336) c5(337, 338, 339, 340, 341, 342, 343, 344, 345, 346, 347, 348, 349, 350, 351, 352, 353, 354, 355, 356, 357, 358, 359, 360, 361, 362, 363, 364, 365, 366, 367, 368, 369, 370, 371, 372, 373, 374) c6( ) c7(gh, T, aey, ea, BO, fd, aeu, ci, YD, xy, aex, aE, Iv, hu, li, nY, uY, PQ, afg, nB, aeB, Ig, cX, ht, aj, ml, aeX, ael, adX, Ak, ey, ox, Dz, bl, on, yi, mR, Ln, pm, zZ, hq, dB, JQ, aA, cz, AO, q, aew, aeh, kf, cy, jj, eu, bA, bf, aek, aeS, eS, Lc, cl, pt, rR, acW, ac, iQ, bt, aag, iW, KW, jh, adW, KO, uu, sg, ad, afb, hX, vJ, IQ, wm, aeT, Ub, cW, PE, ff, afi, aeV, bz, DF, aeg, aeH, aed, iu, ne, jr, Fv, if, bB, cL, bh, Ol, ip, ws, aeO, aeN, xQ, aeR, cm, qJ, Kv, AV, vA, mx, vy, in, ik, dD, gD, wu, n, oY, nA, no, Do, aes, eV, aeJ, A, RT, AQ, aeU, po, yq, aeP, bP, GU, cA, PI, hL, aez, fL, NB, B, NQ, dA, eX, v, yU, Kx, aeD, UE, KB, ae, zH, vT, ev, Lf, bu, t, aff, ck, kP, df, eq, hd, vc, uD, mu, d, aeK, kD, Z, dr, aeh, bF, yE, afd, gZ, aef, Kj, y, hV, al, gf, Qp, aej, xE, u, gH, Qk, M, K, dF, eL, aea, UL, Ku, g, uC, AM, aer, aem, U, QF, dW, m, Uw, FW, OI, aw, NT, aeo, Id, KL, kH, yZ, uV, aev, aeF, Pp, Ld, afc, kz, mg, IB, afj, jx, aee, j, pd, eA, J, o, er, aeZ, qv, bq, aeY, kl, Y, r, en, bN, sn, c, kB, aeM, dy, UF, LS, afa, id, aZ, bS, hF, dP, aet, oj, aeQ, xs, PA, nf, gE, BG, jg, iR, FX, dR, Nq, pu, eB, ei, G, acz, afh, aei, aR, il, zQ, LC, aeC, aW, eM, aep, Qw, zv, aeA, Bm, fr, ct, qN, ai, eW, BI, cc, hw, adY, PD, h, dL, Go, SD, Lg, aeG, ael, Nr, Fn, CM, aq, aeW, mo, Rl, op, bJ, adZ, JJ, Ip, bL, rG, aec, rf, hy, Kh, Ns, aT, vH, dz, adV, af, qw, iU, s, ND, oV, hf, pH, nM, yW, im, aen, ID, Fb, mC, qC, av, I, ib, aeL, aeE, pq, na, uQ, afe, gt, aeq, eZ, aF, pc, bE, Lb, XO, X); #c1(AR) c2(NP_001011645) c3(androgen receptor isoform 2) c4(24654) c5(24655, 24656, 24657, 24658, 24659, 24660) c6( ) c7(gh, T, aey, ea, bO, fd, aeu, ci, YD, xy, aex, aE, Iv, hu, li, nY, uY, PQ, afg, nB, aeB, Ig, cX, ht, aj, ml, aeX, ael, adX, Ak, ey, ox, Dz, hi, on, yi, mR, Ln, pm, zZ, hq, dB, JQ, aA, cz, AO, q, aew, aeh, kf, cy, jj, eu, bA, bf, aek, aeS, eS, Lc, cl, pt, rR, acW, ac, iQ, bt, aag, iW, KW, jh, adW, KO, uu, sg, ad, afb, hX, vJ, IQ, wm, aeT, Ub, cW, PE, ff, afi, aeV, bz, DF, aeg, aeH, aed, iu, ne, jr, Fv, if, bB, cL, bh, Ul, ip, ws, aeO, aeN, xQ, aeR, cm, qJ, Kv, AV, vA, mx, vy, in, ik, dD, gU, wu, n, oY, nA, no, Do, aes, eV, aeJ, A, RT, AQ, aeU, po, yq, aeP, bP, GU, cA, PI, hL, aez, fL, NB, B, NQ, dA, eX, v, yU, Kx, aeD, UE, KB, ae, zH, vT, ev, Lf, bu, t, aff, ck, kP, df, eq, hd, vc, uD, mu, d, aeK, kD, Z, dr, aeh, bF, yE, afd, gZ, aef, Kj, y, hV, al, gf, Qp, aej, xE, u, gH, Qk, M, K, dF, eL, aea, UL, Ku, g, uC, AM, aer, aem, U, QF, dW, m, Uw, FW, OI, aw, NT, aeo, Id, KL, kH, yZ, uV, aev, aeF, Pp, Ld, afc, kz, mg, IB, afj, jx, aee, j, pd, eA, J, o, er, aeZ, qv, bq, aeY, kl, Y, r, en, bN, sn, c, kB, aeM, dy, UF, LS, afa, id, aZ, bS, hF, dP, aet, oj, aeQ, xs, PA, nf, gE, BG, jg, iR, FX, dR, Nq, pu, eB, ei, G, acz, afh, aei, aR, il, zQ, LC, aeC, aW, eM, aep, Qw, zv, aeA, Bm, fr, ct, qN, ai, eW, Bl, cc, hw, adY, PD, h, dL, Go, SD, Lg, aeG, ael, Nr, Fn, CM, aq, aeW, mo, Rl, op, bJ, adZ, JJ, Ip, bL, rG, aec, rf, hy, Kh, Ns, aT, vH, dz, adV, af, qw, iU, s, ND, oV, hf, pH, nM, yW, im, aen, ID, Fb, mC, qC, av, I, ib, aeL, aeE, pq, na, uQ, afe, qt, aeq, eZ, aF, pc, bE, Lb, XO, X); #c1(ARAF) c2(NP_001243126) c3(serine/threonine-protein kinase A-Raf isoform 3) c4( ) c5(89976, 89977, 89978, 89979, 89980, 89981, 89982, 89983, 89984, 89985, 89986, 89987) c6( ) c7(iu, T, Y, aT, Ld, OL, g, Qp, B, bN); #c1(ARAF) c2(NP_001645) c3(serine/threonine-protein kinase A-Raf isoform 1) c4(119690, 119691, 119692) c5(119693, 119694, 119695, 119696, 119697, 119698) c6( ) c7(iu, T, Y, aT, Ld, OL, g, Qp, B, bN); #c1(ARAP1) c2(NP_001035207) c3(arf-GAP with Rho-GAP domain, ANK repeat and PH domain-containing protein 1 isoform c) c4(32619, 32620) c5(32621, 32622, 32623, 32624, 32625, 32626, 32627, 32628, 32629, 32630, 32631, 32632, 32633, 32634, 32635, 32636, 32637) c6( ) c7(bL, aW, y, aT); #c1(ARAP1) c2(NP_001128662) c3(arf-GAP with Rho-GAP domain, ANK repeat and PH domain-containing protein 1 isoform d) c4(50489) c5(50490, 50491, 50492, 50493, 50494, 50495) c6( ) c7(bL, aW, y, aT); #c1(ARAP1) c2(NP_056057) c3(arf-GAP with Rho-GAP domain, ANK repeat and PH domain-containing protein 1 isoform a) c4(185412, 185413, 185414) c5(185415, 185416, 185417, 185418, 185419, 185420, 185421, 185422, 185423, 185424, 185425, 185426, 185427, 185428, 185429, 185430, 185431) c6( ) c7(bL, aW, y, aT); #c1(ARAP3) c2(NP_071926) c3(arf-GAP with Rho-GAP domain, ANK repeat and PH domain-containing protein 3) c4(212361) c5(212362, 212363, 212364, 212365, 212366, 212367) c6( ) c7(DS, T, aF, j, h); #c1(ARAP3) c2(XP_005268554) c3(arf-GAP with Rho-GAP domain, ANK repeat and PH domain-containing protein 3 isoform X1) c4(281894, 281895) c5(281896, 281897, 281898, 281899, 281900, 281901) c6( ) c7(DS, T, aF, j, h); #c1(ARAP3) c2(XP_005268557) c3(arf-GAP with Rho-GAP domain, ANK repeat and PH domain-containing protein 3 isoform X6) c4( ) c5(281902, 281903, 281904, 281905, 281906, 281907) c6( ) c7(DS, T, aF, j, h); #c1(ARAP3) c2(XP_006714855) c3(arf-GAP with Rho-GAP domain, ANK repeat and PH domain-containing protein 3 isoform X3) c4(288264) c5(288265, 288266, 288267, 288268, 288269, 288270) c6( ) c7(DS, T, aF, j, h); #c1(ARC) c2(NP_056008) c3(activity-regulated cytoskeleton-associated protein) c4(185097) c5(185098, 185099, 185100, 185101, 185102, 185103, 185104) c6( ) c7(aw, afk, bB, j, fr, afl, jw, q, gM, h, K, af, Y, r, cu, xw, es, sS, iA, bE, mx, R, y); #c1(ARCN1) c2(NP_001135753) c3(coatomer subunit delta isoform 2) c4( ) c5(53081, 53082, 53083, 53084, 53085, 53086) c6( ) c7(oO, bM, T, dD, am, ID, ea, fG, e, cz, n, bS, gf, ct, Jz, j, eq, cd, zo, eA, afo, afm, oz, afn, ds, XY, cU, bl, K, NM, N, aa, ly, sp, ap, afq, Z, bz, DF, lx, oU, TA, cT, ig, at, dy, fD, IC, afp, cE, ao); #c1(ARCN1) c2(NP_001646) c3(coatomer subunit delta isoform 1) c4(119699, 119700, 119701) c5(119702, 119703, 119704, 119705, 119706, 119707, 119708, 119709, 119710, 119711, 119712, 119713) c6( ) c7(oO, bM, T, dD, am, ID, ea, fG, e, cz, n, bS, gf, ct, Jz, j, eq, cd, zo, eA, afo, afm, oz, afn, ds, XY, cU, bl, K, NM, N, aa, ly, sp, ap, afq, Z, bz, DF, lx, oU, TA, cT, ig, at, dy, fD, IC, afp, cE, ao); #c1(ARCN1) c2(XP_005271599) c3(coatomer subunit delta isoform X1) c4(283501) c5(283502, 283503, 283504, 283505, 283506, 283507) c6( ) c7(oO, bM, T, dD, am, ID, ea, fG, e, cz, n, bS, gf, ct, Jz, j, eq, cd, zo, eA, afo, afm, oz, afn, ds, XY, cU, bl, K, NM, N, aa, ly, sp, ap, afq, Z, bz, DF, lx, oU, TA, cT, ig, at, dy, fD, IC, afp, cE, ao); #c1(AREG) c2(NP_001648) c3(amphiregulin preproprotein) c4(119726) c5(119727, 119728, 119729, 119730, 119731, 119732, 119733, 119734, 119735, 119736, 119737, 119738, 119739, 119740, 119741, 119742) c6(119743, 119744) c7(bM, T, aZ, fG, yk, al, iB, aA, bB, fd, hy, Fb, j, ci, pM, nE, zP, AO, q, ad, er, eA, dP, av, afr, iu, wD, aE, Db, gd, aT, h, ji, IQ, fb, ae, aa, zQ, d, s, aW, sp, oV, az, ff, cr, r, kt, aq, fe, kp, aF, en, g, iR, t, iK, KM, TA, gk, zr, eM, bE, gX, m, i, y, B, vi); #c1(ARF1) c2(NP_001019398) c3(ADP-ribosylation factor 1) c4(27762, 27763) c5(27764, 27765, 27766, 27767, 27768, 27769, 27770, 27771, 27772, 27773, 27774, 27775, 27776, 27777, 27778, 27779, 27780, 27781, 27782, 27783) c6( ) c7(T, jv, aW, jx, aA, aT, h, aF, af, rk); #c1(ARF3) c2(NP_001650) c3(ADP-ribnsylatinn factor 3) c4(119745, 119746, 119747, 119748) c5(119749, 119750, 119751, 119752, 119753, 119754, 119755, 119756, 119757, 119758, 119759, 119760, 119761, 119762, 119763, 119764) c6( ) c7(T, vT, aW, aT, K, afs, cm, dR); #c1(ARF3) c2(XP_006719454) c3(ADP-ribnsylatinn factor 3 isoform X2) c4(292473) c5(292474, 292475, 292476, 292477, 292478, 292479, 292480, 292481, 292482, 292483, 292484, 292485, 292486, 292487, 292488, 292489, 292490, 292491) c6( ) c7(T, vT, aW, aT, K, afs, cm, dR); #c1(ARF4) c2(NP_001651) c3(ADP-ribnsylatinn factor 4) c4(119765, 119766, 119767) c5(119768, 119769, 119770, 119771, 119772, 119773, 119774, 119775, 119776, 119777, 119778, 119779, 119780, 119781, 119782, 119783, 119784, 119785) c6( ) c7(aW, T, d, K, aT); #c1(ARF6) c2(NP_001654) c3(ADP-ribnsylatinn factor 6) c4(119793) c5(119794, 119795, 119796, 119797, 119798, 119799) c6( ) c7(T, jv, aW, Y, aT, aft, cy, By, r, aq, eA, h, pz, B, ek, afu); #c1(ARFGAP1) c2(NP_001268411) c3(ADP-ribnsylatinn factor GTPase-activating protein 1 isoform c) c4(99851) c5(99852, 99853, 99854, 99855, 99856, 99857, 99858, 99859, 99860, 99861, 99862, 99863, 99864) c6( ) c7(aR, r); #c1(ARFGAP1) c2(NP_001268412) c3(ADP-ribnsylatinn factor GTPase-activating protein 1 isoform d) c4(99865) c5(99866, 99867, 99868, 99869, 99870, 99871) c6( ) c7(aR, r); #c1(ARFGAP1) c2(NP_001268413) c3(ADP-ribnsylatinn factor GTPase-activating protein 1 isoform e) c4(99872) c5(99873, 99874, 99875, 99876, 99877, 99878) c6( ) c7(aR, r); #c1(ARFGAP1) c2(NP_060679) c3(ADP-ribnsylatinn factor GTPase-activating protein 1 isoform a) c4(197129, 197130) c5(197131, 197132, 197133, 197134, 197135, 197136) c6( ) c7(aR, r); #c1(ARFGAP1) c2(NP_783202) c3(ADP-ribnsylatinn factor GTPase-activating protein 1 isoform b) c4(251572) c5(251573, 251574, 251575, 251576, 251577, 251578) c6( ) c7(aR, r); #c1(ARFGAP1) c2(XP_006723886) c3(ADP-ribnsylatinn factor GTPase-activating protein 1 isoform X2) c4(295431, 295432) c5( ) c6( ) c7(aR, r); #c1(ARFGAP1) c2(XP_011527204) c3(ADP-ribnsylatinn factor GTPase-activating protein 1 isoform X3) c4( ) c5(321742, 321743, 321744, 321745, 321746, 321747, 321748, 321749, 321750, 321751, 321752, 321753, 321754) c6( ) c7(aR, r); #c1(ARFGAP2) c2(NP_001229761) c3(ADP-ribnsylatinn factor GTPase-activating protein 2 isoform 2) c4(85177) c5(85178, 85179, 85180, 85181, 85182, 85183, 85184, 85185, 85186, 85187, 85188, 85189, 85190, 85191, 85192, 85193, 85194, 85195) c6( ) c7(aA); #c1(ARFGAP2) c2(NP_115765) c3(ADP-ribnsylatinn factor GTPase-activating protein 2 isoform 1) c4(223859) c5(223860, 223861, 223862, 223863, 223864, 223865, 223866) c6( ) c7(aA); #c1(ARFGAP2) c2(XP_005253225) c3(ADP-ribnsylatinn factor GTPase-activating protein 2 isoform X4) c4(272286) c5( ) c6( ) c7(aA); #c1(ARFGAP2) c2(XP_011518707) c3(ADP-ribosylation factor GTPase-activating protein 2 isoform X5) c4(313126) c5( ) c6( ) c7(aA); #c1(ARFGAP3) c2(NP_001135765) c3(ADP-ribnsylatinn factor GTPase-activating protein 3 isoform 2) c4(53165, 53166, 53167) c5(53168, 53169, 53170, 53171, 53172, 53173, 53174, 53175, 53176, 53177, 53178, 53179, 53180, 53181, 53182, 53183, 53184, 53185) c6( ) c7(ae, ad, r); #c1(ARFGAP3) c2(NP_055385) c3(ADP-ribnsylatinn factor GTPase-activating protein 3 isoform 1) c4(180712) c5(180713, 180714, 180715, 180716, 180717, 180718) c6( ) c7(ae, ad, r); #c1(ARFGAP3) c2(XP_005261582) c3(ADP-ribosylation factor GTPase-activating protein 3 isoform X1) c4(277497) c5(277498, 277499, 277500, 277501, 277502, 277503) c6( ) c7(ae, ad, r); #c1(ARFGEF1) c2(NP_006412) c3(brefeldin A-inhibited guanine nucleotide-exchange protein 1) c4(164809) c5(164810, 164811, 164812, 164813, 164814, 164815) c6( ) c7(bM, T, aW, afi, aT, afv, ey); #c1(ARFGEF2) c2(NP_006411) c3(brefeldin A-inhibited guanine nucleotide-exchange protein 2) c4(164795, 164796) c5(164797, 164798, 164799, 164800, 164801, 164802, 164803, 164804, 164805, 164806, 164807, 164808) c6( ) c7(afy, rf, afw, afz, bK, ey, QK, afx, fh, cC); #c1(ARFGEF3) c2(NP_065073) c3(brefeldin A-inhibited guanine nucleotide-exchange protein 3) c4(203633, 203634) c5(203635, 203636, 203637, 203638, 203639, 203640, 203641, 203642, 203643, 203644, 203645, 203646) c6( ) c7(aW, aT); #c1(ARFIP1) c2(NP_001020766) c3(arfaptin-1 isoform 1) c4(29010) c5(29011, 29012, 29013, 29014, 29015, 29016, 29017, 29018, 29019, 29020) c6( ) c7(eG, jN); #c1(ARFIP1) c2(NP_055262) c3(arfaptin-1 isoform 2) c4(180130) c5(180131, 180132, 180133, 180134, 180135, 180136, 180137, 180138, 180139, 180140) c6( ) c7(eG, jN); #c1(ARFRP1) c2(NP_001128230) c3(ADP-ribosylation factor-related protein 1 isoform b) c4(49737, 49738, 49739) c5(49740, 49741, 49742, 49743, 49744, 49745) c6( ) c7(ck, BC, BD, oV, fd, aq, K, hF, B); #c1(ARFRP1) c2(NP_001254474) c3(ADP-ribosylation factor-related protein 1 isoform d) c4( ) c5(94372, 94373, 94374, 94375, 94376, 94377, 94378, 94379, 94380, 94381, 94382, 94383) c6( ) c7(ck, BC, BD, oV, fd, aq, K, hF, B); #c1(ARFRP1) c2(NP_001254475) c3(ADP-ribosylation factor-related protein 1 isoform e) c4( ) c5(94384, 94385, 94386, 94387, 94388, 94389) c6( ) c7(ck, BC, BD, oV, fd, aq, K, hF, B); #c1(ARFRP1) c2(NP_001254477) c3(ADP-ribosylation factor-related protein 1 isoform a) c4(94390, 94391) c5(94392, 94393, 94394, 94395, 94396, 94397, 94398, 94399, 94400, 94401) c6( ) c7(ck, BC, BD, oV, fd, aq, K, hF, B); #c1(ARG1) c2(NP_000036) c3(arginase-1 isoform 2) c4(375, 376) c5(377, 378, 379, 380, 381, 382, 383, 384, 385, 386, 387, 388, 389, 390, 391, 392, 393, 394, 395, 396, 397, 398, 399, 400, 401, 402, 403, 404, 405, 406, 407, 408, 409, 410, 411, 412, 413, 414, 415, 416, 417, 418, 419, 420, 421, 422, 423, 424, 425, 426, 427, 428, 429, 430, 431, 432, 433, 434, 435, 436, 437, 438, 439, 440, 441, 442, 443, 444, 445, 446, 447, 448, 449, 450, 451, 452, 453, 454, 455, 456, 457, 458, 459, 460, 461, 462, 463, 464, 465, 466, 467, 468, 469, 470, 471, 472, 473, 474, 475) c6(476) c7(bM, T, dD, Dw, afA, ea, fG, e, ht, jx, aw, aA, cR, cz, v, j, eq, bh, pM, fr, afD, qW, ad, ady, jz, oj, Lv, IG, Ds, cy, bq, hu, ae, rL, afC, Y, EU, hl, cr, afB, fQ, dq, hJ, LB, iO, D, fT, eM, z, Vy, Ny, E, IC, B, y); #c1(ARG1) c2(NP_001231367) c3(arginase-1 isoform 1) c4(87252) c5(87253, 87254, 87255, 87256, 87257, 87258) c6( ) c7(bM, T, dD, Dw, afA, ea, fG, e, ht, jx, aw, aA, cR, cz, v, j, eq, bh, pM, fr, afD, qW, ad, ady, jz, oj, Lv, IG, Ds, cy, bq, hu, ae, rL, afC, Y, EU, hl, cr, afB, fQ, dq, hJ, LB, iO, D, fT, eM, z, Vy, Ny, E, IC, B, y); #c1(ARGLU1) c2(NP_060481) c3(arginine and glutamate-rich protein 1) c4(196166, 196167, 196168) c5(196169, 196170, 196171, 196172, 196173, 196174, 196175, 196176, 196177, 196178, 196179, 196180, 196181, 196182, 196183, 196184, 196185, 196186, 196187) c6( ) c7(Z, aW, aj, aT); #c1(ARHGAP1) c2(XP_011518397) c3(rho GTPase-activating protein 1 isoform X1) c4(312363, 312364, 312365) c5(312366, 312367, 312368, 312369, 312370, 312371, 312372, 312373, 312374, 312375, 312376, 312377, 312378, 312379, 312380, 312381, 312382, 312383) c6( ) c7(iu, T, aE, aW, KW, aT, nf, cz, aq, K, nA, iR, yj, ae, B, ad); #c1(ARHGAP10) c2(NP_078881) c3(rho GTPase-activating protein 10) c4(215876) c5(215877, 215878, 215879, 215880, 215881, 215882) c6( ) c7(aW, oe, EQ, aT); #c1(ARHGAP10) c2(XP_005263272) c3(rho GTPase-activating protein 10 isoform X1) c4(278380) c5(278381, 278382, 278383, 278384, 278385, 278386) c6( ) c7(aW, oe, EQ, aT); #c1(ARHGAPIIA) c2(NP_001273408) c3(rho GTPase-activating protein 11A isoform 3) c4(104846) c5(104847, 104848, 104849, 104850, 104851) c6( ) c7(bB, T, v, ey, K); #c1(ARHGAP11A) c2(NP_055598) c3(rho GTPase-activating protein 11A isoform 1) c4(182177) c5(182178, 182179, 182180, 182181, 182182, 182183, 182184) c6( ) c7(bB, T, v, ey, K); #c1(ARHGAP11A) c2(NP_955389) c3(rho GTPase-activating protein 11A isoform 2) c4(261660) c5(261661, 261662, 261663, 261664, 261665, 261666) c6( ) c7(bB, T, v, ey, K); #c1(ARHGAP11B) c2(NP_001034930) c3(rho GTPase-activating protein 11B) c4(32397) c5(32398, 32399, 32400, 32401, 32402, 32403, 32404, 32405, 32406, 32407) c6( ) c7(ac); #c1(ARHGAP15) c2(NP_060930) c3(rho GTPase-activating protein 15) c4(198749) c5(198750, 198751, 198752, 198753, 198754, 198755) c6( ) c7(cd, K); #c1(ARHGAP18) c2(NP_277050) c3(rho GTPase-activating protein 18) c4(228814) c5(228815, 228816, 228817, 228818, 228819, 228820, 228821) c6( ) c7(Lu, c, dL, yH, K, eL, af); #c1(ARHGAP18) c2(XP_005267269) c3(rho GTPase-activating protein 18 isoform X1) c4(280843) c5(280844, 280845, 280846, 280847, 280848) c6( ) c7(Lu, c, dL, yH, K, eL, af); #c1(ARHGAP20) c2(NP_001245344) c3(rho GTPase-activating protein 20 isoform 2) c4(93165) c5(93166, 93167, 93168, 93169, 93170, 93171) c6( ) c7(cj); #c1(ARHGAP20) c2(NP_001245345) c3(rho GTPase-activating protein 20 isoform 3) c4(93172) c5(93173, 93174, 93175, 93176, 93177, 93178, 93179, 93180, 93181, 93182) c6( ) c7(cj); #c1(ARHGAP20) c2(XP_005271685) c3(rho GTPase-activating protein 20 isoform X2) c4(283528) c5(283529, 283530, 283531, 283532, 283533) c6( ) c7(cj); #c1(ARHGAP20) c2(XP_006718956) c3(rho GTPase-activating protein 20 isoform X1) c4(292119, 292120) c5(292121, 292122, 292123, 292124, 292125, 292126, 292127, 292128, 292129, 292130, 292131, 292132, 292133, 292134, 292135, 292136, 292137) c6( ) c7(cj); #c1(ARHGAP21) c2(XP_005252599) c3(rho GTPase-activating protein 21 isoform X1) c4(271916, 271917) c5(271918, 271919, 271920, 271921, 271922, 271923, 271924, 271925, 271926, 271927, 271928, 271929, 271930) c6( ) c7(aW, d, aT); #c1(ARHGAP21) c2(XP_005252601) c3(rho GTPase-activating protein 21 isoform X4) c4(271931, 271932, 271933) c5(271934, 271935, 271936, 271937, 271938, 271939, 271940, 271941, 271942, 271943, 271944, 271945, 271946, 271947, 271948, 271949, 271950, 271951, 271952, 271953, 271954, 271955) c6( ) c7(aW, d, aT); #c1(ARHGAP21) c2(XP_011517906) c3(rho GTPase-activating protein 21 isoform X2) c4( ) c5(311830, 311831, 311832, 311833, 311834, 311835) c6( ) c7(aW, d, aT); #c1(ARHGAP21) c2(XP_011517907) c3(rho GTPase-activating protein 21 isoform X3) c4(311836) c5( ) c6( ) c7(aW, d, aT); #c1(ARHGAP21) c2(XP_011517908) c3(rho GTPase-activating protein 21 isoform X5) c4( ) c5(311837, 311838, 311839, 311840, 311841, 311842) c6( ) c7(aW, d, aT); #c1(ARHGAP21) c2(XP_011517909) c3(rho GTPase-activating protein 21 isoform X6) c4(311843, 311844, 311845) c5(311846, 311847, 311848, 311849, 311850, 311851, 311852) c6( ) c7(aW, d, aT); #c1(ARHGAP22) c2(NP_001242953) c3(rho GTPase-activating protein 22 isoform 1) c4(89432) c5(89433, 89434, 89435, 89436, 89437, 89438, 89439, 89440, 89441, 89442, 89443, 89444) c6( ) c7(oe, vy, aj, ey, Gp, J); #c1(ARHGAP22) c2(NP_001242954) c3(rho GTPase-activating protein 22 isoform 2) c4(89445) c5(89446, 89447, 89448, 89449, 89450, 89451) c6( ) c7(oe, vy, aj, ey, Gp, J); #c1(ARHGAP22) c2(NP_001242955) c3(rho GTPase-activating protein 22 isoform 4) c4(89452) c5(89453, 89454, 89455, 89456, 89457, 89458) c6( ) c7(oe, vy, aj, ey, Gp, J); #c1(ARHGAP22) c2(NP_067049) c3(rho GTPase-activating protein 22 isoform 3) c4(208731) c5(208732, 208733, 208734, 208735, 208736, 208737) c6( ) c7(oe, vy, aj, ey, Gp, J); #c1(ARHGAP22) c2(XP_011538309) c3(rho GTPase-activating protein 22 isoform X5) c4(335994) c5( ) c6( ) c7(oe, vy, aj, ey, Gp, J); #c1(ARHGAP22) c2(XP_011538314) c3(rho GTPase-activating protein 22 isoform X10) c4( ) c5(335995) c6( ) c7(oe, vy, aj, ey, Gp, J); #c1(ARHGAP23) c2(NP_001186346) c3(rho GTPase-activating protein 23) c4(77500) c5(77501, 77502, 77503, 77504, 77505, 77506) c6( ) c7(kl); #c1(ARHGAP23) c2(XP_006722054) c3(rho GTPase-activating protein 23 isoform X2) c4( ) c5(294560) c6( ) c7(kl); #c1(ARHGAP23) c2(XP_006722057) c3(rho GTPase-activating protein 23 isoform X8) c4(294561) c5(294562, 294563, 294564, 294565, 294566, 294567) c6( ) c7(kl); #c1(ARHGAP23) c2(XP_011523376) c3(rho GTPase-activating protein 23 isoform X3) c4(317907) c5(317908, 317909, 317910, 317911, 317912) c6( ) c7(kl); #c1(ARHGAP23) c2(XP_011523379) c3(rho GTPase-activating protein 23 isoform X9) c4( ) c5(317913) c6( ) c7(kl); #c1(ARHGAP24) c2(NP_112595) c3(rho GTPase-activating protein 24 isoform 2) c4(221526) c5(221527, 221528, 221529, 221530, 221531, 221532) c6( ) c7(gh, T, os, ea, if, al, EQ, fd, bB, ci, Hr, ip, x, aE, Ma, K, hu, eL, Jl, aW, g, as, eF, ir, cm, bw, eM, nB, iA, iT, cj, iS, k, m, dD, ht, NT, n, afE, fr, qN, br, co, jz, hn, dL, hB, MD, GA, aq, YE, bP, dB, eD, hL, pV, eo, it, B, fM, jx, aA, V, q, eA, qK, aT, jj, ae, af, jf, qw, s, iU, Y, r, en, hf, cl, t, iK, ck, sk, cT, gX, dy, bt, aD, iW, jh, oZ, oH, eq, hF, Fc, ad, afb, hX, iC, hd, io, vw, yF, d, afF, ff, eH, aF, bz, Hp, es, gk, bE, Km, aS, adg, iu); #c1(ARHGAP24) c2(XP_005263320) c3(rho GTPase-activating protein 24 isoform X2) c4(278415, 278416) c5(278417, 278418, 278419, 278420, 278421, 278422, 278423, 278424, 278425, 278426, 278427, 278428, 278429, 278430) c6( ) c7(gh, T, os, ea, if, al, EQ, fd, bB, ci, Hr, ip, x, aE, Ma, K, hu, eL, Jl, aW, g, as, eF, ir, cm, bw, eM, nB, iA, iT, cj, iS, k, m, dD, ht, NT, n, afE, fr, qN, br, co, jz, hn, dL, hB, MD, GA, aq, YE, bP, dB, eD, hL, pV, eo, it, B, fM, jx, aA, V, q, eA, qK, aT, jj, ae, af, jf, qw, s, iU, Y, r, en, hf, cl, t, iK, ck, sk, cT, gX, dy, bt, aD, iW, jh, oZ, oH, eq, hF, Fc, ad, afb, hX, iC, hd, io, vw, yF, d, afF, ff, eH, aF, bz, Hp, es, gk, bE, Km, aS, adg, iu); #c1(ARHGAP24) c2(XP_011530602) c3(rho GTPase-activating protein 24 isoform X1) c4(326503, 326504) c5(326505, 326506, 326507, 326508, 326509, 326510, 326511, 326512, 326513, 326514) c6( ) c7(gh, T, os, ea, if, al, EQ, fd, bB, ci, Hr, ip, x, aE, Ma, K, hu, eL, Jl, aW, g, as, eF, ir, cm, bw, eM, nB, iA, iT, cj, iS, k, m, dD, ht, NT, n, afE, fr, qN, br, co, jz, hn, dL, hB, MD, GA, aq, YE, bP, dB, eD, hL, pV, eo, it, B, fM, jx, aA, V, q, BA, qK, aT, jj, ae, af, jf, qw, s, iU, Y, r, en, hf, cl, t, iK, ck, sk, cT, gX, dy, bt, aD, iW, jh, oZ, oH, eq, hF, Fc, ad, afb, hX, iC, hd, io, vw, yF, d, afF, ff, eH, aF, bz, Hp, es, gk, bE, Km, aS, adg, iu); #c1(ARHGAP25) c2(NP_001007232) c3(rho GTPase-activating protein 25 isoform a) c4(22579) c5(22580, 22581, 22582, 22583, 22584, 22585, 22586, 22587) c6( ) c7(EQ); #c1(ARHGAP25) c2(NP_001159748) c3(rho GTPase-activating protein 25 isoform c) c4(64665, 64666, 64667, 64668) c5(64669, 64670, 64671, 64672, 64673, 64674, 64675, 64676, 64677, 64678, 64679, 64680, 64681, 64682, 64683, 64684, 64685, 64686, 64687, 64688, 64689, 64690, 64691, 64692) c6( ) c7(EQ); #c1(ARHGAP25) c2(NP_001159749) c3(rho GTPase-activating protein 25 isoform d) c4(64693) c5(64694, 64695, 64696, 64697, 64698, 64699) c6( ) c7(EQ); #c1(ARHGAP25) c2(NP_055697) c3(rho GTPase-activating protein 25 isoform b) c4(182847) c5(182848, 182849, 182850, 182851, 182852, 182853) c6( ) c7(EQ); #c1(ARHGAP25) c2(XP_005264732) c3(rho GTPase-activating protein 25 isoform X1) c4(279220) c5(279221, 279222, 279223, 279224, 279225, 279226) c6( ) c7(EQ); #c1(ARHGAP25) c2(XP_011531510) c3(rho GTPase-activating protein 25 isoform X2) c4(327662) c5(327663, 327664, 327665, 327666, 327667, 327668, 327669, 327670) c6( ) c7(EQ); #c1(ARHGAP26) c2(NP_001129080) c3(rho GTPase-activating protein 26 isoform b) c4(50757, 50758) c5(50759, 50760, 50761, 50762, 50763, 50764, 50765, 50766, 50767, 50768, 50769, 50770) c6( ) c7(bL, ck, T, pq, iT, iU, iZ, bw, nA, cm, bt, br); #c1(ARHGAP26) c2(NP_055886) c3(rho GTPase-activating protein 26 isoform a) c4(184167, 184168) c5(184169, 184170, 184171, 184172, 184173, 184174) c6( ) c7(bL, ck, T, pq, iT, iU, iZ, bw, nA, cm, bt, br); #c1(ARHGAP26) c2(XP_005268459) c3(rho GTPase-activating protein 26 isoform X5) c4(281822) c5(281823, 281824, 281825, 281826, 281827, 281828, 281829, 281830, 281831, 281832, 281833, 281834) c6( ) c7(bL, ck, T, pq, iT, iU, iZ, bw, nA, cm, bt, br); #c1(ARHGAP27) c2(NP_777579) c3(rho GTPase-activating protein 27 isoform c) c4(251234, 251235) c5(251236, 251237, 251238, 251239, 251240, 251241, 251242, 251243, 251244, 251245, 251246, 251247, 251248, 251249, 251250, 251251) c6( ) c7(m); #c1(ARHGAP27) c2(NP_954976) c3(rho GTPase-activating protein 27 isoform a) c4(261496, 261497) c5( ) c6( ) c7(m); #c1(ARHGAP27) c2(XP_005257185) c3(rho GTPase-activating protein 27 isoform X8) c4(274733) c5(274734, 274735, 274736, 274737, 274738, 274739) c6( ) c7(m); #c1(ARHGAP27) c2(XP_006721808) c3(rho GTPase-activating protein 27 isoform X3) c4(294279, 294280) c5(294281, 294282, 294283, 294284, 294285, 294286, 294287, 294288, 294289, 294290, 294291, 294292, 294293, 294294, 294295, 294296, 294297, 294298, 294299, 294300, 294301, 294302, 294303, 294304, 294305, 294306, 294307, 294308, 294309, 294310, 294311, 294312, 294313, 294314) c6( ) c7(m); #c1(ARHGAP27) c2(XP_006725322) c3(rho GTPase-activating protein 27 isoform X3) c4(296762) c5(296763, 296764, 296765, 296766, 296767, 296768) c6( ) c7(m); #c1(ARHGAP27) c2(XP_011522774) c3(rho GTPase-activating protein 27 isoform X7) c4( ) c5(317301) c6( ) c7(m); #c1(ARHGAP28) c2(NP_001010000) c3(rho GTPase-activating protein 28) c4(23815) c5(23816, 23817, 23818, 23819, 23820, 23821, 23822, 23823) c6( ) c7(dP, j); #c1(ARHGAP28) c2(XP_005258201) c3(rho GTPase-activating protein 28 isoform X1) c4( ) c5(275542, 275543) c6( ) c7(dP, j); #c1(ARHGAP28) c2(XP_005258202) c3(rho GTPase-activating protein 28 isoform X2) c4(275544, 275545, 275546, 275547, 275548, 275549) c5(275550, 275551, 275552, 275553, 275554, 275555, 275556, 275557, 275558, 275559, 275560, 275561, 275562, 275563, 275564, 275565, 275566, 275567, 275568, 275569, 275570, 275571, 275572, 275573, 275574, 275575, 275576, 275577, 275578, 275579) c6( ) c7(dP, j); #c1(ARHGAP28) c2(XP_005258203) c3(rho GTPase-activating protein 28 isoform X3) c4( ) c5(275580, 275581, 275582, 275583, 275584, 275585) c6( ) c7(dP, j); #c1(ARHGAP30) c2(NP_001020769) c3(rho GTPase-activating protein 30 isoform 1) c4(29021, 29022) c5(29023, 29024, 29025, 29026, 29027, 29028) c6( ) c7(kl); #c1(ARHGAP30) c2(NP_859071) c3(rho GTPase-activating protein 30 isoform 2) c4(255488) c5(255489, 255490, 255491, 255492, 255493, 255494, 255495, 255496, 255497, 255498, 255499, 255500) c6( ) c7(kl); #c1(ARHGAP31) c2(NP_065805) c3(rho GTPase-activating protein 31) c4(205617, 205618) c5(205619, 205620, 205621, 205622, 205623, 205624, 205625, 205626, 205627, 205628, 205629, 205630) c6( ) c7(afG, aW, hp, j, aT); #c1(ARHGAP32) c2(NP_001136157) c3(rho GTPase-activating protein 32 isoform 1) c4(54456, 54457, 54458) c5(54459, 54460, 54461, 54462, 54463, 54464, 54465, 54466, 54467, 54468, 54469, 54470, 54471) c6( ) c7(K); #c1(ARHGAP32) c2(XP_011541376) c3(rho GTPase-activating protein 32 isoform X4) c4(339997) c5(339998, 339999, 340000, 340001, 340002) c6( ) c7(K); #c1(ARHGAP32) c2(XP_011541377) c3(rho GTPase-activating protein 32 isoform X5) c4( ) c5(340003, 340004, 340005, 340006, 340007, 340008) c6( ) c7(K); #c1(ARHGAP35) c2(NP_004482) c3(rho GTPase-activating protein 35) c4(146778, 146779, 146780) c5(146781, 146782, 146783, 146784, 146785, 146786, 146787, 146788, 146789, 146790, 146791, 146792, 146793) c6( ) c7(Y, r, BA, q, ci, Fc, ai); #c1(ARHGAP35) c2(XP_011525175) c3(rho GTPase-activating protein 35 isoform X1) c4( ) c5(319619, 319620, 319621, 319622, 319623, 319624) c6( ) c7(Y, r, eA, q, ci, Fc, ai); #c1(ARHGAP4) c2(NP_001158213) c3(rho GTPase-activating protein 4 isoform 1) c4(63403) c5(63404, 63405, 63406, 63407, 63408, 63409, 63410, 63411, 63412, 63413, 63414, 63415) c6( ) c7(h, yj, adB, j); #c1(ARHGAP4) c2(NP_001657) c3(rho GTPase-activating protein 4 isoform 2) c4(119800, 119801, 119802, 119803) 119821) c6( ) c7(h, yj, adB, j); #c1(ARHGAP42) c2(NP_689645) c3(rho GTPase-activating protein 42) c4(243418) c5(243419, 243420, 243421, 243422, 243423, 243424) c6( ) c7(oe, j, cz); #c1(ARHGAP5) c2(NP_001164) c3(rho GTPase-activating protein 5 isoform b) c4(67260, 67261) c5( ) c6( ) c7(av, bz, B); #c1(ARHGAP5) c2(XP_005267692) c3(rho GTPase-activating protein 5 isoform X1) c4(281201, 281202, 281203, 281204, 281205) c5(281206, 281207, 281208, 281209, 281210, 281211, 281212, 281213, 281214, 281215, 281216, 281217, 281218, 281219, 281220, 281221) c6( ) c7(av, bz, B); #c1(ARHGAP6) c2(NP_001274171) c3(rho GTPase-activating protein 6 isoform 6) c4( ) c5(106101) c6( ) c7(Ud, afH, cz); #c1(ARHGAP6) c2(NP_006116) c3(rho GTPase-activating protein 6 isoform 3) c4(162188, 162189) c5(162190, 162191, 162192, 162193, 162194, 162195, 162196, 162197, 162198, 162199, 162200, 162201, 162202, 162203, 162204, 162205, 162206, 162207, 162208, 162209, 162210, 162211, 162212, 162213) c6( ) c7(Ud, afH, cz); #c1(ARHGAP6) c2(NP_038267) c3(rho GTPase-activating protein 6 isoform 4) c4(176341) c5(176342, 176343, 176344, 176345, 176346, 176347, 176348, 176349, 176350) c6( ) c7(Ud, afH, cz); #c1(ARHGAP6) c2(NP_038286) c3(rho GTPase-activating protein 6 isoform 1) c4(176351, 176352, 176353, 176354) c5(176355, 176356, 176357, 176358, 176359, 176360, 176361, 176362, 176363, 176364, 176365, 176366, 176367, 176368) c6( ) c7(Ud, afH, cz); #c1(ARHGAP9) c2(NP_001073625) c3(rho GTPase-activating protein 9 isoform 3) c4(36091, 36092, 36093) c5(36094, 36095, 36096, 36097, 36098, 36099, 36100, 36101, 36102, 36103, 36104, 36105, 36106, 36107, 36108) c6( ) c7(cR, afl, mw, lu); #c1(ARHGAP9) c2(NP_001073626) c3(rho GTPase-activating protein 9 isoform 2) c4( ) c5(36109, 36110, 36111, 36112, 36113, 36114, 36115) c6( ) c7(cR, afl, mw, lu); #c1(ARHGAP9) c2(NP_115885) c3(rho GTPase-activating protein 9 isoform 1) c4(224503, 224504, 224505, 224506, 224507) c5(224508, 224509, 224510, 224511, 224512, 224513, 224514, 224515, 224516, 224517, 224518, 224519, 224520, 224521) c6( ) c7(cR, afl, mw, lu); #c1(ARHGAP9) c2(XP_005269142) c3(rho GTPase-activating protein 9 isoform X8) c4( ) c5(282358, 282359, 282360, 282361, 282362, 282363) c6( ) c7(cR, afl, mw, lu); #c1(ARHGAP9) c2(XP_006719623) c3(rho GTPase-activating protein 9 isoform X4) c4(292712, 292713, 292714) c5(292715, 292716, 292717, 292718, 292719, 292720, 292721, 292722, 292723, 292724, 292725, 292726) c6( ) c7(cR, afl, mw, lu); #c1(ARHGAP9) c2(XP_011536965) c3(rho GTPase-activating protein 9 isoform X11) c4( ) c5(334650, 334651, 334652, 334653, 334654, 334655, 334656, 334657, 334658, 334659, 334660, 334661, 334662) c6( ) c7(cR, afl, mw, lu); #c1(ARHGDIA) c2(NP_001288171) c3(rho GDP-dissociation inhibitor 1 isoform d) c4( ) c5(113678, 113679, 113680, 113681) c6( ) c7(d, aW, aT, cz, n, afK, h, ah, afL, ci, iV, Fc, afJ); #c1(ARHGDIA) c2(NP_004300) c3(rho GDP-dissociation inhibitor 1 isoform a) c4(144973, 144974) c5(144975, 144976, 144977, 144978, 144979, 144980, 144881, 144982, 144983, 144984, 144985, 144986, 144987, 144988, 144989) c6( ) c7(d, aW, aT, cz, n, afK, h, ah, afL, ci, iV, Fc, afJ); #c1(ARHGDIB) c2(XP_011518968) c3(rho GDP-dissociation inhibitor 2 isoform X1) c4(313392, 313393, 313394, 313395) c5(313396, 313397, 313398, 313399, 313400, 313401, 313402, 313403, 313404, 313405, 313406, 313407, 313408, 313409, 313410, 313411, 313412, 313413, 313414, 313415, 313416, 313417, 313418, 313419, 313420, 313421, 313422, 313423, 313424, 313425, 313426, 313427) c6( ) c7(T, eX, aA, at, h, afK, dL, aF, eV, eL, q, ad); #c1(ARHGEF1) c2(NP_945328) c3(rho guanine nucleotide exchange factor 1 isoform 3) c4(260829) c5(260830, 260831, 260832, 260833, 260834, 260835) c6( ) c7(ck, T, afN, Qy, bP, iU, aW, afM, aT, K, g, bt); #c1(ARHGEF1) c2(NP_945353) c3(rho guanine nucleotide exchange factor 1 isoform 1) c4(260879, 260880) c5(260881, 260882, 260883, 260884, 260885, 260886, 260887, 260888, 260889, 260890, 260891, 260892) c6( ) c7(ck, T, afN, Qy, bP, iU, aW, afM, aT, K, g, bt); #c1(ARHGEF1) c2(XP_005259446) c3(rho guanine nucleotide exchange factor 1 isoform X4) c4(276096) c5( ) c6( ) c7(ck, T, afN, Qy, bP, iU, aW, afM, aT, K, g, bt); #c1(ARHGEF1) c2(XP_005259447) c3(rho guanine nucleotide exchange factor 1 isoform X6) c4(276097) c5(276098, 276099, 276100, 276101, 276102, 276103) c6( ) c7(ck, T, afN, Qy, bP, iU, aW, afM, aT, K, g, bt); #c1(ARHGEF1) c2(XP_006723526) c3(rho guanine nucleotide exchange factor 1 isoform X7) c4( ) c5(295228, 295229, 295230, 295231, 295232, 295233) c6( ) c7(ck, T, afN, Qy, bP, iU, aW, afM, aT, K, g, bt); #c1(ARHGEF10) c2(NP_055444) c3(rho guanine nucleotide exchange factor 10) c4(181173) c5(181174, 181175, 181176, 181177, 181178) c6( ) c7(afP, afO, EQ, bU); #c1(ARHGEF10) c2(XP_006725170) c3(rho guanine nucleotide exchange factor 10 isoform X5) c4(296702) c5( ) c6( ) c7(afP, afO, EQ, bU); #c1(ARHGEF10) c2(XP_011544865) c3(rho guanine nucleotide exchange factor 10 isoform X1) c4(343866) c5( ) c6( ) c7(afP, afO, EQ, bU); #c1(ARHGEF10L) c2(XP_011539993) c3(rho guanine nucleotide exchange factor 10-like protein isoform X4) c4(338313) c5( ) c6( ) c7(hk, Y, afQ, ff, en); #c1(ARHGEF10L) c2(XP_011539996) c3(rho guanine nucleotide exchange factor 10-like protein isoform X7) c4( ) c5(338314) c6( ) c7(hk, Y, afQ, ff, en); #c1(ARHGEF10L) c2(XP_011539997) c3(rho guanine nucleotide exchange factor 10-like protein isoform X10) c4( ) c5(338315, 338316, 338317, 338318, 338319) c6( ) c7(hk, Y, afQ, ff, en); #c1(ARHGEF11) c2(NP_055599) c3(rho guanine nucleotide exchange factor 11 isoform 1) c4(182185) c5(182186, 182187, 182188, 182189, 182190, 182191) c6( ) c7(bL, av, T, aT, jy, mf, dy, bz, us); #c1(ARHGEF11) c2(NP_937879) c3(rho guanine nucleotide exchange factor 11 isoform 2) c4(259381) c5(259382, 259383, 259384, 259385, 259386, 259387) c6( ) c7(bL, av, T, aT, jy, mf, dy, bz, us); #c1(ARHGEF11) c2(XP_011508492) c3(rho guanine nucleotide exchange factor 11 isoform X15) c4(299211) c5(299212, 299213, 299214, 299215, 299216, 299217) c6( ) c7(bL, av, T, aT, jy, mf, dy, bz, us); #c1(ARHGEF12) c2(NP_001185594) c3(rho guanine nucleotide exchange factor 12 isoform 2) c4(75972) c5(75973, 75974, 75975, 75976, 75977, 75978) c6( ) c7(bL, ck, aW, ff, r, aT, ei, en, bt, ae, q, ad); #c1(ARHGEF12) c2(NP_056128) c3(rho guanine nucleotide exchange factor 12 isoform 1) c4(185808) c5(185809, 185810, 185811, 185812, 185813, 185814) c6( ) c7(bL, ck, aW, ff, r, aT, ei, en, bt, ae, q, ad); #c1(ARHGEF15) c2(NP_776089) c3(rho guanine nucleotide exchange factor 15) c4(250845, 250846) c5(250847, 250848, 250849, 250850, 250851, 250852, 250853, 250854, 250855, 250856, 250857, 250858, 250859, 250860, 250861, 250862) c6( ) c7(ha); #c1(ARHGEF16) c2(XP_011539555) c3(rho guanine nucleotide exchange factor 16 isoform X1) c4(337776, 337777) c5(337778, 337779, 337780, 337781, 337782, 337783, 337784, 337785, 337786, 337787, 337788, 337789) c6( ) c7(Fc); #c1(ARHGEF17) c2(NP_055601) c3(rho guanine nucleotide exchange factor 17) c4(182192) c5(182193, 182194, 182195, 182196, 182197, 182198) c6( ) c7(bB, bE, Y); #c1(ARHGEF2) c2(NP_001155855) c3(rho guanine nucleotide exchange factor 2 isoform 1) c4(61588, 61589) c5(61590, 61591, 61592, 61593, 61594, 61595, 61596, 61597, 61598, 61599, 61600, 61601) c6( ) c7(bM, T, jv, aC, yS, ha, Hn, bS, nA, V, q, ad, eA, afR, dV, aT, cU, h, afU, K, bU, afx, ae, A, aW, Y, afS, cr, r, eZ, fe, g, eE, cm, nC, bz, dr, bN, ck, bF, Jr, z, HK, eo, yA, fD, afT, y, bt, B); #c1(ARHGEF2) c2(NP_001155856) c3(rho guanine nucleotide exchange factor 2 isoform 2) c4(61602) c5(61603, 61604, 61605, 61606, 61607, 61608, 61609, 61610, 61611, 61612, 61613, 61614, 61615, 61616) c6( ) c7(bM, T, jv, aC, yS, ha, Hn, bS, nA, V, q, ad, eA, afR, dV, aT, cU, h, afU, K, bU, afx, ae, A, aW, Y, afS, cr, r, eZ, fB, g, eE, cm, nC, bz, dr, bN, ck, bF, Jr, z, HK, eo, yA, fD, afT, y, bt, B); #c1(ARHGEF2) c2(XP_005245646) c3(rho guanine nucleotide exchange factor 2 isoform X8) c4(266836) c5( ) c6( ) c7(bM, T, jv, aC, yS, ha, Hn, bS, nA, V, q, ad, eA, afR, dV, aT, cU, h, afU, K, bU, afx, ae, A, aW, Y, afS, cr, r, eZ, fe, g, eE, cm, nC, bz, dr, bN, ck, bF, Jr, z, HK, eo, yA, fD, afT, y, bt, B); #c1(ARHGEF2) c2(XP_005245651) c3(rho guanine nucleotide exchange factor 2 isoform X11) c4( ) c5(266837, 266838, 266839, 266840, 266841, 266842) c6( ) c7(bM, T, jv, aC, yS, ha, Hn, bS, nA, V, q, ad, eA, afR, dV, aT, cU, h, afU, K, bU, afx, ae, A, aW, Y, afS, cr, r, eZ, fe, g, eE, cm, nC, bz, dr, bN, ck, bF, Jr, z, HK, eo, yA, fD, afT, y, bt, B); #c1(ARHGEF2) c2(XP_011508441) c3(rho guanine nucleotide exchange factor 2 isoform X4) c4( ) c5(299158, 299159) c6( ) c7(bM, T, jv, aC, yS, ha, Hn, bS, nA, V, q, ad, eA, afR, dV, aT, cU, h, afU, K, bU, afx, ae, A, aW, Y, afS, cr, r, eZ, fe, g, eE, cm, nC, bz, dr, bN, ck, bF, Jr, z, HK, eo, yA, fD, afT, y, bt, B); #c1(ARHGEF2) c2(XP_011508442) c3(rho guanine nucleotide exchange factor 2 isoform X3) c4(299160) c5(299161, 299162, 299163, 299164, 299165) c6( ) c7(bM, T, jv, aC, yS, ha, Hn, bS, nA, V, q, ad, eA, afR, dV, aT, cU, h, afU, K, bU, afx, ae, A, aW, Y, afS, cr, r, eZ, fe, g, eE, cm, nC, bz, dr, bN, ck, bF, Jr, z, HK, eo, yA, fD, afT, y, bt, B); #c1(ARHGEF2) c2(XP_011508444) c3(rho guanine nucleotide exchange factor 2 isoform X13) c4(299166) c5(299167) c6( ) c7(bM, T, jv, aC, yS, ha, Hn, bS, nA, V, q, ad, eA, afR, dV, aT, cU, h, afU, K, bU, afx, ae, A, aW, Y, afS, cr, r, eZ, fe, g, eE, cm, nC, bz, dr, bN, ck, bF, Jr, z, HK, eo, yA, fD, afT, y, bt, B); #c1(ARHGEF2) c2(XP_011508445) c3(rho guanine nucleotide exchange factor 2 isoform X14) c4( ) c5(299168, 299169) c6( ) c7(bM, T, jv, aC, yS, ha, Hn, bS, nA, V, q, ad, eA, afR, dV, aT, cU, h, afU, K, bU, afx, ae, A, aW, Y, afS, cr, r, eZ, fe, g, eE, cm, nC, bz, dr, bN, ck, bF, Jr, z, HK, eo, yA, fD, afT, y, bt, B); #c1(ARHGEF25) c2(NP_001104740) c3(rho guanine nucleotide exchange factor 25 isoform 3) c4(42220, 42221) c5(42222, 42223, 42224, 42225, 42226, 42227) c6( ) c7(bv, aW, cz, aT, afV, By); #c1(ARHGEF25) c2(NP_891992) c3(rho guanine nucleotide exchange factor 25 isoform 1) c4(257430) c5(257431, 257432, 257433, 257434, 257435, 257436, 257437, 257438, 257439, 257440, 257441, 257442) c6( ) c7(bv, aW, cz, aT, afV, By); #c1(ARHGEF26) c2(NP_001238892) c3(rho guanine nucleotide exchange factor 26 isoform 2) c4(88002, 88003) c5(88004, 88005, 88006, 88007, 88008, 88009, 88010, 88011, 88012, 88013, 88014, 88015) c6( ) c7(dD, d, ea, eq, ae, eA, ad); #c1(ARHGEF26) c2(NP_056410) c3(rho guanine nucleotide exchange factor 26 isoform 1) c4(187450, 187451) c5(187452, 187453, 187454, 187455, 187456, 187457, 187458, 187459, 187460, 187461) c6( ) c7(dD, d, ea, eq, ae, eA, ad); #c1(ARHGEF28) c2(NP_001073948) c3(rho guanine nucleotide exchange factor 28 isoform 1) c4(36667, 36668, 36669) c5(36670, 36671, 36672, 36673, 36674, 36675, 36676, 36677, 36678, 36679, 36680, 36681, 36682, 36683, 36684, 36685, 36686, 36687, 36688, 36689, 36690, 36691, 36692) c6( ) c7(oO, bM, AW, dD, iV, c, ky, Dl, ea, oe, aw, ff, eZ, cz, cd, eq, ji, en, PJ, bz, B); #c1(ARHGEF28) c2(NP_001171164) c3(rho guanine nucleotide exchange factor 28 isoform 2) c4(69962, 69963) c5(69964, 69965, 69966, 69967, 69968, 69969, 69970, 69971, 69972, 69973, 69974) c6( ) c7(oO, bM, AW, dD, iV, c, ky, OI, ea, oe, aw, ff, eZ, cz, cd, eq, ji, en, PJ, bz, B); #c1(ARHGEF3) c2(NP_001122087) c3(rho guanine nucleotide exchange factor 3 isoform 1) c4(46420) c5(46421, 46422, 46423, 46424, 46425, 46426) c6( ) c7(yE, y, fq, bA, afW); #c1(ARHGEF3) c2(NP_001122088) c3(rho guanine nucleotide exchange factor 3 isoform 2) c4(46427) c5(46428, 46429, 46430, 46431, 46432, 46433) c6( ) c7(yE, y, fq, bA, afW); #c1(ARHGEF3) c2(NP_062455) c3(rho guanine nucleotide exchange factor 3 isoform 3) c4(201795) c5(201796, 201797, 201798, 201799, 201800, 201801) c6( ) c7(yE, y, fq, bA, afW); #c1(ARHGEF38) c2(NP_001229658) c3(rho guanine nucleotide exchange factor 38 isoform 1) c4(84706, 84707) c5(84708, 84709, 84710, 84711, 84712, 84713) c6( ) c7(at, cz); #c1(ARHGEF38) c2(NP_060170) c3(rho guanine nucleotide exchange factor 38 isoform 2) c4( ) c5(194613, 194614, 194615, 194616, 194617, 194618) c6( ) c7(at, cz); #c1(ARHGEF4) c2(NP_056135) c3(rho guanine nucleotide exchange factor 4 isoform a) c4(185870) c5(185871, 185872, 185873, 185874, 185875, 185876, 185877, 185878, 185879, 185880, 185881, 185882, 185883, 185884, 185885, 185886, 185887) c6( ) c7(T, s); #c1(ARHGEF4) c2(NP_127462) c3(rho guanine nucleotide exchange factor 4 isoform b) c4(226495) c5(226496, 226497, 226498, 226499, 226500, 226501, 226502, 226503, 226504, 226505, 226506, 226507, 226508) c6( ) c7(T, s); #c1(ARHGEF4) c2(XP_005263738) c3(rho guanine nucleotide exchange factor 4 isoform X1) c4(278517, 278518) c5( ) c6( ) c7(T, s); #c1(ARHGEF4) c2(XP_005263739) c3(rho guanine nucleotide exchange factor 4 isoform X4) c4(278519) c5( ) c6( ) c7(T, s); #c1(ARHGEF4) c2(XP_011509576) c3(rho guanine nucleotide exchange factor 4 isoform X2) c4( ) c5(300150, 300151) c6( ) c7(T, s); #c1(ARHGEF4) c2(XP_011509577) c3(rho guanine nucleotide exchange factor 4 isoform X3) c4( ) c5(300152, 300153) c6( ) c7(T, s); #c1(ARHGEF5) c2(NP_005426) c3(rho guanine nucleotide exchange factor 5) c4(156009, 156010, 156011, 156012) c5(156013, 156014, 156015, 156016, 156017, 156018, 156019, 156020, 156021, 156022, 156023, 156024, 156025, 156026, 156027, 156028, 156029, 156030, 156031, 156032, 156033, 156034, 156035, 156036, 156037, 156038, 156039) c6( ) c7(bM, V, ai, eA, ad, tT, aT, h, nJ, uQ, iU, hl, eZ, lo, eE, f, cT, z, U, EY, fD, bC, hE, B, y, afX); #c1(ARHGEF6) c2(NP_004831) c3(rho guanine nucleotide exchange factor 6) c4(150132, 150133, 150134) c5(150135, 150136, 150137, 150138, 150139, 150140, 150141, 150142, 150143) c6( ) c7(nf, IC, eA, afY, nA); #c1(ARHGEF6) c2(XP_011529717) c3(rho guanine nucleotide exchange factor 6 isoform X4) c4(325348) c5(325349) c6( ) c7(nf, IC, eA, afY, nA); #c1(ARHGEF6) c2(XP_011529718) c3(rho guanine nucleotide exchange factor 6 isoform X6) c4( ) c5(325350, 325351, 325352, 325353, 325354) c6( ) c7(nf, IC, eA, afY, nA); #c1(ARHGEF7) c2(NP_001106983) c3(rho guanine nucleotide exchange factor 7 isoform c) c4(42738, 42739, 42740) c5(42741, 42742, 42743, 42744, 42745, 42746) c6( ) c7(T, pf, abM, fd, bB, ci, aE, K, zy, cp, eG, aW, Ls, az, g, as, cm, eM, U, cj, m, Uw, fy, aw, Kk, fr, nA, eW, afR, cU, h, By, he, MD, gi, agb, aq, aga, kT, cA, dB, w, at, B, rf, fZ, aA, ti, j, eA, oT, aT, cy, bK, ae, Y, tu, t, nC, bN, ac, agc, afZ, agf, fD, UF, bt, aZ, ha, ah, ad, agd, nd, xX, d, Gv, nf, gl, tv, aF, nk, iR, iV, eK, LB, age, eU, bE, dO, ei, y, xg); #c1(ARHGEF7) c2(NP_001106984) c3(rho guanine nucleotide exchange factor 7 isoform d) c4(42747, 42748) c5(42749, 42750, 42751, 42752, 42753, 42754, 42755) c6( ) c7(T, pf, abM, fd, bB, ci, aE, K, zy, cp, eG, aW, Ls, az, g, as, cm, eM, U, cj, m, Uw, fy, aw, Kk, fr, nA, eW, afR, cU, h, By, he, MD, gi, agb, aq, aga, kT, cA, dB, w, at, B, rf, fZ, aA, ti, j, eA, oT, aT, cy, bK, ae, Y, tu, t, nC, bN, ac, agc, afZ, agf, fD, UF, bt, aZ, ha, ah, ad, agd, nd, xX, d, Gv, nf, gl, tv, aF, nk, iR, iV, eK, LB, age, eU, bE, dO, ei, y, xg); #c1(ARHGEF7) c2(NP_001106985) c3(rho guanine nucleotide exchange factor 7 isoform a) c4( ) c5(42756, 42757, 42758, 42759, 42760, 42761, 42762, 42763) c6( ) c7(T, pf, abM, fd, bB, ci, aE, K, zy, cp, eG, aW, Ls, az, g, as, cm, eM, U, cj, m, Uw, fy, aw, Kk, fr, nA, eW, afR, cU, h, By, he, MD, gi, agb, aq, aga, kT, cA, dB, w, at, B, rf, fZ, aA, ti, j, eA, oT, aT, cy, bK, ae, Y, tu, t, nC, bN, ac, agc, afZ, agf, fD, UF, bt, aZ, ha, ah, ad, agd, nd, xX, d, Gv, nf, gl, tv, aF, nk, iR, iV, eK, LB, age, eU, bE, dU, ei, y, xg); #c1(ARHGEF7) c2(NP_663788) c3(rho guanine nucleotide exchange factor 7 isoform b) c4(241613) c5(241614, 241615, 241616, 241617, 241618, 241619, 241620, 241621, 241622, 241623, 241624, 241625, 241626, 241627, 241628, 241629, 241630, 241631, 241632, 241633, 241634, 241635, 241636, 241637) c6( ) c7(T, pf, abM, fd, bB, ci, aE, K, zy, cp, eG, aW, Ls, az, g, as, cm, eM, U, cj, m, Uw, fy, aw, Kk, fr, nA, eW, afR, cU, h, By, he, MD, gi, agb, aq, aga, kT, cA, dB, w, at, B, rf, fZ, aA, ti, j, eA, oT, aT, cy, bK, ae, Y, tu, t, nC, bN, ac, agc, afZ, agf, fD, UF, bt, aZ, ha, ah, ad, agd, nd, xX, d, Gv, nf, gl, tv, aF, nk, iR, iV, eK, LB, age, eU, bE, dO, ei, y, xg); #c1(ARHGEF7) c2(XP_005254142) c3(rho guanine nucleotide exchange factor 7 isoform X2) c4( ) c5(273010) c6( ) c7(T, pf, abM, fd, bB, ci, aE, K, zy, cp, eG, aW, Ls, az, g, as, cm, eM, U, cj, m, Uw, fy, aw, Kk, fr, nA, eW, afR, cU, h, By, he, MD, gi, agb, ag, aga, kT, cA, dB, w, at, B, rf, fZ, aA, ti, j, eA, oT, aT, cy, bK, ae, Y, tu, t, nC, bN, ac, agc, afZ, agf, fD, UF, bt, aZ, ha, ah, ad, agd, nd, xX, d, Gv, nf, gl, tv, aF, nk, iR, iV, eK, LB, age, eU, bE, dO, ei, y, xg); #c1(ARHGEF7) c2(XP_005254143) c3(rho guanine nucleotide exchange factor 7 isoform X3) c4(273011, 273012) c5(273013) c6( ) c7(T, pf, abM, fd, bB, ci, aE, K, zy, cp, eG, aW, Ls, az, g, as, cm, eM, U, cj, m, Uw, fy, aw, Kk, fr, nA, eW, afR, cU, h, By, he, MD, gi, agb, aq, aga, kT, cA, dB, w, at, B, rf, fZ, aA, ti, j, eA, oT, aT, cy, bK, ae, Y, tu, t, nC, bN, ac, agc, afZ, agf, fD, UF, bt, aZ, ha, ah, ad, agd, nd, xX, d, Gv, nf, gl, tv, aF, nk, iR, iV, eK, LB, age, eU, bE, dO, ei, y, xg); #c1(ARHGEF7) c2(XP_005254144) c3(rho guanine nucleotide exchange factor 7 isoform X7) c4( ) c5(273014) c6( ) c7(T, pf, abM, fd, bB, ci, aE, K, zy, cp, eG, aW, Ls, az, g, as, cm, eM, U, cj, m, Uw, fy, aw, Kk, fr, nA, eW, afR, cU, h, By, he, MD, gi, agb, aq, aga, kT, cA, dB, w, at, B, rf, fZ, aA, ti, j, eA, oT, aT, cy, bK, ae, Y, tu, t, nC, bN, ac, agc, afZ, agf, fD, UF, bt, aZ, ha, ah, ad, agd, nd, xX, d, Gv, nf, gl, tv, aF, nk, iR, iV, eK, LB, age, eU, bE, dO, ei, y, xg); #c1(ARHGEF7) c2(XP_005254146) c3(rho guanine nucleotide exchange factor 7 isoform X9) c4(273015) c5( ) c6( ) c7(T, pf, abM, fd, bB, ci, aE, K, zy, cp, eG, aW, Ls, az, g, as, cm, eM, U, cj, m, Uw, fy, aw, Kk, fr, nA, eW, afR, cU, h, By, he, MD, gi, agb, aq, aga, kT, cA, dB, w, at, B, rf, fZ, aA, ti, j, eA, oT, aT, cy, bK, ae, Y, tu, t, nC, bN, ac, agc, afZ, agf, fD, UF, bt, aZ, ha, ah, ad, agd, nd, xX, d, Gv, nf, gl, tv, aF, nk, iR, iV, eK, LB, age, eU, bE, dO, ei, y, xg); #c1(ARHGEF7) c2(XP_005254147) c3(rho guanine nucleotide exchange factor 7 isoform X10) c4(273016) c5(273017, 273018, 273019, 273020, 273021, 273022) c6( ) c7(T, pf, abM, fd, bB, ci, aE, K, zy, cp, eG, aW, Ls, az, g, as, cm, eM, U, cj, m, Uw, fy, aw, Kk, fr, nA, eW, afR, cU, h, By, he, MD, gi, agb, aq, aga, kT, cA, dB, w, at, B, rf, fZ, aA, ti, j, eA, oT, aT, cy, bK, ae, Y, tu, t, nC, bN, ac, agc, afZ, agf, fD, UF, bt, aZ, ha, ah, ad, agd, nd, xX, d, Gv, nf, gl, tv, aF, nk, iR, iV, eK, LB, age, eU, bE, dO, ei, y, xg); #c1(ARHGEF7) c2(XP_005254148) c3(rho guanine nucleotide exchange factor 7 isoform X11) c4(273023, 273024) c5(273025, 273026, 273027, 273028, 273029, 273030, 273031) c6( ) c7(T, pf, abM, fd, bB, ci, aE, K, zy, cp, eG, aW, Ls, az, g, as, cm, eM, U, cj, m, Uw, fy, aw, Kk, fr, nA, eW, afR, cU, h, By, he, MD, gi, agb, aq, aga, kT, cA, dB, w, at, B, rf, fZ, aA, ti, j, eA, oT, aT, cy, bK, ae, Y, tu, t, nC, bN, ac, agc, afZ, agf, fD, UF, bt, aZ, ha, ah, ad, agd, nd, xX, d, Gv, nf, gl, tv, aF, nk, iR, iV, eK, LB, age, eU, bE, dO, ei, y, xg); #c1(ARHGEF7) c2(XP_011519433) c3(rho guanine nucleotide exchange factor 7 isoform X5) c4( ) c5(314090, 314091, 314092, 314093, 314094) c6( ) c7(T, pf, abM, fd, bB, ci, aE, K, zy, cp, eG, aW, Ls, az, g, as, cm, eM, U, cj, m, Uw, fy, aw, Kk, fr, nA, eW, afR, cU, h, By, he, MD, gi, agb, aq, aga, kT, cA, dB, w, at, B, rf, fZ, aA, ti, j, eA, oT, aT, cy, bK, ae, Y, tu, t, nC, bN, ac, agc, afZ, agf, fD, UF, bt, aZ, ha, ah, ad, agd, nd, xX, d, Gv, nf, gl, tv, aF, nk, iR, iV, eK, LB, age, eU, bE, dD, ei, y, xg); #c1(ARHGEF7) c2(XP_011519435) c3(rho guanine nucleotide exchange factor 7 isoform X14) c4(314095, 314096) c5(314097, 314098, 314099, 314100, 314101, 314102, 314103, 314104, 314105, 314106, 314107, 314108, 314109, 314110, 314111, 314112, 314113, 314114, 314115, 314116, 314117, 314118) c6( ) c7(T, pf, abM, fd, bB, ci, aE, K, zy, cp, eG, aW, Ls, az, g, as, cm, eM, U, cj, m, Uw, fy, aw, Kk, fr, nA, eW, afR, cU, h, By, he, MD, gi, agb, aq, aga, kT, cA, dB, w, at, B, rf, fZ, aA, ti, j, eA, oT, aT, cy, bK, ae, Y, tu, t, nC, bN, ac, agc, afZ, agf, fD, UF, bt, aZ, ha, ah, ad, agd, nd, xX, d, Gv, nf, gl, tv, aF, nk, iR, iV, eK, LB, age, eU, bE, dO, ei, y, xg); #c1(ARHGEF9) c2(NP_001166950) c3(rho guanine nucleotide exchange factor 9 isoform 2) c4(68712) c5(68713, 68714, 68715, 68716, 68717, 68718) c6( ) c7(ll, IF, ha, agg, nf, nA, Ku, B); #c1(ARHGEF9) c2(NP_001166951) c3(rho guanine nucleotide exchange factor 9 isoform 3) c4(68719) c5(68720, 68721, 68722, 68723, 68724) c6( ) c7(ll, IF, ha, agg, nf, nA, Ku, B); #c1(ARHGEF9) c2(NP_056000) c3(rho guanine nucleotide exchange factor 9 isoform 1) c4(185054, 185055) c5(185056, 185057, 185058, 185059, 185060, 185061, 185062, 185063, 185064, 185065, 185066, 185067) c6( ) c7(ll, IF, ha, agg, nf, nA, Ku, B); #c1(ARHGEF9) c2(XP_005262306) c3(rho guanine nucleotide exchange factor 9 isoform X1) c4( ) c5(277821, 277822, 277823, 277824, 277825, 277826) c6( ) c7(ll, IF, ha, agg, nf, nA, Ku, B); #c1(ARHGEF9) c2(XP_011529192) c3(rho guanine nucleotide exchange factor 9 isoform X2) c4(324593) c5( ) c6( ) c7(ll, IF, ha, agg, nf, nA, Ku, B); #c1(ARHGEF9) c2(XP_011529193) c3(rho guanine nucleotide exchange factor 9 isoform X4) c4(324594) c5(324595, 324596, 324597, 324598, 324599, 324600) c6( ) c7(ll, IF, ha, agg, nf, nA, Ku, B); #c1(ARHGEF9) c2(XP_011529194) c3(rho guanine nucleotide exchange factor 9 isoform X5) c4( ) c5(324601) c6( ) c7(ll, IF, ha, agg, nf, nA, Ku, B); #c1(ARID1B) c2(NP_059989) c3(AT-rich interactive domain-containing protein 1B isoform 1) c4(193510, 193511) c5(193512, 193513, 193514, 193515, 193516, 193517, 193518, 193519, 193520, 193521, 193522, 193523, 193524) c6( ) c7(T, aE, agh, agi, cz, cm, cy, agj, nA, mv, Wl, agk, B, zV, bN); #c1(ARID1B) c2(NP_065783) c3(AT-rich interactive domain-containing protein 1B isoform 2) c4(205420) c5(205421, 205422, 205423, 205424, 205425, 205426, 205427) c6( ) c7(T, aE, agh, agi, cz, cm, cy, agj, nA, mv, Wl, agk, B, zV, bN); #c1(ARID1B) c2(XP_005267126) c3(AT-rich interactive domain-containing protein 1B isoform X1) c4(280769, 280770, 280771) c5(280772, 280773, 280774, 280775, 280776, 280777, 280778, 280779, 280780, 280781, 280782, 280783, 280784, 280785, 280786, 280787, 280788, 280789, 280790) c6( ) c7(T, aE, agh, agi, cz, cm, cy, agj, nA, mv, Wl, agk, B, zV, bN); #c1(ARID1B) c2(XP_011534288) c3(AT-rich interactive domain-containing protein 1B isoform X4) c4(330660) c5(330661, 330662, 330663, 330664, 330665, 330666, 330667, 330668, 330669, 330670) c6( ) c7(T, aE, agh, agi, cz, cm, cy, agj, nA, mv, Wl, agk, B, zV, bN); #c1(ARID2) c2(NP_689854) c3(AT-rich interactive domain-containing protein 2) c4(244164, 244165) c5(244166, 244167, 244168, 244169, 244170, 244171, 244172, 244173, 244174, 244175, 244176, 244177, 244178, 244179, 244180, 244181, 244182, 244183, 244184, 244185, 244186, 244187) c6( ) c7(eM, Y, jx, afi, aq, afv, iR, B); #c1(ARID2) c2(XP_011536327) c3(AT-rich interactive domain-containing protein 2 isoform X2) c4(333672) c5( ) c6( ) c7(eM, Y, jx, afi, aq, afv, iR, B); #c1(ARID3A) c2(NP_005215) c3(AT-rich interactive domain-containing protein 3A) c4(154089) c5(154090, 154091, 154092, 154093, 154094, 154095, 154096) c6( ) c7(LB, ck, A, fG, cz, MC); #c1(ARID3B) c2(NP_006456) c3(AT-rich interactive domain-containing protein 3B) c4(165361) c5(165362, 165363, 165364, 165365, 165366, 165367, 165368, 165369, 165370, 165371, 165372, 165373, 165374, 165375, 165376, 165377, 165378, 165379, 165380) c6( ) c7(cm, t, m, bP); #c1(ARID4A) c2(NP_002883) c3(AT-rich interactive domain-containing protein 4A isoform 1) c4(133173) c5(133174, 133175, 133176, 133177, 133178, 133179) c6( ) c7(ck, Mb, bP, aW, agl, r, aT, K, eA, bt, q); #c1(ARID4A) c2(NP_075376) c3(AT-rich interactive domain-containing protein 4A isoform II) c4(213774) c5(213775, 213776, 213777, 213778, 213779, 213780) c6( ) c7(ck, Mb, bP, aW, agl, r, aT, K, eA, bt, q); #c1(ARID4A) c2(NP_075377) c3(AT-rich interactive domain-containing protein 4A isoform III) c4(213781) c5(213782, 213783, 213784, 213785, 213786, 213787, 213788, 213789, 213790, 213791, 213792, 213793, 213794, 213795, 213796, 213797) c6( ) c7(ck, Mb, bP, aW, agl, r, aT, K, eA, bt, q); #c1(ARID4A) c2(XP_011535356) c3(AT-rich interactive domain-containing protein 4A isoform X1) c4(332409) c5( ) c6( ) c7(ck, Mb, bP, aW, agl, r, aT, K, eA, bt, q); #c1(ARID4B) c2(NP_057458) c3(AT-rich interactive domain-containing protein 48 isoform 1) c4(191011, 191012, 191013) c5(191014, 191015, 191016, 191017, 191018, 191019, 191020, 191021, 191022, 191023, 191024, 191025, 191026, 191027, 191028, 191029, 191030, 191031, 191032, 191033, 191034, 191035) c6( ) c7(T, B, d, c, bP, aW, aZ, qK, aT, aq, v, agm, m, eA, iR, t, rL); #c1(ARID4B) c2(NP_112739) c3(AT-rich interactive domain-containing protein 48 isoform 2) c4(221599, 221600) c5(221601, 221602, 221603, 221604, 221605, 221606) c6( ) c7(T, B, d, c, bP, aW, aZ, qK, aT, aq, v, agm, m, eA, iR, t, rL); #c1(ARID4B) c2(XP_005273217) c3(AT-rich interactive domain-containing protein 4B isoform X3) c4( ) c5(284364, 284365, 284366, 284367, 284368, 284369) c6( ) c7(T, B, d, c, bP, aW, aZ, qK, aT, aq, v, agm, m, eA, iR, t, rL); #c1(ARID4B) c2(XP_011542515) c3(AT-rich interactive domain-containing protein 4B isoform X4) c4( ) c5(341059) c6( ) c7(T, B, d, c, bP, aW, aZ, qK, aT, aq, v, agm, m, eA, iR, t, rL); #c1(ARID5B) c2(NP_001231567) c3(AT-rich interactive domain-containing protein 5B isoform 2) c4(87299) c5(87300, 87301, 87302, 87303, 87304, 87305, 87306) c6( ) c7(bL, ck, x, dD, ea, WL, Bj, qK, eZ, hD, dq, hn, j, k, eq, y, bt, agn); #c1(ARID5B) c2(NP_115575) c3(AT-rich interactive domain-containing protein 5B isoform 1) c4(223262) c5(223263, 223264, 223265, 223266, 223267, 223268) c6( ) c7(bL, ck, x, dD, ea, WL, Bj, qK, eZ, hD, dq, hn, j, k, eq, y, bt, agn); #c1(ARIH1) c2(NP_005735) c3(E3 ubiquitin-protein ligase ARIH1) c4(158953, 158954) c5(158955, 158956, 158957, 158958, 158959, 158960, 158961, 158962, 158963, 158964, 158965, 158966) c6( ) c7(cU, pR, ae, ad, an); #c1(ARL1) c2(NP_001168) c3(ADP-ribosylation factor-like protein 1 isoform 1) c4(69489, 69490) c5(69491, 69492, 69493, 69494, 69495, 69496, 69497, 69498, 69499, 69500, 69501, 69502, 69503, 69504, 69505, 69506) c6( ) c7(aq); #c1(ARL1) c2(NP_001287997) c3(ADP-ribosylation factor-like protein 1 isoform 2) c4(113343) c5(113344, 113345, 113346, 113347, 113348, 113349) c6( ) c7(aq); #c1(ARL11) c2(NP_612459) c3(ADP- ribosylation factor-like protein 11) c4(236564) c5(236565, 236566, 236567, 236568, 236569, 236570) c6( ) c7(GI, T, ae, av, qw, Ub, aW, Y, aT, cj, r, hn, Gn, ci, m, t, rA, bz, q, ad); #c1(ARL13A) c2(NP_001155963) c3(ADP-ribosylation factor-like protein 13A) c4(61648) c5(61649, 61650, 61651, 61652, 61653, 61654) c6( ) c7(ago); #c1(ARL13A) c2(XP_011529252) c3(ADP-ribosylation factor-like protein 13A isoform X1) c4(324700) c5(324701, 324702, 324703, 324704, 324705, 324706) c6( ) c7(ago); #c1(ARL13B) c2(NP_001167621) c3(ADP-ribosylation factor-like protein 138 isoform 1) c4(69428) c5(69429, 69430, 69431, 69432, 69433, 69434, 69435, 69436, 69437, 69438) c6( ) c7(Ng, agp); #c1(ARL13B) c2(NP_001167622) c3(ADP-ribosylation factor-like protein 138 isoform 3) c4( ) c5(69439, 69440, 69441, 69442, 69443) c6( ) c7(Ng, agp); #c1(ARL13B) c2(NP_659433) c3(ADP-ribosylation factor-like protein 138 isoform 2) c4(239860) c5(239861, 239862, 239863, 239864, 239865, 239866, 239867, 239868, 239869, 239870, 239871, 239872) c6( ) c7(Ng, agp); #c1(ARL13B) c2(XP_011510835) c3(ADP-ribosylation factor-like protein 138 isoform X2) c4(301294, 301295) c5(301296) c6( ) c7(Ng, agp); #c1(ARL14) c2(NP_079323) c3(ADP-ribosylation factor-like protein 14) c4(217741) c5(217742, 217743, 217744, 217745, 217746, 217747) c6( ) c7(hb); #c1(ARL14EP) c2(NP_689529) c3(ARL14 effector protein) c4(243001, 243002) c5(243003, 243004, 243005, 243006, 243007, 243008, 243009, 243010, 243011, 243012, 243013, 243014) c6( ) c7(gv, nA); #c1(ARL15) c2(NP_061960) c3(ADP-ribosylation factor-like protein 15) c4(201318) c5(201319, 201320, 201321, 201322, 201323, 201324) c6( ) c7(bL, W, aw, v, j, y); #c1(ARL2) c2(NP_001186674) c3(ADP-ribosylation factor-like protein 2 isoform 2) c4(78308) c5(78309, 78310, 78311, 78312, 78313, 78314) c6( ) c7(T, aE, aW, Y, aT, K, g); #c1(ARL2) c2(NP_001658) c3(ADP-ribosylation factor-like protein 2 isoform 1) c4(119822) c5(119823, 119824, 119825, 119826, 119827, 119828, 119829, 119830, 119831, 119832) c6( ) c7(T, aE, aW, Y, aT, K, q); #c1(ARL2BP) c2(NP_036238) c3(ADP-ribosylation factor-like protein 2-binding protein) c4(172577) c5(172578, 172579, 172580, 172581, 172582, 172583) c6( ) c7(T, aE, eX, h, eV, By, agq, aF, ci, K); #c1(ARL3) c2(NP_004302) c3(ADP-ribosylation factor-like protein 3) c4(144990) c5(144991, 144992, 144993, 144994, 144995, 144996) c6( ) c7(j); #c1(ARL4A) c2(NP_001182325) c3(ADP-ribosylation factor-like protein 4A) c4(74774, 74775) c5(74776, 74777, 74778, 74779, 74780, 74781, 74782, 74783, 74784, 74785, 74786, 74787, 74788, 74789, 74790, 74791, 74792, 74793, 74794, 74795, 74796, 74797, 74798, 74799, 74800, 74801, 74802, 74803) c6( ) c7(eA); #c1(ARL4C) c2(NP_001269360) c3(ADP-ribosylation factor-like protein 4C isoform 1) c4(101282) c5(101283, 101284, 101285, 101286, 101287, 101288) c6( ) c7(nZ, iU, ht, bS, ct, g, Z); #c1(ARL4C) c2(NP_005728) c3(ADP-ribosylation factor-like protein 4C isoform 2) c4(158917) c5(158918, 158919, 158920, 158921, 158922, 158923) c6( ) c7(nZ, iU, ht, bS, ct, g, Z); #c1(ARL4D) c2(NP_001652) c3(ADP-ribosylation factor-like protein 40) c4(119786) c5(119787, 119788, 119789, 119790, 119791, 119792) c6( ) c7(dB, eA, Tp); #c1(ARL5A) c2(NP_001032251) c3(ADP-ribosylation factor-like protein 5A isoform 2) c4(31175) c5(31176, 31177, 31178, 31179, 31180, 31181, 31182, 31183) c6( ) c7(q, r); #c1(ARL5A) c2(NP_036229) c3(ADP-ribosylation factor-like protein 5A isoform 1) c4(172467) c5(172468, 172469, 172470, 172471, 172472, 172473, 172474, 172475) c6( ) c7(q, r); #c1(ARL5B) c2(NP_848930) c3(ADP-ribosylation factor-like protein 5B) c4(254230) c5(254231, 254232, 254233, 254234, 254235, 254236) c6( ) c7(Y, af); #c1(ARL6) c2(NP_816931) c3(ADP-ribosylation factor-like protein 6) c4(253048, 253049) c5(253050, 253051, 253052, 253053, 253054, 253055, 253056, 253057, 253058, 253059, 253060, 253061, 253062, 253063, 253064, 253065, 253066, 253067) c6( ) c7(ags, gU, IR, agr, v, Tp); #c1(ARL6) c2(XP_011511532) c3(ADP-ribosylation factor-like protein 6 isoform X3) c4( ) c5(302217, 302218, 302219, 302220, 302221, 302222) c6( ) c7(ags, gU, IR, agr, v, Tp); #c1(ARL6IP1) c2(NP_055976) c3(ADP-ribosylation factor-like protein 6-interacting protein 1) c4(184840, 184841, 184842) c5(184843, 184844, 184845, 184846, 184847, 184848, 184849) c6( ) c7(ea, Y, if, h, agt, qN, bz, ad); #c1(ARL6IP5) c2(NP_006398) c3(PRAI family protein 3) c4(164704, 164705) c5(164706, 164707, 164708, 164709, 164710, 164711, 164712, 164713, 164714, 164715, 164716, 164717) c6( ) c7(ck, T, Y, ff, aA, r, it, dL, ey, aF, en, eL); #c1(ARMC1) c2(NP_001273631) c3(armadillo repeat-containing protein 1 isoform 2) c4(105505) c5(105506, 105507, 105508, 105509, 105510, 105511) c6( ) c7(ey); #c1(ARMC1) c2(NP_060590) c3(armadillo repeat-containing protein 1 isoform 1) c4(196705) c5(196706, 196707, 196708, 196709, 196710, 196711) c6( ) c7(ey); #c1(ARMC10) c2(NP_001154481) c3(armadillo repeat-containing protein 10 isoform b) c4(61045) c5(61046, 61047, 61048, 61049, 61050, 61051) c6( ) c7(aq, B); #c1(ARMC10) c2(NP_001154482) c3(armadillo repeat-containing protein ID isoform c) c4(61052) c5(61053, 61054, 61055, 61056, 61057, 61058) c6( ) c7(aq, B); #c1(ARMC10) c2(NP_001154483) c3(armadillo repeat-containing protein ID isoform e) c4(61059) c5(61060, 61061, 61062, 61063, 61064, 61065) c6( ) c7(aq, B); #c1(ARMC10) c2(NP_001154484) c3(armadillo repeat-containing protein ID isoform d) c4(61066) c5(61067, 61068, 61069, 61070, 61071, 61072) c6( ) c7(aq, B); #c1(ARMC10) c2(NP_001154485) c3(armadillo repeat-containing protein 10 isoform f) c4(61073) c5(61074, 61075, 61076, 61077, 61078, 61079) c6( ) c7(aq, B); #c1(ARMC10) c2(NP_114111) c3(armadillo repeat-containing protein 10 isoform a) c4(222183) c5(222184, 222185, 222186, 222187, 222188, 222189) c6( ) c7(aq, B); #c1(ARMC2) c2(NP_115507) c3(armadillo repeat-containing protein 2 isoform a) c4(222969, 222970) c5(222971, 222972, 222973, 222974, 222975, 222976, 222977, 222978, 222979, 222980, 222981, 222982) c6( ) c7(aj, ad); #c1(ARMC2) c2(XP_011534471) c3(armadillo repeat-containing protein 2 isoform X4) c4(330943) c5( ) c6( ) c7(aj, ad); #c1(ARMC2) c2(XP_011534478) c3(armadillo repeat-containing protein 2 isoform X10) c4( ) c5(330944, 330945, 330946, 330947, 330948, 330949) c6( ) c7(aj, ad); #c1(ARMC3) c2(NP_001269674) c3(armadillo repeat-containing protein 3 isoform 2) c4(102495) c5(102496, 102497, 102498, 102499, 102500, 102501) c6( ) c7(cl, T, aE, hL, bu); #c1(ARMC3) c2(NP_001269675) c3(armadillo repeat-containing protein 3 isoform 3) c4(102502) c5(102503, 102504, 102505, 102506, 102507, 102508) c6( ) c7(cl, T, aE, hL, bu); #c1(ARMC3) c2(NP_001269676) c3(armadillo repeat-containing protein 3 isoform 4) c4(102509) c5( ) c6( ) c7(cl, T, aE, hL, bu); #c1(ARMC3) c2(NP_775104) c3(armadillo repeat-containing protein 3 isoform 1) c4(249515) c5(249516, 249517, 249518, 249519, 249520, 249521) c6( ) c7(cl, T, aE, hL, bu); #c1(ARMC3) c2(XP_005252438) c3(armadillo repeat-containing protein 3 isoform X2) c4( ) c5(271807, 271808, 271809, 271810, 271811, 271812) c6( ) c7(cl, T, aE, hL, bu); #c1(ARMC4) c2(NP_001276950) c3(armadillo repeat-containing protein 4 isoform 2) c4(108696) c5(108697, 108698, 108699, 108700, 108701, 108702) c6( ) c7(agu, BV, Pf, MG); #c1(ARMC4) c2(NP_060546) c3(armadillo repeat-containing protein 4 isoform 1) c4(196499, 196500, 196501) c5(196502, 196503, 196504, 196505, 196506, 196507) c6( ) c7(agu, BV, Pf, MG); #c1(ARMC4) c2(XP_011517831) c3(armadillo repeat-containing protein 4 isoform X1) c4(311760) c5(311761) c6( ) c7(agu, BV, Pf, MG); #c1(ARMC4) c2(XP_011517832) c3(armadillo repeat-containing protein 4 isoform X2) c4( ) c5(311762, 311763, 311764, 311765, 311766, 311767) c6( ) c7(agu, BV, Pf, MG); #c1(ARMC4) c2(XP_011517838) c3(armadillo repeat-containing protein 4 isoform X8) c4( ) c5(311768, 311769, 311770, 311771, 311772, 311773, 311774, 311775, 311776, 311777, 311778, 311779, 311780, 311781, 311782, 311783) c6( ) c7(agu, BV, Pf, MG); #c1(ARMC5) c2(NP_001098717) c3(armadillo repeat-containing protein 5 isoform a precursor) c4( ) c5(41538, 41539, 41540, 41541, 41542, 41543) c6( ) c7(Ja, agv); #c1(ARMC5) c2(NP_001275696) c3(armadillo repeat-containing protein 5 isoform c) c4(107095, 107096, 107097) c5(107098, 107099, 107100, 107101, 107102, 107103, 107104, 107105, 107106, 107107, 107108, 107109, 107110, 107111, 107112, 107113, 107114, 107115) c6( ) c7(Ja, agv); #c1(ARMC5) c2(NP_001288749) c3(armadillo repeat-containing protein 5 isoform d) c4(113967) c5( ) c6( ) c7(Ja, agv); #c1(ARMC5) c2(NP_079018) c3(armadillo repeat-containing protein 5 isoform b precursor) c4(216594) c5(216595, 216596, 216597, 216598, 216599, 216600, 216601) c6( ) c7(Ja, agv); #c1(ARMC8) c2(NP_001253970) c3(armadillo repeat-containing protein 8 isoform 3) c4(94321) c5(94322, 94323, 94324, 94325, 94326, 94327) c6( ) c7(T, bz, eM); #c1(ARMC8) c2(NP_001253971) c3(armadillo repeat-containing protein 8 isoform 4) c4(94328) c5(94329, 94330, 94331, 94332, 94333, 94334) c6( ) c7(T, bz, eM); #c1(ARMC8) c2(NP_054873) c3(armadillo repeat-containing protein 8 isoform 1) c4(178144) c5(178145, 178146, 178147, 178148, 178149, 178150, 178151, 178152, 178153, 178154, 178155, 178156, 178157, 178158, 178159, 178160, 178161) c6( ) c7(T, bz, eM); #c1(ARMC8) c2(NP_056211) c3(armadillo repeat-containing protein 8 isoform 2) c4(186380, 186381, 186382) c5(186383, 186384, 186385, 186386, 186387, 186388, 186389, 186390, 186391, 186392, 186393, 186394, 186395, 186396, 186397, 186398, 186399, 186400, 186401, 186402, 186403, 186404, 186405) c6( ) c7(T, bz, eM); #c1(ARMC8) c2(XP_006713627) c3(armadillo repeat-containing protein 8 isoform X2) c4(287242, 287243) c5(287244, 287245, 287246, 287247, 287248, 287249, 287250, 287251, 287252, 287253, 287254, 287255) c6( ) c7(T, bz, eM); #c1(ARMC8) c2(XP_006713629) c3(armadillo repeat-containing protein 8 isoform X3) c4(287256, 287257) c5( ) c6( ) c7(T, bz, eM); #c1(ARMC8) c2(XP_011510936) c3(armadillo repeat-containing protein 8 isoform X5) c4( ) c5(301408) c6( ) c7(T, bz, eM); #c1(ARMC9) c2(NP_001258395) c3(lisH domain-containing protein ARMC9 isoform 1) c4( ) c5(96045, 96046, 96047, 96048, 96049, 96050, 96051, 96052, 96053, 96054, 96055, 96056) c6( ) c7(li, afR, agx, T, W, IE, Pf, aW, HA, dV, aT, agw, h, fr, agz, agy, hH, iJ, MG); #c1(ARMC9) c2(XP_011510213) c3(lisH domain-containing protein ARMC9 isoform X1) c4(300790) c5( ) c6( ) c7(li, afR, agx, T, W, IE, Pf, aW, HA, dV, aT, agw, h, fr, agz, agy, hH, iJ, MG); #c1(ARMC9) c2(XP_011510216) c3(lisH domain-containing protein ARMC9 isoform X10) c4(300791) c5( ) c6( ) c7(li, afR, agx, T, W, IE, Pf, aW, HA, dV, aT, agw, h, fr, agz, agy, hH, iJ, MG); #c1(ARMC9) c2(XP_011510221) c3(lisH domain-containing protein ARMC9 isoform X15) c4( ) c5(300792) c6( ) c7(li, afR, agx, T, W, IE, Pf, aW, HA, dV, aT, agw, h, fr, agz, agy, hH, iJ, MG); #c1(ARMC9) c2(XP_011510222) c3(lisH domain-containing protein ARMC9 isoform X16) c4(300793) c5(300794, 300795, 300796, 300797, 300798, 300799) c6( ) c7(li, afR, agx, T, W, IE, Pf, aW, HA, dV, aT, agw, h, fr, agz, agy, hH, iJ, MG); #c1(ARMCX1) c2(NP_057692) c3(armadillo repeat-containing X-linked protein 1) c4(192370, 192371) c5(192372, 192373, 192374, 192375, 192376, 192377, 192378, 192379, 192380, 192381, 192382, 192383) c6( ) c7(q); #c1(ARMS2) c2(NP_001093137) c3(age-related maculopathy susceptibility protein 2) c4(39816) c5(39817, 39818, 39819, 39820, 39821, 39822) c6( ) c7(agA, bL, dD, aw, agC, cz, j, eq, cd, ad, agB, agD, acd, db, Um, af, IR, aaP, fe, da, Uk, W, nb, oh, oQ, GF); #c1(ARMT1) c2(NP_001273491) c3(UPF0364 protein C6orf211 isoform b) c4( ) c5(105047, 105048, 105049, 105050, 105051) c6( ) c7(ey, ac); #c1(ARMT1) c2(NP_078849) c3(UPF0364 protein C6orf211 isoform a) c4(215710, 215711) c5(215712, 215713, 215714, 215715, 215716, 215717, 215718) c6( ) c7(ey, ac); #c1(ARNT) c2(XP_011507849) c3(aryl hydrocarbon receptor nuclear translocator isoform X9) c4(297993) c5(297994, 297995, 297996, 297997, 297998, 297999) c6( ) c7(bL, T, al, aA, n, Ns, pz, ad, dP, aT, cy, dL, ji, K, an, ae, yo, aW, Y, aq, aF, Xk, iR, t, op, ov, vA, bo, mg, cj, at, mf, m, k, bt, B); #c1(ARNT2) c2(NP_055677) c3(aryl hydrocarbon receptor nuclear translocator 2) c4(182686, 182687, 182688, 182689) c5(182690, 182691, 182692, 182693, 182694, 182695, 182696, 182697, 182698, 182699, 182700, 182701, 182702, 182703, 182704, 182705, 182706, 182707, 182708, 182709, 182710, 182711, 182712, 182713, 182714, 182715, 182716, 182717, 182718) c6( ) c7(T, aW, aw, agE, EQ, aT, cm, Pp, bK, v, rz, cd, bN); #c1(ARNTL) c2(NP_001025443) c3(aryl hydrocarbon receptor nuclear translocator-like protein 1 isoform a) c4(29535, 29536) c5(29537, 29538, 29539, 29540, 29541, 29542, 29543, 29544, 29545, 29546, 29547, 29548, 29549, 29550, 29551, 29552, 29553, 29554, 29555, 29556, 29557, 29558, 29559, 29560, 29561, 29562, 29563, 29564, 29565, 29566, 29567, 29568, 29569, 29570, 29571, 29572, 29573, 29574, 29575, 29576, 29577, 29578) c6( ) c7(bL, T, gU, Nt, cz, aj, bS, j, ct, Ct, ci, hy, v, q, J, cd, ad, eA, eW, MR, Os, aT, dL, bK, oi, ae, eL, Ir, xQ, d, BN, B, nO, iU, aW, Y, r, agF, Z, cm, bz, ck, qJ, nM, iT, mg, ei, ne); #c1(ARNTL) c2(NP_001025444) c3(aryl hydrocarbon receptor nuclear translocator-like protein 1 isoform b) c4(29579) c5(29580, 29581, 29582, 29583, 29584, 29585, 29586, 29587, 29588, 29589, 29590, 29591, 29592, 29593, 29594, 29595, 29596, 29597, 29598, 29599, 29600, 29601, 29602, 29603) c6( ) c7(bL, T, gU, Nt, cz, aj, bS, j, ct, Ct, ci, hy, v, q, J, cd, ad, eA, eW, MR, Os, aT, dL, bK, oi, ae, eL, Ir, xQ, d, BN, B, nO, iU, aW, Y, r, agF, Z, cm, bz, ck, qJ, nM, iT, mg, ei, ne); #c1(ARNTL) c2(NP_001284651) c3(aryl hydrocarbon receptor nuclear translocator-like protein 1 isoform c) c4(112243, 112244, 112245, 112246, 112247) c5(112248, 112249, 112250, 112251112252, 112253, 112254, 112255, 112256, 112257, 112258, 112259) c6( ) c7(bL, T, gU, Nt, cz, aj, bS, j, ct, Ct, ci, hy, v, q, J, cd, ad, eA, eW, MR, Os, aT, dL, bK, oi, ae, eL, Ir, xQ, d, BN, B, nO, iU, aW, Y, r, agF, Z, cm, bz, ck, qJ, nM, iT, mg, ei, ne); #c1(ARNTL) c2(NP_001284653) c3(aryl hydrocarbon receptor nuclear translocator-like protein 1 isoform d) c4(112260, 112261) c5(112262, 112263, 112264, 112265, 112266, 112267, 112268, 112269, 112270, 112271112272, 112273) c6( ) c7(bL, T, gU, Nt, cz, aj, bS, j, ct, Ct, ci, hy, v, q, J, cd, ad, eA, eW, MR, Os, aT, dL, bK, oi, ae, eL, Ir, xQ, d, BN, B, nO, iU, aW, Y, r, agF, Z, cm, bz, ck, qJ, nM, iT, mg, ei, ne); #c1(ARNTL) c2(XP_011518407) c3(aryl hydrocarbon receptor nuclear translocator-like protein 1 isoform X5) c4(312386) c5( ) c6( ) c7(bL, T, gU, Nt, cz, aj, bS, j, ct, Ct, ci, hy, v, q, J, cd, ad, eA, eW, MR, Os, aT, dL, bK, oi, ae, eL, Ir, xQ, d, BN, B, nO, iU, aW, Y, r, agF, Z, cm, bz, ck, qJ, nM, iT, mg, ei, ne); #c1(ARNTL) c2(XP_011518411) c3(aryl hydrocarbon receptor nuclear translocator-like protein 1 isoform X6) c4(312387) c5(312388, 312389, 312390, 312391, 312392) c6( ) c7(bL, T, gU, Nt, cz, aj, bS, j, ct, Ct, ci, hy, v, q, J, cd, ad, eA, eW, MR, Os, aT, dL, bK, oi, ae, eL, Ir, xQ, d, BN, B, nO, iU, aW, Y, r, agF, Z, cm, bz, ck, qJ, nM, iT, mg, ei, ne); #c1(ARNTL) c2(XP_011518413) c3(aryl hydrocarbon receptor nuclear translocator-like protein 1 isoform X7) c4(312393, 312394, 312395) c5( ) c6( ) c7(bL, T, gU, Nt, cz, aj, bS, j, ct, Ct, ci, hy, v, q, J, cd, ad, eA, eW, MR, Os, aT, dL, bK, oi, ae, eL, Ir, xQ, d, BN, B, nO, iU, aW, Y, r, agF, Z, cm, bz, ck, qJ, nM, iT, mg, ei, ne); #c1(ARNTL2) c2(NP_001234931) c3(aryl hydrocarbon receptor nuclear translocator-like protein 2 isoform 2) c4(87832) c5(87833, 87834, 87835, 87836, 87837, 87838) c6( ) c7(bE, aW, QU, Gs, r, aT, Gd, bB, agG, bK, ey, ei, Z, q); #c1(ARNTL2) c2(NP_001234932) c3(aryl hydrocarbon receptor nuclear translocator-like protein 2 isoform 3) c4(87839, 87840) c5( ) c6( ) c7(bE, aW, QU, Gs, r, aT, Gd, bB, agG, bK, ey, ei, Z, q); #c1(ARNTL2) c2(NP_001234933) c3(aryl hydrocarbon receptor nuclear translocator-like protein 2 isoform 4) c4(87841) c5(87842, 87843, 87844, 87845, 87846, 87847, 87848, 87849, 87850, 87851, 87852, 87853, 87854, 87855, 87856, 87857, 87858, 87859) c6( ) c7(bE, aW, QU, Gs, r, aT, Gd, bB, agG, bK, ey, ei, Z, q); #c1(ARNTL2) c2(NP_064568) c3(aryl hydrocarbon receptor nuclear translocator-like protein 2 isoform 1) c4(203019) c5(203020, 203021, 203022, 203023, 203024, 203025, 203026) c6( ) c7(bE, aW, QU, Gs, r, aT, Gd, bB, agG, bK, ey, ei, Z, q); #c1(ARNTL2) c2(XP_011519071) c3(aryl hydrocarbon receptor nuclear translocator-like protein 2 isoform X5) c4(313665) c5(313666, 313667, 313668, 313669, 313670, 313671) c6( ) c7(bE, aW, QU, Gs, r, aT, Gd, bB, agG, bK, ey, ei, Z, q); #c1(ARPCIA) c2(NP_001177925) c3(actin-related protein 2/3 complex subunit 1A isoform 2) c4(73180) c5(73181, 73182, 73183, 73184, 73185, 73186) c6( ) c7(aC, aE); #c1(ARPCIA) c2(NP_006400) c3(actin-related protein 2/3 complex subunit 1A isoform 1) c4(164739) c5(164740, 164741, 164742, 164743, 164744, 164745) c6( ) c7(aC, aE); #c1(ARPC1B) c2(NP_005711) c3(actin-related protein 2/3 complex subunit 1B) c4(158703, 158704, 158705, 158706, 158707, 158708, 158709, 158710) c5(158711, 158712, 158713, 158714, 158715, 158716, 158717, 158718, 158719, 158720, 158721, 158722, 158723, 158724, 158725, 158726, 158727, 158728, 158729, 158730, 158731, 158732, 158733, 158734, 158735, 158736, 158737, 158738, 158739, 158740, 158741, 158742, 158743, 158744, 158745, 158746, 158747, 158748, 158749, 158750, 158751, 158752, 158753, 158754, 158755, 158756, 158757, 158758, 158759, 158760, 158761, 158762, 158763, 158764, 158765, 158766, 158767, 158768, 158769) c6( ) c7(Y, aF, aA); #c1(ARPC2) c2(NP_005722) c3(actin-related protein 2/3 complex subunit 2) c4(158829, 158830) c5(158831, 158832, 158833, 158834, 158835, 158836, 158837, 158838, 158839, 158840, 158841, 158842, 158843, 158844, 158845, 158846) c6( ) c7(fe, ha, iV); #c1(ARPC3) c2(NP_001265485) c3(actin-related protein 2/3 complex subunit 3 isoform 1) c4(98690, 98691) c5(98692, 98693, 98694, 98695, 98696, 98697, 98698, 98699, 98700, 98701, 98702, 98703) c6( ) c7(agH); #c1(ARPC5) c2(NP_001257368) c3(actin-related protein 2/3 complex subunit 5 isoform 2) c4(95261) c5(95262, 95263, 95264, 95265, 95266, 95267) c6( ) c7(Qu, bv, T, iK); #c1(ARPC5) c2(NP_005708) c3(actin-related protein 2/3 complex subunit 5 isoform 1) c4(158689, 158690) c5(158691, 158692, 158693, 158694, 158695, 158696, 158697, 158698, 158699, 158700, 158701, 158702) c6( ) c7(Qu, bv, iK); #c1(ARPIN) c2(NP_872422) c3(arpin isoform 1) c4( ) c5(256324, 256325, 256326, 256327, 256328, 256329) c6( ) c7(na); #c1(ARPP21) c2(NP_001020240) c3(cAMP-regulated phosphoprotein 21 isoform 2) c4( ) c5(28275, 28276, 28277, 28278, 28279, 28280, 28281, 28282, 28283, 28284, 28285, 28286, 28287, 28288, 28289, 28290, 28291, 28292, 28293, 28294, 28295, 28296, 28297, 28298, 28299, 28300, 28301, 28302, 28303, 28304, 28305, 28306, 28307, 28308, 28309, 28310, 28311, 28312, 28313, 28314, 28315, 28316, 28317, 28318, 28319, 28320, 28321, 28322, 28323, 28324, 28325, 28326, 28327, 28328, 28329, 28330, 28331, 28332) c6( ) c7(aW, nC, dV, aT); #c1(ARPP21) c2(NP_001254546) c3(cAMP-regulated phosphoprotein 21 isoform 3) c4(94637, 94638, 94639) c5(94640, 94641, 94642, 94643, 94644, 94645, 94646, 94647, 94648, 94649, 94650, 94651, 94652, 94653, 94654, 94655) c6( ) c7(aW, nC, dV, aT); #c1(ARPP21) c2(NP_001254548) c3(cAMP-regulated phosphoprotein 21 isoform 4) c4(94656) c5(94657, 94658, 94659, 94660, 94661, 94662, 94663, 94664, 94665, 94666) c6( ) c7(aW, nC, dV, aT); #c1(ARPP21) c2(NP_057384) c3(cAMP-regulated phosphoprotein 21 isoform 1) c4(190498) c5(190499, 190500, 190501, 190502, 190503, 190504) c6( ) c7(aW, nC, dV, aT); #c1(ARPP21) c2(XP_011531605) c3(cAMP-regulated phosphoprotein 21 isoform X4) c4(327744) c5( ) c6( ) c7(aW, nC, dV, aT); #c1(ARPP21) c2(XP_011531607) c3(cAMP-regulated phosphoprotein 21 isoform X7) c4(327745) c5( ) c6( ) c7(aW, nC, dV, aT); #c1(ARPP21) c2(XP_011531610) c3(cAMP-regulated phosphoprotein 21 isoform X10) c4(327746) c5( ) c6( ) c7(aW, nC, dV, aT); #c1(ARPP21) c2(XP_011531611) c3(cAMP-regulated phosphoprotein 21 isoform X11) c4(327747) c5( ) c6( ) c7(aW, nC, dV, aT); #c1(ARPP21) c2(XP_011531613) c3(cAMP-regulated phosphoprotein 21 isoform X13) c4( ) c5(327748) c6( ) c7(aW, nC, dV, aT); #c1(ARR3) c2(NP_004303) c3(arrestin-C) c4(144997, 144998, 144999) c5(145000, 145001, 145002, 145003, 145004, 145005, 145006, 145007, 145008, 145009, 145010, 145011, 145012, 145013, 145014, 145015, 145016, 145017) c6( ) c7(gh, gV, T, dA, qb, jh, fd, v, ci, q, ad, eA, eW, aT, dL, ae, af, eL, PP, s, hG, aW, Y, OX, oV, r, lo, t, cm, ck, kT, bP, mx, cj, iS, MJ, m, agl, gT, bt, B); #c1(ARRB1) c2(NP_004032) c3(beta-arrestin-1 isoform A) c4(142963, 142964) c5(142965, 142966, 142967, 142968, 142969, 142970, 142971, 142972, 142973, 142974, 142975, 142976) c6( ) c7(jh, JW, ai, eA, cd, bv, av, xE, aT, ji, ye, d, s, aW, Gv, fO, aq, iR, t, bz, eM, m, y); #c1(ARRB1) c2(NP_064647) c3(beta-arrestin-1 isoform B) c4(203458) c5(203459, 203460, 203461, 203462, 203463, 203464) c6( ) c7(jh, JW, ai, eA, cd, bv, av, xE, aT, ji, ye, d, s, aW, Gv, fO, aq, iR, t, bz, eM, m, y); #c1(ARRB2) c2(NP_001244258) c3(beta-arrestin-2 isoform 4) c4(92074) c5(92075, 92076, 92077, 92078, 92079, 92080) c6( ) c7(bL, T, jp, jh, ai, cd, ad, eW, HF, aT, K, ae, xa, yo, IR, iU, aW, Gv, fO, aq, HL, g, iR, GR, hq, cA, ao, de); #c1(ARRB2) c2(NP_001244259) c3(beta-arrestin-2 isoform 5) c4(92081) c5(92082, 92083, 92084, 92085, 92086, 92087) c6( ) c7(bL, T, jp, jh, ai, cd, ad, eW, HE, aT, K, ae, xa, yo, IR, iU, aW, Gv, fO, aq, HL, g, iR, GR, hq, cA, ao, de); #c1(ARRB2) c2(NP_004304) c3(beta-arrestin-2 isoform 1) c4(145018) c5(145019, 145020, 145021, 145022, 145023, 145024, 145025, 145026, 145027, 145028, 145029, 145030) c6( ) c7(bL, T, jp, jh, ai, cd, ad, eW, HF, aT, K, ae, xa, yo, IR, iU, aW, Gv, fO, aq, HL, g, iR, GR, hq, cA, ao, de); #c1(ARRB2) c2(NP_945355) c3(beta-arrestin-2 isoform 2) c4(260899) c5(260900, 260901, 260902, 260903, 260904, 260905) c6( ) c7(bL, T, jp, jh, ai, cd, ad, eW, HF, aT, K, ae, xa, yo, IR, iU, aW, Gv, fO, aq, HL, g, iR, GR, hq, cA, ao, de); #c1(ARRB2) c2(XP_011522160) c3(beta-arrestin-2 isoform X1) c4(316761) c5( ) c6( ) c7(bL, T, jp, jh, ai, cd, ad, eW, HF, aT, K, ae, xa, yo, IR, iU, aW, Gv, fO, aq, HL, g, iR, GR, hq, cA, ao, de); #c1(ARRDC2) c2(NP_001020775) c3(arrestin domain-containing protein 2 isoform 2) c4(29109) c5(29110, 29111, 29112, 29113, 29114, 29115) c6( ) c7(j); #c1(ARRDC2) c2(NP_056498) c3(arrestin domain-containing protein 2 isoform 1) c4(187786) c5(187787, 187788, 187789, 187790, 187791, 187792) c6( ) c7(j); #c1(ARRDC3) c2(NP_065852) c3(arrestin domain-containing protein 3) c4(205905) c5(205906, 205907, 205908, 205909, 205910, 205911) c6( ) c7(aW, T, v, aT); #c1(ARRDC4) c2(NP_899232) c3(arrestin domain-containing protein 4) c4(258040, 258041) c5(258042, 258043, 258044, 258045, 258046, 258047, 258048, 258049, 258050, 258051, 258052, 258053) c6( ) c7(agJ, T, v, j, SE); #c1(ARSA) c2(NP_001078895) c3(arylsulfatase A isoform a precursor) c4(37966, 37967, 37968) c5(37969, 37970, 37971, 37972, 37973, 37974, 37975, 37976, 37977, 37978, 37979, 37980, 37981, 37982, 37983, 37984, 37985, 37986, 37987, 37988, 37989, 37990, 37991, 37992, 37993, 37994, 37995, 37996, 37997) c6( ) c7(bM, agO, agQ, T, dA, ob, ZF, iH, zs, agU, aw, NT, bO, bB, Ka, aj, j, bX, yU, V, q, aR, J, AK, agR, yZ, agV, K, ji, he, af, cp, agK, tN, yr, BO, agM, agP, agL, ge, r, dq, fe, agN, iV, f, bz, zV, agS, ac, Rd, bE, U, Lq, gT, agT); #c1(ARSA) c2(XP_011528992) c3(arylsulfatase A isoform X1) c4( ) c5(324358, 324359, 324360, 324361, 324362) c6( ) c7(bM, agO, agQ, T, dA, ob, ZF, iH, zs, agU, aw, NT, bO, bB, Ka, aj, j, bX, yU, V, q, aR, J, AK, agR, yZ, agV, K, ji, he, af, cp, agK, tN, yr, BO, agM, agP, agL, ge, r, dq, fe, agN, iV, f, bz, zV, agS, ac, Rd, bE, U, Lq, gT, agT); #c1(ARSB) c2(NP_000037) c3(arylsulfatase B isoform 1 precursor) c4(477, 478) c5(479, 480, 481, 482, 483, 484, 485, 486, 487, 488, 489, 490, 491, 492, 493, 494, 495, 496, 497, 498, 499, 500, 501, 502, 503, 504, 505, 506, 507, 508, 509, 510, 511, 512, 513, 514, 515, 516, 517, 518, 519, 520, 521, 522, 523, 524, 525, 526, 527, 528, 529, 530, 531, 532, 533, 534, 535, 536, 537, 538, 539, 540, 541, 542, 543, 544, 545, 546, 547, 548, 549, 550, 551, 552, 553, 554, 555, 556, 557, 558, 559, 560, 561, 562, 563, 564, 565, 566, 567, 568, 569, 570, 571, 572, 573, 574, 575, 576, 577, 578) c6(579, 580, 581, 582, 583) c7(Rd, kg, iU, oe, ao, dq, Lq, j, ade, agW, dr); #c1(ARSB) c2(NP_942002) c3(arylsulfatase B isoform 2 precursor) c4(260405) c5(260406, 260407, 260408, 260409, 260410, 260411, 260412, 260413) c6(260414, 260415) c7(Rd, kg, iU, oe, ao, dq, Lq, j, ade, agW, dr); #c1(ARSB) c2(XP_006714678) c3(arylsulfatase B isoform X6) c4(287996) c5( ) c6( ) c7(Rd, kg, iU, oe, ao, dq, Lq, j, ade, agW, dr); #c1(ARSB) c2(XP_011541695) c3(arylsulfatase B isoform X5) c4(340220) c5( ) c6( ) c7(Rd, kg, iU, oe, ao, dq, Lq, j, ade, agW, dr); #c1(ARSD) c2(NP_001660) c3(arylsulfatase D precursor) c4(119833) c5(119834, 119835, 119836, 119837, 119838, 119839) c6( ) c7(hl, ahf, ahc, acl, RX, ha, VT, fF, bS, j, ct, nA, agY, aR, xt, agd, no, KN, h, adm, bK, ahg, jj, rE, rz, ahb, ahd, Gv, ahe, nf, gl, Ku, aha, Z, QK, bN, hq, ac, agX, agZ, yA, bD, jr, qc); #c1(ARSE) c2(NP_001269557) c3(arylsulfatase E isoform 1) c4(101953) c5(101954, 101955, 101956, 101957, 101958, 101959) c6( ) c7(es, Lf, ahj, ahh, bu, ahi); #c1(ARSE) c2(NP_001269560) c3(arylsulfatase E isoform 3) c4(101979) c5(101980, 101981, 101982, 101983, 101984, 101985) c6( ) c7(es, Lf, ahj, ahh, bu, ahi); #c1(ARSE) c2(XP_005274575) c3(arylsulfatase E isoform X2) c4(285159, 285160) c5(285161, 285162) c6( ) c7(es, Lf, ahj, ahh, bu, ahi); #c1(ARSE) c2(XP_005274576) c3(arylsulfatase E isoform X1) c4( ) c5(285163, 285164, 285165, 285166, 285167, 285168, 285169, 285170, 285171, 285172) c6( ) c7(es, Lf, ahj, ahh, bu, ahi); #c1(ARSF) c2(NP_004033) c3(arylsulfatase F precursor) c4( ) c5(142977, 142978, 142979, 142980, 142981, 142982, 142983, 142984, 142985, 142986, 142987, 142988) c6( ) c7(es, T, av, lg, eM, iA, aW, ds, iU, ahk, lb, ff, aT, kf, Io, en, cm, on); #c1(ARSF) c2(XP_011543824) c3(arylsulfatase F isoform X1) c4(342959) c5(342960, 342961) c6( ) c7(es, T, av, lg, eM, iA, aW, ds, iU, ahk, lb, ff, aT, kf, Io, en, cm, on); #c1(ARSG) c2(NP_055775) c3(arylsulfatase G) c4(183406, 183407) c5(183408, 183409, 183410, 183411, 183412, 183413, 183414, 183415, 183416, 183417, 183418, 183419, 183420, 183421, 183422, 183423) c6( ) c7(cd, c, cz); #c1(ARSH) c2(NP_001011719) c3(arylsulfatase H) c4(24800) c5(24801, 24802, 24803, 24804, 24805, 24806) c6( ) c7(T, ahj, agG, agV, ci, cm); #c1(ARSI) c2(NP_001012301) c3(arylsulfatase 1 precursor) c4(24854, 24855, 24856) c5(24857, 24858, 24859, 24860, 24861, 24862, 24863, 24864, 24865, 24866, 24867, 24868, 24869, 24870, 24871, 24872, 24873, 24874) c6( ) c7(ww, BO, tb, hq); #c1(ARSJ) c2(NP_078866) c3(arylsulfatase J precursor) c4(215839, 215840) c5(215841, 215842, 215843, 215844, 215845, 215846) c6( ) c7(oe, ac); #c1(ARSJ) c2(XP_005263269) c3(arylsulfatase J isoform X1) c4(278373) c5(278374, 278375, 278376, 278377, 278378, 278379) c6( ) c7(oe, ac); #c1(ARSJ) c2(XP_011530540) c3(arylsulfatase J isoform X2) c4( ) c5(326475) c6( ) c7(oe, ac); #c1(ARSJ) c2(XP_011530544) c3(arylsulfatase J isoform X4) c4( ) c5(326476, 326477, 326478, 326479, 326480, 326481) c6( ) c7(oe, ac); #c1(ARSK) c2(NP_937793) c3(arylsulfatase K precursor) c4(259083, 259084) c5(259085, 259086, 259087, 259088, 259089, 259090, 259091, 259092, 259093, 259094, 259095, 259096) c6( ) c7(Lq); #c1(ART1) c2(NP_004305) c3(GPI-linked NAD(P)(+)-arginine ADP-ribosyltransferase 1 precursor) c4(145031) c5(145032, 145033, 145034, 145035, 145036, 145037) c6( ) c7(Y, ff, aE, en); #c1(ART3) c2(NP_001123488) c3(ecto-ADP-ribosyltransferase 3 isoform a precursor) c4(47175) c5(47176, 47177, 47178, 47179, 47180, 47181) c6( ) c7(vH); #c1(ART3) c2(NP_001123489) c3(ecto-ADP-ribosyltransferase 3 isoform c precursor) c4(47182) c5(47183, 47184, 47185, 47186, 47187, 47188) c6( ) c7(vH); #c1(ART3) c2(XP_005263061) c3(ecto-ADP-ribosyltransferase 3 isoform X11) c4( ) c5(278277, 278278, 278279, 278280, 278281, 278282, 278283, 278284, 278285, 278286, 278287, 278288, 278289, 278290, 278291, 278292, 278293, 278294, 278295, 278296, 278297, 278298, 278299, 278300) c6( ) c7(vH); #c1(ART3) c2(XP_006714281) c3(ecto-ADP-ribosyltransferase 3 isoform X6) c4(287671, 287672, 287673, 287674) c5( ) c6( ) c7(vH); #c1(ART4) c2(NP_066549) c3(ecto-ADP-ribosyltransferase 4 precursor) c4(207353, 207354) c5(207355, 207356, 207357, 207358, 207359, 207360, 207361, 207362, 207363, 207364, 207365, 207366) c6( ) c7(ck, T, kP, jh, cj, aA, aF, m, B); #c1(ARVCF) c2(XP_005261300) c3(armadillo repeat protein deleted in velo-cardio-facial syndrome isoform X5) c4(277288) c5(277289, 277290, 277291, 277292, 277293, 277294) c6( ) c7(ae, ac, iX, dL, dy, bX, fq, cd, gF, ad); #c1(ARVCF) c2(XP_006724310) c3(armadillo repeat protein deleted in velo-cardio-facial syndrome isoform X9) c4(295919) c5(295920, 295921, 295922, 295923, 295924, 295925, 295926, 295927, 295928, 295929) c6( ) c7(ae, ac, iX, dL, dy, bX, fq, cd, gF, ad); #c1(ARVCF) c2(XP_006724311) c3(armadillo repeat protein deleted in velo-cardio-facial syndrome isoform X10) c4(295930) c5(295931, 295932, 295933, 295934, 295935, 295936) c6( ) c7(ae, ac, iX, dL, dy, bX, fq, cd, gF, ad); #c1(ARVCF) c2(XP_011528482) c3(armadillo repeat protein deleted in velo-cardio-facial syndrome isoform X1) c4(323590) c5(323591, 323592, 323593, 323594, 323595, 323596) c6( ) c7(ae, ac, iX, dL, dy, bX, fq, cd, gF, ad); #c1(ARX) c2(NP_620689) c3(homeobox protein ARX) c4(238044) c5(238045, 238046, 238047, 238048, 238049, 238050, 238051) c6( ) c7(bL, ul, qx, ha, aht, nA, aR, ahs, nd, aU, ahr, aho, Im, ahu, cC, yr, ahl, ahm, aeq, FD, nf, ahq, xw, bN, ahn, ahp, WO, FB); #c1(AS3MT) c2(NP_065733) c3(arsenite methyltransferase) c4(205123) c5(205124, 205125, 205126, 205127, 205128, 205129) c6( ) c7(T, dD, hk, ea, e, eL, aj, dL, cS, K, IQ, j, dQ, Pk, ahv, eq, J); #c1(ASAH1) c2(NP_001120977) c3(acid ceramidase isoform c) c4(45030) c5(45031, 45032, 45033, 45034, 45035, 45036, 45037) c6( ) c7(T, AS, ml, adi, bS, v, ct, nA, yU, ad, acX, ahy, hd, mh, aE, Db, RN, xW, aT, kf, yZ, Fx, K, EL, ae, ahA, cp, aW, Y, OX, aq, ahx, Z, bz, dr, EJ, ck, nB, aem, gX, ahw, ahz, Lq, du, agT, B); #c1(ASAH1) c2(NP_004306) c3(acid ceramidase isoform b) c4(145038, 145039) c5(145040, 145041, 145042, 145043, 145044, 145045, 145046) c6( ) c7(T, AS, ml, adi, bS, v, ct, nA, yU, ad, acX, ahy, hd, mh, aE, Db, RN, xW, aT, kf, yZ, Fx, K, EL, ae, ahA, cp, aW, Y, OX, aq, ahx, Z, bz, dr, EJ, ck, nB, aem, gX, ahw, ahz, Lq, du, agT, B); #c1(ASAH1) c2(NP_808592) c3(acid ceramidase isoform a preproprotein) c4(252738, 252739) c5(252740, 252741, 252742, 252743, 252744, 252745, 252746, 252747, 252748, 252749, 252750, 252751, 252752, 252753, 252754, 252755, 252756, 252757, 252758, 252759, 252760, 252761, 252762, 252763, 252764, 252765, 252766, 252767, 252768, 252769, 252770, 252771, 252772, 252773, 252774, 252775, 252776, 252777, 252778, 252779, 252780, 252781, 252782, 252783, 252784, 252785, 252786, 252787, 252788, 252789, 252790, 252791, 252792, 252793, 252794, 252795, 252796, 252797, 252798, 252799, 252800, 252801, 252802, 252803, 252804, 252805, 252806, 252807, 252808, 252809, 252810, 252811, 252812, 252813, 252814, 252815, 252816, 252817, 252818, 252819, 252820, 252821, 252822, 252823, 252824, 252825, 252826, 252827, 252828, 252829, 252830, 252831, 252832, 252833, 252834, 252835, 252836, 252837, 252838, 252839, 252840, 252841, 252842, 252843, 252844, 252845, 252846, 252847, 252848, 252849, 252850, 252851, 252852, 252853, 252854, 252855, 252856, 252857, 252858, 252859, 252860, 252861, 252862, 252863, 252864, 252865, 252866, 252867, 252868, 252869, 252870, 252871, 252872, 252873, 252874, 252875, 252876, 252877, 252878, 252879, 252880, 252881, 252882, 252883, 252884, 252885, 252886, 252887, 252888, 252889, 252890, 252891) c6( ) c7(T, AS, ml, adi, bS, v, ct, nA, yU, ad, acX, ahy, hd, mh, aE, Db, RN, xW, aT, kf, yZ, Ex, K, EL, ae, ahA, cp, aW, Y, OX, aq, ahx, Z, bz, dr, EJ, ck, nB, aem, gX, ahw, ahz, Lq, du, agT, B); #c1(ASAH1) c2(XP_005273561) c3(acid ceramidase isoform X1) c4( ) c5(284675, 284676, 284677, 284678, 284679, 284680) c6( ) c7(T, AS, ml, adi, bS, v, ct, nA, yU, ad, acX, ahy, hd, mh, aE, Db, RN, xW, aT, kf, yZ, Fx, K, EL, ae, ahA, cp, aW, Y, OX, aq, ahx, Z, bz, dr, EJ, ck, nB, aem, gX, ahw, ahz, Lq, du, agT, B); #c1(ASAH2) c2(NP_001137446) c3(neutral ceramidase isoform b) c4(55765, 55766) c5(55767, 55768, 55769, 55770, 55771, 55772, 55773, 55774, 55775, 55776, 55777, 55778) c6( ) c7(IZ, fm, oe, hl, EQ, fe, ao); #c1(ASAH2) c2(XP_011538272) c3(neutral ceramidase isoform X1) c4(335909, 335910, 335911, 335912, 335913) c5(335914, 335915, 335916, 335917, 335918, 335919, 335920, 335921, 335922, 335923, 335924, 335925, 335926, 335927, 335928, 335929, 335930, 335931, 335932, 335933, 335934, 335935, 335936, 335937) c6( ) c7(IZ, fm, oe, hl, EQ, fe, ao); #c1(ASAH2) c2(XP_011538274) c3(neutral ceramidase isoform X3) c4(335938) c5(335939, 335940, 335941, 335942, 335943, 335944, 335945, 335946) c6( ) c7(IZ, fm, oe, hl, EQ, fe, ao); #c1(ASAP1) c2(NP_060952) c3(arf-GAP with SH3 domain, ANK repeat and PH domain-containing protein 1 isoform 1) c4(198860) c5(198861, 198862, 198863, 198864, 198865, 198866, 198867, 198868, 198869, 198870) c6( ) c7(T, dA, iW, aj, v, V, cd, q, ad, aT, ae, d, aW, Y, r, uF, iK, iP, ck, wq, dT, zG, zl, ao); #c1(ASAP1) c2(XP_011515354) c3(arf-GAP with SH3 domain, ANK repeat and PH domain-containing protein 1 isoform X1) c4(308195) c5(308196, 308197, 308198, 308199, 308200, 308201) c6( ) c7(T, dA, iW, aj, v, V, cd, q, ad, aT, ae, d, aW, Y, r, uF, iK, iP, ck, wq, dT, zG, zl, ao); #c1(ASAP2) c2(NP_001128663) c3(arf-GAP with SH3 domain, ANK repeat and PH domain-containing protein 2 isoform b) c4(50496) c5(50497, 50498, 50499, 50500, 50501, 50502) c6( ) c7(ck, d, dA, iW, r, wq, dT, aj, v, zG, uF, zl, V, cd, ao); #c1(ASAP2) c2(NP_003878) c3(arf-GAP with SH3 domain, ANK repeat and PH domain-containing protein 2 isoform a) c4(141743) c5(141744, 141745, 141746, 141747, 141748, 141749) c6( ) c7(ck, d, dA, iW, r, wq, dT, aj, v, zG, uF, zl, V, cd, ao); #c1(ASAP2) c2(XP_011508705) c3(arf-GAP with SH3 domain, ANK repeat and PH domain-containing protein 2 isoform X1) c4( ) c5(299318) c6( ) c7(ck, d, dA, iW, r, wq, dT, aj, v, zG, uF, zl, V, cd, ao); #c1(ASB1) c2(NP_001035535) c3(ankyrin repeat and SOCS box protein 1) c4(32880) c5(32881, 32882, 32883, 32884, 32885, 32886) c6( ) c7(hH, bK); #c1(ASB10) c2(NP_001135931) c3(ankyrin repeat and SOCS box protein ID isoform 1) c4(53577, 53578) c5(53579, 53580, 53581, 53582, 53583, 53584, 53585, 53586, 53587, 53588, 53589, 53590) c6( ) c7(cZ, pZ, dH, dd, dw, ahB); #c1(ASB10) c2(NP_001135932) c3(ankyrin repeat and SOCS box protein 10 isoform 2) c4(53591, 53592) c5(53593, 53594, 53595, 53596, 53597, 53598, 53599, 53600, 53601, 53602, 53603) c6( ) c7(cZ, pZ, dH, dd, dw, ahB); #c1(ASB10) c2(NP_543147) c3(ankyrin repeat and SOCS box protein ID isoform 3) c4(233458) c5(233459, 233460, 233461, 233462, 233463, 233464) c6( ) c7(cZ, pZ, dH, dd, dw, ahB); #c1(ASB13) c2(NP_078977) c3(ankyrin repeat and SOCS box protein 13) c4(216367) c5(216368, 216369, 216370, 216371, 216372, 216373) c6( ) c7(cF); #c1(ASB15) c2(XP_005250203) c3(ankyrin repeat and SOCS box protein 15 isoform X1) c4(270173, 270174) c5(270175, 270176, 270177, 270178, 270179, 270180, 270181, 270182, 270183, 270184, 270185, 270186, 270187, 270188, 270189, 270190, 270191, 270192, 270193, 270194, 270195, 270196, 270197, 270198, 270199) c6( ) c7(fr); #c1(ASB15) c2(XP_011514118) c3(ankyrin repeat and SOCS box protein 15 isoform X2) c4(306704, 306705) c5(306706, 306707, 306708, 306709) c6( ) c7(fr); #c1(ASB15) c2(XP_011514123) c3(ankyrin repeat and SOCS box protein 15 isoform X3) c4( ) c5(306710, 306711, 306712, 306713, 306714, 306715) c6( ) c7(fr); #c1(ASB15) c2(XP_011514124) c3(ankyrin repeat and SOCS box protein 15 isoform X4) c4( ) c5(306716, 306717, 306718, 306719, 306720) c6( ) c7(fr); #c1(ASB18) c2(NP_997721) c3(ankyrin repeat and SOCS box protein 18) c4(265769, 265770) c5(265771, 265772, 265773, 265774, 265775, 265776, 265777, 265778, 265779, 265780, 265781, 265782) c6( ) c7(fq); #c1(ASB2) c2(NP_057234) c3(ankyrin repeat and SOCS box protein 2 isoform 2) c4(189627) c5(189628, 189629, 189630, 189631, 189632, 189633) c6( ) c7(ck, kS, j, jj, iT); #c1(ASB2) c2(XP_006725228) c3(ankyrin repeat and SOCS box protein 2 isoform X1) c4(296732, 296733, 296734) c5(296735, 296736, 296737, 296738, 296739, 296740, 296741, 296742, 296743, 296744, 296745, 296746) c6( ) c7(ck, kS, j, jj, iT); #c1(ASB2) c2(XP_011544948) c3(ankyrin repeat and SOCS box protein 2 isoform X3) c4( ) c5(343939, 343940, 343941, 343942, 343943, 343944) c6( ) c7(ck, kS, j, jj, iT); #c1(ASB6) c2(NP_060343) c3(ankyrin repeat and SOCS box protein 6 isoform 1) c4(195507, 195508) c5(195509, 195510, 195511, 195512, 195513, 195514, 195515, 195516, 195517, 195518, 195519, 195520, 195521) c6( ) c7(cz); #c1(ASB6) c2(NP_821066) c3(ankyrin repeat and SOCS box protein 6 isoform 2) c4(253158) c5(253159, 253160, 253161, 253162, 253163) c6( ) c7(cz); #c1(ASB7) c2(NP_078984) c3(ankyrin repeat and SOCS box protein 7 isoform 1) c4(216424) c5(216425, 216426, 216427, 216428, 216429, 216430) c6( ) c7(j); #c1(ASB7) c2(NP_937886) c3(ankyrin repeat and SOCS box protein 7 isoform 2) c4(259443) c5(259444, 259445, 259446, 259447, 259448, 259449) c6( ) c7(j); #c1(ASCC1) c2(NP_001185727) c3(activating signal cointegrator 1 complex subunit 1 isoform b) c4(76120, 76121, 76122, 76123) c5(76124, 76125, 76126, 76127, 76128, 76129, 76130, 76131, 76132, 76133, 76134, 76135, 76136, 76137, 76138, 76139, 76140, 76141, 76142, 76143, 76144, 76145, 76146) c6( ) c7(T, pf, aw, abM, rf, aA, bB, ti, j, eA, eW, oT, agd, aE, aT, cU, cy, h, bK, K, zy, he, ae, cp, UF, eG, aW, Y, Gv, az, gi, LZ, agb, gl, aga, aF, as, iV, t, cm, eK, LB, kT, age, eU, agc, eM, bE, w, dO, at, m, fD, Uw, fy, bt, y); #c1(ASCC1) c2(NP_001185728) c3(activating signal cointegrator 1 complex subunit 1 isoform a) c4(76147) c5(76148, 76149, 76150, 76151, 76152, 76153, 76154, 76155, 76156, 76157) c6( ) c7(T, pf, aw, abM, rf, aA, bB, ti, j, eA, eW, oT, agd, aE, aT, cU, cy, h, bK, K, zy, he, ae, cp, UF, eG, aW, Y, Gv, az, gi, LZ, agb, gl, aga, aF, as, iV, t, cm, eK, LB, kT, age, eU, agc, eM, bE, w, dO, at, m, fD, Uw, fy, bt, y); #c1(ASCC1) c2(XP_011538144) c3(activating signal cointegrator 1 complex subunit 1 isoform X3) c4(335745, 335746) c5(335747, 335748, 335749, 335750, 335751, 335752, 335753, 335754, 335755, 335756, 335757, 335758) c6( ) c7(T, pf, aw, abM, rf, aA, bB, ti, j, eA, eW, oT, agd, aE, aT, cU, cy, h, bK, K, zy, he, ae, cp, UF, eG, aW, Y, Gv, az, gi, LZ, agb, gl, aga, aF, as, iV, t, cm, eK, LB, kT, age, eU, agc, eM, bE, w, dO, at, m, fD, Uw, fy, bt, y); #c1(ASCC1) c2(XP_011538145) c3(activating signal cointegrator 1 complex subunit 1 isoform X4) c4(335759, 335760) c5(335761) c6( ) c7(T, pf, aw, abM, rf, aA, bB, ti, j, eA, eW, oT, agd, aE, aT, cU, cy, h, bK, K, zy, he, ae, cp, UF, eG, aW, Y, Gv, az, gi, LZ, agb, gl, aga, aF, as, iV, t, cm, eK, LB, kT, age, eU, agc, eM, bE, w, dO, at, m, fD, Uw, fy, bt, y); #c1(ASCC1) c2(XP_011538146) c3(activating signal cointegrator 1 complex subunit 1 isoform X5) c4( ) c5(335762, 335763, 335764, 335765, 335766, 335767, 335768, 335769, 335770, 335771, 335772, 335773, 335774, 335775, 335776, 335777, 335778, 335779, 335780, 335781, 335782, 335783, 335784, 335785) c6( ) c7(T, pf, aw, abM, rf, aA, bB, ti, j, eA, eW, oT, agd, aE, aT, cU, cy, h, bK, K, zy, he, ae, cp, UF, eG, aW, Y, Gv, az, gi, LZ, agb, gl, aga, aF, as, iV, t, cm, eK, LB, kT, age, eU, agc, eM, bE, w, dO, at, m, fD, Uw, fy, bt, y); #c1(ASCC2) c2(NP_001229835) c3(activating signal cointegrator 1 complex subunit 2 isoform 2) c4(85396) c5(85397, 85398, 85399, 85400, 85401, 85402) c6( ) c7(iM, je, jh, kH, ahC, bB, fd, qN, ae, ad); #c1(ASCC2) c2(NP_115580) c3(activating signal cointegrator 1 complex subunit 2 isoform 1) c4(223269, 223270) c5(223271, 223272, 223273, 223274, 223275, 223276, 223277, 223278, 223279, 223280) c6( ) c7(iM, je, jh, kH, ahC, bB, fd, qN, ae, ad); #c1(ASCC2) c2(XP_011528749) c3(activating signal cointegrator 1 complex subunit 2 isoform X3) c4( ) c5(324054, 324055, 324056, 324057, 324058, 324059) c6( ) c7(iM, je, jh, kH, ahC, bB, fd, qN, ae, ad); #c1(ASCC3) c2(NP_001271200) c3(activating signal cointegrator 1 complex subunit 3 isoform c) c4(103571) c5(103572, 103573, 103574, 103575, 103576, 103577) c6( ) c7(Kc, T, fM, ac, r, ey, nA, fq, q, ahD); #c1(ASCC3) c2(NP_006819) c3(activating signal cointegrator 1 complex subunit 3 isoform a) c4(168379) c5(168380, 168381, 168382, 168383, 168384, 168385) c6( ) c7(Kc, T, fM, ac, r, ey, nA, fq, q, ahD); #c1(ASCC3) c2(NP_071374) c3(activating signal cointegrator 1 complex subunit 3 isoform b) c4(211230) c5(211231, 211232, 211233, 211234, 211235, 211236) c6( ) c7(Kc, T, fM, ac, r, ey, nA, fq, q, ahD); #c1(ASCL1) c2(NP_004307) c3(achaete-scute homolog 1) c4(145047) c5(145048, 145049, 145050, 145051, 145052, 145053, 145054) c6( ) c7(T, ha, qy, OE, BH, ci, nA, yp, pz, Fc, eA, aR, ad, av, ft, hd, nv, pX, ahL, aT, Ou, an, ahK, ahE, Yi, jf, s, ahG, aW, Y, AQ, ff, ahF, ahJ, ahl, en, g, as, cm, bz, ac, eM, nB, nG, ahH, cB, iu); #c1(ASCL2) c2(NP_005161) c3(achaete-scute homolog 2) c4(153528) c5(153529, 153530, 153531, 153532, 153533, 153534, 153535) c6( ) c7(T, B, GN, s, X, hL, r, aA, aF, ci, cl, nJ, q); #c1(ASCL4) c2(NP_982260) c3(achaete-scute homolog 4) c4(263234) c5(263235, 263236, 263237, 263238, 263239, 263240) c6( ) c7(aj); #c1(ASF1A) c2(NP_054753) c3(histone chaperone ASF1A) c4(177619) c5(177620, 177621, 177622, 177623, 177624, 177625) c6( ) c7(zw, xE, hA, Y, aT, y, fb, ai); #c1(ASF1B) c2(NP_060624) c3(histone chaperone ASF1B) c4(196884) c5(196885, 196886, 196887, 196888, 196889, 196890) c6( ) c7(aW, aT); #c1(ASH1L) c2(XP_006711513) c3(histone-lysine N-methyltransferase ASH1L isoform X1) c4(286047, 286048) c5(286049, 286050, 286051, 286052, 286053, 286054, 286055, 286056, 286057, 286058, 286059, 286060, 286061) c6( ) c7(ft, ff, rx, en, cm, bz); #c1(ASH2L) c2(NP_001098684) c3(set1/Ash2 histone methyltransferase complex subunit ASH2 isoform b) c4( ) c5(41485, 41486, 41487, 41488, 41489, 41490) c6( ) c7(aW, gv, B, ci, aT); #c1(ASH2L) c2(NP_001269201) c3(set1/Ash2 histone methyltransferase complex subunit ASH2 isoform d) c4( ) c5(100759, 100760, 100761, 100762, 100763) c6( ) c7(aW, gv, B, ci, aT); #c1(ASH2L) c2(NP_004665) c3(set1/Ash2 histone methyltransferase complex subunit ASH2 isoform a) c4(148685, 148686, 148687) c5(148688, 148689, 148690, 148691, 148692, 148693, 148694, 148695) c6( ) c7(aW, gv, B, ci, aT); #c1(ASH2L) c2(XP_006716476) c3(set1/Ash2 histone methyltransferase complex subunit ASH2 isoform X3) c4(290348) c5(290349, 290350, 290351, 290352, 290353, 290354, 290355, 290356, 290357, 290358) c6( ) c7(aW, gv, B, ci, aT); #c1(ASIC1) c2(NP_001086) c3(acid-sensing ion channel 1 isoform b) c4(38241) c5(38242, 38243, 38244, 38245, 38246, 38247) c6( ) c7(Mo, ahN, d, ac, II, Kv, qK, ahM, cz, cy, IN, eA, IC, abC, V, cd, eu); #c1(ASIC1) c2(NP_001243759) c3(acid-sensing ion channel 1 isoform c) c4(91674) c5(91675, 91676, 91677, 91678, 91679, 91680) c6( ) c7(Mo, ahN, d, ac, II, Kv, qK, ahM, cz, cy, IN, eA, IC, abC, V, cd, eu); #c1(ASIC1) c2(NP_064423) c3(acid-sensing ion channel 1 isoform a) c4(202415) c5(202416, 202417, 202418, 202419, 202420, 202421) c6( ) c7(Mo, ahN, d, ac, II, Kv, qK, ahM, cz, cy, IN, eA, IC, abC, V, cd, eu); #c1(ASIC2) c2(NP_001085) c3(acid-sensing ion channel 2 isoform MDEG1) c4(38227, 38228) c5(38229, 38230, 38231, 38232, 38233, 38234, 38235, 38236, 38237, 38238, 38239, 38240) c6( ) c7(nD, T, cF, d, ac, tb, aE, dM, cm, ww, j, bK, an, gT, V, fq, eA, bN); #c1(ASIC2) c2(NP_899233) c3(acid-sensing ion channel 2 isoform MDEG2) c4(258054) c5(258055, 258056, 258057, 258058, 258059, 258060) c6( ) c7(nD, T, cF, d, ac, tb, aE, dM, cm, ww, j, bK, an, gT, V, fq, eA, bN); #c1(ASIC3) c2(NP_004760) c3(acid-sensing ion channel 3 isoform a) c4(149379) c5(149380, 149381, 149382, 149383, 149384, 149385) c6( ) c7(qX, ahO, xZ, ahP, cz, ahQ, mf); #c1(ASIC3) c2(NP_064717) c3(acid-sensing ion channel 3 isoform b) c4(203552) c5(203553, 203554, 203555, 203556, 203557, 203558) c6( ) c7(qX, ahO, xZ, ahP, cz, ahQ, mf); #c1(ASIC3) c2(NP_064718) c3(acid-sensing ion channel 3 isoform c) c4(203559) c5(203560, 203561, 203562, 203563, 203564, 203565) c6( ) c7(qX, ahO, xZ, ahP, cz, ahQ, mf); #c1(ASIC4) c2(NP_878267) c3(acid-sensing ion channel 4) c4(257064) c5(257065, 257066, 257067, 257068, 257069, 257070) c6( ) c7(ahR, xw, aR); #c1(ASIC4) c2(XP_005246728) c3(acid-sensing ion channel 4 isoform X1) c4(267390) c5(267391, 267392, 267393, 267394, 267395, 267396) c6( ) c7(ahR, xw, aR); #c1(ASIC5) c2(NP_059115) c3(acid-sensing ion channel 5) c4(193113) c5(193114, 193115, 193116, 193117, 193118, 193119) c6( ) c7(ao, MF, ahS, qa, cz); #c1(ASIP) c2(XP_005260469) c3(agouti-signaling protein isoform X2) c4( ) c5(276566) c6( ) c7(sc, T, yk, n, v, j, o, x, l, u, afQ, h, ahU, ahT, A, Y, ff, cr, en, t, ahV, sS, Dy, c, hk, w, m, k, y, B, p); #c1(ASIP) c2(XP_011527125) c3(agouti-signaling protein isoform X1) c4(321628) c5(321629, 321630, 321631, 321632, 321633) c6( ) c7(sc, T, yk, n, v, j, o, x, l, u, afQ, h, ahQ, ahT, A, Y, ff, cr, en, t, ahV, sS, Dy, c, hk, w, m, k, y, B, p); #c1(ASL) c2(NP_000039) c3 (argininosuccinate lyase isoform 1) c4(584) c5(585, 586, 587, 588, 589, 590, 591, 592, 593, 594, 595, 596, 597, 598, 599, 600, 601, 602, 603, 604, 605, 606, 607, 608, 609, 610, 611, 612, 613, 614, 615, 616, 617, 618, 619, 620, 621, 622, 623, 624, 625, 626, 627, 628, 629, 630, 631, 632, 633, 634, 635, 636, 637, 638, 639, 640, 641, 642, 643, 644, 645, 646, 647, 648, 649, 650, 651, 652, 653, 654, 655, 656, 657, 658, 659, 660, 661, 662, 663, 664, 665, 666, 667, 668, 669, 670, 671, 672, 673, 674, 675, 676, 677, 678, 679, 680, 681, 682, 683, 684, 685, 686, 687, 688, 689, 690, 691, 692, 693, 694, 695, 696, 697, 698, 699, 700, 701, 702, 703, 704, 705, 706, 707, 708, 709, 710, 711, 712, 713, 714, 715, 716, 717, 718, 719, 720, 721, 722, 723, 724, 725, 726, 727, 728, 729, 730, 731, 732) c6(733) c7(Na, ahW, T, afC, d, JZ, wz, Lv, Ka, aq, Nc, K, jo, nA, iR, B, bN); #c1(ASL) c2(NP_001020115) c3(argininosuccinate lyase isoform 2) c4(28217) c5(28218, 28219, 28220, 28221, 28222, 28223) c6( ) c7(Na, ahW, T, afC, d, JZ, wz, Lv, Ka, aq, Nc, K, jo, nA, iR, B, bN); #c1(ASL) c2(NP_001020117) c3(argininosuccinate lyase isoform 3) c4(28224, 28225) c5(28226, 28227, 28228, 28229, 28230, 28231, 28232, 28233, 28234, 28235, 28236, 28237) c6( ) c7(Na, ahW, T, afC, d, JZ, wz, Lv, Ka, aq, Nc, K, jo, nA, iR, B, bN); #c1(ASMT) c2(NP_001164510) c3(acetylserotonin O-methyltransferase isoform 2) c4(66980) c5(66981, 66982, 66983, 66984, 66985, 66986, 66987, 66988, 66989, 66990, 66991, 66992) c6( ) c7(bP, rz, ahX, MU, bS, bK, ct, Z, he, bN); #c1(ASMT) c2(NP_004034) c3(acetylserotonin O-methyltransferase isoform 1) c4(142989, 142990, 142991) c5(142992, 142993, 142994, 142995, 142996, 142997, 142998, 142999, 143000, 143001, 143002, 143003) c6( ) c7(bP, rz, ahX, MU, bS, bK, ct, Z, he, bN); #c1(ASMTL) c2(NP_001166945) c3(N-acetylserotonin O-methyltransferase-like protein isoform 3) c4(68693) c5(68694, 68695, 68696, 68697, 68698, 68699) c6( ) c7(bt); #c1(ASMTL) c2(NP_004183) c3(N-acetylserotonin O-methyltransferase-like protein isoform 1) c4(144142, 144143, 144144) c5(144145, 144146, 144147, 144148, 144149, 144150, 144151, 144152, 144153, 144154, 144155, 144156, 144157, 144158, 144159, 144160, 144161, 144162) c6( ) c7(bt); #c1(ASNA1) c2(NP_004308) c3(ATPase ASNA1) c4(145055) c5(145056, 145057, 145058, 145059, 145060, 145061, 145062, 145063, 145064, 145065) c6( ) c7(AK, he); #c1(ASNS) c2(NP_001171546) c3(asparagine synthetase [glutamine-hydrolyzing] isoform b) c4(70554) c5(70555, 70556, 70557, 70558, 70559) c6( ) c7(ck, x, T, aE, hb, NT, aq, ahY, K, m, k, du, t, B, ahZ); #c1(ASNS) c2(NP_001171548) c3(asparagine synthetase [glutamine-hydrolyzing] isoform c) c4(70560) c5(70561, 70562, 70563, 70564, 70565, 70566, 70567, 70568, 70569) c6( ) c7(ck, x, T, aE, hb, NT, aq, ahY, K, m, k, du, t, B, ahZ); #c1(ASNS) c2(NP_597680) c3(asparagine synthetase [glutamine-hydrolyzing] isoform a) c4(234983, 234984, 234985, 234986, 234987, 234988, 234989) c5(234990, 234991, 234992, 234993, 234994, 234995, 234996, 234997, 234998, 234999, 235000, 235001, 235002, 235003, 235004, 235005, 235006, 235007, 235008, 235009, 235010, 235011, 235012, 235013, 235014, 235015, 235016, 235017, 235018, 235019, 235020, 235021, 235022, 235023, 235024, 235025, 235026, 235027, 235028, 235029, 235030, 235031, 235032, 235033, 235034, 235035, 235036, 235037, 235038, 235039, 235040, 235041) c6( ) c7(ck, x, T, aE, hb, NT, aq, ahY, K, m, k, du, t, B, ahZ); #c1(ASPA) c2(XP_006721590) c3(aspartoacylase isoform X1) c4(294012) c5(294013, 294014, 294015, 294016, 294017, 294018, 294019, 294020, 294021, 294022, 294023, 294024, 294025, 294026, 294027, 294028, 294029, 294030, 294031, 294032, 294033, 294034, 294035, 294036, 294037, 294038, 294039, 294040, 294041, 294042, 294043, 294044, 294045, 294046, 294047, 294048, 294049, 294050, 294051, 294052, 294053, 294054, 294055, 294056, 294057, 294058, 294059, 294060, 294061, 294062, 294063, 294064, 294065, 294066, 294067, 294068, 294069, 294070, 294071, 294072, 294073, 294074, 294075, 294076, 294077, 294078, 294079, 294080, 294081, 294082, 294083, 294084, 294085, 294086, 294087, 294088, 294089, 294090, 294091, 294092, 294093, 294094, 294095, 294096, 294097, 294098, 294099, 294100, 294101, 294102, 294103, 294104, 294105, 294106, 294107, 294108) c6( ) c7(aib, n, v, j, eA, o, x, l, u, h, cb, A, aia, cm, t, dr, c, w, U, aic, k, m, y, sH, p); #c1(ASPG) c2(NP_001073933) c3(60 kDa lysophospholipase) c4(36574, 36575) c5(36576, 36577, 36578, 36579, 36580, 36581, 36582, 36583, 36584, 36585, 36586, 36587, 36588, 36589, 36590, 36591) c6(36592, 36593, 36594, 36595) c7(ck, x, cT, I, fX, T, ac, hG, oe, oW, cz, jh, aid, DU, k, B); #c1(ASPG) c2(XP_005267647) c3(60 kDa lysophospholipase isoform X4) c4(281179, 281180) c5(281181, 281182, 281183, 281184, 281185, 281186, 281187, 281188, 281189, 281190, 281191, 281192, 281193, 281194, 281195, 281196) c6(281197, 281198, 281199, 281200) c7(ck, x, cT, I, fX, T, ac, hG, oe, oW, cz, jh, aid, DU, k, B); #c1(ASPH) c2(NP_001158222) c3(aspartyl/asparaginyl beta-hydroxylase isoform f) c4(63450) c5(63451, 63452, 63453, 63454, 63455, 63456) c6( ) c7(gx, T, nZ, Mb, aA, bB, n, ci, bh, aif, jz, aE, It, Ou, aie, jf, B, aig, ack, aq, iR, cm, bE, iu); #c1(ASPH) c2(NP_001158223) c3(aspartyl/asparaginyl beta-hydroxylase isoform g) c4( ) c5(63457, 63458, 63459, 63460, 63461, 63462) c6( ) c7(gx, T, nZ, Mb, aA, bB, n, ci, bh, aif, jz, aE, It, Ou, aie, jf, B, aig, ack, aq, iR, cm, bE, iu); #c1(ASPH) c2(NP_001158225) c3(aspartyl/asparaginyl beta-hydroxylase isoform i) c4( ) c5(63463, 63464, 63465, 63466, 63467, 63468) c6( ) c7(gx, T, nZ, Mb, aA, bB, n, ci, bh, aif, jz, aE, It, Ou, aie, jf, B, aig, ack, aq, iR, cm, bE, iu); #c1(ASPH) c2(NP_001158227) c3(aspartyl/asparaginyl beta-hydroxylase isoform k) c4( ) c5(63469, 63470, 63471, 63472, 63473, 63474) c6( ) c7(gx, T, nZ, Mb, aA, bB, n, ci, bh, aif, jz, aE, It, Ou, aie, jf, B, aig, ack, aq, iR, cm, bE, iu); #c1(ASPH) c2(NP_001158228) c3(aspartyl/asparaginyl beta-hydroxylase isoform 1) c4(63475) c5(63476, 63477, 63478, 63479, 63480, 63481) c6( ) c7(gx, T, nZ, Mb, aA, bB, n, ci, bh, aif, jz, aE, It, Ou, aie, jf, B, aig, ack, aq, iR, cm, bE, iu); #c1(ASPH) c2(NP_004309) c3(aspartyl/asparaginyl beta-hydroxylase isoform a) c4(145066, 145067) c5(145068, 145069, 145070, 145071, 145072, 145073) c6( ) c7(gx, T, nZ, Mb, aA, bB, n, ci, bh, aif, jz, aE, It, Ou, aie, jf, B, aig, ack, aq, iR, cm, bE, iu); #c1(ASPH) c2(NP_064549) c3(aspartyl/asparaginyl beta-hydroxylase isoform e) c4(202937) c5(202938, 202939, 202940, 202941, 202942, 202943) c6( ) c7(gx, T, nZ, Mb, aA, bB, n, ci, bh, aif, jz, aE, It, Ou, aie, jf, B, aig, ack, aq, iR, cm, bE, iu); #c1(ASPH) c2(NP_115855) c3(aspartyl/asparaginyl beta-hydroxylase isoform c) c4( ) c5(224315, 224316, 224317, 224318, 224319, 224320) c6( ) c7(gx, T, nZ, Mb, aA, bB, n, ci, bh, aif, jz, aE, It, Ou, aie, jf, B, aig, ack, aq, iR, cm, bE, iu); #c1(ASPH) c2(NP_115856) c3(aspartyl/asparaginyl beta-hydroxylase isoform d) c4(224321) c5(224322, 224323, 224324, 224325, 224326, 224327) c6( ) c7(gx, T, nZ, Mb, aA, bB, n, ci, bh, aif, jz, aE, It, Ou, aie, jf, B, aig, ack, aq, iR, cm, bE, iu); #c1(ASPH) c2(NP_115857) c3(aspartyl/asparaginyl beta-hydroxylase isoform b) c4( ) c5(224328, 224329, 224330, 224331, 224332, 224333, 224334, 224335, 224336, 224337) c6( ) c7(gx, T, nZ, Mb, aA, bB, n, ci, bh, aif, jz, aE, It, Ou, aie, jf, B, aig, ack, aq, iR, cm, bE, iu); #c1(ASPH) c2(XP_005251297) c3(aspartyl/asparaginyl beta-hydroxylase isoform X6) c4(270871) c5( ) c6( ) c7(gx, T, nZ, Mb, aA, bB, n, ci, bh, aif, jz, aE, It, Ou, aie, jf, B, aig, ack, aq, iR, cm, bE, iu); #c1(ASPH) c2(XP_005251298) c3(aspartyl/asparaginyl beta-hydroxylase isoform X7) c4(270872) c5( ) c6( ) c7(gx, T, nZ, Mb, aA, bB, n, ci, bh, aif, jz, aE, It, Ou, aie, jf, B, aig, ack, aq, iR, cm, bE, iu); #c1(ASPH) c2(XP_005251299) c3(aspartyl/asparaginyl beta-hydroxylase isoform X8) c4(270873) c5(270874, 270875, 270876, 270877, 270878, 270879) c6( ) c7(gx, T, nZ, Mb, aA, bB, n, ci, bh, aif, jz, aE, It, Ou, aie, jf, B, aig, ack, aq, iR, cm, bE, iu); #c1(ASPH) c2(XP_005251303) c3(aspartyl/asparaginyl beta-hydroxylase isoform X11) c4(270880) c5( ) c6( ) c7(gx, T, nZ, Mb, aA, bB, n, ci, bh, aif, jz, aE, It, Ou, aie, jf, B, aig, ack, aq, iR, cm, bE, iu); #c1(ASPH) c2(XP_005251306) c3(aspartyl/asparaginyl beta-hydroxylase isoform X14) c4(270881) c5( ) c6( ) c7(gx, T, nZ, Mb, aA, bB, n, ci, bh, aif, jz, aE, It, Ou, aie, jf, B, aig, ack, aq, iR, cm, bE, iu); #c1(ASPM) c2(NP_001193775) c3(abnormal spindle-like microcephaly-associated protein isoform 2) c4(82586, 82587) c5(82588, 82589, 82590, 82591, 82592, 82593, 82594, 82595, 82596, 82597, 82598, 82599) c6( ) c7(T, aC, p, n, v, j, nA, eA, n, x, l, u, HJ, qK, aT, h, ey, aij, aii, d, kl, A, aih, kp, QK, t, kP, c, W, w, FB, agl, m, k, y, B, ahZ); #c1(ASPM) c2(NP_060606) c3(abnormal spindle-like microcephaly-associated protein isoform 1) c4(196808, 196809) c5(196810, 196811, 196812, 196813, 196814, 196815, 196816, 196817, 196818, 196819, 196820, 196821, 196822, 196823, 196824, 196825, 196826) c6( ) c7(T, aC, p, n, v, j, nA, eA, o, x, l, u, HJ, qK, aT, h, ey, aij, aii, d, kl, A, aih, kp, QK, t, kP, c, W, w, FB, agl, m, k, y, B, ahZ); #c1(ASPN) c2(NP_001180264) c3(asporin isoform 2 preproprotein) c4(73582, 73583) c5(73584, 73585, 73586, 73587, 73588, 73589, 73590, 73591, 73592, 73593, 73594, 73595, 73596, 73597, 73598, 73599, 73600, 73601) c6( ) c7(aik, mR, rw, ail, rE, y, rp); #c1(ASPN) c2(NP_060150) c3(asporin isoform 1 preproprotein) c4(194504, 194505) c5(194506, 194507, 194508, 194509, 194510, 194511) c6( ) c7(aik, mR, rw, ail, rE, y, rp); #c1(ASPRV1) c2(NP_690005) c3(retroviral-like aspartic protease 1) c4(244711) c5(244712, 244713, 244714, 244715, 244716, 244717) c6( ) c7(aW, ff, aT, K, en, eF); #c1(ASPSCR1) c2(NP_001238817) c3(tether containing UBX domain for GLUT4 isoform 2) c4(87935) c5(87936, 87937, 87938, 87939, 87940, 87941) c6( ) c7(bL, es, T, QG, fr, ci, g, Vi, aim); #c1(ASPSCR1) c2(NP_076988) c3(tether containing UBX domain for GLUT4 isoform 1) c4(214635, 214636) c5(214637, 214638, 214639, 214640, 214641, 214642, 214643, 214644, 214645, 214646, 214647, 214648) c6( ) c7(bL, es, T, QG, fr, ci, g, Vi, aim); #c1(ASRGL1) c2(NP_001077395) c3(isoaspartyl peptidase/L-asparaginase) c4(37816, 37817) c5(37818, 37819, 37820, 37821, 37822, 37823, 37824, 37825, 37826, 37827) c6( ) c7(T, ul, aio, jh, fd, bB, aeu, dG, nA, ain, x, Tl, aE, aT, h, dQ, nJ, bc, afy, vT, HY, aW, TH, fJ, eH, aq, eF, t, ck, iT, TJ, bE, TG, au, rx, m, k, y, bt, B); #c1(ASRGL1) c2(XP_005274363) c3(isoaspartyl peptidase/L-asparaginase isoform X5) c4( ) c5(285061, 285062, 285063, 285064, 285065) c6( ) c7(T, ul, aio, jh, fd, bB, aeu, dG, nA, ain, x, Tl, aE, aT, h, dQ, nJ, bc, afy, vT, HY, aW, TH, fJ, eH, aq, eF, t, ck, iT, TJ, bE, TG, au, rx, m, k, y, bt, B); #c1(ASRGL1) c2(XP_011543566) c3(isoaspartyl peptidase/L-asparaginase isoform X1) c4( ) c5(342485) c6( ) c7(T, ul, aio, jh, fd, bB, aeu, dG, nA, ain, x, Tl, aE, aT, h, dQ, nJ, bc, afy, vT, HY, aW, TH, fJ, eH, aq, eF, t, ck, iT, TJ, bE, TG, au, rx, m, k, y, bt, B); #c1(ASS1) c2(XP_005272257) c3(argininosuccinate synthase isoform X1) c4(283794, 283795, 283796, 283797, 283798, 283799) c5(283800, 283801, 283802, 283803, 283804, 283805, 283806, 283807, 283808, 283809, 283810, 283811, 283812, 283813, 283814, 283815, 283816, 283817, 283818, 283819, 283820, 283821, 283822, 283823, 283824, 283825, 283826, 283827, 283828, 283829, 283830, 283831, 283832, 283833, 283834, 283835, 283836, 283837, 283838, 283839, 283840, 283841, 283842, 283843, 283844, 283845, 283846, 283847, 283848, 283849, 283850, 283851, 283852, 283853, 283854, 283855, 283856, 283857, 283858, 283859, 283860, 283861, 283862, 283863, 283864, 283865, 283866, 283867, 283868, 283869, 283870, 283871, 283872, 283873, 283874, 283875, 283876, 283877, 283878, 283879, 283880, 283881, 283882, 283883, 283884, 283885, 283886, 283887, 283888, 283889, 283890, 283891, 283892, 283893, 283894, 283895, 283896, 283897, 283898, 283899, 283900, 283901, 283902, 283903, 283904, 283905, 283906, 283907, 283908, 283909, 283910, 283911, 283912, 283913, 283914, 283915, 283916, 283917, 283918, 283919, 283920) c6(283921) c7(oO, ahW, T, Ve, jh, aip, aA, n, fr, C, pn, qW, ai, ad, Na, ft, aE, hb, aT, Lv, Nc, dL, jo, bq, ais, Wm, ae, eL, uX, jf, d, iU, nO, aW, Y, aiq, eH, eZ, fQ, aq, aF, eF, t, dr, ck, mO, RV, oh, m, air, bt, B, hS); #c1(ASS1) c2(XP_011517007) c3(argininosuccinate synthase isoform X2) c4(310492) c5(310493, 310494, 310495, 310496, 310497, 310498) c6( ) c7(oO, ahW, T, Ve, jh, aip, aA, n, fr, C, pn, qW, ai, ad, Na, ft, aE, hb, aT, Lv, Nc, dL, jo, bq, ais, Wm, ae, eL, uX, jf, d, iU, nO, aW, Y, aiq, eH, eZ, fQ, aq, aF, eF, t, dr, ck, mO, RV, oh, m, air, bt, B, hS); #c1(ASTN2) c2(NP_001171663) c3(astrotactin-2 isoform e) c4( ) c5(71229, 71230, 71231, 71232, 71233, 71234) c6( ) c7(ac, rz, cz, bK, j, vo, fq, xa, eu, bN); #c1(ASTN2) c2(NP_001171664) c3(astrotactin-2 isoform f) c4(71235) c5(71236, 71237, 71238, 71239, 71240, 71241, 71242) c6( ) c7(ac, rz, cz, bK, j, vo, fq, xa, eu, bN); #c1(ASTN2) c2(NP_054729) c3(astrotactin-2 isoform a precursor) c4(177394, 177395, 177396) c5(177397, 177398, 177399, 177400, 177401, 177402, 177403, 177404, 177405, 177406, 177407, 177408, 177409, 177410, 177411177412, 177413, 177414, 177415) c6( ) c7(ac, rz, cz, bK, j, vo, fq, xa, eu, bN); #c1(ASTN2) c2(NP_937829) c3(astrotactin-2 isoform b) c4(259235, 259236) c5(259237, 259238, 259239, 259240, 259241, 259242, 259243) c6( ) c7(ac, rz, cz, bK, j, vo, fq, xa, eu, bN); #c1(ASTN2) c2(NP_937831) c3(astrotactin-2 isoform d) c4(259244) c5(259245, 259246, 259247, 259248, 259249, 259250, 259251, 259252) c6( ) c7(ac, rz, cz, bK, j, vo, fq, xa, eu, bN); #c1(ASUN) c2(NP_060634) c3(protein asunder homolog) c4(196926, 196927) c5(196928, 196929, 196930, 196931, 196932, 196933, 196934, 196935, 196936, 196937, 196938, 196939, 196940) c6( ) c7(wu, PI, BJ, NI, wm, KY); #c1(ASUN) c2(XP_005253479) c3(protein asunder homolog isoform X3) c4( ) c5(272529, 272530, 272531, 272532, 272533) c6( ) c7(wu, PI, BJ, NI, wm, KY); #c1(ASUN) c2(XP_011519053) c3(protein asunder homolog isoform X2) c4(313556, 313557, 313558, 313559) c5(313560) c6( ) c7(wu, PI, BJ, NI, wm, KY); #c1(ASUN) c2(XP_011519054) c3(protein asunder homolog isoform X4) c4(313561) c5(313562, 313563, 313564, 313565, 313566, 313567, 313568, 313569, 313570, 313571, 313572, 313573, 313574, 313575, 313576, 313577, 313578, 313579) c6( ) c7(wu, PI, BJ, NI, wm, KY); #c1(ASUN) c2(XP_011519055) c3(protein asunder homolog isoform X5) c4( ) c5(313580, 313581, 313582, 313583, 313584) c6( ) c7(wu, PI, BJ, NI, wm, KY); #c1(ASXL1) c2(NP_001158075) c3(putative Polycomb group protein ASXL1 isoform 2) c4(63083) c5(63084, 63085, 63086, 63087, 63088, 63089, 63090, 63091, 63092, 63093, 63094, 63095, 63096, 63097, 63098, 63099, 63100) c6( ) c7(gV, aiu, T, Js, if, qx, qy, fZ, bs, n, ol, aeu, oY, fd, qN, jh, abQ, hF, hr, ad, x, oB, oT, oW, aT, aU, vw, dz, h, jj, pq, ae, Nr, aiw, oP, iU, aix, hG, aW, Y, et, gK, pr, r, Mz, kD, po, gm, pm, bw, aiv, bz, yR, Nq, yd, ck, Ta, pc, UY, ait, iT, kz, cj, pg, dW, k, y, bt, Jo, Tc); #c1(ASXL1) c2(NP_056153) c3(putative Polycomb group protein ASXL1 isoform 1) c4(185987, 185988) c5(185989, 185990, 185991, 185992, 185993, 185994, 185995, 185996, 185997, 185998, 185999, 186000, 186001, 186002) c6( ) c7(gV, aiu, T, Js, if, qx, qy, fZ, bs, n, ol, aeu, oY, fd, qN, jh, abQ, hF, hr, ad, x, oB, oT, oW, aT, aU, vw, dz, h, jj, pq, ae, Nr, aiw, oP, iU, aix, hG, aW, Y, et, gK, pr, r, Mz, kD, po, gm, pm, bw, aiv, bz, yR, Nq, yd, ck, Ta, pc, UY, ait, iT, kz, cj, pg, dW, k, y, bt, Jo, Tc); #c1(ASXL1) c2(XP_006723790) c3(putative Polycomb group protein ASXL1 isoform X5) c4(295398, 295399) c5(295400) c6( ) c7(gV, aiu, T, Js, if, qx, qy, fZ, bs, n, ol, aeu, oY, fd, qN, jh, abQ, hF, hr, ad, x, oB, oT, oW, aT, aU, vw, dz, h, jj, pq, ae, Nr, aiw, oP, iU, aix, hG, aW, Y, et, gK, pr, r, Mz, kD, po, gm, pm, bw, aiv, bz, yR, Nq, yd, ck, Ta, pc, UY, ait, iT, kz, cj, pg, dW, k, y, bt, Jo, Tc); #c1(ASXL1) c2(XP_006723795) c3(putative Polycomb group protein ASXL1 isoform X9) c4(295401) c5(295402, 295403, 295404, 295405, 295406) c6( ) c7(gV, aiu, T, Js, if, qx, qy, fZ, bs, n, ol, aeu, oY, fd, qN, jh, abQ, hF, hr, ad, x, oB, oT, oW, aT, aU, vw, dz, h, jj, pq, ae, Nr, aiw, oP, iU, aix, hG, aW, Y, et, gK, pr, r, Mz, kD, po, gm, pm, bw, aiv, bz, yR, Nq, yd, ck, Ta, pc, UY, ait, iT, kz, cj, pg, dW, k, y, bt, Jo, Tc); #c1(ASXL1) c2(XP_011526950) c3(putative Polycomb group protein ASXL1 isoform X2) c4( ) c5(321238, 321239, 321240, 321241, 321242, 321243) c6( ) c7(gV, aiu, T, Js, if, qx, qy, fZ, bs, n, ol, aeu, oY, fd, qN, jh, abQ, hF, hr, ad, x, oB, oT, oW, aT, aU, vw, dz, h, jj, pq, ae, Nr, aiw, oP, iU, aix, hG, aW, Y, et, gK, pr, r, Mz, kD, po, gm, pm, bw, aiv, bz, yR, Nq, yd, ck, Ta, pc, UY, ait, iT, kz, cj, pg, dW, k, y, bt, Jo, Tc); #c1(ASXL1) c2(XP_011526952) c3(putative Polycomb group protein ASXL1 isoform X4) c4( ) c5(321244) c6( ) c7(gV, aiu, T, Js, if, qx, qy, fZ, bs, n, ol, aeu, oY, fd, qN, jh, abQ, hF, hr, ad, x, oB, oT, oW, aT, aU, vw, dz, h, jj, pq, ae, Nr, aiw, oP, iU, aix, hG, aW, Y, et, gK, pr, r, Mz, kD, po, gm, pm, bw, aiv, bz, yR, Nq, yd, ck, Ta, pc, UY, ait, iT, kz, cj, pg, dW, k, y, bt, Jo, Tc); #c1(ASXL2) c2(NP_060733) c3(putative Polycomb group protein ASXL2) c4(197514, 197515) c5(197516, 197517, 197518, 197519, 197520, 197521, 197522, 197523, 197524, 197525, 197526, 197527, 197528, 197529, 197530, 197531, 197532, 197533, 197534, 197535, 197536, 197537) c6( ) c7(iM, je, Y, aT, gZ, r, dL, mo, ae, ad); #c1(ASXL2) c2(XP_006712103) c3(putative Polycomb group protein ASXL2 isoform X4) c4( ) c5(286401) c6( ) c7(iM, je, Y, aT, gZ, r, dL, mo, ae, ad); #c1(ASXL2) c2(XP_011531253) c3(putative Polycomb group protein ASXL2 isoform X2) c4(327231) c5( ) c6( ) c7(iM, je, Y, aT, gZ, r, dL, mo, ae, ad); #c1(ASXL3) c2(NP_085135) c3(putative Polycomb group protein ASXL3) c4(219395) c5(219396, 219397, 219398, 219399, 219400, 219401) c6( ) c7(aiy, aW, Y, Az, r, aT, cm, QK); #c1(ASZ1) c2(NP_570124) c3(ankyrin repeat, SAM and basic leucine zipper domain-containing protein 1 isoform 1) c4(233983) c5(233984, 233985, 233986, 233987, 233988, 233989) c6( ) c7(dA, DK, e, Nf, Io, j, BF, ad, vi); #c1(ATAD2) c2(NP_054828) c3(ATPase family AAA domain-containing protein 2) c4(178103) c5(178104, 178105, 178106, 178107, 178108, 178109) c6( ) c7(iu, T, eW, MD, aW, aT, h, n, aq, ey, qF, cl, iR, ae, B, ad); #c1(ATAD3B) c2(XP_011540545) c3(ATPase family AAA domain-containing protein 38 isoform X3) c4( ) c5(339040, 339041, 339042, 339043, 339044, 339045, 339046) c6( ) c7(aW, T, Fc, as, aT); #c1(ATAD3B) c2(XP_011540546) c3(ATPase family AAA domain-containing protein 38 isoform X5) c4(339047) c5(339048, 339049) c6( ) c7(aW, T, Fc, as, aT); #c1(ATAD3C) c2(XP_011539310) c3(ATPase family AAA domain-containing protein 3C isoform X2) c4( ) c5(337370) c6( ) c7(iu, d); #c1(ATAD3C) c2(XP_011539311) c3(ATPase family AAA domain-containing protein 3C isoform X1) c4(337371) c5(337372, 337373, 337374, 337375, 337376, 337377, 337378, 337379, 337380, 337381) c6( ) c7(iu, d); #c1(ATAD5) c2(NP_079133) c3(ATPase family AAA domain-containing protein 5) c4(217201) c5(217202, 217203, 217204, 217205, 217206, 217207) c6( ) c7(T, os, nX, eH, Az, mL oZ, aiz, hP, K, g, eF, xb, dr, xt); #c1(ATAT1) c2(NP_001026892) c3(alpha-tubulin N-acetyltransferase 1 isoform 1 precursor) c4(29891) c5(29892, 29893, 29894, 29895, 29896, 29897, 29898, 29899, 29900, 29901, 29902, 29903, 29904, 29905, 29906, 29907, 29908, 29909, 29910, 29911, 29912, 29913, 29914, 29915) c6( ) c7(bL, T, DM, fM, Ke, e, DV, jh, aiC, bS, gf, ct, C, aiA, fr, ai, ad, eA, eJ, ip, x, eW, aE, pX, aT, h, cy, K, ae, pi, mu, le, aiB, qt, aW, oV, CM, cr, eZ, yq, gu, as, Z, kk, cm, eK, ck, pH, ok, iQ, c, eM, bE, Uq, U, QF, aiD, mf, m, k, EY, be, ym, bt, kS, y); #c1(ATAT1) c2(NP_001241881) c3(alpha-tubulin N-acetyltransferase 1 isoform 4) c4(89149) c5(89150, 89151, 89152, 89153, 89154, 89155, 89156, 89157, 89158, 89159, 89160, 89161, 89162, 89163, 89164, 89165, 89166, 89167, 89168, 89169, 89170, 89171, 89172, 89173, 89174, 89175, 89176, 89177, 89178, 89179, 89180, 89181, 89182, 89183, 89184, 89185, 89186, 89187, 89188, 89189, 89190, 89191, 89192, 89193, 89194, 89195, 89196, 89197, 89198, 89199, 89200, 89201) c6( ) c7(bL, T, DM, fM, Ke, e, DV, jh, aiC, bS, gf, ct, C, aiA, fr, ai, ad, eA, eJ, ip, x, eW, aE, pX, aT, h, cy, K, ae, pi, mu, le, aiB, qt, aW, oV, CM, cr, eZ, yq, gu, as, Z, kk, cm, eK, ck, pH, ok, iQ, c, eM, bE, Uq, U, QF, aiD, mf, m, k, EY, be, ym, bt, kS, y); #c1(ATAT1) c2(NP_079185) c3(alpha-tubulin N-acetyltransferase 1 isoform 2) c4(217348) c5(217349, 217350, 217351, 217352, 217353, 217354, 217355, 217356, 217357, 217358, 217359, 217360, 217361, 217362, 217363, 217364, 217365, 217366, 217367, 217368, 217369, 217370, 217371, 217372, 217373, 217374, 217375, 217376, 217377, 217378, 217379, 217380, 217381, 217382, 217383, 217384, 217385, 217386, 217387, 217388, 217389, 217390, 217391, 217392, 217393, 217394, 217395, 217396, 217397, 217398, 217399, 217400) c6( ) c7(bL, T, DM, fM, Ke, e, DV, jh, aiC, bS, gf, ct, C, aiA, fr, ai, ad, eA, eJ, ip, x, eW, aE, pX, aT, h, cy, K, ae, pi, mu, le, aiB, qt, aW, oV, CM, cr, eZ, yq, gu, as, Z, kk, cm, eK, ck, pH, ok, iQ, c, eM, bE, Uq, U, QF, aiD, mf, m, k, EY, be, ym, bt, kS, y); #c1(ATAT1) c2(XP_005249473) c3(alpha-tubulin N-acetyltransferase 1 isoform X3) c4(269445) c5( ) c6( ) c7(bL, T, DM, fM, Ke, e, DV, jh, aiC, bS, gf, ct, C, aiA, fr, ai, ad, eA, eJ, ip, x, eW, aE, pX, aT, h, cy, K, ae, pi, mu, le, aiB, qt, aW, oV, CM, cr, eZ, yq, gu, as, Z, kk, cm, eK, ck, pH, ok, iQ, c, eM, bE, Uq, U, QF, aiD, mf, m, k, EY, be, ym, bt, kS, y); #c1(ATAT1) c2(XP_005249474) c3(alpha-tubulin N-acetyltransferase 1 isoform X4) c4(269446, 269447, 269448) c5(269449, 269450, 269451, 269452, 269453, 269454, 269455, 269456, 269457, 269458, 269459, 269460, 269461, 269462, 269463, 269464, 269465, 269466, 269467, 269468, 269469, 269470, 269471, 269472, 269473, 269474, 269475, 269476, 269477, 269478, 269479, 269480, 269481, 269482, 269483, 269484, 269485, 269486, 269487, 269488, 269489, 269490, 269491, 269492, 269493, 269494, 269495, 269496) c6( ) c7(bL, T, DM, fM, Ke, e, DV, jh, aiC, bS, gf, ct, C, aiA, fr, ai, ad, eA, eJ, ip, x, eW, aE, pX, aT, h, cy, K, ae, pi, mu, le, aiB, qt, aW, oV, CM, cr, eZ, yq, gu, as, Z, kk, cm, eK, ck, pH, ok, iQ, c, eM, bE, Uq, U, QF, aiD, mf, m, k, EY, be, ym, bt, kS, y); #c1(ATCAY) c2(NP_149053) c3(caytaxin) c4(226933, 226934, 226935, 226936, 226937) c5(226938, 226939, 226940, 226941, 226942, 226943, 226944, 226945, 226946, 226947, 226948, 226949, 226950, 226951, 226952, 226953, 226954, 226955, 226956, 226957, 226958, 226959, 226960, 226961, 226962, 226963, 226964, 226965, 226966, 226967) c6( ) c7(Ng, ky, IF, dr, aU, EH, he, ci, aiE, nA, H, aR, L); #c1(ATE1) c2(NP_001001976) c3(arginyl-tRNA-protein transferase 1 isoform 1) c4(19264, 19265) c5(19266, 19267, 19268, 19269, 19270, 19271, 19272, 19273, 19274, 19275, 19276, 19277, 19278) c6( ) c7(cd); #c1(ATE1) c2(NP_001275663) c3(arginyl-tRNA-protein transferase 1 isoform 3) c4(106961, 106962) c5(106963, 106964, 106965, 106966, 106967, 106968, 106969, 106970, 106971, 106972, 106973) c6( ) c7(cd); #c1(ATE1) c2(NP_001275664) c3(arginyl-tRNA—protein transferase 1 isoform 4) c4(106974) c5(106975, 106976, 106977, 106978, 106979) c6( ) c7(cd); #c1(ATE1) c2(NP_001275665) c3(arginyl-tRNA—protein transferase 1 isoform 5) c4(106980) c5(106981, 106982, 106983, 106984, 106985, 106986, 106987, 106988, 106989, 106990, 106991, 106992, 106993) c6( ) c7(cd); #c1(ATE1) c2(NP_008972) c3(arginyl-tRNA—protein transferase 1 isoform 2) c4(169980) c5(169981, 169982, 169983, 169984, 169985, 169986) c6( ) c7(cd); #c1(ATE1) c2(XP_005269516) c3(arginyl-tRNA—protein transferase 1 isoform X2) c4(282612) c5( ) c6( ) c7(cd); #c1(ATF1) c2(XP_011536689) c3(cyclic AMP-dependent transcription factor ATF-1 isoform X1) c4(334196, 334197, 334198, 334199) c5(334200, 334201, 334202, 334203, 334204, 334205, 334206, 334207, 334208, 334209, 334210, 334211, 334212, 334213, 334214, 334215, 334216, 334217, 334218) c6( ) c7(T, aiF, aiH, ci, lu, eA, nv, aT, K, dx, cp, kl, d, Y, hQ, me, adj, t, QA, nM, Dy, wB, gX, aiG, bt); #c1(ATF1) c2(XP_011536690) c3(cyclic AMP-dependent transcription factor ATF-1 isoform X2) c4( ) c5(334219, 334220, 334221, 334222, 334223, 334224) c6( ) c7(T, aiF, aiH, ci, lu, eA, nv, aT, K, dx, cp, kl, d, Y, hQ, mo, adj, t, QA, nM, Dy, wB, gX, aiG, bt); #c1(ATF2) c2(NP_001243019) c3(cyclic AMP-dependent transcription factor ATF-2 isoform 1) c4(89541, 89542, 89543, 89544, 89545, 89546) c5(89547, 89548, 89549, 89550, 89551, 89552, 89553, 89554, 89555, 89556, 89557, 89558, 89559, 89560, 89561, 89562, 89563, 89564, 89565, 89566, 89567, 89568, 89569, 89570, 89571, 89572, 89573, 89574, 89575, 89576, 89577) c6( ) c7(ail, T, jh, bS, ct, iJ, ad, av, afQ, aT, K, jo, an, ae, af, cp, je, iE, aW, Y, ff, Io, en, hf, Z, cm, iK, bz, rR, iM, hk, U, Kg, y); #c1(ATF2) c2(NP_001243020) c3(cyclic AMP-dependent transcription factor ATF-2 isoform 2) c4(89578, 89579) c5(89580, 89581, 89582, 89583, 89584, 89585, 89586, 89587, 89588, 89589) c6( ) c7(ail, T, jh, bS, ct, iJ, ad, av, afQ, aT, K, jo, an, ae, af, cp, je, iE, aW, Y, ff, Io, en, hf, Z, cm, iK, bz, rR, iM, hk, U, Kg, y); #c1(ATF2) c2(NP_001243021) c3(cyclic AMP-dependent transcription factor ATF-2 isoform 3) c4(89590, 89591) c5(89592, 89593, 89594, 89595, 89596, 89597, 89598, 89599, 89600, 89601, 89602, 89603, 89604, 89605, 89606, 89607) c6( ) c7(ail, T, jh, bS, ct, iJ, ad, av, afQ, aT, K, jo, an, ae, af, cp, je, iE, aW, Y, ff, Io, en, hf, Z, cm, iK, bz, rR, iM, hk, U, Kg, y); #c1(ATF2) c2(NP_001243023) c3(cyclic AMP-dependent transcription factor ATF-2 isoform 5) c4( ) c5(89608, 89609, 89610, 89611, 89612, 89613, 89614, 89615, 89616, 89617, 89618, 89619, 89620, 89621, 89622, 89623, 89624) c6( ) c7(ail, T, jh, bS, ct, iJ, ad, av, afQ, aT, K, jo, an, ae, af, cp, je, iE, aW, Y, ff, lo, en, hf, Z, cm, iK, bz, rR, iM, hk, U, Kg, y); #c1(ATF3) c2(NP_001035709) c3(cyclic AMP-dependent transcription factor ATF-3 isoform 2) c4(32976) c5(32977, 32978, 32979, 32980, 32981, 32982, 32983, 32984, 32985, 32986) c6( ) c7(bL, bM, G, T, wi, aiK, yk, if, bB, aj, dG, Sv, ci, C, bX, j, v, V, qN, q, aR, J, ad, er, fU, av, cc, aE, ds, kH, aT, IG, cy, dL, bK, K, bj, bq, he, KV, ae, eL, aiJ, JU, d, yi, iU, A, cH, aW, Y, je, ff, CT, r, fe, aq, Pp, zC, en, La, t, cm, bz, op, DF, iP, iM, bP, eM, bE, wO, wE, vA, wR, fD, ei, adg, hS); #c1(ATF3) c2(NP_001193413) c3(cyclic AMP-dependent transcription factor ATF-3 isoform 3) c4(82167) c5(82168, 82169, 82170, 82171, 82172) c6( ) c7(bL, bM, G, T, wi, aiK, yk, if, bB, aj, dG, Sv, ci, C, bX, j, v, V, qN, q, aR, J, ad, er, fU, av, cc, aE, ds, kH, aT, IG, cy, dL, bK, K, bj, bq, he, KV, ae, eL, aiJ, JU, d, yi, iU, A, cH, aW, Y, je, ff, CT, r, fe, aq, Pp, zC, en, La, t, cm, bz, op, DF, iP, iM, bP, eM, bE, wO, wE, vA, wR, fD, ei, adg, hS); #c1(ATF3) c2(NP_001193415) c3(cyclic AMP-dependent transcription factor ATF-3 isoform 5) c4(82173) c5(82174, 82175, 82176, 82177, 82178, 82179) c6( ) c7(bL, bM, G, T, wi, aiK, yk, if, bB, aj, dG, Sv, ci, C, bX, j, v, V, qN, q, aR, J, ad, er, fU, av, cc, aE, ds, kH, aT, IG, cy, dL, bK, K, bj, bq, he, KV, ae, eL, aiJ, JU, d, yi, iU, A, cH, aW, Y, je, ff, CT, r, fe, aq, Pp, zC, en, La, t, cm, bz, op, OF, iP, iM, bP, eM, bE, wO, wE, vA, wR, fD, ei, adg, hS); #c1(ATF3) c2(XP_011507881) c3(cyclic AMP-dependent transcription factor ATF-3 isoform X1) c4(298075, 298076) c5(298077, 298078, 298079, 298080, 298081, 298082, 298083, 298084, 298085, 298086, 298087, 298088, 298089, 298090, 298091, 298092, 298093, 298094) c6( ) c7(bL, bM, G, T, wi, aiK, yk, if, bB, aj, dG, Sv, ci, C, bX, j, v, V, qN, q, aR, J, ad, er, fu, av, cc, aE, ds, kH, aT, IG, cy, dL, bK, K, bj, bq, he, KV, ae, eL, aiJ, JU, d, yi, iU, A, cH, aW, Y, je, ff, CT, r, fe, aq, Pp, zC, en, La, t, cm, bz, op, OF, iP, iM, bP, eM, bE, wO, wE, vA, wR, fD, ei, adg, hS); #c1(ATF4) c2(NP_001666) c3(cyclic AMP-dependent transcription factor ATF-4) c4(119840) c5(119841, 119842, 119843, 119844, 119845, 119846, 119847, 119848, 119848, 119850, 119851, 119852, 119853, 119854, 119855) c6( ) c7(ID, T, aA, q, aT, bK, K, he, dF, af, ly, IR, qt, aW, r, aiL, aq, aF, cm, bz, lx, LB, eM, SE, at, B); #c1(ATF5) c2(NP_001277675) c3(cyclic AMP-dependent transcription factor ATF-5) c4(109387) c5(109388, 109389, 109390, 109391, 109392, 109393, 109394) c6( ) c7(ck, T, d, fR, aW, aT, bK, K, eA, pz, cm, B); #c1(ATF6) c2(NP_031374) c3(cyclic AMP-dependent transcription factor ATF-6 alpha) c4(172038) c5(172039, 172040, 172041, 172042, 172043, 172044, 172045) c6( ) c7(bL, ID, am, BD, e, jh, fd, aj, cd, ad, aT, cy, K, an, ae, ly, IR, aW, Y, fc, Mz, fe, cm, DF, lx, bN, c, Fi, aiM, xh, kS, B); #c1(ATF6B) c2(NP_001129625) c3(cyclic AMP-dependent transcription factor ATF-6 beta isoform b) c4(52023, 52024) c5(52025, 52026, 52027, 52028, 52029, 52030, 52031, 52032, 52033, 52034, 52035, 52036, 52037, 52038, 52039, 52040, 52041, 52042, 52043, 52044, 52045, 52046, 52047, 52048, 52049, 52050, 52051, 52052, 52053, 52054, 52055, 52056, 52057, 52058, 52059, 52060) c6( ) c7(eZ); #c1(ATF6B) c2(NP_004372) c3(cyclic AMP-dependent transcription factor ATF-6 beta isoform a) c4(145843, 145844) c5(145845, 145846, 145847, 145848, 145849, 145850, 145851, 145852, 145853, 145854, 145855, 145856, 145857, 145858, 145859, 145860, 145861, 145862, 145863, 145864, 145865, 145866, 145867, 145868, 145869, 145870, 145871, 145872, 145873, 145874, 145875, 145876) c6( ) c7(eZ); #c1(ATF7) c2(NP_001123532) c3(cyclic AMP-dependent transcription factor ATE-7 isoform 3) c4(47429) c5(47430, 47431, 47432, 47433, 47434, 47435, 47436, 47437, 47438, 47439, 47440, 47441) c6( ) c7(K, jh); #c1(ATF7) c2(NP_001193611) c3(cyclic AMP-dependent transcription factor ATF-7 isoform 4) c4(82355) c5(82356, 82357, 82358, 82359, 82360, 82361, 82362, 82363, 82364, 82365) c6( ) c7(K, jh); #c1(ATF7) c2(XP_005268644) c3(cyclic AMP-dependent transcription factor ATF-7 isoform X1) c4(282003) c5(282004, 282005, 282006, 282007, 282008, 282009, 282010, 282011, 282012, 282013) c6( ) c7(K, jh); #c1(ATF7) c2(XP_011536080) c3(cyclic AMP-dependent transcription factor ATF-7 isoform X2) c4(333393, 333394) c5(333395, 333396, 333397, 333398, 333399, 333400, 333401, 333402, 333403, 333404) c6( ) c7(K, jh); #c1(ATF7IP) c2(NP_001273444) c3(activating transcription factor 7-interacting protein 1 isoform 4) c4(104903, 104904, 104905, 104906, 104907, 104908, 104909, 104910) c5(104911, 104912, 104913, 104914, 104915, 104916) c6( ) c7(bL, T, aiR, jh, gf, bS, ct, mF, aR, aiN, rw, kH, Ne, h, rB, K, he, mH, aiQ, je, xR, Lf, Ce, Io, bu, Z, Ld, op, aiQ, hq, ou, It, iM, cA, aiP, vA, U, Lb, aiS, ph, zu, bt, ao); #c1(ATF7IP) c2(NP_851997) c3(activating transcription factor 7-interacting protein 1 isoform 1) c4(254756) c5(254757, 254758, 254759, 254760, 254761, 254762, 254763, 254764, 254765, 254766, 254767, 254768) c6( ) c7(bL, T, aiR, jh, gf, bS, ct, mF, aR, aiN, rw, kH, Ne, h, rB, K, he, mH, aiQ, je, xR, Lf, Ce, Io, bu, Z, Ld, op, aiO, hq, ou, It, iM, cA, aiP, vA, U, Lb, aiS, ph, zu, bt, ao); #c1(ATF7IP) c2(XP_011519057) c3(activating transcription factor 7-interacting protein 1 isoform XI) c4(313585, 313586, 313587, 313588) c5(313589, 313590, 313591, 313592, 313593, 313594, 313595, 313596, 313597) c6( ) c7(bL, T, aiR, jh, gf, bS, ct, mF, aR, aiN, rw, kH, Ne, h, rB, K, he, mH, aiQ, je, xR, Lf, Ce, Io, bu, Z, Ld, op, aiO, hq, ou, It, iM, cA, aiP, vA, U, Lb, aiS, ph, zu, bt, ao); #c1(ATF7IP) c2(XP_011519058) c3(activating transcription factor 7-interacting protein 1 isoform X3) c4(313598) c5( ) c6( ) c7(bL, T, aiR, jh, gf, bS, ct, mF, aR, aiN, rw, kH, Ne, h, rB, K, he, mH, aiQ, je, xR, Lf, Ce, Io, bu, Z, Ld, op, aiO, hq, ou, It, iM, cA, aiP, vA, U, Lb, aiS, ph, zu, bt, ao); #c1(ATF7IP) c2(XP_011519060) c3(activating transcription factor 7-interacting protein 1 isoform X5) c4( ) c5(313599, 313600, 313601, 313602, 313603, 313604, 313605, 313606, 313607, 313608, 313609, 313610) c6( ) c7(bL, T, aiR, jh, gf, bS, ct, mF, aR, aiN, rw, kH, Ne, h, rB, K, he, mH, aiQ, je, xR, Lf, Ce, Io, bu, Z, Ld, op, aiO, hq, ou, It, iM, cA, aiP, vA, U, Lb, aiS, ph, zu, bt, ao); #c1(ATF7IP) c2(XP_011519061) c3(activating transcription factor 7-interacting protein 1 isoform X6) c4( ) c5(313611, 313612, 313613, 313614, 313615, 313616, 313617, 313618, 313619, 313620, 313621, 313622, 313623, 313624, 313625, 313626, 313627, 313628, 313629, 313630, 313631, 313632, 313633, 313634, 313635, 313636, 313637, 313638, 313639, 313640, 313641, 313642, 313643, 313644, 313645, 313646, 313647, 313648, 313649, 313650, 313651, 313652, 313653, 313654, 313655, 313656, 313657, 313658, 313659, 313660, 313661, 313662, 313663) c6( ) c7(bL, T, aiR, jh, gf, bS, ct, mF, aR, aiN, rw, kH, Ne, h, rB, K, he, mH, aiQ, je, xR, Lf, Ce, Io, bu, Z, Ld, op, aiO, hq, ou, It, iM, cA, aiP, vA, U, Lb, aiS, ph, zu, bt, ao); #c1(ATGI0) c2(XP_005248667) c3(ubiquitin-like-conjugating enzyme ATGI0 isoform X1) c4(268493, 268494) c5(268495, 268496, 268497, 268498, 268499, 268500, 268501, 268502, 268503, 268504, 268505, 268506, 268507, 268508, 268509, 268510) c6( ) c7(T, q, r); #c1(ATGI2) c2(NP_001264712) c3(ubiquitin-like protein ATGI2 isoform 2) c4(97661) c5(97662, 97663, 97664, 97665, 97666) c6( ) c7(aW, eZ, r, aT, aiT, h, ci, fL, mC); #c1(ATGI2) c2(NP_004698) c3(ubiquitin-like protein ATGI2 isoform 1) c4(148891, 148892) c5(148893, 148894, 148895, 148896, 148897, 148898, 148899, 148900, 148901, 148902, 148903, 148904, 148905) c6( ) c7(aW, eZ, r, aT, aiT, h, ci, fL, mC); #c1(ATGI6L1) c2(NP_060444) c3(autophagy-related protein 16-1 isoform 2) c4(195969) c5(195970, 195971, 195972, 195973, 195974, 195975) c6( ) c7(aiU, T, rR, Ik, ra, Ht, az, ju, ge, HG, n, Io, Ni, hp, K, fe, iV, ji, xb); #c1(ATGIGL1) c2(NP_110430) c3(autophagy-related protein 16-1 isoform 1) c4(220326) c5(220327, 220328, 220329, 220330, 220331, 220332) c6( ) c7(aiU, T, rR, Ik, ra, Ht, az, ju, ge, HG, n, Io, Ni, hp, K, fe, iV, ji, xb); #c1(ATGI6L1) c2(NP_942593) c3(autophagy-related protein 16-1 isoform 3) c4(260576) c5(260577, 260578, 260579, 260580, 260581, 260582, 260583, 260584, 260585, 260586, 260587) c6( ) c7(aiU, T, rR, Ik, ra, Ht, az, ju, ge, HG, n, Io, Ni, hp, K, fe, iV, ji, xb); #c1(ATGI6L1) c2(XP_011547155) c3(autophagy-related protein 16-1 isoform X1) c4(345883, 345884) c5(345885, 345886, 345887, 345888, 345889, 345890) c6( ) c7(aiU, T, rR, Ik, ra, Ht, az, ju, ge, HG, n, Io, Ni, hp, K, fe, iV, ji, xb); #c1(ATGIGL1) c2(XP_011547158) c3(autophagy-related protein 16-1 isoform X4) c4(345891) c5(345892, 345893, 345894, 345895, 345896, 345897, 345898) c6( ) c7(aiU, T, rR, Ik, ra, Ht, az, ju, ge, HG, n, Io, Ni, hp, K, fe, iV, ji, xb); #c1(ATG2B) c2(NP_060506) c3(autophagy-related protein 2 homolog B) c4(196288) c5(196289, 196290, 196291, 196292, 196293, 196294) c6( ) c7(r); #c1(ATG3) c2(NP_071933) c3(ubiquitin-like-conjugating enzyme ATG3 isoform 1) c4(212387) c5(212388, 212389, 212390, 212391, 212392, 212393) c6( ) c7(HG, NQ, bz, iu, rR); #c1(ATG4A) c2(NP_443168) c3(cysteine protease ATG4A isoform a) c4(229691, 229692) c5(229693, 229694, 229695, 229696, 229697, 229698, 229699, 229700, 229701, 229702, 229703, 229704) c6( ) c7(t, hy, m, ne, BN); #c1(ATG4A) c2(NP_840054) c3(cysteine protease ATG4A isoform b) c4(253584, 253585) c5(253586, 253587, 253588, 253589, 253590, 253591, 253592) c6( ) c7(t, hy, m, ne, BN); #c1(ATG4A) c2(XP_011529147) c3(cysteine protease ATG4A isoform X4) c4( ) c5(324493, 324494, 324495, 324496, 324497) c6( ) c7(t, hy, m, ne, BN); #c1(ATG4B) c2(NP_037457) c3(cysteine protease ATG4B isoform a) c4(175588, 175589, 175590, 175591) c5(175592, 175593, 175594, 175595, 175596, 175597, 175598, 175599, 175600, 175601, 175602, 175603, 175604, 175605, 175606, 175607, 175608, 175609, 175610, 175611) c6( ) c7(B, iU); #c1(ATG4B) c2(NP_847896) c3(cysteine protease ATG4B isoform b) c4(253656) c5(253657, 253658, 253659, 253660, 253661, 253662, 253663, 253664, 253665) c6( ) c7(B, iU); #c1(ATG4B) c2(XP_005247050) c3(cysteine protease ATG4B isoform X6) c4(267599) c5(267600, 267601, 267602, 267603, 267604, 267605) c6( ) c7(B, iU); #c1(ATG4B) c2(XP_005247052) c3(cysteine protease ATG4B isoform X2) c4(267606, 267607, 267608, 267609) c5( ) c6( ) c7(B, iU); #c1(ATG4B) c2(XP_005247053) c3(cysteine protease ATG4B isoform X4) c4( ) c5(267610, 267611, 267612, 267613, 267614, 267615, 267616, 267617, 267618, 267619, 267620, 267621, 267622, 267623, 267624, 267625, 267626, 267627, 267628, 267629, 267630, 267631, 267632, 267633, 267634, 267635) c6( ) c7(B, iU); #c1(ATG4C) c2(XP_011540615) c3(cysteine protease ATG4C isoform X2) c4(339115) c5(339116, 339117, 339118, 339119, 339120, 339121, 339122, 339123) c6(339124, 339125) c7(T, oe, fq); #c1(ATG4C) c2(XP_011540616) c3(cysteine protease ATG4C isoform X3) c4( ) c5(339126, 339127, 339128, 339129, 339130, 339131, 339132, 339133, 339134, 339135, 339136, 339137, 339138, 339139, 339140, 339141) c6(339142, 339143, 339144, 339145) c7(T, oe, fq); #c1(ATG5) c2(NP_001273035) c3(autophagy protein 5 isoform a) c4(104223) c5(104224, 104225, 104226, 104227, 104228, 104229, 104230, 104231, 104232, 104233) c6( ) c7(bM, T, n, v, j, ci, pM, V, eA, o, ad, x, l, hd, u, sN, ds, HG, h, K, ae, EG, A, mR, aiV, iU, oV, Y, eZ, r, aiT, kp, EZ, t, rR, Dy, c, w, wR, dy, k, m, y, B, p); #c1(ATG5) c2(NP_001273036) c3(autophagy protein 5 isoform b precursor) c4(104234) c5(104235, 104236, 104237, 104238, 104239, 104240, 104241) c6( ) c7(bM, T, n, v, j, ci, pM, V, eA, o, ad, x, l, hd, u, sN, ds, HG, h, K, ae, EG, A, mR, aiV, iU, oV, Y, eZ, r, aiT, kp, EZ, t, rR, Dy, c, w, wR, dy, k, m, y, B, p); #c1(ATG5) c2(NP_001273040) c3(autophagy protein 5 isoform d) c4(104254) c5(104255, 104256, 104257, 104258, 104259) c6( ) c7(bM, T, n, v, j, ci, pM, V, eA, o, ad, x, l, hd, u, sN, ds, HG, h, K, ae, EG, A, mR, aiV, iU, oV, Y, eZ, r, aiT, kp, EZ, t, rR, Dy, c, w, wR, dy, k, m, y, B, p); #c1(ATG7) c2(NP_001129503) c3(ubiquitin-like modifier-activating enzyme ATG7 isoform b) c4(51745) c5(51746, 51747, 51748, 51749, 51750, 51751, 51752, 51753, 51754, 51755, 51756, 51757) c6( ) c7(bM, T, pM, ad, aT, HG, aiW, K, jj, ae, ak, d, aW, eH, kp, g, eF, iK, bz, GB, rR, eM, wz, ei, kS, B); #c1(ATG7) c2(NP_001138384) c3(ubiquitin-like modifier-activating enzyme ATG7 isoform c) c4(56463, 56464) c5(56465, 56466, 56467, 56468, 56469, 56470, 56471, 56472, 56473, 56474, 56475, 56476, 56477, 56478, 56479, 56480, 56481, 56482, 56483, 56484, 56485, 56486, 56487, 56488, 56489, 56490, 56491, 56492, 56493, 56494) c6( ) c7(bM, T, pM, ad, aT, HG, aiW, K, jj, ae, ak, d, aW, eH, kp, g, eF, iK, bz, GB, rR, eM, wz, ei, kS, B); #c1(ATG7) c2(NP_006386) c3(ubiquitin-like modifier-activating enzyme ATG7 isoform a) c4(164560) c5(164561, 164562, 164563, 164564, 164565, 164566) c6( ) c7(bM, T, pM, ad, aT, HG, aiW, K, jj, ae, ak, d, aW, eH, kp, g, eF, iK, bz, GB, rR, eM, wz, ei, kS, B); #c1(ATG7) c2(XP_011531587) c3(ubiquitin-like modifier-activating enzyme ATG7 isoform X9) c4(327709, 327710, 327711, 327712) c5( ) c6( ) c7(bM, T, pM, ad, aT, HG, aiW, K, jj, ae, ak, d, aW, eH, kp, g, eF, iK, bz, GB, rR, eM, wz, ei, kS, B); #c1(ATG9A) c2(NP_001070666) c3(autophagy-related protein 9A) c4(34696, 34697, 34698, 34699, 34700, 34701, 34702, 34703, 34704) c5(34705, 34706, 34707, 34708, 34709, 34710, 34711, 34712, 34713, 34714, 34715, 34716, 34717, 34718, 34719, 34720, 34721, 34722, 34723, 34724, 34725, 34726, 34727, 34728, 34729, 34730, 34731, 34732, 34733, 34734, 34735, 34736, 34737, 34738, 34739, 34740, 34741, 34742, 34743, 34744, 34745, 34746, 34747, 34748, 34749, 34750, 34751, 34752, 34753, 34754, 34755, 34756, 34757, 34758, 34759, 34760, 34761, 34762, 34763, 34764, 34765, 34766) c6( ) c7(BN, aiV, hy, wR, m, t, ne); #c1(ATIC) c2(NP_004035) c3(bifunctional, purine biosynthesis protein PURH) c4(143004, 143005) c5(143006, 143007, 143008, 143009, 143010, 143011, 143012, 143013, 143014, 143015, 143016, 143017) c6( ) c7(JY, if, iW, jh, fd, cL, bS, v, ct, qN, fr, o, x, K, bA, nO, fO, cr, r, Z, ck, aiX, Ip, k, y, B); #c1(ATL1) c2(NP_001121185) c3(atlastin-1 isoform b) c4(45698, 45699, 45700) c5(45701, 45702, 45703, 45704, 45705, 45706, 45707, 45708, 45709, 45710, 45711, 45712, 45713, 45714, 45715, 45716, 45717) c6( ) c7(aiZ, aiY, Pt, oR, fu, aje, aV, lu, aja, afu, je, ajb, xw, fq, Qn, LB, iM, ac, c, ajc, ajd, U, bk, dy); #c1(ATL1) c2(NP_056999) c3(atlastin-1 isoform a) c4(188390, 188391) c5(188392, 188393, 188394, 188395, 188396, 188397, 188398, 188399, 188400, 188401, 188402, 188403, 188404, 188405, 188406, 188407, 188408) c6( ) c7(aiZ, aiY, Pt, oR, fu, aje, aV, lu, aja, afu, je, ajb, xw, fq, Qn, LB, iM, ac, c, ajc, ajd, U, bk, dy); #c1(ATL2) c2(NP_001129145) c3(atlastin-2 isoform 2) c4(50910) c5(50911, 50912, 50913, 50914, 50915, 50916, 50917, 50918) c6( ) c7(je, iM, kH); #c1(ATL2) c2(NP_071769) c3(atlastin-2 isoform 1) c4(212022) c5(212023, 212024, 212025, 212026, 212027, 212028) c6( ) c7(je, iM, kH); #c1(ATL2) c2(XP_006712135) c3(atlastin-2 isoform XI) c4(286425) c5( ) c6( ) c7(je, iM, kH); #c1(ATL2) c2(XP_011531321) c3(atlastin-2 isoform X4) c4(327313) c5(327314, 327315, 327316, 327317, 327318, 327319) c6( ) c7(je, iM, kH); #c1(ATL2) c2(XP_011531323) c3(atlastin-2 isoform X6) c4( ) c5(327320) c6( ) c7(je, iM, kH); #c1(ATLZ) c2(XP_011531324) c3(atlastin-2 isoform X7) c4(327321) c5(327322, 327323, 327324, 327325, 327326) c6( ) c7(je, iM, kH); #c1(ATL3) c2(NP_001276977) c3(atlastin-3 isoform 2) c4(108889) c5( ) c6( ) c7(ajf, IH, Pt); #c1(ATL3) c2(NP_056274) c3(atlastin-3 isoform 1) c4(186856) c5(186857, 186858, 186859, 186860, 186861, 186862, 186863, 186864, 186865, 186866, 186867, 186868) c6( ) c7(ajf, IH, Pt); #c1(ATM) c2(XP_006718906) c3(serine-protein kinase ATM isoform X1) c4(292060) c5(292061, 292062, 292063, 292064, 292065, 292066, 292067, 292068, 292069, 292070, 292071, 292072, 292073, 292074, 292075, 292076, 292077, 292078, 292079, 292080) c6( ) c7(bM, T, os, aC, fR, ea, if, e, al, hE, fd, ajp, bB, IR, ci, Lw, aY, aR, ip, x, bv, aji, aE, pX, ajv, M, aU, iv, K, hu, eL, bc, N, tw, zQ, iE, aW, WE, hl, adp, g, as, pL, eF, cm, bw, ajj, qJ, y, eM, nB, iT, U, cj, k, m, pw, jM, iu, Ro, FW, dD, ajm, iB, aw, ht, ajg, n, cQ, aj, ct, qN, cd, br, ai, eW, b, ft, wG, i, gd, kH, h, eV, hn, dL, on, pl, Ck, OV, oS, RT, A, aq, kp, Hu, ajo, QK, oU, kT, W, ky, dB, hk, ajn, hL, MM, at, oh, WL, cB, B, it, bL, fM, dA, AS, eR, jx, eX, ew, aA, cz, v, j, bX, Vh, Zk, AO, pd, q, J, qH, eA, MR, mP, qK, aT, cy, qG, qv, Fx, ajh, Fg, ae, eu, qw, aii, aju, s, iU, oV, Y, Lf, ajx, r, lo, uU, en, bu, cl, pt, Mu, t, ho, pb, bN, ajq, ck, ajl, iK, BU, VJ, kP, nM, ajs, iM, gX, Da, dy, oX, fD, bt, am, Zl, aZ, aD, iW, VT, jh, acU, oZ, bS, oH, eq, hF, ad, dP, fU, av, hd, F, Cj, py, Db, ajk, gh, oW, vc, vP, iL, Ng, d, je, ajr, BO, qt, Fm, ff, cr, eZ, dq, EH, xH, aF, EZ, Z, bz, dr, qa, adq, eK, bF, gk, bF, afd, ajw, MJ, rH, bC, lM, ajt, X, jr, BA); #c1(ATM) c2(XP_011541147) c3(serine-protein kinase ATM isoform X5) c4(339684) c5( ) c6( ) c7(bM, T, os, aC, fR, ea, if, e, al, hE, fd, ajp, bB, lR, ci, Lw, aY, aR, ip, x, bv, aji, aE, pX, ajv, M, aU, iv, K, hu, eL, bc, N, tw, zQ, iE, aW, WE, hl, adp, g, as, pL, eF, cm, bw, ajj, qJ, y, eM, nB, iT, U, cj, k, m, pw, jM, iu, Ro, FW, dD, ajm, iB, aw, ht, ajg, n, cQ, aj, ct, qN, cd, br, ai, eW, b, ft, wG, i, gd, kH, h, eV, hn, dL, on, pl, Ck, OV, oS, RT, A, aq, kp, Hu, ajo, QK, oU, kT, W, ky, dB, hk, ajn, hL, MM, at, oh, WL, cB, B, it, bL, fM, dA, AS, eR, jx, eX, ew, aA, cz, v, j, bX, Vh, Zk, AO, pd, q, J, qH, eA, MR, mP, qK, aT, cy, qG, qv, Ex, ajh, Fg, ae, eu, qw, aii, aju, s, iU, oV, Y, Lf, ajx, r, Io, uU, en, bu, cl, pt, Mu, t, ho, pb, bN, ajq, ck, ajl, iK, BU, VJ, kP, nM, ajs, iM, gX, Da, dy, oX, fD, bt, am, Zl, aZ, aD, iW, VT, jh, acU, oZ, bS, oH, eq, hF, ad, dP, fU, av, hd, F, Cj, py, Db, ajk, qh, oW, vc, vP, iL, Ng, d, je, ajr, BO, qt, Fm, ff, cr, al, dq, EH, xH, aF, EZ, Z, bz, dr, qa, adq, eK, bF, gk, bE, afd, ajw, MJ, rH, bC, lM, ajt, X, jr, BA); #c1(ATM) c2(XP_011541148) c3(serine-protein kinase ATM isoform X6) c4(339685, 339686) c5(339687, 339688, 339689, 339690, 339691, 339692, 339693, 339694) c6( ) c7(bM, T, os, aC, fR, ea, if, e, al, hE, fd, ajp, bB, IR, ci, Lw, aY, aR, ip, x, bv, aji, aE, pX, ajv, M, aU, iv, K, hu, eL, bc, N, tw, zQ, iE, aW, WE, hl, adp, g, as, pL, eF, cm, bw, ajj, qJ, y, eM, nB, iT, U, cj, k, m, pw, jM, iu, Ro, FW, dD, ajm, iB, aw, ht, ajg, n, cQ, aj, ct, qN, cd, br, ai, eW, b, ft, wG, i, gd, kH, h, eV, hn, dL, on, pi, Ck, OV, oS, RT, A, aq, kp, Hu, ajo, QK, oU, kT, W, ky, dB, hk, ajn, hL, MM, at, oh, WL, cB, B, it, bL, fM, dA, AS, eR, jx, eX, ew, aA, cz, v, j, bX, Vh, Zk, AO, pd, q, J, qH, eA, MR, mP, qK, aT, cy, qG, qv, Ex, ajh, Eg, ae, eu, qw, aii, aju, s, iU, oV, Y, Lf, ajx, r, lo, uU, en, bu, cl, pt, Mu, t, ho, pb, bN, ajg, ck, ajl, iK, BU, VJ, kP, nM, ajs, iM, gX, Da, dy, oX, fD, bt, am, Zl, aZ, aD, iW, VT, jh, acU, oZ, bS, oH, eq, hF, ad, dP, fU, av, hd, F, Cj, py, Db, ajk, qh, oW, vc, vP, iL, Ng, d, je, ajr, BO, qt, Em, ff, cr, eZ, dq, EH, xH, aF, EZ, Z, bz, dr, qa, adq, eK, bF, gk, bE, afd, ajw, MJ, rH, bC, IM, ajt, X, jr, BA); #c1(ATNI) c2(NP_001007027) c3(atrophin-1) c4(22405, 22406) c5(22407, 22408, 22409, 22410, 22411, 22412, 22413, 22414, 22415, 22416, 22417, 22418, 22419, 22420, 22421, 22422, 22423, 22424, 22425, 22426, 22427, 22428, 22429, 22430, 22431, 22432, 22433, 22434, 22435) c6( ) c7(oO, T, uK, if, fd, bB, ci, ajC, x, xy, aE, dV, K, ajK, ajA, dF, be, eL, aW, Ls, eE, cm, bw, iP, ajH, eu, iT, Kv, vA, mx, U, cj, k, m, ajJ, hh, ik, ajy, yG, n, aj, Wb, ct, qN, eW, br, ajL, zw, ju, ajE, kH, h, eV, dL, yZ, on, HO, A, oo, Cu, lb, fe, aq, pm, Rl, mo, ajz, ajB, op, NL, hL, pg, ajl, B, bL, Ob, fM, dA, jx, eX, rf, ajD, v, ajM, yU, g, J, er, eA, Kx, aT, rO, XU, ae, iU, oV, Y, r, en, hf, cl, ajG, ajE, t, f, iK, ck, cT, rR, iM, kB, IV, he, AH, wR, mf, bt, ow, gh, aD, jN, jh, wV, bS, dG, hE, Fc, iJ, ad, ds, ji, cb, fb, pq, je, lx, ff, eZ, Mz, dq, S, jg, iV, Z, iR, bz, dR, Ew, bE, Lj, uR, eB, Kj, rH, y); #c1(ATOH1) c2(NP_005163) c3(protein atonal, homolog 1) c4(153536) c5(153537, 153538, 153539, 153540, 153541, 153542) c6( ) c7(jf, T, dD, s, bE, fm, ea, ev, X, aw, ajN, r, aA, bB, aF, eq, ci, g, iV, q, Yi); #c1(ATOH7) c2(NP_660161) c3(protein atonal homolog 7) c4(240461) c5(240462, 240463, 240464, 240465, 240466, 240467) c6( ) c7(HQ, cZ, T, yG, fd, ajQ, ad, ajO, ady, dV, aT, dd, ae, IR, dH, aW, Y, xs, ajP, cr, dw, cm, bw, bz, ac, U, cj, oQ, B); #c1(ATOX1) c2(NP_004036) c3(copper transport protein ATOX1) c4(143018) c5(143019, 143020, 143021, 143022, 143023, 143024, 143025, 143026, 143027, 143028, 143029, 143030, 143031, 143032) c6( ) c7(eY, T, aaQ, Js, ep, aS, m, Jo); #c1(ATP10A) c2(NP_077816) c3(probable phospholipid-transporting ATPase VA) c4(215393) c5(215394, 215395, 215396, 215397, 215398, 215399) c6( ) c7(bL, ac, dH, agl, fq, rc, bN); #c1(ATP10B) c2(NP_079429) c3(probable phospholipid-transporting ATPase VB) c4(218086) c5(218087, 218088, 218089, 218090, 218091, 218092) c6( ) c7(fq); #c1(ATP10D) c2(NP_065186) c3(probable phospholipid-transporting ATPase VD) c4(204487) c5(204488, 204489, 204490, 204481, 204492, 204493) c6( ) c7(ajR, aw, j); #c1(ATP10D) c2(XP_005248176) c3(probable phospholipid-transporting ATPase VD isoform X1) c4(268264) c5(268265, 268266, 268267, 268268, 268269, 268270) c6( ) c7(ajR, aw, j); #c1(ATP11A) c2(NP_056020) c3(probable phospholipid-transporting ATPase IH isoform a) c4(185179, 185180) c5(185181, 185182, 185183, 185184, 185185, 185186, 185187, 185188, 185189, 185190, 185191, 185192, 185193, 185194, 185195, 185196, 185197, 185198, 185199) c6( ) c7(eY, LB, ajS, ajT, aW, Y, mG, aT, kt, cd, bz, B, ajU); #c1(ATP11A) c2(NP_115565) c3(probable phospholipid-transporting ATPase IH isoform b) c4(223208) c5(223209, 223210, 223211, 223212, 223213, 223214) c6( ) c7(eY, LB, ajS, ajT, aW, Y, mG, aT, kt, cd, bz, B, ajU); #c1(ATP11A) c2(XP_005268356) c3(probable phospholipid-transporting ATPase IH isoform X4) c4( ) c5(281748, 281749) c6( ) c7(eY, LB, ajS, ajT, aW, Y, mG, aT, kt, cd, bz, B, ajU); #c1(ATP11A) c2(XP_011535781) c3(probable phospholipid-transporting ATPase IH isoform X3) c4( ) c5(332979) c6( ) c7(eY, LB, ajS, ajT, aW, Y, mG, aT, kt, cd, bz, B, ajU); #c1(ATP11A) c2(XP_011535783) c3(probable phospholipid-transporting ATPase IH isoform X7) c4(332980, 332981) c5(332982, 332983, 332984, 332985, 332986, 332987, 332988, 332989, 332990, 332991, 332992) c6( ) c7(eY, LB, ajS, ajT, aW, Y, mG, aT, kt, cd, bz, B, ajU); #c1(ATP11AUN) c2(NP_997323) c3(putative protein ATP11AUN) c4(265404) c5(265405, 265406, 265407, 265408, 265409, 265410) c6( ) c7(bM); #c1(ATP11B) c2(NP_055431) c3(probable phospholipid-transporting ATPase IF) c4(181099) c5(181100, 181101, 181102, 181103, 181104, 181105) c6( ) c7(t, T, m); #c1(ATP11B) c2(XP_011510895) c3(probable phospholipid-transporting ATPase IF isoform X2) c4(301363) c5(301364, 301365, 301366, 301367, 301368, 301369) c6( ) c7(t, T, m); #c1(ATP12A) c2(NP_001172014) c3(potassium-transporting ATPase alpha chain 2 isoform 1) c4(72236) c5(72237, 72238, 72239, 72240, 72241, 72242) c6( ) c7(T, akc, akd, aD, zs, ha, aA, aj, ci, ad, zw, yu, K, ajZ, ae, dI, ajV, VC, Nr, Mq, aiV, Y, az, kt, po, aF, aB, g, akb, iK, Nq, ajX, aka, mG, wR, ajY, VG, ajW, cE, B); #c1(ATP12A) c2(NP_001667) c3(potassium-transporting ATPase alpha chain 2 isoform 2) c4(119856) c5(119857, 119858, 119859, 119860, 119861, 119862) c6( ) c7(T, akc, akd, aD, zs, ha, aA, aj, ci, ad, zw, yu, K, ajZ, ae, dl, ajV, VC, Nr, Mq, aiV, Y, az, kt, po, aF, aB, g, akb, iK, Nq, ajX, aka, mG, wR, ajY, VG, ajW, cE, B); #c1(ATP13A3) c2(NP_078800) c3(probable cation-transporting ATPase 13A3) c4(215534, 215535) c5(215536, 215537, 215538, 215539, 215540, 215541, 215542, 215543, 215544, 215545, 215546, 215547, 215548, 215549, 215550, 215551) c6( ) c7(ci); #c1(ATP13A3) c2(XP_005269417) c3(probable cation-transporting 13A3 isoform X5) c4(282556) c5(282557, 282558, 282559, 282560, 282561, 282562, 282563) c6( ) c7(ci); #c1(ATP13A3) c2(XP_011511423) c3(probable cation-transporting ATPase 13A3 isoform X2) c4( ) c5(302066, 302067, 302068, 302069, 302070) c6( ) c7(ci); #c1(ATP13A3) c2(XP_011511424) c3(probable cation-transporting ATPase 13A3 isoform X3) c4(302071) c5( ) c6( ) c7(ci); #c1(ATP13A4) c2(NP_115655) c3(probable cation-transporting ATPase 13A4) c4(223456, 223457) c5(223458, 223459, 223460, 223461, 223462, 223463, 223464, 223465, 223466, 223467, 223468, 223469, 223470, 223471, 223472, 223473, 223474, 223475, 223476) c6( ) c7(akf, aC, ake, Kr); #c1(ATP13A4) c2(XP_011511534) c3(probable cation-transporting ATPase 13A4 isoform X2) c4(302249) c5( ) c6( ) c7(akf, aC, ake, Kr); #c1(ATP1A2) c2(NP_000693) c3(sodium/potassium-transporting ATPase subunit alpha-2 proprotein) c4(14565, 14566, 14567, 14568, 14569) c5(14570, 14571, 14572, 14573, 14574, 14575, 14576, 14577, 14578, 14579, 14580, 14581, 14582, 14583, 14584, 14585, 14586, 14587, 14588, 14589, 14590, 14591, 14592, 14593, 14594, 14595, 14596, 14597, 14598, 14599) c6( ) c7(akn, ha, cz, n, ur, uu, nA, akg, akk, ako, bK, akr, akl, XK, la, akh, vo, akf, akq, akp, aki, akm, akj, Iw); #c1(ATP1A3) c2(NP_001243142) c3(sodium/potassium-transporting ATPase subunit alpha-3 isoform 2) c4(89988) c5(89989, 89990, 89991, 89992, 89993, 89994) c6( ) c7(xw, akv, akx, aki, Wk, akt, aU, bK, K, akh, aks, Wm, akw, aen, cd, aR, aku, dR); #c1(ATP1A3) c2(NP_001243143) c3(sodium/potassium-transporting ATPase subunit alpha-3 isoform 3) c4(89995, 89996, 89997, 89998) c5(89999, 90000, 90001, 90002, 90003, 90004, 90005, 90006, 90007, 90008, 90009, 90010, 90011, 90012, 90013, 90014, 90015, 90016, 90017, 90018, 90019, 90020, 90021, 90022, 90023) c6( ) c7(xw, akv, akx, aki, Wk, akt, aU, bK, K, akh, aks, Wm, akw, aen, cd, aR, aku, dR); #c1(ATP1A3) c2(NP_689509) c3(sodium/potassium-transporting ATPase subunit alpha-3 isoform 1) c4(242961, 242962) c5( ) c6( ) c7(xw, akv, akx, aki, Wk, akt, aU, bK, K, akh, aks, Wm, akw, aen, cd, aR, aku, dR); #c1(ATP1A3) c2(XP_011525293) c3(sodium/potassium-transporting ATPase subunit alpha-3 isoform X1) c4( ) c5(319759, 319760, 319761, 319762, 319763, 319764, 319765, 319766, 319767, 319768, 319769) c6( ) c7(xw, akv, akx, aki, Wk, akt, aU, bK, K, akh, aks, Wm, akw, aen, cd, aR, aku, dR); #c1(ATP1A4) c2(NP_001001734) c3(sodium/potassium-transporting ATPase subunit alpha-4 isoform 2) c4( ) c5(19007, 19008, 19009, 19010, 19011, 19012) c6( ) c7(aky, uT, MM, cR, cz, oJ, qa); #c1(ATP1A4) c2(NP_653300) c3(sodium/potassium-transporting ATPase subunit alpha-4 isoform 1) c4(239530, 239531) c5(239532, 239533, 239534, 239535, 239536, 239537) c6( ) c7(aky, uT, MM, cR, cz, oJ, qa); #c1(ATP1B1) c2(NP_001668) c3(sodium/potassium-transporting ATPase subunit beta-1) c4(119863, 119864, 119865) c5(119866, 119867, 119868, 119869, 119870, 119871, 119872, 119873, 119874, 119875, 119876, 119877, 119878, 119879, 119880, 119881, 119882, 119883, 119884, 119885, 119886, 119887) c6( ) c7(mG, bt, cz, EQ, IB, qa, bA, mu); #c1(ATP1B2) c2(NP_001669) c3(sodium/potassium-transporting ATPase subunit beta-2 isoform 1) c4(119888) c5(119889, 119890, 119891, 119892, 119893, 119894) c6( ) c7(T, aC, d, aW, qy, aT, at, dL, m, it, eA); #c1(ATP2A1) c2(NP_001273004) c3(sarcoplasmic/endoplasmic reticulum calcium ATPase 1 isoform c) c4( ) c5(104151, 104152, 104153, 104154, 104155) c6( ) c7(wY, yi, vX, IW, oj, akz, akB, akA, xk, K, lQ, fq, cd); #c1(ATP2A1) c2(NP_004311) c3(sarcoplasmic/endoplasmic reticulum calcium ATPase 1 isoform a) c4(145074, 145075) c5(145076, 145077, 145078, 145079, 145080) c6( ) c7(wY, yi, vX, IW, oj, akz, akB, akA, xk, K, ID, fq, cd); #c1(ATP2A1) c2(NP_775293) c3(sarcoplasmic/endoplasmic reticulum calcium ATPase 1 isoform b) c4(249879, 249880) c5(249881, 249882, 249883, 249884, 249885, 249886, 249887, 249888, 249889, 249890, 248891, 249892, 249893, 249894, 249895, 249896) c6( ) c7(wY, yi, vX, IW, oj, akz, akB, akA, xk, K, lQ, fq, cd); #c1(ATP2A2) c2(NP_001672) c3(sarcoplasmic/endoplasmic reticulum calcium ATPase 2 isoform a) c4(119902) c5(119903, 119904, 119905, 119906, 119907, 119908, 119909) c6( ) c7(bL, T, akD, cz, aj, akC, sl, agY, akG, cd, J, akE, cc, Bc, JD, vc, bK, K, lQ, bq, ff, wl, dN, en, me, bQ, iK, akF, cl, cA, nF, II, gZ, at, eo, bD, gT, cB, X, ao); #c1(ATP2A2) c2(NP_733765) c3(sarcoplasmic/endoplasmic reticulum calcium ATPase 2 isoform b) c4(247004, 247005, 247006) c5(247007, 247008, 247009, 247010, 247011, 247012, 247013, 247014, 247015, 247016, 247017, 247018, 247019, 247020, 247021, 247022, 247023, 247024, 247025) c6( ) c7(bL, T, akD, cz, aj, akC, sl, agY, akG, cd, J, akE, cc, Bc, JD, vc, bK, K, lQ, bq, ff, wl, dN, en, me, bQ, iK, akE, cl, cA, nF, II, gZ, at, eo, bD, gT, cB, X, ao); #c1(ATP2A3) c2(NP_777613) c3(sarcoplasmic/endoplasmic reticulum calcium ATPase 3 isoform e) c4(251326, 251327) c5(251328, 251329, 251330, 251331, 251332, 251333) c6( ) c7(bL, aA, cz, bB, aj, dG, ci, J, av, K, bq, s, ff, aF, en, g, bQ, iK, bF, ac, bE, akH, cE, X); #c1(ATP2A3) c2(NP_777615) c3(sarcoplasmic/endoplasmic reticulum calcium ATPase 3 isoform b) c4(251334) c5(251335, 251336, 251337, 251338, 251339, 251340) c6( ) c7(bL, aA, cz, bB, aj, dG, ci, J, av, K, bq, s, ff, aF, en, g, bQ, iK, bF, ac, bE, akH, cE, X); #c1(ATP2A3) c2(NP_777618) c3(sarcoplasmic/endoplasmic reticulum calcium ATPase 3 isoform c) c4(251341) c5(251342, 251343, 251344, 251345, 251346, 251347, 251348, 251349, 251350, 251351) c6( ) c7(bL, aA, cz, bB, aj, dG, ci, J, av, K, bq, s, ff, aF, en, g, bQ, iK, bF, ac, bE, akH, cE, X); #c1(ATP2A3) c2(XP_011522188) c3(sarcoplasmic/endoplasmic reticulum calcium ATPase 3 isoform X9) c4(316792) c5(316793, 316794, 316795, 316796, 316797, 316798) c6( ) c7(bL, aA, cz, bB, aj, dG, ci, J, av, K, bq, s, ff, aF, en, g, bQ, iK, bF, ac, bE, akH, cE, X); #c1(ATP2A3) c2(XP_011522192) c3(sarcoplasmic/endoplasmic reticulum calcium ATPase 3 isoform X1) c4(316799) c5(316800, 316801, 316802, 316803, 316804, 316805) c6( ) c7(bL, aA, cz, bB, aj, dG, ci, J, av, K, bq, s, ff, aF, en, g, bQ, iK, bF, ac, bE, akH, cE, X); #c1(ATP2A3) c2(XP_011522193) c3(sarcoplasmic/endoplasmic reticulum calcium ATPase 3 isoform X2) c4(316806) c5(316807, 316808, 316809, 316810, 316811, 316812, 316813, 316814, 316815, 316816, 316817, 316818) c6( ) c7(bL, aA, cz, bB, aj, dG, ci, J, av, K, bq, s, ff, aF, en, g, bQ, iK, bF, ac, bE, akH, cE, X); #c1(ATP2B1) c2(XP_011536710) c3(plasma membrane calcium-transporting ATPase 1 isoform X1) c4(334271, 334272) c5(334273, 334274, 334275, 334276, 334277, 334278, 334279, 334280, 334281, 334282, 334283, 334284, 334285, 334286, 334287, 334288) c6( ) c7(bv, yi, aW, oe, cz, aT, j, K, ey, ga, dR); #c1(ATP2B1) c2(XP_011536712) c3(plasma membrane calcium-transporting ATPase 1 isoform X5) c4(334289, 334290) c5(334291, 334292, 334293, 334294, 334295, 334296) c6( ) c7(bv, yi, aW, oe, cz, aT, j, K, ey, qa, dR); #c1(ATP2B1) c2(XP_011536713) c3(plasma membrane calcium-transporting ATPase 1 isoform X2) c4(334297) c5(334298, 334299, 334300, 334301, 334302, 334303) c6( ) c7(bv, yi, aW, oe, cz, aT, j, K, ey, qa, dR); #c1(ATP2B1) c2(XP_011536714) c3(plasma membrane calcium-transporting ATPase 1 isoform X6) c4( ) c5(334304, 334305, 334306, 334307, 334308, 334309) c6( ) c7(bv, yi, aW, oe, cz, aT, j, K, ey, qa, dR); #c1(ATP2B2) c2(NP_001001331) c3(plasma membrane calcium-transporting ATPase 2 isoform 1) c4(18195, 18196) c5(18197, 18198, 18199, 18200, 18201, 18202, 18203, 18204, 18205, 18206, 18207, 18208, 18209, 18210, 18211, 18212) c6( ) c7(ac, KD, bE, aW, akJ, VB, cz, aT, bB, fe, akl, qa, bN); #c1(ATP2B2) c2(NP_001674) c3(plasma membrane calcium-transporting ATPase 2 isoform 2) c4(119910) c5(119911, 119912, 119913, 119914, 119915, 119916, 119917, 119918, 119919, 119920) c6( ) c7(ac, KD, bE, aW, akJ, VB, cz, aT, bB, fe, akl, qa, bN); #c1(ATP2B2) c2(XP_011532055) c3(plasma membrane calcium-transporting ATPase 2 isoform X3) c4(328111) c5( ) c6( ) c7(ac, KD, bE, aW, akJ, VB, cz, aT, bB, fe, akl, qa, bN); #c1(ATP2B2) c2(XP_011532056) c3(plasma membrane calcium-transporting ATPase 2 isoform X4) c4(328112) c5(328113, 328114, 328115, 328116, 328117, 328118) c6( ) c7(ac, KD, bE, aW, akJ, VB, cz, aT, bB, fe, akl, qa, bN); #c1(ATP2B2) c2(XP_011532057) c3(plasma membrane calcium-transporting ATPase 2 isoform X5) c4(328119) c5( ) c6( ) c7(ac, KD, bE, aW, akJ, VB, cz, aT, bB, fe, akl, qa, bN); #c1(ATP2B2) c2(XP_011532058) c3(plasma membrane calcium-transporting ATPase 2 isoform X6) c4( ) c5(328120, 328121, 328122, 328123, 328124, 328125, 328126) c6( ) c7(ac, KD, bE, aW, akJ, VB, cz, aT, bB, fe, akl, qa, bN); #c1(ATP2B2) c2(XP_011532061) c3(plasma membrane calcium-transporting ATPase 2 isoform X8) c4( ) c5(328127, 328128, 328129, 328130, 328131) c6( ) c7(ac, KD, bE, aW, akJ, VB, cz, aT, bB, fe, akl, qa, bN); #c1(ATP2B3) c2(XP_005274747) c3(plasma membrane calcium-transporting ATPase 3 isoform X2) c4(285363) c5(285364, 285365, 285366, 285367, 285368, 285369, 285370, 285371, 285372, 285373, 285374, 285375, 285376) c6( ) c7(qa, Fj, s, ky, bE, aW, xz, cz, aT, MM, bB, akL, akK); #c1(ATP2B3) c2(XP_005274749) c3(plasma membrane calcium-transporting ATPase 3 isoform X1) c4(285377, 285378, 285379) c5(285380, 285381, 285382, 285383, 285384, 285385, 285386, 285387, 285388, 285389, 285390, 285391, 285392, 285393, 285394, 285395, 285396, 285397, 285398, 285399, 285400, 285401) c6( ) c7(qa, Fj, s, ky, bE, aW, xz, cz, aT, MM, bB, akL, akK); #c1(ATP2B3) c2(XP_011529479) c3(plasma membrane calcium-transporting ATPase 3 isoform X5) c4( ) c5(324924, 324925) c6( ) c7(qa, Fj, s, ky, bE, aW, xz, cz, aT, MM, bB, akL, akK); #c1(ATP2B4) c2(NP_001001396) c3(plasma membrane calcium-transporting ATPase 4 isoform 4a) c4(18324, 18325, 18326, 18327, 18328) c5(18329, 18330, 18331, 18332, 18333, 18334, 18335, 18336, 18337, 18338, 18339, 18340, 18341, 18342, 18343, 18344, 18345, 18346, 18347, 18348, 18349, 18350, 18351, 18352, 18353, 18354, 18355, 18356) c6( ) c7(T, FG, aW, bE, dV, aT, aU, cz, bB, bQ, cd, bN); #c1(ATP2B4) c2(NP_001675) c3(plasma membrane calcium-transporting ATPase 4 isoform 4b) c4(119921) c5(119922, 119923, 119924, 119925, 119926, 119927, 119928, 119929, 119930, 119931, 119932, 119933) c6( ) c7(T, FG, aW, bE, dV, aT, aU, cz, bB, bQ, cd, bN); #c1(ATP2C1) c2(NP_001001486) c3(calcium-transporting ATPase type 2C member 1 isoform 1d) c4(18509, 18510) c5(18511, 18512, 18513, 18514, 18515, 18516, 18517, 18518, 18519, 18520, 18521, 18522, 18523, 18524, 18525, 18526, 18527, 18528, 18529, 18530, 18531, 18532, 18533, 18534, 18535, 18536, 18537, 18538, 18539, 18540, 18541, 18542, 18543, 18544, 18545) c6( ) c7(T, A, dA, cA, bE, aW, ds, Y, aT, dN, h, gA, aj, K, lQ, pL, akG, bz, iu, J, akE); #c1(ATP2C1) c2(NP_001001487) c3(calcium-transporting ATPase type 2C member 1 isoform 1b) c4(18546) c5(18547, 18548, 18549, 18550, 18551, 18552) c6( ) c7(T, A, dA, cA, bE, aW, ds, Y, aT, dN, h, gA, aj, K, lQ, pL, akG, bz, iu, J, akE); #c1(ATP2C1) c2(NP_001186109) c3(calcium-transporting ATPase type 2C member 1 isoform 2a) c4(77151) c5(77152, 77153, 77154, 77155, 77156, 77157, 77158, 77159) c6( ) c7(T, A, dA, cA, bE, aW, ds, Y, aT, dN, h, gA, aj, K, lQ, pL, akG, bz, iu, J, akE); #c1(ATP2C1) c2(NP_001186110) c3(calcium-transporting ATPase type 2C member 1 isoform 2b) c4( ) c5(77160) c6( ) c7(T, A, dA, cA, bE, aW, ds, Y, aT, dN, h, gA, aj, K, lQ, pL, akG, bz, iu, J, akE); #c1(ATP2C1) c2(NP_001186111) c3(calcium-transporting ATPase type 2C member 1 isoform 2c) c4(77161) c5(77162, 77163, 77164, 77165, 77166, 77167) c6( ) c7(T, A, dA, cA, bE, aW, ds, Y, aT, dN, h, gA, aj, K, lQ, pL, akG, bz, iu, J, akE); #c1(ATP2C1) c2(NP_001186112) c3(calcium-transporting ATPase type 2C member 1 isoform 1e) c4(77168) c5(77169, 77170, 77171, 77172, 77173, 77174, 77175, 77176) c6( ) c7(T, A, dA, cA, bE, aW, ds, Y, aT, dN, h, gA, aj, K, lQ, pL, akG, bz, iu, J, akE); #c1(ATP2C1) c2(NP_001186114) c3(calcium-transporting ATPase type 2C member 1 isoform 1c) c4(77177) c5(77178, 77179, 77180, 77181, 77182, 77183) c6( ) c7(T, A, dA, cA, bE, aW, ds, Y, aT, dN, h, gA, aj, K, lQ, pL, akG, bz, iu, J, akE); #c1(ATP2C1) c2(NP_055197) c3(calcium-transporting ATPase type 2C member 1 isoform 1a) c4(179718, 179719, 179720, 179721) c5( ) c6( ) c7(T, A, dA, cA, bE, aW, ds, Y, aT, dN, h, gA, aj, K, lQ, pL, akG, bz, iu, J, akE); #c1(ATP2C1) c2(XP_011510989) c3(calcium-transporting ATPase type 2C member 1 isoform X7) c4(301432) c5(301433, 301434, 301435, 301436, 301437, 301438, 301439, 301440, 301441, 301442, 301443, 301444, 301445, 301446, 301447, 301448, 301449, 301450, 301451) c6( ) c7(T, A, dA, cA, bE, aW, ds, Y, aT, dN, h, gA, aj, K, lQ, pL, akG, bz, iu, J, akE); #c1(ATP2C2) c2(NP_001273456) c3(calcium-transporting ATPase type 2C member 2 isoform 1) c4(104958) c5(104959, 104960, 104961, 104962, 104963, 104964) c6( ) c7(aW, VT, aT, yA, aha, vo); #c1(ATP2C2) c2(NP_001278383) c3(calcium-transporting ATPase type 2C member 2 isoform 3) c4(109604) c5(109605, 109606, 109607, 109608, 109609, 109610) c6( ) c7(aW, VT, aT, yA, aha, vo); #c1(ATP2C2) c2(NP_055676) c3(calcium-transporting ATPase type 2C member 2 isoform 2) c4(182679) c5(182680, 182681, 182682, 182683, 182684, 182685) c6( ) c7(aW, VT, aT, yA, aha, vo); #c1(ATP4A) c2(NP_000695) c3(potassium-transporting ATPase alpha chain 1) c4(14600) c5(14601, 14602, 14603, 14604, 14605, 14606) c6( ) c7(T, akc, akd, aD, zs, ha, aA, aj, zw, yu, K, ajZ, dl, ajV, VC, Nr, Mq, aiV, Jl, Y, az, kt, po, aF, aB, akb, Nq, ajX, aka, mG, wR, ajY, VG, ajW, cE, B, Ex); #c1(ATP4B) c2(NP_000696) c3(potassium-transporting ATPase subunit beta) c4(14607) c5(14608, 14609, 14610, 14611, 14612, 14613) c6( ) c7(aF, e, j, bK, aA); #c1(ATP5A1) c2(NP_001001937) c3(ATP synthase subunit alpha, mitochondrial, isoform a precursor) c4(19185, 19186) c5(19187, 19188, 19189, 19190, 1919119192, 19193, 19194, 19195, 19196, 19197, 19198, 19199) c6( ) c7(BN, Z, af, cA, r, bZ, bS, hy, ct, jo, K, pM, q, v, ne, ad, akM); #c1(ATP5A1) c2(NP_001244263) c3(ATP synthase subunit alpha, mitochondrial, isoform b precursor) c4(92088, 92089) c5(92090, 92091, 92092, 92093, 92094, 92095, 92096, 92097, 92098, 92099, 92100) c6( ) c7(BN, Z, af, cA, r, bZ, bS, hy, ct, jo, K, pM, g, v, ne, ad, akM); #c1(ATP5A1) c2(XP_011524320) c3(ATP synthase subunit alpha, mitochondrial, isoform X1) c4( ) c5(318809, 318810, 318811, 318812, 318813, 318814, 318815, 318816) c6( ) c7(BN, Z, af, cA, r, bZ, bS, hy, ct, jo, K, pM, q, v, ne, ad, akM); #c1(ATP5B) c2(NP_001677) c3(ATP synthase subunit beta, mitochondrial, precursor) c4(119934) c5(119935, 119936, 119937, 119938, 119939, 119940) c6( ) c7(akN, cz); #c1(ATP5C1) c2(NP_001001973) c3(ATP synthase subunit gamma, mitochondrial, isoform L (liver) precursor) c4(19230) c5(19231, 19232, 19233, 19234, 19235, 19236) c6( ) c7(q, ad, r); #c1(ATP5C1) c2(NP_005165) c3(ATP synthase subunit gamma, mitochondrial, isoform H (heart) precursor) c4(153543, 153544) c5(153545, 153546, 153547, 153548, 153549, 153550, 153551) c6( ) c7(q, ad, r); #c1(ATP5C1) c2(XP_011517792) c3(ATP synthase subunit gamma, mitochondrial, isoform X1) c4( ) c5(311670, 311671, 311672, 311673, 311674) c6( ) c7(q, ad, r); #c1(ATP5D) c2(NP_001001975) c3(ATP synthase subunit delta, mitochondrial, precursor) c4(19253) c5(19254, 19255, 19256, 19257, 19258, 19259, 19260, 19261, 19262, 19263) c6( ) c7(g); #c1(ATP5E) c2(NP_008817) c3(ATP synthase subunit epsilon, mitochondrial) c4(168786, 168787) c5(168788, 168789, 168790, 168791, 168792, 168793, 168794, 168795, 168796, 168797, 168798, 168799, 168800, 168801, 168802, 168803, 168804, 168805, 168806, 168807) c6( ) c7(ajS, akQ, iU, hb, akO, oW, ahz, v, ci, cb, kC, X, ajU, akP); #c1(ATP5G1) c2(NP_005166) c3(ATP synthase F(0) complex subunit C1, mitochondrial, precursor) c4(153552) c5(153553, 153554, 153555, 153556, 153557, 153558, 153559, 153560, 153561, 153562) c6( ) c7(rY); #c1(ATP5G2) c2(NP_001002031) c3(ATP synthase F(0) complex subunit C2, mitochondrial, isoform a precursor) c4(19400) c5(19401, 19402, 19403, 19404, 19405, 19406, 19407, 19408, 19409, 19410, 19411) c6( ) c7(fr, ad); #c1(ATP5G2) c2(NP_005167) c3(ATP synthase F(0) complex subunit C2, mitochondrial, isoform b precursor) c4(153563) c5(153564, 153565, 153566, 153567, 153568, 153569, 153570) c6( ) c7(fr, ad); #c1(ATP5G2) c2(XP_011536788) c3(ATP synthase F(0) complex subunit C2, mitochondrial, isoform X1) c4(334466) c5( ) c6( ) c7(fr, ad); #c1(ATP5G3) c2(NP_001002258) c3(ATP synthase F(0) complex subunit C3, mitochondrial, isoform A precursor) c4(19455) c5(19456, 19457, 19458, 19459, 19460, 19461, 19462, 19463, 19464, 19465, 19466, 19467, 19468, 19469) c6( ) c7(bv, iO, ahy, s, aW, dc, eH, aT, eF, B, bN); #c1(ATP5H) c2(NP_001003785) c3(ATP synthase subunit d, mitochondrial, isoform b) c4(20086) c5(20087, 20088, 20089, 20090, 20091, 20092) c6( ) c7(iu, B); #c1(ATP5H) c2(NP_006347) c3(ATP synthase subunit d, mitochondrial, isoform a) c4(164208, 164209) c5(164210, 164211, 164212, 164213, 164214, 164215, 164216, 164217, 164218, 164219, 164220, 164221) c6( ) c7(iu, B); #c1(ATP5J) c2(NP_001003696) c3(ATP synthase-coupling factor 6, mitochondrial, isoform a precursor) c4(19964) c5(19965, 19966, 19967, 19968, 19969, 19970, 19971, 19972, 19973, 19974, 19975, 19976, 19977, 19978, 19979, 19980, 19981) c6( ) c7(eR, ajU, aw, cz, gZ, r, aj, j, q, J, ad); #c1(ATP5J) c2(NP_001003701) c3(ATP synthase-coupling factor 6, mitochondrial, isoform b precursor) c4(19989) c5(19990, 19991, 19992, 19993, 19994, 19995, 19996, 19997, 19998, 19999, 20000) c6( ) c7(eR, ajU, aw, cz, gZ, r, aj, j, q, J, ad); #c1(ATP5J2) c2(NP_001003713) c3(ATP synthase subunit f, mitochondrial, isoform 2b) c4(20027, 20028) c5(20029, 20030, 20031, 20032, 20033, 20034, 20035, 20036, 20037, 20038, 20039, 20040) c6( ) c7(ad); #c1(ATP5J2) c2(NP_001003714) c3(ATP synthase subunit f, mitochondrial, isoform 2c) c4(20041) c5(20042, 20043, 20044, 20045, 20046, 20047) c6( ) c7(ad); #c1(ATP5J2) c2(NP_001034267) c3(ATP synthase subunit f, mitochondrial, isoform 2d) c4(31643) c5(31644, 31645, 31646, 31647, 31648, 31649) c6( ) c7(ad); #c1(ATP5J2) c2(NP_004880) c3(ATP synthase subunit f, mitochondrial, isoform 2a) c4(150516) c5(150517, 150518, 150519, 150520, 150521, 150522) c6( ) c7(ad); #c1(ATP5L) c2(NP_006467) c3(ATP synthase subunit g, mitochondrial) c4(165417) c5(165418, 165419, 165420, 165421, 165422, 165423) c6( ) c7(hy, ne, BN); #c1(ATP5O) c2(NP_001688) c3(ATP synthase subunit O, mitochondrial, precursor) c4(119994) c5(119995, 119996, 119997, 119998, 119999, 120000) c6( ) c7(bL, ad); #c1(ATP6AP1) c2(NP_001174) c3(V-type proton ATPase subunit S1 precursor) c4(72423, 72424, 72425, 72426) c5(72427, 72428, 72429, 72430, 72431, 72432, 72433, 72434, 72435, 72436, 72437, 72438, 72439, 72440, 72441, 72442, 72443, 72444, 72445, 72446, 72447, 72448, 72449, 72450) c6( ) c7(T, Ke, lP, if, fd, ci, qN, Ll, akW, eW, ad, hX, akR, acu, akU, ds, qp, eT, cU, SH, h, K, zy, ae, akS, akX, akT, akV, iU, ff, wc, Pg, Io, yq, xH, en, ck, kP, xD, Nk, i, bt); #c1(ATP6AP1L) c2(XP_011542025) c3(V-type proton ATPase subunit S1-like protein isoform X1) c4(340560) c5(340561, 340562, 340563, 340564, 340565, 340566, 340567, 340568, 340569, 340570) c6( ) c7(akY, c); #c1(ATP6AP2) c2(NP_005756) c3(renin receptor precursor) c4(159052, 159053, 159054, 159055, 159056, 159057, 159058, 159059) c5(159060, 159061, 159062, 159063, 159064, 159065, 159066, 159067, 159068, 159069, 159070, 159071, 159072, 159073, 159074, 159075, 159076, 159077, 159078, 159079, 159080, 159081, 159082, 159083, 159084, 159085, 159086, 159087, 159088, 159089, 159090, 159091, 159092, 159093, 159094, 159095, 159096, 159097, 159098, 159099, 159100, 159101, 159102, 159103, 159104, 159105, 159106, 159107) c6( ) c7(bL, T, eR, e, cz, aj, j, sl, aY, J, hX, fU, ws, sN, aT, ey, lQ, jj, tw, ala, aW, Az, cr, eZ, fe, alb, si, eE, wU, W, Pa, vy, wR, akZ, dy, Hb, tr, aS, CZ, y, kS, vQ); #c1(ATP6VOA1) c2(NP_001123492) c3(V-type proton ATPase 116 kDa subunit a isoform 1 isoform a) c4(47189) c5(47190, 47191, 47192, 47193, 47194, 47195) c6( ) c7(bL, dD, aiV, ec, ea, dQ, hh, cz, aq, wR, j, eq, C, Z, B); #c1(ATP6VOA1) c2(NP_001123493) c3(V-type proton ATPase 116 kDa subunit a isoform 1 isoform b) c4(47196, 47197) c5(47198, 47199, 47200, 47201, 47202, 47203, 47204, 47205, 47206, 47207, 47208, 47209) c6( ) c7(bL, dD, aiV, ec, ea, dQ, hh, cz, aq, wR, j, eq, C, Z, B); #c1(ATP6VOA1) c2(NP_005168) c3(V-type proton ATPase 116 kDa subunit a isoform 1 isoform c) c4(153571, 153572) c5(153573, 153574, 153575, 153576, 153577, 153578, 153579, 153580, 153581, 153582, 153583, 153584) c6( ) c7(bL, dD, aiV, ec, ea, dQ, hh, cz, aq, wR, j, eq, C, Z, B); #c1(ATP6VOA1) c2(XP_005257516) c3(V-type proton ATPase 116 kDa subunit a isoform 1 isoform X1) c4(275192) c5(275193, 275194, 275195, 275196, 275197, 275198) c6( ) c7(bL, dD, aiV, ec, ea, dQ, hh, cz, aq, wR, j, eq, C, Z, B); #c1(ATP6VOA2) c2(NP_036595) c3(V-type proton ATPase 116 kDa subunit a isoform 2) c4(174685) c5(174686, 174687, 174688, 174689, 174690, 174691) c6( ) c7(gU, d, aiV, Uj, aW, ha, aT, alc, wR, ajW, C, ald, hh, Un, eA, dr); #c1(ATP6VOA2) c2(XP_005253620) c3(V-type proton ATPase 116 kDa subunit a isoform 2 isoform X1) c4(272599) c5(272600, 272601, 272602, 272603, 272604, 272605) c6( ) c7(gU, d, aiV, Uj, aW, ha, aT, alc, wR, ajW, C, ald, hh, Un, eA, dr); #c1(ATP6VOA4) c2(XP_005250451) c3(V-type proton ATPase 116 kDa subunit a isoform 4 isoform X1) c4(270308) c5(270309, 270310, 270311, 270312, 270313, 270314, 270315, 270316, 270317, 270318, 270319, 270320, 270321, 270322) c6( ) c7(py, W, aiV, qb, alf, mG, wR, alg, aj, C, hh, ale, Hp); #c1(ATP6VOC) c2(NP_001185498) c3(V-type proton ATPase 16 kDa proteolipid subunit) c4(75754) c5(75755, 75756, 75757, 75758, 75759, 75760) c6( ) c7(aW, T, B, aT); #c1(ATP6VOD1) c2(NP_004682) c3(V-type proton ATPase subunit d 1) c4(148806, 148807, 148808) c5(148809, 148810, 148811, 148812, 148813, 148814, 148815, 148816, 148817, 148818, 148819, 148820, 148821) c6( ) c7(hb, Pg); #c1(ATP6VOD1) c2(XP_011521749) c3(V-type proton ATPase subunit d 1 isoform X1) c4( ) c5(316456, 316457, 316458, 316459, 316460) c6( ) c7(hb, Pg); #c1(ATP6V0E1) c2(NP_003936) c3(V-type proton ATPase subunit e 1) c4(142321) c5(142322, 142323, 142324, 142325, 142326, 142327, 142328, 142329, 142330, 142331) c6( ) c7(aiW, akd, oj); #c1(ATP6V0E2) c2(NP_001094062) c3(V-type proton ATPase subunit e 2 isoform 2) c4(40571, 40572) c5(40573, 40574, 40575, 40576, 40577, 40578, 40579, 40580, 40581, 40582, 40583, 40584, 40585, 40586, 40587) c6( ) c7(oe); #c1(ATP6V0E2) c2(NP_001276919) c3(V-type proton ATPase subunit e 2 isoform 3) c4(108625) c5(108626, 108627, 108628, 108629, 108630, 108631, 108632, 108633, 108634, 108635) c6( ) c7(oe); #c1(ATP6V0E2) c2(NP_660265) c3(V-type proton ATPase subunit e 2 isoform 1) c4(240573, 240574) c5(240575, 240576, 240577, 240578, 240579, 240580, 240581, 240582, 240583, 240584) c6( ) c7(oe); #c1(ATP6V1B1) c2(NP_001683) c3(V-type proton ATPase subunit B, kidney isoform) c4(119941, 119942, 119943) c5(119944, 119945, 119946, 119947, 119948, 119949, 119950, 119951, 119952, 119953, 119954, 119955, 119956, 119957, 119958, 119959, 119960, 119961) c6( ) c7(ajT, alf, zs, mG, ali, cz, alh, ale); #c1(ATP6V1B2) c2(NP_001684) c3(V-type proton ATPase subunit B, brain isoform) c4(119962, 119963) c5(119964, 119965, 119966, 119967, 119968, 119969, 119970, 119971, 119972, 119973, 119974, 119975) c6( ) c7(kf, he, ey); #c1(ATP6V1C1) c2(NP_001686) c3(V-type proton ATPase subunit C 1) c4(119976) c5(119977, 119978, 119979, 119980, 119981, 119982, 119983, 119984, 119985, 119986) c6( ) c7(T, ac, BN, aW, ff, aT, hy, en, ne); #c1(ATP6V1D) c2(NP_057078) c3(V-type proton ATPase subunit D) c4(188829, 188830) c5(188831, 188832, 188833, 188834, 188835, 188836, 188837, 188838, 188839, 188840, 188841, 188842, 188843, 188844, 188845, 188846) c6( ) c7(at); #c1(ATP6V1E1) c2(NP_001034455) c3(V-type proton ATPase subunit E 1 isoform b) c4(31732) c5(31733, 31734, 31735, 31736, 31737, 31738) c6( ) c7(ib, bK, hX); #c1(ATP6V1E1) c2(NP_001034456) c3(V-type proton ATPase subunit E 1 isoform c) c4(31739) c5(31740, 31741, 31742, 31743, 31744, 31745) c6( ) c7(ib, bK, hX); #c1(ATP6V1E1) c2(NP_001687) c3(V-type proton ATPase subunit E 1 isoform a) c4(119987) c5(119988, 119989, 119990, 119991, 119992, 119993) c6( ) c7(ib, bK, hX); #c1(ATP6V1F) c2(NP_001185838) c3(V-type proton ATPase subunit F isoform 2) c4(76563) c5(76564, 76565, 76566, 76567, 76568, 76569) c6( ) c7(ae); #c1(ATP6V1F) c2(NP_004222) c3(V-type proton ATPase subunit F isoform 1) c4(144417) c5(144418, 144419, 144420, 144421, 144422, 144423) c6( ) c7(ae); #c1(ATP6V1G1) c2(NP_004879) c3(V-type proton ATPase subunit G 1) c4(150509) c5(150510, 150511, 150512, 150513, 150514, 150515) c6( ) c7(y, ac); #c1(ATP6V1G2) c2(NP_001191007) c3(V-type proton ATPase subunit G 2 isoform c) c4(80518) c5(80519, 80520, 80521, 80522, 80523, 80524, 80525, 80526, 80527, 80528, 80529, 80530, 80531, 80532, 80533, 80534, 80535, 80536, 80537, 80538, 80539, 80540, 80541, 80542, 80543) c6( ) c7(dV, eZ, aiJ, Kh, hH, y); #c1(ATP6V1G2) c2(NP_569730) c3(V-type proton ATPase subunit G 2 isoform a) c4(233840, 233841, 233842, 233843) c5(233844, 233845, 233846, 233847, 233848, 233849, 233850, 233851, 233852, 233853, 233854, 233855, 233856, 233857, 233858, 233859, 233860, 233861, 233862, 233863, 233864, 233865, 233866, 233867, 233868, 233869, 233870, 233871, 233872, 233873, 233874, 233875, 233876, 233877, 233878, 233879, 233880, 233881, 233882) c6( ) c7(dV, eZ, aiJ, Kh, hH, y); #c1(ATP6V1G2) c2(NP_612139) c3(V-type proton ATPase subunit G 2 isoform b) c4( ) c5(236008, 236009, 236010, 236011, 236012) c6( ) c7(dV, eZ, aiJ, Kh, hH, y); #c1(ATP6V1G3) c2(XP_006725021) c3(V-type proton ATPase subunit G 3 isoform X2) c4(296515) c5(296516, 296517, 296518, 296519, 296520, 296521, 296522, 296523, 296524, 296525) c6( ) c7(py); #c1(ATP6V1G3) c2(XP_011545238) c3(V-type proton ATPase subunit G 3 isoform X1) c4(344034) c5(344035, 344036, 344037, 344038, 344039, 344040, 344041, 344042, 344043, 344044, 344045) c6( ) c7(py); #c1(ATP6V1G3) c2(XP_011545239) c3(V-type proton ATPase subunit G 3 isoform X3) c4(344046) c5(344047, 344048, 344049, 344050, 344051) c6( ) c7(py); #c1(ATP7A) c2(NP_000043) c3(copper-transporting ATPase 1 isoform 1) c4(734, 735) c5(736, 737, 738, 739, 740, 741, 742) c6( ) c7(T, dD, Ol, ea, yk, ha, fd, bB, Mi, eq, Eh, q, alp, ep, Ak, aln, bV, alk, r, sm, aF, t, alj, cm, eY, alm, eM, all, bE, Xp, U, wR, m, alo, Mj, X); #c1(ATP7A) c2(NP_001269153) c3(copper-transporting ATPase 1 isoform 2) c4(100713, 100714, 100715, 100716) c5(100717, 100718, 100719, 100720, 100721, 100722, 100723, 100724, 100725, 100726, 100727, 100728, 100729, 100730, 100731, 100732, 100733, 100734, 100735, 100736, 100737, 100738, 100739, 100740, 100741, 100742, 100743, 100744, 100745) c6( ) c7(T, dD, Dl, ea, yk, ha, fd, bB, Mi, eq, Eh, q, alp, ep, Ak, aln, bV, alk, r, sm, aF, t, alj, cm, eY, alm, eM, all, bE, Xp, U, wR, m, alo, Mj, X); #c1(ATP7B) c2(NP_001005918) c3(copper-transporting ATPase 2 isoform b) c4(22167) c5(22168, 22169, 22170, 22171, 22172, 22173, 22174, 22175) c6(22176, 22177) c7(T, am, al, bO, ci, hX, q, aR, alr, av, ep, aT, aU, K, aln, als, ae, N, na, d, ff, fc, hl, r, alt, aq, en, iR, t, xw, bz, iK, dr, eY, es, iO, aaQ, Xp, m, alq, B, jr, ek); #c1(ATP7B) c2(NP_001230111) c3(copper-transporting ATPase 2 isoform c) c4(85939) c5(85940, 85941, 85942, 85943, 85944, 85945, 85946, 85947) c6(85948, 85949) c7(T, am, al, bO, ci, bX, q, aR, alr, av, ep, aT, aU, K, aln, als, ae, N, na, d, ff, fc, hl, r, alt, aq, en, iR, t, xw, bz, iK, dr, eY, es, iO, aaQ, Xp, m, alq, B, jr, ek); #c1(ATP7B) c2(XP_005266484) c3(copper-transporting ATPase 2 isoform X6) c4(280070) c5(280071, 280072, 280073, 280074, 280075, 280076, 280077, 280078) c6(280079, 280080) c7(T, am, al, bO, ci, bX, q, aR, alr, av, ep, aT, aU, K, aln, als, ae, N, na, d, ff, fc, hl, r, alt, aq, en, iR, t, xw, bz, iK, dr, eY, es, iO, aaQ, Xp, m, alq, B, jr, ek); #c1(ATP7B) c2(XP_005266485) c3(copper-transporting ATPase 2 isoform X7) c4(280081) c5( ) c6( ) c7(T, am, al, bO, ci, bX, q, aR, alr, av, ep, aT, aU, K, aln, als, ae, N, na, d, ff, fc, hl, r, alt, aq, en, iR, t, xw, bz, iK, dr, eY, es, iO, aaQ, Xp, m, alq, B, jr, ek); #c1(ATP7B) c2(XP_005266487) c3(copper-transporting ATPase 2 isoform X1) c4(280082) c5(280083, 280084, 280085, 280086, 280087, 280088, 280089, 280090, 280091, 280092, 280093, 280094, 280095, 280096, 280097, 280098, 280099, 280100, 280101, 280102, 280103, 280104, 280105, 280106, 280107, 280108, 280109, 280110, 280111, 280112, 280113, 280114, 280115, 280116, 280117, 280118, 280119, 280120, 280121, 280122, 280123, 280124, 280125, 280126, 280127, 280128, 280129, 280130, 280131, 280132, 280133, 280134, 280135, 280136, 280137, 280138, 280139, 280140, 280141, 280142, 280143, 280144, 280145, 280146, 280147, 280148, 280149, 280150, 280151, 280152, 280153, 280154, 280155, 280156, 280157, 280158, 280159, 280160, 280161, 280162, 280163, 280164, 280165, 280166, 280167, 280168, 280169, 280170, 280171, 280172, 280173, 280174, 280175, 280176, 280177) c6(280178, 280179, 280180) c7(T, am, al, bO, ci, bX, q, aR, alr, av, ep, aT, aU, K, aln, als, ae, N, na, d, ff, fc, hl, r, alt, ag, en, iR, t, xw, bz, iK, dr, eY, es, iO, aaQ, Xp, m, alq, B, jr, ek); #c1(ATP7B) c2(XP_005266489) c3(copper-transporting ATPase 2 isoform X9) c4(280181) c5(280182, 280183, 280184, 280185, 280186, 280187, 280188, 280189) c6(280190, 280191) c7(T, am, al, bO, ci, bX, q, aR, alr, av, ep, aT, aU, K, aln, als, ae, N, na, d, ff, fc, hl, r, alt, aq, en, iR, t, xw, bz, iK, dr, eY, es, iO, aaQ, Xp, m, alq, B, jr, ek); #c1(ATP7B) c2(XP_006719902) c3(copper-transporting ATPase 2 isoform X13) c4( ) c5(293059, 293060, 293061, 293062, 293063, 293064, 293065) c6(293066, 293067) c7(T, am, al, bO, ci, bX, q, aR, alr, av, ep, aT, aU, K, aln, als, ae, N, na, d, ff, fc, hl, r, alt, aq, en, iR, t, xw, bz, iK, dr, eY, es, iO, aaQ, Xp, m, alq, B, jr, ek); #c1(ATP7B) c2(XP_011533420) c3(copper-transporting ATPase 2 isoform X4) c4(329515) c5(329516, 329517, 329518, 329519, 329520, 329521, 329522, 329523) c6(329524, 329525) c7(T, am, al, bO, ci, bX, q, aR, alr, av, ep, aT, aU, K, aln, als, ae, N, na, d, ff, fc, hl, r, alt, aq, en, iR, t, xw, bz, iK, dr, eY, es, iO, aaQ, Xp, m, alq, B, jr, ek); #c1(ATP7B) c2(XP_011533421) c3(copper-transporting ATPase 2 isoform X5) c4(329526) c5(329527) c6( ) c7(T, am, al, bO, ci, bX, q, aR, alr, av, ep, aT, aU, K, aln, als, ae, N, na, d, ff, fc, hl, r, alt, aq, en, iR, t, xw, bz, iK, dr, eY, es, iO, aaQ, Xp, m, alq, B, jr, ek); #c1(ATP7B) c2(XP_011533423) c3(copper-transporting ATPase 2 isoform X10) c4( ) c5(329528, 329529, 329530, 329531, 329532, 329533, 329534, 329535) c6(329536, 329537) c7(T, am, al, bO, ci, bX, q, aR, alr, av, ep, aT, aU, K, aln, als, ae, N, na, d, ff, fc, hl, r, alt, aq, en, iR, t, xw, bz, iK, dr, eY, es, iO, aaQ, Xp, m, alq, B, jr, ek); #c1(ATP8A1) c2(NP_001098999) c3(phospholipid-transporting ATPase 1A isoform b) c4(41588) c5(41589, 41590, 41591, 41592, 41593, 41594, 41595) c6( ) c7(bL, aj, hJ, agl, aw); #c1(ATP8A1) c2(NP_006086) c3(phospholipid-transporting ATPase IA isoform a) c4(161802) c5(161803, 161804, 161805, 161806, 161807, 161808) c6( ) c7(bL, aj, hJ, agl, aw); #c1(ATP8A2) c2(NP_057613) c3(phospholipid-transporting ATPase IB) c4(191754, 191755) c5(191756, 191757, 191758, 191759, 191760, 191761, 191762, 191763, 191764, 191765, 191766, 191767) c6( ) c7(alu, nA, iX); #c1(ATP8A2) c2(XP_011533405) c3(phospholipid-transporting ATPase IB isoform X1) c4(329505) c5(329506) c6( ) c7(alu, nA, iX); #c1(ATP8A2) c2(XP_011533415) c3(phospholipid-transporting ATPase IB isoform X9) c4(329507) c5( ) c6( ) c7(alu, nA, iX); #c1(ATP8A2) c2(XP_011533416) c3(phospholipid-transporting ATPase IB isoform X10) c4( ) c5(329508, 329509, 329510, 329511, 329512, 329513) c6( ) c7(alu, nA, iX); #c1(ATP8B1) c2(XP_011524324) c3(phospholipid-transporting ATPase IC isoform X1) c4(318817) c5(318818, 318819, 318820, 318821, 318822, 318823, 318824, 318825, 318826, 318827, 318828, 318829, 318830, 318831, 318832, 318833, 318834, 318835, 318836, 318837, 318838, 318839, 318840, 318841, 318842, 318843, 318844, 318845, 318846, 318847, 318848, 318849, 318850, 318851, 318852, 318853, 318854, 318855, 318856, 318857, 318858, 318859, 318860, 318861, 318862, 318863, 318864, 318865, 318866, 318867, 318868, 318869, 318870, 318871, 318872, 318873, 318874, 318875, 318876, 318877, 318878, 318879, 318880, 318881, 318882, 318883, 318884, 318885, 318886, 318887, 318888, 318889, 318890, 318891, 318892, 318893, 318894, 318895, 318896, 318897, 318898, 318899, 318900, 318901, 318902, 318903, 318904, 318905, 318906, 318907, 318908, 318909, 318910, 318911, 318912, 318913, 318914, 318915, 318916, 318917, 318918, 318919, 318920, 318921, 318922, 318923, 318924, 318925, 318926, 318927, 318928, 318929, 318930, 318931, 318932, 318933, 318934, 318935, 318936, 318937, 318938, 318939, 318940, 318941, 318942, 318943, 318944, 318945, 318946, 318947, 318948, 318949, 318950, 318951, 318952, 318953, 318954, 318955, 318956, 318957, 318958, 318959, 318960, 318961, 318962, 318963, 318964, 318965, 318966, 318967, 318968, 318969, 318970, 318971, 318972, 318973, 318974, 318975, 318976, 318977, 318978, 318979, 318980, 318981, 318982, 318983, 318984, 318985, 318986, 318987, 318988, 318989, 318990, 318991, 318992, 318993, 318994, 318995, 318996, 318997, 318998, 318999, 319000) c6( ) c7(jq, ar, aC, iO, acw, hl, jN, jH, alv, j, alw, qj, hJ, jw, alx, an, jK); #c1(ATP8B3) c2(NP_001171473) c3(phospholipid-transporting ATPase IK isoform 2) c4(70233) c5(70234, 70235, 70236, 70237, 70238) c6( ) c7(bK); #c1(ATP8B3) c2(NP_620168) c3(phospholipid-transporting ATPase IK isoform 1) c4(237444, 237445) c5(237446, 237447, 237448, 237449, 237450, 237451) c6( ) c7(bK); #c1(ATP8B3) c2(XP_006722718) c3(phospholipid-transporting ATPase IK isoform X1) c4(294854) c5(294855, 294856, 294857, 294858, 294859, 294860, 294861) c6( ) c7(bK); #c1(ATP8B3) c2(XP_006722720) c3(phospholipid-transporting ATPase IK isoform X8) c4( ) c5(294862, 294863, 294864, 294865, 294866, 294867) c6( ) c7(bK); #c1(ATP8B4) c2(NP_079113) c3(probable phospholipid-transporting ATPase IM) c4( ) c5(217084, 217085, 217086, 217087, 217088, 217089, 217090, 217091) c6( ) c7(af, ac, j); #c1(ATP8B4) c2(XP_006720756) c3(probable phospholipid-transporting ATPase IM isoform X2) c4(293676) c5(293677, 293678) c6( ) c7(af, ac, j); #c1(ATP8B4) c2(XP_011520348) c3(probable phospholipid-transporting ATPase IM isoform X1) c4( ) c5(315193, 315194, 315195, 315196, 315197) c6( ) c7(af, ac, j); #c1(ATP8B4) c2(XP_011520356) c3(probable phospholipid-transporting ATPase IM isoform X4) c4(315198) c5( ) c6( ) c7(af, ac, j); #c1(ATP9B) c2(NP_940933) c3(probable phospholipid-transporting ATPase IIB) c4(260130) c5(260131, 260132, 260133, 260134, 260135, 260136) c6( ) c7(cu); #c1(ATP9B) c2(XP_011524263) c3(probable phospholipid-transporting ATPase IIB isoform X6) c4(318755) c5( ) c6( ) c7(cu); #c1(ATP9B) c2(XP_011524266) c3(probable phospholipid-transporting ATPase IIB isoform X9) c4(318756) c5( ) c6( ) c7(cu); #c1(ATP9B) c2(XP_011524270) c3(probable phospholipid-transporting ATPase IIB isoform X14) c4(318757) c5( ) c6( ) c7(cu); #c1(ATP9B) c2(XP_011524278) c3(probable phospholipid-transporting ATPase IIB isoform X22) c4( ) c5(318758, 318759, 318760, 318761, 318762, 318763, 318764, 318765, 318766, 318767) c6( ) c7(cu); #c1(ATP9B) c2(XP_011524279) c3(probable phospholipid-transporting ATPase IIB isoform X23) c4( ) c5(318768, 318769, 318770, 318771, 318772) c6( ) c7(cu); #c1(ATPAF2) c2(NP_663729) c3(ATP synthase mitochondrial F1 complex assembly factor 2) c4(241456) c5(241457, 241458, 241459, 241460, 241461, 241462) c6( ) c7(aly, alz, akP); #c1(ATPAF2) c2(XP_005256905) c3(ATP synthase mitochondrial, F1 complex assembly factor 2 isoform X5) c4( ) c5(274565, 274566, 274567, 274568, 274569, 274570, 274571, 274572, 274573, 274574, 274575, 274576) c6( ) c7(aly, alz, akP); #c1(ATPAF2) c2(XP_011522365) c3(ATP synthase mitochondrial, F1 complex assembly factor 2 isoform X2) c4(317046, 317047) c5( ) c6( ) c7(aly, alz, akP); #c1(ATR) c2(NP_001175) c3(serine/threonine-protein kinase ATR) c4(72451) c5(72452, 72453, 72454, 72455, 72456, 72457) c6( ) c7(T, os, dD, aC, id, eR, ea, WL, aw, ew, aA, bB, jh, oZ, j, eq, nA, WC, q, eA, eW, hb, KN, kH, aT, h, ey, K, WF, aij, alA, sb, d, kj, wr, aW, WE, Y, ff, alB, r, nf, kp, aF, en, cl, gW, t, QK, g, dr, op, ck, alC, WH, qe, eM, bE, vA, hL, cj, Km, m, ER, bC, Wl, bt, X, BA); #c1(ATR) c2(XP_011511227) c3(serine/threonine-protein kinase ATR isoform X2) c4(301706) c5(301707, 301708, 301709, 301710, 301711, 301712) c6( ) c7(T, ns, dD, aC, id, eR, ea, WL, aw, ew, aA, bB, jh, oZ, j, eq, nA, WC, q, eA, eW, hb, KN, kH, aT, h, ey, K, WF, aij, alA, sb, d, kj, wr, aW, WE, Y, ff, alB, r, nf, kp, aF, en, cl, gW, t, QK, g, dr, op, ck, alC, WH, qe, eM, bE, vA, hL, cj, Km, m, ER, bC, Wl, bt, X, BA); #c1(ATRAID) c2(NP_001164266) c3(all-trans retinoic acid-induced differentiation factor isoform c precursor) c4( ) c5(66893) c6( ) c7(ck, eM, Y, cn, iS, fd, bw, v, ci, K, hF, vt, B, ip); #c1(ATRAID) c2(NP_057169) c3(all-trans retinoic acid-induced differentiation factor isoform a) c4( ) c5(189282, 189283, 189284, 189285, 189286, 189287, 189288, 189289, 189290, 189291) c6( ) c7(ck, eM, Y, cn, iS, fd, bw, v, ci, K, hF, vt, B, ip); #c1(ATRAID) c2(NP_542159) c3(all-trans retinoic acid-induced differentiation factor isoform b) c4(231459, 231460, 231461) c5(231462, 231463, 231464, 231465, 231466, 231467, 231468, 231469) c6( ) c7(ck, eM, Y, cn, iS, fd, bw, v, ci, K, hF, vt, B, ip); #c1(ATRIP) c2(NP_001257952) c3(ATR-interacting protein isoform 4) c4(95857, 95858, 95859) c5(95860, 95861, 95862, 95863, 95864) c6( ) c7(T, Ez, dt, WE, aT, wR, K, m, t, Ex); #c1(ATRIP) c2(NP_115542) c3(ATR-interacting protein isoform 2) c4(223129) c5(223130, 223131, 223132, 223133, 223134, 223135, 223136) c6( ) c7(T, Ez, dt, WE, aT, wR, K, m, t, Ex); #c1(ATRIP) c2(NP_569055) c3(ATR-interacting protein isoform 1) c4(233578, 233579) c5(233580, 233581, 233582, 233583, 233584, 233585, 233586, 233587, 233588, 233589, 233590, 233591, 233592, 233593, 233594, 233595, 233596, 233597, 233598, 233599, 233600, 233601, 233602) c6( ) c7(T, Ez, dt, WE, aT, wR, K, m, t, Ex); #c1(ATRN) c2(NP_647537) c3(attractin isoform 1 preproprotein) c4(238693, 238694) c5(238695, 238696, 238697, 238698, 238699, 238700, 238701) c6( ) c7(alD, sS, cc, hk, Y, yk, afQ, ff, qy, v, en, as, eA); #c1(ATRN) c2(NP_647538) c3(attractin isoform 2 preproprotein) c4(238702) c5(238703, 238704, 238705, 238706, 238707, 238708) c6( ) c7(alD, sS, cc, hk, Y, yk, afQ, ff, qy, v, en, as, eA); #c1(ATRN) c2(XP_005260917) c3(attractin isoform X1) c4( ) c5(276967, 276968, 276969, 276970, 276971) c6( ) c7(alD, sS, cc, hk, Y, yk, afQ, ff, qy, v, en, as, eA); #c1(ATRNL1) c2(NP_997186) c3(attractin-like protein 1 isoform 1 precursor) c4(265133, 265134) c5(265135, 265136, 265137, 265138, 265139, 265140) c6( ) c7(TI, vT, HY, TH, TG, TJ, bE, eH, au, fd, bB, aq, rx, aaw, h, eF, y, nJ, B, bc); #c1(ATRNL1) c2(XP_011537889) c3(attractin-like protein 1 isoform X2) c4(335411) c5(335412, 335413, 335414, 335415, 335416, 335417, 335418) c6( ) c7(TI, vT, HY, TH, TG, TJ, bE, eH, au, fd, bB, aq, rx, aaw, h, eF, y, nJ, B, be); #c1(ATRNL1) c2(XP_011537893) c3(attractin-like protein 1 isoform X5) c4( ) c5(335419, 335420, 335421, 335422, 335423) c6( ) c7(TI, vT, HY, TH, TG, TJ, bE, eH, au, fd, bB, aq, rx, aaw, h, eF, y, nJ, B, be); #c1(ATRX) c2(NP_000480) c3(transcriptional, regulator ATRX isoform 1) c4(9645) c5(9646, 9647, 9648, 9649, 9650, 9651, 9652) c6( ) c7(T, aC, pY, ha, bs, alH, ci, nA, q, br, eA, ip, eW, aE, pX, qK, aT, K, jj, alF, alG, WF, alK, yi, d, alJ, kS, aW, eH, Az, fc, r, nf, as, eF, t, cm, bw, all, bN, ck, alE, Qi, BU, YE, WH, qe, dB, U, cj, iS, m, ER, cP, xb, st); #c1(ATRX) c2(NP_612114) c3(transcriptional, regulator ATRX isoform 2) c4(235871) c5(235872, 235873, 235874, 235875, 235876, 235877) c6( ) c7(T, aC, pY, ha, bs, alH, ci, nA, q, br, eA, ip, eW, aE, pX, qK, aT, K, jj, alF, alG, WF, alK, yi, d, alJ, kS, aW, eH, Az, fc, r, nf, as, eF, t, cm, bw, all, bN, ck, alE, Qi, BU, YE, WH, qe, dB, U, cj, iS, m, ER, cP, xb, st); #c1(ATRX) c2(XP_005262211) c3(transcriptional, regulator ATRX isoform X2) c4( ) c5(277785) c6( ) c7(T, aC, pY, ha, bs, alH, ci, nA, q, br, eA, ip, eW, aE, pX, qK, aT, K, jj, alF, alG, WF, alK, yi, d, alJ, kS, aW, eH, Az, fc, r, nf, as, eF, t, cm, bw, all, bN, ck, alE, Qi, BU, YE, WH, qe, dB, U, cj, iS, m, ER, cP, xb, st); #c1(ATRX) c2(XP_005262214) c3(transcriptional, regulator ATRX isoform X6) c4(277786) c5(277787, 277788, 277789, 277790, 277791, 277792) c6( ) c7(T, aC, pY, ha, bs, alH, ci, nA, q, br, eA, ip, eW, aE, pX, qK, aT, K, jj, alF, alG, WF, alK, yi, d, alJ, kS, aW, eH, Az, fc, r, nf, as, eF, t, cm, bw, all, bN, ck, alE, Qi, BU, YE, WH, qe, dB, U, cj, iS, m, ER, cP, xb, st); #c1(ATRX) c2(XP_006724731) c3(transcriptional, regulator ATRX isoform X8) c4(296278, 296279, 296280) c5(296281, 296282, 296283, 296284, 296285, 296286, 296287, 296288, 296289, 296290, 296291, 296292, 296293, 296294, 296295, 296296, 296297) c6( ) c7(T, aC, pY, ha, bs, alH, ci, nA, q, br, eA, ip, eW, aE, pX, qK, aT, K, jj, alF, alG, WF, alK, yi, d, alJ, kS, aW, eH, Az, fc, r, nf, as, eF, t, cm, bw, all, bN, ck, alE, Qi, BU, YE, WH, qe, dB, U, cj, iS, m, ER, cP, xb, st); #c1(ATXN1) c2(NP_001121636) c3(ataxin-1) c4(45939) c5(45940, 45941, 45942, 45943, 45944, 45945, 45946, 45947, 45948, 45949, 45950, 45951, 45952, 45953) c6( ) c7(T, os, iH, Js, aw, yY, rf, fd, lb, GC, oZ, v, j, Kh, akg, nA, Vd, fu, pd, cd, aR, oT, Yc, fm, aT, Ak, aU, cy, yZ, bK, K, jj, an, he, on, alO, af, alL, alM, iU, akL, dg, EH, Rl, fq, dr, dR, ck, alN, KE, rR, W, ky, kB, c, dB, ac, Kv, U, nw, aS, Kj, bt, Jo); #c1(ATXN10) c2(NP_001161093) c3(ataxin-10 isoform 2) c4(65314) c5(65315, 65316, 65317, 65318, 65319, 65320) c6( ) c7(alP, ky, kB, ha, U, rf, vm, aan, alQ, dr, wT, dR); #c1(ATXN10) c2(NP_037368) c3(ataxin-10 isoform 1) c4(175071, 175072) c5(175073, 175074, 175075, 175076, 175077, 175078, 175079, 175080, 175081, 175082, 175083, 175084) c6( ) c7(alP, ky, kB, ha, U, rf, vm, aan, alQ, dr, wT, dR); #c1(ATXN1L) c2(NP_001131147) c3(ataxin-1-like) c4(52629) c5(52630, 52631, 52632, 52633, 52634, 52635, 52636) c6( ) c7(Kh, kB); #c1(ATXN2) c2(NP_002964) c3(ataxin-2) c4(134012, 134013) c5(134014, 134015, 134016, 134017, 134018, 134019, 134020, 134021, 134022, 134023, 134024, 134025, 134026, 134027, 134028) c6( ) c7(eR, alW, Ol, oe, e, yY, rf, Nt, lb, cz, cL, v, Kh, alS, bX, ez, GC, V, Kx, o, Gt, KB, aV, pN, WY, kf, aU, yZ, K, alU, an, bV, af, alL, cC, Ng, A, rU, alR, akL, eZ, aaE, EH, adE, hp, Rl, t, nC, cm, alT, bb, ky, kB, c, Kv, U, nw, m, Kj, alV, act, X); #c1(ATXN2L) c2(NP_009176) c3(ataxin-2-like protein isoform A) c4(171310) c5(171311, 171312, 171313, 171314, 171315, 171316) c6( ) c7(fe); #c1(ATXN2L) c2(NP_663760) c3(ataxin-2-like protein isoform B) c4(241530) c5(241531, 241532, 241533, 241534, 241535, 241536) c6( ) c7(fe); #c1(ATXN2L) c2(NP_680780) c3(ataxin-2-like protein isoform C) c4(242332) c5(242333, 242334, 242335, 242336, 242337, 242338) c6( ) c7(fe); #c1(ATXN2L) c2(NP_680781) c3(ataxin-2-like protein isoform D) c4(242339) c5(242340, 242341, 242342, 242343, 242344, 242345) c6( ) c7(fe); #c1(ATXN2L) c2(NP_680782) c3(ataxin-2-like protein isoform E) c4(242346, 242347) c5(242348, 242349, 242350, 242351, 242352, 242353, 242354, 242355, 242356, 242357, 242358, 242359, 242360, 242361) c6( ) c7(fe); #c1(ATXN2L) c2(XP_006721071) c3(ataxin-2-like protein isoform X8) c4( ) c5(293839) c6( ) c7(fe); #c1(ATXN2L) c2(XP_011544024) c3(ataxin-2-like protein isoform X18) c4( ) c5(343192, 343193) c6( ) c7(fe); #c1(ATXN3) c2(NP_001121168) c3(ataxin-3 isoform ad) c4(45310, 45311) c5(45312, 45313, 45314, 45315, 45316, 45317, 45318, 45319, 45320, 45321, 45322, 45323) c6( ) c7(T, ob, yY, ht, rf, Nt, lb, aiC, GC, bS, Kh, ct, akg, PJ, fu, bX, ame, Kx, alZ, Na, lF, cF, amc, aV, HC, aU, alX, yZ, ama, K, hu, an, on, af, alY, alL, Ng, sq, xs, rU, TO, YG, EH, Rl, Z, cm, nC, xw, dr, dR, rR, amd, ky, kB, c, se, ag, Kv, U, alV, Km, Kj, aan, amb, aen, ao); #c1(ATXN3) c2(NP_001158252) c3(ataxin-3 isoform u) c4( ) c5(63515, 63516, 63517, 63518, 63519) c6( ) c7(T, ob, yY, ht, rf, Nt, lb, aiC, GC, bS, Kh, ct, akg, PJ, fu, bX, ame, Kx, alZ, Na, lF, cF, amc, aV, HC, aU, alX, yZ, ama, K, hu, an, on, af, alY, alL, Ng, sg, xs, rU, TO, YG, EH, Rl, Z, cm, nC, xw, dr, dR, rR, amd, ky, kB, c, se, ag, Kv, U, alV, Km, Kj, aan, amb, aen, ao); #c1(ATXN3) c2(NP_001158253) c3(ataxin-3 isoform y) c4(63520) c5(63521) c6( ) c7(T, ob, yY, ht, rf, Nt, lb, aiC, GC, bS, Kh, ct, akg, PJ, fu, bX, ame, Kx, alZ, Na, lF, cF, amc, aV, HC, aU, alX, yZ, ama, K, hu, an, on, af, alY, alL, Ng, sq, xs, rU, TO, YG, EH, Rl, Z, cm, nC, xw, dr, dR, rR, amd, ky, kB, c, se, ag, Kv, U, alV, Km, Kj, aan, amb, aen, ao); #c1(ATXN3) c2(NP_004984) c3(ataxin-3 reference isoform) c4(151626, 151627, 151628, 151629, 151630, 151631, 151632, 151633, 151634, 151635) c5(151636, 151637, 151638, 151639, 151640, 151641, 151642, 151643, 151644, 151645, 151646, 151647, 151648, 151649, 151650, 151651, 151652, 151653, 151654, 151655, 151656, 151657, 151658, 151659, 151660, 151661, 151662, 151663, 151664, 151665, 151666, 151667, 151668, 151669, 151670, 151671, 151672, 151673, 151674, 151675, 151676, 151677, 151678, 151679, 151680, 151681, 151682, 151683, 151684, 151685, 151686, 151687, 151688, 151689, 151690, 151691, 151692, 151693, 151694, 151695) c6( ) c7(T, ob, yY, ht, rf, Nt, lb, aiC, GC, bS, Kh, ct, akg, PJ, fu, bX, ame, Kx, alZ, Na, lF, cF, amc, aV, HC, aU, alX, yZ, ama, K, hu, an, on, af, alY, alL, Ng, sq, xs, rU, TO, YG, EH, Rl, Z, cm, nC, xw, dr, dR, rR, amd, ky, kB, c, se, ag, Kv, U, alV, Km, Kj, aan, amb, aen, ao); #c1(ATXN3) c2(NP_109376) c3(ataxin-3 isoform h) c4(219639) c5(219640, 219641, 219642, 219643, 219644, 219645) c6( ) c7(T, ob, yY, ht, rf, Nt, lb, aiC, GC, bS, Kh, ct, akg, PJ, fu, bX, ame, Kx, alZ, Na, lF, cF, amc, aV, HC, aU, alX, yZ, ama, K, hu, an, on, af, alY, alL, Ng, sq, xs, rU, TO, YG, EH, Rl, Z, cm, nC, xw, dr, dR, rR, amd, ky, kB, c, se, ag, Kv, U, alV, Km, Kj, aan, amb, aen, ao); #c1(ATXN7) c2(NP_000324) c3(ataxin-7 isoform a) c4(7121) c5(7122, 7123, 7124, 7125, 7126, 7127, 7128, 7129, 7130, 7131, 7132, 7133, 7134, 7135, 7136, 7137) c6( ) c7(yY, rf, Kh, C, bX, Sr, yZ, K, lQ, rU, EH, Rl, Xl, fq, nC, rR, amf, W, ky, kB, nb, Kv, U, nw, Pk); #c1(ATXN7) c2(NP_001121621) c3(ataxin-7 isoform c) c4(45885) c5(45886, 45887, 45888, 45889, 45890, 45891) c6( ) c7(yY, rf, Kh, C, bX, Sr, yZ, K, lQ, rU, EH, Rl, Xl, fq, nC, rR, amf, W, ky, kB, nb, Kv, U, nw, Pk); #c1(ATXN7) c2(NP_001170858) c3(ataxin-7 isoform b) c4(69547, 69548, 69549) c5(69550, 69551, 69552, 69553, 69554, 69555, 69556, 69557, 69558, 69559, 69560, 69561, 69562, 69563, 69564, 69565) c6( ) c7(yY, rf, Kh, C, bX, Sr, yZ, K, lQ, rU, EH, Rl, Xl, fg, nC, rR, amf, W, ky, kB, nb, Kv, U, nw, Pk); #c1(ATXN7L3B) c2(NP_001129734) c3(putative ataxin-7-like protein 3B) c4(52264) c5(52265, 52266, 52267, 52268, 52269, 52270) c6( ) c7(bA, pN); #c1(AUH) c2(NP_001689) c3(methylglutaconyl-CoA hydratase, mitochondrial, precursor) c4(120001) c5(120002, 120003, 120004, 120005, 120006, 120007) c6( ) c7(dq, aw, my, eZ, EQ); #c1(AUH) c2(XP_005252129) c3(methylglutaconyl-CoA hydratase, mitochondrial isoform X7) c4(271560) c5(271561, 271562, 271563, 271564, 271565, 271566) c6( ) c7(dq, aw, my, eZ, EQ); #c1(AURKA) c2(XP_006723935) c3(aurora kinase A isoform X1) c4(295483, 295484, 295485, 295486, 295487, 295488, 295489) c5(295490, 295481, 295492, 295493, 295494, 295495, 295496, 295497, 295498, 295499, 295500, 295501, 295502, 295503, 295504, 295505, 295506, 295507, 295508, 295509, 295510, 295511, 295512, 295513, 295514, 295515, 295516, 295517, 295518, 295519, 295520, 295521, 295522, 295523, 295524, 295525, 295526, 295527, 295528, 295529, 295530, 295531, 295532, 295533, 295534, 295535) c6( ) c7(T, aC, pf, if, fd, bB, ci, x, aE, aeO, DO, K, hu, eL, aeR, aW, g, eF, cm, bw, eM, nB, cj, k, m, gn, wu, ht, n, fr, qN, zP, aje, br, ft, hw, gd, dL, ey, AQ, ag, agF, kp, cM, dB, hk, at, it, B, fM, yk, aA, hy, bX, q, eA, qH, amg, Ig, aT, ae, ne, jf, s, vT, iU, Y, r, en, cl, t, iK, ck, RW, gX, np, rA, bt, iW, jh, ad, av, hd, ib, iY, hP, wm, fb, d, BN, BO, qt, ff, eH, Ej, aF, iR, bz, es, bE, y, X); #c1(AURKA) c2(XP_011527323) c3(aurora kinase A isoform X2) c4( ) c5(321930, 321931, 321932, 321933, 321934, 321935, 321936, 321937, 321938, 321939, 321940, 321941, 321942, 321943, 321944, 321945, 321946, 321947, 321948, 321949, 321950, 321951, 321952, 321953) c6( ) c7(T, aC, pf, if, fd, bB, ci, x, aE, aeO, DO, K, hu, eL, aeR, aW, g, eF, cm, bw, eM, nB, cj, k, m, gn, wu, ht, n, fr, qN, zP, aje, br, ft, hw, gd, dL, ey, AQ, aq, agF, kp, cM, dB, hk, at, it, B, fM, yk, aA, hy, bX, q, eA, qH, amg, Ig, aT, ae, ne, jf, s, vT, iU, Y, r, en, cl, t, iK, ck, RW, gX, np, rA, bt, iW, jh, ad, av, hd, ib, iY, hP, wm, fb, d, BN, BO, qt, ff, eH, Ej, aF, iR, bz, es, bE, y, X); #c1(AURKB) c2(NP_001271455) c3(aurora kinase B isoform 3) c4(103974) c5(103975, 103976, 103977, 103978, 103979) c6( ) c7(T, ht, al, aA, bB, n, fd, ci, hF, pd, q, br, ad, eA, x, av, ft, hd, aE, gd, aT, ey, K, ae, dx, cp, d, iU, aW, Y, ff, r, agF, en, cl, g, t, cm, bz, bw, ck, gk, Dy, eM, dB, bE, gX, cj, hL, np, m, k, bt, it, B, vi); #c1(AURKC) c2(NP_001015878) c3(aurora kinase C isoform 1) c4(26198, 26199) c5(26200, 26201, 26202, 26203, 26204, 26205) c6( ) c7(T, ami, gU, if, aT, r, j, qN, amh, q); #c1(AURKC) c2(NP_001015879) c3(aurora kinase C isoform 2) c4(26206) c5(26207, 26208, 26209, 26210, 26211, 26212, 26213) c6( ) c7(T, ami, gU, if, aT, r, j, qN, amh, g); #c1(AURKC) c2(NP_003151) c3(aurora kinase C isoform 3) c4( ) c5(135725, 135726, 135727, 135728, 135729) c6( ) c7(T, ami, gU, if, aT, r, j, qN, amh, q); #c1(AUTS2) c2(NP_001120703) c3(autism susceptibility gene 2 protein isoform 2) c4(44688) c5(44689, 44690, 44691, 44692, 44693, 44694) c6( ) c7(x, QK, oe, ha, amj, bK, k, nA, j, he, aR, bN); #c1(AUTS2) c2(NP_001120704) c3(autism susceptibility gene 2 protein isoform 3) c4(44695) c5(44696, 44697, 44698, 44699, 44700, 44701) c6( ) c7(x, QK, oe, ha, amj, bK, k, nA, j, he, aR, bN); #c1(AUTS2) c2(NP_056385) c3(autism susceptibility gene 2 protein isoform 1) c4(187378) c5(187379, 187380, 187381, 187382, 187383, 187384) c6( ) c7(x, QK, oe, ha, amj, bK, k, nA, j, he, aR, bN); #c1(AVEN) c2(NP_065104) c3(cell death regulator Aven) c4(203940) c5(203941, 203942, 203943, 203944, 203945, 203946, 203947) c6( ) c7(x, T, aC, ib, eM, iG, Ea, hf, hF); #c1(AVP) c2(NP_000481) c3(vasopressin-neurophysin 2-copeptin preproprotein) c4(9653) c5(9654, 9655, 9656, 9657, 9658, 9659) c6( ) c7(T, uK, e, al, bO, bB, Ja, alS, ci, amn, aE, M, adB, K, hu, aW, Fe, hl, g, hJ, cm, eM, Eh, Gs, amm, ht, amk, aj, ams, ct, ww, cd, ft, cc, amq, adN, Gc, adF, ami, aq, amo, hq, amt, cA, vL, E, it, B, adG, bL, amp, aA, cz, GC, j, il, q, J, qp, aT, cy, bK, an, rz, Fg, yj, qk, amw, amx, r, amr, wA, Rp, iK, FT, bN, amv, ac, amu, lw, rA, uG, Gd, bS, Sv, dG, Gn, kL, av, ot, oz, tT, adD, Gf, dq, aF, Z, bz, dr, gk, bE, dJ, pK, agZ); #c1(AVPI1) c2(NP_068378) c3(arginine vasopressin-induced protein 1) c4(209373) c5(209374, 209375, 209376, 209377, 209378, 209379) c6( ) c7(oe); #c1(AVPR1A) c2(NP_000697) c3(vasopressin V1a receptor) c4( ) c5(14614, 14615, 14616, 14617, 14618) c6( ) c7(bL, aw, EQ, cz, aj, v, ww, cd, J, ft, cc, bK, K, vP, VX, aml, gu, amr, qa, bN, hq, cO, xZ, E, Rm, mk, agZ); #c1(AVPR1A) c2(XP_005269059) c3(vasopressin V1a receptor isoform X1) c4(282268) c5(282269) c6( ) c7(bL, aw, EQ, cz, aj, v, ww, cd, J, ft, cc, bK, K, vP, VX, aml, gu, amr, qa, bN, hq, cO, xZ, E, Rm, mk, agZ); #c1(AVPR1B) c2(NP_000698) c3(vasopressin V1b receptor) c4(14619) c5(14620, 14621, 14622, 14623, 14624, 14625, 14626) c6( ) c7(ft, tb, cA, amy, r, vL, bS, bK, K, ct, ww, Z, q, bN, hq); #c1(AVPR2) c2(NP_001139623) c3(vasopressin V2 receptor isoform 2) c4(59559) c5(59560, 59561, 59562, 59563, 59564, 59565) c6( ) c7(AB, Ay, cz, n, amk, amC, nA, cd, amB, cc, adN, adD, adB, Nj, yj, amA, adF, Hu, dr, vU, amz, xb, adG); #c1(AVPR2) c2(XP_006724891) c3(vasopressin V2 receptor isoform X1) c4(296478) c5(296479, 296480, 296481, 296482, 296483, 296484, 296485, 296486, 296487, 296488, 296489, 296490, 296491) c6( ) c7(AB, Ay, cz, n, amk, amC, nA, cd, amB, cc, adN, adD, adB, Nj, yj, amA, adF, Hu, dr, vU, amz, xb, adG); #c1(AWAT1) c2(NP_001013597) c3(acyl-CoA wax alcohol acyltransferase 1) c4(25623) c5(25624, 25625, 25626, 25627, 25628, 25629) c6( ) c7(amD); #c1(AXDND1) c2(NP_653297) c3(axonemal, dynein light chain domain-containing protein 1) c4(239523) c5(239524, 239525, 239526, 239527, 239528, 239529) c6( ) c7(V, cz); #c1(AXDND1) c2(XP_011507470) c3(axonemal, dynein light chain domain-containing protein 1 isoform X1) c4( ) c5(297357) c6( ) c7(V, cz); #c1(AXDND1) c2(XP_011507472) c3(axonemal, dynein light chain domain-containing protein 1 isoform X3) c4(297358, 297359, 297360) c5( ) c6( ) c7(V, cz); #c1(AXDND1) c2(XP_011507477) c3(axonemal, dynein light chain domain-containing protein 1 isoform X6) c4(297361) c5(297362, 297363, 297364, 297365, 297366, 297367) c6( ) c7(V, cz); #c1(AXDND1) c2(XP_011507481) c3(axonemal, dynein light chain domain-containing protein 1 isoform X10) c4(297368) c5( ) c6( ) c7(V, cz); #c1(AXDND1) c2(XP_011507482) c3(axonemal dynein light chain domain-containing protein 1 isoform X11) c4( ) c5(297369, 297370, 297371, 297372, 297373, 297374, 297375, 297376, 297377, 297378, 297379, 297380, 297381, 297382, 297383, 297384, 297385, 297386) c6( ) c7(V, cz); #c1(AXDND1) c2(XP_011507483) c3(axonemal, dynein light chain domain-containing protein 1 isoform X12) c4( ) c5(297387, 297388, 297389, 297390, 297391) c6( ) c7(V, cz); #c1(AXIN1) c2(NP_003493) c3(axin-1 isoform a) c4(138763) c5(138764, 138765, 138766, 138767, 138768) c6( ) c7(T, al, aA, bB, ci, q, ad, av, amE, aT, K, an, ae, jf, aW, Y, ff, r, aq, aF, si, en, g, bz, amF, bF, gk, bE, gX, bD, B); #c1(AXIN1) c2(NP_851393) c3(axin-1 isoform b) c4(254569) c5(254570, 254571, 254572, 254573, 254574) c6( ) c7(T, al, aA, bB, ci, q, ad, av, amE, aT, K, an, ae, jf, aW, Y, ff, r, aq, aF, si, en, g, bz, amF, bF, gk, bE, gX, bD, B); #c1(AXIN1) c2(XP_011520984) c3(axin-1 isoform X1) c4( ) c5(315951) c6( ) c7(T, al, aA, bB, ci, q, ad, av, amE, aT, K, an, ae, jf, aW, Y, ff, r, aq, aF, si, en, g, bz, amF, bF, gk, bE, gX, bD, B); #c1(AXIN1) c2(XP_011520985) c3(axin-1 isoform X2) c4( ) c5(315952, 315953) c6( ) c7(T, al, aA, bB, ci, q, ad, av, amE, aT, K, an, ae, jf, aW, Y, ff, r, aq, aF, si, en, g, bz, amF, bF, gk, bE, gX, bD, B); #c1(AXIN1) c2(XP_011520989) c3(axin-1 isoform X6) c4(315954) c5(315955, 315956, 315957, 315958, 315959) c6( ) c7(T, al, aA, bB, ci, q, ad, av, amE, aT, K, an, ae, jf, aW, Y, ff, r, aq, aF, si, en, g, bz, amF, bF, gk, bE, gX, bD, B); #c1(AXIN2) c2(XP_011523623) c3(axin-2 isoform X1) c4(318114) c5(318115, 318116, 318117, 318118, 318119, 318120) c6( ) c7(T, aA, bB, fr, aml, ci, V, q, amH, Na, av, amJ, aT, Nc, dL, Qe, jf, A, B, s, aW, Y, r, aq, ahl, Z, t, amG, bz, cm, bF, iO, kP, eM, bE, gX, at, m, X); #c1(AXIN2) c2(XP_011523624) c3(axin-2 isoform X2) c4(318121, 318122) c5(318123, 318124, 318125, 318126, 318127, 318128, 318129, 318130, 318131, 318132, 318133, 318134) c6( ) c7(T, aA, bB, fr, aml, ci, V, q, amH, Na, av, amJ, aT, Nc, dL, Qe, jf, A, B, s, aW, Y, r, aq, ahl, Z, t, amG, bz, cm, bF, iO, kP, eM, bE, gX, at, m, X); #c1(AXL) c2(NP_001690) c3(tyrosine-protein kinase receptor UFO isoform 2 precursor) c4(120008) c5(120009, 120010, 120011, 120012, 120013, 120014) c6( ) c7(bM, T, dD, pf, ht, jh, eq, fr, cd, ad, eA, yn, dP, ib, aE, aT, dL, hu, fb, ae, eL, d, aW, Y, Ls, eH, AQ, kp, yq, g, mo, as, t, pt, bz, eF, Qt, iK, ck, kP, ac, eM, dB, hk, hc, iT, mx, lI, cS, UF, bt, B); #c1(AXL) c2(NP_068713) c3(tyrosine-protein kinase receptor UFO isoform 1 precursor) c4(210112) c5(210113, 210114, 210115, 210116, 210117, 210118) c6( ) c7(bM, T, dD, pf, ht, jh, eq, fr, cd, ad, eA, yn, dP, ib, aE, aT, dL, hu, fb, ae, eL, d, aW, Y, Ls, eH, AQ, kp, yq, g, mo, as, t, pt, bz, eF, Qt, iK, ck, kP, ac, eM, dB, hk, hc, iT, mx, lI, cS, UF, bt, B); #c1(AZGP1) c2(NP_001176) c3(zinc-alpha-2-glycoprotein precursor) c4(72458) c5(72459, 72460, 72461, 72462, 72463, 72464) c6( ) c7(T, al, aA, n, ko, v, ci, ad, av, iu, aE, aT, ae, UF, kl, Jl, aW, kp, aF, g, f, bz, amK, hr, Uw, B); #c1(AZI2) c2(NP_001127904) c3(5-azacytidine-induced protein 2 isoform b) c4( ) c5(49464, 49465, 49466, 49467, 49468, 49469, 49470, 49471) c6( ) c7(iM, je, cr, n, tv, tu, C, af, amL); #c1(AZI2) c2(NP_001127905) c3(5-azacytidine-induced protein 2 isoform c) c4( ) c5(49472, 49473, 49474, 49475, 49476, 49477, 49478, 49479, 49480, 49481, 49482, 49483, 49484, 49485, 49486) c6( ) c7(iM, je, cr, n, tv, tu, C, af, amL); #c1(AZI2) c2(NP_071906) c3(5-azacytidine-induced protein 2 isoform a) c4( ) c5(212219, 212220, 212221, 212222, 212223) c6( ) c7(iM, je, cr, n, tv, tu, C, af, amL); #c1(AZI2) c2(XP_005265450) c3(5-azacytidine-induced protein 2 isoform X4) c4( ) c5(279557) c6( ) c7(iM, je, cr, n, tv, tu, C, af, amL); #c1(AZI2) c2(XP_011532311) c3(5-azacytidine-induced protein 2 isoform X2) c4(328474) c5(328475) c6( ) c7(iM, je, cr, n, tv, tu, C, af, amL); #c1(AZI2) c2(XP_011532312) c3(5-azacytidine-induced protein 2 isoform X3) c4(328476, 328477) c5(328478, 328479) c6( ) c7(iM, je, cr, n, tv, tu, C, af, amL); #c1(AZI2) c2(XP_011532313) c3(5-azacytidine-induced protein 2 isoform X5) c4(328480, 328481) c5(328482, 328483, 328484) c6( ) c7(iM, je, cr, n, tv, tu, C, af, amL); #c1(AZIN1) c2(NP_001288597) c3(antizyme inhibitor 1 isoform 2) c4(113801) c5(113802, 113803, 113804, 113805, 113806, 113807, 113808, 113809, 113810, 113811, 113812, 113813) c6( ) c7(T, jx, ey, it, B, ad); #c1(AZIN1) c2(XP_011515429) c3(antizyme inhibitor 1 isoform X1) c4(308238, 308239) c5(308240, 308241, 308242, 308243, 308244, 308245, 308246, 308247, 308248, 308249) c6( ) c7(T, jx, ey, it, B, ad); #c1(AZIN2) c2(NP_001288754) c3(antizyme inhibitor 2 isoform 3) c4(113968) c5(113969, 113970, 113971, 113972, 113973, 113974, 113975, 113976, 113977, 113978) c6( ) c7(amN, av, Qy, d, eM, Tf, Y, ff, U, aT, cz, amM, m, en, g, as, t, bz); #c1(AZIN2) c2(XP_011538866) c3(antizyme inhibitor 2 isoform X3) c4(336922, 336923) c5(336924, 336925, 336926, 336927, 336928, 336929, 336930, 336931, 336932, 336933, 336934, 336935, 336936, 336937, 336938, 336939) c6( ) c7(amN, av, Qy, d, eM, Tf, Y, ff, U, aT, cz, amM, m, en, g, as, t, bz); #c1(AZU1) c2(NP_001691) c3(azurocidin preproprotein) c4(120015, 120016, 120017, 120018, 120019, 120020, 120021, 120022, 120023, 120024, 120025, 120026, 120027, 120028, 120029, 120030, 120031, 120032, 120033, 120034, 120035, 120036, 120037, 120038, 120039, 120040, 120041, 120042, 120043, 120044, 120045, 120046, 120047, 120048, 120049, 120050, 120051, 120052, 120053, 120054, 120055, 120056, 120057, 120058, 120059, 120060, 120061, 120062, 120063, 120064, 120065, 120066, 120067, 120068, 120069, 120070, 120071, 120072, 120073, 120074, 120075, 120076, 120077) c5(120078, 120079, 120080, 120081, 120082, 120083, 120084, 120085, 120086, 120087, 120088, 120089) c6( ) c7(T, dc, oe, aT, h, ad); #c1(B2M) c2(NP_004039) c3(beta-2-microglobulin precursor) c4(143033, 143034) c5(143035, 143036, 143037, 143038, 143039, 143040, 143041, 143042, 143043, 143044, 143045, 143046, 143047, 143048, 143049, 143050, 143051, 143052, 143053, 143054, 143055, 143056, 143057, 143058, 143059, 143060, 143061) c6(143062) c7(bL, T, fM, dA, Ke, aD, amQ, yG, jh, aA, bB, n, it, fd, fr, ci, aY, V, q, ad, eA, amR, dP, rw, Id, aT, h, yu, rB, K, ji, an, H, nJ, ae, amO, dx, mJ, A, je, s, iU, aW, Y, Zf, ff, eZ, ge, fQ, r, CF, yy, Ej, uF, en, as, iV, YZ, cm, bz, ck, es, bF, amS, iM, abV, eM, iA, bE, eD, cj, gZ, E, amP, dy, Xa, R, Re, y, bt, WX, X, vi); #c1(B2M) c2(XP_006725245) c3(beta-2-microglobulin isoform X1) c4(296747) c5(296748, 296749, 296750, 296751, 296752, 296753, 296754, 296755, 296756, 296757, 296758, 296759, 296760, 296761) c6( ) c7(bL, T, fM, dA, Ke, aD, amQ, yG, jh, aA, bB, n, it, fd, fr, ci, aY, V, q, ad, eA, amR, dP, rw, ld, aT, h, yu, rB, K, ji, an, H, nJ, ae, amO, dx, mJ, A, je, s, iU, aW, Y, Zf, ff, eZ, ge, fQ, r, CF, yy, Ej, uF, en, as, iV, YZ, cm, bz, ck, es, bF, amS, iM, abV, eM, iA, bE, eD, cj, gZ, E, amP, dy, Xa, R, Re, y, bt, WX, X, vi); #c1(B3GALNT1) c2(XP_005247921) c3(UDP-GalNAc:beta-1,3-N-acetylgalactosaminyltransferase 1 isoform X1) c4(268079, 268080, 268081, 268082, 268083, 268084, 268085, 268086) c5(268087, 268088, 268089, 268090, 268091, 268092, 268093, 268094, 268095, 268096, 268097, 268098, 268099, 268100, 268101, 268102, 268103, 268104, 268105, 268106, 268107, 268108, 268109, 268110, 268111, 268112, 268113, 268114, 268115, 268116, 268117, 268118, 268119, 268120, 268121, 268122, 268123, 268124, 268125, 268126, 268127, 268128, 268129, 268130, 268131, 268132, 268133, 268134, 268135, 268136, 268137, 268138, 268139, 268140, 268141, 268142, 268143, 268144, 268145, 268146, 268147, 268148, 268149, 268150, 268151, 268152) c6( ) c7(amT, dB, aE, kp, Ro); #c1(B3GALNT1) c2(XP_011511564) c3(UDP-GalNAc:beta-1,3-N-acetylgalactosaminyltransferase 1 isoform X2) c4( ) c5(302299, 302300) c6( ) c7(amT, dB, aE, kp, Ro); #c1(B3GALNT2) c2(NP_001264084) c3(UDP-GalNAc:beta-1,3-N-acetylgalactnsaminyltransferase 2 isoform 2 precursor) c4(97500, 97501) c5(97502, 97503, 97504, 97505, 97506, 97507, 97508, 97509, 97510, 97511, 97512) c6( ) c7(aW, FB, amU, aT); #c1(B3GALNT2) c2(NP_689703) c3(UDP-GalNAc:beta-1,3-N-acetylgalactnsaminyltransferase 2 isoform 1 precursor) c4(243616) c5(243617, 243618, 243619, 243620, 243621, 243622, 243623) c6( ) c7(aW, FB, amU, aT); #c1(B3GALT2) c2(NP_003774) c3(beta-1,3-galactosyltransferase 2) c4(140734) c5(140735, 140736, 140737, 140738, 140739, 140740) c6( ) c7(bA, an); #c1(B3GALT4) c2(NP_003773) c3(beta-1,3-galactosyltransferase 4) c4(140714) c5(140715, 140716, 140717, 140718, 140719, 140720, 140721, 140722, 140723, 140724, 140725, 140726, 140727, 140728, 140729, 140730, 140731, 140732, 140733) c6( ) c7(eZ); #c1(B3GALT5) c2(NP_149361) c3(beta-1,3-galactosyltransferase 5 isoform a) c4(227500) c5(227501, 227502, 227503, 227504, 227505, 227506, 227507, 227508, 227509, 227510, 227511, 227512, 227513, 227514) c6( ) c7(bE, T, bK, aE, g); #c1(B3GALT5) c2(NP_149362) c3(beta-1,3-galactesyltransferase 5 isoform b) c4( ) c5(227515, 227516, 227517, 227518) c6( ) c7(bE, T, bK, aE, g); #c1(B3GALTL) c2(NP_919299) c3(beta-1,3-glucesyltransferase precursor) c4(258486) c5(258487, 258488, 258489, 258490, 258491, 258492) c6( ) c7(W, HZ, amJ, amV, j, rz); #c1(B3GAT1) c2(XP_011541055) c3(galactosylgalactosylxylosylprotein 3-beta-glucuronosyltransferase 1 isoform X2) c4(339577) c5(339578, 339579, 339580, 339581, 339582, 339583, 339584, 339585, 339586) c6( ) c7(gV, T, bM, Dw, eR, Ke, DD, Or, aA, cz, fd, bS, j, ct, v, q, amW, ad, afb, x, ft, zw, ds, pX, SV, cU, h, amX, hn, K, lQ, amY, be, dx, uM, hM, s, hG, Y, r, fe, gl, as, iV, Z, jT, zM, bz, cm, mK, iP, hq, Cv, ck, kT, acW, NL, Ji, mg, ME, k, y); #c1(B3GAT1) c2(XP_011541057) c3(galactosylgalactosylxylosylprotein 3-beta-glucuronosyltransferase 1 isoform X1) c4(339587) c5(339588, 339589, 339590, 339591, 339592, 339593, 339594, 339595, 339596, 339597, 339598, 339599) c6( ) c7(gV, T, bM, Dw, eR, Ke, DD, Or, aA, cz, fd, bS, j, ct, v, q, amW, ad, afb, x, ft, zw, ds, pX, SV, cU, h, amX, hn, K, lQ, amY, be, dx, uM, hM, s, hG, Y, r, fe, gl, as, iV, Z, jT, zM, bz, cm, mK, iP, hq, Cv, ck, kT, acW, NL, Ji, mg, ME, k, y); #c1(B3GAT2) c2(NP_542780) c3(galactosylgalactosylxylosylprotein 3-beta-glucuronosyltransferase 2) c4(233049) c5(233050, 233051, 233052, 233053, 233054, 233055) c6( ) c7(qb); #c1(B3GAT3) c2(NP_001275652) c3(galactosylgalactosylxylosylprotein 3-beta-glucurenosyItransferase 3 isoform 4) c4(106906) c5(106907, 106908, 106909, 106910, 106911, 106912) c6( ) c7(LB, amF, fG, Az, bD, si, amZ); #c1(B3GAT3) c2(NP_036332) c3(galactosylgalactosylxylosylprotein 3-beta-glucuronosyltransferase 3 isoform 1) c4(173040) c5(173041, 173042, 173043, 173044, 173045, 173046) c6( ) c7(LB, amF, fG, Az, bD, si, amZ); #c1(B3GNT2) c2(XP_011530788) c3(N-acetyllactosaminide beta-1,3-N-acetylglucosaminyltransferase 2 isoform X1) c4(326839) c5(326840, 326841, 326842, 326843, 326844, 326845, 326846, 326847, 326848, 326849) c6( ) c7(aC, mR, fq, eZ, hD, y, ae, ad); #c1(B3GNT3) c2(XP_011525929) c3(N-acetyllactesaminide beta-1,3-N-acetylglucosaminyltransferase 3 isoform X1) c4(320335) c5(320336, 320337, 320338, 320339, 320340, 320341) c6( ) c7(cm, vj, ds, T, iW); #c1(B3GNT5) c2(XP_011511531) c3(lactosylceramide 1,3-N-acetyl-beta-D-glucosaminyltransferase isoform X1) c4(302181, 302182, 302183, 302184) c5(302185, 302186, 302187, 302188, 302189, 302190, 302191, 302192, 302193, 302194, 302195, 302196, 302197, 302198, 302199, 302200, 302201, 302202, 302203, 302204, 302205, 302206, 302207, 302208, 302209, 302210, 302211, 302212, 302213, 302214, 302215, 302216) c6( ) c7(d); #c1(B3GNT6) c2(NP_619651) c3(UDP-GlcNAc:betaGal, beta-1,3-N-acetylglucosaminyltransferase 6) c4(237021, 237022, 237023, 237024) c5(237025, 237026, 237027, 237028, 237029, 237030, 237031, 237032, 237033, 237034, 237035, 237036, 237037, 237038, 237039, 237040, 237041, 237042, 237043, 237044, 237045, 237046, 237047, 237048, 237049) c6( ) c7(bF, T, aC, aE, s, bE, ci); #c1(B3GNT8) c2(NP_940942) c3(UDP-GlcNAc:betaGal, beta-1,3-N-acetylglucnsaminyltransferase 8 precursor) c4(260167) c5(260168, 260169, 260170, 260171, 260172, 260173) c6( ) c7(bB, bE, X); #c1(B3GNTL1) c2(XP_006722335) c3(UDP-GlcNAc:betaGal, beta-1,3-N-acetylglucnsaminyltransferase-like protein 1 isoform X3) c4(294675) c5(294676, 294677, 294678, 294679, 294680, 294681) c6( ) c7(bB, bE); #c1(B4GALNT1) c2(NP_001263398) c3(beta-1,4 N-acetylgalactosaminyltransferase 1 isoform 3 precursor) c4( ) c5(97246, 97247, 97248, 97249, 97250, 97251, 97252, 97253, 97254, 97255, 97256, 97257) c6( ) c7(T, A, Y, gX, aT, cm, ci, ana, B, Qe); #c1(B4GALNT1) c2(NP_001469) c3(beta-1,4 N-acetylgalactnsaminyltransferase 1 isoform 1 precursor) c4(117980) c5(117981, 117982, 117983, 117984, 117985, 117986) c6( ) c7(T, A, Y, gX, aT, cm, ci, ana, B, Qe); #c1(B4GALNT1) c2(XP_005268830) c3(beta-1,4 N-acetylgalactnsaminyltransferase 1 isoform X2) c4(282110) c5( ) c6( ) c7(T, A, Y, gX, aT, cm, ci, ana, B, Qe); #c1(B4GALNT1) c2(XP_011536449) c3(beta-1,4 N-acetylgalactnsaminyltransferase 1 isoform X1) c4(333814) c5( ) c6( ) c7(T, A, Y, gX, aT, cm, ci, ana, B, Qe); #c1(B4GALNT2) c2(NP_001152859) c3(beta-1,4 N-acetylgalactnsaminyltransferase 2 isoform b) c4(60192) c5(60193, 60194, 60195, 60196, 60197, 60198) c6( ) c7(bL, T, dD, ZV, Zz, ea, e, aw, aA, sM, cz, vr, bS, j, ct, ci, eq, q, ad, av, ec, rS, aT, h, jj, dQ, eN, hm, VC, bf, cW, aW, xs, Zt, r, uY, aF, Z, ck, ac, nB, wE, aka, vb, gX, hE, B); #c1(B4GALNT2) c2(NP_001152860) c3(beta-1,4 N-acetylgalactosaminyltransferase 2 isoform c) c4(60199) c5( ) c6( ) c7(bL, T, dD, ZV, Zz, ea, e, aw, aA, sM, cz, vr, bS, j, ct, ci, eq, q, ad, av, ec, rS, aT, h, jj, dQ, eN, hm, VC, bf, cW, aW, xs, Zt, r, uY, aF, Z, ck, ac, nB, wE, aka, vb, gX, hE, B); #c1(B4GALNT2) c2(NP_703147) c3(beta-1,4 N-acetylgalactosaminyltransferase 2 isoform a) c4(245991) c5(245992, 245993, 245994, 245995, 245996, 245997, 245998, 245999, 246000, 246001, 246002, 246003) c6( ) c7(bL, T, dD, ZV, Zz, ea, e, aw, aA, sM, cz, vr, bS, j, ct, ci, eq, q, ad, av, ec, rS, aT, h, jj, dQ, eN, hm, VC, bf, cW, aW, xs, Zt, r, uY, aF, Z, ck, ac, nB, wE, aka, vb, gX, hE, B); #c1(B4GALNT3) c2(NP_775864) c3(beta-1,4-N-acetylgalactnsaminyltransferase 3) c4(250510) c5(250511, 250512, 250513, 250514, 250515, 250516) c6( ) c7(gZ); #c1(B4GALT1) c2(NP_001488) c3(beta-1,4-galactosyltransferase 1) c4(118136, 118137, 118138) c5(118139, 118140, 118141, 118142, 118143, 118144, 118145, 118146, 118147, 118148, 118149, 118150, 118151, 118152, 118153, 118154, 118155, 118156) c6( ) c7(ck, bM, T, ul, B, av, af, oj, r, vr, q, g, anb, anc); #c1(B4GALT1) c2(XP_005251497) c3(beta-1,4-galactosyltransferase 1 isoform X1) c4(270967) c5(270968, 270969, 270970, 270971, 270972, 270973) c6( ) c7(ck, bM, T, ul, B, av, af, oj, r, vr, q, g, anb, anc); #c1(B4GALT3) c2(NP_003770) c3(beta-1,4-galactnsyltransferase 3) c4(140685, 140686, 140687, 140688, 140689) c5(140690, 140691, 140692, 140693, 140694, 140695, 140696, 140697, 140698, 140699, 140700, 140701, 140702, 140703, 140704, 140705, 140706, 140707, 140708, 140709, 140710, 140711, 140712, 140713) c6( ) c7(cm, q, r); #c1(B4GALT3) c2(XP_011508395) c3(beta-1,4-galactosyltransferase 3 isoform X2) c4( ) c5(299087, 299088, 299089, 299090, 299091, 299092, 299093, 299094, 299095, 299096, 299097) c6( ) c7(cm, q, r); #c1(B4GALT4) c2(NP_997708) c3(beta-1,4-galactnsyltransferase 4) c4(265731, 265732, 265733, 265734, 265735) c5(265736, 265737, 265738, 265739, 265740, 265741, 265742, 265743, 265744, 265745, 265746, 265747, 265748, 265749, 265750, 265751, 265752, 265753, 265754) c6( ) c7(ad); #c1(B4GALT4) c2(XP_005247914) c3(beta-1,4-galactosyltransferase 4 isoform X2) c4(268053) c5(268054, 268055, 268056, 268057, 268058, 268059, 268060, 268061, 268062, 268063, 268064, 268065, 268066, 268067, 268068, 268069, 268070, 268071, 268072, 268073, 268074, 268075, 268076, 268077, 268078) c6( ) c7(ad); #c1(B4GALT5) c2(NP_004767) c3(beta-1,4-galactnsyltransferase 5) c4(149438) c5(149439, 149440, 149441, 149442, 149443, 149444) c6( ) c7(ck, T, q); #c1(B4GALT6) c2(NP_004766) c3(beta-1,4-galactnsyltransferase 6) c4(149417, 149418, 149419) c5(149420, 149421, 149422, 149423, 149424, 149425, 149426, 149427, 149428, 149429, 149430, 149431, 149432, 149433, 149434, 149435, 149436, 149437) c6( ) c7(c); #c1(B4GALT7) c2(NP_009186) c3(beta-1,4-galactnsyltransferase 7) c4(171373) c5(171374, 171375, 171376, 171377, 171378, 171379, 171380, 171381, 171382) c6( ) c7(Az, uo, aq, K, Eh, B, and, anc); #c1(B4GALT7) c2(XP_011532723) c3(beta-1,4-galactnsyltransferase 7 isoform X1) c4(328792) c5(328793, 328794, 328795, 328796, 328797) c6( ) c7(Az, uo, aq, K, Eh, B, and, anc); #c1(B4GAT1) c2(NP_006867) c3(beta-1,4-glucurnnyltransferase 1) c4(168738, 168739) c5(168740, 168741, 168742, 168743, 168744, 168745, 168746, 168747, 168748, 168749, 168750, 168751) c6( ) c7(ane); #c1(B9D1) c2(NP_001230404) c3(B9 domain-containing protein 1 isoform c) c4(86281) c5(86282, 86283, 86284, 86285, 86286) c6( ) c7(anf, zG, age); #c1(B9D1) c2(NP_056496) c3(B9 domain-containing protein 1 isoform b) c4(187775) c5(187776, 187777, 187778, 187779, 187780, 187781, 187782, 187783, 187784, 187785) c6( ) c7(anf, zG, age); #c1(B9D1) c2(XP_005256664) c3(B9 domain-containing protein 1 isoform X4) c4(274267) c5(274268, 274269, 274270, 274271, 274272, 274273) c6( ) c7(anf, zG, ago); #c1(B9D1) c2(XP_005256666) c3(B9 domain-containing protein 1 isoform X6) c4(274274) c5(274275, 274276, 274277, 274278, 274279, 274280) c6( ) c7(anf, zG, ago); #c1(B9D1) c2(XP_005256667) c3(B9 domain-containing protein 1 isoform X7) c4(274281) c5(274282, 274283, 274284, 274285, 274286, 274287) c6( ) c7(anf, zG, ago); #c1(B9D1) c2(XP_011522095) c3(B9 domain-containing protein 1 isoform X1) c4(316739) c5(316740, 316741, 316742, 316743, 316744, 316745) c6( ) c7(anf, zG, ago); #c1(B9D1) c2(XP_011522096) c3(B9 domain-containing protein 1 isoform X3) c4( ) c5(316746) c6( ) c7(anf, zG, ago); #c1(B9D2) c2(NP_085055) c3(B9 domain-containing protein 2) c4(219228) c5(219229, 219230, 219231, 219232, 219233, 219234) c6( ) c7(dy, ang, ago, dL, sj); #c1(BAALC) c2(NP_001019543) c3(brain and acute leukemia cytoplasmic protein isoform 2) c4( ) c5(27784, 27785, 27786, 27787, 27788, 27789) c6( ) c7(ck, x, T, GU, gm, hn, k, jj, hF, bt, er); #c1(BAALC) c2(NP_079088) c3(brain and acute leukemia cytoplasmic protein isoform 1) c4(216946, 216947, 216948) c5(216949, 216950, 216951, 216952, 216953, 216954, 216955, 216956, 216957, 216958, 216959, 216960) c6( ) c7(ck, x, T, GU, gm, hn, k, jj, hF, bt, er); #c1(BAAT) c2(NP_001692) c3(bile acid-CoA:amino acid N-acyltransferase) c4(120090) c5(120091, 120092, 120093, 120094, 120095, 120096, 120097, 120098, 120099, 120100) c6( ) c7(T, aA, bB, v, ci, C, q, cF, hd, aT, Yi, A, BO, s, aW, r, Ph, aF, cl, cl, nB, bE, bt, anh, ani); #c1(BABAM1) c2(NP_001275685) c3(BRISC and BRCA1-A complex member 1 isoform 1) c4(107047, 107048, 107049) c5(107050, 107051, 107052, 107053, 107054, 107055, 107056, 107057, 107058, 107059, 107060, 107061, 107062, 107063, 107064, 107065, 107066, 107067, 107068, 107069, 107070, 107071) c6( ) c7(aW, t, m, aT); #c1(BABAM1) c2(NP_001275686) c3(BRISC and BRCA1-A complex member 1 isoform 2) c4(107072) c5(107073, 107074, 107075, 107076, 107077, 107078) c6( ) c7(aW, t, m, aT); #c1(BACE1) c2(NP_001193978) c3(beta-secretase 1 isoform F) c4(83399) c5(83400, 83401, 83402, 83403, 83404, 83405, 83406, 83407, 83408, 83409, 83410) c6( ) c7(bL, e, ha, l, aj, uu, V, fK, J, anj, akN, sO, ds, K, H, af, ak, aaO, f, alj, cm, eK, acS, eD, dJ, U, oh, aS, R, xg, L); #c1(BACE1) c2(NP_036236) c3(beta-secretase 1 isoform A preproprotein) c4(172554, 172555) c5(172556, 172557, 172558, 172559, 172560, 172561, 172562) c6( ) c7(bL, e, ha, l, aj, uu, V, fK, J, anj, akN, sO, ds, K, H, af, ak, aaO, f, alj, cm, eK, acS, eD, dJ, U, oh, aS, R, xg, L); #c1(BACE1) c2(NP_620427) c3(beta-secretase 1 isoform C preproprotein) c4(237625) c5(237626, 237627, 237628, 237629, 237630, 237631) c6( ) c7(bL, e, ha, l, aj, uu, V, fK, J, anj, akN, sO, ds, K, H, af, ak, aaO, f, alj, cm, eK, acS, eD, dJ, U, oh, aS, R, xg, L); #c1(BACE1) c2(NP_620428) c3(beta-secretase 1 isoform B preproprotein) c4(237632) c5(237633, 237634, 237635, 237636, 237637, 237638) c6( ) c7(bL, e, ha, l, aj, uu, V, fK, J, anj, akN, sO, ds, K, H, af, ak, aaO, f, alj, cm, eK, acS, eD, dJ, U, oh, aS, R, xg, L); #c1(BACE1) c2(NP_620429) c3(beta-secretase 1 isoform D preproprotein) c4(237639) c5(237640, 237641, 237642, 237643, 237644, 237645) c6( ) c7(bL, e, ha, l, aj, uu, V, fK, J, anj, akN, sO, ds, K, H, af, ak, aaO, f, alj, cm, eK, acS, eD, dJ, U, oh, aS, R, xg, L); #c1(BACE2) c2(NP_036237) c3(beta-secretase 2 isoform A preproprotein) c4(172563, 172564) c5(172565, 172566, 172567, 172568, 172569, 172570, 172571, 172572, 172573, 172574, 172575, 172576) c6( ) c7(anj, T, hq, aW, aw, aT, FS, K, aaO, f, alj, af, L); #c1(BACE2) c2(NP_620476) c3(beta-secretase 2 isoform C preproprotein) c4(237680) c5(237681, 237682, 237683, 237684, 237685, 237686) c6( ) c7(anj, T, hq, aW, aw, aT, FS, K, aaO, f, alj, af, L); #c1(BACE2) c2(NP_620477) c3(beta-secretase 2 isoform B preproprotein) c4(237687) c5(237688, 237689, 237690, 237691, 237692, 237693) c6( ) c7(anj, T, hq, aW, aw, aT, FS, K, aaO, f, alj, af, L); #c1(BACH1) c2(NP_996749) c3(transcription regulator protein BACH1) c4(264424, 264425, 264426, 264427, 264428) c5(264429, 264430, 264431, 264432, 264433, 264434, 264435, 264436, 264437, 264438, 264439, 264440, 264441, 264442, 264443, 264444, 264445, 264446, 264447, 264448, 264449, 264450, 264451, 264452, 264453, 264454, 264455, 264456, 264457, 264458, 264459, 264460, 264461, 264462, 264463, 264464, 264465, 264466, 264467, 264468, 264469, 264470, 264471, 264472, 264473, 264474, 264475, 264476, 264477, 264478, 264479) c6( ) c7(T, os, aC, jx, n, oZ, F, aT, h, ji, K, af, aW, aq, zE, f, bz, t, fq, dc, m, bt, B); #c1(BACH2) c2(XP_005248815) c3(transcription regulator protein BACH2 isoform X2) c4(268594) c5(268595, 268596, 268597, 268598) c6( ) c7(bL, bM, T, aC, fM, EQ, aA, jh, n, cL, aj, j, gj, V, J, hD, h, hn, K, pk, A, iU, Of, Og, aF, hp, iV, t, cm, ck, ac, hr, cj, m, y, bt); #c1(BACH2) c2(XP_005248816) c3(transcription regulator protein BACH2 isoform X1) c4(268599) c5(268600, 268601, 268602, 268603, 268604, 268605, 268606, 268607, 268608, 268609, 268610) c6( ) c7(bL, bM, T, aC, fM, EQ, aA, jh, n, cL, aj, j, gj, V, J, hD, h, hn, K, pk, A, iU, Of, Og, aF, hp, iV, t, cm, ck, ac, hr, cj, m, y, bt); #c1(BACH2) c2(XP_011534344) c3(transcription regulator protein BACH2 isoform X3) c4( ) c5(330720, 330721) c6( ) c7(bL, bM, T, aC, fM, EQ, aA, jh, n, cL, aj, j, qj, V, J, hD, h, hn, K, pk, A, iU, Of, Og, aF, hp, iV, t, cm, ck, ac, hr, cj, m, y, bt); #c1(BACH2) c2(XP_011534345) c3(transcription regulator protein BACH2 isoform X4) c4( ) c5(330722, 330723, 330724, 330725, 330726, 330727, 330728, 330729) c6( ) c7(bL, bM, T, aC, fM, EQ, aA, jh, n, cL, aj, j, gj, V, J, hD, h, hn, K, pk, A, iU, Of, Og, aF, hp, iV, t, cm, ck, ac, hr, cj, m, y, bt); #c1(BAD) c2(NP_004313) c3(bcl2 antagonist of cell death) c4(145081, 145082) c5(145083, 145084, 145085, 145086, 145087, 145088, 145089, 145090, 145091, 145092, 145093, 145094, 145095, 145096, 145097, 145098) c6( ) c7(T, fM, fR, fG, iW, eX, aA, bB, v, ci, q, cd, ad, eA, av, ft, Bc, aT, IG, cy, eV, K, bq, an, ae, eu, B, aW, Y, r, vs, g, cl, dw, t, cm, iP, ck, hL, wR, m, bt, X); #c1(BAG1) c2(NP_001165886) c3(BAG family molecular chaperone regulator 1 isoform BAG-1S) c4( ) c5(67920, 67921, 67922, 67923, 67924, 67925, 67926, 67927, 67928, 67929) c6( ) c7(T, anl, iH, aD, if, iW, aA, bB, n, hy, ci, qN, q, ad, eA, iu, tg, cF, aE, WY, ds, aT, IG, DO, bK, K, oi, ae, af, d, BN, B, s, gt, aW, ff, Rr, r, gl, aaE, aF, en, g, bz, ck, bP, c, eM, bE, ank, X, bt, ne); #c1(BAG1) c2(NP_004314) c3(BAG family molecular chaperone regulator 1 isoform BAG-1L) c4(145099, 145100, 145101) c5(145102, 145103, 145104, 145105, 145106, 145107, 145108, 145109) c6( ) c7(T, anl, iH, aD, if, iW, aA, bB, n, hy, ci, qN, q, ad, eA, iu, tg, cF, aE, WY, ds, aT, IG, DO, bK, K, oi, ae, af, d, BN, B, s, qt, aW, ff, Rr, r, gl, aaE, aF, en, g, bz, ck, bP, c, eM, bE, ank, X, bt, ne); #c1(BAG3) c2(NP_004272) c3(BAG family molecular chaperone regulator 3) c4(144757) c5(144758, 144759, 144760, 144761, 144762, 144763) c6( ) c7(T, aC, fR, iW, bB, hy, anm, fu, lu, cd, ad, hd, aE, oj, aT, h, IG, K, ni, ae, uQ, d, BN, B, aW, ff, xs, wc, lo, en, me, t, cm, hq, ck, kP, ac, nB, bE, mx, gX, bk, m, ano, bt, ann, ne); #c1(BAG3) c2(XP_005270344) c3(BAG family molecular chaperone regulator 3 isoform X1) c4(283355) c5(283356, 283357, 283358, 283359, 283360, 283361) c6( ) c7(T, aC, fR, iW, bB, hy, anm, fu, lu, cd, ad, hd, aE, oj, aT, h, IG, K, oi, ae, uQ, d, BN, B, aW, ff, xs, wc, lo, en, mo, t, cm, hq, ck, kP, ac, nB, bE, mx, gX, bk, m, ano, bt, ann, ne); #c1(BAG4) c2(NP_001191807) c3(BAG family molecular chaperone regulator 4 isoform 2) c4(81834) c5(81835, 81836, 81837, 81838, 81839, 81840) c6( ) c7(T, ci, iW); #c1(BAG4) c2(NP_004865) c3(BAG family molecular chaperone regulator 4 isoform 1) c4(150428) c5(150429, 150430, 150431, 150432, 150433, 150434) c6( ) c7(T, ci, iW); #c1(BAG5) c2(NP_001015049) c3(BAG family molecular chaperone regulator 5 isoform a) c4(26142) c5(26143, 26144, 26145, 26146, 26147, 26148, 26149, 26150, 26151) c6( ) c7(BN, iW, hy, K, ae, ne, ad); #c1(BAG5) c2(NP_004864) c3(BAG family molecular chaperone regulator 5 isoform b) c4(150413, 150414) c5(150415, 150416, 150417, 150418, 150419, 150420, 150421, 150422, 150423, 150424, 150425, 150426, 150427) c6( ) c7(BN, iW, hy, K, ae, ne, ad); #c1(BAG6) c2(NP_001186626) c3(large proline-rich protein BAG6 isoform c) c4(78003, 78004) c5(78005, 78006, 78007, 78008, 78009, 78010, 78011, 78012, 78013, 78014, 78015, 78016, 78017, 78018, 78019, 78020, 78021, 78022, 78023, 78024, 78025, 78026, 78027, 78028, 78029, 78030, 78031, 78032, 78033, 78034, 78035, 78036, 78037, 78038, 78039, 78040, 78041, 78042, 78043, 78044, 78045, 78046, 78047, 78048, 78049, 78050, 78051, 78052, 78053, 78054, 78055, 78056, 78057, 78058, 78059, 78060, 78061, 78062, 78063, 78064, 78065, 78066, 78067, 78068, 78069, 78070, 78071, 78072, 78073, 78074, 78075, 78076, 78077, 78078, 78079, 78080, 78081, 78082, 78083, 78084, 78085, 78086, 78087, 78088, 78089, 78090, 78091, 78092, 78093, 78094, 78095, 78096, 78097, 78098, 78099, 78100, 78101, 78102, 78103, 78104, 78105, 78106, 78107, 78108, 78109, 78110, 78111, 78112, 78113, 78114, 78115, 78116, 78117, 78118, 78119, 78120, 78121, 78122, 78123, 78124, 78125, 78126, 78127, 78128, 78129, 78130, 78131, 78132, 78133, 78134, 78135, 78136, 78137, 78138, 78139, 78140, 78141, 78142, 78143, 78144, 78145, 78146, 78147, 78148, 78149, 78150, 78151, 78152, 78153, 78154, 78155, 78156, 78157, 78158, 78159, 78160, 78161, 78162, 78163, 78164, 78165, 78166, 78167, 78168, 78169, 78170, 78171, 78172, 78173, 78174, 78175, 78176, 78177, 78178, 78179, 78180, 78181, 78182, 78183, 78184, 78185, 78186, 78187, 78188, 78189, 78190, 78191, 78192, 78193, 78194, 78195, 78196, 78197, 78198, 78199, 78200, 78201) c6( ) c7(T, iQ, od, eF, ht, cE, eZ, cj, fd, PD, k, C, g, bD, lf, bz, iu, y); #c1(BAG6) c2(NP_001186627) c3(large proline-rich protein BAG6 isoform d) c4(78202) c5(78203, 78204, 78205, 78206, 78207, 78208, 78209, 78210, 78211, 78212, 78213, 78214, 78215, 78216, 78217, 78218, 78219, 78220, 78221, 78222, 78223, 78224, 78225, 78226, 78227, 78228, 78229, 78230, 78231, 78232, 78233, 78234, 78235, 78236, 78237, 78238, 78239, 78240, 78241, 78242, 78243, 78244, 78245, 78246, 78247, 78248, 78249, 78250, 78251, 78252, 78253, 78254, 78255, 78256, 78257, 78258, 78259, 78260, 78261, 78262, 78263, 78264, 78265, 78266, 78267, 78268, 78269, 78270, 78271, 78272, 78273, 78274, 78275, 78276, 78277, 78278, 78279, 78280, 78281, 78282, 78283, 78284) c6( ) c7(T, iQ, od, eF, ht, cE, eZ, cj, fd, pD, k, C, g, bD, lf, bz, iu, y); #c1(BAG6) c2(NP_004630) c3(large proline-rich protein BAG6 isoform a) c4(148296, 148297, 148298) c5(148299, 148300, 148301, 148302, 148303, 148304, 148305, 148306, 148307, 148308, 148309, 148310, 148311, 148312, 148313, 148314, 148315, 148316, 148317, 148318, 148319, 148320, 148321, 148322, 148323, 148324, 148325, 148326, 148327, 148328, 148329, 148330, 148331, 148332, 148333, 148334, 148335, 148336, 148337, 148338, 148339, 148340, 148341, 148342, 148343, 148344, 148345, 148346, 148347, 148348, 148349, 148350) c6( ) c7(T, iQ, od, eF, ht, cE, eZ, cj, fd, pD, k, C, g, bD, lf, bz, iu, y); #c1(BAG6) c2(NP_542433) c3(large proline-rich protein BAG6 isoform b) c4(232877, 232878, 232879, 232880, 232881, 232882, 232883) c5(232884, 232885, 232886, 232887, 232888, 232889, 232890, 232891, 232892, 232893, 232894, 232895, 232896, 232897, 232898, 232899, 232900, 232901, 232902, 232903, 232904, 232905, 232906, 232907, 232908, 232909, 232910, 232911, 232912, 232913, 232914, 232915, 232916, 232917, 232918, 232919, 232920, 232921, 232922, 232923, 232924, 232925, 232926, 232927, 232928, 232929, 232930, 232931, 232932, 232933, 232934, 232935, 232936, 232937, 232938, 232939) c6( ) c7(T, iQ, od, eF, ht, cE, eZ, cj, fd, pD, k, C, g, bD, lf, bz, iu, y); #c1(BAG6) c2(XP_006715255) c3(large proline-rich protein BAG6 isoform X6) c4(289090, 289091, 289092) c5(289093, 289094, 289095, 289096, 289097, 289098, 289099, 289100, 289101, 289102, 289103, 289104, 289105, 289106, 289107, 289108, 289109, 289110, 289111, 289112, 289113, 289114, 289115, 289116, 289117, 289118, 289119, 289120) c6( ) c7(T, iQ, nd, eF, ht, cE, eZ, cj, fd, pD, k, C, g, bD, lf, bz, iu, y); #c1(BAG6) c2(XP_006715264) c3(large proline-rich protein BAG6 isoform X15) c4( ) c5(289121, 289122, 289123, 289124, 289125, 289126, 289127, 289128, 289129, 289130, 289131, 289132, 289133, 289134, 289135, 289136, 289137, 289138, 289139, 289140, 289141, 289142, 289143, 289144, 289145, 289146) c6( ) c7(T, iQ, od, eF, ht, cE, eZ, cj, fd, pD, k, C, g, bD, lf, bz, iu, y); #c1(BAG6) c2(XP_006725986) c3(large proline-rich protein BAG6 isoform X6) c4(297037, 297038) c5( ) c6( ) c7(T, iQ, od, eF, ht, cE, eZ, cj, fd, pD, k, C, g, bD, lf, bz, iu, y); #c1(BAG6) c2(XP_011513199) c3(large proline-rich protein BAG6 isoform X4) c4(305231) c5( ) c6( ) c7(T, iQ, od, eF, ht, cE, eZ, cj, fd, pD, k, C, g, bD, lf, bz, iu, y); #c1(BAG6) c2(XP_011513202) c3(large proline-rich protein BAG6 isoform X7) c4(305232) c5( ) c6( ) c7(T, iQ, od, eF, ht, cE, eZ, cj, fd, pD, k, C, g, bD, lf, bz, iu, y); #c1(BAG6) c2(XP_011513203) c3(large proline-rich protein BAG6 isoform X8) c4(305233, 305234) c5( ) c6( ) c7(T, iQ, od, eF, ht, cE, eZ, cj, fd, pD, k, C, g, bD, lf, bz, iu, y); #c1(BAG6) c2(XP_011513205) c3(large proline-rich protein BAG6 isoform X11) c4(305235) c5( ) c6( ) c7(T, iQ, od, eF, ht, cE, eZ, cj, fd, pD, k, C, g, bD, lf, bz, iu, y); #c1(BAG6) c2(XP_011513207) c3(large proline-rich protein BAG6 isoform X13) c4(305236, 305237) c5(305238, 305239, 305240, 305241, 305242, 305243, 305244, 305245, 305246, 305247, 305248, 305249, 305250, 305251, 305252, 305253, 305254, 305255, 305256, 305257, 305258, 305259, 305260, 305261) c6( ) c7(T, iQ, od, eF, ht, cE, eZ, cj, fd, pD, k, C, g, bD, lf, bz, iu, y); #c1(BAG6) c2(XP_011513209) c3(large proline-rich protein BAG6 isoform X16) c4(305262) c5(305263, 305264, 305265, 305266, 305267, 305268, 305269, 305270, 305271, 305272, 305273, 305274, 305275, 305276, 305277, 305278, 305279, 305280, 305281, 305282, 305283, 305284, 305285, 305286, 305287, 305288, 305289, 305290, 305291, 305292, 305293, 305294, 305295, 305296, 305297, 305298, 305299, 305300, 305301, 305302, 305303, 305304, 305305, 305306, 305307, 305308, 305309, 305310, 305311, 305312, 305313, 305314, 305315, 305316, 305317, 305318) c6( ) c7(T, iQ, od, eF, ht, cE, eZ, cj, fd, pD, k, C, g, bD, lf, bz, iu, y); #c1(BAG6) c2(XP_011513210) c3(large proline-rich protein BAG6 isoform X17) c4( ) c5(305319, 305320, 305321, 305322, 305323, 305324, 305325, 305326, 305327, 305328, 305329, 305330, 305331, 305332, 305333, 305334, 305335, 305336, 305337, 305338, 305339, 305340, 305341, 305342, 305343, 305344, 305345, 305346, 305347, 305348, 305349, 305350, 305351, 305352, 305353, 305354, 305355, 305356, 305357, 305358, 305359, 305360, 305361, 305362, 305363, 305364, 305365, 305366, 305367, 305368, 305369, 305370, 305371, 305372, 305373, 305374, 305375, 305376, 305377, 305378, 305379, 305380, 305381, 305382, 305383, 305384, 305385, 305386, 305387, 305388, 305389, 305390, 305391, 305392, 305393, 305394, 305395, 305396, 305397, 305398, 305399, 305400, 305401, 305402, 305403, 305404, 305405, 305406, 305407, 305408, 305409, 305410, 305411, 305412, 305413, 305414, 305415, 305416, 305417, 305418, 305419, 305420, 305421, 305422, 305423, 305424, 305425, 305426, 305427, 305428, 305429, 305430, 305431, 305432, 305433, 305434, 305435, 305436) c6( ) c7(T, iQ, od, eF, ht, cE, eZ, cj, fd, pD, k, C, g, bD, lf, bz, iu, y); #c1(BAG6) c2(XP_011546389) c3(large proline-rich protein BAGG isoform X5) c4(345168) c5( ) c6( ) c7(T, iQ, od, eF, ht, cE, eZ, cj, fd, PD, k, C, g, bD, lf, bz, iu, y); #c1(BAG6) c2(XP_011546397) c3(large proline-rich protein BAG6 isoform X14) c4(345169) c5( ) c6( ) c7(T, iQ, od, eF, ht, cE, eZ, cj, fd, pD, k, C, g, bD, lf, bz, iu, y); #c1(BAIAP2L1) c2(NP_061330) c3(brain-specific angiogenesis inhibitor 1-associated protein 2-like protein 1) c4(200043) c5(200044, 200045, 200046, 200047, 200048, 200049, 200050, 200051) c6( ) c7(y, ad); #c1(BAIAP3) c2(NP_001186025) c3(BAI1-associated protein 3 isoform 2) c4(76887) c5(76888, 76889, 76890, 76891, 76892, 76893, 76894, 76895, 76896, 76897, 76898, 76899) c6( ) c7(anp, T, ac, hq); #c1(BAIAP3) c2(NP_001186026) c3(BAI1-associated protein 3 isoform 3) c4(76900, 76901) c5( ) c6( ) c7(anp, T, ac, hg); #c1(BAIAP3) c2(NP_003924) c3(BAI1-associated protein 3 isoform 1) c4(142212) c5(142213, 142214, 142215, 142216, 142217, 142218, 142219, 142220, 142221, 142222, 142223, 142224) c6( ) c7(anp, T, ac, hq); #c1(BAIAP3) c2(XP_011521030) c3(BAI1-associated protein 3 isoform X1) c4(315973) c5(315974, 315975, 315976, 315977, 315978, 315979, 315980, 315981, 315982, 315983) c6( ) c7(anp, T, ac, hq); #c1(BAKI) c2(NP_001179) c3(bcl-2 homologous antagonist/killer) c4(73317, 73318, 73319) c5(73320, 73321, 73322, 73323, 73324, 73325, 73326, 73327, 73328, 73329, 73330, 73331, 73332, 73333, 73334, 73335, 73336, 73337, 73338, 73339, 73340, 73341) c6( ) c7(T, if, iW, aA, ci, bX, qN, eA, av, ib, HG, kH, aT, hD, iv, dL, cp, je, bf, s, vT, aW, Y, ff, r, fQ, aF, hp, Hu, en, bu, dw, bz, Ld, op, iM, eM, nB, vA, gX, cj, at, bm, m, y, X); #c1(BAMB1) c2(NP_036474) c3(BMP and activin membrane-bound inhibitor homolog precursor) c4(174126, 174127) c5(174128, 174129, 174130, 174131, 174132, 174133, 174134, 174135, 174136, 174137, 174138, 174139) c6( ) c7(T, B, NE, bE, aW, fc, r, aT, bB, aq, dL, v, ci, cm, eL, q); #c1(BANF1) c2(NP_001137457) c3(barrier-to-autointegration factor) c4(55807, 55808) c5(55809, 55810, 55811, 55812, 55813, 55814, 55815, 55816, 55817, 55818, 55819, 55820, 55821, 55822, 55823, 55824, 55825, 55826, 55827, 55828, 55829, 55830, 55831, 55832) c6( ) c7(T, anr, xs, anq, La, nA, agk, bt); #c1(BANK1) c2(NP_001077376) c3(B-cell scaffold protein with ankyrin repeats isoform 2) c4(37775) c5(37776, 37777, 37778, 37779, 37780) c6( ) c7(ans, ai, pb, OV, mj, A, yW, eZ, ez, IR, fL, an, y, lM, Pr, mC, Pm); #c1(BANK1) c2(NP_001120979) c3(B-cell scaffold protein with ankyrin repeats isoform 3) c4(45038) c5(45039, 45040, 45041, 45042, 45043, 45044, 45045, 45046, 45047, 45048) c6( ) c7(ans, ai, pb, OV, mj, A, yW, eZ, ez, lR, fL, an, y, lM, Pr, mC, Pm); #c1(BANK1) c2(NP_060405) c3(B-cell scaffold protein with ankyrin repeats isoform 1) c4(195829, 195830) c5(195831, 195832, 195833, 195834, 195835, 195836, 195837, 195838, 195839, 195840, 195841, 195842, 195843) c6( ) c7(ans, ai, pb, OV, mj, A, yW, eZ, ez, lR, fL, an, y, lM, Pr, mC, Pm); #c1(BANP) c2(NP_001167010) c3(protein BANP isoform c) c4(68821, 68822, 68823, 68824) c5(68825, 68826, 68827, 68828, 68829, 68830) c6( ) c7(ant, T, ac, aW, aT, la, ab, h, gv, K); #c1(BANP) c2(NP_001167011) c3(protein BANP isoform d) c4(68831, 68832) c5(68833, 68834, 68835, 68836, 68837, 68838, 68839, 68840, 68841, 68842, 68843, 68844) c6( ) c7(ant, T, ac, aW, aT, la, ah, h, gv, K); #c1(BANP) c2(NP_001167012) c3(protein BANP isoform e) c4(68845) c5(68846, 68847, 68848, 68849, 68850, 68851, 68852, 68853, 68854, 68855, 68856, 68857, 68858, 68859, 68860, 68861, 68862, 68863, 68864, 68865, 68866, 68867, 68868, 68869) c6( ) c7(ant, T, ac, aW, aT, la, ab, h, gv, K); #c1(BANP) c2(NP_001167014) c3(protein BANP isoform g) c4(68870) c5(68871, 68872, 68873, 68874, 68875, 68876, 68877, 68878, 68879, 68880) c6( ) c7(ant, T, ac, aW, aT, la, ab, h, gv, K); #c1(BANP) c2(NP_060339) c3(protein BANP isoform a) c4(195473, 195474) c5(195475, 195476, 195477, 195478, 195479, 195480, 195481, 195482, 195483, 195484, 195485, 195486, 195487) c6( ) c7(ant, T, ac, aW, aT, la, ab, h, gv, K); #c1(BANP) c2(NP_524576) c3(protein BANP isoform b) c4(231153, 231154, 231155) c5(231156, 231157, 231158, 231159, 231160, 231161, 231162, 231163, 231164, 231165) c6( ) c7(ant, T, ac, aW, aT, la, ab, h, gv, K); #c1(BANP) c2(XP_005256066) c3(protein BANP isoform X1) c4(273930) c5(273931, 273932, 273933, 273934, 273935, 273936) c6( ) c7(ant, T, ac, aW, aT, la, ab, h, gv, K); #c1(BANP) c2(XP_011521482) c3(protein BANP isoform X4) c4( ) c5(316229, 316230, 316231, 316232, 316233) c6( ) c7(ant, T, ac, aW, aT, la, ab, h, gv, K); #c1(BANP) c2(XP_011521488) c3(protein BANP isoform X11) c4( ) c5(316234, 316235, 316236, 316237, 316238, 316239) c6( ) c7(ant, T, ac, aW, aT, la, ab, h, gv, K); #c1(BAP1) c2(NP_004647) c3(ubiquitin carboxyl-terminal, hydrolase BAP1) c4(148488, 148489) c5(148490, 148491, 148492, 148493, 148494, 148495, 148496, 148497, 148498, 148499, 148500, 148501) c6( ) c7(sc, Mb, T, dA, aA, n, fr, pd, anu, ip, jz, ib, py, Nn, aT, K, anw, anv, nO, aW, Y, aF, t, bw, bz, XT, iP, es, Ew, Dy, iA, hk, go, m, anx, y, VB, hS); #c1(BARD1) c2(NP_000456) c3(BRCA1-associated RING domain protein 1 isoform 1) c4(9249) c5(9250, 9251, 9252, 9253, 9254, 9255) c6( ) c7(T, if, bB, j, ci, qN, lu, hw, aT, dL, K, qw, aW, cl, cm, t, bz, eM, bE, at, m, X); #c1(BARD1) c2(NP_001269472) c3(BRCA1-associated RING domain protein 1 isoform 2) c4(101734) c5( ) c6( ) c7(T, if, bB, j, ci, qN, lu, hw, aT, dL, K, qw, aW, cl, cm, t, bz, eM, bE, at, m, X); #c1(BARD1) c2(XP_011509869) c3(BRCA1-associated RING domain protein 1 isoform X1) c4( ) c5(300473, 300474, 300475, 300476, 300477, 300478) c6( ) c7(T, if, bB, j, ci, qN, lu, hw, aT, dL, K, qw, aW, cl, cm, t, bz, eM, bE, at, m, X); #c1(BARHL1) c2(NP_064448) c3(barH-like 1 homeobox protein) c4(202514) c5(202515, 202516, 202517, 202518, 202519, 202520, 202521, 202522, 202523, 202524, 202525, 202526) c6( ) c7(jf); #c1(BARX1) c2(NP_067545) c3(homeobox protein BarH-like 1) c4(208988, 208989) c5(208990, 208991, 208992, 208993, 208994, 208995, 208996, 208997, 208998, 208999, 209000, 209001, 209002) c6( ) c7(Nc, any, ac, pf); #c1(BARX2) c2(NP_003649) c3(homeobox protein BarH-like 2) c4(139924) c5(139925, 139926, 139927, 139928, 139929, 139930, 139931) c6( ) c7(anA, aW, aT, Qm, anz, m, g, t); #c1(BASP1) c2(NP_006308) c3(brain acid soluble protein 1) c4(163871, 163872) c5(163873, 163874, 163875, 163876, 163877, 163878, 163879, 163880, 163881, 163882, 163883, 163884) c6( ) c7(anB, zQ, iT, ci, zP, B); #c1(BATF) c2(NP_006390) c3(basic leucine zipper transcriptional, factor ATE-like) c4(164620) c5(164621, 164622, 164623, 164624, 164625, 164626, 164627) c6( ) c7(h, V, fq, z, A); #c1(BATF2) c2(NP_612465) c3(basic leucine zipper transcriptional, factor ATE-like 2 isoform 1) c4(236585) c5(236586, 236587, 236588, 236589, 236590, 236591) c6( ) c7(ck, iu, T, Y, ds, cU, ci, B); #c1(BAX) c2(NP_001278357) c3(apoptosis regulator BAX isoform 1) c4( ) c5(109598, 109599, 109600, 109601, 109602, 109603) c6( ) c7(bM, G, T, aC, fR, if, al, bB, ci, x, Vp, aE, il, Bc, pX, ajv, K, pk, dF, eL, aiJ, cp, Qe, eG, aW, az, g, eF, eM, nB, AM, iT, vA, U, cj, k, m, wu, zX, aw, yG, ht, n, aj, fr, qN, JW, eW, ft, no, jz, gd, h, lG, eV, hn, dL, ox, on, pl, afu, wC, Lh, aq, Hu, zZ, op, iO, bP, anC, hL, hR, E, at, it, B, fM, eX, aA, cz, hy, bX, V, q, J, eA, HC, aT, cy, rO, jj, bq, an, ae, af, ne, kl, s, iU, Y, r, en, cl, t, iK, ck, sS, iQ, hc, anD, fD, im, bt, LS, id, gb, iW, jh, dG, Fb, ad, av, hd, hD, wm, uD, d, BN, BO, ff, eH, kD, aF, iV, iR, bz, bF, bE, gZ, bC, y, X); #c1(BAX) c2(NP_004315) c3(apoptosis regulator BAX isoform beta) c4(145110) c5(145111, 145112, 145113, 145114, 145115, 145116) c6( ) c7(bM, G, T, aC, fR, if, al, bB, ci, x, Vp, aE, il, Bc, pX, ajv, K, pk, dF, eL, aiJ, cp, Qe, eG, aW, az, g, eF, eM, nB, AM, iT, vA, U, cj, k, m, wu, zX, aw, yG, ht, n, aj, fr, qN, JW, eW, ft, no, jz, gd, h, lG, eV, hn, dL, ox, on, pl, afu, wC, Lh, aq, Hu, zZ, op, iO, bP, anC, hL, hR, E, at, it, B, fM, eX, aA, cz, hy, bX, V, q, J, eA, HC, aT, cy, rO, jj, bq, an, ae, af, ne, kl, s, iU, Y, r, en, cl, t, iK, ck, sS, iQ, hc, anD, fD, im, bt, LS, id, qb, iW, jh, dG, Fb, ad, av, hd, hD, wm, uD, d, BN, BO, ff, eH, kD, aF, iV, iR, bz, bF, bE, gZ, bC, y, X); #c1(BAX) c2(NP_620116) c3(apoptosis regulator BAX isoform alpha) c4(237287) c5(237288, 237289, 237290, 237291, 237292, 237293, 237294) c6( ) c7(bM, G, T, aC, fR, if, al, bB, ci, x, Vp, aE, il, Bc, pX, ajv, K, pk, dF, eL, aiJ, cp, Qe, eG, aW, az, g, eF, eM, nB, AM, iT, vA, U, cj, k, m, wu, zX, aw, yG, ht, n, aj, fr, qN, JW, eW, ft, no, jz, gd, h, lG, eV, hn, dL, ox, on, pl, afu, wC, Lh, aq, Hu, zZ, op, iO, bP, anC, hL, hR, E, at, it, B, fM, eX, aA, cz, hy, bX, V, q, J, eA, HC, aT, cy, rO, jj, bq, an, ae, af, ne, kl, s, iU, Y, r, en, cl, t, iK, ck, sS, iQ, hc, anD, fD, im, bt, LS, id, qb, iW, jh, dG, Fb, ad, av, hd, hD, wm, uD, d, BN, BO, ff, eH, kD, aF, iV, iR, bz, bE, bE, gZ, bC, y, X); #c1(BAX) c2(NP_620118) c3(apoptosis regulator BAX isoform delta) c4(237295) c5(237296, 237297, 237298, 237299, 237300, 237301) c6( ) c7(bM, G, T, aC, fR, if, al, bB, ci, x, Vp, aE, il, Bc, pX, ajv, K, pk, dF, eL, aiJ, cp, Qe, eG, aW, az, g, eF, eM, nB, AM, iT, vA, U, cj, k, m, wu, zX, aw, yG, ht, n, aj, fr, qN, JW, eW, ft, no, jz, gd, h, lG, eV, hn, dL, ox, on, pl, afu, wC, Lh, aq, Hu, zZ, op, iO, bP, anC, hL, hR, E, at, it, B, fM, eX, aA, cz, hy, bX, V, q, J, eA, HC, aT, cy, rO, jj, bq, an, ae, af, ne, kl, s, iU, Y, r, en, cl, t, iK, ck, sS, iQ, hc, anD, fD, im, bt, LS, id, qb, iW, jh, dG, Fb, ad, av, hd, hD, wm, uD, d, BN, BO, ff, eH, kD, aF, iV, iR, bz, bF, bE, gZ, bC, y, X); #c1(BAX) c2(NP_620119) c3(apoptosis regulator BAX isoform sigma) c4(237302, 237303) c5(237304, 237305, 237306, 237307, 237308, 237309, 237310, 237311, 237312, 237313, 237314) c6( ) c7(bM, G, T, aC, fR, if, al, bB, ci, x, Vp, aE, il, Bc, pX, ajv, K, pk, dF, eL, aiJ, cp, Qe, eG, aW, az, g, eF, eM, nB, AM, iT, vA, U, cj, k, m, wu, zX, aw, yG, ht, n, aj, fr, qN, JW, eW, ft, no, jz, gd, h, lG, eV, hn, dL, ox, on, pl, afu, wC, Lh, aq, Hu, zZ, op, iO, bP, anC, hL, hR, E, at, it, B, fM, eX, aA, cz, hy, bX, V, g, J, eA, HC, aT, cy, rO, jj, bq, an, ae, af, ne, kl, s, iU, Y, r, en, cl, t, iK, ck, sS, iQ, hc, anD, fD, im, bt, LS, id, qb, iW, jh, dG, Fb, ad, av, hd, hD, wm, uD, d, BN, BO, ff, eH, kD, aF, iV, iR, bz, bF, bE, gZ, bC, y, X); #c1(BAZIA) c2(NP_038476) c3(bromodomain adjacent to zinc finger domain protein 1A isoform a) c4(176667) c5(176668, 176669, 176670, 176671, 176672, 176673, 176674, 176675, 176676, 176677, 176678) c6( ) c7(fr); #c1(BAZIA) c2(NP_872589) c3(bromodomain adjacent to zinc finger domain protein 1A isoform b) c4(256443, 256444) c5(256445, 256446, 256447, 256448, 256449, 256450, 256451, 256452, 256453, 256454, 256455, 256456) c6( ) c7(fr); #c1(BAZIB) c2(NP_115784) c3(tyrosine-protein kinase BAZIB) c4(223881) c5(223882, 223883, 223884, 223885, 223886, 223887, 223888, 223889, 223890, 223891, 223892, 223893, 223894, 223895) c6( ) c7(bL, alC, cO, e, dr, bN); #c1(BAZ2A) c2(NP_001287834) c3(bromodomain adjacent to zinc finger domain protein 2A isoform 2) c4(112986) c5(112987, 112988, 112989, 112990, 112991, 112992) c6( ) c7(ad); #c1(BAZ2A) c2(NP_038477) c3(bromodomain adjacent to zinc finger domain protein 2A isoform 1) c4(176679) c5(176680, 176681, 176682, 176683, 176684, 176685, 176686) c6( ) c7(ad); #c1(BAZ2A) c2(XP_011536101) c3(bromodomain adjacent to zinc finger domain protein 2A isoform X3) c4(333426) c5(333427, 333428, 333429, 333430, 333431, 333432) c6( ) c7(ad); #c1(BAZ2B) c2(NP_001276904) c3(bromodomain adjacent to zinc finger domain protein 2B isoform b) c4(108590, 108591) c5(108592, 108593, 108594, 108595, 108596, 108597, 108598, 108599, 108600, 108601, 108602, 108603) c6( ) c7(fq); #c1(BAZ2B) c2(NP_038478) c3(bromodomain adjacent to zinc finger domain protein 2B isoform a) c4(176687) c5(176688, 176689, 176690, 176691, 176692, 176693, 176694) c6( ) c7(fq); #c1(BAZ2B) c2(XP_011509339) c3(bromodomain adjacent to zinc finger domain protein 2B isoform X1) c4( ) c5(299918) c6( ) c7(fq); #c1(BAZ2B) c2(XP_011509350) c3(bromodomain adjacent to zinc finger domain protein 2B isoform X12) c4(299919) c5(299920, 299921, 299922, 299923, 299924, 299925) c6( ) c7(fq); #c1(BAZ2B) c2(XP_011509351) c3(bromodomain adjacent to zinc finger domain protein 2B isoform X13) c4(299926) c5( ) c6( ) c7(fq); #c1(BAZ2B) c2(XP_011509352) c3(bromodomain adjacent to zinc finger domain protein 2B isoform X14) c4(299927) c5(299928, 299929, 299930, 299931, 299932, 299933) c6( ) c7(fq); #c1(BAZ2B) c2(XP_011509357) c3(bromodomain adjacent to zinc finger domain protein 2B isoform X19) c4( ) c5(299934, 299935, 299936, 299937, 299938) c6( ) c7(fq); #c1(BBC3) c2(NP_001120712) c3(bcl-2-binding component 3 isoform 1) c4(44702) c5(44703) c6( ) c7(T, fM, fR, if, ht, jh, aA, bB, n, hy, fr, ci, C, qN, q, ad, eA, aE, aT, io, K, hB, ZN, nJ, ae, pk, eu, d, aW, Y, ff, r, GA, aq, vs, kp, aF, en, g, cm, iK, bz, KM, y, Kv, hE, cj, hE, bt, B, Ex); #c1(BBC3) c2(NP_001120713) c3(bcl-2-binding component 3 isoform 2) c4(44704) c5(44705, 44706, 44707, 44708, 44709, 44710) c6( ) c7(T, fM, fR, if, ht, jh, aA, bB, n, hy, fr, ci, C, qN, q, ad, eA, aE, aT, io, K, hB, ZN, nJ, ae, pk, eu, d, aW, Y, ff, r, GA, aq, vs, kp, aF, en, g, cm, iK, bz, KM, y, Kv, bE, cj, hE, bt, B, Ex); #c1(BBC3) c2(NP_001120714) c3(bcl-2-binding component 3 isoform 3) c4(44711) c5(44712, 44713, 44714, 44715, 44716, 44717, 44718, 44719, 44720, 44721, 44722) c6( ) c7(T, fM, fR, if, ht, jh, aA, bB, n, hy, fr, ci, C, qN, q, ad, eA, aE, aT, io, K, hB, ZN, nJ, ae, pk, eu, d, aW, Y, ff, r, GA, aq, vs, kp, aF, en, g, cm, iK, bz, KM, y, Kv, hE, cj, hE, bt, B, Ex); #c1(BBC3) c2(XP_006723204) c3(bcl-2-binding component 3 isoform X1) c4( ) c5(295036, 295037, 295038, 295039, 295040, 295041) c6( ) c7(T, fM, fR, if, ht, jh, aA, bB, n, hy, fr, ci, C, qN, q, ad, eA, aE, aT, io, K, hB, ZN, nJ, ae, pk, eu, d, aW, Y, ff, r, GA, aq, vs, kp, aF, en, g, cm, iK, bz, KM, y, Kv, bE, cj, hE, bt, B, Ex); #c1(BBC3) c2(XP_011525024) c3(bcl-2-binding component 3 isoform X2) c4(319485) c5(319486, 319487) c6( ) c7(T, fM, fR, if, ht, jh, aA, bB, n, hy, fr, ci, C, qN, q, ad, eA, aE, aT, io, K, hB, ZN, nJ, ae, pk, eu, d, aW, Y, ff, r, GA, aq, vs, kp, aF, en, g, cm, iK, bz, KM, y, Kv, bE, cj, hE, bt, B, Ex); #c1(BBC3) c2(XP_011525025) c3(bcl-2-binding component 3 isoform X3) c4( ) c5(319488) c6( ) c7(T, fM, fR, if, ht, jh, aA, bB, n, hy, fr, ci, C, qN, q, ad, eA, aE, aT, io, K, hB, ZN, nJ, ae, pk, eu, d, aW, Y, ff, r, GA, aq, vs, kp, aF, en, g, cm, iK, bz, KM, y, Kv, bE, cj, hE, bt, B, Ex); #c1(BBIP1) c2(NP_001182233) c3(BBSome-interacting protein 1 isoform 1) c4(74732) c5(74733, 74734, 74735, 74736, 74737, 74738) c6( ) c7(Tp); #c1(BBIP1) c2(NP_001182235) c3(BBSome-interacting protein 1 isoform 2) c4(74739, 74740) c5(74741, 74742, 74743, 74744, 74745, 74746, 74747, 74748) c6( ) c7(Tp); #c1(BBIP1) c2(NP_001182236) c3(BBSome-interacting protein 1 isoform 3) c4(74749) c5(74750, 74751, 74752, 74753, 74754, 74755) c6( ) c7(Tp); #c1(BBIP1) c2(NP_001230712) c3(BBSome-interacting protein 1 isoform 4) c4( ) c5(86683, 86684, 86685, 86686, 86687, 86688, 86689, 86690) c6( ) c7(Tp); #c1(BBOX1) c2(XP_011518705) c3(gamma-butyrobetaine dioxygenase isoform X1) c4(313079, 313080) c5(313081, 313082, 313083, 313084, 313085, 313086, 313087, 313088, 313089, 313090, 313091, 313092, 313093, 313094, 313095, 313096, 313097, 313098, 313099, 313100, 313101, 313102, 313103, 313104) c6( ) c7(ac); #c1(BBS1) c2(NP_078925) c3(Bardet-Biedl syndrome 1 protein) c4(216134, 216135, 216136) c5(216137, 216138, 216139, 216140, 216141, 216142, 216143, 216144, 216145, 216146, 216147, 216148, 216149, 216150, 216151, 216152, 216153, 216154) c6( ) c7(nk, BC, IR, rT, anE, nw, v, anF, Tp, Uw, nC, UF); #c1(BBS10) c2(NP_078961) c3(Bardet-Biedl syndrome 10 protein) c4(216285) c5(216286, 216287, 216288, 216289, 216290, 216291) c6( ) c7(bL, IR, anG, EP, v, zG, Tp); #c1(BBS12) c2(NP_689831) c3(Bardet-Biedl syndrome 12 protein) c4(244082, 244083) c5(244084, 244085, 244086, 244087, 244088, 244089, 244090, 244091, 244092, 244093, 244094, 244095, 244096, 244097, 244098, 244099) c6( ) c7(dy, Tp, anH); #c1(BBS2) c2(XP_005256137) c3(Bardet-Biedl syndrome 2 protein isoform X1) c4(273997) c5(273998, 273999, 274000, 274001, 274002, 274003) c6( ) c7(qQ, v, fr, nA, ad, anl, qM, Nj, ae, IR, ev, Tp, nk, cl, cm, nC, es, iA, bE, anJ, hL, anK, zG); #c1(BBS4) c2(NP_149017) c3(Bardet-Biedl syndrome 4 protein isoform 1) c4(226747, 226748, 226749) c5(226750, 226751, 226752, 226753, 226754, 226755, 226756, 226757, 226758, 226759, 226760, 226761, 226762, 226763, 226764, 226765, 226766, 226767, 226768) c6( ) c7(IR, e, qQ, aT, anL, nw, v, gM, Tp, nC, de); #c1(BBS4) c2(XP_011520152) c3(Bardet-Biedl syndrome 4 protein isoform X1) c4(315023) c5(315024, 315025, 315026, 315027, 315028) c6( ) c7(IR, e, qQ, aT, anL, nw, v, qM, Tp, nC, de); #c1(BBS5) c2(NP_689597) c3(Bardet-Biedl syndrome 5 protein) c4(243161, 243162, 243163) c5(243164, 243165, 243166, 243167, 243168, 243169, 243170, 243171, 243172, 243173, 243174, 243175, 243176, 243177, 243178, 243179, 243180, 243181) c6( ) c7(v, IR, Tp); #c1(BBS7) c2(NP_060660) c3(Bardet-Biedl syndrome 7 protein isoform b) c4( ) c5(197029, 197030, 197031, 197032, 197033, 197034) c6( ) c7(anM, IR, v, Tp, nA, anN); #c1(BBS7) c2(NP_789794) c3(Bardet-Biedl syndrome 7 protein isoform a) c4(252334, 252335) c5(252336, 252337, 252338, 252339, 252340, 252341) c6( ) c7(anM, IR, v, Tp, nA, anN); #c1(BBS7) c2(XP_011530383) c3(Bardet-Biedl syndrome 7 protein isoform X4) c4(326220) c5(326221, 326222, 326223, 326224, 326225, 326226) c6( ) c7(anM, IR, v, Tp, nA, anN); #c1(BBS9) c2(NP_001028776) c3(protein PTHB1 isoform 3) c4(30657, 30658) c5(30659, 30660, 30661, 30662, 30663, 30664, 30665, 30666, 30667, 30668, 30669, 30670) c6( ) c7(ul, IR, PN, il, oe, anO, v, zV, Tp, zZ, nC, er); #c1(BBS9) c2(NP_001028777) c3(protein PTHB1 isoform 4) c4(30671, 30672) c5(30673, 30674, 30675, 30676, 30677, 30678) c6( ) c7(ul, IR, PN, il, oe, anO, v, zV, Tp, zZ, nC, er); #c1(BBS9) c2(NP_055266) c3(protein PTHB1 isoform 1) c4(180154, 180155) c5(180156, 180157, 180158, 180159, 180160, 180161, 180162, 180163, 180164, 180165, 180166, 180167) c6( ) c7(ul, IR, PN, il, oe, anO, v, zV, Tp, zZ, nC, er); #c1(BBS9) c2(NP_940820) c3(protein PTHB1 isoform 2) c4(259920, 259921) c5(259922, 259923, 259924, 259925, 259926, 259927, 259928, 259929, 259930, 259931, 259932, 259933) c6( ) c7(ul, IR, pN, il, oe, anO, v, zV, Tp, zZ, nC, er); #c1(BBS9) c2(XP_005249757) c3(protein PTHB1 isoform X3) c4(269797, 269798) c5( ) c6( ) c7(ul, IR, pN, il, oe, anO, v, zV, Tp, zZ, nC, er); #c1(BBS9) c2(XP_005249758) c3(protein PTHB1 isoform X8) c4( ) c5(269799, 269800, 269801, 269802, 269803, 269804, 269805, 269806, 269807, 269808, 269809, 269810, 269811, 269812, 269813, 269814, 269815) c6( ) c7(ul, IR, pN, il, oe, anO, v, zV, Tp, zZ, nC, er); #c1(BBS9) c2(XP_011513567) c3(protein PTHB1 isoform X1) c4( ) c5(305876) c6( ) c7(ul, IR, pN, il, oe, anO, v, zV, Tp, zZ, nC, er); #c1(BBS9) c2(XP_011513571) c3(protein PTHB1 isoform X6) c4(305877) c5(305878, 305879, 305880, 305881, 305882, 305883) c6( ) c7(ul, IR, pN, il, oe, anO, v, zV, Tp, zZ, nC, er); #c1(BBX) c2(NP_001136040) c3(HMG hex transcription factor BBX isoform 1) c4(54133) c5(54134, 54135, 54136, 54137, 54138, 54139) c6( ) c7(bw, Y, fq, Ea); #c1(BBX) c2(NP_001263215) c3(HMG hex transcription factor BBX isoform 3) c4(97042) c5( ) c6( ) c7(bw, Y, fq, Ea); #c1(BBX) c2(NP_064620) c3(HMG hex transcription factor BBX isoform 2) c4(203320, 203321) c5(203322, 203323, 203324, 203325, 203326, 203327, 203328, 203329, 203330, 203331) c6( ) c7(bw, Y, fq, Ea); #c1(BBX) c2(XP_011511300) c3(HMG hex transcription factor BBX isoform X3) c4(301823) c5(301824, 301825, 301826, 301827, 301828, 301829, 301830, 301831, 301832, 301833, 301834, 301835, 301836, 301837, 301838, 301839, 301840, 301841, 301842) c6( ) c7(bw, Y, fq, Ea); #c1(BBX) c2(XP_011511301) c3(HMG hex transcription factor BBX isoform X4) c4(301843, 301844, 301845, 301846) c5( ) c6( ) c7(bw, Y, fq, Ea); #c1(BBX) c2(XP_011511304) c3(HMG hex transcription factor BBX isoform X5) c4(301847, 301848) c5( ) c6( ) c7(bw, Y, fq, Ea); #c1(BBX) c2(XP_011511307) c3(HMG hex transcription factor BBX isoform X7) c4(301849, 301850, 301851, 301852, 301853) c5(301854, 301855, 301856, 301857, 301858, 301859, 301860, 301861, 301862, 301863) c6( ) c7(bw, Y, fq, Ea); #c1(BBX) c2(XP_011511311) c3(HMG hex transcription factor BBX isoform X11) c4( ) c5(301864) c6( ) c7(bw, Y, fq, Ea); #c1(BBX) c2(XP_011511312) c3(HMG hex transcription factor BBX isoform X12) c4(301865) c5(301866, 301867, 301868, 301869, 301870, 301871, 301872, 301873, 301874, 301875, 301876, 301877, 301878, 301879, 301880, 301881, 301882, 301883, 301884, 301885, 301886, 301887, 301888, 301889, 301890, 301891, 301892, 301893, 301894, 301895, 301896, 301897, 301898, 301899, 301900, 301901, 301902, 301903, 301904, 301905, 301906, 301907, 301908, 301909, 301910, 301911, 301912, 301913, 301914, 301915, 301916, 301917, 301918, 301919, 301920, 301921, 301922, 301923, 301924, 301925, 301926) c6( ) c7(bw, Y, fq, Ea); #c1(BCAM) c2(NP_001013275) c3(basal cell adhesion molecule isoform 2 precursor) c4(25501) c5(25502, 25503, 25504, 25505, 25506, 25507) c6( ) c7(T, anP, qb, bE, e, bB, aq, anQ, pm, fq, B); #c1(BCAM) c2(NP_005572) c3(basal cell adhesion molecule isoform 1 precursor) c4(157571) c5(157572, 157573, 157574, 157575, 157576, 157577) c6( ) c7(T, anP, qb, bE, e, bB, aq, anQ, pm, fq, B); #c1(BCAN) c2(NP_940819) c3(brevican cere protein isoform 2 precursor) c4(259865, 259866, 259867, 259868, 259869) c5(259870, 259871, 259872, 259873, 259874, 259875, 259876, 259877, 259878, 259879, 259880, 259881, 259882, 259883, 259884, 259885, 259886, 259887, 259888, 259889, 259890, 259891, 259892, 259893, 259894, 259895, 259896, 259897, 259898, 259899, 259900, 259901, 259902, 259903, 259904, 259905, 259906, 259907, 259908, 259909) c6(259910, 259911, 259912, 259913, 259914, 259915, 259916, 259917, 259918, 259919) c7(d, ac, dB, dL, Fc, eL, eA, eu); #c1(BCAN) c2(XP_011508168) c3(brevican cere protein isoform X1) c4(298708) c5(298709, 298710, 298711, 298712, 298713, 298714, 298715, 298716, 298717, 298718) c6(298719, 298720) c7(d, ac, dB, dL, Fc, eL, eA, eu); #c1(BCAP29) c2(NP_001008405) c3(B-cell receptor-associated protein 29 isoform a) c4(23165) c5(23166, 23167, 23168, 23169, 23170, 23171, 23172, 23173, 23174, 23175, 23176, 23177, 23178) c6( ) c7(cF, j); #c1(BCAP29) c2(NP_061332) c3(B-cell receptor-associated protein 29 isoform b) c4(200059, 200060) c5(200061, 200062, 200063, 200064, 200065, 200066, 200067, 200068, 200069, 200070, 200071, 200072, 200073, 200074, 200075, 200076, 200077, 200078, 200079, 200080, 200081, 200082, 200083, 200084, 200085, 200086, 200087, 200088, 200089, 200090, 200091, 200092, 200093, 200094, 200095, 200096, 200097, 200098, 200099) c6(200100, 200101) c7(cF, j); #c1(BCAP29) c2(XP_011514709) c3(B-cell receptor-associated protein 29 isoform X2) c4(307348, 307349, 307350, 307351) c5( ) c6( ) c7(cF, j); #c1(BCAP29) c2(XP_011514711) c3(B-cell receptor-associated protein 29 isoform X4) c4(307352, 307353) c5(307354, 307355, 307356, 307357, 307358, 307359, 307360, 307361, 307362, 307363, 307364) c6( ) c7(cF, j); #c1(BCAP31) c2(NP_001132929) c3(B-cell receptor-associated protein 31 isoform a) c4(52651, 52652, 52653, 52654, 52655, 52656) c5(52657, 52658, 52659, 52660, 52661, 52662, 52663, 52664, 52665, 52666, 52667, 52668, 52669, 52670, 52671, 52672, 52673) c6( ) c7(T, anR, anS, anT, fM, iM, aW, je, mG, oj, aT, aU, Be, hu, dF, B, hX); #c1(BCAP31) c2(NP_001243376) c3(B-cell receptor-associated protein 31 isoform b) c4(90592) c5(90593, 90594, 90595, 90596, 90597, 90598, 90599, 90600, 90601, 90602, 90603, 90604, 90605, 90606, 90607, 90608, 90609, 90610, 90611, 90612, 90613, 90614, 90615, 90616, 90617, 90618, 90619, 90620, 90621, 90622, 90623, 90624, 90625, 90626, 90627, 90628, 90629, 90630, 90631) c6( ) c7(T, anR, anS, anT, fM, iM, aW, je, mG, oj, aT, aU, Be, hu, dF, B, hX); #c1(BCAR1) c2(NP_001164185) c3(breast cancer anti-estrogen resistance protein 1 isoform 1) c4(66720) c5(66721, 66722, 66723, 66724, 66725, 66726) c6( ) c7(bL, T, aC, sw, jh, bB, n, j, ci, fr, AO, q, ad, eA, anU, yt, anV, aT, h, dL, ae, dx, d, aiB, s, anX, aW, Y, vj, qt, ff, r, ks, BG, en, anW, g, t, HI, cm, ck, kP, eM, bE, anY, X, iS, np, m, y, B); #c1(BCAR1) c2(NP_001164186) c3(breast cancer anti-estrogen resistance protein 1 isoform 2) c4(66727) c5(66728, 66729, 66730, 66731, 66732, 66733) c6( ) c7(bL, T, aC, sw, jh, bB, n, j, ci, fr, AO, g, ad, eA, anU, yt, anV, aT, h, dL, ae, dx, d, aiB, s, anX, aW, Y, vj, qt, ff, r, ks, BG, en, anW, g, t, HI, cm, ck, kP, eM, bE, anY, X, iS, np, m, y, B); #c1(BCAR1) c2(NP_001164187) c3(breast cancer anti-estrogen resistance protein 1 isoform 3) c4(66734) c5(66735, 66736, 66737, 66738, 66739, 66740) c6( ) c7(bL, T, aC, sw, jh, bB, n, j, ci, fr, AO, g, ad, eA, anU, yt, anV, aT, h, dL, ae, dx, d, aiB, s, anX, aW, Y, vj, qt, ff, r, ks, BG, en, anW, g, t, HI, cm, ck, kP, eM, bE, anY, X, iS, np, m, y, B); #c1(BCAR1) c2(NP_001164188) c3(breast cancer anti-estrogen resistance protein 1 isoform 4) c4(66741) c5(66742, 66743, 66744, 66745, 66746, 66747) c6( ) c7(bL, T, aC, sw, jh, bB, n, j, ci, fr, AO, q, ad, eA, anU, yt, anV, aT, h, dL, ae, dx, d, aiB, s, anX, aW, Y, vj, qt, ff, r, ks, BG, en, anW, g, t, HI, cm, ck, kP, eM, bE, anY, X, iS, np, m, y, B); #c1(BCAR1) c2(NP_001164189) c3(breast cancer anti-estrogen resistance protein 1 isoform 5) c4(66748) c5(66749, 66750, 66751, 66752, 66753, 66754) c6( ) c7(bL, T, aC, sw, jh, bB, n, j, ci, fr, AO, q, ad, eA, anU, yt, anV, aT, h, dL, ae, dx, d, aiB, s, anX, aW, Y, vj, qt, ff, r, ks, BG, en, anW, g, t, HI, cm, ck, kP, eM, bE, anY, X, iS, np, m, y, B); #c1(BCAR1) c2(NP_001164190) c3(breast cancer anti-estrogen resistance protein 1 isoform 7) c4(66755) c5(66756, 66757, 66758, 66759, 66760, 66761) c6( ) c7(bL, T, aC, sw, jh, bB, n, j, ci, fr, AO, q, ad, eA, anU, yt, anV, aT, h, dL, ae, dx, d, aiB, s, anX, aW, Y, vj, qt, ff, r, ks, BG, en, anW, g, t, HI, cm, ck, kP, eM, bE, anY, X, iS, np, m, y, B); #c1(BCAR1) c2(NP_001164191) c3(breast cancer anti-estrogen resistance protein 1 isoform 8) c4(66762) c5(66763, 66764, 66765, 66766, 66767, 66768) c6( ) c7(bL, T, aC, sw, jh, bB, n, j, ci, fr, AO, q, ad, eA, anU, yt, anV, aT, h, dL, ae, dx, d, aiB, s, anX, aW, Y, vj, qt, ff, r, ks, BG, en, anW, g, t, HI, cm, ck, kP, eM, bE, anY, X, iS, np, m, y, B); #c1(BCAR1) c2(NP_055382) c3(breast cancer anti-estrogen resistance protein 1 isoform 6) c4(180694) c5(180695, 180696, 180697, 180698, 180699, 180700, 180701, 180702) c6(180703, 180704) c7(bL, T, aC, sw, jh, bB, n, j, ci, fr, AO, q, ad, eA, anU, yt, anV, aT, h, dL, ae, dx, d, aiB, s, anX, aW, Y, vj, qt, ff, r, ks, BG, en, anW, g, t, HI, cm, ck, kP, eM, bE, anY, X, iS, np, m, y, B); #c1(BCAR1) c2(XP_005256315) c3(breast cancer anti-estrogen resistance protein 1 isoform X2) c4( ) c5(274094) c6( ) c7(bL, T, aC, sw, jh, bB, n, j, ci, fr, AO, q, ad, eA, anU, yt, anV, aT, h, dL, ae, dx, d, aiB, s, anX, aW, Y, vj, qt, ff, r, ks, BG, en, anW, g, t, HI, cm, ck, kP, eM, bE, anY, X, iS, np, m, y, B); #c1(BCAR1) c2(XP_005256316) c3(breast cancer anti-estrogen resistance protein 1 isoform X3) c4(274095) c5( ) c6( ) c7(bL, T, aC, sw, jh, bB, n, j, ci, fr, AO, q, ad, eA, anU, yt, anV, aT, h, dL, ae, dx, d, aiB, s, anX, aW, Y, vj, qt, ff, r, ks, BG, en, anW, g, t, HI, cm, ck, kP, eM, bE, anY, X, iS, np, m, y, B); #c1(BCAR1) c2(XP_011521777) c3(breast cancer anti-estrogen resistance protein 1 isoform X5) c4( ) c5(316468, 316469, 316470, 316471, 316472) c6( ) c7(bL, T, aC, sw, jh, bB, n, j, ci, fr, AO, q, ad, eA, anU, yt, anV, aT, h, dL, ae, dx, d, aiB, s, anX, aW, Y, vj, qt, ff, r, ks, BG, en, anW, g, t, HI, cm, ck, kP, eM, bE, anY, X, iS, np, m, y, B); #c1(BCAS1) c2(NP_003648) c3(breast carcinoma-amplified sequence 1) c4(139916, 139917) c5(139918, 139919, 139920, 139921, 139922, 139923) c6( ) c7(T, c, aW, aw, aT, j, ad); #c1(BCAS1) c2(XP_005260648) c3(breast carcinoma-amplified sequence 1 isoform X4) c4(276772) c5(276773, 276774, 276775, 276776, 276777, 276778) c6( ) c7(T, c, aW, aw, aT, j, ad); #c1(BCAS1) c2(XP_005260652) c3(breast carcinoma-amplified sequence 1 isoform X8) c4(276779) c5(276780, 276781, 276782, 276783, 276784, 276785) c6( ) c7(T, c, aW, aw, aT, j, ad); #c1(BCAS3) c2(NP_001092902) c3(breast carcinoma-amplified sequence 3 isoform 1) c4(39742, 39743) c5(39744, 39745, 39746, 39747, 39748, 39749) c6( ) c7(T, Mo, ac, eR, Cc, aW, anZ, dB, aT, aj); #c1(BCAS3) c2(NP_060149) c3(breast carcinoma-amplified sequence 3 isoform 2) c4(194496) c5(194497, 194498, 194499, 194500, 194501, 194502, 194503) c6( ) c7(T, Mo, ac, eR, Cc, aW, anZ, dB, aT, aj); #c1(BCAS3) c2(XP_005257529) c3(breast carcinoma-amplified sequence 3 isoform X7) c4( ) c5(275213, 275214, 275215, 275216, 275217, 275218, 275219, 275220, 275221, 275222, 275223, 275224, 275225, 275226, 275227, 275228, 275229, 275230) c6( ) c7(T, Mo, ac, eR, Cc, aW, anZ, dB, aT, aj); #c1(BCAS3) c2(XP_005257532) c3(breast carcinoma-amplified sequence 3 isoform X9) c4(275231) c5( ) c6( ) c7(T, Mo, ac, eR, Cc, aW, anZ, dB, aT, aj); #c1(BCAS3) c2(XP_011523242) c3(breast carcinoma-amplified sequence 3 isoform X2) c4(317764) c5( ) c6( ) c7(T, Mo, ac, eR, Cc, aW, anZ, dB, aT, aj); #c1(BCAS3) c2(XP_011523247) c3(breast carcinoma-amplified sequence 3 isoform X8) c4(317765) c5( ) c6( ) c7(T, Mo, ac, eR, Cc, aW, anZ, dB, aT, aj); #c1(BCAS3) c2(XP_011523253) c3(breast carcinoma-amplified sequence 3 isoform X15) c4( ) c5(317766, 317767, 317768, 317769, 317770) c6( ) c7(T, Mo, ac, eR, Cc, aW, anZ, dB, aT, aj); #c1(BCAS3) c2(XP_011523254) c3(breast carcinoma-amplified sequence 3 isoform X16) c4(317771) c5(317772, 317773, 317774, 317775, 317776, 317777) c6( ) c7(T, Mo, ac, eR, Cc, aW, anZ, dB, aT, aj); #c1(BCAS4) c2(NP_001010974) c3(breast carcinoma-amplified sequence 4 isoform c) c4(24381) c5(24382, 24383, 24384, 24385, 24386, 24387) c6( ) c7(aW, j, nA, aT); #c1(BCAS4) c2(NP_060313) c3(breast carcinoma-amplified sequence 4 isoform a) c4(195358, 195359) c5(195360, 195361, 195362, 195363, 195364, 195365, 195366, 195367, 195368, 195369, 195370, 195371) c6( ) c7(aW, j, nA, aT); #c1(BCAS4) c2(XP_011527189) c3(breast carcinoma-amplified sequence 4 isoform X2) c4(321719) c5(321720, 321721, 321722, 321723, 321724, 321725) c6( ) c7(aW, j, nA, aT); #c1(BCAT1) c2(NP_001171562) c3(branched-chain-amino-acid aminotransferase, cytosolic isoform 2) c4(70588) c5(70589, 70590, 70591, 70592, 70593, 70594, 70595) c6( ) c7(jf, A, d, ac, ey, ci, eA); #c1(BCAT1) c2(NP_001171563) c3(branched-chain-amino-acid aminotransferase, cytosolic isoform 3) c4(70596) c5(70597, 70598, 70599, 70600, 70601) c6( ) c7(jf, A, d, ac, ey, ci, eA); #c1(BCAT1) c2(NP_001171565) c3(branched-chain-amino-acid aminotransferase, cytosolic isoform 5) c4(70602) c5(70603, 70604, 70605, 70606, 70607, 70608) c6( ) c7(jf, A, d, ac, ey, ci, eA); #c1(BCAT1) c2(NP_005495) c3(branched-chain-amino-acid aminotransferase, cytosolic isoform 1) c4(156787) c5(156788, 156789, 156790, 156791, 156792, 156793) c6( ) c7(jf, A, d, ac, ey, ci, eA); #c1(BCAT1) c2(XP_011519112) c3(branched-chain-amino-acid aminotransferase, cytosolic isoform X1) c4(313717) c5(313718, 313719, 313720, 313721, 313722, 313723) c6( ) c7(jf, A, d, ac, ey, ci, eA); #c1(BCAT2) c2(NP_001158245) c3(branched-chain-amino-acid aminotransferase, mitochondrial isoform b) c4(63508) c5(63509, 63510, 63511, 63512, 63513, 63514) c6( ) c7(qb, v, agm, pm); #c1(BCAT2) c2(NP_001271254) c3(branched-chain-amino-acid aminotransferase, mitochondrial isoform c) c4( ) c5(103753, 103754, 103755, 103756, 103757) c6( ) c7(qb, v, agm, pm); #c1(BCCIP) c2(NP_057651) c3(BRCA2 and CDKN1A-interacting protein isoform BCCIPalpha) c4(192056) c5(192057, 192058, 192059, 192060, 192061, 192062) c6( ) c7(T, d, NE, dB, aW, Y, go, hk, afQ, afd, aT, r, ff, j, K, m, en, as, t, g, ad); #c1(BCCIP) c2(NP_510868) c3(BRCA2 and CDKN1A-interacting protein isoform BCCIPbeta) c4(231039, 231040) c5(231041, 231042, 231043, 231044, 231045, 231046, 231047, 231048, 231049, 231050, 231051, 231052) c6( ) c7(T, d, NE, dB, aW, Y, go, hk, afQ, afd, aT, r, ff, j, K, m, en, as, t, g, ad); #c1(BCCIP) c2(NP_510869) c3(BRCA2 and CDKN1A-interacting protein isoform C) c4(231053, 231054) c5(231055, 231056, 231057, 231058, 231059, 231060, 231061, 231062, 231063, 231064, 231065, 231066) c6( ) c7(T, d, NE, dB, aW, Y, go, hk, afQ, afd, aT, r, ff, j, K, m, en, as, t, g, ad); #c1(BCDIN3D) c2(NP_859059) c3(pre-miRNA 5′-monophosphate methyltransferase) c4(255441) c5(255442, 255443, 255444, 255445, 255446, 255447) c6( ) c7(bL, bM, fq, v); #c1(BCHE) c2(NP_000046) c3(cholinesterase precursor) c4(743) c5(744, 745, 746, 747, 748, 749, 750, 751, 752, 753, 754, 755, 756, 757, 758, 759, 760, 761, 762, 763, 764, 765) c6(766) c7(T, fV, al, I, aoj, ci, VV, xy, wM, dv, K, H, CG, aoa, ZH, aW, IW, hl, g, bw, cm, yX, wE, U, cj, m, akA, aj, fr, aoc, aoh, on, Jj, CN, wZ, bJ, kT, ok, xA, Qu, kz, FV, fL, L, bL, eR, jx, v, j, aoe, V, g, J, ga, aod, aT, bq, af, ak, hM, qw, cu, t, aoi, ck, ac, bt, ao, aof, gx, sO, abq, rN, cx, d, aog, xs, eZ, kD, aob, iq, es, bE, dJ, ei, xg); #c1(BCHE) c2(XP_005247742) c3(cholinesterase isoform X1) c4(267953, 267954) c5(267955) c6( ) c7(T, fV, al, I, aoj, ci, VV, xy, wM, dv, K, H, CG, aoa, ZH, aW, IW, hl, g, bw, cm, yX, wE, U, cj, m, akA, aj, fr, aoc, aoh, on, Jj, CN, wZ, bJ, kT, ok, xA, Qu, kz, FV, fL, L, bL, eR, jx, v, j, aoe, V, g, J, ga, aod, aT, bq, af, ak, hM, qw, cu, t, aoi, ck, ac, bt, ao, aof, gx, sO, abq, rN, cx, d, aog, xs, eZ, kD, aob, iq, es, bE, dJ, ei, xg); #c1(BCKDHA) c2(NP_000700) c3(2-oxoisovalerate dehydrogenase subunit alpha, mitochondrial isoform 1 precursor) c4(14627, 14628, 14629, 14630) c5(14631, 14632, 14633, 14634, 14635, 14636, 14637, 14638, 14639, 14640, 14641, 14642, 14643, 14644, 14645, 14646, 14647, 14648, 14649, 14650, 14651, 14652, 14653, 14654, 14655, 14656, 14657, 14658, 14659, 14660, 14661, 14662, 14663, 14664, 14665, 14666, 14667, 14668, 14669, 14670, 14671, 14672, 14673, 14674, 14675, 14676, 14677, 14678, 14679, 14680, 14681, 14682, 14683, 14684, 14685, 14686, 14687, 14688, 14689, 14690, 14691, 14692, 14693, 14694, 14695, 14696, 14697, 14698, 14699, 14700, 14701, 14702, 14703, 14704, 14705, 14706, 14707, 14708, 14709, 14710, 14711, 14712, 14713, 14714, 14715, 14716, 14717, 14718, 14719, 14720, 14721, 14722, 14723, 14724, 14725, 14726, 14727, 14728, 14729) c6(14730) c7(aok, CT, agm, bq); #c1(BCKDHB) c2(NP_000047) c3(2-oxoisovalerate dehydrogenase subunit beta, mitochondrial precursor) c4(767, 768) c5(769, 770, 771, 772, 773, 774, 775, 776, 777, 778, 779, 780) c6( ) c7(T, aE, Ig, il, aW, eZ, aT, agm, bq, hX); #c1(BCKDHB) c2(XP_011534328) c3(2-oxoisovalerate dehydrogenase subunit beta, mitochondrial isoform X5) c4( ) c5(330698, 330699, 330700, 330701, 330702) c6( ) c7(T, aE, Ig, il, aW, eZ, aT, agm, bq, hX); #c1(BCKDHB) c2(XP_011534329) c3(2-oxoisovalerate dehydrogenase subunit beta, mitochondrial isoform X6) c4(330703) c5(330704, 330705, 330706, 330707, 330708, 330709, 330710, 330711, 330712) c6( ) c7(T, aE, Ig, il, aW, eZ, aT, agm, bq, hX); #c1(BCKDK) c2(NP_001116429) c3([3-methyl-2-oxobutanoate dehydrogenase [lipoamide]] kinase, mitochondrial isoform b precursor) c4( ) c5(43877, 43878, 43879, 43880, 43881) c6( ) c7(bN, nA, ha, aol); #c1(BCKDK) c2(NP_001258855) c3([3-methyl-2-oxobutanoate dehydrogenase [lipoamide]] kinase, mitochondrial isoform c) c4(96590) c5(96591, 96592, 96593, 96594, 96595) c6( ) c7(bN, nA, ha, aol); #c1(BCKDK) c2(NP_005872) c3([3-methyl-2-oxobutanoate dehydrogenase [lipoamide]] kinase, mitochondrial isoform a precursor) c4(160046, 160047) c5(160048, 160049, 160050, 160051, 160052, 160053, 160054, 160055, 160056, 160057, 160058, 160059) c6( ) c7(bN, nA, ha, aol); #c1(BCL10) c2(XP_011540701) c3(B-cell lymphoma/leukemia 10 isoform X4) c4( ) c5(339270, 339271) c6(339272, 339273) c7(T, fM, aoq, aD, if, ht, jh, aA, bB, n, aj, fd, ci, qN, aon, V, q, J, ad, eA, x, AW, ft, aop, xy, ib, aE, pe, fm, ajv, aT, kf, h, iY, K, hu, ae, YT, iU, vT, aW, Y, aoo, az, oV, ff, r, aq, aF, en, aom, bu, t, cl, KM, bz, g, Ld, iK, ck, es, eU, amS, c, bE, cj, aor, m, bt, it, B, hS); #c1(BCLIIA) c2(NP_060484) c3(B-cell lymphoma/leukemia 11A isoform 2) c4(196202, 196203, 196204) c5(196205, 196206, 196207, 196208, 196209, 196210, 196211, 196212, 196213, 196214, 196215, 196216, 196217, 196218, 196219, 196220, 196221, 196222, 196223) c6( ) c7(bL, T, fM, qb, eX, jh, rf, x, qK, oW, h, eV, aos, bK, pk, pq, kl, aot, ck, BU, qe, eM, iT, cj, k, ER, pw, bt); #c1(BCLIIA) c2(NP_075044) c3(B-cell lymphoma/leukemia 11A isoform 1) c4(213543) c5(213544, 213545, 213546, 213547, 213548, 213549) c6( ) c7(bL, T, fM, qb, eX, jh, rf, x, qK, oW, h, eV, aos, bK, pk, pq, kl, aot, ck, BU, qe, eM, iT, cj, k, ER, pw, bt); #c1(BCLIIA) c2(NP_612569) c3(B-cell lymphoma/leukemia 11A isoform 3) c4(236704) c5(236705, 236706, 236707, 236708, 236709, 236710) c6( ) c7(bL, T, fM, qb, eX, jh, rf, x, qK, oW, h, eV, aos, bK, pk, pq, kl, aot, ck, BU, qe, eM, iT, cj, k, ER, pw, bt); #c1(BCLIIA) c2(XP_011531213) c3(B-cell lymphoma/leukemia 11A isoform X3) c4(327180) c5(327181, 327182, 327183, 327184, 327185, 327186) c6( ) c7(bL, T, fM, qb, eX, jh, rf, x, qK, oW, h, eV, aos, bK, pk, pq, kl, aot, ck, BU, qe, eM, iT, cj, k, ER, pw, bt); #c1(BCLIIA) c2(XP_011531214) c3(B-cell lymphoma/leukemia 11A isoform X4) c4(327187) c5(327188, 327189, 327190, 327191, 327192, 327193) c6( ) c7(bL, T, fM, qb, eX, jh, rf, x, qK, oW, h, eV, aos, bK, pk, pq, kl, aot, ck, BU, qe, eM, iT, cj, k, ER, pw, bt); #c1(BCL11B) c2(NP_075049) c3(B-cell lymphoma/leukemia 11B isoform 2) c4(213578) c5(213579, 213580, 213581, 213582, 213583, 213584) c6( ) c7(T, aiY, Pt, yS, e, jh, oY, ci, hF, aje, x, kH, h, dx, je, iU, Az, dN, fe, hf, eE, iK, ck, iM, cj, k, bD, bt); #c1(BCL11B) c2(NP_612808) c3(B-cell lymphoma/leukemia 11B isoform 1) c4(236769) c5(236770, 236771, 236772, 236773, 236774, 236775) c6( ) c7(T, aiY, Pt, yS, e, jh, oY, ci, hF, aje, x, kH, h, dx, je, iU, Az, dN, fe, hf, eE, iK, ck, iM, cj, k, bD, bt); #c1(BCL2) c2(NP_000624) c3(apoptosis regulator Bcl-2 alpha isoform) c4(14035) c5(14036, 14037, 14038, 14039, 14040, 14041, 14042, 14043, 14044, 14045, 14046, 14047, 14048, 14049) c6(14050, 14051, 14052, 14053) c7(gh, T, ea, bO, fd, Vd, ci, aY, YD, bv, xy, aE, ajv, aoL, aoK, dV, hu, hH, aiJ, cp, aa, li, ly, ZH, az, zC, zE, lk, iA, nB, cj, cX, k, fy, de, ht, cQ, aj, PJ, br, aoc, aow, apG, Ak, IG, dU, ey, Dz, dd, YT, pl, apo, MD, Lh, ajz, hq, iO, dB, aoB, apE, AN, jp, fZ, aA, ol, cz, bX, lu, AO, q, zn, akU, kf, cy, jj, rv, eu, gP, NE, nO, Io, eS, cl, Cv, rR, iM, ac, iQ, nG, aor, aps, bt, rA, ao, gV, iW, jN, jh, dG, Sv, Gn, ape, xt, ad, hX, aoH, afb, Ie, oW, wm, amY, ahK, aoZ, apw, iz, WZ, gj, cH, ff, Of, aph, dq, app, iV, bz, abA, IC, ne, jr, iu, Tc, oO, bM, ID, anl, ya, if, bB, aon, ip, x, Ma, ja, bc, Qe, YL, xQ, eG, Mq, Jl, hl, kt, aoD, as, eE, eF, cm, bw, Qt, go, vA, apy, hh, Vj, dD, gU, wu, n, oY, aoQ, no, pe, jz, Bj, gd, eV, hn, gl, apD, cY, apc, oS, A, kj, fJ, GA, po, yq, YE, bP, apf, hL, at, SZ, fL, eo, cB, B, aoT, dA, eX, v, aoN, Q, V, eJ, qH, xx, hW, BJ, api, ae, jf, Lu, vT, ev, bu, apx, t, ho, aoy, ck, kP, wO, au, gX, vi, Dd, oR, eq, Fc, aoz, BY, Tg, hd, CJ, py, Db, LA, hD, nJ, d, je, hG, et, zR, aoF, aoW, dr, wW, bF, gk, wz, apv, rH, y, kS, hv, ng, aC, fR, hV, al, Qp, apF, Bc, pX, DD, K, aoV, apd, dF, eL, apl, aoo, apn, aB, aoY, apm, g, apB, aoS, iP, ou, AM, nF, U, dW, m, aov, QO, sw, Ol, aw, NT, fN, qy, apt, apz, KL, ft, kH, cU, CN, aoX, ks, Og, YF, yR, apl, yP, it, aox, anU, fM, aoE, jx, hz, j, il, pd, eA, er, XX, amg, Ig, bq, aoP, kl, Y, r, aou, en, aoG, apg, iK, bN, QG, Dy, c, apu, hc, np, dy, fD, LS, gx, kh, id, aZ, bS, hF, iJ, vN, dP, fX, oj, io, apH, Yi, IR, xs, eH, cr, hp, iR, N, pu, hE, G, apr, pf, qx, aoM, XW, apj, oi, H, pk, Zm, hm, akV, aW, eM, iT, uJ, nw, zv, cZ, ajm, fr, kO, qN, ai, eW, ke, Bl, co, TK, h, dL, pj, hB, mY, Df, afu, Nr, aiB, iw, aq, apk, kp, Hu, mo, Ca, op, lx, aoO, apa, Qu, hk, anC, hR, ajW, YH, bL, yk, hy, C, ze, aoC, Zp, ga, mP, nv, Vr, aoA, HC, aT, vH, dz, bK, an, af, aol, ak, qw, s, iU, oV, hf, f, Ta, sS, apq, wg, nM, Zg, IV, aoJ, ij, hS, Kd, Ke, aD, ha, Me, vm, Fb, oH, apC, mC, kL, av, F, ot, MS, ib, sO, zK, NS, nl, Od, fb, iL, apA, TC, qt, eZ, aph, Ej, aF, eK, es, aoR, bE, dJ, uR, aS, XO, X, Ex); #c1(BCL2) c2(NP_000648) c3(apoptosis regulator Bcl-2 beta isoform) c4(14157) c5(14158, 14159, 14160, 14161, 14162, 14163, 14164, 14165, 14166, 14167) c6(14168, 14169) c7(gh, T, ea, bO, fd, Vd, ci, aY, YD, bv, xy, aE, ajv, aoL, aoK, dV, hu, hH, aiJ, cp, aa, li, ly, ZH, az, zC, zE, lk, iA, nB, cj, cX, k, fy, de, ht, cQ, aj, PJ, br, aoc, aow, apG, Ak, IG, dU, ey, Dz, dd, YT, pl, apo, MD, Lh, ajz, hq, iO, dB, aoB, apE, AN, jp, fZ, aA, ol, cz, bX, lu, AO, q, zn, akU, kf, cy, jj, rv, eu, gP, NE, nO, Io, eS, cl, Cv, rR, iM, ac, iQ, nG, aor, aps, bt, rA, ao, gV, iW, jN, jh, dG, Sv, Gn, ape, xt, ad, hX, aoH, afb, Ie, oW, wm, amY, ahK, aoZ, apw, iz, WZ, gj, cH, ff, Of, aph, dq, app, iV, bz, abA, IC, ne, jr, iu, Tc, oO, bM, ID, anl, ya, if, bB, aon, ip, x, Ma, ja, bc, Qe, YL, xQ, eG, Mq, Jl, hl, kt, aoD, as, eE, eF, cm, bw, Qt, go, vA, apy, hh, Vj, dD, gU, wu, n, oY, aoQ, no, pe, jz, Bj, gd, eV, hn, gl, apD, cY, apc, oS, A, kj, fJ, GA, po, yq, YE, bP, apf, hL, at, SZ, fL, eo, cB, B, aoT, dA, eX, v, aoN, Qo, V, eJ, qH, xx, hW, BJ, api, ae, jf, Lu, vT, ev, bu, apx, t, ho, aoy, ck, kP, wO, au, gX, vi, Dd, oR, eq, Fc, aoz, BY, Tg, hd, CJ, py, Db, LA, hD, nJ, d, je, hG, et, zR, aoF, aoW, dr, wW, bF, gk, wz, apv, rH, y, kS, hv, ng, aC, fR, hV, al, Qp, apF, Bc, pX, DO, K, aoV, apd, dF, eL, apl, aoo, apn, aB, aoY, apm, g, apB, aoS, iP, ou, AM, nF, U, dW, m, aov, QO, sw, Ol, aw, NT, fN, qy, apt, apz, KL, ft, kH, cU, CN, aoX, ks, Og, YF, yR, apl, yP, it, aox, aoU, fM, aoE, jx, hz, j, il, pd, eA, er, XX, amg, Ig, bq, aoP, kl, Y, r, aou, en, aoG, apg, iK, bN, QG, Dy, c, apu, hc, np, dy, fD, LS, gx, kh, id, aZ, bS, hF, iJ, vN, dP, fX, oj, io, apH, Yi, IR, xs, eH, cr, hp, iR, Nq, pu, hE, G, apr, pf, qx, aoM, XW, apj, oi, H, pk, Zm, hm, akV, aW, eM, iT, uJ, nw, zv, cZ, ajm, fr, kO, qN, ai, eW, ke, Bl, co, TK, h, dL, pj, hB, mY, Df, afu, Nr, aiB, iw, aq, apk, kp, Hu, mo, Ca, op, lx, aoO, apa, Qu, hk, anC, hR, ajW, YH, bL, yk, hy, C, ze, aoC, Zp, ga, mP, nv, Vr, aoA, HC, aT, vH, dz, bK, an, af, aol, ak, qw, s, iU, oV, hf, f, Ta, sS, apq, wg, nM, Zg, IV, aoJ, ij, hS, Kd, Ke, aD, ha, Me, vm, Fb, oH, apC, mC, kL, av, F, ot, MS, ib, sO, zK, NS, nl, Od, fb, iL, apA, TC, qt, eZ, aph, Ej, aF, eK, es, aoR, bE, dJ, uR, aS, XO, X, Ex); #c1(BCL2A1) c2(NP_001108207) c3(bcl-2-related protein A1 isoform 2) c4(43154) c5(43155, 43156, 43157, 43158, 43159, 43160) c6( ) c7(bL, T, fM, fR, if, e, ht, iW, jh, aA, cz, fd, aj, j, ci, qN, Qp, g, J, ad, er, eA, apJ, qK, M, kH, aT, cy, h, dL, qD, ae, eL, je, aW, Y, r, aF, hf, eE, bz, ck, iM, eM, mg, cj, apv, cS, np, y, vQ); #c1(BCL2A1) c2(NP_004040) c3(bcl-2-related protein A1 isoform 1) c4(143063) c5(143064, 143065, 143066, 143067, 143068, 143069) c6( ) c7(bL, T, fM, fR, if, e, ht, iW, jh, aA, cz, fd, aj, j, ci, qN, Qp, g, J, ad, er, eA, apj, qK, M, kH, aT, cy, h, dL, qD, ae, eL, je, aW, Y, r, aF, hf, eE, bz, ck, iM, eM, mg, cj, apv, cS, np, y, vQ); #c1(BCL2L1) c2(NP_001182) c3(bcl-2-like protein 1 isoform 2) c4( ) c5( ) c6( ) c7(bM, T, aC, fR, fd, bB, ci, aon, bv, xy, xE, aE, fm, K, hu, eL, cp, eG, aW, aoo, wF, hl, g, as, eF, eM, iT, U, cj, m, RX, ht, NT, aw, n, aj, fr, PJ, ft, jz, pe, Lv, cU, h, dL, KV, YT, A, CM, aq, pm, dw, iO, it, B, bL, fM, jp, aA, cR, hy, V, q, J, eA, oT, BJ, aT, kf, cy, bq, an, ae, af, eu, ak, s, nO, iU, oV, Y, apK, r, en, aom, t, iK, ck, c, gX, bt, hS, kh, id, iW, jh, dG, Fc, ad, av, aop, ib, iY, hP, d, ff, wc, eH, aF, iR, KM, bz, iq, es, pc, bE, dJ, gZ, Fk, y, X, BA, Tc); #c1(BCL2L1) c2(XP_011527268) c3(bcl-2-like protein 1 isoform X3) c4( ) c5(321863, 321864, 321865, 321866, 321867, 321868, 321869, 321870, 321871, 321872, 321873, 321874, 321875, 321876, 321877, 321878, 321879, 321880, 321881, 321882, 321883, 321884, 321885, 321886, 321887, 321888, 321889, 321890) c6(321891, 321892, 321893, 321894, 321895, 321896, 321897, 321898) c7(bM, T, aC, fR, fd, bB, ci, aon, bv, xy, xE, aE, fm, K, hu, eL, cp, eG, aW, aoo, wF, hl, g, as, eF, eM, iT, U, cj, m, RX, ht, NT, aw, n, aj, fr, PJ, ft, jz, pe, Lv, cU, h, dL, KV, YT, A, CM, aq, pm, dw, iO, it, B, bL, fM, jp, aA, cR, hy, V, q, J, eA, oT, BJ, aT, kf, cy, bq, an, ae, af, eu, ak, s, nO, iU, oV, Y, apK, r, en, aom, t, iK, ck, c, gX, bt, hS, kh, id, iW, jh, dG, Fc, ad, av, aop, ib, iY, hP, d, ff, wc, eH, aF, iR, KM, bz, iq, es, pc, bE, dJ, gZ, Fk, y, X, BA, Tc); #c1(BCL2L10) c2(NP_065129) c3(bcl-2-like protein 10) c4(204078) c5(204079, 204080, 204081, 204082, 204083, 204084) c6( ) c7(ck, T, ft, fM, aW, iW, qx, r, aT, aA, h, aF, fd, ci, bw, hF, ht, ae, ad); #c1(BCL2L11) c2(NP_001191036) c3(bcl-2-like protein 11 isoform 12) c4(80859) c5(80860, 80861, 80862, 80863, 80864) c6( ) c7(T, fM, fR, IT, sw, iW, jh, aA, bB, fd, hy, j, ci, fr, q, ad, x, av, ft, vJ, pX, aT, cU, K, pk, fb, ae, Yi, apL, gj, d, BN, s, B, iU, aW, Y, oV, eH, ff, r, hN, en, cl, g, t, eF, bz, cm, mK, ck, bF, eM, iA, aeB, bE, hL, cj, hR, k, m, bt, ne); #c1(BCL2L11) c2(NP_001191037) c3(bcl-2-like protein 11 isoform 13) c4(80865) c5(80866, 80867, 80868, 80869, 80870, 80871, 80872) c6( ) c7(T, fM, fR, IT, sw, iW, jh, aA, bB, fd, hy, j, ci, fr, q, ad, x, av, ft, vJ, pX, aT, cU, K, pk, fb, ae, Yi, apL, gj, d, BN, s, B, iU, aW, Y, oV, eH, ff, r, hN, en, cl, g, t, eF, bz, cm, mK, ck, bF, eM, iA, aeB, bE, hL, cj, hR, k, m, ht, ne); #c1(BCL2L11) c2(NP_001191038) c3(bcl-2-like protein 11 isoform 14) c4(80873) c5(80874, 80875, 80876, 80877, 80878, 80879) c6( ) c7(T, fM, fR, IT, sw, iW, jh, aA, bB, fd, hy, j, ci, fr, q, ad, x, av, ft, vJ, pX, aT, cU, K, pk, fb, ae, Yi, apL, gj, d, BN, s, B, iU, aW, Y, oV, eH, ff, r, hN, en, cl, g, t, eF, bz, cm, mK, ck, bF, eM, iA, aeB, bE, hL, cj, hR, k, m, bt, ne); #c1(BCL2L11) c2(NP_001191039) c3(bcl-2-like protein 11 isoform 15) c4(80880) c5(80881, 80882, 80883, 80884, 80885, 80886) c6( ) c7(T, fM, fR, IT, sw, iW, jh, aA, bB, fd, hy, j, ci, fr, q, ad, x, av, ft, vJ, pX, aT, cU, K, pk, fb, ae, Yi, apL, gj, d, BN, s, B, iU, aW, Y, oV, eH, ff, r, hN, en, cl, g, t, eF, bz, cm, mK, ck, bF, eM, iA, aeB, bE, hL, cj, hR, k, m, bt, ne); #c1(BCL2L11) c2(NP_001191040) c3(bcl-2-like protein 11 isoform 16) c4( ) c5(80887) c6( ) c7(T, fM, fR, IT, sw, iW, jh, aA, bB, fd, hy, j, ci, fr, q, ad, x, av, ft, vJ, pX, aT, cU, K, pk, fb, ae, Yi, apL, gj, d, BN, s, B, iU, aW, Y, oV, eH, ff, r, hN, en, cl, g, t, eF, bz, cm, mK, ck, bF, eM, iA, aeB, bE, hL, cj, hR, k, m, bt, ne); #c1(BCL2L11) c2(NP_001191041) c3(bcl-2-like protein 11 isoform 17) c4(80888) c5(80889, 80890, 80891, 80892, 80893, 80894) c6( ) c7(T, fM, fR, IT, sw, iW, jh, aA, bB, fd, hy, j, ci, fr, q, ad, x, av, ft, vJ, pX, aT, cU, K, pk, fb, ae, Yi, apL, gj, d, BN, s, B, iU, aW, Y, oV, eH, ff, r, hN, en, cl, g, t, eF, bz, cm, mK, ck, bF, eM, iA, aeB, bE, hL, cj, hR, k, m, bt, ne); #c1(BCL2L11) c2(NP_001191042) c3(bcl-2-like protein 11 isoform 18) c4( ) c5(80895, 80896, 80897, 80898, 80899, 80900) c6( ) c7(T, fM, fR, IT, sw, iW, jh, aA, bB, fd, hy, j, ci, fr, q, ad, x, av, ft, vJ, pX, aT, cU, K, pk, fb, ae, Yi, apL, gj, d, BN, s, B, iU, aW, Y, oV, eH, ff, r, hN, en, cl, g, t, eF, bz, cm, mK, ck, bF, eM, iA, aeB, bE, hL, cj, hR, k, m, bt, ne); #c1(BCL2L11) c2(NP_006529) c3(bcl-2-like protein 11 isoform 6) c4( ) c5(166039, 166040, 166041, 166042, 166043) c6( ) c7(T, fM, fR, IT, sw, iW, jh, aA, bB, fd, hy, j, ci, fr, q, ad, x, av, ft, vJ, pX, aT, cU, K, pk, fb, ae, Yi, apL, gj, d, BN, s, B, iU, aW, Y, oV, eH, ff, r, hN, en, cl, g, t, eF, bz, cm, mK, ck, bF, eM, iA, aeB, bE, hL, cj, hR, k, m, bt, ne); #c1(BCL2L11) c2(NP_619527) c3(bcl-2-like protein 11 isoform 1) c4( ) c5(236824, 236825, 236826, 236827, 236828) c6( ) c7(T, fM, fR, IT, sw, iW, jh, aA, bB, fd, hy, j, ci, fr, q, ad, x, av, ft, vJ, pX, aT, cU, K, pk, fb, ae, Yi, apL, gj, d, BN, s, B, iU, aW, Y, oV, eH, ff, r, hN, en, cl, g, t, eF, bz, cm, mK, ck, bF, eM, iA, aeB, bE, hL, cj, hR, k, m, bt, ne); #c1(BCL2L11) c2(NP_619530) c3(bcl-2-like protein 11 isoform 4) c4(236829) c5(236830, 236831, 236832, 236833, 236834) c6( ) c7(T, fM, fR, IT, sw, iW, jh, aA, bB, fd, hy, j, ci, fr, q, ad, x, av, ft, vJ, pX, aT, cU, K, pk, fb, ae, Yi, apL, gj, d, BN, s, B, iU, aW, Y, oV, eH, ff, r, hN, en, cl, g, t, eF, bz, cm, mK, ck, bF, eM, iA, aeB, bE, hL, cj, hR, k, m, bt, ne); #c1(BCL2L11) c2(NP_619531) c3(bcl-2-like protein 11 isoform 5) c4(236835) c5(236836) c6( ) c7(T, fM, fR, IT, sw, iW, jh, aA, bB, fd, hy, j, ci, fr, q, ad, x, av, ft, vJ, pX, aT, cU, K, pk, fb, ae, Yi, apL, gj, d, BN, s, B, iU, aW, Y, oV, eH, ff, r, hN, en, cl, g, t, eF, bz, cm, mK, ck, bF, eM, iA, aeB, bE, hL, cj, hR, k, m, bt, ne); #c1(BCL2L11) c2(NP_619532) c3(bcl-2-like protein 11 isoform 7) c4( ) c5(236837, 236838, 236839, 236840, 236841, 236842, 236843, 236844, 236845, 236846) c6( ) c7(T, fM, fR, IT, sw, iW, jh, aA, bB, fd, hy, j, ci, fr, q, ad, x, av, ft, vJ, pX, aT, cU, K, pk, fb, ae, Yi, apL, gj, d, BN, s, B, iU, aW, Y, oV, eH, ff, r, hN, en, cl, g, t, eF, bz, cm, mK, ck, bF, eM, iA, aeB, bE, hL, cj, hR, k, m, bt, ne); #c1(BCL2L11) c2(NP_996885) c3(bcl-2-like protein 11 isoform 9) c4( ) c5(264805, 264806, 264807, 264808, 264809) c6( ) c7(T, fM, fR, IT, sw, iW, jh, aA, bB, fd, hy, j, ci, fr, q, ad, x, av, ft, vJ, pX, aT, cU, K, pk, fb, ae, Yi, apL, gj, d, BN, s, B, iU, aW, Y, oV, eH, ff, r, hN, en, cl, g, t, eF, bz, cm, mK, ck, bF, eM, iA, aeB, bE, hL, cj, hR, k, m, bt, ne); #c1(BCL2L11) c2(XP_005263607) c3(bcl-2-like protein 11 isoform X1) c4(278484) c5( ) c6( ) c7(T, fM, fR, IT, sw, iW, jh, aA, bB, fd, hy, j, ci, fr, q, ad, x, av, ft, vJ, pX, aT, cU, K, pk, fb, ae, Yi, apL, gj, d, BN, s, B, iU, aW, Y, oV, eH, ff, r, hN, en, cl, g, t, eF, bz, cm, mK, ck, bF, eM, iA, aeB, bE, hL, cj, hR, k, m, bt, ne); #c1(BCL2L11) c2(XP_005263608) c3(bcl-2-like protein 11 isoform X2) c4(278485) c5(278486) c6( ) c7(T, fM, fR, IT, sw, iW, jh, aA, bB, fd, hy, j, ci, fr, q, ad, x, av, ft, vJ, pX, aT, cU, K, pk, fb, ae, Yi, apL, gj, d, BN, s, B, iU, aW, Y, oV, eH, ff, r, hN, en, cl, g, t, eF, bz, cm, mK, ck, bF, eM, iA, aeB, bE, hL, cj, hR, k, m, bt, ne); #c1(BCL2L11) c2(XP_005263610) c3(bcl-2-like protein 11 isoform X6) c4(278487) c5(278488) c6( ) c7(T, fM, fR, IT, sw, iW, jh, aA, bB, fd, hy, j, ci, fr, q, ad, x, av, ft, vJ, pX, aT, cU, K, pk, fb, ae, Yi, apL, gj, d, BN, s, B, iU, aW, Y, oV, eH, ff, r, hN, en, cl, g, t, eF, bz, cm, mK, ck, bF, eM, iA, aeB, bE, hL, cj, hR, k, m, bt, ne); #c1(BCL2L11) c2(XP_005263611) c3(bcl-2-like protein 11 isoform X7) c4( ) c5(278489, 278490) c6( ) c7(T, fM, fR, IT, sw, iW, jh, aA, bB, fd, hy, j, ci, fr, q, ad, x, av, ft, vJ, pX, aT, cU, K, pk, fb, ae, Yi, apL, gj, d, BN, s, B, iU, aW, Y, oV, eH, ff, r, hN, en, cl, g, t, eF, bz, cm, mK, ck, bF, eM, iA, aeB, bE, hL, cj, hR, k, m, bt, ne); #c1(BCL2L11) c2(XP_005263616) c3(bcl-2-like protein 11 isoform X12) c4( ) c5(278491) c6( ) c7(T, fM, fR, IT, sw, iW, jh, aA, bB, fd, hy, j, ci, fr, q, ad, x, av, ft, vJ, pX, aT, cU, K, pk, fb, ae, Yi, apL, gj, d, BN, s, B, iU, aW, Y, oV, eH, ff, r, hN, en, cl, g, t, eF, bz, cm, mK, ck, bF, eM, iA, aeB, bE, hL, cj, hR, k, m, bt, ne); #c1(BCL2L11) c2(XP_005263618) c3(bcl-2-like protein 11 isoform X14) c4( ) c5(278492, 278493, 278494, 278495, 278496, 278497) c6( ) c7(T, fM, fR, IT, sw, iW, jh, aA, bB, fd, hy, j, ci, fr, q, ad, x, av, ft, vJ, pX, aT, cU, K, pk, fb, ae, Yi, apL, gj, d, BN, s, B, iU, aW, Y, oV, eH, ff, r, hN, en, cl, g, t, eF, bz, cm, mK, ck, bF, eM, iA, aeB, bE, hL, cj, hR, k, m, bt, ne); #c1(BCL2L11) c2(XP_011508765) c3(bcl-2-like protein 11 isoform X8) c4(299366, 299367) c5( ) c6( ) c7(T, fM, fR, IT, sw, iW, jh, aA, bB, fd, hy, j, ci, fr, q, ad, x, av, ft, vJ, pX, aT, cU, K, pk, fb, ae, Yi, apL, gj, d, BN, s, B, iU, aW, Y, oV, eH, ff, r, hN, en, cl, g, t, eF, bz, cm, mK, ck, bF, eM, iA, aeB, bE, hL, cj, hR, k, m, bt, ne); #c1(BCL2L11) c2(XP_011508766) c3(bcl-2-like protein 11 isoform X11) c4(299368) c5(299369) c6( ) c7(T, fM, fR, IT, sw, iW, jh, aA, bB, fd, hy, j, ci, fr, q, ad, x, av, ft, vJ, pX, aT, cU, K, pk, fb, ae, Yi, apL, gj, d, BN, s, B, iU, aW, Y, oV, eH, ff, r, hN, en, cl, g, t, eF, bz, cm, mK, ck, bF, eM, iA, aeB, bE, hL, cj, hR, k, m, bt, ne); #c1(BCL2L11) c2(XP_011508767) c3(bcl-2-like protein 11 isoform X13) c4(299370) c5( ) c6( ) c7(T, fM, fR, IT, sw, iW, jh, aA, bB, fd, hy, j, ci, fr, q, ad, x, av, ft, vJ, pX, aT, cU, K, pk, fb, ae, Yi, apL, gj, d, BN, s, B, iU, aW, Y, oV, eH, ff, r, hN, en, cl, g, t, eF, bz, cm, mK, ck, bF, eM, iA, aeB, bE, hL, cj, hR, k, m, bt, ne); #c1(BCL2L12) c2(NP_001035758) c3(bcl-2-like protein 12 isoform 3) c4(33049) c5(33050, 33051, 33052, 33053, 33054, 33055, 33056) c6( ) c7(gk, T, d, Jl, aW, bE, iW, al, jx, aT, cj, n, aA, dL, bB, m, eA, aF, t, eL, X); #c1(BCL2L12) c2(NP_001269446) c3(bcl-2-like protein 12 isoform 2) c4(101683) c5(101684, 101685, 101686, 101687, 101688) c6( ) c7(gk, T, d, Jl, aW, bE, iW, al, jx, aT, cj, n, aA, dL, bB, m, eA, aF, t, eL, X); #c1(BCL2L12) c2(NP_619580) c3(bcl-2-like protein 12 isoform 1) c4(236887) c5(236888, 236889, 236890, 236891, 236892, 236893) c6( ) c7(gk, T, d, Jl, aW, bE, iW, al, jx, aT, cj, n, aA, dL, bB, m, eA, aF, t, eL, X); #c1(BCL2L13) c2(NP_001257656) c3(bcl-2-like protein 13 isoform c) c4( ) c5(95549, 95550) c6( ) c7(aq, iW, B, ad); #c1(BCL2L13) c2(NP_001257660) c3(bcl-2-like protein 13 isoform e) c4( ) c5(95551, 95552, 95553, 95554, 95555, 95556, 95557, 95558, 95559, 95560, 95561, 95562, 95563, 95564, 95565) c6( ) c7(aq, iW, B, ad); #c1(BCL2L13) c2(NP_001257663) c3(bcl-2-like protein 13 isoform h) c4(95566, 95567) c5(95568, 95569, 95570, 95571, 95572) c6( ) c7(aq, iW, B, ad); #c1(BCL2L13) c2(NP_001257664) c3(bcl-2-like protein 13 isoform i) c4( ) c5(95573, 95574, 95575, 95576, 95577) c6( ) c7(aq, iW, B, ad); #c1(BCL2L13) c2(XP_011544423) c3(bcl-2-like protein 13 isoform X1) c4(343513, 343514, 343515, 343516) c5(343517, 343518, 343519, 343520, 343521, 343522, 343523, 343524, 343525, 343526, 343527, 343528, 343529, 343530, 343531, 343532) c6( ) c7(aq, iW, B, ad); #c1(BCL2L13) c2(XP_011544424) c3(bcl-2-like protein 13 isoform X4) c4( ) c5(343533) c6( ) c7(aq, iW, B, ad); #c1(BCL2L14) c2(NP_110393) c3(apoptosis facilitator Bcl-2-like protein 14 isoform 2) c4(219996) c5(219997, 219998, 219999, 220000, 220001, 220002, 220003, 220004, 220005, 220006, 220007, 220008, 220009, 220010, 220011, 220012, 220013) c6( ) c7(cF, id, aW, eL, iW, aT, dL, ae, ad); #c1(BCL2L14) c2(XP_011519151) c3(apoptosis facilitator Bcl-2-like protein 14 isoform X1) c4(313741, 313742, 313743) c5(313744, 313745, 313746, 313747, 313748, 313749, 313750, 313751, 313752, 313753, 313754) c6( ) c7(cF, id, aW, eL, iW, aT, dL, ae, ad); #c1(BCL2L2) c2(NP_004041) c3(bcl-2-like protein 2) c4(143070, 143071) c5(143072, 143073, 143074, 143075, 143076, 143077, 143078, 143079, 143080, 143081, 143082, 143083, 143084, 143085, 143086, 143087, 143088, 143089, 143090, 143091, 143092, 143093, 143094, 143095, 143096, 143097, 143098, 143099, 143100, 143101) c6( ) c7(T, gU, fM, iW, hy, V, eA, ft, aT, vH, ne, af, d, BN, ND, iU, B, aW, cm, ck, eM, iu); #c1(BCL2L2-PABPN1) c2(NP_001186793) c3(BCL2L2-PABPN1 protein) c4(78596, 78597, 78598) c5( ) c6( ) c7(ck, iu, T, ft, d, eM, aW, aT, cm, V, eA); #c1(BCL3) c2(XP_011525499) c3(B-cell lymphoma 3 protein isoform X1) c4(319891) c5(319892, 319893, 319894, 319895, 319896, 319897, 319898, 319899) c6( ) c7(T, fM, iW, e, eX, jh, ad, Na, aT, kH, h, dz, eV, Nc, ji, ae, apN, bc, je, aW, Y, fe, iV, eE, t, dR, ck, apM, iM, cj, m); #c1(BCL3) c2(XP_011525501) c3(B-cell lymphoma 3 protein isoform X2) c4(319900) c5(319901, 319902, 319903, 319904, 319905, 319906) c6( ) c7(T, fM, iW, e, eX, jh, ad, Na, aT, kH, h, dz, eV, Nc, ji, ae, apN, bc, je, aW, Y, fe, iV, eE, t, dR, ck, apM, iM, cj, m); #c1(BCL6) c2(NP_001124317) c3(B-cell lymphoma 6 protein isoform 1) c4(48537) c5(48538, 48539, 48540, 48541, 48542, 48543, 48544, 48545, 48546, 48547) c6( ) c7(gx, T, os, fM, dA, ajm, id, iW, jx, eX, oA, aA, Bm, fd, oZ, apR, jh, ci, hF, iJ, ip, x, apS, F, apQ, hW, zK, aT, io, h, eV, hn, hP, ox, jj, pk, fb, jJ, Df, aol, Fp, Uf, d, iU, kS, aW, Y, eH, aph, Of, Og, aF, aoD, Ca, eF, f, fs, op, Wt, ck, kn, ik, bP, iQ, apO, dB, Zg, vA, cj, at, SZ, k, ij, zv, i, y, apE, apP, jr); #c1(BCL6) c2(NP_001128210) c3(B-cell lymphoma 6 protein isoform 2) c4(49692, 49693, 49694) c5(49695, 49696, 49697, 49698, 49699, 49700, 49701, 49702, 49703, 49704, 49705, 49706, 49707, 49708, 49709, 49710, 49711, 49712) c6( ) c7(gx, T, os, fM, dA, ajm, id, iW, jx, eX, oA, aA, Bm, fd, oZ, apR, jh, ci, hF, iJ, ip, x, apS, F, apQ, hW, zK, aT, io, h, eV, hn, hP, ox, jj, pk, fb, jJ, Df, aol, Fp, Uf, d, iU, kS, aW, Y, eH, aph, Of, Og, aF, aoD, Ca, eF, f, fs, op, Wt, ck, kn, ik, bP, iQ, apO, dB, Zg, vA, cj, at, SZ, k, ij, zv, i, y, apE, apP, jr); #c1(BCL68) c2(NP_862827) c3(B-cell CLL/lymphoma 6 member 8 protein) c4(255789, 255790) c5(255791, 255792, 255793, 255794, 255795, 255796, 255797, 255798, 255799, 255800, 255801, 255802, 255803) c6( ) c7(ds, T, aF, aA); #c1(BCL7A) c2(NP_001019979) c3(B-cell CLL/lymphoma 7 protein family member A isoform b) c4(27979) c5(27980, 27981, 27982, 27983, 27984, 27985) c6( ) c7(apT, pk, iW, fM, xR); #c1(BCL7A) c2(NP_066273) c3(B-cell CLL/lymphoma 7 protein family member A isoform a) c4(206891) c5(206892, 206893, 206894, 206895, 206896, 206897) c6( ) c7(aPT, pk, iW, fM, xR); #c1(BCL7B) c2(NP_001184173) c3(B-cell CLL/lymphoma 7 protein family member B isoform 2) c4(75506) c5(75507, 75508, 75509, 75510, 75511, 75512) c6( ) c7(bL, g, ei); #c1(BCL7B) c2(NP_001698) c3(B-cell CLL/lymphoma 7 protein family member B isoform 1) c4(120113) c5(120114, 120115, 120116, 120117, 120118, 120119) c6( ) c7(bL, g, ei); #c1(BCL7C) c2(NP_001273455) c3(B-cell CLL/lymphoma 7 protein family member C isoform 1) c4(104951) c5(104952, 104953, 104954, 104955, 104956, 104957) c6( ) c7(fM); #c1(BCL7C) c2(NP_004756) c3(B-cell CLL/lymphoma 7 protein family member C isoform 2) c4(149343) c5(149344, 149345, 149346, 149347, 149348, 149349, 149350) c6( ) c7(fM); #c1(BCL9L) c2(NP_872363) c3(B-cell CLL/lymphoma 9-like protein) c4(256223, 256224, 256225) c5(256226, 256227, 256228, 256229, 256230, 256231, 256232, 256233, 256234, 256235, 256236, 256237, 256238, 256239, 256240, 256241, 256242, 256243) c6( ) c7(ac, s, X, ha, aj, IQ, cd, Qe); #c1(BCLAF1) c2(NP_001070908) c3(bcl-2-associated transcription factor 1 isoform 2) c4(34905) c5(34906, 34907, 34908, 34909, 34910, 34911, 34912, 34913, 34914, 34915) c6( ) c7(iW, ft, Fw); #c1(BCLAF1) c2(NP_001070909) c3(bcl-2-associated transcription factor 1 isoform 3) c4(34916, 34917) c5(34918, 34919, 34920, 34921, 34922, 34923) c6( ) c7(iW, ft, Fw); #c1(BCLAF1) c2(NP_001287967) c3(bcl-2-associated transcription factor 1 isoform 4) c4(113279) c5(113280, 113281, 113282, 113283, 113284, 113285, 113286, 113287, 113288, 113289, 113290, 113291) c6( ) c7(iW, ft, Fw); #c1(BCLAF1) c2(NP_055554) c3(bcl-2-associated transcription factor 1 isoform 1) c4(181914) c5( ) c6( ) c7(iW, ft, Fw); #c1(BCLAF1) c2(XP_005267296) c3(bcl-2-associated transcription factor 1 isoform X3) c4( ) c5(280882, 280883, 280884, 280885, 280886, 280887, 280888, 280889) c6( ) c7(iW, ft, Fw); #c1(BCO1) c2(NP_059125) c3(beta,beta-carotene 15,15′-monooxygenase) c4(193149, 193150) c5(193151, 193152, 193153, 193154, 193155, 193156, 193157, 193158, 193159, 193160, 193161, 193162) c6( ) c7(bL, T, IR, W, bE, aW, aT, bB, yy, h, apU, ae, q, ad); #c1(BCO2) c2(NP_001243326) c3(beta,beta-carotene 9′,10′-oxygenase isoform c) c4(90410) c5(90411, 90412, 90413, 90414, 90415) c6( ) c7(K); #c1(BCO2) c2(NP_114144) c3(beta,beta-carntene 9′,10′-oxygenase isoform a) c4(222323, 222324) c5(222325, 222326, 222327, 222328, 222329, 222330, 222331, 222332, 222333, 222334, 222335, 222336, 222337, 222338, 222339, 222340, 222341, 222342, 222343, 222344, 222345) c6( ) c7(K); #c1(BCOR) c2(NP_001116855) c3(BCL-6 corepressor isoform a) c4(44006, 44007, 44008) c5(44009, 44010, 44011, 44012, 44013, 44014, 44015, 44016, 44017, 44018) c6( ) c7(ka, T, bs, br, qK, KN, jj, dx, apV, if, jf, kj, gm, eF, bw, ck, kn, bP, ki, apW, cj, Km, Th, bt, B); #c1(BCOR) c2(XP_005272677) c3(BCL-G corepressor isoform X1) c4(284122, 284123) c5(284124, 284125, 284126, 284127, 284128, 284129, 284130, 284131, 284132, 284133, 284134, 284135, 284136, 284137, 284138, 284139, 284140, 284141, 284142) c6( ) c7(ka, T, bs, br, qK, KN, jj, dx, apV, iF, jf, kj, gm, eF, bw, ck, kn, bP, ki, apW, cj, Km, Th, bt, B); #c1(BCOR) c2(XP_011542233) c3(BCL-6 corepressor isoform X2) c4(340727) c5(340728, 340729, 340730, 340731, 340732, 340733, 340734, 340735, 340736, 340737, 340738) c6( ) c7(ka, T, bs, br, qK, KN, jj, dx, apV, iF, jf, kj, gm, eF, bw, ck, kn, bP, ki, apW, cj, Km, Th, bt, B); #c1(BCDRL1) c2(NP_068765) c3(BCL-6 corepressor-like protein 1) c4(210275) c5(210276, 210277, 210278, 210279, 210280, 210281, 210282, 210283, 210284, 210285) c6( ) c7(ka, T, bP, aW, ki, qK, aT, bs, jj, bw, bt, B, br); #c1(BCORL1) c2(XP_005262513) c3(BCL-6 corepressor-like protein 1 isoform X3) c4(277976, 277977) c5(277978, 277979, 277980, 277981, 277982, 277983, 277984, 277985, 277986, 277987, 277988, 277989, 277990, 277991) c6( ) c7(ka, T, bP, aW, ki, qK, aT, bs, jj, bw, bt, B, br); #c1(BCORL1) c2(XP_006724842) c3(BCL-6 corepressor-like protein 1 isoform X2) c4(296452) c5( ) c6( ) c7(ka, T, bP, aW, ki, qK, aT, bs, jj, bw, bt, B, br); #c1(BCR) c2(NP_004318) c3(breakpoint cluster region protein isoform 1) c4(145117, 145118, 145119, 145120, 145121, 145122) c5(145123, 145124, 145125, 145126, 145127, 145128, 145129, 145130, 145131, 145132, 145133, 145134) c6( ) c7(T, os, qx, al, bO, fd, ip, x, oG, K, or, mH, pr, fc, Ku, bw, Qt, ou, iT, vA, cj, k, R, qm, gp, RX, Or, oE, n, ko, oY, br, oC, kH, eV, hn, dL, ox, pi, dx, fe, pm, apX, op, Wt, bP, at, apY, pg, B, fM, dA, eX, oD, fZ, ol, apZ, v, g, er, zn, oT, fh, dz, oF, bK, jj, af, jf, iU, Y, r, hf, ho, ck, ov, iM, oX, bt, Ze, vi, ow, oA, bs, jh, oZ, oH, hF, ad, afb, fX, oW, iY, fb, pq, iL, aqa, d, je, et, eZ, kD, bz, eU, Ew, pc, cP, y, kS, jr); #c1(BCR) c2(NP_067585) c3(breakpoint cluster region protein isoform 2) c4(209003) c5(209004, 209005, 209006, 209007, 209008, 209009, 209010, 209011, 209012, 209013, 209014, 209015, 209016, 209017, 209018, 209019, 209020, 209021, 209022, 209023, 209024, 209025, 209026, 209027, 209028, 209029, 209030, 209031, 209032, 209033) c6( ) c7(T, os, qx, al, bO, fd, ip, x, oG, K, or, mH, pr, fc, Ku, bw, Qt, ou, iT, vA, cj, k, R, qm, gp, RX, Or, oE, n, ko, oY, br, oC, kH, eV, hn, dL, ox, pi, dx, fe, pm, apX, op, Wt, bP, at, apY, pg, B, fM, dA, eX, oD, fZ, ol, apZ, v, q, er, zn, oT, fh, dz, oF, bK, jj, af, jf, iU, Y, r, hf, ho, ck, ov, iM, oX, bt, Ze, vi, ow, oA, bs, jh, oZ, oH, hF, ad, afb, fX, oW, iY, fb, pq, iL, aqa, d, je, et, eZ, kD, bz, eU, Ew, pc, cP, y, kS, jr); #c1(BCS1L) c2(NP_001073335) c3(mitochondrial chaperone BCS1) c4(35896, 35897, 35898, 35899) c5(35900, 35901, 35902, 35903, 35904, 35905, 35906, 35907, 35908, 35909, 35910, 35911, 35912, 35913, 35914, 35915, 35916, 35917, 35918, 35919, 35920, 35921, 35922, 35923, 35924, 35925, 35926, 35927, 35928, 35929, 35930, 35931, 35932, 35933, 35934, 35935, 35936, 35937, 35938, 35939, 35940, 35941, 35942, 35943, 35944, 35945, 35946, 35947, 35948, 35949, 35950, 35951) c6( ) c7(T, DM, aqd, aqf, aqb, eA, hb, h, K, aqe, aH, ajU, kE, ev, cm, kC, eK, cT, SE, aqc, mG, bt); #c1(BDH1) c2(NP_976059) c3(D-beta-hydroxybutyrate dehydrogenase, mitochondrial precursor) c4(262904, 262905, 262906, 262907) c5(262908, 262909, 262910, 262911, 262912, 262913, 262914, 262915, 262916, 262917, 262918, 262919, 262920, 262921, 262922, 262923, 262924, 262925, 262926, 262927, 262928, 262929, 262930, 262931, 262932, 262933) c6( ) c7(aW, hr, aT, fQ, bq, Kp, eA); #c1(BDH1) c2(XP_011511370) c3(D-beta-hydroxybutyrate dehydrogenase, mitochondrial isoform X3) c4( ) c5(301943, 301944, 301945, 301946, 301947, 301948) c6( ) c7(aW, hr, aT, fQ, bq, Kp, eA); #c1(BDH2) c2(XP_005263197) c3(3-hydroxybutyrate dehydrogenase type 2 isoform X3) c4( ) c5(278346, 278347, 278348, 278349, 278350, 278351, 278352, 278353, 278354, 278355, 278356, 278357) c6( ) c7(d, yw, m, as, Rc, t, bt); #c1(BDH2) c2(XP_011530429) c3(3-hydroxybutyrate dehydrogenase type 2 isoform X2) c4(326293, 326294) c5( ) c6( ) c7(d, yw, m, as, Rc, t, bt); #c1(BDH2) c2(XP_011530430) c3(3-hydroxybutyrate dehydrogenase type 2 isoform X1) c4(326295) c5(326296, 326297, 326298, 326299, 326300, 326301) c6( ) c7(d, yw, m, as, Rc, t, bt); #c1(BDKRB1) c2(NP_000701) c3(BI bradykinin receptor) c4(14731) c5(14732, 14733, 14734, 14735, 14736, 14737) c6( ) c7(bM, T, eR, e, ha, My, aw, aA, GP, cz, aj, v, j, eb, il, aY, V, eA, iu, uT, aT, ey, K, bq, he, dl, uX, s, ES, aW, sm, fe, aF, iV, qa, xZ, vy, JM, dy, eo, st); #c1(BDKRB2) c2(NP_000614) c3(B2 bradykinin receptor) c4(13780, 13781) c5(13782, 13783, 13784, 13785, 13786, 13787, 13788, 13789, 13790, 13791, 13792, 13793, 13794, 13795, 13796, 13797, 13798, 13799, 13800, 13801) c6( ) c7(bL, bM, T, Fj, eR, oe, ha, e, uG, aA, GP, cz, My, aj, j, v, bO, ww, il, aY, eA, aw, cc, ql, bK, bq, he, sR, dl, af, aa, UO, tb, sm, fe, aF, uC, qa, ar, RJ, vy, at, IC, iu, y, qc); #c1(BDNF) c2(NP_001137280) c3(brain-derived neurotrophic factor isoform a preproprotein) c4( ) c5(55198, 55199, 55200, 55201, 55202, 55203, 55204, 55205, 55206, 55207, 55208, 55209, 55210, 55211, 55212, 55213, 55214, 55215, 55216, 55217, 55218, 55219, 55220, 55221, 55222, 55223, 55224, 55225, 55226, 55227, 55228, 55229, 55230, 55231, 55232, 55233, 55234, 55235, 55236, 55237, 55238, 55239, 55240, 55241) c6( ) c7(ID, tJ, T, uK, bM, Fv, xo, aqo, e, Ir, bO, fd, gf, HH, aR, ku, il, fm, bW, pX, Fo, Qk, M, iX, aU, abj, K, qM, aqD, oi, H, xa, aqn, KC, ZH, amy, LC, aqB, aW, wf, fc, abn, vt, Ku, Eg, as, eE, cm, mZ, yX, aqr, bb, eM, aqz, nB, ZT, U, vy, sv, nw, uJ, m, act, Zo, cZ, FW, gU, OI, My, fN, aqy, aj, ww, ct, nA, aqL, Vs, ke, Mo, ft, Hx, alq, aqJ, rl, Lv, IG, By, aqK, h, eV, dd, mV, mY, he, dx, aqi, mU, abf, aqg, PT, CN, A, aqA, dw, cM, fq, aqG, Jh, cv, mX, bJ, hq, ok, amt, aqp, cA, bP, dB, Ei, Be, hL, vL, at, JM, aqm, eo, IB, cB, mT, Wl, B, L, bL, qc, it, jd, fM, iH, fG, IH, He, gQ, eX, aA, cR, mS, ti, cz, j, v, bX, aql, il, GC, V, q, J, aqs, aqF, er, eA, PW, aqt, di, aqN, yw, HJ, nv, WY, hb, uT, rS, aql, HC, aT, kf, cy, bK, an, rE, ae, apN, Ir, agC, af, eu, ak, aqv, if, jf, Y, yL, abi, ahe, r, cu, aaE, HL, en, cl, t, f, iK, FT, tl, ck, Qi, pH, cT, bN, ac, c, rR, yW, wO, mG, aqH, Da, JH, EY, fD, gT, hl, kh, qX, VR, id, wi, aqh, iW, ha, jN, Gd, bS, aqu, fu, uu, qi, hF, ad, BY, dP, HF, aqq, hd, ot, mW, sO, aqk, aqx, xp, ahK, nJ, na, aqE, d, VX, aqj, tb, aal, aog, et, Gv, ff, gC, zR, eZ, gl, aF, Z, FX, jb, bz, dr, DF, eK, Hw, EW, aqM, z, dJ, aaG, MJ, cP, ei, pK, IC, aqw, xg, iu, y); #c1(BDNF) c2(NP_001137281) c3(brain-derived neurotrophic factor isoform d preproprotein) c4( ) c5(55242, 55243, 55244) c6( ) c7(ID, tJ, T, uK, bM, Fv, xo, aqo, e, Ir, bO, fd, gf, HH, aR, ku, il, fm, bW, pX, Fo, Qk, M, iX, aU, abj, K, qM, aqD, oi, H, xa, aqn, KC, ZH, amy, LC, aqB, aW, wF, fc, abn, vt, Ku, Eg, as, eE, cm, mZ, yX, aqr, bb, eM, aqz, nB, ZT, U, vy, sv, nw, uJ, m, act, Zo, cZ, FW, gU, Ol, My, fN, aqy, aj, ww, ct, nA, aqL, Vs, ke, Mo, ft, Hx, alq, aqj, rl, Lv, IG, By, aqK, h, eV, dd, mV, mY, he, dx, aqi, mU, abf, aqg, PT, CN, A, aqA, dw, cM, fq, aqG, Jh, cv, mX, bJ, hq, ok, amt, aqp, cA, bP, dB, Ei, Be, hL, vL, at, JM, aqm, eo, IB, cB, mT, Wl, B, L, bL, qc, it, jd, fM, iH, fG, IH, He, qQ, eX, aA, cR, mS, ti, cz, j, v, bX, aql, il, GC, V, q, J, aqs, aqF, er, eA, PW, aqt, di, aqN, yw, HJ, nv, WY, hb, uT, rS, aql, HC, aT, kf, cy, bK, an, rE, ae, apN, Ir, aqC, af, eu, ak, aqv, if, jf, Y, yL, abi, ahe, r, cu, aaE, HL, en, cl, t, f, iK, FT, tl, ck, Qi, pH, cT, bN, ac, c, rR, yW, wO, mG, aqH, Da, JH, EY, fD, gT, hl, kh, qX, VR, id, wi, aqh, iW, ha, jN, Gd, bS, aqu, fu, uu, qi, hF, ad, BY, dP, HF, aqq, hd, ot, mW, sO, aqk, aqx, xp, ahK, nJ, na, aqE, d, VX, aqj, tb, aal, aog, et, Gv, ff, gC, zR, eZ, gl, aF, Z, FX, jb, bz, dr, DF, eK, Hw, EW, aqM, z, dJ, aaG, MJ, cP, ei, pK, IC, aqw, xg, iu, y); #c1(BDNF) c2(NP_001137282) c3(brain-derived neurotrophic factor isoform e) c4(55245, 55246) c5(55247, 55248, 55249, 55250, 55251, 55252, 55253, 55254, 55255, 55256, 55257, 55258) c6( ) c7(ID, tJ, T, uK, bM, Fv, xo, aqo, e, Ir, bO, fd, gf, HH, aR, ku, il, fm, bW, pX, Fo, Qk, M, iX, aU, abj, K, qM, aqD, oi, H, xa, aqn, KC, ZH, amy, LC, aqB, aW, wF, fc, abn, vt, Ku, Eg, as, eE, cm, mZ, yX, aqr, bb, eM, aqz, nB, ZT, U, vy, sv, nw, uJ, m, act, Zo, cZ, FW, gU, Ol, My, fN, aqy, aj, ww, ct, nA, aqL, Vs, ke, Mo, ft, Hx, alq, aqJ, rl, Lv, IG, By, aqK, h, eV, dd, mV, mY, he, dx, aqi, mU, abf, aqg, PT, CN, A, aqA, dw, cM, fq, aqG, Jh, cv, mX, bJ, hq, ok, amt, aqp, cA, bP, dB, Ei, Be, hL, vL, at, JM, aqm, eo, IB, cB, mT, Wl, B, L, bL, qc, it, jd, fM, iH, fG, IH, He, qQ, eX, aA, cR, mS, ti, cz, j, v, bX, aql, il, GC, V, q, J, aqs, aqF, er, eA, PW, aqt, di, aqN, yw, HJ, nv, WY, hb, uT, rS, aql, HC, aT, kf, cy, bK, an, rE, ae, apN, Ir, aqC, af, eu, ak, aqv, iF, jf, Y, yL, abi, ahe, r, cu, aaE, HL, en, cl, t, f, iK, FT, tl, ck, Qi, pH, cT, bN, ac, c, rR, yW, wO, mG, agH, Da, JH, EY, fD, gT, hl, kh, qX, VR, id, wi, aqh, iW, ha, jN, Gd, bS, aqu, fu, uu, qi, hF, ad, BY, dP, HF, aqq, hd, ot, mW, sO, aqk, aqx, xp, ahK, nJ, na, aqE, d, VX, aqj, tb, aal, aog, et, Gv, ff, gC, zR, eZ, gl, aF, Z, FX, jb, bz, dr, DF, eK, Hw, EW, aqM, z, dJ, aaG, MJ, cP, ei, pK, IC, aqw, xg, iu, y); #c1(BDNF) c2(NP_733927) c3(brain-derived neurotrophic factor isoform b preproprotein) c4(247246, 247247) c5(247248, 247249, 247250, 247251, 247252, 247253, 247254, 247255, 247256, 247257, 247258, 247259, 247260, 247261, 247262) c6( ) c7(ID, tJ, T, uK, bM, Fv, xo, aqo, e, Ir, bO, fd, gf, HH, aR, ku, il, fm, bW, pX, Fo, Qk, M, iX, aU, abj, K, qM, aqD, oi, H, xa, aqn, KC, ZH, amy, LC, aqB, aW, wF, fc, abn, vt, Ku, Eg, as, eE, cm, mZ, yX, aqr, bb, eM, aqz, nB, ZT, U, vy, sv, nw, uJ, m, act, Zo, cZ, FW, gU, Ol, My, fN, aqy, aj, ww, ct, nA, aqL, Vs, ke, Mo, ft, Hx, alq, aqJ, rl, Lv, IG, By, aqK, h, eV, dd, mV, mY, he, dx, aqi, mU, abf, aqg, PT, CN, A, aqA, dw, cM, fq, aqG, Jh, cv, mX, bJ, hq, ok, amt, agp, cA, bP, dB, Ei, Be, hL, vL, at, JM, aqm, eo, IB, cB, mT, Wl, B, L, bL, qc, it, jd, fM, iH, fG, IH, He, qQ, eX, aA, cR, mS, ti, cz, j, v, bX, aql, il, GC, V, q, J, aqs, aqF, er, eA, PW, aqt, di, aqN, yw, HJ, nv, WY, hb, uT, rS, aql, HC, aT, kf, cy, bK, an, rE, ae, apN, Ir, aqC, af, eu, ak, aqv, iF, jf, Y, yL, abi, ahe, r, cu, aaE, HL, en, cl, t, f, iK, FT, tl, ck, Qi, pH, cT, bN, ac, c, rR, yW, wO, mG, aqH, Da, JH, EY, fD, gT, hl, kh, qX, VR, id, wi, aqh, iW, ha, jN, Gd, bS, aqu, fu, uu, qi, hF, ad, BY, dP, HF, aqq, hd, ot, mW, sO, aqk, aqx, xp, ahK, nJ, na, aqE, d, VX, aqj, tb, aal, aog, et, Gv, ff, gC, zR, eZ, gl, aF, Z, FX, jb, bz, dr, DF, eK, Hw, EW, aqM, z, dJ, aaG, MJ, cP, ei, pK, IC, aqw, xg, iu, y); #c1(BDNF) c2(NP_733930) c3(brain-derived neurotrophic factor isoform c preproprotein) c4(247263) c5(247264, 247265, 247266, 247267, 247268, 247269, 247270) c6( ) c7(ID, tJ, T, uK, bM, Fv, xo, aqo, e, Ir, bO, fd, gf, HH, aR, ku, il, fm, bW, pX, Fo, Qk, M, iX, aU, abj, K, qM, aqD, oi, H, xa, aqn, KC, ZH, amy, LC, agB, aW, wF, fc, abn, vt, Ku, Eg, as, eE, cm, mZ, yX, aqr, bb, eM, aqz, nB, ZT, U, vy, sv, nw, uJ, m, act, Zo, cZ, FW, gU, Ol, My, fN, aqy, aj, ww, ct, nA, aqL, Vs, ke, Mo, ft, Hx, alq, aqj, rl, Lv, IG, By, aqK, h, eV, dd, mV, mY, he, dx, aqi, mU, abf, aqg, PT, CN, A, aqA, dw, cM, fq, aqG, Jh, cv, mX, bJ, hq, ok, amt, aqp, cA, bP, dB, Ei, Be, hL, vL, at, JM, aqm, eo, IB, cB, mT, Wl, B, L, bL, qc, it, jd, fM, iH, fG, IH, He, qQ, eX, aA, cR, mS, ti, cz, j, v, bX, aql, il, GC, V, q, J, aqs, aqF, er, eA, PW, aqt, di, aqN, yw, HJ, nv, WY, hb, uT, rS, aql, HC, aT, kf, cy, bK, an, rE, ae, apN, Ir, aqC, af, eu, ak, aqv, iF, jf, Y, yL, abi, ahe, r, cu, aaE, HL, en, cl, t, f, iK, FT, tl, ck, Qi, pH, cT, bN, ac, c, rR, yW, wO, mG, aqH, Da, JH, EY, fD, gT, hl, kh, qX, VR, id, wi, aqh, iW, ha, jN, Gd, bS, aqu, fu, uu, qi, hF, ad, BY, dP, HF, aqq, hd, ot, mW, sO, aqk, aqx, xp, ahK, nJ, na, aqE, d, VX, aqj, tb, aal, aog, et, Gv, ff, gC, zR, eZ, gl, aF, Z, FX, jb, bz, dr, DF, eK, Hw, EW, aqM, z, dJ, aaG, MJ, cP, ei, pK, IC, aqw, xg, iu, y); #c1(BDP1) c2(NP_060899) c3(transcription factor TFIIIB component B″ homolog) c4(198491) c5(198492, 198493, 198494, 198495, 198496, 198497, 198498, 198499, 198500, 198501, 198502, 198503, 198504, 198505, 198506, 198507, 198508, 198509) c6( ) c7(aW, T, ff, en, aT); #c1(BDP1) c2(XP_006714722) c3(transcription factor TFIIIB component B″ homolog isoform X3) c4( ) c5(288049, 288050, 288051, 288052, 288053, 288054) c6( ) c7(aW, T, ff, en, aT); #c1(BDP1) c2(XP_006725523) c3(transcription factor TFIIIB component B″ homolog isoform X1) c4(296824) c5(296825, 296826, 296827, 296828, 296829, 296830, 296831, 296832, 296833) c6( ) c7(aW, T, ff, en, aT); #c1(BDP1) c2(XP_006725524) c3(transcription factor TFIIIB component B″ homolog isoform X3) c4(296834) c5( ) c6( ) c7(aW, T, ff, en, aT); #c1(BDP1) c2(XP_006726279) c3(transcription factor TFIIIB component B″ homolog isoform X1) c4(297140) c5(297141) c6( ) c7(aW, T, ff, en, aT); #c1(BDP1) c2(XP_011541815) c3(transcription factor TFIIIB component B″ homolog isoform X5) c4(340391) c5( ) c6( ) c7(aW, T, ff, en, aT); #c1(BEAN1) c2(NP_001184154) c3(protein BEAN1 isoform 3) c4(75430) c5(75431, 75432, 75433, 75434, 75435, 75436) c6( ) c7(bL, ky, kB, U, yZ, aqP, aqO, aqQ, dR); #c1(BEAN1) c2(XP_011521186) c3(protein BEAN1 isoform X1) c4(316116, 316117) c5(316118, 316119, 316120, 316121, 316122, 316123, 316124, 316125, 316126, 316127, 316128, 316129) c6( ) c7(bL, ky, kB, U, yZ, aqP, aqO, aqQ, dR); #c1(BEGAIN) c2(NP_001153003) c3(brain-enriched guanylate kinase-associated protein) c4( ) c5(60299, 60300, 60301, 60302, 60303, 60304, 60305, 60306, 60307, 60308, 60309, 60310, 60311, 60312, 60313, 60314, 60315, 60316) c6( ) c7(v); #c1(BEGAIN) c2(XP_005267976) c3(brain-enriched guanylate kinase-associated protein isoform X4) c4(281406, 281407) c5(281408, 281409, 281410) c6( ) c7(v); #c1(BEGAIN) c2(XP_005267977) c3(brain-enriched guanylate kinase-associated protein isoform X5) c4(281411) c5(281412) c6( ) c7(v); #c1(BEND3) c2(NP_001073919) c3(BEN domain-containing protein 3) c4(36531) c5(36532, 36533, 36534, 36535, 36536, 36537, 36538, 36539, 36540, 36541) c6( ) c7(aqR, H, Cb, L); #c1(BEND4) c2(NP_001153019) c3(BEN domain-containing protein 4 isoform b) c4(60329) c5(60330, 60331, 60332, 60333, 60334) c6( ) c7(r); #c1(BEND4) c2(NP_997289) c3(BEN domain-containing protein 4 isoform a) c4(265375, 265376) c5(265377, 265378, 265379, 265380, 265381, 265382, 265383, 265384, 265385, 265386, 265387, 265388, 265389) c6( ) c7(r); #c1(BEST1) c2(NP_001132915) c3(bestrophin-1 isoform 2) c4( ) c5(52646, 52647, 52648, 52649, 52650) c6( ) c7(bL, bM, T, dD, ef, arb, Ol, nx, ea, arh, Ri, cz, n, aj, jA, eq, aqS, sl, afl, cd, J, Nh, cc, ard, aE, aqT, vJ, il, Sr, ari, oj, adX, kf, Ak, Ps, arc, bl, aqX, zp, afV, sa, bA, ara, IR, aqZ, kj, are, xz, ahk, xs, Hz, lb, uY, hp, Jl, nC, dr, qa, eY, Bv, W, nb, adZ, agU, yE, aqW, mx, U, km, aqV, rx, arf, mf, m, ei, oQ, y, arg, aqY, ao); #c1(BEST1) c2(NP_001287715) c3(bestrophin-1 isoform 3) c4(112623) c5(112624, 112625, 112626, 112627, 112628) c6( ) c7(bL, bM, T, dD, ef, arb, Ol, nx, ea, arh, Ri, cz, n, aj, jA, eq, aqS, sl, afl, cd, J, Nh, cc, ard, aE, aqT, vJ, il, Sr, ari, oj, adX, kf, Ak, Ps, arc, bl, aqX, zp, afV, sa, bA, ara, IR, aqZ, kj, are, xz, ahk, xs, Hz, lb, uY, hp, Jl, nC, dr, qa, eY, Bv, W, nb, adZ, aqU, yE, aqW, mx, U, km, aqV, rx, arf, mf, m, ei, oQ, y, arg, aqY, ao); #c1(BEST1) c2(NP_004174) c3(bestrophin-1 isoform 1) c4(144092) c5(144093, 144094, 144095, 144096, 144097, 144098, 144099) c6( ) c7(bL, bM, T, dD, ef, arb, Ol, nx, ea, arh, Ri, cz, n, aj, jA, eq, agS, sl, afl, cd, J, Nh, cc, ard, aE, aqT, vJ, il, Sr, ari, oj, adX, kf, Ak, Ps, arc, bl, aqX, zp, afV, sa, bA, ara, IR, aqZ, kj, are, xz, ahk, xs, Hz, lb, uY, hp, Jl, nC, dr, qa, eY, Bv, W, nb, adZ, aqU, yE, aqW, mx, U, km, aqV, rx, arf, mf, m, ei, oQ, y, arg, aqY, ao); #c1(BEST1) c2(XP_005274275) c3(bestrophin-1 isoform X8) c4( ) c5(285032) c6( ) c7(bL, bM, T, dD, ef, arb, Ol, nx, ea, arh, Ri, cz, n, aj, jA, eq, aqS, sl, afl, cd, J, Nh, cc, ard, aE, aqT, vJ, il, Sr, ari, oj, adX, kf, Ak, Ps, arc, bl, aqX, zp, afV, sa, bA, ara, IR, aqZ, kj, are, xz, ahk, xs, Hz, lb, uY, hp, Jl, nC, dr, qa, eY, Bv, W, nb, adZ, aqU, yE, aqW, mx, U, km, aqV, rx, arf, mf, m, ei, oQ, y, arg, aqY, ao); #c1(BEST1) c2(XP_005274278) c3(bestrophin-1 isoform X10) c4(285033) c5(285034, 285035, 285036, 285037, 285038, 285039) c6( ) c7(bL, bM, T, dD, ef, arb, Ol, nx, ea, arh, Ri, cz, n, aj, jA, eq, aqS, sl, afl, cd, J, Nh, cc, ard, aE, aqT, vJ, il, Sr, ari, oj, adX, kf, Ak, Ps, arc, bl, aqX, zp, afV, sa, bA, ara, IR, aqZ, kj, are, xz, ahk, xs, Hz, lb, uY, hp, Jl, nC, dr, qa, eY, Bv, W, nb, adZ, aqU, yE, aqW, mx, U, km, aqV, rx, arf, mf, m, ei, oQ, y, arg, aqY, ao); #c1(BEST1) c2(XP_011543531) c3(bestrophin-1 isoform X1) c4(342448, 342449) c5( ) c6( ) c7(bL, bM, T, dD, ef, arb, Ol, nx, ea, arh, Ri, cz, n, aj, jA, eq, aqS, sl, afl, cd, J, Nh, cc, ard, aE, aqT, vJ, il, Sr, ari, oj, adX, kf, Ak, Ps, arc, bl, aqX, zp, afV, sa, bA, ara, IR, aqZ, kj, are, xz, ahk, xs, Hz, lb, uY, hp, Jl, nC, dr, qa, eY, Bv, W, nb, adZ, aqU, yE, aqW, mx, U, km, aqV, rx, arf, mf, m, ei, oQ, y, arg, aqY, ao); #c1(BEST1) c2(XP_011543532) c3(bestrophin-1 isoform X2) c4( ) c5(342450) c6( ) c7(bL, bM, T, dD, ef, arb, Ol, nx, ea, arh, Ri, cz, n, aj, jA, eq, aqS, sl, afl, cd, J, Nh, cc, ard, aE, aqT, vJ, il, Sr, ari, oj, adX, kf, Ak, Ps, arc, bl, aqX, zp, afV, sa, bA, ara, IR, aqZ, kj, are, xz, ahk, xs, Hz, lb, uY, hp, Jl, nC, dr, qa, eY, Bv, W, nb, adZ, aqU, yE, aqW, mx, U, km, aqV, rx, arf, mf, m, ei, oQ, y, arg, aqY, ao); #c1(BEST1) c2(XP_011543535) c3(bestrophin-1 isoform X6) c4( ) c5(342451, 342452, 342453, 342454, 342455, 342456) c6( ) c7(bL, bM, T, dD, ef, arb, Ol, nx, ea, arh, Ri, cz, n, aj, jA, eq, aqS, sl, afl, cd, J, Nh, cc, ard, aE, aqT, vJ, il, Sr, ari, oj, adX, kf, Ak, Ps, arc, bl, aqX, zp, afV, sa, bA, ara, IR, aqZ, kj, are, xz, ahk, xs, Hz, lb, uY, hp, Jl, nC, dr, qa, eY, Bv, W, nb, adZ, aqU, yE, aqW, mx, U, km, aqV, rx, arf, mf, m, ei, oQ, y, arg, aqY, ao); #c1(BEST2) c2(XP_005260020) c3(bestrophin-2 isoform X1) c4(276385) c5(276386, 276387, 276388, 276389, 276390, 276391, 276392, 276393, 276394, 276395, 276396, 276397, 276398, 276399, 276400, 276401) c6( ) c7(iV, DD); #c1(BET1) c2(NP_005859) c3(BET1 homolog) c4(159990) c5(159991, 159992, 159993, 159994, 159995, 159996) c6( ) c7(vA); #c1(BET1L) c2(NP_001092257) c3(BET1-like protein isoform 1) c4(39474) c5(39475, 39476, 39477, 39478, 39479, 39480) c6( ) c7(op, vA, us, afW); #c1(BET1L) c2(NP_057610) c3(BET1-like protein isoform 2) c4(191747) c5(191748, 191749, 191750, 191751, 191752, 191753) c6( ) c7(op, vA, us, afW); #c1(BEX1) c2(NP_060946) c3(protein BEX1) c4(198854) c5(198855, 198856, 198857, 198858, 198859) c6( ) c7(ck, iC, T, d, aW, ff, aT, en, Fc, eA); #c1(BEX2) c2(NP_001161871) c3(protein BEX2 isoform 1) c4(66250) c5(66251, 66252, 66253, 66254, 66255, 66256) c6( ) c7(ck, iC, T, d, aW, ff, aT, en, Fc, eA); #c1(BEX2) c2(NP_001161872) c3(protein BEX2 isoform 2) c4(66257) c5(66258, 66259, 66260, 66261) c6( ) c7(ck, iC, T, d, aW, ff, aT, en, Fc, eA); #c1(BEX2) c2(NP_001161873) c3(protein BEX2 isoform 3) c4(66262) c5(66263, 66264, 66265, 66266, 66267, 66268, 66269, 66270, 66271, 66272, 66273, 66274, 66275) c6( ) c7(ck, iC, T, d, aW, ff, aT, en, Fc, eA); #c1(BEX4) c2(NP_001073894) c3(protein BEX4) c4(36344) c5(36345, 36346, 36347, 36348, 36349, 36350, 36351, 36352, 36353, 36354) c6( ) c7(t, m); #c1(BFAR) c2(NP_057645) c3(bifunctional apoptosis regulator) c4(192019) c5(192020, 192021, 192022, 192023, 192024, 192025, 192026) c6( ) c7(bL, T, pf, JD, arj, U, cj, uS, dq, agD, v, eo, K, qM, GF); #c1(BFAR) c2(XP_005255407) c3(bifunctional apoptosis regulator isoform X2) c4(273631) c5(273632, 273633, 273634, 273635, 273636, 273637) c6( ) c7(bL, T, pf, JD, arj, U, cj, uS, dq, agD, v, eo, K, qM, GF); #c1(BFSP1) c2(NP_001155177) c3(filensin isoform 2) c4(61492) c5(61493, 61494, 61495, 61496, 61497) c6( ) c7(arl, dY, ark); #c1(BFSP1) c2(NP_001265536) c3(filensin isoform 4) c4( ) c5(98761, 98762) c6( ) c7(arl, dY, ark); #c1(BFSP1) c2(NP_001265537) c3(filensin isoform 3) c4(98763) c5(98764, 98765, 98766, 98767, 98768, 98769, 98770, 98771) c6( ) c7(arl, dY, ark); #c1(BFSP2) c2(NP_003562) c3(phakinin) c4(139195) c5(139196, 139197, 139198, 139199, 139200, 139201) c6( ) c7(kj, arm, arn, aro, Zh, Hr); #c1(BGLAP) c2(NP_954642) c3(osteocalcin preproprotein) c4(261148) c5(261149, 261150, 261151, 261152, 261153, 261154) c6( ) c7(gh, T, bM, AB, dA, aC, id, eR, zs, zt, Ay, cz, bB, aj, dG, j, ci, v, fr, fd, aY, amC, eW, J, ad, afb, amB, zw, RN, rC, ari, aT, afV, zp, bq, rv, ae, ars, af, bA, hi, A, s, up, cW, aW, Hz, eH, arp, arq, eF, arv, arr, acW, nM, yE, TJ, bE, wB, aru, wR, mf, k, IS, art, bi, y, LS); #c1(BGN) c2(NP_001702) c3(biglycan preproprotein) c4(120216, 120217, 120218) c5(120219, 120220, 120221, 120222, 120223, 120224, 120225, 120226, 120227, 120228, 120229, 120230, 120231, 120232, 120233, 120234, 120235, 120236, 120237, 120238, 120239, 120240) c6( ) c7(ID, rt, T, dD, aC, PG, id, ea, fG, e, aw, aA, Ij, arw, v, eq, kv, uW, mC, q, hd, aE, hW, vJ, Db, dv, IC, aT, Ak, cy, dL, ey, K, zp, H, vO, eL, VC, ly, eG, bf, anP, LC, aW, eH, eZ, r, aq, aF, si, zC, pL, eF, wU, qa, lx, bF, GU, bE, bm, cj, ro, aS, arx, fL, R, dy, fy, B, y, vQ); #c1(BHLHA15) c2(NP_803238) c3(class A basic helix-loop-helix protein 15) c4(252586) c5(252587, 252588, 252589, 252590, 252591, 252592) c6( ) c7(es, pe, aA, fd, kp, aF, ci, ary, aom, fr, VB); #c1(BHLHA9) c2(NP_001157877) c3(class A basic helix-loop-helix protein 9) c4(62850) c5(62851, 62852, 62853, 62854, 62855, 62856, 62857) c6( ) c7(arz, arB, arA); #c1(BHLHB9) c2(NP_001135999) c3(protein BHLHb9) c4(53943) c5(53944, 53945, 53946, 53947, 53948, 53949, 53950, 53951, 53952, 53953, 53954, 53955, 53956, 53957, 53958, 53959, 53960, 53961, 53962, 53963, 53964, 53965) c6( ) c7(af, U); #c1(BHLHE22) c2(NP_689627) c3(class E basic helix-loop-helix protein 22) c4(243331) c5(243332, 243333, 243334, 243335, 243336, 243337, 243338) c6( ) c7(T, ea, if, al, fd, ci, Na, bv, ta, DY, eL, aW, nY, g, as, pL, eF, cm, DL, eM, mx, aiM, m, cZ, dt, dD, vl, aw, aj, fr, qN, ai, rc, zw, h, By, dL, dd, A, arG, arF, dB, vb, agl, XN, B, bL, aA, arD, zN, cz, v, j, ajM, Eh, q, J, eA, arH, aT, ae, arl, PK, HZ, Y, r, lo, t, arJ, ck, acW, AH, Uq, rA, kh, uu, eq, ad, dP, Dq, ji, IQ, Jg, d, eH, aF, qa, gk, arE, arC, HN, II, gZ, dX, XO, ei, y); #c1(BHLHE23) c2(NP_542173) c3(class E basic helix-loop-helix protein 23) c4(232176) c5(232177, 232178, 232179, 232180, 232181, 232182, 232183) c6( ) c7(sc, T, arM, dt, aC, Dh, e, ha, jN, I, XJ, aA, n, bB, fN, fd, ci, jh, arN, Eh, XM, q, aR, br, ad, Fc, ft, aE, Ig, aT, h, dL, K, IQ, akr, H, arL, ae, eL, HO, arO, hM, Jg, XK, d, eG, A, aW, ev, Ls, xs, Gv, ff, r, Io, arK, aF, en, g, cm, XI, bz, pb, dr, bw, es, sS, eM, bE, X, HN, wB, PV, XG, XO, XN, it, B, XL, L); #c1(BHLHE40) c2(NP_003661) c3(class E basic helix-loop-helix protein 40) c4(140034) c5(140035, 140036, 140037, 140038, 140039, 140040) c6( ) c7(T, aC, ht, aA, ajM, j, ci, fr, py, aE, Ae, aT, jy, bK, K, hu, bA, aW, Y, ff, eZ, aq, aF, en, Z, iK, bz, NC, eM, bE, it, B); #c1(BHLHE41) c2(NP_110389) c3(class E basic helix-loop-helix protein 41) c4(219857, 219858) c5(219859, 219860, 219861, 219862, 219863, 219864, 219865, 219866, 219867, 219868, 219869, 219870, 219871, 219872, 219873, 219874, 219875, 219876, 219877, 219878, 219879, 219880, 219881, 219882, 219883, 219884, 219885, 219886, 219887, 219888, 219889, 219890, 219891, 219892, 219893, 219894, 219895, 219896, 219897, 219898, 219899, 219900, 219901, 219902, 219903, 219904, 219905, 219906, 219907, 219908, 219909, 219910, 219911, 219912, 219913, 219914, 219915, 219916, 219917, 219918, 219919, 219920, 219921, 219922, 219923, 219924, 219925, 219926, 219927, 219928, 219929, 219930, 219931, 219932, 219933, 219934, 219935, 219936, 219937, 219938, 219939, 219940, 219941, 219942, 219943, 219944, 219945, 219946, 219947, 219948, 219949, 219950, 219951, 219952, 219953, 219954, 219955, 219956, 219957, 219958, 219959) c6( ) c7(av, T, kP, aW, arP, aT, kp, np, ci, bK, g, Z, bz, iu, pl); #c1(BHMT) c2(NP_001704) c3(betaine-homocysteine S-methyltransferase 1) c4(120255, 120256) c5(120257, 120258, 120259, 120260, 120261, 120262, 120263, 120264, 120265, 120266, 120267, 120268) c6( ) c7(bL, dD, iW, e, al, arQ, sM, v, j, eq, md, av, Na, amJ, aT, Nc, dL, eu, wC, aW, fc, r, LI, Lk, f, ac, eM, Ip, pE, wE, bm, at, aS, cP, bD, B); #c1(BHMT2) c2(NP_001171476) c3(S-methylmethionine-homocysteine S-methyltransferase BHMT2 isoform 2) c4(70264) c5(70265, 70266, 70267, 70268, 70269, 70270) c6( ) c7(Na, dD, ac, Ip, wE, bm, Nc, eq, j, bD, eu); #c1(BHMT2) c2(NP_060084) c3(S-methylmethionine-homocysteine S-methyltransferase BHMT2 isoform 1) c4(194078) c5(194079, 194080, 194081, 194082, 194083, 194084) c6( ) c7(Na, dD, ac, Ip, wE, bm, Nc, eq, j, bD, eu); #c1(BICCI) c2(NP_001073981) c3(protein bicaudal C homolog 1) c4(36769) c5(36770, 36771, 36772, 36773, 36774, 36775) c6( ) c7(MS, arT, arS, arV, wB, arR, arU, bO, aj, bS, dy, ct, Nj, Z, J); #c1(BICCI) c2(XP_005270226) c3(protein bicaudal C homolog 1 isoform X4) c4(283290) c5( ) c6( ) c7(MS, arT, arS, arV, wB, arR, arU, bO, aj, bS, dy, ct, Nj, Z, J); #c1(BICCI) c2(XP_011538493) c3(protein bicaudal C homolog 1 isoform X8) c4( ) c5(336242, 336243, 336244, 336245, 336246, 336247, 336248) c6( ) c7(MS, arT, arS, arV, wB, arR, arU, bO, aj, bS, dy, ct, Nj, Z, J); #c1(BICD1) c2(NP_001003398) c3(protein bicaudal D homolog 1 isoform 2) c4(19816) c5(19817, 19818, 19819, 19820, 19821, 19822) c6( ) c7(aC, at, y, V, sD, ad); #c1(BICD1) c2(NP_001705) c3(protein bicaudal D homolog 1 isoform 1) c4(120269) c5(120270, 120271, 120272, 120273, 120274, 120275) c6( ) c7(aC, at, y, V, sD, ad); #c1(BICD1) c2(XP_005253522) c3(protein bicaudal D homolog 1 isoform X6) c4(272544) c5(272545, 272546, 272547, 272548, 272549) c6( ) c7(aC, at, y, V, sD, ad); #c1(BICD1) c2(XP_011519116) c3(protein bicaudal D homolog 1 isoform X3) c4( ) c5(313724) c6( ) c7(aC, at, y, V, sD, ad); #c1(BICD2) c2(NP_001003800) c3(protein bicaudal D homolog 2 isoform 1) c4(20148) c5(20149, 20150, 20151, 20152, 20153, 20154) c6( ) c7(kf, arW, aV); #c1(BICD2) c2(NP_056065) c3(protein bicaudal D homolog 2 isoform 2) c4(185488) c5(185489, 185490, 185491, 185492, 185493, 185494) c6( ) c7(kf, arW, aV); #c1(BID) c2(NP_001187) c3(BH3-interacting domain death agonist isoform 2) c4(78964, 78965) c5(78966, 78967, 78968, 78969, 78970, 78971, 78972, 78973, 78974, 78975, 78976, 78977, 78978, 78979, 78980) c6( ) c7(T, dD, fM, sw, ea, if, jx, iW, aA, j, ci, eq, qN, ad, XW, av, Bc, aT, h, IG, bK, K, fb, ae, af, dx, A, B, iU, aW, Y, r, Io, aF, g, bz, cj, bt, X); #c1(BID) c2(NP_001231499) c3(BH3-interacting domain death agonist isoform 3) c4( ) c5(87259, 87260, 87261, 87262, 87263, 87264, 87265, 87266) c6( ) c7(T, dD, fM, sw, ea, if, jx, iW, aA, j, ci, eq, qN, ad, XW, av, Bc, aT, h, IG, bK, K, fb, ae, af, dx, A, B, iU, aW, Y, r, Io, aF, g, bz, cj, bt, X); #c1(BID) c2(NP_932070) c3(BH3-interacting domain death agonist isoform 1) c4(258793, 258794, 258795, 258796) c5(258797, 258798, 258799, 258800, 258801, 258802, 258803, 258804, 258805) c6( ) c7(T, dD, fM, sw, ea, if, jx, iW, aA, j, ci, eq, qN, ad, XW, av, Bc, aT, h, IG, bK, K, fb, ae, af, dx, A, B, iU, aW, Y, r, Io, aF, g, bz, cj, bt, X); #c1(BIN1) c2(NP_004296) c3(myc box-dependent-interacting protein 1 isoform 8) c4(144952) c5(144953, 144954, 144955, 144956, 144957, 144958) c6( ) c7(T, UU, Or, bB, ci, UX, cd, fK, ad, cc, oj, aT, bU, ae, af, aW, Y, xz, aq, cm, dR, ac, bE, X, B, UV); #c1(BIN1) c2(NP_647593) c3(myc box-dependent-interacting protein 1 isoform 1) c4(238734) c5(238735, 238736, 238737, 238738, 238739, 238740) c6( ) c7(T, UU, Or, bB, ci, UX, cd, fK, ad, cc, oj, aT, bU, ae, af, aW, Y, xz, aq, cm, dR, ac, bE, X, B, UV); #c1(BIN1) c2(NP_647594) c3(myc box-dependent-interacting protein 1 isoform 2) c4(238741) c5(238742, 238743, 238744, 238745, 238746, 238747) c6( ) c7(T, UU, Or, bB, ci, UX, cd, fK, ad, cc, oj, aT, bU, ae, af, aW, Y, xz, aq, cm, dR, ac, bE, X, B, UV); #c1(BIN1) c2(NP_647595) c3(myc box-dependent-interacting protein 1 isoform 3) c4(238748) c5(238749, 238750, 238751, 238752, 238753, 238754) c6( ) c7(T, UU, Or, bB, ci, UX, cd, fK, ad, cc, oj, aT, bU, ae, af, aW, Y, xz, aq, cm, dR, ac, bE, X, B, UV); #c1(BIN1) c2(NP_647596) c3(myc box-dependent-interacting protein 1 isoform 4) c4(238755) c5(238756, 238757, 238758, 238759, 238760, 238761) c6( ) c7(T, UU, Or, bB, ci, UX, cd, fK, ad, cc, oj, aT, bU, ae, af, aW, Y, xz, aq, cm, dR, ac, bE, X, B, UV); #c1(BIN1) c2(NP_647597) c3(myc box-dependent-interacting protein 1 isoform 5) c4(238762) c5(238763, 238764, 238765, 238766, 238767, 238768) c6( ) c7(T, UU, Or, bB, ci, UX, cd, fK, ad, cc, oj, aT, bU, ae, af, aW, Y, xz, aq, cm, dR, ac, bE, X, B, UV); #c1(BIN1) c2(NP_647598) c3(myc box-dependent-interacting protein 1 isoform 6) c4(238769) c5(238770, 238771, 238772, 238773, 238774, 238775) c6( ) c7(T, UU, Or, bB, ci, UX, cd, fK, ad, cc, oj, aT, bU, ae, af, aW, Y, xz, aq, cm, dR, ac, bE, X, B, UV); #c1(BIN1) c2(NP_647599) c3(myc box-dependent-interacting protein 1 isoform 7) c4(238776) c5(238777, 238778, 238779, 238780, 238781, 238782) c6( ) c7(T, UU, Or, bB, ci, UX, cd, fK, ad, cc, oj, aT, bU, ae, af, aW, Y, xz, aq, cm, dR, ac, bE, X, B, UV); #c1(BIN1) c2(NP_647600) c3(myc box-dependent-interacting protein 1 isoform 9) c4(238783) c5(238784, 238785, 238786, 238787, 238788, 238789) c6( ) c7(T, UU, Or, bB, ci, UX, cd, fK, ad, cc, oj, aT, bU, ae, af, aW, Y, xz, aq, cm, dR, ac, bE, X, B, UV); #c1(BIN1) c2(NP_647601) c3(myc box-dependent-interacting protein 1 isoform 10) c4(238790) c5(238791, 238792, 238793, 238794, 238795, 238796) c6( ) c7(T, UU, Or, bB, ci, UX, cd, fK, ad, cc, oj, aT, bU, ae, af, aW, Y, xz, aq, cm, dR, ac, bE, X, B, UV); #c1(BIN2) c2(NP_001276936) c3(bridging integrator 2 isoform 2) c4( ) c5(108683, 108684, 108685, 108686, 108687, 108688) c6( ) c7(T); #c1(BIN2) c2(NP_001276937) c3(bridging integrator 2 isoform 3) c4(108689) c5(108690, 108691, 108692, 108693, 108694, 108695) c6( ) c7(T); #c1(BIN2) c2(NP_057377) c3(bridging integrator 2 isoform 1) c4(190469, 190470) c5(190471, 190472, 190473, 190474, 190475, 190476) c6( ) c7(T); #c1(BIN3) c2(NP_061158) c3(bridging integrator 3) c4(199645, 199646) c5(199647, 199648, 199649, 199650, 199651, 199652) c6( ) c7(cd); #c1(BIN3) c2(XP_005273630) c3(bridging integrator 3 isoform X1) c4( ) c5(284721) c6( ) c7(cd); #c1(BIN3) c2(XP_011542888) c3(bridging integrator 3 isoform X2) c4( ) c5(341484, 341485, 341486, 341487, 341488) c6( ) c7(cd); #c1(BIRC2) c2(NP_001243092) c3(baculoviral IAP repeat-containing protein 2 isoform 1) c4(89750, 89751, 89752) c5(89753, 89754, 89755, 89756, 89757, 89758, 89759, 89760, 89761, 89762, 89763, 89764, 89765, 89766, 89767, 89768, 89769, 89770, 89771, 89772, 89773, 89774, 89775, 89776, 89777, 89778, 89779, 89780, 89781, 89782, 89783, 89784, 89785, 89786, 89787, 89788, 89789, 89790, 89791, 89792, 89793, 89794, 89795, 89796, 89797, 89798, 89799, 89800, 89801, 89802, 89803, 89804, 89805, 89806, 89807, 89808, 89809, 89810, 89811, 89812, 89813, 89814, 89815, 89816, 89817, 89818, 89819, 89820, 89821, 89822, 89823, 89824, 89825, 89826, 89827, 89828, 89829, 89830, 89831, 89832, 89833, 89834, 89835, 89836, 89837, 89838, 89839, 89840, 89841, 89842, 89843, 89844, 89845, 89846, 89847, 89848, 89849, 89850, 89851, 89852, 89853, 89854, 89855, 89856, 89857, 89858, 89859, 89860, 89861) c6( ) c7(gh, T, fM, qb, if, aA, fd, n, fr, ci, qN, V, arX, q, ad, afb, x, av, oj, kH, aT, h, dL, K, ae, je, apl, nO, aW, Y, ff, xs, eH, uY, en, eF, t, Bu, bz, iK, bw, ck, arY, iM, bE, hL, cj, k, bC, bt, it, B, cn); #c1(BIRC2) c2(NP_001243095) c3(baculoviral IAP repeat-containing protein 2 isoform 2) c4(89862) c5(89863, 89864, 89865, 89866, 89867, 89868) c6( ) c7(gh, T, fM, qb, if, aA, fd, n, fr, ci, qN, V, arX, q, ad, afb, x, av, oj, kH, aT, h, dL, K, ae, je, apl, nO, aW, Y, ff, xs, eH, uY, en, eF, t, Bu, bz, iK, bw, ck, arY, iM, bE, hL, cj, k, bC, bt, it, B, cn); #c1(BIRC3) c2(NP_892007) c3(baculoviral IAP repeat-containing protein 3) c4(257471) c5(257472, 257473, 257474, 257475, 257476, 257477, 257478, 257479, 257480, 257481, 257482, 257483, 257484, 257485, 257486, 257487, 257488, 257489, 257490, 257491, 257492, 257493, 257494, 257495, 257496, 257497, 257498, 257499, 257500, 257501, 257502, 257503, 257504, 257505, 257506, 257507, 257508, 257509, 257510, 257511, 257512, 257513, 257514, 257515, 257516, 257517, 257518, 257519, 257520, 257521, 257522, 257523, 257524, 257525, 257526, 257527, 257528, 257529, 257530, 257531, 257532, 257533, 257534, 257535, 257536, 257537, 257538, 257539, 257540, 257541, 257542, 257543, 257544, 257545, 257546, 257547, 257548, 257549, 257550, 257551, 257552, 257553, 257554, 257555, 257556, 257557, 257558, 257559, 257560, 257561, 257562, 257563, 257564, 257565, 257566, 257567, 257568, 257569) c6( ) c7(gh, T, fM, fR, qb, ea, if, df, iW, jh, asa, bB, fd, fr, ci, qN, V, asb, q, ad, afb, av, ft, ib, aE, ds, kH, aT, h, dL, NM, ae, aa, akV, d, B, iU, nO, aW, Y, oV, az, eH, fc, ff, aq, Io, aF, en, g, eF, t, iV, bz, bw, arZ, ck, asc, eM, bE, cj, at, SZ, m, bC, X); #c1(BIRC5) c2(NP_001012270) c3(baculoviral IAP repeat-containing protein 5 isoform 2) c4(24825) c5(24826, 24827, 24828, 24829, 24830, 24831) c6( ) c7(bM, T, aC, fR, if, fd, bB, ci, ip, x, aE, rw, hu, eL, aW, hl, apm, g, as, cm, bw, eM, nB, AM, nF, iA, iT, cj, k, m, iu, sw, aw, ht, n, fr, qN, cd, Bl, ft, jz, hw, cc, kH, h, IG, dL, wb, ey, hB, EU, AQ, fQ, aq, cM, bP, dB, apl, hL, it, B, fM, jp, aA, hy, q, eA, Vr, aT, rO, Tj, ae, ne, jf, s, iU, Y, r, en, cl, t, ck, nM, kP, iM, im, rA, bt, Gl, kh, id, LX, iW, jh, Fc, ase, ad, asd, hX, dP, av, hd, ib, NS, io, iY, hP, d, BN, IU, je, qt, ff, Ej, aF, gW, iR, bz, bF, es, arY, Ew, bE, Lb, IC, X, y); #c1(BIRC5) c2(NP_001012271) c3(baculoviral IAP repeat-containing protein 5 isoform 3) c4(24832, 24833) c5(24834, 24835, 24836, 24837, 24838, 24839, 24840, 24841, 24842, 24843, 24844, 24845) c6( ) c7(bM, T, aC, fR, if, fd, bB, ci, ip, x, aE, rw, hu, eL, aW, hl, apm, g, as, cm, bw, eM, nB, AM, nF, iA, iT, cj, k, m, iu, sw, aw, ht, n, fr, qN, cd, Bl, ft, jz, hw, cc, kH, h, IG, dL, wb, ey, hB, EU, AQ, fQ, aq, cM, bP, dB, apl, hL, it, B, fM, jp, aA, hy, q, eA, Vr, aT, rO, Tj, ae, ne, jf, s, iU, Y, r, en, cl, t, ck, nM, kP, iM, im, rA, bt, Gl, kh, id, LX, iW, jh, Fc, ase, ad, asd, hX, dP, av, hd, ib, NS, io, iY, hP, d, BN, IU, je, qt, ff, Ej, aF, gW, iR, bz, bF, es, arY, Ew, bE, Lb, IC, X, y); #c1(BIRC5) c2(NP_001159) c3(baculoviral IAP repeat-containing protein 5 isoform 1) c4(65021) c5( ) c6( ) c7(bM, T, aC, fR, if, fd, bB, ci, ip, x, aE, rw, hu, eL, aW, hl, apm, g, as, cm, bw, eM, nB, AM, nF, iA, iT, cj, k, m, iu, sw, aw, ht, n, fr, qN, cd, Bl, ft, jz, hw, cc, kH, h, IG, dL, wb, ey, hB, EU, AQ, fQ, aq, cM, bP, dB, apl, hL, it, B, fM, jp, aA, hy, q, eA, Vr, aT, rO, Tj, ae, ne, jf, s, iU, Y, r, en, cl, t, ck, nM, kP, iM, im, rA, bt, Gl, kh, id, LX, iW, jh, Fc, ase, ad, asd, hX, dP, av, hd, ib, NS, io, iY, hP, d, BN, IU, je, qt, ff, Ej, aF, gW, iR, bz, bF, es, arY, Ew, bE, Lb, IC, X, y); #c1(BIRC6) c2(NP_057336) c3(baculoviral IAP repeat-containing protein 6) c4(190178) c5(190179, 190180, 190181, 190182, 190183, 190184) c6( ) c7(T, BN, eM, dH, bE, aW, Y, Dd, Qu, aT, bB, hy, cm, ae, ne, ad); #c1(BIRC7) c2(NP_071444) c3(baculoviral IAP repeat-containing protein 7 isoform beta) c4(211702, 211703) c5(211704, 211705, 211706, 211707, 211708, 211709, 211710, 211711, 211712, 211713, 211714, 211715) c6( ) c7(T, iW, bB, n, fr, ci, hF, av, Vr, aT, dL, cp, DA, asf, nO, Y, as, eF, cm, t, bz, eM, bE, Lb, m, k); #c1(BIRC7) c2(NP_647478) c3(baculoviral IAP repeat-containing protein 7 isoform alpha) c4(238663) c5(238664, 238665, 238666, 238667, 238668, 238669) c6( ) c7(T, iW, bB, n, fr, ci, hF, av, Vr, aT, dL, cp, DA, asf, nO, Y, as, eF, cm, t, bz, eM, bE, Lb, m, k); #c1(BIVM) c2(NP_001153068) c3(basic immunoglobulin-like variable motif-containing protein isoform b) c4(60402) c5(60403, 60404, 60405, 60406, 60407) c6( ) c7(cd, bK, ac); #c1(BIVM) c2(NP_060163) c3(basic immunoglobulin-like variable motif-containing protein isoform a) c4(194539) c5(194540, 194541, 194542, 194543, 194544, 194545, 194546, 194547, 194548, 194549, 194550, 194551, 194552) c6( ) c7(cd, bK, ac); #c1(BLCAP) c2(NP_001161292) c3(bladder cancer-associated protein) c4(65519, 65520, 65521) c5(65522, 65523, 65524, 65525, 65526, 65527, 65528, 65529, 65530, 65531, 65532, 65533, 65534, 65535, 65536, 65537, 65538, 65539, 65540, 65541, 65542, 65543, 65544, 65545, 65546, 65547, 65548, 65549, 65550, 65551, 65552, 65553, 65554, 65555, 65556, 65557, 65558, 65559, 65560, 65561, 65562, 65563) c6( ) c7(es, T, iA, aW, if, eH, aT, dL, ci, qN, eF, eL, er); #c1(BLID) c2(NP_001001786) c3(BH3-like motif-containing cell death inducer) c4(19020) c5(19021, 19022, 19023, 19024, 19025, 19026) c6( ) c7(x, T, asg, ac, aW, e, aT, k); #c1(BLK) c2(NP_001706) c3(tyrosine-protein kinase Blk) c4(120276, 120277) c5(120278, 120279, 120280, 120281, 120282, 120283, 120284, 120285, 120286, 120287, 120288, 120289) c6( ) c7(bL, fN, ez, aj, v, V, mC, J, Bc, bW, ey, OV, A, iU, eZ, pb, Bv, yW, ash, If, cj, aS, fL, y, Pr); #c1(BLM) c2(NP_001274175) c3(Bloom syndrome protein isoform 1) c4(106109, 106110, 106111) c5(106112, 106113, 106114, 106115, 106116, 106117, 106118, 106119, 106120, 106121, 106122, 106123) c6( ) c7(T, os, fM, dD, eR, ea, iW, NT, ew, oZ, eq, ci, q, av, asi, ft, MR, aT, h, dL, K, jj, ask, eL, asj, cp, Qe, wr, BO, aW, Y, r, La, lk, dr, ck, Qi, gX, at, bC, bt, kS, sH); #c1(BLM) c2(XP_006720695) c3(Bloom syndrome protein isoform X3) c4( ) c5(293611, 293612, 293613, 293614, 293615, 293616) c6( ) c7(T, os, fM, dD, eR, ea, iW, NT, ew, oZ, eq, ci, q, av, asi, ft, MR, aT, h, dL, K, jj, ask, eL, asj, cp, Qe, wr, BO, aW, Y, r, La, lk, dr, ck, Qi, gX, at, bC, bt, kS, sH); #c1(BLMH) c2(NP_000377) c3(bleomycin hydrolase) c4(8288, 8289) c5(8290, 8291, 8292, 8293, 8294, 8295, 8296, 8297, 8298, 8299, 8300, 8301) c6( ) c7(af, aW, fG, Lf, U, aT, dN, Lb, asl, bu, eE, cM, B); #c1(BLNK) c2(NP_001107566) c3(B-cell linker protein isoform 2) c4(42865, 42866, 42867) c5(42868, 42869, 42870, 42871, 42872, 42873, 42874) c6( ) c7(oO, Kd, T, fM, BD, dA, ra, aD, jx, jh, fd, bB, C, uE, asr, V, mC, ai, x, F, hD, h, hn, ey, ji, pk, aso, hM, asn, asp, A, oV, asm, bq, Pg, eZ, Of, Og, CQ, Wt, ck, ba, ou, iQ, zr, bE, asq, If, cj, uz, oX, k, rH, fL, hh, fD, Ze, y); #c1(BLNK) c2(NP_001245369) c3(B-cell linker protein isoform 3) c4(93312, 93313, 93314, 93315) c5(93316, 93317, 93318, 93319, 93320, 93321, 93322, 93323, 93324, 93325, 93326, 93327) c6( ) c7(oO, Kd, T, fM, BD, dA, ra, aD, jx, jh, fd, bB, C, uE, asr, V, mC, ai, x, F, hD, h, hn, ey, ji, pk, aso, hM, asn, asp, A, oV, asm, bg, Pg, eZ, Of, Og, CQ, Wt, ck, ba, ou, iQ, zr, bE, asq, If, cj, uz, oX, k, rH, fL, hh, fD, Ze, y); #c1(BLNK) c2(NP_001245370) c3(B-cell linker protein isoform 4) c4( ) c5(93328, 93329, 93330, 93331, 93332, 93333, 93334, 93335, 93336, 93337, 93338, 93339, 93340, 93341, 93342, 93343, 93344, 93345) c6( ) c7(oO, Kd, T, fM, BD, dA, ra, aD, jx, jh, fd, bB, C, uE, asr, V, mC, ai, x, F, hD, h, hn, ey, ji, pk, aso, hM, asn, asp, A, oV, asm, bg, Pg, eZ, Of, Og, CQ, Wt, ck, ba, ou, iQ, zr, bE, asq, If, cj, uz, oX, k, rH, fL, hh, fD, Ze, y); #c1(BLNK) c2(NP_001245371) c3(B-cell linker protein isoform 5) c4(93346) c5(93347, 93348, 93349, 93350, 93351, 93352, 93353, 93354, 93355, 93356, 93357) c6( ) c7(oO, Kd, T, fM, BD, dA, ra, aD, jx, jh, fd, bB, C, uE, asr, V, mC, ai, x, F, hD, h, hn, ey, ji, pk, aso, hM, asn, asp, A, oV, asm, bg, Pg, eZ, Of, Og, CQ, Wt, ck, ba, ou, iQ, zr, bE, asq, If, cj, uz, oX, k, rH, fL, hh, fD, Ze, y); #c1(BLNK) c2(NP_037446) c3(B-cell linker protein isoform 1) c4(175558) c5(175559, 175560, 175561, 175562, 175563, 175564) c6( ) c7(oO, Kd, T, fM, BD, dA, ra, aD, jx, jh, fd, bB, C, uE, asr, V, mC, ai, x, F, hD, h, hn, ey, ji, pk, aso, hM, asn, asp, A, oV, asm, bg, Pg, eZ, Of, Og, CQ, Wt, ck, ba, ou, iQ, zr, bE, asq, If, cj, uz, oX, k, rH, fL, hh, fD, Ze, y); #c1(BLNK) c2(XP_011538030) c3(B-cell linker protein isoform X1) c4( ) c5(335588) c6( ) c7(oO, Kd, T, fM, BD, dA, ra, aD, jx, jh, fd, bB, C, uE, asr, V, mC, ai, x, F, hD, h, hn, ey, ji, pk, aso, hM, asn, asp, A, oV, asm, bg, Pg, eZ, Of, Og, CQ, Wt, ck, ba, ou, iQ, zr, bE, asq, If, cj, uz, oX, k, rH, fL, hh, fD, Ze, y); #c1(BLOC1S2) c2(NP_001269365) c3(biogenesis of lysosome-related organelles complex 1 subunit 2 isoform 3) c4( ) c5(101289, 101290, 101291, 101292, 101293, 101294, 101295, 101296) c6( ) c7(et, HP, ag, dz, Hr, ass, aiJ); #c1(BLOC1S2) c2(NP_001269367) c3(biogenesis of lysosome-related organelles complex 1 subunit 2 isoform 2) c4( ) c5(101297, 101298, 101299, 101300, 101301) c6( ) c7(et, HP, ag, dz, Hr, ass, aiJ); #c1(BLOC1S2) c2(NP_001269368) c3(biogenesis of lysosome-related organelles complex 1 subunit 2 isoform 4) c4( ) c5(101302, 101303, 101304, 101305, 101306, 101307, 101308, 101309) c6( ) c7(et, HP, ag, dz, Hr, ass, aiJ); #c1(BLOC1S2) c2(NP_776170) c3(biogenesis of lysosome-related organelles complex 1 subunit 2 isoform 1) c4(250916, 250917, 250918) c5( ) c6( ) c7(et, HP, ag, dz, Hr, ass, aiJ); #c1(BLOC1S3) c2(NP_997715) c3(biogenesis of lysosome-related organelles complex 1 subunit 3) c4(265755) c5(265756, 265757, 265758, 265759, 265760, 265761) c6( ) c7(ast, kl, af, XF, IF); #c1(BLOC1S4) c2(NP_060836) c3(biogenesis of lysosome-related organelles complex 1 subunit 4) c4(198052) c5(198053, 198054, 198055, 198056, 198057, 198058) c6( ) c7(aC, asu, XF, IF); #c1(BLOC1S5) c2(NP_001186251) c3(biogenesis of lysosome-related organelles complex 1 subunit 5 isoform 2) c4(77451) c5(77452, 77453, 77454, 77455, 77456) c6( ) c7(IE); #c1(BLOC1S5) c2(NP_958437) c3(biogenesis of lysosome-related organelles complex 1 subunit 5 isoform 1) c4(262091) c5(262092, 262093, 262094, 262095, 262096, 262097, 262098) c6( ) c7(IE); #c1(BLOC1S6) c2(NP_036520) c3(biogenesis of lysosome-related organelles complex 1 subunit 6) c4(174220) c5(174221, 174222, 174223, 174224, 174225, 174226) c6( ) c7(DS, IE, iU, ds, IF, bw, fD, asv, Df, eA, asw); #c1(BLVRA) c2(XP_011513776) c3(biliverdin reductase A isoform X1) c4(306170, 306171) c5(306172, 306173, 306174, 306175, 306176, 306177, 306178, 306179, 306180, 306181, 306182, 306183, 306184, 306185, 306186, 306187) c6( ) c7(dD, sO, al, U, j, K, asx, C, hJ, eq, af); #c1(BLVRB) c2(NP_000704) c3(flavin reductase (NADPH)) c4(14738) c5(14739, 14740, 14741, 14742, 14743, 14744) c6( ) c7(Ew, aoq, asy, aA, hD, aq, asA, m, asz, bw, bt, it, B); #c1(BLZF1) c2(NP_003657) c3(Golgin-45) c4(140008) c5(140009, 140010, 140011, 140012, 140013, 140014, 140015, 140016, 140017, 140018, 140019) c6( ) c7(bL, T, os, fM, Ke, asB, cz, fd, afK, oZ, fu, asF, AO, ad, bv, WY, aT, h, vc, K, jj, asC, MG, bA, hM, iU, aW, asD, rU, hl, Pg, aq, Io, kp, BG, t, asE, ck, Kc, ac, c, II, cj, U, rK, m, cP, MC, zA, B); #c1(BLZF1) c2(XP_005245618) c3(golgin-45 isoform X2) c4(266785, 266786, 266787) c5(266788, 266789, 266790, 266791, 266792, 266793, 266794, 266795, 266796, 266797, 266798, 266799, 266800, 266801, 266802, 266803, 266804, 266805) c6( ) c7(bL, T, os, fM, Ke, asB, cz, fd, afK, oZ, fu, asF, AO, ad, bv, WY, aT, h, vc, K, jj, asC, MG, bA, hM, iU, aW, asD, rU, hl, Pg, aq, Io, kp, BG, t, asE, ck, Kc, ac, c, II, cj, U, rK, m, cP, MC, zA, B); #c1(BMF) c2(NP_001003942) c3(bcl-2-modifying factor isoform bmf-2) c4(20324) c5(20325, 20326, 20327, 20328, 20329, 20330) c6( ) c7(l, BN, u, eM, cj, aj, hy, ne, J); #c1(BMF) c2(NP_001003943) c3(bcl-2-modifying factor isoform bmf-3) c4(20331) c5(20332, 20333, 20334, 20335, 20336, 20337, 20338, 20339, 20340, 20341, 20342, 20343, 20344, 20345, 20346, 20347, 20348, 20349, 20350, 20351) c6( ) c7(l, BN, u, eM, cj, aj, hy, ne, J); #c1(BMF) c2(NP_277038) c3(bcl-2-modifying factor isoform bmf-1) c4(228759, 228760) c5(228761, 228762, 228763, 228764, 228765, 228766, 228767, 228768, 228769, 228770, 228771, 228772, 228773, 228774, 228775, 228776, 228777, 228778) c6( ) c7(l, BN, u, eM, cj, aj, hy, ne, J); #c1(BMI1) c2(NP_005171) c3(polycomb complex protein BMI-1) c4( ) c5(153585, 153586, 153587, 153588, 153589, 153590, 153591, 153592, 153593, 153594, 153595, 153596, 153597, 153598, 153599, 153600, 153601, 153602, 153603, 153604, 153605, 153606, 153607, 153608, 153609, 153610, 153611, 153612, 153613, 153614, 153615, 153616, 153617, 153618, 153619, 153620, 153621) c6( ) c7(T, if, fd, bB, ci, x, aE, SV, ja, K, hu, DY, pk, eL, bc, yo, aW, arK, as, eF, cm, bw, eM, m, k, ht, n, qN, br, Bl, ft, jz, eV, hn, dL, asH, dx, pl, oS, A, aq, kp, cM, oU, Qy, bP, asl, dB, hk, Qu, hL, hR, nz, it, B, bL, ul, fM, dA, yk, eX, aA, q, eA, asG, MR, aoA, aT, cy, ae, jf, Uf, iU, oV, Y, r, en, cl, t, iK, ck, QG, gX, rA, bt, kG, Mb, jh, Gn, hF, ad, av, Db, d, qt, ff, eH, cr, Ej, aF, iR, bz, bE, bC, iu); #c1(BMP1) c2(NP_001190) c3(bone morphogenetic protein 1 isoform 1 precursor) c4(80503) c5( ) c6( ) c7(T, NT, bO, asM, bS, Jz, ct, j, V, eJ, Ie, aT, h, zp, anN, ae, af, asL, rU, asK, r, gl, Z, t, bw, eM, Ip, dc, dO, asJ, pg, fD, bC, bt); #c1(BMP1) c2(NP_006120) c3(bone morphogenetic protein 1 isoform 3 precursor) c4(162214, 162215, 162216) c5(162217, 162218, 162219, 162220, 162221, 162222, 162223, 162224) c6( ) c7(T, NT, bO, asM, bS, Jz, ct, j, V, eJ, Ie, aT, h, zp, anN, ae, af, asL, rU, asK, r, gl, Z, t, bw, eM, Ip, dc, dO, asJ, pg, fD, bC, bt); #c1(BMP1) c2(XP_006716449) c3(bone morphogenetic protein 1 isoform X1) c4( ) c5(290308, 290309, 290310, 290311, 290312, 290313, 290314) c6( ) c7(T, NT, bO, asM, bS, Jz, ct, j, V, eJ, Ie, aT, h, zp, anN, ae, af, asL, rU, asK, r, gl, Z, t, bw, eM, Ip, dc, dO, asJ, pg, fD, bC, bt); #c1(BMP1) c2(XP_011542919) c3(bone morphogenetic protein 1 isoform X2) c4(341520) c5(341521, 341522, 341523, 341524, 341525, 341526, 341527, 341528, 341529, 341530, 341531) c6( ) c7(T, NT, bO, asM, bS, Jz, ct, j, V, eJ, Ie, aT, h, zp, anN, ae, af, asL, rU, asK, r, gl, Z, t, bw, eM, Ip, dc, dO, asJ, pg, fD, bC, bt); #c1(BMP10) c2(NP_055297) c3(bone morphogenetic protein 10 preproprotein) c4(180353) c5(180354, 180355, 180356, 180357, 180358, 180359, 180360, 180361) c6(180362, 180363) c7(aW, mx, cz, aT, ae, ad); #c1(BMP15) c2(NP_005439) c3(bone morphogenetic protein 15 precursor) c4(156184) c5(156185, 156186, 156187, 156188, 156189, 156190) c6( ) c7(UH, Ut, kl, vJ, asP, AV, aZ, il, asQ, aeS, Uv, UG, asN, asO, zZ); #c1(BMP2) c2(NP_001191) c3(bone morphogenetic protein 2 preproprotein) c4(81907, 81908, 81909) c5( ) c6( ) c7(ID, T, ea, hE, fd, bB, amj, ci, Na, bv, aE, gH, iv, zy, ly, up, HI, aW, Ls, g, eF, bw, zV, eM, acw, vA, asR, m, IS, asW, dD, wu, NT, fr, cd, asS, ai, zw, h, asT, A, iw, aq, fq, op, lx, eD, Be, B, bL, eR, aA, wo, v, j, V, pd, q, cF, afQ, Id, aT, Nc, zg, jj, ae, bA, jf, vT, oV, r, en, t, sS, ac, nG, hO, KY, hS, kh, eq, zU, xg, ad, afb, BY, abk, Ae, hP, wm, asU, d, vj, ff, eH, yy, asV, aF, iR, bz, all, Ew, bE, adh, IC, kS, iu); #c1(BMP2) c2(XP_011527625) c3(bone morphogenetic protein 2 isoform X1) c4(322515) c5( ) c6( ) c7(ID, T, ea, hE, fd, bB, amj, ci, Na, bv, aE, gH, iv, zy, ly, up, HI, aW, Ls, g, eF, bw, zV, eM, acw, vA, asR, m, IS, asW, dD, wu, NT, fr, cd, asS, ai, zw, h, asT, A, iw, aq, fq, op, lx, eD, Be, B, bL, eR, aA, wo, v, j, V, pd, q, cF, afQ, Id, aT, Nc, zg, jj, ae, bA, jf, vT, oV, r, en, t, sS, ac, nG, hO, KY, hS, kh, eq, zU, xg, ad, afb, BY, abk, Ae, hP, wm, asU, d, vj, ff, eH, yy, asV, aF, iR, bz, all, Ew, bE, adh, IC, kS, iu); #c1(BMP2K) c2(NP_060063) c3(BMP-2-inducible protein kinase isoform b) c4(193962, 193963) c5(193964, 193965, 193966, 193967, 193968, 193969, 193970, 193971, 193972, 193973, 193974, 193975) c6( ) c7(dy, bA); #c1(BMP2K) c2(NP_942595) c3(BMP-2-inducible protein kinase isoform a) c4(260588) c5( ) c6( ) c7(dy, bA); #c1(BMP2K) c2(XP_011530403) c3(BMP-2-inducible protein kinase isoform X2) c4( ) c5(326248, 326249, 326250, 326251, 326252, 326253, 326254) c6( ) c7(dy, bA); #c1(BMP3) c2(XP_006714354) c3(bone morphogenetic protein 3 isoform X1) c4(287787) c5(287788, 287789, 287790, 287791, 287792, 287793) c6( ) c7(af, Ls, In, r, Fb, q); #c1(BMP4) c2(NP_001193) c3(bone morphogenetic protein 4 preproprotein) c4(83497, 83498) c5( ) c6( ) c7(T, aC, ea, atj, bB, ci, wa, x, bv, Na, aE, ata, asY, ath, K, asX, cp, mH, li, yo, aW, Ls, hl, LZ, g, eF, iT, Ip, vy, k, m, IS, fy, dD, IT, wJ, NT, zw, Lv, atc, A, kj, fQ, atf, aq, Pp, dw, W, hk, w, wk, ajd, Be, hR, ati, zG, eo, aiS, B, bL, ul, eR, nx, aA, cR, cz, V, q, eA, tL, afQ, aT, Nc, zg, jj, an, ae, af, bA, kl, s, Y, ev, ate, r, t, dS, ck, Dy, ac, gX, sx, hl, qb, atk, ha, uO, eq, zU, OH, ad, dP, MS, oW, IR, xs, eH, yy, asZ, aF, bz, atb, Hv, LB, apM, yE, bE, atg, aS, y, X, atd); #c1(BMP5) c2(NP_066551) c3(bone morphogenetic protein 5 preproprotein) c4(207374) c5(207375, 207376, 207377, 207378, 207379, 207380) c6( ) c7(aW, Dd, Ls, aw, iw, ff, aT, iv, eo, en, y, V, ae, ad, dS); #c1(BMP5) c2(XP_011513118) c3(bone morphogenetic protein 5 isoform X1) c4(304909) c5(304910, 304911, 304912, 304913, 304914, 304915) c6( ) c7(aW, Dd, Ls, aw, iw, ff, aT, iv, eo, en, y, V, ae, ad, dS); #c1(BMP6) c2(NP_001709) c3(bone morphogenetic protein 6 preproprotein) c4(120305, 120306, 120307) c5(120308, 120309, 120310, 120311, 120312, 120313, 120314, 120315, 120316, 120317, 120318, 120319, 120320, 120321, 120322, 120323, 120324, 120325) c6( ) c7(T, kh, pG, aZ, jh, aA, cz, fd, aj, Fb, fr, ci, cd, J, ad, x, ib, Id, oW, kH, aT, IG, Nc, ji, K, zg, hu, ae, eu, hi, kl, A, je, aW, fJ, eH, atl, r, yy, aq, aF, eF, bz, ck, atm, iM, W, eM, cj, pg, k, IC, bt, it, B, y); #c1(BMP7) c2(NP_001710) c3(bone morphogenetic protein 7 precursor) c4(120326, 120327) c5(120328, 120329, 120330, 120331, 120332, 120333, 120334, 120335, 120336, 120337, 120338, 120339, 120340, 120341, 120342, 120343, 120344, 120345, 120346, 120347, 120348, 120349, 120350, 120351, 120352, 120353, 120354, 120355, 120356, 120357, 120358, 120359, 120360, 120361, 120362, 120363, 120364, 120365, 120366, 120367, 120368, 120369, 120370, 120371, 120372, 120373, 120374, 120375, 120376, 120377, 120378, 120379, 120380, 120381, 120382, 120383, 120384, 120385, 120386, 120387, 120388, 120389, 120390, 120391, 120392, 120393, 120394, 120395, 120396, 120397, 120398, 120399, 120400, 120401, 120402, 120403, 120404, 120405, 120406, 120407, 120408, 120409, 120410, 120411, 120412, 120413, 120414, 120415, 120416, 120417, 120418, 120419, 120420, 120421, 120422, 120423, 120424, 120425, 120426, 120427, 120428, 120429, 120430, 120431, 120432) c6(120433, 120434, 120435, 120436, 120437) c7(bL, T, kh, eR, hV, atk, fG, if, al, bO, aA, jh, aj, bX, qN, atp, aY, V, AO, q, J, ad, er, dP, fU, wa, afb, cF, aE, zw, fm, rw, IC, aT, IG, cy, ji, K, SD, atq, ae, atn, af, cp, atr, ato, A, IU, aW, aeC, Y, vj, Np, eH, r, fQ, fe, ff, Pp, uF, en, g, eF, bz, eK, iP, gk, ac, wO, X, pg, dy, Hb, IS, fy, in, B); #c1(BMP8B) c2(XP_011540326) c3(bone morphogenetic protein 8B isoform X3) c4(338764) c5(338765, 338766, 338767, 338768, 338769, 338770, 338771, 338772) c6(338773, 338774) c7(ci, vi); #c1(BMPER) c2(NP_597725) c3(BMP-binding endothelial regulator protein precursor) c4(235120) c5(235121, 235122, 235123, 235124, 235125, 235126, 235127, 235128, 235129, 235130) c6( ) c7(gk, F, VR, dc, dh, hl, oW, al, jx, h, ats, cd, vi); #c1(BMPR1A) c2(NP_004320) c3(bone morphogenetic protein receptor type-1A precursor) c4(145135) c5(145136, 145137, 145138, 145139, 145140, 145141, 145142, 145143, 145144, 145145) c6( ) c7(bL, ID, T, jW, aZ, atv, al, NT, aA, v, Cd, Cb, eA, ad, er, Cj, rw, BJ, bj, atw, K, ae, Ur, wC, ly, B, Yd, Az, atu, atf, aF, att, op, lx, bF, nM, vA, gX, adh, IC, X); #c1(BMPR1B) c2(NP_001243721) c3(bone morphogenetic protein receptor type-IB isoform b precursor) c4(91547) c5(91548, 91549, 91550, 91551, 91552, 91553, 91554, 91555, 91556, 91557, 91558, 91559, 91560, 91561, 91562, 91563, 91564, 91565, 91566, 91567, 91568, 91569, 91570, 91571, 91572, 91573, 91574, 91575) c6( ) c7(bA, bM, atx, T, aty, d, ID, aW, BJ, In, Az, NT, aT, cz, zU, bX, IC, Qx, atb, ad, BY); #c1(BMPR1B) c2(NP_001243722) c3(bone morphogenetic protein receptor type-IB isoform a precursor) c4(91576, 91577, 91578) c5(91579, 91580, 91581, 91582, 91583, 91584, 91585, 91586, 91587, 91588, 91589, 91590) c6( ) c7(bA, bM, atx, T, aty, d, ID, aW, BJ, In, Az, NT, aT, cz, zU, bX, IC, Qx, atb, ad, BY); #c1(BMPR2) c2(NP_001195) c3(bone morphogenetic protein receptor type-2 precursor) c4(83499) c5(83500, 83501, 83502, 83503, 83504, 83505) c6( ) c7(ID, bM, T, atB, atC, e, al, NT, cz, bB, v, j, ci, IR, fr, q, ad, BY, XX, Cj, Zs, IC, yg, aT, h, IG, BZ, atD, K, uV, bq, rz, ae, wC, ly, ue, atA, eH, r, eF, pb, lx, bE, wl, gZ, uo, aS, atz, jr); #c1(BMPR2) c2(XP_011509989) c3(bone morphogenetic protein receptor type-2 isoform X1) c4(300604) c5( ) c6( ) c7(ID, bM, T, atB, atC, e, al, NT, cz, bB, v, j, ci, IR, fr, q, ad, BY, XX, Cj, Zs, IC, yg, aT, h, IG, BZ, atD, K, uV, bq, rz, ae, wC, ly, ue, atA, eH, r, eF, pb, lx, bE, wl, gZ, uo, aS, atz, jr); #c1(BMPR2) c2(XP_011509990) c3(bone morphogenetic protein receptor type-2 isoform X2) c4( ) c5(300605, 300606, 300607, 300608, 300609, 300610) c6( ) c7(ID, bM, T, atB, atC, e, al, NT, cz, bB, v, j, ci, IR, fr, q, ad, BY, XX, Cj, Zs, IC, yg, aT, h, IG, BZ, atD, K, uV, bq, rz, ae, wC, ly, ue, atA, eH, r, eF, pb, lx, bE, wl, gZ, uo, aS, atz, jr); #c1(BMSI) c2(NP_055568) c3(ribosome biogenesis protein BMSI homolog) c4(181975) c5(181976, 181977, 181978, 181979, 181980, 181981) c6( ) c7(bL, T, eR, aD, qB, cz, fF, n, cL, bS, j, ci, v, aY, ad, o, qH, qC, dP, ft, ib, qK, iv, jy, qG, ae, af, hm, qE, iU, nO, iw, cr, qL, eZ, mv, cm, qJ, ql, act, qF, i, hS); #c1(BMX) c2(NP_001712) c3(cytoplasmic tyrosine-protein kinase BMX) c4(120438) c5(120439, 120440, 120441, 120442, 120443, 120444, 120445, 120446, 120447, 120448, 120449, 120450, 120451, 120452) c6( ) c7(ae, T, ft, aW, aT, h, bw, fr, y, bz, ad); #c1(BNC1) c2(NP_001288135) c3(zinc finger protein basonuclin-1 isoform b) c4(113594) c5(113595, 113596, 113597, 113598, 113599, 113600) c6( ) c7(T, sS, aE, ff, aq, en, B); #c1(BNC1) c2(NP_001708) c3(zinc finger protein basonuclin-1 isoform a) c4(120297) c5(120298, 120299, 120300, 120301, 120302, 120303, 120304) c6( ) c7(T, sS, aE, ff, aq, en, B); #c1(BNC1) c2(XP_011520196) c3(zinc finger protein basonuclin-1 isoform X2) c4( ) c5(315081) c6( ) c7(T, sS, aE, ff, aq, en, B); #c1(BNC2) c2(NP_060107) c3(zinc finger protein basonuclin-2) c4(194189, 194190) c5(194191, 194192, 194193, 194194, 194195, 194196, 194197, 194198, 194199, 194200, 194201, 194202, 194203, 194204, 194205, 194206, 194207, 194208, 194209, 194210, 194211, 194212, 194213, 194214, 194215, 194216, 194217, 194218, 194219) c6( ) c7(dP, Na, A, pf, bo, Az, aj, Pp, m, t, J); #c1(BNC2) c2(XP_011516223) c3(zinc finger protein basonuclin-2 isoform X1) c4(309441, 309442, 309443) c5(309444) c6( ) c7(dP, Na, A, pf, bo, Az, aj, Pp, m, t, J); #c1(BNC2) c2(XP_011516224) c3(zinc finger protein basonuclin-2 isoform X2) c4( ) c5(309445, 309446, 309447, 309448, 309449, 309450) c6( ) c7(dP, Na, A, pf, bo, Az, aj, Pp, m, t, J); #c1(BNC2) c2(XP_011516226) c3(zinc finger protein basonuclin-2 isoform X4) c4(309451) c5( ) c6( ) c7(dP, Na, A, pf, bo, Az, aj, Pp, m, t, J); #c1(BNC2) c2(XP_011516229) c3(zinc finger protein basonuclin-2 isoform X7) c4(309452) c5( ) c6( ) c7(dP, Na, A, pf, bo, Az, aj, Pp, m, t, J); #c1(BNC2) c2(XP_011516230) c3(zinc finger protein basonuclin-2 isoform X8) c4( ) c5(309453, 309454, 309455, 309456, 309457, 309458, 309459, 309460, 309461, 309462, 309463, 309464, 309465, 309466, 309467, 309468) c6( ) c7(dP, Na, A, pf, bo, Az, aj, Pp, m, t, J); #c1(BNC2) c2(XP_011516234) c3(zinc finger protein basonuclin-2 isoform X9) c4( ) c5(309469, 309470, 309471, 309472, 309473, 309474) c6( ) c7(dP, Na, A, pf, bo, Az, aj, Pp, m, t, J); #c1(BNIP1) c2(NP_001196) c3(vesicle transport protein SEC20 isoform BNIP1) c4(83506) c5(83507, 83508, 83509, 83510, 83511, 83512) c6( ) c7(aeP, aW, cz, ad, aT); #c1(BNIP1) c2(NP_053581) c3(vesicle transport protein SEC20 isoform BNIP1-a) c4(177216) c5(177217, 177218, 177219, 177220, 177221, 177222) c6( ) c7(aeP, aW, cz, ad, aT); #c1(BNIP1) c2(NP_053582) c3(vesicle transport protein SEC20 isoform BNIP1-b) c4(177223) c5(177224, 177225, 177226, 177227, 177228, 177229) c6( ) c7(aeP, aW, cz, ad, aT); #c1(BNIP1) c2(NP_053583) c3(vesicle transport protein SEC20 isoform BNIP1-c) c4(177230) c5(177231, 177232, 177233, 177234, 177235, 177236) c6( ) c7(aeP, aW, cz, ad, aT); #c1(BNIP2) c2(NP_004321) c3(BCL2/adenovirus E1B 19 kDa protein-interacting protein 2) c4(145146, 145147) c5(145148, 145149, 145150, 145151, 145152, 145153, 145154, 145155, 145156, 145157, 145158, 145159) c6( ) c7(cm, iW, ae, cF, ad); #c1(BNIP3) c2(NP_004043) c3(BCL2/adenovirus E1B 19 kDa protein-interacting protein 3) c4(143102, 143103) c5(143104, 143105, 143106, 143107, 143108, 143109, 143110, 143111, 143112, 143113, 143114, 143115) c6( ) c7(T, aC, fM, rQ, iW, aw, aA, fd, n, fr, ci, q, cd, ad, eA, x, av, aE, aT, Lv, cy, K, ae, d, aW, Y, r, QP, aq, vs, aF, g, ck, es, ac, eM, iA, bE, gX, wz, gZ, pg, qF, B); #c1(BNIP3L) c2(NP_004322) c3(BCL2/adenovirus E1B 19 kDa protein-interacting protein 3-like) c4(145160, 145161) c5(145162, 145163, 145164, 145165, 145166, 145167, 145168, 145169, 145170, 145171, 145172, 145173, 145174, 145175, 145176) c6( ) c7(ar, T, BN, pc, aE, aW, aT, gZ, cy, cd, aj, hy, K, m, an, t, ae, ne, J, ad); #c1(BNIP3L) c2(XP_011542932) c3(BCL2/adenovirus E1B 19 kDa protein-interacting protein 3-like isoform X1) c4(341568) c5(341569, 341570, 341571, 341572, 341573, 341574, 341575, 341576, 341577, 341578, 341579) c6( ) c7(ar, T, BN, pc, aE, aW, aT, gZ, cy, cd, aj, hy, K, m, an, t, ae, ne, J, ad); #c1(BNIPL) c2(XP_011507538) c3(bcl-2/adenovirus E1B 19 kDa-interacting protein 2-like protein isoform X1) c4( ) c5(297468, 297469) c6( ) c7(B); #c1(BOC) c2(NP_001288790) c3(brother of CDO isoform 1 precursor) c4(114044) c5(114045, 114046, 114047, 114048, 114049, 114050, 114051, 114052, 114053, 114054, 114055) c6( ) c7(jf, gV, aiw, hG); #c1(BOC) c2(NP_001288796) c3(brother of CDO isoform 3 precursor) c4(114056) c5(114057, 114058, 114059, 114060, 114061, 114062, 114063, 114064, 114065, 114066, 114067, 114068, 114069, 114070, 114071, 114072, 114073, 114074, 114075, 114076, 114077, 114078, 114079, 114080, 114081, 114082) c6( ) c7(jf, gV, aiw, hG); #c1(BOC) c2(XP_005247954) c3(brother of CDO isoform X5) c4(268153, 268154, 268155) c5( ) c6( ) c7(jf, gV, aiw, hG); #c1(BOC) c2(XP_011511607) c3(brother of CDO isoform X2) c4(302332) c5(302333, 302334, 302335, 302336, 302337, 302338, 302339, 302340, 302341, 302342) c6( ) c7(jf, gV, aiw, hG); #c1(BOC) c2(XP_011511608) c3(brother of CDO isoform X3) c4( ) c5(302343, 302344) c6( ) c7(jf, gV, aiw, hG); #c1(BODIL2) c2(NP_001244893) c3(biorientation of chromosomes in cell division protein 1-like 2) c4(92259, 92260) c5(92261, 92262, 92263, 92264, 92265, 92266, 92267, 92268, 92269, 92270, 92271, 92272) c6( ) c7(j); #c1(BOK) c2(NP_115904) c3(bcl-2-related ovarian killer protein) c4(224595) c5(224596, 224597, 224598, 224599, 224600, 224601) c6( ) c7(hb, uC, ul, id); #c1(BOLA3) c2(NP_001030582) c3(bolA-like protein 3 isoform 2) c4(31027) c5(31028, 31029, 31030, 31031, 31032, 31033) c6( ) c7(atE, UZ, atF); #c1(BOLA3) c2(NP_997717) c3(bolA-like protein 3 isoform 1) c4(265762) c5(265763, 265764, 265765, 265766, 265767, 265768) c6( ) c7(atE, UZ, atF); #c1(BOLL) c2(NP_001271287) c3(protein boule-like isoform 3) c4(103848) c5(103849, 103850, 103851, 103852, 103853, 103854) c6( ) c7(gU, ND, aec, vH, g, us, dR); #c1(BOLL) c2(NP_001271291) c3(protein boule-like isoform 5) c4( ) c5(103855) c6( ) c7(gU, ND, aec, vH, g, us, dR); #c1(BOLL) c2(NP_149019) c3(protein boule-like isoform 2) c4( ) c5(226776, 226777, 226778, 226779, 226780, 226781, 226782, 226783) c6( ) c7(gU, ND, aec, vH, g, us, dR); #c1(BOLL) c2(NP_932074) c3(protein boule-like isoform 1) c4(258806, 258807) c5(258808, 258809, 258810, 258811, 258812, 258813, 258814) c6( ) c7(gU, ND, aec, vH, g, us, dR); #c1(BOP1) c2(NP_056016) c3(ribosome biogenesis protein BOP1) c4(185151, 185152) c5(185153, 185154, 185155, 185156, 185157, 185158, 185159, 185160, 185161, 185162, 185163, 185164) c6( ) c7(NT, aA); #c1(BORA) c2(NP_001273675) c3(protein aurora borealis isoform 2) c4(105595) c5(105596, 105597, 105598, 105599, 105600) c6( ) c7(fq); #c1(BORA) c2(NP_001273676) c3(protein aurora borealis isoform 3) c4(105601) c5(105602, 105603, 105604, 105605, 105606, 105607) c6( ) c7(fq); #c1(BORA) c2(NP_079084) c3(protein aurora borealis isoform 1) c4( ) c5(216929) c6( ) c7(fq); #c1(BPGM) c2(NP_001280014) c3(bisphosphoglycerate mutase) c4(111236, 111237) c5(111238, 111239, 111240, 111241, 111242, 111243, 111244, 111245, 111246, 111247, 111248, 111249, 111250, 111251, 111252, 111253, 111254, 111255, 111256, 111257) c6( ) c7(atG, atH, bK, atl); #c1(BPI) c2(NP_001716) c3(bactericidal permeability-increasing protein precursor) c4(120460, 120461, 120462, 120463, 120464) c5(120465, 120466, 120467, 120468, 120469, 120470) c6( ) c7(oO, bL, am, fR, aw, al, mS, bS, ct, C, mW, dL, bK, ji, mY, he, mV, N, aa, mU, atJ, bg, hl, fe, aga, iV, Z, mZ, pb, DF, mX, gk, eM, at, Zn, uJ, mf, y, mT, ao); #c1(BPI) c2(XP_005260579) c3(bactericidal permeability-increasing protein isoform X1) c4(276640) c5(276641, 276642, 276643, 276644, 276645, 276646, 276647, 276648, 276649, 276650, 276651, 276652, 276653, 276654, 276655, 276656, 276657, 276658, 276659, 276660, 276661, 276662, 276663, 276664, 276665, 276666, 276667, 276668, 276669, 276670, 276671, 276672, 276673, 276674, 276675, 276676, 276677, 276678, 276679, 276680, 276681, 276682, 276683, 276684, 276685, 276686, 276687, 276688, 276689, 276690, 276691, 276692, 276693, 276694, 276695, 276696, 276697, 276698, 276699, 276700, 276701, 276702, 276703, 276704, 276705, 276706, 276707, 276708, 276709, 276710, 276711, 276712, 276713, 276714, 276715, 276716, 276717, 276718, 276719, 276720, 276721, 276722, 276723, 276724, 276725, 276726, 276727) c6(276728) c7(oO, bL, am, fR, aw, al, mS, bS, ct, C, mW, dL, bK, ji, mY, he, mV, N, aa, mU, atJ, bg, hl, fe, aga, iV, Z, mZ, pb, DF, mX, gk, eM, at, Zn, uJ, mf, y, mT, ao); #c1(BPIFA1) c2(NP_057667) c3(BPI fold-containing family A member 1 precursor) c4(192226, 192227) c5(192228, 192229, 192230, 192231, 192232, 192233, 192234, 192235, 192236, 192237, 192238, 192239, 192240, 192241, 192242, 192243, 192244, 192245, 192246, 192247, 192248, 192249, 192250, 192251, 192252, 192253, 192254, 192255) c6(192256, 192257, 192258, 192259, 192260, 192261, 192262, 192263) c7(oO, av, eM, afm, df, ff, n, zV, ci, en, g, zy, B, ao, aa); #c1(BPIFA2) c2(NP_542141) c3(BPI fold-containing family A member 2 precursor) c4(231396) c5(231397, 231398, 231399, 231400, 231401, 231402, 231403, 231404, 231405, 231406, 231407, 231408, 231409, 231410, 231411) c6(231412, 231413, 231414, 231415) c7(ar, kp, act, IB, ae, ad); #c1(BPIFA3) c2(NP_001035904) c3(BPI fold-containing family A member 3 isoform 2 precursor) c4(33358) c5(33359, 33360, 33361, 33362, 33363, 33364, 33365, 33366) c6(33367, 33368) c7(oe); #c1(BPIFA3) c2(NP_848561) c3(BPI fold-containing family A member 3 isoform 1 precursor) c4(253860) c5(253861, 253862, 253863, 253864, 253865, 253866, 253867, 253868) c6(253869, 253870) c7(oe); #c1(BPIFB1) c2(NP_149974) c3(BPI fold-containing family B member 1 precursor) c4(227681, 227682, 227683) c5(227684, 227685, 227686, 227687, 227688, 227689, 227690, 227691, 227692, 227693, 227694, 227695, 227696, 227697, 227698, 227699, 227700, 227701, 227702, 227703, 227704, 227705, 227706, 227707) c6(227708, 227709, 227710, 227711, 227712, 227713) c7(bW, jN, uo, ci, yb, OM, atK, ao); #c1(BPIFB2) c2(NP_079503) c3(BPI fold-containing family B member 2 precursor) c4(218418) c5(218419, 218420, 218421, 218422, 218423, 218424, 218425, 218426) c6(218427, 218428) c7(atL); #c1(BPIFC) c2(NP_777592) c3(BPI fold-containing family C protein precursor) c4(251264) c5(251265, 251266, 251267, 251268, 251269, 251270, 251271, 251272, 251273, 251274, 251275, 251276, 251277, 251278, 251279) c6(251280, 251281, 251282, 251283) c7(m); #c1(BPIFC) c2(XP_011528393) c3(BPI fold-containing family C protein isoform X2) c4(323480) c5(323481) c6( ) c7(m); #c1(BPIFC) c2(XP_011528395) c3(BPI fold-containing family C protein isoform X3) c4(323482) c5(323483, 323484, 323485, 323486, 323487, 323488, 323489, 323490, 323491, 323492, 323493, 323494, 323495, 323496) c6(323497, 323498, 323499, 323500) c7(m); #c1(BPNT1) c2(NP_001273078) c3(3′(2′),5′-bisphosphate nucleotidase 1 isoform 2) c4( ) c5(104294, 104295, 104296, 104297, 104298) c6( ) c7(T, KW, Fb, fr, zF, ci, nA, atN, ai, ad, aT, DO, K, ae, aW, Ue, zD, Pp, t, atM, dB, zB); #c1(BPNT1) c2(NP_001273079) c3(3′(2′),5′-bisphosphate nucleotidase 1 isoform 3) c4(104299) c5(104300, 104301, 104302, 104303, 104304, 104305) c6( ) c7(T, KW, Fb, fr, zF, ci, nA, atN, ai, ad, aT, DO, K, ae, aW, Ue, zD, Pp, t, atM, dB, zB); #c1(BPNT1) c2(NP_006076) c3(3′(2′),5′-bisphosphate nucleotidase 1 isoform 1) c4(161694, 161695, 161696) c5(161697, 161698, 161699, 161700, 161701, 161702, 161703, 161704, 161705, 161706, 161707, 161708, 161709, 161710, 161711, 161712, 161713) c6( ) c7(T, KW, Fb, fr, zF, ci, nA, atN, ai, ad, aT, DO, K, ae, aW, Ue, zD, Pp, t, atM, dB, zB); #c1(BPNT1) c2(XP_005273056) c3(3′(2′),5′-bisphosphate nucleotidase 1 isoform X2) c4(284284) c5( ) c6( ) c7(T, KW, Fb, fr, zF, ci, nA, atN, ai, ad, aT, DO, K, ae, aW, Ue, zD, Pp, t, atM, dB, zB); #c1(BPNT1) c2(XP_011507367) c3(3′(2′),5′-bisphosphate nucleotidase 1 isoform X7) c4( ) c5(297207, 297208, 297209, 297210, 297211, 297212) c6( ) c7(T, KW, Fb, fr, zF, ci, nA, atN, ai, ad, aT, DO, K, ae, aW, Ue, zD, Pp, t, atM, dB, zB); #c1(BPTF) c2(NP_004450) c3(nucleosome-remodeling factor subunit BPTF isoform 2) c4(146411) c5(146412, 146413, 146414, 146415, 146416, 146417, 146418, 146419, 146420, 146421, 146422, 146423, 146424) c6( ) c7(aW, dL, aT); #c1(BPTF) c2(NP_872579) c3(nucleosome-remodeling factor subunit BPTF isoform 1) c4(256411) c5(256412, 256413, 256414, 256415, 256416, 256417) c6( ) c7(aW, dL, aT); #c1(BPTF) c2(XP_005257207) c3(nucleosome-remodeling factor subunit BPTF isoform X1) c4( ) c5(274756, 274757, 274758, 274759, 274760, 274761, 274762, 274763, 274764, 274765, 274766, 274767) c6( ) c7(aW, dL, aT); #c1(BPTF) c2(XP_005257210) c3(nucleosome-remodeling factor subunit BPTF isoform X5) c4( ) c5(274768, 274769, 274770, 274771, 274772, 274773) c6( ) c7(aW, dL, aT); #c1(BPTF) c2(XP_005257211) c3(nucleosome-remodeling factor subunit BPTF isoform X6) c4(274774, 274775) c5( ) c6( ) c7(aW, dL, aT); #c1(BPTF) c2(XP_005257212) c3(nucleosome-remodeling factor subunit BPTF isoform X8) c4(274776) c5(274777, 274778, 274779, 274780, 274781, 274782) c6( ) c7(aW, dL, aT); #c1(BPTF) c2(XP_005257217) c3(nucleosome-remodeling factor subunit BPTF isoform X15) c4( ) c5(274783) c6( ) c7(aW, dL, aT); #c1(BPTF) c2(XP_005257218) c3(nucleosome-remodeling factor subunit BPTF isoform X16) c4(274784) c5( ) c6( ) c7(aW, dL, aT); #c1(BPTF) c2(XP_005257219) c3(nucleosome-remodeling factor subunit BPTF isoform X18) c4( ) c5(274785, 274786) c6( ) c7(aW, dL, aT); #c1(BPTF) c2(XP_011522826) c3(nucleosome-remodeling factor subunit BPTF isoform X17) c4(317314, 317315, 317316) c5(317317, 317318, 317319, 317320, 317321, 317322) c6( ) c7(aW, dL, aT); #c1(BPTF) c2(XP_011522828) c3(nucleosome-remodeling factor subunit BPTF isoform X20) c4( ) c5(317323, 317324, 317325, 317326, 317327) c6( ) c7(aW, dL, aT); #c1(BPY2) c2(NP_004669) c3(testis-specific basic protein Y 2) c4(148696) c5(148697, 148698, 148699, 148700, 148701, 148702, 148703, 148704, 148705, 148706, 148707, 148708, 148709, 148710, 148711, 148712) c6( ) c7(ae, gU, ad, ND); #c1(BRAF) c2(NP_004324) c3(serine/threonine-protein kinase B-raf) c4(145177) c5(145178, 145179, 145180, 145181, 145182, 145183) c6( ) c7(DS, atT, T, aC, apr, aiR, yS, if, WV, fd, bB, ci, aub, aon, auu, Qp, ip, Vp, afr, bv, xy, aE, pX, aeO, Qk, auB, iv, auF, K, MD, Zm, cp, YL, xQ, DA, eG, yo, auQ, aW, Ls, QB, Az, XV, nY, Qq, Qv, CT, NR, apm, g, as, cm, Qt, iP, qJ, eY, atU, auD, eM, nB, aep, cj, Qw, k, m, ik, iu, atD, sc, Uc, wu, sw, zX, RX, ht, NT, iB, n, kv, fr, qN, rP, auA, atV, atW, auO, auv, ft, jz, hw, auj, i, Nn, gd, KN, h, aul, By, dL, aux, yT, auS, Xh, Lg, Fp, kj, aua, auM, PX, iw, ks, aq, aqF, kp, po, jT, cM, auC, XT, Zj, ar, VZ, bP, ky, aul, dB, hk, eD, hL, auh, aum, aur, hR, nL, auR, bD, it, B, AN, fM, AS, aA, hz, Qo, auG, q, eA, zn, RU, aud, auf, aup, auL, nv, nX, atQ, aT, aut, Fx, atZ, ae, ne, jf, Uf, s, vT, NE, oV, Y, auc, ev, iU, r, auk, en, bu, cl, LV, t, ho, apx, iK, ck, aug, sS, nM, Dy, auo, auz, aui, np, auN, gT, bt, On, Mb, id, atY, qz, iW, atS, VT, jh, KO, auq, atR, ah, Fb, Fc, anu, aue, ad, atP, dP, av, hd, agd, ib, Db, yt, oz, ds, NS, aun, hP, auE, wm, fb, pq, atX, Yj, d, lx, BO, asf, aus, ff, nK, auP, aF, VI, iV, adj, bz, Hp, bF, es, auJ, amS, Ew, bE, Lj, auw, auH, Lb, auK, adg, y, xg, X, jr, auy); #c1(BRAP) c2(NP_006759) c3(BRCA1-associated protein) c4(167798, 167799) c5(167800, 167801, 167802, 167803, 167804, 167805, 167806, 167807, 167808, 167809, 167810, 167811) c6( ) c7(bL, Si, T, dD, pF, ck, aW, e, aw, aT, auT, j, bK, ei, eq, add); #c1(BRAT1) c2(NP_689956) c3(BRCA1-associated ATM activator 1) c4(244524) c5(244525, 244526, 244527, 244528, 244529, 244530) c6( ) c7(ha, auU, IQ); #c1(BRCA1) c2(NP_009225) c3(breast cancer type 1 susceptibility protein isoform 1) c4(171607, 171608, 171609, 171610, 171611) c5(171612, 171613, 171614, 171615, 171616, 171617, 171618, 171619, 171620, 171621, 171622, 171623, 171624, 171625, 171626, 171627, 171628, 171629, 171630, 171631, 171632, 171633, 171634, 171635, 171636, 171637, 171638, 171639, 171640, 171641, 171642, 171643, 171644, 171645, 171646, 171647, 171648, 171649, 171650, 171651, 171652, 171653, 171654, 171655) c6( ) c7(ng, atT, os, T, aC, auW, ea, xo, e, if, fd, bB, aeu, gf, ci, Jt, ip, gJ, aE, Ma, Xc, il, ajv, avd, gs, K, hu, MO, eL, avn, bc, avq, ave, xQ, zQ, wp, LC, aW, Qm, g, ir, eF, cm, ajj, iP, eM, Ip, mx, cj, cX, avo, m, in, iu, dD, sw, aw, ht, n, To, aj, fr, ct, bd, qN, zP, cd, ajL, Bl, no, hw, zf, gd, KN, cU, h, eV, dL, asT, on, pl, Yl, ia, avc, hT, aeU, hQ, agF, kp, mo, ajB, avf, zZ, QK, hq, Qy, auV, bP, dB, hk, anZ, Pl, avk, Ei, hL, Vy, at, avr, qF, nz, WL, it, B, DM, dA, Dh, afl, avm, eX, ew, Nt, cR, aA, cz, hy, v, C, bX, AO, V, q, J, er, eA, eJ, mj, cF, amg, MR, hW, afQ, BJ, eO, qK, aT, qv, avt, avl, ae, af, qw, avg, arl, wr, s, iU, oV, Y, PL, aeS, r, auX, avh, eS, en, avb, cl, t, iK, aoy, ck, nM, kP, Dy, Li, hr, fD, im, bt, ava, avi, ao, gV, Gl, kh, hl, id, avj, aZ, iW, jh, oZ, bS, Gn, eq, MC, avv, ad, afb, hX, dP, avu, avp, ib, Db, yt, vJ, avs, qh, oW, bj, xp, ji, aeQ, auY, d, BN, lx, Ub, BO, PE, Hh, hG, qt, ff, aF, Z, bz, dr, IU, bF, Ew, bE, auZ, X, WK, afd, aS, bC, be, ei, hE, aed, kS, ne); #c1(BRCA1) c2(NP_009228) c3(breast cancer type 1 susceptibility protein isoform 3) c4(171656, 171657, 171658) c5(171659, 171660, 171661, 171662, 171663, 171664) c6( ) c7(ng, atT, os, T, aC, auW, ea, xo, e, if, fd, bB, aeu, gf, ci, Jt, ip, gJ, aE, Ma, Xc, il, ajv, avd, gs, K, hu, MO, eL, avn, bc, avq, ave, xQ, zQ, wp, LC, aW, Qm, g, ir, eF, cm, ajj, iP, eM, Ip, mx, cj, cX, avo, m, in, iu, dD, sw, aw, ht, n, To, aj, fr, ct, bd, qN, zP, cd, ajL, Bl, no, hw, zf, gd, KN, cU, h, eV, dL, asT, on, pl, Yl, ia, avc, hT, aeU, hQ, aqF, kp, mo, ajB, avf, zZ, QK, hq, Qy, auV, bP, dB, hk, anZ, Pl, avk, Ei, hL, Vy, at, avr, qF, nz, WL, it, B, DM, dA, Dh, afl, avm, eX, ew, Nt, cR, aA, cz, hy, v, C, bX, AO, V, q, J, er, eA, eJ, mj, cF, amg, MR, hW, afQ, BJ, eO, qK, aT, qv, avt, avl, ae, af, qw, avg, arl, wr, s, iU, oV, Y, PL, aeS, r, auX, avh, eS, en, avb, cl, t, iK, aoy, ck, nM, kP, Dy, Li, hr, fD, im, bt, ava, avi, ao, gV, Gl, kh, hl, id, avj, aZ, iW, jh, oZ, bS, Gn, eq, MC, avv, ad, afb, hX, dP, avu, avp, ib, Db, yt, vJ, avs, qh, oW, bj, xp, ji, aeQ, auY, d, BN, lx, Ub, BO, PE, Hh, hG, qt, ff, aF, Z, bz, dr, IU, bF, Ew, bE, auZ, X, WK, afd, aS, bC, be, ei, hE, aed, kS, ne); #c1(BRCA1) c2(NP_009229) c3(breast cancer type 1 susceptibility protein isoform 4) c4(171665, 171666, 171667, 171668, 171669, 171670, 171671) c5(171672, 171673, 171674, 171675, 171676, 171677, 171678, 171679, 171680, 171681, 171682, 171683, 171684, 171685, 171686, 171687, 171688, 171689, 171690, 171691, 171692, 171693, 171694, 171695) c6( ) c7(ng, atT, os, T, aC, auW, ea, xo, e, if, fd, bB, aeu, gf, ci, Jt, ip, gJ, aE, Ma, Xc, il, ajv, avd, gs, K, hu, MO, eL, avn, bc, avq, ave, xQ, zQ, wp, LC, aW, Qm, g, ir, eF, cm, ajj, iP, eM, Ip, mx, cj, cX, avo, m, in, iu, dD, sw, aw, ht, n, To, aj, fr, ct, bd, qN, zP, cd, ajL, Bl, no, hw, zf, gd, KN, cU, h, eV, dL, asT, on, pl, Yl, ia, avc, hT, aeU, hQ, aqF, kp, mo, ajB, avf, zZ, QK, hq, Qy, auV, bP, dB, hk, anZ, Pl, avk, Ei, hL, Vy, at, avr, qF, nz, WL, it, B, DM, dA, Dh, afl, avm, eX, ew, Nt, cR, aA, cz, hy, v, C, bX, AO, V, q, J, er, eA, eJ, mj, cF, amg, MR, hW, afQ, BJ, eO, qK, aT, qv, avt, avl, ae, af, qw, avg, arl, wr, s, iU, oV, Y, PL, aeS, r, auX, avh, eS, en, avb, cl, t, iK, aoy, ck, nM, kP, Dy, Li, hr, fD, im, bt, ava, avi, ao, gV, Gl, kh, hl, id, avj, aZ, iW, jh, oZ, bS, Gn, eq, MC, avv, ad, afb, hX, dP, avu, avp, ib, Db, yt, vJ, avs, qh, oW, bj, xp, ji, aeQ, auY, d, BN, lx, Ub, BO, PE, Hh, hG, qt, ff, aF, Z, bz, dr, IU, bF, Ew, bE, auZ, X, WK, afd, aS, bC, be, ei, hE, aed, kS, ne); #c1(BRCA1) c2(NP_009230) c3(breast cancer type 1 susceptibility protein isoform 5) c4(171696) c5(171697, 171698, 171699, 171700, 171701, 171702, 171703, 171704, 171705, 171706, 171707, 171708, 171709, 171710, 171711, 171712, 171713, 171714, 171715, 171716, 171717, 171718, 171719, 171720, 171721, 171722, 171723, 171724, 171725, 171726, 171727, 171728, 171729, 171730, 171731, 171732, 171733, 171734, 171735, 171736, 171737, 171738, 171739, 171740, 171741, 171742, 171743, 171744, 171745) c6( ) c7(ng, atT, os, T, aC, auW, ea, xo, e, if, fd, bB, aeu, gf, ci, Jt, ip, gJ, aE, Ma, Xc, il, ajv, avd, gs, K, hu, MO, eL, avn, bc, avq, ave, xQ, zQ, wp, LC, aW, Qm, g, ir, eF, cm, ajj, iP, eM, Ip, mx, cj, cX, avo, m, in, iu, dD, sw, aw, ht, n, To, aj, fr, ct, bd, qN, zP, cd, ajL, Bl, no, hw, zf, gd, KN, cU, h, eV, dL, asT, on, pl, Yl, ia, avc, hT, aeU, hQ, agF, kp, mo, ajB, avf, zZ, QK, hq, Qy, auV, bP, dB, hk, anZ, Pl, avk, Ei, hL, Vy, at, avr, qF, nz, WL, it, B, DM, dA, Dh, afl, avm, eX, ew, Nt, cR, aA, cz, hy, v, C, bX, AO, V, q, J, er, eA, eJ, mj, cF, amg, MR, hW, afQ, BJ, eO, qK, aT, qv, avt, avl, ae, af, qw, avg, arl, wr, s, iU, oV, Y, PL, aeS, r, auX, avh, eS, en, avb, cl, t, iK, aoy, ck, nM, kP, Dy, Li, hr, fD, im, bt, ava, avi, ao, gV, Gl, kh, hl, id, avj, aZ, iW, jh, oZ, bS, Gn, eq, MC, avv, ad, afb, hX, dP, avu, avp, ib, Db, yt, vJ, avs, qh, oW, bj, xp, ji, aeQ, auY, d, BN, lx, Ub, BO, PE, Hh, hG, qt, ff, aF, Z, bz, dr, IU, bF, Ew, bE, auZ, X, WK, afd, aS, bC, be, ei, hE, aed, kS, ne); #c1(BRCA1) c2(NP_009231) c3(breast cancer type 1 susceptibility protein isoform 2) c4(171746, 171747, 171748, 171749, 171750, 171751, 171752) c5(171753, 171754, 171755, 171756, 171757, 171758, 171759, 171760, 171761, 171762, 171763, 171764, 171765, 171766, 171767, 171768, 171769, 171770, 171771) c6( ) c7(ng, atT, os, T, aC, auW, ea, xo, e, if, fd, bB, aeu, gf, ci, Jt, ip, gJ, aE, Ma, Xc, il, ajv, avd, gs, K, hu, MO, eL, avn, bc, avq, ave, xQ, zQ, wp, LC, aW, Qm, g, ir, eF, cm, ajj, iP, eM, Ip, mx, cj, cX, avo, m, in, iu, dD, sw, aw, ht, n, To, aj, fr, ct, bd, qN, zP, cd, ajL, Bl, no, hw, zf, gd, KN, cU, h, eV, dL, asT, on, pl, Yl, ia, avc, hT, aeU, hQ, aqF, kp, mo, ajB, avf, zZ, QK, hq, Qy, auV, bP, dB, hk, anZ, Pl, avk, Ei, hL, Vy, at, avr, qF, nz, WL, it, B, DM, dA, Dh, afl, avm, eX, ew, Nt, cR, aA, cz, hy, v, C, bX, AO, V, q, J, er, eA, eJ, mj, cF, amg, MR, hW, afQ, BJ, eO, qK, aT, qv, avt, avl, ae, af, qw, avg, arl, wr, s, iU, oV, Y, PL, aeS, r, auX, avh, eS, en, avb, cl, t, iK, aoy, ck, nM, kP, Dy, Li, hr, fD, im, bt, ava, avi, ao, gV, Gl, kh, hl, id, avj, aZ, iW, jh, oZ, bS, Gn, eq, MC, avv, ad, afb, hX, dP, avu, avp, ib, Db, yt, vJ, avs, qh, oW, bj, xp, ji, aeQ, auY, d, BN, lx, Ub, BO, PE, Hh, hG, qt, ff, aF, Z, bz, dr, IU, bF, Ew, bE, auZ, X, WK, afd, aS, bC, be, ei, hE, aed, kS, ne); #c1(BRCA2) c2(NP_000050) c3(breast cancer type 2 susceptibility protein) c4(781) c5(782, 783, 784, 785, 786, 787) c6( ) c7(ng, atT, os, T, aC, avE, auW, aaH, e, bB, aeu, gf, ci, Jt, ip, gJ, aE, Ma, avA, ajv, avd, SV, Vv, ta, gs, K, hu, H, avq, xQ, zQ, aW, g, eF, bw, avx, ajj, iP, nB, nF, U, cj, cX, avo, m, in, avB, iu, gU, ht, avy, n, aj, qN, br, Bl, avC, hw, TK, KN, eV, dL, dx, ia, avc, hT, aeU, aqF, kp, avf, hq, YE, bP, dB, hk, Vy, hL, at, pg, avF, avr, it, B, L, hL, fM, avm, eX, ew, aA, bX, lu, AO, V, avD, q, J, er, eA, eJ, cF, afQ, BJ, eO, aT, avw, cy, vH, qv, bK, adV, ae, ne, jf, ak, iF, Uf, qw, ND, Y, aeS, r, auX, avh, eS, en, avb, cl, LV, t, iK, avz, ck, kP, Dy, Li, gX, wR, aan, fD, bt, ava, gV, pY, aZ, iW, jh, oZ, MC, Gn, ad, avu, dP, av, avp, hd, ib, Db, yt, avs, bj, hP, aeQ, auY, BN, BO, Ub, hG, qt, Hh, ff, dq, Ej, aF, xH, KM, bz, dr, bF, es, Ew, bE, ag, auZ, X, afd, bC, be, aed, CW, jr, BA); #c1(BRCA2) c2(XP_011533505) c3(breast cancer type 2 susceptibility protein isoform X1) c4( ) c5(329596, 329597, 329598, 329599, 329600, 329601, 329602, 329603, 329604, 329605) c6( ) c7(ng, atT, os, T, aC, avE, auW, aaH, e, bB, aeu, gf, ci, Jt, ip, gJ, aE, Ma, avA, ajv, avd, SV, Vv, ta, gs, K, hu, H, avq, xQ, zQ, aW, g, eF, bw, avx, ajj, iP, nB, nF, U, cj, cX, avo, m, in, avB, iu, gU, ht, avy, n, aj, qN, br, Bl, avC, hw, TK, KN, eV, dL, dx, ia, avc, hT, aeU, aqF, kp, avf, hq, YE, bP, dB, hk, Vy, hL, at, pg, avF, avr, it, B, L, bL, fM, avm, eX, ew, aA, bX, Iu, AO, V, avD, q, J, er, eA, eJ, cF, afQ, BJ, eO, aT, avw, cy, vH, qv, bK, adV, ae, ne, jf, ak, iF, Uf, qw, ND, Y, aeS, r, auX, avh, eS, en, avb, cl, LV, t, iK, avz, ck, kP, Dy, Li, gX, wR, aan, fD, bt, ava, gV, pY, aZ, iW, jh, oZ, MC, Gn, ad, avu, dP, av, avp, hd, ib, Db, yt, avs, bj, hP, aeQ, auY, BN, BO, Ub, hG, qt, Hh, ff, dq, Ej, aF, xH, KM, bz, dr, bF, es, Ew, bE, ag, auZ, X, afd, bC, be, aed, CW, jr, BA); #c1(BRCA2) c2(XP_011533507) c3(breast cancer type 2 susceptibility protein isoform X3) c4(329606) c5( ) c6( ) c7(ng, atT, os, T, aC, avE, auW, aaH, e, bB, aeu, gf, ci, Jt, ip, gJ, aE, Ma, avA, ajv, avd, SV, Vv, ta, gs, K, hu, H, avq, xQ, zQ, aW, g, eF, bw, avx, ajj, iP, nB, nF, U, cj, cX, avo, m, in, avB, iu, gU, ht, avy, n, aj, qN, br, Bl, avC, hw, TK, KN, eV, dL, dx, ia, avc, hT, aeU, agF, kp, avf, hq, YE, bP, dB, hk, Vy, hL, at, pg, avF, avr, it, B, L, bL, fM, avm, eX, ew, aA, bX, lu, AO, V, avD, q, J, er, eA, eJ, cF, afQ, BJ, eO, aT, avw, cy, vH, qv, bK, adV, ae, ne, jf, ak, iF, Uf, qw, ND, Y, aeS, r, auX, avh, eS, en, avb, cl, LV, t, iK, avz, ck, kP, Dy, Li, gX, wR, aan, fD, bt, ava, gV, pY, aZ, iW, jh, oZ, MC, Gn, ad, avu, dP, av, avp, hd, ib, Db, yt, avs, bj, hP, aeQ, auY, BN, BO, Ub, hG, qt, Hh, ff, dq, Ej, aF, xH, KM, bz, dr, bF, es, Ew, bE, ag, auZ, X, afd, bC, be, aed, CW, jr, BA); #c1(BRCC3) c2(NP_001018065) c3(lys-63-specific deubiquitinase BRCC36 isoform 2) c4(27031, 27032) c5(27033, 27034, 27035, 27036, 27037, 27038, 27039, 27040, 27041, 27042, 27043, 27044) c6( ) c7(ck, aW, Kk, qh, aT, atf, aS, bC, bd); #c1(BRCC3) c2(NP_001229569) c3(lys-63-specific deubiquitinase BRCC36 isoform 3) c4(84656) c5(84657, 84658, 84659, 84660, 84661, 84662) c6( ) c7(ck, aW, Kk, qh, aT, atf, aS, bC, bd); #c1(BRCC3) c2(NP_077308) c3(lys-63-specific deubiquitinase BRCC36 isoform 1) c4(215165, 215166) c5(215167, 215168, 215169, 215170, 215171, 215172, 215173, 215174, 215175, 215176, 215177, 215178) c6( ) c7(ck, aW, Kk, qh, aT, atf, aS, bC, bd); #c1(BRD1) c2(NP_001291737) c3(bromodomain-containing protein 1 isoform 1) c4(116459) c5(116460, 116461, 116462, 116463, 116464, 116465) c6( ) c7(mU, hS, mW, mZ, aq, qK, cz, mS, cd, mY, mT, K, ci, avG, he, mV, bK, uJ, B, ad, mX); #c1(BRD1) c2(NP_001291738) c3(bromodomain-containing protein 1 isoform 2) c4(116466) c5(116467, 116468, 116469, 116470, 116471, 116472, 116473, 116474, 116475, 116476, 116477) c6( ) c7(mU, hS, mW, mZ, aq, qK, cz, mS, cd, mY, mT, K, ci, avG, he, mV, bK, uJ, B, ad, mX); #c1(BRD1) c2(XP_011528367) c3(bromodomain-containing protein 1 isoform X3) c4(323398) c5(323399, 323400, 323401, 323402, 323403, 323404) c6( ) c7(mU, hS, mW, mZ, aq, qK, cz, mS, cd, mY, mT, K, ci, avG, he, mV, bK, uJ, B, ad, mX); #c1(BRD1) c2(XP_011528372) c3(bromodomain-containing protein 1 isoform X7) c4( ) c5(323405, 323406, 323407, 323408, 323409, 323410) c6( ) c7(mU, hS, mW, mZ, aq, qK, cz, mS, cd, mY, mT, K, ci, avG, he, mV, bK, uJ, B, ad, mX); #c1(BRD1) c2(XP_011528373) c3(bromodomain-containing protein 1 isoform X2) c4( ) c5(323411) c6( ) c7(mU, hS, mW, mZ, aq, qK, cz, mS, cd, mY, mT, K, ci, avG, he, mV, bK, uJ, B, ad, mX); #c1(BRD1) c2(XP_011528375) c3(bromodomain-containing protein 1 isoform X9) c4(323412, 323413) c5(323414, 323415, 323416, 323417, 323418) c6( ) c7(mU, hS, mW, mZ, aq, qK, cz, mS, cd, mY, mT, K, ci, avG, he, mV, bK, uJ, B, ad, mX); #c1(BRD2) c2(NP_001106653) c3(bromodomain-containing protein 2 isoform 1) c4(42462, 42463, 42464, 42465, 42466, 42467, 42468, 42469) c5(42470, 42471, 42472, 42473, 42474, 42475, 42476, 42477, 42478, 42479, 42480, 42481, 42482, 42483, 42484, 42485, 42486, 42487, 42488, 42489, 42490, 42491, 42492, 42493, 42494, 42495, 42496, 42497, 42498, 42499, 42500, 42501, 42502, 42503, 42504, 42505, 42506, 42507, 42508, 42509, 42510, 42511, 42512, 42513, 42514, 42515, 42516, 42517, 42518, 42519, 42520, 42521, 42522, 42523, 42524, 42525, 42526, 42527, 42528, 42529, 42530, 42531, 42532, 42533, 42534, 42535, 42536, 42537, 42538, 42539, 42540, 42541, 42542, 42543, 42544, 42545, 42546, 42547, 42548, 42549, 42550, 42551, 42552, 42553, 42554, 42555, 42556, 42557, 42558, 42559, 42560, 42561, 42562, 42563, 42564, 42565, 42566, 42567, 42568, 42569, 42570, 42571, 42572, 42573) c6( ) c7(bM, T, Ut, UH, acz, amj, ci, Ul, il, qM, EL, eL, avM, yo, avH, aW, eM, aiM, m, Uw, Ro, OF, gU, Uc, lT, n, aj, nA, b, PD, adX, h, dL, hg, uV, avP, yq, zZ, avK, avN, bP, adZ, hL, Uv, hR, rx, zG, bL, fM, pQ, v, avO, q, J, BJ, aT, kf, vH, af, bA, kl, s, ND, aeS, r, avJ, lo, cl, pt, t, EJ, ck, pa, mf, UF, gx, Ke, aZ, iW, ha, jh, OE, iD, dG, ad, hX, dP, vJ, avL, Ps, avQ, yr, d, eZ, bz, YR, Cq, OG, Uu, avl, i); #c1(BRD2) c2(NP_001186384) c3(bromodomain-containing protein 2 isoform 2) c4(77520, 77521, 77522, 77523) c5(77524, 77525, 77526, 77527, 77528, 77529, 77530, 77531, 77532, 77533, 77534, 77535, 77536, 77537, 77538, 77539, 77540, 77541, 77542, 77543, 77544, 77545, 77546, 77547, 77548, 77549, 77550, 77551, 77552, 77553, 77554, 77555, 77556, 77557, 77558, 77559, 77560, 77561, 77562, 77563, 77564, 77565, 77566, 77567, 77568, 77569, 77570, 77571, 77572, 77573, 77574, 77575, 77576, 77577) c6( ) c7(bM, T, Ut, UH, acz, amj, ci, Ul, il, qM, EL, eL, avM, yo, avH, aW, eM, aiM, m, Uw, Ro, OF, qU, Uc, lT, n, aj, nA, b, PD, adX, h, dL, hg, uV, avP, yq, zZ, avK, avN, bP, adZ, hL, Uv, hR, rx, zG, bL, fM, pQ, v, avO, q, J, BJ, aT, kf, vH, af, bA, kl, s, ND, aeS, r, avJ, lo, cl, pt, t, EJ, ck, pa, mf, UF, gx, Ke, aZ, iW, ha, jh, OE, iD, dG, ad, hX, dP, vJ, avL, Ps, avQ, yr, d, eZ, bz, YR, Cq, OG, Uu, avl, i); #c1(BRD2) c2(NP_001186385) c3(bromodomain-containing protein 2 isoform 3) c4(77578, 77579, 77580) c5(77581, 77582, 77583, 77584, 77585, 77586, 77587, 77588, 77589, 77590, 77591, 77592, 77593, 77594, 77595, 77596, 77597, 77598, 77599, 77600, 77601, 77602, 77603) c6( ) c7(bM, T, Ut, UH, acz, amj, ci, Ul, il, qM, EL, eL, avM, yo, avH, aW, eM, aiM, m, Uw, Ro, OF, gU, Uc, lT, n, aj, nA, b, PD, adX, h, dL, hg, uV, avP, yq, zZ, avK, avN, bP, adZ, hL, Uv, hR, rx, zG, bL, fM, pQ, v, avO, q, J, BJ, aT, kf, vH, af, bA, kl, s, ND, aeS, r, avJ, lo, cl, pt, t, EJ, ck, pa, mf, UF, gx, Ke, aZ, iW, ha, jh, OE, iD, dG, ad, hX, dP, vJ, avL, Ps, avQ, yr, d, eZ, bz, YR, Cq, OG, Uu, avl, i); #c1(BRD2) c2(NP_001278915) c3(bromodomain-containing protein 2 isoform 4) c4(110916, 110917) c5(110918, 110919, 110920, 110921, 110922, 110923, 110924, 110925, 110926, 110927, 110928, 110929, 110930, 110931, 110932, 110933, 110934, 110935, 110936, 110937, 110938, 110939, 110940, 110941, 110942, 110943, 110944, 110945, 110946, 110947, 110948, 110949, 110950, 110951) c6( ) c7(bM, T, Ut, UH, acz, amj, ci, Ul, il, qM, EL, eL, avM, yo, avH, aW, eM, aiM, m, Uw, Ro, OF, gU, Uc, lT, n, aj, nA, b, PD, adX, h, dL, hg, uV, avP, yq, zZ, avK, avN, bP, adZ, hL, Uv, hR, rx, zG, bL, fM, pQ, v, avO, q, J, BJ, aT, kf, vH, af, bA, kl, s, ND, aeS, r, avJ, lo, cl, pt, t, EJ, ck, pa, mf, UF, gx, Ke, aZ, iW, ha, jh, OE, iD, dG, ad, hX, dP, vJ, avL, Ps, avQ, yr, d, eZ, bz, YR, Cq, OG, Uu, avl, i); #c1(BRD3) c2(NP_031397) c3(bromodomain-containing protein 3) c4(172231, 172232, 172233) c5(172234, 172235, 172236, 172237, 172238, 172239, 172240, 172241, 172242, 172243, 172244, 172245, 172246, 172247, 172248, 172249, 172250, 172251) c6( ) c7(T, c); #c1(BRD3) c2(XP_005272271) c3(bromodomain-containing protein 3 isoform X2) c4(283951, 283952) c5(283953, 283954, 283955, 283956, 283957, 283958, 283959, 283960, 283961, 283962, 283963, 283964, 283965, 283966, 283967, 283968, 283969) c6( ) c7(T, c); #c1(BRD4) c2(XP_011526156) c3(bromodomain-containing protein 4 isoform X1) c4(320421) c5(320422, 320423, 320424, 320425, 320426, 320427, 320428, 320429) c6( ) c7(bM, T, Dw, Ke, jx, jh, fd, bB, ci, q, eW, F, afn, aT, h, hP, cp, jf, avR, Y, aW, r, tv, aq, tu, avT, ck, cT, rR, avS, bE, bt, avU, B); #c1(BRD4) c2(XP_011526157) c3(bromodomain-containing protein 4 isoform X3) c4(320430) c5(320431, 320432, 320433, 320434, 320435, 320436) c6( ) c7(bM, T, Dw, Ke, jx, jh, fd, bB, ci, q, eW, F, afn, aT, h, hP, cp, jf, avR, Y, aW, r, tv, aq, tu, avT, ck, cT, rR, avS, bE, bt, avU, B); #c1(BRD4) c2(XP_011526158) c3(bromodomain-containing protein 4 isoform X2) c4(320437) c5(320438, 320439, 320440, 320441, 320442, 320443) c6( ) c7(bM, T, Dw, Ke, jx, jh, fd, bB, ci, q, eW, F, afn, aT, h, hP, cp, jf, avR, Y, aW, r, tv, aq, tu, avT, ck, cT, rR, avS, bE, bt, avU, B); #c1(BRD7) c2(NP_001167455) c3(bromodomain-containing protein 7 isoform 1) c4(68934) c5(68935, 68936, 68937, 68938, 68939, 68940, 68941, 68942, 68943) c6( ) c7(T, kP, eH, fe, ci, m, k, eF, t, bt, eA, c1); #c1(BRD7) c2(NP_037395) c3(bromodomain-containing protein 7 isoform 2) c4(175244) c5(175245, 175246, 175247, 175248, 175249, 175250, 175251) c6( ) c7(T, kP, eH, fe, ci, m, k, eF, t, bt, eA, cl); #c1(BRD8) c2(NP_001157798) c3(bromodomain-containing protein 8 isoform 4) c4(62706, 62707) c5(62708, 62709, 62710, 62711, 62712, 62713, 62714, 62715, 62716, 62717, 62718, 62719) c6( ) c7(dP, T, aE, af, qt, aW, X, gd, aT, r, ci, eA, zy, AO, q); #c1(BRD8) c2(NP_001287891) c3(bromodomain-containing protein 8 isoform 6) c4(113143) c5(113144, 113145, 113146, 113147, 113148, 113149) c6( ) c7(dP, T, aE, af, qt, aW, X, gd, aT, r, ci, eA, zy, AO, q); #c1(BRD8) c2(NP_001287895) c3(bromodomain-containing protein 8 isoform 7) c4(113178) c5( ) c6( ) c7(dP, T, aE, af, qt, aW, X, gd, aT, r, ci, eA, zy, AO, q); #c1(BRD8) c2(NP_006687) c3(bromodomain-containing protein 8 isoform 1) c4(167157) c5(167158, 167159, 167160, 167161, 167162, 167163) c6( ) c7(dP, T, aE, af, qt, aW, X, gd, aT, r, ci, eA, zy, AO, q); #c1(BRD8) c2(NP_631938) c3(bromodomain-containing protein 8 isoform 2) c4(238356) c5(238357, 238358, 238359, 238360, 238361, 238362) c6( ) c7(dP, T, aE, af, qt, aW, X, gd, aT, r, ci, eA, zy, AO, q); #c1(BRD8) c2(XP_006714588) c3(bromodomain-containing protein 8 isoform X9) c4(287914) c5(287915, 287916, 287917, 287918, 287919, 287920, 287921, 287922, 287923, 287924, 287925, 287926) c6( ) c7(dP, T, aE, af, qt, aW, X, gd, aT, r, ci, eA, zy, AO, q); #c1(BRE) c2(NP_004890) c3(BRCA1-A complex subunit BRE isoform 1) c4(150594) c5(150595, 150596, 150597, 150598, 150599, 150600) c6( ) c7(DA, iZ, pN, aW, aT, ci, bt, B); #c1(BRE) c2(NP_954662) c3(BRCA1-A complex subunit BRE isoform 3) c4(261197, 261198) c5(261199, 261200, 261201, 261202, 261203, 261204, 261205, 261206, 261207, 261208, 261209, 261210, 261211, 261212) c6( ) c7(DA, iZ, pN, aW, aT, ci, bt, B); #c1(BRE) c2(NP_954664) c3(BRCA1-A complex subunit BRE isoform 2) c4(261213, 261214) c5(261215, 261216, 261217, 261218, 261219, 261220, 261221, 261222, 261223, 261224, 261225, 261226, 261227, 261228, 261229, 261230, 261231, 261232) c6( ) c7(DA, iZ, pN, aW, aT, ci, bt, B); #c1(BRF1) c2(NP_001229715) c3(transcription factor IIIB 90 kDa subunit isoform 4) c4(84863) c5(84864, 84865, 84866, 84867, 84868) c6( ) c7(ae, ad); #c1(BRF1) c2(NP_001229716) c3(transcription factor IIIB 90 kDa subunit isoform 5) c4(84869) c5( ) c6( ) c7(ae, ad); #c1(BRF1) c2(NP_001229717) c3(transcription factor IIIB 90 kDa subunit isoform 6) c4(84870) c5(84871, 84872, 84873, 84874, 84875, 84876) c6( ) c7(ae, ad); #c1(BRF1) c2(NP_001229718) c3(transcription factor IIIB 90 kDa subunit isoform 7) c4( ) c5(84877, 84878, 84879, 84880, 84881, 84882, 84883, 84884, 84885, 84886, 84887) c6( ) c7(ae, ad); #c1(BRF1) c2(NP_001229719) c3(transcription factor IIIB 90 kDa subunit isoform 8) c4(84888, 84889) c5(84890, 84891, 84892, 84893, 84894, 84895, 84896, 84897, 84898, 84899, 84900, 84901) c6( ) c7(ae, ad); #c1(BRF1) c2(NP_001510) c3(transcription factor IIIB 90 kDa subunit isoform 1) c4(118386, 118387) c5(118388, 118389, 118390, 118391, 118392, 118393, 118394, 118395, 118396, 118397, 118398, 118399, 118400, 118401, 118402, 118403, 118404, 118405, 118406) c6( ) c7(ae, ad); #c1(BRF1) c2(XP_005267618) c3(transcription factor IIIB 90 kDa subunit isoform X2) c4(281100, 281101) c5( ) c6( ) c7(ae, ad); #c1(BRF1) c2(XP_005267620) c3(transcription factor IIIB 90 kDa subunit isoform X1) c4(281102, 281103, 281104, 281105) c5(281106, 281107, 281108, 281109, 281110, 281111, 281112, 281113, 281114, 281115, 281116, 281117, 281118, 281119, 281120, 281121, 281122, 281123, 281124, 281125, 281126, 281127, 281128, 281129, 281130, 281131, 281132, 281133, 281134, 281135) c6( ) c7(ae, ad); #c1(BRF1) c2(XP_006720186) c3(transcription factor IIIB 90 kDa subunit isoform X6) c4( ) c5(293309) c6( ) c7(ae, ad); #c1(BRF1) c2(XP_011534974) c3(transcription factor IIIB 90 kDa subunit isoform X3) c4( ) c5(331532) c6( ) c7(ae, ad); #c1(BRF1) c2(XP_011534975) c3(transcription factor IIIB 90 kDa subunit isoform X4) c4(331533, 331534) c5( ) c6( ) c7(ae, ad); #c1(BRF1) c2(XP_011534976) c3(transcription factor IIIB 90 kDa subunit isoform X5) c4( ) c5(331535, 331536, 331537, 331538, 331539, 331540) c6( ) c7(ae, ad); #c1(BRF2) c2(NP_060780) c3(transcription factor IIIB 50 kDa subunit) c4(197747, 197748) c5(197749, 197750, 197751, 197752, 197753, 197754, 197755, 197756, 197757, 197758, 197759, 197760) c6( ) c7(Qu, T, eM, ff, en); #c1(BRI3) c2(NP_001152963) c3(brain protein 13 isoform b) c4(60285) c5(60286, 60287, 60288, 60289, 60290, 60291) c6( ) c7(bL, Qu, T, Qj, Tb, QO, if, avX, aA, bB, n, aeu, Gn, ci, bh, qN, q, ad, eA, av, iu, wG, awa, Xe, awb, pX, aT, kf, h, Ou, dL, fb, nJ, ae, af, be, eL, jf, if, A, avV, d, aW, Y, sq, kK, ED, ff, r, qL, YG, aF, bp, en, cl, g, t, f, bz, pb, avW, bN, as, mK, nM, kP, Dy, eM, dB, se, bE, go, JQ, mx, hL, Om, avZ, AM, m, act, hh, rA, it, YK, avY); #c1(BRI3) c2(NP_056194) c3(brain protein 13 isoform a) c4(186253) c5(186254, 186255, 186256, 186257, 186258, 186259) c6( ) c7(bL, Qu, T, Qj, Tb, QO, if, avX, aA, bB, n, aeu, Gn, ci, bh, qN, q, ad, eA, av, iu, wG, awa, Xe, awb, pX, aT, kf, h, Ou, dL, fb, nJ, ae, af, be, eL, jf, if, A, avV, d, aW, Y, sq, kK, ED, ff, r, qL, YG, aF, bp, en, cl, g, t, f, bz, pb, avW, bN, as, mK, nM, kP, Dy, eM, dB, se, bE, go, JQ, mx, hL, Om, avZ, AM, m, act, hh, rA, it, YK, avY); #c1(BRI3BP) c2(NP_542193) c3(BRI3-binding protein precursor) c4(232266) c5(232267, 232268, 232269, 232270, 232271, 232272) c6( ) c7(ck, T, aW, if, r, aT, ci, qN, q); #c1(BRINP1) c2(NP_055433) c3(BMP/retinoic acid-inducible neural-specific protein 1 precursor) c4(181106, 181107) c5(181108, 181109, 181110, 181111, 181112, 181113, 181114, 181115, 181116, 181117, 181118, 181119, 181120, 181121, 181122, 181123) c6( ) c7(x, bM, T, ant, id, eM, aW, aw, ff, jh, aT, la, n, dL, Da, aF, en, an, V, eL, cd); #c1(BRINP2) c2(NP_066988) c3(BMP/retinoic acid-inducible neural-specific protein 2 precursor) c4(208043, 208044) c5(208045, 208046, 208047, 208048, 208049, 208050, 208051, 208052, 208053, 208054, 208055, 208056, 208057, 208058, 208059, 208060) c6(208061, 208062, 208063, 208064) c7(oe, fq); #c1(BRINP3) c2(NP_950252) c3(BMP/retinoic acid-inducible neural-specific protein 3 precursor) c4(260938, 260939) c5(260940, 260941, 260942, 260943, 260944, 260945, 260946, 260947, 260948, 260949, 260950, 260951, 260952, 260953, 260954) c6(260955, 260956, 260957) c7(ba, dD, ac, aw, bg, EQ, fe, j, eq, Tz); #c1(BRIP1) c2(NP_114432) c3(Fanconi anemia group J protein) c4(222760) c5(222761, 222762, 222763, 222764, 222765, 222766) c6( ) c7(T, os, aC, yk, if, n, oZ, ci, qN, q, ad, eA, ip, F, Qk, awd, oW, aT, h, aed, dL, ji, K, ae, sb, aW, CT, r, aq, g, zE, t, bz, dr, dB, dc, afd, at, m, bt, B, awe); #c1(BRK1) c2(NP_060932) c3(protein BRICK1) c4(198756, 198757) c5(198758, 198759, 198760, 198761, 198762, 198763, 198764, 198765, 198766, 198767, 198768, 198769) c6( ) c7(Jm, es, T, py, Rl, auo, awe, Qu, By, Hu, fr, K, Qz, bz, VB); #c1(BRMS1) c2(NP_001020128) c3(breast cancer metastasis-suppressor 1 isoform 2) c4(28267) c5(28268, 28269, 28270, 28271, 28272, 28273, 28274) c6( ) c7(T, ci, eA, av, aT, dL, Dz, nJ, eL, B, CN, aW, Y, ff, en, g, zE, t, bz, Dy, eM, m, iu); #c1(BRMS1) c2(NP_056214) c3(breast cancer metastasis-suppressor 1 isoform 1) c4(186443, 186444) c5(186445, 186446, 186447, 186448, 186449, 186450, 186451, 186452, 186453, 186454, 186455) c6( ) c7(T, ci, eA, av, aT, dL, Dz, nJ, eL, B, CN, aW, Y, ff, en, g, zE, t, bz, Dy, eM, m, iu); #c1(BRMS1L) c2(NP_115728) c3(breast cancer metastasis-suppressor 1-like protein) c4(223722, 223723) c5(223724, 223725, 223726, 223727, 223728, 223729, 223730) c6( ) c7(T, aw, ci, Ea, eA, av, iu, aT, dL, Dz, nJ, eL, af, CN, aW, Y, ff, en, g, zE, t, bz, Dy, eM, nB, cj, m, B); #c1(BRMS1L) c2(XP_006720338) c3(breast cancer metastasis-suppressor 1-like protein isoform X3) c4( ) c5(293497, 293498, 293499, 293500, 293501) c6( ) c7(T, aw, ci, Ea, eA, av, iu, aT, dL, Dz, nJ, eL, af, CN, aW, Y, ff, en, g, zE, t, bz, Dy, eM, nB, cj, m, B); #c1(BRS3) c2(NP_001718) c3(bombesin receptor subtype-3) c4(120471) c5(120472, 120473, 120474, 120475, 120476, 120477) c6( ) c7(bL, bM, T, iH, yk, hU, ha, cz, fd, aj, v, ci, yp, ye, xY, J, cd, ad, eA, yn, av, xW, pX, aT, h, xV, bK, K, yb, yh, yj, ae, yi, xX, d, xU, aW, Y, yc, yq, t, nC, bz, iK, iP, dR, jq, ok, yf, bP, yl, xZ, cj, tl, m, y); #c1(BRSK1) c2(NP_115806) c3(serine/threonine-pretein kinase BRSK1) c4(223971, 223972) c5(223973, 223974, 223975, 223976, 223977, 223978) c6( ) c7(il, aW, zZ, gv, aT); #c1(BRSK1) c2(XP_005259384) c3(serine/threonine-protein kinase BRSK1 isoform X2) c4( ) c5(276083, 276084, 276085, 276086, 276087, 276088, 276089, 276090, 276091, 276092) c6( ) c7(il, aW, zZ, gv, aT); #c1(BRSK2) c2(NP_001243556) c3(serine/threonine-pretein kinase BRSK2 isoform 1) c4(91039) c5(91040, 91041, 91042, 91043, 91044, 91045) c6( ) c7(ft); #c1(BRSK2) c2(NP_001243558) c3(serine/threonine-protein kinase BRSK2 isoform 3) c4(91046, 91047) c5(91048, 91049, 91050, 91051, 91052, 91053, 91054, 91055, 91056, 91057, 91058, 91059, 91060, 91061, 91062, 91063, 91064) c6( ) c7(ft); #c1(BRSK2) c2(NP_001243559) c3(serine/threonine-pretein kinase BRSK2 isoform 4) c4(91065) c5(91066, 91067, 91068, 91069, 91070, 91071) c6( ) c7(ft); #c1(BRSK2) c2(NP_001269147) c3(serine/threonine-protein kinase BRSK2 isoform 5) c4( ) c5(100708, 100709, 100710, 100711, 100712) c6( ) c7(ft); #c1(BRSK2) c2(NP_003948) c3(serine/threonine-protein kinase BRSK2 isoform 2) c4(142391) c5(142392, 142393, 142394, 142395, 142396, 142397) c6( ) c7(ft); #c1(BRSK2) c2(XP_005253277) c3(serine/threonine-protein kinase BRSK2 isoform X9) c4( ) c5(272366) c6(272367) c7(ft); #c1(BRSK2) c2(XP_006718437) c3(serine/threonine-protein kinase BRSK2 isoform X2) c4(291873) c5( ) c6( ) c7(ft); #c1(BRWD1) c2(NP_001007247) c3(bromodomain and WD repeat-containing protein 1 isoform C) c4(22643) c5(22644, 22645, 22646, 22647, 22648, 22649) c6( ) c7(fe, f, bK, ND, iV); #c1(BRWD1) c2(NP_061836) c3(bromodomain and WD repeat-containing protein 1 isoform A) c4(200702) c5(200703, 200704, 200705, 200706, 200707, 200708) c6( ) c7(fe, f, bK, ND, iV); #c1(BRWD1) c2(NP_387505) c3(bromodomain and WD repeat-containing protein 1 isoform B) c4(229006) c5(229007, 229008, 229009, 229010, 229011, 229012) c6( ) c7(fe, f, bK, ND, iV); #c1(BRWD1) c2(XP_011527913) c3(bromodomain and WD repeat-containing protein 1 isoform X1) c4(323010) c5(323011, 323012, 323013, 323014, 323015, 323016) c6( ) c7(fe, f, bK, ND, iV); #c1(BRWD3) c2(NP_694984) c3(bromodomain and WD repeat-containing protein 3) c4(245555) c5(245556, 245557, 245558, 245559, 245560, 245561) c6( ) c7(nf, awf); #c1(BRWD3) c2(XP_011529206) c3(bromodomain and WD repeat-containing protein 3 isoform X3) c4( ) c5(324623) c6( ) c7(nf, awf); #c1(BSCL2) c2(NP_001116427) c3(seipin isoform 1) c4(43818, 43819, 43820, 43821, 43822, 43823, 43824, 43825) c5(43826, 43827, 43828, 43829, 43830, 43831, 43832, 43833, 43834, 43835, 43836, 43837, 43838, 43839, 43840, 43841, 43842, 43843, 43844, 43845, 43846, 43847, 43848, 43849, 43850, 43851, 43852, 43853, 43854, 43855, 43856, 43857, 43858, 43859, 43860, 43861, 43862, 43863, 43864, 43865, 43866, 43867, 43868, 43869) c6( ) c7(Pt, Ol, aj, fu, nA, awg, J, LL, LN, lu, kf, jy, vc, bl, K, bU, bV, iU, LO, fc, as, LK, GR, dr, JP, LM, c, cP); #c1(BSCL2) c2(NP_001124174) c3(seipin isoform 3) c4(48417, 48418) c5(48419, 48420, 48421, 48422, 48423, 48424, 48425, 48426, 48427, 48428, 48429, 48430, 48431, 48432, 48433, 48434) c6( ) c7(Pt, Ol, aj, fu, nA, awg, J, LL, LN, lu, kf, jy, vc, bl, K, bU, bV, iU, LO, fc, as, LK, GR, dr, JP, LM, c, cP); #c1(BSCL2) c2(NP_116056) c3(seipin isoform 2) c4( ) c5(225300, 225301, 225302, 225303, 225304, 225305, 225306, 225307, 225308, 225309, 225310) c6( ) c7(Pt, Ol, aj, fu, nA, awg, J, LL, LN, lu, kf, jy, vc, bl, K, bU, bV, iU, LO, fc, as, LK, GR, dr, JP, LM, c, cP); #c1(BSG) c2(NP_001719) c3(basigin isoform 1 precursor) c4(120478) c5(120479, 120480, 120481, 120482, 120483, 120484) c6( ) c7(T, ea, if, Xi, fd, bB, ci, ip, aE, K, hu, eL, hm, yo, aW, zC, g, as, eF, cm, qJ, ba, nB, vA, m, dD, ht, n, fr, qN, PJ, ai, ft, IG, eV, dL, aq, W, dB, aar, uz, it, AN, B, cn, vQ, AS, IH, eX, aA, awh, g, eA, eJ, yw, qK, aT, cy, ae, af, s, oV, Y, bg, en, t, Px, Vi, iK, ck, ov, zu, Gl, id, eq, ad, dP, yt, fb, d, ff, eH, cr, eZ, aF, anW, bz, bE, II, gZ, IC, y); #c1(BSG) c2(NP_940992) c3(basigin isoform 3) c4( ) c5(260274, 260275, 260276, 260277, 260278) c6( ) c7(T, ea, if, Xi, fd, bB, ci, ip, aE, K, hu, eL, hm, yo, aW, zC, g, as, eF, cm, qJ, ba, nB, vA, m, dD, ht, n, fr, qN, PJ, ai, ft, IG, eV, dL, aq, W, dB, aar, uz, it, AN, B, cn, vQ, AS, IH, eX, aA, awh, q, eA, eJ, yw, qK, aT, cy, ae, af, s, oV, Y, bg, en, t, Px, Vi, iK, ck, ov, zu, Gl, id, eq, ad, dP, yt, fb, d, ff, eH, cr, eZ, aF, anW, bz, bE, II, gZ, IG, y); #c1(BSG) c2(NP_940993) c3(basigin isoform 4) c4(260279) c5(260280, 260281, 260282, 260283, 260284, 260285) c6( ) c7(T, ea, if, Xi, fd, bB, ci, ip, aE, K, hu, eL, hm, yo, aW, zC, g, as, eF, cm, qJ, ha, nB, vA, m, dD, ht, n, fr, qN, PJ, ai, ft, IG, eV, dL, aq, W, dB, aar, uz, it, AN, B, cn, vQ, AS, IH, eX, aA, awh, q, eA, eJ, yw, qK, aT, cy, ae, af, s, oV, Y, bg, en, t, Px, Vi, iK, ck, ov, zu, Gl, id, eq, ad, dP, yt, fb, d, ff, eH, cr, eZ, aF, anW, bz, bE, II, gZ, IC, y); #c1(BSG) c2(XP_005259676) c3(basigin isoform X1) c4(276222, 276223) c5(276224, 276225, 276226, 276227, 276228, 276229, 276230) c6( ) c7(T, ea, if, Xi, fd, bB, ci, ip, aE, K, hu, eL, hm, yo, aW, zC, g, as, eF, cm, qJ, ba, nB, vA, m, dD, ht, n, fr, qN, PJ, ai, ft, IG, eV, dL, aq, W, dB, aar, uz, it, AN, B, cn, vQ, AS, IH, eX, aA, awh, q, eA, eJ, yw, qK, aT, cy, ae, af, s, oV, Y, bg, en, t, Px, Vi, iK, ck, ov, zu, Gl, id, eq, ad, dP, yt, fb, d, ff, eH, cr, eZ, aF, anW, bz, bE, II, gZ, IC, y); #c1(BSN) c2(NP_003449) c3(protein bassoon) c4(138430) c5(138431, 138432, 138433, 138434, 138435, 138436, 138437, 138438) c6( ) c7(bL, A, U, cz, gZ, GC, fe, j, bK, iV, y, V, xb); #c1(BSPH1) c2(NP_001121798) c3(binder of sperm protein homolog 1 precursor) c4(46251) c5(46252, 46253, 46254, 46255, 46256, 46257) c6( ) c7(iU, ht, iT); #c1(BSPRY) c2(NP_060158) c3(B box and SPRY domain-containing protein) c4(194525) c5(194526, 194527, 194528, 194529, 194530, 194531) c6( ) c7(Na, Nc); #c1(BST1) c2(NP_004325) c3(ADP-ribosyl cyclase/cyclic ADP-ribose hydrolase 2 precursor) c4(145184) c5(145185, 145186, 145187, 145188, 145189, 145190) c6( ) c7(bM, m, K, an, y, bN, aa); #c1(BST2) c2(NP_004326) c3(bone marrow stromal antigen 2 precursor) c4(145191, 145192) c5(145193, 145194, 145195, 145196, 145197, 145198, 145199, 145200, 145201, 145202, 145203, 145204) c6( ) c7(ck, T, dB, aW, Y, AH, hL, aT, h, fd, fr, gn, m, cl, f, t, as, awi); #c1(BSX) c2(NP_001091639) c3(brain-specific homeobox protein homolog) c4(38525) c5(38526, 38527, 38528, 38529, 38530, 38531) c6( ) c7(v); #c1(BTBD1) c2(NP_001011885) c3(BTB/POZ domain-containing protein 1 isoform 2) c4(24807) c5(24808, 24809, 24810, 24811, 24812, 24813) c6( ) c7(lf, awj); #c1(BTBD1) c2(NP_079514) c3(BTB/POZ domain-containing protein 1 isoform 1) c4(218502) c5(218503, 218504, 218505, 218506, 218507, 218508, 218509) c6( ) c7(lf, awj); #c1(BTBD10) c2(XP_011518706) c3(BTB/POZ domain-containing protein 10 isoform X1) c4(313105, 313106, 313107) c5(313108, 313109, 313110, 313111, 313112, 313113, 313114, 313115, 313116, 313117, 313118, 313119, 313120, 313121, 313122, 313123, 313124, 313125) c6( ) c7(c); #c1(BTBD11) c2(NP_001017523) c3(ankyrin repeat and BTB/POZ domain-containing protein BTBD11 isoform b) c4(26546) c5(26547, 26548, 26549, 26550, 26551, 26552, 26553, 26554, 26555, 26556, 26557, 26558) c6( ) c7(aq, aw, c); #c1(BTBD11) c2(NP_001018082) c3(ankyrin repeat and BTB/POZ domain-containing protein BTBD11 isoform a) c4(27147, 27148, 27149) c5(27150, 27151, 27152, 27153, 27154, 27155, 27156, 27157, 27158, 27159, 27160, 27161) c6( ) c7(aq, aw, c); #c1(BTBD11) c2(XP_011536210) c3(ankyrin repeat and BTB/POZ domain-containing protein BTBD11 isoform X1) c4(333520) c5(333521, 333522, 333523, 333524, 333525, 333526) c6( ) c7(aq, aw, c); #c1(BTBD16) c2(NP_653188) c3(BTB/POZ domain-containing protein 16) c4(238986) c5(238987, 238988, 238989, 238990, 238991, 238992) c6( ) c7(bK, W); #c1(BTBD2) c2(NP_060267) c3(BTB/POZ domain-containing protein 2) c4(195138) c5(195139, 195140, 195141, 195142, 195143, 195144, 195145) c6( ) c7(dB, eA, W); #c1(BTBD3) c2(NP_001269480) c3(BTB/POZ domain-containing protein 3 isoform b) c4( ) c5(101735, 101736, 101737, 101738, 101739) c6( ) c7(cd, j, ac); #c1(BTBD3) c2(NP_055777) c3(BTB/POZ domain-containing protein 3 isoform a) c4(183432, 183433) c5(183434, 183435, 183436, 183437, 183438, 183439, 183440, 183441, 183442, 183443, 183444, 183445, 183446, 183447, 183448, 183449, 183450, 183451, 183452, 183453, 183454, 183455) c6( ) c7(cd, j, ac); #c1(BTBD3) c2(NP_852108) c3(BTB/POZ domain-containing protein 3 isoform d) c4(254851) c5(254852) c6( ) c7(cd, j, ac); #c1(BTBD9) c2(NP_001165889) c3(BTB/POZ domain-containing protein 9 isoform c) c4(67937) c5(67938, 67939, 67940, 67941, 67942, 67943) c6( ) c7(eR, Fo, yL, yY, awl, awk, aY, awm, qc); #c1(BTBD9) c2(NP_689946) c3(BTB/POZ domain-containing protein 9 isoform b) c4(244449) c5( ) c6( ) c7(eR, Fo, yL, yY, awl, awk, aY, awm, qc); #c1(BTBD9) c2(XP_005248898) c3(BTB/POZ domain-containing protein 9 isoform X1) c4(268754, 268755) c5(268756, 268757, 268758, 268759, 268760, 268761, 268762, 268763, 268764, 268765, 268766, 268767, 268768, 268769, 268770, 268771, 268772, 268773, 268774, 268775) c6( ) c7(eR, Fo, yL, yY, awl, awk, aY, awm, qc); #c1(BTBD9) c2(XP_011512584) c3(BTB/POZ domain-containing protein 9 isoform X4) c4( ) c5(303495, 303496, 303497, 303498, 303499, 303500) c6( ) c7(eR, Fo, yL, yY, awl, awk, aY, awm, qc); #c1(BTC) c2(NP_001720) c3(probetacellulin precursor) c4(120485) c5(120486, 120487, 120488, 120489, 120490, 120491, 120492, 120493) c6(120494, 120495) c7(bL, T, mj, A, hV, aW, aT, zo, aj, mf, dG, im, nE, AO, B, J, auO); #c1(BTD) c2(NP_000051) c3(biotinidase isoform 3) c4(788) c5(789, 790, 791, 792, 793, 794, 795) c6( ) c7(bN, cZ, b, T, PK, Cn, awn, aW, oe, Bw, i, IZ, aT, zN, awo, j, dd, ex, mH, awp); #c1(BTD) c2(NP_001268652) c3(biotinidase isoform 1) c4(100071) c5(100072, 100073, 100074, 100075, 100076, 100077, 100078, 100079, 100080, 100081, 100082) c6( ) c7(bN, cZ, b, T, PK, Cn, awn, aW, oe, Bw, i, IZ, aT, zN, awo, j, dd, ex, mH, awp); #c1(BTD) c2(NP_001268653) c3(biotinidase isoform 2) c4(100083, 100084) c5(100085, 100086, 100087, 100088, 100089, 100090) c6( ) c7(bN, cZ, b, T, PK, Cn, awn, aW, oe, Bw, i, IZ, aT, zN, awo, j, dd, ex, mH, awp); #c1(BTF3) c2(NP_001032726) c3(transcription factor BTF3 isoform A) c4(31440) c5(31441, 31442, 31443, 31444, 31445, 31446) c6( ) c7(T, d, aE, r, kp, g, q); #c1(BTF3) c2(NP_001198) c3(transcription factor BTF3 isoform B) c4(83520) c5(83521, 83522, 83523, 83524, 83525, 83526, 83527) c6( ) c7(T, d, aE, r, kp, g, q); #c1(BTG1) c2(NP_001722) c3(protein BTG1) c4(120513) c5(120514, 120515, 120516, 120517, 120518, 120519) c6( ) c7(ck, ae, T, x, eM, aW, bt, cj, aT, hL, fd, k, ajo, cl, jj, f, cM, V, awq, ad); #c1(BTG2) c2(NP_006754) c3(protein BTG2) c4(167731) c5(167732, 167733, 167734, 167735, 167736, 167737) c6( ) c7(T, awr, ci, ad, py, Bc, aT, IG, dL, K, ae, eL, eu, li, jf, aW, EU, cm, bz, es, iA, Nl, aS, aws, y, rA, B); #c1(BTG3) c2(NP_001124386) c3(protein BTG3 isoform a) c4(48769, 48770) c5(48771, 48772, 48773, 48774, 48775, 48776) c6( ) c7(ae, T, es, B, av, iu, iA, lu, y, eZ, oX, m, fL, pb, fr, t, bz, mC, ad, bc, hq); #c1(BTG3) c2(NP_006797) c3(protein BTG3 isoform b) c4(168161) c5(168162, 168163, 168164, 168165, 168166, 168167, 168168, 168169, 168170, 168171, 168172) c6( ) c7(ae, T, es, B, av, iu, iA, lu, y, eZ, oX, m, fL, pb, fr, t, bz, mC, ad, bc, hq); #c1(BTG3) c2(XP_011527743) c3(protein BTG3 isoform X1) c4( ) c5(322726) c6( ) c7(ae, T, es, B, av, iu, iA, lu, y, eZ, oX, m, fL, pb, fr, t, bz, mC, ad, bc, hq); #c1(BTG4) c2(NP_060059) c3(protein BTG4) c4(193924) c5(193925, 193926, 193927, 193928, 193929, 193930, 193931, 193932, 193933, 193934, 193935, 193936) c6( ) c7(yg, r, cj, aq, q, B); #c1(BTG4) c2(XP_011541181) c3(protein BTG4 isoform X4) c4(339786) c5( ) c6( ) c7(yg, r, cj, aq, q, B); #c1(BTK) c2(NP_000052) c3(tyrosine-protein kinase BTK isoform 1) c4(796, 797, 798, 799, 800, 801) c5(802, 803, 804, 805, 806, 807, 808, 809, 810, 811, 812, 813, 814, 815, 816, 817, 818, 819, 820, 821, 822, 823, 824, 825, 826, 827, 828, 829, 830, 831, 832, 833, 834, 835) c6( ) c7(gV, T, fM, dA, ajm, fF, fd, eW, zn, h, zA, ey, Wm, amA, d, hG, Cw, oV, Rj, Of, awv, awu, Og, bw, aww, Wt, asE, ck, eM, awt, cj, hO, k, bt, Ze, afX); #c1(BTK) c2(NP_001274273) c3(tyrosine-protein kinase BTK isoform 3) c4(106196) c5(106197, 106198, 106199, 106200, 106201, 106202, 106203) c6( ) c7(gV, T, fM, dA, ajm, fF, fd, eW, zn, h, zA, ey, Wm, amA, d, hG, Cw, oV, Rj, Of, awv, awu, Og, bw, aww, Wt, asE, ck, eM, awt, cj, hO, k, bt, Ze, afX); #c1(BTK) c2(NP_001274274) c3(tyrosine-protein kinase BTK isoform 2) c4(106204, 106205) c5(106206, 106207, 106208, 106209, 106210, 106211, 106212, 106213, 106214, 106215, 106216, 106217, 106218) c6( ) c7(gV, T, fM, dA, ajm, fF, fd, eW, zn, h, zA, ey, Wm, amA, d, hG, Cw, oV, Rj, Of, awv, awu, Og, bw, aww, Wt, asE, ck, eM, awt, cj, hO, k, bt, Ze, afX); #c1(BTLA) c2(NP_001078826) c3(B- and T-lymphocyte attenuator isoform 2) c4(37912) c5(37913, 37914, 37915, 37916, 37917, 37918) c6( ) c7(qw, A, fM, xE, qZ, aW, jx, eZ, cj, aT, h, jh, y, eW); #c1(BTLA) c2(NP_861445) c3(B- and T-lymphocyte attenuator isoform 1 precursor) c4(255580) c5(255581, 255582, 255583, 255584, 255585, 255586) c6( ) c7(qw, A, fM, xE, qZ, aW, jx, eZ, cj, aT, h, jh, y, eW); #c1(BTN1A1) c2(NP_001723) c3(butyrophilin subfamily 1 member A1 precursor) c4( ) c5(120520, 120521, 120522, 120523, 120524, 120525, 120526, 120527, 120528, 120529) c6( ) c7(y, nM, K, U); #c1(BTN1A1) c2(XP_005249397) c3(butyrophilin subfamily 1 member A1 isoform X1) c4(269293, 269294) c5(269295, 269296) c6( ) c7(y, nM, K, U); #c1(BTN2A1) c2(NP_001184162) c3(butyrophilin subfamily 2 member A1 isoform 3) c4( ) c5(75437, 75438, 75439, 75440, 75441) c6( ) c7(bL, aw, eZ, cz, aj, pi, ei, J); #c1(BTN2A1) c2(NP_001184163) c3(butyrophilin subfamily 2 member A1 isoform 4 precursor) c4(75442) c5(75443, 75444, 75445, 75446, 75447, 75448) c6( ) c7(bL, aw, eZ, cz, aj, pi, ei, J); #c1(BTN2A1) c2(NP_008980) c3(butyrophilin subfamily 2 member A1 isoform 1 precursor) c4(170017, 170018, 170019) c5(170020, 170021, 170022, 170023, 170024, 170025, 170026, 170027, 170028, 170029, 170030, 170031, 170032) c6( ) c7(bL, aw, eZ, cz, aj, pi, ei, J); #c1(BTN2A1) c2(NP_510961) c3(butyrophilin subfamily 2 member A1 isoform 2 precursor) c4(231076) c5(231077, 231078, 231079, 231080, 231081, 231082) c6( ) c7(bL, aw, eZ, cz, aj, pi, ei, J); #c1(BTN2A2) c2(NP_001184166) c3(butyrophilin subfamily 2 member A2 isoform a precursor) c4(75449) c5(75450, 75451, 75452, 75453, 75454, 75455, 75456, 75457, 75458, 75459) c6( ) c7(CT); #c1(BTN2A2) c2(NP_001184167) c3(butyrophilin subfamily 2 member A2 isoform c precursor) c4(75460, 75461, 75462) c5(75463, 75464, 75465, 75466, 75467, 75468, 75469, 75470, 75471, 75472, 75473, 75474, 75475, 75476, 75477, 75478, 75479, 75480, 75481, 75482, 75483, 75484, 75485, 75486) c6( ) c7(CT); #c1(BTN2A2) c2(NP_001184168) c3(butyrophilin subfamily 2 member A2 isoform d precursor) c4(75487) c5(75488, 75489, 75490, 75491, 75492, 75493) c6( ) c7(CT); #c1(BTN2A2) c2(NP_001184169) c3(butyrophilin subfamily 2 member A2 isoform e precursor) c4(75494) c5(75495, 75496, 75497, 75498, 75499, 75500, 75501, 75502, 75503, 75504, 75505) c6( ) c7(CT); #c1(BTN2A2) c2(NP_853509) c3(butyrophilin subfamily 2 member A2 isoform b precursor) c4(255132, 255133, 255134) c5( ) c6( ) c7(CT); #c1(BTN2A2) c2(XP_006715017) c3(butyrophilin subfamily 2 member A2 isoform X5) c4( ) c5(288515, 288516, 288517, 288518, 288519, 288520) c6( ) c7(CT); #c1(BTN2A2) c2(XP_011512531) c3(butyrophilin subfamily 2 member A2 isoform X4) c4( ) c5(303192) c6( ) c7(CT); #c1(BTN3A1) c2(NP_001138480) c3(butyrophilin subfamily 3 member A1 isoform c precursor) c4(56882) c5(56883, 56884, 56885, 56886, 56887, 56888) c6( ) c7(t, m); #c1(BTN3A1) c2(NP_001138481) c3(butyrophilin subfamily 3 member A1 isoform d precursor) c4(56889, 56890, 56891) c5(56892, 56893, 56894, 56895, 56896, 56897) c6( ) c7(t, m); #c1(BTN3A1) c2(NP_008979) c3(butyrophilin subfamily 3 member A1 isoform a precursor) c4(170008, 170009) c5(170010, 170011, 170012, 170013, 170014, 170015, 170016) c6( ) c7(t, m); #c1(BTN3A1) c2(NP_919423) c3(butyrophilin subfamily 3 member A1 isoform b precursor) c4(258568) c5(258569, 258570, 258571, 258572, 258573, 258574, 258575, 258576, 258577, 258578, 258579, 258580, 258581, 258582, 258583, 258584, 258585, 258586, 258587, 258588, 258589, 258590, 258591, 258592) c6( ) c7(t, m); #c1(BTN3A2) c2(NP_001184175) c3(butyrophilin subfamily 3 member A2 isoform a precursor) c4(75513, 75514, 75515) c5(75516, 75517, 75518, 75519, 75520, 75521, 75522, 75523, 75524, 75525, 75526, 75527, 75528, 75529, 75530, 75531, 75532, 75533, 75534, 75535, 75536, 75537, 75538) c6( ) c7(T, A, aE, af, eZ, r, kp, m, t, q); #c1(BTN3A2) c2(NP_001184177) c3(butyrophilin subfamily 3 member A2 isoform b) c4(75539) c5(75540, 75541, 75542, 75543, 75544, 75545, 75546) c6( ) c7(T, A, aE, af, eZ, r, kp, m, t, q); #c1(BTN3A2) c2(NP_001184178) c3(butyrophilin subfamily 3 member A2 isoform c) c4( ) c5(75547, 75548, 75549, 75550, 75551) c6( ) c7(T, A, aE, af, eZ, r, kp, m, t, q); #c1(BTN3A2) c2(XP_011512573) c3(butyrophilin subfamily 3 member A2 isoform X5) c4( ) c5(303482, 303483, 303484, 303485, 303486, 303487) c6( ) c7(T, A, aE, af, eZ, r, kp, m, t, q); #c1(BTN3A3) c2(NP_008925) c3(butyrophilin subfamily 3 member A3 isoform a precursor) c4(169569, 169570, 169571, 169572) c5(169573, 169574, 169575, 169576, 169577, 169578, 169579, 169580, 169581, 169582, 169583, 169584, 169585, 169586, 169587, 169588, 169589, 169590, 169591) c6( ) c7(T, aE, awx, r, kp, q); #c1(BTN3A3) c2(NP_932078) c3(butyrophilin subfamily 3 member A3 isoform b) c4(258820) c5(258821, 258822, 258823, 258824, 258825) c6( ) c7(T, aE, awx, r, kp, q); #c1(BTNL2) c2(NP_001291490) c3(butyrophilin-like protein 2) c4(116146, 116147, 116148, 116149, 116150, 116151, 116152, 116153, 116154, 116210, 116211, 116212, 116213, 116214, 116215, 116216, 116217, 116218, 116219, 116220, 116221, 116222, 116223, 116224, 116225, 116226, 116227, 116228, 116229, 116230, 116231, 116232, 116233, 116234, 116235, 116236, 116237, 116238, 116239, 116240, 116241, 116242, 116243, 116244, 116245, 116246, 116247, 116248, 116249, 116250, 116251, 116252, 116253, 116254, 116255, 116256, 116257, 116258, 116259, 116260, 116261, 116262, 116263, 116264, 116265, 116266, 116267, 116268, 116269, 116270, 116271, 116272, 116273, 116274, 116275, 116276, 116277, 116278, 116279, 116280, 116281, 116282, 116283, 116284, 116285, 116286, 116287) c6( ) c7(oe, awz, qj, V, ad, AW, hD, ji, an, ae, bc, uQ, A, awy, cr, eZ, fe, iV, aaO, pt, ig, uy, If, y); #c1(BTNL2) c2(XP_011513057) c3(butyrophilin-like protein 2 isoform X1) c4( ) c5(304650, 304651, 304652, 304653, 304654, 304655, 304656, 304657, 304658, 304659, 304660, 304661, 304662, 304663, 304664) c6( ) c7(oe, awz, qj, V, ad, AW, hD, ji, an, ae, bc, uQ, A, awy, cr, eZ, fe, iV, aaO, pt, ig, uy, If, y); #c1(BTNL2) c2(XP_011513058) c3(butyrophilin-like protein 2 isoform X2) c4(304665, 304666, 304667) c5(304668, 304669, 304670, 304671, 304672, 304673, 304674, 304675, 304676, 304677, 304678, 304679, 304680, 304681, 304682, 304683, 304684, 304685, 304686, 304687, 304688, 304689, 304690, 304691, 304692, 304693, 304694, 304695, 304696, 304697, 304698, 304699, 304700, 304701, 304702, 304703, 304704, 304705, 304706, 304707, 304708, 304709, 304710, 304711, 304712, 304713, 304714, 304715, 304716, 304717, 304718, 304719, 304720, 304721, 304722, 304723, 304724, 304725, 304726, 304727, 304728, 304729, 304730, 304731, 304732, 304733, 304734, 304735, 304736, 304737, 304738) c6( ) c7(oe, awz, qj, V, ad, AW, hD, ji, an, ae, bc, uQ, A, awy, cr, eZ, fe, iV, aaO, pt, ig, uy, If, y); #c1(BTNL2) c2(XP_011546755) c3(butyrophilin-like protein 2 isoform X1) c4(345672) c5(345673, 345674, 345675, 345676, 345677, 345678, 345679, 345680, 345681, 345682, 345683, 345684) c6( ) c7(oe, awz, qj, V, ad, AW, hD, ji, an, ae, bc, uQ, A, awy, cr, eZ, fe, iV, aaO, pt, ig, uy, If, y); #c1(BTNL2) c2(XP_011546879) c3(butyrophilin-like protein 2 isoform X2) c4(345739) c5(345740, 345741, 345742, 345743, 345744, 345745, 345746, 345747, 345748, 345749, 345750, 345751) c6( ) c7(oe, awz, qj, V, ad, AW, hD, ji, an, ae, bc, uQ, A, awy, cr, eZ, fe, iV, aaO, pt, ig, uy, If, y); #c1(BTRC) c2(NP_001243785) c3(F-box/WD repeat-containing protein 1A isoform 3) c4(91719) c5(91720, 91721, 91722, 91723, 91724, 91725) c6( ) c7(T, aC, aA, KO, q, ad, av, aE, aT, jf, d, aW, Y, r, aF, as, cm, bz, bF, iO, nM, bt, B); #c1(BTRC) c2(NP_003930) c3(F-box/WD repeat-containing protein 1A isoform 2) c4(142254, 142255) c5(142256, 142257, 142258, 142259, 142260, 142261, 142262, 142263, 142264, 142265, 142266, 142267) c6( ) c7(T, aC, aA, KO, q, ad, av, aE, aT, jf, d, aW, Y, r, aF, as, cm, bz, bF, iO, nM, bt, B); #c1(BTRC) c2(NP_378663) c3(F-box/WD repeat-containing protein 1A isoform 1) c4(228926) c5(228927, 228928, 228929, 228930, 228931, 228932, 228933, 228934, 228935, 228936, 228937) c6( ) c7(T, aC, aA, KO, q, ad, av, aE, aT, jf, d, aW, Y, r, aF, as, cm, bz, bF, iO, nM, bt, B); #c1(BTRC) c2(XP_006718117) c3(F-box/WD repeat-containing protein 1A isoform X1) c4(291521) c5(291522) c6( ) c7(T, aC, aA, KO, q, ad, av, aE, aT, jf, d, aW, Y, r, aF, as, cm, bz, bF, iO, nM, bt, B); #c1(BUB1) c2(NP_001265545) c3(mitotic checkpoint serine/threonine-protein kinase BUB1 isoform 2) c4(98803) c5(98804, 98805, 98806, 98807, 98808, 98809) c6( ) c7(gh, T, aC, jh, aA, bB, fd, aj, ci, aon, auA, q, ad, x, av, hd, aE, aT, hn, dL, ey, ae, d, je, aW, LZ, r, agF, aF, g, t, iK, bz, dR, ck, iM, eM, nB, bE, m, k, MC, bt, B); #c1(BUB1) c2(NP_001265546) c3(mitotic checkpoint serine/threonine-protein kinase BUB1 isoform 3) c4(98810) c5(98811, 98812, 98813, 98814, 98815, 98816, 98817, 98818, 98819, 98820, 98821, 98822) c6( ) c7(gh, T, aC, jh, aA, bB, fd, aj, ci, aon, auA, q, ad, x, av, hd, aE, aT, hn, dL, ey, ae, d, je, aW, LZ, r, agF, aF, g, t, iK, bz, dR, ck, iM, eM, nB, bE, m, k, MC, bt, B); #c1(BUB1) c2(NP_004327) c3(mitotic checkpoint serine/threonine-protein kinase BUB1 isoform 1) c4(145205, 145206) c5(145207, 145208, 145209, 145210, 145211, 145212) c6( ) c7(gh, T, aC, jh, aA, bB, fd, aj, ci, aon, auA, q, ad, x, av, hd, aE, aT, hn, dL, ey, ae, d, je, aW, LZ, r, agF, aF, g, t, iK, bz, dR, ck, iM, eM, nB, bE, m, k, MC, bt, B); #c1(BUB1B) c2(NP_001202) c3(mitotic checkpoint serine/threonine-protein kinase BUB1 beta) c4(83545, 83546, 83547) c5(83548, 83549, 83550, 83551, 83552, 83553, 83554, 83555, 83556, 83557, 83558, 83559, 83560, 83561, 83562, 83563, 83564, 83565) c6( ) c7(T, fM, aA, it, n, ci, Xr, aon, bv, awA, hd, aE, MR, arV, aT, iv, hP, K, ey, d, je, aiB, Qr, qt, Ya, Y, aW, ff, iw, r, aF, aiz, en, cl, g, t, QK, bz, iV, iM, nB, dB, bE, wB, hL, cj, m, bt, xb, B); #c1(BUB3) c2(NP_001007794) c3(mitotic checkpoint protein BUB3 isoform b) c4(22862) c5(22863, 22864, 22865, 22866, 22867, 22868) c6( ) c7(T, eU, d, aW, r, aT, aA, dL, aF, q, eF, B); #c1(BUB3) c2(NP_004716) c3(mitotic checkpoint protein BUB3 isoform a) c4(149036, 149037) c5(149038, 149039, 149040, 149041, 149042, 149043, 149044, 149045, 149046, 149047, 149048, 149049) c6( ) c7(T, eU, d, aW, r, aT, aA, dL, aF, q, eF, B); #c1(BUD13) c2(NP_001153208) c3(BUD13 homolog isoform 2) c4(60543) c5(60544, 60545, 60546, 60547, 60548, 60549) c6( ) c7(bL, ae, om, e, ad); #c1(BUD13) c2(NP_116114) c3(BUD13 homolog isoform 1) c4(225360) c5(225361, 225362, 225363, 225364, 225365, 225366) c6( ) c7(bL, ae, om, e, ad); #c1(BUD31) c2(NP_003901) c3(protein BUD31 homolog) c4(142007, 142008) c5(142009, 142010, 142011, 142012, 142013, 142014, 142015, 142016, 142017, 142018, 142019, 142020, 142021, 142022, 142023, 142024) c6( ) c7(T, aW, oe, eH, K, m, bU, eF, t); #c1(BVES) c2(XP_011533700) c3(blood vessel epicardial substance isoform X1) c4(329768) c5(329769, 329770, 329771, 329772, 329773, 329774, 329775, 329776, 329777, 329778, 329779, 329780, 329781, 329782, 329783) c6( ) c7(bE, awB, bB, q, B, adz); #c1(BYSL) c2(NP_004044) c3(bystin) c4(143116) c5(143117, 143118, 143119, 143120, 143121, 143122) c6( ) c7(awC); #c1(BZRAP1) c2(NP_001248764) c3(peripheral-type benzodiazepine receptor-associated protein 1 isoform c) c4( ) c5(94016) c6( ) c7(bP, Mb, eA, K, bN); #c1(BZRAP1) c2(NP_004749) c3(peripheral-type benzodiazepine receptor-associated protein 1 isoform a) c4(149247) c5(149248, 149249, 149250, 149251, 149252, 149253, 149254) c6( ) c7(bP, Mb, eA, K, bN); #c1(BZRAP1) c2(NP_077729) c3(peripheral-type benzodiazepine receptor-associated protein 1 isoform b) c4(215314) c5(215315, 215316, 215317, 215318, 215319, 215320, 215321) c6( ) c7(bP, Mb, eA, K, bN); #c1(BZRAP1) c2(XP_006722236) c3(peripheral-type benzodiazepine receptor-associated protein 1 isoform X1) c4(294661) c5(294662, 294663, 294664, 294665, 294666, 294667, 294668) c6( ) c7(bP, Mb, eA, K, bN); #c1(BZRAP1) c2(XP_011523774) c3(peripheral-type benzodiazepine receptor-associated protein 1 isoform X8) c4( ) c5(318268, 318269) c6( ) c7(bP, Mb, eA, K, bN); #c1(BZW1) c2(NP_001193996) c3(basic leucine zipper and W2 domain-containing protein 1 isoform 1) c4(83463) c5(83464, 83465, 83466, 83467, 83468, 83469, 83470, 83471, 83472, 83473) c6( ) c7(Y); #c1(BZW1) c2(NP_001193997) c3(basic leucine zipper and W2 domain-containing protein 1 isoform 2) c4(83474, 83475) c5(83476, 83477, 83478, 83479, 83480, 83481, 83482, 83483) c6( ) c7(Y); #c1(BZW1) c2(NP_001193998) c3(basic leucine zipper and W2 domain-containing protein 1 isoform 3) c4(83484, 83485, 83486, 83487) c5(83488, 83489, 83490, 83491, 83492, 83493, 83494, 83495, 83496) c6( ) c7(Y); #c1(BZW1) c2(NP_055485) c3(basic leucine zipper and W2 domain-containing protein 1 isoform 4) c4(181412) c5(181413, 181414, 181415, 181416, 181417, 181418, 181419, 181420, 181421, 181422, 181423, 181424, 181425, 181426, 181427, 181428, 181429, 181430, 181431, 181432, 181433) c6( ) c7(Y); #c1(C10orf10) c2(NP_008952) c3(protein DEPP) c4(169727, 169728, 169729) c5(169730, 169731, 169732, 169733, 169734, 169735, 169736, 169737, 169738, 169739, 169740, 169741, 169742, 169743, 169744, 169745, 169746, 169747) c6( ) c7(dP, d, aW, bo, aT, awD, v, aS, K, du); #c1(C10orf107) c2(XP_005269657) c3(uncharacterized protein C10orf107 isoform X1) c4(282687, 282688) c5(282689, 282690, 282691, 282692, 282693) c6( ) c7(oe, cz); #c1(C10orf107) c2(XP_006717753) c3(uncharacterized protein C10orf107 isoform X2) c4( ) c5(291314) c6( ) c7(oe, cz); #c1(C10orf107) c2(XP_006717755) c3(uncharacterized protein C10orf107 isoform X4) c4( ) c5(291315, 291316, 291317, 291318, 291319, 291320) c6( ) c7(oe, cz); #c1(C10orf11) c2(NP_114413) c3(leucine-rich repeat-containing protein C10orf11) c4(222661) c5(222662, 222663, 222664, 222665, 222666, 222667) c6( ) c7(aW, awE, aT, n, j, IB); #c1(C10orf113) c2(NP_001010896) c3(putative uncharacterized protein C10orf113 isoform 1) c4(24014, 24015) c5(24016, 24017, 24018, 24019, 24020, 24021, 24022, 24023, 24024, 24025, 24026, 24027, 24028) c6( ) c7(aw, j); #c1(C10orf113) c2(NP_001170954) c3(putative uncharacterized protein C10orf113 isoform 2) c4(69614) c5(69615, 69616, 69617, 69618, 69619) c6( ) c7(aw, j); #c1(C10orf2) c2(NP_001157284) c3(twinkle protein, mitochondrial isoform B) c4(62142) c5(62143, 62144, 62145, 62146, 62147, 62148) c6( ) c7(awH, awG, awF, qx, amp, ha, rf, fr, ci, fu, V, aoz, cc, no, KB, oj, yZ, bq, bV, awL, an, af, Ng, KG, A, gl, EH, ir, Rl, awJ, t, kC, cm, bw, dR, akQ, ky, kB, Kv, awN, aaG, U, awM, awK, bk, m, aan, awl, Al); #c1(C10orf2) c2(NP_068602) c3(twinkle protein, mitochondrial isoform A) c4(209775) c5(209776, 209777, 209778, 209779, 209780, 209781) c6( ) c7(awH, awG, awF, qx, amp, ha, rf, fr, ci, fu, V, aoz, cc, no, KB, oj, yZ, bq, bV, awL, an, af, Ng, KG, A, gl, EH, ir, Rl, awJ, t, kC, cm, bw, dR, akQ, ky, kB, Kv, awN, aaG, U, awM, awK, bk, m, aan, awl, Al); #c1(C10orf32) c2(NP_001129672) c3(UPF0693 protein C10orf32) c4(52183) c5(52184, 52185, 52186, 52187, 52188, 52189, 52190, 52191, 52192, 52193) c6( ) c7(an); #c1(C10orf35) c2(NP_660349) c3(uncharacterized protein C10orf35) c4( ) c5(241042, 241043, 241044, 241045, 241046) c6( ) c7(af); #c1(C10orf35) c2(XP_005269663) c3(uncharacterized protein C10orf35 isoform X2) c4(282694, 282695) c5(282696, 282697, 282698, 282699, 282700, 282701, 282702) c6( ) c7(af); #c1(C10orf54) c2(NP_071436) c3(platelet receptor Gi24 precursor) c4(211659, 211660) c5(211661, 211662, 211663, 211664, 211665, 211666, 211667, 211668, 211669, 211670, 211671, 211672) c6( ) c7(bM); #c1(C10orf67) c2(NP_714925) c3(uncharacterized protein C10orf67) c4( ) c5(246632, 246633, 246634, 246635, 246636, 246637) c6( ) c7(dB, iV, aC, uQ); #c1(C10orf67) c2(XP_011517743) c3(uncharacterized protein C10orf67 isoform X2) c4(311551, 311552) c5( ) c6( ) c7(dB, iV, aC, uQ); #c1(C10orf67) c2(XP_011517744) c3(uncharacterized protein C10orf67 isoform X3) c4( ) c5(311553, 311554, 311555, 311556, 311557, 311558) c6( ) c7(dB, iV, aC, uQ); #c1(C10orf67) c2(XP_011517745) c3(uncharacterized protein C10orf67 isoform X4) c4(311559) c5(311560, 311561, 311562, 311563, 311564, 311565, 311566, 311567, 311568, 311569) c6( ) c7(dB, iV, aC, uQ); #c1(C10orf82) c2(NP_653262) c3(uncharacterized protein C10orf82) c4( ) c5(239386, 239387, 239388, 239389, 239390) c6( ) c7(IB); #c1(C10orf82) c2(XP_011537642) c3(uncharacterized protein C10orf82 isoform X1) c4(335200) c5( ) c6( ) c7(IB); #c1(C10orf82) c2(XP_011537648) c3(uncharacterized protein C10orf82 isoform X4) c4(335201) c5(335202, 335203, 335204, 335205, 335206, 335207, 335208) c6( ) c7(IB); #c1(C10orf88) c2(NP_079218) c3(uncharacterized protein C10orf88) c4(217481) c5(217482, 217483, 217484, 217485, 217486, 217487) c6( ) c7(aW, eA, aT); #c1(C10orf90) c2(NP_001004298) c3(centrosomal protein C10orf90) c4(20491, 20492, 20493) c5(20494, 20495, 20496, 20497, 20498, 20499, 20500, 20501, 20502, 20503, 20504, 20505, 20506, 20507, 20508, 20509, 20510, 20511, 20512, 20513, 20514, 20515, 20516, 20517) c6( ) c7(T, fq, j, ac); #c1(C10orf90) c2(XP_005269548) c3(centrosomal protein C10orf90 isoform X2) c4( ) c5(282633) c6( ) c7(T, fq, j, ac); #c1(C10orf90) c2(XP_011537518) c3(centrosomal protein C10orf90 isoform X1) c4(335120, 335121, 335122) c5(335123, 335124, 335125, 335126, 335127, 335128, 335129) c6( ) c7(T, fq, j, ac); #c1(C10orf90) c2(XP_011537531) c3(centrosomal protein C10orf90 isoform X5) c4( ) c5(335130, 335131, 335132, 335133, 335134, 335135, 335136, 335137) c6( ) c7(T, fq, j, ac); #c1(C10orf90) c2(XP_011537539) c3(centrosomal protein C10orf90 isoform X8) c4(335138) c5(335139, 335140, 335141, 335142, 335143, 335144) c6( ) c7(T, fq, j, ac); #c1(C11orf21) c2(NP_001136418) c3(uncharacterized protein C11orf21) c4(54939, 54940) c5(54941, 54942, 54943, 54944, 54945, 54946, 54947, 54948, 54949, 54950, 54951, 54952) c6( ) c7(cj); #c1(C11orf30) c2(NP_064578) c3(protein EMSY isoform 4) c4(203066, 203067) c5(203068, 203069, 203070, 203071, 203072, 203073, 203074, 203075, 203076, 203077, 203078, 203079, 203080, 203081, 203082, 203083) c6( ) c7(bM, T, kl, qw, iV, nB, aW, aT, fe, ci, m, cl, eE, t, ae, ad); #c1(C11orf30) c2(XP_006718700) c3(protein EMSY isoform X9) c4(291986) c5( ) c6( ) c7(bM, T, kl, qw, iV, nB, aW, aT, fe, ci, m, cl, eE, t, ae, ad); #c1(C11orf30) c2(XP_006718702) c3(protein EMSY isoform X12) c4( ) c5(291987, 291988, 291989, 291990, 291991, 291992) c6( ) c7(bM, T, kl, qw, iV, nB, aW, aT, fe, ci, m, cl, eE, t, ae, ad); #c1(C11orf31) c2(NP_734467) c3(selenoprotein H) c4(247299, 247300) c5(247301, 247302, 247303, 247304, 247305, 247306, 247307, 247308, 247309, 247310, 247311, 247312, 247313, 247314, 247315, 247316) c6( ) c7(anN); #c1(C11orf53) c2(NP_940900) c3(uncharacterized protein C11orf53) c4( ) c5(260071, 260072, 260073, 260074, 260075) c6( ) c7(q, r); #c1(C11orf53) c2(XP_011541105) c3(uncharacterized protein C11orf53 isoform X2) c4(339619) c5(339620) c6( ) c7(q, r); #c1(C11orf65) c2(NP_689800) c3(uncharacterized protein C11orf65) c4(243984) c5(243985, 243986, 243987, 243988, 243989, 243990, 243991, 243992, 243993, 243994) c6( ) c7(dL); #c1(C11orf68) c2(NP_001129107) c3(UPF0696 protein C11orf68 isoform 1) c4(50771) c5(50772, 50773, 50774, 50775, 50776, 50777) c6( ) c7(Y); #c1(C11orf68) c2(NP_113638) c3(UPF0696 protein C11orf68 isoform 2) c4(221843) c5(221844, 221845, 221846, 221847, 221848, 221849) c6( ) c7(Y); #c1(C11orf73) c2(NP_057485) c3(protein Hikeshi) c4(191150) c5(191151, 191152, 191153, 191154, 191155, 191156) c6( ) c7(Y, aA); #c1(C11orf74) c2(NP_001263656) c3(uncharacterized protein C11orf74 isoform b) c4(97384, 97385) c5(97386, 97387, 97388, 97389, 97390, 97391, 97392, 97393, 97394, 97395, 97396, 97397, 97398, 97399, 97400, 97401) c6( ) c7(Kc, fq, PN); #c1(C11orf74) c2(XP_011518187) c3(uncharacterized protein C11orf74 isoform X1) c4(312202, 312203, 312204, 312205, 312206) c5(312207, 312208, 312209, 312210, 312211, 312212, 312213, 312214, 312215, 312216, 312217, 312218, 312219, 312220, 312221, 312222, 312223, 312224, 312225, 312226, 312227, 312228, 312229, 312230, 312231, 312232, 312233, 312234, 312235, 312236) c6( ) c7(Kc, fq, PN); #c1(C11orf80) c2(NP_001289013) c3(uncharacterized protein C11orf80 isoform b) c4(114116) c5(114117, 114118, 114119, 114120, 114121, 114122) c6( ) c7(bK); #c1(C11orf80) c2(NP_078926) c3(uncharacterized protein C11orf80 isoform a) c4(216155, 216156) c5(216157, 216158, 216159, 216160, 216161, 216162, 216163, 216164, 216165, 216166, 216167, 216168) c6( ) c7(bK); #c1(C11orf87) c2(XP_011541119) c3(uncharacterized protein C11orf87 isoform X2) c4(339636) c5(339637) c6( ) c7(oe, ac); #c1(C11orf87) c2(XP_011541120) c3(uncharacterized protein C11orf87 isoform X1) c4( ) c5(339638, 339639, 339640, 339641, 339642) c6( ) c7(oe, ac); #c1(C11orf95) c2(NP_001138408) c3(uncharacterized protein C11orf95) c4( ) c5(56576) c6( ) c7(awO, awP, hj); #c1(C12orf10) c2(NP_067653) c3(UPF0160 protein MYG1, mitochondrial precursor) c4(209240, 209241) c5(209242, 209243, 209244, 209245, 209246, 209247, 209248, 209249, 209250, 209251, 209252, 209253) c6( ) c7(yl, aW, aT, awQ, qj, pC); #c1(C12orf42) c2(NP_940923) c3(uncharacterized protein C12orf42 isoform 1) c4( ) c5(260117, 260118, 260119, 260120, 260121, 260122, 260123, 260124, 260125, 260126, 260127, 260128, 260129) c6( ) c7(iy); #c1(C12orf42) c2(XP_011536593) c3(uncharacterized protein C12orf42 isoform X2) c4(334092, 334093) c5(334094, 334095, 334096) c6( ) c7(iy); #c1(C12orf42) c2(XP_011536616) c3(uncharacterized protein C12orf42 isoform X15) c4(334097) c5( ) c6( ) c7(iy); #c1(C12orf42) c2(XP_011536619) c3(uncharacterized protein C12orf42 isoform X17) c4( ) c5(334098, 334099, 334100, 334101, 334102, 334103) c6( ) c7(iy); #c1(C12orf43) c2(NP_001273127) c3(uncharacterized protein C12orf43 isoform g) c4(104329) c5(104330, 104331, 104332, 104333, 104334, 104335) c6( ) c7(j); #c1(C12orf43) c2(NP_075046) c3(uncharacterized protein C12orf43 isoform c) c4(213557, 213558) c5(213559, 213560, 213561, 213562, 213563, 213564, 213565, 213566, 213567, 213568, 213569, 213570) c6( ) c7(j); #c1(C12orf5) c2(NP_065108) c3(fructose-2,6-bisphesphatase TIGAR) c4(203959) c5(203960, 203961, 203962, 203963, 203964, 203965) c6( ) c7(T, d, bP, X, ja, cj, aq, ey, K, eA, iV, KV, B); #c1(C12orf50) c2(NP_689802) c3(uncharacterized protein C12orf50) c4(244002, 244003) c5(244004, 244005, 244006, 244007, 244008) c6( ) c7(j); #c1(C12orf50) c2(XP_011536284) c3(uncharacterized protein C12orf50 isoform X1) c4( ) c5(333620) c6( ) c7(j); #c1(C12orf50) c2(XP_011536287) c3(uncharacterized protein C12orf50 isoform X4) c4( ) c5(333621, 333622, 333623, 333624, 333625, 333626) c6( ) c7(j); #c1(C12orf57) c2(NP_001288763) c3(protein C10 isoform 1) c4(114012) c5(114013, 114014, 114015, 114016, 114017, 114018) c6( ) c7(awR, af, afy, nA, awS); #c1(C12orf65) c2(NP_001181924) c3(probable peptide chain release factor C12orf65, mitochondrial) c4(74393, 74394, 74395, 74396) c5(74397, 74398, 74399, 74400, 74401, 74402, 74403, 74404, 74405, 74406, 74407, 74408, 74409, 74410, 74411, 74412, 74413, 74414, 74415, 74416, 74417, 74418, 74419, 74420, 74421, 74422, 74423, 74424, 74425, 74426, 74427, 74428) c6( ) c7(awT, awK, px, fu, awU); #c1(C12orf66) c2(NP_001287869) c3(UPF0536 protein C12orf66 isoform 1) c4(113102) c5( ) c6( ) c7(kl); #c1(C12orf66) c2(NP_689653) c3(UPF0536 protein C12orf66 isoform 2) c4( ) c5(243480, 243481, 243482, 243483, 243484, 243485) c6( ) c7(kl); #c1(C12orf75) c2(NP_001138671) c3(overexpressed in colon carcinoma 1 protein) c4(57336) c5(57337, 57338, 57339, 57340, 57341, 57342) c6( ) c7(t, awV, e, m, pN); #c1(C12orf77) c2(NP_001094809) c3(putative uncharacterized protein C12orf77) c4(40758) c5(40759, 40760, 40761, 40762, 40763, 40764) c6( ) c7(aw); #c1(C14orf1) c2(NP_009107) c3(probable ergosterol biosynthetic protein 28) c4(170700) c5(170701, 170702, 170703, 170704, 170705, 170706) c6( ) c7(aE); #c1(C14orf166) c2(NP_057123) c3(UPF0568 protein C14orf166) c4(189002) c5(189003, 189004, 189005, 189006, 189007, 189008, 189009) c6( ) c7(dB, aC); #c1(C14orf177) c2(NP_872366) c3(putative uncharacterized protein C14orf177) c4(256244, 256245) c5(256246, 256247, 256248, 256249, 256250, 256251, 256252, 256253, 256254, 256255, 256256, 256257, 256258) c6( ) c7(cd); #c1(C15orf32) c2(NP_694585) c3(uncharacterized protein C15orf32 isoform a) c4(245330) c5(245331, 245332, 245333, 245334, 245335, 245336) c6( ) c7(bK); #c1(C15orf41) c2(XP_011520412) c3(uncharacterized protein C15orf41 isoform X1) c4(315298, 315299) c5(315300, 315301, 315302, 315303, 315304, 315305, 315306, 315307) c6( ) c7(awW); #c1(C15orf41) c2(XP_011520414) c3(uncharacterized protein C15orf41 isoform X2) c4( ) c5(315308, 315309, 315310, 315311, 315312, 315313, 315314, 315315) c6( ) c7(awW); #c1(C15orf48) c2(NP_922946) c3(normal mucosa of esophagus-specific gene 1 protein) c4(258713, 258714) c5(258715, 258716, 258717, 258718, 258719, 258720, 258721, 258722, 258723, 258724, 258725) c6( ) c7(T, it, ff, en); #c1(C15orf53) c2(NP_997327) c3(uncharacterized protein C15orf53) c4(265411) c5(265412, 265413, 265414, 265415, 265416, 265417) c6( ) c7(cd, oe, bK, ac, ad); #c1(C15orf59) c2(XP_005254426) c3(UPF0583 protein C15orf59 isoform X1) c4(273197) c5(273198, 273199, 273200, 273201, 273202, 273203, 273204, 273205, 273206, 273207) c6( ) c7(fq, ad); #c1(C16orf72) c2(NP_054836) c3(UPF0472 protein C16orf72) c4(178110) c5(178111, 178112, 178113, 178114, 178115, 178116) c6( ) c7(Ea); #c1(C16orf74) c2(NP_996850) c3(uncharacterized protein C16orf74) c4(264782) c5(264783, 264784, 264785, 264786, 264787, 264788) c6( ) c7(eL, dL); #c1(C16orf78) c2(NP_653203) c3(uncharacterized protein C16orf78) c4(239050) c5(239051, 239052, 239053, 239054, 239055, 239056) c6( ) c7(EQ); #c1(C16orf95) c2(NP_001182053) c3(uncharacterized protein C16orf95 isoform 1) c4(74514) c5(74515, 74516, 74517, 74518, 74519, 74520) c6( ) c7(awX); #c1(C16orf95) c2(NP_001182054) c3(uncharacterized protein C16orf95 isoform 2) c4(74521) c5(74522, 74523, 74524, 74525, 74526, 74527) c6( ) c7(awX); #c1(C17orf51) c2(NP_001106905) c3(uncharacterized protein C17orf51) c4(42678) c5(42679, 42680, 42681, 42682, 42683, 42684) c6( ) c7(cr, an); #c1(C17orf53) c2(NP_076937) c3(uncharacterized protein C17orf53 isoform 1) c4(214306) c5(214307, 214308, 214309, 214310, 214311, 214312) c6( ) c7(D); #c1(C17orf53) c2(XP_011523493) c3(uncharacterized protein C17orf53 isoform X5) c4(318019) c5( ) c6( ) c7(D); #c1(C17orf53) c2(XP_011523498) c3(uncharacterized protein C17orf53 isoform X10) c4(318020) c5(318021, 318022, 318023, 318024, 318025, 318026, 318027, 318028, 318029, 318030, 318031, 318032) c6( ) c7(D); #c1(C17orf64) c2(NP_859058) c3(uncharacterized protein C17orf64) c4(255434) c5(255435, 255436, 255437, 255438, 255439, 255440) c6( ) c7(W); #c1(C17orf96) c2(NP_001124149) c3(uncharacterized protein C17orf96) c4(48291) c5(48292, 48293, 48294, 48295, 48296, 48297, 48298) c6( ) c7(bX); #c1(C18orf54) c2(NP_001275909) c3(lung adenoma susceptibility protein 2 isoform a) c4(107369) c5(107370, 107371, 107372, 107373, 107374, 107375) c6( ) c7(av, auM, ac, g); #c1(C18orf54) c2(NP_775800) c3(lung adenoma susceptibility protein 2 isoform b precursor) c4(250341) c5(250342, 250343, 250344, 250345, 250346, 250347) c6( ) c7(av, auM, ac, g); #c1(C18orf8) c2(NP_001263271) c3(uncharacterized protein C18orf8 isoform 2) c4( ) c5(97124, 97125) c6( ) c7(bL, T, dD, aiR, ea, e, aw, aA, bB, n, v, eq, q, ad, eA, aE, sO, aT, dL, K, KV, ae, eL, cp, d, aW, Y, aF, pL, ar, pu, ac, bE, y, LS, awY); #c1(C18orf8) c2(NP_037458) c3(uncharacterized protein C18orf8 isoform 1) c4(175612) c5(175613, 175614, 175615, 175616, 175617, 175618, 175619, 175620, 175621, 175622, 175623, 175624, 175625) c6( ) c7(bL, T, dD, aiR, ea, e, aw, aA, bB, n, v, eq, q, ad, eA, aE, sO, aT, dL, K, KV, ae, eL, cp, d, aW, Y, aF, pL, ar, pu, ac, bE, y, LS, awY); #c1(C19orf12) c2(NP_001026896) c3(protein C19orf12 isoform 1) c4(29924, 29925) c5(29926, 29927, 29928, 29929, 29930, 29931, 29932) c6( ) c7(axa, Pw, aV, axb, dL, awZ, t); #c1(C19orf12) c2(NP_001242975) c3(protein C19orf12 isoform 3) c4(89459) c5(89460, 89461, 89462, 89463, 89464, 89465) c6( ) c7(axa, Pw, aV, axb, dL, awZ, t); #c1(C19orf12) c2(NP_113636) c3(protein C19orf12 isoform 2) c4( ) c5(221838, 221839, 221840, 221841, 221842) c6( ) c7(axa, Pw, aV, axb, dL, awZ, t); #c1(C19orf18) c2(NP_689687) c3(uncharacterized protein C19orf18 precursor) c4(243574) c5(243575, 243576, 243577, 243578, 243579, 243580) c6( ) c7(IB); #c1(C19orf24) c2(NP_060384) c3(uncharacterized membrane protein C19orf24 precursor) c4(195736) c5(195737, 195738, 195739, 195740, 195741, 195742, 195743, 195744, 195745) c6(195746, 195747) c7(aw); #c1(C19orf26) c2(NP_689982) c3(protein Dos) c4(244645, 244646) c5(244647, 244648, 244649, 244650, 244651, 244652, 244653, 244654, 244655, 244656, 244657, 244658) c6( ) c7(T, aog, axc); #c1(C19orf33) c2(NP_277055) c3(immortalization up-regulated protein) c4(228881) c5(228882, 228883, 228884, 228885, 228886, 228887) c6( ) c7(n, ji, hL, eb); #c1(C19orf40) c2(NP_689479) c3(Fanconi anemia-associated protein of 24 kDa isoform 1) c4(242830) c5(242831, 242832, 242833, 242834, 242835, 242836, 242837, 242838, 242839, 242840) c6( ) c7(oZ, os, K); #c1(C19orf45) c2(XP_011526294) c3(uncharacterized protein C19orf45 isoform X1) c4(320566, 320567) c5(320568, 320569, 320570, 320571, 320572, 320573) c6( ) c7(iK); #c1(C19orf45) c2(XP_011526296) c3(uncharacterized protein C19orf45 isoform X3) c4(320574) c5( ) c6( ) c7(iK); #c1(C19orf45) c2(XP_011526297) c3(uncharacterized protein C19orf45 isoform X4) c4( ) c5(320575, 320576, 320577, 320578, 320579, 320580, 320581, 320582, 320583, 320584, 320585, 320586) c6( ) c7(iK); #c1(C19orf48) c2(NP_001277083) c3(uncharacterized protein C19orf48) c4(109012) c5(109013, 109014, 109015, 109016, 109017, 109018, 109019, 109020, 109021, 109022) c6( ) c7(es, T, bE, aW, Y, iB, cj, aT, bB, fr, bt, B, er); #c1(C19orf57) c2(NP_077299) c3(uncharacterized protein C19orf57) c4(215101, 215102) c5(215103, 215104, 215105, 215106, 215107, 215108, 215109, 215110, 215111, 215112, 215113, 215114) c6( ) c7(ac); #c1(C19orf57) c2(XP_011526589) c3(uncharacterized protein C19orf57 isoform X2) c4( ) c5(320895) c6( ) c7(ac); #c1(C19orf68) c2(NP_955373) c3(uncharacterized protein C19orf68) c4(261590) c5(261591, 261592, 261593, 261594, 261595, 261596) c6( ) c7(kl); #c1(C1D) c2(NP_775269) c3(nuclear nucleic acid-binding protein C1D) c4(249724, 249725) c5(249726, 249727, 249728, 249729, 249730, 249731, 249732, 249733, 249734, 249735, 249736, 249737, 249738, 249739, 249740, 249741, 249742, 249743, 249744, 249745) c6( ) c7(bL, T, dD, vl, ea, axd, aw, cz, v, uu, ci, j, eq, ip, av, aT, af, bA, bf, cW, aW, Y, g, acD, bz, Be, aS, iu, L); #c1(C1GALT1) c2(XP_005249869) c3(glycoprotein-N-acetylgalactosamine 3-beta-galactosyltransferase 1 isoform X2) c4(269937, 269938) c5(269939, 269940, 269941, 269942) c6( ) c7(T, HZ, bE, dM, bB, bK, dy, uE, ey, hH, V, B); #c1(C1GALT1) c2(XP_011513758) c3(glycoprotein-N-acetylgalactosamine 3-beta-galactosyltransferase 1 isoform X1) c4(306106, 306107) c5(306108, 306109, 306110, 306111, 306112, 306113, 306114, 306115, 306116, 306117, 306118, 306119, 306120, 306121, 306122, 306123, 306124, 306125, 306126, 306127, 306128, 306129, 306130, 306131) c6( ) c7(T, HZ, bE, dM, bB, bK, dy, uE, ey, hH, V, B); #c1(C1GALT1C1) c2(NP_689905) c3(C1GALT1-specific chaperone 1) c4(244332) c5(244333, 244334, 244335, 244336, 244337, 244338, 244339, 244340, 244341, 244342) c6( ) c7(HZ, ey, Jn, X, Jm); #c1(C1orf106) c2(NP_001136041) c3(uncharacterized protein C1orf106 isoform 2) c4(54140, 54141) c5(54142, 54143, 54144, 54145, 54146, 54147, 54148, 54149, 54150, 54151, 54152) c6( ) c7(fe, iV); #c1(C1orf106) c2(NP_060735) c3(uncharacterized protein C1orf106 isoform 1) c4(197538) c5(197539, 197540, 197541, 197542, 197543, 197544, 197545, 197546) c6( ) c7(fe, iV); #c1(C1orf106) c2(XP_011508058) c3(uncharacterized protein C1orf106 isoform X2) c4(298525) c5(298526, 298527, 298528, 298529, 298530, 298531, 298532) c6( ) c7(fe, iV); #c1(C1orf109) c2(NP_001289959) c3(uncharacterized protein C1orf109 isoform 2) c4(114870) c5( ) c6( ) c7(aW, T, np, aT); #c1(C1orf109) c2(NP_001289960) c3(uncharacterized protein C1orf109 isoform 1) c4( ) c5(114871) c6( ) c7(aW, T, np, aT); #c1(C1orf110) c2(NP_848645) c3(coiled-coil domain-containing protein C1orf110) c4( ) c5(254069, 254070, 254071, 254072, 254073) c6( ) c7(bL, fe, cd, cz); #c1(C1orf110) c2(XP_005245182) c3(coiled-coil domain-containing protein C1orf110 isoform X2) c4(266339) c5(266340) c6( ) c7(bL, fe, cd, cz); #c1(C1orf110) c2(XP_006711352) c3(coiled-coil domain-containing protein C1orf110 isoform X3) c4( ) c5(285896, 285897, 285898, 285899, 285900) c6( ) c7(bL, fe, cd, cz); #c1(C1orf110) c2(XP_011507779) c3(coiled-coil domain-containing protein C1orf110 isoform X1) c4(297843) c5(297844) c6( ) c7(bL, fe, cd, cz); #c1(C1orf112) c2(XP_005245374) c3(uncharacterized protein C1orf112 isoform X2) c4(266504) c5(266505, 266506, 266507, 266508, 266509, 266510, 266511, 266512) c6( ) c7(T, bA, cz); #c1(C1orf112) c2(XP_011508033) c3(uncharacterized protein C1orf112 isoform X1) c4(298495) c5(298496, 298497, 298498, 298499, 298500, 298501, 298502, 298503, 298504) c6( ) c7(T, bA, cz); #c1(C1orf112) c2(XP_011508036) c3(uncharacterized protein C1orf112 isoform X3) c4(298505) c5(298506, 298507, 298508, 298509, 298510) c6( ) c7(T, bA, cz); #c1(C1orf115) c2(NP_078985) c3(uncharacterized protein C1orf110) c4(216431) c5(216432, 216433, 216434, 216435, 216436, 216437) c6( ) c7(c); #c1(C1orf127) c2(XP_011539059) c3(uncharacterized protein C1orf127 isoform X5) c4( ) c5(337137, 337138) c6( ) c7(dx); #c1(C1orf141) c2(XP_011539768) c3(uncharacterized protein C1orf141 isoform X1) c4(337977, 337978) c5(337979, 337980, 337981, 337982, 337983, 337984, 337985, 337986, 337987, 337988) c6( ) c7(AW, HA); #c1(C1orf141) c2(XP_011539769) c3(uncharacterized protein C1orf141 isoform X2) c4(337989) c5( ) c6( ) c7(AW, HA); #c1(C1orf141) c2(XP_011539772) c3(uncharacterized protein C1orf141 isoform X5) c4( ) c5(337990) c6( ) c7(AW, HA); #c1(C1orf141) c2(XP_011539777) c3(uncharacterized protein C1orf141 isoform X10) c4( ) c5(337991, 337992, 337993, 337994, 337995, 337996, 337997, 337998, 337999, 338000, 338001) c6( ) c7(AW, HA); #c1(C1orf167) c2(XP_011539574) c3(uncharacterized protein C1orf167 isoform X3) c4(337801) c5(337802, 337803, 337804, 337805, 337806, 337807) c6( ) c7(bL); #c1(C1orf167) c2(XP_011539579) c3(uncharacterized protein C1orf167 isoform X6) c4(337808) c5(337809) c6( ) c7(bL); #c1(C1orf167) c2(XP_011539581) c3(uncharacterized protein C1orf167 isoform X8) c4( ) c5(337810, 337811, 337812, 337813, 337814, 337815) c6( ) c7(bL); #c1(C1orf204) c2(NP_001127705) c3(uncharacterized protein LOC284677) c4(49258) c5(49259, 49260, 49261, 49262, 49263, 49264) c6( ) c7(bL); #c1(C1orf226) c2(NP_001078844) c3(uncharacterized protein C1orf226 isoform 2) c4( ) c5(37919, 37920, 37921, 37922, 37923, 37924, 37925, 37926, 37927, 37928) c6( ) c7(cd); #c1(C1orf226) c2(NP_001128712) c3(uncharacterized protein C1orf226 isoform 1) c4(50561, 50562, 50563) c5(50564, 50565, 50566, 50567, 50568, 50569, 50570, 50571) c6( ) c7(cd); #c1(C1orf228) c2(XP_011539646) c3(uncharacterized protein C1orf228 isoform X1) c4(337913) c5(337914, 337915, 337916, 337917, 337918, 337919, 337920, 337921, 337922, 337923) c6( ) c7(bM, A, Jr, z, Y, eE, afS, dV, r, cU, Hn, h, cr, eo, eZ, fe, afT, y, V, q); #c1(C1orf27) c2(NP_001157717) c3(protein odr-4 homolog isoform 2) c4(62456) c5(62457, 62458, 62459, 62460, 62461, 62462) c6( ) c7(x); #c1(C1orf27) c2(NP_001157718) c3(protein odr-4 homolog isoform 3) c4(62463) c5(62464, 62465, 62466, 62467, 62468, 62469) c6( ) c7(x); #c1(C1orf27) c2(XP_011507962) c3(protein odr-4 homolog isoform X1) c4(298385, 298386) c5(298387, 298388, 298389, 298390, 298391, 298392) c6( ) c7(x); #c1(C1orf27) c2(XP_011507964) c3(protein odr-4 homolog isoform X3) c4( ) c5(298393, 298394, 298395, 298396, 298397, 298398) c6( ) c7(x); #c1(C1orf61) c2(XP_005244889) c3(protein CROC-4 isoform X6) c4(266143, 266144) c5(266145, 266146, 266147, 266148, 266149, 266150, 266151, 266152, 266153, 266154, 266155) c6( ) c7(al, T, B, hl); #c1(C1orf61) c2(XP_011507370) c3(protein CROC-4 isoform X3) c4( ) c5(297213) c6( ) c7(al, T, B, hl); #c1(C1orf61) c2(XP_011507374) c3(protein CROC-4 isoform X1) c4(297214, 297215, 297216) c5(297217, 297218, 297219, 297220, 297221, 297222, 297223, 297224, 297225, 297226, 297227, 297228, 297229, 297230, 297231, 297232, 297233, 297234) c6( ) c7(al, T, B, hl); #c1(C1orf86) c2(XP_011539224) c3(Fanconi anemia-associated protein of 20 kDa isoform X1) c4(337333) c5( ) c6( ) c7(oZ, os); #c1(C1QB) c2(XP_011540361) c3(complement C1q subcomponent subunit B isoform X1) c4(338824, 338825, 338826, 338827) c5(338828, 338829, 338830, 338831, 338832, 338833, 338834, 338835, 338836, 338837, 338838, 338839, 338840, 338841, 338842, 338843, 338844, 338845, 338846, 338847, 338848, 338849, 338850, 338851) c6( ) c7(axe, oV, Y, iW, wF, eZ, j, fL, ey, mC); #c1(C1QBP) c2(NP_001203) c3(complement component 1 Q subcomponent-binding protein, mitochondrial precursor) c4(83566) c5(83567, 83568, 83569, 83570, 83571, 83572) c6( ) c7(T, dA, fR, aW, if, qp, jx, cn, aT, h, jh, fD, qN, cm, bz, B, ip); #c1(C1QL1) c2(NP_006679) c3(C1q-related factor precursor) c4(167096) c5(167097, 167098, 167099, 167100, 167101, 167102) c6( ) c7(T, eR, bO, aj, bS, ct, aY, J, fU, ft, iX, aT, h, K, nJ, af, s, aW, Z, cm, hq, ac, cA, vL, hR); #c1(C1QL3) c2(NP_001010908) c3(complement C1q-like protein 3 precursor) c4(24064, 24065) c5(24066, 24067, 24068, 24069, 24070, 24071, 24072, 24073, 24074, 24075, 24076, 24077, 24078, 24079, 24080, 24081) c6(24082, 24083, 24084, 24085) c7(v); #c1(C1QTNF1) c2(NP_112230) c3(complement C1q tumor necrosis factor-related protein 1 isoform 1 precursor) c4( ) c5(220981, 220982, 220983, 220984, 220985, 220986, 220987, 220988, 220989, 220990, 220991, 220992, 220993) c6(220994, 220995, 220996, 220997) c7(bL, W, pX, fc, hl, cz, Ja, dG, v, cP, ei, Hu); #c1(C1QTNF1) c2(NP_940996) c3(complement C1q tumor necrosis factor-related protein 1 isoform 2) c4( ) c5(260286, 260287, 260288, 260289, 260290, 260291, 260292) c6(260293, 260294) c7(bL, W, pX, fc, hl, cz, Ja, dG, v, cP, ei, Hu); #c1(C1QTNF1) c2(XP_006721726) c3(complement C1q tumor necrosis factor-related protein 1 isoform X2) c4(294245) c5( ) c6( ) c7(bL, W, pX, fc, hl, cz, Ja, dG, v, cP, ei, Hu); #c1(C1QTNF1) c2(XP_006721727) c3(complement C1q tumor necrosis factor-related protein 1 isoform X4) c4(294246, 294247, 294248, 294249) c5(294250) c6( ) c7(bL, W, pX, fc, hl, cz, Ja, dG, v, cP, ei, Hu); #c1(C1QTNF1) c2(XP_006721729) c3(complement C1q tumor necrosis factor-related protein 1 isoform X3) c4( ) c5(294251, 294252, 294253, 294254, 294255, 294256, 294257, 294258, 294259, 294260, 294261, 294262, 294263, 294264, 294265, 294266, 294267) c6(294268, 294269, 294270, 294271) c7(bL, W, pX, fc, hl, cz, Ja, dG, v, cP, ei, Hu); #c1(C1QTNF3) c2(NP_112207) c3(complement C1q tumor necrosis factor-related protein 3 isoform a precursor) c4(220789, 220790) c5(220791, 220792, 220793, 220794, 220795, 220796, 220797, 220798, 220799, 220800, 220801, 220802, 220803, 220804, 220805, 220806, 220807, 220808, 220809, 220810, 220811, 220812, 220813) c6(220814, 220815, 220816, 220817) c7(bL, bM, kl, aZ, cz, v); #c1(C1QTNF3) c2(NP_852100) c3(complement C1q tumor necrosis factor-related protein 3 isoform b precursor) c4(254839, 254840) c5(254841, 254842, 254843, 254844, 254845, 254846, 254847, 254848) c6(254849, 254850) c7(bL, bM, kl, aZ, cz, v); #c1(C1QTNF5) c2(NP_001265360) c3(complement C1q tumor necrosis factor-related protein 5 precursor) c4(98367) c5(98368, 98369, 98370, 98371, 98372, 98373, 98374, 98375, 98376) c6( ) c7(W, IR, nb, axf, om, aqV, nw, v, nC, aqY); #c1(C1QTNF6) c2(NP_872292) c3(complement C1q tumor necrosis factor-related protein 6) c4(256011) c5(256012, 256013, 256014, 256015, 256016, 256017, 256018, 256019, 256020, 256021, 256022, 256023, 256024, 256025) c6(256026, 256027, 256028, 256029) c7(bL, A, Y, hD, v, qj, gT, cd, y); #c1(C1QTNF6) c2(XP_011528159) c3(complement C1q tumor necrosis factor-related protein 6 isoform X1) c4(323276) c5(323277, 323278, 323279, 323280, 323281, 323282, 323283, 323284) c6(323285, 323286) c7(bL, A, Y, hD, v, qj, gT, cd, y); #c1(C1QTNF7) c2(NP_001128642) c3(complement C1q tumor necrosis factor-related protein 7 isoform a precursor) c4(50426, 50427) c5(50428, 50429, 50430, 50431, 50432, 50433, 50434, 50435, 50436, 50437, 50438) c6(50439, 50440) c7(Gp, iW, v, EQ); #c1(C1QTNF7) c2(NP_114H7) c3(complement C1q tumor necrosis factor-related protein 7 isoform b precursor) c4(222201) c5(222202, 222203, 222204, 222205, 222206, 222207, 222208, 222209, 222210, 222211, 222212, 222213, 222214, 222215, 222216, 222217, 222218, 222219, 222220) c6(222221, 222222, 222223, 222224, 222225, 222226) c7(Gp, iW, v, EQ); #c1(C1QTNF9B-AS1) c2(NP_001014442) c3(prostate collagen triple helix protein isoform 1) c4( ) c5(25922, 25923, 25924, 25925, 25926) c6( ) c7(ae, ad); #c1(C1QTNF9B-AS1) c2(NP_001129288) c3(prostate collagen triple helix protein isoform 2) c4(51362) c5( ) c6( ) c7(ae, ad); #c1(C1R) c2(NP_001724) c3(complement C1r subcomponent precursor) c4(120530, 120531, 120532) c5(120533, 120534, 120535, 120536, 120537, 120538, 120539, 120540, 120541, 120542, 120543, 120544, 120545, 120546, 120547, 120548, 120549, 120550) c6( ) c7(dP, WP, af); #c1(C1RL) c2(NP_001284572) c3(complement C1r subcomponent-like protein isoform 4 precursor) c4( ) c5(112061) c6( ) c7(iW); #c1(C1RL) c2(NP_057630) c3(complement C1r subcomponent-like protein isoform 1 precursor) c4(191980, 191981) c5(191982, 191983, 191984, 191985, 191986, 191987, 191988, 191989, 191990, 191991, 191992, 191993) c6( ) c7(iW); #c1(C1S) c2(XP_005253817) c3(complement C1s subcomponent isoform X1) c4(272695, 272696, 272697, 272698, 272699) c5(272700, 272701, 272702, 272703, 272704, 272705, 272706, 272707, 272708, 272709, 272710, 272711, 272712, 272713, 272714, 272715, 272716, 272717, 272718, 272719, 272720, 272721, 272722, 272723, 272724, 272725, 272726, 272727, 272728, 272729, 272730, 272731, 272732, 272733, 272734, 272735, 272736, 272737, 272738, 272739, 272740, 272741, 272742, 272743) c6( ) c7(axh, iW, RJ, eZ, bh, axg); #c1(C2) c2(NP_000054) c3(complement C2 isoform 1 preproprotein) c4(1032, 1033, 1034) c5(1035, 1036, 1037, 1038, 1039, 1040, 1041, 1042, 1043, 1044, 1045, 1046, 1047, 1048, 1049, 1050, 1051, 1052, 1053, 1054, 1055, 1056, 1057, 1058, 1059, 1060, 1061, 1062, 1063, 1064) c6( ) c7(bL, dD, axi, fR, iW, aj, j, eq, V, ad, od, rw, agD, h, ey, aaW, acd, IM, af, mu, hM, A, IR, ZC, cr, eZ, fe, da, dq, as, Uk, D, Bv, W, arj, RJ, axj, Br, GF, If, B, y); #c1(C2) c2(NP_001139375) c3(complement C2 isoform 2 precursor) c4(59227, 59228, 59229, 59230) c5(59231, 59232, 59233, 59234, 59235, 59236, 59237, 59238, 59239, 59240, 59241, 59242, 59243, 59244, 59245, 59246, 59247, 59248, 59249, 59250, 59251, 59252, 59253, 59254, 59255, 59256, 59257, 59258, 59259, 59260, 59261, 59262, 59263, 59264, 59265, 59266, 59267, 59268, 59269, 59270, 59271, 59272, 59273, 59274, 59275, 59276, 59277, 59278, 59279, 59280) c6( ) c7(bL, dD, axi, fR, iW, aj, j, eq, V, ad, od, rw, agD, h, ey, aaW, acd, IM, af, mu, hM, A, IR, ZC, cr, eZ, fe, da, dq, as, Uk, D, Bv, W, arj, RJ, axj, Br, GF, If, B, y); #c1(C2) c2(NP_001171534) c3(complement C2 isoform 3) c4(70471, 70472, 70473, 70474) c5(70475, 70476, 70477, 70478, 70479, 70480, 70481, 70482, 70483, 70484, 70485, 70486, 70487, 70488, 70489, 70490, 70491, 70492, 70493, 70494, 70495, 70496, 70497, 70498, 70499, 70500, 70501, 70502, 70503, 70504, 70505, 70506, 70507, 70508, 70509, 70510, 70511, 70512, 70513, 70514, 70515, 70516, 70517, 70518, 70519, 70520, 70521, 70522, 70523, 70524, 70525, 70526, 70527, 70528, 70529, 70530, 70531, 70532, 70533, 70534, 70535, 70536, 70537, 70538, 70539) c6( ) c7(bL, dD, axi, fR, iW, aj, j, eq, V, ad, od, rw, agD, h, ey, aaW, acd, IM, af, mu, hM, A, IR, ZC, cr, eZ, fe, da, dq, as, Uk, D, Bv, W, arj, RJ, axj, Br, GF, If, B, y); #c1(C2) c2(NP_001269386) c3(complement C2 isoform 4) c4(101403, 101404, 101405) c5(101406, 101407, 101408, 101409, 101410, 101411, 101412, 101413, 101414, 101415, 101416, 101417, 101418, 101419, 101420, 101421, 101422, 101423, 101424, 101425, 101426, 101427, 101428, 101429, 101430, 101431, 101432, 101433, 101434, 101435, 101436, 101437, 101438, 101439, 101440, 101441, 101442, 101443, 101444, 101445, 101446, 101447, 101448, 101449, 101450, 101451, 101452, 101453, 101454, 101455, 101456, 101457, 101458, 101459, 101460, 101461, 101462, 101463, 101464, 101465, 101466, 101467, 101468, 101469, 101470, 101471, 101472, 101473, 101474, 101475, 101476, 101477, 101478, 101479, 101480, 101481) c6( ) c7(bL, dD, axi, fR, iW, aj, j, eq, V, ad, od, rw, agD, h, ey, aaW, acd, IM, af, mu, hM, A, IR, ZC, cr, eZ, fe, da, dq, as, Uk, D, Bv, W, arj, RJ, axj, Br, GF, If, B, y); #c1(C2) c2(NP_001269388) c3(complement C2 isoform 6 precursor) c4( ) c5(101482, 101483, 101484, 101502, 101503, 101504, 101505, 101506, 101507, 101508, 101509, 101510, 101511, 101512, 101513, 101514, 101515, 101516, 101517, 101518, 101519, 101520, 101521, 101522, 101523, 101524, 101525, 101526, 101527, 101528, 101529, 101530, 101531, 101532, 101533, 101534, 101535, 101536, 101537, 101538, 101539, 101540, 101541, 101542, 101543, 101544, 101545, 101546, 101547, 101548, 101549, 101550, 101551, 101552, 101553) c6( ) c7(bL, dD, axi, fR, iW, aj, j, eq, V, ad, od, rw, agD, h, ey, aaW, acd, IM, af, mu, hM, A, IR, ZC, cr, eZ, fe, da, dq, as, Uk, D, Bv, W, arj, RJ, axj, Br, GF, If, B, y); #c1(C20orf194) c2(NP_001009984) c3(uncharacterized protein C20orf194) c4(23776) c5(23777, 23778, 23779, 23780, 23781, 23782) c6( ) c7(F, rf); #c1(C20orf194) c2(XP_005260741) c3(uncharacterized protein C20orf194 isoform X1) c4( ) c5(276824, 276825) c6( ) c7(F, rf); #c1(C20orf194) c2(XP_005260743) c3(uncharacterized protein C20orf194 isoform X4) c4(276826) c5(276827, 276828, 276829, 276830, 276831) c6( ) c7(F, rf); #c1(C20orf196) c2(NP_001290406) c3(uncharacterized protein C20orf196 isoform 1) c4( ) c5(115345, 115346, 115347, 115348, 115349, 115350, 115351, 115352, 115353, 115354, 115355, 115356, 115357, 115358, 115359) c6( ) c7(aaw, dY); #c1(C20orf196) c2(NP_001290408) c3(uncharacterized protein C20orf196 isoform 3) c4(115360) c5(115361, 115362, 115363, 115364, 115365) c6( ) c7(aaw, dY); #c1(C20orf196) c2(XP_006723612) c3(uncharacterized protein C20orf196 isoform X2) c4(295248, 295249, 295250, 295251, 295252) c5(295253, 295254, 295255, 295256, 295257, 295258, 295259) c6( ) c7(aaw, dY); #c1(C20orf196) c2(XP_011527479) c3(uncharacterized protein C20orf196 isoform X1) c4( ) c5(322276, 322277, 322278) c6( ) c7(aaw, dY); #c1(C20orf196) c2(XP_011527482) c3(uncharacterized protein C20orf196 isoform X5) c4( ) c5(322279) c6( ) c7(aaw, dY); #c1(C20orf196) c2(XP_011527484) c3(uncharacterized protein C20orf196 isoform X7) c4( ) c5(322280, 322281, 322282, 322283, 322284) c6( ) c7(aaw, dY); #c1(C20orf27) c2(NP_001034229) c3(UPF0687 protein C20orf27 isoform 1) c4(31613) c5(31614, 31615, 31616, 31617, 31618, 31619) c6( ) c7(j); #c1(C20orf27) c2(NP_001245359) c3(UPF0687 protein C20orf27 isoform 2) c4(93241) c5(93242, 93243, 93244, 93245, 93246, 93247, 93248, 93249, 93250, 93251) c6( ) c7(j); #c1(C20orf27) c2(XP_011527568) c3(UPF0687 protein C20orf27 isoform X1) c4(322416, 322417) c5(322418, 322419, 322420, 322421, 322422, 322423, 322424, 322425, 322426, 322427, 322428, 322429) c6( ) c7(j); #c1(C20orf85) c2(NP_848551) c3(uncharacterized protein C20orf85) c4(253827) c5(253828, 253829, 253830, 253831, 253832, 253833) c6( ) c7(av, DA, eM, ff, en, bz, iu); #c1(C21orf2) c2(NP_001258369) c3(nuclear encoded mitochondrial protein C21orf2 isoform 2) c4(96018) c5(96019, 96020, 96021, 96022, 96023) c6( ) c7(cc, OM, f, Bh, af, wT); #c1(C21orf2) c2(NP_001258370) c3(nuclear encoded mitochondrial protein C21orf2 isoform 3) c4(96024) c5(96025, 96026, 96027, 96028, 96029, 96030) c6( ) c7(cc, OM, f, Bh, af, wT); #c1(C21orf2) c2(NP_004919) c3(nuclear encoded mitochondrial protein C21orf2 isoform 1) c4(150786) c5(150787, 150788, 150789, 150790, 150791, 150792, 150793) c6( ) c7(cc, OM, f, Bh, af, wT); #c1(C21orf33) c2(NP_004640) c3(ES1 protein homolog, mitochondrial isoform 1a precursor) c4(148432) c5(148433, 148434, 148435, 148436, 148437, 148438) c6( ) c7(Fv, T, os, fM, aC, iB, aA, bB, n, axk, oZ, ci, il, q, ad, eA, ip, iC, bv, av, ft, x, aE, ahL, kH, aT, bl, Tj, fb, ae, Qe, jf, axl, A, bf, s, iU, As, aW, Y, eH, cr, r, nY, hN, aq, aF, g, cl, as, t, f, bz, eF, cm, iV, ck, iO, c, bE, m, be, bt, B); #c1(C21orf33) c2(NP_937798) c3(ES1 protein homolog, mitochondrial isoform 1b precursor) c4(259125) c5(259126, 259127, 259128, 259129, 259130, 259131) c6( ) c7(Fv, T, os, fM, aC, iB, aA, bB, n, axk, oZ, ci, il, q, ad, eA, ip, iC, bv, av, ft, x, aE, ahL, kH, aT, bl, Tj, fb, ae, Qe, jf, axl, A, bf, s, iU, As, aW, Y, eH, cr, r, nY, hN, aq, aF, g, cl, as, t, f, bz, eF, cm, iV, ck, iO, c, bE, m, be, bt, B); #c1(C21orf59) c2(NP_067077) c3(UPF0769 protein C21orf59) c4(208917, 208918, 208919) c5(208920, 208921, 208922, 208923, 208924, 208925, 208926, 208927, 208928, 208929, 208930, 208931, 208932, 208933, 208934, 208935, 208936, 208937) c6( ) c7(Pf, axm, MG); #c1(C21orfG2) c2(XP_011545334) c3(uncharacterized protein C21orfG2 isoform X1) c4(344097) c5(344098, 344099, 344100, 344101, 344102, 344103, 344104, 344105, 344106, 344107, 344108, 344109, 344110, 344111, 344112, 344113, 344114, 344115, 344116) c6( ) c7(RI); #c1(C21orf91) c2(NP_001093890) c3(protein EURL homolog isoform 1) c4(40504, 40505) c5(40506, 40507, 40508, 40509, 40510, 40511) c6( ) c7(ey); #c1(C21orf91) c2(NP_001093891) c3(protein EURL homolog isoform 3) c4( ) c5(40512, 40513, 40514, 40515, 40516) c6( ) c7(ey); #c1(C21orf91) c2(NP_059143) c3(protein EURL homolog isoform 2) c4(193262, 193263) c5(193264, 193265, 193266, 193267, 193268, 193269, 193270, 193271, 193272, 193273, 193274, 193275, 193276) c6( ) c7(ey); #c1(C22orf29) c2(NP_078903) c3(protein Bop) c4(216003) c5(216004, 216005, 216006, 216007, 216008, 216009, 216010, 216011, 216012, 216013, 216014, 216015, 216016, 216017) c6( ) c7(ae, T, fM, asp, py, aW, Y, jh, cj, aT, fd, kp, fr, K, bz, iu, ad); #c1(C2CD3) c2(NP_001273506) c3(C2 domain-containing protein 3 isoform 1) c4(105095, 105096, 105097) c5(105098, 105099, 105100, 105101, 105102, 105103) c6( ) c7(ahD); #c1(C2CD3) c2(NP_056346) c3(C2 domain-containing protein 3 isoform 2) c4(187186) c5(187187, 187188, 187189, 187190, 187191, 187192, 187193, 187194, 187195, 187196, 187197, 187198, 187199) c6( ) c7(ahD); #c1(C2CD3) c2(XP_011543209) c3(C2 domain-containing protein 3 isoform X7) c4( ) c5(342019, 342020, 342021, 342022, 342023) c6( ) c7(ahD); #c1(C2CD4A) c2(NP_997205) c3(C2 calcium-dependent domain-containing protein 4A) c4(265173) c5(265174, 265175, 265176, 265177, 265178, 265179) c6( ) c7(bL, aj, J, c); #c1(C2CD4B) c2(NP_001007596) c3(C2 calcium-dependent domain-containing protein 4B) c4(22848) c5(22849, 22850, 22851, 22852, 22853, 22854) c6( ) c7(bL, aj, e, J); #c1(C2CD5) c2(NP_001273104) c3(C2 domain-containing protein 5 isoform b) c4(104321) c5(104322, 104323, 104324, 104325, 104326, 104327) c6( ) c7(e); #c1(C2CD5) c2(NP_055617) c3(C2 domain-containing protein 5 isoform e) c4(182308) c5(182309, 182310, 182311, 182312, 182313, 182314) c6( ) c7(e); #c1(C2orf16) c2(NP_115642) c3(uncharacterized protein C2orf16) c4(223412) c5(223413, 223414, 223415, 223416, 223417, 223418, 223419, 223420, 223421) c6( ) c7(om); #c1(C2orf40) c2(NP_115787) c3(augurin precursor) c4(223903) c5(223904, 223905, 223906, 223907, 223908, 223909) c6( ) c7(T, aW, ff, ht, aT, eA, en, hu, it, q); #c1(C2orf43) c2(NP_001269649) c3(UPF0554 protein C2orf43 isoform c) c4(102406) c5(102407, 102408, 102409, 102410, 102411, 102412) c6( ) c7(om, ae, j, ad); #c1(C2orf43) c2(NP_001269650) c3(UPF0554 protein C2orf43 isoform d) c4( ) c5(102413, 102414, 102415, 102416, 102417) c6( ) c7(om, ae, j, ad); #c1(C2orf43) c2(NP_001269652) c3(UPF0554 protein C2orf43 isoform e) c4(102418) c5(102419, 102420, 102421, 102422, 102423, 102424) c6( ) c7(om, ae, j, ad); #c1(C2orf43) c2(NP_068744) c3(UPF0554 protein C2orf43 isoform a) c4(210148) c5(210149, 210150, 210151, 210152, 210153, 210154, 210155) c6( ) c7(om, ae, j, ad); #c1(C2orf43) c2(XP_011531316) c3(UPF0554 protein C2orf43 isoform X1) c4(327312) c5( ) c6( ) c7(om, ae, j, ad); #c1(C2orf47) c2(NP_078796) c3(uncharacterized protein C2orf47, mitochondrial precursor) c4(215516) c5(215517, 215518, 215519, 215520, 215521, 215522, 215523, 215524, 215525, 215526) c6( ) c7(k); #c1(C2orf57) c2(NP_689827) c3(uncharacterized protein C2orf57) c4(244051) c5(244052, 244053, 244054, 244055, 244056, 244057) c6( ) c7(fq); #c1(C2orf61) c2(NP_001157033) c3(uncharacterized protein C2orf61 isoform 1) c4(62054) c5(62055, 62056, 62057, 62058, 62059, 62060) c6( ) c7(fq); #c1(C2orf61) c2(NP_775920) c3(uncharacterized protein C2orf61 isoform 2) c4(250704) c5(250705, 250706, 250707, 250708, 250709, 250710) c6( ) c7(fq); #c1(C3) c2(NP_000055) c3(complement C3 precursor) c4(1065) c5(1066, 1067, 1068, 1069, 1070, 1071) c6( ) c7(bM, ea, bB, ci, x, aE, u, Bc, Ds, dQ, aW, axu, mQ, wF, awv, da, vs, as, eE, Ik, axp, uC, Uk, iA, nw, Dt, k, m, qR, p, dD, My, aw, n, fr, uE, ai, ql, h, IG, ey, Um, A, sp, fe, cM, kT, W, w, Fi, afc, mg, JM, uz, eo, fL, bL, Dw, axt, dK, v, j, C, so, il, V, o, aT, agD, axn, an, ae, af, eu, kl, bf, oV, t, axo, ac, c, WP, hc, of, DW, JH, fD, dM, iW, uu, eq, mC, dP, I, axq, akJ, JK, uQ, axr, cr, eZ, Z, DF, dR, Hw, gk, axs, nb, ag, dO, arj, ei, GF, y, vt, fh); #c1(C3AR1) c2(NP_004045) c3(C3a anaphylaxia chemotactic receptor) c4(143123, 143124) c5(143125, 143126, 143127, 143128, 143129, 143130, 143131, 143132, 143133, 143134, 143135, 143136) c6( ) c7(bM, W, sp, iW, at, IG, v, JH, ey, C, fD, mF, V, aa); #c1(C3orf17) c2(NP_056227) c3(uncharacterized protein C3orf17) c4(186599, 186600) c5(186601, 186602, 186603, 186604, 186605, 186606, 186607) c6( ) c7(e, af); #c1(C3orf17) c2(XP_005247330) c3(uncharacterized protein C3orf17 isoform X1) c4(267799) c5(267800, 267801, 267802, 267803, 267804, 267805) c6( ) c7(e, af); #c1(C3orf17) c2(XP_005247333) c3(uncharacterized protein C3orf17 isoform X2) c4( ) c5(267806, 267807, 267808, 267809, 267810) c6( ) c7(e, af); #c1(C3orf17) c2(XP_005247335) c3(uncharacterized protein C3orf17 isoform X3) c4(267811) c5( ) c6( ) c7(e, af); #c1(C3orf17) c2(XP_011510940) c3(uncharacterized protein C3orf17 isoform X4) c4( ) c5(301409, 301410, 301411, 301412, 301413, 301414) c6( ) c7(e, af); #c1(C3orf18) c2(NP_001165212) c3(uncharacterized protein C3orf18 isoform 1) c4(67539) c5(67540, 67541, 67542, 67543, 67544, 67545, 67546, 67547, 67548, 67549, 67550) c6( ) c7(h); #c1(C3orf18) c2(XP_011532091) c3(uncharacterized protein C3orf18 isoform X4) c4( ) c5(328140, 328141, 328142, 328143) c6( ) c7(h); #c1(C3orf18) c2(XP_011532092) c3(uncharacterized protein C3orf18 isoform X1) c4(328144) c5(328145, 328146, 328147, 328148, 328149) c6( ) c7(h); #c1(C3orf20) c2(NP_001171887) c3(uncharacterized protein C3orf20 isoform 2) c4( ) c5(71958, 71959, 71960, 71961, 71962, 71963, 71964, 71965) c6( ) c7(an); #c1(C3orf20) c2(NP_115513) c3(uncharacterized protein C3orf20 isoform 1) c4(223018, 223019) c5(223020, 223021, 223022, 223023, 223024, 223025, 223026, 223027) c6( ) c7(an); #c1(C3orf35) c2(NP_848029) c3(AP20 region protein 1 isoform 8) c4(253716, 253717) c5(253718, 253719, 253720, 253721, 253722, 253723, 253724, 253725, 253726, 253727, 253728, 253729) c6( ) c7(T, ft, aW, aT, n, iK); #c1(C3orf35) c2(NP_848032) c3(AP20 region protein 1 isoform E) c4(253730) c5(253731, 253732, 253733, 253734, 253735, 253736, 253737, 253738, 253739, 253740, 253741, 253742, 253743, 253744) c6( ) c7(T, ft, aW, aT, n, iK); #c1(C3orf56) c2(NP_001007535) c3(putative uncharacterized protein C3orf56) c4(22781) c5(22782, 22783, 22784, 22785, 22786, 22787) c6( ) c7(af); #c1(C3orf58) c2(NP_001127942) c3(deleted in autism protein 1 isoform b) c4(49519) c5(49520, 49521, 49522, 49523, 49524, 49525) c6( ) c7(ck, T, VX, Y, axv, aw, cy, nA, ad, bN); #c1(C3orf58) c2(NP_775823) c3(deleted in autism protein 1 isoform a precursor) c4(250439) c5(250440, 250441, 250442, 250443, 250444, 250445) c6( ) c7(ck, T, VX, Y, axv, aw, cy, nA, ad, bN); #c1(C3orf67) c2(NP_940865) c3(uncharacterized protein C3orf67) c4(259983) c5( ) c6( ) c7(gZ, af, ac); #c1(C3orf67) c2(XP_006713076) c3(uncharacterized protein C3orf67 isoform X1) c4(287017) c5(287018) c6( ) c7(gZ, af, ac); #c1(C3orf67) c2(XP_011531755) c3(uncharacterized protein C3orf67 isoform X6) c4( ) c5(327838) c6( ) c7(gZ, af, ac); #c1(C3orf67) c2(XP_011531756) c3(uncharacterized protein C3orf67 isoform X7) c4(327839) c5( ) c6( ) c7(gZ, af, ac); #c1(C3orf67) c2(XP_011531761) c3(uncharacterized protein C3orf67 isoform X10) c4( ) c5(327840, 327841, 327842, 327843, 327844, 327845) c6( ) c7(gZ, af, ac); #c1(C3orf67) c2(XP_011531765) c3(uncharacterized protein C3orf67 isoform X13) c4( ) c5(327846, 327847, 327848, 327849, 327850) c6( ) c7(gZ, af, ac); #c1(C3orf67) c2(XP_011531766) c3(uncharacterized protein C3orf67 isoform X9) c4( ) c5(327851, 327852, 327853, 327854, 327855) c6( ) c7(gZ, af, ac); #c1(C3orf79) c2(NP_001094807) c3(putative uncharacterized protein C3orf79) c4(40751) c5(40752, 40753, 40754, 40755, 40756, 40757) c6( ) c7(aeP, bM); #c1(C4A) c2(NP_001239133) c3(complement C4-A isoform 2 preproprotein) c4(88265, 88266, 88267, 88268, 88269, 88270, 88271) c5(88272, 88273, 88274, 88275, 88276, 88277, 88278, 88279, 88280, 88281, 88282, 88283, 88284, 88285, 88286, 88287, 88288, 88289, 88290, 88291, 88292, 88293, 88294, 88295, 88296, 88297, 88298, 88299, 88300, 88301, 88302, 88303, 88304, 88305, 88306, 88307, 88308, 88309, 88310, 88311, 88312, 88313, 88314, 88315, 88316, 88317, 88318, 88319, 88320, 88321, 88322, 88323, 88324, 88325, 88326, 88327, 88328, 88329, 88330, 88331, 88332, 88333, 88334, 88335, 88336, 88337, 88338, 88339, 88340, 88341, 88342, 88343, 88344) c6(88345, 88346, 88347, 88348) c7(bL, bM, fR, dM, e, al, aw, fN, iW, cL, aj, qj, bh, mC, J, vV, axy, adX, hD, IM, af, bc, hm, vl, wC, A, axz, oV, IC, cr, eZ, aq, axx, axw, EZ, cM, fq, bN, IY, ac, adZ, hc, Ny, at, Vw, oh, JH, fL, y, B, pC); #c1(C4A) c2(NP_009224) c3(complement C4-A isoform 1 preproprotein) c4(171577, 171578, 171579, 171580) c5(171581, 171582, 171583, 171584, 171585, 171586, 171587, 171588, 171589, 171590, 171591, 171592, 171593, 171594, 171595, 171596, 171597, 171598, 171599, 171600, 171601, 171602, 171603, 171604, 171605, 171606) c6( ) c7(bL, bM, fR, dM, e, al, aw, fN, iW, cL, aj, qj, bh, mC, J, vV, axy, adX, hD, IM, af, bc, hm, vl, wC, A, axz, oV, IC, cr, eZ, aq, axx, axw, EZ, cM, fq, bN, IY, ac, adZ, hc, Ny, at, Vw, oh, JH, fL, y, B, pC); #c1(C4B) c2(NP_001002029) c3(complement C4-B preproprotein) c4(19377, 19378, 19379, 19380, 19381, 19382) c5(19383, 19384, 19385, 19386, 19387, 19388, 19389, 19390, 19391, 19392, 19393, 19394, 19395, 19396, 19397, 19398, 19399) c6( ) c7(bL, e, aw, fN, aj, qj, bh, ai, mC, J, vV, axy, adX, hD, DX, af, bc, hm, vl, A, axz, IC, cr, eZ, aq, axx, axw, EZ, cM, bN, IY, ac, adZ, hc, Ny, oh, JH, fL, y, B, pC); #c1(C4B_2) c2(NP_001229752) c3(complement C4-B-like preproprotein) c4(85060, 85061) c5(85062, 85063, 85064, 85065, 85066, 85067, 85068, 85069, 85070, 85071, 85072, 85073, 85074, 85075, 85076, 85077, 85078, 85079, 85080, 85081, 85082, 85083, 85084, 85085, 85086, 85087, 85088, 85089, 85090, 85091, 85092, 85093, 85094, 85095, 85096, 85097, 85098, 85099, 85100, 85101, 85102, 85103, 85104, 85105) c6(85106, 85107, 85108, 85109, 85110, 85111) c7(bL, e, aw, fN, aj, qj, bh, mC, J, vV, axy, adX, hD, af, bc, hm, vl, A, axz, IC, cr, eZ, aq, axx, axw, EZ, bN, IY, ac, adZ, hc, Ny, oh, fL, y, B, pC); #c1(C4BPA) c2(XP_005273308) c3(C4b-binding protein alpha chain isoform X1) c4(284434, 284435) c5(284436, 284437, 284438, 284439, 284440, 284441, 284442, 284443, 284444, 284445, 284446, 284447) c6( ) c7(ka, dt, kh, iW, axA, jX, hF, q, jY, hX, av, anj, ec, hb, ql, ds, aT, h, hH, aW, BG, Xk, kk, dr, dS, ck, jV, W, eM, ki, kq, jQ, it); #c1(C4BPB) c2(NP_001017365) c3(C4b-binding protein beta chain isoform 1 precursor) c4(26259, 26260) c5(26261, 26262, 26263, 26264, 26265, 26266, 26267, 26268, 26269, 26270, 26271, 26272, 26273, 26274, 26275, 26276, 26277, 26278, 26279, 26280) c6( ) c7(W, eM, ec, iW, YG, hH, dr); #c1(C4BPB) c2(NP_001017366) c3(C4b-binding protein beta chain isoform 2 precursor) c4(26281) c5(26282, 26283, 26284, 26285, 26286, 26287) c6( ) c7(W, eM, ec, iW, YG, hH, dr); #c1(C4BPB) c2(XP_005273312) c3(C4b-binding protein beta chain isoform X2) c4(284448) c5(284449, 284450, 284451, 284452, 284453, 284454, 284455, 284456, 284457, 284458, 284459, 284460, 284461, 284462, 284463, 284464, 284465, 284466, 284467, 284468, 284469, 284470, 284471, 284472, 284473, 284474, 284475, 284476, 284477, 284478) c6( ) c7(W, eM, ec, iW, YG, hH, dr); #c1(C4orf22) c2(NP_001193926) c3(uncharacterized protein C4orf22 isoform 1) c4(83188) c5(83189, 83190, 83191, 83192, 83193, 83194) c6( ) c7(oe, pN); #c1(C4orf22) c2(NP_689983) c3(uncharacterized protein C4orf22 isoform 2) c4(244659) c5(244660, 244661, 244662, 244663, 244664, 244665) c6( ) c7(oe, pN); #c1(C4orf26) c2(NP_001193910) c3(uncharacterized protein C4orf26 isoform 1 precursor) c4(83143) c5(83144, 83145, 83146, 83147, 83148, 83149, 83150, 83151, 83152, 83153) c6(83154, 83155) c7(Ud, axB); #c1(C4orf26) c2(NP_848592) c3(uncharacterized protein C4orf26 isoform 2 precursor) c4(253917) c5(253918, 253919, 253920, 253921, 253922, 253923, 253924) c6(253925, 253926) c7(Ud, axB); #c1(C4orf27) c2(NP_060337) c3(UPF0609 protein C4orf27) c4(195458) c5(195459, 195460, 195461, 195462, 195463, 195464, 195465) c6( ) c7(ey); #c1(C4orf32) c2(NP_689613) c3(uncharacterized protein C4orf32) c4(243260) c5(243261, 243262, 243263, 243264, 243265, 243266) c6( ) c7(bL); #c1(C4orf33) c2(NP_001093253) c3(UPF0462 protein C4orf33) c4(40177) c5(40178, 40179, 40180, 40181, 40182, 40183, 40184, 40185, 40186, 40187) c6( ) c7(v, oe, j, ac, cz); #c1(C4orf33) c2(XP_011529896) c3(UPF0462 protein C4orf33 isoform X2) c4(325664) c5(325665, 325666, 325667, 325668, 325669, 325670) c6( ) c7(v, oe, j, ac, cz); #c1(C4orf36) c2(XP_011529917) c3(uncharacterized protein C4orf36 isoform X1) c4(325677, 325678, 325679) c5(325680, 325681, 325682, 325683, 325684, 325685, 325686, 325687, 325688, 325689, 325690, 325691, 325692, 325693, 325694, 325695, 325696, 325697, 325698, 325699, 325700, 325701) c6( ) c7(c); #c1(C4orf48) c2(NP_001135408) c3(neuropeptide-like protein C4orf48 isoform 2 precursor) c4( ) c5(52868, 52869, 52870, 52871, 52872, 52873, 52874) c6(52875) c7(axC); #c1(C4orf48) c2(NP_001161715) c3(neuropeptide-like protein C4orf48 isoform 1) c4(65863, 65864) c5(65865, 65866, 65867, 65868, 65869, 65870, 65871, 65872, 65873, 65874, 65875, 65876, 65877, 65878, 65879, 65880) c6(65881, 65882, 65883, 65884) c7(axC); #c1(C4orf48) c2(XP_011511770) c3(neuropeptide-like protein C4orf48 isoform X2) c4(302470) c5( ) c6( ) c7(axC); #c1(C4orf51) c2(XP_011530499) c3(uncharacterized protein C4orf51 isoform X1) c4(326386, 326387) c5(326388, 326389, 326390, 326391, 326392, 326393, 326394, 326395, 326396, 326397, 326398, 326399) c6( ) c7(ac); #c1(C5) c2(NP_001726) c3(complement C5 preproprotein) c4(120551) c5(120552, 120553, 120554, 120555, 120556, 120557) c6( ) c7(ng, gV, bL, ajy, dD, bM, Dw, iW, al, fF, cL, j, eq, C, Jx, ai, dP, ke, F, Bc, axE, IG, Ds, cy, JK, K, ey, ji, db, eu, uQ, A, oV, sp, DN, fO, axu, eZ, lo, ajz, cM, axD, OW, W, ac, afc, mk, Hb, y, qR, B); #c1(C5AR1) c2(NP_001727) c3(C5a anaphylaxia chemotactic receptor 1) c4(120558) c5(120559, 120560, 120561, 120562, 120563, 120564) c6( ) c7(ng, gV, T, bM, dK, iW, axF, dG, v, kD, C, yV, Jx, ai, ke, F, afn, axE, IG, cy, ey, K, ji, H, af, aa, IR, fO, ih, aq, lo, ajz, wA, bz, axG, W, c, eM, wO, vy, at, dy, Hb, fD, y, B, L); #c1(C5AR2) c2(NP_001258679) c3(C5a anaphylatoxin chemotactic receptor 2) c4(96317) c5(96318, 96319, 96320, 96321, 96322, 96323, 96324, 96325, 96326, 96327) c6( ) c7(bL, Fi, v, j, ji, dQ); #c1(C5orf22) c2(NP_060826) c3(UPF0489 protein C5orf22) c4(198012) c5(198013, 198014, 198015, 198016, 198017, 198018, 198019) c6( ) c7(c); #c1(C5orf22) c2(XP_006714542) c3(UPF0489 protein C5orf22 isoform X2) c4(287901, 287902) c5( ) c6( ) c7(c); #c1(C5orf22) c2(XP_006714543) c3(UPF0489 protein C5orf22 isoform X3) c4( ) c5(287903, 287904, 287905, 287906, 287907, 287908, 287909, 287910, 287911, 287912, 287913) c6( ) c7(c); #c1(C5orf30) c2(NP_149988) c3(UNC119-binding protein C5orf30) c4(227721) c5(227722, 227723, 227724, 227725, 227726, 227727, 227728, 227729, 227730, 227731, 227732, 227733, 227734, 227735, 227736, 227737, 227738) c6( ) c7(y); #c1(C5orf34) c2(NP_940968) c3(uncharacterized protein C5orf34) c4(260209) c5(260210, 260211, 260212, 260213, 260214, 260215) c6( ) c7(j); #c1(C5orf38) c2(NP_001281266) c3(protein CEI isoform 2 precursor) c4(111632) c5(111633, 111634, 111635, 111636, 111637, 111638, 111639) c6(111640) c7(cd, ac, c); #c1(C5orf38) c2(NP_848664) c3(protein CEI isoform 1 precursor) c4(254147) c5(254148, 254149, 254150, 254151, 254152, 254153, 254154, 254155) c6(254156, 254157) c7(cd, ac, c); #c1(C5orf38) c2(XP_005248313) c3(protein CEI isoform X1) c4( ) c5(268302) c6( ) c7(cd, ac, c); #c1(C5orf42) c2(NP_075561) c3(uncharacterized protein C5orf42) c4(213948) c5(213949, 213950, 213951, 213952, 213953, 213954, 213955, 213956, 213957, 213958) c6( ) c7(axl, axH); #c1(C5orf42) c2(XP_005248403) c3(uncharacterized protein C5orf42 isoform X3) c4(268380) c5(268381, 268382, 268383, 268384, 268385, 268386) c6( ) c7(axl, axH); #c1(C5orf42) c2(XP_005248406) c3(uncharacterized protein C5orf42 isoform X7) c4(268387) c5(268388, 268389, 268390, 268391, 268392, 268393) c6( ) c7(axl, axH); #c1(C5orf63) c2(NP_001157950) c3(glutaredoxin-like protein C5orf63 isoform 2) c4(62945) c5(62946, 62947, 62948, 62949, 62950, 62951) c6( ) c7(IB); #c1(C5orf63) c2(NP_001157951) c3(glutaredoxin-like protein C5orf63 isoform 1) c4(62952) c5(62953, 62954, 62955, 62956, 62957, 62958) c6( ) c7(IB); #c1(C6) c2(NP_000056) c3(complement component C6 precursor) c4(1072) c5( ) c6( ) c7(W, fR, up, eg, eR, hc, iW, axJ, IS, axK, C, wt, xe); #c1(C6) c2(XP_005248414) c3(complement component C6 isoform X5) c4( ) c5(268394, 268395, 268396, 268397, 268398, 268399, 268400, 268401, 268402, 268403) c6( ) c7(W, fR, up, eg, eR, hc, iW, axJ, IS, axK, C, wt, xe); #c1(C6orf10) c2(XP_011512542) c3(uncharacterized protein C6orf10 isoform X8) c4(303376, 303377, 303378, 303379, 303380) c5(303381, 303382, 303383, 303384, 303385, 303386, 303387, 303388, 303389, 303390, 303391, 303392, 303393, 303394, 303395, 303396, 303397, 303398, 303399, 303400, 303401, 303402) c6( ) c7(bL, bM, A, cr, cz, gZ, hD, cL, eZ, j, pt, V, bc, y); #c1(C6orf10) c2(XP_011512544) c3(uncharacterized protein C6orf10 isoform X9) c4(303403) c5( ) c6( ) c7(bL, bM, A, cr, cz, gZ, hD, cL, eZ, j, pt, V, bc, y); #c1(C6orf10) c2(XP_011512545) c3(uncharacterized protein C6orf10 isoform X18) c4( ) c5(303404, 303405, 303406, 303407, 303408, 303409, 303410, 303411, 303412, 303413) c6( ) c7(bL, bM, A, cr, cz, gZ, hD, cL, eZ, j, pt, V, bc, y); #c1(C6orf10) c2(XP_011512548) c3(uncharacterized protein C6orf10 isoform X11) c4(303414, 303415) c5(303416, 303417, 303418, 303419, 303420, 303421, 303422, 303423, 303424, 303425, 303426, 303427) c6( ) c7(bL, bM, A, cr, cz, gZ, hD, cL, eZ, j, pt, V, bc, y); #c1(C6orf10) c2(XP_011545475) c3(uncharacterized protein C6orf10 isoform X25) c4( ) c5(344156, 344157, 344158, 344159, 344160, 344161) c6( ) c7(bL, bM, A, cr, cz, gZ, hD, cL, eZ, j, pt, V, bc, y); #c1(C6orf10) c2(XP_011545478) c3(uncharacterized protein C6orf10 isoform X3) c4(344162, 344163, 344164, 344165, 344166, 344167, 344168) c5(344169, 344170, 344171, 344172, 344173, 344174, 344175, 344176, 344177, 344178, 344179, 344180, 344181, 344182, 344183, 344184, 344185, 344186, 344187, 344188, 344189, 344190, 344191, 344192, 344193, 344194, 344195, 344196, 344197, 344198, 344199, 344200, 344201, 344202, 344203, 344204, 344205, 344206, 344207, 344208, 344209, 344210, 344211, 344212, 344213, 344214, 344215, 344216, 344217) c6( ) c7(bL, bM, A, cr, cz, gZ, hD, cL, eZ, j, pt, V, bc, y); #c1(C6orf10) c2(XP_011546134) c3(uncharacterized protein C6orf10 isoform X10) c4(344849) c5(344850, 344851, 344852, 344853, 344854, 344855, 344856, 344857, 344858, 344859) c6( ) c7(bL, bM, A, cr, cz, gZ, hD, cL, eZ, j, pt, V, bc, y); #c1(C6orf10) c2(XP_011546684) c3(uncharacterized protein C6orf10 isoform X25) c4(345454) c5(345455, 345456, 345457, 345458, 345459, 345460, 345461, 345462, 345463, 345464, 345465, 345466, 345467, 345468, 345469, 345470) c6( ) c7(bL, bM, A, cr, cz, gZ, hD, cL, eZ, j, pt, V, bc, y); #c1(C6orf106) c2(NP_073595) c3(uncharacterized protein C6orf106 isoform b) c4(213022) c5(213023, 213024, 213025, 213026, 213027, 213028) c6( ) c7(xb); #c1(C6orf106) c2(NP_077270) c3(uncharacterized protein C6orf106 isoform a) c4(214840, 214841) c5(214842, 214843, 214844, 214845, 214846, 214847, 214848, 214849, 214850, 214851, 214852, 214853) c6( ) c7(xb); #c1(C6orf15) c2(NP_054789) c3(uncharacterized protein C6orf15 precursor) c4(177929, 177930, 177931) c5(177932, 177933, 177934, 177935, 177936, 177937, 177938, 177939, 177940, 177941, 177942, 177943, 177944, 177945, 177946, 177947, 177948, 177949, 177950, 177951, 177952, 177953, 177954, 177955, 177956, 177957, 177958, 177959, 177960, 177961, 177962, 177963, 177964, 177965, 177966) c6(177967, 177968, 177969, 177970, 177971, 177972, 177973, 177974) c7(hH, AW, y, eZ); #c1(C6orf25) c2(NP_079536) c3(protein G6b isoform G6b-A precursor) c4(218875, 218876) c5(218877, 218878, 218879, 218880, 218881, 218882, 218883, 218884, 218885, 218886, 218887, 218888, 218889, 218890, 218891, 218892, 218893, 218894, 218895, 218896, 218897, 218898, 218899, 218900, 218901, 218902, 218903, 218904, 218905) c6( ) c7(A, ac, qb, jx, eZ, fL, iV, mC, aoH); #c1(C6orf25) c2(NP_612116) c3(protein G6b isoform G6b-B precursor) c4(235878, 235879) c5(235880, 235881, 235882, 235883, 235884, 235885, 235886, 235887, 235888, 235889, 235890, 235891, 235892, 235893, 235894, 235895, 235896, 235897, 235898, 235899, 235900, 235901, 235902, 235903, 235904, 235905, 235906, 235907, 235908) c6( ) c7(A, ac, qb, jx, eZ, fL, iV, mC, aoH); #c1(C6orf25) c2(NP_612117) c3(protein G6b isoform G6b-C precursor) c4(235909, 235910) c5(235911, 235912, 235913, 235914, 235915, 235916, 235917, 235918, 235919, 235920, 235921, 235922, 235923, 235924, 235925, 235926, 235927, 235928, 235929, 235930, 235931, 235932, 235933, 235934, 235935, 235936, 235937, 235938, 235939) c6( ) c7(A, ac, qb, jx, eZ, fL, iV, mC, aoH); #c1(C6orf25) c2(NP_612118) c3(protein G6b isoform G6b-D precursor) c4(235940) c5(235941, 235942, 235943, 235944, 235945, 235946, 235947, 235948, 235949, 235950, 235951, 235952, 235953, 235954, 235955, 235956, 235957, 235958, 235959, 235960, 235961, 235962, 235963, 235964, 235965, 235966) c6( ) c7(A, ac, qb, jx, eZ, fL, iV, mC, aoH); #c1(C6orf25) c2(NP_612119) c3(protein G6b isoform G6b-E precursor) c4(235967) c5(235968, 235969, 235970, 235971, 235972, 235973, 235974, 235975, 235976, 235977, 235978, 235979, 235980, 235981, 235982, 235983, 235984, 235985, 235986, 235987, 235988, 235989, 235990, 235991, 235992, 235993) c6( ) c7(A, ac, qb, jx, eZ, fL, iV, mC, aoH); #c1(C6orf25) c2(NP_612121) c3(protein G6b isoform G6b-G precursor) c4(235994) c5(235995, 235996, 235997, 235998, 235999, 236000) c6( ) c7(A, ac, qb, jx, eZ, fL, iV, mC, aoH); #c1(C6orf47) c2(NP_067007) c3(uncharacterized protein C6orf47) c4(208263, 208264, 208265) c5(208266, 208267, 208268, 208269, 208270, 208271, 208272, 208273, 208274, 208275, 208276, 208277, 208278, 208279, 208280, 208281, 208282, 208283, 208284, 208285, 208286, 208287, 208288, 208289, 208290, 208291, 208292, 208293, 208294, 208295, 208296, 208297, 208298, 208299, 208300, 208301) c6( ) c7(y, A, eZ); #c1(C6orf48) c2(NP_001274413) c3(protein G8) c4(106381) c5(106382, 106383, 106384, 106385, 106386, 106387, 106388, 106389, 106390, 106391, 106392, 106393, 106394, 106395, 106396, 106397, 106398, 106399, 106400, 106401, 106402, 106403, 106404, 106405, 106406, 106407, 106408, 106409, 106410, 106411, 106412, 106413, 106414, 106415, 106416, 106417, 106418, 106419, 106420, 106421, 106422, 106423, 106424, 106425, 106426, 106427, 106428, 106429, 106430, 106431, 106432, 106433, 106434, 106435, 106436, 106437, 106438, 106439, 106440, 106441, 106442, 106443, 106444, 106445, 106446, 106447, 106448, 106449, 106450, 106451, 106452, 106453, 106454, 106455, 106456, 106457, 106458, 106459, 106460, 106461, 106462, 106463, 106464, 106465, 106466, 106467, 106468, 106469, 106470, 106471, 106472, 106473, 106474, 106475, 106476, 106477, 106478, 106479, 106480, 106481, 106482, 106483, 106484, 106485, 106486, 106487, 106488, 106489, 106490, 106491, 106492, 106493, 106494, 106495, 106496, 106497, 106498, 106499, 106500, 106501, 106502, 106503, 106504, 106505, 106506, 106507, 106508, 106509, 106510, 106511, 106512, 106513, 106514, 106515, 106516, 106517, 106518, 106519, 106520, 106521, 106522, 106523, 106524, 106525, 106526, 106527, 106528, 106529, 106530, 106531, 106532, 106533) c6( ) c7(eZ); #c1(C6orf89) c2(NP_001273564) c3(bombesin receptor-activated protein C6orf89 isoform b) c4(105294) c5(105295, 105296, 105297, 105298, 105299, 105300) c6( ) c7(cW, aw, j, ei); #c1(C6orf89) c2(NP_001273565) c3(bombesin receptor-activated protein C6orf89 isoform c) c4( ) c5(105301, 105302, 105303, 105304, 105305, 105306, 105307, 105308) c6( ) c7(cW, aw, j, ei); #c1(C6orf89) c2(NP_689947) c3(bombesin receptor-activated protein C6orf89 isoform a) c4(244450, 244451, 244452, 244453) c5(244454, 244455, 244456, 244457, 244458, 244459, 244460, 244461, 244462, 244463, 244464, 244465, 244466, 244467, 244468, 244469, 244470, 244471, 244472, 244473) c6( ) c7(cW, aw, j, ei); #c1(C7) c2(NP_000578) c3(complement component C7 precursor) c4(13132, 13133, 13134) c5(13135, 13136, 13137, 13138, 13139, 13140) c6( ) c7(W, axL, Cw, dK, aw, iW, n, pD, V, cd); #c1(C7) c2(XP_011512424) c3(complement component C7 isoform X1) c4( ) c5(303115, 303116, 303117, 303118, 303119, 303120, 303121, 303122, 303123, 303124, 303125, 303126) c6( ) c7(W, axL, Cw, dK, aw, iW, n, pD, V, cd); #c1(C7orf49) c2(NP_001230683) c3(modulator of retrovirus infection homolog isoform 3) c4(86559) c5(86560, 86561, 86562, 86563, 86564, 86565, 86566, 86567) c6( ) c7(fR); #c1(C7orf49) c2(NP_076938) c3(modulator of retrovirus infection homolog isoform 1) c4(214313, 214314) c5(214315, 214316, 214317, 214318, 214319, 214320, 214321, 214322, 214323, 214324, 214325, 214326, 214327, 214328) c6( ) c7(fR); #c1(C7orf57) c2(NP_001254795) c3(uncharacterized protein C7orf57 isoform 3) c4( ) c5(94951, 94952, 94953, 94954, 94955) c6( ) c7(c); #c1(C7orf57) c2(XP_011513423) c3(uncharacterized protein C7orf57 isoform X1) c4(305673, 305674) c5(305675, 305676, 305677, 305678, 305679, 305680, 305681, 305682, 305683, 305684, 305685, 305686) c6( ) c7(c); #c1(C7orf57) c2(XP_011513425) c3(uncharacterized protein C7orf57 isoform X4) c4(305687) c5(305688) c6( ) c7(c); #c1(C7orf60) c2(NP_689769) c3(probable methyltransferase BTM2 homolog) c4(243902, 243903) c5(243904, 243905, 243906, 243907, 243908, 243909, 243910, 243911, 243912, 243913, 243914, 243915) c6( ) c7(alv); #c1(C7orf62) c2(XP_011514206) c3(uncharacterized protein C7orf62 isoform X1) c4(306816) c5(306817, 306818, 306819, 306820, 306821, 306822) c6( ) c7(aw, ac, bA); #c1(C7orf65) c2(NP_001116537) c3(uncharacterized protein C7orf65) c4(43901) c5(43902, 43903, 43904, 43905, 43906, 43907) c6( ) c7(aw, af); #c1(C7orf69) c2(NP_079307) c3(uncharacterized protein C7orf69 isoform a precursor) c4(217730) c5(217731, 217732, 217733, 217734, 217735, 217736, 217737, 217738) c6(217739, 217740) c7(AW); #c1(C7orf72) c2(NP_001155306) c3(uncharacterized protein C7orf72) c4(61581) c5(61582, 61583, 61584, 61585, 61586, 61587) c6( ) c7(af, eZ); #c1(C8orf34) c2(NP_001182568) c3(uncharacterized protein C8orf34 isoform 2) c4(75066) c5(75067, 75068, 75069, 75070, 75071, 75072) c6( ) c7(oe, aw); #c1(C8orf34) c2(NP_443190) c3(uncharacterized protein C8orf34 isoform 1) c4(229767, 229768, 229769) c5(229770, 229771, 229772, 229773, 229774, 229775, 229776, 229777, 229778, 229779, 229780, 229781, 229782, 229783, 229784, 229785, 229786, 229787) c6( ) c7(oe, aw); #c1(C8orf34) c2(XP_011515749) c3(uncharacterized protein C8orf34 isoform X3) c4(308553) c5( ) c6( ) c7(oe, aw); #c1(C8orf34) c2(XP_011515750) c3(uncharacterized protein C8orf34 isoform X4) c4(308554) c5(308555, 308556, 308557, 308558, 308559, 308560, 308561, 308562, 308563, 308564, 308565, 308566) c6( ) c7(oe, aw); #c1(C8orf37) c2(NP_808880) c3(protein C8orf37) c4(252988) c5(252989, 252990, 252991, 252992, 252993, 252994) c6( ) c7(aw, W, nx, cd, axM); #c1(C8orf4) c2(NP_064515) c3(uncharacterized protein C8orf4) c4(202831) c5(202832, 202833, 202834, 202835, 202836, 202837) c6( ) c7(hd, iU, nB, bE, aW, PX, aA, aT, bB, aF); #c1(C8orf46) c2(NP_689978) c3(uncharacterized protein C8orf46) c4(244638) c5(244639, 244640, 244641, 244642, 244643, 244644) c6( ) c7(dy); #c1(C8orf48) c2(NP_001007091) c3(uncharacterized protein C8orf48) c4(22484) c5(22485, 22486, 22487, 22488, 22489, 22490) c6( ) c7(oe, af, dY); #c1(C8orf86) c2(NP_997295) c3(uncharacterized protein C8orf86 isoform 1) c4(265390) c5(265391, 265392, 265393, 265394, 265395, 265396) c6( ) c7(an); #c1(C9) c2(NP_001728) c3(complement component C9 precursor) c4(120565) c5(120566, 120567, 120568, 120569, 120570, 120571) c6( ) c7(dP, ajy, Bv, VR, W, axP, axO, oV, afc, iW, jE, axN, an, B); #c1(C9orf106) c2(NP_001012733) c3(putative uncharacterized protein C9orf106) c4( ) c5(25192) c6( ) c7(aw); #c1(C9orf135) c2(NP_001010940) c3(uncharacterized protein C9orf135) c4(24267) c5(24268, 24269, 24270, 24271, 24272, 24273) c6( ) c7(Kc); #c1(C9orf152) c2(NP_001013011) c3(uncharacterized protein C9orf152) c4(25429) c5(25430, 25431, 25432, 25433, 25434, 25435) c6( ) c7(aw); #c1(C9orf156) c2(NP_057565) c3(nef-associated protein 1) c4(191370, 191371, 191372) c5(191373, 191374, 191375, 191376, 191377, 191378, 191379) c6( ) c7(Na, cr, n, tv, Nc, tu, C, af, amL); #c1(C9orf156) c2(XP_005252107) c3(nef-associated protein 1 isoform X4) c4(271554) c5(271555, 271556, 271557, 271558, 271559) c6( ) c7(Na, cr, n, tv, Nc, tu, C, af, amL); #c1(C9orf156) c2(XP_011517078) c3(nef- associated protein 1 isoform X2) c4( ) c5(310593, 310594, 310595, 310596, 310597, 310598, 310599, 310600, 310601, 310602, 310603) c6( ) c7(Na, cr, n, tv, Nc, tu, C, af, amL); #c1(C9orf156) c2(XP_011517081) c3(nef-associated protein 1 isoform X3) c4(310604) c5(310605, 310606, 310607, 310608, 310609, 310610, 310611) c6( ) c7(Na, cr, n, tv, Nc, tu, C, af, amL); #c1(C9orf170) c2(NP_001001709) c3(uncharacterized protein C9orf170) c4(18959) c5(18960, 18961, 18962, 18963, 18964, 18965) c6( ) c7(fe, he); #c1(C9orf171) c2(NP_001269886) c3(uncharacterized protein C9orf171 isoform 2) c4(103035) c5(103036, 103037, 103038, 103039, 103040, 103041) c6( ) c7(aw, cd); #c1(C9orf171) c2(NP_997300) c3(uncharacterized protein C9orf171 isoform 1) c4(265397) c5(265398, 265399, 265400, 265401, 265402, 265403) c6( ) c7(aw, cd); #c1(C9orf3) c2(NP_001180260) c3(aminopeptidase 0 isoform 4) c4(73568, 73569) c5(73570, 73571, 73572, 73573, 73574, 73575, 73576, 73577, 73578, 73579, 73580, 73581) c6( ) c7(wL, c); #c1(C9orf3) c2(NP_116212) c3(aminopeptidase 0 isoform 2) c4(225770, 225771, 225772, 225773, 225774, 225775, 225776, 225777) c5(225778, 225779, 225780, 225781, 225782, 225783, 225784, 225785, 225786, 225787, 225788, 225789, 225790, 225791, 225792, 225793, 225794, 225795, 225796, 225797, 225798, 225799, 225800, 225801, 225802, 225803, 225804, 225805, 225806, 225807) c6( ) c7(wL, c); #c1(C9orf3) c2(XP_005252341) c3(aminopeptidase 0 isoform X5) c4( ) c5(271662, 271663, 271664, 271665, 271666, 271667) c6( ) c7(wL, c); #c1(C9orf3) c2(XP_006717369) c3(aminopeptidase 0 isoform X1) c4(291016, 291017, 291018) c5(291019, 291020, 291021, 291022, 291023, 291024, 291025, 291026, 291027, 291028, 291029, 291030) c6( ) c7(wL, c); #c1(C9orf3) c2(XP_011517425) c3(aminopeptidase 0 isoform X7) c4(311138) c5(311139) c6( ) c7(wL, c); #c1(C9orf3) c2(XP_011517434) c3(aminopeptidase 0 isoform X16) c4( ) c5(311140, 311141, 311142, 311143, 311144, 311145, 311146, 311147, 311148, 311149, 311150) c6( ) c7(wL, c); #c1(C9orf3) c2(XP_011517437) c3(aminopeptidase 0 isoform X19) c4( ) c5(311151, 311152, 311153, 311154, 311155, 311156) c6( ) c7(wL, c); #c1(C9orf43) c2(NP_001265558) c3(uncharacterized protein C9orf43 isoform 1) c4(98835) c5(98836, 98837, 98838, 98839, 98840, 98841, 98842, 98843) c6( ) c7(Na, Nc); #c1(C9orf43) c2(NP_001265559) c3(uncharacterized protein C9orf43 isoform 2) c4( ) c5(98844, 98845) c6( ) c7(Na, Nc); #c1(C9orf66) c2(NP_689782) c3(uncharacterized protein C9orf66) c4(243939) c5(243940, 243941, 243942, 243943, 243944, 243945) c6( ) c7(cd); #c1(C9orf72) c2(NP_060795) c3(protein C9orf72 isoform a) c4(197873, 197874) c5(197875, 197876, 197877, 197878, 197879, 197880) c6( ) c7(iH, Tb, Ol, oe, yY, GC, n, Vd, j, nA, PJ, V, PW, aV, WY, sO, axU, bK, K, an, he, af, axR, axW, tx, TQ, gl, aaE, axQ, axT, xw, avz, axS, bb, c, aaG, U, axV, act, y, gD); #c1(C9orf72) c2(NP_659442) c3(protein C9orf72 isoform b) c4( ) c5(239915, 239916, 239917, 239918, 239919, 239920, 239921, 239922, 239923, 239924) c6( ) c7(iH, Tb, Ol, oe, yY, GC, n, Vd, j, nA, PJ, V, PW, aV, WY, sO, axU, bK, K, an, he, af, axR, axW, tx, TQ, gl, aaE, axQ, axT, xw, avz, axS, bb, c, aaG, U, axV, act, y, gD); #c1(C9orf85) c2(NP_872311) c3(uncharacterized protein C9orf85) c4(256087, 256088) c5(256089, 256090, 256091, 256092, 256093, 256094, 256095, 256096, 256097, 256098, 256099, 256100) c6( ) c7(oe); #c1(C9orf85) c2(XP_011516529) c3(uncharacterized protein C9orf85 isoform X2) c4(309946) c5( ) c6( ) c7(oe); #c1(C9orf85) c2(XP_011516530) c3(uncharacterized protein C9orf85 isoform X3) c4( ) c5(309947, 309948, 309949, 309950, 309951, 309952) c6( ) c7(oe); #c1(C9orf9) c2(NP_061829) c3(uncharacterized protein C9orf9) c4(200638) c5(200639, 200640, 200641, 200642, 200643, 200644) c6( ) c7(Xd, ok, ao); #c1(C9orf91) c2(NP_694590) c3(transmembrane protein C9orf91) c4(245337) c5(245338, 245339, 245340, 245341, 245342, 245343) c6( ) c7(AW); #c1(C9orf91) c2(XP_006717060) c3(transmembrane protein C9orf91 isoform X4) c4(290664) c5(290665, 290666, 290667, 290668, 290669, 290670) c6( ) c7(AW); #c1(CA1) c2(XP_011515886) c3(carbonic anhydrase 1 isoform X1) c4(308904, 308905, 308906, 308907, 308908, 308909, 308910, 308911) c5(308912, 308913, 308914, 308915, 308916, 308917, 308918, 308919, 308920, 308921, 308922, 308923, 308924, 308925, 308926, 308927, 308928, 308929, 308930, 308931, 308932, 308933, 308934, 308935, 308936, 308937, 308938, 308939, 308940, 308941, 308942, 308943, 308944, 308945, 308946, 308947, 308948, 308949, 308950, 308951, 308952, 308953, 308954, 308955, 308956, 308957, 308958, 308959, 308960, 308961, 308962, 308963, 308964, 308965, 308966, 308967, 308968, 308969, 308970, 308971, 308972, 308973, 308974, 308975, 308976, 308977, 308978, 308979, 308980, 308981, 308982, 308983) c6( ) c7(bE, NT, hr, aA, mE, r, bB, vy, dy, ci, g, iV, y, it, q); #c1(CA10) c2(NP_001076003) c3(carbonic anhydrase-related protein 10 precursor) c4(37288, 37289) c5(37290, 37291, 37292, 37293, 37294, 37295, 37296, 37297, 37298, 37299, 37300, 37301, 37302, 37303, 37304, 37305, 37306, 37307, 37308, 37309) c6( ) c7(qw, ac, aW, aw, aT, v, Gp, fb, fq, bA); #c1(CA11) c2(NP_001208) c3(carbonic anhydrase-related protein 11 precursor) c4(83732) c5(83733, 83734, 83735, 83736, 83737, 83738, 83739, 83740, 83741) c6( ) c7(T, Kv, aW, if, aA, aT, aF, qN, cm, fb); #c1(CA12) c2(NP_001209) c3(carbonic anhydrase 12 isoform 1 precursor) c4(83742) c5(83743, 83744, 83745, 83746, 83747, 83748) c6( ) c7(T, ac, nB, ig, aW, if, aT, axX, n, axY, cd, fr, qN, as, dw, AO, aed, B); #c1(CA12) c2(NP_001280571) c3(carbonic anhydrase 12 isoform 3 precursor) c4(111536) c5(111537, 111538, 111539, 111540, 111541, 111542) c6( ) c7(T, ac, nB, ig, aW, if, aT, axX, n, axY, cd, fr, qN, as, dw, AO, aed, B); #c1(CA12) c2(NP_996808) c3(carbonic anhydrase 12 isoform 2 precursor) c4(264605) c5(264606, 264607, 264608, 264609, 264610, 264611) c6( ) c7(T, ac, nB, ig, aW, if, aT, axX, n, axY, cd, fr, qN, as, dw, AO, aed, B); #c1(CA13) c2(NP_940986) c3(carbonic anhydrase 13) c4(260260) c5(260261, 260262, 260263, 260264, 260265, 260266) c6( ) c7(W, aW, r, aT, fd, y, q); #c1(CA2) c2(NP_000058) c3(carbonic anhydrase 2 isoform 1) c4(1073) c5(1074, 1075, 1076, 1077, 1078, 1079) c6( ) c7(T, aC, id, DD, zs, e, Kk, aoE, aA, cR, j, nA, eJ, qH, dP, aE, hb, dL, K, eL, af, dx, bA, ao, jf, xQ, if, A, s, ajT, cW, cr, ge, axZ, g, cl, eE, f, iV, dr, OC, ar, mO, pg, cS, dy, pw, be, jM, y, it, B, jr, aya); #c1(CA3) c2(NP_005172) c3(carbonic anhydrase 3) c4(153622, 153623) c5(153624, 153625, 153626, 153627, 153628, 153629, 153630, 153631, 153632, 153633, 153634, 153635) c6( ) c7(jp, aw, fQ, uY, aq, v, iR, B); #c1(CA4) c2(NP_000708) c3(carbonic anhydrase 4 precursor) c4(14745) c5(14746, 14747, 14748, 14749, 14750, 14751) c6( ) c7(xX, ayb, IR, DD, wV, fr, K, m, t, nC, X, de); #c1(CA5A) c2(NP_001730) c3(carbonic anhydrase 5A, mitochondrial precursor) c4(120572) c5(120573, 120574, 120575, 120576, 120577, 120578) c6( ) c7(T, oW, bK, dw, aye, qW, is); #c1(CA6) c2(XP_011540385) c3(carbonic anhydrase 6 isoform X1) c4( ) c5(338880, 338881, 338882, 338883, 338884, 338885, 338886, 338887) c6( ) c7(ka, ki, rl, r, aye, xY, ayd); #c1(CA8) c2(NP_004047) c3(carbonic anhydrase-related protein) c4(143143) c5(143144, 143145, 143146, 143147, 143148, 143149) c6( ) c7(bv, T, cc, ky, s, bE, eM, Y, X, mx, adl, r, bB, im, nA, g, q, MG, bA, ayf); #c1(CAB39) c2(NP_001124322) c3(calcium-binding protein 39) c4(48667) c5(48668, 48669, 48670, 48671, 48672, 48673, 48674, 48675, 48676, 48677, 48678, 48679, 48680, 48681) c6( ) c7(T, ey, eA, MC); #c1(CAB39L) c2(NP_001274268) c3(calcium-binding protein 39-like) c4(106149, 106150, 106151, 106152, 106153) c5(106154, 106155, 106156, 106157, 106158, 106159, 106160, 106161, 106162, 106163, 106164, 106165, 106166, 106167, 106168, 106169, 106170, 106171, 106172, 106173, 106174, 106175, 106176, 106177, 106178, 106179, 106180, 106181, 106182, 106183, 106184, 106185, 106186, 106187, 106188, 106189, 106190, 106191, 106192, 106193, 106194, 106195) c6( ) c7(aC, iZ); #c1(CABIN1) c2(NP_036427) c3(calcineurin-binding protein cabin-1 isoform a) c4(173784) c5(173785, 173786, 173787, 173788, 173789, 173790, 173791, 173792, 173793, 173794) c6( ) c7(fU, ai, eR, c, cH, aW, eE, jx, aT, cz, n, cd, m, Hb, ci, t, fy, EA, ayg, B, vi); #c1(CABIN1) c2(XP_005261477) c3(calcineurin-binding protein cabin-1 isoform X6) c4(277368) c5(277369, 277370, 277371, 277372, 277373, 277374) c6( ) c7(fU, ai, eR, c, cH, aW, eE, jx, aT, cz, n, cd, m, Hb, ci, t, fy, EA, ayg, B, vi); #c1(CABIN1) c2(XP_006724245) c3(calcineurin-binding protein cabin-1 isoform X8) c4(295874) c5( ) c6( ) c7(fU, ai, eR, c, cH, aW, eE, jx, aT, cz, n, cd, m, Hb, ci, t, fy, EA, ayg, B, vi); #c1(CABIN1) c2(XP_006724247) c3(calcineurin-binding protein cabin-1 isoform X18) c4( ) c5(295875, 295876, 295877, 295878, 295879, 295880) c6( ) c7(fU, ai, eR, c, cH, aW, eE, jx, aT, cz, n, cd, m, Hb, ci, t, fy, EA, ayg, B, vi); #c1(CABLES1) c2(NP_001094089) c3(CDK5 and ABL1 enzyme substrate 1 isoform 2) c4(40634, 40635) c5(40636, 40637, 40638, 40639, 40640, 40641) c6( ) c7(T, ac, bE, X, r, bB, m, cl, t, Yr, q, Qe); #c1(CABLES1) c2(NP_001243367) c3(CDK5 and ABL1 enzyme substrate 1 isoform 3) c4( ) c5(90580, 90581, 90582, 90583, 90584) c6( ) c7(T, ac, bE, X, r, bB, m, cl, t, Yr, q, Qe); #c1(CABLES1) c2(NP_612384) c3(CDK5 and ABL1 enzyme substrate 1 isoform 1) c4(236320) c5(236321, 236322, 236323, 236324, 236325, 236326, 236327) c6( ) c7(T, ac, bE, X, r, bB, m, cl, t, Yr, q, Qe); #c1(CABP2) c2(NP_057450) c3(calcium-binding protein 2) c4(190946) c5(190947, 190948, 190949, 190950, 190951, 190952) c6( ) c7(cm, ayh); #c1(CABP4) c2(NP_001287824) c3(calcium-binding protein 4 isoform b) c4(112924) c5(112925, 112926, 112927, 112928, 112929, 112930) c6( ) c7(cm, ayj, ayi, IR); #c1(CABP4) c2(NP_660201) c3(calcium-binding protein 4 isoform a) c4(240503) c5(240504, 240505, 240506, 240507, 240508, 240509) c6( ) c7(cm, ayj, ayi, IR); #c1(CABS1) c2(NP_149113) c3(calcium-binding and spermatid-specific protein 1) c4(227218) c5(227219, 227220, 227221, 227222, 227223, 227224) c6( ) c7(aw); #c1(CABYR) c2(NP_036321) c3(calcium-binding tyrosine phosphorylation-regulated protein isoform a) c4(172981, 172982) c5(172983, 172984, 172985, 172986, 172987, 172988) c6( ) c7(dB, T, bz, bu); #c1(CABYR) c2(NP_619584) c3(calcium-binding tyrosine phosphorylation-regulated protein isoform d) c4( ) c5(236894, 236895, 236896, 236897, 236898) c6( ) c7(dB, T, bz, bu); #c1(CABYR) c2(NP_722452) c3(calcium-binding tyrosine phosphorylation-regulated protein isoform b) c4(246731) c5(246732, 246733, 246734, 246735, 246736, 246737, 246738) c6( ) c7(dB, T, bz, bu); #c1(CABYR) c2(NP_722453) c3(calcium-binding tyrosine phosphorylation-regulated protein isoform c) c4(246739, 246740) c5(246741, 246742, 246743, 246744, 246745, 246746, 246747, 246748, 246749, 246750) c6( ) c7(dB, T, bz, bu); #c1(CABYR) c2(NP_722454) c3(calcium-binding tyrosine phosphorylation-regulated protein isoform e) c4(246751) c5(246752, 246753, 246754, 246755, 246756, 246757) c6( ) c7(dB, T, bz, bu); #c1(CABYR) c2(XP_005258304) c3(calcium-binding tyrosine phosphorylation-regulated protein isoform X3) c4( ) c5(275626) c6( ) c7(dB, T, bz, bu); #c1(CACNA1A) c2(NP_001120693) c3(voltage-dependent P/Q-type calcium channel subunit alpha-1A isoform 3) c4(44603) c5(44604, 44605, 44606, 44607, 44608, 44609, 44610, 44611, 44612, 44613, 44614, 44615) c6( ) c7(dt, yY, ha, cV, rf, lb, n, acU, OY, Kh, ur, akg, nA, uu, auu, yU, aR, aym, ad, av, no, aV, ayk, aU, ayp, yZ, dL, bK, hg, an, akr, ae, af, eL, alL, Ng, yr, ayl, XK, Ub, ayn, akL, EH, la, akh, Rl, aqP, vo, nC, ayj, dr, akp, Cq, KE, ayq, ky, aki, kB, rR, Kv, akm, HN, U, nw, mk, ayo); #c1(CACNA1A) c2(NP_001120694) c3(voltage-dependent P/Q-type calcium channel subunit alpha-1A isoform 4) c4(44616, 44617, 44618) c5(44619, 44620, 44621, 44622, 44623, 44624, 44625, 44626, 44627, 44628, 44629, 44630) c6( ) c7(dt, yY, ha, cV, rf, lb, n, acU, OY, Kh, ur, akg, nA, uu, auu, yU, aR, aym, ad, av, no, aV, ayk, aU, ayp, yZ, dL, bK, hg, an, akr, ae, af, eL, alL, Ng, yr, ayl, XK, Ub, ayn, akL, EH, la, akh, Rl, aqP, vo, nC, ayj, dr, akp, Cq, KE, ayq, ky, aki, kB, rR, Kv, akm, HN, U, nw, mk, ayo); #c1(CACNA1A) c2(NP_075461) c3(voltage-dependent P/Q-type calcium channel subunit alpha-1A isoform 2) c4(213881) c5(213882, 213883, 213884, 213885, 213886, 213887) c6( ) c7(dt, yY, ha, cV, rf, lb, n, acU, OY, Kh, ur, akg, nA, uu, auu, yU, aR, aym, ad, av, no, aV, ayk, aU, ayp, yZ, dL, bK, hg, an, akr, ae, af, eL, alL, Ng, yr, ayl, XK, Ub, ayn, akL, EH, la, akh, Rl, aqP, vo, nC, ayj, dr, akp, Cq, KE, ayq, ky, aki, kB, rR, Kv, akm, HN, U, nw, mk, ayo); #c1(CACNA1B) c2(NP_000709) c3(voltage-dependent N-type calcium channel subunit alpha-1B isoform 1) c4(14752) c5(14753, 14754, 14755, 14756, 14757, 14758) c6( ) c7(Fg, s, bX); #c1(CACNA1B) c2(NP_001230741) c3(voltage-dependent N-type calcium channel subunit alpha-1B isoform 2) c4(86745) c5(86746, 86747, 86748, 86749, 86750, 86751) c6( ) c7(Fg, s, bX); #c1(CACNA1B) c2(XP_011517292) c3(voltage-dependent N-type calcium channel subunit alpha-1B isoform X1) c4( ) c5(310893, 310894, 310895, 310896, 310897, 310898, 310899) c6( ) c7(Fg, s, bX); #c1(CACNA1B) c2(XP_011517293) c3(voltage-dependent N-type calcium channel subunit alpha-1B isoform X2) c4(310900) c5(310901, 310902, 310903, 310904, 310905, 310906) c6( ) c7(Fg, s, bX); #c1(CACNA1B) c2(XP_011517295) c3(voltage-dependent N-type calcium channel subunit alpha-1B isoform X4) c4(310907, 310908) c5(310909, 310910, 310911, 310912, 310913, 310914) c6( ) c7(Fg, s, bX); #c1(CACNA1B) c2(XP_011517296) c3(voltage-dependent N-type calcium channel subunit alpha-1B isoform X5) c4(310915) c5(310916, 310917, 310918, 310919, 310920, 310921, 310922, 310923, 310924, 310925, 310926, 310927) c6( ) c7(Fg, s, bX); #c1(CACNA1B) c2(XP_011517297) c3(voltage-dependent N-type calcium channel subunit alpha-1B isoform X6) c4(310928, 310929) c5(310930, 310931, 310932, 310933, 310934, 310935, 310936, 310937, 310938, 310939, 310940, 310941) c6( ) c7(Fg, s, bX); #c1(CACNA1B) c2(XP_011517298) c3(voltage-dependent N-type calcium channel subunit alpha-1B isoform X7) c4( ) c5(310942, 310943, 310944, 310945, 310946, 310947, 310948, 310949, 310950, 310951, 310952, 310953, 310954) c6( ) c7(Fg, s, bX); #c1(CACNA1B) c2(XP_011517299) c3(voltage-dependent N-type calcium channel subunit alpha-1B isoform X8) c4(310955, 310956, 310957) c5( ) c6( ) c7(Fg, s, bX); #c1(CACNA1C) c2(NP_000710) c3(voltage-dependent L-type calcium channel subunit alpha-1C isoform 18) c4(14759) c5(14760, 14761, 14762, 14763, 14764, 14765, 14766) c6( ) c7(bL, T, dD, fR, ms, aw, ays, cV, cz, arD, bO, ajM, bS, gf, ct, nA, zU, uu, eq, aR, ke, cF, pN, Fo, vc, bK, K, he, Fg, rz, VP, mu, Cw, oV, vj, IW, Az, fe, ayr, gI, Z, vo, dr, atb, HT, hq, qa, bN, TA, ayt, ac, cA, bo, Kr, wB, vL, gZ, uJ, xg); #c1(CACNA1C) c2(NP_001123299) c3(voltage-dependent L-type calcium channel subunit alpha-1C isoform 2) c4(46869) c5(46870, 46871, 46872, 46873, 46874, 46875, 46876) c6( ) c7(bL, T, dD, fR, ms, aw, ays, cV, cz, arD, bO, ajM, bS, gf, ct, nA, zU, uu, eq, aR, ke, cF, pN, Fo, vc, bK, K, he, Fg, rz, VP, mu, Cw, oV, vj, IW, Az, fe, ayr, gI, Z, vo, dr, atb, HT, hq, qa, bN, TA, ayt, ac, cA, bo, Kr, wB, vL, gZ, uJ, xg); #c1(CACNA1C) c2(NP_001123301) c3(voltage-dependent L-type calcium channel subunit alpha-1C isoform 3) c4(46884) c5(46885, 46886, 46887, 46888, 46889, 46890, 46891) c6( ) c7(bL, T, dD, fR, ms, aw, ays, cV, cz, arD, bO, ajM, bS, gf, ct, nA, zU, uu, eq, aR, ke, cF, pN, Fo, vc, bK, K, he, Fg, rz, VP, mu, Cw, oV, vj, IW, Az, fe, ayr, gI, Z, vo, dr, atb, HT, hq, qa, bN, TA, ayt, ac, cA, bo, Kr, wB, vL, gZ, uJ, xg); #c1(CACNA1C) c2(NP_001123302) c3(voltage-dependent L-type calcium channel subunit alpha-1C isoform 4) c4(46892) c5(46893, 46894, 46895, 46896, 46897, 46898, 46899) c6( ) c7(bL, T, dD, fR, ms, aw, ays, cV, cz, arD, bO, ajM, bS, gf, ct, nA, zU, uu, eq, aR, ke, cF, pN, Fo, vc, bK, K, he, Fg, rz, VP, mu, Cw, oV, vj, IW, Az, fe, ayr, gI, Z, vo, dr, atb, HT, hq, qa, bN, TA, ayt, ac, cA, bo, Kr, wB, vL, gZ, uJ, xg); #c1(CACNA1C) c2(NP_001123303) c3(voltage-dependent L-type calcium channel subunit alpha-1C isoform 5) c4(46900) c5(46901, 46902, 46903, 46904, 46905, 46906, 46907) c6( ) c7(bL, T, dD, fR, ms, aw, ays, cV, cz, arD, bO, ajM, bS, gf, ct, nA, zU, uu, eq, aR, ke, cF, pN, Fo, vc, bK, K, he, Fg, rz, VP, mu, Cw, oV, vj, IW, Az, fe, ayr, gI, Z, vo, dr, atb, HT, hq, qa, bN, TA, ayt, ac, cA, bo, Kr, wB, vL, gZ, uJ, xg); #c1(CACNA1C) c2(NP_001123304) c3(voltage-dependent L-type calcium channel subunit alpha-1C isoform 6) c4(46908) c5(46909, 46910, 46911, 46912, 46913, 46914, 46915) c6( ) c7(bL, T, dD, fR, ms, aw, ays, cV, cz, arD, bO, ajM, bS, gf, ct, nA, zU, uu, eq, aR, ke, cF, pN, Fo, vc, bK, K, he, Fg, rz, VP, mu, Cw, oV, vj, IW, Az, fe, ayr, gI, Z, vo, dr, atb, HT, hq, qa, bN, TA, ayt, ac, cA, bo, Kr, wB, vL, gZ, uJ, xg); #c1(CACNA1C) c2(NP_001123305) c3(voltage-dependent L-type calcium channel subunit alpha-1C isoform 7) c4(46916) c5(46917, 46918, 46919, 46920, 46921, 46922, 46923) c6( ) c7(bL, T, dD, fR, ms, aw, ays, cV, cz, arD, bO, ajM, bS, gf, ct, nA, zU, uu, eq, aR, ke, cF, pN, Fo, vc, bK, K, he, Fg, rz, VP, mu, Cw, oV, vj, IW, Az, fe, ayr, gI, Z, vo, dr, atb, HT, hq, qa, bN, TA, ayt, ac, cA, bo, Kr, wB, vL, gZ, uJ, xg); #c1(CACNA1C) c2(NP_001123306) c3(voltage-dependent L-type calcium channel subunit alpha-1C isoform 8) c4(46924) c5(46925, 46926, 46927, 46928, 46929, 46930, 46931) c6( ) c7(bL, T, dD, fR, ms, aw, ays, cV, cz, arD, bO, ajM, bS, gf, ct, nA, zU, uu, eq, aR, ke, cF, pN, Fo, vc, bK, K, he, Fg, rz, VP, mu, Cw, oV, vj, IW, Az, fe, ayr, gI, Z, vo, dr, atb, HT, hq, qa, bN, TA, ayt, ac, cA, bo, Kr, wB, vL, gZ, uJ, xg); #c1(CACNA1C) c2(NP_001123307) c3(voltage-dependent L-type calcium channel subunit alpha-1C isoform 9) c4(46932, 46933) c5(46934, 46935, 46936, 46937, 46938, 46939, 46940) c6( ) c7(bL, T, dD, fR, ms, aw, ays, cV, cz, arD, bO, ajM, bS, gf, ct, nA, zU, uu, eq, aR, ke, cF, pN, Fo, vc, bK, K, he, Fg, rz, VP, mu, Cw, oV, vj, IW, Az, fe, ayr, gI, Z, vo, dr, atb, HT, hq, qa, bN, TA, ayt, ac, cA, bo, Kr, wB, vL, gZ, uJ, xg); #c1(CACNA1C) c2(NP_001123308) c3(voltage-dependent L-type calcium channel subunit alpha-1C isoform 10) c4(46941) c5(46942, 46943, 46944, 46945, 46946, 46947, 46948) c6( ) c7(bL, T, dD, fR, ms, aw, ays, cV, cz, arD, bO, ajM, bS, gf, ct, nA, zU, uu, eq, aR, ke, cF, pN, Fo, vc, bK, K, he, Fg, rz, VP, mu, Cw, oV, vj, IW, Az, fe, ayr, gI, Z, vo, dr, atb, HT, hq, qa, bN, TA, ayt, ac, cA, bo, Kr, wB, vL, gZ, uJ, xg); #c1(CACNA1C) c2(NP_001123309) c3(voltage-dependent L-type calcium channel subunit alpha-1C isoform 11) c4(46949) c5(46950, 46951, 46952, 46953, 46954, 46955, 46956) c6( ) c7(bL, T, dD, fR, ms, aw, ays, cV, cz, arD, bO, ajM, bS, gf, ct, nA, zU, uu, eq, aR, ke, cF, pN, Fo, vc, bK, K, he, Fg, rz, VP, mu, Cw, oV, vj, IW, Az, fe, ayr, gI, Z, vo, dr, atb, HT, hq, qa, bN, TA, ayt, ac, cA, bo, Kr, wB, vL, gZ, uJ, xg); #c1(CACNA1C) c2(NP_001123310) c3(voltage-dependent L-type calcium channel subunit alpha-1C isoform 12) c4(46957) c5(46958, 46959, 46960, 46961, 46962, 46963, 46964) c6( ) c7(bL, T, dD, fR, ms, aw, ays, cV, cz, arD, bO, ajM, bS, gf, ct, nA, zU, uu, eq, aR, ke, cF, pN, Fo, vc, bK, K, he, Fg, rz, VP, mu, Cw, oV, vj, IW, Az, fe, ayr, gI, Z, vo, dr, atb, HT, hq, qa, bN, TA, ayt, ac, cA, bo, Kr, wB, vL, gZ, uJ, xg); #c1(CACNA1C) c2(NP_001123311) c3(voltage-dependent L-type calcium channel subunit alpha-1C isoform 13) c4(46965) c5(46966, 46967, 46968, 46969, 46970, 46971, 46972) c6( ) c7(bL, T, dD, fR, ms, aw, ays, cV, cz, arD, bO, ajM, bS, gf, ct, nA, zU, uu, eq, aR, ke, cF, pN, Fo, vc, bK, K, he, Fg, rz, VP, mu, Cw, oV, vj, IW, Az, fe, ayr, gI, Z, vo, dr, atb, HT, hq, qa, bN, TA, ayt, ac, cA, bo, Kr, wB, vL, gZ, uJ, xg); #c1(CACNA1C) c2(NP_001123312) c3(voltage-dependent L-type calcium channel subunit alpha-1C isoform 14) c4(46973) c5(46974, 46975, 46976, 46977, 46978, 46979, 46980) c6( ) c7(bL, T, dD, fR, ms, aw, ays, cV, cz, arD, bO, ajM, bS, gf, ct, nA, zU, uu, eq, aR, ke, cF, pN, Fo, vc, bK, K, he, Fg, rz, VP, mu, Cw, oV, vj, IW, Az, fe, ayr, gI, Z, vo, dr, atb, HT, hq, qa, bN, TA, ayt, ac, cA, bo, Kr, wB, vL, gZ, uJ, xg); #c1(CACNA1C) c2(NP_001123313) c3(voltage-dependent L-type calcium channel subunit alpha-1C isoform 15) c4(46981) c5(46982, 46983, 46984, 46985, 46986, 46987, 46988, 46989, 46990, 46991, 46992, 46993, 46994) c6( ) c7(bL, T, dD, fR, ms, aw, ays, cV, cz, arD, bO, ajM, bS, gf, ct, nA, zU, uu, eq, aR, ke, cF, pN, Fo, vc, bK, K, he, Fg, rz, VP, mu, Cw, oV, vj, IW, Az, fe, ayr, gI, Z, vo, dr, atb, HT, hq, qa, bN, TA, ayt, ac, cA, bo, Kr, wB, vL, gZ, uJ, xg); #c1(CACNA1C) c2(NP_001123314) c3(voltage-dependent L-type calcium channel subunit alpha-1C isoform 16) c4(46995) c5(46996, 46997, 46998, 46999, 47000, 47001, 47002) c6( ) c7(bL, T, dD, fR, ms, aw, ays, cV, cz, arD, bO, ajM, bS, gf, ct, nA, zU, uu, eq, aR, ke, cF, pN, Fo, vc, bK, K, he, Fg, rz, VP, mu, Cw, oV, vj, IW, Az, fe, ayr, gI, Z, vo, dr, atb, HT, hq, qa, bN, TA, ayt, ac, cA, bo, Kr, wB, vL, gZ, uJ, xg); #c1(CACNA1C) c2(NP_001123315) c3(voltage-dependent L-type calcium channel subunit alpha-1C isoform 17) c4(47003) c5(47004, 47005, 47006, 47007, 47008, 47009, 47010) c6( ) c7(bL, T, dD, fR, ms, aw, ays, cV, cz, arD, bO, ajM, bS, gf, ct, nA, zU, uu, eq, aR, ke, cF, pN, Fo, vc, bK, K, he, Fg, rz, VP, mu, Cw, oV, vj, IW, Az, fe, ayr, gI, Z, vo, dr, atb, HT, hq, qa, bN, TA, ayt, ac, cA, bo, Kr, wB, vL, gZ, uJ, xg); #c1(CACNA1C) c2(NP_001123316) c3(voltage-dependent L-type calcium channel subunit alpha-1C isoform 19) c4( ) c5(47011) c6( ) c7(bL, T, dD, fR, ms, aw, ays, cV, cz, arD, bO, ajM, bS, gf, ct, nA, zU, uu, eq, aR, ke, cF, pN, Fo, vc, bK, K, he, Fg, rz, VP, mu, Cw, oV, vj, IW, Az, fe, ayr, gI, Z, vo, dr, atb, HT, hq, qa, bN, TA, ayt, ac, cA, bo, Kr, wB, vL, gZ, uJ, xg); #c1(CACNA1C) c2(NP_001123318) c3(voltage-dependent L-type calcium channel subunit alpha-1C isoform 20) c4( ) c5(47012) c6( ) c7(bL, T, dD, fR, ms, aw, ays, cV, cz, arD, bO, ajM, bS, gf, ct, nA, zU, uu, eq, aR, ke, cF, pN, Fo, vc, bK, K, he, Fg, rz, VP, mu, Cw, oV, vj, IW, Az, fe, ayr, gI, Z, vo, dr, atb, HT, hq, qa, bN, TA, ayt, ac, cA, bo, Kr, wB, vL, gZ, uJ, xg); #c1(CACNA1C) c2(NP_001161095) c3(voltage-dependent L-type calcium channel subunit alpha-1C isoform 21) c4(65321) c5(65322, 65323, 65324, 65325, 65326, 65327, 65328) c6( ) c7(bL, T, dD, fR, ms, aw, ays, cV, cz, arD, bO, ajM, bS, gf, ct, nA, zU, uu, eq, aR, ke, cF, pN, Fo, vc, bK, K, he, Fg, rz, VP, mu, Cw, oV, vj, IW, Az, fe, ayr, gI, Z, vo, dr, atb, HT, hq, qa, bN, TA, ayt, ac, cA, bo, Kr, wB, vL, gZ, uJ, xg); #c1(CACNA1C) c2(NP_001161096) c3(voltage-dependent L-type calcium channel subunit alpha-1C isoform 22) c4(65329) c5(65330, 65331, 65332, 65333, 65334, 65335, 65336) c6( ) c7(bL, T, dD, fR, ms, aw, ays, cV, cz, arD, bO, ajM, bS, gf, ct, nA, zU, uu, eq, aR, ke, cF, pN, Fo, vc, bK, K, he, Fg, rz, VP, mu, Cw, oV, vj, IW, Az, fe, ayr, gI, Z, vo, dr, atb, HT, hq, qa, bN, TA, ayt, ac, cA, bo, Kr, wB, vL, gZ, uJ, xg); #c1(CACNA1C) c2(NP_001161097) c3(voltage-dependent L-type calcium channel subunit alpha-1C isoform 23) c4(65337, 65338) c5(65339, 65340, 65341, 65342, 65343, 65344, 65345, 65346, 65347, 65348, 65349, 65350, 65351) c6( ) c7(bL, T, dD, fR, ms, aw, ays, cV, cz, arD, bO, ajM, bS, gf, ct, nA, zU, uu, eq, aR, ke, cF, pN, Fo, vc, bK, K, he, Fg, rz, VP, mu, Cw, oV, vj, IW, Az, fe, ayr, gI, Z, vo, dr, atb, HT, hq, qa, bN, TA, ayt, ac, cA, bo, Kr, wB, vL, gZ, uJ, xg); #c1(CACNA1C) c2(NP_955630) c3(voltage-dependent L-type calcium channel subunit alpha-1C isoform 1) c4( ) c5(261910) c6( ) c7(bL, T, dD, fR, ms, aw, ays, cV, cz, arD, bO, ajM, bS, gf, ct, nA, zU, uu, eq, aR, ke, cF, pN, Fo, vc, bK, K, he, Fg, rz, VP, mu, Cw, oV, vj, IW, Az, fe, ayr, gI, Z, vo, dr, atb, HT, hq, qa, bN, TA, ayt, ac, cA, bo, Kr, wB, vL, gZ, uJ, xg); #c1(CACNA1C) c2(XP_011519324) c3(voltage-dependent L-type calcium channel subunit alpha-1C isoform X7) c4(313973) c5(313974, 313975, 313976, 313977, 313978, 313979, 313980) c6( ) c7(bL, T, dD, fR, ms, aw, ays, cV, cz, arD, bO, ajM, bS, gf, ct, nA, zU, uu, eq, aR, ke, cF, pN, Fo, vc, bK, K, he, Fg, rz, VP, mu, Cw, oV, vj, IW, Az, fe, ayr, gI, Z, vo, dr, atb, HT, hq, qa, bN, TA, ayt, ac, cA, bo, Kr, wB, vL, gZ, uJ, xg); #c1(CACNA1C) c2(XP_011519325) c3(voltage-dependent L-type calcium channel subunit alpha-1C isoform X8) c4(313981) c5(313982, 313983, 313984, 313985, 313986, 313987) c6( ) c7(bL, T, dD, fR, ms, aw, ays, cV, cz, arD, bO, ajM, bS, gf, ct, nA, zU, uu, eq, aR, ke, cF, pN, Fo, vc, bK, K, he, Fg, rz, VP, mu, Cw, oV, vj, IW, Az, fe, ayr, gI, Z, vo, dr, atb, HT, hq, qa, bN, TA, ayt, ac, cA, bo, Kr, wB, vL, gZ, uJ, xg); #c1(CACNA1D) c2(NP_000711) c3(voltage-dependent L-type calcium channel subunit alpha-1D isoform a) c4(14767) c5(14768, 14769, 14770, 14771, 14772, 14773) c6( ) c7(bL, mj, ot, s, Fj, vj, My, Ak, ayu, cz, cv, dG, ayv, Fg, qa, mu); #c1(CACNA1D) c2(NP_001122311) c3(voltage-dependent L-type calcium channel subunit alpha-1D isoform c) c4(46489, 46490) c5(46491, 46492, 46493, 46494, 46495, 46496, 46497, 46498, 46499, 46500, 46501, 46502) c6( ) c7(bL, mj, ot, s, Fj, vj, My, Ak, ayu, cz, cv, dG, ayv, Fg, qa, mu); #c1(CACNA1D) c2(NP_001122312) c3(voltage-dependent L-type calcium channel subunit alpha-1D isoform b) c4(46503) c5(46504, 46505, 46506, 46507, 46508, 46509) c6( ) c7(bL, mj, ot, s, Fj, vj, My, Ak, ayu, cz, cv, dG, ayv, Fg, qa, mu); #c1(CACNA1D) c2(XP_005265505) c3(voltage-dependent L-type calcium channel subunit alpha-1D isoform X4) c4(279568) c5( ) c6( ) c7(bL, mj, ot, s, Fj, vj, My, Ak, ayu, cz, cv, dG, ayv, Fg, qa, mu); #c1(CACNA1D) c2(XP_011532396) c3(voltage-dependent L-type calcium channel subunit alpha-1D isoform X1) c4(328581) c5(328582, 328583, 328584, 328585, 328586, 328587, 328588) c6( ) c7(bL, mj, ot, s, Fj, vj, My, Ak, ayu, cz, cv, dG, ayv, Fg, qa, mu); #c1(CACNA1D) c2(XP_011532401) c3(voltage-dependent L-type calcium channel subunit alpha-1D isoform XG) c4( ) c5(328589, 328590, 328591, 328592, 328593, 328594) c6( ) c7(bL, mj, ot, s, Fj, vj, My, Ak, ayu, cz, cv, dG, ayv, Fg, qa, mu); #c1(CACNA1E) c2(NP_000712) c3(voltage-dependent R-type calcium channel subunit alpha-1E isoform 3) c4(14774, 14775) c5(14776, 14777, 14778, 14779, 14780, 14781, 14782, 14783, 14784, 14785, 14786, 14787) c6( ) c7(bL, vj, jN, mf, ur, vo); #c1(CACNA1E) c2(NP_001192222) c3(voltage-dependent R-type calcium channel subunit alpha-1E isoform 1) c4(82084, 82085, 82086) c5(82087, 82088, 82089, 82090, 82091, 82092, 82093, 82094, 82095, 82096, 82097, 82098, 82099) c6( ) c7(bL, vj, jN, mf, ur, vo); #c1(CACNA1E) c2(NP_001192223) c3(voltage-dependent R-type calcium channel subunit alpha-1E isoform 2) c4(82100, 82101) c5(82102, 82103, 82104, 82105, 82106, 82107, 82108, 82109, 82110, 82111, 82112, 82113, 82114, 82115, 82116, 82117, 82118, 82119, 82120) c6( ) c7(bL, vj, jN, mf, ur, vo); #c1(CACNA1E) c2(XP_011508273) c3(voltage-dependent R-type calcium channel subunit alpha-1E isoform X1) c4(298965) c5(298966, 298967, 298968, 298969, 298970, 298971) c6( ) c7(bL, vj, jN, mf, ur, vo); #c1(CACNA1F) c2(NP_001243718) c3(voltage-dependent L-type calcium channel subunit alpha-1E isoform 2) c4(91533) c5(91534, 91535, 91536, 91537, 91538, 91539) c6( ) c7(ayx, cZ, ayw, cV, HU, ayA, dd, d, IR, ayB, IW, qL, ayr, as, ayy, nC, ayj, KE, Be, ayz, awK, oQ); #c1(CACNA1F) c2(NP_001243719) c3(voltage-dependent L-type calcium channel subunit alpha-1E isoform 3) c4(91540) c5(91541, 91542, 91543, 91544, 91545, 91546) c6( ) c7(ayx, cZ, ayw, cV, HU, ayA, dd, d, IR, ayB, IW, qL, ayr, as, ayy, nC, ayj, KE, Be, ayz, awK, oQ); #c1(CACNA1F) c2(NP_005174) c3(voltage-dependent L-type calcium channel subunit alpha-1E isoform 1) c4(153636) c5(153637, 153638, 153639, 153640, 153641, 153642) c6( ) c7(ayx, cZ, ayw, cV, HU, ayA, dd, d, IR, ayB, IW, qL, ayr, as, ayy, nC, ayj, KE, Be, ayz, awK, oQ); #c1(CACNA1G) c2(NP_001243253) c3(voltage-dependent T-type calcium channel subunit alpha-1G isoform 16) c4(90252) c5(90253, 90254, 90255, 90256, 90257, 90258, 90259, 90260, 90261, 90262, 90263, 90264) c6( ) c7(bL, T, Cq, A, s, ha, HN, EQ, r, aA, n, bB, hg, nA, g, bN); #c1(CACNA1G) c2(NP_001243254) c3(voltage-dependent T-type calcium channel subunit alpha-1G isoform 17) c4(90265) c5(90266, 90267, 90268, 90269, 90270, 90271) c6( ) c7(bL, T, Cq, A, s, ha, HN, EQ, r, aA, n, bB, hg, nA, g, bN); #c1(CACNA1G) c2(NP_001243255) c3(voltage-dependent T-type calcium channel subunit alpha-1G isoform 18) c4(90272) c5(90273, 90274, 90275, 90276, 90277, 90278) c6( ) c7(bL, T, Cq, A, s, ha, HN, EQ, r, aA, n, bB, hg, nA, g, bN); #c1(CACNA1G) c2(NP_001243256) c3(voltage-dependent T-type calcium channel subunit alpha-1G isoform 19) c4(90279) c5(90280, 90281, 90282, 90283, 90284, 90285) c6( ) c7(bL, T, Cq, A, s, ha, HN, EQ, r, aA, n, bB, hg, nA, g, bN); #c1(CACNA1G) c2(NP_001243257) c3(voltage-dependent T-type calcium channel subunit alpha-1G isoform 20) c4(90286) c5(90287, 90288, 90289, 90290, 90291, 90292) c6( ) c7(bL, T, Cq, A, s, ha, HN, EQ, r, aA, n, bB, hg, nA, g, bN); #c1(CACNA1G) c2(NP_001243258) c3(voltage-dependent T-type calcium channel subunit alpha-1G isoform 21) c4(90293) c5(90294, 90295, 90296, 90297, 90298, 90299) c6( ) c7(bL, T, Cq, A, s, ha, HN, EQ, r, aA, n, bB, hg, nA, g, bN); #c1(CACNA1G) c2(NP_001243259) c3(voltage-dependent T-type calcium channel subunit alpha-1G isoform 22) c4(90300) c5(90301, 90302, 90303, 90304, 90305, 90306) c6( ) c7(bL, T, Cq, A, s, ha, HN, EQ, r, aA, n, bB, hg, nA, g, bN); #c1(CACNA1G) c2(NP_001243260) c3(voltage-dependent T-type calcium channel subunit alpha-1G isoform 23) c4(90307) c5(90308, 90309, 90310, 90311, 90312, 90313) c6( ) c7(bL, T, Cq, A, s, ha, HN, EQ, r, aA, n, bB, hg, nA, g, bN); #c1(CACNA1G) c2(NP_001243261) c3(voltage-dependent T-type calcium channel subunit alpha-1G isoform 24) c4(90314) c5(90315, 90316, 90317, 90318, 90319, 90320) c6( ) c7(bL, T, Cq, A, s, ha, HN, EQ, r, aA, n, bB, hg, nA, g, bN); #c1(CACNA1G) c2(NP_001243262) c3(voltage-dependent T-type calcium channel subunit alpha-1G isoform 25) c4(90321) c5(90322, 90323, 90324, 90325, 90326, 90327) c6( ) c7(bL, T, Cq, A, s, ha, HN, EQ, r, aA, n, bB, hg, nA, g, bN); #c1(CACNA1G) c2(NP_001243263) c3(voltage-dependent T-type calcium channel subunit alpha-1G isoform 26) c4(90328, 90329) c5(90330, 90331, 90332, 90333, 90334, 90335) c6( ) c7(bL, T, Cq, A, s, ha, HN, EQ, r, aA, n, bB, hg, nA, g, bN); #c1(CACNA1G) c2(NP_061496) c3(voltage-dependent T-type calcium channel subunit alpha-1G isoform 1) c4(200363, 200364) c5(200365, 200366, 200367, 200368, 200369, 200370, 200371, 200372, 200373, 200374, 200375, 200376) c6( ) c7(bL, T, Cq, A, s, ha, HN, EQ, r, aA, n, bB, hg, nA, g, bN); #c1(CACNA1G) c2(NP_938190) c3(voltage-dependent T-type calcium channel subunit alpha-1G isoform 14) c4(259660) c5(259661, 259662, 259663, 259664, 259665, 259666) c6( ) c7(bL, T, Cq, A, s, ha, HN, EQ, r, aA, n, bB, hg, nA, g, bN); #c1(CACNA1G) c2(NP_938191) c3(voltage-dependent T-type calcium channel subunit alpha-1G isoform 2) c4(259667, 259668, 259669) c5(259670, 259671, 259672, 259673, 259674, 259675) c6( ) c7(bL, T, Cq, A, s, ha, HN, EQ, r, aA, n, bB, hg, nA, g, bN); #c1(CACNA1G) c2(NP_938192) c3(voltage-dependent T-type calcium channel subunit alpha-1G isoform 9) c4(259676) c5(259677, 259678, 259679, 259680, 259681, 259682, 259683, 259684, 259685, 259686, 259687, 259688) c6( ) c7(bL, T, Cq, A, s, ha, HN, EQ, r, aA, n, bB, hg, nA, g, bN); #c1(CACNA1G) c2(NP_938193) c3(voltage-dependent T-type calcium channel subunit alpha-1G isoform 7) c4(259689) c5(259690, 259691, 259692, 259693, 259694, 259695) c6( ) c7(bL, T, Cq, A, s, ha, HN, EQ, r, aA, n, bB, hg, nA, g, bN); #c1(CACNA1G) c2(NP_938194) c3(voltage-dependent T-type calcium channel subunit alpha-1G isoform 5) c4(259696) c5(259697, 259698, 259699, 259700, 259701, 259702) c6( ) c7(bL, T, Cq, A, s, ha, HN, EQ, r, aA, n, bB, hg, nA, g, bN); #c1(CACNA1G) c2(NP_938196) c3(voltage-dependent T-type calcium channel subunit alpha-1G isoform 11) c4(259713) c5(259714, 259715, 259716, 259717, 259718, 259719, 259720, 259721, 259722, 259723, 259724, 259725, 259726, 259727, 259728, 259729, 259730, 259731) c6( ) c7(bL, T, Cq, A, s, ha, HN, EQ, r, aA, n, bB, hg, nA, g, bN); #c1(CACNA1G) c2(NP_938197) c3(voltage-dependent T-type calcium channel subunit alpha-1G isoform 6) c4(259732, 259733, 259734) c5(259735, 259736, 259737, 259738, 259739, 259740) c6( ) c7(bL, T, Cq, A, s, ha, HN, EQ, r, aA, n, bB, hg, nA, g, bN); #c1(CACNA1G) c2(NP_938198) c3(voltage-dependent T-type calcium channel subunit alpha-1G isoform 8) c4(259741) c5(259742, 259743, 259744, 259745, 259746, 259747) c6( ) c7(bL, T, Cq, A, s, ha, HN, EQ, r, aA, n, bB, hg, nA, g, bN); #c1(CACNA1G) c2(NP_938199) c3(voltage-dependent T-type calcium channel subunit alpha-1G isoform 4) c4(259748) c5(259749, 259750, 259751, 259752, 259753, 259754) c6( ) c7(bL, T, Cq, A, s, ha, HN, EQ, r, aA, n, bB, hg, nA, g, bN); #c1(CACNA1G) c2(NP_938200) c3(voltage-dependent T-type calcium channel subunit alpha-1G isoform 10) c4(259755) c5(259756, 259757, 259758, 259759, 259760, 259761) c6( ) c7(bL, T, Cq, A, s, ha, HN, EQ, r, aA, n, bB, hg, nA, g, bN); #c1(CACNA1G) c2(NP_938201) c3(voltage-dependent T-type calcium channel subunit alpha-1G isoform 12) c4(259762, 259763) c5(259764, 259765, 259766, 259767, 259768, 259769) c6( ) c7(bL, T, Cq, A, s, ha, HN, EQ, r, aA, n, bB, hg, nA, g, bN); #c1(CACNA1G) c2(NP_938202) c3(voltage-dependent T-type calcium channel subunit alpha-1G isoform 13) c4(259770) c5(259771, 259772, 259773, 259774, 259775, 259776, 259777, 259778, 259779, 259780, 259781, 259782) c6( ) c7(bL, T, Cq, A, s, ha, HN, EQ, r, aA, n, bB, hg, nA, g, bN); #c1(CACNA1G) c2(NP_938406) c3(voltage-dependent T-type calcium channel subunit alpha-1G isoform 3) c4(259815) c5(259816, 259817, 259818, 259819, 259820, 259821) c6( ) c7(bL, T, Cq, A, s, ha, HN, EQ, r, aA, n, bB, hg, nA, g, bN); #c1(CACNA1G) c2(XP_011523742) c3(voltage-dependent T-type calcium channel subunit alpha-1G isoform X1) c4( ) c5(318238, 318239, 318240, 318241, 318242, 318243) c6( ) c7(bL, T, Cq, A, s, ha, HN, EQ, r, aA, n, bB, hg, nA, g, bN); #c1(CACNA1H) c2(NP_001005407) c3(voltage-dependent T-type calcium channel subunit alpha-1H isoform b) c4(21647) c5(21648, 21649, 21650, 21651, 21652, 21653) c6( ) c7(ae, Cq, dD, s, xZ, ha, HN, aT, cz, ayD, eq, gu, hg, rz, Fg, ayC, ad, bN); #c1(CACNA1H) c2(NP_066921) c3(voltage-dependent T-type calcium channel subunit alpha-1H isoform a) c4(207478) c5(207479, 207480, 207481, 207482, 207483, 207484) c6( ) c7(ae, Cq, dD, s, xZ, ha, HN, aT, cz, ayD, eq, gu, hg, rz, Fg, ayC, ad, bN); #c1(CACNA1H) c2(XP_006721028) c3(voltage-dependent T-type calcium channel subunit alpha-1H isoform X4) c4( ) c5(293821) c6( ) c7(ae, Cq, dD, s, xZ, ha, HN, aT, cz, ayD, eq, gu, hg, rz, Fg, ayC, ad, bN); #c1(CACNA1H) c2(XP_011521028) c3(voltage-dependent T-type calcium channel subunit alpha-1H isoform X10) c4( ) c5(315972) c6( ) c7(ae, Cq, dD, s, xZ, ha, HN, aT, cz, ayD, eq, gu, hg, rz, Fg, ayC, ad, bN); #c1(CACNA1I) c2(NP_066919) c3(voltage-dependent T-type calcium channel subunit alpha-1I isoform a) c4(207457, 207458, 207459) c5(207460, 207461, 207462, 207463, 207464, 207465, 207466, 207467, 207468, 207469, 207470, 207471, 207472, 207473, 207474, 207475, 207476, 207477) c6( ) c7(pN); #c1(CACNA1I) c2(XP_011528783) c3(voltage-dependent T-type calcium channel subunit alpha-1I isoform X1) c4(324092, 324093, 324094) c5(324095, 324096, 324097, 324098, 324099, 324100, 324101, 324102, 324103, 324104, 324105, 324106, 324107, 324108, 324109, 324110, 324111, 324112) c6( ) c7(pN); #c1(CACNA1S) c2(NP_000060) c3(voltage-dependent L-type calcium channel subunit alpha-1S) c4(1080) c5(1081, 1082, 1083, 1084, 1085, 1086) c6( ) c7(IJ, DT, GY, c, Ig, ayl, dR, vj, xs, ayH, cV, IW, akB, ayr, ayG, ayE, cd, HT, ayF); #c1(CACNA1S) c2(XP_005245535) c3(voltage-dependent L-type calcium channel subunit alpha-1S isoform X1) c4(266697) c5(266698, 266699, 266700, 266701, 266702, 266703) c6( ) c7(IJ, DT, GY, c, Ig, ayl, dR, vj, xs, ayH, cV, IW, akB, ayr, ayG, ayE, cd, HT, ayF); #c1(CACNA2D1) c2(NP_000713) c3(voltage-dependent calcium channel subunit alpha-2/delta-1 preproprotein) c4(14788) c5(14789, 14790, 14791, 14792, 14793, 14794) c6( ) c7(aIC, ms, IW, oe, cV, ajM, j, fq, X); #c1(CACNA2D1) c2(XP_005250627) c3(voltage-dependent calcium channel subunit alpha-2/delta-1 isoform X4) c4(270468) c5(270469, 270470, 270471, 270472, 270473, 270474) c6( ) c7(aIC, ms, IW, oe, cV, ajM, j, fq, X); #c1(CACNA2D1) c2(XP_006716181) c3(voltage-dependent calcium channel subunit alpha-2/delta-1 isoform X1) c4(290136) c5(290137, 290138, 290139, 290140, 290141, 290142) c6( ) c7(aIC, ms, IW, oe, cV, ajM, j, fq, X); #c1(CACNA2D1) c2(XP_006716183) c3(voltage-dependent calcium channel subunit alpha-2/delta-1 isoform X10) c4(290143) c5( ) c6( ) c7(aIC, ms, IW, oe, cV, ajM, j, fq, X); #c1(CACNA2D1) c2(XP_006716184) c3(voltage-dependent calcium channel subunit alpha-2/delta-1 isoform X12) c4( ) c5(290144, 290145, 290146, 290147, 290148, 290149, 290150) c6( ) c7(aIC, ms, IW, oe, cV, ajM, j, fq, X); #c1(CACNA2D2) c2(NP_001005505) c3(voltage-dependent calcium channel subunit alpha-2/delta-2 isoform a precursor) c4(21802, 21803) c5(21804, 21805, 21806, 21807, 21808, 21809, 21810, 21811, 21812, 21813, 21814, 21815) c6( ) c7(av, ky, eM, dB, aW, HN, aT, ayJ, Im, qN, bz, eA); #c1(CACNA2D2) c2(NP_001167522) c3(voltage-dependent calcium channel subunit alpha-2/delta-2 isoform c precursor) c4(68994) c5(68995, 68996, 68997, 68998, 68999, 69000) c6( ) c7(av, ky, eM, dB, aW, HN, aT, ayJ, Im, qN, bz, eA); #c1(CACNA2D2) c2(NP_001278030) c3(voltage-dependent calcium channel subunit alpha-2/delta-2 isoform d) c4(109420) c5(109421, 109422, 109423, 109424, 109425, 109426) c6( ) c7(av, ky, eM, dB, aW, HN, aT, ayJ, Im, qN, bz, eA); #c1(CACNA2D2) c2(NP_006021) c3(voltage-dependent calcium channel subunit alpha-2/delta-2 isoform b precursor) c4(161225) c5(161226, 161227, 161228, 161229, 161230, 161231) c6( ) c7(av, ky, eM, dB, aW, HN, aT, ayJ, Im, qN, bz, eA); #c1(CACNA2D2) c2(XP_011532544) c3(voltage-dependent calcium channel subunit alpha-2/delta-2 isoform X1) c4(328641) c5(328642, 328643, 328644, 328645, 328646, 328647) c6( ) c7(av, ky, eM, dB, aW, HN, aT, ayJ, Im, qN, bz, eA); #c1(CACNA2D3) c2(NP_060868) c3(voltage-dependent calcium channel subunit alpha-2/delta-3 precursor) c4(198177, 198178, 198179) c5(198180, 198181, 198182, 198183, 198184, 198185, 198186, 198187, 198188, 198189, 198190, 198191, 198192, 198193, 198194, 198195, 198196, 198197, 198198, 198199, 198200, 198201, 198202, 198203, 198204, 198205) c6( ) c7(T, dY, aW, aw, aT, aA, aF, it, ayL, ayK); #c1(CACNA2D3) c2(XP_011532248) c3(voltage-dependent calcium channel subunit alpha-2/delta-3 isoform X2) c4(328308) c5( ) c6( ) c7(T, dY, aW, aw, aT, aA, aF, it, ayL, ayK); #c1(CACNA2D3) c2(XP_011532253) c3(voltage-dependent calcium channel subunit alpha-2/delta-3 isoform X7) c4(328309) c5(328310, 328311, 328312, 328313, 328314, 328315) c6( ) c7(T, dY, aW, aw, aT, aA, aF, it, ayL, ayK); #c1(CACNA2D3) c2(XP_011532255) c3(voltage-dependent calcium channel subunit alpha-2/delta-3 isoform X9) c4(328316) c5(328317, 328318, 328319, 328320, 328321, 328322, 328323, 328324, 328325, 328326, 328327, 328328) c6( ) c7(T, dY, aW, aw, aT, aA, aF, it, ayL, ayK); #c1(CACNA2D4) c2(NP_758952) c3(voltage-dependent calcium channel subunit alpha-2/delta-4) c4(249356, 249357, 249358, 249359, 249360) c5(249361, 249362, 249363, 249364, 249365, 249366, 249367, 249368, 249369, 249370, 249371, 249372, 249373, 249374, 249375, 249376, 249377, 249378, 249379, 249380, 249381, 249382, 249383, 249384, 249385, 249386, 249387, 249388, 249389, 249390, 249391, 249392, 249393, 249394, 249395, 249396, 249397) c6( ) c7(IR, ayM, uJ, bK, he, ayj); #c1(CACNB1) c2(NP_000714) c3(voltage-dependent L-type calcium channel subunit beta-1 isoform 1) c4(14795, 14796) c5(14797, 14798, 14799, 14800, 14801, 14802, 14803, 14804, 14805, 14806, 14807, 14808) c6( ) c7(aT); #c1(CACNB1) c2(NP_954855) c3(voltage-dependent L-type calcium channel subunit beta-1 isoform 2) c4(261407) c5(261408, 261409, 261410, 261411, 261412, 261413) c6( ) c7(aT); #c1(CACNB1) c2(NP_954856) c3(voltage-dependent L-type calcium channel subunit beta-1 isoform 3) c4(261414, 261415) c5(261416, 261417, 261418, 261419, 261420, 261421, 261422, 261423, 261424, 261425, 261426, 261427) c6( ) c7(aT); #c1(CACNB2) c2(NP_000715) c3(voltage-dependent L-type calcium channel subunit beta-2 isoform 1) c4(14809) c5(14810, 14811, 14812, 14813, 14814, 14815) c6( ) c7(cF, ac, rz, ms, oe, aA, cz, ayN, ajM, bK, vo, bN); #c1(CACNB2) c2(NP_963864) c3(voltage-dependent L-type calcium channel subunit beta-2 isoform 7) c4(262458) c5(262459, 262460, 262461, 262462, 262463, 262464) c6( ) c7(cF, ac, rz, ms, oe, aA, cz, ayN, ajM, bK, vo, bN); #c1(CACNB2) c2(NP_963865) c3(voltage-dependent L-type calcium channel subunit beta-2 isoform 6) c4(262465) c5(262466, 262467, 262468, 262469, 262470, 262471) c6( ) c7(cF, ac, rz, ms, oe, aA, cz, ayN, ajM, bK, vo, bN); #c1(CACNB2) c2(NP_963866) c3(voltage-dependent L-type calcium channel subunit beta-2 isoform 8) c4(262472) c5(262473, 262474, 262475, 262476, 262477, 262478) c6( ) c7(cF, ac, rz, ms, oe, aA, cz, ayN, ajM, bK, vo, bN); #c1(CACNB2) c2(NP_963884) c3(voltage-dependent L-type calcium channel subunit beta-2 isoform 3) c4(262496) c5(262497, 262498, 262499, 262500, 262501, 262502) c6( ) c7(cF, ac, rz, ms, oe, aA, cz, ayN, ajM, bK, vo, bN); #c1(CACNB2) c2(NP_963890) c3(voltage-dependent L-type calcium channel subunit beta-2 isoform 2) c4(262542) c5(262543, 262544, 262545, 262546, 262547, 262548) c6( ) c7(cF, ac, rz, ms, oe, aA, cz, ayN, ajM, bK, vo, bN); #c1(CACNB2) c2(NP_963891) c3(voltage-dependent L-type calcium channel subunit beta-2 isoform 4) c4(262549) c5(262550, 262551, 262552, 262553, 262554, 262555) c6( ) c7(cF, ac, rz, ms, oe, aA, cz, ayN, ajM, bK, vo, bN); #c1(CACNB2) c2(XP_011517962) c3(voltage-dependent L-type calcium channel subunit beta-2 isoform X4) c4(312001) c5(312002, 312003, 312004, 312005, 312006, 312007) c6( ) c7(cF, ac, rz, ms, oe, aA, cz, ayN, ajM, bK, vo, bN); #c1(CACNB3) c2(NP_000716) c3(voltage-dependent L-type calcium channel subunit beta-3 isoform 1) c4(14816) c5(14817, 14818, 14819, 14820, 14821, 14822) c6( ) c7(bL, bK, mu); #c1(CACNB3) c2(NP_001193844) c3(voltage- dependent L-type calcium channel subunit beta-3 isoform 2) c4(82710) c5(82711, 82712, 82713, 82714, 82715, 82716) c6( ) c7(bL, bK, mu); #c1(CACNB3) c2(NP_001193845) c3(voltage-dependent L-type calcium channel subunit beta-3 isoform 3) c4(82717) c5(82718, 82719, 82720, 82721, 82722, 82723) c6( ) c7(bL, bK, mu); #c1(CACNB3) c2(NP_001193846) c3(voltage-dependent L-type calcium channel subunit beta-3 isoform 4) c4(82724) c5(82725, 82726, 82727, 82728, 82729, 82730) c6( ) c7(bL, bK, mu); #c1(CACNB4) c2(NP_000717) c3(voltage-dependent L-type calcium channel subunit beta-4 isoform b) c4(14823, 14824) c5(14825, 14826, 14827, 14828, 14829, 14830, 14831, 14832, 14833, 14834, 14835, 14836) c6( ) c7(yr, Cq, XK, ayO, ha, iD, hg, akr); #c1(CACNB4) c2(NP_001005746) c3(voltage-dependent L-type calcium channel subunit beta-4 isoform c) c4(22023) c5(22024, 22025, 22026, 22027, 22028, 22029) c6( ) c7(yr, Cq, XK, ayO, ha, iD, hg, akr); #c1(CACNB4) c2(NP_001005747) c3(voltage-dependent L-type calcium channel subunit beta-4 isoform a) c4(22030, 22031) c5(22032, 22033, 22034, 22035, 22036, 22037, 22038, 22039, 22040, 22041, 22042, 22043) c6( ) c7(yr, Cq, XK, ayO, ha, iD, hg, akr); #c1(CACNB4) c2(NP_001139270) c3(voltage-dependent L-type calcium channel subunit beta-4 isoform d) c4(59059, 59060) c5(59061, 59062, 59063, 59064, 59065, 59066, 59067, 59068, 59069, 59070, 59071, 59072) c6( ) c7(yr, Cq, XK, ayO, ha, iD, hg, akr); #c1(CACNG2) c2(NP_006069) c3(voltage-dependent calcium channel gamma-2 subunit) c4(161649) c5(161650, 161651, 161652, 161653, 161654, 161655, 161656, 161657, 161658, 161659, 161660, 161661, 161662, 161663, 161664, 161665) c6( ) c7(aIP, T, fX, ayP, Fo, ha, bK); #c1(CACNG3) c2(NP_006530) c3(voltage-dependent calcium channel gamma-3 subunit) c4(166044) c5(166045, 166046, 166047, 166048, 166049, 166050, 166051, 166052) c6( ) c7(W, HN, ha, ayQ, jj); #c1(CACNG4) c2(NP_055220) c3(voltage-dependent calcium channel gamma-4 subunit) c4(179912) c5(179913, 179914, 179915, 179916, 179917, 179918) c6( ) c7(V); #c1(CACNG5) c2(XP_011522915) c3(voltage-dependent calcium channel gamma-5 subunit isoform X1) c4(317401, 317402) c5(317403, 317404, 317405, 317406, 317407, 317408, 317409, 317410, 317411, 317412, 317413, 317414, 317415, 317416, 317417, 317418, 317419, 317420) c6( ) c7(ayR); #c1(CACNG6) c2(NP_114103) c3(voltage-dependent calcium channel gamma-6 subunit isoform c) c4(222162) c5(222163, 222164, 222165, 222166, 222167, 222168) c6( ) c7(bM); #c1(CACNG6) c2(NP_665813) c3(voltage-dependent calcium channel gamma-6 subunit isoform a) c4(241748) c5(241749, 241750, 241751, 241752, 241753, 241754) c6( ) c7(bM); #c1(CACNG6) c2(NP_665814) c3(voltage-dependent calcium channel gamma-6 subunit isoform b) c4(241755) c5(241756, 241757, 241758, 241759, 241760, 241761) c6( ) c7(bM); #c1(CACUL1) c2(NP_722517) c3(CDK2-associated and cullin domain-containing protein 1) c4(246758, 246759, 246760) c5(246761, 246762, 246763, 246764, 246765, 246766, 246767, 246768, 246769, 246770, 246771, 246772, 246773, 246774, 246775, 246776, 246777, 246778) c6( ) c7(bM, T, af, AM, aW, apx, aT, nf, r, aA, aF, fd, K, qN, g, q, dx, cn); #c1(CACUL1) c2(XP_011537650) c3(CDK2-associated and cullin domain-containing protein 1 isoform X1) c4(335209) c5(335210, 335211, 335212, 335213, 335214, 335215) c6( ) c7(bM, T, af, AM, aW, apx, aT, nf, r, aA, aF, fd, K, qN, g, q, dx, cn); #c1(CACYBP) c2(NP_001007215) c3(calcyclin-binding protein isoform 2) c4( ) c5(22558, 22559, 22560, 22561, 22562, 22563, 22564, 22565, 22566, 22567, 22568, 22569, 22570, 22571) c6( ) c7(es, aC, cc, aE, iA, bE, aW, aw, aA, bB, aT, aF, fr, eA); #c1(CACYBP) c2(NP_055227) c3(calcyclin-binding protein isoform 1) c4(179938, 179939, 179940, 179941, 179942) c5(179943, 179944, 179945, 179946, 179947, 179948, 179949, 179950, 179951, 179952, 179953, 179954, 179955, 179956, 179957, 179958, 179959, 179960, 179961, 179962) c6( ) c7(es, aC, cc, aE, iA, bE, aW, aw, aA, bB, aT, aF, fr, eA); #c1(CAD) c2(NP_004332) c3(CAD protein) c4(145221) c5(145222, 145223, 145224, 145225, 145226, 145227) c6( ) c7(bL, T, dD, ZV, Zz, jp, qb, ea, e, aw, cz, sM, vr, bS, j, ct, eq, zP, q, ad, av, ec, rS, aT, h, jj, bq, dQ, eN, hm, CK, bf, cW, aW, Zt, r, aq, Z, VJ, ac, nB, wE, aka, ayS, vb, aS, pw, hE, B); #c1(CADM1) c2(NP_001091987) c3(cell adhesion molecule 1 isoform E precursor) c4(39150, 39151) c5(39152, 39153, 39154, 39155, 39156, 39157, 39158, 39159, 39160, 39161, 39162, 39163) c6( ) c7(T, sw, if, iW, WT, eX, jh, aA, n, Gn, ct, C, ci, nA, qN, q, ad, eA, eJ, dP, ip, av, ft, ib, aE, iu, cF, akU, rA, kH, aT, eV, dL, K, rz, eL, jf, ayT, je, iZ, aW, Y, ff, ayU, r, aq, Ej, kp, en, bu, g, cm, akw, bz, iR, bN, iM, Dy, eM, Ew, WU, Zn, adg, bt, it, B, ayV); #c1(CADM1) c2(NP_001287973) c3(cell adhesion molecule 1 isoform 8 precursor) c4(113292) c5(113293) c6( ) c7(T, sw, if, iW, WT, eX, jh, aA, n, Gn, ct, C, ci, nA, qN, q, ad, eA, eJ, dP, ip, av, ft, ib, aE, iu, cF, akU, rA, kH, aT, eV, dL, K, rz, eL, jf, ayT, je, iZ, aW, Y, ff, ayU, r, aq, Ej, kp, en, bu, g, cm, akw, bz, iR, bN, iM, Dy, eM, Ew, WU, Zn, adg, bt, it, B, ayV); #c1(CADM1) c2(NP_055148) c3(cell adhesion molecule 1 isoform D precursor) c4(179449) c5(179450, 179451, 179452, 179453, 179454, 179455) c6( ) c7(T, sw, if, iW, WT, eX, jh, aA, n, Gn, ct, C, ci, nA, qN, q, ad, eA, eJ, dP, ip, av, ft, ib, aE, iu, cF, akU, rA, kH, aT, eV, dL, K, rz, eL, jf, ayT, je, iZ, aW, Y, ff, ayU, r, aq, Ej, kp, en, bu, g, cm, akw, bz, iR, bN, iM, Dy, eM, Ew, WU, Zn, adg, bt, it, B, ayV); #c1(CADM1) c2(XP_005271551) c3(cell adhesion molecule 1 isoform X1) c4( ) c5(283468, 283469, 283470, 283471, 283472) c6( ) c7(T, sw, if, iW, WT, eX, jh, aA, n, Gn, ct, C, ci, nA, qN, q, ad, eA, eJ, dP, ip, av, ft, ib, aE, iu, cF, akU, rA, kH, aT, eV, dL, K, rz, eL, jf, ayT, je, iZ, aW, Y, ff, ayU, r, aq, Ej, kp, en, bu, g, cm, akw, bz, iR, bN, iM, Dy, eM, Ew, WU, Zn, adg, bt, it, B, ayV); #c1(CADM2) c2(NP_001161146) c3(cell adhesion molecule 2 isoform 1 precursor) c4(65376) c5(65377, 65378, 65379, 65380, 65381, 65382) c6( ) c7(ae, T, hb, n, Jd, j, v, iV, fq, B, ad); #c1(CADM2) c2(NP_001161147) c3(cell adhesion molecule 2 isoform 2 precursor) c4(65383) c5(65384, 65385, 65386, 65387, 65388, 65389) c6( ) c7(ae, T, hb, n, Jd, j, v, iV, fq, B, ad); #c1(CADM2) c2(NP_694854) c3(cell adhesion molecule 2 isoform 3 precursor) c4(245390) c5(245391, 245392, 245393, 245394, 245395, 245396) c6( ) c7(ae, T, hb, n, Jd, j, v, iV, fq, B, ad); #c1(CADM3) c2(NP_001120645) c3(cell adhesion molecule 3 isoform 2 precursor) c4(44337, 44338) c5(44339, 44340, 44341, 44342, 44343, 44344, 44345, 44346, 44347, 44348, 44349, 44350) c6( ) c7(T, ae, eA, ad); #c1(CADM3) c2(NP_067012) c3(cell adhesion molecule 3 isoform 1 precursor) c4(208351) c5(208352, 208353, 208354, 208355, 208356, 208357) c6( ) c7(T, ae, eA, ad); #c1(CADM4) c2(NP_660339) c3(cell adhesion molecule 4 precursor) c4(241007) c5(241008, 241009, 241010, 241011, 241012, 241013) c6( ) c7(av, T, py, ae, eA, ad); #c1(CADPS) c2(NP_003707) c3(calcium-dependent secretion activator 1 isoform 1) c4(140312, 140313) c5(140314, 140315, 140316, 140317, 140318, 140319, 140320, 140321, 140322, 140323, 140324, 140325) c6( ) c7(ayW, bX, hH, ae, af, ad); #c1(CADPS) c2(NP_899630) c3(calcium-dependent secretion activator 1 isoform 3) c4(258075) c5(258076, 258077, 258078, 258079, 258080, 258081) c6( ) c7(ayW, bX, hH, ae, af, ad); #c1(CADPS) c2(NP_899631) c3(calcium-dependent secretion activator 1 isoform 2) c4(258082) c5(258083, 258084, 258085, 258086, 258087, 258088) c6( ) c7(ayW, bX, hH, ae, af, ad); #c1(CADPS) c2(XP_011532484) c3(calcium-dependent secretion activator 1 isoform X12) c4(328627) c5( ) c6( ) c7(ayW, bX, hH, ae, af, ad); #c1(CADPS) c2(XP_011532503) c3(calcium-dependent secretion activator 1 isoform X32) c4( ) c5(328628, 328629, 328630, 328631, 328632, 328633) c6( ) c7(ayW, bX, hH, ae, af, ad); #c1(CADPS2) c2(NP_001009571) c3(calcium-dependent secretion activator 2 isoform b) c4(23631, 23632, 23633) c5(23634, 23635, 23636, 23637, 23638, 23639, 23640, 23641, 23642, 23643, 23644, 23645, 23646, 23647, 23648, 23649, 23650, 23651) c6( ) c7(ac, rz, hb, ha, nA, he, IB, bN); #c1(CADPS2) c2(NP_001161412) c3(calcium-dependent secretion activator 2 isoform c) c4(65777) c5(65778, 65779, 65780, 65781, 65782, 65783) c6( ) c7(ac, rz, hb, ha, nA, he, IB, bN); #c1(CADPS2) c2(NP_060424) c3(calcium-dependent secretion activator 2 isoform a) c4(195891, 195892) c5(195893, 195894, 195895, 195896, 195897, 195898, 195899, 195900, 195901, 195902, 195903, 195904, 195905, 195906, 195907, 195908, 195909) c6( ) c7(ac, rz, hb, ha, nA, he, IB, bN); #c1(CADPS2) c2(XP_005250755) c3(calcium-dependent secretion activator 2 isoform X4) c4(270518) c5( ) c6( ) c7(ac, rz, hb, ha, nA, he, IB, bN); #c1(CADPS2) c2(XP_005250757) c3(calcium-dependent secretion activator 2 isoform X6) c4(270519) c5(270520, 270521, 270522, 270523, 270524, 270525) c6( ) c7(ac, rz, hb, ha, nA, he, IB, bN); #c1(CADPS2) c2(XP_005250759) c3(calcium-dependent secretion activator 2 isoform X8) c4( ) c5(270526) c6( ) c7(ac, rz, hb, ha, nA, he, IB, bN); #c1(CADPS2) c2(XP_005250765) c3(calcium-dependent secretion activator 2 isoform X17) c4(270527) c5(270528, 270529, 270530, 270531, 270532, 270533) c6( ) c7(ac, rz, hb, ha, nA, he, IB, bN); #c1(CAGE1) c2(NP_001164163) c3(cancer-associated gene 1 protein isoform 1) c4(66657, 66658) c5(66659, 66660, 66661, 66662, 66663, 66664, 66665, 66666, 66667, 66668, 66669, 66670, 66671, 66672, 66673, 66674, 66675, 66676, 66677) c6( ) c7(ci, g); #c1(CAGE1) c2(NP_001164164) c3(cancer-associated gene 1 protein isoform 2) c4(66678, 66679) c5(66680, 66681, 66682, 66683, 66684, 66685) c6( ) c7(ci, g); #c1(CAGE1) c2(NP_995586) c3(cancer-associated gene 1 protein isoform 3) c4(263971) c5(263972, 263973, 263974, 263975, 263976) c6( ) c7(ci, g); #c1(CALB1) c2(NP_004920) c3(calbindin) c4(150794, 150795) c5(150796, 150797, 150798, 150799, 150800, 150801, 150802, 150803, 150804, 150805, 150806, 150807) c6( ) c7(jf, es, rR, c, pY, hC, U, Ib, n, dy, gn, bK, an, fr, he, nJ, af); #c1(CALB2) c2(NP_001731) c3(calretinin isoform 1) c4(120579) c5(120580, 120581, 120582, 120583, 120584, 120585) c6( ) c7(T, arY, ib, nO, bE, ev, ayX, bO, r, bB, q, ci, PJ, g, Nm, ayY, qW, X, hS); #c1(CALB2) c2(NP_009019) c3(calretinin isoform 22k) c4(170289) c5(170290, 170291, 170292, 170293, 170294, 170295) c6( ) c7(T, arY, ib, nO, bE, ev, ayX, bO, r, bB, q, ci, PJ, g, Nm, ayY, qW, X, hS); #c1(CALCA) c2(NP_001029125) c3(calcitonin gene-related peptide 1 isoform alpha-CGRP preproprotein) c4(30764) c5(30765, 30766, 30767, 30768, 30769, 30770, 30771, 30772, 30773, 30774) c6( ) c7(oO, T, vS, fR, azf, azi, aza, fd, ci, aR, ip, x, Vp, azb, EL, H, azh, aW, g, eE, eF, uC, cm, bw, eM, nB, iA, iT, TG, cj, QF, azg, m, k, cZ, gp, My, yG, zt, n, aj, nA, mI, ai, ft, Do, azj, cU, dd, he, aze, A, sp, OX, AQ, zZ, vo, ar, kT, ok, Qy, iO, cA, B, bL, zm, fG, cz, adi, hz, v, C, AO, pd, rd, q, J, er, mj, ga, nv, akU, Qg, aT, cy, dz, bK, UN, bq, an, yj, ahE, ae, bA, hM, wr, s, iU, fO, r, ahl, en, t, f, bN, EJ, ck, alC, azc, Gg, bt, VB, ayZ, vi, df, ha, ml, jh, Hn, azd, uu, hF, ad, iC, av, hd, Rq, Aa, ji, yh, nJ, Yi, DI, aus, et, ff, eH, eZ, Mz, la, Sm, iV, HI, bz, dr, qa, es, D, yE, bE, rH, IC, X); #c1(CALCA) c2(NP_001732) c3(calcitonin isoform CT preproprotein) c4(120586, 120587, 120588) c5(120589, 120590, 120591, 120592, 120593, 120594, 120595, 120596, 120597, 120598, 120599, 120600, 120601, 120602, 120603, 120604, 120605, 120606, 120607, 120608, 120609, 120610) c6( ) c7(oO, T, vS, fR, azf, azi, aza, fd, ci, aR, ip, x, Vp, azb, EL, H, azh, aW, g, eE, eF, uC, cm, bw, eM, nB, iA, iT, TG, cj, QF, azg, m, k, cZ, gp, My, yG, zt, n, aj, nA, mI, ai, ft, Do, azj, cU, dd, he, aze, A, sp, OX, AQ, zZ, vo, ar, kT, ok, Qy, iO, cA, B, bL, zm, fG, cz, adi, hz, v, C, AO, pd, rd, q, J, er, mj, ga, nv, akU, Qg, aT, cy, dz, bK, UN, bq, an, yj, ahE, ae, bA, hM, wr, s, iU, fO, r, ahl, en, t, f, bN, EJ, ck, alC, azc, Gg, bt, VB, ayZ, vi, df, ha, ml, jh, Hn, azd, uu, hF, ad, iC, av, hd, Rq, Aa, ji, yh, nJ, Yi, DI, aus, et, ff, eH, eZ, Mz, la, Sm, iV, HI, bz, dr, qa, es, D, yE, bE, rH, IC, X); #c1(CALCB) c2(NP_000719) c3(calcitonin gene-related peptide 2 precursor) c4(14837, 14838) c5(14839, 14840, 14841, 14842, 14843, 14844, 14845, 14846, 14847, 14848, 14849, 14850, 14851, 14852, 14853, 14854, 14855, 14856, 14857, 14858, 14859, 14860) c6( ) c7(nv); #c1(CALCOCO1) c2(NP_001137154) c3(calcium-binding and coiled-coil domain-containing protein 1 isoform 2) c4(55053) c5(55054, 55055, 55056, 55057, 55058, 55059) c6( ) c7(ww, cd, Fg, aT); #c1(CALCOCO1) c2(NP_065949) c3(calcium-binding and coiled-coil domain-containing protein 1 isoform 1) c4(206429, 206430, 206431, 206432) c5(206433, 206434, 206435, 206436, 206437, 206438, 206439, 206440, 206441, 206442, 206443, 206444, 206445, 206446, 206447, 206448, 206449, 206450, 206451, 206452, 206453, 206454, 206455, 206456) c6( ) c7(ww, cd, Fg, aT); #c1(CALCOCO1) c2(XP_011536906) c3(calcium-binding and coiled-coil domain-containing protein 1 isoform X1) c4(334572, 334573) c5(334574, 334575, 334576, 334577, 334578, 334579, 334580, 334581, 334582, 334583, 334584, 334585) c6( ) c7(ww, cd, Fg, aT); #c1(CALCOCO2) c2(NP_001248319) c3(calcium-binding and coiled-coil domain-containing protein 2 isoform 1) c4(93672) c5(93673, 93674, 93675, 93676, 93677, 93678) c6( ) c7(cm, BF, Io, bc); #c1(CALCOCO2) c2(NP_005822) c3(calcium-binding and coiled-coil domain-containing protein 2 isoform 3) c4(159706) c5(159707, 159708, 159709, 159710, 159711, 159712) c6( ) c7(cm, BF, Io, bc); #c1(CALCOCO2) c2(XP_011522483) c3(calcium-binding and coiled-coil domain-containing protein 2 isoform X1) c4(317120) c5(317121, 317122, 317123, 317124, 317125, 317126) c6( ) c7(cm, BF, Io, bc); #c1(CALCR) c2(NP_001158209) c3(calcitonin receptor isoform 1) c4(63353, 63354, 63355, 63356) c5(63357, 63358, 63359, 63360, 63361, 63362, 63363, 63364, 63365, 63366, 63367, 63368, 63369, 63370, 63371, 63372, 63373, 63374, 63375, 63376, 63377, 63378, 63379, 63380, 63381) c6( ) c7(T, zt, if, aw, NT, aA, bB, n, cL, fd, ml, qN, azk, cd, o, ad, eW, nv, aT, h, dL, K, ae, ake, af, bA, azh, eL, hM, Qr, cH, aW, vj, nf, aF, as, t, ve, bz, cm, bJ, eM, yE, at, uz, m); #c1(CALCR) c2(NP_001158210) c3(calcitonin receptor isoform 2 precursor) c4(63382, 63383) c5(63384, 63385, 63386, 63387, 63388, 63389, 63390, 63391, 63392, 63393, 63394, 63395, 63396, 63397, 63398, 63399, 63400, 63401, 63402) c6( ) c7(T, zt, if, aw, NT, aA, bB, n, cL, fd, ml, qN, azk, cd, o, ad, eW, nv, aT, h, dL, K, ae, ake, af, bA, azh, eL, hM, Qr, cH, aW, vj, nf, aF, as, t, ve, bz, cm, bJ, eM, yE, at, uz, m); #c1(CALCRL) c2(NP_005786) c3(calcitonin gene-related peptide type 1 receptor precursor) c4(159339, 159340) c5(159341, 159342, 159343, 159344, 159345, 159346, 159347, 159348, 159349, 159350, 159351, 159352, 159353, 159354, 159355, 159356, 159357, 159358, 159359, 159360, 159361) c6( ) c7(nJ, gx, T, d, aE, vj, fJ, sa, cz, cy, v, j, ci, m, azl, y, IJ, qa, bN); #c1(CALCRL) c2(XP_005246291) c3(calcitonin gene-related peptide type 1 receptor isoform X1) c4(267022) c5(267023, 267024, 267025, 267026, 267027) c6( ) c7(nJ, gx, T, d, aE, vj, fJ, sa, cz, cy, v, j, ci, m, azl, y, IJ, qa, bN); #c1(CALD1) c2(NP_004333) c3(caldesmon isoform 2) c4(145228, 145229) c5( ) c6( ) c7(bL, T, dD, ZV, Zz, ea, e, aw, aA, sM, Bm, cz, bS, j, ct, bB, vr, eq, q, ad, eA, Zp, av, ec, hW, rS, oj, aT, h, By, K, jj, bq, dQ, pk, fb, eN, cY, hm, A, anR, bf, cW, aW, Zt, r, aF, Z, ac, nB, bE, wE, aka, vb, bo, dy, hE, B, y); #c1(CALD1) c2(NP_149129) c3(caldesmon isoform 1) c4(227348) c5( ) c6( ) c7(bL, T, dD, ZV, Zz, ea, e, aw, aA, sM, Bm, cz, bS, j, ct, bB, vr, eq, q, ad, eA, Zp, av, ec, hW, rS, oj, aT, h, By, K, jj, bq, dQ, pk, fb, eN, cY, hm, A, anR, bf, cW, aW, Zt, r, aF, Z, ac, nB, bE, wE, aka, vb, bo, dy, hE, B, y); #c1(CALD1) c2(NP_149130) c3(caldesmon isoform 4) c4(227349) c5( ) c6( ) c7(bL, T, dD, ZV, Zz, ea, e, aw, aA, sM, Bm, cz, bS, j, ct, bB, vr, eq, q, ad, eA, Zp, av, ec, hW, rS, oj, aT, h, By, K, jj, bq, dQ, pk, fb, eN, cY, hm, A, anR, bf, cW, aW, Zt, r, aF, Z, ac, nB, bE, wE, aka, vb, bo, dy, hE, B, y); #c1(CALD1) c2(NP_149131) c3(caldesmon isoform 5) c4(227350, 227351) c5(227352, 227353, 227354, 227355, 227356, 227357, 227358, 227359, 227360, 227361, 227362, 227363, 227364, 227365, 227366, 227367, 227368, 227369, 227370, 227371, 227372, 227373, 227374, 227375, 227376, 227377, 227378, 227379, 227380, 227381, 227382, 227383, 227384, 227385, 227386, 227387, 227388, 227389, 227390, 227391) c6( ) c7(bL, T, dD, ZV, Zz, ea, e, aw, aA, sM, Bm, cz, bS, j, ct, bB, vr, eq, q, ad, eA, Zp, av, ec, hW, rS, oj, aT, h, By, K, jj, bq, dQ, pk, fb, eN, cY, hm, A, anR, bf, cW, aW, Zt, r, aF, Z, ac, nB, bE, wE, aka, vb, bo, dy, hE, B, y); #c1(CALD1) c2(NP_149347) c3(caldesmon isoform 3) c4(227432, 227433) c5(227434) c6( ) c7(bL, T, dD, ZV, Zz, ea, e, aw, aA, sM, Bm, cz, bS, j, ct, bB, vr, eq, q, ad, eA, Zp, av, ec, hW, rS, oj, aT, h, By, K, jj, bq, dQ, pk, fb, eN, cY, hm, A, anR, bf, cW, aW, Zt, r, aF, Z, ac, nB, bE, wE, aka, vb, bo, dy, hE, B, y); #c1(CALD1) c2(XP_006716202) c3(caldesmon isoform X3) c4( ) c5(290165, 290166, 290167, 290168, 290169, 290170, 290171, 290172, 290173, 290174, 290175, 290176, 290177, 290178, 290179, 290180, 290181, 290182, 290183, 290184, 290185, 290186, 290187, 290188, 290189, 290190, 290191) c6( ) c7(bL, T, dD, ZV, Zz, ea, e, aw, aA, sM, Bm, cz, bS, j, ct, bB, vr, eq, q, ad, eA, Zp, av, ec, hW, rS, oj, aT, h, By, K, jj, bq, dQ, pk, fb, eN, cY, hm, A, anR, bf, cW, aW, Zt, r, aF, Z, ac, nB, bE, wE, aka, vb, bo, dy, hE, B, y); #c1(CALD1) c2(XP_011514887) c3(caldesmon isoform X2) c4(307638, 307639) c5( ) c6( ) c7(bL, T, dD, ZV, Zz, ea, e, aw, aA, sM, Bm, cz, bS, j, ct, bB, vr, eq, q, ad, eA, Zp, av, ec, hW, rS, oj, aT, h, By, K, jj, bq, dQ, pk, fb, eN, cY, hm, A, anR, bf, cW, aW, Zt, r, aF, Z, ac, nB, bE, wE, aka, vb, bo, dy, hE, B, y); #c1(CALHM1) c2(NP_001001412) c3(calcium homeostasis modulator protein 1) c4(18357) c5(18358, 18359, 18360, 18361, 18362, 18363) c6( ) c7(iI, fK, af); #c1(CALHM2) c2(XP_006717946) c3(calcium homeostasis modulator protein 2 isoform X1) c4(291394, 291395) c5(291396, 291397, 291398, 291399, 291400, 291401, 291402, 291403, 291404, 291405, 291406, 291407, 291408, 291409, 291410, 291411) c6( ) c7(af); #c1(CALHM3) c2(NP_001123214) c3(calcium homeostasis modulator protein 3) c4(46836) c5(46837, 46838, 46839, 46840, 46841, 46842) c6( ) c7(af); #c1(CALM2) c2(NP_001734) c3(calmodulin) c4( ) c5(120611, 120612, 120613, 120614, 120615, 120616, 120617, 120618, 120619, 120620, 120621, 120622, 120623, 120624, 120625, 120626, 120627) c6( ) c7(bM, T, if, e, fd, ci, Sp, add, ip, aE, azm, K, eL, cp, eG, aW, IW, as, g, cm, eM, iA, iT, vA, U, cj, iS, m, xh, FG, fr, ct, qN, cd, ft, jz, h, dL, hB, azp, HO, CQ, mo, op, hq, ok, agl, azr, B, azo, bL, mr, rf, cz, arD, ajM, v, j, iI, eA, azn, nv, aT, rO, XZ, ae, eu, bA, jf, s, iU, Y, Pg, ayr, cu, en, hf, t, ck, cl, ac, nM, gX, acl, gT, bt, ao, hl, qb, jh, rr, bS, hF, ad, Xv, ib, py, azq, io, vc, hP, mu, d, ff, gE, Z, jb, bz, qa, eK, es, bE, gZ, pK, IC, y); #c1(CALML3) c2(NP_005176) c3(calmodulin-like protein 3) c4(153643) c5(153644, 153645, 153646, 153647, 153648, 153649) c6( ) c7(Na, azs, amJ, eH, Nc, amI, eF); #c1(CALML5) c2(NP_059118) c3(calmodulin-like protein 5) c4(193135) c5(193136, 193137, 193138, 193139, 193140, 193141) c6( ) c7(IQ, cr); #c1(CALN1) c2(NP_001017440) c3(calcium-binding protein 8 isoform 2) c4(26522, 26523) c5(26524, 26525, 26526, 26527, 26528, 26529, 26530, 26531, 26532, 26533, 26534, 26535, 26536, 26537, 26538) c6( ) c7(aF, aA); #c1(CALN1) c2(NP_113656) c3(calcium-binding protein 8 isoform 1) c4(221964) c5(221965, 221966, 221967, 221968, 221969, 221970, 221971, 221972, 221973, 221974) c6( ) c7(aF, aA); #c1(CALN1) c2(XP_011514896) c3(calcium-binding protein 8 isoform X2) c4( ) c5(307657, 307658, 307659) c6( ) c7(aF, aA); #c1(CALN1) c2(XP_011514900) c3(calcium-binding protein 8 isoform X3) c4( ) c5(307660, 307661, 307662, 307663, 307664, 307665) c6( ) c7(aF, aA); #c1(CALR) c2(NP_004334) c3(calreticulin precursor) c4(145230, 145231) c5(145232, 145233, 145234, 145235, 145236, 145237, 145238, 145239, 145240, 145241, 145242, 145243, 145244) c6( ) c7(DS, T, if, al, eb, bB, qj, ci, xy, aE, rw, bW, pX, K, hu, azx, ake, eL, cp, azu, yo, up, aW, NR, g, as, cm, uC, mx, cj, m, NT, n, qN, cd, eW, azw, b, eT, azt, h, dL, he, agF, pm, cA, hR, pg, fL, it, B, iH, mr, aA, j, q, eA, MK, aT, yu, dz, bK, atZ, azv, ae, dl, s, oV, Y, r, ck, au, bt, vi, qi, mC, ad, yt, NS, hD, IQ, Yj, d, et, cH, afi, eZ, nf, gI, kD, yy, aF, YZ, bF, gk, pc, bE, azy, i, y, X, pC); #c1(CALR3) c2(NP_659483) c3(calreticulin-3 precursor) c4(240165) c5(240166, 240167, 240168, 240169, 240170, 240171) c6( ) c7(azz); #c1(CALU) c2(NP_001124146) c3(calumenin isoform b precursor) c4(48269) c5(48270, 48271, 48272, 48273, 48274, 48275, 48276, 48277, 48278, 48279, 48280, 48281, 48282, 48283, 48284, 48285, 48286, 48287, 48288, 48289, 48290) c6( ) c7(T, dD, d, eM, yt, ea, bE, bB, j, IS, eq, aaD, iu); #c1(CALU) c2(NP_001186600) c3(calumenin isoform c precursor) c4(77918, 77919, 77920, 77921, 77922) c5(77923, 77924, 77925, 77926, 77927, 77928, 77929, 77930, 77931, 77932, 77933, 77934, 77935, 77936, 77937, 77938, 77939, 77940) c6( ) c7(T, dD, d, eM, yt, ea, bE, bB, j, IS, eq, aaD, iu); #c1(CALU) c2(NP_001186601) c3(calumenin isoform d precursor) c4(77941, 77942, 77943, 77944, 77945) c5(77946, 77947, 77948, 77949, 77950, 77951, 77952, 77953, 77954, 77955, 77956) c6( ) c7(T, dD, d, eM, yt, ea, bE, bB, j, IS, eq, aaD, iu); #c1(CALU) c2(NP_001186602) c3(calumenin isoform e precursor) c4(77957) c5(77958, 77959, 77960, 77961, 77962, 77963, 77964, 77965, 77966, 77967, 77968, 77969, 77970, 77971, 77972) c6( ) c7(T, dD, d, eM, yt, ea, bE, bB, j, IS, eq, aaD, iu); #c1(CALU) c2(NP_001210) c3(calumenin isoform a precursor) c4( ) c5(83749, 83750, 83751, 83752, 83753, 83754, 83755, 83756, 83757, 83758, 83759, 83760, 83761, 83762) c6( ) c7(T, dD, d, eM, yt, ea, bE, bB, j, IS, eq, aaD, iu); #c1(CALU) c2(XP_011514890) c3(calumenin isoform X1) c4( ) c5(307640, 307641, 307642, 307643, 307644, 307645, 307646, 307647, 307648, 307649, 307650, 307651, 307652, 307653, 307654, 307655, 307656) c6( ) c7(T, dD, d, eM, yt, ea, bE, bB, j, IS, eq, aaD, iu); #c1(CALY) c2(NP_056537) c3(neuron-specific vesicular protein calcyon) c4(188007, 188008) c5(188009, 188010, 188011, 188012, 188013, 188014) c6( ) c7(Gx); #c1(CALY) c2(XP_011538141) c3(neuron-specific vesicular protein calcyon isoform X4) c4(335728) c5(335729, 335730, 335731, 335732, 335733, 335734, 335735, 335736, 335737, 335738, 335739, 335740, 335741, 335742, 335743, 335744) c6( ) c7(Gx); #c1(CAMK1) c2(NP_003647) c3(calcium/calmodulin-dependent protein kinase type 1) c4(139909) c5(139910, 139911, 139912, 139913, 139914, 139915) c6( ) c7(jf, eM, aW, aT, ae, ad); #c1(CAMK1D) c2(NP_065130) c3(calcium/calmodulin-dependent protein kinase type 1D isoform 1) c4(204085) c5(204086, 204087, 204088, 204089, 204090, 204091) c6( ) c7(bL, Bl, T, cF, pN, aW, e, aT, h, aj, v, ad); #c1(CAMK1D) c2(NP_705718) c3(calcium/calmodulin-dependent protein kinase type 1D isoform 2) c4(246282) c5(246283, 246284, 246285, 246286, 246287, 246288) c6( ) c7(bL, Bl, T, cF, pN, aW, e, aT, h, aj, v, ad); #c1(CAMK1G) c2(NP_065172) c3(calcium/calmodulin-dependent protein kinase type 1G) c4(204377) c5(204378, 204379, 204380, 204381, 204382, 204383, 204384, 204385, 204386, 204387, 204388, 204389) c6(204390, 204391) c7(c); #c1(CAMK2A) c2(NP_057065) c3(calcium/calmodulin-dependent protein kinase type II subunit alpha isoform 1) c4(188735, 188736) c5(188737, 188738, 188739, 188740, 188741, 188742) c6( ) c7(ff, Xg, cu, bK, en, nA, eF, af); #c1(CAMK2A) c2(NP_741960) c3(calcium/calmodulin-dependent protein kinase type II subunit alpha isoform 2) c4(247468) c5(247469, 247470, 247471, 247472, 247473, 247474, 247475, 247476, 247477, 247478, 247479, 247480) c6( ) c7(ff, Xg, cu, bK, en, nA, eF, af); #c1(CAMK2B) c2(NP_001211) c3(calcium/calmodulin-dependent protein kinase type II subunit beta isoform 1) c4(83763) c5(83764, 83765, 83766, 83767, 83768, 83769) c6( ) c7(Y, cu, sv, acl, ei, jb, eA, cp); #c1(CAMK2B) c2(NP_742075) c3(calcium/calmodulin-dependent protein kinase type II subunit beta isoform 2) c4(247968, 247969) c5(247970, 247971, 247972, 247973, 247974, 247975, 247976, 247977, 247978, 247979, 247980, 247981, 247982, 247983, 247984, 247985) c6( ) c7(Y, cu, sv, acl, ei, jb, eA, cp); #c1(CAMK2B) c2(NP_742076) c3(calcium/calmodulin-dependent protein kinase type II subunit beta isoform 3) c4(247986) c5(247987, 247988, 247989, 247990, 247991, 247992, 247993, 247994, 247995, 247996) c6( ) c7(Y, cu, sv, acl, ei, jb, eA, cp); #c1(CAMK2B) c2(NP_742077) c3(calcium/calmodulin-dependent protein kinase type II subunit beta isoform 4) c4(247997) c5(247998, 247999, 248000, 248001, 248002, 248003) c6( ) c7(Y, cu, sv, acl, ei, jb, eA, cp); #c1(CAMK2B) c2(NP_742078) c3(calcium/calmodulin-dependent protein kinase type II subunit beta isoform 5) c4(248004) c5(248005, 248006, 248007, 248008, 248009, 248010) c6( ) c7(Y, cu, sv, acl, ei, jb, eA, cp); #c1(CAMK2B) c2(NP_742079) c3(calcium/calmodulin-dependent protein kinase type II subunit beta isoform 6) c4(248011) c5(248012, 248013, 248014, 248015, 248016, 248017) c6( ) c7(Y, cu, sv, acl, ei, jb, eA, cp); #c1(CAMK2B) c2(NP_742080) c3(calcium/calmodulin-dependent protein kinase type II subunit beta isoform 7) c4(248018) c5(248019, 248020, 248021, 248022, 248023, 248024) c6( ) c7(Y, cu, sv, acl, ei, jb, eA, cp); #c1(CAMK2B) c2(NP_742081) c3(calcium/calmodulin-dependent protein kinase type II subunit beta isoform 8) c4(248025) c5(248026, 248027, 248028, 248029, 248030, 248031) c6( ) c7(Y, cu, sv, acl, ei, jb, eA, cp); #c1(CAMK2D) c2(NP_001212) c3(calcium/calmodulin-dependent protein kinase type II subunit delta isoform 3) c4(83770) c5(83771, 83772, 83773, 83774, 83775, 83776) c6( ) c7(kl, ac, ha, j, m, lf, cd); #c1(CAMK2D) c2(NP_742112) c3(calcium/calmodulin-dependent protein kinase type II subunit delta isoform 5) c4(248174) c5(248175, 248176, 248177, 248178, 248179, 248180) c6( ) c7(kl, ac, ha, j, m, lf, cd); #c1(CAMK2D) c2(NP_742113) c3(calcium/calmodulin-dependent protein kinase type II subunit delta isoform 1) c4(248181) c5(248182, 248183, 248184, 248185, 248186, 248187, 248188, 248189, 248190, 248191, 248192, 248193, 248194, 248195, 248196, 248197) c6( ) c7(kl, ac, ha, j, m, lf, cd); #c1(CAMK2D) c2(NP_742126) c3(calcium/calmodulin-dependent protein kinase type II subunit delta isoform 2) c4(248198) c5(248199, 248200, 248201, 248202, 248203, 248204) c6( ) c7(kl, ac, ha, j, m, lf, cd); #c1(CAMK2D) c2(NP_742127) c3(calcium/calmodulin-dependent protein kinase type II subunit delta isoform 4) c4(248205) c5(248206, 248207, 248208, 248209, 248210, 248211) c6( ) c7(kl, ac, ha, j, m, lf, cd); #c1(CAMK2D) c2(XP_005263308) c3(calcium/calmodulin-dependent protein kinase type II subunit delta isoform X3) c4(278394, 278395) c5(278396, 278397, 278398, 278399, 278400, 278401, 278402, 278403, 278404, 278405, 278406, 278407) c6( ) c7(kl, ac, ha, j, m, lf, cd); #c1(CAMK2D) c2(XP_005263312) c3(calcium/calmodulin-dependent protein kinase type II subunit delta isoform X7) c4(278408) c5(278409, 278410, 278411, 278412, 278413, 278414) c6( ) c7(kl, ac, ha, j, m, lf, cd); #c1(CAMK2D) c2(XP_006714393) c3(calcium/calmodulin-dependent protein kinase type II subunit delta isoform X15) c4(287826) c5( ) c6( ) c7(kl, ac, ha, j, m, lf, cd); #c1(CAMK2D) c2(XP_011530591) c3(calcium/calmodulin-dependent protein kinase type II subunit delta isoform X11) c4(326495) c5(326496, 326497, 326498, 326499, 326500, 326501) c6( ) c7(kl, ac, ha, j, m, lf, cd); #c1(CAMK2G) c2(NP_001213) c3(calcium/calmodulin-dependent protein kinase type II subunit gamma isoform 4) c4(83777) c5(83778, 83779, 83780, 83781, 83782, 83783) c6( ) c7(af, iT); #c1(CAMK2G) c2(NP_751909) c3(calcium/calmodulin-dependent protein kinase type II subunit gamma isoform 2) c4(248515) c5(248516, 248517, 248518, 248519, 248520, 248521) c6( ) c7(af, iT); #c1(CAMK2G) c2(NP_751910) c3(calcium/calmodulin-dependent protein kinase type II subunit gamma isoform 3) c4(248522) c5(248523, 248524, 248525, 248526, 248527, 248528) c6( ) c7(af, iT); #c1(CAMK2G) c2(NP_751911) c3(calcium/calmodulin-dependent protein kinase type II subunit gamma isoform 1) c4(248529, 248530) c5(248531, 248532, 248533, 248534, 248535, 248536, 248537, 248538, 248539, 248540, 248541, 248542, 248543) c6( ) c7(af, iT); #c1(CAMK2G) c2(XP_005270259) c3(calcium/calmodulin-dependent protein kinase type II subunit gamma isoform X16) c4(283301) c5(283302, 283303, 283304, 283305, 283306, 283307) c6( ) c7(af, iT); #c1(CAMK2G) c2(XP_005270260) c3(calcium/calmodulin-dependent protein kinase type II subunit gamma isoform X17) c4(283308) c5(283309, 283310, 283311, 283312, 283313, 283314) c6( ) c7(af, iT); #c1(CAMK2G) c2(XP_005270262) c3(calcium/calmodulin-dependent protein kinase type II subunit gamma isoform X18) c4(283315) c5(283316, 283317, 283318, 283319, 283320, 283321) c6( ) c7(af, iT); #c1(CAMK2G) c2(XP_006718056) c3(calcium/calmodulin-dependent protein kinase type II subunit gamma isoform X1) c4(291482) c5(291483, 291484, 291485, 291486, 291487, 291488) c6( ) c7(af, iT); #c1(CAMK2G) c2(XP_006718059) c3(calcium/calmodulin-dependent protein kinase type II subunit gamma isoform X6) c4(291489, 291490) c5(291491, 291492, 291493, 291494, 291495, 291496) c6( ) c7(af, iT); #c1(CAMK2G) c2(XP_011538527) c3(calcium/calmodulin-dependent protein kinase type II subunit gamma isoform X4) c4( ) c5(336284) c6( ) c7(af, iT); #c1(CAMK2G) c2(XP_011538533) c3(calcium/calmodulin-dependent protein kinase type II subunit gamma isoform X22) c4( ) c5(336285, 336286, 336287, 336288, 336289) c6( ) c7(af, iT); #c1(CAMK4) c2(NP_001735) c3(calcium/calmodulin-dependent protein kinase type IV) c4(120628, 120629) c5(120630, 120631, 120632, 120633, 120634, 120635, 120636, 120637, 120638, 120639, 120640, 120641, 120642, 120643, 120644, 120645) c6( ) c7(cF, ND, oe, XY, eZ, pk, vH, cu, fL, IQ, Ea, uE, t, mC, Hr, hq); #c1(CAMKK1) c2(NP_757343) c3(calcium/calmodulin-dependent protein kinase kinase 1 isoform a) c4(248619, 248620) c5(248621, 248622, 248623, 248624, 248625, 248626, 248627, 248628, 248629, 248630, 248631, 248632) c6( ) c7(T, bz, aR); #c1(CAMKK1) c2(XP_006721651) c3(calcium/calmodulin-dependent protein kinase kinase 1 isoform X2) c4(294140) c5(294141, 294142, 294143, 294144, 294145, 294146, 294147, 294148, 294149, 294150, 294151, 294152, 294153, 294154) c6(294155, 294156) c7(T, bz, aR); #c1(CAMKK1) c2(XP_011522333) c3(calcium/calmodulin-dependent protein kinase kinase 1 isoform X1) c4(317016) c5( ) c6( ) c7(T, bz, aR); #c1(CAMKK2) c2(NP_001257414) c3(calcium/calmodulin-dependent protein kinase kinase 2 isoform 1) c4(95390) c5(95391, 95392, 95393, 95394, 95395, 95396, 95397, 95398, 95399, 95400) c6( ) c7(dA, M, mf, bK, m, v, azA, t, ae, ad, bA, hq); #c1(CAMKK2) c2(NP_001257415) c3(calcium/calmodulin-dependent protein kinase kinase 2 isoform 7) c4(95401) c5(95402, 95403, 95404, 95405, 95406, 95407) c6( ) c7(dA, M, mf, bK, m, v, azA, t, ae, ad, bA, hq); #c1(CAMKK2) c2(NP_757364) c3(calcium/calmodulin-dependent protein kinase kinase 2 isoform 6) c4(248712) c5(248713, 248714, 248715, 248716, 248717, 248718, 248719, 248720, 248721, 248722, 248723, 248724, 248725, 248726, 248727, 248728, 248729, 248730, 248731, 248732, 248733, 248734, 248735) c6( ) c7(dA, M, mf, bK, m, v, azA, t, ae, ad, bA, hq); #c1(CAMKK2) c2(NP_757380) c3(calcium/calmodulin-dependent protein kinase kinase 2 isoform 2) c4(249088, 249089) c5(249090, 249091, 249092, 249093, 249094, 249095, 249096, 249097, 249098, 249099, 249100, 249101, 249102, 249103, 249104, 249105) c6( ) c7(dA, M, mf, bK, m, v, azA, t, ae, ad, bA, hq); #c1(CAMKK2) c2(XP_005253879) c3(calcium/calmodulin-dependent protein kinase kinase 2 isoform X3) c4(272751) c5(272752, 272753, 272754, 272755, 272756, 272757) c6( ) c7(dA, M, mf, bK, m, v, azA, t, ae, ad, bA, hq); #c1(CAMKK2) c2(XP_005253880) c3(calcium/calmodulin-dependent protein kinase kinase 2 isoform X1) c4( ) c5(272758, 272759, 272760, 272761, 272762, 272763) c6( ) c7(dA, M, mf, bK, m, v, azA, t, ae, ad, bA, hq); #c1(CAMKK2) c2(XP_005253881) c3(calcium/calmodulin-dependent protein kinase kinase 2 isoform X2) c4(272764) c5(272765, 272766, 272767, 272768, 272769, 272770) c6( ) c7(dA, M, mf, bK, m, v, azA, t, ae, ad, bA, hq); #c1(CAMKK2) c2(XP_011536064) c3(calcium/calmodulin-dependent protein kinase kinase 2 isoform X5) c4(333389, 333390, 333391, 333392) c5( ) c6( ) c7(dA, M, mf, bK, m, v, azA, t, ae, ad, bA, hq); #c1(CAMKMT) c2(NP_079042) c3(calmodulin-lysine N-methyltransferase) c4(216717) c5(216718, 216719, 216720, 216721, 216722, 216723) c6( ) c7(bM, T, qb, jh, fd, bS, fr, ct, ci, pK, eA, ad, ip, ft, ib, pN, azB, IC, aT, io, h, dL, bK, K, hB, ae, eL, cp, d, s, iU, aW, Y, ff, CQ, en, Z, t, cm, azC, op, es, iA, vA, m, azr, xh, gT, B); #c1(CAMKMT) c2(XP_011531414) c3(calmodulin-lysine N-methyltransferase isoform X2) c4(327500) c5(327501, 327502, 327503, 327504, 327505, 327506) c6( ) c7(bM, T, qb, jh, fd, bS, fr, ct, ci, pK, eA, ad, ip, ft, ib, pN, azB, IC, aT, io, h, dL, bK, K, hB, ae, eL, cp, d, s, iU, aW, Y, ff, CQ, en, Z, t, cm, azC, op, es, iA, vA, m, azr, xh, gT, B); #c1(CAMLG) c2(NP_001736) c3(calcium signal-modulating cyclophilin ligand) c4(120646) c5(120647, 120648, 120649, 120650, 120651, 120652) c6( ) c7(ck, T, dD, aW, Y, jh, aT, eq, bt); #c1(CAMP) c2(NP_004336) c3(cathelicidin antimicrobial peptide preproprotein) c4(145252, 145253, 145254, 145255, 145256, 145257, 145258, 145259, 145260, 145261, 145262, 145263, 145264, 145265, 145266, 145267, 145268, 145269, 145270, 145271, 145272, 145273, 145274, 145275, 145276, 145277, 145278, 145279, 145280, 145281, 145282, 145283, 145284) c5(145285, 145286, 145287, 145288, 145289, 145290, 145291, 145292, 145293, 145294, 145295, 145296, 145297, 145298, 145299, 145300, 145301, 145302, 145303, 145304, 145305, 145306, 145307, 145308, 145309, 145310, 145311, 145312, 145313, 145314, 145315, 145316, 145317, 145318, 145319, 145320, 145321, 145322, 145323, 145324, 145325, 145326, 145327, 145328, 145329, 145330, 145331, 145332, 145333, 145334, 145335, 145336, 145337, 145338, 145339, 145340, 145341, 145342, 145343, 145344, 145345, 145346, 145347, 145348, 145349, 145350, 145351, 145352, 145353, 145354, 145355, 145356, 145357, 145358, 145359, 145360, 145361, 145362, 145363, 145364, 145365, 145366, 145367, 145368, 145369, 145370, 145371, 145372, 145373, 145374, 145375, 145376, 145377, 145378, 145379, 145380, 145381, 145382, 145383, 145384, 145385, 145386, 145387, 145388, 145389, 145390, 145391, 145392, 145393, 145394, 145395, 145396, 145397, 145398, 145399, 145400, 145401, 145402, 145403, 145404, 145405, 145406, 145407, 145408, 145409, 145410, 145411, 145412, 145413, 145414, 145415, 145416, 145417, 145418, 145419, 145420, 145421, 145422, 145423, 145424, 145425, 145426, 145427, 145428, 145429, 145430, 145431, 145432, 145433, 145434, 145435, 145436, 145437, 145438, 145439, 145440, 145441, 145442, 145443, 145444, 145445, 145446, 145447, 145448, 145449, 145450, 145451, 145452, 145453, 145454, 145455, 145456, 145457, 145458, 145459, 145460, 145461, 145462, 145463, 145464, 145465, 145466, 145467) c6(145468, 145469, 145470, 145471) c7(oO, gV, ka, T, dD, dA, fR, bM, ea, azE, wh, aA, hB, afK, azF, BF, eq, C, pM, asS, ad, eA, x, av, hd, azD, aT, hD, h, IQ, DY, ae, aa, RT, XE, LC, aW, bg, cr, eZ, Kb, aF, g, ajz, t, f, bz, eE, zV, EJ, ck, ajl, ba, iT, Jr, xD, nB, ki, bE, mx, at, Zn, JH, k, m, bt, kS, ao); #c1(CAMSAP1) c2(NP_056262) c3(calmodulin-regulated spectrin-associated protein 1) c4(186791) c5(186792, 186793, 186794, 186795, 186796, 186797, 186798, 186799, 186800, 186801, 186802, 186803) c6( ) c7(Ej, T); #c1(CAMSAP1) c2(XP_005263453) c3(calmodulin-regulated spectrin-associated protein 1 isoform X1) c4(278477) c5(278478, 278479, 278480, 278481, 278482, 278483) c6( ) c7(Ej, T); #c1(CAMSAP1) c2(XP_011516574) c3(calmodulin-regulated spectrin-associated protein 1 isoform X2) c4(310031) c5( ) c6( ) c7(Ej, T); #c1(CAMSAP2) c2(NP_001284636) c3(calmodulin-regulated spectrin-associated protein 2 isoform 1) c4(112198) c5(112199, 112200, 112201, 112202, 112203, 112204) c6( ) c7(ha); #c1(CAMSAP2) c2(NP_001284637) c3(calmodulin-regulated spectrin-associated protein 2 isoform 3) c4(112205) c5(112206, 112207, 112208, 112209, 112210, 112211) c6( ) c7(ha); #c1(CAMSAP2) c2(NP_982284) c3(calmodulin-regulated spectrin-associated protein 2 isoform 2) c4(263279) c5(263280, 263281, 263282, 263283, 263284, 263285) c6( ) c7(ha); #c1(CAMTA1) c2(XP_011539388) c3(calmodulin-binding transcription activator 1 isoform X4) c4(337493, 337494) c5(337495, 337496, 337497, 337498, 337499, 337500, 337501, 337502, 337503, 337504, 337505, 337506) c6( ) c7(azH, bL, d, ac, azG, j, eA, nA, cm, Fc, cd); #c1(CAMTA1) c2(XP_011539389) c3(calmodulin-binding transcription activator 1 isoform X5) c4(337507, 337508) c5( ) c6( ) c7(azH, bL, d, ac, azG, j, eA, nA, cm, Fc, cd); #c1(CAMTA1) c2(XP_011539390) c3(calmodulin-binding transcription activator 1 isoform X6) c4( ) c5(337509, 337510, 337511, 337512, 337513, 337514) c6( ) c7(azH, bL, d, ac, azG, j, eA, nA, cm, Fc, cd); #c1(CAND1) c2(NP_060918) c3(cullin-associated NEDD8-dissociated protein 1) c4(198616, 198617) c5(198618, 198619, 198620, 198621, 198622, 198623, 198624, 198625, 198626, 198627, 198628, 198629, 198630, 198631, 198632, 198633, 198634) c6( ) c7(T, g, Ea, ae, ad, bA); #c1(CAND2) c2(NP_001155971) c3(cullin-associated NEDD8-dissociated protein 2 isoform 1) c4(61666) c5(61667, 61668, 61669, 61670, 61671, 61672) c6( ) c7(XW); #c1(CAND2) c2(NP_036430) c3(cullin-associated NEDD8-dissociated protein 2 isoform 2) c4(173808) c5(173809, 173810, 173811, 173812, 173813, 173814) c6( ) c7(XW); #c1(CANT1) c2(XP_005257079) c3(soluble calcium-activated nucleotidase 1 isoform X1) c4(274661, 274662, 274663) c5(274664, 274665, 274666, 274667, 274668, 274669, 274670, 274671, 274672, 274673, 274674, 274675, 274676, 274677, 274678, 274679, 274680, 274681, 274682, 274683, 274684, 274685, 274686, 274687, 274688, 274689, 274690, 274691) c6( ) c7(dD, kB, KH, U, eq, azl, bC, kC, aR); #c1(CANX) c2(XP_011532966) c3(calnexin isoform X2) c4(329127, 329128, 329129, 329130, 329131, 329132, 329133, 329134, 329135, 329136, 329137) c5(329138, 329139, 329140, 329141, 329142, 329143, 329144, 329145, 329146, 329147, 329148, 329149, 329150, 329151, 329152, 329153, 329154, 329155, 329156, 329157) c6( ) c7(T, dD, hl, aio, ea, if, fd, aj, pl, j, fu, qj, eq, qN, pC, bW, azt, aT, ey, K, bU, yj, cp, aW, Y, jT, nC, iK, kP, asl, cj, nw, de); #c1(CANX) c2(XP_011532967) c3(calnexin isoform X1) c4( ) c5(329158, 329159, 329160, 329161, 329162, 329163, 329164, 329165, 329166, 329167, 329168, 329169, 329170, 329171, 329172, 329173, 329174, 329175, 329176, 329177, 329178, 329179, 329180, 329181, 329182, 329183, 329184, 329185, 329186, 329187, 329188, 329189, 329190, 329191, 329192, 329193, 329194, 329195, 329196, 329197, 329198, 329199, 329200, 329201, 329202, 329203, 329204, 329205, 329206, 329207, 329208, 329209, 329210) c6( ) c7(T, dD, hl, aio, ea, if, fd, aj, pl, j, fu, qj, eq, qN, pC, bW, azt, aT, ey, K, bU, yj, cp, aW, Y, jT, nC, iK, kP, asl, cj, nw, de); #c1(CAP1) c2(XP_011538812) c3(adenylyl cyclase-associated protein 1 isoform X1) c4(336599, 336600, 336601, 336602, 336603, 336604, 336605) c5(336606, 336607, 336608, 336609, 336610, 336611, 336612, 336613, 336614, 336615, 336616, 336617, 336618, 336619, 336620, 336621, 336622, 336623, 336624, 336625, 336626, 336627, 336628, 336629, 336630, 336631, 336632, 336633, 336634, 336635, 336636, 336637, 336638, 336639, 336640, 336641, 336642, 336643, 336644, 336645, 336646, 336647, 336648, 336649, 336650, 336651, 336652, 336653, 336654, 336655, 336656, 336657, 336658, 336659, 336660, 336661, 336662, 336663, 336664, 336665, 336666, 336667, 336668, 336669, 336670, 336671, 336672, 336673, 336674, 336675, 336676, 336677, 336678, 336679, 336680, 336681, 336682, 336683, 336684, 336685, 336686, 336687, 336688, 336689, 336690, 336691, 336692, 336693, 336694, 336695, 336696) c6(336697, 336698, 336699, 336700, 336701, 336702, 336703, 336704, 336705, 336706, 336707, 336708, 336709, 336710, 336711, 336712, 336713, 336714, 336715, 336716, 336717, 336718, 336719) c7(bL, bM, T, Ke, jx, ci, q, ad, eW, F, afn, aT, h, K, ae, bA, avR, aW, r, tv, aq, tu, avT, cT, rR, avS, CZ, B); #c1(CAP1) c2(XP_011538817) c3(adenylyl cyclase-associated protein 1 isoform X2) c4(336720, 336721, 336722) c5(336723, 336724, 336725, 336726, 336727, 336728, 336729, 336730, 336731, 336732, 336733, 336734, 336735, 336736, 336737, 336738, 336739, 336740, 336741, 336742, 336743, 336744, 336745, 336746, 336747, 336748, 336749, 336750, 336751, 336752, 336753, 336754, 336755, 336756, 336757, 336758, 336759, 336760, 336761, 336762, 336763, 336764) c6(336765, 336766, 336767, 336768, 336769, 336770, 336771, 336772, 336773, 336774, 336775, 336776) c7(bL, bM, T, Ke, jx, ci, q, ad, eW, F, afn, aT, h, K, ae, bA, avR, aW, r, tv, aq, tu, avT, cT, rR, avS, CZ, B); #c1(CAP2) c2(NP_006357) c3(adenylyl cyclase-associated protein 2) c4(164329, 164330) c5(164331, 164332, 164333, 164334, 164335, 164336) c6( ) c7(wR, B, W); #c1(CAP2) c2(XP_011512535) c3(adenylyl cyclase-associated protein 2 isoform X1) c4( ) c5(303194, 303195, 303196, 303197, 303198, 303199) c6( ) c7(wR, B, W); #c1(CAPG) c2(NP_001243069) c3(macrophage-capping protein isoform 2) c4(89722) c5(89723, 89724, 89725, 89726, 89727, 89728) c6( ) c7(T, eR, kA, oA, aA, n, fr, aY, hF, ai, cd, dY, ec, ql, oj, aT, h, GQ, K, af, Uf, cH, aW, Io, aF, CQ, g, cm, wT, W, eD, Hb, IM, pJ, bt, iu); #c1(CAPG) c2(XP_011531425) c3(macrophage-capping protein isoform X1) c4(327520, 327521, 327522, 327523) c5(327524, 327525, 327526, 327527, 327528, 327529, 327530, 327531, 327532, 327533, 327534, 327535, 327536, 327537, 327538, 327539, 327540, 327541, 327542, 327543, 327544, 327545, 327546, 327547, 327548, 327549, 327550, 327551, 327552, 327553, 327554, 327555, 327556, 327557, 327558, 327559, 327560, 327561, 327562, 327563) c6( ) c7(T, eR, kA, oA, aA, n, fr, aY, hF, ai, cd, dY, ec, ql, oj, aT, h, GQ, K, af, Uf, cH, aW, Io, aF, CQ, g, cm, wT, W, eD, Hb, IM, pJ, bt, iu); #c1(CAPN1) c2(XP_011543594) c3(calpain-1 catalytic subunit isoform X1) c4(342518, 342519, 342520, 342521, 342522, 342523, 342524, 342525, 342526, 342527, 342528) c5(342529, 342530, 342531, 342532, 342533, 342534, 342535, 342536, 342537, 342538, 342539, 342540, 342541, 342542, 342543, 342544, 342545, 342546, 342547, 342548, 342549, 342550, 342551, 342552, 342553, 342554, 342555, 342556, 342557, 342558, 342559, 342560, 342561, 342562, 342563, 342564, 342565, 342566, 342567, 342568, 342569, 342570, 342571, 342572, 342573, 342574, 342575, 342576, 342577, 342578, 342579, 342580, 342581, 342582, 342583, 342584, 342585, 342586, 342587, 342588, 342589, 342590, 342591, 342592, 342593, 342594, 342595, 342596, 342597, 342598, 342599, 342600, 342601, 342602, 342603, 342604, 342605, 342606, 342607, 342608, 342609, 342610, 342611, 342612, 342613, 342614) c6( ) c7(bL, sS, kB, Y, ff, rf, uY, en, af, ad); #c1(CAPN10) c2(NP_075571) c3(calpain-10 isoform a) c4(213986, 213987, 213988) c5(213989, 213990, 213991, 213992, 213993, 213994) c6( ) c7(bL, GI, aC, dD, iH, eR, aZ, ea, e, aA, cz, n, aj, dG, j, ci, nA, Gn, v, eq, q, J, ad, aex, jy, K, uV, bq, qM, af, aev, kI, cH, azJ, aeS, r, Mz, dq, aF, uC, qa, bJ, W, bE, Fi, mg, vy, mf, ei, rA, ao); #c1(CAPN10) c2(NP_075573) c3(calpain-10 isoform c) c4(213995, 213996) c5(213997, 213998, 213999, 214000, 214001, 214002, 214003, 214004, 214005, 214006, 214007, 214008, 214009, 214010, 214011, 214012, 214013, 214014, 214015, 214016, 214017, 214018, 214019, 214020) c6( ) c7(bL, GI, aC, dD, iH, eR, aZ, ea, e, aA, cz, n, aj, dG, j, ci, nA, Gn, v, eq, q, J, ad, aex, jy, K, uV, bq, qM, af, aev, kl, cH, azJ, aeS, r, Mz, dq, aF, uC, qa, bJ, W, bE, Fi, mg, vy, mf, ei, rA, ao); #c1(CAPN13) c2(NP_653176) c3(calpain-13) c4(238951, 238952) c5(238953, 238954, 238955, 238956, 238957, 238958, 238959, 238960, 238961, 238962, 238963, 238964) c6( ) c7(cz); #c1(CAPN14) c2(NP_001138594) c3(calpain-14) c4(57134, 57135) c5(57136, 57137, 57138, 57139, 57140, 57141, 57142, 57143, 57144, 57145, 57146, 57147) c6( ) c7(zo, akc); #c1(CAPN2) c2(NP_001139540) c3(calpain-2 catalytic subunit isoform 2) c4(59471) c5(59472, 59473, 59474, 59475, 59476, 59477) c6( ) c7(aW, U, cj, aT, uY, an, bt); #c1(CAPN2) c2(NP_001739) c3(calpain-2 catalytic subunit isoform 1) c4(120653, 120654, 120655) c5(120656, 120657, 120658, 120659, 120660, 120661, 120662, 120663, 120664, 120665, 120666, 120667) c6( ) c7(aW, U, cj, aT, uY, an, bt); #c1(CAPN2) c2(XP_011542588) c3(calpain-2 catalytic subunit isoform X1) c4( ) c5(341154, 341155, 341156, 341157, 341158, 341159) c6( ) c7(aW, U, cj, aT, uY, an, bt); #c1(CAPN3) c2(NP_000061) c3(calpain-3 isoform a) c4(1087) c5(1088, 1089, 1090, 1091, 1092, 1093, 1094, 1095) c6( ) c7(bL, aiu, T, aeu, aj, v, Rk, J, no, azL, Wn, Ae, Pq, oj, Ak, bl, atO, li, VC, aqZ, Y, xs, dr, adu, ac, au, azK, km, cj, azM, oh, rx, Fw, B, jr); #c1(CAPN3) c2(NP_077320) c3(calpain-3 isoform b) c4(215216, 215217, 215218, 215219) c5(215220, 215221, 215222, 215223, 215224, 215225, 215226, 215227, 215228, 215229, 215230, 215231, 215232, 215233, 215234, 215235, 215236, 215237, 215238, 215239, 215240) c6( ) c7(bL, aiu, T, aeu, aj, v, Rk, J, no, azL, Wn, Ae, Pq, oj, Ak, bl, atO, li, VC, aqZ, Y, xs, dr, adu, ac, au, azK, km, cj, azM, oh, rx, Fw, B, jr); #c1(CAPN3) c2(NP_775110) c3(calpain-3 isoform c) c4(249599) c5(249600, 249601, 249602, 249603, 249604, 249605, 249606) c6( ) c7(bL, aiu, T, aeu, aj, v, Rk, J, no, azL, Wn, Ae, Pq, oj, Ak, bl, atO, li, VC, aqZ, Y, xs, dr, adu, ac, au, azK, km, cj, azM, oh, rx, Fw, B, jr); #c1(CAPN3) c2(NP_775111) c3(calpain-3 isoform d) c4(249607, 249608) c5(249609, 249610, 249611, 249612, 249613, 249614, 249615, 249616, 249617, 249618, 249619, 249620, 249621, 249622) c6( ) c7(bL, aiu, T, aeu, aj, v, Rk, J, no, azL, Wn, Ae, Pq, oj, Ak, bl, atO, li, VC, aqZ, Y, xs, dr, adu, ac, au, azK, km, cj, azM, oh, rx, Fw, B, jr); #c1(CAPN3) c2(NP_775112) c3(calpain-3 isoform e) c4( ) c5(249623, 249624, 249625, 249626, 249627, 249628, 249629, 249630, 249631) c6( ) c7(bL, aiu, T, aeu, aj, v, Rk, J, no, azL, Wn, Ae, Pq, oj, Ak, bl, atO, li, VC, aqZ, Y, xs, dr, adu, ac, au, azK, km, cj, azM, oh, rx, Fw, B, jr); #c1(CAPN5) c2(NP_004046) c3(calpain-5) c4(143137) c5(143138, 143139, 143140, 143141, 143142) c6( ) c7(bL, T, dD, aZ, e, cz, v, eq, qW, av, Pq, BJ, K, Ha, cY, kl, cl, t, bz, nB, hL, m, oQ); #c1(CAPN5) c2(XP_011543527) c3(calpain-5 isoform X1) c4(342421, 342422, 342423) c5(342424, 342425, 342426, 342427, 342428, 342429, 342430, 342431, 342432, 342433, 342434, 342435, 342436, 342437, 342438, 342439, 342440, 342441, 342442, 342443, 342444, 342445, 342446) c6( ) c7(bL, T, dD, aZ, e, cz, v, eq, qW, av, Pq, BJ, K, Ha, cY, kl, cl, t, bz, nB, hL, m, oQ); #c1(CAPN6) c2(NP_055104) c3(calpain-6) c4(178963, 178964) c5(178965, 178966, 178967, 178968, 178969, 178970, 178971, 178972, 178973, 178974, 178975, 178976) c6( ) c7(bK); #c1(CAPN7) c2(NP_055111) c3(calpain-7) c4(179005) c5(179006, 179007, 179008, 179009, 179010, 179011) c6( ) c7(W); #c1(CAPN9) c2(NP_006606) c3(calpain-9 isoform 1) c4(166581) c5(166582, 166583, 166584, 166585, 166586, 166587) c6( ) c7(cI, aF, aA, hL, cj); #c1(CAPN9) c2(NP_057536) c3(calpain-9 isoform 2) c4(191293) c5(191294, 191295, 191296, 191297, 191298, 191299) c6( ) c7(cI, aF, aA, hL, cj); #c1(CAPN9) c2(XP_005273067) c3(calpain-9 isoform X4) c4(284285) c5(284286, 284287, 284288, 284289, 284290, 284291) c6( ) c7(cI, aF, aA, hL, cj); #c1(CAPN9) c2(XP_011542319) c3(calpain-9 isoform X1) c4( ) c5(340912) c6( ) c7(cI, aF, aA, hL, cj); #c1(CAPNS1) c2(NP_001289561) c3(calpain small subunit 1 isoform 1) c4(114274) c5(114275, 114276, 114277, 114278, 114279, 114280) c6( ) c7(Mb, T, d, Dh, sw, aW, aT, n, aq, v, eA, B, ad); #c1(CAPRIN1) c2(NP_005889) c3(caprin-1 isoform 1) c4(160137) c5( ) c6( ) c7(ey, K); #c1(CAPRIN1) c2(NP_976240) c3(caprin-1 isoform 2) c4(263041) c5(263042, 263043, 263044, 263045, 263046, 263047, 263048, 263049, 263050, 263051, 263052, 263053, 263054, 263055, 263056, 263057) c6( ) c7(ey, K); #c1(CAPRIN2) c2(NP_001002259) c3(caprin-2 isoform 1) c4(19470) c5(19471, 19472, 19473, 19474, 19475, 19476) c6( ) c7(iO, j, EQ); #c1(CAPRIN2) c2(NP_001193785) c3(caprin-2 isoform 4) c4(82613) c5(82614, 82615, 82616, 82617, 82618, 82619) c6( ) c7(iO, j, EQ); #c1(CAPRIN2) c2(NP_076414) c3(caprin-2 isoform 2) c4(214091) c5(214092, 214093, 214094, 214095, 214096, 214097) c6( ) c7(iO, j, EQ); #c1(CAPRIN2) c2(NP_115532) c3(caprin-2 isoform 3) c4(223108) c5(223109, 223110, 223111, 223112, 223113, 223114) c6( ) c7(iO, j, EQ); #c1(CAPRIN2) c2(XP_006719200) c3(caprin-2 isoform X1) c4(292298) c5(292299, 292300, 292301, 292302, 292303, 292304) c6( ) c7(iO, j, EQ); #c1(CAPRIN2) c2(XP_006719202) c3(caprin-2 isoform X3) c4( ) c5(292305, 292306, 292307, 292308, 292309, 292310) c6( ) c7(iO, j, EQ); #c1(CAPRIN2) c2(XP_011519131) c3(caprin-2 isoform X15) c4(313732) c5( ) c6( ) c7(iO, j, EQ); #c1(CAPS) c2(NP_004049) c3(calcyphosin isoform a) c4(143150, 143151) c5(143152, 143153, 143154, 143155, 143156, 143157, 143158, 143159, 143160, 143161, 143162, 143163) c6( ) c7(hH, ae, ih, ad, awP); #c1(CAPS) c2(NP_542157) c3(calcyphosin isoform b) c4(231445) c5(231446, 231447, 231448, 231449, 231450, 231451) c6( ) c7(hH, ae, ih, ad, awP); #c1(CAPS2) c2(NP_001273476) c3(calcyphosin-2 isoform 2) c4(104975) c5( ) c6( ) c7(rz, bN); #c1(CAPS2) c2(NP_001273478) c3(calcyphosin-2 isoform 4) c4( ) c5(104976, 104977, 104978, 104979, 104980) c6( ) c7(rz, bN); #c1(CAPS2) c2(NP_115995) c3(calcyphosin-2 isoform 1) c4(225154) c5( ) c6( ) c7(rz, bN); #c1(CAPS2) c2(XP_005269251) c3(calcyphosin-2 isoform X12) c4( ) c5(282501, 282502, 282503, 282504, 282505, 282506) c6( ) c7(rz, bN); #c1(CAPS2) c2(XP_006719711) c3(calcyphosin-2 isoform X2) c4( ) c5(292904, 292905, 292906, 292907, 292908, 292909) c6( ) c7(rz, bN); #c1(CAPS2) c2(XP_006719712) c3(calcyphosin-2 isoform X5) c4(292910) c5( ) c6( ) c7(rz, bN); #c1(CAPS2) c2(XP_006719713) c3(calcyphosin-2 isoform X11) c4( ) c5(292911) c6( ) c7(rz, bN); #c1(CAPS2) c2(XP_011537190) c3(calcyphosin-2 isoform X8) c4(334953) c5( ) c6( ) c7(rz, bN); #c1(CAPS2) c2(XP_011537193) c3(calcyphosin-2 isoform X3) c4( ) c5(334954) c6( ) c7(rz, bN); #c1(CAPS2) c2(XP_011537194) c3(calcyphosin-2 isoform X1) c4( ) c5(334955, 334956, 334957, 334958, 334959) c6( ) c7(rz, bN); #c1(CAPSL) c2(NP_001036090) c3(calcyphosin-like protein) c4( ) c5(33963, 33964, 33965, 33966, 33967, 33968, 33969, 33970, 33971, 33972, 33973, 33974, 33975) c6( ) c7(A, bc); #c1(CAPSL) c2(XP_006714507) c3(calcyphosin-like protein isoform X1) c4(287876, 287877) c5(287878, 287879, 287880) c6( ) c7(A, bc); #c1(CAPZA2) c2(NP_006127) c3(F-actin-capping protein subunit alpha-2) c4(162260, 162261) c5(162262, 162263, 162264, 162265, 162266, 162267, 162268, 162269, 162270, 162271, 162272, 162273) c6( ) c7(ey); #c1(CAPZA3) c2(NP_201585) c3(F-actin-capping protein subunit alpha-3) c4(228298) c5(228299, 228300, 228301, 228302, 228303, 228304) c6( ) c7(cd, EQ); #c1(CARD10) c2(NP_055365) c3(caspase recruitment domain-containing protein 10) c4(180612, 180613, 180614) c5(180615, 180616, 180617, 180618, 180619, 180620, 180621, 180622, 180623, 180624, 180625, 180626, 180627, 180628, 180629, 180630, 180631, 180632, 180633, 180634, 180635, 180636) c6( ) c7(bM, T, eM, dH, aW, aT, j, bh, fr, t, bz); #c1(CARD11) c2(NP_115791) c3(caspase recruitment domain-containing protein 11) c4(223910, 223911) c5(223912, 223913, 223914, 223915, 223916, 223917) c6( ) c7(aox, Cv, T, fM, azN, oe, eE, jh, fr, C, fD, ij, Wt); #c1(CARD11) c2(XP_011513889) c3(caspase recruitment domain-containing protein 11 isoform X2) c4( ) c5(306310, 306311, 306312, 306313, 306314, 306315) c6( ) c7(aox, Cv, T, fM, azN, oe, eE, jh, fr, C, fD, ij, Wt); #c1(CARD14) c2(NP_001244899) c3(caspase recruitment domain-containing protein 14 isoform 3) c4(92315, 92316) c5(92317, 92318, 92319, 92320, 92321, 92322) c6( ) c7(ka, dt, kh, axA, jX, V, wD, hX, jY, hb, ds, aT, hD, azR, aW, azP, cr, azO, eE, kk, dS, jV, ac, ki, azQ, kq, jQ); #c1(CARD14) c2(NP_077015) c3(caspase recruitment domain-containing protein 14 isoform 1) c4(214741) c5(214742, 214743, 214744, 214745, 214746, 214747, 214748, 214749, 214750, 214751, 214752) c6( ) c7(ka, dt, kh, axA, jX, V, wD, hX, jY, hb, ds, aT, hD, azR, aW, azP, cr, azO, eE, kk, dS, jV, ac, ki, azQ, kq, jQ); #c1(CARD14) c2(NP_438170) c3(caspase recruitment domain-containing protein 14 isoform 2) c4(229118) c5(229119, 229120, 229121, 229122, 229123, 229124, 229125, 229126, 229127, 229128, 229129) c6( ) c7(ka, dt, kh, axA, jX, V, wD, hX, jY, hb, ds, aT, hD, azR, aW, azP, cr, azO, eE, kk, dS, jV, ac, ki, azQ, kq, jQ); #c1(CARD16) c2(NP_001017534) c3(caspase recruitment domain-containing protein 16 isoform 1) c4(26586) c5(26587, 26588, 26589, 26590, 26591, 26592, 26593, 26594) c6( ) c7(T, rR, aE, c, qt, aW, jx, aT, aA, n, oY, aF, K, g, ir, bt, B); #c1(CARD16) c2(NP_443121) c3(caspase recruitment domain-containing protein 16 isoform 2) c4(229540) c5(229541, 229542, 229543, 229544, 229545, 229546, 229547, 229548, 229549, 229550, 229551, 229552, 229553) c6( ) c7(T, rR, aE, c, qt, aW, jx, aT, aA, n, oY, aF, K, g, ir, bt, B); #c1(CARD6) c2(NP_115976) c3(caspase recruitment domain-containing protein 6) c4(225028, 225029, 225030) c5(225031, 225032, 225033, 225034, 225035, 225036, 225037, 225038, 225039, 225040, 225041, 225042, 225043, 225044, 225045, 225046, 225047, 225048, 225049) c6( ) c7(cd); #c1(CARD8) c2(NP_001171829) c3(caspase recruitment domain-containing protein 8 isoform a) c4(71923, 71924) c5(71925, 71926, 71927, 71928, 71929, 71930) c6( ) c7(oO, T, dD, ea, aw, cz, bB, cL, eq, ai, o, M, aT, af, NX, azU, mR, azS, bf, aW, r, fe, iV, ac, bE, dc, azT, bm, cj, y); #c1(CARD8) c2(NP_001171830) c3(caspase recruitment domain-containing protein 8 isoform b) c4(71931) c5(71932, 71933, 71934, 71935, 71936, 71937) c6( ) c7(oO, T, dD, ea, aw, cz, bB, cL, eq, ai, o, M, aT, af, NX, azU, mR, azS, bf, aW, r, fe, iV, ac, bE, dc, azT, bm, cj, y); #c1(CARD8) c2(NP_001171833) c3(caspase recruitment domain-containing protein 8 isoform d) c4( ) c5(71938, 71939, 71940, 71941, 71942, 71943) c6( ) c7(oO, T, dD, ea, aw, cz, bB, cL, eq, ai, o, M, aT, af, NX, azU, mR, azS, bf, aW, r, fe, iV, ac, bE, dc, azT, bm, cj, y); #c1(CARD8) c2(XP_006723167) c3(caspase recruitment domain-containing protein 8 isoform X10) c4(295015) c5(295016, 295017, 295018, 295019, 295020) c6( ) c7(oO, T, dD, ea, aw, cz, bB, cL, eq, ai, o, M, aT, af, NX, azU, mR, azS, bf, aW, r, fe, iV, ac, bE, dc, azT, bm, cj, y); #c1(CARD8) c2(XP_011524949) c3(caspase recruitment domain-containing protein 8 isoform X6) c4( ) c5(319432) c6( ) c7(oO, T, dD, ea, aw, cz, bB, cL, eq, ai, o, M, aT, af, NX, azU, mR, azS, bf, aW, r, fe, iV, ac, bE, dc, azT, bm, cj, y); #c1(CARD8) c2(XP_011524950) c3(caspase recruitment domain-containing protein 8 isoform X7) c4( ) c5(319433) c6( ) c7(oO, T, dD, ea, aw, cz, bB, cL, eq, ai, o, M, aT, af, NX, azU, mR, azS, bf, aW, r, fe, iV, ac, bE, dc, azT, bm, cj, y); #c1(CARD8) c2(XP_011524953) c3(caspase recruitment domain-containing protein 8 isoform X12) c4(319434) c5(319435, 319436, 319437, 319438, 319439) c6( ) c7(oO, T, dD, ea, aw, cz, bB, cL, eq, ai, o, M, aT, af, NX, azU, mR, azS, bf, aW, r, fe, iV, ac, bE, dc, azT, bm, cj, y); #c1(CARD9) c2(NP_434700) c3(caspase recruitment domain-containing protein 9 isoform 1) c4(229084, 229085) c5(229086, 229087, 229088, 229089, 229090, 229091) c6( ) c7(azV, fM, azW, azX, Pa, py, mR, hl, fe, n, wR, CZ, ey, iV); #c1(CARD9) c2(NP_434701) c3(caspase recruitment domain-containing protein 9 isoform 2) c4(229092) c5(229093, 229094, 229095, 229096, 229097, 229098, 229099, 229100, 229101, 229102, 229103, 229104) c6( ) c7(azV, fM, azW, azX, Pa, py, mR, hl, fe, n, wR, CZ, ey, iV); #c1(CARF) c2(NP_001098056) c3(calcium-responsive transcription factor isoform 1) c4(41315, 41316) c5(41317, 41318, 41319, 41320, 41321, 41322, 41323, 41324, 41325, 41326, 41327, 41328, 41329, 41330, 41331, 41332, 41333, 41334, 41335) c6( ) c7(T, K, nA); #c1(CARF) c2(NP_001269839) c3(calcium-responsive transcription factor isoform 2) c4(102927) c5(102928, 102929, 102930, 102931, 102932, 102933) c6( ) c7(T, K, nA); #c1(CARF) c2(NP_001269841) c3(calcium-responsive transcription factor isoform 3) c4(102934) c5(102935, 102936, 102937, 102938, 102939, 102940) c6( ) c7(T, K, nA); #c1(CARF) c2(XP_005246920) c3(calcium-responsive transcription factor isoform X4) c4(267494) c5( ) c6( ) c7(T, K, nA); #c1(CARF) c2(XP_006712822) c3(calcium-responsive transcription factor isoform X5) c4(286844, 286845, 286846) c5( ) c6( ) c7(T, K, nA); #c1(CARF) c2(XP_006712823) c3(calcium-responsive transcription factor isoform X7) c4(286847) c5(286848, 286849, 286850, 286851, 286852, 286853, 286854, 286855, 286856, 286857, 286858, 286859, 286860, 286861, 286862, 286863, 286864, 286865, 286866, 286867, 286868, 286869, 286870, 286871, 286872, 286873, 286874, 286875, 286876, 286877, 286878, 286879, 286880, 286881) c6( ) c7(T, K, nA); #c1(CARKD) c2(NP_001229810) c3(ATP-dependent (S)-NAD(P)H-hydrate dehydratase isoform b) c4(85293) c5( ) c6( ) c7(aA); #c1(CARKD) c2(NP_001229811) c3(ATP-dependent (S)-NAD(P)H-hydrate dehydratase isoform c) c4(85294, 85295) c5(85296, 85297, 85298, 85299, 85300, 85301, 85302, 85303, 85304, 85305, 85306, 85307) c6( ) c7(aA); #c1(CARKD) c2(NP_001229812) c3(ATP-dependent (S)-NAD(P)H-hydrate dehydratase isoform d) c4(85308) c5(85309, 85310, 85311, 85312, 85313, 85314, 85315, 85316, 85317, 85318, 85319, 85320) c6( ) c7(aA); #c1(CARKD) c2(NP_060680) c3(ATP-dependent (S)-NAD(P)H-hydrate dehydratase isoform a) c4(197137) c5(197138, 197139, 197140, 197141, 197142, 197143) c6( ) c7(aA); #c1(CARM1) c2(NP_954592) c3(histone-arginine methyltransferase CARM1) c4(261079) c5(261080, 261081, 261082, 261083, 261084, 261085) c6( ) c7(ae, T, bM, B, bv, eM, Ip, aW, Y, vy, aT, kf, r, cr, ci, bz, q, ad); #c1(CARM1) c2(XP_005259765) c3(histone-arginine methyltransferase CARM1 isoform X1) c4(276291) c5(276292, 276293, 276294, 276295, 276296, 276297) c6( ) c7(ae, T, bM, B, bv, eM, Ip, aW, Y, vy, aT, kf, r, cr, ci, bz, q, ad); #c1(CARM1) c2(XP_011525939) c3(histone-arginine methyltransferase CARM1 isoform X2) c4( ) c5(320348) c6( ) c7(ae, T, bM, B, bv, eM, Ip, aW, Y, vy, aT, kf, r, cr, ci, bz, q, ad); #c1(CARS) c2(NP_001014437) c3(cysteine-tRNA ligase, cytoplasmic isoform c) c4(25903) c5(25904, 25905, 25906, 25907, 25908, 25909) c6( ) c7(bL, T, A, fM, ahc, VT, aj, dy, m, C, eA, B, J, bN); #c1(CARS) c2(NP_001742) c3(cysteine-tRNA ligase, cytoplasmic isoform b) c4(120668) c5(120669, 120670, 120671, 120672, 120673, 120674) c6( ) c7(bL, T, A, fM, ahc, VT, aj, dy, m, C, eA, B, J, bN); #c1(CARS) c2(NP_644802) c3(cysteine-tRNA ligase, cytoplasmic isoform a) c4(238535, 238536) c5(238537, 238538, 238539, 238540, 238541, 238542, 238543, 238544, 238545, 238546, 238547, 238548) c6( ) c7(bL, T, A, fM, ahc, VT, aj, dy, m, C, eA, B, J, bN); #c1(CARS) c2(XP_006718404) c3(cysteine-tRNA ligase, cytoplasmic isoform X1) c4(291824) c5(291825, 291826, 291827, 291828, 291829, 291830) c6( ) c7(bL, T, A, fM, ahc, VT, aj, dy, m, C, eA, B, J, bN); #c1(CARTPT) c2(NP_004282) c3(cocaine- and amphetamine-regulated transcript protein preproprotein) c4(144816) c5(144817, 144818, 144819, 144820, 144821, 144822, 144823, 144824) c6(144825, 144826) c7(bL, T, dD, ea, oe, cz, Gd, bS, v, ct, eq, cd, azY, PW, pN, qI, Fo, pX, XY, aqI, M, dV, io, cy, bK, he, Yi, Qe, gl, cu, Z, FT, hq, eK, kT, ok, ac, wO, awl, hr, aqm, st); #c1(CASC1) c2(NP_001076441) c3(protein CASE1 isoform c) c4(37432, 37433) c5(37434, 37435, 37436, 37437, 37438, 37439, 37440, 37441, 37442, 37443, 37444, 37445, 37446, 37447, 37448, 37449, 37450, 37451) c6( ) c7(av, auM, bz, iu, g); #c1(CASC1) c2(NP_060742) c3(protein CASC1 isoform a) c4(197588) c5( ) c6( ) c7(av, auM, bz, iu, g); #c1(CASC1) c2(XP_005253466) c3(protein CASC1 isoform X5) c4(272517) c5( ) c6( ) c7(av, auM, bz, iu, g); #c1(CASC1) c2(XP_006719165) c3(protein CASC1 isoform X8) c4( ) c5(292238, 292239, 292240, 292241, 292242, 292243) c6( ) c7(av, auM, bz, iu, g); #c1(CASC1) c2(XP_011519025) c3(protein CASC1 isoform X2) c4(313466, 313467, 313468) c5(313469, 313470, 313471, 313472, 313473, 313474, 313475) c6( ) c7(av, auM, bz, iu, g); #c1(CASC1) c2(XP_011519026) c3(protein CASC1 isoform X3) c4(313476) c5( ) c6( ) c7(av, auM, bz, iu, g); #c1(CASC1) c2(XP_011519027) c3(protein CASC1 isoform X1) c4( ) c5(313477, 313478, 313479, 313480, 313481, 313482, 313483, 313484, 313485, 313486, 313487, 313488, 313489, 313490, 313491, 313492, 313493, 313494) c6( ) c7(av, auM, bz, iu, g); #c1(CASC1) c2(XP_011519028) c3(protein CASC1 isoform XG) c4(313495) c5(313496, 313497, 313498, 313499, 313500) c6( ) c7(av, auM, bz, iu, g); #c1(CASC3) c2(XP_005257220) c3(protein CASC3 isoform X1) c4(274787, 274788) c5(274789, 274790, 274791, 274792, 274793, 274794, 274795, 274796, 274797, 274798, 274799, 274800, 274801, 274802, 274803, 274804, 274805) c6( ) c7(aW, T, K, y, aT); #c1(CASC4) c2(NP_612432) c3(protein CASC4 isoform a) c4(236468, 236469, 236470, 236471, 236472) c5(236473, 236474, 236475, 236476, 236477, 236478, 236479, 236480, 236481, 236482, 236483, 236484, 236485, 236486, 236487, 236488, 236489, 236490, 236491, 236492, 236493, 236494, 236495, 236496) c6( ) c7(ac); #c1(CASC4) c2(NP_816929) c3(protein CASC4 isoform b) c4(253040) c5(253041, 253042, 253043, 253044, 253045, 253046, 253047) c6( ) c7(ac); #c1(CASC4) c2(XP_011519472) c3(protein CASC4 isoform X1) c4( ) c5(314139, 314140, 314141, 314142, 314143) c6( ) c7(ac); #c1(CASC5) c2(NP_653091) c3(protein CASC5 isoform 2) c4(238872) c5(238873, 238874, 238875, 238876, 238877, 238878) c6( ) c7(x, av, T, aii, Y, azZ, k, bX, bu, bt, aij); #c1(CASC5) c2(NP_733468) c3(protein CASC5 isoform 1) c4(246895) c5(246896, 246897, 246898, 246899, 246900, 246901) c6( ) c7(x, av, T, aii, Y, azZ, k, bX, bu, bt, aij); #c1(CASC5) c2(XP_011520119) c3(protein CASC5 isoform X2) c4(315010) c5(315011, 315012, 315013, 315014, 315015, 315016) c6( ) c7(x, av, T, aii, Y, azZ, k, bX, bu, bt, aij); #c1(CASD1) c2(NP_075051) c3(CAS1 domain-containing protein 1 precursor) c4(213585) c5(213586, 213587, 213588, 213589, 213590, 213591) c6( ) c7(aW, aAa, NT, aT); #c1(CASK) c2(NP_001119526) c3(peripheral plasma membrane protein CASK isoform 2) c4(44077, 44078) c5(44079, 44080, 44081, 44082, 44083, 44084, 44085, 44086, 44087, 44088, 44089, 44090) c6( ) c7(UR, ci, nA, zP, q, Na, aAc, aAd, hb, NG, hu, aAe, Yl, Ng, zQ, r, nf, aF, aha, QK, KE, bE, FB, aAb); #c1(CASK) c2(NP_001119527) c3(peripheral plasma membrane protein CASK isoform 3) c4(44091, 44092) c5(44093, 44094, 44095, 44096, 44097, 44098, 44099, 44100, 44101, 44102, 44103, 44104) c6( ) c7(UR, ci, nA, zP, q, Na, aAc, aAd, hb, NG, hu, aAe, Yl, Ng, zQ, r, nf, aF, aha, QK, KE, bE, FB, aAb); #c1(CASK) c2(NP_003679) c3(peripheral plasma membrane protein CASK isoform 1) c4(140133, 140134, 140135, 140136, 140137) c5(140138, 140139, 140140, 140141, 140142, 140143, 140144, 140145, 140146, 140147, 140148, 140149, 140150, 140151, 140152, 140153, 140154, 140155, 140156, 140157, 140158, 140159, 140160, 140161, 140162, 140163, 140164, 140165, 140166, 140167) c6( ) c7(UR, ci, nA, zP, q, Na, aAc, aAd, hb, NG, hu, aAe, Yl, Ng, zQ, r, nf, aF, aha, QK, KE, bE, FB, aAb); #c1(CASK) c2(XP_011542296) c3(peripheral plasma membrane protein CASK isoform X3) c4(340888) c5(340889, 340890, 340891, 340892, 340893, 340894) c6( ) c7(UR, ci, nA, zP, q, Na, aAc, aAd, hb, NG, hu, aAe, Yl, Ng, zQ, r, nf, aF, aha, QK, KE, bE, FB, aAb); #c1(CASP1) c2(NP_001244048) c3(caspase-1 isoform beta precursor) c4(91844) c5(91845, 91846, 91847, 91848, 91849, 91850, 91851, 91852, 91853, 91854, 91855, 91856, 91857, 91858, 91859) c6( ) c7(oO, bM, T, fR, ea, al, ci, UI, xE, aE, Bc, dV, Ds, K, zy, akX, aAg, aW, Ls, mQ, ih, CT, aoD, g, eE, cm, iA, wE, mx, U, cj, hh, ajy, dD, aw, fr, ct, PJ, zP, cd, eW, aAh, h, IG, fe, Ca, ajz, Zb, hq, ar, Ei, E, eo, cB, Dw, aAf, fG, aA, azF, v, j, C, V, eA, aT, cy, bq, ae, af, aAi, le, bf, s, iU, Y, lo, bu, pb, c, AH, Uq, wR, Da, dy, fD, bt, hS, kV, qX, Zl, iW, bS, eq, ad, sO, NY, ds, abq, jo, fb, NM, sj, d, BO, yx, nh, eZ, dq, aF, Fq, iV, Z, bz, bF, es, gk, DT, bE, y); #c1(CASP1) c2(NP_150634) c3(caspase-1 isoform alpha precursor) c4(228157, 228158, 228159) c5(228160, 228161, 228162, 228163, 228164, 228165, 228166, 228167, 228168, 228169, 228170, 228171, 228172, 228173, 228174) c6( ) c7(oO, bM, T, fR, ea, al, ci, UI, xE, aE, Bc, dV, Ds, K, zy, akX, aAg, aW, Ls, mQ, ih, CT, aoD, g, eE, cm, iA, wE, mx, U, cj, hh, ajy, dD, aw, fr, ct, PJ, zP, cd, eW, aAh, h, IG, fe, Ca, ajz, Zb, hq, ar, Ei, E, eo, cB, Dw, aAf, fG, aA, azF, v, j, C, V, eA, aT, cy, bq, ae, af, aAi, le, bf, s, iU, Y, lo, bu, pb, c, AH, Uq, wR, Da, dy, fD, bt, hS, kV, qX, Zl, iW, bS, eq, ad, sO, NY, ds, abq, jo, fb, NM, sj, d, BO, yx, nh, eZ, dq, aF, Fq, iV, Z, bz, bF, es, gk, DT, bE, y); #c1(CASP1) c2(NP_150635) c3(caspase-1 isoform gamma) c4(228175) c5(228176, 228177, 228178, 228179, 228180, 228181) c6( ) c7(oO, bM, T, fR, ea, al, ci, UI, xE, aE, Bc, dV, Ds, K, zy, akX, aAg, aW, Ls, mQ, ih, CT, aoD, g, eE, cm, iA, wE, mx, U, cj, hh, ajy, dD, aw, fr, ct, PJ, zP, cd, eW, aAh, h, IG, fe, Ca, ajz, Zb, hq, ar, Ei, E, eo, cB, Dw, aAf, fG, aA, azF, v, j, C, V, eA, aT, cy, bq, ae, af, aAi, le, bf, s, iU, Y, lo, bu, pb, c, AH, Uq, wR, Da, dy, fD, bt, hS, kV, qX, Zl, iW, bS, eq, ad, sO, NY, ds, abq, jo, fb, NM, sj, d, BO, yx, nh, eZ, dq, aF, Fq, iV, Z, bz, bF, es, gk, DT, bE, y); #c1(CASP1) c2(NP_150636) c3(caspase-1 isoform delta) c4(228182) c5(228183, 228184, 228185, 228186, 228187, 228188, 228189, 228190, 228191, 228192, 228193, 228194, 228195) c6( ) c7(oO, bM, T, fR, ea, al, ci, UI, xE, aE, Bc, dV, Ds, K, zy, akX, aAg, aW, Ls, mQ, ih, CT, aoD, g, eE, cm, iA, wE, mx, U, cj, hh, ajy, dD, aw, fr, ct, PJ, zP, cd, eW, aAh, h, IG, fe, Ca, ajz, Zb, hq, ar, Ei, E, eo, cB, Dw, aAf, fG, aA, azF, v, j, C, V, eA, aT, cy, bq, ae, af, aAi, le, bf, s, iU, Y, lo, bu, pb, c, AH, Uq, wR, Da, dy, fD, bt, hS, kV, qX, Zl, iW, bS, eq, ad, sO, NY, ds, abq, jo, fb, NM, sj, d, BO, yx, nh, eZ, dq, aF, Fq, iV, Z, bz, bF, es, gk, DT, bE, y); #c1(CASP1) c2(NP_150637) c3(caspase-1 isoform epsilon) c4(228196) c5(228197, 228198, 228199, 228200, 228201, 228202, 228203, 228204, 228205, 228206, 228207, 228208, 228209) c6( ) c7(oO, bM, T, fR, ea, al, ci, UI, xE, aE, Bc, dV, Ds, K, zy, akX, aAg, aW, Ls, mQ, ih, CT, aoD, g, eE, cm, iA, wE, mx, U, cj, hh, ajy, dD, aw, fr, ct, PJ, zP, cd, eW, aAh, h, IG, fe, Ca, ajz, Zb, hq, ar, Ei, E, eo, cB, Dw, aAf, fG, aA, azF, v, j, C, V, eA, aT, cy, bq, ae, af, aAi, le, bf, s, iU, Y, lo, bu, pb, c, AH, Uq, wR, Da, dy, fD, bt, hS, kV, qX, Zl, iW, bS, eq, ad, sO, NY, ds, abq, jo, fb, NM, sj, d, BO, yx, nh, eZ, dq, aF, Fq, iV, Z, bz, bF, es, gk, DT, bE, y); #c1(CASP1) c2(XP_011541319) c3(caspase-1 isoform X1) c4( ) c5(339917) c6( ) c7(oO, bM, T, fR, ea, al, ci, UI, xE, aE, Bc, dV, Ds, K, zy, akX, aAg, aW, Ls, mQ, ih, CT, aoD, g, eE, cm, iA, wE, mx, U, cj, hh, ajy, dD, aw, fr, ct, PJ, zP, cd, eW, aAh, h, IG, fe, Ca, ajz, Zb, hq, ar, Ei, E, eo, cB, Dw, aAf, fG, aA, azF, v, j, C, V, eA, aT, cy, bq, ae, af, aAi, le, bf, s, iU, Y, lo, bu, pb, c, AH, Uq, wR, Da, dy, fD, bt, hS, kV, qX, Zl, iW, bS, eq, ad, sO, NY, ds, abq, jo, fb, NM, sj, d, BO, yx, nh, eZ, dq, aF, Fq, iV, Z, bz, bF, es, gk, DT, bE, y); #c1(CASP10) c2(NP_001193453) c3(caspase-10 isoform 6 preproprotein) c4(82187) c5(82188, 82189, 82190, 82191, 82192, 82193) c6( ) c7(bM, T, iW, ht, NT, aAk, aA, bB, eX, fd, ci, qN, hF, V, ad, x, XW, av, aT, h, eV, hn, dL, jj, hu, fb, nJ, ae, ZH, s, CN, iU, aW, sp, Y, eZ, r, aF, g, t, cm, mK, aAj, ck, Dy, c, eM, bE, hk, cj, at, k, m, B); #c1(CASP10) c2(NP_001193471) c3(caspase-10 isoform 5 preproprotein) c4(82217) c5(82218, 82219, 82220, 82221, 82222, 82223) c6( ) c7(bM, T, iW, ht, NT, aAk, aA, bB, eX, fd, ci, qN, hF, V, ad, x, XW, av, aT, h, eV, hn, dL, jj, hu, fb, nJ, ae, ZH, s, CN, iU, aW, sp, Y, eZ, r, aF, g, t, cm, mK, aAj, ck, Dy, c, eM, bE, hk, cj, at, k, m, B); #c1(CASP10) c2(NP_001221) c3(caspase-10 isoform 3 preproprotein) c4(83935) c5(83936, 83937, 83938, 83939, 83940, 83941) c6( ) c7(bM, T, iW, ht, NT, aAk, aA, bB, eX, fd, ci, qN, hF, V, ad, x, XW, av, aT, h, eV, hn, dL, jj, hu, fb, nJ, ae, ZH, s, CN, iU, aW, sp, Y, eZ, r, aF, g, t, cm, mK, aAj, ck, Dy, c, eM, bE, hk, cj, at, k, m, B); #c1(CASP10) c2(NP_116756) c3(caspase-10 isoform 2 preproprotein) c4(226397) c5(226398, 226399, 226400, 226401, 226402, 226403) c6( ) c7(bM, T, iW, ht, NT, aAk, aA, bB, eX, fd, ci, qN, hF, V, ad, x, XW, av, aT, h, eV, hn, dL, jj, hu, fb, nJ, ae, ZH, s, CN, iU, aW, sp, Y, eZ, r, aF, g, t, cm, mK, aAj, ck, Dy, c, eM, bE, hk, cj, at, k, m, B); #c1(CASP10) c2(NP_116758) c3(caspase-10 isoform 4) c4(226418) c5(226419, 226420, 226421, 226422, 226423) c6( ) c7(bM, T, iW, ht, NT, aAk, aA, bB, eX, fd, ci, qN, hF, V, ad, x, XW, av, aT, h, eV, hn, dL, jj, hu, fb, nJ, ae, ZH, s, CN, iU, aW, sp, Y, eZ, r, aF, g, t, cm, mK, aAj, ck, Dy, c, eM, bE, hk, cj, at, k, m, B); #c1(CASP10) c2(NP_116759) c3(caspase-10 isoform 1 preproprotein) c4(226424) c5(226425, 226426, 226427, 226428, 226429, 226430, 226431) c6( ) c7(bM, T, iW, ht, NT, aAk, aA, bB, eX, fd, ci, qN, hF, V, ad, x, XW, av, aT, h, eV, hn, dL, jj, hu, fb, nJ, ae, ZH, s, CN, iU, aW, sp, Y, eZ, r, aF, g, t, cm, mK, aAj, ck, Dy, c, eM, bE, hk, cj, at, k, m, B); #c1(CASP14) c2(NP_036246) c3(caspase-14 precursor) c4(172616, 172617) c5(172618, 172619, 172620, 172621, 172622, 172623, 172624, 172625, 172626, 172627, 172628, 172629, 172630, 172631, 172632, 172633) c6( ) c7(bM, T, dD, dA, Zz, ea, fG, aal, yG, zs, if, aA, bB, iW, aj, eq, ci, qN, vY, eh, q, J, cd, ad, ai, eA, av, ft, Ig, ds, BJ, hh, qh, aT, h, ji, K, jj, fb, qE, asp, bf, s, oV, xs, r, yc, fe, kp, La, g, as, t, bN, hq, sS, jV, bP, hk, dh, AH, U, gZ, hR, agf, MW, rK, m, aAI, oQ, aS, dy, fD, B); #c1(CASP2) c2(NP_001215) c3(caspase-2 isoform 2) c4(83784) c5(83785, 83786, 83787, 83788, 83789) c6( ) c7(gh, T, iW, jh, aA, bB, hy, fr, nA, V, q, ad, x, aE, aT, K, fb, ae, eL, B, BN, BO, aW, Y, r, g, ac, bE, cj, m, k, ht, cB, ne); #c1(CASP2) c2(NP_116764) c3(caspase-2 isoform 1 preproprotein) c4(226447) c5(226448, 226449, 226450, 226451, 226452, 226453, 226454, 226455) c6( ) c7(gh, T, iW, jh, aA, bB, hy, fr, nA, V, q, ad, x, aE, aT, K, fb, ae, eL, B, BN, BO, aW, Y, r, g, ac, bE, cj, m, k, ht, cB, ne); #c1(CASP2) c2(NP_116765) c3(caspase-2 isoform 3) c4(226456) c5(226457, 226458, 226459, 226460, 226461) c6( ) c7(gh, T, iW, jh, aA, bB, hy, fr, nA, V, q, ad, x, aE, aT, K, fb, ae, eL, B, BN, BO, aW, Y, r, g, ac, bE, cj, m, k, ht, cB, ne); #c1(CASP3) c2(XP_011530603) c3(caspase-3 isoform X1) c4(326515, 326516, 326517, 326518, 326519) c5(326520, 326521, 326522, 326523, 326524, 326525, 326526, 326527, 326528, 326529, 326530, 326531, 326532, 326533, 326534, 326535, 326536, 326537, 326538, 326539, 326540, 326541, 326542, 326543, 326544, 326545, 326546, 326547, 326548, 326549, 326550, 326551, 326552, 326553, 326554, 326555, 326556, 326557, 326558, 326559, 326560, 326561, 326562, 326563, 326564, 326565, 326566, 326567, 326568, 326569, 326570, 326571, 326572, 326573, 326574, 326575, 326576, 326577, 326578, 326579, 326580, 326581, 326582, 326583, 326584, 326585, 326586, 326587, 326588, 326589, 326590, 326591, 326592, 326593, 326594, 326595, 326596, 326597, 326598, 326599, 326600, 326601, 326602, 326603, 326604, 326605, 326606, 326607, 326608, 326609, 326610, 326611, 326612, 326613, 326614, 326615, 326616, 326617, 326618, 326619, 326620, 326621, 326622, 326623, 326624, 326625, 326626, 326627, 326628, 326629, 326630, 326631, 326632, 326633, 326634, 326635, 326636, 326637, 326638, 326639, 326640, 326641, 326642, 326643, 326644, 326645, 326646, 326647, 326648, 326649, 326650, 326651, 326652, 326653, 326654, 326655, 326656, 326657, 326658, 326659, 326660, 326661, 326662, 326663, 326664, 326665, 326666, 326667, 326668, 326669, 326670, 326671, 326672, 326673, 326674, 326675, 326676, 326677, 326678, 326679, 326680, 326681, 326682, 326683, 326684, 326685, 326686, 326687, 326688, 326689, 326690, 326691, 326692, 326693, 326694, 326695, 326696, 326697, 326698, 326699, 326700, 326701, 326702, 326703, 326704, 326705, 326706, 326707, 326708, 326709, 326710, 326711, 326712, 326713, 326714, 326715, 326716, 326717, 326718) c6( ) c7(gh, T, os, fR, apr, if, fd, bB, ci, akg, aAo, UI, aR, ip, x, XW, bv, zi, aE, Bc, fm, us, K, hu, zy, H, pk, dF, eL, Qe, up, aAu, aW, fc, XV, hN, g, eE, eF, cm, bw, iP, y, eM, vA, mx, aiM, cj, U, vy, zv, k, m, IS, hh, fy, in, iu, Ro, dD, FG, sw, ht, lb, n, aj, fr, asF, bd, PJ, qN, cd, eW, ft, jz, Yc, pN, kH, h, IG, eV, dL, bI, yZ, Dz, A, aJ, EU, CM, hQ, aq, yq, Rl, dw, ajz, alj, cM, fs, op, Ld, Ye, ar, bP, ky, dB, hk, Qu, If, ajd, hL, at, uz, cB, B, L, bL, fM, dA, aAs, eX, rf, aA, hy, C, iI, AO, V, q, J, eA, mj, Yn, uT, hb, HC, aT, aAn, cy, vH, rO, aAv, aAt, bq, an, jj, ae, af, eu, hM, iU, Y, ev, r, aAm, akY, en, cl, xl, t, kC, f, pb, iK, rY, dS, ck, vk, Ta, rR, iM, ac, c, kB, gX, adR, aAp, bt, rA, LS, ao, hl, kh, id, qb, iW, jh, oZ, eq, aoz, ad, aAq, hX, av, hd, F, ib, sO, ds, NS, nI, oW, abP, lC, vc, fb, d, lR, je, hG, ff, eH, rU, eZ, akL, aF, bz, aAr, Hv, eK, iq, LB, bF, DT, bE, Ny, aS, cP, hE, kS, X, Ex, Tc); #c1(CASP4) c2(NP_001216) c3(caspase-4 isoform alpha precursor) c4(83790, 83791, 83792, 83793) c5(83794, 83795, 83796, 83797, 83798, 83799, 83800, 83801, 83802, 83803, 83804, 83805, 83806) c6( ) c7(T, fb, id, af, aW, Y, iW, aT, BF, K, aAw, PJ, ci, fy, bz, NM, q, ad, rY, g); #c1(CASP4) c2(NP_150649) c3(caspase-4 isoform gamma precursor) c4( ) c5(228261, 228262, 228263, 228264, 228265, 228266, 228267, 228268, 228269, 228270, 228271) c6( ) c7(T, fb, id, af, aW, Y, iW, aT, BF, K, aAw, PJ, ci, fy, bz, NM, q, ad, rY, g); #c1(CASP5) c2(NP_001129581) c3(caspase-5 isoform b precursor) c4(51872) c5(51873, 51874, 51875, 51876, 51877, 51878) c6( ) c7(T, iW, jh, ci, V, q, ad, av, F, aT, fb, aW, g, t, bz, ck, es, bP, iA, gX, cj, fy); #c1(CASP5) c2(NP_001129582) c3(caspase-5 isoform c) c4( ) c5(51879, 51880, 51881, 51882, 51883, 51884, 51885, 51886, 51887, 51888, 51889) c6( ) c7(T, iW, jh, ci, V, q, ad, av, F, aT, fb, aW, g, t, bz, ck, es, bP, iA, gX, cj, fy); #c1(CASP5) c2(NP_001129584) c3(caspase-5 isoform f precursor) c4(51890, 51891) c5(51892, 51893, 51894, 51895, 51896, 51897, 51898, 51899, 51900, 51901) c6( ) c7(T, iW, jh, ci, V, q, ad, av, F, aT, fb, aW, g, t, bz, ck, es, bP, iA, gX, cj, fy); #c1(CASP5) c2(NP_004338) c3(caspase-5 isoform a precursor) c4(145472, 145473) c5(145474, 145475, 145476, 145477, 145478, 145479) c6( ) c7(T, iW, jh, ci, V, q, ad, av, F, aT, fb, aW, g, t, bz, ck, es, bP, iA, gX, cj, fy); #c1(CASP5) c2(XP_011541323) c3(caspase-5 isoform X2) c4( ) c5(339918, 339919, 339920, 339921, 339922) c6( ) c7(T, iW, jh, ci, V, q, ad, av, F, aT, fb, aW, g, t, bz, ck, es, bP, iA, gX, cj, fy); #c1(CASP6) c2(NP_001217) c3(caspase-6 isoform alpha preproprotein) c4(83807, 83808) c5(83809, 83810, 83811, 83812, 83813, 83814, 83815, 83816, 83817, 83818, 83819, 83820, 83821, 83822, 83823, 83824, 83825, 83826, 83827, 83828, 83829, 83830, 83831, 83832, 83833, 83834, 83835, 83836, 83837, 83838, 83839, 83840, 83841, 83842, 83843, 83844, 83845, 83846, 83847, 83848, 83849, 83850, 83851, 83852, 83853, 83854, 83855, 83856, 83857, 83858, 83859, 83860, 83861, 83862, 83863, 83864, 83865, 83866, 83867, 83868, 83869, 83870, 83871, 83872, 83873, 83874, 83875, 83876, 83877, 83878, 83879, 83880, 83881, 83882, 83883, 83884, 83885, 83886, 83887, 83888, 83889, 83890, 83891, 83892, 83893, 83894, 83895, 83896, 83897, 83898, 83899, 83900, 83901, 83902, 83903) c6( ) c7(T, fM, sw, iW, aA, bB, ci, C, eA, ad, abg, h, IG, bq, kU, fb, af, eu, Y, Ih, CW, r, g, iK, Bv, rR, ac, bE, U, cB, X); #c1(CASP6) c2(NP_116787) c3(caspase-6 isoform beta) c4(226488) c5(226489, 226490, 226491, 226492, 226493, 226494) c6( ) c7(T, fM, sw, iW, aA, bB, ci, C, eA, ad, abg, h, IG, bq, kU, fb, af, eu, Y, Ih, CW, r, g, iK, Bv, rR, ac, bE, U, cB, X); #c1(CASP7) c2(NP_001218) c3(caspase-7 isoform alpha precursor) c4(83904, 83905, 83906) c5(83907, 83908, 83909, 83910, 83911, 83912, 83913, 83914, 83915, 83916, 83917, 83918, 83919, 83920, 83921, 83922, 83923, 83924, 83925, 83926, 83927) c6( ) c7(T, pf, sw, iW, jh, aA, n, hy, qj, ci, V, q, ad, eW, Bc, aT, IG, K, fb, ae, af, A, B, BN, iU, JI, aW, Y, rU, r, aq, aF, g, cI, iK, bz, eM, dJ, hL, y, bt, ne); #c1(CASP7) c2(NP_001253986) c3(caspase-7 isoform e) c4( ) c5(94362, 94363, 94364) c6( ) c7(T, pf, sw, iW, jh, aA, n, hy, qj, ci, V, q, ad, eW, Bc, aT, IG, K, fb, ae, af, A, B, BN, iU, JI, aW, Y, rU, r, aq, aF, g, cI, iK, bz, eM, dJ, hL, y, bt, ne); #c1(CASP7) c2(NP_001253987) c3(caspase-7 isoform f) c4(94365) c5(94366, 94367, 94368, 94369, 94370, 94371) c6( ) c7(T, pf, sw, iW, jh, aA, n, hy, qj, ci, V, q, ad, eW, Bc, aT, IG, K, fb, ae, af, A, B, BN, iU, JI, aW, Y, rU, r, aq, aF, g, cI, iK, bz, eM, dJ, hL, y, bt, ne); #c1(CASP7) c2(NP_203124) c3(caspase-7 isoform delta) c4(228315) c5(228316, 228317, 228318, 228319, 228320, 228321, 228322, 228323, 228324, 228325, 228326) c6( ) c7(T, pf, sw, iW, jh, aA, n, hy, qj, ci, V, q, ad, eW, Bc, aT, IG, K, fb, ae, af, A, B, BN, iU, JI, aW, Y, rU, r, aq, aF, g, cI, iK, bz, eM, dJ, hL, y, bt, ne); #c1(CASP7) c2(NP_203126) c3(caspase-7 isoform beta) c4(228327, 228328, 228329) c5(228330, 228331, 228332, 228333, 228334, 228335, 228336, 228337, 228338, 228339, 228340, 228341, 228342, 228343, 228344, 228345, 228346, 228347) c6( ) c7(T, pf, sw, iW, jh, aA, n, hy, qj, ci, V, q, ad, eW, Bc, aT, IG, K, fb, ae, af, A, B, BN, iU, JI, aW, Y, rU, r, aq, aF, g, cI, iK, bz, eM, dJ, hL, y, bt, ne); #c1(CASP8) c2(NP_001073594) c3(caspase-8 isoform G precursor) c4(36081, 36082) c5(36083, 36084, 36085, 36086, 36087, 36088, 36089, 36090) c6( ) c7(bM, T, os, aC, fR, pf, hV, if, aAx, fd, bB, ci, Qp, ip, x, XW, bv, aE, Bc, Qk, Ou, K, eL, eG, zQ, aW, az, g, pL, eE, lk, eF, cm, mK, aAB, eM, nB, aiM, cj, U, k, m, gn, hh, gU, pG, aAz, aw, ht, NT, n, aj, fr, qN, eW, ft, h, dL, hB, pi, sp, fJ, aq, yq, cM, Zj, bP, dB, hk, hL, at, fL, cB, B, aAE, ek, it, bL, fM, dA, jx, aA, hy, C, V, q, er, eA, mj, cF, aAF, aT, aAn, kf, cy, bK, aAD, jj, bq, aAC, ae, af, ne, jf, s, nO, iU, oV, Y, xR, r, lo, en, cl, t, iK, ck, ahN, rR, nM, Dy, c, ac, iM, wR, ro, im, bt, LS, pY, iW, aAk, jh, KO, oZ, mC, ad, av, hd, Db, io, hD, ji, fb, nJ, Yi, aAy, aca, d, BN, aAA, je, ff, eH, eZ, Ej, aF, bz, eU, bE, Rv, Ny, hE, kS, X, y); #c1(CASP8) c2(NP_001219) c3(caspase-8 isoform A precursor) c4(83928) c5(83929, 83930, 83931, 83932, 83933, 83934) c6( ) c7(bM, T, os, aC, fR, pf, hV, if, aAx, fd, bB, ci, Qp, ip, x, XW, bv, aE, Bc, Qk, Ou, K, eL, eG, zQ, aW, az, g, pL, eE, lk, eF, cm, mK, aAB, eM, nB, aiM, cj, U, k, m, gn, hh, gU, pG, aAz, aw, ht, NT, n, aj, fr, qN, eW, ft, h, dL, hB, pi, sp, fJ, aq, yq, cM, Zj, bP, dB, hk, hL, at, fL, cB, B, aAE, ek, it, bL, fM, dA, jx, aA, hy, C, V, q, er, eA, mj, cF, aAF, aT, aAn, kf, cy, bK, aAD, jj, bq, aAC, ae, af, ne, jf, s, nO, iU, oV, Y, xR, r, lo, en, cl, t, iK, ck, ahN, rR, nM, Dy, c, ac, iM, wR, ro, im, bt, LS, pY, iW, aAk, jh, KO, oZ, mC, ad, av, hd, Db, io, hD, ji, fb, nJ, Yi, aAy, aca, d, BN, aAA, je, ff, eH, eZ, Ej, aF, bz, eU, bE, Rv, Ny, hE, kS, X, y); #c1(CASP8) c2(NP_203519) c3(caspase-8 isoform B precursor) c4(228356) c5(228357, 228358, 228359, 228360, 228361) c6( ) c7(bM, T, os, aC, fR, pf, hV, if, aAx, fd, bB, ci, Qp, ip, x, XW, bv, aE, Bc, Qk, Ou, K, eL, eG, zQ, aW, az, g, pL, eE, lk, eF, cm, mK, aAB, eM, nB, aiM, cj, U, k, m, gn, hh, gU, pG, aAz, aw, ht, NT, n, aj, fr, qN, eW, ft, h, dL, hB, pi, sp, fJ, aq, yq, cM, Zj, bP, dB, hk, hL, at, fL, cB, B, aAE, ek, it, bL, fM, dA, jx, aA, hy, C, V, q, er, eA, mj, cF, aAF, aT, aAn, kf, cy, bK, aAD, jj, bq, aAC, ae, af, ne, jf, s, nO, iU, oV, Y, xR, r, lo, en, cl, t, iK, ck, ahN, rR, nM, Dy, c, ac, iM, wR, ro, im, bt, LS, pY, iW, aAk, jh, KO, oZ, mC, ad, av, hd, Db, io, hD, ji, fb, nJ, Yi, aAy, aca, d, BN, aAA, je, ff, eH, eZ, Ej, aF, bz, eU, bE, Rv, Ny, hE, kS, X, y); #c1(CASP8) c2(NP_203520) c3(caspase-8 isoform C precursor) c4(228362, 228363) c5(228364, 228365, 228366, 228367, 228368, 228369, 228370, 228371, 228372, 228373, 228374, 228375, 228376) c6( ) c7(bM, T, os, aC, fR, pf, hV, if, aAx, fd, bB, ci, Qp, ip, x, XW, bv, aE, Bc, Qk, Ou, K, eL, eG, zQ, aW, az, g, pL, eE, lk, eF, cm, mK, aAB, eM, nB, aiM, cj, U, k, m, gn, hh, gU, pG, aAz, aw, ht, NT, n, aj, fr, qN, eW, ft, h, dL, hB, pi, sp, fJ, aq, yq, cM, Zj, bP, dB, hk, hL, at, fL, cB, B, aAE, ek, it, bL, fM, dA, jx, aA, hy, C, V, q, er, eA, mj, cF, aAF, aT, aAn, kf, cy, bK, aAD, jj, bq, aAC, ae, af, ne, jf, s, nO, iU, oV, Y, xR, r, lo, en, cl, t, iK, ck, ahN, rR, nM, Dy, c, ac, iM, wR, ro, im, bt, LS, pY, iW, aAk, jh, KO, oZ, mC, ad, av, hd, Db, io, hD, ji, fb, nJ, Yi, aAy, aca, d, BN, aAA, je, ff, eH, eZ, Ej, aF, bz, eU, bE, Rv, Ny, hE, kS, X, y); #c1(CASP8) c2(NP_203522) c3(caspase-8 isoform E) c4(228377) c5(228378, 228379, 228380, 228381, 228382, 228383, 228384, 228385, 228386, 228387, 228388, 228389, 228390, 228391, 228392, 228393, 228394, 228395, 228396, 228397, 228398, 228399, 228400, 228401) c6( ) c7(bM, T, os, aC, fR, pf, hV, if, aAx, fd, bB, ci, Qp, ip, x, XW, bv, aE, Bc, Qk, Ou, K, eL, eG, zQ, aW, az, g, pL, eE, lk, eF, cm, mK, aAB, eM, nB, aiM, cj, U, k, m, gn, hh, gU, pG, aAz, aw, ht, NT, n, aj, fr, qN, eW, ft, h, dL, hB, pi, sp, fJ, aq, yq, cM, Zj, bP, dB, hk, hL, at, fL, cB, B, aAE, ek, it, bL, fM, dA, jx, aA, hy, C, V, q, er, eA, mj, cF, aAF, aT, aAn, kf, cy, bK, aAD, jj, bq, aAC, ae, af, ne, jf, s, nO, iU, oV, Y, xR, r, lo, en, cl, t, iK, ck, ahN, rR, nM, Dy, c, ac, iM, wR, ro, im, bt, LS, pY, iW, aAk, jh, KO, oZ, mC, ad, av, hd, Db, io, hD, ji, fb, nJ, Yi, aAy, aca, d, BN, aAA, je, ff, eH, eZ, Ej, aF, bz, eU, bE, Rv, Ny, hE, kS, X, y); #c1(CASP8) c2(XP_005246942) c3(caspase-8 isoform X4) c4(267534) c5(267535, 267536, 267537, 267538) c6( ) c7(bM, T, os, aC, fR, pf, hV, if, aAx, fd, bB, ci, Qp, ip, x, XW, bv, aE, Bc, Qk, Ou, K, eL, eG, zQ, aW, az, g, pL, eE, lk, eF, cm, mK, aAB, eM, nB, aiM, cj, U, k, m, gn, hh, gU, pG, aAz, aw, ht, NT, n, aj, fr, qN, eW, ft, h, dL, hB, pi, sp, fJ, aq, yq, cM, Zj, bP, dB, hk, hL, at, fL, cB, B, aAE, ek, it, bL, fM, dA, jx, aA, hy, C, V, q, er, eA, mj, cF, aAF, aT, aAn, kf, cy, bK, aAD, jj, bq, aAC, ae, af, ne, jf, s, nO, iU, oV, Y, xR, r, Io, en, cl, t, iK, ck, ahN, rR, nM, Dy, c, ac, iM, wR, ro, im, bt, LS, pY, iW, aAk, jh, KO, oZ, mC, ad, av, hd, Db, io, hD, ji, fb, nJ, Yi, aAy, aca, d, BN, aAA, je, ff, eH, eZ, Ej, aF, bz, eU, bE, Rv, Ny, hE, kS, X, y); #c1(CASP8) c2(XP_005246952) c3(caspase-8 isoform X10) c4(267539, 267540) c5(267541, 267542, 267543, 267544, 267545, 267546, 267547, 267548, 267549, 267550, 267551, 267552) c6( ) c7(bM, T, os, aC, fR, pf, hV, if, aAx, fd, bB, ci, Qp, ip, x, XW, bv, aE, Bc, Qk, Ou, K, eL, eG, zQ, aW, az, g, pL, eE, lk, eF, cm, mK, aAB, eM, nB, aiM, cj, U, k, m, gn, hh, gU, pG, aAz, aw, ht, NT, n, aj, fr, qN, eW, ft, h, dL, hB, pi, sp, fJ, aq, yq, cM, Zj, bP, dB, hk, hL, at, fL, cB, B, aAE, ek, it, bL, fM, dA, jx, aA, hy, C, V, q, er, eA, mj, cF, aAF, aT, aAn, kf, cy, bK, aAD, jj, bq, aAC, ae, af, ne, jf, s, nO, iU, oV, Y, xR, r, lo, en, cl, t, iK, ck, ahN, rR, nM, Dy, c, ac, iM, wR, ro, im, bt, LS, pY, iW, aAk, jh, KO, oZ, mC, ad, av, hd, Db, io, hD, ji, fb, nJ, Yi, aAy, aca, d, BN, aAA, je, ff, eH, eZ, Ej, aF, bz, eU, bE, Rv, Ny, hE, kS, X, y); #c1(CASP8) c2(XP_006712854) c3(caspase-8 isoform X5) c4(286895) c5(286896, 286897, 286898, 286899, 286900, 286901) c6( ) c7(bM, T, os, aC, fR, pf, hV, if, aAx, fd, bB, ci, Qp, ip, x, XW, bv, aE, Bc, Qk, Ou, K, eL, eG, zQ, aW, az, g, pL, eE, lk, eF, cm, mK, aAB, eM, nB, aiM, cj, U, k, m, gn, hh, gU, pG, aAz, aw, ht, NT, n, aj, fr, qN, eW, ft, h, dL, hB, pi, sp, fJ, aq, yq, cM, Zj, bP, dB, hk, hL, at, fL, cB, B, aAE, ek, it, bL, fM, dA, jx, aA, hy, C, V, q, er, eA, mj, cF, aAF, aT, aAn, kf, cy, bK, aAD, jj, bq, aAC, ae, af, ne, jf, s, nO, iU, oV, Y, xR, r, lo, en, cl, t, iK, ck, ahN, rR, nM, Dy, c, ac, iM, wR, ro, im, bt, LS, pY, iW, aAk, jh, KO, oZ, mC, ad, av, hd, Db, io, hD, ji, fb, nJ, Yi, aAy, aca, d, BN, aAA, je, ff, eH, eZ, Ej, aF, bz, eU, bE, Rv, Ny, hE, kS, X, y); #c1(CASP8) c2(XP_011510272) c3(caspase-8 isoform X8) c4(300868) c5(300869, 300870) c6( ) c7(bM, T, os, aC, fR, pf, hV, if, aAx, fd, bB, ci, Qp, ip, x, XW, bv, aE, Bc, Qk, Ou, K, eL, eG, zQ, aW, az, g, pL, eE, lk, eF, cm, mK, aAB, eM, nB, aiM, cj, U, k, m, gn, hh, gU, pG, aAz, aw, ht, NT, n, aj, fr, qN, eW, ft, h, dL, hB, pi, sp, fJ, aq, yq, cM, Zj, bP, dB, hk, hL, at, fL, cB, B, aAE, ek, it, bL, fM, dA, jx, aA, hy, C, V, q, er, eA, mj, cF, aAF, aT, aAn, kf, cy, bK, aAD, jj, bq, aAC, ae, af, ne, jf, s, nO, iU, oV, Y, xR, r, lo, en, cl, t, iK, ck, ahN, rR, nM, Dy, c, ac, iM, wR, ro, im, bt, LS, pY, iW, aAk, jh, KO, oZ, mC, ad, av, hd, Db, io, hD, ji, fb, nJ, Yi, aAy, aca, d, BN, aAA, je, ff, eH, eZ, Ej, aF, bz, eU, bE, Rv, Ny, hE, kS, X, y); #c1(CASP8AP2) c2(NP_001131140) c3(CASP8-associated protein 2) c4(52606) c5(52607, 52608, 52609, 52610, 52611, 52612, 52613, 52614) c6( ) c7(oL, T, fX, vT, iW, r, h, ci, XU, aAG, q); #c1(CASP9) c2(XP_011540572) c3(caspase-9 isoform X2) c4( ) c5(339058, 339059, 339060, 339061, 339062, 339063) c6( ) c7(bL, T, aC, fM, fR, pf, sw, if, iW, jx, jh, aA, lD, n, fd, bS, fr, ci, C, bX, qN, zP, V, asr, g, aR, ad, eA, eW, XW, av, jz, aE, Bc, aT, ah, lG, nm, cy, dL, K, hD, bq, an, fb, ae, eL, eu, jf, d, iU, vT, aW, Y, eH, hl, r, vs, aF, g, xl, t, eF, bz, cm, iK, vk, ac, c, eM, asq, aiM, cj, gZ, U, at, m, bC, bt, ik, B, Ex, rp); #c1(CASP9) c2(XP_011540574) c3(caspase-9 isoform X1) c4( ) c5(339064, 339065, 339066, 339067, 339068, 339069, 339070, 339071, 339072, 339073, 339074, 339075, 339076, 339077, 339078) c6( ) c7(bL, T, aC, fM, fR, pf, sw, if, iW, jx, jh, aA, lD, n, fd, bS, fr, ci, C, bX, qN, zP, V, asr, q, aR, ad, eA, eW, XW, av, jz, aE, Bc, aT, ab, lG, nm, cy, dL, K, hD, bq, an, fb, ae, eL, eu, jf, d, iU, vT, aW, Y, eH, hl, r, vs, aF, g, xl, t, eF, bz, cm, iK, vk, ac, c, eM, asq, aiM, cj, gZ, U, at, m, bC, bt, ik, B, Ex, rp); #c1(CASP9) c2(XP_011540575) c3(caspase-9 isoform X3) c4(339079) c5(339080, 339081, 339082, 339083, 339084, 339085) c6( ) c7(bL, T, aC, fM, fR, pf, sw, if, iW, jx, jh, aA, lD, n, fd, bS, fr, ci, C, bX, qN, zP, V, asr, q, aR, ad, eA, eW, XW, av, jz, aE, Bc, aT, ab, lG, nm, cy, dL, K, hD, bq, an, fb, ae, eL, eu, jf, d, iU, vT, aW, Y, eH, hl, r, vs, aF, g, xl, t, eF, bz, cm, iK, vk, ac, c, eM, asq, aiM, cj, gZ, U, at, m, bC, bt, ik, B, Ex, rp); #c1(CASQ1) c2(NP_001222) c3(calsequestrin-1 precursor) c4(83942, 83943, 83944) c5(83945, 83946, 83947, 83948, 83949, 83950, 83951, 83952, 83953, 83954, 83955, 83956, 83957, 83958, 83959, 83960, 83961, 83962) c6( ) c7(bL, ac, mP, lW, aj, mf, K, Jk, bq, J); #c1(CASR) c2(NP_001171536) c3(extracellular calcium-sensing receptor isoform 1 precursor) c4(70547) c5(70548, 70549, 70550, 70551, 70552, 70553) c6( ) c7(T, ea, al, fd, bB, ci, aY, aE, Bc, eL, azh, yo, PP, aW, aAT, Lm, dg, as, eF, cm, TG, mx, wB, cj, iS, azg, m, lS, aAK, dD, aAP, aw, NT, n, aj, fr, ml, eW, cc, afV, dL, aAG, OM, aAI, OX, aAH, cM, ar, kT, YE, Qu, at, eo, aAQ, B, vQ, bL, aAM, dA, eR, cz, v, j, ON, sl, q, J, eA, QI, mj, TI, XD, nv, aT, aAR, bq, ae, af, bA, s, oV, Y, EK, r, lo, t, ck, c, dy, gT, bt, aAO, gV, pY, qb, ha, jh, eq, ad, Xv, fU, hd, LL, arV, yh, aAL, sj, uQ, hG, vj, eH, OQ, dq, HI, bz, gk, Cq, aAS, bE, AR, avI, MJ, aAJ, lC, aAN, X); #c1(CASR) c2(XP_005247893) c3(extracellular calcium-sensing receptor isoform X1) c4(268021) c5(268022, 268023, 268024, 268025, 268026, 268027, 268028, 268029, 268030, 268031) c6( ) c7(T, ea, al, fd, bB, ci, aY, aE, Bc, eL, azh, yo, PP, aW, aAT, Lm, dg, as, eF, cm, TG, mx, wB, cj, iS, azg, m, lS, aAK, dD, aAP, aw, NT, n, aj, fr, ml, eW, cc, afV, dL, aAG, OM, aAI, OX, aAH, cM, ar, kT, YE, Qu, at, eo, aAQ, B, vQ, bL, aAM, dA, eR, cz, v, j, ON, sl, q, J, eA, QI, mj, TI, XD, nv, aT, aAR, bq, ae, af, bA, s, oV, Y, EK, r, lo, t, ck, c, dy, gT, bt, aAO, gV, pY, qb, ha, jh, eq, ad, Xv, fU, hd, LL, arV, yh, aAL, sj, uQ, hG, vj, eH, OQ, dq, HI, bz, gk, Cq, aAS, bE, AR, avI, MJ, aAJ, lC, aAN, X); #c1(CASR) c2(XP_005247894) c3(extracellular calcium-sensing receptor isoform X2) c4(268032) c5( ) c6( ) c7(T, ea, al, fd, bB, ci, aY, aE, Bc, eL, azh, yo, PP, aW, aAT, Lm, dg, as, eF, cm, TG, mx, wB, cj, iS, azg, m, lS, aAK, dD, aAP, aw, NT, n, aj, fr, ml, eW, cc, afV, dL, aAG, OM, aAI, OX, aAH, cM, ar, kT, YE, Qu, at, eo, aAQ, B, vQ, bL, aAM, dA, eR, cz, v, j, ON, sl, q, J, eA, QI, mj, TI, XD, nv, aT, aAR, bq, ae, af, bA, s, oV, Y, EK, r, lo, t, ck, c, dy, gT, bt, aAO, gV, pY, qb, ha, jh, eq, ad, Xv, fU, hd, LL, arV, yh, aAL, sj, uQ, hG, vj, eH, OQ, dq, HI, bz, gk, Cq, aAS, bE, AR, avI, MJ, aAJ, lC, aAN, X); #c1(CASS4) c2(NP_001157587) c3(cas scaffolding protein family member 4 isoform c) c4(62304) c5(62305, 62306, 62307, 62308, 62309, 62310) c6( ) c7(T); #c1(CASS4) c2(NP_001157588) c3(cas scaffolding protein family member 4 isoform a) c4(62311) c5(62312, 62313, 62314, 62315, 62316, 62317, 62318, 62319, 62320, 62321) c6( ) c7(T); #c1(CAST) c2(NP_001035905) c3(calpastatin isoform f) c4(33369) c5(33370, 33371, 33372, 33373, 33374, 33375) c6( ) c7(Kd, dD, ea, fG, eX, jh, cz, v, eq, C, uE, V, g, aR, mC, cd, Bc, aT, h, lG, cy, eV, bl, ji, an, zy, H, af, eu, akX, d, aW, Fm, Y, FD, cr, eZ, fe, t, cm, Hv, iO, VJ, ac, c, hc, wB, U, uo, nw, eo, m, fL, aAU, y, X, hv, L); #c1(CAST) c2(NP_001177371) c3(calpastatin isoform m) c4(72716) c5(72717, 72718, 72719, 72720, 72721) c6( ) c7(Kd, dD, ea, fG, eX, jh, cz, v, eq, C, uE, V, q, aR, mC, cd, Bc, aT, h, lG, cy, eV, bl, ji, an, zy, H, af, eu, akX, d, aW, Fm, Y, FD, cr, eZ, fe, t, cm, Hv, iD, VJ, ac, c, hc, wB, U, uo, nw, eo, m, fL, aAU, y, X, hv, L); #c1(CAST) c2(NP_775083) c3(calpastatin isoform b) c4(249488) c5(249489, 249490, 249491, 249492, 249493, 249494) c6( ) c7(Kd, dD, ea, fG, eX, jh, cz, v, eq, C, uE, V, q, aR, mC, cd, Bc, aT, h, lG, cy, eV, bl, ji, an, zy, H, af, eu, akX, d, aW, Fm, Y, FD, cr, eZ, fe, t, cm, Hv, iO, VJ, ac, c, hc, wB, U, uo, nw, eo, m, fL, aAU, y, X, hv, L); #c1(CAST) c2(XP_006714759) c3(calpastatin isoform X2) c4(288105) c5(288106, 288107, 288108, 288109, 288110, 288111, 288112, 288113, 288114, 288115) c6( ) c7(Kd, dD, ea, fG, eX, jh, cz, v, eq, C, uE, V, q, aR, mC, cd, Bc, aT, h, lG, cy, eV, bl, ji, an, zy, H, af, eu, akX, d, aW, Fm, Y, FD, cr, eZ, fe, t, cm, Hv, iO, VJ, ac, c, hc, wB, U, uo, nw, eo, m, fL, aAU, y, X, hv, L); #c1(CAST) c2(XP_006714761) c3(calpastatin isoform X4) c4( ) c5(288116) c6( ) c7(Kd, dD, ea, fG, eX, jh, cz, v, eq, C, uE, V, q, aR, mC, cd, Bc, aT, h, lG, cy, eV, bl, ji, an, zy, H, af, eu, akX, d, aW, Em, Y, FD, cr, eZ, fe, t, cm, Hv, iO, VJ, ac, c, hc, wB, U, uo, nw, eo, m, fL, aAU, y, X, hv, L); #c1(CAST) c2(XP_006714762) c3(calpastatin isoform X5) c4(288117, 288118, 288119) c5(288120) c6( ) c7(Kd, dD, ea, fG, eX, jh, cz, v, eq, C, uE, V, g, aR, mC, cd, Bc, aT, h, lG, cy, eV, bl, ji, an, zy, H, af, eu, akX, d, aW, Fm, Y, FD, cr, eZ, fe, t, cm, Hv, iO, VJ, ac, c, hc, wB, U, uo, nw, eo, m, fL, aAU, y, X, hv, L); #c1(CAST) c2(XP_006714763) c3(calpastatin isoform X6) c4(288121) c5(288122, 288123, 288124, 288125, 288126, 288127) c6( ) c7(Kd, dD, ea, fG, eX, jh, cz, v, eq, C, uE, V, q, aR, mC, cd, Bc, aT, h, lG, cy, eV, bl, ji, an, zy, H, af, eu, akX, d, aW, Em, Y, FD, cr, eZ, fe, t, cm, Hv, iO, VJ, ac, c, hc, wB, U, uo, nw, eo, m, fL, aAU, y, X, hv, L); #c1(CAST) c2(XP_006714766) c3(calpastatin isoform X11) c4(288128) c5(288129, 288130, 288131, 288132, 288133, 288134) c6( ) c7(Kd, dD, ea, fG, eX, jh, cz, v, eq, C, uE, V, q, aR, mC, cd, Bc, aT, h, lG, cy, eV, bl, ji, an, zy, H, af, eu, akX, d, aW, Em, Y, ED, cr, eZ, fe, t, cm, Hv, iO, VJ, ac, c, hc, wB, U, uo, nw, eo, m, fL, aAU, y, X, hv, L); #c1(CAST) c2(XP_006714767) c3(calpastatin isoform X12) c4(288135) c5(288136, 288137, 288138, 288139, 288140, 288141) c6( ) c7(Kd, dD, ea, fG, eX, jh, cz, v, eq, C, uE, V, q, aR, mC, cd, Bc, aT, h, IG, cy, eV, bl, ji, an, zy, H, af, eu, akX, d, aW, Fm, Y, FD, cr, eZ, fe, t, cm, Hv, iO, VJ, ac, c, hc, wB, U, uo, nw, eo, m, fL, aAU, y, X, hv, L); #c1(CAST) c2(XP_006714770) c3(calpastatin isoform X17) c4( ) c5(288142, 288143, 288144, 288145, 288146, 288147, 288148, 288149, 288150, 288151, 288152, 288153, 288154, 288155, 288156, 288157, 288158) c6( ) c7(Kd, dD, ea, fG, eX, jh, cz, v, eq, C, uE, V, q, aR, mC, cd, Bc, aT, h, lG, cy, eV, bl, ji, an, zy, H, af, eu, akX, d, aW, fm, Y, FD, cr, eZ, fe, t, cm, Hv, iO, VJ, ac, c, hc, wB, U, uo, nw, eo, m, fL, aAU, y, X, hv, L); #c1(CASZ1) c2(XP_011539937) c3(zinc finger protein castor homolog 1 isoform X3) c4( ) c5(338290, 338291, 338292, 338293, 338294, 338295) c6( ) c7(T, qo, d, aAV, F, aW, Y, oe, oW, aT, cz, eb, jh, ur, K, eA, eg, cm, bz, B); #c1(CAT) c2(NP_001743) c3(catalase) c4(120675) c5(120676, 120677, 120678, 120679, 120680, 120681) c6( ) c7(bM, T, os, aC, lP, ea, if, e, bB, fe, Vd, ci, qj, aBm, fw, ku, aBb, aE, Bc, PI, aBg, K, qD, hH, N, Zm, aa, aAX, aW, az, fc, CT, aBd, La, aoD, Ku, hJ, aBa, g, eF, cm, aBh, wT, aAW, qJ, yl, aBr, eM, nB, Gs, U, vy, wx, m, aBn, pw, aBt, dD, aBe, aBf, My, aw, RC, BH, aj, ko, nA, PJ, aBI, Rc, qN, cd, zo, eW, JB, ft, cc, pe, qg, cU, lG, h, dL, wb, on, pi, Gc, hi, rk, A, Gw, ap, ge, Ni, aq, QK, cv, ej, ar, iO, aBs, yf, W, lX, dB, hk, eD, mg, hR, at, oh, lB, cB, B, abW, bL, eR, yk, qQ, rf, aA, cR, cz, aBo, v, j, Kh, C, AO, V, eA, J, er, eJ, mj, uT, HJ, nv, afQ, MI, aT, cy, bK, aAD, bq, DX, lM, ae, af, dl, bA, eu, azU, wr, s, nO, aBq, Y, ajx, fO, ate, r, en, cl, t, f, iK, bN, hY, ck, akF, rR, nM, ac, c, kB, iM, mG, hr, wR, mf, dy, aBp, ao, hS, am, aBj, aD, iW, jh, Hn, acU, oZ, dG, eq, atK, aAY, ad, kL, hX, dP, fU, hd, ib, yt, ds, Hk, ts, ah, mL, ji, nJ, sj, uQ, NP, uX, je, lR, anv, qt, ff, eH, cr, eZ, dN, dq, Mz, aF, iV, bz, aBi, qa, iq, xT, aAZ, yE, bE, aBc, uR, eB, atd, aBk, aS, bC, be, ei, y, X, jr, pC); #c1(CATSPER1) c2(NP_444282) c3(cation channel sperm-associated protein 1) c4(230288) c5(230289, 230290, 230291, 230292, 230293, 230294, 230295) c6( ) c7(gU, aBu); #c1(CATSPER2) c2(NP_001269238) c3(cation channel sperm-associated protein 2 isoform 1) c4(100849) c5(100850, 100851, 100852, 100853, 100854, 100855, 100856, 100857, 100858, 100859, 100860, 100861, 100862, 100863, 100864, 100865, 100866, 100867, 100868, 100869, 100870, 100871, 100872) c6( ) c7(gU); #c1(CATSPER2) c2(NP_001269239) c3(cation channel sperm-associated protein 2 isoform 5) c4(100873) c5(100874, 100875, 100876, 100877, 100878) c6( ) c7(gU); #c1(CATSPER2) c2(NP_742093) c3(cation channel sperm-associated protein 2 isoform 2) c4(248069, 248070, 248071, 248072) c5(248073, 248074, 248075, 248076, 248077, 248078, 248079, 248080, 248081, 248082, 248083, 248084, 248085, 248086, 248087) c6( ) c7(gU); #c1(CAV1) c2(NP_001166366) c3(caveolin-1 isoform beta) c4( ) c5(68561, 68562, 68563, 68564, 68565, 68566, 68567, 68568) c6( ) c7(ID, T, aC, fR, ea, if, e, al, EQ, fd, bB, lR, ci, aY, ip, hv, aE, Qk, ajv, K, hu, eL, bc, cp, ly, eG, dH, JI, aW, az, LZ, vs, PQ, g, as, eF, GR, qJ, eM, nB, iA, go, cj, iS, m, Xu, fy, Th, iu, dD, Uc, My, cV, aBx, qy, n, aj, fr, uE, qN, qW, eW, aBy, ft, kH, h, IG, jy, dL, dx, wC, MD, hT, PX, aq, kp, dw, lx, bP, GU, dB, hj, at, uz, aBv, zl, it, B, bL, dA, eR, mr, wL, fG, aA, cR, cz, hy, v, j, C, AO, V, g, J, eA, XX, Ig, LY, aah, aT, Oi, bK, bq, ae, af, ne, eu, qw, s, Y, ev, r, en, t, pb, iM, c, pZ, mG, nG, au, km, wR, np, fD, gT, aBw, bt, Kd, id, aZ, aBz, eq, Fc, iJ, ad, kL, BY, hX, av, iC, hd, QJ, oW, bj, nJ, d, BN, je, qt, ff, eH, aeV, aF, iR, bz, LB, es, gk, bF, bE, z, aS, ei, lG, X, hv); #c1(CAV1) c2(NP_001744) c3(caveolin-1 isoform alpha) c4(120682, 120683) c5(120684, 120685, 120686, 120687, 120688, 120689, 120690, 120691) c6( ) c7(ID, T, aC, fR, ea, if, e, al, EQ, fd, bB, lR, ci, aY, ip, bv, aE, Qk, ajv, K, hu, eL, bc, cp, ly, eG, dH, JI, aW, az, LZ, vs, PQ, g, as, eF, GR, qJ, eM, nB, iA, go, cj, iS, m, Xu, fy, Th, iu, dD, Uc, My, cV, aBx, qy, n, aj, fr, uE, qN, qW, eW, aBy, ft, kH, h, lG, jy, dL, dx, wC, MD, hT, PX, aq, kp, dw, lx, bP, GU, dB, hj, at, uz, aBv, zl, it, B, bL, dA, eR, mr, wL, fG, aA, cR, cz, hy, v, j, C, AO, V, q, J, eA, XX, lg, LY, aah, aT, Oi, bK, bq, ae, af, ne, eu, qw, s, Y, ev, r, en, t, pb, iM, c, pZ, mG, nG, au, km, wR, np, fD, gT, aBw, bt, Kd, id, aZ, aBz, eq, Fc, iJ, ad, kL, BY, hX, av, iC, hd, QJ, oW, bj, nJ, d, BN, je, qt, ff, eH, aeV, aF, iR, bz, LB, es, gk, bF, bE, z, aS, ei, lC, X, hv); #c1(CAV2) c2(NP_001224) c3(caveolin-2 isoform a) c4(83963, 83964) c5(83965, 83966, 83967, 83968, 83969, 83970, 83971, 83972, 83973, 83974, 83975, 83976) c6( ) c7(cZ, T, dD, fR, mr, wL, ha, al, hy, V, eq, ci, fr, qW, eA, ad, oW, aT, bK, dd, ne, be, wC, d, BN, s, dH, aW, ff, eH, en, dw, eF, qJ, pZ, HN, Lq, X); #c1(CAV2) c2(NP_937855) c3(caveolin-2 isoform c) c4(259301) c5(259302, 259303, 259304, 259305, 259306, 259307) c6( ) c7(cZ, T, dD, fR, mr, wL, ha, al, hy, v, eq, ci, fr, qW, eA, ad, oW, aT, bK, dd, ne, be, wC, d, BN, s, dH, aW, ff, eH, en, dw, eF, qJ, pZ, HN, Lq, X); #c1(CAV3) c2(NP_001225) c3(caveolin-3) c4(83977) c5(83978, 83979, 83980, 83981, 83982, 83983, 83984, 83985, 83986, 83987) c6( ) c7(aBD, AY, e, aBE, al, jN, aw, aeu, j, bX, pd, aBF, cc, no, fm, Ws, oj, aT, Ak, vc, bl, aBA, bq, HO, mu, wC, hM, xs, Ad, uY, EZ, avK, aBG, aBB, gY, mx, km, aBH, gZ, oh, bD, aBG); #c1(CBFA2T2) c2(NP_001028171) c3(protein CBFA2T2 isoform MTGR1c) c4(30330, 30331) c5(30332, 30333, 30334, 30335, 30336, 30337, 30338, 30339, 30340, 30341, 30342, 30343) c6( ) c7(T, oT, ac, af, cA, bE, aW, aZ, eM, aT, kH, aq, fd, ji, ci, ei, eA, bt, B); #c1(CBFA2T2) c2(XP_006723949) c3(protein CBFA2T2 isoform X1) c4(295552, 295553, 295554, 295555, 295556) c5(295557, 295558, 295559, 295560, 295561, 295562, 295563, 295564, 295565, 295566, 295567, 295568, 295569, 295570, 295571, 295572, 295573) c6( ) c7(T, oT, ac, af, cA, bE, aW, aZ, eM, aT, kH, aq, fd, ji, ci, ei, eA, bt, B); #c1(CBFA2T2) c2(XP_011527403) c3(protein CBFA2T2 isoform X3) c4(322118) c5(322119) c6( ) c7(T, oT, ac, af, cA, bE, aW, aZ, eM, aT, kH, aq, fd, ji, ci, ei, eA, bt, B); #c1(CBFA2T2) c2(XP_011527406) c3(protein CBFA2T2 isoform X2) c4( ) c5(322120, 322121, 322122, 322123, 322124, 322125, 322126, 322127, 322128, 322129, 322130) c6( ) c7(T, oT, ac, af, cA, bE, aW, aZ, eM, aT, kH, aq, fd, ji, ci, ei, eA, bt, B); #c1(CBFA2T2) c2(XP_011527407) c3(protein CBFA2T2 isoform X5) c4( ) c5(322131, 322132, 322133, 322134, 322135) c6( ) c7(T, oT, ac, af, cA, bE, aW, aZ, eM, aT, kH, aq, fd, ji, ci, ei, eA, bt, B); #c1(CBFA2T2) c2(XP_011527409) c3(protein CBFA2T2 isoform X6) c4( ) c5(322136, 322137, 322138, 322139, 322140, 322141) c6( ) c7(T, oT, ac, af, cA, bE, aW, aZ, eM, aT, kH, aq, fd, ji, ci, ei, eA, bt, B); #c1(CBFA2T3) c2(NP_005178) c3(protein CBFA2T3 isoform 1) c4(153650) c5(153651, 153652, 153653, 153654, 153655, 153656, 153657) c6( ) c7(ck, oB, T, fM, aW, jh, aT, iY, ji, K, iV, AO, bt); #c1(CBFA2T3) c2(XP_005256380) c3(protein CBFA2T3 isoform X1) c4(274138, 274139, 274140) c5(274141, 274142, 274143, 274144, 274145, 274146, 274147, 274148, 274149, 274150, 274151, 274152, 274153, 274154, 274155, 274156, 274157, 274158, 274159, 274160, 274161, 274162) c6( ) c7(ck, oB, T, fM, aW, jh, aT, iY, ji, K, iV, AO, bt); #c1(CBFB) c2(NP_001746) c3(core-binding factor subunit beta isoform 2) c4(120713) c5(120714, 120715, 120716, 120717, 120718, 120719) c6( ) c7(aA, hF, cd, g, x, Na, fX, aT, h, ey, aBI, iU, aW, r, aF, g, Fu, t, ck, iT, aBJ, m, k, bD, bt); #c1(CBFB) c2(NP_074036) c3(core-binding factor subunit beta isoform 1) c4(213497) c5(213498, 213499, 213500, 213501, 213502, 213503) c6( ) c7(aA, hF, cd, g, x, Na, fX, aT, h, ey, aBI, iU, aW, r, aF, g, Fu, t, ck, iT, aBJ, m, k, bD, bt); #c1(CBL) c2(NP_005179) c3(E3 ubiquitin-protein ligase CBL) c4(153658) c5(153659, 153660, 153661, 153662, 153663, 153664) c6( ) c7(bL, T, fM, yS, qx, ew, bs, aA, jh, hF, mC, hr, ad, amR, x, acA, KN, h, dz, fb, pq, dx, aBI, aBK, yi, oP, et, gK, eZ, kD, aF, pm, bw, Qt, yR, Cv, ck, pc, kz, gX, mg, pg, aBL, Km, k, fL, agy, bt, xb, hv); #c1(CBLB) c2(NP_733762) c3(E3 ubiquitin-protein ligase CBL-B) c4(246969, 246970, 246971) c5(246972, 246973, 246974, 246975, 246976, 246977, 246978, 246979, 246980, 246981, 246982, 246983, 246984, 246985, 246986, 246987, 246988, 246989) c6( ) c7(x, t, A, fO, hD, aj, eo, k, bl, jh, bt, V, J, uQ); #c1(CBLB) c2(XP_011511560) c3(E3 ubiquitin-protein ligase CBL-B isoform X2) c4(302278, 302279) c5(302280, 302281, 302282, 302283, 302284, 302285) c6( ) c7(x, T, A, fO, hD, aj, eo, k, bl, jh, bt, V, J, uQ); #c1(CBLB) c2(XP_011511561) c3(E3 ubiquitin-protein ligase CBL-B isoform X3) c4(302286) c5(302287, 302288, 302289, 302290, 302291, 302292, 302293, 302294, 302295, 302296, 302297, 302298) c6( ) c7(x, T, A, fO, hD, aj, eo, k, bl, jh, bt, V, J, uQ); #c1(CBLL1) c2(NP_001271220) c3(E3 ubiquitin-protein ligase Hakai isoform 2) c4(103641) c5(103642, 103643, 103644, 103645, 103646, 103647, 103648, 103649) c6( ) c7(lo, aiM); #c1(CBLL1) c2(NP_079090) c3(E3 ubiquitin-protein ligase Hakai isoform 1) c4(216961, 216962) c5(216963, 216964, 216965, 216966, 216967, 216968) c6( ) c7(lo, aiM); #c1(CBLL1) c2(XP_011514882) c3(E3 ubiquitin-protein ligase Hakai isoform X1) c4( ) c5(307633, 307634, 307635, 307636, 307637) c6( ) c7(lo, aiM); #c1(CBLN1) c2(NP_004343) c3(cerebellin-1 precursor) c4(145519) c5(145520, 145521, 145522, 145523, 145524, 145525, 145526, 145527, 145528, 145529, 145530, 145531, 145532, 145533) c6(145534, 145535, 145536, 145537) c7(Z, bS, ct, ad); #c1(CBLN2) c2(XP_011524128) c3(cerebellin-2 isoform X1) c4(318685) c5(318686, 318687, 318688, 318689, 318690, 318691) c6( ) c7(ID, ly, yL, IC, lx); #c1(CBLN4) c2(NP_542184) c3(cerebellin-4 precursor) c4(232255) c5(232256, 232257, 232258, 232259, 232260, 232261, 232262, 232263) c6(232264, 232265) c7(cm); #c1(CBR1) c2(NP_001748) c3(carbonyl reductase [NADPH] 1 isoform 1) c4(120734) c5(120735, 120736, 120737, 120738, 120739, 120740) c6( ) c7(T, hl, aA, bB, g, ad, jz, cc, nv, aT, h, dL, K, jj, A, B, aW, aBN, az, aBM, r, aF, iV, f, bz, ck, EW, bE, gX, at, IC, bt, X); #c1(CBR3) c2(NP_001227) c3(carbonyl reductase [NADPH] 3) c4(83988) c5(83989, 83990, 83991, 83992, 83993, 83994) c6( ) c7(bL, T, cc, aT, at, n, aeu, dL, K, t, bt, cd); #c1(CBR4) c2(NP_116172) c3(carbonyl reductase family member 4) c4(225550, 225551) c5(225552, 225553, 225554, 225555, 225556, 225557, 225558, 225559, 225560, 225561, 225562, 225563) c6( ) c7(aw); #c1(CBS) c2(XP_011528084) c3(cystathionine beta-synthase isoform X3) c4(323160) c5(323161, 323162, 323163, 323164, 323165, 323166) c6( ) c7(ng, T, fR, ea, e, al, fd, bB, ci, mF, aY, ip, Na, M, K, dF, eL, eN, aW, fc, g, eM, Ip, wE, aBO, uo, m, dD, sQ, aw, aj, nA, aBP, aaL, dL, aBR, ux, is, aBQ, wC, MX, sq, PX, fe, aq, kT, W, gY, dB, ayS, bm, at, ut, bD, B, bL, fM, aA, sM, cR, cz, v, j, C, g, J, aT, HG, Nc, an, ae, af, eu, Uf, oV, r, en, t, f, ck, rR, wg, ac, Nb, gX, fP, wR, bt, iW, jh, oR, eq, ad, av, iY, IQ, Zf, ff, eZ, dN, aF, bz, dr, eK, IU, bF, mO, bE, ag, gZ, aS, cP, Tw, us); #c1(CBX1) c2(NP_006798) c3(chromobox protein homolog 1) c4(168173, 168174) c5(168175, 168176, 168177, 168178, 168179, 168180, 168181, 168182, 168183, 168184, 168185, 168186, 168187, 168188, 168189, 168190, 168191) c6( ) c7(T, hd, AS, bP, ae, ad); #c1(CBX2) c2(NP_005180) c3(chromobox protein homolog 2 isoform 1) c4(153665) c5(153666, 153667, 153668, 153669, 153670, 153671, 153672) c6( ) c7(aBS, KZ, T, av, UL); #c1(CBX2) c2(NP_116036) c3(chromobox protein homolog 2 isoform 2) c4(225273) c5(225274, 225275, 225276, 225277, 225278, 225279) c6( ) c7(aBS, KZ, T, av, UL); #c1(CBX3) c2(NP_009207) c3(chromobox protein homolog 3) c4(171505, 171506) c5(171507, 171508, 171509, 171510, 171511, 171512, 171513, 171514, 171515, 171516, 171517, 171518, 171519, 171520, 171521, 171522, 171523, 171524) c6( ) c7(sb, ae, T, wu, eD, n, rO, wm, bz, iu, ad); #c1(CBX3) c2(XP_005249669) c3(chromobox protein homolog 3 isoform X2) c4(269771) c5(269772, 269773, 269774, 269775, 269776) c6( ) c7(sb, ae, T, wu, eD, n, rO, wm, bz, iu, ad); #c1(CBX4) c2(NP_003646) c3(E3 SUMO-protein ligase CBX4) c4(139895) c5(139896, 139897, 139898, 139899, 139900, 139901, 139902, 139903, 139904, 139905, 139906, 139907, 139908) c6( ) c7(n, ae, B, ad, Ub); #c1(CBX4) c2(XP_011523701) c3(E3 SUMO-protein ligase CBX4 isoform X1) c4(318175) c5(318176) c6( ) c7(n, ae, B, ad, Ub); #c1(CBX5) c2(NP_001120793) c3(chromobox protein homolog 5) c4(44760, 44761) c5(44762, 44763, 44764, 44765, 44766, 44767, 44768, 44769, 44770, 44771, 44772, 44773, 44774, 44775, 44776, 44777, 44778, 44779, 44780, 44781, 44782) c6( ) c7(ck, ae, T, hd, iU, wu, aW, aBT, eD, dV, aT, bO, rO, ci, wm, bz, ad); #c1(CBX6) c2(NP_001290423) c3(chromobox protein homolog 6 isoform 2) c4(115396) c5(115397, 115398, 115399, 115400, 115401, 115402, 115403) c6( ) c7(dL, as); #c1(CBX6) c2(NP_055107) c3(chromobox protein homolog 6 isoform 1) c4(178987) c5( ) c6( ) c7(dL, as); #c1(CBX6) c2(XP_011528326) c3(chromobox protein homolog 6 isoform X1) c4( ) c5(323382, 323383, 323384, 323385, 323386, 323387, 323388) c6( ) c7(dL, as); #c1(CBX7) c2(NP_783640) c3(chromobox protein homolog 7) c4(251698, 251699) c5(251700, 251701, 251702, 251703, 251704, 251705, 251706, 251707, 251708, 251709, 251710, 251711, 251712) c6( ) c7(T, fM, jh, aA, bB, fd, ci, eJ, q, ad, hd, aE, ae, d, s, qt, Y, r, aF, g, oU, nB, bE, eD); #c1(CBX7) c2(XP_005261470) c3(chromobox protein homolog 7 isoform X7) c4(277361) c5(277362, 277363, 277364, 277365, 277366, 277367) c6( ) c7(T, fM, jh, aA, bB, fd, ci, eJ, q, ad, hd, aE, ae, d, s, qt, Y, r, aF, g, oU, nB, bE, eD); #c1(CBX8) c2(NP_065700) c3(chromobox protein homolog 8) c4(205004) c5(205005, 205006, 205007, 205008, 205009, 205010) c6( ) c7(aE, Bj, aW, aw, aT, dL); #c1(CBY1) c2(NP_001002880) c3(protein chibby homolog 1 isoform b) c4( ) c5(19724, 19725, 19726, 19727) c6( ) c7(fR, sQ, aBU, awP, r, uo, ut, IQ, q); #c1(CBY1) c2(NP_056188) c3(protein chibby homolog 1 isoform a) c4(186192, 186193, 186194) c5(186195, 186196, 186197, 186198, 186199, 186200, 186201, 186202, 186203, 186204, 186205, 186206, 186207, 186208, 186209, 186210, 186211, 186212) c6( ) c7(fR, sQ, aBU, awP, r, uo, ut, IQ, q); #c1(CC2D1A) c2(NP_060191) c3(coiled-coil and C2 domain-containing protein 1A) c4(194698, 194699) c5(194700, 194701, 194702, 194703, 194704, 194705, 194706) c6( ) c7(W, aBV, bO, h, K, nA, bz); #c1(CC2D1A) c2(XP_005260030) c3-(coiled-coil and C2 domain-containing protein 1A isoform X2) c4(276402, 276403) c5(276404, 276405, 276406, 276407, 276408, 276409, 276410, 276411, 276412, 276413, 276414, 276415) c6( ) c7(W, aBV, bO, h, K, nA, bz); #c1(CC2D1A) c2(XP_005260032) c3(coiled-coil and C2 domain-containing protein 1A isoform X4) c4( ) c5(276416, 276417, 276418, 276419, 276420) c6( ) c7(W, aBV, bO, h, K, nA, bz); #c1(CC2D1B) c2(XP_011539232) c3(coiled-coil and C2 domain-containing protein IB isoform X5) c4( ) c5(337334, 337335, 337336, 337337, 337338, 337339) c6( ) c7(h); #c1(CC2D2A) c2(NP_001073991) c3(coiled-coil and C2 domain-containing protein 2A isoform a) c4(36811, 36812) c5(36813, 36814, 36815, 36816, 36817, 36818, 36819, 36820, 36821, 36822, 36823, 36824, 36825, 36826, 36827, 36828, 36829, 36830, 36831, 36832, 36833, 36834, 36835, 36836, 36837, 36838, 36839, 36840, 36841, 36842, 36843, 36844, 36845, 36846) c6( ) c7(aBW, ul, ago, Gp, hl, vm, aBZ, Nj, aBY, nA, aBX, nC); #c1(CC2D2A) c2(NP_065836) c3(coiled-coil and C2 domain-containing protein 2A isoform b) c4(205777) c5(205778, 205779, 205780, 205781, 205782, 205783, 205784, 205785, 205786, 205787, 205788, 205789, 205790, 205791, 205792, 205793) c6( ) c7(aBW, ul, ago, Gp, hl, vm, aBZ, Nj, aBY, nA, aBX, nC); #c1(CC2D2A) c2(XP_011512174) c3(coiled-coil and C2 domain-containing protein 2A isoform X5) c4(302739) c5( ) c6( ) c7(aBW, ul, ago, Gp, hl, vm, aBZ, Nj, aBY, nA, aBX, nC); #c1(CC2D2A) c2(XP_011512176) c3(coiled-coil and C2 domain-containing protein 2A isoform X2) c4(302740) c5(302741, 302742, 302743, 302744, 302745, 302746) c6( ) c7(aBW, ul, ago, Gp, hl, vm, aBZ, Nj, aBY, nA, aBX, nC); #c1(CCAR1) c2(NP_001269889) c3(cell division cycle and apoptosis regulator protein 1 isoform b) c4(103042, 103043) c5(103044, 103045, 103046, 103047, 103048, 103049, 103050, 103051, 103052, 103053, 103054, 103055, 103056, 103057, 103058, 103059, 103060, 103061, 103062, 103063, 103064, 103065, 103066, 103067, 103068, 103069, 103070, 103071, 103072, 103073) c6( ) c7(T, ok, dA, bE, jh, aT, bB, he); #c1(CCAR1) c2(NP_060707) c3(cell division cycle and apoptosis regulator protein 1 isoform a) c4(197313, 197314, 197315) c5( ) c6( ) c7(T, ok, dA, bE, jh, aT, bB, he); #c1(CCAR2) c2(NP_066997) c3(cell cycle and apoptosis regulator protein 2) c4(208081) c5(208082, 208083, 208084, 208085, 208086, 208087, 208088, 208089, 208090, 208091) c6( ) c7(x, T, id, Qu, aW, eL, fc, jh, aT, n, dL, v, ci, K, cP, kp, aF, ae, iu, ad); #c1(CCBE1) c2(NP_597716) c3(collagen and calcium-binding EGF domain-containing protein 1 precursor) c4(235089, 235090) c5(235091, 235092, 235093, 235094, 235095, 235096, 235097, 235098, 235099, 235100, 235101, 235102) c6( ) c7(aW, aCa, aT, m, nA, hJ, t, fq, y); #c1(CCBL1) c2(NP_001116144) c3(kynurenine-oxoglutarate transaminase 1 isoform b) c4(43654, 43655) c5(43656, 43657, 43658, 43659, 43660, 43661, 43662, 43663, 43664, 43665, 43666, 43667, 43668, 43669, 43670) c6( ) c7(es, fO, ci); #c1(CCBL1) c2(NP_001274319) c3(kynurenine-oxoglutarate transaminase 1 isoform c) c4(106230) c5(106231, 106232, 106233, 106234, 106235, 106236) c6( ) c7(es, fO, ci); #c1(CCBL1) c2(XP_006717374) c3(kynurenine-oxoglutarate transaminase 1 isoform X4) c4(291038, 291039) c5(291040) c6( ) c7(es, fO, ci); #c1(CCBL1) c2(XP_011517467) c3(kynurenine-oxoglutarate transaminase 1 isoform X2) c4(311186) c5(311187, 311188, 311189) c6( ) c7(es, fO, ci); #c1(CCBL1) c2(XP_011517468) c3(kynurenine-oxoglutarate transaminase 1 isoform X3) c4( ) c5(311190, 311191, 311192, 311193, 311194, 311195, 311196, 311197, 311198, 311199) c6( ) c7(es, fO, ci); #c1(CCBL1) c2(XP_011517472) c3(kynurenine-oxoglutarate transaminase 1 isoform X1) c4( ) c5(311200, 311201, 311202, 311203, 311204) c6( ) c7(es, fO, ci); #c1(CCDC101) c2(NP_612423) c3(SAGA-associated factor 29 homolog) c4(236435) c5(236436, 236437, 236438, 236439, 236440, 236441) c6( ) c7(dy, K); #c1(CCDC102B) c2(NP_001087198) c3(coiled-coil domain-containing protein 102B) c4(38257) c5(38258, 38259, 38260, 38261, 38262, 38263, 38264, 38265, 38266, 38267) c6( ) c7(fq); #c1(CCDC102B) c2(XP_011524476) c3(coiled-coil domain-containing protein 1028 isoform X4) c4(319065) c5(319066, 319067, 319068, 319069, 319070, 319071, 319072) c6( ) c7(fq); #c1(CCDC103) c2(NP_001245326) c3(coiled-coil domain-containing protein 103 isoform 2) c4( ) c5(93123) c6( ) c7(Pf, aCb, MG); #c1(CCDC103) c2(NP_998772) c3(coiled-coil domain-containing protein 103 isoform 1) c4(265922, 265923) c5(265924, 265925, 265926, 265927, 265928, 265929, 265930, 265931, 265932, 265933, 265934, 265935, 265936, 265937, 265938, 265939) c6( ) c7(Pf, aCb, MG); #c1(CCDC105) c2(NP_775753) c3(coiled-coil domain-containing protein 105) c4(250168) c5(250169, 250170, 250171, 250172, 250173, 250174) c6( ) c7(oe); #c1(CCDC108) c2(NP_001265224) c3(coiled-coil domain-containing protein 108 isoform 3) c4(97957, 97958) c5(97959, 97960, 97961, 97962, 97963, 97964) c6( ) c7(cd); #c1(CCDC108) c2(NP_001265225) c3(coiled-coil domain-containing protein 108 isoform 4) c4( ) c5(97965, 97966, 97967, 97968, 97969, 97970) c6( ) c7(cd); #c1(CCDC108) c2(NP_689602) c3(coiled-coil domain-containing protein 108 isoform 2) c4(243210) c5(243211, 243212, 243213, 243214, 243215, 243216, 243217, 243218, 243219, 243220) c6( ) c7(cd); #c1(CCDC108) c2(NP_919278) c3(coiled-coil domain-containing protein 108 isoform 1) c4( ) c5(258449, 258450, 258451, 258452, 258453, 258454, 258455, 258456, 258457, 258458, 258459) c6( ) c7(cd); #c1(CCDC108) c2(XP_011509211) c3(coiled-coil domain-containing protein 108 isoform X2) c4( ) c5(299866) c6( ) c7(cd); #c1(CCDC108) c2(XP_011509212) c3(coiled-coil domain-containing protein 108 isoform X3) c4(299867) c5(299868, 299869, 299870) c6( ) c7(cd); #c1(CCDC114) c2(NP_653178) c3(coiled-coil domain-containing protein 114) c4(238965) c5(238966, 238967, 238968, 238969, 238970) c6( ) c7(Pf, aCc, MG, bD); #c1(CCDC114) c2(XP_005259472) c3(coiled-coil domain-containing protein 114 isoform X2) c4( ) c5(276112) c6( ) c7(Pf, aCc, MG, bD); #c1(CCDC115) c2(NP_115733) c3(coiled-coil domain-containing protein 115) c4(223738) c5(223739, 223740, 223741, 223742, 223743, 223744) c6( ) c7(cm, n, CQ); #c1(CCDC115) c2(XP_005263882) c3(coiled-coil domain-containing protein 115 isoform X1) c4(278569) c5(278570, 278571, 278572, 278573, 278574, 278575) c6( ) c7(cm, n, CQ); #c1(CCDC121) c2(NP_001136155) c3(coiled-coil domain-containing protein 121 isoform 2) c4(54443) c5(54444, 54445, 54446, 54447, 54448, 54449, 54450) c6( ) c7(om); #c1(CCDC121) c2(NP_078860) c3(coiled-coil domain-containing protein 121 isoform 3) c4(215826) c5(215827, 215828, 215829, 215830, 215831) c6( ) c7(om); #c1(CCDC122) c2(NP_659411) c3(coiled-coil domain-containing protein 122) c4(239771) c5(239772, 239773, 239774, 239775, 239776, 239777) c6( ) c7(acD, fq, AW, acC); #c1(CCDC122) c2(XP_011533245) c3(coiled-coil domain-containing protein 122 isoform X1) c4(329378, 329379, 329380, 329381, 329382, 329383, 329384) c5(329385, 329386, 329387, 329388, 329389, 329390, 329391, 329392, 329393, 329394, 329395, 329396, 329397, 329398, 329399, 329400, 329401, 329402, 329403, 329404, 329405, 329406, 329407, 329408, 329409, 329410, 329411, 329412) c6( ) c7(acD, fq, AW, acC); #c1(CCDC129) c2(NP_001244896) c3(coiled-coil domain-containing protein 129 isoform 1) c4(92293, 92294) c5(92295, 92296, 92297, 92298, 92299, 92300, 92301, 92302, 92303) c6( ) c7(Ea); #c1(CCDC129) c2(NP_001244897) c3(coiled-coil domain-containing protein 129 isoform 3) c4(92304, 92305, 92306, 92307) c5(92308, 92309, 92310, 92311, 92312, 92313, 92314) c6( ) c7(Ea); #c1(CCDC129) c2(NP_919276) c3(coiled-coil domain-containing protein 129 isoform 2) c4(258414) c5(258415, 258416, 258417, 258418, 258419, 258420, 258421, 258422, 258423, 258424, 258425, 258426, 258427, 258428, 258429, 258430, 258431, 258432, 258433, 258434, 258435, 258436, 258437, 258438, 258439, 258440) c6( ) c7(Ea); #c1(CCDC129) c2(XP_011513518) c3(coiled-coil domain-containing protein 129 isoform X2) c4( ) c5(305803) c6( ) c7(Ea); #c1(CCDC130) c2(NP_110445) c3(coiled-coil domain-containing protein 130) c4(220397, 220398) c5(220399, 220400, 220401, 220402, 220403, 220404) c6( ) c7(zx); #c1(CCDC130) c2(XP_011526628) c3(coiled-coil domain-containing protein 130 isoform X2) c4( ) c5(320928, 320929, 320930, 320931, 320932, 320933) c6( ) c7(zx); #c1(CCDC134) c2(NP_001291726) c3(coiled-coil domain-containing protein 134 isoform 2 precursor) c4(116419) c5(116420, 116421, 116422, 116423, 116424, 116425, 116426) c6(116427) c7(aq, af); #c1(CCDC134) c2(XP_005261805) c3(coiled-coil domain-containing protein 134 isoform X1) c4(277616) c5(277617, 277618, 277619, 277620, 277621, 277622, 277623, 277624) c6(277625, 277626) c7(aq, af); #c1(CCDC136) c2(NP_001188301) c3(coiled-coil domain-containing protein 136 isoform 2) c4(79030) c5(79031, 79032, 79033, 79034, 79035, 79036, 79037, 79038, 79039, 79040, 79041, 79042, 79043, 79044, 79045, 79046, 79047, 79048, 79049, 79050, 79051, 79052, 79053, 79054, 79055) c6( ) c7(ci); #c1(CCDC136) c2(NP_073579) c3(coiled-coil domain-containing protein 136 isoform 1) c4(212945, 212946, 212947) c5(212948, 212949, 212950, 212951, 212952, 212953) c6( ) c7(ci); #c1(CCDC136) c2(XP_005250591) c3(coiled-coil domain-containing protein 136 isoform X5) c4(270430) c5(270431, 270432, 270433, 270434, 270435, 270436) c6( ) c7(ci); #c1(CCDC136) c2(XP_005250595) c3(coiled-coil domain-containing protein 136 isoform X9) c4(270437) c5(270438, 270439, 270440, 270441, 270442, 270443) c6( ) c7(ci); #c1(CCDC136) c2(XP_006716154) c3(coiled-coil domain-containing protein 136 isoform X13) c4(290099) c5(290100, 290101, 290102, 290103, 290104, 290105) c6( ) c7(ci); #c1(CCDC136) c2(XP_011514786) c3(coiled-coil domain-containing protein 136 isoform X2) c4(307438) c5( ) c6( ) c7(ci); #c1(CCDC140) c2(NP_694583) c3(coiled-coil domain-containing protein 140) c4(245316, 245317) c5(245318, 245319, 245320, 245321, 245322, 245323, 245324, 245325, 245326, 245327, 245328, 245329) c6( ) c7(bM); #c1(CCDC141) c2(NP_775919) c3(coiled-coil domain-containing protein 141) c4(250683, 250684, 250685) c5(250686, 250687, 250688, 250689, 250690, 250691, 250692, 250693, 250694, 250695, 250696, 250697, 250698, 250699, 250700, 250701, 250702, 250703) c6( ) c7(cz); #c1(CCDC141) c2(XP_011509296) c3(coiled-coil domain-containing protein 141 isoform X4) c4( ) c5(299906) c6( ) c7(cz); #c1(CCDC148) c2(NP_001288613) c3(coiled-coil domain-containing protein 148 isoform 3) c4( ) c5(113839, 113840, 113841, 113842, 113843, 113844) c6( ) c7(bN, bA); #c1(CCDC148) c2(NP_620158) c3(coiled-coil domain-containing protein 148 isoform 1) c4(237388) c5(237389, 237390, 237391, 237392, 237393, 237394, 237395, 237396, 237397, 237398, 237399, 237400) c6( ) c7(bN, bA); #c1(CCDC148) c2(XP_011508940) c3(coiled-coil domain-containing protein 148 isoform X1) c4(299502) c5( ) c6( ) c7(bN, bA); #c1(CCDC148) c2(XP_011508941) c3(coiled-coil domain-containing protein 148 isoform X3) c4(299503) c5( ) c6( ) c7(bN, bA); #c1(CCDC151) c2(NP_001289382) c3(coiled-coil domain-containing protein 151 isoform 2) c4(114164) c5(114165, 114166, 114167, 114168, 114169, 114170) c6( ) c7(Pf, MG, bD); #c1(CCDC151) c2(NP_659482) c3(coiled-coil domain-containing protein 151 isoform 1) c4(240151, 240152) c5(240153, 240154, 240155, 240156, 240157, 240158, 240159, 240160, 240161, 240162, 240163, 240164) c6( ) c7(Pf, MG, bD); #c1(CCDC167) c2(NP_612502) c3(coiled-coil domain-containing protein 167) c4(236648, 236649, 236650) c5(236651, 236652, 236653, 236654, 236655, 236656, 236657, 236658, 236659, 236660, 236661, 236662, 236663, 236664, 236665, 236666, 236667, 236668) c6( ) c7(aw, cd, af); #c1(CCDC169-SOHLH2) c2(NP_001185839) c3(CCDC169-SOHLH2 protein) c4(76570) c5(76571, 76572, 76573, 76574, 76575, 76576, 76577, 76578, 76579) c6( ) c7(il, t, T, zZ, m); #c1(CCDC170) c2(NP_079335) c3(coiled-coil domain-containing protein 170) c4(217755, 217756) c5(217757, 217758, 217759, 217760, 217761, 217762, 217763, 217764, 217765, 217766, 217767, 217768) c6( ) c7(aT); #c1(CCDC171) c2(NP_775821) c3(coiled-coil domain-containing protein 171) c4(250411, 250412) c5(250413, 250414, 250415, 250416, 250417, 250418, 250419, 250420, 250421, 250422, 250423, 250424) c6( ) c7(dY); #c1(CCDC171) c2(XP_011516092) c3(coiled-coil domain-containing protein 171 isoform X3) c4(309297) c5(309298, 309299, 309300, 309301, 309302, 309303) c6( ) c7(dY); #c1(CCDC171) c2(XP_011516094) c3(coiled-coil domain-containing protein 171 isoform X5) c4(309304) c5( ) c6( ) c7(dY); #c1(CCDC171) c2(XP_011516095) c3(coiled-coil domain-containing protein 171 isoform X6) c4(309305, 309306) c5(309307) c6( ) c7(dY); #c1(CCDC171) c2(XP_011516096) c3(coiled-coil domain-containing protein 171 isoform X7) c4(309308) c5( ) c6( ) c7(dY); #c1(CCDC171) c2(XP_011516097) c3(coiled-coil domain-containing protein 171 isoform X8) c4( ) c5(309309, 309310, 309311, 309312, 309313, 309314) c6( ) c7(dY); #c1(CCDC171) c2(XP_011516098) c3(coiled-coil domain-containing protein 171 isoform X9) c4( ) c5(309315, 309316, 309317, 309318, 309319, 309320, 309321, 309322, 309323, 309324, 309325, 309326, 309327, 309328, 309329, 309330, 309331) c6( ) c7(dY); #c1(CCDC175) c2(NP_001157871) c3(coiled-coil domain-containing protein 175) c4(62836, 62837) c5(62838, 62839, 62840, 62841, 62842, 62843, 62844, 62845, 62846, 62847, 62848, 62849) c6( ) c7(af); #c1(CCDC176) c2(NP_079333) c3(basal body-orientation factor 1) c4(217748) c5(217749, 217750, 217751, 217752, 217753, 217754) c6( ) c7(kl); #c1(CCDC176) c2(XP_011535474) c3(basal body-orientation factor 1 isoform X3) c4(332541) c5(332542, 332543, 332544, 332545, 332546, 332547) c6( ) c7(kl); #c1(CCDC178) c2(NP_001098998) c3(coiled-coil domain-containing protein 178 isoform 1) c4(41576, 41577) c5(41578, 41579, 41580, 41581, 41582, 41583, 41584, 41585, 41586, 41587) c6( ) c7(ad); #c1(CCDC178) c2(NP_945346) c3(coiled-coil domain-containing protein 178 isoform 2) c4(260850) c5(260851, 260852, 260853, 260854, 260855, 260856) c6( ) c7(ad); #c1(CCDC178) c2(XP_011524253) c3(coiled-coil domain-containing protein 178 isoform X7) c4(318742) c5(318743, 318744, 318745, 318746, 318747, 318748) c6( ) c7(ad); #c1(CCDC178) c2(XP_011524257) c3(coiled-coil domain-containing protein 178 isoform X10) c4( ) c5(318749, 318750, 318751, 318752, 318753, 318754) c6( ) c7(ad); #c1(CCDC180) c2(NP_065944) c3(coiled-coil domain-containing protein 180) c4(206360, 206361, 206362, 206363, 206364) c5(206365, 206366, 206367, 206368, 206369, 206370, 206371, 206372, 206373, 206374, 206375, 206376, 206377, 206378, 206379, 206380, 206381, 206382, 206383, 206384, 206385, 206386, 206387, 206388, 206389, 206390, 206391, 206392, 206393, 206394, 206395, 206396, 206397, 206398, 206399) c6( ) c7(hH); #c1(CCDC181) c2(NP_067002) c3(coiled-coil domain-containing protein 181 isoform a) c4(208239) c5(208240, 208241, 208242, 208243, 208244, 208245, 208246, 208247, 208248, 208249, 208250, 208251, 208252, 208253, 208254, 208255) c6( ) c7(n, cz); #c1(CCDC181) c2(XP_011508129) c3(coiled-coil domain-containing protein 181 isoform X1) c4(298616, 298617) c5(298618, 298619, 298620, 298621, 298622, 298623) c6( ) c7(n, cz); #c1(CCDC185) c2(NP_689823) c3(coiled-coil domain-containing protein 185) c4(244030) c5(244031, 244032, 244033, 244034, 244035, 244036, 244037, 244038, 244039, 244040, 244041, 244042, 244043) c6( ) c7(j); #c1(CCDC22) c2(NP_054727) c3(coiled-coil domain-containing protein 22) c4(177367, 177368) c5(177369, 177370, 177371, 177372, 177373, 177374, 177375, 177376, 177377, 177378, 177379, 177380) c6( ) c7(af); #c1(CCDC28A) c2(NP_056254) c3(coiled-coil domain-containing protein 28A) c4(186748, 186749) c5(186750, 186751, 186752, 186753, 186754, 186755, 186756, 186757, 186758, 186759, 186760, 186761, 186762, 186763) c6( ) c7(iY, hF, dz, iT, et); #c1(CCDC3) c2(NP_001269587) c3(coiled-coil domain-containing protein 3 isoform 2) c4(102076) c5(102077, 102078, 102079, 102080, 102081, 102082, 102083, 102084) c6(102085, 102086) c7(v); #c1(CCDC3) c2(NP_113643) c3(coiled-coil domain-containing protein 3 isoform 1 precursor) c4(221900) c5(221901, 221902, 221903, 221904, 221905, 221906, 221907, 221908) c6(221909, 221910) c7(v); #c1(CCDC39) c2(NP_852091) c3(coiled-coil domain-containing protein 39) c4(254813, 254814) c5(254815, 254816, 254817, 254818, 254819, 254820, 254821, 254822, 254823, 254824, 254825, 254826) c6( ) c7(Pf, aCd, MG); #c1(CCDC40) c2(NP_001230271) c3(coiled-coil domain-containing protein 40 isoform 2) c4(86177) c5(86178, 86179, 86180, 86181, 86182, 86183) c6( ) c7(Pf, aCe, MG); #c1(CCDC40) c2(NP_060420) c3(coiled-coil domain-containing protein 40 isoform 1) c4(195883, 195884) c5(195885, 195886, 195887, 195888, 195889, 195890) c6( ) c7(Pf, aCe, MG); #c1(CCDC40) c2(XP_005257549) c3(coiled-coil domain-containing protein 40 isoform X4) c4(275249) c5(275250, 275251, 275252, 275253, 275254, 275255, 275256, 275257, 275258, 275259, 275260, 275261) c6( ) c7(Pf, aCe, MG); #c1(CCDC42) c2(NP_001151733) c3(coiled-coil domain-containing protein 42A isoform 2) c4(60121) c5(60122, 60123, 60124, 60125, 60126, 60127) c6( ) c7(hH); #c1(CCDC42) c2(NP_653282) c3(coiled-coil domain-containing protein 42A isoform 1) c4(239497) c5(239498, 239499, 239500, 239501, 239502, 239503) c6( ) c7(hH); #c1(CCDC428) c2(NP_001138344) c3(coiled-coil domain-containing protein 428) c4(56192) c5(56193, 56194, 56195, 56196, 56197, 56198) c6( ) c7(F, B, hi); #c1(CCDC50) c2(NP_777568) c3(coiled-coil domain-containing protein 50 short isoform) c4(251150) c5(251151, 251152, 251153, 251154, 251155, 251156) c6( ) c7(aCf, cj); #c1(CCDC50) c2(NP_848018) c3(coiled-coil domain-containing protein 50 long isoform) c4(253699) c5(253700, 253701, 253702, 253703, 253704, 253705) c6( ) c7(aCf, cj); #c1(CCDC54) c2(NP_115989) c3(coiled-coil domain-containing protein 54) c4(225119) c5(225120, 225121, 225122, 225123, 225124, 225125) c6( ) c7(Kc, T, eM, if, ff, ht, bu, hL, fd, m, en, hu, qN, t, g, c1); #c1(CCDC6) c2(NP_005427) c3(coiled-coil domain-containing protein 6) c4(156040) c5(156041, 156042, 156043, 156044, 156045, 156046) c6( ) c7(T, aCh, AS, wu, LX, Dd, n, hz, ci, aon, mF, xY, aCi, Vp, iu, hd, xy, azj, Db, nv, Qg, aT, dz, Fx, K, wm, pi, jf, VC, d, aCg, vT, aW, r, bz, aAW, qJ, sS, nM, nB, hk, YH, aeH, AN, LT); #c1(CCDC60) c2(NP_848594) c3(coiled-coil domain-containing protein 60) c4(253935) c5(253936, 253937, 253938, 253939, 253940, 253941) c6( ) c7(bL, j); #c1(CCDC62) c2(NP_958843) c3(coiled-coil domain-containing protein 62) c4(262265, 262266) c5(262267, 262268, 262269, 262270, 262271, 262272) c6( ) c7(aiZ, Gt, ajx, an, U, aU, bu, ae, ad); #c1(CCDC62) c2(XP_006719707) c3(coiled-coil domain-containing protein 62 isoform X3) c4(292897) c5(292898, 292899, 292900, 292901, 292902, 292903) c6( ) c7(aiZ, Gt, ajx, an, U, aU, bu, ae, ad); #c1(CCDC62) c2(XP_011537160) c3(coiled-coil domain-containing protein 62 isoform X5) c4( ) c5(334920, 334921, 334922, 334923, 334924, 334925) c6( ) c7(aiZ, Gt, ajx, an, U, aU, bu, ae, ad); #c1(CCDC63) c2(XP_011536303) c3(coiled-coil domain-containing protein 63 isoform X1) c4(333641) c5(333642, 333643, 333644, 333645, 333646, 333647) c6( ) c7(Y); #c1(CCDC65) c2(NP_149115) c3(coiled-coil domain-containing protein 65 isoform 1) c4(227245, 227246) c5(227247, 227248, 227249, 227250, 227251, 227252, 227253, 227254, 227255, 227256, 227257, 227258) c6( ) c7(Pf, aCj, MG); #c1(CCDC66) c2(NP_001012524) c3(coiled-coil domain-containing protein 66 isoform 2) c4(25027) c5(25028, 25029, 25030, 25031, 25032) c6( ) c7(nC, aCk); #c1(CCDC66) c2(NP_001135419) c3(coiled-coil domain-containing protein 66 isoform 1) c4(52876, 52877) c5(52878, 52879, 52880, 52881, 52882, 52883, 52884, 52885, 52886, 52887, 52888, 52889, 52890) c6( ) c7(nC, aCk); #c1(CCDC66) c2(XP_005265138) c3(coiled-coil domain-containing protein 66 isoform X1) c4( ) c5(279441) c6( ) c7(nC, aCk); #c1(CCDC66) c2(XP_005265144) c3(coiled-coil domain-containing protein 66 isoform X11) c4( ) c5(279442, 279443, 279444, 279445, 279446, 279447, 279448) c6( ) c7(nC, aCk); #c1(CCDC66) c2(XP_006713178) c3(coiled-coil domain-containing protein 66 isoform X3) c4(287050) c5( ) c6( ) c7(nC, aCk); #c1(CCDC67) c2(NP_857596) c3(deuterosome protein 1) c4(255265) c5(255266, 255267, 255268, 255269, 255270, 255271, 255272, 255273, 255274, 255275) c6( ) c7(bM, aF, aA); #c1(CCDC67) c2(XP_011540937) c3(deuterosome protein 1 isoform X6) c4(339464) c5( ) c6( ) c7(bM, aF, aA); #c1(CCDC67) c2(XP_011540939) c3(deuterosome protein 1 isoform X8) c4( ) c5(339465, 339466, 339467, 339468, 339469, 339470) c6( ) c7(bM, aF, aA); #c1(CCDC68) c2(NP_001137301) c3(coiled-coil domain-containing protein 68) c4(55387) c5(55388, 55389, 55390, 55391, 55392, 55393, 55394, 55395, 55396, 55397, 55398, 55399, 55400) c6( ) c7(j, Eg); #c1(CCDC78) c2(NP_001026907) c3(coiled-coil domain-containing protein 78) c4(29969) c5(29970, 29971, 29972, 29973, 29974, 29975) c6( ) c7(aCl, oj, Ad); #c1(CCDC78) c2(XP_005255163) c3(coiled-coil domain-containing protein 78 isoform X19) c4( ) c5(273570) c6( ) c7(aCl, oj, Ad); #c1(CCDC78) c2(XP_006720906) c3(coiled-coil domain-containing protein 78 isoform X16) c4(293779) c5( ) c6( ) c7(aCl, oj, Ad); #c1(CCDC78) c2(XP_011520673) c3(coiled-coil domain-containing protein 78 isoform X18) c4( ) c5(315603, 315604, 315605, 315606, 315607) c6( ) c7(aCl, oj, Ad); #c1(CCDC8) c2(NP_114429) c3(coiled-coil domain-containing protein 8) c4(222733, 222734) c5(222735, 222736, 222737, 222738, 222739, 222740, 222741, 222742, 222743, 222744, 222745, 222746) c6( ) c7(T, dD, hl, kP, asl, aW, Y, ea, aT, aCm, nw, aj, eq, fr, pl, aCo, iK, aCn, de); #c1(CCDC80) c2(NP_955805) c3(coiled-coil domain-containing protein 80 precursor) c4(261980, 261981) c5(261982, 261983, 261984, 261985, 261986, 261987, 261988, 261989, 261990, 261991, 261992, 261993, 261994, 261995, 261996, 261997, 261998, 261999, 262000, 262001, 262002, 262003) c6(262004, 262005, 262006, 262007) c7(T, hd, Db, nB, eF, eH, eE, ad); #c1(CCDC83) c2(NP_001273088) c3(coiled-coil domain-containing protein 83 isoform 2) c4(104313) c5(104314, 104315, 104316, 104317, 104318, 104319) c6( ) c7(bB, bE, bu); #c1(CCDC83) c2(XP_011543143) c3(coiled-coil domain-containing protein 83 isoform X1) c4(341957) c5(341958, 341959, 341960, 341961, 341962, 341963) c6( ) c7(bB, bE, bu); #c1(CCDC83) c2(XP_011543145) c3(coiled-coil domain-containing protein 83 isoform X3) c4(341964) c5(341965, 341966, 341967, 341968, 341969, 341970) c6( ) c7(bB, bE, bu); #c1(CCDC85A) c2(NP_001073902) c3(coiled-coil domain-containing protein 85A) c4(36412) c5(36413, 36414, 36415, 36416, 36417, 36418) c6( ) c7(v, j, pN); #c1(CCDC85A) c2(XP_005264182) c3(coiled-coil domain-containing protein 85A isoform X1) c4( ) c5(278699) c6( ) c7(v, j, pN); #c1(CCDC86) c2(NP_077003) c3(coiled-coil domain-containing protein 86) c4(214680, 214681, 214682) c5(214683, 214684, 214685, 214686, 214687, 214688, 214689, 214690, 214691, 214692, 214693, 214694, 214695, 214696, 214697, 214698, 214699, 214700) c6( ) c7(ac); #c1(CCDC88A) c2(NP_001129069) c3(girdin isoform 1) c4(50723) c5(50724, 50725, 50726, 50727, 50728, 50729) c6( ) c7(T, ac, c, aE, bE, aW, aT, r, PR, bB, K, q); #c1(CCDC88A) c2(NP_001241872) c3(girdin isoform 3) c4(89122) c5(89123, 89124, 89125, 89126, 89127, 89128, 89129, 89130, 89131, 89132, 89133, 89134, 89135, 89136, 89137, 89138, 89139, 89140, 89141) c6(89142, 89143, 89144, 89145, 89146, 89147, 89148) c7(T, ac, c, aE, bE, aW, aT, r, pR, bB, K, q); #c1(CCDC88A) c2(XP_005264478) c3(girdin isoform X5) c4(278955) c5(278956, 278957, 278958, 278959, 278960, 278961) c6( ) c7(T, ac, c, aE, bE, aW, aT, r, pR, bB, K, q); #c1(CCDC88A) c2(XP_011531268) c3(girdin isoform X4) c4(327241) c5(327242, 327243, 327244, 327245, 327246, 327247) c6( ) c7(T, ac, c, aE, bE, aW, aT, r, pR, bB, K, q); #c1(CCDC88A) c2(XP_011531269) c3(girdin isoform X1) c4(327248, 327249) c5(327250, 327251, 327252, 327253, 327254, 327255, 327256, 327257, 327258, 327259, 327260, 327261) c6( ) c7(T, ac, c, aE, bE, aW, aT, r, pR, bB, K, q); #c1(CCDC88C) c2(NP_001073883) c3(protein Daple) c4(36287, 36288) c5(36289, 36290, 36291, 36292, 36293, 36294) c6( ) c7(Nq, ul, Nr, aW, aT, dz, Xm, fq); #c1(CCDC88C) c2(XP_005267748) c3(protein Daple isoform X2) c4(281229) c5(281230, 281231, 281232, 281233, 281234, 281235) c6( ) c7(Nq, ul, Nr, aW, aT, dz, Xm, fq); #c1(CCDC88C) c2(XP_011535098) c3(protein Daple isoform X1) c4(331835) c5(331836, 331837, 331838, 331839, 331840, 331841, 331842, 331843, 331844, 331845, 331846, 331847) c6( ) c7(Nq, ul, Nr, aW, aT, dz, Xm, fq); #c1(CCDC91) c2(NP_060788) c3(coiled-coil domain-containing protein 91) c4(197816, 197817, 197818, 197819, 197820) c5(197821, 197822, 197823, 197824, 197825, 197826, 197827, 197828, 197829, 197830, 197831, 197832, 197833, 197834, 197835, 197836, 197837, 197838, 197839, 197840, 197841, 197842, 197843, 197844, 197845, 197846, 197847, 197848, 197849, 197850, 197851, 197852, 197853, 197854, 197855, 197856, 197857, 197858) c6( ) c7(IB, aCp, abV, Be); #c1(CCDC91) c2(XP_011519034) c3(coiled-coil domain-containing protein 91 isoform X4) c4(313501) c5(313502, 313503, 313504, 313505, 313506, 313507) c6( ) c7(IB, aCp, abV, Be); #c1(CCDC94) c2(NP_060544) c3(coiled-coil domain-containing protein 94) c4(196485) c5(196486, 196487, 196488, 196489, 196490, 196491) c6( ) c7(bt); #c1(CCDC97) c2(NP_443080) c3(coiled-coil domain-containing protein 97) c4(229308) c5(229309, 229310, 229311, 229312, 229313, 229314) c6( ) c7(dL); #c1(CCHCR1) c2(NP_001099033) c3(coiled-coil alpha-helical rod protein 1 isoform 2) c4(41672) c5(41673, 41674, 41675, 41676, 41677, 41678, 41679, 41680, 41681, 41682) c6( ) c7(bL, bM, T, yk, e, NT, cz, aj, v, j, C, J, ad, wD, afV, K, IQ, hu, hH, xa, aCr, Nr, aCq, ff, cr, eZ, po, pD, en, iV, Nq, vK, sS, Jr, z, hk, Gs, ei); #c1(CCHCR1) c2(NP_001099034) c3(coiled-coil alpha-helical rod protein 1 isoform 1) c4(41683) c5(41684, 41685, 41686, 41687, 41688, 41689, 41690, 41691, 41692, 41693, 41694, 41695, 41696, 41697, 41698, 41699, 41700, 41701, 41702, 41703, 41704, 41705, 41706, 41707, 41708, 41709, 41710, 41711, 41712, 41713, 41714) c6( ) c7(bL, bM, T, yk, e, NT, cz, aj, v, j, C, J, ad, wD, afV, K, IQ, hu, hH, xa, aCr, Nr, aCq, ff, cr, eZ, po, pD, en, iV, Nq, vK, sS, Jr, z, hk, Gs, ei); #c1(CCHCR1) c2(XP_006725551) c3(coiled-coil alpha-helical rod protein 1 isoform X9) c4(296884, 296885, 296886, 296887, 296888, 296889) c5(296890, 296891, 296892, 296893, 296894, 296895, 296896, 296897, 296898, 296899, 296900, 296901, 296902, 296903, 296904, 296905, 296906, 296907, 296908, 296909, 296910, 296911) c6( ) c7(bL, bM, T, yk, e, NT, cz, aj, v, j, C, J, ad, wD, afV, K, IQ, hu, hH, xa, aCr, Nr, aCq, ff, cr, eZ, po, pD, en, iV, Nq, vK, sS, Jr, z, hk, Gs, ei); #c1(CCHCR1) c2(XP_011513004) c3(coiled-coil alpha-helical rod protein 1 isoform X8) c4( ) c5(304453, 304454) c6( ) c7(bL, bM, T, yk, e, NT, cz, aj, v, j, C, J, ad, wD, afV, K, IQ, hu, hH, xa, aCr, Nr, aCq, ff, cr, eZ, po, pD, en, iV, Nq, vK, sS, Jr, z, hk, Gs, ei); #c1(CCHCR1) c2(XP_011513005) c3(coiled-coil alpha-helical rod protein 1 isoform X9) c4(304455, 304456, 304457, 304458, 304459, 304460, 304461, 304462, 304463, 304464, 304465) c5(304466, 304467, 304468, 304469, 304470, 304471, 304472, 304473, 304474, 304475, 304476, 304477, 304478, 304479, 304480, 304481) c6( ) c7(bL, bM, T, yk, e, NT, cz, aj, v, j, C, J, ad, wD, afV, K, IQ, hu, hH, xa, aCr, Nr, aCg, ff, cr, eZ, po, pD, en, iV, Nq, vK, sS, Jr, z, hk, Gs, ei); #c1(CCHCR1) c2(XP_011513007) c3(coiled-coil alpha-helical rod protein 1 isoform X10) c4(304482, 304483, 304484) c5(304485, 304486, 304487, 304488, 304489, 304490, 304491, 304492, 304493, 304494, 304495, 304496, 304497, 304498, 304499) c6( ) c7(bL, bM, T, yk, e, NT, cz, aj, v, j, C, J, ad, wD, afV, K, IQ, hu, hH, xa, aCr, Nr, aCq, ff, cr, eZ, po, pD, en, iV, Nq, vK, sS, Jr, z, hk, Gs, ei); #c1(CCHCR1) c2(XP_011513008) c3(coiled-coil alpha-helical rod protein 1 isoform X2) c4( ) c5(304500, 304501, 304502, 304503, 304504, 304505, 304506, 304507, 304508, 304509, 304510, 304511, 304512, 304513, 304514, 304515, 304516, 304517, 304518, 304519, 304520, 304521, 304522, 304523, 304524, 304525, 304526, 304527, 304528, 304529, 304530, 304531, 304532, 304533, 304534, 304535, 304536, 304537, 304538, 304539, 304540, 304541, 304542, 304543, 304544, 304545, 304546, 304547, 304548, 304549, 304550, 304551, 304552, 304553, 304554, 304555, 304556, 304557, 304558, 304559, 304560, 304561, 304562, 304563, 304564, 304565, 304566, 304567, 304568, 304569, 304570, 304571, 304572, 304573, 304574, 304575, 304576, 304577, 304578, 304579, 304580, 304581, 304582, 304583, 304584, 304585, 304586, 304587, 304588, 304589, 304590, 304591, 304592, 304593, 304594, 304595, 304596, 304597, 304598, 304599, 304600, 304601, 304602, 304603, 304604, 304605, 304606, 304607, 304608, 304609, 304610, 304611, 304612, 304613, 304614, 304615, 304616, 304617, 304618, 304619, 304620, 304621, 304622, 304623, 304624, 304625, 304626) c6( ) c7(bL, bM, T, yk, e, NT, cz, aj, v, j, C, J, ad, wD, afV, K, IQ, hu, hH, xa, aCr, Nr, aCq, ff, cr, eZ, po, pD, en, iV, Nq, vK, sS, Jr, z, hk, Gs, ei); #c1(CCHCR1) c2(XP_011545560) c3(coiled-coil alpha-helical rod protein 1 isoform X10) c4(344329, 344330) c5(344331, 344332, 344333, 344334, 344335, 344336, 344337, 344338) c6( ) c7(bL, bM, T, yk, e, NT, cz, aj, v, j, C, J, ad, wD, afV, K, IQ, hu, hH, xa, aCr, Nr, aCq, ff, cr, eZ, po, pD, en, iV, Nq, vK, sS, Jr, z, hk, Gs, ei); #c1(CCHCR1) c2(XP_011545561) c3(coiled-coil alpha-helical rod protein 1 isoform X2) c4( ) c5(344339, 344340, 344341, 344342, 344343, 344344, 344345, 344346, 344347, 344348, 344349, 344350, 344351, 344352, 344353, 344354) c6( ) c7(bL, bM, T, yk, e, NT, cz, aj, v, j, C, J, ad, wD, afV, K, IQ, hu, hH, xa, aCr, Nr, aCq, ff, cr, eZ, po, pD, en, iV, Nq, vK, sS, Jr, z, hk, Gs, ei); #c1(CCHCR1) c2(XP_011545562) c3(coiled-coil alpha-helical rod protein 1 isoform X1) c4( ) c5(344355, 344356, 344357, 344358, 344359, 344360, 344361, 344362, 344363) c6( ) c7(bL, bM, T, yk, e, NT, cz, aj, v, j, C, J, ad, wD, afV, K, IQ, hu, hH, xa, aCr, Nr, aCq, ff, cr, eZ, po, pD, en, iV, Nq, vK, sS, Jr, z, hk, Gs, ei); #c1(CCHCR1) c2(XP_011546361) c3(coiled-coil alpha-helical rod protein 1 isoform X9) c4(345076, 345077, 345078, 345079, 345080, 345081, 345082) c5(345083, 345084, 345085, 345086, 345087, 345088, 345089, 345090, 345091, 345092, 345093, 345094, 345095, 345096, 345097, 345098, 345099, 345100, 345101, 345102, 345103, 345104) c6( ) c7(bL, bM, T, yk, e, NT, cz, aj, v, j, C, J, ad, wD, afV, K, IQ, hu, hH, xa, aCr, Nr, aCq, ff, cr, eZ, po, pD, en, iV, Nq, vK, sS, Jr, z, hk, Gs, ei); #c1(CCHCR1) c2(XP_011546363) c3(coiled-coil alpha-helical rod protein 1 isoform X10) c4(345105) c5(345106, 345107, 345108, 345109, 345110, 345111, 345112, 345113) c6( ) c7(bL, bM, T, yk, e, NT, cz, aj, v, j, C, J, ad, wD, afV, K, IQ, hu, hH, xa, aCr, Nr, aCq, ff, cr, eZ, po, pD, en, iV, Nq, vK, sS, Jr, z, hk, Gs, ei); #c1(CCHCR1) c2(XP_011546547) c3(coiled-coil alpha-helical rod protein 1 isoform X6) c4(345384) c5(345385, 345386, 345387, 345388, 345389, 345390, 345391, 345392, 345393, 345394) c6( ) c7(bL, bM, T, yk, e, NT, cz, aj, v, j, C, J, ad, wD, afV, K, IQ, hu, hH, xa, aCr, Nr, aCq, ff, cr, eZ, po, pD, en, iV, Nq, vK, sS, Jr, z, hk, Gs, ei); #c1(CCHCR1) c2(XP_011546548) c3(coiled-coil alpha-helical rod protein 1 isoform X7) c4(345395, 345396) c5(345397, 345398, 345399, 345400, 345401, 345402, 345403, 345404, 345405, 345406, 345407, 345408, 345409, 345410, 345411, 345412, 345413, 345414, 345415, 345416, 345417, 345418, 345419, 345420, 345421, 345422, 345423, 345424, 345425, 345426, 345427, 345428, 345429, 345430, 345431, 345432, 345433) c6( ) c7(bL, bM, T, yk, e, NT, cz, aj, v, j, C, J, ad, wD, afV, K, IQ, hu, hH, xa, aCr, Nr, aCq, ff, cr, eZ, po, pD, en, iV, Nq, vK, sS, Jr, z, hk, Gs, ei); #c1(CCK) c2(NP_000720) c3(cholecystokinin preproprotein) c4(14861) c5(14862, 14863, 14864, 14865, 14866, 14867, 14868, 14869, 14870, 14871, 14872, 14873, 14874, 14875) c6( ) c7(bL, cZ, T, aC, dA, ya, jh, aA, ti, aj, bS, v, ci, iG, ww, Wb, q, ad, eA, eJ, jF, bv, ip, l, ft, hd, u, hW, aE, av, mj, pX, io, Sb, Ou, gl, bK, dd, bq, he, hB, ae, dl, dx, na, an, li, fb, kl, lx, tb, s, Gv, vj, aCt, AQ, hl, aCs, r, nY, aF, hp, g, as, LV, EX, fq, t, cm, Jh, cv, hq, ar, iq, eM, dB, bE, Gs, gX, sG, m, ra, cE, Ex, On); #c1(CCKAR) c2(NP_000721) c3(cholecystokinin receptor type A) c4(14876) c5(14877, 14878, 14879, 14880, 14881, 14882) c6( ) c7(bL, aC, bO, aA, aj, v, ww, qi, eA, J, ip, l, aE, u, hW, iX, aql, Sb, dL, bK, an, na, tb, vj, aF, g, EX, hq, ZT, On); #c1(CCKBR) c2(NP_795344) c3(gastrin/cholecystokinin type B receptor) c4(252416) c5(252417, 252418, 252419, 252420, 252421, 252422) c6( ) c7(bL, T, aC, fM, aCw, On, aD, aA, bB, ww, ci, g, ad, eA, eJ, ip, av, ft, hd, aE, hW, nv, ji, aCv, bq, an, fb, ae, B, tb, s, JI, Y, aCt, az, r, cu, aF, g, hg, ck, aCu, nB, bE, gX, X, Ex, qc); #c1(CCKBR) c2(XP_005253267) c3(gastrin/cholecystokinin type B receptor isoform X1) c4(272352) c5(272353, 272354, 272355, 272356, 272357, 272358) c6( ) c7(bL, T, aC, fM, aCw, On, aD, aA, bB, ww, ci, q, ad, eA, eJ, ip, av, ft, hd, aE, hW, nv, ji, aCv, bq, an, fb, ae, B, tb, s, JI, Y, aCt, az, r, cu, aF, g, hq, ck, aCu, nB, bE, gX, X, Ex, qc); #c1(CCL1) c2(NP_002972) c3(C—C motif chemokine 1 precursor) c4(134087) c5(134088, 134089, 134090, 134091, 134092, 134093) c6( ) c7(bM, T, Dw, iW, V, dP, dY, dV, aT, h, cU, kH, Ds, hu, uD, je, ff, r, yq, en, adz, iM, hc, at, va, IC, it); #c1(CCL11) c2(NP_002977) c3(eotaxin precursor) c4(134141) c5(134142, 134143, 134144, 134145, 134146, 134147) c6( ) c7(bL, bM, T, kh, dD, aCA, Dw, akc, eR, fG, aw, aj, v, j, ci, C, pM, eq, fr, V, J, dP, fS, M, h, lG, Ds, JK, ji, eu, Nr, A, zH, sp, aCx, mQ, aCB, fe, akY, po, iV, eE, t, cM, DF, Nq, TA, kT, cT, ac, aCz, Jp, JM, at, aCy, fD, ei, ra); #c1(CCL13) c2(NP_005399) c3(C—C motif chemokine 13 precursor) c4(155709, 155710, 155711) c5(155712, 155713, 155714, 155715, 155716, 155717) c6( ) c7(Nq, aCC, bM, Nr, Dw, z, hc, U, cj, bt, h, Ds, va, Xm, fD, eE, t, V, y); #c1(CCL14) c2(NP_116738) c3(C—C motif chemokine 14 isoform 2 precursor) c4(226315) c5(226316, 226317, 226318, 226319, 226320, 226321, 226322, 226323, 226324, 226325, 226326) c6( ) c7(dP, bM, gk, Dw, B, eJ, eR, aW, al, eZ, aT, fe, Ds, fL, hF, V, bz, mC, hX); #c1(CCL14) c2(NP_116739) c3(C—C motif chemokine 14 isoform 1 precursor) c4(226327) c5(226328, 226329, 226330, 226331, 226332, 226333) c6( ) c7(dP, bM, gk, Dw, B, eJ, eR, aW, al, eZ, aT, fe, Ds, fL, hF, V, bz, mC, hX); #c1(CCL15) c2(NP_116741) c3(C—C motif chemokine 15 preproprotein) c4(226334, 226335) c5(226336, 226337, 226338, 226339, 226340, 226341, 226342, 226343, 226344, 226345, 226346, 226347, 226348, 226349, 226350, 226351, 226352, 226353, 226354, 226355, 226356, 226357, 226358, 226359, 226360, 226361) c6(226362) c7(bM, Dw, eR, fe, Ds, B); #c1(CCL16) c2(XP_005258077) c3(C—C motif chemokine 16 isoform X1) c4(275480) c5(275481, 275482, 275483, 275484, 275485, 275486) c6( ) c7(bM, Dw, aaQ, aE, iU, sw, Y, aW, al, hl, aT, dN, aq, Ds, ci, aAo, adz, hE, B, ad); #c1(CCL17) c2(NP_002978) c3(C—C motif chemokine 17 precursor) c4(134148) c5(134149, 134150, 134151, 134152, 134153) c6( ) c7(bM, T, dD, fM, Dw, afA, ZI, ea, fG, jx, eX, jh, aA, eq, Qp, V, aR, o, dP, aCF, lg, od, ds, kH, cU, eV, Ds, IQ, amY, aCG, Nr, je, Y, f J, mQ, hl, cr, eZ, dN, aCE, po, ff, en, bu, eE, Nq, LB, cT, ck, iM, eU, xT, vZ, xO, z, ME, fD, aCD, i, If, bt, an); #c1(CCL17) c2(XP_011521558) c3(C—C motif chemokine 17 isoform X1) c4( ) c5(316292) c6( ) c7(bM, T, dD, fM, Dw, afA, ZI, ea, fG, jx, eX, jh, aA, eq, Qp, V, aR, o, dP, aCF, lg, od, ds, kH, cU, eV, Ds, IQ, amY, aCG, Nr, je, Y, f J, mQ, hl, cr, eZ, dN, aCE, po, ff, en, bu, eE, Nq, LB, cT, ck, iM, eU, xT, vZ, xO, z, ME, fD, aCD, i, If, bt, ao); #c1(CCL18) c2(NP_002979) c3(C—C motif chemokine 18 precursor) c4(134154) c5(134155, 134156, 134157, 134158, 134159, 134160, 134161) c6(134162) c7(bM, T, dD, Dw, akc, afA, ea, fG, j, eq, hX, x, av, F, dY, lg, aT, h, Ds, vB, IQ, bA, aa, je, aW, aCH, eE, cm, pb, LB, ck, ou, vU, iM, iQ, z, cG, hs, aCl, XU, k, aCD, y); #c1(CCL19) c2(NP_006265) c3(C—C motif chemokine 19 precursor) c4(163422, 163423) c5(163424, 163425, 163426, 163427, 163428, 163429, 163430, 163431, 163432, 163433, 163434, 163435) c6( ) c7(bM, Dw, dD, fR, ea, cL, v, j, eq, V, cd, o, aCJ, kH, aT, h, Ds, vB, kU, uQ, je, iU, aW, lh, lb, mQ, fJ, cr, bz, Wt, xT, Bv, iM, Dy, eU, xO, cj, en, fD, iu); #c1(CCL2) c2(NP_002973) c3(C—C motif chemokine 2 precursor) c4(134094) c5(134095, 134096, 134097, 134098, 134099, 134100) c6( ) c7(T, ea, bO, fd, ci, aY, aDI, bv, xy, aE, fm, rw, dV, Ds, aCL, aCU, LG, hH, aCN, cp, aa, li, ly, az, uY, vs, PQ, zC, GR, ha, nB, aCT, Ip, wE, cj, k, lS, aDi, de, vE, cQ, aj, qW, cd, zo, TB, aDo, lG, ey, mJ, mR, anP, sp, EU, fQ, fe, aDu, dB, aoB, aA, cz, hX, g, aCX, agD, Oi, cy, aCR, rz, dl, eu, bf, fO, bg, Io, cl, pb, tR, Vn, OW, ac, iQ, ig, CP, DW, MB, bt, On, aCA, wi, iW, KO, dG, fu, ad, hX, oW, IQ, DI, cH, cW, ff, tv, iV, bz, DF, anY, ME, If, lG, iu, lD, bM, aiR, if, e, bB, cL, bh, Tz, ip, x, Na, eG, up, fc, hl, aDn, kt, as, ir, eE, eE, cm, vA, vy, tV, aCy, hh, aCS, dD, zt, n, aDc, aCZ, uE, md, Mo, aDa, DU, A, fJ, lb, hQ, bP, dC, cA, hL, at, pg, ut, eo, aDb, fL, cB, B, NQ, dA, mr, Lx, aDq, v, V, WY, Nw, Id, aDr, aDt, aDh, ae, CB, jf, iZ, t, vk, ck, wO, zu, vi, hl, wV, eq, qi, BY, ds, aCJ, JK, uD, nJ, sj, d, wc, NH, dN, aCK, Hv, D, gk, Hs, agl, aCP, y, aC, fR, atj, al, CH, lR, wa, AW, Bc, bW, M, K, GO, ajK, dF, eL, Us, aCM, mQ, g, uC, Vm, aDs, U, uo, Hb, m, NK, QO, sQ, aw, BH, apt, aCQ, pU, JW, ft, gq, cU, Ne, By, Jn, wb, aDp, Ha, ar, kT, W, mg, gg, Pr, it, L, iH, fG, jx, hz, j, vp, eA, J, o, hh, nX, aCV, Nc, bq, Y, Pg, r, Is, tu, en, iK, c, hc, dh, azK, tM, Da, cS, dy, fD, amL, sY, id, ah, SY, iG, dP, fU, sN, vB, ji, adx, eH, cr, hp, Fq, Bu, qa, Bv, nb, Lj, cP, ei, G, aR, dY, aCW, aDk, YX, aCO, bU, oi, H, dQ, hm, amN, aW, HA, eM, nw, My, ez, fr, qN, ai, eW, ke, cc, jL, zf, h, jy, Nf, dL, db, wC, DV, aDe, aq, kp, mo, op, lx, aCz, bm, uz, bD, bL, Dw, eR, sM, tc, C, cF, aCY, acj, mP, Vr, aT, bK, an, af, oV, aDf, aaE, aDm, f, sS, vZ, AH, wq, aDj, Kd, ha, vr, Fb, jE, pz, mC, kL, LH, F, ib, sO, Os, jo, iL, yF, uQ, qt, yx, eZ, yy, aF, aDd, LB, es, axs, bE, uR, aDg, aS, X, us); #c1(CCL20) c2(NP_001123518) c3(C—C motif chemokine 20 isoform 2 precursor) c4(47294) c5(47295, 47296, 47297, 47298, 47299, 47300) c6( ) c7(bM, T, id, fR, aD, oe, eX, fd, cL, aj, ci, V, q, o, J, ad, eA, hd, aE, lg, aT, hD, eV, ji, K, IQ, bq, pk, ae, be, eu, DA, A, B, je, xR, aW, az, hl, mQ, r, cr, aq, fe, vs, yq, iV, eE, bz, ck, fT, aDv, iM, zr, nB, AM, at, uz, wR, fD, Pk, X, y); #c1(CCL20) c2(NP_004582) c3(C—C motif chemokine 20 isoform 1 precursor) c4(147880) c5(147881, 147882, 147883, 147884, 147885, 147886) c6( ) c7(bM, T, id, fR, aD, oe, eX, fd, cL, aj, ci, V, q, o, J, ad, eA, hd, aE, lg, aT, hD, eV, ji, K, IQ, bq, pk, ae, be, eu, DA, A, B, je, xR, aW, az, hl, mQ, r, cr, aq, fe, vs, yq, iV, eE, bz, ck, fT, aDv, iM, zr, nB, AM, at, uz, wR, fD, Pk, X, y); #c1(CCL21) c2(NP_002980) c3(C—C motif chemokine 21 precursor) c4(134163, 134164) c5(134165, 134166, 134167, 134168, 134169, 134170, 134171, 134172, 134173, 134174, 134175) c6( ) c7(oO, bM, T, dD, fR, JC, ea, e, fN, cz, bB, jh, cL, j, eq, V, Uy, o, q, cd, dP, ai, eW, hd, F, wD, kH, aT, h, azm, ey, hu, kU, hm, hM, A, je, s, iU, xR, aW, Y, Ih, Ib, ev, cr, r, iV, t, cm, bz, pb, Wt, aDw, LB, Bv, iM, Dy, eM, nB, bE, eU, ajd, tV, cj, aDx, aS, m, yH, y, B); #c1(CCL21) c2(XP_011516306) c3(C—C motif chemokine 21 isoform X1) c4( ) c5(309522) c6( ) c7(oO, bM, T, dD, fR, JC, ea, e, fN, cz, bB, jh, cL, j, eq, V, Uy, o, q, cd, dP, ai, eW, hd, F, wD, kH, aT, h, azm, ey, hu, kU, hm, hM, A, je, s, iU, xR, aW, Y, Ih, lb, ev, cr, r, iV, t, cm, bz, pb, Wt, aDw, LB, Bv, iM, Dy, eM, nB, bE, eU, ajd, tV, cj, aDx, aS, m, yH, y, B); #c1(CCL22) c2(NP_002981) c3(C—C motif chemokine 22 precursor) c4(134176) c5(134177, 134178, 134179, 134180, 134181134182) c6( ) c7(bM, T, Dw, Zl, fG, aw, jx, eX, jh, aA, cz, eq, Qp, V, aR, wD, av, lg, kH, cU, aT, Ds, dL, h, eV, amY, eL, uQ, je, anP, aW, hl, cr, aF, eE, asE, iP, LB, cT, fT, iM, ac, hk, hc, cj, ME, fD, aCD, i, y, bt); #c1(CCL23) c2(NP_005055) c3(C—C motif chemokine 23 isoform CKbeta8-1 precursor) c4(152482) c5(152483, 152484, 152485, 152486, 152487, 152488) c6( ) c7(bM, Dw, h, Ds, eE, y); #c1(CCL23) c2(NP_665905) c3(C—C motif chemokine 23 isoform CKbeta8 precursor) c4(241970) c5(241971, 241972, 241973, 241974, 241975, 241976) c6( ) c7(bM, Dw, h, Ds, eE, y); #c1(CCL24) c2(XP_011514762) c3(C—C motif chemokine 24 isoform X1) c4(307406) c5(307407, 307408, 307409, 307410, 307411, 307412, 307413, 307414, 307415, 307416) c6( ) c7(Nq, bM, Dw, Nr, tk, fR, aDy, z, sp, fS, mQ, JM, dN, h, Ds, Xm, fD, iV, eE); #c1(CCL25) c2(NP_001188288) c3(C—C motif chemokine 25 isoform 2 precursor) c4(79010) c5(79011, 79012, 79013, 79014, 79015, 79016, 79017, 79018, 79019, 79020, 79021, 79022) c6( ) c7(bM, xN, dD, Dw, ea, v, eq, ad, dP, aT, h, Ds, ae, xQ, aW, Y, vj, t, Dy, z, cj, m, y); #c1(CCL25) c2(XP_011526479) c3(C—C motif chemokine 25 isoform X1) c4(320776, 320777) c5(320778, 320779, 320780, 320781, 320782, 320783) c6( ) c7(bM, xN, dD, Dw, ea, v, eq, ad, dP, aT, h, Ds, ae, xQ, aW, Y, vj, t, Dy, z, cj, m, y); #c1(CCL26) c2(NP_006063) c3(C—C motif chemokine 26 precursor) c4(161568) c5(161569, 161570, 161571, 161572, 161573, 161574, 161575, 161576, 161577, 161578, 161579, 161580, 161581161582) c6(161583) c7(bM, Dw, hl, akc, fR, aoj, oz, cE, h, Ds, Nr, Du, dN, akY, po, fe, iV, eE, fq, DF, Nq, Ta, z, fD, y, it, hv, Tc); #c1(CCL27) c2(NP_006655) c3(C—C motif chemokine 27 precursor) c4(166946) c5(166947, 166948, 166949, 166950, 166951, 166952) c6( ) c7(bM, T, Dw, xS, fd, bB, TI, aT, h, Ds, IQ, nJ, be, xP, avg, je, xR, vT, HY, aW, TH, fJ, eH, cr, dN, aq, eE, eE, pb, xT, iM, TJ, xD, TG, bE, au, cj, rx, i, y, in, B); #c1(CCL28) c2(NP_001288802) c3(C—C motif chemokine 28 isoform a precursor) c4(114083, 114084, 114085) c5(114086, 114087, 114088, 114089, 114090, 114091, 114092, 114093, 114094, 114095, 114096, 114097, 114098, 114099, 114100, 114101, 114102, 114103, 114104, 114105, 114106, 114107, 114108) c6( ) c7(bM, T, Dw, aC, fR, LX, iB, cz, v, ci, afb, aT, kH, h, Ds, IQ, aCt, CM, bw, Ji, cj, dy, bt, ra, LT); #c1(CCL28) c2(NP_001288804) c3(C—C motif chemokine 28 isoform b) c4( ) c5(114109, 114110, 114111, 114112, 114113, 114114) c6(114115) c7(bM, T, Dw, aC, fR, LX, iB, cz, v, ci, afb, aT, kH, h, Ds, IQ, aCt, CM, bw, Ji, cj, dy, bt, ra, LT); #c1(CCL3) c2(NP_002974) c3(C—C motif chemokine 3 precursor) c4(134101) c5(134102, 134103, 134104, 134105, 134106, 134107) c6( ) c7(bM, T, fR, ea, fd, cL, AW, dV, K, mQ, zC, g, eE, oy, cj, uo, Hb, hh, dD, sQ, aiK, n, uE, ai, zw, h, lG, jy, aDp, mJ, Nr, aq, po, dB, ut, cB, B, DD, fG, Lx, j, V, eA, o, rS, aT, cy, an, af, eu, kl, bf, iU, axW, aCH, fO, en, ck, iQ, iM, ac, ig, aDA, wO, hc, AH, wR, fD, bt, ao, Ke, jh, eq, aDz, ds, aCJ, vB, IQ, yF, uQ, d, je, ff, gE, iV, eK, Nq, LB, axs, aDB, aS, y, X); #c1(CCL3L3) c2(NP_001001437) c3(C—C motif chemokine 3-like 1 precursor) c4(18444, 18445, 18446, 18447, 18448) c5(18449, 18450, 18451, 18452, 18453, 18454, 18455, 18456, 18457, 18458, 18459, 18460, 18461, 18462, 18463, 18464, 18465, 18466, 18467, 18468, 18469, 18470, 18471, 18472, 18473, 18474, 18475, 18476, 18477, 18478, 18479, 18480, 18481, 18482, 18483, 18484, 18485, 18486) c6(18487, 18488, 18489, 18490) c7(bM, A, F, iU, axW, jx, If, oW, dV, h, cr, gA, eZ, IQ, Pk, bt, y, hX); #c1(CCL4) c2(NP_002975) c3(C—C motif chemokine 4 precursor) c4(134108, 134109, 134110, 134111, 134112, 134113, 134114) c5(134115, 134116, 134117, 134118, 134119, 134120, 134121, 134122, 134123, 134124, 134125, 134126) c6( ) c7(bL, bM, T, dD, Dw, Ke, ea, fG, Lx, al, hE, jx, fd, jh, gA, j, ci, C, bX, eq, pz, a mW, kL, LH, zn, hX, F, xy, ds, dV, kH, aT, h, Ds, K, aDC, IQ, aj K, ZN, af, eu, yF, d, je, s, aW, aCH, mQ, hl, cr, aq, iV, f, KM, dr, ck, gk, iM, ac, iQ, ig, hc, If, cj, wR, fD, be, ei, Pk, bt, B, y); #c1(CCL4L1) c2(NP_996890) c3(C—C motif chemokine 4-like precursor) c4(264826) c5(264827, 264828, 264829, 264830, 264831, 264832, 264833, 264834, 264835, 264836, 264837, 264838, 264839, 264840, 264841, 264842, 264843, 264844, 264845, 264846, 264847, 264848, 264849, 264850, 264851, 264852, 264853) c6(264854, 264855, 264856) c7(bL, T, dD, Ke, ea, al, jx, jh, BH, gA, v, eq, C, bX, kL, LH, zn, hX, F, xy, ds, dV, kH, aT, h, K, aDC, ZN, yF, d, je, s, aW, aCH, hl, cr, aq, iV, f, KM, dr, ck, gk, iM, ac, If, cj, wR, ME, be, ei, hE, bt, cB, B, y); #c1(CCL4L2) c2(NP_001278397) c3(C—C motif chemokine 4-like isoform 1 precursor) c4( ) c5(109667) c6( ) c7(bL, T, dD, Ke, ea, al, jx, jh, gA, eq, C, bX, kL, LH, zn, hX, F, xy, ds, dV, kH, aT, h, K, aDC, ZN, yF, d, je, s, aW, aCH, hl, cr, aq, iV, f, KM, dr, ck, gk, iM, ac, If, cj, wR, be, ei, hE, bt, B, y); #c1(CCL4L2) c2(NP_001278400) c3(C—C motif chemokine 4-like isoform 3 precursor) c4(109668) c5(109669, 109670, 109671, 109672, 109673, 109674, 109675, 109676) c6(109677, 109678) c7(bL, T, dD, Ke, ea, al, jx, jh, gA, eq, C, bX, kL, LH, zn, hX, F, xy, ds, dV, kH, aT, h, K, aDC, ZN, yF, d, je, s, aW, aCH, hl, cr, aq, iV, f, KM, dr, ck, gk, iM, ac, If, cj, wR, be, ei, hE, bt, B, y); #c1(CCL4L2) c2(NP_001278402) c3(C—C motif chemokine 4-like isoform 5 precursor) c4(109679) c5(109680, 109681, 109682, 109683, 109684, 109685) c6( ) c7(bL, T, dD, Ke, ea, al, jx, jh, gA, eq, C, bX, kL, LH, zn, hX, F, xy, ds, dV, kH, aT, h, K, aDC, ZN, yF, d, je, s, aW, aCH, hl, cr, aq, iV, f, KM, dr, ck, gk, iM, ac, If, cj, wR, be, ei, hE, bt, B, y); #c1(CCL4L2) c2(NP_001278403) c3(C—C motif chemokine 4-like isoform 6 precursor) c4(109686, 109687) c5(109688, 109689, 109690, 109691, 109692, 109693, 109694, 109695, 109696, 109697, 109698, 109699, 109700) c6(109701) c7(bL, T, dD, Ke, ea, al, jx, jh, gA, eq, C, bX, kL, LH, zn, hX, F, xy, ds, dV, kH, aT, h, K, aDC, ZN, yF, d, je, s, aW, aCH, hl, cr, aq, iV, f, KM, dr, ck, gk, iM, ac, If, cj, wR, be, ei, hE, bt, B, y); #c1(CCL5) c2(NP_001265665) c3(C—C motif chemokine 5 isoform 2 precursor) c4( ) c5(99188, 99189) c6( ) c7(oO, bM, T, lD, fR, ea, atj, e, al, fd, bB, cL, bh, aY, fw, sD, a mW, aR, wa, xy, aE, rw, bW, dV, Ds, K, dD, hH, be, aa, ly, eG, aiV, aW, az, hl, mQ, aDn, hN, aB, zC, Ku, g, as, ve, axp, uC, eE, y, fT, aDD, aiM, dW, Dt, Dv, aDM, fy, aDi, qR, iu, dD, My, aw, n, aDI, aj, fr, pM, qW, ai, eW, aDF, zw, ec, wG, ju, cU, lG, h, dL, ey, eV, aDp, Nr, A, sp, fe, aq, po, cM, lx, ar, If, JM, at, eo, fL, aDE, gg, Pr, B, bL, Dw, dA, eR, aDK, fG, jx, eX, YN, aA, rf, hz, v, j, eK, C, bX, aaV, aDO, V, g, J, o, eA, aCY, apJ, Nw, qp, afQ, aT, Oi, jj, an, ae, af, hM, Uf, s, xR, oV, Y, fO, apK, r, Io, aDL, en, bu, pb, Cv, cT, OW, ac, iQ, ig, hc, aDG, AH, MB, wq, mf, dy, Gg, fD, Da, bt, Kd, aCA, Ke, qb, aD, dM, df, iW, jh, vr, dG, eq, jE, Fb, ad, wD, hX, dP, fU, av, F, ds, aCJ, oW, Os, hD, vB, jo, Od, adx, yF, sj, uQ, d, cH, ff, wc, cr, eZ, aF, hp, uF, iV, bz, aDH, DF, aDw, Nq, D, gk, aDN, es, zr, axs, hE, atM, eU, z, X, aDJ, ME, agl, ei, oQ, lG, gq, hv); #c1(CCL5) c2(NP_002976) c3(C—C motif chemokine 5 isoform 1 precursor) c4(134127, 134128) c5(134129, 134130, 134131, 134132, 134133, 134134, 134135, 134136, 134137, 134138) c6(134139, 134140) c7(oO, bM, T, ID, fR, ea, atj, e, al, fd, bB, cL, bh, aY, fw, sD, amW, aR, wa, xy, aE, rw, bW, dV, Ds, K, dQ, hH, be, aa, ly, eG, aiV, aW, az, hl, mQ, aDn, hN, aB, zC, Ku, g, as, ve, axp, uC, eE, y, fT, aDD, aiM, dW, Dt, Dv, aDM, fy, aDi, qR, iu, dD, My, aw, n, aDI, aj, fr, pM, qW, ai, eW, aDF, zw, ec, wG, ju, cU, lG, h, dL, ey, eV, aDp, Nr, A, sp, fe, aq, po, cM, lx, ar, If, JM, at, eo, fL, aDE, gg, Pr, B, bL, Dw, dA, eR, aDK, fG, jx, eX, YN, aA, rf, hz, v, j, eK, C, bX, aaV, aDO, V, g, J, o, eA, aCY, apJ, Nw, qp, afQ, aT, Oi, jj, an, ae, af, hM, Uf, s, xR, oV, Y, fO, apK, r, Io, aDL, en, bu, pb, Cv, cT, OW, ac, iU, ig, hc, aDG, AH, MB, wq, mf, dy, Gg, fD, Da, bt, Kd, aCA, Ke, qb, aD, dM, df, iW, jh, vr, dG, eq, jE, Fb, ad, wD, hX, dP, fU, av, F, ds, aCJ, oW, Os, hD, vB, jo, Dd, adx, yF, sj, uQ, d, cH, ff, wc, cr, eZ, aF, hp, uF, iV, bz, aDH, DF, aDw, Nq, D, gk, aDN, es, zr, axs, hE, atM, eU, z, X, aDJ, ME, agl, ei, oQ, lG, gq, hv); #c1(CCL7) c2(NP_006264) c3(C—C motif chemokine 7 precursor) c4(163404, 163405) c5(163406, 163407, 163408, 163409, 163410, 163411, 163412, 163413, 163414, 163415, 163416, 163417, 163418, 163419, 163420, 163421) c6( ) c7(bM, T, NK, Dw, wi, bB, fr, V, ai, eA, wa, aE, h, Ds, jj, uD, rz, ff, mQ, fQ, fe, en, aDP, hJ, t, cm, pb, LB, bE, hc, Ny, ajd, va, fD, y, X); #c1(CCL8) c2(NP_005614) c3(C—C motif chemokine 8 precursor) c4(157949, 157950) c5(157951, 157952, 157953, 157954, 157955, 157956, 157957, 157958, 157959, 157960, 157961, 157962, 157963) c6( ) c7(bM, Dw, fR, sQ, iW, eX, CH, ol, v, V, q, ai, eA, ady, F, WY, ds, h, eV, Ds, IQ, af, CB, ff, mQ, eZ, r, yy, aaE, en, iV, eE, t, aDQ, eM, Jp, AH, uo, ut, aDR, m, fD, hh, y); #c1(CCM2) c2(NP_001025006) c3(malcavernin isoform 1) c4(29180, 29181) c5(29182, 29183, 29184, 29185, 29186, 29187, 29188, 29189, 29190, 29191, 29192) c6( ) c7(bL, jf, y, d, nO, dB, Ot, aDT, cj, aT, cL, v, cm, o, ae, aDS, ad); #c1(CCM2) c2(NP_001161406) c3(malcavernin isoform 3) c4(65757) c5(65758, 65759, 65760, 65761, 65762, 65763) c6( ) c7(bL, jf, y, d, nO, dB, Ot, aDT, cj, aT, cL, v, cm, o, ae, aDS, ad); #c1(CCM2) c2(NP_001161407) c3(malcavernin isoform 4) c4(65764) c5(65765, 65766, 65767, 65768, 65769, 65770, 65771, 65772, 65773, 65774, 65775, 65776) c6( ) c7(bL, jf, y, d, nO, dB, Ot, aDT, cj, aT, cL, v, cm, o, ae, aDS, ad); #c1(CCM2) c2(NP_113631) c3(malcavernin isoform 2) c4(221824) c5(221825, 221826, 221827, 221828, 221829, 221830) c6( ) c7(bL, jf, y, d, nO, dB, Ot, aDT, cj, aT, cL, v, cm, o, ae, aDS, ad); #c1(CCM2) c2(XP_011513864) c3(malcavernin isoform X2) c4(306280) c5( ) c6( ) c7(bL, jf, y, d, nO, dB, Ot, aDT, cj, aT, cL, v, cm, o, ae, aDS, ad); #c1(CCNA1) c2(NP_001104515) c3(cyclin-A1 isoform b) c4(42153) c5(42154, 42155, 42156, 42157, 42158, 42159, 42160) c6( ) c7(T, gU, if, al, n, oY, fr, ci, qN, UI, q, ad, x, pp, aoA, aT, vH, h, dL, ae, eL, iU, aW, Lf, ff, r, en, bu, t, iK, bz, Zj, ck, gk, gn, k, bt, B); #c1(CCNA1) c2(NP_003905) c3(cyclin-A1 isoform a) c4(142043) c5(142044, 142045, 142046, 142047, 142048, 142049, 142050) c6( ) c7(T, gU, if, al, n, oY, fr, ci, qN, UI, g, ad, x, pp, aoA, aT, vH, h, dL, ae, eL, iU, aW, Lf, ff, r, en, bu, t, iK, bz, Zj, ck, gk, gn, k, bt, B); #c1(CCNA1) c2(XP_011533599) c3(cyclin-A1 isoform X1) c4(329702) c5(329703, 329704, 329705, 329706, 329707, 329708, 329709, 329710) c6( ) c7(T, gU, if, al, n, oY, fr, ci, qN, UI, g, ad, x, pp, aoA, aT, vH, h, dL, ae, eL, iU, aW, Lf, ff, r, en, bu, t, iK, bz, Zj, ck, gk, gn, k, bt, B); #c1(CCNA2) c2(NP_001228) c3(cyclin-A2) c4(83995) c5(83996, 83997, 83998, 83999, 84000, 84001) c6( ) c7(gh, T, dD, id, ea, aA, fd, wV, eq, ci, nA, C, bX, fr, eW, ad, er, hX, dP, afb, cc, zw, aT, cy, dL, K, jj, vx, aDU, ae, Lg, lR, aW, ev, aDV, eH, LZ, aq, vt, aF, g, cl, eF, t, iR, LB, ck, kT, sS, It, eM, eD, Il, gZ, at, np, m, k, zu, bt, B, y); #c1(CCNB1) c2(NP_114172) c3(G2/mitotic-specific cyclin-BI) c4(222475, 222476, 222477) c5(222478, 222479, 222480, 222481, 222482, 222483, 222484, 222485, 222486, 222487, 222488, 222489, 222490, 222491, 222492, 222493, 222494, 222495) c6( ) c7(T, fM, jp, aZ, if, aA, bB, n, fd, BF, ci, qN, fr, g, ad, eA, dP, jz, kH, aT, lG, ey, K, bq, hu, fb, aDW, ae, nJ, Lg, jf, kl, d, je, s, qt, aW, ff, eH, r, aq, aF, en, afs, cl, t, eF, bz, KM, iR, ck, bF, kT, iM, bP, eM, dB, bE, hL, m, bt, it, B); #c1(CCNB2) c2(NP_004692) c3(G2/mitotic-specific cyclin-B2) c4(148851) c5(148852, 148853, 148854, 148855, 148856, 148857) c6( ) c7(av, yo, iu, s, eM, qt, aW, ff, aT, hR, aF, ey, ci, en, mo, g, t, bz, eA); #c1(CCNB3) c2(NP_391990) c3(G2/mitotic-specific cyclin-B3 isoform 1) c4(229052) c5(229053, 229054, 229055, 229056, 229057, 229058, 229059, 229060, 229061, 229062, 229063, 229064, 229065, 229066, 229067, 229068, 229069, 229070, 229071, 229072, 229073, 229074) c6( ) c7(aiG, T, eF, dx); #c1(CCNB3) c2(XP_011529134) c3(G2/mitetic-specific cyclin-B3 isoform X1) c4(324458, 324459) c5(324460, 324461, 324462, 324463, 324464, 324465, 324466, 324467, 324468, 324469, 324470, 324471, 324472, 324473, 324474, 324475, 324476, 324477, 324478, 324479, 324480, 324481) c6( ) c7(aiG, T, eF, dx); #c1(CCNB3) c2(XP_011529135) c3(G2/mitotic-specific cyclin-B3 isoform X3) c4( ) c5(324482, 324483, 324484, 324485, 324486, 324487) c6( ) c7(aiG, T, eF, dx); #c1(CCNC) c2(NP_001013417) c3(cyclin-C isoform b) c4( ) c5(25519, 25520, 25521, 25522, 25523, 25524, 25525, 25526, 25527, 25528, 25529, 25530, 25531) c6( ) c7(x, T, af, bE, Y, vA, ev, eH, bB, ey, fr, eF, B); #c1(CCNC) c2(NP_005181) c3(cyclin-C isoform a) c4(153673, 153674, 153675) c5(153676, 153677, 153678, 153679, 153680, 153681, 153682, 153683) c6( ) c7(x, T, af, bE, Y, vA, ev, eH, bB, ey, fr, eF, B); #c1(CCNC) c2(XP_006715657) c3(cyclin-C isoform X1) c4( ) c5(289700) c6( ) c7(x, T, af, bE, Y, vA, ev, eH, bB, ey, fr, eF, B); #c1(CCNC) c2(XP_011534534) c3(cyclin-C isoform X2) c4(331052) c5(331053, 331054, 331055, 331056, 331057, 331058) c6( ) c7(x, T, af, bE, Y, vA, ev, eH, bB, ey, fr, eF, B); #c1(CCND1) c2(NP_444284) c3(G1/S-specific cyclin-D1) c4(230303) c5(230304, 230305, 230306, 230307, 230308, 230309, 230310, 230311, 230312, 230313, 230314, 230315) c6( ) c7(Fv, gh, G, T, bM, aC, Tb, aEn, pf, if, al, aEf, fd, bB, aeu, ci, auu, aEe, ip, x, Vp, afr, aE, nG, axy, dE, aEg, aoL, pX, SV, aoK, Qk, ja, iT, K, aDZ, hu, pk, dF, eL, Zm, hm, Qe, eG, yo, zQ, iE, JI, aW, aEl, Ls, az, fc, LZ, Qm, aB, g, as, eF, cm, bw, Qx, fT, aDX, nB, avZ, nF, AM, go, vA, Gs, eM, cj, PV, iS, cX, azg, k, m, gn, Th, Le, YS, iu, cE, aEj, IT, sw, zt, Or, ht, aDT, NT, qy, iB, n, awr, aw, fr, qN, zP, BI, ft, jz, hw, Yc, pe, Nn, gd, kH, h, lG, jy, hn, dL, aEn, eV, pi, dx, ape, aoX, PX, aAH, AQ, ge, alt, aq, fe, kp, yq, Og, me, Ca, XT, op, Ld, hq, Ye, iO, WA, ok, YE, bP, GU, dB, hk, anZ, PL eD, Qu, hL, Vy, gw, hR, at, YH, nz, aEc, it, B, cn, L, fM, AS, eR, jp, yk, eX, aA, hy, v, j, aoN, Qo, aEb, AO, pd, q, eA, qH, zn, eJ, aeZ, XX, Rl, lg, hW, nv, LW, qK, aT, gz, ae, aqC, jf, s, vT, iU, oV, Y, ev, aEk, xR, r, eS, en, aom, aDY, t, hf, ho, aoy, f, cl, iK, Cv, ov, ck, sS, rR, Dy, nM, iM, aEp, QG, au, RW, wR, aor, zu, bt, rA, VB, hS, iW, Gl, hl, kh, aEd, id, pY, Mb, aEa, Dd, aEh, aZ, aD, YM, rQ, vG, oR, OE, dG, ah, Gn, jh, adg, OH, iJ, ad, afb, hX, Jm, dP, aEi, hd, fX, aop, ib, Db, oz, av, py, qh, hP, Od, yh, fb, iL, aAL, iA, d, lx, BO, aus, qt, je, ff, eH, Of, cr, aeV, Ej, aoW, aF, anW, gW, aEm, HI, KM, bz, iR, YR, iV, LB, es, gk, eU, RV, pc, amS, bF, bE, auZ, X, cP, bC, ei, y, aed, kS, ne, Ex); #c1(CCND1) c2(XP_006718716) c3(G1/S-specific cyclin-D1 isoform X1) c4(291993) c5( ) c6( ) c7(Fv, gh, G, T, bM, aC, Tb, aEn, pf, if, al, aEf, fd, bB, aeu, ci, auu, aEe, ip, x, Vp, afr, aE, oG, axy, dE, aEg, aoL, pX, SV, aoK, Qk, ja, iT, K, aDZ, hu, pk, dF, eL, Zm, hm, Qe, eG, yo, zQ, iE, JI, aW, aEl, Ls, az, fc, LZ, Qm, aB, g, as, eF, cm, bw, Qx, fT, aDX, nB, avZ, nF, AM, go, vA, Gs, eM, cj, PV, iS, cX, azg, k, m, gn, Th, Le, YS, iu, cE, aEj, IT, sw, zt, Or, ht, aDT, NT, qy, iB, n, awr, aw, fr, qN, zP, BI, ft, jz, hw, Yc, pe, Nn, gd, kH, h, lG, jy, hn, dL, aEn, eV, pi, dx, ape, aoX, PX, aAH, AQ, ge, alt, aq, fe, kp, yq, Og, me, Ca, XT, op, Ld, hq, Ye, iO, WA, ok, YE, bP, GU, dB, hk, anZ, PI, eD, Qu, hL, Vy, gw, hR, at, YH, nz, aEc, it, B, cn, L, fM, AS, eR, jp, yk, eX, aA, hy, v, j, aoN, Qo, aEb, AO, pd, q, eA, qH, zn, eJ, aeZ, XX, Rl, Ig, hW, nv, LW, qK, aT, gz, ae, aqC, jf, s, vT, iU, oV, Y, ev, aEk, xR, r, eS, en, aom, aDY, t, hf, ho, aoy, f, cl, iK, Cv, ov, ck, sS, rR, Dy, nM, iM, aEp, QG, au, RW, wR, aor, zu, bt, rA, VB, hS, iW, GL hi, kh, aEd, id, pY, Mb, aEa, Dd, aEh, aZ, aD, YM, rQ, vG, oR, OE, dG, ah, Gn, jh, adg, OH, iJ, ad, afb, hX, Jm, dP, aEi, hd, fX, aop, ib, Db, oz, av, py, qh, hP, Dd, yh, fb, iL, aAL, iA, d, lx, BO, aus, qt, je, ff, eH, Of, cr, aeV, Ej, aoW, aF, anW, gW, aEm, HL KM, bz, iR, YR, iV, LB, es, gk, eU, RV, pc, amS, bF, bE, auZ, X, cP, bC, ei, y, aed, kS, ne, Ex); #c1(CCND2) c2(NP_001750) c3(G1/S-specific cyclin-D2) c4(120741) c5(120742, 120743, 120744, 120745, 120746, 120747) c6( ) c7(bL, T, id, dA, qy, aA, fd, n, jh, j, ci, uE, g, ad, er, hX, eA, bv, BI, ft, hd, eJ, aE, av, pe, mj, cE, BJ, kH, aT, x, hn, Od, nJ, ae, jf, PM, B, iU, vT, aW, ff, Of, iw, r, nY, aq, Og, kp, aF, en, hf, dw, t, zE, hu, g, cm, Ld, iP, ck, qJ, eM, nB, dB, eD, cj, aor, m, k, MG, bt, X, hS); #c1(CCND3) c2(NP_001129489) c3(G1/S-specific cyclin-D3 isoform 1) c4(51608, 51609, 51610) c5(51611, 51612, 51613, 51614, 51615, 51616, 51617, 51618, 51619, 51620, 51621, 51622, 51623, 51624) c6( ) c7(T, fM, jh, fd, n, fr, ci, Ea, zP, g, ad, eA, hd, cq, aE, QJ, aT, dL, bq, pk, fb, ae, af, dx, eL, d, s, aW, Y, ff, az, r, Ej, kp, en, cl, g, t, bw, bz, fq, ck, bP, awC, nB, hL, at, bt, B); #c1(CCND3) c2(NP_001129597) c3(G1/S-specific cyclin-D3 isoform 3) c4(51968) c5(51969, 51970, 51971, 51972, 51973, 51974, 51975) c6( ) c7(T, fM, jh, fd, n, fr, ci, Ea, zP, g, ad, eA, hd, cq, aE, QJ, aT, dL, bq, pk, fb, ae, af, dx, eL, d, s, aW, Y, ff, az, r, Ej, kp, en, cl, g, t, bw, bz, fq, ck, bP, awC, nB, hL, at, bt, B); #c1(CCND3) c2(NP_001274356) c3(G1/S-specific cyclin-D3 isoform 5) c4(106257, 106258) c5(106259, 106260, 106261, 106262, 106263, 106264, 106265, 106266, 106267, 106268) c6( ) c7(T, fM, jh, fd, n, fr, ci, Ea, zP, g, ad, eA, hd, cq, aE, QJ, aT, dL, bq, pk, fb, ae, af, dx, eL, d, s, aW, Y, ff, az, r, Ej, kp, en, cl, g, t, bw, bz, fq, ck, bP, awC, nB, hL, at, bt, B); #c1(CCND3) c2(NP_001274363) c3(G1/S-specific cyclin-D3 isoform 4) c4( ) c5(106276, 106277, 106278, 106279, 106280, 106281, 106282, 106283, 106284) c6( ) c7(T, fM, jh, fd, n, fr, ci, Ea, zP, g, ad, eA, hd, cq, aE, QJ, aT, dL, bq, pk, fb, ae, af, dx, eL, d, s, aW, Y, ff, az, r, Ej, kp, en, cl, g, t, bw, bz, fq, ck, bP, awC, nB, hL, at, bt, B); #c1(CCND3) c2(NP_001751) c3(G1/S-specific cyclin-D3 isoform 2) c4(120748) c5(120749, 120750, 120751, 120752, 120753, 120754) c6( ) c7(T, fM, jh, fd, n, fr, ci, Ea, zP, g, ad, eA, hd, cq, aE, QJ, aT, dL, bq, pk, fb, ae, af, dx, eL, d, s, aW, Y, ff, az, r, Ej, kp, en, cl, g, t, bw, bz, fq, ck, bP, awC, nB, hL, at, bt, B); #c1(CCND3) c2(XP_011513274) c3(G1/S-specific cyclin-D3 isoform X2) c4( ) c5(305546, 305547, 305548, 305549, 305550) c6( ) c7(T, fM, jh, fd, n, fr, ci, Ea, zP, q, ad, eA, hd, cq, aE, QJ, aT, dL, bq, pk, fb, ae, af, dx, eL, d, s, aW, Y, ff, az, r, Ej, kp, en, cl, g, t, bw, bz, fq, ck, bP, awC, nB, hL, at, bt, B); #c1(CCNDBP1) c2(NP_036274) c3(cyclin-D1-binding protein 1) c4(172802, 172803, 172804) c5(172805, 172806, 172807, 172808, 172809, 172810, 172811, 172812, 172813, 172814, 172815, 172816, 172817, 172818, 172819, 172820, 172821, 172822) c6( ) c7(B, bP, s, jp, bE, aT, bB, aq, ci, bz, X); #c1(CCNE1) c2(NP_001229) c3(G1/S-specific cyclin-E1) c4(85756, 85757, 85758) c5( ) c6( ) c7(T, aC, jh, cz, fd, n, ci, zP, eA, pX, aT, lG, dL, K, eL, jf, xQ, d, B, aW, ff, eH, fe, aEq, en, cl, g, t, cM, eF, cm, ck, ac, nB, m, avr, X); #c1(CCNE1) c2(XP_006723520) c3(G1/S-specific cyclin-E1 isoform X2) c4( ) c5(295223, 295224, 295225, 295226, 295227) c6( ) c7(T, aC, jh, cz, fd, n, ci, zP, eA, pX, aT, lG, dL, K, eL, jf, xQ, d, B, aW, ff, eH, fe, aEq, en, cl, g, t, cM, eF, cm, ck, ac, nB, m, avr, X); #c1(CCNE2) c2(NP_477097) c3(G1/S-specific cyclin-E2) c4(230743, 230744, 230745) c5(230746, 230747, 230748, 230749, 230750, 230751, 230752, 230753, 230754, 230755, 230756, 230757, 230758) c6( ) c7(ck, dP, T, kl, Dh, aW, bE, aT, bB, Io, m, t, bt, ae, ad); #c1(CCNE2) c2(XP_011515667) c3(G1/S-specific cyclin-E2 isoform X1) c4( ) c5(308514, 308515, 308516, 308517, 308518, 308519, 308520, 308521, 308522) c6( ) c7(ck, dP, T, kl, Dh, aW, bE, aT, bB, In, m, t, bt, ae, ad); #c1(CCNF) c2(NP_001752) c3(cyclin-F) c4(120755, 120756) c5(120757, 120758, 120759, 120760, 120761, 120762, 120763, 120764, 120765, 120766, 120767, 120768) c6( ) c7(aW, T, aT); #c1(CCNG1) c2(NP_954854) c3(cyclin-G1) c4(261368, 261369, 261370, 261371, 261372, 261373) c5(261374, 261375, 261376, 261377, 261378, 261379, 261380, 261381, 261382, 261383, 261384, 261385, 261386, 261387, 261388, 261389, 261390, 261391, 261392, 261393, 261394, 261395, 261396, 261397, 261398, 261399, 261400, 261401, 261402, 261403, 261404, 261405, 261406) c6( ) c7(ck, av, T, vA, eH, Az, Xg, lG, n, aq, np, ci, cl, eF, t, B, op, hX); #c1(CCNG1) c2(XP_011532987) c3(cyclin-G1 isoform X1) c4( ) c5(329216, 329217, 329218, 329219, 329220, 329221, 329222, 329223, 329224, 329225, 329226, 329227, 329228, 329229) c6( ) c7(ck, av, T, vA, eH, Az, Xg, lG, n, aq, np, ci, cl, eF, t, B, op, hX); #c1(CCNG2) c2(XP_011530701) c3(cyclin-G2 isoform X1) c4(326774, 326775, 326776) c5(326777, 326778, 326779, 326780, 326781, 326782, 326783, 326784, 326785, 326786, 326787, 326788, 326789, 326790, 326791, 326792, 326793, 326794, 326795, 326796, 326797, 326798, 326799, 326800, 326801, 326802) c6( ) c7(es, T, cF, d, iA, aW, ht, mg, aT, cm, fd, fr, m, hu, t, eA, y); #c1(CCNH) c2(NP_001186118) c3(cyclin-H isoform 2) c4(77184) c5(77185, 77186, 77187, 77188, 77189) c6( ) c7(bL, T, fM, eR, bB, ci, zP, V, eA, ip, av, Qk, aT, dL, fb, eL, zQ, ff, Pg, nY, vs, en, bz, fq, eK, bJ, ck, bE, eM, dB, bE, cj, at, bC, bD, bt); #c1(CCNH) c2(NP_001230) c3(cyclin-H isoform 1) c4( ) c5( ) c6( ) c7(bL, T, fM, eR, bB, ci, zP, V, eA, ip, av, Qk, aT, dL, fb, eL, zQ, ff, Pg, nY, vs, en, bz, fq, eK, bJ, ck, bE, eM, dB, bE, cj, at, bC, bD, bt); #c1(CCNH) c2(XP_005248686) c3(cyclin-H isoform X3) c4(268512) c5(268513, 268514, 268515, 268516, 268517, 268518) c6( ) c7(bL, T, fM, eR, bB, ci, zP, V, eA, ip, av, Qk, aT, dL, fb, eL, zQ, ff, Pg, nY, vs, en, bz, fq, eK, bJ, ck, bE, eM, dB, bE, cj, at, bC, bD, bt); #c1(CCNI) c2(NP_006826) c3(cyclin-I) c4(168460, 168461, 168462, 168463) c5(168464, 168465, 168466, 168467, 168468, 168469, 168470, 168471, 168472, 168473, 168474, 168475, 168476, 168477, 168478, 168479, 168480, 168481) c6( ) c7(eF, kl, aT, ci, eH); #c1(CCNI) c2(XP_011529857) c3(cyclin-I isoform X1) c4( ) c5(325640, 325641, 325642, 325643, 325644, 325645) c6( ) c7(eF, kl, af, ci, eH); #c1(CCNJ) c2(NP_001127847) c3(cyclin-J isoform 1) c4(49374) c5(49375, 49376, 49377, 49378, 49379, 49380) c6( ) c7(aW, aT); #c1(CCNJ) c2(NP_001127848) c3(cyclin-J isoform 3) c4(49381) c5(49382, 49383, 49384, 49385, 49386, 49387) c6( ) c7(aW, aT); #c1(CCNJ) c2(NP_061957) c3(cyclin-J isoform 2) c4(201300) c5(201301, 201302, 201303, 201304, 201305, 201306, 201307, 201308, 201309, 201310) c6( ) c7(aW, aT); #c1(CCNJL) c2(NP_078841) c3(cyclin-J-like protein) c4(215668) c5(215669, 215670, 215671, 215672, 215673, 215674) c6( ) c7(cd); #c1(CCNJL) c2(XP_011532950) c3(cyclin-J-like protein isoform X5) c4(329113) c5(329114, 329115, 329116, 329117, 329118, 329119) c6( ) c7(cd); #c1(CCNK) c2(XP_011535577) c3(cyclin-K isoform X1) c4(332719, 332720, 332721, 332722, 332723, 332724) c5(332725, 332726, 332727, 332728, 332729, 332730, 332731, 332732, 332733, 332734, 332735, 332736, 332737, 332738, 332739, 332740, 332741, 332742, 332743, 332744, 332745, 332746, 332747, 332748, 332749, 332750, 332751, 332752, 332753, 332754, 332755, 332756, 332757, 332758, 332759, 332760, 332761, 332762, 332763) c6( ) c7(fd); #c1(CCNL1) c2(NP_064703) c3(cyclin-L1) c4(203480, 203481) c5(203482, 203483, 203484, 203485, 203486, 203487) c6( ) c7(bL, ff, aql, ey, ci, K, en, iK); #c1(CCNL1) c2(XP_005247707) c3(cyclin-L1 isoform X5) c4( ) c5(267946) c6( ) c7(bL, ff, aql, ey, ci, K, en, iK); #c1(CCNL1) c2(XP_005247708) c3(cyclin-L1 isoform X6) c4( ) c5(267947, 267948, 267949, 267950, 267951, 267952) c6( ) c7(bL, ff, aql, ey, ci, K, en, iK); #c1(CCNL2) c2(XP_011540521) c3(cyclin-L2 isoform X6) c4( ) c5(338989) c6( ) c7(B); #c1(CCNL2) c2(XP_011540523) c3(cyclin-L2 isoform X7) c4(338990) c5(338991, 338992, 338993, 338994, 338995) c6( ) c7(B); #c1(CCNO) c2(NP_066970) c3(cyclin-O) c4(207885) c5(207886, 207887, 207888, 207889, 207890, 207891) c6( ) c7(Oe, T, d, dB, zb, ap, aT, h, gA, zA, aa); #c1(CCNT1) c2(NP_001231) c3(cyclin-T1 isoform a) c4(87759) c5( ) c6( ) c7(cc, fM, ds, jh, h, as, bq, cm); #c1(CCNY) c2(NP_001269781) c3(cyclin-Y isoform 3) c4(102752) c5(102753, 102754, 102755, 102756, 102757, 102758) c6( ) c7(T, iV, A, eM, ff, ge, fe, en, an, g, bz, af); #c1(CCNY) c2(NP_001269783) c3(cyclin-Y isoform 5) c4( ) c5(102759, 102760, 102761, 102762, 102763, 102764) c6( ) c7(T, iV, A, eM, ff, ge, fe, en, an, g, bz, af); #c1(CCNY) c2(NP_659449) c3(cyclin-Y isoform 1) c4(239965) c5(239966, 239967, 239968, 239969, 239970, 239971, 239972, 239973, 239974, 239975, 239976, 239977) c6( ) c7(T, iV, A, eM, ff, ge, fe, en, an, g, bz, af); #c1(CCNY) c2(XP_006717455) c3(cyclin-Y isoform X3) c4(291145, 291146) c5( ) c6( ) c7(T, iV, A, eM, ff, ge, fe, en, an, g, bz, af); #c1(CCNY) c2(XP_011517670) c3(cyclin-Y isoform X1) c4( ) c5(311500, 311501, 311502, 311503, 311504, 311505, 311506, 311507) c6( ) c7(T, iV, A, eM, ff, ge, fe, en, an, g, bz, af); #c1(CCP110) c2(NP_055526) c3(centriolar coiled-coil protein of 110 kDa isoform 2) c4(181755) c5(181756, 181757, 181758, 181759, 181760, 181761, 181762, 181763, 181764, 181765) c6( ) c7(dz, et); #c1(CCP110) c2(XP_011544294) c3(centriolar coiled-coil protein of 110 kDa isoform X1) c4(343446) c5(343447, 343448, 343449, 343450, 343451, 343452) c6( ) c7(dz, et); #c1(CCR1) c2(NP_001286) c3(C—C chemokine receptor type 1) c4(112413) c5(112414, 112415, 112416, 112417, 112418, 112419) c6( ) c7(bL, bM, T, Dw, lD, dA, fR, aiK, eR, fd, bB, fu, uE, V, mC, ad, dP, zw, F, afm, dV, cU, h, ey, ji, hH, nJ, ae, af, aa, ly, Nr, d, A, yx, fO, hl, mQ, eZ, ff, aq, po, hp, en, t, DF, lx, Nq, W, nb, axs, bE, z, AH, wR, Hb, m, yH, fL, zB, fD, B, y); #c1(CCR10) c2(NP_057686) c3(C—C chemokine receptor type 10) c4(192333) c5(192334, 192335, 192336, 192337, 192338, 192339) c6( ) c7(xS, xT, eU, iM, je, xR, xO, Y, f J, dN, h, IQ, cB, xP); #c1(CCR2) c2(NP_001116513) c3(C—C chemokine receptor type 2 isoform A) c4(43890) c5(43891, 43892, 43893, 43894, 43895, 43896, 43897, 43898, 43899, 43900) c6( ) c7(bM, T, ea, if, fd, gA, Vd, ur, mF, aY, aDI, wa, AW, xE, aCW, dY, aE, aEu, M, Ds, K, GO, dQ, dF, eL, eN, li, aW, mQ, hl, fc, aik, U, cj, m, hh, aDi, qR, de, Ht, dD, aw, cQ, aj, fr, qN, cd, zo, ai, eW, h, By, dL, ey, A, anP, sp, fJ, fe, vo, cM, kT, W, aCz, at, qF, cB, B, bL, Dw, eR, fG, jx, aA, cz, v, j, V, eA, J, ga, hb, nX, aCV, aT, ae, af, eu, aCC, oV, fO, en, t, awi, pb, DC, iU, ac, c, ig, dh, wR, cS, dy, fD, aEr, aEt, jh, vr, uu, fu, eq, ad, wD, dP, F, aEv, acu, Dq, ds, qh, Os, JK, uQ, d, cH, cW, ff, cr, eZ, aF, hp, Bu, bz, Hv, LB, Bv, nb, aEs, aS, cP, ei, If, y); #c1(CCR2) c2(NP_001116868) c3(C—C chemokine receptor type 2 isoform B) c4(44019, 44020) c5(44021, 44022, 44023, 44024, 44025, 44026, 44027, 44028, 44029, 44030, 44031, 44032) c6( ) c7(bM, T, ea, if, fd, gA, Vd, ur, mF, aY, aDI, wa, AW, xE, aCW, dY, aE, aEu, M, Ds, K, GO, dQ, dF, eL, eN, li, aW, mQ, hl, fc, aik, U, cj, m, hh, aDi, qR, de, Ht, dD, aw, cQ, aj, fr, qN, cd, zo, ai, eW, h, By, dL, ey, A, anP, sp, f J, fe, vo, cM, kT, W, aCz, at, qF, cB, B, bL, Dw, eR, fG, jx, aA, cz, v, j, V, eA, J, ga, hb, nX, aCV, aT, ae, af, eu, aCC, oV, fO, en, t, awi, pb, DC, iU, ac, c, ig, dh, wR, cS, dy, fD, aEr, aEt, jh, vr, uu, fu, eq, ad, wD, dP, F, aEv, acu, Dq, ds, qh, Os, JK, uQ, d, cH, cW, ff, cr, eZ, aF, hp, Bu, bz, Hv, LB, Bv, nb, aEs, aS, cP, ei, If, y); #c1(CCR3) c2(NP_001158152) c3(C—C chemokine receptor type 3 isoform 3) c4(63203) c5(63204, 63205, 63206, 63207, 63208) c6( ) c7(bM, T, kh, dD, Dw, Ke, akc, aDy, ea, fG, aw, eX, iW, cL, v, j, ci, eq, fr, F, hb, dV, h, eV, Ds, dL, JK, hH, eu, aa, Nr, A, je, sp, dN, po, Io, fe, hp, iV, eE, DF, Nq, TA, cT, y, iM, W, ac, aDu, aCT, z, Jp, dh, JM, at, aS, Tu, fD, If, bt, cB, aEw); #c1(CCR3) c2(NP_001828) c3(C—C chemokine receptor type 3 isoform 1) c4(121534, 121535) c5(121536, 121537, 121538, 121539, 121540, 121541, 121542, 121543, 121544, 121545, 121546, 121547, 121548, 121549, 121550, 121551, 121552, 121553, 121554) c6( ) c7(bM, T, kh, dD, Dw, Ke, akc, aDy, ea, fG, aw, eX, iW, cL, v, j, ci, eq, fr, F, hb, dV, h, eV, Ds, dL, JK, hH, eu, aa, Nr, A, je, sp, dN, po, Io, fe, hp, iV, eE, DF, Nq, TA, cT, y, iM, W, ac, aDu, aCT, z, Jp, dh, JM, at, aS, Tu, fD, If, bt, cB, aEw); #c1(CCR3) c2(NP_847898) c3(C—C chemokine receptor type 3 isoform 2) c4(253666) c5(253667, 253668, 253669, 253670, 253671, 253672, 253673, 253674, 253675, 253676, 253677, 253678) c6( ) c7(bM, T, kh, dD, Dw, Ke, akc, aDy, ea, fG, aw, eX, iW, cL, v, j, ci, eq, fr, F, hb, dV, h, eV, Ds, dL, JK, hH, eu, aa, Nr, A, je, sp, dN, po, Io, fe, hp, iV, eE, DF, Nq, TA, cT, y, iM, W, ac, aDu, aCT, z, Jp, dh, JM, at, aS, Tu, fD, If, bt, cB, aEw); #c1(CCR4) c2(NP_005499) c3(C—C chemokine receptor type 4) c4(156844) c5(156845, 156846, 156847, 156848, 156849, 156850) c6( ) c7(bM, fG, eX, jh, CH, cL, V, eA, aR, o, apJ, kH, aT, h, eV, vB, eu, Nr, B, A, xR, je, Y, cr, eZ, aEz, aq, po, hp, eE, aEx, DF, Nq, cT, eU, iM, Jr, vZ, hc, mx, i, y, aEy); #c1(CCR5) c2(NP_000570) c3(C—C chemokine receptor type 5) c4(12795, 12796) c5(12797, 12798, 12799, 12800, 12801, 12802, 12803, 12804, 12805, 12806, 12807, 12808, 12809, 12810, 12811, 12812, 12813, 12814, 12815, 12816) c6( ) c7(ID, bM, T, aC, fR, ea, if, e, al, fd, bB, cL, gA, qj, ci, aY, aR, aEl, aEQ, AW, dY, aE, Bc, rw, aEJ, dE, dV, Ds, azm, aaW, dQ, hH, eL, be, cp, aa, Ok, ly, aEV, zQ, aW, aEH, asD, hl, aDn, hN, vs, aoD, g, pL, ve, as, eE, cm, aEP, ha, eu, y, aDs, nB, dc, uy, aiM, hh, qR, iu, dD, aw, fN, n, cQ, qN, qW, cd, ai, eW, ke, cc, zw, gd, aEB, cU, h, dL, ey, eV, ux, aDp, aEL, afu, A, anP, sp, f J, lb, ge, fe, aq, CQ, kk, cM, lx, kT, aCz, dB, NL, hk, aES, bm, at, uz, aEG, eo, aDE, agy, gg, Pr, B, abW, aEG, vQ, bL, Dw, cB, dA, eR, oe, jx, eX, cz, hy, v, j, aDO, V, q, o, eA, eJ, ady, ga, aEE, jZ, aT, cy, aDt, sX, ae, af, eu, aEF, oV, aEM, aCH, fO, Y, bq, r, iy, Io, aER, iK, vk, ck, iQ, aEA, ac, ig, AH, fP, auT, wR, rK, yH, dy, bt, Kd, GI, kh, Ke, qb, uG, gN, aEK, vr, jh, aET, ah, jE, aDz, fu, EA, eq, ad, wD, LH, dP, hX, F, fX, od, aEv, oz, acu, ds, qh, hD, JK, vB, ji, uD, nJ, uQ, d, yx, cr, aEO, rM, Mf, hv, eZ, hp, aEW, Fq, iV, Hv, zr, axs, bE, atM, z, dO, uR, aED, aDg, aS, aEU, aEN, ei, If, ne, rk); #c1(CCR6) c2(NP_004358) c3(C—C chemokine receptor type 6) c4(145640) c5(145641, 145642, 145643, 145644, 145645, 145646, 145647, 145648, 145649, 145650, 145651, 145652, 145653, 145654) c6( ) c7(bM, T, aC, aAz, aD, jh, fd, v, qj, fu, Qp, g, ad, ai, eA, ip, av, iu, hd, aE, pN, aT, h, ey, ji, hH, ae, DA, je, xR, aW, mQ, hl, HA, r, cr, fe, vs, aF, yq, iV, eE, cm, bz, pb, fT, It, aDv, zr, nB, AM, hk, hc, DW, eM, iM, at, wR, fD, y, Pr, B); #c1(CCR7) c2(NP_001829) c3(C—C chemokine receptor type 7 precursor) c4(121555) c5(121556, 121557, 121558, 121559, 121560, 121561) c6( ) c7(ID, T, os, aC, fR, ea, fd, bB, cL, ci, Qp, x, aE, aEX, dV, K, hH, be, ly, JI, aW, aoo, g, bw, iP, It, eM, nB, iT, tV, cj, dW, k, m, iu, dD, JC, gp, fN, n, cd, hr, eW, BI, kH, h, eV, KV, A, MD, lb, pm, lx, Wt, ajd, cB, B, it, dA, eX, aA, v, j, V, pd, q, o, eA, aT, AJ, dz, jj, ae, iU, iZ, Y, Pg, r, en, cl, t, iK, pb, ck, nM, iM, oX, bt, iW, oA, bs, jh, oZ, eq, hF, ad, iC, av, hd, F, oW, pq, je, lx, ff, cr, eZ, aF, iV, bz, LB, eU, bE, eB, lC, kS, X); #c1(CCR8) c2(NP_005192) c3(C—C chemokine receptor type 8) c4(153798, 153799) c5(153800, 153801, 153802, 153803, 153804, 153805, 153806, 153807, 153808, 153809, 153810, 153811) c6( ) c7(dP, bM, JZ, fG, cj, h, vB, fD, eE, cB, DF); #c1(CCR9) c2(NP_001243298) c3(C—C chemokine receptor type 9 isoform B) c4(90386) c5(90387, 90388, 90389, 90390, 90391, 90392, 90393, 90394) c6( ) c7(bM, xN, T, dD, ea, iW, j, ew, ad, dP, x, aT, kH, gU, h, ae, xQ, je, iZ, aW, Y, mQ, eZ, hp, t, ck, iM, z, m, k, fD, y, cB); #c1(CCR9) c2(XP_011531614) c3(C—C chemokine receptor type 9 isoform X1) c4(327749) c5(327750, 327751, 327752, 327753, 327754, 327755, 327756, 327757) c6( ) c7(bM, xN, T, dD, ea, iW, j, eq, ad, dP, x, aT, kH, gU, h, ae, xQ, je, iZ, aW, Y, mQ, eZ, hp, t, ck, iM, z, m, k, fD, y, cB); #c1(CCRL2) c2(NP_001124382) c3(C—C chemokine receptor-like 2 isoform 2) c4(48741, 48742, 48743) c5(48744, 48745, 48746, 48747, 48748, 48749, 48750, 48751, 48752, 48753) c6( ) c7(bM, T, aD, e, NT, fd, v, fu, q, ad, ai, wD, av, iu, hd, cF, aE, h, ey, IQ, ji, hu, hH, ae, iM, iU, DA, aCr, je, aCq, xR, HA, hl, cr, r, fe, yq, hp, iV, eE, bz, pb, fT, yl, It, zr, Jr, nB, hk, hc, dO, AM, aDv, at, wR, Pk, Pr, B, y); #c1(CCRL2) c2(NP_003956) c3(C—C chemokine receptor-like 2 isoform 1) c4( ) c5(142428, 142429, 142430, 142431, 142432, 142433, 142434, 142435, 142436, 142437, 142438, 142439, 142440, 142441, 142442, 142443) c6( ) c7(bM, T, aD, e, NT, fd, v, fu, q, ad, ai, wD, av, iu, hd, cF, aE, h, ey, IQ, ji, hu, hH, ae, iM, iQ, DA, aCr, je, aCq, xR, HA, hl, cr, r, fe, yq, hp, iV, eE, bz, pb, fT, yl, It, zr, Jr, nB, hk, hc, dO, AM, aDv, at, wR, Pk, Pr, B, y); #c1(CCRN4L) c2(NP_036250) c3(nocturnin) c4(172634) c5(172635, 172636, 172637, 172638, 172639, 172640) c6( ) c7(bM, T, eX, CH, cL, v, V, q, aR, o, av, kH, h, eV, vB, Nr, A, je, xR, Y, fc, cr, r, aEz, eZ, po, eE, aEx OF, Nq, cT, eU, iM, Jr, vZ, hc, mx, pP, cP, i, y, aEy); #c1(CCS) c2(NP_005116) c3(copper chaperone for superoxide dismutase) c4(153024) c5(153025, 153026, 153027, 153028, 153029, 153030, 153031) c6( ) c7(eY, ac, c, Y, bW, aEY, r, acJ, PJ, q, aya, Qt); #c1(CCSER1) c2(NP_001138537) c3(serine-rich coiled-coil domain-containing protein 1 isoform 1) c4(56971, 56972) c5(56973, 56974, 56975, 56976, 56977, 56978, 56979, 56980, 56981, 56982) c6( ) c7(T, aE, oe, cu, Ea, sj); #c1(CCSER1) c2(NP_997374) c3(serine-rich coiled-coil domain-containing protein 1 isoform 2) c4(265473) c5(265474, 265475, 265476, 265477, 265478, 265479, 265480, 265481, 265482, 265483, 265484, 265485) c6( ) c7(T, aE, oe, cu, Ea, sj); #c1(CCT2) c2(NP_006422) c3(T-complex protein 1 subunit beta isoform 1) c4(164906, 164907) c5(164908, 164909, 164910, 164911, 164912, 164913, 164914, 164915, 164916, 164917, 164918, 164919) c6( ) c7(ac, bA); #c1(CCT3) c2(NP_001008800) c3(T-complex protein 1 subunit gamma isoform c) c4(23423, 23424) c5(23425, 23426, 23427, 23428, 23429, 23430, 23431, 23432, 23433, 23434, 23435, 23436) c6( ) c7(B, U, r, h, g, dr, dR); #c1(CCT3) c2(NP_005989) c3(T-complex protein 1 subunit gamma isoform a) c4(161018, 161019, 161020, 161021) c5(161022, 161023, 161024, 161025, 161026, 161027, 161028, 161029, 161030, 161031, 161032, 161033, 161034, 161035, 161036, 161037, 161038, 161039, 161040, 161041, 161042, 161043, 161044, 161045, 161046, 161047, 161048, 161049) c6( ) c7(B, U, r, h, g, dr, dR); #c1(CCT4) c2(NP_001243650) c3(T-complex protein 1 subunit delta isoform b) c4(91308) c5(91309, 91310, 91311, 91312, 91313, 91314, 91315, 91316, 91317, 91318, 91319, 91320) c6( ) c7(cm, Pt); #c1(CCT4) c2(NP_006421) c3(T-complex protein 1 subunit delta isoform a) c4(164891, 164892, 164893) c5(164894, 164895, 164896, 164897, 164898, 164899, 164900, 164901, 164902, 164903, 164904, 164905) c6( ) c7(cm, Pt); #c1(CCT5) c2(NP_036205) c3(T-complex protein 1 subunit epsilon) c4(172358, 172359) c5(172360, 172361, 172362, 172363, 172364, 172365, 172366, 172367, 172368, 172369, 172370, 172371, 172372, 172373, 172374, 172375, 172376, 172377) c6( ) c7(cZ, Iu, xZ, aFa, Pt, Be, aT, r, h, ey, aEZ, q, Qn); #c1(CCT6A) c2(NP_001009186) c3(T-complex protein 1 subunit zeta isoform b) c4(23573) c5(23574, 23575, 23576, 23577, 23578, 23579, 23580, 23581, 23582, 23583, 23584) c6( ) c7(ff, q, en, r); #c1(CCT6A) c2(NP_001753) c3(T-complex protein 1 subunit zeta isoform a) c4(120769, 120770, 120771) c5(120772, 120773, 120774, 120775, 120776, 120777, 120778, 120779, 120780, 120781, 120782, 120783, 120784) c6( ) c7(ff, q, en, r); #c1(CCT6B) c2(NP_001180458) c3(T-complex protein 1 subunit zeta-2 isoform 2) c4(74117) c5(74118, 74119, 74120, 74121, 74122, 74123) c6( ) c7(pk, T); #c1(CCT6B) c2(NP_001180459) c3(T-complex protein 1 subunit zeta-2 isoform 3) c4(74124) c5(74125, 74126, 74127, 74128, 74129, 74130) c6( ) c7(pk, T); #c1(CCT6B) c2(NP_006575) c3(T-complex protein 1 subunit zeta-2 isoform 1) c4(166336) c5(166337, 166338, 166339, 166340, 166341, 166342) c6( ) c7(pk, T); #c1(CCT7) c2(NP_001009570) c3(T-complex protein 1 subunit eta isoform b) c4( ) c5(23625, 23626, 23627, 23628, 23629, 23630) c6( ) c7(aw, aA, h, r, mq, mJ, q); #c1(CCT7) c2(NP_001159756) c3(T-complex protein 1 subunit eta isoform c) c4(64747) c5(64748, 64749, 64750, 64751, 64752, 64753, 64754, 64755, 64756, 64757, 64758, 64759, 64760, 64761, 64762, 64763, 64764) c6( ) c7(aw, aA, h, r, mq, mJ, q); #c1(CCT7) c2(NP_001159757) c3(T-complex protein 1 subunit eta isoform d) c4(64765) c5( ) c6( ) c7(aw, aA, h, r, mq, mJ, q); #c1(CCT7) c2(NP_006420) c3(T-complex protein 1 subunit eta isoform a) c4(164874, 164875, 164876, 164877) c5(164878, 164879, 164880, 164881, 164882, 164883, 164884, 164885, 164886, 164887, 164888, 164889, 164890) c6( ) c7(aw, aA, h, r, mq, mJ, q); #c1(CD109) c2(NP_001153059) c3(CD109 antigen isoform 2 preproprotein) c4(60388) c5(60389, 60390, 60391, 60392, 60393, 60394) c6( ) c7(T, ft, oe, eH, AQ, RW, aT, h, ff, ci, en, g, eF, y, Wq, X); #c1(CD109) c2(NP_001153060) c3(CD109 antigen isoform 3 preproprotein) c4(60395) c5(60396, 60397, 60398, 60399, 60400, 60401) c6( ) c7(T, ft, oe, eH, AQ, RW, aT, h, ff, ci, en, g, eF, y, Wq, X); #c1(CD109) c2(NP_598000) c3(CD109 antigen isoform 1 preproprotein) c4(235250) c5(235251, 235252, 235253, 235254, 235255, 235256) c6( ) c7(T, ft, oe, eH, AQ, RW, aT, h, ff, ci, en, g, eF, y, Wq, X); #c1(CD14) c2(NP_001167576) c3(monocyte differentiation antigen CD14 precursor) c4(69319) c5(69320, 69321, 69322, 69323, 69324, 69325, 69326, 69327, 69328, 69329) c6( ) c7(oO, bM, T, JN, fR, Js, aFg, ea, hV, e, qx, al, fd, cL, Vd, ci, Jx, Qp, fw, aDI, Tz, ip, NF, AW, xE, aE, rw, Gb, dV, Ds, K, dD, aFk, dF, eL, eN, hm, aa, yo, aAg, aW, az, hl, asD, mQ, g, hJ, tU, uC, eE, bw, ha, fT, eM, xD, dc, JA, AV, ki, cj, uo, aFp, Dt, eg, Le, aFf, qR, Wx, FW, dD, sQ, zt, aw, ht, aFc, n, fr, jG, pM, aCQ, TI, cd, zo, ai, TB, eW, ec, jL, aFq, cU, h, eV, dL, aaA, aFi, wb, ey, aDp, wC, A, mR, oo, sp, fe, nN, jT, cM, aFj, Wt, asE, ar, kT, aBs, JM, at, uz, Dp, aEG, ut, fL, aDE, eo, B, Jo, bL, Dw, fM, dA, eR, jx, eX, aA, tc, ol, v, j, OY, C, aFn, V, aFv, q, o, er, cF, apJ, si, Id, rS, aT, yu, Oi, cy, jj, an, aFm, Cy, ae, af, eu, aFs, s, iU, bg, Pg, r, aFo, Io, ahl, pb, ck, cT, ac, c, ig, wO, hc, gX, tM, mf, cS, dy, JH, fD, Da, zu, bt, ao, Kd, sY, aFe, akd, aD, iW, jh, vr, Jz, jE, ah, eq, iG, ad, kL, hX, Jm, aFu, F, ib, aFI, aFh, Dq, Os, hD, LA, JK, vB, IQ, jo, XI, NM, uQ, d, cW, qt, yx, wc, aFt, eZ, aFr, gE, hp, aF, Fq, iV, aFd, eK, D, Cq, gk, pc, zr, yE, z, aka, aFb, eB, wz, sG, aS, ei, If, fh, y); #c1(CD151) c2(NP_001034579) c3(CD151 antigen) c4(31810, 31811, 31812, 31813, 31814, 31815, 31816, 31817) c5(31818, 31819, 31820, 31821, 31822, 31823, 31824, 31825, 31826, 31827, 31828, 31829, 31830, 31831, 31832, 31833, 31834, 31835, 31836, 31837, 31838, 31839, 31840, 31841, 31842, 31843, 31844, 31845, 31846, 31847, 31848, 31849, 31850, 31851, 31852, 31853, 31854, 31855, 31856, 31857, 31858, 31859, 31860, 31861, 31862, 31863, 31864, 31865, 31866, 31867, 31868, 31869, 31870, 31871, 31872, 31873, 31874, 31875, 31876, 31877, 31878, 31879, 31880, 31881) c6( ) c7(T, eR, fG, aw, aA, bB, n, axk, ci, aFw, eA, ad, kH, aT, cy, ae, d, je, LG, Y, aW, ff, aF, en, bz, LB, ck, iM, eM, bE, uo, dy, B); #c1(CD163) c2(NP_004235) c3(scavenger receptor cysteine-rich type 1 protein M130 isoform a precursor) c4(144501, 144502) c5(144503, 144504, 144505, 144506, 144507, 144508) c6( ) c7(oO, bL, T, EM, dD, eR, ea, aw, qy, aA, n, aj, v, eq, azF, C, pz, g, J, eA, ip, tg, AW, ib, dY, hW, Id, dV, aT, h, dL, ey, K, lM, eL, hZ, nP, iU, iZ, aW, Y, eH, cr, r, fe, aFx, aF, iV, eF, iP, LB, c, zr, Vy, hc, sG, at, m, hh, y, bt); #c1(CD163) c2(NP_981961) c3(scavenger receptor cysteine-rich type 1 protein M130 isoform b precursor) c4(263205) c5(263206, 263207, 263208, 263209, 263210, 263211, 263212, 263213, 263214, 263215, 263216, 263217, 263218) c6( ) c7(oO, bL, T, EM, dD, eR, ea, aw, qy, aA, n, aj, v, eq, azF, C, pz, g, J, eA, ip, tg, AW, ib, dY, hW, Id, dV, aT, h, dL, ey, K, lM, eL, hZ, nP, iU, iZ, aW, Y, eH, cr, r, fe, aFx, aF, iV, eF, iP, LB, c, zr, Vy, hc, sG, at, m, hh, y, bt); #c1(CD163) c2(XP_005253585) c3(scavenger receptor cysteine-rich type 1 protein M130 isoform X1) c4(272574) c5(272575, 272576, 272577, 272578, 272579, 272580) c6( ) c7(oO, bL, T, EM, dD, eR, ea, aw, qy, aA, n, aj, v, eq, azF, C, pz, g, J, eA, ip, tg, AW, ib, dY, hW, Id, dV, aT, h, dL, ey, K, lM, eL, hZ, nP, iU, iZ, aW, Y, eH, cr, r, fe, aFx, aF, iV, eF, iP, LB, c, zr, Vy, hc, sG, at, m, hh, y, bt); #c1(CD163L1) c2(NP_777601) c3(scavenger receptor cysteine-rich type 1 protein M160 isoform 2 precursor) c4(251307) c5(251308, 251309, 251310, 251311, 251312, 251313, 251314, 251315) c6(251316, 251317) c7(Y); #c1(CD163L1) c2(XP_011518918) c3(scavenger receptor cysteine-rich type 1 protein M160 isoform X1) c4(313344) c5(313345, 313346, 313347, 313348, 313349, 313350, 313351, 313352) c6(313353, 313354) c7(Y); #c1(CD163L1) c2(XP_011518919) c3(scavenger receptor cysteine-rich type 1 protein M160 isoform X2) c4(313355) c5( ) c6( ) c7(Y); #c1(CD163L1) c2(XP_011518923) c3(scavenger receptor cysteine-rich type 1 protein M160 isoform X5) c4( ) c5(313356, 313357, 313358, 313359, 313360, 313361, 313362, 313363) c6(313364, 313365) c7(Y); #c1(CD164) c2(NP_001135873) c3(sialomucin core protein 24 isoform 2 precursor) c4(53448) c5(53449, 53450, 53451, 53452, 53453, 53454) c6( ) c7(eU, pg, m, g, t, ad); #c1(CD164) c2(NP_001135874) c3(sialomucin core protein 24 isoform 3 precursor) c4(53455, 53456) c5(53457, 53458, 53459, 53460, 53461, 53462, 53463, 53464, 53465, 53466, 53467, 53468) c6( ) c7(eU, pg, m, g, t, ad); #c1(CD164) c2(NP_001135875) c3(sialomucin core protein 24 isoform 4 precursor) c4(53469) c5(53470, 53471, 53472, 53473, 53474, 53475) c6( ) c7(eU, pg, m, g, t, ad); #c1(CD164) c2(NP_001135876) c3(sialomucin core protein 24 isoform 5 precursor) c4(53476) c5(53477, 53478, 53479, 53480, 53481, 53482) c6( ) c7(eU, pg, m, g, t, ad); #c1(CD164) c2(NP_006007) c3(sialomucin core protein 24 isoform 1 precursor) c4(161123) c5(161124, 161125, 161126, 161127, 161128, 161129) c6( ) c7(eU, pg, m, g, t, ad); #c1(CD177) c2(NP_065139) c3(CD177 antigen precursor) c4(204223, 204224, 204225) c5(204226, 204227, 204228, 204229, 204230, 204231, 204232, 204233, 204234, 204235, 204236, 204237, 204238, 204239, 204240, 204241, 204242, 204243, 204244, 204245, 204246, 204247) c6( ) c7(bL, gV, T, lD, OI, jx, jh, aA, bB, fd, ci, C, iJ, eA, ad, eW, oT, Cj, dE, ds, aFy, aT, oW, h, dz, ae, cY, uQ, ly, VC, A, d, lx, iU, et, aW, eZ, r, kD, aFC, aq, aF, yq, g, pm, cm, aFB, aFz, iK, mK, lx, dR, aFA, bw, L, BU, pc, age, eM, bE, AH, cj, hR, pg, aS, pw, bt, it, B, aeA); #c1(CD180) c2(NP_005573) c3(CD180 antigen precursor) c4(157578) c5(157579, 157580, 157581, 157582, 157583, 157584) c6( ) c7(jx, eZ, cj, dq, v, be, ad); #c1(CD19) c2(NP_001171569) c3(B-lymphocyte antigen CD19 isoform 1 precursor) c4(70632) c5(70633, 70634, 70635, 70636, 70637, 70638) c6( ) c7(bM, T, aFG, fM, dA, iW, jx, eX, jh, fd, aeu, lR, aFF, hF, V, mC, eW, tD, zn, x, aFD, ke, pe, lg, oG, ds, h, eV, hn, ey, ox, jj, ajA, be, azh, nP, iU, oV, Y, axu, aFE, bg, eZ, Of, bw, Og, Io, hp, aom, aot, kk, cM, cm, pb, iV, Wt, asE, Cv, ck, ou, ha, eM, iT, of, cj, dW, k, aDb, fL, y, bt, Ze, abW); #c1(CD19) c2(NP_001761) c3(B-lymphocyte antigen CD19 isoform 2 precursor) c4(120875, 120876, 120877) c5(120878, 120879, 120880, 120881, 120882, 120883, 120884, 120885, 120886, 120887, 120888, 120889, 120890, 120891, 120892, 120893, 120894, 120895) c6( ) c7(bM, T, aFG, fM, dA, iW, jx, eX, jh, fd, aeu, lR, aFF, hF, V, mC, eW, tD, zn, x, aFD, ke, pe, lg, oG, ds, h, eV, hn, ey, ox, jj, ajA, be, azh, nP, iU, oV, Y, axu, aFE, bg, eZ, Of, bw, Og, Io, hp, aom, aot, kk, cM, cm, pb, iV, Wt, asE, Cv, ck, ou, ha, eM, iT, of, cj, dW, k, aDb, fL, y, bt, Ze, abW); #c1(CD1A) c2(NP_001754) c3(T-cell surface glycoprotein CD1a precursor) c4(120785) c5(120786, 120787, 120788, 120789, 120790, 120791) c6( ) c7(T, qb, bS, OY, ci, ct, fu, Qp, pd, V, ds, aT, h, rO, dF, A, iU, fJ, Z, eE, aFH, ck, xT, nM, yW, Qw, at, i, bt); #c1(CD1B) c2(NP_001755) c3(T-cell surface glycoprotein CD1b precursor) c4(120792) c5(120793, 120794, 120795, 120796, 120797, 120798) c6( ) c7(T, qb, bO, bB, bS, OY, ct, ci, fu, Qp, V, wD, AW, ds, aT, h, aFI, dF, A, iU, ev, fJ, cr, awv, Z, aFH, eE, ck, xT, BU, nM, yW, bE, Qw, at, eo, i, bt, B); #c1(CD1B) c2(XP_011508421) c3(T-cell surface glycoprotein CD1b isoform X1) c4(299137) c5(299138, 299139, 299140, 299141, 299142, 299143) c6( ) c7(T, qb, bO, bB, bS, OY, ct, ci, fu, Qp, V, wD, AW, ds, aT, h, aFI, dF, A, iU, ev, f J, cr, awv, Z, aFH, eE, ck, xT, BU, nM, yW, bE, Qw, at, eo, i, bt, B); #c1(CD1C) c2(NP_001756) c3(T-cell surface glycoprotein CD1c precursor) c4(120799, 120800) c5(120801, 120802, 120803, 120804, 120805, 120806, 120807, 120808, 120809, 120810, 120811, 120812) c6( ) c7(T, qb, bS, OY, ci, ct, fu, Qp, hF, uE, V, ds, aT, h, dF, be, A, iU, oV, f J, Z, aFH, eE, ck, xT, BU, nM, yW, Qw, cj, at, i, bt); #c1(CD1C) c2(XP_005245636) c3(T-cell surface glycoprotein CD1c isoform X1) c4(266822, 266823) c5(266824, 266825, 266826, 266827, 266828, 266829, 266830, 266831, 266832, 266833, 266834, 266835) c6( ) c7(T, qb, bS, OY, ci, ct, fu, Qp, hF, uE, V, ds, aT, h, dF, be, A, iU, oV, f J, Z, aFH, eE, ck, xT, BU, nM, yW, Qw, cj, at, i, bt); #c1(CD1D) c2(NP_001757) c3(antigen-presenting glycoprotein CD1d precursor) c4(120813) c5(120814, 120815, 120816, 120817, 120818, 120819) c6( ) c7(oO, bM, T, JZ, fR, yG, al, jx, fd, jh, n, aj, bS, v, ct, ci, bX, aFJ, mF, V, OY, Qp, aR, J, hX, x, ds, akJ, aT, h, ey, IQ, ji, OM, NM, dF, jf, akV, A, iU, mD, aW, fJ, aFK, cr, fe, aq, In, yq, hp, aFH, Z, eE, cm, Wt, ck, vU, y, nM, yW, xD, Qw, cj, at, uz, oX, k, i, hE, bt, fh, B, ao); #c1(CD1E) c2(NP_001036048) c3(T-cell surface glycoprotein CD1e, membrane-associated isoform b precursor) c4(33850) c5(33851, 33852, 33853, 33854, 33855, 33856, 33857, 33858, 33859, 33860, 33861, 33862, 33863) c6( ) c7(T, bS, OY, ci, ct, Qp, V, ds, aT, h, A, iO, fJ, eE, Z, aFH, ck, nM, c, yW, Qw, at, i, bt, hv); #c1(CD1E) c2(NP_001036050) c3(T-cell surface glycoprotein CD1e, membrane-associated isoform d precursor) c4(33864) c5(33865, 33866, 33867, 33868, 33869, 33870) c6( ) c7(T, bS, OY, ci, ct, Qp, V, ds, aT, h, A, iU, fJ, eE, Z, aFH, ck, nM, c, yW, Qw, at, i, bt, hv); #c1(CD1E) c2(NP_001036051) c3(T-cell surface glycoprotein CD1e, membrane-associated isoform e precursor) c4(33871) c5(33872, 33873, 33874, 33875, 33876, 33877) c6( ) c7(T, bS, OY, ci, ct, Qp, V, ds, aT, h, A, iU, fJ, eE, Z, aFH, ck, nM, c, yW, Qw, at, i, bt, hv); #c1(CD1E) c2(NP_001036052) c3(T-cell surface glycoprotein CD1e, membrane-associated isoform f precursor) c4(33878) c5(33879, 33880, 33881, 33882, 33883, 33884, 33885, 33886, 33887, 33888, 33889) c6( ) c7(T, bS, OY, ci, ct, Qp, V, ds, aT, h, A, iU, f J, eE, Z, aFH, ck, nM, c, yW, Qw, at, i, bt, hv); #c1(CD1E) c2(NP_001172036) c3(T-cell surface glycoprotein CD1e, membrane-associated isoform g precursor) c4(72305) c5(72306, 72307, 72308, 72309, 72310, 72311) c6( ) c7(T, bS, OY, ci, ct, Qp, V, ds, aT, h, A, iU, fJ, eE, Z, aFH, ck, nM, c, yW, Qw, at, i, bt, hv); #c1(CD1E) c2(NP_001172037) c3(T-cell surface glycoprotein CD1e, membrane-associated isoform i precursor) c4(72312) c5(72313, 72314, 72315, 72316, 72317, 72318) c6( ) c7(T, bS, OY, ci, ct, Qp, V, ds, aT, h, A, iU, f J, eE, Z, aFH, ck, nM, c, yW, Qw, at, i, bt, hv); #c1(CD1E) c2(NP_001172039) c3(T-cell surface glycoprotein CD1e, membrane-associated isoform 1 precursor) c4(72319) c5(72320, 72321, 72322, 72323, 72324, 72325) c6( ) c7(T, bS, OY, ci, ct, Qp, V, ds, aT, h, A, iU, fJ, eE, Z, aFH, ck, nM, c, yW, Qw, at, i, bt, hv); #c1(CD1E) c2(NP_001172041) c3(T-cell surface glycoprotein CD1e, membrane-associated isoform j precursor) c4(72326) c5(72327, 72328, 72329, 72330, 72331, 72332, 72333) c6( ) c7(T, bS, OY, ci, ct, Qp, V, ds, aT, h, A, iU, fJ, eE, Z, aFH, ck, nM, c, yW, Qw, at, i, bt, hv); #c1(CD1E) c2(NP_001172042) c3(T-cell surface glycoprotein CD1e, membrane-associated isoform k precursor) c4(72334) c5(72335, 72336, 72337, 72338, 72339, 72340) c6( ) c7(T, bS, OY, ci, ct, Qp, V, ds, aT, h, A, iU, fJ, eE, Z, aFH, ck, nM, c, yW, Qw, at, i, bt, hv); #c1(CD1E) c2(NP_001172043) c3(T-cell surface glycoprotein CD1e, membrane-associated isoform m precursor) c4(72341) c5(72342, 72343, 72344, 72345, 72346, 72347) c6( ) c7(T, bS, OY, ci, ct, Qp, V, ds, aT, h, A, iU, fJ, eE, Z, aFH, ck, nM, c, yW, Qw, at, i, bt, hv); #c1(CD1E) c2(NP_001172044) c3(T-cell surface glycoprotein CD1e, membrane-associated isoform h precursor) c4(72348) c5(72349, 72350, 72351, 72352, 72353, 72354) c6( ) c7(T, bS, OY, ci, ct, Qp, V, ds, aT, h, A, iU, fJ, eE, Z, aFH, ck, nM, c, yW, Qw, at, i, bt, hv); #c1(CD1E) c2(NP_112155) c3(T-cell surface glycoprotein CD1e, membrane-associated isoform a precursor) c4(220508, 220509) c5(220510, 220511, 220512, 220513, 220514, 220515) c6( ) c7(T, bS, OY, ci, ct, Qp, V, ds, aT, h, A, iU, fJ, eE, Z, aFH, ck, nM, c, yW, Qw, at, i, bt, hv); #c1(CD1E) c2(XP_011508436) c3(T-cell surface glycoprotein CD1e, membrane-associated isoform X1) c4(299150, 299151) c5(299152, 299153, 299154, 299155, 299156, 299157) c6( ) c7(T, bS, OY, ci, ct, Qp, V, ds, aT, h, A, iU, f J, eE, Z, aFH, ck, nM, c, yW, Qw, at, i, bt, hv); #c1(CD200) c2(NP_001004196) c3(OX-2 membrane glycoprotein isoform b) c4(20484) c5(20485, 20486, 20487, 20488, 20489, 20490) c6( ) c7(ck, bM, T, zw, dA, aW, Y, aw, wL, bt, cj, aT, fd, Io, eo, an, hF, V, X, cp); #c1(CD200) c2(NP_005935) c3(OX-2 membrane glycoprotein isoform a precursor) c4(160533) c5(160534, 160535, 160536, 160537, 160538, 160539) c6( ) c7(ck, bM, T, zw, dA, aW, Y, aw, wL, bt, cj, aT, fd, Io, eo, an, hF, V, X, cp); #c1(CD200) c2(XP_005247547) c3(OX-2 membrane glycoprotein isoform X9) c4( ) c5(267865, 267866) c6( ) c7(ck, bM, T, zw, dA, aW, Y, aw, wL, bt, cj, aT, fd, Io, eo, an, hF, V, X, cp); #c1(CD200RI) c2(NP_620161) c3(cell surface glycoprotein CD200 receptor 1 isoform a precursor) c4(237423) c5(237424, 237425, 237426, 237427, 237428, 237429) c6( ) c7(Ye, ae, T, cF, zw, oz, aW, U, Nt, aT, alX, bt, cl, uu, an, abC, V, alY, ad); #c1(CD200RI) c2(NP_620385) c3(cell surface glycoprotein CD200 receptor 1 isoform b precursor) c4(237536) c5(237537, 237538, 237539, 237540, 237541, 237542) c6( ) c7(Ye, ae, T, cF, zw, oz, aW, U, Nt, aT, alX, bt, cl, uu, an, abC, V, alY, ad); #c1(CD200R1) c2(NP_620386) c3(cell surface glycoprotein CD200 receptor 1 isoform c precursor) c4(237543) c5(237544, 237545, 237546, 237547, 237548, 237549) c6( ) c7(Ye, ae, T, cF, zw, oz, aW, U, Nt, aT, alX, bt, cl, uu, an, abC, V, alY, ad); #c1(CD200RI) c2(NP_740750) c3(cell surface glycoprotein CD200 receptor 1 isoform d precursor) c4(247448) c5(247449, 247450, 247451, 247452, 247453, 247454) c6( ) c7(Ye, ae, T, cF, zw, oz, aW, U, Nt, aT, alX, bt, cl, uu, an, abC, V, alY, ad); #c1(CD207) c2(NP_056532) c3(C-type lectin domain family 4 member K) c4(187971) c5(187972, 187973, 187974, 187975, 187976, 187977) c6( ) c7(Qp, et, dz, fe, aFL); #c1(CD209) c2(NP_001138365) c3(CD209 antigen isoform 5) c4(56383) c5(56384, 56385, 56386, 56387, 56388, 56389) c6( ) c7(bM, Dw, fR, jx, al, fr, aBI, q, aFM, AW, F, kH, h, Ds, wc, hl, ge, r, lo, aDm, hp, yq, aCK, eE, iV, iQ, Jr, ig, AH, y); #c1(CD209) c2(NP_001138366) c3(CD209 antigen isoform 6) c4(56390) c5(56391, 56392, 56393, 56394, 56395, 56396) c6( ) c7(bM, Dw, fR, jx, al, fr, aBI, q, aFM, AW, F, kH, h, Ds, wc, hl, ge, r, lo, aDm, hp, yq, aCK, eE, iV, iQ, Jr, ig, AH, y); #c1(CD209) c2(NP_001138367) c3(CD209 antigen isoform 7) c4(56397) c5(56398, 56399, 56400, 56401, 56402, 56403, 56404, 56405, 56406, 56407) c6( ) c7(bM, Dw, fR, jx, al, fr, aBI, q, aFM, AW, F, kH, h, Ds, wc, hl, ge, r, lo, aDm, hp, yq, aCK, eE, iV, iQ, Jr, ig, AH, y); #c1(CD209) c2(NP_001138368) c3(CD209 antigen isoform 3) c4(56408, 56409) c5(56410, 56411, 56412, 56413, 56414, 56415) c6( ) c7(bM, Dw, fR, jx, al, fr, aBI, q, aFM, AW, F, kH, h, Ds, wc, hl, ge, r, lo, aDm, hp, yq, aCK, eE, iV, iQ, Jr, ig, AH, y); #c1(CD209) c2(NP_001138369) c3(CD209 antigen isoform 4) c4(56416, 56417, 56418) c5(56419, 56420, 56421, 56422, 56423, 56424, 56425, 56426, 56427, 56428, 56429) c6( ) c7(bM, Dw, fR, jx, al, fr, aBI, q, aFM, AW, F, kH, h, Ds, wc, hl, ge, r, lo, aDm, hp, yq, aCK, eE, iV, iQ, Jr, ig, AH, y); #c1(CD209) c2(NP_001138371) c3(CD209 antigen isoform 8) c4( ) c5(56430, 56431, 56432, 56433, 56434) c6( ) c7(bM, Dw, fR, jx, al, fr, aBI, q, aFM, AW, F, kH, h, Ds, wc, hl, ge, r, lo, aDm, hp, yq, aCK, eE, iV, iQ, Jr, ig, AH, y); #c1(CD209) c2(NP_066978) c3(CD209 antigen isoform 1) c4(207951) c5(207952, 207953, 207954, 207955, 207956, 207957, 207958) c6( ) c7(bM, Dw, fR, jx, al, fr, aBI, q, aFM, AW, F, kH, h, Ds, wc, hl, ge, r, lo, aDm, hp, yq, aCK, eE, iV, iQ, Jr, ig, AH, y); #c1(CD22) c2(NP_001172028) c3(B-cell receptor CD22 isoform 2 precursor) c4(72277) c5(72278, 72279, 72280, 72281, 72282, 72283) c6( ) c7(T, fM, iW, jh, fd, C, hF, ai, zn, x, b, fX, oG, ql, eZ, pb, ck, ou, iT, cj, uo, XO, k, i, bt); #c1(CD22) c2(NP_001172029) c3(B-cell receptor CD22 isoform 3 precursor) c4(72284) c5(72285, 72286, 72287, 72288, 72289, 72290) c6( ) c7(T, fM, iW, jh, fd, C, hF, ai, zn, x, b, fX, oG, ql, eZ, pb, ck, ou, iT, cj, uo, XO, k, i, bt); #c1(CD22) c2(NP_001172030) c3(B-cell receptor CD22 isoform 4 precursor) c4(72291) c5(72292, 72293, 72294, 72295, 72296, 72297) c6( ) c7(T, fM, iW, jh, fd, C, hF, ai, zn, x, b, fX, oG, ql, eZ, pb, ck, ou, iT, cj, uo, XO, k, i, bt); #c1(CD22) c2(NP_001265346) c3(B-cell receptor CD22 isoform 5) c4(98346) c5(98347, 98348, 98349, 98350, 98351, 98352) c6( ) c7(T, fM, iW, jh, fd, C, hF, ai, zn, x, b, fX, oG, ql, eZ, pb, ck, ou, iT, cj, uo, XO, k, i, bt); #c1(CD22) c2(NP_001762) c3(B-cell receptor CD22 isoform 1 precursor) c4(120896, 120897) c5(120898, 120899, 120900, 120901, 120902, 120903, 120904, 120905, 120906, 120907, 120908, 120909, 120910, 120911) c6(120912, 120913) c7(T, fM, iW, jh, fd, C, hF, ai, zn, x, b, fX, oG, ql, eZ, pb, ck, ou, iT, cj, uo, XO, k, i, bt); #c1(CD226) c2(NP_001290547) c3(CD226 antigen isoform a precursor) c4(115513) c5(115514, 115515, 115516, 115517, 115518, 115519) c6( ) c7(bM, T, lo, jh, fd, cL, aoj, ci, V, q, ad, o, dP, yF, OV, A, Y, aFE, cr, r, eZ, ve, pb, afW, y, Pr, B, hv); #c1(CD24) c2(XP_011533677) c3(signal transducer CD24 isoform X1) c4( ) c5(329740) c6( ) c7(T, kh, dA, jh, aA, n, fr, jE, ci, V, q, ad, er, hX, AK, abZ, eA, ft, av, aE, afb, jz, yt, aT, By, dL, K, asT, ae, eL, iL, uQ, li, d, aW, oV, eZ, r, fe, aq, kp, aF, g, as, iR, t, ahv, bz, uC, op, pb, cm, ck, uP, ik, kP, iT, vA, gX, dy, np, m, k, eo, Pr, B); #c1(CD244) c2(NP_001160135) c3(natural killer cell receptor 2B4 isoform 2 precursor) c4(65105) c5(65106, 65107, 65108, 65109, 65110, 65111) c6( ) c7(ck, Zg, eZ, fL, pb, aaV, y, bt, mC, aR); #c1(CD244) c2(NP_001160136) c3(natural killer cell receptor 2B4 isoform 3 precursor) c4(65112) c5(65113, 65114, 65115, 65116, 65117, 65118) c6( ) c7(ck, Zg, eZ, fL, pb, aaV, y, bt, mC, aR); #c1(CD244) c2(NP_057466) c3(natural killer cell receptor 2B4 isoform 1 precursor) c4(191109) c5(191110, 191111, 191112, 191113, 191114, 191115) c6( ) c7(ck, Zg, eZ, fL, pb, aaV, y, bt, mC, aR); #c1(CD244) c2(XP_011507924) c3(natural killer cell receptor 2B4 isoform X3) c4(298240) c5(298241, 298242, 298243, 298244, 298245, 298246) c6( ) c7(ck, Zg, eZ, fL, pb, aaV, y, bt, mC, aR); #c1(CD247) c2(NP_000725) c3(T-cell surface glycoprotein CD3 zeta chain isoform 2 precursor) c4(14904) c5(14905, 14906, 14907, 14908, 14909, 14910) c6( ) c7(T, aA, cz, cL, ci, eA, q, mC, o, hX, h, K, aDU, bA, iU, eZ, r, aF, hp, bw, pb, ig, cj, dW, m, fL, y, aFN); #c1(CD247) c2(NP_932170) c3(T-cell surface glycoprotein CD3 zeta chain isoform 1 precursor) c4(258856) c5(258857, 258858, 258859, 258860, 258861, 258862) c6( ) c7(T, aA, cz, cL, ci, eA, q, mC, o, hX, h, K, aDU, bA, iU, eZ, r, aF, hp, bw, pb, ig, cj, dW, m, fL, y, aFN); #c1(CD248) c2(NP_065137) c3(endosialin precursor) c4(204146) c5(204147, 204148, 204149, 204150, 204151, 204152) c6( ) c7(T, ci, ai, ad, wD, fU, ft, afm, ds, cY, awV, d, aFP, MD, Y, eH, eF, kk, cm, aFO, dB, bE, Zn, y); #c1(CD27) c2(NP_001233) c3(CD27 antigen precursor) c4(87760) c5(87761, 87762, 87763, 87764, 87765, 87766) c6( ) c7(aox, bM, T, aov, fM, fR, aFQ, RX, jh, fd, zN, aj, aFR, hX, mC, J, ai, LH, aoH, zn, eA, agd, fX, CJ, pe, x, Oe, ds, aT, h, yu, cy, rB, bc, qw, A, PK, iU, xR, aW, sp, zb, Y, CM, eZ, Of, CF, Og, Io, bz, pb, Wt, Cv, ck, amS, ig, anY, eB, cj, k, aDb, fL, be, y); #c1(CD274) c2(NP_001254635) c3(programmed cell death 1 ligand 1 isoform b precursor) c4(94736) c5(94737, 94738, 94739, 94740, 94741, 94742) c6( ) c7(T, fR, al, fd, ci, bh, aE, hu, hH, eL, bc, cp, aa, Jl, aW, mQ, hl, g, bw, iP, eM, iA, cj, m, ht, fN, n, aj, fr, eW, jz, h, eV, dL, A, mR, lb, fe, aq, yq, jT, cM, bP, eo, fL, aCD, IB, B, fM, jx, eX, aA, V, q, J, eA, cF, Ig, aT, hK, ae, aFS, iU, oV, Y, aCH, r, lo, en, t, ck, iM, kP, Uq, fD, bt, Kd, Ke, jh, wV, jE, mC, ad, hX, av, F, oz, ds, hD, amY, d, qZ, je, ff, eZ, dN, aF, es, y, iu); #c1(CD274) c2(NP_054862) c3(programmed cell death 1 ligand 1 isoform a precursor) c4(178126) c5(178127, 178128, 178129, 178130, 178131, 178132) c6( ) c7(T, fR, al, fd, ci, bh, aE, hu, hH, eL, bc, cp, aa, Jl, aW, mQ, hl, g, bw, iP, eM, iA, cj, m, ht, fN, n, aj, fr, eW, jz, h, eV, dL, A, mR, lb, fe, aq, yq, jT, cM, bP, eo, fL, aCD, IB, B, fM, jx, eX, aA, V, q, J, eA, cF, Ig, aT, hK, ae, aFS, iU, oV, Y, aCH, r, lo, en, t, ck, iM, kP, Uq, fD, bt, Kd, Ke, jh, wV, jE, mC, ad, hX, av, F, oz, ds, hD, amY, d, qZ, je, ff, eZ, dN, aF, es, y, iu); #c1(CD276) c2(NP_079516) c3(CD276 antigen isoform b precursor) c4(218532) c5(218533, 218534, 218535, 218536, 218537, 218538, 218539, 218540, 218541, 218542, 218543, 218544, 218545, 218546, 218547, 218548, 218549, 218550, 218551, 218552, 218553, 218554, 218555, 218556, 218557, 218558, 218559, 218560, 218561, 218562, 218563, 218564, 218565, 218566, 218567, 218568) c6( ) c7(T, qz, if, aw, im, bB, aj, fr, ci, ze, qN, asr, V, q, mC, J, ad, eA, ib, aE, auj, aT, hD, h, Ou, bK, ae, uQ, Uf, d, A, aW, Y, ff, eH, aFT, eZ, r, fe, en, aFU, t, eF, cm, pb, Dy, bE, asq, m, fL, fD, y, B, hS); #c1(CD276) c2(XP_011520398) c3(CD276 antigen isoform X1) c4(315255, 315256, 315257, 315258, 315259, 315260, 315261, 315262) c5(315263, 315264, 315265, 315266, 315267, 315268, 315269, 315270, 315271, 315272, 315273, 315274, 315275, 315276, 315277, 315278, 315279, 315280) c6( ) c7(T, qz, if, aw, im, bB, aj, fr, ci, ze, qN, asr, V, q, mC, J, ad, eA, ib, aE, auj, aT, hD, h, Ou, bK, ae, uQ, Uf, d, A, aW, Y, ff, eH, aFT, eZ, r, fe, en, aFU, t, eF, cm, pb, Dy, bE, asq, m, fL, fD, y, B, hS); #c1(CD28) c2(NP_001230007) c3(T-cell-specific surface glycoprotein CD28 isoform 3 precursor) c4(85766) c5(85767, 85768, 85769, 85770, 85771, 85772) c6( ) c7(bM, T, if, fd, aFV, wa, x, AW, xE, Ds, K, hH, bc, axu, g, aFU, eE, eM, uy, cj, NI, k, abh, aw, aj, aFF, uE, qN, ai, Ne, h, aFX, A, mR, anP, oo, CM, kk, jT, W, bm, at, aEG, bk, fL, cn, bL, Dw, DM, fM, dA, DD, jx, j, V, pd, q, J, mP, Ig, rS, aT, yu, Oi, qw, hM, xR, oV, Y, fO, aFT, Pg, r, lo, zM, pb, ck, cT, cI, yW, Zg, hr, wR, gx, Kd, Ke, iW, axd, jh, auq, oH, fu, mC, wD, aFW, hX, fX, ds, hD, ji, lQ, yF, cr, eZ, hp, BG, iV, Bv, z, y, hv); #c1(CD28) c2(NP_006130) c3(T-cell-specific surface glycoprotein CD28 isoform 1 precursor) c4(162289) c5(162290, 162291, 162292, 162293, 162294, 162295) c6( ) c7(bM, T, if, fd, aFV, wa, x, AW, xE, Ds, K, hH, bc, axu, g, aFU, eE, eM, uy, cj, NI, k, abh, aw, aj, aFF, uE, qN, ai, Ne, h, aFX, A, mR, anP, oo, CM, kk, jT, W, bm, at, aEG, bk, fL, cn, bL, Dw, DM, fM, dA, DD, jx, j, V, pd, q, J, mP, Ig, rS, aT, yu, Oi, qw, hM, xR, oV, Y, fO, aFT, Pg, r, lo, zM, pb, ck, cT, cI, yW, Zg, hr, wR, gx, Kd, Ke, iW, axd, jh, auq, oH, fu, mC, wD, aFW, hX, fX, ds, hD, ji, lQ, yF, cr, eZ, hp, BG, iV, Bv, z, y, hv); #c1(CD28) c2(XP_011510496) c3(T-cell-specific surface glycoprotein CD28 isoform X1) c4(301016) c5(301017, 301018, 301019, 301020, 301021, 301022) c6( ) c7(bM, T, if, fd, aFV, wa, x, AW, xE, Ds, K, hH, bc, axu, g, aFU, eE, eM, uy, cj, NI, k, abh, aw, aj, aFF, uE, qN, ai, Ne, h, aFX, A, mR, anP, oo, CM, kk, jT, W, bm, at, aEG, bk, fL, cn, bL, Dw, DM, fM, dA, DD, jx, j, V, pd, q, J, mP, Ig, rS, aT, yu, Oi, qw, hM, xR, oV, Y, fO, aFT, Pg, r, lo, zM, pb, ck, cT, cI, yW, Zg, hr, wR, gx, Kd, Ke, iW, axd, jh, auq, oH, fu, mC, wD, aFW, hX, fX, ds, hD, ji, lQ, yF, cr, eZ, hp, BG, iV, Bv, z, y, hv); #c1(CD28) c2(XP_011510499) c3(T-cell-specific surface glycoprotein CD28 isoform X4) c4(301023) c5(301024, 301025, 301026, 301027, 301028, 301029) c6( ) c7(bM, T, if, fd, aFV, wa, x, AW, xE, Ds, K, hH, bc, axu, g, aFU, eE, eM, uy, cj, NI, k, abh, aw, aj, aFF, uE, qN, ai, Ne, h, aFX, A, mR, anP, oo, CM, kk, jT, W, bm, at, aEG, bk, fL, cn, bL, Dw, DM, fM, dA, DD, jx, j, V, pd, q, J, mP, Ig, rS, aT, yu, Oi, qw, hM, xR, oV, Y, fO, aFT, Pg, r, lo, zM, pb, ck, cT, cI, yW, Zg, hr, wR, gx, Kd, Ke, iW, axd, jh, auq, oH, fu, mC, wD, aFW, hX, fX, ds, hD, ji, lQ, yF, cr, eZ, hp, BG, iV, Bv, z, y, hv); #c1(CD2AP) c2(NP_036252) c3(CD2-associated protein) c4(172655) c5(172656, 172657, 172658, 172659, 172660, 172661) c6( ) c7(fM, eR, aFY, aj, ah, aY, aFZ, J, aGa, no, oj, vw, IG, af, A, aGb, cH, gi, f, sk, xA, vW, xj, hc, U, dy); #c1(CD3OOA) c2(NP_001243770) c3(CMRF35-like molecule 8 isoform 2 precursor) c4(91688, 91689) c5(91690, 91691, 91692, 91693, 91694, 91695) c6( ) c7(lo, aw, jx); #c1(CD3OOA) c2(NP_009192) c3(CMRF35-like molecule 8 isoform 1 precursor) c4(171416) c5(171417, 171418, 171419, 171420, 171421, 171422) c6( ) c7(lo, aw, jx); #c1(CD3OOA) c2(XP_005257049) c3(CMRF35-like molecule 8 isoform X3) c4( ) c5(274640, 274641, 274642, 274643, 274644, 274645) c6( ) c7(lo, aw, jx); #c1(CD3OOA) c2(XP_011522556) c3(CMRF35-like molecule 8 isoform X4) c4(317138) c5(317139, 317140, 317141, 317142, 317143, 317144) c6( ) c7(lo, aw, jx); #c1(CD3OOC) c2(NP_006669) c3(CMRF35-like molecule 6 precursor) c4(167013) c5(167014, 167015, 167016, 167017, 167018, 167019) c6( ) c7(T); #c1(CD3OOLF) c2(NP_001276011) c3(CMRF35-like molecule 1 isoform 2) c4(107736) c5(107737, 107738, 107739, 107740, 107741) c6( ) c7(Nq, Nr, jx, lo, Xm, DF); #c1(CD3OOLF) c2(NP_001276012) c3(CMRF35-like molecule 1 isoform 3 precursor) c4(107742) c5(107743, 107744, 107745, 107746, 107747, 107748) c6( ) c7(Nq, Nr, jx, lo, Xm, DF); #c1(CD3OOLF) c2(NP_001276014) c3(CMRF35-like molecule 1 isoform 5) c4( ) c5(107749) c6( ) c7(Nq, Nr, jx, lo, Xm, DF); #c1(CD3OOLF) c2(NP_001276015) c3(CMRF35-like molecule 1 isoform 6) c4(107750) c5(107751, 107752, 107753, 107754, 107755) c6( ) c7(Nq, Nr, jx, lo, Xm, DF); #c1(CD3OOLF) c2(NP_620587) c3(CMRF35-like molecule 1 isoform 1 precursor) c4(237818) c5(237819, 237820, 237821, 237822, 237823, 237824) c6( ) c7(Nq, Nr, jx, lo, Xm, DF); #c1(CD3OOLF) c2(XP_011522677) c3(CMRF35-like molecule 1 isoform X7) c4( ) c5(317223) c6( ) c7(Nq, Nr, jx, lo, Xm, DF); #c1(CD302) c2(NP_001185692) c3(CD302 antigen isoform 2 precursor) c4(76059) c5(76060, 76061, 76062, 76063, 76064, 76065) c6( ) c7(eV, ae, eX, ci); #c1(CD302) c2(NP_055695) c3(CD302 antigen isoform 1 precursor) c4(182829) c5(182830, 182831, 182832, 182833, 182834, 182835) c6( ) c7(eV, ae, eX, ci); #c1(CD320) c2(NP_001159367) c3(CD320 antigen isoform 2 precursor) c4(63876) c5(63877, 63878, 63879, 63880, 63881, 63882, 63883, 63884, 63885, 63886) c6( ) c7(aGc, Lk, mN, Ll, bu); #c1(CD320) c2(NP_057663) c3(CD320 antigen isoform 1 precursor) c4(192208, 192209) c5(192210, 192211, 192212, 192213, 192214, 192215, 192216, 192217) c6( ) c7(aGc, Lk, mN, Ll, bu); #c1(CD33) c2(NP_001076087) c3(myeloid cell surface antigen CD33 isoform 2 precursor) c4(37377) c5(37378, 37379, 37380, 37381, 37382, 37383, 37384, 37385, 37386, 37387, 37388, 37389) c6( ) c7(T, os, fM, fR, jh, bs, oZ, v, hF, br, x, aT, h, hn, K, ox, jj, H, af, iL, iU, hG, aW, ff, en, iV, Fu, bw, ck, ou, eM, iT, dc, cj, PV, k, bt, L); #c1(CD33) c2(NP_001171079) c3(myeloid cell surface antigen CD33 isoform 3 precursor) c4(69811) c5(69812, 69813, 69814, 69815, 69816, 69817, 69818, 69819, 69820, 69821, 69822) c6( ) c7(T, os, fM, fR, jh, bs, oZ, v, hF, hr, x, aT, h, hn, K, ox, jj, H, af, iL, iU, hG, aW, ff, en, iV, Fu, bw, ck, ou, eM, iT, dc, cj, PV, k, bt, L); #c1(CD33) c2(XP_011525833) c3(myeloid cell surface antigen CD33 isoform X2) c4(320236, 320237, 320238, 320239) c5(320240, 320241) c6( ) c7(T, os, fM, fR, jh, bs, oZ, v, hF, br, x, aT, h, hn, K, ox, jj, H, af, iL, iU, hG, aW, ff, en, iV, Fu, bw, ck, ou, eM, iT, dc, cj, PV, k, bt, L); #c1(CD33) c2(XP_011525834) c3(myeloid cell surface antigen CD33 isoform X1) c4( ) c5(320242, 320243, 320244, 320245, 320246) c6( ) c7(T, os, fM, fR, jh, bs, oZ, v, hF, br, x, aT, h, hn, K, ox, jj, H, af, iL, iU, hG, aW, ff, en, iV, Fu, bw, ck, ou, eM, iT, dc, cj, PV, k, bt, L); #c1(CD34) c2(NP_001020280) c3(hematopoietic progenitor cell antigen CD34 isoform a precursor) c4(28546, 28547, 28548, 28549) c5(28550, 28551, 28552, 28553, 28554, 28555, 28556, 28557, 28558, 28559, 28560, 28561, 28562, 28563, 28564, 28565, 28566, 28567, 28568, 28569, 28570, 28571, 28572, 28573) c6( ) c7(bM, T, os, aC, Js, ea, if, e, qx, al, fd, gf, ci, Qp, ip, x, xy, aGm, aE, oG, Co, SV, dV, DD, K, hu, DY, dF, ln, li, yo, aW, Ls, hl, KX, g, cm, bw, ajH, eM, nB, iT, vA, aGe, mx, cj, dW, k, m, pw, ym, in, Cx, dD, xu, vl, aw, ht, n, aj, fr, qN, eh, eW, br, Bl, no, kH, Ne, h, By, hn, eV, ox, dx, cY, afu, Lg, XE, Cu, Lh, aGd, yq, pm, me, jT, apX, op, yR, vU, Qf, hk, kz, Vy, ajd, pg, aEG, Lq, eo, ajW, agy, B, Jo, aAE, aGk, aGn, dA, jx, DV, eX, fZ, aA, hz, afK, hy, j, v, V, g, J, er, eA, mP, jZ, aT, cy, dz, rO, jj, qk, af, sb, arl, s, vT, iU, oV, Y, aGf, r, lo, en, t, f, ck, Ta, BU, iM, ac, QG, aGo, aGi, RW, hr, oX, zu, bt, id, ow, qb, iW, oA, bs, jh, oZ, oH, aGI, eq, hF, iJ, hX, Jm, hd, fX, CJ, ib, Ot, oW, LA, hD, iY, aGh, fb, nJ, pq, iL, d, BN, ue, et, cW, qt, afe, je, ff, nK, eZ, gl, Ej, xv, aF, BG, jg, iV, aGj, bz, Hp, LB, age, pc, kg, yE, z, eB, auH, aCI, CO, aS, aGg, i, y, fh, ne, jr, Cp, Tc); #c1(CD34) c2(NP_001764) c3(hematopoietic progenitor cell antigen CD34 isoform b precursor) c4(120914) c5(120915, 120916, 120917, 120918, 120919, 120920) c6( ) c7(bM, T, os, aC, Js, ea, if, e, gx, al, fd, gf, ci, Qp, ip, x, xy, aGm, aE, oG, Co, SV, dV, DO, K, hu, DY, dF, ln, li, yo, aW, Ls, hl, KX, g, cm, bw, ajH, eM, nB, iT, vA, aGe, mx, cj, dW, k, m, pw, ym, in, Cx, dD, xu, vl, aw, ht, n, aj, fr, qN, eh, eW, br, BI, no, kH, Ne, h, By, hn, eV, ox, dx, cY, afu, Lg, XE, Cu, Lh, aGd, yq, pm, mo, jT, apX, op, yR, vU, Qf, hk, kz, Vy, ajd, pg, aEG, Lq, eo, ajW, agy, B, Jo, aAE, aGk, aGn, dA, jx, DV, eX, fZ, aA, hz, afK, hy, j, v, V, q, J, er, eA, mP, jZ, aT, cy, dz, rO, jj, qk, af, sb, arl, s, vT, iU, oV, Y, aGf, r, lo, en, t, f, ck, Ta, BU, iM, ac, QG, aGo, aGi, RW, hr, oX, zu, bt, id, ow, qb, iW, oA, bs, jh, oZ, oH, aGI, eq, hF, iJ, hX, Jm, hd, fX, CJ, ib, Ot, oW, LA, hD, iY, aGh, fb, nJ, pq, iL, d, BN, ue, et, cW, qt, afe, je, ff, nK, eZ, gI, Ej, xv, aF, BG, jg, iV, aGj, bz, Hp, LB, age, pc, kg, yE, z, eB, auH, aCI, CO, aS, aGg, i, y, fh, ne, jr, Cp, Tc); #c1(CD36) c2(NP_001001547) c3(platelet glycoprotein 4 isoform 1) c4(18631, 18632, 18633, 18634) c5(18635, 18636, 18637, 18638, 18639, 18640, 18641, 18642, 18643, 18644, 18645, 18646, 18647, 18648, 18649, 18650, 18651, 18652, 18653, 18654, 18655, 18656, 18657, 18658, 18659, 18660, 18661, 18662, 18663, 18664, 18665, 18666, 18667, 18668, 18669) c6( ) c7(T, fR, ea, e, aI, bB, axk, dV, ta, K, dQ, aW, fc, hl, eE, eF, bw, mx, vy, nw, eg, aGv, Ro, dD, xu, aw, aj, afE, ct, eh, cd, br, rc, cc, h, IG, DU, ey, ZN, Um, A, fJ, aq, aGq, pm, acD, bJ, W, Fi, va, B, tq, bL, eR, fG, oe, aGt, aGu, cz, v, j, nS, q, J, aT, kf, bK, bq, aFm, af, kl, oV, Y, aGp, r, en, ck, aGs, ac, aGr, mf, dy, bt, qb, axd, bS, dG, eq, dP, F, Dq, oW, vc, iY, cH, PE, cW, ff, dq, Z, qa, LB, bE, lI, gZ, dX, cP, ei, y, xg, gq); #c1(CD36) c2(NP_001276837) c3(platelet glycoprotein 4 isoform 2) c4(108394, 108395, 108396, 108397, 108398, 108399) c5(108400, 108401, 108402, 108403, 108404, 108405, 108406, 108407, 108408, 108409, 108410, 108411, 108412, 108413, 108414, 108415, 108416, 108417) c6( ) c7(T, fR, ea, e, aI, bB, axk, dV, ta, K, dQ, aW, fc, hl, eE, eF, bw, mx, vy, nw, eg, aGv, Ro, dD, xu, aw, aj, afE, ct, eh, cd, br, rc, cc, h, IG, DU, ey, ZN, Um, A, fJ, aq, aGq, pm, acD, bJ, W, Fi, va, B, tq, bL, eR, fG, oe, aGt, aGu, cz, v, j, nS, q, J, aT, kf, bK, bq, aFm, af, kl, oV, Y, aGp, r, en, ck, aGs, ac, aGr, mf, dy, bt, qb, axd, bS, dG, eq, dP, F, Dq, oW, vc, iY, cH, PE, cW, ff, dq, Z, qa, LB, bE, lI, gZ, dX, cP, ei, y, xg, gq); #c1(CD36) c2(NP_001276838) c3(platelet glycoprotein 4 isoform 3) c4(108418) c5(108419, 108420, 108421, 108422, 108423, 108424, 108425, 108426, 108427, 108428, 108429, 108430, 108431, 108432, 108433, 108434, 108435, 108436, 108437, 108438, 108439, 108440, 108441, 108442, 108443, 108444, 108445, 108446, 108447, 108448, 108449, 108450, 108451) c6( ) c7(T, fR, ea, e, aI, bB, axk, dV, ta, K, dQ, aW, fc, hl, eE, eF, bw, mx, vy, nw, eg, aGv, Ro, dD, xu, aw, aj, afE, ct, eh, cd, br, rc, cc, h, IG, DU, ey, ZN, Um, A, fJ, aq, aGq, pm, acD, bJ, W, Fi, va, B, tq, bL, eR, fG, oe, aGt, aGu, cz, v, j, nS, q, J, aT, kf, bK, bq, aFm, af, kl, oV, Y, aGp, r, en, ck, aGs, ac, aGr, mf, dy, bt, qb, axd, bS, dG, eq, dP, F, Dq, oW, vc, iY, cH, PE, cW, ff, dq, Z, qa, LB, bE, lI, gZ, dX, cP, ei, y, xg, gq); #c1(CD36) c2(NP_001276840) c3(platelet glycoprotein 4 isoform 4) c4(108458) c5(108459, 108460, 108461, 108462, 108463, 108464) c6( ) c7(T, fR, ea, e, aI, bB, axk, dV, ta, K, dQ, aW, fc, hl, eE, eF, bw, mx, vy, nw, eg, aGv, Ro, dD, xu, aw, aj, afE, ct, eh, cd, br, rc, cc, h, IG, DU, ey, ZN, Um, A, fJ, aq, aGq, pm, acD, bJ, W, Fi, va, B, tq, bL, eR, fG, oe, aGt, aGu, cz, v, j, nS, q, J, aT, kf, bK, bq, aFm, af, kl, oV, Y, aGp, r, en, ck, aGs, ac, aGr, mf, dy, bt, qb, axd, bS, dG, eq, dP, F, Dq, oW, vc, iY, cH, PE, cW, ff, dq, Z, qa, LB, bE, lI, gZ, dX, cP, ei, y, xg, gq); #c1(CD37) c2(NP_001765) c3(leukocyte antigen CD37 isoform A) c4(120921, 120922, 120923) c5(120924, 120925, 120926, 120927, 120928, 120929, 120930, 120931, 120932, 120933, 120934, 120935, 120936, 120937, 120938, 120939, 120940, 120941) c6( ) c7(ck, x, T, ds, iW, cj, ey, k, rm); #c1(CD37) c2(XP_005259492) c3(leukocyte antigen CD37 isoform X2) c4(276113) c5( ) c6( ) c7(ck, x, T, ds, iW, cj, ey, k, rm); #c1(CD37) c2(XP_011525846) c3(leukocyte antigen CD37 isoform X1) c4( ) c5(320258, 320259, 320260, 320261, 320262, 320263) c6( ) c7(ck, x, T, ds, iW, cj, ey, k, rm); #c1(CD38) c2(NP_001766) c3(ADP-ribosyl cyclase/cyclic ADP-ribose hydrolase 1) c4(120942, 120943) c5(120944, 120945, 120946, 120947, 120948, 120949, 120950, 120951, 120952, 120953, 120954, 120955) c6( ) c7(bL, bM, T, fM, dA, fR, qb, aDT, oA, fZ, bs, aGw, aj, v, j, fd, jh, hF, br, J, x, CJ, fX, cq, nX, oW, kH, Ne, h, hn, jj, rz, pk, amO, af, bA, sj, A, asp, qZ, iU, je, oV, Pg, eZ, fQ, dq, hp, aom, f, cm, bz, GR, bw, DF, Wt, Cv, zJ, ck, bN, ar, iM, dJ, cj, k, fL, ei, hh, y, bt, fh, agZ); #c1(CD3D) c2(NP_000723) c3(T-cell surface glycoprotein CD3 delta chain isoform A precursor) c4(14883) c5(14884, 14885, 14886, 14887, 14888, 14889) c6( ) c7(ck, T, aGz, dA, iq, fJ, CM, hl, jh, aGy, aGx, dW, hp, anx, aDU, bc, aGA); #c1(CD3D) c2(NP_001035741) c3(T-cell surface glycoprotein CD3 delta chain isoform B precursor) c4(33024) c5(33025, 33026, 33027, 33028, 33029, 33030) c6( ) c7(ck, T, aGz, dA, iq, fJ, CM, hl, jh, aGy, aGx, dW, hp, anx, aDU, be, aGA); #c1(CD3E) c2(NP_000724) c3(T-cell surface glycoprotein CD3 epsilon chain precursor) c4(14890, 14891) c5(14892, 14893, 14894, 14895, 14896, 14897, 14898, 14899, 14900, 14901, 14902, 14903) c6( ) c7(aGB, id, dA, aGC, aGx, fr, ci, hF, cd, ad, aGA, azq, ae, A, je, oV, Y, hp, g, Z, sS, iM, dW, m, y); #c1(CD3EAP) c2(NP_036231) c3(DNA-directed RNA polymerase I subunit RPA34 isoform 2) c4(172498) c5(172499, 172500, 172501, 172502, 172503, 172504, 172505, 172506, 172507) c6( ) c7(Kd, dD, ea, jh, cz, fd, eq, Qo, ai, dL, ji, an, akX, s, Fm, Y, r, bz, sS, VJ, eM, wB); #c1(CD3G) c2(NP_000064) c3(T-cell surface glycoprotein CD3 gamma chain precursor) c4(1096, 1097) c5(1098, 1099, 1100, 1101, 1102, 1103, 1104, 1105, 1106, 1107, 1108, 1109) c6( ) c7(ck, aGC, dA, CM, jh, h, dW, hp, ey, aGD, y, bt); #c1(CD4) c2(NP_000607) c3(T-cell surface glycoprotein CD4 isoform 1 precursor) c4(13694) c5(13695, 13696, 13697, 13698, 13699, 13700, 13701, 13702, 13703, 13704, 13705, 13706, 13707) c6(13708, 13709) c7(bL, fR, jx, fN, fd, hy, qj, V, HC, aT, h, dL, ey, Nr, aGF, BN, A, gT, ff, eZ, uY, lo, po, aoD, en, Nq, ar, eU, iQ, akx, bE, aGE, at, aDE, hE, ne, y); #c1(CD40) c2(NP_001241) c3(tumor necrosis factor receptor superfamily member 5 isoform 1 precursor) c4(89202) c5( ) c6( ) c7(bM, T, fR, pf, ea, e, abM, fd, bB, cL, zh, ci, aY, x, AW, xy, xE, aE, aDk, M, Ds, K, zy, dQ, hH, eL, bc, pk, cp, eG, aW, axu, az, hl, HA, aGQ, g, as, eE, cm, bw, aGI, gt, nB, eM, iA, mx, U, cj, zl, aGN, k, m, Uw, fy, dD, aiK, aw, fN, n, aj, fr, uE, ai, eW, Oe, aGR, jz, no, cU, IG, By, hn, dL, h, eV, he, aGL, A, Cw, zb, gi, aGG, aGM, agb, aga, fe, Og, xe, cM, Wt, asE, kT, bP, aGH, w, aGO, Lp, at, Pr, B, cB, aox, bL, Dw, fM, dA, eR, wL, dK, eX, rf, aA, fF, ti, hz, v, j, aGK, V, eA, J, eJ, zn, ady, oT, mP, aT, Oi, cy, bK, ae, aH, af, bA, eu, qw, hM, aGP, iU, xR, oV, Y, en, t, pb, aFA, ck, rR, OW, ac, agc, wg, of, hr, fP, auT, aor, oX, fD, UF, bt, Ze, zA, id, iW, jh, eq, jE, ad, hX, dP, av, abk, hd, aop, agd, LA, hD, NZ, IQ, ji, MG, lx, cH, cW, Gv, ff, aFE, Of, cr, eZ, gI, aF, hp, jg, iV, bz, aGJ, eK, LB, Bv, age, eU, zr, amS, bE, dO, wz, aS, ei, lf, X, y); #c1(CD40) c2(NP_690593) c3(tumor necrosis factor receptor superfamily member 5 isoform 2 precursor) c4(244871) c5(244872, 244873, 244874, 244875, 244876, 244877) c6( ) c7(bM, T, fR, pf, ea, e, abM, fd, bB, cL, zh, ci, aY, x, AW, xy, xE, aE, aDk, M, Ds, K, zy, dQ, hH, eL, bc, pk, cp, eG, aW, axu, az, hl, HA, aGQ, g, as, eE, cm, bw, aGI, gt, nB, eM, iA, mx, U, cj, zl, aGN, k, m, Uw, fy, dD, aiK, aw, fN, n, aj, fr, uE, ai, eW, Oe, aGR, jz, no, cU, IG, By, hn, dL, h, eV, he, aGL, A, Cw, zb, gi, aGG, aGM, agb, aga, fe, Og, xe, cM, Wt, asE, kT, bP, aGH, w, aGO, Lp, at, Pr, B, cB, aox, bL, Dw, fM, dA, eR, wL, dK, eX, rf, aA, fF, ti, hz, v, j, aGK, V, eA, J, eJ, zn, ady, oT, mP, aT, Oi, cy, bK, ae, aH, af, bA, eu, qw, hM, aGP, iU, xR, oV, Y, en, t, pb, aFA, ck, rR, OW, ac, agc, wg, of, hr, fP, auT, aor, oX, fD, UF, bt, Ze, zA, id, iW, jh, eq, jE, ad, hX, dP, av, abk, hd, aop, agd, LA, hD, NZ, IQ, ji, MG, lx, cH, cW, Gv, ff, aFE, Of, cr, eZ, gl, aF, hp, jg, iV, bz, aGJ, eK, LB, Bv, age, eU, zr, amS, bE, dO, wz, aS, ei, lf, X, y); #c1(CD40) c2(XP_011527411) c3(tumor necrosis factor receptor superfamily member 5 isoform X3) c4( ) c5(322142, 322143) c6( ) c7(bM, T, fR, pf, ea, e, abM, fd, bB, cL, zh, ci, aY, x, AW, xy, xE, aE, aDk, M, Ds, K, zy, dQ, hH, eL, bc, pk, cp, eG, aW, axu, az, hl, HA, aGQ, g, as, eE, cm, bw, aGI, gt, nB, eM, iA, mx, U, cj, zl, aGN, k, m, Uw, fy, dD, aiK, aw, fN, n, aj, fr, uE, ai, eW, Oe, aGR, jz, no, cU, IG, By, hn, dL, h, eV, he, aGL, A, Cw, zb, gi, aGG, aGM, agb, aga, fe, Og, xe, cM, Wt, asE, kT, bP, aGH, w, aGO, Lp, at, Pr, B, cB, aox, bL, Dw, fM, dA, eR, wL, dK, eX, rf, aA, fF, ti, hz, v, j, aGK, V, eA, J, eJ, zn, ady, oT, mP, aT, Oi, cy, bK, ae, aH, af, bA, eu, qw, hM, aGP, iU, xR, oV, Y, en, t, pb, aFA, ck, rR, OW, ac, agc, wg, of, hr, fP, auT, aor, oX, fD, UF, bt, Ze, zA, id, iW, jh, eq, jE, ad, hX, dP, av, abk, hd, aop, agd, LA, hD, NZ, IQ, ji, MG, lx, cH, cW, Gv, ff, aFE, Of, cr, eZ, gl, aF, hp, jg, iV, bz, aGJ, eK, LB, Bv, age, eU, zr, amS, bE, dO, wz, aS, ei, lf, X, y); #c1(CD40LG) c2(NP_000065) c3(CD40 ligand) c4(1110, 1111) c5(1112, 1113, 1114, 1115, 1116, 1117, 1118, 1119, 1120, 1121, 1122, 1123) c6( ) c7(oO, hM, T, ID, ea, e, al, fd, bB, zh, ci, bh, aGX, x, AW, aE, iI, dV, Ds, DY, pk, eL, bc, eN, hm, Ok, Iy, DA, aW, axu, mQ, hl, aGQ, awv, g, aFU, ve, cm, bw, aGI, eM, nB, mx, aiM, cj, U, zI, dW, k, m, R, eg, iu, Re, dD, aw, n, aj, aGU, fr, uE, eh, zo, ai, Oe, ft, jz, kH, h, IG, jy, dL, eV, A, Cw, zb, asK, fe, aq, jT, xe, lx, Wt, asE, aGH, dB, lf, eo, fL, B, bL, Dw, fM, dA, eR, wL, eX, aA, fF, v, j, C, ze, aGK, abC, V, q, J, aGT, eA, ady, mP, rS, aT, Oi, zg, ae, af, eu, kl, aGP, xR, oV, Y, kX, bg, IC, r, awu, en, aoG, t, pb, IY, aFA, ck, ac, c, hc, hr, aGV, wR, dy, fD, bt, Ze, zA, ao, hS, gV, id, iW, axd, jh, dG, eq, hF, mC, aGW, ad, av, abk, hd, ib, tT, ds, IC, NZ, IQ, vl, d, ue, hG, ff, aFE, aGS, cr, eZ, dN, aF, jg, iV, bz, dr, Bv, eU, amS, zr, bE, dO, wz, aS, ME, bC, ei, zk, X, y); #c1(CD44) c2(NP_000601) c3(CD44 antigen isoform 1 precursor) c4(13671) c5(13672, 13673, 13674, 13675, 13676, 13677) c6( ) c7(bM, T, aC, UH, Tb, fR, Zz, ea, if, e, fd, bB, qj, ci, IR, ip, x, afr, aE, iI, rJ, pX, aeO, ajv, K, DY, H, pk, eL, aiJ, cp, aa, eG, yo, aeR, dH, JI, aW, Ls, adw, XV, fc, nY, g, as, pL, hJ, eF, cm, aHd, aAW, aHe, lt, gt, nB, avZ, AV, eM, iA, iT, cj, k, m, iu, dD, vl, ajm, aEj, wu, sw, zX, QO, NT, fg, n, aj, kv, fr, qN, zP, cd, SW, ai, Bl, ft, jz, gd, kH, h, IG, By, hn, dL, ey, SH, hB, Ha, pl, yi, aiB, PX, aGZ, AQ, ahJ, aq, fe, Pp, kp, Hu, Ca, cM, Qy, bP, dB, hk, anZ, vb, hL, hm, E, fL, bD, it, B, bL, fM, dA, Dh, fG, yk, jx, aA, hy, v, j, aHa, hX, acn, aHc, V, pd, q, J, er, eA, eJ, Zp, aEE, mP, Vr, qK, HC, aHb, aT, jj, Fg, ae, ne, af, bA, kl, s, vT, nO, oV, Y, ev, fO, iU, iZ, r, en, cl, t, iK, pb, ck, sS, nM, kP, Dy, ac, iM, nG, aGY, gX, wR, fD, kZ, bt, rA, gx, Gl, nZ, id, Mb, qz, iW, jN, jh, Fb, Gn, eq, EA, Fc, mC, ad, afb, aoH, abZ, dP, hX, hd, ib, av, Tg, Db, NS, akJ, LA, io, hP, lQ, wm, fb, Yi, d, BN, TY, je, ff, eH, eZ, aF, Vl, iV, iR, bz, LB, es, bF, apM, Ew, zr, bE, AR, Hs, cP, adg, Pk, X, y); #c1(CD44) c2(NP_001001389) c3(CD44 antigen isoform 2 precursor) c4(18213) c5(18214, 18215, 18216, 18217, 18218, 18219) c6( ) c7(bM, T, aC, UH, Tb, fR, Zz, ea, if, e, fd, bB, qj, ci, IR, ip, x, afr, aE, iI, rJ, pX, aeO, ajv, K, DY, H, pk, eL, aiJ, cp, aa, eG, yo, aeR, dH, JI, aW, Ls, adw, XV, fc, nY, g, as, pL, hJ, eF, cm, aHd, aAW, aHe, lt, gt, nB, avZ, AV, eM, iA, iT, cj, k, m, iu, dD, vl, ajm, aEj, wu, sw, zX, QO, NT, fg, n, aj, kv, fr, qN, zP, cd, SW, ai, Bl, ft, jz, gd, kH, h, lG, By, hn, dL, ey, SH, hB, Ha, pl, yi, aiB, PX, aGZ, AQ, ahJ, aq, fe, Pp, kp, Hu, Ca, cM, Qy, bP, dB, hk, anZ, vb, hL, bm, E, fL, bD, it, B, bL, fM, dA, Dh, fG, yk, jx, aA, hy, v, j, aHa, bX, acn, aHc, V, pd, q, J, er, eA, eJ, Zp, aEE, mP, Vr, qK, HC, aHb, aT, jj, Fg, ae, ne, af, bA, kI, s, vT, nO, oV, Y, ev, fO, iU, iZ, r, en, cl, t, iK, pb, ck, sS, nM, kP, Dy, ac, iM, nG, aGY, gX, wR, fD, kZ, bt, rA, gx, Gl, nZ, id, Mb, qz, iW, jN, jh, Fb, Gn, eq, EA, Fc, mC, ad, afb, aoH, abZ, dP, hX, hd, ib, av, Tg, Db, NS, akJ, LA, io, hP, lQ, wm, fb, Yi, d, BN, TY, je, ff, eH, eZ, aF, VI, iV, iR, bz, LB, es, bF, apM, Ew, zr, bE, AR, Hs, cP, adg, Pk, X, y); #c1(CD44) c2(NP_001001390) c3(CD44 antigen isoform 3 precursor) c4(18220) c5(18221, 18222, 18223, 18224, 18225, 18226) c6( ) c7(bM, T, aC, UH, Tb, fR, Zz, ea, if, e, fd, bB, qj, ci, IR, ip, x, afr, aE, iI, rJ, pX, aeO, ajv, K, DY, H, pk, eL, aiJ, cp, aa, eG, yo, aeR, dH, Jl, aW, Ls, adw, XV, fc, nY, g, as, pL, hJ, eF, cm, aHd, aAW, aHe, lt, gt, nB, avZ, AV, eM, iA, iT, cj, k, m, iu, dD, vl, ajm, aEj, wu, sw, zX, QO, NT, fg, n, aj, kv, fr, qN, zP, cd, SW, ai, Bl, ft, jz, gd, kH, h, IG, By, hn, dL, ey, SH, hB, Ha, pl, yi, aiB, PX, aGZ, AQ, ahJ, aq, fe, Pp, kp, Hu, Ca, cM, Qy, bP, dB, hk, anZ, vb, hL, bm, E, fL, bD, it, B, bL, fM, dA, Dh, fG, yk, jx, aA, hy, v, j, aHa, bX, acn, aHc, V, pd, q, J, er, eA, eJ, Zp, aEE, mP, Vr, qK, HC, aHb, aT, jj, Fg, ae, ne, af, bA, kl, s, vT, nO, oV, Y, ev, fO, iU, iZ, r, en, cl, t, iK, pb, ck, sS, nM, kP, Dy, ac, iM, nG, aGY, gX, wR, fD, kZ, bt, rA, gx, Gl, nZ, id, Mb, qz, iW, jN, jh, Fb, Gn, eq, EA, Fc, mC, ad, afb, aoH, abZ, dP, hX, hd, ib, av, Tg, Db, NS, akJ, LA, io, hP, lQ, wm, fb, Yi, d, BN, TY, je, ff, eH, eZ, aF, VI, iV, iR, bz, LB, es, bF, apM, Ew, zr, bE, AR, Hs, cP, adg, Pk, X, y); #c1(CD44) c2(NP_001001391) c3(CD44 antigen isoform 4 precursor) c4(18227, 18228) c5(18229, 18230, 18231, 18232, 18233, 18234, 18235) c6( ) c7(bM, T, aC, UH, Tb, fR, Zz, ea, if, e, fd, bB, qj, ci, IR, ip, x, afr, aE, iI, rJ, pX, aeO, ajv, K, DY, H, pk, eL, aiJ, cp, aa, eG, yo, aeR, dH, Jl, aW, Ls, adw, XV, fc, nY, g, as, pL, hJ, eF, cm, aHd, aAW, aHe, lt, gt, nB, avZ, AV, eM, iA, iT, cj, k, m, iu, dD, vl, ajm, aEj, wu, sw, zX, QO, NT, fg, n, aj, kv, fr, qN, zP, cd, SW, ai, Bl, ft, jz, gd, kH, h, IG, By, hn, dL, ey, SH, hB, Ha, pl, yi, aiB, PX, aGZ, AQ, ahJ, aq, fe, Pp, kp, Hu, Ca, cM, Qy, bP, dB, hk, anZ, vb, hL, bm, E, fL, bD, it, B, bL, fM, dA, Dh, fG, yk, jx, aA, hy, v, j, aHa, bX, acn, aHc, V, pd, q, J, er, eA, eJ, Zp, aEE, mP, Vr, qK, HC, aHb, aT, jj, Fg, ae, ne, af, bA, kl, s, vT, nO, oV, Y, ev, fO, iU, iZ, r, en, cl, t, iK, pb, ck, sS, nM, kP, Dy, ac, iM, nG, aGY, gX, wR, fD, kZ, bt, rA, gx, Gl, nZ, id, Mb, qz, iW, jN, jh, Fb, Gn, eq, EA, Fc, mC, ad, afb, aoH, abZ, dP, hX, hd, ib, av, Tg, Db, NS, akJ, LA, io, hP, lQ, wm, fb, Yi, d, BN, TY, je, ff, eH, eZ, aF, VI, iV, iR, bz, LB, es, bF, apM, Ew, zr, bE, AR, Hs, cP, adg, Pk, X, y); #c1(CD44) c2(NP_001001392) c3(CD44 antigen isoform 5 precursor) c4(18236) c5(18237, 18238, 18239, 18240, 18241, 18242, 18243, 18244, 18245, 18246, 18247, 18248, 18249, 18250, 18251, 18252, 18253) c6( ) c7(bM, T, aC, UH, Tb, fR, Zz, ea, if, e, fd, bB, qj, ci, IR, ip, x, afr, aE, iI, rJ, pX, aeO, ajv, K, DY, H, pk, eL, aiJ, cp, aa, eG, yo, aeR, dH, Jl, aW, Ls, adw, XV, fc, nY, g, as, pL, hJ, eF, cm, aHd, aAW, aHe, lt, gt, nB, avZ, AV, eM, iA, iT, cj, k, m, iu, dD, vl, ajm, aEj, wu, sw, zX, QO, NT, fg, n, aj, kv, fr, qN, zP, cd, SW, ai, Bl, ft, jz, gd, kH, h, lG, By, hn, dL, ey, SH, hB, Ha, pl, yi, aiB, PX, aGZ, AQ, ahJ, aq, fe, Pp, kp, Hu, Ca, cM, Qy, bP, dB, hk, anZ, vb, hL, bm, E, fL, bD, it, B, bL, fM, dA, Dh, fG, yk, jx, aA, hy, v, j, aHa, bX, acn, aHc, V, pd, q, J, er, eA, eJ, Zp, aEE, mP, Vr, qK, HC, aHb, aT, jj, Fg, ae, ne, af, bA, kl, s, vT, nO, oV, Y, ev, fO, iU, iZ, r, en, cl, t, iK, pb, ck, sS, nM, kP, Dy, ac, iM, nG, aGY, gX, wR, fD, kZ, bt, rA, gx, Gl, nZ, id, Mb, qz, iW, jN, jh, Fb, Gn, eq, EA, Fc, mC, ad, afb, aoH, abZ, dP, hX, hd, ib, av, Tg, Db, NS, akJ, LA, io, hP, lQ, wm, fb, Yi, d, BN, TY, je, ff, eH, eZ, aF, VI, iV, iR, bz, LB, es, bF, apM, Ew, zr, bE, AR, Hs, cP, adg, Pk, X, y); #c1(CD44) c2(NP_001189484) c3(CD44 antigen isoform 6 precursor) c4(80235, 80236, 80237) c5(80238, 80239, 80240, 80241, 80242, 80243) c6( ) c7(bM, T, aC, UH, Tb, fR, Zz, ea, if, e, fd, bB, qj, ci, IR, ip, x, afr, aE, iI, rJ, pX, aeO, ajv, K, DY, H, pk, eL, aiJ, cp, aa, eG, yo, aeR, dH, Jl, aW, Ls, adw, XV, fc, nY, g, as, pL, hJ, eF, cm, aHd, aAW, aHe, lt, gt, nB, avZ, AV, eM, iA, iT, cj, k, m, iu, dD, vl, ajm, aEj, wu, sw, zX, QO, NT, fg, n, aj, kv, fr, qN, zP, cd, SW, ai, Bl, ft, jz, gd, kH, h, IG, By, hn, dL, ey, SH, hB, Ha, pl, yi, aiB, PX, aGZ, AQ, ahJ, aq, fe, Pp, kp, Hu, Ca, cM, Qy, bP, dB, hk, anZ, vb, hL, bm, E, fL, bD, it, B, bL, fM, dA, Dh, fG, yk, jx, aA, hy, v, j, aHa, bX, acn, aHc, V, pd, q, J, er, eA, eJ, Zp, aEE, mP, Vr, qK, HC, aHb, aT, jj, Fg, ae, ne, af, bA, kl, s, vT, nO, oV, Y, ev, fO, iU, iZ, r, en, cl, t, iK, pb, ck, sS, nM, kP, Dy, ac, iM, nG, aGY, gX, wR, fD, kZ, bt, rA, gx, Gl, nZ, id, Mb, qz, iW, jN, jh, Fb, Gn, eq, EA, Fc, mC, ad, afb, aoH, abZ, dP, hX, hd, ib, av, Tg, Db, NS, akJ, LA, io, hP, lQ, wm, fb, Yi, d, BN, TY, je, ff, eH, eZ, aF, Vl, iV, iR, bz, LB, es, bF, apM, Ew, zr, bE, AR, Hs, cP, adg, Pk, X, y); #c1(CD44) c2(NP_001189485) c3(CD44 antigen isoform 7 precursor) c4(80244) c5(80245, 80246, 80247, 80248, 80249, 80250) c6( ) c7(bM, T, aC, UH, Tb, fR, Zz, ea, if, e, fd, bB, qj, ci, IR, ip, x, afr, aE, iI, rJ, pX, aeO, ajv, K, DY, H, pk, eL, aiJ, cp, aa, eG, yo, aeR, dH, Jl, aW, Ls, adw, XV, fc, nY, g, as, pL, hJ, eF, cm, aHd, aAW, aHe, lt, gt, nB, avZ, AV, eM, iA, iT, cj, k, m, iu, dD, vl, ajm, aEj, wu, sw, zX, QO, NT, fg, n, aj, kv, fr, qN, zP, cd, SW, ai, Bl, ft, jz, gd, kH, h, IG, By, hn, dL, ey, SH, hB, Ha, pl, yi, aiB, PX, aGZ, AQ, ahJ, aq, fe, Pp, kp, Hu, Ca, cM, Qy, bP, dB, hk, anZ, vb, hL, bm, E, fL, bD, it, B, bL, fM, dA, Dh, fG, yk, jx, aA, hy, v, j, aHa, bX, acn, aHc, V, pd, q, J, er, eA, eJ, Zp, aEE, mP, Vr, qK, HC, aHb, aT, jj, Fg, ae, ne, af, bA, kl, s, vT, nO, oV, Y, ev, fO, iU, iZ, r, en, cl, t, iK, pb, ck, sS, nM, kP, Dy, ac, iM, nG, aGY, gX, wR, fD, kZ, bt, rA, gx, Gl, nZ, id, Mb, qz, iW, jN, jh, Fb, Gn, eq, EA, Fc, mC, ad, afb, aoH, abZ, dP, hX, hd, ib, av, Tg, Db, NS, akJ, LA, io, hP, lQ, wm, fb, Yi, d, BN, TY, je, ff, eH, eZ, aF, VI, iV, iR, bz, LB, es, bF, apM, Ew, zr, bE, AR, Hs, cP, adg, Pk, X, y); #c1(CD44) c2(NP_001189486) c3(CD44 antigen isoform 8 precursor) c4( ) c5(80251, 80252, 80253, 80254, 80255, 80256) c6( ) c7(bM, T, aC, UH, Tb, fR, Zz, ea, if, e, fd, bB, qj, ci, IR, ip, x, afr, aE, iI, rJ, PX, aeO, ajv, K, DY, H, pk, eL, aiJ, cp, aa, eG, yo, aeR, dH, Jl, aW, Ls, adw, XV, fc, nY, g, as, pL, hJ, eF, cm, aHd, aAW, aHe, lt, gt, nB, avZ, AV, eM, iA, iT, cj, k, m, iu, dD, vl, ajm, aEj, wu, sw, zX, QO, NT, fg, n, aj, kv, fr, qN, zP, cd, SW, ai, Bl, ft, jz, gd, kH, h, IG, By, hn, dL, ey, SH, hB, Ha, pl, yi, aiB, PX, aGZ, AQ, ahJ, aq, fe, Pp, kp, Hu, Ca, cM, Qy, bP, dB, hk, anZ, vb, hL, bm, E, fL, bD, it, B, bL, fM, dA, Dh, fG, yk, jx, aA, hy, v, j, aHa, bX, acn, aHc, V, pd, q, J, er, eA, eJ, Zp, aEE, mP, Vr, qK, HC, aHb, aT, jj, Fg, ae, ne, af, bA, kl, s, vT, nO, oV, Y, ev, fO, iU, iZ, r, en, cl, t, iK, pb, ck, sS, nM, kP, Dy, ac, iM, nG, aGY, gX, wR, fD, kZ, bt, rA, gx, Gl, nZ, id, Mb, qz, iW, jN, jh, Fb, Gn, eq, EA, Fc, mC, ad, afb, aoH, abZ, dP, hX, hd, ib, av, Tg, Db, NS, akJ, LA, io, hP, lQ, wm, fb, Yi, d, BN, TY, je, ff, eH, eZ, aF, VI, iV, iR, bz, LB, es, bF, apM, Ew, zr, bE, AR, Hs, cP, adg, Pk, X, y); #c1(CD44) c2(XP_005253288) c3(CD44 antigen isoform X1) c4(272410) c5(272411, 272412, 272413, 272414, 272415, 272416) c6( ) c7(bM, T, aC, UH, Tb, fR, Zz, ea, if, e, fd, bB, qj, ci, IR, ip, x, afr, aE, iI, rJ, pX, aeO, ajv, K, DY, H, pk, eL, aiJ, cp, aa, eG, yo, aeR, dH, Jl, aW, Ls, adw, XV, fc, nY, g, as, pL, hJ, eF, cm, aHd, aAW, aHe, lt, gt, nB, avZ, AV, eM, iA, iT, cj, k, m, iu, dD, vl, ajm, aEj, wu, sw, zX, QO, NT, fg, n, aj, kv, fr, qN, zP, cd, SW, ai, Bl, ft, jz, gd, kH, h, IG, By, hn, dL, ey, SH, hB, Ha, pl, yi, aiB, PX, aGZ, AQ, ahJ, aq, fe, Pp, kp, Hu, Ca, cM, Qy, bP, dB, hk, anZ, vb, hL, bm, E, fL, bD, it, B, bL, fM, dA, Dh, fG, yk, jx, aA, hy, v, j, aHa, bX, acn, aHc, V, pd, q, J, er, eA, eJ, Zp, aEE, mP, Vr, qK, HC, aHb, aT, jj, Fg, ae, ne, af, bA, kl, s, vT, nO, oV, Y, ev, fO, iU, iZ, r, en, cl, t, iK, pb, ck, sS, nM, kP, Dy, ac, iM, nG, aGY, gX, wR, fD, kZ, bt, rA, gx, Gl, nZ, id, Mb, qz, iW, jN, jh, Fb, Gn, eq, EA, Fc, mC, ad, afb, aoH, abZ, dP, hX, hd, ib, av, Tg, Db, NS, akJ, LA, io, hP, lQ, wm, fb, Yi, d, BN, TY, je, ff, eH, eZ, aF, VI, iV, iR, bz, LB, es, bF, apM, Ew, zr, bE, AR, Hs, cP, adg, Pk, X, y); #c1(CD44) c2(XP_005253291) c3(CD44 antigen isoform X5) c4( ) c5(272417, 272418, 272419, 272420, 272421, 272422) c6( ) c7(bM, T, aC, UH, Tb, fR, Zz, ea, if, e, fd, bB, qj, ci, IR, ip, x, afr, aE, iI, rJ, pX, aeO, ajv, K, DY, H, pk, eL, aiJ, cp, aa, eG, yo, aeR, dH, Jl, aW, Ls, adw, XV, fc, nY, g, as, pL, hJ, eF, cm, aHd, aAW, aHe, lt, gt, nB, avZ, AV, eM, iA, iT, cj, k, m, iu, dD, vl, ajm, aEj, wu, sw, zX, QO, NT, fg, n, aj, kv, fr, qN, zP, cd, SW, ai, Bl, ft, jz, gd, kH, h, IG, By, hn, dL, ey, SH, hB, Ha, pl, yi, aiB, PX, aGZ, AQ, ahJ, aq, fe, Pp, kp, Hu, Ca, cM, Qy, bP, dB, hk, anZ, vb, hL, bm, E, fL, bD, it, B, bL, fM, dA, Dh, fG, yk, jx, aA, hy, v, j, aHa, bX, acn, aHc, V, pd, q, J, er, eA, eJ, Zp, aEE, mP, Vr, qK, HC, aHb, aT, jj, Fg, ae, ne, af, bA, kl, s, vT, nO, oV, Y, ev, fO, iU, iZ, r, en, cl, t, iK, pb, ck, sS, nM, kP, Dy, ac, iM, nG, aGY, gX, wR, fD, kZ, bt, rA, gx, Gl, nZ, id, Mb, qz, iW, jN, jh, Fb, Gn, eq, EA, Fc, mC, ad, afb, aoH, abZ, dP, hX, hd, ib, av, Tg, Db, NS, akJ, LA, io, hP, lQ, wm, fb, Yi, d, BN, TY, je, ff, eH, eZ, aF, VI, iV, iR, bz, LB, es, bF, apM, Ew, zr, bE, AR, Hs, cP, adg, Pk, X, y); #c1(CD44) c2(XP_006718451) c3(CD44 antigen isoform X3) c4(291875) c5( ) c6( ) c7(bM, T, aC, UH, Tb, fR, Zz, ea, if, e, fd, bB, qj, ci, IR, ip, x, afr, aE, iI, rJ, pX, aeO, ajv, K, DY, H, pk, eL, aiJ, cp, aa, eG, yo, aeR, dH, Jl, aW, Ls, adw, XV, fc, nY, g, as, pL, hJ, eF, cm, aHd, aAW, aHe, lt, gt, nB, avZ, AV, eM, iA, iT, cj, k, m, iu, dD, vl, ajm, aEj, wu, sw, zX, QO, NT, fg, n, aj, kv, fr, qN, zP, cd, SW, ai, Bl, ft, jz, gd, kH, h, IG, By, hn, dL, ey, SH, hB, Ha, pl, yi, aiB, PX, aGZ, AQ, ahJ, aq, fe, Pp, kp, Hu, Ca, cM, Qy, bP, dB, hk, anZ, vb, hL, bm, E, fL, bD, it, B, bL, fM, dA, Dh, fG, yk, jx, aA, hy, v, j, aHa, bX, acn, aHc, V, pd, q, J, er, eA, eJ, Zp, aEE, mP, Vr, qK, HC, aHb, aT, jj, Fg, ae, ne, af, bA, kl, s, vT, nO, oV, Y, ev, fO, iU, iZ, r, en, cl, t, iK, pb, ck, sS, nM, kP, Dy, ac, iM, nG, aGY, gX, wR, fD, kZ, bt, rA, gx, Gl, nZ, id, Mb, qz, iW, jN, jh, Fb, Gn, eq, EA, Fc, mC, ad, afb, aoH, abZ, dP, hX, hd, ib, av, Tg, Db, NS, akJ, LA, io, hP, lQ, wm, fb, Yi, d, BN, TY, je, ff, eH, eZ, aF, VI, iV, iR, bz, LB, es, bF, apM, Ew, zr, bE, AR, Hs, cP, adg, Pk, X, y); #c1(CD44) c2(XP_011518784) c3(CD44 antigen isoform X7) c4(313181) c5(313182, 313183, 313184, 313185, 313186, 313187) c6( ) c7(bM, T, aC, UH, Tb, fR, Zz, ea, if, e, fd, bB, qj, ci, IR, ip, x, afr, aE, iI, rJ, pX, aeO, ajv, K, DY, H, pk, eL, aiJ, cp, aa, eG, yo, aeR, dH, Jl, aW, Ls, adw, XV, fc, nY, g, as, pL, hJ, eF, cm, aHd, aAW, aHe, lt, gt, nB, avZ, AV, eM, iA, iT, cj, k, m, iu, dD, vl, ajm, aEj, wu, sw, zX, QO, NT, fg, n, aj, kv, fr, qN, zP, cd, SW, ai, Bl, ft, jz, gd, kH, h, lG, By, hn, dL, ey, SH, hB, Ha, pl, yi, aiB, PX, aGZ, AQ, ahJ, aq, fe, Pp, kp, Hu, Ca, cM, Qy, bP, dB, hk, anZ, vb, hL, bm, E, fL, bD, it, B, bL, fM, dA, Dh, fG, yk, jx, aA, hy, v, j, aHa, bX, acn, aHc, V, pd, q, J, er, eA, eJ, Zp, aEE, mP, Vr, qK, HC, aHb, aT, jj, Fg, ae, ne, af, bA, kl, s, vT, nO, oV, Y, ev, fO, iU, iZ, r, en, cl, t, iK, pb, ck, sS, nM, kP, Dy, ac, iM, nG, aGY, gX, wR, fD, kZ, bt, rA, gx, Gl, nZ, id, Mb, qz, iW, jN, jh, Fb, Gn, eq, EA, Fc, mC, ad, afb, aoH, abZ, dP, hX, hd, ib, av, Tg, Db, NS, akJ, LA, io, hP, lQ, wm, fb, Yi, d, BN, TY, je, ff, eH, eZ, aF, VI, iV, iR, bz, LB, es, bF, apM, Ew, zr, bE, AR, Hs, cP, adg, Pk, X, y); #c1(CD44) c2(XP_011518790) c3(CD44 antigen isoform X16) c4(313188) c5(313189, 313190, 313191, 313192, 313193, 313194) c6( ) c7(bM, T, aC, UH, Tb, fR, Zz, ea, if, e, fd, bB, qj, ci, IR, ip, x, afr, aE, iI, rJ, pX, aeO, ajv, K, DY, H, pk, eL, aiJ, cp, aa, eG, yo, aeR, dH, Jl, aW, Ls, adw, XV, fc, nY, g, as, pL, hJ, eF, cm, aHd, aAW, aHe, lt, gt, nB, avZ, AV, eM, iA, iT, cj, k, m, iu, dD, vl, ajm, aEj, wu, sw, zX, QO, NT, fg, n, aj, kv, fr, qN, zP, cd, SW, ai, Bl, ft, jz, gd, kH, h, lG, By, hn, dL, ey, SH, hB, Ha, pl, yi, aiB, PX, aGZ, AQ, ahJ, aq, fe, Pp, kp, Hu, Ca, cM, Qy, bP, dB, hk, anZ, vb, hL, bm, E, fL, bD, it, B, bL, fM, dA, Dh, fG, yk, jx, aA, hy, v, j, aHa, bX, acn, aHc, V, pd, q, J, er, eA, eJ, Zp, aEE, mP, Vr, qK, HC, aHb, aT, jj, Fg, ae, ne, af, bA, kl, s, vT, nO, oV, Y, ev, fO, iU, iZ, r, en, cl, t, iK, pb, ck, sS, nM, kP, Dy, ac, iM, nG, aGY, gX, wR, fD, kZ, bt, rA, gx, Gl, nZ, id, Mb, qz, iW, jN, jh, Fb, Gn, eq, EA, Fc, mC, ad, afb, aoH, abZ, dP, hX, hd, ib, av, Tg, Db, NS, akJ, LA, io, hP, lQ, wm, fb, Yi, d, BN, TY, je, ff, eH, eZ, aF, VI, iV, iR, bz, LB, es, bF, apM, Ew, zr, bE, AR, Hs, cP, adg, Pk, X, y); #c1(CD46) c2(NP_002380) c3(membrane cofactor protein isoform 1 precursor) c4(127987) c5(127988, 127989, 127990, 127991, 127992, 127993) c6( ) c7(T, fR, if, ci, aY, K, aHf, aHg, aW, uY, pD, g, as, eF, cm, wT, eM, acw, Hb, m, hh, pJ, n, uE, qN, cd, ai, ke, ql, h, db, Gw, EU, aq, CQ, iO, ok, W, dB, eD, at, eo, B, EM, eR, AL, kA, V, eA, zT, Yn, aT, GQ, cy, ae, af, Uf, Y, lo, en, t, iK, aHi, sn, hc, DW, dy, JH, bH, hS, iW, oA, jh, hF, ad, ib, oj, aHh, aGF, qZ, ff, eH, eZ, bz, LB, IM, DH); #c1(CD46) c2(NP_722548) c3(membrane cofactor protein isoform 4 precursor) c4(246821, 246822) c5(246823, 246824, 246825, 246826, 246827, 246828) c6( ) c7(T, fR, if, ci, aY, K, aHf, aHg, aW, uY, pD, g, as, eF, cm, wT, eM, acw, Hb, m, hh, pJ, n, uE, qN, cd, ai, ke, ql, h, db, Cw, EU, aq, CQ, iO, ok, W, dB, eD, at, en, B, EM, eR, AL, kA, V, eA, zT, Yn, aT, GQ, cy, ae, af, Uf, Y, lo, en, t, iK, aHi, sn, hc, DW, dy, JH, bH, hS, iW, oA, jh, hF, ad, ib, oj, aHh, aGF, qZ, ff, eH, eZ, bz, LB, IM, DH); #c1(CD46) c2(NP_758860) c3(membrane cofactor protein isoform 14 precursor) c4(249294) c5(249295, 249296, 249297, 249298, 249299, 249300, 249301, 249302, 249303, 249304, 249305, 249306) c6( ) c7(T, fR, if, ci, aY, K, aHf, aHg, aW, uY, pD, g, as, eF, cm, wT, eM, acw, Hb, m, hh, pJ, n, uE, qN, cd, ai, ke, ql, h, db, Cw, EU, aq, CQ, iO, ok, W, dB, eD, at, eo, B, EM, eR, AL, kA, V, eA, zT, Yn, aT, GQ, cy, ae, af, Uf, Y, lo, en, t, iK, aHi, sn, hc, DW, dy, JH, bH, hS, iW, oA, jh, hF, ad, ib, oj, aHh, aGF, qZ, ff, eH, eZ, bz, LB, IM, DH); #c1(CD46) c2(NP_758861) c3(membrane cofactor protein isoform 3 precursor) c4(249307) c5(249308, 249309, 249310, 249311, 249312, 249313) c6( ) c7(T, fR, if, ci, aY, K, aHf, aHg, aW, uY, pD, g, as, eF, cm, wT, eM, acw, Hb, m, hh, pJ, n, uE, qN, cd, ai, ke, ql, h, db, Cw, EU, aq, CQ, iO, ok, W, dB, eD, at, eo, B, EM, eR, AL, kA, V, eA, zT, Yn, aT, GQ, cy, ae, af, Uf, Y, lo, en, t, iK, aHi, sn, hc, DW, dy, JH, bH, hS, iW, oA, jh, hF, ad, ib, oj, aHh, aGF, qZ, ff, eH, eZ, bz, LB, IM, DH); #c1(CD46) c2(NP_758862) c3(membrane cofactor protein isoform 5 precursor) c4(249314) c5(249315, 249316, 249317, 249318, 249319, 249320) c6( ) c7(T, fR, if, ci, aY, K, aHf, aHg, aW, uY, pD, g, as, eF, cm, wT, eM, acw, Hb, m, hh, pJ, n, uE, qN, cd, ai, ke, ql, h, db, Cw, EU, aq, CQ, iO, ok, W, dB, eD, at, eo, B, EM, eR, AL, kA, V, eA, zT, Yn, aT, GQ, cy, ae, af, Uf, Y, lo, en, t, iK, aHi, sn, hc, DW, dy, JH, bH, hS, iW, oA, jh, hF, ad, ib, oj, aHh, aGF, qZ, ff, eH, eZ, bz, LB, IM, DH); #c1(CD46) c2(NP_758863) c3(membrane cofactor protein isoform 6 precursor) c4(249321) c5(249322, 249323, 249324, 249325, 249326, 249327) c6( ) c7(T, fR, if, ci, aY, K, aHf, aHg, aW, uY, pD, g, as, eF, cm, wT, eM, acw, Hb, m, hh, pJ, n, uE, qN, cd, ai, ke, ql, h, db, Cw, EU, aq, CQ, iO, ok, W, dB, eD, at, eo, B, EM, eR, AL, kA, V, eA, zT, Yn, aT, GQ, cy, ae, af, Uf, Y, lo, en, t, iK, aHi, sn, hc, DW, dy, JH, bH, hS, iW, oA, jh, hF, ad, ib, oj, aHh, aGF, qZ, ff, eH, eZ, bz, LB, IM, dH); #c1(CD46) c2(NP_758869) c3(membrane cofactor protein isoform 2 precursor) c4(249328, 249329) c5(249330, 249331, 249332, 249333, 249334, 249335, 249336, 249337, 249338, 249339, 249340, 249341) c6( ) c7(T, fR, if, ci, aY, K, aHf, aHg, aW, uY, pD, g, as, eF, cm, wT, eM, acw, Hb, m, hh, pJ, n, uE, qN, cd, ai, ke, ql, h, db, Cw, EU, aq, CQ, iO, ok, W, dB, eD, at, eo, B, EM, eR, AL, kA, V, eA, zT, Yn, aT, GQ, cy, ae, af, Uf, Y, lo, en, t, iK, aHi, sn, hc, DW, dy, JH, bH, hS, iW, oA, jh, hF, ad, ib, oj, aHh, aGF, qZ, ff, eH, eZ, bz, LB, IM, DH); #c1(CD46) c2(NP_758871) c3(membrane cofactor protein isoform 12 precursor) c4(249342) c5(249343, 249344, 249345, 249346, 249347, 249348) c6( ) c7(T, fR, if, ci, aY, K, aHf, aHg, aW, uY, pD, g, as, eF, cm, wT, eM, acw, Hb, m, hh, pJ, n, uE, qN, cd, ai, ke, ql, h, db, Cw, EU, aq, CQ, iO, ok, W, dB, eD, at, eo, B, EM, eR, AL, kA, V, eA, zT, Yn, aT, GQ, cy, ae, af, Uf, Y, lo, en, t, iK, aHi, sn, hc, DW, dy, JH, bH, hS, iW, oA, jh, hF, ad, ib, oj, aHh, aGF, qZ, ff, eH, eZ, bz, LB, IM, DH); #c1(CD46) c2(XP_011507865) c3(membrane cofactor protein isoform X1) c4(298029) c5(298030, 298031, 298032, 298033, 298034, 298035) c6( ) c7(T, fR, if, ci, aY, K, aHf, aHg, aW, uY, pD, g, as, eF, cm, wT, eM, acw, Hb, m, hh, pJ, n, uE, qN, cd, ai, ke, ql, h, db, Cw, EU, aq, CQ, iO, ok, W, dB, eD, at, eo, B, EM, eR, AL, kA, V, eA, zT, Yn, aT, GQ, cy, ae, af, Uf, Y, lo, en, t, iK, aHi, sn, hc, DW, dy, JH, bH, hS, iW, oA, jh, hF, ad, ib, oj, aHh, aGF, qZ, ff, eH, eZ, bz, LB, IM, DH); #c1(CD46) c2(XP_011507866) c3(membrane cofactor protein isoform X2) c4(298036) c5(298037, 298038, 298039, 298040, 298041, 298042) c6( ) c7(T, fR, if, ci, aY, K, aHf, aHg, aW, uY, pD, g, as, eF, cm, wT, eM, acw, Hb, m, hh, pJ, n, uE, qN, cd, ai, ke, ql, h, db, Cw, EU, aq, CQ, iO, ok, W, dB, eD, at, eo, B, EM, eR, AL, kA, V, eA, zT, Yn, aT, GQ, cy, ae, af, Uf, Y, lo, en, t, iK, aHi, sn, hc, DW, dy, JH, bH, hS, iW, oA, jh, hF, ad, ib, oj, aHh, aGF, qZ, ff, eH, eZ, bz, LB, IM, DH); #c1(CD47) c2(NP_001768) c3(leukocyte surface antigen CD47 isoform 1 precursor) c4(120964) c5(120965, 120966, 120967, 120968, 120969, 120970) c6( ) c7(lD, T, if, eX, jh, fd, n, ci, qN, PJ, pz, V, aHj, ai, ad, aE, Dq, dv, aT, kf, cy, vH, dL, eV, K, jj, DY, ae, eL, cp, ly, d, MD, nO, aW, Y, oV, hl, aq, S, as, pm, aaO, iR, iK, bz, bw, lx, yR, LB, ck, VJ, kP, ac, zr, bE, iT, HN, cj, eo, k, hh, bt, kS, B); #c1(CD47) c2(NP_942088) c3(leukocyte surface antigen CD47 isoform 2 precursor) c4(260452) c5(260453, 260454, 260455, 260456, 260457, 260458) c6( ) c7(lD, T, if, eX, jh, fd, n, ci, qN, PJ, pz, V, aHj, ai, ad, aE, Dq, dv, aT, kf, cy, vH, dL, eV, K, jj, DY, ae, eL, cp, ly, d, Md, nO, aW, Y, oV, hl, aq, S, as, pm, aaO, iR, iK, bz, bw, lx, yR, LB, ck, VJ, kP, ac, zr, bE, iT, HN, cj, eo, k, hh, bt, kS, B); #c1(CD48) c2(NP_001769) c3(CD48 antigen isoform 1 precursor) c4(120971) c5(120972, 120973, 120974, 120975, 120976, 120977) c6( ) c7(T, jh, mC, ad, x, aT, ae, HZ, aW, Pg, eZ, bw, mK, ck, kz, wR, dW, fL, k, y, bt, fh); #c1(CD48) c2(XP_005245682) c3(CD48 antigen isoform X2) c4(266901) c5(266902, 266903, 266904, 266905, 266906, 266907) c6( ) c7(T, jh, mC, ad, x, aT, ae, HZ, aW, Pg, eZ, bw, mK, ck, kz, wR, dW, fL, k, y, bt, fh); #c1(CD5) c2(NP_055022) c3(T-cell surface glycoprotein CD5 precursor) c4(178334) c5(178335, 178336, 178337, 178338, 178339, 178340) c6( ) c7(Cv, ck, T, fM, iM, je, iW, jh, cj, fd, hn, aHk, y); #c1(CD55) c2(NP_000565) c3(complement decay-accelerating factor isoform 1 preproprotein) c4(12713, 12714) c5(12715, 12716, 12717, 12718, 12719, 12720, 12721, 12722, 12723, 12724, 12725, 12726, 12727, 12728, 12729, 12730, 12731, 12732, 12733, 12734, 12735, 12736, 12737) c6( ) c7(oO, sY, T, fR, iW, jN, jh, bB, mN, j, ci, hF, aHj, q, br, ad, ai, dP, aT, lG, ji, K, wt, xa, aHo, aHp, hM, iU, aW, r, aq, lo, aF, as, iV, t, Bu, uC, f, cm, bw, LB, yd, ck, aHm, W, aHn, bE, kz, X, cj, uJ, dW, m, y, fh, B, aHl); #c1(CD55) c2(NP_001108224) c3(complement decay-accelerating factor isoform 2 precursor) c4(43161, 43162) c5(43163, 43164, 43165, 43166, 43167, 43168) c6( ) c7(oO, sY, T, fR, iW, jN, jh, bB, mN, j, ci, hF, aHj, q, br, ad, ai, dP, aT, lG, ji, K, wt, xa, aHo, aHp, hM, iU, aW, r, aq, lo, aF, as, iV, t, Bu, uC, f, cm, bw, LB, yd, ck, aHm, W, aHn, bE, kz, X, cj, uJ, dW, m, y, fh, B, aHl); #c1(CD55) c2(NP_001287831) c3(complement decay-accelerating factor isoform 5 precursor) c4( ) c5(112967) c6( ) c7(oO, sY, T, fR, iW, jN, jh, bB, mN, j, ci, hF, aHj, q, br, ad, ai, dP, aT, lG, ji, K, wt, xa, aHo, aHp, hM, iU, aW, r, aq, lo, aF, as, iV, t, Bu, uC, f, cm, bw, LB, yd, ck, aHm, W, aHn, bE, kz, X, cj, uJ, dW, m, y, fh, B, aHl); #c1(CD55) c2(NP_001287832) c3(complement decay-accelerating factor isoform 6 precursor) c4(112968) c5(112969, 112970, 112971, 112972, 112973, 112974, 112975, 112976, 112977) c6( ) c7(oO, sY, T, fR, iW, jN, jh, bB, mN, j, ci, hF, aHj, q, br, ad, ai, dP, aT, lG, ji, K, wt, xa, aHo, aHp, hM, iU, aW, r, aq, lo, aF, as, iV, t, Bu, uC, f, cm, bw, LB, yd, ck, aHm, W, aHn, bE, kz, X, cj, uJ, dW, m, y, fh, B, aHl); #c1(CD55) c2(NP_001287833) c3(complement decay-accelerating factor isoform 7 precursor) c4(112978, 112979) c5(112980, 112981, 112982, 112983, 112984, 112985) c6( ) c7(oO, sY, T, fR, iW, jN, jh, bB, mN, j, ci, hF, aHj, q, br, ad, ai, dP, aT, lG, ji, K, wt, xa, aHo, aHp, hM, iU, aW, r, aq, lo, aF, as, iV, t, Bu, uC, f, cm, bw, LB, yd, ck, aHm, W, aHn, bE, kz, X, cj, uJ, dW, m, y, fh, B, aHl); #c1(CD59) c2(NP_001120695) c3(CD59 glycoprotein preproprotein) c4(44631) c5(44632, 44633, 44634, 44635, 44636, 44637, 44638, 44639, 44640, 44641, 44642, 44643, 44644, 44645, 44646, 44647, 44648, 44649, 44650, 44651, 44652, 44653, 44654, 44655, 44656, 44657, 44658, 44659, 44660, 44661, 44662, 44663, 44664, 44665, 44666, 44667, 44668, 44669, 44670, 44671, 44672, 44673, 44674, 44675, 44676, 44677, 44678, 44679, 44680, 44681, 44682, 44683, 44684, 44685, 44686, 44687) c6( ) c7(aHq, T, fR, ea, e, ci, aY, gH, K, aHo, azh, aa, xQ, EV, aW, zC, g, cm, bw, GR, Uk, yd, eM, TG, mx, vy, cj, dW, m, dD, aw, cQ, aj, ct, nA, aHj, cd, br, ai, eW, b, cc, lG, jy, ey, alY, A, MD, EU, aq, mo, W, Fi, kz, ajn, mg, bm, nL, va, B, tq, bL, aHl, eR, aA, cz, v, j, nS, q, J, er, aT, yu, Oi, ae, af, iU, Y, fO, r, en, t, f, ck, cl, hc, fP, mf, dy, bt, an, qb, aZ, iW, jh, Hn, bS, dG, jE, eq, hF, ad, hX, fU, oW, vc, aHp, aGF, Gy, lR, cW, ff, aF, hp, avG, Z, Hl, bz, axs, ei, i, y, fh, X); #c1(CD5L) c2(NP_005885) c3(CD5 antigen-like precursor) c4(160112) c5(160113, 160114, 160115, 160116, 160117, 160118) c6( ) c7(aE, pZ, WE, EQ, hD, fe, dw, Fg, af); #c1(CD6) c2(NP_001241679) c3(T-cell differentiation antigen CD6 isoform 2 precursor) c4(89041) c5(89042, 89043, 89044, 89045, 89046, 89047) c6( ) c7(aiu, aiF, T, fM, YU, FG, aHA, aHt, aHx, jh, aHv, oY, aHC, jE, ci, aHy, aY, V, hF, avD, br, ip, afb, lS, iJ, x, b, fX, aHu, Rq, pe, i, Bj, zK, aT, aHs, dz, hn, rO, K, in, jj, pk, dx, cp, Nr, iU, et, pr, aW, Y, TH, FD, bw, po, aHw, hf, eF, f, adj, aHr, QA, atb, op, iN, Ng, ck, ou, Dy, iT, vA, au, aHB, cj, hj, pg, Fk, k, bC, azr, aiG, aHz, bt, y); #c1(CD6) c2(NP_001241680) c3(T-cell differentiation antigen CD6 isoform 3 precursor) c4(89048) c5(89049, 89050, 89051, 89052, 89053, 89054) c6( ) c7(aiu, aiF, T, fM, YU, FG, aHA, aHt, aHx, jh, aHv, oY, aHC, jE, ci, aHy, aY, V, hF, avD, br, ip, afb, lS, iJ, x, b, fX, aHu, Rq, pe, i, Bj, zK, aT, aHs, dz, hn, rO, K, in, jj, pk, dx, cp, Nr, iU, et, pr, aW, Y, TH, ED, bw, po, aHw, hf, eF, f, adj, aHr, QA, atb, op, iN, Nq, ck, ou, Dy, iT, vA, au, aHB, cj, hj, pg, Fk, k, bC, azr, aiG, aHz, bt, y); #c1(CD6) c2(NP_006716) c3(T-cell differentiation antigen COG isoform 1 precursor) c4(167378) c5(167379, 167380, 167381, 167382, 167383, 167384) c6( ) c7(aiu, aiF, T, fM, YU, fG, aHA, aHt, aHx, jh, aHv, oY, aHC, jE, ci, aHy, aY, V, hF, avD, br, ip, afb, lS, iJ, x, b, fX, aHu, Rq, pe, i, Bj, zK, aT, aHs, dz, hn, rO, K, in, jj, pk, dx, cp, Nr, iU, et, pr, aW, Y, TH, FD, bw, po, aHw, hf, eF, f, adj, aHr, QA, atb, op, iN, Ng, ck, ou, Dy, iT, vA, au, aHB, cj, hj, pg, Fk, k, bC, azr, aiG, aHz, bt, y); #c1(CD6) c2(XP_006718801) c3(T-cell differentiation antigen COG isoform X2) c4(292004) c5(292005, 292006, 292007, 292008, 292009, 292010) c6( ) c7(aiu, aiF, T, fM, YU, FG, aHA, aHt, aHx, jh, aHv, oY, aHC, jE, ci, aHy, aY, V, hF, avD, br, ip, afb, lS, iJ, x, b, fX, aHu, Rq, pe, i, Bj, zK, aT, aHs, dz, hn, rO, K, in, jj, pk, dx, cp, Nr, iU, et, pr, aW, Y, TH, FD, bw, po, aHw, hf, eF, f, adj, aHr, QA, atb, op, iN, Nq, ck, ou, Dy, iT, vA, au, aHB, cj, hj, pg, Fk, k, bC, azr, aiG, aHz, bt, y); #c1(CD6) c2(XP_006718804) c3(T-cell differentiation antigen COG isoform X6) c4(292011) c5(292012, 292013, 292014, 292015, 292016, 292017) c6( ) c7(aiu, aiF, T, fM, YU, FG, aHA, aHt, aHx, jh, aHv, oY, aHC, jE, ci, aHy, aY, V, hF, avD, br, ip, afb, lS, iJ, x, b, fX, aHu, Rq, pe, i, Bj, zK, aT, aHs, dz, hn, rO, K, in, jj, pk, dx, cp, Nr, iU, et, pr, aW, Y, TH, FD, bw, po, aHw, hf, eF, f, adj, aHr, QA, atb, op, iN, Nq, ck, ou, Dy, iT, vA, au, aHB, cj, hj, pg, Fk, k, bC, azr, aiG, aHz, bt, y); #c1(CDG3) c2(NP_001244321) c3(CD63 antigen isoform C) c4(92156) c5(92157, 92158, 92159, 92160, 92161, 92162) c6( ) c7(T, fR, jp, bB, Fc, eA, aT, h, By, aHD, Cy, cp, aHE, tN, d, aW, Y, oV, g, as, pm, t, Vk, Hp, cT, nM, Dy, pc, aki, bE, at, pg, m, y); #c1(CD63) c2(NP_001244330) c3(CD63 antigen isoform D precursor) c4( ) c5(92181, 92182, 92183, 92184, 92185, 92186, 92187, 92188) c6( ) c7(T, fR, jp, bB, Fc, eA, aT, h, By, aHD, Cy, cp, aHE, tN, d, aW, Y, oV, g, as, pm, t, Vk, Hp, cT, nM, Dy, pc, aki, bE, at, pg, m, y); #c1(CD63) c2(NP_001254627) c3(CD63 antigen isoform A) c4(94674, 94675, 94676, 94677, 94678, 94679) c5(94680, 94681, 94682, 94683, 94684, 94685, 94686, 94687, 94688, 94689, 94690, 94691, 94692, 94693, 94694, 94695, 94696, 94697, 94698, 94699, 94700, 94701, 94702, 94703, 94704, 94705, 94706, 94707, 94708, 94709, 94710, 94711, 94712, 94713, 94714, 94715, 94716, 94717, 94718, 94719) c6( ) c7(T, fR, jp, bB, Fc, eA, aT, h, By, aHD, Cy, cp, aHE, tN, d, aW, Y, oV, g, as, pm, t, Vk, Hp, cT, nM, Dy, pc, aki, bE, at, pg, m, y); #c1(CD68) c2(NP_001035148) c3(macrosialin isoform B precursor) c4(32531) c5(32532, 32533, 32534, 32535, 32536, 32537) c6( ) c7(bM, T, apr, ea, l, fd, bB, ci, aY, aR, ip, aao, xE, rw, K, dQ, H, li, aW, lh, pL, bw, GR, iP, y, Qw, m, cZ, dD, zt, fr, PJ, Tl, cd, b, h, By, ey, dd, Xh, nP, mR, anP, fe, aFx, JM, bm, at, L, bL, eR, jx, aA, v, j, mP, hW, aT, cy, bq, kU, af, bf, iU, oV, Y, r, lo, t, pb, aHG, dS, sS, iM, mf, fD, zu, vi, kh, atY, aZ, eq, atK, iJ, ad, dP, aHF, av, aaZ, F, ib, acQ, uQ, hZ, je, cW, cr, yy, aF, Fq, iV, bz, aS, i, hE, jr); #c1(CD68) c2(NP_001242) c3(macrosialin isoform A precursor) c4(89513) c5( ) c6( ) c7(bM, T, apr, ea, l, fd, bB, ci, aY, aR, ip, aao, xE, rw, K, dQ, H, li, aW, lh, pL, bw, GR, iP, y, Qw, m, cZ, dD, zt, fr, PJ, Tl, cd, b, h, By, ey, dd, Xh, nP, mR, anP, fe, aFx, JM, bm, at, L, bL, eR, jx, aA, v, j, mP, hW, aT, cy, bq, kU, af, bf, iU, oV, Y, r, lo, t, pb, aHG, dS, sS, iM, mf, fD, zu, vi, kh, atY, aZ, eq, atK, iJ, ad, dP, aHF, av, aaZ, F, ib, acQ, uQ, hZ, je, cW, cr, yy, aF, Fq, iV, bz, aS, i, hE, jr); #c1(CD69) c2(NP_001772) c3(early activation antigen CD69) c4(120978, 120979) c5(120980, 120981, 120982, 120983, 120984, 120985, 120986, 120987, 120988, 120989, 120990, 120991) c6( ) c7(gx, bM, dA, aHH, jh, wV, lR, jE, wy, ai, cd, eA, ip, x, cc, F, xE, lg, aE, h, hK, hH, Fg, ae, hM, A, mR, bf, oV, WE, yL, fO, CM, eZ, fe, BG, dw, bw, iK, pb, Wt, pZ, cj, k, be, y, B); #c1(CD7) c2(NP_006128) c3(T-cell antigen CD7 precursor) c4(162274) c5(162275, 162276, 162277, 162278, 162279, 162280) c6( ) c7(x, xR, auT, k, PJ, hF, bt, hS); #c1(CD72) c2(NP_001773) c3(B-cell differentiation antigen CD72) c4(120992, 120993, 120994, 120995) c5(120996, 120997, 120998, 120999, 121000, 121001, 121002, 121003, 121004, 121005, 121006, 121007, 121008, 121009, 121010, 121011) c6( ) c7(x, fL, DY, k, eZ); #c1(CD72) c2(XP_011516377) c3(B-cell differentiation antigen CD72 isoform X3) c4( ) c5(309598, 309599, 309600, 309601, 309602, 309603, 309604, 309605, 309606, 309607, 309608, 309609, 309610) c6( ) c7(x, fL, DY, k, eZ); #c1(CD74) c2(NP_001020329) c3(HLA class II histocompatibility antigen gamma chain isoform c) c4(28574) c5(28575, 28576, 28577, 28578, 28579, 28580, 28581, 28582, 28583, 28584, 28585, 28586, 28587, 28588, 28589, 28590, 28591) c6( ) c7(T, dD, ea, e, qy, fd, vr, jh, eq, ci, bh, fr, cd, mC, ad, eA, dP, av, ib, aE, py, aEu, aT, h, cy, bc, d, s, nO, Y, ff, Ib, eZ, dN, dq, lo, hp, en, g, iV, cM, bz, es, eM, iA, cj, aEs, at, fL, B); #c1(CD74) c2(NP_001020330) c3(HLA class II histocompatibility antigen gamma chain isoform a) c4(28592, 28593) c5(28594, 28595, 28596, 28597, 28598, 28599, 28600, 28601, 28602, 28603, 28604, 28605, 28606, 28607, 28608, 28609) c6( ) c7(T, dD, ea, e, qy, fd, vr, jh, eq, ci, bh, fr, cd, mC, ad, eA, dP, av, ib, aE, py, aEu, aT, h, cy, be, d, s, nO, Y, ff, lb, eZ, dN, dq, lo, hp, en, g, iV, cM, bz, es, eM, iA, cj, aEs, at, fL, B); #c1(CD74) c2(NP_004346) c3(HLA class II histocompatibility antigen gamma chain isoform b) c4(145538, 145539, 145540) c5(145541, 145542, 145543, 145544, 145545, 145546) c6( ) c7(T, dD, ea, e, qy, fd, vr, jh, eq, ci, bh, fr, cd, mC, ad, eA, dP, av, ib, aE, py, aEu, aT, h, cy, bc, d, s, nO, Y, ff, lb, eZ, dN, dq, lo, hp, en, g, iV, cM, bz, es, eM, iA, cj, aEs, at, fL, B); #c1(CD79A) c2(NP_001774) c3(B-cell antigen receptor complex-associated protein alpha chain isoform 1 precursor) c4(121012) c5(121013, 121014, 121015, 121016, 121017, 121018) c6( ) c7(T, aov, fM, aBe, iW, jh, fd, aHl, hF, x, CJ, pe, pp, oG, ds, aT, h, ey, bc, Of, Og, bz, ck, amS, Zg, cj, k, bt, Ze); #c1(CD79A) c2(NP_067612) c3(B-cell antigen receptor complex-associated protein alpha chain isoform 2 precursor) c4(209052) c5(209053, 209054, 209055, 209056, 209057, 209058) c6( ) c7(T, aov, fM, aBe, iW, jh, fd, aHl, hf, x, CJ, pe, pp, oG, ds, aT, h, ey, bc, Of, Og, bz, ck, amS, Zg, cj, k, bt, Ze); #c1(CD798) c2(NP_000617) c3(B-cell antigen receptor complex-associated protein beta chain isoform 1 precursor) c4(13963) c5(13964, 13965, 13966, 13967, 13968, 13969, 13970, 13971) c6( ) c7(gV, T, fM, iW, eX, jh, fd, apZ, aHK, zn, x, afm, aHJ, eV, hG, hl, eZ, hf, ck, ou, cj, Ze); #c1(CD798) c2(NP_001035022) c3(B-cell antigen receptor complex-associated protein beta chain isoform 3 precursor) c4(32430) c5(32431, 32432, 32433, 32434, 32435, 32436) c6( ) c7(gV, T, fM, iW, eX, jh, fd, apZ, aHK, zn, x, afm, aHJ, eV, hG, hl, eZ, hf, ck, ou, cj, Ze); #c1(CD798) c2(NP_067613) c3(B-cell antigen receptor complex-associated protein beta chain isoform 2 precursor) c4(209059) c5(209060, 209061, 209062, 209063, 209064, 209065) c6( ) c7(gV, T, fM, iW, eX, jh, fd, apZ, aHK, zn, x, afm, aHJ, eV, hG, hl, eZ, hf, ck, ou, cj, Ze); #c1(CD80) c2(NP_005182) c3(T-lymphocyte activation antigen CD80 precursor) c4(153684) c5(153685, 153686, 153687, 153688, 153689, 153690, 153691, 153692, 153693, 153694) c6( ) c7(bM, T, fR, if, fd, qj, ci, aR, x, xy, Ds, hu, eL, bc, aW, g, cm, iP, ha, eM, cj, k, m, uL, ht, aj, fr, qN, eW, aHN, h, eV, dL, ey, xP, Nr, A, po, dB, at, bk, fL, B, Dw, fM, jx, eX, aA, zN, j, C, aHM, V, q, J, eA, mP, aT, PK, iU, Y, bg, r, lo, en, ck, iM, yW, fP, bt, gx, id, axd, jh, ah, fu, mC, Pm, wD, hX, ds, lQ, uQ, je, qZ, ff, eZ, aF, xH, hp, iV, bz, Nq, aHL, ME, y, iu); #c1(CD80) c2(XP_011511628) c3(T-lymphocyte activation antigen CD80 isoform X1) c4(302377, 302378) c5(302379, 302380, 302381, 302382, 302383, 302384, 302385, 302386, 302387, 302388, 302389, 302390) c6( ) c7(bM, T, fR, if, fd, qj, ci, aR, x, xy, Ds, hu, eL, bc, aW, g, cm, iP, ba, eM, cj, k, m, uL, ht, aj, fr, qN, eW, aHN, h, eV, dL, ey, xP, Nr, A, po, dB, at, bk, fL, B, Dw, fM, jx, eX, aA, zN, j, C, aHM, V, q, J, eA, mP, aT, PK, iU, Y, bg, r, lo, en, ck, iM, yW, fP, bt, gx, id, axd, jh, ah, fu, mC, Pm, wD, hX, ds, lQ, uQ, je, qZ, ff, eZ, aF, xH, hp, iV, bz, Nq, aHL, ME, y, iu); #c1(CD81) c2(NP_004347) c3(CD81 antigen isoform 1) c4(145547) c5(145548, 145549, 145550, 145551, 145552, 145553) c6( ) c7(fR, qb, yk, jx, ml, fd, v, aHO, eA, F, jZ, dV, h, dL, on, Y, aq, lo, cm, Wt, Gs, at, XO, B, vi); #c1(CD82) c2(NP_001020015) c3(CD82 antigen isoform 2) c4(28037, 28038, 28039) c5(28040, 28041, 28042, 28043, 28044, 28045, 28046, 28047, 28048, 28049, 28050, 28051, 28052, 28053, 28054) c6( ) c7(T, id, dA, Uc, rQ, if, WV, aA, cz, n, bB, v, fr, ci, qN, rP, fd, AO, q, ad, aHR, dP, aE, Db, yt, aT, h, Ou, dL, ae, eL, cp, pl, atX, RT, s, qt, aW, Y, ff, r, aq, Ej, aF, en, cl, g, t, cm, bz, aHQ, iR, ck, es, bF, eM, nB, bE, gX, hL, m, aHP, y, it, B); #c1(CD82) c2(XP_006718285) c3(CD82 antigen isoform X2) c4(291669, 291670) c5(291671, 291672, 291673, 291674, 291675, 291676) c6( ) c7(T, id, dA, Uc, rQ, if, WV, aA, cz, n, bB, v, fr, ci, qN, rP, fd, AO, q, ad, aHR, dP, aE, Db, yt, aT, h, Ou, dL, ae, eL, cp, pl, atX, RT, s, qt, aW, Y, ff, r, aq, Ej, aF, en, cl, g, t, cm, bz, aHQ, iR, ck, es, bF, eM, nB, bE, gX, hL, m, aHP, y, it, B); #c1(CD82) c2(XP_006718286) c3(CD82 antigen isoform X1) c4(291677) c5(291678, 291679, 291680, 291681, 291682, 291683, 291684, 291685, 291686, 291687, 291688, 291689, 291690, 291691, 291692) c6( ) c7(T, id, dA, Uc, rQ, if, WV, aA, cz, n, bB, v, fr, ci, qN, rP, fd, AO, q, ad, aHR, dP, aE, Db, yt, aT, h, Ou, dL, ae, eL, cp, pl, atX, RT, s, qt, aW, Y, ff, r, aq, Ej, aF, en, cl, g, t, cm, bz, aHQ, iR, ck, es, bF, eM, nB, bE, gX, hL, m, aHP, y, it, B); #c1(CD83) c2(NP_004224) c3(CD83 antigen isoform a precursor) c4(144424) c5(144425, 144426, 144427, 144428, 144429, 144430) c6( ) c7(T, dt, BD, fR, aEj, if, fd, hz, v, ame, ci, qN, Qp, V, q, cd, ad, wD, x, av, ib, aE, yt, aT, hD, h, lQ, Tj, kU, ae, Qe, iU, aAu, aW, Y, lh, lb, ev, eZ, ff, en, hf, g, t, cm, Zj, asE, Kc, sS, Bv, cj, k, m, Pk, bt, B, y); #c1(CD84) c2(NP_001171808) c3(SLAM family member 5 isoform 1 precursor) c4(71784, 71785) c5(71786, 71787, 71788, 71789, 71790, 71791, 71792, 71793, 71794, 71795, 71796, 71797) c6( ) c7(lf, y); #c1(CD84) c2(NP_001171810) c3(SLAM family member 5 isoform 3 precursor) c4(71805) c5(71806, 71807, 71808, 71809, 71810, 71811, 71812, 71813, 71814, 71815, 71816, 71817) c6( ) c7(lf, y); #c1(CD84) c2(NP_001171811) c3(SLAM family member 5 isoform 4 precursor) c4(71818) c5(71819, 71820, 71821, 71822, 71823, 71824) c6( ) c7(lf, y); #c1(CD84) c2(NP_003865) c3(SLAM family member 5 isoform 2 precursor) c4(141614, 141615) c5(141616, 141617, 141618, 141619, 141620, 141621) c6( ) c7(lf, y); #c1(CD84) c2(XP_011508396) c3(SLAM family member 5 isoform X1) c4(299098) c5(299099, 299100, 299101, 299102, 299103, 299104) c6( ) c7(lf, y); #c1(CD86) c2(NP_001193853) c3(T-lymphocyte activation antigen CD86 isoform 4 precursor) c4(82731) c5(82732, 82733, 82734, 82735, 82736, 82737, 82738, 82739, 82740, 82741, 82742, 82743) c6( ) c7(Ob, gx, T, dD, fM, bM, fR, Dw, id, aHS, wi, axd, jx, jh, fd, n, aj, OY, j, ci, C, fu, eq, abC, V, q, Pm, J, hX, wa, eA, x, eW, wD, aE, mP, ds, aT, h, Ds, dL, ey, lQ, eL, uQ, Nr, A, qZ, je, axu, Y, hl, eZ, la, r, aDn, lo, yq, po, fe, iV, cm, cM, pb, Wt, Nq, ck, cT, iM, eM, nB, yW, hr, cj, at, bk, k, y, bt, ne); #c1(CD86) c2(NP_001193854) c3(T-lymphocyte activation antigen CD86 isoform 5) c4(82744) c5(82745, 82746, 82747, 82748, 82749) c6( ) c7(Ob, gx, T, dD, fM, bM, fR, Dw, id, aHS, wi, axd, jx, jh, fd, n, aj, OY, j, ci, C, fu, eq, abC, V, q, Pm, J, hX, wa, eA, x, eW, wD, aE, mP, ds, aT, h, Ds, dL, ey, lQ, eL, uQ, Nr, A, qZ, je, axu, Y, hl, eZ, la, r, aDn, lo, yq, po, fe, iV, cm, cM, pb, Wt, Nq, ck, cT, iM, eM, nB, yW, hr, cj, at, bk, k, y, bt, ne); #c1(CD86) c2(NP_008820) c3(T-lymphocyte activation antigen CD86 isoform 2 precursor) c4(168817, 168818) c5(168819, 168820, 168821, 168822, 168823, 168824) c6( ) c7(Ob, gx, T, dD, fM, bM, fR, Dw, id, aHS, wi, axd, jx, jh, fd, n, aj, OY, j, ci, C, fu, eq, abC, V, q, Pm, J, hX, wa, eA, x, eW, wD, aE, mP, ds, aT, h, Ds, dL, ey, lQ, eL, uQ, Nr, A, qZ, je, axu, Y, hl, eZ, la, r, aDn, lo, yq, po, fe, iV, cm, cM, pb, Wt, Nq, ck, cT, iM, eM, nB, yW, hr, cj, at, bk, k, y, bt, ne); #c1(CD86) c2(NP_787058) c3(T-lymphocyte activation antigen CD86 isoform 1 precursor) c4(252039) c5(252040, 252041, 252042, 252043, 252044, 252045, 252046) c6( ) c7(Ob, gx, T, dD, fM, bM, fR, Dw, id, aHS, wi, axd, jx, jh, fd, n, aj, OY, j, ci, C, fu, eq, abC, V, q, Pm, J, hX, wa, eA, x, eW, wD, aE, mP, ds, aT, h, Ds, dL, ey, lQ, eL, uQ, Nr, A, qZ, je, axu, Y, hl, eZ, la, r, aDn, lo, yq, po, fe, iV, cm, cM, pb, Wt, Nq, ck, cT, iM, eM, nB, yW, hr, cj, at, bk, k, y, bt, ne); #c1(CD86) c2(NP_795711) c3(T-lymphocyte activation antigen CD86 isoform 3 precursor) c4(252455) c5(252456, 252457, 252458, 252459, 252460, 252461) c6( ) c7(Ob, gx, T, dD, fM, bM, fR, Dw, id, aHS, wi, axd, jx, jh, fd, n, aj, OY, j, ci, C, fu, eq, abC, V, q, Pm, J, hX, wa, eA, x, eW, wD, aE, mP, ds, aT, h, Ds, dL, ey, lQ, eL, uQ, Nr, A, qZ, je, axu, Y, hl, eZ, la, r, aDn, lo, yq, po, fe, iV, cm, cM, pb, Wt, Nq, ck, cT, iM, eM, nB, yW, hr, cj, at, bk, k, y, bt, ne); #c1(CD8A) c2(NP_001759) c3(T-cell surface glycoprotein CD8 alpha chain isoform 1 precursor) c4(120820, 120821, 120822, 120823) c5(120824, 120825, 120826, 120827, 120828, 120829, 120830, 120831, 120832, 120833, 120834, 120835, 120836, 120837, 120838, 120839, 120840, 120841, 120842, 120843, 120844, 120845, 120846, 120847, 120848, 120849, 120850, 120851) c6( ) c7(T, aHV, if, ht, eX, jh, aA, v, ci, V, aHT, ip, akU, qp, dV, aT, h, eV, iY, hu, lZ, aW, Y, eZ, aq, aHU, aF, t, f, cm, iK, ck, gX, cj, at, m, k, y, bt, B); #c1(CD8A) c2(NP_741969) c3(T-cell surface glycoprotein CD8 alpha chain isoform 2 precursor) c4(247481) c5(247482, 247483, 247484, 247485, 247486, 247487, 247488, 247489, 247490, 247491) c6( ) c7(T, aHV, if, ht, eX, jh, aA, v, ci, V, aHT, ip, akU, qp, dV, aT, h, eV, iY, hu, lZ, aW, Y, eZ, aq, aHU, aF, t, f, cm, iK, ck, gX, cj, at, m, k, y, bt, B); #c1(CD8B) c2(NP_001171571) c3(T-cell surface glycoprotein CD8 beta chain isoform 6 precursor) c4(70639) c5(70640, 70641, 70642, 70643, 70644, 70645) c6( ) c7(ck, Pg, eZ, cj, jh, fL, act, mC); #c1(CD8B) c2(NP_004922) c3(T-cell surface glycoprotein CD8 beta chain isoform 5 precursor) c4(150808, 150809) c5(150810, 150811, 150812, 150813, 150814, 150815, 150816, 150817, 150818, 150819, 150820, 150821) c6( ) c7(ck, Pg, eZ, cj, jh, fL, act, mC); #c1(CD8B) c2(NP_742099) c3(T-cell surface glycoprotein CD8 beta chain isoform 3 precursor) c4(248088) c5(248089, 248090, 248091, 248092, 248093) c6( ) c7(ck, Pg, eZ, cj, jh, fL, act, mC); #c1(CD8B) c2(NP_742100) c3(T-cell surface glycoprotein CD8 beta chain isoform 4 precursor) c4(248094, 248095) c5(248096, 248097, 248098, 248099, 248100, 248101, 248102, 248103, 248104, 248105, 248106, 248107) c6( ) c7(ck, Pg, eZ, cj, jh, fL, act, mC); #c1(CD8B) c2(NP_757362) c3(T-cell surface glycoprotein CD8 beta chain isoform 2 precursor) c4(248703, 248704) c5(248705, 248706, 248707, 248708, 248709, 248710, 248711) c6( ) c7(ck, Pg, eZ, cj, jh, fL, act, mC); #c1(CD9) c2(NP_001760) c3(CD9 antigen) c4(120852, 120853, 120854, 120855) c5(120856, 120857, 120858, 120859, 120860, 120861, 120862, 120863, 120864, 120865, 120866, 120867, 120868, 120869, 120870, 120871, 120872, 120873, 120874) c6( ) c7(T, dt, id, Uc, if, iW, aA, bB, n, fd, ci, qN, AO, ad, hX, ft, ds, jZ, HC, kH, aT, dV, SH, dL, h, he, nJ, ae, af, be, CB, je, iU, aHW, aW, Y, Tr, kD, lo, aF, g, kk, cm, bz, ck, es, iM, iQ, cA, eM, bE, NL, cj, pg, aEG, Lb, zv, gn, aEN, bt, iu, EB); #c1(CD9) c2(XP_005253871) c3(CD9 antigen isoform X1) c4(272744) c5(272745, 272746, 272747, 272748, 272749, 272750) c6( ) c7(T, dt, id, Uc, if, iW, aA, bB, n, fd, ci, qN, AO, ad, hX, ft, ds, jZ, HC, kH, aT, dV, SH, dL, h, he, nJ, ae, af, bc, CB, je, iU, aHW, aW, Y, Tr, kD, lo, aF, g, kk, cm, bz, ck, es, iM, iQ, cA, eM, bE, NL, cj, pg, aEG, Lb, zv, gn, aEN, bt, iu, EB); #c1(CD9) c2(XP_011519342) c3(CD9 antigen isoform X2) c4( ) c5(313996, 313997, 313998, 313999, 314000, 314001, 314002, 314003, 314004, 314005, 314006) c6( ) c7(T, dt, id, Uc, if, iW, aA, bB, n, fd, ci, qN, AO, ad, hX, ft, ds, jZ, HC, kH, aT, dV, SH, dL, h, he, nJ, ae, af, bc, CB, je, iU, aHW, aW, Y, Tr, kD, lo, aF, g, kk, cm, bz, ck, es, iM, iQ, cA, eM, bE, NL, cj, pg, aEG, Lb, zv, gn, aEN, bt, iu, EB); #c1(CD93) c2(NP_036204) c3(complement component C1q receptor precursor) c4(172344, 172345) c5(172346, 172347, 172348, 172349, 172350, 172351, 172352, 172353, 172354, 172355, 172356, 172357) c6( ) c7(ac, W, ec, iW, aw, aT, dy, j, an); #c1(CD96) c2(NP_005807) c3(T-cell surface protein tactile isoform 2 precursor) c4(159610) c5(159611, 159612, 159613, 159614, 159615, 159616) c6( ) c7(ait, aHX, nX, Az, oA, atS, hF, bt, B); #c1(CD96) c2(NP_937839) c3(T-cell surface protein tactile isoform 1 precursor) c4(259272) c5(259273, 259274, 259275, 259276, 259277, 259278) c6( ) c7(ait, aHX, nX, Az, oA, atS, hF, bt, B); #c1(CD99) c2(NP_001116370) c3(CD99 antigen isoform b precursor) c4(43797) c5(43798, 43799, 43800, 43801, 43802, 43803) c6( ) c7(T, iH, afA, jh, ci, aHZ, iJ, ad, er, amR, ft, PX, ahj, SV, aT, dz, Ou, ahK, ae, bc, dx, jf, if, Jl, aW, oV, yx, eH, AQ, aF, g, Fu, eF, cm, adj, bw, asE, aHY, ck, EW, GU, eM, dB, apy, k, y, bt); #c1(CD99) c2(NP_002405) c3(CD99 antigen isoform a precursor) c4(128135, 128136) c5(128137, 128138, 128139, 128140, 128141, 128142) c6( ) c7(T, iH, afA, jh, ci, aHZ, iJ, ad, er, amR, ft, pX, ahj, SV, aT, dz, Ou, ahK, ae, bc, dx, jf, if, Jl, aW, oV, yx, eH, AQ, aF, g, Fu, eF, cm, adj, bw, asE, aHY, ck, EW, GU, eM, dB, apy, k, y, bt); #c1(CD99) c2(XP_005274851) c3(CD99 antigen isoform X1) c4(285491, 285492) c5(285493, 285494, 285495, 285496, 285497, 285498) c6( ) c7(T, iH, afA, jh, ci, aHZ, iJ, ad, er, amR, ft, pX, ahj, SV, aT, dz, Ou, ahK, ae, bc, dx, jf, if, Jl, aW, oV, yx, eH, AQ, aF, g, Fu, eF, cm, adj, bw, asE, aHY, ck, EW, GU, eM, dB, apy, k, y, bt); #c1(CD99) c2(XP_005274853) c3(CD99 antigen isoform X2) c4( ) c5(285499, 285500, 285501, 285502, 285503, 285504) c6( ) c7(T, iH, afA, jh, ci, aHZ, iJ, ad, er, amR, ft, pX, ahj, SV, aT, dz, Ou, ahK, ae, bc, dx, jf, if, Jl, aW, oV, yx, eH, AQ, aF, g, Fu, eF, cm, adj, bw, asE, aHY, ck, EW, GU, eM, dB, apy, k, y, bt); #c1(CD99) c2(XP_005274856) c3(CD99 antigen isoform X5) c4( ) c5(285505, 285506, 285507, 285508, 285509, 285510) c6( ) c7(T, iH, afA, jh, ci, aHZ, iJ, ad, er, amR, ft, pX, ahj, SV, aT, dz, Ou, ahK, ae, bc, dx, jf, if, Jl, aW, oV, yx, eH, AQ, aF, g, Fu, eF, cm, adj, bw, asE, aHY, ck, EW, GU, eM, dB, apy, k, y, bt); #c1(CDADC1) c2(NP_001180407) c3(cytidine and dCMP deaminase domain-containing protein 1 isoform 2) c4(73965) c5(73966, 73967, 73968, 73969, 73970, 73971) c6( ) c7(oe); #c1(CDADC1) c2(NP_112173) c3(cytidine and dCMP deaminase domain-containing protein 1 isoform 1) c4(220602, 220603) c5(220604, 220605, 220606, 220607, 220608, 220609) c6( ) c7(oe); #c1(CDADC1) c2(XP_006719934) c3(cytidine and dCMP deaminase domain-containing protein 1 isoform X5) c4( ) c5(293085) c6( ) c7(oe); #c1(CDADC1) c2(XP_006719937) c3(cytidine and dCMP deaminase domain-containing protein 1 isoform X6) c4( ) c5(293086, 293087, 293088, 293089, 293090) c6( ) c7(oe); #c1(CDAN1) c2(NP_612486) c3(codanin-1) c4(236629) c5(236630, 236631, 236632, 236633, 236634, 236635, 236636) c6( ) c7(NU, Gq, ac, alc, alb, aBT, adw, lT, oW, fH, fe, ala, fC, aiS, BE, Bh, ald); #c1(CDAN1) c2(XP_005254233) c3(codanin-1 isoform X4) c4(273129) c5(273130, 273131, 273132, 273133, 273134, 273135) c6( ) c7(NU, Gq, ac, alc, alb, aBT, adw, lT, oW, fH, fe, ala, fC, aiS, BE, Bh, ald); #c1(CDAN1) c2(XP_011519572) c3(codanin-1 isoform X1) c4( ) c5(314237) c6( ) c7(NU, Gq, ac, alc, alb, aBT, adw, lT, oW, fH, fe, ala, fC, aiS, BE, Bh, ald); #c1(CDAN1) c2(XP_011519575) c3(codanin-1 isoform X5) c4( ) c5(314238, 314239, 314240) c6( ) c7(NU, Gq, ac, alc, alb, aBT, adw, lT, oW, fH, fe, ala, fC, aiS, BE, Bh, ald); #c1(CDC123) c2(NP_006014) c3(cell division cycle protein 123 homolog) c4(161166, 161167, 161168, 161169) c5(161170, 161171, 161172, 161173, 161174, 161175, 161176, 161177, 161178, 161179, 161180, 161181, 161182, 161183, 161184, 161185, 161186, 161187) c6( ) c7(bL, kh, aj, v, ale, qN, iJ, J, bv, aE, aT, h, ae, eL, dx, eG, Uf, d, aW, Y, eH, aq, aF, eF, bz, au, B); #c1(CDC123) c2(XP_005252695) c3(cell division cycle protein 123 homolog isoform X1) c4(271993, 271994) c5(271995, 271996, 271997, 271998, 271999, 272000, 272001, 272002, 272003, 272004, 272005, 272006, 272007, 272008, 272009, 272010, 272011, 272012) c6( ) c7(bL, kh, aj, v, ale, qN, iJ, J, bv, aE, aT, h, ae, eL, dx, eG, Uf, d, aW, Y, eH, aq, aF, eF, bz, au, B); #c1(CDC14A) c2(XP_011540643) c3(dual specificity protein phosphatase CDC14A isoform X3) c4( ) c5(339179, 339180) c6( ) c7(aW, T, aA, aT); #c1(CDC14A) c2(XP_011540644) c3(dual specificity protein phosphatase CDC14A isoform X4) c4(339181) c5(339182, 339183, 339184, 339185, 339186, 339187) c6( ) c7(aW, T, aA, aT); #c1(CDC14A) c2(XP_011540646) c3(dual specificity protein phosphatase CDC14A isoform X7) c4( ) c5(339188, 339189, 339190, 339191, 339192) c6( ) c7(aW, T, aA, aT); #c1(CDC14A) c2(XP_011540648) c3(dual specificity protein phosphatase CDC14A isoform X9) c4( ) c5(339193, 339194, 339195, 339196, 339197, 339198) c6( ) c7(aW, T, aA, aT); #c1(CDC14B) c2(NP_001070649) c3(dual specificity protein phosphatase CDC14B isoform 3) c4(34651) c5( ) c6( ) c7(alf, n, py, d, as); #c1(CDC14B) c2(NP_003662) c3(dual specificity protein phosphatase CDC14B isoform 1) c4(140041) c5(140042, 140043, 140044, 140045, 140046, 140047) c6( ) c7(alf, n, py, d, as); #c1(CDC14B) c2(NP_201588) c3(dual specificity protein phosphatase CDC14B isoform 2) c4(228305, 228306) c5(228307) c6( ) c7(alf, n, py, d, as); #c1(CDC14B) c2(XP_011517453) c3(dual specificity protein phosphatase CDC14B isoform X5) c4( ) c5(311158, 311159, 311160, 311161, 311162, 311163, 311164, 311165, 311166, 311167) c6( ) c7(alf, n, py, d, as); #c1(CDC14B) c2(XP_011517457) c3(dual specificity protein phosphatase CDC14B isoform X9) c4( ) c5(311168, 311169, 311170, 311171, 311172) c6( ) c7(alf, n, py, d, as); #c1(CDC14B) c2(XP_011517459) c3(dual specificity protein phosphatase CDC14B isoform X11) c4( ) c5(311173, 311174, 311175, 311176, 311177, 311178) c6( ) c7(alf, n, py, d, as); #c1(CDC14B) c2(XP_011517460) c3(dual specificity protein phosphatase CDC14B isoform X12) c4(311179) c5(311180, 311181, 311182, 311183, 311184, 311185) c6( ) c7(alf, n, py, d, as); #c1(CDC16) c2(NP_003894) c3(cell division cycle protein 16 homolog) c4(141921) c5(141922, 141923, 141924, 141925, 141926, 141927, 141928, 141929, 141930, 141931) c6( ) c7(X, B, aT); #c1(CDC16) c2(XP_011533153) c3(cell division cycle protein 16 homolog isoform X2) c4(329300) c5(329301) c6( ) c7(X, B, aT); #c1(CDC20B) c2(NP_001139206) c3(cell division cycle protein 20 homolog B isoform 2) c4(58956, 58957) c5(58958, 58959, 58960, 58961, 58962, 58963, 58964, 58965, 58966, 58967, 58968) c6( ) c7(i0); #c1(CDC20B) c2(NP_001163873) c3(cell division cycle protein 20 homolog B isoform 3) c4(66459) c5(66460, 66461, 66462, 66463, 66464, 66465, 66466) c6( ) c7(i0); #c1(CDC20B) c2(NP_689836) c3(cell division cycle protein 20 homolog B isoform 1) c4(244107) c5(244108, 244109, 244110, 244111, 244112, 244113) c6( ) c7(i0); #c1(CDC20B) c2(XP_011541520) c3(cell division cycle protein 20 homolog B isoform X1) c4(340096) c5(340097, 340098, 340099, 340100, 340101, 340102) c6( ) c7(i0); #c1(CDC23) c2(NP_004652) c3(cell division cycle protein 23 homolog) c4(148527, 148528) c5(148529, 148530, 148531, 148532, 148533, 148534, 148535, 148536, 148537, 148538, 148539, 148540) c6( ) c7(ck, T, hd, nM, iT, nB, X); #c1(CDC25A) c2(NP_001780) c3(M-phase inducer phosphatase 1 isoform a) c4(121043) c5(121044, 121045, 121046, 121047, 121048, 121049) c6( ) c7(T, gU, jh, aA, bB, ci, qN, q, ad, eA, cq, aE, arV, oW, aT, dL, K, ae, Qe, jf, zQ, s, aW, ff, hl, r, aq, aF, en, g, t, cm, iK, eM, bE, ayS, wB, at, m, bt, B); #c1(CDC25A) c2(NP_963861) c3(M-phase inducer phosphatase 1 isoform b) c4(262451) c5(262452, 262453, 262454, 262455, 262456, 262457) c6( ) c7(T, gU, jh, aA, bB, ci, qN, q, ad, eA, cq, aE, arV, oW, aT, dL, K, ae, Qe, jf, zQ, s, aW, ff, hl, r, aq, aF, en, g, t, cm, iK, eM, bE, ayS, wB, at, m, bt, B); #c1(CDC25A) c2(XP_006713499) c3(M-phase inducer phosphatase 1 isoform X4) c4(287170) c5(287171, 287172, 287173, 287174, 287175, 287176) c6( ) c7(T, gU, jh, aA, bB, ci, qN, q, ad, eA, cq, aE, arV, oW, aT, dL, K, ae, Qe, jf, zQ, s, aW, ff, hl, r, aq, aF, en, g, t, cm, iK, eM, bE, ayS, wB, at, m, bt, B); #c1(CDC258) c2(NP_001274445) c3(M-phase inducer phosphatase 2 isoform 4) c4(106541) c5(106542, 106543, 106544, 106545, 106546, 106547) c6( ) c7(T, ht, jh, ci, eA, ad, xy, aE, aT, dL, bK, K, hu, ae, d, ff, kp, en, t, bz, eM, hL, at, bt, it, B); #c1(CDC25B) c2(NP_001274447) c3(M-phase inducer phosphatase 2 isoform 6) c4(106548) c5(106549, 106550, 106551, 106552, 106553, 106554) c6( ) c7(T, ht, jh, ci, eA, ad, xy, aE, aT, dL, bK, K, hu, ae, d, ff, kp, en, t, bz, eM, hL, at, bt, it, B); #c1(CDC25B) c2(NP_004349) c3(M-phase inducer phosphatase 2 isoform 2) c4(145554) c5(145555, 145556, 145557, 145558, 145559, 145560) c6( ) c7(T, ht, jh, ci, eA, ad, xy, aE, aT, dL, bK, K, hu, ae, d, ff, kp, en, t, bz, eM, hL, at, bt, it, B); #c1(CDC25B) c2(NP_068658) c3(M-phase inducer phosphatase 2 isoform 3) c4(209952) c5(209953, 209954, 209955, 209956, 209957, 209958) c6( ) c7(T, ht, jh, ci, eA, ad, xy, aE, aT, dL, bK, K, hu, ae, d, ff, kp, en, t, bz, eM, hL, at, bt, it, B); #c1(CDC25B) c2(NP_068659) c3(M-phase inducer phosphatase 2 isoform 1) c4(209959) c5(209960, 209961, 209962, 209963, 209964, 209965, 209966) c6( ) c7(T, ht, jh, ci, eA, ad, xy, aE, aT, dL, bK, K, hu, ae, d, ff, kp, en, t, bz, eM, hL, at, bt, it, B); #c1(CDC25C) c2(NP_001274511) c3(M-phase inducer phosphatase 3 isoform a) c4(106563, 106564) c5(106565, 106566, 106567, 106568, 106569, 106570, 106571, 106572, 106573, 106574, 106575, 106576, 106577, 106578, 106579) c6( ) c7(T, yS, zt, jh, aA, bB, n, fd, q, ad, eA, aE, dV, aT, h, ja, dL, K, ae, A, aW, ff, aq, aF, en, cl, iR, t, bw, bz, ck, bE, wB, hL, cj, hR, at, m, B); #c1(CDC25C) c2(NP_001274512) c3(M-phase inducer phosphatase 3 isoform c) c4(106580) c5(106581, 106582, 106583, 106584, 106585, 106586, 106587, 106588, 106589, 106590) c6( ) c7(T, yS, zt, jh, aA, bB, n, fd, q, ad, eA, aE, dV, at, h, ja, dL, K, ae, A, aW, ff, aq, aF, en, cl, iR, t, bw, bz, ck, bE, wB, hL, cj, hR, at, m, B); #c1(CDC25C) c2(NP_073720) c3(M-phase inducer phosphatase 3 isoform b) c4(213248) c5(213249, 213250, 213251, 213252, 213253, 213254, 213255, 213256) c6( ) c7(T, yS, zt, jh, aA, bB, n, fd, q, ad, eA, aE, dV, aT, h, ja, dL, K, ae, A, aW, ff, aq, aF, en, cl, iR, t, bw, bz, ck, bE, wB, hL, cj, hR, at, m, B); #c1(CDC25C) c2(XP_011542061) c3(M-phase inducer phosphatase 3 isoform X3) c4(340588) c5(340589) c6( ) c7(T, yS, zt, jh, aA, bB, n, fd, q, ad, eA, aE, dV, aT, h, ja, dL, K, ae, A, aW, ff, aq, aF, en, cl, iR, t, bw, bz, ck, bE, wB, hL, cj, hR, at, m, B); #c1(CDC25C) c2(XP_011542063) c3(M-phase inducer phosphatase 3 isoform X6) c4( ) c5(340590, 340591) c6( ) c7(T, yS, zt, jh, aA, bB, n, fd, q, ad, eA, aE, dV, aT, h, ja, dL, K, ae, A, aW, ff, aq, aF, en, cl, iR, t, bw, bz, ck, bE, wB, hL, cj, hR, at, m, B); #c1(CDC27) c2(NP_001107563) c3(cell division cycle protein 27 homolog isoform 1) c4(42858) c5(42859, 42860, 42861, 42862, 42863, 42864) c6( ) c7(aW, aT); #c1(CDC27) c2(NP_001280018) c3(cell division cycle protein 27 homolog isoform 3) c4(111258) c5(111259, 111260, 111261, 111262, 111263, 111264) c6( ) c7(aW, aT); #c1(CDC27) c2(NP_001280020) c3(cell division cycle protein 27 homolog isoform 4) c4(111265) c5(111266, 111267, 111268, 111269, 111270, 111271) c6( ) c7(aW, aT); #c1(CDC34) c2(NP_004350) c3(ubiquitin-conjugating enzyme E2 R1) c4(145561) c5(145562, 145563, 145564, 145565, 145566, 145567) c6( ) c7(T, ht, alg, aT, hu, rP); #c1(CDC37) c2(NP_008996) c3(hsP90 co-chaperone Cdc37) c4(170134) c5(170135, 170136, 170137, 170138, 170139, 170140) c6( ) c7(T, azY, G, bE, cj, bB, fd, ci, K, MC, ae, B, ad); #c1(CDC37L1) c2(NP_060383) c3(hsP90 co-chaperone Cdc37-like 1) c4(195722, 195723) c5(195724, 195725, 195726, 195727, 195728, 195729, 195730, 195731, 195732, 195733, 195734, 195735) c6( ) c7(ci); #c1(CDC42BPA) c2(NP_003598) c3(serine/threonine-protein kinase MRCK alpha isoform B) c4(139461, 139462) c5(139463, 139464, 139465, 139466, 139467, 139468, 139469, 139470, 139471, 139472, 139473, 139474, 139475, 139476, 139477, 139478, 139479, 139480) c6( ) c7(aBD, aC, aW, aBH, aT, nA, cd, dR); #c1(CDC42BPA) c2(NP_055641) c3(serine/threonine-protein kinase MRCK alpha isoform A) c4(182458) c5(182459, 182460, 182461, 182462, 182463, 182464) c6( ) c7(aBD, aC, aW, aBH, aT, nA, cd, dR); #c1(CDC42BPA) c2(XP_005273374) c3(serine/threonine-protein kinase MRCK alpha isoform X2) c4(284493, 284494) c5(284495, 284496, 284497, 284498, 284499, 284500, 284501, 284502, 284503, 284504, 284505) c6( ) c7(aBD, aC, aW, aBH, aT, nA, cd, dR); #c1(CDC42BPA) c2(XP_005273378) c3(serine/threonine-protein kinase MRCK alpha isoform X9) c4(284506, 284507) c5(284508, 284509, 284510, 284511, 284512, 284513, 284514, 284515, 284516, 284517, 284518, 284519) c6( ) c7(aBD, aC, aW, aBH, aT, nA, cd, dR); #c1(CDC42BPA) c2(XP_005273379) c3(serine/threonine-protein kinase MRCK alpha isoform X11) c4(284520, 284521) c5(284522, 284523, 284524, 284525, 284526, 284527, 284528, 284529, 284530, 284531, 284532, 284533, 284534) c6( ) c7(aBD, aC, aW, aBH, aT, nA, cd, dR); #c1(CDC42BPA) c2(XP_005273381) c3(serine/threonine-protein kinase MRCK alpha isoform X12) c4(284535, 284536) c5(284537, 284538, 284539, 284540, 284541, 284542, 284543, 284544, 284545, 284546, 284547, 284548) c6( ) c7(aBD, aC, aW, aBH, aT, nA, cd, dR); #c1(CDC42BPA) c2(XP_011542610) c3(serine/threonine-protein kinase MRCK alpha isoform X8) c4(341180) c5( ) c6( ) c7(aBD, aC, aW, aBH, aT, nA, cd, dR); #c1(CDC42BPB) c2(NP_006026) c3(serine/threonine-protein kinase MRCK beta) c4(161253) c5(161254, 161255, 161256, 161257, 161258, 161259) c6( ) c7(dR, aW, 1 jh, aT); #c1(CDC42BPB) c2(XP_005268286) c3(serine/threonine-protein kinase MRCK beta isoform X3) c4(281669) c5(281670, 281671, 281672, 281673, 281674, 281675) c6( ) c7(dR, aW, T, jh, aT); #c1(CDC42BPB) c2(XP_011535689) c3(serine/threonine-protein kinase MRCK beta isoform X5) c4( ) c5(332920) c6( ) c7(dR, aW, T, jh, aT); #c1(CDC42BPG) c2(NP_059995) c3(serine/threonine-protein kinase MRCK gamma) c4(193568) c5(193569, 193570, 193571, 193572, 193573, 193574) c6( ) c7(AW, aC); #c1(CDC42BPG) c2(XP_011543460) c3(serine/threonine-protein kinase MRCK gamma isoform X4) c4( ) c5(342356) c6( ) c7(AW, aC); #c1(CDC42EP1) c2(NP_689449) c3(cdc42 effector protein 1) c4(242740, 242741, 242742, 242743) c5(242744, 242745, 242746, 242747, 242748, 242749, 242750, 242751, 242752, 242753, 242754, 242755, 242756, 242757, 242758, 242759, 242760, 242761, 242762, 242763, 242764, 242765, 242766, 242767) c6( ) c7(y, eA); #c1(CDC42EP3) c2(NP_006440) c3(cdc42 effector protein 3) c4(165232, 165233, 165234, 165235) c5(165236, 165237, 165238, 165239, 165240, 165241, 165242, 165243, 165244, 165245, 165246, 165247, 165248, 165249, 165250, 165251, 165252, 165253, 165254, 165255, 165256, 165257) c6( ) c7(id, aj, j, g, Gp, bz, af, ad, iP); #c1(CDC42SE2) c2(NP_001033791) c3(CDC42 small effector protein 2) c4(31552) c5(31553, 31554, 31555, 31556, 31557, 31558, 31559, 31560, 31561, 31562, 31563, 31564, 31565, 31566) c6( ) c7(AM, oV, hL, cl); #c1(CDC45) c2(XP_005261342) c3(cell division control protein 45 homolog isoform X1) c4(277295, 277296) c5(277297, 277298, 277299, 277300, 277301, 277302) c6( ) c7(bz, RX, cj); #c1(CDC45) c2(XP_011528717) c3(cell division control protein 45 homolog isoform X3) c4(323986) c5(323987, 323988, 323989, 323990, 323991, 323992, 323993, 323994, 323995, 323996, 323997, 323998, 323999, 324000, 324001, 324002) c6( ) c7(bz, RX, cj); #c1(CDC45) c2(XP_011528720) c3(cell division control protein 45 homolog isoform X2) c4(324003) c5(324004, 324005, 324006, 324007, 324008, 324009) c6( ) c7(bz, RX, cj); #c1(CDC5L) c2(NP_001244) c3(cell division cycle 5-like protein) c4(92538) c5( ) c6( ) c7(eF, av, eH, aoM, c); #c1(CDC6) c2(NP_001245) c3(cell division control protein 6 homolog) c4(93495) c5( ) c6( ) c7(T, alh, if, iW, ci, bX, qN, ad, aoA, aT, ali, ae, kl, aW, ff, aq, en, QK, cj, at, B, cn); #c1(CDC7) c2(XP_011540528) c3(cell division cycle 7-related protein kinase isoform X1) c4(338996, 338997, 338998) c5(338999, 339000, 339001, 339002, 339003, 339004, 339005, 339006, 339007, 339008, 339009, 339010, 339011, 339012, 339013, 339014, 339015) c6( ) c7(T, BN, kP, c, dH, WY, Y, oe, aW, alR, ff, aT, aaE, hy, K, m, en, t, bt, fq, ne); #c1(CDC7) c2(XP_011540529) c3(cell division cycle 7-related protein kinase isoform X3) c4( ) c5(339016, 339017, 339018, 339019, 339020) c6( ) c7(T, BN, kP, c, dH, WY, Y, oe, aW, alR, ff, aT, aaE, hy, K, m, en, t, bt, fq, ne); #c1(CDC73) c2(NP_078805) c3(parafibromin) c4(215560) c5(215561, 215562, 215563, 215564, 215565, 215566) c6( ) c7(T, aC, pY, aw, n, fr, ci, ad, Do, yh, dQ, alk, ae, azh, bA, aAL, s, aAH, dg, Hl, dr, es, YE, TG, iS, aru, azg, alj); #c1(CDC73) c2(XP_006711600) c3(parafibromin isoform X1) c4(286177) c5(286178, 286179, 286180, 286181, 286182, 286183) c6( ) c7(T, aC, pY, aw, n, fr, ci, ad, Do, yh, dQ, alk, ae, azh, bA, aAL, s, aAH, dg, Hl, dr, es, YE, TG, iS, aru, azg, alj); #c1(CDCA2) c2(NP_689775) c3(cell division cycle-associated protein 2) c4(243923, 243924) c5(243925, 243926, 243927, 243928, 243929, 243930) c6( ) c7(T, Y, aw, ff, en, bX); #c1(CDCA2) c2(XP_011542720) c3(cell division cycle-associated protein 2 isoform X2) c4(341288) c5( ) c6( ) c7(T, Y, aw, ff, en, bX); #c1(CDCA2) c2(XP_011542721) c3(cell division cycle-associated protein 2 isoform X4) c4( ) c5(341289, 341290, 341291, 341292, 341293) c6( ) c7(T, Y, aw, ff, en, bX); #c1(CDCA3) c2(NP_112589) c3(cell division cycle-associated protein 3 isoform 1) c4(221484) c5(221485, 221486, 221487, 221488, 221489, 221490, 221491, 221492, 221493, 221494, 221495, 221496, 221497) c6( ) c7(bL, T); #c1(CDCA5) c2(NP_542399) c3(sororin) c4(232337) c5(232338, 232339, 232340, 232341, 232342, 232343) c6( ) c7(T, hl, ci, aR, hX, hb, dV, af, A, Y, eH, Pg, eZ, as, eF, cm, bz, kT, WO, ac, WP, U, xg, ek); #c1(CDCA5) c2(XP_011543047) c3(sororin isoform X5) c4(341848) c5( ) c6( ) c7(T, hl, ci, aR, hX, hb, dV, af, A, Y, eH, Pg, eZ, as, eF, cm, bz, kT, WO, ac, WP, U, xg, ek); #c1(CDCA5) c2(XP_011543049) c3(sororin isoform X7) c4( ) c5(341849, 341850, 341851, 341852, 341853, 341854) c6( ) c7(T, hl, ci, aR, hX, hb, dV, af, A, Y, eH, Pg, eZ, as, eF, cm, bz, kT, WO, ac, WP, U, xg, ek); #c1(CDCA7) c2(NP_114148) c3(cell division cycle-associated protein 7 isoform 1) c4(222346) c5(222347, 222348, 222349, 222350, 222351, 222352) c6( ) c7(jf, T, W, iU, c, fq); #c1(CDCA7) c2(NP_665809) c3(cell division cycle-associated protein 7 isoform 2) c4(241716, 241717) c5(241718, 241719, 241720, 241721, 241722, 241723, 241724, 241725, 241726, 241727, 241728, 241729) c6( ) c7(jf, T, W, iU, c, fq); #c1(CDCA7L) c2(NP_001120842) c3(cell division cycle-associated 7-like protein isoform 2) c4(44825, 44826) c5(44827, 44828, 44829, 44830, 44831, 44832, 44833, 44834, 44835, 44836) c6( ) c7(h, jf, B, an); #c1(CDCA7L) c2(NP_001120843) c3(cell division cycle-associated 7-like protein isoform 3) c4(44837) c5(44838, 44839, 44840, 44841, 44842, 44843) c6( ) c7(h, jf, B, an); #c1(CDCA7L) c2(NP_061189) c3(cell division cycle-associated 7-like protein isoform 1) c4(199892) c5(199893, 199894, 199895, 199896, 199897, 199898, 199899, 199900) c6( ) c7(h, jf, B, an); #c1(CDCP1) c2(NP_073753) c3(CUB domain-containing protein 1 isoform 1 precursor) c4(213466) c5(213467, 213468, 213469, 213470, 213471, 213472) c6( ) c7(T, aw, bB, n, fr, ci, q, ad, av, py, aE, aT, ey, dQ, ae, cY, iU, aW, r, aF, g, t, cM, bz, ck, bE, m, lB); #c1(CDCP1) c2(NP_835488) c3(CUB domain-containing protein 1 isoform 2 precursor) c4(253563) c5(253564, 253565, 253566, 253567, 253568, 253569) c6( ) c7(T, aw, bB, n, fr, ci, q, ad, av, py, aE, aT, ey, dQ, ae, cY, iU, aW, r, aF, g, t, cM, bz, ck, bE, m, lB); #c1(CDH1) c2(NP_004351) c3(cadherin-1 preproprotein) c4(145568, 145569, 145570) c5(145571, 145572, 145573, 145574, 145575, 145576, 145577, 145578, 145579, 145580, 145581, 145582, 145583, 145584, 145585, 145586, 145587, 145588) c6( ) c7(bM, T, aC, fR, pf, if, fd, bB, axk, ci, ip, Na, aE, ajv, ja, Ds, gs, hu, zy, eL, alo, YL, yo, zQ, aW, aEl, az, wF, nY, g, as, eF, ir, fT, eM, nB, iA, cj, m, alm, in, iu, aln, dD, Uc, QO, lT, sw, iB, wu, ht, n, fr, qN, pM, zP, Bl, jz, hw, gd, Gw, dL, hB, pl, YO, aq, kp, mo, cM, fs, op, dB, Qu, hL, hR, at, it, B, Dw, fM, jp, fG, aA, hy, AO, pd, q, er, eA, XX, ami, hW, Vr, eO, qK, HC, aT, AJ, Nc, ae, ne, jf, qw, avg, s, iU, Y, r, en, avb, cl, t, Px, iK, zJ, ck, nM, pZ, gX, all, im, Kg, bt, hS, HQ, Gl, vi, Mb, id, aD, iW, eq, Fc, iJ, ad, hX, dP, av, iC, hd, ib, py, Db, yt, NS, wm, fb, BO, Ub, gt, ff, eH, aF, iV, iR, bz, YR, bF, es, apM, bE, AR, Gu, ra, X); #c1(CDH10) c2(NP_006718) c3(cadherin-10 preproprotein) c4(167392) c5(167393, 167394, 167395, 167396, 167397, 167398) c6( ) c7(bN, cd, j, ac, c); #c1(CDH11) c2(NP_001788) c3(cadherin-11 preproprotein) c4(121117, 121118, 121119) c5(121120, 121121, 121122, 121123, 121124, 121125, 121126, 121127, 121128, 121129, 121130, 121131, 121132) c6( ) c7(Gl, T, fG, oe, ht, aw, bB, n, aj, hy, j, zh, ci, fr, cd, ad, ai, er, eA, afb, aT, Gw, ae, af, d, aW, fO, eH, as, eF, t, cM, fq, alp, LB, arY, acW, W, ac, zr, bE, iA, bP, Gu, zu, y); #c1(CDH13) c2(NP_001207417) c3(cadherin-13 isoform 2) c4(83647) c5(83648, 83649, 83650, 83651, 83652, 83653) c6( ) c7(T, pf, if, e, al, EQ, bB, ci, x, aE, dQ, xa, yo, aW, LZ, g, lk, eM, iT, m, k, aw, ht, n, fr, qN, alq, cd, h, hn, hB, cY, A, aq, bP, hL, hR, lB, it, B, fM, oe, aA, cz, v, j, q, eA, XX, GL, aT, ae, s, alr, iU, Y, r, iy, en, cl, t, iK, bN, ck, pH, kP, aps, bt, iW, jh, ad, av, Sb, na, d, ff, cr, aF, iV, Z, bz, bF, gk, pc, Rm, ei, adg, y, aqD); #c1(CDH13) c2(NP_001207418) c3(cadherin-13 isoform 3 precursor) c4(83654, 83655) c5(83656, 83657, 83658, 83659, 83660, 83661) c6( ) c7(T, pf, if, e, al, EQ, bB, ci, x, aE, dQ, xa, yo, aW, LZ, g, lk, eM, iT, m, k, aw, ht, n, fr, qN, alq, cd, h, hn, hB, cY, A, aq, bP, hL, hR, lB, it, B, fM, oe, aA, cz, v, j, q, eA, XX, GL, aT, ae, s, alr, iU, Y, r, iy, en, cl, t, iK, bN, ck, pH, kP, aps, bt, iW, jh, ad, av, Sb, na, d, ff, cr, aF, iV, Z, bz, bF, gk, pc, Rm, ei, adg, y, aqD); #c1(CDH13) c2(NP_001207419) c3(cadherin-13 isoform 4) c4(83662, 83663) c5(83664, 83665, 83666, 83667, 83668, 83669, 83670, 83671, 83672, 83673, 83674, 83675, 83676, 83677, 83678, 83679, 83680, 83681) c6( ) c7(T, pf, if, e, al, EQ, bB, ci, x, aE, dQ, xa, yo, aW, LZ, g, lk, eM, iT, m, k, aw, ht, n, fr, qN, alq, cd, h, hn, hB, cY, A, aq, bP, hL, hR, lB, it, B, fM, oe, aA, cz, v, j, q, eA, XX, GL, aT, ae, s, alr, iU, Y, r, iy, en, cl, t, iK, bN, ck, pH, kP, aps, bt, iW, jh, ad, av, Sb, na, d, ff, cr, aF, iV, Z, bz, bF, gk, pc, Rm, ei, adg, y, aqD); #c1(CDH13) c2(NP_001207420) c3(cadherin-13 isoform 5 precursor) c4(83682) c5(83683, 83684, 83685, 83686, 83687, 83688, 83689) c6( ) c7(T, pf, if, e, al, EQ, bB, ci, x, aE, dQ, xa, yo, aW, LZ, g, lk, eM, iT, m, k, aw, ht, n, fr, qN, alq, cd, h, hn, hB, cY, A, aq, bP, hL, hR, lB, it, B, fM, oe, aA, cz, v, j, q, eA, XX, GL, aT, ae, s, alr, iU, Y, r, iy, en, cl, t, iK, bN, ck, pH, kP, aps, bt, iW, jh, ad, av, Sb, na, d, ff, cr, aF, iV, Z, bz, bF, gk, pc, Rm, ei, adg, y, aqD); #c1(CDH13) c2(NP_001207421) c3(cadherin-13 isoform 6 precursor) c4(83690) c5(83691, 83692, 83693, 83694, 83695, 83696, 83697, 83698, 83699) c6( ) c7(T, pf, if, e, al, EQ, bB, ci, x, aE, dQ, xa, yo, aW, LZ, g, lk, eM, iT, m, k, aw, ht, n, fr, qN, alq, cd, h, hn, hB, cY, A, aq, bP, hL, hR, lB, it, B, fM, oe, aA, cz, v, j, q, eA, XX, GL, aT, ae, s, alr, iU, Y, r, iy, en, cl, t, iK, bN, ck, pH, kP, aps, bt, iW, jh, ad, av, Sb, na, d, ff, cr, aF, iV, Z, bz, bF, gk, pc, Rm, ei, adg, y, aqD); #c1(CDH15) c2(NP_004924) c3(cadherin-15 preproprotein) c4(150822) c5(150823, 150824, 150825, 150826, 150827, 150828) c6( ) c7(T, fr, ci, nA, cd, q, alt, b, aE, arA, i, Sr, aT, qw, kl, aW, r, EZ, W, ac, alu, bo, als, m, Wl); #c1(CDH16) c2(NP_001191673) c3(cadherin-16 isoform 2 precursor) c4(81585) c5(81586, 81587, 81588, 81589, 81590, 81591) c6( ) c7(es, hd, Uc, WA, rQ, fr, ci, ahv); #c1(CDH16) c2(NP_001191674) c3(cadherin-16 isoform 3 precursor) c4(81592) c5(81593, 81594, 81595, 81596, 81597, 81598) c6( ) c7(es, hd, Uc, WA, rQ, fr, ci, ahv); #c1(CDH16) c2(NP_001191675) c3(cadherin-16 isoform 4 precursor) c4(81599) c5(81600, 81601, 81602, 81603, 81604, 81605) c6( ) c7(es, hd, Uc, WA, rQ, fr, ci, ahv); #c1(CDH16) c2(NP_004053) c3(cadherin-16 isoform 1 precursor) c4(143164, 143165) c5(143166, 143167, 143168, 143169, 143170, 143171, 143172, 143173, 143174, 143175, 143176, 143177) c6( ) c7(es, hd, Uc, WA, rQ, fr, ci, ahv); #c1(CDH17) c2(NP_001138135) c3(cadherin-17 precursor) c4(56042) c5(56043, 56044, 56045, 56046, 56047, 56048, 56049, 56050, 56051, 56052, 56053, 56054) c6( ) c7(T, pf, sw, by, aA, ci, q, ad, hX, hd, aE, alv, bK, ae, Jl, Y, yL, ff, r, alw, aq, aF, en, g, Z, t, iR, bz, bN, pH, bP, B, qc); #c1(CDH17) c2(XP_011515092) c3(cadherin-17 isoform X1) c4(307946) c5(307947, 307948, 307949, 307950, 307951, 307952) c6( ) c7(T, pf, sw, by, aA, ci, q, ad, hX, hd, aE, alv, bK, ae, Jl, Y, yL, ff, r, alw, aq, aF, en, g, Z, t, iR, bz, bN, pH, bP, B, qc); #c1(CDH18) c2(NP_001161139) c3(cadherin-18 isoform 2 preproprotein) c4(65352) c5(65353, 65354, 65355, 65356, 65357, 65358) c6( ) c7(om, fq); #c1(CDH18) c2(NP_001278885) c3(cadherin-18 isoform 1 preproprotein) c4(110793) c5(110794, 110795, 110796, 110797, 110798, 110799, 110800, 110801, 110802, 110803, 110804, 110805, 110806, 110807, 110808, 110809, 110810, 110811) c6( ) c7(om, fq); #c1(CDH19) c2(NP_001257957) c3(cadherin-19 isoform 2 preproprotein) c4(95872) c5(95873, 95874, 95875, 95876, 95877, 95878) c6( ) c7(aw, bO); #c1(CDH19) c2(NP_066976) c3(cadherin-19 isoform 1 preproprotein) c4(207936, 207937) c5(207938, 207939, 207940, 207941, 207942, 207943) c6( ) c7(aw, bO); #c1(CDH19) c2(XP_011524234) c3(cadherin-19 isoform X2) c4( ) c5(318736, 318737, 318738, 318739, 318740, 318741) c6( ) c7(aw, bO); #c1(CDH2) c2(NP_001783) c3(cadherin-2 preproprotein) c4(121050) c5(121051, 121052, 121053, 121054, 121055, 121056) c6( ) c7(Gl, T, aw, ht, aA, bB, fd, hy, v, j, ci, AO, cd, ad, eA, Na, iu, alv, HC, aT, Nc, dL, Gw, rE, ae, af, eL, YO, d, B, nO, aW, Y, yL, ff, en, g, bz, cA, eM, bE, mx, Gu, zl, cB, X, qc); #c1(CD1120) c2(XP_005266739) c3(cadherin-20 isoform X1) c4(280290) c5(280291, 280292, 280293, 280294, 280295, 280296, 280297, 280298, 280299, 280300, 280301, 280302, 280303, 280304) c6( ) c7(g, s, bO); #c1(CDH22) c2(XP_011527296) c3(cadherin-22 isoform X1) c4(321919) c5(321920, 321921, 321922, 321923, 321924, 321925, 321926, 321927, 321928, 321929) c6( ) c7(bL); #c1(CDH23) c2(NP_001165401) c3(cadherin-23 isoform 3 precursor) c4(67653) c5( ) c6( ) c7(bM, pH, alx, alz, lR, aW, aw, alA, aly, aT, akl, nw, oc, nC, Bh, na); #c1(CDH23) c2(NP_001165402) c3(cadherin-23 isoform 4 precursor) c4(67654) c5( ) c6( ) c7(bM, pH, alx, alz, lR, aW, aw, alA, aly, aT, akl, nw, oc, nC, Bh, na); #c1(CDH23) c2(NP_071407) c3(cadherin-23 isoform 1 precursor) c4(211486) c5(211487, 211488, 211489, 211490, 211491, 211492, 211493, 211494, 211495, 211496, 211497, 211498, 211499, 211500, 211501, 211502, 211503) c6( ) c7(bM, pH, alx, alz, lR, aW, aw, alA, aly, aT, akl, nw, oc, nC, Bh, na); #c1(CDH23) c2(NP_443068) c3(cadherin-23 isoform 2 precursor) c4(229198, 229199, 229200) c5(229201, 229202, 229203, 229204, 229205, 229206, 229207, 229208, 229209, 229210, 229211, 229212, 229213, 229214, 229215, 229216) c6( ) c7(bM, pH, alx, alz, IR, aW, aw, alA, aly, aT, akl, nw, oc, nC, Bh, na); #c1(CDH23) c2(XP_006718005) c3(cadherin-23 isoform X5) c4(291426, 291427) c5(291428, 291429, 291430, 291431, 291432, 291433, 291434, 291435, 291436, 291437, 291438, 291439) c6( ) c7(bM, pH, alx, alz, lR, aW, aw, alA, aly, aT, akl, nw, oc, nC, Bh, na); #c1(CDH23) c2(XP_011538341) c3(cadherin-23 isoform X2) c4(336026) c5( ) c6( ) c7(bM, pH, alx, alz, lR, aW, aw, alA, aly, aT, akl, nw, oc, nC, Bh, na); #c1(CDH23) c2(XP_011538343) c3(cadherin-23 isoform X4) c4( ) c5(336027) c6( ) c7(bM, pH, alx, alz, lR, aW, aw, alA, aly, aT, akl, nw, oc, nC, Bh, na); #c1(CDH23) c2(XP_011538345) c3(cadherin-23 isoform X7) c4(336028) c5(336029, 336030, 336031, 336032, 336033, 336034) c6( ) c7(bM, pH, alx, alz, lR, aW, aw, alA, aly, aT, akl, nw, oc, nC, Bh, na); #c1(CDH23) c2(XP_011538348) c3(cadherin-23 isoform X10) c4(336035) c5( ) c6( ) c7(bM, pH, alx, alz, lR, aW, aw, alA, aly, aT, akl, nw, oc, nC, Bh, na); #c1(CDH23) c2(XP_011538355) c3(cadherin-23 isoform X16) c4( ) c5(336036, 336037, 336038, 336039, 336040, 336041) c6( ) c7(bM, pH, alx, alz, lR, aW, aw, alA, aly, aT, akl, nw, oc, nC, Bh, na); #c1(CDH23) c2(XP_011538356) c3(cadherin-23 isoform X17) c4( ) c5(336042, 336043, 336044, 336045, 336046, 336047, 336048, 336049) c6( ) c7(bM, pH, alx, alz, lR, aW, aw, alA, aly, aT, akl, nw, oc, nC, Bh, na); #c1(CDH26) c2(NP_068582) c3(cadherin-like protein 26 isoform b) c4(209710) c5(209711, 209712, 209713, 209714, 209715, 209716, 209717) c6( ) c7(bM, oe); #c1(CDH26) c2(NP_817089) c3(cadherin-like protein 26 isoform a precursor) c4(253082) c5(253083, 253084, 253085, 253086, 253087, 253088) c6( ) c7(bM, oe); #c1(CDH26) c2(XP_006723910) c3(cadherin-like protein 26 isoform X5) c4(295441) c5(295442, 295443, 295444, 295445, 295446, 295447) c6( ) c7(bM, oe); #c1(CDH26) c2(XP_011527271) c3(cadherin-like protein 26 isoform X2) c4(321899, 321900) c5(321901, 321902, 321903, 321904, 321905, 321906) c6( ) c7(bM, oe); #c1(CDH26) c2(XP_011527272) c3(cadherin-like protein 26 isoform X3) c4( ) c5(321907, 321908, 321909, 321910, 321911, 321912) c6( ) c7(bM, oe); #c1(CDH3) c2(NP_001784) c3(cadherin-3 preproprotein) c4(121057, 121058) c5(121059, 121060, 121061, 121062, 121063, 121064, 121065) c6( ) c7(T, iB, aj, fr, ci, q, dP, aE, arA, Sr, aT, alB, alC, s, aW, Y, ff, r, en, g, iV, W, alu, als, m, hS); #c1(CDH4) c2(NP_001239267) c3(cadherin-4 isoform 2) c4( ) c5(88398, 88399, 88400, 88401, 88402, 88403) c6( ) c7(T, ac, gX, aA, aF, dy, ci); #c1(CDH4) c2(NP_001239268) c3(cadherin-4 isoform 3) c4(88404) c5( ) c6( ) c7(T, ac, gX, aA, aF, dy, ci); #c1(CDH4) c2(NP_001785) c3(cadherin-4 isoform 1 preproprotein) c4(121066, 121067) c5(121068, 121069, 121070, 121071, 121072, 121073, 121074, 121075, 121076, 121077, 121078, 121079) c6( ) c7(T, ac, gX, aA, aF, dy, ci); #c1(CDH5) c2(NP_001786) c3(cadherin-5 preproprotein) c4(121080, 121081) c5(121082, 121083, 121084, 121085, 121086, 121087, 121088, 121089, 121090, 121091, 121092, 121093, 121094, 121095, 121096, 121097, 121098, 121099, 121100, 121101, 121102, 121103, 121104, 121105) c6( ) c7(alD, d, hd, ue, nB, bf, aW, Y, qK, mx, aT, cR, cm, dG, K, m, ml, ym, eA, bc); #c1(CDH5) c2(XP_011521103) c3(cadherin-5 isoform X1) c4(316032, 316033) c5( ) c6( ) c7(alD, d, hd, ue, nB, bf, aW, Y, qK, mx, aT, cR, cm, dG, K, m, ml, ym, eA, bc); #c1(CDH6) c2(XP_011512223) c3(cadherin-G isoform X1) c4(302786) c5(302787, 302788, 302789, 302790, 302791, 302792) c6( ) c7(hd, iA, nB, aw, n, Qm, fr, ci, m, bz, t, fq, B); #c1(CDH7) c2(NP_387450) c3(cadherin-7 preproprotein) c4(228969) c5(228970, 228971, 228972, 228973, 228974, 228975, 228976, 228977, 228978, 228979, 228980, 228981, 228982, 228983) c6( ) c7(Y, bK, bO); #c1(CDH8) c2(NP_001787) c3(cadherin-8 preproprotein) c4(121106) c5(121107, 121108, 121109, 121110, 121111, 121112, 121113, 121114, 121115, 121116) c6( ) c7(bN, aw, fr, an, rz, ao, xt); #c1(CDH9) c2(XP_011512224) c3(cadherin-9 isoform X1) c4(302793, 302794, 302795) c5(302796, 302797, 302798, 302799, 302800, 302801, 302802, 302803, 302804, 302805, 302806, 302807, 302808, 302809, 302810, 302811, 302812, 302813) c6( ) c7(pN, iX, oe, cz, aj, fr, Hb, rE, fq, bN, qc); #c1(CDHR1) c2(NP_001165442) c3(cadherin-related family member 1 isoform 2 precursor) c4(67727) c5(67728, 67729, 67730, 67731, 67732, 67733) c6( ) c7(alF, W, lR, nb, nx, nw, nC, alE); #c1(CDHR1) c2(NP_149091) c3(cadherin-related family member 1 isoform 1 precursor) c4(227080, 227081) c5(227082, 227083, 227084, 227085, 227086, 227087, 227088, 227089, 227090, 227091, 227092, 227093) c6( ) c7(alF, W, lR, nb, nx, nw, nC, alE); #c1(CDHR2) c2(NP_001165447) c3(cadherin-related family member 2 precursor) c4(67734) c5(67735, 67736, 67737, 67738, 67739, 67740, 67741, 67742, 67743, 67744, 67745, 67746, 67747, 67748) c6( ) c7(bB, bE, T, aq); #c1(CDHR3) c2(NP_689963) c3(cadherin-related family member 3 isoform 1 precursor) c4(244595, 244596) c5(244597, 244598, 244599, 244600, 244601, 244602, 244603, 244604, 244605, 244606, 244607, 244608) c6( ) c7(bM, hH, pM); #c1(CDHR3) c2(XP_011514257) c3(cadherin-related family member 3 isoform X2) c4(306824) c5( ) c6( ) c7(bM, hH, pM); #c1(CDHR3) c2(XP_011514260) c3(cadherin-related family member 3 isoform X7) c4(306825, 306826) c5(306827, 306828, 306829, 306830, 306831, 306832, 306833, 306834, 306835, 306836, 306837, 306838, 306839, 306840, 306841, 306842, 306843, 306844) c6( ) c7(bM, hH, pM); #c1(CDHR5) c2(NP_001165439) c3(cadherin-related family member 5 isoform 4 precursor) c4(67726) c5( ) c6( ) c7(aj, l, q, r); #c1(CDHR5) c2(NP_068743) c3(cadherin-related family member 5 isoform 1 precursor) c4(210137) c5(210138, 210139, 210140, 210141, 210142, 210143, 210144, 210145, 210146, 210147) c6( ) c7(aj, l, q, r); #c1(CDHR5) c2(NP_112554) c3(cadherin-related family member 5 isoform 3 precursor) c4(221374) c5(221375, 221376, 221377, 221378, 221379, 221380) c6( ) c7(aj, l, q, r); #c1(CDHR5) c2(XP_005253047) c3(cadherin-related family member 5 isoform X5) c4( ) c5(272114) c6( ) c7(aj, l, q, r); #c1(CDHR5) c2(XP_011518492) c3(cadherin-related family member 5 isoform X5) c4( ) c5(312562) c6( ) c7(aj, l, q, r); #c1(CDHR5) c2(XP_011518493) c3(cadherin-related family member 5 isoform X1) c4( ) c5(312563, 312564, 312565, 312566, 312567, 312568) c6( ) c7(aj, l, q, r); #c1(CDIPT) c2(NP_006310) c3(CDP-diacylglycerol—inositol 3-phosphatidyltransferase isoform 1) c4(163885, 163886) c5(163887, 163888, 163889, 163890, 163891, 163892, 163893, 163894, 163895, 163896, 163897, 163898) c6( ) c7(am, aek, N, alG); #c1(CDK1) c2(NP_203698) c3(cyclin-dependent kinase 1 isoform 2) c4(228457) c5(228458, 228459, 228460, 228461, 228462, 228463, 228464, 228465, 228466, 228467) c6( ) c7(T, os, hl, pf, zt, ha, jh, aA, bB, n, oZ, fd, j, ci, fK, q, ad, eA, dP, aE, aT, h, dL, K, jj, ae, af, eL, Lg, jf, d, nO, aW, Y, ff, r, aq, Xj, aF, en, cl, t, iK, bz, eK, ck, bF, ac, eM, nB, bE, bP, dO, U, hL, hR, np, m, bC, bt, kS, B, L); #c1(CDK1) c2(XP_006718145) c3(cyclin-dependent kinase 1 isoform X1) c4(291555, 291556, 291557) c5(291558, 291559, 291560, 291561, 291562, 291563, 291564, 291565, 291566, 291567, 291568, 291569, 291570, 291571, 291572, 291573, 291574, 291575) c6( ) c7(T, os, hl, pf, zt, ha, jh, aA, bB, n, oZ, fd, j, ci, fK, q, ad, eA, dP, aE, aT, h, dL, K, jj, ae, af, eL, Lg, jf, d, nO, aW, Y, ff, r, aq, Xj, aF, en, cl, t, iK, bz, eK, ck, bF, ac, eM, nB, bE, bP, dO, U, hL, hR, np, m, bC, bt, kS, B, L); #c1(CDK10) c2(NP_443713) c3(cyclin-dependent kinase 10 isoform b) c4( ) c5(229950, 229951, 229952, 229953, 229954) c6( ) c7(T, os, aW, Y, aT, cd, oZ, B); #c1(CDK10) c2(NP_443714) c3(cyclin-dependent kinase 10 isoform a) c4(229955, 229956) c5(229957, 229958, 229959, 229960, 229961, 229962, 229963, 229964, 229965, 229966, 229967, 229968) c6( ) c7(T, os, aW, Y, aT, cd, oZ, B); #c1(CDK10) c2(XP_006721373) c3(cyclin-dependent kinase 10 isoform X7) c4(293953) c5(293954) c6( ) c7(T, os, aW, Y, aT, cd, oZ, B); #c1(CDK11B) c2(NP_001778) c3(cyclin-dependent kinase 11B isoform 1) c4(121026, 121027) c5(121028, 121029, 121030, 121031, 121032) c6( ) c7(asp, Y, au, eH, U, aT, eF, cm); #c1(CDK11B) c2(XP_011540794) c3(cyclin-dependent kinase 11B isoform X1) c4( ) c5(339354, 339355, 339356, 339357, 339358) c6( ) c7(asp, Y, au, eH, U, aT, eF, cm); #c1(CDK12) c2(NP_055898) c3(cyclin-dependent kinase 12 isoform 2) c4(184309) c5(184310, 184311, 184312, 184313, 184314, 184315) c6( ) c7(t, m); #c1(CDK12) c2(NP_057591) c3(cyclin-dependent kinase 12 isoform 1) c4(191477) c5( ) c6( ) c7(t, m); #c1(CDK12) c2(XP_005257513) c3(cyclin-dependent kinase 12 isoform X1) c4( ) c5(275185, 275186, 275187, 275188, 275189, 275190, 275191) c6( ) c7(t, m); #c1(CDK13) c2(NP_003709) c3(cyclin-dependent kinase 13 isoform 1) c4(140337) c5(140338, 140339, 140340, 140341, 140342, 140343) c6( ) c7(alI, alH, q, r, B); #c1(CDK13) c2(NP_112557) c3(cyclin-dependent kinase 13 isoform 2) c4(221382) c5(221383, 221384, 221385, 221386, 221387, 221388) c6( ) c7(alI, alH, q, r, B); #c1(CDK13) c2(XP_011513900) c3(cyclin-dependent kinase 13 isoform X2) c4( ) c5(306335) c6( ) c7(alI, alH, q, r, B); #c1(CDK14) c2(NP_001274064) c3(cyclin-dependent kinase 14 isoform a) c4(105992) c5(105993, 105994, 105995, 105996, 105997, 105998) c6( ) c7(oe, B, ff, en); #c1(CDK14) c2(NP_001274066) c3(cyclin-dependent kinase 14 isoform d) c4(105999) c5(106000, 106001, 106002, 106003, 106004, 106005) c6( ) c7(oe, B, ff, en); #c1(CDK14) c2(NP_036527) c3(cyclin-dependent kinase 14 isoform b) c4(174232) c5(174233, 174234, 174235, 174236, 174237, 174238) c6( ) c7(oe, B, ff, en); #c1(CDK15) c2(NP_001248364) c3(cyclin-dependent kinase 15 isoform 1) c4(93809) c5(93810, 93811, 93812, 93813, 93814, 93815) c6( ) c7(T, Y, alJ, K, MC, eW); #c1(CDK15) c2(NP_001248365) c3(cyclin-dependent kinase 15 isoform 2) c4(93816) c5(93817, 93818, 93819, 93820, 93821, 93822) c6( ) c7(T, Y, alJ, K, MC, eW); #c1(CDK15) c2(NP_631897) c3(cyclin-dependent kinase 15 isoform 3) c4( ) c5(238256, 238257, 238258, 238259, 238260, 238261, 238262, 238263) c6( ) c7(T, Y, alJ, K, MC, eW); #c1(CDK15) c2(XP_006712759) c3(cyclin-dependent kinase 15 isoform X2) c4(286822, 286823) c5(286824, 286825, 286826, 286827, 286828, 286829, 286830, 286831) c6( ) c7(T, Y, alJ, K, MC, eW); #c1(CDK16) c2(NP_001163931) c3(cyclin-dependent kinase 16 isoform 3) c4(66508, 66509) c5(66510, 66511, 66512, 66513, 66514, 66515, 66516) c6( ) c7(T, IR, Y, alJ, MC, K, oQ, QK, eW); #c1(CDK16) c2(NP_006192) c3(cyclin-dependent kinase 16 isoform 1) c4( ) c5(162747, 162748, 162749, 162750, 162751, 162752, 162753, 162754, 162755, 162756, 162757, 162758, 162759, 162760, 162761, 162762, 162763, 162764, 162765, 162766, 162767, 162768, 162769, 162770, 162771) c6( ) c7(T, IR, Y, alJ, MC, K, oQ, QK, eW); #c1(CDK16) c2(NP_148978) c3(cyclin-dependent kinase 16 isoform 2) c4(226668, 226669, 226670, 226671, 226672, 226673, 226674) c5(226675, 226676, 226677, 226678, 226679, 226680, 226681, 226682, 226683, 226684, 226685, 226686, 226687, 226688, 226689, 226690, 226691, 226692, 226693, 226694, 226695, 226696, 226697) c6( ) c7(T, IR, Y, alJ, MC, K, oQ, QK, eW); #c1(CDK16) c2(XP_011542223) c3(cyclin-dependent kinase 16 isoform X2) c4( ) c5(340724) c6( ) c7(T, IR, Y, alJ, MC, K, oQ, QK, eW); #c1(CDK16) c2(XP_011542224) c3(cyclin-dependent kinase 16 isoform X3) c4( ) c5(340725, 340726) c6( ) c7(T, IR, Y, alJ, MC, K, oQ, QK, eW); #c1(CDK17) c2(NP_002586) c3(cyclin-dependent kinase 17 isoform 1) c4(130080) c5(130081, 130082, 130083, 130084, 130085, 130086) c6( ) c7(Ew, an); #c1(CDK17) c2(XP_011536737) c3(cyclin-dependent kinase 17 isoform X1) c4(334369) c5(334370, 334371, 334372, 334373, 334374, 334375) c6( ) c7(Ew, an); #c1(CDK17) c2(XP_011536738) c3(cyclin-dependent kinase 17 isoform X2) c4(334376, 334377, 334378) c5(334379, 334380, 334381, 334382, 334383, 334384, 334385, 334386, 334387, 334388, 334389, 334390, 334391, 334392, 334393, 334394, 334395, 334396) c6( ) c7(Ew, an); #c1(CDK18) c2(NP_002587) c3(cyclin-dependent kinase 18 isoform b) c4( ) c5(130087, 130088, 130089, 130090, 130091, 130092) c6( ) c7(eA); #c1(CDK18) c2(NP_997668) c3(cyclin-dependent kinase 18 isoform a) c4(265675, 265676) c5(265677, 265678, 265679, 265680, 265681, 265682, 265683, 265684, 265685, 265686, 265687, 265688) c6( ) c7(eA); #c1(CDK18) c2(XP_011507904) c3(cyclin-dependent kinase 18 isoform X1) c4(298181, 298182) c5(298183, 298184, 298185, 298186, 298187, 298188, 298189, 298190, 298191, 298192) c6( ) c7(eA); #c1(CDK19) c2(NP_001287892) c3(cyclin-dependent kinase 19 isoform 3) c4( ) c5(113150, 113151, 113152, 113153, 113154, 113155, 113156, 113157, 113158, 113159, 113160, 113161, 113162, 113163, 113164, 113165) c6( ) c7(au, vA, eH, r, eF, q); #c1(CDK19) c2(NP_055891) c3(cyclin-dependent kinase 19 isoform 1) c4(184217, 184218, 184219, 184220) c5(184221, 184222, 184223, 184224, 184225, 184226, 184227, 184228) c6( ) c7(au, vA, eH, r, eF, q); #c1(CDK19) c2(XP_005266928) c3(cyclin-dependent kinase 19 isoform X4) c4(280406) c5(280407, 280408, 280409, 280410, 280411, 280412) c6( ) c7(au, vA, eH, r, eF, q); #c1(CDK2) c2(NP_001789) c3(cyclin-dependent kinase 2 isoform 1) c4(121133) c5(121134, 121135, 121136, 121137, 121138, 121139) c6( ) c7(bM, T, aC, if, fd, bB, ci, ip, x, aE, dE, ajv, K, hu, eL, xQ, Jl, aW, nY, g, alK, as, eF, cm, iP, eM, nB, iA, vA, cj, PV, m, k, sc, wu, ht, qy, awr, qN, ft, h, dL, A, kj, fQ, aq, op, bP, dB, azr, it, B, fM, dA, aA, pd, q, eA, Vr, qK, aT, vH, ae, jf, qw, s, vT, iU, Y, r, lo, en, cl, t, iK, ck, iM, Dy, DW, wR, np, bt, hS, kh, id, aHA, jh, OE, Fc, ad, hd, F, ib, Rq, wm, fb, Yi, d, je, ff, eH, aF, iR, bz, es, Hw, bE, afd, bC, y, X, jr); #c1(CDK2) c2(NP_439892) c3(cyclin-dependent kinase 2 isoform 2) c4(229130) c5(229131, 229132, 229133, 229134, 229135, 229136) c6( ) c7(bM, T, aC, if, fd, bB, ci, ip, x, aE, dE, ajv, K, hu, eL, xQ, Jl, aW, nY, g, alK, as, eF, cm, iP, eM, nB, iA, vA, cj, PV, m, k, sc, wu, ht, qy, awr, qN, ft, h, dL, A, kj, fQ, aq, op, bP, dB, azr, it, B, fM, dA, aA, pd, q, eA, Vr, qK, aT, vH, ae, jf, qw, s, vT, iU, Y, r, lo, en, cl, t, iK, ck, iM, Dy, DW, wR, np, bt, hS, kh, id, aHA, jh, OE, Fc, ad, hd, F, ib, Rq, wm, fb, Yi, d, je, ff, eH, aF, iR, bz, es, Hw, bE, afd, bC, y, X, jr); #c1(CDK20) c2(NP_001034892) c3(cyclin-dependent kinase 20 isoform 3) c4(32383) c5(32384, 32385, 32386, 32387, 32388, 32389) c6( ) c7(T, d, yw, kB, h, m, hH); #c1(CDK20) c2(NP_001164111) c3(cyclin-dependent kinase 20 isoform 5) c4(66629) c5(66630, 66631, 66632, 66633, 66634, 66635) c6( ) c7(T, d, yw, kB, h, m, hH); #c1(CDK20) c2(NP_036251) c3(cyclin-dependent kinase 20 isoform 2) c4(172641, 172642) c5(172643, 172644, 172645, 172646, 172647, 172648, 172649, 172650, 172651, 172652, 172653, 172654) c6( ) c7(T, d, yw, kB, h, m, hH); #c1(CDK20) c2(NP_848519) c3(cyclin-dependent kinase 20 isoform 1) c4(253760) c5(253761, 253762, 253763, 253764, 253765, 253766) c6( ) c7(T, d, yw, kB, h, m, hH); #c1(CDK2AP1) c2(NP_004633) c3(cyclin-dependent kinase 2-associated protein 1 isoform 1) c4(148382) c5(148383, 148384, 148385, 148386, 148387, 148388) c6( ) c7(T, ff, r, ey, ci, m, en, t, V, ae, q, ad); #c1(CDK2AP2) c2(NP_005842) c3(cyclin-dependent kinase 2-associated protein 2 isoform 1) c4(159806) c5(159807, 159808, 159809, 159810, 159811, 159812) c6( ) c7(sc, jf, T, ft, aEj, aW, Y, jh, aT, cj, r, dL, aF, ci, K, q, EY, g, fr, B, ad); #c1(CDK3) c2(NP_001249) c3(cyclin-dependent kinase 3) c4(94024) c5(94025, 94026, 94027, 94028, 94029, 94030, 94031, 94032, 94033, 94034) c6( ) c7(T, d, if, iw, qN, B); #c1(CDK4) c2(NP_000066) c3(cyclin-dependent kinase 4) c4(1124, 1125, 1126, 1127, 1128, 1129) c5(1130, 1131, 1132, 1133, 1134, 1135, 1136, 1137, 1138, 1139, 1140, 1141, 1142, 1143, 1144, 1145, 1146, 1147, 1148, 1149, 1150, 1151, 1152, 1153, 1154, 1155, 1156, 1157, 1158, 1159, 1160, 1161, 1162, 1163, 1164, 1165) c6( ) c7(G, T, pf, hV, YU, if, alN, fd, bB, axk, ci, ip, x, bv, aE, u, pX, SV, K, eL, avq, Qe, eG, yo, zQ, aW, hl, CT, Qm, g, as, eF, cm, QA, iP, eM, cj, k, m, Xu, iu, alM, sc, iB, qy, n, aj, kv, fr, qN, zP, pe, aeX, Lv, dL, dx, Lg, A, kj, iw, ks, fQ, aq, kp, iN, bJ, bP, dB, hk, eD, hL, hj, at, it, B, bL, fM, yk, fZ, aA, hy, v, q, J, er, eA, lg, hW, qK, yg, aT, aHs, cy, ae, af, jf, iF, qw, s, vT, Qr, nO, Y, iU, r, en, hf, bu, t, cl, iK, ck, ov, QG, kP, Dy, ac, au, alL, bt, hS, On, kh, iW, jh, KO, hF, Fc, ad, afb, av, l, hd, ib, vJ, hP, fb, Dl, d, BN, ff, eH, bz, eK, bF, bE, QC, y, ne); #c1(CDK5) c2(NP_001157882) c3(cyclin-dependent-like kinase 5 isoform 2) c4(62858) c5(62859, 62860, 62861, 62862, 62863, 62864) c6( ) c7(bL, T, dD, ea, fd, bB, GC, aj, eq, bX, aR, ad, hd, aE, nv, hb, M, aT, alO, cy, dL, K, an, ae, af, eu, Lg, aii, xX, kl, aW, eH, cr, as, eF, cm, bz, FT, ck, ok, rR, WO, c, nB, ac, bE, eM, bP, U, at, act, ei, xg, gD, ek); #c1(CDK5) c2(NP_004926) c3(cyclin-dependent-like kinase 5 isoform 1) c4(150829) c5(150830, 150831, 150832, 150833, 150834, 150835) c6( ) c7(bL, T, dD, ea, fd, bB, GC, aj, eq, bX, aR, ad, hd, aE, nv, hb, M, aT, alO, cy, dL, K, an, ae, af, eu, Lg, aii, xX, kl, aW, eH, cr, as, eF, cm, bz, FT, ck, ok, rR, WO, c, nB, ac, bE, eM, bP, U, at, act, ei, xg, gD, ek); #c1(CDK5RI) c2(XP_011523740) c3(cyclin-dependent kinase 5 activator 1 isoform X1) c4(318212) c5(318213, 318214, 318215, 318216, 318217, 318218) c6( ) c7(T, hl, alQ, fr, nA, alP, alR, aR, ad, hX, Hx, hb, dV, aT, h, K, ae, af, Lg, eG, A, Y, eH, Pg, eZ, as, eF, cm, kT, WO, c, ac, bP, WP, U, auT, xg, gD, ek); #c1(CDK5R2) c2(NP_003927) c3(cyclin-dependent kinase 5 activator 2) c4(142233) c5(142234, 142235, 142236, 142237, 142238, 142239) c6( ) c7(hb, af, Pg); #c1(CDK5RAP1) c2(NP_001265096) c3(CDK5 regulatory subunit-associated protein 1 isoform c) c4( ) c5(97773, 97774, 97775, 97776, 97777, 97778) c6( ) c7(cF); #c1(CDK5RAP1) c2(NP_001265097) c3(CDK5 regulatory subunit-associated protein 1 isoform d) c4(97779, 97780) c5(97781, 97782, 97783, 97784, 97785, 97786, 97787) c6( ) c7(cF); #c1(CDK5RAP1) c2(NP_057166) c3(CDK5 regulatory subunit-associated protein 1 isoform b) c4( ) c5(189273) c6( ) c7(cF); #c1(CDK5RAP1) c2(NP_057492) c3(CDK5 regulatory subunit-associated protein 1 isoform a) c4(191157, 191158, 191159, 191160) c5(191161, 191162, 191163, 191164, 191165, 191166, 191167, 191168, 191169, 191170, 191171, 191172, 191173, 191174, 191175, 191176, 191177) c6( ) c7(cF); #c1(CDK5RAP1) c2(XP_011527157) c3(CDK5 regulatory subunit-associated protein 1 isoform X1) c4( ) c5(321674, 321675, 321676, 321677, 321678) c6( ) c7(cF); #c1(CDK5RAP2) c2(NP_001011649) c3(CDK5 regulatory subunit-associated protein 2 isoform b) c4(24661) c5(24662, 24663, 24664, 24665, 24666, 24667) c6( ) c7(QK, aii, aij, alS); #c1(CDK5RAP2) c2(NP_001258968) c3(CDK5 regulatory subunit-associated protein 2 isoform c) c4(96841) c5(96842, 96843, 96844, 96845, 96846, 96847) c6( ) c7(QK, aii, aij, alS); #c1(CDK5RAP2) c2(NP_060719) c3(CDK5 regulatory subunit-associated protein 2 isoform a) c4(197461, 197462) c5(197463, 197464, 197465, 197466, 197467, 197468, 197469, 197470, 197471, 197472, 197473, 197474) c6( ) c7(QK, aii, aij, alS); #c1(CDK5RAP2) c2(XP_006717245) c3(CDK5 regulatory subunit-associated protein 2 isoform X3) c4(290820) c5(290821, 290822, 290823, 290824, 290825, 290826) c6( ) c7(QK, aii, aij, alS); #c1(CDK5RAP3) c2(NP_788276) c3(CDK5 regulatory subunit-associated protein 3 isoform b) c4(252174) c5(252175, 252176, 252177, 252178, 252179, 252180) c6( ) c7(T, B, bE, ev, X, r, bB, K, g, q, oU); #c1(CDK5RAP3) c2(XP_011523599) c3(CDK5 regulatory subunit-associated protein 3 isoform X1) c4(318078) c5(318079, 318080, 318081, 318082, 318083, 318084) c6( ) c7(T, B, bE, ev, X, r, bB, K, g, q, oU); #c1(CDK6) c2(XP_006715898) c3(cyclin-dependent kinase 6 isoform X1) c4(289892) c5(289893, 289894, 289895, 289896, 289897, 289898, 289899, 289900, 289901, 289902) c6( ) c7(sc, T, fM, pf, wu, jh, aA, it, fd, cL, aon, eA, o, ad, x, Bl, aE, pX, aT, h, dL, wm, fb, ae, eL, aij, jf, A, d, aW, Y, ff, hl, kp, aF, yq, en, hf, g, t, ve, bz, pb, cm, iP, ck, Dy, eM, nB, bP, hL, cj, Nl, m, k, y, bt, xb, B); #c1(CDK7) c2(NP_001790) c3(cyclin-dependent kinase 7) c4(121140) c5(121141, 121142, 121143, 121144, 121145, 121146) c6( ) c7(bL, T, ci, bX, V, eA, ad, av, ft, aE, NS, aT, dL, ae, d, aW, nY, t, bz, bJ, ck, at, m, jQ, X); #c1(CDK8) c2(NP_001251) c3(cyclin-dependent kinase 8) c4( ) c5( ) c6( ) c7(T, bE, Y, vA, eH, NT, gd, r, bB, hL, h, fr, Ea, cl, eF, q); #c1(CDK9) c2(NP_001252) c3(cyclin-dependent kinase 9) c4( ) c5( ) c6( ) c7(Dw, T, aC, alT, jh, C, cd, ad, iu, cc, ds, aT, cU, h, K, bq, ae, dx, cp, aa, jf, iF, d, aW, aq, lo, as, cm, ck, eM, bt, avU, B); #c1(CDKAL1) c2(NP_060244) c3(threonylcarbamoyladenosine tRNA methylthiotransferase) c4(194960) c5(194961, 194962, 194963, 194964, 194965, 194966, 194967, 194968, 194969, 194970) c6( ) c7(bL, T, dD, aZ, ea, aw, aj, dG, j, v, eq, cd, q, J, mj, h, dL, eL, sj, kl, A, zR, r, cr, fe, iV, fq, ac, mg, mf, lS, ei); #c1(CDKAL1) c2(XP_011513020) c3(threonylcarbamoyladenosine tRNA methylthiotransferase isoform X1) c4(304629) c5(304630, 304631, 304632, 304633, 304634, 304635) c6( ) c7(bL, T, dD, aZ, ea, aw, aj, dG, j, v, eq, cd, q, J, mj, h, dL, eL, sj, kl, A, zR, r, cr, fe, iV, fq, ac, mg, mf, lS, ei); #c1(CDKL1) c2(NP_004187) c3(cyclin-dependent kinase-like 1 isoform 1) c4(144170) c5(144171, 144172, 144173, 144174, 144175, 144176) c6( ) c7(T, yw, kB, aA, h, aF); #c1(CDKL2) c2(NP_003939) c3(cyclin-dependent kinase-like 2) c4(142339) c5(142340, 142341, 142342, 142343, 142344, 142345) c6( ) c7(aCp, Be); #c1(CDKL3) c2(NP_001107047) c3(cyclin-dependent kinase-like 3 isoform 1) c4(42807) c5(42808, 42809, 42810, 42811, 42812, 42813) c6( ) c7(bw, nA); #c1(CDKL3) c2(NP_057592) c3(cyclin-dependent kinase-like 3 isoform 2) c4( ) c5(191478, 191479, 191480, 191481, 191482, 191483, 191484, 191485, 191486, 191487) c6( ) c7(bw, nA); #c1(CDKL3) c2(XP_006714708) c3(cyclin-dependent kinase-like 3 isoform X4) c4( ) c5(288033, 288034, 288035, 288036, 288037, 288038) c6( ) c7(bw, nA); #c1(CDKL3) c2(XP_011541732) c3(cyclin-dependent kinase-like 3 isoform X1) c4( ) c5(340337) c6( ) c7(bw, nA); #c1(CDKL3) c2(XP_011541733) c3(cyclin-dependent kinase-like 3 isoform X2) c4(340338, 340339) c5( ) c6( ) c7(bw, nA); #c1(CDKL3) c2(XP_011541734) c3(cyclin-dependent kinase-like 3 isoform X5) c4(340340) c5(340341, 340342, 340343, 340344, 340345, 340346) c6( ) c7(bw, nA); #c1(CDKL3) c2(XP_011541749) c3(cyclin-dependent kinase-like 3 isoform X12) c4(340347) c5(340348, 340349, 340350, 340351, 340352) c6( ) c7(bw, nA); #c1(CDKL4) c2(NP_001009565) c3(cyclin-dependent kinase-like 4) c4(23618) c5(23619, 23620, 23621, 23622, 23623, 23624) c6( ) c7(Qi, agl); #c1(CDKL5) c2(NP_001032420) c3(cyclin-dependent kinase-like 5) c4(31340) c5(31341, 31342, 31343, 31344, 31345, 31346, 31347, 31348, 31349, 31350) c6( ) c7(ha, Nt, nA, aR, alY, hb, alX, lm, he, alV, cC, yr, alW, alX, ahm, nf, QK, f, dr, bN, alU, Qi, WO, mG, agl); #c1(CDKN1A) c2(NP_000380) c3(cyclin-dependent kinase inhibitor 1 isoform 1) c4(8316) c5(8317, 8318, 8319, 8320, 8321, 8322, 8323, 8324, 8325, 8326, 8327) c6( ) c7(gh, T, os, bM, aC, pf, ea, if, al, fd, bB, ci, aJa, ip, x, bv, afr, aE, aEX, Qk, ajv, K, hu, eL, be, Qe, aa, yo, Jl, aW, wF, hl, CT, g, as, pL, eE, eF, cm, aAB, eM, nB, AM, iA, iT, vA, wE, cj, k, m, jM, iu, dD, afA, Or, aw, ht, NT, n, alZ, fr, Qh, qN, asS, ai, eW, co, Bl, zw, hw, It, kH, Lv, IG, aEo, dL, h, bl, eV, Gw, aJb, pl, aua, ks, fe, aq, kp, Hu, YF, dw, cM, Ld, Zj, op, Ye, bP, dB, In, hL, pV, hR, rx, at, fL, WL, it, B, fM, AS, jp, yk, uv, aoE, jx, eX, aA, sM, bZ, hy, v, atp, q, eA, eJ, MR, Ig, akU, Vr, ahL, aT, kf, cy, Ex, jj, yb, bq, ae, ne, Lu, Is, wr, s, NE, iU, Y, ev, aEk, Lf, r, en, bu, cl, t, f, iK, ck, QG, nM, iM, pZ, II, nG, agf, np, dy, im, bt, rA, hS, HQ, Gl, Mb, kh, id, pY, iW, jh, Hn, oZ, dG, eq, pz, aFJ, iJ, mC, ad, hX, dP, av, Tg, hd, ib, Rq, oW, ahK, fb, uQ, Dl, d, je, qt, vj, ff, eH, cr, eZ, Ej, gE, VI, aF, iV, iR, KM, bz, Hp, LB, bF, gk, bE, bC, Gu, y, kS, X, rk); #c1(CDKN1A) c2(NP_001278478) c3(cyclin-dependent kinase inhibitor 1 isoform 2) c4(109756) c5(109757, 109758, 109759, 109760, 109761, 109762, 109763, 109764, 109765, 109766) c6( ) c7(gh, T, os, bM, aC, pf, ea, if, al, fd, bB, ci, aJa, ip, x, bv, afr, aE, aEX, Qk, ajv, K, hu, eL, bc, Qe, aa, yo, Jl, aW, wF, hl, CT, g, as, pL, eE, eF, cm, aAB, eM, nB, AM, iA, iT, vA, wE, cj, k, m, jM, iu, dD, afA, Or, aw, ht, NT, n, alZ, fr, Qh, qN, asS, ai, eW, co, Bl, zw, hw, It, kH, Lv, IG, aEo, dL, h, bl, eV, Gw, aJb, pl, aua, ks, fe, aq, kp, Hu, YF, dw, cM, Ld, Zj, op, Ye, bP, dB, In, hL, pV, hR, rx, at, fL, WL, it, B, fM, AS, jp, yk, uv, aoE, jx, eX, aA, sM, bZ, hy, v, atp, q, eA, eJ, MR, Ig, akU, Vr, ahL, aT, kf, cy, Ex, jj, yb, bq, ae, ne, Lu, Is, wr, s, NE, iU, Y, ev, aEk, Lf, r, en, bu, cl, t, f, iK, ck, QG, nM, iM, pZ, II, nG, agf, np, dy, im, bt, rA, hS, HQ, Gl, Mb, kh, id, pY, iW, jh, Hn, oZ, dG, eq, pz, aFJ, iJ, mC, ad, hX, dP, av, Tg, hd, ib, Rq, oW, ahK, fb, uQ, Dl, d, je, qt, vj, ff, eH, cr, eZ, Ej, gE, VI, aF, iV, iR, KM, bz, Hp, LB, bF, gk, bE, bC, Gu, y, kS, X, rk); #c1(CDKN1B) c2(NP_004055) c3(cyclin-dependent kinase inhibitor 1B) c4(143178, 143179) c5(143180, 143181, 143182, 143183, 143184, 143185, 143186, 143187, 143188, 143189, 143190, 143191) c6( ) c7(gh, G, T, bM, aC, ea, if, fd, bB, ci, x, Vp, Na, aE, il, pX, Qk, K, hu, eL, Qe, yo, aeR, iE, aW, az, nY, Qv, g, as, eF, cm, aJq, bw, iP, qJ, ou, fT, eM, nB, iA, aJh, iT, cj, Nl, iS, cX, azg, k, m, OD, iu, cZ, dD, afA, IT, aw, ht, NT, n, aj, fr, qN, zP, JW, eW, aJe, aJf, ft, jz, hw, Do, Bj, kH, Ne, IG, h, dL, ey, eV, dd, pl, Oz, kj, aJd, AQ, fe, aq, yq, PU, dw, cM, sE, zZ, op, iO, kT, YE, bP, dB, Fi, eD, Pl, hL, hR, E, at, HB, avr, qF, anx, B, cn, fM, jx, eX, aA, cz, hy, j, atp, q, J, eA, zn, aHy, nv, Vr, aT, jj, ae, af, jf, s, NE, nO, iU, Y, r, iy, lo, eS, en, hf, cl, t, f, ck, rR, nM, ac, iM, DW, nG, bt, aJc, hS, id, pY, iW, YM, jh, OE, Fb, eq, Fc, iJ, ad, hX, dP, fU, av, hd, ib, py, Db, ds, NS, oW, hP, nJ, d, BN, je, Ub, vj, ff, eH, aF, VI, HI, bz, es, RV, bE, aS, aed, ne); #c1(CDKN1C) c2(NP_000067) c3(cyclin-dependent kinase inhibitor 1C isoform a) c4(1166, 1167) c5(1168, 1169, 1170, 1171, 1172, 1173, 1174, 1175, 1176, 1177, 1178, 1179, 1180) c6( ) c7(T, aC, ea, ci, x, bv, Na, aE, aX, iv, K, hu, eL, ZH, aW, uY, g, cm, bw, eM, nB, k, m, aJi, dD, aw, ht, fg, aj, rc, br, aoc, kH, jy, hn, dL, ey, CN, iw, aq, Ll, Hu, bJ, iO, bP, hL, at, eo, B, bL, ul, fM, AL, aA, V, q, J, er, eA, mj, aT, ae, s, Qr, Y, LO, r, en, t, iK, ck, alC, iM, dy, bt, pY, iW, mL eq, ad, Jm, av, fX, ib, nJ, iL, gj, d, je, ff, Lk, aF, bz, aJj, dr); #c1(CDKN1C) c2(NP_001116103) c3(cyclin-dependent kinase inhibitor 1C isoform b) c4( ) c5(43419, 43420, 43421, 43422, 43423, 43424, 43425, 43426) c6( ) c7(T, aC, ea, ci, x, bv, Na, aE, aX, iv, K, hu, eL, ZH, aW, uY, g, cm, bw, eM, nB, k, m, aJi, dD, aw, ht, fg, aj, rc, hr, aoc, kH, jy, hn, dL, ey, CN, iw, aq, Ll, Hu, bJ, iO, bP, hL, at, eo, B, bL, ul, fM, AL, aA, V, q, J, er, eA, mj, aT, ae, s, Qr, Y, LO, r, en, t, iK, ck, alC, iM, dy, bt, pY, iW, ml, eq, ad, Jm, av, fX, ib, nJ, iL, gj, d, je, ff, Lk, aF, bz, aJj, dr); #c1(CDKN2A) c2(NP_000068) c3(cyclin-dependent kinase inhibitor 2A isoform pI6INK4a) c4(1181) c5(1182, 1183, 1184, 1185, 1186, 1187, 1188, 1189) c6( ) c7(T, ea, bO, fd, aeu, aJN, ci, YD, bv, aE, ajv, auB, SV, iv, hu, hH, cp, aa, li, yo, Ls, az, QB, CT, nY, iA, Jr, nB, avZ, cj, cX, k, IS, fy, YK, aln, iB, ht, aj, hr, aeX, KN, Gw, Dz, asH, aEL, YT, pl, ge, ahJ, pm, hq, iO, dB, eD, aAE, aJC, aJJ, fZ, aA, cz, bX, AO, aJs, q, zn, akU, qK, yu, rO, jj, aJA, amw, eu, iF, bf, NE, nO, Io, eS, cI, rR, iM, ac, nG, WU, aor, aps, bt, rA, On, Mb, aEd, iW, jh, Hn, KO, dG, Sv, Gn, ad, afb, hX, iC, oW, IQ, wm, apw, Dl, BO, ff, gK, Of, aeV, aJv, iV, bz, aJx, amS, aJm, IC, ne, rk, jr, BA, iu, bM, Fv, if, e, bB, bh, aon, ye, Tz, ip, aJO, x, Ma, aeO, ja, aJu, bc, avq, YL, xQ, eG, auQ, aeR, ahG, Jl, dH, fc, hl, kt, Qm, as, eF, cm, bw, qJ, atU, vA, iS, CD, OD, ik, Vj, sc, dD, Qj, wu, aDT, n, uE, aJr, b, no, pe, ec, jz, eV, hn, A, kj, AQ, hQ, GA, aJP, bP, hL, at, pg, SZ, B, AS, dA, eX, v, Qo, V, GS, eJ, hW, wN, BJ, eO, AJ, ae, jf, Lu, iZ, vT, auc, aJD, aJq, bu, apx, LV, t, ck, kP, au, gX, vi, nZ, hl, pY, eq, Fc, aGW, hd, aop, Db, hD, aJR, YQ, auY, d, je, zR, aJk, anW, Z, adj, bF, gk, Ny, afd, pP, gZ, rH, y, aJV, atT, aC, fR, hV, atj, al, alN, Jt, afr, aJp, Xc, rJ, pX, Qk, M, K, eL, aJE, aEl, aoo, mQ, XV, LZ, hN, g, pL, iP, aAW, aJX, ou, aJw, aJH, U, PV, m, QO, sw, zX, aw, NT, fN, qy, zP, ft, It, Nn, kH, dx, aoX, aJL, aJG, ks, Og, fs, Zj, ar, mg, azr, zl, WL, it, fM, aoE, jx, j, pd, eA, J, er, XX, MR, Ig, aAE, aJn, xR, Y, ayU, r, en, iK, QG, Dy, c, aJS, dy, EY, Gl, kh, id, aHA, bS, OH, hF, iJ, dP, ajk, io, hP, Yi, BN, anv, eH, cr, aJK, aJW, aJI, iR, Ew, AR, bC, hE, tQ, pf, WV, aJM, aJo, MO, pk, Zm, ayT, akV, zQ, aAu, aW, arK, arZ, eM, iT, aep, avo, zv, jM, Xu, qR, OF, aEj, Or, aBx, Bm, Wb, awr, fr, ct, qN, ai, eW, axC, Bl, hw, h, dL, hB, SD, Lg, wC, iw, aq, kp, Hu, mo, dw, op, oU, Qy, Qu, hk, Vy, hR, uz, oh, anx, cn, bL, yk, WT, hy, mj, Vr, aoA, afQ, aT, aJy, dz, an, aJB, af, aol, qw, s, iU, aJI, gm, hf, Vq, aJU, sS, nM, aJt, aJY, aJQ, ij, hS, aD, aJF, oH, aFJ, av, F, ib, Rq, fb, iL, yF, UT, qt, eZ, auP, Ej, aF, aJT, Hp, LB, es, auJ, eU, bE, aJz, aS, MC, adg, X, us); #c1(CDKN2A) c2(NP_001182061) c3(cyclin-dependent kinase inhibitor 2A isoform p16gamma) c4(74528) c5(74529, 74530, 74531, 74532, 74533, 74534, 74535, 74536, 74537, 74538) c6( ) c7(T, ea, bO, fd, aeu, aJN, ci, YD, bv, aE, ajv, auB, SV, iv, hu, hH, cp, aa, li, yo, Ls, az, QB, CT, nY, iA, Jr, nB, avZ, cj, cX, k, IS, fy, YK, aln, iB, ht, aj, hr, aeX, KN, Gw, Dz, asH, aEL, YT, pl, ge, ahJ, pm, hq, iO, dB, eD, aAE, aJC, aJJ, fZ, aA, cz, bX, AO, aJs, q, zn, akU, qK, yu, rO, jj, aJA, amw, eu, iF, bf, NE, nO, Io, eS, cI, rR, iM, ac, nG, WU, aor, aps, bt, rA, On, Mb, aEd, iW, jh, Hn, KO, dG, Sv, Gn, ad, afb, hX, iC, oW, IQ, wm, apw, Dl, BO, ff, gK, Of, aeV, aJv, iV, bz, aJx, amS, aJm, IC, ne, rk, jr, BA, iu, bM, Fv, if, e, bB, bh, aon, ye, Tz, ip, aJO, x, Ma, aeO, ja, aJu, be, avq, YL, xQ, eG, auQ, aeR, ahG, Jl, dH, fc, hl, kt, Qm, as, eF, cm, bw, qJ, atU, vA, iS, CD, OD, ik, Vj, sc, dD, Qj, wu, aDT, n, uE, aJr, b, no, pe, ec, jz, eV, hn, A, kj, AQ, hQ, GA, aJP, bP, hL, at, pg, SZ, B, AS, dA, eX, v, Qo, V, GS, eJ, hW, wN, BJ, eO, AJ, ae, jf, Lu, iZ, vT, auc, aJD, aJq, bu, apx, LV, t, ck, kP, au, gX, vi, nZ, hl, pY, eq, Fc, aGW, hd, aop, Db, hD, aJR, YQ, auY, d, je, zR, aJk, anW, Z, adj, bF, gk, Ny, afd, pP, gZ, rH, y, aJV, atT, aC, fR, hV, atj, al, alN, Jt, afr, aJp, Xc, rJ, pX, Qk, M, K, eL, aJE, aEl, aoo, mQ, XV, LZ, hN, g, pL, iP, aAW, aJX, ou, aJw, aJH, U, PV, m, QO, sw, zX, aw, NT, fN, qy, zP, ft, It, Nn, kH, dx, aoX, aJL, aJG, ks, Og, fs, Zj, ar, mg, azr, zl, WL, it, fM, aoE, jx, j, pd, eA, J, er, XX, MR, Ig, aAE, aJn, xR, Y, ayU, r, en, iK, QG, Dy, c, aJS, dy, EY, Gl, kh, id, aHA, bS, OH, hF, iJ, dP, ajk, io, hP, Yi, BN, anv, eH, cr, aJK, aJW, aJI, iR, Ew, AR, bC, hE, tQ, pf, WV, aJM, aJo, MO, pk, Zm, ayT, akV, zQ, aAu, aW, arK, arZ, eM, iT, aep, avo, zv, jM, Xu, qR, OF, aEj, Dr, aBx, Bm, Wb, awr, fr, ct, qN, ai, eW, axC, Bl, hw, h, dL, hB, SD, Lg, wC, iw, aq, kp, Hu, mo, dw, op, oU, Qy, Qu, hk, Vy, hR, uz, oh, anx, cn, bL, yk, WT, hy, mj, Vr, aoA, afQ, aT, aJy, dz, an, aJB, af, aol, qw, s, iU, aJI, gm, hf, Vq, aJU, sS, nM, aJt, aJY, aJQ, ij, hS, aD, aJF, oH, aFJ, av, F, ib, Rq, fb, iL, yF, UT, qt, eZ, auP, Ej, aF, aJT, Hp, LB, es, auJ, eU, bE, aJz, aS, MC, adg, X, us); #c1(CDKN2A) c2(NP_478102) c3(cyclin-dependent kinase inhibitor 2A isoform P14ARF) c4(230894, 230895) c5(230896, 230897, 230898, 230899, 230900) c6( ) c7(T, ea, bO, fd, aeu, aJN, ci, YD, bv, aE, ajv, auB, SV, iv, hu, hH, cp, aa, li, yo, Ls, az, QB, CT, nY, iA, Jr, nB, avZ, cj, cX, k, IS, fy, YK, aln, iB, ht, aj, hr, aeX, KN, Gw, Dz, asH, aEL, YT, pl, ge, ahJ, pm, hq, iO, dB, eD, aAE, aJC, aJJ, fZ, aA, cz, bX, AO, aJs, q, zn, akU, qK, yu, rO, jj, aJA, amw, eu, iF, bf, NE, nO, Io, eS, cI, rR, iM, ac, nG, WU, aor, aps, bt, rA, On, Mb, aEd, iW, jh, Hn, KO, dG, Sv, Gn, ad, afb, hX, iC, oW, IQ, wm, apw, DI, BO, ff, gK, Of, aeV, aJv, iV, bz, aJx, amS, aJm, IC, ne, rk, jr, BA, iu, bM, Fv, if, e, bB, bh, aon, ye, Tz, ip, aJO, x, Ma, aeO, ja, aJu, be, avq, YL, xQ, eG, auQ, aeR, ahG, Jl, dH, fc, hl, kt, Qm, as, eF, cm, bw, qJ, atU, vA, iS, CD, OD, ik, Vj, sc, dD, Qj, wu, aDT, n, uE, aJr, b, no, pe, ec, jz, eV, hn, A, kj, AQ, hQ, GA, aJP, bP, hL, at, pg, SZ, B, AS, dA, eX, v, Qo, V, GS, eJ, hW, wN, BJ, eO, AJ, ae, jf, Lu, iZ, vT, auc, aJD, aJq, bu, apx, LV, t, ck, kP, au, gX, vi, nZ, hl, pY, eq, Fc, aGW, hd, aop, Db, hD, aJR, YQ, auY, d, je, zR, aJk, anW, Z, adj, bF, gk, Ny, afd, pP, gZ, rH, y, aJV, atT, aC, fR, hV, atj, al, alN, Jt, afr, aJp, Xc, rJ, pX, Qk, M, K, eL, aJE, aEl, aoo, mQ, XV, LZ, hN, g, pL, iP, aAW, aJX, ou, aJw, aJH, U, PV, m, QO, sw, zX, aw, NT, fN, qy, zP, ft, It, Nn, kH, dx, aoX, aJL, aJG, ks, Og, fs, Zj, ar, mq, azr, zl, WL, it, fM, aoE, jx, j, pd, eA, J, er, XX, MR, Ig, aAE, aJn, xR, Y, ayU, r, en, iK, QG, Dy, c, aJS, dy, EY, Gl, kh, id, aHA, bS, OH, hF, iJ, dP, ajk, io, hP, Yi, BN, anv, eH, cr, aJK, aJW, aJI, iR, Ew, AR, bC, hE, tQ, pf, WV, aJM, aJo, MO, pk, Zm, ayT, akV, zQ, aAu, aW, arK, arZ, eM, iT, aep, avo, zv, jM, Xu, qR, OF, aEj, Dr, aBx, Bm, Wb, awr, fr, ct, qN, ai, eW, axC, BI, hw, h, dL, hB, SD, Lg, wC, iw, aq, kp, Hu, mo, dw, op, oU, Qy, Qu, hk, Vy, hR, uz, oh, anx, cn, bL, yk, WT, hy, mj, Vr, aoA, afQ, aT, aJy, dz, an, aJB, af, aol, qw, s, iU, aJI, gm, hf, Vq, aJU, sS, nM, aJt, aJY, aJQ, ij, hS, aD, aJF, oH, aFJ, av, F, ib, Rq, fb, iL, yF, UT, qt, eZ, auP, Ej, aF, aJT, Hp, LB, es, auJ, eU, bE, aJz, aS, MC, adg, X, us); #c1(CDKN2A) c2(XP_011515979) c3(cyclin-dependent kinase inhibitor 2A isoform X3) c4( ) c5(309150, 309151, 309152, 309153, 309154) c6( ) c7(T, ea, 50, fd, aeu, aJN, ci, YD, bv, aE, ajv, auB, SV, iv, hu, hH, cp, aa, li, yo, Ls, az, QB, CT, nY, iA, Jr, nB, avZ, cj, cX, k, IS, fy, YK, aln, iB, ht, aj, hr, aeX, KN, Gw, Dz, asH, aEL, YT, pl, ge, ahJ, pm, hq, iO, dB, eD, aAE, aJC, aJJ, fZ, aA, cz, bX, AO, aJs, q, zn, akU, gK, yu, rO, jj, aJA, amw, eu, iF, bf, NE, nO, Io, eS, cI, rR, iM, ac, nG, WU, aor, aps, bt, rA, On, Mb, aEd, iW, jh, Hn, KO, dG, Sv, Gn, ad, afb, hX, iC, oW, IQ, wm, apw, DI, BO, ff, gK, Df, aeV, aJv, iV, bz, aJx, amS, aJm, IC, ne, rk, jr, BA, iu, bM, Fv, if, e, bB, bh, aon, ye, Tz, ip, aJO, x, Ma, aeO, ja, aJu, be, avq, YL, xQ, eG, auQ, aeR, ahG, Jl, dH, fc, hl, kt, Qm, as, eF, cm, bw, qJ, atU, vA, iS, CD, OD, ik, Vj, sc, dD, Qj, wu, aDT, n, uE, aJr, b, no, pe, ec, jz, eV, hn, A, kj, AQ, hQ, GA, aJP, bP, hL, at, pg, SZ, B, AS, dA, eX, v, Qo, V, GS, eJ, hW, wN, BJ, eO, AJ, ae, jf, Lu, iZ, vT, auc, aJD, aJq, bu, apx, LV, t, ck, kP, au, gX, vi, nZ, hl, pY, eq, Fc, aGW, hd, aop, Db, hD, aJR, YQ, auY, d, je, zR, aJk, anW, Z, adj, bF, gk, Ny, afd, pP, gZ, rH, y, aJV, atT, aC, fR, hV, atj, al, alN, Jt, afr, aJp, Xc, rJ, pX, Qk, M, K, eL, aJE, aEl, aoo, mQ, XV, LZ, hN, g, pL, iP, aAW, aJX, ou, aJw, aJH, U, PV, m, QO, sw, ik, aw, NT, fN, qy, zP, ft, It, Nn, kH, dx, aoX, aJL, aJG, ks, Og, fs, Zj, ar, mg, azr, zl, WL, it, fM, aoE, jx, j, pd, eA, J, er, XX, MR, Ig, aAE, aJn, xR, Y, ayU, r, en, iK, QG, Dy, c, aJS, dy, EY, Gl, kh, id, aHA, bS, OH, hF, iJ, dP, ajk, io, hP, Yi, BN, anv, eH, cr, aJK, aJW, aJI, iR, Ew, AR, bC, hE, tQ, pf, WV, aJM, aJo, MO, pk, Zm, ayT, akV, zQ, aAu, aW, arK, arZ, eM, iT, aep, avo, zv, jM, Xu, qR, OF, aEj, Or, aBx, Bm, Wb, awr, fr, ct, qN, ai, eW, axC, BI, hw, h, dL, hB, SD, Lg, wC, iw, aq, kp, Hu, mo, dw, op, oU, Qy, Qu, hk, Vy, hR, uz, oh, anx, cn, bL, yk, WT, hy, mj, Vr, aoA, afQ, aT, aJy, dz, an, aJB, af, aol, qw, s, iU, aJI, gm, hf, Vq, aJU, sS, nM, aJt, aJY, aJQ, ij, hS, aD, aJF, oH, aFJ, av, F, ib, Rq, fb, iL, yF, UT, qt, eZ, auP, Ej, aF, aJT, Hp, LB, es, auJ, eU, bE, aJz, aS, MC, adg, X, us); #c1(CDKN2AIP) c2(NP_060102) c3(CDKN2A-interacting protein) c4(194133) c5(194134, 194135, 194136, 194137, 194138, 194139) c6( ) c7(T, K); #c1(CDKN2B) c2(NP_004927) c3(cyclin-dependent kinase 4 inhibitor B isoform 1) c4(150836) c5(150837, 150838, 150839, 150840, 150841, 150842, 150843) c6( ) c7(bM, T, aC, tQ, ea, e, qx, al, fd, bB, ci, Tz, ip, x, bv, aE, aeO, M, K, hu, pk, eL, Zm, xQ, yo, aeR, dH, Jl, aW, mQ, nY, g, as, eF, cm, bw, iP, qJ, ou, eM, nB, iT, cj, PV, CD, k, m, IS, vF, ik, sc, cZ, dD, aEj, Or, aw, ht, fN, qy, n, aj, oY, fr, qN, hr, ft, ec, kH, h, hn, dL, dd, A, aix, ks, dw, oU, iO, bP, dB, hk, kz, Fi, mg, hL, pq, uz, it, B, bL, fM, AS, jx, aA, cz, v, j, GS, aJs, q, J, eA, zn, eJ, mj, Ig, nv, afQ, aT, dz, jj, XZ, ae, eu, aol, jf, bf, s, nO, iU, xR, Y, r, en, cl, t, iK, ck, cT, sS, iM, Dy, ac, pZ, gX, aor, bt, vi, HQ, hS, kh, id, pY, aHA, iW, jh, bs, dG, eq, hF, Fc, ad, iC, av, hd, fX, ib, Db, aun, hP, fb, pq, iL, d, je, ff, zR, aJK, Ej, aF, bz, bE, gk, eU, Ew, amS, aJm, AR, gZ, aS, y, iu, us); #c1(CDKN2B) c2(NP_511042) c3(cyclin-dependent kinase 4 inhibitor B isoform 2) c4(231122) c5(231123, 231124, 231125, 231126, 231127, 231128, 231129, 231130, 231131) c6( ) c7(bM, T, aC, tQ, ea, e, qx, al, fd, bB, ci, Tz, ip, x, bv, aE, aeO, M, K, hu, pk, eL, Zm, xQ, yo, aeR, dH, Jl, aW, mQ, nY, g, as, eF, cm, bw, iP, qJ, ou, eM, nB, iT, cj, PV, CD, k, m, IS, vF, ik, sc, cZ, dD, aEj, Or, aw, ht, fN, qy, n, aj, oY, fr, qN, hr, ft, ec, kH, h, hn, dL, dd, A, aix, ks, dw, oU, iO, bP, dB, hk, kz, Fi, mg, hL, pg, uz, it, B, bL, fM, AS, jx, aA, cz, v, j, GS, aJs, q, J, eA, zn, eJ, mj, Ig, nv, afQ, aT, dz, jj, XZ, ae, eu, aol, jf, bf, s, nO, iU, xR, Y, r, en, cI, t, iK, ck, cT, sS, iM, Dy, ac, pZ, gX, aor, bt, vi, HQ, hS, kh, id, pY, aHA, iW, jh, bs, dG, eq, hF, Fc, ad, iC, av, hd, fX, ib, Db, aun, hP, fb, pq, iL, d, je, ff, zR, aJK, Ej, aF, bz, bF, gk, eU, Ew, amS, aJm, AR, gZ, aS, y, iu, us); #c1(CDKN2C) c2(NP_001253) c3(cyclin-dependent kinase 4 inhibitor C) c4( ) c5( ) c6( ) c7(T, pY, al, eX, fd, hy, v, hF, Fc, eA, ip, bv, Do, aT, h, eV, K, jf, yo, d, BN, s, B, aW, Y, t, cm, bw, ck, iO, gk, amS, YE, Dy, eM, nB, Vy, iS, hR, OD, be, y, vt, ne); #c1(CDKN2D) c2(NP_001791) c3(cyclin-dependent kinase 4 inhibitor D) c4(121147) c5(121148, 121149, 121150, 121151, 121152, 121153, 121154, 121155, 121156, 121157) c6( ) c7(T, aC, pY, aAx, aA, Hn, ci, hF, V, eA, mj, kH, aT, io, K, hH, pq, eL, Lg, jf, je, aW, aoo, cr, Io, eF, t, bw, bz, aJx, iM, bP, c, Jr, eD, AR, U, m, y, qR); #c1(CDKN3) c2(NP_001124323) c3(cyclin-dependent kinase inhibitor 3 isoform 2) c4(48682) c5(48683, 48684, 48685, 48686, 48687, 48688) c6( ) c7(bM, T, ea, if, fd, ci, xE, aE, aEX, M, K, hu, eL, Qe, yo, dH, aW, uY, g, as, eF, cm, axp, bw, eM, cj, iS, azg, m, k, dD, ht, aj, qN, ai, eW, aDF, co, pe, kH, h, dL, ey, aq, dw, iO, kT, bP, hk, eD, hR, rx, it, B, bL, jx, aA, eA, J, er, cF, Vr, ahL, aT, jj, ae, jf, s, nO, oV, Y, en, apx, t, iK, ck, nM, Dy, iM, im, bt, hS, id, pY, ml, jh, Fb, eq, hF, i J, ad, hX, dP, d, je, ff, eH, aF, iR, bF, aS, bC, y, kS); #c1(CDKN3) c2(NP_005183) c3(cyclin-dependent kinase inhibitor 3 isoform 1) c4(153695, 153696, 153697, 153698) c5(153699, 153700, 153701, 153702, 153703, 153704, 153705, 153706, 153707, 153708, 153709, 153710, 153711, 153712, 153713, 153714, 153715, 153716) c6( ) c7(bM, T, ea, if, fd, ci, xE, aE, aEX, M, K, hu, eL, Qe, yo, dH, aW, uY, g, as, eF, cm, axp, bw, eM, cj, iS, azg, m, k, dD, ht, aj, qN, ai, eW, aDF, co, pe, kH, h, dL, ey, aq, dw, iO, kT, bP, hk, eD, hR, rx, it, B, bL, jx, aA, eA, J, er, cF, Vr, ahL, aT, jj, ae, jf, s, nO, oV, Y, en, apx, t, iK, ck, nM, Dy, iM, im, bt, hS, id, pY, ml, jh, Fb, eq, hF, iJ, ad, hX, dP, d, je, ff, eH, aF, iR, hF, aS, bC, y, kS); #c1(CDKN3) c2(XP_011534655) c3(cyclin-dependent kinase inhibitor 3 isoform X1) c4( ) c5(331160, 331161, 331162, 331163, 331164, 331165) c6( ) c7(bM, T, ea, if, fd, ci, xE, aE, aEX, M, K, hu, eL, Qe, yo, dH, aW, uY, g, as, eF, cm, axp, bw, eM, cj, iS, azg, m, k, dD, ht, aj, qN, ai, eW, aDF, co, pe, kH, h, dL, ey, aq, dw, iO, kT, bP, hk, eD, hR, rx, it, B, bL, jx, aA, eA, J, er, cF, Vr, ahL, aT, jj, ae, jf, s, nO, oV, Y, en, apx, t, iK, ck, nM, Dy, iM, im, bt, hS, id, pY, ml, jh, Fb, eq, hF, iJ, ad, hX, dP, d, je, ff, eH, aF, iR, hF, aS, bC, y, kS); #c1(CDNF) c2(NP_001025125) c3(cerebral dopamine neurotrophic factor precursor) c4(29347, 29348) c5(29349, 29350, 29351, 29352, 29353, 29354, 29355, 29356, 29357, 29358, 29359, 29360, 29361, 29362, 29363) c6(29364, 29365, 29366) c7(an); #c1(CDO1) c2(NP_001792) c3(cysteine dioxygenase type 1) c4(121158) c5(121159, 121160, 121161, 121162, 121163, 121164) c6( ) c7(bL, T, jz, d, eU, xR, aW, hl, gX, aT, fQ, r, cz, BV, q, MG); #c1(CDON) c2(XP_011541167) c3(cell adhesion molecule-related/down-regulated by oncogenes isoform X2) c4(339748) c5(339749, 339750, 339751, 339752, 339753, 339754) c6( ) c7(BV, ZW, MG, a JZ); #c1(CDON) c2(XP_011541168) c3(cell adhesion molecule-related/down-regulated by oncogenes isoform X1) c4(339755) c5(339756, 339757, 339758, 339759, 339760, 339761) c6( ) c7(BV, ZW, MG, aJZ); #c1(CDR1) c2(NP_004056) c3(cerebellar degeneration-related antigen 1) c4(143192) c5(143193, 143194, 143195, 143196, 143197, 143198) c6( ) c7(oO, T, aw, fd, mC, hr, sO, aT, h, MG, aW, eZ, Io, PG, pm, bw, ac, pc, cj, rH, fL, bt, L); #c1(CDR2) c2(NP_001793) c3(cerebellar degeneration-related protein 2) c4(121165) c5(121166, 121167, 121168, 121169, 121170, 121171) c6( ) c7(Qi, T, akJ, aT, cj, asa, By, h, m, t, V, it, MG); #c1(CDS2) c2(NP_003809) c3(phosphatidate cytidylyltransferase 2) c4(141051, 141052, 141053) c5(141054, 141055, 141056, 141057, 141058, 141059) c6( ) c7(cd, oQ); #c1(CDS2) c2(XP_006723723) c3(phosphatidate cytidylyltransferase 2 isoform X1) c4(295319) c5(295320, 295321, 295322, 295323, 295324, 295325) c6( ) c7(cd, oQ); #c1(CDS2) c2(XP_011527692) c3(phosphatidate cytidylyltransferase 2 isoform X2) c4( ) c5(322617, 322618, 322619, 322620, 322621, 322622, 322623, 322624, 322625, 322626, 322627, 322628) c6( ) c7(cd, oQ); #c1(CDT1) c2(NP_112190) c3(DNA replication factor Cdt1) c4(220717) c5(220718, 220719, 220720, 220721, 220722, 220723) c6( ) c7(T, fM, dE, aT, aKa, ali, m, k, t); #c1(CDV3) c2(NP_001127894) c3(protein CDV3 homolog isoform a) c4(49433) c5(49434, 49435, 49436, 49437, 49438, 49439) c6( ) c7(q, r); #c1(CDV3) c2(NP_001127895) c3(protein CDV3 homolog isoform c) c4( ) c5(49440, 49441, 49442, 49443, 49444) c6( ) c7(q, r); #c1(CDV3) c2(NP_060018) c3(protein CDV3 homolog isoform b) c4(193682) c5(193683, 193684, 193685, 193686, 193687, 193688) c6( ) c7(q, r); #c1(CDV3) c2(XP_011511263) c3(protein CDV3 homolog isoform X4) c4(301768) c5(301769) c6( ) c7(q, r); #c1(CDX1) c2(NP_001795) c3(homeobox protein CDX-1) c4(121172, 121173, 121174) c5(121175, 121176, 121177, 121178, 121179, 121180, 121181, 121182, 121183, 121184, 121185, 121186, 121187, 121188, 121189, 121190, 121191, 121192, 121193) c6( ) c7(T, jW, aD, aA, bB, ci, q, dP, aE, Tj, pl, aKb, s, ev, az, r, kt, aF, g, bP, bE, gX, apy, bt, cE, X); #c1(CDX2) c2(NP_001256) c3(homeobox protein CDX-2) c4( ) c5( ) c6( ) c7(Fv, T, aC, pf, atj, bB, ci, x, aE, gH, pX, auB, hu, cp, Qe, Jl, aW, az, LZ, kt, NR, g, eM, aep, m, k, cE, ht, NT, n, ft, jz, Yc, gd, hB, pl, AQ, fe, aq, kp, hL, at, Te, ZZ, B, yk, aA, AO, V, q, aKc, eJ, Yn, aT, ae, bA, s, NE, iU, Y, ev, r, akY, en, cl, t, iK, aKe, ck, sS, aJt, gX, bt, aD, oH, hF, ad, aKd, av, abk, I, NS, io, BO, qt, ff, aF, bz, bF, bE, X, MC, iu); #c1(CDX4) c2(NP_005184) c3(homeobox protein CDX-4) c4(153717) c5(153718, 153719, 153720, 153721, 153722, 153723, 153724) c6( ) c7(ck, hF, bt, gX); #c1(CDY1B) c2(NP_001003894) c3(testis-specific chromodomain protein Y 1 isoform a) c4(20250) c5(20251, 20252, 20253, 20254, 20255, 20256, 20257, 20258, 20259, 20260) c6( ) c7(vH, UI, ND, fd); #c1(CDY1B) c2(NP_001003895) c3(testis-specific chromodomain protein Y 1 isoform b) c4(20261, 20262) c5(20263, 20264, 20265, 20266, 20267, 20268, 20269, 20270, 20271, 20272, 20273, 20274, 20275, 20276, 20277, 20278, 20279, 20280, 20281) c6( ) c7(vH, UI, ND, fd); #c1(CDY2B) c2(NP_001001722) c3(testis-specific chromodomain protein Y 2) c4(18996) c5(18997, 18998, 18999, 19000, 19001, 19002, 19003, 19004, 19005, 19006) c6( ) c7(vH, pt, UI); #c1(CDYL) c2(NP_001137442) c3(chromodomain Y-like protein isoform d) c4( ) c5(55750, 55751, 55752, 55753, 55754, 55755, 55756, 55757) c6( ) c7(at, ft); #c1(CDYL) c2(NP_004815) c3(chromodomain Y-like protein isoform a) c4(150009, 150010, 150011) c5(150012, 150013, 150014, 150015, 150016, 150017, 150018, 150019, 150020, 150021, 150022, 150023, 150024, 150025) c6( ) c7(at, ft); #c1(CDYL2) c2(NP_689555) c3(chromodomain Y-like protein 2) c4(243097) c5(243098, 243099, 243100, 243101, 243102, 243103) c6( ) c7(dy, ac); #c1(CEACAM1) c2(NP_001020083) c3(carcinoembryonic antigen-related cell adhesion molecule 1 isoform 2 precursor) c4(28111) c5(28112, 28113, 28114, 28115, 28116, 28117, 28118, 28119, 28120, 28121, 28122, 28123, 28124, 28125, 28126, 28127, 28128, 28129, 28130, 28131, 28132, 28133, 28134) c6( ) c7(oO, bL, T, fR, wu, aA, bB, v, fr, ci, q, ad, eJ, av, Bl, hd, amB, aE, Vr, M, aT, dL, wm, ae, eL, bA, B, s, aW, Y, r, aq, pD, g, cl, eK, ac, eM, nB, bE, AM, hL, wR, X); #c1(CEACAM1) c2(NP_001171742) c3(carcinoembryonic antigen-related cell adhesion molecule 1 isoform 4 precursor) c4(71470) c5(71471, 71472, 71473, 71474, 71475, 71476) c6( ) c7(oO, bL, T, fR, wu, aA, bB, v, fr, ci, q, ad, eJ, av, Bl, hd, amB, aE, Vr, M, aT, dL, wm, ae, eL, bA, B, s, aW, Y, r, aq, pD, g, cl, eK, ac, eM, nB, bE, AM, hL, wR, X); #c1(CEACAM1) c2(NP_001171744) c3(carcinoembryonic antigen-related cell adhesion molecule 1 isoform 3 precursor) c4(71477, 71478, 71479) c5(71480, 71481, 71482, 71483, 71484, 71485) c6( ) c7(oO, bL, T, fR, wu, aA, bB, v, fr, ci, q, ad, eJ, av, Bl, hd, amB, aE, Vr, M, aT, dL, wm, ae, eL, bA, B, s, aW, Y, r, aq, pD, g, cl, eK, ac, eM, nB, bE, AM, hL, wR, X); #c1(CEACAM1) c2(NP_001171745) c3(carcinoembryonic antigen-related cell adhesion molecule 1 isoform 5 precursor) c4(71486) c5(71487, 71488, 71489, 71490, 71491, 71492, 71493, 71494, 71495, 71496, 71497, 71498) c6( ) c7(oO, bL, T, fR, wu, aA, bB, v, fr, ci, q, ad, eJ, av, Bl, hd, amB, aE, Vr, M, aT, dL, wm, ae, eL, bA, B, s, aW, Y, r, aq, pD, g, cl, eK, ac, eM, nB, bE, AM, hL, wR, X); #c1(CEACAM1) c2(NP_001703) c3(carcinoembryonic antigen-related cell adhesion molecule 1 isoform 1 precursor) c4(120241, 120242, 120243, 120244, 120245) c5(120246, 120247, 120248, 120249, 120250, 120251, 120252, 120253, 120254) c6( ) c7(oO, bL, T, fR, w aA, bB, v, fr, ci, q, ad, eJ, av, Bl, hd, amB, aE, Vr, M, aT, dL, wm, ae, eL, bA, B, s, aW, Y, r, aq, pD, g, cl, eK, ac, eM, nB, bE, AM, hL, wR, X); #c1(CEACAM1) c2(XP_011525508) c3(carcinoembryonic antigen-related cell adhesion molecule 1 isoform X1) c4(319909) c5(319910, 319911, 319912, 319913, 319914, 319915, 319916, 319917, 319918, 319919, 319920, 319921, 319922, 319923, 319924, 319925, 319926, 319927, 319928) c6( ) c7(oO, bL, T, fR, wu, aA, bB, v, fr, ci, q, ad, eJ, av, Bl, hd, amB, aE, Vr, M, aT, dL, wm, ae, eL, bA, B, s, aW, Y, r, aq, pD, g, cl, eK, ac, eM, nB, bE, AM, hL, wR, X); #c1(CEACAM16) c2(NP_001034302) c3(carcinoembryonic antigen-related cell adhesion molecule 16 precursor) c4(31650, 31651) c5(31652, 31653, 31654, 31655, 31656, 31657, 31658, 31659, 31660, 31661, 31662, 31663) c6( ) c7(aKf, aKg, fM); #c1(CEACAM19) c2(NP_001121365) c3(carcinoembryonic antigen-related cell adhesion molecule 19 isoform 1 precursor) c4(45777) c5(45778, 45779, 45780, 45781, 45782, 45783) c6( ) c7(aW, aT); #c1(CEACAM19) c2(NP_064604) c3(carcinoembryonic antigen-related cell adhesion molecule 19 isoform 2 precursor) c4(203251) c5(203252, 203253, 203254, 203255, 203256, 203257) c6( ) c7(aW, aT); #c1(CEACAM21) c2(XP_006725457) c3(carcinoembryonic antigen-related cell adhesion molecule 21 isoform X1) c4(296808) c5(296809, 296810, 296811, 296812, 296813, 296814, 296815) c6( ) c7(ao); #c1(CEACAM21) c2(XP_006725458) c3(carcinoembryonic antigen-related cell adhesion molecule 21 isoform X2) c4(296816) c5(296817, 296818, 296819, 296820, 296821, 296822) c6( ) c7(ao); #c1(CEACAM3) c2(NP_001264092) c3(carcinoembryonic antigen-related cell adhesion molecule 3 isoform 2 precursor) c4(97513) c5(97514, 97515, 97516, 97517, 97518, 97519, 97520, 97521, 97522, 97523, 97524, 97525, 97526, 97527, 97528) c6( ) c7(T, dA, if, NT, aA, bB, n, ci, ze, qN, q, eW, x, Vp, bv, av, ib, aE, iu, jz, nv, Qg, gd, aT, cU, dL, ox, Tj, eL, Qe, B, BO, s, Jl, aW, ff, r, aF, CQ, en, YF, cl, t, aoG, bz, g, cm, ck, bP, eM, bE, dc, gX, m, X, ao); #c1(CEACAM3) c2(NP_001806) c3(carcinoembryonic antigen-related cell adhesion molecule 3 isoform 1 precursor) c4(121279) c5(121280, 121281, 121282, 121283, 121284, 121285) c6( ) c7(T, dA, if, NT, aA, bB, n, ci, ze, qN, q, eW, x, Vp, bv, av, ib, aE, iu, jz, nv, Qg, gd, aT, cU, dL, ox, Tj, eL, Qe, B, BO, s, Jl, aW, ff, r, aF, CQ, en, YF, cl, t, aoG, bz, g, cm, ck, bP, eM, bE, dc, gX, m, X, ao); #c1(CEACAM4) c2(NP_001808) c3(carcinoembryonic antigen-related cell adhesion molecule 4 precursor) c4(121297) c5(121298, 121299, 121300, 121301, 121302, 121303) c6( ) c7(x, T, eJ, s, iU, bE, r, bB, ji, ci, K, g, ho, q); #c1(CEACAM5) c2(NP_001278413) c3(carcinoembryonic antigen-related cell adhesion molecule 5 preproprotein) c4(109702) c5(109703, 109704, 109705, 109706, 109707, 109708, 109709, 109710, 109711, 109712) c6( ) c7(T, aC, if, bB, ci, x, Vp, bv, aE, K, hu, eL, Qe, Jl, aW, az, g, cm, qJ, eM, nB, AM, dc, m, iu, aKi, QO, ht, NT, n, qN, eW, b, ft, jz, zw, Xe, gd, cU, ic, dL, hB, aDW, dx, pl, Yl, ia, aq, CQ, YF, kk, cM, ar, iO, bP, Pl, pg, it, B, fM, dA, aA, ze, q, eA, Yn, nv, Qg, aT, cy, Tj, ae, s, NE, iU, oV, Y, ev, r, lo, en, cl, aoG, t, ck, pa, gX, nZ, Dd, ad, hX, av, ib, NS, ji, d, BO, afe, ff, aKh, aF, iV, bz, bE, bE, i, X); #c1(CEACAM6) c2(NP_002474) c3(carcinoembryonic antigen-related cell adhesion molecule 6 preproprotein) c4(129143, 129144) c5(129145, 129146, 129147, 129148, 129149, 129150) c6( ) c7(oO, Mb, T, aC, aA, bB, n, fd, ci, q, ad, eJ, x, iu, jz, aE, aT, ji, K, ox, ae, aa, s, aW, Y, r, fe, aF, pD, g, iV, ho, t, iK, ck, eM, bE, pg, k, X, ao); #c1(CEACAM6) c2(XP_011525292) c3(carcinoembryonic antigen-related cell adhesion molecule 6 isoform X1) c4( ) c5(319758) c6( ) c7(oO, Mb, T, aC, aA, bB, n, fd, ci, q, ad, eJ, x, iu, jz, aE, aT, ji, K, ox, ae, aa, s, aW, Y, r, fe, aF, pD, g, iV, ho, t, iK, ck, eM, bE, pg, k, X, ao); #c1(CEACAM7) c2(NP_001278414) c3(carcinoembryonic antigen-related cell adhesion molecule 7 preproprotein) c4(109713, 109714, 109715) c5(109716, 109717, 109718, 109719, 109720, 109721, 109722, 109723, 109724, 109725, 109726, 109727, 109728, 109729, 109730, 109731, 109732, 109733, 109734, 109735, 109736, 109737, 109738, 109739) c6(109740, 109741) c7(T, dA, if, NT, aA, bB, n, ci, ze, qN, q, eW, x, Vp, bv, av, ib, aE, iu, nv, Qg, gd, aT, cU, dL, Tj, eL, Qe, B, BO, s, Jl, aW, ev, ff, r, aF, CQ, en, YF, cl, t, aoG, bz, g, cm, bP, eM, bE, dc, gX, m, X, BA); #c1(CEACAM8) c2(NP_001807) c3(carcinoembryonic antigen-related cell adhesion molecule 8 precursor) c4(121286) c5(121287, 121288, 121289, 121290, 121291, 121292, 121293, 121294) c6(121295, 121296) c7(x, akc, bw, n, t, fh); #c1(CEBPA) c2(NP_001274353) c3(CCAAT/enhancer-binding protein alpha isoform c) c4( ) c5(106237, 106238) c6( ) c7(bL, T, Ve, fM, xu, aC, id, yk, e, iW, jh, fd, aj, hy, j, v, hF, hr, ad, av, aT, dz, hn, K, jj, dQ, ae, af, iU, hG, et, aW, ff, eH, fc, aq, gm, yq, en, aKk, aKj, cM, bz, eF, cm, iK, iR, ck, iO, bw, iT, hk, bo, k, cP, ei, bt, B); #c1(CEBPA) c2(NP_004355) c3(CCAAT/enhancer-binding protein alpha isoform a) c4(145618) c5(145619, 145620, 145621, 145622, 145623) c6( ) c7(bL, T, Ve, fM, xu, aC, id, yk, e, iW, jh, fd, aj, hy, j, v, hF, hr, ad, av, aT, dz, hn, K, jj, dQ, ae, af, iU, hG, et, aW, ff, eH, fc, aq, gm, yq, en, aKk, aKj, cM, bz, eF, cm, iK, iR, ck, iO, bw, iT, hk, bo, k, cP, ei, bt, B); #c1(CEBPB) c2(NP_005185) c3(CCAAT/enhancer-binding protein beta isoform a) c4(153725) c5(153726, 153727, 153728, 153729, 153730, 153731) c6( ) c7(bL, T, dA, fR, fG, e, zt, jh, bB, aj, v, ci, C, q, aR, J, ad, aKI, ai, eA, av, eW, aE, azq, aT, h, bl, K, ji, jj, ae, eu, d, s, aW, ff, fc, eZ, r, akB, aq, lo, en, dw, iR, bz, op, ck, iO, cT, nM, pc, GU, c, nB, bE, eD, vA, AH, cj, uo, zu, bt, kS, B, y); #c1(CEBPD) c2(NP_005186) c3(CCAAT/enhancer-binding protein delta) c4(153732, 153733) c5(153734, 153735, 153736, 153737, 153738, 153739, 153740, 153741, 153742, 153743, 153744, 153745, 153746) c6( ) c7(T, id, if, cz, v, j, ci, C, qN, g, aR, ad, Kx, XX, cc, aT, h, bl, ae, af, qw, d, aW, ff, r, dq, en, dR, ac, bP, hk, U, Kj, ei, y, bt, B); #c1(CEBPE) c2(NP_001796) c3(CCAAT/enhancer-binding protein epsilon) c4(121194) c5(121195, 121196, 121197, 121198, 121199, 121200, 121201) c6( ) c7(ck, x, aKm, hn, k, jj, bw, bt); #c1(CEBPG) c2(NP_001239225) c3(CCAAT/enhancer-binding protein gamma) c4(88383) c5(88384, 88385, 88386, 88387, 88388, 88389, 88390) c6( ) c7(av, T, co, ci, bt); #c1(CEBPZ) c2(NP_005751) c3(CCAAT/enhancer-binding protein zeta) c4(158996, 158997) c5(158998, 158999, 159000, 159001, 159002, 159003, 159004, 159005, 159006, 159007, 159008, 159009, 159010) c6( ) c7(ck, T, fX, cm, bS, IR, ct, Z, hF, bt, pb, aBI, yR); #c1(CECR1) c2(NP_803124) c3(adenosine deaminase CECR1 isoform b) c4(252491) c5(252492, 252493, 252494, 252495, 252496, 252497, 252498, 252499) c6(252500, 252501) c7(Cx, gV, aC, eG, dA, ac, hG, aKn, dV, kp, j, y, eA, hv); #c1(CECR1) c2(XP_011544435) c3(adenosine deaminase CECR1 isoform X1) c4(343541, 343542, 343543, 343544) c5(343545, 343546, 343547, 343548, 343549, 343550, 343551, 343552, 343553, 343554, 343555, 343556, 343557, 343558, 343559, 343560, 343561, 343562, 343563, 343564, 343565, 343566, 343567, 343568, 343569, 343570, 343571, 343572, 343573, 343574, 343575, 343576, 343577, 343578, 343579, 343580, 343581, 343582, 343583, 343584, 343585, 343586, 343587, 343588, 343589, 343590, 343591) c6(343592, 343593, 343594, 343595, 343596, 343597, 343598, 343599, 343600, 343601, 343602, 343603) c7(Cx, gV, aC, eG, dA, ac, hG, aKn, dV, kp, j, y, eA, hv); #c1(CECR2) c2(NP_001276976) c3(cat eye syndrome critical region protein 2 isoform 1) c4( ) c5(108883, 108884, 108885, 108886, 108887, 108888) c6( ) c7(anN, aKo, RX, agd); #c1(CECR2) c2(XP_006724141) c3(cat eye syndrome critical region protein 2 isoform X3) c4(295817) c5( ) c6( ) c7(anN, aKo, RX, agd); #c1(CECR2) c2(XP_006724142) c3(cat eye syndrome critical region protein 2 isoform X7) c4( ) c5(295818, 295819, 295820, 295821, 295822, 295823) c6( ) c7(anN, aKo, RX, agd); #c1(CECR2) c2(XP_011544430) c3(cat eye syndrome critical region protein 2 isoform X1) c4(343534) c5(343535, 343536, 343537, 343538, 343539, 343540) c6( ) c7(anN, aKo, RX, agd); #c1(CEL) c2(NP_001798) c3(bile salt-activated lipase precursor) c4(121202, 121203, 121204) c5(121205, 121206, 121207, 121208, 121209, 121210, 121211, 121212, 121213, 121214, 121215, 121216, 121217, 121218, 121219, 121220, 121221, 121222) c6( ) c7(oO, bM, T, aC, ea, aKu, e, bB, aKs, ci, Jt, aKq, bW, dV, K, zy, H, aKy, YC, g, Im, dc, oy, cj, m, R, aKr, dD, aw, NT, aj, aKt, alZ, aKz, aKx, h, mJ, ks, aq, pm, aKv, ej, Yl, ar, aKA, bP, at, Br, B, fM, fG, asB, cR, v, j, alx, J, q, bq, s, aKD, r, en, t, pb, ig, aKp, dT, fD, aKB, ob, df, aKw, jh, eq, fu, iG, hF, hX, aHF, vB, MG, qE, uQ, BO, ff, Kf, anW, dr, LB, hF, bE, dO, uR, afd, aKC, aEN, ei); #c1(CELA1) c2(NP_001962) c3(chymotrypsin-like elastase family member 1) c4(122662) c5(122663, 122664, 122665, 122666, 122667, 122668, 122669, 122670) c6(122671, 122672) c7(al, ao, OC, wC); #c1(CELA3B) c2(XP_011539434) c3(chymotrypsin-like elastase family member 38 isoform X1) c4(337586) c5( ) c6( ) c7(ar, aKF, aKE, aKG, hJ, ao); #c1(CELA3B) c2(XP_011539435) c3(chymotrypsin-like elastase family member 38 isoform X2) c4(337587) c5(337588, 337589, 337590, 337591, 337592, 337593, 337594, 337595) c6(337596, 337597) c7(ar, aKF, aKE, aKG, hJ, ao); #c1(CELF1) c2(NP_001166110) c3(CUGBP Elav-like family member 1 isoform 4) c4(68173) c5(68174, 68175, 68176, 68177, 68178, 68179, 68180, 68181, 68182, 68183, 68184, 68185, 68186, 68187, 68188, 68189, 68190, 68191, 68192, 68193) c6( ) c7(wK, h, aq, v, bl, iR, dR); #c1(CELF1) c2(NP_001166111) c3(CUGBP Elav-like family member 1 isoform 5) c4(68194, 68195) c5(68196, 68197, 68198, 68199, 68200) c6( ) c7(wK, h, aq, v, bl, iR, dR); #c1(CELF1) c2(NP_006551) c3(CUGBP Elav-like family member 1 isoform 1) c4(166170) c5(166171, 166172, 166173, 166174, 166175, 166176, 166177, 166178, 166179, 166180, 166181) c6( ) c7(wK, h, aq, v, bl, iR, dR); #c1(CELF1) c2(XP_011518153) c3(CUGBP Elav-like family member 1 isoform X1) c4(312179) c5(312180, 312181, 312182, 312183, 312184, 312185) c6( ) c7(wK, h, aq, v, bl, iR, dR); #c1(CELF1) c2(XP_011518154) c3(CUGBP Elav-like family member 1 isoform X4) c4(312186) c5(312187, 312188, 312189, 312190, 312191) c6( ) c7(wK, h, aq, v, bl, iR, dR); #c1(CELF1) c2(XP_011518155) c3(CUGBP Elav-like family member 1 isoform X5) c4(312192) c5( ) c6( ) c7(wK, h, aq, v, bl, iR, dR); #c1(CELF1) c2(XP_011518161) c3(CUGBP Elav-like family member 1 isoform X2) c4(312193, 312194) c5(312195, 312196, 312197, 312198, 312199, 312200) c6( ) c7(wK, h, aq, v, bl, iR, dR); #c1(CELF2) c2(NP_001020247) c3(CUGBP Elav-like family member 2 isoform 1) c4( ) c5(28352, 28353, 28354, 28355, 28356, 28357, 28358, 28359, 28360, 28361, 28362, 28363, 28364, 28365) c6( ) c7(D, cF, aE, wK, aW, RX, aT, kf, aKI, cd, j, ey, aKH, X, dR); #c1(CELF2) c2(NP_001077060) c3(CUGBP Elav-like family member 2 isoform 4) c4(37629) c5(37630, 37631, 37632, 37633, 37634, 37635, 37636, 37637, 37638, 37639) c6( ) c7(D, cF, aE, wK, aW, RX, aT, kf, aKI, cd, j, ey, aKH, X, dR); #c1(CELF2) c2(NP_006552) c3(CUGBP Elav-like family member 2 isoform 2) c4(166182) c5(166183, 166184, 166185, 166186, 166187, 166188, 166189, 166190, 166191, 166192, 166193) c6( ) c7(D, cF, aE, wK, aW, RX, aT, kf, aKI, cd, j, ey, aKH, X, dR); #c1(CELF2) c2(XP_005252411) c3(CUGBP Elav-like family member 2 isoform X4) c4(271721) c5(271722, 271723, 271724) c6( ) c7(D, cF, aE, wK, aW, RX, aT, kf, aKI, cd, j, ey, aKH, X, dR); #c1(CELF2) c2(XP_006717432) c3(CUGBP Elav-like family member 2 isoform X2) c4( ) c5(291083) c6( ) c7(D, cF, aE, wK, aW, RX, aT, kf, aKI, cd, j, ey, aKH, X, dR); #c1(CELF2) c2(XP_006717433) c3(CUGBP Elav-like family member 2 isoform X3) c4(291084) c5(291085) c6( ) c7(D, cF, aE, wK, aW, RX, aT, kf, aKI, cd, j, ey, aKH, X, dR); #c1(CELF2) c2(XP_006717436) c3(CUGBP Elav-like family member 2 isoform X10) c4(291086) c5(291087, 291088, 291089, 291090, 291091, 291092) c6( ) c7(D, cF, aE, wK, aW, RX, aT, kf, aKI, cd, j, ey, aKH, X, dR); #c1(CELF2) c2(XP_011517596) c3(CUGBP Elav-like family member 2 isoform X1) c4(311355, 311356) c5(311357, 311358, 311359, 311360, 311361, 311362, 311363, 311364, 311365, 311366) c6( ) c7(D, cF, aE, wK, aW, RX, aT, kf, aKI, cd, j, ey, aKH, X, dR); #c1(CELF2) c2(XP_011517599) c3(CUGBP Elav-like family member 2 isoform X7) c4( ) c5(311367, 311368, 311369, 311370, 311371, 311372) c6( ) c7(D, cF, aE, wK, aW, RX, aT, kf, aKI, cd, j, ey, aKH, X, dR); #c1(CELF4) c2(NP_001020258) c3(CUGBP Elav-like family member 4 isoform 2) c4(28373) c5(28374, 28375, 28376, 28377, 28378, 28379) c6( ) c7(bL, aw, ha, r, v, FI, aR); #c1(CELF4) c2(NP_001020259) c3(CUGBP Elav-like family member 4 isoform 3) c4(28380) c5(28381, 28382, 28383, 28384, 28385, 28386) c6( ) c7(bL, aw, ha, r, v, FI, aR); #c1(CELF4) c2(NP_001020260) c3(CUGBP Elav-like family member 4 isoform 4) c4(28387) c5(28388, 28389, 28390, 28391, 28392, 28393) c6( ) c7(bL, aw, ha, r, v, FI, aR); #c1(CELF4) c2(NP_064565) c3(CUGBP Elav-like family member 4 isoform 1) c4(202997) c5(202998, 202999, 203000, 203001, 203002, 203003) c6( ) c7(bL, aw, ha, r, v, FI, aR); #c1(CELF4) c2(XP_011524388) c3(CUGBP Elav-like family member 4 isoform X7) c4( ) c5(319018) c6( ) c7(bL, aw, ha, r, v, FI, aR); #c1(CELF4) c2(XP_011524394) c3(CUGBP Elav-like family member 4 isoform X14) c4(319019) c5( ) c6( ) c7(bL, aw, ha, r, v, FI, aR); #c1(CELF4) c2(XP_011524398) c3(CUGBP Elav-like family member 4 isoform X18) c4( ) c5(319020, 319021, 319022, 319023, 319024) c6( ) c7(bL, aw, ha, r, v, FI, aR); #c1(CELF5) c2(NP_001166144) c3(CUGBP Elav-like family member 5 isoform 2) c4(68324, 68325) c5(68326, 68327, 68328, 68329, 68330, 68331, 68332, 68333, 68334, 68335, 68336, 68337, 68338) c6( ) c7(pN); #c1(CELF5) c2(XP_006722895) c3(CUGBP Elav-like family member 5 isoform X1) c4(294920) c5(294921, 294922, 294923, 294924, 294925, 294926) c6( ) c7(pN); #c1(CELF6) c2(NP_001166155) c3(CUGBP Elav-like family member 6 isoform 2) c4(68353, 68354) c5(68355, 68356, 68357, 68358, 68359, 68360, 68361, 68362, 68363, 68364, 68365, 68366, 68367, 68368, 68369, 68370) c6( ) c7(bN); #c1(CELF6) c2(NP_001166156) c3(CUGBP Elav-like family member 6 isoform 3) c4(68371) c5(68372, 68373, 68374, 68375, 68376, 68377) c6( ) c7(bN); #c1(CELF6) c2(NP_443072) c3(CUGBP Elav-like family member 6 isoform 1) c4(229242, 229243, 229244) c5(229245, 229246, 229247, 229248, 229249, 229250, 229251, 229252, 229253, 229254, 229255, 229256, 229257, 229258, 229259, 229260, 229261, 229262) c6( ) c7(bN); #c1(CELSR1) c2(NP_055061) c3(cadherin EGF LAG seven-pass G-type receptor 1 precursor) c4(178668) c5(178669, 178670, 178671, 178672, 178673, 178674) c6( ) c7(lp, eu, ac, M); #c1(CELSR1) c2(XP_006724446) c3(cadherin EGF LAG seven-pass G-type receptor 1 isoform X1) c4(295982, 295983) c5( ) c6( ) c7(lp, eu, ac, M); #c1(CELSR1) c2(XP_011528855) c3(cadherin EGF LAG seven-pass G-type receptor 1 isoform X2) c4(324228) c5(324229, 324230, 324231, 324232, 324233, 324234, 324235, 324236, 324237, 324238, 324239, 324240) c6( ) c7(lp, eu, ac, M); #c1(CELSR3) c2(NP_001398) c3(cadherin EGF LAG seven-pass G-type receptor 3 precursor) c4(117577, 117578) c5(117579, 117580, 117581, 117582, 117583, 117584, 117585, 117586, 117587, 117588, 117589, 117590, 117591, 117592) c6( ) c7(li, c, lm, pk, ae, ad); #c1(CEM1P) c2(NP_001280227) c3(cell migration-inducing and hyaluronan-binding protein precursor) c4(111496, 111497) c5(111498, 111499, 111500, 111501, 111502, 111503, 111504, 111505, 111506, 111507, 111508, 111509, 111510, 111511, 111512, 111513, 111514, 111516, 111517) c6( ) c7(T, s, bE, aW, aw, aT, bB, n, fr, g, Bh); #c1(CEMP1) c2(NP_001041677) c3(cementoblastoma-derived protein 1) c4(34279) c5(34280, 34281, 34282, 34283, 34284, 34285, 34286, 34287, 34288, 34289) c6( ) c7(eJ); #c1(CEND1) c2(NP_057648) c3(cell cycle exit and neuronal differentiation protein 1) c4(192048) c5(192049, 192050, 192051, 192052, 192053, 192054, 192055) c6( ) c7(cm, dr, ml); #c1(CENPA) c2(NP_001035891) c3(histone H3-like centromeric protein A isoform b) c4(33339) c5(33340, 33341, 33342, 33343, 33344, 33345) c6( ) c7(iu, T, B, kP, aW, r, aT, ey, m, g, pb, IR, q); #c1(CENPA) c2(NP_001800) c3(histone H3-like centromeric protein A isoform a) c4(121223) c5(121224, 121225, 121226, 121227, 121228, 121229) c6( ) c7(iu, T, B, kP, aW, r, aT, ey, m, g, pb, IR, q); #c1(CENPB) c2(NP_001801) c3(major centromere autoantigen B) c4(121230, 121231) c5(121232, 121233, 121234, 121235, 121236, 121237, 121238, 121239, 121240, 121241, 121242, 121243) c6( ) c7(uo, pb); #c1(CENPC) c2(NP_001803) c3(centromere protein C) c4(121244) c5(121245, 121246, 121247, 121248, 121249, 121250) c6( ) c7(pb, bK, jh, an); #c1(CENPE) c2(NP_001273663) c3(centromere-associated protein E isoform 2 proprotein) c4(105577) c5(105578, 105579, 105580, 105581, 105582, 105583) c6( ) c7(pb, 1 ac, aT, cm, bu, QK, avx, B); #c1(CENPE) c2(NP_001804) c3(centromere-associated protein E isoform 1 proprotein) c4(121251, 121252) c5(121253, 121254, 121255, 121256, 121257, 121258, 121259, 121260, 121261121262, 121263, 121264) c6( ) c7(pb, 1 ac, aT, cm, bu, QK, avx, B); #c1(CENPF) c2(NP_057427) c3(centromere protein F) c4(190752, 190753) c5(190754, 190755, 190756, 190757, 190758, 190759, 190760, 190761, 190762, 190763, 190764, 190765) c6( ) c7(T, ac, yw, aW, iB, ff, gK, afb, cj, aT, YP, ey, en, iK, ae, ad, Yl); #c1(CENPH) c2(NP_075060) c3(centromere protein H) c4(213600, 213601) c5(213602, 213603, 213604, 213605, 213606, 213607, 213608, 213609, 213610, 213611, 213612, 213613) c6( ) c7(T, aA, r, aF, ci, nz, q); #c1(CENPJ) c2(NP_060921) c3(centromere protein J) c4(198693) c5(198694, 198695, 198696, 198697, 198698, 198699) c6( ) c7(ck, y, aii, hd, dA, aKK, pc, nM, AS, aKJ, WE, aT, cj, MC, ji, aon, QK, bt, avx, AN, aij); #c1(CENPJ) c2(XP_011533451) c3(centromere protein J isoform X1) c4(329567, 329568) c5(329569, 329570, 329571, 329572, 329573, 329574) c6( ) c7(ck, y, aii, hd, dA, aKK, pc, nM, AS, aKJ, WE, aT, cj, MC, ji, aon, QK, bt, avx, AN, aij); #c1(CENPJ) c2(XP_011533452) c3(centromere protein J isoform X2) c4( ) c5(329575, 329576, 329577, 329578, 329579, 329580) c6( ) c7(ck, y, aii, hd, dA, aKK, pc, nM, AS, aKJ, WE, aT, cj, MC, ji, aon, QK, bt, avx, AN, aij); #c1(CENPK) c2(NP_001253967) c3(centromere protein K) c4(94274, 94275) c5(94276, 94277, 94278, 94279, 94280, 94281, 94282, 94283, 94284, 94285, 94286, 94287, 94288, 94289, 94290, 94291, 94292, 94293, 94294, 94295) c6( ) c7(T, kP); #c1(CENPN) c2(NP_001094095) c3(centromere protein N isoform 1) c4(40642) c5(40643, 40644, 40645, 40646, 40647, 40648) c6( ) c7(ey); #c1(CENPN) c2(NP_001257402) c3(centromere protein N isoform 4) c4(95362) c5(95363, 95364, 95365, 95366, 95367, 95368) c6( ) c7(ey); #c1(CENPN) c2(NP_001257403) c3(centromere protein N isoform 5) c4(95369) c5(95370, 95371, 95372, 95373, 95374, 95375) c6( ) c7(ey); #c1(CENPN) c2(NP_060925) c3(centromere protein N isoform 3) c4(198707) c5(198708, 198709, 198710, 198711, 198712, 198713) c6( ) c7(ey); #c1(CENPN) c2(XP_006721299) c3(centromere protein N isoform X1) c4(293926) c5(293927, 293928, 293929, 293930, 293931, 293932) c6( ) c7(ey); #c1(CENP0) c2(NP_001186732) c3(centromere protein D isoform 2) c4(78442) c5(78443, 78444, 78445, 78446, 78447, 78448) c6( ) c7(bK); #c1(CENP0) c2(XP_006712165) c3(centromere protein D isoform X1) c4(286482) c5(286483, 286484, 286485, 286486, 286487, 286488, 286489, 286490, 286491, 286492) c6( ) c7(bK); #c1(CENPQ) c2(NP_060602) c3(centromere protein Q) c4(196797) c5(196798, 196799, 196800, 196801, 196802, 196803, 196804, 196805, 196806, 196807) c6( ) c7(j); #c1(CENP0) c2(NP_078905) c3(centromere protein U) c4(216018, 216019, 216020, 216021) c5(216022, 216023, 216024, 216025, 216026, 216027, 216028, 216029, 216030, 216031, 216032, 216033, 216034, 216035, 216036, 216037, 216038, 216039, 216040, 216041, 216042, 216043, 216044, 216045) c6( ) c7(lf, d, eA); #c1(CENPV) c2(NP_859067) c3(centromere protein V) c4(255481) c5(255482, 255483, 255484, 255485, 255486, 255487) c6( ) c7(iM, je, au, Ne, By, EY, bC, zy, bt, hq); #c1(CENPW) c2(NP_001012525) c3(centromere protein W isoform b) c4(25033) c5(25034, 25035, 25036, 25037, 25038, 25039) c6( ) c7(T, A, hb, bE, bB, xb, afu); #c1(CENPW) c2(NP_001273453) c3(centromere protein W isoform a) c4(104937) c5(104938, 104939, 104940, 104941, 104942, 104943) c6( ) c7(T, A, hb, bE, bB, xb, afu); #c1(CENPW) c2(NP_001273454) c3(centromere protein W isoform c) c4(104944) c5(104945, 104946, 104947, 104948, 104949, 104950) c6( ) c7(T, A, hb, bE, bB, xb, afu); #c1(CEP112) c2(NP_001032402) c3(centrosomal protein of 112 kDa isoform b) c4(31303) c5(31304, 31305, 31306, 31307, 31308, 31309) c6( ) c7(V, aw); #c1(CEP112) c2(NP_001289820) c3(centrosomal protein of 112 kDa isoform c) c4(114673) c5(114674, 114675, 114676, 114677, 114678, 114679) c6( ) c7(V, aw); #c1(CEP112) c2(XP_011522763) c3(centrosomal protein of 112 kDa isoform X1) c4(317283) c5(317284, 317285, 317286, 317287, 317288, 317289, 317290, 317291, 317292, 317293) c6( ) c7(V, aw); #c1(CEP112) c2(XP_011522766) c3(centrosomal protein of 112 kDa isoform X6) c4(317294) c5(317295, 317296, 317297, 317298, 317299, 317300) c6( ) c7(V, aw); #c1(CEP120) c2(NP_001159698) c3(centrosomal protein of 120 kDa isoform 2) c4(64608) c5( ) c6( ) c7(e); #c1(CEP120) c2(NP_694955) c3(centrosomal protein of 120 kDa isoform 1) c4(245467, 245468) c5(245469, 245470, 245471, 245472, 245473, 245474, 245475, 245476, 245477, 245478, 245479, 245480, 245481, 245482, 245483, 245484) c6( ) c7(e); #c1(CEP120) c2(XP_005271958) c3(centrosomal protein of 120 kDa isoform X2) c4( ) c5(283647, 283648, 283649, 283650, 283651, 283652) c6( ) c7(e); #c1(CEP128) c2(XP_006720119) c3(centrosomal protein of 128 kDa isoform X1) c4(293251, 293252, 293253) c5(293254, 293255, 293256, 293257, 293258, 293259, 293260, 293261, 293262, 293263, 293264, 293265, 293266, 293267, 293268, 293269) c6( ) c7(j); #c1(CEP128) c2(XP_011534794) c3(centrosomal protein of 128 kDa isoform X2) c4( ) c5(331253, 331254, 331255, 331256, 331257) c6( ) c7(j); #c1(CEP128) c2(XP_011534797) c3(centrosomal protein of 128 kDa isoform X5) c4(331258, 331259, 331260, 331261) c5(331262) c6( ) c7(j); #c1(CEP128) c2(XP_011534798) c3(centrosomal protein of 128 kDa isoform X6) c4( ) c5(331263, 331264, 331265, 331266, 331267, 331268, 331269, 331270, 331271, 331272, 331273, 331274, 331275, 331276, 331277, 331278, 331279, 331280, 331281, 331282, 331283, 331284, 331285, 331286, 331287) c6( ) c7(j); #c1(CEP131) c2(NP_001009811) c3(centrosomal protein of 131 kDa isoform b) c4(23687) c5(23688, 23689, 23690, 23691, 23692, 23693) c6( ) c7(gU); #c1(CEP131) c2(NP_055799) c3(centrosomal protein of 131 kDa isoform a) c4(183577) c5(183578, 183579, 183580, 183581, 183582, 183583) c6( ) c7(gU); #c1(CEP131) c2(XP_011522851) c3(centrosomal protein of 131 kDa isoform X3) c4(317334) c5(317335, 317336, 317337, 317338, 317339, 317340) c6( ) c7(gU); #c1(CEP135) c2(NP_079285) c3(centrosomal protein of 135 kDa) c4(217694, 217695) c5(217696, 217697, 217698, 217699, 217700, 217701) c6( ) c7(aKL, aii, aij); #c1(CEP135) c2(XP_006714118) c3(centrosomal protein of 135 kDa isoform X1) c4( ) c5(287574, 287575, 287576, 287577, 287578, 287579) c6( ) c7(aKL, aii, aij); #c1(CEP152) c2(NP_055800) c3(centrosomal protein of 152 kDa isoform 2) c4(183584) c5(183585, 183586, 183587, 183588, 183589, 183590) c6( ) c7(T, aii, WE, aKM, azZ, aKO, K, aKN, aij); #c1(CEP152) c2(XP_006720500) c3(centrosomal protein of 152 kDa isoform X1) c4(293527) c5(293528, 293529, 293530, 293531, 293532, 293533) c6( ) c7(T, aii, WE, aKM, azZ, aKO, K, aKN, aij); #c1(CEP152) c2(XP_011519676) c3(centrosomal protein of 152 kDa isoform X3) c4(314339) c5( ) c6( ) c7(T, aii, WE, aKM, azZ, aKO, K, aKN, aij); #c1(CEP152) c2(XP_011519680) c3(centrosomal protein of 152 kDa isoform X7) c4(314340, 314341) c5(314342, 314343, 314344, 314345, 314346, 314347) c6( ) c7(T, aii, WE, aKM, azZ, aKO, K, aKN, aij); #c1(CEP152) c2(XP_011519681) c3(centrosomal protein of 152 kDa isoform X8) c4( ) c5(314348, 314349, 314350, 314351, 314352, 314353, 314354, 314355, 314356, 314357, 314358, 314359) c6( ) c7(T, aii, WE, aKM, azZ, aKO, K, aKN, aij); #c1(CEP162) c2(NP_055710) c3(centrosomal protein of 162 kDa isoform a) c4(182987) c5(182988, 182989, 182990, 182991, 182992, 182993) c6( ) c7(j); #c1(CEP164) c2(NP_001258862) c3(centrosomal protein of 164 kDa isoform 2) c4(96596, 96597) c5( ) c6( ) c7(aKP, vm, ahD); #c1(CEP164) c2(NP_055771) c3(centrosomal protein of 164 kDa isoform 1) c4(183399) c5(183400, 183401, 183402, 183403, 183404, 183405) c6( ) c7(aKP, vm, ahD); #c1(CEP164) c2(XP_011540977) c3(centrosomal protein of 164 kDa isoform X6) c4(339505) c5( ) c6( ) c7(aKP, vm, ahD); #c1(CEP164) c2(XP_011540981) c3(centrosomal protein of 164 kDa isoform X11) c4(339506) c5(339507, 339508, 339509, 339510, 339511, 339512) c6( ) c7(aKP, vm, ahD); #c1(CEP164) c2(XP_011540992) c3(centrosomal protein of 164 kDa isoform X20) c4( ) c5(339513, 339514, 339515, 339516, 339517, 339518, 339519, 339520, 339521, 339522, 339523, 339524, 339525, 339526, 339527, 339528, 339529, 339530, 339531, 339532, 339533, 339534) c6( ) c7(aKP, vm, ahD); #c1(CEP170) c2(NP_001035863) c3(centrosomal protein of 170 kDa isoform beta) c4(33300) c5(33301, 33302, 33303, 33304, 33305, 33306) c6( ) c7(V); #c1(CEP170) c2(NP_001035864) c3(centrosomal protein of 170 kDa isoform gamma) c4(33307) c5(33308, 33309, 33310, 33311, 33312, 33313, 33314, 33315, 33316, 33317, 33318, 33319, 33320) c6( ) c7(V); #c1(CEP170) c2(NP_055627) c3(centrosomal protein of 170 kDa isoform alpha) c4(182346) c5(182347, 182348, 182349, 182350, 182351, 182352, 182353, 182354, 182355, 182356, 182357, 182358) c6( ) c7(V); #c1(CEP170) c2(XP_011544742) c3(centrosomal protein of 170 kDa isoform X1) c4( ) c5(343815, 343816, 343817, 343818, 343819, 343820, 343821, 343822, 343823, 343824, 343825, 343826, 343827, 343828, 343829, 343830, 343831) c6( ) c7(V); #c1(CEP170) c2(XP_011544745) c3(centrosomal protein of 170 kDa isoform X4) c4(343832) c5( ) c6( ) c7(V); #c1(CEP170) c2(XP_011544746) c3(centrosomal protein of 170 kDa isoform X5) c4(343833) c5( ) c6( ) c7(V); #c1(CEP170) c2(XP_011544747) c3(centrosomal protein of 170 kDa isoform X6) c4(343834) c5( ) c6( ) c7(V); #c1(CEP170) c2(XP_011544749) c3(centrosomal protein of 170 kDa isoform X8) c4(343835, 343836) c5( ) c6( ) c7(V); #c1(CEP19) c2(NP_116287) c3(centrosomal protein of 19 kDa) c4(226087) c5(226088, 226089, 226090, 226091, 226092, 226093) c6( ) c7(aKQ, v, qM); #c1(CEP192) c2(NP_115518) c3(centrosomal protein of 192 kDa) c4(223035, 223036, 223037) c5(223038, 223039, 223040, 223041, 223042, 223043, 223044, 223045, 223046, 223047, 223048, 223049, 223050, 223051, 223052, 223053, 223054, 223055) c6( ) c7(T); #c1(CEP192) c2(XP_006722390) c3(centrosomal protein of 192 kDa isoform X7) c4(294689, 294690) c5(294691, 294692, 294693, 294694, 294695, 294696) c6( ) c7(T); #c1(CEP192) c2(XP_011523978) c3(centrosomal protein of 192 kDa isoform X11) c4( ) c5(318523, 318524, 318525, 318526, 318527, 318528) c6( ) c7(T); #c1(CEP250) c2(NP_009117) c3(centrosome-associated protein CEP250) c4(170810) c5(170811, 170812, 170813, 170814, 170815, 170816, 170817, 170818, 170819, 170820, 170821, 170822) c6( ) c7(T, et, mG, aT, dz, nw, bX, oc); #c1(CEP250) c2(XP_006723757) c3(centrosome-associated protein CEP250 isoform X2) c4(295360) c5( ) c6( ) c7(T, et, mG, aT, dz, nw, bX, oc); #c1(CEP250) c2(XP_006723758) c3(centrosome-associated protein CEP250 isoform X3) c4(295361, 295362, 295363) c5(295364, 295365, 295366, 295367, 295368, 295369) c6( ) c7(T, et, mG, aT, dz, nw, bX, oc); #c1(CEP250) c2(XP_011526819) c3(centrosome-associated protein CEP250 isoform X6) c4(321136, 321137) c5( ) c6( ) c7(T, et, mG, aT, dz, nw, bX, oc); #c1(CEP250) c2(XP_011526822) c3(centrosome-associated protein CEP250 isoform X10) c4( ) c5(321138, 321139, 321140, 321141, 321142, 321143, 321144, 321145, 321146, 321147, 321148, 321149, 321150, 321151, 321152, 321153, 321154, 321155, 321156, 321157, 321158, 321159, 321160, 321161) c6( ) c7(T, et, mG, aT, dz, nw, bX, oc); #c1(CEP290) c2(NP_079390) c3(centrosomal protein of 290 kDa) c4(217885, 217886) c5(217887, 217888, 217889, 217890, 217891, 217892, 217893, 217894, 217895, 217896, 217897, 217898, 217899, 217900, 217901, 217902, 217903, 217904) c6( ) c7(aKU, arS, nx, vm, Jz, nA, Sp, aKT, cd, Nh, aKV, rz, aKR, ago, Gy, IR, aKS, Tp, nC, bN, U, nw, dy, eQ, de); #c1(CEP290) c2(XP_011537060) c3(centrosomal protein of 290 kDa isoform X2) c4( ) c5(334831) c6( ) c7(aKU, arS, nx, vm, Jz, nA, Sp, aKT, cd, Nh, aKV, rz, aKR, ago, Gy, IR, aKS, Tp, nC, bN, U, nw, dy, eQ, de); #c1(CEP290) c2(XP_011537061) c3(centrosomal protein of 290 kDa isoform X3) c4(334832) c5(334833, 334834, 334835, 334836, 334837, 334838, 334839, 334840, 334841) c6( ) c7(aKU, arS, nx, vm, Jz, nA, Sp, aKT, cd, Nh, aKV, rz, aKR, ago, Gy, IR, aKS, Tp, nC, bN, U, nw, dy, eQ, de); #c1(CEP290) c2(XP_011537064) c3(centrosomal protein of 290 kDa isoform X6) c4( ) c5(334842) c6( ) c7(aKU, arS, nx, vm, Jz, nA, Sp, aKT, cd, Nh, aKV, rz, aKR, ago, Gy, IR, aKS, Tp, nC, bN, U, nw, dy, eQ, de); #c1(CEP290) c2(XP_011537065) c3(centrosomal protein of 290 kDa isoform X7) c4(334843, 334844) c5(334845, 334846, 334847, 334848, 334849, 334850) c6( ) c7(aKU, arS, nx, vm, Jz, nA, Sp, aKT, cd, Nh, aKV, rz, aKR, ago, Gy, IR, aKS, Tp, nC, bN, U, nw, dy, eQ, de); #c1(CEP41) c2(NP_001244087) c3(centrosomal protein of 41 kDa isoform 2) c4(91893) c5(91894, 91895, 91896, 91897, 91898, 91899) c6( ) c7(VX, aKW); #c1(CEP41) c2(NP_001244088) c3(centrosomal protein of 41 kDa isoform 3) c4(91900) c5(91901, 91902, 91903, 91904, 91905, 91906) c6( ) c7(VX, aKW); #c1(CEP41) c2(NP_001244089) c3(centrosomal protein of 41 kDa isoform 4) c4(91907) c5(91908, 91909, 91910, 91911, 91912, 91913, 91914, 91915) c6( ) c7(VX, aKW); #c1(CEP41) c2(NP_061188) c3(centrosomal protein of 41 kDa isoform 1) c4(199885) c5(199886, 199887, 199888, 199889, 199890, 199891) c6( ) c7(VX, aKW); #c1(CEP55) c2(NP_001120654) c3(centrosomal protein of 55 kDa) c4(44395, 44396, 44397) c5(44398, 44399, 44400, 44401, 44402, 44403, 44404, 44405, 44406, 44407, 44408, 44409, 44410, 44411, 44412, 44413, 44414, 44415) c6( ) c7(iu, T, kl, qt, aW, X, r, aT, n, aA, bB, ey, ci, aF, iK, bz, B); #c1(CEP57) c2(NP_001230705) c3(centrosomal protein of 57 kDa isoform b) c4(86618) c5(86619, 86620, 86621, 86622, 86623, 86624, 86625, 86626, 86627, 86628, 86629, 86630) c6( ) c7(aKX, T, bP, Ya, aW, aT, ae, ad); #c1(CEP57) c2(NP_001230706) c3(centrosomal protein of 57 kDa isoform c) c4(86631, 86632) c5(86633, 86634, 86635, 86636, 86637, 86638, 86639, 86640, 86641, 86642, 86643, 86644) c6( ) c7(aKX, T, bP, Ya, aW, aT, ae, ad); #c1(CEP57) c2(NP_055494) c3(centrosomal protein of 57 kDa isoform a) c4(181504) c5( ) c6( ) c7(aKX, T, bP, Ya, aW, aT, ae, ad); #c1(CEP57) c2(XP_006719008) c3(centrosomal protein of 57 kDa isoform X1) c4( ) c5(292158) c6(292159) c7(aKX, T, bP, Ya, aW, aT, ae, ad); #c1(CEP63) c2(NP_001035842) c3(centrosomal protein of 63 kDa isoform c) c4(33216) c5(33217, 33218, 33219, 33220, 33221, 33222) c6( ) c7(QK, aKY, xb, id, aii); #c1(CEP63) c2(NP_001035843) c3(centrosomal protein of 63 kDa isoform d) c4(33223) c5(33224, 33225, 33226, 33227, 33228, 33229, 33230, 33231, 33232, 33233, 33234, 33235, 33236, 33237, 33238, 33239, 33240, 33241) c6( ) c7(QK, aKY, xb, id, aii); #c1(CEP63) c2(NP_001035859) c3(centrosomal protein of 63 kDa isoform b) c4(33277) c5(33278, 33279, 33280, 33281, 33282, 33283) c6( ) c7(QK, aKY, xb, id, aii); #c1(CEP63) c2(XP_005247854) c3(centrosomal protein of 63 kDa isoform X1) c4(268008, 268009, 268010) c5(268011, 268012, 268013, 268014, 268015, 268016, 268017, 268018, 268019, 268020) c6( ) c7(QK, aKY, xb, id, aii); #c1(CEP68) c2(NP_055962) c3(centrosomal protein of 68 kDa) c4(184701, 184702, 184703, 184704) c5(184705, 184706, 184707, 184708, 184709, 184710, 184711, 184712, 184713, 184714, 184715, 184716) c6( ) c7(bM, tk); #c1(CEP68) c2(XP_011531006) c3(centrosomal protein of 68 kDa isoform X3) c4( ) c5(326966, 326967, 326968, 326969, 326970, 326971, 326972, 326973, 326974, 326975, 326976, 326977) c6( ) c7(bM, tk); #c1(CEP72) c2(NP_060610) c3(centrosomal protein of 72 kDa) c4(196834, 196835) c5(196836, 196837, 196838, 196839, 196840, 196841, 196842, 196843, 196844, 196845, 196846) c6( ) c7(y, iV); #c1(CEP72) c2(XP_005248380) c3(centrosomal protein of 72 kDa isoform X3) c4( ) c5(268372) c6( ) c7(y, iV); #c1(CEP76) c2(NP_001258918) c3(centrosomal protein of 76 kDa isoform b) c4(96793) c5(96794, 96795, 96796, 96797, 96798, 96799) c6( ) c7(T); #c1(CEP76) c2(NP_079175) c3(centrosomal protein of 76 kDa isoform a) c4(217312) c5(217313, 217314, 217315, 217316, 217317, 217318) c6( ) c7(T); #c1(CEP83) c2(NP_057206) c3(centrosomal protein of 83 kDa) c4(189478, 189479) c5(189480, 189481, 189482, 189483, 189484, 189485, 189486, 189487, 189488, 189489, 189490, 189491, 189492, 189493, 189494, 189495) c6( ) c7(aKZ, nA); #c1(CEP85L) c2(NP_001035940) c3(centrosomal protein of 85 kDa-like isoform a) c4(33501) c5(33502, 33503, 33504, 33505, 33506, 33507) c6( ) c7(Nq, Nr, et, e, EQ, dz, Xm, fr); #c1(CEP85L) c2(NP_001171506) c3(centrosomal protein of 85 kDa-like isoform c) c4(70345) c5(70346, 70347, 70348, 70349, 70350, 70351) c6( ) c7(Nq, Nr, et, e, EQ, dz, Xm, fr); #c1(CEP85L) c2(NP_996804) c3(centrosomal protein of 85 kDa-like isoform b) c4(264583) c5(264584, 264585, 264586, 264587, 264588, 264589) c6( ) c7(Nq, Nr, et, e, EQ, dz, Xm, fr); #c1(CEP89) c2(NP_116205) c3(centrosomal protein of 89 kDa) c4(225745) c5(225746, 225747, 225748, 225749, 225750, 225751) c6( ) c7(dy); #c1(CER1) c2(NP_005445) c3(cerberus precursor) c4(156269) c5(156270, 156271, 156272, 156273, 156274, 156275) c6( ) c7(dA); #c1(CERK) c2(NP_073603) c3(ceramide kinase) c4(213029) c5(213030, 213031, 213032, 213033, 213034, 213035, 213036) c6( ) c7(aW, aT, n, nk, cm, iu); #c1(CERK) c2(XP_011528617) c3(ceramide kinase isoform X1) c4(323879) c5(323880, 323881, 323882, 323883, 323884) c6( ) c7(aW, aT, n, nk, cm, iu); #c1(CERKL) c2(NP_001025482) c3(ceramide kinase-like protein isoform 2) c4(29604) c5(29605, 29606, 29607, 29608, 29609, 29610) c6( ) c7(cF, IR, nx, nw, nk, nC, aLa); #c1(CERKL) c2(NP_001025483) c3(ceramide kinase-like protein isoform 3) c4(29611) c5(29612, 29613, 29614, 29615, 29616, 29617) c6( ) c7(cF, IR, nx, nw, nk, nC, aLa); #c1(CERKL) c2(NP_001025484) c3(ceramide kinase-like protein isoform 4) c4(29618) c5(29619, 29620, 29621, 29622, 29623, 29624) c6( ) c7(cF, IR, nx, nw, nk, nC, aLa); #c1(CERKL) c2(NP_001153749) c3(ceramide kinase-like protein isoform 7) c4(60978) c5(60979, 60980, 60981, 60982, 60983, 60984) c6( ) c7(cF, IR, nx, nw, nk, nC, aLa); #c1(CERKL) c2(NP_963842) c3(ceramide kinase-like protein isoform 1) c4(262419) c5(262420, 262421, 262422, 262423, 262424, 262425) c6( ) c7(cF, IR, nx, nw, nk, nC, aLa); #c1(CERS1) c2(NP_001277194) c3(ceramide synthase 1 isoform 3) c4( ) c5(109217, 109218, 109219, 109220, 109221) c6( ) c7(T, h, fe, K, cm, iK); #c1(CERS1) c2(NP_067090) c3(ceramide synthase 1 isoform 1) c4(208952, 208953, 208954) c5(208955, 208956, 208957, 208958, 208959) c6( ) c7(T, h, fe, K, cm, iK); #c1(CERS1) c2(NP_937850) c3(ceramide synthase 1 isoform 2) c4( ) c5(259294, 259295, 259296, 259297, 259298, 259299, 259300) c6( ) c7(T, h, fe, K, cm, iK); #c1(CERS2) c2(XP_011507753) c3(ceramide synthase 2 isoform X2) c4(297816, 297817, 297818, 297819) c5(297820, 297821, 297822, 297823, 297824, 297825, 297826, 297827, 297828, 297829, 297830) c6( ) c7(eR, aW, Y, aT, aq, dy, ae, B, ad); #c1(CERS3) c2(NP_001277270) c3(ceramide synthase 3 isoform 1) c4(109308, 109309, 109310, 109311) c5(109312, 109313, 109314, 109315, 109316, 109317, 109318, 109319, 109320, 109321, 109322) c6( ) c7(aLb, fn, Eb); #c1(CERS3) c2(NP_849164) c3(ceramide synthase 3 isoform 2) c4( ) c5(254378, 254379, 254380, 254381, 254382, 254383, 254384, 254385, 254386, 254387, 254388, 254389, 254390, 254391, 254392, 254393, 254394, 254395, 254396, 254397, 254398) c6( ) c7(aLb, fn, Eb); #c1(CERS4) c2(NP_078828) c3(ceramide synthase 4) c4(215633, 215634, 215635, 215636, 215637, 215638) c5(215639, 215640, 215641, 215642, 215643, 215644, 215645, 215646) c6( ) c7(ad); #c1(CERS4) c2(XP_011526590) c3(ceramide synthase 4 isoform X2) c4( ) c5(320896, 320897, 320898, 320899, 320900) c6( ) c7(ad); #c1(CERS4) c2(XP_011526598) c3(ceramide synthase 4 isoform X4) c4( ) c5(320901, 320902, 320903, 320904, 320905, 320906, 320907, 320908, 320909, 320910, 320911, 320912, 320913, 320914, 320915, 320916, 320917, 320918, 320919, 320920, 320921, 320922, 320923, 320924, 320925, 320926, 320927) c6( ) c7(ad); #c1(CERS6) c2(NP_001243055) c3(ceramide synthase 6 isoform 1) c4(89694) c5(89695, 89696, 89697, 89698, 89699, 89700) c6( ) c7(aW, IB, K, aT); #c1(CERS6) c2(NP_982288) c3(ceramide synthase 6 isoform 2) c4(263286) c5(263287, 263288, 263289, 263290, 263291, 263292) c6( ) c7(aW, IB, K, aT); #c1(CES1) c2(NP_001020365) c3(liver carboxylesterase 1 isoform b precursor) c4(28646, 28647) c5(28648, 28649, 28650, 28651, 28652, 28653, 28654, 28655, 28656, 28657, 28658, 28659) c6( ) c7(bL, T, dD, VR, ea, iW, jx, cz, v, j, eq, bX, q, x, av, gd, on, LG, dF, aKB, iU, cH, hl, r, cu, ck, ej, mO, k, bC, bt, B); #c1(CES1) c2(NP_001020366) c3(liver carboxylesterase 1 isoform a precursor) c4(28660) c5(28661, 28662, 28663, 28664, 28665, 28666) c6( ) c7(bL, T, dD, VR, ea, iW, jx, cz, v, j, eq, bX, q, x, av, gd, on, LG, dF, aKB, iU, cH, hl, r, cu, ck, ej, mO, k, bC, bt, B); #c1(CES2) c2(NP_003860) c3(cocaine esterase isoform 1) c4(141574) c5(141575, 141576, 141577, 141578, 141579, 141580) c6( ) c7(gV, T, gX, fM, fV, q, eA, hd, NY, gd, aT, h, LG, mQ, eH, CT, r, fQ, cu, g, bu, eF, cm, hq, nB, bE, Ei, X); #c1(CES2) c2(NP_932327) c3(cocaine esterase isoform 2) c4(258959) c5(258960, 258961, 258962, 258963, 258964, 258965) c6( ) c7(gV, 1 gX, fM, fV, q, eA, hd, NY, gd, aT, h, LG, mQ, eH, CT, r, fQ, cu, g, bu, eF, cm, hq, nB, bE, Ei, X); #c1(CES3) c2(NP_001172105) c3(carboxylesterase 3 isoform 3) c4( ) c5(72396, 72397, 72398, 72399, 72400) c6( ) c7(fQ, ea, dD, j, eq); #c1(CES3) c2(NP_001172106) c3(carboxylesterase 3 isoform 2 precursor) c4(72401) c5(72402, 72403, 72404, 72405, 72406, 72407) c6( ) c7(fQ, ea, dD, j, eq); #c1(CES3) c2(NP_079198) c3(carboxylesterase 3 isoform 1 precursor) c4(217451, 217452) c5(217453, 217454, 217455, 217456, 217457, 217458) c6( ) c7(fQ, ea, dD, j, eq); #c1(CES3) c2(XP_011521277) c3(carboxylesterase 3 isoform X1) c4( ) c5(316174) c6( ) c7(fQ, ea, dD, j, eq); #c1(CETN1) c2(NP_004057) c3(centrin-1) c4(143199) c5(143200, 143201, 143202, 143203, 143204, 143205) c6( ) c7(bM, T, Vo, aA, bB, fr, ci, q, ad, Hx, hd, jz, aE, hW, aT, hD, dL, IQ, ae, eL, aW, Y, ev, lb, cr, r, dN, aF, Xk, dw, eE, bz, ar, Dy, bE, z, U, aps, bt, B, L); #c1(CETN2) c2(NP_004335) c3(centrin-2) c4(145245) c5(145246, 145247, 145248, 145249, 145250, 145251) c6( ) c7(ul, bP, CT, aT, hR, as, ip); #c1(CETN3) c2(NP_004356) c3(centrin-3 isoform 2) c4(145624) c5(145625, 145626, 145627, 145628, 145629, 145630) c6( ) c7(hR, ip, K, as, aT); #c1(CETP) c2(NP_000069) c3(cholesteryl ester transfer protein isoform 1 precursor) c4(1190) c5(1191, 1192, 1193, 1194, 1195, 1196) c6( ) c7(bM, Zz, acz, ea, e, GK, dY, u, dQ, eN, fc, nY, Au, uC, ZB, dD, wh, aw, Wb, aj, aLc, TB, Zu, ec, h, jy, dL, aq, cM, bJ, kT, W, dC, cO, xO, Fi, bm, at, B, L, bL, eR, wL, oe, cz, cR, v, j, bX, nS, J, jF, af, eu, bf, r, wA, ac, c, hr, mf, cS, dy, gT, sY, iW, jh, vG, ah, eq, tK, I, ot, ts, vl, uX, nU, cH, cW, eZ, dq, xT, nb, ZD, gZ, aS, ei, vt); #c1(CETP) c2(NP_001273014) c3(cholesteryl ester transfer protein isoform 2 precursor) c4(104178) c5(104179, 104180, 104181, 104182, 104183, 104184) c6( ) c7(bM, Zz, acz, ea, e, GK, dY, u, dQ, eN, fc, nY, Au, uC, ZB, dD, wh, aw, Wb, aj, aLc, TB, Zu, ec, h, jy, dL, aq, cM, bJ, kT, W, dC, cO, xO, Fi, bm, at, B, L, bL, eR, wL, oe, cz, cR, v, j, bX, nS, J, jF, af, eu, bf, r, wA, ac, c, hr, mf, cS, dy, gT, sY, iW, jh, vG, ah, eq, tK, I, ot, ts, vl, uX, nU, cH, cW, eZ, dq, xT, nb, ZD, gZ, aS, ei, vt); #c1(CFAP126) c2(NP_001013647) c3(protein Flattop) c4(25674) c5(25675, 25676, 25677, 25678, 25679, 25680) c6( ) c7(iV); #c1(CFAP36) c2(NP_001269690) c3(cilia- and flagella-associated protein 36 isoform a) c4(102574) c5(102575, 102576, 102577, 102578, 102579, 102580) c6( ) c7(T); #c1(CFAP36) c2(NP_542398) c3(cilia- and flagella-associated protein 36 isoform b) c4(232330) c5(232331, 232332, 232333, 232334, 232335, 232336) c6( ) c7(T); #c1(CFAP44) c2(NP_060808) c3(cilia- and flagella-associated protein 44 isoform 2) c4( ) c5(197921, 197922, 197923, 197924, 197925, 197926, 197927, 197928, 197929, 197930) c6( ) c7(aw); #c1(CFAP44) c2(XP_005247674) c3(cilia- and flagella-associated protein 44 isoform X11) c4(267925) c5(267926, 267927, 267928, 267929, 267930, 267931) c6( ) c7(aw); #c1(CFAP44) c2(XP_011511277) c3(cilia- and flagella-associated protein 44 isoform X2) c4(301770) c5(301771) c6( ) c7(aw); #c1(CFAP44) c2(XP_011511278) c3(cilia- and flagella-associated protein 44 isoform X1) c4(301772, 301773) c5(301774, 301775, 301776, 301777, 301778) c6( ) c7(aw); #c1(CFAP44) c2(XP_011511286) c3(cilia- and flagella-associated protein 44 isoform X12) c4( ) c5(301779, 301780) c6( ) c7(aw); #c1(CFAP52) c2(NP_001074025) c3(cilia- and flagella-associated protein 52 isoform c) c4(36980) c5(36981, 36982, 36983, 36984, 36985, 36986) c6( ) c7(B); #c1(CFAP52) c2(NP_659491) c3(cilia- and flagella-associated protein 52 isoform b) c4(240200, 240201) c5(240202, 240203, 240204, 240205, 240206, 240207, 240208, 240209, 240210, 240211, 240212, 240213) c6( ) c7(B); #c1(CFAP53) c2(NP_659457) c3(cilia- and flagella-associated protein 53) c4(240057) c5(240058, 240059, 240060, 240061, 240062, 240063) c6( ) c7(aLd, ha, IQ); #c1(CFAP57) c2(XP_011539101) c3(cilia- and flagella-associated protein 57 isoform X5) c4(337197) c5( ) c6( ) c7(aLe); #c1(CFAP58) c2(NP_001008723) c3(coiled-coil domain-containing protein 147) c4(23388, 23389) c5(23390, 23391, 23392, 23393, 23394, 23395, 23396) c6( ) c7(j); #c1(CFAP58) c2(XP_011537679) c3(coiled-coil domain-containing protein 147 isoform X2) c4( ) c5(335222, 335223, 335224, 335225, 335226, 335227, 335228, 335229, 335230) c6( ) c7(j); #c1(CFAP61) c2(NP_056400) c3(cilia- and flagella-associated protein 61 isoform 1) c4(187409, 187410, 187411) c5(187412, 187413, 187414, 187415, 187416, 187417, 187418, 187419, 187420, 187421, 187422, 187423, 187424, 187425, 187426, 187427, 187428, 187429, 187430, 187431) c6( ) c7(cd); #c1(CFAP61) c2(XP_005260749) c3(cilia- and flagella-associated protein 61 isoform X6) c4(276832) c5(276833, 276834, 276835, 276836, 276837, 276838) c6( ) c7(cd); #c1(CFAP61) c2(XP_005260751) c3(cilia- and flagella-associated protein 61 isoform X10) c4(276839) c5(276840, 276841, 276842, 276843, 276844) c6( ) c7(cd); #c1(CFAP61) c2(XP_005260752) c3(cilia- and flagella-associated protein 61 isoform X11) c4(276845, 276846) c5( ) c6( ) c7(cd); #c1(CFAP61) c2(XP_005260753) c3(cilia- and flagella-associated protein 61 isoform X12) c4( ) c5(276847, 276848, 276849, 276850, 276851, 276852, 276853, 276854, 276855, 276856, 276857, 276858, 276859, 276860, 276861) c6( ) c7(cd); #c1(CFAP61) c2(XP_011527514) c3(cilia- and flagella-associated protein 61 isoform X9) c4(322312, 322313) c5( ) c6( ) c7(cd); #c1(CFAP61) c2(XP_011527515) c3(cilia- and flagella-associated protein 61 isoform X2) c4(322314) c5(322315, 322316, 322317, 322318, 322319, 322320, 322321, 322322, 322323, 322324, 322325, 322326, 322327, 322328, 322329, 322330, 322331, 322332, 322333, 322334, 322335, 322336) c6( ) c7(cd); #c1(CFAP69) c2(NP_001034795) c3(cilia- and flagella-associated protein 69 isoform 1) c4(32288) c5(32289, 32290, 32291, 32292, 32293, 32294, 32295, 32296, 32297, 32298, 32299, 32300, 32301, 32302, 32303, 32304, 32305, 32306) c6( ) c7(fM); #c1(CFAP69) c2(NP_001153610) c3(cilia- and flagella-associated protein 69 isoform 2) c4(60756, 60757) c5(60758, 60759, 60760, 60761, 60762, 60763) c6( ) c7(fM); #c1(CFAP69) c2(XP_011514879) c3(cilia- and flagella-associated protein 69 isoform X2) c4(307632) c5( ) c6( ) c7(fM); #c1(CFAP97) c2(NP_001278962) c3(cilia- and flagella-associated protein 97 isoform 2) c4(111142) c5(111143, 111144, 111145, 111146, 111147, 111148) c6( ) c7(kh, aW, ds, jh, aT, at, zo, K, eA, ae, cd); #c1(CFAP97) c2(XP_011530455) c3(cilia- and flagella-associated protein 97 isoform X1) c4(326319) c5(326320, 326321, 326322, 326323, 326324, 326325) c6( ) c7(kh, aW, ds, jh, aT, at, zo, K, eA, ae, cd); #c1(CFB) c2(NP_001701) c3(complement factor B preproprotein) c4(120127, 120128, 120129, 120130, 120131, 120132) c5(120133, 120134, 120135, 120136, 120137, 120138, 120139, 120140, 120141, 120142, 120143, 120144, 120145, 120146, 120147, 120148, 120149, 120150, 120151, 120152, 120153, 120154, 120155, 120156, 120157, 120158, 120159, 120160, 120161, 120162, 120163, 120164, 120165, 120166, 120167, 120168, 120169, 120170, 120171, 120172, 120173, 120174, 120175, 120176, 120177, 120178, 120179, 120180, 120181, 120182, 120183, 120184, 120185, 120186, 120187, 120188, 120189, 120190, 120191, 120192, 120193, 120194, 120195, 120196, 120197, 120198, 120199, 120200, 120201, 120202, 120203, 120204, 120205, 120206, 120207, 120208, 120209, 120210, 120211, 120212, 120213, 120214, 120215) c6( ) c7(bL, axi, iW, agC, v, aLg, j, C, aLh, V, x, ql, agD, h, an, acd, db, Um, af, hM, A, Fn, IR, aAg, ZC, cr, eZ, fe, da, pD, iV, Z, Uk, W, nb, axs, aLf, dc, bC, GF, y); #c1(CFC1) c2(NP_115934) c3(cryptic protein isoform 1 precursor) c4(224787) c5(224788, 224789, 224790, 224791, 224792, 224793) c6( ) c7(qC, aLi, T, jh, hl, dV, bw, gZ, aLj, dq, at, dy, K, aLk, aLm, hp, j, Fq, aLn, eA, aLI); #c1(CFC1B) c2(NP_001072998) c3(cryptic family protein IB precursor) c4(35554) c5(35555, 35556, 35557, 35558, 35559, 35560, 35561, 35562) c6(35563, 35564) c7(aLi, aLo, BT); #c1(CFD) c2(NP_001919) c3(complement factor D preproprotein) c4(122210) c5(122211, 122212, 122213, 122214, 122215, 122216) c6( ) c7(dP, W, aLq, hc, oV, iW, awv, aLr, aLp, pD, j, v, bq); #c1(CFDP1) c2(NP_006315) c3(craniofacial development protein 1) c4(163929) c5(163930, 163931, 163932, 163933, 163934, 163935) c6( ) c7(T, bb, mR, c, Kv, Y, if, oj, U, alO, j, ci, K, qN, y, af); #c1(CFDP1) c2(XP_011521117) c3(craniofacial development protein 1 isoform X2) c4( ) c5(316037) c6( ) c7(T, bb, mR, c, Kv, Y, if, oj, U, alO, j, ci, K, qN, y, af); #c1(CFH) c2(NP_000177) c3(complement factor H isoform a precursor) c4(3853, 3854) c5(3855, 3856, 3857, 3858, 3859, 3860, 3861, 3862, 3863, 3864) c6(3865, 3866, 3867) c7(oO, ID, T, fR, yS, ea, e, aLv, aLy, bB, fo, HS, ci, aY, bv, AW, dY, M, dV, azm, K, wt, aHg, xa, uM, li, aW, aLH, hl, da, uY, pD, g, uC, Uk, ba, eM, iA, U, cj, vy, nw, aDM, pJ, iu, aLL, aLC, ajy, dD, aLx, aw, n, aj, BF, fr, uE, qW, ft, aLs, cc, ec, ql, jL, h, IG, aLB, aaA, dL, DU, ey, bl, acd, db, Um, A, Ad, ks, fe, ax, aLE, cM, aBs, aLw, W, Be, at, oh, va, B, ani, bL, Ik, aLt, AL, eR, dK, aA, cz, v, j, C, V, aLK, eA, J, agD, aLM, an, ae, af, aLD, s, oV, bg, Pg, aLJ, DR, ac, wO, hc, DW, AH, dy, Kd, gV, Ke, iW, He, agC, Jy, eq, DP, adg, ad, BY, aLF, Ae, aLu, tT, aLz, agB, aLG, oj, oW, vw, vc, IQ, vl, uQ, d, IR, hG, aaB, xs, aLI, aaP, eZ, dq, aF, S, bz, dr, DT, nb, aHL, axs, bE, arj, aLA, Fw, bC, oQ, GF, IC, vt, rF, X, y, DH); #c1(CFH) c2(NP_001014975) c3(complement factor H isoform b precursor) c4(26077) c5(26078, 26079, 26080, 26081, 26082, 26083, 26084, 26085, 26086, 26087, 26088, 26089, 26090, 26091, 26092, 26093, 26094) c6(26095, 26096, 26097, 26098) c7(oO, ID, T, fR, yS, ea, e, aLv, aLy, bB, fo, HS, ci, aY, bv, AW, dY, M, dV, azm, K, wt, aHg, xa, uM, li, aW, aLH, hl, da, uY, pD, g, uC, Uk, ba, eM, iA, U, cj, vy, nw, aDM, pJ, iu, aLL, aLC, ajy, dD, aLx, aw, n, aj, BF, fr, uE, qW, ft, aLs, cc, ec, ql, jL, h, IG, aLB, aaA, dL, DU, ey, bl, acd, db, Um, A, Ad, ks, fe, ax, aLE, cM, aBs, aLw, W, Be, at, oh, va, B, ani, bL, Ik, aLt, AL, eR, dK, aA, cz, v, j, C, V, aLK, eA, J, agD, aLM, an, ae, af, aLD, s, oV, bg, Pg, aLJ, DR, ac, wO, hc, DW, AH, dy, Kd, gV, Ke, iW, Hc, agC, Jy, eq, DP, adg, ad, BY, aLF, Ae, aLu, tT, aLz, agB, aLG, oj, oW, vw, vc, IQ, vl, uQ, d, IR, hG, aaB, xs, aLI, aaP, eZ, dq, aF, S, bz, dr, DT, nb, aHL, axs, bE, arj, aLA, Fw, bC, oQ, GF, IG, vt, rF, X, y, DH); #c1(CFHR1) c2(NP_002104) c3(complement factor H-related protein 1 precursor) c4(124598) c5(124599, 124600, 124601, 124602, 124603, 124604) c6( ) c7(T, W, ac, eR, ql, ZC, DW, iW, eZ, cz, n, Io, hn, ey, pT, pJ, bt, Uk); #c1(CFHR2) c2(NP_005657) c3(complement factor H-related protein 2 precursor) c4(158321) c5(158322, 158323, 158324, 158325, 158326, 158327, 158328, 158329, 158330, 158331) c6( ) c7(W); #c1(CFHR3) c2(NP_001160096) c3(complement factor H-related protein 3 isoform 2 precursor) c4(65084) c5(65085, 65086, 65087, 65088, 65089, 65090) c6( ) c7(T, W, eR, ql, ZC, DW, eZ, cz, pD, dy, ey, pJ, Uk); #c1(CFHR3) c2(NP_066303) c3(complement factor H-related protein 3 isoform 1 precursor) c4(207153, 207154) c5(207155, 207156, 207157, 207158, 207159, 207160) c6( ) c7(T, W, eR, ql, ZC, DW, eZ, cz, pD, dy, ey, pJ, Uk); #c1(CFHR3) c2(XP_011507398) c3(complement factor H-related protein 3 isoform X1) c4( ) c5(297261, 297262, 297263, 297264, 297265, 297266) c6( ) c7(T, W, eR, ql, ZC, DW, eZ, cz, pD, dy, ey, pJ, Uk); #c1(CFHR4) c2(NP_001188480) c3(complement factor H-related protein 4 isoform 2 precursor) c4(79211) c5(79212, 79213, 79214, 79215, 79216, 79217) c6( ) c7(W, eZ); #c1(CFHR4) c2(NP_006675) c3(complement factor H-related protein 4 isoform 3 precursor) c4(167049, 167050, 167051) c5(167052, 167053, 167054, 167055, 167056, 167057, 167058, 167059, 167060, 167061, 167062, 167063, 167064, 167065, 167066, 167067, 167068, 167069) c6( ) c7(W, eZ); #c1(CFHR5) c2(NP_110414) c3(complement factor H-related protein 5 precursor) c4(220134, 220135) c5(220136, 220137, 220138, 220139, 220140, 220141, 220142, 220143, 220144, 220145, 220146, 220147, 220148, 220149, 220150, 220151) c6(220152, 220153, 220154, 220155) c7(fU, aLO, acF, W, eR, ql, hc, DW, iW, eZ, n, dy, rF, aLN, aY, aLP); #c1(CFI) c2(NP_000195) c3(complement factor 1 preproprotein) c4(4401, 4402, 4403) c5(4404, 4405, 4406, 4407, 4408, 4409, 4410, 4411, 4412, 4413, 4414, 4415, 4416, 4417, 4418, 4419, 4420, 4421) c6( ) c7(T, eR, AL, aA, n, aLQ, dP, av, aLS, aLu, ql, h, aq, afq, Uk, W, afc, Be, aLR, GF, pJ, B, ao, aLL); #c1(CFI) c2(XP_005263033) c3(complement factor 1 isoform X3) c4(278216) c5(278217, 278218, 278219, 278220, 278221, 278222) c6( ) c7(T, eR, AL, aA, n, aLQ, dP, av, aLS, aLu, ql, h, aq, afq, Uk, W, afc, Be, aLR, GF, pJ, B, ao, aLL); #c1(CFL1) c2(NP_005498) c3(cofilin-1) c4(156826, 156827) c5(156828, 156829, 156830, 156831, 156832, 156833, 156834, 156835, 156836, 156837, 156838, 156839, 156840, 156841, 156842, 156843) c6( ) c7(bM, fd, bB, v, ci, hF, ad, ip, dP, yt, aT, By, K, ae, B, aW, Y, g, cm, bw, bz, ck, eM, Ip, bE, iS, vt, it, X); #c1(CFL2) c2(NP_068733) c3(cofilin-2 isoform 1) c4(210119) c5(210120, 210121, 210122, 210123, 210124, 210125, 210126, 210127, 210128, 210129) c6( ) c7(Bm, Am, oj, Ad, aLT); #c1(CFLAR) c2(NP_001120656) c3(CASP8 and FADD-like apoptosis regulator isoform 2) c4(44416) c5(44417, 44418, 44419, 44420, 44421, 44422, 44423, 44424, 44425, 44426, 44427, 44428, 44429, 44430, 44431, 44432, 44433, 44434, 44435, 44436, 44437, 44438, 44439, 44440, 44441, 44442, 44443, 44444, 44445, 44446) c6( ) c7(oO, gh, T, bM, fM, aC, if, ha, eX, jh, aA, bB, n, fd, fr, ci, qN, Qp, V, q, hr, ad, eA, XW, iu, ib, aE, afQ, aT, Lv, cy, h, dL, eV, nJ, ae, eL, cp, d, apo, je, nO, aW, sp, Y, ayU, eH, ff, r, hQ, aF, en, g, eF, t, aEx, bz, cm, iV, pm, bw, LB, ck, iM, eM, iA, bE, X, ajd, cj, km, hL, m, y, bt, B, hS); #c1(CFLAR) c2(NP_001189445) c3(CASP8 and FADD-like apoptosis regulator isoform 4) c4(79394) c5(79395, 79396, 79397, 79398, 79399, 79400) c6( ) c7(oO, gh, 1 bM, fM, aC, if, ha, eX, jh, aA, bB, n, fd, fr, ci, qN, Qp, V, q, br, ad, eA, XW, iu, ib, aE, afQ, aT, Lv, cy, h, dL, eV, nJ, ae, eL, cp, d, apo, je, nO, aW, sp, Y, ayU, eH, ff, r, hQ, aF, en, g, eF, t, aEx, bz, cm, iV, pm, bw, LB, ck, iM, eM, iA, bE, X, ajd, cj, km, hL, m, y, bt, B, hS); #c1(CFLAR) c2(NP_001189446) c3(CASP8 and FADD-like apoptosis regulator isoform 5) c4( ) c5(79401, 79402, 79403, 79404, 79405) c6( ) c7(oO, gh, T, bM, fM, aC, if, ha, eX, jh, aA, bB, n, fd, fr, ci, qN, Qp, V, q, hr, ad, eA, XW, iu, ib, aE, afQ, aT, Lv, cy, h, dL, eV, nJ, ae, eL, cp, d, apo, je, nO, aW, sp, Y, ayU, eH, ff, r, hQ, aF, en, g, eF, t, aEx, bz, cm, iV, pm, bw, LB, ck, iM, eM, iA, bE, X, ajd, cj, km, hL, m, y, bt, B, hS); #c1(CFLAR) c2(NP_001189447) c3(CASP8 and FADD-like apoptosis regulator isoform 6) c4( ) c5(79406, 79407, 79408, 79409, 79410) c6( ) c7(oO, gh, T, bM, fM, aC, if, ha, eX, jh, aA, bB, n, fd, fr, ci, qN, Qp, V, q, hr, ad, eA, XW, iu, ib, aE, afQ, aT, Lv, cy, h, dL, eV, nJ, ae, eL, cp, d, apo, je, nO, aW, sp, Y, ayU, eH, ff, r, hQ, aF, en, g, eF, t, aEx, bz, cm, iV, pm, bw, LB, ck, iM, eM, iA, bE, X, ajd, cj, km, hL, m, y, bt, B, hS); #c1(CFLAR) c2(NP_003870) c3(CASP8 and FADD-like apoptosis regulator isoform 1) c4(141653, 141654) c5(141655, 141656, 141657, 141658, 141659, 141660, 141661, 141662, 141663, 141664, 141665) c6( ) c7(oO, gh, 1 bM, fM, aC, if, ha, eX, jh, aA, bB, n, fd, fr, ci, qN, Qp, V, q, hr, ad, eA, XW, iu, ib, aE, afQ, aT, Lv, cy, h, dL, eV, nJ, ae, eL, cp, d, apo, je, nO, aW, sp, Y, ayU, eH, ff, r, hQ, aF, en, g, eF, t, aEx, bz, cm, iV, pm, bw, LB, ck, iM, eM, iA, bE, X, ajd, cj, km, hL, m, y, bt, B, hS); #c1(CFLAR) c2(XP_011510402) c3(CASP8 and FADD-like apoptosis regulator isoform X2) c4(300966, 300967, 300968, 300969, 300970) c5(300971, 300972, 300973, 300974, 300975, 300976) c6( ) c7(oO, gh, T, bM, fM, aC, if, ha, eX, jh, aA, bB, n, fd, fr, ci, qN, Qp, V, q, hr, ad, eA, XW, iu, ib, aE, afQ, aT, Lv, cy, h, dL, eV, nJ, ae, eL, cp, d, apo, je, nO, aW, sp, Y, ayU, eH, ff, r, hQ, aF, en, g, eF, t, aEx, bz, cm, iV, pm, bw, LB, ck, iM, eM, iA, bE, X, ajd, cj, km, hL, m, y, bt, B, hS); #c1(CFP) c2(NP_002612) c3(properdin precursor) c4(130286) c5(130287, 130288, 130289, 130290, 130291, 130292, 130293, 130294, 130295, 130296, 130297, 130298, 130299, 130300) c6(130301, 130302, 130303, 130304) c7(ajy, aLy, iD, aLU, bS, aLX, rP, il, iu, AW, h, K, aLV, af, B, aq, aLW, pD, W, ig, aS, xg, gD); #c1(CFTR) c2(NP_000483) c3(cystic fibrosis transmembrane conductance regulator) c4(9660, 9661) c5(9662, 9663, 9664, 9665, 9666, 9667, 9668, 9669, 9670, 9671, 9672, 9673, 9674, 9675, 9676, 9677, 9678, 9679, 9680, 9681, 9682, 9683, 9684, 9685, 9686, 9687, 9688, 9689, 9690, 9691, 9692, 9693, 9694, 9695, 9696, 9697, 9698, 9699, 9700, 9701, 9702, 9703, 9704, 9705, 9706, 9707, 9708, 9709, 9710, 9711, 9712, 9713, 9714, 9715, 9716, 9717, 9718, 9719, 9720, 9721, 9722, 9723, 9724, 9725, 9726, 9727, 9728, 9729, 9730, 9731, 9732, 9733, 9734, 9735, 9736, 9737, 9738, 9739, 9740, 9741, 9742, 9743, 9744, 9745, 9746, 9747, 9748, 9749, 9750, 9751, 9752, 9753, 9754, 9755, 9756, 9757, 9758, 9759, 9760, 9761, 9762, 9763, 9764, 9765, 9766, 9767, 9768, 9769, 9770, 9771, 9772, 9773, 9774, 9775, 9776) c6(9777, 9778, 9779, 9780, 9781, 9782, 9783) c7(oO, bM, T, aC, fR, if, aMq, aMv, ci, fw, aMB, aMu, aE, Iz, aMh, K, aCO, dQ, dF, be, azh, eL, aa, aEV, aW, qS, mQ, hl, hN, aMF, g, hJ, zV, aLZ, eM, AV, ki, wB, QF, zl, jM, aKr, avB, gU, n, aj, qN, pM, aMd, awq, KL, aMp, b, jz, aME, ju, aMD, adX, cU, aMj, h, dL, wb, aKE, aMi, ajV, aMC, yi, aMe, A, aMm, sp, aMs, ap, aae, fe, kp, aKv, cM, aMg, ar, wk, JM, at, aMc, aAl, IB, B, aMk, bL, Dw, pF, fG, oe, aA, aBo, j, alx, J, q, aMx, eJ, aMh, qp, aT, kf, vH, aMl, yb, aKG, ae, af, le, ND, r, aMA, afg, en, aMf, OC, EJ, dS, cT, YW, aMz, aMr, fD, UF, xb, ao, aMt, ayZ, kV, Kd, am, Me, atS, VT, jN, aMw, dG, Jz, iG, ad, dP, afm, aMn, ds, arV, vB, Yi, MG, mu, uQ, ZE, ff, aF, Hl, bz, aLY, aMo, DF, dr, TA, aMa, bE, uR, aMy, ei, asz, i, y, sH); #c1(CFTR) c2(XP_011514056) c3(cystic fibrosis transmembrane conductance regulator isoform X3) c4(306591, 306592) c5(306593, 306594, 306595, 306596, 306597, 306598, 306599, 306600, 306601, 306602) c6(306603, 306604) c7(oO, bM, T, aC, fR, if, aMq, aMv, ci, fw, aMB, aMu, aE, Iz, aMh, K, aCO, dQ, dF, be, azh, eL, aa, aEV, aW, qS, mQ, hl, hN, aMF, g, hJ, zV, aLZ, eM, AV, ki, wB, QF, zl, jM, aKr, avB, gU, n, aj, qN, pM, aMd, awq, KL, aMp, b, jz, aME, ju, aMD, adX, cU, aMj, h, dL, wb, aKE, aMi, ajV, aMC, yi, aMe, A, aMm, sp, aMs, ap, aae, fe, kp, aKv, cM, aMg, ar, wk, JM, at, aMc, aAl, IB, B, aMk, hL, Dw, pF, fG, oe, aA, aBo, j, alx, J, q, aMx, eJ, aMh, qp, aT, kf, vH, aMl, yb, aKG, ae, af, le, ND, r, aMA, afg, en, aMf, OC, EJ, dS, cT, YW, aMz, aMr, fD, UF, xb, ao, aMt, ayZ, kV, Kd, am, Me, atS, VT, jN, aMw, dG, Jz, iG, ad, dP, afm, aMn, ds, arV, vB, Yi, MG, mu, uQ, ZE, ff, aF, HI, bz, aLY, aMo, DF, dr, TA, aMa, bE, uR, aMy, ei, asz, i, y, sH); #c1(CGA) c2(NP_000726) c3(glycoprotein hormones alpha chain isoform 2 precursor) c4(14911) c5(14912, 14913, 14914, 14915, 14916, 14917, 14918, 14919, 14920, 14921, 14922, 14923, 14924, 14925, 14926, 14927, 14928, 14929, 14930, 14931, 14932, 14933, 14934, 14935, 14936, 14937, 14938, 14939, 14940, 14941, 14942, 14943, 14944, 14945, 14946, 14947, 14948, 14949, 14950, 14951, 14952, 14953, 14954, 14955, 14956, 14957, 14958, 14959, 14960, 14961, 14962, 14963, 14964, 14965, 14966, 14967, 14968, 14969, 14970, 14971, 14972, 14973, 14974, 14975, 14976, 14977, 14978, 14979, 14980, 14981, 14982, 14983, 14984, 14985, 14986, 14987, 14988, 14989, 14990, 14991, 14992, 14993, 14994, 14995, 14996, 14997, 14998, 14999, 15000, 15001, 15002, 15003, 15004, 15005, 15006) c6(15007, 15008, 15009) c7(Zo, aMK, cZ, gV, gU, T, afa, UH, AS, aZ, axd, I, KY, aiC, n, ci, Eh, ad, ft, aew, Db, aT, dL, jj, dd, fb, nJ, ae, Df, gk, WZ, eL, aeQ, yO, bf, s, aMG, hG, aW, ND, sq, vT, aML, Lm, NH, Pr, aMH, Hu, aMJ, S, Pd, cl, t, KQ, bz, f, cm, bN, qJ, Ew, bP, eM, HK, hL, at, aez, MW, m, be, aMI, Po, AN); #c1(CGB1) c2(NP_203695) c3(choriogonadotropin subunit beta variant 1 precursor) c4(228433) c5(228434, 228435, 228436, 228437, 228438, 228439, 228440) c6(228441, 228442) c7(CN); #c1(CGB2) c2(NP_203696) c3(choriogonadotropin subunit beta variant 2 precursor) c4(228443, 228444) c5(228445, 228446, 228447, 228448, 228449, 228450, 228451, 228452, 228453, 228454, 228455, 228456) c6( ) c7(CN); #c1(CGB5) c2(NP_149032) c3(chorionic gonadotropin, beta polypeptide 5 precursor) c4(226815, 226816, 226817, 226818, 226819) c5(226820, 226821, 226822, 226823, 226824, 226825, 226826, 226827, 226828, 226829, 226830, 226831, 226832, 226833, 226834, 226835, 226836, 226837, 226838, 226839, 226840, 226841, 226842, 226843, 226844, 226845, 226846, 226847, 226848, 226849, 226850, 226851, 226852, 226853, 226854, 226855, 226856, 226857, 226858, 226859, 226860, 226861, 226862, 226863, 226864) c6(226865, 226866, 226867, 226868, 226869, 226870, 226871, 226872, 226873, 226874) c7(cZ, T, afa, UH, if, fr, ci, qN, ad, ft, aT, dL, jj, dd, nJ, Df, ae, eL, ae, kl, CN, vT, aW, ff, Hu, en, cl, f, t, KQ, sn, hL, hR, m, KY); #c1(CGB7) c2(XP_011525821) c3(chorionic gonadotropin, beta polypeptide 7 isoform X1) c4(320206, 320207, 320208) c5(320209, 320210, 320211, 320212, 320213, 320214, 320215, 320216, 320217, 320218, 320219, 320220) c6( ) c7(cZ, T, afa, UH, if, fr, ci, qN, ad, ft, aT, dL, jj, dd, nJ, Df, ae, eL, aeQ, CN, vT, aW, ff, Hu, en, cl, f, t, KQ, hL, hR, m, KY); #c1(CGN) c2(XP_005245422) c3(cingulin isoform X1) c4(266540, 266541, 266542) c5(266543, 266544, 266545, 266546, 266547, 266548, 266549, 266550, 266551, 266552, 266553, 266554, 266555, 266556, 266557, 266558, 266559, 266560, 266561, 266562, 266563, 266564) c6( ) c7(bM, ff, en); #c1(CGNL1) c2(NP_116255) c3(cingulin-like protein 1) c4(225998) c5(225999, 226000, 226001, 226002, 226003, 226004) c6( ) c7(bK); #c1(CGRRF1) c2(NP_006559) c3(cell growth regulator with RING finger domain protein 1) c4(166229) c5(166230, 166231, 166232, 166233, 166234, 166235) c6( ) c7(cI, cF, v, hL, an); #c1(C112511) c2(NP_003947) c3(cholesterol 25-hydroxylase) c4(142384) c5(142385, 142386, 142387, 142388, 142389, 142390) c6( ) c7(at, ea, af); #c1(CHAC1) c2(NP_001136248) c3(glutathione-specific gamma-glutamylcyclotransferase 1 isoform b) c4(54682) c5(54683, 54684, 54685, 54686, 54687, 54688) c6( ) c7(T, aW, Dd, aT, m, t); #c1(CHAC1) c2(NP_077016) c3(glutathione-specific gamma-glutamylcyclotransferase 1 isoform a) c4(214753) c5(214754, 214755, 214756, 214757, 214758, 214759) c6( ) c7(T, aW, Dd, aT, m, t); #c1(CHAD) c2(XP_011522516) c3(chondroadherin isoform X1) c4( ) c5(317137) c6( ) c7(ff, en); #c1(CHAF1A) c2(NP_005474) c3(chromatin assembly factor 1 subunit A) c4(156506) c5( ) c6( ) c7(T, dB, aW, bE, ps, aT, bB, pl, m, eA, cm, cM, avn, ad); #c1(CHAF1A) c2(XP_011525907) c3(chromatin assembly factor 1 subunit A isoform X1) c4(320315, 320316) c5( ) c6( ) c7(T, dB, aW, bE, ps, aT, bB, pl, m, eA, cm, cM, avn, ad); #c1(CHAF1A) c2(XP_011525908) c3(chromatin assembly factor 1 subunit A isoform X2) c4( ) c5(320317, 320318, 320319, 320320, 320321, 320322, 320323, 320324, 320325, 320326, 320327, 320328) c6( ) c7(T, dB, aW, bE, ps, aT, bB, pl, m, eA, cm, cM, avn, ad); #c1(CHAF1A) c2(XP_011525909) c3(chromatin assembly factor 1 subunit A isoform X3) c4( ) c5(320329, 320330, 320331, 320332, 320333, 320334) c6( ) c7(T, dB, aW, bE, ps, aT, bB, pl, m, eA, cm, cM, avn, ad); #c1(CHAF1B) c2(NP_005432) c3(chromatin assembly factor 1 subunit 8) c4(156129) c5(156130, 156131, 156132, 156133, 156134, 156135) c6( ) c7(f, avn, af, aT); #c1(CHAMP1) c2(NP_001157617) c3(chromosome alignment-maintaining phosphoprotein 1) c4(62322) c5(62323, 62324, 62325, 62326, 62327, 62328, 62329, 62330) c6( ) c7(oO, ck, bM, hd, x, c, nB, mx, hD, h, k, g, pM, eE, Kg, kS, eA, EJ); #c1(CHAT) c2(NP_001136401) c3(choline O-acetyltransferase isoform 1) c4(54878, 54879) c5( ) c6( ) c7(rt, bM, xn, aw, bB, aj, bS, ct, ci, zW, abe, J, xC, xm, zT, ib, xc, sO, ahL, Ak, cy, H, af, Gc, Gv, ff, EZ, en, Z, f, cm, wA, hY, xA, akx, bE, xj, dJ, aMM, R, y, xg, L); #c1(CHAT) c2(NP_001136405) c3(choline O-acetyltransferase isoform 3) c4(54901) c5(54902, 54903, 54904, 54905, 54906, 54907, 54908, 54909, 54910, 54911, 54912, 54913, 54914, 54915, 54916, 54917, 54918, 54919, 54920, 54921, 54922, 54923, 54924, 54925) c6( ) c7(rt, bM, xn, aw, bB, aj, bS, ct, ci, zW, abe, J, xC, xm, zT, ib, xc, sO, ahL, Ak, cy, H, af, Gc, Gv, ff, EZ, en, Z, f, cm, wA, hY, xA, akx, bE, xj, dJ, aMM, R, y, xg, L); #c1(CHAT) c2(NP_065574) c3(choline O-acetyltransferase isoform 2) c4(204806) c5(204807, 204808, 204809, 204810, 204811, 204812, 204813, 204814) c6( ) c7(rt, bM, xn, aw, bB, aj, bS, ct, ci, zW, abe, J, xC, xm, zT, ib, xc, sO, ahL, Ak, cy, H, af, Gc, Gv, ff, EZ, en, Z, f, cm, wA, hY, xA, akx bE, xj, dJ, aMM, R, y, xg, L); #c1(CHCHD1) c2(NP_976043) c3(coiled-coil-helix-coiled-coil-helix domain-containing protein 1) c4(262865, 262866) c5(262867, 262868, 262869, 262870, 262871, 262872, 262873, 262874, 262875, 262876, 262877, 262878) c6( ) c7(kC); #c1(CHCHD10) c2(NP_998885) c3(coiled-coil-helix-coiled-coil-helix domain-containing protein 10, mitochondrial isoform b precursor) c4(266071) c5(266072, 266073, 266074, 266075, 266076, 266077) c6( ) c7(axR, kC, bb, c); #c1(CHCHD3) c2(NP_060282) c3(MICOS complex subunit MIC19) c4(195188) c5(195189, 195190, 195191, 195192, 195193, 195194) c6( ) c7(rz, IB); #c1(CHCHD3) c2(XP_011514666) c3(MICOS complex subunit MIC19 isoform X2) c4(307321) c5(307322, 307323, 307324, 307325, 307326, 307327) c6( ) c7(rz, IB); #c1(CHCHD5) c2(NP_115685) c3(coiled-coil-helix-coiled-coil-helix domain-containing protein 5 isoform a) c4(223541) c5(223542, 223543, 223544, 223545, 223546, 223547) c6( ) c7(Ea); #c1(CHCHD6) c2(NP_115719) c3(MICOS complex subunit MIC25) c4(223708, 223709) c5(223710, 223711, 223712, 223713, 223714, 223715, 223716, 223717, 223718, 223719, 223720, 223721) c6( ) c7(T); #c1(CHCHD7) c2(NP_001011668) c3(coiled-coil-helix-coiled-coil-helix domain-containing protein 7 isoform b) c4(24683, 24684) c5(24685, 24686, 24687, 24688, 24689, 24690, 24691, 24692, 24693, 24694, 24695, 24696, 24697, 24698) c6( ) c7(afb); #c1(CHCHD7) c2(NP_001011671) c3(coiled-coil-helix-coiled-coil-helix domain-containing protein 7 isoform f) c4( ) c5(24699, 24700, 24701, 24702, 24703, 24704, 24705, 24706, 24707, 24708) c6( ) c7(afb); #c1(CHCHD7) c2(NP_077276) c3(coiled-coil-helix-coiled-coil-helix domain-containing protein 7 isoform d) c4(214878, 214879, 214880) c5(214881, 214882, 214883, 214884, 214885, 214886, 214887) c6( ) c7(afb); #c1(CHD1) c2(XP_005271923) c3(chromodomain-helicase-DNA-binding protein 1 isoform X2) c4(283630) c5(283631) c6( ) c7(T, aE, aW, aT, aA, aj, ci, ae, J, ad); #c1(CHD1) c2(XP_005271924) c3(chromodomain-helicase-DNA-binding protein 1 isoform X1) c4(283632) c5(283633, 283634, 283635, 283636, 283637, 283638, 283639, 283640, 283641, 283642, 283643, 283644, 283645, 283646) c6( ) c7(T, aE, aW, aT, aA, aj, ci, ae, J, ad); #c1(CHD1) c2(XP_011541414) c3(chromodomain-helicase-DNA-binding protein 1 isoform X3) c4(340016) c5(340017, 340018, 340019, 340020, 340021, 340022) c6( ) c7(T, aE, aW, aT, aA, aj, ci, ae, J, ad); #c1(CHD2) c2(NP_001036037) c3(chromodomain-helicase-DNA-binding protein 2 isoform 2) c4(33764, 33765) c5(33766, 33767, 33768, 33769, 33770, 33771, 33772, 33773, 33774, 33775, 33776, 33777, 33778, 33779, 33780, 33781, 33782, 33783) c6( ) c7(ha, cz, vH, aMN, Im, nA, avQ); #c1(CHD2) c2(NP_001262) c3(chromodomain-helicase-DNA-binding protein 2 isoform 1) c4(96969, 96970, 96971) c5(96972, 96973, 96974, 96975, 96976, 96977, 96978, 96979, 96980, 96981, 96982, 96983, 96984) c6( ) c7(ha, cz, vH, aMN, lm, nA, avQ); #c1(CHD3) c2(NP_001005271) c3(chromodomain-helicase-DNA-binding protein 3 isoform 3) c4(21259) c5(21260, 21261, 21262, 21263, 21264, 21265) c6( ) c7(nf, ail, aE); #c1(CHD3) c2(NP_001005273) c3(chromodomain-helicase-DNA-binding protein 3 isoform 1) c4(21266) c5(21267, 21268, 21269, 21270, 21271, 21272) c6( ) c7(nf, ail, aE); #c1(CHD3) c2(NP_005843) c3(chromodomain-helicase-DNA- binding protein 3 isoform 2) c4(159813) c5(159814, 159815, 159816, 159817, 159818, 159819, 159820) c6( ) c7(nf, ail, aE); #c1(CHD4) c2(NP_001284482) c3(chromodomain-helicase-DNA-binding protein 4 isoform 2) c4(111874, 111875) c5(111876, 111877, 111878, 111879, 111880, 111881, 111882, 111883, 111884, 111885, 111886, 111887) c6( ) c7(d, hL); #c1(CHD4) c2(XP_006719021) c3(chromodomain-helicase-DNA-binding protein 4 isoform X2) c4(292160, 292161) c5(292162, 292163, 292164, 292165, 292166, 292167, 292168, 292169, 292170, 292171, 292172, 292173, 292174, 292175, 292176, 292177, 292178, 292179, 292180, 292181) c6( ) c7(d, hL); #c1(CHD4) c2(XP_006719025) c3(chromodomain-helicase-DNA-binding protein 4 isoform X6) c4(292182) c5(292183) c6( ) c7(d, hL); #c1(CHD6) c2(NP_115597) c3(chromodomain-helicase-DNA-binding protein 6) c4(223318, 223319, 223320) c5(223321, 223322, 223323, 223324, 223325, 223326, 223327, 223328, 223329, 223330, 223331, 223332, 223333, 223334, 223335, 223336, 223337, 223338) c6( ) c7(sc, T, id, aA, ci, q, ad, eA, dP, ds, aT, dL, aW, Y, ff, r, Ej, EH, aF, en, t, cm, bz, ck, Dy, ky, m, B); #c1(CHD6) c2(XP_005260633) c3(chromodomain-helicase-DNA-binding protein 6 isoform X8) c4( ) c5(276754) c6( ) c7(sc, T, id, aA, ci, q, ad, eA, dP, ds, aT, dL, aW, Y, ff, r, Ej, EH, aF, en, t, cm, bz, ck, Dy, ky, m, B); #c1(CHD6) c2(XP_006723946) c3(chromodomain-helicase-DNA-binding protein 6 isoform X7) c4(295536, 295537) c5(295538, 295539, 295540, 295541, 295542, 295543, 295544, 295545, 295546, 295547, 295548, 295549, 295550) c6( ) c7(sc, T, id, aA, ci, q, ad, eA, dP, ds, aT, dL, aW, Y, ff, r, Ej, EH, aF, en, t, cm, bz, ck, Dy, ky, m, B); #c1(CHD7) c2(NP_060250) c3(chromodomain-helicase-DNA-binding protein 7) c4(195023) c5(195024, 195025, 195026, 195027, 195028, 195029, 195030, 195031, 195032, 195033) c6( ) c7(aMU, dA, aMQ, acz, aMW, RX, atS, bB, n, rr, q, zon, yn, UE, md, aMV, aE, amJ, nX, aMS, aMT, Gc, ahb, avQ, kp, aMO, BE, bQ, dr, kn, y, aMP, aMR, gY, bE, gZ, Km, UF, bD, gT, sH); #c1(CHD7) c2(XP_011515856) c3(chromodomain-helicase-DNA-binding protein 7 isoform X1) c4( ) c5(308834, 308835, 308836, 308837, 308838) c6( ) c7(aMU, dA, aMQ, acz, aMW, RX, atS, bB, n, rr, q, zo, yn, UE, md, aMV, aE, amJ, nX, aMS, aMT, Gc, ahb, avQ, kp, aMO, BE, bQ, dr, kn, y, aMP, aMR, gY, bE, gZ, Km, UF, bD, gT, sH); #c1(CHD7) c2(XP_011515858) c3(chromodomain-helicase-DNA-binding protein 7 isoform X3) c4(308839) c5( ) c6( ) c7(aMU, dA, aMQ, acz, aMW, RX, atS, bB, n, rr, q, zo, yn, UE, md, aMV, aE, amJ, nX, aMS, aMT, Gc, ahb, avQ, kp, aMO, BE, bQ, dr, kn, y, aMP, aMR, gY, bE, gZ, Km, UF, bD, gT, sH); #c1(CHD8) c2(NP_001164100) c3(chromodomain-helicase-DNA-binding protein 8 isoform 1) c4(66591) c5(66592, 66593, 66594, 66595, 66596, 66597, 66598, 66599, 66600, 66601, 66602) c6( ) c7(VX, aMX, avQ, nA, rz, bN); #c1(CHD8) c2(NP_065971) c3(chromodomain-helicase-DNA-binding protein 8 isoform 2) c4(206524, 206525) c5(206526, 206527, 206528, 206529, 206530, 206531, 206532, 206533, 206534, 206535, 206536) c6( ) c7(VX, aMX, avQ, nA, rz, bN); #c1(CHDH) c2(NP_060867) c3(choline dehydrogenase, mitochondrial) c4(198169, 198170) c5(198171, 198172, 198173, 198174, 198175, 198176) c6( ) c7(bL, T, dD, ahf, eR, atk, ea, acI, e, aw, arQ, cz, sM, n, cR, Zv, j, aj, v, bB, eq, nS, cd, J, Na, agd, ec, M, aT, Nc, K, dQ, rz, aW, hl, QK, dr, ac, gY, bE, wE, aMY, gZ, ei, bD, ZW); #c1(CHDH) c2(XP_006713315) c3(choline dehydrogenase, mitochondrial isoform X2) c4( ) c5(287071, 287072, 287073, 287074, 287075, 287076, 287077, 287078, 287079, 287080, 287081, 287082) c6( ) c7(bL, T, dD, ahf, eR, atk, ea, acI, e, aw, arQ, cz, sM, n, cR, Zv, j, aj, v, bB, eq, nS, cd, J, Na, agd, ec, M, aT, Nc, K, dQ, rz, aW, hl, QK, dr, ac, gY, bE, wE, aMY, gZ, ei, bD, ZW); #c1(CHDH) c2(XP_011532241) c3(choline dehydrogenase, mitochondrial isoform X1) c4(328295) c5( ) c6( ) c7(bL, T, dD, ahf, eR, atk, ea, acI, e, aw, arQ, cz, sM, n, cR, Zv, j, aj, v, bB, eq, nS, cd, J, Na, agd, ec, M, aT, Nc, K, dQ, rz, aW, hl, QK, dr, ac, gY, bE, wE, aMY, gZ, ei, bD, ZW); #c1(CHEK1) c2(NP_001231775) c3(serine/threonine-protein kinase Chk1 isoform 2) c4(87483, 87484, 87485) c5(87486, 87487, 87488, 87489, 87490, 87491, 87492, 87493, 87494, 87495, 87496, 87497, 87498, 87499, 87500, 87501, 87502, 87503, 87504, 87505, 87506, 87507, 87508, 87509, 87510, 87511, 87512, 87513, 87514, 87515, 87516, 87517, 87518, 87519, 87520, 87521) c6( ) c7(T, os, aC, if, iW, jh, aA, bB, fd, oZ, ci, bX, qN, q, ad, eA, ip, iu, ft, aE, aEX, Qk, ajv, oW, aT, CQ, dL, ey, K, ae, aii, B, aW, WE, Y, aBq, CT, ff, r, aF, La, en, cl, g, t, QK, bz, eF, ajj, cm, bw, ck, kP, eM, bP, dB, bE, bt, hL, at, CZ, m, bC, aed, X, BA); #c1(CHEK2) c2(NP_001244316) c3(serine/threonine-protein kinase Chk2 isoform d) c4( ) c5(92139, 92140, 92141, 92142, 92143, 92144, 92145, 92146, 92147, 92148, 92149, 92150, 92151, 92152, 92153, 92154, 92155) c6( ) c7(atT, T, aC, bB, ci, ip, bv, aE, Qk, ajv, K, aNc, MO, eL, xQ, zQ, aW, aNb, LZ, g, eF, cm, bw, ajj, eM, nF, cj, cX, m, in, dD, ht, n, cd, ft, aMZ, eV, dL, pl, avc, aeU, aq, dB, hk, anZ, hL, tl, aNa, WL, it, AN, B, bL, AS, eR, eX, ew, aA, cz, hy, pd, q, eA, aT, qv, jj, ae, qw, hM, iU, vT, Y, r, auX, eS, en, cl, t, iK, ck, nM, kP, gX, np, dy, rA, bt, HQ, Gl, jh, Gn, eq, ad, av, fb, d, BN, BO, Ub, ff, eH, aF, bz, bE, es, bE, afd, bC, oQ, y, aed, X, BA); #c1(CHEK2) c2(NP_009125) c3(serine/threonine-protein kinase Chk2 isoform a) c4(170896, 170897) c5(170898, 170899, 170900, 170901, 170902, 170903, 170904, 170905, 170906, 170907, 170908, 170909, 170910, 170911, 170912, 170913, 170914, 170915, 170916, 170917, 170918, 170919, 170920, 170921, 170922) c6( ) c7(atT, T, aC, bB, ci, ip, bv, aE, Qk, ajv, K, aNc, MO, eL, xQ, zQ, aW, aNb, LZ, g, eF, cm, bw, ajj, eM, nF, cj, cX, m, in, dD, ht, n, cd, ft, aMZ, eV, dL, pl, avc, aeU, aq, dB, hk, anZ, hL, tl, aNa, WL, it, AN, B, bL, AS, eR, eX, ew, aA, cz, hy, pd, q, eA, aT, qv, jj, ae, qw, hM, iU, vT, Y, r, auX, eS, en, cI, t, iK, ck, nM, kP, gX, np, dy, rA, bt, HQ, GI, jh, Gn, eq, ad, av, fb, d, BN, BO, Ub, ff, eH, aF, bz, bF, es, bE, afd, bC, oQ, y, aed, X, BA); #c1(CHEK2) c2(NP_665861) c3(serine/threonine-protein kinase Chk2 isoform b) c4(241856, 241857) c5(241858, 241859, 241860, 241861, 241862, 241863, 241864, 241865, 241866, 241867, 241868, 241869, 241870, 241871, 241872, 241873, 241874, 241875, 241876, 241877) c6( ) c7(atT, T, aC, bB, ci, ip, bv, aE, Qk, ajv, K, aNc, MO, eL, xQ, zQ, aW, aNb, LZ, g, eF, cm, bw, ajj, eM, nF, cj, cX, m, in, dD, ht, n, cd, ft, aMZ, eV, dL, pI, avc, aeU, aq, dB, hk, anZ, hL, tl, aNa, WL, it, AN, B, bL, AS, eR, eX, ew, aA, cz, hy, pd, q, eA, aT, qv, jj, ae, qw, hM, iU, vT, Y, r, auX, eS, en, cl, t, iK, ck, nM, kP, gX, np, dy, rA, bt, HQ, Gl, jh, Gn, eq, ad, av, fb, d, BN, BO, Ub, ff, eH, aF, bz, bF, es, bE, afd, bC, oQ, y, aed, X, BA); #c1(CHEK2) c2(XP_006724179) c3(serine/threonine-protein kinase Chk2 isoform X9) c4(295850) c5( ) c6( ) c7(atT, T, aC, bB, ci, ip, bv, aE, Qk, ajv, K, aNc, MO, eL, xQ, zQ, aW, aNb, LZ, g, eF, cm, bw, ajj, eM, nF, cj, cX, m, in, dD, ht, n, cd, ft, aMZ, eV, dL, pl, avc, aeU, aq, dB, hk, anZ, hL, tl, aNa, WL, it, AN, B, bL, AS, eR, eX, ew, aA, cz, hy, pd, q, eA, aT, qv, jj, ae, qw, hM, iU, vT, Y, r, auX, eS, en, cl, t, iK, ck, nM, kP, gX, np, dy, rA, bt, HQ, Gl, jh, Gn, eq, ad, av, fb, d, BN, BO, Ub, ff, eH, aF, bz, bF, es, bE, afd, bC, oQ, y, aed, X, BA); #c1(CHEK2) c2(XP_011528141) c3(serine/threonine-protein kinase Chk2 isoform X2) c4(323258, 323259) c5(323260, 323261, 323262, 323263, 323264, 323265) c6( ) c7(atT, T, aC, bB, ci, ip, bv, aE, Qk, ajv, K, aNc, MO, eL, xQ, zQ, aW, aNb, LZ, g, eF, cm, bw, ajj, eM, nF, cj, cX, m, in, dD, ht, n, cd, ft, aMZ, eV, dL, pl, avc, aeU, aq, dB, hk, anZ, hL, tl, aNa, WL, it, AN, B, bL, AS, eR, eX, ew, aA, cz, hy, pd, q, eA, aT, qv, jj, ae, qw, hM, iU, vT, Y, r, auX, eS, en, cl, t, iK, ck, nM, kP, gX, np, dy, rA, bt, HQ, Gl, jh, Gn, eq, ad, av, fb, d, BN, BO, Ub, ff, eH, aF, bz, bF, es, bE, afd, bC, oQ, y, aed, X, BA); #c1(CHEK2) c2(XP_011528144) c3(serine/threonine-protein kinase Chk2 isoform X5) c4(323266) c5(323267) c6( ) c7(atT, T, aC, bB, ci, ip, bv, aE, Qk, ajv, K, aNc, MO, eL, xQ, zQ, aW, aNb, LZ, g, eF, cm, bw, ajj, eM, nF, cj, cX, m, in, dD, ht, n, cd, ft, aMZ, eV, dL, pl, avc, aeU, aq, dB, hk, anZ, hL, tl, aNa, WL, it, AN, B, bL, AS, eR, eX, ew, aA, cz, hy, pd, q, eA, aT, qv, jj, ae, qw, hM, iU, vT, Y, r, auX, eS, en, cI, t, iK, ck, nM, kP, gX, np, dy, rA, bt, HQ, Gl, jh, Gn, eq, ad, av, fb, d, BN, BO, Ub, ff, eH, aF, bz, bF, es, bE, afd, bC, oQ, y, aed, X, BA); #c1(CHEK2) c2(XP_011528146) c3(serine/threonine-protein kinase Chk2 isoform X7) c4(323268) c5(323269) c6( ) c7(atT, T, aC, bB, ci, ip, bv, aE, Qk, ajv, K, aNc, MO, eL, xQ, zQ, aW, aNb, LZ, g, eF, cm, bw, ajj, eM, nF, cj, cX, m, in, dD, ht, n, cd, ft, aMZ, eV, dL, pl, avc, aeU, aq, dB, hk, anZ, hL, tl, aNa, WL, it, AN, B, bL, AS, eR, eX, ew, aA, cz, hy, pd, q, eA, aT, qv, jj, ae, qw, hM, iU, vT, Y, r, auX, eS, en, cl, t, iK, ck, nM, kP, gX, np, dy, rA, bt, HQ, Gl, jh, Gn, eq, ad, av, fb, d, BN, BO, Ub, ff, eH, aF, bz, bF, es, bE, afd, bC, oQ, y, aed, X, BA); #c1(CHERP) c2(NP_006378) c3(calcium homeostasis endoplasmic reticulum protein) c4(164491) c5(164492, 164493, 164494, 164495, 164496, 164497, 164498) c6( ) c7(ck, pr, aNd, axd, jj, aNe, acD, kS, aR); #c1(CHFR) c2(NP_001154816) c3(E3 ubiquitin-protein ligase CHFR isoform 1) c4(61108, 61109) c5(61110, 61111, 61112, 61113, 61114, 61115) c6( ) c7(T, if, ht, aA, bB, n, ci, qN, q, av, aT, K, hu, aW, ff, r, aF, en, cl, g, t, apx, bz, eM, bE, Qu, hL, m); #c1(CHFR) c2(NP_001154817) c3(E3 ubiquitin-protein ligase CHFR isoform 2) c4(61116) c5(61117, 61118, 61119, 61120, 61121, 61122) c6( ) c7(T, if, ht, aA, bB, n, ci, qN, q, av, aT, K, hu, aW, ff, r, aF, en, cl, g, t, apx, bz, eM, bE, Qu, hL, m); #c1(CHFR) c2(NP_001154818) c3(E3 ubiquitin-protein ligase CHFR isoform 3) c4(61123, 61124) c5(61125, 61126, 61127, 61128, 61129, 61130, 61131, 61132, 61133, 61134, 61135, 61136) c6( ) c7(T, if, ht, aA, bB, n, ci, qN, q, av, aT, K, hu, aW, ff, r, aF, en, cl, g, t, apx, bz, eM, bE, Qu, hL, m); #c1(CHFR) c2(NP_001154819) c3(E3 ubiquitin-protein ligase CHFR isoform 5) c4(61137) c5(61138, 61139, 61140, 61141, 61142, 61143, 61144, 61145, 61146, 61147, 61148) c6( ) c7(T, if, ht, aA, bB, n, ci, qN, q, av, aT, K, hu, aW, ff, r, aF, en, cl, g, t, apx, bz, eM, bE, Qu, hL, m); #c1(CHFR) c2(NP_060693) c3(E3 ubiquitin-protein ligase CHFR isoform 4) c4(197214) c5(197215, 197216, 197217, 197218, 197219, 197220, 197221) c6( ) c7(T, if, ht, aA, bB, n, ci, qN, q, av, aT, K, hu, aW, ff, r, aF, en, cl, g, t, apx, bz, eM, bE, Qu, hL, m); #c1(CHGA) c2(NP_001288619) c3(chromogranin-A isoform 2 preproprotein) c4(113845, 113846, 113847) c5(113848, 113849, 113850, 113851, 113852, 113853) c6( ) c7(aMK, T, e, l, aiC, ci, aY, aE, pX, SV, K, eL, azh, yo, aW, Lm, g, Im, cm, qJ, eM, Ji, iS, QF, Zo, gU, IT, n, aj, cd, ft, aNj, dL, dx, ajV, A, sq, AQ, ahJ, fe, aMH, aMJ, YE, bP, bo, tl, aez, hR, MW, anx, Pr, AN, hL, AS, eR, uv, cz, tc, v, Eh, J, aew, nv, aT, ae, af, gk, jf, iF, bf, s, aMG, aNi, en, dS, aJU, c, aNh, nG, HK, ht, VB, gV, axd, aNk, jh, aNf, Fb, ad, av, Db, ji, fb, nJ, Yi, WZ, hG, ff, dq, aF, S, Pd, Hl, bz, qa, Ew, AR, sG, aNg, be, ei, y); #c1(CHGA) c2(XP_011544942) c3(chromogranin-A isoform X1) c4(343908, 343909, 343910, 343911, 343912) c5(343913, 343914, 343915, 343916, 343917, 343918, 343919, 343920) c6( ) c7(aMK, T, e, l, aiC, ci, aY, aE, pX, SV, K, eL, azh, yo, aW, Lm, g, Im, cm, qJ, eM, Ji, iS, QF, Zo, gU, IT, n, aj, cd, ft, aNj, dL, dx, ajV, A, sq, AQ, ahJ, fe, aMH, aMJ, YE, bP, bo, tl, aez, hR, MW, anx, Pr, AN, hL, AS, eR, uv, cz, tc, v, Eh, J, aew, nv, aT, ae, af, gk, jf, iF, bf, s, aMG, aNi, en, dS, aJU, c, aNh, nG, HK, ht, VB, gV, axd, aNk, jh, aNf, Fb, ad, av, Ob, ji, fb, nJ, Yi, WZ, hG, ff, dq, aF, S, Pd, Hl, bz, qa, Ew, AR, sG, aNg, be, ei, y); #c1(CHGB) c2(NP_001810) c3(secretogranin-1 precursor) c4(121334, 121335) c5(121336, 121337, 121338, 121339, 121340, 121341, 121342, 121343, 121344, 121345, 121346, 121347) c6( ) c7(T, yo, CN, c, MD, aW, e, cj, aT, cz, hR, kp, hu, cm, ht, af, dS); #c1(CHI3L1) c2(XP_011507410) c3(chitinase-3-like protein 1 isoform X4) c4(297321) c5(297322, 297323, 297324, 297325, 297326, 297327) c6( ) c7(bM, T, ea, e, al, bB, ci, bh, aY, aE, Ma, rw, M, K, aa, aW, az, hl, zC, g, as, Zn, m, hh, aNm, dD, aw, qy, n, aNl, pM, ai, Oe, ft, zw, sp, zb, fe, vU, W, dB, at, eo, B, bL, jx, cz, v, j, C, V, q, eA, aT, cy, yb, r, en, t, wg, ac, wR, cS, ao, aDj, eq, ad, iC, av, F, yt, ji, IQ, uQ, d, cH, vj, ff, cr, iV, bz, LB, gk, bE, z, aS, y); #c1(CHIC1) c2(NP_001034929) c3(cysteine-rich hydrophobic domain-containing protein 1 isoform 1) c4(32390) c5(32391, 32392, 32393, 32394, 32395, 32396) c6( ) c7(t, m); #c1(CHIC1) c2(NP_001287813) c3(cysteine-rich hydrophobic domain-containing protein 1 isoform 2) c4(112917) c5(112918, 112919, 112920, 112921, 112922, 112923) c6( ) c7(t, m); #c1(CHIC2) c2(NP_036242) c3(cysteine-rich hydrophobic domain-containing protein 2) c4(172595) c5(172596, 172597, 172598, 172599, 172600, 172601) c6( ) c7(Nq, ck, Nr, Xm, ht, yR); #c1(CHIT1) c2(NP_001243054) c3(chitotriosidase-1 isoform 2 precursor) c4(89683) c5(89684, 89685, 89686, 89687, 89688, 89689, 89690, 89691) c6(89692, 89693) c7(oO, bM, G, EM, dD, fR, Ju, cz, cL, aj, j, eq, C, pM, J, ad, dV, aT, aNp, aAt, uQ, aNo, aW, mQ, aFd, vU, z, cG, at, wR, pw, aNn, bt); #c1(CHIT1) c2(NP_003456) c3(chitotriosidase-1 isoform 1 precursor) c4(138446) c5(138447, 138448, 138449, 138450, 138451, 138452, 138453, 138454) c6(138455, 138456) c7(oO, bM, G, EM, dD, fR, Ju, cz, cL, aj, j, eq, C, pM, J, ad, dV, aT, aNp, aAt, uQ, aNo, aW, mQ, aFd, vU, z, cG, at, wR, pw, aNn, bt); #c1(CHKA) c2(NP_997634) c3(choline kinase alpha isoform b) c4(265617) c5(265618, 265619, 265620, 265621, 265622, 265623) c6( ) c7(T, jh, bB, q, eA, ad, Na, aE, aT, h, Nc, K, ae, B, aW, aNq, r, cm, t, bz, eM, Ip, bE, PV, m, X); #c1(CHKB) c2(NP_005189) c3(choline/ethanolamine kinase) c4(153780) c5(153781, 153782, 153783, 153784, 153785, 153786) c6( ) c7(ck, cF, eM, yY, xs, aaN, aNr, oY, X, alY); #c1(CHL1) c2(NP_001240317) c3(neural cell adhesion molecule L1-like protein isoform 3 precursor) c4(88602, 88603, 88604) c5(88605, 88606, 88607, 88608, 88609, 88610) c6( ) c7(T, ul, FG, aio, if, Kk, jh, fd, bB, ci, nA, qN, eA, er, ft, hd, cc, nv, K, Xh, aBl, Yi, s, Y, g, Fu, f, cm, bz, bN, avK, iP, es, iA, iT, bE, Qu, II, m, Xu, adg, gT, bt, xg); #c1(CHL1) c2(XP_006713003) c3(neural cell adhesion molecule L1-like protein isoform X1) c4(286953, 286954, 286955) c5(286956, 286957, 286958, 286959, 286960, 286961) c6( ) c7(T, ul, FG, aio, if, Kk, jh, fd, bB, ci, nA, qN, eA, er, ft, hd, cc, nv, K, Xh, aBl, Yi, s, Y, g, Fu, f, cm, bz, bN, avK, iP, es, iA, iT, bE, Qu, II, m, Xu, adg, gT, bt, xg); #c1(CHL1) c2(XP_011531597) c3(neural cell adhesion molecule L1-like protein isoform X2) c4(327713) c5(327714, 327715, 327716, 327717, 327718, 327719) c6( ) c7(T, ul, FG, aio, if, Kk, jh, fd, bB, ci, nA, qN, eA, er, ft, hd, cc, nv, K, Xh, aBl, Yi, s, Y, g, Fu, f, cm, bz, bN, avK, iP, es, iA, iT, bE, Qu, II, m, Xu, adg, gT, bt, xg); #c1(CHL1) c2(XP_011531599) c3(neural cell adhesion molecule L1-like protein isoform X4) c4( ) c5(327720, 327721, 327722, 327723, 327724, 327725, 327726, 327727, 327728, 327729, 327730, 327731, 327732, 327733, 327734, 327735, 327736, 327737, 327738, 327739, 327740, 327741, 327742, 327743) c6( ) c7(T, ul, FG, aio, if, Kk, jh, fd, bB, ci, nA, qN, eA, er, ft, hd, cc, nv, K, Xh, aBl, Yi, s, Y, g, Fu, f, cm, bz, bN, avK, iP, es, iA, iT, bE, Qu, II, m, Xu, adg, gT, bt, xg); #c1(CHM) c2(NP_000381) c3(rab proteins geranylgeranyltransferase component A 1 isoform a) c4(8328, 8329) c5(8330, 8331, 8332, 8333, 8334, 8335) c6( ) c7(yY, ahX, Gd, bS, ct, eW, q, Gt, an, bA, hZ, AT, xX, IR, eH, r, eF, Z, cm, nC, W, IF, nw, oQ); #c1(CHM) c2(NP_001138886) c3(rab proteins geranylgeranyltransferase component A 1 isoform b) c4(58079) c5(58080, 58081, 58082, 58083, 58084, 58085) c6( ) c7(yY, ahX, Gd, bS, ct, eW, q, Gt, an, bA, hZ, AT, xX, IR, eH, r, eF, Z, cm, nC, W, IF, nw, oQ); #c1(CHM) c2(XP_006724678) c3(rab proteins geranylgeranyltransferase component A 1 isoform X1) c4( ) c5(296250) c6( ) c7(yY, ahX, Gd, bS, ct, eW, q, Gt, an, bA, hZ, AT, xX, IR, eH, r, eF, Z, cm, nC, W, IF, nw, oQ); #c1(CHM) c2(XP_011529141) c3(rab proteins geranylgeranyltransferase component A 1 isoform X2) c4( ) c5(324488, 324489, 324490, 324491, 324492) c6( ) c7(yY, ahX, Gd, bS, ct, eW, q, Gt, an, bA, hZ, AT, xX, IR, eH, r, eF, Z, cm, nC, W, IF, nw, oQ); #c1(CHML) c2(NP_001812) c3(rab proteins geranylgeranyltransferase component A 2) c4(121348) c5(121349, 121350, 121351, 121352, 121353, 121354) c6( ) c7(AT, bM, z, dc, FQ, nw, oc, V); #c1(CHMP1A) c2(NP_001076783) c3(charged multivesicular body protein 1a isoform 1) c4( ) c5(37541, 37542, 37543, 37544, 37545, 37546) c6( ) c7(es, T, aNs, os, aC, UR, oZ, fr, QK); #c1(CHMP1A) c2(NP_002759) c3(charged multivesicular body protein 1a isoform 2) c4(131758) c5(131759, 131760, 131761, 131762, 131763) c6( ) c7(es, T, aNs, os, aC, UR, oZ, fr, QK); #c1(CHMP1A) c2(XP_011521400) c3(charged multivesicular body protein 1a isoform X2) c4( ) c5(316212, 316213) c6( ) c7(es, T, aNs, os, aC, UR, oZ, fr, QK); #c1(CHMP1A) c2(XP_011521401) c3(charged multivesicular body protein 1a isoform X3) c4(316214) c5(316215) c6( ) c7(es, T, aNs, os, aC, UR, oZ, fr, QK); #c1(CHMP1B) c2(NP_065145) c3(charged multivesicular body protein 1b) c4(204255) c5(204256, 204257, 204258, 204259, 204260, 204261) c6( ) c7(awG, qx, oj, bw, EH, bK, fu, fr, awL, kC); #c1(CHMP2B) c2(NP_001231573) c3(charged multivesicular body protein 2b isoform 2) c4( ) c5(87307, 87308, 87309, 87310, 87311, 87312) c6( ) c7(OI, ci, PJ, Rc, yw, WY, oW, yu, cy, ey, af, eu, aNu, aaE, cm, BU, bb, ac, c, aNv, wO, U, aNt); #c1(CHMP2B) c2(NP_054762) c3(charged multivesicular body protein 2b isoform 1) c4(177632) c5(177633, 177634, 177635, 177636, 177637, 177638) c6( ) c7(OI, ci, PJ, Rc, yw, WY, oW, yu, cy, ey, af, eu, aNu, aaE, cm, BU, bb, ac, c, aNv, wO, U, aNt); #c1(CHMP2B) c2(XP_011531878) c3(charged multivesicular body protein 2b isoform X1) c4(327930) c5( ) c6( ) c7(OI, ci, PJ, Rc, yw, WY, oW, yu, cy, ey, af, eu, aNu, aaE, cm, BU, bb, ac, c, aNv, wO, U, aNt); #c1(CHMP3) c2(NP_001005753) c3(charged multivesicular body protein 3 isoform 2) c4( ) c5(22044, 22045, 22046, 22047, 22048) c6( ) c7(av, h, f, ae, eW, ad); #c1(CHMP3) c2(NP_001180446) c3(charged multivesicular body protein 3 isoform 3) c4(74096) c5(74097, 74098, 74099, 74100, 74101, 74102) c6( ) c7(av, h, f, ae, eW, ad); #c1(CHMP3) c2(NP_057163) c3(charged multivesicular body protein 3 isoform 1) c4(189231) c5(189232, 189233, 189234, 189235, 189236, 189237, 189238, 189239) c6( ) c7(av, h, f, ae, eW, ad); #c1(CHMP4A) c2(NP_054888) c3(charged multivesicular body protein 4a) c4(178213) c5(178214, 178215, 178216, 178217, 178218, 178219) c6( ) c7(h, RB); #c1(CHMP4B) c2(NP_789782) c3(charged multivesicular body protein 4b) c4(252280) c5(252281, 252282, 252283, 252284, 252285, 252286) c6( ) c7(h, RB, aNw); #c1(CHMP4C) c2(NP_689497) c3(charged multivesicular body protein 4c) c4(242940) c5(242941, 242942, 242943, 242944, 242945, 242946) c6( ) c7(t, m); #c1(CHMP5) c2(NP_001182465) c3(charged multivesicular body protein 5 isoform 2) c4(74954) c5(74955, 74956, 74957, 74958, 74959, 74960) c6( ) c7(ck, hF, bt); #c1(CHMP5) c2(NP_057494) c3(charged multivesicular body protein 5 isoform 1) c4(191178) c5(191179, 191180, 191181, 191182, 191183, 191184) c6( ) c7(ck, hF, bt); #c1(CHN1) c2(NP_001020372) c3(N-chimaerin isoform 2) c4(28678) c5(28679, 28680, 28681, 28682, 28683, 28684) c6( ) c7(aNx, aNA, dt, aNz, kh, QG, Nk, arH, aHA, aNy, cm); #c1(CHN1) c2(NP_001193531) c3(N-chimaerin isoform 3) c4(82246) c5(82247, 82248, 82249, 82250, 82251, 82252) c6( ) c7(aNx, aNA, dt, aNz, kh, QG, Nk, arH, aHA, aNy, cm); #c1(CHN1) c2(NP_001813) c3(N-chimaerin isoform 1) c4(121355) c5(121356, 121357, 121358, 121359, 121360, 121361) c6( ) c7(aNx, aNA, dt, aNz, kh, QG, Nk, arH, aHA, aNy, cm); #c1(CHN2) c2(NP_001035025) c3(beta-chimaerin isoform 1) c4(32437) c5(32438, 32439, 32440, 32441, 32442, 32443, 32444, 32445, 32446, 32447, 32448, 32449) c6( ) c7(bL, bM, T, aaF, dA, Y, vy, aT, aq, cm); #c1(CHN2) c2(NP_001279998) c3(beta-chimaerin isoform 3) c4(111187) c5(111188, 111189, 111190, 111191, 111192, 111193) c6( ) c7(bL, bM, T, aaF, dA, Y, vy, aT, aq, cm); #c1(CHN2) c2(NP_001279999) c3(beta- chimaerin isoform 4) c4(111194, 111195) c5(111196, 111197, 111198, 111199, 111200, 111201) c6( ) c7(bL, bM, T, aaF, dA, Y, vy, aT, aq, cm); #c1(CHN2) c2(NP_001280001) c3(beta-chimaerin isoform 6) c4( ) c5(111203, 111204, 111205, 111206, 111207) c6( ) c7(bL, bM, T, aaF, dA, Y, vy, aT, aq, cm); #c1(CHN2) c2(NP_001280002) c3(beta-chimaerin isoform 7) c4(111208, 111209) c5(111210, 111211, 111212, 111213, 111214, 111215) c6( ) c7(bL, bM, T, aaF, dA, Y, vy, aT, aq, cm); #c1(CHN2) c2(NP_001280005) c3(beta-chimaerin isoform 9) c4(111216) c5(111217, 111218, 111219, 111220, 111221, 111222) c6( ) c7(bL, bM, T, aaF, dA, Y, vy, aT, aq, cm); #c1(CHN2) c2(NP_001280009) c3(beta-chimaerin isoform 13) c4(111223) c5(111224, 111225, 111226, 111227, 111228, 111229) c6( ) c7(bL, bM, T, aaF, dA, Y, vy, aT, aq, cm); #c1(CHN2) c2(NP_001280010) c3(beta-chimaerin isoform 14) c4( ) c5(111230, 111231, 111232, 111233, 111234, 111235) c6( ) c7(bL, bM, T, aaF, dA, Y, vy, aT, aq, cm); #c1(CHN2) c2(NP_004058) c3(beta-chimaerin isoform 2) c4(143206) c5(143207) c6( ) c7(bL, bM, T, aaF, dA, Y, vy, aT, aq, cm); #c1(CHN2) c2(XP_011513408) c3(beta-chimaerin isoform X3) c4( ) c5(305639, 305640, 305641, 305642, 305643, 305644) c6( ) c7(bL, bM, T, aaF, dA, Y, vy, aT, aq, cm); #c1(CHN2) c2(XP_011513409) c3(beta-chimaerin isoform X4) c4(305645) c5(305646, 305647, 305648, 305649, 305650, 305651) c6( ) c7(bL, bM, T, aaF, dA, Y, vy, aT, aq, cm); #c1(CHN2) c2(XP_011513411) c3(beta-chimaerin isoform X6) c4(305652) c5( ) c6( ) c7(bL, bM, T, aaF, dA, Y, vy, aT, aq, cm); #c1(CHODL) c2(NP_001191103) c3(chondrolectin isoform b) c4(81001) c5(81002, 81003, 81004, 81005, 81006, 81007, 81008, 81009) c6( ) c7(kf, T, bz, eM); #c1(CHODL) c2(NP_001191104) c3(chondrolectin isoform c) c4(81010) c5(81011, 81012, 81013, 81014, 81015, 81016, 81017, 81018, 81019, 81020, 81021, 81022, 81023, 81024, 81025, 81026, 81027, 81028, 81029) c6( ) c7(kf, T, bz, eM); #c1(CHODL) c2(NP_001191107) c3(chondrolectin isoform d) c4( ) c5(81030, 81031, 81032, 81033, 81034, 81035, 81036, 81037, 81038, 81039, 81040) c6( ) c7(kf, T, bz, eM); #c1(CHODL) c2(NP_079220) c3(chondrolectin isoform a precursor) c4(217488, 217489) c5(217490, 217491, 217492, 217493, 217494, 217495, 217496) c6( ) c7(kf, T, bz, eM); #c1(CHODL) c2(XP_011527755) c3(chondrolectin isoform X3) c4(322742) c5(322743) c6( ) c7(kf, T, bz, eM); #c1(CHODL) c2(XP_011527756) c3(chondrolectin isoform X4) c4( ) c5(322744, 322745, 322746, 322747) c6( ) c7(kf, T, bz, eM); #c1(CHORDC1) c2(NP_001137545) c3(cysteine and histidine-rich domain-containing protein 1 isoform b) c4(56021) c5(56022, 56023, 56024, 56025, 56026, 56027) c6( ) c7(ac, oe, j, an, fq, af); #c1(CHORDC1) c2(NP_036256) c3(cysteine and histidine-rich domain-containing protein 1 isoform a) c4(172669) c5(172670, 172671, 172672, 172673, 172674, 172675) c6( ) c7(ac, oe, j, an, fg, af); #c1(CHP1) c2(NP_009167) c3(calcineurin B homologous protein 1) c4(171228) c5(171229, 171230, 171231, 171232, 171233, 171234) c6( ) c7(T, ya, if, iW, jh, qN, hX, DK, nv, ds, jZ, dV, kH, h, SH, Ou, an, he, CB, je, aHW, Pg, Io, kk, cm, ck, sk, iM, iQ, aNB, cA, bE, NL, aEG, XO, zv, aEN, B, EB); #c1(CHP2) c2(NP_071380) c3(calcineurin B homologous protein 2) c4(211278) c5(211279, 211280, 211281, 211282, 211283, 211284) c6( ) c7(t, ci, T, m); #c1(CHPF) c2(NP_078812) c3(chondroitin sulfate synthase 2 isoform 1) c4(215594, 215595) c5(215596, 215597, 215598, 215599, 215600, 215601, 215602, 215603, 215604, 215605, 215606, 215607) c6( ) c7(B); #c1(CHPT1) c2(NP_064629) c3(cholinephosphotransferase 1) c4(203375, 203376) c5(203377, 203378, 203379, 203380, 203381, 203382, 203383, 203384, 203385, 203386, 203387, 203388) c6( ) c7(gV, T, dA, eP, aNE, aA, fF, n, ti, KO, v, ci, bB, aNG, aNH, fr, q, ad, eA, eW, bv, co, ft, Do, nv, gd, aT, K, aNC, jf, je, iU, hG, aNI, aW, Y, eH, fc, r, gl, dq, aq, aF, en, g, eF, jT, aNE, t, bz, ir, cm, iR, ck, jb, bw, iM, agc, auo, eM, dB, bE, iA, iT, aND, mx, bo, aNJ, m, kS, X); #c1(CHRAC1) c2(NP_059140) c3(chromatin accessibility complex protein 1) c4(193255) c5(193256, 193257, 193258, 193259, 193260, 193261) c6( ) c7(aW, aT); #c1(CHRD) c2(NP_001291401) c3(chordin isoform 2 precursor) c4(115883) c5(115884, 115885, 115886, 115887, 115888, 115889) c6( ) c7(T, agd, w, RX, Kk, Az, aNL, m, t, agY, ZW, B, aNK); #c1(CHRD) c2(NP_003732) c3(chordin isoform 1 precursor) c4(140504, 140505) c5(140506, 140507, 140508, 140509, 140510, 140511, 140512, 140513, 140514, 140515, 140516, 140517) c6( ) c7(T, agd, w, RX, Kk, Az, aNL, m, t, agY, ZW, B, aNK); #c1(CHRD) c2(XP_011511556) c3(chordin isoform X2) c4(302263) c5(302264, 302265, 302266, 302267, 302268, 302269) c6( ) c7(T, agd, w, RX, Kk, Az, aNL, m, t, agY, ZW, B, aNK); #c1(CHRD) c2(XP_011511557) c3(chordin isoform X3) c4(302270) c5(302271, 302272, 302273, 302274, 302275, 302276) c6( ) c7(T, agd, w, RX, Kk, Az, aNL, m, t, agY, ZW, B, aNK); #c1(CHRD) c2(XP_011511558) c3(chordin isoform X1) c4( ) c5(302277) c6( ) c7(T, agd, w, RX, Kk, Az, aNL, m, t, agY, ZW, B, aNK); #c1(CHRDL1) c2(NP_001137455) c3(chordin-like protein 1 isoform 4 precursor) c4(55785, 55786) c5(55787, 55788, 55789, 55790, 55791, 55792, 55793, 55794, 55795, 55796, 55797, 55798) c6( ) c7(d, aNM, h, cy, j, zL); #c1(CHRDL1) c2(NP_660277) c3(chordin-like protein 1 isoform 3 precursor) c4(240600, 240601) c5(240602, 240603, 240604, 240605, 240606, 240607, 240608, 240609, 240610, 240611, 240612, 240613, 240614, 240615, 240616, 240617) c6( ) c7(d, aNM, h, cy, j, zL); #c1(CHRDL1) c2(XP_005262278) c3(chordin-like protein 1 isoform X1) c4(277807) c5(277808, 277809, 277810, 277811, 277812, 277813) c6( ) c7(d, aNM, h, cy, j, zL); #c1(CHRDL1) c2(XP_005262279) c3(chordin-like protein 1 isoform X2) c4(277814) c5(277815, 277816, 277817, 277818, 277819, 277820) c6( ) c7(d, aNM, h, cy, j, zL); #c1(CHRFAM7A) c2(XP_011520455) c3(CHRNA7-FAM7A fusion protein isoform X3) c4(315349) c5(315350, 315351, 315352, 315353, 315354, 315355, 315356, 315357, 315358, 315359, 315360, 315361) c6( ) c7(ha, VT, aNN, ti, iD, nA, rc, agd, ib, sO, XY, bK, K, rz, af, ak, gl, aga, wA, jb, akq, bN, Cq, bb, aNO, xg); #c1(CHRFAM7A) c2(XP_011520456) c3(CHRNA7-FAM7A fusion protein isoform X1) c4( ) c5(315362, 315363, 315364, 315365, 315366, 315367, 315368, 315369, 315370, 315371, 315372) c6( ) c7(ha, VT, aNN, ti, iD, nA, rc, agd, ib, sO, XY, bK, K, rz, af, ak, gl, aga, wA, jb, akq, bN, Cq, bb, aNO, xg); #c1(CHRM1) c2(XP_011543044) c3(muscarinic acetylcholine receptor M1 isoform X1) c4(341826, 341827, 341828) c5(341829, 341830, 341831, 341832, 341833, 341834, 341835, 341836, 341837, 341838, 341839, 341840, 341841, 341842, 341843, 341844, 341845, 341846, 341847) c6( ) c7(bM, ot, Dy, ac, DK, HP, af, ha, Be, aNP, aNQ, X, eu); #c1(CHRM2) c2(XP_011514073) c3(muscarinic acetylcholine receptor M2 isoform X1) c4(306619) c5(306620, 306621, 306622, 306623, 306624, 306625, 306626, 306627, 306628, 306629, 306630, 306631, 306632, 306633, 306634, 306635, 306636, 306637, 306638, 306639, 306640, 306641, 306642, 306643, 306644, 306645) c6( ) c7(bM, mr, aw, ha, bO, bS, ct, V, uT, XY, bK, bq, he, af, hm, KG, A, anR, Z, FT, aaS, cA, Gs, Ug, Be, mx, gZ, vL, IB); #c1(CHRM3) c2(NP_000731) c3(muscarinic acetylcholine receptor M3) c4(15010, 15011) c5(15012, 15013, 15014, 15015, 15016, 15017, 15018, 15019, 15020, 15021, 15022, 15023, 15024) c6( ) c7(bL, bM, Bl, ha, aI, fN, cz, bB, bO, aj, dG, v, V, q, J, bK, aNR, yi, sp, Y, r, jb, bP, cA, bE, Be, gZ, at, sv, X); #c1(CHRM4) c2(NP_000732) c3(muscarinic acetylcholine receptor M4) c4(15025) c5(15026, 15027, 15028, 15029, 15030, 15031) c6( ) c7(aNN, he, cd); #c1(CHRM5) c2(XP_005254198) c3(muscarinic acetylcholine receptor M5 isoform X1) c4(273052, 273053) c5(273054, 273055, 273056, 273057, 273058, 273059, 273060, 273061, 273062, 273063, 273064, 273065, 273066, 273067, 273068, 273069) c6( ) c7(bP, cu, ac); #c1(CHRNA1) c2(NP_000070) c3(acetylcholine receptor subunit alpha isoform b precursor) c4(1197) c5(1198, 1199, 1200, 1201, 1202, 1203) c6( ) c7(hM, xA, e, aFY, XY, aNS, at, aNU, aNT, xl, pd, bz); #c1(CHRNA1) c2(NP_001034612) c3(acetylcholine receptor subunit alpha isoform a precursor) c4(31911) c5(31912, 31913, 31914, 31915, 31916, 31917) c6( ) c7(hM, xA, e, aFY, XY, aNS, at, aNU, aNT, xl, pd, bz); #c1(CHRNA10) c2(NP_065135) c3(neuronal acetylcholine receptor subunit alpha-10 isoform a precursor) c4(204128) c5(204129, 204130, 204131, 204132, 204133, 204134) c6( ) c7(XY); #c1(CHRNA2) c2(NP_000733) c3(neuronal acetylcholine receptor subunit alpha-2 isoform 1 precursor) c4(15032) c5(15033, 15034, 15035, 15036, 15037, 15038, 15039, 15040, 15041, 15042) c6( ) c7(XY, ha, uJ, v, bK, aNV, oi, IB, aNX, aNW, FT, hq); #c1(CHRNA3) c2(NP_000734) c3(neuronal acetylcholine receptor subunit alpha-3 isoform 1 precursor) c4(15043) c5(15044, 15045, 15046, 15047, 15048, 15049, 15050, 15051, 15052, 15053) c6( ) c7(T, EM, am, VR, aqh, OI, aA, v, VV, av, XY, aNU, dL, gl, aNZ, af, N, ap, cu, aF, g, f, jb, bz, aNY, eM, Qu, PV, at, Iw, IB, iu); #c1(CHRNA3) c2(NP_001160166) c3(neuronal acetylcholine receptor subunit alpha-3 isoform 2 precursor) c4(65174) c5(65175, 65176, 65177, 65178, 65179, 65180) c6( ) c7(T, EM, am, VR, aqh, OI, aA, v, VV, av, XY, aNU, dL, gl, aNZ, af, N, ap, cu, aF, g, f, jb, bz, aNY, eM, Qu, PV, at, Iw, IB, iu); #c1(CHRNA3) c2(XP_006720445) c3(neuronal acetylcholine receptor subunit alpha-3 isoform X2) c4( ) c5(293511, 293512, 293513, 293514, 293515, 293516) c6( ) c7(T, EM, am, VR, aqh, OI, aA, v, VV, av, XY, aNU, dL, gl, aNZ, af, N, ap, cu, aF, g, f, jb, bz, aNY, eM, Qu, PV, at, Iw, IB, iu); #c1(CHRNA3) c2(XP_011519475) c3(neuronal acetylcholine receptor subunit alpha-3 isoform X1) c4(314144) c5( ) c6( ) c7(T, EM, am, VR, aqh, OI, aA, v, VV, av, XY, aNU, dL, gl, aNZ, af, N, ap, cu, aF, g, f, jb, bz, aNY, eM, Qu, PV, at, Iw, IB, iu); #c1(CHRNA4) c2(NP_000735) c3(neuronal acetylcholine receptor subunit alpha-4 isoform 1 precursor) c4(15054, 15055) c5(15056, 15057, 15058, 15059, 15060, 15061, 15062) c6( ) c7(bL, T, FW, aqh, OI, ha, cV, aA, bB, Ir, aj, bS, Vd, ct, Jd, arN, iD, ww, cd, J, aR, ft, no, sO, Gb, aT, aU, h, aNU, dL, gl, hq, an, he, eL, xa, af, ak, hM, bO, aOb, agT, Gv, ff, aOa, aF, gu, en, g, Z, aOd, f, bz, eE, akq, bN, hq, pH, Cq, ok, xA, eM, bE, Qu, xj, aNX, aOc, at, sv, avI, EZ, xg, aNW, L); #c1(CHRNA4) c2(NP_001243502) c3(neuronal acetylcholine receptor subunit alpha-4 isoform 2) c4( ) c5(90972) c6( ) c7(bL, T, FW, aqh, OI, ha, cV, aA, bB, Ir, aj, bS, Vd, ct, Jd, arN, iD, ww, cd, J, aR, ft, no, sO, Gb, aT, aU, h, aNU, dL, gl, hq, an, he, eL, xa, af, ak, hM, bO, aOb, agT, Gv, ff, aOa, aF, gu, en, g, Z, aOd, f, bz, eE, akq, bN, hq, pH, Cq, ok, xA, eM, bE, Qu, xj, aNX, aOc, at, sv, avI, EZ, xg, aNW, L); #c1(CHRNA4) c2(XP_011526826) c3(neuronal acetylcholine receptor subunit alpha-4 isoform X1) c4(321162) c5(321163, 321164, 321165, 321166, 321167, 321168, 321169, 321170, 321171, 321172, 321173, 321174) c6( ) c7(bL, T, FW, aqh, OI, ha, cV, aA, bB, Ir, aj, bS, Vd, ct, Jd, arN, iD, ww, cd, J, aR, ft, no, sO, Gb, aT, aU, h, aNU, dL, gl, hq, an, he, eL, xa, af, ak, hM, bO, aOb, agT, Gv, ff, aOa, aF, gu, en, g, Z, aOd, f, bz, eE, akq, bN, hq, pH, Cq, ok, xA, eM, bE, Qu, xj, aNX, aOc, at, sv, avI, EZ, xg, aNW, L); #c1(CHRNA5) c2(NP_000736) c3(neuronal acetylcholine receptor subunit alpha-5 precursor) c4(15063) c5(15064, 15065, 15066, 15067, 15068, 15069) c6( ) c7(T, VR, aqh, Gd, v, ci, VV, av, cF, alO, aNU, Jc, Gv, ff, cu, en, g, jb, bz, hq, pH, aNY, at, IB, it, iu); #c1(CHRNA6) c2(NP_001186208) c3(neuronal acetylcholine receptor subunit alpha-6 isoform 2 precursor) c4(77421) c5(77422, 77423, 77424, 77425, 77426, 77427) c6( ) c7(av, FW, aqh, XY, Gb, aNU, cd); #c1(CHRNA6) c2(NP_004189) c3(neuronal acetylcholine receptor subunit alpha-6 isoform 1 precursor) c4(144234) c5(144235, 144236, 144237, 144238, 144239, 144240) c6( ) c7(av, FW, aqh, XY, Gb, aNU, cd); #c1(CHRNA7) c2(NP_000737) c3(neuronal acetylcholine receptor subunit alpha-7 isoform 1 precursor) c4(15070, 15071, 15072) c5(15073, 15074, 15075, 15076, 15077, 15078) c6( ) c7(ha, VT, aNN, ti, iD, ci, nA, rc, av, agd, ot, yt, sO, HC, aaw, bK, K, hq, rz, af, na, Bp, ak, axu, Gv, gl, aga, Lk, Ll, aOe, EZ, wA, f, uC, cm, jb, akq, bN, Cq, aNO, xg, X); #c1(CHRNA7) c2(NP_001177384) c3(neuronal acetylcholine receptor subunit alpha-7 isoform 2 precursor) c4(72727) c5(72728, 72729, 72730, 72731, 72732, 72733) c6( ) c7(ha, VT, aNN, ti, iD, ci, nA, rc, av, agd, ot, yt, sO, HC, aaw, bK, K, hg, rz, af, na, Bp, ak, axu, Gv, gl, aga, Lk, Ll, aOe, EZ, wA, f, uC, cm, jb, akq, bN, Cq, aNO, xg, X); #c1(CHRNA7) c2(XP_011545684) c3(neuronal acetylcholine receptor subunit alpha-7 isoform X1) c4(344599) c5(344600, 344601, 344602, 344603, 344604, 344605) c6( ) c7(ha, VT, aNN, ti, iD, ci, nA, rc, av, agd, ot, yt, sO, HC, aaw, bK, K, hg, rz, af, na, Bp, ak, axu, Gv, gl, aga, Lk, Ll, aOe, EZ, wA, f, uC, cm, jb, akq, bN, Cq, aNO, xg, X); #c1(CHRNA7) c2(XP_011545686) c3(neuronal acetylcholine receptor subunit alpha-7 isoform X3) c4( ) c5(344606) c6( ) c7(ha, VT, aNN, ti, iD, ci, nA, rc, av, agd, ot, yt, sO, HC, aaw, bK, K, hq, rz, af, na, Bp, ak, axu, Gv, gl, aga, Lk, Ll, aOe, EZ, wA, f, uC, cm, jb, akq, bN, Cq, aNO, xg, X); #c1(CHRNA7) c2(XP_011545688) c3(neuronal acetylcholine receptor subunit alpha-7 isoform X4) c4( ) c5(344607, 344608, 344609, 344610, 344611, 344612) c6( ) c7(ha, VT, aNN, ti, iD, ci, nA, rc, av, agd, ot, yt, sO, HC, aaw, bK, K, hq, rz, af, na, Bp, ak, axu, Gv, gl, aga, Lk, Ll, aOe, EZ, wA, f, uC, cm, jb, akq, bN, Cq, aNO, xg, X); #c1(CHRNB1) c2(NP_000738) c3(acetylcholine receptor subunit beta precursor) c4(15079, 15080) c5(15081, 15082, 15083, 15084, 15085, 15086, 15087, 15088, 15089, 15090, 15091, 15092) c6( ) c7(aNT, aOf, aFY, hM, XY); #c1(CHRNB2) c2(NP_000739) c3(neuronal acetylcholine receptor subunit beta-2 precursor) c4(15093) c5(15094, 15095, 15096, 15097, 15098, 15099) c6( ) c7(cw, gD, cF, aOg, af, XY, ha, HC, sv, avI, EZ, f, cM, aNX, xa, aNW, bN, hq); #c1(CHRNB3) c2(NP_000740) c3(neuronal acetylcholine receptor subunit beta-3 precursor) c4(15100) c5(15101, 15102, 15103, 15104, 15105, 15106) c6( ) c7(av, Cq, aqh, oe, XY, aNU, W); #c1(CHRNB4) c2(NP_000741) c3(neuronal acetylcholine receptor subunit beta-4 isoform 1 precursor) c4(15107) c5(15108, 15109, 15110, 15111, 15112, 15113) c6( ) c7(av, OI, XY, at, aNU, cu, bS, ct, Rm, v, Z, IB, bz, iu); #c1(CHRNB4) c2(NP_001243496) c3(neuronal acetylcholine receptor subunit beta-4 isoform 2 precursor) c4(90942) c5(90943, 90944, 90945, 90946, 90947, 90948) c6( ) c7(av, OI, XY, at, aNU, cu, bS, ct, Rm, v, Z, IB, bz, iu); #c1(CHRND) c2(NP_000742) c3(acetylcholine receptor subunit delta isoform 1 precursor) c4(15114, 15115) c5(15116, 15117, 15118, 15119, 15120, 15121, 15122, 15123, 15124, 15125, 15126, 15127, 15128, 15129, 15130, 15131) c6( ) c7(xA, hM, e, aFY, XY, aNS, aNT); #c1(CHRND) c2(NP_001243586) c3(acetylcholine receptor subunit delta isoform 2 precursor) c4(91100) c5(91101, 91102, 91103, 91104, 91105, 91106) c6( ) c7(xA, hM, e, aFY, XY, aNS, aNT); #c1(CHRNE) c2(NP_000071) c3(acetylcholine receptor subunit epsilon precursor) c4(1204) c5(1205, 1206, 1207, 1208, 1209, 1210) c6( ) c7(hM, aOf, xA, aOh, Dq, aFY, pd, aNS, aNT, xl, XM); #c1(CHRNG) c2(NP_005190) c3(acetylcholine receptor subunit gamma precursor) c4(153787) c5(153788, 153789, 153790, 153791, 153792, 153793, 153794, 153795, 153796, 153797) c6( ) c7(bv, xA, aOi, e, XY, aDx, Vj); #c1(CHST1) c2(NP_003645) c3(carbohydrate sulfotransferase 1 precursor) c4(139888) c5(139889, 139890, 139891, 139892, 139893, 139894) c6( ) c7(jb, sv, rv); #c1(CHST10) c2(NP_004845) c3(carbohydrate sulfotransferase 10 precursor) c4(150232, 150233, 150234, 150235, 150236, 150237, 150238) c5(150239, 150240, 150241, 150242, 150243, 150244, 150245, 150246, 150247, 150248, 150249, 150250, 150251, 150252, 150253, 150254, 150255, 150256, 150257, 150258, 150259, 150260, 150261, 150262, 150263, 150264, 150265, 150266, 150267, 150268, 150269, 150270, 150271, 150272, 150273, 150274, 150275, 150276, 150277, 150278, 150279, 150280, 150281, 150282, 150283, 150284) c6( ) c7(Y); #c1(CHST11) c2(NP_001167453) c3(carbohydrate sulfotransferase 11 isoform 2) c4(68927) c5(68928, 68929, 68930, 68931, 68932, 68933) c6( ) c7(jv, aOj, aW, cj, aT, aj, kv, eg, jb, ad); #c1(CHST11) c2(NP_060883) c3(carbohydrate sulfotransferase 11 isoform 1) c4(198359) c5(198360, 198361, 198362, 198363, 198364, 198365) c6( ) c7(jv, aOj, aW, cj, aT, aj, kv, eg, jb, ad); #c1(CHST12) c2(NP_001230724) c3(carbohydrate sulfotransferase 12) c4(86712, 86713) c5(86714, 86715, 86716, 86717, 86718, 86719, 86720, 86721, 86722, 86723, 86724, 86725) c6( ) c7(jv, eg, aOj); #c1(CHST13) c2(NP_690849) c3(carbohydrate sulfotransferase 13 precursor) c4(244961, 244962) c5(244963, 244964, 244965, 244966, 244967, 244968, 244969, 244970, 244971, 244972, 244973, 244974) c6( ) c7(jv, eg, aOj); #c1(CHST14) c2(NP_569735) c3(carbohydrate sulfotransferase 14) c4(233918) c5(233919, 233920, 233921, 233922, 233923, 233924, 233925, 233926) c6( ) c7(aOm, aOl, Eh, Az, aOk); #c1(CHST15) c2(NP_001257694) c3(carbohydrate sulfotransferase 15 isoform 2) c4(95578, 95579) c5(95580, 95581, 95582, 95583, 95584, 95585) c6( ) c7(d, j, m, as); #c1(CHST15) c2(NP_056976) c3(carbohydrate sulfotransferase 15 isoform 1) c4(188283, 188284) c5(188285, 188286, 188287, 188288, 188289, 188290, 188291, 188292, 188293, 188294, 188295, 188296, 188297, 188298, 188299, 188300) c6( ) c7(d, j, m, as); #c1(CHST15) c2(XP_011538159) c3(carbohydrate sulfotransferase 15 isoform X5) c4( ) c5(335793, 335794, 335795, 335796, 335797, 335798) c6( ) c7(d, j, m, as); #c1(CHST2) c2(NP_004258) c3(carbohydrate sulfotransferase 2) c4(144653) c5(144654, 144655, 144656, 144657, 144658, 144659) c6( ) c7(cF, c, eH, sv, ey, g, iV, eF, jb); #c1(CHST3) c2(XP_006718138) c3(carbohydrate sulfotransferase 3 isoform X1) c4(291548) c5(291549, 291550, 291551, 291552, 291553, 291554) c6( ) c7(bL, T, aC, aZ, e, aw, jN, cz, cR, ci, aOr, azl, aOn, ad, Hr, qC, dP, aex, aOq, aOp, aT, iv, nJ, ae, dF, bA, eG, s, aMG, aW, g, cl, dr, qa, op, vK, vA, ln, hL, aez, m, B, aOo); #c1(CHST4) c2(NP_005760) c3(carbohydrate sulfotransferase 4) c4(159135) c5(159136, 159137, 159138, 159139, 159140, 159141, 159142, 159143, 159144, 159145) c6( ) c7(T, aOs, ac, g, NE); #c1(CHST5) c2(NP_078809) c3(carbohydrate sulfotransferase 5) c4(215574, 215575) c5(215576, 215577, 215578, 215579, 215580, 215581, 215582, 215583, 215584, 215585, 215586, 215587) c6( ) c7(g, bX, NE); #c1(CHST6) c2(XP_011521387) c3(carbohydrate sulfotransferase 6 isoform X1) c4(316196) c5(316197, 316198, 316199, 316200, 316201, 316202, 316203, 316204, 316205, 316206) c6( ) c7(zN, aOv, aOu, PK, aOt); #c1(CHST8) c2(XP_011525528) c3(carbohydrate sulfotransferase 8 isoform X1) c4(319941) c5(319942, 319943, 319944, 319945, 319946, 319947, 319948, 319949, 319950, 319951, 319952, 319953, 319954, 319955) c6( ) c7(v, bM, fq, aFQ); #c1(CHST9) c2(NP_001243245) c3(carbohydrate sulfotransferase 9 isoform 2) c4(90237) c5(90238, 90239, 90240, 90241, 90242, 90243) c6(90244) c7(bt); #c1(CHST9) c2(NP_113610) c3(carbohydrate sulfotransferase 9 isoform 1) c4(221724) c5(221725, 221726, 221727, 221728, 221729, 221730, 221731, 221732) c6(221733, 221734) c7(bt); #c1(CHST9) c2(XP_011524527) c3(carbohydrate sulfotransferase 9 isoform X2) c4( ) c5(319098) c6( ) c7(bt); #c1(CHSY1) c2(NP_055733) c3(chondroitin sulfate synthase 1 precursor) c4(183174) c5(183175, 183176, 183177, 183178, 183179, 183180) c6( ) c7(aOw, rV); #c1(CHSY3) c2(NP_787052) c3(chondroitin sulfate synthase 3) c4(252019) c5(252020, 252021, 252022, 252023, 252024, 252025) c6( ) c7(aOy, aOx); #c1(CHTF18) c2(NP_071375) c3(chromosome transmission fidelity protein 18 homolog) c4(211237, 211238) c5(211239, 211240, 211241, 211242, 211243, 211244, 211245, 211246, 211247, 211248, 211249, 211250) c6( ) c7(K); #c1(CHTF18) c2(XP_005255528) c3(chromosome transmission fidelity protein 18 homolog isoform X1) c4(273712) c5(273713, 273714, 273715, 273716, 273717, 273718) c6( ) c7(K); #c1(CHTOP) c2(NP_001193541) c3(chromatin target of PRMT1 protein isoform 2) c4(82255) c5( ) c6( ) c7(pg, w, dz, aw, et); #c1(CHTOP) c2(NP_001231593) c3(chromatin target of PRMT1 protein isoform 3) c4( ) c5(87313, 87314, 87315, 87316, 87317) c6( ) c7(pg, w, dz, aw, et); #c1(CHTOP) c2(NP_056422) c3(chromatin target of PRMT1 protein isoform 1) c4(187531, 187532) c5(187533, 187534, 187535, 187536, 187537, 187538, 187539, 187540, 187541, 187542, 187543, 187544) c6( ) c7(pg, w, dz, aw, et); #c1(CHURC1) c2(NP_001190992) c3(protein Churchill isoform 2) c4(80441) c5(80442, 80443, 80444, 80445, 80446, 80447) c6( ) c7(bN); #c1(CHURC1) c2(NP_001190993) c3(protein Churchill isoform 3) c4(80448) c5(80449, 80450, 80451, 80452, 80453, 80454) c6( ) c7(bN); #c1(CHURC1) c2(NP_660148) c3(protein Churchill isoform 1) c4(240395, 240396) c5(240397, 240398, 240399, 240400, 240401, 240402, 240403, 240404, 240405, 240406, 240407, 240408) c6( ) c7(bN); #c1(CIAO1) c2(NP_004795) c3(probable cytosolic iron-sulfur protein assembly protein CIAO1) c4(149921) c5(149922, 149923, 149924, 149925, 149926, 149927) c6( ) c7(y, aj, J); #c1(CIAPIN1) c2(NP_064709) c3(anamorsin) c4(203521) c5(203522, 203523, 203524, 203525, 203526, 203527) c6( ) c7(ck, T, py, aE, Jl, aA, aF, g, B, pl); #c1(CIB1) c2(NP_006375) c3(calcium and integrin-binding protein 1 isoform b) c4(164463) c5(164464, 164465, 164466, 164467, 164468, 164469) c6( ) c7(bM, T, if, fd, bB, ci, Na, Vp, aE, K, hu, eL, Qe, yo, aeR, aW, az, g, as, eF, cm, aJg, bw, iP, eM, nB, iA, aJh, cj, m, afA, IT, n, fr, qN, JW, eW, ft, Do, Bj, kH, Ne, h, eV, dL, ey, pl, Oz, kj, ag, yq, PU, iO, kT, bP, hR, avr, B, cn, fM, eX, aA, oc, atp, q, eA, aHy, zn, Vr, aT, jj, ae, jf, s, nO, iU, Y, r, lo, en, hf, cl, t, f, ck, rR, iM, bt, Bh, aJc, hS, id, pY, iW, YM, jh, OE, Fb, Fc, iJ, ad, dP, hd, py, Ob, oW, hP, d, je, ff, eH, aF, Vl, bz, es, RV, bE, aS, iu); #c1(CIB2) c2(NP_006374) c3(calcium and integrin-binding family member 2 isoform 1) c4(164456) c5(164457, 164458, 164459, 164460, 164461, 164462) c6( ) c7(T, fM, iW, mI, aj, oc, br, J, ad, er, bv, aOz, kH, aT, jy, hn, dL, K, ey, rz, nJ, ae, eL, gj, je, ZH, s, Qr, CN, aW, ff, en, t, bw, bz, aOA, iO, iM, eM, at, m, Bh, B); #c1(CIC) c2(NP_055940) c3(protein capicua homolog isoform CIC-S) c4(184579) c5(184580, 184581, 184582, 184583, 184584, 184585, 184586, 184587) c6( ) c7(T, zX, dK, RX, nA, Fc, q, er, tD, eA, bv, agd, aT, aDh, dx, jf, d, aW, eZ, r, as, cl, aLY, QG, kB, hc, RW, aOB, aiG, y); #c1(CIC) c2(XP_005258732) c3(protein capicua homolog isoform X11) c4( ) c5(275719) c6( ) c7(T, zX, dK, RX, nA, Fc, q, er, tD, eA, bv, agd, aT, aDh, dx, jf, d, aW, eZ, r, as, cl, aLY, QG, kB, hc, RW, aOB, aiG, y); #c1(CIC) c2(XP_011524967) c3(protein capicua homolog isoform XG) c4( ) c5(319461) c6( ) c7(T, zX, dK, RX, nA, Fc, q, er, tD, eA, bv, agd, aT, aDh, dx, jf, d, aW, eZ, r, as, cl, aLY, QG, kB, hc, RW, aOB, aiG, y); #c1(CIC) c2(XP_011524969) c3(protein capicua homolog isoform X8) c4( ) c5(319462) c6( ) c7(T, zX, dK, RX, nA, Fc, q, er, tD, eA, bv, agd, aT, aDh, dx, jf, d, aW, eZ, r, as, cl, aLY, QG, kB, hc, RW, aOB, aiG, y); #c1(CIDEB) c2(XP_005267597) c3(cell death activator CIDE-B isoform X1) c4(281081) c5(281082, 281083, 281084, 281085, 281086, 281087, 281088, 281089, 281090, 281091, 281092, 281093, 281094, 281095, 281096, 281097, 281098, 281099) c6( ) c7(ad); #c1(CIDEC) c2(NP_001186480) c3(cell death activator CIDE-3 isoform 2) c4(77683, 77684) c5(77685, 77686, 77687, 77688, 77689, 77690, 77691, 77692, 77693, 77694, 77695) c6( ) c7(LL, fJ, fc, GR, aq, aj, v, cP, aOC, B, J, QI); #c1(CIDEC) c2(NP_001186481) c3(cell death activator CIDE-3 isoform 3) c4( ) c5(77696, 77697, 77698, 77699, 77700, 77701, 77702) c6( ) c7(LL, fJ, fc, GR, aq, aj, v, cP, aOC, B, J, QI); #c1(CIDEC) c2(NP_001186552) c3(cell death activator CIDE-3 isoform 1) c4(77818, 77819) c5(77820) c6( ) c7(LL, fJ, fc, GR, aq, aj, v, cP, aOC, B, J, QI); #c1(CIDEC) c2(XP_005265433) c3(cell death activator CIDE-3 isoform X2) c4( ) c5(279541, 279542, 279543, 279544, 279545, 279546, 279547, 279548, 279549) c6( ) c7(LL, fJ, fc, GR, aq, aj, v, cP, aOC, B, J, QI); #c1(CIITA) c2(NP_000237) c3(MHC class II transactivator isoform 2) c4(5321, 5322) c5(5323, 5324, 5325, 5326, 5327, 5328, 5329, 5330, 5331, 5332, 5333, 5334, 5335) c6( ) c7(T, fM, dA, fR, eR, aw, eX, jh, cz, fd, n, cL, cQ, jE, ci, V, pd, aDI, eA, hX, bv, py, aX, nX, apJ, NS, aT, h, eV, hK, af, eu, bA, uQ, A, aW, Y, oV, ff, eZ, r, fe, hp, NR, en, eE, cm, iV, iP, ac, aOD, gX, eo, fL, ei, Xa, y, WX, B); #c1(CIITA) c2(NP_001273332) c3(MHC class II transactivator isoform 3) c4(104697) c5(104698, 104699, 104700, 104701, 104702, 104703) c6( ) c7(T, fM, dA, fR, eR, aw, eX, jh, cz, fd, n, cL, cQ, jE, ci, V, pd, aDI, eA, hX, bv, py, aX, nX, apJ, NS, aT, h, eV, hK, af, eu, bA, uQ, A, aW, Y, oV, ff, eZ, r, fe, hp, NR, en, eE, cm, iV, iP, ac, aOD, gX, en, fL, ei, Xa, y, WX, B); #c1(CIITA) c2(XP_011520797) c3(MHC class II transactivator isoform X11) c4(315801) c5(315802, 315803, 315804, 315805, 315806, 315807) c6( ) c7(T, fM, dA, fR, eR, aw, eX, jh, cz, fd, n, cL, cQ, jE, ci, V, pd, aDI, eA, hX, bv, py, aX, nX, apJ, NS, aT, h, eV, hK, af, eu, bA, uQ, A, aW, Y, oV, ff, eZ, r, fe, hp, NR, en, eE, cm, iV, iP, ac, aOD, gX, eo, fL, ei, Xa, y, WX, B); #c1(CILP) c2(NP_003604) c3(cartilage intermediate layer protein 1 preproprotein) c4(139529) c5(139530, 139531, 139532, 139533, 139534, 139535) c6( ) c7(aik, y, aef, rp); #c1(CILP2) c2(NP_694953) c3(cartilage intermediate layer protein 2 precursor) c4(245460) c5(245461, 245462, 245463, 245464, 245465, 245466) c6( ) c7(bL, M); #c1(CINP) c2(NP_116019) c3(cyclin-dependent kinase 2-interacting protein) c4(225220) c5(225221, 225222, 225223, 225224, 225225, 225226, 225227, 225228, 225229, 225230, 225231) c6( ) c7(bP); #c1(CINP) c2(XP_005267810) c3(cyclin-dependent kinase 2-interacting protein isoform X3) c4(281259) c5(281260, 281261, 281262, 281263, 281264) c6( ) c7(bP); #c1(CINP) c2(XP_011535132) c3(cyclin-dependent kinase 2-interacting protein isoform X1) c4(331978) c5(331979, 331980, 331981, 331982, 331983, 331984) c6( ) c7(bP); #c1(CIPC) c2(NP_219494) c3(CLOCK-interacting pacemaker) c4(228609, 228610, 228611, 228612, 228613) c5(228614, 228615, 228616, 228617, 228618, 228619, 228620, 228621, 228622, 228623, 228624, 228625, 228626, 228627, 228628, 228629, 228630, 228631, 228632, 228633, 228634, 228635, 228636, 228637, 228638, 228639, 228640, 228641, 228642, 228643) c6( ) c7(oe); #c1(CIRI) c2(NP_004873) c3(corepressor interacting with RBPJ 1) c4(150452) c5(150453, 150454, 150455, 150456, 150457, 150458) c6( ) c7(cm, aj, J); #c1(CIRBP) c2(NP_001287744) c3(cold-inducible RNA-binding protein isoform 2) c4( ) c5(112778, 112779, 112780, 112781, 112782, 112783, 112784, 112785, 112786, 112787) c6( ) c7(T, iV, VX, iZ, aW, eu, hL, aT, cy, cl, j, K, UN, C, ae, ad, Oh); #c1(CIRBP) c2(NP_001287758) c3(cold-inducible RNA-binding protein isoform 3) c4(112816, 112817) c5(112818, 112819, 112820, 112821, 112822, 112823, 112824, 112825, 112826, 112827, 112828, 112829) c6( ) c7(T, iV, VX, iZ, aW, eu, hL, aT, cy, cl, j, K, UN, C, ae, ad, Oh); #c1(CIRBP) c2(XP_006722700) c3(cold-inducible RNA-binding protein isoform X1) c4(294846) c5( ) c6( ) c7(T, iV, VX, iZ, aW, eu, hL, aT, cy, cl, j, K, UN, C, ae, ad, Oh); #c1(CIRHIA) c2(NP_116219) c3(cirhin) c4(225823, 225824) c5(225825, 225826, 225827, 225828, 225829, 225830, 225831, 225832, 225833, 225834, 225835, 225836) c6( ) c7(hJ, aOE, jw, aOF); #c1(CISD1) c2(NP_060934) c3(CDGSH iron-sulfur domain-containing protein 1) c4(198770) c5(198771, 198772, 198773, 198774, 198775, 198776) c6( ) c7(bL, aj, aw, J); #c1(CISD2) c2(NP_001008389) c3(CDGSH iron-sulfur domain-containing protein 2) c4(23138) c5(23139, 23140, 23141, 23142, 23143, 23144) c6( ) c7(MR, Ae, adF, aOH, awK, aj, aOG, aOI); #c1(CISH) c2(NP_037456) c3(cytokine-inducible SH2-containing protein isoform 1) c4(175581) c5(175582, 175583, 175584, 175585, 175586, 175587) c6( ) c7(bL, T, dD, id, QO, pf, wu, ea, if, aFc, jh, v, eq, ci, qN, fr, aOJ, AO, V, qW, cd, q, ad, hX, cn, BI, jz, aLS, dV, aT, h, dz, dL, abW, wm, ae, eL, pi, Ft, tw, je, vT, aOK, aW, Y, et, fJ, eH, ff, r, lo, en, aCK, eF, Qt, hq, iM, eD, aOL, aS, m, Hb, eo, y, kS, B, VB, cn); #c1(CISH) c2(NP_659508) c3(cytokine-inducible SH2-containing protein isoform 2) c4(240281) c5(240282, 240283, 240284, 240285, 240286, 240287) c6( ) c7(bL, T, dD, id, QO, pf, wu, ea, if, aFc, jh, v, eq, ci, qN, fr, aOJ, AO, V, qW, cd, q, ad, hX, co, BI, jz, aLS, dV, aT, h, dz, dL, abW, wm, ae, eL, pi, Ft, tw, je, vT, aOK, aW, Y, et, fJ, eH, ff, r, lo, en, aCK, eF, Qt, hq, iM, eD, aOL, aS, m, Hb, eo, y, kS, B, VB, cn); #c1(CIT) c2(NP_001193928) c3(citron Rho-interacting kinase isoform 1) c4(83222) c5(83223, 83224, 83225, 83226, 83227, 83228) c6( ) c7(anj, akN, aji, Gt, A, an, bO, ta, bS, bK, m, ct, ci, Z, alL); #c1(CIT) c2(NP_009105) c3(citron Rho-interacting kinase isoform 2) c4(170681) c5(170682, 170683, 170684, 170685, 170686, 170687) c6( ) c7(anj, akN, aji, Gt, A, an, bO, ta, bS, bK, m, ct, ci, Z, alL); #c1(CITED1) c2(NP_001138357) c3(cbp/p300-interacting transactivator 1 isoform 2) c4(56315, 56316, 56317, 56318, 56319, 56320, 56321) c5(56322, 56323, 56324, 56325, 56326, 56327, 56328, 56329, 56330, 56331, 56332, 56333, 56334, 56335, 56336, 56337, 56338, 56339, 56340, 56341, 56342, 56343, 56344, 56345, 56346, 56347, 56348, 56349, 56350, 56351, 56352, 56353) c6( ) c7(qJ, iO, nM, MS, s, nB, aW, Y, MP, Nn, aT, aOM, aq, ci, er); #c1(CITED1) c2(NP_001138359) c3(cbp/p300-interacting transactivator 1 isoform 1) c4( ) c5(56354, 56355, 56356, 56357, 56358, 56359, 56360, 56361, 56362, 56363, 56364, 56365, 56366, 56367, 56368, 56369, 56370, 56371, 56372, 56373, 56374, 56375) c6( ) c7(qJ, iO, nM, MS, s, nB, aW, Y, MP, Nn, aT, aOM, aq, ci, er); #c1(CITED2) c2(NP_001161860) c3(cbp/p300-interacting transactivator 2 isoform 1) c4( ) c5(66189, 66190, 66191, 66192, 66193, 66194, 66195, 66196, 66197, 66198, 66199, 66200, 66201, 66202, 66203, 66204, 66205) c6( ) c7(bL, bM, oe, EQ, aA, bB, wo, j, md, Mg, il, aT, iv, bl, eu, aW, iw, aF, eF, zZ, aOO, aON, awC, gY, Ip, bE, m, bD, Po, X); #c1(CITED2) c2(NP_001161861) c3(cbp/p300-interacting transactivator 2 isoform 2) c4(66206, 66207) c5(66208, 66209, 66210) c6( ) c7(bL, bM, oe, EQ, aA, bB, wo, j, md, Mg, il, aT, iv, bl, eu, aW, iw, aF, eF, zZ, aOO, aON, awC, gY, Ip, bE, m, bD, Po, X); #c1(CIZ1) c2(NP_001124490) c3(cip1-interacting zinc finger protein isoform 4) c4(49149) c5(49150) c6( ) c7(T, aOQ, aT, Wk, aU, Wm, Wl, dx, aOP); #c1(CIZ1) c2(NP_001244904) c3(cip1-interacting zinc finger protein isoform 5) c4(92323) c5(92324, 92325, 92326, 92327, 92328, 92329) c6( ) c7(T, aOQ, aT, Wk, aU, Wm, Wl, dx, aOP); #c1(CIZ1) c2(XP_005251945) c3(cip1-interacting zinc finger protein isoform X3) c4(271317, 271318, 271319, 271320, 271321) c5(271322, 271323, 271324, 271325, 271326, 271327, 271328, 271329, 271330, 271331, 271332, 271333, 271334, 271335, 271336, 271337, 271338, 271339, 271340, 271341, 271342, 271343, 271344, 271345, 271346, 271347, 271348, 271349, 271350, 271351, 271352, 271353) c6( ) c7(T, aOQ, aT, Wk, aU, Wm, Wl, dx, aOP); #c1(CIZ1) c2(XP_005251948) c3(cip1-interacting zinc finger protein isoform X1) c4(271354, 271355) c5(271356, 271357, 271358, 271359, 271360, 271361, 271362, 271363, 271364, 271365, 271366, 271367) c6( ) c7(T, aOQ, aT, Wk, aU, Wm, Wl, dx, aOP); #c1(CIZ1) c2(XP_005251949) c3(cip1-interacting zinc finger protein isoform X2) c4( ) c5(271368, 271369, 271370, 271371, 271372, 271373) c6( ) c7(T, aOQ, aT, Wk, aU, Wm, Wl, dx, aOP); #c1(CIZ1) c2(XP_005251950) c3(cip1-interacting zinc finger protein isoform X8) c4( ) c5(271374, 271375, 271376, 271377, 271378, 271379) c6( ) c7(T, aOQ, aT, Wk, aU, Wm, Wl, dx, aOP); #c1(CIZ1) c2(XP_006717102) c3(cip1-interacting zinc finger protein isoform X7) c4(290719, 290720) c5(290721, 290722, 290723, 290724, 290725, 290726, 290727, 290728, 290729, 290730, 290731, 290732) c6( ) c7(T, aOQ, aT, Wk, aU, Wm, Wl, dx, aOP); #c1(CIZ1) c2(XP_011516785) c3(cip1-interacting zinc finger protein isoform X9) c4(310230) c5(310231, 310232, 310233, 310234, 310235, 310236) c6( ) c7(T, aOQ, aT, Wk, aU, Wm, Wl, dx, aOP); #c1(CKAP2) c2(NP_001091995) c3(cytoskeleton-associated protein 2 isoform 2) c4(39201, 39202) c5(39203, 39204, 39205, 39206, 39207, 39208, 39209, 39210, 39211, 39212, 39213, 39214) c6( ) c7(T, s, aW, aA, aT, aF, g); #c1(CKAP2) c2(NP_001273616) c3(cytoskeleton-associated protein 2 isoform 4) c4(105442) c5(105443, 105444, 105445, 105446, 105447, 105448) c6( ) c7(T, s, aW, aA, aT, aF, g); #c1(CKAP2) c2(NP_060674) c3(cytoskeleton-associated protein 2 isoform 1) c4(197081) c5(197082, 197083, 197084, 197085, 197086, 197087) c6( ) c7(T, s, aW, aA, aT, aF, g); #c1(CKAP2L) c2(NP_689728) c3(cytoskeleton-associated protein 2-like isoform 1) c4(243687, 243688) c5(243689, 243690, 243691, 243692, 243693, 243694, 243695, 243696, 243697, 243698, 243699, 243700) c6( ) c7(dP, Tz); #c1(CKAP4) c2(NP_006816) c3(cytoskeleton-associated protein 4) c4(168340) c5(168341, 168342, 168343, 168344, 168345, 168346) c6( ) c7(aOR, bM, T, Fv, if, ci, Na, aOS, aE, arA, pX, K, hu, eL, li, aW, aEI, az, Az, LZ, aOW, OZ, arK, g, eF, eM, nB, aPc, m, sw, zt, iB, ht, n, qN, aPb, ft, amJ, dL, Dz, aOU, aOX, MD, ks, aOT, fM, yk, arN, AO, akG, q, er, aOY, qK, aT, rO, Nc, Tj, avt, aOV, ae, xR, Y, Lf, r, en, bu, t, iK, sS, QG, kP, zu, rA, Mb, zU, ad, aOZ, hd, Db, IQ, ff, eH, cr, asV, Ej, bz, atb, dr, LB, adg, aPa); #c1(CKAP5) c2(NP_001008938) c3(cytoskeleton-associated protein 5 isoform a) c4(23488, 23489, 23490) c5(23491, 23492, 23493, 23494, 23495, 23496, 23497, 23498, 23499, 23500, 23501, 23502, 23503, 23504, 23505, 23506, 23507, 23508, 23509) c6( ) c7(aT); #c1(CKAP5) c2(NP_055571) c3(cytoskeleton-associated protein 5 isoform b) c4(181991, 181992) c5(181993, 181994, 181995, 181996, 181997, 181998, 181999, 182000, 182001, 182002, 182003, 182004, 182005, 182006, 182007) c6( ) c7(aT); #c1(CKB) c2(NP_001814) c3(creatine kinase B-type) c4(121362, 121363, 121364) c5(121365, 121366, 121367, 121368, 121369, 121370, 121371, 121372, 121373, 121374, 121375, 121376, 121377, 121378, 121379, 121380, 121381, 121382) c6( ) c7(T, aw, jx, aA, bB, oY, qW, q, b, ft, af, r, g, t, bz, ck, W, bE, bo, mx, uS, m, i, X); #c1(CKLF) c2(NP_001035228) c3(chemokine-like factor isoform e) c4(32646) c5(32647, 32648, 32649, 32650, 32651, 32652, 32653, 32654) c6(32655, 32656) c7(eE, bM, T, V, iT); #c1(CKLF) c2(NP_057410) c3(chemokine-like factor isoform c) c4(190603) c5(190604, 190605, 190606, 190607, 190608, 190609, 190610) c6(190611) c7(eE, bM, T, V, iT); #c1(CKLF) c2(NP_058647) c3(chemokine-like factor isoform a) c4(192991, 192992) c5(192993, 192994, 192995, 192996, 192997, 192998, 192999, 193000, 193001, 193002, 193003, 193004, 193005, 193006, 193007, 193008) c6(193009, 193010, 193011, 193012) c7(eE, bM, T, V, iT); #c1(CKLF) c2(NP_857591) c3(chemokine-like factor isoform b) c4(255245) c5(255246, 255247, 255248, 255249, 255250, 255251, 255252) c6(255253) c7(eE, bM, T, V, iT); #c1(CKLF) c2(NP_857592) c3(chemokine-like factor isoform d) c4(255254) c5(255255, 255256, 255257, 255258, 255259, 255260, 255261, 255262) c6(255263, 255264) c7(eE, bM, T, V, iT); #c1(CKM) c2(NP_001815) c3(creatine kinase M-type) c4(121383) c5(121384, 121385, 121386, 121387, 121388, 121389) c6( ) c7(dR, aw, cy, aPe, j, bX, X, aPd); #c1(CKMT1A) c2(XP_005254555) c3(creatine kinase U-type, mitochondrial isoform X2) c4(273245) c5(273246, 273247, 273248, 273249, 273250) c6( ) c7(ev); #c1(CKMT1A) c2(XP_011520030) c3(creatine kinase U-type, mitochondrial isoform X1) c4(314906, 314907, 314908, 314909, 314910, 314911, 314912) c5(314913, 314914, 314915, 314916, 314917, 314918, 314919, 314920, 314921, 314922, 314923, 314924, 314925, 314926, 314927, 314928, 314929, 314930, 314931, 314932, 314933, 314934, 314935, 314936, 314937, 314938, 314939, 314940, 314941, 314942, 314943, 314944, 314945, 314946, 314947, 314948, 314949, 314950, 314951, 314952, 314953, 314954, 314955, 314956, 314957, 314958, 314959, 314960) c6( ) c7(ev); #c1(CKMT1B) c2(XP_011519498) c3(creatine kinase U-type, mitochondrial isoform X2) c4(314145, 314146) c5(314147, 314148, 314149, 314150, 314151, 314152, 314153, 314154, 314155, 314156, 314157, 314158, 314159) c6( ) c7(at, ev); #c1(CKMT1B) c2(XP_011519500) c3(creatine kinase U-type, mitochondrial isoform X3) c4(314160) c5(314161, 314162, 314163, 314164, 314165, 314166, 314167, 314168, 314169, 314170, 314171) c6( ) c7(at, ev); #c1(CKMT1B) c2(XP_011519501) c3(creatine kinase U-type, mitochondrial isoform X5) c4( ) c5(314172) c6( ) c7(at, ev); #c1(CKMT2) c2(NP_001093206) c3(creatine kinase S-type, mitochondrial precursor) c4(39933, 39934) c5(39935, 39936, 39937, 39938, 39939, 39940, 39941, 39942, 39943, 39944, 39945, 39946, 39947, 39948, 39949, 39950, 39951, 39952, 39953, 39954) c6( ) c7(T, bt); #c1(CKS1B) c2(NP_001817) c3(cyclin-dependent kinases regulatory subunit 1) c4(121390, 121391, 121392) c5(121393, 121394, 121395, 121396, 121397, 121398, 121399, 121400, 121401, 121402, 121403, 121404, 121405, 121406, 121407, 121408, 121409, 121410) c6( ) c7(T, atC, jh, fd, fr, ci, ad, dP, x, aT, pk, aW, Y, ff, aq, aF, en, iR, aJg, bz, amS, aJh, k, B); #c1(CKS2) c2(NP_001818) c3(cyclin-dependent kinases regulatory subunit 2) c4(121411) c5(121412, 121413, 121414, 121415, 121416, 121417) c6( ) c7(x, T, kI, nM, jz, aA, r, dL, aF, k, eL, q, ad, ip); #c1(CLASP1) c2(NP_001135745) c3(CLIP-associating protein 1 isoform 2) c4(52991, 52992) c5(52993, 52994, 52995, 52996, 52997, 52998, 52999, 53000, 53001, 53002, 53003, 53004) c6( ) c7(j, aT); #c1(CLASP1) c2(NP_001135746) c3(CLIP-associating protein 1 isoform 3) c4(53005) c5(53006, 53007, 53008, 53009, 53010, 53011) c6( ) c7(j, aT); #c1(CLASP1) c2(NP_001193980) c3(CLIP-associating protein 1 isoform 4) c4(83411) c5(83412, 83413, 83414, 83415, 83416, 83417, 83418) c6( ) c7(j, aT); #c1(CLASP1) c2(NP_056097) c3(CLIP-associating protein 1 isoform 1) c4(185692) c5(185693, 185694, 185695, 185696, 185697, 185698) c6( ) c7(j, aT); #c1(CLASP1) c2(XP_006712448) c3(CLIP-associating protein 1 isoform X20) c4(286659) c5(286660, 286661, 286662, 286663, 286664, 286665) c6( ) c7(j, aT); #c1(CLASP1) c2(XP_011509150) c3(CLIP-associating protein 1 isoform X9) c4(299779, 299780) c5(299781, 299782, 299783, 299784, 299785, 299786, 299787, 299788, 299789, 299790, 299791) c6( ) c7(j, aT); #c1(CLASP2) c2(NP_001193973) c3(CLIP-associating protein 2 isoform 2) c4(83392) c5(83393, 83394, 83395, 83396, 83397, 83398) c6( ) c7(Z, hH); #c1(CLASP2) c2(NP_055912) c3(CLIP-associating protein 2 isoform 1) c4(184459) c5(184460, 184461, 184462, 184463, 184464, 184465) c6( ) c7(Z, hH); #c1(CLASP2) c2(XP_006713115) c3(CLIP-associating protein 2 isoform X21) c4(287019) c5(287020, 287021, 287022, 287023, 287024, 287025) c6( ) c7(Z, hH); #c1(CLASP2) c2(XP_006713116) c3(CLIP-associating protein 2 isoform X22) c4(287026, 287027) c5(287028, 287029, 287030, 287031, 287032, 287033, 287034, 287035, 287036, 287037, 287038, 287039) c6( ) c7(Z, hH); #c1(CLASP2) c2(XP_006713121) c3(CLIP-associating protein 2 isoform X29) c4( ) c5(287040, 287041, 287042, 287043, 287044, 287045) c6( ) c7(Z, hH); #c1(CLASP2) c2(XP_011531823) c3(CLIP-associating protein 2 isoform X27) c4(327888, 327889) c5(327890, 327891, 327892, 327893, 327894, 327895) c6( ) c7(Z, hH); #c1(CLC) c2(NP_001819) c3(galectin-10) c4(121418) c5(121419, 121420, 121421, 121422, 121423, 121424) c6( ) c7(T, XD, aAN, ha, r, cU, ah, aOB, dy, hp, aDp, bt, aLY, q, dr); #c1(CLCA2) c2(XP_011540750) c3(calcium-activated chloride channel regulator 2 isoform X1) c4( ) c5(339327, 339328, 339329, 339330, 339331, 339332) c6( ) c7(T, Qu, aW, aT, aPf, K, ae, ad); #c1(CLCA4) c2(XP_011539317) c3(calcium-activated chloride channel regulator 4 isoform X1) c4(337395) c5(337396, 337397, 337398, 337399, 337400, 337401, 337402, 337403) c6(337404, 337405) c7(aPf, aW, ao, aT); #c1(CLCF1) c2(NP_001159684) c3(cardiotrophin-like cytokine factor 1 isoform 2 precursor) c4(64573) c5(64574, 64575, 64576, 64577, 64578, 64579, 64580, 64581) c6( ) c7(T, aPg, aAN, XD, aPh, ha, r, aOB, dy, aLY, q, dr); #c1(CLCF1) c2(NP_037378) c3(cardiotrophin-like cytokine factor 1 isoform 1 precursor) c4(175152) c5(175153, 175154, 175155, 175156, 175157, 175158, 175159, 175160) c6( ) c7(T, aPg, aAN, XD, aPh, ha, r, aOB, dy, aLY, q, dr); #c1(CLCN1) c2(NP_000074) c3(chloride channel protein 1) c4(1227) c5(1228, 1229, 1230, 1231, 1232, 1233) c6( ) c7(no, zs, aPi, aPk, ha, oj, ao, aOB, avI, aPj, akA, aPl, aPm, aLY, dr, dR); #c1(CLCN2) c2(NP_001164558) c3(chloride channel protein 2 isoform 2) c4(66993) c5(66994, 66995, 66996, 66997, 66998, 66999) c6( ) c7(iV, Cq, aPn, aPo, ha, aPp, aCs, aT, Ir, ao, avI, HN, Ji, hg, eA, iD, cb, ji, akq, aR); #c1(CLCN2) c2(NP_001164559) c3(chloride channel protein 2 isoform 3) c4(67000) c5(67001, 67002, 67003, 67004, 67005, 67006, 67007) c6( ) c7(iV, Cq, aPn, aPo, ha, aPp, aCs, aT, Ir, ao, avI, HN, Ji, hg, eA, iD, cb, ji, akq, aR); #c1(CLCN2) c2(NP_001164560) c3(chloride channel protein 2 isoform 4) c4(67008) c5(67009, 67010, 67011, 67012, 67013, 67014) c6( ) c7(iV, Cq, aPn, aPo, ha, aPp, aCs, aT, Ir, ao, avI, HN, Ji, hg, eA, iD, cb, ji, akq, aR); #c1(CLCN2) c2(NP_004357) c3(chloride channel protein 2 isoform 1) c4(145631) c5(145632, 145633, 145634, 145635, 145636, 145637, 145638, 145639) c6( ) c7(iV, Cq, aPn, aPo, ha, aPp, aCs, aT, Ir, ao, avI, HN, Ji, hg, eA, iD, cb, ji, akq, aR); #c1(CLCN2) c2(XP_011510704) c3(chloride channel protein 2 isoform X3) c4(301142) c5(301143, 301144, 301145, 301146, 301147) c6( ) c7(iV, Cq, aPn, aPo, ha, aPp, aCs, aT, Ir, ao, avI, HN, Ji, hq, eA, iD, cb, ji, akq, aR); #c1(CLCN3) c2(NP_001230301) c3(H(+)/Cl(−) exchange transporter 3 isoform a) c4(86192) c5(86193, 86194, 86195, 86196, 86197, 86198, 86199, 86200, 86201, 86202, 86203, 86204, 86205, 86206, 86207, 86208, 86209, 86210, 86211, 86212, 86213, 86214, 86215, 86216) c6( ) c7(T, d, dh, aA, aq, eA, ae, B, ad, rY); #c1(CLCN3) c2(NP_001230303) c3(H(+)/Cl(−) exchange transporter 3 isoform c) c4( ) c5(86217, 86218, 86219, 86220, 86221, 86222) c6( ) c7(T, d, dh, aA, ag, eA, ae, B, ad, rY); #c1(CLCN3) c2(NP_001820) c3(H(+)/Cl(−) exchange transporter 3 isoform b) c4(121425, 121426, 121427, 121428, 121429) c5(121430, 121431, 121432, 121433, 121434, 121435) c6( ) c7(T, d, dh, aA, aq, eA, ae, B, ad, rY); #c1(CLCN3) c2(NP_776297) c3(H(+)/Cl(−) exchange transporter 3 isoform e) c4(251073) c5(251074, 251075, 251076, 251077, 251078, 251079) c6( ) c7(T, d, dh, aA, ag, eA, ae, B, ad, rY); #c1(CLCN4) c2(NP_001243873) c3(H(+)/Cl(−) exchange transporter 4 isoform 2) c4(91821) c5( ) c6( ) c7(bB, bE, ha, afH); #c1(CLCN4) c2(NP_001821) c3(H(+)/Cl(−) exchange transporter 4 isoform 1) c4(121436, 121437, 121438) c5(121439, 121440, 121441, 121442, 121443, 121444, 121445, 121446, 121447, 121448, 121449, 121450, 121451, 121452, 121453, 121454, 121455, 121456, 121457, 121458, 121459, 121460, 121461, 121462) c6( ) c7(bB, bE, ha, afH); #c1(CLCN5) c2(NP_001121370) c3(H(+)/Cl(−) exchange transporter 5 isoform a) c4(45791, 45792, 45793) c5(45794, 45795, 45796, 45797, 45798, 45799, 45800, 45801, 45802, 45803) c6( ) c7(bL, aPr, Vp, aPt, Tl, aAP, kQ, Rj, dK, cV, Ay, KW, n, aPs, dy, amC, aPq, wt, aY, amA, aAN); #c1(CLCN5) c2(NP_001269092) c3(H(+)/Cl(−) exchange transporter 5 isoform d) c4( ) c5(100408, 100409, 100410, 100411, 100412, 100413, 100414, 100415, 100416, 100417, 100418, 100419, 100420, 100421, 100422, 100423) c6( ) c7(bL, aPr, Vp, aPt, Tl, aAP, kQ, Rj, dK, cV, Ay, KW, n, aPs, dy, amC, aPq, wt, aY, amA, aAN); #c1(CLCN6) c2(NP_001277) c3(chloride transport protein 6 isoform 1) c4( ) c5( ) c6( ) c7(bL, rY, cz); #c1(CLCN7) c2(NP_001107803) c3(H(+)/Cl(−) exchange transporter 7 isoform b) c4(43007) c5(43008, 43009, 43010, 43011, 43012, 43013) c6( ) c7(zw, aPu, aPv, zs, Lq, nw, ajW, eA, bA); #c1(CLCN7) c2(NP_001278) c3(H(+)/Cl(−) exchange transporter 7 isoform a) c4(111185, 111186) c5( ) c6( ) c7(zw, aPu, aPv, zs, Lq, nw, ajW, eA, bA); #c1(CLCN7) c2(XP_011520656) c3(H(+)/Cl(−) exchange transporter 7 isoform X1) c4(315597) c5(315598, 315599, 315600, 315601, 315602) c6( ) c7(zw, aPu, aPv, zs, Lq, nw, ajW, eA, bA); #c1(CLCNKB) c2(XP_011538921) c3(chloride channel protein ClC-Kb isoform X1) c4(336989) c5( ) c6( ) c7(qa, Tl, ajT, XD, eR, mG, Rj, aPy, yj, cz, aPx, afV, Xy, adB, aPz, dy, Fg, aPw); #c1(CLCNKB) c2(XP_011538923) c3(chloride channel protein ClC-Kb isoform X3) c4( ) c5(336990, 336991, 336992, 336993, 336994, 336995) c6( ) c7(qa, Tl, ajT, XD, eR, mG, Rj, aPy, yj, cz, aPx, afV, Xy, adB, aPz, dy, Fg, aPw); #c1(CLDN1) c2(NP_066924) c3(claudin-1) c4(207501, 207502) c5(207503, 207504, 207505, 207506, 207507, 207508, 207509, 207510, 207511, 207512, 207513, 207514) c6( ) c7(T, aC, fR, aEj, ht, jx, aA, bB, n, ci, fu, q, aOF, ip, auO, dP, aE, gd, aT, aPA, aPB, aOE, qw, d, s, aW, ev, ff, r, fe, hN, io, aq, aF, en, cl, hJ, t, g, bz, iV, iO, bE, vZ, AM, X, aqH, m, azr, in, ra, B); #c1(CLDN10) c2(NP_001153572) c3(claudin-10 isoform a_i1) c4(60657) c5(60658, 60659, 60660, 60661, 60662, 60663, 60664) c6( ) c7(n, cM, T, B, eZ); #c1(CLDN10) c2(NP_008915) c3(claudin-10 isoform b precursor) c4(169555) c5(169556, 169557, 169558, 169559, 169560, 169561) c6( ) c7(n, cM, T, B, eZ); #c1(CLDN10) c2(NP_878268) c3(claudin-10 isoform a) c4(257071) c5(257072, 257073, 257074, 257075, 257076, 257077) c6( ) c7(n, cM, T, B, eZ); #c1(CLDN11) c2(NP_005593) c3(claudin-11 isoform 1) c4(157751, 157752) c5(157753, 157754, 157755, 157756, 157757, 157758, 157759, 157760, 157761, 157762, 157763, 157764, 157765, 157766, 157767, 157768, 157769, 157770) c6( ) c7(T, Y, aA, aF, m, t, he, V, eW); #c1(CLDN14) c2(NP_036262) c3(claudin-14) c4(172676) c5(172677, 172678, 172679, 172680, 172681, 172682, 172683, 172684, 172685, 172686, 172687, 172688, 172689, 172690, 172691, 172692, 172693, 172694, 172695, 172696, 172697, 172698) c6( ) c7(aAN, aIA, aPC); #c1(CLDN15) c2(NP_001172009) c3(claudin-15) c4(72215) c5(72216, 72217, 72218, 72219, 72220, 72221, 72222, 72223, 72224, 72225) c6( ) c7(arY); #c1(CLDN16) c2(NP_006571) c3(claudin-16) c4(166315, 166316) c5(166317, 166318, 166319, 166320, 166321, 166322, 166323, 166324, 166325, 166326, 166327, 166328) c6( ) c7(T, aPD, Tl, eR, aW, aT, fP, cz, aPs, dy, m, Hb, t, aY); #c1(CLDN18) c2(NP_001002026) c3(claudin-18 isoform 2) c4(19370) c5(19371, 19372, 19373, 19374, 19375, 19376) c6( ) c7(uB, YL, T, av, Qy, aE, AO, eM, qt, iE, Yo, aA, kt, aF, ji, ci, g, iV, LV, bz, hX); #c1(CLDN18) c2(NP_057453) c3(claudin-18 isoform 1 precursor) c4(190961, 190962) c5(190963, 190964, 190965, 190966, 190967, 190968, 190969, 190970, 190971, 190972, 190973, 190974) c6( ) c7(uB, YL, T, av, Qy, aE, AO, eM, qt, iE, Yo, aA, kt, aF, ji, ci, g, iV, LV, bz, hX); #c1(CLDN2) c2(NP_001164566) c3(claudin-2) c4(67015) c5(67016, 67017, 67018, 67019, 67020, 67021, 67022, 67023, 67024, 67025, 67026, 67027, 67028, 67029) c6( ) c7(oO, T, Ik, aA, bB, n, ci, jO, q, jF, l, u, aT, ji, s, aW, ff, r, fe, en, g, iV, ar, iO, eM, bE, gX, wz); #c1(CLDN23) c2(NP_919260) c3(claudin-23) c4(258326) c5(258327, 258328, 258329, 258330, 258331, 258332) c6( ) c7(mG, ac, aF, aA); #c1(CLDN5) c2(NP_001124333) c3(claudin-5) c4(48705) c5(48706, 48707, 48708, 48709, 48710, 48711, 48712, 48713, 48714, 48715, 48716, 48717, 48718, 48719) c6( ) c7(ck, UH, agd, ac, c, aEj, aE, aW, yW, aw, ff, aFT, aT, cR, h, ci, m, en, dw, t, g); #c1(CLDN6) c2(NP_067018) c3(claudin-6 precursor) c4(208396) c5(208397, 208398, 208399, 208400, 208401, 208402, 208403, 208404, 208405, 208406) c6( ) c7(jf, iu, T, Qy, eM, aW, Or, aT, ag, K, g, bz, B); #c1(CLDN7) c2(NP_001171952) c3(claudin-7 isoform 2 precursor) c4(72098) c5(72099, 72100, 72101, 72102, 72103) c6( ) c7(uB, T, aC, Uc, aEj, aI, jx, aA, bB, n, fr, ci, fu, AO, iJ, q, aOF, ad, ip, aE, gd, aT, aPB, ae, qw, avg, s, NE, qt, aW, ev, ff, r, hN, ag, aF, en, cl, hJ, t, g, bz, iV, iO, gk, eM, nB, bE, AM, X, m, azr, in, ra, B); #c1(CLDN8) c2(NP_955360) c3(claudin-8) c4(261538, 261539) c5(261540, 261541, 261542, 261543, 261544, 261545, 261546, 261547, 261548, 261549, 261550, 261551, 261552, 261553, 261554, 261555) c6( ) c7(Uc, fr, aE); #c1(CLDN9) c2(NP_066192) c3(claudin-9) c4(206842) c5(206843, 206844, 206845, 206846, 206847, 206848) c6( ) c7(ad); #c1(CLEC10A) c2(NP_006335) c3(C-type lectin domain family 10 member A isoform 2) c4(164121) c5(164122, 164123, 164124, 164125, 164126, 164127, 164128, 164129, 164130, 164131) c6( ) c7(iu, T, fM, c, vT, yW, aW, Y, jh, aT, h, bK, ci, hp, j, y, Tl, aPE); #c1(CLEC10A) c2(NP_878910) c3(C-type lectin domain family 10 member A isoform 1) c4(257138) c5(257139, 257140, 257141, 257142, 257143, 257144) c6( ) c7(iu, T, fM, c, vT, yW, aW, Y, jh, aT, h, bK, ci, hp, j, y, Tl, aPE); #c1(CLEC11A) c2(NP_002966) c3(C-type lectin domain family 11 member A precursor) c4(134029, 134030) c5(134031, 134032, 134033, 134034, 134035, 134036, 134037, 134038, 134039, 134040, 134041, 134042, 134043, 134044, 134045, 134046) c6(134047, 134048, 134049, 134050) c7(bM, T, iV, ra, wu, oW, fe, qj, m, wm, aPF, t, fb, aPG, pC); #c1(CLEC12A) c2(NP_001193939) c3(C-type lectin domain family 12 member A isoform 3) c4(83250) c5(83251, 83252, 83253, 83254, 83255, 83256, 83257) c6( ) c7(T, fX, Of, jh, Og, y, bt); #c1(CLEC12A) c2(NP_001287659) c3(C-type lectin domain family 12 member A isoform 4) c4(112448, 112449) c5(112450, 112451, 112452, 112453, 112454, 112455, 112456, 112457, 112458, 112459, 112460, 112461, 112462, 112463, 112464, 112465) c6( ) c7(T, fX, Of, jh, Og, y, bt); #c1(CLEC12A) c2(NP_612210) c3(C-type lectin domain family 12 member A isoform 1) c4(236224) c5(236225, 236226, 236227, 236228, 236229) c6( ) c7(T, fX, Of, jh, Og, y, bt); #c1(CLEC12A) c2(NP_963917) c3(C-type lectin domain family 12 member A isoform 2) c4(262556, 262557) c5(262558, 262559, 262560, 262561, 262562, 262563) c6( ) c7(T, fX, Of, jh, Og, y, bt); #c1(CLEC12A) c2(XP_006719099) c3(C-type lectin domain family 12 member A isoform X7) c4( ) c5(292210, 292211) c6( ) c7(T, fX, Of, jh, Og, y, bt); #c1(CLEC14A) c2(NP_778230) c3(C-type lectin domain family 14 member A precursor) c4(251441, 251442) c5(251443, 251444, 251445, 251446, 251447, 251448, 251449, 251450, 251451, 251452, 251453, 251454) c6( ) c7(bL, mw, K, Ea, cd, cY); #c1(CLEC16A) c2(NP_001230332) c3(protein CLEC16A isoform 2) c4(86237) c5(86238, 86239, 86240, 86241, 86242, 86243) c6( ) c7(bL, eR, Io, yG, aw, hz, cL, aj, V, o, rw, aT, hK, be, yF, A, IC, eZ, fe, hp, lY, OW, ac, y); #c1(CLEC16A) c2(NP_056041) c3(protein CLEC16A isoform 1) c4(185259, 185260) c5(185261, 185262, 185263, 185264, 185265, 185266, 185267, 185268, 185269, 185270, 185271, 185272) c6( ) c7(bL, eR, Io, yG, aw, hz, cL, aj, V, o, rw, aT, hK, be, yF, A, lC, eZ, fe, hp, lY, OW, ac, y); #c1(CLEC16A) c2(XP_011520736) c3(protein CLEC16A isoform X4) c4(315755) c5(315756, 315757, 315758, 315759, 315760, 315761) c6( ) c7(bL, eR, Io, yG, aw, hz, cL, aj, V, o, rw, aT, hK, be, yF, A, lC, eZ, fe, hp, lY, OW, ac, y); #c1(CLEC1B) c2(NP_001092901) c3(C-type lectin domain family 1 member B isoform b) c4(39724, 39725) c5(39726, 39727, 39728, 39729, 39730, 39731, 39732, 39733, 39734, 39735, 39736, 39737, 39738, 39739, 39740, 39741) c6( ) c7(bL, T, A, cz, dX, j, y, sj); #c1(CLEC1B) c2(NP_057593) c3(C-type lectin domain family 1 member B isoform a) c4(191488) c5(191489, 191490, 191491, 191492, 191493, 191494) c6( ) c7(bL, T, A, cz, dX, j, y, sj); #c1(CLEC2A) c2(NP_001124183) c3(C-type lectin domain family 2 member A isoform 1) c4(48447) c5(48448, 48449, 48450, 48451, 48452, 48453) c6( ) c7(ai); #c1(CLEC2B) c2(NP_005118) c3(C-type lectin domain family 2 member B) c4(153046) c5(l53047, 153048, 153049, 153050, 153051, 153052) c6( ) c7(aq); #c1(CLEC2D) c2(NP_001004419) c3(C-type lectin domain family 2 member D isoform 2) c4(20676) c5(20677, 20678, 20679, 20680, 20681, 20682) c6( ) c7(T, A, yE, cU, hK, eA, aDH); #c1(CLEC2D) c2(NP_001184246) c3(C-type lectin domain family 2 member D isoform 3) c4(75578) c5(75579, 75580, 75581, 75582, 75583, 75584) c6( ) c7(T, A, yE, cU, hK, eA, aDH); #c1(CLEC2D) c2(NP_001184247) c3(C-type lectin domain family 2 member D isoform 4) c4(75585) c5(75586, 75587, 75588, 75589, 75590, 75591) c6( ) c7(T, A, yE, cU, hK, eA, aDH); #c1(CLEC2D) c2(NP_001184248) c3(C-type lectin domain family 2 member D isoform 5) c4(75592) c5(75593, 75594, 75595, 75596, 75597, 75598) c6( ) c7(T, A, yE, cU, hK, eA, aDH); #c1(CLEC2D) c2(NP_037401) c3(C-type lectin domain family 2 member D isoform 1) c4(175302) c5(175303, 175304, 175305, 175306, 175307, 175308) c6( ) c7(T, A, yE, cU, hK, eA, aDH); #c1(CLEC2L) c2(NP_001073980) c3(C-type lectin domain family 2 member L) c4(36762) c5(36763, 36764, 36765, 36766, 36767, 36768) c6( ) c7(bL); #c1(CLEC3B) c2(NP_003269) c3(tetranectin precursor) c4(136952) c5(136953, 136954, 136955, 136956, 136957, 136958, 136959, 136960) c6(136961, 136962) c7(aPH, bE, r, bB, qN, g, q); #c1(CLEC4A) c2(NP_057268) c3(C-type lectin domain family 4 member A isoform 1) c4(189769) c5(189770, 189771, 189772, 189773, 189774, 189775) c6( ) c7(h, y, Ke); #c1(CLEC4A) c2(NP_919429) c3(C-type lectin domain family 4 member A isoform 3) c4(258593) c5(258594, 258595, 258596, 258597, 258598, 258599) c6( ) c7(h, y, Ke); #c1(CLEC4A) c2(NP_919430) c3(C-type lectin domain family 4 member A isoform 4) c4(258600) c5(258601, 258602, 258603, 258604, 258605, 258606) c6( ) c7(h, y, Ke); #c1(CLEC4A) c2(NP_919432) c3(C-type lectin domain family 4 member A isoform 2) c4(258621) c5(258622, 258623, 258624, 258625, 258626, 258627) c6( ) c7(h, y, Ke); #c1(CLEC4C) c2(NP_569708) c3(C-type lectin domain family 4 member C isoform 1) c4(233720) c5(233721, 233722, 233723, 233724, 233725, 233726, 233727, 233728, 233729, 233730) c6( ) c7(eZ); #c1(CLEC4C) c2(NP_987099) c3(C-type lectin domain family 4 member C isoform 2) c4(263406) c5(263407, 263408, 263409, 263410, 263411, 263412, 263413, 263414, 263415, 263416) c6( ) c7(eZ); #c1(CLEC4D) c2(NP_525126) c3(C-type lectin domain family 4 member D) c4(231203, 231204) c5(231205, 231206, 231207, 231208, 231209, 231210, 231211, 231212, 231213, 231214, 231215, 231216) c6( ) c7(ck, x, T, ady, fM, zn, azW, iU, iW, bt, cj, h, jh, ji, k, ho, Zb, aa, yR, aHE); #c1(CLEC4E) c2(NP_055173) c3(C-type lectin domain family 4 member E) c4(179570) c5(179571, 179572, 179573, 179574, 179575, 179576) c6( ) c7(v, aa); #c1(CLEC4G) c2(NP_001231785) c3(C-type lectin domain family 4 member G isoform 2) c4(87522) c5(87523, 87524, 87525, 87526, 87527) c6( ) c7(wc); #c1(CLEC4G) c2(NP_940894) c3(C-type lectin domain family 4 member G isoform 1) c4(260063) c5(260064, 260065, 260066, 260067, 260068, 260069, 260070) c6( ) c7(wc); #c1(CLEC4M) c2(NP_001138376) c3(C-type lectin domain family 4 member M isoform 2) c4(56435) c5(56436, 56437, 56438, 56439, 56440, 56441) c6( ) c7(PA, fR, wc, jx, gC, h, j); #c1(CLEC4M) c2(NP_001138379) c3(C-type lectin domain family 4 member M isoform 11) c4(56442) c5(56443, 56444, 56445, 56446, 56447, 56448) c6( ) c7(pA, fR, wc, jx, gC, h, j); #c1(CLEC4M) c2(NP_001138382) c3(C-type lectin domain family 4 member M isoform 8) c4(56449) c5(56450, 56451, 56452, 56453, 56454, 56455) c6( ) c7(pA, fR, wc, jx, gC, h, j); #c1(CLEC4M) c2(NP_001138383) c3(C-type lectin domain family 4 member M isoform 3) c4(56456) c5(56457, 56458, 56459, 56460, 56461, 56462) c6( ) c7(pA, fR, wc, jx, gC, h, j); #c1(CLEC4M) c2(NP_055072) c3(C-type lectin domain family 4 member M isoform 1) c4(178761, 178762) c5(178763, 178764, 178765, 178766, 178767, 178768, 178769, 178770, 178771, 178772, 178773, 178774) c6( ) c7(pA, fR, wc, jx, gC, h, j); #c1(CLEC4M) c2(XP_006722677) c3(C-type lectin domain family 4 member M isoform X4) c4(294813) c5(294814, 294815, 294816, 294817, 294818, 294819) c6( ) c7(pA, fR, wc, jx, gC, h, j); #c1(CLEC4M) c2(XP_006722678) c3(C-type lectin domain family 4 member M isoform X5) c4(294820) c5(294821, 294822, 294823, 294824, 294825, 294826) c6( ) c7(pA, fR, wc, jx, gC, h, j); #c1(CLEC5A) c2(NP_037384) c3(C-type lectin domain family 5 member A isoform 1) c4(175180) c5(175181, 175182, 175183, 175184, 175185, 175186) c6( ) c7(AH, Uq, aDm, pL, lf, ai, y); #c1(CLEC6A) c2(NP_001007034) c3(C-type lectin domain family 6 member A) c4(22442) c5(22443, 22444, 22445, 22446, 22447, 22448) c6( ) c7(y, wR); #c1(CLEC7A) c2(NP_072092) c3(C-type lectin domain family 7 member A isoform b) c4(212670) c5(212671, 212672, 212673, 212674, 212675, 212676) c6( ) c7(gU, azW, aPJ, lH, aBI, azY, h, ji, aPl, aGP, Zf, cr, eZ, fe, iV, eE, azV, wR, CZ, m, lf, y); #c1(CLEC7A) c2(NP_922938) c3(C-type lectin domain family 7 member A isoform a) c4(258668) c5(258669, 258670, 258671, 258672, 258673, 258674, 258675, 258676, 258677, 258678, 258679) c6( ) c7(gU, azW, aPJ, lH, aBI, azY, h, ji, aPl, aGP, Zf, cr, eZ, fe, iV, eE, azV, wR, CZ, m, lf, y); #c1(CLEC7A) c2(NP_922939) c3(C-type lectin domain family 7 member A isoform c) c4(258680) c5(258681, 258682, 258683, 258684, 258685, 258686) c6( ) c7(gU, azW, aPJ, lH, aBI, azY, h, ji, aPl, aGP, Zf, cr, eZ, fe, iV, eE, azV, wR, CZ, m, lf, y); #c1(CLEC7A) c2(NP_922940) c3(C-type lectin domain family 7 member A isoform d) c4(258687) c5(258688, 258689, 258690, 258691, 258692, 258693) c6( ) c7(gU, azW, aPJ, lH, aBI, azY, h, ji, aPl, aGP, Zf, cr, eZ, fe, iV, eE, azV, wR, CZ, m, lf, y); #c1(CLEC7A) c2(NP_922941) c3(C-type lectin domain family 7 member A isoform e) c4(258694) c5(258695, 258696, 258697, 258698, 258699, 258700) c6( ) c7(gU, azW, aPJ, lH, aBI, azY, h, ji, aPl, aGP, Zf, cr, eZ, fe, iV, eE, azV, wR, CZ, m, lf, y); #c1(CLEC7A) c2(NP_922945) c3(C-type lectin domain family 7 member A isoform f) c4(258701) c5(258702, 258703, 258704, 258705, 258706, 258707, 258708, 258709, 258710, 258711, 258712) c6( ) c7(gU, azW, aPJ, lH, aBI, azY, h, ji, aPl, aGP, Zf, cr, eZ, fe, iV, eE, azV, wR, CZ, m, lf, y); #c1(CLEC7A) c2(XP_006719198) c3(C-type lectin domain family 7 member A isoform X2) c4(292297) c5( ) c6( ) c7(gU, azW, aPJ, lH, aBI, azY, h, ji, aPl, aGP, Zf, cr, eZ, fe, iV, eE, azV, wR, CZ, m, lf, y); #c1(CLEC9A) c2(NP_997228) c3(C-type lectin domain family 9 member A) c4(265231) c5(265232, 265233, 265234, 265235, 265236, 265237) c6( ) c7(eh); #c1(CLECL1) c2(NP_001240679) c3(C-type lectin-like domain family 1 isoform 3) c4(88697) c5(88698, 88699, 88700, 88701, 88702, 88703) c6( ) c7(V); #c1(CLECL1) c2(NP_742001) c3(C-type lectin-like domain family 1 isoform 1) c4(247583) c5(247584, 247585, 247586, 247587, 247588, 247589) c6( ) c7(V); #c1(CLGN) c2(NP_004353) c3(calmegin precursor) c4(145589, 145590, 145591) c5(145592, 145593, 145594, 145595, 145596, 145597, 145598, 145599, 145600, 145601, 145602, 145603, 145604, 145605, 145606, 145607, 145608, 145609, 145610, 145611, 145612, 145613, 145614, 145615, 145616, 145617) c6( ) c7(np); #c1(CLIC1) c2(NP_001279) c3(chloride intracellular channel protein 1) c4(111202) c5( ) c6( ) c7(Ye, T, A, Jl, eZ, aA, aT, io, h, aF, eA, iV, it, X); #c1(CLIC3) c2(NP_004660) c3(chloride intracellular channel protein 3) c4(148597, 148598) c5(148599, 148600, 148601, 148602, 148603, 148604, 148605, 148606, 148607, 148608, 148609, 148610) c6( ) c7(eL, dL, eh); #c1(CLIC5) c2(NP_001107558) c3(chloride intracellular channel protein 5 isoform a) c4(42829) c5(42830, 42831, 42832, 42833, 42834, 42835) c6( ) c7(vo); #c1(CLIC5) c2(NP_001242952) c3(chloride intracellular channel protein 5 isoform c) c4(89425) c5(89426, 89427, 89428, 89429, 89430, 89431) c6( ) c7(vo); #c1(CLIC5) c2(NP_058625) c3(chloride intracellular channel protein 5 isoform b) c4(192826) c5(192827, 192828, 192829, 192830, 192831, 192832) c6( ) c7(vo); #c1(CLIC6) c2(NP_444507) c3(chloride intracellular channel protein 6) c4(230334) c5(230335, 230336, 230337, 230338, 230339, 230340) c6( ) c7(aPK); #c1(CLINT1) c2(NP_001182484) c3(clathrin interactor 1 isoform 1) c4(74961) c5(74962, 74963, 74964, 74965, 74966, 74967, 74968, 74969, 74970, 74971, 74972, 74973, 74974, 74975, 74976, 74977, 74978, 74979, 74980, 74981) c6( ) c7(gl, he, bA); #c1(CLINT1) c2(NP_001182485) c3(clathrin interactor 1 isoform 3) c4(74982) c5( ) c6( ) c7(gl, he, bA); #c1(CLINT1) c2(NP_055481) c3(clathrin interactor 1 isoform 2) c4(181370) c5(181371, 181372, 181373, 181374, 181375, 181376) c6( ) c7(gl, he, bA); #c1(CLIP1) c2(NP_001234926) c3(CAP-Gly domain-containing linker protein 1 isoform c) c4(87782, 87783) c5(87784, 87785, 87786, 87787, 87788, 87789, 87790, 87791, 87792, 87793, 87794, 87795, 87796, 87797, 87798, 87799, 87800, 87801) c6( ) c7(bL, A, alC, c, jx, eX, aT, eV, aj, dG, t, J, bN, hX); #c1(CLIP1) c2(NP_002947) c3(CAP-Gly domain-containing linker protein 1 isoform a) c4(133825, 133826) c5(133827, 133828, 133829, 133830, 133831, 133832, 133833, 133834, 133835, 133836) c6( ) c7(bL, A, alC, c, jx, eX, aT, eV, aj, dG, t, J, bN, hX); #c1(CLIP1) c2(NP_937883) c3(CAP-Gly domain-containing linker protein 1 isoform b) c4(259402, 259403) c5(259404, 259405, 259406, 259407, 259408, 259409, 259410, 259411, 259412, 259413, 259414, 259415, 259416, 259417, 259418, 259419, 259420, 259421, 259422) c6( ) c7(bL, A, alC, c, jx, eX, aT, eV, aj, dG, t, J, bN, hX); #c1(CLIP1) c2(XP_005253650) c3(CAP-Gly domain-containing linker protein 1 isoform X1) c4(272606, 272607) c5(272608, 272609, 272610, 272611, 272612, 272613) c6( ) c7(bL, A, alC, c, jx, eX, aT, eV, aj, dG, t, J, bN, hX); #c1(CLIP1) c2(XP_006719615) c3(CAP-Gly domain-containing linker protein 1 isoform X2) c4(292706) c5(292707, 292708, 292709, 292710, 292711) c6( ) c7(bL, A, alC, c, jx, eX, aT, eV, aj, dG, t, J, bN, hX); #c1(CLIP2) c2(NP_003379) c3(CAP-Gly domain-containing linker protein 2 isoform 1) c4(138037, 138038) c5(138039, 138040, 138041, 138042, 138043, 138044, 138045, 138046, 138047, 138048, 138049, 138050, 138051, 138052, 138053, 138054, 138055, 138056, 138057, 138058) c6( ) c7(bL, OV, alC, A, c, jx, aj, dG, J, bN, hX); #c1(CLIP2) c2(NP_115797) c3(CAP-Gly domain-containing linker protein 2 isoform 2) c4(223936, 223937) c5(223938, 223939, 223940, 223941, 223942, 223943, 223944, 223945, 223946, 223947, 223948, 223949) c6( ) c7(bL, OV, alC, A, c, jx, aj, dG, J, bN, hX); #c1(CLK1) c2(NP_001155879) c3(dual specificity protein kinase CLK1 isoform 2) c4(61617, 61618) c5(61619, 61620, 61621, 61622, 61623, 61624) c6( ) c7(ds, asp, U); #c1(CLK1) c2(NP_004062) c3(dual specificity protein kinase CLK1 isoform 1) c4(143230) c5(143231, 143232, 143233, 143234, 143235, 143236, 143237, 143238, 143239, 143240, 143241, 143242, 143243) c6( ) c7(ds, asp, U); #c1(CLK2) c2(NP_001281267) c3(dual specificity protein kinase CLK2 isoform 1) c4(111641, 111642) c5( ) c6( ) c7(it, aF, nA, aA); #c1(CLK2) c2(NP_001281268) c3(dual specificity protein kinase CLK2 isoform 3) c4( ) c5(111643, 111644, 111645, 111646, 111647) c6( ) c7(it, aF, nA, aA); #c1(CLK2) c2(NP_003984) c3(dual specificity protein kinase CLK2 isoform 2) c4(142644) c5( ) c6( ) c7(it, aF, nA, aA); #c1(CLK2) c2(XP_005276801) c3(dual specificity protein kinase CLK2 isoform X2) c4(285721) c5(285722, 285723, 285724, 285725, 285726, 285727, 285728, 285729, 285730, 285731, 285732, 285733, 285734) c6( ) c7(it, aF, nA, aA); #c1(CLK2) c2(XP_011545227) c3(dual specificity protein kinase CLK2 isoform X1) c4( ) c5(344009, 344010, 344011, 344012, 344013, 344014, 344015, 344016, 344017, 344018) c6( ) c7(it, aF, nA, aA); #c1(CLLU1) c2(NP_001020404) c3(chronic lymphocytic leukemia up-regulated protein 1) c4(28732) c5(28733, 28734, 28735, 28736, 28737, 28738) c6( ) c7(ad, cj); #c1(CLMN) c2(NP_079010) c3(calmin) c4(216538) c5(216539, 216540, 216541, 216542, 216543, 216544) c6( ) c7(cm, j); #c1(CLMP) c2(NP_079045) c3(CXADR-like membrane protein precursor) c4(216737) c5(216738, 216739, 216740, 216741, 216742, 216743) c6( ) c7(j, aPL, bK, cj); #c1(CLN3) c2(NP_000077) c3(battenin isoform a) c4(1234, 1235, 1236, 1237) c5(1238, 1239, 1240, 1241, 1242, 1243, 1244, 1245, 1246, 1247, 1248, 1249, 1250, 1251, 1252, 1253, 1254, 1255, 1256, 1257, 1258, 1259, 1260, 1261, 1262, 1263, 1264, 1265, 1266, 1267, 1268, 1269, 1270) c6( ) c7(aPO, T, aA, bB, ci, aR, Sw, mP, hb, aT, aiW, K, aPN, d, lR, aW, aPP, cm, nC, rY, bE, U, Lp, Lq, nw, aPM, X, de); #c1(CLN3) c2(NP_001273033) c3(battenin isoform b) c4(104201) c5(104202, 104203, 104204, 104205, 104206, 104207) c6( ) c7(aPO, T, aA, bB, ci, aR, Sw, mP, hb, aT, aiW, K, aPN, d, lR, aW, aPP, cm, nC, rY, bE, U, Lp, Lq, nw, aPM, X, de); #c1(CLN3) c2(NP_001273034) c3(battenin isoform c) c4(104208, 104209) c5(104210, 104211, 104212, 104213, 104214, 104215, 104216, 104217, 104218, 104219, 104220, 104221, 104222) c6( ) c7(aPO, T, aA, bB, ci, aR, Sw, mP, hb, aT, aiW, K, aPN, d, lR, aW, aPP, cm, nC, rY, bE, U, Lp, Lq, nw, aPM, X, de); #c1(CLN3) c2(NP_001273038) c3(battenin isoform d) c4(104242) c5(104243, 104244, 104245, 104246, 104247) c6( ) c7(aPO, T, aA, bB, ci, aR, Sw, mP, hb, aT, aiW, K, aPN, d, lR, aW, aPP, cm, nC, rY, bE, U, Lp, Lq, nw, aPM, X, de); #c1(CLN3) c2(NP_001273039) c3(battenin isoform e) c4(104248) c5(104249, 104250, 104251, 104252, 104253) c6( ) c7(aPO, T, aA, bB, ci, aR, Sw, mP, hb, aT, aiW, K, aPN, d, lR, aW, aPP, cm, nC, rY, bE, U, Lp, Lq, nw, aPM, X, de); #c1(CLN5) c2(NP_006484) c3(ceroid-lipofuscinosis neuronal protein 5) c4(165597, 165598, 165599) c5(165600, 165601, 165602, 165603, 165604, 165605, 165606, 165607, 165608, 165609, 165610, 165611, 165612, 165613, 165614, 165615, 165616, 165617) c6( ) c7(T, apM, aPQ, eM, aPR, hb, aW, ha, aPS, aT, U, Lq, aPT, ci, nA, aR, rY, aOX); #c1(CLN6) c2(NP_060352) c3(ceroid-lipofuscinosis neuronal protein 6) c4(195543, 195544, 195545) c5(195546, 195547, 195548, 195549, 195550, 195551, 195552, 195553, 195554, 195555, 195556, 195557, 195558, 195559, 195560, 195561, 195562, 195563) c6( ) c7(aPQ, aPU, U, yZ, Lq, K, aPT, yU, rY); #c1(CLN8) c2(NP_061764) c3(protein CLN8) c4(200454) c5(200455, 200456, 200457, 200458, 200459, 200460) c6( ) c7(vU, aPV, ha, HN, aPS, nA, rY); #c1(CLNK) c2(NP_443196) c3(cytokine-dependent hematopoietic cell linker) c4( ) c5(229795, 229796, 229797, 229798, 229799, 229800, 229801, 229802, 229803, 229804, 229805, 229806, 229807, 229808, 229809, 229810, 229811, 229812, 229813, 229814) c6( ) c7(gk, c, aI, EQ, qj); #c1(CLNK) c2(XP_011512076) c3(cytokine-dependent hematopoietic cell linker isoform X1) c4(302721) c5( ) c6( ) c7(gk, c, aI, EQ, qj); #c1(CLNK) c2(XP_011512077) c3(cytokine-dependent hematopoietic cell linker isoform X2) c4(302722, 302723) c5(302724, 302725) c6( ) c7(gk, c, aI, EQ, qj); #c1(CLNSIA) c2(NP_001284) c3(methylosome subunit PlCln) c4(112396) c5( ) c6( ) c7(Y); #c1(CLOCK) c2(NP_004889) c3(circadian locomoter output cycles protein kaput) c4(150578) c5(150579, 150580, 150581, 150582, 150583, 150584, 150585, 150586, 150587, 150588, 150589, 150590, 150591, 150592, 150593) c6( ) c7(bM, T, ea, e, bO, gf, iX, ta, hu, aW, fc, cm, mZ, iA, cj, uJ, dD, gU, aQc, n, aj, fr, ct, Nv, mY, mV, he, mU, Jj, aPZ, fe, cM, aQb, mX, hq, cA, hk, mg, vL, aPX, jd, mT, bL, jx, Nt, cz, mS, ti, v, q, J, eA, aPW, MR, hb, aqI, aT, bK, ae, af, iO, nO, Y, r, en, iK, bN, aPY, pH, Dy, aQd, jh, Gd, bS, eq, Fc, ad, dP, oz, mW, sO, Os, aQa, na, d, aaB, ff, dq, Z, es, bE, ei, y, aqD); #c1(CLP1) c2(NP_001136069) c3(polyribonucleotide 5′-hydroxyl-kinase Clp1 isoform 2) c4(54253) c5(54254, 54255, 54256, 54257, 54258, 54259, 54260, 54261, 54262, 54263, 54264, 54265, 54266, 54267, 54268, 54269, 54270, 54271) c6( ) c7(Ae, QK, jW, oj, Ak); #c1(CLP1) c2(NP_006822) c3(polyribonucleotide 5′-hydroxyl-kinase Clp1 isoform 1) c4(168407, 168408, 168409, 168410) c5(168411, 168412, 168413, 168414, 168415, 168416, 168417, 168418, 168419, 168420, 168421, 168422, 168423, 168424, 168425, 168426) c6( ) c7(Ae, QK, jW, oj, Ak); #c1(CLPP) c2(NP_006003) c3(ATP-dependent Clp protease proteolytic subunit, mitochondrial precursor) c4(161116) c5(161117, 161118, 161119, 161120, 161121, 161122) c6( ) c7(K, Bh, aQf, aQg, aQe); #c1(CLPS) c2(NP_001239527) c3(colipase isoform 3 preproprotein) c4(88470) c5(88471, 88472, 88473, 88474, 88475, 88476) c6( ) c7(bL, aj, v, K, bq, J); #c1(CLPS) c2(NP_001823) c3(colipase isoform 1 preproprotein) c4(121504) c5(121505, 121506, 121507, 121508, 121509, 121510) c6( ) c7(bL, aj, v, K, bq, J); #c1(CLPTM1) c2(NP_001269104) c3(cleft lip and palate transmembrane protein 1 isoform 3) c4(100443) c5(100444, 100445, 100446, 100447, 100448, 100449) c6( ) c7(Na, T, apM, eM, Y, Nc, bz, ad); #c1(CLPTM1) c2(NP_001269105) c3(cleft lip and palate transmembrane protein 1 isoform 4) c4( ) c5(100450, 100451, 100452, 100453, 100454) c6( ) c7(Na, T, apM, eM, Y, Nc, bz, ad); #c1(CLPTM1) c2(NP_001285) c3(cleft lip and palate transmembrane protein 1 isoform 2) c4(112397, 112398, 112399) c5(112400, 112401, 112402, 112403, 112404, 112405, 112406, 112407, 112408, 112409, 112410, 112411, 112412) c6( ) c7(Na, T, apM, eM, Y, Nc, bz, ad); #c1(CLPTM1L) c2(NP_110409) c3(cleft lip and palate transmembrane protein 1-like protein) c4(220120, 220121) c5(220122, 220123, 220124, 220125, 220126, 220127, 220128, 220129, 220130, 220131, 220132, 220133) c6( ) c7(T, aC, yk, if, NT, bB, aj, hy, j, qN, q, ad, eA, av, aE, amJ, afQ, aT, hn, dL, af, vT, aW, Y, ff, r, kp, en, bu, g, t, iK, bz, sS, eM, bE, hk, Lb, m, it, iu); #c1(CLRN1) c2(NP_001182723) c3(clarin-1 isoform d) c4(75154) c5(75155, 75156, 75157, 75158, 75159, 75160) c6( ) c7(mG, aQi, aQj, oc, nw, nk, nC, aQh); #c1(CLRN1) c2(NP_001243748) c3(clarin-1 isoform e) c4( ) c5(91640) c6( ) c7(mG, aQi, aQj, oc, nw, nk, nC, aQh); #c1(CLRN1) c2(NP_443721) c3(clarin-1 isoform c) c4(230004, 230005) c5(230006, 230007, 230008, 230009, 230010, 230011, 230012, 230013, 230014, 230015, 230016) c6( ) c7(mG, aQi, aQj, oc, nw, nk, nC, aQh); #c1(CLRN1) c2(NP_777367) c3(clarin-1 isoform a) c4(251108) c5(251109, 251110, 251111, 251112, 251113, 251114) c6( ) c7(mG, aQi, aQj, oc, nw, nk, nC, aQh); #c1(CLSPN) c2(XP_011540241) c3(claspin isoform X2) c4(338641) c5(338642, 338643, 338644, 338645, 338646, 338647) c6( ) c7(T, aW, if, aT, bK, ci, K, m, bC, qN); #c1(CLSPN) c2(XP_011540244) c3(claspin isoform X5) c4(338648) c5(338649, 338650, 338651, 338652, 338653, 338654) c6( ) c7(T, aW, if, aT, bK, ci, K, m, bC, qN); #c1(CLSTN1) c2(NP_001289812) c3(calsyntenin-1 isoform 3 precursor) c4(114637, 114638) c5(114639, 114640, 114641, 114642, 114643, 114644, 114645, 114646, 114647, 114648, 114649, 114650, 114651, 114652, 114653, 114654, 114655, 114656, 114657, 114658, 114659, 114660) c6(114661, 114662, 114663, 114664, 114665, 114666) c7(T, d, oV, zb, r, fd, q, cm, ae, B, ad, Oe); #c1(CLSTN2) c2(NP_071414) c3(calsyntenin-2 precursor) c4(211544) c5(211545, 211546, 211547, 211548, 211549, 211550) c6( ) c7(fe, aq, FW, ot); #c1(CLTA) c2(NP_001070145) c3(clathrin light chain A isoform c) c4(34587) c5(34588, 34589, 34590, 34591, 34592, 34593) c6( ) c7(nO, eZ, jh, uu, ci, y, nC, Nh); #c1(CLTA) c2(NP_001171689) c3(clathrin light chain A isoform d) c4(71296) c5(71297, 71298, 71299, 71300, 71301, 71302, 71303, 71304, 71305, 71306) c6( ) c7(nO, eZ, jh, uu, ci, y, nC, Nh); #c1(CLTA) c2(NP_001171691) c3(clathrin light chain A isoform f) c4(71307) c5(71308, 71309, 71310, 71311, 71312, 71313) c6( ) c7(nO, eZ, jh, uu, ci, y, nC, Nh); #c1(CLTA) c2(NP_001824) c3(clathrin light chain A isoform a) c4(121511) c5(121512, 121513, 121514, 121515, 121516, 121517) c6( ) c7(nO, eZ, jh, uu, ci, y, nC, Nh); #c1(CLTA) c2(NP_009027) c3(clathrin light chain A isoform b) c4(170296) c5(170297, 170298, 170299, 170300, 170301, 170302, 170303, 170304, 170305, 170306) c6( ) c7(nO, eZ, jh, uu, ci, y, nC, Nh); #c1(CLTC) c2(NP_004850) c3(clathrin heavy chain 1 isoform 1) c4(150303) c5(150304, 150305, 150306, 150307, 150308, 150309) c6( ) c7(bv, T, agd, F, fM, d, aE, iA, dc, aW, HM, RX, jh, aT, h, fr, eA, ae, B, ad); #c1(CLTCL1) c2(NP_001826) c3(clathrin heavy chain 2 isoform 2) c4(121518) c5(121519, 121520, 121521, 121522, 121523, 121524) c6( ) c7(bv, ip); #c1(CLTCL1) c2(NP_009029) c3(clathrin heavy chain 2 isoform 1) c4(170307) c5(170308, 170309, 170310, 170311, 170312, 170313, 170314, 170315, 170316, 170317) c6( ) c7(bv, ip); #c1(CLU) c2(NP_001822) c3(clusterin preproprotein) c4(121463, 121464, 121465) c5(121466, 121467, 121468, 121469, 121470, 121471, 121472, 121473, 121474, 121475, 121476, 121477, 121478, 121479, 121480, 121481, 121482, 121483, 121484, 121485, 121486, 121487, 121488, 121489, 121490, 121491, 121492, 121493, 121494, 121495, 121496, 121497, 121498, 121499, 121500, 121501, 121502, 121503) c6( ) c7(gh, G, T, fV, ea, e, aI, if, bB, IN, ci, aR, aE, dV, K, wt, oi, H, MO, eL, cp, li, eG, dH, aW, aNb, hl, zC, g, as, hJ, eF, uC, cm, eY, ha, y, eM, AM, U, nw, Hb, m, R, iu, dt, dD, n, aj, ww, fr, qN, PJ, fK, cd, Mo, amB, ql, eV, dL, ia, aq, dw, cM, avN, W, vD, dB, hk, hL, E, uz, sa, it, B, L, bL, dA, DD, dK, eX, aA, cz, j, q, J, eA, Rl, Ig, aT, kf, cy, bK, bq, an, aFm, ae, af, eu, CB, Lu, aQk, s, oV, Y, Lf, bg, r, TQ, en, bu, cl, t, nC, iK, Qi, kP, pZ, lI, cS, np, dy, LS, VB, iW, aal, ha, jh, iD, oH, ah, eq, ad, aoH, Jm, fU, av, sO, abP, d, cH, ff, eH, eZ, aF, iV, bz, bF, D, Hw, gk, zr, bE, ME, lC, X, EB); #c1(CLU) c2(XP_006716347) c3(clusterin isoform X1) c4(290228, 290229, 290230, 290231) c5(290232, 290233, 290234, 290235, 290236, 290237, 290238, 290239, 290240, 290241, 290242, 290243, 290244, 290245, 290246, 290247, 290248, 290249, 290250, 290251, 290252, 290253, 290254, 290255, 290256, 290257, 290258, 290259, 290260, 290261) c6( ) c7(gh, G, T, fV, ea, e, aI, if, bB, lN, ci, aR, aE, dV, K, wt, oi, H, MO, eL, cp, li, eG, dH, aW, aNb, hl, zC, g, as, hJ, eF, uC, cm, eY, ha, y, eM, AM, U, nw, Hb, m, R, iu, dt, dD, n, aj, ww, fr, qN, PJ, fK, cd, Mo, amB, qI, eV, dL, ia, aq, dw, cM, avN, W, vD, dB, hk, hL, E, uz, sa, it, B, L, bL, dA, DD, dK, eX, aA, cz, j, g, J, eA, Rl, Ig, aT, kf, cy, bK, bq, an, aFm, ae, af, eu, CB, Lu, aQk, s, oV, Y, Lf, bg, r, TQ, en, bu, cl, t, nC, iK, Qi, kP, pZ, lI, cS, np, dy, LS, VB, iW, aaI, ha, jh, iD, oH, ah, eq, ad, aoH, Jm, fU, av, sO, abP, d, cH, ff, eH, eZ, aF, iV, bz, bF, D, Hw, gk, zr, bE, ME, IG, X, EB); #c1(CLUAP1) c2(NP_055856) c3(clusterin-associated protein 1 isoform 1) c4(183942) c5(183943, 183944, 183945, 183946, 183947, 183948, 183949, 183950, 183951, 183952, 183953) c6( ) c7(av, T, bE, bB, eF, X); #c1(CLUAP1) c2(NP_079069) c3(clusterin-associated protein 1 isoform 2) c4( ) c5(216883, 216884, 216885, 216886, 216887, 216888, 216889, 216890, 216891, 216892, 216893) c6( ) c7(av, T, bE, bB, eF, X); #c1(CLUAP1) c2(XP_006720930) c3(clusterin-associated protein 1 isoform X1) c4(293791, 293792) c5( ) c6( ) c7(av, T, bE, bB, eF, X); #c1(CLUL1) c2(NP_001275965) c3(clusterin-like protein 1 isoform a) c4(107547) c5(107548, 107549, 107550, 107551, 107552, 107553, 107554, 107555, 107556, 107557, 107558, 107559, 107560, 107561, 107562, 107563, 107564, 107565, 107566, 107567, 107568) c6(107569, 107570, 107571, 107572, 107573, 107574) c7(aT); #c1(CLUL1) c2(NP_055225) c3(clusterin-like protein 1 isoform b precursor) c4(179937) c5( ) c6( ) c7(aT); #c1(CLUL1) c2(XP_005258160) c3(clusterin-like protein 1 isoform X3) c4( ) c5(275535) c6( ) c7(aT); #c1(CLVS1) c2(NP_775790) c3(clavesin-1) c4(250317) c5(250318, 250319, 250320, 250321, 250322, 250323, 250324, 250325, 250326, 250327, 250328, 250329, 250330, 250331, 250332, 250333) c6( ) c7(B, af); #c1(CLVS1) c2(XP_011515773) c3(clavesin-1 isoform X2) c4(308575) c5( ) c6( ) c7(B, af); #c1(CLYBL) c2(NP_996531) c3(citrate lyase subunit beta-like protein, mitochondrial precursor) c4(264041, 264042) c5(264043, 264044, 264045, 264046, 264047, 264048, 264049, 264050, 264051, 264052, 264053, 264054, 264055, 264056, 264057, 264058) c6( ) c7(h, qs, bz, fh); #c1(CLYBL) c2(XP_005254088) c3(citrate lyase subunit beta-like protein, mitochondrial isoform X2) c4(272882, 272883, 272884, 272885, 272886) c5(272887, 272888, 272889, 272890, 272891, 272892, 272893, 272894, 272895, 272896, 272897, 272898, 272899, 272900, 272901, 272902, 272903, 272904, 272905, 272906, 272907, 272908, 272909, 272910, 272911, 272912, 272913, 272914, 272915, 272916, 272917, 272918, 272919, 272920) c6( ) c7(h, qs, bz, fh); #c1(CMA1) c2(NP_001827) c3(chymase preproprotein) c4(121525, 121526) c5(121527, 121528, 121529, 121530, 121531, 121532, 121533) c6( ) c7(bL, bM, T, dD, fM, fG, aw, jh, aA, cz, fd, j, ci, eq, pM, eA, ad, mj, cc, aQI, apJ, aT, DD, vc, vB, jy, K, hg, bq, fh, ae, eu, hm, uQ, uX, eG, d, aW, vj, eH, Ce, fe, aF, aB, aiz, dw, eE, eF, bz, cm, ac, aQm, z, bo, vy, uo, gZ, dy, bD, lC, vQ); #c1(CMAS) c2(NP_061156) c3(N-acylneuraminate cytidylyltransferase) c4(199638) c5(199639, 199640, 199641, 199642, 199643, 199644) c6( ) c7(T, d, py, oV, fc, cP, anx, fh, q, hv); #c1(CMC1) c2(NP_872329) c3(COX assembly mitochondrial protein homolog) c4(256132) c5(256133, 256134, 256135, 256136, 256137) c6( ) c7(Ck, Dg, aQn, aFy, Dj, fq); #c1(CMC2) c2(NP_064573) c3(COX assembly mitochondrial protein 2 homolog) c4(203041) c5(203042, 203043, 203044, 203045, 203046, 203047) c6( ) c7(dV, aT); #c1(CMC4) c2(NP_001018024) c3(cx9C motif-containing protein 4) c4(26873) c5(26874, 26875, 26876, 26877, 26878, 26879, 26880, 26881, 26882, 26883, 26884, 26885, 26886) c6( ) c7(ck, fM, Kk, qh, kH, atf, bC, bd, ho); #c1(CMIP) c2(NP_085132) c3(C-Maf-inducing protein isoform Tc-Mip) c4(219359, 219360, 219361) c5(219362, 219363, 219364, 219365, 219366, 219367, 219368, 219369, 219370, 219371, 219372, 219373) c6( ) c7(bL, Y, aw, VT, ah, yA, aha, Kg); #c1(CMIP) c2(NP_938204) c3(C-Maf-inducing protein isoform C-Mip) c4(259783) c5(259784, 259785, 259786, 259787, 259788, 259789) c6( ) c7(bL, Y, aw, VT, ah, yA, aha, Kq); #c1(CMIP) c2(XP_005256236) c3(C-Maf-inducing protein isoform X2) c4( ) c5(274013) c6( ) c7(bL, Y, aw, VT, ah, yA, aha, Kq); #c1(CMIP) c2(XP_011521655) c3(C-Maf-inducing protein isoform X3) c4( ) c5(316431, 316432, 316433, 316434, 316435) c6( ) c7(bL, Y, aw, VT, ah, yA, aha, Kq); #c1(CMKLR1) c2(NP_001135815) c3(chemokine-like receptor 1 isoform a) c4(53310, 53311, 53312, 53313) c5(53314, 53315, 53316, 53317, 53318, 53319, 53320, 53321, 53322, 53323, 53324, 53325, 53326, 53327, 53328, 53329, 53330, 53331, 53332, 53333, 53334, 53335, 53336, 53337, 53338, 53339, 53340) c6( ) c7(cZ, eM, aw, fc, cr, Vv, V, dd, y, aQo); #c1(CMKLR1) c2(NP_004063) c3(chemokine-like receptor 1 isoform b) c4( ) c5(143244, 143245, 143246, 143247, 143248, 143249, 143250, 143251) c6( ) c7(cZ, eM, aw, fc, cr, Vv, v, dd, y, aQo); #c1(CMPK2) c2(NP_001243406) c3(UMP-CMP kinase 2, mitochondrial isoform 2 precursor) c4( ) c5(90700, 90701, 90702, 90703, 90704, 90705) c6( ) c7(ck, x, T, hd, gU, aE, iU, afm, aW, if, hl, aT, h, hn, K, k, qN, eA, dr, MG); #c1(CMPK2) c2(NP_001243407) c3(UMP-CMP kinase 2, mitochondrial isoform 3 precursor) c4(90706) c5(90707, 90708, 90709, 90710, 90711, 90712) c6( ) c7(ck, x, T, hd, gU, aE, iU, afm, aW, if, hl, aT, h, hn, K, k, qN, eA, dr, MG); #c1(CMPK2) c2(NP_997198) c3(UMP-CMP kinase 2, mitochondrial isoform 1 precursor) c4(265158, 265159) c5(265160, 265161, 265162, 265163, 265164, 265165) c6( ) c7(ck, x, T, hd, gU, aE, iU, afm, aW, if, hl, aT, h, hn, K, k, qN, eA, dr, MG); #c1(CMSS1) c2(NP_001161396) c3(protein CMSS1 isoform 2) c4(65693) c5(65694, 65695, 65696, 65697, 65698, 65699) c6( ) c7(EQ); #c1(CMSS1) c2(NP_115735) c3(protein CMSS1 isoform 1) c4(223745) c5(223746, 223747, 223748, 223749, 223750, 223751) c6( ) c7(EQ); #c1(CMTM3) c2(NP_853531) c3(CKLF-like MARVEL transmembrane domain-containing protein 3) c4(255155, 255156) c5(255157, 255158, 255159, 255160, 255161, 255162, 255163, 255164, 255165, 255166, 255167, 255168, 255169, 255170) c6( ) c7(Lf, aF, ci, bu, aA); #c1(CMTM3) c2(XP_011521163) c3(CKLF-like MARVEL transmembrane domain-containing protein 3 isoform X2) c4( ) c5(316109, 316110, 316111, 316112, 316113, 316114) c6( ) c7(Lf, aF, ci, bu, aA); #c1(CMTM5) c2(NP_001032365) c3(CKLF-like MARVEL transmembrane domain-containing protein 5 isoform c) c4(31273) c5(31274, 31275, 31276, 31277, 31278, 31279) c6( ) c7(ck, T, ci, iT); #c1(CMTM5) c2(NP_001275673) c3(CKLF-like MARVEL transmembrane domain-containing protein 5 isoform d) c4(107018) c5(107019, 107020, 107021, 107022, 107023, 107024) c6( ) c7(ck, T, ci, iT); #c1(CMTM5) c2(NP_001275674) c3(CKLF-like MARVEL transmembrane domain-containing protein 5 isoform e) c4(107025) c5(107026, 107027, 107028, 107029, 107030, 107031) c6( ) c7(ck, T, ci, iT); #c1(CMTM5) c2(NP_001275675) c3(CKLF-like MARVEL transmembrane domain-containing protein 5 isoform f) c4(107032) c5(107033, 107034, 107035, 107036, 107037, 107038) c6( ) c7(ck, T, ci, iT); #c1(CMTM5) c2(NP_612469) c3(CKLF-like MARVEL transmembrane domain-containing protein 5 isoform a) c4(236614) c5(236615, 236616, 236617, 236618, 236619, 236620) c6( ) c7(ck, T, ci, iT); #c1(CMTM7) c2(NP_612419) c3(CKLF-like MARVEL transmembrane domain-containing protein 7 isoform a) c4(236421) c5(236422, 236423, 236424, 236425, 236426, 236427) c6( ) c7(if, cd, ci); #c1(CMTM7) c2(NP_852137) c3(CKLF-like MARVEL transmembrane domain-containing protein 7 isoform b) c4(254917) c5(254918, 254919, 254920, 254921, 254922, 254923) c6( ) c7(if, cd, ci); #c1(CMTM8) c2(NP_849199) c3(CKLF-like MARVEL transmembrane domain-containing protein 8) c4(254513) c5(254514, 254515, 254516, 254517, 254518, 254519) c6( ) c7(fq, bK, ac, pN); #c1(CMTR1) c2(NP_055865) c3(cap-specific mRNA (nucleoside-2′-O-)-methyltransferase 1) c4(184018) c5(184019, 184020, 184021, 184022, 184023, 184024) c6( ) c7(bv, aW, aw, g, aT); #c1(CMTR1) c2(XP_005249012) c3(cap-specific mRNA (nucleoside-2′-O-)-methyltransferase 1 isoform X1) c4(268850, 268851) c5(268852, 268853, 268854, 268855, 268856, 268857, 268858, 268859, 268860, 268861, 268862, 268863) c6( ) c7(bv, aW, aw, g, aT); #c1(CMTR1) c2(XP_006715091) c3(cap-specific mRNA (nucleoside-2′-O-)-methyltransferase 1 isoform X2) c4(288627, 288628) c5(288629, 288630, 288631, 288632, 288633, 288634, 288635, 288636, 288637, 288638, 288639, 288640, 288641, 288642, 288643, 288644) c6( ) c7(bv, aW, aw, g, aT); #c1(CMTR2) c2(NP_060818) c3(cap-specific mRNA (nucleoside-2′-O-)-methyltransferase 2) c4(197968) c5(197969, 197970, 197971, 197972, 197973, 197974, 197975, 197976, 197977, 197978) c6( ) c7(Y, kI, qK); #c1(CMYA5) c2(NP_705838) c3(cardiomyopathy-associated protein 5) c4(246319) c5(246320, 246321, 246322, 246323, 246324, 246325) c6( ) c7(oe, azK, km, cz, fq, af); #c1(CNBD1) c2(NP_775809) c3(cyclic nucleotide-binding domain-containing protein 1) c4(250382) c5(250383, 250384, 250385, 250386, 250387, 250388) c6( ) c7(bL); #c1(CNBP) c2(NP_001120664) c3(cellular nucleic acid-binding protein isoform 1) c4(44447) c5(44448, 44449, 44450, 44451, 44452, 44453) c6( ) c7(bL, T, dD, fM, qX, ea, axd, cz, bB, dG, j, aPl, v, eq, UX, GK, aT, jy, K, dQ, iU, xz, xs, fc, aPm, dq, aq, aaO, aac, GR, dR, nT, cP, ei, lM, B, vQ); #c1(CNBP) c2(NP_001120665) c3(cellular nucleic acid-binding protein isoform 2) c4(44454) c5(44455, 44456, 44457, 44458, 44459, 44460) c6( ) c7(bL, T, dD, fM, qX, ea, axd, cz, bB, dG, j, aPl, v, eq, UX, GK, aT, jy, K, dQ, iU, xz, xs, fc, aPm, dq, aq, aaO, aac, GR, dR, nT, cP, ei, lM, B, vQ); #c1(CNBP) c2(NP_001120666) c3(cellular nucleic acid-binding protein isoform 4) c4(44461) c5(44462, 44463, 44464, 44465, 44466, 44467) c6( ) c7(bL, T, dD, fM, qX, ea, axd, cz, bB, dG, j, aPl, v, eq, UX, GK, aT, jy, K, dQ, iU, xz, xs, fc, aPm, dq, aq, aaO, aac, GR, dR, nT, cP, ei, lM, B, vQ); #c1(CNBP) c2(NP_001120668) c3(cellular nucleic acid-binding protein isoform 6) c4(44468) c5(44469, 44470, 44471, 44472, 44473, 44474) c6( ) c7(bL, T, dD, fM, qX, ea, axd, cz, bB, dG, j, aPl, v, eq, UX, GK, aT, jy, K, dQ, iU, xz, xs, fc, aPm, dq, aq, aaO, aac, GR, dR, nT, cP, ei, lM, B, vQ); #c1(CNBP) c2(NP_003409) c3(cellular nucleic acid-binding protein isoform 3) c4(138238, 138239) c5(138240, 138241, 138242, 138243, 138244, 138245, 138246, 138247, 138248, 138249, 138250, 138251, 138252) c6( ) c7(bL, T, dD, fM, qX, ea, axd, cz, bB, dG, j, aPl, v, eq, UX, GK, aT, jy, K, dQ, iU, xz, xs, fc, aPm, dq, aq, aaO, aac, GR, dR, nT, cP, ei, lM, B, vQ); #c1(CNDP1) c2(NP_116038) c3(beta-Ala-His dipeptidase precursor) c4(225280) c5(225281, 225282, 225283, 225284, 225285, 225286) c6( ) c7(bL, T, A, eR, c, aQp, aI, fP, aj, dG, dy, j, nA, aY); #c1(CNDP2) c2(NP_001161971) c3(cytosolic non-specific dipeptidase isoform 2) c4(66309) c5(66310, 66311, 66312, 66313, 66314, 66315) c6( ) c7(bL, ck, T, A, aE, cA, eR, iL, rA, aA, aj, aF, dy, bt, Df, B, J); #c1(CNDP2) c2(XP_011524374) c3(cytosolic non-specific dipeptidase isoform X1) c4(319011) c5(319012, 319013, 319014, 319015, 319016, 319017) c6( ) c7(bL, ck, T, A, aE, cA, eR, iL, rA, aA, aj, aF, dy, bt, Df, B, J); #c1(CNGA1) c2(NP_001136036) c3(cGMP-gated cation channel alpha-1 isoform 1) c4(54097, 54098, 54099) c5(54100, 54101, 54102, 54103, 54104, 54105, 54106, 54107, 54108, 54109, 54110, 54111, 54112) c6( ) c7(aQq, nC, IR); #c1(CNGA1) c2(XP_005248106) c3(cGMP-gated cation channel alpha-1 isoform X1) c4(268184) c5(268185, 268186, 268187, 268188, 268189, 268190, 268191, 268192, 268193, 268194, 268195, 268196, 268197, 268198, 268199, 268200, 268201, 268202, 268203, 268204, 268205, 268206, 268207, 268208, 268209, 268210, 268211) c6( ) c7(aQq, nC, IR); #c1(CNGA3) c2(NP_001073347) c3(cyclic nucleotide-gated cation channel alpha-3 isoform 2) c4(35973) c5(35974, 35975, 35976, 35977, 35978, 35979) c6( ) c7(aQs, KE, lR, mA, nx, aQr, nw, aQt, aQu, aCi); #c1(CNGB1) c2(NP_001129111) c3(cyclic nucleotide-gated cation channel beta-1 isoform b) c4(50799) c5(50800, 50801, 50802, 50803, 50804, 50805) c6( ) c7(sb, bM, aQv, aIx, lR, aDR, aQw, nk, nC, oc, aDQ); #c1(CNGB1) c2(XP_006721197) c3(cyclic nucleotide-gated cation channel beta-1 isoform X1) c4(293889) c5(293890, 293891, 293892, 293893, 293894, 293895) c6( ) c7(sb, bM, aQv, aIx, lR, aDR, aQw, nk, nC, oc, aDQ); #c1(CNGB3) c2(NP_061971) c3(cyclic nucleotide-gated cation channel beta-3) c4(201356) c5(201357, 201358, 201359, 201360, 201361, 201362) c6( ) c7(IR, nb, W, mA, aQr, aQx, nw, aQu, cd); #c1(CNIH3) c2(NP_689708) c3(protein cornichon homolog 3) c4(243653) c5(243654, 243655, 243656, 243657, 243658, 243659) c6( ) c7(dP, bM); #c1(CNKSR1) c2(NP_001284576) c3(connector enhancer of kinase suppressor of ras 1 isoform 2) c4(112070, 112071) c5(112072, 112073, 112074, 112075, 112076, 112077) c6( ) c7(Sw, Bl, T, aW, if, ha, aT, m, nA, ci, t, gT, qN, aQy); #c1(CNKSR2) c2(NP_001162118) c3(connector enhancer of kinase suppressor of ras 2 isoform 2) c4(66320) c5(66321, 66322, 66323, 66324, 66325, 66326) c6( ) c7(W, v, aR); #c1(CNKSR2) c2(NP_001162119) c3(connector enhancer of kinase suppressor of ras 2 isoform 3) c4( ) c5(66327, 66328, 66329, 66330, 66331, 66332) c6( ) c7(W, v, aR); #c1(CNKSR2) c2(NP_001162120) c3(connector enhancer of kinase suppressor of ras 2 isoform 4) c4( ) c5(66333, 66334, 66335, 66336, 66337) c6( ) c7(W, v, aR); #c1(CNKSR2) c2(NP_055742) c3(connector enhancer of kinase suppressor of ras 2 isoform 1) c4(183221, 183222) c5(183223, 183224, 183225, 183226, 183227, 183228) c6( ) c7(W, v, aR); #c1(CNKSR2) c2(XP_011543774) c3(connector enhancer of kinase suppressor of ras 2 isoform X2) c4(342888) c5(342889) c6( ) c7(W, v, aR); #c1(CNKSR3) c2(NP_775786) c3(connector enhancer of kinase suppressor of ras 3) c4(250302, 250303) c5(250304, 250305, 250306, 250307, 250308, 250309, 250310) c6( ) c7(sk, bM, iM, je, aDy, Y, oe, Ne, bK, an, B, iP); #c1(CNKSR3) c2(XP_011533787) c3(connector enhancer of kinase suppressor of ras 3 isoform X1) c4(329927) c5(329928, 329929, 329930, 329931, 329932, 329933, 329934, 329935, 329936, 329937, 329938) c6( ) c7(sk, bM, iM, je, aDy, Y, oe, Ne, bK, an, B, iP); #c1(CNN1) c2(NP_001290) c3(calponin-1) c4( ) c5( ) c6( ) c7(B, X, mx, eH, K, uE, eF, cd); #c1(CNN1) c2(XP_011525991) c3(calponin-1 isoform X1) c4( ) c5(320363) c6( ) c7(B, X, mx, eH, K, uE, eF, cd); #c1(CNN1) c2(XP_011525992) c3(calponin-1 isoform X2) c4(320364, 320365) c5(320366) c6( ) c7(B, X, mx, eH, K, uE, eF, cd); #c1(CNN2) c2(NP_004359) c3(calponin-2 isoform a) c4(145655, 145656) c5(145657, 145658, 145659, 145660, 145661, 145662, 145663, 145664, 145665, 145666, 145667, 145668) c6( ) c7(By, ae, fr, ad); #c1(CNN2) c2(NP_958434) c3(calponin-2 isoform b) c4(262070) c5(262071, 262072, 262073, 262074, 262075, 262076) c6( ) c7(By, ae, fr, ad); #c1(CNNM1) c2(NP_065081) c3(metal transporter CNNM1) c4(203743, 203744, 203745) c5(203746, 203747, 203748, 203749, 203750, 203751, 203752, 203753, 203754, 203755, 203756, 203757, 203758, 203759, 203760, 203761, 203762, 203763) c6( ) c7(Ae, Y, ac, oj); #c1(CNNM1) c2(XP_005269749) c3(metal transporter CNNM1 isoform X3) c4(282746) c5(282747, 282748, 282749, 282750, 282751, 282752) c6( ) c7(Ae, Y, ac, oj); #c1(CNNM1) c2(XP_011537931) c3(metal transporter CNNM1 isoform X1) c4(335437) c5(335438, 335439, 335440, 335441, 335442, 335443) c6( ) c7(Ae, Y, ac, oj); #c1(CNNM2) c2(NP_060119) c3(metal transporter CNNM2 isoform 1) c4(194248, 194249) c5(194250, 194251, 194252, 194253, 194254, 194255, 194256, 194257, 194258, 194259, 194260, 194261) c6( ) c7(aQz, Kk, cz, dr, nA, an, Wl, ae, agZ, ad); #c1(CNNM2) c2(NP_951058) c3(metal transporter CNNM2 isoform 2) c4(261016, 261017) c5(261018, 261019, 261020, 261021, 261022, 261023, 261024, 261025, 261026, 261027, 261028, 261029) c6( ) c7(aQz, Kk, cz, dr, nA, an, Wl, ae, agZ, ad); #c1(CNNM2) c2(NP_951059) c3(metal transporter CNNM2 isoform 3) c4(261030, 261031) c5(261032, 261033, 261034, 261035, 261036, 261037, 261038, 261039, 261040, 261041, 261042, 261043) c6( ) c7(aQz, Kk, cz, dr, nA, an, Wl, ae, agZ, ad); #c1(CNNM4) c2(NP_064569) c3(metal transporter CNNM4 precursor) c4(203027) c5(203028, 203029, 203030, 203031, 203032, 203033) c6( ) c7(aQA, Rz, aQB, Ry, oQ, nC, Ud); #c1(CNNM4) c2(XP_005263972) c3(metal transporter CNNM4 isoform X2) c4(278630) c5(278631, 278632, 278633, 278634, 278635, 278636) c6( ) c7(aQA, Rz, aQB, Ry, oQ, nC, Ud); #c1(CNOT1) c2(NP_001252541) c3(CCR4-NOT transcription complex subunit 1 isoform c) c4(94226) c5(94227, 94228, 94229, 94230, 94231, 94232, 94233, 94234, 94235, 94236, 94237) c6( ) c7(T, alC, d, EQ, fd, h, eA, hX); #c1(CNOT1) c2(NP_057368) c3(CCR4-NOT transcription complex subunit 1 isoform a) c4(190397, 190398, 190399) c5(190400, 190401, 190402, 190403, 190404, 190405, 190406, 190407, 190408, 190409, 190410, 190411, 190412, 190413, 190414, 190415, 190416, 190417, 190418) c6( ) c7(T, alC, d, EQ, fd, h, eA, hX); #c1(CNOT1) c2(NP_996882) c3(CCR4-NOT transcription complex subunit 1 isoform b) c4(264797, 264798) c5(264799, 264800, 264801, 264802, 264803, 264804) c6( ) c7(T, alC, d, EQ, fd, h, eA, hX); #c1(CNOT2) c2(NP_055330) c3(CCR4-NOT transcription complex subunit 2) c4(180521, 180522, 180523) c5(180524, 180525, 180526, 180527, 180528, 180529, 180530, 180531, 180532, 180533, 180534, 180535, 180536, 180537, 180538, 180539, 180540, 180541, 180542, 180543) c6( ) c7(bB, cd, bE, j, abW); #c1(CNOT2) c2(XP_006719492) c3(CCR4-NOT transcription complex subunit 2 isoform X2) c4(292568) c5( ) c6( ) c7(bB, cd, bE, j, abW); #c1(CNOT2) c2(XP_006719496) c3(CCR4-NOT transcription complex subunit 2 isoform X5) c4( ) c5(292569, 292570, 292571, 292572, 292573, 292574) c6( ) c7(bB, cd, bE, j, abW); #c1(CNOT2) c2(XP_011536703) c3(CCR4-NOT transcription complex subunit 2 isoform X6) c4(334247) c5(334248, 334249, 334250, 334251, 334252, 334253, 334254, 334255, 334256, 334257, 334258, 334259) c6( ) c7(bB, cd, bE, j, abW); #c1(CNOT3) c2(NP_055331) c3(CCR4-NOT transcription complex subunit 3) c4(180544, 180545) c5(180546, 180547, 180548, 180549, 180550, 180551, 180552, 180553, 180554, 180555, 180556, 180557, 180558, 180559, 180560, 180561, 180562, 180563, 180564, 180565, 180566, 180567, 180568, 180569, 180570, 180571, 180572, 180573, 180574, 180575, 180576, 180577, 180578) c6( ) c7(mR, s, eM, bj, nw, K, m, nC, cd); #c1(CNOT3) c2(XP_011545832) c3(CCR4-NOT transcription complex subunit 3 isoform X3) c4(344762) c5(344763, 344764, 344765, 344766, 344767, 344768) c6( ) c7(mR, s, eM, bj, nw, K, m, nC, cd); #c1(CNOT3) c2(XP_011545833) c3(CCR4-NOT transcription complex subunit 3 isoform X5) c4( ) c5(344769, 344770, 344771, 344772, 344773, 344774) c6( ) c7(mR, s, eM, bj, nw, K, m, nC, cd); #c1(CNOT4) c2(NP_001008226) c3(CCR4-NOT transcription complex subunit 4 isoform b) c4(22930) c5(22931, 22932, 22933, 22934, 22935, 22936) c6( ) c7(bz); #c1(CNOT4) c2(NP_001177776) c3(CCR4-NOT transcription complex subunit 4 isoform c) c4(73006) c5(73007, 73008, 73009, 73010, 73011, 73012) c6( ) c7(bz); #c1(CNOT4) c2(NP_001177777) c3(CCR4-NOT transcription complex subunit 4 isoform d) c4(73013, 73014) c5(73015, 73016, 73017, 73018, 73019, 73020, 73021, 73022, 73023, 73024, 73025, 73026, 73027, 73028, 73029, 73030) c6( ) c7(bz); #c1(CNOT4) c2(NP_001177778) c3(CCR4-NOT transcription complex subunit 4 isoform e) c4(73031) c5(73032, 73033, 73034, 73035, 73036, 73037) c6( ) c7(bz); #c1(CNOT4) c2(NP_001177779) c3(CCR4-NOT transcription complex subunit 4 isoform f) c4(73038, 73039) c5(73040, 73041, 73042, 73043, 73044, 73045, 73046, 73047, 73048, 73049, 73050, 73051) c6( ) c7(bz); #c1(CNOT4) c2(NP_037448) c3(CCR4-NOT transcription complex subunit 4 isoform a) c4(175565) c5(175566, 175567, 175568, 175569, 175570, 175571, 175572) c6( ) c7(bz); #c1(CNOT6) c2(NP_001290170) c3(CCR4-NOT transcription complex subunit 6) c4(115010) c5(115011, 115012, 115013, 115014, 115015, 115016, 115017, 115018, 115019, 115020) c6( ) c7(bM, eX, CH, cL, V, aR, o, kH, h, eV, vB, bA, Nr, A, je, xR, Y, cr, eZ, aEz, po, eE, aEx, DF, Nq, cT, eU, iM, Jr, vZ, hc, mx, i, y, aEy); #c1(CNOT6L) c2(NP_653172) c3(CCR4-NOT transcription complex subunit 6-like) c4( ) c5(238935, 238936, 238937, 238938, 238939, 238940, 238941, 238942, 238943) c6( ) c7(bM); #c1(CNOT6L) c2(XP_011530109) c3(CCR4-NOT transcription complex subunit 6-like isoform X2) c4(326025) c5(326026) c6( ) c7(bM); #c1(CNOT7) c2(NP_037486) c3(CCR4-NOT transcription complex subunit 7 isoform 1) c4(175808, 175809, 175810) c5(175811, 175812, 175813, 175814, 175815, 175816) c6( ) c7(f, q, r, aT); #c1(CNOT7) c2(NP_473367) c3(CCR4-NOT transcription complex subunit 7 isoform 2) c4(230432) c5(230433, 230434, 230435, 230436, 230437, 230438, 230439, 230440, 230441, 230442, 230443, 230444, 230445, 230446, 230447, 230448, 230449, 230450) c6( ) c7(f, q, r, aT); #c1(CNOT8) c2(NP_001288003) c3(CCR4-NOT transcription complex subunit 8 isoform 2) c4(113366, 113367, 113368) c5(113369, 113370, 113371, 113372, 113373, 113374, 113375, 113376, 113377, 113378, 113379, 113380, 113381, 113382, 113383, 113384, 113385, 113386, 113387, 113388, 113389, 113390, 113391, 113392, 113393, 113394, 113395, 113396, 113397) c6( ) c7(lo, aT); #c1(CNOT8) c2(NP_001288011) c3(CCR4-NOT transcription complex subunit 8 isoform 3) c4(113398) c5(113399, 113400, 113401, 113402, 113403, 113404, 113405, 113406, 113407, 113408, 113409, 113410, 113411, 113412, 113413, 113414, 113415, 113416, 113417) c6( ) c7(lo, aT); #c1(CNOT8) c2(NP_001288015) c3(CCR4-NOT transcription complex subunit 8 isoform 4) c4( ) c5(113425, 113426, 113427, 113428, 113429) c6( ) c7(lo, aT); #c1(CNOT8) c2(NP_004770) c3(CCR4-NOT transcription complex subunit 8 isoform 1) c4(149452, 149453, 149454, 149455, 149456, 149457, 149458, 149459) c5(149460, 149461, 149462, 149463, 149464, 149465, 149466, 149467, 149468, 149469, 149470, 149471, 149472, 149473, 149474, 149475, 149476, 149477, 149478, 149479, 149480, 149481, 149482, 149483, 149484, 149485, 149486, 149487, 149488, 149489, 149490, 149491, 149492, 149493, 149494, 149495, 149496, 149497, 149498, 149499, 149500, 149501, 149502, 149503) c6( ) c7(lo, aT); #c1(CNP) c2(NP_149124) c3(2′,3′-cyclic-nucleotide 3′-phosphodiesterase) c4(227319, 227320, 227321) c5(227322, 227323, 227324, 227325, 227326, 227327, 227328, 227329) c6( ) c7(bM, dD, aQC, ea, cz, aNN, vr, GC, bS, ah, ct, eq, mF, V, Fc, cd, fm, rD, hP, he, af, d, aq, si, as, Z, Hv, B, vQ); #c1(CNP) c2(XP_011522642) c3(2′,3′-cyclic-nucleotide 3′-phosphodiesterase isoform X1) c4(317180) c5(317181, 317182, 317183, 317184, 317185, 317186, 317187, 317188, 317189, 317190, 317191, 317192, 317193, 317194, 317195, 317196) c6( ) c7(bM, dD, aQC, ea, cz, aNN, vr, GC, bS, ah, ct, eq, mF, V, Fc, cd, fm, rD, hP, he, af, d, aq, si, as, Z, Hv, B, vQ); #c1(CNPY2) c2(NP_055070) c3(protein canopy homolog 2 isoform 1 precursor) c4(178747, 178748) c5(178749, 178750, 178751, 178752, 178753, 178754, 178755, 178756, 178757, 178758, 178759, 178760) c6( ) c7(aA); #c1(CNPY3) c2(NP_006577) c3(protein canopy homolog 3 precursor) c4(166343, 166344) c5(166345, 166346, 166347, 166348, 166349, 166350, 166351, 166352, 166353, 166354, 166355) c6( ) c7(U, kB); #c1(CNPY3) c2(XP_005248874) c3(protein canopy homolog 3 isoform X4) c4( ) c5(268710) c6( ) c7(U, kB); #c1(CNR1) c2(NP_001153731) c3(cannabinnid receptor 1 isoform a) c4(60917, 60918) c5(60919, 60920, 60921, 60922, 60923, 60924, 60925, 60926, 60927, 60928, 60929, 60930, 60931, 60932, 60933, 60934, 60935, 60936, 60937, 60938, 60939, 60940, 60941, 60942, 60943, 60944, 60945, 60946, 60947, 60948, 60949, 60950) c6( ) c7(T, uK, aC, ea, e, aI, Ir, bO, gf, VV, aQF, hv, Bc, iX, K, qM, dQ, aW, fc, hl, aB, as, cm, eM, Gs, U, vy, sv, Xu, dD, aw, aj, ct, Vs, IG, jy, eV, he, ge, fQ, fe, kp, hq, ar, aap, ok, hk, Ei, lB, cB, abW, B, jd, bL, Dh, hU, jx, eX, cz, v, j, il, V, q, J, eA, eJ, uT, DK, rS, agI, HC, aT, bK, bq, an, ae, bA, Y, yL, r, cu, HL, xw, FT, bN, pH, rR, vK, ac, mf, jh, Gd, bS, uu, jE, eq, qi, ad, tX, dP, HE, aQE, F, afm, Sb, Gv, gC, gI, dq, iV, Z, jb, HP, aQG, gZ, Rm, ei, ra, y, aqw, xg, iu, aQD); #c1(CNR1) c2(NP_149421) c3(cannabinoid receptor 1 isoform b) c4(227653, 227654) c5(227655, 227656, 227657, 227658, 227659, 227660, 227661, 227662, 227663, 227664, 227665, 227666) c6( ) c7(T, uK, aC, ea, e, aI, Ir, bO, gf, VV, aQF, bv, Bc, iX, K, qM, dQ, aW, fc, hl, aB, as, cm, eM, Gs, U, vy, sv, Xu, dD, aw, aj, ct, Vs, IG, jy, eV, he, ge, fQ, fe, kp, hq, ar, aap, ok, hk, Ei, lB, cB, abW, B, jd, bL, Dh, hU, jx, eX, cz, v, j, iI, V, q, J, eA, eJ, uT, DK, rS, aqI, HC, aT, bK, bq, an, ae, bA, Y, yL, r, cu, HL, xw, FT, bN, pH, rR, vK, ac, mf, jh, Gd, bS, uu, jE, eq, qi, ad, tX, dP, HE, aQE, F, afm, Sb, Gv, gC, gI, dg, iV, Z, jb, HP, aQG, gZ, Rm, ei, ra, y, aqw, xg, iu, aQD); #c1(CNR2) c2(XP_011538931) c3(cannabinoid receptor 2 isoform X1) c4(337003) c5(337004, 337005, 337006, 337007, 337008, 337009, 337010, 337011, 337012, 337013) c6( ) c7(bL, aC, dD, ea, e, My, aI, jx, aw, bS, eq, ct, V, cd, ad, ai, eJ, ke, F, Bc, aT, cy, bK, K, ji, DY, af, bc, bA, aW, hI, zD, fe, gu, Z, jT, cm, jb, pb, ck, ar, kT, ok, rR, c, nB, yE, hk, Gs, U, bt, eo, y, IB, aen, B, vi); #c1(CNRIP1) c2(NP_001104571) c3(CBI cannabinoid receptor-interacting protein 1 isoform CRIP1b) c4(42186) c5(42187, 42188, 42189, 42190, 42191, 42192) c6( ) c7(bM, T, s, aW, eH, aT, j, eF); #c1(CNRIP1) c2(NP_056278) c3(CBI cannabinoid receptor-interacting protein 1 isoform CRIP1a) c4(186900) c5(186901, 186902, 186903, 186904, 186905, 186906) c6( ) c7(bM, T, s, aW, eH, aT, j, eF); #c1(CNST) c2(NP_001132931) c3(consortin isoform 2) c4(52674, 52675) c5(52676, 52677, 52678, 52679, 52680, 52681, 52682, 52683, 52684, 52685, 52686, 52687) c6( ) c7(hz); #c1(CNST) c2(NP_689822) c3(consortin isoform 1) c4(244023) c5(244024, 244025, 244026, 244027, 244028, 244029) c6( ) c7(hz); #c1(CNTF) c2(NP_000605) c3(ciliary neurotrophic factor) c4(13678) c5(13679, 13680, 13681, 13682, 13683, 13684, 13685) c6(13686) c7(cZ, lT, Ol, eX, ti, aj, bS, Vd, ct, gf, PJ, fu, dG, V, bX, v, J, eA, eW, ke, fm, aqI, HC, eV, aaw, bU, dd, yo, d, lR, s, aq, as, dw, Z, nC, cm, bJ, ck, rR, W, c, U, nw, eo, B, de); #c1(CNTFR) c2(NP_001193940) c3(ciliary neurotrophic factor receptor subunit alpha preproprotein) c4(83258, 83259) c5(83260, 83261, 83262, 83263, 83264, 83265, 83266, 83267, 83268, 83269) c6( ) c7(hM, af, c, aqI, aQH, eA, bJ); #c1(CNTFR) c2(XP_011516009) c3(ciliary neurotrophic factor receptor subunit alpha isoform X1) c4( ) c5(309221, 309222, 309223, 309224, 309225, 309226) c6( ) c7(hM, af, c, aqI, aQH, eA, bJ); #c1(CNTLN) c2(NP_001107867) c3(centlein isoform 2) c4(43054) c5(43055, 43056, 43057, 43058, 43059, 43060) c6( ) c7(bM, T, nD, ago, ac, QK, et, dB, aW, aT, gZ, dz, aj, m, Nh, t, iK, B, J); #c1(CNTLN) c2(NP_060208) c3(centlein isoform 1) c4(194747, 194748) c5(194749, 194750, 194751, 194752, 194753, 194754, 194755, 194756, 194757, 194758, 194759, 194760) c6( ) c7(bM, T, nD, ago, ac, QK, et, dB, aW, aT, gZ, dz, aj, m, Nh, t, iK, B, J); #c1(CNTLN) c2(XP_011516242) c3(centlein isoform X2) c4(309475) c5(309476, 309477, 309478, 309479, 309480, 309481) c6( ) c7(bM, T, nD, ago, ac, QK, et, dB, aW, aT, gZ, dz, aj, m, Nh, t, iK, B, J); #c1(CNTN1) c2(NP_001242993) c3(contactin-1 isoform 3 precursor) c4(89466, 89467) c5(89468, 89469, 89470, 89471, 89472, 89473, 89474, 89475, 89476, 89477, 89478, 89479, 89480, 89481, 89482, 89483, 89484, 89485, 89486, 89487, 89488, 89489, 89490, 89491, 89492, 89493, 89494, 89495, 89496, 89497, 89498, 89499, 89500, 89501, 89502, 89503, 89504, 89505) c6( ) c7(iu, aw, ht, ff, oj, Ad, en, hu, g, aQI, bz, eA); #c1(CNTN1) c2(NP_778203) c3(contactin-1 isoform 2 precursor) c4(251375) c5(251376, 251377, 251378, 251379, 251380, 251381) c6( ) c7(iu, aw, ht, ff, oj, Ad, en, hu, g, aQI, bz, eA); #c1(CNTN1) c2(XP_011536229) c3(contactin-1 isoform X1) c4(333544, 333545, 333546, 333547) c5(333548, 333549, 333550, 333551, 333552, 333553, 333554, 333555, 333556, 333557) c6( ) c7(iu, aw, ht, ff, oj, Ad, en, hu, g, aQI, bz, eA); #c1(CNTN2) c2(NP_005067) c3(contactin-2 precursor) c4(152573) c5(152574, 152575, 152576, 152577, 152578, 152579) c6( ) c7(T, fM, dA, ha, fN, Fc, pd, ai, Pm, aQJ, eA, rw, kH, Ne, h, rB, mH, d, je, Y, An, as, QK, t, aJx, ans, ck, iM, ac, Ew, apO, yW, aiS, m, y); #c1(CNTN3) c2(NP_065923) c3(contactin-3 precursor) c4(206279) c5(206280, 206281, 206282, 206283, 206284, 206285) c6( ) c7(ck, cc, anR, aW, fJ, aT, fd, j, ae, ad, bN, mu); #c1(CNTN4) c2(NP_001193884) c3(contactin-4 isoform a precursor) c4(83022, 83023, 83024) c5(83025, 83026, 83027, 83028, 83029, 83030, 83031, 83032, 83033, 83034, 83035, 83036, 83037, 83038, 83039, 83040, 83041, 83042, 83043, 83044, 83045, 83046, 83047, 83048, 83049, 83050, 83051) c6( ) c7(c, kB, dH, oe, Az, fq, Vd, bK, nA, hB, rz, xb, bN); #c1(CNTN4) c2(NP_783302) c3(contactin-4 isoform c) c4(251593) c5(251594, 251595, 251596, 251597, 251598, 251599, 251600, 251601) c6( ) c7(c, kB, dH, oe, Az, fq, Vd, bK, nA, hB, rz, xb, bN); #c1(CNTN4) c2(XP_006713067) c3(contactin-4 isoform X2) c4( ) c5(287009, 287010, 287011, 287012, 287013, 287014, 287015) c6( ) c7(c, kB, dH, oe, Az, fq, Vd, bK, nA, hB, rz, xb, bN); #c1(CNTN4) c2(XP_011531733) c3(contactin-4 isoform X3) c4(327824) c5( ) c6( ) c7(c, kB, dH, oe, Az, fq, Vd, bK, nA, hB, rz, xb, bN); #c1(CNTN5) c2(NP_001230199) c3(contactin-5 isoform 1 precursor) c4(86095) c5(86096, 86097, 86098, 86099, 86100, 86101, 86102, 86103, 86104, 86105, 86106, 86107, 86108, 86109) c6( ) c7(eW, ac, af, rz, hb, wL, aw, Ak, vr, aur, nA, he, Kl, cd, cY); #c1(CNTN5) c2(NP_001230200) c3(contactin-5 isoform 3 precursor) c4(86110) c5(86111, 86112, 86113, 86114, 86115, 86116) c6( ) c7(eW, ac, af, rz, hb, wL, aw, Ak, vr, aur, nA, he, Kl, cd, cY); #c1(CNTN5) c2(XP_011541173) c3(contactin-5 isoform X1) c4(339779) c5(339780, 339781, 339782, 339783, 339784, 339785) c6( ) c7(eW, ac, af, rz, hb, wL, aw, Ak, vr, aur, nA, he, Kl, cd, cY); #c1(CNTN6) c2(NP_001276010) c3(contactin-6 isoform 2) c4(107735) c5( ) c6( ) c7(aw, qK, Ak, bK, nA, he, Kl, ad, cY); #c1(CNTN6) c2(NP_055276) c3(contactin-6 isoform 1 precursor) c4(180212) c5(180213, 180214, 180215, 180216, 180217, 180218, 180219, 180220, 180221, 180222, 180223, 180224, 180225, 180226, 180227, 180228, 180229) c6( ) c7(aw, qK, Ak, bK, nA, he, Kl, ad, cY); #c1(CNTNAP1) c2(NP_003623) c3(contactin-associated protein 1 precursor) c4(139695) c5(139696, 139697, 139698, 139699, 139700, 139701) c6( ) c7(T, ow, oE, oD, jh, ol, hF, Fc, eA, br, x, aE, oC, oG, dV, aT, oF, hn, ox, iL, iU, bw, bN, ck, pc, pg, k, eg, bt); #c1(CNTNAP2) c2(NP_054860) c3(contactin-associated protein-like 2 precursor) c4(178117, 178118) c5(178119, 178120, 178121, 178122, 178123, 178124, 178125) c6( ) c7(aQP, T, wY, ahc, FG, Or, ha, aI, VT, cz, Ir, bO, aj, aQN, nA, aQK, cd, aR, eA, hX, ft, dY, hb, aQQ, Ko, aQM, bK, he, rz, af, na, bA, VX, yL, aQO, aha, Jl, aQL, fq, bN, pH, gk, ac, vD, Kr, k, yA, hh, qc); #c1(CNTNAP2) c2(XP_006715982) c3(contactin-associated protein-like 2 isoform X1) c4( ) c5(290002, 290003, 290004, 290005, 290006) c6( ) c7(aQP, T, wY, ahc, FG, Or, ha, aI, VT, cz, Ir, bO, aj, aQN, nA, aQK, cd, aR, eA, hX, ft, dY, hb, aQQ, Ko, aQM, bK, he, rz, af, na, bA, VX, yL, aQO, aha, Jl, aQL, fq, bN, pH, gk, ac, vD, Kr, k, yA, hh, qc); #c1(CNTNAP3) c2(NP_387504) c3(contactin-associated protein-like 3 precursor) c4(228984, 228985) c5(228986, 228987, 228988, 228989, 228990, 228991, 228992, 228993, 228994, 228995, 228996, 228997, 228998, 228999, 229000, 229001) c6(229002, 229003, 229004, 229005) c7(T); #c1(CNTNAP3) c2(XP_006716934) c3(contactin-associated protein-like 3 isoform X1) c4(290565, 290566) c5(290567, 290568, 290569, 290570, 290571, 290572, 290573, 290574, 290575, 290576, 290577, 290578, 290579, 290580, 290581, 290582) c6(290583, 290584, 290585, 290586) c7(T); #c1(CNTNAP3) c2(XP_006716936) c3(contactin-associated protein-like 3 isoform X4) c4(290587) c5(290588, 290589, 290590, 290591, 290592, 290593, 290594, 290595) c6(290596, 290597) c7(T); #c1(CNTNAP3) c2(XP_011516335) c3(contactin-associated protein-like 3 isoform X11) c4( ) c5(309544, 309545, 309546, 309547, 309548, 309549, 309550, 309551, 309552, 309553, 309554, 309555) c6( ) c7(T); #c1(CNTNAP4) c2(NP_207837) c3(contactin-associated protein-like 4 isoform 1 precursor) c4(228512, 228513) c5(228514, 228515, 228516, 228517, 228518, 228519, 228520, 228521, 228522, 228523, 228524, 228525) c6( ) c7(he, aj, j, dH, aT); #c1(CNTNAP4) c2(NP_620481) c3(contactin-associated protein-like 4 isoform 2) c4(237694) c5(237695, 237696, 237697, 237698, 237699, 237700) c6( ) c7(he, aj, j, dH, aT); #c1(CNTNAP5) c2(NP_570129) c3(contactin-associated protein-like 5 precursor) c4(234025) c5(234026, 234027, 234028, 234029, 234030, 234031) c6( ) c7(ac, hb, Y, oe, n, bK, yA, fq, bN); #c1(CNTRL) c2(XP_005251736) c3(centriolin isoform X1) c4(271104, 271105, 271106, 271107, 271108) c5(271109, 271110, 271111, 271112, 271113, 271114, 271115, 271116, 271117, 271118, 271119, 271120, 271121, 271122, 271123, 271124, 271125, 271126, 271127, 271128, 271129, 271130, 271131, 271132, 271133, 271134, 271135, 271136, 271137) c6( ) c7(T, et, Y, aT, dz, y, eA); #c1(CNTRL) c2(XP_006717003) c3(centriolin isoform X6) c4( ) c5(290631, 290632, 290633, 290634, 290635, 290636) c6( ) c7(T, et, Y, aT, dz, y, eA); #c1(CNTRL) c2(XP_006717005) c3(centriolin isoform X8) c4(290637) c5( ) c6( ) c7(T, et, Y, aT, dz, y, eA); #c1(CNTRL) c2(XP_006717007) c3(centriolin isoform X10) c4(290638) c5(290639, 290640, 290641, 290642, 290643, 290644, 290645, 290646, 290647, 290648, 290649) c6( ) c7(T, et, Y, aT, dz, y, eA); #c1(CNTRL) c2(XP_011516469) c3(centriolin isoform X2) c4( ) c5(309802) c6( ) c7(T, et, Y, aT, dz, y, eA); #c1(CNTRL) c2(XP_011516471) c3(centriolin isoform X4) c4(309803) c5( ) c6( ) c7(T, et, Y, aT, dz, y, eA); #c1(CNTRL) c2(XP_011516473) c3(centriolin isoform X7) c4(309804) c5( ) c6( ) c7(T, et, Y, aT, dz, y, eA); #c1(CNTRL) c2(XP_011516474) c3(centriolin isoform X9) c4(309805, 309806) c5(309807, 309808, 309809, 309810, 309811, 309812, 309813, 309814, 309815, 309816, 309817, 309818) c6( ) c7(T, et, Y, aT, dz, y, eA); #c1(CNTRL) c2(XP_011516475) c3(centriolin isoform X11) c4( ) c5(309819, 309820, 309821, 309822, 309823, 309824, 309825, 309826, 309827, 309828, 309829) c6( ) c7(T, et, Y, aT, dz, y, eA); #c1(CNTROB) c2(NP_001032221) c3(centrobin isoform beta) c4(31104) c5(31105, 31106, 31107, 31108, 31109, 31110) c6( ) c7(aW, kI, aiB, aT); #c1(CNTROB) c2(NP_444279) c3(centrobin isoform alpha) c4(230252, 230253) c5(230254, 230255, 230256, 230257, 230258, 230259) c6( ) c7(aW, kI, aiB, aT); #c1(CNTROB) c2(XP_006721502) c3(centrobin isoform X1) c4( ) c5(294010, 294011) c6( ) c7(aW, kI, aiB, aT); #c1(CNTROB) c2(XP_011521936) c3(centrobin isoform X6) c4( ) c5(316638, 316639, 316640, 316641, 316642, 316643) c6( ) c7(aW, kI, aiB, aT); #c1(COAI) c2(NP_060694) c3(cytochrome c oxidase assembly factor 1 homolog) c4(197222, 197223, 197224) c5(197225, 197226, 197227, 197228, 197229, 197230, 197231, 197232, 197233, 197234, 197235, 197236, 197237, 197238, 197239, 197240, 197241, 197242, 197243, 197244, 197245, 197246, 197247, 197248, 197249, 197250, 197251, 197252, 197253, 197254, 197255, 197256, 197257, 197258, 197259, 197260, 197261, 197262, 197263, 197264, 197265, 197266, 197267, 197268, 197269, 197270) c6( ) c7(avQ, BE); #c1(COA5) c2(NP_001008216) c3(cytochrome c oxidase assembly factor 5) c4(22890) c5(22891, 22892, 22893, 22894, 22895, 22896) c6( ) c7(vc, cc, acJ, p); #c1(COASY) c2(NP_001035997) c3(bifunctional coenzyme A synthase isoform c) c4(33635, 33636) c5(33637, 33638, 33639, 33640, 33641, 33642, 33643, 33644, 33645, 33646, 33647, 33648) c6( ) c7(if, adi, mI, qN, adf, axa, acX, zw, aQS, aT, dL, K, EL, aQR, avH, aq, cm, iP, EJ, acW, bt, xg, AN, ao); #c1(COASY) c2(NP_079509) c3(bifunctional coenzyme A synthase isoform a precursor) c4(218429) c5(218430, 218431, 218432, 218433, 218434, 218435, 218436, 218437, 218438, 218439, 218440, 218441, 218442, 218443, 218444, 218445) c6( ) c7(if, adi, mI, qN, adf, axa, acX, zw, aQS, aT, dL, K, EL, aQR, avH, aq, cm, iP, EJ, acW, bt, xg, AN, ao); #c1(COASY) c2(XP_011523603) c3(bifunctional coenzyme A synthase isoform X3) c4(318085) c5(318086, 318087, 318088, 318089) c6( ) c7(if, adi, mI, qN, adf, axa, acX, zw, aQS, aT, dL, K, EL, aQR, avH, aq, cm, iP, EJ, acW, bt, xg, AN, ao); #c1(COBL) c2(NP_001274367) c3(protein cordon-bleu isoform c) c4(106292) c5(106293, 106294, 106295, 106296, 106297, 106298, 106299, 106300, 106301, 106302, 106303, 106304) c6( ) c7(A, EQ, cz, cd, bX, cm, sD, af); #c1(COBL) c2(NP_056013) c3(protein cordon-bleu isoform b) c4(185133) c5(185134, 185135, 185136, 185137, 185138, 185139) c6( ) c7(A, EQ, cz, cd, bX, cm, sD, af); #c1(COBL) c2(XP_005271813) c3(protein cordon-bleu isoform X10) c4(283604) c5( ) c6( ) c7(A, EQ, cz, cd, bX, cm, sD, af); #c1(COBL) c2(XP_011513537) c3(protein cordon-bleu isoform X2) c4(305811, 305812) c5(305813, 305814, 305815, 305816, 305817, 305818, 305819, 305820, 305821, 305822, 305823, 305824) c6( ) c7(A, EQ, cz, cd, bX, cm, sD, af); #c1(COBL) c2(XP_011513539) c3(protein cordon-bleu isoform X6) c4(305825) c5( ) c6( ) c7(A, EQ, cz, cd, bX, cm, sD, af); #c1(COBL) c2(XP_011513543) c3(protein cordon-bleu isoform X11) c4( ) c5(305826, 305827, 305828, 305829, 305830, 305831) c6( ) c7(A, EQ, cz, cd, bX, cm, sD, af); #c1(COBLL1) c2(NP_001265387) c3(cordon-bleu protein-like 1 isoform 1) c4(98413, 98414) c5(98415, 98416, 98417, 98418, 98419, 98420, 98421, 98422, 98423, 98424, 98425, 98426) c6( ) c7(v, j, ac); #c1(COBLL1) c2(NP_001265389) c3(cordon-bleu protein-like 1 isoform 3) c4(98427, 98428, 98429) c5(98430, 98431, 98432, 98433, 98434, 98435, 98436, 98437, 98438, 98439, 98440, 98441) c6( ) c7(v, j, ac); #c1(COBLL1) c2(NP_001265390) c3(cordon-bleu protein-like 1 isoform 4) c4(98442) c5(98443, 98444, 98445, 98446, 98447, 98448, 98449, 98450, 98451, 98452, 98453, 98454) c6( ) c7(v, j, ac); #c1(COBLL1) c2(NP_055715) c3(cordon-bleu protein-like 1 isoform 2) c4(183016) c5(183017, 183018, 183019, 183020, 183021, 183022) c6( ) c7(v, j, ac); #c1(COCH) c2(XP_011534841) c3(cochlin isoform X1) c4(331337, 331338, 331339) c5(331340, 331341, 331342, 331343, 331344, 331345, 331346, 331347, 331348, 331349, 331350, 331351, 331352, 331353, 331354, 331355, 331356, 331357, 331358, 331359, 331360, 331361) c6( ) c7(aQU, qk, b, aQX, aQT, Fh, i, mG, aRa, U, aQV, K, aQW, dw, aKv, Bh, aQY, aQZ); #c1(COG1) c2(NP_061184) c3(conserved oligomeric Golgi complex subunit 1) c4(199837, 199838) c5(199839, 199840, 199841, 199842, 199843, 199844, 199845, 199846, 199847, 199848, 199849, 199850) c6( ) c7(aRd, SP, aRb, aRc, pk, af); #c1(C062) c2(NP_001138508) c3(conserved oligomeric Golgi complex subunit 2 isoform 2) c4(56912) c5(56913, 56914, 56915, 56916, 56917, 56918) c6( ) c7(ZV, ac, cH, e, aw, j, af, eu); #c1(C062) c2(NP_031383) c3(conserved oligomeric Golgi complex subunit 2 isoform 1) c4(172124, 172125, 172126, 172127) c5(172128, 172129, 172130, 172131, 172132, 172133, 172134, 172135, 172136, 172137, 172138, 172139, 172140, 172141, 172142, 172143, 172144, 172145, 172146, 172147, 172148, 172149, 172150, 172151) c6( ) c7(ZV, ac, cH, e, aw, j, af, eu); #c1(C063) c2(NP_113619) c3(conserved oligomeric Golgi complex subunit 3) c4(221760) c5(221761, 221762, 221763, 221764, 221765, 221766) c6( ) c7(atO); #c1(C064) c2(NP_001182068) c3(conserved oligomeric Golgi complex subunit 4 isoform 2) c4(74539) c5(74540, 74541, 74542, 74543, 74544, 74545, 74546, 74547, 74548, 74549, 74550, 74551) c6( ) c7(aRe, nC, OL, SP); #c1(C064) c2(NP_056201) c3(conserved oligomeric Golgi complex subunit 4 isoform 1) c4(186293, 186294) c5(186295, 186296, 186297, 186298, 186299, 186300, 186301) c6( ) c7(aRe, nC, OL, SP); #c1(C064) c2(XP_011521283) c3(conserved oligomeric Golgi complex subunit 4 isoform X1) c4(316177) c5(316178, 316179, 316180, 316181, 316182) c6( ) c7(aRe, nC, OL, SP); #c1(C065) c2(NP_006339) c3(conserved oligomeric Golgi complex subunit 5 isoform 1) c4(164154, 164155) c5(164156, 164157, 164158, 164159, 164160, 164161, 164162, 164163, 164164, 164165, 164166, 164167) c6( ) c7(aRf, SL); #c1(C065) c2(NP_859422) c3(conserved oligomeric Golgi complex subunit 5 isoform 2) c4(255529) c5(255530, 255531, 255532, 255533, 255534, 255535) c6( ) c7(aRf, SL); #c1(COG6) c2(NP_001138551) c3(conserved oligomeric Golgi complex subunit 6 isoform 2) c4(56990) c5(56991, 56992, 56993, 56994, 56995, 56996) c6( ) c7(ant, iV, Jr, aRg, oe, dv, aRh, cr, Ia, Lo, OL, Xk); #c1(C066) c2(NP_065802) c3(conserved oligomeric Golgi complex subunit 6 isoform 1) c4(205596, 205597) c5(205598, 205599, 205600, 205601, 205602, 205603, 205604, 205605, 205606, 205607, 205608, 205609) c6( ) c7(ant, iV, Jr, aRg, oe, dv, aRh, cr, Ia, Lo, OL, Xk); #c1(C067) c2(NP_705831) c3(conserved oligomeric Golgi complex subunit 7) c4(246289) c5(246290, 246291, 246292, 246293, 246294, 246295) c6( ) c7(aRi, Lo, Km, QK); #c1(C068) c2(NP_115758) c3(conserved oligomeric Golgi complex subunit 8) c4(223838) c5(223839, 223840, 223841, 223842, 223843, 223844) c6( ) c7(SL, aRj, SP); #c1(COIL) c2(NP_004636) c3(coilin) c4(148403) c5(148404, 148405, 148406, 148407, 148408, 148409) c6( ) c7(ck, b, XE, i, eH, aRk, jh, kf, m, eF, t, nJ); #c1(COL10A1) c2(XP_011533735) c3(collagen alpha-1(X) chain isoform X1) c4(329818, 329819, 329820) c5(329821, 329822, 329823, 329824, 329825, 329826, 329827, 329828, 329829, 329830, 329831, 329832, 329833, 329834, 329835, 329836, 329837, 329838, 329839, 329840, 329841, 329842, 329843, 329844) c6( ) c7(kF, W, rI, In, aRm, aT, aRI, rD, ade, rv, aRn, cY, aRo); #c1(COL11A1) c2(XP_011539021) c3(collagen alpha-1(XI) chain isoform X1) c4( ) c5(337085, 337086, 337087, 337088, 337089, 337090, 337091, 337092, 337093) c6(337094, 337095) c7(T, aRu, n, aRt, q, Na, aE, rl, By, Nc, sa, rv, aRs, s, ff, Az, r, en, mo, dw, aRq, t, g, iK, Ek, bF, aik, aRp, eM, BP, In, ro, aRr, m, lJ); #c1(COL11A1) c2(XP_011539023) c3(collagen alpha-1(XI) chain isoform X3) c4(337096) c5(337097, 337098, 337099, 337100, 337101, 337102, 337103, 337104) c6(337105, 337106) c7(T, aRu, n, aRt, q, Na, aE, rl, By, Nc, sa, rv, aRs, s, ff, Az, r, en, mo, dw, aRq, t, g, iK, Ek, bF, aik, aRp, eM, BP, In, ro, aRr, m, lJ); #c1(COL11A2) c2(NP_001157243) c3(collagen alpha-2(XI) chain isoform 4 precursor) c4(62093, 62094, 62095) c5(62096, 62097, 62098, 62099, 62100, 62101, 62102, 62103, 62104, 62105, 62106, 62107, 62108, 62109, 62110, 62111, 62112, 62113, 62114, 62115, 62116, 62117, 62118, 62119, 62120, 62121, 62122, 62123, 62124, 62125, 62126, 62127, 62128, 62129) c6(62130, 62131, 62132, 62133) c7(eW, cZ, os, DM, T, WL, aRx, NT, fd, bB, jh, aj, oZ, fr, ci, q, J, cd, ad, aRo, Na, aRy, hd, no, aE, rl, aT, h, Nc, K, dd, hS, rv, ae, af, vl, A, d, aW, eH, Az, eZ, r, aq, aRw, kp, eF, t, cm, bz, atb, kP, eM, nB, bE, BP, mG, aRz, In, afd, cj, aef, asR, ro, aRA, m, y, bt, Bh, B, aRv); #c1(COL11A2) c2(NP_542410) c3(collagen alpha-2(XI) chain isoform 3 preproprotein) c4(232408, 232409, 232410, 232411, 232412, 232413, 232414, 232415) c5(232416, 232417, 232418, 232419, 232420, 232421, 232422, 232423, 232424, 232425, 232426, 232427, 232428, 232429, 232430, 232431, 232432, 232433, 232434, 232435, 232436, 232437, 232438, 232439, 232440, 232441, 232442, 232443, 232444, 232445, 232446, 232447, 232448, 232449, 232450, 232451, 232452, 232453, 232454) c6(232455, 232456, 232457, 232458) c7(eW, cZ, os, DM, T, WL, aRx, NT, fd, bB, jh, aj, oZ, fr, ci, q, J, cd, ad, aRo, Na, aRy, hd, no, aE, rl, aT, h, Nc, K, dd, hS, rv, ae, af, vl, A, d, aW, eH, Az, eZ, r, aq, aRw, kp, eF, t, cm, bz, atb, kP, eM, nB, bE, BP, mG, aRz, In, afd, cj, aef, asR, ro, aRA, m, y, bt, Bh, B, aRv); #c1(COL11A2) c2(NP_542411) c3(collagen alpha-2(XI) chain isoform 1 preproprotein) c4(232459, 232460, 232461, 232462, 232463, 232464, 232465, 232466, 232467, 232468, 232469, 232470) c5(232471, 232472, 232473, 232474, 232475, 232476, 232477, 232478, 232479, 232480, 232481, 232482, 232483, 232484, 232485, 232486, 232487, 232488, 232489, 232490, 232491, 232492, 232493, 232494, 232495, 232496, 232497, 232498, 232499, 232500, 232501, 232502, 232503, 232504, 232505, 232506, 232507, 232508, 232509, 232510, 232511, 232512, 232513, 232514, 232515, 232516, 232517, 232518, 232519, 232520, 232521, 232522, 232523, 232524, 232525, 232526, 232527, 232528, 232529, 232530, 232531, 232532, 232533, 232534, 232535, 232536, 232537, 232538, 232539, 232540, 232541, 232542, 232543, 232544, 232545, 232546, 232547, 232548, 232549, 232550, 232551, 232552, 232553, 232554, 232555, 232556, 232557, 232558, 232559, 232560, 232561, 232562, 232563, 232564, 232565, 232566, 232567, 232568, 232569, 232570, 232571, 232572, 232573, 232574, 232575, 232576, 232577, 232578, 232579, 232580, 232581, 232582, 232583, 232584, 232585, 232586, 232587, 232588, 232589, 232590, 232591, 232592, 232593, 232594, 232595, 232596, 232597, 232598, 232599, 232600, 232601, 232602, 232603, 232604, 232605, 232606, 232607, 232608, 232609, 232610, 232611, 232612, 232613, 232614, 232615, 232616, 232617, 232618, 232619, 232620, 232621, 232622, 232623, 232624, 232625, 232626, 232627, 232628, 232629, 232630, 232631, 232632, 232633, 232634, 232635, 232636, 232637, 232638, 232639, 232640, 232641, 232642, 232643, 232644, 232645, 232646, 232647, 232648, 232649) c6(232650, 232651, 232652, 232653, 232654, 232655, 232656, 232657, 232658, 232659, 232660, 232661, 232662, 232663, 232664, 232665, 232666, 232667, 232668, 232669) c7(eW, cZ, os, DM, T, WL, aRx, NT, fd, bB, jh, aj, al, fr, ci, q, J, cd, ad, aRo, Na, aRy, hd, no, aE, rl, aT, h, Nc, K, dd, hS, rv, ae, af, vl, A, d, aW, eH, Az, eZ, r, aq, aRw, kp, eF, t, cm, bz, atb, kP, eM, nB, bE, BP, mG, aRz, In, afd, cj, aef, asR, ro, aRA, m, y, bt, Bh, B, aRv); #c1(COL11A2) c2(NP_542412) c3(collagen alpha-2(XI) chain isoform 2 preproprotein) c4(232670, 232671, 232672, 232673) c5(232674, 232675, 232676, 232677, 232678, 232679, 232680, 232681, 232682, 232683, 232684, 232685, 232686, 232687, 232688, 232689, 232690, 232691, 232692, 232693, 232694, 232695, 232696, 232697, 232698, 232699, 232700, 232701, 232702, 232703, 232704, 232705, 232706, 232707, 232708, 232709, 232710, 232711, 232712, 232713, 232714, 232715, 232716, 232717, 232718, 232719, 232720, 232721, 232722, 232723, 232724, 232725, 232726, 232727, 232728, 232729, 232730, 232731, 232732, 232733, 232734, 232735, 232736, 232737, 232738, 232739, 232740, 232741, 232742, 232743, 232744, 232745, 232746, 232747, 232748, 232749, 232750, 232751, 232752, 232753, 232754, 232755, 232756, 232757, 232758, 232759, 232760, 232761, 232762, 232763, 232764, 232765, 232766, 232767, 232768, 232769, 232770, 232771, 232772, 232773, 232774, 232775, 232776, 232777, 232778, 232779, 232780, 232781, 232782) c6(232783, 232784, 232785, 232786, 232787, 232788, 232789, 232790, 232791, 232792, 232793, 232794) c7(eW, cZ, os, DM, T, WL, aRx, NT, fd, bB, jh, aj, oZ, fr, ci, q, J, cd, ad, aRo, Na, aRy, hd, no, aE, rl, aT, h, Nc, K, dd, hS, rv, ae, af, vl, A, d, aW, eH, Az, eZ, r, aq, aRw, kp, eF, t, cm, bz, atb, kP, eM, nB, bE, BP, mG, aRz, In, afd, cj, aef, asR, ro, aRA, m, y, bt, Bh, B, aRv); #c1(COL11A2) c2(XP_011512600) c3(collagen alpha-2(XI) chain isoform X1) c4(303519, 303520, 303521, 303522) c5( ) c6( ) c7(eW, cZ, os, DM, T, WL, aRx, NT, fd, bB, jh, aj, oZ, fr, ci, q, J, cd, ad, aRo, Na, aRy, hd, no, aE, rl, aT, h, Nc, K, dd, hS, rv, ae, af, vl, A, d, aW, eH, Az, eZ, r, aq, aRw, kp, eF, t, cm, bz, atb, kP, eM, nB, bE, BP, mG, aRz, In, afd, cj, aef, asR, ro, aRA, m, y, bt, Bh, B, aRv); #c1(COL11A2) c2(XP_011512601) c3(collagen alpha-2(XI) chain isoform X2) c4(303523, 303524, 303525) c5( ) c6( ) c7(eW, cZ, os, DM, T, WL, aRx, NT, fd, bB, jh, aj, oZ, fr, ci, q, J, cd, ad, aRo, Na, aRy, hd, no, aE, rl, aT, h, Nc, K, dd, hS, rv, ae, af, vl, A, d, aW, eH, Az, eZ, r, aq, aRw, kp, eF, t, cm, bz, atb, kP, eM, nB, bE, BP, mG, aRz, In, afd, cj, aef, asR, ro, aRA, m, y, bt, Bh, B, aRv); #c1(COL11A2) c2(XP_011512602) c3(collagen alpha-2(XI) chain isoform X3) c4(303526, 303527, 303528, 303529) c5( ) c6( ) c7(eW, cZ, os, DM, T, WL, aRx, NT, fd, bB, jh, aj, oZ, fr, ci, q, J, cd, ad, aRo, Na, aRy, hd, no, aE, rl, aT, h, Nc, K, dd, hS, rv, ae, af, vl, A, d, aW, eH, Az, eZ, r, aq, aRw, kp, eF, t, cm, bz, atb, kP, eM, nB, bE, BP, mG, aRz, In, afd, cj, aef, asR, ro, aRA, m, y, bt, Bh, B, aRv); #c1(COL11A2) c2(XP_011512604) c3(collagen alpha-2(XI) chain isoform X5) c4(303530, 303531) c5(303532, 303533, 303534, 303535, 303536, 303537, 303538, 303539, 303540, 303541, 303542, 303543, 303544, 303545, 303546, 303547, 303548, 303549, 303550, 303551, 303552, 303553, 303554, 303555, 303556, 303557, 303558, 303559, 303560, 303561, 303562, 303563, 303564, 303565, 303566, 303567, 303568, 303569, 303570, 303571, 303572) c6(303573, 303574, 303575, 303576) c7(eW, cZ, os, DM, T, WL, aRx, NT, fd, bB, jh, aj, al, fr, ci, q, J, cd, ad, aRo, Na, aRy, hd, no, aE, rl, aT, h, Nc, K, dd, hS, rv, ae, af, vl, A, d, aW, eH, Az, al, r, aq, aRw, kp, eF, t, cm, bz, atb, kP, eM, nB, bE, BP, mG, aRz, In, afd, cj, aef, asR, ro, aRA, m, y, bt, Bh, B, aRv); #c1(COL12A1) c2(NP_004361) c3(collagen alpha-1(XII) chain long isoform precursor) c4(145681, 145682) c5(145683, 145684, 145685, 145686, 145687, 145688, 145689, 145690, 145691, 145692, 145693, 145694, 145695, 145696, 145697, 145698, 145699, 145700, 145701, 145702, 145703, 145704, 145705) c6(145706, 145707, 145708, 145709, 145710, 145711) c7(eW, T, no, aW, rn, aRB, oj, aT, r, n, aRC, Eh, q); #c1(COL12A1) c2(NP_542376) c3(collagen alpha-1(XII) chain short isoform precursor) c4(232287) c5(232288) c6( ) c7(eW, T, no, aW, rn, aRB, oj, aT, r, n, aRC, Eh, q); #c1(COL12A1) c2(XP_011533738) c3(collagen alpha-1(XII) chain isoform X3) c4( ) c5(329845) c6( ) c7(eW, T, no, aW, rn, aRB, oj, aT, r, n, aRC, Eh, q); #c1(COL13A1) c2(NP_001123575) c3(collagen alpha-1(XIII) chain isoform 1) c4(47664, 47665, 47666, 47667, 47668, 47669, 47670) c5(47671, 47672, 47673, 47674, 47675, 47676, 47677, 47678, 47679, 47680, 47681, 47682, 47683, 47684, 47685, 47686, 47687, 47688, 47689, 47690, 47691, 47692, 47693, 47694, 47695, 47696, 47697, 47698, 47699, 47700, 47701, 47702, 47703, 47704, 47705, 47706) c6( ) c7(fc, ac, BE); #c1(COL13A1) c2(NP_542988) c3(collagen alpha-1(XIII) chain isoform 21) c4(233144, 233145) c5(233146, 233147, 233148, 233149, 233150, 233151, 233152, 233153, 233154, 233155, 233156, 233157) c6( ) c7(fc, ac, BE); #c1(COL13A1) c2(NP_542990) c3(collagen alpha-1(XIII) chain isoform 11) c4(233158, 233159) c5(233160, 233161, 233162, 233163, 233164, 233165, 233166, 233167, 233168, 233169, 233170, 233171) c6( ) c7(fc, ac, BE); #c1(COL13A1) c2(NP_542991) c3(collagen alpha-1(XIII) chain isoform 5) c4(233172, 233173, 233174) c5(233175, 233176, 233177, 233178, 233179, 233180, 233181, 233182, 233183, 233184, 233185, 233186, 233187, 233188, 233189, 233190, 233191, 233192) c6( ) c7(fc, ac, BE); #c1(COL13A1) c2(NP_542992) c3(collagen alpha-1(XIII) chain isoform 15) c4(233193) c5(233194, 233195, 233196, 233197, 233198, 233199, 233200, 233201, 233202, 233203, 233204, 233205, 233206) c6( ) c7(fc, ac, BE); #c1(COL13A1) c2(NP_542995) c3(collagen alpha-1(XIII) chain isoform 19) c4(233207) c5(233208, 233209, 233210, 233211, 233212, 233213, 233214) c6( ) c7(fc, ac, BE); #c1(COL14A1) c2(XP_005251116) c3(collagen alpha-1(XIV) chain isoform X2) c4(270818, 270819) c5(270820, 270821, 270822, 270823, 270824, 270825, 270826, 270827, 270828, 270829, 270830, 270831) c6( ) c7(rn, fr, j, q, Eg, bG); #c1(COL14A1) c2(XP_006716714) c3(collagen alpha-1(XIV) chain isoform X1) c4(290426, 290427) c5(290428, 290429, 290430, 290431, 290432, 290433, 290434, 290435, 290436, 290437, 290438, 290439) c6( ) c7(rn, fr, j, q, Eg, bG); #c1(COL15A1) c2(XP_011516516) c3(collagen alpha-1(XV) chain isoform X1) c4(309920, 309921) c5(309922, 309923, 309924, 309925, 309926, 309927, 309928, 309929, 309930, 309931, 309932, 309933) c6( ) c7(cZ, dD, dH, ea, eX, eV, eq, fr, dd, aRD, pb, bA); #c1(COL16A1) c2(XP_011539026) c3(collagen alpha-1(XVI) chain isoform X4) c4( ) c5(337107) c6( ) c7(d); #c1(COL16A1) c2(XP_011539030) c3(collagen alpha-1(XVI) chain isoform X8) c4( ) c5(337108) c6( ) c7(d); #c1(COL16A1) c2(XP_011539032) c3(collagen alpha-1(XVI) chain isoform X10) c4( ) c5(337109, 337110, 337111, 337112, 337113, 337114, 337115, 337116, 337117, 337118, 337119, 337120) c6( ) c7(d); #c1(COL17A1) c2(NP_000485) c3(collagen alpha-1(XVII) chain) c4(9784, 9785, 9786, 9787) c5(9788, 9789, 9790, 9791, 9792, 9793, 9794, 9795, 9796, 9797, 9798, 9799, 9800, 9801, 9802, 9803, 9804, 9805, 9806, 9807, 9808, 9809, 9810, 9811, 9812, 9813, 9814, 9815, 9816, 9817, 9818, 9819, 9820) c6(9821, 9822, 9823, 9824, 9825, 9826, 9827) c7(sc, T, OI, aGX, aRE, XM, aue, aRG, aRM, IQ, on, aRF, li, aRK, aRL, ff, aCB, ks, en, q, aRI, arJ, aRJ, aRH, ck, ay, sS, Qu, IV, uz, XO, XN, adg, arO); #c1(COL18A1) c2(NP_085059) c3(collagen alpha-1(XVIII) chain isoform 1 preproprotein) c4(219249) c5(219250, 219251, 219252, 219253, 219254, 219255) c6( ) c7(gh, T, aC, al, fd, bB, ci, aR, x, aE, eL, DA, up, JI, aW, dH, Ih, arK, zC, g, as, eF, cm, qJ, eM, nB, iA, cj, k, m, IS, n, fr, nA, zP, eh, eW, yn, EI, BI, Dr, Xe, dL, hB, cY, wC, aq, CQ, W, dB, Vy, Be, at, B, bL, ul, aRN, fZ, aA, wo, hy, v, j, q, eA, aT, kU, ae, af, dl, ne, jf, qw, s, oV, r, en, t, f, iK, ck, ov, bt, ha, jh, Fb, ad, dP, av, Rq, DI, d, BN, ff, eH, aF, Ed, iV, iR, bz, LB, es, bF, bE, GF, y, vt, X); #c1(COL18A1) c2(NP_569711) c3(collagen alpha-1(XVIII) chain isoform 3 preproprotein) c4(233792, 233793) c5(233794, 233795, 233796, 233797, 233798, 233799, 233800, 233801, 233802, 233803, 233804, 233805) c6( ) c7(gh, T, aC, al, fd, bB, ci, aR, x, aE, eL, DA, up, JI, aW, dH, Ih, arK, zC, g, as, eF, cm, qJ, eM, nB, iA, cj, k, m, IS, n, fr, nA, zP, eh, eW, yn, EI, BI, Dr, Xe, dL, hB, cY, wC, aq, CQ, W, dB, Vy, Be, at, B, bL, ul, aRN, fZ, aA, wo, hy, v, j, q, eA, aT, kU, ae, af, dl, ne, jf, gw, s, oV, r, en, t, f, iK, ck, ov, bt, ha, jh, Fb, ad, dP, av, Rq, DI, d, BN, ff, eH, aF, Ed, iV, iR, bz, LB, es, bF, bE, GF, y, vt, X); #c1(COL18A1) c2(NP_569712) c3(collagen alpha-1(XVIII) chain isoform 2 preproprotein) c4(233806, 233807) c5(233808, 233809, 233810, 233811, 233812, 233813, 233814, 233815, 233816, 233817, 233818, 233819) c6( ) c7(gh, T, aC, al, fd, bB, ci, aR, x, aE, eL, DA, up, JI, aW, dH, Ih, arK, zC, g, as, eF, cm, qJ, eM, nB, iA, cj, k, m, IS, n, fr, nA, zP, eh, eW, yn, EI, BI, Dr, Xe, dL, hB, cY, wC, aq, CQ, W, dB, Vy, Be, at, B, bL, ul, aRN, fZ, aA, wo, hy, v, j, q, eA, aT, kU, ae, af, dl, ne, jf, gw, s, oV, r, en, t, f, iK, ck, ov, bt, ha, jh, Fb, ad, dP, av, Rq, DI, d, BN, ff, eH, aF, Ed, iV, iR, bz, LB, es, bF, bE, GF, y, vt, X); #c1(COL1A1) c2(NP_000079) c3(collagen alpha-1(I) chain preproprotein) c4(1271) c5( ) c6( ) c7(bM, T, asg, fR, al, IL, fd, IR, ci, XW, ws, rw, rn, ari, HR, bc, aRY, eG, Rh, up, pr, aW, aRO, aRW, aRS, hJ, eF, uC, aSb, iP, iA, Iq, uo, pw, IS, gU, pG, vI, sQ, aRX, aw, n, zw, aSa, rl, aaj, aRQ, aRP, asL, fQ, aq, op, IX, hk, Be, at, uz, ut, B, rp, tf, fG, cz, v, j, Eh, aT, rD, zp, IM, eC, af, bA, aRR, bQ, pb, aDQ, ck, BU, aGo, aRZ, ro, sY, li, ah, jE, azk, wD, hX, nH, sN, IQ, uQ, IU, aRV, Fz, eH, LB, es, yE, aRU, aRT); #c1(COL1A1) c2(XP_005257115) c3(collagen alpha-1(I) chain isoform X2) c4( ) c5(274692, 274693) c6( ) c7(bM, T, asg, fR, al, IL, fd, IR, ci, XW, ws, rw, rn, ari, HR, bc, aRY, eG, Rh, up, pr, aW, aRO, aRW, aRS, hJ, eF, uC, aSb, iP, iA, Iq, uo, pw, IS, gU, pG, vl, sQ, aRX, aw, n, zw, aSa, rl, aaj, aRQ, aRP, asL, fQ, aq, op, IX, hk, Be, at, uz, ut, B, rp, tf, fG, cz, v, j, Eh, aT, rD, zp, IM, eC, af, bA, aRR, bQ, pb, aDQ, ck, BU, aGo, aRZ, ro, sY, li, ah, jE, azk, wD, hX, nH, sN, IQ, uQ, IU, aRV, Fz, eH, LB, es, yE, aRU, aRT); #c1(COL1A1) c2(XP_005257116) c3(collagen alpha-1(I) chain isoform X3) c4( ) c5(274694, 274695, 274696, 274697, 274698, 274699, 274700, 274701, 274702) c6( ) c7(bM, T, asg, fR, al, IL, fd, IR, ci, XW, ws, rw, rn, ari, HR, bc, aRY, eG, Rh, up, pr, aW, aRO, aRW, aRS, hJ, eF, uC, aSb, iP, iA, Ig, uo, pw, IS, gU, pG, vl, sQ, aRX, aw, n, zw, aSa, rl, aaj, aRQ, aRP, asL, fQ, aq, op, IX, hk, Be, at, uz, ut, B, rp, tf, fG, cz, v, j, Eh, aT, rD, zp, IM, eC, af, bA, aRR, bQ, pb, aDQ, ck, BU, aGo, aRZ, ro, sY, li, ah, jE, azk, wD, hX, nH, sN, IQ, uQ, IQ, aRV, Fz, eH, LB, es, yE, aRU, aRT); #c1(COL1A2) c2(NP_000080) c3(collagen alpha-2(I) chain precursor) c4(1272, 1273) c5(1274, 1275, 1276, 1277, 1278, 1279, 1280, 1281, 1282, 1283, 1284, 1285, 1286, 1287, 1288, 1289, 1290, 1291, 1292, 1293, 1294, 1295, 1296, 1297, 1298, 1299, 1300, 1301, 1302, 1303, 1304, 1305, 1306, 1307, 1308, 1309, 1310, 1311, 1312, 1313, 1314, 1315, 1316, 1317, 1318, 1319, 1320, 1321, 1322, 1323, 1324, 1325, 1326, 1327, 1328, 1329, 1330, 1331, 1332, 1333, 1334, 1335, 1336, 1337, 1338, 1339, 1340, 1341, 1342, 1343, 1344, 1345, 1346, 1347, 1348, 1349, 1350, 1351, 1352, 1353, 1354, 1355, 1356, 1357, 1358, 1359, 1360, 1361, 1362, 1363, 1364, 1365, 1366, 1367, 1368, 1369, 1370, 1371, 1372, 1373, 1374, 1375, 1376, 1377, 1378) c6(1379, 1380, 1381, 1382, 1383) c7(sY, T, vl, eR, sQ, FG, fG, e, al, IL, vr, IR, aml, azk, Eh, DZ, aSe, awa, aSd, rl, aAh, aT, vc, dL, aSf, IQ, zp, bl, pj, aRP, eL, aRY, ao, bA, jf, IU, Rh, aPH, up, ff, Fz, fQ, aRW, arq, en, uC, pb, dr, arv, sS, ac, aSc, yE, bm, uo, at, ut, ajY, gT, B, us); #c1(COL20A1) c2(NP_065933) c3(collagen alpha-1(XX) chain precursor) c4(206311) c5(206312, 206313, 206314, 206315, 206316, 206317, 206318, 206319) c6(206320, 206321) c7(aW, aT); #c1(COL20A1) c2(XP_011527239) c3(collagen alpha-1(XX) chain isoform X2) c4( ) c5(321792) cG( ) c7(aW, aT); #c1(COL20A1) c2(XP_011527241) c3(collagen alpha-1(XX) chain isoform X4) c4(321793) c5(321794, 321795, 321796, 321797, 321798, 321799, 321800, 321801) c6(321802, 321803) c7(aW, aT); #c1(COL20A1) c2(XP_011527242) c3(collagen alpha-1(XX) chain isoform X5) c4(321804) c5(321805, 321806, 321807, 321808, 321809, 321810, 321811, 321812, 321813, 321814, 321815, 321816, 321817, 321818) c6(321819, 321820, 321821, 321822) c7(aW, aT); #c1(COL21A1) c2(NP_110447) c3(collagen alpha-1(XXI) chain precursor) c4(220405, 220406, 220407, 220408, 220409) c5(220410, 220411, 220412, 220413, 220414, 220415, 220416, 220417, 220418, 220419, 220420, 220421, 220422, 220423, 220424, 220425, 220426, 220427, 220428, 220429, 220430, 220431, 220432) c6( ) c7(ey, cu, bK, ac, ad); #c1(COL21A1) c2(XP_006715286) c3(collagen alpha-1(XXI) chain isoform X2) c4( ) c5(289480, 289481, 289482, 289483, 289484, 289485) c6( ) c7(ey, cu, bK, ac, ad); #c1(COL21A1) c2(XP_006715288) c3(collagen alpha-1(XXI) chain isoform X3) c4( ) c5(289486, 289487, 289488, 289489, 289490) c6( ) c7(ey, cu, bK, ac, ad); #c1(COL22A1) c2(NP_690848) c3(collagen alpha-1(XXII) chain precursor) c4(244959) c5(244960) c6( ) c7(ft, ac, aSg, e, xs, EQ, Ea, an, af); #c1(COL22A1) c2(XP_011515185) c3(collagen alpha-1(XXII) chain isoform X1) c4(308025) c5( ) c6( ) c7(ft, ac, aSg, e, xs, EQ, Ea, an, af); #c1(COL22A1) c2(XP_011515187) c3(collagen alpha-1(XXII) chain isoform X3) c4(308026) c5( ) c6( ) c7(ft, ac, aSg, e, xs, EQ, Ea, an, af); #c1(COL22A1) c2(XP_011515190) c3(collagen alpha-1(XXII) chain isoform X6) c4( ) c5(308027, 308028, 308029, 308030, 308031, 308032, 308033, 308034, 308035, 308036, 308037, 308038) c6( ) c7(ft, ac, aSg, e, xs, EQ, Ea, an, af); #c1(COL22A1) c2(XP_011515192) c3(collagen alpha-1(XXII) chain isoform X8) c4( ) c5(308039) c6( ) c7(ft, ac, aSg, e, xs, EQ, Ea, an, af); #c1(COL22A1) c2(XP_011515193) c3(collagen alpha-1(XXII) chain isoform X9) c4( ) c5(308040, 308041, 308042, 308043, 308044, 308045) c6( ) c7(ft, ac, aSg, e, xs, EQ, Ea, an, af); #c1(COL23A1) c2(NP_775736) c3(collagen alpha-1(XXIII) chain) c4(250118, 250119) c5(250120, 250121, 250122, 250123, 250124, 250125) c6( ) c7(dy, ac); #c1(COL23A1) c2(XP_011532994) c3(collagen alpha-1(XXIII) chain isoform X9) c4( ) c5(329230, 329231, 329232, 329233, 329234, 329235, 329236) cG( ) c7(dy, ac); #c1(COL24A1) c2(XP_011539493) c3(collagen alpha-1(XXIV) chain isoform X2) c4( ) c5(337692, 337693, 337694, 337695, 337696, 337697) c6( ) c7(bA); #c1(COL25A1) c2(NP_001243003) c3(collagen alpha-1(XXV) chain isoform 3) c4(89528) c5(89529, 89530, 89531, 89532, 89533, 89534) c6( ) c7(uK, L, B, aq, f, H, af, FT, hq); #c1(COL25A1) c2(NP_115907) c3(collagen alpha-1(XXV) chain isoform 2) c4(224613) c5(224614, 224615, 224616, 224617, 224618, 224619, 224620, 224621, 224622, 224623, 224624, 224625) c6( ) c7(uK, L, B, aq, f, H, af, FT, hq); #c1(COL25A1) c2(NP_942014) c3(collagen alpha-1(XXV) chain isoform 1) c4(260416) c5(260417, 260418, 260419, 260420, 260421, 260422, 260423, 260424, 260425, 260426, 260427, 260428) c6( ) c7(uK, L, B, aq, f, H, af, FT, hq); #c1(COL25A1) c2(XP_011530646) c3(collagen alpha-1(XXV) chain isoform X10) c4(326728, 326729) c5(326730, 326731, 326732, 326733, 326734, 326735) c6( ) c7(uK, L, B, aq, f, H, af, FT, hq); #c1(COL25A1) c2(XP_011530651) c3(collagen alpha-1(XXV) chain isoform X15) c4(326736) c5( ) c6( ) c7(uK, L, B, aq, f, H, af, FT, hq); #c1(COL25A1) c2(XP_011530652) c3(collagen alpha-1(XXV) chain isoform X16) c4(326737) c5( ) c6( ) c7(uK, L, B, aq, f, H, af, FT, hq); #c1(COL25A1) c2(XP_011530655) c3(collagen alpha-1(XXV) chain isoform X19) c4(326738) c5( ) c6( ) c7(uK, L, B, aq, f, H, af, FT, hq); #c1(COL25A1) c2(XP_011530661) c3(collagen alpha-1(XXV) chain isoform X25) c4( ) c5(326739, 326740, 326741, 326742, 326743, 326744) c6( ) c7(uK, L, B, aq, f, H, af, FT, hq); #c1(COL26A1) c2(NP_001265492) c3(collagen alpha-1(XXVI) chain isoform 1 precursor) c4(98704) c5(98705, 98706, 98707, 98708, 98709, 98710, 98711, 98712) c6(98713, 98714) c7(bM, aw); #c1(COL26A1) c2(NP_597714) c3(collagen alpha-1(XXVI) chain isoform 2 precursor) c4( ) c5(235087, 235088) c6( ) c7(bM, aw); #c1(COL27A1) c2(NP_116277) c3(collagen alpha-1(XXVII) chain preproprotein) c4(226052, 226053) c5(226054, 226055, 226056, 226057, 226058, 226059, 226060, 226061, 226062, 226063, 226064, 226065) c6( ) c7(ro, ru); #c1(COL27A1) c2(XP_006717371) c3(collagen alpha-1(XXVII) chain isoform X4) c4(291031) c5(291032, 291033, 291034, 291035, 291036, 291037) c6( ) c7(ro, ru); #c1(COL27A1) c2(XP_011517447) c3(collagen alpha-1(XXVII) chain isoform X10) c4( ) c5(311157) c6( ) c7(ro, ru); #c1(COL28A1) c2(XP_011513662) c3(collagen alpha-1(XXV111) chain isoform X1) c4(305964, 305965) c5(305966, 305967, 305968, 305969, 305970, 305971) c6( ) c7(xa, bK); #c1(COL28A1) c2(XP_011513663) c3(collagen alpha-1(XXV111) chain isoform X2) c4(305972) c5( ) c6( ) c7(xa, bK); #c1(COL28A1) c2(XP_011513664) c3(collagen alpha-1(XXV111) chain isoform X3) c4( ) c5(305973, 305974, 305975, 305976, 305977, 305978, 305979) c6( ) c7(xa, bK); #c1(COL28A1) c2(XP_011513665) c3(collagen alpha-1(XXV111) chain isoform X4) c4(305980) c5(305981, 305982, 305983, 305984, 305985, 305986) c6( ) c7(xa, bK); #c1(COL28A1) c2(XP_011513668) c3(collagen alpha-1(XXV111) chain isoform X7) c4( ) c5(305987, 305988, 305989, 305990, 305991, 305992, 305993) c6( ) c7(xa, bK); #c1(COL2A1) c2(NP_001835) c3(collagen alpha-1(II) chain isoform 1 precursor) c4(121562) c5( ) c6( ) c7(T, aSz, fR, rV, aSy, bB, aSl, aSn, Na, aRy, HV, rw, Fo, aRY, aSj, alK, Ih, Az, aSt, aRg, rq, BP, apy, fy, aSs, Ic, aSg, vl, n, aRt, aSv, ai, ajO, rl, ey, Wr, rk, Dg, aSr, aSm, vU, In, Be, aSx, IA, Tr, aSh, Eh, q, aRo, aSo, Id, rD, Nc, an, aSi, rv, jr, rh, Y, ev, fO, r, rs, Ci, aDQ, vk, vK, mG, HW, aSu, aDR, aSk, gT, kh, ade, aSw, gb, Dj, ji, aFI, aGS, zr, bE, aq, aSp, y, X, aCR); #c1(COL2A1) c2(NP_149162) c3(collagen alpha-1(II) chain isoform 2 precursor) c4(227430, 227431) c5( ) c6( ) c7(T, aSz, fR, rV, aSy, bB, aSl, aSn, Na, aRy, HV, rw, Fo, aRY, aSj, alK, Ih, Az, aSt, aRq, rq, BP, apy, fy, aSs, Ic, aSq, vl, n, aRt, aSv, ai, ajO, rl, ey, Wr, rk, Dg, aSr, aSm, vU, In, Be, aSx, IA, Tr, aSh, Eh, q, aRo, aSo, Id, rD, Nc, an, aSi, rv, jr, rh, Y, ev, fO, r, rs, Ci, aDQ, vk, vK, mG, HW, aSu, aDR, aSk, gT, kh, ade, aSw, gb, Dj, ji, aFI, aGS, zr, bE, aq, aSp, y, X, aCR); #c1(COL2A1) c2(XP_011536236) c3(collagen alpha-1(II) chain isoform X2) c4( ) c5(333558) c6( ) c7(T, aSz, fR, rV, aSy, bB, aSl, aSn, Na, aRy, HV, rw, Fo, aRY, aSj, alK, Ih, Az, aSt, aRq, rq, BP, apy, fy, aSs, Ic, aSg, vl, n, aRt, aSv, ai, ajO, rl, ey, Wr, rk, Dg, aSr, aSm, vU, In, Be, aSx, IA, Tr, aSh, Eh, q, aRo, aSo, Id, rD, Nc, an, aSi, rv, jr, rh, Y, ev, fO, r, rs, Ci, aDQ, vk, vK, mG, HW, aSu, aDR, aSk, gT, kh, ade, aSw, gb, Dj, ji, aFI, aGS, zr, bE, ag, aSp, y, X, aCR); #c1(COL2A1) c2(XP_011536237) c3(collagen alpha-1(II) chain isoform X3) c4(333559) c5(333560, 333561, 333562, 333563, 333564, 333565, 333566, 333567, 333568, 333569, 333570, 333571, 333572, 333573, 333574, 333575, 333576, 333577, 333578, 333579) c6( ) c7(T, aSz, fR, rV, aSy, bB, aSl, aSn, Na, aRy, HV, rw, Fo, aRY, aSj, alK, Ih, Az, aSt, aRq, rq, BP, apy, fy, aSs, Ic, aSq, vl, n, aRt, aSv, ai, ajO, rl, ey, Wr, rk, Dg, aSr, aSm, vU, In, Be, aSx, IA, Tr, aSh, Eh, q, aRo, aSo, Id, rD, Nc, an, aSi, rv, jr, rh, Y, ev, fO, r, rs, Ci, aDQ, vk, vK, mG, HW, aSu, aDR, aSk, gT, kh, ade, aSw, gb, Dj, ji, aFI, aGS, zr, bE, aq, aSp, y, X, aCR); #c1(COL3A1) c2(NP_000081) c3(collagen alpha-1(III) chain preproprotein) c4(1384, 1385) c5(1386, 1387, 1388, 1389, 1390, 1391, 1392, 1393, 1394, 1395, 1396, 1397, 1398, 1399, 1400) c6( ) c7(aSB, aSH, sY, vl, fR, sQ, IP, eR, wJ, aw, al, Av, IL, aSA, cz, n, aSE, dG, j, jE, Mi, vp, Cd, Eh, aSG, kL, cc, ws, rl, le, aSF, jy, HR, K, IQ, zp, Iz, eN, af, uQ, aSC, bf, cH, Fz, hl, fc, fQ, Au, aSD, uC, dr, op, LB, ac, FB, bm, uo, ut, rx, aS, tr, be, ei, cE, JO, us); #c1(COL4A1) c2(NP_001290039) c3(collagen alpha-1(IV) chain isoform 2 precursor) c4(114948) c5(114949, 114950, 114951, 114952, 114953, 114954, 114955, 114956, 114957) c6(114958, 114959) c7(lp, sY, Ez, T, dD, aib, aw, cz, j, HS, ah, aSL, eq, Id, eA, ad, aJr, aSM, sd, oj, aT, vw, us, K, an, he, aSl, ae, vl, rz, d, cH, aW, Y, aSK, ack, aSJ, S, uC, D, aLO, ac, uz, aS, dy, IM, Ex, If); #c1(COL4A1) c2(NP_001836) c3(collagen alpha-1(IV) chain isoform 1 preproprotein) c4(121563, 121564, 121565, 121566) c5(121567, 121568, 121569, 121570, 121571, 121572, 121573, 121574, 121575, 121576, 121577, 121578, 121579, 121580, 121581, 121582, 121583, 121584, 121585, 121586, 121587, 121588, 121589, 121590) c6(121591, 121592, 121593, 121594, 121595, 121596) c7(lp, sY, Ez, T, dD, aib, aw, cz, j, HS, ah, aSL, eq, Id, eA, ad, aJr, aSM, sd, oj, aT, vw, us, K, an, he, aSl, ae, vl, rz, d, cH, aW, Y, aSK, ack, aSJ, S, uC, D, aLO, ac, uz, aS, dy, IM, Ex, If); #c1(COL4A1) c2(XP_011519350) c3(collagen alpha-1(IV) chain isoform X1) c4( ) c5(314008, 314009, 314010) c6( ) c7(lp, sY, Ez, T, dD, aib, aw, cz, j, HS, ah, aSL, eq, Id, eA, ad, aJr, aSM, sd, oj, aT, vw, us, K, an, he, aSl, ae, vl, rz, d, cH, aW, Y, aSK, ack, aSJ, S, uC, D, aLO, ac, uz, aS, dy, IM, Ex, If); #c1(COL4A2) c2(NP_001837) c3(collagen alpha-2(IV) chain preproprotein) c4(121597, 121598, 121599) c5(121600, 121601, 121602, 121603, 121604, 121605, 121606, 121607, 121608, 121609, 121610, 121611, 121612, 121613, 121614, 121615, 121616, 121617, 121618, 121619, 121620, 121621) c6( ) c7(lp, sY, T, e, n, j, ci, uE, ah, Id, ad, ft, sd, aE, oj, aT, ey, K, he, uM, aW, Y, aSK, uC, bz, fq, aLO, ac, aSN, dy); #c1(COL4A3) c2(NP_000082) c3(collagen alpha-3(IV) chain precursor) c4(1401, 1402) c5( ) c6( ) c7(bM, sY, eR, aSP, sw, ah, HS, uE, fr, aY, aSR, eA, ad, fU, aSU, ah, vw, K, aSS, ae, aST, uM, DA, acF, Y, ff, anQ, aSO, en, uC, sk, aLO, eM, iA, bE, hc, fP, PV, at, dy, Hb, ME, aSQ, all, B, jr); #c1(COL4A3) c2(XP_005246333) c3(collagen alpha-3(IV) chain isoform X1) c4(267051, 267052, 267053) c5( ) c6( ) c7(bM, sY, eR, aSP, sw, ah, HS, uE, fr, aY, aSR, eA, ad, fU, aSU, ah, vw, K, aSS, ae, aST, uM, DA, acF, Y, ff, anQ, aSO, en, uC, sk, aLO, eM, iA, bE, hc, fP, PV, at, dy, Hb, ME, aSQ, all, B, jr); #c1(COL4A3) c2(XP_005246334) c3(collagen alpha-3(IV) chain isoform X2) c4( ) c5(267054) c6( ) c7(bM, sY, eR, aSP, sw, ah, HS, uE, fr, aY, aSR, eA, ad, fU, aSU, ah, vw, K, aSS, ae, aST, uM, DA, acF, Y, ff, anQ, aSO, en, uC, sk, aLO, eM, iA, bE, hc, fP, PV, at, dy, Hb, ME, aSQ, all, B, jr); #c1(COL4A3) c2(XP_005246337) c3(collagen alpha-3(IV) chain isoform X6) c4( ) c5(267055, 267056, 267057, 267058, 267059, 267060, 267061, 267062, 267063, 267064, 267065, 267066, 267067, 267068, 267069, 267070, 267071, 267072, 267073, 267074, 267075, 267076, 267077, 267078) c6( ) c7(bM, sY, eR, aSP, sw, ah, HS, uE, fr, aY, aSR, eA, ad, fQ, aSO, ah, vw, K, aSS, ae, aST, uM, DA, acF, Y, ff, anQ, aSO, en, uC, sk, aLO, eM, iA, bE, hc, fP, PV, at, dy, Hb, ME, aSQ, all, B, jr); #c1(COL4A3) c2(XP_011508858) c3(collagen alpha-3(IV) chain isoform X4) c4( ) c5(299450, 299451, 299452, 299453, 299454, 299455, 299456) c6( ) c7(bM, sY, eR, aSP, sw, ah, HS, uE, fr, aY, aSR, eA, ad, fQ, aSO, ah, vw, K, aSS, ae, aST, uM, DA, acF, Y, ff, anQ, aSO, en, uC, sk, aLO, eM, iA, bE, hc, fP, PV, at, dy, Hb, ME, aSQ, all, B, jr); #c1(COL4A3BP) c2(NP_001123577) c3(collagen type IV alpha-3-binding protein isoform 3) c4(47707, 47708, 47709) c5(47710, 47711, 47712, 47713, 47714, 47715, 47716, 47717, 47718, 47719, 47720, 47721, 47722) c6( ) c7(T, af, eM, aW, hc, Y, eZ, aT, ME, m, fL, t, H, mC, L); #c1(COL4A3BP) c2(NP_005704) c3(collagen type IV alpha-3-binding protein isoform 1) c4(158665) c5( ) c6( ) c7(T, af, eM, aW, hc, Y, eZ, aT, ME, m, fL, t, H, mC, L); #c1(COL4A3BP) c2(NP_112729) c3(collagen type IV alpha-3-binding protein isoform 2) c4(221547, 221548, 221549) c5(221550, 221551, 221552, 221553, 221554, 221555, 221556, 221557, 221558, 221559, 221560, 221561, 221562, 221563, 221564, 221565, 221566, 221567, 221568) c6( ) c7(T, af, eM, aW, hc, Y, eZ, aT, ME, m, fL, t, H, mC, L); #c1(COL4A4) c2(XP_005246338) c3(collagen alpha-4(IV) chain isoform X1) c4(267079, 267080) c5(267081) c6( ) c7(sY, eR, dK, HS, aSV, aY, aSR, fU, aSU, ah, vw, aSS, uM, aST, acF, uC, sk, aLO, mG, fP, dy, aSQ, jr); #c1(COL4A4) c2(XP_011508873) c3(collagen alpha-4(IV) chain isoform X15) c4( ) c5(299457, 299458, 299459, 299460, 299461, 299462, 299463, 299464, 299465, 299466, 299467, 299468) c6( ) c7(sY, eR, dK, HS, aSV, aY, aSR, fO, aSO, ah, vw, aSS, uM, aST, acF, uC, sk, aLO, mG, fP, dy, aSQ, jr); #c1(COL4A4) c2(XP_011508874) c3(collagen alpha-4(IV) chain isoform X16) c4( ) c5(299469, 299470) cG( ) c7(sY, eR, dK, HS, aSV, aY, aSR, fO, aSO, ah, vw, aSS, uM, aST, acF, uC, sk, aLO, mG, fP, dy, aSQ, jr); #c1(COL4A5) c2(NP_000486) c3(collagen alpha-5(IV) chain isoform 1 precursor) c4(9828) c5( ) c6( ) c7(bM, sY, T, kh, eR, dM, ha, ah, HS, nA, uE, aY, aSR, rc, Zp, IS, bW, nd, aT, ey, aSX, uM, acF, IR, aW, nf, g, aTa, aRC, uC, bz, aTb, dr, op, aSZ, LB, sk, aLO, Bv, afZ, hc, mG, vA, agI, aSW, dy, vF, aSQ, aSY, iu, jr); #c1(COL4A5) c2(XP_005262127) c3(collagen alpha-5(IV) chain isoform X2) c4( ) c5(277751) cG( ) c7(bM, sY, T, kh, eR, dM, ha, ah, HS, nA, uE, aY, aSR, rc, Zp, IS, bW, nd, aT, ey, aSX, uM, acF, IR, aW, nf, g, aTa, aRC, uC, bz, aTb, dr, op, aSZ, LB, sk, aLO, Bv, afZ, hc, mG, vA, agI, aSW, dy, vF, aSQ, aSY, iu, jr); #c1(COL4A5) c2(XP_005262129) c3(collagen alpha-5(IV) chain isoform X5) c4( ) c5(277752) cG( ) c7(bM, sY, T, kh, eR, dM, ha, ah, HS, nA, uE, aY, aSR, rc, Zp, IS, bW, nd, aT, ey, aSX, uM, acF, IR, aW, nf, g, aTa, aRC, uC, bz, aTb, dr, op, aSZ, LB, sk, aLO, Bv, afZ, hc, mG, vA, agI, aSW, dy, vF, aSQ, aSY, iu, jr); #c1(COL4A5) c2(XP_006724679) c3(collagen alpha-5(IV) chain isoform X1) c4(296251, 296252) c5(296253) c6( ) c7(bM, sY, T, kh, eR, dM, ha, ah, HS, nA, uE, aY, aSR, rc, Zp, IS, bW, nd, aT, ey, aSX, uM, acF, IR, aW, nf, g, aTa, aRC, uC, bz, aTb, dr, op, aSZ, LB, sk, aLO, Bv, afZ, hc, mG, vA, agI, aSW, dy, vF, aSQ, aSY, iu, jr); #c1(COL4A5) c2(XP_011529153) c3(collagen alpha-5(IV) chain isoform X6) c4( ) c5(324498, 324499, 324500, 324501, 324502, 324503, 324504, 324505, 324506, 324507, 324508, 324509, 324510, 324511, 324512, 324513, 324514) c6( ) c7(bM, sY, T, kh, eR, dM, ha, ah, HS, nA, uE, aY, aSR, rc, Zp, IS, bW, nd, aT, ey, aSX, uM, acF, IR, aW, nf, g, aTa, aRC, uC, bz, aTb, dr, op, aSZ, LB, sk, aLO, Bv, afZ, hc, mG, vA, agI, aSW, dy, vF, aSQ, aSY, iu, jr); #c1(COL4A6) c2(NP_001274688) c3(collagen alpha-G(IV) chain isoform 4 precursor) c4(106660, 106661) c5( ) c6( ) c7(sY, T, aTc, s, op, bE, Zp, vA, ff, bB, dy, aTd, HS, en, g, aY, uC, Bh, aTb, dr, IS); #c1(COL4A6) c2(NP_001274689) c3(collagen alpha-6(IV) chain isoform 5 precursor) c4(106662) c5(106663, 106664, 106665, 106666, 106667, 106668, 106669, 106670, 106671, 106672, 106673, 106674) c6( ) c7(sY, T, aTc, s, op, bE, Zp, vA, ff, bB, dy, aTd, HS, en, g, aY, uC, Bh, aTb, dr, IS); #c1(COL4A6) c2(NP_001838) c3(collagen alpha-6(IV) chain isoform A precursor) c4(121622) c5( ) c6( ) c7(sY, T, aTc, s, op, bE, Zp, vA, ff, bB, dy, aTd, HS, en, q, aY, uC, Bh, aTb, dr, IS); #c1(COL4A6) c2(NP_378667) c3(collagen alpha-6(IV) chain isoform B precursor) c4(228938, 228939, 228940) c5( ) c6( ) c7(sY, T, aTc, s, op, bE, Zp, vA, ff, bB, dy, aTd, HS, en, g, aY, uC, Bh, aTb, dr, IS); #c1(COL4A6) c2(XP_011529154) c3(collagen alpha-6(IV) chain isoform X2) c4( ) c5(324515, 324516, 324517, 324518, 324519, 324520) c6( ) c7(sY, T, aTc, s, op, bE, Zp, vA, ff, bB, dy, aTd, HS, en, q, aY, uC, Bh, aTb, dr, IS); #c1(COL4A6) c2(XP_011529155) c3(collagen alpha-6(IV) chain isoform X3) c4( ) c5(324521, 324522, 324523, 324524, 324525, 324526, 324527, 324528, 324529, 324530, 324531, 324532, 324533, 324534, 324535, 324536, 324537, 324538, 324539, 324540, 324541, 324542, 324543, 324544, 324545) c6( ) c7(sY, T, aTc, s, op, bE, Zp, vA, ff, bB, dy, aTd, HS, en, q, aY, uC, Bh, aTb, dr, IS); #c1(COL4A6) c2(XP_011529156) c3(collagen alpha-6(IV) chain isoform X4) c4( ) c5(324546) c6( ) c7(sY, T, aTc, s, op, bE, Zp, vA, ff, bB, dy, aTd, HS, en, q, aY, uC, Bh, aTb, dr, IS); #c1(COL5A1) c2(NP_000084) c3(collagen alpha-1(V) chain isoform 1 preproprotein) c4(1403) c5(1404, 1405, 1406, 1407, 1408, 1409, 1410, 1411, 1412, 1413) c6(1414, 1415) c7(sY, pG, fR, sQ, IL, ci, zP, Eh, pn, ip, HV, aTf, Cj, rl, ah, IQ, aDp, ant, zQ, la, aTg, aTh, uC, dr, uo, ut, ro, aTe); #c1(COL5A1) c2(NP_001265003) c3(collagen alpha-1(V) chain isoform 2 preproprotein) c4(97691, 97692) c5(97693, 97694, 97695, 97696, 97697, 97698, 97699, 97700, 97701, 97702, 97703, 97704, 97705, 97706, 97707, 97708) c6(97709, 97710, 97711, 97712) c7(sY, PG, fR, sQ, IL, ci, zP, Eh, pn, ip, HV, aTf, Cj, rl, ah, IQ, aDp, ant, zQ, la, aTg, aTh, uC, dr, uo, ut, ro, aTe); #c1(CDL5A2) c2(NP_000384) c3(collagen alpha-2(V) chain preproprotein) c4(8357, 8358) c5(8359, 8360, 8361, 8362, 8363, 8364, 8365, 8366, 8367, 8368, 8369, 8370) c6( ) c7(sY, T, HV, uC, fR, sQ, rl, Eh, e, IL, r, uo, aTg, ut, aaL, j, 10, ei, mo, aKo, g); #c1(COL5A2) c2(XP_011508875) c3(collagen alpha-2(V) chain isoform X1) c4( ) c5(299471, 299472, 299473) c6( ) c7(sY, T, HV, uC, fR, sQ, rl, Eh, e, IL, r, uo, aTg, ut, aaL, j, IQ, ei, mo, aKo, q); #c1(COL5A3) c2(NP_056534) c3(collagen alpha-3(V) chain preproprotein) c4(187987) c5(187988, 187989, 187990, 187991, 187992, 187993) c6( ) c7(Eh); #c1(COL5A3) c2(XP_011526344) c3(collagen alpha-3(V) chain isoform X1) c4( ) c5(320648) c6( ) c7(Eh); #c1(COL6A1) c2(NP_001839) c3(collagen alpha-1(VI) chain precursor) c4(121623, 121624, 121625) c5(121626, 121627, 121628, 121629, 121630, 121631, 121632, 121633, 121634, 121635, 121636, 121637, 121638, 121639, 121640, 121641, 121642, 121643) c6( ) c7(av, mR, Wn, aBq, xs, oj, bD, arw, asR, j, v, as, akb, f, aTi, qW, af); #c1(COL6A2) c2(NP_478054) c3(collagen alpha-2(VI) chain isoform 2C2a precursor) c4(230820) c5(230821, 230822, 230823, 230824, 230825, 230826, 230827, 230828, 230829, 230830) c6( ) c7(ly, aTj, Wn, eE, xs, aTk, oj, mg, fQ, yU, arw, yZ, bD, f, aTi, af); #c1(COL6A2) c2(NP_478055) c3(collagen alpha-2(VI) chain isoform 2C2a precursor) c4(230831, 230832) c5(230833, 230834, 230835, 230836, 230837, 230838, 230839, 230840, 230841, 230842, 230843, 230844, 230845, 230846, 230847, 230848) c6( ) c7(ly, aTj, Wn, eE, xs, aTk, oj, mg, fQ, yU, am yZ, bD, f, aTi, af); #c1(COL6A2) c2(XP_011527754) c3(collagen alpha-2(VI) chain isoform X1) c4(322735) c5(322736, 322737, 322738, 322739, 322740, 322741) c6( ) c7(ly, aTj, Wn, eE, xs, aTk, oj, mg, fQ, yU, ara, yZ, bD, f, aTi, af); #c1(COL6A3) c2(NP_004360) c3(collagen alpha-3(VI) chain isoform 1 precursor) c4(145669, 145670) c5(145671, 145672, 145673, 145674, 145675, 145676, 145677, 145678) c6(145679, 145680) c7(VC, ly, T, ac, aE, Wn, Y, eE, xs, oj, ara, aTl, v, kp, zu, f, aTi, ad, aTm); #c1(CDL6A3) c2(NP_476505) c3(collagen alpha-3(VI) chain isoform 2 precursor) c4(230623) c5(230624, 230625, 230626, 230627, 230628, 230629, 230630, 230631) c6(230632, 230633) c7(VC, ly, T, ac, aE, Wn, Y, eE, xs, oj, ara, aTl, v, kp, zu, f, aTi, ad, aTm); #c1(COL6A3) c2(NP_476506) c3(collagen alpha-3(VI) chain isoform 3 precursor) c4(230634) c5(230635, 230636, 230637, 230638, 230639, 230640) c6( ) c7(VC, ly, T, ac, aE, Wn, Y, eE, xs, oj, ara, aTl, v, kp, zu, f, aTi, ad, aTm); #c1(COL6A3) c2(NP_476507) c3(collagen alpha-3(VI) chain isoform 4 precursor) c4(230641) c5(230642, 230643, 230644, 230645, 230646, 230647) c6( ) c7(VC, ly, T, ac, aE, Wn, Y, eE, xs, oj, ara, aTl, v, kp, zu, f, aTi, ad, aTm); #c1(COL6A3) c2(NP_476508) c3(collagen alpha-3(VI) chain isoform 5 precursor) c4(230648, 230649) c5(230650, 230651, 230652, 230653, 230654, 230655, 230656, 230657, 230658, 230659, 230660, 230661, 230662, 230663, 230664, 230665, 230666, 230667, 230668, 230669, 230670, 230671) c6(230672, 230673, 230674, 230675, 230676, 230677) c7(VC, ly, T, ac, aE, Wn, Y, eE, xs, oj, ara, aTl, v, kp, zu, f, aTi, ad, aTm); #c1(COL6A3) c2(XP_005246122) c3(collagen alpha-3(VI) chain isoform X3) c4(266938) c5(266939, 266940, 266941, 266942, 266943, 266944, 266945, 266946) c6(266947, 266948) c7(VC, ly, T, ac, aE, Wn, Y, eE, xs, oj, ara, aTl, v, kp, zu, f, aTi, ad, aTm); #c1(COL6A3) c2(XP_011508877) c3(collagen alpha-S(VI) chain isoform X5) c4( ) c5(299474) c6( ) c7(VC, ly, T, ac, aE, Wn, Y, eE, xs, oj, arw, aTl, v, kp, zu, f, aTi, ad, aTm); #c1(COL6A5) c2(NP_001265227) c3(collagen alpha-5(VI) chain isoform 1 precursor) c4(97971, 97972, 97973, 97974, 97975) c5(97976, 97977, 97978, 97979, 97980, 97981, 97982, 97983, 97984, 97985, 97986, 97987, 97988, 97989, 97990, 97991, 97992, 97993, 97994, 97995, 97996, 97997, 97998, 97999) c6(98000, 98001, 98002, 98003, 98004, 98005) c7(Wn, aTi, am eE, bM); #c1(COL6A5) c2(NP_694996) c3(collagen alpha-5(VI) chain isoform 2 precursor) c4( ) c5(245620, 245621, 245622, 245623, 245624, 245625, 245626, 245627) c6(245628, 245629) c7(Wn, aTi, am eE, bM); #c1(COL6A5) c2(XP_011510923) c3(collagen alpha-5(VI) chain isoform X1) c4( ) c5(301398, 301399, 301400, 301401, 301402, 301403, 301404, 301405) c6(301406, 301407) c7(Wn, aTi, am, eE, bM); #c1(COL7A1) c2(NP_000085) c3(collagen alpha-1(VII) chain precursor) c4(1416, 1417) c5(1418, 1419, 1420, 1421, 1422, 1423, 1424, 1425, 1426, 1427, 1428, 1429, 1430, 1431, 1432, 1433, 1434, 1435, 1436, 1437, 1438, 1439, 1440, 1441, 1442, 1443, 1444, 1445, 1446, 1447, 1448, 1449, 1450, 1451, 1452, 1453, 1454, 1455, 1456, 1457, 1458, 1459, 1460, 1461, 1462, 1463, 1464, 1465, 1486, 1467, 1468, 1469, 1470, 1471, 1472, 1473, 1474, 1475, 1476, 1477, 1478, 1479, 1480, 1481, 1482, 1483, 1484, 1485, 1486, 1487, 1488, 1489, 1490, 1491, 1492, 1493, 1494, 1495, 1496, 1497, 1498, 1499, 1500, 1501, 1502, 1503, 1504, 1505, 1506, 1507, 1508, 1509, 1510, 1511, 1512, 1513, 1514, 1515, 1516, 1517, 1518, 1519) c6(1520, 1521, 1522, 1523, 1524) c7(T, yk, n, aTy, iD, ci, aTs, XM, aTr, aTt, aT, rO, aTx, IQ, aTn, afu, aTp, aTv, aTq, aTo, ff, asL, arK, en, dr, aTw, aAW, aTu, XN, adg, it); #c1(COL7A1) c2(XP_011531644) c3(collagen alpha-1(VII) chain isoform X7) c4( ) c5(327784, 327785) c6( ) c7(T, yk, n, aTy, iD, ci, aTs, XM, aTr, aTt, aT, rO, aTx, IQ, aTn, afu, aTp, aTv, aTq, aTo, ff, asL, arK, en, dr, aTw, aAW, aTu, XN, adg, it); #c1(COL8A1) c2(NP_065084) c3(collagen alpha-1(VIII) chain precursor) c4(203776, 203777) c5(203778, 203779, 203780, 203781, 203782, 203783, 203784, 203785, 203786, 203787, 203788, 203789, 203790, 203791, 203792, 203793) c6( ) c7(bL, Lu, aOu, W, nb, pZ, IR, yL, EQ, Be); #c1(COL8A2) c2(NP_001281276) c3(collagen alpha-2(VIII) chain isoform 2) c4(111683) c5(111684, 111685, 111686, 111687, 111688, 111689, 111690, 111691, 111692, 111693, 111694, 111695, 111696, 111697, 111698, 111699, 111700, 111701, 111702, 111703, 111704, 111705, 111706, 111707, 111708, 111709, 111710, 111711) c6( ) c7(Lu, aOu, IR, pZ, aSP, ah, aou, K, aTz, B); #c1(COL9A1) c2(NP_001842) c3(collagen alpha-1(IX) chain isoform 1 precursor) c4(121644) c5(121645, 121646, 121647, 121648, 121649, 121650, 121651, 121652, 121653, 121654, 121655, 121656) c6( ) c7(eA, aR, aTB, XW, ec, ry, rl, h, By, m jf, IR, ih, dq, Iv, aDQ, vK, BU, qe, mG, In, Be, aDR, ER, aTA, R, zB); #c1(COL9A1) c2(NP_511040) c3(collagen alpha-1(IX) chain isoform 2 precursor) c4(231108, 231109) c5(231110, 231111, 231112, 231113, 231114, 231115, 231116, 231117, 231118, 231119, 231120, 231121) c6( ) c7(eA, aR, aTB, XW, ec, ry, rl, h, By, m jf, IR, ih, dq, Iv, aDQ, vK, BU, qe, mG, In, Be, aDR, ER, aTA, R, zB); #c1(COL9A1) c2(XP_011533731) c3(collagen alpha-1(IX) chain isoform X1) c4(329817) c5( ) c6( ) c7(eA, aR, aTB, XW, ec, ry, rl, h, By, m jf, IR, ih, dq, Iv, aDQ, vK, BU, qe, mG, In, Be, aDR, ER, aTA, R, zB); #c1(COL9A2) c2(XP_011539020) c3(collagen alpha-2(IX) chain isoform X5) c4( ) c5(337084) c6( ) c7(aTD, aTE, aR, eA, ec, aTF, rl, ry, h, rv, jf, ih, dq, bQ, cM, Iv, aik, vK, BU, qe, HP, In, uo, aef, aTC, ER, R, zB, rp); #c1(COL9A3) c2(NP_001844) c3(collagen alpha-3(IX) chain precursor) c4(121657) c5(121658, 121659, 121660) c6(121661, 121662) c7(aj, bX, aTE, aR, J, eA, ec, aTF, rl, ry, h, be, jf, A, Y, ih, dq, aTG, Iv, aik, vK, BU, qe, In, aef, ER, R, zB, rp); #c1(COL9A3) c2(XP_011526845) c3(collagen alpha-3(IX) chain isoform X1) c4(321198) c5( ) c6( ) c7(aj, bX, aTE, aR, J, eA, ec, aTF, rl, ry, h, bc, jf, A, Y, ih, dq, aTG, Iv, aik, vK, BU, qe, In, aef, ER, R, zB, rp); #c1(COL9A3) c2(XP_011526846) c3(collagen alpha-3(IX) chain isoform X2) c4( ) c5(321199, 321200, 321201, 321202, 321203, 321204, 321205, 321206, 321207, 321208) c6(321209, 321210) c7(aj, bX, aTE, aR, J, eA, ec, aTF, rl, ry, h, bc, jf, A, Y, ih, dq, aTG, Iv, aik, vK, BU, qe, In, aef, ER, R, zB, rp); #c1(COL9A3) c2(XP_011526849) c3(collagen alpha-3(IX) chain isoform X5) c4( ) c5(321211, 321212, 321213, 321214, 321215, 321216, 321217, 321218) c6(321219, 321220) c7(aj, bX, aTE, aR, J, eA, ec, aTF, rl, ry, h, bc, jf, A, Y, ih, dq, aTG, Iv, aik, vK, BU, qe, In, aef, ER, R, zB, rp); #c1(COLCA1) c2(NP_001289574) c3(colorectal cancer-associated protein 1) c4(114281) c5(114282, 114283, 114284, 114285, 114286, 114287, 114288, 114289, 114290, 114291, 114292, 114293, 114294, 114295) c6( ) c7(bB, bE, q, r); #c1(COLCA2) c2(NP_001258386) c3(colorectal cancer-associated protein 2 isoform 2) c4( ) c5(96031, 96032, 96033, 96034, 96035, 96036, 96037, 96038, 96039, 96040, 96041, 96042, 96043) c6( ) c7(bB, bE, q, r); #c1(COLCA2) c2(NP_001258387) c3(colorectal cancer-associated protein 2 isoform 1) c4( ) c5(96044) c6( ) c7(bB, bE, q, r); #c1(COLCA2) c2(XP_011540891) c3(colorectal cancer-associated protein 2 isoform X1) c4(339434, 339435) c5(339436, 339437) c6( ) c7(bB, bE, q, r); #c1(COLEC10) c2(NP_006429) c3(collectin-10 precursor) c4(165141) c5(165142, 165143, 165144, 165145, 165146, 165147) c6( ) c7(Og, T, Of, jh, aj); #c1(COLEC11) c2(NP_001242912) c3(collectin-11 isoform d precursor) c4( ) c5(89241, 89242, 89243, 89244, 89245) c6( ) c7(asp, ac, aTl, Az, U, aTH, h, aTJ, dy); #c1(COLEC11) c2(NP_001242914) c3(collectin-11 isoform f precursor) c4(89246, 89247) c5(89248, 89249, 89250, 89251, 89252, 89253, 89254) c6( ) c7(asp, ac, aTl, Az, U, aTH, h, aTJ, dy); #c1(COLEC11) c2(NP_001242916) c3(collectin-11 isoform h) c4(89255) c5(89256, 89257, 89258, 89259, 89260, 89261) c6( ) c7(asp, ac, aTl, Az, U, aTH, h, aTJ, dy); #c1(COLEC11) c2(NP_001242917) c3(collectin-11 isoform i) c4(89262) c5(89263, 89264, 89265, 89266, 89267, 89268) c6( ) c7(asp, ac, aTl, Az, U, aTH, h, aTJ, dy); #c1(COLEC11) c2(NP_001242918) c3(collectin-11 isoform j) c4(89269) c5(89270, 89271, 89272, 89273, 89274, 89275) c6( ) c7(asp, ac, aTl, Az, U, aTH, h, aTJ, dy); #c1(COLEC11) c2(NP_076932) c3(collectin-11 isoform a precursor) c4( ) c5(214301, 214302, 214303, 214304, 214305) c6( ) c7(asp, ac, aTl, Az, U, aTH, h, aTJ, dy); #c1(COLEC11) c2(NP_954705) c3(collectin-11 isoform b) c4(261326) c5(261327, 261328, 261329, 261330, 261331, 261332) c6( ) c7(asp, ac, aTl, Az, U, aTH, h, aTJ, dy); #c1(COLEC11) c2(XP_006711960) c3(collectin-11 isoform X2) c4(286308) c5(286309) c6( ) c7(asp, ac, aTl, Az, U, aTH, h, aTJ, dy); #c1(COLEC12) c2(NP_569057) c3(collectin-12) c4(233623) c5(233624, 233625, 233626, 233627, 233628, 233629) c6( ) c7(jW, Ae, oj, Ak, QK, IB); #c1(COLGALT2) c2(NP_001290349) c3(procollagen galactosyltransferase 2 isoform 2 precursor) c4(115221) c5(115222, 115223, 115224, 115225, 115226, 115227) c6( ) c7(an); #c1(COLGALT2) c2(NP_001290350) c3(procollagen galactosyltransferase 2 isoform 3) c4( ) c5(115228, 115229, 115230, 115231, 115232, 115233) c6( ) c7(an); #c1(COLGALT2) c2(NP_055916) c3(procollagen galactosyltransferase 2 isoform 1 precursor) c4(184466, 184467) c5(184468, 184469, 184470, 184471, 184472, 184473) c6( ) c7(an); #c1(COLGALT2) c2(XP_011507640) c3(procollagen galactosyltransferase 2 isoform X4) c4(297580) c5(297581, 297582, 297583, 297584, 297585, 297586) c6( ) c7(an); #c1(COLQ) c2(NP_005668) c3(acetylchnlinesterase collagenic tail peptide isoform 1 precursor) c4(158385, 158386, 158387) c5(158388, 158389, 158390, 158391, 158392, 158393, 158394, 158395, 158396, 158397, 158398) c6( ) c7(xl, xA, wX); #c1(COLQ) c2(NP_536799) c3(acetylchnlinesterase collagenic tail peptide isoform II precursor) c4(231332, 231333) c5(231334) c6( ) c7(xl, xA, wX); #c1(COLQ) c2(NP_536800) c3(acetylchnlinesterase collagenic tail peptide isoform III precursor) c4(231335, 231336) c5(231337, 231338, 231339, 231340, 231341, 231342, 231343, 231344, 231345, 231346, 231347, 231348, 231349, 231350, 231351, 231352, 231353, 231354, 231355, 231356, 231357, 231358, 231359, 231360, 231361, 231362, 231363, 231364, 231365, 231366, 231367, 231368, 231369, 231370, 231371, 231372) c6( ) c7(xl, xA, wX); #c1(COMMD1) c2(NP_689729) c3(COMM domain-containing protein 1) c4(243701, 243702, 243703, 243704, 243705) c5(243706, 243707, 243708, 243709, 243710, 243711, 243712, 243713, 243714, 243715, 243716, 243717, 243718, 243719, 243720, 243721, 243722, 243723, 243724, 243725, 243726, 243727, 243728, 243729, 243730, 243731, 243732, 243733, 243734, 243735, 243736, 243737, 243738, 243739, 243740, 243741, 243742, 243743, 243744, 243745, 243746, 243747, 243748, 243749, 243750, 243751, 243752, 243753, 243754, 243755, 243756, 243757, 243758, 243759, 243760, 243761, 243762, 243763, 243764, 243765, 243766, 243767, 243768, 243769, 243770, 243771, 243772, 243773, 243774, 243775, 243776, 243777, 243778, 243779, 243780, 243781, 243782, 243783, 243784, 243785, 243786, 243787, 243788, 243789, 243790, 243791, 243792, 243793, 243794, 243795, 243796, 243797, 243798, 243799, 243800) c6(243801) c7(eY, T, aaQ, aTK, al, ep, aTL, h, dq, fe, ji, iV, als, ao, vi); #c1(COMMD1) c2(XP_011530860) c3(COMM domain-containing protein 1 isoform X1) c4( ) c5(326856, 326857, 326858, 326859, 326860, 326861, 326862) c6( ) c7(eY, T, aaQ, aTK, al, ep, aTL, h, dq, fe, ji, iV, als, ao, vi); #c1(COMMD1) c2(XP_011530861) c3(COMM domain-containing protein 1 isoform X2) c4(326863, 326864, 326865) c5( ) c6( ) c7(eY, T, aaQ, aTK, al, ep, aTL, h, dq, fe, ji, iV, als, ao, vi); #c1(COMMD1) c2(XP_011530862) c3(COMM domain-containing protein 1 isoform X3) c4( ) c5(326866, 326867, 326868, 326869, 326870, 326871, 326872, 326873, 326874, 326875, 326876, 326877, 326878, 326879, 326880) c6( ) c7(eY, T, aaQ, aTK, al, ep, aTL, h, dq, fe, ji, iV, als, ao, vi); #c1(COMMD10) c2(NP_057228) c3(COMM domain-containing protein 10) c4(189599) c5(189600, 189601, 189602, 189603, 189604, 189605) c6( ) c7(c); #c1(COMMD3-BMI1) c2(NP_001190991) c3(COMMD3-BMI1 read-through protein) c4(80414, 80415, 80416, 80417, 80418, 80419, 80420, 80421, 80422) c5(80423, 80424, 80425, 80426, 80427, 80428, 80429, 80430, 80431, 80432, 80433, 80434, 80435, 80436, 80437, 80438, 80439, 80440) c6( ) c7(T, if, fd, bB, ci, x, aE, SV, ja, K, hu, DY, pk, eL, yo, aW, arK, as, eF, cm, bw, eM, m, k, ht, n, qN, hr, BI, ft, jz, eV, hn, dL, asH, dx, pl, oS, A, aq, kp, oU, Qy, bP, asI, dB, hk, Qu, hR, nz, it, B, bL, ul, fM, dA, yk, eX, aA, q, eA, asG, MR, aoA, aT, cy, ae, jf, Uf, iU, oV, Y, r, en, cl, t, iK, ck, QG, gX, rA, bt, kG, Mb, jh, Gn, hF, ad, d, qt, ff, eH, cr, Ej, aF, iR, bz, bE, bC, iu); #c1(COMMD5) c2(NP_054785) c3(COMM domain-containing protein 5) c4(177818) c5(177819, 177820, 177821, 177822, 177823, 177824, 177825, 177826, 177827, 177828, 177829, 177830, 177831, 177832) c6( ) c7(bL, cy, cz, dy, aA); #c1(COMMD7) c2(NP_001092809) c3(COMM domain-containing protein 7 isoform 2) c4(39654) c5(39655, 39656, 39657, 39658, 39659, 39660) c6( ) c7(aw, B); #c1(COMMD7) c2(NP_444269) c3(COMM domain-containing protein 7 isoform 1) c4(230215) c5(230216, 230217, 230218, 230219, 230220, 230221) c6( ) c7(aw, B); #c1(COMP) c2(NP_000086) c3(cartilage oligomeric matrix protein precursor) c4(1525, 1526, 1527) c5(1528, 1529, 1530, 1531, 1532, 1533, 1534, 1535, 1536, 1537, 1538, 1539, 1540, 1541, 1542, 1543, 1544, 1545, 1546, 1547, 1548, 1549, 1550, 1551) c6( ) c7(dD, ea, aTN, bB, j, ade, eq, IR, ai, aR, Pm, aRo, eA, aHF, xE, ec, rw, ry, h, pj, rv, af, jf, DI, IU, ih, dq, pL, aOm, pb, Iv, LB, vK, sS, BU, qe, bE, In, aoJ, ER, R, zB, aTM, y); #c1(COMT) c2(NP_001128634) c3(catechol O-methyltransferase isoform MB-COMT) c4(50391, 50392) c5(50393, 50394, 50395, 50396, 50397, 50398, 50399, 50400, 50401, 50402, 50403, 50404, 50405, 50406, 50407, 50408, 50409, 50410, 50411) c6( ) c7(aUh, T, aUk, ea, aqo, abM, e, bO, eh, bB, yY, gf, Jd, ci, aTS, ur, HH, Jt, qj, Gp, aQF, gF, aR, IS, VV, aEQ, acc, iX, M, ta, K, oi, eL, xa, gr, zQ, aW, hl, g, sz, Eg, uC, ml, aaS, fT, yl, eM, nB, Ip, iA, wE, vA, ZT, Gs, U, Ji, sv, cX, aTV, m, abl, uJ, xh, aTW, aCS, yA, gL, nD, FW, dD, RX, ht, NT, aw, n, To, aj, fr, ct, nA, ml, ww, aUf, agJ, eW, hw, axc, aNU, aUb, dL, aUm, Gw, mV, mY, aTX, aTO, aIY, aUi, he, mJ, mU, abf, PT, rk, Fn, ny, sp, aq, vo, cM, Ld, op, cv, mX, hq, aUn, ok, abV, cA, anZ, PI, yP, Ei, hL, at, ut, gv, IB, it, B, mT, jd, qc, bL, jc, jv, iH, eR, He, jx, aOH, aTP, aA, mS, ti, cz, j, hy, v, agI, wy, V, q, aqN, PW, gM, cF, acj, HJ, aTT, aTZ, agI, aT, wP, bK, bq, an, rz, rE, ae, af, bA, gw, kl, yL, zS, abi, r, cu, eS, HL, en, cl, t, aTQ, xw, tl, bN, aUc, pH, azK, mf, aTU, FI, GI, gX, VR, ob, akd, aZ, aD, iW, ha, jh, bS, uu, eq, qi, agY, ad, aUd, aUe, dP, HF, agd, F, ot, ib, mW, sO, aqk, Sb, xp, aUj, na, hZ, WZ, aUI, aog, tb, BO, PE, Gv, ff, gC, gI, aTY, aF, aTR, gu, Z, EX, iR, bz, jh, Ek, es, D, gk, aUg, bE, HP, pP, aUa, Rm, ei, ra, pK, Gu, rF, xg, X, agZ, pC); #c1(COMT) c2(NP_009294) c3(catechol O-methyltransferase isoform S-COMT) c4(171797) c5(171798, 171799, 171800, 171801, 171802, 171803, 171804, 171805) cG( ) c7(aUh, T, aUk, ea, aqo, abM, e, bO, eh, bB, yY, gf, Jd, ci, aTS, ur, HH, Jt, qj, Gp, aQF, gF, aR, IS, VV, aEQ, acc, iX, M, ta, K, oi, eL, xa, gr, zQ, aW, hl, g, sz, Eg, uC, mZ, aaS, fT, yl, eM, nB, Ip, iA, wE, vA, ZT, Gs, U, Ji, sv, cX, aTV, m, abl, uJ, xh, aTW, aCS, yA, gL, nD, FW, dD, RX, ht, NT, aw, n, To, aj, fr, ct, nA, mL ww, aUf, agJ, eW, hw, axe, aNU, aUb, dL, aUm, Gw, mV, mY, aTX, aTO, aIY, aUi, he, mJ, mU, abf, PT, rk, Fn, ny, sp, aq, vo, cM, Ld, op, cv, mX, hq, aUn, ok, abV, cA, anZ, PI, yP, Ei, hL, at, ut, gv, IB, it, B, mT, jd, qc, bL, jc, jv, iH, eR, He, jx, aOH, aTP, aA, mS, ti, cz, j, hy, v, aql, wy, V, q, aqN, PW, gM, cF, acj, HJ, aTT, aTZ, aql, aT, wP, bK, bq, an, rz, rE, ae, af, bA, gw, kl, yL, zS, abi, r, cu, eS, HL, en, cl, t, aTQ, xw, tl, bN, aUc, pH, azK, mf, aTU, FI, GL gX, VR, ob, akd, aZ, aD, iW, ha, jh, bS, uu, eq, qi, agY, ad, aUd, aUe, dP, HF, agd, F, ot, ib, mW, sO, aqk, Sb, xp, aUj, na, hZ, WZ, aUI, aog, tb, BO, PE, Gv, ff, gC, gI, aTY, aF, aTR, gu, Z, EX, iR, bz, jb, Ek, es, D, gk, aUg, bE, HP, pP, aUa, Rm, ei, ra, pK, Gu, rF, xg, X, agZ, pC); #c1(COMT) c2(XP_011528188) c3(catechol O-methyltransferase isoform X2) c4( ) c5(323287, 323288, 323289) c6( ) c7(aUh, T, aUk, ea, aqo, abM, e, bO, eh, bB, yY, gf, Jd, ci, aTS, ur, HH, Jt, qj, Gp, aQF, gF, aR, IS, VV, aEQ, acc, iX, M, ta, K, oi, eL, xa, gr, zQ, aW, hl, g, sz, Eg, uC, mZ, aaS, fT, yl, eM, nB, Ip, iA, wE, vA, ZT, Gs, U, Ji, sv, cX, aTV, m, abl, uJ, xh, aTW, aCS, yA, gL, nD, FW, dD, RX, ht, NT, aw, n, To, aj, fr, ct, nA, ml, ww, aUf, agJ, eW, hw, axe, aNU, aUb, dL, aUm, Gw, mV, mY, aTX, aTO, aIY, aUi, he, mJ, mU, abf, PT, rk, Fn, ny, sp, aq, vo, cM, Ld, op, cv, mX, hq, aUn, ok, abV, cA, anZ, PI, yP, Ei, hL, at, ut, gv, IB, it, B, mT, jd, qc, bL, jc, jv, iH, eR, He, jx, aOH, aTP, aA, mS, ti, cz, j, hy, v, agI, wy, V, q, aqN, PW, gM, cF, acj, HJ, aTT, aTZ, aql, aT, wP, bK, bq, an, rz, rE, ae, af, bA, gw, kl, yL, zS, abi, r, cu, eS, HL, en, cl, t, aTQ, xw, tl, bN, aUc, pH, azK, mf, aTU, FI, GI, qX, VR, ob, akd, aZ, aD, iW, ha, jh, bS, uu, eq, qi, agY, ad, aUd, aUe, dP, HF, agd, F, ot, ib, mW, sO, aqk, Sb, xp, aUj, na, hZ, WZ, aUI, aog, tb, BO, PE, Gv, ff, gC, gI, aTY, aF, aTR, gu, Z, EX, iR, bz, jb, Ek, es, D, gk, aUg, bE, HP, pP, aUa, Rm, ei, ra, pK, Gu, rF, xg, X, agZ, pC); #c1(COPA) c2(NP_001091868) c3(coatomer subunit alpha isoform 1) c4(38734) c5(38735, 38736, 38737, 38738, 38739, 38740) c6( ) c7(bL, T, ib, kf, dG, ae, B, ad); #c1(COPA) c2(NP_004362) c3(coatomer subunit alpha isoform 2) c4(145712) c5(145713, 145714, 145715, 145716, 145717, 145718) c6( ) c7(bL, T, ib, kf, dG, ae, B, ad); #c1(COPB1) c2(NP_057535) c3(coatomer subunit beta) c4(191282) c5(191283, 191284, 191285, 191286, 191287, 191288, 191289, 191290, 191291, 191292) c6( ) c7(y); #c1(COPB2) c2(NP_004757) c3(coatomer subunit beta′) c4(149351, 149352) c5(149353, 149354, 149355, 149356, 149357, 149358, 149359, 149360, 149361, 149362, 149363, 149364) c6( ) c7(NK, d, h, K, If, y); #c1(COPE) c2(NP_009194) c3(coatomer subunit epsilon isoform a) c4(171423, 171424) c5(171425, 171426, 171427, 171428, 171429, 171430, 171431, 171432, 171433, 171434, 171435, 171436) c6( ) c7(ad); #c1(COPE) c2(NP_955474) c3(coatomer subunit epsilon isoform b) c4(261835) c5(261836, 261837, 261838, 261839, 261840, 261841) c6( ) c7(ad); #c1(COPE) c2(NP_955476) c3(coatomer subunit epsilon isoform c) c4(261849) c5(261850, 261851, 261852, 261853, 261854, 261855) c6( ) c7(ad); #c1(COPG2) c2(NP_001276962) c3(coatomer subunit gamma-2 isoform 2) c4(108844) c5(108845, 108846, 108847, 108848, 108849, 108850, 108851, 108852, 108853, 108854) c6( ) c7(LO); #c1(COPG2) c2(NP_036265) c3(coatomer subunit gamma-2 isoform 1) c4(172699) c5(172700, 172701, 172702, 172703, 172704, 172705) c6( ) c7(LO); #c1(COPRS) c2(NP_060875) c3(coordinator of PRMT5 and differentiation stimulator) c4(198230) c5(198231, 198232, 198233, 198234, 198235, 198236) c6( ) c7(hP, rY); #c1(COPRS) c2(XP_005258057) c3(coordinator of PRMT5 and differentiation stimulator isoform X1) c4(275472) c5(275473, 275474, 275475, 275476, 275477, 275478, 275479) c6( ) c7(hP, rY); #c1(COPS2) c2(NP_001137359) c3(COP9 signalosome complex subunit 2 isoform 2) c4(55606) c5(55607, 55608, 55609, 55610, 55611, 55612) c6( ) c7(dP, alQ); #c1(COPS2) c2(NP_004227) c3(COP9 signalosome complex subunit 2 isoform 1) c4(144457) c5(144458, 144459, 144460, 144461, 144462, 144463, 144464) c6( ) c7(dP, alQ); #c1(COPS3) c2(NP_001186054) c3(COP9 signalosome complex subunit 3 isoform 2) c4( ) c5(77000, 77001, 77002, 77003, 77004) c6( ) c7(gk, al, eH, eF, V, B); #c1(COPS3) c2(NP_003644) c3(COP9 signalosome complex subunit 3 isoform 1) c4(139871, 139872, 139873, 139874) c5(139875, 139876, 139877, 139878, 139879, 139880, 139881, 139882, 139883, 139884, 139885, 139886, 139887) c6( ) c7(gk, al, eH, eF, V, B); #c1(COPS4) c2(NP_001244935) c3(COP9 signalosome complex subunit 4 isoform 2) c4(92335) c5(92336, 92337, 92338, 92339, 92340, 92341) c6( ) c7(cm, f); #c1(COPS4) c2(NP_057213) c3(COP9 signalosome complex subunit 4 isoform 1) c4(189523) c5(189524, 189525, 189526, 189527, 189528, 189529) c6( ) c7(cm, f); #c1(COPS5) c2(NP_006828) c3(COP9 signalosome complex subunit 5) c4(168489) c5(168490, 168491, 168492, 168493, 168494, 168495, 168496) c6( ) c7(T, aC, al, jh, n, ci, q, hX, aE, Db, aT, on, pl, iU, aW, Y, ff, r, en, t, nC, es, gk, bP, iA, m, B, vi); #c1(COPS6) c2(NP_006824) c3(COP9 signalosome complex subunit 6) c4(168439, 168440) c5(168441, 168442, 168443, 168444, 168445, 168446, 168447, 168448, 168449, 168450, 168451, 168452) c6( ) c7(h, aW, nB, aT); #c1(COPS7A) c2(XP_005253752) c3(COP9 signalosome complex subunit 7a isoform X1) c4(272641) c5(272642, 272643, 272644, 272645, 272646, 272647, 272648, 272649, 272650, 272651, 272652, 272653, 272654, 272655, 272656, 272657, 272658, 272659, 272660, 272661, 272662, 272663, 272664, 272665, 272666, 272667) c6( ) c7(aA); #c1(COPS8) c2(NP_006701) c3(COP9 signalosome complex subunit 8 isoform 1) c4(167245, 167246) c5(167247, 167248, 167249, 167250, 167251, 167252, 167253) c6( ) c7(aW, T, nB, aT); #c1(COPS8) c2(NP_937832) c3(COP9 signalosome complex subunit 8 isoform 2) c4( ) c5(259253, 259254, 259255, 259256, 259257) c6( ) c7(aW, T, nB, aT); #c1(COPZ2) c2(NP_057513) c3(coatomer subunit zeta-2) c4(191200) c5(191201, 191202, 191203, 191204, 191205, 191206, 191207, 191208) c6( ) c7(hL, c1); #c1(COQ2) c2(NP_056512) c3(4-hydroxybenzoate polyprenyltransferase, mitochondrial) c4(187851, 187852, 187853) c5(187854, 187855, 187856, 187857, 187858, 187859, 187860, 187861, 187862, 187863, 187864, 187865, 187866, 187867, 187868, 187869, 187870, 187871) c6( ) c7(EG, eR, ky, kB, mG, Ju, oj, dV, aUn, EE, GC, dy, ah, eh, ajU, dR); #c1(COQ2) c2(XP_011530157) c3(4-hydroxybenzoate polyprenyltransferase, mitochondrial isoform X1) c4( ) c5(326050) c6( ) c7(EG, eR, ky, kB, mG, Ju, oj, dV, aUo, EF, GC, dy, ah, eh, ajU, dR); #c1(COQ3) c2(NP_059117) c3(hexaprenyldihydroxybenzoate methyltransferase, mitochondrial) c4(193128) c5(193129, 193130, 193131, 193132, 193133, 193134) c6( ) c7(lp); #c1(COQ3) c2(XP_005267075) c3(hexaprenyldihydroxybenzoate methyltransferase, mitochondrial isoform X3) c4(280669) c5(280670, 280671, 280672, 280673, 280674, 280675, 280676, 280677, 280678, 280679) c6( ) c7(lp); #c1(COQ3) c2(XP_011534200) c3(hexaprenyldihydroxybenzoate methyltransferase, mitochondrial isoform X2) c4( ) c5(330503, 330504, 330505) c6( ) c7(lp); #c1(COQ4) c2(NP_057119) c3(ubiquinone biosynthesis protein COQ4 homolog, mitochondrial precursor) c4(188987, 188988) c5(188989, 188990, 188991, 188992, 188993, 188994) c6( ) c7(EG); #c1(COQ4) c2(XP_011517063) c3(ubiquinone biosynthesis protein COQ4 homolog, mitochondrial isoform X1) c4( ) c5(310556, 310557, 310558, 310559, 310560, 310561) c6( ) c7(EG); #c1(COQ5) c2(NP_115690) c3(2-methoxy-6-polyprenyl-1,4-benzoquinol methylase, mitochondrial precursor) c4(223564, 223565) c5(223566, 223567, 223568, 223569, 223570, 223571, 223572, 223573, 223574, 223575, 223576, 223577) c6( ) c7(nA); #c1(COQ6) c2(NP_872282) c3(ubiquinone biosynthesis monooxygenase COQ6 isoform a) c4(255996, 255997) c5(255998, 255999, 256000, 256001, 256002, 256003) c6( ) c7(ah, mG, gi, aUp); #c1(COQ6) c2(NP_872286) c3(ubiquinone biosynthesis monooxygenase COQ6 isoform b) c4(256004) c5(256005, 256006, 256007, 256008, 256009, 256010) c6( ) c7(ah, mG, gi, aUp); #c1(COQ6) c2(XP_005267773) c3(ubiquinone biosynthesis monooxygenase COQ6 isoform X2) c4(281236) c5(281237, 281238, 281239, 281240, 281241, 281242, 281243, 281244, 281245) c6( ) c7(ah, mG, gi, aUp); #c1(COQ6) c2(XP_011535111) c3(ubiquinone biosynthesis monooxygenase COQ6 isoform X3) c4(331926, 331927, 331928) c5(331929, 331930, 331931, 331932, 331933, 331934, 331935, 331936, 331937, 331938, 331939, 331940, 331941, 331942, 331943) c6( ) c7(ah, mG, gi, aUp); #c1(COQ6) c2(XP_011535112) c3(ubiquinone biosynthesis monooxygenase COQ6 isoform X5) c4( ) c5(331944, 331945, 331946, 331947, 331948, 331949) c6( ) c7(ah, mG, gi, aUp); #c1(COQ7) c2(NP_001177912) c3(ubiquinone biosynthesis protein COQ7 homolog isoform 2) c4( ) c5(73134, 73135, 73136, 73137, 73138) c6( ) c7(asp, gi, U); #c1(COQ7) c2(NP_057222) c3(ubiquinone biosynthesis protein COQ7 homolog isoform 1) c4(189554, 189555) c5(189556, 189557, 189558, 189559, 189560, 189561, 189562) c6( ) c7(asp, gi, U); #c1(COQ9) c2(NP_064708) c3(ubiquinone biosynthesis protein COQ9, mitochondrial precursor) c4(203514) c5(203515, 203516, 203517, 203518, 203519, 203520) c6( ) c7(EG, EE, aUg, kC, aU); #c1(CORIN) c2(NP_006578) c3(atrial natriuretic peptide-converting enzyme isoform 1) c4(166356, 166357, 166358) c5(166359, 166360, 166361, 166362, 166363, 166364, 166365, 166366, 166367, 166368, 166369, 166370, 166371, 166372, 166373, 166374, 166375, 166376) cG( ) c7(gx, jv, oe, aDT, cz, eh, j, zU, cd, ft, zw, aUu, h, aUs, bA, hM, iV, aUv, xA, xj, cj, aUt); #c1(CORO1A) c2(XP_011544016) c3(coronin-1A isoform X1) c4(343180) c5(343181, 343182, 343183, 343184, 343185, 343186, 343187, 343188, 343189, 343190, 343191) c6( ) c7(T, ul, dA, jh, aA, aGx, ci, mC, LH, x, aT, iL, zQ, ZH, CN, aW, ff, eZ, uY, aF, en, t, ck, aUw, k, m, fL, bt, B); #c1(CORO1B) c2(NP_001018080) c3(coronin-IB) c4(27107, 27108, 27109, 27110) c5(27111, 27112, 27113, 27114, 27115, 27116, 27117, 27118, 27119, 27120, 27121, 27122, 27123, 27124, 27125, 27126, 27127, 27128, 27129, 27130, 27131, 27132, 27133, 27134, 27135, 27136, 27137, 27138) cG( ) c7(By); #c1(CORO1C) c2(NP_001098707) c3(coronin-1C isoform a) c4(41491, 41492, 41493) c5(41494, 41495, 41496, 41497, 41498, 41499, 41500, 41501, 41502, 41503, 41504, 41505, 41506, 41507, 41508, 41509, 41510, 41511, 41512, 41513, 41514, 41515, 41516) cG( ) c7(bL, T, d, eM, dB, aA, aF, ey, eA, B); #c1(CORO1C) c2(NP_001263400) c3(coronin-1C isoform b) c4(97258, 97259, 97260, 97261, 97262, 97263) c5( ) c6( ) c7(bL, T, d, eM, dB, aA, aF, ey, eA, B); #c1(CORO1C) c2(XP_011536426) c3(coronin-1C isoform X1) c4( ) c5(333779, 333780, 333781, 333782, 333783, 333784, 333785, 333786, 333787, 333788, 333789, 333790, 333791, 333792, 333793, 333794, 333795, 333796, 333797, 333798, 333799, 333800, 333801, 333802, 333803, 333804, 333805, 333806, 333807) c6( ) c7(bL, T, d, eM, dB, aA, aF, ey, eA, B); #c1(CORO1C) c2(XP_011536427) c3(coronin-1C isoform X2) c4( ) c5(333808, 333809, 333810, 333811, 333812, 333813) c6( ) c7(bL, T, d, eM, dB, aA, aF, ey, eA, B); #c1(CORO2A) c2(XP_011517288) c3(coronin-2A isoform X1) c4(310882) c5(310883, 310884, 310885, 310886, 310887, 310888, 310889, 310890, 310891, 310892) c6( ) c7(q, qj, r); #c1(CORO2B) c2(NP_001177385) c3(coronin-2B isoform 2) c4( ) c5(72734, 72735, 72736, 72737, 72738, 72739, 72740, 72741, 72742) c6( ) c7(ht, EQ); #c1(CORO2B) c2(NP_006082) c3(coronin-2B isoform 1) c4(161759, 161760) c5(161761, 161762, 161763, 161764, 161765, 161766, 161767, 161768, 161769, 161770) c6( ) c7(ht, EQ); #c1(CORO2B) c2(XP_005254181) c3(coronin-2B isoform X2) c4( ) c5(273050) c6( ) c7(ht, EQ); #c1(CORO6) c2(NP_116243) c3(coronin-6) c4(225919, 225920) c5(225921, 225922, 225923, 225924, 225925, 225926, 225927, 225928, 225929, 225930, 225931, 225932) c6( ) c7(fr); #c1(CORO6) c2(XP_005258113) c3(coronin-6 isoform X9) c4(275502) c5(275503, 275504, 275505, 275506, 275507, 275508) c6( ) c7(fr); #c1(CORO6) c2(XP_011523687) c3(coronin-6 isoform X3) c4(318166) c5(318167, 318168, 318169, 318170, 318171, 318172) c6( ) c7(fr); #c1(CORO7) c2(NP_001188402) c3(coronin-7 isoform 3) c4(79120) c5(79121, 79122, 79123, 79124, 79125, 79126, 79127, 79128, 79129, 79130, 79131, 79132, 79133, 79134, 79135, 79136, 79137, 79138, 79139, 79140, 79141) c6( ) c7(iv, iw); #c1(CORO7) c2(NP_078811) c3(coronin-7 isoform 1) c4( ) c5(215588, 215589, 215590, 215591, 215592, 215593) c6( ) c7(iv, iw); #c1(CORO7-PAM16) c2(NP_001188408) c3(CORO7-PAM16 protein) c4(79142, 79143, 79144, 79145) c5(79146, 79147, 79148, 79149, 79150, 79151, 79152) c6( ) c7(iv, iw); #c1(COTL1) c2(NP_066972) c3(coactosin-like protein) c4(207915) c5(207916, 207917, 207918, 207919, 207920, 207921) c6( ) c7(Na, azs, ft, eM, amJ, eH, eZ, aT, Nc, aml, eF, y); #c1(COX10) c2(XP_005256515) c3(protoheme IX farnesyltransferase, mitochondrial isoform X3) c4( ) c5(274189, 274190, 274191, 274192, 274193, 274194) c6( ) c7(bL, oW, vc, aUx, aNG, acJ, cb, afO, af, ajU); #c1(COX10) c2(XP_011521960) c3(protoheme IX farnesyltransferase, mitochondrial isoform X2) c4(316678) c5(316679, 316680, 316681, 316682, 316683, 316684, 316685, 316686, 316687, 316688) cG( ) c7(bL, oW, vc, aUx, aNG, acJ, cb, afO, af, ajU); #c1(COX11) c2(NP_001156333) c3(cytochrome c oxidase assembly protein COX11, mitochondrial isoform 2) c4( ) c5(61704) c6( ) c7(aT); #c1(COX11) c2(NP_001156334) c3(cytochrome c oxidase assembly protein COX11, mitochondrial isoform 3) c4(61705) c5(61706, 61707, 61708, 61709, 61710, 61711) cG( ) c7(aT); #c1(COX11) c2(XP_011522644) c3(cytochrome c oxidase assembly protein COX11, mitochondrial isoform X1) c4(317197) c5(317198, 317199, 317200, 317201, 317202, 317203) cG( ) c7(aT); #c1(COX14) c2(NP_001244062) c3(cytochrome c oxidase assembly protein COX14) c4(91860) c5(91861, 91862, 91863, 91864, 91865, 91866, 91867, 91868, 91869, 91870, 91871, 91872, 91873, 91874, 91875, 91876, 91877, 91878) c6( ) c7(acJ); #c1(COX15) c2(NP_004367) c3(cytochrome c oxidase assembly protein COX15 homolog isoform 2) c4(145776) c5(145777, 145778, 145779, 145780, 145781, 145782) c6( ) c7(cc, vc, aUx, acJ, aUy, af, ajU); #c1(COX15) c2(NP_510870) c3(cytochrome c oxidase assembly protein COX15 homolog isoform 1) c4(231067) c5(231068, 231069, 231070, 231071, 231072, 231073, 231074, 231075) c6( ) c7(cc, vc, aUx, acJ, aUy, af, ajU); #c1(COX16) c2(NP_057552) c3(cytochrome c oxidase assembly protein COX16 homolog, mitochondrial isoform 1 precursor) c4(191356) c5(191357, 191358, 191359, 191360, 191361, 191362) c6( ) c7(acJ); #c1(COX17) c2(NP_005685) c3(cytochrome c oxidase copper chaperone) c4(158550, 158551) c5(158552, 158553, 158554, 158555, 158556, 158557, 158558, 158559, 158560, 158561, 158562, 158563, 158564, 158565, 158566, 158567, 158568, 158569, 158570, 158571) c6( ) c7(T, eM); #c1(COX18) c2(NP_001284661) c3(mitochondrial inner membrane protein COX18 isoform 1) c4(112274) c5(112275, 112276, 112277, 112278, 112279, 112280) c6( ) c7(hy, ne, BN); #c1(COX18) c2(NP_776188) c3(mitochondrial inner membrane protein COX18 isoform 2) c4(250957) c5(250958, 250959, 250960, 250961, 250962, 250963) c6( ) c7(hy, ne, BN); #c1(COX19) c2(NP_001026788) c3(cytochrome c oxidase assembly protein COX19) c4(29626) c5(29627, 29628, 29629, 29630, 29631, 29632) c6( ) c7(acJ); #c1(COX4I1) c2(NP_001852) c3(cytochrome c oxidase subunit 4 isoform 1, mitochondrial precursor) c4( ) c5(121684, 121685, 121686, 121687, 121688, 121689) c6( ) c7(acJ, v, awq, oj, h); #c1(COX4I1) c2(XP_011521173) c3(cytochrome c oxidase subunit 4 isoform 1, mitochondrial isoform X2) c4(316115) c5( ) c6( ) c7(acJ, v, awq, oj, h); #c1(COX4I2) c2(NP_115998) c3(cytochrome c oxidase subunit 4 isoform 2, mitochondrial) c4(225183) c5(225184, 225185, 225186, 225187, 225188, 225189) c6( ) c7(oW, oj, h, v, acJ, aUz, aKG, ad); #c1(COX5A) c2(NP_004246) c3(cytochrome c oxidase subunit 5A, mitochondrial precursor) c4(144574) c5(144575, 144576, 144577, 144578, 144579, 144580) c6( ) c7(cw, bM, T, aC, BD, aDy, sw, bB, n, aNG, j, q, eA, iu, aE, aT, cy, bl, K, aUA, af, ajU, Nr, s, aW, ff, eH, aNq, r, Ej, po, kp, aB, en, eF, t, kC, bz, Nq, sS, eM, SE, xZ, wO, bE, at, acJ, m, y, it, B); #c1(COX5B) c2(NP_001853) c3(cytochrome c oxidase subunit 58, mitochondrial precursor) c4(121690) c5(121691, 121692, 121693, 121694, 121695, 121696) c6( ) c7(bL, ac, cz, j, ci, anW); #c1(COX6A1) c2(NP_004364) c3(cytochrome c oxidase subunit 6A1, mitochondrial) c4(145719, 145720) c5(145721, 145722, 145723, 145724, 145725, 145726, 145727, 145728, 145729, 145730, 145731, 145732) c6( ) c7(acJ, bU); #c1(COX6A2) c2(NP_005196) c3(cytochrome c oxidase subunit 6A2, mitochondrial precursor) c4(153812) c5(153813, 153814, 153815, 153816, 153817, 153818) c6( ) c7(acJ); #c1(COX6B1) c2(NP_001854) c3(cytochrome c oxidase subunit 681) c4(121697, 121698) c5(121699, 121700, 121701, 121702, 121703, 121704, 121705, 121706, 121707, 121708, 121709, 121710) c6( ) c7(acJ); #c1(COX6C) c2(NP_004365) c3(cytochrome c oxidase subunit 6C proprotein) c4(145733) c5(145734, 145735, 145736, 145737, 145738, 145739, 145740, 145741, 145742, 145743, 145744, 145745, 145746, 145747, 145748, 145749, 145750, 145751, 145752, 145753, 145754, 145755, 145756, 145757, 145758, 145759, 145760, 145761, 145762, 145763, 145764, 145765, 145766, 145767, 145768, 145769, 145770, 145771, 145772, 145773, 145774, 145775) c6( ) c7(vA, ad); #c1(COX7A1) c2(NP_001855) c3(cytochrome c oxidase subunit 7A1, mitochondrial precursor) c4(121711, 121712) c5(121713, 121714, 121715, 121716, 121717, 121718, 121719, 121720, 121721, 121722, 121723, 121724) c6( ) c7(bL, iK, acJ, wm, wu); #c1(COX7A2) c2(XP_011533748) c3(cytochrome c oxidase subunit 7A2, mitochondrial isoform X1) c4(329854, 329855) c5(329856, 329857, 329858, 329859, 329860, 329861, 329862, 329863, 329864, 329865, 329866, 329867, 329868, 329869, 329870, 329871) c6( ) c7(ad); #c1(COX7A2L) c2(XP_011531460) c3(cytochrome c oxidase subunit 7A-related protein, mitochondrial isoform X1) c4(327585) c5(327586, 327587, 327588, 327589, 327590, 327591, 327592, 327593, 327594, 327595) c6( ) c7(bF, ou, ad, r); #c1(COX7B) c2(NP_001857) c3(cytochrome c oxidase subunit 78, mitochondrial precursor) c4(121725) c5(121726, 121727, 121728, 121729, 121730, 121731) c6( ) c7(kC, aUB, kj); #c1(COX7B2) c2(XP_005248113) c3(cytochrome c oxidase subunit 782, mitochondrial isoform X1) c4(268212, 268213, 268214) c5(268215, 268216, 268217, 268218, 268219, 268220, 268221, 268222, 268223, 268224, 268225, 268226, 268227, 268228, 268229, 268230, 268231, 268232, 268233, 268234, 268235, 268236, 268237, 268238, 268239, 268240) c6( ) c7(ci, ad); #c1(COX7C) c2(NP_001858) c3(cytochrome c oxidase subunit 7C, mitochondrial precursor) c4(121732) c5(121733, 121734, 121735, 121736, 121737, 121738, 121739, 121740, 121741, 121742) c6( ) c7(aw, v, cd); #c1(COX8A) c2(NP_004065) c3(cytochrome c oxidase subunit 8A, mitochondrial) c4(143252, 143253) c5(143254, 143255, 143256, 143257, 143258, 143259, 143260, 143261) c6( ) c7(bM, T, aC, aSz, al, fd, bB, aiC, ame, ip, x, aE, rw, Qk, M, dV, adB, K, dF, aW, hl, axJ, aNq, YG, aB, aUG, Ku, g, as, kJ, eF, DL, aiv, bw, aUF, ba, wE, uo, wx, k, m, Re, P, NU, NK, aU, aUK, Zo, pA, sw, OI, n, oY, jX, nA, eW, hr, h, dL, bl, aUH, Vb, Nr, sq, po, aUP, kp, aMJ, SE, se, Vy, hL, at, uz, oh, acJ, it, B, agx, AB, eR, aUI, jx, sM, aNG, v, j, C, AO, Eh, q, eA, aT, cy, yj, qk, af, ajU, Lu, s, oV, Y, bg, r, en, cl, t, kC, ck, BU, sS, ac, c, aIC, aUJ, wO, dy, cw, BD, aDy, qb, aUM, Jy, Ay, bs, bS, aSw, agz, hF, vJ, qh, qV, IC, aUA, aUh, aUE, MG, ff, eH, cr, kD, yy, aUD, Ej, uF, aUO, Pd, BG, aUG, bz, DI, dr, Nq, qk, aUN, xZ, bE, aq, dX, Fw, hE, iu, y); #c1(CP) c2(NP_000087) c3(ceruloplasmin precursor) c4(1552, 1553, 1554) c5(1555, 1556, 1557, 1558, 1559, 1560, 1561, 1562, 1563, 1564, 1565, 1566, 1567, 1568, 1569, 1570, 1571, 1572, 1573, 1574, 1575, 1576, 1577, 1578, 1579, 1580, 1581, 1582, 1583, 1584, 1585, 1586, 1587, 1588, 1589, 1590, 1591, 1592, 1593, 1594, 1595, 1596, 1597, 1598, 1599, 1600, 1601, 1602, 1603, 1604, 1605, 1606, 1607, 1608, 1609, 1610, 1611, 1612, 1613, 1614, 1615, 1616, 1617, 1618, 1619, 1620, 1621, 1622, 1623, 1624, 1625, 1626, 1627, 1628, 1629, 1630, 1631, 1632, 1633, 1634, 1635, 1636, 1637, 1638, 1639, 1640, 1641, 1642, 1643, 1644, 1645, 1646, 1647, 1648, 1649, 1650) c6(1651, 1652, 1653) c7(T, ea, aUT, e, aR, aE, aU, K, az, hl, uC, eY, nB, U, aUS, nw, m, mk, aUU, dD, aw, aj, aUX, rP, cd, b, gq, ep, DU, ey, A, dw, aLO, W, ky, aUZ, B, ek, mr, j, nS, eA, J, axa, yw, hb, rS, HC, yu, cy, bq, aUQ, an, DX, af, eu, aUY, fO, en, t, nC, xw, f, bN, rR, c, aUW, hr, dy, aUR, aen, aya, rQ, ha, eq, air, py, oW, aln, aUV, sj, ff, cr, yy, S, Z, es, nb, gZ, ei, i, y, alq, X, hv); #c1(CPA1) c2(NP_001859) c3(carboxypeptidase A1 preproprotein) c4(121743) c5(121744, 121745, 121746, 121747, 121748, 121749, 121750, 121751) c6( ) c7(ar, tg, s, aW, vf, aT, vg, K, Fg, afb); #c1(CPA2) c2(NP_001860) c3(carboxypeptidase A2 precursor) c4(121752) c5(121753, 121754, 121755, 121756, 121757, 121758) c6( ) c7(bN); #c1(CPA3) c2(NP_001861) c3(mast cell carboxypeptidase A precursor) c4(121759) c5(121760, 121761, 121762, 121763, 121764, 121765) c6( ) c7(bM, T, ae, ad); #c1(CPA4) c2(NP_001156918) c3(carboxypeptidase A4 isoform 2 preproprotein) c4(62026, 62027) c5(62028, 62029, 62030, 62031, 62032, 62033, 62034, 62035, 62036, 62037, 62038, 62039) c6( ) c7(bM, T, LO, r, PQ, ae, q, ad); #c1(CPA4) c2(NP_057436) c3(carboxypeptidase A4 preproprotein) c4(190787) c5(190788, 190789, 190790, 190791, 190792, 190793) c6( ) c7(bM, T, LO, r, PQ, ae, q, ad); #c1(CPA6) c2(NP_065094) c3(carboxypeptidase A6 preproprotein) c4(203860, 203861, 203862) c5(203863, 203864, 203865, 203866, 203867, 203868, 203869, 203870, 203871, 203872, 203873, 203874, 203875) c6( ) c7(aVa, arH, ha, Ir, EQ, aNy, aVb, il); #c1(CPA6) c2(XP_011515872) c3(carboxypeptidase A6 isoform X2) c4( ) c5(308847, 308848, 308849, 308850, 308851) c6( ) c7(aVa, arH, ha, Ir, EQ, aNy, aVb, il); #c1(CPAMD8) c2(NP_056507) c3(C3 and PZP-like alpha-2-macroglobulin domain-containing protein 8) c4(187822, 187823) c5(187824, 187825, 187826, 187827, 187828, 187829, 187830, 187831, 187832, 187833, 187834, 187835, 187836, 187837, 187838, 187839) c6(187840, 187841, 187842, 187843) c7(ID, gh, gx, bB, V, ad, BY, aT, ji, ae, Qe, aW, hp, cm, bz, qa, c, eM, bE, vy, EY, y); #c1(CPAMD8) c2(XP_011526221) c3(C3 and PZP-like alpha-2-macroglobulin domain-containing protein 8 isoform X3) c4(320480) c5( ) c6( ) c7(ID, gh, gx, bB, V, ad, BY, aT, ji, ae, Qe, aW, hp, cm, bz, qa, c, eM, bE, vy, EY, y); #c1(CPAMD8) c2(XP_011526226) c3(C3 and PZP-like alpha-2-macroglobulin domain-containing protein 8 isoform X5) c4( ) c5(320481, 320482, 320483, 320484, 320485, 320486, 320487, 320488) c6(320489, 320490) c7(ID, gh, gx, bB, V, ad, BY, aT, ji, ae, Qe, aW, hp, cm, bz, qa, c, eM, bE, vy, EY, y); #c1(CPB1) c2(NP_001862) c3(carboxypeptidase 8 preproprotein) c4(121766, 121767, 121768) c5(121769, 121770, 121771, 121772, 121773, 121774, 121775, 121776, 121777, 121778, 121779, 121780, 121781, 121782, 121783, 121784, 121785, 121786, 121787, 121788, 121789, 121790, 121791, 121792, 121793, 121794, 121795, 121796) c6(121797, 121798, 121799, 121800, 121801, 121802) c7(y, wb, ai); #c1(CPB2) c2(NP_001265470) c3(carboxypeptidase B2 isoform 2 preproprotein) c4(98621) c5(98622, 98623, 98624, 98625, 98626, 98627) c6( ) c7(P, bL, T, Ve, jv, dD, eR, oe, e, DV, aw, cz, sM, eh, aj, v, j, eq, ez, ai, av, ft, rS, M, Yk, hH, adx, eu, Vb, OV, d, azS, kl, cH, anX, sq, DN, AQ, aeS, ff, kD, aq, pD, en, q, pT, t, cM, aVc, bz, uC, eK, sn, ac, wE, ag, dh, hr, qq, dX, aS, m, ei, wx, B, amL); #c1(CPB2) c2(NP_001863) c3(carboxypeptidase B2 isoform 1 preproprotein) c4(121803) c5(121804, 121805, 121806, 121807, 121808, 121809) c6( ) c7(P, bL, T, Ve, jv, dD, eR, oe, e, DV, aw, cz, sM, eh, aj, v, j, eq, ez, ai, av, ft, rS, M, Yk, hH, adx, eu, Vb, OV, d, azS, kl, cH, anX, sq, DN, AQ, aeS, ff, kD, aq, pD, en, q, pT, t, cM, aVc, bz, uC, eK, sn, ac, wE, ag, dh, hr, qq, dX, aS, m, ei, wx, B, amL); #c1(CPD) c2(NP_001186704) c3(carboxypeptidase D isoform 2) c4(78371) c5(78372, 78373, 78374, 78375, 78376, 78377) c6( ) c7(oO, ae, T, hV, aW, yk, XY, CT, aT, ci, fL, cm, aed, bz, ad, hX); #c1(CPE) c2(NP_001864) c3(carboxypeptidase E preproprotein) c4(121810, 121811) c5(121812, 121813, 121814, 121815, 121816, 121817, 121818, 121819, 121820, 121821, 121822, 121823) c6( ) c7(bL, T, dD, al, aj, v, j, eq, mL g, J, eA, gC, mj, ft, pX, K, qM, dQ, af, eG, A, d, aVd, cW, r, lo, t, uR, m, B, amL); #c1(CPEB1) c2(NP_001073001) c3(cytoplasmic polyadenylation element-binding protein 1 isoform 2) c4(35568) c5(35569, 35570, 35571, 35572, 35573) c6( ) c7(ck, T, d, gU, eM, cj, Ku, q, eA); #c1(CPEB1) c2(NP_001073003) c3(cytoplasmic polyadenylation element-binding protein 1 isoform 3) c4( ) c5(35574, 35575, 35576, 35577, 35578, 35579) c6( ) c7(ck, T, d, gU, eM, cj, Ku, g, eA); #c1(CPEB1) c2(NP_001275749) c3(cytoplasmic polyadenylation element-binding protein 1 isoform 4) c4( ) c5(107237, 107238, 107239, 107240, 107241) c6( ) c7(ck, T, d, gU, eM, cj, Ku, g, eA); #c1(CPEB1) c2(NP_085097) c3(cytoplasmic polyadenylation element-binding protein 1 isoform 1) c4(219270, 219271, 219272, 219273, 219274) c5(219275, 219276, 219277, 219278, 219279, 219280, 219281, 219282, 219283, 219284, 219285, 219286, 219287, 219288, 219289, 219290, 219291, 219292, 219293, 219294, 219295, 219296, 219297, 219298) c6( ) c7(ck, T, d, gU, eM, cj, Ku, g, eA); #c1(CPEB3) c2(NP_001171608) c3(cytoplasmic polyadenylation element-binding protein 3 isoform 2) c4(70772) c5(70773, 70774, 70775, 70776, 70777, 70778, 70779, 70780, 70781, 70782) c6( ) c7(fq); #c1(CPEB3) c2(NP_055727) c3(cytoplasmic polyadenylation element-binding protein 3 isoform 1) c4(183145) c5(183146, 183147, 183148, 183149, 183150, 183151) c6( ) c7(fq); #c1(CPEB3) c2(XP_011537825) c3(cytoplasmic polyadenylation element-binding protein 3 isoform X12) c4( ) c5(335329) c6( ) c7(fq); #c1(CPEB4) c2(NP_085130) c3(cytoplasmic polyadenylation element-binding protein 4) c4(219345) c5(219346, 219347, 219348, 219349, 219350, 219351) c6( ) c7(iR, aq, dt, B); #c1(CPED1) c2(NP_001099003) c3(cadherin-like and PC-esterase domain-containing protein 1 isoform 2 precursor) c4(41603) c5(41604, 41605, 41606, 41607, 41608, 41609, 41610, 41611, 41612, 41613, 41614, 41615) c6( ) c7(v, agk); #c1(CPED1) c2(NP_079189) c3(cadherin-like and PC-esterase domain-containing protein 1 isoform 1 precursor) c4(217401, 217402, 217403) c5(217404, 217405, 217406, 217407, 217408, 217409, 217410, 217411, 217412, 217413, 217414, 217415) c6( ) c7(v, agk); #c1(CPLX1) c2(NP_006642) c3(complexin-1) c4(166848) c5(166849, 166850, 166851, 166852, 166853, 166854) c6( ) c7(hH, bK); #c1(CPLX2) c2(XP_011532721) c3(complexin-2 isoform X1) c4(328742, 328743, 328744, 328745, 328746, 328747) c5(328748, 328749, 328750, 328751, 328752, 328753, 328754, 328755, 328756, 328757, 328758, 328759, 328760, 328761, 328762, 328763, 328764, 328765, 328766, 328767, 328768, 328769, 328770, 328771, 328772, 328773, 328774, 328775, 328776, 328777, 328778, 328779, 328780, 328781, 328782, 328783, 328784, 328785, 328786, 328787, 328788, 328789, 328790, 328791) cG( ) c7(ac, aw, bS, bK, ct, Z, aR); #c1(CPLX3) c2(NP_001025176) c3(complexin-3 precursor) c4(29405) c5(29406, 29407, 29408, 29409, 29410, 29411) cG( ) c7(oe, Gx); #c1(CPLX4) c2(NP_857637) c3(complexin-4) c4(255297) c5(255298, 255299, 255300, 255301, 255302, 255303) cG( ) c7(Gx); #c1(CPM) c2(NP_001005502) c3(carboxypeptidase M precursor) c4(21769, 21770, 21771) c5(21772, 21773, 21774, 21775, 21776, 21777, 21778, 21779, 21780, 21781, 21782, 21783, 21784, 21785, 21786, 21787, 21788, 21789, 21790, 21791, 21792, 21793, 21794, 21795, 21796, 21797, 21798, 21799, 21800, 21801) c6( ) c7(dP, iu, T, oe, au, hj, kf, aHs, iN, QC, cd); #c1(CPN1) c2(XP_011537601) c3(carboxypeptidase N catalytic chain isoform X1) c4(335187) c5(335188) c6( ) c7(af, fc, U, Fb, K, ei, aVe, ai); #c1(CPN2) c2(NP_001278917) c3(carboxypeptidase N subunit 2 precursor) c4(110952) c5(110953, 110954, 110955, 110956, 110957, 110958, 110959, 110960, 110961, 110962, 110963, 110964, 110965, 110966) c6(110967, 110968, 110969, 110970) c7(uz, Fb); #c1(CPNE1) c2(NP_001185792) c3(copine-1 isoform c) c4(76411, 76412) c5(76413, 76414, 76415, 76416, 76417, 76418, 76419, 76420, 76421, 76422, 76423, 76424, 76425, 76426, 76427, 76428, 76429, 76430, 76431, 76432, 76433, 76434, 76435, 76436, 76437, 76438, 76439, 76440, 76441, 76442, 76443, 76444, 76445, 76446, 76447, 76448, 76449, 76450, 76451, 76452, 76453, 76454, 76455, 76456, 76457, 76458, 76459) c6( ) c7(pZ); #c1(CPNE1) c2(NP_003906) c3(copine-1 isoform b) c4(142051, 142052, 142053, 142054, 142055) c5(142056, 142057, 142058, 142059, 142060, 142061, 142062, 142063, 142064, 142065, 142066, 142067, 142068, 142069, 142070, 142071, 142072, 142073, 142074, 142075, 142076, 142077, 142078, 142079, 142080, 142081, 142082, 142083, 142084) c6( ) c7(pZ); #c1(CPNE1) c2(NP_690905) c3(copine-1 isoform a) c4(245061, 245062, 245063) c5( ) c6( ) c7(pZ); #c1(CPNE2) c2(NP_689940) c3(copine-2) c4(244408, 244409) c5(244410, 244411, 244412, 244413, 244414, 244415, 244416, 244417, 244418, 244419, 244420, 244421, 244422, 244423, 244424, 244425) c6( ) c7(uz); #c1(CPNE3) c2(NP_003900) c3(copine-3) c4(141961, 141962, 141963, 141964, 141965, 141966) c5(141967, 141968, 141969, 141970, 141971, 141972, 141973, 141974, 141975, 141976, 141977, 141978, 141979, 141980, 141981, 141982, 141983, 141984, 141985, 141986, 141987, 141988, 141989, 141990, 141991, 141992, 141993, 141994, 141995, 141996, 141997, 141998, 141999, 142000, 142001, 142002, 142003, 142004, 142005, 142006) c6( ) c7(t, T, bz, ad, eM); #c1(CPNE4) c2(NP_001276041) c3(copine-4 isoform 1) c4(107808, 107809, 107810) c5(107811, 107812, 107813, 107814, 107815, 107816, 107817, 107818, 107819, 107820, 107821, 107822, 107823, 107824, 107825, 107826, 107827, 107828, 107829, 107830) c6( ) c7(bM, fq, aw, EQ); #c1(CPNE4) c2(NP_570720) c3(copine-4 isoform 2) c4( ) c5(234231, 234232, 234233, 234234, 234235, 234236) c6( ) c7(bM, fq, aw, EQ); #c1(CPNE7) c2(NP_055242) c3(copine-7 isoform b) c4(180011) c5(180012, 180013, 180014, 180015, 180016, 180017) c6( ) c7(aW, aC, cd, aT); #c1(CPNE7) c2(NP_705900) c3(copine-7 isoform a) c4(246403) c5(246404, 246405, 246406, 246407, 246408, 246409) c6( ) c7(aW, aC, cd, aT); #c1(CPNE8) c2(NP_705898) c3(copine-8) c4(246396) c5(246397, 246398, 246399, 246400, 246401, 246402) c6( ) c7(oe, dt); #c1(CPO) c2(XP_011508929) c3(carboxypeptidase O isoform X1) c4(299484) c5(299485, 299486, 299487, 299488, 299489, 299490, 299491, 299492) c6(299493, 299494) c7(bM, T, aVf, fd, aUA, ae, ad); #c1(CPOX) c2(NP_000088) c3(oxygen-dependent coproporphyrinogen-III oxidase, mitochondrial precursor) c4(1654) c5(1655, 1656, 1657, 1658, 1659, 1660) c6( ) c7(cw, bM, T, aC, BD, aDy, sw, QW, fd, bB, n, aNG, aHv, j, aVi, q, ad, eA, iu, aE, aT, h, cy, bl, K, aUA, aVg, ae, af, ajU, Nr, s, Ow, aW, aVf, ff, fO, eH, aNq, r, Ej, po, kp, aB, en, nN, eF, t, kC, bz, dr, Nq, y, sS, aBr, SE, xZ, wO, bE, aVh, at, acJ, m, QV, it, B, ao); #c1(CPOX) c2(XP_011510739) c3(oxygen-dependent coproporphyrinogen-III oxidase, mitochondrial isoform X2) c4( ) c5(301157) c6( ) c7(cw, bM, T, aC, BD, aDy, sw, QW, fd, bB, n, aNG, aHv, j, aVi, q, ad, eA, iu, aE, aT, h, cy, bl, K, aUA, aVg, ae, af, ajU, Nr, s, Ow, aW, aVf, ff, fO, eH, aNq, r, Ej, po, kp, aB, en, nN, eF, t, kC, bz, dr, Nq, y, sS, aBr, SE, xZ, wO, bE, aVh, at, acJ, m, QV, it, B, ao); #c1(CPPED1) c2(NP_001092925) c3(serine/threonine-protein phosphatase CPPED1 isoform b) c4(39771) c5(39772, 39773, 39774, 39775, 39776, 39777) c6( ) c7(n, Y, dL, Nn, eL); #c1(CPPED1) c2(NP_060810) c3(serine/threonine-protein phosphatase CPPED1 isoform a) c4(197938) c5(197939, 197940, 197941, 197942, 197943, 197944) cG( ) c7(n, Y, dL, Nn, eL); #c1(CPQ) c2(NP_057218) c3(carboxypeptidase Q preproprotein) c4(189537) c5(189538, 189539, 189540, 189541, 189542, 189543, 189544, 189545) cG( ) c7(T, mR, Wz, bE, asD, hl, EQ, aVj, cz, bB, aq, h, uu, ox, fr, zy, y, B, adz); #c1(CPS1) c2(NP_001116105) c3(carbamoyl-phosphate synthase [ammonia], mitochondrial isoform a precursor) c4(43427, 43428, 43429, 43430) c5(43431, 43432, 43433, 43434, 43435, 43436, 43437, 43438, 43439, 43440, 43441, 43442, 43443, 43444, 43445, 43446, 43447, 43448, 43449, 43450, 43451, 43452, 43453, 43454, 43455, 43456, 43457, 43458, 43459, 43460, 43461, 43462, 43463, 43464, 43465, 43466, 43467, 43468, 43469, 43470, 43471, 43472, 43473, 43474, 43475, 43476, 43477, 43478, 43479, 43480, 43481, 43482, 43483, 43484, 43485, 43486, 43487, 43488, 43489, 43490, 43491, 43492, 43493, 43494, 43495, 43496, 43497, 43498, 43499, 43500, 43501, 43502, 43503, 43504, 43505, 43506, 43507, 43508, 43509, 43510, 43511, 43512, 43513, 43514, 43515, 43516, 43517, 43518, 43519, 43520, 43521, 43522, 43523, 43524, 43525, 43526, 43527, 43528, 43529, 43530, 43531, 43532, 43533, 43534, 43535, 43536, 43537, 43538, 43539, 43540, 43541, 43542, 43543, 43544, 43545, 43546, 43547, 43548, 43549, 43550, 43551, 43552, 43553, 43554, 43555, 43556, 43557, 43558, 43559, 43560, 43561, 43562, 43563, 43564, 43565, 43566, 43567, 43568, 43569, 43570, 43571, 43572, 43573, 43574, 43575, 43576, 43577, 43578, 43579, 43580, 43581, 43582, 43583, 43584, 43585, 43586, 43587, 43588, 43589, 43590, 43591, 43592, 43593, 43594, 43595) c6( ) c7(eR, jp, ha, aip, cz, v, afD, md, acu, jo, bq, aiV, fc, fQ, fH, aq, xH, iR, f, wz, aUS, aS, IC, B); #c1(CPS1) c2(NP_001116106) c3(carbamoyl-phosphate synthase [ammonia], mitochondrial isoform c) c4(43596) c5(43597, 43598, 43599, 43600, 43601, 43602) c6( ) c7(eR, jp, ha, aip, cz, v, afD, md, acu, jo, bq, aiV, fc, fQ, fH, aq, xH, iR, f, wz, aUS, aS, IC, B); #c1(CPS1) c2(NP_001866) c3(carbamoyl-phosphate synthase [ammonia], mitochondrial isoform b precursor) c4( ) c5(121824, 121825, 121826, 121827, 121828) c6( ) c7(eR, jp, ha, aip, cz, v, afD, md, acu, jo, bq, aiV, fc, fQ, fH, aq, xH, iR, f, wz, aUS, aS, IC, B); #c1(CPS1) c2(XP_011508942) c3(carbamoyl-phosphate synthase [ammonia], mitochondrial isoform X2) c4(299504, 299505) c5(299506, 299507, 299508, 299509, 299510, 299511, 299512, 299513, 299514, 299515, 299516) c6( ) c7(eR, jp, ha, aip, cz, v, afD, md, acu, jo, bq, aiV, fc, fQ, fH, aq, xH, iR, f, wz, aUS, aS, IC, B); #c1(CPSF1) c2(NP_037423) c3(cleavage and polyadenylation specificity factor subunit 1) c4(175481) c5(175482, 175483, 175484, 175485, 175486, 175487) c6( ) c7(aA); #c1(CPSF2) c2(NP_059133) c3(cleavage and polyadenylation specificity factor subunit 2) c4(193209, 193210) c5(193211, 193212, 193213, 193214, 193215, 193216, 193217, 193218, 193219, 193220, 193221, 193222) c6( ) c7(bL, T, hd, nM, nB); #c1(CPSF3) c2(NP_057291) c3(cleavage and polyadenylation specificity factor subunit 3) c4(189918, 189919, 189920) c5(189921, 189922, 189923, 189924, 189925, 189926, 189927, 189928, 189929, 189930, 189931, 189932, 189933) c6( ) c7(aVk); #c1(CPSF3) c2(XP_011508664) c3(cleavage and polyadenylation specificity factor subunit 3 isoform X2) c4( ) c5(299285, 299286, 299287, 299288, 299289) c6( ) c7(aVk); #c1(CPSF3L) c2(XP_011539949) c3(integrator complex subunit 11 isoform X1) c4(338302) c5( ) c6( ) c7(sO, aVk); #c1(CPSF3L) c2(XP_011539950) c3(integrator complex subunit 11 isoform X2) c4(338303) c5(338304, 338305) c6( ) c7(sO, aVk); #c1(CPSF4) c2(NP_001075028) c3(cleavage and polyadenylation specificity factor subunit 4 isoform 2) c4(37187) c5(37188, 37189, 37190, 37191, 37192, 37193) c6( ) c7(bz, iu, g); #c1(CPSF4) c2(NP_006684) c3(cleavage and polyadenylation specificity factor subunit 4 isoform 1) c4(167128) c5(167129, 167130, 167131, 167132, 167133, 167134) c6( ) c7(bz, iu, g); #c1(CPSF6) c2(NP_001287876) c3(cleavage and polyadenylation specificity factor subunit 6 isoform 2) c4(113104) c5(113105, 113106, 113107, 113108, 113109, 113110) c6( ) c7(h, ey); #c1(CPSF6) c2(NP_008938) c3(cleavage and polyadenylation specificity factor subunit 6 isoform 1) c4(169676, 169677) c5(169678, 169679, 169680, 169681, 169682, 169683, 169684, 169685, 169686, 169687, 169688, 169689) c6( ) c7(h, ey); #c1(CPSF7) c2(NP_001129512) c3(cleavage and polyadenylation specificity factor subunit 7 isoform 2) c4( ) c5(51813, 51814, 51815, 51816, 51817) c6( ) c7(aW, n, T, aT); #c1(CPSF7) c2(NP_001136037) c3(cleavage and polyadenylation specificity factor subunit 7 isoform 3) c4(54113, 54114) c5(54115, 54116, 54117, 54118, 54119, 54120, 54121, 54122, 54123, 54124, 54125, 54126, 54127, 54128, 54129, 54130, 54131, 54132) c6( ) c7(aW, n, T, aT); #c1(CPSF7) c2(NP_079087) c3(cleavage and polyadenylation specificity factor subunit 7 isoform 1) c4(216937, 216938) c5(216939, 216940, 216941, 216942, 216943, 216944, 216945) c6( ) c7(aW, n, T, aT); #c1(CPSF7) c2(XP_005274355) c3(cleavage and polyadenylation specificity factor subunit 7 isoform X3) c4(285056) c5(285057, 285058, 285059, 285060) c6( ) c7(aW, n, T, aT); #c1(CPSF7) c2(XP_011543559) c3(cleavage and polyadenylation specificity factor subunit 7 isoform X4) c4(342471, 342472) c5(342473, 342474, 342475, 342476, 342477, 342478, 342479, 342480, 342481, 342482, 342483, 342484) c6( ) c7(aW, n, T, aT); #c1(CPT1A) c2(XP_005273819) c3(carnitine O-palmitoyltransferase 1, liver isoform isoform X1) c4(284835) c5(284836, 284837, 284838, 284839, 284840, 284841, 284842, 284843, 284844, 284845, 284846, 284847, 284848, 284849) c6( ) c7(bL, cZ, dD, eR, al, aj, v, eq, ci, J, F, aT, jy, dd, bq, af, d, nU, fc, dq, EZ, bw, bo, mx, Xu, it); #c1(CPT1A) c2(XP_005273820) c3(carnitine O-palmitoyltransferase 1, liver isoform isoform X2) c4(284850) c5(284851, 284852, 284853, 284854, 284855, 284856, 284857, 284858, 284859, 284860) c6( ) c7(bL, cZ, dD, eR, al, aj, v, eq, ci, J, F, aT, jy, dd, bq, af, d, nU, fc, dq, EZ, bw, bo, mx, Xu, it); #c1(CPT1B) c2(NP_001138606) c3(carnitine O-palmitoyltransferase 1, muscle isoform isoform c) c4(57162, 57163) c5(57164, 57165, 57166, 57167, 57168, 57169, 57170, 57171, 57172, 57173, 57174, 57175) c6( ) c7(bL, cF, cj, aaN, aq, v, j, ei, bq, af, alY); #c1(CPT1B) c2(NP_004368) c3(carnitine O-palmitoyltransferase 1, muscle isoform isoform a) c4(145783, 145784, 145785) c5(145786, 145787, 145788, 145789, 145790, 145791, 145792, 145793, 145794, 145795, 145796, 145797, 145798, 145799, 145800, 145801, 145802, 145803, 145804, 145805, 145806, 145807, 145808, 145809, 145810, 145811, 145812, 145813, 145814, 145815) c6( ) c7(bL, cF, cj, aaN, aq, v, j, ei, bq, af, alY); #c1(CPT1C) c2(NP_001129524) c3(carnitine O-palmitoyltransferase 1, brain isoform isoform 1) c4(51846) c5(51847, 51848, 51849, 51850, 51851, 51852) c6( ) c7(av, cZ, d, Y, fd, K, bX, dd); #c1(CPT1C) c2(NP_001186682) c3(carnitine O-palmitoyltransferase 1, brain isoform isoform 2) c4(78331) c5(78332, 78333, 78334, 78335, 78336, 78337, 78338, 78339, 78340, 78341, 78342, 78343, 78344, 78345) c6( ) c7(av, cZ, d, Y, fd, K, bX, dd); #c1(CPT1C) c2(XP_006723072) c3(carnitine O-palmitoyltransferase 1, brain isoform isoform X3) c4(295000) c5(295001, 295002, 295003, 295004, 295005, 295006) c6( ) c7(av, cZ, d, Y, fd, K, bX, dd); #c1(CPT1C) c2(XP_011524742) c3(carnitine O-palmitoyltransferase 1, brain isoform isoform X2) c4(319208) c5(319209, 319210, 319211, 319212, 319213, 319214) c6( ) c7(av, cZ, d, Y, fd, K, bX, dd); #c1(CPVL) c2(XP_011513739) c3(probable serine carboxypeptidase CPVL isoform X1) c4(306056, 306057, 306058, 306059) c5(306060, 306061, 306062, 306063, 306064, 306065, 306066, 306067, 306068, 306069, 306070, 306071, 306072, 306073, 306074, 306075, 306076, 306077, 306078, 306079, 306080, 306081, 306082, 306083, 306084, 306085, 306086, 306087, 306088, 306089, 306090, 306091) c6( ) c7(bL, ck, BI, T, RB, aE, QO, aVI, ds, oe, if, aiM, vy, cU, h, Io, EA, qN, hH, fq, aMk); #c1(CPXCR1) c2(NP_001171700) c3(CPX chromosomal region candidate gene 1 protein) c4(71321) c5(71322, 71323, 71324, 71325, 71326, 71327, 71328, 71329, 71330, 71331) c6( ) c7(aA); #c1(CPZ) c2(NP_001014447) c3(carboxypeptidase Z isoform 1 precursor) c4(25943) c5(25944, 25945, 25946, 25947, 25948, 25949, 25950, 25951, 25952, 25953, 25954, 25955, 25956, 25957, 25958, 25959, 25960) c6(25961, 25962, 25963, 25964) c7(cm); #c1(CPZ) c2(NP_001014448) c3(carboxypeptidase Z isoform 3) c4(25965, 25966) c5(25967, 25968, 25969, 25970, 25971, 25972, 25973) c6(25974, 25975) c7(cm); #c1(CPZ) c2(NP_003643) c3(carboxypeptidase Z isoform 2 precursor) c4(139860) c5(139861, 139862, 139863, 139864, 139865, 139866, 139867, 139868) c6(139869, 139870) c7(cm); #c1(CR1) c2(NP_000564) c3(complement receptor type 1 isoform F precursor) c4(12688, 12689, 12690) c5(12691, 12692, 12693, 12694, 12695, 12696, 12697, 12698, 12699, 12700, 12701, 12702, 12703, 12704, 12705, 12706, 12707, 12708, 12709, 12710, 12711, 12712) c6( ) c7(bL, bM, dD, eR, ea, fG, e, al, hE, aw, cz, iW, eq, ci, atK, eh, aHj, F, Id, dV, aT, aLr, h, dL, aVn, af, uQ, A, aW, Y, wc, hl, eZ, dr, asE, ck, LB, W, qe, ig, hc, aVm, dy, fL, eg, aTW, bt, fh, y, vi); #c1(CR1) c2(NP_000642) c3(complement receptor type 1 isoform S precursor) c4(14142, 14143) c5(14144, 14145, 14146, 14147, 14148, 14149) c6( ) c7(bL, bM, dD, eR, ea, fG, e, al, hE, aw, cz, iW, eq, ci, atK, eh, aHj, F, Id, dV, aT, aLr, h, dL, aVn, af, uQ, A, aW, Y, wc, hl, eZ, dr, asE, ck, LB, W, qe, ig, hc, aVm, dy, fL, eg, aTW, bt, fh, y, vi); #c1(CR1) c2(XP_006711229) c3(complement receptor type 1 isoform X2) c4( ) c5(285796, 285797, 285798, 285799, 285800, 285801) c6( ) c7(bL, bM, dD, eR, ea, fG, e, al, hE, aw, cz, iW, eq, ci, atK, eh, aHj, F, Id, dV, aT, aLr, h, dL, aVn, af, uQ, A, aW, Y, wc, hl, eZ, dr, asE, ck, LB, W, qe, ig, hc, aVm, dy, fL, eg, aTW, bt, fh, y, vi); #c1(CR2) c2(NP_001006659) c3(complement receptor type 2 isoform 1 precursor) c4(22338) c5(22339, 22340, 22341, 22342, 22343, 22344) c6( ) c7(bL, T, fM, aVo, iW, eX, jh, cz, fd, aj, ci, aVp, V, ai, mC, J, aoH, mj, hW, aVq, ja, h, eV, an, zy, hM, ff, eZ, aq, Io, BG, aoD, en, op, Wt, ck, iQ, W, vA, cj, eo, fL, y, Ze); #c1(CR2) c2(NP_001868) c3(complement receptor type 2 isoform 2 precursor) c4(121829, 121830, 121831) c5(121832, 121833, 121834, 121835, 121836, 121837, 121838, 121839, 121840, 121841, 121842, 121843, 121844, 121845, 121846, 121847, 121848, 121849) c6( ) c7(bL, T, fM, aVo, iW, eX, jh, cz, fd, aj, ci, aVp, V, ai, mC, J, aoH, mj, hW, aVq, ja, h, eV, an, zy, hM, ff, eZ, aq, Io, BG, aoD, en, op, Wt, ck, iQ, W, vA, cj, eo, fL, y, Ze); #c1(CRABP1) c2(NP_004369) c3(cellular retinoic acid-binding protein 1) c4(145816) c5(145817, 145818, 145819, 145820, 145821, 145822) c6( ) c7(T, fr, ci, bd, q, mP, jj, s, ff, r, aq, en, cm, iK, op, sS, nM, nB, AM, vA, y, bt, it); #c1(CRABP2) c2(NP_001186652) c3(cellular retinoic acid-binding protein 2) c4(78285, 78286) c5(78287, 78288, 78289, 78290, 78291, 78292, 78293, 78294, 78295, 78296, 78297, 78298, 78299, 78300, 78301, 78302) c6( ) c7(bL, T, ci, eA, er, ad, LL, ec, aT, ae, jf, cH, aW, eV, ff, kp, en, g, as, cm, cM, bz, GR, op, iK, Fi, vA, aRD, iu); #c1(CRACR2A) c2(NP_001138430) c3(EF-hand calcium-binding domain-containing protein 4B isoform a) c4(56675) c5(56676, 56677, 56678, 56679, 56680, 56681, 56682, 56683, 56684, 56685, 56686, 56687) c6( ) c7(aw, gU, fc, an); #c1(CRACR2A) c2(NP_116069) c3(EF-hand calcium-binding domain-containing protein 4B isoform c) c4(225318) c5(225319, 225320, 225321, 225322, 225323, 225324) c6( ) c7(aw, gU, fc, an); #c1(CRACR2A) c2(XP_011519338) c3(EF-hand calcium-binding domain-containing protein 4B isoform X1) c4(313988, 313989) c5( ) c6( ) c7(aw, gU, fc, an); #c1(CRACR2A) c2(XP_011519340) c3(EF-hand calcium-binding domain-containing protein 4B isoform X2) c4( ) c5(313990, 313991, 313992, 313993, 313994, 313995) c6( ) c7(aw, gU, fc, an); #c1(CRADD) c2(NP_003796) c3(death domain-containing protein CRADD) c4(140945, 140946) c5(140947, 140948, 140949, 140950, 140951, 140952, 140953, 140954, 140955, 140956) c6( ) c7(cF, aw, eH, aVr, fr, eF, fq); #c1(CRADD) c2(XP_005269268) c3(death domain-containing protein CRADD isoform X1) c4(282507) c5(282508, 282509, 282510, 282511, 282512, 282513, 282514, 282515, 282516, 282517, 282518, 282519) c6( ) c7(cF, aw, eH, aVr, fr, eF, fq); #c1(CRAMP1L) c2(NP_065876) c3(protein cramped-like) c4(206016, 206017, 206018) c5(206019, 206020, 206021, 206022, 206023, 206024, 206025, 206026, 206027, 206028, 206029, 206030, 206031, 206032, 206033, 206034, 206035, 206036, 206037, 206038, 206039, 206040, 206041) c6( ) c7(ac); #c1(CRAT) c2(NP_000746) c3(carnitine O-acetyltransferase isoform 1 precursor) c4(15132, 15133) c5(15134, 15135, 15136, 15137, 15138, 15139, 15140, 15141, 15142, 15143, 15144, 15145) c6( ) c7(bM, T, IP, if, bB, Vd, ci, qj, aE, K, aW, CT, La, aoD, Ku, eF, cm, bw, aAW, qJ, eM, nB, m, nA, qN, cd, eW, ft, pe, cU, h, on, pi, A, aq, ej, iO, IX, eD, hR, at, B, bL, rf, Kh, AO, q, er, mj, cF, nv, aT, bK, an, IM, ae, s, Y, r, en, cl, t, qs, iK, hY, nM, iM, c, kB, ig, mf, jh, Hn, ad, hX, hd, ds, nJ, je, qt, ff, eH, eZ, bz, qa, hE, aS, be, ei, pC); #c1(CRB1) c2(NP_001180569) c3(protein crumbs homolog 1 isoform 2 precursor) c4(74260, 74261) c5(74262, 74263, 74264, 74265, 74266, 74267) c6( ) c7(bM, nx, v, Nh, ah, li, IR, aVs, aVu, nk, nC, aVt, vk, W, aVv, ajw, hR, nw, eQ, oQ, aVw, de); #c1(CRB1) c2(NP_001244894) c3(protein crumbs homolog 1 isoform 3) c4(92273) c5(92274, 92275, 92276, 92277, 92278, 92279) c6( ) c7(bM, nx, v, Nh, ah, li, IR, aVs, aVu, nk, nC, aVt, vk, W, aVv, ajw, hR, nw, eQ, oQ, aVw, de); #c1(CRB1) c2(NP_001244895) c3(protein crumbs homolog 1 isoform 4 precursor) c4(92280) c5(92281, 92282, 92283, 92284, 92285, 92286, 92287, 92288, 92289, 92290, 92291, 92292) c6( ) c7(bM, nx, v, Nh, ah, li, IR, aVs, aVu, nk, nC, aVt, vk, W, aVv, ajw, hR, nw, eQ, oQ, aVw, de); #c1(CRB1) c2(NP_957705) c3(protein crumbs homolog 1 isoform 1 precursor) c4(262008) c5(262009, 262010, 262011, 262012, 262013, 262014, 262015) c6( ) c7(bM, nx, v, Nh, ah, li, IR, aVs, aVu, nk, nC, aVt, vk, W, aVv, ajw, hR, nw, eQ, oQ, aVw, de); #c1(CRB1) c2(XP_011507668) c3(protein crumbs homolog 1 isoform X2) c4(297654) c5(297655, 297656, 297657, 297658, 297659) c6( ) c7(bM, nx, v, Nh, ah, li, IR, aVs, aVu, nk, nC, aVt, vk, W, aVv, ajw, hR, nw, eQ, oQ, aVw, de); #c1(CRB1) c2(XP_011507670) c3(protein crumbs homolog 1 isoform X4) c4(297660) c5(297661, 297662, 297663, 297664, 297665, 297666, 297667, 297668) c6( ) c7(bM, nx, v, Nh, ah, li, IR, aVs, aVu, nk, nC, aVt, vk, W, aVv, ajw, hR, nw, eQ, oQ, aVw, de); #c1(CRB1) c2(XP_011507671) c3(protein crumbs homolog 1 isoform X5) c4(297669, 297670) c5(297671, 297672, 297673, 297674, 297675, 297676, 297677, 297678, 297679, 297680) c6( ) c7(bM, nx, v, Nh, ah, li, IR, aVs, aVu, nk, nC, aVt, vk, W, aVv, ajw, hR, nw, eQ, oQ, aVw, de); #c1(CRB2) c2(NP_775960) c3(protein crumbs homolog 2 precursor) c4(250824, 250825) c5(250826, 250827, 250828, 250829, 250830, 250831, 250832, 250833, 250834, 250835, 250836, 250837) c6( ) c7(Na, nC, nx, Nc, Nh); #c1(CRB2) c2(XP_005251991) c3(protein crumbs homolog 2 isoform X3) c4(271411) c5(271412, 271413, 271414, 271415, 271416, 271417) c6( ) c7(Na, nC, nx, Nc, Nh); #c1(CRB3) c2(NP_777377) c3(protein crumbs homolog 3 isoform b precursor) c4(251115) c5(251116, 251117, 251118, 251119, 251120, 251121) c6( ) c7(T, MU); #c1(CRB3) c2(XP_005259737) c3(protein crumbs homolog 3 isoform X1) c4(276280) c5(276281, 276282, 276283, 276284, 276285, 276286, 276287, 276288, 276289, 276290) c6( ) c7(T, MU); #c1(CRBN) c2(NP_001166953) c3(protein cereblon isoform 2) c4(68725) c5(68726, 68727, 68728, 68729, 68730, 68731, 68732) c6( ) c7(aC, oe, fd, bK, nA, ae, ad, aVx); #c1(CRBN) c2(NP_057386) c3(protein cereblon isoform 1) c4(190505, 190506) c5(190507, 190508, 190509, 190510, 190511, 190512) c6( ) c7(aC, oe, fd, bK, nA, ae, ad, aVx); #c1(CRBN) c2(XP_005265259) c3(protein cereblon isoform X2) c4( ) c5(279450, 279451, 279452, 279453, 279454) c6( ) c7(aC, oe, fd, bK, nA, ae, ad, aVx); #c1(CRCP) c2(NP_001035737) c3(DNA-directed RNA polymerase III subunit RPC9 isoform b) c4(32992, 32993) c5(32994, 32995, 32996, 32997, 32998, 32999, 33000, 33001, 33002, 33003, 33004) c6( ) c7(h, aW, My, aT); #c1(CRCP) c2(NP_001035738) c3(DNA-directed RNA polymerase III subunit RPC9 isoform c) c4(33005) c5(33006, 33007, 33008, 33009, 33010) c6( ) c7(h, aW, My, aT); #c1(CRCP) c2(NP_001135886) c3(DNA-directed RNA polymerase III subunit RPC9 isoform d) c4(53490) c5(53491, 53492, 53493, 53494, 53495, 53496, 53497, 53498) c6( ) c7(h, aW, My, aT); #c1(CRCP) c2(NP_055293) c3(DNA-directed RNA polymerase III subunit RPC9 isoform a) c4(180329) c5(180330, 180331, 180332, 180333, 180334, 180335) c6( ) c7(h, aW, My, aT); #c1(CRCT1) c2(NP_061933) c3(cysteine-rich C-terminal protein 1) c4(201209) c5(201210, 201211, 201212, 201213, 201214, 201215) c6( ) c7(bM); #c1(CREB1) c2(XP_011508947) c3(cyclic AMP-responsive element-binding protein 1 isoform X1) c4(299517, 299518, 299519) c5(299520, 299521, 299522, 299523, 299524, 299525, 299526, 299527) c6( ) c7(bM, T, ea, bO, fd, ci, aR, rw, K, cp, JI, aW, Ls, fc, cm, bw, iT, xD, m, dD, iB, aw, aj, ct, eW, adf, aGR, ft, kH, h, ask, abf, aq, hq, ok, cA, hR, eo, B, bL, aGn, fG, aA, v, V, q, eA, di, aT, kf, cy, dz, bK, jj, ae, af, eu, ak, s, Y, r, cu, Io, t, f, FT, ck, Qi, acW, Dy, iM, gX, Yz, bt, hS, iW, ha, jh, bS, dG, eq, aVy, hF, ad, hX, av, Db, ds, pq, d, je, aCt, eZ, aF, Z, adj, iR, bz, all, eK, Ew, bE, dJ, rH, y); #c1(CREB1) c2(XP_011508948) c3(cyclic AMP-responsive element-binding protein 1 isoform X3) c4(299528) c5( ) c6( ) c7(bM, T, ea, bO, fd, ci, aR, rw, K, cp, JI, aW, Ls, fc, cm, bw, iT, xD, m, dD, iB, aw, aj, ct, eW, adf, aGR, ft, kH, h, ask, abf, aq, hq, ok, cA, hR, eo, B, bL, aGn, fG, aA, v, V, q, eA, di, aT, kf, cy, dz, bK, jj, ae, af, eu, ak, s, Y, r, cu, Io, t, f, FT, ck, Qi, acW, Dy, iM, gX, Yz, bt, hS, iW, ha, jh, bS, dG, eq, aVy, hF, ad, hX, av, Db, ds, pq, d, je, aCt, eZ, aF, Z, adj, iR, bz, all, eK, Ew, bE, dJ, rH, y); #c1(CREB1) c2(XP_011508949) c3(cyclic AMP-responsive element-binding protein 1 isoform X2) c4(299529, 299530) c5(299531, 299532, 299533, 299534, 299535, 299536, 299537, 299538, 299539, 299540, 299541, 299542, 299543, 299544, 299545, 299546, 299547) c6( ) c7(bM, T, ea, bO, fd, ci, aR, rw, K, cp, JI, aW, Ls, fc, cm, bw, iT, xD, m, dD, iB, aw, aj, ct, eW, adf, aGR, ft, kH, h, ask, abf, aq, hq, ok, cA, hR, eo, B, bL, aGn, fG, aA, v, V, q, eA, di, aT, kf, cy, dz, bK, jj, ae, af, eu, ak, s, Y, r, cu, Io, t, f, FT, ck, Qi, acW, Dy, iM, gX, Yz, bt, hS, iW, ha, jh, bS, dG, eq, aVy, hF, ad, hX, av, Db, ds, pq, d, je, aCt, eZ, aF, Z, adj, iR, bz, all, eK, Ew, bE, dJ, rH, y); #c1(CREB1) c2(XP_011508954) c3(cyclic AMP-responsive element-binding protein 1 isoform X7) c4(299548, 299549) c5(299550, 299551, 299552, 299553, 299554, 299555, 299556, 299557, 299558, 299559, 299560, 299561, 299562, 299563, 299564, 299565, 299566, 299567, 299568, 299569, 299570, 299571, 299572, 299573, 299574, 299575, 299576, 299577, 299578) c6( ) c7(bM, T, ea, bO, fd, ci, aR, rw, K, cp, JI, aW, Ls, fc, cm, bw, iT, xD, m, dD, iB, aw, aj, ct, eW, adf, aGR, ft, kH, h, ask, abf, aq, hq, ok, cA, hR, eo, B, bL, aGn, fG, aA, v, V, q, eA, di, aT, kf, cy, dz, bK, jj, ae, af, eu, ak, s, Y, r, cu, Io, t, f, FT, ck, Qi, acW, Dy, iM, gX, Yz, bt, hS, iW, ha, jh, bS, dG, eq, aVy, hF, ad, hX, av, Db, ds, pq, d, je, aCt, eZ, aF, Z, adj, iR, bz, all, eK, Ew, bE, dJ, rH, y); #c1(CREB1) c2(XP_011508955) c3(cyclic AMP-responsive element-binding protein 1 isoform X8) c4(299579) c5(299580, 299581, 299582, 299583, 299584) cG( ) c7(bM, T, ea, bO, fd, ci, aR, rw, K, cp, JI, aW, Ls, fc, cm, bw, iT, xD, m, dD, iB, aw, aj, ct, eW, adf, aGR, ft, kH, h, ask, abf, aq, hq, ok, cA, hR, eo, B, bL, aGn, fG, aA, v, V, q, eA, di, aT, kf, cy, dz, bK, jj, ae, af, eu, ak, s, Y, r, cu, Io, t, f, FT, ck, Qi, acW, Dy, iM, gX, Yz, bt, hS, iW, ha, jh, bS, dG, eq, aVy, hF, ad, hX, av, Db, ds, pq, d, je, aCt, eZ, aF, Z, adj, iR, bz, all, eK, Ew, bE, dJ, rH, y); #c1(CREB3) c2(NP_006359) c3(cyclic AMP-responsive element-binding protein 3) c4(164337) c5(164338, 164339, 164340, 164341, 164342, 164343) c6( ) c7(dD, kj, aE, xD, aW, ea, zs, jx, aT, eq, y, af, MG); #c1(CREB3L1) c2(NP_443086) c3(cyclic AMP-responsive element-binding protein 3-like protein 1) c4(229323, 229324) c5(229325, 229326, 229327, 229328, 229329, 229330, 229331, 229332, 229333, 229334, 229335, 229336, 229337, 229338, 229339, 229340, 229341) c6( ) c7(eG, aw, zp, K, eA, aVz); #c1(CREB3L2) c2(NP_001240704) c3(cyclic AMP-responsive element-binding protein 3-like protein 2 isoform 2) c4(88704) c5(88705, 88706, 88707, 88708, 88709, 88710, 88711, 88712, 88713, 88714, 88715, 88716, 88717, 88718, 88719, 88720, 88721) c6( ) c7(T, hd, eG, ac, QG, nB, ci, QA, eA); #c1(CREB3L2) c2(NP_919047) c3(cyclic AMP-responsive element-binding protein 3-like protein 2 isoform 1) c4(258229, 258230, 258231, 258232) c5(258233, 258234, 258235, 258236, 258237, 258238, 258239, 258240, 258241, 258242, 258243, 258244, 258245, 258246) c6( ) c7(T, hd, eG, ac, QG, nB, ci, QA, eA); #c1(CREB3L3) c2(NP_001258924) c3(cyclic AMP-responsive element-binding protein 3-like protein 3 isoform b) c4(96800) c5(96801, 96802, 96803, 96804, 96805, 96806) c6( ) c7(aq, B, K, s); #c1(CREB3L3) c2(NP_115996) c3(cyclic AMP-responsive element-binding protein 3-like protein 3 isoform a) c4(225155, 225156) c5(225157, 225158, 225159, 225160, 225161, 225162, 225163, 225164, 225165, 225166, 225167, 225168, 225169, 225170, 225171) c6( ) c7(aq, B, K, s); #c1(CREB3L4) c2(NP_001242908) c3(cyclic AMP-responsive element-binding protein 3-like protein 4 isoform 1) c4(89211, 89212, 89213) c5(89214, 89215, 89216, 89217, 89218, 89219, 89220, 89221, 89222, 89223, 89224, 89225, 89226, 89227, 89228, 89229, 89230, 89231, 89232, 89233, 89234, 89235, 89236, 89237, 89238, 89239, 89240) c6( ) c7(JI, aW, qd, aT, K, g, ae, ad); #c1(CREB3L4) c2(XP_006711235) c3(cyclic AMP-responsive element-binding protein 3-like protein 4 isoform X1) c4(285802, 285803, 285804) c5(285805, 285806, 285807, 285808, 285809, 285810, 285811, 285812, 285813, 285814, 285815, 285816, 285817, 285818, 285819, 285820, 285821, 285822) cG( ) c7(JI, aW, qd, aT, K, g, ae, ad); #c1(CREB5) c2(NP_001011666) c3(cyclic AMP-responsive element-binding protein 5 isoform delta) c4(24675) c5(24676, 24677, 24678, 24679, 24680, 24681, 24682) c6( ) c7(bM, oe, ad, cz); #c1(CREB5) c2(NP_878901) c3(cyclic AMP-responsive element-binding protein 5 isoform alpha) c4(257125, 257126, 257127, 257128) c5(257129, 257130, 257131, 257132, 257133, 257134, 257135, 257136, 257137) c6( ) c7(bM, oe, ad, cz); #c1(CREB5) c2(XP_011513918) c3(cyclic AMP-responsive element-binding protein 5 isoform X4) c4( ) c5(306336, 306337, 306338, 306339, 306340, 306341, 306342, 306343, 306344, 306345, 306346, 306347, 306348, 306349, 306350, 306351, 306352, 306353, 306354, 306355) c6( ) c7(bM, oe, ad, cz); #c1(CREBBP) c2(NP_001073315) c3(CREB-binding protein isoform b) c4(35844, 35845) c5( ) c6( ) c7(bM, T, bO, fd, bB, ci, aR, x, aVC, aVA, dV, aVB, kS, aW, apn, cm, bw, aVE, eM, Ip, aep, U, m, n, oY, nA, PJ, aCi, ft, h, dL, ask, he, pi, hi, avP, aVD, ok, hL, at, fL, bD, it, L, aTl, Kh, C, AO, q, eA, Kx, MR, jZ, qK, aT, bK, ae, af, jf, iU, iZ, r, en, cl, t, ck, Qi, nM, iM, c, kB, CZ, bt, an, id, jh, hF, gb, mC, ad, hX, av, je, ff, eZ, adj, bz, dr, all, bE, Kj, y, xg); #c1(CREBBP) c2(NP_004371) c3(CREB-binding protein isoform a) c4(145823) c5(145824, 145825, 145826, 145827, 145828, 145829, 145830, 145831, 145832, 145833, 145834, 145835, 145836, 145837, 145838, 145839, 145840, 145841, 145842) c6( ) c7(bM, T, bO, fd, bB, ci, aR, x, aVC, aVA, dV, aVB, kS, aW, apn, cm, bw, aVE, eM, Ip, aep, U, m, n, oY, nA, PJ, aCi, ft, h, dL, ask, he, pi, hi, avP, aVD, ok, hL, at, fL, bD, it, L, aTl, Kh, C, AO, q, eA, Kx, MR, jZ, qK, aT, bK, ae, af, jf, iU, iZ, r, en, cl, t, ck, Qi, nM, iM, c, kB, CZ, bt, ao, id, jh, hF, gb, mC, ad, hX, av, je, ff, eZ, adj, bz, dr, all, bE, Kj, y, xg); #c1(CREBBP) c2(XP_005255182) c3(CREB-binding protein isoform X4) c4(273571) c5( ) cG( ) c7(bM, T, bO, fd, bB, ci, aR, x, aVC, aVA, dV, aVB, kS, aW, apn, cm, bw, aVE, eM, Ip, aep, U, m, n, oY, nA, PJ, aCi, ft, h, dL, ask, he, pi, hi, avP, aVD, ok, hL, at, fL, bD, it, L, aTl, Kh, C, AO, q, eA, Kx, MR, jZ, qK, aT, bK, ae, af, jf, iU, iZ, r, en, cl, t, ck, Qi, nM, iM, c, kB, CZ, bt, ao, id, jh, hF, gb, mC, ad, hX, av, je, ff, eZ, adj, bz, dr, all, bE, Kj, y, xg); #c1(CREBBP) c2(XP_011520683) c3(CREB-binding protein isoform X5) c4( ) c5(315608, 315609, 315610, 315611, 315612, 315613, 315614, 315615) cG( ) c7(bM, T, bO, fd, bB, ci, aR, x, aVC, aVA, dV, aVB, kS, aW, apn, cm, bw, aVE, eM, Ip, aep, U, m, n, oY, nA, PJ, aCi, ft, h, dL, ask, he, pi, hi, avP, aVD, ok, hL, at, fL, bD, it, L, aTl, Kh, C, AO, q, eA, Kx, MR, jZ, qK, aT, bK, ae, af, jf, iU, iZ, r, en, cl, t, ck, Qi, nM, iM, c, kB, CZ, bt, ao, id, jh, hF, gb, mC, ad, hX, av, je, ff, eZ, adj, bz, dr, all, bE, Kj, y, xg); #c1(CREBBP) c2(XP_011520684) c3(CREB-binding protein isoform XG) c4( ) c5(315616) c6( ) c7(bM, T, bO, fd, bB, ci, aR, x, aVC, aVA, dV, aVB, kS, aW, apn, cm, bw, aVE, eM, Ip, aep, U, m, n, oY, nA, PJ, aCi, ft, h, dL, ask, he, pi, hi, avP, aVD, ok, hL, at, fL, bD, it, L, aTl, Kh, C, AO, q, eA, Kx, MR, jZ, qK, aT, bK, ae, af, jf, iU, iZ, r, en, cl, t, ck, Qi, nM, iM, c, kB, CZ, bt, ao, id, jh, hF, gb, mC, ad, hX, av, je, ff, eZ, adj, bz, dr, all, bE, Kj, y, xg); #c1(CREBRF) c2(NP_001161865) c3(CREB3 regulatory factor isoform 2) c4(66211, 66212) c5(66213, 66214, 66215, 66216, 66217, 66218, 66219, 66220, 66221, 66222, 66223) c6( ) c7(ck, x, T, kh, aVF, cj, ci, k, y, pd, ae, Pm, ad); #c1(CREBRF) c2(XP_011532743) c3(CREB3 regulatory factor isoform X1) c4(328798, 328799, 328800, 328801) c5(328802, 328803, 328804, 328805, 328806, 328807, 328808, 328809, 328810, 328811, 328812, 328813, 328814, 328815, 328816, 328817, 328818, 328819, 328820, 328821, 328822, 328823, 328824, 328825, 328826, 328827, 328828, 328829, 328830) c6( ) c7(ck, x, T, kh, aVF, cj, ci, k, y, pd, ae, Pm, ad); #c1(CREBZF) c2(NP_001034707) c3(CREB/ATF bZIP transcription factor) c4(32085, 32086) c5(32087, 32088, 32089, 32090, 32091, 32092, 32093, 32094, 32095, 32096, 32097, 32098, 32099, 32100, 32101, 32102, 32103) c6( ) c7(xD, gV, jf, jh, hG); #c1(CREG1) c2(NP_003842) c3(protein CREG1 precursor) c4(141309) c5(141310, 141311, 141312, 141313, 141314, 141315, 141316, 141317, 141318) c6(141319, 141320) c7(eG, dD, mR, ea, ajv, cz, hQ, Hn, j, ci, eq, y, ad, bA); #c1(CRELD1) c2(NP_001026887) c3(cysteine-rich with EGF-like domain protein 1 isoform 1 precursor) c4(29854) c5(29855, 29856, 29857, 29858, 29859, 29860) c6( ) c7(aVJ, gY, aVG, bD, j, aVI, sx, aVH, f); #c1(CRELD1) c2(NP_056328) c3(cysteine-rich with EGF-like domain protein 1 isoform 2 precursor) c4(187100) c5(187101, 187102, 187103, 187104, 187105, 187106, 187107, 187108, 187109, 187110, 187111, 187112, 187113, 187114) c6( ) c7(aVJ, gY, aVG, bD, j, aVI, sx, aVH, f); #c1(CRELD2) c2(NP_001128573) c3(cysteine-rich with EGF-like domain protein 2 isoform a precursor) c4(50295) c5(50296, 50297, 50298, 50299, 50300, 50301, 50302, 50303) c6(50304, 50305) c7(jb, ry, In, K); #c1(CRELD2) c2(NP_001271246) c3(cysteine-rich with EGF-like domain protein 2 isoform c precursor) c4(103731) c5(103732, 103733, 103734, 103735, 103736, 103737, 103738, 103739) c6(103740, 103741) c7(jb, ry, In, K); #c1(CRELD2) c2(NP_001271247) c3(cysteine-rich with EGF-like domain protein 2 isoform d precursor) c4(103742) c5(103743, 103744, 103745, 103746, 103747, 103748, 103749, 103750) c6(103751, 103752) c7(jb, ry, In, K); #c1(CRELD2) c2(NP_077300) c3(cysteine-rich with EGF-like domain protein 2 isoform b precursor) c4(215115) c5(215116, 215117, 215118, 215119, 215120, 215121, 215122, 215123) c6(215124, 215125) c7(jb, ry, In, K); #c1(CREM) c2(NP_001254491) c3(cAMP-responsive element modulator isoform 23) c4( ) c5(94519, 94520, 94521, 94522, 94523, 94524) c6( ) c7(bL, gU, aw, bO, fd, dG, v, ww, aVK, mC, ad, hd, ds, vH, bK, K, an, he, ae, af, yo, A, tb, ND, Y, fJ, eZ, vs, g, hq, nM, nB, NI, fL, it, AN); #c1(CREM) c2(NP_001254493) c3(cAMP-responsive element modulator isoform 25) c4(94525) c5(94526, 94527, 94528, 94529, 94530, 94531) c6( ) c7(bL, gU, aw, bO, fd, dG, v, ww, aVK, mC, ad, hd, ds, vH, bK, K, an, he, ae, af, yo, A, tb, ND, Y, fJ, eZ, vs, g, hq, nM, nB, NI, fL, it, AN); #c1(CREM) c2(NP_001254499) c3(cAMP-responsive element modulator isoform 31) c4( ) c5(94532) c6( ) c7(bL, gU, aw, bO, fd, dG, v, ww, aVK, mC, ad, hd, ds, vH, bK, K, an, he, ae, af, yo, A, tb, NO, Y, f J, eZ, vs, g, hq, nM, nB, NI, fL, it, AN); #c1(CREM) c2(NP_001872) c3(cAMP-responsive element modulator isoform 2) c4(121859) c5(121860, 121861, 121862, 121863, 121864, 121865, 121866, 121867, 121868, 121869, 121870) c6( ) c7(bL, gU, aw, bO, fd, dG, v, ww, aVK, mC, ad, hd, ds, vH, bK, K, an, he, ae, af, yo, A, tb, ND, Y, f J, eZ, vs, g, hq, nM, nB, NI, fL, it, AN); #c1(CREM) c2(NP_874386) c3(cAMP-responsive element modulator isoform 4) c4(256662) c5(256663, 256664, 256665, 256666, 256667, 256668, 256669) c6( ) c7(bL, gU, aw, bO, fd, dG, v, ww, aVK, mC, ad, hd, ds, vH, bK, K, an, he, ae, af, yo, A, tb, ND, Y, fJ, eZ, vs, g, hq, nM, nB, NI, fL, it, AN); #c1(CREM) c2(NP_874387) c3(cAMP-responsive element modulator isoform 5) c4(256670) c5(256671, 256672, 256673, 256674, 256675, 256676, 256677, 256678, 256679, 256680, 256681) c6( ) c7(bL, gU, aw, bO, fd, dG, v, ww, aVK, mC, ad, hd, ds, vH, bK, K, an, he, ae, af, yo, A, tb, ND, Y, fJ, eZ, vs, g, hq, nM, nB, NI, fL, it, AN); #c1(CREM) c2(NP_874388) c3(cAMP-responsive element modulator isoform 6) c4(256682) c5(256683, 256684, 256685, 256686, 256687, 256688) c6( ) c7(bL, gU, aw, bO, fd, dG, v, ww, aVK, mC, ad, hd, ds, vH, bK, K, an, he, ae, af, yo, A, tb, ND, Y, fJ, eZ, vs, g, hq, nM, nB, NI, fL, it, AN); #c1(CREM) c2(NP_874389) c3(cAMP-responsive element modulator isoform 7) c4(256689) c5(256690, 256691, 256692, 256693, 256694, 256695) c6( ) c7(bL, gU, aw, bO, fd, dG, v, ww, aVK, mC, ad, hd, ds, vH, bK, K, an, he, ae, af, yo, A, tb, ND, Y, fJ, eZ, vs, g, hq, nM, nB, NI, fL, it, AN); #c1(CREM) c2(NP_874390) c3(cAMP-responsive element modulator isoform 8) c4(256696) c5(256697, 256698, 256699, 256700, 256701, 256702) c6( ) c7(bL, gU, aw, bO, fd, dG, v, ww, aVK, mC, ad, hd, ds, vH, bK, K, an, he, ae, af, yo, A, tb, ND, Y, fJ, eZ, vs, g, hq, nM, nB, NI, fL, it, AN); #c1(CREM) c2(NP_874392) c3(cAMP-responsive element modulator isoform 10) c4( ) c5(256703, 256704, 256705, 256706, 256707, 256708, 256709, 256710, 256711, 256712, 256713, 256714, 256715, 256716, 256717) c6( ) c7(bL, gU, aw, bO, fd, dG, v, ww, aVK, mC, ad, hd, ds, vH, bK, K, an, he, ae, af, yo, A, tb, ND, Y, fJ, eZ, vs, g, hq, nM, nB, NI, fL, it, AN); #c1(CREM) c2(NP_874393) c3(cAMP-responsive element modulator isoform 11) c4(256718) c5(256719, 256720, 256721, 256722, 256723, 256724) c6( ) c7(bL, gU, aw, bO, fd, dG, v, ww, aVK, mC, ad, hd, ds, vH, bK, K, an, he, ae, af, yo, A, tb, ND, Y, f J, eZ, vs, g, hq, nM, nB, NI, fL, it, AN); #c1(CREM) c2(NP_877570) c3(cAMP-responsive element modulator isoform 13) c4( ) c5(256892, 256893, 256894, 256895, 256896, 256897) c6( ) c7(bL, gU, aw, bO, fd, dG, v, ww, aVK, mC, ad, hd, ds, vH, bK, K, an, he, ae, af, yo, A, tb, ND, Y, fJ, eZ, vs, g, hq, nM, nB, NI, fL, it, AN); #c1(CREM) c2(NP_877572) c3(cAMP-responsive element modulator isoform 15) c4(256898) c5(256899, 256900, 256901, 256902, 256903, 256904) c6( ) c7(bL, gU, aw, bO, fd, dG, v, ww, aVK, mC, ad, hd, ds, vH, bK, K, an, he, ae, af, yo, A, tb, ND, Y, fJ, eZ, vs, g, hq, nM, nB, NI, fL, it, AN); #c1(CREM) c2(NP_877573) c3(cAMP-responsive element modulator isoform 16) c4(256905) c5(256906, 256907, 256908, 256909, 256910, 256911) c6( ) c7(bL, gU, aw, bO, fd, dG, v, ww, aVK, mC, ad, hd, ds, vH, bK, K, an, he, ae, af, yo, A, tb, ND, Y, f J, eZ, vs, g, hq, nM, nB, NI, fL, it, AN); #c1(CREM) c2(NP_898831) c3(cAMP-responsive element modulator isoform 19) c4(257762, 257763) c5(257764, 257765, 257766, 257767, 257768, 257769, 257770, 257771, 257772, 257773, 257774, 257775) c6( ) c7(bL, gU, aw, bO, fd, dG, v, ww, aVK, mC, ad, hd, ds, vH, bK, K, an, he, ae, af, yo, A, tb, ND, Y, fJ, eZ, vs, g, hq, nM, nB, NI, fL, it, AN); #c1(CREM) c2(NP_898883) c3(cAMP-responsive element modulator isoform 22) c4( ) c5(257822, 257823, 257824, 257825, 257826, 257827, 257828, 257829, 257830, 257831, 257832, 257833, 257834, 257835, 257836) c6( ) c7(bL, gU, aw, bO, fd, dG, v, ww, aVK, mC, ad, hd, ds, vH, bK, K, an, he, ae, af, yo, A, tb, ND, Y, fJ, eZ, vs, g, hq, nM, nB, NI, fL, it, AN); #c1(CREM) c2(XP_006717441) c3(cAMP-responsive element modulator isoform X3) c4(291114, 291115, 291116) c5(291117, 291118, 291119, 291120, 291121, 291122) c6( ) c7(bL, gU, aw, bO, fd, dG, v, ww, aVK, mC, ad, hd, ds, vH, bK, K, an, he, ae, af, yo, A, tb, ND, Y, f J, eZ, vs, g, hq, nM, nB, NI, fL, it, AN); #c1(CREM) c2(XP_006717442) c3(cAMP-responsive element modulator isoform X1) c4(291123) c5(291124, 291125, 291126, 291127, 291128, 291129, 291130, 291131, 291132, 291133, 291134, 291135) c6( ) c7(bL, gU, aw, bO, fd, dG, v, ww, aVK, mC, ad, hd, ds, vH, bK, K, an, he, ae, af, yo, A, tb, ND, Y, fJ, eZ, vs, g, hq, nM, nB, NI, fL, it, AN); #c1(CREM) c2(XP_006717445) c3(cAMP-responsive element modulator isoform X18) c4(291136) c5(291137) c6( ) c7(bL, gU, aw, bO, fd, dG, v, ww, aVK, mC, ad, hd, ds, vH, bK, K, an, he, ae, af, yo, A, tb, ND, Y, f J, eZ, vs, g, hq, nM, nB, NI, fL, it, AN); #c1(CREM) c2(XP_006717446) c3(cAMP-responsive element modulator isoform X2) c4(291138) c5(291139, 291140, 291141, 291142, 291143, 291144) c6( ) c7(bL, gU, aw, bO, fd, dG, v, ww, aVK, mC, ad, hd, ds, vH, bK, K, an, he, ae, af, yo, A, tb, ND, Y, fJ, eZ, vs, g, hq, nM, nB, NI, fL, it, AN); #c1(CREM) c2(XP_011517619) c3(cAMP-responsive element modulator isoform X5) c4(311409, 311410) c5(311411, 311412, 311413, 311414, 311415, 311416) c6( ) c7(bL, gU, aw, bO, fd, dG, v, ww, aVK, mC, ad, hd, ds, vH, bK, K, an, he, ae, af, yo, A, tb, ND, Y, f J, eZ, vs, g, hq, nM, nB, NI, fL, it, AN); #c1(CREM) c2(XP_011517620) c3(cAMP-responsive element modulator isoform X6) c4(311417) c5( ) c6( ) c7(bL, gU, aw, bO, fd, dG, v, ww, aVK, mC, ad, hd, ds, vH, bK, K, an, he, ae, af, yo, A, tb, ND, Y, fJ, eZ, vs, g, hq, nM, nB, NI, fL, it, AN); #c1(CREM) c2(XP_011517621) c3(cAMP-responsive element modulator isoform X7) c4(311418, 311419) c5(311420, 311421, 311422, 311423, 311424, 311425) c6( ) c7(bL, gU, aw, bO, fd, dG, v, ww, aVK, mC, ad, hd, ds, vH, bK, K, an, he, ae, af, yo, A, tb, ND, Y, f J, eZ, vs, g, hq, nM, nB, NI, fL, it, AN); #c1(CREM) c2(XP_011517622) c3(cAMP-responsive element modulator isoform X8) c4(311426, 311427, 311428) c5(311429, 311430, 311431, 311432, 311433, 311434, 311435, 311436, 311437, 311438, 311439, 311440) c6( ) c7(bL, gU, aw, bO, fd, dG, v, ww, aVK, mC, ad, hd, ds, vH, bK, K, an, he, ae, af, yo, A, tb, ND, Y, f J, eZ, vs, g, hq, nM, nB, NI, fL, it, AN); #c1(CREM) c2(XP_011517624) c3(cAMP-responsive element modulator isoform X9) c4(311441, 311442) c5(311443, 311444, 311445, 311446, 311447, 311448) c6( ) c7(bL, gU, aw, bO, fd, dG, v, ww, aVK, mC, ad, hd, ds, vH, bK, K, an, he, ae, af, yo, A, tb, ND, Y, f J, eZ, vs, g, hq, nM, nB, NI, fL, it, AN); #c1(CREM) c2(XP_011517627) c3(cAMP-responsive element modulator isoform X11) c4(311449) c5(311450, 311451, 311452, 311453, 311454, 311455) c6( ) c7(bL, gU, aw, bO, fd, dG, v, ww, aVK, mC, ad, hd, ds, vH, bK, K, an, he, ae, af, yo, A, tb, ND, Y, f J, eZ, vs, g, hq, nM, nB, NI, fL, it, AN); #c1(CREM) c2(XP_011517630) c3(cAMP-responsive element modulator isoform X14) c4(311456) c5(311457, 311458, 311459, 311460, 311461, 311462) c6( ) c7(bL, gU, aw, bO, fd, dG, v, ww, aVK, mC, ad, hd, ds, vH, bK, K, an, he, ae, af, yo, A, tb, ND, Y, f J, eZ, vs, g, hq, nM, nB, NI, fL, it, AN); #c1(CREM) c2(XP_011517631) c3(cAMP-responsive element modulator isoform X15) c4(311463, 311464) c5(311465, 311466, 311467, 311468, 311469, 311470, 311471, 311472, 311473, 311474, 311475, 311476) c6( ) c7(bL, gU, aw, bO, fd, dG, v, ww, aVK, mC, ad, hd, ds, vH, bK, K, an, he, ae, af, yo, A, tb, ND, Y, f J, eZ, vs, g, hq, nM, nB, NI, fL, it, AN); #c1(CRH) c2(NP_000747) c3(corticoliberin preproprotein) c4(15146) c5(15147, 15148, 15149, 15150, 15151, 15152, 15153, 15154) c6(15155, 15156) c7(bM, T, fR, vf, if, bO, eb, cL, gf, ci, aY, rw, iX, pX, aU, abj, K, aVL, yo, aW, aVQ, Fe, az, aVO, eE, cm, uC, mZ, uo, uJ, aVN, m, xh, sQ, My, n, To, akA, aj, ct, mI, qN, ww, ai, ke, ft, Nn, aMD, adX, h, eV, mV, mY, he, cC, mU, ape, aq, Hu, mX, hq, amt, ok, bP, cA, adZ, bo, Ei, vL, hR, ut, Pr, B, mT, aNW, cB, aNX, jv, eR, eX, aee, cR, mS, Nt, v, j, C, iI, J, gM, aVM, aql, aT, bK, bq, hK, ae, af, eu, tN, ls, s, Y, fO, cu, en, cI, t, xw, aff, rR, ac, aeM, gx, wi, akd, aVP, aD, Gd, bS, aVy, ad, wD, dP, fU, oz, mW, IQ, cx, nJ, vO, hZ, aqa, Di, Gv, ff, cr, aFr, iV, Z, iR, atM, xZ, pK, y, ra); #c1(CRHBP) c2(NP_001873) c3(corticotropin-releasing factor-binding protein precursor) c4(121871) c5(121872, 121873, 121874, 121875, 121876, 121877) c6( ) c7(jv, fR, sQ, bO, cz, Gd, bS, gf, ct, v, iI, ke, aVM, bK, K, IQ, an, he, aFr, cu, Z, uC, hq, es, ac, cA, iA, vL, uo, ut); #c1(CRHR1) c2(NP_001138618) c3(corticotropin-releasing factor receptor 1 isoform 1 precursor) c4(57202) c5(57203, 57204, 57205, 57206, 57207, 57208, 57209, 57210, 57211, 57212) c6( ) c7(bM, T, fR, bO, gf, aVS, ip, x, azY, Gb, K, yo, amy, aW, mQ, Fa, Au, Ku, g, Jl, uC, Gs, U, uo, k, m, act, sQ, aVR, n, To, ww, ct, pM, cU, he, abf, sp, hq, jq, ok, aqp, cA, bP, yP, Ei, vL, at, ut, bL, jv, eR, oe, cz, v, wy, V, mj, hb, aVM, aql, aT, bK, ae, bA, tN, s, fO, cu, t, FT, pH, vZ, sY, Gd, bS, OH, ad, dP, iC, LA, ji, IQ, tb, eZ, aFr, gI, iV, Z, pK, y, ra); #c1(CRHR1) c2(NP_001138619) c3(corticotropin-releasing factor receptor 1 isoform 3 precursor) c4(57213, 57214) c5(57215, 57216, 57217, 57218, 57219, 57220, 57221, 57222, 57223, 57224) c6( ) c7(bM, T, fR, bO, gf, aVS, ip, x, azY, Gb, K, yo, amy, aW, mQ, Fa, Au, Ku, g, JI, uC, Gs, U, uo, k, m, act, sQ, aVR, n, To, ww, ct, pM, cU, he, abf, sp, hq, jq, ok, aqp, cA, bP, yP, Ei, vL, at, ut, bL, jv, eR, oe, cz, v, wy, V, mj, hb, aVM, aql, aT, bK, ae, bA, tN, s, fO, cu, t, FT, pH, vZ, sY, Gd, bS, OH, ad, dP, iC, LA, ji, IQ, tb, eZ, aFr, gI, iV, Z, pK, y, ra); #c1(CRHR1) c2(NP_001138620) c3(corticotropin-releasing factor receptor 1 isoform 4 precursor) c4(57225, 57226) c5(57227, 57228, 57229, 57230, 57231, 57232, 57233, 57234, 57235, 57236, 57237, 57238, 57239, 57240, 57241, 57242, 57243, 57244, 57245, 57246) c6( ) c7(bM, T, fR, bO, gf, aVS, ip, x, azY, Gb, K, yo, amy, aW, mQ, Fa, Au, Ku, g, JI, uC, Gs, U, uo, k, m, act, sQ, aVR, n, To, ww, ct, pM, cU, he, abf, sp, hq, jq, ok, aqp, cA, bP, yP, Ei, vL, at, ut, bL, jv, eR, oe, cz, v, wy, V, mj, hb, aVM, aql, aT, bK, ae, bA, tN, s, fO, cu, t, FT, pH, vZ, sY, Gd, bS, OH, ad, dP, iC, LA, ji, IQ, tb, eZ, aFr, gI, iV, Z, pK, y, ra); #c1(CRHR1) c2(NP_001289949) c3(corticotropin-releasing factor receptor 1 isoform 1i-B) c4(114869) c5( ) c6( ) c7(bM, T, fR, bO, gf, aVS, ip, x, azY, Gb, K, yo, amy, aW, mQ, Fa, Au, Ku, g, JI, uC, Gs, U, uo, k, m, act, sQ, aVR, n, To, ww, ct, pM, cU, he, abf, sp, hq, jq, ok, aqp, cA, bP, yP, Ei, vL, at, ut, bL, jv, eR, oe, cz, v, wy, V, mj, hb, aVM, aql, aT, bK, ae, bA, tN, s, fO, cu, t, FT, pH, vZ, sY, Gd, bS, OH, ad, dP, iC, LA, ji, IQ, tb, eZ, aFr, gI, iV, Z, pK, y, ra); #c1(CRHR1) c2(NP_004373) c3(corticotropin-releasing factor receptor 1 isoform 2 precursor) c4(145877) c5(145878, 145879, 145880, 145881, 145882, 145883, 145884, 145885, 145886, 145887, 145888, 145889, 145890, 145891) c6( ) c7(bM, T, fR, bO, gf, aVS, ip, x, azY, Gb, K, yo, amy, aW, mQ, Fa, Au, Ku, g, JI, uC, Gs, U, uo, k, m, act, sQ, aVR, n, To, ww, ct, pM, cU, he, abf, sp, hq, jq, ok, aqp, cA, bP, yP, Ei, vL, at, ut, bL, jv, eR, oe, cz, v, wy, V, mj, hb, aVM, aql, aT, bK, ae, bA, tN, s, fO, cu, t, FT, pH, vZ, sY, Gd, bS, OH, ad, dP, iC, LA, ji, IQ, tb, eZ, aFr, gI, iV, Z, pK, y, ra); #c1(CRHR2) c2(NP_001189404) c3(corticotropin-releasing factor receptor 2 isoform 2 precursor) c4(79366) c5(79367, 79368, 79369, 79370, 79371, 79372) c6( ) c7(bM, sY, T, fR, sQ, jx, bO, aA, cz, n, To, bS, v, ct, aVS, pM, fr, ww, wy, q, ad, dP, azY, py, aql, aT, cU, cy, bK, K, IQ, bl, ji, aa, abf, tb, s, aW, cr, r, aFr, tv, cu, aq, tu, aF, Z, uC, hq, es, ok, bP, cA, Ei, uo, ut, y, ra, B, amL); #c1(CRHR2) c2(NP_001189410) c3(corticotropin-releasing factor receptor 2 isoform 3) c4(79380) c5(79381, 79382, 79383, 79384, 79385, 79386) c6( ) c7(bM, sY, T, fR, sQ, jx, bO, aA, cz, n, To, bS, v, ct, aVS, pM, fr, ww, wy, q, ad, dP, azY, py, aql, aT, cU, cy, bK, K, IQ, bI, ji, aa, abf, tb, s, aW, cr, r, aFr, tv, cu, aq, tu, aF, Z, uC, hq, es, ok, bP, cA, Ei, uo, ut, y, ra, B, amL); #c1(CRHR2) c2(NP_001874) c3(corticotropin-releasing factor receptor 2 isoform 1) c4(121878) c5(121879, 121880, 121881, 121882, 121883, 121884) c6( ) c7(bM, sY, T, fR, sQ, jx, bO, aA, cz, n, To, bS, v, ct, aVS, pM, fr, ww, wy, q, ad, dP, azY, py, aql, aT, cU, cy, bK, K, IQ, bI, ji, aa, abf, tb, s, aW, cr, r, aFr, tv, cu, aq, tu, aF, Z, uC, hq, es, ok, bP, cA, Ei, uo, ut, y, ra, B, amL); #c1(CRHR2) c2(XP_011513430) c3(corticotropin-releasing factor receptor 2 isoform X3) c4(305689) c5(305690, 305691, 305692, 305693, 305694, 305695) c6( ) c7(bM, sY, T, fR, sQ, jx, bO, aA, cz, n, To, bS, v, ct, aVS, pM, fr, ww, wy, q, ad, dP, azY, py, aql, aT, cU, cy, bK, K, IQ, bI, ji, aa, abf, tb, s, aW, cr, r, aFr, tv, cu, aq, tu, aF, Z, uC, hq, es, ok, bP, cA, Ei, uo, ut, y, ra, B, amL); #c1(CRIM1) c2(NP_057525) c3(cysteine-rich motor neuron 1 protein precursor) c4(191246) c5(191247, 191248, 191249, 191250, 191251, 191252) c6( ) c7(eW, bK); #c1(CRIP2) c2(NP_001257766) c3(cysteine-rich protein 2 isoform 2) c4(95625) c5(95626, 95627, 95628, 95629, 95630, 95631) c6( ) c7(aW, it, aT, afu); #c1(CRIP2) c2(NP_001257770) c3(cysteine-rich protein 2 isoform 3) c4(95632) c5(95633, 95634, 95635, 95636, 95637, 95638) c6( ) c7(aW, it, aT, afu); #c1(CRIP3) c2(NP_996805) c3(cysteine-rich protein 3) c4(264590, 264591) c5(264592, 264593, 264594, 264595, 264596, 264597, 264598, 264599, 264600, 264601, 264602, 264603, 264604) c6( ) c7(cc, ac); #c1(CRIP3) c2(XP_005249160) c3(cysteine-rich protein 3 isoform X1) c4(269049) c5(269050, 269051, 269052, 269053, 269054, 269055) c6( ) c7(cc, ac); #c1(CRIP3) c2(XP_011512911) c3(cysteine-rich protein 3 isoform X4) c4(304278) c5(304279, 304280, 304281, 304282, 304283) c6( ) c7(cc, ac); #c1(CRIP3) c2(XP_011512912) c3(cysteine-rich protein 3 isoform X5) c4(304284) c5( ) c6( ) c7(cc, ac); #c1(CRIPAK) c2(NP_787114) c3(cysteine-rich PAK1 inhibitor) c4(252110, 252111) c5(252112, 252113, 252114, 252115, 252116, 252117, 252118, 252119, 252120, 252121, 252122, 252123, 252124, 252125, 252126) c6( ) c7(aW, aT); #c1(CRIPT) c2(NP_054890) c3(cysteine-rich PDZ-binding protein) c4(178220) c5(178221, 178222, 178223, 178224, 178225, 178226) c6( ) c7(avx, ayR); #c1(CRISP1) c2(NP_001122) c3(cysteine-rich secretory protein 1 isoform 1 precursor) c4(46810) c5( ) c6( ) c7(bM, K); #c1(CRISP1) c2(NP_733758) c3(cysteine-rich secretory protein 1 isoform 2 precursor) c4(246955) c5(246956, 246957, 246958, 246959, 246960, 246961, 246962, 246963, 246964, 246965, 246966, 246967, 246968) c6( ) c7(bM, K); #c1(CRISP2) c2(NP_001135879) c3(cysteine-rich secretory protein 2 precursor) c4(53483) c5(53484, 53485, 53486, 53487, 53488, 53489) c6( ) c7(T, gU, Tb, DD, aZ, if, e, aA, bB, fd, v, lR, ci, qN, fr, cd, ad, ai, eA, DJ, Dq, aT, cy, ae, cp, jf, asp, s, nO, aW, Y, oV, ff, aF, en, cI, dw, aaO, cm, bz, pb, DT, eM, iA, bE, hL, agf, mf, m, y, iu); #c1(CRISP2) c2(XP_005249410) c3(cysteine-rich secretory protein 2 isoform X2) c4(269297) c5(269298, 269299, 269300, 269301, 269302, 269303) c6( ) c7(T, gU, Tb, DD, aZ, if, e, aA, bB, fd, v, lR, ci, qN, fr, cd, ad, ai, eA, DJ, Dq, aT, cy, ae, cp, jf, asp, s, nO, aW, Y, oV, ff, aF, en, cI, dw, aaO, cm, bz, pb, DT, eM, iA, bE, hL, agf, mf, m, y, iu); #c1(CRISP3) c2(NP_001177915) c3(cysteine-rich secretory protein 3 isoform 2 precursor) c4(73139, 73140) c5(73141, 73142, 73143, 73144, 73145, 73146, 73147, 73148, 73149, 73150, 73151, 73152, 73153, 73154, 73155, 73156, 73157) c6(73158, 73159, 73160, 73161) c7(gx, T, fN, aA, n, Fb, aF, ci, g, ae, Vs, ad); #c1(CRISP3) c2(NP_006052) c3(cysteine-rich secretory protein 3 isoform 1 precursor) c4(161473, 161474, 161475) c5(161476, 161477, 161478, 161479, 161480, 161481, 161482, 161483, 161484, 161485, 161486, 161487, 161488, 161489, 161490, 161491, 161492, 161493, 161494, 161495, 161496, 161497, 161498) c6(161499, 161500, 161501, 161502, 161503, 161504) c7(gx, T, fN, aA, n, Fb, aF, ci, g, ae, Vs, ad); #c1(CRISPLD1) c2(NP_001273707) c3(cysteine-rich secretory protein LCCL domain-containing 1 isoform 3) c4( ) c5(105686, 105687, 105688, 105689, 105690, 105691, 105692) c6(105693, 105694) c7(aaw, fq); #c1(CRISPLD1) c2(NP_113649) c3(cysteine-rich secretory protein LCCL domain-containing 1 isoform 1 precursor) c4(221925, 221926, 221927) c5(221928, 221929, 221930, 221931, 221932, 221933, 221934, 221935, 221936, 221937, 221938, 221939, 221940, 221941, 221942, 221943, 221944) c6(221945, 221946, 221947, 221948) c7(aaw, fq); #c1(CRISPLD2) c2(NP_113664) c3(cysteine-rich secretory protein LCCL domain-containing 2 precursor) c4(222010) c5(222011, 222012, 222013, 222014, 222015, 222016) c6( ) c7(Na, apM, hI, Nc, C, iq, aa); #c1(CRK) c2(NP_005197) c3(adapter molecule crk isoform b) c4(153819) c5(153820, 153821, 153822, 153823, 153824, 153825) c6( ) c7(T, aC, ea, if, fd, bB, gf, IR, Lw, bv, xE, aE, rw, dV, K, aW, FD, zC, g, as, eF, cm, bw, eM, cj, NO, Hb, m, NN, NK, dD, NJ, aj, BF, ct, qN, fr, cd, ai, Hx, b, jz, cU, h, fe, aq, NL, w, hR, B, bL, Dw, NQ, fM, yk, lH, jx, aA, cR, cz, v, j, C, V, q, eA, eJ, yw, aT, kf, cy, ae, af, hM, wr, iU, Y, r, lo, en, t, iK, pb, bN, ck, im, bt, ao, kh, jh, dG, eq, iJ, ad, dP, av, CJ, F, ds, ji, IQ, NM, NP, d, ff, eH, cr, aF, bz, bE, i, y, iu); #c1(CRK) c2(NP_058431) c3(adapter molecule crk isoform a) c4(192695) c5(192696, 192697, 192698, 192699, 192700, 192701) c6( ) c7(T, aC, ea, if, fd, bB, gf, IR, Lw, bv, xE, aE, rw, dV, K, aW, FD, zC, g, as, eF, cm, bw, eM, cj, NO, Hb, m, NN, NK, dD, NJ, aj, BF, ct, qN, fr, cd, ai, Hx, b, jz, cU, h, fe, aq, NL, w, hR, B, bL, Dw, NQ, fM, yk, lH, jx, aA, cR, cz, v, j, C, V, q, eA, eJ, yw, aT, kf, cy, ae, af, hM, wr, iU, Y, r, lo, en, t, iK, pb, bN, ck, im, bt, ao, kh, jh, dG, eq, iJ, ad, dP, av, CJ, F, ds, ji, IQ, NM, NP, d, ff, eH, cr, aF, bz, bE, i, y, iu); #c1(CRKL) c2(NP_005198) c3(crk-like protein) c4(153826) c5(153827, 153828, 153829, 153830, 153831, 153832, 153833, 153834, 153835, 153836) c6( ) c7(T, RX, aA, ci, pd, ad, x, bv, ft, agd, aT, ae, iU, aW, aF, bz, bN, ck, eM, k, bD, y); #c1(CRLF1) c2(NP_004741) c3(cytokine receptor-like factor 1 precursor) c4(149192) c5( ) c6( ) c7(LB, fG, aPh, aQH, amj, Nc, hE, aVT); #c1(CRLF1) c2(XP_011526725) c3(cytokine receptor-like factor 1 isoform X2) c4( ) c5(321039, 321040, 321041, 321042, 321043, 321044) c6( ) c7(LB, fG, aPh, aQH, amj, Nc, hE, aVT); #c1(CRLF2) c2(NP_071431) c3(cytokine receptor-like factor 2 isoform 1 precursor) c4(211622, 211623, 211624) c5(211625, 211626, 211627, 211628, 211629, 211630, 211631, 211632, 211633, 211634, 211635, 211636) c6( ) c7(ck, bM, ou, x, fX, eE, cj, zV, k, ox, aVU, ajo, f, IM, iL, Us); #c1(CRLF2) c2(XP_011543937) c3(cytokine receptor-like factor 2 isoform X2) c4( ) c5(343158, 343159, 343160, 343161, 343162, 343163) c6( ) c7(ck, hM, ou, x, fX, eE, cj, zV, k, ox, aVU, ajo, f, IM, iL, Us); #c1(CRLF3) c2(NP_057070) c3(cytokine receptor-like factor 3) c4(188768, 188769) c5(188770, 188771, 188772, 188773, 188774, 188775) c6( ) c7(aVV, T, d, id, kS, ds, oX, Az, CT, aq, ey, eA, jj, zy, t, xb, B, xt); #c1(CRLF3) c2(XP_011523181) c3(cytokine receptor-like factor 3 isoform X2) c4( ) c5(317711, 317712, 317713, 317714, 317715, 317716) c6( ) c7(aVV, T, d, id, kS, ds, oX, Az, CT, aq, ey, eA, jj, zy, t, xb, B, xt); #c1(CRLS1) c2(NP_001120930) c3(cardiolipin synthase isoform 2) c4(44945) c5(44946, 44947, 44948, 44949, 44950, 44951) c6( ) c7(v, aVW, K, fD, fh, an, alK); #c1(CRLS1) c2(NP_061968) c3(cardiolipin synthase isoform 1) c4(201348, 201349) c5(201350, 201351, 201352, 201353, 201354, 201355) c6( ) c7(v, aVW, K, fD, fh, an, alK); #c1(CRLS1) c2(XP_011527565) c3(cardiolipin synthase isoform X3) c4( ) c5(322410, 322411, 322412, 322413, 322414, 322415) c6( ) c7(v, aVW, K, fD, fh, an, alK); #c1(CRMP1) c2(NP_001014809) c3(dihydropyrimidinase-related protein 1 isoform 1) c4(26000) c5(26001, 26002, 26003, 26004, 26005, 26006) c6( ) c7(ID, T, aOH, dG, pd, Na, Ae, cy, Nc, K, an, ly, g, cm, bz, lx, ck, wg, c, eM, aND, U, iu); #c1(CRMP1) c2(NP_001275590) c3(dihydropyrimidinase-related protein 1 isoform 3) c4(106856) c5(106857, 106858, 106859, 106860, 106861, 106862) c6( ) c7(ID, T, aOH, dG, pd, Na, Ae, cy, Nc, K, an, ly, g, cm, bz, lx, ck, wg, c, eM, aND, U, iu); #c1(CRNKL1) c2(NP_001265554) c3(crooked neck-like protein 1 isoform b) c4(98828) c5(98829, 98830, 98831, 98832, 98833, 98834) c6( ) c7(fG, h, Nc, iV, hE, cd); #c1(CRNKL1) c2(NP_057736) c3(crooked neck-like protein 1 isoform a) c4(192586) c5(192587, 192588, 192589, 192590, 192591, 192592) c6( ) c7(fG, h, Nc, iV, hE, cd); #c1(CRNN) c2(NP_057274) c3(cornulin) c4(189794, 189795) c5(189796, 189797, 189798, 189799, 189800, 189801, 189802, 189803, 189804, 189805, 189806, 189807) c6( ) c7(PN, cE, ht, ff, K, en, hu, Xk, it, MG); #c1(CROCC) c2(XP_011540774) c3(rootletin isoform X6) c4( ) c5(339353) c6( ) c7(B); #c1(CROT) c2(NP_001137407) c3(peroxisomal carnitine O-octanoyltransferase isoform 1) c4(55635) c5(55636, 55637, 55638, 55639, 55640, 55641) c6( ) c7(Y); #c1(CROT) c2(NP_001230674) c3(peroxisomal carnitine O-octanoyltransferase isoform 3) c4(86546) c5(86547, 86548, 86549, 86550, 86551, 86552) c6( ) c7(Y); #c1(CROT) c2(NP_066974) c3(peroxisomal carnitine O-octanoyltransferase isoform 2) c4(207929) c5(207930, 207931, 207932, 207933, 207934, 207935) c6( ) c7(Y); #c1(CRP) c2(XP_011507509) c3(C-reactive protein isoform X1) c4(297404, 297405, 297406, 297407) c5(297408, 297409, 297410, 297411, 297412, 297413, 297414, 297415, 297416, 297417, 297418, 297419, 297420, 297421, 297422, 297423, 297424, 297425, 297426, 297427, 297428, 297429, 297430, 297431, 297432, 297433, 297434, 297435, 297436, 297437, 297438, 297439) c6( ) c7(oO, bM, T, fR, pf, ea, aUT, e, al, bO, aza, bB, eb, fd, gf, aY, fw, aMB, AW, dY, Bc, rw, M, dV, aWa, Bi, K, GO, hu, dQ, qM, aWf, eN, avn, DY, VF, aa, hm, aAu, aW, aEH, az, Rr, hl, ih, fc, vs, zC, NR, pL, eF, axp, akw, uC, Uk, bm, aWd, eY, y, It, rq, eM, wE, WS, mx, U, tV, uo, Zn, vn, vy, mk, m, wx, eg, QF, P, nD, dD, sQ, sw, tp, aw, ht, NT, ez, n, aj, fr, ct, JW, cd, ai, aJr, aDF, rc, eW, jz, Zu, Yc, ec, afn, gq, rC, cU, axE, jy, dL, h, eV, ux, uV, Um, aGL, wC, A, mR, sp, Xg, fQ, aq, fe, pm, cM, adz, hq, ar, kT, W, dC, fa, If, mg, hL, RJ, E, ut, uz, aVY, fL, hR, at, Pr, B, cB, it, L, bL, jv, aAf, pF, eR, mr, atB, wL, uv, eX, cz, sM, cR, v, j, C, si, lu, nS, q, J, ady, PW, cF, aWb, yw, aWc, rS, aT, agD, cy, dz, bK, bq, ae, af, eu, uA, tn, kl, bf, s, fO, IC, bg, r, Io, rs, en, cl, wA, t, iK, pb, IY, rR, wg, tW, ac, iM, aWe, hc, dh, fP, hO, wR, mf, dy, oX, fO, Kd, gV, Ve, am, Ke, aag, aZ, em, vr, aET, bS, dG, eq, wV, atK, mC, ad, dZ, hX, wD, fU, av, LL, od, Db, sN, sO, oz, aC J, ds, NS, oW, Os, qV, vJ, JK, IQ, uD, vl, na, sj, qE, aAy, aVZ, je, hG, cH, vj, ff, eH, gC, Ce, cr, kD, dq, eZ, uF, iV, pT, YZ, Z, bz, aVX, qa, eK, amS, pc, nb, atM, bE, ag, X, eB, gZ, MJ, aS, ei, Lz, GF, hE, xg, st, hv); #c1(CRTAC1) c2(NP_001193457) c3(cartilage acidic protein 1 isoform 8 precursor) c4(82194, 82195, 82196) c5(82197, 82198, 82199, 82200, 82201, 82202, 82203, 82204, 82205, 82206, 82207, 82208, 82209, 82210, 82211, 82212) c6(82213, 82214, 82215, 82216) c7(bL, bM, tk, aHY); #c1(CRTAC1) c2(NP_060528) c3(cartilage acidic protein 1 isoform A precursor) c4(196402, 196403) c5(196404, 196405, 196406, 196407, 196408, 196409, 196410, 196411) c6(196412, 196413) c7(bL, bM, tk, aHY); #c1(CRTAC1) c2(XP_005269995) c3(cartilage acidic protein 1 isoform X2) c4( ) c5(283010, 283011, 283012, 283013, 283014, 283015, 283016, 283017, 283018, 283019, 283020, 283021, 283022, 283023, 283024, 283025) c6(283026, 283027, 283028, 283029) c7(bL, bM, tk, aHY); #c1(CRTAM) c2(NP_001291711) c3(cytotoxic and regulatory T-cell molecule Isoform 2 precursor) c4(116369) c5(116370, 116371, 116372, 116373, 116374, 116375) c6( ) c7(hS); #c1(CRTAM) c2(NP_062550) c3(cytotoxic and regulatory T-cell molecule Isoform 1 precursor) c4(201943) c5(201944, 201945, 201946, 201947, 201948, 201949) c6( ) c7(hS); #c1(CRTAP) c2(NP_006362) c3(cartilage-associated protein precursor) c4(164351, 164352, 164353, 164354) c5(164355, 164356, 164357, 164358, 164359, 164360, 164361, 164362, 164363, 164364, 164365, 164366, 164367, 164368, 164369, 164370, 164371, 164372, 164373, 164374, 164375, 164376, 164377, 164378) c6( ) c7(bA, T, zw, eM, iK, PV, uo, ci, zp, aWh, ade, fb, V, bz, aWg); #c1(CRTC1) c2(NP_001091952) c3(CREB-regulated transcription coactivator 1 isoform 3) c4(38996) c5(38997, 38998, 38999, 39000, 39001, 39002) c6( ) c7(T, hl, wi, aWj, pf, iB, fd, v, ad, afb, di, Ig, aWi, aeX, M, aT, cy, Tj, ahG, aW, Y, bz, es, iA, FB, dJ); #c1(CRTC1) c2(NP_056136) c3(CREB-regulated transcription coactivator 1 isoform 1) c4(185888) c5(185889, 185890, 185891, 185892, 185893, 185894) c6( ) c7(T, hl, wi, aWj, pf, iB, fd, v, ad, afb, di, Ig, aWi, aeX, M, aT, cy, Tj, ahG, aW, Y, bz, es, iA, FB, dJ); #c1(CRTC1) c2(XP_005259891) c3(CREB-regulated transcription coactivator 1 isoform X3) c4(276313) c5(276314, 276315, 276316, 276317, 276318, 276319) c6( ) c7(T, hl, wi, aWj, pf, iB, fd, v, ad, afb, di, Ig, aWi, aeX, M, aT, cy, Tj, ahG, aW, Y, bz, es, iA, FB, dJ); #c1(CRTC2) c2(NP_859066) c3(CREB-regulated transcription coactivator 2) c4(255474) c5(255475, 255476, 255477, 255478, 255479, 255480) c6( ) c7(bL, T, d, aW, ff, aT, fd, aj, mf, dG, K, v, bq, en, g, bz, J, ad); #c1(CRTC3) c2(NP_001036039) c3(CREB-regulated transcription coactivator 3 isoform b) c4(33794, 33795) c5(33796, 33797, 33798, 33799, 33800, 33801, 33802, 33803, 33804, 33805, 33806, 33807) c6( ) c7(v, iB, aaw); #c1(CRTC3) c2(NP_073606) c3(CREB-regulated transcription coactivator 3 isoform a) c4(213051) c5(213052, 213053, 213054, 213055, 213056, 213057) c6( ) c7(v, iB, aaw); #c1(CRX) c2(NP_000545) c3(cone-rod homeobox protein) c4(12596) c5(12597, 12598, 12599, 12600, 12601, 12602, 12603, 12604, 12605, 12606, 12607, 12608, 12609, 12610, 12611, 12612, 12613, 12614, 12615, 12616, 12617, 12618, 12619, 12620, 12621, 12622) c6( ) c7(aWk, T, nx, ahX, nA, Nh, Sr, MU, IR, aNM, rU, fe, Ud, nC, ayj, aWI, W, bP, nw, eQ, OL, de); #c1(CRY1) c2(NP_004066) c3(cryptochrome-1) c4(143262) c5(143263, 143264, 143265, 143266, 143267, 143268, 143269, 143270) c6(143271, 143272) c7(T, bO, cz, aj, bS, ct, q, J, ad, aT, bK, ae, jJ, hZ, sj, aWm, iU, aW, Y, r, cl, Z, hq, aPY, cj); #c1(CRY1) c2(XP_011536241) c3(cryptochrome-1 isoform X1) c4(333580) c5(333581, 333582, 333583, 333584, 333585, 333586) c6( ) c7(T, bO, cz, aj, bS, ct, q, J, ad, aT, bK, ae, jJ, hZ, sj, aWm, iU, aW, Y, r, cl, Z, hq, aPY, Cj); #c1(CRY2) c2(NP_001120929) c3(cryptochrome-2 isoform 2) c4(44938) c5(44939, 44940, 44941, 44942, 44943, 44944) c6( ) c7(bL, aMK, T, iW, jx, jh, cz, bS, v, ct, ci, ad, aT, ta, bK, ae, iU, aW, g, sz, Z, hq, aPY, amt, qJ, nM, cA, ei); #c1(CRY2) c2(NP_066940) c3(cryptochrome-2 isoform 1) c4(207616) c5(207617, 207618, 207619, 207620, 207621, 207622) c6( ) c7(bL, aMK, T, iW, jx, jh, cz, bS, v, ct, ci, ad, aT, ta, bK, ae, iU, aW, g, sz, Z, hq, aPY, amt, qJ, nM, cA, ei); #c1(CRYAB) c2(NP_001276737) c3(alpha-crystallin B chain) c4(108290, 108291, 108292, 108293, 108294) c5(108295, 108296, 108297, 108298, 108299, 108300, 108301, 108302, 108303, 108304, 108305, 108306, 108307, 108308, 108309, 108310, 108311, 108312, 108313, 108314, 108315, 108316, 108317, 108318, 108319, 108320, 108321, 108322, 108323, 108324, 108325, 108326, 108327, 108328, 108329, 108330, 108331, 108332, 108333, 108334, 108335, 108336, 108337, 108338, 108339, 108340, 108341, 108342, 108343, 108344, 108345, 108346, 108347, 108348, 108349) c6( ) c7(T, dt, aWt, sw, fG, ht, qy, GC, n, arl, j, ci, asF, PJ, mF, fr, V, aWr, eA, ad, ku, b, cc, Ws, aWq, akJ, oj, aT, vc, aWs, K, db, af, JU, d, aW, ff, Ej, aWo, en, aWp, t, iK, LB, kP, jV, W, bP, X, mx, aWn, U, nw, eo, m, i, rA, B); #c1(CRYBA1) c2(NP_005199) c3(beta-crystallin A3) c4(153837) c5(153838, 153839, 153840, 153841, 153842, 153843) c6( ) c7(jj, Ew, aWu, wF); #c1(CRYBA2) c2(NP_476434) c3(beta-crystallin A2) c4(230576, 230577) c5(230578, 230579, 230580, 230581, 230582, 230583, 230584, 230585, 230586, 230587, 230588, 230589, 230590, 230591, 230592, 230593) c6( ) c7(Km); #c1(CRYBA4) c2(NP_001877) c3(beta-crystallin A4) c4( ) c5(121927, 121928, 121929, 121930, 121931) c6( ) c7(arm, aWw, kj, aWv); #c1(CRYBA4) c2(XP_011528200) c3(beta-crystallin A4 isoform X1) c4(323290) c5(323291) c6( ) c7(arm, aWw, kj, aWv); #c1(CRYBB1) c2(NP_001878) c3(beta-crystallin B1) c4(121932) c5(121933, 121934, 121935, 121936, 121937, 121938) c6( ) c7(aWx, arm, aWy); #c1(CRYBB2) c2(NP_000487) c3(beta-crystallin 82) c4(9829) c5(9830, 9831, 9832, 9833, 9834, 9835) c6( ) c7(kj, aWA, arm, Or, Zh, aWz, qW); #c1(CRYBB3) c2(NP_004067) c3(beta-crystallin 83) c4( ) c5(143273, 143274, 143275, 143276, 143277) c6( ) c7(aWB); #c1(CRYBB3) c2(XP_011528204) c3(beta-crystallin 83 isoform X1) c4(323292) c5(323293) c6( ) c7(aWB); #c1(CRYGB) c2(NP_005201) c3(gamma-crystallin B) c4(153844) c5(153845, 153846, 153847, 153848, 153849, 153850) c6( ) c7(aWC); #c1(CRYGC) c2(NP_066269) c3(gamma-crystallin C) c4(206867) c5(206868, 206869, 206870, 206871, 206872, 206873) c6( ) c7(bM, zT, apn, eZ, cm, h, nw, g, aWz, V); #c1(CRYGD) c2(NP_008822) c3(gamma-crystallin D) c4(168825) c5(168826, 168827, 168828, 168829, 168830, 168831) c6( ) c7(aWD, T, dD, ea, e, aWG, KD, cL, eq, apt, uE, q, Uy, o, ad, aoH, ai, yM, wD, rw, yu, ae, A, aWE, bg, r, pL, bz, ha, y, ac, zr, aWF, QF, uz, bC, anx, aWz, iu, VB, XL); #c1(CRYGS) c2(NP_060011) c3(beta-crystallin S) c4(193634) c5(193635, 193636, 193637, 193638, 193639, 193640, 193641, 193642, 193643, 193644) c6( ) c7(aWH, arm, K, Zh, aWI); #c1(CRYL1) c2(NP_057058) c3(lambda-crystallin homolog) c4(188680) c5(188681, 188682, 188683, 188684, 188685, 188686) c6( ) c7(dc, bo, aWJ, wz, jy, pw, B, ad); #c1(CRYM) c2(NP_001879) c3(ketimine reductase mu-crystallin) c4(121939, 121940) c5(121941, 121942, 121943, 121944, 121945, 121946, 121947, 121948, 121949, 121950, 121951, 121952, 121953, 121954, 121955, 121956, 121957, 121958, 121959) c6( ) c7(T, rx); #c1(CRYZL1) c2(NP_665857) c3(quinone oxidoreductase-like protein 1) c4(241762, 241763, 241764, 241765) c5(241766, 241767, 241768, 241769, 241770, 241771, 241772, 241773, 241774, 241775, 241776, 241777, 241778, 241779, 241780, 241781, 241782, 241783, 241784, 241785, 241786, 241787, 241788, 241789) c6( ) c7(bS); #c1(CS) c2(NP_004068) c3(citrate synthase, mitochondrial precursor) c4(143278, 143279) c5(143280, 143281, 143282, 143283, 143284, 143285, 143286, 143287, 143288, 143289, 143290, 143291) c6( ) c7(T, aWK, aC, ac, c, cc, aWL, ue, aWM, mx, dV, cd, aNG, LE, v, as, aMB, cm, aoz, bN); #c1(CSAD) c2(NP_001231634) c3(cysteine sulfinic acid decarboxylase isoform 2) c4( ) c5(87366, 87367, 87368, 87369, 87370, 87371, 87372, 87373, 87374, 87375) c6( ) c7(Y, fG, fQ, uu, ur, la, IR, ae, pb, ad); #c1(CSAD) c2(NP_057073) c3(cysteine sulfinic acid decarboxylase isoform 1) c4(188785, 188786, 188787, 188788, 188789, 188790) c5(188791, 188792, 188793, 188794, 188795, 188796, 188797, 188798, 188799, 188800, 188801, 188802, 188803, 188804, 188805) c6( ) c7(Y, fG, fQ, uu, ur, la, IR, ae, pb, ad); #c1(CSAD) c2(XP_011536744) c3(cysteine sulfinic acid decarboxylase isoform X2) c4(334413) c5(334414, 334415, 334416, 334417, 334418) c6( ) c7(Y, fG, fQ, uu, ur, la, IR, ae, pb, ad); #c1(CSAD) c2(XP_011536746) c3(cysteine sulfinic acid decarboxylase isoform X3) c4( ) c5(334419) c6( ) c7(Y, fG, fQ, uu, ur, la, IR, ae, pb, ad); #c1(CSAD) c2(XP_011536749) c3(cysteine sulfinic acid decarboxylase isoform X5) c4( ) c5(334420, 334421, 334422, 334423, 334424) c6( ) c7(Y, fG, fQ, uu, ur, la, IR, ae, pb, ad); #c1(CSAD) c2(XP_011536750) c3(cysteine sulfinic acid decarboxylase isoform X6) c4( ) c5(334425, 334426, 334427, 334428, 334429, 334430, 334431, 334432, 334433, 334434) c6( ) c7(Y, fG, fQ, uu, ur, la, IR, ae, pb, ad); #c1(CSAG3) c2(NP_001123300) c3(chondrosarcoma-associated gene 2/3 protein isoform b) c4(46877) c5(46878, 46879, 46880, 46881, 46882, 46883) c6( ) c7(T, id, eH, aT, m, bu, eF); #c1(CSEIL) c2(NP_001243064) c3(exportin-2 isoform 2) c4(89708, 89709) c5(89710, 89711, 89712, 89713, 89714, 89715, 89716, 89717, 89718, 89719, 89720, 89721) c6( ) c7(T, fM, bB, fr, ci, Fc, q, eA, anU, aT, h, dx, d, aiB, s, aW, vj, ev, ff, r, ks, aq, en, anW, iR, t, HI, ck, bP, bE, anY, iS, np, m, y, B); #c1(CSEIL) c2(NP_001307) c3(exportin-2 isoform 1) c4(116563, 116564) c5(116565, 116566, 116567, 116568, 116569, 116570, 116571, 116572, 116573, 116574, 116575, 116576) c6( ) c7(T, fM, bB, fr, ci, Fc, q, eA, anU, aT, h, dx, d, aiB, s, aW, vj, ev, ff, r, ks, aq, en, anW, iR, t, HI, ck, bP, bE, anY, iS, np, m, y, B); #c1(CSFIR) c2(NP_005202) c3(macrophage colony-stimulating factor 1 receptor precursor) c4(153851, 153852, 153853, 153854) c5(153855, 153856, 153857, 153858, 153859, 153860, 153861, 153862, 153863, 153864, 153865, 153866, 153867, 153868, 153869, 153870, 153871, 153872, 153873, 153874, 153875, 153876, 153877, 153878) c6( ) c7(bM, T, aC, Js, ea, bB, ci, x, DY, eG, aWN, aW, hl, g, eF, bw, iT, nB, AM, k, m, dD, n, fr, hr, ft, RN, By, dL, ey, dx, Gq, aWO, kz, Ei, hL, at, aWP, eo, bD, B, Jo, afK, V, eA, aT, jj, aPF, an, ae, aeY, bA, hf, cl, t, ck, ahN, nM, ac, aWQ, dT, bt, an, oA, bs, jh, dG, eq, hF, ad, dP, hd, py, iY, hP, ji, cb, nJ, TC, d, eH, dq, gE, aWR, es, EW, zr, bE, ME, y, jr); #c1(CSF2) c2(NP_000749) c3(granulocyte-macrophage colony-stimulating factor precursor) c4(15157) c5(15158, 15159, 15160, 15161, 15162, 15163, 15164, 15165, 15166, 15167, 15168, 15169, 15170, 15171, 15172, 15173, 15174, 15175, 15176, 15177, 15178, 15179, 15180, 15181, 15182, 15183, 15184, 15185, 15186, 15187, 15188, 15189, 15190, 15191, 15192, 15193, 15194, 15195, 15196, 15197, 15198, 15199, 15200, 15201, 15202, 15203, 15204, 15205, 15206, 15207, 15208, 15209, 15210, 15211, 15212, 15213, 15214, 15215, 15216, 15217, 15218, 15219, 15220, 15221, 15222, 15223, 15224, 15225, 15226, 15227, 15228, 15229, 15230, 15231, 15232, 15233, 15234, 15235, 15236, 15237, 15238, 15239, 15240, 15241, 15242, 15243, 15244, 15245, 15246, 15247, 15248, 15249, 15250, 15251, 15252, 15253, 15254, 15255, 15256, 15257, 15258, 15259, 15260, 15261, 15262, 15263, 15264, 15265, 15266, 15267, 15268, 15269, 15270, 15271, 15272, 15273, 15274, 15275, 15276, 15277, 15278, 15279, 15280, 15281, 15282, 15283, 15284, 15285, 15286, 15287, 15288, 15289, 15290, 15291, 15292, 15293, 15294, 15295, 15296, 15297, 15298, 15299, 15300, 15301, 15302, 15303) c6(15304, 15305, 15306) c7(T, os, uK, ea, fd, ci, aE, aXn, Ds, aXg, aXa, aiJ, cp, aa, dg, akw, jV, iA, cj, Zn, k, act, aWX, aEw, aFG, aXw, aj, qW, cd, hr, ox, nP, sp, fe, CQ, pm, ajz, adz, RB, aWV, dB, abW, jv, cz, bX, aXr, q, Cc, rO, jj, rz, eu, bA, Io, cl, pb, aXi, Cv, cT, iM, ac, ig, mG, aXt, bt, Ze, rA, gV, iW, jN, jh, oZ, dG, Gn, fu, aNH, ad, hX, iC, vJ, akJ, oW, iY, cb, qZ, ff, dq, bz, oK, aKC, IC, bM, bB, asr, ip, x, oG, eG, aiV, Oj, kt, as, eE, eF, cm, bw, bb, anT, vA, oy, aiM, hh, xN, aiu, dD, Ht, n, oY, Me, Hx, no, cq, Bj, DU, aWY, pi, cC, A, f J, Ib, hQ, po, bP, aXk, at, pg, bk, eo, B, ek, qc, ul, dA, ti, afK, aWU, Qo, V, eJ, Yn, WY, aql, aWW, ae, Ir, jf, tn, iZ, De, WQ, bu, t, UZ, rY, ck, II, HK, JH, oX, hl, pY, df, eq, CJ, Db, JK, rL, cs, d, je, hG, xH, Z, bF, dO, Hs, y, aXu, kS, CW, pC, JN, Js, zs, I, axk, qj, IR, Qp, wa, Qk, rB, K, eL, apn, g, uC, iP, aJX, aWZ, AM, U, PV, dW, m, XL, OI, aw, aBI, eb, ft, cU, Ha, aIY, jT, cM, fs, bo, mg, JM, aXv, aEG, Pr, Jo, L, fM, fG, Nt, ON, j, pd, eA, J, XX, hb, jZ, apJ, aeY, sb, aCr, Y, aM, RF, Pg, r, en, wA, aoG, iK, bN, Qi, tj, Dy, c, auo, aXe, hA, Uq, rK, dy, fD, LS, sY, id, bs, bS, EA, hF, ase, vN, dP, vB, ji, IR, eH, cr, BG, iR, Nq, TA, Bv, aHL, asq, aXq, fV, aXb, mF, aR, IE, Fo, aU, bU, H, aXj, aXp, amN, DA, aW, aXc, aXh, eM, iT, gn, R, qR, QS, aFc, aXo, fr, ct, aWT, ai, eW, aXI, ke, h, SH, Nf, dL, aXd, Nr, aXf, aq, op, Qu, ahC, bL, Dw, eR, C, ze, cF, aaF, aT, dz, adV, an, af, ak, s, iU, oV, aaE, xw, dS, aXm, agc, yW, vZ, AH, dT, ij, aWS, hS, qX, aD, Fb, oH, jE, av, F, sO, abg, uQ, TC, yx, aGS, eZ, aXs, eK, es, pc, zr, aqM, bE, z, dJ, fh, X, Ex); #c1(CSF2RA) c2(NP_001155002) c3(granulocyte-macrophage colony-stimulating factor receptor subunit alpha isoform f precursor) c4(61261) c5(61262, 61263, 61264, 61265, 61266, 61267) c6( ) c7(aWW, akt, ase, vJ, dT); #c1(CSF2RA) c2(NP_001155004) c3(granulocyte-macrophage colony-stimulating factor receptor subunit alpha isoform h) c4( ) c5(61268, 61269, 61270, 61271, 61272) c6( ) c7(aWW, akt, ase, vJ, dT); #c1(CSF2RA) c2(NP_758449) c3(granulocyte-macrophage colony-stimulating factor receptor subunit alpha isoform b precursor) c4(249188) c5(249189, 249190, 249191, 249192, 249193, 249194) c6( ) c7(aWW, akt, ase, vJ, dT); #c1(CSF2RA) c2(NP_758452) c3(granulocyte-macrophage colony-stimulating factor receptor subunit alpha isoform e precursor) c4(249195) c5(249196, 249197, 249198, 249199, 249200, 249201, 249202, 249203, 249204, 249205, 249206, 249207) c6( ) c7(aWW, akt, ase, vJ, dT); #c1(CSF2RA) c2(XP_011543921) c3(granulocyte-macrophage colony-stimulating factor receptor subunit alpha isoform X1) c4(343108, 343109, 343110, 343111) c5(343112, 343113, 343114, 343115, 343116, 343117, 343118, 343119, 343120, 343121, 343122, 343123, 343124, 343125, 343126) c6( ) c7(aWW, akt, ase, vJ, dT); #c1(CSF2RA) c2(XP_011543925) c3(granulocyte-macrophage colony-stimulating factor receptor subunit alpha isoform X5) c4(343127) c5( ) c6( ) c7(aWW, akt, ase, vJ, dT); #c1(CSF2RA) c2(XP_011543927) c3(granulocyte-macrophage colony-stimulating factor receptor subunit alpha isoform X6) c4(343128) c5(343129, 343130, 343131, 343132, 343133, 343134) c6( ) c7(aWW, akt, ase, vJ, dT); #c1(CSF2RA) c2(XP_011543930) c3(granulocyte-macrophage colony-stimulating factor receptor subunit alpha isoform X7) c4(343135) c5(343136, 343137, 343138, 343139, 343140, 343141, 343142, 343143, 343144, 343145, 343146, 343147, 343148, 343149, 343150, 343151, 343152, 343153, 343154, 343155, 343156, 343157) c6( ) c7(aWW, akt, ase, vJ, dT); #c1(CSF2RB) c2(NP_000386) c3(cytokine receptor common subunit beta precursor) c4(8371, 8372) c5(8373, 8374, 8375, 8376, 8377, 8378, 8379, 8380, 8381, 8382, 8383, 8384) c6( ) c7(ck, bM, mR, aWV, ayU, bO, dT, aXx, he, bt, eu); #c1(CSF2RB) c2(XP_005261397) c3(cytokine receptor common subunit beta isoform X3) c4(277346, 277347) c5(277348, 277349, 277350, 277351, 277352, 277353, 277354, 277355, 277356, 277357, 277358, 277359) c6( ) c7(ck, bM, mR, aWV, ayU, bO, dT, aXx, he, bt, eu); #c1(CSF2RB) c2(XP_011528206) c3(cytokine receptor common subunit beta isoform X2) c4(323294) c5( ) c6( ) c7(ck, bM, mR, aWV, ayU, bO, dT, aXx, he, bt, eu); #c1(CSF2RB) c2(XP_011528207) c3(cytokine receptor common subunit beta isoform X4) c4( ) c5(323295, 323296, 323297, 323298, 323299, 323300) c6( ) c7(ck, bM, mR, aWV, ayU, bO, dT, aXx, he, bt, eu); #c1(CSF3) c2(NP_000750) c3(granulocyte colony-stimulating factor isoform a precursor) c4(15307) c5(15308, 15309, 15310, 15311, 15312, 15313, 15314, 15315, 15316, 15317, 15318) c6(15319, 15320) c7(oO, bM, T, os, xS, fR, fV, qx, al, fd, bB, ci, amW, aR, ip, x, aE, aEX, fm, DO, Os, K, ex, eL, Us, aa, aW, hC, hl, bp, as, eF, cm, uC, bw, eM, iT, aWZ, mx, tV, cj, dW, k, m, gn, dD, aw, ht, n, oY, ct, aXA, cd, hr, ai, ke, ft, cc, hw, azD, qg, aXE, h, eV, hn, dL, DU, pj, dx, afu, Nr, aXy, XE, aXG, fQ, aq, po, fe, pm, kT, hk, kz, aXF, Vy, If, at, pg, aEG, Pr, B, Dw, fM, dA, fG, jx, eX, aA, afK, hy, j, v, C, bX, aoG, Qo, eA, er, zn, aXC, hW, dn, aT, cy, dz, jj, ae, bA, sb, IE, iU, oV, Y, en, t, iK, aXi, ck, BU, wg, ac, c, hA, iQ, QG, aXB, CZ, rK, dy, EY, oX, ud, bt, hS, kV, Kd, sY, gV, id, qb, iW, df, ol, jh, bs, oZ, eq, aXD, hF, atK, ad, hX, av, oz, oj, oW, ji, nJ, aXz, d, BN, IR, hG, et, ff, eH, cr, dN, aoF, aF, aot, aGj, bz, dr, oK, Nq, bE, eB, II, gZ, aS, hE, kS, X); #c1(CSF3) c2(NP_001171618) c3(granulocyte colony-stimulating factor isoform d precursor) c4( ) c5(70844, 70845, 70846, 70847, 70848, 70849, 70850, 70851, 70852, 70853, 70854, 70855, 70856, 70857, 70858, 70859, 70860, 70861, 70862, 70863, 70864, 70865, 70866, 70867, 70868, 70869, 70870, 70871, 70872, 70873, 70874, 70875, 70876, 70877, 70878, 70879, 70880, 70881, 70882, 70883, 70884, 70885, 70886, 70887, 70888, 70889, 70890, 70891, 70892, 70893, 70894, 70895, 70896, 70897, 70898, 70899, 70900, 70901, 70902, 70903, 70904, 70905, 70906, 70907, 70908, 70909, 70910, 70911, 70912, 70913, 70914, 70915, 70916, 70917, 70918, 70919, 70920, 70921, 70922, 70923, 70924, 70925, 70926, 70927, 70928, 70929, 70930, 70931, 70932) c6(70933) c7(oO, bM, T, os, xS, fR, fV, qx, al, fd, bB, ci, amW, aR, ip, x, aE, aEX, fm, DO, Ds, K, ex, eL, Us, aa, aW, hC, hl, bp, as, eF, cm, uC, bw, eM, iT, aWZ, mx, tV, cj, dW, k, m, gn, dD, aw, ht, n, oY, ct, aXA, cd, hr, ai, ke, ft, cc, hw, azD, qg, aXE, h, eV, hn, dL, DU, pj, dx, afu, Nr, aXy, XE, aXG, fQ, aq, po, fe, pm, kT, hk, kz, aXF, Vy, If, at, pg, aEG, Pr, B, Dw, fM, dA, fG, jx, eX, aA, afK, hy, j, v, C, bX, aoC, Qo, eA, er, zn, aXG, hW, dn, aT, cy, dz, jj, ae, bA, sb, IE, iU, oV, Y, en, t, iK, aXi, ck, BU, wg, ac, c, hA, iQ, QG, aXB, CZ, rK, dy, EY, oX, ud, bt, hS, kV, Kd, sY, gV, id, qb, iW, df, ol, jh, bs, oZ, eq, aXD, hF, atK, ad, hX, av, oz, oj, oW, ji, nJ, aXz, d, BN, IR, hG, et, ff, eH, cr, dN, aoF, aF, aot, aGj, bz, dr, oK, Nq, bE, eB, II, gZ, aS, hE, kS, X); #c1(CSF3) c2(NP_757373) c3(granulocyte colony-stimulating factor isoform b precursor) c4(248747, 248748, 248749, 248750, 248751, 248752, 248753) c5(248754, 248755, 248756, 248757, 248758, 248759, 248760, 248761, 248762, 248763, 248764, 248765, 248766, 248767, 248768, 248769, 248770, 248771, 248772, 248773, 248774, 248775, 248776, 248777, 248778, 248779, 248780, 248781, 248782, 248783, 248784, 248785, 248786, 248787, 248788, 248789, 248790, 248791, 248792, 248793, 248794, 248795, 248796, 248797, 248798, 248799, 248800, 248801, 248802, 248803, 248804, 248805, 248806, 248807, 248808, 248809, 248810, 248811, 248812, 248813, 248814, 248815, 248816, 248817, 248818, 248819, 248820, 248821, 248822, 248823, 248824, 248825, 248826, 248827, 248828, 248829, 248830, 248831, 248832, 248833, 248834, 248835, 248836, 248837, 248838, 248839, 248840, 248841, 248842, 248843, 248844, 248845, 248846, 248847, 248848, 248849, 248850, 248851, 248852, 248853, 248854, 248855, 248856, 248857, 248858, 248859, 248860, 248861, 248862, 248863, 248864, 248865, 248866, 248867, 248868, 248869, 248870, 248871, 248872, 248873, 248874, 248875, 248876, 248877, 248878, 248879, 248880, 248881, 248882, 248883, 248884, 248885, 248886, 248887, 248888, 248889, 248890, 248891, 248892, 248893, 248894, 248895, 248896, 248897, 248898, 248899, 248900, 248901, 248902, 248903, 248904, 248905, 248906, 248907, 248908, 248909, 248910, 248911, 248912, 248913, 248914, 248915, 248916, 248917, 248918, 248919, 248920, 248921, 248922, 248923, 248924, 248925, 248926, 248927, 248928, 248929, 248930, 248931, 248932, 248933, 248934, 248935, 248936, 248937, 248938, 248939, 248940, 248941, 248942, 248943, 248944, 248945, 248946, 248947, 248948, 248949, 248950, 248951, 248952, 248953, 248954, 248955, 248956, 248957, 248958, 248959, 248960, 248961, 248962, 248963, 248964, 248965, 248966, 248967, 248968, 248969, 248970, 248971, 248972, 248973, 248974, 248975, 248976, 248977, 248978, 248979, 248980, 248981, 248982, 248983, 248984, 248985, 248986, 248987, 248988, 248989, 248990, 248991, 248992, 248993, 248994, 248995, 248996, 248997, 248998, 248999, 249000, 248001, 249002, 249003, 249004, 249005, 249006, 249007, 249008, 249009, 249010, 249011, 249012, 249013, 249014, 249015, 249016, 249017, 249018, 249019, 249020, 249021, 249022, 249023, 249024, 249025, 249026, 249027, 249028, 249029, 249030) c6(249031, 249032, 249033, 249034, 249035, 249036, 249037, 249038, 249039, 249040, 249041, 249042, 249043, 249044, 249045, 249046, 249047, 249048, 249049, 249050, 249051, 249052, 249053, 249054, 249055, 249056, 249057, 249058, 249059, 249060, 249061, 249062, 249063, 249064, 249065, 249066, 249067, 249068, 249069, 249070, 249071, 249072, 249073) c7(oO, bM, T, os, xS, fR, fV, qx, al, fd, bB, ci, amW, aR, ip, x, aE, aEX, fm, DO, Ds, K, ex, eL, Us, aa, aW, hC, hl, bp, as, eF, cm, uC, bw, eM, iT, aWZ, mx, tV, cj, dW, k, m, gn, dD, aw, ht, n, oY, ct, aXA, cd, hr, ai, ke, ft, cc, hw, azD, qg, aXE, h, eV, hn, dL, DU, pj, dx, afu, Nr, aXy, XE, aXG, fQ, aq, po, fe, pm, kT, hk, kz, aXE, Vy, If, at, pg, aEG, Pr, B, Dw, fM, dA, fG, jx, eX, aA, afK, hy, j, v, C, bX, aoC, Qo, eA, er, zn, aXG, hW, dn, aT, cy, dz, jj, ae, bA, sb, IE, iU, oV, Y, en, t, iK, aXi, ck, Bu, wg, ac, c, hA, iQ, QG, aXB, CZ, rK, dy, EY, oX, ud, bt, hS, kV, Kd, sY, gV, id, qb, iW, df, ol, jh, bs, oZ, eq, aXD, hF, atK, ad, hX, av, oz, oj, oW, ji, nJ, aXz, d, BN, IR, hG, et, ff, eH, cr, dN, aoF, aF, aot, aGj, bz, dr, oK, Nq, bE, eB, II, gZ, aS, hE, kS, X); #c1(CSF3) c2(NP_757374) c3(granulocyte colony-stimulating factor isoform c precursor) c4(249074, 249075, 249076) c5(249077, 249078, 249079, 249080, 249081, 249082, 249083, 249084, 249085) c6(249086, 249087) c7(oO, bM, T, os, xS, fR, fV, qx, al, fd, bB, ci, amW, aR, ip, x, aE, aEX, fm, DO, Ds, K, ex, eL, Us, aa, aW, hC, hl, bp, as, eF, cm, uC, bw, eM, iT, aWZ, mx, tV, cj, dW, k, m, gn, dD, aw, ht, n, oY, ct, aXA, cd, hr, ai, ke, ft, cc, hw, azD, qg, aXE, h, eV, hn, dL, DU, pj, dx, afu, Nr, aXy, XE, aXG, fQ, ag, po, fe, pm, kT, hk, kz, aXE, Vy, If, at, pg, aEG, Pr, B, Dw, fM, dA, fG, jx, eX, aA, afK, hy, j, v, C, bX, aoC, Qo, eA, er, zn, aXG, hW, dn, aT, cy, dz, jj, ae, bA, sb, IE, iU, oV, Y, en, t, iK, aXi, ck, BU, wg, ac, c, hA, iQ, QG, aXB, CZ, rK, dy, EY, oX, ud, bt, hS, kV, Kd, sY, gV, id, qb, iW, df, ol, jh, bs, oZ, eq, aXD, hF, atK, ad, hX, av, oz, oj, oW, ji, nJ, aXz, d, BN, IR, hG, et, ff, eH, cr, dN, aoF, aF, aot, aGj, bz, dr, oK, Nq, bE, eB, II, gZ, aS, hE, kS, X); #c1(CSGALNACT1) c2(NP_001123990) c3(chondroitin sulfate N-acetylgalactosaminyltransferase 1) c4(48171, 48172, 48173, 48174, 48175) c5(48176, 48177, 48178, 48179, 48180, 48181, 48182, 48183, 48184, 48185, 48186, 48187, 48188, 48189, 48190, 48191, 48192, 48193, 48194, 48195, 48196, 48197, 48198, 48199, 48200, 48201, 48202, 48203, 48204, 48205, 48206, 48207, 48208, 48209, 48210, 48211, 48212, 48213, 48214, 48215, 48216, 48217, 48218, 48219, 48220) c6( ) c7(OY, qI, oe, k, fu); #c1(CSGALNACT2) c2(NP_061060) c3(chondroitin sulfate N-acetylgalactosaminyltransferase 2) c4(199123) c5(199124, 199125, 199126, 199127, 199128, 199129) c6( ) c7(ahl); #c1(CSGALNACT2) c2(XP_011538240) c3(chondroitin sulfate N-acetylgalactosaminyltransferase 2 isoform X1) c4(335842) c5(335843, 335844, 335845, 335846, 335847, 335848) c6( ) c7(ahl); #c1(CSH1) c2(NP_001308) c3(chorionic somatomammotropin hormone 1 precursor) c4(116577, 116578) c5(116579, 116580, 116581, 116582, 116583, 116584, 116585, 116586, 116587, 116588, 116589, 116590, 116591, 116592, 116593, 116594, 116595, 116596, 116597, 116598, 116599, 116600, 116601, 116602, 116603) c6( ) c7(T, nl, wu, yk, Jy, ci, eW, aR, MR, aXH, jZ, nl, dV, aT, dz, KP, K, aAG, wm, nJ, vT, aW, LO, CT, nh, La, iK, bz, dr, ck, aXI, mg, U, hR, m, ei); #c1(CSH2) c2(NP_066271) c3(chorionic somatomammotropin hormone 2 isoform 1 precursor) c4(206874, 206875) c5(206876, 206877, 206878, 206879, 206880, 206881, 206882, 206883) c6( ) c7(T, nl, wu, yk, Jy, ci, eW, aR, MR, aXH, jZ, nl, dV, aT, dz, KP, K, aAG, wm, nJ, vT, aW, LO, CT, nh, La, iK, bz, dr, ck, aXI, mg, U, hR, m, ei); #c1(CSH2) c2(NP_072170) c3(chorionic somatomammotropin hormone 2 isoform 2 precursor) c4(212732, 212733) c5(212734, 212735, 212736, 212737, 212738, 212739, 212740, 212741, 212742, 212743, 212744, 212745, 212746, 212747) c6( ) c7(T, nl, wu, yk, Jy, ci, eW, aR, MR, aXH, jZ, nl, dV, aT, dz, KP, K, aAG, wm, nJ, vT, aW, LO, CT, nh, La, iK, bz, dr, ck, aXI, mg, U, hR, m, ei); #c1(CSH2) c2(NP_072171) c3(chorionic somatomammotropin hormone 2 isoform 3 precursor) c4(212748, 212749, 212750) c5(212751, 212752, 212753, 212754, 212755, 212756, 212757, 212758, 212759, 212760, 212761, 212762, 212763, 212764, 212765, 212766, 212767, 212768, 212769, 212770, 212771, 212772, 212773, 212774) c6(212775, 212776) c7(T, nl, wu, yk, Jy, ci, eW, aR, MR, aXH, jZ, nl, dV, aT, dz, KP, K, aAG, wm, nJ, vT, aW, LO, CT, nh, La, iK, bz, dr, ck, aXI, mg, U, hR, m, ei); #c1(CSHL1) c2(NP_001309) c3(chorionic somatomammotropin hormone-like 1 isoform 3) c4( ) c5(116604, 116605, 116606, 116607, 116608) c6( ) c7(bL, ck, T, A, d, aW, aT, bj, mf, aXJ, bq, zP, ae, ad, yv); #c1(CSHL1) c2(NP_072101) c3(chorionic somatomammotropin hormone-like 1 isoform 1 precursor) c4(212710, 212711) c5(212712, 212713, 212714, 212715, 212716, 212717, 212718, 212719, 212720, 212721, 212722, 212723) c6( ) c7(bL, ck, T, A, d, aW, aT, bj, mf, aXJ, bq, zP, ae, ad, yv); #c1(CSHL1) c2(NP_072102) c3(chorionic somatomammotropin hormone-like 1 isoform 4) c4(212724) c5(212725, 212726, 212727, 212728, 212729, 212730) c6( ) c7(bL, ck, T, A, d, aW, aT, bj, mf, aXJ, bq, zP, ae, ad, yv); #c1(CSHL1) c2(NP_072103) c3(chorionic somatomammotropin hormone-like 1 isoform 2 precursor) c4(212731) c5( ) c6( ) c7(bL, ck, T, A, d, aW, aT, bj, mf, aXJ, bq, zP, ae, ad, yv); #c1(CSHL1) c2(XP_011522646) c3(chorionic somatomammotropin hormone-like 1 isoform X1) c4(317204) c5(317205, 317206, 317207, 317208, 317209, 317210, 317211, 317212, 317213) c6( ) c7(bL, ck, T, A, d, aW, aT, bj, mf, aXJ, bq, zP, ae, ad, yv); #c1(CSHL1) c2(XP_011522648) c3(chorionic somatomammotropin hormone-like 1 isoform X3) c4( ) c5(317214) c6( ) c7(bL, ck, T, A, d, aW, aT, bj, mf, aXJ, bq, zP, ae, ad, yv); #c1(CSK) c2(XP_005254222) c3(tyrosine-protein kinase CSK isoform X1) c4(273099, 273100) c5(273101, 273102, 273103, 273104, 273105, 273106, 273107, 273108, 273109, 273110, 273111, 273112, 273113, 273114, 273115, 273116, 273117, 273118, 273119, 273120) c6( ) c7(T, oe, IH, jx, aA, cz, bB, iJ, q, ad, aXK, yg, aT, h, K, ae, af, B, aW, Y, fO, eZ, r, aF, t, bw, pb, eM, bE, m, y, Pr, X, ao); #c1(CSMD1) c2(NP_150094) c3(CUB and sushi domain-containing protein 1 precursor) c4(227753, 227754, 227755, 227756, 227757, 227758) c5(227759, 227760, 227761, 227762, 227763, 227764, 227765, 227766, 227767, 227768, 227769, 227770, 227771, 227772, 227773, 227774, 227775, 227776, 227777, 227778, 227779, 227780, 227781, 227782, 227783, 227784, 227785, 227786, 227787, 227788, 227789, 227790, 227791, 227792, 227793, 227794) c6( ) c7(bM, T, yk, oe, EQ, cz, aj, j, Ea, V, q, ad, pN, aT, dL, an, hH, xa, KG, xQ, Y, ff, cr, r, aXL, en, g, t, cM, fq, iK, W, ac, If, IB); #c1(CSMD2) c2(XP_011538874) c3(CUB and sushi domain-containing protein 2 isoform X1) c4(336958, 336959) c5(336960, 336961, 336962, 336963, 336964, 336965, 336966, 336967) c6( ) c7(hb, Y, gZ, n, fe, Fc); #c1(CSMD3) c2(NP_443132) c3(CUB and sushi domain-containing protein 3 isoform 3) c4(229582) c5(229583, 229584, 229585, 229586, 229587, 229588) c6( ) c7(r, aj, fr, nA, IB, bz, q, bN); #c1(CSMD3) c2(NP_937756) c3(CUB and sushi domain-containing protein 3 isoform 1) c4(259035, 259036) c5(259037, 259038, 259039, 259040, 259041, 259042) c6( ) c7(r, aj, fr, nA, IB, bz, q, bN); #c1(CSMD3) c2(NP_937757) c3(CUB and sushi domain-containing protein 3 isoform 2) c4(259043) c5(259044, 259045, 259046, 259047, 259048, 259049) c6( ) c7(r, aj, fr, nA, IB, bz, q, bN); #c1(CSMD3) c2(XP_011515117) c3(CUB and sushi domain-containing protein 3 isoform X8) c4( ) c5(307978) c6( ) c7(r, aj, fr, nA, IB, bz, q, bN); #c1(CSMD3) c2(XP_011515118) c3(CUB and sushi domain-containing protein 3 isoform X9) c4( ) c5(307979, 307980, 307981, 307982, 307983, 307984) c6( ) c7(r, aj, fr, nA, IB, bz, q, bN); #c1(CSNIS1) c2(NP_001020275) c3(alpha-S1-casein isoform 2 precursor) c4(28511) c5(28512, 28513, 28514, 28515, 28516, 28517, 28518, 28519) c6(28520, 28521) c7(aW, aT); #c1(CSNIS1) c2(NP_001881) c3(alpha-S1-casein isoform 1 precursor) c4(121960) c5(121961, 121962, 121963, 121964, 121965, 121966, 121967, 121968) c6(121969, 121970) c7(aW, aT); #c1(CSNIS1) c2(XP_006714153) c3(alpha-S1-casein isoform X2) c4(287600, 287601) c5(287602, 287603, 287604, 287605, 287606, 287607, 287608, 287609, 287610, 287611, 287612, 287613, 287614, 287615, 287616, 287617) c6(287618, 287619, 287620, 287621) c7(aW, aT); #c1(CSN2) c2(XP_011529920) c3(beta-casein isoform X1) c4(325702) c5(325703, 325704, 325705, 325706, 325707, 325708) c6( ) c7(x, A, zQ, aW, hF, aT, aj, j, k, ci, zP, bt, xY, J); #c1(CSN3) c2(NP_005203) c3(kappa-casein precursor) c4( ) c5(153879, 153880, 153881, 153882, 153883) c6( ) c7(gk, aAd, zQ, QK, KE, hb, FB, al, eF, eH, aw, nf, UR, aAe, ci, nA, aha, hu, zP, V, B); #c1(CSN3) c2(XP_011529921) c3(kappa-casein isoform X2) c4(325709) c5(325710) c6( ) c7(gk, aAd, zQ, QK, KE, hb, FB, al, eF, eH, aw, nf, OR, aAe, ci, nA, aha, hu, zP, V, B); #c1(CSNKIA1) c2(NP_001020276) c3(casein kinase I isoform alpha isoform 1) c4(28522) c5(28523, 28524, 28525, 28526, 28527, 28528) c6( ) c7(bE, Y, Az, r, aT, bB, q, X, cp, vi); #c1(CSNKIA1) c2(NP_001258670) c3(casein kinase I isoform alpha isoform 3) c4(96306) c5(96307, 96308, 96309, 96310, 96311, 96312, 96313, 96314, 96315, 96316) c6( ) c7(bE, Y, Az, r, al bB, q, X, cp, vi); #c1(CSNKIA1) c2(NP_001883) c3(casein kinase I isoform alpha isoform 2) c4(121971) c5(121972, 121973, 121974, 121975, 121976, 121977) c6( ) c7(bE, Y, Az, r, aT, bB, q, X, cp, vi); #c1(CSNKID) c2(NP_001884) c3(casein kinase I isoform delta isoform 1) c4(121978, 121979) c5(121980, 121981, 121982, 121983, 121984, 121985, 121986, 121987, 121988, 121989, 121990, 121991) c6( ) c7(aXM, aXN, s, yE, aW, cr, aT, aA, ayp, aXO, aj, bK, K, ur, uu, azg, j, nJ, af); #c1(CSNKID) c2(NP_620693) c3(casein kinase I isoform delta isoform 2) c4(238052) c5(238053, 238054, 238055, 238056, 238057, 238058, 238059, 238060, 238061, 238062, 238063, 238064) c6( ) c7(aXM, aXN, s, yE, aW, cr, aT, aA, ayp, aXO, aj, bK, K, ur, uu, azg, j, nJ, af); #c1(CSNKID) c2(XP_005256393) c3(casein kinase I isoform delta isoform X1) c4(274169) c5(274170, 274171, 274172, 274173, 274174, 274175) c6( ) c7(aXM, aXN, s, yE, aW, cr, aT, aA, ayp, aXO, aj, bK, K, ur, uu, azg, j, nJ, af); #c1(CSNKID) c2(XP_005256394) c3(casein kinase I isoform delta isoform X2) c4(274176) c5( ) c6( ) c7(aXM, aXN, s, yE, aW, cr, aT, aA, ayp, aXO, aj, bK, K, ur, uu, azg, j, nJ, af); #c1(CSNKIG3) c2(NP_001026982) c3(casein kinase I isoform gamma-3 isoform 2) c4(30044) c5(30045, 30046, 30047, 30048, 30049, 30050, 30051, 30052, 30053, 30054) c6( ) c7(c); #c1(CSNKIG3) c2(NP_001038188) c3(casein kinase I isoform gamma-3 isoform 4) c4(34171) c5(34172, 34173, 34174, 34175, 34176, 34177, 34178, 34179, 34180, 34181) c6( ) c7(c); #c1(CSNKIG3) c2(NP_001257501) c3(casein kinase I isoform gamma-3 isoform 5) c4(95498) c5(95499, 95500, 95501, 95502, 95503, 95504) c6( ) c7(c); #c1(CSNKIG3) c2(NP_004375) c3(casein kinase I isoform gamma-3 isoform 1) c4(145892) c5(145893, 145894, 145895, 145896, 145897, 145898, 145899, 145900, 145901, 145902) c6( ) c7(c); #c1(CSNK2A1) c2(XP_011527477) c3(casein kinase II subunit alpha isoform X1) c4(322244, 322245, 322246, 322247) c5(322248, 322249, 322250, 322251, 322252, 322253, 322254, 322255, 322256, 322257, 322258, 322259, 322260, 322261, 322262, 322263, 322264, 322265, 322266, 322267, 322268, 322269, 322270) c6( ) c7(T, aXP, fd, bB, q, er, ad, aE, aT, K, ae, d, aW, ff, CT, Xg, r, en, zE, bE, hk, Qu, bt, kS); #c1(CSNK2A1) c2(XP_011527478) c3(casein kinase II subunit alpha isoform X2) c4( ) c5(322271, 322272, 322273, 322274, 322275) c6( ) c7(T, aXP, fd, bB, q, er, ad, aE, aT, K, ae, d, aW, ff, CT, Xg, r, en, zE, bE, hk, Qu, bt, kS); #c1(CSNK2A2) c2(NP_001887) c3(casein kinase II subunit alpha′) c4(121992) c5(121993, 121994, 121995, 121996, 121997, 121998) c6( ) c7(bF, d, aXP, Qu, hk, ff, r, en, q); #c1(CSNK2B) c2(NP_001311) c3(casein kinase II subunit beta isoform 1) c4(116609, 116610, 116611) c5(116612, 116613, 116614, 116615, 116616, 116617, 116618, 116619, 116620, 116621116622, 116623, 116624, 116625, 116626, 116627, 116628, 116629, 116630, 116631116632, 116633, 116634, 116635, 116636, 116637, 116638, 116639, 116640, 116641116642, 116643, 116644, 116645, 116646, 116647, 116648, 116649, 116650, 116651116652, 116653, 116654, 116655, 116656, 116657, 116658, 116659, 116660, 116661, 116662, 116663, 116664, 116665, 116666, 116667, 116668, 116669, 116670, 116671116672, 116673, 116674, 116675, 116676, 116677, 116678, 116679, 116680, 116681, 116682, 116683, 116684, 116685, 116686, 116687, 116688, 116689, 116690, 116691, 116692, 116693, 116694, 116695, 116696, 116697, 116698, 116699, 116700, 116701116702, 116703, 116704, 116705, 116706, 116707, 116708, 116709, 116710, 116711, 116712, 116713, 116714, 116715, 116716, 116717, 116718, 116719, 116720, 116721116722, 116723, 116724, 116725, 116726, 116727, 116728, 116729, 116730, 116731, 116732, 116733, 116734, 116735, 116736) c6( ) c7(bF, hk, ff, hL, eZ, en, y, B); #c1(CSPG4) c2(NP_001888) c3(chondroitin sulfate proteoglycan 4 precursor) c4(121999, 122000) c5(122001, 122002, 122003, 122004, 122005, 122006, 122007, 122008, 122009, 122010, 122011, 122012) c6( ) c7(T, d, Dy, ac, aW, Y, aT, IG, arw, k, aCp, af, eu); #c1(CSPG5) c2(NP_001193871) c3(chondroitin sulfate proteoglycan 5 isoform 2) c4( ) c5(82885, 82886, 82887, 82888, 82889) c6( ) c7(AH, Eg); #c1(CSPG5) c2(NP_001193872) c3(chondroitin sulfate proteoglycan 5 isoform 3 precursor) c4(82890) c5(82891, 82892, 82893, 82894, 82895, 82896) c6( ) c7(AH, Eg); #c1(CSPG5) c2(NP_006565) c3(chondroitin sulfate proteoglycan 5 isoform 1 precursor) c4(166273, 166274) c5(166275, 166276, 166277, 166278, 166279, 166280, 166281) c6( ) c7(AH, Eg); #c1(CSPP1) c2(NP_001278268) c3(centrosome and spindle pole-associated protein 1 isoform 2) c4( ) c5(109537, 109538, 109539, 109540, 109541, 109542, 109543, 109544) c6( ) c7(aXQ, Ng); #c1(CSPP1) c2(NP_079066) c3(centrosome and spindle pole-associated protein 1 isoform 1) c4(216863) c5(216864, 216865, 216866, 216867, 216868) c6( ) c7(aXQ, Ng); #c1(CSPP1) c2(XP_005251362) c3(centrosome and spindle pole-associated protein 1 isoform X3) c4(270921) c5(270922, 270923, 270924, 270925, 270926, 270927) c6( ) c7(aXQ, Ng); #c1(CSPP1) c2(XP_006716537) c3(centrosome and spindle pole-associated protein 1 isoform X7) c4(290377) c5(290378, 290379) c6( ) c7(aXQ, Ng); #c1(CSPP1) c2(XP_011515904) c3(centrosome and spindle pole-associated protein 1 isoform X6) c4( ) c5(309066) c6( ) c7(aXQ, Ng); #c1(CSPP1) c2(XP_011515912) c3(centrosome and spindle pole-associated protein 1 isoform X13) c4( ) c5(309067) c6( ) c7(aXQ, Ng); #c1(CSRNP1) c2(NP_149016) c3(cysteine/serine-rich nuclear protein 1) c4(226729, 226730) c5(226731, 226732, 226733, 226734, 226735, 226736, 226737, 226738, 226739, 226740, 226741, 226742, 226743, 226744, 226745, 226746) c6( ) c7(bB, aj, ci, mx); #c1(CSRNP3) c2(NP_079245) c3(cysteine/serine-rich nuclear protein 3) c4(217573) c5(217574, 217575, 217576, 217577, 217578, 217579, 217580, 217581, 217582, 217583, 217584, 217585, 217586, 217587, 217588, 217589, 217590, 217591) c6( ) c7(IB, bN); #c1(CSRNP3) c2(XP_005246922) c3(cysteine/serine-rich nuclear protein 3 isoform X1) c4(267495, 267496, 267497, 267498) c5(267499, 267500, 267501, 267502, 267503, 267504, 267505, 267506, 267507, 267508, 267509, 267510, 267511, 267512, 267513, 267514) c6( ) c7(IB, bN); #c1(CSRP1) c2(NP_001180500) c3(cysteine and glycine-rich protein 1 isoform 1) c4(74166, 74167) c5(74168, 74169, 74170, 74171, 74172, 74173, 74174, 74175, 74176, 74177, 74178, 74179, 74180, 74181, 74182, 74183, 74184, 74185, 74186, 74187, 74188, 74189, 74190, 74191, 74192) c6( ) c7(P, gV, T, bL, dD, bM, pf, atB, fG, e, ea, cz, it, n, aj, bS, j, ct, C, gf, v, eq, q, J, ad, ai, aMB, fU, jz, Zu, oz, afn, ds, M, Os, aT, cy, h, JK, K, ae, vl, hm, A, mR, hG, aW, aEH, ff, eH, hl, eZ, r, fe, aq, vs, en, iV, Z, eF, bz, qa, LB, eY, tW, W, ac, bE, aWe, eM, dh, mx, eB, at, MJ, wx, aVY, fD, Lz, ei, y, xg, B, L); #c1(CSRP2) c2(NP_001287894) c3(cysteine and glycine-rich protein 2) c4(113166) c5(113167, 113168, 113169, 113170, 113171, 113172, 113173, 113174, 113175, 113176, 113177) c6( ) c7(aW, aT); #c1(CSRP2BP) c2(NP_065397) c3(cysteine-rich protein 2-binding protein) c4(204742, 204743) c5(204744, 204745, 204746, 204747, 204748, 204749, 204750, 204751, 204752, 204753, 204754, 204755, 204756, 204757, 204758) c6( ) c7(aSP); #c1(CSRP3) c2(NP_003467) c3(cysteine and glycine-rich protein 3) c4(138571) c5(138572, 138573, 138574, 138575, 138576, 138577, 138578, 138579, 138580, 138581) c6( ) c7(azs, T, tc, v, aml, jE, ci, cd, ad, Na, bv, cc, ib, aE, aXS, amJ, aT, vc, Nc, K, Tj, ae, aW, ff, eH, Pg, aXR, en, mo, eF, t, cm, pm, Bt, ac, eM, mx, II, nw, IB); #c1(CST1) c2(NP_001889) c3(cystatin-SN precursor) c4(122013) c5(122014, 122015, 122016, 122017, 122018, 122019, 122020, 122021, 122022, 122023) c6( ) c7(bL, bE, r, aA, ahr, bB, aF, q, X, ad); #c1(CST2) c2(NP_001313) c3(cystatin-SA precursor) c4(116737) c5(116738, 116739, 116740, 116741, 116742, 116743) c6( ) c7(aXT, Wh, ac, nv, m, R, t, H, iK, af, y); #c1(CST3) c2(NP_001275543) c3(cystatin-C precursor) c4(106827, 106828) c5(106829, 106830, 106831, 106832, 106833, 106834, 106835, 106836, 106837, 106838, 106839, 106840, 106841, 106842) c6( ) c7(T, aXW, ea, e, l, aR, ip, aao, x, aXV, Ex, H, hm, eG, aW, hl, as, sz, aBO, U, R, dD, gU, aw, cQ, aj, PJ, fK, cd, ke, BI, Hx, yZ, Um, aXT, aXU, cM, W, dB, aXX, FV, hm, at, E, bL, eR, cz, GC, v, j, yU, V, J, WY, rS, aT, qG, an, ae, af, bA, ak, bf, iU, aaE, In, aaO, wA, iK, tj, ac, c, yW, dh, dy, bt, aDj, aaI, eq, ad, fU, sO, Dq, acQ, sj, d, azS, IU, cW, bz, dr, dJ, kq, aS, y, us); #c1(CST4) c2(NP_001890) c3(cystatin-S precursor) c4(122024, 122025) c5(122026, 122027, 122028, 122029, 122030, 122031) c6( ) c7(aAV); #c1(CST5) c2(NP_001891) c3(cystatin-D precursor) c4(122032) c5(122033, 122034, 122035, 122036, 122037, 122038) c6( ) c7(aXT, Wh, nv, m, R, t, H, iK, af, ad); #c1(CST6) c2(NP_001314) c3(cystatin-M precursor) c4(116744) c5(116745, 116746, 116747, 116748, 116749, 116750) c6( ) c7(T, aC, Wh, if, ci, qN, eA, ad, nv, aT, IQ, Dz, H, ae, af, aXT, MD, gt, aW, Y, cr, g, mo, eE, t, iK, dr, fk, eM, nB, dB, m, R); #c1(CST7) c2(NP_003641) c3(cystatin-F precursor) c4(139830, 139831) c5(139832, 139833, 139834, 139835, 139836, 139837, 139838, 139839, 139840, 139841, 139842, 139843, 139844, 139845, 139846, 139847) c6(139848, 139849, 139850, 139851) c7(T, aA, aOB, aj, xl, aLY); #c1(CST8) c2(NP_005483) c3(cystatin-8 precursor) c4(156607, 156608) c5(156609, 156610, 156611, 156612, 156613, 156614, 156615, 156616, 156617, 156618, 156619, 156620, 156621, 156622, 156623, 156624) c6(156625, 156626, 156627, 156628) c7(gU, Y, aXY, af); #c1(CST9) c2(NP_001008693) c3(cystatin-9 precursor) c4(23352) c5(23353, 23354, 23355, 23356, 23357, 23358, 23359, 23360) c6(23361, 23362) c7(oO, aW, e, aT, dy, ci, sj); #c1(CST9L) c2(NP_542177) c3(cystatin-9-like precursor) c4(232191, 232192) c5(232193, 232194, 232195, 232196, 232197, 232198, 232199, 232200, 232201, 232202, 232203, 232204, 232205, 232206, 232207, 232208) c6(232209, 232210, 232211, 232212) c7(e, UA, sj); #c1(CSTA) c2(NP_005204) c3(cystatin-A) c4(153884) c5(153885, 153886, 153887, 153888, 153889, 153890) c6( ) c7(bM, T, aXZ, aj, J, ad, aT, K, ae, aiJ, d, qt, aW, Y, ff, cr, en, g, eE, dw, iK, bz, eM, dB, at, it); #c1(CSTB) c2(NP_000091) c3(cystatin-B) c4(1661) c5(1662, 1663, 1664, 1665, 1666, 1667) c6( ) c7(T, ha, it, iD, ci, yU, aR, ad, ip, Mo, yt, aT, h, yT, yZ, Sq, hu, ae, yr, d, agT, aW, Y, g, as, f, XL bz, cM, akq, yX, ky, aYa, aYb, aem, aPS, U, KA, Bh, B, vi); #c1(CSTF1) c2(NP_001315) c3(cleavage stimulation factor subunit 1) c4(116751, 116752, 116753, 116754) c5(116755, 116756, 116757, 116758, 116759, 116760, 116761, 116762, 116763, 116764, 116765, 116766, 116767, 116768, 116769, 116770, 116771, 116772, 116773, 116774, 116775, 116776, 116777, 116778, 116779, 116780, 116781, 116782) c6( ) c7(at, dL); #c1(CSTF2) c2(NP_001316) c3(cleavage stimulation factor subunit 2) c4(116783, 116784, 116785) c5(116786, 116787, 116788, 116789, 116790, 116791, 116792, 116793, 116794, 116795, 116796, 116797) c6( ) c7(bz, eM); #c1(CSTF2) c2(XP_011529176) c3(cleavage stimulation factor subunit 2 isoform X2) c4( ) c5(324547, 324548, 324549, 324550, 324551, 324552) c6( ) c7(bz, eM); #c1(CSTF2T) c2(NP_056050) c3(cleavage stimulation factor subunit 2 tau variant) c4(185336) c5(185337, 185338, 185339, 185340, 185341, 185342, 185343, 185344, 185345, 185346, 185347, 185348, 185349, 185350, 185351, 185352, 185353, 185354, 185355, 185356, 185357, 185358, 185359, 185360, 185361, 185362, 185363, 185364, 185365, 185366, 185367, 185368, 185369) c6( ) c7(gU); #c1(CSTL1) c2(NP_612140) c3(cystatin-like 1 precursor) c4(236013, 236014) c5(236015, 236016, 236017, 236018, 236019, 236020, 236021, 236022, 236023, 236024, 236025, 236026, 236027, 236028, 236029, 236030, 236031, 236032, 236033, 236034, 236035) c6(236036, 236037, 236038, 236039, 236040) c7(an); #c1(CT45A1) c2(NP_001017417) c3(cancer/testis antigen family 45 member A1) c4(26471) c5(26472, 26473, 26474, 26475, 26476, 26477) c6( ) c7(T, no, wu, aW, pX, aT m, g, bu, wm, t); #c1(CT55) c2(NP_001026875) c3(cancer/testis antigen 55 isoform 1 precursor) c4(29778) c5(29779, 29780, 29781, 29782, 29783, 29784) c6( ) c7(os, Ub, aW, aT, nZ, m, t); #c1(CT55) c2(NP_060333) c3(cancer/testis antigen 55 isoform 2 precursor) c4(195428) c5(195429, 195430, 195431, 195432, 195433, 195434) c6( ) c7(os, Ub, aW, aT, oZ, m, t); #c1(CT83) c2(NP_001017978) c3(kita-kyushu lung cancer antigen 1) c4(26710) c5(26711, 26712, 26713, 26714, 26715, 26716) c6( ) c7(ra, eM, ff, bu, g, en, bz, ad); #c1(CTAG1A) c2(NP_640343) c3(cancer/testis antigen 1) c4(238472) c5(238473, 238474, 238475, 238476, 238477, 238478, 238479, 238480, 238481, 238482) c6( ) c7(T, id, wu, if, ht, al, jh, fd, n, ze, qN, AO, iJ, q, ad, eA, aHy, iu, BI, ib, WB, nv, aT, h, wm, hu, is, fb, ae, afu, je, iu, nO, aW, Y, Lf, Aq, ff, r, en, bu, g, t, cm, bz, ck, iM, Qf, eM, iT, au, m, bt, it, B, LS, vi); #c1(CTAG2) c2(NP_066274) c3(cancer/testis antigen 2 isoform LAGE-1b) c4(206898) c5(206899, 206900, 206901, 206902, 206903, 206904) c6( ) c7(T, id, Y, au, ht, ff, bu, r, aA, it, fd, m, en, hu, g, t, aHy, ae, q, ad); #c1(CTAG2) c2(NP_758965) c3(cancer/testis antigen 2 isoform LAGE-1a) c4(249426, 249427) c5(249428, 249429, 249430, 249431, 249432, 249433, 249434, 249435, 249436, 249437, 249438, 249439) c6( ) c7(T, id, Y, au, ht, ff, bu, r, aA, it, fd, m, en, hu, g, t, aHy, ae, q, ad); #c1(CTAGE1) c2(NP_758441) c3(cTAGE family member 2) c4(249160) c5(249161, 249162, 249163, 249164, 249165, 249166) c6( ) c7(hb, T); #c1(CTAGE5) c2(NP_001234918) c3(cTAGE family member 5 isoform 6) c4(87767) c5(87768, 87769, 87770, 87771, 87772, 87773) c6( ) c7(bE, T, Y, ip, aYc); #c1(CTAGE5) c2(NP_005921) c3(cTAGE family member 5 isoform 1) c4(160378, 160379) c5(160380, 160381, 160382, 160383, 160384, 160385, 180386, 160387, 160388, 160389, 160390, 160391, 160392) c6( ) c7(bE, T, Y, ip, aYc); #c1(CTAGE5) c2(NP_976229) c3(cTAGE family member 5 isoform 2) c4(263014, 263015, 263016) c5(263017, 263018, 263019, 263020, 263021, 263022, 263023, 263024, 263025, 263026, 263027, 263028) c6( ) c7(bE, T, Y, ip, aYc); #c1(CTAGE5) c2(NP_976230) c3(cTAGE family member 5 isoform 3) c4(263029) c5(263030, 263031, 263032, 263033, 263034, 263035) c6( ) c7(bE, T, Y, ip, aYc); #c1(CTAGE5) c2(NP_976231) c3(cTAGE family member 5 isoform 4) c4( ) c5(263036, 263037, 263038, 263039, 263040) c6( ) c7(bE, T, Y, ip, aYc); #c1(CTBP1) c2(NP_001012632) c3(C-terminal-binding protein 1 isoform 2) c4(25101) c5(25102, 25103, 25104, 25105, 25106, 25107, 25108, 25109, 25110, 25111, 25112, 25113, 25114, 25115, 25116, 25117, 25118, 25119) c6( ) c7(bF, T, os, ac, fR, s, aW, Y, aT, r, aA, oZ, v, hR, ci, aF, bw, ae, q, ad); #c1(CTBP1) c2(NP_001319) c3(C-terminal-binding protein 1 isoform 1) c4(116798) c5(116799, 116800, 116801, 116802, 116803, 116804) c6( ) c7(bF, T, os, ac, fR, s, aW, Y, aT, r, aA, oZ, v, hR, ci, aF, bw, ae, q, ad); #c1(CTBP1) c2(XP_011511698) c3(C-terminal-binding protein 1 isoform X2) c4(302430, 302431) c5( ) c6( ) c7(bF, T, os, ac, fR, s, aW, Y, aT, r, aA, oZ, v, hR, ci, aF, bw, ae, q, ad); #c1(CTBP2) c2(NP_001277143) c3(C-terminal-binding protein 2 isoform 1) c4(109122) c5(109123, 109124, 109125, 109126, 109127, 109128, 109129, 109130, 109131, 109132, 109133, 109134, 109135, 109136, 109137, 109138, 109139, 109140) c6( ) c7(ck, T, aW, hL, aT, m, cl, t, it, ad); #c1(CTBP2) c2(NP_073713) c3(C-terminal-binding protein 2 isoform 2) c4(213192, 213193) c5(213194, 213195, 213196, 213197, 213198, 213199) c6( ) c7(ck, T, aW, hL, aT, m, cl, t, it, ad); #c1(CTBP2) c2(XP_011537651) c3(C-terminal-binding protein 2 isoform X2) c4( ) c5(335216) c6( ) c7(ck, T, aW, hL, aT, m, cl, t, it, ad); #c1(CTBP2) c2(XP_011537660) c3(C-terminal-binding protein 2 isoform X3) c4( ) c5(335217, 335218, 335219, 335220, 335221) c6( ) c7(ck, T, aW, hL, al m, cl, t, it, ad); #c1(CTC1) c2(NP_079375) c3(CST complex subunit CTC1) c4(217848) c5(217849, 217850, 217851, 217852, 217853, 217854) c6( ) c7(sb, hb, ajw, IS, aYe, aYd); #c1(CTC1) c2(XP_011522312) c3(CST complex subunit CTC1 isoform X1) c4(317009) c5(317010, 317011, 317012, 317013, 317014, 317015) c6( ) c7(sb, hb, ajw, IS, aYe, aYd); #c1(CTCF) c2(NP_001177951) c3(transcriptional repressor CTCF isoform 2) c4(73230) c5(73231, 73232, 73233, 73234, 73235) c6( ) c7(cZ, T, fR, mL aMv, j, ci, nA, AO, aYh, q, ad, er, eW, x, av, aT, aYf, dL, dd, he, eL, qw, je, ND, vT, qt, aW, ff, az, LO, eH, r, Ej, Ku, bu, en, t, cl, bz, eF, dr, dR, ck, wT, iM, bP, aYg, hL, aNL, rx, k, m, ei, bt); #c1(CTCF) c2(NP_006556) c3(transcriptional repressor CTCF isoform 1) c4(166220) c5(166221, 166222, 166223, 166224, 166225, 166226, 166227, 166228) c6( ) c7(cZ, T, fR, mL aMv, j, ci, nA, AO, aYh, q, ad, er, eW, x, av, aT, aYf, dL, dd, he, eL, qw, je, ND, vT, qt, aW, ff, az, LO, eH, r, Ej, Ku, bu, en, t, cl, bz, eF, dr, dR, ck, wT, iM, bP, aYg, hL, aNL, rx, k, m, ei, bt); #c1(CTCFL) c2(NP_001255970) c3(transcriptional repressor CTCFL isoform 1) c4(94996) c5(94997, 94998, 94999, 95000, 95001, 95002, 95003, 95004, 95005, 95006, 95007) c6( ) c7(T, aYi, ht, n, ci, x, av, hw, TK, aT, hu, eL, vT, aW, Y, ff, LO, Qm, en, bu, cl, t, iK, bz, wT, bE, hL, np, m, k); #c1(CTCFL) c2(NP_001255972) c3(transcriptional repressor CTCFL isoform 3) c4(95008, 95009) c5(95010, 95011, 95012, 95013, 95014, 95015) c6( ) c7(T, aYi, ht, n, ci, x, av, hw, TK, aT, hu, eL, vT, aW, Y, ff, LO, Qm, en, bu, cl, t, iK, bz, wT, bE, hL, np, m, k); #c1(CTCFL) c2(NP_001255973) c3(transcriptional repressor CTCFL isoform 4) c4(95016, 95017) c5(95018, 95019, 95020, 95021, 95022, 95023) c6( ) c7(T, aYi, ht, n, ci, x, av, hw, TK, aT, hu, eL, vT, aW, Y, ff, LO, Qm, en, bu, cl, t, iK, bz, wT, bE, hL, np, m, k); #c1(CTCFL) c2(NP_001255974) c3(transcriptional repressor CTCFL isoform 5) c4(95024) c5(95025, 95026) c6( ) c7(T, aYi, ht, n, ci, x, av, hw, TK, aT, hu, eL, vT, aW, Y, ff, LO, Qm, en, bu, cl, t, iK, bz, wT, bE, hL, np, m, k); #c1(CTCFL) c2(NP_001255975) c3(transcriptional repressor CTCFL isoform 6) c4(95027, 95028) c5(95029, 95030, 95031, 95032, 95033, 95034) c6( ) c7(T, aYi, ht, n, ci, x, av, hw, TK, aT, hu, eL, vT, aW, Y, ff, LO, Qm, en, bu, cl, t, iK, bz, wT, bE, hL, np, m, k); #c1(CTCFL) c2(NP_001255976) c3(transcriptional repressor CTCFL isoform 7) c4(95035) c5(95036, 95037, 95038, 95039, 95040, 95041, 95042, 95043, 95044, 95045, 95046, 95047, 95048, 95049, 95050, 95051, 95052) c6( ) c7(T, aYi, ht, n, ci, x, av, hw, TK, aT, hu, eL, vT, aW, Y, ff, LO, Qm, en, bu, cl, t, iK, bz, wT, bE, hL, np, m, k); #c1(CTCFL) c2(NP_001255977) c3(transcriptional repressor CTCFL isoform 8) c4(95053) c5(95054, 95055, 95056, 95057, 95058, 95059) c6( ) c7(T, aYi, ht, n, ci, x, av, hw, TK, aT, hu, eL, vT, aW, Y, ff, LO, Qm, en, bu, cl, t, iK, bz, wT, bE, hL, np, m, k); #c1(CTCFL) c2(NP_001255978) c3(transcriptional repressor CTCFL isoform 9) c4( ) c5(95060) c6( ) c7(T, aYi, ht, n, ci, x, av, hw, TK, aT, hu, eL, vT, aW, Y, ff, LO, Qm, en, bu, cl, t, iK, bz, wT, bE, hL, np, m, k); #c1(CTCFL) c2(NP_001255979) c3(transcriptional repressor CTCFL isoform 10) c4( ) c5(95061, 95062, 95063, 95064, 95065, 95066, 95067, 95068) c6( ) c7(T, aYi, ht, n, ci, x, av, hw, TK, aT, hu, eL, vT, aW, Y, ff, LO, Qm, en, bu, cl, t, iK, bz, wT, bE, hL, np, m, k); #c1(CTCFL) c2(NP_001255983) c3(transcriptional repressor CTCFL isoform 12) c4( ) c5(95069, 95070, 95071, 95072, 95073) c6( ) c7(T, aYi, ht, n, ci, x, av, hw, TK, aT, hu, eL, vT, aW, Y, ff, LO, Qm, en, bu, cl, t, iK, bz, wT, bE, hL, np, m, k); #c1(CTDP1) c2(NP_004706) c3(RNA polymerase II subunit A C-terminal domain phosphatase isoform 1) c4(148967) c5(148968, 148969, 148970, 148971, 148972, 148973) c6( ) c7(agU, ad, bK, aYj, c); #c1(CTDP1) c2(NP_430255) c3(RNA polymerase II subunit A C-terminal domain phosphatase isoform 2) c4(229075) c5(229076, 229077, 229078, 229079, 229080, 229081, 229082, 229083) c6( ) c7(agU, ad, bK, aYj, c); #c1(CTDSP1) c2(NP_001193807) c3(carboxy-terminal domain RNA polymerase II polypeptide A small phosphatase 1 isoform 3) c4(82626) c5(82627, 82628, 82629, 82630, 82631, 82632) c6( ) c7(T, iU, iT, WB, aW, aT, fd, bu); #c1(CTDSP1) c2(NP_067021) c3(carboxy-terminal domain RNA polymerase II polypeptide A small phosphatase 1 isoform 1) c4(208448) c5(208449, 208450, 208451, 208452, 208453, 208454) c6( ) c7(T, iU, iT, WB, aW, aT, fd, bu); #c1(CTDSP2) c2(NP_005721) c3(carboxy-terminal domain RNA polymerase II polypeptide A small phosphatase 2) c4(158822) c5(158823, 158824, 158825, 158826, 158827, 158828) c6( ) c7(af); #c1(CTDSPL) c2(NP_001008393) c3(CTD small phosphatase-like protein isoform 1) c4(23146) c5(23147, 23148, 23149, 23150, 23151, 23152) c6( ) c7(es, T, av, eM, iT, aW, ff, iK, aT, hn, fr, ci, en, qN, g, ht, ad); #c1(CTDSPL) c2(NP_005799) c3(CTD small phosphatase-like protein isoform 2) c4(159553) c5(159554, 159555, 159556, 159557, 159558, 159559) c6( ) c7(es, T, av, eM, iT, aW, ff, iK, aT, hn, fr, ci, en, qN, g, ht, ad); #c1(CTF1) c2(NP_001136016) c3(cardiotrophin-1 isoform 2) c4(54012) c5(54013, 54014, 54015, 54016, 54017, 54018) c6( ) c7(bL, dD, IT, OI, ea, e, cz, v, eq, cd, Ae, bl, K, yo, cH, JV, aq, uU, kk, qa, c, mx, U, gZ, dy, ei, B, L); #c1(CTF1) c2(NP_001321) c3(cardiotrophin-1 isoform 1) c4(116805) c5(116806, 116807, 116808, 116809, 116810, 116811, 116812, 116813, 116814, 116815, 116816, 116817, 116818, 116819, 116820, 116821116822, 116823, 116824, 116825, 116826, 116827, 116828, 116829, 116830, 116831, 116832, 116833, 116834, 116835, 116836, 116837, 116838, 116839, 116840, 116841, 116842, 116843, 116844, 116845, 116846, 116847, 116848, 116849, 116850, 116851, 116852, 116853, 116854, 116855, 116856, 116857, 116858, 116859, 116860, 116861, 116862, 116863, 116864, 116865, 116866, 116867, 116868, 116869, 116870, 116871116872, 116873, 116874, 116875, 116876, 116877, 116878, 116879, 116880, 116881, 116882, 116883, 116884, 116885, 116886, 116887, 116888, 116889, 116890, 116891, 116892, 116893, 116894, 116895, 116896, 116897) c6( ) c7(bL, dD, IT, OI, ea, e, cz, v, eq, cd, Ae, bl, K, yo, cH, JV, aq, uU, kk, qa, c, mx, U, gZ, dy, ei, B, L); #c1(CTGF) c2(NP_001892) c3(connective tissue growth factor precursor) c4(122039) c5(122040, 122041, 122042, 122043, 122044, 122045) c6( ) c7(oO, bM, T, aC, ea, if, al, fd, IR, ci, Lw, aY, ip, x, aE, ws, bW, aYm, atD, K, be, cp, aa, li, eG, dH, aW, hl, g, eF, ou, eM, nB, vA, vy, uJ, wx, k, Hb, m, fy, iu, FW, dD, pG, aw, n, cU, aj, fr, uE, qN, cd, ai, zw, eV, aNj, ey, pj, hB, Ha, Dg, A, aiB, anP, EU, fQ, aq, fe, kp, dw, aYo, op, vD, at, it, B, vQ, hL, fM, eR, DD, fG, oe, jx, pQ, eX, aA, cz, fF, v, j, vp, aGK, q, J, er, eA, aT, cy, aLM, bq, an, IM, af, hM, bf, Y, r, wl, aYp, Io, en, t, iK, pb, ck, aYk, sS, QG, DW, dh, aYI, dy, Gg, hS, kh, MH, uG, aNk, jh, dG, eq, jE, hX, dP, fU, av, hd, F, ib, sN, io, vw, Dj, vB, ji, amY, iL, d, IR, ff, xs, eH, Ce, aF, hp, Fq, iV, bz, LB, gk, Ew, gZ, Hs, IC, X, y, aYn); #c1(CTHRC1) c2(NP_001243028) c3(collagen triple helix repeat-containing protein 1 isoform 2) c4(89625, 89626) c5(89627, 89628, 89629, 89630, 89631, 89632, 89633, 89634, 89635, 89636, 89637, 89638) c6( ) c7(T, pf, aA, bB, n, ci, Rk, ai, q, aE, aT, cp, VC, aW, Y, ff, xs, LZ, r, aF, en, bE, y, B); #c1(CTHRC1) c2(NP_612464) c3(collagen triple helix repeat-containing protein 1 isoform 1 precursor) c4(236578) c5(236579, 236580, 236581, 236582, 236583, 236584) c6( ) c7(T, pf, aA, bB, n, ci, Rk, ai, q, aE, aT, cp, VC, aW, Y, ff, xs, LZ, r, aF, en, bE, y, B); #c1(CTIF) c2(NP_001135869) c3(CBP80/20-dependent translation initiation factor isoform 2) c4(53441) c5(53442, 53443, 53444, 53445, 53446, 53447) c6( ) c7(aC, an); #c1(CTIF) c2(NP_055587) c3(CBP80/20-dependent translation initiation factor isoform 1) c4(182137, 182138) c5(182139, 182140, 182141, 182142, 182143, 182144) c6( ) c7(aC, an); #c1(CTIF) c2(XP_006722649) c3(CBP80/20-dependent translation initiation factor isoform X4) c4( ) c5(294789, 294790, 294791, 294792, 294793, 294794) c6( ) c7(aC, an); #c1(CTLA4) c2(NP_001032720) c3(cytotoxic T-lymphocyte protein 4 isoform CTLA-4delTM precursor) c4(31418, 31419, 31420, 31421) c5(31422, 31423, 31424, 31425, 31426, 31427, 31428, 31429, 31430, 31431, 31432, 31433, 31434, 31435, 31436, 31437, 31438, 31439) c6( ) c7(oO, bM, T, fR, ea, if, al, fd, cL, ur, ci, qj, aFV, Jx, aY, bh, Qp, Tz, IR, x, AW, xy, xE, aE, rw, aYy, Ds, K, wt, DY, hH, be, cp, hm, zQ, aW, Oj, axu, HA, hl, XC, fc, hN, g, aFU, ve, aYA, uC, hJ, eE, eF, bw, ha, y, yl, eM, Jr, Fh, aYw, iT, aDs, mx, cj, uo, k, IS, uL, qR, abh, dD, sQ, Hm, Io, yG, aw, fN, n, aj, oY, fr, aFF, uE, pM, aYv, ml, qN, aHj, ai, aPb, ft, no, cc, aYr, aMj, Ne, alO, h, hn, dL, aFX, DM, he, aDp, OV, mR, CN, anP, A, on, sp, OX, CM, ge, fe, aq, po, kp, aMJ, mo, kk, jT, cM, vo, Wt, ar, W, aYq, hk, If, JM, hm, at, uz, aEG, ut, eo, fL, bk, gg, B, cn, bL, Ob, Dw, DM, fM, dA, eR, DD, aYB, dK, fG, yk, jx, aA, hz, j, bX, Qo, abC, V, q, J, o, pd, mP, Ig, apJ, Id, afQ, yg, aT, rS, yu, bK, hK, DX, IM, ae, eu, qw, hM, xR, oV, Y, fO, aFT, IC, r, Pg, bg, aHU, Io, aDm, aYz, en, zM, pb, OC, IY, Cv, ck, cT, sS, cl, OW, ac, BU, ig, yW, hc, aGi, AH, hr, aYx, wR, dy, gT, bt, zA, vi, gx, Kd, Ke, dM, axd, iW, jh, auq, dG, oH, jE, fu, uu, eq, wV, pz, aYs, mC, ad, kL, aFW, dP, hX, av, wD, F, fX, ds, qh, oW, hD, JK, ji, IQ, nJ, yF, uQ, DI, IU, qZ, asf, ff, aFE, eH, aYu, cr, Mz, eZ, hp, BG, iV, bz, aYt, TA, es, Bv, axs, Lj, z, gZ, ei, oQ, hE, X, hv, pC); #c1(CTLA4) c2(NP_005205) c3(cytotoxic T-lymphocyte protein 4 isoform CTLA4-TM precursor) c4(153891) c5(153892, 153893, 153894, 153895, 153896, 153897, 153898, 153899, 153900, 153901, 153902, 153903, 153904, 153905, 153906, 153907, 153908, 153909, 153910, 153911, 153912, 153913, 153914, 153915, 153916, 153917, 153918, 153919, 153920, 153921, 153922, 153923, 153924, 153925, 153926, 153927, 153928, 153929, 153930, 153931, 153932, 153933, 153934, 153935, 153936, 153937, 153938, 153939, 153940, 153941, 153942, 153943, 153944, 153945, 153946, 153947, 153948, 153949, 153950, 153951, 153952, 153953, 153954, 153955, 153956, 153957, 153958, 153959, 153960, 153961, 153962, 153963, 153964, 153965, 153966, 153967, 153968, 153969, 153970, 153971, 153972, 153973, 153974, 153975, 153976, 153977, 153978, 153979, 153980, 153981, 153982, 153983, 153984) c6(153985) c7(oO, bM, T, fR, ea, if, al, fd, cL, ur, ci, qj, aFV, Jx, aY, bh, Qp, Tz, IR, x, AW, xy, xE, aE, rw, aYy, Ds, K, wt, DY, hH, be, cp, hm, zQ, aW, Oj, axu, HA, hl, XC, fc, hN, g, aFU, ve, aYA, uC, hJ, eE, eF, bw, ha, y, yl, eM, Jr, Fh, aYw, iT, aDs, mx, cj, uo, k, IS, uL, qR, abh, dD, sQ, Hm, Io, yG, aw, fN, n, aj, oY, fr, aFF, uE, pM, aYv, mI, qN, aHj, ai, aPb, ft, no, cc, aYr, aMj, Ne, alO, h, hn, dL, aFX, DM, he, aDp, OV, mR, CN, anP, A, oo, sp, OX, CM, ge, fe, aq, po, kp, aMJ, mo, kk, jT, cM, vo, Wt, ar, W, aYq, hk, If, JM, hm, at, uz, aEG, ut, eo, fL, bk, gg, B, cn, bL, Ob, Dw, DM, fM, dA, eR, DD, aYB, dK, fG, yk, jx, aA, hz, j, bX, Qo, abC, V, q, J, o, pd, mP, Ig, apJ, Id, afQ, yg, aT, rS, yu, bK, hK, DX, IM, ae, eu, qw, hM, xR, oV, Y, fO, aFT, IG, r, Pg, bg, aHU, Io, aDm, aYz, en, zM, pb, DC, IY, Cv, ck, cT, sS, cl, OW, ac, BU, ig, yW, hc, aGi, AH, hr, aYx, wR, dy, gT, bt, zA, vi, gx, Kd, Ke, dM, axd, iW, jh, auq, dG, oH, jE, fu, uu, eq, wV, pz, aYs, mC, ad, kL, aFW, dP, hX, av, wD, F, fX, ds, qh, oW, hD, JK, ji, IQ, nJ, yF, uQ, DL IU, qZ, asf, ff, aFE, eH, aYu, cr, Mz, eZ, hp, BG, iV, bz, aYt, TA, es, Bv, axs, Lj, z, gZ, ei, oQ, hE, X, hv, pC); #c1(CTNNA1) c2(NP_001277236) c3(catenin alpha-1 isoform 2) c4( ) c5(109253, 109254, 109255, 109256, 109257, 109258, 109259, 109260, 109261, 109262, 109263, 109264, 109265, 109266, 109267, 109268, 109269, 109270, 109271, 109272, 109273, 109274, 109275, 109276, 109277, 109278, 109279, 109280, 109281, 109282, 109283, 109284, 109285, 109286, 109287, 109288, 109289, 109290, 109291, 109292, 109293, 109294) c6( ) c7(bM, T, aC, fR, ht, bs, aA, n, bB, ci, q, hr, ad, er, eA, av, Vr, pX, aT, dL, ae, eL, d, s, aW, ff, gK, r, dq, aF, en, cl, as, t, bw, ck, bF, bE, m, EY, alm, bt, it); #c1(CTNNA1) c2(NP_001277239) c3(catenin alpha-1 isoform 4 precursor) c4( ) c5(109295, 109296, 109297, 109298, 109299, 109300) c6( ) c7(bM, T, aC, fR, ht, bs, aA, n, bB, ci, q, hr, ad, er, eA, av, Vr, pX, aT, dL, ae, eL, d, s, aW, ff, gK, r, dq, aF, en, cl, as, t, bw, ck, bF, bE, m, EY, alm, bt, it); #c1(CTNNA1) c2(NP_001894) c3(catenin alpha-1 isoform 1) c4(122046, 122047, 122048, 122049, 122050, 122051, 122052, 122053, 122054, 122055, 122056, 122057) c5(122058, 122059, 122060, 122061, 122062, 122063, 122064, 122065, 122066, 122067, 122068, 122069, 122070, 122071, 122072, 122073, 122074, 122075, 122076, 122077, 122078, 122079, 122080, 122081) c6( ) c7(bM, T, aC, fR, ht, bs, aA, n, bB, ci, q, hr, ad, er, eA, av, Vr, pX, aT, dL, ae, eL, d, s, aW, ff, gK, r, dg, aF, en, cl, as, t, bw, ck, bF, bE, m, EY, alm, bt, it); #c1(CTNNA2) c2(NP_001158355) c3(catenin alpha-2 isoform 2) c4(63615, 63616) c5(63617, 63618, 63619, 63620, 63621, 63622, 63623, 63624, 63625, 63626, 63627, 63628, 63629, 63630, 63631, 63632) c6( ) c7(aC, oe, aA, bK, j, ci, iK, fq); #c1(CTNNA2) c2(NP_001269526) c3(catenin alpha-2 isoform 3) c4(101805) c5(101806, 101807, 101808, 101809, 101810, 101811) c6( ) c7(aC, oe, aA, bK, j, ci, iK, fq); #c1(CTNNA2) c2(NP_001269527) c3(catenin alpha-2 isoform 4) c4(101812) c5(101813, 101814, 101815, 101816, 101817, 101818, 101819, 101820, 101821, 101822) c6( ) c7(aC, oe, aA, bK, j, ci, iK, fq); #c1(CTNNA2) c2(NP_001269528) c3(catenin alpha-2 isoform 5) c4(101823) c5(101824, 101825, 101826, 101827, 101828, 101829) c6( ) c7(aC, oe, aA, bK, j, ci, iK, fq); #c1(CTNNA2) c2(NP_004380) c3(catenin alpha-2 isoform 1) c4(145942, 145943) c5(145944, 145945, 145946, 145947, 145948, 145949, 145950, 145951, 145952, 145953, 145954, 145955) c6( ) c7(aC, oe, aA, bK, j, ci, iK, fq); #c1(CTNNA3) c2(NP_001278062) c3(catenin alpha-3 isoform b) c4(109427) c5(109428, 109429, 109430, 109431, 109432, 109433, 109434, 109435, 109436, 109437, 109438, 109439, 109440, 109441, 109442, 109443, 109444, 109445, 109446, 109447) c6( ) c7(bM, T, id, aw, EQ, n, ci, V, q, er, aYC, XY, dL, an, af, anR, eZ, r, dq, wK, mx, IB, rk); #c1(CTNNA3) c2(NP_037398) c3(catenin alpha-3 isoform a) c4( ) c5(175266, 175267, 175268, 175269, 175270, 175271, 175272, 175273, 175274, 175275, 175276, 175277, 175278, 175279, 175280) c6( ) c7(bM, T, id, aw, EQ, n, ci, V, q, er, aYC, XY, dL, an, af, anR, eZ, r, dq, wK, mx, IB, rk); #c1(CTNNA3) c2(XP_005269774) c3(catenin alpha-3 isoform X5) c4(282803, 282804, 282805) c5(282806) c6( ) c7(bM, T, id, aw, EQ, n, ci, V, q, er, aYC, XY, dL, an, af, anR, eZ, r, dq, wK, mx, IB, rk); #c1(CTNNA3) c2(XP_011538029) c3(catenin alpha-3 isoform X4) c4( ) c5(335587) c6( ) c7(bM, T, id, aw, EQ, n, ci, V, q, er, aYC, XY, dL, an, af, anR, eZ, r, dq, wK, mx, IB, rk); #c1(CTNNAL1) c2(NP_001273903) c3(alpha-catulin isoform b) c4(105875, 105876, 105877) c5(105878, 105879, 105880, 105881, 105882, 105883, 105884, 105885, 105886, 105887, 105888, 105889, 105890, 105891, 105892, 105893, 105894, 105895) c6( ) c7(bM, T, cF, aqJ, Y, iB, ff, en); #c1(CTNNAL1) c2(NP_003789) c3(alpha-catulin isoform a) c4(140821, 140822) c5(140823, 140824, 140825, 140826, 140827, 140828, 140829, 140830, 140831, 140832, 140833, 140834) c6( ) c7(bM, T, cF, aqJ, Y, iB, ff, en); #c1(CTNNB1) c2(NP_001091679) c3(catenin beta-1) c4(38674, 38675) c5(38676, 38677, 38678, 38679, 38680, 38681, 38682, 38683, 38684, 38685, 38686, 38687, 38688, 38689, 38690, 38691, 38692, 38693, 38694, 38695, 38696, 38697, 38698, 38699, 38700, 38701, 38702, 38703) c6( ) c7(T, aC, fR, if, al, aEf, fd, bB, ci, aEe, ip, x, afr, Iv, iv, K, eL, Qe, yo, aW, Az, hl, g, as, hJ, ve, eF, auD, iA, nB, wK, vA, U, cj, iS, m, YS, iu, ZF, iB, RX, ht, NT, n, oY, aYH, fr, qN, alD, Yc, apG, h, aEe, Gw, dL, bl, hB, aYF, Yl, hi, iw, ge, aq, Hu, yq, pm, cM, auC, np, Ye, iO, YE, dB, hk, Vy, hL, at, B, jp, aA, hy, Qo, aYD, q, er, eA, aeZ, mj, BJ, eO, qK, HC, aT, ae, af, jf, s, iU, Y, r, lo, en, cl, t, iK, aYI, ck, sS, nM, Dy, gX, aJS, bt, hS, GI, aEh, atS, aYE, ad, afb, hX, dP, av, hd, ib, yt, io, Ti, d, BN, BU, aYG, ff, eH, dq, aF, app, iV, iR, aEm, HI, bz, bF, es, gk, pc, bE, Gu, MG, X); #c1(CTNNB1) c2(XP_006713048) c3(catenin beta-1 isoform X3) c4(286986, 286987, 286988) c5(286989, 286990, 286991, 286992, 286993, 286994, 286995, 286996, 286997, 286998, 286999, 287000, 287001, 287002, 287003, 287004, 287005, 287006, 287007) c6( ) c7(T, aC, fR, if, al, aEf, fd, bB, ci, aEe, ip, x, afr, Iv, iv, K, eL, Qe, yo, aW, Az, hl, g, as, hJ, ve, eF, auD, iA, nB, wK, vA, U, cj, iS, m, YS, iu, ZF, iB, RX, ht, NT, n, oY, aYH, fr, qN, alD, Yc, apG, h, aEe, Gw, dL, bl, hB, aYF, Yl, hi, iw, ge, aq, Hu, yq, pm, cM, auC, op, Ye, iO, YE, dB, hk, Vy, hL, at, B, jp, aA, hy, Qo, aYD, q, er, eA, aeZ, mj, BJ, eO, qK, HC, aT, ae, af, jf, s, iU, Y, r, lo, en, cl, t, iK, aYI, ck, sS, nM, Dy, gX, aJS, bt, hS, GI, aEh, atS, aYE, ad, afb, hX, dP, av, hd, ib, yt, io, Ti, d, BN, BO, aYG, ff, eH, dq, aF, app, iV, iR, aEm, HI, bz, bF, es, gk, pc, bE, Gu, MG, X); #c1(CTNNBL1) c2(NP_001268424) c3(beta-catenin-like protein 1 isoform 2) c4(99899) c5(99900, 99901, 99902, 99903, 99904, 99905, 99906, 99907, 99908, 99909) c6( ) c7(sc, bM, T, aEj, jh, v, fr, ci, q, ad, Hx, ft, vJ, aT, vH, UD, dL, K, jf, Nr, aW, Y, r, po, aF, g, t, Nq, z, cj, EY, B); #c1(CTNNBL1) c2(NP_110517) c3(beta-catenin-like protein 1 isoform 1) c4(220492, 220493) c5(220494, 220495, 220496, 220497, 220498, 220499, 220500, 220501) c6( ) c7(sc, bM, T, aEj, jh, v, fr, ci, q, ad, Hx, ft, vJ, aT, vH, UD, dL, K, jf, Nr, aW, Y, r, po, aF, g, t, Nq, z, cj, EY, B); #c1(CTNNBL1) c2(XP_011527219) c3(beta-catenin-like protein 1 isoform X1) c4( ) c5(321770, 321771) c6( ) c7(sc, bM, T, aEj, jh, v, fr, ci, q, ad, Hx, ft, vJ, aT, vH, UD, dL, K, jf, Nr, aW, Y, r, po, aF, g, t, Nq, z, cj, EY, B); #c1(CTNND1) c2(NP_001078927) c3(catenin delta-1 isoform 1ABC) c4(38012, 38013, 38014, 38015, 38016, 38017) c5(38018, 38019, 38020, 38021, 38022, 38023, 38024, 38025, 38026, 38027, 38028, 38029, 38030) c6( ) c7(T, aC, iW, bB, fr, ci, AO, q, ad, eA, anU, av, iu, jz, aE, aT, h, By, K, zy, ae, dx, aiB, s, qt, aW, Y, vj, ev, MD, ff, r, dN, ks, en, anW, cl, g, HI, bz, ck, bF, eM, bE, anY, hL, iS, np, m, alm, in, B, BA); #c1(CTNND1) c2(NP_001078928) c3(catenin delta-1 isoform 1AB) c4(38031, 38032, 38033, 38034, 38035, 38036) c5(38037, 38038, 38039, 38040, 38041, 38042, 38043) c6( ) c7(T, aC, iW, bB, fr, ci, AO, q, ad, eA, anU, av, iu, jz, aE, aT, h, By, K, zy, ae, dx, aiB, s, gt, aW, Y, vj, ev, MD, ff, r, dN, ks, en, anW, cl, g, HI, bz, ck, bF, eM, bE, anY, hL, iS, np, m, alm, in, B, BA); #c1(CTNND1) c2(NP_001078931) c3(catenin delta-1 isoform 1A) c4(38044, 38045, 38046, 38047) c5(38048, 38049, 38050, 38051, 38052, 38053, 38054, 38055, 38056, 38057, 38058, 38059, 38060, 38061, 38062, 38063, 38064, 38065, 38066, 38067, 38068, 38069, 38070, 38071, 38072, 38073, 38074, 38075, 38076, 38077, 38078, 38079, 38080, 38081, 38082, 38083, 38084, 38085, 38086, 38087, 38088) c6( ) c7(T, aC, iW, bB, fr, ci, AO, q, ad, eA, anU, av, iu, jz, aE, aT, h, By, K, zy, ae, dx, aiB, s, qt, aW, Y, vj, ev, MD, ff, r, dN, ks, en, anW, cl, g, HI, bz, ck, bF, eM, bE, anY, hL, iS, np, m, alm, in, B, BA); #c1(CTNND1) c2(NP_001078932) c3(catenin delta-1 isoform 3ABC) c4( ) c5(38089, 38090, 38091, 38092, 38093, 38094, 38095, 38096, 38097, 38098, 38099) c6( ) c7(T, aC, iW, bB, fr, ci, AD, q, ad, eA, anU, av, iu, jz, aE, aT, h, By, K, zy, ae, dx, aiB, s, qt, aW, Y, vj, ev, MD, ff, r, dN, ks, en, anW, cl, g, HI, bz, ck, bF, eM, bE, anY, hL, iS, np, m, alm, in, B, BA); #c1(CTNND1) c2(NP_001078933) c3(catenin delta-1 isoform 3AB) c4( ) c5(38100, 38101, 38102, 38103, 38104, 38105, 38106, 38107, 38108, 38109, 38110) c6( ) c7(T, aC, iW, bB, fr, ci, AD, q, ad, eA, anU, av, iu, jz, aE, aT, h, By, K, zy, ae, dx, aiB, s, qt, aW, Y, vj, ev, MD, ff, r, dN, ks, en, anW, cl, g, HI, bz, ck, bF, eM, bE, anY, hL, iS, np, m, alm, in, B, BA); #c1(CTNND1) c2(NP_001078938) c3(catenin delta-1 isoform 3A) c4( ) c5(38111, 38112, 38113, 38114, 38115, 38116, 38117, 38118, 38119, 38120, 38121, 38122, 38123, 38124, 38125, 38126, 38127, 38128, 38129, 38130, 38131, 38132, 38133, 38134, 38135, 38136) c6( ) c7(T, aC, iW, bB, fr, ci, AD, q, ad, eA, anU, av, iu, jz, aE, aT, h, By, K, zy, ae, dx, aiB, s, gt, aW, Y, vj, ev, MD, ff, r, dN, ks, en, anW, cl, g, HI, bz, ck, bF, eM, bE, anY, hL, iS, np, m, alm, in, B, BA); #c1(CTNND1) c2(NP_001193812) c3(catenin delta-1 isoform 2ABC) c4( ) c5(82640, 82641, 82642, 82643, 82644, 82645) c6( ) c7(T, aC, iW, bB, fr, ci, AD, q, ad, eA, anU, av, iu, jz, aE, aT, h, By, K, zy, ae, dx, aiB, s, qt, aW, Y, vj, ev, MD, ff, r, dN, ks, en, anW, cl, g, HI, bz, ck, bF, eM, bE, anY, hL, iS, np, m, ah, in, B, BA); #c1(CTNND1) c2(NP_001193814) c3(catenin delta-1 isoform IAC) c4(82646, 82647, 82648) c5(82649, 82650, 82651, 82652, 82653, 82654, 82655, 82656, 82657, 82658, 82659, 82660, 82661, 82662, 82663, 82664, 82665, 82666, 82667, 82668, 82669, 82670, 82671, 82672) c6( ) c7(T, aC, iW, bB, fr, ci, AD, q, ad, eA, anU, av, iu, jz, aE, aT, h, By, K, zy, ae, dx, aiB, s, qt, aW, Y, vj, ev, MD, ff, r, dN, ks, en, anW, cl, g, HI, bz, ck, bF, eM, bE, anY, hL, iS, np, m, alm, in, B, BA); #c1(CTNND1) c2(NP_001193815) c3(catenin delta-1 isoform 2AB) c4( ) c5(82673, 82674, 82675, 82676, 82677, 82678) c6( ) c7(T, aC, iW, bB, fr, ci, AD, q, ad, eA, anU, av, iu, jz, aE, aT, h, By, K, zy, ae, dx, aiB, s, qt, aW, Y, vj, ev, MD, ff, r, dN, ks, en, anW, cl, g, HI, bz, ck, bF, eM, bE, anY, hL, iS, np, m, alm, in, B, BA); #c1(CTNND1) c2(NP_001193816) c3(catenin delta-1 isoform 28) c4( ) c5(82679, 82680, 82681, 82682, 82683, 82684, 82685, 82686, 82687, 82688, 82689) c6( ) c7(T, aC, iW, bB, fr, ci, AD, q, ad, eA, anU, av, iu, jz, aE, aT, h, By, K, zy, ae, dx, aiB, s, qt, aW, Y, vj, ev, MD, ff, r, dN, ks, en, anW, cl, g, HI, bz, ck, bF, eM, bE, anY, hL, iS, np, m, alm, in, B, BA); #c1(CTNND1) c2(NP_001193820) c3(catenin delta-1 isoform 2A) c4( ) c5(82690, 82691, 82692, 82693, 82694) c6( ) c7(T, aC, iW, bB, fr, ci, AD, q, ad, eA, anU, av, iu, jz, aE, aT, h, By, K, zy, ae, dx, aiB, s, qt, aW, Y, vj, ev, MD, ff, r, dN, ks, en, anW, cl, g, HI, bz, ck, bF, eM, bE, anY, hL, iS, np, m, alm, in, B, BA); #c1(CTNND1) c2(NP_001322) c3(catenin delta-1 isoform IB) c4(116898, 116899, 116900) c5(116901, 116902, 116903, 116904, 116905, 116906, 116907) c6( ) c7(T, aC, iW, bB, fr, ci, AD, g, ad, eA, anU, av, iu, jz, aE, aT, h, By, K, zy, ae, dx, aiB, s, qt, aW, Y, vj, ev, MD, ff, r, dN, ks, en, anW, cl, g, HI, bz, ck, bF, eM, bE, anY, hL, iS, np, m, alm, in, B, BA); #c1(CTNND2) c2(NP_001275644) c3(catenin delta-2 isoform 2) c4(106870) c5(106871, 106872, 106873, 106874, 106875) c6( ) c7(bM, T, asg, aYJ, aw, bO, Fb, Zh, nA, gq, ad, eA, pN, bK, he, ae, af, aa, d, r, g, t, bz, fq, hq, eM, Bc, m, it, iu); #c1(CTNND2) c2(NP_001275645) c3(catenin delta-2 isoform 3) c4(106876) c5(106877, 106878, 106879, 106880, 106881, 106882) c6( ) c7(bM, T, asg, aYJ, aw, bO, Fb, Zh, nA, q, ad, eA, pN, bK, he, ae, af, aa, d, r, g, t, bz, fq, hq, eM, Bc, m, it, iu); #c1(CTNND2) c2(NP_001275646) c3(catenin delta-2 isoform 4) c4( ) c5(106883, 106884, 106885, 106886, 106887) c6( ) c7(bM, T, asg, aYJ, aw, bO, Fb, Zh, nA, q, ad, eA, pN, bK, he, ae, af, aa, d, r, g, t, bz, fq, hq, eM, Bc, m, it, iu); #c1(CTNND2) c2(NP_001323) c3(catenin delta-2 isoform 1) c4(116908, 116909, 116910, 116911) c5(116912, 116913, 116914, 116915, 116916, 116917, 116918, 116919, 116920, 116921, 116922, 116923, 116924, 116925, 116926, 116927, 116928, 116929, 116930, 116931) c6( ) c7(bM, T, asg, aYJ, aw, bO, Fb, Zh, nA, q, ad, eA, pN, bK, he, ae, af, aa, d, r, g, t, bz, fq, hq, eM, Bc, m, it, iu); #c1(CTNS) c2(NP_001026851) c3(cystinosin isoform 1 precursor) c4(29645, 29646, 29647) c5(29648, 29649, 29650, 29651, 29652, 29653, 29654, 29655, 29656, 29657, 29658, 29659, 29660) c6( ) c7(IR, aYM, aAh, awd, dq, aj, Lq, dy, aYN, UE, bl, aYK, aYL); #c1(CTNS) c2(NP_004928) c3(cystinosin isoform 2 precursor) c4(150844, 150845) c5(150846, 150847, 150848, 150849, 150850, 150851, 150852, 150853, 150854, 150855, 150856, 150857, 150858, 150859, 150860, 150861, 150862, 150863, 150864, 150865, 150866, 150867, 150868, 150869, 150870, 150871, 150872, 150873, 150874, 150875, 150876, 150877, 150878, 150879, 150880, 150881, 150882, 150883, 150884, 150885, 150886, 150887, 150888, 150889, 150890, 150891, 150892, 150893, 150894, 150895, 150896, 150897, 150898, 150899, 150900, 150901, 150902, 150903, 150904, 150905, 150906, 150907, 150908, 150909, 150910, 150911, 150912, 150913, 150914, 150915, 150916, 150917, 150918, 150919, 150920, 150921, 150922, 150923, 150924, 150925, 150926, 150927, 150928, 150929, 150930, 150931, 150932, 150933, 150934, 150935, 150936, 150937, 150938, 150939, 150940, 150941, 150942, 150943, 150944, 150945, 150946, 150947, 150948, 150949, 150950, 150951, 150952, 150953, 150954, 150955, 150956, 150957, 150958, 150959, 150960, 150961, 150962, 150963, 150964, 150965, 150966, 150967, 150968, 150969, 150970, 150971, 150972, 150973, 150974, 150975, 150976, 150977, 150978, 150979, 150980, 150981, 150982, 150983, 150984, 150985, 150986, 150987, 150988, 150989, 150990, 150991, 150992, 150993, 150994, 150995, 150996, 150997, 150998, 150999, 151000, 151001, 151002, 151003, 151004, 151005) c6(151006, 151007) c7(IR, aYM, aAh, awd, dq, aj, Lq, dy, aYN, UE, bl, aYK, aYL); #c1(CTPS1) c2(NP_001288166) c3(CTP synthase 1 isoform b) c4( ) c5(113666, 113667, 113668, 113669, 113670, 113671) c6( ) c7(hF, nY); #c1(CTPS1) c2(XP_011539123) c3(CTP synthase 1 isoform X2) c4(337198, 337199) c5(337200, 337201) c6( ) c7(hF, nY); #c1(CTPS1) c2(XP_011539124) c3(CTP synthase 1 isoform X3) c4(337202) c5(337203, 337204, 337205, 337206, 337207, 337208) c6( ) c7(hF, nY); #c1(CTR9) c2(NP_055448) c3(RNA polymerase-associated protein CTR9 homolog) c4(181213) c5(181214, 181215, 181216, 181217, 181218, 181219) c6( ) c7(pl, j, m, bA, ps); #c1(CTRB1) c2(NP_001897) c3(chymotrypsinogen B precursor) c4(122082) c5(122083, 122084, 122085, 122086, 122087, 122088) c6( ) c7(W, aj, J); #c1(CTRB2) c2(NP_001020371) chymotrypsinogen 82 precursor) c4(28667) c5(28668, 28669, 28670, 28671, 28672, 28673, 28674, 28675) c6(28676, 28677) c7(ar, aC, A, W); #c1(CTRC) c2(XP_011538852) c3(chymotrypsin-C isoform X1) c4( ) c5(336921) c6( ) c7(ar, A, Gs, aYO, iG, alx, ayZ); #c1(CTRL) c2(NP_001898) c3(chymotrypsin-like protease CTRL-1 precursor) c4(122089) c5(122090, 122091, 122092, 122093, 122094, 122095, 122096, 122097, 122098, 122099) c6( ) c7(aW, Of, cr, aT, Og, aEW, cd); #c1(CTSA) c2(NP_000299) c3(lysosomal protective protein isoform a precursor) c4(6714) c5(6715, 6716, 6717, 6718, 6719, 6720, 6721, 6722, 6723) c6( ) c7(T, aYP, aYa, zt, aYQ, aDj, cz, Lp, h, aYR, Lq, bt, dr); #c1(CTSA) c2(NP_001121167) c3(lysosomal protective protein isoform b precursor) c4(45297, 45298) c5(45299, 45300, 45301, 45302, 45303, 45304, 45305, 45306, 45307, 45308, 45309) c6( ) c7(T, aYP, aYa, zt, aYQ, aDj, cz, Lp, h, aYR, Lq, bt, dr); #c1(CTSA) c2(NP_001161066) c3(lysosomal protective protein isoform c precursor) c4(65243, 65244) c5(65245, 65246, 65247, 65248, 65249, 65250, 65251, 65252, 65253, 65254, 65255, 65256, 65257) c6( ) c7(T, aYP, aYa, zt, aYQ, aDj, cz, Lp, h, aYR, Lq, bt, dr); #c1(CTSB) c2(NP_680093) c3(cathepsin B preproprotein) c4(242194, 242195, 242196, 242197) c5(242198, 242199, 242200, 242201, 242202, 242203, 242204, 242205, 242206, 242207, 242208, 242209, 242210, 242211, 242212, 242213, 242214, 242215, 242216, 242217, 242218, 242219, 242220, 242221, 242222, 242223, 242224, 242225, 242226, 242227, 242228, 242229, 242230, 242231, 242232, 242233, 242234, 242235, 242236, 242237, 242238, 242239, 242240, 242241, 242242, 242243, 242244, 242245, 242246, 242247, 242248, 242249, 242250, 242251, 242252, 242253, 242254, 242255, 242256, 242257, 242258, 242259, 242260, 242261, 242262) c6(242263, 242264, 242265, 242266, 242267, 242268, 242269, 242270, 242271, 242272, 242273, 242274, 242275, 242276, 242277, 242278, 242279, 242280, 242281, 242282) c7(oO, T, os, aC, pf, ea, e, bB, ci, aR, ip, dV, K, wt, H, cp, aYX, ajT, JI, aW, fc, uY, g, pL, eE, eF, cm, ha, eM, nB, mx, U, wB, aYS, m, aYV, IS, hh, atO, dD, aw, aj, fr, cd, zo, ai, b, h, IG, yZ, dL, wb, bl, a XT, Dg, asp, MD, EU, aq, aXU, ajz, kk, adz, vU, ar, dB, aYU, hL, hR, Lq, B, ek, L, bL, aA, hz, C, aYW, Qo, yU, q, J, eA, ady, mj, yg, HC, aT, cy, aYT, bq, ae, af, eu, jf, bf, iU, oV, Y, axW, fO, bg, r, afq, Io, tu, en, cl, t, rY, wg, nM, aki, mf, aDj, ayZ, an, bH, aZ, aat, oZ, eq, ad, av, hd, Db, yt, sO, oj, ah, Dj, sj, d, yx, eH, ff, tv, Ej, aF, hp, bz, Hw, DT, bE, i, y, agT, us); #c1(CTSC) c2(NP_001107645) c3(dipeptidyl peptidase 1 isoform c precursor) c4(42939) c5(42940, 42941, 42942, 42943, 42944, 42945) c6( ) c7(dD, aYZ, ea, e, ht, by, aA, cz, v, j, eq, Tz, aZa, aji, qG, dL, IQ, bq, eL, aYY, eu, MD, axW, yx, bg, hl, fJ, ajl, ba, uz); #c1(CTSC) c2(NP_001805) c3(dipeptidyl peptidase 1 isoform a preproprotein) c4(121265, 121266) c5(121267, 121268, 121269, 121270, 121271, 121272, 121273, 121274, 121275, 121276, 121277, 121278) c6( ) c7(dD, aYZ, ea, e, ht, by, aA, cz, v, j, eq, Tz, aZa, aji, qG, dL, 10, bq, eL, aYY, eu, MD, axW, yx, bg, hl, fJ, ajl, ha, uz); #c1(CTSC) c2(NP_680475) c3(dipeptidyl peptidase 1 isoform b precursor) c4(242291) c5(242292, 242293, 242294, 242295, 242296, 242297) c6( ) c7(dD, aYZ, ea, e, ht, by, aA, cz, v, j, eq, Tz, aZa, aji, qG, dL, IQ, bq, eL, aYY, eu, MD, axW, yx, bg, hl, fJ, ajl, ha, uz); #c1(CTSD) c2(NP_001900) c3(cathepsin D preproprotein) c4(122100) c5(122101, 122102, 122103, 122104, 122105, 122106) c6( ) c7(bM, T, dt, aC, pf, aw, ha, KW, qy, n, j, ci, fr, PJ, iI, q, ad, asS, aao, eA, iu, aaF, b, aE, cc, yt, aAh, awd, qK, aT, DO, aZd, dL, K, acQ, an, ae, af, eL, aa, ak, d, aW, Y, CM, bg, ff, LZ, r, aq, en, cl, g, t, QK, bz, as, cm, rY, dS, bN, ha, tj, jV, aZc, bE, AM, U, hL, uz, wR, dy, m, aPM, aZb, y, B); #c1(CTSE) c2(NP_001901) c3(cathepsin E isoform a preproprotein) c4(122107) c5(122108, 122109, 122110, 122111, 122112, 122113) c6( ) c7(YL, gx, T, aE, s, aA, aq, dL, kp, ci, aF, eE, LV, eL); #c1(CTSE) c2(NP_683865) c3(cathepsin E isoform b preproprotein) c4(242590, 242591) c5(242592, 242593, 242594, 242595, 242596, 242597) c6( ) c7(YL, gx, T, aE, s, aA, aq, dL, kp, ci, aF, eE, LV, eL); #c1(CTSE) c2(XP_011507546) c3(cathepsin E isoform X1) c4(297470) c5(297471, 297472, 297473, 297474, 297475, 297476) c6( ) c7(YL, gx, T, aE, s, aA, aq, dL, kp, ci, aF, eE, LV, eL); #c1(CTSF) c2(NP_003784) c3(cathepsin F precursor) c4(140783) c5(140784, 140785, 140786, 140787, 140788, 140789) c6( ) c7(vy, aZe, bK, aPT, rY); #c1(CTSG) c2(NP_001902) c3(cathepsin G preproprotein) c4(122114, 122115) c5(122116, 122117, 122118, 122119, 122120, 122121, 122122) c6( ) c7(bM, T, eR, e, aw, oA, C, hF, ah, h, hn, K, jj, aa, aZf, pb, eK, ck, Ta, wg, ac, fP, cj, uz, wR, dX, fD, ei, bt, kS); #c1(CTSG) c2(XP_011534801) c3(cathepsin G isoform X1) c4(331300, 331301, 331302, 331303, 331304, 331305, 331306, 331307, 331308, 331309, 331310, 331311) c5( ) c6( ) c7(bM, T, eR, e, aw, oA, C, hF, ah, h, hn, K, jj, aa, aZf, pb, eK, ck, Ta, wg, ac, fP, cj, uz, wR, dX, fD, ei, bt, kS); #c1(CTSH) c2(NP_004381) c3(pro-cathepsin H preproprotein) c4(145956, 145957, 145958) c5(145959, 145960, 145961, 145962, 145963, 145964, 145965, 145966, 145967, 145968, 145969, 145970) c6( ) c7(bL, av, T, A, wB, Bc, aT, at, ag, cL, dL, bK, hp, bm, sz, bt, B, aa); #c1(CTSH) c2(XP_011519578) c3(pro-cathepsin H isoform X2) c4( ) c5(314241, 314242, 314243, 314244, 314245, 314246) c6( ) c7(bL, av, T, A, wB, Bc, aT, at, aq, cL, dL, bK, hp, bm, sz, bt, B, aa); #c1(CTSL) c2(XP_005251773) c3(cathepsin L1 isoform X1) c4(271150, 271151) c5(271152, 271153, 271154, 271155, 271156, 271157, 271158, 271159, 271160, 271161, 271162, 271163, 271164, 271165) c6(271166, 271167, 271168, 271169) c7(bL, T, dD, dA, ea, if, yG, ht, aA, n, oR, aj, ah, ci, v, hz, eq, qN, MT, q, J, zo, asS, eA, ip, av, hd, hw, Db, rl, aT, h, bl, K, bq, hu, wt, fb, af, eu, sj, CL, A, d, aYX, iU, aW, Y, AQ, eH, ff, cr, r, dq, Io, aZg, EZ, en, bu, eE, t, cM, xe, eF, cm, ck, es, ar, Bv, nM, kP, eM, dB, mx, hr, hR, mf, dy, m, y, B); #c1(CTSL) c2(XP_011516565) c3(cathepsin L1 isoform X2) c4(309996) c5(309997, 309998, 309999, 310000, 310001, 310002, 310003, 310004, 310005, 310006, 310007, 310008, 310009, 310010, 310011) c6(310012, 310013, 310014) c7(bL, T, dD, dA, ea, if, yG, ht, aA, n, oR, aj, ah, ci, v, hz, eq, qN, MT, q, J, zo, asS, eA, ip, av, hd, hw, Db, rl, aT, h, bl, K, bq, hu, wt, fb, af, eu, sj, CL, A, d, aYX, iU, aW, Y, AQ, eH, ff, cr, r, dq, Io, aZg, EZ, en, bu, eE, t, cM, xe, eF, cm, ck, es, ar, Bv, nM, kP, eM, dB, mx, hr, hR, mf, dy, m, y, B); #c1(CTS0) c2(NP_001325) c3(cathepsin 0 preproprotein) c4(116932) c5(116933, 116934, 116935, 116936, 116937, 116938) c6( ) c7(aW, aT); #c1(CTSV) c2(NP_001188504) c3(cathepsin L2 preproprotein) c4(79231) c5(79232, 79233, 79234, 79235, 79236, 79237, 79238, 79239, 79240, 79241) c6( ) c7(hM, A, cr, ah, eE, pb); #c1(CTSW) c2(NP_001326) c3(cathepsin W preproprotein) c4(116939) c5(116940, 116941, 116942, 116943, 116944, 116945) c6( ) c7(anY, cE); #c1(CTSZ) c2(NP_001327) c3(cathepsin Z preproprotein) c4(116946) c5(116947, 116948, 116949, 116950, 116951, 116952) c6( ) c7(ae, T, aE, ig, zt, aoo, az, cE, bt, aA, kp, aF, ci, g, aCK, H, tP, V, ad, L); #c1(CTTN) c2(NP_001171669) c3(src substrate cortactin isoform c) c4(71250, 71251) c5(71252, 71253, 71254, 71255, 71256, 71257, 71258, 71259, 71260, 71261, 71262, 71263) c6( ) c7(bM, T, fR, ht, aA, bB, n, BF, ci, cd, q, aE, aT, By, dL, K, hu, eL, aW, Y, Ls, az, ev, ff, r, ag, Io, aE, BG, en, g, iR, t, iK, ac, bE, m, rA, it, B); #c1(CTTN) c2(NP_005222) c3(src substrate cortactin isoform a) c4(154187) c5(154188, 154189, 154190, 154191, 154192, 154193) c6( ) c7(bM, T, fR, ht, aA, bB, n, BF, ci, cd, q, aE, aT, By, dL, K, hu, eL, aW, Y, Ls, az, ev, ff, r, aq, Io, aE, BG, en, g, iR, t, iK, ac, bE, m, rA, it, B); #c1(CTTN) c2(NP_612632) c3(src substrate cortactin isoform b) c4(236711) c5(236712, 236713, 236714, 236715, 236716, 236717) c6( ) c7(bM, T, fR, ht, aA, bB, n, BF, ci, cd, q, aE, aT, By, dL, K, hu, eL, aW, Y, Ls, az, ev, ff, r, aq, Io, aE, BG, en, g, iR, t, iK, ac, bE, m, rA, it, B); #c1(CTTNBP2) c2(NP_219499) c3(cortactin-binding protein 2) c4(228644) c5(228645, 228646, 228647, 228648, 228649, 228650, 228651, 228652) c6( ) c7(eW, aC, xH, j, jN); #c1(CTU1) c2(NP_660275) c3(cytoplasmic tRNA 2-thiolation protein 1) c4(240592) c5(240593, 240594, 240595, 240596, 240597, 240598, 240599) c6( ) c7(MO, aW, avp, bu); #c1(CTXN3) c2(NP_001041717) c3(cortexin-3) c4(34331) c5(34332, 34333, 34334, 34335, 34336, 34337, 34338, 34339, 34340, 34341) c6( ) c7(EQ); #c1(CUBN) c2(NP_001072) c3(cubilin precursor) c4(35565, 35566, 35567) c5( ) c6( ) c7(eR, oe, e, cz, mN, cQ, aj, j, aY, J, ad, af, xa, sj, A, aZh, Y, r, aZi, hz, apM, acC, c, UP, Ip, mz, my); #c1(CUBN) c2(XP_011518010) c3(cubilin isoform X1) c4( ) c5(312023) c6( ) c7(eR, oe, e, cz, mN, cQ, aj, j, aY, J, ad, af, xa, sj, A, aZh, Y, r, aZi, bz, apM, acC, c, UP, Ip, mz, my); #c1(CUBN) c2(XP_011518013) c3(cubilin isoform X4) c4(312024, 312025) c5(312026, 312027, 312028, 312029, 312030, 312031, 312032) c6( ) c7(eR, oe, e, cz, mN, cQ, aj, j, aY, J, ad, af, xa, sj, A, aZh, Y, r, aZi, bz, apM, acC, c, UP, Ip, mz, my); #c1(CUEDC1) c2(NP_001278954) c3(CUE domain-containing protein 1) c4(111088) c5(111089, 111090, 111091, 111092, 111093, 111094, 111095, 111096, 111097, 111098) c6( ) c7(V); #c1(CUEDC2) c2(NP_076945) c3(CUE domain-containing protein 2) c4(214329) c5(214330, 214331, 214332, 214333, 214334, 214335) c6( ) c7(aW, iU, aT); #c1(CUL1) c2(XP_011514934) c3(cullin-1 isoform X1) c4(307688, 307689, 307690) c5(307691, 307692, 307693, 307694, 307695, 307696, 307697, 307698, 307699, 307700, 307701, 307702, 307703, 307704, 307705, 307706, 307707, 307708, 307709, 307710, 307711, 307712) c6( ) c7(T, Kv, aW, Y, aT, cm, h, hP, t, B, y); #c1(CUL2) c2(NP_001185707) c3(cullin-2 isoform a) c4(76083) c5(76084, 76085, 76086, 76087, 76088, 76089, 76090, 76091, 76092) c6( ) c7(T, py, bP, iA, aW, go, ht, an, ff, fe, fr, en, hu, g, VB); #c1(CUL2) c2(NP_001185708) c3(cullin-2 isoform b) c4(76093) c5(76094, 76095) c6( ) c7(T, py, bP, iA, aW, go, ht, an, ff, fe, fr, en, hu, g, VB); #c1(CUL2) c2(XP_011518047) c3(cullin-2 isoform X2) c4( ) c5(312055) c6( ) c7(T, py, bP, iA, aW, go, ht, an, ff, fe, fr, en, hu, g, VB); #c1(CUL2) c2(XP_011518049) c3(cullin-2 isoform X1) c4(312056, 312057, 312058) c5(312059, 312060, 312061, 312062, 312063, 312064, 312065, 312066, 312067, 312068, 312069, 312070, 312071, 312072, 312073, 312074, 312075, 312076, 312077, 312078, 312079, 312080, 312081, 312082, 312083, 312084, 312085, 312086, 312087, 312088) c6( ) c7(T, py, bP, iA, aW, go, ht, an, ff, fe, fr, en, hu, g, VB); #c1(CUL3) c2(NP_001244126) c3(cullin-3 isoform 2) c4(91958) c5(91959, 91960, 91961, 91962, 91963, 91964) c6( ) c7(T, Lu, xX, d, bE, aW, Y, eL, aT, cz, bB, aq, dL, at, K, rP, bz, B, aZj); #c1(CUL3) c2(NP_001244127) c3(cullin-3 isoform 3) c4( ) c5(91965, 91966, 91967, 91968, 91969, 91970, 91971, 91972, 91973) c6( ) c7(T, Lu, xX, d, bE, aW, Y, eL, aT, cz, bB, aq, dL, at, K, rP, bz, B, aZj); #c1(CUL3) c2(NP_003581) c3(cullin-3 isoform 1) c4(139373, 139374) c5(139375, 139376, 139377, 139378, 139379, 139380, 139381) c6( ) c7(T, Lu, xX, d, bE, aW, Y, eL, aT, cz, bB, aq, dL, at, K, rP, bz, B, aZj); #c1(CUL4A) c2(NP_001008895) c3(cullin-4A isoform 1) c4(23472, 23473) c5(23474, 23475, 23476, 23477, 23478, 23479, 23480, 23481, 23482) c6( ) c7(ae, T, av, ib, yo, s, nO, aW, aT, hR, aq, h, K, m, t, bz, B, ad); #c1(CUL4A) c2(XP_011535825) c3(cullin-4A isoform X1) c4( ) c5(333027, 333028, 333029, 333030, 333031, 333032, 333033, 333034, 333035, 333036, 333037) c6( ) c7(ae, T, av, ib, yo, s, nO, aW, aT, hR, aq, h, K, m, t, bz, B, ad); #c1(CUL4B) c2(NP_001073341) c3(cullin-4B isoform 2) c4(35966) c5(35967, 35968, 35969, 35970, 35971, 35972) c6( ) c7(alT, T, aZk, ha, nf, ey, nA, bX, aZI); #c1(CUL4B) c2(NP_003579) c3(cullin-4B isoform 1) c4(139366) c5(139367, 139368, 139369, 139370, 139371, 139372) c6( ) c7(alT, T, aZk, ha, nf, ey, nA, bX, aZI); #c1(CUL4B) c2(XP_006724848) c3(cullin-4B isoform X6) c4(296464) c5(296465, 296466, 296467, 296468, 296469, 296470) c6( ) c7(alT, T, aZk, ha, nf, ey, nA, bX, aZI); #c1(CUL4B) c2(XP_011529702) c3(cullin-4B isoform X4) c4(325327) c5(325328, 325329, 325330, 325331, 325332, 325333) c6( ) c7(alT, T, aZk, ha, nf, ey, nA, bX, aZI); #c1(CUL5) c2(NP_003469) c3(cullin-5) c4(138589) c5(138590, 138591, 138592, 138593, 138594, 138595, 138596, 138597, 138598, 138599) c6( ) c7(T, aW, if, aCH, gN, cj, aT, VT, h, qN, B); #c1(CUL7) c2(NP_001161842) c3(cullin-7 isoform 1) c4(66143) c5(66144, 66145, 66146, 66147, 66148, 66149) c6( ) c7(eM, aq, aCm, fr, aCo, ei, cm, nJ, rv, B); #c1(CUL7) c2(NP_055595) c3(cullin-7 isoform 2) c4(182159) c5( ) c6( ) c7(eM, aq, aCm, fr, aCo, ei, cm, nJ, rv, B); #c1(CUL7) c2(XP_005249560) c3(cullin-7 isoform X3) c4( ) c5(269705, 269706, 269707, 269708, 269709, 269710) c6( ) c7(eM, aq, aCm, fr, aCo, ei, cm, nJ, rv, B); #c1(CUL9) c2(NP_055904) c3(cullin-9) c4(184374) c5(184375, 184376, 184377, 184378, 184379, 184380) c6( ) c7(ac, aCI, an, cm, bA, hX); #c1(CUL9) c2(XP_011512727) c3(cullin-9 isoform X3) c4(303760) c5(303761, 303762, 303763, 303764, 303765, 303766) c6( ) c7(ac, aCI, an, cm, bA, hX); #c1(CUL9) c2(XP_011512731) c3(cullin-9 isoform X7) c4( ) c5(303767) c6( ) c7(ac, aCI, an, cm, bA, hX); #c1(CUTA) c2(NP_001014433) c3(protein CutA isoform 1) c4(25862, 25863) c5(25864, 25865, 25866, 25867, 25868, 25869, 25870, 25871) c6( ) c7(eZ); #c1(CUTA) c2(NP_001014837) c3(protein CutA isoform 2 precursor) c4( ) c5(26051, 26052, 26053, 26054, 26055, 26056, 26057, 26058) c6( ) c7(eZ); #c1(CUTA) c2(NP_001014840) c3(protein CutA isoform 3 precursor) c4(26059, 26060) c5(26061, 26062, 26063, 26064, 26065, 26066, 26067, 26068, 26069, 26070, 26071, 26072, 26073, 26074, 26075, 26076) c6( ) c7(eZ); #c1(CUX1) c2(NP_001189472) c3(protein GASP isoform d) c4(80189) c5(80190, 80191, 80192, 80193, 80194, 80195) c6( ) c7(bM, T, bO, fd, bB, ci, aR, a mW, aE, K, zy, H, eG, LC, aW, Ls, eE, cm, eM, avS, iT, vA, wB, U, PV, Hb, m, cZ, wu, aw, aj, fr, qN, ec, KN, kH, dd, Yd, fe, op, Fi, ahC, it, L, aA, V, q, eA, WY, aql, aT, dz, adm, jj, rz, ae, af, jf, oV, Y, r, wA, t, xw, iK, bN, ck, iM, ac, c, rA, bt, hS, jh, hF, ad, av, Tg, aCJ, ji, wm, fb, WZ, je, afi, aF, bz, LB); #c1(CUX1) c2(NP_001189473) c3(protein GASP isoform e) c4(80196) c5(80197, 80198, 80199, 80200, 80201, 80202) c6( ) c7(bM, T, bO, fd, bB, ci, aR, amW, aE, K, zy, H, eG, LC, aW, Ls, eE, cm, eM, avS, iT, vA, wB, U, PV, Hb, m, cZ, wu, aw, aj, fr, qN, ec, KN, kH, dd, Yd, fe, op, Fi, ahC, it, L, aA, V, q, eA, WY, aql, aT, dz, adm, jj, rz, ae, af, jf, oV, Y, r, wA, t, xw, iK, bN, ck, iM, ac, c, rA, bt, hS, jh, hF, ad, av, Tg, aCJ, ji, wm, fb, WZ, je, afi, aF, bz, LB); #c1(CUX1) c2(NP_001189474) c3(protein GASP isoform f) c4(80203) c5(80204, 80205, 80206, 80207, 80208, 80209) c6( ) c7(bM, T, bO, fd, bB, ci, aR, amW, aE, K, zy, H, eG, LC, aW, Ls, eE, cm, eM, avS, iT, vA, wB, U, PV, Hb, m, cZ, wu, aw, aj, fr, qN, ec, KN, kH, dd, Yd, fe, op, Fi, ahC, it, L, aA, V, g, eA, WY, aql, aT, dz, adm, jj, rz, ae, af, jf, oV, Y, r, wA, t, xw, iK, bN, ck, iM, ac, c, rA, bt, hS, jh, hF, ad, av, Tg, aCJ, ji, wm, fb, WZ, je, afi, aF, bz, LB); #c1(CUX1) c2(NP_001189475) c3(protein GASP isoform g) c4(80210) c5(80211, 80212, 80213, 80214, 80215, 80216) c6( ) c7(bM, T, bO, fd, bB, ci, aR, amW, aE, K, zy, H, eG, LC, aW, Ls, eE, cm, eM, avS, iT, vA, wB, U, PV, Hb, m, cZ, wu, aw, aj, fr, qN, ec, KN, kH, dd, Yd, fe, op, Fi, ahC, it, L, aA, V, g, eA, WY, aql, aT, dz, adm, jj, rz, ae, af, jf, oV, Y, r, wA, t, xw, iK, bN, ck, iM, ac, c, rA, bt, hS, jh, hF, ad, av, Tg, aCJ, ji, wm, fb, WZ, je, afi, aF, bz, LB); #c1(CUX1) c2(NP_001904) c3(protein GASP isoform b) c4(122123, 122124, 122125) c5(122126, 122127, 122128, 122129, 122130, 122131, 122132) c6( ) c7(bM, T, bO, fd, bB, ci, aR, a mW, aE, K, zy, H, eG, LC, aW, Ls, eE, cm, eM, avS, iT, vA, wB, U, PV, Hb, m, cZ, wu, aw, aj, fr, qN, ec, KN, kH, dd, Yd, fe, op, Fi, ahC, it, L, aA, V, g, eA, WY, aql, aT, dz, adm, jj, rz, ae, af, jf, oV, Y, r, wA, t, xw, iK, bN, ck, iM, ac, c, rA, bt, hS, jh, hF, ad, av, Tg, aCJ, ji, wm, fb, WZ, je, afi, aF, bz, LB); #c1(CUX1) c2(NP_852477) c3(protein GASP isoform c) c4(255012) c5(255013, 255014, 255015, 255016, 255017, 255018) c6( ) c7(bM, T, bO, fd, bB, ci, aR, amW, aE, K, zy, H, eG, LC, aW, Ls, eE, cm, eM, avS, iT, vA, wB, U, PV, Hb, m, cZ, wu, aw, aj, fr, qN, ec, KN, kH, dd, Yd, fe, op, Fi, ahC, it, L, aA, V, g, eA, WY, aql, aT, dz, adm, jj, rz, ae, af, jf, oV, Y, r, wA, t, xw, iK, bN, ck, iM, ac, c, rA, bt, hS, jh, hF, ad, av, Tg, aCJ, ji, wm, fb, WZ, je, afi, aF, bz, LB); #c1(CUX1) c2(NP_853530) c3(protein GASP isoform a) c4(255149) c5(255150, 255151, 255152, 255153, 255154) c6( ) c7(bM, T, bO, fd, bB, ci, aR, amW, aE, K, zy, H, eG, LC, aW, Ls, eE, cm, eM, avS, iT, vA, wB, U, PV, Hb, m, cZ, wu, aw, aj, fr, qN, ec, KN, kH, dd, Yd, fe, op, Fi, ahC, it, L, aA, V, g, eA, WY, aql, aT, dz, adm, jj, rz, ae, af, jf, oV, Y, r, wA, t, xw, iK, bN, ck, iM, ac, c, rA, bt, hS, jh, hF, ad, av, Tg, aCJ, ji, wm, fb, WZ, je, afi, aF, bz, LB); #c1(CUX1) c2(XP_005250207) c3(protein GASP isoform X1) c4( ) c5(270200) c6( ) c7(bM, T, bO, fd, bB, ci, aR, a mW, aE, K, zy, H, eG, LC, aW, Ls, eE, cm, eM, avS, iT, vA, wB, U, PV, Hb, m, cZ, wu, aw, aj, fr, qN, ec, KN, kH, dd, Yd, fe, op, Fi, ahC, it, L, aA, V, g, eA, WY, aql, aT, dz, adm, jj, rz, ae, af, jf, oV, Y, r, wA, t, xw, iK, bN, ck, iM, ac, c, rA, bt, hS, jh, hF, ad, av, Tg, aCJ, ji, wm, fb, WZ, je, afi, aF, bz, LB); #c1(CUX1) c2(XP_005250211) c3(protein GASP isoform X7) c4( ) c5(270201, 270202, 270203, 270204, 270205, 270206, 270207, 270208, 270209, 270210, 270211, 270212) c6( ) c7(bM, T, bO, fd, bB, ci, aR, a mW, aE, K, zy, H, eG, LC, aW, Ls, eE, cm, eM, avS, iT, vA, wB, U, PV, Hb, m, cZ, wu, aw, aj, fr, qN, ec, KN, kH, dd, Yd, fe, op, Fi, ahC, it, L, aA, V, g, eA, WY, aql, aT, dz, adm, jj, rz, ae, af, jf, oV, Y, r, wA, t, xw, iK, bN, ck, iM, ac, c, rA, bt, hS, jh, hF, ad, av, Tg, aCJ, ji, wm, fb, WZ, je, afi, aF, bz, LB); #c1(CUX1) c2(XP_006715917) c3(protein GASP isoform X3) c4(289938, 289939) c5(289940, 289941, 289942, 289943, 289944, 289945, 289946, 289947, 289948, 289949, 289950, 289951) c6( ) c7(bM, T, bO, fd, bB, ci, aR, amW, aE, K, zy, H, eG, LC, aW, Ls, eE, cm, eM, avS, iT, vA, wB, U, PV, Hb, m, cZ, wu, aw, aj, fr, qN, ec, KN, kH, dd, Yd, fe, op, Fi, ahC, it, L, aA, V, q, eA, WY, aql, aT, dz, adm, jj, rz, ae, af, jf, oV, Y, r, wA, t, xw, iK, bN, ck, iM, ac, c, rA, bt, hS, jh, hF, ad, av, Tg, aCJ, ji, wm, fb, WZ, je, afi, aF, bz, LB); #c1(CUX1) c2(XP_011514125) c3(protein GASP isoform X4) c4(306721, 306722) c5(306723, 306724, 306725, 306726, 306727, 306728, 306729, 306730, 306731, 306732, 306733, 306734) c6( ) c7(bM, T, bO, fd, bB, ci, aR, amW, aE, K, zy, H, eG, LC, aW, Ls, eE, cm, eM, avS, iT, vA, wB, U, PV, Hb, m, cZ, wu, aw, aj, fr, qN, ec, KN, kH, dd, Yd, fe, op, Fi, ahC, it, L, aA, V, q, eA, WY, aql, aT, dz, adm, jj, rz, ae, af, jf, oV, Y, r, wA, t, xw, iK, bN, ck, iM, ac, c, rA, bt, hS, jh, hF, ad, av, Tg, aCJ, ji, wm, fb, WZ, je, afi, aF, bz, LB); #c1(CUX1) c2(XP_011514127) c3(protein GASP isoform X6) c4( ) c5(306735) c6( ) c7(bM, T, bO, fd, bB, ci, aR, amW, aE, K, zy, H, eG, LC, aW, Ls, eE, cm, eM, avS, iT, vA, wB, U, PV, Hb, m, cZ, wu, aw, aj, fr, qN, ec, KN, kH, dd, Yd, fe, op, Fi, ahC, it, L, aA, V, g, eA, WY, aql, aT, dz, adm, jj, rz, ae, af, jf, oV, Y, r, wA, t, xw, iK, bN, ck, iM, ac, c, rA, bt, hS, jh, hF, ad, av, Tg, aCJ, ji, wm, fb, WZ, je, afi, aF, bz, LB); #c1(CUX2) c2(NP_056082) c3(homeobox protein cut-like 2) c4(185581) c5(185582, 185583, 185584, 185585, 185586, 185587, 185588) c6( ) c7(mU, A, mW, mZ, mS, mY, bK, mV, mT, bN, mX); #c1(CUX2) c2(XP_011536363) c3(homeobox protein cut-like 2 isoform X1) c4( ) c5(333685) c6( ) c7(mU, A, mW, mZ, mS, mY, bK, mV, mT, bN, mX); #c1(CUX2) c2(XP_011536374) c3(homeobox protein cut-like 2 isoform X5) c4(333686) c5(333687, 333688, 333689, 333690, 333691) c6( ) c7(mU, A, mW, ml, mS, mY, bK, mV, mT, bN, mX); #c1(CUZD1) c2(NP_071317) c3(CUB and zona pellucida-like domain-containing protein 1 precursor) c4(210896, 210897, 210898) c5(210899, 210900, 210901, 210902, 210903, 210904, 210905, 210906, 210907, 210908, 210909, 210910, 210911, 210912, 210913, 210914, 210915, 210916, 210917, 210918, 210919, 210920, 210921, 210922, 210923, 210924, 210925, 210926, 210927, 210928, 210929, 210930, 210931, 210932) c6( ) c7(fe, t, T, aE, m); #c1(CWC22) c2(NP_065994) c3(pre-mRNA-splicing factor CWC22 homolog) c4(206627, 206628, 206629) c5(206630, 206631, 206632, 206633, 206634, 206635, 206636, 206637, 206638, 206639, 206640, 206641, 206642, 206643, 206644, 206645, 206646, 206647) c6( ) c7(bM, ac, PN, bE, aw, eZ, bB, v, ad); #c1(CWC27) c2(NP_001284573) c3(peptidyl-prolyl cis-trans isomerase CWC27 homolog isoform 2) c4(112062) c5(112063, 112064, 112065, 112066, 112067, 112068) c6( ) c7(j); #c1(CWC27) c2(NP_005860) c3(peptidyl-prolyl cis-trans isomerase CWC27 homolog isoform 1) c4(159997) c5(159998, 159999, 160000, 160001, 160002, 160003) c6( ) c7(j); #c1(CWF19L1) c2(NP_001290333) c3(CWF19-like protein 1 isoform 2) c4(115199) c5(115200, 115201, 115202, 115203, 115204, 115205) c6( ) c7(fc, cP); #c1(CWF19L1) c2(NP_060764) c3(CWF19-like protein 1 isoform 1) c4(197678) c5(197679, 197680, 197681, 197682, 197683, 197684, 197685, 197686, 197687, 197688) c6( ) c7(fc, cP); #c1(CWF19L2) c2(NP_689647) c3(CWF19-like protein 2) c4(243425, 243426, 243427) c5(243428, 243429, 243430, 243431, 243432, 243433, 243434, 243435, 243436, 243437, 243438, 243439) c6( ) c7(cF, cz, aT); #c1(CWF19L2) c2(XP_006718831) c3(CWF19-like protein 2 isoform X2) c4( ) c5(292018, 292019, 292020, 292021, 292022, 292023) c6( ) c7(cF, cz, aT); #c1(CWH43) c2(NP_079363) c3(PGAP2-interacting protein isoform 1) c4(217820) c5(217821, 217822, 217823, 217824, 217825, 217826) c6( ) c7(F); #c1(CWH43) c2(XP_011512060) c3(PGAP2-interacting protein isoform X3) c4( ) c5(302700) c6( ) c7(F); #c1(CX3CL1) c2(NP_002987) c3(fractalkine isoform 1 precursor) c4(134197) c5(134198, 134199, 134200, 134201, 134202, 134203, 134204, 134205) c6( ) c7(bM, T, ea, aFV, aZn, GO, aa, UC, aW, mQ, hl, vs, eE, cm, nB, U, uo, nw, aZo, m, wx, eg, hh, dt, dD, aw, fN, qW, cd, qI, rl, h, SH, IG, wb, aDp, wC, ap, hQ, fe, kp, kT, W, JM, bm, va, eo, cB, bL, cz, v, j, V, eA, eJ, rS, aT, Oi, cy, bq, an, ahE, ae, af, fO, aZm, r, Io, ahl, LV, pb, hc, cS, EY, fD, CS, uG, jh, wV, eq, ad, dP, aZp, tT, je, cr, hv, Fq, iV, eK, D, aS, ME, IC, y); #c1(CX3CR1) c2(NP_001164645) c3(CX3C chemokine receptor 1 isoform a) c4(67128, 67129, 67130) c5(67131, 67132, 67133, 67134, 67135, 67136, 67137, 67138, 67139, 67140, 67141, 67142, 67143, 67144, 67145, 67146, 67147) c6( ) c7(lD, bM, T, fR, ea, e, aI, aY, aE, K, GO, bc, hm, UC, ly, li, aW, vs, g, as, eE, cm, uC, y, eM, NI, nw, wx, m, hh, de, dt, dD, My, aw, aj, qW, cd, eW, Mo, Hx, vC, rI, cU, SH, h, dL, ey, aDp, Um, wC, ZC, ap, kp, lx, kT, W, lf, JM, bm, hs, at, va, cB, bL, Dw, eR, cz, cR, v, j, V, eA, J, eJ, di, rS, aT, agD, Oi, cy, UN, bg, ae, af, aZs, fO, aZm, LV, sK, pb, wg, ac, iM, iQ, hc, cS, dy, EY, aZr, iW, uG, jh, vr, aZq, uu, eq, ad, aZp, F, ot, oz, tT, uQ, DI, d, je, cr, dN, Fq, bz, nb, Om, dJ, aS, agI, ei, ME, IC, xg, hv); #c1(CX3CR1) c2(NP_001328) c3(CX3C chemokine receptor 1 isoform b) c4(116953, 116954) c5(116955, 116956, 116957, 116958, 116959, 116960, 116961, 116962, 116963, 116964, 116965, 116966, 116967, 116968, 116969, 116970, 116971, 116972, 116973, 116974, 116975) c6( ) c7(lD, bM, T, fR, ea, e, al, aY, aE, K, GO, bc, hm, ZC, ly, li, aW, vs, g, as, eE, cm, uC, y, eM, NI, nw, wx, m, hh, de, dt, dD, My, aw, aj, qW, cd, eW, Mo, Hx, vC, rI, cU, SH, h, dL, ey, aDp, Um, wC, ZC, ap, kp, lx, kT, W, lf, JM, bm, hs, at, va, cB, bL, Dw, eR, cz, cR, v, j, V, eA, J, eJ, di, rS, aT, agD, Oi, cy, UN, bq, ae, af, aZs, fO, aZm, LV, sK, pb, wg, ac, iM, iQ, hc, cS, dy, EY, aZr, iW, uG, jh, vr, aZq, uu, eq, ad, aZp, F, ot, oz, tT, uQ, DI, d, je, cr, dN, Fq, bz, nb, Om, dJ, aS, agl, ei, ME, IC, xg, hv); #c1(CXADR) c2(NP_001193993) c3(coxsackievirus and adenovirus receptor isoform 3 precursor) c4(83442) c5(83443, 83444, 83445, 83446, 83447, 83448) c6( ) c7(gV, T, dA, fR, qb, aw, jh, aA, bB, fd, wV, v, rf, ci, q, ad, eA, ip, eW, av, Yn, aT, dL, ae, af, eL, d, B, PP, s, hG, aW, Y, OX, oV, eH, ff, r, la, en, g, eF, t, cm, bz, iK, ck, kT, bP, aDX, eM, aHn, dB, bE, mx, hL, cj, gZ, iS, MJ, m, gT, bt, X); #c1(CXADR) c2(NP_001193994) c3(coxsackievirus and adenovirus receptor isoform 4 precursor) c4(83449) c5(83450, 83451, 83452, 83453, 83454, 83455) c6( ) c7(gV, T, dA, fR, qb, aw, jh, aA, bB, fd, wV, v, rf, ci, q, ad, eA, ip, eW, av, Yn, aT, dL, ae, af, eL, d, B, PP, s, hG, aW, Y, DX, oV, eH, ff, r, la, en, g, eF, t, cm, bz, iK, ck, kT, bP, aDX, eM, aHn, dB, bE, mx, hL, cj, gZ, iS, MJ, m, gT, bt, X); #c1(CXADR) c2(NP_001193995) c3(coxsackievirus and adenovirus receptor isoform 5 precursor) c4(83456) c5(83457, 83458, 83459, 83460, 83461, 83462) c6( ) c7(gV, T, dA, fR, qb, aw, jh, aA, bB, fd, wV, v, rf, ci, q, ad, eA, ip, eW, av, Yn, aT, dL, ae, af, eL, d, B, PP, s, hG, aW, Y, OX, oV, eH, ff, r, lo, en, g, eF, t, cm, bz, iK, ck, kT, bP, aDX, eM, aHn, dB, bE, mx, hL, cj, gZ, iS, MJ, m, gT, bt, X); #c1(CXADR) c2(NP_001329) c3(coxsackievirus and adenovirus receptor isoform 1 precursor) c4(116976, 116977) c5(116978, 116979, 116980, 116981, 116982, 116983, 116984, 116985, 116986, 116987, 116988, 116989) c6( ) c7(gV, T, dA, fR, qb, aw, jh, aA, bB, fd, wV, v, rf, ci, q, ad, eA, ip, eW, av, Yn, aT, dL, ae, af, eL, d, B, PP, s, hG, aW, Y, OX, oV, eH, ff, r, lo, en, g, eF, t, cm, bz, iK, ck, kT, bP, aDX, eM, aHn, dB, bE, mx, hL, cj, gZ, iS, MJ, m, gT, bt, X); #c1(CXADR) c2(XP_011527780) c3(coxsackievirus and adenovirus receptor isoform X4) c4(322748) c5( ) c6( ) c7(gV, T, dA, fR, qb, aw, jh, aA, bB, fd, wV, v, rf, ci, q, ad, eA, ip, eW, av, Yn, aT, dL, ae, af, eL, d, B, PP, s, hG, aW, Y, OX, oV, eH, ff, r, lo, en, g, eF, t, cm, bz, iK, ck, kT, bP, aDX, eM, aHn, dB, bE, mx, hL, cj, gZ, iS, MJ, m, gT, bt, X); #c1(CXADR) c2(XP_011527781) c3(coxsackievirus and adenovirus receptor isoform X5) c4( ) c5(322749, 322750, 322751, 322752, 322753, 322754) c6( ) c7(gV, T, dA, fR, qb, aw, jh, aA, bB, fd, wV, v, rf, ci, q, ad, eA, ip, eW, av, Yn, aT, dL, ae, af, eL, d, B, PP, s, hG, aW, Y, OX, oV, eH, ff, r, lo, en, g, eE, t, cm, bz, iK, ck, kT, bP, aDX, eM, aHn, dB, bE, mx, hL, cj, gZ, iS, MJ, m, gT, bt, X); #c1(CXCL1) c2(NP_001502) c3(growth-regulated alpha protein precursor) c4(118246) c5(118247, 118248, 118249, 118250, 118251, 118252) c6( ) c7(aZt, T, dD, bM, dA, Dw, qb, aD, aI, jx, aA, bB, j, ci, eq, bh, qN, V, q, Pm, ad, kL, dP, Ks, wD, hd, rw, qp, akJ, aT, cU, lG, Ds, dL, aLr, IQ, NM, ae, le, BO, s, ff, aW, sp, Y, az, hl, oV, r, mQ, kD, lo, aF, yq, en, as, eE, t, iV, fq, ck, D, gk, lt, aZu, pc, bE, AM, Jp, wR, m, fD, hh, y, bt, B); #c1(CXCL10) c2(NP_001556) c3(C—X—C motif chemokine 10 precursor) c4(118934) c5(118935, 118936, 118937, 118938, 118939, 118940) c6( ) c7(bM, T, fR, if, al, bO, fd, cL, ci, hh, aR, wa, azY, xy, dV, Ds, K, hu, wt, aWf, eL, be, aa, amN, aW, qS, fc, hl, Ku, pL, eE, uC, ha, y, aZx, eM, aDs, dc, ki, cj, m, gn, hh, aDi, Ht, dD, afA, ht, aFc, fN, n, aj, fr, apt, aBI, uE, qN, Za, qW, ai, eh, eW, aZv, cU, lG, h, dL, eV, pi, cY, xP, Nr, A, fJ, aq, po, kp, CQ, xe, hL, at, aDx, aEG, nz, B, ka, aZy, avm, dK, lH, yk, jx, eX, aA, fF, hz, v, j, V, eA, J, o, ady, jZ, aT, cy, aLM, aDt, XZ, eu, hM, s, Y, bg, r, lo, en, aaO, t, pb, ck, OW, ac, nM, lI, ig, iQ, hc, AH, wR, dy, bt, vi, Kd, aD, df, jh, auq, dG, eq, jE, wV, pz, ad, aoH, dP, hX, F, ds, hD, vB, ji, lQ, amY, NM, vP, yF, uQ, d, ff, wc, aZw, cr, eZ, aF, Fq, iV, Nq, LB, D, gk, eU, Lj, dO, hE, kS, X, hv); #c1(CXCL11) c2(NP_005400) c3(C—X—C motif chemokine 11 isoform 1 precursor) c4(155718) c5(155719, 155720, 155721, 155722, 155723, 155724, 155725, 155726, 155727, 155728, 155729, 155730) c6(155731, 155732) c7(T, id, jx, jh, cL, j, ci, fr, eA, o, F, dV, aT, h, IQ, db, eG, d, xR, aW, ff, Pg, dN, aq, lo, fe, un, en, as, aaO, t, iR, aZz, xT, iQ, W, eM, lI, xO, dc, at, m, B); #c1(CXCL12) c2(NP_000600) c3(stromal cell-derived factor 1 isoform beta precursor) c4(13662) c5(13663, 13664, 13665, 13666, 13667, 13668, 13669) c6(13670) c7(lD, bM, T, aC, aiH, fR, ea, if, e, al, eh, bB, fd, axk, ci, bh, mF, ip, wa, x, bv, aE, iI, rJ, K, eL, hm, ly, yo, aW, hI, g, as, eF, ir, cm, bw, iP, ba, ou, eM, iA, AM, iT, cj, k, Hb, m, ym, pJ, Vj, dD, sw, zt, iB, aw, NT, adk, n, aj, oY, fr, qN, qW, cd, ai, ke, JX, ft, jz, zw, ql, h, lG, eV, hn, dL, vx, A, apo, sp, fe, aq, Og, mo, zZ, cM, lx, aCz, dB, hL, bm, hR, pg, fL, aDE, aZD, cB, B, AN, aEC, it, bL, apE, aZA, dA, mr, fG, jx, eX, aA, tc, hz, j, C, uW, V, q, J, eA, mj, RU, RI, hb, afQ, ld, yg, aT, cy, bq, aFm, ae, af, eu, qw, Uf, s, nO, aZB, oV, Y, bg, r, en, cl, t, iK, pb, vk, ck, nM, ac, aZC, iQ, gX, cS, ij, zu, bt, Ze, aDj, VB, hS, kh, id, gN, jh, vr, dG, Gn, eq, tK, mC, ad, hX, dP, fU, av, F, py, yt, NS, io, hD, JK, yF, uQ, d, lx, lR, hG, et, qt, ff, eH, Of, eZ, kD, aeV, aoF, aF, BG, iV, bz, eK, LB, es, D, Bv, arY, pc, Ew, bE, aED, lI, gZ, aS, ME, y, ra, X); #c1(CXCL12) c2(NP_001029058) c3(stromal cell-derived factor 1 isoform gamma precursor) c4(30754, 30755, 30756) c5( ) c6( ) c7(lD, bM, T, aC, aiH, fR, ea, if, e, al, eh, bB, fd, axk, ci, bh, mF, ip, wa, x, bv, aE, iI, rJ, K, eL, hm, ly, yo, aW, hI, g, as, eF, ir, cm, bw, iP, ba, ou, eM, iA, AM, iT, cj, k, Hb, m, ym, pJ, Vj, dD, sw, zt, iB, aw, NT, adk, n, aj, oY, fr, qN, qW, cd, ai, ke, JX, ft, jz, zw, ql, h, IG, eV, hn, dL, vx, A, apo, sp, fe, aq, Og, mo, zZ, cM, lx, aCz, dB, hL, bm, hR, pg, fL, aDE, aZD, cB, B, AN, aEC, it, bL, apE, aZA, dA, mr, fG, jx, eX, aA, tc, hz, j, C, uW, V, q, J, eA, mj, RU, RI, hb, afQ, ld, yg, aT, cy, bq, aFm, ae, af, eu, qw, Uf, s, nO, aZB, oV, Y, bg, r, en, cl, t, iK, pb, vk, ck, nM, ac, aZC, iQ, gX, cS, ij, zu, bt, Ze, aDj, VB, hS, kh, id, gN, jh, vr, dG, Gn, eq, tK, mC, ad, hX, dP, fU, av, F, py, yt, NS, io, hD, JK, yF, uQ, d, lx, lR, hG, et, qt, ff, eH, Of, eZ, kD, aeV, aoF, aF, BG, iV, bz, eK, LB, es, D, Bv, arY, pc, Ew, bE, aED, lI, gZ, aS, ME, y, ra, X); #c1(CXCL12) c2(NP_001171605) c3(stromal cell-derived factor 1 isoform delta precursor) c4(70739) c5(70740, 70741, 70742, 70743, 70744, 70745, 70746, 70747, 70748, 70749, 70750, 70751, 70752, 70753, 70754) c6(70755, 70756, 70757) c7(lD, bM, T, aC, aiH, fR, ea, if, e, al, eh, bB, fd, axk, ci, bh, mF, ip, wa, x, bv, aE, iI, rJ, K, eL, hm, ly, yo, aW, hI, g, as, eF, ir, cm, bw, iP, ba, ou, eM, iA, AM, iT, cj, k, Hb, m, ym, pJ, Vj, dD, sw, zt, iB, aw, NT, adk, n, aj, oY, fr, qN, qW, cd, ai, ke, JX, ft, jz, zw, ql, h, IG, eV, hn, dL, vx, A, apo, sp, fe, aq, Og, mo, zZ, cM, lx, aCz, dB, hL, bm, hR, pg, fL, aDE, aZD, cB, B, AN, aEC, it, bL, apE, aZA, dA, mr, fG, jx, eX, aA, tc, hz, j, C, uW, V, q, J, eA, mj, RU, RI, hb, afQ, ld, yg, aT, cy, bq, aFm, ae, af, eu, qw, Uf, s, nO, aZB, oV, Y, bg, r, en, cl, t, iK, pb, vk, ck, nM, ac, aZC, iQ, gX, cS, ij, zu, bt, Ze, aDj, VB, hS, kh, id, gN, jh, vr, dG, Gn, eq, tK, mC, ad, hX, dP, fU, av, F, py, yt, NS, io, hD, JK, yF, uQ, d, lx, lR, hG, et, qt, ff, eH, Of, eZ, kD, aeV, aoF, aF, BG, iV, bz, eK, LB, es, D, Bv, arY, pc, Ew, bE, aED, lI, gZ, aS, ME, y, ra, X); #c1(CXCL12) c2(NP_954637) c3(stromal cell-derived factor 1 isoform alpha precursor) c4( ) c5(261110, 261111, 261112, 261113, 261114, 261115, 261116, 261117, 261118, 261119, 261120, 261121, 261122, 261123, 261124) c6(261125, 261126, 261127) c7(lD, bM, T, aC, aiH, fR, ea, if, e, al, eh, bB, fd, axk, ci, bh, mF, ip, wa, x, bv, aE, iI, rJ, K, eL, hm, ly, yo, aW, hI, g, as, eF, ir, cm, bw, iP, ba, ou, eM, iA, AM, iT, cj, k, Hb, m, ym, pJ, Vj, dD, sw, zt, iB, aw, NT, adk, n, aj, oY, fr, qN, qW, cd, ai, ke, JX, ft, jz, zw, ql, h, IG, eV, hn, dL, vx, A, apo, sp, fe, aq, Og, mo, zZ, cM, lx, aCz, dB, hL, bm, hR, pg, fL, aDE, aZD, cB, B, AN, aEC, it, bL, apE, aZA, dA, mr, fG, jx, eX, aA, tc, hz, j, C, uW, V, q, J, eA, mj, RU, RI, hb, afQ, ld, yg, aT, cy, bq, aFm, ae, af, eu, qw, Uf, s, nO, aZB, oV, Y, bg, r, en, cl, t, iK, pb, vk, ck, nM, ac, aZC, iQ, gX, cS, ij, zu, bt, Ze, aDj, VB, hS, kh, id, gN, jh, vr, dG, Gn, eq, tK, mC, ad, hX, dP, fU, av, F, py, yt, NS, io, hD, JK, yF, uQ, d, lx, lR, hG, et, qt, ff, eH, Of, eZ, kD, aeV, aoF, aF, BG, iV, bz, eK, LB, es, D, Bv, arY, pc, Ew, bE, aED, lI, gZ, aS, ME, y, ra, X); #c1(CXCL13) c2(NP_006410) c3(C—X—C motif chemokine 13 precursor) c4(164788) c5(164789, 164790, 164791, 164792, 164793, 164794) c6( ) c7(bM, T, dD, fM, Dw, fR, ea, fN, cz, jh, v, eq, apt, aOJ, AO, V, pd, mC, Pm, aZE, aoH, x, auO, Mo, aT, h, Ds, aJb, eL, hM, lx, aW, ff, az, aFK, Pg, eZ, en, iV, pL, cm, aAr, LB, y, eU, bP, aHL, U, cj, at, eo, k, yH, fL, fD, ij, hv); #c1(CXCL14) c2(NP_004878) c3(C—X—C motif chemokine 14 precursor) c4(150495, 150496) c5(150497, 150498, 150499, 150500, 150501, 150502, 150503, 150504, 150505, 150506, 150507, 150508) c6( ) c7(bM, T, Dw, aC, dA, jx, aA, n, ci, q, ad, dP, av, aE, aT, h, Ds, K, ae, JI, aW, Y, vj, ff, r, aq, aF, en, g, apx, t, iK, bz, nM, nB, vA, at, lB, iu, cn); #c1(CXCL16) c2(NP_001094282) c3(C—X—C motif chemokine 16 precursor) c4(40649) c5(40650, 40651, 40652, 40653, 40654, 40655, 40656, 40657, 40658, 40659) c6( ) c7(oO, bM, T, dD, Dw, aC, eR, ea, e, cL, j, ci, eq, jO, fr, q, cd, o, ad, eA, bv, dY, aE, Db, cy, Ds, hP, K, ae, eN, aZF, up, Ls, bg, hl, r, fe, aF, ha, es, ac, iA, dh, cS, aS, ei, y, B); #c1(CXCL17) c2(NP_940879) c3(VEGF coregulated chemokine 1 precursor) c4(260023) c5(260024, 260025, 260026, 260027, 260028, 260029, 260030, 260031, 260032, 260033) c6( ) c7(dA, if, PX, q, qN, aZG, bz, B); #c1(CXCL2) c2(NP_002080) c3(C—X—C motif chemokine 2 precursor) c4(124315) c5(124316, 124317, 124318, 124319, 124320, 124321) c6( ) c7(bM, Dw, wi, id, fG, ht, hE, cz, aZH, v, j, BF, C, atK, cd, eA, Bc, aT, cU, lG, Ds, cy, h, K, IQ, ji, bA, aa, uA, zH, Y, EU, fO, Np, Bw, wc, fJ, aZI, lo, ajz, hJ, eE, D, ac, uR, mx, wq, wR, aUS, fD, Pk, cB, y); #c1(CXCL3) c2(NP_002081) c3(C—X—C motif chemokine 3 precursor) c4(124322) c5(124323, 124324, 124325, 124326, 124327, 124328) c6( ) c7(bM, T, Dw, aZH, vr, BH, il, atK, jw, eA, Bc, aT, h, IG, Ds, K, IQ, uA, aa, aW, aZI, EU, sP, t, aDs, uz, aUS, mk, qF, fD, Pk); #c1(CXCL5) c2(NP_002985) c3(C—X—C motif chemokine 5 precursor) c4(134190) c5(134191, 134192, 134193, 134194, 134195, 134196) c6( ) c7(bL, gh, T, bM, Dw, Mb, fR, dM, df, al, aA, n, aj, v, j, ci, q, J, ad, aZJ, dP, av, jz, ady, aE, Ds, aT, Ds, vB, yb, ae, aa, uQ, s, aW, Y, aZK, mQ, wc, ff, r, fe, lo, aF, en, g, iV, iK, bz, zV, LB, gk, eM, aDs, ki, dW, JH, fD, y, bt, qR, B); #c1(CXCL6) c2(NP_002984) c3(C—X—C motif chemokine 6 precursor) c4(134183) c5(134184, 134185, 134186, 134187, 134188, 134189) c6( ) c7(aZJ, bM, Dw, y, zH, eM, Bc, Y, aw, fO, wc, eH, an, IG, BH, Ds, zV, eF, t, ae, ad); #c1(CXCL8) c2(NP_000575) c3(interleukin-8 precursor) c4(12837) c5(12838, 12839, 12840, 12841, 12842, 12843) c6( ) c7(uB, gh, T, ea, fd, ci, bv, aE, rw, dV, BZ, Ds, Bi, zy, hH, cp, VF, aa, li, yo, az, ih, nY, zC, axp, GR, zV, ha, fT, gt, Jr, nB, dc, cj, Zn, Dt, k, aNn, fy, uL, cE, LT, nD, aFG, ht, aj, zo, bao, IG, ey, pl, MD, sp, fe, CQ, pm, apX, adz, aBs, avN, dB, ajd, XN, DD, aA, AO, bap, aXr, q, bag, zn, aZJ, cy, jj, dl, eu, le, bf, nO, bg, lo, cl, pb, Cv, cT, iM, ac, ig, AU, bt, rA, ao, BD, iW, aZU, rl, jN, jh, dG, Gn, ad, hX, iC, yt, oW, aHh, bac, IQ, WZ, cH, ff, aPK, Ce, tv, Sm, iV, bz, DF, baa, oQ, lf, lC, ra, ne, iu, nO, bM, if, e, bB, cL, lN, Tz, aZO, x, bah, be, Qe, eG, JI, fc, hl, kt, NR, aoD, nr, as, eE, eF, cm, bw, qJ, xD, ki, vA, mx, hh, pJ, aTW, aZY, dD, zt, n, uE, bak, b, bae, zw, ec, Xe, gd, eV, hn, xP, A, bad, hT, lb, po, yq, amo, aZR, hL, at, pg, ut, fL, Ss, arO, B, dA, bab, wL, eX, fF, GC, v, V, akG, eJ, aZZ, hW, rS, sI, ae, aAi, tn, zH, iZ, aOK, t, ck, kP, lI, gX, kV, dM, df, aEt, oR, wV, eq, hd, py, ds, aCJ, hD, JK, nJ, atX, CL, d, je, et, aZK, wc, rM, dN, kD, Z, bF, D, gk, Qa, dO, wz, Hs, aCP, y, kS, pC, aC, UH, fR, vf, atj, al, qj, bal, wa, AW, gJ, M, K, aZS, ajK, eL, adT, mH, HI, axu, aoo, Bw, XV, LZ, FU, aB, g, pL, uC, iP, aDs, aer, Gs, uo, dW, m, aZN, FW, sQ, sw, zX, aw, NT, BF, aZP, ft, Uh, gq, kH, cU, aaA, aDp, Ha, aTO, baj, BE, cM, GG, W, aZL, mg, hs, it, fM, fG, jx, aSE, j, eA, J, o, hh, Y, RF, Pg, r, ls, tu, en, iK, Dy, hc, azK, wR, dy, fD, LS, amL, GI, sY, kh, id, LX, bS, ah, dP, fU, aZW, ji, adx, NM, WW, IR, eH, Sn, cr, aZM, gE, VI, hp, Fq, iR, baf, Nq, TA, eB, cP, hE, pf, atv, eb, zh, aEQ, YX, hm, aW, hJ, arZ, eM, aFc, fr, ct, qN, ai, wG, h, jy, dL, bam, pj, Nr, oo, qY, aDe, aq, kp, gG, ban, op, NL, hk, bm, hR, uz, bai, aZV, aMk, hL, Dw, eR, rf, cR, aBo, C, aCY, aZX, mP, qp, afq, aT, dz, yb, aSX, an, af, aZQ, aqk, s, iU, aNi, akY, f, ajI, sS, aZT, nM, Zg, aJt, vZ, IV, AH, wq, aSu, bH, Kd, qX, Ke, Zl, qh, aD, Me, vr, Jz, jE, pz, mC, kL, qC, av, F, oz, sO, NS, Os, aNR, uQ, eZ, aEO, aFr, aF, uF, eK, LB, eU, pc, zr, hE, z, uR, aS, XO, GF, X, Ex); #c1(CXCL9) c2(NP_002407) c3(C—X—C motif chemokine 9 precursor) c4(128150) c5(128151, 128152, 128153, 128154, 128155, 128156) c6( ) c7(bM, T, dD, pF, fM, fR, jp, dA, Dw, fN, jh, wV, eq, jE, fr, kD, pz, eA, eW, wa, F, ds, dV, aT, hD, h, Ds, iY, lQ, amY, be, A, IU, je, aW, Y, ff, mQ, hI, wc, ge, cr, aq, lo, fe, en, iV, aaO, t, xe, f, eE, sS, OW, iM, eM, lI, ig, dc, hc, iT, fD, y, bt, B); #c1(CXCR1) c2(NP_000625) c3(C—X—C chemokine receptor type 1) c4(14054, 14055) c5(14056, 14057, 14058, 14059, 14060, 14061, 14062, 14063, 14064, 14065, 14066, 14067) c6( ) c7(bM, T, aC, fR, atj, aI, bB, ci, aE, aa, JI, aW, az, nY, eF, uC, eM, aDs, ki, vA, uo, sQ, NT, aj, qW, ai, ft, wG, Uh, h, dL, cY, bar, qY, fe, Og, CQ, op, lf, ajd, at, pg, ut, it, B, ka, dK, aA, J, aT, yb, aSX, ae, baq, Y, afq, ls, cl, pb, ck, ajl, DW, wq, ao, sY, df, aEt, ad, hX, dP, py, IC, IQ, WW, et, Of, eH, cr, aEO, kD, aF, uF, iV, bz, LB, pc, bE, y); #c1(CXCR2) c2(NP_001161770) c3(C—X—C chemokine receptor type 2) c4(65950, 65951, 65952, 65953, 65954, 65955) c5(65956, 65957, 65958, 65959, 65960, 65961, 65962, 65963, 65964, 65965, 65966, 65967, 65968, 65969, 65970, 65971, 65972, 65973, 65974, 65975, 65976, 65977, 65978, 65979, 65980, 65981, 65982, 65983, 65984, 65985, 65986, 65987, 65988, 65989, 65990, 65991, 65992, 65993) c6( ) c7(bM, T, aC, ea, atj, fd, bB, ci, mF, aDI, AW, aE, Ds, K, hu, hH, Qe, aa, DA, JI, aW, az, nY, g, as, hJ, eE, uC, lt, eM, aDs, AM, ki, has, m, aTW, dD, ht, NT, n, fr, uE, ai, ft, Uh, cU, h, aDp, Ha, cY, Yd, qY, fe, kp, CQ, apX, lf, ajd, at, uz, pg, it, B, Dw, ka, Lx, jx, aA, afK, v, C, V, q, aT, cy, yb, aSX, ae, af, le, bf, Y, bg, r, cl, t, pb, aZu, fD, ao, nZ, sY, qb, df, vr, Jz, jE, eq, ad, dP, aHF, av, oz, ji, WW, d, et, cr, eZ, dN, kD, aF, un, Fq, iV, bz, DF, LB, pc, bE, aFb, Hs, IC, iu, y); #c1(CXCR3) c2(NP_001136269) c3(C—X—C chemokine receptor type 3 isoform 2) c4(54743) c5(54744, 54745, 54746, 54747, 54748, 54749) c6( ) c7(bM, T, fR, fd, bB, cL, IN, wa, Ds, hH, bat, be, cp, aa, aW, az, mQ, g, eE, eF, eM, Jr, iA, ki, mx, cj, k, m, dD, fr, kD, uE, ke, h, IG, xP, A, fJ, ap, fe, cM, xe, hk, at, Pr, Dw, ka, fM, avm, jx, fZ, v, j, bX, V, q, o, eA, zn, jZ, aT, cy, ae, hM, Y, r, la, en, aaO, t, ck, cT, OW, ac, iM, lI, hc, Da, dy, fD, hS, aZ, iW, jh, wV, eq, fu, EA, ad, aoH, dP, hX, F, hD, vB, IQ, Od, NM, vP, uQ, je, lx, ff, eH, eZ, dN, hp, iV, aEx, Hv, es, bE, y, hv); #c1(CXCR3) c2(NP_001495) c3(C—X—C chemokine receptor type 3 isoform 1) c4(118193) c5(118194, 118195, 118196, 118197, 118198, 118199) c6( ) c7(bM, T, fR, fd, bB, cL, lN, wa, Ds, hH, bat, be, cp, aa, aW, az, mQ, g, eE, eF, eM, Jr, iA, ki, mx, cj, k, m, dD, fr, kD, uE, ke, h, IG, xP, A, f J, ap, fe, cM, xe, hk, at, Pr, Dw, ka, fM, avm, jx, fZ, v, j, bX, V, q, o, eA, zn, jZ, aT, cy, ae, hM, Y, r, lo, en, aaO, t, ck, cT, OW, ac, iM, lI, hc, Da, dy, fD, hS, aZ, iW, jh, wV, eq, fu, EA, ad, aoH, dP, hX, F, hD, vB, IQ, Od, NM, vP, uQ, je, lx, ff, eH, eZ, dN, hp, iV, aEx, Hv, es, bE, y, hv); #c1(CXCR3) c2(XP_005262314) c3(C—X—C chemokine receptor type 3 isoform X2) c4(277827) c5(277828, 277829, 277830, 277831, 277832, 277833) c6( ) c7(bM, T, fR, fd, bB, cL, IN, wa, Ds, hH, bat, be, cp, aa, aW, az, mQ, g, eE, eF, eM, Jr, iA, ki, mx, cj, k, m, dD, fr, kD, uE, ke, h, IG, xP, A, f J, ap, fe, cM, xe, hk, at, Pr, Dw, ka, fM, avm, jx, fZ, v, j, bX, V, q, o, eA, zn, jZ, aT, cy, ae, hM, Y, r, lo, en, aaO, t, ck, cT, OW, ac, iM, lI, hc, Da, dy, fD, hS, aZ, iW, jh, wV, eq, fu, EA, ad, aoH, dP, hX, F, hD, vB, IQ, Od, NM, vP, uQ, je, lx, ff, eH, eZ, dN, hp, iV, aEx, Hv, es, bE, y, hv); #c1(CXCR4) c2(NP_001008540) c3(C—X—C chemokine receptor type 4 isoform a) c4(23325) c5(23326, 23327, 23328, 23329, 23330, 23331) c6( ) c7(oO, hM, T, os, ID, aC, fR, ea, if, EQ, fd, bB, ci, bh, aR, ip, wa, x, hv, xy, aE, K, hu, eL, hm, aa, ly, aEV, yo, aW, az, hl, aoD, g, as, zE, eF, ir, Qt, cm, iP, bw, yd, bax, ou, CC, ba, eM, nB, AM, dc, iA, go, iT, cj, cX, k, m, ym, fy, Vj, sc, cZ, dD, IT, sw, zX, iB, ht, NT, n, oY, fr, qN, qW, ai, eW, BI, JX, ft, jz, azD, zw, ql, kH, h, hn, dL, bav, dd, KV, dx, OV, MD, Cw, CM, lb, fe, aq, Og, mo, cM, lx, ok, dB, NL, PI, ajd, bm, hR, pg, agy, apE, it, B, AN, aEC, bL, fM, dA, DD, Dh, fG, aA, tc, afK, v, j, C, AO, V, q, eA, eJ, RU, RI, nv, hb, Qg, rS, qK, yg, aT, cy, bau, ae, af, jf, qw, s, Qr, nO, oV, Y, iU, bg, r, lo, gm, eS, en, cl, LV, t, iK, pb, ck, haw, sS, baz, kP, Dy, ac, ig, nM, iM, iQ, gX, adR, np, fl, ht, zA, Ze, VB, hS, gV, kh, Dd, iW, jh, oZ, eq, hF, aue, ad, dP, av, hd, py, io, hD, bay, nJ, uQ, d, lx, je, hG, et, qt, ff, eH, Of, eZ, kD, aeV, aoF, aF, iV, bz, dr, DF, eK, LB, es, OG, pc, bE, dO, aS, y); #c1(CXCR4) c2(NP_003458) c3(C—X—C chemokine receptor type 4 isoform b) c4(138463, 138464) c5(138465, 138466, 138467, 138468, 138469, 138470, 138471, 138472, 138473, 138474, 138475, 138476) c6( ) c7(oO, bM, T, os, ID, aC, fR, ea, if, EQ, fd, bB, ci, bh, aR, ip, wa, x, hv, xy, aE, K, hu, eL, hm, aa, ly, aEV, yo, aW, az, hl, aoD, g, as, zE, eF, ir, Qt, cm, iP, bw, yd, bax, ou, CC, ba, eM, nB, AM, dc, iA, go, iT, cj, cX, k, m, ym, fy, Vj, sc, cZ, dD, lT, sw, zX, iB, ht, NT, n, oY, fr, qN, qW, ai, eW, VI, JX, ft, jz, azD, zw, qI, kH, h, hn, dL, bav, dd, KV, dx, DV, MD, Cw, CM, lb, fe, aq, Dg, mo, cM, lx, ok, dB, NL, PI, ajd, bm, hR, pg, agy, apE, it, B, AN, aEC, bL, fM, dA, DD, Dh, fG, aA, tc, afK, v, j, C, AD, V, q, eA, eJ, RU, RI, nv, hb, Qg, rS, qK, yg, aT, cy, bau, ae, af, jf, qw, s, Qr, nO, oV, Y, iU, bg, r, la, gm, eS, en, cl, LV, t, iK, pb, ck, haw, sS, baz, kP, Dy, ac, ig, nM, iM, iQ, gX, adR, np, fl, ht, zA, Ze, VB, hS, gV, kh, Dd, iW, jh, oZ, eq, hF, aue, ad, dP, av, hd, py, io, hD, bay, nJ, uQ, d, lx, je, hG, et, qt, ff, eH, Of, eZ, kD, aeV, aoF, aF, iV, bz, dr, DF, eK, LB, es, OG, pc, bE, dO, aS, y); #c1(CXCR5) c2(NP_001707) c3(C—X—C chemokine receptor type 5 isoform 1) c4(120290) c5(120291, 120292, 120293, 120294, 120295, 120296) c6( ) c7(T, fM, dA, fR, aD, dK, aw, iW, jh, fd, jE, ci, AO, V, pd, q, ad, hX, qC, av, x, F, aE, pe, aT, h, ae, be, hM, lx, aW, az, aFK, eZ, r, kD, cm, aAr, bE, AV, cj, eo, k, y, apE); #c1(CXCR6) c2(NP_006555) c3(C—X—C chemokine receptor type 6) c4(166201) c5(166202, 166203, 166204, 166205, 166206, 166207, 166208, 166209, 166210, 166211, 166212, 166213, 166214, 166215, 166216, 166217, 166218, 166219) c6( ) c7(bL, bM, T, dD, iH, ea, yk, hU, ha, cz, fd, n, cL, v, j, ci, eq, fr, yp, ye, xY, o, cd, ad, ai, eA, yn, av, aE, Db, xW, aeO, aT, hD, xV, h, bK, K, yb, yh, hP, yj, ae, yi, xX, d, xU, aW, Y, Ls, hl, yc, aq, aF, yq, t, nC, bz, iK, iP, dR, jq, ok, yf, bP, yI, iQ, xZ, dO, cj, tl, at, cS, m, cP, ei, y, B); #c1(CXorf36) c2(NP_078965) c3(deleted in autism-related protein 1 isoform 2 precursor) c4(216292) c5(216293, 216294, 216295, 216296, 216297, 216298, 216299, 216300) c6(216301, 216302) c7(nf, VX, nA); #c1(CXorf36) c2(NP_789789) c3(deleted in autism-related protein 1 isoform 1 precursor) c4(252301) c5(252302, 252303, 252304, 252305, 252306, 252307, 252308, 252309) c6(252310, 252311) c7(nf, VX, nA); #c1(CXorf66) c2(NP_001013421) c3(uncharacterized protein CXorf66 precursor) c4(25532) c5(25533, 25534, 25535, 25536, 25537, 25538) c6( ) c7(he, bK); #c1(CXorf67) c2(NP_981952) c3(uncharacterized protein CXorf67) c4(263191) c5(263192, 263193, 263194, 263195, 263196, 263197) c6( ) c7(dB, Th, ad); #c1(CXXC1) c2(NP_001095124) c3(CXXC-type zinc finger protein 1 isoform 1) c4(40801) c5(40802, 40803, 40804, 40805, 40806, 40807) c6( ) c7(T, if, aA, fo, ci, qN, Qp, V, q, aR, eA, baA, bv, iu, hb, Xe, Qk, h, fb, iL, bA, TC, A, nO, Y, ff, xs, eH, eZ, r, nf, uY, fe, aF, en, eF, bN, Qi, nM, eM, agl, cj, B, fl); #c1(CXXC1) c2(NP_055408) c3(CXXC-type zinc finger protein 1 isoform 2) c4(180901) c5(180902, 180903, 180904, 180905, 180906, 180907) c6( ) c7(T, if, aA, fo, ci, qN, Qp, V, q, aR, eA, baA, bv, iu, hb, Xe, Qk, h, fb, iL, bA, TC, A, nO, Y, ff, xs, eH, eZ, r, nf, uY, fe, aF, en, eF, bN, Qi, nM, eM, agl, cj, B, fl); #c1(CXXC4) c2(NP_079488) c3(CXXC-type zinc finger protein 4) c4(218324) c5(218325, 218326, 218327, 218328, 218329, 218330, 218331, 218332, 218333, 218334) c6( ) c7(ck, iO, aA, aF, j, fr, hr, bw, B, ad); #c1(CYB561) c2(XP_005257148) c3(cytochrome b561 isoform X1) c4(274710, 274711, 274712) c5(274713, 274714, 274715, 274716, 274717, 274718, 274719, 274720, 274721, 274722, 274723, 274724, 274725, 274726, 274727, 274728, 274729, 274730, 274731, 274732) c6( ) c7(il, cz); #c1(CYB561) c2(XP_011522726) c3(cytochrome 6561 isoform X2) c4( ) c5(317260, 317261, 317262, 317263, 317264, 317265, 317266) c6( ) c7(il, cz); #c1(CYB561D2) c2(NP_001278213) c3(cytochrome 6561 domain-containing protein 2) c4(109498) c5(109499, 109500, 109501, 109502, 109503, 109504, 109505, 109506, 109507, 109508, 109509, 109510, 109511, 109512, 109513, 109514, 109515, 109516) c6( ) c7(T, bz, eM); #c1(CYB5A) c2(NP_001177736) c3(cytochrome b5 isoform 3) c4(72947) c5(72948, 72949, 72950, 72951, 72952, 72953) c6( ) c7(dP, aE, s, il, axv, baC, adW, ti, baD, v, kp, K, uF, baB); #c1(CYB5A) c2(NP_683725) c3(cytochrome b5 isoform 1) c4(242527, 242528) c5(242529, 242530, 242531, 242532, 242533, 242534, 242535) c6( ) c7(dP, aE, s, il, axv, baC, adW, ti, baD, v, kp, K, uF, baB); #c1(CYB5A) c2(XP_011524137) c3(cytochrome b5 isoform X1) c4(318692) c5(318693, 318694, 318695, 318696, 318697, 318698, 318699, 318700, 318701, 318702, 318703) c6( ) c7(dP, aE, s, il, axv, baC, adW, ti, baD, v, kp, K, uF, baB); #c1(CYB5B) c2(NP_085056) c3(cytochrome b5 type B) c4(219235, 219236) c5(219237, 219238, 219239, 219240, 219241, 219242, 219243, 219244, 219245, 219246, 219247, 219248) c6( ) c7(eV, eX); #c1(CYB5R3) c2(NP_000389) c3(NADH-cytochrome 65 reductase 3 isoform 1) c4(8400) c5(8401, 8402, 8403, 8404, 8405, 8406, 8407, 8408) c6( ) c7(AX, ck, T, adc, XX, eR, baE, baF, Y, axv, baD, lo, rK, nA, Kp); #c1(CYB5R3) c2(NP_001123291) c3(NADH-cytochrome b5 reductase 3 isoform 2) c4( ) c5(46843, 46844, 46845, 46846, 46847, 46848, 46849, 46850, 46851, 46852, 46853, 46854, 46855, 46856, 46857, 46858, 46859, 46860, 46861) c6( ) c7(AX, ck, T, adc, XX, eR, baE, baF, Y, axv, baD, lo, rK, nA, Kp); #c1(CYB5R3) c2(NP_001165131) c3(NADH-cytochrome b5 reductase 3 isoform 3) c4(67511, 67512, 67513) c5(67514, 67515, 67516, 67517, 67518, 67519, 67520, 67521, 67522) c6( ) c7(AX, ck, T, adc, XX, eR, baE, baF, Y, axv, baD, lo, rK, nA, Kp); #c1(CYB5R4) c2(NP_057314) c3(cytochrome b5 reductase 4) c4(190053, 190054) c5(190055, 190056, 190057, 190058, 190059, 190060, 190061, 190062, 190063, 190064, 190065, 190066) c6( ) c7(bL, mg, aj, mf, ey, K, J); #c1(CYBA) c2(NP_000092) c3(cytochrome b-245 light chain) c4(1668) c5(1669, 1670, 1671, 1672, 1673, 1674, 1675) c6( ) c7(bL, bM, Dw, dD, eR, QO, ea, iW, e, aXb, aw, aA, cz, n, aj, mw, j, Sv, fu, v, eh, aY, eq, Tz, J, dZ, Mg, nH, dY, baG, M, aT, IG, Ds, dL, K, bq, asC, eN, vl, eu, tw, sj, A, cH, aW, eZ, vs, aB, aF, bw, cM, pb, qa, eK, ck, kT, fT, wg, ac, hA, pE, eB, vy, gZ, uz, at, CZ, cS, dy, ei, IC, bt, zA, us, sZ); #c1(CYBB) c2(NP_000388) c3(cytochrome b-245 heavy chain) c4(8385, 8386, 8387) c5(8388, 8389, 8390, 8391, 8392, 8393, 8394, 8395, 8396, 8397, 8398, 8399) c6( ) c7(T, dD, id, dA, Fj, eR, qb, ea, aw, al, ew, cz, sM, cR, aj, baK, j, v, oY, PJ, eg, eq, cd, J, ai, x, azY, aE, sN, baH, Bc, dV, aT, h, IG, cy, dL, ey, baJ, K, bq, wt, af, VF, uQ, wC, A, cW, aW, Cu, zb, fO, Y, oV, kD, fe, eK, aFA, bal, wg, ac, c, hA, dB, iT, wE, eB, at, Zn, wR, baL, dy, k, Hb, fD, zA, jr); #c1(CYBB) c2(XP_011542192) c3(cytochrome b-245 heavy chain isoform X1) c4( ) c5(340663, 340664, 340665, 340666, 340667, 340668) c6( ) c7(T, dD, id, dA, Fj, eR, qb, ea, aw, al, ew, cz, sM, cR, aj, baK, j, v, oY, PJ, eg, eq, cd, J, ai, x, azY, aE, sN, baH, Bc, dV, aT, h, IG, cy, dL, ey, baJ, K, bq, wt, af, VF, uQ, wC, A, cW, aW, Cu, zb, fO, Y, oV, kD, fe, eK, aFA, bal, wg, ac, c, hA, dB, iT, wE, eB, at, Zn, wR, baL, dy, k, Hb, fD, zA, jr); #c1(CYBRD1) c2(NP_001120855) c3(cytochrome b reductase 1 isoform 2) c4(44851) c5(44852, 44853, 44854, 44855, 44856, 44857) c6( ) c7(ac, yw, e, aw, r, yy, yu, j, ci, q, eu); #c1(CYBRD1) c2(NP_001243838) c3(cytochrome b reductase 1 isoform 3) c4(91809) c5(91810, 91811, 91812, 91813, 91814, 91815) c6( ) c7(ac, yw, e, aw, r, yy, yu, j, ci, q, eu); #c1(CYBRD1) c2(NP_079119) c3(cytochrome b reductase 1 isoform 1) c4(217168) c5(217169, 217170, 217171, 217172, 217173, 217174) c6( ) c7(ac, yw, e, aw, r, yy, yu, j, ci, q, eu); #c1(CYC1) c2(NP_001907) c3(cytochrome c1, heme protein, mitochondrial precursor) c4(122133) c5(122134, 122135, 122136, 122137, 122138, 122139) c6( ) c7(t, baM, kI, eH, eF); #c1(CYCS) c2(NP_061820) c3(cytochrome c) c4(200497, 200498) c5(200499, 200500, 200501, 200502, 200503, 200504, 200505, 200506, 200507, 200508, 200509, 200510, 200511, 200512, 200513, 200514, 200515, 200516, 200517, 200518) c6( ) c7(baN, kh, BU, PK, xu, aW, fc, oW, aT, NI, zN, cy, v, DU, vs, Lz, y, nJ, eu); #c1(CYFIP1) c2(NP_001274739) c3(cytoplasmic FMR1-interacting protein 1 isoform a) c4(106720, 106721, 106722) c5(106723, 106724, 106725, 106726, 106727, 106728, 106729, 106730, 106731, 106732, 106733, 106734, 106735, 106736, 106737, 106738) c6( ) c7(ck, pr, hb, aNd, axd, fq, jj, aNe, rz, acD, kS, rc, aR, bN); #c1(CYFIP1) c2(XP_011542177) c3(cytoplasmic FMR1-interacting protein 1 isoform X1) c4(340607) c5(340608, 340609, 340610, 340611, 340612, 340613) c6( ) c7(ck, pr, hb, aNd, axd, fq, jj, aNe, rz, acD, kS, rc, aR, bN); #c1(CYFIP1) c2(XP_011542178) c3(cytoplasmic FMR1-interacting protein 1 isoform X2) c4(340614) c5(340615, 340616, 340617, 340618, 340619, 340620, 340621, 340622, 340623, 340624, 340625, 340626) c6( ) c7(ck, pr, hb, aNd, axd, fq, jj, aNe, rz, acD, kS, rc, aR, bN); #c1(CYFIP2) c2(NP_001278650) c3(cytoplasmic FMR1-interacting protein 2 isoform b) c4(109910, 109911) c5(109912, 109913, 109914, 109915, 109916, 109917, 109918) c6( ) c7(bM, T, bE, aW, sp, cj, aT, bB, m, Ku, t); #c1(CYFIP2) c2(NP_001278651) c3(cytoplasmic FMR1-interacting protein 2 isoform c) c4(109919, 109920) c5(109921, 109922, 109923, 109924, 109925, 109926, 109927, 109928, 109929, 109930, 109931, 109932) c6( ) c7(bM, T, bE, aW, sp, cj, aT, bB, m, Ku, t); #c1(CYFIP2) c2(XP_011532818) c3(cytoplasmic FMR1-interacting protein 2 isoform X1) c4(328943) c5(328944, 328945, 328946, 328947, 328948, 328949, 328950, 328951, 328952, 328953) c6( ) c7(bM, T, bE, aW, sp, cj, aT, bB, m, Ku, t); #c1(CYFIP2) c2(XP_011532819) c3(cytoplasmic FMR1-interacting protein 2 isoform X2) c4( ) c5(328954, 328955, 328956, 328957, 328958) c6( ) c7(bM, T, bE, aW, sp, cj, aT, bB, m, Ku, t); #c1(CYGB) c2(NP_599030) c3(cytoglobin) c4(235615) c5(235616, 235617, 235618, 235619, 235620, 235621) c6( ) c7(T, al, aj, Fb, ci, J, av, yw, aT, K, qD, d, aW, fQ, baP, g, t, iK, bz, aeb, bE, eM, dB, baO, dy, m, Hb); #c1(CYLC1) c2(NP_066941) c3(cylicin-1 isoform 1) c4(207623, 207624) c5(207625, 207626, 207627, 207628, 207629, 207630, 207631, 207632, 207633, 207634, 207635, 207636) c6( ) c7(h, T, iQ, jh); #c1(CYLC1) c2(XP_005262143) c3(cylicin-1 isoform X1) c4( ) c5(277753) c6( ) c7(h, T, iQ, jh); #c1(CYLC2) c2(NP_001331) c3(cylicin-2) c4(116990) c5(116991, 116992, 116993, 116994, 116995, 116996, 116997, 116998, 116999, 117000) c6( ) c7(aur, cF, aw, j, af); #c1(CYLD) c2(NP_001035877) c3(ubiquitin carboxyl-terminal hydrolase CYLD isoform 2) c4(33321) c5(33322, 33323, 33324, 33325, 33326, 33327, 33328, 33329, 33330, 33331) c6( ) c7(oO, T, dD, fM, fR, pf, ea, fG, yk, ht, atj, eX, aA, fd, j, ci, eq, Qo, pd, ai, ad, eA, AW, Tf, qK, kH, aT, h, eV, hu, baU, azU, LC, Y, aW, baT, aJL, cr, ff, fe, aF, en, g, baR, dr, baQ, bF, sS, YE, eM, aJm, aJt, hk, baS, fD, jQ, y, aFf, cE, B); #c1(CYLD) c2(NP_056062) c3(ubiquitin carboxyl-terminal hydrolase CYLD isoform 1) c4(185474, 185475) c5(185476, 185477, 185478, 185479, 185480, 185481, 185482, 185483, 185484, 185485, 185486, 185487) c6( ) c7(oO, T, dD, fM, fR, pf, ea, fG, yk, ht, atj, eX, aA, fd, j, ci, eq, Qo, pd, ai, ad, eA, AW, Tf, qK, kH, aT, h, eV, hu, baU, azU, LC, Y, aW, baT, aJL, cr, ff, fe, aF, en, g, baR, dr, baQ, bF, sS, YE, eM, aJm, aJt, hk, baS, fD, jQ, y, aFf, cE, B); #c1(CYP11A1) c2(NP_000772) c3(cholesterol side-chain cleavage enzyme, mitochondrial isoform a precursor) c4(15555, 15556, 15557) c5(15558, 15559, 15560, 15561, 15562, 15563, 15564, 15565, 15566, 15567, 15568, 15569, 15570, 15571, 15572, 15573, 15574, 15575, 15576, 15577) c6( ) c7(bL, gh, aZ, My, baV, jN, cz, adW, it, dG, UI, ml, eA, ad, UE, qC, dP, acu, aX, aT, iv, baX, uV, bq, ae, yi, avH, kl, s, aW, Pp, Hu, cl, zE, bN, baW, PI, FV, hL, Uv, va, cB); #c1(CYP11A1) c2(NP_001093243) c3(cholesterol side-chain cleavage enzyme, mitochondrial isoform b) c4(40147, 40148) c5(40149, 40150, 40151, 40152, 40153, 40154, 40155, 40156, 40157, 40158, 40159, 40160, 40161, 40162) c6( ) c7(bL, gh, aZ, My, baV, jN, cz, adW, it, dG, UI, ml, eA, ad, UE, qC, dP, acu, aX, aT, iv, baX, uV, bq, ae, yi, avH, kl, s, aW, Pp, Hu, cI, zE, bN, baW, PI, FV, hL, Uv, va, cB); #c1(CYP11B1) c2(NP_000488) c3(cytochrome P450 11B1, mitochondrial isoform 1 precursor) c4(9836) c5(9837, 9838, 9839, 9840, 9841, 9842) c6( ) c7(Fj, bbf, iW, e, cz, j, MA, cd, bbc, qC, XD, aX, adX, aT, bbd, bbb, Fg, avH, s, baY, iw, bbe, baZ, Hu, aPz, dr, qa, bN, es, bba, iA, adZ, FV, jr); #c1(CYP11B1) c2(NP_001021384) c3(cytochrome P450 11B1, mitochondrial isoform 2 precursor) c4(29150) c5(29151, 29152, 29153, 29154, 29155, 29156) c6( ) c7(Fj, bbf, iW, e, cz, j, MA, cd, bbc, qC, XD, aX, adX, aT, bbd, bbb, Fg, avH, s, baY, iw, bbe, baZ, Hu, aPz, dr, qa, bN, es, bba, iA, adZ, FV, jr); #c1(CYP11B2) c2(NP_000489) c3(cytochrome P450 11B2, mitochondrial precursor) c4(9843) c5(9844, 9845, 9846, 9847, 9848, 9849) c6( ) c7(bL, dD, tf, bbi, Fj, mr, eR, wH, iW, oe, e, uv, aw, cz, eh, tc, bD, wV, j, uj, ah, m, MA, aY, eq, JW, cd, bbc, bbg, cc, ec, MF, sN, bbh, M, aT, vg, iv, vc, ey, bbd, bbb, bq, sR, Fg, af, sj, kl, avH, Mr, IR, baY, s, ajT, iw, uU, bbe, Hu, mo, dw, uC, qa, es, kT, bba, ac, iA, bbj, dh, uR, mx, fP, uo, gZ, uz, uS, dy, wL, ei, ud, IC, sZ, y, vQ); #c1(CYP17A1) c2(NP_000093) c3(steroid 17-alpha-hydroxylase/17,20 lyase precursor) c4(1676) c5(1677, 1678, 1679, 1680, 1681, 1682) c6( ) c7(G, atT, T, Fj, aC, acz, e, ci, Ef, aE, u, iI, aX, bbm, aW, hI, baC, nY, PQ, g, hJ, zE, uC, bbk, eM, iA, vA, Gs, cX, m, gn, aTW, FW, gU, uH, My, aw, NT, Wb, ml, hw, adX, jy, dL, aUm, uV, hB, Dz, RA, RT, Ln, fQ, aq, Pp, Hu, op, adZ, afc, anZ, hL, at, gv, B, bbl, hL, fM, eR, oe, jx, aee, aA, cz, j, q, UE, cF, ld, aT, bbd, an, Fg, ae, af, eu, bA, kI, s, Y, aeS, r, HL, eS, en, hu, cl, t, f, bN, sn, ac, aZ, bbn, iW, jh, ad, qC, dP, HF, I, F, vJ, acu, io, na, WZ, BO, Ub, PE, ff, eZ, aF, iR, bz, dr, es, gk, pu, yE, UB, aeg, Lb, be, y, aed, X, BA); #c1(CYP19A1) c2(NP_112503) c3(aromatase) c4(221187, 221188, 221189, 221190, 221191, 221192, 221193, 221194, 221195, 221196, 221197) c5(221198, 221199, 221200, 221201, 221202, 221203, 221204, 221205, 221206, 221207, 221208, 221209, 221210, 221211, 221212, 221213, 221214, 221215, 221216, 221217, 221218, 221219, 221220, 221221, 221222, 221223, 221224, 221225, 221226, 221227, 221228, 221229, 221230, 221231, 221232, 221233, 221234, 221235, 221236, 221237, 221238, 221239, 221240, 221241, 221242, 221243, 221244, 221245, 221246, 221247, 221248, 221249, 221250, 221251, 221252, 221253, 221254, 221255, 221256, 221257, 221258, 221259, 221260, 221261, 221262, 221263, 221264, 221265, 221266, 221267, 221268, 221269, 221270, 221271, 221272, 221273, 221274, 221275, 221276, 221277, 221278, 221279, 221280, 221281, 221282, 221283) c6( ) c7(G, T, UH, fR, pf, acz, if, e, al, cL, gf, ci, bbo, il, ari, iv, bbu, HR, qM, ake, iE, aW, fc, Np, g, eM, nB, vA, uo, cX, m, yA, aTW, Th, dD, gU, sQ, ht, NT, n, ml, qN, awq, bbt, hw, zf, lG, dL, aUm, uV, bbr, wC, yi, iw, aq, zZ, cM, Ld, op, afc, anZ, JQ, PI, mg, hL, at, ut, gv, B, qc, bL, aA, cz, v, j, bX, bbq, q, eA, UE, bbp, MP, aT, qv, Fx, bq, an, ae, af, bA, kl, bf, aeS, r, bbs, eS, cI, pt, t, f, bN, sn, aeM, gT, JO, hS, kh, aZ, iW, jN, uu, eq, ad, dP, av, hd, Db, vJ, aet, hD, vc, IQ, nJ, aeQ, d, PE, NH, eZ, aF, EX, bz, dr, yE, ag, auZ, sG, aeg, hE, aed, y); #c1(CYP1A1) c2(NP_000490) c3(cytochrome P450 1A1) c4(9850, 9851, 9852) c5(9853, 9854, 9855, 9856, 9857, 9858, 9859, 9860, 9861, 9862, 9863, 9864, 9865, 9866, 9867, 9868, 9869, 9870, 9871, 9872, 9873, 9874) c6( ) c7(bM, atT, T, aC, fR, ea, if, e, al, fd, bB, gf, ci, fw, sD, x, aEQ, Na, aE, u, lv, azm, K, aNZ, hu, hH, eL, xQ, zQ, aW, mQ, hI, LZ, aB, g, eE, bw, uC, eM, nB, iA, nF, iT, vA, cj, NI, uo, cX, uJ, dW, k, m, Vj, iu, bbv, FW, gU, dD, sQ, aw, ht, NT, n, BH, aj, fr, qN, jw, ai, hr, FY, cn, ft, hw, Bj, Lv, IG, h, dL, eV, Gw, Dz, hB, ny, FZ, mR, fJ, AQ, aq, Pp, ajo, pm, cM, Ld, Zj, np, ar, bbz, W, dB, hk, bbx, PI, Qu, hL, at, uz, ut, gv, YH, zl, it, B, bL, jv, eR, jp, oe, Lx, jx, eX, aA, cz, hy, v, j, acn, C, bX, Qn, Iu, q, J, eA, eJ, XX, mP, afQ, aT, Nc, bq, an, ae, af, bA, kI, s, NE, nO, iU, Y, Lf, afS, r, Ox, Io, eS, en, bu, cl, t, Px, bbw, iK, bN, ck, sS, sn, c, ac, ig, bbA, fD, im, ht, rA, hS, GI, nZ, aZ, iW, ha, uO, jh, Gn, jE, eq, iG, hF, ad, kL, hX, dP, av, wD, I, hd, ib, Db, yt, io, hD, ji, IQ, bby, aOh, WZ, IU, BO, Ub, cH, PE, cW, hG, ff, cr, eZ, Ej, aF, EZ, iV, bz, eK, TA, es, yE, bE, pP, gZ, dX, aS, Lb, Gu, oQ, X, rk); #c1(CYP1A2) c2(NP_000752) c3(cytochrome P450 1A2) c4(15321) c5(15322, 15323, 15324, 15325, 15326, 15327) c6( ) c7(bM, T, aC, fV, ea, e, al, bB, ci, bh, HH, gF, Na, aE, K, eL, bbC, aW, hI, g, bbD, cj, k, m, dD, NA, aw, ht, NT, n, ct, bbB, jz, Gw, dL, OM, Gc, ny, Nu, alt, fQ, aq, Ld, cv, W, Qu, hL, at, IB, B, bL, jp, aA, cz, hy, j, C, bX, q, eJ, XX, nv, aT, gz, an, ae, s, r, HL, en, bu, cl, t, iK, ac, c, ht, xb, GI, iW, ha, aHv, eq, uu, qi, ad, dP, av, HF, ib, PE, ff, aF, Fq, Z, bz, gk, adc, bE, Gu, QV, iu, y, BA); #c1(CYP1B1) c2(NP_000095) c3(cytochrome P450 1B1) c4(1683) c5(1684, 1685, 1686, 1687, 1688, 1689, 1690, 1691, 1692, 1693) c6( ) c7(lD, bM, T, aC, if, e, bbH, fd, gf, ci, ip, x, aE, K, hu, eL, aa, ly, zQ, dH, aW, wE, g, bw, bbE, iA, vA, Gs, bbD, cj, cX, k, bbF, m, aTW, iu, asW, ht, ko, fr, ml, qN, jw, hr, hw, dL, aUm, hB, bbG, ny, kj, aq, kp, dw, Ld, op, lx, kn, dB, anZ, Pl, hL, at, gv, JJ, sa, it, B, jv, fM, DD, aA, cz, hy, v, aSL, q, eA, aT, an, rz, ae, bA, avV, s, Y, r, eS, en, bu, cl, t, iK, bN, pZ, IJ, HQ, GI, iW, jh, Gn, ad, dP, av, ib, io, fb, nJ, IR, Ub, qt, PE, ff, eZ, aF, bz, es, yE, pP, aS, X); #c1(CYP21A2) c2(NP_000491) c3(steroid 21-hydroxylase isoform a) c4(9875, 9876, 9877, 9878) c5(9879, 9880, 9881, 9882, 9883, 9884, 9885, 9886, 9887, 9888, 9889, 9890, 9891, 9892, 9893, 9894, 9895, 9896, 9897, 9898, 9899, 9900, 9901, 9902, 9903, 9904, 9905, 9906, 9907, 9908, 9909, 9910, 9911, 9912, 9913, 9914) c6( ) c7(bbL, aZ, iW, aee, cz, v, ml, afD, Eh, bbc, KL, qC, b, aX, adX, bbI, uV, hK, Fg, dF, kI, avH, aiV, s, IC, iw, eZ, dq, aq, axx, Hu, mv, iR, cM, OU, dr, Wt, bbK, bN, amK, mO, y, IY, adZ, JQ, wz, cj, at, i, bbJ, B, ao); #c1(CYP21A2) c2(NP_001122062) c3(steroid 21-hydroxylase isoform b) c4(46350, 46351, 46352) c5(46353, 46354, 46355, 46356, 46357, 46358, 46359, 46360, 46361, 46362, 46363, 46364, 46365, 46366, 46367, 46368, 46369, 46370, 46371, 46372, 46373, 46374, 46375, 46376, 46377, 46378, 46379, 46380, 46381, 46382, 46383, 46384) c6( ) c7(bbL, aZ, iW, aee, cz, v, ml, afD, Eh, bbc, KL, qC, b, aX, adX, bbI, uV, hK, Fg, dF, kI, avH, aiV, s, IC, iw, eZ, dq, aq, axx, Hu, mv, iR, cM, OU, dr, Wt, bbK, bN, amK, mO, y, IY, adZ, JQ, wz, cj, at, i, bbJ, B, ao); #c1(CYP24A1) c2(NP_000773) c3(1,25-dihydroxyvitamin D(3) 24-hydroxylase, mitochondrial isoform 1 precursor) c4(15578) c5(15579, 15580, 15581, 15582, 15583, 15584) c6( ) c7(bM, T, iW, ht, Ay, bbO, n, oR, cz, j, ci, bX, aj, v, bB, V, qW, q, J, cd, ad, fU, amB, hd, av, TI, aE, iu, jz, zw, aT, dL, bbd, hu, hH, ae, azh, bbN, A, mR, qt, bbM, Y, aW, arp, r, aq, bbP, g, t, fr, bz, dr, qJ, arr, nM, eM, nB, bE, X, fP, at, dy, IS, B); #c1(CYP24A1) c2(NP_001122387) c3(1,25-dihydroxyvitamin D(3) 24-hydroxylase, mitochondrial isoform 2 precursor) c4(46586) c5(46587, 46588, 46589, 46590, 46591, 46592) c6( ) c7(bM, T, iW, ht, Ay, bbO, n, oR, cz, j, ci, bX, aj, v, bB, V, qW, q, J, cd, ad, fU, amB, hd, av, TI, aE, iu, jz, zw, aT, dL, bbd, hu, hH, ae, azh, bbN, A, mR, gt, bbM, Y, aW, arp, r, aq, bbP, g, t, fr, bz, dr, qJ, arr, nM, eM, nB, bE, X, fP, at, dy, IS, B); #c1(CYP26A1) c2(NP_000774) c3(cytochrome P450 26A1 isoform 1) c4(15585) c5(15586, 15587, 15588, 15589, 15590, 15591, 15592, 15593, 15594, 15595, 15596, 15597, 15598, 15599, 15600) c6( ) c7(T, dD, ea, ht, eq, ci, dP, aT, jj, af, mR, s, aW, Pg, LZ, g, cm, iK, bz, zV, ck, bF, pZ, lp, avF, dy, kS, X); #c1(CYP26A1) c2(NP_476498) c3(cytochrome P450 26A1 isoform 2) c4(230622) c5( ) c6( ) c7(T, dD, ea, ht, eq, ci, dP, aT, jj, af, mR, s, aW, Pg, LZ, g, cm, iK, bz, zV, ck, bF, pZ, lp, avF, dy, kS, X); #c1(CYP26B1) c2(NP_001264671) c3(cytochrome P450 26B1 isoform 2) c4(97654) c5(97655, 97656, 97657, 97658, 97659, 97660) c6( ) c7(dD, ea, ff, Az, v, dy, eq, en, iV, cm, avn, zV, bbQ); #c1(CYP26B1) c2(NP_063938) c3(cytochrome P450 26B1 isoform 1) c4(202244) c5(202245, 202246, 202247, 202248, 202249, 202250, 202251, 202252) c6(202253, 202254) c7(dD, ea, ff, Az, v, dy, eq, en, iV, cm, avn, zV, bbQ); #c1(CYP26C1) c2(NP_899230) c3(cytochrome P450 26C1) c4(258033) c5(258034, 258035, 258036, 258037, 258038, 258039) c6( ) c7(bbR, mR); #c1(CYP27A1) c2(NP_000775) c3(sterol 26-hydroxylase, mitochondrial precursor) c4(15601) c5(15602, 15603, 15604, 15605, 15606, 15607) c6( ) c7(bM, dD, ea, al, Vd, j, eq, bbS, ad, aR, dY, hB, dQ, H, an, ae, dH, Y, qS, aq, dg, hJ, eE, aFj, bbT, W, c, U, Lp, du, hE, B, L); #c1(CYP2781) c2(NP_000776) c3(25-hydroxyvitamin D-1 alpha hydroxylase, mitochondrial) c4(15608) c5(15609, 15610, 15611, 15612, 15613, 15614) c6( ) c7(bM, T, if, bB, cL, gf, gj, ci, bbZ, aY, Tz, xy, dV, K, bbV, hH, be, Zm, azh, aa, aW, hI, LZ, g, eE, qJ, ba, eY, xK, rq, Jr, nB, eM, iA, vA, U, vy, PV, iS, azg, m, IS, Le, iu, bca, bbW, aYZ, aAP, lo, NT, xJ, aj, fr, qN, qW, cd, amB, jz, zw, aow, cU, h, dL, Nr, Dg, mR, A, OX, arp, ks, fe, bbX, aq, pn, CQ, kT, YE, mg, at, E, uz, va, it, B, bL, bbU, rG, beb, eR, yk, cz, wo, v, j, C, V, q, J, n, eA, aT, aAR, jj, bq, hK, ae, bA, qw, s, Y, aCH, bg, r, aDm, rs, Lc, en, t, ck, ajl, arr, sS, BU, Dy, nM, ig, iQ, hr, wR, ars, gx, aZ, iW, Ay, ad, hX, av, abk, hd, F, vJ, hD, Dj, ji, nJ, yF, uQ, d, Ub, PE, vj, ff, cr, eZ, gl, hp, iV, HI, bz, dr, Nq, es, yE, bE, bbY, Lj, Km, ei, y, X, pC); #c1(CYP27C1) c2(NP_001001665) c3(cytochrome P450 27C1) c4(18933) c5(18934, 18935, 18936, 18937, 18938, 18939, 18940, 18941, 18942) c6( ) c7(Hr); #c1(CYP27C1) c2(XP_006712546) c3(cytochrome P450 27C1 isoform X1) c4( ) c5(286720) c6( ) c7(Hr); #c1(CYP2A13) c2(NP_000757) c3(cytochrome P450 2A13) c4(15351) c5(15352, 15353, 15354, 15355, 15356, 15357, 15358, 15359, 15360, 15361, 15362, 15363, 15364, 15365, 15366, 15367, 15368, 15369) c6( ) c7(GI, T, id, hy, bS, sD, aE, ja, Gw, dL, eL, s, Gv, ff, en, g, bz, dR, eM, vA, Gu, iu); #c1(CYP2A6) c2(NP_000753) c3(cytochrome P450 2A6 precursor) c4(15328, 15329, 15330) c5(15331, 15332, 15333, 15334, 15335, 15336) c6( ) c7(GI, T, jv, aqh, ha, bce, ht, aA, cz, bB, hy, bS, v, ct, ci, qN, it, bch, sD, q, ad, aI, hX, av, ib, aE, hb, ja, aT, Vv, h, aNU, dL, gl, K, Gw, hu, eL, na, ny, s, JI, aW, Gv, AQ, ff, hl, r, aq, en, g, Z, t, iK, bz, dR, gk, bcg, Qy, jx, eM, bE, bcf, X, bed, at, dy, bcc, Gu, xb, B); #c1(CYP2A7) c2(NP_000755) c3(cytochrome P450 2A7 isoform 1 precursor) c4(15337) c5(15338, 15339, 15340, 15341, 15342, 15343) c6( ) c7(dB, T, aPm, s, jp); #c1(CYP2A7) c2(NP_085079) c3(cytochrome P450 2A7 isoform 2 precursor) c4(219263) c5(219264, 219265, 219266, 219267, 219268, 219269) c6( ) c7(dB, T, aPm, s, jp); #c1(CYP2B6) c2(NP_000758) c3(cytochrome P450 2B6 precursor) c4(15370) c5(15371, 15372, 15373, 15374, 15375, 15376, 15377) c6( ) c7(bM, T, os, aC, xS, ea, e, al, fd, gA, IR, ci, bh, UI, HH, bck, aY, aR, x, aEQ, aE, iI, aX, bW, M, dV, iv, K, eL, bc, hm, eG, aiV, dH, aW, hC, az, hl, fc, bcj, hJ, eE, aaD, bw, zV, bbk, eM, nB, iT, vA, bbD, U, cj, dW, bcl, k, iu, dD, gU, QO, aw, aDI, aj, ct, ml, cd, eW, bbB, ke, qg, Bj, adX, h, bci, dL, uV, OM, he, aK, Nu, mR, auM, aq, kp, pm, dw, zZ, np, hg, iO, nk, adZ, dB, hk, FV, Uv, avF, YH, JJ, bcn, B, bL, bbU, eR, QW, jx, aA, cz, ti, v, j, q, J, eA, cF, aT, cy, jj, bbd, Fg, ae, kl, s, iU, oV, Y, Lf, r, bbs, lo, HL, en, cl, t, f, pb, ck, sS, iQ, ac, wO, hc, bcm, gX, ht, lJ, ars, On, aqh, aZ, ha, jN, jh, oZ, bS, eq, aXD, qi, hF, ad, wD, qC, dP, HF, av, F, nj, nJ, WZ, mu, d, hG, cH, Gv, ff, eH, eZ, gl, dq, aF, aDd, Fq, EZ, Z, bz, YR, dR, TA, gk, MJ, Lb, MG, hE, kS, GW, y); #c1(CYP2B6) c2(XP_011524849) c3(cytochrome P450 2B6 isoform X4) c4(319278) c5(319279, 319280, 319281, 319282, 319283) c6( ) c7(bM, T, os, aC, xS, ea, e, al, fd, gA, IR, ci, bh, UI, HH, bck, aY, aR, x, aEQ, aE, iI, aX, bW, M, dV, iv, K, eL, bc, hm, eG, aiV, dH, aW, hC, az, hl, fc, bcj, hJ, eE, aaD, bw, zV, bbk, eM, nB, iT, vA, bbD, U, cj, dW, bcl, k, iu, dD, gU, QO, aw, aDI, aj, ct, ml, cd, eW, bbB, ke, qg, Bj, adX, h, bci, dL, uV, OM, he, aK, Nu, mR, auM, aq, kp, pm, dw, zZ, op, hq, iO, ok, adZ, dB, hk, FV, Uv, avF, YH, JJ, bcn, B, bL, bbU, eR, QW, jx, aA, cz, ti, v, j, q, J, eA, cF, aT, cy, jj, bbd, Fg, ae, kl, s, iU, oV, Y, Lf, r, bbs, lo, HL, en, cl, t, f, pb, ck, sS, iQ, ac, wO, hc, hem, gX, bt, IJ, ars, On, aqh, aZ, ha, jN, jh, oZ, bS, eq, aXD, gi, hF, ad, wD, qC, dP, HF, av, F, oj, nJ, WZ, mu, d, hG, cH, Gv, ff, eH, eZ, gl, dq, aF, aDd, Fq, EZ, Z, bz, YR, dR, TA, gk, MJ, Lb, MG, hE, kS, GW, y); #c1(CYP2B6) c2(XP_011524851) c3(cytochrome P450 2B6 isoform X6) c4(319284) c5(319285) c6( ) c7(bM, T, os, aC, xS, ea, e, al, fd, gA, IR, ci, bh, UI, HH, bck, aY, aR, x, aEQ, aE, iI, aX, bW, M, dV, iv, K, eL, bc, hm, eG, aiV, dH, aW, hC, az, hl, fc, bcj, hJ, eF, aaD, bw, zV, bbk, eM, nB, iT, vA, bbD, U, cj, dW, bcl, k, iu, dD, gU, QO, aw, aDI, aj, ct, ml, cd, eW, bbB, ke, qg, Bj, adX, h, bci, dL, uV, DM, he, aK, Nu, mR, auM, aq, kp, pm, dw, zZ, op, hq, iO, ok, adZ, dB, hk, FV, Uv, avF, YH, JJ, bcn, B, bL, bbU, eR, QW, jx, aA, cz, ti, v, j, q, J, eA, cF, aT, cy, jj, bbd, Fg, ae, kl, s, iU, oV, Y, Lf, r, bbs, lo, HL, en, cl, t, f, pb, ck, sS, iQ, ac, wO, hc, bcm, gX, bt, IJ, ars, On, aqh, aZ, ha, jN, jh, al, bS, eq, aXD, gi, hF, ad, wD, qC, dP, HF, av, F, oj, nJ, WZ, mu, d, hG, cH, Gv, ff, eH, eZ, gl, dq, aF, aDd, Fq, EZ, Z, bz, YR, dR, TA, gk, MJ, Lb, MG, hE, kS, GW, y); #c1(CYP2B6) c2(XP_011524852) c3(cytochrome P450 2B6 isoform X7) c4(319286) c5(319287, 319288, 319289, 319290, 319291, 319292, 319293, 319294, 319295, 319296, 319297) c6( ) c7(bM, T, os, aC, xS, ea, e, al, fd, gA, IR, ci, bh, UI, HH, bck, aY, aR, x, aEQ, aE, iI, aX, bW, M, dV, iv, K, eL, bc, hm, eG, aiV, dH, aW, hC, az, hl, fc, bcj, hJ, eF, aaD, bw, zV, bbk, eM, nB, iT, vA, bbD, U, cj, dW, bcl, k, iu, dD, gU, QO, aw, aDI, aj, ct, ml, cd, eW, bbB, ke, qg, Bj, adX, h, bci, dL, uV, DM, he, aK, Nu, mR, auM, aq, kp, pm, dw, zZ, op, hg, iO, ok, adZ, dB, hk, FV, Uv, avF, YH, JJ, bcn, B, bL, bbU, eR, QW, jx, aA, cz, ti, v, j, q, J, eA, cF, aT, cy, jj, bbd, Fg, ae, kl, s, iU, oV, Y, Lf, r, bbs, lo, HL, en, cl, t, f, pb, ck, sS, iQ, ac, wO, hc, bcm, gX, bt, IJ, ars, On, aqh, aZ, ha, jN, jh, oZ, bS, eq, aXD, qi, hF, ad, wD, qC, dP, HF, av, F, oj, nJ, WZ, mu, d, hG, cH, Gv, ff, eH, al, gl, dq, aF, aDd, Fq, EZ, Z, bz, YR, dR, TA, gk, MJ, Lb, MG, hE, kS, GW, y); #c1(CYP2C18) c2(NP_000763) c3(cytochrome P450 2C18 isoform 1 precursor) c4(15420) c5(15421, 15422, 15423, 15424, 15425, 15426) c6( ) c7(T, eR, oe, ha, cz, j, ct, ad, Gt, ib, aT, af, ny, IR, aW, Au, aB, EZ, aaD, bz, ok, cj, B, On); #c1(CYP2C18) c2(NP_001122397) c3(cytochrome P450 2C18 isoform 2 precursor) c4(46664) c5(46665, 46666, 46667, 46668, 46669, 46670) c6( ) c7(T, eR, oe, ha, cz, j, ct, ad, Gt, ib, aT, af, ny, IR, aW, Au, aB, EZ, aaD, bz, ok, cj, B, On); #c1(CYP2C19) c2(NP_000760) c3(cytochrome P450 2C19 precursor) c4(15378) c5(15379, 15380, 15381, 15382, 15383, 15384) c6( ) c7(bM, T, atj, e, al, lr, bO, fd, lj, gf, aY, Gt, iI, fS, M, K, dQ, hH, eL, eN, hm, aW, az, hl, fc, nY, kt, Au, aB, bw, aaD, fT, eM, iT, qr, vy, cj, cE, dD, aw, ht, n, aj, oY, ct, ai, hr, cc, adX, h, dL, DU, he, ny, aiL, ag, zZ, cM, sE, hg, kT, ok, adZ, vb, at, E, uz, B, gc, bL, bcq, aCw, eR, wL, oe, aA, cz, aSE, v, j, q, qp, rS, aT, yb, rE, bau, dl, ne, r, iy, akY, en, t, iK, pb, ck, ac, ig, aJt, gX, ao, gV, akd, qb, aD, ha, aET, bS, eq, ad, wD, hX, dP, av, ib, bco, uD, bcp, azS, IR, cH, ff, cr, eZ, kD, aF, aDd, EZ, Sm, Z, bz, iq, gk, aka, dX, Lb, hE, gq, y); #c1(CYP2C8) c2(NP_000761) c3(cytochrome P450 2C8 isoform a precursor) c4(15385, 15386, 15387) c5(15388, 15389, 15390, 15391, 15392, 15393, 15394, 15395, 15396, 15397, 15398, 15399, 15400, 15401, 15402, 15403, 15404, 15405) c6( ) c7(bL, gV, GI, dD, eR, jp, ea, e, ha, ht, aw, cz, fd, hy, j, ci, fu, bX, eq, aR, fU, Gt, pN, fm, fS, M, aT, oj, cy, oW, dV, Gw, dQ, dl, eu, hi, s, hG, aW, Au, aB, bct, aaD, bcr, t, ac, bo, bcs, cj, dX, dy, k, m, eg, Gu); #c1(CYP2C8) c2(NP_001185783) c3(cytochrome P450 2C8 isoform c) c4(76333) c5(76334, 76335, 76336, 76337, 76338, 76339, 76340, 76341, 76342, 76343, 76344, 76345, 76346, 76347, 76348, 76349, 76350, 76351) c6( ) c7(bL, gV, GI, dD, eR, jp, ea, e, ha, ht, aw, cz, fd, hy, j, ci, fu, bX, eq, aR, fU, Gt, pN, fm, fS, M, aT, oj, cy, oW, dV, Gw, dQ, dl, eu, hi, s, hG, aW, Au, aB, bct, aaD, bcr, t, ac, bo, bcs, cj, dX, dy, k, m, eg, Gu); #c1(CYP2C8) c2(NP_001185784) c3(cytochrome P450 2C8 isoform b) c4(76352, 76353) c5( ) c6( ) c7(bL, gV, GI, dD, eR, jp, ea, e, ha, ht, aw, cz, fd, hy, j, ci, fu, bX, eq, aR, fU, Gt, pN, fm, fS, M, aT, oj, cy, oW, dV, Gw, dQ, dl, eu, hi, s, hG, aW, Au, aB, bct, aaD, bcr, t, ac, bo, bcs, cj, dX, dy, k, m, eg, Gu); #c1(CYP2C9) c2(NP_000762) c3(cytochrome P450 2C9 precursor) c4(15406, 15407) c5(15408, 15409, 15410, 15411, 15412, 15413, 15414, 15415, 15416, 15417, 15418, 15419) c6( ) c7(lD, bM, T, fV, ea, e, lr, bO, bB, lj, fd, bh, aR, Gt, vh, iI, fS, M, hu, dQ, wt, aa, ly, aW, Az, hl, Au, aB, bct, aaD, fT, cj, wx, m, dD, aw, ht, ez, n, aj, oY, ct, cd, ai, cc, h, eV, Gw, dL, DU, ajV, FZ, aq, cM, lx, ok, dB, bo, E, uz, it, B, bL, aCw, eR, mr, wL, oe, uv, eX, aA, cz, hy, v, j, q, J, aT, cy, dl, kl, su, s, r, t, iK, pb, ac, ig, fP, dy, Tu, gV, GI, iW, ha, bS, eq, av, F, oj, uD, IR, cH, bcv, gC, EZ, Sm, Z, bz, qa, ig, bE, ag, gZ, bcu, dX, aS, bcc, Lb, Gu, y, X); #c1(CYP2D6) c2(NP_000097) c3(cytochrome P450 2D6 isoform 1) c4(1694, 1695, 1696, 1697, 1698, 1699) c5(1700, 1701, 1702, 1703, 1704, 1705, 1706, 1707, 1708, 1709, 1710, 1711, 1712, 1713, 1714, 1715, 1716, 1717, 1718, 1719, 1720, 1721, 1722, 1723, 1724, 1725, 1726, 1727, 1728, 1729, 1730, 1731, 1732, 1733, 1734, 1735) c6( ) c7(bM, T, fR, wH, fV, if, e, al, bO, fd, bB, gf, ci, bh, HH, aY, gF, ip, Ef, x, fS, aU, aNZ, dQ, eL, xa, bc, hm, gr, ayT, ye, zQ, dH, aAu, aW, wF, hI, aaN, Qq, Au, g, Eg, Jl, as, uC, yX, y, eM, nB, iT, U, cj, uo, dW, k, m, aCS, bcA, gL, FW, aEj, sQ, bcy, aw, n, aj, fr, ct, qN, cd, ai, FY, ke, b, ft, co, cc, h, dL, he, HO, A, mR, AQ, QP, aQ, fe, dw, cM, cv, hq, ok, W, cA, lX, dB, hk, bo, FV, JM, VU, hR, E, ut, at, YH, IB, jd, bcn, B, qc, bL, jv, aCw, bcB, iH, eR, wL, oe, hx, jx, aA, cz, tc, ti, hy, j, bcE, GC, V, J, aqs, aqN, ga, aVM, afQ, aqI, aT, an, rE, lM, ae, af, dl, Su, ak, kl, avV, hex, s, iU, Y, bcz, bcD, r, lo, aMA, HL, en, t, xw, iK, pb, bN, ck, sS, nM, iQ, pZ, hA, ig, bcw, fP, dy, bt, ao, vi, GI, VR, qb, ha, KO, bS, uu, jE, Gn, hF, ad, qC, av, HF, F, afm, bcC, oj, IQ, uD, na, hZ, BN, cH, PE, KS, ff, eZ, gI, aF, gu, Z, iR, bz, ga, gk, bE, pE, sG, gZ, dX, i, QV, ne, rk); #c1(CYP2D6) c2(NP_001020332) c3(cytochrome P450 2D6 isoform 2) c4(28624, 28625, 28626) c5(28627, 28628, 28629, 28630, 28631, 28632, 28633, 28634, 28635, 28636, 28637, 28638, 28639, 28640, 28641, 28642, 28643, 28644, 28645) c6( ) c7(bM, T, fR, wH, fV, if, e, al, bO, fd, bB, gf, ci, bh, HH, aY, gF, ip, Ef, x, fS, aU, aNZ, dQ, eL, xa, bc, hm, gr, ayT, ye, zQ, dH, aAu, aW, wF, hl, aaN, Qq, Au, g, Eg, Jl, as, uC, yX, y, eM, nB, iT, U, cj, uo, dW, k, m, aCS, bcA, gL, FW, aEj, sQ, bcy, aw, n, aj, fr, ct, qN, cd, ai, FY, ke, b, ft, co, cc, h, dL, he, HO, A, mR, AQ, OP, aq, fe, dw, cM, cv, hq, ok, W, cA, lX, dB, hk, bo, FV, JM, VU, hR, E, ut, at, YH, IB, jd, bcn, B, qc, bL, jv, aCw, bcB, iH, eR, wL, oe, hx, jx, aA, cz, tc, ti, hy, j, bcE, GC, V, J, aqs, aqN, ga, aVM, afQ, agI, aT, an, rE, lM, ae, af, dl, Su, ak, kl, avV, hex, s, iU, Y, bcz, bcD, r, lo, aMA, HL, en, t, xw, iK, pb, bN, ck, sS, nM, iQ, pZ, hA, ig, bcw, fP, dy, bt, ao, vi, GI, VR, qb, ha, KO, bS, uu, jE, Gn, hF, ad, gC, av, HF, F, afm, bcC, oj, IQ, uD, na, hZ, BN, cH, PE, KS, ff, eZ, gI, aF, gu, Z, iR, bz, qa, gk, bE, pE, sG, gZ, dX, i, QV, ne, rk); #c1(CYP2D6) c2(XP_011528273) c3(cytochrome P450 2D6 isoform X8) c4(323348) c5( ) c6( ) c7(bM, T, fR, wH, fV, if, e, al, bO, fd, bB, gf, ci, bh, HH, aY, gF, ip, Ef, x, fS, aU, aNZ, dQ, eL, xa, bc, hm, gr, ayT, ye, zQ, dH, aAu, aW, wF, hl, aaN, Qg, Au, g, Eg, Jl, as, uC, yX, y, eM, nB, iT, U, cj, uo, dW, k, m, aCS, bcA, gL, FW, aEj, sQ, bcy, aw, n, aj, fr, ct, qN, cd, ai, FY, ke, b, ft, co, cc, h, dL, he, HO, A, mR, AQ, QP, ag, fe, dw, cM, cv, hq, ok, W, cA, lX, dB, hk, bo, FV, JM, VU, hR, E, ut, at, YH, IB, jd, bcn, B, qc, bL, jv, aCw, bcB, iH, eR, wL, oe, hx, jx, aA, cz, tc, ti, hy, j, bcE, GC, V, J, aqs, aqN, ga, aVM, afQ, agI, aT, an, rE, lM, ae, af, dl, Su, ak, kl, avV, hex, s, iU, Y, bcz, bcD, r, lo, aMA, HL, en, t, xw, iK, pb, bN, ck, sS, nM, iQ, pZ, hA, ig, bcw, fP, dy, bt, ao, vi, GI, VR, qb, ha, KO, bS, uu, jE, Gn, hF, ad, qC, av, HF, F, afm, bcC, oj, IQ, uD, na, hZ, BN, cH, PE, KS, ff, eZ, gI, aF, gu, Z, iR, bz, ga, gk, bE, pE, sG, gZ, dX, i, QV, ne, rk); #c1(CYP2D6) c2(XP_011528274) c3(cytochrome P450 2D6 isoform X5) c4( ) c5(323349, 323350, 323351, 323352, 323353) c6( ) c7(bM, T, fR, wH, fV, if, e, al, bO, fd, bB, gf, ci, bh, HH, aY, gF, ip, Ef, x, fS, aU, aNZ, dQ, eL, xa, bc, hm, gr, ayT, ye, zQ, dH, aAu, aW, wf, hI, aaN, Qq, Au, g, Eg, Jl, as, uC, yX, y, eM, nB, iT, U, cj, uo, dW, k, m, aCS, bcA, gL, FW, aEj, sQ, bcy, aw, n, aj, fr, ct, qN, cd, ai, FY, ke, b, ft, co, cc, h, dL, he, HO, A, mR, AQ, QP, aq, fe, dw, cM, cv, hq, ok, W, cA, lX, dB, hk, bo, FV, JM, VU, hR, E, ut, at, YH, IB, jd, bcn, B, qc, bL, jv, aCw, bcB, iH, eR, wL, oe, hx, jx, aA, cz, tc, ti, hy, j, bcE, GC, V, J, aqs, aqN, ga, aVM, afQ, agI, aT, aw, rE, lM, ae, af, dl, Su, ak, kl, avV, hex, s, iU, Y, bcz, bcD, r, lo, aMA, HL, en, t, xw, iK, pb, bN, ck, sS, nM, iQ, pZ, hA, ig, bcw, fP, dy, bt, ao, vi, Gl, VR, gb, ha, KO, bS, uu, jE, Gn, hF, ad, qC, av, HF, F, afm, bcC, oj, IQ, uD, na, hZ, BN, cH, PE, KS, ff, eZ, gI, aF, gu, Z, iR, bz, qa, gk, bE, pE, sG, gZ, dX, i, QV, ne, rk); #c1(CYP2E1) c2(NP_000764) c3(cytochrome P450 2E1 precursor) c4(15427, 15428) c5(15429, 15430, 15431, 15432, 15433, 15434, 15435, 15436, 15437, 15438, 15439, 15440, 15441, 15442, 15443, 15444) c6( ) c7(bM, atT, T, uK, fV, ea, e, al, if, lj, ci, bh, fw, sD, x, Na, AW, Ok, K, aDZ, hu, LG, dF, eL, JI, aW, az, hl, fc, kt, aB, g, bw, uC, yd, fT, eM, nF, Gs, mx, cj, dW, bcl, k, gn, m, pw, abh, FW, dD, OI, ht, NT, aj, ct, qN, cd, ai, FY, ft, cc, Bj, h, IG, aNU, dL, eV, ZN, ajV, hi, ny, A, AQ, aq, bcG, ar, W, dB, Qu, at, uz, NB, IB, it, B, bL, bcF, jv, jp, oe, jx, eX, aA, cz, hy, v, j, C, bX, q, J, eA, Yn, aT, cy, Nc, bq, an, ae, avV, s, Y, r, en, t, iK, pb, tR, ck, BU, ig, bcH, fD, bt, GI, id, aD, iW, jh, Gd, bS, eq, iG, hF, ad, kL, dP, av, F, ib, NS, iL, na, Gv, ff, eZ, aF, Sm, Z, iR, bz, Oh, TA, es, gk, Zi, gZ, cP, i, hE, iu, rk); #c1(CYP2F1) c2(NP_000765) c3(cytochrome P450 2F1 precursor) c4(15445) c5(15446, 15447, 15448, 15449, 15450, 15451) c6( ) c7(at, av, bz, jp); #c1(CYP2R1) c2(NP_078790) c3(vitamin D 25-hydroxylase) c4(215477) c5(215478, 215479, 215480, 215481, 215482, 215483) c6( ) c7(bM, aec, al, gN, bB, hz, fr, UI, V, q, eA, ad, F, aE, bcl, hD, h, ae, A, ND, Y, r, dr, qJ, nM, bE, mg, y, B, ars); #c1(CYP2S1) c2(NP_085125) c3(cytochrome P450 2S1 precursor) c4(219310, 219311, 219312) c5(219313, 219314, 219315, 219316, 219317, 219318, 219319, 219320, 219321, 219322, 219323, 219324, 219325, 219326, 219327, 219328, 219329, 219330) c6( ) c7(IQ, cr, cz); #c1(CYP201) c2(NP_898898) c3(cytochrome P450 2U1) c4(257844, 257845) c5(257846, 257847, 257848, 257849, 257850, 257851, 257852, 257853, 257854, 257855, 257856, 257857) c6( ) c7(bcJ); #c1(CYP2W1) c2(NP_060251) c3(cytochrome P450 2W1 precursor) c4(195034) c5(195035, 195036, 195037, 195038, 195039, 195040) c6( ) c7(T, B, bE, aW, r, aT, bB, Hu, q, X); #c1(CYP39A1) c2(NP_057677) c3(24-hydroxycholesterol 7-alpha-hydroxylase isoform 1) c4(192310) c5(192311, 192312, 192313, 192314, 192315, 192316) c6( ) c7(gV, bcK, K, aFj, hG); #c1(CYP3A4) c2(NP_001189784) c3(cytochrome P450 3A4 isoform 2) c4( ) c5(80264, 80265, 80266, 80267, 80268) c6( ) c7(bM, G, T, Zz, ea, aI, bB, gf, ci, bh, x, iI, fS, dV, K, dQ, eL, bc, zQ, aW, fc, hl, g, lm, hJ, eF, bw, eM, nF, Gs, dW, k, m, pw, cE, dD, aw, ht, aj, fr, jG, qN, aLc, ft, gd, adX, h, eV, Gw, hn, dL, HO, bbN, hi, aix, aq, cM, bbT, hq, iO, adZ, hk, aZL, FV, hL, gg, jd, B, bL, eR, jx, eX, cz, hy, v, j, bX, q, J, aT, vH, ae, bA, iU, ev, r, HL, en, bu, cl, t, ck, BU, iQ, ac, gX, fP, dy, bt, ao, On, gV, GI, ha, jh, uu, ah, eq, gb, ad, hX, av, HF, hd, F, ib, oj, aak, fb, hG, cH, ff, gu, iV, bz, eK, es, gk, bE, Lb, cP, ei, i, Gu, X); #c1(CYP3A4) c2(NP_059488) c3(cytochrome P450 3A4 isoform 1) c4(193323, 193324) c5(193325, 193326, 193327, 193328, 193329, 193330, 193331, 193332, 193333, 193334, 193335, 193336, 193337) c6( ) c7(bM, G, T, Zz, ea, aI, bB, gf, ci, bh, x, iI, fS, dV, K, dQ, eL, bc, zQ, aW, fc, hl, g, lm, hJ, eF, bw, eM, nF, Gs, dW, k, m, pw, cE, dD, aw, ht, aj, fr, jG, qN, aLc, ft, gd, adX, h, eV, Gw, hn, dL, HO, bbN, hi, aix, aq, cM, bbT, hq, iO, adZ, hk, aZL, FV, hL, gg, jd, B, bL, eR, jx, eX, cz, hy, v, j, bX, q, J, aT, vH, ae, bA, iU, ev, r, HL, en, bu, cl, t, ck, BU, iQ, ac, gX, fP, dy, bt, an, On, gV, GI, ha, jh, uu, ah, eq, gb, ad, hX, av, HF, hd, F, ib, oj, aak, fb, hG, cH, ff, gu, iV, bz, eK, es, gk, bE, Lb, cP, ei, i, Gu, X); #c1(CYP3A4) c2(XP_011514144) c3(cytochrome P450 3A4 isoform X2) c4(306737) c5( ) c6( ) c7(bM, G, T, Zz, ea, aI, bB, gf, ci, bh, x, iI, fS, dV, K, dQ, eL, bc, zQ, aW, fc, hl, g, lm, hJ, eF, bw, eM, nF, Gs, dW, k, m, pw, cE, dD, aw, ht, aj, fr, jG, qN, aLc, ft, gd, adX, h, eV, Gw, hn, dL, HO, bbN, hi, aix, aq, cM, bbT, hq, iO, adZ, hk, aZL, FV, hL, gg, jd, B, bL, eR, jx, eX, cz, hy, v, j, bX, q, J, aT, vH, ae, bA, iU, ev, r, HL, en, bu, cl, t, ck, BU, iQ, ac, gX, fP, dy, bt, an, On, gV, GI, ha, jh, uu, ah, eq, gb, ad, hX, av, HF, hd, F, ib, oj, aak, fb, hG, cH, ff, gu, iV, bz, eK, es, gk, bE, Lb, cP, ei, i, Gu, X); #c1(CYP3A43) c2(NP_001265850) c3(cytochrome P450 3A43 isoform 4) c4(99484, 99485, 99486) c5(99487, 99488, 99489, 99490, 99491) c6( ) c7(aW, ae, ad, aT); #c1(CYP3A43) c2(NP_073731) c3(cytochrome P450 3A43 isoform 1) c4(213305) c5(213306, 213307, 213308, 213309, 213310, 213311) c6( ) c7(aW, ae, ad, aT); #c1(CYP3A43) c2(NP_476436) c3(cytochrome P450 3A43 isoform 2) c4(230594, 230595) c5(230596, 230597, 230598, 230599, 230600, 230601, 230602) c6( ) c7(aW, ae, ad, aT); #c1(CYP3A43) c2(NP_476437) c3(cytochrome P450 3A43 isoform 3) c4(230603, 230604) c5(230605, 230606, 230607, 230608, 230609, 230610, 230611, 230612, 230613, 230614, 230615, 230616, 230617, 230618, 230619, 230620, 230621) c6( ) c7(aW, ae, ad, aT); #c1(CYP3A43) c2(XP_011514795) c3(cytochrome P450 3A43 isoform X1) c4(307439) c5( ) c6( ) c7(aW, ae, ad, aT); #c1(CYP3A43) c2(XP_011514796) c3(cytochrome P450 3A43 isoform X2) c4(307440) c5(307441, 307442, 307443, 307444, 307445, 307446) c6( ) c7(aW, ae, ad, aT); #c1(CYP3A5) c2(NP_000768) c3(cytochrome P450 3A5 isoform 1) c4(15452) c5(15453, 15454, 15455, 15456, 15457, 15458) c6( ) c7(bM, G, T, e, lj, ci, gF, x, iI, fS, dV, dQ, aW, hJ, ou, eM, iT, nF, k, m, fy, dD, aw, n, aj, fr, qN, ft, h, dL, RT, aq, cM, W, hk, at, va, gg, it, B, bL, aCw, eR, jp, oe, cz, fF, hy, j, bX, q, ga, aT, ae, iU, bcL, Lf, r, HL, en, bu, t, ck, ac, gX, fP, dy, bt, gV, ha, eq, jE, fu, ad, fU, av, hd, oj, fb, gj, lU, hG, cH, ff, gu, iV, gW, bz, ga, ig, es, Lb, i); #c1(CYP3A5) c2(NP_001177413) c3(cytochrome P450 3A5 isoform 2) c4(72782) c5(72783, 72784, 72785, 72786, 72787, 72788, 72789, 72790, 72791) c6( ) c7(bM, G, T, e, lj, ci, gF, x, iI, fS, dV, dQ, aW, hJ, ou, eM, iT, nF, k, m, fy, dD, aw, n, aj, fr, qN, ft, h, dL, RT, aq, cM, W, hk, at, va, gg, it, B, bL, aCw, eR, jp, oe, cz, fF, hy, j, bX, q, ga, aT, ae, iU, bcL, Lf, r, HL, en, bu, t, ck, ac, gX, fP, dy, bt, gV, ha, eq, jE, fu, ad, fU, av, hd, oj, fb, gj, lU, hG, cH, ff, gu, iV, gW, bz, ga, ig, es, Lb, i); #c1(CYP3A5) c2(NP_001278759) c3(cytochrome P450 3A5 isoform 4 precursor) c4(110051) c5(110052, 110053, 110054, 110055, 110056, 110057) c6( ) c7(bM, G, T, e, lj, ci, gF, x, iI, fS, dV, dQ, aW, hJ, ou, eM, iT, nF, k, m, fy, dD, aw, n, aj, fr, qN, ft, h, dL, RT, aq, cM, W, hk, at, va, gg, it, B, bL, aCw, eR, jp, oe, cz, fF, hy, j, bX, q, ga, aT, ae, iU, bcL, Lf, r, HL, en, bu, t, ck, ac, gX, fP, dy, bt, gV, ha, eq, jE, fu, ad, fU, av, hd, oj, fb, gj, lU, hG, cH, ff, gu, iV, gW, bz, ga, ig, es, Lb, i); #c1(CYP3A5) c2(XP_011514149) c3(cytochrome P450 3A5 isoform X3) c4( ) c5(306738) c6( ) c7(bM, G, T, e, lj, ci, gF, x, iI, fS, dV, dQ, aW, hJ, ou, eM, iT, nF, k, m, fy, dD, aw, n, aj, fr, qN, ft, h, dL, RT, aq, cM, W, hk, at, va, gg, it, B, bL, aCw, eR, jp, oe, cz, fF, hy, j, bX, q, ga, aT, ae, iU, bcL, Lf, r, HL, en, bu, t, ck, ac, gX, fP, dy, bt, gV, ha, eq, jE, fu, ad, fU, av, hd, oj, fb, gj, lU, hG, cH, ff, gu, iV, gW, bz, ga, ig, es, Lb, i); #c1(CYP3A7) c2(NP_000756) c3(cytochrome P450 3A7) c4(15344) c5(15345, 15346, 15347, 15348, 15349, 15350) c6( ) c7(bM, kl, aW, aZ, Lf, aT, fQ, aq, at, dL, m, bu, bz, B, ad, cl); #c1(CYP3A7-CYP3A51P) c2(NP_001243426) c3(CYP3A7-CYP3A51P protein) c4(90763) c5(90764, 90765, 90766, 90767, 90768, 90769) c6( ) c7(bM, gj, kl, aW, aZ, Lf, aT, fF, aq, bu, bz, B, cl); #c1(CYP46A1) c2(NP_006659) c3(cholesterol 24-hydroxylase precursor) c4(166972, 166973) c5(166974, 166975, 166976, 166977, 166978, 166979, 166980, 166981, 166982, 166983, 166984, 166985) c6( ) c7(cZ, W, dH, sO, dd, H, af, L); #c1(CYP4A11) c2(XP_011539132) c3(cytochrome P450 4A11 isoform X6) c4(337209) c5(337210, 337211, 337212, 337213, 337214) c6( ) c7(ac, eu, aw, M, cz, cR, aq, j, eK, bq, uW, ye, B, qa, urn); #c1(CYP4B1) c2(XP_011539133) c3(cytochrome P450 481 isoform X1) c4(337215) c5(337216, 337217, 337218, 337219, 337220, 337221) c6( ) c7(av, 1 eW, d, aW, cj, aT, cz, dL, eA, eL, B); #c1(CYP4F11) c2(NP_067010) c3(phylloquinone omega-hydroxylase CYP4F11 precursor) c4(208310, 208311) c5(208312, 208313, 208314, 208315, 208316, 208317, 208318, 208319, 208320, 208321, 208322, 208323, 208324, 208325, 208326, 208327) c6( ) c7(aW, aT); #c1(CYP4F11) c2(XP_011526458) c3(phylloquinone omega-hydroxylase CYP4F11 isoform X1) c4( ) c5(320760) c6( ) c7(aW, aT); #c1(CYP4F12) c2(NP_076433) c3(cytochrome P450 4F12) c4( ) c5(214156, 214157, 214158, 214159, 214160, 214161, 214162, 214163) c6( ) c7(bX, cz); #c1(CYP4F12) c2(XP_011526501) c3(cytochrome P450 4F12 isoform X1) c4(320798) c5(320799, 320800) c6( ) c7(bX, cz); #c1(CYP4F12) c2(XP_011526503) c3(cytochrome P450 4F12 isoform X3) c4(320801) c5( ) c6( ) c7(bX, cz); #c1(CYP4F12) c2(XP_011526508) c3(cytochrome P450 4F12 isoform X6) c4( ) c5(320802, 320803, 320804, 320805, 320806, 320807) c6( ) c7(bX, cz); #c1(CYP4F2) c2(NP_001073) c3(phylloquinone omega-hydroxylase CYP4F2 precursor) c4(36899, 36900, 36901) c5( ) c6( ) c7(ac, mr, cH, wL, aw, M, EQ, cz, kp, aS, hp, ei, aaD, eu, B, qa, eK); #c1(CYP4F22) c2(NP_775754) c3(cytochrome P450 4F22) c4(250175) c5(250176, 250177, 250178, 250179, 250180, 250181) c6( ) c7(fn, y, bcM, bcj); #c1(CYP4F3) c2(NP_000887) c3(docosahexaenoic acid omega-hydroxylase CYP4F3 isoform a) c4(16844) c5(16845, 16846, 16847, 16848, 16849, 16850) c6( ) c7(bM, T, aw, aA, cz, v, ci, HH, V, q, ad, ip, HF, fS, aT, K, jj, Fg, ae, nJ, aW, oV, ff, fc, hl, r, aq, lo, kp, hp, aF, en, cl, as, EZ, HL, bcN, bz, qa, op, iO, bbz, bbx, vA, hL, cP, kS, B); #c1(CYP4F3) c2(NP_001186138) c3(docosahexaenoic acid omega-hydroxylase CYP4F3 isoform b) c4(77197, 77198) c5(77199, 77200, 77201, 77202, 77203, 77204, 77205, 77206, 77207, 77208, 77209, 77210) c6( ) c7(bM, T, aw, aA, cz, v, ci, HH, V, g, ad, ip, HF, fS, aT, K, jj, Fg, ae, nJ, aW, oV, ff, fc, hl, r, aq, lo, kp, hp, aF, en, cl, as, EZ, HL, bcN, bz, qa, op, iO, bbz, bbx, vA, hL, cP, kS, B); #c1(CYP4F8) c2(NP_009184) c3(cytochrome P450 4F8 precursor) c4(171349) c5(171350, 171351, 171352, 171353, 171354, 171355, 171356, 171357, 171358, 171359, 171360, 171361, 171362, 171363, 171364, 171365) c6( ) c7(ae, ad); #c1(CYP4F8) c2(XP_011525956) c3(cytochrome P450 4F8 isoform X2) c4(320349, 320350) c5(320351, 320352) c6( ) c7(ae, ad); #c1(CYP4V2) c2(NP_997235) c3(cytochrome P450 4V2) c4(265247, 265248) c5(265249, 265250, 265251, 265252, 265253, 265254, 265255, 265256, 265257, 265258, 265259, 265260) c6( ) c7(P, cj, kf, nm, h, bci, bcO); #c1(CYP51A1) c2(NP_000777) c3(lanosterol 14-alpha demethylase isoform 1 precursor) c4(15615, 15616, 15617) c5(15618, 15619, 15620, 15621, 15622, 15623, 15624, 15625, 15626, 15627, 15628, 15629, 15630, 15631, 15632) c6( ) c7(avF, wR, T, aiV, qE); #c1(CYP51A1) c2(NP_001139624) c3(lanosterol 14-alpha demethylase isoform 2) c4( ) c5(59566, 59567, 59568, 59569, 59570) c6( ) c7(avF, wR, T, aiV, qE); #c1(CYP7A1) c2(NP_000771) c3(cholesterol 7-alpha-monooxygenase) c4(15459) c5(15460, 15461, 15462, 15463, 15464, 15465, 15466, 15467, 15468, 15469, 15470, 15471, 15472, 15473, 15474, 15475, 15476, 15477, 15478, 15479, 15480, 15481, 15482, 15483, 15484, 15485, 15486, 15487, 15488, 15489, 15490, 15491, 15492, 15493, 15494, 15495, 15496, 15497, 15498, 15499, 15500, 15501, 15502, 15503, 15504, 15505, 15506, 15507, 15508, 15509, 15510, 15511, 15512, 15513, 15514, 15515, 15516, 15517, 15518, 15519, 15520, 15521, 15522, 15523, 15524, 15525, 15526, 15527, 15528, 15529, 15530, 15531, 15532, 15533, 15534, 15535, 15536, 15537, 15538, 15539, 15540, 15541, 15542, 15543, 15544, 15545, 15546, 15547, 15548, 15549, 15550, 15551, 15552, 15553, 15554) c6( ) c7(dD, Zz, ea, oe, e, aw, cz, bB, aj, v, j, eq, q, J, jF, I, dY, u, ec, il, io, dL, K, hB, dQ, be, cH, cW, hI, r, dq, aq, hJ, bcP, bN, bJ, cO, bE, hr, B); #c1(CYP7B1) c2(NP_004811) c3(25-hydroxycholesterol 7-alpha-hydroxylase) c4(149987) c5(149988, 149989, 149990, 149991, 149992, 149993) c6( ) c7(bcR, Ng, ad, aV, lu, bcS, nU, fc, hl, at, bcK, bcQ, dL, Fb, g, hJ, y, ae, af, bcT, aFj); #c1(CYP8B1) c2(NP_004382) c3(7-alpha-hydroxycholest-4-en-3-ene 12-alpha-hydroxylase) c4(145971) c5(145972, 145973, 145974, 145975, 145976, 145977) c6( ) c7(jF, aj, hJ, J, bX); #c1(CYS1) c2(NP_001032237) c3(cystin-1) c4(31111) c5(31112, 31113, 31114, 31115, 31116, 31117) c6( ) c7(vm); #c1(CYSLTR1) c2(NP_001269117) c3(cysteinyl leukotriene receptor 1) c4(100474) c5(100475, 100476, 100477, 100478, 100479, 100480) c6( ) c7(bM, T, dD, Dw, ea, fG, bB, j, ci, eq, q, ad, wM, dY, fS, aT, Tx, IG, Ds, sp, mQ, g, eE, bE, JM, Tu, m, fD, lC, X, aZN); #c1(CYTH1) c2(NP_004753) c3(cytohesin-1 isoform 1) c4(149311) c5(149312, 149313, 149314, 149315, 149316, 149317, 149318, 149319, 149320, 149321, 149322, 149323) c6( ) c7(hF); #c1(CYTH1) c2(NP_059430) c3(cytohesin-1 isoform 2) c4(193301) c5(193302, 193303, 193304, 193305, 193306, 193307, 193308, 193309, 193310, 193311) c6( ) c7(hF); #c1(CYTH1) c2(XP_006722245) c3(cytohesin-1 isoform X2) c4(294669) c5( ) c6( ) c7(hF); #c1(CYTH1) c2(XP_011523778) c3(cytohesin-1 isoform X3) c4(318270) c5(318271, 318272, 318273, 318274, 318275) c6( ) c7(hF); #c1(CYTH1) c2(XP_011523779) c3(cytohesin-1 isoform X1) c4( ) c5(318276, 318277, 318278, 318279, 318280, 318281, 318282, 318283) c6( ) c7(hF); #c1(CYTH3) c2(NP_004218) c3(cytohesin-3) c4(144385, 144386) c5(144387, 144388, 144389, 144390, 144391, 144392, 144393, 144394, 144395, 144396, 144397, 144398) c6( ) c7(T, jv); #c1(CYTIP) c2(NP_004279) c3(cytohesin-interacting protein) c4(144785, 144786) c5(144787, 144788, 144789, 144790, 144791, 144792, 144793, 144794, 144795, 144796, 144797, 144798) c6( ) c7(T, eM, iK, PV, ci, Kw, fb, V, bz); #c1(CYTL1) c2(NP_061129) c3(cytokine-like protein 1 precursor) c4(199265) c5(199266, 199267, 199268, 199269, 199270, 199271) c6( ) c7(Qu, cm); #c1(CYYR1) c2(NP_443186) c3(cysteine and tyrosine-rich protein 1 precursor) c4(229754) c5(229755, 229756, 229757, 229758, 229759) c6( ) c7(cm, pX, oe, Kw, bM); #c1(CYYR1) c2(XP_011527751) c3(cysteine and tyrosine-rich protein 1 isoform X1) c4( ) c5(322727) c6( ) c7(cm, pX, oe, Kw, bM); #c1(CYYR1) c2(XP_011527752) c3(cysteine and tyrosine-rich protein 1 isoform X2) c4(322728) c5(322729, 322730, 322731, 322732, 322733, 322734) c6( ) c7(cm, PX, oe, Kw, bM); #c1(D2HGDH) c2(NP_001274178) c3(D-2-hydroxyglutarate dehydrogenase, mitochondrial isoform 2) c4(106124, 106125) c5(106126, 106127, 106128, 106129, 106130, 106131, 106132, 106133, 106134, 106135, 106136, 106137) c6( ) c7(bcU, d, dq, bX, bcV, bcW, rL); #c1(D2HGDH) c2(NP_689996) c3(D-2-hydroxyglutarate dehydrogenase, mitochondrial isoform 1 precursor) c4(244673) c5(244674, 244675, 244676, 244677, 244678, 244679, 244680) c6( ) c7(bcU, d, dq, bX, bcV, bcW, rL); #c1(D2HGDH) c2(XP_011510059) c3(D-2-hydroxyglutarate dehydrogenase, mitochondrial isoform X20) c4( ) c5(300676) c6( ) c7(bcU, d, dg, bX, bcV, bcW, rL); #c1(D2HGDH) c2(XP_011510061) c3(D-2-hydroxyglutarate dehydrogenase, mitochondrial isoform X21) c4(300677) c5(300678, 300679, 300680, 300681, 300682, 300683) c6( ) c7(bcU, d, dg, bX, bcV, bcW, rL); #c1(D2HGDH) c2(XP_011510062) c3(D-2-hydroxyglutarate dehydrogenase, mitochondrial isoform X22) c4(300684) c5(300685, 300686, 300687, 300688, 300689, 300690) c6( ) c7(bcU, d, dg, bX, bcV, bcW, rL); #c1(DAAM1) c2(NP_001257449) c3(disheveled-associated activator of morphogenesis 1 isoform 2) c4(95428) c5( ) c6( ) c7(kD, aW, pc, ac, aT); #c1(DAAM1) c2(NP_055807) c3(disheveled-associated activator of morphogenesis 1 isoform 1) c4(183618, 183619) c5(183620, 183621, 183622, 183623, 183624, 183625, 183626, 183627, 183628, 183629, 183630, 183631, 183632, 183633, 183634, 183635, 183636, 183637, 183638, 183639, 183640, 183641) c6( ) c7(kD, aW, pc, ac, aT); #c1(DAAM2) c2(NP_001188356) c3(disheveled-associated activator of morphogenesis 2 isoform 1) c4(79090) c5(79091, 79092, 79093, 79094, 79095, 79096, 79097, 79098) c6( ) c7(es, Dp, fq, fr); #c1(DAAM2) c2(NP_056160) c3(disheveled-associated activator of morphogenesis 2 isoform 2) c4(186029) c5(186030, 186031, 186032, 186033, 186034, 186035, 186036, 186037, 186038, 186039) c6( ) c7(es, Dp, fq, fr); #c1(DAAM2) c2(XP_006715103) c3(disheveled-associated activator of morphogenesis 2 isoform X2) c4( ) c5(288645, 288646, 288647, 288648) c6( ) c7(es, Dp, fq, fr); #c1(DAAM2) c2(XP_006715109) c3(disheveled-associated activator of morphogenesis 2 isoform X4) c4(288649) c5( ) c6( ) c7(es, Dp, fq, fr); #c1(DAB2) c2(NP_001231800) c3(disabled homolog 2 isoform 2) c4(87528, 87529, 87530, 87531) c5(87532, 87533, 87534, 87535, 87536, 87537, 87538, 87539, 87540, 87541, 87542, 87543, 87544, 87545, 87546, 87547, 87548, 87549, 87550, 87551, 87552, 87553, 87554, 87555, 87556) c6( ) c7(T, aC, id, eR, sw, HM, ht, aw, n, ci, V, ad, av, BI, aoc, aT, dL, nJ, ae, af, eL, xQ, mR, ZH, CN, cH, aW, ff, fe, en, cI, iV, t, bz, fq, bF, hL, adR, np, m, dy); #c1(DAB2) c2(NP_001334) c3(disabled homolog 2 isoform 1) c4(117001, 117002) c5(117003, 117004, 117005, 117006, 117007, 117008, 117009, 117010, 117011, 117012, 117013) c6( ) c7(T, aC, id, eR, sw, HM, ht, aw, n, ci, V, ad, av, BI, aoc, aT, dL, nJ, ae, af, eL, xQ, mR, ZH, CN, cH, aW, ff, fe, en, cI, iV, t, bz, fq, bF, hL, adR, np, m, dy); #c1(DAB2IP) c2(NP_115941) c3(disabled homolog 2-interacting protein isoform 1) c4(224815, 224816) c5(224817, 224818, 224819, 224820, 224821, 224822, 224823, 224824, 224825, 224826, 224827, 224828) c6( ) c7(T, id, ea, aw, cz, n, j, ad, av, aT, hD, h, dL, K, ae, eL, jf, bf, Y, bz, bm, wx, ht, B); #c1(DAB2IP) c2(XP_005251776) c3(disabled homolog 2-interacting protein isoform X6) c4(271170, 271171) c5(271172, 271173, 271174, 271175, 271176) c6( ) c7(T, id, ea, aw, cz, n, j, ad, av, aT, hD, h, dL, K, ae, eL, jf, bf, Y, bz, bm, wx, ht, B); #c1(DAB2IP) c2(XP_005251778) c3(disabled homolog 2-interacting protein isoform X9) c4(271177, 271178) c5(271179, 271180) c6( ) c7(T, id, ea, aw, cz, n, j, ad, av, aT, hD, h, dL, K, ae, eL, jf, bf, Y, bz, bm, wx, ht, B); #c1(DAB2IP) c2(XP_005251781) c3(disabled homolog 2-interacting protein isoform X10) c4( ) c5(271181) c6( ) c7(T, id, ea, aw, cz, n, j, ad, av, aT, hD, h, dL, K, ae, eL, jf, bf, Y, bz, bm, wx, ht, B); #c1(DAB2IP) c2(XP_011516568) c3(disabled homolog 2-interacting protein isoform X4) c4( ) c5(310015, 310016, 310017, 310018, 310019, 310020) c6( ) c7(T, id, ea, aw, cz, n, j, ad, av, aT, hD, h, dL, K, ae, eL, jf, bf, Y, bz, bm, wx, ht, B); #c1(DAB2IP) c2(XP_011516573) c3(disabled homolog 2-interacting protein isoform X1) c4( ) c5(310021, 310022, 310023, 310024, 310025, 310026, 310027, 310028, 310029, 310030) c6( ) c7(T, id, ea, aw, cz, n, j, ad, av, aT, hD, h, dL, K, ae, eL, jf, bf, Y, bz, bm, wx, ht, B); #c1(DACH1) c2(NP_004383) c3(dachshund homolog 1 isoform c) c4(145978) c5(145979, 145980, 145981, 145982, 145983, 145984, 145985) c6( ) c7(bcX, T, eR, e, aA, aj, fr, ci, J, ad, MS, aT, gs, hP, ae, aW, Mz, t, bz, dr, Ew, eM, zG, m, B); #c1(DACH1) c2(NP_542937) c3(dachshund homolog 1 isoform a) c4(233107) c5(233108, 233109, 233110, 233111, 233112, 233113) c6( ) c7(bcX, T, eR, e, aA, aj, fr, ci, J, ad, MS, aT, gs, hP, ae, aW, Mz, t, bz, dr, Ew, eM, zG, m, B); #c1(DACH1) c2(NP_542938) c3(dachshund homolog 1 isoform b) c4(233114) c5(233115, 233116, 233117, 233118, 233119, 233120) c6( ) c7(bcX, T, eR, e, aA, aj, fr, ci, J, ad, MS, aT, gs, hP, ae, aW, Mz, t, bz, dr, Ew, eM, zG, m, B); #c1(DACH1) c2(XP_011533241) c3(dachshund homolog 1 isoform X1) c4(329364, 329365) c5(329366, 329367, 329368, 329369, 329370, 329371, 329372, 329373, 329374, 329375, 329376, 329377) c6( ) c7(bcX, T, eR, e, aA, aj, fr, ci, J, ad, MS, aT, gs, hP, ae, aW, Mz, t, bz, dr, Ew, eM, zG, m, B); #c1(DACH2) c2(NP_001132986) c3(dachshund homolog 2 isoform b) c4(52774) c5(52775, 52776, 52777, 52778, 52779, 52780) c6( ) c7(il); #c1(DACH2) c2(NP_001132987) c3(dachshund homolog 2 isoform c) c4(52781, 52782, 52783) c5(52784, 52785, 52786, 52787, 52788, 52789, 52790, 52791, 52792, 52793, 52794, 52795, 52796, 52797, 52798, 52799, 52800) c6( ) c7(il); #c1(DACH2) c2(NP_444511) c3(dachshund homolog 2 isoform a) c4(230348) c5(230349, 230350, 230351, 230352, 230353, 230354, 230355, 230356, 230357, 230358, 230359) c6( ) c7(il); #c1(DACT1) c2(NP_001072988) c3(dapper homolog 1 isoform 2) c4(35474) c5(35475, 35476, 35477, 35478, 35479, 35480) c6( ) c7(bL, x, T, bE, dO, r, aA, bB, aq, v, aF, ci, k, g, B); #c1(DACT1) c2(NP_057735) c3(dapper homolog 1 isoform 1) c4(192579) c5(192580, 192581, 192582, 192583, 192584, 192585) c6( ) c7(bL, x, T, bE, dO, r, aA, bB, ag, v, aF, ci, k, g, B); #c1(DACT2) c2(NP_001273280) c3(dapper homolog 2 isoform c) c4(104600) c5(104601, 104602, 104603, 104604, 104605, 104606) c6( ) c7(gT, T, bz, aq); #c1(DACT2) c2(NP_999627) c3(dapper homolog 2 isoform a) c4(266085) c5(266086, 266087, 266088, 266089, 266090, 266091) c6( ) c7(gT, T, bz, aq); #c1(DACT3) c2(NP_659493) c3(dapper homolog 3 isoform 1) c4(240214) c5(240215, 240216, 240217, 240218, 240219, 240220) c6( ) c7(kI, nM, r, cj, bz, q); #c1(DACT3) c2(XP_011524802) c3(dapper homolog 3 isoform X1) c4( ) c5(319215) c6( ) c7(kI, nM, r, cj, bz, q); #c1(DAD1) c2(NP_001335) c3(dolichyl-diphosphooligosaccharide-protein glycosyltransferase subunit DAD1) c4(117014) c5(117015, 117016, 117017, 117018, 117019, 117020) c6( ) c7(cF, pf, aW, PX, aT, L); #c1(DAG1) c2(NP_001171113) c3(dystroglycan preproprotein) c4(69823, 69824, 69825, 69826, 69827, 69828, 69829, 69830, 69831) c5(69832, 69833, 69834, 69835, 69836, 69837, 69838, 69839, 69840, 69841, 69842, 69843, 69844, 69845, 69846, 69847, 69848, 69849, 69850, 69851, 69852, 69853, 69854, 69855, 69856, 69857, 69858, 69859, 69860, 69861, 69862, 69863, 69864, 69865, 69866, 69867, 69868, 69869, 69870, 69871, 69872, 69873, 69874, 69875, 69876, 69877, 69878, 69879, 69880, 69881, 69882, 69883, 69884, 69885, 69886, 69887, 69888, 69889, 69890, 69891, 69892, 69893, 69894, 69895, 69896, 69897, 69898, 69899, 69900, 69901, 69902, 69903, 69904, 69905) c6( ) c7(bda, bM, T, dD, ea, cz, bB, n, v, eq, ci, nA, bX, EA, fr, cd, ad, cc, no, sN, Ae, Dq, oj, aT, Ak, bK, K, bcY, cb, Wq, ae, be, jf, VC, aqZ, aW, ff, xs, ED, fQ, uY, en, g, alj, es, Bv, iA, dB, bE, go, FB, mx, km, uJ, bcZ, IM, X, If); #c1(DAND5) c2(NP_689867) c3(DAN domain family member 5 precursor) c4(244213) c5(244214, 244215, 244216, 244217, 244218, 244219, 244220, 244221, 244222) c6(244223, 244224) c7(ck, bM, T, bv, aE, eM, nO, Y, r, hD, uz, vx, bz, q); #c1(DAO) c2(XP_011536307) c3(D-amino-acid oxidase isoform X1) c4(333648, 333649) c5(333650, 333651, 333652, 333653, 333654, 333655, 333656, 333657, 333658, 333659, 333660, 333661) c6( ) c7(mU, hq, iH, rz, mW, Fo, ml, agb, mS, gI, mY, bK, K, eA, oi, mV, mT, bN, mX); #c1(DAOA) c2(NP_001155284) c3(D-amino acid oxidase activator isoform 2) c4(61569) c5(61570, 61571, 61572, 61573, 61574, 61575) c6( ) c7(bO, mS, ww, ct, dY, mW, aUb, bK, oi, mY, mV, he, af, rz, mU, agb, gl, Eg, Z, jb, mZ, bN, mX, bde, W, ac, cA, sv, bdb, mT); #c1(DAOA) c2(NP_001155286) c3(D-amino acid oxidase activator isoform 3) c4( ) c5(61576, 61577, 61578, 61579, 61580) c6( ) c7(bO, mS, ww, ct, dY, mW, aUb, bK, oi, mY, mV, he, af, rz, mU, agb, gl, Eg, Z, jb, mZ, bN, mX, bde, W, ac, cA, sv, bdb, mT); #c1(DAOA) c2(NP_758958) c3(D-amino acid oxidase activator isoform 1) c4(249405, 249406) c5(249407, 249408, 249409, 249410, 249411, 249412, 249413) c6( ) c7(bO, mS, ww, ct, dY, mW, aUb, bK, oi, mY, mV, he, af, rz, mU, agb, gl, Eg, Z, jb, mZ, bN, mX, bde, W, ac, cA, sv, bdb, mT); #c1(DAP) c2(NP_001278892) c3(death-associated protein 1 isoform 1) c4( ) c5(110835) c6( ) c7(T, dD, fM, eP, pf, ea, if, ha, ht, fd, aA, Bm, n, aj, vm, eh, ci, eq, qN, iI, q, eA, XX, av, pe, hW, Vr, aT, dL, hu, eL, je, aW, ff, r, ks, aF, jh, apm, en, g, t, cm, bz, iK, iV, Wt, ck, qJ, bF, amS, nM, iM, eM, AM, vA, gX, cj, hR, m, adg, bt, aln); #c1(DAP) c2(NP_004385) c3(death-associated protein 1 isoform 2) c4(145986) c5(145987, 145988, 145989, 145990, 145991) c6( ) c7(T, dD, fM, eP, pf, ea, if, ha, ht, fd, aA, Bm, n, aj, vm, eh, ci, eq, qN, iI, q, eA, XX, av, pe, hW, Vr, aT, dL, hu, eL, je, aW, ff, r, ks, aF, jh, apm, en, g, t, cm, bz, iK, iV, Wt, ck, qJ, bF, amS, nM, iM, eM, AM, vA, gX, cj, hR, m, adg, bt, aln); #c1(DAP3) c2(NP_001186778) c3(28S ribosomal protein S29, mitochondrial isoform 1) c4(78554) c5(78555, 78556, 78557, 78558, 78559, 78560, 78561, 78562, 78563, 78564) c6( ) c7(bM, d, nB, aA, aT, aF, pd, eA, ad); #c1(DAP3) c2(XP_005245537) c3(28S ribosomal protein S29, mitochondrial isoform X1) c4(266704) c5(266705, 266706, 266707, 266708, 266709, 266710) c6( ) c7(bM, d, nB, aA, aT, aF, pd, eA, ad); #c1(DAP3) c2(XP_005245538) c3(28S ribosomal protein S29, mitochondrial isoform X2) c4(266711) c5(266712, 266713, 266714, 266715, 266716, 266717) c6( ) c7(bM, d, nB, aA, aT, aF, pd, eA, ad); #c1(DAPK1) c2(NP_004929) c3(death-associated protein kinase 1) c4(151008, 151009) c5(151010, 151011, 151012, 151013, 151014, 151015, 151016, 151017, 151018, 151019, 151020, 151021, 151022, 151023, 151024, 151025, 151026, 151027, 151028, 151029, 151030, 151031, 151032, 151033, 151034, 151035) c6( ) c7(gV, T, id, w atj, if, qx, ht, aA, n, fr, ci, bX, qN, il, fw, eA, iC, av, BI, jz, py, x, cF, qK, aT, dL, bde, K, wm, hu, eL, af, iL, jf, qw, bdd, d, BN, iU, hG, JI, aW, Y, ff, eH, r, aF, en, g, eF, bw, iK, bz, op, ck, es, bb, Dy, eM, iA, aJt, dB, AM, vA, bdf, cj, pg, m, bt, hS); #c1(DAPK1) c2(XP_005251814) c3(death-associated protein kinase 1 isoform X1) c4(271199) c5( ) c6( ) c7(gV, T, id, wu, atj, if, qx, ht, aA, n, fr, ci, bX, qN, il, fw, eA, iC, av, BI, jz, py, x, cF, qK, aT, dL, bde, K, wm, hu, eL, af, iL, jf, qw, bdd, d, BN, iU, hG, JI, aW, Y, ff, eH, r, aF, en, g, eF, bw, iK, bz, op, ck, es, bb, Dy, eM, iA, aJt, dB, AM, vA, bdf, cj, pg, m, bt, hS); #c1(DAPK2) c2(NP_055141) c3(death-associated protein kinase 2) c4(179389) c5(179390, 179391, 179392, 179393, 179394, 179395, 179396, 179397, 179398, 179399) c6( ) c7(lD, ly, wg, c, Ae, aW, U, aT, aA, cy, fd, dG, dL, ci, K, an, jj, bt, lx); #c1(DAPK2) c2(XP_011519716) c3(death-associated protein kinase 2 isoform X3) c4(314378) c5( ) c6( ) c7(lD, ly, wg, c, Ae, aW, U, aT, aA, cy, fd, dG, dL, ci, K, an, jj, bt, lx); #c1(DAPK2) c2(XP_011519720) c3(death-associated protein kinase 2 isoform X7) c4( ) c5(314379, 314380, 314381, 314382, 314383, 314384) c6( ) c7(lD, ly, wg, c, Ae, aW, U, aT, aA, cy, fd, dG, dL, ci, K, an, jj, bt, lx); #c1(DAPK3) c2(XP_005259565) c3(death-associated protein kinase 3 isoform X1) c4(276126, 276127) c5(276128, 276129, 276130, 276131, 276132, 276133, 276134, 276135, 276136, 276137, 276138, 276139, 276140, 276141, 276142, 276143) c6( ) c7(T, aC, fM, Tb, e, cz, aj, zx, ci, pz, J, ad, aE, yw, aT, K, ae, kj, iU, aW, cm, bw, bz, iO, eM, dh, B); #c1(DARS) c2(NP_001280241) c3(aspartate-tRNA ligase, cytoplasmic isoform 2) c4( ) c5(111518, 111519, 111520, 111521, 111522) c6( ) c7(bdh, cm, bdg); #c1(DARS) c2(NP_001340) c3(aspartate-tRNA ligase, cytoplasmic isoform 1) c4(117035, 117036) c5(117037, 117038, 117039, 117040, 117041, 117042, 117043) c6( ) c7(bdh, cm, bdg); #c1(DARS2) c2(NP_060592) c3(aspartate-tRNA ligase, mitochondrial) c4(196719, 196720) c5(196721, 196722, 196723, 196724, 196725, 196726, 196727, 196728, 196729, 196730, 196731, 196732) c6( ) c7(bL, W, bdh, bdi, akr, V); #c1(DAW1) c2(NP_849143) c3(dynein assembly factor with WDR repeat domains 1) c4(254248, 254249) c5(254250, 254251, 254252, 254253, 254254, 254255, 254256) c6( ) c7(oe, an); #c1(DAW1) c2(XP_011509057) c3(dynein assembly factor with WDR repeat domains 1 isoform X1) c4( ) c5(299666, 299667, 299668, 299669, 299670) c6( ) c7(oe, an); #c1(DAXX) c2(NP_001135442) c3(death domain-associated protein 6 isoform b) c4( ) c5(52909, 52910, 52911, 52912, 52913, 52914, 52915, 52916, 52917, 52918, 52919, 52920, 52921, 52922, 52923, 52924, 52925, 52926, 52927, 52928, 52929, 52930, 52931, 52932, 52933, 52934, 52935) c6( ) c7(T, aC, fR, ci, pX, BJ, iv, K, bdj, jj, pi, A, asP, ev, CM, eZ, lo, vs, bdk, t, Hv, ck, AH, k, aan, m, y, bt, kS, st); #c1(DAXX) c2(NP_001241646) c3(death domain-associated protein 6 isoform c) c4(88944) c5( ) c6( ) c7(T, aC, fR, ci, pX, BJ, iv, K, bdj, jj, pi, A, asP, ev, CM, eZ, lo, vs, bdk, t, Hv, ck, AH, k, aan, m, y, bt, kS, st); #c1(DAXX) c2(NP_001341) c3(death domain-associated protein 6 isoform a) c4(117044, 117045, 117046, 117047) c5(117048, 117049, 117050, 117051, 117052, 117053, 117054, 117055, 117056, 117057, 117058, 117059, 117060, 117061, 117062, 117063, 117064, 117065, 117066, 117067, 117068, 117069, 117070, 117071, 117072, 117073, 117074, 117075, 117076, 117077, 117078, 117079, 117080, 117081, 117082, 117083, 117084, 117085, 117086, 117087, 117088, 117089, 117090, 117091, 117092, 117093, 117094, 117095, 117096, 117097, 117098, 117099, 117100, 117101, 117102, 117103, 117104, 117105, 117106, 117107, 117108, 117109, 117110, 117111, 117112, 117113, 117114, 117115, 117116, 117117, 117118, 117119, 117120, 117121, 117122, 117123, 117124, 117125, 117126, 117127, 117128, 117129, 117130, 117131, 117132, 117133, 117134) c6( ) c7(T, aC, fR, ci, pX, BJ, iv, K, bdj, jj, pi, A, asP, ev, CM, eZ, lo, vs, bdk, t, Hv, ck, AH, k, aan, m, y, bt, kS, st); #c1(DAZ1) c2(NP_004072) c3(deleted in azoospermia protein 1) c4(143310, 143311, 143312, 143313) c5(143314, 143315, 143316, 143317, 143318, 143319, 143320, 143321, 143322, 143323, 143324, 143325) c6( ) c7(yi, gU, ND, vJ, vH, UI, bX, bdl, on, KL); #c1(DAZ2) c2(NP_001005785) c3(deleted in azoospermia protein 2 isoform 2) c4(22078, 22079) c5(22080, 22081, 22082, 22083, 22084, 22085, 22086, 22087, 22088, 22089, 22090, 22091, 22092, 22093, 22094, 22095, 22096) c6( ) c7(gU, UI, NO); #c1(DAZ2) c2(NP_001005786) c3(deleted in azoospermia protein 2 isoform 3) c4(22097, 22098, 22099) c5(22100, 22101, 22102, 22103, 22104, 22105, 22106, 22107, 22108, 22109, 22110, 22111, 22112, 22113, 22114, 22115) c6( ) c7(gU, UI, ND); #c1(DAZ2) c2(NP_065096) c3(deleted in azoospermia protein 2 isoform 1) c4(203876, 203877) c5(203878, 203879, 203880, 203881, 203882, 203883, 203884, 203885, 203886, 203887, 203888, 203889) c6( ) c7(gU, UI, ND); #c1(DAZ3) c2(NP_065097) c3(deleted in azoospermia protein 3) c4(203890, 203891, 203892) c5(203893, 203894, 203895, 203896, 203897, 203898, 203899, 203900, 203901, 203902, 203903, 203904, 203905, 203906, 203907, 203908, 203909, 203910, 203911, 203912, 203913, 203914, 203915, 203916, 203917, 203918, 203919, 203920, 203921, 203922, 203923, 203924, 203925) c6( ) c7(ND, bX); #c1(DAZ4) c2(NP_001005375) c3(deleted in azoospermia protein 4 isoform 1) c4(21579) c5(21580, 21581, 21582, 21583, 21584, 21585, 21586, 21587, 21588) c6( ) c7(ND, gU, bX); #c1(DAZ4) c2(NP_065153) c3(deleted in azoospermia protein 4 isoform 2) c4(204269, 204270, 204271, 204272, 204273) c5(204274, 204275, 204276, 204277, 204278, 204279, 204280, 204281, 204282, 204283, 204284, 204285, 204286, 204287, 204288, 204289, 204290, 204291, 204292, 204293, 204294, 204295, 204296, 204297, 204298, 204299, 204300, 204301, 204302, 204303, 204304, 204305, 204306, 204307, 204308, 204309, 204310, 204311, 204312, 204313, 204314, 204315, 204316, 204317, 204318, 204319, 204320, 204321, 204322, 204323, 204324, 204325, 204326) c6( ) c7(ND, gU, bX); #c1(DAZ4) c2(XP_005262659) c3(deleted in azoospermia protein 4 isoform X1) c4(278028, 278029, 278030) c5( ) c6( ) c7(ND, gU, bX); #c1(DAZ4) c2(XP_011529811) c3(deleted in azoospermia protein 4 isoform X2) c4( ) c5(325579, 325580, 325581, 325582, 325583, 325584, 325585, 325586, 325587, 325588, 325589, 325590, 325591) c6( ) c7(ND, gU, bX); #c1(DAZAP1) c2(NP_061832) c3(DAZ-associated protein 1 isoform b) c4(200681) c5(200682, 200683, 200684, 200685, 200686, 200687) c6( ) c7(x, W, T, k); #c1(DAZAP1) c2(NP_733829) c3(DAZ-associated protein 1 isoform a) c4(247211) c5(247212, 247213, 247214, 247215, 247216, 247217) c6( ) c7(x, W, T, k); #c1(DAZAP1) c2(XP_011526212) c3(DAZ-associated protein 1 isoform X7) c4( ) c5(320477) c6( ) c7(x, W, T, k); #c1(DAZAP2) c2(NP_001129736) c3(DAZ-associated protein 2 isoform b) c4(52271) c5(52272, 52273, 52274, 52275, 52276) c6( ) c7(fd); #c1(DAZAP2) c2(NP_001129738) c3(DAZ-associated protein 2 isoform c) c4(52277) c5(52278, 52279, 52280, 52281, 52282, 52283, 52284, 52285, 52286, 52287) c6( ) c7(fd); #c1(DAZAP2) c2(NP_001129739) c3(DAZ-associated protein 2 isoform d) c4(52288) c5(52289, 52290, 52291, 52292, 52293) c6( ) c7(fd); #c1(DAZAP2) c2(NP_001129740) c3(DAZ-associated protein 2 isoform e) c4(52294) c5(52295, 52296, 52297, 52298, 52299) c6( ) c7(fd); #c1(DAZAP2) c2(NP_001129741) c3(DAZ-associated protein 2 isoform f) c4(52300) c5(52301, 52302, 52303, 52304, 52305, 52306) c6( ) c7(fd); #c1(DAZAP2) c2(NP_055579) c3(DAZ-associated protein 2 isoform a) c4(182063) c5(182064, 182065, 182066, 182067, 182068) c6( ) c7(fd); #c1(DAZL) c2(NP_001177740) c3(deleted in azoospermia-like isoform 1) c4(72954) c5(72955, 72956, 72957, 72958, 72959, 72960) c6( ) c7(zZ, gU, ND, il, Lf, vH, bu, pt, Ld); #c1(DAZL) c2(NP_001342) c3(deleted in azoospermia-like isoform 2) c4(117135) c5(117136, 117137, 117138, 117139, 117140, 117141) c6( ) c7(zZ, gU, ND, il, Lf, vH, bu, pt, Ld); #c1(DBF4) c2(NP_006707) c3(protein DBF4 homolog A) c4(167312) c5(167313, 167314, 167315, 167316, 167317, 167318) c6( ) c7(Dy, Y, K); #c1(DBF4) c2(XP_005250177) c3(protein DBF4 homolog A isoform X1) c4(270166) c5(270167) c6( ) c7(Dy, Y, K); #c1(DBF4) c2(XP_005250179) c3(protein DBF4 homolog A isoform X5) c4( ) c5(270168, 270169, 270170, 270171, 270172) c6( ) c7(Dy, Y, K); #c1(DBH) c2(NP_000778) c3(dopamine beta-hydroxylase precursor) c4(15633, 15634, 15635) c5(15636, 15637, 15638, 15639, 15640, 15641, 15642, 15643, 15644, 15645, 15646, 15647, 15648, 15649, 15650) c6( ) c7(bdo, hl, aaM, rG, wJ, e, ha, uG, bO, cz, GC, ti, bS, ur, bdm, ct, uu, bdr, ml, V, bX, cd, aR, xt, VV, HF, hb, sO, Qg, Fo, ep, aU, alO, Sb, bdp, gl, K, ama, bg, bK, mY, he, an, af, eu, na, Wm, ak, Wi, Y, yL, Gv, fQ, bds, HL, Eg, Z, EX, PE, cm, dr, GB, hg, qa, bN, bdn, pH, ac, cA, Ei, U, cj, Rm, Km, dy, bdq, xg); #c1(DB1) c2(NP_001073331) c3(acyl-CoA-binding protein isoform 3) c4(35871) c5(35872, 35873, 35874, 35875, 35876, 35877) c6( ) c7(bL, T, zQ, aPf, Fb, ci, K, abQ, zP, ae, ad, hq); #c1(DB1) c2(NP_001073332) c3(acyl-CoA-binding protein isoform 2) c4(35878) c5(35879, 35880, 35881, 35882, 35883, 35884) c6( ) c7(bL, T, zQ, aPf, Fb, ci, K, abQ, zP, ae, ad, hq); #c1(DB1) c2(NP_001171488) c3(acyl-CoA-binding protein isoform 4) c4(70312) c5(70313, 70314, 70315, 70316, 70317, 70318) c6( ) c7(bL, T, zQ, aPf, Fb, ci, K, abQ, zP, ae, ad, hq); #c1(DB1) c2(NP_001171512) c3(acyl-CoA-binding protein isoform 5) c4(70384) c5(70385, 70386, 70387, 70388, 70389, 70390) c6( ) c7(bL, T, zQ, aPf, Fb, ci, K, abQ, zP, ae, ad, hq); #c1(DB1) c2(NP_001171514) c3(acyl-CoA-binding protein isoform 6) c4(70391) c5( ) c6( ) c7(bL, T, zQ, aPf, Fb, ci, K, abQ, zP, ae, ad, hq); #c1(DB1) c2(NP_065438) c3(acyl-CoA-binding protein isoform 1) c4(204791) c5(204792, 204793, 204794, 204795, 204796, 204797, 204798, 204799, 204800, 204801, 204802, 204803, 204804, 204805) c6( ) c7(bL, T, zQ, aPf, Fb, ci, K, abQ, zP, ae, ad, hq); #c1(DBN1) c2(NP_004386) c3(drebrin isoform a) c4(145992, 145993, 145994) c5(145995, 145996, 145997, 145998, 145999, 146000, 146001, 146002, 146003, 146004, 146005, 146006, 146007, 146008, 146009, 146010, 146011, 146012, 146013) c6( ) c7(d, af, eM, U, bK, eA, nA, xg, cd); #c1(DBN1) c2(NP_543157) c3(drebrin isoform b) c4(233479) c5(233480, 233481, 233482, 233483, 233484, 233485) c6( ) c7(d, af, eM, U, bK, eA, nA, xg, cd); #c1(DBN1) c2(XP_005265884) c3(drebrin isoform X2) c4(279818) c5( ) c6( ) c7(d, af, eM, U, bK, eA, nA, xg, cd); #c1(DBN1) c2(XP_005265886) c3(drebrin isoform X6) c4( ) c5(279819, 279820, 279821, 279822, 279823) c6( ) c7(d, af, eM, U, bK, eA, nA, xg, cd); #c1(DBNL) c2(NP_001014436) c3(drebrin-like protein isoform b) c4(25880, 25881, 25882, 25883) c5(25884, 25885, 25886, 25887, 25888, 25889, 25890, 25891, 25892, 25893, 25894, 25895, 25896, 25897, 25898, 25899, 25900, 25901, 25902) c6( ) c7(Nq, bM, cT, Nr, JM, aOB, aj, Xm, bK, xl, aLY); #c1(DBNL) c2(NP_001116428) c3(drebrin-like protein isoform c) c4(43870) c5(43871, 43872, 43873, 43874, 43875, 43876) c6( ) c7(Nq, bM, cT, Nr, JM, aOB, aj, Xm, bK, xl, aLY); #c1(DBNL) c2(NP_001271242) c3(drebrin-like protein isoform d) c4( ) c5(103719, 103720, 103721, 103722, 103723) c6( ) c7(Nq, bM, cT, Nr, JM, aOB, aj, Xm, bK, xl, aLY); #c1(DBNL) c2(NP_001271244) c3(drebrin-like protein isoform e) c4(103724) c5(103725, 103726, 103727, 103728, 103729, 103730) c6( ) c7(Ng, bM, cT, Nr, JM, aOB, aj, Xm, bK, xl, aLY); #c1(DBNL) c2(NP_054782) c3(drebrin-like protein isoform a) c4(177797, 177798, 177799) c5(177800, 177801, 177802, 177803, 177804, 177805, 177806, 177807, 177808, 177809, 177810, 177811, 177812, 177813, 177814, 177815, 177816, 177817) c6( ) c7(Ng, bM, cT, Nr, JM, aOB, aj, Xm, bK, xl, aLY); #c1(DBP) c2(NP_001343) c3(D site-binding protein) c4(117142) c5(117143, 117144, 117145, 117146, 117147, 117148, 117149) c6( ) c7(bL, am, eR, jh, cz, aj, dG, v, il, V, qW, ai, J, eA, eW, xy, aT, hD, afV, dL, bK, K, eL, bA, A, mR, Pd, Z, hq, yE, at, pK); #c1(DBR1) c2(NP_057300) c3(lariat debranching enzyme) c4(189964, 189965) c5(189966, 189967, 189968, 189969, 189970, 189971, 189972, 189973, 189974, 189975, 189976, 189977) c6( ) c7(h, ql, c, zn); #c1(DBX1) c2(NP_001025036) c3(homeobox protein DBX1) c4(29246, 29247) c5(29248, 29249, 29250, 29251, 29252, 29253, 29254, 29255, 29256, 29257, 29258, 29259) c6( ) c7(PJ); #c1(DCAF12) c2(NP_056212) c3(DDB1- and CUL4-associated factor 12) c4(186406, 186407) c5(186408, 186409, 186410, 186411, 186412, 186413, 186414, 186415, 186416, 186417, 186418, 186419) c6( ) c7(ae, T, bz, ad, bu); #c1(DCAF12) c2(XP_006716815) c3(DDB1- and CUL4-associated factor 12 isoform X1) c4(290496) c5(290497, 290498, 290499, 290500, 290501, 290502) c6( ) c7(ae, T, bz, ad, bu); #c1(DCAF13) c2(NP_056235) c3(DDB1- and CUL4-associated factor 13) c4(186639, 186640) c5(186641, 186642, 186643, 186644, 186645, 186646, 186647, 186648, 186649, 186650, 186651, 186652) c6( ) c7(bA); #c1(DCAF17) c2(NP_001158293) c3(DDB1- and CUL4-associated factor 17 isoform 2) c4(63565) c5(63566, 63567, 63568, 63569, 63570, 63571) c6( ) c7(bdt, aU, aeM, aj, nA, UE); #c1(DCAF17) c2(NP_079276) c3(DDB1- and CUL4-associated factor 17 isoform 1) c4(217658, 217659) c5(217660, 217661, 217662, 217663, 217664, 217665) c6( ) c7(bdt, aU, aeM, aj, nA, UE); #c1(DCAF17) c2(XP_006712836) c3(DDB1- and CUL4-associated factor 17 isoform X7) c4( ) c5(286885, 286886, 286887, 286888, 286889, 286890) c6( ) c7(bdt, aU, aeM, aj, nA, UE); #c1(DCAF4) c2(NP_001156980) c3(DDB1- and CUL4-associated factor 4 isoform 4) c4(62047) c5(62048, 62049, 62050, 62051, 62052, 62053) c6( ) c7(bM); #c1(DCAF4) c2(NP_056419) c3(DDB1- and CUL4-associated factor 4 isoform 1) c4(187524) c5(187525, 187526, 187527, 187528, 187529, 187530) c6( ) c7(bM); #c1(DCAF4) c2(NP_851937) c3(DDB1- and CUL4-associated factor 4 isoform 2) c4(254701) c5(254702, 254703, 254704, 254705, 254706) c6( ) c7(bM); #c1(DCAF4) c2(NP_851938) c3(DDB1- and CUL4-associated factor 4 isoform 3) c4(254707) c5(254708, 254709, 254710, 254711, 254712, 254713) c6( ) c7(bM); #c1(DCAF4) c2(XP_005267581) c3(DDB1- and CUL4-associated factor 4 isoform X3) c4( ) c5(281023) c6( ) c7(bM); #c1(DCAF5) c2(NP_001271136) c3(DDB1- and CUL4-associated factor 5 isoform 3) c4(103438) c5(103439, 103440, 103441, 103442, 103443, 103444, 103445, 103446) c6( ) c7(j); #c1(DCAF5) c2(NP_001271137) c3(DDB1- and CUL4-associated factor 5 isoform 4) c4( ) c5(103447, 103448, 103449, 103450, 103451, 103452) c6( ) c7(j); #c1(DCAF5) c2(NP_003852) c3(DDB1- and CUL4-associated factor 5 isoform 1) c4(141418) c5(141419, 141420, 141421, 141422, 141423, 141424, 141425, 141426) c6( ) c7(j); #c1(DCAF5) c2(XP_006720363) c3(DDB1- and CUL4-associated factor 5 isoform X4) c4(293503) c5( ) c6( ) c7(j); #c1(DCAF6) c2(NP_001017977) c3(DDB1- and CUL4-associated factor 6 isoform b) c4(26703) c5(26704, 26705, 26706, 26707, 26708, 26709) c6( ) c7(bA, ae, dA, ad, cz); #c1(DCAF6) c2(NP_001185885) c3(DDB1- and CUL4-associated factor 6 isoform c) c4(76650) c5(76651, 76652, 76653, 76654, 76655, 76656) c6( ) c7(bA, ae, dA, ad, cz); #c1(DCAF6) c2(NP_001185886) c3(DDB1- and CUL4-associated factor 6 isoform d) c4(76657) c5(76658, 76659, 76660, 76661, 76662, 76663) c6( ) c7(bA, ae, dA, ad, cz); #c1(DCAF6) c2(NP_060912) c3(DDB1- and CUL4-associated factor 6 isoform a) c4(198594) c5(198595, 198596, 198597, 198598, 198599, 198600) c6( ) c7(bA, ae, dA, ad, cz); #c1(DCAF6) c2(XP_011508069) c3(DDB1- and CUL4-associated factor 6 isoform X4) c4( ) c5(298534, 298535, 298536) c6( ) c7(bA, ae, dA, ad, cz); #c1(DCAF7) c2(NP_005819) c3(DDB1- and CUL4-associated factor 7) c4(159660, 159661, 159662) c5(159663, 159664, 159665, 159666, 159667, 159668, 159669, 159670, 159671, 159672, 159673, 159674, 159675, 159676, 159677, 159678, 159679, 159680) c6( ) c7(T, qn, fd, IR, Qp, aY, Tz, x, bv, fE, dV, aU, eL, Us, azh, KG, apl, aW, Az, ace, g, eF, aHd, mZ, bdx, eM, Kv, aDs, nw, aYS, k, m, LT, WA, RC, n, aj, fr, nA, bd, nE, rc, Nh, Oe, ft, afn, acA, adX, h, aDa, dL, aUH, mY, mV, dx, Lg, mU, yi, A, Gw, aJ, aVf, zb, agL, AQ, agG, ack, QK, mX, hq, ej, adZ, dB, mg, zG, bdA, bD, B, mT, BC, fM, eR, aYJ, aA, cz, mS, v, C, aqf, bdB, aYh, akW, J, hb, aT, kf, bK, zp, ae, bA, bdy, tN, sb, arl, bdz, Qr, iU, axW, Y, bdv, t, f, iK, pb, cT, pa, apq, ac, Zg, mf, rK, bt, ps, yv, gV, ha, jh, wV, ad, hX, iC, Db, vJ, mW, oj, oW, agm, fb, bdw, atJ, yr, d, hG, et, xs, eH, EZ, avG, ayj, all, bdu, eK, pv, EW, DT, Ew, kg, azM, awK, y, hv); #c1(DCAF8) c2(NP_056541) c3(DDB1- and CUL4-associated factor 8) c4(188022, 188023, 188024, 188025, 188026, 188027, 188028) c5(188029, 188030, 188031, 188032, 188033, 188034, 188035, 188036, 188037, 188038, 188039, 188040, 188041, 188042, 188043, 188044, 188045, 188046, 188047, 188048, 188049, 188050, 188051, 188052, 188053, 188054, 188055, 188056, 188057, 188058, 188059, 188060, 188061, 188062, 188063, 188064, 188065, 188066, 188067, 188068, 188069, 188070, 188071, 188072, 188073, 188074, 188075, 188076, 188077, 188078, 188079, 188080, 188081) c6( ) c7(cc, ql, bdC); #c1(DCANP1) c2(NP_570900) c3(dendritic cell nuclear protein 1) c4(234393) c5(234394, 234395, 234396, 234397, 234398, 234399, 234400) c6( ) c7(bM, eE, bO, bS, K, ct, Z); #c1(DCBLD1) c2(NP_775945) c3(discoidin, CUB and LCCL domain-containing protein 1 precursor) c4(250762) c5(250763, 250764, 250765, 250766, 250767, 250768, 250769, 250770, 250771, 250772) c6( ) c7(Y, cd, dY); #c1(DCBLD1) c2(XP_005266998) c3(discoidin, CUB and LCCL domain-containing protein 1 isoform X1) c4(280603) c5(280604, 280605, 280606, 280607, 280608, 280609) c6( ) c7(Y, cd, dY); #c1(DCBLD1) c2(XP_011534074) c3(discoidin, CUB and LCCL domain-containing protein 1 isoform X3) c4(330256) c5(330257, 330258, 330259, 330260, 330261) c6( ) c7(Y, cd, dY); #c1(DCBLD1) c2(XP_011534075) c3(discoidin, CUB and LCCL domain-containing protein 1 isoform X4) c4(330262) c5(330263, 330264) c6( ) c7(Y, cd, dY); #c1(DCBLD1) c2(XP_011534076) c3(discoidin, CUB and LCCL domain-containing protein 1 isoform X5) c4( ) c5(330265) c6( ) c7(Y, cd, dY); #c1(DCBLD2) c2(NP_563615) c3(discoidin, CUB and LCCL domain-containing protein 2 precursor) c4(233540, 233541, 233542) c5(233543, 233544, 233545, 233546, 233547, 233548, 233549, 233550, 233551, 233552, 233553, 233554, 233555, 233556, 233557, 233558, 233559, 233560) c6( ) c7(bM, T, kl, d, ant, aDy, oV, ea, EQ, la, aA, aF, bz); #c1(DCC) c2(NP_005206) c3(netrin receptor DCC) c4(153986, 153987) c5(153988, 153989, 153990, 153991, 153992, 153993) c6( ) c7(T, aC, e, fd, bB, ci, ip, x, aE, eL, aW, nY, g, ir, eF, cm, bw, eM, dc, m, YK, Qj, aw, ht, NT, n, aj, h, IG, hn, dL, hB, bdD, fe, YF, W, dB, hL, it, B, aA, j, q, er, eA, eJ, cF, hW, aT, Oi, an, ae, eu, s, vT, NE, iU, Y, r, qL, pR, en, cl, t, iK, ck, ac, gX, bt, id, jh, bS, ad, Dq, io, hD, d, ff, eH, aF, iV, bz, bF, bE, y, X); #c1(DCC) c2(XP_011524148) c3(netrin receptor DCC isoform X4) c4(318704) c5(318705, 318706, 318707, 318708, 318709, 318710, 318711, 318712, 318713, 318714, 318715, 318716) c6( ) c7(T, aC, e, fd, bB, ci, ip, x, aE, eL, aW, nY, g, ir, eF, cm, bw, eM, dc, m, YK, Qj, aw, ht, NT, n, aj, h, IG, hn, dL, hB, bdD, fe, YF, W, dB, hL, it, B, aA, j, q, er, eA, eJ, cF, hW, aT, Oi, an, ae, eu, s, vT, NE, iU, Y, r, qL, pR, en, cl, t, iK, ck, ac, gX, bt, id, jh, bS, ad, Dq, io, hD, d, ff, eH, aF, iV, bz, bF, bE, y, X); #c1(DCD) c2(NP_444513) c3(dermcidin isoform 1 preproprotein) c4(230360, 230361) c5(230362, 230363, 230364, 230365, 230366, 230367) c6( ) c7(bL, T, bdE, aE, fR, aW, Y, aT, tc, aq, oH, K, IQ, kD, eE, ae, B, ad, bA); #c1(DCDC2) c2(NP_057440) c3(doublecortin domain-containing protein 2) c4(190833, 190834, 190835, 190836) c5(190837, 190838, 190839, 190840, 190841, 190842, 190843, 190844, 190845, 190846, 190847, 190848, 190849, 190850, 190851, 190852, 190853, 190854, 190855, 190856, 190857, 190858, 190859, 190860, 190861) c6( ) c7(ae, T, ac, VT, aaw, yA, alP, afx, bdF, B, xt, ad); #c1(DCDC2C) c2(NP_001274373) c3(doublecortin domain-containing protein 2C) c4( ) c5(106375, 106376, 106377, 106378, 106379, 106380) c6( ) c7(bL, bM, aC, oe, j, an, fq, cd); #c1(DCDC2C) c2(XP_006711957) c3(doublecortin domain-containing protein 2C isoform X5) c4(286307) c5( ) c6( ) c7(bL, bM, aC, oe, j, an, fq, cd); #c1(DCHS1) c2(NP_003728) c3(protocadherin-16 precursor) c4(140479) c5(140480, 140481, 140482, 140483, 140484, 140485, 140486) c6( ) c7(aur, afw, bdG, j); #c1(DCHS2) c2(NP_001136024) c3(protocadherin-23 isoform 2) c4(54037, 54038) c5(54039, 54040, 54041, 54042, 54043, 54044, 54045, 54046, 54047, 54048, 54049, 54050) c6( ) c7(V, oe, af); #c1(DCHS2) c2(NP_060109) c3(protocadherin-23 isoform 1) c4(194220) c5(194221, 194222, 194223, 194224, 194225, 194226) c6( ) c7(V, oe, af); #c1(DCHS2) c2(XP_011530347) c3(protocadherin-23 isoform X1) c4(326206, 326207) c5(326208, 326209, 326210, 326211, 326212, 326213, 326214, 326215, 326216, 326217, 326218, 326219) c6( ) c7(V, oe, af); #c1(DCK) c2(NP_000779) c3(deoxycytidine kinase) c4(15651, 15652) c5(15653, 15654, 15655, 15656, 15657, 15658, 15659, 15660, 15661, 15662, 15663, 15664) c6( ) c7(T, aC, iW, ht, jh, ci, bX, eA, x, aE, nv, aT, h, DU, hS, aW, kp, hf, t, f, cm, bw, ck, nM, eM, bE, zv, m, k, bt, iu, ix, On); #c1(DCLK1) c2(NP_001182344) c3(serine/threonine-protein kinase DCLK1 isoform 2) c4( ) c5(74804, 74805, 74806, 74807, 74808, 74809) c6( ) c7(HQ, T, ac, Yc, s, dH, aE, e, r, aq, kp, ey, q, eA, cm, B); #c1(DCLK1) c2(NP_001182345) c3(serine/threonine-protein kinase DCLK1 isoform 3) c4(74810) c5(74811, 74812, 74813, 74814, 74815, 74816) c6( ) c7(HQ, T, ac, Yc, s, dH, aE, e, r, aq, kp, ey, q, eA, cm, B); #c1(DCLK1) c2(NP_004725) c3(serine/threonine-protein kinase DCLK1 isoform 1) c4(149089, 149090) c5(149091, 149092, 149093, 149094, 149095, 149096, 149097, 149098, 149099, 149100, 149101, 149102, 149103, 149104, 149105, 149106, 149107, 149108) c6( ) c7(HQ, T, ac, Yc, s, dH, aE, e, r, aq, kp, ey, q, eA, cm, B); #c1(DCLK1) c2(XP_006719956) c3(serine/threonine-protein kinase DCLK1 isoform X1) c4(293091, 293092, 293093) c5(293094, 293095, 293096, 293097, 293098, 293099) c6( ) c7(HQ, T, ac, Yc, s, dH, aE, e, r, aq, kp, ey, q, eA, cm, B); #c1(DCLK2) c2(NP_001035350) c3(serine/threonine-protein kinase DCLK2 isoform a) c4(32773) c5(32774, 32775, 32776, 32777, 32778, 32779) c6( ) c7(cd); #c1(DCLK2) c2(NP_001035351) c3(serine/threonine-protein kinase DCLK2 isoform b) c4(32780) c5(32781, 32782, 32783, 32784, 32785, 32786) c6( ) c7(cd); #c1(DCLK2) c2(XP_005262843) c3(serine/threonine-protein kinase DCLK2 isoform X2) c4(278145) c5(278146, 278147, 278148, 278149, 278150, 278151) c6( ) c7(cd); #c1(DCLK3) c2(NP_208382) c3(serine/threonine-protein kinase DCLK3) c4(228540) c5(228541, 228542, 228543, 228544, 228545, 228546) c6( ) c7(T, d, Vv, wR, azl, sa, Hr, Hp); #c1(DCLRE1A) c2(NP_055696) c3(DNA cross-link repair 1A protein) c4(182836) c5(182837, 182838, 182839, 182840, 182841, 182842, 182843, 182844, 182845, 182846) c6( ) c7(dA, os, ft, oW, oZ); #c1(DCLRE1C) c2(NP_001029027) c3(protein artemis isoform a) c4(30718, 30719, 30720) c5(30721, 30722, 30723, 30724, 30725, 30726, 30727, 30728, 30729, 30730, 30731, 30732, 30733, 30734, 30735) c6( ) c7(fM, dA, jh, aA, fd, V, q, o, eA, dP, bdJ, aT, h, pk, CB, aAi, oS, oV, Y, CM, Rr, hl, ff, bdH, r, CF, bdl, aE, en, QK, ck, ou, dB, cj, m, bt, xg); #c1(DCLRE1C) c2(XP_011517920) c3(protein artemis isoform X1) c4(311873, 311874) c5(311875, 311876, 311877, 311878, 311879, 311880, 311881, 311882, 311883, 311884, 311885, 311886, 311887, 311888, 311889, 311890, 311891, 311892) c6( ) c7(fM, dA, jh, aA, fd, V, q, o, eA, dP, bdJ, aT, h, pk, CB, aAi, oS, oV, Y, CM, Rr, hl, ff, bdH, r, CF, bdl, aE, en, QK, ck, ou, dB, cj, m, bt, xg); #c1(DCLRE1C) c2(XP_011517921) c3(protein artemis isoform X2) c4(311893, 311894, 311895) c5(311896, 311897, 311898, 311899, 311900, 311901, 311902, 311903, 311904, 311905, 311906, 311907, 311908, 311909, 311910, 311911, 311912, 311913, 311914, 311915, 311916, 311917, 311918) c6( ) c7(fM, dA, jh, aA, fd, V, q, o, eA, dP, bdJ, aT, h, pk, CB, aAi, oS, oV, Y, CM, Rr, hl, ff, bdH, r, CF, bdl, aE, en, QK, ck, ou, dB, cj, m, bt, xg); #c1(DCLRE1C) c2(XP_011517922) c3(protein artemis isoform X3) c4( ) c5(311919, 311920, 311921, 311922, 311923, 311924) c6( ) c7(fM, dA, jh, aA, fd, V, q, o, eA, dP, bdJ, aT, h, pk, CB, aAi, oS, oV, Y, CM, Rr, hl, ff, bdH, r, CF, bdl, aE, en, QK, ck, ou, dB, cj, m, bt, xg); #c1(DCLRE1C) c2(XP_011517923) c3(protein artemis isoform X4) c4( ) c5(311925, 311926, 311927, 311928, 311929, 311930, 311931, 311932, 311933, 311934, 311935) c6( ) c7(fM, dA, jh, aA, fd, V, q, o, eA, dP, bdJ, al h, pk, CB, aAi, oS, oV, Y, CM, Rr, hl, ff, bdH, r, CF, bdl, aE, en, QK, ck, ou, dB, cj, m, bt, xg); #c1(DCN) c2(NP_598010) c3(decorin isoform a preproprotein) c4(235299, 235300, 235301, 235302, 235303, 235304) c5(235305, 235306, 235307, 235308, 235309, 235310, 235311, 235312, 235313, 235314, 235315, 235316, 235317, 235318, 235319, 235320, 235321, 235322, 235323, 235324, 235325, 235326, 235327, 235328, 235329, 235330, 235331, 235332, 235333, 235334, 235335, 235336, 235337, 235338, 235339, 235340, 235341, 235342, 235343, 235344) c6( ) c7(lD, bM, T, asg, ea, al, fd, bB, ci, aE, Bc, dv, ta, K, apj, H, eL, Qe, aW, pL, eF, aAW, eM, nB, tV, cj, Hb, m, R, fy, rt, dD, vl, zt, aw, aj, bdL, cd, bdK, amJ, dL, ey, pj, Dg, A, anP, aq, fq, bP, hL, ajd, hj, mg, rx, bm, B, AN, bL, fG, oe, cz, lj, v, j, uW, V, Eh, q, J, eA, lg, aT, aHs, zp, bq, ae, af, aCr, wr, bf, Pg, r, en, cl, t, pb, hc, agf, dy, EY, vi, kh, eq, ad, BY, dP, sN, le, uD, sj, d, ff, xs, iR, dr, LB, D, gk, RV, bE, aS); #c1(DCN) c2(NP_598011) c3(decorin isoform b precursor) c4(235345) c5(235346, 235347, 235348, 235349, 235350, 235351, 235352, 235353, 235354, 235355) c6( ) c7(lD, bM, T, asg, ea, al, fd, bB, ci, aE, Bc, dv, ta, K, apj, H, eL, Qe, aW, pL, eF, aAW, eM, nB, tV, cj, Hb, m, R, fy, rt, dD, vl, zt, aw, aj, bdL, cd, bdK, amJ, dL, ey, pj, Dg, A, anP, aq, fq, bP, hL, ajd, hj, mg, rx, bm, B, AN, bL, fG, oe, cz, lj, v, j, uW, V, Eh, q, J, eA, lg, aT, aHs, zp, bq, ae, af, aCr, wr, bf, Pg, r, en, cl, t, pb, hc, agf, dy, EY, vi, kh, eq, ad, BY, dP, sN, le, uD, sj, d, ff, xs, iR, dr, LB, D, gk, RV, bE, aS); #c1(DCN) c2(NP_598012) c3(decorin isoform c precursor) c4(235356) c5(235357, 235358, 235359, 235360, 235361, 235362, 235363, 235364, 235365, 235366) c6( ) c7(lD, bM, T, asg, ea, al, fd, bB, ci, aE, Bc, dv, ta, K, apj, H, eL, Qe, aW, pL, eF, aAW, eM, nB, tV, cj, Hb, m, R, fy, rt, dD, vl, zt, aw, aj, bdL, cd, bdK, amJ, dL, ey, pj, Dg, A, anP, aq, fq, bP, hL, ajd, hj, mg, rx, bm, B, AN, bL, fG, oe, cz, lj, v, j, uW, V, Eh, q, J, eA, lg, aT, aHs, zp, bq, ae, af, aCr, wr, bf, Pg, r, en, cl, t, pb, hc, agf, dy, EY, vi, kh, eq, ad, BY, dP, sN, le, uD, sj, d, ff, xs, iR, dr, LB, D, gk, RV, bE, aS); #c1(DCN) c2(NP_598013) c3(decorin isoform d precursor) c4(235367) c5(235368, 235369, 235370, 235371, 235372, 235373, 235374, 235375, 235376, 235377) c6( ) c7(lD, bM, T, asg, ea, al, fd, bB, ci, aE, Bc, dv, ta, K, apj, H, eL, Qe, aW, pL, eF, aAW, eM, nB, tV, cj, Hb, m, R, fy, rt, dD, vl, zt, aw, aj, bdL, cd, bdK, amJ, dL, ey, pj, Dg, A, anP, aq, fq, bP, hL, ajd, hj, mg, rx, bm, B, AN, bL, fG, oe, cz, lj, v, j, uW, V, Eh, q, J, eA, lg, aT, aHs, zp, bq, ae, af, aCr, wr, bf, Pg, r, en, cl, t, pb, hc, agf, dy, EY, vi, kh, eq, ad, BY, dP, sN, le, uD, sj, d, ff, xs, iR, dr, LB, D, gk, RV, bE, aS); #c1(DCN) c2(NP_598014) c3(decorin isoform e precursor) c4( ) c5(235378, 235379, 235380, 235381, 235382, 235383) c6( ) c7(lD, bM, T, asg, ea, al, fd, bB, ci, aE, Bc, dv, ta, K, apj, H, eL, Qe, aW, pL, eF, aAW, eM, nB, tV, cj, Hb, m, R, fy, rt, dD, vl, zt, aw, aj, bdL, cd, bdK, amJ, dL, ey, pj, Dg, A, anP, aq, fq, bP, hL, ajd, hj, mg, rx, bm, B, AN, bL, fG, oe, cz, lj, v, j, uW, V, Eh, q, J, eA, lg, aT, aHs, zp, bq, ae, af, aCr, wr, bf, Pg, r, en, cl, t, pb, hc, agf, dy, EY, vi, kh, eq, ad, BY, dP, sN, le, uD, sj, d, ff, xs, iR, dr, LB, D, gk, RV, bE, aS); #c1(DCP1A) c2(NP_001277136) c3(mRNA-decapping enzyme 1A isoform e) c4( ) c5(109113) c6( ) c7(yT, oe, K, c); #c1(DCP1A) c2(NP_060873) c3(mRNA-decapping enzyme 1A isoform a) c4(198215) c5(198216, 198217, 198218, 198219, 198220, 198221, 198222) c6( ) c7(yT, oe, K, c); #c1(DCP1B) c2(NP_689853) c3(mRNA-decapping enzyme 1B) c4(244156) c5(244157, 244158, 244159, 244160, 244161, 244162, 244163) c6( ) c7(aC, W, bS, aS, ct, Z); #c1(DCP1B) c2(XP_011519229) c3(mRNA-decapping enzyme 1B isoform X1) c4(313822) c5(313823, 313824, 313825, 313826, 313827) c6( ) c7(aC, W, bS, aS, ct, Z); #c1(DCPS) c2(NP_054745) c3(m7GpppX diphosphatase) c4(177552) c5(177553, 177554, 177555, 177556, 177557, 177558) c6( ) c7(h, bM); #c1(DCST1) c2(NP_001137159) c3(DC-STAMP domain-containing protein 1 isoform 2) c4(55060) c5(55061, 55062, 55063, 55064, 55065, 55066) c6( ) c7(aw); #c1(DCST1) c2(NP_689707) c3(DC-STAMP domain-containing protein 1 isoform 1) c4(243635, 243636) c5(243637, 243638, 243639, 243640, 243641, 243642, 243643, 243644, 243645, 243646, 243647, 243648, 243649, 243650, 243651, 243652) c6( ) c7(aw); #c1(DCST2) c2(NP_653223) c3(DC-STAMP domain-containing protein 2) c4(239171, 239172) c5(239173, 239174, 239175, 239176, 239177, 239178, 239179, 239180, 239181, 239182, 239183, 239184) c6( ) c7(aw); #c1(DCST2) c2(XP_011507491) c3(DC-STAMP domain-containing protein 2 isoform X2) c4( ) c5(297392) c6( ) c7(aw); #c1(DCSTAMP) c2(XP_005251132) c3(dendritic cell-specific transmembrane protein isoform X1) c4(270832) c5(270833, 270834, 270835, 270836, 270837, 270838) c6( ) c7(dP, aw, hl, bdM, bi, xa); #c1(DCSTAMP) c2(XP_011515626) c3(dendritic cell-specific transmembrane protein isoform X2) c4(308455) c5(308456, 308457, 308458, 308459, 308460, 308461) c6( ) c7(dP, aw, hl, bdM, bi, xa); #c1(DCT) c2(NP_001123361) c3(L-dopachrome tautomerase isoform 2 precursor) c4(47032, 47033) c5(47034, 47035, 47036, 47037, 47038, 47039) c6( ) c7(rp, d, Dy, bP, HP, Y, rI, hD, asM, qj, K, BM, aYs, eA, pC); #c1(DCT) c2(NP_001913) c3(L-dopachrome tautomerase isoform 1 precursor) c4(122147) c5(122148, 122149, 122150, 122151, 122152, 122153) c6( ) c7(rp, d, Dy, bP, HP, Y, rI, hD, asM, qj, K, BM, aYs, eA, pC); #c1(DCT) c2(XP_011519352) c3(L-dopachrome tautomerase isoform X1) c4( ) c5(314011, 314012, 314013, 314014, 314015, 314016) c6( ) c7(rp, d, Dy, bP, HP, Y, rI, hD, asM, qj, K, BM, aYs, eA, pC); #c1(DCTD) c2(NP_001012750) c3(deoxycytidylate deaminase isoform a) c4(25260, 25261) c5(25262, 25263, 25264, 25265, 25266, 25267) c6( ) c7(aC, ac); #c1(DCTD) c2(XP_005262835) c3(deoxycytidylate deaminase isoform X2) c4(278135) c5(278136, 278137, 278138, 278139, 278140, 278141, 278142, 278143, 278144) c6( ) c7(aC, ac); #c1(DCTD) c2(XP_011529976) c3(deoxycytidylate deaminase isoform X1) c4(325751, 325752, 325753, 325754, 325755, 325756) c5(325757, 325758, 325759, 325760, 325761, 325762, 325763, 325764, 325765, 325766, 325767, 325768, 325769, 325770, 325771, 325772, 325773, 325774, 325775, 325776, 325777, 325778, 325779, 325780, 325781, 325782, 325783, 325784, 325785, 325786, 325787, 325788, 325789, 325790, 325791, 325792, 325793, 325794, 325795, 325796, 325797, 325798, 325799) c6( ) c7(aC, ac); #c1(DCTN1) c2(NP_001128512) c3(dynactin subunit 1 isoform 3) c4(50128, 50129) c5(50130, 50131, 50132, 50133, 50134, 50135, 50136, 50137) c6( ) c7(bU, c, cA, Kx, avR, WY, OI, aem, an, HC, aT, U, Kj, bdN, PJ, als, V, Tq, aR, bdO); #c1(DCTN1) c2(NP_001128513) c3(dynactin subunit 1 isoform 4) c4(50138) c5(50139, 50140, 50141, 50142, 50143, 50144) c6( ) c7(bU, c, cA, Kx, avR, WY, OI, aem, an, HC, aT, U, Kj, bdN, PJ, alS, V, Tq, aR, bdO); #c1(DCTN1) c2(NP_001177765) c3(dynactin subunit 1 isoform 5) c4(72980) c5(72981, 72982, 72983, 72984, 72985, 72986, 72987, 72988, 72989, 72990) c6( ) c7(bU, c, cA, Kx, avR, WY, OI, aem, an, HC, aT, U, Kj, bdN, PJ, alS, V, Tq, aR, bdO); #c1(DCTN1) c2(NP_001177766) c3(dynactin subunit 1 isoform 6) c4(72991) c5(72992, 72993, 72994, 72995, 72996, 72997) c6( ) c7(bU, c, cA, Kx, avR, WY, OI, aem, an, HC, aT, U, Kj, bdN, PJ, alS, V, Tq, aR, bdO); #c1(DCTN1) c2(NP_004073) c3(dynactin subunit 1 isoform 1) c4(143326, 143327, 143328, 143329) c5(143330, 143331, 143332, 143333, 143334, 143335, 143336, 143337, 143338, 143339, 143340, 143341, 143342, 143343, 143344, 143345, 143346, 143347, 143348, 143349, 143350, 143351, 143352, 143353, 143354, 143355, 143356, 143357, 143358, 143359) c6( ) c7(bU, c, cA, Kx, avR, WY, OI, aem, an, HC, aT, U, Kj, bdN, PJ, alS, V, Tq, aR, bdO); #c1(DCTN1) c2(NP_075408) c3(dynactin subunit 1 isoform 2) c4(213858) c5( ) c6( ) c7(bU, c, cA, Kx, avR, WY, OI, aem, an, HC, aT, U, Kj, bdN, PJ, alS, V, Tq, aR, bdO); #c1(DCTN2) c2(NP_001248341) c3(dynactin subunit 2 isoform 2) c4(93723) c5( ) c6( ) c7(eF, T, eH); #c1(DCTN2) c2(NP_001248342) c3(dynactin subunit 2 isoform 3) c4(93724) c5(93725, 93726, 93727, 93728, 93729, 93730) c6( ) c7(eF, T, eH); #c1(DCTN2) c2(NP_006391) c3(dynactin subunit 2 isoform 1) c4(164628, 164629) c5(164630, 164631, 164632, 164633, 164634, 164635, 164636, 164637, 164638, 164639, 164640, 164641, 164642, 164643, 164644, 164645, 164646, 164647, 164648) c6( ) c7(eF, T, eH); #c1(DCTN2) c2(XP_011536063) c3(dynactin subunit 2 isoform X1) c4(333383) c5(333384, 333385, 333386, 333387, 333388) c6( ) c7(eF, T, eH); #c1(DCTN3) c2(NP_001268354) c3(dynactin subunit 3 isoform 3) c4(99717, 99718) c5(99719, 99720, 99721, 99722, 99723, 99724, 99725, 99726, 99727, 99728, 99729, 99730) c6( ) c7(T, aNB, DK, nv, bdP, Pg, B, bdQ); #c1(DCTN3) c2(NP_001268355) c3(dynactin subunit 3 isoform 4) c4( ) c5(99731, 99732, 99733, 99734, 99735, 99736, 99737, 99738, 99739, 99740, 99741, 99742, 99743, 99744, 99745, 99746, 99747) c6( ) c7(T, aNB, DK, nv, bdP, Pg, B, bdQ); #c1(DCTN3) c2(NP_001268356) c3(dynactin subunit 3 isoform 5) c4( ) c5(99748) c6( ) c7(T, aNB, DK, nv, bdP, Pg, B, bdQ); #c1(DCTN3) c2(NP_009165) c3(dynactin subunit 3 isoform 1) c4(171218, 171219, 171220, 171221) c5(171222, 171223, 171224, 171225, 171226, 171227) c6( ) c7(T, aNB, DK, nv, bdP, Pg, B, bdQ); #c1(DCTN3) c2(NP_077324) c3(dynactin subunit 3 isoform 2) c4(215241) c5(215242, 215243, 215244, 215245, 215246, 215247) c6( ) c7(T, aNB, DK, nv, bdP, Pg, B, bdQ); #c1(DCTN4) c2(NP_001129115) c3(dynactin subunit 4 isoform a) c4(50806) c5(50807, 50808, 50809, 50810, 50811, 50812) c6( ) c7(kV, Kd, T, bM, pF, if, GC, To, v, BF, ci, q, ad, Kx, jz, zw, WY, aT, h, K, Wr, ae, af, d, aW, ff, az, alR, r, aq, aaE, kp, en, g, bb, kP, c, eM, U, Kj, bdR, hi, xg, B, ao); #c1(DCTN4) c2(NP_001129116) c3(dynactin subunit 4 isoform c) c4(50813, 50814, 50815) c5(50816, 50817, 50818, 50819, 50820, 50821, 50822, 50823, 50824, 50825, 50826, 50827, 50828, 50829, 50830) c6( ) c7(kV, Kd, T, bM, pF, if, GC, To, v, BF, ci, q, ad, Kx, jz, zw, WY, aT, h, K, Wr, ae, af, d, aW, ff, az, alR, r, aq, aaE, kp, en, g, bb, kP, c, eM, U, Kj, bdR, hi, xg, B, ao); #c1(DCTN4) c2(NP_057305) c3(dynactin subunit 4 isoform b) c4(190017) c5(190018, 190019, 190020, 190021, 190022, 190023, 190024, 190025, 190026) c6( ) c7(kV, Kd, T, bM, pF, if, GC, To, v, BF, ci, q, ad, Kx, jz, zw, WY, aT, h, K, Wr, ae, af, d, aW, ff, az, alR, r, aq, aaE, kp, en, g, bb, kP, c, eM, U, Kj, bdR, bi, xg, B, ao); #c1(DCTN5) c2(NP_001185940) c3(dynactin subunit 5 isoform 2) c4(76798) c5(76799, 76800, 76801, 76802, 76803, 76804) c6( ) c7(Hx, ac, c, U, aT, cz, h, aj, j, bK, fr, y, gD, aR); #c1(DCTN5) c2(NP_115875) c3(dynactin subunit 5 isoform 1) c4(224425) c5(224426, 224427, 224428, 224429, 224430, 224431) c6( ) c7(Hx, ac, c, U, aT, cz, h, aj, j, bK, fr, y, gD, aR); #c1(DCTN6) c2(NP_006562) c3(dynactin subunit 6) c4(166243) c5(166244, 166245, 166246, 166247, 166248, 166249) c6( ) c7(T, ea, if, fd, bB, ci, aE, il, Qk, K, eL, be, xQ, yo, aW, as, cm, bw, GR, eM, nB, dc, go, vA, cj, m, dD, NT, n, fr, qN, jz, h, dL, Oz, ge, aq, zZ, iO, bP, hR, it, B, fM, aoE, aA, q, eA, XX, aT, dz, ae, af, jf, s, iU, Y, r, en, cl, t, iK, aEp, ck, nM, iM, dy, bt, On, hS, hl, Ke, pY, jh, eq, ad, hX, hd, ib, fb, d, je, et, ff, apb, aF, aTa, bz, bE, aS, EB); #c1(DCUN1D1) c2(NP_065691) c3(DCN1-like protein 1) c4(204971, 204972) c5(204973, 204974, 204975, 204976, 204977, 204978, 204979, 204980, 204981, 204982, 204983, 204984, 204985) c6( ) c7(T, d, eM, iE, WY, ff, iv, aaE, ci, en, g, it, eA); #c1(DCUN1D1) c2(XP_011511215) c3(DCN1-like protein 1 isoform X1) c4(301696) c5( ) c6( ) c7(T, d, eM, iE, WY, ff, iv, aaE, ci, en, g, it, eA); #c1(DCX) c2(NP_000546) c3(neuronal migration protein doublecortin isoform a) c4(12623, 12624, 12625) c5(12626, 12627, 12628, 12629, 12630, 12631, 12632, 12633, 12634, 12635, 12636, 12637, 12638, 12639, 12640) c6( ) c7(T, hl, Tb, qx, ha, jx, qy, n, bdV, nA, Fc, afz, eA, ad, iC, Hx, hb, K, bdS, Lg, jf, d, aeR, Y, Ls, FD, qL, Xj, as, cm, Hp, bdW, bdT, WO, afZ, dB, wO, FB, bdU); #c1(DCX) c2(NP_835365) c3(neuronal migration protein doublecortin isoform b) c4(253485) c5(253486, 253487, 253488, 253489, 253490, 253491, 253492, 253493, 253494, 253495) c6( ) c7(T, hl, Tb, qx, ha, jx, qy, n, bdV, nA, Fc, afz, eA, ad, iC, Hx, hb, K, bdS, Lg, jf, d, aeR, Y, Ls, FD, qL, Xj, as, cm, Hp, bdW, bdT, WO, afZ, dB, wO, FB, bdU); #c1(DCX) c2(NP_835366) c3(neuronal migration protein doublecortin isoform c) c4(253496) c5(253497, 253498, 253499, 253500, 253501, 253502, 253503, 253504) c6( ) c7(T, hl, Tb, qx, ha, jx, qy, n, bdV, nA, Fc, afz, eA, ad, iC, Hx, hb, K, bdS, Lg, jf, d, aeR, Y, Ls, FD, qL, Xj, as, cm, Hp, bdW, bdT, WO, afZ, dB, wO, FB, bdU); #c1(DCX) c2(XP_011529182) c3(neuronal migration protein doublecortin isoform X3) c4( ) c5(324586, 324587, 324588, 324589, 324590) c6( ) c7(T, hl, Tb, qx, ha, jx, qy, n, bdV, nA, Fc, afz, eA, ad, iC, Hx, hb, K, bdS, Lg, jf, d, aeR, Y, Ls, FD, qL, Xj, as, cm, Hp, bdW, bdT, WO, afZ, dB, wO, FB, bdU); #c1(DCXR) c2(NP_057370) c3(L-xylulose reductase isoform 1) c4(190419) c5(190420, 190421, 190422, 190423, 190424, 190425) c6( ) c7(ai, bdX, ac, xE, IH, v, Fb, nA, f, ae, B, ad, eK); #c1(DDAH1) c2(XP_011539460) c3(N(G),N(G)-dimethylarginine dimethylaminohydrolase 1 isoform X3) c4(337642) c5(337643, 337644, 337645, 337646, 337647, 337648, 337649, 337650, 337651, 337652, 337653, 337654, 337655) c6( ) c7(bL, fU, ac, wE, fG, e, aw, hl, cz, sM, cR, eh, QL, j, dy, cm, lC, uC, tw); #c1(DDAH2) c2(NP_001289937) c3(N(G),N(G)-dimethylarginine dimethylaminohydrolase 2) c4(114715, 114716, 114717, 114718, 114719) c5(114720, 114721, 114722, 114723, 114724, 114725, 114726, 114727, 114728, 114729, 114730, 114731, 114732, 114733, 114734, 114735, 114736, 114737, 114738, 114739, 114740, 114741, 114742, 114743, 114744, 114745, 114746, 114747, 114748, 114749, 114750, 114751, 114752, 114753, 114754, 114755, 114756, 114757, 114758, 114759, 114760, 114761, 114762, 114763, 114764, 114765, 114766, 114767, 114768, 114769, 114770, 114771, 114772, 114773, 114774, 114775, 114776, 114777, 114778, 114779, 114780, 114781, 114782, 114783, 114784, 114785, 114786, 114787, 114788, 114789, 114790, 114791, 114792, 114793, 114794, 114795, 114796, 114797, 114798, 114799, 114800, 114801, 114802, 114803, 114804, 114805, 114806, 114807, 114808, 114809, 114810, 114811, 114812, 114813, 114814, 114815, 114816, 114817, 114818, 114819, 114820, 114821, 114822, 114823, 114824, 114825, 114826, 114827, 114828, 114829, 114830, 114831, 114832, 114833, 114834, 114835, 114836, 114837, 114838, 114839, 114840, 114841, 114842, 114843, 114844, 114845, 114846, 114847, 114848, 114849, 114850, 114851, 114852, 114853, 114854, 114855, 114856, 114857, 114858, 114859, 114860, 114861, 114862, 114863, 114864, 114865, 114866, 114867, 114868) c6( ) c7(bL, dD, ea, fG, e, aw, cz, sM, cR, aj, dG, j, v, eq, aY, fU, K, A, Y, eZ, uC, ac, wE, fP, dy); #c1(DDB1) c2(NP_001914) c3(DNA damage-binding protein 1) c4(122154, 122155, 122156, 122157) c5(122158, 122159, 122160, 122161, 122162, 122163, 122164, 122165, 122166, 122167, 122168, 122169, 122170, 122171, 122172, 122173, 122174, 122175, 122176, 122177, 122178, 122179, 122180, 122181) c6( ) c7(jx, CT, aA, bB, K, m, aW, t, B, hX); #c1(DDB2) c2(NP_000098) c3(DNA damage-binding protein 2) c4(1736, 1737, 1738) c5(1739, 1740, 1741, 1742, 1743, 1744, 1745, 1746, 1747, 1748, 1749, 1750, 1751, 1752, 1753, 1754, 1755, 1756) c6( ) c7(T, d, BN, bE, aW, Y, yk, hX, CT, aT, bB, hy, dL, K, m, aW, t, V, bz, ne, bdY); #c1(DDB2) c2(NP_001287663) c3(DNA damage-binding protein 2 isoform D1) c4(112485) c5(112486, 112487, 112488, 112489, 112490, 112491) c6( ) c7(T, d, BN, bE, aW, Y, yk, hX, CT, aT, bB, hy, dL, K, m, aW, t, V, bz, ne, bdY); #c1(DDC) c2(NP_000781) c3(aromatic-L-amino-acid decarboxylase isoform 1) c4(15686) c5(15687, 15688, 15689, 15690, 15691, 15692, 15693, 15694, 15695, 15696, 15697, 15698, 15699, 15700, 15701) c6( ) c7(T, eR, bdZ, uG, aA, mS, n, bS, ti, ur, uu, ah, qi, q, ad, ft, bea, aji, hb, mW, HC, dV, bK, an, mY, mV, he, ae, na, mU, B, Gv, ff, LO, fQ, hN, aF, en, g, t, vo, cm, mZ, iK, bN, mX, cv, hq, Nb, m, mT); #c1(DDC) c2(NP_001229817) c3(aromatic-L-amino-acid decarboxylase isoform 4) c4(85321) c5(85322, 85323, 85324, 85325, 85326, 85327) c6( ) c7(T, eR, bdZ, uG, aA, mS, n, bS, ti, ur, uu, ah, qi, q, ad, ft, bea, aji, hb, mW, HC, dV, bK, an, mY, mV, he, ae, na, mU, B, Gv, ff, LO, fQ, hN, aF, en, g, t, vo, cm, mZ, iK, bN, mX, cv, hq, Nb, m, mT); #c1(DDC) c2(NP_001229818) c3(aromatic-L-amino-acid decarboxylase isoform 5) c4(85328) c5(85329, 85330, 85331, 85332, 85333, 85334) c6( ) c7(T, eR, bdZ, uG, aA, mS, n, bS, ti, ur, uu, ah, qi, q, ad, ft, bea, aji, hb, mW, HC, dV, bK, an, mY, mV, he, ae, na, mU, B, Gv, ff, LO, fQ, hN, aF, en, g, t, vo, cm, mZ, iK, bN, mX, cv, hq, Nb, m, mT); #c1(DDC) c2(NP_001229819) c3(aromatic-L-amino-acid decarboxylase isoform 6) c4(85335, 85336) c5(85337, 85338, 85339, 85340, 85341, 85342) c6( ) c7(T, eR, bdZ, uG, aA, mS, n, bS, ti, ur, uu, ah, qi, q, ad, ft, bea, aji, hb, mW, HC, dV, bK, an, mY, mV, he, ae, na, mU, B, Gv, ff, LO, fQ, hN, aF, en, g, t, vo, cm, mZ, iK, bN, mX, cv, hq, Nb, m, mT); #c1(DDC) c2(XP_005271802) c3(aromatic-L-amino-acid decarboxylase isoform X1) c4(283597) c5(283598, 283599, 283600, 283601, 283602, 283603) c6( ) c7(T, eR, bdZ, uG, aA, mS, n, bS, ti, ur, uu, ah, qi, q, ad, ft, bea, aji, hb, mW, HC, dV, bK, an, mY, mV, he, ae, na, mU, B, Gv, ff, LO, fQ, hN, aF, en, g, t, vo, cm, mZ, iK, bN, mX, cv, hq, Nb, m, mT); #c1(DDHD1) c2(NP_001153619) c3(phospholipase DDHD1 isoform b) c4(60764) c5(60765, 60766, 60767, 60768, 60769, 60770) c6( ) c7(bcR, xV, oe, bcS, beb); #c1(DDHD1) c2(NP_001153620) c3(phospholipase DDHD1 isoform c) c4(60771, 60772) c5(60773, 60774, 60775, 60776, 60777, 60778, 60779, 60780, 60781, 60782, 60783, 60784) c6( ) c7(bcR, xV, oe, bcS, beb); #c1(DDHD1) c2(NP_085140) c3(phospholipase DDHD1 isoform a) c4(219402) c5(219403, 219404, 219405, 219406, 219407, 219408) c6( ) c7(bcR, xV, oe, bcS, beb); #c1(DDHD1) c2(XP_005268160) c3(phospholipase DDHD1 isoform X4) c4(281630) c5( ) c6( ) c7(bcR, xV, oe, bcS, beb); #c1(DDHD2) c2(NP_001157706) c3(phospholipase DDHD2 isoform 2) c4( ) c5(62416, 62417, 62418, 62419, 62420, 62421, 62422, 62423, 62424, 62425, 62426, 62427) c6( ) c7(bec, aV, bcS); #c1(DDHD2) c2(XP_005273511) c3(phospholipase DDHD2 isoform X1) c4(284639, 284640) c5(284641, 284642, 284643, 284644, 284645, 284646, 284647, 284648, 284649, 284650, 284651, 284652, 284653, 284654, 284655, 284656) c6( ) c7(bec, aV, bcS); #c1(DDHD2) c2(XP_005273513) c3(phospholipase DDHD2 isoform X2) c4(284657, 284658, 284659) c5( ) c6( ) c7(bec, aV, bcS); #c1(DDHD2) c2(XP_005273514) c3(phospholipase DDHD2 isoform X3) c4( ) c5(284660, 284661, 284662, 284663, 284664, 284665) c6( ) c7(bec, aV, bcS); #c1(DD11) c2(NP_001001711) c3(protein DD11 homolog 1) c4(18966) c5(18967, 18968, 18969, 18970, 18971, 18972) c6( ) c7(aw); #c1(DDIAS) c2(NP_659455) c3(DNA damage-induced apoptosis suppressor protein) c4(240011, 240012, 240013, 240014, 240015, 240016) c5(240017, 240018, 240019, 240020, 240021, 240022, 240023, 240024, 240025, 240026, 240027, 240028, 240029, 240030, 240031, 240032, 240033, 240034, 240035, 240036, 240037, 240038, 240039, 240040, 240041, 240042, 240043, 240044, 240045, 240046, 240047, 240048, 240049, 240050, 240051, 240052, 240053, 240054, 240055, 240056) c6( ) c7(aW, aT); #c1(DDIT3) c2(NP_001181983) c3(DNA damage-inducible transcript 3 protein isoform 1) c4(74466, 74467) c5(74468, 74469, 74470, 74471, 74472, 74473, 74474, 74475, 74476, 74477, 74478, 74479, 74480, 74481, 74482, 74483, 74484) c6( ) c7(T, aC, YU, hV, if, bO, fd, bB, ci, aon, K, pk, aa, eG, aW, wF, hI, cm, bw, QA, eM, nB, iT, vA, U, cj, uJ, nw, m, aiF, n, aj, qN, aOJ, ju, jy, Xh, dx, A, TH, bed, Ni, aq, aHw, iN, op, bP, mg, hj, at, E, va, bee, cB, B, bL, fM, Dh, jx, aA, fF, hy, v, j, bX, q, J, eA, aHy, aT, cy, rz, ae, eu, iU, oV, Y, axW, r, en, t, iK, aXi, ck, c, au, bt, ao, gV, Ve, id, iW, ha, jh, ad, afb, hX, hd, Rq, Ps, xX, d, hG, ff, aF, iR, adj, bz, LB, bE, dO, uR, QC, ei, X); #c1(DDIT3) c2(NP_001181986) c3(DNA damage-inducible transcript 3 protein isoform 2) c4( ) c5(74485, 74486, 74487, 74488, 74489, 74490, 74491, 74492) c6( ) c7(T, aC, YU, hV, if, bO, fd, bB, ci, aon, K, pk, aa, eG, aW, wF, hI, cm, bw, QA, eM, nB, iT, vA, U, cj, uJ, nw, m, aiF, n, aj, qN, aOJ, ju, jy, Xh, dx, A, TH, bed, Ni, aq, aHw, iN, pp, bP, mg, hj, at, E, va, bee, cB, B, bL, fM, Dh, jx, aA, fF, hy, v, j, bX, q, J, eA, aHy, aT, cy, rz, ae, eu, iU, oV, Y, axW, r, en, t, iK, aXi, ck, c, au, bt, ao, gV, Ve, id, iW, ha, jh, ad, afb, hX, hd, Rq, Ps, xX, d, hG, ff, aF, iR, adj, bz, LB, bE, dO, uR, QC, ei, X); #c1(DDIT3) c2(XP_011536308) c3(DNA damage-inducible transcript 3 protein isoform X1) c4(333662) c5(333663, 333664) c6( ) c7(T, aC, YU, hV, if, bO, fd, bB, ci, aon, K, pk, aa, eG, aW, wF, hI, cm, bw, QA, eM, nB, iT, vA, U, cj, uJ, nw, m, aiF, n, aj, qN, aOJ, ju, jy, Xh, dx, A, TH, bed, Ni, aq, aHw, iN, op, bP, mg, hj, at, E, va, bee, cB, B, bL, fM, Dh, jx, aA, fF, hy, v, j, bX, q, J, eA, aHy, aT, cy, rz, ae, eu, iU, oV, Y, axW, r, en, t, iK, aXi, ck, c, au, bt, ao, gV, Ve, id, iW, ha, jh, ad, afb, hX, hd, Rq, Ps, xX, d, hG, ff, aF, iR, adj, bz, LB, bE, dO, uR, QC, ei, X); #c1(DDIT4) c2(NP_061931) c3(DNA damage-inducible transcript 4 protein) c4(201202) c5(201203, 201204, 201205, 201206, 201207, 201208) c6( ) c7(ck, T, hI, W, af, iT, ff, iK, HC, bO, fd, K, en, an, bt, ae, avn, ad, hq); #c1(DDIT4L) c2(NP_660287) c3(DNA damage-inducible transcript 4-like protein) c4(240643, 240644, 240645) c5(240646, 240647, 240648, 240649, 240650, 240651, 240652, 240653, 240654, 240655, 240656, 240657, 240658, 240659, 240660, 240661, 240662, 240663) c6( ) c7(Y, bX); #c1(DDN) c2(NP_055901) c3(dendrin) c4(184333) c5(184334, 184335, 184336, 184337, 184338, 184339) c6( ) c7(ah, dy); #c1(DDN) c2(XP_011536357) c3(dendrin isoform X1) c4( ) c5(333680, 333681, 333682, 333683, 333684) c6( ) c7(ah, dy); #c1(DDO) c2(NP_003640) c3(D-aspartate oxidase isoform a) c4(139816, 139817) c5(139818, 139819, 139820, 139821, 139822, 139823, 139824, 139825, 139826, 139827, 139828, 139829) c6( ) c7(fq); #c1(DDO) c2(NP_004023) c3(D-aspartate oxidase isoform b) c4(142922) c5(142923, 142924, 142925, 142926, 142927, 142928) c6( ) c7(fq); #c1(DDR1) c2(NP_001189450) c3(epithelial discnidin domain-containing receptor 1 isoform 4 precursor) c4( ) c5(79411, 79412, 79413, 79414, 79415, 79416, 79417, 79418, 79419, 79420, 79421, 79422, 79423, 79424, 79425, 79426, 79427, 79428, 79429, 79430, 79431, 79432, 79433, 79434, 79435, 79436, 79437, 79438, 79439, 79440, 79441, 79442, 79443, 79444, 79445, 79446, 79447, 79448, 79449, 79450, 79451, 79452, 79453, 79454, 79455, 79456, 79457, 79458, 79459, 79460, 79461, 79462, 79463, 79464, 79465, 79466, 79467, 79468, 79469, 79470, 79471, 79472, 79473, 79474, 79475, 79476, 79477, 79478, 79479, 79480, 79481, 79482, 79483, 79484, 79485, 79486, 79487, 79488, 79489, 79490, 79491, 79492, 79493, 79494, 79495, 79496, 79497, 79498, 79499, 79500, 79501, 79502, 79503, 79504, 79505, 79506, 79507, 79508, 79509, 79510, 79511, 79512, 79513, 79514, 79515, 79516, 79517, 79518, 79519, 79520, 79521, 79522, 79523, 79524, 79525, 79526, 79527, 79528, 79529, 79530, 79531, 79532, 79533, 79534, 79535, 79536, 79537, 79538, 79539, 79540, 79541, 79542, 79543, 79544, 79545, 79546, 79547, 79548, 79549, 79550, 79551, 79552, 79553, 79554, 79555, 79556, 79557, 79558, 79559, 79560, 79561, 79562, 79563, 79564, 79565, 79566, 79567, 79568, 79569, 79570, 79571, 79572, 79573, 79574, 79575, 79576, 79577, 79578, 79579, 79580, 79581, 79582, 79583, 79584, 79585, 79586, 79587, 79588, 79589, 79590, 79591, 79592, 79593, 79594, 79595, 79596, 79597, 79598, 79599, 79600, 79601, 79602, 79603, 79604, 79605, 79606, 79607, 79608, 79609, 79610, 79611, 79612, 79613, 79614, 79615, 79616, 79617, 79618, 79619, 79620, 79621, 79622, 79623, 79624, 79625, 79626, 79627, 79628, 79629, 79630, 79631, 79632, 79633, 79634, 79635, 79636, 79637, 79638, 79639, 79640, 79641, 79642, 79643, 79644, 79645, 79646, 79647, 79648, 79649, 79650, 79651, 79652, 79653, 79654, 79655, 79656, 79657, 79658, 79659, 79660, 79661, 79662, 79663, 79664, 79665, 79666, 79667, 79668, 79669, 79670, 79671, 79672, 79673, 79674, 79675, 79676, 79677, 79678, 79679, 79680, 79681, 79682, 79683, 79684, 79685, 79686, 79687, 79688, 79689, 79690, 79691, 79692, 79693, 79694, 79695, 79696, 79697, 79698, 79699, 79700, 79701, 79702, 79703, 79704, 79705, 79706, 79707, 79708, 79709, 79710, 79711, 79712, 79713, 79714, 79715, 79716, 79717, 79718, 79719, 79720, 79721, 79722, 79723, 79724, 79725, 79726, 79727, 79728, 79729, 79730, 79731, 79732, 79733, 79734, 79735, 79736, 79737, 79738, 79739, 79740, 79741, 79742, 79743, 79744, 79745, 79746, 79747, 79748, 79749, 79750, 79751, 79752, 79753, 79754, 79755, 79756, 79757, 79758, 79759, 79760, 79761, 79762, 79763) c6(79764, 79765, 79766, 79767, 79768, 79769, 79770, 79771, 79772, 79773, 79774, 79775, 79776, 79777, 79778, 79779, 79780, 79781, 79782, 79783, 79784, 79785, 79786, 79787, 79788, 79789, 79790, 79791, 79792, 79793, 79794, 79795, 79796, 79797, 79798, 79799, 79800, 79801, 79802, 79803, 79804, 79805, 79806, 79807, 79808, 79809, 79810, 79811, 79812, 79813, 79814, 79815, 79816, 79817, 79818, 79819, 79820, 79821, 79822, 79823, 79824, 79825, 79826, 79827, 79828, 79829, 79830, 79831, 79832, 79833, 79834, 79835, 79836, 79837, 79838, 79839, 79840, 79841, 79842, 79843, 79844, 79845, 79846, 79847, 79848, 79849) c7(T, dD, ea, al, jx, I, eX, cL, v, qj, ci, vQ, eq, aoj, zP, UI, pC, q, o, cd, afo, ad, eA, av, jz, eW, aT, eV, hn, vB, K, ey, H, hH, ae, af, be, aRY, aa, yo, A, ND, aW, Y, cr, r, eZ, aq, Io, si, g, pt, t, bz, LB, ck, gk, es, tj, eM, iA, dB, hc, mx, hL, hR, k, Hb, R, m, bt, B, L); #c1(DDR1) c2(NP_001189451) c3(epithelial discoidin domain-containing receptor 1 isoform 5 precursor) c4(79850) c5(79851, 79852, 79853, 79854, 79855, 79856, 79857, 79858, 79859, 79860, 79861, 79862, 79863, 79864, 79865, 79866, 79867, 79868, 79869, 79870, 79871, 79872, 79873, 79874, 79875, 79876, 79877, 79878, 79879, 79880, 79881, 79882, 79883, 79884, 79885, 79886, 79887, 79888, 79889, 79890, 79891, 79892, 79893, 79894, 79895, 79896, 79897, 79898, 79899, 79900, 79901, 79902, 79903, 79904) c6(79905, 79906, 79907, 79908, 79909, 79910, 79911, 79912, 79913, 79914, 79915, 79916, 79917, 79918, 79919, 79920) c7(T, dD, ea, al, jx, I, eX, cL, v, qj, ci, vQ, eq, aoj, zP, UI, pC, q, o, cd, afo, ad, eA, av, jz, eW, aT, eV, hn, vB, K, ey, H, hH, ae, af, be, aRY, aa, yo, A, ND, aW, Y, cr, r, eZ, aq, Io, si, g, pt, t, bz, LB, ck, gk, es, tj, eM, iA, dB, hc, mx, hL, hR, k, Hb, R, m, bt, B, L); #c1(DDR1) c2(NP_001189452) c3(epithelial discoidin domain-containing receptor 1 isoform 6 precursor) c4(79921) c5(79922, 79923, 79924, 79925, 79926, 79927, 79928, 79929, 79930, 79931, 79932, 79933, 79934, 79935, 79936, 79937, 79938, 79939, 79940, 79941, 79942, 79943, 79944, 79945, 79946, 79947, 79948, 79949, 79950, 79951, 79952, 79953, 79954, 79955, 79956, 79957, 79958, 79959, 79960, 79961, 79962, 79963, 79964, 79965, 79966, 79967, 79968, 79969, 79970, 79971, 79972, 79973, 79974, 79975, 79976, 79977, 79978, 79979, 79980, 79981, 79982, 79983, 79984, 79985, 79986, 79987, 79988, 79989, 79990, 79991, 79992, 79993, 79994, 79995, 79996, 79997, 79998, 79999, 80000, 80001, 80002, 80003, 80004, 80005, 80006, 80007, 80008, 80009, 80010, 80011, 80012, 80013, 80014, 80015, 80016, 80017, 80018, 80019, 80020, 80021, 80022, 80023, 80024, 80025, 80026, 80027, 80028, 80029, 80030, 80031, 80032, 80033, 80034, 80035, 80036, 80037, 80038, 80039, 80040, 80041, 80042, 80043, 80044, 80045, 80046, 80047, 80048, 80049, 80050, 80051, 80052, 80053, 80054, 80055, 80056, 80057, 80058, 80059, 80060, 80061, 80062, 80063, 80064, 80065, 80066, 80067, 80068, 80069, 80070, 80071, 80072, 80073, 80074, 80075, 80076, 80077, 80078, 80079, 80080, 80081, 80082, 80083, 80084, 80085, 80086, 80087, 80088, 80089, 80090, 80091, 80092, 80093, 80094, 80132, 80133, 80134) c6(80135, 80136, 80137, 80138, 80139, 80140, 80141, 80142, 80143, 80144, 80145, 80146, 80147, 80148, 80149, 80150, 80151, 80152, 80153, 80154, 80155, 80156, 80157, 80158, 80159, 80160, 80161, 80162, 80163, 80164, 80165, 80166, 80167, 80168, 80169, 80170, 80171, 80172, 80173, 80174, 80175, 80176, 80177, 80178, 80179, 80180, 80181, 80182, 80183, 80184, 80185, 80186, 80187, 80188) c7(T, dD, ea, al, jx, I, eX, cL, v, qj, ci, vQ, eq, aoj, zP, UI, pC, q, o, cd, afo, ad, eA, av, jz, eW, aT, eV, hn, vB, K, ey, H, hH, ae, af, bc, aRY, aa, yo, A, ND, aW, Y, cr, r, eZ, aq, Io, si, g, pt, t, bz, LB, ck, gk, es, tj, eM, iA, dB, hc, mx, hL, hR, k, Hb, R, m, bt, B, L); #c1(DDR1) c2(NP_001945) c3(epithelial discoidin domain-containing receptor 1 isoform 1 precursor) c4(122394, 122395, 122396, 122397, 122398) c5(122399, 122400, 122401, 122402, 122403, 122404, 122405, 122406, 122407, 122408, 122409, 122410, 122411, 122412, 122413, 122414, 122415, 122416, 122417, 122418, 122419, 122420, 122421, 122422, 122423, 122424, 122425, 122426, 122427) c6(122428, 122429, 122430, 122431, 122432, 122433, 122434, 122435, 122436, 122437) c7(T, dD, ea, al, jx, I, eX, cL, v, qj, ci, vQ, eq, aoj, zP, UI, pC, q, o, cd, afo, ad, eA, av, jz, eW, aT, eV, hn, vB, K, ey, H, hH, ae, af, bc, aRY, aa, yo, A, ND, aW, Y, cr, r, eZ, aq, Io, si, g, pt, t, bz, LB, ck, gk, es, tj, eM, iA, dB, hc, mx, hL, hR, k, Hb, R, m, bt, B, L); #c1(DDR1) c2(NP_054699) c3(epithelial discoidin domain-containing receptor 1 isoform 2 precursor) c4(177286, 177287, 177288, 177289, 177290, 177291, 177292) c5( ) c6( ) c7(T, dD, ea, al, jx, I, eX, cL, v, qj, ci, vQ, eq, aoj, zP, UI, pC, q, o, cd, afo, ad, eA, av, jz, eW, aT, eV, hn, vB, K, ey, H, hH, ae, af, bc, aRY, aa, yo, A, ND, aW, Y, cr, r, eZ, aq, Io, si, g, pt, t, bz, LB, ck, gk, es, tj, eM, iA, dB, hc, mx, hL, hR, k, Hb, R, m, bt, B, L); #c1(DDR1) c2(XP_006715248) c3(epithelial discoidin domain-containing receptor 1 isoform X7) c4( ) c5(289011, 289012, 289013, 289014, 289015, 289016, 289017, 289018, 289019, 289020, 289021, 289022, 289023, 289024, 289025, 289026, 289027, 289028, 289029, 289030, 289031, 289032, 289033, 289034, 289035, 289036, 289037, 289038, 289039, 289040, 289041, 289042, 289043, 289044, 289045, 289046, 289047, 289048, 289049, 289050, 289051, 289052, 289053, 289054, 289055, 289056, 289057, 289058, 289059, 289060, 289061, 289062, 289063, 289064, 289065, 289066, 289067) c6(289068, 289069, 289070, 289071, 289072, 289073, 289074, 289075, 289076, 289077, 289078, 289079, 289080, 289081, 289082, 289083, 289084, 289085, 289086, 289087, 289088, 289089) c7(T, dD, ea, al, jx, I, eX, cL, v, qj, ci, vQ, eq, aoj, zP, UI, pC, q, o, cd, afo, ad, eA, av, jz, eW, aT, eV, hn, vB, K, ey, H, hH, ae, af, bc, aRY, aa, yo, A, ND, aW, Y, cr, r, eZ, aq, Io, si, g, pt, t, bz, LB, ck, gk, es, tj, eM, iA, dB, hc, mx, hL, hR, k, Hb, R, m, bt, B, L); #c1(DDR1) c2(XP_011513184) c3(epithelial discoidin domain-containing receptor 1 isoform X6) c4(305115, 305116, 305117) c5( ) c6( ) c7(T, dD, ea, al, jx, I, eX, cL, v, qj, ci, vQ, eq, aoj, zP, UI, pC, q, o, cd, afo, ad, eA, av, jz, eW, aT, eV, hn, vB, K, ey, H, hH, ae, af, bc, aRY, aa, yo, A, ND, aW, Y, cr, r, eZ, aq, Io, si, g, pt, t, bz, LB, ck, gk, es, tj, eM, iA, dB, hc, mx, hL, hR, k, Hb, R, m, bt, B, L); #c1(DDR1) c2(XP_011513189) c3(epithelial discoidin domain-containing receptor 1 isoform X1) c4(305118, 305119, 305120, 305121, 305122, 305123, 305124, 305125, 305126, 305127, 305128, 305129, 305130, 305131, 305132, 305133, 305134) c5(305135, 305136, 305137, 305138, 305139, 305140, 305141, 305142, 305143, 305144, 305145, 305146, 305147, 305148, 305149, 305150, 305151, 305152, 305153, 305154, 305155, 305156, 305157, 305158, 305159, 305160, 305161, 305162, 305163, 305164, 305165, 305166) c6(305167, 305168, 305169, 305170, 305171, 305172, 305173, 305174, 305175, 305176, 305177, 305178) c7(T, dD, ea, al, jx, I, eX, cL, v, qj, ci, vQ, eq, aoj, zP, UI, pC, q, o, cd, afo, ad, eA, av, jz, eW, aT, eV, hn, vB, K, ey, H, hH, ae, af, bc, aRY, aa, yo, A, ND, aW, Y, cr, r, eZ, aq, Io, si, g, pt, t, bz, LB, ck, gk, es, tj, eM, iA, dB, hc, mx, hL, hR, k, Hb, R, m, bt, B, L); #c1(DDR1) c2(XP_011513190) c3(epithelial discoidin domain-containing receptor 1 isoform X8) c4(305179) c5(305180, 305181, 305182, 305183, 305184, 305185, 305186, 305187, 305188, 305189, 305190, 305191, 305192, 305193, 305194, 305195, 305196, 305197, 305198, 305199, 305200, 305201) c6(305202, 305203, 305204, 305205, 305206, 305207, 305208, 305209) c7(T, dD, ea, al, jx, I, eX, cL, v, qj, ci, vQ, eq, aoj, zP, UI, pC, q, o, cd, afo, ad, eA, av, jz, eW, aT, eV, hn, vB, K, ey, H, hH, ae, af, bc, aRY, aa, yo, A, ND, aW, Y, cr, r, eZ, aq, Io, si, g, pt, t, bz, LB, ck, gk, es, tj, eM, iA, dB, hc, mx, hL, hR, k, Hb, R, m, bt, B, L); #c1(DDR1) c2(XP_011545985) c3(epithelial discoidin domain-containing receptor 1 isoform X2) c4(344815, 344816) c5(344817, 344818, 344819, 344820, 344821, 344822, 344823, 344824, 344825) c6(344826) c7(T, dD, ea, al, jx, I, eX, cL, v, qj, ci, vQ, eq, aoj, zP, UI, pC, q, o, cd, afo, ad, eA, av, jz, eW, aT, eV, hn, vB, K, ey, H, hH, ae, af, bc, aRY, aa, yo, A, ND, aW, Y, cr, r, eZ, aq, Io, si, g, pt, t, bz, LB, ck, gk, es, tj, eM, iA, dB, hc, mx, hL, hR, k, Hb, R, m, bt, B, L); #c1(DDR1) c2(XP_011545986) c3(epithelial discoidin domain-containing receptor 1 isoform X3) c4(344827) c5(344828, 344829, 344830, 344831, 344832, 344833, 344834, 344835, 344836) c6( ) c7(T, dD, ea, al, jx, I, eX, cL, v, qj, ci, vQ, eq, aoj, zP, UI, pC, q, o, cd, afo, ad, eA, av, jz, eW, aT, eV, hn, vB, K, ey, H, hH, ae, af, bc, aRY, aa, yo, A, ND, aW, Y, cr, r, eZ, aq, Io, si, g, pt, t, bz, LB, ck, gk, es, tj, eM, iA, dB, hc, mx, hL, hR, k, Hb, R, m, bt, B, L); #c1(DDR1) c2(XP_011545990) c3(epithelial discoidin domain-containing receptor 1 isoform X4) c4(344837, 344838, 344839) c5(344840) c6( ) c7(T, dD, ea, al, jx, I, eX, cL, v, qj, ci, vQ, eq, aoj, zP, UI, pC, q, o, cd, afo, ad, eA, av, jz, eW, aT, eV, hn, vB, K, ey, H, hH, ae, af, bc, aRY, aa, yo, A, ND, aW, Y, cr, r, eZ, aq, Io, si, g, pt, t, bz, LB, ck, gk, es, tj, eM, iA, dB, hc, mx, hL, hR, k, Hb, R, m, bt, B, L); #c1(DDR1) c2(XP_011545991) c3(epithelial discoidin domain-containing receptor 1 isoform X5) c4( ) c5(344841, 344842, 344843) c6( ) c7(T, dD, ea, al, jx, I, eX, cL, v, qj, ci, vQ, eq, aoj, zP, UI, pC, q, o, cd, afo, ad, eA, av, jz, eW, aT, eV, hn, vB, K, ey, H, hH, ae, af, bc, aRY, aa, yo, A, ND, aW, Y, cr, r, eZ, aq, Io, si, g, pt, t, bz, LB, ck, gk, es, tj, eM, iA, dB, hc, mx, hL, hR, k, Hb, R, m, bt, B, L); #c1(DDR2) c2(XP_011507889) c3(discoidin domain-containing receptor 2 isoform X1) c4(298113, 298114, 298115, 298116) c5(298117, 298118, 298119, 298120, 298121, 298122, 298123, 298124, 298125, 298126, 298127, 298128, 298129, 298130, 298131, 298132) c6( ) c7(T, dD, ea, cz, eq, ci, IR, afo, aT, K, be, bef, aW, ff, hN, en, t, bz, Qt, pb, beg, eM, Qu, au, QC, y); #c1(DDR2) c2(XP_011507891) c3(discoidin domain-containing receptor 2 isoform X3) c4(298133) c5(298134, 298135, 298136, 298137, 298138, 298139, 298140, 298141, 298142, 298143, 298144, 298145, 298146, 298147, 298148, 298149, 298150, 298151, 298152, 298153, 298154, 298155) c6( ) c7(T, dD, ea, cz, eq, ci, IR, afo, aT, K, bc, bef, aW, ff, hN, en, t, bz, Qt, pb, beg, eM, Qu, au, QC, y); #c1(DDRGK1) c2(NP_076424) c3(DDRGK domain-containing protein 1 precursor) c4(214126, 214127, 214128) c5(214129, 214130, 214131, 214132, 214133, 214134, 214135, 214136, 214137, 214138, 214139, 214140, 214141, 214142, 214143, 214144, 214145, 214146, 214147, 214148) c6( ) c7(F); #c1(DDT) c2(NP_001077861) c3(D-dopachrome decarboxylase) c4(37875, 37876) c5(37877, 37878, 37879, 37880, 37881, 37882, 37883, 37884, 37885, 37886, 37887, 37888, 37889, 37890, 37891, 37892) c6( ) c7(II, IF, T, es, B, aE, eM, bbC, iu, aW, iA, dV, al avB, aq, g, kk, xw, q); #c1(DDTL) c2(NP_001077862) c3(D-dopachrome decarboxylase-like protein) c4(37893) c5(37894, 37895, 37896, 37897, 37898, 37899) c6( ) c7(II, IF, T, es, B, aE, eM, bbC, iu, aW, iA, dV, aT, avB, ag, kk, xw, q); #c1(DDX1) c2(NP_004930) c3(ATP-dependent RNA helicase DDX1) c4(151036, 151037, 151038) c5(151039, 151040, 151041, 151042, 151043, 151044, 151045, 151046, 151047, 151048, 151049, 151050, 151051, 151052, 151053, 151054, 151055, 151056, 151057, 151058, 151059, 151060) c6( ) c7(T, gP, bP, eR, wu, aW, IB, aAx, wc, aT, n, wm, cm, on); #c1(DDX10) c2(NP_004389) c3(probable ATP-dependent RNA helicase DDX10) c4(146053, 146054) c5(146055, 146056, 146057, 146058, 146059, 146060, 146061, 146062, 146063, 146064, 146065, 146066) c6( ) c7(T, aW, EQ, aT, bw, bt, br); #c1(DDX11) c2(NP_001244074) c3(probable ATP-dependent RNA helicase DDX11 isoform 4) c4(91891, 91892) c5( ) c6( ) c7(T, os, EG, if, oZ, nA, qN, beh, K, cp, Y, CT, g, QK, dr, bN, iP, es, bei, iA, Qu, WI); #c1(DDX11) c2(NP_004390) c3(probable ATP-dependent RNA helicase DDX11 isoform 2) c4(146067) c5(146068, 146069, 146070, 146071, 146072) c6( ) c7(T, os, FG, if, oZ, nA, qN, beh, K, cp, Y, CT, g, QK, dr, bN, iP, es, bei, iA, Qu, WI); #c1(DDX11) c2(NP_085911) c3(probable ATP-dependent RNA helicase DDX11 isoform 1) c4( ) c5(219620, 219621, 219622, 219623, 219624, 219625, 219626, 219627, 219628, 219629, 219630, 219631) c6( ) c7(T, os, FG, if, oZ, nA, qN, beh, K, cp, Y, CT, g, QK, dr, bN, iP, es, bei, iA, Qu, WI); #c1(DDX11) c2(NP_689651) c3(probable ATP-dependent RNA helicase DDX11 isoform 3) c4( ) c5(243466, 243467, 243468, 243469, 243470, 243471, 243472, 243473, 243474, 243475, 243476, 243477, 243478, 243479) c6( ) c7(T, os, FG, if, oZ, nA, qN, beh, K, cp, Y, CT, g, QK, dr, bN, iP, es, bei, iA, Qu, WI); #c1(DDX11) c2(XP_005253388) c3(probable ATP-dependent RNA helicase DDX11 isoform X3) c4(272449) c5(272450, 272451) c6( ) c7(T, os, FG, if, oZ, nA, qN, beh, K, cp, Y, CT, g, QK, dr, bN, iP, es, bei, iA, Qu, WI); #c1(DDX11) c2(XP_005253390) c3(probable ATP-dependent RNA helicase DDX11 isoform X10) c4(272452) c5(272453) c6( ) c7(T, os, FG, if, oZ, nA, qN, beh, K, cp, Y, CT, g, QK, dr, bN, iP, es, bei, iA, Qu, WI); #c1(DDX11) c2(XP_011518897) c3(probable ATP-dependent RNA helicase DDX11 isoform X11) c4(313248) c5(313249) c6( ) c7(T, os, FG, if, oZ, nA, qN, beh, K, cp, Y, CT, g, QK, dr, bN, iP, es, bei, iA, Qu, WI); #c1(DDX11) c2(XP_011518899) c3(probable ATP-dependent RNA helicase DDX11 isoform X15) c4(313250) c5(313251, 313252, 313253, 313254, 313255, 313256, 313257, 313258, 313259, 313260, 313261) c6( ) c7(T, os, FG, if, oZ, nA, qN, beh, K, cp, Y, CT, g, QK, dr, bN, iP, es, bei, iA, Qu, WI); #c1(DDX17) c2(NP_001091974) c3(probable ATP-dependent RNA helicase DDX17 isoform 3) c4(39107, 39108) c5(39109, 39110, 39111, 39112, 39113, 39114, 39115, 39116, 39117, 39118, 39119, 39120) c6( ) c7(T, bE, aW, aT, bB, X); #c1(DDX17) c2(NP_006377) c3(probable ATP-dependent RNA helicase DDX17 isoform 1) c4(164470, 164471, 164472) c5(164473, 164474, 164475, 164476, 164477, 164478, 164479, 164480, 164481, 164482, 164483, 164484, 164485, 164486, 164487, 164488, 164489, 164490) c6( ) c7(T, bE, aW, aT, bB, X); #c1(DDX18) c2(NP_006764) c3(ATP-dependent RNA helicase DDX18) c4(167868, 167869) c5(167870, 167871, 167872, 167873, 167874, 167875, 167876, 167877, 167878, 167879, 167880, 167881) c6( ) c7(bt); #c1(DDX19A) c2(NP_060802) c3(ATP-dependent RNA helicase DDX19A) c4(197906, 197907, 197908) c5(197909, 197910, 197911, 197912, 197913, 197914, 197915, 197916, 197917, 197918, 197919, 197920) c6( ) c7(T, jx, bej, q, eA, beI, ahD, MR, bW, aT, K, IQ, bV, jf, A, IR, aW, Y, eZ, r, lo, pb, c, Jr, U, uo, aYe, y, bek); #c1(DDX19A) c2(XP_005256087) c3(ATP-dependent RNA helicase DDX19A isoform X1) c4(273943) c5(273944, 273945, 273946, 273947, 273948, 273949, 273950, 273951, 273952, 273953, 273954) c6( ) c7(T, jx, bej, q, eA, beI, ahD, MR, bW, aT, K, IQ, bV, jf, A, IR, aW, Y, eZ, r, lo, pb, c, Jr, U, uo, aYe, y, bek); #c1(DDX21) c2(NP_004719) c3(nucleolar RNA helicase 2 isoform 1) c4(149065, 149066) c5(149067, 149068, 149069, 149070, 149071, 149072) c6( ) c7(uo, bem); #c1(DDX21) c2(XP_011538638) c3(nucleolar RNA helicase 2 isoform X1) c4( ) c5(336385, 336386, 336387, 336388, 336389, 336390) c6( ) c7(uo, bem); #c1(DDX25) c2(NP_037396) c3(ATP-dependent RNA helicase DDX25) c4(175252) c5(175253, 175254, 175255, 175256, 175257, 175258) c6( ) c7(pv, gU, ND, ben, afc, vH); #c1(DDX27) c2(NP_060365) c3(probable ATP-dependent RNA helicase DDX27) c4(195612, 195613) c5(195614, 195615, 195616, 195617, 195618, 195619, 195620, 195621, 195622, 195623, 195624, 195625) c6( ) c7(iT); #c1(DDX28) c2(NP_060850) c3(probable ATP-dependent RNA helicase DDX28) c4(198117) c5(198118, 198119, 198120, 198121, 198122, 198123) c6( ) c7(q, r); #c1(DDX31) c2(NP_073616) c3(probable ATP-dependent RNA helicase DDX31 isoform 1) c4(213146, 213147) c5(213148, 213149, 213150, 213151, 213152, 213153, 213154, 213155, 213156, 213157, 213158, 213159, 213160, 213161, 213162, 213163, 213164, 213165) c6( ) c7(fr); #c1(DDX31) c2(NP_619526) c3(probable ATP-dependent RNA helicase DDX31 isoform 2) c4( ) c5(236817, 236818, 236819, 236820, 236821, 236822, 236823) c6( ) c7(fr); #c1(DDX31) c2(XP_005272263) c3(probable ATP-dependent RNA helicase DDX31 isoform X2) c4(283922) c5(283923, 283924, 283925, 283926, 283927, 283928) c6( ) c7(fr); #c1(DDX31) c2(XP_005272264) c3(probable ATP-dependent RNA helicase DDX31 isoform X3) c4(283929, 283930) c5(283931, 283932, 283933, 283934, 283935, 283936) c6( ) c7(fr); #c1(DDX31) c2(XP_011517223) c3(probable ATP-dependent RNA helicase DDX31 isoform X1) c4(310811) c5( ) c6( ) c7(fr); #c1(DDX39A) c2(NP_005795) c3(ATP-dependent RNA helicase DDX39A) c4(159508, 159509, 159510, 159511) c5(159512, 159513, 159514, 159515, 159516, 159517, 159518, 159519, 159520, 159521, 159522, 159523, 159524, 159525, 159526, 159527, 159528, 159529, 159530, 159531, 159532, 159533, 159534, 159535, 159536, 159537) c6( ) c7(AW, beo, A, aw, uz, gA, dL, aj, iV, y, eL, af, J); #c1(DDX398) c2(NP_542165) c3(spliceosome RNA helicase DDX398) c4(231500, 231501, 231502, 231503, 231504, 231505, 231506, 231507, 231508, 231509, 231510, 231511, 231512, 231513, 231514, 231515, 231516, 231517, 231518, 231519, 231520, 231521, 231522, 231523, 231524, 231525, 231526, 231527, 231528, 231529, 231530, 231531) c5(231532, 231533, 231534, 231535, 231536, 231537, 231538, 231539, 231540, 231541, 231542, 231543, 231544, 231545, 231546, 231547, 231548, 231549, 231550, 231551, 231552, 231553, 231554, 231555, 231556, 231557, 231558, 231559, 231560, 231561, 231562, 231563, 231564, 231565, 231566, 231567, 231568, 231569, 231570, 231571, 231572, 231573, 231574, 231575, 231576, 231577, 231578, 231579, 231580, 231581, 231582, 231583, 231584, 231585, 231586, 231587, 231588, 231589, 231590, 231591, 231592, 231593, 231594, 231595, 231596, 231597, 231598, 231599, 231600, 231601, 231602, 231603, 231604, 231605, 231606, 231607, 231608, 231609, 231610, 231611, 231612, 231613, 231614, 231615, 231616, 231617, 231618, 231619, 231620, 231621, 231622, 231623, 231624, 231625, 231626, 231627, 231628, 231629, 231630, 231631, 231632, 231633, 231634, 231635, 231636, 231637, 231638, 231639, 231640, 231641, 231642, 231643, 231644, 231645, 231646, 231647, 231648, 231649, 231650, 231651, 231652, 231653, 231654, 231655, 231656, 231657, 231658, 231659, 231660, 231661, 231662, 231663, 231664, 231665, 231666, 231667, 231668, 231669, 231670, 231671, 231672, 231673, 231674, 231675, 231676, 231677, 231678, 231679, 231680, 231681, 231682, 231683, 231684, 231685, 231686, 231687, 231688, 231689, 231690, 231691, 231692, 231693, 231694, 231695, 231696, 231697, 231698, 231699, 231700, 231701, 231702, 231703, 231704, 231705, 231706, 231707, 231708, 231709, 231710, 231711, 231712, 231713, 231714, 231715, 231716, 231717, 231718, 231719, 231720, 231721, 231722, 231723, 231724, 231725, 231726, 231727, 231728, 231729, 231730, 231731, 231732, 231733, 231734, 231735, 231736, 231737, 231738, 231739, 231740, 231741, 231742, 231743, 231744, 231745, 231746, 231747, 231748, 231749, 231750, 231751, 231752, 231753, 231754, 231755, 231756, 231757, 231758, 231759, 231760, 231761, 231762, 231763, 231764, 231765, 231766, 231767, 231768, 231769, 231770, 231771, 231772, 231773, 231774, 231775, 231776, 231777, 231778, 231779, 231780, 231781, 231782, 231783, 231784, 231785, 231786, 231787, 231788, 231789, 231790, 231791, 231792, 231793, 231794, 231795, 231796, 231797, 231798, 231799, 231800, 231801, 231802, 231803, 231804, 231805, 231806, 231807, 231808, 231809, 231810, 231811, 231812, 231813, 231814, 231815, 231816, 231817, 231818, 231819, 231820, 231821, 231822, 231823, 231824, 231825, 231826, 231827, 231828, 231829, 231830, 231831, 231832, 231833, 231834, 231835, 231836, 231837, 231838, 231839, 231840, 231841, 231842, 231843, 231844, 231845, 231846, 231847, 231848, 231849, 231850, 231851, 231852, 231853, 231854, 231855, 231856, 231857, 231858, 231859, 231860, 231861, 231862, 231863, 231864, 231865, 231866, 231867, 231868, 231869, 231870, 231871, 231872, 231873, 231874, 231875, 231876, 231877, 231878, 231879, 231880, 231881, 231882, 231883, 231884, 231885, 231886, 231887, 231888, 231889, 231890, 231891, 231892, 231893, 231894, 231895, 231896, 231897, 231898, 231899, 231900, 231901, 231902, 231903, 231904, 231905, 231906, 231907, 231908, 231909, 231910, 231911, 231912, 231913, 231914, 231915, 231916, 231917, 231918, 231919, 231920, 231921, 231922, 231923, 231924, 231925, 231926, 231927, 231928, 231929, 231930, 231931, 231932, 231933, 231934, 231935, 231936, 231937, 231938, 231939, 231940, 231941, 231942, 231943, 231944, 231945, 231946, 231947, 231948, 231949, 231950, 231951, 231952, 231953, 231954, 231955, 231956, 231957, 231958, 231959, 231960, 231961, 231962, 231963, 231964, 231965, 231966, 231967, 231968, 231969, 231970, 231971, 231972, 231973, 231974, 231975, 231976, 231977, 231978, 231979, 231980, 231981, 231982, 231983, 231984, 231985, 231986, 231987, 231988, 231989, 231990, 231991, 231992, 231993, 231994, 231995, 231996, 231997, 231998, 231999, 232000, 232001, 232002, 232003, 232004, 232005, 232006, 232007, 232008, 232009, 232010, 232011, 232012, 232013, 232014, 232015, 232016, 232017, 232018, 232019, 232020, 232021, 232022, 232023, 232024, 232025, 232026, 232027, 232028, 232029, 232030, 232031, 232032, 232033, 232034, 232035, 232036, 232037, 232038, 232039, 232040, 232041, 232042, 232043, 232044, 232045, 232046, 232047, 232048, 232049, 232050, 232051, 232052, 232053, 232054, 232055, 232056, 232057, 232058, 232059, 232060, 232061, 232062, 232063, 232064, 232065, 232066, 232067, 232068, 232069, 232070, 232071, 232072, 232073, 232074, 232075, 232076, 232077, 232078, 232079, 232080, 232081, 232082, 232083, 232084, 232085, 232086, 232087, 232088, 232089, 232090, 232091, 232092, 232093, 232094, 232095, 232096, 232097, 232098, 232099, 232100, 232101, 232102, 232103, 232104, 232105, 232106, 232107, 232108, 232109, 232110, 232111, 232112, 232113, 232114, 232115, 232116, 232117, 232118, 232119, 232120, 232121, 232122, 232123, 232124, 232125, 232126, 232127, 232128, 232129, 232130, 232131, 232132, 232133, 232134, 232135, 232136, 232137, 232138, 232139, 232140, 232141) c6( ) c7(bM, aw, gA, aj, V, J, AW, cc, dV, h, hH, af, aiJ, beo, A, aXy, eZ, iV, eE, iQ, Om, uz, y); #c1(DDX3X) c2(NP_001180345) c3(ATP-dependent RNA helicase DDX3X isoform 2) c4( ) c5(73845, 73846, 73847, 73848, 73849, 73850) c6( ) c7(T, jx, hX, av, iI, aT, h, ey, K, jf, aW, hep, hI, aq, Io, cI, bz, bP, eM, Uq, aiM, cj, hL, hE, B); #c1(DDX3X) c2(NP_001180346) c3(ATP-dependent RNA helicase DDX3X isoform 3) c4(73851) c5(73852, 73853, 73854, 73855, 73856, 73857) c6( ) c7(T, jx, hX, av, iI, aT, h, ey, K, jf, aW, bep, hI, aq, Io, cI, bz, bP, eM, Uq, aiM, cj, hL, hE, B); #c1(DDX3X) c2(NP_001347) c3(ATP-dependent RNA helicase DDX3X isoform 1) c4(117193) c5(117194) c6( ) c7(T, jx, hX, av, iI, aT, h, ey, K, jf, aW, bep, hI, aq, Io, cI, bz, bP, eM, Uq, aiM, cj, hL, hE, B); #c1(DDX3X) c2(XP_011542194) c3(ATP-dependent RNA helicase DDX3X isoform X1) c4(340669, 340670) c5(340671, 340672, 340673, 340674, 340675, 340676, 340677, 340678, 340679, 340680, 340681) c6( ) c7(T, jx, hX, av, il, aT, h, ey, K, jf, aW, bep, hI, aq, Io, cI, bz, bP, eM, Uq, aiM, cj, hL, hE, B); #c1(DDX3Y) c2(NP_001289481) c3(ATP-dependent RNA helicase DDX3Y isoform 2) c4(114217, 114218) c5(114219, 114220, 114221, 114222, 114223, 114224, 114225, 114226, 114227, 114228, 114229, 114230) c6( ) c7(beq, gU, ND, wu, eD, wm, UI, bu); #c1(DDX3Y) c2(NP_004651) c3(ATP-dependent RNA helicase DDX3Y isoform 1) c4(148516) c5(148517, 148518, 148519, 148520, 148521, 148522, 148523, 148524, 148525, 148526) c6( ) c7(beq, gU, ND, wu, eD, wm, UI, bu); #c1(DDX3Y) c2(XP_011529773) c3(ATP-dependent RNA helicase DDX3Y isoform X2) c4(325456) c5(325457, 325458, 325459, 325460, 325461, 325462) c6( ) c7(beq, gU, ND, wu, eD, wm, UI, bu); #c1(DDX4) c2(NP_001136021) c3(probable ATP-dependent RNA helicase DDX4 isoform 2) c4(54019, 54020) c5(54021, 54022, 54023, 54024, 54025, 54026, 54027, 54028, 54029, 54030, 54031, 54032, 54033, 54034, 54035, 54036) c6( ) c7(Le, gU, ND, vT, wu, eD, PI, Me, KY, jh, vH, bbs, cm, m, wm, ber, t, KQ); #c1(DDX4) c2(NP_001160005) c3(probable ATP-dependent RNA helicase DDX4 isoform 3) c4(65022) c5(65023, 65024, 65025, 65026, 65027, 65028) c6( ) c7(Le, gU, ND, vT, wu, eD, PI, Me, KY, jh, vH, bbs, cm, m, wm, ber, t, KQ); #c1(DDX4) c2(NP_001160006) c3(probable ATP-dependent RNA helicase DDX4 isoform 4) c4(65029) c5(65030, 65031, 65032, 65033, 65034, 65035) c6( ) c7(Le, gU, ND, vT, wu, eD, PI, Me, KY, jh, vH, bbs, cm, m, wm, ber, t, KQ); #c1(DDX4) c2(NP_077726) c3(probable ATP-dependent RNA helicase DDX4 isoform 1) c4(215300, 215301) c5(215302, 215303, 215304, 215305, 215306, 215307, 215308, 215309, 215310, 215311, 215312, 215313) c6( ) c7(Le, gU, ND, vT, wu, eD, PI, Me, KY, jh, vH, bbs, cm, m, wm, ber, t, KQ); #c1(DDX41) c2(NP_057306) c3(probable ATP-dependent RNA helicase DDX41) c4(190027) c5(190028, 190029, 190030, 190031, 190032, 190033) c6( ) c7(x, bP, Y, fd, h, uz, k, cm); #c1(DDX42) c2(NP_987095) c3(ATP-dependent RNA helicase DDX42) c4(263380, 263381) c5(263382, 263383, 263384, 263385, 263386, 263387, 263388, 263389, 263390, 263391, 263392, 263393, 263394, 263395, 263396, 263397, 263398, 263399, 263400, 263401, 263402, 263403, 263404, 263405) c6( ) c7(jf, Uq); #c1(DDX43) c2(NP_061135) c3(probable ATP-dependent RNA helicase DDX43) c4(199443, 199444) c5(199445, 199446, 199447, 199448, 199449, 199450, 199451, 199452, 199453, 199454, 199455, 199456, 199457, 199458, 199459) c6( ) c7(ck, T, aMa, aAS, iT, iU, Y, ci, bu, bt, bz); #c1(DDX46) c2(NP_001287789) c3(probable ATP-dependent RNA helicase DDX46 isoform 1) c4(112883) c5(112884, 112885, 112886, 112887, 112888, 112889) c6( ) c7(T, jx, bej, q, eA, beI, ahD, MR, bW, aT, K, IQ, bV, jf, A, IR, aW, Y, eZ, r, lo, pb, c, Jr, U, uo, aYe, y, bek); #c1(DDX46) c2(NP_055644) c3(probable ATP-dependent RNA helicase DDX46 isoform 2) c4(182512, 182513) c5(182514, 182515, 182516, 182517, 182518, 182519) c6( ) c7(T, jx, bej, q, eA, beI, ahD, MR, bW, aT, K, IQ, bV, jf, A, IR, aW, Y, eZ, r, lo, pb, c, Jr, U, uo, aYe, y, bek); #c1(DDX46) c2(XP_011542060) c3(probable ATP-dependent RNA helicase DDX46 isoform X2) c4( ) c5(340582, 340583, 340584, 340585, 340586, 340587) c6( ) c7(T, jx, bej, q, eA, beI, ahD, MR, bW, aT, K, IQ, bV, jf, A, IR, aW, Y, eZ, r, lo, pb, c, Jr, U, uo, aYe, y, bek); #c1(DDX5) c2(NP_004387) c3(probable ATP-dependent RNA helicase DDX5) c4(146014, 146015) c5(146016, 146017, 146018, 146019, 146020, 146021, 146022, 146023, 146024, 146025, 146026, 146027, 146028, 146029, 146030, 146031, 146032, 146033) c6( ) c7(dP, gk, T, F, bP, bE, aW, ds, al, iw, aT, bB, fd, hP, eA, t, iK, ae, X, ad, dR); #c1(DDX5) c2(XP_011522758) c3(probable ATP-dependent RNA helicase DDX5 isoform X2) c4(317274) c5( ) c6( ) c7(dP, gk, T, F, bP, bE, aW, ds, al, iw, aT, bB, fd, hP, eA, t, iK, ae, X, ad, dR); #c1(DDX50) c2(NP_076950) c3(ATP-dependent RNA helicase DDX50) c4(214443, 214444) c5(214445, 214446, 214447, 214448, 214449, 214450, 214451, 214452, 214453, 214454, 214455, 214456) c6( ) c7(Z); #c1(DDX51) c2(NP_778236) c3(ATP-dependent RNA helicase DDX51) c4(251484) c5(251485, 251486, 251487, 251488, 251489, 251490) c6( ) c7(x, k); #c1(DDX52) c2(NP_008941) c3(probable ATP-dependent RNA helicase DDX52 isoform 1) c4(169697, 169698) c5(169699, 169700, 169701, 169702, 169703, 169704, 169705, 169706, 169707, 169708, 169709, 169710) c6( ) c7(ae, ad, bX); #c1(DDX53) c2(NP_874358) c3(DEAD hex protein 53) c4(256605) c5(256606, 256607, 256608, 256609, 256610, 256611) c6( ) c7(T, os, if, al, aA, bB, Gd, oZ, fr, ci, qN, q, ad, eW, Si, av, F, qp, aT, ae, jf, B, aW, Y, ev, az, hl, ff, r, aFr, aq, aF, aB, en, mo, bu, cl, bN, gk, sS, Dy, iA, bP, bE, Gs, hL, X, cn); #c1(DDX54) c2(NP_001104792) c3(ATP-dependent RNA helicase DDX54 isoform 1) c4(42304) c5(42305, 42306, 42307, 42308, 42309, 42310) c6( ) c7(aq, kl); #c1(DDX54) c2(NP_076977) c3(ATP-dependent RNA helicase DDX54 isoform 2) c4(214557) c5(214558, 214559, 214560, 214561, 214562, 214563) c6( ) c7(aq, kl); #c1(DDX56) c2(NP_001244118) c3(probable ATP-dependent RNA helicase DDX56 isoform 2) c4(91923) c5(91924, 91925, 91926, 91927, 91928, 91929) c6( ) c7(T, d, aiV, Uq, jx, h, j, hE, ae, ad); #c1(DDX56) c2(NP_061955) c3(probable ATP-dependent RNA helicase DDX56 isoform 1) c4(201293) c5(201294, 201295, 201296, 201297, 201298, 201299) c6( ) c7(T, d, aiV, Uq, jx, h, j, hE, ae, ad); #c1(DDX58) c2(NP_055129) c3(probable ATP-dependent RNA helicase DDX58) c4(179124, 179125, 179126, 179127, 179128, 179129) c5(179130, 179131, 179132, 179133, 179134, 179135, 179136, 179137, 179138, 179139, 179140, 179141, 179142, 179143, 179144, 179145, 179146, 179147, 179148, 179149, 179150, 179151, 179152, 179153, 179154, 179155, 179156, 179157, 179158, 179159, 179160, 179161, 179162, 179163, 179164, 179165) c6( ) c7(gV, T, Dw, fR, if, jx, EA, qN, V, eW, hX, F, hb, Eq, ds, cU, aAn, h, DU, IQ, ey, afu, A, d, bes, Y, apn, cr, eZ, aiT, lo, kp, CQ, iV, t, iK, awi, Bv, Jr, NL, hc, AH, Uq, aiM, m, y); #c1(DDX59) c2(NP_001026895) c3(probable ATP-dependent RNA helicase DDX59) c4(29916, 29917) c5(29918, 29919, 29920, 29921, 29922, 29923) c6( ) c7(bet, ahD, EQ); #c1(DDX59) c2(XP_005245577) c3(probable ATP-dependent RNA helicase DDX59 isoform X3) c4(266732, 266733) c5(266734, 266735, 266736, 266737, 266738, 266739, 266740, 266741, 266742, 266743, 266744, 266745) c6( ) c7(bet, ahD, EQ); #c1(DDX59) c2(XP_005245578) c3(probable ATP-dependent RNA helicase DDX59 isoform X5) c4(266746) c5(266747, 266748, 266749, 266750, 266751, 266752, 266753, 266754, 266755, 266756, 266757, 266758, 266759) c6( ) c7(bet, ahD, EQ); #c1(DDX6) c2(NP_004388) c3(probable ATP-dependent RNA helicase DDX6) c4(146034, 146035) c5(146036, 146037, 146038, 146039, 146040, 146041, 146042, 146043, 146044, 146045, 146046, 146047, 146048, 146049, 146050, 146051, 146052) c6( ) c7(cT, B, fM, aiM, eZ, ci, eA, hF, q, y, bc, dR); #c1(DDX6) c2(XP_011540946) c3(probable ATP-dependent RNA helicase DDX6 isoform X2) c4( ) c5(339471, 339472, 339473, 339474, 339475, 339476) c6( ) c7(cT, B, fM, aiM, eZ, ci, eA, hF, q, y, bc, dR); #c1(DDX60) c2(NP_060101) c3(probable ATP-dependent RNA helicase DDX60) c4(194123, 194124, 194125) c5(194126, 194127, 194128, 194129, 194130, 194131, 194132) c6( ) c7(ds); #c1(DDX60) c2(XP_011530405) c3(probable ATP-dependent RNA helicase DDX60 isoform X1) c4( ) c5(326255, 326256, 326257, 326258, 326259) c6( ) c7(ds); #c1(DDX60) c2(XP_011530406) c3(probable ATP-dependent RNA helicase DDX60 isoform X2) c4( ) c5(326260, 326261, 326262, 326263, 326264, 326265) c6( ) c7(ds); #c1(DEAF1) c2(NP_001280563) c3(deformed epidermal autoregulatory factor 1 homolog isoform b) c4(111525) c5(111526, 111527, 111528, 111529, 111530, 111531, 111532, 111533) c6(111534, 111535) c7(T, A, tb, cA, bO, aj, bS, ww, K, nA, g, he, q, J); #c1(DEAF1) c2(NP_066288) c3(deformed epidermal autoregulatory factor 1 homolog isoform a) c4(206998, 206999, 207000, 207001) c5(207002, 207003, 207004, 207005, 207006, 207007, 207008, 207009, 207010, 207011, 207012, 207013, 207014, 207015, 207016, 207017, 207018, 207019, 207020, 207021, 207022, 207023, 207024, 207025, 207026, 207027, 207028, 207029, 207030, 207031, 207032, 207033, 207034) c6(207035, 207036, 207037, 207038, 207039, 207040, 207041, 207042) c7(T, A, tb, cA, bO, aj, bS, ww, K, nA, g, he, q, J); #c1(DEC1) c2(XP_011517055) c3(deleted in esophageal cancer 1 isoform X1) c4(310542) c5(310543, 310544, 310545, 310546, 310547, 310548) c6( ) c7(GI, T, ht, aA, hy, ajM, fr, ci, aE, aT, Gw, hu, aW, ff, aq, aF, en, iK, eM, dB, Gu, it, B); #c1(DECR1) c2(NP_001350) c3(2,4-dienoyl-CoA reductase, mitochondrial precursor) c4(117223) c5(117224, 117225, 117226, 117227, 117228, 117229) c6( ) c7(bM, T, qo, pf, ea, e, eb, bB, fd, qj, ci, Tz, azY, wM, aE, dV, K, asC, VF, aa, aW, az, hl, LZ, CT, g, as, cm, bw, y, wE, U, Hb, m, cE, iu, dD, OI, aw, ez, baD, n, aj, cd, br, ai, ju, h, Cw, Cu, fe, aq, kp, ajz, kT, avF, B, bL, fG, cz, sM, cR, afK, wo, j, C, V, eA, J, eJ, aT, cy, jj, an, ae, af, afC, oV, Y, HL, t, alC, ac, c, hA, wO, wR, CZ, fD, bt, zA, Kd, id, qb, aD, acl, bs, mw, dG, eq, ad, HF, hd, F, nH, afm, sN, ji, yC, vl, sj, d, IR, nU, cH, beu, eZ, gE, iR, bz, dr, qa, eK, LB, bE, eB, MJ, Km, aS, IC, ra, X, us, pC); #c1(DECR1) c2(XP_011515182) c3(2,4-dienoyl-CoA reductase, mitochondrial isoform X1) c4(308009) c5(308010, 308011, 308012, 308013, 308014, 308015) c6( ) c7(bM, T, qo, pf, ea, e, eb, bB, fd, qj, ci, Tz, azY, wM, aE, dV, K, asC, VF, aa, aW, az, hl, LZ, CT, g, as, cm, bw, y, wE, U, Hb, m, cE, iu, dD, OI, aw, ez, baD, n, aj, cd, br, ai, ju, h, Cw, Cu, fe, aq, kp, ajz, kT, avF, B, bL, fG, cz, sM, cR, afK, wo, j, C, V, eA, J, eJ, aT, cy, jj, an, ae, af, afC, oV, Y, HL, t, alC, ac, c, hA, wO, wR, CZ, fD, bt, zA, Kd, id, qb, aD, acl, bs, mw, dG, eq, ad, HF, hd, F, nH, afm, sN, ji, yC, vl, sj, d, IR, nU, cH, beu, eZ, gE, iR, bz, dr, qa, eK, LB, bE, eB, MJ, Km, aS, IC, ra, X, us, pC); #c1(DEDD) c2(NP_001034801) c3(death effector domain-containing protein) c4(32321, 32322) c5(32323, 32324, 32325, 32326, 32327, 32328, 32329, 32330, 32331, 32332, 32333, 32334, 32335, 32336, 32337, 32338, 32339, 32340, 32341, 32342, 32343, 32344, 32345, 32346, 32347, 32348) c6( ) c7(gx); #c1(DEDD) c2(XP_005245657) c3(death effector domain-containing protein isoform X1) c4(266843) c5(266844, 266845, 266846, 266847, 266848, 266849, 266850, 266851, 266852, 266853) c6( ) c7(gx); #c1(DEF6) c2(NP_071330) c3(differentially expressed in FDCP 6 homolog) c4(211029, 211030, 211031, 211032) c5(211033, 211034, 211035, 211036, 211037, 211038, 211039, 211040, 211041, 211042, 211043, 211044, 211045, 211046, 211047, 211048, 211049, 211050, 211051, 211052, 211053, 211054, 211055, 211056) c6( ) c7(fr, j, eZ); #c1(DEFA1B) c2(NP_001035965) c3(neutrophil defensin 1 isoform 2 preproprotein) c4(33570) c5(33571, 33572, 33573, 33574, 33575, 33576, 33577, 33578, 33579, 33580, 33581, 33582, 33583, 33584, 33585, 33586, 33587) c6(33588, 33589) c7(bM, T, iU, bO, r, K, g, NM, q, afb); #c1(DEFAIB) c2(NP_001289194) c3(neutrophil defensin 1 isoform 1 preproprotein) c4(114123, 114124, 114125, 114126, 114127, 114128, 114129, 114130, 114131, 114132, 114133, 114134) c5(114135, 114136, 114137) c6( ) c7(bM, T, iU, bO, r, K, g, NM, g, afb); #c1(DEFA3) c2(NP_005208) c3(neutrophil defensin 3 preproprotein) c4( ) c5(153994, 153995, 153996, 153997, 153998, 153999) c6(154000) c7(bev, s, afm, mG, aFr, h, ci, C, jj, y, NM); #c1(DEFA3) c2(XP_011533043) c3(neutrophil defensin 3 isoform X1) c4(329240, 329241, 329242, 329243, 329244, 329245, 329246, 329247, 329248, 329249) c5(329250) c6( ) c7(bev, s, afm, mG, aFr, h, ci, C, jj, y, NM); #c1(DEFA4) c2(NP_001916) c3(neutrophil defensin 4 preproprotein) c4(122182, 122183, 122184, 122185, 122186) c5(122187, 122188, 122189, 122190, 122191, 122192) c6( ) c7(eE, pD, afb, h); #c1(DEFA5) c2(NP_066290) c3(defensin-5 preproprotein) c4(207063, 207064, 207065, 207066, 207067, 207068, 207069, 207070, 207071, 207072, 207073, 207074, 207075, 207076, 207077, 207078, 207079, 207080, 207081, 207082, 207083, 207084, 207085, 207086, 207087, 207088, 207089, 207090, 207091, 207092, 207093, 207094, 207095, 207096) c5(207097, 207098, 207099, 207100, 207101, 207102) c6( ) c7(sY, iV, s, fR, aD, az, aFr, h, fe, hp, ey, g, MG, eE, uC, X, ip); #c1(DEFA6) c2(NP_001917) c3(defensin-6 preproprotein) c4(122193, 122194, 122195) c5(122196, 122197, 122198, 122199, 122200, 122201) c6( ) c7(aA, h, fe, aF, fr, iV, eE, X); #c1(DEFB1) c2(NP_005209) c3(beta-defensin 1 preproprotein) c4(154001, 154002, 154003, 154004, 154005, 154006, 154007, 154008, 154009, 154010, 154011, 154012, 154013, 154014, 154015, 154016, 154017, 154018, 154019, 154020, 154021) c5(154022, 154023, 154024, 154025, 154026, 154027) c6( ) c7(bL, bM, sY, bew, pF, ka, fR, T, aD, oe, axd, aee, aA, bS, dG, ct, C, pM, bex, ci, v, fr, asS, ad, Tz, ip, AW, F, afm, apJ, h, bK, wb, pj, bq, ji, ae, bc, pl, aa, le, ls, A, xR, EU, az, bg, cr, ff, dN, fe, Ph, pD, hp, en, aF, Z, eE, uC, iV, aff, ck, ba, es, fT, sS, iA, ki, AH, at, uz, CZ, EY, aDE, ao); #c1(DEFB1038) c2(NP_061131) c3(beta-defensin 103 precursor) c4(199317, 199318, 199319, 199320, 199321, 199322, 199323, 199324, 199325, 199326) c5(199327, 199328, 199329, 199330, 199331, 199332, 199333, 199334, 199335, 199336, 199337, 199338, 199339, 199340, 199341, 199342, 199343, 199344, 199345, 199346, 199347, 199348, 199349, 199350, 199351, 199352, 199353, 199354, 199355, 199356, 199357, 199358, 199359, 199360, 199361, 199362, 199363, 199364, 199365, 199366, 199367, 199368, 199369, 199370, 199371, 199372, 199373, 199374, 199375, 199376, 199377, 199378, 199379, 199380, 199381, 199382, 199383, 199384, 199385, 199386, 199387, 199388, 199389, 199390, 199391, 199392, 199393, 199394, 199395, 199396, 199397, 199398, 199399, 199400, 199401, 199402, 199403, 199404, 199405, 199406, 199407, 199408, 199409, 199410, 199411, 199412, 199413, 199414, 199415, 199416, 199417, 199418, 199419, 199420, 199421, 199422, 199423, 199424) c6(199425, 199426, 199427) c7(oO, T, Ht, fR, aD, bB, ds, Dn, pj, le, xR, ff, lo, hp, en, iV, eE, iK, bE, bas, CZ, PK); #c1(DEFB1048) c2(NP_001035792) c3(beta-defensin 104 precursor) c4(33094, 33095, 33096, 33097, 33098) c5(33099, 33100, 33101, 33102, 33103, 33104, 33105, 33106, 33107, 33108, 33109) c6(33110, 33111) c7(bE, if, cr, eZ, h, uz, hv, wb, ji, qN, iV, ae, ao, ad, aa); #c1(DEFB105A) c2(NP_689463) c3(beta-defensin 105 precursor) c4(242768, 242769, 242770, 242771, 242772, 242773, 242774, 242775) c5(242776, 242777, 242778, 242779, 242780, 242781, 242782, 242783, 242784, 242785, 242786, 242787) c6(242788, 242789) c7(h); #c1(DEFB106A) c2(NP_689464) c3(beta-defensin 106 precursor) c4(242790, 242791, 242792, 242793, 242794, 242795, 242796) c5(242797, 242798, 242799, 242800, 242801, 242802, 242803, 242804, 242805, 242806, 242807, 242808) c6(242809, 242810) c7(h); #c1(DEFB108B) c2(NP_001002035) c3(beta-defensin 108B precursor) c4(19422, 19423, 19424, 19425) c5(19426, 19427, 19428, 19429, 19430, 19431, 19432) c6(19433) c7(h); #c1(DEFB112) c2(NP_001032587) c3(beta-defensin 112) c4(31388) c5(31389, 31390, 31391, 31392, 31393, 31394, 31395, 31396) c6(31397, 31398) c7(fq, c); #c1(DEFB125) c2(NP_697020) c3(beta-defensin 125 preproprotein) c4(245710, 245711, 245712, 245713, 245714, 245715, 245716, 245717) c5(245718, 245719, 245720, 245721, 245722, 245723, 245724, 245725) c6(245726, 245727) c7(aw); #c1(DEFB126) c2(NP_112193) c3(beta-defensin 126 preproprotein) c4(220731, 220732, 220733, 220734, 220735, 220736) c5(220737, 220738, 220739, 220740, 220741, 220742, 220743, 220744) c6(220745, 220746) c7(AV, iW, d); #c1(DEFB4A) c2(NP_004933) c3(beta-defensin 4A precursor) c4(151068, 151069, 151070, 151071, 151072, 151073, 151074, 151075, 151076, 151077, 151078, 151079, 151080, 151081, 151082, 151083, 151084, 151085, 151086, 151087, 151088, 151089, 151090, 151091, 151092, 151093, 151094, 151095, 151096, 151097, 151098, 151099, 151100, 151101, 151102, 151103, 151104, 151105, 151106, 151107, 151108, 151109, 151110, 151111, 151112, 151113, 151114, 151115, 151116, 151117, 151118, 151119, 151120, 151121, 151122, 151123, 151124, 151125, 151126, 151127, 151128, 151129, 151130, 151131) c5(151132, 151133, 151134, 151135, 151136, 151137, 151138, 151139, 151140, 151141, 151142, 151143, 151144, 151145, 151146, 151147, 151148, 151149, 151150, 151151, 151152, 151153, 151154, 151155, 151156, 151157, 151158, 151159, 151160, 151161, 151162, 151163, 151164, 151165, 151166, 151167, 151168, 151169, 151170, 151171, 151172, 151173, 151174, 151175, 151176, 151177, 151178, 151179, 151180, 151181, 151182, 151183, 151184, 151185, 151186, 151187, 151188, 151189, 151190, 151191, 151192, 151193, 151194, 151195, 151196, 151197, 151198, 151199, 151200, 151201, 151202, 151203, 151204, 151205, 151206, 151207, 151208, 151209, 151210, 151211, 151212, 151213, 151214, 151215, 151216, 151217, 151218, 151219, 151220, 151221, 151222, 151223, 151224, 151225, 151226, 151227, 151228, 151229, 151230) c6(151231, 151232, 151233) c7(oO, fR, tp, aD, if, wh, rl, aA, C, qN, Za, q, asS, Tz, wa, AK, F, bey, rS, dV, aT, h, dL, bK, IQ, Dn, wb, oi, pj, eL, bc, ao, pi, ls, xR, ff, Zf, EU, bez, bg, cr, r, rM, dN, hN, aFr, eZ, aEW, en, iV, eE, fe, axp, p, ac, JM, wz, at, uz, wR, CZ, fD, hv); #c1(DEGS1) c2(NP_003667) c3(sphingolipid delta(4)-desaturase DES1) c4(140056, 140057) c5(140058, 140059, 140060, 140061, 140062, 140063, 140064, 140065, 140066, 140167, 140068, 140069, 140070, 140071, 140072, 140073) c6( ) c7(ob, zs, hD, aj, ey, hu, J, ad, cp); #c1(DEGS2) c2(NP_996801) c3(sphingolipid delta(4)-desaturase/C4-hydroxylase DES2) c4(264576) c5(264577, 264578, 264579, 264580, 264581, 264582) c6( ) c7(cF); #c1(DEK) c2(NP_001128181) c3(protein DEK isoform 2) c4(49685) c5(49686, 49687, 49688, 49689, 49690, 49691) c6( ) c7(Gl, T, oe, oA, bB, cL, ci, o, lg, yt, aT, h, dL, K, eL, je, iU, aW, Y, ff, eH, lo, en, eF, bz, ck, iM, bP, bE, nG, cj, np, bC, oQ, y, bt, X); #c1(DEK) c2(NP_003463) c3(protein DEK isoform 1) c4(138540) c5(138541, 138542, 138543, 138544, 138545, 138546) c6( ) c7(Gl, T, oe, oA, bB, cL, ci, o, lg, yt, aT, h, dL, K, eL, je, iU, aW, Y, ff, eH, lo, en, eF, bz, ck, iM, bP, bE, nG, cj, np, bC, oQ, y, bt, X); #c1(DENND1A) c2(NP_065997) c3(DENN domain-containing protein 1A isoform 1) c4(206701) c5(216702, 206703, 206704, 206705, 206706, 206707) c6( ) c7(Na, kl, zX, beA, aZ, Nc, j, cl); #c1(DENND1A) c2(NP_079096) c3(DENN domain-containing protein 1A isoform 2) c4(217009) c5(217010, 217011, 217012, 217013, 217014, 217015) c6( ) c7(Na, kl, zX, beA, aZ, Nc, j, cl); #c1(DENND1A) c2(XP_005252170) c3(DENN domain-containing protein 1A isoform X10) c4(271586) c5(271587, 271588, 271589, 271590, 271591, 271592) c6( ) c7(Na, kl, zX, beA, aZ, Nc, j, cl); #c1(DENND1A) c2(XP_006717258) c3(DENN domain-containing protein 1A isoform X3) c4(290827, 290828) c5(290829, 290830, 290831, 290832, 290833, 290834, 290835, 290836, 290837, 290838, 290839, 290840) c6( ) c7(Na, kl, zX, beA, aZ, Nc, j, cl); #c1(DENND1A) c2(XP_011517186) c3(DENN domain-containing protein 1A isoform X5) c4(310780) c5(310781, 310782, 310783, 310784, 310785, 310786) c6( ) c7(Na, kl, zX, beA, aZ, Nc, j, cl); #c1(DENND1B) c2(NP_001287787) c3(DENN domain-containing protein 1B isoform 5) c4(112872) c5(112873, 112874, 112875, 112876, 112877, 112878, 112879, 112880, 112881, 112882) c6( ) c7(bM, v, j, bc, pM); #c1(DENND1B) c2(NP_659414) c3(DENN domain-containing protein 1B isoform 2) c4(239785) c5(239786, 239787, 239788, 239789, 239790, 239791) c6( ) c7(bM, v, j, bc, pM); #c1(DENND1B) c2(XP_00524498) c3(DENN domain-containing protein 1B isoform X5) c4(266185) c5(266186, 266187, 266188, 266189, 266190, 266191) c6( ) c7(bM, v, j, bc, pM); #c1(DENND1B) c2(XP_006711257) c3(DENN domain-containing protein 1B isoform X8) c4(285823) c5(285824, 285825, 285826, 285827, 285288, 28529) c6( ) c7(bM, v, j, bc, pM); #c1(DENND1B) c2(XP_011507550) c3(DENN domain-containing protein 1B isoform X3) c4(297477) c5(297478, 297479, 297480, 297481, 297482, 297483) c6( ) c7(bM, v, j, bc, pM); #c1(DENND2A) c2(NP_056504) c3(DENN domain-containing protein 2A) c4(187805, 187806, 187807) c5(187808, 187809, 187810, 187811, 187812, 187813, 187814, 187815, 187816, 187817, 187818, 187819, 187820, 187821) c6( ) c7(ajP, oQ); #c1(DENND2A) c2(XP_005250036) c3(DENN domain-containing protein 2A isoform X3) c4( ) c5(270041, 270042, 270043, 270044, 270045, 270046, 270047, 270048, 270049, 270050, 270051, 270052, 270053, 270054, 270055, 270056, 270057, 270058) c6( ) c7(ajP, oQ); #c1(DENND2A) c2(XP_011514356) c3(DENN domain-containing protein 2A isoform X2) c4(307056) c5( ) c6( ) c7(ajP, oQ); #c1(DENND4A) c2(NP_001138295) c3(C-myc promoter-binding protein isoform 1) c4(56135) c5(56136, 56137, 56138, 56139, 56140, 56141) c6( ) c7(gk, hb, oe, al, fd, ae, ad); #c1(DENND4A) c2(NP_005839) c3(C-myc promoter-binding protein isoform 2) c4(159792) c5(159793, 159794, 159795, 159796, 159797, 159798) c6( ) c7(gk, hb, oe, al, fd, ae, ad); #c1(DENND4A) c2(XP_005254179) c3(C-myc promoter-binding protein isoform X5) c4( ) c5(273049) c6( ) c7(gk, hb, oe, al, fd, ae, ad); #c1(DENR) c2(NP_003668) c3(density-regulated protein) c4(140074) c5(140075, 140076, 140077, 140078, 140079, 140080) c6( ) c7(lD, ly, wg, c, Ae, dc, U, cy, uY, dG, K, an, lx); #c1(DEPDC1B) c2(NP_001138680) c3(DEP domain-containing protein 1B isoform 2) c4(57391, 57392) c5(57393, 57394, 57395, 57396, 57397, 57398, 57399, 57400, 57401, 57402, 57403, 57404) c6( ) c7(aS, bd); #c1(DEPDC1B) c2(NP_060839) c3(DEP domain-containing protein 1B isoform 1) c4(198078) c5(198079, 198080, 198081, 198082, 198083, 198084) c6( ) c7(aS, bd); #c1(DEPDC5) c2(NP_001007189) c3(DEP domain-containing protein 5 isoform 2) c4(22545) c5(22546, 22547, 22548, 22549, 22550, 22551, 22552, 22553, 22554, 22555, 22556, 22557) c6( ) c7(F, FB, ha, beB, hl, lr, akf, B, aNW, hX); #c1(DEPDC5) c2(NP_001129501) c3(DEP domain-containing protein 5 isoform 3) c4(51710) c5(51711, 51712, 51713, 51714, 51715, 51716) c6( ) c7(F, FB, ha, beB, hl, lr, akf, B, aNW, hX); #c1(DEPDC5) c2(NP_001229825) c3(DEP domain-containing protein 5 isoform 4) c4(85349) c5(85350, 85351, 85352, 85353, 85354, 85355) c6( ) c7(F, FB, ha, beB, hl, lr, akf, B, aNW, hX); #c1(DEPDC5) c2(NP_001229826) c3(DEP domain-containing protein 5 isoform 5) c4(85356, 85357, 85358) c5(85359, 85360, 85361, 85362, 85363, 85364, 85365, 85366, 85367, 85368, 85369, 85370, 85371, 85372, 85373, 85374, 85375, 85376) c6( ) c7(F, FB, ha, beB, hl, lr, akf, B, aNW, hX); #c1(DEPDC5) c2(NP_055477) c3(DEP domain-containing protein 5 isoform 1) c4(181359) c5(181360, 181361, 181362, 181363, 181364, 181365, 181366, 181367, 181368, 181369) c6( ) c7(F, FB, ha, beB, hl, lr, akf, B, aNW, hX); #c1(DEPDC5) c2(XP_011528860) c3(DEP domain-containing protein 5 isoform X5) c4(324249, 324250) c5(324251, 324252, 324253, 324254, 324255, 324256) c6( ) c7(F, FB, ha, beB, hl, lr, akf, B, aNW, hX); #c1(DEPDC5) c2(XP_011528862) c3(DEP domain-containing protein 5 isoform X6) c4(324257, 324258) c5(324259, 324260, 324261, 324262, 324263, 324264) c6( ) c7(F, FB, ha, beB, hl, lr, akf, B, aNW, hX); #c1(DEPDC5) c2(XP_011528871) c3(DEP domain-containing protein 5 isoform X14) c4( ) c5(324265, 324266, 324267, 324268, 324269, 324270) c6( ) c7(F, FB, ha, beB, hl, lr, akf, B, aNW, hX); #c1(DEPTOR) c2(NP_073620) c3(DEP domain-containing mTOR-interacting protein isoform 1) c4(213173) c5(213174, 213175, 213176, 213177, 213178, 213179) c6( ) c7(T, K); #c1(DERA) c2(NP_057038) c3(deoxyribose-phosphate aldolase isoform 1) c4(188592, 188593) c5(188594, 188595, 188596, 188597, 188598, 188599, 188600, 188601, 188602, 188603, 188604, 188605) c6( ) c7(dy); #c1(DERL1) c2(NP_001128143) c3(derlin-1 isoform b) c4(49635) c5(49636, 49637, 49638, 49639, 49640, 49641) c6( ) c7(T, Uc, WA, qx, bs, fd, amj, oY, ci, AO, Fc, br, x, Db, aT, gs, dz, hn, beD, qt, aW, aq, pm, Fu, bw, bz, ck, beC, pc, c, eM, pg, k, bt); #c1(DERL1) c2(NP_077271) c3(derlin-1 isoform a) c4(214854, 214855) c5(214856, 214857, 214858, 214859, 214860, 214861) c6( ) c7(T, Uc, WA, qx, bs, fd, amj, oY, ci, AO, Fc, br, x, Db, aT, gs, dz, hn, beD, qt, aW, aq, pm, Fu, bw, bz, ck, beC, pc, c, eM, pg, k, bt); #c1(DERL1) c2(XP_011515601) c3(derlin-1 isoform X1) c4( ) c5(308443, 308444, 308445, 308446, 308447, 308448) c6( ) c7(T, Uc, WA, qx, bs, fd, amj, oY, ci, AO, Fc, br, x, Db, aT, gs, dz, hn, beD, qt, aW, aq, pm, Fu, bw, bz, ck, her, pc, c, eM, pg, k, bt); #c1(DERL2) c2(NP_057125) c3(derlin-2 isoform a) c4(189010) c5(189011, 189012, 189013, 189014, 189015, 189016, 189017, 189018) c6(189019, 189020) c7(ck, bv, EW, T, Fp, iO, fR, beE, Pl, jh, pg, aF); #c1(DERL3) c2(NP_001002862) c3(derlin-3 isoform 2) c4(19679) c5(19680, 19681, 19682, 19683, 19684, 19685, 19686) c6( ) c7(es, T, ac, iA, RX, oA, jh, bw, fr, Kg, iJ, avK); #c1(DERL3) c2(NP_001129223) c3(derlin-3 isoform 1) c4(51250, 51251) c5(51252, 51253, 51254, 51255, 51256, 51257) c6( ) c7(es, T, ac, iA, RX, oA, jh, bw, fr, Kg, iJ, avK); #c1(DERL3) c2(NP_940842) c3(derlin-3 isoform 3) c4( ) c5(259934, 259935, 259936, 259937, 259938) c6( ) c7(es, T, ac, iA, RX, oA, jh, bw, fr, Kg, iJ, avK); #c1(DES) c2(NP_001918) c3(desmin) c4(122202) c5(122203, 122204, 122205, 122206, 122207, 122208, 122209) c6( ) c7(T, hV, bB, lR, ci, Hr, bv, K, li, zQ, aW, Ls, as, cm, wK, wE, vA, mx, beI, Uc, Am, aw, fr, asF, nA, zP, aHZ, cd, cc, Ak, FN, bl, agW, cY, AX, A, kj, Ad, aMH, mo, aYo, alj, op, eD, aWn, va, bD, arO, B, wL, fG, aA, aTl, j, UX, pd, q, er, eA, hW, Ws, aT, adm, aWs, qk, Qr, Y, la, r, en, pb, ck, beH, beJ, c, aXe, hc, km, aof, beG, Fc, hX, Dq, oj, vc, fb, Yi, anR, d, xz, xs, ff, beF, dr, bE, gZ, X); #c1(DES12) c2(NP_001284675) c3(desumoylating isopeptidase 2 isoform 2) c4(112295) c5(112296, 112297, 112298, 112299, 112300, 112301) c6( ) c7(bE, t, DA, T, m); #c1(DES12) c2(NP_057160) c3(desumoylating isopeptidase 2 isoform 1) c4(189208) c5(189209, 189210, 189211, 189212, 189213, 189214) c6( ) c7(bE, t, DA, T, m); #c1(DES12) c2(XP_011542505) c3(desumoylating isopeptidase 2 isoform X1) c4(341052) c5( ) c6( ) c7(bE, t, DA, T, m); #c1(DES12) c2(XP_011542510) c3(desumoylating isopeptidase 2 isoform X6) c4( ) c5(341053, 341054, 341055, 341056, 341057, 341058) c6( ) c7(bE, t, DA, T, m); #c1(DEX1) c2(NP_054734) c3(dexamethasone-induced protein) c4(17745) c5(177466, 177467, 177468, 177469, 177470, 177471) c6( ) c7(eV, V, A, eX, bt); #c1(DEX1) c2(XP_011520757) c3(dexamethasone-induced protein isoform X1) c4( ) c5(315764) c6( ) c7(eV, V, A, eX, bt); #c1(DFFB) c2(XP_011539165) c3(DNA fragmentation factor subunit beta isoform X1) c4( ) c5(337278, 337279, 337280, 337281, 337282, 337283, 337284, 337285, 337286, 337287) c6( ) c7(bL, T, dD, ZV, Zz, ea, iW, e, aw, cz, sM, vr, bS, j, ct, eq, il, Fc, q, ad, av, ec, rS, aT, h, jj, dQ, eN, hm, bf, cW, aW, Zt, r, aq, vs, Z, cm, ac, nB, wE, aka, vb, hE, bt, B); #c1(DFFB) c2(XP_011539166) c3(DNA fragmentation factor subunit beta isoform X2) c4(337288) c5(337289, 337290, 337291, 337292, 337293, 337294, 337295, 337296, 337297, 337298) c6( ) c7(bL, T, dD, ZV, Zz, ea, iW, e, aw, cz, sM, vr, bS, j, ct, eq, il, Fc, q, ad, av, ec, rS, aT, h, jj, dQ, eN, hm, bf, cW, aW, Zt, r, aq, vs, Z, cm, ac, nB, wE, aka, vb, hE, bt, B); #c1(DFFB) c2(XP_011539167) c3(DNA fragmentation factor subunit beta isoform X3) c4( ) c5(337299, 337300, 337301, 337302, 337303, 337304, 337305, 337306, 337307, 337308, 337309, 337310, 337311, 337312, 337313, 337314, 337315, 337316, 337317, 337318, 337319, 337320) c6( ) c7(bL, T, dD, ZV, Zz, ea, iW, e, aw, cz, sM, vr, bS, j, ct, eq, il, Fc, q, ad, av, ec, rS, aT, h, jj, dQ, eN, hm, bf, cW, aW, Zt, r, aq, vs, Z, cm, ac, nB, wE, aka, vb, hE, bt, B); #c1(DFNA5) c2(NP_001120925) c3(non-syndromic hearing impairment protein 5 isoform a) c4(44916, 44917) c5(44918, 44919, 44920, 44921, 44922, 44923, 44924, 44925, 44926, 44927, 44928, 44929) c6( ) c7(T, beK, bE, aW, Y, mG, aT, r, aA, bB, aF, K, Bh, q); #c1(DFNA5) c2(NP_001120926) c3(non-syndromic hearing impairment protein 5 isoform b) c4( ) c5(44930, 44931, 44932, 44933, 44934, 44935, 44936, 44937) c6( ) c7(T, beK, bE, aW, Y, mG, aT, r, aA, bB, aF, K, Bh, q); #c1(DFNB31) c2(NP_056219) c3(whirlin isoform 1) c4(186467, 186468, 186469, 186470) c5(186471, 186472, 186473, 186474, 186475, 186476, 186477, 186478, 186479, 186480, 186481, 186482, 186483, 186484, 186485, 18646, 186487, 186488) c6( ) c7(cz, bB, mS, oc, q, Na, beM, mW, beL, FD, Nc, bK, mY, mV, mU, r, nC, mZ, mX, bE, mG, alA, nw, Bh, mT); #c1(DFNB31) c2(XP_011516796) c3(whirlin isoform X10) c4( ) c5(310237, 310238, 310239, 310240, 310241, 310242) c6( ) c7(cz, bB, mS, oc, q, Na, beM, mW, beL, FQ, Nc, bK, mY, mV, mU, r, nC, mZ, mX, bE, mG, alA, nw, Bh, mT); #c1(DFNB59) c2(NP_001036167) c3(pejvakin) c4(34008) c5(34009, 34010, 34011, 34012, 34013, 34014, 34015, 34016, 34017, 34018) c6( ) c7(Bh, beO, beN); #c1(DGAT1) c2(NP_036211) c3(diacylglycerol O-acyltransferase 1) c4(172389) c5(172390, 172391, 172392, 172393, 172394, 172395) c6( ) c7(A, af, oe, jx, fc, dq, v, cP, cd, bJ); #c1(DGAT2) c2(NP_001240820) c3(diacylglycerol O-acyltransferase 2 isoform 2) c4(88874) c5(88875, 88876, 88877, 88878, 88879, 88880) c6( ) c7(v, fc, hX); #c1(DGAT2) c2(NP_115953) c3(diacylglycerol O-acyltransferase 2 isoform 1) c4(224903) c5(224904, 224905, 224906, 224907, 224908, 224909) c6( ) c7(v, fc, hX); #c1(DGCR2) c2(NP_001167004) c3(integral membrane protein D88122/IDD isoform 2 precursor) c4(68813) c5(68814, 68815, 68816, 68817, 68818, 68819) c6( ) c7(agd, A, RX, aw, bD, aj, aKH, beP, Nl, cm, bc, J); #c1(DGCR2) c2(NP_001167005) c3(integral membrane protein D88122/IDD isoform 3 precursor) c4( ) c5(68820) c6( ) c7(agd, A, RX, aw, bD, aj, aKH, beP, Nl, cm, bc, J); #c1(DGCR2) c2(NP_001171710) c3(integral membrane protein D88122/IDD isoform 4 precursor) c4(71375) c5(71376, 71377, 71378, 71379, 71380) c6( ) c7(agd, A, RX, aw, bD, aj, aKH, beP, Nl, cm, bc, J); #c1(DGCR2) c2(NP_005128) c3(integral membrane protein D88122/IDD isoform 1 precursor) c4(153085, 153086) c5(153087, 153088, 153089, 153090, 153091, 153092, 153093, 153094, 153095, 153096, 153097, 153098) c6( ) c7(agd, A, RX, aw, bD, aj, aKH, beP, Nl, cm, bc, J); #c1(DGCR6L) c2(NP_150282) c3(protein DGCR6L) c4(228035) c5(228036, 228037, 228038, 228039, 228040, 228041) c6( ) c7(RX, agd, bN, hq); #c1(DGCR8) c2(NP_001177255) c3(microprocessor complex subunit DGCR8 isoform 2) c4(72552) c5(72553, 72554, 72555, 72556, 72557, 72558, 72559, 72560, 72561, 72562, 72563, 72564, 72565, 72566, 72567, 72568) c6( ) c7(es, BN, aW, yk, RX, aT, hy, fr, aan, he, agY, ne); #c1(DGCR8) c2(NP_073557) c3(microprocessor complex subunit DGCR8 isoform 1) c4(212845, 212846) c5(212847, 212848, 212849, 212850, 212851, 212852) c6( ) c7(es, BN, aW, yk, RX, aT, hy, fr, aan, he, agY, ne); #c1(DGKA) c2(NP_958853) c3(diacylglycerol kinase alpha) c4(262298, 262299, 262300) c5(262301, 262302, 262303, 262304, 262305, 262306, 262307, 262308, 262309, 262310, 262311, 262312, 262313, 262314, 262315, 262316, 262317, 262318, 262319, 262320, 262321, 262322, 262323, 262324, 262325, 262326, 262327, 262328, 262329, 262330, 262331, 262332, 262333, 262334, 262335, 262336, 262337, 262338, 262339, 262340, 262341, 262342, 262343, 262344, 262345) c6( ) c7(T, d, Y, hL, n, nw, cl, B, Tz); #c1(DGKA) c2(XP_005268745) c3(diacylglycerol kinase alpha isoform X2) c4(282083) c5(282084, 282085, 282086, 282087, 282088, 282089, 282090, 282091, 282092, 282093, 282094, 282095, 282096, 282097, 282098, 282099, 282100, 282101, 282102) c6( ) c7(T, d, Y, hL, n, nw, cl, B, Tz); #c1(DGKA) c2(XP_011536292) c3(diacylglycerol kinase alpha isoform X3) c4(333627, 333628, 333629, 333630, 333631) c5(333632, 333633, 333634, 333635, 333636, 333637, 333638, 333639, 333640) c6( ) c7(T, d, Y, hL, n, nw, cl, B, Tz); #c1(DGKB) c2(NP_004071) c3(diacylglycerol kinase beta isoform 1) c4(143292, 143293) c5(143294, 143295, 143296, 143297, 143298, 143299, 143300, 143301, 143302, 143303, 143304, 143305, 143306, 143307, 143308, 143309) c6( ) c7(A, gk, cF, aw, al, k, aoz); #c1(DGKB) c2(NP_663733) c3(diacylglycerol kinase beta isoform 2) c4(241470) c5(241471, 241472, 241473, 241474, 241475, 241476) c6( ) c7(A, gk, cF, aw, al, k, aoz); #c1(DGKB) c2(XP_005249686) c3(diacylglycerol kinase beta isoform X2) c4(269777, 269778) c5(269779, 269780, 269781, 269782, 269783, 269784) c6( ) c7(bL, gk, cF, aw, al, k, aoz); #c1(DGKB) c2(XP_005249688) c3(diacylglycerol kinase beta isoform X6) c4(269785) c5(269786, 269787, 269788, 269789, 269790, 269791) c6( ) c7(A, gk, cF, aw, al, k, aoz); #c1(DGKB) c2(XP_011513458) c3(diacylglycerol kinase beta isoform X4) c4(305711) c5(305712, 305713, 305714, 305715, 305716, 305717) c6( ) c7(A, gk, cF, aw, al, k, aoz); #c1(DGKB) c2(XP_011513462) c3(diacylglycerol kinase beta isoform X8) c4( ) c5(305718, 305719, 305720, 305721, 305722, 305723) c6( ) c7(A, gk, cF, aw, al, k, aoz); #c1(DGKD) c2(NP_003639) c3(diacylglycerol kinase delta isoform 1) c4(139809) c5(139810, 139811, 139812, 139813, 139814, 139815) c6( ) c7(bL, T, beR, beQ); #c1(DGKD) c2(NP_690618) c3(diacylglycerol kinase delta isoform 2) c4(244930) c5(244931, 244932, 244933, 244934, 244935, 244936) c6( ) c7(bL, T, beR, beQ) #c1(DGKE) c2(NP_003638) c3(diacylglycerol kinase epsilon) c4( ) c5(139804, 139805, 139806, 139807, 139808) c6( ) c7(bL, gk, al, beS, vl, aoz); #c1(DGKE) c2(XP_011523696) c3(diacylglycerol kinase epsilon isoform X1) c4(318173) c5(318174) c6( ) c7(bL, gk, al, beS, vl, aoz); #c1(DGKG) c2(NP_001074213) c3(diacylglycerol kinase gamma isoform 2) c4(36987) c5(36988, 36989, 36990, 36991, 36992, 36993) c6( ) c7(bL, fq, v, oQ); #c1(DGKG) c2(NP_001074214) c3(diacylglycerol kinase gamma isoform 3) c4(36994, 36995, 36996) c5(36997, 36998, 36999, 37000, 37001, 37002, 37003, 37004, 37005, 37000, 37007, 37008, 37009, 37010, 37011, 37012, 37013, 37014) c6( ) c7(bL, fq, v, oQ); #c1(DGKG) c2(NP_001337) c3(diacylglycerol kinase gamma isoform 1) c4(117021) c5(117022, 117023, 117024, 117025, 117026, 117027) c6( ) c7(bL, fq, v, oQ); #c1(DGKH) c2(NP_001191433) c3(diacylglycerol kinase eta isoform 1) c4(81497) c5(81498, 81499, 81500, 81501, 81502, 81503, 81504, 81505, 81506, 81507) c6( ) c7(uJ, bK, af); #c1(DGKH) c2(NP_001191434) c3(diacylglycerol kinase eta isoform 3) c4(81508) c5(81509, 81510, 81511, 81512, 81513) c6( ) c7(uJ, bK, af); #c1(DGKH) c2(NP_001191435) c3(diacylglycerol kinase eta isoform 4) c4( ) c5(81514, 81515, 81546, 81517, 81518) c6( ) c7(uJ, bK, af); #c1(DGKH) c2(NP_001284358) c3(diacylglycerol kinase eta isoform 5) c4(111764) c5(111765, 111766, 111767, 111768, 111769, 111770) c6( ) c7(uJ, bK, af); #c1(DGKH) c2(NP_821077) c3(diacylglycerol kinase eta isoform 2) c4(253198, 253199) c5(253200, 253201, 253202, 253203, 253204, 253205, 253206, 253207) c6( ) c7(uJ, bK, af); #c1(DGKI) c2(NP_004708) c3(diacylglycerol kinase iota) c4(148989, 148990) c5(148991, 148992, 148993, 148994, 148995, 148996) c6( ) c7(cm, fq, iQ, yA); #c1(DGKI) c2(XP_006716235) c3(diacylglycerol kinase iota isoform X1) c4( ) c5(290192, 290193, 290194, 290195, 290196, 290197) c6( ) c7(cm, fq, iQ, yA); #c1(DGKI) c2(XP_011514980) c3(diacylglycerol kinase iota isoform X3) c4(307787) c5(307788, 307789, 307790, 307791, 307792, 307793) c6( ) c7(cm, fq, iQ, yA); #c1(DGKK) c2(NP_001013764) c3(diacylglycerol kinase kappa) c4(25751) c5(25752, 25753, 25754, 25755, 25756, 25757, 25758) c6( ) c7(beU, beT); #c1(DGKQ) c2(NP_001338) c3(diacylglycerol kinase theta) c4(117028) c5(117029, 117030, 117031, 117032, 117033, 117034) c6( ) c7(nw, fN, an); #c1(DGKQ) c2(XP_011511717) c3(diacylglycerol kinase theta isoform X4) c4( ) c5(302439) c6( ) c7(nw, fN, an); #c1(DGKZ) c2(NP_001099010) c3(diacylglycerol kinase zeta isoform 4) c4(41641) c5(41642, 41643, 41644, 41645, 41646, 41647) c6( ) c7(bB, bE, T, PX, aw); #c1(DGKZ) c2(NP_001186195) c3(diacylglycerol kinase zeta isoform 5) c4(77400) c5(77401, 77402, 77403, 77404, 77405, 77406) c6( ) c7(bB, bE, T, PX, aw); #c1(DGKZ) c2(NP_001186196) c3(diacylglycerol kinase zeta isoform G) c4(77407) c5(77408, 77409, 77410, 77411, 77412, 77413) c6( ) c7(bB, bE, T, PX, aw); #c1(DGKZ) c2(NP_001186197) c3(diacylglycerol kinase zeta isoform 7) c4(77414) c5(77415, 77416, 77417, 77418, 77419, 77420) c6( ) c7(bB, bE, T, PX, aw); #c1(DGKZ) c2(NP_003637) c3(diacylglycerol kinase zeta isoform 2) c4(139797) c5(139798, 139799, 139800, 139801, 139802, 139803) c6( ) c7(bB, bE, T, PX, aw); #c1(DGKZ) c2(NP_963290) c3(diacylglycerol kinase zeta isoform 1) c4(262346) c5(262347, 262348, 262349, 262350, 262351, 262352) c6( ) c7(bB, bE, T, PX, aw); #c1(DGKZ) c2(XP_005253239) c3(diacylglycerol kinase zeta isoform X4) c4(272289) c5(272290, 272291, 272292, 272293, 272294, 272295) c6( ) c7(bB, bE, T, PX, aw); #c1(DGKZ) c2(XP_011518723) c3(diacylglycerol kinase zeta isoform X1) c4(313129) c5( ) c6( ) c7(bB, bE, T, PX, aw); #c1(DGKZ) c2(XP_011518725) c3(diacylglycerol kinase zeta isoform X7) c4( ) c5(313130, 313131, 313132, 313133, 313134, 313135) c6( ) c7(bB, bE, T, PX, aw); #c1(DGUOK) c2(NP_550438) c3(deoxyguanosine kinase, mitochondrial isoform a precursor) c4(233494, 233495, 233496) c5(233497, 233498, 233499, 233500, 233501, 233502, 233503, 233504, 233505, 233506, 233507, 233508, 233509, 233510, 233511, 233512, 233513, 233514) c6( ) c7(bL, ck, T, gk, Fr, aE, hb, Ft, al, oj, bt, beV, bZ, aNG, hJ, awL, awl, dF, aoz, kC); #c1(DGUOK) c2(NP_550440) c3(deoxyguanosine kinase, mitochondrial isoform b precursor) c4(233515) c5(23354, 233517, 233518, 233519, 233520, 233521) c6( ) c7(bL, ck, T, gk, Fr, aE, hb, Ft, al, oj, bt, beV, bZ, aNG, hJ, awL, awl, dF, aoz, kC); #c1(DHCR7) c2(NP_001157289) c3(7-dehydrocholesterol reductase) c4(62149, 62150, 62151, 62152, 62153) c5(62154, 62155, 62156, 62157, 62158, 62159, 62160, 62161, 62162, 62163) c6( ) c7(bL, dD, aZ, ea, e, al, gN, bB, cL, j, eq, nA, beZ, beW, V, q, o, ad, F, nl, h, hH, ae, A, beX, beY, Az, nh, r, da, QK, dr, bN, bE, vA, el, ZW, B); #c1(DHCR7) c2(XP_011543079) c3(7-dehydrocholesterol reductase isoform X1) c4( ) c5(341878, 341879, 341880, 341881, 341882, 341883, 341884, 341885, 341886, 341887, 341888, 341889, 341890, 341891, 341892, 341893, 341894, 341895, 341896, 341897, 341898, 341899, 341900, 341901, 341902, 341903, 341904) c6( ) c7(bL, dD, aZ, ea, e, al, gN, bB, cL, j, eq, nA, beZ, beW, V, q, o, ad, F, nl, h, hH, ae, A, beX, beY, Az, nh, r, da, QK, dr, bN, bE, vA, el, ZW, B); #c1(DHDH) c2(NP_055290) c3(trans-1,2-dihydrobenzene-1,2-diol dehydrogenase) c4(180314) c5(180315, 180316, 180317, 180318, 180319, 180320) c6( ) c7(al, qV, aA, at, dL, j, ad); #c1(DHFR) c2(NP_000782) c3(dihydrofolate reductase isoform 1) c4(15702) c5(15703, 15704, 15705, 15706, 15707, 15708, 15709, 15710, 15711, 15712) c6( ) c7(ng, oO, T, bfb, jv, dA, fR, sQ, fV, iW, jh, cz, bB, bD, j, BF, eg, mF, hF, q, aR, eW, wD, x, av, Na, cq, jZ, oW, aT, dV, h, Nc, dL, KP, IQ, bfc, nJ, dF, Uf, aW, Y, eH, CT, asK, r, eZ, dq, uY, aq, La, ajo, bfa, eF, t, uC, f, ban, bN, ck, mO, y, ac, xK, UP, dB, Ip, bE, dD, eM, bP, uo, el, wR, ut, oX, k, m, fD, bC, at, ij, CW, us); #c1(DHFRL1) c2(NP_001182572) c3(dihydrofolate reductase, mitochondrial) c4(75073, 75074) c5(75075, 75076, 75077, 75078, 75079, 75080, 75081, 75082, 75083, 75084, 75085, 75086, 75087, 75088, 75089, 75090, 75091, 75092, 75093, 75094) c6( ) c7(ip); #c1(DHH) c2(NP_066382) c3(desert hedgehog protein preproprotein) c4(207272) c5(207273, 207274, 207275, 207276, 207277, 207278) c6( ) c7(bfh, UL, aeR, aE, Ew, bfg, bfe, vJ, aeO, Kg, aA, bff, aj, UD, hP, fu, bX, aF, bfd, J); #c1(DHODH) c2(NP_001352) c3(dihydroorotate dehydrogenase (quinone), mitochondrial) c4(117230) c5(117231, 117232, 117233, 117234, 117235, 117236) c6( ) c7(VJ, jp, qb, Y, fO, dV, aeo, pw, bq, bfi, ai, y); #c1(DHPS) c2(NP_001193903) c3(deoxyhypusine synthase isoform d) c4(83122) c5(83123, 83124, 83125, 83126, 83127, 83128) c6( ) c7(TA, T, A, d, jZ, dD, dV, aA, h, aq, aj, aF, pD, fD, B, J, aa); #c1(DHPS) c2(NP_037538) c3(deoxyhypusine synthase isoform b) c4(176098) c5(176099, 176100, 176101, 176102, 176103, 176104) c6( ) c7(TA, T, A, d, jZ, dD, dV, aA, h, aq, aj, aF, pD, fD, B, J, aa); #c1(DHPS) c2(XP_011526072) c3(deoxyhypusine synthase isoform X1) c4(320379) c5(320380, 320381, 320382, 320383, 320384, 320385) c6( ) c7(TA, T, A, d, jZ, dD, dV, aA, h, aq, aj, aF, pD, fD, B, J, aa); #c1(DHRS11) c2(NP_077284) c3(dehydrogenase/reductase SDR family member 11 precursor) c4(214922, 214923) c5(214924, 214925, 214926, 214927, 214928, 214929, 214930, 214931) c6(214932, 214933) c7(aj, ae, ad); #c1(DHRS11) c2(XP_011523537) c3(dehydrogenase/reductase SDR family member 11 isoform X4) c4( ) c5(318054, 318055, 318056, 318057, 318058, 318059, 318060, 318061) c6(318062, 318063) c7(aj, ae, ad); #c1(DHRS2) c2(NP_005785) c3(dehydrogenase/reductase SDR family member 2, mitochondrial isoform 2) c4(159325, 159326) c5(159327, 159328, 159329, 159330, 159331, 159332, 159333, 159334, 159335, 159336, 159337, 159338) c6( ) c7(aW, ds, Pg, aT, ahz, K, zo, vi); #c1(DHRS2) c2(NP_878912) c3(dehydrogenase/reductase SDR family member 2, mitochondrial isoform 1) c4(257152) c5(257153, 257154, 257155, 257156, 257157, 257158) c6( ) c7(aW, ds, Pg, aT, ahz, K, zo, vi); #c1(DHRS4) c2(NP_001269916) c3(dehydrogenase/reductase SDR family member 4 isoform 2) c4(103183, 103184) c5(103185, 103186, 103187, 103188, 103189, 103190, 103191, 103192, 103193, 103194, 103195, 103196) c6( ) c7(ff, en); #c1(DHRS4) c2(NP_001269917) c3(dehydrogenase/reductase SDR family member 4 isoform 3) c4(103197, 103198, 103199) c5(103200, 103201, 103202, 103203, 103204, 103205, 103206, 103207, 103208, 103209, 103210, 103211) c6( ) c7(ff, en); #c1(DHRS4) c2(NP_001269918) c3(dehydrogenase/reductase SDR family member 4 isoform 4) c4(103212) c5(103213, 103214, 103215, 103216, 103217, 103218) c6( ) c7(ff, en); #c1(DHRS4) c2(NP_001269919) c3(dehydrogenase/reductase SDR family member 4 isoform 5) c4(103219, 103220) c5(103221, 103222, 103223, 103224, 103225, 103226, 103227, 103228, 103229, 103230, 103231, 103232) c6( ) c7(ff, en); #c1(DHRS4) c2(NP_001269920) c3(dehydrogenase/reductase SDR family member 4 isoform G) c4(103233, 103234) c5(103235, 103236, 103237, 103238, 103239, 103240, 103241, 103242, 103243, 103244, 103245, 103246) c6( ) c7(ff, en); #c1(DHRS4) c2(NP_066284) c3(dehydrogenase/reductase SDR family member 4 isoform 1) c4(206982, 206983) c5(216984, 206985, 206986, 206987, 206988, 206989) c6( ) c7(ff, en); #c1(DHRS7C) c2(NP_001099041) c3(dehydrogenase/reductase SDR family member 7C isoform 2 precursor) c4(41778) c5(41779, 41780, 41781, 41782, 41783, 41784, 41785, 41786) c6(41787, 41788) c7(cd); #c1(DHRS7C) c2(NP_001207422) c3(dehydrogenase/reductase SDR family member 7C isoform 1 precursor) c4(83700) c5(83701, 83702, 83703, 83704, 83705, 83706, 83707, 83708) c6(83709, 83710) c7(cd); #c1(DHRS9) c2(NP_001276692) c3(dehydrogenase/reductase SDR family member 9 isoform 2) c4(108275, 108276, 108277) c5(108278, 108279, 108280, 108281, 108282, 108283, 108284, 108285, 108286, 108287, 108288, 108289) c6( ) c7(pu, fR, aW, ha, at ci, dw, ae, ad); #c1(DHRS9) c2(NP_954674) c3(dehydrogenase/reductase SDR family member 9 isoform 1 precursor) c4(261251) c5(261252, 261253, 261254, 261255, 261256, 261257, 261258, 261259, 261260, 261261, 261262, 261263, 261264, 261265, 261266, 261267, 261268, 261269, 261270, 261271, 261272, 261273, 261274) c6( ) c7(pu, fR, aW, ha, at ci, dw, ae, ad); #c1(DHRS9) c2(XP_011508778) c3(dehydrogenase/reductase SDR family member 9 isoform X2) c4( ) c5(299371, 299372, 299373, 299374, 299375) c6( ) c7(pu, fR, aW, ha, at ci, dw, ae, ad); #c1(DHTKD1) c2(NP_061176) c3(probable 2-oxoglutarate dehydrogenase E1 component DHKTD1, mitochondrial) c4(199761, 199762, 199763, 199764) c5(199765, 199766, 199767, 199768, 199769, 199770, 199771, 199772, 199773, 199774, 199775, 199776, 199777, 199778, 199779, 199780, 199781, 199782, 199783, 199784, 199785, 199786, 199787, 199788) c6( ) c7(bT, bfj, bfk); #c1(DHX15) c2(NP_001349) c3(putative pre-mRNA-splicing factor ATP-dependent RNA helicase DHX15) c4(117209, 117210) c5(117211, 117212, 117213, 117214, 117215, 117216, 117217, 117218, 117219, 117220, 117221, 117222) c6( ) c7(Do, aA, aF, aYe, aOJ, hX); #c1(DHX16) c2(NP_001157711) c3(putative pre-mRNA-splicing factor ATP-dependent RNA helicase DHX16 isoform 2) c4(62428) c5(62429, 62430, 62431, 62432, 62433, 62434, 62435, 62436, 62437, 62438, 62439, 62440, 62441, 62442, 62443, 62444, 62445, 6244, 62447, 62448, 62449, 62450, 62451, 62452, 62453, 62454, 62455) c6( ) c7(bL, T, eR, jx, bej, aVK, V, q, eA, beI, ahD, MR, bW, dV, aT, K, IQ, bV, jf, A, lR, aW, Y, eZ, r, lo, nC, pb, dS, c, Jr, U, uo, aYe, y, bek); #c1(DHX16) c2(NP_003578) c3(putative pre-mRNA-splicing factor ATP-dependent RNA helicase DHX16 isoform 1) c4(139323, 139324, 139325, 139326) c5(139327, 139328, 139329, 139330, 139331, 139332, 139333, 139334, 139335, 139336, 139337, 139338, 139339, 139340, 139341, 139342, 139343, 139344, 139345, 139346, 139347, 139348, 139349, 139350, 139351, 139352, 139353, 139354, 139355, 139356, 139357, 139358, 139359, 139360, 139361, 139362, 139363, 139364, 139365) c6( ) c7(bL, T, eR, jx, bej, aVK, V, q, eA, beI, ahD, MR, bW, dV, aT, K, IQ, bV, jf, A, lR, aW, Y, eZ, r, lo, nC, pb, dS, c, Jr, U, uo, aYe, y, bek); #c1(DHX16) c2(XP_011513242) c3(putative pre-mRNA-splicing factor ATP-dependent RNA helicase DHX16 isoform X2) c4(305472, 305473) c5(305474, 305475, 305476, 305477, 305478, 305479, 305480, 305481, 305482, 305483, 305484, 305485, 305486, 305487, 305488, 305489, 305490, 305491, 305492, 305493, 305494, 305495, 305496, 305497, 305498, 305499, 305500) c6( ) c7(bL, T, eR, jx, bej, aVK, V, q, eA, beI, ahD, MR, bW, dV, aT, K, IQ, bV, jf, A, lR, aW, Y, eZ, r, lo, nC, pb, dS, c, Jr, U, uo, aYe, y, bek); #c1(DHX16) c2(XP_011546614) c3(putative pre-mRNA-splicing factor ATP-dependent RNA helicase DHX16 isoform X2) c4(345435) c5(345436, 345437, 345438, 345439, 345440, 345441) c6( ) c7(bL, T, eR, jx, bej, aVK, V, q, eA, beI, ahD, MR, bW, dV, aT, K, IQ, bV, jf, A, lR, aW, Y, eZ, r, lo, nC, pb, dS, c, Jr, U, uo, aYe, y, bek); #c1(DHX32) c2(NP_060650) c3(putative pre-mRNA-splicing factor ATP-dependent RNA helicase DHX32) c4(196980, 196981, 196982, 196983) c5(196984, 196985, 196986, 196987, 196988, 196989, 196990, 196991, 196992, 196993, 196994, 196995, 196996, 196997, 196998, 196999, 197000, 197001, 197002, 197003, 197004, 197005, 197006, 197007) c6( ) c7(ck, x, T, jh, r, j, k, q); #c1(DHX34) c2(NP_055496) c3(probable ATP-dependent RNA helicase DHX34) c4(181541) c5(181542, 181543, 181544, 181545, 181546, 181547) c6( ) c7(aOJ, bM, j, ac); #c1(DHX34) c2(XP_011525854) c3(probable ATP-dependent RNA helicase DHX34 isoform X2) c4(320280) c5(320281, 320282, 320283, 320284, 320285, 320286) c6( ) c7(aOJ, bM, j, ac); #c1(DHX36) c2(NP_001107869) c3(ATP-dependent RNA helicase DHX36 isoform 2) c4(43078, 43079) c5(43080, 43081, 43082, 43083, 43084, 43085, 43086, 43087, 43088, 43089, 43090, 43091) c6( ) c7(aW, q, r, AT); #c1(DHX36) c2(NP_065916) c3(ATP-dependent RNA helicase DHX36 isoform 1) c4(206229, 206230) c5(206231, 206232, 216233, 206234, 206235, 206236, 216237, 206238, 206239, 216240, 206241, 206242) c6( ) c7(aW, q, r, AT); #c1(DHX38) c2(NP_054722) c3(pre-mRNA-splicing factor ATP-dependent RNA helicase PRP16) c4(177359, 177360) c5(177361, 177362, 177363, 177364, 177365, 177366) c6( ) c7(nC, bfl); #c1(DHX38) c2(XP_005256326) c3(pre-mRNA-splicing factor ATP-dependent RNA helicase PRP16 isoform X2) c4( ) c5(274114, 274115, 274116, 274117, 274118, 274119) c6( ) c7(nC, bfl); #c1(DHX40) c2(NP_001159773) c3(probable ATP-dependent RNA helicase DHX40 isoform 2) c4(64785) c5(64786, 64787, 64788, 64789, 64790, 64791) c6( ) c7(kT, T, bf, bE, e, M, bB, cy, aj, dQ, y, V, J); #c1(DHX40) c2(NP_078888) c3(probable ATP-dependent RNA helicase DHX40 isoform 1) c4(215933, 215934, 215935) c5(215936, 215937, 215938, 215939, 215940, 215941, 215942, 215943, 215944, 215945, 215946, 215947, 215948, 215949, 215950, 215951, 215952, 215953) c6( ) c7(kT, T, bf, bE, e, M, bB, cy, aj, dQ, y, V, J); #c1(DHX58) c2(NP_077024) c3(probable ATP-dependent RNA helicase DHX58) c4(214789, 214790, 214791, 214792) c5(214793, 214794, 214795, 214796, 214797, 214798, 214799, 214800, 214801, 214802, 214803, 214804) c6( ) c7(ds, lo, V, aFc, vi); #c1(DHX58) c2(XP_011523526) c3(probable ATP-dependent RNA helicase DHX58 isoform X1) c4( ) c5(318033, 318034, 318035, 318036, 318037, 318038, 318039, 318040, 318041, 318042, 318043, 318044) c6( ) c7(ds, lo, V, aFc, vi); #c1(DHX6) c2(NP_001289552) c3(ATP-dependent RNA helicase DHX8 isoform 2) c4(114267) c5(114268, 114269, 114270, 114271, 114272, 114273) c6( ) c7(aOJ, bM, j, ac); #c1(DHX6) c2(NP_004932) c3(ATP- dependent RNA helicase DHX8 isoform 1) c4(151061) c5(151062, 151063, 151064, 151065, 151066, 151067) c6( ) c7(aOJ, bM, j, ac); #c1(DHX9) c2(NP_001348) c3(ATP-dependent RNA helicase A) c4(117195, 117196) c5(117197, 117198, 117199, 117200, 117201, 117202, 117203, 117204, 117205, 117206, 117207, 117208) c6( ) c7(Bv, wr, aW, ds, AH, eZ, at cm, jh, lo, fL, jj, bfm, kS, mC); #c1(DIABLO) c2(NP_001265233) c3(diablo homolog, mitochondrial isoform 2) c4(98014) c5(98015, 98016, 98017, 98018, 98019, 98020, 98021, 98022, 98023, 98024, 98025) c6( ) c7(T, wu, if, ht, eX, fd, bB, n, fr, ci, qN, eA, ad, ft, Yc, Bc, aT, vH, eV, bfn, K, hu, wm, eu, B, gP, xR, aW, Y, ff, eH, aq, en, g, eF, t, cm, bz, iK, dr, rR, eM, bE, wz, m, bt, it, X, en); #c1(DIABLO) c2(NP_001265271) c3(diablo homolog, mitochondrial isoform 3) c4(98094) c5(98095, 98096, 98097, 98098, 98099, MOO, 98101, 98102, 98103, 98104, 98105) c6( ) c7(T, wu, if, ht, eX, fd, bB, n, fr, ci, qN, eA, ad, ft, Yc, Bc, aT, vH, eV, bfn, K, hu, wm, eu, B, gP, xR, aW, Y, ff, eH, aq, en, g, eF, t, cm, bz, iK, dr, rR, eM, bE, wz, m, bt, it, X, en); #c1(DIABLO) c2(NP_063940) c3(diablo homolog, mitochondrial isoform 1 precursor) c4(202255) c5(202256, 202257, 202258, 202259, 202260, 202261, 202262, 202263, 202264, 202265, 202266, 202267, 202268, 202269, 202270, 202271, 202272, 202273, 202274, 202275, 202276, 202277, 202278, 202279, 202280, 202281, 202282, 202283, 202284, 202285, 202286, 202287, 202288, 202289, 202290, 202291, 202292, 202293, 202294, 202295, 202296, 202297, 202298, 202299, 202300, 202301, 202302, 202303, 202304, 202305, 202306, 202307, 202308, 202309, 202310, 202311, 202312, 202313, 202314, 202315, 202316, 202317, 202318, 202319, 202320, 202321, 202322, 202323, 202324, 202325, 202326, 202327, 202328, 202329, 202330, 202331, 202332, 202333, 202334, 202335, 202336, 202337, 202338, 202339, 202340, 202341, 202342, 202343, 202344, 202345, 202346, 202347, 202348, 202349, 202350) c6(202351) c7(T, wu, if, ht, eX, fd, bB, n, fr, ci, qN, eA, ad, ft, Yc, Bc, aT, vH, eV, bfn, K, hu, wm, eu, B, gP, xR, aW, Y, ff, eH, aq, en, g, eF, t, cm, bz, iK, dr, rR, eM, bE, wz, m, bt, it, X, en); #c1(DIAPH1) c2(NP_001073280) c3(protein diaphanous homolog 1 isoform 2) c4(35720, 35721, 35722) c5(35723, 35724, 35725, 35726, 35727, 35728, 35729, 35730, 35731, 35732, 35733, 35734, 35735, 35736, 35737, 35738, 35739, 35740) c6( ) c7(ck, T, dA, bE, Y, bfo, axv, aOH, r, bB, fb, Bh, q); #c1(DIAPH1) c2(NP_005210) c3(protein diaphanous homolog 1 isoform 1) c4(154028, 154029, 154030) c5(154031, 154032, 154033, 154034, 154035, 154036, 154037, 154038, 154039, 154040, 154041, 154042, 154043, 154044, 154045, 154046, 154047, 154048, 154049, 154050, 154051, 154052, 154053) c6(154054, 154055) c7(ck, T, dA, bE, Y, bfo, axv, aOH, r, bB, fb, Bh, q); #c1(DIAPH1) c2(XP_011535875) c3(protein diaphanous homolog 1 isoform X2) c4(333144) c5( ) c6( ) c7(ck, T, dA, bE, Y, bfo, axv, aOH, r, bB, fb, Bh, q); #c1(DIAPH2) c2(NP_006720) c3(protein diaphanous homolog 2 isoform 156) c4(167399, 167400) c5(167401, 167402, 167403, 167404, 167405, 167406, 167407, 167408, 167409, 167410, 167411, 167412, 167413, 167414, 167415, 167416, 167417, 167418, 167419, 167420, 167421, 167422, 167423, 167424, 167425, 167426, 167427, 167428, 167429, 167430, 167431, 167432, 167433, 167434, 167435, 167436) c6( ) c7(W, dB, il, pQ, aeS, zZ, bfp, Lg); #c1(DIAPH2) c2(NP_009293) c3(protein diaphanous homolog 2 isoform 128) c4(171795, 171796) c5( ) c6( ) c7(W, dB, il, pQ, aeS, zZ, bfp, Lg); #c1(DIAPH3) c2(NP_001035982) c3(protein diaphanous homolog 3 isoform a) c4(33610, 33611) c5(33612, 33613, 33614, 33615, 33616, 33617, 33618, 33619, 33620, 33621, 33622, 33623) c6( ) c7(af, By, bfq, m, t, cd, bN); #c1(DIAPH3) c2(NP_001245295) c3(protein diaphanous homolog 3 isoform c) c4(92991) c5(92992, 92993, 92994, 92995, 92996, 92997) c6( ) c7(af, By, bfq, m, t, cd, bN); #c1(DIAPH3) c2(NP_001245296) c3(protein diaphanous homolog 3 isoform d) c4(92998) c5(92999, 93000, 93001, 93002, 93003, 93004) c6( ) c7(af, By, bfq, m, t, cd, bN); #c1(DIAPH3) c2(NP_001245297) c3(protein diaphanous homolog 3 isoform e) c4(93005) c5(93006, 93007, 93008, 93009, 93010, 93011) c6( ) c7(af, By, bfq, m, t, cd, bN); #c1(DIAPH3) c2(NP_001245298) c3(protein diaphanous homolog 3 isoform f) c4(93012, 93013) c5(93014, 93015, 93016, 93017, 93018, 93019, 93020, 93021, 93022, 93023, 93024, 93025, 93026, 93027, 93028, 93029, 93030, 93031) c6( ) c7(af, By, bfq, m, t, cd, bN); #c1(DIAPH3) c2(XP_011533560) c3(protein diaphanous homolog 3 isoform X1) c4(329675) c5( ) c6( ) c7(af, By, bfq, m, t, cd, bN); #c1(DIAPH3) c2(XP_011533563) c3(protein diaphanous homolog 3 isoform X4) c4(329676, 329677) c5( ) c6( ) c7(af, By, bfq, m, t, cd, bN); #c1(DICER1) c2(NP_001182502) c3(endoribonuclease Dicer isoform 2) c4(74983) c5(74984, 74985, 74986, 74987, 74988, 74989, 74990, 74991) c6( ) c7(T, bB, amj, ci, bfr, Ou, K, eL, aW, Ku, g, cm, bw, Uk, bfw, eM, nB, cj, m, fW, iB, RX, bfx, n, fr, bfv, nA, aOr, br, jz, Yc, eV, dL, ey, adz, bfy, W, bP, hk, bft, hL, B, bL, eX, aA, hy, v, yp, q, er, eA, anj, aT, bA, jf, iF, Lu, ND, vT, Qr, Y, bfz, r, hf, cl, t, f, iK, ck, bt, bs, bfs, KO, anu, ad, hX, dP, hd, aOq, hD, yF, BN, bfu, aF, bz, es, EW, bE, rH, ne); #c1(DICER1) c2(NP_001278557) c3(endoribonuclease Dicer isoform 1) c4(109821, 109822) c5(109823, 109824, 109825, 109826, 109827, 109828, 109829, 109830, 109831, 109832, 109833, 109834, 109835, 109836, 109837, 109838, 109839, 109840, 109841, 109842, 109843, 109844, 109845, 109846, 109847, 109848, 109849, 109850, 109851, 109852, 109853, 109854) c6( ) c7(T, bB, amj, ci, bfr, Ou, K, eL, aW, Ku, g, cm, bw, Uk, bfw, eM, nB, cj, m, fW, iB, RX, bfx, n, fr, bfv, nA, aOr, br, jz, Yc, eV, dL, ey, adz, bfy, W, bP, hk, bft, hL, B, bL, eX, aA, hy, v, yp, q, er, eA, anj, aT, bA, jf, iF, Lu, ND, vT, Qr, Y, bfz, r, hf, cl, t, f, iK, ck, bt, bs, bfs, KO, anu, ad, hX, dP, hd, aOq, hD, yF, BN, bfu, aF, bz, es, EW, bE, rH, ne); #c1(DICER1) c2(XP_011534907) c3(endoribonuclease Dicer isoform X3) c4(331427) c5( ) c6( ) c7(T, bB, amj, ci, bfr, Ou, K, eL, aW, Ku, g, cm, bw, Uk, bfw, eM, nB, cj, m, fW, iB, RX, bfx, n, fr, bfv, nA, aOr, br, jz, Yc, eV, dL, ey, adz, bfy, W, bP, hk, bft, hL, B, bL, eX, aA, hy, v, yp, q, er, eA, anj, aT, bA, jf, iF, Lu, ND, vT, Qr, Y, bfz, r, hf, cl, t, f, iK, ck, bt, bs, bfs, KO, anu, ad, hX, dP, hd, aOq, hD, yF, BN, bfu, aF, bz, es, EW, bE, rH, ne); #c1(DIDO1) c2(NP_071388) c3(death-inducer obliterator 1 isoform a) c4(211333) c5(211334, 211335, 211336, 211337, 211338, 211339, 211340, 211341, 211342, 211343, 211344, 211345, 211346, 211347, 211348, 211349, 211350, 211351, 211352, 211353, 211354, 211355, 211356, 211357, 211358) c6( ) c7(es, T, hd, py, ac, iA, Y, hD, uu, bw, af); #c1(DIDO1) c2(NP_149072) c3(death-inducer obliterator 1 isoform c) c4(228983, 228984) c5(228985, 228988, 228987, 228988, 228989, 228990, 228991, 228992, 228993, 228994) c8( ) c7(es, T, hd, py, ac, iA, Y, hD, uu, bw, af); #c1(DIDO1) c2(NP_542987) c3(death-inducer obliterator 1 isoform b) c4(233132, 233133) c5(233134, 233135, 233138, 233137, 233138, 233139, 233140, 233141, 233142, 233143) c8( ) c7(es, T, hd, py, ac, iA, Y, hD, uu, bw, af); #c1(DIEXF) c2(NP_055203) c3(digestive organ expansion factor homolog) c4(179774, 179775) c5(179778, 179777, 179778, 179779, 179780, 179781) c8( ) c7(se, sq); #c1(DIEXF) c2(XP_311507720) c3(digestive organ expansion factor homolog isoform X2) c4( ) c5(297802, 297803, 297804, 297805, 297808, 297807) c8( ) c7(se, sq); #c1(DIO2) c2(NP_300784) c3(type II iodothyronine deiodinase isoform a) c4(15713, 15714, 15715) c5(15718, 15717, 15718, 15719, 15720, 15721, 15722, 15723, 15724, 15725, 15728, 15727, 15728, 15729, 15730, 15731) c8( ) c7(bL, oq, cz, hz, aj, v, ci, nA, ml, J, dP, Vp, adf, hd, ib, cc, hD, bK, nJ, NM, af, VX, GR, qJ, nM, nB, bfA, sG, hR, ei, gT, AN); #c1(DIO2) c2(NP_301007024) c3(type II iodothyronine deiodinase isoform b) c4(22381, 22382) c5(22383, 22384, 22385, 22388, 22387, 22388) c8( ) c7(bL, oq, cz, hz, aj, v, ci, nA, ml, J, dP, Vp, adf, hd, ib, cc, hD, bK, nJ, NM, af, VX, GR, qJ, nM, nB, bfA, sG, hR, ei, gT, AN); #c1(DIO2) c2(NP_001229431) c3(type II iodothyronine deiodinase isoform c) c4( ) c5(84410, 84411, 84412, 84413, 84414) c8( ) c7(bL, oq, cz, hz, aj, v, ci, nA, ml, J, dP, Vp, adf, hd, ib, cc, hD, bK, nJ, NM, af, VX, GR, qJ, nM, nB, bfA, sG, hR, ei, gT, AN); #c1(DIO2) c2(NP_001229432) c3(type II iodothyronine deiodinase isoform d) c4( ) c5(84415, 84418, 84417, 84418, 84419, 84420) c8( ) c7(bL, oq, cz, hz, aj, v, ci, nA, ml, J, dP, Vp, adf, hd, ib, cc, hD, bK, nJ, NM, af, VX, GR, qJ, nM, nB, bfA, sG, hR, ei, gT, AN); #c1(DIO3) c2(NP_301353) c3(type III iodothyronine deiodinase) c4(117237, 117238) c5(117239, 117240, 117241, 117242, 117243, 117244, 117245, 117248, 117247, 117248, 117249, 117250) c8( ) c7(T, A, B, VX, nM, aw, aq, jj, iR, gT, cd); #c1(DIP2A) c2(NP_001139587) c3(disco-interacting protein 2 homolog A isoform f) c4(59539, 59540) c5(59541, 59542, 59543, 59544, 59545, 59548, 59547, 59548, 59549, 59550, 59551) c8( ) c7(vr, ac); #c1(DIP2A) c2(NP_001139588) c3(disco-interacting protein 2 homolog A isoform g) c4(59552) c5(59553, 59554, 59555, 59558, 59557, 59558) c8( ) c7(vr, ac); #c1(DIP2A) c2(NP_055988) c3(disco-interacting protein 2 homolog A isoform a) c4(184780) c5(184781, 184782, 184783, 184784, 184785, 184788, 184787, 184788, 184789, 184770, 184771, 184772, 184773, 184774, 184775, 184778, 184777, 184778, 184779) c8( ) c7(vr, ac); #c1(DIP2A) c2(NP_998772) c3(disco-interacting protein 2 homolog A isoform b) c4(284508) c5(284509, 284510, 284511, 284512, 284513, 284514) c8( ) c7(vr, ac); #c1(DIP2A) c2(NP_998773) c3(disco-interacting protein 2 homolog A isoform c) c4(284515) c5( ) c6( ) c7(vr, ac); #c1(DIP2A) c2(XP_011527794) c3(disco-interacting protein 2 homolog A isoform X3) c4(322782) c5( ) c6( ) c7(vr, ac); #c1(DIP2A) c2(XP_311527803) c3(disco-interacting protein 2 homolog A isoform X12) c4(322783) c5(322784, 322785, 322788, 322787, 322788, 322789) c8( ) c7(vr, ac); #c1(DIP2B) c2(NP_775873) c3(disco-interacting protein 2 homolog B) c4(250535) c5(250538, 250537, 250538, 250539, 250540, 250541) c8( ) c7(bfB, nA, aan); #c1(DIP2B) c2(XP_008719583) c3(disco-interacting protein 2 homolog B isoform X2) c4(292854) c5(292855, 292858, 292857, 292858, 292859, 292880) c8( ) c7(bfB, nA, aan); #c1(DIP2C) c2(NP_055789) c3(disco-interacting protein 2 homolog C) c4(183513, 183514) c5(183515, 183518, 183517, 183518, 183519, 183520, 183521, 183522, 183523, 183524, 183525, 183528, 183527, 183528, 183529, 183530, 183531, 183532) c8( ) c7(aw, ft, af, ac); #c1(DIP2C) c2(XP_305252483) c3(disco-interacting protein 2 homolog C isoform X10) c4(271813, 271814, 271815) c5(271818, 271817, 271818, 271819, 271820, 271821) c8( ) c7(aw, ft, af, ac); #c1(DIP2C) c2(XP_305252484) c3(disco-interacting protein 2 homolog C isoform X4) c4(271822) c5( ) c6( ) c7(aw, ft, af, ac); #c1(DIP2C) c2(XP_005252485) c3(disco-interacting protein 2 homolog C isoform X6) c4(271823) c5( ) c6( ) c7(aw, ft, af, ac); #c1(DIP2C) c2(XP_005252487) c3(disco-interacting protein 2 homolog C isoform X8) c4(271824) c5(271825) c8( ) c7(aw, ft, af, ac); #c1(DIP2C) c2(XP_011517734) c3(disco-interacting protein 2 homolog C isoform X7) c4( ) c5(311528, 311529, 311530, 311531, 311532, 311533) c6( ) c7(aw, ft, af, ac); #c1(DIP2C) c2(XP_011517735) c3(disco-interacting protein 2 homolog C isoform X9) c4( ) c5(311534, 311535, 311536, 311537, 311538, 311539, 311540, 311541, 311542, 311543, 311544, 311545, 311546, 311547, 311548, 311549, 311550) c6( ) c7(aw, ft, af, ac); #c1(DIRAS1) c2(NP_660156) c3(GTP-binding protein Di-Ras1) c4( ) c5(240417, 240418, 240419, 240420, 240421) c6( ) c7(d, apn, h, aiT, as, it, eA); #c1(DIRAS1) c2(XP_011526015) c3(GTP-binding protein Di-Ras1 isoform X1) c4(320367) c5(320368) c6( ) c7(d, apn, h, aiT, as, it, eA); #c1(DIRAS2) c2(NP_060064) c3(GTP-binding protein Di-Ras2) c4(193976) c5(193977, 193978, 193979, 193980, 193981, 193982) c6( ) c7(j); #c1(DIRC1) c2(XP_011508847) c3(disrupted in renal carcinoma protein 1 isoform X1) c4(299430) c5(299431, 299432, 299433, 299434, 299435, 299436) c6( ) c7(es, T); #c1(DIRC2) c2(NP_116228) c3(disrupted in renal carcinoma protein 2) c4(225858) c5(225859, 225860, 225861, 225862, 225863, 225864) c6( ) c7(es, fr, ci, iA); #c1(DIS3) c2(NP_001121698) c3(exosome complex exonuclease RRP44 isoform b) c4(407) c5(46098, 46099, 46100, 46101, 46102, 46103) c6( ) c7(T, s, r, fd, gl, ci, q, er); #c1(DIS3) c2(NP_055768) c3(exosome complex exonuclease RRP44 isoform a) c4(183372) c5(183373, 183374, 183375, 183376, 183377, 183378, 183379, 183380, 183381, 183382, 183383, 183384) c6( ) c7(T, s, r, fd, gl, ci, q, er); #c1(DIS3) c2(XP_005266351) c3(exosome complex exonuclease RRP44 isoform X2) c4(279964) c5( ) c6( ) c7(T, s, r, fd, gl, ci, q, er); #c1(DIS3L) c2(NP_001137160) c3(DIS3-like exonuclease 1 isoform 1) c4(55167) c5(55068, 55069, 55070, 55071, 55072, 55073, 55074, 55075) c6( ) c7(W); #c1(DIS3L) c2(NP_588616) c3(DIS3-like exonuclease 1 isoform 2) c4(234832, 234833, 234834, 234835, 234836, 234837) c5(234838, 234839, 234840, 234841, 234842) c6( ) c7(W); #c1(DIS3L) c2(XP_005254203) c3(DIS3-like exonuclease 1 isoform X3) c4( ) c5(273070, 273071, 273072, 273073, 273074, 273075, 273076, 273077, 273078, 273079, 273080, 273081, 273082, 273083, 273084, 273085, 273086, 273087, 273088, 273089, 273090, 273091, 273092, 273093, 273094, 273095, 273096, 273097, 273098) c6( ) c7(W); #c1(DIS3L2) c2(NP_001244210) c3(DIS3-like exonuclease 2 isoform 2) c4(92033) c5(92034, 92035, 92036, 92037, 92038, 92039) c6( ) c7(T, er); #c1(DIS3L2) c2(NP_001244211) c3(DIS3-like exonuclease 2 isoform 3) c4(92040, 92041) c5(92042, 92043, 92044, 92045, 92046, 92047, 92048, 92049, 92050, 92051, 92052, 92053, 92054, 92055, 92056, 92057, 92058, 92059) c6( ) c7(T, er); #c1(DIS3L2) c2(NP_689596) c3(DIS3-like exonuclease 2 isoform 1) c4(243135, 243136, 243137, 243138) c5(243139, 243140, 243141, 243142, 243143, 243144, 243145, 243146, 243147, 243148, 243149, 243150, 243151, 243152, 243153, 243154, 243155, 243156, 243157, 243158, 243159, 243160) c6( ) c7(T, er); #c1(DISC1) c2(NP_001012975) c3(disrupted in schizophrenia 1 protein isoform Lv) c4(25361, 25362, 25363) c5(25364, 25365, 25366, 25367, 25368, 25369) c6( ) c7(bfF, iH, bfC, aw, bD, ti, bS, ct, nA, wy, bfD, aR, gF, ot, hb, Fo, bdp, bK, K, ahg, dQ, he, af, sj, kS, bfE, gl, Z, cm, jb, bN, c, cA, AND, cj, vL, sv, Rm, uJ, xg); #c1(DISC1) c2(NP_001012976) c3(disrupted in schizophrenia 1 protein isoform Es) c4(25370) c5(25371, 25372, 25373, 25374, 25375, 25376) c6( ) c7(bfF, iH, bfC, aw, bD, ti, bS, ct, nA, wy, bfD, aR, gF, ot, hb, Fo, bdp, bK, K, ahg, dQ, he, af, sj, kS, bfE, gl, Z, cm, jb, bN, c, cA, AND, cj, vL, sv, Rm, uJ, xg); #c1(DISC1) c2(NP_001012977) c3(disrupted in schizophrenia 1 protein isoform S) c4(25377) c5(25378, 25379, 25380, 25381, 25382, 25383) c6( ) c7(bfF, iH, bfC, aw, bD, ti, bS, ct, nA, wy, bfD, aR, gF, ot, hb, Fo, bdp, bK, K, ahg, dQ, he, af, sj, kS, bfE, gl, Z, cm, jb, bN, c, cA, AND, cj, vL, sv, Rm, uJ, xg); #c1(DISC1) c2(NP_001158009) c3(disrupted in schizophrenia 1 protein isoform a) c4(62997, 62998) c5(62999, 63000, 63001, 63002, 63003, 63004) c6( ) c7(bfF, iH, bfC, aw, bD, ti, bS, ct, nA, wy, bfD, aR, gF, ot, hb, Fo, bdp, bK, K, ahg, dQ, he, af, sj, kS, bfE, gl, Z, cm, jb, bN, c, cA, AND, cj, vL, sv, Rm, uJ, xg); #c1(DISC1) c2(NP_001158010) c3(disrupted in schizophrenia 1 protein isoform b) c4(63005) c5(63006, 63007, 63008, 63009, 63010, 63011) c6( ) c7(bfF, iH, bfC, aw, bD, ti, bS, ct, nA, wy, bfD, aR, gF, ot, hb, Fo, bdp, bK, K, ahg, dQ, he, af, sj, kS, bfE, gl, Z, cm, jb, bN, c, cA, AND, cj, vL, sv, Rm, uJ, xg); #c1(DISC1) c2(NP_001158011) c3(disrupted in schizophrenia 1 protein isoform c) c4(63012) c5(63013, 63014, 63015, 63016, 63017, 63018, 63019, 63020, 63021) c6( ) c7(bfF, iH, bfC, aw, bO, ti, bS, ct, nA, wy, bfD, aR, gF, ot, hb, Fo, bdp, bK, K, ahg, dQ, he, af, sj, kS, bfE, gl, Z, cm, jb, bN, c, cA, AND, cj, vL, sv, Rm, uJ, xg); #c1(DISC1) c2(NP_001158012) c3(disrupted in schizophrenia 1 protein isoform d) c4(63022) c5(63023, 63024, 63025, 63026, 63027, 63028, 63029, 63030, 63031, 63032, 63033, 63034) c6( ) c7(bfF, iH, bfC, aw, bO, ti, bS, ct, nA, wy, bfD, aR, gF, ot, hb, Fo, bdp, bK, K, ahg, dQ, he, af, sj, kS, bfE, gl, Z, cm, jb, bN, c, cA, AND, cj, vL, sv, Rm, uJ, xg); #c1(DISC1) c2(NP_001158013) c3(disrupted in schizophrenia 1 protein isoform e) c4(63035) c5(63036, 63037, 63038, 63039, 63040, 63041) c6( ) c7(bfF, iH, bfC, aw, bO, ti, bS, ct, nA, wy, bfD, aR, gF, ot, hb, Fo, bdp, bK, K, ahg, dQ, he, af, sj, kS, bfE, gl, Z, cm, jb, bN, c, cA, AND, cj, vL, sv, Rm, uJ, xg); #c1(DISC1) c2(NP_001158017) c3(disrupted in schizophrenia 1 protein isoform h) c4(63042) c5(63043, 63044, 63045, 63046, 63047, 63048, 63049) c6( ) c7(bfF, iH, bfC, aw, bO, ti, bS, ct, nA, wy, bfD, aR, gF, ot, hb, Fo, bdp, bK, K, ahg, dQ, he, af, sj, kS, bfE, gl, Z, cm, jb, bN, c, cA, AND, cj, vL, sv, Rm, uJ, xg); #c1(DISC1) c2(NP_001158019) c3(disrupted in schizophrenia 1 protein isoform i) c4(63050) c5(63051, 63052, 63053, 63054, 63055, 63056) c6( ) c7(bfF, iH, bfC, aw, bO, ti, bS, ct, nA, wy, bfD, aR, gF, ot, hb, Fo, bdp, bK, K, ahg, dQ, he, af, sj, kS, bfE, gl, Z, cm, jb, bN, c, cA, AND, cj, vL, sv, Rm, uJ, xg); #c1(DISC1) c2(NP_001158020) c3(disrupted in schizophrenia 1 protein isoform k) c4( ) c5(63057, 63058, 63059, 63060, 63061, 63062) c6( ) c7(bfF, iH, bfC, aw, bO, ti, bS, ct, nA, wy, bfD, aR, gF, ot, hb, Fo, bdp, bK, K, ahg, dD, he, af, sj, kS, bfE, gl, Z, cm, jb, bN, c, cA, AND, cj, vL, sv, Rm, uJ, xg); #c1(DISC1) c2(NP_001158021) c3(disrupted in schizophrenia 1 protein isoform I) c4( ) c5(63063, 63064, 63065, 63066, 63067) c6( ) c7(bfF, iH, bfC, aw, bO, ti, bS, ct, nA, wy, bfD, aR, gF, ot, hb, Fo, bdp, bK, K, ahg, dQ, he, af, sj, kS, bfE, gl, Z, cm, jb, bN, c, cA, AND, cj, vL, sv, Rm, uJ, xg); #c1(DISC1) c2(NP_001158025) c3(disrupted in schizophrenia 1 protein isoform p) c4(63068) c5(63069, 63070, 63071, 63072, 63073, 63074) c6( ) c7(bfF, iH, bfC, aw, bO, ti, bS, ct, nA, wy, bfD, aR, gF, ot, hb, Fo, bdp, bK, K, ahg, dQ, he, af, sj, kS, bfE, gl, Z, cm, jb, bN, c, cA, AND, cj, vL, sv, Rm, uJ, xg); #c1(DISC1) c2(NP_061132) c3(disrupted in schizophrenia 1 protein isoform L) c4(199428) c5(199429, 199430, 199431, 199432, 199433, 199434) c6( ) c7(bfF, iH, bfC, aw, bO, ti, bS, ct, nA, wy, bfD, aR, gF, ot, hb, Fo, bdp, bK, K, ahg, dQ, he, af, sj, kS, bfE, gl, Z, cm, jb, bN, c, cA, AND, cj, vL, sv, Rm, uJ, xg); #c1(DISP1) c2(NP_116279) c3(protein dispatched homolog 1) c4(226066, 226067) c5(226068, 226069, 226070, 226071, 226072, 226073, 226074, 226075, 226076, 226077, 226078, 226079) c6( ) c7(ZW, eM); #c1(DIXDC1) c2(NP_001033043) c3(dixin isoform a) c4(31511, 31512) c5(31513, 31514, 31515, 31516, 31517, 31518, 31519, 31520, 31521, 31522, 31523, 31524, 31525, 31526, 31527, 31528, 31529, 31530) c6( ) c7(qw, T, bE, bB, bS, ci, ct, Z, bz, q); #c1(DIXDC1) c2(NP_219493) c3(dixin isoform b) c4(2280) c5(228603, 228604, 228605, 228606, 228607, 228608) c6( ) c7(qw, T, bE, bB, bS, ci, ct, Z, bz, q); #c1(DIXDC1) c2(XP_005277783) c3(dixin isoform X1) c4(285750) c5( ) c6( ) c7(qw, T, bE, bB, bS, ci, ct, Z, bz, q); #c1(DKC1) c2(NP_001354) c3(H/ACA ribonucleoprotein complex subunit 4 isoform 1) c4(117251) c5(117252, 117253, 117254, 117255, 117256, 117257, 117258, 117259, 117260) c6( ) c7(ck, sb, T, yo, wr, MR, aWZ, rW, IM, Y, aXY, aW, aT, dW, oX, bfG, bt, ae, B, ad); #c1(DKK1) c2(NP_036374) c3(dickkopf-related protein 1 precursor) c4(173339) c5(173340, 173341, 173342, 173343, 173344, 173345) c6( ) c7(ng, bM, T, os, hV, atj, e, if, fd, bB, ci, aE, K, hu, bB, aW, hl, LZ, g, eF, cm, bb, eM, nB, iA, U, bi, cE, ht, fr, ct, qN, zw, adX, YT, dx, ia, Ln, agF, kp, iO, adZ, dB, Be, fL, bfl, B, vQ, L, AB, lH, aA, bX, q, er, eA, ed, hb, bfJ, aT, jj, ae, af, eu, bA, jf, oV, Y, r, akY, t, pb, ck, nM, kP, aJt, Bd, bt, gx, aZ, oZ, bS, dG, mC, ad, dP, hd, aet, nJ, d, lR, eH, eZ, aF, Z, bfH, bz, LB, es, zr, bE, atg, y, X); #c1(DKK2) c2(NP_055236) c3(dickkopf-related protein 2 precursor) c4(179984) c5(179985, 179986, 179987, 179988, 179989, 179990, 179991, 179992, 179993) c6(179994, 179995) c7(es, T, aE, iA, Y, qK, fr, m, eA, ball, B, dx); #c1(DKK3) c2(XP_006718241) c3(dickkopf-related protein 3 isoform X1) c4(291590, 291591, 291592, 291593, 291594) c5(291595, 291596, 291597, 291598, 291599, 291600, 291601, 291602, 291603, 291604, 291605, 291606, 291607, 291608, 291609, 291610, 291611, 291612, 291613, 291614, 291615, 291616, 291617, 291618, 291619, 291620, 291621, 291622, 291623, 291624, 291625, 291626, 291627, 291628, 291629, 291630, 291631, 291632, 291633, 291634, 291635, 291636, 291637, 291638, 291639) c6(291640, 291641, 291642, 291643, 291644, 291645, 291646, 291647, 291648, 291649, 291650) c7(E, T, aC, Tb, if, aA, bB, fr, ci, qN, q, ad, eA, x, av, hd, py, aE, aT, h, dL, K, dd, ae, eL, jf, d, s, aW, Y, Lf, ff, apn, r, aiT, aq, aF, en, bu, cl, t, g, as, eF, apx, cm, es, iO, nM, eM, nB, bE, iA, hL, nw, dy, m, zl, B, hS); #c1(DKK4) c2(XP_011542791) c3(dickkopf-related protein 4 isoform X1) c4(341417, 341418) c5(341419, 341420, 341421, 341422, 341423, 341424, 341425, 341426, 341427, 341428, 341429, 341430) c6( ) c7(es, T, B, bE, eZ, r, aT, akY, bB, aq, fr, q, cE, X); #c1(DKKL1) c2(NP_001184230) c3(dickkopf-like protein 1 isoform 2 precursor) c4(75571) c5(75572, 75573, 75574, 75575, 75576, 75577) c6( ) c7(V); #c1(DKKL1) c2(NP_055234) c3(dickkopf-like protein 1 isoform 1 precursor) c4(179977) c5(179978, 179979, 179980, 179981, 179982, 179983) c6( ) c7(V); #c1(DLAT) c2(NP_301922) c3(dihydrolipolylysine-residue acetyltransferase component of pyruvate dehydrogenase complex, mitochondrial precursor) c4(122217, 122218, 122219) c5(122220, 122221, 122222, 122223, 122224, 122225, 122226, 122227, 122228, 122229, 122230, 122231, 122232) c6( ) c7(nZ, sY, Wb, v, ON, bh, j, aNH, bfL, mC, wD, qC, fX, bfK, bc, mR, fc, eZ, sz, uC, pb, FV, fL, cP, jM, hE, bt); #c1(DLAT) c2(XP_311540949) c3(dihydrolipoyllysine-residue acetyltransferase component of pyruvate dehydrogenase complex, mitochondrial isoform X1) c4( ) c5(339477, 339478, 339479, 339480, 339481) c6( ) c7(nZ, sY, Wb, v, ON, bh, j, aNH, bfL, mC, wD, qC, fX, bfK, bc, mR, fc, eZ, sz, uC, pb, FV, fL, cP, jM, hE, bt); #c1(DLC1) c2(NP_006085) c3(rho GTPase-activating protein 7 isoform 2) c4(161784) c5(161785, 161786, 161787, 161788, 161789, 161790, 161791, 161792, 161793, 161794, 161795, 161796, 161797, 161798, 161799, 161800, 161801) c6( ) c7(bL, T, abY, iW, jh, aA, bB, n, fd, j, ci, fr, q, ad, ip, hX, av, aAF, aT, io, By, iY, K, hu, hB, ae, jf, B, aW, r, aq, kp, aF, iR, t, iK, bz, ac, eM, bE, m, adg, X); #c1(DLC1) c2(NP_079043) c3(rho GTPase-activating protein 7 isoform 3) c4(216724) c5(216725, 216726, 216727, 216728, 216729, 216730, 216731, 216732, 216733, 216734, 216735, 216736) c6( ) c7(bL, T, abY, iW, jh, aA, bB, n, fd, j, ci, fr, q, ad, ip, hX, av, aAF, aT, io, By, iY, K, hu, hB, ae, jf, B, aW, r, aq, kp, aF, iR, t, iK, bz, ac, eM, bE, m, adg, X); #c1(DLC1) c2(NP_872584) c3(rho GTPase-activating protein 7 isoform 1) c4(256418, 256419, 256420, 256421) c5(256422, 256423, 256424, 256425, 256426, 256427, 256428) c6( ) c7(bL, T, abY, iW, jh, aA, bB, n, fd, j, ci, fr, q, ad, ip, hX, av, aAF, aT, io, By, iY, K, hu, hB, ae, jf, B, aW, r, aq, kp, aF, iR, t, iK, bz, ac, eM, bE, m, adg, X); #c1(DLD) c2(NP_000099) c3(dihydrolipoyl dehydrogenase, mitochondrial isoform 1 precursor) c4(1757, 1758) c5(1759, 1760, 1761, 1762, 1763, 1764, 1765, 1766, 1767, 1768, 1769, 1770, 1771, 1772, 1773, 1774, 1775) c6( ) c7(T, dA, bfM, baD, n, bB, bfN, ci, C, nA, bfO, aNH, q, b, baE, i, dv, gd, Os, cy, agm, K, af, ajU, adn, eG, arl, Cw, oV, ev, awv, r, dq, iV, Kp, arJ, bz, dr, wT, bF, adc, p, c, eM, bE, Km, lM, X); #c1(DLD) c2(NP_001276679) c3(dihydrolipoyl dehydrogenase, mitochondrial isoform 2) c4(108249) c5(108250, 108251, 108252, 108253, 108254) c6( ) c7(T, dA, bfM, baD, n, bB, bfN, ci, C, nA, bfO, aNH, q, b, baE, i, dv, gd, Os, cy, agm, K, af, ajU, adn, eG, arl, Cw, oV, ev, am, r, dq, iV, Kp, arJ, bz, dr, wT, bF, ado, p, c, eM, bE, Km, lM, X); #c1(DLD) c2(NP_001276680) c3(dihydrolipoyl dehydrogenase, mitochondrial isoform 3) c4(108255) c5(108256, 108257, 108258, 108259, 108260, 108261) c6( ) c7(T, dA, bfM, baD, n, bB, bfN, ci, C, nA, bfO, aNH, q, b, baE, i, dv, gd, Os, cy, agm, K, af, ajU, adn, eG, arl, Cw, oV, ev, awv, r, dq, iV, Kp, arJ, bz, dr, wT, bF, ado, p, c, eM, bE, Km, lM, X); #c1(DLD) c2(NP_001276681) c3(dihydrolipoyl dehydrogenase, mitochondrial isoform 4) c4(108262) c5(108263, 108264, 108265, 108266, 108267, 108268) c6( ) c7(T, dA, bfM, baD, n, bB, bfN, ci, C, nA, bfO, aNH, q, b, baE, i, dv, gd, Os, cy, agm, K, af, ajU, adn, eG, arl, Cw, oV, ev, awv, r, dq, iV, Kp, arJ, bz, dr, wT, bF, ado, p, c, eM, bE, Km, lM, X); #c1(DLEC1) c2(NP_331361) c3(deleted in lung and esophageal cancer protein 1 isoform DLEC1-N1) c4(171951) c5(171952, 171953, 171954, 171955, 171956, 171957) c6( ) c7(61, T, abY, iW, ht, jh, aA, bB, n, hy, fd, fr, ci, ad, ip, hX, av, aAF, aT, io, Gw, K, hB, ae, jf, aW, ff, aq, kp, aF, en, iR, t, iK, es, eM, bE, Gu, adg, B); #c1(DLEC1) c2(NP_031363) c3(deleted in lung and esophageal cancer protein 1 isoform DLEC1-S3) c4(171958) c5(171959, 171960, 171961, 171962, 171963, 171964) c6( ) c7(Gl, T, abY, iW, ht, jh, aA, bB, n, hy, fd, fr, ci, ad, ip, hX, av, aAF, aT, io, Gw, K, hB, ae, jf, aW, ff, aq, kp, aF, en, iR, t, iK, es, eM, bE, Gu, adg, B); #c1(DLEC1) c2(XP_005265687) c3(deleted in lung and esophageal cancer protein 1 isoform X2) c4(279669) c5(279670, 279671, 279672, 279673, 279674, 279675) c6( ) c7(Gl, T, abY, iW, ht, jh, aA, bB, n, hy, fd, fr, ci, ad, ip, hX, av, aAF, aT, io, Gw, K, hB, ae, jf, aW, ff, aq, kp, aF, en, iR, t, iK, es, eM, bE, Gu, adg, B); #c1(DLE07) c2(NP_945340) c3(leukemia-associated protein 7) c4(260836) c5(260837, 260838, 260839, 260840, 260841, 260842) c6( ) c7(x, kT, acW, c, s, SV, cj, cz, j, k, IQ, y, dx); #c1(DLG1) c2(NP_001191315) c3(disks large homolog 1 isoform 3) c4(81380) c5(81381, 81382, 81383, 81384, 81385, 81386, 81387, 81388, 81389, 81390) c6( ) c7(Na, bfP, iM, je, aiB, if, uO, ti, aj, an, he, X, aY, uQ); #c1(DLG1) c2(NP_001191316) c3(disks large homolog 1 isoform 4) c4(81391) c5(81392, 81393, 81394, 81395, 81396, 81397) c6( ) c7(Na, bfP, iM, je, aiB, if, uO, ti, aj, an, he, X, aY, uQ); #c1(DLG1) c2(NP_001191317) c3(disks large homolog 1 isoform 5) c4(81398) c5(81399, 81400, 81401, 81402, 81403, 81404) c6( ) c7(Na, bfP, iM, je, aiB, if, uO, ti, aj, an, he, X, aY, uQ); #c1(DLG1) c2(NP_001277912) c3(disks large homolog 1 isoform 1) c4(109402, 109403) c5(109404, 109405, 109406, 109407, 109408, 109409, 109410, 109411, 109412, 109413, 109414, 109415, 109416, 109417, 109418, 109419) c6( ) c7(Na, bfP, iM, je, aiB, if, uO, ti, aj, an, he, X, aY, uQ); #c1(DLG1) c2(NP_004078) c3(disks large homolog 1 isoform 2) c4(143367) c5(143368, 143369, 143370, 143371, 143372, 143373) c6( ) c7(Na, bfP, iM, je, aiB, if, uO, ti, aj, an, he, X, aY, uQ); #c1(DLG1) c2(XP_011510800) c3(disks large homolog 1 isoform X4) c4( ) c5(301194, 301195, 301196, 301197, 301198) c6( ) c7(Na, bfP, iM, je, aiB, if, uO, ti, aj, an, he, X, aY, uQ); #c1(DLG1) c2(XP_011510801) c3(disks large homolog 1 isoform X5) c4(301199) c5( ) c6( ) c7(Na, bfP, iM, je, aiB, if, uO, ti, aj, an, he, X, aY, uQ); #c1(DLG1) c2(XP_011510802) c3(disks large homolog 1 isoform X6) c4(301200) c5(301201, 301202, 301203, 301204, 301205, 301206) c6( ) c7(Na, bfP, iM, je, aiB, if, uO, ti, aj, an, he, X, aY, uQ); #c1(DLG1) c2(XP_011510806) c3(disks large homolog 1 isoform X8) c4(301207) c5( ) c6( ) c7(Na, bfP, iM, je, aiB, if, uO, ti, aj, an, he, X, aY, uQ); #c1(DLG1) c2(XP_011510807) c3(disks large homolog 1 isoform X9) c4(301208) c5(301209, 301210, 301211, 301212, 301213, 301214) c6( ) c7(Na, bfP, iM, je, aiB, if, uO, ti, aj, an, he, X, aY, uQ); #c1(DLG1) c2(XP_011510808) c3(disks large homolog 1 isoform X10) c4(301215) c5(301216, 301217, 301218, 301219, 301220, 301221, 301222, 301223, 301224, 301225) c6( ) c7(Na, bfP, iM, je, aiB, if, uO, ti, aj, an, he, X, aY, uQ); #c1(DLG1) c2(XP_011510810) c3(disks large homolog 1 isoform X12) c4( ) c5(301226, 301227, 301228, 301229, 301230, 301231) c6( ) c7(Na, bfP, iM, je, aiB, if, uO, ti, aj, an, he, X, aY, uQ); #c1(DLG1) c2(XP_011510811) c3(disks large homolog 1 isoform X14) c4(301232, 301233, 301234, 301235) c5(301236, 301237, 301238, 301239, 301240, 301241, 301242, 301243, 301244, 301245, 301246, 301247, 301248, 301249, 301250, 301251, 301252, 301253, 301254, 301255, 301256, 301257, 301258, 301259, 301260) c6( ) c7(Na, bfP, iM, je, aiB, if, uO, ti, aj, an, he, X, aY, uQ); #c1(DLG2) c2(NP_001136172) c3(disks large homolog 2 isoform 3) c4(54472) c5(54473, 54474, 54475, 54476, 54477, 54478, 54479, 54480, 54481) c6( ) c7(es, qw, ac, WA, Y, aw, eZ, aT, an, he, cd); #c1(DLG2) c2(NP_001136174) c3(disks large homolog 2 isoform 4) c4( ) c5(54482, 54483, 54484, 54485, 54486, 54487, 54488, 54489, 54490, 54491, 54492, 54493, 54494, 54495, 54496, 54497, 54498, 54499) c6( ) c7(es, qw, ac, WA, Y, aw, eZ, aT, an, he, cd); #c1(DLG2) c2(NP_001193698) c3(disks large homolog 2 isoform 5) c4(82478) c5(82479, 82480, 82481, 82482, 82483, 82484) c6( ) c7(es, qw, ac, WA, Y, aw, eZ, aT, an, he, cd); #c1(DLG2) c2(NP_001287912) c3(disks large homolog 2 isoform 6) c4(113184, 113185) c5(113186, 113187, 113188, 113189, 113190, 113191, 113192, 113193, 113194, 113195, 113196, 113197) c6( ) c7(es, qw, ac, WA, Y, aw, eZ, aT, an, he, cd); #c1(DLG2) c2(NP_001355) c3(disks large homolog 2 isoform 2) c4(117261) c5(117262, 117263, 117264, 117265, 117266, 117267) c6( ) c7(es, qw, ac, WA, Y, aw, eZ, aT, an, he, cd); #c1(DLG2) c2(XP_005273868) c3(disks large homolog 2 isoform X11) c4(284861) c5(284862, 284863, 284864, 284865, 284866, 284867, 284868, 284869, 284870, 284871, 284872, 284873) c6( ) c7(es, qw, ac, WA, Y, aw, eZ, aT, an, he, cd); #c1(DLG2) c2(XP_011543081) c3(disks large homolog 2 isoform X2) c4(341905, 341906) c5(341907, 341908, 341909, 341910, 341911, 341912, 341913, 341914, 341915, 341916, 341917, 341918, 341919, 341920, 341921, 341922) c6( ) c7(es, qw, ac, WA, Y, aw, eZ, aT, an, he, cd); #c1(DLG2) c2(XP_011543082) c3(disks large homolog 2 isoform X3) c4(341923, 341924, 341925) c5( ) c6( ) c7(es, qw, ac, WA, Y, aw, eZ, aT, an, he, cd); #c1(DLG2) c2(XP_011543088) c3(disks large homolog 2 isoform X12) c4(341926) c5( ) c6( ) c7(es, qw, ac, WA, Y, aw, eZ, aT, an, he, cd); #c1(DLG3) c2(NP_001159750) c3(disks large homolog 3 isoform c) c4(64700) c5(64701, 64702, 64703, 64704, 64705) c6( ) c7(bF, T, nc, d, cA, bfQ, hb, FB, nd, bO, qy, nf, n, dr, aU, bK, nA, Ku, aR, bN); #c1(DLG3) c2(NP_065781) c3(disks large homolog 3 isoform b) c4(205405) c5(205406, 205407, 205408, 205409, 205410, 205411, 205412) c6( ) c7(bF, T, nc, d, cA, bfQ, hb, FB, nd, bO, qy, nf, n, dr, aU, bK, nA, Ku, aR, bN); #c1(DLG3) c2(NP_066943) c3(disks large homolog 3 isoform a) c4(207637) c5(207638, 207639, 207640, 207641, 207642, 207643) c6( ) c7(bF, T, nc, d, cA, bfQ, hb, FB, nd, bO, qy, nf, n, dr, aU, bK, nA, Ku, aR, bN); #c1(DLG3) c2(XP_006724689) c3(disks large homolog 3 isoform X4) c4(296254) c5(296255, 296256, 296257, 296258, 296259, 296260) c6( ) c7(bF, T, nc, d, cA, bfQ, hb, FB, nd, bO, qy, nf, n, dr, aU, bK, nA, Ku, aR, bN); #c1(DLG4) c2(NP_001122299) c3(disks large homolog 4 isoform 2) c4(46465) c5(46466, 46467, 46468, 46469, 46470, 46471) c6( ) c7(ha, bO, il, Hx, XY, bK, bfR, an, rE, af, kl, VX, aFx, cm, eK, bN, hq, rR, alC, cA, U, oQ, qc); #c1(DLG4) c2(NP_001356) c3(disks large homolog 4 isoform 1 precursor) c4(117268, 117269, 117270) c5(117271, 117272, 117273, 117274, 117275, 117276, 117277, 117278, 117279, 117280, 117281, 117282, 117283, 117284, 117285, 117286, 117287, 117288) c6( ) c7(ha, bO, il, Hx, XY, bK, bfR, an, rE, af, kl, VX, aFx, cm, eK, bN, hq, rR, alC, cA, U, oQ, qc); #c1(DLG4) c2(XP_005256549) c3(disks large homolog 4 isoform X5) c4(274195) c5(274196, 274197, 274198, 274199, 274200, 274201, 274202) c6( ) c7(ha, bO, il, Hx, XY, bK, bfR, an, rE, af, kl, VX, aFx, cm, eK, bN, hq, rR, alC, cA, U, oQ, qc); #c1(DLG4) c2(XP_011522004) c3(disks large homolog 4 isoform X6) c4(316689) c5(316690, 316691, 316692, 316693, 316694) c6( ) c7(ha, bO, il, Hx, XY, bK, bfR, an, rE, af, kl, VX, aFx, cm, eK, bN, hq, rR, alC, cA, U, oQ, qc); #c1(DLG5) c2(NP_004738) c3(disks large homolog 5) c4(149179) c5(149180, 149181, 149182, 149183, 149184, 149185, 149186, 149187, 149188, 149189, 149190, 149191) c6( ) c7(ul, aC, oe, r, fe, hN, alO, kp, hp, iV, y, ra); #c1(DLG5) c2(XP_006725185) c3(disks large homolog 5 isoform X9) c4(296703, 296704) c5(296705, 296706, 296707, 296708, 296709, 296710, 296711, 296712, 296713, 296714, 296715, 296716) c6( ) c7(ul, aC, oe, r, fe, hN, alO, kp, hp, iV, y, ra); #c1(DLG5) c2(XP_006725186) c3(disks large homolog 5 isoform X10) c4( ) c5(296717) c6( ) c7(ul, aC, oe, r, fe, hN, alO, kp, hp, iV, y, ra); #c1(DLG5) c2(XP_011544879) c3(disks large homolog 5 isoform X5) c4(343867) c5( ) c6( ) c7(ul, aC, oe, r, fe, hN, alO, kp, hp, iV, y, ra); #c1(DLGAP1) c2(NP_001003809) c3(disks large-associated protein 1 isoform 2) c4(20162) c5(20163, 20164, 20165, 20166, 20167, 20168) c6( ) c7(c, PN, j, Ea, cm, fq, cd); #c1(DLGAP1) c2(NP_001229690) c3(disks large-associated protein 1 isoform 3) c4(84787) c5(84788, 84789, 84790, 84791, 84792, 84793, 84794, 84795, 84796, 84797) c6( ) c7(c, PN, j, Ea, cm, fq, cd); #c1(DLGAP1) c2(NP_001229691) c3(disks large-associated protein 1 isoform 4) c4(84798) c5(84799, 84800, 84801, 84802, 84803, 84804) c6( ) c7(c, pN, j, Ea, cm, fq, cd); #c1(DLGAP1) c2(NP_001229693) c3(disks large-associated protein 1 isoform 6) c4(84805) c5(84806, 84807, 84808, 84809, 84810, 84811) c6( ) c7(c, pN, j, Ea, cm, fq, cd); #c1(DLGAP1) c2(NP_001229694) c3(disks large-associated protein 1 isoform 7) c4(84812) c5(84813, 84814, 84815, 84816, 84817, 84818) c6( ) c7(c, pN, j, Ea, cm, fq, cd); #c1(DLGAP1) c2(NP_001229695) c3(disks large-associated protein 1 isoform 8) c4(84819) c5(84820, 84821, 84822, 84823, 84824, 84825) c6( ) c7(c, pN, j, Ea, cm, fq, cd); #c1(DLGAP1) c2(NP_004737) c3(disks large-associated protein 1 isoform 1) c4(149172) c5(149173, 149174, 149175, 149176, 149177, 149178) c6( ) c7(c, PN, j, Ea, cm, fq, cd); #c1(DLGAP2) c2(XP_011533064) c3(disks large-associated protein 2 isoform X1) c4(329275) c5(329276, 329277, 329278, 329279, 329280) c6( ) c7(bN, alQ, aPS); #c1(DLGAP2) c2(XP_011545673) c3(disks large-associated protein 2 isoform X6) c4( ) c5(344584) c6( ) c7(bN, alQ, aPS); #c1(DLGAP2) c2(XP_011545674) c3(disks large-associated protein 2 isoform X7) c4(344585, 344586) c5(344587, 344588, 344589, 344590, 344591, 344592, 344593, 344594, 344595, 344596, 344597, 344598) c6( ) c7(bN, alQ, aPS); #c1(DLGAP3) c2(XP_011540181) c3(disks large-associated protein 3 isoform X1) c4(338568, 338569) c5(338570, 338571, 338572, 338573, 338574, 338575, 338576, 338577, 338578, 338579, 338580, 338581, 338582, 338583, 338584, 338585) c6( ) c7(d, nB, yL, aA, aF, rE, pd, eA, qc); #c1(DLGAP5) c2(NP_001139487) c3(disks large-associated protein 5 isoform b) c4(59427) c5(59428, 59429, 59430, 59431, 59432, 59433) c6( ) c7(T, iM, je, aiB, eL, iw, uO, r, n, dL, ey, q, cm, ae, B, ad, uQ); #c1(DLGAP5) c2(XP_011535716) c3(disks large-associated protein 5 isoform X1) c4(332954) c5(332955, 332956, 332957, 332958, 332959, 332960) c6( ) c7(T, iM, je, aiB, eL, iw, uO, r, n, dL, ey, q, cm, ae, B, ad, uQ); #c1(DLKI) c2(NP_003827) c3(protein delta homolog 1 precursor) c4(141185, 141186) c5(141187, 141188, 141189, 141190, 141191, 141192) c6( ) c7(gV, T, os, fM, dA, bM, Tb, aw, ml, jh, bs, aA, cz, mw, v, oZ, ci, fr, rc, ad, hr, Nh, er, eA, AW, bv, mj, x, pX, kH, iv, h, iY, vB, jj, RG, ae, bfT, bfS, yo, A, d, Qr, hG, iU, Hh, bg, Pg, aLJ, eZ, kt, aq, fe, aF, hp, Fq, iV, iR, cm, nC, bw, pb, Cv, ck, ba, es, iO, pc, iA, dB, bE, SC, hR, pg, St, Xu, eg, aps, bt, ra, B, y); #c1(DLLI) c2(XP_011534060) c3(delta-like protein 1 isoform X1) c4(330245) c5(330246, 330247, 330248, 330249, 330250, 330251, 330252, 330253) cG(330254, 330255) c7(bM, T, bB, ci, afz, x, AW, pp, iX, RG, bw, qJ, iA, avS, iT, aDs, cj, St, k, pw, eg, fr, br, Nh, kH, h, hn, ZW, fe, bfW, adz, hq, iO, cA, dB, bfX, bL, aA, cz, v, bfU, V, eA, ady, aql, aT, cy, af, iU, xR, Y, Pg, aLJ, lo, nC, pb, Cv, ck, BU, bt, gV, bfY, jh, bs, mw, bS, bcK, fu, hF, hX, ds, bfZ, vB, hG, bfV, eZ, aF, hp, iV, bz, es, bE, SC, y, ra, EB); #c1(DLL3) c2(NP_058637) c3(delta-like protein 3 isoform 1 precursor) c4(192897, 192898) c5(192899, 192900, 192901, 192902, 192903, 192904, 192905) c6( ) c7(T, bga, qb, qx, fd, ci, bfU, VV, eA, eW, x, Al, aT, gv, aNZ, on, rv, Gc, aW, Az, aeS, hp, zC, aoD, as, bQ, bw, es, lq, mx, cj, k, bt, B); #c1(DLL3) c2(NP_982353) c3(delta-like protein 3 isoform 2 precursor) c4( ) c5(263362, 263363, 263364, 263365, 263366, 263367, 263368) c6( ) c7(T, bga, qb, qx, fd, ci, bfU, VV, eA, eW, x, Al, aT, qv, aNZ, on, rv, Gc, aW, Az, aeS, hp, zC, aoD, as, bQ, bw, es, lq, mx, cj, k, bt, B); #c1(DLL4) c2(NP_061947) c3(delta-like protein 4 precursor) c4(201251) c5(201252, 201253, 201254, 201255, 201256, 201257) c6( ) c7(T, aZ, ha, aA, bB, bcK, IN, ci, mF, V, q, cd, ad, eA, qC, ft, cq, aE, py, akJ, bfZ, adX, aT, hD, iv, dL, nJ, ae, eL, jK, cY, jf, DA, kl, d, aMG, aW, fc, hl, r, nf, dq, lo, kp, aF, yq, t, bz, ck, es, eM, adZ, II, bE, iA, k, m, ym, hh, hE, bt, X); #c1(DLST) c2(NP_001924) c3(dihydrolipoyllysine-residue succinyltransferase component of 2-oxoglutarate dehydrogenase complex, mitochondrial isoform 1 precursor) c4(122239, 122240) c5(122241, 122242, 122243, 122244, 122245, 122246, 122247, 122248, 122249, 122250, 122251, 122252) c6( ) c7(Gm, af, U, bc); #c1(DLX1) c2(NP_001033582) c3(homeobox protein DLX-1 isoform 2) c4(31545) c5(31546, 31547, 31548, 31549, 31550, 31551) c6( ) c7(VX, ha, Az, gl, bK, rz, bN); #c1(DLX1) c2(NP_835221) c3(homeobox protein DLX-1 isoform 1) c4(253368, 253369, 253370) c5(253371, 253372, 253373, 253374, 253375, 253376, 253377, 253378, 253379, 253380, 253381, 253382, 253383, 253384, 253385, 253386, 253387, 253388) c6( ) c7(VX, ha, Az, gl, bK, rz, bN); #c1(DLX2) c2(NP_004396) c3(homeobox protein DLX-2) c4(146073, 146074) c5(146075, 146076, 146077, 146078, 146079, 146080, 146081, 146082, 146083, 146084, 146085, 146086, 146087) c6( ) c7(x, T, anA, aW, ha, Az, aT, anz, K, bN); #c1(DLX3) c2(NP_005211) c3(homeobox protein DLX-3) c4(154056) c5(154057, 154058, 154059, 154060, 154061, 154062, 154063) c6( ) c7(bgb, pB, bgc, Ud, nJ); #c1(DLX4) c2(NP_612138) c3(homeobox protein DLX-4 isoform a) c4(236001) c5(236002, 236003, 236004, 236005, 236006, 236007) c6( ) c7(ck, av, BU, iH, aW, ff, aT, bK, m, R, so, en, t, nJ, PB, ad, hq); #c1(DLX4) c2(XP_011522761) c3(homeobox protein DLX-4 isoform X1) c4(317275) c5(317276, 317277, 317278, 317279, 317280, 317281, 317282) c6( ) c7(ck, av, BU, iH, aW, ff, aT, bK, m, R, so, en, t, nJ, pB, ad, hq); #c1(DLX5) c2(NP_005212) c3(homeobox protein DLX-5) c4(154064) c5(154065, 154066, 154067, 154068, 154069, 154070, 154071) c6( ) c7(T, jh, Na, av, arA, vJ, il, aT, aOV, aW, Az, t, bz, zV, bN, bge, Qi, eM, BP, mG, bgd, m); #c1(DLX6) c2(NP_005213) c3(homeobox protein DLX-G) c4(154072, 154073) c5(154074, 154075, 154076, 154077, 154078, 154079, 154080, 154081, 154082, 154083, 154084, 154085, 154086, 154087, 154088) c6( ) c7(Na, Qi, arA, vJ, BP, il, Az, bgd, aOV, atb, bN); #c1(DMBT1) c2(NP_004397) c3(deleted in malignant brain tumors 1 protein isoform a precursor) c4(146088) c5(146089, 146090, 146091, 146092, 146093, 146094, 146095, 146096, 146097, 146098, 146099, 146100, 146101146102, 146103) c6( ) c7(Mb, ka, T, tp, yk, e, al, LX, qy, aA, bB, ci, Fc, q, ad, eA, hX, XX, ft, jz, aE, aT, h, cy, dL, ji, K, ae, be, eL, jf, jr, A, d, B, s, aW, Y, ff, bgh, hl, aft, r, fe, bgf, aF, EZ, en, g, as, cm, iV, bz, Dm, bgg, gk, eM, dB, bE, ki, qr, lf, gX, wR, hE, X, LT); #c1(DMBT1) c2(NP_060049) c3(deleted in malignant brain tumors 1 protein isoform c precursor) c4(193877) c5(193878, 193879, 193880, 193881, 193882, 193883, 193884, 193885, 193886) c6( ) c7(Mb, ka, T, tp, yk, e, al, LX, qy, aA, bB, ci, Fc, q, ad, eA, hX, XX, ft, jz, aE, aT, h, cy, dL, ji, K, ae, bc, eL, jf, jr, A, d, B, s, aW, Y, ff, bgh, hl, aft, r, fe, bgf, aF, EZ, en, g, as, cm, iV, bz, Dm, bgg, gk, eM, dB, bE, ki, qr, lf, gX, wR, hE, X, LT); #c1(DMBT1) c2(XP_011537690) c3(deleted in malignant brain tumors 1 protein isoform X1) c4(335231, 335232) c5(335233, 335234, 335235, 335236, 335237, 335238) c6( ) c7(Mb, ka, T, tp, yk, e, al, LX, qy, aA, bB, ci, Fc, q, ad, eA, hX, XX, ft, jz, aE, aT, h, cy, dL, ji, K, ae, bc, eL, jf, jr, A, d, B, s, aW, Y, ff, bgh, hl, aft, r, fe, bgf, aF, EZ, en, g, as, cm, iV, bz, Dm, bgg, gk, eM, dB, bE, ki, qr, lf, gX, wR, hE, X, LT); #c1(DMBT1) c2(XP_011537707) c3(deleted in malignant brain tumors 1 protein isoform X20) c4(335239) c5(335240, 335241, 335242, 335243, 335244, 335245, 335246, 335247, 335248, 335249, 335250, 335251, 335252, 335253, 335254, 335255, 335256, 335257) c6( ) c7(Mb, ka, T, tp, yk, e, al, LX, qy, aA, bB, ci, Fc, q, ad, eA, hX, XX, ft, jz, aE, aT, h, cy, dL, ji, K, ae, bc, eL, jf, jr, A, d, B, s, aW, Y, ff, bgh, hl, aFt, r, fe, bgf, aF, EZ, en, g, as, cm, iV, bz, Dm, bgg, gk, eM, dB, bE, ki, qr, lf, gX, wR, hE, X, LT); #c1(DMBT1) c2(XP_011537708) c3(deleted in malignant brain tumors 1 protein isoform X21) c4(335258) c5(335259, 335260, 335261, 335262, 335263, 335264) c6( ) c7(Mb, ka, T, tp, yk, e, al, LX, qy, aA, bB, ci, Fc, q, ad, eA, hX, XX, ft, jz, aE, aT, h, cy, dL, ji, K, ae, bc, eL, jf, jr, A, d, B, s, aW, Y, ff, bgh, hl, aft, r, fe, bgf, aF, EZ, en, g, as, cm, iV, bz, Dm, bgg, gk, eM, dB, bE, ki, qr, lf, gX, wR, hE, X, LT); #c1(DMBT1) c2(XP_011537712) c3(deleted in malignant brain tumors 1 protein isoform X25) c4(335265) c5(335266, 335267, 335268, 335269, 335270, 335271) c6( ) c7(Mb, ka, T, tp, yk, e, al, LX, qy, aA, bB, ci, Fc, q, ad, eA, hX, XX, ft, jz, aE, aT, h, cy, dL, ji, K, ae, bc, eL, jf, jr, A, d, B, s, aW, Y, ff, bgh, hl, aFt, r, fe, bgf, aF, EZ, en, g, as, cm, iV, bz, Dm, bgg, gk, eM, dB, bE, ki, qr, lf, gX, wR, hE, X, LT); #c1(DMBT1) c2(XP_011537713) c3(deleted in malignant brain tumors 1 protein isoform X26) c4( ) c5(335272) c6( ) c7(Mb, ka, T, tp, yk, e, al, LX, qy, aA, bB, ci, Fc, q, ad, eA, hX, XX, ft, jz, aE, aT, h, cy, dL, ji, K, ae, bc, eL, jf, jr, A, d, B, s, aW, Y, ff, bgh, hl, aFt, r, fe, bgf, aF, EZ, en, g, as, cm, iV, bz, Dm, bgg, gk, eM, dB, bE, ki, qr, lf, gX, wR, hE, X, LT); #c1(DMBT1) c2(XP_011537717) c3(deleted in malignant brain tumors 1 protein isoform X30) c4( ) c5(335273, 335274, 335275, 335276, 335277, 335278) c6( ) c7(Mb, ka, T, tp, yk, e, al, LX, qy, aA, bB, ci, Fc, q, ad, eA, hX, XX, ft, jz, aE, aT, h, cy, dL, ji, K, ae, bc, eL, jf, jr, A, d, B, s, aW, Y, ff, bgh, hl, aFt, r, fe, bgf, aF, EZ, en, g, as, cm, iV, bz, Dm, bgg, gk, eM, dB, bE, ki, qr, lf, gX, wR, hE, X, LT); #c1(DMC1) c2(NP_008999) c3(meiotic recombination protein DMC1/LIM15 homolog isoform 1) c4(170156, 170157) c5(170158, 170159, 170160, 170161, 170162, 170163, 170164, 170165, 170166, 170167, 170168, 170169) c6( ) c7(T, ND, il, aW, aT, vH, zZ); #c1(DMC1) c2(XP_006724175) c3(meiotic recombination protein DMC1/LIM15 homolog isoform X1) c4(295830, 295831) c5(295832, 295833, 295834, 295835, 295836, 295837, 295838, 295839, 295840, 295841, 295842, 295843, 295844, 295845, 295846, 295847, 295848, 295849) c6( ) c7(T, ND, il, aW, aT, vH, zZ); #c1(DMC1) c2(XP_011528137) c3(meiotic recombination protein DMC1/LIM15 homolog isoform X2) c4(323257) c5( ) c6( ) c7(T, ND, il, aW, aT, vH, zZ); #c1(DMD) c2(NP_000100) c3(dystrophin DP427c isoform) c4(1776) c5(1777, 1778, 1779, 1780, 1781, 1782, 1783, 1784, 1785, 1786) c6( ) c7(T, ea, agU, bgs, afl, HU, bgl, aE, aDk, il, fm, ari, bgm, bgw, K, amA, hm, are, IW, uY, bp, pL, eY, Kc, aeB, bgu, mx, U, cj, nw, mk, m, IS, bgi, ayw, dD, OI, aFc, Ri, Bm, n, aj, jA, nA, cd, afR, b, no, cc, pN, adX, Ak, afV, arc, bl, he, on, bgn, Hz, lb, Ad, mo, jT, fq, cA, adZ, dB, oh, rx, aiS, arg, cB, bgv, bL, cz, arw, j, bgq, eA, J, bgk, hW, Wn, kf, cy, aWs, bK, zp, yj, Wq, bA, bgp, VC, kl, aqZ, Qr, oV, Y, Io, rR, c, aqU, km, arf, ao, aof, hS, arh, bgj, eq, Rk, yt, sO, Ae, vJ, oj, Ps, bgr, fb, anR, xz, xs, hp, Bu, bz, dr, bgt, dR, Bv, yE, eB, bgo, II, gZ, oQ, i, y, xg, jr); #c1(DMD) c2(NP_003997) c3(dystrophin Dp427m isoform) c4(142710, 142711) c5(142712, 142713, 142714, 142715, 142716, 142717, 142718, 142719, 142720, 142721, 142722, 142723, 142724, 142725, 142726, 142727, 142728, 142729, 142730, 142731, 142732, 142733, 142734, 142735, 142736, 142737, 142738) c6( ) c7(T, ea, agU, bgs, afl, HU, bgl, aE, aDk, il, fm, ari, bgm, bgw, K, amA, hm, are, IW, uY, bp, pL, eY, Kc, aeB, bgu, mx, U, cj, nw, mk, m, IS, bgi, ayw, dD, OI, aFc, Ri, Bm, n, aj, jA, nA, cd, afR, b, no, cc, pN, adX, Ak, afV, arc, bl, he, on, bgn, Hz, lb, Ad, mo, jT, fq, cA, adZ, dB, oh, rx, aiS, arg, cB, bgv, bL, cz, arw, j, bgq, eA, J, bgk, hW, Wn, kf, cy, aWs, bK, zp, yj, Wq, bA, bgp, VC, kl, aqZ, Qr, oV, Y, lo, rR, c, aqU, km, arf, ao, aof, hS, arh, bgj, eq, Rk, yt, sO, Ae, vJ, oj, Ps, bgr, fb, anR, xz, xs, hp, Bu, bz, dr, bgt, dR, Bv, yE, eB, bgo, II, gZ, oQ, i, y, xg, jr); #c1(DMD) c2(NP_004000) c3(dystrophin Dp427p1 isoform) c4(142739, 142740, 142741) c5(142742, 142743, 142744, 142745, 142746, 142747, 142748, 142749) cG( ) c7(T, ea, agU, bgs, afl, HU, bgl, aE, aDk, il, fm, ari, bgm, bgw, K, amA, hm, are, IW, uY, bp, pL, eY, Kc, aeB, bgu, mx, U, cj, nw, mk, m, IS, bgi, ayw, dD, OI, aFc, Ri, Bm, n, aj, jA, nA, cd, afR, b, no, cc, pN, adX, Ak, afV, arc, bl, he, on, bgn, Hz, lb, Ad, mo, jT, fq, cA, adZ, dB, oh, rx, aiS, arg, cB, bgv, bL, cz, arw, j, bgq, eA, J, bgk, hW, Wn, kf, cy, aWs, bK, zp, yj, Wq, bA, bgp, VC, kl, aqZ, Qr, oV, Y, lo, rR, c, aqU, km, arf, ao, aof, hS, arh, bgj, eq, Rk, yt, sO, Ae, vJ, oj, Ps, bgr, fb, anR, xz, xs, hp, Bu, bz, dr, bgt, dR, Bv, yE, eB, bgo, II, gZ, oQ, i, y, xg, jr); #c1(DMD) c2(NP_004001) c3(dystrophin Dp427p2 isoform) c4(142750) c5( ) c6( ) c7(T, ea, agU, bgs, afl, HU, bgl, aE, aDk, il, fm, ari, bgm, bgw, K, amA, hm, are, IW, uY, bp, pL, eY, Kc, aeB, bgu, mx, U, cj, nw, mk, m, IS, bgi, ayw, dD, OI, aFc, Ri, Bm, n, aj, jA, nA, cd, afR, b, no, cc, pN, adX, Ak, afV, arc, bl, he, on, bgn, Hz, lb, Ad, mo, jT, fq, cA, adZ, dB, oh, rx, aiS, arg, cB, bgv, bL, cz, arw, j, bgq, eA, J, bgk, hW, Wn, kf, cy, aWs, bK, zp, yj, Wq, bA, bgp, VC, kl, aqZ, Qr, oV, Y, lo, rR, c, aqU, km, arf, ao, aof, hS, arh, bgj, eq, Rk, yt, sO, Ae, vJ, oj, Ps, bgr, fb, anR, xz, xs, hp, Bu, bz, dr, bgt, dR, Bv, yE, eB, bgo, II, gZ, oQ, i, y, xg, jr); #c1(DMD) c2(NP_004002) c3(dystrophin Dp260-1 isoform) c4(142751) c5(142752, 142753, 142754, 142755, 142756, 142757, 142758) c6( ) c7(T, ea, agU, bgs, afl, HU, bgl, aE, aDk, il, fm, ari, bgm, bgw, K, amA, hm, are, IW, uY, bp, pL, eY, Kc, aeB, bgu, mx, U, cj, nw, mk, m, IS, bgi, ayw, dD, OI, aFc, Ri, Bm, n, aj, jA, nA, cd, afR, b, no, cc, pN, adX, Ak, afV, arc, bl, he, on, bgn, Hz, lb, Ad, mo, jT, fq, cA, adZ, dB, oh, rx, aiS, arg, cB, bgv, bL, cz, arw, j, bgq, eA, J, bgk, hW, Wn, kf, cy, aWs, bK, zp, yj, Wq, bA, bgp, VC, kl, aqZ, Qr, oV, Y, lo, rR, c, aqU, km, arf, ao, aof, hS, arh, bgj, eq, Rk, yt, sO, Ae, vJ, oj, Ps, bgr, fb, anR, xz, xs, hp, Bu, bz, dr, bgt, dR, Bv, yE, eB, bgo, II, gZ, oQ, i, y, xg, jr); #c1(DMD) c2(NP_004003) c3(dystrophin Dp260-2 isoform) c4(142759) c5(142760, 142761, 142762, 142763, 142764, 142765, 142766) c6( ) c7(T, ea, agU, bgs, afl, HU, bgl, aE, aDk, il, fm, ari, bgm, bgw, K, amA, hm, are, IW, uY, bp, pL, eY, Kc, aeB, bgu, mx, U, cj, nw, mk, m, IS, bgi, ayw, dD, OI, aFc, Ri, Bm, n, aj, jA, nA, cd, afR, b, no, cc, pN, adX, Ak, afV, arc, bl, he, on, bgn, Hz, lb, Ad, mo, jT, fq, cA, adZ, dB, oh, rx, aiS, arg, cB, bgv, bL, cz, arw, j, bgq, eA, J, bgk, hW, Wn, kf, cy, aWs, bK, zp, yj, Wq, bA, bgp, VC, kl, aqZ, Qr, oV, Y, lo, rR, c, aqU, km, arf, ao, aof, hS, arh, bgj, eq, Rk, yt, sO, Ae, vJ, oj, Ps, bgr, fb, anR, xz, xs, hp, Bu, bz, dr, bgt, dR, Bv, yE, eB, bgo, II, gZ, oQ, i, y, xg, jr); #c1(DMD) c2(NP_004005) c3(dystrophin DpHG isoform) c4( ) c5(142767) c6( ) c7(T, ea, agU, bgs, afl, HU, bgl, aE, aDk, il, fm, ari, bgm, bgw, K, amA, hm, are, IW, uY, bp, pL, eY, Kc, aeB, bgu, mx, U, cj, nw, mk, m, IS, bgi, ayw, dD, OI, aFc, Ri, Bm, n, aj, jA, nA, cd, afR, b, no, cc, pN, adX, Ak, afV, arc, bl, he, on, bgn, Hz, lb, Ad, mo, jT, fq, cA, adZ, dB, oh, rx, aiS, arg, cB, bgv, bL, cz, arw, j, bgq, eA, J, bgk, hW, Wn, kf, cy, aWs, bK, zp, yj, Wq, bA, bgp, VC, kl, aqZ, Qr, oV, Y, lo, rR, c, aqU, km, arf, ao, aof, hS, arh, bgj, eq, Rk, yt, sO, Ae, vJ, oj, Ps, bgr, fb, anR, xz, xs, hp, Bu, bz, dr, bgt, dR, Bv, yE, eB, bgo, II, gZ, oQ, i, y, xg, jr); #c1(DMD) c2(NP_004006) c3(dystrophin Dp71 isoform) c4( ) c5(142768, 142769, 142770, 142771, 142772, 142773, 142774, 142775) c6( ) c7(T, ea, agU, bgs, afl, HU, bgl, aE, aDk, il, fm, ari, bgm, bgw, K, amA, hm, are, IW, uY, bp, pL, eY, Kc, aeB, bgu, mx, U, cj, nw, mk, m, IS, bgi, ayw, dD, OI, aFc, Ri, Bm, n, aj, jA, nA, cd, afR, b, no, cc, pN, adX, Ak, afV, arc, bl, he, on, bgn, Hz, lb, Ad, mo, jT, fq, cA, adZ, dB, oh, rx, aiS, arg, cB, bgv, bL, cz, arw, j, bgq, eA, J, bgk, hW, Wn, kf, cy, aWs, bK, zp, yj, Wq, bA, bgp, VC, kl, aqZ, Qr, oV, Y, lo, rR, c, aqU, km, arf, ao, aof, hS, arh, bgj, eq, Rk, yt, sO, Ae, vJ, oj, Ps, bgr, fb, anR, xz, xs, hp, Bu, bz, dr, bgt, dR, Bv, yE, eB, bgo, II, gZ, oQ, i, y, xg, jr); #c1(DMD) c2(NP_004007) c3(dystrophin Dp71b isoform) c4( ) c5(142776, 142777, 142778, 142779, 142780, 142781, 142782, 142783) c6( ) c7(T, ea, agU, bgs, afl, HU, bgl, aE, aDk, il, fm, ari, bgm, bgw, K, amA, hm, are, IW, uY, bp, pL, eY, Kc, aeB, bgu, mx, U, cj, nw, mk, m, IS, bgi, ayw, dD, OI, aFc, Ri, Bm, n, aj, jA, nA, cd, afR, b, no, cc, pN, adX, Ak, afV, arc, bl, he, on, bgn, Hz, lb, Ad, mo, jT, fq, cA, adZ, dB, oh, rx, aiS, arg, cB, bgv, bL, cz, arw, j, bgq, eA, J, bgk, hW, Wn, kf, cy, aWs, bK, zp, yj, Wg, bA, bgp, VC, kl, aqZ, Qr, oV, Y, lo, rR, c, aqU, km, arf, ao, aof, hS, arh, bgj, eq, Rk, yt, sO, Ae, vJ, oj, Ps, bgr, fb, anR, xz, xs, hp, Bu, bz, dr, bgt, dR, Bv, yE, eB, bgo, II, gZ, oQ, i, y, xg, jr); #c1(DMD) c2(NP_004008) c3(dystrophin Dp71a isoform) c4( ) c5(142784) c6( ) c7(T, ea, agU, bgs, afl, HU, bgl, aE, aDk, il, fm, ari, bgm, bgw, K, amA, hm, are, IW, uY, bp, pL, eY, Kc, aeB, bgu, mx, U, cj, nw, mk, m, IS, bgi, ayw, dD, OI, aFc, Ri, Bm, n, aj, jA, nA, cd, afR, b, no, cc, pN, adX, Ak, afV, arc, bl, he, on, bgn, Hz, lb, Ad, mo, jT, fq, cA, adZ, dB, oh, rx, aiS, arg, cB, bgv, bL, cz, arw, j, bgq, eA, J, bgk, hW, Wn, kf, cy, aWs, bK, zp, yj, Wq, bA, bgp, VC, kl, aqZ, Qr, oV, Y, lo, rR, c, aqU, km, arf, ao, aof, hS, arh, bgj, eq, Rk, yt, sO, Ae, vJ, oj, Ps, bgr, fb, anR, xz, xs, hp, Bu, bz, dr, bgt, dR, Bv, yE, eB, bgo, II, gZ, oQ, i, y, xg, jr); #c1(DMD) c2(NP_004009) c3(dystrophin Dp71ab isoform) c4( ) c5(142785, 142786, 142787, 142788, 142789, 142790, 142791, 142792) c6( ) c7(T, ea, agU, bgs, afl, HU, bgl, aE, aDk, il, fm, ari, bgm, bgw, K, amA, hm, are, IW, uY, bp, pL, eY, Kc, aeB, bgu, mx, U, cj, nw, mk, m, IS, bgi, ayw, dD, OI, aFc, Ri, Bm, n, aj, jA, nA, cd, afR, b, no, cc, pN, adX, Ak, afV, arc, bl, he, on, bgn, Hz, lb, Ad, mo, jT, fq, cA, adZ, dB, oh, rx, aiS, arg, cB, bgv, bL, cz, arw, j, bgq, eA, J, bgk, hW, Wn, kf, cy, aWs, bK, zp, yj, Wq, bA, bgp, VC, kl, aqZ, Qr, oV, Y, lo, rR, c, aqU, km, arf, ao, aof, hS, arh, bgj, eq, Rk, yt, sO, Ae, vJ, oj, Ps, bgr, fb, anR, xz, xs, hp, Bu, bz, dr, bgt, dR, Bv, yE, eB, bgo, II, gZ, oQ, i, y, xg, jr); #c1(DMD) c2(NP_004010) c3(dystrophin Dp40 isoform) c4( ) c5(142793) c6( ) c7(T, ea, agU, bgs, afl, HU, bgl, aE, aDk, il, fm, ari, bgm, bgw, K, amA, hm, are, IW, uY, bp, pL, eY, Kc, aeB, bgu, mx, U, cj, nw, mk, m, IS, bgi, ayw, dD, OI, aFc, Ri, Bm, n, aj, jA, nA, cd, afR, b, no, cc, pN, adX, Ak, afV, arc, bl, he, on, bgn, Hz, lb, Ad, mo, jT, fq, cA, adZ, dB, oh, rx, aiS, arg, cB, bgv, bL, cz, arw, j, bgq, eA, J, bgk, hW, Wn, kf, cy, aWs, bK, zp, yj, Wq, bA, bgp, VC, kl, aqZ, Qr, oV, Y, lo, rR, c, aqU, km, arf, ao, aof, hS, arh, bgj, eq, Rk, yt, sO, Ae, vJ, oj, Ps, bgr, fb, anR, xz, xs, hp, Bu, bz, dr, bgt, dR, Bv, yE, eB, bgo, II, gZ, oQ, i, y, xg, jr); #c1(DMD) c2(NP_004011) c3(dystrophin Dp140c isoform) c4( ) c5(142794, 142795, 142796, 142797, 142798, 142799, 142800, 142801, 142802, 142803, 142804, 142805, 142806, 142807, 142808, 142809, 142810, 142811, 142812, 142813, 142814, 142815, 142816, 142817, 142818, 142819, 142820, 142821, 142822, 142823, 142824, 142825, 142826, 142827, 142828, 142829, 142830, 142831, 142832, 142833, 142834, 142835, 142836, 142837, 142838, 142839, 142840, 142841, 142842, 142843, 142844, 142845, 142846, 142847, 142848, 142849, 142850, 142851, 142852, 142853, 142854, 142855, 142856, 142857, 142858, 142859, 142860, 142861, 142862, 142863, 142864, 142865, 142866, 142867, 142868, 142869, 142870, 142871, 142872, 142873, 142874, 142875, 142876, 142877, 142878, 142879) c6( ) c7(T, ea, agU, bgs, afl, HU, bgl, aE, aDk, il, fm, ari, bgm, bgw, K, amA, hm, are, IW, uY, bp, pL, eY, Kc, aeB, bgu, mx, U, cj, nw, mk, m, IS, bgi, ayw, dD, OI, aFc, Ri, Bm, n, aj, jA, nA, cd, afR, b, no, cc, pN, adX, Ak, afV, arc, bl, he, on, bgn, Hz, lb, Ad, mo, jT, fq, cA, adZ, dB, oh, rx, aiS, arg, cB, bgv, bL, cz, arw, j, bgq, eA, J, bgk, hW, Wn, kf, cy, aWs, bK, zp, yj, Wq, bA, bgp, VC, kl, aqZ, Qr, oV, Y, lo, rR, c, aqU, km, arf, ao, aof, hS, arh, bgj, eq, Rk, yt, sO, Ae, vJ, oj, Ps, bgr, fb, anR, xz, xs, hp, Bu, bz, dr, bgt, dR, Bv, yE, eB, bgo, II, gZ, oQ, i, y, xg, jr); #c1(DMD) c2(XP_006724531) c3(dystrophin isoform X1) c4(296030) c5( ) c6( ) c7(T, ea, agU, bgs, afl, HU, bgl, aE, aDk, il, fm, ari, bgm, bgw, K, amA, hm, are, IW, uY, bp, pL, eY, Kc, aeB, bgu, mx, U, cj, nw, mk, m, IS, bgi, ayw, dD, OI, aFc, Ri, Bm, n, aj, jA, nA, cd, afR, b, no, cc, pN, adX, Ak, afV, arc, bl, he, on, bgn, Hz, lb, Ad, mo, jT, fq, cA, adZ, dB, oh, rx, aiS, arg, cB, bgv, bL, cz, arw, j, bgq, eA, J, bgk, hW, Wn, kf, cy, aWs, bK, zp, yj, Wq, bA, bgp, VC, kl, aqZ, Qr, oV, Y, lo, rR, c, aqU, km, arf, ao, aof, hS, arh, bgj, eq, Rk, yt, sO, Ae, vJ, oj, Ps, bgr, fb, anR, xz, xs, hp, Bu, bz, dr, bgt, dR, Bv, yE, eB, bgo, II, gZ, oQ, i, y, xg, jr); #c1(DMD) c2(XP_006724533) c3(dystrophin isoform X3) c4(296031, 296032) c5(296033, 296034, 296035, 296036, 296037, 296038, 296039, 296040) c6( ) c7(T, ea, agU, bgs, afl, HU, bgl, aE, aDk, il, fm, ari, bgm, bgw, K, amA, hm, are, IW, uY, bp, pL, eY, Kc, aeB, bgu, mx, U, cj, nw, mk, m, IS, bgi, ayw, dD, OI, aFc, Ri, Bm, n, aj, jA, nA, cd, afR, b, no, cc, pN, adX, Ak, afV, arc, bl, he, on, bgn, Hz, lb, Ad, mo, jT, fq, cA, adZ, dB, oh, rx, aiS, arg, cB, bgv, bL, cz, arw, j, bgq, eA, J, bgk, hW, Wn, kf, cy, aWs, bK, zp, yj, Wq, bA, bgp, VC, kl, agZ, Qr, oV, Y, lo, rR, c, aqU, km, arf, ao, aof, hS, arh, bgj, eq, Rk, yt, sO, Ae, vJ, oj, Ps, bgr, fb, anR, xz, xs, hp, Bu, bz, dr, bgt, dR, Bv, yE, eB, bgo, II, gZ, oQ, i, y, xg, jr); #c1(DMD) c2(XP_006724535) c3(dystrophin isoform X6) c4(296041) c5( ) c6( ) c7(T, ea, agU, bgs, afl, HU, bgl, aE, aDk, il, fm, ari, bgm, bgw, K, amA, hm, are, IW, uY, bp, pL, eY, Kc, aeB, bgu, mx, U, cj, nw, mk, m, IS, bgi, ayw, dD, OI, aFc, Ri, Bm, n, aj, jA, nA, cd, afR, b, no, cc, pN, adX, Ak, afV, arc, bl, he, on, bgn, Hz, lb, Ad, mo, jT, fq, cA, adZ, dB, oh, rx, aiS, arg, cB, bgv, bL, cz, arw, j, bgq, eA, J, bgk, hW, Wn, kf, cy, aWs, bK, zp, yj, Wq, bA, bgp, VC, kl, aqZ, Qr, oV, Y, lo, rR, c, aqU, km, arf, ao, aof, hS, arh, bgj, eq, Rk, yt, sO, Ae, vJ, oj, Ps, bgr, fb, anR, xz, xs, hp, Bu, bz, dr, bgt, dR, Bv, yE, eB, bgo, II, gZ, oQ, i, y, xg, jr); #c1(DMD) c2(XP_006724536) c3(dystrophin isoform X7) c4( ) c5(296042, 296043, 296044, 296045, 296046, 296047, 296048, 296049) c6( ) c7(T, ea, agU, bgs, afl, HU, bgl, aE, aDk, il, fm, ari, bgm, bgw, K, amA, hm, are, IW, uY, bp, pL, eY, Kc, aeB, bgu, mx, U, cj, nw, mk, m, IS, bgi, ayw, dD, OI, aFc, Ri, Bm, n, aj, jA, nA, cd, afR, b, no, cc, pN, adX, Ak, afV, arc, bl, he, on, bgn, Hz, lb, Ad, mo, jT, fq, cA, adZ, dB, oh, rx, aiS, arg, cB, bgv, bL, cz, arw, j, bgq, eA, J, bgk, hW, Wn, kf, cy, aWs, bK, zp, yj, Wq, bA, bgp, VC, kl, aqZ, Qr, oV, Y, lo, rR, c, aqU, km, arf, ao, aof, hS, arh, bgj, eq, Rk, yt, sO, Ae, vJ, oj, Ps, bgr, fb, anR, xz, xs, hp, Bu, bz, dr, bgt, dR, Bv, yE, eB, bgo, II, gZ, oQ, i, y, xg, jr); #c1(DMD) c2(XP_006724537) c3(dystrophin isoform X8) c4(296050) c5(296051, 296052, 296053, 296054, 296055, 296056, 296057, 296058) c6( ) c7(T, ea, agU, bgs, afl, HU, bgl, aE, aDk, il, fm, ari, bgm, bgw, K, amA, hm, are, IW, uY, bp, pL, eY, Kc, aeB, bgu, mx, U, cj, nw, mk, m, IS, bgi, ayw, dD, OI, aFc, Ri, Bm, n, aj, jA, nA, cd, afR, b, no, cc, pN, adX, Ak, afV, arc, bl, he, on, bgn, Hz, lb, Ad, mo, jT, fq, cA, adZ, dB, oh, rx, aiS, arg, cB, bgv, bL, cz, arw, j, bgq, eA, J, bgk, hW, Wn, kf, cy, aWs, bK, zp, yj, Wq, bA, bgp, VC, kl, aqZ, Qr, oV, Y, lo, rR, c, aqU, km, arf, ao, aof, hS, arh, bgj, eq, Rk, yt, sO, Ae, vJ, oj, Ps, bgr, fb, anR, xz, xs, hp, Bu, bz, dr, bgt, dR, Bv, yE, eB, bgo, II, gZ, oQ, i, y, xg, jr); #c1(DMD) c2(XP_006724538) c3(dystrophin isoform X9) c4(296059) c5(296060, 296061, 296062, 296063, 296064, 296065, 296066, 296067) c6( ) c7(T, ea, agU, bgs, afl, HU, bgl, aE, aDk, il, fm, ari, bgm, bgw, K, amA, hm, are, IW, uY, bp, pL, eY, Kc, aeB, bgu, mx, U, cj, nw, mk, m, IS, bgi, ayw, dD, OI, aFc, Ri, Bm, n, aj, jA, nA, cd, afR, b, no, cc, pN, adX, Ak, afV, arc, bl, he, on, bgn, Hz, lb, Ad, mo, jT, fq, cA, adZ, dB, oh, rx, aiS, arg, cB, bgv, bL, cz, arw, j, bgq, eA, J, bgk, hW, Wn, kf, cy, aWs, bK, zp, yj, Wq, bA, bgp, VC, kl, aqZ, Qr, oV, Y, lo, rR, c, aqU, km, arf, ao, aof, hS, arh, bgj, eq, Rk, yt, sO, Ae, vJ, oj, Ps, bgr, fb, anR, xz, xs, hp, Bu, bz, dr, bgt, dR, Bv, yE, eB, bgo, II, gZ, oQ, i, y, xg, jr); #c1(DMD) c2(XP_011543771) c3(dystrophin isoform X11) c4( ) c5(342802, 342803, 342804, 342805, 342806, 342807, 342808, 342809, 342810, 342811, 342812, 342813, 342814, 342815, 342816, 342817, 342818, 342819, 342820, 342821, 342822, 342823, 342824, 342825, 342826, 342827, 342828, 342829, 342830, 342831, 342832, 342833, 342834, 342835, 342836, 342837, 342838, 342839, 342840, 342841, 342842, 342843, 342844, 342845, 342846, 342847, 342848, 342849, 342850, 342851, 342852, 342853, 342854, 342855, 342856, 342857, 342858, 342859, 342860, 342861, 342862, 342863, 342864, 342865, 342866, 342867, 342868, 342869, 342870, 342871, 342872, 342873, 342874, 342875, 342876, 342877, 342878, 342879, 342880, 342881, 342882, 342883, 342884, 342885, 342886, 342887) c6( ) c7(T, ea, agU, bgs, afl, HU, bgl, aE, aDk, il, fm, ari, bgm, bgw, K, amA, hm, are, IW, uY, bp, pL, eY, Kc, aeB, bgu, mx, U, cj, nw, mk, m, IS, bgi, ayw, dD, OI, aFc, Ri, Bm, n, aj, jA, nA, cd, afR, b, no, cc, pN, adX, Ak, afV, arc, bl, he, on, bgn, Hz, lb, Ad, mo, jT, fq, cA, adZ, dB, oh, rx, aiS, arg, cB, bgv, bL, cz, arw, j, bgq, eA, J, bgk, hW, Wn, kf, cy, aWs, bK, zp, yj, Wq, bA, bgp, VC, kl, aqZ, Qr, oV, Y, lo, rR, c, aqU, km, arf, ao, aof, hS, arh, bgj, eq, Rk, yt, sO, Ae, vJ, oj, Ps, bgr, fb, anR, xz, xs, hp, Bu, bz, dr, bgt, dR, Bv, yE, eB, bgo, II, gZ, oQ, i, y, xg, jr); #c1(DMGDH) c2(NP_037523) c3(dimethylglycine dehydrogenase, mitochondrial precursor) c4(176005) c5(176006, 176007, 176008, 176009, 176010, 176011) c6( ) c7(Na, mO, oe, bgx, Nc, j); #c1(DMGDH) c2(XP_006714660) c3(dimethylglycine dehydrogenase, mitochondrial isoform X1) c4(287951, 287952, 287953, 287954) c5(287955, 287956, 287957, 287958, 287959, 287960, 287961, 287962, 287963, 287964, 287965, 287966, 287967, 287968, 287969, 287970, 287971, 287972, 287973, 287974, 287975, 287976, 287977, 287978) c6( ) c7(Na, mO, oe, bgx, Nc, j); #c1(DMKN) c2(NP_001030593) c3(dermokine isoform 1 precursor) c4(31055) c5(31056, 31057, 31058, 31059, 31060, 31061, 31062) c6(31063) c7(afr, ff, r, q, IQ, en, X); #c1(DMKN) c2(NP_001119528) c3(dermokine isoform 3 precursor) c4(44105) c5(44106, 44107, 44108, 44109, 44110, 44111, 44112, 44113) c6(44114, 44115) c7(afr, ff, r, q, IQ, en, X); #c1(DMKN) c2(NP_001119529) c3(dermokine isoform 5 precursor) c4(44116, 44117) c5( ) c6( ) c7(afr, ff, r, q, IQ, en, X); #c1(DMKN) c2(NP_001119530) c3(dermokine isoform 4 precursor) c4(44118) c5( ) c6( ) c7(afr, ff, r, q, IQ, en, X); #c1(DMKN) c2(NP_001119531) c3(dermokine isoform 6) c4(44119) c5(44120, 44121, 44122, 44123, 44124, 44125, 44126, 44127, 44128, 44129, 44130, 44131, 44132, 44133, 44134, 44135, 44136) c6(44137, 44138, 44139, 44140) c7(afr, ff, r, q, IQ, en, X); #c1(DMKN) c2(NP_001177276) c3(dermokine isoform 8 precursor) c4(72569) c5(72570, 72571, 72572, 72573, 72574, 72575, 72576, 72577, 72578) c6(72579, 72580) c7(afr, ff, r, q, IQ, en, X); #c1(DMKN) c2(NP_001177277) c3(dermokine isoform 9 precursor) c4(72581) c5( ) c6( ) c7(afr, ff, r, q, IQ, en, X); #c1(DMKN) c2(NP_001177278) c3(dermokine isoform 10 precursor) c4(72582, 72583) c5(72584, 72585, 72586, 72587, 72588, 72589, 72590, 72591, 72592, 72593, 72594, 72595, 72596, 72597, 72598, 72599, 72600, 72601, 72602, 72603, 72604, 72605, 72606, 72607, 72608, 72609, 72610, 72611, 72612, 72613, 72614, 72615, 72616, 72617, 72618, 72619, 72620, 72621, 72622, 72623, 72624, 72625, 72626, 72627, 72628, 72629, 72630) c6(72631, 72632, 72633, 72634, 72635, 72636, 72637, 72638, 72639, 72640, 72641, 72642) c7(afr, ff, r, q, IQ, en, X); #c1(DMKN) c2(NP_201574) c3(dermokine isoform 2 precursor) c4(228286) c5( ) c6( ) c7(afr, ff, r, q, IQ, en, X); #c1(DMKN) c2(XP_011525806) c3(dermokine isoform X9) c4( ) c5(320204) c6( ) c7(afr, ff, r, q, IQ, en, X); #c1(DMKN) c2(XP_011525814) c3(dermokine isoform X17) c4( ) c5(320205) c6( ) c7(afr, ff, r, q, IQ, en, X); #c1(DMP1) c2(NP_001073380) c3(dentin matrix acidic phosphoprotein 1 isoform 2 precursor) c4(35992) c5(35993, 35994, 35995, 35996, 35997) c6( ) c7(AB, oe, jh, Ay, amC, ci, av, amB, aT, hP, aW, ff, en, g, AA, bz, oU, QG, eM, ki, X, bfl, awa, ars); #c1(DMP1) c2(NP_004398) c3(dentin matrix acidic phosphoprotein 1 isoform 1 precursor) c4(146104) c5(146105, 146106, 146107, 146108, 146109) c6( ) c7(AB, oe, jh, Ay, amC, ci, av, amB, aT, hP, aW, ff, en, g, AA, bz, oU, QG, eM, ki, X, bfl, awa, ars); #c1(DMP1) c2(XP_011530007) c3(dentin matrix acidic phosphoprotein 1 isoform X1) c4( ) c5(325813) c6( ) c7(AB, oe, jh, Ay, amC, ci, av, amB, aT, hP, aW, ff, en, g, AA, bz, oU, QG, eM, ki, X, bfl, awa, ars); #c1(DMP1) c2(XP_011530008) c3(dentin matrix acidic phosphoprotein 1 isoform X2) c4( ) c5(325814) c6( ) c7(AB, oe, jh, Ay, amC, ci, av, amB, aT, hP, aW, ff, en, g, AA, bz, oU, QG, eM, ki, X, bfl, awa, ars); #c1(DMPK) c2(NP_001075029) c3(myotonin-protein kinase isoform 3) c4(37194, 37195) c5(37196, 37197, 37198, 37199, 37200, 37201, 37202, 37203, 37204, 37205, 37206, 37207, 37208) c6( ) c7(dD, Kk, aj, eq, aPI, nA, UX, UE, bgz, alD, oj, Ak, vH, vc, bl, K, dF, mD, xz, xs, aPm, hp, aac, dr, dR, rR, bgy, kB, aer, awK, IM, fy, gq); #c1(DMPK) c2(NP_001075031) c3(myotonin-protein kinase isoform 4) c4(37209) c5(37210, 37211, 37212, 37213, 37214, 37215, 37216) c6( ) c7(dD, Kk, aj, eq, aPI, nA, UX, UE, bgz, alD, oj, Ak, vH, vc, bl, K, dF, mD, xz, xs, aPm, hp, aac, dr, dR, rR, bgy, kB, aer, awK, IM, fy, gq); #c1(DMPK) c2(NP_001075032) c3(myotonin-protein kinase isoform 1) c4(37217, 37218) c5(37219, 37220, 37221, 37222, 37223, 37224, 37225, 37226, 37227, 37228, 37229, 37230, 37231) c6( ) c7(dD, Kk, aj, eq, aPI, nA, UX, UE, bgz, alD, oj, Ak, vH, vc, bl, K, dF, mD, xz, xs, aPm, hp, aac, dr, dR, rR, bgy, kB, aer, awK, IM, fy, gq); #c1(DMPK) c2(NP_001275693) c3(myotonin-protein kinase isoform 5) c4(107079) c5(107080, 107081, 107082, 107083, 107084, 107085, 107086) c6( ) c7(dD, Kk, aj, eq, aPI, nA, UX, UE, bgz, alD, oj, Ak, vH, vc, bl, K, dF, mD, xz, xs, aPm, hp, aac, dr, dR, rR, bgy, kB, aer, awK, IM, fy, gq); #c1(DMPK) c2(NP_001275695) c3(myotonin-protein kinase isoform 7) c4(107087) c5(107088, 107089, 107090, 107091, 107092, 107093, 107094) c6( ) c7(dD, Kk, aj, eq, aPI, nA, UX, UE, bgz, alD, oj, Ak, vH, vc, bl, K, dF, mD, xz, xs, aPm, hp, aac, dr, dR, rR, bgy, kB, aer, awK, IM, fy, gq); #c1(DMPK) c2(NP_004400) c3(myotonin-protein kinase isoform 2) c4(146125) c5(146126, 146127, 146128, 146129, 146130, 146131, 146132) c6( ) c7(dD, Kk, aj, eq, aPI, nA, UX, UE, bgz, alD, oj, Ak, vH, vc, bl, K, dF, mD, xz, xs, aPm, hp, aac, dr, dR, rR, bgy, kB, aer, awK, IM, fy, gq); #c1(DMRT1) c2(NP_068770) c3(doublesex- and mab-3-related transcription factor 1) c4(210308) c5(210309, 210310, 210311, 210312, 210313, 210314, 210315, 210316, 210317, 210318, 210319, 210320, 210321) c6( ) c7(wu, e, ci, Rc, ber, ad, yw, vJ, oW, yu, cy, UD, rO, wm, eu, bgA, vT, Lf, bu, Ld, BU, ac, aNv, Qu, wO, Lb, aAE, aNt); #c1(DMRT1) c2(XP_006716795) c3(doublesex- and mab-3-related transcription factor 1 isoform X3) c4(290488) c5( ) c6( ) c7(wu, e, ci, Rc, ber, ad, yw, vJ, oW, yu, cy, UD, rO, wm, eu, bgA, vT, Lf, bu, Ld, BU, ac, aNv, Qu, wO, Lb, aAE, aNt); #c1(DMRT2) c2(XP_006716781) c3(doublesex- and mab-3-related transcription factor 2 isoform X3) c4( ) c5(290451, 290452) c6( ) c7(it); #c1(DMRT2) c2(XP_011515995) c3(doublesex- and mab-3-related transcription factor 2 isoform X1) c4(309177) c5(309178, 309179, 309180, 309181, 309182, 309183, 309184, 309185, 309186, 309187, 309188, 309189, 309190, 309191, 309192, 309193) c6( ) c7(it); #c1(DMRT2) c2(XP_011515998) c3(doublesex- and mab-3-related transcription factor 2 isoform X2) c4(309194) c5(309195, 309196, 309197, 309198, 309199, 309200, 309201, 309202, 309203, 309204, 309205, 309206) c6( ) c7(it); #c1(DMRT3) c2(NP_067063) c3(doublesex- and mab-3-related transcription factor 3) c4(208795, 208796) c5(208797, 208798, 208799, 208800, 208801, 208802, 208803) c6( ) c7(gP, vT, Qu, PI, B, aR); #c1(DMRT3) c2(XP_011516299) c3(doublesex- and mab-3-related transcription factor 3 isoform X1) c4( ) c5(309504, 309505, 309506, 309507, 309508, 309509) c6( ) c7(gP, vT, Qu, PI, B, aR); #c1(DMRTA1) c2(NP_071443) c3(doublesex- and mab-3-related transcription factor A1) c4(211694) c5(211695, 211696, 211697, 211698, 211699, 211700, 211701) c6( ) c7(Ea, oe, baZ, fq, aA); #c1(DMTF1) c2(NP_001135798) c3(cyclin-D-binding Myb-like transcription factor 1 isoform b) c4( ) c5(53287) c6( ) c7(av, amB, QG, AB, eM, aW, jh, aT, Ay, amC, bK, ci, bfl, AA, bz, awa, ars, oU); #c1(DMTF1) c2(XP_011515039) c3(cyclin-D-binding Myb-like transcription factor 1 isoform X1) c4(307809, 307810, 307811, 307812) c5(307813, 307814, 307815, 307816, 307817, 307818, 307819, 307820, 307821, 307822, 307823, 307824, 307825, 307826, 307827, 307828, 307829, 307830, 307831, 307832, 307833, 307834, 307835, 307836, 307837, 307838, 307839) c6( ) c7(av, amB, QG, AB, eM, aW, jh, aT, Ay, amC, bK, ci, bfl, AA, bz, awa, ars, oU); #c1(DMTF1) c2(XP_011515041) c3(cyclin-D-binding Myb-like transcription factor 1 isoform X2) c4(307840) c5(307841, 307842, 307843, 307844, 307845, 307846, 307847, 307848, 307849) c6( ) c7(av, amB, QG, AB, eM, aW, jh, aT, Ay, amC, bK, ci, bfl, AA, bz, awa, ars, oU); #c1(DMTF1) c2(XP_011515042) c3(cyclin-D-binding Myb-like transcription factor 1 isoform X3) c4(307850, 307851) c5( ) c6( ) c7(av, amB, QG, AB, eM, aW, jh, aT, Ay, amC, bK, ci, bfl, AA, bz, awa, ars, oU); #c1(DMTF1) c2(XP_011515043) c3(cyclin-D-binding Myb-like transcription factor 1 isoform X4) c4(307852, 307853) c5(307854, 307855, 307856, 307857, 307858, 307859, 307860, 307861, 307862, 307863, 307864, 307865, 307866) c6( ) c7(av, amB, QG, AB, eM, aW, jh, aT, Ay, amC, bK, ci, bfl, AA, bz, awa, ars, oU); #c1(DMTF1) c2(XP_011515044) c3(cyclin-D-binding Myb-like transcription factor 1 isoform X5) c4(307867, 307868, 307869, 307870, 307871, 307872, 307873, 307874) c5(307875, 307876, 307877, 307878, 307879, 307880, 307881, 307882, 307883, 307884, 307885, 307886, 307887, 307888, 307889, 307890, 307891, 307892, 307893, 307894, 307895, 307896, 307897, 307898, 307899, 307900, 307901, 307902, 307903, 307904, 307905, 307906, 307907, 307908, 307909, 307910, 307911, 307912, 307913, 307914, 307915, 307916, 307917, 307918, 307919, 307920, 307921, 307922, 307923, 307924, 307925, 307926, 307927, 307928, 307929, 307930, 307931, 307932, 307933, 307934, 307935, 307936, 307937, 307938, 307939, 307940, 307941, 307942, 307943, 307944, 307945) c6( ) c7(av, amB, QG, AB, eM, aW, jh, aT, Ay, amC, bK, ci, bfl, AA, bz, awa, ars, oU); #c1(DMTN) c2(NP_001107611) c3(dematin isoform 3) c4(42917) c5(42918, 42919, 42920, 42921, 42922, 42923, 42924, 42925) c6( ) c7(S, oW); #c1(DMTN) c2(NP_001289745) c3(dematin isoform 2) c4(114374) c5(114375, 114376, 114377, 114378, 114379, 114380, 114381114382, 114383, 114384, 114385, 114386, 114387, 114388) c6( ) c7(S, oW); #c1(DMTN) c2(NP_001289746) c3(dematin isoform 4) c4(114389) c5(114390, 114391, 114392, 114393, 114394, 114395) c6( ) c7(S, oW); #c1(DMTN) c2(XP_005273489) c3(dematin isoform X1) c4(284611, 284612) c5(284613, 284614, 284615, 284616, 284617, 284618, 284619, 284620, 284621, 284622, 284623, 284624, 284625, 284626, 284627, 284628, 284629, 284630, 284631) c6( ) c7(S, oW); #c1(DMTN) c2(XP_011542740) c3(dematin isoform X4) c4( ) c5(341316, 341317, 341318, 341319, 341320) c6( ) c7(S, oW); #c1(DMWD) c2(NP_004934) c3(dystrophia myotonica WD repeat-containing protein) c4(151234) c5(151235, 151236, 151237, 151238, 151239, 151240) c6( ) c7(gU, ND, dR); #c1(DMXL1) c2(NP_001277250) c3(dmX-like protein 1 isoform 1) c4(109301) c5(109302, 109303, 109304, 109305, 109306, 109307) c6( ) c7(dw, d, eA); #c1(DMXL1) c2(NP_005500) c3(dmX-like protein 1 isoform 2) c4(156851) c5(156852, 156853, 156854, 156855, 156856, 156857) c6( ) c7(dw, d, eA); #c1(DMXL1) c2(XP_005271967) c3(dmX-like protein 1 isoform X2) c4(283653) c5(283654, 283655, 283656, 283657, 283658, 283659) c6( ) c7(dw, d, eA); #c1(DMXL2) c2(NP_001167587) c3(dmX-like protein 2 isoform 1) c4(69330) c5(69331, 69332, 69333, 69334, 69335, 69336) c6( ) c7(bM, ac, aw, e, j, eu); #c1(DMXL2) c2(NP_001167588) c3(dmX-like protein 2 isoform 3) c4(69337) c5(69338, 69339, 69340, 69341, 69342, 69343) c6( ) c7(bM, ac, aw, e, j, eu); #c1(DMXL2) c2(NP_056078) c3(dmX-like protein 2 isoform 2) c4(185560) c5(185561, 185562, 185563, 185564, 185565, 185566) c6( ) c7(bM, ac, aw, e, j, eu); #c1(DMXL2) c2(XP_005254313) c3(dmX-like protein 2 isoform X2) c4(273141) c5(273142, 273143, 273144, 273145, 273146, 273147, 273148, 273149) c6( ) c7(bM, ac, aw, e, j, eu); #c1(DNA2) c2(NP_001073918) c3(DNA replication ATP-dependent helicase/nuclease DNA2) c4(36520) c5(36521, 36522, 36523, 36524, 36525, 36526, 36527, 36528, 36529, 36530) c6( ) c7(ck, Mb, os, WE, oj, h, aNG, bgB, dL, K, oZ, avx); #c1(DNA2) c2(XP_006717743) c3(DNA replication ATP-dependent helicase/nuclease DNA2 isoform X1) c4(291305, 291306) c5(291307, 291308, 291309, 291310, 291311, 291312, 291313) c6( ) c7(ck, Mb, os, WE, oj, h, aNG, bgB, dL, K, oZ, avx); #c1(DNA2) c2(XP_011537721) c3(DNA replication ATP-dependent helicase/nuclease DNA2 isoform X5) c4( ) c5(335279) c6( ) c7(ck, Mb, os, WE, oj, h, aNG, bgB, dL, K, oZ, avx); #c1(DNAAF1) c2(NP_848547) c3(dynein assembly factor 1, axonemal) c4(253813, 253814) c5(253815, 253816, 253817, 253818, 253819, 253820, 253821, 253822, 253823, 253824, 253825, 253826) c6( ) c7(Pf, bgC, wB, aBZ, Nj, MG); #c1(DNAAF1) c2(XP_011521162) c3(dynein assembly factor 1, axonemal isoform X11) c4( ) c5(316108) c6( ) c7(Pf, bgC, wB, aBZ, Nj, MG); #c1(DNAAF2) c2(NP_001077377) c3(protein kintoun isoform 2) c4(37781) c5(37782, 37783, 37784, 37785, 37786, 37787) c6( ) c7(bgD); #c1(DNAAF2) c2(NP_060609) c3(protein kintoun isoform 1) c4(196827) c5(196828, 196829, 196830, 196831, 196832, 196833) c6( ) c7(bgD); #c1(DNAAF3) c2(NP_001243643) c3(dynein assembly factor 3, axonemal isoform 1) c4(91282) c5(91283, 91284, 91285, 91286, 91287, 91288, 91289, 91290, 91291, 91292) c6( ) c7(bN, T, aaF, dt, ul, Pf, bgE, hL, fd, ame, bgE, cl, Vq, cm, BV, xg, af, LS, DF, MG); #c1(DNAAF3) c2(NP_001243644) c3(dynein assembly factor 3, axonemal isoform 3) c4(91293) c5(91294, 91295, 91296, 91297, 91298) c6( ) c7(bN, T, aaF, dt, ul, Pf, bgE, hL, fd, ame, bgE, cl, Vq, cm, BV, xg, af, LS, DF, MG); #c1(DNAAF3) c2(NP_001243645) c3(dynein assembly factor 3, axonemal isoform 4) c4(91299) c5(91300, 91301, 91302, 91303, 91304, 91305, 91306) c6( ) c7(bN, T, aaF, dt, ul, Pf, bgE, hL, fd, ame, bgF, cl, Vq, cm, BV, xg, af, LS, DF, MG); #c1(DNAAF3) c2(NP_849159) c3(dynein assembly factor 3, axonemal isoform 2) c4(254326) c5(254327, 254328, 254329, 254330, 254331, 254332, 254333, 254334, 254335, 254336) c6( ) c7(bN, T, aaF, dt, ul, Pf, bgE, hL, fd, ame, bgF, cl, Vq, cm, BV, xg, af, LS, DF, MG); #c1(DNAAF5) c2(NP_060272) c3(dynein assembly factor 5, axonemal) c4(195146, 195147, 195148) c5(195149, 195150, 195151, 195152, 195153, 195154, 195155, 195156, 195157, 195158, 195159, 195160, 195161, 195162, 195163, 195164, 195165, 195166) c6( ) c7(Pf, MG, bgG); #c1(DNAH1) c2(NP_056327) c3(dynein heavy chain 1, axonemal) c4(187086) c5(187087, 187088, 187089, 187090, 187091, 187092, 187093, 187094, 187095, 187096, 187097, 187098, 187099) c6( ) c7(MG); #c1(DNAH1) c2(XP_011531879) c3(dynein heavy chain 1, axonemal isoform X1) c4(327931) c5( ) c6( ) c7(MG); #c1(DNAH11) c2(NP_001264044) c3(dynein heavy chain 11, axonemal) c4(97441) c5(97442, 97443, 97444, 97445, 97446, 97447) c6( ) c7(bgl, ZE, BV, Pf, bgH, hb, fd, afq, j, aXL, fw, af, MG); #c1(DNAH12) c2(NP_001278590) c3(dynein heavy chain 12, axonemal isoform 3) c4(109869) c5(109870, 109871, 109872, 109873, 109874, 109875, 109876, 109877, 109878, 109879, 109880, 109881, 109882, 109883, 109884, 109885, 109886, 109887, 109888, 109889, 109890) c6( ) c7(ac, ad); #c1(DNAH12) c2(NP_940966) c3(dynein heavy chain 12, axonemal isoform 2) c4(260202) c5(260203, 260204, 260205, 260206, 260207, 260208) c6( ) c7(ac, ad); #c1(DNAH12) c2(XP_011531772) c3(dynein heavy chain 12, axonemal isoform X5) c4(327856) c5( ) c6( ) c7(ac, ad); #c1(DNAH12) c2(XP_011531773) c3(dynein heavy chain 12, axonemal isoform X6) c4(327857) c5(327858, 327859) c6( ) c7(ac, ad); #c1(DNAH17) c2(NP_775899) c3(dynein heavy chain 17, axonemal) c4(250611, 250612) c5(250613, 250614, 250615, 250616, 250617, 250618) c6( ) c7(ul, MG); #c1(DNAH17) c2(XP_011523718) c3(dynein heavy chain 17, axonemal isoform X1) c4( ) c5(318177, 318178, 318179, 318180, 318181, 318182) c6( ) c7(ul, MG); #c1(DNAH17) c2(XP_011523720) c3(dynein heavy chain 17, axonemal isoform X3) c4( ) c5(318183) c6( ) c7(ul, MG); #c1(DNAH2) c2(NP_001290199) c3(dynein heavy chain 2, axonemal isoform 2) c4(115124) c5(115125, 115126, 115127, 115128, 115129, 115130, 115131, 115132, 115133, 115134, 115135, 115136, 115137, 115138, 115139, 115140) c6( ) c7(A); #c1(DNAH2) c2(NP_065928) c3(dynein heavy chain 2, axonemal isoform 1) c4(206293, 206294) c5(206295, 206296, 206297, 206298, 206299, 206300, 206301, 206302, 206303, 206304, 206305, 206306, 206307, 206308, 206309, 206310) c6( ) c7(A); #c1(DNAH3) c2(NP_060009) c3(dynein heavy chain 3, axonemal) c4(193614, 193615, 193616) c5(193617, 193618, 193619, 193620, 193621, 193622, 193623, 193624, 193625, 193626, 193627, 193628, 193629, 193630, 193631, 193632, 193633) c6( ) c7(ul, MG); #c1(DNAH3) c2(XP_006721125) c3(dynein heavy chain 3, axonemal isoform X2) c4(293861) c5(293862, 293863, 293864, 293865, 293866, 293867) c6( ) c7(ul, MG); #c1(DNAH5) c2(NP_001360) c3(dynein heavy chain 5, axonemal) c4(117289) c5(117290, 117291, 117292, 117293, 117294, 117295) c6( ) c7(Mg, bM, ul, bgJ, ZE, aBU, Pf, aYJ, oe, fd, ame, bgE, Vq, LS, DF, MG); #c1(DNAH6) c2(NP_001361) c3(dynein heavy chain 6, axonemal) c4(117296) c5(117297, 117298, 117299, 117300, 117301, 117302, 117303, 117304, 117305, 117306, 117307) c6( ) c7(fq); #c1(DNAH6) c2(XP_011530955) c3(dynein heavy chain 6, axonemal isoform X3) c4(326923) c5(326924, 326925, 326926, 326927, 326928, 326929) c6( ) c7(fq); #c1(DNAH7) c2(NP_061720) c3(dynein heavy chain 7, axonemal) c4(200377, 200378) c5(200379, 200380, 200381, 200382, 200383, 200384, 200385, 200386, 200387, 200388, 200389, 200390) c6( ) c7(cm, MG, Ea); #c1(DNAH7) c2(XP_011509793) c3(dynein heavy chain 7, axonemal isoform X5) c4(300348, 300349) c5( ) c6( ) c7(cm, MG, Ea); #c1(DNAH7) c2(XP_011509797) c3(dynein heavy chain 7, axonemal isoform X9) c4( ) c5(300350, 300351, 300352, 300353, 300354, 300355, 300356, 300357, 300358, 300359, 300360, 300361) c6( ) c7(cm, MG, Ea); #c1(DNAH8) c2(NP_001193856) c3(dynein heavy chain 8, axonemal) c4(82750, 82751, 82752) c5(82753, 82754, 82755, 82756, 82757, 82758, 82759, 82760, 82761, 82762, 82763, 82764, 82765, 82766, 82767, 82768, 82769, 82770) c6( ) c7(gh, T, IP, aPR, zs, e, akz, bB, fd, ur, ci, akg, oJ, bgM, aR, AW, aE, JD, dV, aU, K, be, azh, Ok, DA, aiV, ajT, Jl, alf, aW, az, hl, kt, uY, La, pL, hJ, eY, bb, akx, eM, wE, TG, Kr, mx, U, cj, alc, uo, wB, aL, mk, bi, eg, iu, NK, gU, sw, aw, ht, akA, aj, bd, cd, aky, cc, mh, ep, jy, aYf, AX, A, aJ, Ad, aiL, aq, mo, dw, aYo, ajS, W, cA, bP, eo, ajW, bgO, aCD, bD, alo, al, B, sZ, IB, bL, bgL, mr, fG, oe, yk, jx, rf, aA, cR, mS, cz, v, j, sl, bgR, akG, aYD, q, J, eA, akE, Mg, uT, Ig, aT, Wk, cy, aiW, bgN, bK, an, ae, af, ajU, wr, s, Y, r, wl, ayr, cu, en, f, kC, nC, iK, akq, rY, ck, Qi, akF, cl, ac, aki, ig, baO, mG, au, hr, wR, mf, aan, fD, bt, VB, ao, eP, pY, ob, bgP, bgQ, jN, jh, dG, fu, aoz, Pu, ad, av, aV, arV, oj, bgK, vc, IQ, cb, alk, mu, IR, xz, ff, eZ, aF, la, akh, iV, Hl, bz, dr, qa, dR, LB, Uj, Xp, bE, akm, uR, II, gZ, aks, X); #c1(DNAH8) c2(XP_011512621) c3(dynein heavy chain 8, axonemal isoform X2) c4(303586) c5(303587, 303588, 303589, 303590, 303591, 303592) c6( ) c7(gh, T, IP, aPR, zs, e, akz, bB, fd, ur, ci, akg, oJ, bgM, aR, AW, aE, JD, dV, aU, K, be, azh, Ok, DA, aiV, ajT, Jl, alf, aW, az, hl, kt, uY, La, pL, hJ, eY, bb, akx, eM, wE, TG, Kr, mx, U, cj, alc, uo, wB, aL, mk, bi, eg, iu, NK, gU, sw, aw, ht, akA, aj, bd, cd, aky, cc, mh, ep, jy, aYf, AX, A, aJ, Ad, aiL, aq, mo, dw, aYo, ajS, W, cA, bP, eo, ajW, bgO, aCD, bD, alo, al, B, sZ, IB, bL, bgL, mr, fG, oe, yk, jx, rf, aA, cR, mS, cz, v, j, sl, bgR, akG, aYD, q, J, eA, akE, Mg, uT, Ig, aT, Wk, cy, aiW, bgN, bK, an, ae, af, ajU, wr, s, Y, r, wl, ayr, cu, en, f, kC, nC, iK, akq, rY, ck, Qi, akF, cl, ac, aki, ig, baO, mG, au, hr, wR, mf, aan, fD, bt, VB, ao, eP, pY, ob, bgP, bgQ, jN, jh, dG, fu, aoz, Pu, ad, av, aV, arV, oj, bgK, vc, IQ, cb, alk, mu, IR, xz, ff, eZ, aF, la, akh, iV, Hl, bz, dr, qa, dR, LB, Uj, Xp, bE, akm, uR, II, gZ, aks, X); #c1(DNAH9) c2(NP_001363) c3(dynein heavy chain 9, axonemal isoform 2) c4(117308, 117309, 117310, 117311) c5(117312, 117313, 117314, 117315, 117316, 117317, 117318, 117319, 117320, 117321, 117322, 117323, 117324, 117325, 117326, 117327, 117328, 117329, 117330, 117331, 117332, 117333, 117334, 117335) c6( ) c7(Pf, Bd, dY, Be, MG); #c1(DNAH9) c2(XP_011522005) c3(dynein heavy chain 9, axonemal isoform X1) c4(316695) c5(316696, 316697, 316698, 316699, 316700, 316701) c6( ) c7(Pf, Bd, dY, Be, MG); #c1(DNAI1) c2(NP_036276) c3(dynein intermediate chain 1, axonemal isoform 1) c4(172823, 172824) c5(172825, 172826, 172827, 172828, 172829, 172830, 172831, 172832) c6( ) c7(ul, LS, ZE, Pf, il, iW, fd, MG, bw, ame, bgF, Vq, zZ, BV, br, DF, afu); #c1(DNAI1) c2(XP_006716821) c3(dynein intermediate chain 1, axonemal isoform X5) c4( ) c5(290509, 290510, 290511, 290512, 290513, 290514, 290515, 290516, 290517, 290518, 290519) c6( ) c7(ul, LS, ZE, Pf, il, iW, fd, MG, bw, ame, bgF, Vq, zZ, BV, hr, DF, afu); #c1(DNAI1) c2(XP_011516148) c3(dynein intermediate chain 1, axonemal isoform X1) c4(309383, 309384) c5( ) c6( ) c7(ul, LS, ZE, Pf, il, iW, fd, MG, bw, ame, bgF, Vq, zZ, BV, hr, DF, afu); #c1(DNAI1) c2(XP_011516149) c3(dynein intermediate chain 1, axonemal isoform X2) c4(309385) c5( ) c6( ) c7(ul, LS, ZE, Pf, il, iW, fd, MG, bw, ame, bgF, Vq, zZ, BV, hr, DF, afu); #c1(DNAI1) c2(XP_011516152) c3(dynein intermediate chain 1, axonemal isoform X6) c4( ) c5(309386, 309387, 309388, 309389, 309390, 309391, 309392, 309393, 309394, 309395, 309396, 309397, 309398, 309399, 309400) c6( ) c7(ul, LS, ZE, Pf, il, iW, fd, MG, bw, ame, bgF, Vq, zZ, BV, hr, DF, afu); #c1(DNA12) c2(NP_001166281) c3(dynein intermediate chain 2, axonemal isoform 2) c4(68536) c5(68537, 68538, 68539, 68540, 68541, 68542) c6( ) c7(cU, lo, Pf, MG, bgS); #c1(DNA12) c2(NP_075462) c3(dynein intermediate chain 2, axonemal isoform 1) c4(213888, 213889) c5(213890, 213891, 213892, 213893, 213894, 213895, 213896, 213897, 213898, 213899, 213900, 213901, 213902, 213903, 213904, 213905) c6( ) c7(cU, lo, Pf, MG, bgS); #c1(DNAJA1) c2(NP_001530) c3(dnaJ homolog subfamily A member 1) c4(118640, 118641, 118642) c5(118643, 118644, 118645, 118646, 118647, 118648, 118649, 118650) c6( ) c7(aC, app, avn, Kj, eZ); #c1(DNAJA2) c2(NP_005871) c3(dnaJ homolog subfamily A member 2) c4(160039) c5(160040, 160041, 160042, 160043, 160044, 160045) c6( ) c7(t, y, K, hl, m); #c1(DNAJA3) c2(NP_001128582) c3(dnaJ homolog subfamily A member 3, mitochondrial isoform 2) c4(50336) c5(50337, 50338, 50339, 50340, 50341, 50342) c6( ) c7(bF, T, xA, mx, aT, t, eA); #c1(DNAJA3) c2(NP_001273445) c3(dnaJ homolog subfamily A member 3, mitochondrial isoform 3) c4(104917) c5(104918, 104919, 104920, 104921, 104922, 104923) c6( ) c7(bF, T, xA, mx, aT, t, eA); #c1(DNAJA3) c2(NP_005138) c3(dnaJ homolog subfamily A member 3, mitochondrial isoform 1) c4(153323) c5(153324, 153325, 153326, 153327, 153328, 153329) c6( ) c7(bF, T, xA, mx, aT, t, eA); #c1(DNAJB1) c2(NP_001287843) c3(dnaJ homolog subfamily B member 1 isoform 2) c4( ) c5(112994, 112995, 112996, 112997, 112998) c6( ) c7(lD, bM, fR, aZ, He, bcE, fr, eW, hX, dV, bK, K, oi, ly, aq, bu, iV, lx, eM, Kv, mx, U, km, Kj, 8); #c1(DNAJB1) c2(NP_006136) c3(dnaJ homolog subfamily B member 1 isoform 1) c4(162303, 162304) c5(162305, 162306, 162307, 162308, 162309, 162310, 162311) c6( ) c7(lD, bM, fR, aZ, He, bcE, fr, eW, hX, dV, bK, K, oi, ly, aq, bu, iV, lx, eM, Kv, mx, U, km, Kj, B); #c1(DNAJB11) c2(NP_057390) c3(dnaJ homolog subfamily B member 11 precursor) c4(190520) c5(190521, 190522, 190523, 190524, 190525, 190526, 190527, 190528, 190529, 190530) c6( ) c7(t, m); #c1(DNAJB13) c2(NP_705842) c3(dnaJ homolog subfamily B member 13) c4(246344) c5(246345, 246346, 246347, 246348, 246349, 246350) c6( ) c7(cF); #c1(DNAJB13) c2(XP_005274041) c3(dnaJ homolog subfamily B member 13 isoform X3) c4(284911) c5( ) c6( ) c7(cF); #c1(DNAJB13) c2(XP_011543314) c3(dnaJ homolog subfamily B member 13 isoform X4) c4( ) c5(342096) c6( ) c7(cF); #c1(DNAJB13) c2(XP_011543317) c3(dnaJ homolog subfamily B member 13 isoform X7) c4( ) c5(342097, 342098, 342099, 342100, 342101, 342102, 342103, 342104, 342105) c6( ) c7(cF); #c1(DNAJB2) c2(NP_001034639) c3(dnaJ homolog subfamily B member 2 isoform a) c4(31958) c5(31959, 31960, 31961, 31962, 31963, 31964, 31965, 31966, 31967, 31968, 31969, 31970, 31971, 31972, 31973, 31974, 31975, 31976, 31977, 31978, 31979, 31980, 31981, 31982) c6( ) c7(rR, ql, c, bT, aem, oj, U, uY, bgT, Kj, fu, bV); #c1(DNAJB2) c2(NP_006727) c3(dnaJ homolog subfamily B member 2 isoform b) c4(167474, 167475, 167476, 167477) c5(167478, 167479, 167480, 167481, 167482, 167483) c6( ) c7(rR, ql, c, bT, aem, oj, U, uY, bgT, Kj, fu, bV); #c1(DNAJB5) c2(NP_001128476) c3(dnaJ homolog subfamily 8 member 5 isoform 2) c4(50036, 50037, 50038, 50039, 50040) c5(50041, 50042, 50043, 50044, 50045, 50046, 50047, 50048, 50049, 50050, 50051, 50052, 50053, 50054) c6( ) c7(iV); #c1(DNAJB5) c2(NP_001128477) c3(dnaJ homolog subfamily B member 5 isoform 1) c4(50055, 50056, 50057) c5(50058, 50059, 50060, 50061, 50062, 50063, 50064, 50065, 50066, 50067, 50068, 50069, 50070, 50071, 50072, 50073, 50074, 50075, 50076, 50077, 50078, 50079) c6( ) c7(iV); #c1(DNAJB5) c2(NP_036398) c3(dnaJ homolog subfamily B member 5 isoform 3) c4( ) c5(173608, 173609, 173610, 173611, 173612, 173613, 173614, 173615, 173616, 173617, 173618, 173619, 173620, 173621, 173622, 173623, 173624, 173625, 173626, 173627, 173628) c6( ) c7(iV); #c1(DNAJB6) c2(NP_005485) c3(dnaJ homolog subfamily B member 6 isoform b) c4(156641, 156642, 156643, 156644) c5(156645, 156646, 156647, 156648, 156649, 156650, 156651, 156652, 156653, 156654, 156655, 156656, 156657, 156658, 156659, 156660, 156661, 156662, 156663, 156664, 156665, 156666, 156667, 156668, 156669, 156670, 156671, 156672, 156673, 156674, 156675, 156676, 156677, 156678, 156679, 156680, 156681, 156682, 156683, 156684, 156685, 156686, 156687, 156688, 156689, 156690, 156691, 156692, 156693, 156694, 156695, 156696, 156697, 156698, 156699, 156700, 156701, 156702, 156703, 156704) c6( ) c7(Y, oj, aT, km, bgU, K, m, t, y); #c1(DNAJB6) c2(NP_490647) c3(dnaJ homolog subfamily B member 6 isoform a) c4(231031, 231032) c5(231033, 231034, 231035, 231036, 231037, 231038) c6( ) c7(Y, oj, aT, km, bgU, K, m, t, y); #c1(DNAJB6) c2(XP_006715886) c3(dnaJ homolog subfamily B member 6 isoform X2) c4(289883, 289884, 289885) c5( ) c6( ) c7(Y, oj, aT, km, bgU, K, m, t, y); #c1(DNAJB6) c2(XP_011514006) c3(dnaJ homolog subfamily B member 6 isoform X1) c4(306412, 306413) c5( ) c6( ) c7(Y, oj, aT, km, bgU, K, m, t, y); #c1(DNAJB7) c2(NP_660157) c3(dnaJ homolog subfamily B member 7) c4(240422) c5(240423, 240424, 240425, 240426, 240427, 240428) c6( ) c7(T, dA, bE, IH, ff, iK, en, qN, rA); #c1(DNAJB8) c2(NP_699161) c3(dnaJ homolog subfamily B member 8) c4(245749) c5(245750, 245751, 245752, 245753, 245754, 245755, 245756, 245757, 245758, 245759) c6( ) c7(bE, r, bB, fr, bu, q); #c1(DNAJB9) c2(NP_036460) c3(dnaJ homolog subfamily B member 9 precursor) c4(174033) c5(174034, 174035, 174036, 174037, 174038, 174039) c6( ) c7(hb, wL, K); #c1(DNAJC1) c2(NP_071760) c3(dnaJ homolog subfamily C member 1 precursor) c4(211979, 211980, 211981) c5(211982, 211983, 211984, 211985, 211986, 211987, 211988) c6( ) c7(Y, ac, an); #c1(DNAJC1) c2(XP_011517917) c3(dnaJ homolog subfamily C member 1 isoform X2) c4( ) c5(311862, 311863, 311864, 311865, 311866, 311867, 311868, 311869, 311870, 311871, 311872) c6( ) c7(Y, ac, an); #c1(DNAJC10) c2(NP_001258510) c3(dnaJ homolog subfamily C member 10 isoform 2 precursor) c4(96083) c5(96084, 96085, 96086, 96087, 96088, 96089, 96090, 96091, 96092, 96093, 96094, 96095) c6( ) c7(T, U, ey, K, cm, B, ad); #c1(DNAJC10) c2(NP_061854) c3(dnaJ homolog subfamily C member 10 isoform 1 precursor) c4(200806, 200807, 200808) c5(200809, 200810, 200811, 200812, 200813, 200814, 200815, 200816, 200817, 200818, 200819, 200820) c6( ) c7(T, U, ey, K, cm, B, ad); #c1(DNAJC12) c2(NP_068572) c3(dnaJ homolog subfamily C member 12 isoform a) c4(209441) c5(209442, 209443, 209444, 209445, 209446, 209447) c6( ) c7(af); #c1(DNAJC12) c2(NP_957714) c3(dnaJ homolog subfamily C member 12 isoform b) c4(262016) c5(262017, 262018, 262019, 262020, 262021, 262022) c6( ) c7(af); #c1(DNAJC13) c2(NP_056083) c3(dnaJ homolog subfamily C member 13) c4(185589) c5(185590, 185591, 185592, 185593, 185594, 185595, 185596, 185597, 185598, 185599, 185600, 185601, 185602) c6( ) c7(aW, j, an, aT); #c1(DNAJC13) c2(XP_005247302) c3(dnaJ homolog subfamily C member 13 isoform X1) c4(267761) c5(267762, 267763, 267764, 267765) c6( ) c7(aW, j, an, aT); #c1(DNAJC14) c2(NP_115740) c3(dnaJ homolog subfamily C member 14) c4(223759, 223760, 223761, 223762, 223763) c5(223764, 223765, 223766, 223767, 223768, 223769, 223770, 223771, 223772, 223773, 223774, 223775, 223776, 223777, 223778, 223779, 223780, 223781, 223782, 223783, 223784, 223785, 223786, 223787, 223788, 223789, 223790, 223791, 223792, 223793, 223794, 223795, 223796, 223797, 223798, 223799, 223800, 223801) c6( ) c7(t, y, K, m); #c1(DNAJC15) c2(NP_037370) c3(dnaJ homolog subfamily C member 15) c4(175085) c5(175086, 175087, 175088, 175089, 175090, 175091) c6( ) c7(iC, jf, T, dB, aW, Y, aT, aA, aF, m, t); #c1(DNAJC18) c2(NP_689899) c3(dnaJ homolog subfamily C member 18) c4(244297, 244298, 244299, 244300) c5(244301, 244302, 244303, 244304, 244305, 244306, 244307, 244308, 244309, 244310, 244311, 244312, 244313, 244314, 244315, 244316, 244317, 244318, 244319, 244320, 244321, 244322, 244323, 244324) c6( ) c7(at, bw, dL); #c1(DNAJC19) c2(NP_660304) c3(mitochondrial import inner membrane translocase subunit TIM14 isoform 1) c4(240808) c5(240809, 240810, 240811, 240812, 240813, 240814) c6( ) c7(gZ, cc, dr, mx, bgV); #c1(DNAJC2) c2(NP_001123359) c3(dnaJ homolog subfamily C member 2 isoform 2) c4(47013) c5(47014, 47015, 47016, 47017, 47018, 47019, 47020, 47021, 47022, 47023, 47024, 47025, 47026, 47027, 47028, 47029, 47030, 47031) c6( ) c7(ck, T, iU, ff, en, bt); #c1(DNAJC2) c2(NP_055192) c3(dnaJ homolog subfamily C member 2 isoform 1) c4(179680, 179681) c5( ) c6( ) c7(ck, T, iU, ff, en, bt); #c1(DNAJC27) c2(NP_057628) c3(dnaJ homolog subfamily C member 27 isoform 1) c4(191948, 191949) c5(191950, 191951, 191952, 191953, 191954, 191955, 191956, 191957, 191958, 191959, 191960, 191961) c6( ) c7(v, gX); #c1(DNAJC28) c2(NP_060303) c3(dnaJ homolog subfamily C member 28) c4(195280) c5(195281, 195282, 195283, 195284, 195285, 195286, 195287, 195288, 195289, 195290, 195291, 195292, 195293, 195294, 195295, 195296, 195297, 195298, 195299, 195300) c6( ) c7(Y); #c1(DNAJC3) c2(NP_006251) c3(dnaJ homolog subfamily C member 3 precursor) c4(163293) c5(163294, 163295, 163296, 163297, 163298, 163299) c6( ) c7(B, ad, r); #c1(DNAJC5) c2(NP_079495) c3(dnaJ homolog subfamily C member 5) c4(218378, 218379) c5(218380, 218381, 218382, 218383, 218384, 218385, 218386, 218387, 218388, 218389, 218390, 218391, 218392) c6( ) c7(T, apM, hq, aPQ, eM, aPR, aW, jZ, Gb, aPS, aT, aPT, ci, nA, bgW, aR, rY, aOX); #c1(DNAJC7) c2(NP_001138238) c3(dnaJ homolog subfamily C member 7 isoform 2) c4(56127) c5( ) c6( ) c7(h); #c1(DNAJC7) c2(NP_003306) c3(dnaJ homolog subfamily C member 7 isoform 1) c4(137322) c5(137323, 137324, 137325, 137326, 137327, 137328, 137329, 137330, 137331, 137332, 137333, 137334, 137335, 137336) c6( ) c7(h); #c1(DNAJC7) c2(XP_011523468) c3(dnaJ homolog subfamily C member 7 isoform X2) c4( ) c5(318004, 318005) c6( ) c7(h); #c1(DNAL1) c2(NP_113615) c3(dynein light chain 1, axonemal isoform 1) c4(221735, 221736, 221737, 221738, 221739, 221740, 221741) c5(221742, 221743, 221744, 221745, 221746, 221747, 221748, 221749, 221750, 221751, 221752) c6( ) c7(bgX, MG); #c1(DNAL1) c2(XP_011535506) c3(dynein light chain 1, axonemal isoform X1) c4( ) c5(332560, 332561, 332562, 332563, 332564, 332565, 332566, 332567, 332568, 332569, 332570, 332571, 332572, 332573, 332574, 332575, 332576, 332577, 332578, 332579, 332580, 332581, 332582, 332583, 332584, 332585, 332586, 332587, 332588, 332589, 332590, 332591, 332592, 332593, 332594) c6( ) c7(bgX, MG); #c1(DNASE1) c2(XP_011520696) c3(deoxyribonuclease-1 isoform X1) c4(315617) c5(315618, 315619, 315620, 315621, 315622, 315623, 315624, 315625, 315626, 315627, 315628, 315629, 315630, 315631, 315632, 315633, 315634, 315635, 315636, 315637, 315638, 315639, 315640, 315641, 315642, 315643, 315644, 315645, 315646, 315647, 315648, 315649, 315650, 315651, 315652, 315653, 315654, 315655, 315656, 315657, 315658, 315659, 315660, 315661, 315662, 315663, 315664, 315665, 315666, 315667, 315668, 315669, 315670, 315671, 315672, 315673, 315674, 315675, 315676, 315677, 315678, 315679, 315680, 315681, 315682, 315683, 315684, 315685, 315686, 315687, 315688, 315689, 315690, 315691, 315692, 315693, 315694, 315695, 315696, 315697, 315698, 315699, 315700, 315701, 315702, 315703, 315704, 315705, 315706, 315707, 315708, 315709, 315710, 315711, 315712, 315713, 315714, 315715, 315716, 315717, 315718) c6(315719, 315720, 315721, 315722, 315723) c7(T, eR, qb, aw, jh, cz, bB, hz, uE, cd, q, ad, rc, er, aE, aT, hD, h, K, wt, hK, ae, hm, yF, aa, aW, hI, eZ, aq, aVD, aF, ho, Vk, cm, aFA, ck, avS, bE, hc, fL, pw, y, B, ao); #c1(DNASE1) c2(XP_011520697) c3(deoxyribonuclease-1 isoform X3) c4(315724) c5(315725) c6( ) c7(T, eR, qb, aw, jh, cz, bB, hz, uE, cd, q, ad, rc, er, aE, aT, hD, h, K, wt, hK, ae, hm, yF, aa, aW, hI, eZ, aq, aVD, aF, ho, Vk, cm, aFA, ck, avS, bE, hc, fL, pw, y, B, ao); #c1(DNASE1) c2(XP_011520700) c3(deoxyribonuclease-1 isoform X6) c4( ) c5(315726, 315727, 315728, 315729, 315730, 315731, 315732) c6(315733, 315734) c7(T, eR, qb, aw, jh, cz, bB, hz, uE, cd, q, ad, rc, er, aE, aT, hD, h, K, wt, hK, ae, hm, yF, aa, aW, hI, eZ, aq, aVD, aF, ho, Vk, cm, aFA, ck, avS, bE, hc, fL, pw, y, B, ao); #c1(DNASEIL2) c2(NP_001288609) c3(deoxyribonuclease-1-like 2 precursor) c4( ) c5(113814, 113815, 113816, 113817, 113818, 113819, 113820, 113821, 113822, 113823, 113824, 113825, 113826, 113827, 113828, 113829, 113830, 113831, 113832) c6(113833, 113834, 113835, 113836, 113837, 113838) c7(ad); #c1(DNASEIL2) c2(XP_011520701) c3(deoxyribonuclease-1-like 2 isoform X1) c4(315735, 315736) c5(315737, 315738, 315739) c6( ) c7(ad); #c1(DNASEIL3) c2(NP_001243489) c3(deoxyribonuclease gamma isoform 2 precursor) c4(90930) c5(90931, 90932, 90933, 90934, 90935, 90936) c6( ) c7(vU, ajH, bgY, av, bgZ, bha, eH, eZ, jh, gl, ti, bS, du, eF, rz, eA, y, bN, qc); #c1(DNASEIL3) c2(NP_004935) c3(deoxyribonuclease gamma isoform 1 precursor) c4(151241, 151242, 151243) c5(151244, 151245, 151246, 151247, 151248, 151249, 151250, 151251, 151252, 151253, 151254, 151255, 151256, 151257, 151258, 151259, 151260, 151261, 151262, 151263, 151264, 151265) c6( ) c7(vU, ajH, bgY, av, bgZ, bha, eH, eZ, jh, gl, ti, bS, du, eF, rz, eA, y, bN, qc); #c1(DNASE2) c2(NP_001366) c3(deoxyribonuclease-2-alpha precursor) c4(117336, 117337) c5(117338, 117339, 117340, 117341, 117342, 117343, 117344, 117345, 117346, 117347, 117348, 117349) c6( ) c7(oO, eZ, cy, dy, fL, y); #c1(DNASE2B) c2(XP_011540180) c3(deoxyribonuclease-2-beta isoform X1) c4( ) c5(338563, 338564, 338565, 338566, 338567) c6( ) c7(F); #c1(DND1) c2(NP_919225) c3(dead end protein homolog 1) c4(258254) c5(258255, 258256, 258257, 258258, 258259, 258260) c6( ) c7(Lb, vT, bu); #c1(DNER) c2(NP_620711) c3(delta and Notch-like epidermal growth factor-related receptor precursor) c4(238097, 238098) c5(238099, 238100, 238101, 238102, 238103, 238104, 238105, 238106, 238107, 238108, 238109, 238110) c6( ) c7(bL, Kd, T, dD, ck, x, jf, ea, fd, h, eq, k, cm, bt, cd); #c1(DNHD1) c2(NP_653267) c3(dynein heavy chain domain-containing protein 1 isoform 1) c4(239412, 239413, 239414) c5(239415, 239416, 239417, 239418, 239419, 239420, 239421, 239422, 239423, 239424, 239425, 239426, 239427, 239428, 239429, 239430, 239431) c6( ) c7(fr); #c1(DNHD1) c2(NP_775860) c3(dynein heavy chain domain-containing protein 1 isoform 2) c4( ) c5(250500, 250501, 250502, 250503, 250504) c6( ) c7(fr); #c1(DNLZ) c2(NP_001074318) c3(DNL-type zinc finger protein) c4(37089) c5(37090, 37091, 37092, 37093, 37094, 37095) c6( ) c7(T, if, aj, Gn, qN, eW, J, hX, jz, h, CW, apn, aq, Ej, iR, cm, ov, iO, rH, im, rA, B); #c1(DNM1) c2(NP_001005336) c3(dynamin-1 isoform 2) c4(21388, 21389) c5(21390, 21391, 21392, 21393, 21394, 21395) c6( ) c7(vU, Qi, Cq, aTK, hb, XY, ha, fc, lm, cP, bU, af, aR); #c1(DNM1) c2(NP_001275666) c3(dynamin-1 isoform 3) c4(106994) c5(106995, 106996, 106997, 106998, 106999, 107000, 107001, 107002, 107003, 107004, 107005, 107006, 107007, 107008, 107009, 107010) c6( ) c7(vU, Qi, Cq, aTK, hb, XY, ha, fc, lm, cP, bU, af, aR); #c1(DNM1) c2(NP_001275668) c3(dynamin-1 isoform 4) c4(107011) c5(107012, 107013, 107014, 107015, 107016, 107017) c6( ) c7(vU, Qi, Cq, aTK, hb, XY, ha, fc, lm, cP, bU, af, aR); #c1(DNM1) c2(NP_004399) c3(dynamin-1 isoform 1) c4(146110, 146111) c5(146112, 146113, 146114, 146115, 146116, 146117, 146118, 146119, 146120, 146121, 146122, 146123, 146124) c6( ) c7(vU, Qi, Cq, aTK, hb, XY, ha, fc, lm, cP, bU, af, aR); #c1(DNM1) c2(XP_005251820) c3(dynamin-1 isoform X4) c4(271200) c5( ) c6( ) c7(vU, Qi, Cq, aTK, hb, XY, ha, fc, lm, cP, bU, af, aR); #c1(DNM1L) c2(NP_001265392) c3(dynamin-1-like protein isoform 4) c4(98484) c5(98485, 98486, 98487, 98488, 98489, 98490) c6( ) c7(lD, T, dG, j, ad, Ae, aT, cy, K, an, ae, af, ly, aW, ff, en, g, QK, px, bhb, lx, wg, c, SE, eM, U, awK, lC, NN); #c1(DNM1L) c2(NP_001265393) c3(dynamin-1-like protein isoform 5) c4(98491) c5(98492, 98493, 98494, 98495, 98496, 98497) c6( ) c7(lD, T, dG, j, ad, Ae, aT, cy, K, an, ae, af, ly, aW, ff, en, g, QK, px, bhb, lx, wg, c, SE, eM, U, awK, lC, NN); #c1(DNM1L) c2(NP_001265394) c3(dynamin-1-like protein isoform 6) c4(98498) c5(98499, 98500, 98501, 98502, 98503, 98504) c6( ) c7(lD, T, dG, j, ad, Ae, aT, cy, K, an, ae, af, ly, aW, ff, en, g, QK, px, bhb, lx, wg, c, SE, eM, U, awK, lC, NN); #c1(DNM1L) c2(NP_001265395) c3(dynamin-1-like protein isoform 7) c4(98505) c5(98506, 98507, 98508, 98509, 98510, 98511) c6( ) c7(lD, T, dG, j, ad, Ae, aT, cy, K, an, ae, af, ly, aW, ff, en, g, QK, px, bhb, lx, wg, c, SE, eM, U, awK, lC, NN); #c1(DNM1L) c2(NP_005681) c3(dynamin-1-like protein isoform 3) c4(158498, 158499) c5(158500, 158501, 158502, 158503, 158504, 158505, 158506, 158507, 158508, 158509, 158510, 158511) c6( ) c7(lD, T, dG, j, ad, Ae, aT, cy, K, an, ae, af, ly, aW, ff, en, g, QK, px, bhb, lx, wg, c, SE, eM, U, awK, lC, NN); #c1(DNM1L) c2(NP_036192) c3(dynamin-1-like protein isoform 1) c4(172323) c5(172324, 172325, 172326, 172327, 172328, 172329) c6( ) c7(lD, T, dG, j, ad, Ae, aT, cy, K, an, ae, af, ly, aW, ff, en, g, QK, px, bhb, lx, wg, c, SE, eM, U, awK, lC, NN); #c1(DNM1L) c2(NP_036193) c3(dynamin-1-like protein isoform 2) c4(172330) c5(172331, 172332, 172333, 172334, 172335, 172336) c6( ) c7(lD, T, dG, j, ad, Ae, aT, cy, K, an, ae, af, ly, aW, ff, en, g, QK, px, bhb, lx, wg, c, SE, eM, U, awK, lC, NN); #c1(DNM2) c2(NP_001005360) c3(dynamin-2 isoform 1) c4(21455) c5(21456, 21457, 21458, 21459, 21460, 21461) c6( ) c7(gV, T, aC, fR, Pt, aio, UU, arS, amp, Ri, aA, n, cz, aj, j, aTe, ci, fu, bX, bB, qN, UX, fK, J, aR, cd, ad, hX, eA, hd, no, aE, oj, aT, Ak, h, bhf, K, bI, bU, bV, ae, bhe, af, mu, jf, bhh, d, bhg, s, hG, aW, bT, xz, bhi, ayn, Ad, akB, dq, aF, bhd, BG, as, iV, dr, qa, zW, c, bE, mx, U, bhc, bk, aS, IC, B, UV, cn); #c1(DNM2) c2(NP_001005361) c3(dynamin-2 isoform 2) c4(21462, 21463) c5(21464, 21465, 21466, 21467, 21468, 21469, 21470, 21471, 21472, 21473, 21474, 21475, 21476) c6( ) c7(gV, T, aC, fR, Pt, aio, UU, arS, amp, Ri, aA, n, cz, aj, j, aTe, ci, fu, bX, bB, qN, UX, fK, J, aR, cd, ad, hX, eA, hd, no, aE, oj, aT, Ak, h, bhf, K, bI, bU, bV, ae, bhe, af, mu, jf, bhh, d, bhg, s, hG, aW, bT, xz, bhi, ayn, Ad, akB, dq, aF, bhd, BG, as, iV, dr, qa, zW, c, bE, mx, U, bhc, bk, aS, IC, B, UV, cn); #c1(DNM2) c2(NP_001005362) c3(dynamin-2 isoform 4) c4(21477, 21478, 21479) c5(21480, 21481, 21482, 21483, 21484, 21485, 21486, 21487, 21488, 21489, 21490, 21491, 21492, 21493, 21494, 21495, 21496) c6( ) c7(gV, T, aC, fR, Pt, aio, UU, arS, amp, Ri, aA, n, cz, aj, j, aTe, ci, fu, bX, bB, qN, UX, fK, J, aR, cd, ad, hX, eA, hd, no, aE, oj, aT, Ak, h, bhf, K, bI, bU, bV, ae, bhe, af, mu, jf, bhh, d, bhg, s, hG, aW, bT, xz, bhi, ayn, Ad, akB, dq, aF, bhd, BG, as, iV, dr, qa, zW, c, bE, mx, U, bhc, bk, aS, IC, B, UV, cn); #c1(DNM2) c2(NP_004936) c3(dynamin-2 isoform 3) c4(151266) c5(151267, 151268, 151269, 151270, 151271, 151272) c6( ) c7(gV, T, aC, fR, Pt, aio, UU, arS, amp, Ri, aA, n, cz, aj, j, aTe, ci, fu, bX, bB, qN, UX, fK, J, aR, cd, ad, hX, eA, hd, no, aE, oj, aT, Ak, h, bhf, K, bI, bU, bV, ae, bhe, af, mu, jf, bhh, d, bhg, s, hG, aW, bT, xz, bhi, ayn, Ad, akB, dq, aF, bhd, BG, as, iV, dr, qa, zW, c, bE, mx, U, bhc, bk, aS, IC, B, UV, cn); #c1(DNM3) c2(NP_001129599) c3(dynamin-3 isoform b) c4(51976, 51977) c5(51978, 51979, 51980, 51981, 51982, 51983) c6( ) c7(xR, T, au, afW, eU); #c1(DNM3) c2(NP_001265181) c3(dynamin-3 isoform c) c4( ) c5(97927, 97928, 97929, 97930, 97931) c6( ) c7(xR, T, au, afW, eU); #c1(DNM3) c2(NP_056384) c3(dynamin-3 isoform a) c4(187370) c5(187371, 187372, 187373, 187374, 187375, 187376, 187377) c6( ) c7(xR, T, au, afW, eU); #c1(DNM3) c2(XP_005245136) c3(dynamin-3 isoform X1) c4(266316) c5(266317) c6( ) c7(xR, T, au, afW, eU); #c1(DNM3) c2(XP_005245137) c3(dynamin-3 isoform X2) c4(266318) c5(266319, 266320, 266321, 266322, 266323, 266324) c6( ) c7(xR, T, au, afW, eU); #c1(DNM3) c2(XP_011507703) c3(dynamin-3 isoform X5) c4(297709) c5(297710, 297711, 297712, 297713, 297714, 297715) c6( ) c7(xR, T, au, afW, eU); #c1(DNMBP) c2(NP_056036) c3(dynamin-binding protein) c4(185236, 185237) c5(185238, 185239, 185240, 185241, 185242, 185243, 185244, 185245, 185246, 185247, 185248, 185249, 185250, 185251) c6( ) c7(af); #c1(DNMT1) c2(NP_001124295) c3(DNA (cytosine-5)-methyltransferase 1 isoform a) c4(48515, 48516) c5(48517, 48518, 48519, 48520, 48521, 48522) c6( ) c7(ng, bM, T, if, aI, bO, bB, IR, ci, Lw, ip, aE, K, eL, yo, zQ, iE, aW, WE, kt, g, eE, bw, bb, eM, Ip, vA, U, cj, uJ, m, gU, wu, iB, n, fr, qN, fK, cd, RD, jz, dL, ZN, he, fe, aq, kp, bhk, mo, dw, op, hq, bP, cA, eD, hL, hR, fL, bD, it, B, cn, bL, fG, arQ, aA, iI, AO, q, eA, cF, aT, vH, bK, Fg, ae, jf, ak, ND, nO, iU, Y, Lf, r, lo, en, cl, bu, t, iK, pb, ck, c, pZ, bhl, bt, bhj, vi, id, Pt, aFa, ha, jh, bS, hF, mC, ad, hX, dP, av, ib, py, wm, nJ, d, qt, ff, gK, eZ, gI, aF, Fq, bz, LB, bE, gk, bE, y, X); #c1(DNMT1) c2(NP_001370) c3(DNA (cytosine-5)-methyltransferase 1 isoform b) c4(117391) c5(117392, 117393, 117394, 117395, 117396, 117397) c6( ) c7(ng, bM, T, if, aI, bO, bB, IR, ci, Lw, ip, aE, K, eL, yo, zQ, iE, aW, WE, kt, g, eE, bw, bb, eM, Ip, vA, U, cj, uJ, m, gU, wu, iB, n, fr, qN, fK, cd, RD, jz, dL, ZN, he, fe, aq, kp, bhk, mo, dw, op, hq, bP, cA, eD, hL, hR, fL, bD, it, B, cn, bL, fG, arQ, aA, iI, AO, q, eA, cF, aT, vH, bK, Fg, ae, jf, ak, ND, nO, iU, Y, Lf, r, lo, en, cl, bu, t, iK, pb, ck, c, pZ, bhl, bt, bhj, vi, id, Pt, aFa, ha, jh, bS, hF, mC, ad, hX, dP, av, ib, py, wm, nJ, d, qt, ff, gK, eZ, gI, aF, Fq, bz, LB, bF, gk, bE, y, X); #c1(DNMT3A) c2(NP_715640) c3(DNA (cytosine-5)-methyltransferase 3A isoform b) c4(246706) c5(246707, 246708, 246709, 246710, 246711, 246712) c6( ) c7(T, wi, id, if, iW, ha, ht, aI, aA, fd, oY, jh, fr, ci, nA, qN, iI, hF, q, mC, br, ad, dP, oB, hX, er, av, aE, x, KN, kH, aT, dL, ox, jj, hu, eL, d, zH, iU, iZ, aW, oV, ff, Az, eZ, r, gm, aF, Fq, en, t, bw, bz, Hv, op, yR, ck, bF, gk, bP, c, eM, lp, vA, k, m, fL, bD, bt, xb, B, vi); #c1(DNMT3A) c2(NP_783328) c3(DNA (cytosine-5)-methyltransferase 3A isoform a) c4(251653, 251654) c5(251655, 251656, 251657, 251658, 251659, 251660, 251661, 251662, 251663, 251664, 251665, 251666, 251667, 251668, 251669, 251670) c6( ) c7(T, wi, id, if, iW, ha, ht, aI, aA, fd, oY, jh, fr, ci, nA, qN, iI, hF, q, mC, br, ad, dP, oB, hX, er, av, aE, x, KN, kH, aT, dL, ox, jj, hu, eL, d, zH, iU, iZ, aW, oV, ff, Az, eZ, r, gm, aF, Fq, en, t, bw, bz, Hv, op, yR, ck, bE, gk, bP, c, eM, lp, vA, k, m, fL, bD, bt, xb, B, vi); #c1(DNMT3A) c2(NP_783329) c3(DNA (cytosine-5)-methyltransferase 3A isoform c) c4(251671) c5(251672, 251673, 251674, 251675, 251676, 251677) c6( ) c7(T, wi, id, if, iW, ha, ht, aI, aA, fd, oY, jh, fr, ci, nA, qN, iI, hF, q, mC, br, ad, dP, oB, hX, er, av, aE, x, KN, kH, aT, dL, ox, jj, hu, eL, d, zH, iU, iZ, aW, oV, ff, Az, eZ, r, gm, aF, Fq, en, t, bw, bz, Hv, op, yR, ck, bF, gk, bP, c, eM, lp, vA, k, m, fL, bD, bt, xb, B, vi); #c1(DNMT3B) c2(NP_001193984) c3(DNA (cytosine-5)-methyltransferase 3B isoform 7) c4(83428, 83429) c5(83430, 83431, 83432, 83433, 83434) c6( ) c7(T, fR, if, aI, bO, fd, bB, ci, aE, u, hu, DY, bhm, aW, Az, g, cm, eM, cj, sv, uJ, m, gU, wu, sw, ht, afE, fr, nA, qN, zP, ft, jz, h, hB, ZN, he, Cw, AQ, aq, kp, hq, bP, cA, dB, eD, hL, rx, fL, bD, B, fM, aA, hy, pd, q, aT, ae, ne, jf, qw, hM, s, zH, iU, oV, Y, ev, r, lo, en, cl, t, f, iK, bt, ao, vi, id, jh, Hn, bS, mC, ad, dP, av, l, wm, BN, BO, ff, eZ, aF, jb, bz, dr, bF, alE, gk, bE, X, y, iu); #c1(DNMT3B) c2(NP_001193985) c3(DNA (cytosine-5)-methyltransferase 3B isoform 8) c4(83435) c5(83436, 83437, 83438, 83439, 83440, 83441) c6( ) c7(T, fR, if, aI, bO, fd, bB, ci, aE, u, hu, DY, bhm, aW, Az, g, cm, eM, cj, sv, uJ, m, gU, wu, sw, ht, afE, fr, nA, qN, zP, ft, jz, h, hB, ZN, he, Cw, AQ, aq, kp, hq, bP, cA, dB, eD, hL, rx, fL, bD, B, fM, aA, hy, pd, q, aT, ae, ne, jf, qw, hM, s, zH, iU, oV, Y, ev, r, lo, en, cl, t, f, iK, bt, ao, vi, id, jh, Hn, bS, mC, ad, dP, av, l, wm, BN, BO, ff, eZ, aF, jb, bz, dr, bF, alE, gk, bE, X, y, iu); #c1(DNMT3B) c2(NP_008823) c3(DNA (cytosine-5)-methyltransferase 3B isoform 1) c4(168832) c5(168833, 168834, 168835, 168836, 168837, 168838, 168839) c6( ) c7(T, fR, if, aI, bO, fd, bB, ci, aE, u, hu, DY, bhm, aW, Az, g, cm, eM, cj, sv, uJ, m, gU, wu, sw, ht, afE, fr, nA, qN, zP, ft, jz, h, hB, ZN, he, Cw, AQ, aq, kp, hq, bP, cA, dB, eD, hL, rx, fL, bD, B, fM, aA, hy, pd, q, aT, ae, ne, jf, qw, hM, s, zH, iU, oV, Y, ev, r, lo, en, cl, t, f, iK, bt, ao, vi, id, jh, Hn, bS, mC, ad, dP, av, l, wm, BN, BO, ff, eZ, aF, jb, bz, dr, bF, alE, gk, bE, X, y, iu); #c1(DNMT3B) c2(NP_787044) c3(DNA (cytosine-5)-methyltransferase 3B isoform 2) c4(251989, 251990, 251991) c5( ) c6( ) c7(T, fR, if, aI, bO, fd, bB, ci, aE, u, hu, DY, bhm, aW, Az, g, cm, eM, cj, sv, uJ, m, gU, wu, sw, ht, afE, fr, nA, qN, zP, ft, jz, h, hB, ZN, he, Cw, AQ, aq, kp, hq, bP, cA, dB, eD, hL, rx, fL, bD, B, fM, aA, hy, pd, q, aT, ae, ne, jf, qw, hM, s, zH, iU, oV, Y, ev, r, lo, en, cl, t, f, iK, bt, ao, vi, id, jh, Hn, bS, mC, ad, dP, av, l, wm, BN, BO, ff, eZ, aF, jb, bz, dr, bF, alE, gk, bE, X, y, iu); #c1(DNMT3B) c2(NP_787045) c3(DNA (cytosine-5)-methyltransferase 3B isoform 3) c4(251992) c5( ) c6( ) c7(T, fR, if, al, bO, fd, bB, ci, aE, u, hu, DY, bhm, aW, Az, g, cm, eM, cj, sv, uJ, m, gU, wu, sw, ht, afE, fr, nA, qN, zP, ft, jz, h, hB, ZN, he, Cw, AQ, aq, kp, hq, bP, cA, dB, eD, hL, rx, fL, bD, B, fM, aA, hy, pd, q, aT, ae, ne, jf, qw, hM, s, zH, iU, oV, Y, ev, r, la, en, cl, t, f, iK, bt, an, vi, id, jh, Hn, bS, mC, ad, dP, av, l, wm, BN, BO, ff, eZ, aF, jb, bz, dr, bF, alE, gk, bE, X, y, iu); #c1(DNMT3B) c2(NP_787046) c3(DNA (cytosine-5)-methyltransferase 3B isoform 6) c4(251993) c5(251994, 251995, 251996, 251997, 251998, 251999, 252000, 252001, 252002, 252003, 252004, 252005, 252006, 252007, 252008, 252009, 252010, 252011) c6( ) c7(T, fR, if, aI, bO, fd, bB, ci, aE, u, hu, DY, bhm, aW, Az, g, cm, eM, cj, sv, uJ, m, gU, wu, sw, ht, afE, fr, nA, qN, zP, ft, jz, h, hB, ZN, he, Cw, AQ, aq, kp, hq, bP, cA, dB, eD, hL, rx, fL, bD, B, fM, aA, hy, pd, q, aT, ae, ne, jf, qw, hM, s, zH, iU, oV, Y, ev, r, lo, en, cl, t, f, iK, bt, ao, vi, id, jh, Hn, bS, mC, ad, dP, av, l, wm, BN, BO, ff, eZ, aF, jb, bz, dr, bF, alE, gk, bE, X, y, iu); #c1(DNMT3B) c2(XP_011526955) c3(DNA (cytosine-5)-methyltransferase 3B isoform X1) c4( ) c5(321245, 321246, 321247, 321248, 321249, 321250, 321251, 321252, 321253, 321254, 321255, 321256) c6( ) c7(T, fR, if, aI, bO, fd, bB, ci, aE, u, hu, DY, bhm, aW, Az, g, cm, eM, cj, sv, uJ, m, gU, wu, sw, ht, afE, fr, nA, qN, zP, ft, jz, h, hB, ZN, he, Cw, AQ, aq, kp, hq, bP, cA, dB, eD, hL, rx, fL, bD, B, fM, aA, hy, pd, q, aT, ae, ne, jf, qw, hM, s, zH, iU, oV, Y, ev, r, lo, en, cl, t, f, iK, bt, ao, vi, id, jh, Hn, bS, mC, ad, dP, av, l, wm, BN, BO, ff, eZ, aF, jb, bz, dr, bF, alE, gk, bE, X, y, iu); #c1(DNMT3B) c2(XP_011526956) c3(DNA (cytosine-5)-methyltransferase 3B isoform X2) c4( ) c5(321257, 321258, 321259, 321260, 321261, 321262) c6( ) c7(T, fR, if, aI, bO, fd, bB, ci, aE, u, hu, DY, bhm, aW, Az, g, cm, eM, cj, sv, uJ, m, gU, wu, sw, ht, afE, fr, nA, qN, zP, ft, jz, h, hB, ZN, he, Cw, AQ, aq, kp, hq, bP, cA, dB, eD, hL, rx, fL, bD, B, fM, aA, hy, pd, q, aT, ae, ne, jf, qw, hM, s, zH, iU, oV, Y, ev, r, lo, en, cl, t, f, iK, bt, ao, vi, id, jh, Hn, bS, mC, ad, dP, av, l, wm, BN, BO, ff, eZ, aF, jb, bz, dr, bF, alE, gk, bE, X, y, iu); #c1(DNMT3L) c2(NP_787063) c3(DNA (cytosine-5)-methyltransferase 3-like isoform 2) c4(252054) c5(252055, 252056, 252057, 252058, 252059, 252060) c6( ) c7(T, gU, wu, Fa, eD, arQ, bt, vH, m, wm, bw, Px); #c1(DNMT3L) c2(XP_011527838) c3(DNA (cytosine-5)-methyltransferase 3-like isoform X1) c4(322771) c5(322772, 322773, 322774, 322775, 322776, 322777) c6( ) c7(T, gU, wu, Fa, eD, arQ, bt, vH, m, wm, bw, Px); #c1(DNPEP) c2(NP_036232) c3(aspartyl aminopeptidase) c4(172508, 172509) c5(172510, 172511, 172512, 172513, 172514, 172515, 172516, 172517, 172518, 172519, 172520, 172521) c6( ) c7(T, fM, eP, ha, jh, aA, Bm, n, vm, eb, fd, ci, q, XX, hW, Vr, dL, eL, r, aF, apm, iK, bz, ck, eM, cj, hR); #c1(DNPEP) c2(XP_011509185) c3(aspartyl aminopeptidase isoform X1) c4(299801) c5( ) c6( ) c7(T, fM, eP, ha, jh, aA, Bm, n, vm, eb, fd, ci, q, XX, hW, Vr, dL, eL, r, aF, apm, iK, bz, ck, eM, cj, hR); #c1(DNPEP) c2(XP_011509189) c3(aspartyl aminopeptidase isoform X3) c4( ) c5(299802, 299803, 299804, 299805, 299806, 299807) c6( ) c7(T, fM, eP, ha, jh, aA, Bm, n, vm, eb, fd, ci, q, XX, hW, Vr, dL, eL, r, aF, apm, iK, bz, ck, eM, cj, hR); #c1(DNTT) c2(NP_001017520) c3(DNA nucleotidylexotransferase isoform 2) c4(26539) c5(26540, 26541, 26542, 26543, 26544, 26545) c6( ) c7(bM, iH, acI, yY, cz, v, j, ad, Mg, Na, iX, hD, bK, K, rz, ae, ahE, A, yL, eZ, fe, ahI, bN, ck, ou, mx, yA, y, bt); #c1(DNTT) c2(NP_004079) c3(DNA nucleotidylexotransferase isoform 1) c4(143374) c5(143375, 143376, 143377, 143378, 143379, 143380) c6( ) c7(bM, iH, acI, yY, cz, v, j, ad, Mg, Na, iX, hD, bK, K, rz, ae, ahE, A, yL, eZ, fe, ahI, bN, ck, ou, mx, yA, y, bt); #c1(DOC2A) c2(XP_011544277) c3(double C2-like domain-containing protein alpha isoform X1) c4(343432) c5(343433, 343434, 343435, 343436, 343437, 343438) c6( ) c7(T, BI, id, ZH, CN, aoc, cF, eL, dL, m, ci, t, nJ, ae, ad, bN); #c1(DOC2B) c2(NP_003576) c3(double C2-like domain-containing protein beta) c4(139312) c5(139313, 139314, 139315, 139316, 139317, 139318, 139319, 139320, 139321, 139322) c6( ) c7(if, iQ, qN); #c1(DOCK1) c2(NP_001371) c3(dedicator of cytokinesis protein 1 isoform 2) c4(117398) c5(117399, 117400, 117401, 117402, 117403, 117404) c6( ) c7(bM, T, ac, mQ, aA, aF, aJu, m, MO, t, IB, eA); #c1(DOCK10) c2(NP_001277192) c3(dedicator of cytokinesis protein 10 DOCK10.2) c4(109210) c5(109211, 109212, 109213, 109214, 109215, 109216) c6( ) c7(Y, ey, cj); #c1(DOCK10) c2(NP_055504) c3(dedicator of cytokinesis protein 10 DOCK10.1) c4(181607) c5(181608, 181609, 181610, 181611, 181612, 181613) c6( ) c7(Y, ey, cj); #c1(DOCK10) c2(XP_006712685) c3(dedicator of cytokinesis protein 10 isoform X8) c4( ) c5(286791) c6( ) c7(Y, ey, cj); #c1(DOCK10) c2(XP_006712687) c3(dedicator of cytokinesis protein 10 isoform X10) c4(286792) c5(286793, 286794, 286795, 286796, 286797) c6( ) c7(Y, ey, cj); #c1(DOCK11) c2(NP_653259) c3(dedicator of cytokinesis protein 11) c4(239379) c5(239380, 239381, 239382, 239383, 239384, 239385) c6( ) c7(aj, J, hX, qC, nv, Qg, ajv, aT, adn, YL, qZ, aW, Pp, fq, bN, W, qe, aiM, cj, aez, pw, ER, be); #c1(DOCK2) c2(NP_004937) c3(dedicator of cytokinesis protein 2) c4(151273, 151274) c5(151275, 151276, 151277, 151278, 151279, 151280, 151281, 151282, 151283, 151284, 151285, 151286, 151287) c6( ) c7(ck, bM, ac, pf, aw, U, cd, ey, af); #c1(DOCK2) c2(XP_011532752) c3(dedicator of cytokinesis protein 2 isoform X3) c4(328831) c5(328832, 328833, 328834, 328835, 328836) c6( ) c7(ck, bM, ac, pf, aw, U, cd, ey, af); #c1(DOCK3) c2(NP_004938) c3(dedicator of cytokinesis protein 3) c4(151288) c5(151289, 151290, 151291, 151292, 151293, 151294, 151295) c6( ) c7(HQ, T, aW, ds, Y, pP, aT, nw, K, aAU, axp, aDF); #c1(DOCK3) c2(XP_006713073) c3(dedicator of cytokinesis protein 3 isoform X8) c4(287016) c5( ) c6( ) c7(HQ, T, aW, ds, Y, pP, aT, nw, K, aAU, axp, aDF); #c1(DOCK3) c2(XP_011531747) c3(dedicator of cytokinesis protein 3 isoform X12) c4( ) c5(327833, 327834, 327835, 327836, 327837) c6( ) c7(HQ, T, aW, ds, Y, pP, aT, nw, K, aAU, axp, aDF); #c1(DOCK4) c2(NP_055520) c3(dedicator of cytokinesis protein 4) c4(181690, 181691, 181692) c5(181693, 181694, 181695, 181696, 181697, 181698, 181699, 181700, 181701, 181702, 181703, 181704) c6( ) c7(xQ, T, oe, EQ, bw, oX, ci, m, yA, t, bN); #c1(DOCK4) c2(XP_006716251) c3(dedicator of cytokinesis protein 4 isoform X1) c4(290198, 290199) c5(290200, 290201, 290202, 290203, 290204, 290205, 290206, 290207, 290208, 290209, 290210, 290211) c6( ) c7(xQ, T, oe, EQ, bw, oX, ci, m, yA, t, bN); #c1(DOCK4) c2(XP_006716252) c3(dedicator of cytokinesis protein 4 isoform X3) c4(290212) c5(290213, 290214, 290215, 290216, 290217, 290218) c6( ) c7(xQ, T, oe, EQ, bw, oX, ci, m, yA, t, bN); #c1(DOCK4) c2(XP_011515019) c3(dedicator of cytokinesis protein 4 isoform X4) c4( ) c5(307794, 307795, 307796, 307797, 307798, 307799) c6( ) c7(xQ, T, oe, EQ, bw, oX, ci, m, yA, t, bN); #c1(DOCK5) c2(NP_079216) c3(dedicator of cytokinesis protein 5) c4(217473, 217474) c5(217475, 217476, 217477, 217478, 217479, 217480) c6( ) c7(v, aw, qM); #c1(DOCK5) c2(XP_011542965) c3(dedicator of cytokinesis protein 5 isoform X3) c4( ) c5(341663, 341664, 341665, 341666, 341667, 341668) c6( ) c7(v, aw, qM); #c1(DOCK6) c2(NP_065863) c3(dedicator of cytokinesis protein 6) c4(205951) c5(205952, 205953, 205954, 205955, 205956, 205957) c6( ) c7(afG, bhn, j, bt); #c1(DOCK6) c2(XP_005260058) c3(dedicator of cytokinesis protein 6 isoform X3) c4(276428) c5(276429, 276430, 276431, 276432, 276433, 276434) c6( ) c7(afG, bhn, j, bt); #c1(DOCK7) c2(XP_011540628) c3(dedicator of cytokinesis protein 7 isoform X1) c4(339172) c5(339173, 339174, 339175, 339176, 339177, 339178) c6( ) c7(bho, d, lm, lE); #c1(DOCK8) c2(NP_982272) c3(dedicator of cytokinesis protein 8 isoform 1) c4(263250, 263251) c5(263252, 263253, 263254, 263255, 263256, 263257, 263258, 263259, 263260, 263261, 263262, 263263, 263264) c6( ) c7(oO, bbv, T, nA, cd, bhq, lg, aT, Nr, Cw, aW, oV, CM, aeS, CF, Io, Xm, eE, bz, Nq, cT, Qu, zA, bhp); #c1(DOCK8) c2(XP_011516347) c3(dedicator of cytokinesis protein 8 isoform X1) c4(309574) c5(309575, 309576, 309577, 309578, 309579) c6( ) c7(oO, bbv, T, nA, cd, bhq, lg, aT, Nr, Cw, aW, oV, CM, aeS, CF, Io, Xm, eE, bz, Nq, cT, Qu, zA, bhp); #c1(DOCK8) c2(XP_011516348) c3(dedicator of cytokinesis protein 8 isoform X3) c4( ) c5(309580) c6( ) c7(oO, bbv, T, nA, cd, bhq, lg, aT, Nr, Cw, aW, oV, CM, aeS, CF, Io, Xm, eE, bz, Nq, cT, Qu, zA, bhp); #c1(DOCK8) c2(XP_011516350) c3(dedicator of cytokinesis protein 8 isoform X2) c4(309581) c5(309582, 309583, 309584, 309585, 309586) c6( ) c7(oO, bbv, T, nA, cd, bhq, lg, aT, Nr, Cw, aW, oV, CM, aeS, CF, Io, Xm, eE, bz, Nq, cT, Qu, zA, bhp); #c1(DOCK9) c2(NP_001123520) c3(dedicator of cytokinesis protein 9 isoform b) c4(47312) c5(47313, 47314, 47315, 47316, 47317, 47318) c6( ) c7(d, cj, j, bhr, bK, cd); #c1(DOCK9) c2(NP_001123521) c3(dedicator of cytokinesis protein 9 isoform c) c4( ) c5(47319, 47320, 47321, 47322, 47323, 47324) c6( ) c7(d, cj, j, bhr, bK, cd); #c1(DOCK9) c2(NP_001123522) c3(dedicator of cytokinesis protein 9 isoform d) c4(47325) c5(47326, 47327, 47328, 47329, 47330, 47331) c6( ) c7(d, cj, j, bhr, bK, cd); #c1(DOCK9) c2(XP_005254091) c3(dedicator of cytokinesis protein 9 isoform X16) c4( ) c5(272921) c6( ) c7(d, cj, j, bhr, bK, cd); #c1(DOCK9) c2(XP_005254092) c3(dedicator of cytokinesis protein 9 isoform X19) c4(272922, 272923) c5(272924, 272925, 272926, 272927, 272928, 272929, 272930, 272931, 272932, 272933, 272934, 272935) c6( ) c7(d, cj, j, bhr, bK, cd); #c1(DOCK9) c2(XP_005254093) c3(dedicator of cytokinesis protein 9 isoform X20) c4(272936) c5(272937, 272938, 272939, 272940, 272941) c6( ) c7(d, cj, j, bhr, bK, cd); #c1(DOCK9) c2(XP_006719985) c3(dedicator of cytokinesis protein 9 isoform X1) c4(293117) c5(293118, 293119, 293120, 293121, 293122, 293123, 293124) c6( ) c7(d, cj, j, bhr, bK, cd); #c1(DOCK9) c2(XP_006719989) c3(dedicator of cytokinesis protein 9 isoform X5) c4(293125) c5(293126, 293127, 293128, 293129, 293130, 293131) c6( ) c7(d, cj, j, bhr, bK, cd); #c1(DOCK9) c2(XP_006719992) c3(dedicator of cytokinesis protein 9 isoform X9) c4(293132, 293133) c5(293134, 293135, 293136, 293137, 293138, 293139, 293140, 293141, 293142, 293143, 293144) c6( ) c7(d, cj, j, bhr, bK, cd); #c1(DOCK9) c2(XP_006719994) c3(dedicator of cytokinesis protein 9 isoform X11) c4(293145, 293146, 293147) c5(293148, 293149, 293150, 293151, 293152, 293153, 293154, 293155, 293156, 293157, 293158, 293159, 293160, 293161, 293162, 293163, 293164, 293165) c6( ) c7(d, cj, j, bhr, bK, cd); #c1(DOCK9) c2(XP_006719995) c3(dedicator of cytokinesis protein 9 isoform X12) c4(293166) c5(293167, 293168, 293169, 293170, 293171, 293172) c6( ) c7(d, cj, j, bhr, bK, cd); #c1(DOCK9) c2(XP_006720000) c3(dedicator of cytokinesis protein 9 isoform X17) c4(293173, 293174, 293175) c5(293176, 293177, 293178, 293179, 293180, 293181, 293182, 293183, 293184, 293185, 293186, 293187, 293188) c6( ) c7(d, cj, j, bhr, bK, cd); #c1(DOCK9) c2(XP_006720001) c3(dedicator of cytokinesis protein 9 isoform X18) c4(293189) c5(293190, 293191, 293192, 293193, 293194, 293195) c6( ) c7(d, cj, j, bhr, bK, cd); #c1(DOHH) c2(XP_011526642) c3(deoxyhypusine hydroxylase isoform X1) c4(320949) c5(320950, 320951, 320952, 320953, 320954, 320955, 320956, 320957, 320958, 320959) c6( ) c7(ae, d, fM, ad, dV); #c1(DOK1) c2(NP_001184189) c3(docking protein 1 isoform 2) c4( ) c5(75557, 75558, 75559, 75560, 75561) c6( ) c7(ck, av, T, kP, iU, jh, cj, aA, pk, dz, aF, m, t, B); #c1(DOK1) c2(NP_001372) c3(docking protein 1 isoform 1) c4(117405) c5(117406, 117407, 117408, 117409, 117410, 117411) c6( ) c7(ck, av, T, kP, iU, jh, cj, aA, pk, dz, aF, m, t, B); #c1(DOK1) c2(XP_011530971) c3(docking protein 1 isoform X1) c4(326930) c5( ) c6( ) c7(ck, av, T, kP, iU, jh, cj, aA, pk, dz, aF, m, t, B); #c1(DOK1) c2(XP_011530972) c3(docking protein 1 isoform X2) c4( ) c5(326931) c6( ) c7(ck, av, T, kP, iU, jh, cj, aA, pk, dz, aF, m, t, B); #c1(DOK2) c2(NP_003965) c3(docking protein 2) c4(142493, 142494) c5(142495, 142496, 142497, 142498, 142499, 142500, 142501) c6( ) c7(ck, av, iU, Jl, aA, n, aF, m, bX, t, bz, iu, zn); #c1(DOK3) c2(NP_001138347) c3(docking protein 3 isoform 2) c4(56199, 56200) c5(56201, 56202, 56203, 56204, 56205, 56206, 56207, 56208, 56209, 56210, 56211, 56212, 56213, 56214, 56215, 56216, 56217, 56218, 56219, 56220, 56221, 56222, 56223, 56224, 56225, 56226, 56227, 56228, 56229, 56230, 56231, 56232, 56233) c6( ) c7(av); #c1(DOK3) c2(NP_001138348) c3(docking protein 3 isoform 3) c4(56234) c5(56235, 56236, 56237, 56238, 56239, 56240) c6( ) c7(av); #c1(DOK3) c2(NP_079148) c3(docking protein 3 isoform 1) c4(217244, 217245, 217246, 217247, 217248, 217249) c5(217250, 217251, 217252, 217253, 217254, 217255, 217256, 217257, 217258, 217259, 217260, 217261, 217262, 217263) c6( ) c7(av); #c1(DOK3) c2(XP_011532959) c3(docking protein 3 isoform X3) c4( ) c5(329120) c6( ) c7(av); #c1(DOK4) c2(NP_060580) c3(docking protein 4) c4(196666) c5(196667, 196668, 196669, 196670, 196671, 196672) c6( ) c7(av, bz, py, eM); #c1(DOK5) c2(NP_060901) c3(docking protein 5 isoform a) c4(198510) c5(198511, 198512, 198513, 198514, 198515, 198516) c6( ) c7(bL, W, v, bK, pb, sj); #c1(DOK6) c2(NP_689934) c3(docking protein 6) c4(244382) c5(244383, 244384, 244385, 244386, 244387, 244388) c6( ) c7(bA); #c1(DOK7) c2(NP_001158145) c3(protein Dok-7 isoform 2) c4(63183) c5(63184, 63185, 63186, 63187, 63188) c6( ) c7(xC, xm, T, hM, no, Mc, aOi, xA, aW, xj, bhs, bht, oj, aT, Ak, aDx); #c1(DOK7) c2(NP_001288000) c3(protein Dok-7 isoform 4) c4(113359) c5(113360, 113361, 113362, 113363, 113364, 113365) c6( ) c7(xC, xm, T, hM, no, Mc, aOi, xA, aW, xj, bhs, bht, oj, aT, Ak, aDx); #c1(DOK7) c2(NP_775931) c3(protein Dok-7 isoform 1) c4(250748) c5(250749, 250750, 250751, 250752, 250753, 250754, 250755) c6( ) c7(xC, xm, T, hM, no, Mc, aOi, xA, aW, xj, bhs, bht, oj, aT, Ak, aDx); #c1(DOK7) c2(XP_011511739) c3(protein Dok-7 isoform X3) c4( ) c5(302455) c6( ) c7(xC, xm, T, hM, no, Mc, aOi, xA, aW, xj, bhs, bht, oj, aT, Ak, aDx); #c1(DOLK) c2(NP_055723) c3(dolichol kinase) c4(183104, 183105) c5(183106, 183107, 183108, 183109, 183110, 183111, 183112, 183113, 183114, 183115, 183116, 183117) c6( ) c7(bhu, mx); #c1(DONSON) c2(NP_060083) c3(protein downstream neighbor of Son) c4(194071) c5(194072, 194073, 194074, 194075, 194076, 194077) c6( ) c7(ae, ad); #c1(DOPEY2) c2(XP_006724131) c3(protein dopey-2 isoform X1) c4(295797, 295798) c5(295799, 295800, 295801, 295802, 295803, 295804, 295805, 295806, 295807, 295808, 295809, 295810) c6( ) c7(f, anj, nA); #c1(DOT1L) c2(NP_115871) c3(histone-lysine N-methyltransferase, H3 lysine-79 specific) c4(224411) c5(224412, 224413, 224414, 224415, 224416, 224417) c6( ) c7(ck, T, mx, r, oX, mo, q); #c1(DOT1L) c2(XP_005259717) c3(histone-lysine N-methyltransferase, H3 lysine-79 specific isoform X1) c4(276240) c5(276241, 276242, 276243, 276244, 276245, 276246) c6( ) c7(ck, T, mx, r, oX, mo, q); #c1(DPAGT1) c2(NP_001373) c3(UDP-N-acetylglucosamine-dolichyl-phosphate N-acetylglucosaminephosphotransferase) c4(117412) c5(117413, 117414, 117415, 117416, 117417, 117418, 117419, 117420, 117421, 117422) c6( ) c7(Wl, xA, no, ff, SO, bhw, bu, aA, aQQ, aeu, aq, Km, beZ, bhv, avG, IM, en, B); #c1(DPAGT1) c2(XP_005271479) c3(UDP-N-acetylglucosamine-dolichyl-phosphate N-acetylglucosaminephosphotransferase isoform X1) c4(283430) c5(283431) c6( ) c7(WI, xA, no, ff, SO, bhw, bu, aA, aQQ, aeu, aq, Km, beZ, bhv, avG, IM, en, B); #c1(DPAGT1) c2(XP_011540950) c3(UDP-N-acetylglucosamine-dolichyl-phosphate N-acetylglucosaminephosphotransferase isoform X2) c4( ) c5(339482, 339483, 339484, 339485, 339486) c6( ) c7(WI, xA, no, ff, SO, bhw, bu, aA, aQQ, aeu, aq, Km, beZ, bhv, avG, IM, en, B); #c1(DPCD) c2(NP_056263) c3(protein DPCD) c4(186804, 186805, 186806, 186807, 186808) c5(186809, 186810, 186811, 186812, 186813, 186814, 186815, 186816, 186817, 186818, 186819, 186820, 186821, 186822, 186823, 186824, 186825, 186826, 186827, 186828, 186829, 186830, 186831, 186832, 186833, 186834, 186835, 186836, 186837, 186838, 186839, 186840, 186841) c6( ) c7(Pf, MG); #c1(DPCR1) c2(NP_543146) c3(diffuse panbronchiolitis critical region protein 1 precursor) c4(233402, 233403, 233404, 233405, 233406, 233407) c5(233408, 233409, 233410, 233411, 233412, 233413, 233414, 233415, 233416, 233417, 233418, 233419, 233420, 233421, 233422, 233423, 233424, 233425, 233426, 233427, 233428, 233429, 233430, 233431, 233432, 233433, 233434, 233435, 233436, 233437, 233438, 233439, 233440, 233441, 233442, 233443, 233444, 233445, 233446, 233447, 233448, 233449, 233450, 233451, 233452, 233453, 233454, 233455, 233456, 233457) c6( ) c7(aZL, eZ, cr, r, hH, q); #c1(DPEP1) c2(NP_001121613) c3(dipeptidase 1 precursor) c4(45848) c5(45849, 45850, 45851, 45852, 45853, 45854, 45855, 45856, 45857, 45858, 45859, 45860, 45861, 45862) c6( ) c7(T, axd, bB, qj, q, ad, AW, aE, aT, aU, ae, s, YY, aW, r, kp, akh, Fq, akw, bz, bN, kg, bE, HP, abh, pC); #c1(DPEP2) c2(NP_071750) c3(dipeptidase 2 precursor) c4(211932, 211933) c5(211934, 211935, 211936, 211937, 211938, 211939, 211940, 211941, 211942, 211943, 211944, 211945, 211946, 211947, 211948, 211949) c6( ) c7(T, id, aA, AO, q, mC, ad, aT, eL, ae, d, s, aW, eZ, la, r, g, pb, ck, Bv, eM, Qu, fL, B); #c1(DPEP2) c2(XP_005256147) c3(dipeptidase 2 isoform X5) c4(274012) c5( ) c6( ) c7(T, id, aA, AO, q, mC, ad, aT, eL, ae, d, s, aW, eZ, la, r, g, pb, ck, Bv, eM, Qu, fL, B); #c1(DPEP2) c2(XP_011521573) c3(dipeptidase 2 isoform XB) c4( ) c5(316305, 316306, 316307, 316308, 316309, 316310) c6( ) c7(T, id, aA, AO, q, mC, ad, aT, eL, ae, d, s, aW, eZ, la, r, g, pb, ck, Bv, eM, Qu, fL, B); #c1(DPEP3) c2(NP_071752) c3(dipeptidase 3 isoform a precursor) c4(211950) c5(211951, 211952, 211953, 211954, 211955, 211956) c6( ) c7(T, eM, aD, qj, bz, pC); #c1(DPF1) c2(NP_001128627) c3(zinc finger protein neuro-d4 isoform a) c4(50375) c5(50376, 50377, 50378, 50379, 50380, 50381, 50382, 50383, 50384, 50385) c6( ) c7(ad); #c1(DPF1) c2(NP_001128628) c3(zinc finger protein neuro-d4 isoform c) c4( ) c5(50386, 50387, 50388, 50389, 50390) c6( ) c7(ad); #c1(DPF1) c2(NP_004638) c3(zinc finger protein neuro-d4 isoform b) c4(148424) c5(148425, 148426, 148427, 148428, 148429, 148430, 148431) c6( ) c7(ad); #c1(DPF1) c2(XP_005259347) c3(zinc finger protein neuro-d4 isoform X5) c4(276068, 276069) c5(276070, 276071, 276072, 276073, 276074, 276075, 276076, 276077, 276078, 276079, 276080, 276081, 276082) c6( ) c7(ad); #c1(DPF1) c2(XP_006723470) c3(zinc finger protein neuro-d4 isoform X2) c4(295222) c5( ) c6( ) c7(ad); #c1(DPF3) c2(NP_001267471) c3(zinc finger protein DPF3 isoform 2) c4(99580, 99581) c5(99582, 99583, 99584, 99585, 99586, 99587, 99588, 99589, 99590, 99591, 99592, 99593) c6( ) c7(Na, aj, Nc, bX, aT); #c1(DPF3) c2(NP_036206) c3(zinc finger protein DPF3 isoform 1) c4(172378) c5(172379, 172380, 172381, 172382, 172383, 172384, 172385, 172386, 172387, 172388) c6( ) c7(Na, aj, Nc, bX, aT); #c1(DPH1) c2(NP_001374) c3(diphthamide biosynthesis protein 1) c4(117423) c5(117424, 117425, 117426, 117427, 117428, 117429) c6( ) c7(x, t, m, k); #c1(DPH3) c2(NP_001040899) c3(DPH3 homolog isoform 2) c4(34217) c5(34218, 34219, 34220, 34221, 34222, 34223) c6( ) c7(Y); #c1(DPH3) c2(NP_996662) c3(DPH3 homolog isoform 1) c4(264340) c5(264341, 264342, 264343, 264344, 264345, 264346) c6( ) c7(Y); #c1(DPH6) c2(NP_001135444) c3(diphthine-ammonia ligase isoform 2) c4(52936) c5(52937, 52938, 52939, 52940, 52941, 52942) c6( ) c7(y, aC, c); #c1(DPH6) c2(NP_542381) c3(diphthine-ammonia ligase isoform 1) c4(232309) c5(232310, 232311, 232312, 232313, 232314, 232315) c6( ) c7(y, aC, c); #c1(DPH7) c2(NP_620133) c3(diphthamide biosynthesis protein 7) c4(237324) c5(237325, 237326, 237327, 237328, 237329, 237330) c6( ) c7(jh); #c1(DPM1) c2(NP_003850) c3(dolichol-phosphate mannosyltransferase subunit 1) c4(141411) c5(141412, 141413, 141414, 141415, 141416, 141417) c6( ) c7(aE, Km, dv, SM); #c1(DPM2) c2(NP_003854) c3(dolichol phosphate-mannose biosynthesis regulatory protein) c4(141524, 141525) c5(141526, 141527, 141528, 141529, 141530, 141531, 141532, 141533, 141534, 141535, 141536, 141537) c6( ) c7(bhx, ha, xs); #c1(DPM3) c2(NP_061846) c3(dolichol-phosphate mannosyltransferase subunit 3 isoform 1) c4(200754, 200755) c5(200756, 200757, 200758, 200759, 200760, 200761, 200762, 200763) c6( ) c7(bhy, dv, ad); #c1(DPM3) c2(NP_714963) c3(dolichol-phosphate mannosyltransferase subunit 3 isoform 2) c4( ) c5(246662, 246663, 246664, 246665, 246666, 246667, 246668, 246669) c6( ) c7(bhy, dv, ad); #c1(DPP10) c2(NP_001171505) c3(inactive dipeptidyl peptidase 10 isoform c) c4(70334, 70335, 70336, 70337) c5(70338, 70339, 70340, 70341, 70342, 70343, 70344) c6( ) c7(bM, cT, Dw, VX, ac, nO, sp, oe, mQ, aq, Ds, v, bK, rz); #c1(DPP10) c2(NP_001171507) c3(inactive dipeptidyl peptidase 10 isoform a) c4( ) c5(70352, 70353, 70354, 70355, 70356) c6( ) c7(bM, cT, Dw, VX, ac, nO, sp, oe, mQ, aq, Ds, v, bK, rz); #c1(DPP10) c2(NP_065919) c3(inactive dipeptidyl peptidase 10 isoform long) c4(206251) c5(206252, 206253, 206254, 206255, 206256, 206257) c6( ) c7(bM, cT, Dw, VX, ac, nO, sp, oe, mQ, aq, Ds, v, bK, rz); #c1(DPP10) c2(XP_011509828) c3(inactive dipeptidyl peptidase 10 isoform X1) c4(300415) c5(300416, 300417, 300418, 300419, 300420, 300421, 300422) c6( ) c7(bM, cT, Dw, VX, ac, nO, sp, oe, mQ, aq, Ds, v, bK, rz); #c1(DPP10) c2(XP_011509829) c3(inactive dipeptidyl peptidase 10 isoform X2) c4( ) c5(300423, 300424, 300425, 300426, 300427, 300428, 300429, 300430, 300431, 300432, 300433) c6( ) c7(bM, cT, Dw, VX, ac, nO, sp, oe, mQ, aq, Ds, v, bK, rz); #c1(DPP3) c2(NP_001243599) c3(dipeptidyl peptidase 3 isoform 2) c4( ) c5(91134, 91135, 91136, 91137, 91138, 91139) c6( ) c7(T); #c1(DPP3) c2(NP_569710) c3(dipeptidyl peptidase 3 isoform 1) c4(233741, 233742, 233743, 233744, 233745, 233746, 233747) c5(233748, 233749, 233750, 233751, 233752, 233753, 233754, 233755, 233756, 233757, 233758, 233759, 233760, 233761, 233762, 233763, 233764, 233765, 233766, 233767, 233768, 233769, 233770, 233771, 233772, 233773, 233774, 233775, 233776, 233777, 233778, 233779, 233780, 233781, 233782, 233783, 233784, 233785, 233786, 233787, 233788, 233789, 233790, 233791) c6( ) c7(T); #c1(DPP4) c2(NP_001926) c3(dipeptidyl peptidase 4) c4(122253) c5(122254, 122255, 122256, 122257, 122258, 122259) c6( ) c7(T, fR, ea, e, al, aza, bB, fd, cL, ci, ip, GK, iX, qM, wt, aW, g, eE, qJ, eM, iA, cj, m, dD, aw, Wb, aj, fr, et, ai, cc, vM, h, jy, eV, dx, kK, fe, Wt, hq, hk, uz, eo, AN, bL, fM, dA, AS, eX, cz, v, j, C, V, q, J, eA, aT, aFm, ae, iU, De, nO, oV, Y, xR, r, lo, hf, t, ck, iM, mf, dy, hS, iW, jh, bS, eq, dG, ad, wD, dP, aHF, hd, F, ib, dk, IQ, fb, sj, je, wc, hp, Z, bz, es, gk, eU, bE, CO, bhz, ei, X, Cp); #c1(DPP6) c2(NP_001034439) c3(dipeptidyl aminopeptidase-like protein 6 isoform 3) c4(31717) c5(31718, 31719, 31720, 31721, 31722, 31723) c6( ) c7(aC, rR, bhA, VX, bhB, c, aV, ms, arD, vc, Vd, rz, bt); #c1(DPP6) c2(NP_001277181) c3(dipeptidyl aminopeptidase-like protein 6 isoform 4) c4(109201) c5(109202, 109203, 109204, 109205, 109206, 109207) c6( ) c7(aC, rR, bhA, VX, bhB, c, aV, ms, arD, vc, Vd, rz, bt); #c1(DPP6) c2(NP_001277182) c3(dipeptidyl aminopeptidase-like protein 6 isoform 5) c4( ) c5(109208) c6( ) c7(aC, rR, bhA, VX, bhB, c, aV, ms, arD, vc, Vd, rz, bt); #c1(DPP6) c2(NP_001927) c3(dipeptidyl aminopeptidase-like protein 6 isoform 2) c4(122260) c5(122261, 122262, 122263, 122264, 122265, 122266) c6( ) c7(aC, rR, bhA, VX, bhB, c, aV, ms, arD, vc, Vd, rz, bt); #c1(DPP6) c2(NP_570629) c3(dipeptidyl aminopeptidase-like protein 6 isoform 1) c4(234128) c5(234129, 234130, 234131, 234132, 234133, 234134) c6( ) c7(aC, rR, bhA, VX, bhB, c, aV, ms, arD, vc, Vd, rz, bt); #c1(DPP7) c2(NP_037511) c3(dipeptidyl peptidase 2 preproprotein) c4(175947) c5(175948, 175949, 175950, 175951, 175952, 175953, 175954, 175955, 175956) c6(175957, 175958) c7(cj); #c1(DPP7) c2(XP_006717146) c3(dipeptidyl peptidase 2 isoform X3) c4( ) c5(290781) c6( ) c7(cj); #c1(DPP7) c2(XP_011516903) c3(dipeptidyl peptidase 2 isoform X5) c4(310353) c5(310354, 310355, 310356, 310357, 310358, 310359, 310360) c6(310361, 310362) c7(cj); #c1(DPP8) c2(NP_060213) c3(dipeptidyl peptidase 8 isoform 2) c4( ) c5(194776, 194777, 194778, 194779, 194780) c6( ) c7(T, dD, aW, ea, aT, eq, m, ip); #c1(DPP8) c2(NP_932064) c3(dipeptidyl peptidase 8 isoform 3) c4(258747, 258748, 258749) c5(258750, 258751, 258752, 258753, 258754, 258755, 258756, 258757, 258758, 258759, 258760, 258761, 258762, 258763, 258764, 258765, 258766, 258767, 258768, 258769, 258770, 258771) c6( ) c7(T, dD, aW, ea, aT, eq, m, ip); #c1(DPP8) c2(NP_932065) c3(dipeptidyl peptidase 8 isoform 4) c4(258772) c5(258773, 258774, 258775, 258776, 258777, 258778) c6( ) c7(T, dD, aW, ea, aT, eq, m, ip); #c1(DPP8) c2(XP_005254562) c3(dipeptidyl peptidase 8 isoform X8) c4( ) c5(273251, 273252, 273253, 273254, 273255, 273256) c6( ) c7(T, dD, aW, ea, aT, eq, m, ip); #c1(DPP8) c2(XP_011520033) c3(dipeptidyl peptidase 8 isoform X3) c4(314961) c5( ) c6( ) c7(T, dD, aW, ea, aT, eq, m, ip); #c1(DPP8) c2(XP_011520036) c3(dipeptidyl peptidase 8 isoform X6) c4(314962) c5(314963) c6( ) c7(T, dD, aW, ea, aT, eq, m, ip); #c1(DPP9) c2(XP_005259730) c3(dipeptidyl peptidase 9 isoform X1) c4(276264, 276265, 276266) c5(276267, 276268, 276269, 276270, 276271, 276272, 276273, 276274, 276275, 276276, 276277, 276278) c6( ) c7(LB, dD, ea, cj, eq, bQ, ip); #c1(DPP9) c2(XP_011526711) c3(dipeptidyl peptidase 9 isoform X4) c4( ) c5(321021) c6( ) c7(LB, dD, ea, cj, eq, bQ, ip); #c1(DPP9) c2(XP_011526713) c3(dipeptidyl peptidase 9 isoform X5) c4( ) c5(321022, 321023, 321024, 321025, 321026, 321027) c6( ) c7(LB, dD, ea, cj, eq, bQ, ip); #c1(DPPA2) c2(NP_620170) c3(developmental pluripotency-associated protein 2) c4( ) c5(237459, 237460, 237461, 237462, 237463) c6( ) c7(av, TK, q, r); #c1(DPPA2) c2(XP_006713572) c3(developmental pluripotency-associated protein 2 isoform X2) c4(287238) c5(287239) c6( ) c7(av, TK, q, r); #c1(DPPA3) c2(NP_954980) c3(developmental pluripotency-associated protein 3) c4(261498) c5(261499, 261500, 261501, 261502, 261503, 261504, 261505) c6( ) c7(Lb); #c1(DPPA4) c2(NP_060659) c3(developmental pluripotency-associated protein 4) c4(197022) c5(197023, 197024, 197025, 197026, 197027, 197028) c6( ) c7(wu, wm); #c1(DPT) c2(NP_001928) c3(dermatopontin precursor) c4(122267) c5(122268, 122269, 122270, 122271, 122272, 122273) c6( ) c7(bA, gj, T, A, op, zt, e, vA, aep, cz, Mz, aj, Hr, ci, g, ae, eW, J, ad, afu); #c1(DPY19L2) c2(NP_776173) c3(probable C-mannosyltransferase DPY19L2) c4(250932) c5(250933, 250934, 250935, 250936, 250937, 250938) c6( ) c7(bhC, gU); #c1(DPY19L2) c2(XP_006719413) c3(probable C-mannosyltransferase DPY19L2 isoform X2) c4(292466) c5( ) c6( ) c7(bhC, gU); #c1(DPY19L2) c2(XP_006719419) c3(probable C-mannosyltransferase DPY19L2 isoform X8) c4(292467) c5( ) c6( ) c7(bhC, gU); #c1(DPY19L2) c2(XP_011536519) c3(probable C-mannosyltransferase DPY19L2 isoform X7) c4( ) c5(333880, 333881, 333882, 333883, 333884, 333885) c6( ) c7(bhC, gU); #c1(DPY19L2) c2(XP_011536520) c3(probable C-mannosyltransferase DPY19L2 isoform X9) c4( ) c5(333886, 333887, 333888, 333889, 333890, 333891) c6( ) c7(bhC, gU; #c1(DPY19L3) c2(XP_011524828) c3(probable C-mannosyltransferase DPY19L3 isoform X1) c4(319253) c5(319254, 319255, 319256, 319257, 319258, 319259, 319260, 319261, 319262, 319263) c6( ) c7(bK); #c1(DPY19L3) c2(XP_011524829) c3(probable C-mannosyltransferase DPY19L3 isoform X2) c4(319264, 319265) c5(319266, 319267, 319268, 319269, 319270, 319271, 319272, 319273, 319274, 319275, 319276, 319277) c6( ) c7(bK); #c1(DPY30) c2(NP_115963) c3(protein dpy-30 homolog) c4(224963) c5(224964, 224965, 224966, 224967, 224968, 224969, 224970, 224971, 224972, 224973) c6( ) c7(bhD, ck); #c1(DPYS) c2(NP_001376) c3(dihydropyrimidinase) c4(117430) c5(117431, 117432, 117433, 117434, 117435, 117436) c6( ) c7(IJ, T, W, nb, bhF, HT, oj, hl, aA, ayr, aF, cm, cd, bhE); #c1(DPYSL2) c2(NP_001184222) c3(dihydropyrimidinase-related protein 2 isoform 1) c4(75562) c5(75563) c6( ) c7(T, iH, oe, ci, il, qi, V, aPQ, WY, aT, bK, he, af, eu, aW, gl, aaE, f, cm, bz, fq, eM, bE, U, gT); #c1(DPYSL2) c2(NP_001231533) c3(dihydropyrimidinase-related protein 2 isoform 3) c4(87284) c5(87285, 87286, 87287, 87288, 87289, 87290, 87291, 87292, 87293, 87294, 87295, 87296, 87297, 87298) c6( ) c7(T, iH, oe, ci, il, qi, V, aPQ, WY, aT, bK, he, af, eu, aW, gl, aaE, f, cm, bz, fq, eM, bE, U, gT); #c1(DPYSL2) c2(NP_001377) c3(dihydropyrimidinase-related protein 2 isoform 2) c4(117437) c5(117438, 117439, 117440, 117441, 117442, 117443, 117444, 117445, 117446, 117447, 117448) c6( ) c7(T, iH, oe, ci, il, qi, V, aPQ, WY, aT, bK, he, af, eu, aW, gl, aaE, f, cm, bz, fq, eM, bE, U, gT); #c1(DPYSL3) c2(NP_001184223) c3(dihydropyrimidinase-related protein 3 isoform 1) c4(75564) c5(75565, 75566, 75567, 75568, 75569, 75570) c6( ) c7(ae, hl, aE, wO, ha, cm, Xj, K, f, bz, ad); #c1(DPYSL3) c2(NP_001378) c3(dihydropyrimidinase-related protein 3 isoform 2) c4(117449, 117450) c5(117451, 117452, 117453, 117454, 117455, 117456, 117457, 117458, 117459, 117460, 117461, 117462) c6( ) c7(ae, hl, aE, wO, ha, cm, Xj, K, f, bz, ad); #c1(DPYSL3) c2(XP_011535876) c3(dihydropyrimidinase-related protein 3 isoform X1) c4(333145) c5(333146, 333147, 333148, 333149, 333150, 333151) c6( ) c7(ae, hl, aE, wO, ha, cm, Xj, K, f, bz, ad); #c1(DPYSL4) c2(NP_006417) c3(dihydropyrimidinase-related protein 4) c4(164858, 164859) c5(164860, 164861, 164862, 164863, 164864, 164865, 164866) c6( ) c7(f, bhG); #c1(DPYSL4) c2(XP_011537427) c3(dihydropyrimidinase-related protein 4 isoform X1) c4( ) c5(335072, 335073, 335074, 335075, 335076, 335077, 335078, 335079, 335080) c6( ) c7(f, bhG); #c1(DPYSL5) c2(NP_001240652) c3(dihydropyrimidinase-related protein 5) c4(88647, 88648, 88649, 88650) c5(88651, 88652, 88653, 88654, 88655, 88656, 88657, 88658, 88659, 88660, 88661, 88662, 88663, 88664, 88665, 88666, 88667, 88668, 88669, 88670, 88671, 88672, 88673, 88674, 88675, 88676, 88677, 88678) c6( ) c7(av, ft, ape, nG, vd, pd, abW, mH); #c1(DRAM1) c2(NP_060840) c3(DNA damage-regulated autophagy modulator protein 1) c4(198085) c5(198086, 198087, 198088, 198089, 198090, 198091) c6( ) c7(T, d, iR, eH, cz, aq, K, jj, eF, B); #c1(DRAP1) c2(NP_006433) c3(dr1-associated corepressor) c4(165203) c5(165204, 165205, 165206, 165207, 165208, 165209, 165210) c6( ) c7(Y); #c1(DRC1) c2(NP_659475) c3(dynein regulatory complex protein 1) c4(240098) c5(240099, 240100, 240101, 240102, 240103, 240104) c6( ) c7(MG, bhH); #c1(DRC1) c2(XP_005264694) c3(dynein regulatory complex protein 1 isoform X1) c4(279207) c5( ) c6( ) c7(MG, bhH); #c1(DRC1) c2(XP_005264695) c3(dynein regulatory complex protein 1 isoform X2) c4( ) c5(279208, 279209, 279210, 279211, 279212, 279213) c6( ) c7(MG, bhH); #c1(DRD1) c2(NP_000785) c3(D(1A) dopamine receptor) c4(15732) c5(15733, 15734, 15735, 15736, 15737, 15738, 15739, 15740, 15741, 15742) c6( ) c7(bL, aUk, eR, wu, oe, uv, cz, mS, Jd, uu, ct, dG, v, ww, VV, ip, fU, HE, cF, hw, mW, XY, aU, h, bdp, dL, bK, K, wm, bq, oi, mY, mV, an, xa, af, hZ, mU, yL, fO, gC, gI, cu, abn, aFx, HL, Eg, bu, cm, xw, jb, mZ, qa, FT, mX, cv, aiO, Kc, op, bN, abV, cA, rR, vA, Gs, bhl, at, sv, ei, jd, mT); #c1(DRD2) c2(NP_000786) c3(D(2) dopamine receptor isoform long) c4(15743, 15744, 15745) c5(15746, 15747, 15748, 15749, 15750, 15751, 15752, 15753, 15754, 15755, 15756, 15757, 15758, 15759, 15760, 15761, 15762, 15763, 15764, 15765, 15766, 15767, 15768, 15769, 15770, 15771) c6( ) c7(Gk, T, uK, aUk, e, bO, gf, ur, HH, VV, aR, aji, bhN, iX, Gb, aU, K, qM, oi, xa, gr, KC, yo, aW, cm, mZ, aiO, bdc, eM, vA, ZT, Gs, sv, uJ, m, FW, IT, bhT, ht, n, To, aj, ww, et, nA, fK, bhM, ke, no, hw, bhR, aQQ, h, aNU, bdp, gl, aPe, dL, Gw, mV, mY, he, mU, abf, PT, Fn, Jj, ge, fe, vo, op, mX, cv, hq, aap, bhK, abV, ok, cA, yP, Ei, bhU, VU, hR, at, aqm, IB, jd, bhP, mT, qc, bL, iH, rG, eR, hU, bhS, He, qU, hx, cz, mS, ti, hy, v, avO, bhJ, V, q, J, cF, DK, QU, aqI, aT, cy, qv, aaw, bK, bq, an, rE, aqC, af, eu, s, Y, yL, fO, bcD, r, cu, HL, t, xw, FT, tl, bN, pH, rR, bhQ, FI, gO, Gl, VR, iW, ha, VT, Hn, Gd, bhL, bS, uu, dG, OH, kL, abZ, dP, HE, aQE, et, mW, UG, aqk, Sb, na, Jc, hZ, d, aal, Wi, aCt, Gv, gC, gI, iV, Z, EX, jb, bz, iq, gk, bhO, HP, Rm, bC, ei, Gp, Gu, ne); #c1(DRD2) c2(NP_057658) c3(D(2) dopamine receptor isoform short) c4(192134, 192135, 192136) c5(192137, 192138, 192139, 192140, 192141, 192142, 192143, 192144, 192145, 192146, 192147, 192148, 192149, 192150, 192151, 192152, 192153) c6( ) c7(Gk, T, uK, aUk, e, bO, gf, ur, HH, VV, aR, aji, bhN, iX, Gb, aU, K, qM, oi, xa, gr, KC, yo, aW, cm, mZ, aiO, bdc, eM, vA, ZT, Gs, sv, uJ, m, FW, IT, bhT, ht, n, To, aj, ww, ct, nA, fK, bhM, ke, no, hw, bhR, aQQ, h, aNU, bdp, gl, aPe, dL, Gw, mV, mY, he, mU, abf, PT, Fn, Jj, ge, fe, vo, op, mX, cv, hq, aap, bhK, abV, ok, cA, yP, Ei, bhU, VU, hR, at, aqm, lB, jd, bhP, mT, qc, bL, iH, rG, eR, hU, bhS, He, qQ, hx, cz, mS, ti, hy, v, avO, bhJ, V, g, J, cF, DK, QU, aqI, aT, cy, qv, aaw, bK, bq, an, rE, aqC, af, eu, s, Y, yL, fO, bcD, r, cu, HL, t, xw, FT, tl, bN, pH, rR, bhQ, FI, gO, Gl, VR, iW, ha, VT, Hn, Gd, bhL, bS, uu, dG, OH, kL, abZ, dP, HE, aQE, ot, mW, UG, aqk, Sb, na, Jc, hZ, d, aal, Wi, aCt, Gv, gC, gI, iV, Z, EX, jb, bz, iq, gk, bhO, HP, Rm, bC, ei, Gp, Gu, ne); #c1(DRD3) c2(NP_001269492) c3(D(3) dopamine receptor isoform a) c4(101741, 101742) c5(101743, 101744, 101745, 101746, 101747, 101748, 101749, 101750, 101751, 101752, 101753, 101754, 101755, 101756, 101757, 101758, 101759, 101760, 101761, 101762) c6( ) c7(qX, iH, aUk, aZ, iW, He, eX, bO, cz, mS, ti, bS, uu, et, ww, HH, V, VV, bhW, HE, PW, Gt, bhV, mW, iX, XY, UG, aT, h, eV, Sb, bK, an, mY, mV, he, aTO, xa, na, af, rz, mU, bN, PT, kl, hZ, Jj, aal, aW, yL, bcD, r, gl, cu, HL, PG, Eg, Z, vo, xw, jb, mZ, FT, mX, cv, aiO, aUc, hq, bhX, ok, akx, cA, rR, dJ, yP, Gs, sv, dy, jd, aqD, mT, qc); #c1(DRD3) c2(NP_387512) c3(D(3) dopamine receptor isoform e) c4(229024) c5(229025, 229026, 229027, 229028, 229029, 229030) c6( ) c7(qX, iH, aUk, aZ, iW, He, eX, bO, cz, mS, ti, bS, uu, ct, ww, HH, V, VV, bhW, HE, PW, Gt, bhV, mW, iX, XY, UG, aT, h, eV, Sb, bK, an, mY, mV, he, aTO, xa, na, af, rz, mU, bN, PT, kl, hZ, Jj, aal, aW, yL, bcD, r, gl, cu, HL, PG, Eg, Z, vo, xw, jb, mZ, FT, mX, cv, aiO, aUc, hq, bhX, ok, akx, cA, rR, dJ, yP, Gs, sv, dy, jd, aqD, mL qc); #c1(DRD4) c2(NP_000788) c3(D(4) dopamine receptor) c4(15772) c5(15773, 15774, 15775, 15776, 15777, 15778, 15779, 15780, 15781) c6( ) c7(uK, aUk, bO, eb, gf, bhZ, Jd, bhN, bid, iX, Gb, ta, abj, K, xa, uC, mZ, bdc, eM, ZT, Gs, adl, sv, abl, alv, uJ, yA, FW, ww, ct, ml, bhM, no, axe, dL, gl, mY, mV, he, mU, PT, agP, hie, vo, mX, bJ, hq, ok, abV, cA, bP, bhU, at, lB, jd, mL qc, jv, iH, oe, mS, ti, v, Si, aqt, aql, bK, bia, an, rE, rz, af, jf, Uf, yL, zS, r, HL, f, FT, bN, pH, bdF, bhY, bS, uu, abZ, HF, mW, aqk, na, Jc, agK, hZ, VX, tb, Gv, gC, gI, Z, jb, bz, GB, bib, aUa, Gp); #c1(DRD5) c2(NP_000789) c3(D(1B) dopamine receptor) c4(15782) c5(15783, 15784, 15785, 15786, 15787, 15788) c6( ) c7(uK, iH, aUk, iW, mS, bS, uu, et, ww, aOP, mW, XY, aqk, aU, bK, mL an, mY, mV, he, af, na, mU, ayn, mZ, FT, mX, dJ, HK, aUZ, aUR, Gp, Wl); #c1(DRG1) c2(NP_004138) c3(developmentally-regulated GTP-binding protein 1) c4(143843) c5(143844, 143845, 143846, 143847, 143848, 143849) c6( ) c7(ae, T, s, bE, aW, PX, aT, bB, it, dL, g, bz, ad); #c1(DRGX) c2(NP_001263380) c3(dorsal root ganglia homeobox protein) c4(97199, 97200) c5(97201, 97202, 97203, 97204, 97205, 97206, 97207, 97208, 97209, 97210, 97211, 97212) c6( ) c7(cd); #c1(DROSHA) c2(NP_001093882) c3(ribonuclease 3 isoform 2) c4(40489, 40490, 40491) c5(40492, 40493, 40494, 40495, 40496, 40497, 40498, 40499, 40500, 40501, 40502, 40503) c6( ) c7(T, gU, ht, bs, n, hy, br, ci, br, iu, vJ, iI, dL, hP, K, eL, BN, s, bfz, g, cl, t, bw, bz, ck, es, kP, eM, hL, cj, m, aan, ne); #c1(DROSHA) c2(NP_037367) c3(ribonuclease 3 isoform 1) c4(175060) c5(175061, 175062, 175063, 175064, 175065, 175066, 175067, 175068, 175069, 175070) c6( ) c7(T, gU, ht, bs, n, hy, fr, ci, br, iu, vJ, iI, dL, hP, K, eL, BN, s, bfz, g, cl, t, bw, bz, ck, es, kP, eM, hL, cj, m, aan, ne); #c1(DROSHA) c2(XP_005248351) c3(ribonuclease 3 isoform X4) c4(268324) c5(268325, 268326, 268327, 268328, 268329, 268330) c6( ) c7(T, gU, ht, bs, n, hy, fr, ci, br, iu, vJ, iI, dL, hP, K, eL, BN, s, bfz, g, cl, t, bw, bz, ck, es, kP, eM, hL, cj, m, aan, ne); #c1(DROSHA) c2(XP_011512335) c3(ribonuclease 3 isoform X5) c4( ) c5(302984, 302985, 302986, 302987, 302988, 302989) c6( ) c7(T, gU, ht, bs, n, hy, fr, ci, br, iu, vJ, il, dL, hP, K, eL, BN, s, bfz, g, cl, t, bw, bz, ck, es, kP, eM, hL, cj, m, aan, ne); #c1(DRP2) c2(NP_001164655) c3(dystrophin-related protein 2 isoform 2) c4(67148) c5( ) c6( ) c7(gl, PT, bK); #c1(DRP2) c2(NP_001930) c3(dystrophin-related protein 2 isoform 1) c4(122274) c5(122275, 122276, 122277, 122278, 122279, 122280, 122281, 122282, 122283, 122284, 122285, 122286, 122287, 122288, 122289, 122290, 122291, 122292, 122293, 122294) c6( ) c7(gl, PT, bK); #c1(DSC1) c2(NP_004939) c3(desmocollin-1 isoform Dsc1b preproprotein) c4(151296) c5(151297, 151298, 151299, 151300, 151301, 151302) c6( ) c7(bbA, Y, ji, g, bie, q, bif); #c1(DSC1) c2(NP_077739) c3(desmocollin-1 isoform Dsc1a preproprotein) c4(215327) c5(215328, 215329, 215330, 215331, 215332, 215333) c6( ) c7(bbA, Y, ji, g, bie, q, bif); #c1(DSC2) c2(NP_004940) c3(desmocollin-2 isoform Dsc2b preproprotein) c4(151303) c5(151304, 151305, 151306, 151307, 151308, 151309) c6( ) c7(T, bih, ht, by, aA, n, bB, ci, AO, XM, q, ad, cc, aT, ey, K, big, lQ, hu, ji, ae, qt, aW, ff, r, akt, aF, en, g, cm, bz, alu, wK, bE, hk, Qu, mx, m, bii, it, X); #c1(DSC2) c2(NP_077740) c3(desmocollin-2 isoform Dsc2a preproprotein) c4(215334, 215335, 215336) c5(215337, 215338, 215339, 215340, 215341, 215342, 215343, 215344, 215345, 215346, 215347, 215348) c6( ) c7(T, bih, ht, by, aA, n, bB, ci, AO, XM, q, ad, cc, aT, ey, K, big, lQ, hu, ji, ae, qt, aW, ff, r, akt, aF, en, g, cm, bz, alu, wK, bE, hk, Qu, mx, m, bii, it, X); #c1(DSC2) c2(XP_005258263) c3(desmocollin-2 isoform X1) c4( ) c5(275595, 275596, 275597, 275598, 275599, 275600) c6( ) c7(T, bih, ht, by, aA, n, bB, ci, AO, XM, q, ad, cc, aT, ey, K, big, lQ, hu, ji, ae, qt, aW, ff, r, akt, aF, en, g, cm, bz, alu, wK, bE, hk, Qu, mx, m, bii, it, X); #c1(DSC3) c2(NP_001932) c3(desmocollin-3 isoform Dsc3a preproprotein) c4(122295) c5(122296, 122297, 122298, 122299, 122300, 122301) c6( ) c7(T, bih, by, aA, n, bS, ct, ci, AO, XM, q, ad, sO, aT, ji, K, lQ, ae, qt, aW, ff, r, akt, aF, en, g, Z, t, cm, bz, alu, bbA, Qu, hk, wK, cj, vL, m, bii, it); #c1(DSC3) c2(NP_077741) c3(desmocollin-3 isoform Dsc3b preproprotein) c4(215349) c5(215350, 215351, 215352, 215353, 215354, 215355) c6( ) c7(T, bih, by, aA, n, bS, ct, ci, AO, XM, q, ad, sO, aT, ji, K, lQ, ae, qt, aW, ff, r, akt, aF, en, g, Z, t, cm, bz, alu, bbA, Qu, hk, wK, cj, vL, m, bii, it); #c1(DSCAM) c2(NP_001380) c3(Down syndrome cell adhesion molecule isoform CHD2-42 precursor) c4(117463) c5(117464, 117465, 117466, 117467, 117468, 117469) c6( ) c7(eM, ha, bD, vH, bK, lm, nA, ahl, j, f, lB, ahE, y); #c1(DSCAML1) c2(NP_065744) c3(Down syndrome cell adhesion molecule-like protein 1) c4(205154) c5(205155, 205156, 205157, 205158, 205159, 205160) c6( ) c7(ac); #c1(DSCAML1) c2(XP_011541220) c3(Down syndrome cell adhesion molecule-like protein 1 isoform X2) c4(339860) c5(339861, 339862, 339863, 339864, 339865, 339866) c6( ) c7(ac); #c1(DSCC1) c2(NP_076999) c3(sister chromatid cohesion protein DCC1) c4(214673) c5(214674, 214675, 214676, 214677, 214678, 214679) c6( ) c7(T, q, r); #c1(DSCR4) c2(NP_005858) c3(Down syndrome critical region protein 4) c4(159983) c5(159984, 159985, 159986, 159987, 159988, 159989) c6( ) c7(f); #c1(DSE) c2(NP_037484) c3(dermatan-sulfate epimerase precursor) c4(175764, 175765, 175766) c5(175767, 175768, 175769, 175770, 175771, 175772, 175773, 175774, 175775, 175776, 175777, 175778, 175779, 175780, 175781, 175782, 175783, 175784, 175785, 175786, 175787, 175788, 175789, 175790, 175791, 175792, 175793) c6( ) c7(bij, Eh, ac); #c1(DSEL) c2(NP_115536) c3(dermatan-sulfate epimerase-like protein precursor) c4(223115, 223116) c5(223117, 223118, 223119, 223120, 223121, 223122, 223123, 223124, 223125, 223126, 223127, 223128) c6( ) c7(xS, aw); #c1(DSG1) c2(NP_001933) c3(desmoglein-1 preproprotein) c4(122302) c5(122303, 122304, 122305, 122306, 122307, 122308) c6( ) c7(T, by, Pz, Tz, aRG, alg, lG, lQ, Zm, bil, axu, Y, ff, aFE, mQ, dN, dq, akY, aEW, LU, en, f, aRJ, dr, ay, cT, bik, XO, bim, awa); #c1(DSG2) c2(NP_001934) c3(desmoglein-2 preproprotein) c4(122309) c5(122310, 122311, 122312, 122313, 122314, 122315) c6( ) c7(bie, ay, cc, fM, wK, bE, bin, Y, mx, aA, bB, fe, dg, aF, ci, iV, bii, pb, wa); #c1(DSG3) c2(NP_001935) c3(desmoglein-3 preproprotein) c4(122316) c5(122317, 122318, 122319, 122320, 122321, 122322) c6( ) c7(T, hy, ci, aGX, av, biq, bip, aet, pX, alg, ab, IQ, an, axu, ff, aFE, en, g, pL, pm, iK, bz, ay, eM, Qu, IV, XO); #c1(DSG4) c2(NP_001127925) c3(desmoglein-4 isoform 1 preproprotein) c4(49512) c5(49513, 49514, 49515, 49516, 49517, 49518) c6( ) c7(alC, alu, bis, bir, axu, afB, xV, aEW, bim, pL); #c1(DSG4) c2(NP_817123) c3(desmoglein-4 isoform 2 preproprotein) c4(253114) c5(253115, 253116, 253117, 253118, 253119, 253120) c6( ) c7(alC, alu, bis, bir, axu, afB, xV, aEW, him, pL); #c1(DSP) c2(NP_001008844) c3(desmoplakin isoform II) c4(23437) c5(23438, 23439, 23440, 23441, 23442, 23443, 23444, 23445, 23446, 23447, 23448, 23449) c6( ) c7(aOR, T, Ke, by, n, aml, ci, aFJ, biy, XM, cd, Hr, ip, biA, av, cc, biu, biw, bit, ey, IQ, Tj, af, biz, Y, ff, afB, GA, biv, Ph, en, anW, g, bz, awi, dr, LB, eM, wK, mx, cj, gZ, bix, XO, it); #c1(DSP) c2(NP_004406) c3(desmoplakin isoform 1) c4(146154, 146155) c5(146156, 146157, 146158, 146159, 146160, 146161) c6( ) c7(aOR, T, Ke, by, n, aml, ci, aFJ, biy, XM, cd, Hr, ip, biA, av, cc, biu, biw, bit, ey, IQ, Tj, af, biz, Y, ff, afB, GA, biv, Ph, en, anW, g, bz, awi, dr, LB, eM, wK, mx, cj, gZ, bix, XO, it); #c1(DSPP) c2(NP_055023) c3(dentin sialophosphoprotein preproprotein) c4(178341) c5(178342, 178343, 178344, 178345, 178346, 178347, 178348, 178349, 178350, 178351) c6( ) c7(biD, T, Rz, oe, biB, n, biC, Ry, Pz, biy, V, ad, Hr, cc, awb, biw, ae, af, Y, ff, en, dr, wK, mG, gZ, biE, en, ano, awa); #c1(DST) c2(NP_001714) c3(dystonin isoform 1e precursor) c4(120453) c5(120454, 120455, 120456, 120457, 120458, 120459) c6( ) c7(T, arM, bcb, biF, Pt, aFa, bO, biH, bS, Jz, ct, ci, fu, bX, V, XM, aue, ad, RD, eW, aqJ, aT, aU, lQ, ae, iL, aW, Y, ff, en, g, Z, t, pm, aRJ, amt, sS, cA, Jr, biG, ZT, Ei, dy, m, XO, X); #c1(DST) c2(NP_056363) c3(dystonin isoform 1eA precursor) c4(187312, 187313) c5(187314, 187315, 187316, 187317, 187318, 187319) c6( ) c7(T, arM, bcb, biF, Pt, aFa, bO, biH, bS, Jz, ct, ci, fu, bX, V, XM, aue, ad, RD, eW, aqJ, aT, aU, lQ, ae, iL, aW, Y, ff, en, g, Z, t, pm, aRJ, amt, sS, cA, Jr, biG, ZT, Ei, dy, m, XO, X); #c1(DST) c2(NP_899236) c3(dystonin isoform 1) c4(258061) c5(258062, 258063, 258064, 258065, 258066, 258067) c6( ) c7(T, arM, bcb, biF, Pt, aFa, bO, biH, bS, Jz, ct, ci, fu, bX, V, XM, aue, ad, RD, eW, aqJ, aT, aU, lQ, ae, iL, aW, Y, ff, en, g, Z, t, pm, aRJ, amt, sS, cA, Jr, biG, ZT, Ei, dy, m, XO, X); #c1(DST) c2(XP_005249367) c3(dystonin isoform X1) c4( ) c5(269240, 269241, 269242, 269243, 269244) c6( ) c7(T, arM, bcb, biF, Pt, aFa, bO, biH, bS, Jz, ct, ci, fu, bX, V, XM, aue, ad, RD, eW, aqJ, aT, aU, lQ, ae, iL, aW, Y, ff, en, g, Z, t, pm, aRJ, amt, sS, cA, Jr, biG, ZT, Ei, dy, m, XO, X); #c1(DST) c2(XP_005249372) c3(dystonin isoform X3) c4(269245) c5(269246, 269247, 269248, 269249, 269250, 269251) c6( ) c7(T, arM, bcb, biF, Pt, aFa, bO, biH, bS, Jz, ct, ci, fu, bX, V, XM, aue, ad, RD, eW, aqJ, aT, aU, lQ, ae, iL, aW, Y, ff, en, g, Z, t, pm, aRJ, amt, sS, cA, Jr, biG, ZT, Ei, dy, m, XO, X); #c1(DST) c2(XP_005249380) c3(dystonin isoform X9) c4(269252, 269253) c5(269254, 269255, 269256, 269257, 269258, 269259) c6( ) c7(T, arM, bcb, biF, Pt, aFa, bO, biH, bS, Jz, ct, ci, fu, bX, V, XM, aue, ad, RD, eW, aqJ, aT, aU, lQ, ae, iL, aW, Y, ff, en, g, Z, t, pm, aRJ, amt, sS, cA, Jr, biG, ZT, Ei, dy, m, XO, X); #c1(DST) c2(XP_005249381) c3(dystonin isoform X10) c4(269260, 269261) c5(269262, 269263, 269264, 269265, 269266, 269267, 269268, 269269, 269270, 269271, 269272, 269273) c6( ) c7(T, arM, bcb, biF, Pt, aFa, bO, biH, bS, Jz, ct, ci, fu, bX, V, XM, aue, ad, RD, eW, aqJ, aT, aU, lQ, ae, iL, aW, Y, ff, en, g, Z, t, pm, aRJ, amt, sS, cA, Jr, biG, ZT, Ei, dy, m, XO, X); #c1(DST) c2(XP_011513127) c3(dystonin isoform X11) c4( ) c5(304932) c6( ) c7(T, arM, bcb, biF, Pt, aFa, bO, biH, bS, Jz, ct, ci, fu, bX, V, XM, aue, ad, RD, eW, aqJ, aT, aU, lQ, ae, iL, aW, Y, ff, en, g, Z, t, pm, aRJ, amt, sS, cA, Jr, biG, ZT, Ei, dy, m, XO, X); #c1(DST) c2(XP_011513128) c3(dystonin isoform X12) c4(304933) c5(304934, 304935, 304936, 304937, 304938, 304939, 304940, 304941, 304942, 304943, 304944, 304945) c6( ) c7(T, arM, bcb, biF, Pt, aFa, bO, biH, bS, Jz, ct, ci, fu, bX, V, XM, aue, ad, RD, eW, aqJ, aT, aU, lQ, ae, iL, aW, Y, ff, en, g, Z, t, pm, aRJ, amt, sS, cA, Jr, biG, ZT, Ei, dy, m, XO, X); #c1(DSTN) c2(XP_011527445) c3(destrin isoform X1) c4(322199, 322200) c5(322201, 322202, 322203, 322204, 322205, 322206, 322207) c6( ) c7(T, d, aE, bE, bB, By, dL, m, K, as, eA, X); #c1(DSTN) c2(XP_011527446) c3(destrin isoform X2) c4( ) c5(322208, 322209, 322210, 322211, 322212) c6( ) c7(T, d, aE, bE, bB, By, dL, m, K, as, eA, X); #c1(DSTYK) c2(NP_056190) c3(dual serine/threonine and tyrosine protein kinase isoform 1) c4(186213) c5(186214, 186215, 186216, 186217, 186218, 186219) c6( ) c7(bil); #c1(DSTYK) c2(NP_955749) c3(dual serine/threonine and tyrosine protein kinase isoform 2) c4(261925, 261926) c5(261927, 261928, 261929, 261930, 261931, 261932, 261933, 261934, 261935, 261936, 261937, 261938) c6( ) c7(bil); #c1(DSTYK) c2(XP_011507694) c3(dual serine/threonine and tyrosine protein kinase isoform X1) c4(297698) c5( ) c6( ) c7(bil); #c1(DTD1) c2(NP_543010) c3(D-tyrosyl-tRNA(Tyr) deacylase 1) c4(233229) c5(233230, 233231, 233232, 233233, 233234, 233235) c6( ) c7(aQe); #c1(DTHD1) c2(NP_001130008) c3(death domain-containing protein 1 isoform 2) c4( ) c5(52413, 52414, 52415, 52416, 52417, 52418) c6( ) c7(V, nx, j); #c1(DTHD1) c2(NP_001164171) c3(death domain-containing protein 1 isoform 1) c4( ) c5(66715, 66716, 66717, 66718, 66719) c6( ) c7(V, nx, j); #c1(DTHD1) c2(XP_006714077) c3(death domain-containing protein 1 isoform X2) c4(287538, 287539) c5(287540) c6( ) c7(V, nx, j); #c1(DTL) c2(NP_001273158) c3(denticleless protein homolog isoform 2) c4( ) c5(104387, 104388, 104389, 104390, 104391, 104392, 104393) c6( ) c7(T, ht, aA, bB, q, qK, aT, dz, ey, et, ff, r, nf, aF, en, t, KM, ac, bE, eD, m, B); #c1(DTL) c2(NP_001273159) c3(denticleless protein homolog isoform 3) c4(104394) c5(104395, 104396, 104397, 104398, 104399, 104400) c6( ) c7(T, ht, aA, bB, q, qK, aT, dz, ey, et, ff, r, nf, aF, en, t, KM, ac, bE, eD, m, B); #c1(DTL) c2(NP_057532) c3(denticleless protein homolog isoform 1) c4(191275) c5(191276, 191277, 191278, 191279, 191280, 191281) c6( ) c7(T, ht, aA, bB, q, qK, aT, dz, ey, et, ff, r, nf, aF, en, t, KM, ac, bE, eD, m, B); #c1(DTL) c2(XP_011507916) c3(denticleless protein homolog isoform X1) c4(298225) c5( ) c6( ) c7(T, ht, aA, bB, q, qK, aT, dz, ey, et, ff, r, nf, aF, en, t, KM, ac, bE, eD, m, B); #c1(DTNA) c2(NP_001121647) c3(dystrobrevin alpha isoform 9) c4(46010) c5(46011, 46012, 46013, 46014, 46015, 46016, 46017, 46018, 46019) c6( ) c7(no, Fh, xs, oj, biJ, j, Bu, bfW); #c1(DTNA) c2(NP_001185867) c3(dystrobrevin alpha isoform 10) c4(76601) c5(76602, 76603, 76604, 76605, 76606, 76607) c6( ) c7(no, Fh, xs, oj, biJ, j, Bu, bfW); #c1(DTNA) c2(NP_001185868) c3(dystrobrevin alpha isoform II) c4(76608) c5(76609, 76610, 76611, 76612, 76613, 76614) c6( ) c7(no, Fh, xs, oj, biJ, j, Bu, bfW); #c1(DTNA) c2(NP_001185871) c3(dystrobrevin alpha isoform 14) c4( ) c5(76615, 76616, 76617, 76618, 76619) c6( ) c7(ne, Eh, xs, oj, biJ, j, Bu, bfW); #c1(DTNA) c2(NP_001185873) c3(dystrobrevin alpha isoform 16) c4( ) c5(76620, 76621, 76622, 76623, 76624) c6( ) c7(no, Fh, xs, oj, biJ, j, Bu, bfW); #c1(DTNA) c2(NP_001381) c3(dystrobrevin alpha isoform 1) c4(117470, 117471, 117472) c5(117473, 117474, 117475, 117476, 117477, 117478, 117479, 117480, 117481, 117482, 117483, 117484, 117485, 117486, 117487, 117488, 117489, 117490, 117491, 117492, 117493, 117494) c6( ) c7(no, Fh, xs, oj, biJ, j, Bu, bfW); #c1(DTNA) c2(NP_001382) c3(dystrobrevin alpha isoform 3) c4(117495) c5(117496, 117497, 117498, 117499, 117500, 117501) c6( ) c7(no, Fh, xs, oj, biJ, j, Bu, bfW); #c1(DTNA) c2(NP_001383) c3(dystrobrevin alpha isoform 7) c4(117502) c5(117503, 117504, 117505, 117506, 117507, 117508) c6( ) c7(no, Fh, xs, oj, biJ, j, Bu, bfW); #c1(DTNA) c2(NP_116757) c3(dystrobrevin alpha isoform 2) c4(226404, 226405) c5(226406, 226407, 226408, 226409, 226410, 226411, 226412, 226413, 226414, 226415, 226416, 226417) c6( ) c7(no, Fh, xs, oj, biJ, j, Bu, bfW); #c1(DTNA) c2(NP_116760) c3(dystrobrevin alpha isoform 4) c4(226432) c5(226433, 226434, 226435, 226436, 226437, 226438) c6( ) c7(no, Fh, xs, oj, biJ, j, Bu, bfW); #c1(DTNA) c2(NP_116762) c3(dystrobrevin alpha isoform 6) c4( ) c5(226439, 226440, 226441, 226442, 226443, 226444, 226445, 226446) c6( ) c7(no, Fh, xs, oj, biJ, j, Bu, bfW); #c1(DTNA) c2(XP_005258273) c3(dystrobrevin alpha isoform X17) c4(275601) c5(275602) c6( ) c7(no, Fh, xs, oj, biJ, j, Bu, bfW); #c1(DTNA) c2(XP_005258278) c3(dystrobrevin alpha isoform X24) c4(275603) c5(275604) c6( ) c7(no, Fh, xs, oj, biJ, j, Bu, bfW); #c1(DTNA) c2(XP_005258279) c3(dystrobrevin alpha isoform X25) c4(275605) c5(275606, 275607) c6( ) c7(no, Fh, xs, oj, biJ, j, Bu, bfW); #c1(DTNB) c2(NP_001243232) c3(dystrobrevin beta isoform 6) c4(90200) c5(90201, 90202, 90203, 90204, 90205, 90206) c6( ) c7(cc, j, fd); #c1(DTNB) c2(NP_001243233) c3(dystrobrevin beta isoform 7) c4(90207) c5(90208) c6( ) c7(cc, j, fd); #c1(DTNB) c2(NP_001243237) c3(dystrobrevin beta isoform 8) c4( ) c5(90224, 90225, 90226, 90227, 90228, 90229) c6( ) c7(cc, j, fd); #c1(DTNB) c2(NP_068707) c3(dystrobrevin beta isoform 1) c4(210075, 210076) c5(210077, 210078, 210079, 210080, 210081, 210082, 210083) c6( ) c7(cc, j, fd); #c1(DTNB) c2(NP_149159) c3(dystrobrevin beta isoform 2) c4(227408, 227409, 227410) c5(227411, 227412, 227413, 227414, 227415, 227416, 227417, 227418, 227419, 227420, 227421, 227422) c6( ) c7(cc, j, fd); #c1(DTNB) c2(NP_149160) c3(dystrobrevin beta isoform 3) c4(227423) c5(227424, 227425, 227426, 227427, 227428, 227429) c6( ) c7(cc, j, fd); #c1(DTNB) c2(NP_899204) c3(dystrobrevin beta isoform 4) c4(258019) c5(258020, 258021, 258022, 258023, 258024, 258025) c6( ) c7(cc, j, fd); #c1(DTNB) c2(NP_899205) c3(dystrobrevin beta isoform 5) c4(258026) c5(258027, 258028, 258029, 258030, 258031, 258032) c6( ) c7(cc, j, fd); #c1(DTNB) c2(XP_005264241) c3(dystrobrevin beta isoform X9) c4(278712) c5(278713, 278714, 278715, 278716, 278717, 278718) c6( ) c7(cc, j, fd); #c1(DTNB) c2(XP_005264243) c3(dystrobrevin beta isoform X15) c4( ) c5(278719, 278720, 278721, 278722, 278723, 278724, 278725, 278726, 278727, 278728, 278729, 278730, 278731, 278732, 278733, 278734, 278735) c6( ) c7(cc, j, fd); #c1(DTNB) c2(XP_011530973) c3(dystrobrevin beta isoform X2) c4(326932) c5( ) c6( ) c7(cc, j, fd); #c1(DTNB) c2(XP_011530983) c3(dystrobrevin beta isoform X14) c4(326933) c5(326934, 326935, 326936, 326937, 326938) c6( ) c7(cc, j, fd); #c1(DTNBP1) c2(NP_001258596) c3(dysbindin isoform C) c4( ) c5(96173, 96174, 96175, 96176, 96177) c6( ) c7(iH, dA, oe, bO, mS, bS, ct, bdr, mW, Fo, bK, oi, mY, mV, he, na, KC, mU, IE, gI, Eg, Z, cm, jb, mZ, biK, mX, hq, ac, cA, XF, IF, sv, bdq, lB, xg, mT); #c1(DTNBP1) c2(NP_001258597) c3(dysbindin isoform d) c4(96178, 96179, 96180) c5(96181, 96182, 96183, 96184, 96185, 96186, 96187, 96188, 96189, 96190, 96191) c6( ) c7(iH, dA, oe, bO, mS, bS, ct, bdr, mW, Fo, bK, oi, mY, mV, he, na, KC, mU, IE, gI, Eg, Z, cm, jb, mZ, biK, mX, hq, ac, cA, XF, IF, sv, bdq, IB, xg, mT); #c1(DTNBP1) c2(NP_115498) c3(dysbindin isoform a) c4(222930, 222931) c5(222932, 222933, 222934, 222935, 222936, 222937, 222938, 222939, 222940, 222941, 222942, 222943, 222944, 222945) c6( ) c7(iH, dA, oe, bO, mS, bS, ct, bdr, mW, Fo, bK, oi, mY, mV, he, na, KC, mU, IE, gI, Eg, Z, cm, jb, mZ, biK, mX, hq, ac, cA, XF, IF, sv, bdq, IB, xg, mT); #c1(DTNBP1) c2(NP_898861) c3(dysbindin isoform b) c4(257776, 257777) c5(257778, 257779, 257780, 257781, 257782, 257783, 257784, 257785, 257786, 257787, 257788, 257789) c6( ) c7(iH, dA, oe, 60, mS, bS, ct, bdr, mW, Fo, bK, oi, mY, mV, he, na, KC, mU, IE, gI, Eg, Z, cm, jb, mZ, biK, mX, hq, ac, cA, XF, IF, sv, bdq, IB, xg, mT); #c1(DTX1) c2(XP_011536311) c3(E3 ubiquitin-protein ligase DTX1 isoform X1) c4(333665) c5(333666, 333667, 333668, 333669, 333670, 333671) c6( ) c7(d, yS, eF, eH, apK, h, il, Fc, eA, BA, Qt); #c1(DTX2) c2(NP_001096064) c3(probable E3 ubiquitin-protein ligase DTX2 isoform a) c4(40997, 40998, 40999, 41000, 41001, 41002, 41003) c5(41004, 41005, 41006, 41007, 41008, 41009, 41010, 41011, 41012, 41013, 41014, 41015, 41016, 41017, 41018, 41019, 41020, 41021, 41022, 41023, 41024, 41025, 41026, 41027, 41028, 41029, 41030, 41031, 41032, 41033, 41034, 41035, 41036, 41037) c6( ) c7(dB); #c1(DTX2) c2(NP_001096066) c3(probable E3 ubiquitin-protein ligase DTX2 isoform b) c4(41038, 41039) c5(41040, 41041, 41042, 41043, 41044, 41045, 41046, 41047, 41048, 41049) c6( ) c7(dB); #c1(DTX2) c2(XP_011514079) c3(probable E3 ubiquitin-protein ligase DTX2 isoform X3) c4(306646, 306647, 306648) c5(306649, 306650, 306651, 306652, 306653, 306654, 306655, 306656, 306657, 306658, 306659, 306660, 306661, 306662, 306663, 306664, 306665, 306666, 306667, 306668, 306669, 306670, 306671, 306672, 306673, 306674, 306675, 306676, 306677, 306678, 306679, 306680, 306681, 306682, 306683, 306684, 306685, 306686, 306687, 306688, 306689, 306690) c6( ) c7(dB); #c1(DTX3) c2(NP_001273174) c3(probable E3 ubiquitin-protein ligase DTX3 isoform b) c4(104478, 104479) c5(104480, 104481, 104482, 104483, 104484, 104485, 104486, 104487, 104488, 104489, 104490, 104491) c6( ) c7(aT); #c1(DTX3) c2(NP_001273175) c3(probable E3 ubiquitin-protein ligase DTX3 isoform a) c4(104492, 104493) c5(104494, 104495, 104496, 104497, 104498, 104499, 104500, 104501, 104502, 104503, 104504, 104505, 104506, 104507, 104508, 104509, 104510, 104511, 104512, 104513) c6( ) c7(aT); #c1(DTX4) c2(NP_001287656) c3(E3 ubiquitin-protein ligase DTX4 isoform 2) c4(112442) c5(112443, 112444, 112445, 112446, 112447) c6( ) c7(qK, BA); #c1(DTX4) c2(NP_055992) c3(E3 ubiquitin-protein ligase DTX4 isoform 1) c4(184994) c5(184995, 184996, 184997, 184998, 184999, 185000, 185001) c6( ) c7(qK, BA); #c1(DTYMK) c2(NP_036277) c3(thymidylate kinase isoform 1) c4(172833) c5(172834, 172835, 172836, 172837, 172838, 172839) c6( ) c7(eW, T, jp, bE, eH, bB, h, bS, eF, ae, X, ad); #c1(DUOX1) c2(NP_787954) c3(dual oxidase 1 precursor) c4(252151, 252152) c5(252153, 252154, 252155, 252156, 252157, 252158, 252159, 252160, 252161, 252162, 252163, 252164, 252165, 252166, 252167, 252168, 252169, 252170, 252171, 252172) c6( ) c7(T, al, cz, cR, n, aj, V, cd, J, ad, av, M, h, cy, K, ae, aQy, wC, d, Cu, g, bz, ck, qJ, eB, at, Da, B, biL); #c1(DUOX1) c2(XP_011519983) c3(dual oxidase 1 isoform X1) c4(314829) c5(314830, 314831, 314832, 314833) c6( ) c7(T, al, cz, cR, n, aj, V, cd, J, ad, av, M, h, cy, K, ae, aQy, wC, d, Cu, g, bz, ck, qJ, eB, at, Da, B, biL); #c1(DUOX1) c2(XP_011519984) c3(dual oxidase 1 isoform X2) c4(314834) c5(314835, 314836, 314837, 314838, 314839, 314840) c6( ) c7(T, al, cz, cR, n, aj, V, cd, J, ad, av, M, h, cy, K, ae, aQy, wC, d, Cu, g, bz, ck, qJ, eB, at, Da, B, biL); #c1(DUOX2) c2(NP_054799) c3(dual oxidase 2 precursor) c4(178005) c5(178006, 178007, 178008, 178009, 178010, 178011) c6( ) c7(al, cz, cR, n, aj, V, biO, cd, J, biN, Vp, av, hd, RN, M, h, cy, ji, K, wC, azU, A, biM, Cu, iV, bz, ck, qJ, eB, at, Da, gT, B); #c1(DUOXA1) c2(NP_001263193) c3(dual oxidase maturation factor 1 isoform 1) c4(96992) c5(96993, 96994, 96995, 96996, 96997, 96998, 96999, 97000, 97001, 97002, 97003, 97004, 97005) c6( ) c7(T, d, aW, aT, h, biP, bz, eA, aQy); #c1(DUOXA1) c2(NP_001263194) c3(dual oxidase maturation factor 1 isoform 2) c4(97006) c5(97007, 97008, 97009, 97010, 97011, 97012) c6( ) c7(T, d, aW, aT, h, biP, bz, eA, aQy); #c1(DUOXA1) c2(XP_005254830) c3(dual oxidase maturation factor 1 isoform X1) c4(273330) c5(273331, 273332, 273333, 273334, 273335) c6( ) c7(T, d, aW, aT, h, biP, bz, eA, aQy); #c1(DUOXA1) c2(XP_006720815) c3(dual oxidase maturation factor 1 isoform X3) c4(293693) c5(293694, 293695, 293696, 293697, 293698, 293699, 293700, 293701) c6( ) c7(T, d, aW, aT, h, biP, bz, eA, aQy); #c1(DUOXA1) c2(XP_006720817) c3(dual oxidase maturation factor 1 isoform X2) c4(293702, 293703, 293704) c5(293705, 293706, 293707, 293708, 293709, 293710, 293711, 293712, 293713, 293714, 293715, 293716, 293717, 293718, 293719, 293720, 293721, 293722, 293723) c6( ) c7(T, d, aW, aT, h, biP, bz, eA, aQy); #c1(DUOXA1) c2(XP_011520487) c3(dual oxidase maturation factor 1 isoform X5) c4(315374) c5( ) c6( ) c7(T, d, aW, aT, h, biP, bz, eA, aQy); #c1(DUOXA1) c2(XP_011520488) c3(dual oxidase maturation factor 1 isoform X6) c4(315375, 315376) c5(315377, 315378, 315379, 315380, 315381, 315382, 315383, 315384, 315385, 315386, 315387, 315388, 315389, 315390) c6( ) c7(T, d, aW, aT, h, biP, bz, eA, aQy); #c1(DUOXA2) c2(NP_997464) c3(dual oxidase maturation factor 2) c4(265542) c5(265543, 265544, 265545, 265546, 265547, 265548) c6( ) c7(RN, biR, ji, iV, biP, biQ, bz); #c1(DUPD1) c2(NP_001003892) c3(dual specificity phosphatase DUPD1) c4(20243) c5(20244, 20245, 20246, 20247, 20248, 20249) c6( ) c7(W); #c1(DUS2) c2(NP_001258691) c3(tRNA-dihydrouridine(20) synthase [NAD(P)+]-like isoform 1) c4(96350) c5(96351, 96352, 96353, 96354, 96355, 96356, 96357, 96358, 96359, 96360) c6( ) c7(bz, eM); #c1(DUS2) c2(NP_001258692) c3(tRNA-dihydrouridine(20) synthase [NAD(P)+]-like isoform 2) c4(96361) c5(96362, 96363, 96364, 96365, 96366, 96367) c6( ) c7(bz, eM); #c1(DUSP1) c2(NP_004408) c3(dual specificity protein phosphatase 1) c4(146162, 146163, 146164) c5(146165, 146166, 146167, 146168, 146169, 146170, 146171, 146172, 146173, 146174, 146175, 146176, 146177, 146178, 146179, 146180, 146181, 146182) c6( ) c7(bM, T, dD, aC, id, ea, uG, bO, aA, cz, jh, bS, j, et, C, ci, v, eq, V, fr, q, Pm, cd, ad, zo, dP, BI, av, biS, aE, Db, gd, aT, h, cy, K, bq, MO, ae, A, aW, ff, eH, cr, r, eZ, aq, lo, vs, kp, en, cl, Z, t, g, bz, eF, iK, ck, ar, ou, rR, nM, eM, iT, hL, cj, aGN, wR, ME, m, y, bt, B); #c1(DUSP10) c2(NP_009138) c3(dual specificity protein phosphatase 10) c4(171019, 171020, 171021) c5(171022, 171023, 171024, 171025, 171026, 171027, 171028, 171029, 171030, 171031, 171032, 171033) c6( ) c7(bM, ar, aiK, oz, r, hp, K, EA, ey, act, q, ad); #c1(DUSP10) c2(XP_011507418) c3(dual specificity protein phosphatase 10 isoform X2) c4( ) c5(297328, 297329, 297330, 297331, 297332, 297333, 297334, 297335, 297336, 297337) c6( ) c7(bM, ar, aiK, oz, r, hp, K, EA, ey, act, q, ad); #c1(DUSP11) c2(NP_003575) c3(RNA/RNP complex-1-interacting phosphatase) c4(139291, 139292, 139293) c5(139294, 139295, 139296, 139297, 139298, 139299, 139300, 139301, 139302, 139303, 139304, 139305, 139306, 139307, 139308, 139309, 139310, 139311) c6( ) c7(bE); #c1(DUSP12) c2(NP_009171) c3(dual specificity protein phosphatase 12) c4(171242) c5(171243, 171244, 171245, 171246, 171247, 171248) c6( ) c7(bL, T, aE, eM, iT, iU, NT, hL, iK, cm, lo, v, K, m, C, t, bt, bz, cl); #c1(DUSP13) c2(NP_001007272) c3(dual specificity protein phosphatase 13 isoform 1) c4(22664) c5(22665, 22666, 22667, 22668, 22669) c6( ) c7(cm, eR, bX); #c1(DUSP13) c2(NP_001007273) c3(dual specificity protein phosphatase 13 isoform 2) c4(22670, 22671) c5(22672, 22673, 22674, 22675, 22676, 22677) c6( ) c7(cm, eR, bX); #c1(DUSP13) c2(NP_001007274) c3(dual specificity protein phosphatase 13 isoform 3 precursor) c4(22678) c5(22679, 22680, 22681, 22682, 22683, 22684) c6( ) c7(cm, eR, bX); #c1(DUSP13) c2(NP_057448) c3(dual specificity protein phosphatase 13 isoform 6) c4( ) c5(190937, 190938, 190939, 190940, 190941, 190942, 190943, 190944, 190945) c6( ) c7(cm, eR, bX); #c1(DUSP13) c2(XP_005269940) c3(dual specificity protein phosphatase 13 isoform X3) c4( ) c5(283008, 283009) c6( ) c7(cm, eR, bX); #c1(DUSP13) c2(XP_011538155) c3(dual specificity protein phosphatase 13 isoform X5) c4(335786) c5(335787, 335788, 335789, 335790, 335791, 335792) c6( ) c7(cm, eR, bX); #c1(DUSP14) c2(NP_008957) c3(dual specificity protein phosphatase 14) c4(169791) c5(169792, 169793, 169794, 169795, 169796, 169797, 169798, 169799, 169800, 169801) c6( ) c7(Y); #c1(DUSP15) c2(NP_542178) c3(dual specificity protein phosphatase 15 isoform a) c4(232213, 232214, 232215, 232216) c5(232217, 232218, 232219, 232220, 232221, 232222, 232223, 232224, 232225, 232226, 232227, 232228, 232229, 232230, 232231, 232232, 232233, 232234, 232235, 232236, 232237, 232238, 232239, 232240) c6( ) c7(V, eo); #c1(DUSP15) c2(NP_817130) c3(dual specificity protein phosphatase 15 isoform b) c4( ) c5(253136, 253137, 253138, 253139, 253140, 253141, 253142, 253143, 253144, 253145, 253146) c6( ) c7(V, eo); #c1(DUSP16) c2(XP_005253545) c3(dual specificity protein phosphatase 16 isoform X2) c4( ) c5(272550) c6( ) c7(ck, vs, ae, ad); #c1(DUSP16) c2(XP_006719218) c3(dual specificity protein phosphatase 16 isoform X1) c4(292316, 292317, 292318) c5(292319, 292320, 292321, 292322, 292323, 292324, 292325, 292326, 292327, 292328, 292329, 292330, 292331, 292332, 292333, 292334, 292335) c6( ) c7(ck, vs, ae, ad); #c1(DUSP18) c2(NP_001291723) c3(dual specificity protein phosphatase 18 isoform a) c4(116389, 116390) c5(116391, 116392, 116393, 116394, 116395, 116396, 116397, 116398, 116399, 116400, 116401, 116402, 116403, 116404, 116405, 116406, 116407, 116408, 116409, 116410, 116411, 116412, 116413, 116414) c6( ) c7(ac); #c1(DUSP18) c2(NP_001291725) c3(dual specificity protein phosphatase 18 isoform b) c4( ) c5(116415, 116416, 116417, 116418) c6( ) c7(ac); #c1(DUSP2) c2(NP_004409) c3(dual specificity protein phosphatase 2) c4(146183) c5(146184, 146185, 146186, 146187, 146188, 146189) c6( ) c7(ul, iW, NT, fd, bB, Fb, uu, hF, Fc, eA, ad, dP, pX, aT, bK, K, he, ae, aW, kp, cm, bz, ck, bP, bE, Ei, m, pK); #c1(DUSP21) c2(NP_071359) c3(dual specificity protein phosphatase 21) c4(211198, 211199) c5(211200, 211201, 211202, 211203, 211204, 211205, 211206, 211207, 211208, 211209, 211210, 211211) c6( ) c7(B); #c1(DUSP22) c2(NP_001273484) c3(dual specificity protein phosphatase 22 isoform a) c4(105003) c5( ) c6( ) c7(aW, hp, aT); #c1(DUSP22) c2(NP_064570) c3(dual specificity protein phosphatase 22 isoform b) c4(203034) c5(203035, 203036, 203037, 203038, 203039, 203040) c6( ) c7(aW, hp, aT); #c1(DUSP22) c2(XP_011513059) c3(dual specificity protein phosphatase 22 isoform X1) c4( ) c5(304739, 304740, 304741, 304742, 304743, 304744) c6( ) c7(aW, hp, aT); #c1(DUSP23) c2(NP_060293) c3(dual specificity protein phosphatase 23) c4(195223) c5(195224, 195225, 195226, 195227, 195228, 195229, 195230, 195231, 195232, 195233, 195234, 195235, 195236, 195237) c6( ) c7(cm, bW, bX); #c1(DUSP27) c2(XP_005245660) c3(inactive dual specificity phosphatase 27 isoform X1) c4(266854) c5(266855, 266856, 266857, 266858, 266859, 266860, 266861, 266862, 266863, 266864, 266865, 266866, 266867, 266868) c6( ) c7(aWm, an, ac, cz); #c1(DUSP28) c2(NP_001028747) c3(dual specificity phosphatase 28) c4(30603) c5(30604, 30605, 30606, 30607, 30608, 30609, 30610, 30611, 30612, 30613) c6( ) c7(cm, eA, T, d, K); #c1(DUSP3) c2(NP_004081) c3(dual specificity protein phosphatase 3) c4(143400, 143401) c5(143402, 143403, 143404, 143405, 143406, 143407, 143408, 143409, 143410, 143411, 143412, 143413) c6( ) c7(T, eM, ci, m, t, ae, ad); #c1(DUSP4) c2(NP_001385) c3(dual specificity protein phosphatase 4 isoform 1) c4(117509) c5(117510, 117511, 117512, 117513, 117514, 117515) c6( ) c7(iu, T, cc, d, aW, qy, aT, r, n, ci, K, bz, eA, t, iK, fq, q); #c1(DUSP4) c2(XP_011542730) c3(dual specificity protein phosphatase 4 isoform X1) c4(341308) c5(341309, 341310, 341311, 341312, 341313, 341314) c6( ) c7(iu, T, cc, d, aW, qy, aT, r, n, ci, K, bz, eA, t, iK, fq, q); #c1(DUSP5) c2(NP_004410) c3(dual specificity protein phosphatase 5) c4(146190) c5(146191, 146192, 146193, 146194, 146195, 146196) c6( ) c7(T, aFG, aW, jh, cj, aT, aA, h, aF, ho, t, Cd, Wt); #c1(DUSP6) c2(NP_001937) c3(dual specificity protein phosphatase 6 isoform a) c4(122334) c5(122335, 122336, 122337, 122338, 122339, 122340) c6( ) c7(bL, T, aC, wL, v, j, ci, zP, AO, biT, Yn, hd, aE, aT, bK, K, eu, zQ, d, s, qt, aW, aq, g, cI, LV, t, bz, cm, ar, biU, nM, cA, nB, AM, Qu, eM, hL, m, it, B); #c1(DUSP6) c2(NP_073143) c3(dual specificity protein phosphatase 6 isoform b) c4(212791, 212792) c5(212793, 212794, 212795, 212796, 212797, 212798, 212799, 212800, 212801, 212802, 212803, 212804) c6( ) c7(bL, T, aC, wL, v, j, ci, zP, AO, biT, Yn, hd, aE, aT, bK, K, eu, zQ, d, s, qt, aW, aq, g, cI, LV, t, bz, cm, ar, biU, nM, cA, nB, AM, Qu, eM, hL, m, it, B); #c1(DUSP7) c2(NP_001938) c3(dual specificity protein phosphatase 7) c4(122341, 122342) c5(122343, 122344, 122345, 122346, 122347, 122348, 122349, 122350, 122351, 122352, 122353, 122354) c6( ) c7(ck, x, T, iT, k, hF, bt); #c1(DUSP8) c2(XP_011518235) c3(dual specificity protein phosphatase 8 isoform X1) c4(312267) c5(312268, 312269, 312270, 312271, 312272, 312273, 312274, 312275, 312276, 312277) c6( ) c7(fd, cj); #c1(DUSP9) c2(XP_011529425) c3(dual specificity protein phosphatase 9 isoform X2) c4(324852) c5(324853, 324854) c6( ) c7(bL, py, n, aj, v, ei, J); #c1(DUT) c2(NP_001020419) c3(deoxyuridine 5′-triphosphate nucleotidohydrolase, mitochondrial isoform 1 precursor) c4(28767, 28768, 28769) c5(28770, 28771, 28772, 28773, 28774, 28775, 28776, 28777, 28778, 28779, 28780, 28781) c6( ) c7(eW, T, eM, atC, aw, cr, jh, biV, ci, as, B); #c1(DUT) c2(NP_001020420) c3(deoxyuridine 5′-triphosphate nucleotidohydrolase, mitochondrial isoform 3) c4( ) c5(28782, 28783, 28784, 28785, 28786) c6( ) c7(eW, T, eM, atC, aw, cr, jh, biV, ci, as, B); #c1(DUT) c2(NP_001939) c3(deoxyuridine 5′-triphosphate nucleotidohydrolase, mitochondrial isoform 2) c4(122355) c5(122356, 122357, 122358, 122359, 122360, 122361, 122362) c6( ) c7(eW, T, eM, atC, aw, cr, jh, biV, ci, as, B); #c1(DUX4) c2(XP_011529816) c3(double homeobox protein 4 isoform X2) c4( ) c5(325627) c6( ) c7(li, bv, QG, xs, oj, lo, rx, bI, K, aiG, Bu, dx); #c1(DVL2) c2(NP_004413) c3(segment polarity protein dishevelled homolog DVL-2) c4(146197) c5(146198, 146199, 146200, 146201, 146202, 146203, 146204, 146205) c6(146206, 146207) c7(jf, av, d, aW, aT, r, ci, eA, Z, aLo, q, Qe); #c1(DVL3) c2(NP_004414) c3(segment polarity protein dishevelled homolog DVL-3) c4(146208, 146209, 146210) c5( ) c6( ) c7(av, T, eM, ff, it, at, aLn, g, en, as, bz, B, aa); #c1(DVL3) c2(XP_011510815) c3(segment polarity protein dishevelled homolog DVL-3 isoform X2) c4( ) c5(301261, 301262, 301263, 301264, 301265, 301266, 301267, 301268, 301269, 301270, 301271, 301272, 301273, 301274, 301275, 301276, 301277, 301278, 301279) c6( ) c7(av, T, eM, ff, it, at, aLn, g, en, as, bz, B, aa); #c1(DX0) c2(XP_006715068) c3(decapping and exo ribonuclease protein isoform X2) c4(288574) c5(288575, 288576, 288577, 288578, 288579, 288580, 288581, 288582, 288583, 288584, 288585, 288586, 288587, 288588, 288589, 288590, 288591, 288592, 288593, 288594, 288595, 288596, 288597, 288598, 288599, 288600, 288601, 288602, 288603, 288604, 288605, 288606, 288607, 288608, 288609, 288610, 288611, 288612, 288613, 288614, 288615, 288616, 288617, 288618, 288619, 288620, 288621, 288622, 288623, 288624, 288625, 288626) c6( ) c7(bN, A, W, cH, eZ, cj, v, nA, ei, bD, biW, af, alL); #c1(DX0) c2(XP_006725751) c3(decapping and exoribonuclease protein isoform X2) c4(296965) c5(296966, 296967, 296968, 296969, 296970, 296971, 296972, 296973, 296974, 296975, 296976, 296977, 296978, 296979) c6( ) c7(bN, A, W, cH, eZ, cj, v, nA, ei, bD, biW, af, alL); #c1(DYM) c2(NP_060123) c3(dymeclin) c4(194274, 194275) c5(194276, 194277, 194278, 194279, 194280, 194281, 194282, 194283, 194284, 194285, 194286, 194287, 194288) c6( ) c7(lD, bM, T, dD, ea, aO, e, if, aw, I, aj, eq, C, nA, bd, qN, q, J, rc, BY, sO, Ot, IC, aRD, K, Iz, fb, rv, aa, ly, lx, kT, gZ, aNL, aS, yA, vF, aZG); #c1(DYM) c2(XP_006722554) c3(dymeclin isoform X10) c4(294733) c5(294734, 294735, 294736, 294737, 294738) c6( ) c7(lD, bM, T, dD, ea, aO, e, if, aw, I, aj, eq, C, nA, bd, qN, q, J, rc, BY, sO, Ot, IC, aRD, K, Iz, fb, rv, aa, ly, lx, kT, gZ, aNL, aS, yA, vF, aZG); #c1(DYNAP) c2(NP_775900) c3(dynactin-associated protein) c4(250619) c5(250620, 250621, 250622, 250623, 250624, 250625) c6( ) c7(T); #c1(DYNC1H1) c2(NP_001367) c3(cytoplasmic dynein 1 heavy chain 1) c4(117350) c5(117351, 117352, 117353, 117354, 117355, 117356) c6( ) c7(T, OI, zN, dG, Vd, fu, nA, biY, cF, DK, nv, kf, biX, jy, bl, bU, OQ, PK, ED, Pg, QK, biZ, aNB, c, ql, mf, gv, XO, Wl, B); #c1(DYNC1I1) c2(NP_001129029) c3(cytoplasmic dynein 1 intermediate chain 1 isoform c) c4(50677) c5(50678, 50679, 50680, 50681, 50682, 50683) c6( ) c7(aOV, bX); #c1(DYNC1I1) c2(NP_001265351) c3(cytoplasmic dynein 1 intermediate chain 1 isoform e) c4(98353, 98354) c5(98355, 98356, 98357, 98358, 98359, 98360, 98361, 98362, 98363, 98364, 98365, 98366) c6( ) c7(aOV, bX); #c1(DYNC1I1) c2(XP_011514163) c3(cytoplasmic dynein 1 intermediate chain 1 isoform X1) c4(306743) c5(306744, 306745, 306746, 306747, 306748, 306749) c6( ) c7(aOV, bX); #c1(DYNC1I1) c2(XP_011514164) c3(cytoplasmic dynein 1 intermediate chain 1 isoform X2) c4(306750, 306751) c5(306752, 306753, 306754, 306755, 306756, 306757, 306758, 306759, 306760, 306761, 306762, 306763, 306764, 306765, 306766, 306767) c6( ) c7(aOV, bX); #c1(DYNC1I2) c2(NP_001258715) c3(cytoplasmic dynein 1 intermediate chain 2 isoform 2) c4(96411) c5(96412, 96413, 96414, 96415, 96416, 96417) c6( ) c7(T); #c1(DYNC1I2) c2(NP_001258718) c3(cytoplasmic dynein 1 intermediate chain 2 isoform 3) c4(96418) c5(96419, 96420, 96421, 96422, 96423, 96424, 96425, 96426, 96427, 96428) c6( ) c7(T); #c1(DYNC1I2) c2(NP_001258719) c3(cytoplasmic dynein 1 intermediate chain 2 isoform 4) c4(96429) c5(96430, 96431, 96432, 96433, 96434, 96435) c6( ) c7(T); #c1(DYNC1I2) c2(NP_001369) c3(cytoplasmic dynein 1 intermediate chain 2 isoform 1) c4(117366, 117367, 117368) c5(117369, 117370, 117371, 117372, 117373, 117374, 117375, 117376, 117377, 117378, 117379, 117380, 117381, 117382, 117383, 117384, 117385, 117386, 117387, 117388, 117389, 117390) c6( ) c7(T); #c1(DYNC1I2) c2(XP_005246424) c3(cytoplasmic dynein 1 intermediate chain 2 isoform X4) c4(267089) c5(267090, 267091, 267092, 267093, 267094, 267095, 267096, 267097, 267098, 267099) c6( ) c7(T); #c1(DYNC1LI1) c2(NP_057225) c3(cytoplasmic dynein 1 light intermediate chain 1) c4(189574) c5(189575, 189576, 189577, 189578, 189579, 189580) c6( ) c7(ds); #c1(DYNC2H1) c2(NP_001073932) c3(cytoplasmic dynein 2 heavy chain 1 isoform 2) c4(36567) c5(36568, 36569, 36570, 36571, 36572, 36573) c6( ) c7(ft, bja, bjc, bjb, bjd, j, zG, eA, af); #c1(DYNC2H1) c2(NP_001368) c3(cytoplasmic dynein 2 heavy chain 1 isoform 1) c4(117357, 117358, 117359) c5(117360, 117361, 117362, 117363, 117364, 117365) c6( ) c7(ft, bja, bjc, bjb, bjd, j, zG, eA, af); #c1(DYNC2H1) c2(XP_006718966) c3(cytoplasmic dynein 2 heavy chain 1 isoform X1) c4( ) c5(292138, 292139, 292140, 292141, 292142, 292143, 292144, 292145, 292146, 292147, 292148, 292149) c6( ) c7(ft, bja, bjc, bjb, bjd, j, zG, eA, af); #c1(DYNLL1) c2(NP_001032584) c3(dynein light chain 1, cytoplasmic) c4(31358, 31359) c5(31360, 31361, 31362, 31363, 31364, 31365, 31366, 31367, 31368, 31369, 31370, 31371, 31372, 31373, 31374, 31375, 31376, 31377, 31378, 31379, 31380, 31381, 31382, 31383, 31384, 31385, 31386, 31387) c6( ) c7(T, abY, iW, WT, jh, aA, bB, n, fd, Fb, fr, ci, ad, ip, hX, av, aAF, aT, io, K, hB, ae, eu, jf, aW, aEl, ff, aq, kp, aF, en, g, iR, t, cm, iK, eM, bE, adg, B); #c1(DYNLL2) c2(NP_542408) c3(dynein light chain 2, cytoplasmic) c4(232401) c5(232402, 232403, 232404, 232405, 232406, 232407) c6( ) c7(tb, Y, QU, yP, hL, ww, K, cl, B, hq); #c1(DYNLRB1) c2(NP_001268658) c3(dynein light chain roadblock-type 1 isoform c) c4( ) c5(100091) c6( ) c7(T, ft, eM, aA, cU, bz); #c1(DYNLRB1) c2(NP_054902) c3(dynein light chain roadblock-type 1 isoform a) c4(178266, 178267) c5(178268, 178269, 178270, 178271, 178272, 178273, 178274, 178275, 178276, 178277, 178278) c6( ) c7(T, ft, eM, aA, cU, bz); #c1(DYNLRB1) c2(XP_005260625) c3(dynein light chain roadblock-type 1 isoform X1) c4(276747) c5(276748, 276749, 276750, 276751, 276752, 276753) c6( ) c7(T, ft, eM, aA, cU, bz); #c1(DYNLT1) c2(NP_001278531) c3(dynein light chain Tctex-type 1 isoform 2) c4( ) c5(109793, 109794, 109795, 109796, 109797) c6( ) c7(lD, bu, BY); #c1(DYNLT1) c2(NP_001278532) c3(dynein light chain Tctex-type 1 isoform 3) c4( ) c5(109798, 109799, 109800, 109801, 109802, 109803) c6( ) c7(lD, bu, BY); #c1(DYNLT1) c2(NP_006510) c3(dynein light chain Tctex-type 1 isoform 1) c4(165890, 165891, 165892) c5(165893, 165894, 165895, 165896, 165897, 165898) c6( ) c7(lD, bu, BY); #c1(DYNLT3) c2(NP_006511) c3(dynein light chain Tctex-type 3) c4(165899, 165900, 165901) c5(165902, 165903, 165904, 165905, 165906, 165907, 165908, 165909, 165910, 165911, 165912, 165913, 165914, 165915, 165916, 165917, 165918, 165919) c6( ) c7(afR, HU, ayj, nC, Be); #c1(DYRK1A) c2(NP_001387) c3(dual specificity tyrosine-phosphorylation-regulated kinase 1A isoform 1) c4(117516, 117517) c5(117518, 117519, 117520, 117521, 117522, 117523) c6( ) c7(T, Kk, ha, bjf, bS, ct, nA, fK, cd, eA, anj, Hx, zf, HC, h, iY, K, he, af, ak, d, Y, bje, Z, QK, f, pH, EW, bb, pa, Kr, agl, U, R, bD, xg); #c1(DYRK1A) c2(NP_567824) c3(dual specificity tyrosine-phosphorylation-regulated kinase 1A isoform 3) c4(233561) c5(233562, 233563, 233564, 233565, 233566, 233567, 233568, 233569, 233570, 233571, 233572, 233573, 233574, 233575, 233576, 233577) c6( ) c7(T, Kk, ha, bjf, bS, ct, nA, fK, cd, eA, anj, Hx, zf, HC, h, iY, K, he, af, ak, d, Y, bje, Z, QK, f, pH, EW, bb, pa, Kr, agl, U, R, bD, xg); #c1(DYRK1A) c2(NP_569120) c3(dual specificity tyrosine-phosphorylation-regulated kinase 1A isoform 2) c4(233671) c5(233672, 233673, 233674, 233675, 233676, 233677, 233678, 233679, 233680, 233681, 233682, 233683) c6( ) c7(T, Kk, ha, bjf, bS, ct, nA, fK, cd, eA, anj, Hx, zf, HC, h, iY, K, he, af, ak, d, Y, bje, Z, QK, f, pH, EW, bb, pa, Kr, agl, U, R, bD, xg); #c1(DYRK1A) c2(NP_569122) c3(dual specificity tyrosine-phosphorylation-regulated kinase 1A isoform 5) c4(233684, 233685, 233686) c5(233687, 233688, 233689, 233690, 233691, 233692, 233693, 233694, 233695, 233696, 233697, 233698, 233699, 233700, 233701, 233702, 233703, 233704) c6( ) c7(T, Kk, ha, bjf, bS, ct, nA, fK, cd, eA, anj, Hx, zf, HC, h, iY, K, he, af, ak, d, Y, bje, Z, QK, f, pH, EW, bb, pa, Kr, agl, U, R, bD, xg); #c1(DYRK1A) c2(XP_011527786) c3(dual specificity tyrosine-phosphorylation-regulated kinase 1A isoform X4) c4(322755) c5( ) c6( ) c7(T, Kk, ha, bjf, bS, ct, nA, fK, cd, eA, anj, Hx, zf, HC, h, iY, K, he, af, ak, d, Y, bje, Z, QK, f, pH, EW, bb, pa, Kr, agl, U, R, bD, xg); #c1(DYRK1B) c2(NP_004705) c3(dual specificity tyrosine-phosphorylation-regulated kinase 1B isoform a) c4(148961) c5(148962, 148963, 148964, 148965, 148966) c6( ) c7(bv, T, aE, eM, bE, eH, bB, kp, m, ei, g, eF, t, bz); #c1(DYRK1B) c2(NP_006474) c3(dual specificity tyrosine-phosphorylation-regulated kinase 1B isoform b) c4(165477) c5(165478, 165479, 165480, 165481, 165482) c6( ) c7(bv, T, aE, eM, bE, eH, bB, kp, m, ei, g, eF, t, bz); #c1(DYRK1B) c2(NP_006475) c3(dual specificity tyrosine-phosphorylation-regulated kinase 1B isoform c) c4(165483) c5(165484, 165485, 165486, 165487, 165488) c6( ) c7(bv, T, aE, eM, bE, eH, bB, kp, m, ei, g, eF, t, bz); #c1(DYRK1B) c2(XP_005259452) c3(dual specificity tyrosine-phosphorylation-regulated kinase 1B isoform X1) c4( ) c5(276111) c6( ) c7(bv, T, aE, eM, bE, eH, bB, kp, m, ei, g, eF, t, bz); #c1(DYRK1B) c2(XP_011525771) c3(dual specificity tyrosine-phosphorylation-regulated kinase 1B isoform X2) c4( ) c5(320173) c6( ) c7(bv, T, aE, eM, bE, eH, bB, kp, m, ei, g, eF, t, bz); #c1(DYRK1B) c2(XP_011525772) c3(dual specificity tyrosine-phosphorylation-regulated kinase 1B isoform X3) c4( ) c5(320174) c6( ) c7(bv, T, aE, eM, bE, eH, bB, kp, m, ei, g, eF, t, bz); #c1(DYRK2) c2(NP_003574) c3(dual specificity tyrosine-phosphorylation-regulated kinase 2 isoform 1) c4( ) c5(139281, 139282, 139283, 139284, 139285, 139286, 139287, 139288, 139289, 139290) c6( ) c7(T, iE, aW, hj, aA, aHs, aT, aE, ey, g, cm); #c1(DYRK2) c2(NP_006473) c3(dual specificity tyrosine-phosphorylation-regulated kinase 2 isoform 2) c4(165459, 165460, 165461, 165462) c5(165463, 165464, 165465, 165466, 165467, 165468, 165469, 165470, 165471, 165472, 165473, 165474, 165475, 165476) c6( ) c7(T, iE, aW, hj, aA, aHs, aT, aE, ey, g, cm); #c1(DYRK3) c2(NP_001004023) c3(dual specificity tyrosine-phosphorylation-regulated kinase 3 isoform b) c4(20359, 20360) c5(20361, 20362, 20363, 20364, 20365, 20366, 20367, 20368, 20369, 20370, 20371, 20372, 20373, 20374, 20375, 20376, 20377, 20378, 20379) c6( ) c7(mA, K, bjg); #c1(DYRK3) c2(NP_003573) c3(dual specificity tyrosine-phosphorylation-regulated kinase 3 isoform a) c4(139274) c5(139275, 139276, 139277, 139278, 139279, 139280) c6( ) c7(mA, K, bjg); #c1(DYSF) c2(NP_001123927) c3(dysferlin isoform 2) c4(48018) c5(48019, 48020, 48021, 48022, 48023, 48024, 48025, 48026, 48027, 48028, 48029, 48030, 48031, 48032, 48033, 48034, 48035, 48036, 48037, 48038, 48039, 48040, 48041, 48042, 48043, 48044, 48045, 48046, 48047, 48048, 48049, 48050, 48051, 48052, 48053, 48054, 48055, 48056, 48057, 48058, 48059, 48060, 48061, 48062, 48063, 48064, 48065, 48066, 48067, 48068, 48069, 48070, 48071, 48072, 48073, 48074, 48075, 48076, 48077, 48078, 48079, 48080, 48081, 48082, 48083, 48084, 48085, 48086, 48087, 48088, 48089, 48090, 48091, 48092, 48093, 48094, 48095, 48096, 48097, 48098, 48099, 48100, 48101, 48102, 48103, 48104, 48105, 48106, 48107, 48108, 48109, 48110, 4811148112, 48113, 48114, 48115) c6(48116, 48117, 48118) c7(aBD, e, V, Rk, ad, cc, no, Ae, Ws, bjh, oj, Ak, bI, K, H, aTm, aqZ, xs, lb, Ad, bji, adu, aBH, U, km, oh, R, uL, atO); #c1(DYSF) c2(NP_001124448) c3(dysferlin isoform 9) c4( ) c5(48949) c6( ) c7(aBD, e, V, Rk, ad, cc, no, Ae, Ws, bjh, oj, Ak, bI, K, H, aTm, aqZ, xs, lb, Ad, bji, adu, aBH, U, km, oh, R, uL, atO); #c1(DYSF) c2(NP_001124449) c3(dysferlin isoform 10) c4( ) c5(48950) c6( ) c7(aBD, e, V, Rk, ad, cc, no, Ae, Ws, bjh, oj, Ak, bI, K, H, aTm, aqZ, xs, lb, Ad, bji, adu, aBH, U, km, oh, R, uL, atO); #c1(DYSF) c2(NP_001124450) c3(dysferlin isoform II) c4(48951) c5(48952, 48953, 48954, 48955, 48956, 48957, 48958, 48959, 48960, 48961) c6(48962, 48963) c7(aBD, e, V, Rk, ad, cc, no, Ae, Ws, bjh, oj, Ak, bl, K, H, aTm, aqZ, xs, lb, Ad, bji, adu, aBH, U, km, oh, R, uL, atO); #c1(DYSF) c2(NP_001124451) c3(dysferlin isoform 12) c4(48964) c5(48965, 48966, 48967, 48968, 48969, 48970, 48971, 48972, 48973, 48974) c6(48975, 48976) c7(aBD, e, V, Rk, ad, cc, no, Ae, Ws, bjh, oj, Ak, bl, K, H, aTm, aqZ, xs, lb, Ad, bji, adu, aBH, U, km, oh, R, uL, atO); #c1(DYSF) c2(NP_001124452) c3(dysferlin isoform 13) c4(48977) c5(48978, 48979, 48980, 48981, 48982, 48983, 48984, 48985, 48986, 48987) c6(48988, 48989) c7(aBD, e, V, Rk, ad, cc, no, Ae, Ws, bjh, oj, Ak, bl, K, H, aTm, aqZ, xs, lb, Ad, bji, adu, aBH, U, km, oh, R, uL, atO); #c1(DYSF) c2(NP_001124453) c3(dysferlin isoform 14) c4(48990) c5(48991, 48992, 48993, 48994, 48995, 48996, 48997, 48998, 48999, 49000) c6(49001, 49002) c7(aBD, e, V, Rk, ad, cc, no, Ae, Ws, bjh, oj, Ak, bl, K, H, aTm, aqZ, xs, lb, Ad, bji, adu, aBH, U, km, oh, R, uL, atO); #c1(DYSF) c2(NP_001124454) c3(dysferlin isoform 7) c4(49003) c5(49004, 49005, 49006, 49007, 49008, 49009, 49010, 49011, 49012, 49013) c6(49014, 49015) c7(aBD, e, V, Rk, ad, cc, no, Ae, Ws, bjh, oj, Ak, bl, K, H, aTm, aqZ, xs, lb, Ad, bji, adu, aBH, U, km, oh, R, uL, atO); #c1(DYSF) c2(NP_001124455) c3(dysferlin isoform 6) c4(49016) c5(49017, 49018, 49019, 49020, 49021, 49022, 49023, 49024, 49025, 49026) c6(49027, 49028) c7(aBD, e, V, Rk, ad, cc, no, Ae, Ws, bjh, oj, Ak, bl, K, H, aTm, aqZ, xs, lb, Ad, bji, adu, aBH, U, km, oh, R, uL, atO); #c1(DYSF) c2(NP_001124456) c3(dysferlin isoform 5) c4(49029) c5(49030, 49031, 49032, 49033, 49034, 49035, 49036, 49037, 49038, 49039) c6(49040, 49041) c7(aBD, e, V, Rk, ad, cc, no, Ae, Ws, bjh, oj, Ak, bl, K, H, aTm, aqZ, xs, lb, Ad, bji, adu, aBH, U, km, oh, R, uL, atO); #c1(DYSF) c2(NP_001124457) c3(dysferlin isoform 4) c4(49042) c5(49043, 49044, 49045, 49046, 49047, 49048, 49049, 49050, 49051, 49052) c6(49053, 49054) c7(aBD, e, V, Rk, ad, cc, no, Ae, Ws, bjh, oj, Ak, bl, K, H, aTm, aqZ, xs, lb, Ad, bji, adu, aBH, U, km, oh, R, uL, atO); #c1(DYSF) c2(NP_001124458) c3(dysferlin isoform 3) c4( ) c5(49055) c6( ) c7(aBD, e, V, Rk, ad, cc, no, Ae, Ws, bjh, oj, Ak, bl, K, H, aTm, aqZ, xs, lb, Ad, bji, adu, aBH, U, km, oh, R, uL, atO); #c1(DYSF) c2(NP_001124459) c3(dysferlin isoform 1) c4(49056) c5(49057, 49058, 49059, 49060, 49061, 49062, 49063, 49064, 49065, 49066) c6(49067, 49068) c7(aBD, e, V, Rk, ad, cc, no, Ae, Ws, bjh, oj, Ak, bl, K, H, aTm, aqZ, xs, lb, Ad, bji, adu, aBH, U, km, oh, R, uL, atO); #c1(DYSF) c2(NP_003485) c3(dysferlin isoform 8) c4(138713) c5(138714, 138715, 138716, 138717, 138718, 138719, 138720, 138721, 138722, 138723) c6(138724, 138725) c7(aBD, e, V, Rk, ad, cc, no, Ae, Ws, bjh, oj, Ak, bl, K, H, aTm, aqZ, xs, lb, Ad, bji, adu, aBH, U, km, oh, R, uL, atO); #c1(DYX1C1) c2(NP_001028731) c3(dyslexia susceptibility 1 candidate gene 1 protein isoform b) c4(30553) c5(30554, 30555, 30556, 30557, 30558, 30559, 30560, 30561, 30562, 30563, 30564, 30565, 30566, 30567, 30568, 30569) c6( ) c7(T, gU, aW, aT, r, at, yA, alP, cm, bjj, q, aR, bN, MG); #c1(DYX1C1) c2(NP_001028732) c3(dyslexia susceptibility 1 candidate gene 1 protein isoform c) c4(30570, 30571) c5(30572, 30573, 30574, 30575, 30576, 30577, 30578, 30579, 30580, 30581) c6( ) c7(T, gU, aW, aT, r, at, yA, alP, cm, bjj, q, aR, bN, MG); #c1(DYX1C1) c2(NP_570722) c3(dyslexia susceptibility 1 candidate gene 1 protein isoform a) c4(234274) c5(234275, 234276, 234277, 234278, 234279, 234280) c6( ) c7(T, gU, aW, aT, r, at, yA, alP, cm, bjj, q, aR, bN, MG); #c1(DZIP1) c2(NP_055749) c3(zinc finger protein DZIP1 isoform 1) c4(183266) c5(183267, 183268, 183269, 183270, 183271, 183272, 183273, 183274, 183275, 183276) c6( ) c7(aW, aT); #c1(DZIP1) c2(NP_945319) c3(zinc finger protein DZIP1 isoform 2) c4(260800) c5(260801, 260802, 260803, 260804, 260805, 260806, 260807, 260808, 260809, 260810) c6( ) c7(aW, aT); #c1(E2F1) c2(NP_005216) c3(transcription factor E2F1) c4(154097) c5(154098, 154099, 154100, 154101, 154102, 154103, 154104) c6( ) c7(T, fR, if, al, fd, bB, ci, aE, aEX, K, aNZ, hu, pk, eL, cp, eG, yo, anw, aW, az, uY, bjk, g, eF, cm, bw, gJ, eM, nB, dc, cj, QF, m, Xu, iu, IT, aBT, aw, ht, fN, n, fr, qN, br, co, ft, h, aPe, hn, dL, Go, A, kj, aiB, PX, aq, kp, YE, bP, dB, hk, hR, it, AN, B, AS, jx, aA, q, eA, hW, nv, aT, cy, an, ae, af, jf, xR, Y, r, en, bji, t, iK, ck, rR, Dy, np, bt, id, iW, jh, bs, bS, hF, ad, hX, av, py, fb, uX, d, IR, qt, ff, xs, eH, dg, aF, iR, bz, dR, es, gk, bE, bC, X); #c1(E2F3) c2(NP_001230005) c3(transcription factor E2F3 isoform 2) c4(85759) c5(85760, 85761, 85762, 85763, 85764, 85765) c6( ) c7(T, id, eX, oH, ci, q, er, ad, aHR, av, iu, aT, eV, dL, ae, eL, dx, d, iU, aW, Y, ff, en, g, t, cm, bz, es, bP, hR, m, bC, bt, B); #c1(E2F3) c2(NP_001940) c3(transcription factor E2F3 isoform 1) c4(122363) c5(122364, 122365, 122366, 122367, 122368, 122369) c6( ) c7(T, id, eX, oH, ci, q, er, ad, aHR, av, iu, aT, eV, dL, ae, eL, dx, d, iU, aW, Y, ff, en, g, t, cm, bz, es, bP, hR, m, bC, bt, B); #c1(E2F3) c2(XP_011512628) c3(transcription factor E2F3 isoform X3) c4(303593) c5(303594, 303595, 303596, 303597, 303598, 303599) c6( ) c7(T, id, eX, oH, ci, q, er, ad, aHR, av, iu, aT, eV, dL, ae, eL, dx, d, iU, aW, Y, ff, en, g, t, cm, bz, es, bP, hR, m, bC, bt, B); #c1(E2F4) c2(NP_001941) c3(transcription factor E2F4) c4(122370) c5(122371, 122372, 122373, 122374, 122375, 122376) c6( ) c7(T, aw, aA, bB, j, ci, q, ad, av, hd, bjn, kH, aT, K, pk, ae, B, kj, je, aW, r, aF, iV, bjm, t, iM, nB, aBU, bE, gX, m, bt, X); #c1(E2F5) c2(NP_001077057) c3(transcription factor E2F5 isoform 2) c4(37622) c5(37623, 37624, 37625, 37626, 37627, 37628) c6( ) c7(aW, t, T, aT); #c1(E2F5) c2(NP_001942) c3(transcription factor E2F5 isoform 1) c4(122377, 122378, 122379, 122380) c5(122381, 122382, 122383, 122384, 122385, 122386, 122387, 122388, 122389, 122390, 122391, 122392, 122393) c6( ) c7(aW, t, T, aT); #c1(E2F5) c2(XP_006716497) c3(transcription factor E2F5 isoform X1) c4( ) c5(290359, 290360, 290361, 290362, 290363, 290364, 290365, 290366, 290367, 290368, 290369, 290370) c6( ) c7(aW, t, T, aT); #c1(E2F6) c2(NP_001265204) c3(transcription factor E2F6 isoform 2) c4(97932, 97933) c5(97934, 97935, 97936, 97937, 97938, 97939, 97940, 97941) c6( ) c7(cT, eM, jh, eF, t, B); #c1(E2F6) c2(NP_001265207) c3(transcription factor E2F6 isoform 3) c4( ) c5(97942, 97943, 97944, 97945, 97946, 97947, 97948, 97949) c6( ) c7(cT, eM, jh, eF, t, B); #c1(E2F6) c2(NP_937987) c3(transcription factor E2F6 isoform 1) c4(259457, 259458) c5(259459, 259460, 259461, 259462, 259463, 259464) c6( ) c7(cT, eM, jh, eF, t, B); #c1(E2F6) c2(XP_011508619) c3(transcription factor E2F6 isoform X1) c4( ) c5(299237, 299238, 299239, 299240, 299241, 299242) c6( ) c7(cT, eM, jh, eF, t, B); #c1(E2F7) c2(NP_976328) c3(transcription factor E2F7) c4(263156, 263157) c5(263158, 263159, 263160, 263161, 263162, 263163, 263164, 263165, 263166, 263167, 263168, 263169) c6( ) c7(W, BN, ne, hb, oe, ff, cj, hy, en, t, bt, B); #c1(E2F7) c2(XP_011536270) c3(transcription factor E2F7 isoform X3) c4(333605, 333606) c5(333607, 333608, 333609, 333610, 333611, 333612) c6( ) c7(W, BN, ne, hb, oe, ff, cj, hy, en, t, bt, B); #c1(E2F7) c2(XP_011536271) c3(transcription factor E2F7 isoform X4) c4( ) c5(333613, 333614, 333615, 333616, 333617, 333618) c6( ) c7(W, BN, ne, hb, oe, ff, cj, hy, en, t, bt, B); #c1(E2F8) c2(NP_078956) c3(transcription factor E2F8) c4(216249, 216250) c5(216251, 216252, 216253, 216254, 216255, 216256, 216257, 216258, 216259, 216260, 216261, 216262, 216263, 216264, 216265, 216266) c6( ) c7(t, T, B, m); #c1(E4F1) c2(NP_004415) c3(transcription factor E4F1 isoform 1) c4(146211) c5(146212, 146213, 146214, 146215, 146216, 146217) c6( ) c7(bt, K, iT); #c1(EAF1) c2(NP_149074) c3(ELL- associated factor 1) c4(227013) c5(227014, 227015, 227016, 227017, 227018, 227019) c6( ) c7(ck); #c1(EAF1) c2(XP_011532468) c3(ELL-associated factor 1 isoform X1) c4(328620) c5(328621, 328622, 328623, 328624, 328625, 328626) c6( ) c7(ck); #c1(EAF2) c2(NP_060926) c3(ELL-associated factor 2) c4(198714, 198715) c5(198716, 198717, 198718, 198719, 198720, 198721, 198722, 198723, 198724, 198725, 198726, 198727) c6( ) c7(av, bjo, T, fM, iu, aDZ, bt, ae, B, ad, hq); #c1(EARS2) c2(NP_001077083) c3(probable glutamate-tRNA ligase, mitochondrial) c4(37697) c5(37698, 37699, 37700, 37701, 37702, 37703, 37704, 37705, 37706, 37707) c6( ) c7(dD, ea, bjp, eZ, hD, j, eq); #c1(EBAG9) c2(NP_001265867) c3(receptor-binding cancer antigen expressed on SiSo cells) c4(99513, 99514, 99515, 99516) c5(99517, 99518, 99519, 99520, 99521, 99522, 99523, 99524, 99525, 99526, 99527, 99528, 99529, 99530, 99531, 99532, 99533, 99534, 99535, 99536, 99537, 99538, 99539, 99540, 99541, 99542, 99543, 99544) c6( ) c7(T, aC, aA, Wb, fr, ci, AO, eA, ad, dP, jz, ib, aT, dL, ae, be, Jl, aW, ff, aF, en, cl, g, t, uC, bz, ck, AM, mg, hL, m, jM, y, B); #c1(EBF1) c2(NP_076870) c3(transcription factor COE1 isoform 2) c4(214193) c5(214194, 214195, 214196, 214197, 214198, 214199, 214200, 214201, 214202, 214203) c6( ) c7(ck, x, T, ac, eX, jh, n, eV, j, k, Ea, cm, V, Hr); #c1(EBF1) c2(NP_874367) c3(transcription factor COE1 isoform 3) c4(256636) c5(256637, 256638, 256639, 256640, 256641, 256642) c6( ) c7(ck, x, T, ac, eX, jh, n, eV, j, k, Ea, cm, V, Hr); #c1(EBF2) c2(NP_073150) c3(transcription factor COE2) c4(212815, 212816) c5(212817, 212818, 212819, 212820, 212821, 212822, 212823, 212824, 212825, 212826, 212827, 212828) c6( ) c7(iU, eF, eH, j, bX, bV, fq, yn); #c1(EBF3) c2(NP_001005463) c3(transcription factor COE3) c4(21685) c5(21686, 21687, 21688, 21689, 21690, 21691) c6( ) c7(jf, T, dB, ff, yg, aA, aF, Ea, en, af); #c1(EBF3) c2(XP_005252725) c3(transcription factor COE3 isoform X4) c4(272032) c5(272033, 272034, 272035, 272036, 272037, 272038) c6( ) c7(jf, T, dB, ff, yg, aA, aF, Ea, en, af); #c1(EBF3) c2(XP_011537876) c3(transcription factor COE3 isoform X9) c4(335376) c5( ) c6( ) c7(jf, T, dB, ff, yg, aA, aF, Ea, en, af); #c1(EBF3) c2(XP_011537877) c3(transcription factor COE3 isoform X11) c4( ) c5(335377, 335378, 335379, 335380, 335381, 335382) c6( ) c7(jf, T, dB, ff, yg, aA, aF, Ea, en, af); #c1(EBF4) c2(NP_001103984) c3(transcription factor COE4) c4(42056, 42057) c5(42058, 42059, 42060, 42061, 42062, 42063, 42064, 42065, 42066, 42067, 42068, 42069) c6( ) c7(y); #c1(EBF4) c2(XP_005260828) c3(transcription factor COE4 isoform X2) c4( ) c5(276931, 276932, 276933, 276934, 276935, 276936) c6( ) c7(y); #c1(EBF4) c2(XP_006723663) c3(transcription factor COE4 isoform X1) c4(295283) c5( ) c6( ) c7(y); #c1(EBI3) c2(NP_005746) c3(interleukin-27 subunit beta precursor) c4(158974, 158975, 158976) c5(158977, 158978, 158979, 158980, 158981, 158982) c6( ) c7(bL, bM, T, dD, aAf, fM, dA, Dw, aEj, ea, AL, jh, aA, n, lD, pi, eq, V, ip, hX, x, aE, Bj, ds, dV, aT, gU, h, dz, JK, pq, iL, ly, A, d, mR, aAu, aW, Y, zb, aoo, oV, eZ, fe, aF, CQ, jg, iV, eE, iK, bz, DF, Lx, ck, cT, eM, iT, rK, k, y, bt, cn); #c1(EBP) c2(NP_006570) c3(3-beta-hydroxysteroid-Delta(8), Delta(7)-isomerase) c4(166294, 166295, 166296) c5(166297, 166298, 166299, 166300, 166301, 166302, 166303, 166304, 166305, 166306, 166307, 166308, 166309, 166310, 166311, 166312, 166313, 166314) c6( ) c7(bL, gx, T, bM, jh, cz, bB, v, afE, beW, q, br, ad, hX, x, ke, hd, ahj, dV, aT, h, jy, hn, dL, K, aAt, aVg, bl, jj, nJ, ae, eL, eG, d, beX, iU, aW, Y, oV, fc, r, aq, aF, Pd, cm, bw, bz, Qt, qa, eK, QA, ck, nM, bjq, iT, bE, aVh, k, arx, cP, y, bt, B, ao); #c1(EBPL) c2(NP_001265565) c3(emopamil-binding protein-like isoform 2) c4(98846, 98847) c5(98848, 98849, 98850, 98851, 98852, 98853, 98854, 98855, 98856, 98857, 98858, 98859, 98860, 98861, 98862, 98863) c6( ) c7(agd, alC, sO, RX, abi, Pg, Ps, bK, aan, lw, af, agZ); #c1(EBPL) c2(NP_115954) c3(emepamil-binding protein-like isoform 1) c4(224910, 224911) c5(224912, 224913, 224914, 224915, 224916, 224917, 224918, 224919) c6( ) c7(agd, alC, sO, RX, abi, Pg, Ps, bK, aan, lw, af, agZ); #c1(ECD) c2(NP_001129224) c3(protein SGT1 isoform 2) c4(51258) c5(51259, 51260, 51261, 51262, 51263, 51264) c6( ) c7(Pw, T, hM, aW, aA, hD, aT, aF, cd); #c1(ECD) c2(NP_001129225) c3(protein SGT1 isoform 3) c4(51265, 51266) c5(51267, 51268, 51269, 51270, 51271, 51272, 51273, 51274, 51275, 51276, 51277, 51278) c6( ) c7(Pw, T, hM, aW, aA, hD, aT, aF, cd); #c1(ECD) c2(NP_009196) c3(protein SGT1 isoform 1) c4(171437, 171438) c5(171439, 171440, 171441, 171442, 171443, 171444, 171445, 171446, 171447, 171448, 171449, 171450, 171451) c6( ) c7(Pw, T, hM, aW, aA, hD, aT, aF, cd); #c1(ECE2) c2(NP_001032401) c3(endothelin-converting enzyme 2 isoform B) c4(31296) c5(31297, 31298, 31299, 31300, 31301, 31302) c6( ) c7(ea, V, dD, eq, qa); #c1(ECE2) c2(NP_001093590) c3(endothelin-converting enzyme 2 isoform D) c4(40318) c5(40319, 40320, 40321, 40322, 40323, 40324) c6( ) c7(ea, V, dD, eq, qa); #c1(ECE2) c2(NP_001093591) c3(endothelin-converting enzyme 2 isoform E) c4(40325) c5(40326, 40327, 40328, 40329, 40330, 40331) c6( ) c7(ea, V, dD, eq, qa); #c1(ECE2) c2(NP_055508) c3(endothelin-converting enzyme 2 isoform A) c4(181614) c5(181615, 181616, 181617, 181618, 181619, 181620) c6( ) c7(ea, V, dD, eq, qa); #c1(ECE2) c2(NP_115707) c3(endothelin-converting enzyme 2 isoform C) c4(223662) c5(223663, 223664, 223665, 223666, 223667, 223668) c6( ) c7(ea, V, dD, eq, qa); #c1(ECEL1) c2(NP_001277716) c3(endothelin-converting enzyme-like 1 isoform 2) c4(109395) c5(109396, 109397, 109398, 109399, 109400, 109401) c6( ) c7(bjs, bjr, bjt, zW, cm, Al); #c1(ECEL1) c2(NP_004817) c3(endothelin-converting enzyme-like 1 isoform 1) c4(150026) c5(150027, 150028, 150029, 150030, 150031, 150032) c6( ) c7(bjs, bjr, bjt, zW, cm, Al); #c1(ECHDC1) c2(NP_001099014) c3(ethylmalnnyl-CoA decarboxylase isoform 3) c4( ) c5(41662, 41663, 41664, 41665, 41666) c6( ) c7(aW, t, Y, aT); #c1(ECHDC1) c2(NP_001099015) c3(ethylmalonyl-CoA decarboxylase isoform 4) c4( ) c5(41667, 41668, 41669, 41670, 41671) c6( ) c7(aW, t, Y, aT); #c1(ECHDC1) c2(NP_001132982) c3(ethylmalnnyl-CoA decarboxylase isoform 5) c4(52752, 52753, 52754, 52755, 52756) c5(52757, 52758, 52759, 52760, 52761, 52762, 52763, 52764, 52765, 52766, 52767, 52768, 52769, 52770, 52771, 52772, 52773) c6( ) c7(aW, t, Y, aT); #c1(ECHDC1) c2(XP_005267105) c3(ethylmalonyl-CoA decarboxylase isoform X1) c4(280705) c5(280706, 280707, 280708, 280709, 280710, 280711, 280712, 280713, 280714, 280715, 280716, 280717, 280718, 280719, 280720, 280721, 280722, 280723, 280724, 280725, 280726, 280727, 280728, 280729, 280730, 280731, 280732) c6( ) c7(aW, t, Y, aT); #c1(ECHDC1) c2(XP_005267106) c3(ethylmalonyl-CoA decarboxylase isoform X4) c4(280733, 280734, 280735, 280736) c5( ) c6( ) c7(aW, t, Y, aT); #c1(ECHDC1) c2(XP_005267107) c3(ethylmalonyl-CoA decarboxylase isoform X2) c4( ) c5(280737, 280738, 280739, 280740, 280741, 280742, 280743, 280744, 280745, 280746, 280747, 280748, 280749, 280750, 280751, 280752, 280753, 280754) c6( ) c7(aW, t, Y, aT); #c1(ECHDC1) c2(XP_011534245) c3(ethylmalonyl-CoA decarboxylase isoform X5) c4(330602) c5(330603, 330604, 330605, 330606, 330607, 330608) c6( ) c7(aW, t, Y, aT); #c1(ECHDC3) c2(NP_078969) c3(enoyl-CoA hydratase domain-containing protein 3, mitochondrial precursor) c4(216326, 216327, 216328) c5(216329, 216330, 216331, 216332, 216333, 216334, 216335, 216336, 216337, 216338, 216339, 216340, 216341, 216342, 216343, 216344, 216345, 216346) c6( ) c7(aw, ac); #c1(ECHS1) c2(NP_004083) c3(enoyl-CoA hydratase, mitochondrial) c4(143414) c5(143415, 143416, 143417, 143418, 143419, 143420) c6( ) c7(mO, d, aW, aA, aT, v, hE, B, ajU, hX); #c1(ECI1) c2(NP_001171500) c3(enoyl-CoA delta isomerase 1, mitochondrial isoform 2 precursor) c4(70319) c5(70320, 70321, 70322, 70323, 70324, 70325) c6( ) c7(T, mo); #c1(ECI1) c2(NP_001910) c3(enoyl-CoA delta isomerase 1, mitochondrial isoform 1 precursor) c4(122140) c5(122141, 122142, 122143, 122144, 122145, 122146) c6( ) c7(T, mo); #c1(ECI2) c2(NP_006108) c3(enoyl-CoA delta isomerase 2, mitochondrial isoform 1) c4(161908) c5(161909, 161910, 161911, 161912, 161913, 161914, 161915, 161916, 161917, 161918, 161919, 161920, 161921, 161922, 161923, 161924) c6( ) c7(yd, bM, ck, iQ, iT, dW, bw, fh, cd); #c1(ECI2) c2(NP_996667) c3(enoyl-CoA delta isomerase 2, mitochondrial isoform 2) c4(264347, 264348) c5(264349, 264350, 264351, 264352, 264353, 264354, 264355, 264356, 264357, 264358) c6( ) c7(yd, bM, ck, iQ, iT, dW, bw, fh, cd); #c1(ECSCR) c2(NP_001071161) c3(endothelial cell-specific chemotaxis regulator isoform 1 precursor) c4(35339) c5(35340, 35341, 35342, 35343, 35344, 35345) c6( ) c7(bw, Jn, eM); #c1(ECSCR) c2(NP_001280668) c3(endothelial cell-specific chemotaxis regulator isoform 2 precursor) c4(111573) c5(111574, 111575, 111576, 111577, 111578, 111579) c6( ) c7(bw, Jn, eM); #c1(ECSIT) c2(NP_001135936) c3(evolutionarily conserved signaling intermediate in Toll pathway, mitochondrial isoform 2 precursor) c4(53612) c5(53613, 53614, 53615, 53616, 53617, 53618) c6( ) c7(K); #c1(ECSIT) c2(NP_001135937) c3(evolutionarily conserved signaling intermediate in Toll pathway, mitochondrial isoform 3 precursor) c4(53619) c5(53620, 53621, 53622, 53623, 53624, 53625) c6( ) c7(K); #c1(ECSIT) c2(NP_001230133) c3(evolutionarily conserved signaling intermediate in Toll pathway, mitochondrial isoform 4 precursor) c4(85976) c5(85977, 85978, 85979, 85980, 85981) c6( ) c7(K); #c1(ECSIT) c2(NP_057665) c3(evolutionarily conserved signaling intermediate in Toll pathway, mitochondrial isoform 1 precursor) c4(192218) c5(192219, 192220, 192221, 192222, 192223, 192224, 192225) c6( ) c7(K); #c1(ECT2) c2(NP_001245244) c3(protein ECT2 isoform a) c4(92810) c5(92811, 92812, 92813, 92814, 92815, 92816, 92817, 92818, 92819, 92820) c6( ) c7(abZ, iu, Bl, T, d, aC, eM, py, eH, r, n, ey, K, g, eA, eF, fs, q); #c1(ECT2) c2(NP_001245245) c3(protein ECT2 isoform b) c4(92821, 92822, 92823) c5(92824, 92825, 92826, 92827, 92828, 92829, 92830, 92831, 92832, 92833, 92834, 92835, 92836, 92837, 92838, 92839, 92840, 92841, 92842, 92843, 92844, 92845, 92846, 92847, 92848, 92849, 92850, 92851) c6( ) c7(abZ, iu, Bl, T, d, aC, eM, py, eH, r, n, ey, K, g, eA, eF, fs, q); #c1(ECT2) c2(XP_006713587) c3(protein ECT2 isoform X3) c4(287240) c5( ) c6( ) c7(abZ, iu, Bl, T, d, aC, eM, py, eH, r, n, ey, K, g, eA, eF, fs, q); #c1(ECT2) c2(XP_011510817) c3(protein ECT2 isoform X1) c4( ) c5(301280, 301281, 301282, 301283, 301284) c6( ) c7(abZ, iu, Bl, T, d, aC, eM, py, eH, r, n, ey, K, g, eA, eF, fs, q); #c1(ECT2) c2(XP_011510818) c3(protein ECT2 isoform X2) c4(301285, 301286) c5(301287, 301288, 301289, 301290, 301291, 301292) c6( ) c7(abZ, iu, Bl, T, d, aC, eM, py, eH, r, n, ey, K, g, eA, eF, fs, q); #c1(EDA) c2(NP_001005609) c3(ectodysplasin-A isoform 2) c4(21846) c5(21847, 21848, 21849, 21850, 21851, 21852, 21853, 21854, 21855, 21856, 21857, 21858, 21859, 21860, 21861, 21862, 21863, 21864, 21865, 21866, 21867, 21868, 21869, 21870, 21871, 21872, 21873, 21874, 21875, 21876, 21877, 21878, 21879, 21880, 21881, 21882, 21883, 21884, 21885, 21886, 21887, 21888, 21889, 21890, 21891, 21892, 21893, 21894, 21895, 21896, 21897, 21898, 21899, 21900, 21901, 21902, 21903, 21904, 21905, 21906, 21907, 21908, 21909, 21910, 21911, 21912, 21913, 21914, 21915, 21916, 21917, 21918, 21919, 21920, 21921, 21922, 21923, 21924, 21925, 21926, 21927, 21928, 21929, 21930, 21931, 21932, 21933, 21934, 21935, 21936, 21937, 21938, 21939, 21940, 21941) c6(21942, 21943, 21944) c7(T, sw, bjB, aml, bjz, bju, biA, b, bjA, bjv, tT, aT, IQ, Ha, bjy, aW, Y, eH, YF, eF, dr, bjw, bjx, Hs, dy, i, y); #c1(EDA) c2(NP_001005610) c3(ectodysplasin-A isoform 3) c4(21945) c5(21946, 21947, 21948, 21949, 21950, 21951, 21952, 21953) c6(21954, 21955) c7(T, sw, bjB, aml, bjz, bju, biA, b, bjA, bjv, tT, aT, IQ, Ha, bjy, aW, Y, eH, YF, eF, dr, bjw, bjx, Hs, dy, i, y); #c1(EDA) c2(NP_001005612) c3(ectodysplasin-A isoform 5) c4(21956) c5(21957, 21958, 21959, 21960, 21961, 21962, 21963, 21964) c6(21965, 21966) c7(T, sw, bjB, aml, bjz, bju, biA, b, bjA, bjv, tT, aT, IQ, Ha, bjy, aW, Y, eH, YF, eF, dr, bjw, bjx, Hs, dy, i, y); #c1(EDA) c2(NP_001005613) c3(ectodysplasin-A isoform 6) c4(21967) c5(21968, 21969, 21970, 21971, 21972, 21973, 21974, 21975, 21976, 21977, 21978, 21979, 21980, 21981) c6(21982, 21983, 21984, 21985) c7(T, sw, bjB, aml, bjz, bju, biA, b, bjA, bjv, tT, aT, IQ, Ha, bjy, aW, Y, eH, YF, eF, dr, bjw, bjx, Hs, dy, i, y); #c1(EDA) c2(NP_001390) c3(ectodysplasin-A isoform 1) c4(117524) c5(117525, 117526, 117527, 117528, 117529, 117530, 117531, 117532) c6(117533, 117534) c7(T, sw, bjB, aml, bjz, bju, biA, b, bjA, bjv, tT, aT, IQ, Ha, bjy, aW, Y, eH, YF, eF, dr, bjw, bjx, Hs, dy, i, y); #c1(EDA) c2(XP_011529187) c3(ectodysplasin-A isoform X2) c4(324591) c5( ) c6( ) c7(T, sw, bjB, aml, bjz, bju, biA, b, bjA, bjv, tT, aT, IQ, Ha, bjy, aW, Y, eH, YF, eF, dr, bjw, bjx, Hs, dy, i, y); #c1(EDA2R) c2(NP_001186616) c3(tumor necrosis factor receptor superfamily member 27 isoform 1) c4(77973) c5(77974, 77975, 77976, 77977, 77978, 77979, 77980, 77981, 77982, 77983, 77984, 77985, 77986, 77987) c6( ) c7(Ln, aW, r, aT, aeM, q); #c1(EDA2R) c2(XP_011529303) c3(tumor necrosis factor receptor superfamily member 27 isoform X1) c4(324727) c5(324728, 324729, 324730, 324731, 324732, 324733, 324734, 324735, 324736, 324737) c6( ) c7(Ln, aW, r, aT, aeM, q); #c1(EDA2R) c2(XP_011529307) c3(tumor necrosis factor receptor superfamily member 27 isoform X6) c4(324738) c5(324739, 324740, 324741, 324742, 324743, 324744) c6( ) c7(Ln, aW, r, aT, aeM, q); #c1(EDAR) c2(NP_071731) c3(tumor necrosis factor receptor superfamily member EDAR precursor) c4(211845) c5(211846, 211847, 211848, 211849, 211850) c6( ) c7(bjy, bjA, bjv, aW, bjB, bjC, aT, aml, af); #c1(EDAR) c2(XP_006712267) c3(tumor necrosis factor receptor superfamily member EDAR isoform X2) c4(286588) c5(286589, 286590, 286591, 286592, 286593, 286594, 286595, 286596) c6( ) c7(bjy, bjA, bjv, aW, bjB, bjC, aT, aml, af); #c1(EDAR) c2(XP_011508804) c3(tumor necrosis factor receptor superfamily member EDAR isoform X1) c4( ) c5(299401, 299402) c6( ) c7(bjy, bjA, bjv, aW, bjB, bjC, aT, aml, af); #c1(EDAR) c2(XP_011508805) c3(tumor necrosis factor receptor superfamily member EDAR isoform X3) c4( ) c5(299403) c6( ) c7(bjy, bjA, bjv, aW, bjB, bjC, aT, aml, af); #c1(EDARADD) c2(NP_542776) c3(ectodysplasin-A receptor-associated adapter protein isoform B) c4(233037) c5(233038, 233039, 233040, 233041, 233042, 233043, 233044, 233045, 233046, 233047, 233048) c6( ) c7(bjD, bjA, bjv, bjC, bjE, aml); #c1(EDARADD) c2(NP_665860) c3(ectodysplasin-A receptor-associated adapter protein isoform A) c4(241848, 241849) c5(241850, 241851, 241852, 241853, 241854, 241855) c6( ) c7(bjD, bjA, bjv, bjC, bjE, aml); #c1(EDC4) c2(NP_055144) c3(enhancer of mRNA-decapping protein 4) c4(179400, 179401) c5(179402, 179403, 179404, 179405, 179406, 179407, 179408, 179409, 179410, 179411, 179412, 179413) c6( ) c7(om, j); #c1(EDEM1) c2(NP_055489) c3(ER degradation-enhancing alpha-mannosidase-like protein 1) c4(181478) c5(181479, 181480, 181481, 181482, 181483, 181484, 181485) c6( ) c7(Ei, oe, Uq, K, b0); #c1(EDEM1) c2(XP_011532574) c3(ER degradation-enhancing alpha-mannosidase-like protein 1 isoform X3) c4(328684, 328685) c5(328686, 328687, 328688, 328689, 328690, 328691, 328692, 328693, 328694, 328695, 328696) c6( ) c7(Ei, oe, Uq, K, bO); #c1(EDIL3) c2(NP_001265571) c3(EGF-like repeat and discoidin I-like domain-containing protein 3 isoform 2 precursor) c4(98864) c5(98865, 98866, 98867, 98868, 98869, 98870, 98871, 98872) c6(98873, 98874) c7(T, os, jv, iW, oe, ha, cz, bB, oZ, v, j, q, x, Mg, Ig, fm, bhF, M, aT, dL, K, Dz, eL, mR, aW, Y, iV, uC, eK, W, bE, wk, Fk, k, bt, B); #c1(EDIL3) c2(NP_005702) c3(EGF-like repeat and discoidin I-like domain-containing protein 3 isoform 1 precursor) c4(158654) c5(158655, 158656, 158657, 158658, 158659, 158660, 158661, 158662) c6(158663, 158664) c7(T, os, jv, iW, oe, ha, cz, bB, oZ, v, j, q, x, Mg, Ig, fm, bhF, M, aT, dL, K, Dz, eL, mR, aW, Y, iV, uC, eK, W, bE, wk, Fk, k, bt, B); #c1(EDN1) c2(NP_001946) c3(endothelin-1 isoform 1 preproprotein) c4(122438) c5(122439, 122440, 122441, 122442, 122443, 122444) c6( ) c7(oO, gh, G, T, bM, lD, ea, if, e, al, eb, bB, fo, ur, ci, qj, IR, aY, Jf, YD, ip, Na, aif, xy, Bc, dV, iv, Ds, K, bjF, aDO, aCN, bc, hm, aa, eL, ly, bjJ, dH, aW, Az, hl, aB, bjH, as, eF, cm, uC, iA, nB, AM, vA, mx, vy, cj, bjL, wB, wx, bgd, Hb, m, mk, hh, fy, aCS, cZ, bfb, dD, aw, bfx, BH, aj, fr, uE, bjI, qN, cd, TB, cc, hw, ec, acA, kl, Lv, IG, h, dL, vd, wb, ey, dd, wo, vx, Ha, wC, ES, sp, fQ, fe, CQ, mo, dw, ban, op, lx, ar, kT, Sc, cA, wk, hL, tl, E, te, bjK, uz, va, at, bD, sZ, B, fl, vQ, bL, Dw, eR, aYP, wL, fG, oe, uv, cz, cR, tc, fF, uZ, j, v, C, sl, bX, Cb, q, J, eA, aRo, UE, oT, hb, afQ, aT, cy, Nc, bq, an, DX, Fg, ae, af, dl, qk, eu, ak, Sh, bf, s, Y, bg, r, en, cl, t, pb, vk, nM, kP, ua, c, ac, wO, hc, DW, hr, fP, dy, ao, sY, kh, wi, qb, uG, jh, bjG, aZH, mw, dG, uu, eq, Fb, ad, BY, av, hd, py, sN, oz, hD, vw, vc, Aa, aNp, jo, nJ, sj, d, IR, qZ, cH, cW, aZl, ff, eH, cr, eZ, dg, si, Fq, bz, qa, LB, D, Hw, gk, zr, bE, z, X, gZ, Hs, gB, aS, bC, oQ, ei, IC, vt, gq, y, pC); #c1(EDN3) c2(NP_001289385) c3(endothelin-3 isoform 5 preproprotein) c4(114171) c5(114172, 114173, 114174, 114175, 114176, 114177) c6( ) c7(d, bE, aW, Y, aT, ahF, amj, cz, bB, bjM, bjN, aPF, ahl, aTa, bjO, ahE, ao); #c1(EDN3) c2(NP_996915) c3(endothelin-3 isoform 2 preproprotein) c4(264871) c5(264872, 264873, 264874, 264875, 264876, 264877) c6( ) c7(d, bE, aW, Y, aT, ahF, amj, cz, bB, bjM, bjN, aPF, ahl, aTa, bjO, ahE, ao); #c1(EDN3) c2(NP_996916) c3(endothelin-3 isoform 3 preproprotein) c4(264878) c5(264879, 264880, 264881, 264882, 264883, 264884) c6( ) c7(d, bE, aW, Y, aT, ahF, amj, cz, bB, bjM, bjN, aPF, ahl, aTa, bjO, ahE, ao); #c1(EDN3) c2(NP_996917) c3(endothelin-3 isoform 1 preproprotein) c4(264885) c5(264886, 264887, 264888, 264889, 264890, 264891, 264892, 264893, 264894, 264895) c6( ) c7(d, bE, aW, Y, aT, ahF, amj, cz, bB, bjM, bjN, aPF, ahl, aTa, bjO, ahE, ao); #c1(EDNRA) c2(NP_001159527) c3(endothelin-1 receptor isoform b precursor) c4(64228) c5(64229, 64230, 64231, 64232, 64233, 64234, 64235, 64236, 64237, 64238, 64239, 64240, 64241, 64242, 64243) c6( ) c7(lD, bM, T, ea, e, al, fd, Ja, ur, ci, aY, xY, ye, bv, xy, Bc, K, Nj, tw, ly, aW, Az, Qv, bjH, g, as, eF, cm, iP, qJ, y, eM, iA, wE, vA, mx, wB, cj, bgd, Hb, m, bim, aCS, cZ, dD, aw, akA, fr, qN, cd, yn, TB, jz, cc, Mv, h, ey, wC, yi, A, sp, yc, yq, CQ, mo, dw, vo, op, lx, jq, ar, kT, ok, yf, bP, hk, wk, tl, at, te, bD, sZ, B, it, vQ, bL, iH, dA, eR, yk, hU, jx, aA, cR, tc, cz, v, j, aGK, yp, eA, xW, at, xV, bK, yb, bq, yj, ae, af, xU, s, Y, LU, t, nC, iK, pb, nM, ac, yl, dy, bt, ao, HQ, ha, Me, uG, uu, ah, eq, bjQ, ad, BY, av, hd, agd, Db, hD, yh, bjP, nJ, xX, d, qZ, eH, aF, si, bz, qa, dR, D, gk, xZ, aS, oQ, IC, us); #c1(EDNRA) c2(NP_001948) c3(endothelin-1 receptor isoform a precursor) c4(122445, 122446, 122447) c5(122448, 122449, 122450, 122451, 122452, 122453, 122454, 122455, 122456, 122457, 122458, 122459, 122460) c6( ) c7(lD, bM, T, ea, e, al, fd, Ja, ur, ci, aY, xY, ye, bv, xy, Bc, K, Nj, tw, ly, aW, Az, Qv, bjH, g, as, eF, cm, iP, qJ, y, eM, iA, wE, vA, mx, wB, cj, bgd, Hb, m, bim, aCS, cZ, dD, aw, akA, fr, qN, cd, yn, TB, jz, cc, Mv, h, ey, wC, yi, A, sp, yc, yq, CQ, mo, dw, vo, op, lx, jq, ar, kT, ok, yf, bP, hk, wk, tl, at, te, bD, sZ, B, it, vQ, bL, iH, dA, eR, yk, hU, jx, aA, cR, tc, cz, v, j, aGK, yp, eA, xW, aT, xV, bK, yb, bq, yj, ae, af, xU, s, Y, LU, t, nC, iK, pb, nM, ac, yl, dy, bt, ao, HQ, ha, Me, uG, uu, ah, eq, bjQ, ad, BY, av, hd, agd, Db, hD, yh, bjP, nJ, xX, d, qZ, eH, aF, si, bz, qa, dR, D, gk, xZ, aS, oQ, IC, us); #c1(EDNRB) c2(NP_000106) c3(endothelin B receptor isoform 1 precursor) c4(1845) c5( ) c6( ) c7(lD, bM, T, abY, aC, e, al, ur, ci, bjN, IR, ip, bjV, Bc, iv, eL, cp, aa, ly, aW, wF, bjH, g, as, eF, cm, iP, eM, vA, Ji, mx, bjU, bim, aCS, cZ, dD, aw, fr, cd, aJe, TB, aJf, ft, jz, cc, IG, dL, cY, wC, bjR, yq, mo, dw, QK, op, lx, hk, wk, hL, at, te, va, nz, Pr, B, it, bL, jx, cz, tc, j, aGK, eA, aT, aPF, ahE, ae, af, s, Y, aZs, LU, en, ahl, cl, f, iK, pb, ck, ac, dy, ao, rQ, uG, Fb, oH, uu, eq, Fc, ad, BY, av, py, bjS, bjT, bjP, nJ, d, ff, eH, gu, aTa, bz, D, gk, Hs, IC, y); #c1(EDNRB) c2(NP_001188326) c3(endothelin B receptor isoform 3) c4(79056) c5(79057, 79058, 79059, 79060, 79061, 79062, 79063, 79064, 79065, 79066, 79067, 79068) c6( ) c7(lD, bM, T, abY, aC, e, al, ur, ci, bjN, IR, ip, bjV, Bc, iv, eL, cp, aa, ly, aW, wF, bjH, g, as, eF, cm, iP, eM, vA, Ji, mx, bjU, bim, aCS, cZ, dD, aw, fr, cd, aJe, TB, aJf, ft, jz, cc, IG, dL, cY, wC, bjR, yq, mo, dw, QK, op, lx, hk, wk, hL, at, te, va, nz, Pr, B, it, bL, jx, cz, tc, j, aGK, eA, aT, aPF, ahE, ae, af, s, Y, aZs, LU, en, ahl, cl, f, iK, pb, ck, ac, dy, ao, rQ, uG, Fb, oH, uu, eq, Fc, ad, BY, av, py, bjS, bjT, bjP, nJ, d, ff, eH, gu, aTa, bz, D, gk, Hs, IC, y); #c1(EDNRB) c2(NP_003982) c3(endothelin B receptor isoform 2 precursor) c4(142637) c5(142638, 142639, 142640, 142641, 142642, 142643) c6( ) c7(lD, bM, T, abY, aC, e, al, ur, ci, bjN, IR, ip, bjV, Bc, iv, eL, cp, aa, ly, aW, wF, bjH, g, as, eF, cm, iP, eM, vA, Ji, mx, bjU, bim, aCS, cZ, dD, aw, fr, cd, aJe, TB, aJf, ft, jz, cc, IG, dL, cY, wC, bjR, yq, mo, dw, QK, op, lx, hk, wk, hL, at, te, va, nz, Pr, B, it, bL, jx, cz, tc, j, aGK, eA, aT, aPF, ahE, ae, af, s, Y, aZs, LU, en, ahl, cl, f, iK, pb, ck, ac, dy, ao, rQ, uG, Fb, oH, uu, eq, Fc, ad, BY, av, py, bjS, bjT, bjP, nJ, d, ff, eH, gu, aTa, bz, D, gk, Hs, IC, y); #c1(EEA1) c2(NP_003557) c3(early endosome antigen 1) c4(139181, 139182) c5(139183, 139184, 139185, 139186, 139187, 139188, 139189, 139190, 139191, 139192, 139193, 139194) c6( ) c7(h, aj, J); #c1(EED) c2(NP_003788) c3(polycomb protein EED isoform a) c4(140805, 140806) c5(140807, 140808, 140809, 140810, 140811, 140812, 140813, 140814, 140815, 140816, 140817, 140818, 140819, 140820) c6( ) c7(T, aW, aeO, aT, aq, vs, hP, iV, dx); #c1(EED) c2(XP_005274430) c3(polycomb protein EED isoform X4) c4( ) c5(285077, 285078, 285079, 285080, 285081) c6( ) c7(T, aW, aeO, aT, aq, vs, hP, iV, dx); #c1(EEF1A1) c2(XP_011533816) c3(elongation factor 1-alpha 1 isoform X1) c4(329939, 329940, 329941, 329942, 329943) c5(329944, 329945, 329946, 329947, 329948, 329949, 329950, 329951, 329952, 329953, 329954, 329955, 329956, 329957, 329958, 329959, 329960, 329961, 329962, 329963, 329964, 329965, 329966, 329967, 329968, 329969, 329970, 329971, 329972, 329973, 329974, 329975, 329976, 329977, 329978, 329979, 329980, 329981) c6( ) c7(T, wu, aA, bB, bjW, ci, zP, q, ad, ft, aE, gH, aT, K, wm, cb, zy, ae, yi, zQ, vT, aW, Y, r, fe, t, bz, bE, m, B); #c1(EEF1A2) c2(NP_001949) c3(elongation factor 1-alpha 2) c4(122461, 122462) c5(122463, 122464, 122465, 122466, 122467, 122468, 122469, 122470, 122471, 122472, 122473, 122474, 122475, 122476, 122477, 122478) c6( ) c7(bM, T, ea, e, fd, bB, fo, ci, dY, M, K, dQ, hm, aW, g, eF, cj, m, dD, tp, aw, NT, n, aj, no, pe, ec, eV, kp, kT, W, Fi, at, B, L, bL, jx, DV, eX, aA, cR, v, j, V, q, J, aT, cy, jj, ae, af, bA, wr, bf, s, Y, r, lo, t, ck, rR, tW, ac, ao, hS, bjX, qb, Dd, ha, aHv, bjW, eq, ad, tX, F, sO, oj, uX, d, cH, cW, aaB, eH, gC, cr, eZ, Bu, bz, bE, Om, aS, ei, Zw, iu, y); #c1(EEF1B2) c2(NP_001032752) c3(elongation factor 1-beta) c4(31454, 31455) c5(31456, 31457, 31458, 31459, 31460, 31461, 31462, 31463, 31464, 31465, 31466, 31467, 31468, 31469, 31470, 31471, 31472, 31473, 31474, 31475) c6( ) c7(T, nA, aT); #c1(EEF1D) c2(NP_001123525) c3(elongation factor 1-delta isoform 1) c4(47332, 47333, 47334, 47335, 47336, 47337, 47338, 47339, 47340, 47341, 47342) c5(47343, 47344, 47345, 47346, 47347, 47348, 47349, 47350, 47351, 47352, 47353, 47354, 47355, 47356, 47357, 47358, 47359, 47360, 47361, 47362, 47363, 47364, 47365, 47366, 47367, 47368, 47369, 47370, 47371, 47372, 47373, 47374, 47375, 47376, 47377, 47378, 47379, 47380, 47381, 47382, 47383, 47384, 47385, 47386, 47387, 47388, 47389, 47390, 47391, 47392, 47393, 47394, 47395, 47396, 47397, 47398, 47399, 47400, 47401, 47402, 47403, 47404) c6( ) c7(jf, T, aT, kf, ci, hu); #c1(EEF1D) c2(NP_001123528) c3(elongation factor 1-delta isoform 4) c4(47405) c5(47406, 47407, 47408, 47409, 47410, 47411, 47412, 47413, 47414, 47415, 47416, 47417, 47418, 47419, 47420, 47421, 47422, 47423, 47424, 47425, 47426, 47427, 47428) c6( ) c7(jf, T, aT, kf, ci, hu); #c1(EEF1D) c2(NP_001182132) c3(elongation factor 1-delta isoform 5) c4(74609, 74610) c5(74611, 74612, 74613, 74614, 74615, 74616, 74617, 74618, 74619, 74620, 74621, 74622) c6( ) c7(jf, T, aT, kf, ci, hu); #c1(EEF1D) c2(NP_001951) c3(elongation factor 1-delta isoform 2) c4(122479, 122480, 122481, 122482, 122483, 122484, 122485) c5(122486, 122487, 122488, 122489, 122490, 122491, 122492, 122493, 122494, 122495, 122496, 122497, 122498, 122499, 122500, 122501, 122502, 122503, 122504, 122505, 122506, 122507, 122508, 122509, 122510, 122511, 122512, 122513, 122514, 122515, 122516, 122517, 122518, 122519, 122520, 122521, 122522, 122523, 122524, 122525, 122526, 122527, 122528, 122529, 122530, 122531, 122532, 122533, 122534, 122535, 122536, 122537) c6( ) c7(jf, T, aT, kf, ci, hu); #c1(EEF1D) c2(XP_006725127) c3(elongation factor 1-delta isoform X1) c4(296613) c5(296614, 296615, 296616, 296617, 296618, 296619, 296620, 296621, 296622, 296623, 296624, 296625, 296626, 296627, 296628, 296629, 296630) c6( ) c7(jf, T, aT, kf, ci, hu); #c1(EEF1D) c2(XP_006725128) c3(elongation factor 1-delta isoform X2) c4(296631) c5(296632, 296633) c6( ) c7(jf, T, aT, kf, ci, hu); #c1(EEF1D) c2(XP_006725129) c3(elongation factor 1-delta isoform X3) c4(296634, 296635, 296636) c5(296637, 296638, 296639, 296640, 296641, 296642, 296643, 296644, 296645, 296646, 296647, 296648, 296649, 296650, 296651, 296652) c6( ) c7(jf, T, aT, kf, ci, hu); #c1(EEF1D) c2(XP_006725135) c3(elongation factor 1-delta isoform X4) c4(296653, 296654, 296655, 296656, 296657, 296658) c5(296659, 296660, 296661, 296662, 296663, 296664, 296665, 296666, 296667, 296668, 296669, 296670, 296671, 296672, 296673, 296674, 296675, 296676, 296677, 296678, 296679, 296680, 296681, 296682, 296683, 296684, 296685, 296686, 296687, 296688, 296689, 296690, 296691, 296692, 296693, 296694) c6( ) c7(jf, T, aT, kf, ci, hu); #c1(EEF1E1) c2(NP_001129122) c3(eukaryotic translation elongation factor 1 epsilon-1 isoform 2) c4(50838) c5(50839, 50840, 50841, 50842, 50843, 50844) c6( ) c7(ck, eM, Y, iS, fd, bw, dL, v, K, hF, vt, eL, B, ip); #c1(EEF1E1) c2(NP_004271) c3(eukaryotic translation elongation factor 1 epsilon-1 isoform 1) c4(144750) c5(144751, 144752, 144753, 144754, 144755, 144756) c6( ) c7(ck, eM, Y, iS, fd, bw, dL, v, K, hF, vt, eL, B, ip); #c1(EEF1G) c2(NP_001395) c3(elongation factor 1-gamma) c4(117535, 117536, 117537, 117538) c5(117539, 117540, 117541, 117542, 117543, 117544, 117545, 117546, 117547, 117548, 117549, 117550, 117551, 117552, 117553, 117554, 117555, 117556, 117557, 117558, 117559, 117560, 117561, 117562) c6( ) c7(bF, aC, aE, bE, r, g, hu, q); #c1(EEF2) c2(NP_001952) c3(elongation factor 2) c4(122538, 122539) c5(122540, 122541, 122542, 122543, 122544, 122545, 122546, 122547, 122548, 122549, 122550, 122551) c6( ) c7(av, T, ayl, yt, U, aT, r, wR, fr, g, cM, af, ad); #c1(EEFSEC) c2(NP_068756) c3(selenocysteine-specific elongation factor) c4(210195) c5(210196, 210197, 210198, 210199, 210200, 210201) c6( ) c7(cd, ad); #c1(EFCAB1) c2(XP_005251361) c3(EF-hand calcium-binding domain-containing protein 1 isoform X2) c4(270910) c5(270911, 270912, 270913, 270914, 270915, 270916, 270917, 270918, 270919, 270920) c6( ) c7(cz); #c1(EFCAB1) c2(XP_011515891) c3(EF-hand calcium-binding domain-containing protein 1 isoform X1) c4(308984, 308985) c5(308986, 308987, 308988, 308989, 308990, 308991, 308992, 308993, 308994, 308995) c6( ) c7(cz); #c1(EFCAB1) c2(XP_011515893) c3(EF-hand calcium-binding domain-containing protein 1 isoform X3) c4( ) c5(308996, 308997, 308998, 308999, 309000, 309001) c6( ) c7(cz); #c1(EFCAB11) c2(NP_001271195) c3(EF-hand calcium-binding domain-containing protein 11 isoform 2) c4( ) c5(103550) c6( ) c7(hH, B); #c1(EFCAB11) c2(NP_001271197) c3(EF-hand calcium-binding domain-containing protein 11 isoform 4) c4(103551, 103552) c5(103553, 103554, 103555, 103556, 103557, 103558, 103559, 103560, 103561, 103562, 103563) c6( ) c7(hH, B); #c1(EFCAB11) c2(NP_001271198) c3(EF-hand calcium-binding domain-containing protein 11 isoform 5) c4(103564) c5(103565, 103566, 103567, 103568, 103569, 103570) c6( ) c7(hH, B); #c1(EFCAB11) c2(NP_660274) c3(EF-hand calcium-binding domain-containing protein 11 isoform 1) c4(240585) c5(240586, 240587, 240588, 240589, 240590, 240591) c6( ) c7(hH, B); #c1(EFEMP1) c2(NP_001034438) c3(EGF-containing fibulin-like extracellular matrix protein 1 precursor) c4(31664, 31665, 31666) c5(31667, 31668, 31669, 31670, 31671, 31672, 31673, 31674, 31675, 31676, 31677, 31678, 31679, 31680, 31681, 31682, 31683, 31684, 31685, 31686, 31687, 31688, 31689, 31690, 31691, 31692, 31693, 31694, 31695, 31696, 31697, 31698, 31699, 31700, 31701, 31702, 31703, 31704, 31705, 31706, 31707, 31708, 31709, 31710, 31711, 31712, 31713, 31714, 31715, 31716) c6( ) c7(T, dD, bjZ, aC, if, nx, n, aj, eq, ci, qN, zP, q, J, cd, eA, eJ, av, b, aE, aqT, i, Sr, aT, agD, bka, db, Vj, qw, yo, zQ, d, IR, s, wr, aW, r, g, cl, t, bz, dr, W, nb, c, eM, bjY, aqV, nw, m, GF, xb, B); #c1(EFEMP1) c2(XP_005264262) c3(EGF-containing fibulin-like extracellular matrix protein 1 isoform X1) c4(278744, 278745, 278746, 278747, 278748, 278749, 278750) c5(278751, 278752, 278753, 278754, 278755, 278756, 278757, 278758, 278759, 278760, 278761, 278762, 278763, 278764, 278765, 278766, 278767, 278768) c6( ) c7(T, dD, bjZ, aC, if, nx, n, aj, eq, ci, qN, zP, q, J, cd, eA, eJ, av, b, aE, aqT, i, Sr, aT, agD, bka, db, Vj, qw, yo, zQ, d, IR, s, wr, aW, r, g, cl, t, bz, dr, W, nb, c, eM, bjY, aqV, nw, m, GF, xb, B); #c1(EFEMP2) c2(NP_058634) c3(EGF-containing fibulin-like extracellular matrix protein 2 precursor) c4(192864, 192865, 192866) c5(192867, 192868, 192869, 192870, 192871, 192872, 192873, 192874, 192875, 192876, 192877, 192878, 192879, 192880, 192881, 192882, 192883, 192884, 192885, 192886, 192887, 192888, 192889, 192890, 192891, 192892, 192893, 192894, 192895, 192896) c6( ) c7(bkb, T, y, IR, IP, Uj, aW, bkc, xs, bjY, aT, Aa, aS, ci, pb, QK, X, dr, ad); #c1(EFHB) c2(NP_653316) c3(EF-hand domain-containing family member B) c4(239565) c5(239566, 239567, 239568, 239569, 239570, 239571, 239572, 239573) c6(239574, 239575) c7(A); #c1(EFHB) c2(XP_011531685) c3(EF-hand domain-containing family member B isoform X3) c4( ) c5(327793) c6( ) c7(A); #c1(EFHC1) c2(NP_001165891) c3(EF-hand domain-containing protein 1 isoform 2) c4(67944, 67945) c5(67946, 67947, 67948, 67949, 67950, 67951, 67952, 67953, 67954, 67955, 67956, 67957, 67958) c6( ) c7(pa, Cq, ha, HN, iD, avl, uu, hg, bkd, sj); #c1(EFHC1) c2(NP_060570) c3(EF-hand domain-containing protein 1 isoform 1) c4(196623) c5(196624, 196625, 196626, 196627, 196628, 196629) c6( ) c7(pa, Cq, ha, HN, iD, avl, uu, hg, bkd, sj); #c1(EFHC2) c2(NP_079460) c3(EF-hand domain-containing family member C2) c4(218179, 218180, 218181) c5(218182, 218183, 218184, 218185, 218186, 218187, 218188, 218189, 218190, 218191, 218192, 218193, 218194, 218195, 218196, 218197, 218198, 218199, 218200) c6( ) c7(vJ, iD, agZ); #c1(EFHC2) c2(XP_006724625) c3(EF-hand domain-containing family member C2 isoform X2) c4(296134, 296135) c5(296136, 296137, 296138, 296139, 296140, 296141, 296142, 296143, 296144, 296145, 296146) c6( ) c7(vJ, iD, agZ); #c1(EFHD1) c2(NP_001230181) c3(EF-hand domain-containing protein D1 isoform 2) c4(86067) c5(86068, 86069, 86070, 86071, 86072, 86073, 86074, 86075) c6( ) c7(qK); #c1(EFHD1) c2(NP_079478) c3(EF-hand domain-containing protein D1 isoform 1) c4(218251, 218252, 218253) c5(218254, 218255, 218256, 218257, 218258, 218259, 218260, 218261, 218262, 218263, 218264, 218265) c6( ) c7(qK); #c1(EFNA1) c2(NP_004419) c3(ephrin-A1 isoform a precursor) c4(146226) c5(146227, 146228, 146229, 146230, 146231, 146232) c6( ) c7(bM, T, id, aA, n, ci, q, eA, iu, aT, dL, eL, hm, cY, Qe, s, nO, aW, Y, ff, r, aq, aF, en, uC, bz, eM, bE, m, B); #c1(EFNA1) c2(NP_872626) c3(ephrin-A1 isoform b precursor) c4(256551) c5(256552, 256553, 256554, 256555, 256556, 256557) c6( ) c7(bM, T, id, aA, n, ci, q, eA, iu, aT, dL, eL, hm, cY, Qe, s, nO, aW, Y, ff, r, aq, aF, en, uC, bz, eM, bE, m, B); #c1(EFNA2) c2(NP_001396) c3(ephrin-A2 precursor) c4(117563) c5(117564, 117565, 117566, 117567, 117568, 117569) c6( ) c7(bP, if, eB, gX, eZ, h, qN, cl, bt); #c1(EFNA3) c2(NP_004943) c3(ephrin-A3 precursor) c4(151339, 151340, 151341) c5(151342, 151343, 151344, 151345, 151346, 151347, 151348, 151349, 151350, 151351, 151352, 151353, 151354, 151355, 151356, 151357, 151358, 151359, 151360, 151361, 151362, 151363) c6( ) c7(bz, af); #c1(EFNA4) c2(NP_005218) c3(ephrin-A4 isoform a precursor) c4(154116) c5(154117, 154118, 154119, 154120, 154121, 154122) c6( ) c7(atL, agj, sH, cj); #c1(EFNA4) c2(NP_872631) c3(ephrin-A4 isoform b precursor) c4(256577) c5(256578, 256579, 256580, 256581, 256582, 256583) c6( ) c7(atL, agj, sH, cj); #c1(EFNA4) c2(NP_872632) c3(ephrin-A4 isoform c precursor) c4(256584) c5(256585, 256586, 256587, 256588, 256589, 256590) c6( ) c7(atL, agj, sH, cj); #c1(EFNA5) c2(NP_001953) c3(ephrin-A5 precursor) c4(122552) c5(122553, 122554, 122555, 122556, 122557, 122558) c6( ) c7(T, kh, ac, dY, aW, Y, rl, aT, rM, IG, eZ, fd, k, ux, an, Gp, he); #c1(EFNA5) c2(XP_011541553) c3(ephrin-A5 isoform X3) c4( ) c5(340103) c6( ) c7(T, kh, ac, dY, aW, Y, rl, aT, rM, IG, eZ, fd, k, ux, an, Gp, he); #c1(EFNB1) c2(NP_004420) c3(ephrin-B1 precursor) c4(146233) c5(146234, 146235, 146236, 146237, 146238, 146239) c6( ) c7(T, dD, ea, aA, v, eq, nA, bjz, q, bke, bjA, bjv, TR, jf, d, Az, r, aF, g, as, eF, zV, ck, wk, y, B, sH); #c1(EFNB2) c2(NP_004084) c3(ephrin-B2 precursor) c4(143421) c5(143422, 143423, 143424, 143425, 143426, 143427) c6( ) c7(bL, T, eR, fR, e, aA, bB, ci, aY, q, eA, hd, aT, h, IG, cy, hu, d, IR, B, nO, aW, ff, aeq, r, aq, aF, yq, en, as, cm, ck, nB, bE, dy, it, X); #c1(EFNB3) c2(NP_001397) c3(ephrin-B3 precursor) c4(117570) c5(117571, 117572, 117573, 117574, 117575, 117576) c6( ) c7(d, eM, adR, dL, ci, cm, eA); #c1(EFR3A) c2(NP_055952) c3(protein EFR3 homolog A) c4(184645, 184646, 184647) c5(184648, 184649, 184650, 184651, 184652, 184653, 184654, 184655, 184656, 184657, 184658, 184659, 184660, 184661, 184662, 184663, 184664, 184665, 184666, 184667, 184668, 184669, 184670, 184671) c6( ) c7(ey); #c1(EFR3A) c2(XP_005250906) c3(protein EFR3 homolog A isoform X2) c4(270618, 270619) c5(270620, 270621, 270622, 270623, 270624) c6( ) c7(ey); #c1(EFR3A) c2(XP_011515247) c3(protein EFR3 homolog A isoform X1) c4( ) c5(308063) c6( ) c7(ey); #c1(EFR3B) c2(NP_055786) c3(protein EFR3 homolog B) c4(183486) c5(183487, 183488, 183489, 183490, 183491, 183492, 183493, 183494, 183495, 183496, 183497, 183498) c6( ) c7(A); #c1(EFR3B) c2(XP_011531005) c3(protein EFR3 homolog B isoform X3) c4(326965) c5( ) c6( ) c7(A); #c1(EFS) c2(NP_001264103) c3(embryonal Fyn-associated substrate isoform 3) c4(97529) c5(97530, 97531, 97532, 97533, 97534, 97535, 97536) c6( ) c7(ck, Tg, T, x, fX, bkf, Y, h, k, CQ, cm, bt, fh, er, iP); #c1(EFS) c2(NP_005855) c3(embryonal Fyn-associated substrate isoform 1) c4(159939) c5(159940, 159941, 159942, 159943, 159944, 159945) c6( ) c7(ck, Tg, T, x, fX, bkf, Y, h, k, CQ, cm, bt, fh, er, iP); #c1(EFS) c2(NP_115835) c3(embryonal Fyn-associated substrate isoform 2) c4(224252) c5(224253, 224254, 224255, 224256, 224257, 224258) c6( ) c7(ck, Tg, T, x, fX, bkf, Y, h, k, CQ, cm, bt, fh, er, iP); #c1(EFTUD1) c2(NP_001035700) c3(elongation factor Tu GTP-binding domain-containing protein 1 isoform 2) c4(32948, 32949, 32950) c5(32951, 32952, 32953, 32954, 32955, 32956, 32957, 32958) c6( ) c7(aw, dY); #c1(EFTUD1) c2(NP_078856) c3(elongation factor Tu GTP-binding domain-containing protein 1 isoform 1) c4(215787) c5(215788, 215789, 215790, 215791, 215792, 215793, 215794, 215795, 215796, 215797, 215798, 215799, 215800, 215801, 215802, 215803) c6( ) c7(aw, dY); #c1(EFTUD2) c2(NP_001136077) c3(116 kDa U5 small nuclear ribonucleoprotein component isoform b) c4(54272) c5( ) c6( ) c7(bkg, aMU, Xg, bkh, QK, nC); #c1(EFTUD2) c2(NP_001245282) c3(116 kDa U5 small nuclear ribonucleoprotein component isoform a) c4(92970, 92971) c5(92972, 92973, 92974, 92975, 92976, 92977, 92978, 92979, 92980, 92981, 92982, 92983, 92984, 92985, 92986, 92987, 92988, 92989) c6( ) c7(bkg, aMU, Xg, bkh, QK, nC); #c1(EGF) c2(NP_001171601) c3(pro-epidermal growth factor isoform 2 preproprotein) c4(70717) c5(70718, 70719, 70720, 70721, 70722, 70723, 70724) c6( ) c7(lD, gh, G, T, bM, aC, pf, hV, ea, if, e, al, bO, eb, ajp, bB, axk, ahX, IR, ci, fd, aY, ip, x, Vp, bv, Na, aE, rJ, pX, aeO, bki, dV, auB, iv, ja, K, Nj, hu, bkk, eL, aa, ly, xQ, y0, bkr, ZH, aeR, JI, aW, aoo, Ls, hl, LZ, Qm, YG, PQ, g, as, eE, eF, uC, cm, Qt, zV, iP, bw, aAW, qJ, eM, nB, AM, nF, iA, vA, wB, cj, NI, dW, m, fy, cE, iu, Vj, dD, xu, vl, aEj, bkq, sw, zt, ht, NT, aBx, n, kv, fr, qN, auA, aje, asS, eW, EI, ft, no, jz, Yc, bkm, ec, i, Nn, gd, IG, By, dL, ey, hB, Ha, Dg, asp, RT, CN, MD, As, hQ, Vt, ack, aq, kp, fe, auC, op, lx, kT, bkn, W, GU, dB, hk, eD, ajn, hL, gw, uz, hR, at, it, B, bL, eR, Dh, fG, WT, jx, aA, cz, fF, hy, v, yO, asA, bX, bkj, q, eA, qH, XX, Mg, mj, anA, Ig, bjA, nv, Qg, qp, BJ, aT, kf, cy, anz, an, rz, ae, ne, bkl, dl, amx, s, ND, nO, oV, Y, ev, LO, iU, r, Io, tu, en, bu, cl, t, apx, bkp, pb, iK, bN, wA, tR, nM, kP, c, Dy, ac, wO, II, nG, gX, WU, adR, CZ, dy, bko, anD, im, bt, ao, hS, On, hl, aD, jN, uO, jh, Hn, bjW, Fb, eq, jE, aml, ad, wD, hX, dP, av, iC, hd, F, ib, py, xl, yt, Db, NS, tT, Sr, bj, Dj, hP, ji, aKo, nJ, Yi, d, vj, ff, eH, cr, dN, tv, anQ, aF, hp, Fq, Pd, iR, bz, LB, es, D, gk, pu, arY, TA, kg, bE, Ew, AR, wz, Hs, adg, IC, X, y); #c1(EGF) c2(NP_001171602) c3(pro-epidermal growth factor isoform 3 preproprotein) c4(70725) c5(70726, 70727, 70728, 70729, 70730, 70731, 70732) c6( ) c7(lD, gh, G, T, bM, aC, pf, hV, ea, if, e, al, bO, eb, ajp, bB, axk, ahX, IR, ci, fd, aY, ip, x, Vp, bv, Na, aE, rJ, pX, aeO, bki, dV, auB, iv, ja, K, Nj, hu, bkk, eL, aa, ly, xQ, yo, bkr, ZH, aeR, JI, aW, aoo, Ls, hl, LZ, Qm, YG, PQ, g, as, eE, eF, uC, cm, Qt, zV, iP, bw, aAW, qJ, eM, nB, AM, nF, iA, vA, wB, cj, NI, dW, m, fy, cE, iu, Vj, dD, xu, vl, aEj, bkq, sw, zt, ht, NT, aBx, n, kv, fr, qN, auA, aje, asS, eW, EI, ft, no, jz, Yc, bkm, ec, i, Nn, gd, IG, By, dL, ey, hB, Ha, Dg, asp, RT, CN, MD, As, hQ, Vt, ack, aq, kp, fe, auC, op, lx, kT, bkn, W, GU, dB, hk, eD, ajn, hL, gw, uz, hR, at, it, B, bL, eR, Dh, fG, WT, jx, aA, cz, fF, hy, v, yO, asA, bX, bkj, q, eA, qH, XX, Mg, mj, anA, Ig, bjA, nv, Qg, qp, BJ, aT, kf, cy, anz, an, rz, ae, ne, bkl, dl, amx, s, ND, nO, oV, Y, ev, LO, iU, r, lo, tu, en, bu, cl, t, apx, bkp, pb, iK, bN, wA, tR, nM, kP, c, Dy, ac, wO, II, nG, gX, WU, adR, CZ, dy, bko, anD, im, bt, ao, hS, On, hl, aD, jN, uO, jh, Hn, bjW, Fb, eq, jE, aml, ad, wD, hX, dP, av, iC, hd, F, ib, py, xl, yt, Db, NS, tT, Sr, bj, Dj, hP, ji, aKo, nJ, Yi, d, vj, ff, eH, cr, dN, tv, anQ, aF, hp, Fq, Pd, iR, bz, LB, es, D, gk, pu, arY, TA, kg, bE, Ew, AR, wz, Hs, adg, IC, X, y); #c1(EGF) c2(NP_001954) c3(pro-epidermal growth factor isoform 1 preproprotein) c4(122559) c5(122560, 122561, 122562, 122563, 122564, 122565, 122566) c6( ) c7(lD, gh, G, T, bM, aC, pf, hV, ea, if, e, al, bO, eb, ajp, bB, axk, ahX, IR, ci, fd, aY, ip, x, Vp, bv, Na, aE, rJ, pX, aeO, bki, dV, auB, iv, ja, K, Nj, hu, bkk, eL, aa, ly, xQ, yo, bkr, ZH, aeR, JI, aW, aoo, Ls, hl, LZ, Qm, YG, PQ, g, as, eE, eF, uC, cm, Qt, zV, iP, bw, aAW, qJ, eM, nB, AM, nF, iA, vA, wB, cj, NI, dW, m, fy, cE, iu, Vj, dD, xu, vl, aEj, bkq, sw, zt, ht, NT, aBx, n, kv, fr, qN, auA, aje, asS, eW, EI, ft, no, jz, Yc, bkm, ec, i, Nn, gd, IG, By, dL, ey, hB, Ha, Dg, asp, RT, CN, MD, As, hQ, Vt, ack, aq, kp, fe, auC, op, lx, kT, bkn, W, GU, dB, hk, eD, ajn, hL, gw, uz, hR, at, it, B, bL, eR, Dh, fG, WT, jx, aA, cz, fF, hy, v, yO, asA, bX, bkj, q, eA, qH, XX, Mg, mj, anA, Ig, bjA, nv, Qg, qp, BJ, aT, kf, cy, anz, an, rz, ae, ne, bkl, dl, amx, s, ND, nO, oV, Y, ev, LO, iU, r, lo, tu, en, bu, cl, t, apx, bkp, pb, iK, bN, wA, tR, nM, kP, c, Dy, ac, wO, II, nG, gX, WU, adR, CZ, dy, bko, anD, im, bt, ao, hS, On, hl, aD, jN, uO, jh, Hn, bjW, Fb, eq, jE, aml, ad, wD, hX, dP, av, iC, hd, F, ib, py, xl, yt, Db, NS, tT, Sr, bj, Dj, hP, ji, aKo, nJ, Yi, d, vj, ff, eH, cr, dN, tv, anQ, aF, hp, Fq, Pd, iR, bz, LB, es, D, gk, pu, arY, TA, kg, bE, Ew, AR, wz, Hs, adg, IC, X, y); #c1(EGFL6) c2(NP_001161362) c3(epidermal growth factor-like protein 6 isoform 2 precursor) c4(65638) c5(65639, 65640, 65641, 65642, 65643, 65644) c6( ) c7(bgw, t, aJQ, m, ip); #c1(EGFL6) c2(NP_056322) c3(epidermal growth factor-like protein 6 isoform 1 precursor) c4(187061) c5(187062, 187063, 187064, 187065, 187066, 187067) c6( ) c7(bgw, t, aJQ, m, ip); #c1(EGFL7) c2(XP_011517068) c3(epidermal growth factor-like protein 7 isoform X1) c4(310562) c5(310563, 310564, 310565, 310566, 310567, 310568, 310569, 310570, 310571, 310572, 310573, 310574, 310575, 310576, 310577, 310578, 310579, 310580) c6( ) c7(T, aYP, dG, eA, gd, aT, ey, H, B, qt, aW, oV, eZ, aYR, ys, bz, ac, aYa, wO, aYb, aYQ, Lp, Lq, in, X, L); #c1(EGFL8) c2(NP_085155) c3(epidermal growth factor-like protein 8 precursor) c4(219525, 219526, 219527, 219528) c5(219529, 219530, 219531, 219532, 219533, 219534, 219535, 219536, 219537, 219538, 219539, 219540, 219541, 219542, 219543, 219544, 219545, 219546, 219547, 219548, 219549, 219550, 219551, 219552, 219553, 219554, 219555, 219556, 219557, 219558, 219559, 219560, 219561, 219562, 219563, 219564, 219565, 219566, 219567, 219568, 219569, 219570, 219571, 219572, 219573, 219574, 219575, 219576, 219577, 219578, 219579, 219580, 219581, 219582, 219583, 219584, 219585, 219586, 219587, 219588, 219589, 219590, 219591, 219592, 219593, 219594, 219595, 219596, 219597, 219598, 219599, 219600, 219601, 219602, 219603, 219604, 219605, 219606, 219607, 219608, 219609, 219610, 219611, 219612, 219613, 219614, 219615, 219616, 219617, 219618, 219619) c6( ) c7(T, A, W, eZ, r, q); #c1(EGFLAM) c2(NP_001192230) c3(pikachurin isoform 5 precursor) c4(82121, 82122) c5(82123, 82124, 82125, 82126, 82127, 82128, 82129, 82130, 82131, 82132) c6(82133, 82134) c7(cd, oe, xs); #c1(EGFLAM) c2(NP_689616) c3(pikachurin isoform 1 precursor) c4(243281, 243282, 243283, 243284) c5(243285, 243286, 243287, 243288, 243289, 243290, 243291, 243292, 243293) c6(243294, 243295) c7(cd, oe, xs); #c1(EGFLAM) c2(NP_877950) c3(pikachurin isoform 2) c4(256973) c5(256974, 256975, 256976, 256977, 256978, 256979, 256980, 256981, 256982, 256983, 256984, 256985, 256986, 256987, 256988, 256989, 256990, 256991, 256992, 256993, 256994, 256995, 256996, 256997) c6(256998, 256999, 257000, 257001, 257002, 257003) c7(cd, oe, xs); #c1(EGFLAM) c2(NP_877953) c3(pikachurin isoform 4) c4( ) c5(257004, 257005, 257006, 257007, 257008, 257009, 257010, 257011, 257012, 257013, 257014, 257015, 257016, 257017, 257018, 257019, 257020, 257021, 257022, 257023, 257024, 257025, 257026, 257027) c6(257028, 257029, 257030, 257031, 257032, 257033, 257034) c7(cd, oe, xs); #c1(EGFR) c2(NP_005219) c3(epidermal growth factor receptor isoform a precursor) c4(154123, 154124, 154125, 154126, 154127, 154128) c5(154129, 154130, 154131, 154132, 154133, 154134, 154135, 154136, 154137, 154138, 154139, 154140, 154141, 154142, 154143, 154144, 154145, 154146, 154147, 154148, 154149, 154150, 154151, 154152, 154153, 154154, 154155, 154156, 154157, 154158, 154159, 154160, 154161, 154162, 154163, 154164) c6( ) c7(gh, T, ea, bO, fd, ci, aY, bv, aE, fm, dE, ajv, auB, iv, hu, zy, bkk, azh, cp, aa, yo, iE, Ls, az, Az, QB, nY, bjk, zE, ahv, zV, iA, nB, avZ, bkv, cj, azg, cE, YK, aAz, iB, ht, RC, aj, cd, bao, auO, aoc, aeX, bkP, aJb, pl, Yl, alJ, anP, MD, sp, Lh, fe, CQ, iO, bkn, dB, eD, E, avr, bkE, aJJ, jv, Dh, fZ, aA, cz, bX, Iu, AO, q, bkJ, Qg, qK, jj, ch, dl, iF, NE, nO, fO, cl, bkB, ig, Nk, RW, VA, nG, WU, aws, bt, rA, On, Mb, jN, Jy, jh, OE, Gn, ad, afb, hX, iC, yt, aFh, avs, IQ, wm, apw, bku, BO, ff, aeV, iV, bz, YR, mi, ag, azT, aed, ne, jr, iu, oO, bM, aBD, aEn, anl, bkx, bkF, if, bkl, bB, ip, anV, aeO, ja, aeN, aNZ, bky, Qe, xQ, aeR, JI, fc, hl, Qq, kt, Qm, NR, as, eE, eF, cm, Qt, qJ, bkD, vA, mx, NO, OD, Th, ik, Vj, dD, IT, wu, zt, n, oY, aje, aGR, Mo, jz, no, zw, ec, Do, Xe, gd, aAG, bkN, A, bkC, hT, PX, fJ, AQ, GA, bP, GU, PI, hL, at, fL, Te, B, dA, v, Qo, eJ, asG, RI, bjA, BJ, AJ, atZ, ae, jf, Qr, vT, ev, auc, acB, afs, bu, t, KQ, ck, aUc, kP, gX, anD, nZ, hl, Dd, eq, Fc, Tg, hd, py, Db, ds, Ti, bkw, nJ, atX, d, dN, anW, Z, adj, bF, gk, arY, wz, gZ, QC, y, kS, aC, fR, azf, hV, al, axk, PB, Vp, bkA, xE, bW, pX, Qk, vg, K, eL, aEI, mQ, LZ, g, iP, AM, nF, Gs, U, PV, Hb, m, sw, zX, NT, qy, zP, asS, ft, It, Tf, cU, vd, is, dx, ny, CN, ks, YF, cM, auC, Zj, Tk, JM, aEG, zl, it, avm, fG, jx, wo, acn, il, pd, eA, J, er, XX, Ig, aAF, yg, bq, Y, LO, apK, r, en, iK, QG, c, np, dy, bkK, KY, LS, kh, id, bkL, auq, bS, bkM, OH, iJ, dP, io, hP, ji, Yi, anv, vj, eH, PA, cr, anQ, VI, hp, iR, KM, TA, Ew, AR, cP, G, jW, pf, WV, mF, Ou, DA, zQ, aAu, aW, eM, wB, uJ, gn, bkz, Xu, bks, aEj, Or, aBx, awr, fr, ct, qN, eW, co, BI, hw, Yc, ic, h, dL, hB, Wr, asT, Xh, Lg, asp, aq, aeW, kp, bkH, op, aoO, Qy, bkQ, Qu, hk, gw, hR, ZZ, cn, bL, rG, yk, WT, hy, akW, bkG, nv, aoA, afQ, aT, Fx, Tj, af, Uf, s, iU, oV, aNi, bjI, OC, sS, nM, im, hS, aD, Fb, oH, mC, bkO, av, ib, Rq, oz, NS, fb, afe, qt, eZ, Ej, aF, Hp, LB, es, bkt, zr, bE, aBH, MC, adg, X); #c1(EGFR) c2(NP_958439) c3(epidermal growth factor receptor isoform b precursor) c4( ) c5(262110, 262111, 262112, 262113, 262114, 262115) c6( ) c7(gh, T, ea, bO, fd, ci, aY, bv, aE, fm, dE, ajv, auB, iv, hu, zy, bkk, azh, cp, aa, yo, iE, Ls, az, Az, QB, nY, bjk, zE, ahv, zV, iA, nB, avZ, bkv, cj, azg, cE, YK, aAz, iB, ht, RC, aj, cd, bao, auO, aoc, aeX, bkP, aJb, pl, YI, alJ, anP, MD, sp, Lh, fe, CQ, iO, bkn, dB, eD, E, avr, bkE, aJJ, jv, Dh, fZ, aA, cz, bX, Iu, AO, q, bkJ, Qg, qK, jj, ch, dl, iF, NE, nO, fO, cl, bkB, ig, Nk, RW, VA, nG, WU, aws, bt, rA, On, Mb, jN, Jy, jh, OE, Gn, ad, afb, hX, iC, yt, aFh, avs, IQ, wm, apw, bku, BO, ff, aeV, iV, bz, YR, mi, ag, azT, aed, ne, jr, iu, oO, bM, aBD, aEn, anl, bkx, bkE, if, bkl, bB, ip, anV, aeO, ja, aeN, aNZ, bky, Qe, xQ, aeR, JI, fc, hl, Qg, kt, Qm, NR, as, eE, eF, cm, Qt, qJ, bkD, vA, mx, NI, OD, Th, ik, Vj, dD, IT, wu, zt, n, oY, aje, aGR, Mo, jz, no, zw, ec, Do, Xe, gd, aAG, bkN, A, bkC, hT, PX, fJ, AQ, GA, bP, GU, PI, hL, at, fL, Te, B, dA, v, Qo, eJ, asG, RI, bjA, BJ, AJ, atZ, ae, jf, Qr, vT, ev, auc, acB, afs, bu, t, KQ, ck, aUc, kP, gX, anD, nZ, hl, Dd, eq, Fc, Tg, hd, py, Db, ds, Ti, bkw, nJ, atX, d, dN, anW, Z, adj, bF, gk, arY, wz, gZ, QC, y, kS, aC, fR, azf, hV, al, axk, PB, Vp, bkA, xE, bW, pX, Qk, vg, K, eL, aEl, mQ, LZ, g, iP, AM, nF, Gs, U, PV, Hb, m, sw, zX, NT, qy, zP, asS, ft, It, Tf, cU, vd, is, dx, ny, CN, ks, YF, cM, auC, Zj, Tk, JM, aEG, zl, it, avm, fG, jx, wo, acn, il, pd, eA, J, er, XX, Ig, aAF, yg, bq, Y, LO, apK, r, en, iK, QG, c, np, dy, bkK, KY, LS, kh, id, bkL, auq, bS, bkM, OH, iJ, dP, io, hP, ji, Yi, anv, vj, eH, PA, cr, anQ, VI, hp, iR, KM, TA, Ew, AR, cP, G, jW, pf, WV, mF, Ou, DA, zQ, aAu, aW, eM, wB, uJ, gn, bkz, Xu, bks, aEj, Or, aBx, awr, fr, ct, qN, eW, co, BI, hw, Yc, ic, h, dL, hB, Wr, asT, Xh, Lg, asp, aq, aeW, kp, bkH, op, aoO, Qy, bkQ, Qu, hk, gw, hR, ZZ, cn, bL, rG, yk, WT, hy, akW, bkG, nv, aoA, afQ, aT, Fx, Tj, af, Uf, s, iU, oV, aNi, bjI, OC, sS, nM, im, hS, aD, Fb, oH, mC, bkO, av, ib, Rq, oz, NS, fb, afe, qt, eZ, Ej, aF, Hp, LB, es, bkt, zr, bE, aBH, MC, adg, X); #c1(EGFR) c2(NP_958440) c3(epidermal growth factor receptor isoform c precursor) c4(262116) c5(262117, 262118, 262119, 262120, 262121, 262122) c6( ) c7(gh, T, ea, bO, fd, ci, aY, bv, aE, fm, dE, ajv, auB, iv, hu, zy, bkk, azh, cp, aa, yo, iE, Ls, az, Az, QB, nY, bjk, zE, ahv, zV, iA, nB, avZ, bkv, cj, azg, cE, YK, aAz, iB, ht, RC, aj, cd, bao, auO, aoc, aeX, bkP, aJb, pl, Yl, alJ, anP, MD, sp, Lh, fe, CQ, iO, bkn, dB, eD, E, avr, bkE, aJJ, jv, Dh, fZ, aA, cz, bX, Iu, AO, q, bkJ, Qg, qK, jj, ch, dl, iF, NE, nO, fO, cl, bkB, ig, Nk, RW, VA, nG, WU, aws, bt, rA, On, Mb, jN, Jy, jh, OE, Gn, ad, afb, hX, iC, yt, aFh, avs, IQ, wm, apw, bku, BO, ff, aeV, iV, bz, YR, mi, ag, azT, aed, ne, jr, iu, oO, bM, aBD, aEn, anl, bkx, bkF, if, bkl, bB, ip, anV, aeO, ja, aeN, aNZ, bky, Qe, xQ, aeR, JI, fc, hl, Qq, kt, Qm, NR, as, eE, eF, cm, Qt, qJ, bkD, vA, mx, NI, OD, Th, ik, Vj, dD, IT, wu, zt, n, oY, aje, aGR, Mo, jz, no, zw, ec, Do, Xe, gd, aAG, bkN, A, bkG, hT, PX, fJ, AQ, GA, bP, GU, PI, hL, at, fL, Te, B, dA, v, Qo, eJ, asG, RI, bjA, BJ, AJ, atZ, ae, jf, Qr, vT, ev, auc, acB, afs, bu, t, KQ, ck, aUc, kP, gX, anD, nZ, hl, Dd, eq, Fc, Tg, hd, py, Db, ds, Ti, bkw, nJ, atX, d, dN, anW, Z, adj, bF, gk, arY, wz, gZ, QC, y, kS, aC, fR, azf, hV, al, axk, PB, Vp, bkA, xE, bW, pX, Qk, vg, K, eL, aEl, mQ, LZ, g, iP, AM, nF, Gs, U, PV, Hb, m, sw, zX, NT, qy, zP, asS, ft, It, Tf, cU, vd, is, dx, ny, CN, ks, YF, cM, auC, Zj, Tk, JM, aEG, zl, it, avm, fG, jx, wo, acn, il, pd, eA, J, er, XX, Ig, aAF, yg, bq, Y, LO, apK, r, en, iK, QG, c, np, dy, bkK, KY, LS, kh, id, bkL, auq, bS, bkM, OH, iJ, dP, io, hP, ji, Yi, anv, vj, eH, PA, cr, anQ, VI, hp, iR, KM, TA, Ew, AR, cP, G, jW, pf, WV, mF, Ou, DA, zQ, aAu, aW, eM, wB, uJ, gn, bkz, Xu, bks, aEj, Or, aBx, awr, fr, ct, qN, eW, co, BI, hw, Yc, ic, h, dL, hB, Wr, asT, Xh, Lg, asp, aq, aeW, kp, bkH, op, aoO, Qy, bkQ, Qu, hk, gw, hR, ZZ, cn, bL, rG, yk, WT, hy, akW, bkG, nv, aoA, afQ, aT, Fx, Tj, af, Uf, s, iU, oV, aNi, bjI, OC, sS, nM, im, hS, aD, Fb, oH, mC, bkO, av, ib, Rq, oz, NS, fb, afe, qt, eZ, Ej, aF, Hp, LB, es, bkt, zr, bE, aBH, MC, adg, X); #c1(EGFR) c2(NP_958441) c3(epidermal growth factor receptor isoform d precursor) c4(262123, 262124) c5(262125, 262126, 262127, 262128, 262129, 262130) c6( ) c7(gh, T, ea, bO, fd, ci, aY, bv, aE, fm, dE, ajv, auB, iv, hu, zy, bkk, azh, cp, aa, yo, iE, Ls, az, Az, QB, nY, bjk, zE, ahv, zV, iA, nB, avZ, bkv, cj, azg, cE, YK, aAz, iB, ht, RC, aj, cd, bao, auO, aoc, aeX, bkP, aJb, pl, YI, alJ, anP, MD, sp, Lh, fe, CQ, iO, bkn, dB, eD, E, avr, bkE, aJJ, jv, Dh, fZ, aA, cz, bX, Iu, AO, q, bkJ, Qg, qK, jj, ch, dl, iF, NE, nO, fO, cl, bkB, ig, Nk, RW, VA, nG, WU, aws, bt, rA, On, Mb, jN, Jy, jh, OE, Gn, ad, afb, hX, iC, yt, aFh, avs, IQ, wm, apw, bku, BO, ff, aeV, iV, bz, YR, mi, ag, azT, aed, ne, jr, iu, oO, bM, aBD, aEn, anl, bkx, bkF, if, bkl, bB, ip, anV, aeO, ja, aeN, aNZ, bky, Qe, xQ, aeR, JI, fc, hl, Qq, kt, Qm, NR, as, eE, eF, cm, Qt, qJ, bkD, vA, mx, NI, OD, Th, ik, Vj, dD, IT, wu, zt, n, oY, aje, aGR, Mo, jz, no, zw, ec, Do, Xe, gd, aAG, bkN, A, bkG, hT, PX, fJ, AQ, GA, bP, GU, PI, hL, at, fL, Te, B, dA, v, Qo, eJ, asG, Rl, bjA, BJ, AJ, atZ, ae, jf, Qr, vT, ev, auc, acB, afs, bu, t, KQ, ck, aUc, kP, gX, anD, nZ, hl, Dd, eq, Fc, Tg, hd, py, Db, ds, Ti, bkw, nJ, atX, d, dN, anW, Z, adj, bF, gk, arY, wz, gZ, QC, y, kS, aC, fR, azf, hV, al, axk, PB, Vp, bkA, xE, bW, pX, Qk, vg, K, eL, aEl, mQ, LZ, g, iP, AM, nF, Gs, U, PV, Hb, m, sw, zX, NT, qy, zP, asS, ft, It, Tf, cU, vd, is, dx, ny, CN, ks, YF, cM, auC, Zj, Tk, JM, aEG, zl, it, avm, fG, jx, wo, acn, il, pd, eA, J, er, XX, Ig, aAF, yg, bq, Y, LO, apK, r, en, iK, QG, c, np, dy, bkK, KY, LS, kh, id, bkL, auq, bS, bkM, OH, iJ, dP, io, hP, ji, Yi, anv, vj, eH, PA, cr, anQ, VI, hp, iR, KM, TA, Ew, AR, cP, G, jW, pf, WV, mF, Ou, DA, zQ, aAu, aW, eM, wB, uJ, gn, bkz, Xu, bks, aEj, Or, aBx, awr, fr, ct, qN, eW, co, BI, hw, Yc, ic, h, dL, hB, Wr, asT, Xh, Lg, asp, aq, aeW, kp, bkH, op, aoO, Qy, bkQ, Qu, hk, gw, hR, ZZ, cn, bL, rG, yk, WT, hy, akW, bkG, nv, aoA, afQ, aT, Fx, Tj, af, Uf, s, iU, oV, aNi, bjI, OC, sS, nM, im, hS, aD, Fb, oH, mC, bkO, av, ib, Rq, oz, NS, fb, afe, qt, eZ, Ej, aF, Hp, LB, es, bkt, zr, bE, aBH, MC, adg, X); #c1(EGLN1) c2(NP_071334) c3(egl nine homolog 1) c4(211057) c5(211058, 211059, 211060, 211061, 211062, 211063, 211064) c6( ) c7(if, bB, fr, ci, qN, bkU, ai, oT, py, hw, oW, aT, ji, K, sR, bkR, eu, cp, bkS, aW, Y, ff, en, cl, iK, uR, hL, bkT, anx, y, sZ, wS, bkV); #c1(EGLN1) c2(XP_005273224) c3(egl nine homolog 1 isoform X2) c4(284372) c5(284373, 284374, 284375, 284376, 284377, 284378, 284379) c6( ) c7(if, bB, fr, ci, qN, bkU, ai, oT, py, hw, oW, aT, ji, K, sR, bkR, eu, cp, bkS, aW, Y, ff, en, cl, iK, uR, hL, bkT, anx, y, sZ, wS, bkV); #c1(EGLN2) c2(NP_444274) c3(egl nine homolog 2) c4(230229) c5(230230, 230231, 230232, 230233, 230234, 230235, 230236, 230237, 230238, 230239, 230240) c6( ) c7(T, Uc, eM, qt, aW, aqh, WA, z, Gv, aT, kH, at, fe, fr, eA, ji, hf, aH); #c1(EGLN3) c2(NP_071356) c3(egl nine homolog 3) c4(211187) c5(211188, 211189, 211190, 211191, 211192, 211193, 211194, 211195, 211196, 211197) c6( ) c7(T, aw, aA, bB, fr, ci, q, ad, eA, Hr, oT, cc, aE, aT, cy, rO, ji, sR, ae, aH, bA, aW, r, aq, kp, aF, iV, cm, iK, ac, c, z, go, tV, B, VB); #c1(EGR1) c2(NP_001955) c3(early growth response protein 1) c4(122567, 122568, 122569) c5(122570, 122571, 122572, 122573, 122574, 122575, 122576, 122577, 122578, 122579, 122580, 122581, 122582, 122583, 122584, 122585, 122586, 122587, 122588) c6( ) c7(gh, T, os, bM, Js, ea, if, fd, bB, IR, ci, aHR, gH, fm, K, hu, oi, eL, aa, eG, dH, Hl, aW, az, fc, aBd, g, as, hJ, aKj, eF, cm, bw, eM, nB, iA, acS, iT, vA, Hb, m, iu, dD, wu, ht, n, aj, oY, awr, fr, qN, jw, fK, br, eW, FN, IG, h, dL, pi, apc, oS, RT, fe, aq, op, hq, ar, kT, Gq, dB, Fi, Ei, Be, hL, at, bm, zB, it, B, Jo, fG, aA, ol, v, j, q, J, er, eA, mj, fh, aT, cy, dz, rO, ae, af, eu, Y, r, cu, lo, en, cl, t, iK, pb, ck, iM, ac, wO, dy, aws, bt, qb, ha, uO, bs, jh, oZ, bS, dG, eq, Fb, iJ, ad, aHF, ib, py, Ot, oW, wm, NM, d, je, et, ff, gK, eH, gE, aF, KM, bz, Hv, LB, es, bE, Ny, HN, aS, ra, IC, xg, X, y); #c1(EGR2) c2(NP_001129650) c3(E3 SUMO-protein ligase EGR2 isoform a) c4(52095, 52096) c5(52097, 52098, 52099, 52100, 52101, 52102, 52103, 52104, 52105, 52106, 52107) c6( ) c7(Pt, xF, bkY, ha, agU, aA, j, fu, bX, EA, il, IR, mC, hX, no, bK, bU, oi, af, dx, HA, eZ, aF, bQ, t, cm, pb, op, bN, bkZ, Qi, ql, bkW, iT, Iq, vA, wR, fL, y, bkX); #c1(EGR2) c2(XP_011537729) c3(E3 SUMO-protein ligase EGR2 isoform X2) c4(335280) c5(335281, 335282, 335283, 335284, 335285, 335286, 335287) c6( ) c7(Pt, xF, bkY, ha, agU, aA, j, fu, bX, EA, il, IR, mC, hX, no, bK, bU, oi, af, dx, HA, eZ, aF, bQ, t, cm, pb, op, bN, bkZ, Qi, ql, bkW, iT, Iq, vA, wR, fL, y, bkX); #c1(EGR2) c2(XP_011537731) c3(E3 SUMO-protein ligase EGR2 isoform X1) c4( ) c5(335288, 335289, 335290, 335291, 335292) c6( ) c7(Pt, xF, bkY, ha, agU, aA, j, fu, bX, EA, il, IR, mC, hX, no, bK, bU, oi, af, dx, HA, eZ, aF, bQ, t, cm, pb, op, bN, bkZ, Qi, ql, bkW, iT, Iq, vA, wR, fL, y, bkX); #c1(EGR3) c2(NP_001186810) c3(early growth response protein 3 isoform 3) c4( ) c5(78619, 78620, 78621, 78622, 78623, 78624) c6( ) c7(T, iH, ha, n, j, ci, IR, mC, hX, kH, aT, oi, he, af, je, aW, eZ, pb, iM, Iq, cj, fL, cB); #c1(EGR3) c2(NP_004421) c3(early growth response protein 3 isoform 1) c4(146240, 146241) c5(146242, 146243, 146244, 146245, 146246, 146247, 146248) c6( ) c7(T, iH, ha, n, j, ci, IR, mC, hX, kH, aT, oi, he, af, je, aW, eZ, pb, iM, Iq, cj, fL, cB); #c1(EGR3) c2(XP_005273483) c3(early growth response protein 3 isoform X1) c4(284605) c5(284606, 284607, 284608, 284609, 284610) c6( ) c7(T, iH, ha, n, j, ci, IR, mC, hX, kH, aT, oi, he, af, je, aW, eZ, pb, iM, Iq, cj, fL, cB); #c1(EGR3) c2(XP_011542731) c3(early growth response protein 3 isoform X3) c4( ) c5(341315) c6( ) c7(T, iH, ha, n, j, ci, IR, mC, hX, kH, aT, oi, he, af, je, aW, eZ, pb, iM, Iq, cj, fL, cB); #c1(EGR4) c2(NP_001956) c3(early growth response protein 4) c4(122589, 122590) c5(122591, 122592, 122593, 122594, 122595, 122596, 122597, 122598, 122599, 122600, 122601, 122602, 122603) c6( ) c7(oi, hL, gU, ND); #c1(EHBP1) c2(NP_001136087) c3(EH domain-binding protein 1 isoform 3) c4(54284, 54285) c5(54286, 54287, 54288, 54289, 54290, 54291, 54292, 54293, 54294, 54295, 54296, 54297, 54298, 54299, 54300, 54301) c6( ) c7(cm, ae, ad, bla); #c1(EHBP1) c2(XP_005264284) c3(EH domain-binding protein 1 isoform X2) c4(278769) c5(278770, 278771, 278772, 278773, 278774, 278775, 278776, 278777, 278778, 278779) c6( ) c7(cm, ae, ad, bla); #c1(EHBP1) c2(XP_005264285) c3(EH domain-binding protein 1 isoform X7) c4( ) c5(278780, 278781, 278782, 278783, 278784, 278785, 278786, 278787, 278788, 278789, 278790, 278791) c6( ) c7(cm, ae, ad, bla); #c1(EHBP1) c2(XP_011531017) c3(EH domain-binding protein 1 isoform X1) c4(326978) c5(326979, 326980, 326981, 326982, 326983, 326984) c6( ) c7(cm, ae, ad, bla); #c1(EHBP1) c2(XP_011531018) c3(EH domain-binding protein 1 isoform X3) c4(326985) c5( ) c6( ) c7(cm, ae, ad, bla); #c1(EHBP1) c2(XP_011531020) c3(EH domain-binding protein 1 isoform X6) c4(326986) c5( ) c6( ) c7(cm, ae, ad, bla); #c1(EHD1) c2(NP_001269374) c3(EH domain-containing protein 1 isoform 2) c4(101317, 101318, 101319, 101320, 101321) c5(101322, 101323, 101324, 101325, 101326, 101327, 101328, 101329, 101330, 101331, 101332, 101333, 101334, 101335, 101336, 101337, 101338, 101339, 101340, 101341, 101342, 101343, 101344, 101345) c6( ) c7(bL, cc, aZ, Y, Be, V, bN); #c1(EHD1) c2(NP_006786) c3(EH domain-containing protein 1 isoform 1) c4( ) c5(168059, 168060, 168061, 168062, 168063, 168064, 168065, 168066, 168067, 168068) c6( ) c7(bL, cc, aZ, Y, Be, V, bN); #c1(EHD2) c2(NP_055416) c3(EH domain-containing protein 2) c4(180987, 180988, 180989, 180990, 180991, 180992) c5(180993, 180994, 180995, 180996, 180997, 180998, 180999, 181000, 181001, 181002, 181003, 181004, 181005, 181006, 181007, 181008, 181009, 181010, 181011, 181012, 181013, 181014, 181015, 181016, 181017, 181018, 181019, 181020, 181021, 181022, 181023, 181024, 181025, 181026, 181027, 181028) c6( ) c7(bL, bM, NK, T, dD, acz, aAz, ea, agU, ha, cV, jh, bgj, ajM, eq, fu, fr, bgR, q, eA, hX, x, fX, aOu, oz, Dq, blb, qh, yg, aT, aU, h, K, akr, dx, HO, aa, jf, iF, aW, Y, xs, eZ, bfu, r, fe, lo, cm, bz, bN, aBs, ck, es, y, Bv, eM, iA, dB, Qu, ag, aiM, IO, k, pJ, bt, ao); #c1(EHD3) c2(NP_055415) c3(EH domain-containing protein 3) c4(180974, 180975) c5(180976, 180977, 180978, 180979, 180980, 180981, 180982, 180983, 180984, 180985, 180986) c6( ) c7(bL, bM, T, aGn, pf, bO, GC, oY, bS, j, ct, ci, v, yU, lu, fw, cd, br, eA, aE, pX, h, yZ, aNU, dz, jj, an, blc, apc, mR, Y, eZ, dq, bld, jg, Z, bw, adz, cT, dB, gZ, afW, bt, kS); #c1(EHD3) c2(XP_011531108) c3(EH domain-containing protein 3 isoform X1) c4( ) c5(327091) c6( ) c7(bL, bM, T, aGn, pf, bO, GC, oY, bS, j, ct, ci, v, yU, lu, fw, cd, br, eA, aE, pX, h, yZ, aNU, dz, jj, an, blc, apc, mR, Y, eZ, dq, bld, jg, Z, bw, adz, cT, dB, gZ, afW, bt, kS); #c1(EHD4) c2(NP_644670) c3(EH domain-containing protein 4) c4(238483) c5(238484, 238485, 238486, 238487, 238488, 238489) c6( ) c7(bL, T, Y, jN, ap, uY, v, bt, bA); #c1(EHF) c2(NP_001193545) c3(ETS homologous factor isoform 1 precursor) c4(82256, 82257) c5(82258, 82259, 82260, 82261, 82262, 82263) c6( ) c7(bM, T, xQ, ac, aT, agF, ci, m, ae, ad, hS); #c1(EHF) c2(XP_005252918) c3(ETS homologous factor isoform X5) c4(272067) c5(272068) c6( ) c7(bM, T, xQ, ac, aT, agF, ci, m, ae, ad, hS); #c1(EHF) c2(XP_005252919) c3(ETS homologous factor isoform X2) c4( ) c5(272069, 272070, 272071, 272072, 272073) c6( ) c7(bM, T, xQ, ac, aT, agF, ci, m, ae, ad, hS); #c1(EHF) c2(XP_011518285) c3(ETS homologous factor isoform X4) c4( ) c5(312309, 312310, 312311, 312312) c6( ) c7(bM, T, xQ, ac, aT, agF, ci, m, ae, ad, hS); #c1(EHF) c2(XP_011518287) c3(ETS homologous factor isoform X1) c4( ) c5(312313, 312314, 312315, 312316, 312317, 312318, 312319, 312320, 312321, 312322, 312323) c6( ) c7(bM, T, xQ, ac, aT, agF, ci, m, ae, ad, hS); #c1(EHHADH) c2(NP_001159887) c3(peroxisomal bifunctional enzyme isoform 2) c4( ) c5(64887, 64888, 64889, 64890, 64891) c6( ) c7(blf, af, bE, ble, X, hl, Zn, oh, bK, ci, C, oi, qO, IB, dF, B); #c1(EHHADH) c2(NP_001957) c3(peroxisomal bifunctional enzyme isoform 1) c4(122604, 122605, 122606) c5(122607, 122608, 122609, 122610, 122611, 122612, 122613, 122614, 122615, 122616, 122617, 122618, 122619) c6( ) c7(blf, af, bE, ble, X, hl, Zn, oh, bK, ci, C, oi, qO, IB, dF, B); #c1(EHMT1) c2(NP_001138999) c3(histone-lysine N-methyltransferase EHMT1 isoform 2) c4(58590, 58591) c5(58592, 58593, 58594, 58595, 58596) c6( ) c7(bL, dA, e, aj, dG, j, v, nA, J, mj, blh, aT, jy, blg, he, hm, jf, A, r, jb, W, sv, ra); #c1(EHMT1) c2(NP_079033) c3(histone-lysine N-methyltransferase EHMT1 isoform 1) c4(216693) c5(216694, 216695, 216696, 216697, 216698) c6( ) c7(bL, dA, e, aj, dG, j, v, nA, J, mj, blh, aT, jy, blg, he, hm, jf, A, r, jb, W, sv, ra); #c1(EHMT1) c2(XP_005266167) c3(histone-lysine N-methyltransferase EHMT1 isoform X7) c4( ) c5(279945, 279946, 279947, 279948, 279949) c6( ) c7(bL, dA, e, aj, dG, j, v, nA, J, mj, blh, aT, jy, blg, he, hm, jf, A, r, jb, W, sv, ra); #c1(EHMT1) c2(XP_006717351) c3(histone-lysine N-methyltransferase EHMT1 isoform X5) c4(290963) c5(290964, 290965) c6( ) c7(bL, dA, e, aj, dG, j, v, nA, J, mj, blh, aT, jy, blg, he, hm, jf, A, r, jb, W, sv, ra); #c1(EHMT1) c2(XP_011517329) c3(histone-lysine N-methyltransferase EHMT1 isoform X9) c4( ) c5(310997, 310998, 310999, 311000, 311001, 311002) c6( ) c7(bL, dA, e, aj, dG, j, v, nA, J, mj, blh, aT, jy, blg, he, hm, jf, A, r, jb, W, sv, ra); #c1(EHMT1) c2(XP_011517330) c3(histone-lysine N-methyltransferase EHMT1 isoform X10) c4( ) c5(311003) c6( ) c7(bL, dA, e, aj, dG, j, v, nA, J, mj, blh, aT, jy, blg, he, hm, jf, A, r, jb, W, sv, ra); #c1(EHMT2) c2(NP_001276342) c3(histone-lysine N-methyltransferase EHMT2 isoform c) c4(108142, 108143) c5(108144, 108145, 108146, 108147, 108148, 108149, 108150, 108151, 108152, 108153, 108154, 108155, 108156, 108157, 108158, 108159, 108160, 108161, 108162, 108163, 108164, 108165, 108166, 108167, 108168, 108169, 108170, 108171, 108172, 108173, 108174, 108175, 108176, 108177, 108178, 108179, 108180, 108181, 108182, 108183, 108184, 108185, 108186, 108187, 108188, 108189, 108190, 108191, 108192, 108193, 108194, 108195, 108196, 108197, 108198, 108199, 108200, 108201, 108202) c6( ) c7(av, T, W, eZ, aT, r, cu, sv, ci, jE, jj, hF, V, kS, q, jb); #c1(EHMT2) c2(NP_006700) c3(histone-lysine N-methyltransferase EHMT2 isoform a) c4(167242, 167243, 167244) c5( ) c6( ) c7(av, T, W, eZ, aT, r, cu, sv, ci, jE, jj, hF, V, kS, q, jb); #c1(EHMT2) c2(NP_079532) c3(histone-lysine N-methyltransferase EHMT2 isoform b) c4(218618, 218619, 218620) c5(218621, 218622, 218623, 218624, 218625, 218626, 218627, 218628, 218629, 218630, 218631, 218632, 218633, 218634, 218635, 218636, 218637, 218638, 218639, 218640, 218641, 218642, 218643, 218644) c6( ) c7(av, T, W, eZ, aT, r, cu, sv, ci, jE, jj, hF, V, kS, q, jb); #c1(EHMT2) c2(XP_005248881) c3(histone-lysine N-methyltransferase EHMT2 isoform X2) c4(268711, 268712) c5(268713, 268714, 268715, 268716, 268717, 268718, 268719, 268720, 268721, 268722, 268723, 268724, 268725, 268726, 268727, 268728, 268729, 268730, 268731, 268732, 268733, 268734, 268735, 268736, 268737, 268738, 268739, 268740, 268741, 268742, 268743, 268744, 268745, 268746, 268747, 268748, 268749, 268750, 268751, 268752, 268753) c6( ) c7(av, T, W, eZ, aT, r, cu, sv, ci, jE, jj, hF, V, kS, q, jb); #c1(EHMT2) c2(XP_005274890) c3(histone-lysine N-methyltransferase EHMT2 isoform X2) c4(285511) c5(285512, 285513, 285514, 285515, 285516, 285517, 285518, 285519, 285520, 285521, 285522, 285523, 285524, 285525, 285526, 285527, 285528, 285529) c6( ) c7(av, T, W, eZ, aT, r, cu, sv, ci, jE, jj, hF, V, kS, q, jb); #c1(EHMT2) c2(XP_006715039) c3(histone-lysine N-methyltransferase EHMT2 isoform X4) c4(288535, 288536) c5(288537, 288538, 288539, 288540, 288541, 288542, 288543, 288544, 288545, 288546, 288547, 288548, 288549, 288550, 288551, 288552, 288553, 288554, 288555, 288556, 288557, 288558, 288559, 288560, 288561) c6( ) c7(av, T, W, eZ, aT, r, cu, sv, ci, jE, jj, hF, V, kS, q, jb); #c1(E124) c2(XP_011541371) c3(etoposide-induced protein 2.4 homolog isoform X1) c4(339983) c5(339984, 339985, 339986, 339987, 339988, 339989, 339990) c6( ) c7(T, bP, aW, yk, aT, n, ci, qN, ad); #c1(E124) c2(XP_011541372) c3(etoposide-induced protein 2.4 homolog isoform X2) c4(339991) c5(339992, 339993, 339994, 339995, 339996) c6( ) c7(T, bP, aW, yk, aT, n, ci, qN, ad); #c1(EID1) c2(NP_055150) c3(EP300-interacting inhibitor of differentiation 1) c4(179463) c5(179464, 179465, 179466, 179467, 179468, 179469) c6( ) c7(ib, nO, af, FT, hS); #c1(EIF1) c2(NP_005792) c3(eukaryotic translation initiation factor 1) c4(159369) c5(159370, 159371, 159372, 159373, 159374, 159375) c6( ) c7(dP, bM, hX, al, eZ, ci, fD, be, B, vi); #c1(EIF1AD) c2(NP_001229411) c3(probable RNA-binding protein EIF1AD) c4(84363, 84364, 84365, 84366, 84367) c5(84368, 84369, 84370, 84371, 84372, 84373, 84374, 84375, 84376, 84377, 84378, 84379, 84380, 84381, 84382, 84383, 84384, 84385, 84386, 84387, 84388, 84389, 84390, 84391, 84392, 84393, 84394, 84395, 84396, 84397, 84398, 84399, 84400, 84401, 84402, 84403, 84404, 84405, 84406, 84407, 84408, 84409) c6( ) c7(Y); #c1(EIF1AX) c2(NP_001403) c3(eukaryotic translation initiation factor 1A, X-chromosomal) c4(117608, 117609) c5(117610, 117611, 117612, 117613, 117614, 117615, 117616, 117617, 117618, 117619, 117620, 117621) c6( ) c7(Y, iP); #c1(EIF1AY) c2(NP_001265541) c3(eukaryotic translation initiation factor 1A, Y-chromosomal isoform 2) c4(98779) c5(98780, 98781, 98782, 98783, 98784, 98785) c6( ) c7(vH, bN); #c1(EIF1AY) c2(NP_004672) c3(eukaryotic translation initiation factor 1A, Y-chromosomal isoform 1) c4(148723) c5(148724, 148725, 148726, 148727, 148728, 148729) c6( ) c7(vH, bN); #c1(EIF2A) c2(NP_114414) c3(eukaryotic translation initiation factor 2A) c4(222668) c5(222669, 222670, 222671, 222672, 222673, 222674) c6( ) c7(jx, fd, fe, IG, j, K, cM); #c1(EIF2A) c2(XP_011511525) c3(eukaryotic translation initiation factor 2A isoform X1) c4(302174) c5(302175, 302176, 302177, 302178, 302179, 302180) c6( ) c7(jx, fd, fe, IG, j, K, cM); #c1(EIF2AK1) c2(NP_055228) c3(eukaryotic translation initiation factor 2-alpha kinase 1 isoform a) c4(179963, 179964) c5(179965, 179966, 179967, 179968, 179969, 179970, 179971, 179972, 179973, 179974, 179975, 179976) c6( ) c7(aCr, T, aCq, ac, Jr, aW, NT, cr, aT, IQ, K, hu, wD); #c1(EIF2AK2) c2(NP_001129124) c3(interferon-induced, double-stranded RNA-activated protein kinase isoform b) c4(50845, 50846, 50847) c5(50848, 50849, 50850, 50851, 50852, 50853, 50854, 50855, 50856, 50857, 50858, 50859, 50860, 50861, 50862, 50863, 50864, 50865) c6( ) c7(Dw, T, os, eW, fR, e, ht, al, jx, aw, jh, oZ, j, ci, wy, hF, V, mC, aR, ad, hX, qC, av, x, aaF, F, hd, aE, Db, rJ, ds, aT, cU, h, hn, K, hu, af, eu, afu, d, aW, Y, ff, eH, eZ, pR, lo, aq, CQ, en, eF, t, cm, bz, dS, ck, rR, ac, c, eM, U, cj, rK, k, fL, hh, cB, B, EB, L); #c1(EIF2AK2) c2(NP_002750) c3(interferon-induced, double-stranded RNA-activated protein kinase isoform a) c4(131690, 131691) c5(131692, 131693, 131694, 131695, 131696, 131697, 131698, 131699, 131700, 131701, 131702, 131703, 131704, 131705, 131706, 131707) c6( ) c7(Dw, T, os, eW, fR, e, ht, al, jx, aw, jh, oZ, j, ci, wy, hF, V, mC, aR, ad, hX, qC, av, x, aaF, F, hd, aE, Db, rJ, ds, aT, cU, h, hn, K, hu, af, eu, afu, d, aW, Y, ff, eH, eZ, pR, lo, aq, CQ, en, eF, t, cm, bz, dS, ck, rR, ac, c, eM, U, cj, rK, k, fL, hh, cB, B, EB, L); #c1(EIF2AK3) c2(NP_004827) c3(eukaryotic translation initiation factor 2-alpha kinase 3 precursor) c4(150104, 150105) c5(150106, 150107, 150108, 150109, 150110, 150111, 150112, 150113, 150114, 150115, 150116, 150117) c6( ) c7(T, fR, jx aj, j, eW, eA, J, F, mh, aT, cy, K, li, A, aW, fc, bo, TF, act, cP, cB); #c1(EIF2AK4) c2(NP_001013725) c3(eukaryotic translation initiation factor 2-alpha kinase 4) c4(25716, 25717, 25718) c5(25719, 25720, 25721, 25722, 25723, 25724, 25725, 25726, 25727, 25728, 25729, 25730, 25731, 25732, 25733, 25734, 25735, 25736) c6( ) c7(lD, ly, blj, beH, beJ, T, bli, oV, Zs, oj, afB, lo, K, cb, IC, rL, lx, afu); #c1(EIF2AK4) c2(XP_011519902) c3(eukaryotic translation initiation factor 2-alpha kinase 4 isoform X3) c4(314689) c5(314690, 314691, 314692, 314693, 314694, 314695, 314696) c6( ) c7(lD, ly, blj, beH, beJ, T, bli, oV, Zs, oj, afB, lo, K, cb, IC, rL, lx, afu); #c1(EIF2B1) c2(NP_001405) c3(translation initiation factor eIF-2B subunit alpha) c4(117622) c5(117623, 117624, 117625, 117626, 117627, 117628) c6( ) c7(aR, hb, il, U, bK, K, blk, cb, zZ, bll, dr); #c1(EIF2B2) c2(NP_055054) c3(translation initiation factor eIF-2B subunit beta) c4(178623) c5(178624, 178625, 178626, 178627, 178628, 178629) c6( ) c7(aR, hb, il, U, bK, K, blk, cb, zZ, bll, CW, dr); #c1(EIF2B3) c2(XP_011540698) c3(translation initiation factor eIF-2B subunit gamma isoform X1) c4(339269) c5( ) c6( ) c7(bll, blk); #c1(EIF2B4) c2(NP_001029288) c3(translation initiation factor eIF-2B subunit delta isoform 2) c4(30781) c5(30782, 30783, 30784, 30785, 30786, 30787) c6( ) c7(aR, kl, hb, il, ag, U, v, bK, K, blk, cb, zZ, bll, iu, dr); #c1(EIF2B4) c2(NP_056451) c3(translation initiation factor eIF-2B subunit delta isoform 3) c4(187602, 187603) c5(187604, 187605, 187606, 187607, 187608, 187609, 187610, 187611, 187612, 187613, 187614, 187615) c6( ) c7(aR, kl, hb, il, ag, U, v, bK, K, blk, cb, zZ, bll, iu, dr); #c1(EIF2B4) c2(NP_751945) c3(translation initiation factor eIF-2B subunit delta isoform 1) c4(248566) c5(248567, 248568, 248569, 248570, 248571, 248572) c6( ) c7(aR, kl, hb, il, ag, U, v, bK, K, blk, cb, zZ, blb, iu, dr); #c1(EIF2B5) c2(NP_003898) c3(translation initiation factor eIF-2B subunit epsilon) c4(141947) c5(141948, 141949, 141950, 141951, 141952, 141953) c6( ) c7(blm, T, abV, ha, K, blk, V, bll, iu); #c1(EIF2B5) c2(XP_011511567) c3(translation initiation factor eIF-2B subunit epsilon isoform X1) c4(302302) c5(302303, 302304, 302305, 302306, 302307, 302308) c6( ) c7(blm, T, abV, ha, K, blk, V, bll, iu); #c1(EIF2S1) c2(NP_004085) c3(eukaryotic translation initiation factor 2 subunit 1) c4(143428, 143429, 143430) c5(143431, 143432, 143433, 143434, 143435, 143436, 143437, 143438, 143439, 143440, 143441, 143442, 143443, 143444, 143445, 143446, 143447, 143448, 143449, 143450, 143451, 143452) c6( ) c7(T, al, jx, eX, aj, jE, nA, ci, il, eW, J, hX, Db, HC, aT, aAn, cy, h, eV, ey, K, af, li, s, aW, ff, eH, fc, fe, aq, lo, en, pm, eF, QK, iR, bz, XT, gk, c, nB, bE, au, U, TF, cB, blj); #c1(EIF2S2) c2(NP_003899) c3(eukaryotic translation initiation factor 2 subunit 2) c4(141954) c5(141955, 141956, 141957, 141958, 141959, 141960) c6( ) c7(al, jx, aj, nA, blk, aR, J, hb, il, aT, h, cy, bK, K, cb, aW, ff, aq, lo, en, iR, QK, zZ, dr, gk, c, au, U, TF, bll, blj); #c1(EIF2S3) c2(NP_001406) c3(eukaryotic translation initiation factor 2 subunit 3) c4(117629, 117630, 117631) c5(117632, 117633, 117634, 117635, 117636, 117637, 117638, 117639, 117640, 117641, 117642, 117643, 117644, 117645, 117646, 117647, 117648, 117649) c6( ) c7(al, jx, aj, nA, aR, J, aT, h, cy, K, aW, ff, aq, lo, en, iR, QK, gk, c, au, U, TF, y, blj); #c1(EIF3A) c2(NP_003741) c3(eukaryotic translation initiation factor 3 subunit A) c4(140553, 140554) c5(140555, 140556, 140557, 140558, 140559, 140560, 140561, 140562, 140563, 140564, 140565, 140566, 140567, 140568) c6( ) c7(T, jx, ci, eA, ad, x, aT, bl, Wq, sj, li, d, iU, aW, ff, eH, aF, as, en, eF, t, g, bz, ck, eM, dB, m, k, bt, iu); #c1(EIF3B) c2(NP_001032360) c3(eukaryotic translation initiation factor 3 subunit 8) c4(31248, 31249, 31250) c5(31251, 31252, 31253, 31254, 31255, 31256, 31257, 31258, 31259, 31260, 31261, 31262, 31263, 31264, 31265, 31266, 31267, 31268, 31269, 31270, 31271, 31272) c6( ) c7(ov, T, eM, eL, HK, h, dL, ci, cm, ae, B, ad); #c1(EIF3C) c2(NP_001254503) c3(eukaryotic translation initiation factor 3 subunit C isoform a) c4(94554, 94555) c5(94556, 94557, 94558, 94559, 94560, 94561, 94562, 94563, 94564, 94565, 94566, 94567, 94568, 94569, 94570, 94571, 94572, 94573, 94574, 94575) c6( ) c7(wu, Ew, wm); #c1(EIF3C) c2(NP_001273407) c3(eukaryotic translation initiation factor 3 subunit C isoform b) c4(104832, 104833) c5(104834, 104835, 104836, 104837, 104838, 104839, 104840, 104841, 104842, 104843, 104844, 104845) c6( ) c7(wu, Ew, wm); #c1(EIF3E) c2(NP_001559) c3(eukaryotic translation initiation factor 3 subunit E) c4(118966) c5(118967, 118968, 118969, 118970, 118971, 118972) c6( ) c7(av, T, eM, aW, aT, ci, t, X, eu); #c1(EIF3F) c2(NP_003745) c3(eukaryotic translation initiation factor 3 subunit F) c4(140569, 140570, 140571, 140572) c5(140573, 140574, 140575, 140576, 140577, 140578, 140579, 140580, 140581, 140582, 140583, 140584, 140585, 140586, 140587, 140588, 140589, 140590, 140591, 140592, 140593, 140594, 140595, 140596, 140597, 140598, 140599, 140600, 140601) c6( ) c7(T, aC, aE, Y, Z, eJ); #c1(EIF3H) c2(NP_003747) c3(eukaryotic translation initiation factor 3 subunit H) c4(140602, 140603) c5(140604, 140605, 140606, 140607, 140608, 140609, 140610, 140611, 140612, 140613, 140614, 140615) c6( ) c7(T, RT, eM, aW, aT, r, DO, ci, q, ae, B, ad, hX); #c1(EIF3J) c2(NP_001271265) c3(eukaryotic translation initiation factor 3 subunit J isoform 3) c4( ) c5(103779, 103780, 103781, 103782, 103783, 103784) c6( ) c7(T, bz, eM); #c1(EIF3J) c2(NP_003749) c3(eukaryotic translation initiation factor 3 subunit J isoform 1) c4(140616) c5( ) c6( ) c7(T, bz, eM); #c1(EIF3K) c2(NP_037366) c3(eukaryotic translation initiation factor 3 subunit K isoform 1) c4(175044, 175045, 175046) c5(175047, 175048, 175049, 175050, 175051, 175052, 175053, 175054, 175055, 175056, 175057, 175058, 175059) c6( ) c7(bL, bM, T, dD, Ap, lD, ea, cV, jh, aNG, j, fu, blp, eq, vY, UX, q, cd, bv, agd, no, cc, Ig, WY, oj, Ak, kf, h, bl, K, bU, aDU, hm, ly, hM, acV, Dg, asp, IW, xz, xs, Bw, Ad, lb, uY, aaO, kC, dr, lx, HT, ck, dR, op, IJ, blo, xA, c, QG, vA, bln, km, gZ, aDx, oh, mf, aS, Ew, rx, acJ, Xu, sT, B, atO); #c1(EIF3M) c2(NP_006351) c3(eukaryotic translation initiation factor 3 subunit M) c4(164263) c5(164264, 164265, 164266, 164267, 164268, 164269) c6( ) c7(bB, bE, T, j); #c1(EIF4A1) c2(NP_001191439) c3(eukaryotic initiation factor 4A-1 isoform 2) c4(81519) c5(81520, 81521, 81522, 81523, 81524, 81525, 81526, 81527, 81528, 81529, 81530, 81531, 81532, 81533, 81534, 81535, 81536, 81537) c6( ) c7(Ye, ck, T, fM, aW, ds, jx, jh, aT, h, K); #c1(EIF4A1) c2(NP_001407) c3(eukaryotic initiation factor 4A-I isoform 1) c4(117650, 117651, 117652) c5(117653, 117654, 117655, 117656, 117657, 117658) c6( ) c7(Ye, ck, T, fM, aW, ds, jx, jh, aT, h, K); #c1(EIF4A2) c2(NP_001958) c3(eukaryotic initiation factor 4A-II) c4(122620, 122621, 122622, 122623, 122624) c5(122625, 122626, 122627, 122628, 122629, 122630, 122631, 122632, 122633, 122634, 122635, 122636, 122637, 122638, 122639, 122640, 122641, 122642, 122643, 122644, 122645, 122646, 122647, 122648, 122649, 122650, 122651, 122652, 122653, 122654) c6( ) c7(bL, ck, T, fM, ib, eM, pf, aW, ds, jx, jh, aT, K, bz, eW); #c1(EIF4A3) c2(NP_055555) c3(eukaryotic initiation factor 4A-III) c4(181915) c5(181916, 181917, 181918, 181919, 181920, 181921) c6( ) c7(aC, arB, Dr, aA, blq, aF, qN); #c1(EIF4B) c2(NP_001408) c3(eukaryotic translation initiation factor 4B isoform 2) c4(117659, 117660) c5(117661, 117662, 117663, 117664, 117665, 117666, 117667, 117668, 117669, 117670, 117671, 117672) c6( ) c7(en, ae, ff, bO); #c1(EIF4E) c2(NP_001124150) c3(eukaryotic translation initiation factor 4E isoform 3) c4(48299) c5(48300, 48301, 48302, 48303, 48304, 48305) c6( ) c7(T, fR, pf, if, fd, bB, ci, aE, il, hu, iE, aW, Ku, g, bw, eM, nB, AM, m, ht, NT, n, oY, nA, qN, aCi, eW, jz, eV, By, Dz, ask, pi, afu, avP, aq, kp, cM, hL, it, B, L, jx, eX, aA, blr, hy, Kh, C, AO, q, eA, aT, ae, s, Y, ev, r, lo, en, cl, t, iK, bN, ck, Qi, iM, kP, nM, kB, au, CZ, bt, id, jh, Gn, xg, hF, ad, av, ib, Db, vJ, ds, d, je, ff, cr, eZ, aF, iR, bz, all, RV, bE, X, kS, iu); #c1(EIF4E) c2(NP_001124151) c3(eukaryotic translation initiation factor 4E isoform 2) c4(48306) c5(48307, 48308, 48309, 48310, 48311, 48312) c6( ) c7(T, fR, pf, if, fd, bB, ci, aE, il, hu, iE, aW, Ku, g, bw, eM, nB, AM, m, ht, NT, n, oY, nA, qN, aCi, eW, jz, eV, By, Dz, ask, pi, afu, avP, aq, kp, cM, hL, it, B, L, jx, eX, aA, blr, hy, Kh, C, AO, q, eA, aT, ae, s, Y, ev, r, lo, en, cl, t, iK, bN, ck, Qi, iM, kP, nM, kB, au, CZ, bt, id, jh, Gn, xg, hF, ad, av, ib, Db, vJ, ds, d, je, ff, cr, eZ, aF, iR, bz, all, RV, bE, X, kS, iu); #c1(EIF4E) c2(NP_001959) c3(eukaryotic translation initiation factor 4E isoform 1) c4(122655) c5(122656, 122657, 122658, 122659, 122660, 122661) c6( ) c7(T, fR, pf, if, fd, bB, ci, aE, il, hu, iE, aW, Ku, g, bw, eM, nB, AM, m, ht, NT, n, oY, nA, qN, aCi, eW, jz, eV, By, Dz, ask, pi, afu, avP, aq, kp, cM, hL, it, B, L, jx, eX, aA, blr, hy, Kh, C, AO, q, eA, aT, ae, s, Y, ev, r, lo, en, cl, t, iK, bN, ck, Qi, iM, kP, nM, kB, au, CZ, bt, id, jh, Gn, xg, hF, ad, av, ib, Db, vJ, ds, d, je, ff, cr, eZ, aF, iR, bz, all, RV, bE, X, kS, iu); #c1(EIF4E2) c2(NP_001263265) c3(eukaryotic translation initiation factor 4E type 2 isoform C) c4(97110) c5(97111, 97112, 97113, 97114, 97115, 97116) c6( ) c7(T, eM); #c1(EIF4E2) c2(NP_001263266) c3(eukaryotic translation initiation factor 4E type 2 isoform D) c4(97117) c5(97118, 97119, 97120, 97121, 97122, 97123) c6( ) c7(T, eM); #c1(EIF4E2) c2(NP_004837) c3(eukaryotic translation initiation factor 4E type 2 isoform A) c4(150181) c5(150182, 150183, 150184, 150185, 150186, 150187) c6( ) c7(T, eM); #c1(EIF4E3) c2(NP_001128121) c3(eukaryotic translation initiation factor 4E type 3 isoform b) c4( ) c5(49557, 49558, 49559, 49560, 49561, 49562, 49563, 49564, 49565, 49566, 49567, 49568, 49569, 49570, 49571, 49572, 49573, 49574, 49575, 49576, 49577, 49578, 49579, 49580, 49581, 49582, 49583, 49584, 49585) c6( ) c7(aW, q, r, aT); #c1(EIF4E3) c2(NP_001128123) c3(eukaryotic translation initiation factor 4E type 3 isoform a) c4(49586, 49587, 49588, 49589, 49590) c5(49591, 49592, 49593, 49594, 49595, 49596, 49597, 49598, 49599, 49600, 49601, 49602, 49603) c6( ) c7(aW, q, r, aT); #c1(EIF4EBP1) c2(NP_004086) c3(eukaryotic translation initiation factor 4E-binding protein 1) c4(143453) c5(143454, 143455, 143456, 143457, 143458, 143459) c6( ) c7(T, kh, fM, hl, iH, eR, jx, jh, fd, bB, GC, aj, dG, v, ci, C, so, aY, q, ad, J, eA, dP, iu, eW, jz, aE, aT, iv, jy, h, bK, bl, jj, ae, af, cp, li, Nr, d, s, iU, aW, Y, oV, ev, eZ, r, po, aF, cl, bz, hq, Nq, es, eM, bE, bt, it, B); #c1(EIF4EBP2) c2(NP_004087) c3(eukaryotic translation initiation factor 4E-binding protein 2) c4(143460) c5(143461, 143462, 143463, 143464, 143465, 143466) c6( ) c7(T, eZ, r, jy, aj, v, t, q, J, bN); #c1(EIF4EBP3) c2(NP_003723) c3(eukaryotic translation initiation factor 4E-binding protein 3) c4(140451) c5(140452, 140453, 140454, 140455, 140456, 140457) c6( ) c7(YE, q, r); #c1(EIF4ENIF1) c2(NP_001157974) c3(eukaryotic translation initiation factor 4E transporter isoform b) c4(62973, 62974) c5(62975, 62976, 62977, 62978, 62979, 62980) c6( ) c7(vJ, il, EQ); #c1(EIF4ENIF1) c2(XP_006724344) c3(eukaryotic translation initiation factor 4E transporter isoform X2) c4(295945, 295946) c5( ) c6( ) c7(vJ, il, EQ); #c1(EIF4ENIF1) c2(XP_011528582) c3(eukaryotic translation initiation factor 4E transporter isoform X1) c4(323759, 323760, 323761) c5(323762, 323763, 323764, 323765, 323766, 323767, 323768, 323769, 323770, 323771, 323772, 323773, 323774, 323775, 323776, 323777, 323778, 323779, 323780, 323781, 323782, 323783) c6( ) c7(vJ, il, EQ); #c1(EIF4ENIF1) c2(XP_011528584) c3(eukaryotic translation initiation factor 4E transporter isoform X3) c4( ) c5(323784, 323785, 323786, 323787, 323788, 323789, 323790, 323791, 323792, 323793, 323794, 323795, 323796, 323797, 323798, 323799, 323800, 323801, 323802, 323803, 323804, 323805) c6( ) c7(vJ, il, EQ); #c1(EIF4G1) c2(NP_001181876) c3(eukaryotic translation initiation factor 4 gamma 1 isoform 6) c4(74281) c5(74282, 74283, 74284, 74285, 74286, 74287, 74288, 74289, 74290, 74291, 74292, 74293, 74294, 74295, 74296, 74297, 74298, 74299, 74300, 74301, 74302, 74303, 74304, 74305, 74306, 74307) c6( ) c7(bls, T, BD, fR, pf, jx, jh, aYc, ci, eW, blt, ib, ds, aT, h, K, an, afu, ak, MD, aW, ff, eZ, en, Qu, bdP); #c1(EIF4G1) c2(NP_001278086) c3(eukaryotic translation initiation factor 4 gamma 1 isoform 7) c4(109448, 109449, 109450, 109451) c5(109452, 109453, 109454, 109455, 109456, 109457, 109458, 109459, 109460, 109461, 109462, 109463, 109464, 109465, 109466, 109467, 109468, 109469, 109470, 109471, 109472, 109473, 109474, 109475, 109476, 109477, 109478, 109479, 109480, 109481) c6( ) c7(bls, T, BD, fR, pf, jx, jh, aYc, ci, eW, blt, ib, ds, aT, h, K, an, afu, ak, MD, aW, ff, eZ, en, Qu, bdP); #c1(EIF4G1) c2(NP_004944) c3(eukaryotic translation initiation factor 4 gamma 1 isoform 4) c4(151364, 151365, 151366) c5(151367, 151368, 151369, 151370, 151371, 151372, 151373, 151374, 151375, 151376, 151377, 151378, 151379, 151380, 151381) c6( ) c7(bls, T, BD, fR, pf, jx, jh, aYc, ci, eW, blt, ib, ds, aT, h, K, an, afu, ak, MD, aW, ff, eZ, en, Qu, bdP); #c1(EIF4G1) c2(NP_886553) c3(eukaryotic translation initiation factor 4 gamma 1 isoform 1) c4(257226, 257227, 257228, 257229, 257230) c5(257231, 257232, 257233, 257234, 257235, 257236, 257237, 257238, 257239, 257240, 257241, 257242, 257243, 257244, 257245, 257246, 257247, 257248, 257249, 257250, 257251, 257252, 257253, 257254, 257255) c6( ) c7(bls, T, BD, fR, pf, jx, jh, aYc, ci, eW, blt, ib, ds, aT, h, K, an, afu, ak, MD, aW, ff, eZ, en, Qu, bdP); #c1(EIF4G1) c2(NP_937884) c3(eukaryotic translation initiation factor 4 gamma 1 isoform 5) c4(259423, 259424) c5(259425, 259426, 259427, 259428, 259429, 259430, 259431, 259432, 259433, 259434, 259435, 259436, 259437, 259438) c6( ) c7(bls, T, BD, fR, pf, jx, jh, aYc, ci, eW, blt, ib, ds, aT, h, K, an, afu, ak, MD, aW, ff, eZ, en, Qu, bdP); #c1(EIF4G1) c2(NP_937885) c3(eukaryotic translation initiation factor 4 gamma 1 isoform 3) c4(259439) c5(259440, 259441, 259442) c6( ) c7(bls, T, BD, fR, pf, jx, jh, aYc, ci, eW, blt, ib, ds, aT, h, K, an, afu, ak, MD, aW, ff, eZ, en, Qu, bdP); #c1(EIF4G2) c2(NP_001036024) c3(eukaryotic translation initiation factor 4 gamma 2 isoform 2) c4(33707, 33708, 33709, 33710) c5(33711, 33712, 33713, 33714, 33715, 33716, 33717, 33718, 33719, 33720, 33721, 33722, 33723, 33724, 33725, 33726, 33727, 33728, 33729, 33730, 33731, 33732, 33733, 33734, 33735, 33736, 33737, 33738, 33739, 33740, 33741, 33742, 33743, 33744, 33745, 33746, 33747, 33748, 33749, 33750, 33751, 33752, 33753, 33754, 33755, 33756, 33757, 33758, 33759, 33760, 33761, 33762, 33763) c6( ) c7(gx, azs, T, id, if, iW, aA, bB, ci, qN, q, ad, av, aE, amJ, oj, aT, alO, dL, K, Od, jj, ae, af, bkl, eL, avV, s, aW, Y, ff, r, aF, en, cm, iK, bz, cT, apM, bb, c, Kv, bE, U, B, blu); #c1(EIF4G2) c2(NP_001166176) c3(eukaryotic translation initiation factor 4 gamma 2 isoform 1) c4(68441, 68442, 68443, 68444, 68445, 68446, 68447) c5(68448, 68449, 68450, 68451, 68452, 68453, 68454, 68455, 68456, 68457, 68458, 68459, 68460, 68461, 68462, 68463, 68464, 68465, 68466, 68467, 68468) c6( ) c7(gx, azs, T, id, if, iW, aA, bB, ci, qN, q, ad, av, aE, amJ, oj, aT, alO, dL, K, Od, jj, ae, af, bkl, eL, avV, s, aW, Y, ff, r, aF, en, cm, iK, bz, cT, apM, bb, c, Kv, bE, U, B, blu); #c1(EIF4H) c2(NP_071496) c3(eukaryotic translation initiation factor 4H isoform 1) c4(211776) c5(211777, 211778, 211779, 211780, 211781, 211782, 211783) c6( ) c7(bL, eW, T, A, alC, bE, cz, r, bB, j, y, q); #c1(EIF4H) c2(NP_114381) c3(eukaryotic translation initiation factor 4H isoform 2) c4(222524) c5(222525, 222526, 222527, 222528, 222529, 222530) c6( ) c7(bL, eW, T, A, alC, bE, cz, r, bB, j, y, q); #c1(EIF5) c2(NP_892116) c3(eukaryotic translation initiation factor 5) c4(257701, 257702, 257703, 257704, 257705, 257706, 257707) c5(257708, 257709, 257710, 257711, 257712, 257713, 257714, 257715, 257716, 257717, 257718, 257719, 257720, 257721, 257722, 257723, 257724, 257725, 257726, 257727, 257728, 257729, 257730, 257731, 257732, 257733, 257734, 257735, 257736, 257737, 257738, 257739, 257740, 257741, 257742, 257743, 257744, 257745, 257746, 257747, 257748, 257749, 257750, 257751, 257752, 257753, 257754, 257755, 257756, 257757, 257758, 257759, 257760, 257761) c6( ) c7(av, dV, m, g, t, iu); #c1(EIF5A) c2(NP_001137232) c3(eukaryotic translation initiation factor 5A-1 isoform A) c4(55076) c5(55077, 55078, 55079, 55080, 55081, 55082, 55083, 55084, 55085, 55086) c6( ) c7(T, aC, jh, bB, n, aj, ci, zP, eh, q, J, ad, av, iu, b, jZ, dV, h, K, ae, A, zQ, d, r, g, t, bz, ck, eM, bE, m, i, B); #c1(EIF5A) c2(XP_005256566) c3(eukaryotic translation initiation factor 5A-1 isoform X1) c4(274203) c5(274204, 274205, 274206, 274207, 274208, 274209, 274210, 274211, 274212, 274213, 274214) c6( ) c7(T, aC, jh, bB, n, aj, ci, zP, eh, q, J, ad, av, iu, b, jZ, dV, h, K, ae, A, zQ, d, r, g, t, bz, ck, eM, bE, m, i, B); #c1(EIF5A) c2(XP_011522010) c3(eukaryotic translation initiation factor 5A-1 isoform X2) c4(316702) c5(316703) c6( ) c7(T, aC, jh, bB, n, aj, ci, zP, eh, q, J, ad, av, iu, b, jZ, dV, h, K, ae, A, zQ, d, r, g, t, bz, ck, eM, bE, m, i, B); #c1(EIF5A) c2(XP_011522015) c3(eukaryotic translation initiation factor 5A-1 isoform X3) c4( ) c5(316704, 316705, 316706, 316707, 316708) c6( ) c7(T, aC, jh, bB, n, aj, ci, zP, eh, q, J, ad, av, iu, b, jZ, dV, h, K, ae, A, zQ, d, r, g, t, bz, ck, eM, bE, m, i, B); #c1(EIF5A2) c2(NP_065123) c3(eukaryotic translation initiation factor 5A-2) c4(204060) c5(204061, 204062, 204063, 204064, 204065, 204066) c6( ) c7(T, gU, d, id, eM, Y, it, n, dL, ci, m, q, t, on, eL, B); #c1(EIF6) c2(NP_001254739) c3(eukaryotic translation initiation factor 6 isoform a) c4(94902, 94903) c5(94904, 94905, 94906, 94907, 94908, 94909, 94910, 94911, 94912, 94913, 94914, 94915, 94916, 94917, 94918, 94919) c6( ) c7(ck, T, s, aW, r, aT, aA, h, aF, ci, bz, q); #c1(EIF6) c2(NP_852131) c3(eukaryotic translation initiation factor 6 isoform c) c4(254901) c5(254902, 254903, 254904, 254905, 254906, 254907) c6( ) c7(ck, T, s, aW, r, aT, aA, h, aF, ci, bz, q); #c1(ELAC1) c2(NP_061166) c3(zinc phosphodiesterase ELAC protein 1) c4(199693) c5(199694, 199695, 199696, 199697, 199698, 199699) c6( ) c7(wR, ae, ad); #c1(ELAC2) c2(NP_001159434) c3(zinc phosphodiesterase ELAC protein 2 isoform 3) c4(64012, 64013) c5(64014, 64015, 64016, 64017, 64018, 64019, 64020, 64021, 64022, 64023, 64024, 64025) c6( ) c7(bM, T, Ub, aM, blv, vc, blw, ci, ae, af, ad); #c1(ELAC2) c2(NP_060597) c3(zinc phosphodiesterase ELAC protein 2 isoform 1) c4(196740, 196741, 196742) c5(196743, 196744, 196745, 196746, 196747, 196748, 196749, 196750, 196751, 196752, 196753, 196754, 196755, 196756, 196757, 196758, 196759, 196760) c6( ) c7(bM, T, Ub, aM, blv, vc, blw, ci, ae, af, ad); #c1(ELANE) c2(NP_001963) c3(neutrophil elastase preproprotein) c4(122673, 122674) c5(122675, 122676, 122677, 122678, 122679, 122680, 122681, 122682, 122683, 122684, 122685) c6( ) c7(oO, bM, T, e, al, bB, fo, ci, wa, K, blx, dF, N, aa, aW, fc, bw, eM, iT, aWZ, uJ, pw, dD, aw, n, blz, cd, br, bly, ai, md, jy, eV, HX, wC, aXT, XE, aq, mo, iO, at, uz, B, fl, fG, oe, eX, rf, fF, afK, v, j, C, aT, cy, jj, af, iU, f, ck, ac, hc, wR, fD, im, bt, zA, ao, kV, gV, am, df, Me, blA, bs, jh, bIB, eq, av, ji, aXz, atJ, hG, eZ, aEW, aFB, bz, dr, bE, IF, cP, kS, hv); #c1(ELAVL1) c2(NP_001410) c3(ELAV-like protein 1) c4(117673) c5(117674, 117675, 117676, 117677, 117678) c6( ) c7(T, dD, aoT, aA, bB, eq, ci, eA, ip, dP, ib, aT, ab, K, jf, d, s, aW, Y, ff, eZ, CQ, en, g, iK, DT, c, bE, AH, aEs, m, y, X); #c1(ELAVL1) c2(XP_011526079) c3(ELAV-like protein 1 isoform X1) c4(320386) c5(320387, 320388, 320389, 320390, 320391, 320392, 320393) c6( ) c7(T, dD, aoT, aA, bB, eq, ci, eA, ip, dP, ib, aT, ab, K, jf, d, s, aW, Y, ff, eZ, CQ, en, g, iK, DT, c, bE, AH, aEs, m, y, X); #c1(ELAVL2) c2(NP_001164668) c3(ELAV-like protein 2 isoform b) c4( ) c5(67149, 67150, 67151, 67152, 67153, 67154, 67155, 67156, 67157, 67158, 67159, 67160, 67161, 67162, 67163, 67164, 67165, 67166, 67167) c6( ) c7(bL, bM, T, bev, oe, EQ, aA, bB, Hn, j, pM, cd, ad, eA, av, ft, pN, aT, bK, he, af, aW, Y, aF, cl, cm, bz, ac, c, eM, bE, bt); #c1(ELAVL2) c2(NP_004423) c3(ELAV-like protein 2 isoform a) c4( ) c5(146249, 146250, 146251, 146252, 146253, 146254, 146255, 146256, 146257, 146258, 146259) c6( ) c7(bL, bM, T, bev, oe, EQ, aA, bB, Hn, j, pM, cd, ad, eA, av, ft, pN, aT, bK, he, af, aW, Y, aF, cl, cm, bz, ac, c, eM, bE, bt); #c1(ELAVL2) c2(XP_011516076) c3(ELAV-like protein 2 isoform X1) c4(309280) c5(309281, 309282, 309283) c6( ) c7(bL, bM, T, bev, oe, EQ, aA, bB, Hn, j, pM, cd, ad, eA, av, ft, pN, aT, bK, he, af, aW, Y, aF, cl, cm, bz, ac, c, eM, bE, bt); #c1(ELAVL2) c2(XP_011516077) c3(ELAV-like protein 2 isoform X2) c4(309284) c5(309285, 309286, 309287, 309288, 309289, 309290) c6( ) c7(bL, bM, T, bev, oe, EQ, aA, bB, Hn, j, pM, cd, ad, eA, av, ft, pN, aT, bK, he, af, aW, Y, aF, cl, cm, bz, ac, c, eM, bE, bt); #c1(ELAVL2) c2(XP_011516079) c3(ELAV-like protein 2 isoform X4) c4(309291, 309292) c5(309293, 309294) c6( ) c7(bL, bM, T, bev, oe, EQ, aA, bB, Hn, j, pM, cd, ad, eA, av, ft, pN, aT, bK, he, af, aW, Y, aF, cl, cm, bz, ac, c, eM, bE, bt); #c1(ELAVL2) c2(XP_011516083) c3(ELAV-like protein 2 isoform XG) c4(309295) c5( ) c6( ) c7(bL, bM, T, bev, oe, EQ, aA, bB, Hn, j, pM, cd, ad, eA, av, ft, pN, aT, bK, he, af, aW, Y, aF, cl, cm, bz, ac, c, eM, bE, bt); #c1(ELAVL2) c2(XP_011516085) c3(ELAV-like protein 2 isoform X7) c4( ) c5(309296) c6( ) c7(bL, bM, T, bev, oe, EQ, aA, bB, Hn, j, pM, cd, ad, eA, av, ft, pN, aT, bK, he, af, aW, Y, aF, cl, cm, bz, ac, c, eM, bE, bt); #c1(ELAVL3) c2(NP_001411) c3(ELAV-like protein 3 isoform 1) c4(117679) c5(117680, 117681, 117682, 117683, 117684, 117685) c6( ) c7(eW, kl, id, ft, akJ, aq, dL, eL, B); #c1(ELAVL3) c2(NP_115657) c3(ELAV-like protein 3 isoform 2) c4(223477) c5(223478, 223479, 223480, 223481, 223482, 223483) c6( ) c7(eW, kl, id, ft, akJ, aq, dL, eL, B); #c1(ELAVL4) c2(NP_001281277) c3(ELAV-like protein 4 isoform 6) c4(111712) c5(111713, 111714, 111715, 111716, 111717, 111718) c6( ) c7(av, bev, ft, My, cm, an, gT, bz, xt, cB); #c1(ELAVL4) c2(XP_011539193) c3(ELAV-like protein 4 isoform X5) c4(337326) c5(337327, 337328, 337329, 337330, 337331, 337332) c6( ) c7(av, bev, ft, My, cm, an, gT, bz, xt, cB); #c1(ELF1) c2(NP_001138825) c3(ETS-related transcription factor Elf-1 isoform b) c4(57904, 57905) c5(57906, 57907, 57908, 57909, 57910, 57911) c6( ) c7(bP, if, eB, eZ, h, qN, cl, bt, B, be); #c1(ELF1) c2(XP_011533252) c3(ETS-related transcription factor Elf-1 isoform X1) c4(329413) c5(329414, 329415, 329416, 329417, 329418, 329419, 329420, 329421, 329422, 329423, 329424, 329425) c6( ) c7(bP, if, eB, eZ, h, qN, cl, bt, B, bc); #c1(ELF1) c2(XP_011533253) c3(ETS-related transcription factor Elf-1 isoform X2) c4(329426) c5(329427, 329428, 329429, 329430, 329431, 329432, 329433) c6( ) c7(bP, if, eB, eZ, h, qN, cl, bt, B, bc); #c1(ELF1) c2(XP_011533254) c3(ETS-related transcription factor Elf-1 isoform X3) c4( ) c5(329434) c6( ) c7(bP, if, eB, eZ, h, qN, cl, bt, B, bc); #c1(ELF2) c2(NP_001263386) c3(ETS-related transcription factor Elf-2 isoform 3) c4(97227) c5(97228, 97229, 97230, 97231, 97232, 97233) c6( ) c7(bt, vi, kH); #c1(ELF2) c2(NP_006865) c3(ETS-related transcription factor Elf-2 isoform 2) c4(168716) c5(168717, 168718, 168719, 168720, 168721, 168722, 168723) c6( ) c7(bt, vi, kH); #c1(ELF2) c2(NP_973728) c3(ETS-related transcription factor Elf-2 isoform 1) c4(262683) c5(262684, 262685, 262686, 262687, 262688, 262689, 262690, 262691, 262692, 262693) c6( ) c7(bt, vi, kH); #c1(ELF2) c2(XP_005262860) c3(ETS-related transcription factor Elf-2 isoform X2) c4(278152) c5(278153, 278154, 278155, 278156, 278157, 278158) c6( ) c7(bt, vi, kH); #c1(ELF2) c2(XP_005262862) c3(ETS-related transcription factor Elf-2 isoform X4) c4(278159) c5( ) c6( ) c7(bt, vi, kH); #c1(ELF2) c2(XP_005262863) c3(ETS-related transcription factor Elf-2 isoform X6) c4( ) c5(278160, 278161, 278162, 278163, 278164, 278165) c6( ) c7(bt, vi, kH); #c1(ELF3) c2(NP_001107781) c3(ETS-related transcription factor Elf-3) c4(42977, 42978, 42979) c5(42980, 42981, 42982, 42983, 42984, 42985, 42986, 42987, 42988, 42989, 42990, 42991, 42992, 42993, 42994, 42995, 42996, 42997, 42998, 42999, 43000, 43001, 43002, 43003, 43004, 43005, 43006) c6( ) c7(bM, T, aJJ, aYP, wu, rQ, Lx, bS, ct, rP, iJ, ad, py, aT, K, wm, dQ, ae, aW, ff, aUG, en, g, Z, iK, bz, vU, bIC, ag, dh, hO, Lq, y, bt, YK); #c1(ELF4) c2(XP_005262446) c3(ETS-related transcription factor Elf-4 isoform X1) c4(277910, 277911) c5(277912, 277913, 277914, 277915, 277916, 277917, 277918, 277919, 277920, 277921, 277922, 277923, 277924, 277925, 277926, 277927, 277928) c6( ) c7(T, eG, d, aW, Rj, ih, aiM, aT, rC, fd, By, jh, m, anW, hh, t, bt, eA); #c1(ELF5) c2(NP_001230009) c3(ETS-related transcription factor Elf-5 isoform 3) c4(85780) c5(85781, 85782, 85783, 85784, 85785, 85786) c6( ) c7(bM, VZ, c, hb, aW, aT, ci); #c1(ELF5) c2(NP_001413) c3(ETS-related transcription factor Elf-5 isoform 2) c4( ) c5(117686, 117687, 117688, 117689, 117690) c6( ) c7(bM, VZ, c, hb, aW, aT, ci); #c1(ELF5) c2(NP_938195) c3(ETS-related transcription factor Elf-5 isoform 1) c4(259703, 259704) c5(259705, 259706, 259707, 259708, 259709, 259710, 259711, 259712) c6( ) c7(bM, VZ, c, hb, aW, aT, ci); #c1(ELK1) c2(NP_001244097) c3(ETS domain-containing protein Elk-1 isoform b) c4(91916) c5(91917, 91918, 91919, 91920, 91921, 91922) c6( ) c7(lD, dD, id, yS, ea, aA, eq, iJ, q, ad, mj, MR, nd, aqk, kf, aT, K, ae, ly, ak, eG, d, aW, eZ, r, nf, hN, vs, g, aaO, cm, Ld, lx, U, yA, bt, B); #c1(ELK1) c2(NP_005220) c3(ETS domain-containing protein Elk-1 isoform a) c4(154165, 154166) c5(154167, 154168, 154169, 154170, 154171, 154172, 154173, 154174, 154175, 154176, 154177, 154178, 154179, 154180, 154181, 154182, 154183, 154184, 154185, 154186) c6( ) c7(lD, dD, id, yS, ea, aA, eq, iJ, q, ad, mj, MR, nd, aqk, kf, aT, K, ae, ly, ak, eG, d, aW, eZ, r, nf, hN, vs, g, aaO, cm, Ld, lx, U, yA, bt, B); #c1(ELK3) c2(XP_006719338) c3(ETS domain-containing protein Elk-3 isoform X1) c4(292411, 292412, 292413) c5(292414, 292415, 292416, 292417, 292418, 292419, 292420, 292421, 292422, 292423, 292424, 292425, 292426, 292427, 292428, 292429, 292430, 292431, 292432) c6( ) c7(T, aC, pY, RX, DV, bO, cz, oR, bS, ww, ct, C, aBl, Za, q, ft, agd, afm, sO, iX, pX, aT, Ps, bK, af, qE, aWm, bID, tb, aW, Zf, abi, Pg, r, hv, Z, aiO, aFA, ok, alC, ac, cA, eM, Ew, eB, VB, uz, wR, yH, aan, lw, FI, agZ); #c1(ELK4) c2(NP_068567) c3(ETS domain-containing protein Elk-4 isoform b) c4(209418) c5(209419, 209420, 209421, 209422, 209423, 209424, 209425) c6( ) c7(AK, pi, d, aW, Zf, bez, rS, dV, aT, r, wR, CZ, eA, C, Za, ae, q, ad); #c1(ELK4) c2(XP_005245008) c3(ETS domain-containing protein Elk-4 isoform X1) c4(266206, 266207) c5(266208, 266209, 266210, 266211, 266212, 266213, 266214, 266215, 266216, 266217, 266218, 266219) c6( ) c7(AK, pi, d, aW, Zf, bez, rS, dV, aT, r, wR, CZ, eA, C, Za, ae, q, ad); #c1(ELL) c2(NP_006523) c3(RNA polymerase II elongation factor ELL) c4(165978, 165979) c5(165980, 165981, 165982, 165983, 165984, 165985, 165986, 165987, 165988, 165989, 165990, 165991) c6( ) c7(ck, T, iT, iZ, hF, bt, ae, ad); #c1(ELL) c2(XP_011526632) c3(RNA polymerase II elongation factor ELL isoform X1) c4( ) c5(320934) c6( ) c7(ck, T, iT, iZ, hF, bt, ae, ad); #c1(ELL2) c2(NP_036213) c3(RNA polymerase II elongation factor ELL2) c4(172403) c5(172404, 172405, 172406, 172407, 172408, 172409) c6( ) c7(oe); #c1(ELL2) c2(XP_011541582) c3(RNA polymerase II elongation factor ELL2 isoform X2) c4(340125) c5(340126, 340127, 340128, 340129, 340130, 340131) c6( ) c7(oe); #c1(ELM01) c2(NP_569709) c3(engulfment and cell motility protein 1 isoform 2) c4( ) c5(233731, 233732, 233733, 233734, 233735, 233736, 233737, 233738, 233739, 233740) c6( ) c7(bL, iV, A, eR, pf, hb, aw, aT, dy, k, hp, eA, bw, fq, bc); #c1(ELM01) c2(XP_005249976) c3(engulfment and cell motility protein 1 isoform X1) c4(269961, 269962, 269963, 269964) c5(269965, 269966, 269967, 269968, 269969, 269970, 269971, 269972, 269973, 269974, 269975, 269976, 269977, 269978, 269979, 269980, 269981, 269982, 269983, 269984, 269985, 269986, 269987, 269988, 269989, 269990) c6( ) c7(bL, iV, A, eR, pf, hb, aw, aT, dy, k, hp, eA, bw, fq, bc); #c1(ELM01) c2(XP_011513957) c3(engulfment and cell motility protein 1 isoform X2) c4(306384, 306385, 306386) c5(306387, 306388, 306389, 306390, 306391, 306392, 306393, 306394, 306395, 306396, 306397, 306398, 306399, 306400, 306401, 306402, 306403, 306404) c6( ) c7(bL, iV, A, eR, pf, hb, aw, aT, dy, k, hp, eA, bw, fq, bc); #c1(ELM02) c2(NP_877496) c3(engulfment and cell motility protein 2) c4(256845, 256846, 256847, 256848, 256849) c5(256850, 256851, 256852, 256853, 256854, 256855, 256856, 256857, 256858, 256859, 256860, 256861, 256862, 256863, 256864, 256865, 256866, 256867, 256868, 256869, 256870, 256871, 256872, 256873, 256874, 256875, 256876, 256877, 256878) c6( ) c7(bL); #c1(ELM02) c2(XP_005260559) c3(engulfment and cell motility protein 2 isoform X3) c4( ) c5(276609, 276610, 276611, 276612, 276613, 276614, 276615, 276616, 276617, 276618, 276619, 276620, 276621, 276622, 276623, 276624, 276625, 276626) c6( ) c7(bL); #c1(ELM0D1) c2(NP_001123509) c3(ELM0 domain-containing protein 1 isoform 2) c4(47260) c5(47261, 47262, 47263, 47264, 47265, 47266) c6( ) c7(beA, cF, ac); #c1(ELM0D1) c2(NP_061182) c3(ELM0 domain-containing protein 1 isoform 1) c4(199816) c5(199817, 199818, 199819, 199820, 199821, 199822) c6( ) c7(beA, cF, ac); #c1(ELM0D2) c2(NP_714913) c3(ELM0 domain-containing protein 2) c4(246602) c5(246603, 246604, 246605, 246606, 246607, 246608, 246609, 246610, 246611, 246612, 246613, 246614, 246615, 246616, 246617) c6( ) c7(LB); #c1(ELM0D2) c2(XP_005262942) c3(ELM0 domain-containing protein 2 isoform X2) c4(278173) c5(278174) c6( ) c7(LB); #c1(ELM0D2) c2(XP_011530120) c3(ELM0 domain-containing protein 2 isoform X3) c4(326027) c5(326028, 326029) c6( ) c7(LB); #c1(ELM0D3) c2(NP_001128494) c3(ELM0 domain-containing protein 3 isoform b) c4(50080, 50081) c5(50082, 50083, 50084, 50085, 50086, 50087, 50088, 50089, 50090, 50091, 50092, 50093, 50094, 50095, 50096, 50097, 50098, 50099) c6( ) c7(Bh, blE); #c1(ELM0D3) c2(NP_115589) c3(ELM0 domain-containing protein 3 isoform a) c4(223295, 223296, 223297) c5(223298, 223299, 223300, 223301, 223302, 223303) c6( ) c7(Bh, blE); #c1(ELM0D3) c2(XP_006712179) c3(ELM0 domain-containing protein 3 isoform X2) c4( ) c5(286494, 286495, 286496, 286497, 286498, 286499, 286500, 286501, 286502, 286503, 286504, 286505, 286506, 286507, 286508, 286509, 286510, 286511) c6( ) c7(Bh, blE); #c1(ELMSAN1) c2(NP_919254) c3(ELM2 and SANT domain-containing protein 1) c4( ) c5(258307, 258308, 258309, 258310, 258311, 258312, 258313, 258314, 258315, 258316, 258317, 258318, 258319, 258320, 258321, 258322, 258323, 258324, 258325) c6( ) c7(gv); #c1(ELMSAN1) c2(XP_005268263) c3(ELM2 and SANT domain-containing protein 1 isoform X1) c4(281649, 281650, 281651) c5(281652) c6( ) c7(gv); #c1(ELMSAN1) c2(XP_011535621) c3(ELM2 and SANT domain-containing protein 1 isoform X2) c4( ) c5(332876, 332877, 332878, 332879, 332880, 332881) c6( ) c7(gv); #c1(ELN) c2(NP_000492) c3(elastin isoform a precursor) c4(9915) c5( ) c6( ) c7(blK, T, IP, ea, e, al, Av, fo, sD, Hr, wa, x, bll, HR, K, pk, N, aa, li, bbM, aW, uC, lq, uo, uJ, vF, bIL, Vj, dD, vl, FG, RX, aw, ww, bIH, kv, nA, bd, cd, cc, azj, rC, ux, db, Um, wC, aiB, bIF, aJ, bIP, ail, dw, W, vD, bP, bIM, wk, bm, at, uz, rx, bD, alo, fl, eR, fG, cz, Ij, j, Eh, Mg, aCF, aT, bIN, bq, af, bIG, bf, oV, Y, bIJ, aYR, gm, bQ, bN, aIC, pZ, fD, afp, bt, sY, am, ha, eq, Pu, fU, hd, Ot, le, IQ, lz, mu, d, tb, cr, dr, qa, nb, Uj, Ny, bIO, aS, Hg, be, GF, IC, ei, us); #c1(ELN) c2(NP_001075221) c3(elastin isoform b precursor) c4(37267, 37268) c5( ) c6( ) c7(blK, T, IP, ea, e, al, Av, fo, sD, Hr, wa, x, bll, HR, K, pk, N, aa, li, bbM, aW, uC, Iq, uo, uJ, vF, bIL, Vj, dD, vl, FG, RX, aw, ww, bIH, kv, nA, bd, cd, cc, azj, rC, ux, db, Um, wC, aiB, bIF, aJ, bIP, ail, dw, W, vD, bP, bIM, wk, bm, at, uz, rx, bD, alo, fl, eR, fG, cz, Ij, j, Eh, Mg, aCF, aT, bIN, bq, af, bIG, bf, oV, Y, bIJ, aYR, gm, bQ, bN, aIC, pZ, fD, afp, bt, sY, am, ha, eq, Pu, fU, hd, Ot, le, IQ, lz, mu, d, tb, cr, dr, qa, nb, Uj, Ny, bIO, aS, Hg, be, GF, IC, ei, us); #c1(ELN) c2(NP_001075222) c3(elastin isoform c precursor) c4(37269) c5( ) c6( ) c7(blK, T, IP, ea, e, al, Av, fo, sD, Hr, wa, x, bll, HR, K, pk, N, aa, li, bbM, aW, uC, Iq, uo, uJ, vF, bIL, Vj, dD, vl, FG, RX, aw, ww, bIH, kv, nA, bd, cd, cc, azj, rC, ux, db, Um, wC, aiB, bIF, aJ, bIP, ail, dw, W, vD, bP, bIM, wk, bm, at, uz, rx, bD, alo, fl, eR, fG, cz, Ij, j, Eh, Mg, aCF, aT, bIN, bq, af, bIG, bf, oV, Y, bIJ, aYR, gm, bQ, bN, aIC, pZ, fD, afp, bt, sY, am, ha, eq, Pu, fU, hd, Ot, le, IQ, lz, mu, d, tb, cr, dr, qa, nb, Uj, Ny, bIO, aS, Hg, be, GF, IC, ei, us); #c1(ELN) c2(NP_001075223) c3(elastin isoform d precursor) c4(37270) c5( ) c6( ) c7(blK, T, IP, ea, e, al, Av, fo, sD, Hr, wa, x, bll, HR, K, pk, N, aa, li, bbM, aW, uC, Iq, uo, uJ, vF, bIL, Vj, dD, vl, FG, RX, aw, ww, bIH, kv, nA, bd, cd, cc, azj, rC, ux, db, Um, wC, aiB, bIF, aJ, bIP, ail, dw, W, vD, bP, bIM, wk, bm, at, uz, rx, bD, alo, fl, eR, fG, cz, Ij, j, Eh, Mg, aCF, aT, bIN, bq, af, bIG, bf, oV, Y, bIJ, aYR, gm, bQ, bN, aIC, pZ, fD, afp, bt, sY, am, ha, eq, Pu, fU, hd, Ot, le, IQ, lz, mu, d, tb, cr, dr, qa, nb, Uj, Ny, bIO, aS, Hg, be, GF, IC, ei, us); #c1(ELN) c2(NP_001075224) c3(elastin isoform e precursor) c4(37271) c5( ) c6( ) c7(blK, T, IP, ea, e, al, Av, fo, sD, Hr, wa, x, bll, HR, K, pk, N, aa, li, bbM, aW, uC, Iq, uo, uJ, vF, bIL, Vj, dD, vl, FG, RX, aw, ww, bIH, kv, nA, bd, cd, cc, azj, rC, ux, db, Um, wC, aiB, bIE, aJ, bIP, ail, dw, W, vD, bP, bIM, wk, bm, at, uz, rx, bD, alo, fl, eR, fG, cz, Ij, j, Eh, Mg, aCF, aT, bIN, bq, af, bIG, bf, oV, Y, bIJ, aYR, gm, bQ, bN, aIC, pZ, fD, afp, bt, sY, am, ha, eq, Pu, fU, hd, Ot, le, IQ, lz, mu, d, tb, cr, dr, qa, nb, Uj, Ny, bIO, aS, Hg, be, GF, IC, ei, us); #c1(ELN) c2(NP_001265841) c3(elastin isoform f precursor) c4(99341) c5( ) c6( ) c7(blK, T, IP, ea, e, al, Av, fo, sD, Hr, wa, x, bll, HR, K, pk, N, aa, li, bbM, aW, uC, Iq, uo, uJ, vF, bIL, Vj, dD, vl, FG, RX, aw, ww, bIH, kv, nA, bd, cd, cc, azj, rC, ux, db, Um, wC, aiB, bIF, aJ, bIP, ail, dw, W, vD, bP, bIM, wk, bm, at, uz, rx, bD, alo, fl, eR, fG, cz, Ij, j, Eh, Mg, aCF, aT, bIN, bq, af, bIG, bf, oV, Y, bIJ, aYR, gm, bQ, bN, aIC, pZ, fD, afp, bt, sY, am, ha, eq, Pu, fU, hd, Ot, le, IQ, lz, mu, d, tb, cr, dr, qa, nb, Uj, Ny, bIO, aS, Hg, be, GF, IC, ei, us); #c1(ELN) c2(NP_001265846) c3(elastin isoform k precursor) c4(99342) c5( ) c6( ) c7(blK, T, IP, ea, e, al, Av, fo, sD, Hr, wa, x, bll, HR, K, pk, N, aa, li, bbM, aW, uC, Iq, uo, uJ, vF, bIL, Vj, dD, vl, FG, RX, aw, ww, bIH, kv, nA, bd, cd, cc, azj, rC, ux, db, Um, wC, aiB, bIF, aJ, bIP, ail, dw, W, vD, bP, bIM, wk, bm, at, uz, rx, bD, alo, fl, eR, fG, cz, Ij, j, Eh, Mg, aCF, aT, bIN, bq, af, bIG, bf, oV, Y, bIJ, aYR, gm, bQ, bN, aIC, pZ, fD, afp, bt, sY, am, ha, eq, Pu, fU, hd, Ot, le, IQ, lz, mu, d, tb, cr, dr, qa, nb, Uj, Ny, bIO, aS, Hg, be, GF, IC, ei, us); #c1(ELN) c2(NP_001265847) c3(elastin isoform 1 precursor) c4(99343, 99344, 99345) c5(99346, 99347, 99348, 99349, 99350, 99351, 99352, 99353, 99354, 99355, 99356, 99357, 99358, 99359, 99360, 99361, 99362, 99363, 99364, 99365, 99366, 99367, 99368, 99369, 99370, 99371, 99372, 99373, 99374, 99375, 99376, 99377, 99378, 99379, 99380, 99381, 99382, 99383, 99384, 99385, 99386, 99387, 99388, 99389, 99390, 99391, 99392, 99393, 99394, 99395, 99396, 99397, 99398, 99399, 99400, 99401, 99402, 99403, 99404, 99405, 99406, 99407, 99408, 99409, 99410, 99411, 99412, 99413, 99414, 99415, 99416, 99417, 99418, 99419, 99420, 99421, 99422, 99423, 99424, 99425, 99426, 99427, 99428, 99429, 99430, 99431, 99432, 99433, 99434, 99435, 99436, 99437, 99438, 99439, 99440, 99441, 99442, 99443, 99444, 99445, 99446, 99447, 99448, 99449, 99450, 99451, 99452, 99453, 99454) c6(99455, 99456, 99457, 99458, 99459, 99460, 99461, 99462, 99463, 99464, 99465, 99466, 99467, 99468, 99469, 99470, 99471, 99472, 99473, 99474, 99475, 99476, 99477, 99478, 99479, 99480, 99481, 99482, 99483) c7(blK, T, IP, ea, e, al, Av, fo, sD, Hr, wa, x, bll, HR, K, pk, N, aa, li, bbM, aW, uC, Iq, uo, uJ, vF, bIL, Vj, dD, vl, FG, RX, aw, ww, bIH, kv, nA, bd, cd, cc, azj, rC, ux, db, Um, wC, aiB, bIF, aJ, bIP, ail, dw, W, vD, bP, bIM, wk, bm, at, uz, rx, bD, alo, fl, eR, fG, cz, Ij, j, Eh, Mg, aCF, aT, bIN, bq, af, bIG, bf, oV, Y, bIJ, aYR, gm, bQ, bN, aIC, pZ, fD, afp, bt, sY, am, ha, eq, Pu, fU, hd, Ot, le, IQ, lz, mu, d, tb, cr, dr, qa, nb, Uj, Ny, bIO, aS, Hg, be, GF, IC, ei, us); #c1(ELN) c2(NP_001265868) c3(elastin isoform m precursor) c4(99545) c5(99546, 99547, 99548, 99549, 99550, 99551, 99552, 99553) c6( ) c7(blK, T, IP, ea, e, al, Av, fo, sD, Hr, wa, x, bll, HR, K, pk, N, aa, li, bbM, aW, uC, Iq, uo, uJ, vF, bIL, Vj, dD, vl, FG, RX, aw, ww, bIH, kv, nA, bd, cd, cc, azj, rC, ux, db, Um, wC, aiB, bIF, aJ, bIP, ail, dw, W, vD, bP, bIM, wk, bm, at, uz, rx, bD, alo, fl, eR, fG, cz, Ij, j, Eh, Mg, aCF, aT, bIN, bq, af, bIG, bf, oV, Y, bIJ, aYR, gm, bQ, bN, aIC, pZ, fD, afp, bt, sY, am, ha, eq, Pu, fU, hd, Ot, le, IQ, lz, mu, d, tb, cr, dr, qa, nb, Uj, Ny, bIO, aS, Hg, be, GF, IC, ei, us); #c1(ELN) c2(XP_011514170) c3(elastin isoform X1) c4( ) c5(306789, 306790) c6(306791) c7(blK, T, IP, ea, e, al, Av, fo, sD, Hr, wa, x, bll, HR, K, pk, N, aa, li, bbM, aW, uC, Iq, uo, uJ, vF, bIL, Vj, dD, vl, FG, RX, aw, ww, bIH, kv, nA, bd, cd, cc, azj, rC, ux, db, Um, wC, aiB, bIF, aJ, bIP, ail, dw, W, vD, bP, bIM, wk, bm, at, uz, rx, bD, alo, fl, eR, fG, cz, Ij, j, Eh, Mg, aCF, aT, bIN, bq, af, bIG, bf, oV, Y, bIJ, aYR, gm, bQ, bN, aIC, pZ, fD, afp, bt, sY, am, ha, eq, Pu, fU, hd, Ot, le, IQ, lz, mu, d, tb, cr, dr, qa, nb, Uj, Ny, bIO, aS, Hg, be, GF, IC, ei, us); #c1(ELN) c2(XP_011514176) c3(elastin isoform X9) c4(306792) c5( ) c6( ) c7(blK, T, IP, ea, e, al, Av, fo, sD, Hr, wa, x, bll, HR, K, pk, N, aa, li, bbM, aW, uC, Iq, uo, uJ, vF, bIL, Vj, dD, vl, FG, RX, aw, ww, bIH, kv, nA, bd, cd, cc, azj, rC, ux, db, Um, wC, aiB, bIF, aJ, bIP, ail, dw, W, vD, bP, bIM, wk, bm, at, uz, rx, bD, alo, fl, eR, fG, cz, Ij, j, Eh, Mg, aCF, aT, bIN, bq, af, bIG, bf, oV, Y, bIJ, aYR, gm, bQ, bN, aIC, pZ, fD, afp, bt, sY, am, ha, eq, Pu, fU, hd, Ot, le, IQ, lz, mu, d, tb, cr, dr, qa, nb, Uj, Ny, bIO, aS, Hg, be, GF, IC, ei, us); #c1(ELN) c2(XP_011514177) c3(elastin isoform X10) c4(306793, 306794) c5( ) c6( ) c7(blK, T, IP, ea, e, al, Av, fo, sD, Hr, wa, x, bll, HR, K, pk, N, aa, li, bbM, aW, uC, Iq, uo, uJ, vF, bIL, Vj, dD, vl, FG, RX, aw, ww, bIH, kv, nA, bd, cd, cc, azj, rC, ux, db, Um, wC, aiB, bIF, aJ, bIP, ail, dw, W, vD, bP, bIM, wk, bm, at, uz, rx, bD, alo, fl, eR, fG, cz, Ij, j, Eh, Mg, aCF, aT, bIN, bq, af, bIG, bf, oV, Y, bIJ, aYR, gm, bQ, bN, aIC, pZ, fD, afp, bt, sY, am, ha, eq, Pu, fU, hd, Ot, le, IQ, lz, mu, d, tb, cr, dr, qa, nb, Uj, Ny, bIO, aS, Hg, be, GF, IC, ei, us); #c1(ELN) c2(XP_011514179) c3(elastin isoform X12) c4( ) c5(306795) c6( ) c7(blK, T, IP, ea, e, al, Av, fo, sD, Hr, wa, x, bll, HR, K, pk, N, aa, li, bbM, aW, uC, Iq, uo, uJ, vF, bIL, Vj, dD, vl, FG, RX, aw, ww, bIH, kv, nA, bd, cd, cc, azj, rC, ux, db, Um, wC, aiB, bIF, aJ, bIP, ail, dw, W, vD, bP, bIM, wk, bm, at, uz, rx, bD, alo, fl, eR, fG, cz, Ij, j, Eh, Mg, aCF, aT, bIN, bq, af, bIG, bf, oV, Y, bIJ, aYR, gm, bQ, bN, aIC, pZ, fD, afp, bt, sY, am, ha, eq, Pu, fU, hd, Ot, le, IQ, lz, mu, d, tb, cr, dr, qa, nb, Uj, Ny, bIO, aS, Hg, be, GF, IC, ei, us); #c1(ELOF1) c2(NP_115753) c3(transcription elongation factor 1 homolog) c4(223831) c5(223832, 223833, 223834, 223835, 223836, 223837) c6( ) c7(bP, if, eB, bt, eZ, h, qN, cl, V); #c1(ELOVL2) c2(NP_060240) c3(elongation of very long chain fatty acids protein 2) c4( ) c5(194925, 194926, 194927, 194928, 194929) c6( ) c7(gU); #c1(ELOVL2) c2(XP_011513018) c3(elongation of very long chain fatty acids protein 2 isoform X1) c4( ) c5(3D4627) c6( ) c7(gU); #c1(ELOVL2) c2(XP_011513019) c3(elongation of very long chain fatty acids protein 2 isoform X2) c4(304628) c5( ) c6( ) c7(gU); #c1(ELOVL4) c2(NP_073563) c3(elongation of very long chain fatty acids protein 4) c4(212860) c5(212861, 212862, 212863, 212864, 212865, 212866) c6( ) c7(li, T, cc, no, IR, nb, kB, W, nX, bIS, Sr, Ir, bIR, nw, bIQ, nC, Um, de); #c1(ELOVL5) c2(NP_001229757) c3(elongation of very long chain fatty acids protein 5 isoform 2) c4(85153) c5(85154, 85155, 85156, 85157, 85158, 85159) c6( ) c7(HQ, dH, kB, rf, dG, v, dw); #c1(ELOVL5) c2(NP_001229760) c3(elongation of very long chain fatty acids protein 5 isoform 4) c4(85170) c5(85171, 85172, 85173, 85174, 85175, 85176) c6( ) c7(HQ, dH, kB, rf, dG, v, dw); #c1(ELOVL5) c2(NP_001288785) c3(elongation of very long chain fatty acids protein 5 isoform 1) c4(114026, 114027) c5(114028, 114029, 114030, 114031, 114032, 114033, 114034, 114035, 114036, 114037, 114038, 114039, 114040, 114041, 114042, 114043) c6( ) c7(HQ, dH, kB, rf, dG, v, dw); #c1(ELOVL6) c2(XP_011530536) c3(elongation of very long chain fatty acids protein 6 isoform X1) c4(326450, 326451, 326452) c5(326453, 326454, 326455, 326456, 326457, 326458, 326459, 326460, 326461, 326462, 326463, 326464, 326465, 326466, 326467, 326468, 326469, 326470, 326471, 326472, 326473, 326474) c6( ) c7(LB, Kc, os, dD, wD, Jr, ea, fG, fJ, eE, cr, jy, oZ, v, eq, K, Xk, bX, ey, aAE, bIT); #c1(ELOVL7) c2(NP_001098028) c3(elongation of very long chain fatty acids protein 7 isoform 1) c4(41289, 41290) c5(41291, 41292, 41293, 41294, 41295, 41296, 41297, 41298, 41299, 41300, 41301, 41302, 41303, 41304, 41305, 41306, 41307, 41308, 41309, 41310, 41311, 41312, 41313, 41314) c6( ) c7(IM, ae, ac, ad); #c1(ELP2) c2(NP_001229804) c3(elongator complex protein 2 isoform 1) c4(85258) c5(85259, 85260, 85261, 85262, 85263, 85264) c6( ) c7(ao, m, K, nA); #c1(ELP2) c2(NP_001229805) c3(elongator complex protein 2 isoform 3) c4(85265) c5(85266, 85267, 85268, 85269, 85270, 85271) c6( ) c7(ao, m, K, nA); #c1(ELP2) c2(NP_001229806) c3(elongator complex protein 2 isoform 4) c4(85272) c5(85273, 85274, 85275, 85276, 85277, 85278) c6( ) c7(ao, m, K, nA); #c1(ELP2) c2(NP_001229807) c3(elongator complex protein 2 isoform 5) c4(85279) c5(85280, 85281, 85282, 85283, 85284, 85285) c6( ) c7(ao, m, K, nA); #c1(ELP2) c2(NP_001229808) c3(elongator complex protein 2 isoform 6) c4(85286) c5(85287, 85288, 85289, 85290, 85291, 85292) c6( ) c7(ao, m, K, nA); #c1(ELP2) c2(NP_060725) c3(elongator complex protein 2 isoform 2) c4(197475) c5(197476, 197477, 197478, 197479, 197480, 197481) c6( ) c7(ao, m, K, nA); #c1(ELP3) c2(NP_001271151) c3(elongator complex protein 3 isoform 3) c4(103473, 103474) c5(103475, 103476, 103477, 103478, 103479, 103480, 103481, 103482, 103483, 103484, 103485, 103486, 103487, 103488, 103489, 103490) c6( ) c7(aqJ, U, bM, c); #c1(ELP3) c2(NP_001271155) c3(elongator complex protein 3 isoform 5) c4( ) c5(103491, 103492, 103493, 103494, 103495) c6( ) c7(aqJ, U, bM, c); #c1(ELP3) c2(NP_060561) c3(elongator complex protein 3 isoform 1) c4(196553, 196554, 196555) c5(196556, 196557, 196558, 196559, 196560, 196561, 196562, 196563, 196564) c6( ) c7(aqJ, U, bM, c); #c1(ELP3) c2(XP_006716417) c3(elongator complex protein 3 isoform X1) c4(290287, 290288) c5(290289, 290290, 290291, 290292, 290293, 290294, 290295, 290296, 290297, 290298, 290299, 290300) c6( ) c7(aqJ, U, bM, c); #c1(ELP4) c2(NP_001275654) c3(elongator complex protein 4 isoform 2) c4(106913) c5(106914, 106915, 106916, 106917, 106918, 106919) c6( ) c7(akf, ko, Ir); #c1(ELP4) c2(NP_001275655) c3(elongator complex protein 4 isoform 3) c4(106920, 106921) c5(106922, 106923, 106924, 106925, 106926, 106927, 106928, 106929, 106930, 106931, 106932, 106933, 106934, 106935, 106936, 106937, 106938, 106939, 106940, 106941, 106942, 106943, 106944, 106945, 106946, 106947, 106948, 106949, 106950, 106951, 106952) c6( ) c7(akf, ko, Ir); #c1(ELP4) c2(NP_061913) c3(elongator complex protein 4 isoform 1) c4(201168) c5(201169, 201170, 201171, 201172, 201173, 201174) c6( ) c7(akf, ko, Ir); #c1(ELP6) c2(NP_001026873) c3(elongator complex protein 6) c4(29764, 29765) c5(29766, 29767, 29768, 29769, 29770, 29771, 29772, 29773, 29774, 29775, 29776, 29777) c6( ) c7(A, fu); #c1(ELSPBP1) c2(NP_071425) c3(epididymal sperm-binding protein 1 precursor) c4(211597) c5(211598, 211599, 211600, 211601, 211602, 211603, 211604, 211605) c6(211606, 211607) c7(fq, kh); #c1(EMB) c2(NP_940851) c3(embigin precursor) c4(259946) c5(259947, 259948, 259949, 259950, 259951, 259952) c6( ) c7(ck, B, hc, fJ, jx, eD, eZ, h, wR, fL, bD, hE, mC, vi); #c1(EMC10) c2(NP_778233) c3(ER membrane protein complex subunit 10 isoform 1 precursor) c4(251473) c5(251474, 251475, 251476, 251477, 251478, 251479, 251480, 251481) c6(251482, 251483) c7(Fm, T, VJ, eA, as); #c1(EMC10) c2(NP_996261) c3(ER membrane protein complex subunit 10 isoform 2 precursor) c4(263977, 263978) c5(263979, 263980, 263981, 263982, 263983, 263984, 263985, 263986, 263987, 263988, 263989, 263990, 263991, 263992, 263993, 263994) c6(263995, 263996, 263997, 263998) c7(Fm, T, VJ, eA, as); #c1(EMC2) c2(NP_055488) c3(ER membrane protein complex subunit 2) c4(181471) c5(181472, 181473, 181474, 181475, 181476, 181477) c6( ) c7(cd); #c1(EMC3) c2(NP_060917) c3(ER membrane protein complex subunit 3) c4(198602, 198603) c5(198604, 198605, 198606, 198607, 198608, 198609, 198610, 198611, 198612, 198613, 198614, 198615) c6( ) c7(AW, mx, bIU, vc, kp, bt); #c1(EMC7) c2(NP_064539) c3(ER membrane protein complex subunit 7 precursor) c4(202892) c5(202893, 202894, 202895, 202896, 202897, 202898) c6( ) c7(cc); #c1(EMC8) c2(NP_001135760) c3(ER membrane protein complex subunit 8 isoform 2) c4(53131) c5(53132, 53133, 53134, 53135, 53136) c6( ) c7(dy, ac, hy, ne, BN); #c1(EMC8) c2(NP_006058) c3(ER membrane protein complex subunit 8 isoform 1) c4(161521) c5(161522, 161523, 161524, 161525, 161526, 161527, 161528) c6( ) c7(dy, ac, hy, ne, BN); #c1(EMCN) c2(NP_001153166) c3(endomucin isoform 2 precursor) c4(60471) c5(60472, 60473, 60474, 60475, 60476, 60477, 60478, 60479, 60480, 60481, 60482, 60483, 60484, 60485, 60486, 60487) c6(60488, 60489, 60490, 60491) c7(Jm, x, Vy, k, IQ, eE, y); #c1(EMCN) c2(XP_011530326) c3(endomucin isoform X1) c4(326167, 326168) c5(326169, 326170, 326171, 326172, 326173, 326174, 326175, 326176) c6(326177, 326178) c7(Jm, x, Vy, k, IQ, eE, y); #c1(EMD) c2(NP_000108) c3(emerin) c4(1830, 1831) c5(1832, 1833, 1834, 1835, 1836, 1837, 1838, 1839, 1840, 1841, 1842, 1843, 1844) c6( ) c7(dA, fR, mr, wL, aeu, aTI, bd, eW, er, cc, aLs, no, MR, QJ, oj, Ak, h, aWs, bl, hm, bIV, aJ, xs, lb, fe, uY, Bu, GR, Ye, ck, ly, iT, dB, mx, km, gZ, rx, Fw, y); #c1(EME1) c2(NP_689676) c3(crossover junction endonuclease EME1 isoform 2) c4(243533) c5(243534, 243535, 243536, 243537, 243538, 243539) c6( ) c7(T, d, dB, bE, aT, bB, V, eA); #c1(EME1) c2(XP_011522698) c3(crossover junction endonuclease EME1 isoform X1) c4(317224) c5(317225, 317226, 317227, 317228, 317229, 317230, 317231, 317232, 317233, 317234) c6( ) c7(T, d, dB, bE, aT, bB, V, eA); #c1(EMG1) c2(NP_006322) c3(ribosomal RNA small subunit methyltransferase NEP1) c4(164026) c5(164027, 164028, 164029, 164030, 164031, 164032) c6( ) c7(h, bIW, er, dx, aT); #c1(EMILIN1) c2(NP_008977) c3(EMILIN-1 precursor) c4(169994, 169995) c5(169996, 169997, 169998, 169999, 170000, 170001, 170002, 170003, 170004, 170005, 170006, 170007) c6( ) c7(Vv, t, m, qa, cz); #c1(EMILIN2) c2(NP_114437) c3(EMILIN-2 precursor) c4(222774) c5(222775, 222776, 222777, 222778, 222779, 222780, 222781, 222782, 222783, 222784, 222785, 222786, 222787, 222788, 222789, 222790) c6(222791, 222792, 222793, 222794) c7(T, aC, aW, cz, aT, g); #c1(EMILIN2) c2(XP_011524049) c3(EMILIN-2 isoform X1) c4(318642) c5( ) c6( ) c7(T, aC, aW, cz, aT, g); #c1(EMILIN3) c2(NP_443078) c3(EMILIN-3 precursor) c4(229291) c5(229292, 229293, 229294, 229295, 229296, 229297, 229298, 229299) c6(229300, 229301) c7(ht); #c1(EML1) c2(NP_001008707) c3(echinoderm microtubule-associated protein-like 1 isoform a) c4(23370) c5(23371, 23372, 23373, 23374, 23375, 23376, 23377, 23378, 23379, 23380) c6( ) c7(kp, af); #c1(EML1) c2(NP_004425) c3(echinoderm microtubule-associated protein-like 1 isoform b) c4(146260) c5(146261, 146262, 146263, 146264, 146265, 146266) c6( ) c7(kp, af); #c1(EML2) c2(NP_001180197) c3(echinoderm microtubule-associated protein-like 2 isoform 1) c4(73349, 73350) c5(73351, 73352, 73353, 73354, 73355, 73356, 73357, 73358, 73359, 73360, 73361, 73362) c6( ) c7(aE, aW, Y, aT, uJ, ci); #c1(EML2) c2(NP_001180198) c3(echinoderm microtubule-associated protein-like 2 isoform 3) c4(73363) c5(73364, 73365, 73366, 73367, 73368, 73369) c6( ) c7(aE, aW, Y, aT, uJ, ci); #c1(EML2) c2(NP_036287) c3(echinoderm microtubule-associated protein-like 2 isoform 2) c4(172847) c5(172848, 172849, 172850, 172851, 172852, 172853) c6( ) c7(aE, aW, Y, aT, uJ, ci); #c1(EML2) c2(XP_011524999) c3(echinoderm microtubule-associated protein-like 2 isoform X6) c4(319476) c5(319477, 319478, 319479, 319480, 319481, 319482) c6( ) c7(aE, aW, Y, aT, uJ, ci); #c1(EML2) c2(XP_011525001) c3(echinoderm microtubule-associated protein-like 2 isoform X8) c4( ) c5(319483, 319484) c6( ) c7(aE, aW, Y, aT, uJ, ci); #c1(EML4) c2(NP_001138548) c3(echinoderm microtubule-associated protein-like 4 isoform b) c4(56983) c5(56984, 56985, 56986, 56987, 56988, 56989) c6( ) c7(YL, av, T, ft, Qy, eM, dB, ff, jh, n, ci, m, en, g, Tj, bz, iu); #c1(EML4) c2(NP_061936) c3(echinoderm microtubule-associated protein-like 4 isoform a) c4(201216) c5(201217, 201218, 201219, 201220, 201221, 201222) c6( ) c7(YL, av, T, ft, Qy, eM, dB, ff, jh, n, ci, m, en, g, Tj, bz, iu); #c1(EML4) c2(XP_006712054) c3(echinoderm microtubule-associated protein-like 4 isoform X2) c4(286366) c5( ) c6( ) c7(YL, av, T, ft, Qy, eM, dB, ff, jh, n, ci, m, en, g, Tj, bz, iu); #c1(EML4) c2(XP_006712055) c3(echinoderm microtubule-associated protein-like 4 isoform X3) c4( ) c5(286367, 286368, 286369, 286370, 286371, 286372) c6( ) c7(YL, av, T, ft, Qy, eM, dB, ff, jh, n, ci, m, en, g, Tj, bz, iu); #c1(EML5) c2(NP_899243) c3(echinoderm microtubule-associated protein-like 5) c4(258068) c5(258069, 258070, 258071, 258072, 258073, 258074) c6( ) c7(aE, aW, Y, aT, uJ, ci); #c1(EML5) c2(XP_006720133) c3(echinoderm microtubule-associated protein-like 5 isoform X6) c4(293270, 293271) c5(293272, 293273, 293274, 293275, 293276, 293277, 293278, 293279, 293280, 293281, 293282, 293283) c6( ) c7(aE, aW, Y, aT, uJ, ci); #c1(EML6) c2(NP_001034842) c3(echinoderm microtubule-associated protein-like 6) c4(32357) c5(32358, 32359, 32360, 32361, 32362, 32363) c6( ) c7(aC, v, pN); #c1(EMP1) c2(NP_001414) c3(epithelial membrane protein 1) c4(117691, 117692) c5(117693, 117694, 117695, 117696, 117697, 117698, 117699, 117700, 117701, 117702, 117703, 117704) c6( ) c7(T, aw, aA, BE, yU, ad, Uh, aT, h, yZ, aDZ, ae, avV, aW, ff, aF, en, bz, eK, eM, dB, dO, eB, wR, EY); #c1(EMP2) c2(XP_006720927) c3(epithelial membrane protein 2 isoform X1) c4(293780) c5(293781, 293782, 293783, 293784, 293785, 293786, 293787, 293788, 293789, 293790) c6( ) c7(T, id, hL, RC, ah, bU, cm); #c1(EMX1) c2(NP_004088) c3(homeobox protein EMX1) c4(143467) c5(143468, 143469, 143470, 143471, 143472, 143473, 143474) c6( ) c7(yn); #c1(EMX2) c2(NP_001159396) c3(homeobox protein EMX2 isoform 2) c4(63948) c5(63949, 63950, 63951, 63952, 63953, 63954) c6( ) c7(T, aA, n, bS, j, dP, av, zY, wG, bK, Ur, iE, blX, aF, g, cl, Z, bz, uP, FB, hL, Gp, iu); #c1(EMX2) c2(NP_004089) c3(homeobox protein EMX2 isoform 1) c4(143475) c5(143476, 143477, 143478, 143479, 143480, 143481, 143482) c6( ) c7(T, aA, n, bS, j, dP, av, zY, wG, bK, Ur, iE, blX, aF, g, cl, Z, bz, uP, FB, hL, Gp, iu); #c1(EN1) c2(NP_001417) c3(homeobox protein engrailed-1) c4(117705) c5(117706, 117707, 117708, 117709, 117710, 117711, 117712, 117713, 117714) c6( ) c7(V, qK, aR, arA, an); #c1(EN2) c2(NP_001418) c3(homeobox protein engrailed-2) c4(117715) c5(117716, 117717, 117718, 117719, 117720, 117721, 117722) c6( ) c7(jf, Ng, T, iU, VT, aT, fr, an, rz, ae, ad, bN); #c1(ENAH) c2(NP_001008493) c3(protein enabled homolog isoform a) c4(23265) c5( ) c6( ) c7(eZ, aT, h, ey, q, ci, wt, cd); #c1(ENAH) c2(NP_060682) c3(protein enabled homolog isoform b) c4(197144) c5(197145, 197146, 197147, 197148, 197149, 197150) c6( ) c7(eZ, aT, h, ey, q, ci, wt, cd); #c1(ENAH) c2(XP_011542536) c3(protein enabled homolog isoform X9) c4(341074) c5(341075, 341076, 341077, 341078, 341079, 341080) c6( ) c7(eZ, aT, h, ey, q, ci, wt, cd); #c1(ENAH) c2(XP_011542537) c3(protein enabled homolog isoform X10) c4( ) c5(341081, 341082, 341083, 341084, 341085, 341086, 341087) c6( ) c7(eZ, aT, h, ey, q, ci, wt, cd); #c1(ENAM) c2(NP_114095) c3(enamelin precursor) c4(222142) c5(222143, 222144, 222145, 222146, 222147, 222148, 222149, 222150, 222151) c6(222152, 222153, 222154) c7(gk, ka, blY, ki, al, bcw, jx, blZ, bma, bh, Ud, ai); #c1(ENC1) c2(XP_011541999) c3(ectoderm-neural cortex protein 1 isoform X1) c4(340467, 340468, 340469) c5(340470, 340471, 340472, 340473, 340474, 340475, 340476, 340477, 340478, 340479, 340480, 340481, 340482, 340483, 340484, 340485, 340486, 340487, 340488, 340489, 340490, 340491, 340492) c6( ) c7(T, B, dB, bE, aT, bB, h, fr, K, cm, q, zn); #c1(END0G) c2(NP_004426) c3(endonuclease G, mitochondrial precursor) c4(146267) c5(146268, 146269, 146270, 146271, 146272, 146273) c6( ) c7(T, bP, aW, eu, ff, r, aT, cd, aA, fd, bl, q, en, bw, AO, bt, ae, B, ad); #c1(END0U) c2(NP_001165910) c3(poly(U)-specific endoribonuclease isoform 1 precursor) c4(67997, 67998) c5(67999, 68000, 68001, 68002, 68003, 68004, 68005, 68006) c6(68007, 68008) c7(Ei, U, aT, bO, bS, bK, K, ct, Z, he, ra, hq); #c1(END0U) c2(NP_001165911) c3(poly(U)-specific endoribonuclease isoform 3 precursor) c4(68009) c5(68010, 68011, 68012, 68013, 68014, 68015, 68016, 68017, 68018, 68019, 68020, 68021, 68022, 68023, 68024, 68025) c6(68026, 68027, 68028, 68029) c7(Ei, U, aT, bO, bS, bK, K, ct, Z, he, ra, hq); #c1(END0U) c2(NP_006016) c3(poly(U)-specific endoribonuclease isoform 2 precursor) c4(161195) c5(161196, 161197, 161198, 161199, 161200, 161201, 161202, 161203) c6( ) c7(Ei, U, aT, bO, bS, bK, K, ct, Z, he, ra, hq); #c1(END0V) c2(NP_001158109) c3(endonuclease V isoform 2) c4(63141) c5(63142, 63143, 63144, 63145, 63146, 63147) c6( ) c7(CT, X, La, bC); #c1(END0V) c2(NP_001158110) c3(endonuclease V isoform 3) c4(63148) c5(63149, 63150, 63151, 63152, 63153, 63154) c6( ) c7(CT, X, La, bC); #c1(END0V) c2(NP_775898) c3(endonuclease V isoform 1) c4(250604) c5(250605, 250606, 250607, 250608, 250609, 250610) c6( ) c7(CT, X, La, bC); #c1(ENG) c2(NP_000109) c3(endoglin isoform 2 precursor) c4(1845) c5(1846, 1847, 1848, 1849, 1850, 1851) c6( ) c7(lD, T, aC, fR, pf, if, e, qx, al, eh, bB, IR, ci, ip, x, aE, K, hu, ly, aW, hl, LZ, g, hJ, eF, uC, bw, ou, y, iA, vA, vy, cj, uJ, Hb, m, iB, aw, ht, n, fr, qN, Cd, cd, br, bmb, kl, Cf, dL, dx, cY, wC, Ck, fe, lx, hL, at, pg, bD, it, B, dA, eR, oe, aA, cz, Cg, Cb, q, o, er, aHu, qK, aT, dz, ae, Y, r, en, cl, t, Vq, iK, pb, amF, nM, ac, c, bt, kh, id, MH, Cl, bs, ad, afb, BY, Jm, av, F, Cj, fb, nJ, d, BO, et, ff, eH, Ce, aF, si, iV, bz, es, bE, dX, aS, bC, IC, us); #c1(ENG) c2(NP_001108225) c3(endoglin isoform 1 precursor) c4(43169, 43170) c5(43171, 43172, 43173, 43174, 43175, 43176, 43177, 43178, 43179, 43180, 43181, 43182, 43183, 43184, 43185, 43186) c6( ) c7(lD, T, aC, fR, pf, if, e, qx, al, eb, bB, IR, ci, ip, x, aE, K, hu, ly, aW, hl, LZ, g, hJ, eF, uC, bw, ou, y, iA, vA, vy, cj, uJ, Hb, m, iB, aw, ht, n, fr, qN, Cd, cd, br, bmb, kl, Cf, dL, dx, cY, wC, Ck, fe, lx, hL, at, pg, bD, it, B, dA, eR, oe, aA, cz, Cg, Cb, q, o, er, aHu, qK, aT, dz, ae, Y, r, en, cl, t, Vq, iK, pb, amF, nM, ac, c, bt, kh, id, MH, Cl, bs, ad, afb, BY, Jm, av, F, Cj, fb, nJ, d, BO, et, ff, eH, Ce, aF, si, iV, bz, es, bE, dX, aS, bC, IC, us); #c1(ENGASE) c2(NP_001036038) c3(cytosolic endo-beta-N-acetylglucosaminidase) c4(33784) c5(33785, 33786, 33787, 33788, 33789, 33790, 33791, 33792, 33793) c6( ) c7(aW, T, y, aT); #c1(ENGASE) c2(XP_006722082) c3(cytosolic endo-beta-N-acetylglucosaminidase isoform X4) c4(294598) c5(294599, 294600, 294601, 294602, 294603, 294604) c6( ) c7(aW, T, y, aT); #c1(ENH0) c2(NP_940975) c3(adropin precursor) c4(260230, 260231) c5(260232, 260233, 260234, 260235, 260236, 260237, 260238, 260239, 260240, 260241, 260242, 260243, 260244, 260245) c6(260246, 260247) c7(dq, v, qO); #c1(EN02) c2(NP_001966) c3(gamma-enolase) c4(122693, 122694) c5(122695, 122696, 122697, 122698, 122699, 122700, 122701, 122702, 122703, 122704, 122705, 122706, 122707, 122708, 122709, 122710, 122711, 122712, 122713, 122714, 122715, 122716, 122717, 122718, 122719, 122720, 122721) c6( ) c7(T, aFG, jp, jd, jh, rf, v, ci, iJ, eW, ad, Nh, er, av, aaF, ft, Nn, SV, abg, aT, IG, cy, dL, vd, K, bq, H, ae, af, dx, awV, jf, if, bmc, yo, d, IR, s, vT, UT, aW, je, fc, Pg, CQ, f, cm, bz, bmd, eK, dS, ov, Qi, iM, jV, ac, eM, Ew, w, apl, cj, MJ, oQ, hh, bt, xg, iu, L); #c1(EN03) c2(NP_001180432) c3(beta-enolase isoform 2) c4(74045) c5(74046, 74047, 74048, 74049, 74050, 74051) c6( ) c7(ck, Ig, sO, bme, hl, km, jh, gE, vQ); #c1(EN03) c2(NP_443739) c3(beta-enolase isoform 1) c4( ) c5(230073, 230074, 230075, 230076, 230077, 230078, 230079, 230080, 230081, 230082, 230083, 230084, 230085, 230086, 230087, 230088, 230089, 230090, 230091, 230092, 230093, 230094, 230095) c6( ) c7(ck, Ig, sO, bme, hl, km, jh, gE, vQ); #c1(EN03) c2(XP_005256578) c3(beta-enolase isoform X2) c4(274215, 274216, 274217, 274218) c5(274219, 274220, 274221, 274222, 274223) c6( ) c7(ck, Ig, sO, bme, hl, km, jh, gE, vQ); #c1(ENO4) c2(NP_001229628) c3(enolase-like protein ENO4) c4(84699) c5(84700, 84701, 84702, 84703, 84704, 84705) c6( ) c7(gU); #c1(ENOPH1) c2(NP_067027) c3(enolase-phosphatase E1 isoform 1) c4(208517, 208518) c5(208519, 208520, 208521, 208522, 208523, 208524, 208525, 208526, 208527, 208528, 208529, 208530, 208531) c6( ) c7(aio, ul, bmf, nA); #c1(ENOSF1) c2(NP_001119595) c3(mitochondrial enolase superfamily member 1 isoform rTSalpha) c4(44268) c5(44269, 44270, 44271, 44272, 44273, 44274) c6( ) c7(T, dD, eq, q, hX, MR, jZ, aVA, aT, dV, ask, aVB, eu, apn, r, cl, all, dr, ac, wE, hL, bm); #c1(ENOSF1) c2(NP_059982) c3(mitochondrial enolase superfamily member 1 isoform rTSbeta) c4(193470) c5(193471, 193472, 193473, 193474, 193475, 193476) c6( ) c7(T, dD, eq, q, hX, MR, jZ, aVA, aT, dV, ask, aVB, eu, apn, r, cl, all, dr, ac, wE, hL, bm); #c1(ENOSF1) c2(NP_974487) c3(mitochondrial enolase superfamily member 1 isoform rTSgamma) c4(262726) c5(262727, 262728, 262729, 262730, 262731, 262732) c6( ) c7(T, dD, eq, q, hX, MR, jZ, aVA, aT, dV, ask, aVB, eu, apn, r, cl, all, dr, ac, wE, hL, bm); #c1(ENOSF1) c2(XP_005258175) c3(mitochondrial enolase superfamily member 1 isoform X18) c4( ) c5(275536, 275537, 275538, 275539, 275540, 275541) c6( ) c7(T, dD, eq, q, hX, MR, jZ, aVA, aT, dV, ask, aVB, eu, apn, r, cl, all, dr, ac, wE, hL, bm); #c1(ENOSF1) c2(XP_011523981) c3(mitochondrial enolase superfamily member 1 isoform X3) c4(318529) c5( ) c6( ) c7(T, dD, eq, q, hX, MR, jZ, aVA, aT, dV, ask, aVB, eu, apn, r, cl, all, dr, ac, wE, hL, bm); #c1(ENOSF1) c2(XP_011523982) c3(mitochondrial enolase superfamily member 1 isoform X4) c4(318530) c5( ) c6( ) c7(T, dD, eq, q, hX, MR, jZ, aVA, aT, dV, ask, aVB, eu, apn, r, cl, all, dr, ac, wE, hL, bm); #c1(ENOSF1) c2(XP_011523984) c3(mitochondrial enolase superfamily member 1 isoform X6) c4( ) c5(318531, 318532, 318533, 318534, 318535, 318536) c6( ) c7(T, dD, eq, q, hX, MR, jZ, aVA, aT, dV, ask, aVB, eu, apn, r, cl, all, dr, ac, wE, hL, bm); #c1(ENOX1) c2(NP_001121087) c3(ecto-NOX disulfide-thiol exchanger 1) c4(45173, 45174) c5(45175, 45176, 45177, 45178, 45179, 45180, 45181, 45182) c6( ) c7(aDx, T, oe, y); #c1(ENOX1) c2(XP_011533427) c3(ecto-NOX disulfide-thiol exchanger 1 isoform X2) c4( ) c5(329552, 329553) c6( ) c7(aDx, T, oe, y); #c1(ENOX1) c2(XP_011533434) c3(ecto-NOX disulfide-thiol exchanger 1 isoform X3) c4( ) c5(329554, 329555, 329556, 329557, 329558, 329559) c6( ) c7(aDx, T, oe, y); #c1(ENOX2) c2(XP_011529546) c3(ecto-NOX disulfide-thiol exchanger 2 isoform X3) c4(325066, 325067, 325068) c5(325069, 325070, 325071, 325072, 325073, 325074, 325075) c6( ) c7(bv, T, aF, aA); #c1(ENOX2) c2(XP_011529547) c3(ecto-NOX disulfide-thiol exchanger 2 isoform X4) c4(325076) c5(325077) c6( ) c7(bv, T, aF, aA); #c1(ENOX2) c2(XP_011529552) c3(ecto-NOX disulfide-thiol exchanger 2 isoform X1) c4(325078) c5(325079, 325080, 325081, 325082, 325083, 325084, 325085, 325086, 325087, 325088, 325089) c6( ) c7(bv, T, aF, aA); #c1(ENOX2) c2(XP_011529554) c3(ecto-NOX disulfide-thiol exchanger 2 isoform X2) c4( ) c5(325090, 325091, 325092, 325093, 325094, 325095, 325096, 325097, 325098, 325099, 325100, 325101, 325102, 325103, 325104, 325105, 325106, 325107) c6( ) c7(bv, T, aF, aA); #c1(ENPEP) c2(NP_001968) c3(glutamyl aminopeptidase) c4(122722) c5(122723, 122724, 122725, 122726, 122727, 122728) c6( ) c7(dA, Fj, WA, rQ, cV, bs, cz, n, bO, fr, qN, hr, ad, aT, vw, h, Fg, ae, nJ, ayT, d, s, aW, ff, Hu, en, aoG, bw, bN, ck, es, rK, LS); #c1(ENPP1) c2(NP_006199) c3(ectonucleotide pyrophosphatase/phosphodiesterase family member 1) c4(162806) c5(162807, 162808, 162809, 162810, 162811, 162812) c6( ) c7(bL, nZ, T, dD, AB, Ly, eR, aZ, ea, e, jx, qQ, aw, Ay, cR, cz, aj, bmi, j, dG, v, eq, fo, nS, aY, amC, cd, J, ad, zn, dP, amB, zw, aE, IK, rC, oW, aT, dV, jy, dL, qM, ae, af, kl, d, mR, A, bmh, bmg, HY, aW, fc, rs, si, fd, bfH, AA, bmj, uC, dr, aDQ, bJ, amF, y, ac, rg, cO, bib, mg, asR, mf, dy, IS, ei, bfl, VK, fl); #c1(ENPP2) c2(NP_001035181) c3(ectonucleotide pyrophosphatase/phosphodiesterase family member 2 isoform 2 preproprotein) c4(32556) c5(32557, 32558, 32559, 32560, 32561, 32562, 32563, 32564) c6( ) c7(T, DD, bmk, al, jx, eX, fd, cR, fr, ai, ad, Vp, hd, F, aT, eV, bq, ae, aW, rU, fQ, t, cm, LB, qJ, nB, dX, np, y, B); #c1(ENPP2) c2(NP_001124335) c3(ectonucleotide pyrophosphatase/phosphodiesterase family member 2 isoform 3 preproprotein) c4(48727) c5(48728, 48729, 48730, 48731, 48732, 48733) c6( ) c7(T, DD, bmk, al, jx, eX, fd, cR, fr, ai, ad, Vp, hd, F, aT, eV, bq, ae, aW, rU, fQ, t, cm, LB, qJ, nB, dX, np, y, B); #c1(ENPP2) c2(NP_006200) c3(ectonucleotide pyrophosphatase/phosphodiesterase family member 2 isoform 1 preproprotein) c4(162813) c5(162814, 162815, 162816, 162817, 162818, 162819) c6( ) c7(T, DD, bmk, al, jx, eX, fd, cR, fr, ai, ad, Vp, hd, F, aT, eV, bq, ae, aW, rU, fQ, t, cm, LB, qJ, nB, dX, np, y, B); #c1(ENPP2) c2(XP_006716647) c3(ectonucleotide pyrophosphatase/phosphodiesterase family member 2 isoform X1) c4( ) c5(290420) c6( ) c7(T, DD, bmk, al, jx, eX, fd, cR, fr, ai, ad, Vp, hd, F, aT, eV, bq, ae, aW, rU, fQ, t, cm, LB, qJ, nB, dX, np, y, B); #c1(ENPP2) c2(XP_006716650) c3(ectonucleotide pyrophosphatase/phosphodiesterase family member 2 isoform X4) c4(290421) c5( ) c6( ) c7(T, DD, bmk, al, jx, eX, fd, cR, fr, ai, ad, Vp, hd, F, aT, eV, bq, ae, aW, rU, fQ, t, cm, LB, qJ, nB, dX, np, y, B); #c1(ENPP3) c2(NP_005012) c3(ectonucleotide pyrophosphatase/phosphodiesterase family member 3) c4(152133, 152134, 152135, 152136) c5(152137, 152138, 152139, 152140, 152141152142, 152143, 152144, 152145, 152146, 152147, 152148, 152149, 152150, 152151, 152152, 152153, 152154, 152155, 152156, 152157, 152158, 152159, 152160, 152161, 152162, 152163, 152164) c6( ) c7(nZ, cT, T, bjX, e, X, bt, apG, aq, ci, bmj, Qx, B, yR, hX); #c1(ENPP5) c2(XP_005249317) c3(ectonucleotide pyrophosphatase/phosphodiesterase family member 5 isoform X1) c4(269158) c5(269159, 269160, 269161, 269162, 269163, 269164, 269165, 269166, 269167, 269168, 269169, 269170, 269171, 269172) c6(269173, 269174, 269175, 269176) c7(ad); #c1(ENPP7) c2(NP_848638) c3(ectonucleotide pyrophosphatase/phosphodiesterase family member 7 precursor) c4(254041) c5(254042, 254043, 254044, 254045, 254046, 254047) c6( ) c7(bB, bE, X, ao); #c1(ENTHD2) c2(NP_653280) c3(AP-4 complex accesses subunit tepsin) c4(239490) c5(239491, 239492, 239493, 239494, 239495, 239496) c6( ) c7(cr); #c1(ENTHD2) c2(XP_005257124) c3(AP-4 complex accessory subunit tepsin isoform X5) c4( ) c5(274703) c6( ) c7(cr); #c1(ENTHD2) c2(XP_006721775) c3(AP-4 complex accesses subunit tepsin isoform X7) c4( ) c5(294272, 294273, 294274, 294275, 294276, 294277) c6( ) c7(cr); #c1(ENTHD2) c2(XP_011522660) c3(AP-4 complex accesses subunit tepsin isoform X6) c4(317222) c5( ) c6( ) c7(cr); #c1(ENTPD1) c2(NP_001091645) c3(ectonucleoside triphosphate diphosphohydrolase 1 isoform 2) c4(38539, 38540, 38541, 38542) c5(38543, 38544, 38545, 38546, 38547, 38548, 38549, 38550, 38551, 38552, 38553, 38554) c6( ) c7(bL, bM, 1 eR, aD, aj, j, nA, C, mF, aY, V, jw, J, aE, bmm, Co, h, cy, ji, bq, pk, bml, Y, fe, vs, eK, iQ, ac, cj, gZ, aS, rH, pw, ei, gT); #c1(ENTPD1) c2(NP_001157650) c3(ectonucleoside triphosphate diphosphohydrolase 1 isoform 3) c4(62373) c5(62374, 62375, 62376, 62377, 62378, 62379) c6( ) c7(bL, bM, T, eR, aD, aj, j, nA, C, mF, aY, V, jw, J, aE, bmm, Co, h, cy, ji, bq, pk, bml, Y, fe, vs, eK, iQ, ac, cj, gZ, aS, rH, pw, ei, gT); #c1(ENTPD1) c2(NP_001157653) c3(ectonucleoside triphosphate diphosphohydrolase 1 isoform 5) c4( ) c5(62380, 62381, 62382, 62383, 62384, 62385, 62386) c6( ) c7(bL, bM, T, eR, aD, aj, j, nA, C, mF, aY, V, jw, J, aE, bmm, Co, h, cy, ji, bq, pk, bml, Y, fe, vs, eK, iQ, ac, cj, gZ, aS, rH, pw, ei, gT); #c1(ENTPD1) c2(NP_001157654) c3(ectonucleoside triphosphate diphosphohydrolase 1 isoform 6) c4( ) c5(62387, 62388, 62389, 62390, 62391, 62392, 62393, 62394) c6( ) c7(bL, bM, 1 eR, aD, aj, j, nA, C, mF, aY, V, jw, J, aE, bmm, Co, h, cy, ji, bq, pk, bml, Y, fe, vs, eK, iQ, ac, cj, gZ, aS, rH, pw, ei, gT); #c1(ENTPD1) c2(NP_001767) c3(ectonucleoside triphosphate diphosphohydrolase 1 isoform 1) c4(120956) c5(120957, 120958, 120959, 120960, 120961, 120962, 120963) c6( ) c7(bL, bM, T, eR, aD, aj, j, nA, C, mF, aY, V, jw, J, aE, bmm, Co, h, cy, ji, bq, pk, bml, Y, fe, vs, eK, iQ, ac, cj, gZ, aS, rH, pw, ei, gT); #c1(ENTPD2) c2(NP_001237) c3(ectonucleoside triphosphate diphosphohydrolase 2 isoform 2) c4(87886) c5(87887, 87888, 87889, 87890, 87891, 87892) c6( ) c7(aE, Y, cz, fQ, aq, B, be); #c1(ENTPD2) c2(NP_982293) c3(ectonucleoside triphosphate diphosphohydrolase 2 isoform 1) c4(263301) c5(263302, 263303, 263304, 263305, 263306, 263307) c6( ) c7(aE, Y, cz, fQ, aq, B, bc); #c1(ENTPD4) c2(NP_001122402) c3(ectonucleoside triphosphate diphosphohydrolase 4 isoform b) c4(46775, 46776) c5(46777, 46778, 46779, 46780, 46781, 46782, 46783, 46784, 46785, 46786, 46787, 46788) c6( ) c7(T); #c1(ENTPD4) c2(NP_004892) c3(ectonucleoside triphosphate diphosphohydrolase 4 isoform a) c4(150608) c5(150609, 150610, 150611, 150612, 150613, 150614) c6( ) c7(T); #c1(ENTPD5) c2(XP_006720387) c3(ectonucleoside triphosphate diphosphohydrolase 5 isoform X1) c4(293504) c5(293505, 293506, 293507, 293508, 293509, 293510) c6( ) c7(Gl, BI, T, vT, aT, fZ, r, Ej, Lb, K, bu, rA, ae, q, ad); #c1(ENTPD6) c2(NP_001107561) c3(ectonucleoside triphosphate diphosphohydrolase 6 isoform 2) c4(42836) c5(42837, 42838, 42839, 42840, 42841, 42842) c6( ) c7(wu, wm); #c1(ENTPD6) c2(XP_005260938) c3(ectonucleoside triphosphate diphosphohydrolase 6 isoform X4) c4(276988, 276989) c5(276990) c6( ) c7(wu, wm); #c1(ENTPD6) c2(XP_005260939) c3(ectonucleoside triphosphate diphosphohydrolase 6 isoform X5) c4(276991) c5(276992) c6( ) c7(wu, wm); #c1(ENTPD6) c2(XP_005260940) c3(ectonucleoside triphosphate diphosphohydrolase 6 isoform X6) c4( ) c5(276993, 276994, 276995, 276996, 276997, 276998, 276999, 277000, 277001, 277002, 277003) c6( ) c7(wu, wm); #c1(ENTPD6) c2(XP_005260941) c3(ectonucleoside triphosphate diphosphohydrolase 6 isoform X7) c4(277004) c5(277005, 277006, 277007, 277008, 277009, 277010) c6( ) c7(wu, wm); #c1(ENTPD6) c2(XP_005260942) c3(ectonucleoside triphosphate diphosphohydrolase 6 isoform X8) c4(277011) c5(277012, 277013, 277014, 277015, 277016, 277017) c6( ) c7(wu, wm); #c1(ENTPD6) c2(XP_011527698) c3(ectonucleoside triphosphate diphosphohydrolase 6 isoform X1) c4(322636) c5( ) c6( ) c7(wu, wm); #c1(ENTPD6) c2(XP_011527699) c3(ectonucleoside triphosphate diphosphohydrolase 6 isoform X2) c4(322637) c5( ) c6( ) c7(wu, wm); #c1(ENTPD6) c2(XP_011527700) c3(ectonucleoside triphosphate diphosphohydrolase 6 isoform X3) c4(322638, 322639) c5( ) c6( ) c7(wu, wm); #c1(ENTPD6) c2(XP_011527701) c3(ectonucleoside triphosphate diphosphohydrolase 6 isoform X9) c4(322640, 322641, 322642) c5(322643, 322644, 322645, 322646, 322647, 322648) c6( ) c7(wu, wm); #c1(ENTPD6) c2(XP_011527702) c3(ectonucleoside triphosphate diphosphohydrolase 6 isoform X10) c4(322649) c5(322650, 322651, 322652, 322653, 322654, 322655, 322656, 322657, 322658, 322659, 322660, 322661, 322662, 322663, 322664, 322665, 322666, 322667) c6( ) c7(wu, wm); #c1(ENTPD6) c2(XP_011527703) c3(ectonucleoside triphosphate diphosphohydrolase 6 isoform X11) c4( ) c5(322668, 322669, 322670, 322671, 322672, 322673, 322674, 322675, 322676, 322677, 322678, 322679, 322680, 322681, 322682, 322683, 322684) c6( ) c7(wu, wm); #c1(ENTPD7) c2(NP_065087) c3(ectonucleoside triphosphate diphosphohydrolase 7) c4(203831) c5(203832, 203833, 203834, 203835, 203836, 203837) c6( ) c7(af); #c1(EOGT) c2(NP_001265618) c3(EGF domain-specific O-linked N-acetylglucosamine transferase isoform a precursor) c4(98994, 98995, 98996, 98997) c5(98998, 98999, 99000, 99001, 99002, 99003, 99004, 99005, 99006, 99007, 99008, 99009, 99010, 99011, 99012, 99013, 99014, 99015, 99016, 99017, 99018, 99019, 99020, 99021) c6(99022, 99023, 99024, 99025, 99026, 99027) c7(afG, bmn); #c1(EOGT) c2(NP_775925) c3(EGF domain-specific O-linked N-acetylglucosamine transferase isoform b precursor) c4(250725) c5(250726, 250727, 250728, 250729, 250730, 250731, 250732, 250733) c6(250734, 250735) c7(afG, bmn); #c1(EOGT) c2(XP_011531904) c3(EGF domain-specific O-linked N-acetylglucosamine transferase isoform X2) c4(327940) c5( ) c6( ) c7(afG, bmn); #c1(EOGT) c2(XP_011531907) c3(EGF domain-specific O-linked N-acetylglucosamine transferase isoform X5) c4( ) c5(327941, 327942, 327943, 327944, 327945, 327946, 327947, 327948, 327949, 327950, 327951, 327952, 327953, 327954, 327955, 327956) c6(327957, 327958, 327959, 327960) c7(afG, bmn); #c1(EOMES) c2(NP_001265111) c3(eomesodermin homolog isoform 1) c4(97788, 97789, 97790) c5(97791, 97792, 97793, 97794, 97795, 97796, 97797, 97798, 97799, 97800, 97801, 97802) c6( ) c7(c, wu, CM, KY, Ej, Io, dL, fr, wm, QK, V, eL, cd); #c1(EOMES) c2(NP_001265112) c3(eomesodermin homolog isoform 3) c4( ) c5(97803, 97804, 97805, 97806, 97807, 97808) c6( ) c7(c, wu, CM, KY, Ej, Io, dL, fr, wm, QK, V, eL, cd); #c1(EOMES) c2(NP_005433) c3(eomesodermin homolog isoform 2) c4(156136) c5(156137, 156138, 156139, 156140, 156141, 156142, 156143) c6( ) c7(c, wu, CM, KY, Ej, Io, dL, fr, wm, QK, V, eL, cd); #c1(EP300) c2(NP_001420) c3(histone acetyltransferase P300) c4(117723) c5( ) c6( ) c7(T, fM, id, jh, cz, bB, v, ci, C, q, ad, x, ft, bmp, qK, aT, IG, dz, dL, K, jo, bq, ae, bmo, d, mR, iU, aCM, iZ, aW, Y, ff, fc, eZ, r, vs, aF, en, cl, t, bw, bz, all, ck, Hw, eM, Ip, bE, QQ, DW, vy, hL, gZ, Lo, k, m, cP, Km, bt, it, B); #c1(EP300) c2(XP_006724228) c3(histone acetyltransferase P300 isoform X1) c4( ) c5(295863, 295864, 295865, 295866, 295867, 295868, 295869, 295870) c6( ) c7(T, fM, id, jh, cz, bB, v, ci, C, q, ad, x, ft, bmp, qK, aT, IG, dz, dL, K, jo, bq, ae, bmo, d, mR, iU, aCM, iZ, aW, Y, ff, fc, eZ, r, vs, aF, en, cl, t, bw, bz, all, ck, Hw, eM, Ip, bE, QQ, DW, vy, hL, gZ, Lo, k, m, cP, Km, bt, it, B); #c1(EP400) c2(NP_056224) c3(EIA-binding protein P400) c4(186489, 186490, 186491, 186492, 186493, 186494, 186495, 186496, 186497, 186498, 186499, 186500, 186501, 186502) c5(186503, 186504, 186505, 186506, 186507, 186508, 186509, 186510, 186511, 186512, 186513, 186514, 186515, 186516, 186517, 186518, 186519, 186520, 186521, 186522, 186523, 186524, 186525, 186526, 186527, 186528, 186529, 186530, 186531, 186532, 186533, 186534, 186535, 186536, 186537, 186538, 186539, 186540, 186541, 186542, 186543, 186544, 186545, 186546, 186547, 186548, 186549, 186550, 186551, 186552, 186553, 186554, 186555, 186556, 186557, 186558, 186559, 186560, 186561, 186562, 186563, 186564, 186565, 186566, 186567, 186568, 186569, 186570, 186571, 186572, 186573, 186574, 186575, 186576, 186577, 186578, 186579, 186580, 186581, 186582, 186583, 186584, 186585, 186586, 186587, 186588, 186589) c6( ) c7(B, bP, jE, bmq, bt, q); #c1(EPAS1) c2(NP_001421) c3(endothelial PAS domain-containing protein 1) c4(117724, 117725) c5(117726, 117727, 117728, 117729, 117730, 117731, 117732, 117733, 117734, 117735, 117736, 117737, 117738) c6( ) c7(gx, T, kh, sw, if, jh, aA, bB, hy, j, ci, fr, bkU, q, ad, eA, Hr, x, iu, oT, ft, py, aE, yw, oW, aT, dL, bmr, K, sR, pk, ae, azh, eu, DA, aW, Y, anx, ff, cr, r, bmu, aq, vt, aF, zC, en, g, as, LV, t, fq, bz, cm, iR, ck, es, ou, iO, y, kP, eM, iA, bE, X, bmt, k, Hb, m, GF, IG, bt, bms, B, VB); #c1(EPB41L1) c2(NP_001245258) c3(band 4.1-like protein 1 isoform c) c4(92909) c5(92910, 92911, 92912, 92913, 92914, 92915, 92916) c6( ) c7(bmv, n, T); #c1(EPB41L1) c2(NP_001245259) c3(band 4.1-like protein 1 isoform d) c4(92917, 92918) c5(92919, 92920, 92921, 92922, 92923, 92924, 92925, 92926, 92927, 92928, 92929, 92930, 92931, 92932, 92933, 92934, 92935, 92936, 92937, 92938, 92939, 92940, 92941, 92942, 92943) c6( ) c7(bmv, n, T); #c1(EPB41L1) c2(NP_036288) c3(band 4.1-like protein 1 isoform a) c4(172854) c5(172855, 172856, 172857, 172858, 172859, 172860) c6( ) c7(bmv, n, T); #c1(EPB41L1) c2(XP_011526966) c3(band 4.1-like protein 1 isoform X1) c4(321268) c5( ) c6( ) c7(bmv, n, T); #c1(EPB41L1) c2(XP_011526969) c3(band 4.1-like protein 1 isoform X4) c4( ) c5(321269, 321270, 321271, 321272, 321273, 321274) c6( ) c7(bmv, n, T); #c1(EPB41L1) c2(XP_011526970) c3(band 4.1-like protein 1 isoform X5) c4(321275, 321276) c5( ) c6( ) c7(bmv, n, T); #c1(EPB41L1) c2(XP_011526975) c3(band 4.1-like protein 1 isoform X7) c4(321277) c5(321278) c6( ) c7(bmv, n, T); #c1(EPB41L1) c2(XP_011526979) c3(band 4.1-like protein 1 isoform X11) c4( ) c5(321279, 321280, 321281, 321282, 321283) c6( ) c7(bmv, n, T); #c1(EPB41L1) c2(XP_011526982) c3(band 4.1-like protein 1 isoform X14) c4(321284) c5(321285, 321286, 321287, 321288, 321289, 321290, 321291, 321292, 321293, 321294) c6( ) c7(bmv, n, T); #c1(EPB41L1) c2(XP_011526983) c3(band 4.1-like protein 1 isoform X15) c4(321295) c5( ) c6( ) c7(bmv, n, T); #c1(EPB41L1) c2(XP_011526985) c3(band 4.1-like protein 1 isoform X17) c4(321296) c5(321297, 321298, 321299, 321300, 321301, 321302) c6( ) c7(bmv, n, T); #c1(EPB41L1) c2(XP_011526986) c3(band 4.1-like protein 1 isoform X18) c4(321303) c5(321304, 321305, 321306, 321307, 321308, 321309, 321310, 321311, 321312, 321313) c6( ) c7(bmv, n, T); #c1(EPB41L1) c2(XP_011526987) c3(band 4.1-like protein 1 isoform X19) c4(321314) c5( ) c6( ) c7(bmv, n, T); #c1(EPB41L1) c2(XP_011526988) c3(band 4.1-like protein 1 isoform X20) c4(321315, 321316) c5(321317, 321318, 321319, 321320, 321321, 321322, 321323, 321324, 321325, 321326, 321327, 321328, 321329, 321330, 321331, 321332, 321333, 321334, 321335, 321336, 321337, 321338, 321339, 321340, 321341, 321342) cG( ) c7(bmv, n, T); #c1(EPB41L2) c2(NP_001129026) c3(band 4.1-like protein 2 isoform b) c4(50636) c5(50637, 50638, 50639, 50640, 50641, 50642, 50643, 50644, 50645, 50646, 50647, 50648, 50649, 50650, 50651, 50652, 50653, 50654, 50655, 50656, 50657, 50658, 50659, 50660, 50661, 50662, 50663, 50664, 50665, 50666, 50667, 50668, 50669, 50670, 50671, 50672, 50673, 50674, 50675, 50676) c6( ) c7(EQ, pN); #c1(EPB41L2) c2(NP_001422) c3(band 4.1-like protein 2 isoform a) c4(117739, 117740) c5(117741, 117742, 117743, 117744, 117745, 117746, 117747, 117748, 117749, 117750, 117751, 117752, 117753, 117754, 117755, 117756) c6( ) c7(EQ, pN); #c1(EPB41L2) c2(XP_006715425) c3(band 4.1-like protein 2 isoform X10) c4(289531) c5( ) c6( ) c7(EQ, pN); #c1(EPB41L2) c2(XP_011533824) c3(band 4.1-like protein 2 isoform X3) c4(329982) c5( ) c6( ) c7(EQ, pN); #c1(EPB41L2) c2(XP_011533826) c3(band 4.1-like protein 2 isoform X5) c4(329983, 329984) c5(329985, 329986, 329987, 329988, 329989, 329990, 329991, 329992, 329993, 329994, 329995, 329996) c6( ) c7(EQ, pN); #c1(EPB41L2) c2(XP_011533832) c3(band 4.1-like protein 2 isoform X1) c4(329997) c5(329998, 329999, 330000, 330001, 330002, 330003, 330004, 330005, 330006, 330007, 330008, 330009) c6( ) c7(EQ, pN); #c1(EPB41L2) c2(XP_011533833) c3(band 4.1-like protein 2 isoform X11) c4(330010, 330011) c5( ) c6( ) c7(EQ, pN); #c1(EPB41L2) c2(XP_011533834) c3(band 4.1-like protein 2 isoform X12) c4( ) c5(330012) c6( ) c7(EQ, pN); #c1(EPB41L2) c2(XP_011533835) c3(band 4.1-like protein 2 isoform X13) c4(330013) c5( ) c6( ) c7(EQ, pN); #c1(EPB41L2) c2(XP_011533836) c3(band 4.1-like protein 2 isoform X2) c4(330014, 330015) c5(330016, 330017, 330018, 330019, 330020, 330021, 330022, 330023, 330024, 330025) c6( ) c7(EQ, pN); #c1(EPB41L3) c2(NP_001268462) c3(band 4.1-like protein 3 isoform 2) c4( ) c5(99977, 99978, 99979, 99980, 99981, 99982) c6( ) c7(T, oe, vr, j, ci, fr, ad, ip, iC, av, ft, py, Fo, aT, ae, aiV, aW, g, zE, t, bz, Ew, c, eM, dB, m, iu); #c1(EPB41L3) c2(NP_001268463) c3(band 4.1-like protein 3 isoform 3) c4(99983, 99984) c5(99985, 99986, 99987, 99988, 99989, 99990, 99991, 99992, 99993) c6( ) c7(T, oe, vr, j, ci, fr, ad, ip, iC, av, ft, py, Fo, aT, ae, aiV, aW, g, zE, t, bz, Ew, c, eM, dB, m, iu); #c1(EPB41L3) c2(NP_001268464) c3(band 4.1-like protein 3 isoform 4) c4( ) c5(99994, 99995, 99996, 99997, 99998, 99999, 100000, 100001) c6( ) c7(T, oe, vr, j, ci, fr, ad, ip, iC, av, ft, py, Fo, aT, ae, aiV, aW, g, zE, t, bz, Ew, c, eM, dB, m, iu); #c1(EPB41L3) c2(NP_036439) c3(band 4.1-like protein 3 isoform 1) c4(173874) c5(173875, 173876, 173877, 173878, 173879, 173880, 173881, 173882, 173883, 173884) c6( ) c7(T, oe, vr, j, ci, fr, ad, ip, iC, av, ft, py, Fo, aT, ae, aiV, aW, g, zE, t, bz, Ew, c, eM, dB, m, iu); #c1(EPB41L3) c2(XP_011523920) c3(band 4.1-like protein 3 isoform X9) c4(318444) c5( ) c6( ) c7(T, oe, vr, j, ci, fr, ad, ip, iC, av, ft, py, Fo, aT, ae, aiV, aW, g, zE, t, bz, Ew, c, eM, dB, m, iu); #c1(EPB41L3) c2(XP_011523925) c3(band 4.1-like protein 3 isoform X14) c4(318445) c5( ) c6( ) c7(T, oe, vr, j, ci, fr, ad, ip, iC, av, ft, py, Fo, aT, ae, aiV, aW, g, zE, t, bz, Ew, c, eM, dB, m, iu); #c1(EPB41L3) c2(XP_011523926) c3(band 4.1-like protein 3 isoform X15) c4(318446) c5(318447, 318448, 318449, 318450, 318451, 318452) c6( ) c7(T, oe, vr, j, ci, fr, ad, ip, iC, av, ft, py, Fo, aT, ae, aiV, aW, g, zE, t, bz, Ew, c, eM, dB, m, iu); #c1(EPB41L3) c2(XP_011523928) c3(band 4.1-like protein 3 isoform X17) c4( ) c5(318453, 318454, 318455, 318456, 318457, 318458) c6( ) c7(T, oe, vr, j, ci, fr, ad, ip, iC, av, ft, py, Fo, aT, ae, aiV, aW, g, zE, t, bz, Ew, c, eM, dB, m, iu); #c1(EPB41L3) c2(XP_011523930) c3(band 4.1-like protein 3 isoform X19) c4(318459) c5( ) c6( ) c7(T, oe, vr, j, ci, fr, ad, ip, iC, av, ft, py, Fo, aT, ae, aiV, aW, g, zE, t, bz, Ew, c, eM, dB, m, iu); #c1(EPB41L3) c2(XP_011523939) c3(band 4.1-like protein 3 isoform X28) c4( ) c5(318460, 318461, 318462, 318463, 318464) c6( ) c7(T, oe, vr, j, ci, fr, ad, ip, iC, av, ft, py, Fo, aT, ae, aiV, aW, g, zE, t, bz, Ew, c, eM, dB, m, iu); #c1(EPB41L4A) c2(NP_071423) c3(band 4.1-like protein 4A) c4(211590) c5(211591, 211592, 211593, 211594, 211595, 211596) c6( ) c7(W); #c1(EPB41L4B) c2(NP_060894) c3(band 4.1-like protein 48 isoform 1) c4(198432, 198433) c5(198434, 198435, 198436, 198437, 198438, 198439, 198440, 198441, 198442, 198443, 198444, 198445) c6( ) c7(T, aW, aT, n, ae, ad); #c1(EPB41L4B) c2(NP_061987) c3(band 4.1-like protein 48 isoform 2) c4(201774, 201775) c5(201776, 201777, 201778, 201779, 201780, 201781, 201782, 201783, 201784, 201785, 201786, 201787) c6( ) c7(T, aW, aT, n, ae, ad); #c1(EPB42) c2(NP_001107606) c3(erythrocyte membrane protein band 4.2 isoform 2) c4(42903, 42904) c5(42905, 42906, 42907, 42908, 42909, 42910, 42911, 42912, 42913, 42914, 42915, 42916) c6( ) c7(Cl, Fm, VJ, S, bmw); #c1(EPB42) c2(XP_011519653) c3(erythrocyte membrane protein band 4.2 isoform X1) c4(314318) c5(314319, 314320, 314321, 314322, 314323, 314324) c6( ) c7(Cl, Em, VJ, S, bmw); #c1(EPB42) c2(XP_011519654) c3(erythrocyte membrane protein band 4.2 isoform X2) c4(314325) c5(314326, 314327, 314328, 314329, 314330, 314331) c6( ) c7(Cl, Em, VJ, S, bmw); #c1(EPC1) c2(NP_001258933) c3(enhancer of polycomb homolog 1 isoform b) c4(96807) c5(96808, 96809, 96810, 96811, 96812, 96813) c6( ) c7(ck, je, iM, afS, Th, bt); #c1(EPC1) c2(NP_001269320) c3(enhancer of polycomb homolog 1 isoform d) c4(101118) c5(101119, 101120, 101121, 101122, 101123, 101124) c6( ) c7(ck, je, iM, afS, Th, bt); #c1(EPC1) c2(NP_079485) c3(enhancer of polycomb homolog 1 isoform a) c4(218317) c5(218318, 218319, 218320, 218321, 218322, 218323) c6( ) c7(ck, je, iM, afS, Th, bt); #c1(EPC2) c2(NP_056445) c3(enhancer of polycomb homolog 2) c4(187573) c5(187574, 187575, 187576, 187577, 187578, 187579) c6( ) c7(ck, ht, bt, it, af); #c1(EPCAM) c2(NP_002345) c3(epithelial cell adhesion molecule precursor) c4(127690) c5(127691, 127692, 127693, 127694, 127695, 127696) c6( ) c7(T, aC, pf, if, fd, bB, ci, aE, K, hu, eL, xQ, zQ, aW, LZ, nY, NR, g, eM, nB, m, ht, NT, n, fr, gN, bmA, zP, eW, b, ju, dL, PX, aq, kp, kk, iO, bP, hL, nz, it, B, dA, KR, bmz, jx, aA, hz, bmx, g, mj, aT, rO, Ex, ae, s, vT, NE, oV, Y, bmy, r, en, cl, t, iK, nM, arh, oH, ad, fU, av, hd, Db, NS, oW, aeL, nJ, BO, ff, aF, aot, iR, bz, bE, X, i, iu); #c1(EPDR1) c2(NP_060019) c3(mammalian ependymin-related protein 1 isoform 1 precursor) c4(193689, 193690) c5(193691, 193692, 193693, 193694, 193695, 193696, 193697, 193698, 193699, 193700, 193701, 193702, 193703, 193704, 193705, 193706) c6(193707, 193708, 193709, 193710) c7(aw, ad); #c1(EPG5) c2(NP_066015) c3(ectopic P granules protein 5 homolog) c4(206730, 206731, 206732) c5(206733, 206734, 206735, 206736, 206737, 206738, 206739, 206740, 206741, 206742, 206743, 206744, 206745, 206746, 206747, 206748, 206749, 206750) c6( ) c7(T, cc, aW, oV, ff, ht, al r, fZ, en, q, bmB); #c1(EPGN) c2(NP_001257918) c3(epigen isoform 1 precursor) c4(95803) c5(95804, 95805, 95806, 95807, 95808, 95809, 95810, 95811) c6(95812, 95813) c7(fq, qe, ER); #c1(EPGN) c2(XP_005265723) c3(epigen isoform X2) c4(279676) c5(279677, 279678, 279679, 279680, 279681, 279682, 279683, 279684) c6(279685, 279686) c7(fq, qe, ER); #c1(EPHA1) c2(NP_005223) c3(ephrin type-A receptor 1 precursor) c4(154194) c5(154195, 154196, 154197, 154198, 154199, 154200) c6( ) c7(T, kh, fM, yk, NT, qy, fZ, bB, jh, ci, bjz, Qo, q, eA, x, iu, bmC, aT, hn, af, d, s, aW, Y, ff, r, aq, yq, en, g, Qt, zV, c, bE, hk, gX, cj, k, hE, B, y); #c1(EPHA3) c2(NP_005224) c3(ephrin type-A receptor 3 isoform a precursor) c4(154201) c5(154202, 154203, 154204, 154205, 154206, 154207) c6( ) c7(lI, cZ, T, aC, ha, oA, akz, aA, bB, ajM, jh, Vd, Kh, ci, fr, hF, eA, akE, lF, bv, av, aT, h, hn, K, dd, pk, yj, mu, jf, nP, d, aW, Y, lW, eH, akB, aF, g, eF, t, cm, bz, HT, c, bE, bmD, afd, hr, k, m, bmE, zB, B, EB); #c1(EPHA3) c2(NP_872585) c3(ephrin type-A receptor 3 isoform b precursor) c4(256429) c5(256430, 256431, 256432, 256433, 256434, 256435) c6( ) c7(lI, cZ, T, aC, ha, oA, akz, aA, bB, ajM, jh, Vd, Kh, ci, fr, hF, eA, akE, lF, bv, av, aT, h, hn, K, dd, pk, yj, mu, jf, nP, d, aW, Y, lW, eH, akB, aF, g, eF, t, cm, bz, HT, c, bE, bmD, afd, hr, k, m, bmE, zB, B, EB); #c1(EPHA4) c2(NP_001291465) c3(ephrin type-A receptor 4 isoform a precursor) c4(116117, 116118, 116119, 116120, 116121) c5(116122, 116123, 116124, 116125, 116126, 116127, 116128, 116129, 116130, 116131, 116132, 116133, 116134, 116135, 116136, 116137, 116138) c6( ) c7(T, uO, ci, eA, ad, q, aE, h, lQ, an, bmG, ae, bmE, cp, d, Y, hI, r, kp, g, bz, Hv, iq, eU, c, iu); #c1(EPHA4) c2(NP_001291466) c3(ephrin type-A receptor 4 isoform b) c4(116139) c5(116140, 116141, 116142, 116143, 116144, 116145) c6( ) c7(T, uO, ci, eA, ad, q, aE, h, lQ, an, bmG, ae, bmE, cp, d, Y, hI, r, kp, g, bz, Hv, iq, eU, c, iu); #c1(EPHA4) c2(XP_005246431) c3(ephrin type-A receptor 4 isoform X1) c4( ) c5(267100, 267101, 267102, 267103, 267104, 267105, 267106, 267107, 267108, 267109, 267110, 267111) c6( ) c7(T, uO, ci, eA, ad, g, aE, h, lQ, an, bmG, ae, bmE, cp, d, Y, hI, r, kp, g, bz, Hv, iq, eU, c, iu); #c1(EPHA5) c2(NP_001268694) c3(ephrin type-A receptor 5 isoform c) c4(100140) c5( ) c6( ) c7(Pt, aW, eA, Pg, aT); #c1(EPHA5) c2(NP_001268696) c3(ephrin type-A receptor 5 isoform e) c4( ) c5(100141, 100142, 100143, 100144, 100145, 100146) c6( ) c7(Pt, aW, eA, Pg, aT); #c1(EPHA5) c2(NP_004430) c3(ephrin type-A receptor 5 isoform a) c4(146274) c5(146275, 146276, 146277, 146278, 146279, 146280) c6( ) c7(Pt, aW, eA, Pg, aT); #c1(EPHA5) c2(NP_872272) c3(ephrin type-A receptor 5 isoform b) c4(255989) c5(255990, 255991, 255992, 255993, 255994, 255995) c6( ) c7(Pt, aW, eA, Pg, aT); #c1(EPHA6) c2(NP_001073917) c3(ephrin type-A receptor 6 isoform a) c4(36513) c5(36514, 36515, 36516, 36517, 36518, 36519) c6( ) c7(v, j, agl); #c1(EPHA6) c2(NP_001265229) c3(ephrin type-A receptor 6 isoform c) c4(98006) c5( ) c6( ) c7(v, j, agl); #c1(EPHA6) c2(NP_001265230) c3(ephrin type-A receptor 6 isoform d) c4(98007) c5(98008, 98009, 98010, 98011, 98012, 98013) c6( ) c7(v, j, agl); #c1(EPHA6) c2(NP_775926) c3(ephrin type-A receptor 6 isoform b) c4(250736) c5(250737, 250738, 250739, 250740, 250741, 250742, 250743, 250744, 250745, 250746, 250747) c6( ) c7(v, j, agl); #c1(EPHA6) c2(XP_006713655) c3(ephrin type-A receptor 6 isoform X1) c4( ) c5(287271) c6( ) c7(v, j, agl); #c1(EPHA7) c2(NP_001275559) c3(ephrin type-A receptor 7 isoform 3 precursor) c4( ) c5(106843, 106844, 106845, 106846, 106847, 106848) c6( ) c7(ae, T, ft, d, fM, bE, eX, uO, r, bB, eV, jh, ci, hF, bmG, bz, q, ad); #c1(EPHA7) c2(NP_004431) c3(ephrin type-A receptor 7 isoform 1 precursor) c4(146281, 146282) c5(146283, 146284, 146285, 146286, 146287, 146288) c6( ) c7(ae, T, ft, d, fM, bE, eX, uO, r, bB, eV, jh, ci, hF, bmG, bz, q, ad); #c1(EPHB1) c2(NP_004432) c3(ephrin type-B receptor 1 precursor) c4(146289, 146290) c5(146291, 146292, 146293, 146294, 146295, 146296) c6( ) c7(bL, T, PY, ht, DV, bO, aA, cz, oR, jh, bS, j, et, aBI, ci, ww, g, eA, ft, afm, iX, pX, an, gE, blD, tb, ff, r, aF, en, Z, Qt, aFA, ok, Ew, ac, cA, eB, VB, uz, yH, y, jd, FI, B, hv); #c1(EPHB1) c2(XP_011510843) c3(ephrin type-B receptor 1 isoform X2) c4( ) c5(301297, 301298, 301299, 301300, 301301, 301302) c6( ) c7(bL, T, PY, ht, DV, bO, aA, cz, oR, jh, bS, j, et, aBI, ci, ww, q, eA, ft, afm, iX, pX, an, qE, bID, tb, ff, r, aF, en, Z, Qt, aFA, ok, Ew, ac, cA, eB, VB, uz, yH, y, jd, FI, B, hv); #c1(EPHB3) c2(NP_004434) c3(ephrin type-B receptor 3 precursor) c4(146297) c5(146298, 146299, 146300, 146301, 146302, 146303) c6( ) c7(bF, T, s, pN, Qu, eM, ff, r, ci, en, ash, q); #c1(EPHB4) c2(NP_004435) c3(ephrin type-B receptor 4 precursor) c4(146304, 146305) c5(146306, 146307, 146308, 146309, 146310, 146311, 146312, 146313, 146314, 146315, 146316, 146317) c6( ) c7(T, jh, aA, bB, ci, qN, Cb, tK, q, ad, eA, x, av, ib, aE, kI, aT, dL, hu, ae, vI, eL, Qe, qw, A, IR, LG, aW, ff, r, aq, aF, yq, en, cI, t, iK, bz, ck, bE, nM, bE, dy, m, k, it, B); #c1(EPHB6) c2(NP_001267724) c3(ephrin type-B receptor 6 isoform b) c4(99665) c5( ) c6( ) c7(T, n, aj, Gn, J, hX, iu, aT, h, aW, Y, oV, apn, ag, Ej, cm, bz, iO, eM, cj, PV, rH, im, rA, B); #c1(EPHBG) c2(XP_011544811) c3(ephrin type-B receptor 6 isoform X1) c4(343837) c5(343838, 343839, 343840, 343841, 343842, 343843, 343844, 343845, 343846, 343847, 343848, 343849, 343850, 343851, 343852, 343853) c6( ) c7(T, n, aj, Gn, J, hX, iu, aT, h, aW, Y, oV, apn, aq, Ej, cm, bz, iO, eM, cj, PV, rH, im, rA, B); #c1(EPHX1) c2(NP_000111) c3(epoxide hydrolase 1) c4(1852, 1853, 1854) c5(1855, 1856, 1857, 1858, 1859, 1860, 1861, 1862, 1863, 1864, 1865, 1866, 1867, 1868, 1869, 1870, 1871, 1872, 1873, 1874, 1875, 1876) c6( ) c7(bM, T, fR, if, hE, eh, bB, fd, ci, fw, sD, x, K, hu, eL, xa, aAX, zQ, aW, Az, hi, aaD, uC, yd, eM, Gs, cj, uo, k, m, sQ, aw, ht, aBx, qN, pM, zP, zw, eV, Gw, dL, ny, aq, W, dB, Qu, at, ut, eQ, it, B, bL, EM, jx, eX, aA, hy, j, bX, q, aT, an, ae, kI, s, r, en, t, ck, fD, rA, bt, anh, hS, Gl, am, id, iW, ha, jh, Gn, jE, fu, ad, hX, dP, av, F, ib, oW, IQ, ff, aF, bz, bmH, TA, gk, Zi, bE, pP, Gu, lC, X, rk); #c1(EPHX2) c2(NP_001243411) c3(bifunctional epoxide hydrolase 2 isoform b) c4( ) c5(90713, 90714, 90715, 90716, 90717, 90718, 90719, 90720, 90721, 90722, 90723) c6( ) c7(bL, bM, dD, eR, fR, sQ, mr, ea, iW, e, cz, n, BH, aj, j, hy, eq, cd, J, ad, dY, ec, iX, M, dL, ey, 10, ae, eu, BN, cH, r, iy, eK, cl, ac, hc, dh, cj, uo, at, ut, IS, ei, lC, ne); #c1(EPHX2) c2(NP_001970) c3(bifunctional epoxide hydrolase 2 isoform a) c4(122729, 122730, 122731, 122732) c5(122733, 122734, 122735, 122736, 122737, 122738, 122739, 122740, 122741, 122742, 122743, 122744, 122745) c6( ) c7(bL, bM, dD, eR, fR, sQ, mr, ea, iW, e, cz, n, BH, aj, j, hy, eq, cd, J, ad, dY, ec, iX, M, dL, ey, IQ, ae, eu, BN, cH, r, iy, eK, cI, ac, hc, dh, cj, uo, at, ut, IS, ei, IC, ne); #c1(EPHX3) c2(NP_001136358) c3(epoxide hydrolase 3 precursor) c4(54859) c5(54860, 54861, 54862, 54863, 54864, 54865, 54866, 54867, 54868, 54869, 54870, 54871, 54872, 54873) c6(54874, 54875, 54876, 54877) c7(Kd, T, dt, hi, Ke, aA, n, Vd, Kh, jX, PJ, ci, fr, eA, ad, ip, aaF, jz, hb, aT, bK, K, bU, ae, aW, Y, yx, as, bz, op, dS, bF, Ew, jV, c, iA, vA, U, B); #c1(EPM2A) c2(NP_001018051) c3(laforin isoform b) c4(26944, 26945) c5(26946, 26947, 26948, 26949, 26950, 26951, 26952, 26953, 26954, 26955, 26956, 26957) c6( ) c7(T, yr, d, ajm, ha, U, jh, yT, yZ, yX, K, yA, yU, xg, xt); #c1(EPM2A) c2(NP_005661) c3(laforin isoform a) c4(158354, 158355) c5(158356, 158357, 158358, 158359, 158360, 158361, 158362, 158363, 158364, 158365, 158366, 158367) c6( ) c7(T, yr, d, ajm, ha, U, jh, yT, yZ, yX, K, yA, yU, xg, xt); #c1(EPM2A) c2(XP_011534416) c3(laforin isoform X2) c4(330921, 330922) c5(330923, 330924, 330925, 330926, 330927, 330928, 330929, 330930, 330931, 330932, 330933, 330934) c6( ) c7(T, yr, d, ajm, ha, U, jh, yT, yZ, yX, K, yA, yU, xg, xt); #c1(EPM2AIP1) c2(NP_055620) c3(EPM2A-interacting protein 1) c4(182315) c5(182316, 182317, 182318, 182319, 182320, 182321) c6( ) c7(yU, yT, v, yZ, aT); #c1(EPN1) c2(NP_001123543) c3(epsin-1 isoform a) c4(47467) c5(47468, 47469, 47470, 47471, 47472, 47473, 47474) c6( ) c7(T); #c1(EPN1) c2(NP_037465) c3(epsin-1 isoform c) c4(175642) c5(175643, 175644, 175645, 175646, 175647, 175648, 175649) c6( ) c7(T); #c1(EPN1) c2(XP_005258886) c3(epsin-1 isoform X1) c4(275851) c5(275852, 275853, 275854, 275855, 275856, 275857) c6( ) c7(T); #c1(EPN1) c2(XP_005258887) c3(epsin-1 isoform X2) c4(275858) c5(275859, 275860, 275861, 275862, 275863, 275864) c6( ) c7(T); #c1(EPO) c2(NP_000790) c3(erythropoietin precursor) c4(15789) c5(15790, 15791, 15792, 15793, 15794, 15795, 15796, 15797, 15798, 15799, 15800, 15801, 15802, 15803, 15804, 15805, 15806, 15807, 15808, 15809, 15810, 15811, 15812, 15813, 15814, 15815, 15816, 15817, 15818, 15819, 15820, 15821, 15822, 15823, 15824, 15825, 15826, 15827, 15828, 15829, 15830, 15831, 15832, 15833, 15834, 15835, 15836, 15837, 15838, 15839, 15840, 15841, 15842, 15843, 15844, 15845, 15846, 15847, 15848, 15849, 15850, 15851, 15852, 15853, 15854, 15855, 15856, 15857, 15858, 15859, 15860, 15861, 15862, 15863, 15864, 15865, 15866, 15867, 15868, 15869, 15870, 15871, 15872, 15873, 15874, 15875, 15876, 15877, 15878, 15879, 15880, 15881, 15882, 15883, 15884, 15885, 15886, 15887, 15888, 15889, 15890, 15891, 15892, 15893, 15894, 15895, 15896, 15897, 15898, 15899, 15900, 15901, 15902, 15903, 15904, 15905, 15906, 15907, 15908, 15909, 15910, 15911, 15912, 15913, 15914, 15915, 15916, 15917, 15918, 15919, 15920, 15921, 15922, 15923, 15924, 15925, 15926, 15927, 15928, 15929, 15930, 15931, 15932, 15933, 15934, 15935, 15936, 15937, 15938, 15939, 15940, 15941, 15942, 15943, 15944, 15945, 15946, 15947, 15948, 15949, 15950, 15951, 15952, 15953, 15954, 15955, 15956, 15957, 15958, 15959, 15960, 15961, 15962, 15963, 15964, 15965, 15966, 15967, 15968, 15969, 15970, 15971, 15972, 15973, 15974, 15975, 15976, 15977, 15978, 15979, 15980, 15981, 15982, 15983, 15984, 15985, 15986, 15987, 15988, 15989, 15990, 15991, 15992, 15993, 15994, 15995, 15996, 15997, 15998, 15999, 16000, 16001, 16002, 16003, 16004, 16005, 16006, 16007, 16008, 16009, 16010, 16011, 16012, 16013, 16014, 16015, 16016, 16017, 16018, 16019, 16020, 16021, 16022, 16023, 16024, 16025, 16026, 16027, 16028, 16029, 16030, 16031, 16032, 16033, 16034, 16035, 16036, 16037, 16038, 16039, 16040, 16041, 16042, 16043, 16044, 16045, 16046, 16047, 16048, 16049, 16050, 16051, 16052, 16053, 16054, 16055, 16056, 16057, 16058, 16059, 16060, 16061, 16062, 16063, 16064, 16065, 16066, 16067) c6(16068, 16069, 16070, 16071, 16072) c7(T, if, e, qx, hE, fd, Vd, ci, aY, aR, ip, bmL, x, wM, fm, aeO, M, dV, K, hm, LQ, CG, aW, qS, fc, aoD, eE, cm, bw, bml, wT, eM, aNv, nB, iA, vA, wB, U, cj, vy, QF, dW, nw, mk, k, m, R, pw, IS, CI, qm, Re, aZt, cZ, aw, n, aj, fr, qN, aCQ, bkU, eh, cd, hr, eW, ke, Mo, jz, cc, pe, BR, bmN, qI, h, lG, eV, DU, dd, vx, cY, OV, A, fe, aq, kp, pm, hq, iO, ok, GU, bmP, dB, xO, kz, eD, hL, at, E, pg, ER, cB, B, bL, Ik, dA, eR, kA, jx, eX, cz, wo, GC, hy, v, j, V, q, J, eA, eJ, oT, Rl, yw, hb, HC, aT, yu, cy, dz, ae, eu, sb. Uf, iU, oV, Y, atI, r, en, t, iK, ck, bmS, BU, rR, ac, c, pZ, baO, bmR, fP, mf, dy, Mn, oX, bt, VB, an, vi, hS, bmQ, ob, qb, acI, bs, bmJ, oZ, fu, tK, vN, ad, bmK, dP, fU, iC, CJ, F, ib, alp, py, yt, oz, arV, lC, oW, iY, bmM, d, lR, et, ff, kD, yy, VI, S, avG, aot, iR, dr, eK, bF, es, D, alm, age, qe, pc, bmO, gZ, aS, zk, vt, xg); #c1(EPOR) c2(NP_000112) c3(erythropoietin receptor precursor) c4(1877) c5(1878, 1879, 1880, 1881, 1882, 1883) c6( ) c7(G, T, eR, e, cz, fd, hy, j, ci, fr, bkU, eA, ad, bmL, md, dP, oT, iC, ib, jz, x, yt, HC, aT, oW, cy, dz, K, hS, ae, af, cY, jf, je, aW, Y, ff, en, avG, g, t, cm, pm, bw, ck, es, iO, YE, pc, eM, nB, dB, iA, iM, hL, pg, m, k, iu, VB, Ro); #c1(EPPIN) c2(NP_001289790) c3(eppin isoform 2 precursor) c4(114617) c5(114618, 114619, 114620, 114621, 114622, 114623, 114624) c6(114625) c7(gU); #c1(EPPIN) c2(NP_065131) c3(eppin isoform 1 precursor) c4(204092, 204093) c5(204094, 204095, 204096, 204097, 204098, 204099, 204100, 204101, 204102, 204103, 204104, 204105, 204106, 204107, 204108, 204109) c6(204110, 204111, 204112, 204113) c7(gU); #c1(EPPIN-WFDC6) c2(NP_001185915) c3(SPINLWI-WFDC6 fusion protein precursor) c4(76738) c5(76739, 76740, 76741, 76742, 76743, 76744, 76745, 76746, 76747, 76748, 76749, 76750, 76751, 76752) c6(76753, 76754, 76755, 76756) c7(gU); #c1(EPPK1) c2(XP_011515627) c3(epiplakin isoform X1) c4(308462, 308463) c5(308464, 308465, 308466, 308467, 308468, 308469, 308470, 308471, 308472, 308473, 308474, 308475) c6( ) c7(NI, aYD); #c1(EPRS) c2(NP_004437) c3(bifunctional glutamate/proline—tRNA ligase) c4(146318, 146319, 146320) c5(146321, 146322, 146323, 146324, 146325, 146326, 146327, 146328, 146329, 146330, 146331, 146332, 146333, 146334, 146335, 146336, 146337, 146338) c6( ) c7(dD, ea, e, ha, aw, gZ, cy, j, eq, QK); #c1(EPS15L1) c2(NP_001245303) c3(epidermal growth factor receptor substrate 15-like 1 isoform 1) c4(93050) c5(93051, 93052, 93053, 93054, 93055, 93056) c6( ) c7(V, B); #c1(EPS15L1) c2(NP_001245304) c3(epidermal growth factor receptor substrate 15-like 1 isoform 3) c4(93057) c5(93058, 93059, 93060, 93061, 93062, 93063) c6( ) c7(V, B); #c1(EPS15L1) c2(NP_001245305) c3(epidermal growth factor receptor substrate 15-like 1 isoform 4) c4(93064) c5(93065, 93066, 93067, 93068, 93069, 93070) c6( ) c7(V, B); #c1(EPS15L1) c2(NP_067058) c3(epidermal growth factor receptor substrate 15-like 1 isoform 2) c4(208774) c5(208775, 208776, 208777, 208778, 208779, 208780) c6( ) c7(V, B); #c1(EPS8) c2(XP_005253396) c3(epidermal growth factor receptor kinase substrate 8 isoform X3) c4(272454, 272455, 272456) c5(272457, 272458, 272459, 272460, 272461, 272462, 272463) c6( ) c7(T, jz, d, cF, yt, aW, ff, aT, hR, ci, m, nA, en, t, bN); #c1(EPS8) c2(XP_011518907) c3(epidermal growth factor receptor kinase substrate 8 isoform X2) c4(313284) c5(313285, 313286) c6( ) c7(T, jz, d, cF, yt, aW, ff, aT, hR, ci, m, nA, en, t, bN); #c1(EPS8) c2(XP_011518908) c3(epidermal growth factor receptor kinase substrate 8 isoform X1) c4(313287, 313288, 313289) c5(313290, 313291, 313292, 313293, 313294, 313295, 313296, 313297, 313298, 313299, 313300, 313301, 313302, 313303, 313304, 313305, 313306, 313307, 313308, 313309, 313310, 313311, 313312, 313313, 313314, 313315, 313316, 313317, 313318, 313319, 313320, 313321, 313322, 313323, 313324, 313325, 313326, 313327, 313328, 313329, 313330, 313331, 313332, 313333, 313334, 313335, 313336, 313337, 313338) c6( ) c7(T, jz, d, cF, yt, aW, ff, aT, hR, ci, m, nA, en, t, bN); #c1(EPS8L2) c2(NP_073609) c3(epidermal growth factor receptor kinase substrate 8-like protein 2) c4(213074, 213075, 213076, 213077, 213078, 213079) c5(213080, 213081, 213082, 213083, 213084, 213085, 213086, 213087, 213088, 213089, 213090, 213091, 213092, 213093, 213094, 213095, 213096, 213097, 213098, 213099, 213100, 213101, 213102, 213103, 213104, 213105, 213106, 213107, 213108, 213109, 213110, 213111, 213112, 213113, 213114, 213115, 213116, 213117, 213118, 213119, 213120, 213121213122, 213123) c6( ) c7(fe); #c1(EPSTI1) c2(NP_001002264) c3(epithelial-stromal interaction protein 1 isoform 1) c4(19505) c5(19506, 19507, 19508, 19509, 19510, 19511) c6( ) c7(aW, 1 aT); #c1(EPSTI1) c2(NP_150280) c3(epithelial- stromal interaction protein 1 isoform 2) c4(228022) c5(228023, 228024, 228025, 228026, 228027) c6( ) c7(aW, T, aT); #c1(EPSTI1) c2(XP_005266653) c3(epithelial-stromal interaction protein 1 isoform X1) c4( ) c5(280272) c6( ) c7(aW, T, aT); #c1(EPT1) c2(NP_277040) c3(ethanolaminephosphotransferase 1) c4(228779, 228780) c5(228781, 228782, 228783, 228784, 228785, 228786, 228787, 228788, 228789, 228790, 228791, 228792) c6( ) c7(qb, iO); #c1(EPX) c2(NP_000493) c3(eosinophil peroxidase preproprotein) c4(9916) c5(9917, 9918, 9919, 9920, 9921, 9922) c6( ) c7(T, eR, NT, bB, fr, bkU, q, ad, eA, Ro, x, oT, alp, fm, nW, cy, ae, d, IR, r, aq, pm, bw, ck, alm, bmU, c, dB, bE, eM, mf, k, Mn, B, bmT); #c1(EPYC) c2(NP_004941) c3(epiphycan precursor) c4(151310, 151311) c5(151312, 151313, 151314, 151315, 151316, 151317, 151318, 151319, 151320, 151321, 151322, 151323, 151324, 151325, 151326, 151327) c6(151328, 151329, 151330, 151331) c7(bmV, asg, Be); #c1(ERAL1) c2(NP_005693) c3(GTPase Era, mitochondrial) c4(158604, 158605) c5(158606, 158607, 158608, 158609, 158610, 158611) c6( ) c7(ai, aW, eZ, aT, cL, dy, cd, o); #c1(ERAP1) c2(NP_001185470) c3(endoplasmic reticulum aminopeptidase 1 isoform b precursor) c4(75674) c5(75675, 75676, 75677, 75678, 75679, 75680, 75681, 75682, 75683, 75684, 75685, 75686, 75687, 75688, 75689, 75690) c6( ) c7(T, jv, eX, bmW, cz, cL, qN, V, ai, q, o, wD, h, eV, hH, A, mR, cr, fe, Io, cl, uC, qa, Jr, AM, Tr); #c1(ERAP1) c2(NP_057526) c3(endoplasmic reticulum aminopeptidase 1 isoform a precursor) c4(191253) c5(191254, 191255, 191256, 191257, 191258, 191259) c6( ) c7(T, jv, eX, bmW, cz, cL, qN, V, ai, q, o, wD, h, eV, hH, A, mR, cr, fe, Io, cl, uC, qa, Jr, AM, Tr); #c1(ERAP1) c2(XP_011541787) c3(endoplasmic reticulum aminopeptidase 1 isoform X3) c4(340382) c5( ) c6( ) c7(T, jv, eX, bmW, cz, cL, qN, V, ai, q, o, wD, h, eV, hH, A, mR, cr, fe, Io, cl, uC, qa, Jr, AM, Tr); #c1(ERAP2) c2(NP_001123612) c3(endoplasmic reticulum aminopeptidase 2) c4(47794, 47795, 47796) c5(47797, 47798, 47799, 47800, 47801, 47802, 47803, 47804, 47805, 47806, 47807, 47808, 47809, 47810, 47811, 47812, 47813, 47814) c6( ) c7(jv, mR, A, cz, h, Io, cm, uC, qa); #c1(ERAP2) c2(XP_011541846) c3(endoplasmic reticulum aminopeptidase 2 isoform X1) c4(340401) c5(340402, 340403, 340404, 340405, 340406, 340407) c6( ) c7(jv, mR, A, cz, h, Io, cm, uC, qa); #c1(ERAS) c2(NP_853510) c3(GTPase ERas precursor) c4(255135) c5(255136, 255137, 255138, 255139, 255140, 255141) c6( ) c7(av, Vy, ht, ci); #c1(ERBB2) c2(NP_001005862) c3(receptor tyrosine-protein kinase erbB-2 isoform b) c4(22143, 22144) c5( ) c6( ) c7(gh, T, AY, ci, bv, xy, aE, ajv, auB, hu, cp, li, ZH, iE, Ls, az, nY, zE, iA, nB, wE, bkv, cj, Zn, cX, k, iB, ht, cd, aoc, aeX, bkP, Gw, Dz, pl, MD, Lh, CQ, asl, dB, pV, avr, AN, Dh, aA, bX, lu, AO, q, RU, aew, qK, jj, aju, NE, eS, cl, bkp, pb, ov, pa, aWQ, aws, bnl, rA, Mb, eP, rQ, iW, jN, jh, OE, Sv, Gn, aue, ad, afb, hX, oW, aln, MG, BO, ff, aeV, bz, i, aed, iu, ne, bmY, bkx, if, bB, ip, bmL, x, Na, ws, Ma, anV, aeO, gs, YL, xQ, eG, ajT, Jl, Qq, Au, Qm, as, ir, eF, cm, Qt, bnp, go, mx, in, afA, IT, n, b, no, jz, bnd, Do, zw, gd, eV, ia, AQ, hQ, Ye, bP, GU, PL hL, at, nL, B, bmX, AS, dA, eX, v, eJ, asG, BJ, avt, ae, jf, bnk, Qr, vT, alr, aDY, apx, t, KQ, ck, aug, bnf, kP, gX, anD, alV, Dd, bnb, hd, bne, Db, Ti, YQ, nJ, d, anW, aWR, anW, gk, bnn, II, gZ, apv, y, aC, al, alN, IR, AW, gJ, bnj, gH, rJ, pX, Qk, DO, K, eL, LZ, g, ajj, AM, U, PV, m, sw, zX, NT, zP, Nh, ft, By, wb, KV, avc, GN, aGd, cM, Zj, it, aoU, fM, avm, fG, j, eA, er, XX, amg, bno, Ig, yg, qv, Nc, avg, Y, r, en, iK, bnc, QG, np, EY, LS, Gl, id, bnm, iJ, dP, fX, io, hP, Yi, aeQ, eH, hp, aAr, Ew, Lj, AR, auZ, Gu, hE, ix, DS, G, pf, Fo, bU, zQ, bnh, aW, eM, wB, Xu, awr, fr, qN, eW, ke, BL, cc, hw, FN, jy, Nf, dL, hB, asT, afu, aiB, bmZ, aq, kp, mo, np, Qy, Qu, hk, hR, anx, bni, ZZ, adG, cn, sM, tc, hy, bkG, nv, LY, aT, adV, bna, gw, Uf, s, iU, eV, aYI, nM, im, ava, Fb, qC, av, Rq, Yo, fb, iL, bng, afe, qt, apb, Ej, aF, aUO, Hp, es, eU, aoR, bE, WK, be, adg, X); #c1(ERBB2) c2(NP_001276865) c3(receptor tyrosine-protein kinase erbB-2 isoform c) c4(108510) c5(108511, 108512, 108513, 108514, 108515, 108516, 108517, 108518, 108519, 108520, 108521, 108522, 108523, 108524, 108525, 108526, 108527, 108528, 108529, 108530) c6( ) c7(gh, T, AY, ci, bv, xy, aE, ajv, auB, hu, cp, li, ZH, iE, Ls, az, nY, zE, iA, nB, wE, bkv, cj, Zn, cX, k, iB, ht, cd, aoc, aeX, bkP, Gw, Dz, pi, MD, Lh, CQ, asl, dB, pV, avr, AN, Dh, aA, bX, lu, AO, q, RU, aew, gK, jj, aju, NE, eS, cl, bkp, pb, ov, pa, aWQ, aws, bnl, rA, Mb, eP, rQ, iW, jN, jh, OE, Sv, Gn, aue, ad, afb, hX, oW, aln, MG, BO, ff, aeV, bz, i, aed, iu, ne, bmY, bkx, if, bB, ip, bmL, x, Na, ws, Ma, anV, aeO, gs, YL, xQ, eG, ajT, Jl, Qq, Au, Qm, as, ir, eF, cm, Qt, bnp, go, mx, in, afA, IT, n, b, no, jz, bnd, Do, zw, gd, eV, ia, AQ, hQ, Ye, bP, GU, PI, hL, at, nL, B, bmX, AS, dA, eX, v, eJ, asG, BJ, avt, ae, jf, bnk, Qr, vT, alr, aDY, apx, t, KQ, ck, aug, bnf, kP, gX, anD, alV, Dd, bnb, hd, bne, Db, Ti, YQ, nJ, d, aoW, aWR, anW, gk, bnn, II, gZ, apv, y, aC, al, alN, IR, AW, gJ, bnj, gH, rJ, pX, Qk, DO, K, eL, LZ, g, ajj, AM, U, PV, m, sw, zX, NT, zP, Nh, ft, By, wb, KV, avc, CN, aGd, cM, Zj, it, aoU, fM, avm, fG, j, eA, er, XX, amg, bno, Ig, yg, gv, Nc, avg, Y, r, en, iK, bnc, QG, np, EY, LS, Gl, id, bnm, iJ, dP, fX, io, hP, Yi, aeQ, eH, hp, aAr, Ew, Lj, AR, auZ, Gu, hE, ix, DS, G, pf, Fo, bU, zQ, bnh, aW, eM, wB, Xu, awr, fr, qN, eW, ke, BI, cc, hw, FN, jy, Nf, dL, hB, asT, afu, aiB, bmZ, aq, kp, mo, op, Qy, Qu, hk, hR, anx, bni, ZZ, adG, cn, sM, tc, hy, bkG, nv, LY, aT, adV, bna, qw, Uf, s, iU, oV, aYI, nM, im, ava, Fb, qC, av, Rq, Yo, fb, iL, bng, afe, qt, apb, Ej, aF, aUO, Hp, es, eU, aoR, bE, WK, be, adg, X); #c1(ERBB2) c2(NP_001276866) c3(receptor tyrosine-protein kinase erbB-2 isoform d precursor) c4( ) c5(108531, 108532, 108533, 108534, 108535, 108536) c6( ) c7(gh, T, AY, ci, bv, xy, aE, ajv, auB, hu, cp, li, ZH, iE, Ls, az, nY, zE, iA, nB, wE, bkv, cj, Zn, cX, k, iB, ht, cd, aoc, aeX, bkP, Gw, Dz, pI, MD, Lh, CQ, asl, dB, pV, avr, AN, Dh, aA, bX, Iu, AO, q, RU, aew, qK, jj, aju, NE, eS, cI, bkp, pb, ov, pa, aWQ, aws, bnl, rA, Mb, eP, rQ, iW, jN, jh, OE, Sv, Gn, aue, ad, afb, hX, oW, aln, MG, BO, ff, aeV, bz, i, aed, iu, ne, bmY, bkx, if, bB, ip, bmL, x, Na, ws, Ma, anV, aeO, gs, YL, xQ, eG, ajT, Jl, Qq, Au, Qm, as, ir, eF, cm, Qt, bnp, go, mx, in, afA, IT, n, b, no, jz, bed, Do, zw, gd, eV, ia, AQ, hQ, Ye, bP, GU, PI, hL, at, nL, B, bmX, AS, dA, eX, v, eJ, asG, BJ, avt, ae, jf, bnk, Qr, vT, alr, aDY, apx, t, KQ, ck, aug, bnf, kP, gX, anD, alV, Dd, bnh, hd, bne, Db, Ti, YQ, nJ, d, aoW, aWR, anW, gk, bnn, II, gZ, apv, y, aC, aI, aIN, IR, AW, gJ, bnj, gH, rJ, pX, Qk, DO, K, eL, LZ, g, ajj, AM, U, PV, m, sw, zX, NT, zP, Nh, ft, By, wb, KV, avc, CN, aGd, cM, Zj, it, anU, fM, avm, fG, j, eA, er, XX, amg, bno, Ig, yg, qv, Nc, avg, Y, r, en, iK, bnc, QG, np, EY, LS, Gl, id, bnm, iJ, dP, fX, io, hP, Yi, aeQ, eH, hp, aAr, Ew, Lj, AR, auZ, Gu, hE, ix, DS, G, pf, Fo, bU, zQ, bnh, aW, eM, wB, Xu, awr, fr, qN, eW, ke, BI, cc, hw, FN, jy, Nf, dL, hB, asT, afu, aiB, bmZ, aq, kp, mo, op, Qy, Qu, hk, hR, anx, bni, ZZ, adG, cn, sM, tc, hy, bkG, nv, LY, aT, adV, bna, qw, Uf, s, iU, oV, aYI, nM, im, ava, Fb, qC, av, Rq, Ye, fb, iL, bng, afe, qt, apb, Ej, aF, aUO, Hp, es, eU, aoR, bE, WK, be, adg, X); #c1(ERBB2) c2(NP_004439) c3(receptor tyrosine-protein kinase erbB-2 isoform a precursor) c4(146339, 146340) c5(146341, 146342, 146343, 146344, 146345, 146346, 146347) c6( ) c7(gh, T, AY, ci, bv, xy, aE, ajv, auB, hu, cp, li, ZH, iE, Ls, az, nY, zE, iA, nB, wE, bkv, cj, Zn, cX, k, iB, ht, cd, aoc, aeX, bkP, Gw, Dz, pI, MD, Lh, CQ, asl, dB, pV, avr, AN, Dh, aA, bX, lu, AO, q, RU, aew, qK, jj, aju, NE, eS, cl, bkp, pb, nv, pa, aWQ, aws, bnl, rA, Mb, eP, rQ, iW, jN, jh, OE, Sv, Gn, aue, ad, afb, hX, oW, aln, MG, BO, ff, aeV, bz, i, aed, iu, ne, bmY, bkx, if, bB, ip, bmL, x, Na, ws, Ma, anV, aeO, gs, YL, xQ, eG, ajT, Jl, Qg, Au, Qm, as, ir, eF, cm, Qt, bnp, go, mx, in, afA, IT, n, b, no, jz, bnd, Do, zw, gd, eV, ia, AQ, hQ, Ye, bP, GU, PI, hL, at, nL, B, bmX, AS, dA, eX, v, eJ, asG, BJ, avt, ae, jf, bnk, Qr, vT, alr, aDY, apx, t, KQ, ck, aug, bnf, kP, gX, anD, aIV, Dd, bnh, hd, bne, Db, Ti, YQ, nJ, d, aoW, aWR, anW, gk, bnn, II, gZ, apv, y, aC, al, aIN, IR, AW, gJ, bnj, gH, rJ, pX, Qk, DO, K, eL, LZ, g, ajj, AM, U, PV, m, sw, zX, NT, zP, Nh, ft, By, wb, KV, avc, CN, aGd, cM, Zj, it, aoU, fM, avm, fG, j, eA, er, XX, amg, bno, Ig, yg, qv, Nc, avg, Y, r, en, iK, bnc, QG, np, EY, LS, Gl, id, bnm, iJ, dP, fX, io, hP, Yi, aeQ, eH, hp, aAr, Ew, Lj, AR, auZ, Gu, hE, ix, DS, G, pf, Fo, bU, zQ, bnh, aW, eM, wB, Xu, awr, fr, qN, eW, ke, BI, cc, hw, FN, jy, Nf, dL, hB, asT, afu, aiB, bmZ, aq, kp, mo, op, Qy, Qu, hk, hR, anx, bni, ZZ, adG, cn, sM, tc, hy, bkG, nv, LY, aT, adV, bna, gw, Uf, s, iU, oV, aYI, nM, im, ava, Fb, qC, av, Rq, Ye, fb, iL, bng, afe, qt, apb, Ej, aF, aUO, Hp, es, eU, aoR, bE, WK, be, adg, X); #c1(ERBB2IP) c2(NP_001006600) c3(protein LAP2 isoform 7) c4(22188) c5(22189, 22190, 22191, 22192, 22193, 22194, 22195, 22196, 22197, 22198) cG( ) c7(nZ, T, jz, eW, qK, mx, asL, fu, XM, bc); #c1(ERBB2IP) c2(NP_001240626) c3(protein LAP2 isoform 1) c4(88624) c5(88625, 88626, 88627, 88628, 88629, 88630) c6( ) c7(nZ, T, jz, eW, qK, mx, asL, fu, XM, bc); #c1(ERBB2IP) c2(NP_001240627) c3(protein LAP2 isoform 4) c4(88631) c5(88632, 88633, 88634, 88635, 88636, 88637) c6( ) c7(nZ, T, jz, eW, qK, mx, asL, fu, XM, bc); #c1(ERBB2IP) c2(NP_001240628) c3(protein LAP2 isoform 8) c4(88638, 88639, 88640) c5(88641, 88642, 88643, 88644, 88645, 88646) c6( ) c7(nZ, T, jz, eW, qK, mx, asL, fu, XM, bc); #c1(ERBB2IP) c2(NP_061165) c3(protein LAP2 isoform 2) c4(199674) c5(199675, 199676, 199677, 199678, 199679, 199680, 199681, 199682, 199683, 199684, 199685, 199686, 199687, 199688, 199689, 199690, 199691, 199692) c6( ) c7(nZ, T, jz, eW, qK, mx, asL, fu, XM, bc); #c1(ERBB3) c2(NP_001005915) c3(receptor tyrosine-protein kinase erbB-3 isoform s precursor) c4(22154) c5(22155, 22156, 22157, 22158, 22159, 22160, 22161, 22162, 22163, 22164, 22165, 22166) c6( ) c7(T, Tb, pf, fd, bB, cL, ci, ip, yM, bv, aE, anV, Qk, bnt, K, bU, hu, Qe, ZH, aW, Au, g, as, eF, cm, Qt, eM, nB, go, m, Xu, in, IT, Io, yG, NT, fr, qN, aoc, dL, hB, A, CN, AQ, kp, op, GU, dB, Qu, bns, at, bL, fG, aA, cz, j, AO, V, q, eA, eJ, aT, hK, ae, s, oV, Y, bnq, r, en, cI, t, iK, np, im, LS, id, ad, av, Tg, nJ, Yi, bnr, yF, d, ff, eH, eZ, aF, hp, adj, bz, Hp, bE, X, Ug, y, iu); #c1(ERBB3) c2(NP_001973) c3(receptor tyrosine-protein kinase erbB-3 isoform 1 precursor) c4(122753, 122754, 122755, 122756, 122757, 122758) c5(122759, 122760, 122761, 122762, 122763, 122764, 122765, 122766, 122767, 122768, 122769, 122770, 122771, 122772, 122773, 122774, 122775, 122776, 122777, 122778, 122779, 122780, 122781, 122782, 122783, 122784, 122785, 122786, 122787, 122788) c6( ) c7(T, Tb, pf, fd, bB, cL, ci, ip, yM, bv, aE, anV, Qk, bnt, K, bU, hu, Qe, ZH, aW, Au, g, as, eF, cm, Qt, eM, nB, go, m, Xu, in, IT, Io, yG, NT, fr, qN, aoc, dL, hB, A, CN, AQ, kp, op, GU, dB, Qu, bns, at, bL, fG, aA, cz, j, AO, V, q, eA, eJ, aT, hK, ae, s, oV, Y, bnq, r, en, cI, t, iK, np, im, LS, id, ad, av, Tg, nJ, Yi, bnr, yF, d, ff, eH, eZ, aF, hp, adj, bz, Hp, bE, X, Ug, y, iu); #c1(ERBB4) c2(NP_001036064) c3(receptor tyrosine-protein kinase erbB-4 isoform JM-a/CVT-2 precursor) c4(33899) c5(33900, 33901, 33902, 33903, 33904, 33905, 33906) c6( ) c7(T, aC, if, bB, ci, aE, K, hu, eL, aW, Ls, g, eF, cm, mZ, eM, iA, go, m, IT, ht, n, fr, qN, cd, aoc, dL, hB, mY, mV, he, dx, bnv, mU, MD, fe, cM, mX, GU, dB, hk, aur, it, mT, bL, mS, ti, v, q, eA, aT, bnu, bK, jj, rz, af, jf, hM, Y, r, en, t, iK, amd, ac, c, id, ha, ad, XB, av, py, mW, io, bkw, ji, nJ, Yi, d, Gv, ff, eH, aF, bz, Hp, es, D, bE, dO, kS); #c1(ERBB4) c2(NP_005226) c3(receptor tyrosine-protein kinase erbB-4 isoform JM-a/CVT-1 precursor) c4(154222) c5(154223, 154224, 154225, 154226, 154227, 154228, 154229) c6( ) c7(T, aC, if, bB, ci, aE, K, hu, eL, aW, Ls, g, eF, cm, mZ, eM, iA, go, m, IT, ht, n, fr, qN, cd, aoc, dL, hB, mY, mV, he, dx, bnv, mU, MD, fe, cM, mX, GU, dB, hk, aur, it, mT, bL, mS, ti, v, q, eA, aT, bnu, bK, jj, rz, af, jf, hM, Y, r, en, t, iK, amd, ac, c, id, ha, ad, XB, av, py, mW, io, bkw, ji, nJ, Yi, d, Gv, ff, eH, aF, bz, Hp, es, D, bE, dO, kS); #c1(ERBB4) c2(XP_005246433) c3(receptor tyrosine-protein kinase erbB-4 isoform X3) c4(267112, 267113) c5(267114, 267115, 267116, 267117, 267118, 267119) c6( ) c7(T, aC, if, bB, ci, aE, K, hu, eL, aW, Ls, g, eF, cm, ml, eM, iA, go, m, IT, ht, n, fr, qN, cd, aoc, dL, hB, mY, mV, he, dx, bnv, mU, MD, fe, cM, mX, GU, dB, hk, aur, it, mT, bL, mS, ti, v, q, eA, aT, bnu, bK, jj, rz, af, jf, hM, Y, r, en, t, iK, amd, ac, c, id, ha, ad, XB, av, py, mW, io, bkw, ji, nJ, Yi, d, Gv, ff, eH, aF, bz, Hp, es, D, bE, dO, kS); #c1(ERBB4) c2(XP_005246434) c3(receptor tyrosine-protein kinase erbB-4 isoform X4) c4( ) c5(267120, 267121, 267122, 267123, 267124, 267125, 267126, 267127, 267128, 267129, 267130, 267131) c6( ) c7(T, aC, if, bB, ci, aE, K, hu, eL, aW, Ls, g, eF, cm, ml, eM, iA, go, m, IT, ht, n, fr, qN, cd, aoc, dL, hB, mY, mV, he, dx, bnv, mU, MD, fe, cM, mX, GU, dB, hk, aur, it, mT, bL, mS, ti, v, q, eA, aT, bnu, bK, jj, rz, af, jf, hM, Y, r, en, t, iK, amd, ac, c, id, ha, ad, XB, av, py, mW, io, bkw, ji, nJ, Yi, d, Gv, ff, eH, aF, bz, Hp, es, D, bE, dO, kS); #c1(ERBB4) c2(XP_006712427) c3(receptor tyrosine-protein kinase erbB-4 isoform X1) c4(286648) c5( ) c6( ) c7(T, aC, if, bB, ci, aE, K, hu, eL, aW, Ls, g, eF, cm, mZ, eM, iA, go, m, IT, ht, n, fr, qN, cd, aoc, dL, hB, mY, mV, he, dx, bnv, mU, MD, fe, cM, mX, GU, dB, hk, aur, it, mT, bL, mS, ti, v, q, eA, aT, bnu, bK, jj, rz, af, jf, hM, Y, r, en, t, iK, amd, ac, c, id, ha, ad, XB, av, py, mW, in, bkw, ji, nJ, Yi, d, Gv, ff, eH, aF, bz, Hp, es, D, bE, dO, kS); #c1(ERC1) c2(XP_011519238) c3(ELKS/RabG-interacting/CAST family member 1 isoform X3) c4(313828, 313829) c5(313830, 313831, 313832, 313833, 313834, 313835, 313836, 313837, 313838, 313839, 313840, 313841) c6( ) c7(hd, nM, nB, n, ht, fq, anU); #c1(ERC1) c2(XP_011519239) c3(ELKS/Rab6-interacting/CAST family member 1 isoform X4) c4(313842) c5( ) c6( ) c7(hd, nM, nB, n, ht, fq, anU); #c1(ERC1) c2(XP_011519240) c3(ELKS/Rab6-interacting/CAST family member 1 isoform X5) c4(313843) c5( ) c6( ) c7(hd, nM, nB, n, ht, fq, anU); #c1(ERC1) c2(XP_011519241) c3(ELKS/Rab6-interacting/CAST family member 1 isoform X6) c4( ) c5(313844, 313845, 313846, 313847, 313848, 313849, 313850, 313851, 313852, 313853, 313854, 313855) c6( ) c7(hd, nM, nB, n, ht, fq, anU); #c1(ERC1) c2(XP_011519243) c3(ELKS/Rab6-interacting/CAST family member 1 isoform X1) c4(313856) c5(313857, 313858, 313859, 313860, 313861, 313862, 313863, 313864, 313865, 313866, 313867, 313868, 313869, 313870, 313871, 313872, 313873, 313874) c6( ) c7(hd, nM, nB, n, bt, fq, anU); #c1(ERC1) c2(XP_011519244) c3(ELKS/Rab6-interacting/CAST family member 1 isoform X2) c4(313875) c5(313876, 313877, 313878, 313879, 313880, 313881) c6( ) c7(hd, nM, nB, n, bt, fq, anU); #c1(ERC1) c2(XP_011519246) c3(ELKS/Rab6-interacting/CAST family member 1 isoform X9) c4(313882, 313883, 313884) c5(313885, 313886, 313887, 313888, 313889, 313890, 313891, 313892, 313893, 313894, 313895, 313896, 313897, 313898, 313899, 313900, 313901, 313902) c6( ) c7(hd, nM, nB, n, bt, fq, anU); #c1(ERC2) c2(NP_056391) c3(ERC protein 2) c4(187399) c5(187400, 187401, 187402, 187403, 187404, 187405, 187406, 187407, 187408) c6( ) c7(Kd, dD, VJ, akX, ea, Em, Y, aw, wB, jh, cz, n, eq, fr, ji, an, he, cd, Hr); #c1(ERC2) c2(XP_011531882) c3(ERC protein 2 isoform X1) c4(327932) c5(327933, 327934, 327935, 327936, 327937, 327938) c6( ) c7(Kd, dD, VJ, akX, ea, Em, Y, aw, wB, jh, cz, n, eq, fr, ji, an, he, cd, Hr); #c1(ERC2) c2(XP_011531883) c3(ERC protein 2 isoform X2) c4( ) c5(327939) c6( ) c7(Kd, dD, VJ, akX, ea, Em, Y, aw, wB, jh, cz, n, eq, fr, ji, an, he, cd, Hr); #c1(ERCC1) c2(NP_001159521) c3(DNA excision repair protein ERCC-1 isoform 3) c4(64191) c5(64192, 64193, 64194, 64195, 64196, 64197, 64198, 64199, 64200, 64201, 64202) c6( ) c7(T, os, aC, pf, if, bB, ci, x, gJ, bkA, aE, ja, K, hu, eL, bny, JI, aW, CT, nY, La, NR, g, Im, eF, bw, eM, iT, vy, cj, PV, k, m, iu, gU, bnw, ht, qy, qN, hr, ft, rC, qd, IG, Gw, dL, hT, PX, hQ, bJ, dB, hL, at, it, B, bL, fM, yk, aA, hy, bX, Qo, V, q, eA, yg, aT, vH, bnx, ahE, ae, ne, wr, ND, Y, Lf, apK, r, ahI, en, bu, cI, t, iK, ck, sS, BU, gX, dy, rA, bt, hS, gV, Gl, Dd, iW, oZ, oH, Gn, ad, av, vJ, NS, d, hG, ff, aF, bz, dR, bE, Lb, bC, Gu, Pk, X); #c1(ERCC1) c2(NP_001974) c3(DNA excision repair protein ERCC-1 isoform 2) c4(122789, 122790) c5(122791, 122792, 122793, 122794, 122795, 122796, 122797, 122798, 122799, 122800) c6( ) c7(T, os, aC, pf, if, bB, ci, x, gJ, bkA, aE, ja, K, hu, eL, bny, JI, aW, CT, nY, La, NR, g, Im, eF, bw, eM, iT, vy, cj, PV, k, m, iu, gU, bnw, ht, qy, qN, hr, ft, rC, gd, IG, Gw, dL, hT, PX, hQ, bJ, dB, hL, at, it, B, bL, fM, yk, aA, hy, bX, Qo, V, q, eA, yg, aT, vH, bnx, ahE, ae, ne, wr, ND, Y, Lf, apK, r, ahl, en, bu, cI, t, iK, ck, sS, BU, gX, dy, rA, bt, hS, gV, Gl, Dd, iW, oZ, oH, Gn, ad, av, vJ, NS, d, hG, ff, aF, bz, dR, bE, Lb, bC, Gu, Pk, X); #c1(ERCC1) c2(XP_005258693) c3(DNA excision repair protein ERCC-1 isoform X1) c4(275707, 275708) c5(275709, 275710, 275711, 275712, 275713, 275714, 275715, 275716) c6(275717, 275718) c7(T, os, aC, pf, if, bB, ci, x, gJ, bkA, aE, ja, K, hu, eL, bny, JI, aW, CT, nY, La, NR, g, Im, eF, bw, eM, iT, vy, cj, PV, k, m, iu, gU, bnw, ht, qy, qN, hr, ft, rC, gd, IG, Gw, dL, hT, PX, hQ, bJ, dB, hL, at, it, B, bL, fM, yk, aA, hy, bX, Qo, V, q, eA, yg, aT, vH, bnx, ahE, ae, ne, wr, ND, Y, Lf, apK, r, ahl, en, bu, cI, t, iK, ck, sS, BU, gX, dy, rA, bt, hS, gV, GL Dd, iW, oZ, oH, Gn, ad, av, vJ, NS, d, hG, ff, aF, bz, dR, bE, Lb, bC, Gu, Pk, X); #c1(ERCC2) c2(NP_000391) c3(TFIIH basal transcription factor complex helicase XPD subunit isoform 1) c4(8409, 8410, 8411) c5(8412, 8413, 8414, 8415, 8416, 8417, 8418, 8419, 8420, 8421, 8422, 8423, 8424, 8425, 8426, 8427, 8428, 8429) c6( ) c7(atT, os, T, aC, pf, if, fd, axk, ci, ip, x, aE, Qk, K, bU, hu, pk, eL, zQ, aW, CT, LZ, nY, kt, La, g, eF, zE, Ik, uC, bw, ou, fT, eM, nB, iT, cj, k, m, cE, Vj, bnA, gU, ht, NT, n, fr, nA, qN, ke, ft, no, hw, aXH, rC, gd, eV, dL, hB, ny, AQ, hQ, aq, pm, cM, op, W, dB, hk, hL, at, uz, NB, it, B, cn, bnz, fM, yk, jx, eX, aA, hy, j, bX, Qo, V, q, eA, MR, hW, afQ, yg, aT, vH, ae, qw, s, aBq, Y, Lf, r, en, bu, cI, t, iK, ck, sS, kP, Dy, ac, pZ, bt, rA, hS, gV, Gl, id, iW, jh, oZ, Gn, fu, hF, Fc, iJ, ad, hX, dP, av, bnC, hd, ib, NS, nI, in, IQ, BN, hG, ff, eH, nh, eZ, CF, aF, bz, dr, es, pc, bE, IM, bnB, iu, rk, BA); #c1(ERCC2) c2(NP_001124339) c3(TFIIH basal transcription factor complex helicase XPD subunit isoform 2) c4(48734) c5(48735, 48736, 48737, 48738, 48739, 48740) c6( ) c7(atT, os, T, aC, pf, if, fd, axk, ci, ip, x, aE, Qk, K, bU, hu, pk, eL, zQ, aW, CT, LZ, nY, kt, La, g, eF, zE, Ik, uC, bw, ou, fT, eM, nB, iT, cj, k, m, cE, Vj, bnA, gU, ht, NT, n, fr, nA, qN, ke, ft, no, hw, aXH, rC, gd, eV, dL, hB, ny, AQ, hQ, aq, pm, cM, op, W, dB, hk, hL, at, uz, NB, it, B, cn, bnz, fM, yk, jx, eX, aA, hy, j, bX, Qo, V, q, eA, MR, hW, afQ, yg, aT, vH, ae, qw, s, aBq, Y, Lf, r, en, bu, cI, t, iK, ck, sS, kP, Dy, ac, pZ, bt, rA, hS, gV, Gl, id, iW, jh, oZ, Gn, fu, hF, Fc, iJ, ad, hX, dP, av, bnC, hd, ib, NS, nI, io, IQ, BN, hG, ff, eH, nh, eZ, CF, aF, bz, dr, es, pc, bE, IM, bnB, iu, rk, BA); #c1(ERCC2) c2(XP_011524913) c3(TFIIH basal transcription factor complex helicase XPD subunit isoform X1) c4(319307, 319308) c5(319309, 319310, 319311, 319312, 319313, 319314, 319315, 319316, 319317, 319318, 319319, 319320) c6( ) c7(atT, os, T, aC, pf, if, fd, axk, ci, ip, x, aE, Qk, K, bU, hu, pk, eL, zQ, aW, CT, LZ, nY, kt, La, g, eF, zE, Ik, uC, bw, ou, fT, eM, nB, iT, cj, k, m, cE, Vj, bnA, gU, ht, NT, n, fr, nA, qN, ke, ft, no, hw, aXH, rC, gd, eV, dL, hB, ny, AQ, hQ, aq, pm, cM, op, W, dB, hk, hL, at, uz, NB, it, B, cn, bnz, fM, yk, jx, eX, aA, hy, j, bX, Qo, V, q, eA, MR, hW, afQ, yg, aT, vH, ae, qw, s, aBq, Y, Lf, r, en, bu, cI, t, iK, ck, sS, kP, Dy, ac, pZ, bt, rA, hS, qV, Gl, id, iW, jh, oZ, Gn, fu, hF, Fc, iJ, ad, hX, dP, av, bnC, hd, ib, NS, nl, io, IQ, BN, hG, ff, eH, nh, eZ, CF, aF, bz, dr, es, pc, bE, IM, bnB, iu, rk, BA); #c1(ERCC3) c2(NP_000113) c3(TFIIH basal transcription factor complex helicase XPB subunit isoform a) c4(1884) c5(1885, 1886, 1887, 1888, 1889, 1890, 1891, 1892, 1893, 1894, 1895, 1896, 1897) c6( ) c7(T, yk, iW, ht, bX, V, eA, ad, ke, av, no, MR, aT, dL, K, IQ, ae, hG, aW, bnD, Y, aBq, CT, r, La, t, iK, bz, dr, at, m, gn, Pk, bnB, B, bnA); #c1(ERCC3) c2(NP_001290347) c3(TFIIH basal transcription factor complex helicase XPB subunit isoform b) c4(115220) c5( ) c6( ) c7(T, yk, iW, ht, bX, V, eA, ad, ke, av, no, MR, aT, dL, K, IQ, ae, hG, aW, bnD, Y, aBq, CT, r, La, t, iK, bz, dr, at, m, gn, Pk, bnB, B, bnA); #c1(ERCC4) c2(NP_005227) c3(DNA repair endonuclease XPF) c4(154230, 154231, 154232) c5(154233, 154234, 154235, 154236, 154237, 154238, 154239, 154240, 154241, 154242, 154243, 154244, 154245, 154246, 154247, 154248, 154249, 154250) c6( ) c7(bL, Gl, T, os, gU, aC, bnw, ht, aA, n, aj, hy, Gn, oZ, bX, V, q, J, ad, eA, eJ, ip, av, gJ, aE, Qk, rC, yg, aT, bnF, dL, Gw, K, hu, eL, wr, aW, Y, ff, eH, CT, r, GA, dg, aF, La, en, bu, cI, t, cM, bz, zE, g, eF, iK, ck, sS, Dy, Zi, eM, bnE, dB, hk, PI, afd, vy, cj, hL, at, Lb, dy, m, Gu, Gp, Pk, rA, it); #c1(ERCC5) c2(NP_000114) c3(DNA repair protein complementing XP-G cells) c4(1898, 1899, 1900, 1901) c5(1902, 1903, 1904, 1905, 1906, 1907, 1908, 1909, 1910, 1911, 1912, 1913, 1914, 1915, 1916, 1917, 1918, 1919) c6( ) c7(gV, T, ns, Gl, id, if, iW, aoE, eX, jh, aA, n, oZ, Gn, ci, fr, V, iJ, q, cd, ad, eA, dP, ip, av, hW, Qk, yg, aT, rA, eV, dL, K, bnG, ae, eL, hG, aW, Y, ff, eH, CT, r, hQ, aq, aF, La, en, cI, eF, t, zE, bz, QA, iK, es, Dy, eM, iT, dB, hk, hL, cj, at, m, NB, bt, it, B, rk); #c1(ERCC6) c2(NP_000115) c3(DNA excision repair protein ERCC-6) c4(1920, 1921, 1922, 1923, 1924) c5(1925, 1926, 1927, 1928, 1929, 1930, 1931, 1932, 1933, 1934, 1935, 1936, 1937, 1938, 1939, 1940, 1941, 1942, 1943, 1944, 1945, 1946, 1947, 1948, 1949, 1950) c6( ) c7(Gl, T, dD, eR, yk, iW, aA, n, Gn, ci, eq, Qo, V, q, aR, ad, eA, eW, av, MR, aXH, nI, aT, aYf, dL, KP, K, cx, eL, kj, bnH, aW, Az, nh, r, kt, CT, aF, La, QK, Ik, bz, iK, dr, sS, W, nb, U, cj, at, m, rA, xb, B); #c1(ERCC6L2) c2(NP_001010895) c3(DNA excision repair protein ERCC-6-like 2 isoform c) c4( ) c5(23996, 23997, 23998, 23999, 24000, 24001, 24002, 24003, 24004, 24005, 24006, 24007, 24008, 24009, 24010, 24011, 24012, 24013) c6( ) c7(bnI, oX); #c1(ERCC6L2) c2(NP_064592) c3(DNA excision repair protein ERCC-6-like 2 isoform a) c4(203148) c5(203149, 203150, 203151, 203152, 203153, 203154) c6( ) c7(bnI, oX); #c1(ERCC6L2) c2(XP_011516944) c3(DNA excision repair protein ERCC-6-like 2 isoform X2) c4(310475) c5( ) c6( ) c7(bnI, oX); #c1(ERCC6L2) c2(XP_011516946) c3(DNA excision repair protein ERCC-6-like 2 isoform X4) c4(310476) c5( ) c6( ) c7(bnI, oX); #c1(ERCC6L2) c2(XP_011516952) c3(DNA excision repair protein ERCC-6-like 2 isoform X10) c4(310477) c5( ) c6( ) c7(bnI, oX); #c1(ERCC6-PGBD3) c2(NP_001263988) c3(Cockayne syndrome B-piggyBac fusion protein) c4(97409) c5(97410, 97411, 97412, 97413, 97414, 97415, 97416, 97417, 97418, 97419, 97420, 97421, 97422, 97423, 97424, 97425) c6( ) c7(bj, aYf, La); #c1(ERCC8) c2(NP_000073) c3(DNA excision repair protein ERCC-8 isoform 1) c4(1211, 1212, 1213) c5(1214, 1215, 1216, 1217, 1218, 1219, 1220, 1221, 1222, 1223, 1224, 1225, 1226) c6( ) c7(ck, aR, T, MR, aXH, jZ, bnJ, aT, dr, U, dz, dL, KP, K, dV, La, IM, V, sH); #c1(ERCC8) c2(NP_001007234) c3(DNA excision repair protein ERCC-8 isoform 2) c4( ) c5(22588, 22589, 22590, 22591, 22592, 22593) c6( ) c7(ck, aR, T, MR, aXH, jZ, bnJ, aT, dr, U, dz, dL, KP, K, dV, La, IM, V, sH); #c1(ERCC8) c2(NP_001277214) c3(DNA excision repair protein ERCC-8 isoform 4) c4(109233) c5(109234, 109235, 109236, 109237, 109238) c6( ) c7(ck, aR, T, MR, aXH, jZ, bnJ, aT, dr, U, dz, dL, KP, K, dV, La, IM, V, sH); #c1(EREG) c2(NP_001423) c3(proepiregulin preproprotein) c4(117757) c5(117758, 117759, 117760, 117761, 117762, 117763, 117764, 117765) c6(117766, 117767) c7(T, hV, aA, ci, nE, asS, q, eA, av, iu, qK, gd, aT, ey, ji, fb, d, Ls, eH, ff, r, aF, en, g, eF, t, KM, eM, m, i, y, B); #c1(ERF) c2(NP_001287964) c3(ETS domain-containing transcription factor ERF isoform 2) c4( ) c5(113274, 113275, 113276, 113277, 113278) c6( ) c7(bnK, ck, bnL, bnM, eD, Az, r, hR, fe, aQM, f, bz, q, zV); #c1(ERF) c2(NP_006485) c3(ETS domain-containing transcription factor ERF isoform 1) c4(165618, 165619) c5(165620, 165621, 165622, 165623, 165624, 165625, 165626) c6( ) c7(bnK, ck, bnL, bnM, eD, Az, r, hR, fe, aQM, f, bz, g, zV); #c1(ERG) c2(NP_001129626) c3(transcriptional regulator ERG isoform 3) c4(52061) c5(52062, 52063, 52064, 52065, 52066, 52067, 52068, 52069, 52070, 52071) c6( ) c7(gh, T, ci, amW, x, bv, xE, SV, dV, Ou, K, aW, bnQ, g, QA, iT, bjY, nw, m, k, cZ, n, Sw, afR, ft, pN, Zs, h, hn, dd, bnO, db, dx, YI, AT, A, RT, AQ, bnN, W, Vy, nx, fZ, aA, pd, g, aT, jj, avt, ae, af, jf, if, r, gm, en, f, nC, ck, bnR, np, OL, bt, Dd, bnS, Fb, hF, iJ, mC, ad, Jm, F, Sr, iY, uQ, IR, Ub, qt, ff, bgh, aF, Tp, bz, ayj, bgg, EW, bnP, y); #c1(ERG) c2(NP_001129627) c3(transcriptional regulator ERG isoform 4) c4( ) c5(52072, 52073, 52074, 52075, 52076) c6( ) c7(gh, T, ci, a mW, x, bv, xE, SV, dV, Ou, K, aW, bnQ, g, QA, iT, bjY, nw, m, k, cZ, n, Sw, afR, ft, pN, Zs, h, hn, dd, bnO, db, dx, YI, AT, A, RT, AQ, bnN, W, Vy, nx, fZ, aA, pd, g, aT, jj, avt, ae, af, jf, if, r, gm, en, f, nC, ck, bnR, np, OL, bt, Dd, bnS, Fb, hF, iJ, mC, ad, Jm, F, Sr, iY, uQ, IR, Ub, qt, ff, bgh, aF, Tp, bz, ayj, bgg, EW, bnP, y); #c1(ERG) c2(NP_001230358) c3(transcriptional regulator ERG isoform 5) c4( ) c5(86251, 86252, 86253, 86254, 86255) c6( ) c7(gh, T, ci, a mW, x, bv, xE, SV, dV, Ou, K, aW, bnQ, g, QA, iT, bjY, nw, m, k, cZ, n, Sw, afR, ft, pN, Zs, h, hn, dd, bnO, db, dx, YI, AT, A, RT, AQ, bnN, W, Vy, nx, fZ, aA, pd, q, aT, jj, avt, ae, af, jf, if, r, gm, en, f, nC, ck, bnR, np, OL, bt, Dd, bnS, Fb, hF, iJ, mC, ad, Jm, F, Sr, iY, uQ, IR, Ub, qt, ff, bgh, aF, Tp, bz, ayj, bgg, EW, bnP, y); #c1(ERG) c2(NP_004440) c3(transcriptional regulator ERG isoform 2) c4(146348, 146349) c5(146350, 146351, 146352, 146353, 146354, 146355, 146356, 146357, 146358, 146359, 146360, 146361) c6( ) c7(gh, T, ci, amW, x, bv, xE, SV, dV, Ou, K, aW, bnQ, g, QA, iT, bjY, nw, m, k, cZ, n, Sw, afR, ft, pN, Zs, h, hn, dd, bnO, db, dx, YI, AT, A, RT, AQ, bnN, W, Vy, nx, fZ, aA, pd, q, aT, jj, avt, ae, af, jf, if, r, gm, en, f, nC, ck, bnR, np, OL, bt, Dd, bnS, Fb, hF, iJ, mC, ad, Jm, F, Sr, iY, uQ, IR, Ub, qt, ff, bgh, aF, Tp, bz, ayj, bgg, EW, bnP, y); #c1(ERG) c2(NP_891548) c3(transcriptional regulator ERG isoform 1) c4(257256, 257257, 257258) c5(257259, 257260, 257261, 257262, 257263, 257264, 257265) c6( ) c7(gh, T, ci, amW, x, bv, xE, SV, dV, Ou, K, aW, bnQ, g, QA, iT, bjY, nw, m, k, cZ, n, Sw, afR, ft, pN, Zs, h, hn, dd, bnO, db, dx, YI, AT, A, RT, AQ, bnN, W, Vy, nx, fZ, aA, pd, q, aT, jj, avt, ae, af, jf, if, r, gm, en, f, nC, ck, bnR, np, OL, bt, Dd, bnS, Fb, hF, iJ, mC, ad, Jm, F, Sr, iY, uQ, IR, Ub, qt, ff, bgh, aF, Tp, bz, ayj, bgg, EW, bnP, y); #c1(ERG) c2(XP_011527789) c3(transcriptional regulator ERG isoform X2) c4( ) c5(322756, 322757, 322758, 322759, 322760, 322761) c6( ) c7(gh, T, ci, amW, x, bv, xE, SV, dV, Ou, K, aW, bnQ, g, QA, iT, bjY, nw, m, k, cZ, n, Sw, afR, ft, pN, Zs, h, hn, dd, bnO, db, dx, YI, AT, A, RT, AQ, bnN, W, Vy, nx, fZ, aA, pd, q, aT, jj, avt, ae, af, jf, if, r, gm, en, f, nC, ck, bnR, np, OL, bt, Dd, bnS, Fb, hF, iJ, mC, ad, Jm, F, Sr, iY, uQ, IR, Ub, qt, ff, bgh, aF, Tp, bz, ayj, bgg, EW, bnP, y); #c1(ERGIC1) c2(NP_001026881) c3(endoplasmic reticulum-Golgi intermediate compartment protein 1) c4(29821) c5(29822, 29823, 29824, 29825, 29826, 29827) c6( ) c7(ae, dy, ac, ad); #c1(ERGIC2) c2(NP_057654) c3(endoplasmic reticulum-Golgi intermediate compartment protein 2) c4(192084, 192085, 192086, 192087, 192088) c5(192089, 192090, 192091, 192092, 192093, 192094, 192095, 192096, 192097, 192098, 192099, 192100, 192101, 192102, 192103, 192104, 192105, 192106, 192107, 192108, 192109, 192110, 192111, 192112, 192113, 192114, 192115, 192116, 192117, 192118, 192119) c6( ) c7(s, Xg, hR, ey, ae, ad); #c1(ERGIC3) c2(NP_057050) c3(endoplasmic reticulum-Golgi intermediate compartment protein 3 isoform b) c4(188634, 188635, 188636) c5(188637, 188638, 188639, 188640, 188641, 188642, 188643, 188644, 188645, 188646, 188647, 188648, 188649, 188650, 188651, 188652, 188653, 188654) c6( ) c7(iu, bz, B); #c1(ERGIC3) c2(NP_938408) c3(endoplasmic reticulum-Golgi intermediate compartment protein 3 isoform a) c4(259822, 259823) c5(259824, 259825, 259826, 259827, 259828, 259829, 259830, 259831, 259832, 259833, 259834, 259835) c6( ) c7(iu, bz, B); #c1(ERI3) c2(NP_001288628) c3(ERI1 exoribonuclease 3 isoform 2) c4(113854, 113855, 113856, 113857, 113858, 113859) c5(113860, 113861, 113862, 113863, 113864, 113865, 113866, 113867, 113868, 113869, 113870, 113871, 113872, 113873, 113874, 113875, 113876, 113877, 113878, 113879, 113880, 113881, 113882, 113883, 113884, 113885, 113886, 113887, 113888, 113889) c6( ) c7(ac); #c1(ERI3) c2(NP_001288630) c3(ERI1 exoribonuclease 3 isoform 4) c4( ) c5(113890, 113891, 113892, 113893, 113894) c6( ) c7(ac); #c1(ERICH5) c2(NP_001164277) c3(glutamate-rich protein 5 isoform 2) c4(66907) c5(66908, 66909, 66910, 66911, 66912, 66913) c6( ) c7(akY); #c1(ERICH5) c2(NP_775820) c3(glutamate-rich protein 5 isoform 1) c4(250404) c5(250405, 250406, 250407, 250408, 250409, 250410) c6( ) c7(akY); #c1(ERICH6B) c2(NP_872348) c3(glutamate-rich protein 68) c4(256169) c5(256170, 256171, 256172, 256173, 256174, 256175) c6( ) c7(ac); #c1(ERLEC1) c2(NP_001120869) c3(endoplasmic reticulum lectin 1 isoform 2 precursor) c4(44879) c5(44880, 44881, 44882, 44883, 44884, 44885) c6( ) c7(bz, K); #c1(ERLEC1) c2(NP_001120870) c3(endoplasmic reticulum lectin 1 isoform 3 precursor) c4(44886) c5(44887, 44888, 44889, 44890, 44891, 44892) c6( ) c7(bz, K); #c1(ERLEC1) c2(NP_056516) c3(endoplasmic reticulum lectin 1 isoform 1 precursor) c4(187892) c5(187893, 187894, 187895, 187896, 187897, 187898) c6( ) c7(bz, K); #c1(ERLIN1) c2(XP_005269499) c3(erlin-1 isoform X1) c4(282577, 282578, 282579) c5(282580, 282581, 282582, 282583, 282584, 282585, 282586, 282587, 282588, 282589, 282590, 282591, 282592, 282593, 282594, 282595, 282596) c6( ) c7(ey, cP, fc); #c1(ERLIN1) c2(XP_011537472) c3(erlin-1 isoform X2) c4( ) c5(335082, 335083, 335084, 335085, 335086) c6( ) c7(ey, cP, fc); #c1(ERLIN2) c2(NP_001003791) c3(erlin-2 isoform 2) c4(20100) c5(20101, 20102, 20103, 20104, 20105, 20106, 20107, 20108, 20109, 20110, 20111, 20112, 20113, 20114, 20115, 20116) c6( ) c7(T, Iu, TL, aW, Pt, axW, bnT, aT, aq, K, nA, B); #c1(ERLIN2) c2(NP_009106) c3(erlin-2 isoform 1) c4(170688, 170689) c5(170690, 170691, 170692, 170693, 170694, 170695, 170696, 170697, 170698, 170699) c6( ) c7(T, Iu, TL, aW, Pt, axW, bnT, aT, aq, K, nA, B); #c1(ERMAP) c2(XP_011538872) c3(erythroid membrane-associated protein isoform X1) c4(336940, 336941) c5(336942, 336943, 336944, 336945, 336946, 336947, 336948, 336949, 336950, 336951, 336952, 336953, 336954, 336955, 336956, 336957) c6( ) c7(bnU, bnV); #c1(ERMARD) c2(NP_001265460) c3(endoplasmic reticulum membrane-associated RNA degradation protein isoform 2) c4(98607) c5(98608, 98609, 98610, 98611, 98612, 98613) c6( ) c7(afx, bnW, ha, afz); #c1(ERMARD) c2(NP_001265462) c3(endoplasmic reticulum membrane-associated RNA degradation protein isoform 4) c4(98614) c5(98615, 98616, 98617, 98618, 98619, 98620) c6( ) c7(afx, bnW, ha, afz); #c1(ERMARD) c2(NP_060811) c3(endoplasmic reticulum membrane-associated RNA degradation protein isoform 1) c4(197945) c5(197946, 197947, 197948, 197949, 197950, 197951, 197952, 197953) c6( ) c7(afx, bnW, ha, afz); #c1(ERMARD) c2(XP_011534242) c3(endoplasmic reticulum membrane-associated RNA degradation protein isoform X2) c4(330584, 330585) c5(330586, 330587, 330588, 330589, 330590, 330591, 330592, 330593, 330594, 330595, 330596) c6( ) c7(afx, bnW, ha, afz); #c1(ERMP1) c2(NP_079172) c3(endoplasmic reticulum metallopeptidase 1) c4(217298, 217299, 217300) c5(217301, 217302, 217303, 217304, 217305, 217306, 217307, 217308, 217309, 217310, 217311) c6( ) c7(aXL, an); #c1(ERMP1) c2(XP_011516336) c3(endoplasmic reticulum metallopeptidase 1 isoform X1) c4( ) c5(309556, 309557, 309558, 309559, 309560, 309561, 309562, 309563, 309564, 309565, 309566) c6( ) c7(aXL, an); #c1(ERN1) c2(NP_001424) c3(serine/threonine-protein kinase/endoribonuclease IRE1 precursor) c4(117768) c5(117769, 117770, 117771, 117772, 117773, 117774) c6( ) c7(T, hI, BD, eR, ha, jh, fd, hy, v, eA, hX, aT, jy, K, B, BN, aW, Y, fc, ck, ac, wR, cP, ne); #c1(ERN2) c2(NP_150296) c3(serine/threonine-protein kinase/endoribonuclease IRE2) c4(228070) c5(228071, 228072, 228073, 228074, 228075, 228076) c6( ) c7(ao, bM, K, DF); #c1(ERO1L) c2(NP_055399) c3(ERO1-like protein alpha precursor) c4(180790) c5(180791, 180792, 180793, 180794, 180795, 180796) c6( ) c7(bL, T, bn, ey); #c1(ERO1LB) c2(NP_063944) c3(ERO1-like protein beta precursor) c4(202359, 202360, 202361, 202362) c5(202363, 202364, 202365, 202366, 202367, 202368, 202369, 202370, 202371, 202372, 202373, 202374, 202375, 202376, 202377, 202378, 202379, 202380, 202381, 202382, 202383, 202384, 202385, 202386) c6( ) c7(bM, ac); #c1(ERP29) c2(NP_001029197) c3(endoplasmic reticulum resident protein 29 isoform 2 precursor) c4(30775) c5(30776, 30777, 30778, 30779, 30780) c6( ) c7(iu, T, aW, aT, ci, K, B, ad); #c1(ERP29) c2(NP_006808) c3(endoplasmic reticulum resident protein 29 isoform 1 precursor) c4(168284) c5(168285, 168286, 168287, 168288, 168289, 168290, 168291) c6( ) c7(iu, T, aW, aT, ci, K, B, ad); #c1(ERP44) c2(NP_055866) c3(endoplasmic reticulum resident protein 44 precursor) c4(184025) c5(184026, 184027, 184028, 184029, 184030, 184031) c6( ) c7(ad); #c1(ERV3-1) c2(NP_001007254) c3(endogenous retrovirus group 3 member 1 Env polyprotein precursor) c4(22650) c5(22651, 22652, 22653, 22654, 22655, 22656) c6( ) c7(nJ, bnX, eZ, eo, m, bkE, t, V, ae, cI); #c1(ERVW-1) c2(NP_055405) c3(syncytin-1 precursor) c4(180861) c5(180862, 180863, 180864, 180865, 180866, 180867) c6( ) c7(T, adP, aiR, eh, gA, boa, ci, aR, dV, ZQ, rB, K, eL, bnY, aW, hI, apn, aB, aoD, g, as, eE, uC, cm, y, aDX, dc, aiM, m, bod, wu, n, kO, eW, Mo, b, pe, kH, cU, Ne, h, afu, aq, CQ, kk, jT, dB, NL, eo, fL, agy, B, dA, AL, jx, aDO, ze, V, pd, eA, aaF, hb, aT, bK, rz, ae, xR, vT, oV, Y, Lf, Io, aDm, bu, cI, aoG, t, ck, iM, iQ, Zg, AH, Uq, hoc, rK, gx, Kd, hI, nI, Ke, iW, jh, Hn, pI, jE, EA, mC, ad, XB, aoH, dP, fU, bnZ, hX, F, tT, ds, bob, oW, IQ, wm, nJ, d, bkf, je, wc, gC, eZ, bee, xH, aJx, i, hE, EB); #c1(ESAM) c2(NP_620411) c3(endothelial cell-selective adhesion molecule precursor) c4(237586) c5(237587, 237588, 237589, 237590, 237591, 237592) c6( ) c7(ea, Y, dD, eq, fD); #c1(ESAM) c2(XP_005271777) c3(endothelial cell-selective adhesion molecule isoform X2) c4(283578) c5(283579, 283580, 283581, 283582, 283583) c6( ) c7(ea, Y, dD, eq, fD); #c1(ESCO1) c2(NP_443143) c3(N-acetyltransferase ESCO1) c4(229626) c5(229627, 229628, 229629, 229630, 229631, 229632) c6( ) c7(T, ib, bof, aA, cj, cm, aF, bu, f, it, af, ad, cI); #c1(ESCO1) c2(XP_011524101) c3(N-acetyltransferase ESCO1 isoform X2) c4(318661) c5(318662, 318663, 318664, 318665, 318666, 318667) c6( ) c7(T, ib, bof, aA, cj, cm, aF, bu, f, it, af, ad, cI); #c1(ESCO2) c2(XP_011542723) c3(N-acetyltransferase ESCO2 isoform X1) c4(341294) c5(341295, 341296, 341297, 341298, 341299, 341300) c6( ) c7(T, bei, nX, Az, atS, cj, aNL, Km, nA); #c1(ESCO2) c2(XP_011542724) c3(N-acetyltransferase ESCO2 isoform X2) c4(341301) c5(341302, 341303, 341304, 341305, 341306, 341307) c6( ) c7(T, bei, nX, Az, atS, cj, aNL, Km, nA); #c1(ESD) c2(XP_011533256) c3(S-formylglutathione hydrolase isoform X1) c4(329435) c5(329436, 329437, 329438, 329439, 329440, 329441) c6( ) c7(eY, A, bP, eM, bog, avA, qW, ace, MW, uu, j, bau, dI, kD; #c1(ESF1) c2(NP_001263309) c3(ESF1 homolog) c4(97160, 97161) c5(97162, 97163, 97164, 97165, 97166, 97167, 97168, 97169, 97170, 97171, 97172, 97173, 97174) c6( ) c7(cd); #c1(ESM1) c2(NP_001129076) c3(endnthelial cell-specific molecule 1 isoform b precursor) c4(50745) c5(50746, 50747, 50748, 50749, 50750, 50751, 50752, 50753, 50754) c6(50755, 50756) c7(es, T, py, iA, aI, aA, r, dL, aF, q, hE, eL, B); #c1(ESM1) c2(NP_008967) c3(endothelial cell-specific molecule 1 isoform a precursor) c4(169946) c5(169947, 169948, 169949, 169950, 169951, 169952, 169953, 169954) c6(169955, 169956) c7(es, T, py, iA, aI, aA, r, dL, aF, q, hE, eL, B); #c1(ESPL1) c2(NP_036423) c3(separin) c4(173715, 173716) c5(173717, 173718, 173719, 173720, 173721, 173722, 173723, 173724, 173725, 173726, 173727, 173728, 173729, 173730, 173731, 173732) c6( ) c7(ck, av, T, fM, id, ajm, eM, iU, eH, qK, aT, hR, KO, dL, eF, bz, ad); #c1(ESPN) c2(XP_011540537) c3(espin isoform X6) c4(339021) c5(339022, 339023, 339024, 339025, 339026, 339027, 339028, 339029, 339030, 339031, 339032, 339033) c6( ) c7(T, Y, aRa, aIA, nw, oc, boh, Bh, boi); #c1(ESPN) c2(XP_011540540) c3(espin isoform X9) c4( ) c5(339034, 339035, 339036, 339037, 339038, 339039) c6( ) c7(T, Y, aRa, aIA, nw, oc, boh, Bh, boi); #c1(ESR1) c2(NP_001278159) c3(estrogen receptor isoform 2) c4(109487) c5( ) c6( ) c7(gh, T, ea, bO, fd, aeu, ci, aY, Hr, bv, bor, aE, ajv, auB, iv, HR, hu, aid, azh, li, yo, nY, PQ, zE, GR, nB, cj, cX, k, sr, FG, aj, ml, cd, anw, Dz, dd, mJ, pi, yi, MD, sp, fe, zZ, hq, iO, dB, bom, Be, rp, Dh, bmk, aA, cz, bX, AO, q, aew, akU, rO, eu, bA, NE, iy, rs, eS, cI, pb, pa, ac, aDR, bt, On, iW, jN, jh, rr, uu, ad, hX, avp, bop, yt, le, wm, WZ, lx, cW, PE, ff, aeV, iV, bz, IC, aed, ne, iu, bM, bou, if, e, bB, cL, ur, aTS, ip, fS, anV, aeO, bc, Ur, xQ, Jl, hl, Qm, as, eF, cm, vA, mx, iS, aIm, Th, in, ik, dD, gU, afA, IT, wu, n, jz, zw, ec, Do, hi, A, aeU, PU, jq, Ye, YE, aqp, cA, bP, PL hL, at, fL, B, qc, vQ, bcq, wL, ti, v, V, asG, HJ, hW, BJ, aqI, rE, ae, jf, hM, Qr, vT, ev, Lf, ate, bu, t, KQ, Px, ck, kP, yH, nZ, Dd, eq, hd, hD, vc, nJ, auY, d, NH, rM, Z, HI, bF, gk, yE, II, gZ, y, pC, bdo, fR, atj, al, Xi, gf, qj, xE, u, Xc, Be, rJ, pX, ari, M, K, aDZ, eL, aNb, g, uC, ajj, rg, AM, Gs, m, bok, Vo, sw, zX, aw, NT, fN, qy, boj, abQ, zP, Pp, cM, auC, Ld, kT, W, afe, mg, boo, gv, IB, Pr, it, aeU, aAf, boq, oe, bot, jx, j, pd, eA, J, o, er, jF, aHu, qv, qG, bq, atn, aRR, kI, Y, r, en, wA, iK, bN, sn, hc, dy, KY, LS, gx, sY, id, aZ, LX, bS, EA, boy, azk, dP, fU, fX, acu, io, hP, aeQ, eH, bow, si, iR, auZ, aFb, eB, ei, hE, vt, boI, G, auW, pf, acs, iI, iX, qM, dQ, eN, hm, zQ, box, aW, bov, PG, hJ, aGl, eM, iT, sv, pw, cZ, wh, Bm, fr, et, Ea, qN, ai, eW, hw, zf, h, dL, hB, asT, he, wC, aiB, bos, iw, aq, op, bJ, vb, bm, hR, uz, ZZ, bL, eR, azn, nv, aT, vH, bK, an, af, qw, s, ND, iU, ahe, hf, bQ, f, aDQ, pH, sS, nM, pZ, aJt, aGo, aTU, im, hS, ha, vr, Fb, jE, aFJ, mC, qC, av, abk, I, ib, Rq, sO, qt, eZ, aF, eK, es, atM, bE, WK, aS, bon, X, atd); #c1(ESR1) c2(NP_001278170) c3(estrogen receptor isoform 3) c4(109488) c5( ) c6( ) c7(gh, T, ea, bO, fd, aeu, ci, aY, Hr, bv, bor, aE, ajv, auB, iv, HR, hu, aiJ, azh, li, yo, nY, PQ, zE, GR, nB, cj, cX, k, sr, FG, aj, mI, cd, aow, Dz, dd, mJ, pI, yi, MD, sp, fe, zZ, hq, iO, dB, bom, Be, rp, Dh, bmk, aA, cz, bX, AO, q, aew, akU, rO, eu, bA, NE, iy, rs, eS, cI, pb, pa, ac, aDR, bt, On, iW, jN, jh, rr, uu, ad, hX, avp, bop, yt, le, wm, WZ, lx, cW, PE, ff, aeV, iV, bz, IC, aed, ne, iu, bM, bou, if, e, bB, cL, ur, aTS, ip, fS, anV, aeO, bc, Ur, xQ, Jl, hl, Qm, as, eF, cm, vA, mx, iS, alm, Th, in, ik, dD, gU, afA, IT, wu, n, jz, zw, ec, Do, hi, A, aeU, PU, jq, Ye, YE, aqp, cA, bP, PI, hL, at, fL, B, qc, vQ, beg, wL, ti, v, V, asG, HJ, hW, BJ, aqI, rE, ae, jf, hM, Qr, vT, ev, Lf, ate, bu, t, KQ, Px, ck, kP, yH, nZ, Dd, eq, hd, hD, vc, nJ, auY, d, NH, rM, Z, HI, bF, gk, yE, lI, gZ, y, pC, bdo, fR, atj, aI, Xi, gf, qj, xE, u, Xc, Be, rJ, pX, ari, M, K, aDZ, eL, aNb, g, uC, ajj, rq, AM, Gs, m, bok, Vo, sw, zX, aw, NT, fN, qy, boj, abQ, zP, Pp, cM, auC, Ld, kT, W, afc, mg, boo, gv, IB, Pr, it, aoU, aAf, boq, oe, bot, jx, j, pd, eA, J, o, er, jF, aHu, qv, qG, bq, atn, aRR, kI, Y, r, en, wA, iK, bN, sn, hc, dy, KY, LS, gx, sY, id, aZ, LX, bS, EA, boy, azk, dP, fU, fX, acu, io, hP, aeQ, eH, bow, si, iR, auZ, aFb, eB, ei, hE, vt, boI, G, auW, pf, acs, iI, iX, qM, dQ, eN, hm, zQ, box, aW, bov, PG, hJ, aGl, eM, iT, sv, pw, cZ, wh, Bm, fr, et, Ea, qN, ai, eW, hw, zf, h, dL, hB, asT, he, wC, aiB, bos, iw, aq, op, bJ, vb, bm, hR, uz, ZZ, hL, eR, azn, nv, aT, vH, bK, an, af, qw, s, ND, iU, ahe, hf, bQ, f, aDQ, pH, sS, nM, pZ, aJt, aGo, aTU, im, hS, ha, vr, Fb, jE, aFJ, mC, qC, av, abk, I, ib, Rq, sO, qt, eZ, aF, eK, es, atM, bE, WK, aS, bon, X, atd); #c1(ESR1) c2(XP_006715437) c3(estrogen receptor isoform X3) c4( ) c5(289532, 289533, 289534, 289535, 289536, 289537, 289538, 289539, 289540, 289541, 289542, 289543, 289544, 289545, 289546, 289547, 289548, 289549, 289550, 289551, 289552, 289553, 289554, 289555, 289556, 289557, 289558) c6( ) c7(gh, T, ea, bO, fd, aeu, ci, aY, Hr, bv, bor, aE, ajv, auB, iv, HR, hu, aiJ, azh, li, yo, nY, PQ, zE, GR, nB, cj, cX, k, sr, FG, aj, ml, cd, aow, Dz, dd, mJ, pi, yi, MD, sp, fe, zZ, hq, iO, dB, bom, Be, rp, Dh, bmk, aA, cz, bX, AO, q, aew, akU, rO, eu, bA, NE, iy, rs, eS, cI, pb, pa, ac, aDR, bt, On, iW, jN, jh, rr, uu, ad, hX, avp, bop, yt, le, wm, WZ, lx, cW, PE, ff, aeV, iV, bz, IC, aed, ne, iu, bM, bou, if, e, bB, cL, ur, aTS, ip, fS, anV, aeO, bc, Ur, xQ, JIl hl, Qm, as, eF, cm, vA, mx, iS, alm, Th, in, ik, dD, gU, afA, IT, wu, n, jz, zw, ec, Do, hi, A, aeU, PU, jq, Ye, YE, aqp, cA, bP, PI, hL, at, fL, B, qc, vQ, bcq, wL, ti, v, V, asG, HJ, hW, BJ, aqI, rE, ae, jf, hM, Qr, vT, ev, Lf, ate, bu, t, KQ, Px, ck, kP, yH, nZ, Dd, eq, hd, hD, vc, nJ, auY, d, NH, rM, Z, HI, bF, gk, yE, lI, gZ, y, pC, bdo, fR, atj, al, Xi, gf, qj, xE, u, Xc, Bc, rJ, pX, ari, M, K, aDZ, eL, aNb, g, uC, ajj, rq, AM, Gs, m, bok, Vo, sw, zX, aw, NT, fN, qy, boj, abQ, zP, Pp, cM, auC, Ld, kT, W, afc, mg, boo, gv, IB, Pr, it, aoU, aAf, boq, oe, bot, jx, j, pd, eA, J, o, er, jE, aHu, qv, qG, bq, atn, aRR, kI, Y, r, en, wA, iK, bN, sn, hc, dy, KY, LS, gx, sY, id, aZ, LX, bS, EA, boy, azk, dP, fU, fX, acu, io, hP, aeQ, eH, bow, si, iR, auZ, aFb, eB, ei, hE, vt, boI, G, auW, pf, acs, iI, iX, qM, dQ, eN, hm, zQ, box, aW, bov, PG, hJ, aGl, eM, iT, sv, pw, cZ, wh, Bm, fr, et, Ea, qN, ai, eW, hw, zf, h, dL, hB, asT, he, wC, aiB, bos, iw, aq, op, bJ, vb, bm, hR, uz, ZZ, hL, eR, azn, nv, aT, vH, bK, an, af, qw, s, ND, iU, ahe, hf, bQ, f, aDQ, pH, sS, nM, pZ, aJt, aGo, aTU, im, hS, ha, vr, Fb, jE, aFJ, mC, qC, av, abk, I, ib, Rq, sO, qt, eZ, aF, eK, es, atM, bE, WK, aS, bon, X, atd); #c1(ESR1) c2(XP_011533848) c3(estrogen receptor isoform X1) c4(330026, 330027, 330028, 330029, 330030, 330031) c5(330032, 330033, 330034, 330035, 330036, 330037, 330038, 330039, 330040, 330041, 330042, 330043, 330044, 330045, 330046, 330047, 330048, 330049, 330050, 330051, 330052, 330053, 330054, 330055, 330056) c6( ) c7(gh, T, ea, bO, fd, aeu, ci, aY, Hr, bv, bor, aE, ajv, auB, iv, HR, hu, aiJ, azh, li, yo, nY, PQ, zE, GR, nB, cj, cX, k, sr, FG, aj, ml, cd, aow, Dz, dd, mJ, pi, yi, MD, sp, fe, zZ, hq, iO, dB, bom, Be, rp, Dh, bmk, aA, cz, bX, AO, q, aew, akU, rO, eu, bA, NE, iy, rs, eS, cl, pb, pa, ac, aDR, bt, On, iW, jN, jh, rr, uu, ad, hX, avp, bop, yt, le, wm, WZ, lx, cW, PE, ff, aeV, iV, bz, IC, aed, ne, iu, bM, bou, if, e, bB, cL, ur, aTS, ip, fS, anV, aeO, bc, Ur, xQ, Jl, hi, Qm, as, eF, cm, vA, mx, iS, alm, Th, in, ik, dD, gU, afA, IT, wu, n, jz, zw, ec, Do, hi, A, aeU, PU, jq, Ye, YE, aqp, cA, bP, PL hL, at, fL, B, qc, vQ, beq, wL, ti, v, V, asG, HJ, hW, BJ, aqI, rE, ae, jf, hM, Qr, vT, ev, Lf, ate, bu, t, KQ, Px, ck, kP, yH, nZ, Dd, eq, hd, hD, vc, nJ, auY, d, NH, rM, Z, HI, bF, gk, yE, II, gZ, y, pC, bdo, fR, atj, al, Xi, gf, qj, xE, u, Xc, Be, rJ, pX, ari, M, K, aDZ, eL, aNb, g, uC, ajj, rg, AM, Gs, m, bok, Vo, sw, zX, aw, NT, fN, qy, boj, abQ, zP, Pp, cM, auC, Ld, kT, W, afe, mg, boo, gv, IB, Pr, it, aeU, aAf, boq, oe, bot, jx, j, pd, eA, J, o, er, jF, aHu, qv, qG, bq, atn, aRR, kI, Y, r, en, wA, iK, bN, sn, hc, dy, KY, LS, gx, sY, id, aZ, LX, bS, EA, boy, azk, dP, fU, fX, acu, io, hP, aeQ, eH, bow, si, iR, auZ, aFb, eB, ei, hE, vt, boI, G, auW, pf, acs, iI, iX, qM, dQ, eN, hm, zQ, box, aW, bov, PG, hJ, aGl, eM, iT, sv, pw, cZ, wh, Bm, fr, et, Ea, qN, ai, eW, hw, zf, h, dL, hB, asT, he, wC, aiB, bos, iw, aq, op, bJ, vb, hm, hR, uz, ZZ, hL, eR, azn, nv, aT, vH, bK, an, af, qw, s, ND, iU, ahe, hf, bQ, f, aDQ, pH, sS, nM, pZ, aJt, aGo, aTU, im, hS, ha, vr, Fb, jE, aFJ, mC, qC, av, abk, I, ib, Rq, sO, qt, eZ, aF, eK, es, atM, bE, WK, aS, bon, X, atd); #c1(ESR1) c2(XP_011533850) c3(estrogen receptor isoform X4) c4(330057) c5(330058, 330059, 330060, 330061, 330062, 330063, 330064, 330065, 330066, 330067) c6( ) c7(gh, T, ea, bO, fd, aeu, ci, aY, Hr, bv, bor, aE, ajv, auB, iv, HR, hu, aiJ, azh, li, yo, nY, PQ, zE, GR, nB, cj, cX, k, sr, FG, aj, ml, cd, aow, Dz, dd, mJ, pi, yi, MD, sp, fe, zZ, hq, iO, dB, bom, Be, rp, Dh, bmk, aA, cz, bX, AO, q, aew, akU, rO, eu, bA, NE, iy, rs, eS, cl, pb, pa, ac, aDR, bt, On, iW, jN, jh, rr, uu, ad, hX, avp, bop, yt, le, wm, WZ, lx, cW, PE, ff, aeV, iV, bz, IC, aed, ne, iu, bM, bou, if, e, bB, cL, ur, aTS, ip, fS, anV, aeO, bc, Ur, xQ, Jl, hl, Qm, as, eF, cm, vA, mx, iS, alm, Th, in, ik, dD, gU, af A, IT, wu, n, jz, zw, ec, Do, hi, A, aeU, PU, jq, Ye, YE, aqp, cA, bP, PI, hL, at, fL, B, qc, vQ, bcq, wL, ti, v, V, asG, HJ, hW, BJ, aqI, rE, ae, jf, hM, Qr, vT, ev, Lf, ate, bu, t, KQ, Px, ck, kP, yH, nZ, Dd, eq, hd, hD, vc, nJ, auY, d, NH, rM, Z, HI, bF, gk, yE, II, gZ, y, pC, bdo, fR, atj, al, Xi, gf, qj, xE, u, Xc, Bc, rJ, pX, ari, M, K, aDZ, eL, aNb, g, uC, ajj, rg, AM, Gs, m, bok, Vo, sw, ik, aw, NT, fN, qy, boj, abQ, zP, Pp, cM, auC, Ld, kT, W, afe, mg, boo, gv, IB, Pr, it, aeU, aAf, boq, oe, bot, jx, j, pd, eA, J, o, er, jE, aHu, qv, qG, bq, atn, aRR, kI, Y, r, en, wA, iK, bN, sn, hc, dy, KY, LS, gx, sY, id, aZ, LX, bS, EA, boy, azk, dP, fU, fX, acu, io, hP, aeQ, eH, bow, si, iR, auZ, aFb, eB, ei, hE, vt, boI, G, auW, pf, acs, iI, iX, qM, dQ, eN, hm, zQ, box, aW, bov, PG, hJ, aGl, eM, iT, sv, pw, cZ, wh, Bm, fr, et, Ea, qN, ai, eW, hw, zf, h, dL, hB, asT, he, wC, aiB, bos, iw, aq, op, bJ, vb, bm, hR, uz, ZZ, hL, eR, azn, nv, aT, vH, bK, an, af, qw, s, ND, iU, ahe, hf, bQ, f, aDQ, pH, sS, nM, pZ, aJt, aGo, aTU, im, hS, ha, vr, Fb, jE, aFJ, mC, qC, av, abk, I, ib, Rq, sO, qt, eZ, aF, eK, es, atM, bE, WK, aS, bon, X, atd); #c1(ESR1) c2(XP_011533851) c3(estrogen receptor isoform X5) c4(330068, 330069) c5(330070, 330071, 330072, 330073, 330074, 330075, 330076, 330077, 330078, 330079, 330080, 330081, 330082, 330083, 330084, 330085, 330086) c6( ) c7(gh, T, ea, bO, fd, aeu, ci, aY, Hr, bv, bor, aE, ajv, auB, iv, HR, hu, aiJ, azh, li, yo, nY, PQ, zE, GR, nB, cj, cX, k, sr, FG, aj, ml, cd, aow, Dz, dd, mJ, pi, yi, MD, sp, fe, zZ, hq, iO, dB, bom, Be, rp, Dh, bmk, aA, cz, bX, AO, q, aew, akU, rO, eu, bA, NE, iy, rs, eS, cl, pb, pa, ac, aDR, bt, On, iW, jN, jh, rr, uu, ad, hX, avp, bop, yt, le, wm, WZ, lx, cW, PE, ff, aeV, iV, bz, IC, aed, ne, iu, bM, bou, if, e, bB, cL, ur, aTS, ip, fS, anV, aeO, bc, Ur, xQ, Jl, hl, Qm, as, eF, cm, vA, mx, iS, alm, Th, in, ik, dD, gU, afA, IT, wu, n, jz, zw, ec, Do, hi, A, aeU, PU, jq, Ye, YE, aqp, cA, bP, PL hL, at, fL, B, qc, vQ, bcq, wL, ti, v, V, asG, HJ, hW, BJ, aqI, rE, ae, jf, hM, Qr, vT, ev, Lf, ate, bu, t, KQ, Px, ck, kP, yH, nZ, Dd, eq, hd, hD, vc, nJ, auY, d, NH, rM, Z, HI, bF, gk, yE, II, gZ, y, pC, bdo, fR, atj, al, Xi, gf, qj, xE, u, Xc, Be, rJ, pX, ari, M, K, aDZ, eL, aNb, g, uC, ajj, rg, AM, Gs, m, bok, Vo, sw, zX, aw, NT, fN, qy, boj, abQ, zP, Pp, cM, auC, Ld, kT, W, afe, mg, boo, gv, IB, Pr, it, aoU, aAf, boq, oe, bet, jx, j, pd, eA, J, o, er, jF, aHu, qv, gG, bq, atn, aRR, kl, Y, r, en, wA, iK, bN, sn, hc, dy, KY, LS, gx, sY, id, aZ, LX, bS, EA, boy, azk, dP, fU, fX, acu, io, hP, aeQ, eH, bow, si, iR, auZ, aFb, eB, ei, hE, vt, boI, G, auW, pf, acs, il, iX, qM, dQ, eN, hm, zQ, box, aW, bov, PG, hJ, aGl, eM, iT, sv, pw, cZ, wh, Bm, fr, et, Ea, qN, ai, eW, hw, zf, h, dL, hB, asT, he, wC, aiB, bos, iw, aq, op, bJ, vb, bm, hR, uz, ZZ, bL, eR, azn, nv, aT, vH, bK, an, af, qw, s, ND, iU, ahe, hf, bQ, f, aDQ, pH, sS, nM, pZ, aJt, aGo, aTU, im, hS, ha, vr, Fb, jE, aFJ, mC, qC, av, abk, I, ib, Rq, sO, qt, eZ, aF, eK, es, atM, bE, WK, aS, bon, X, atd); #c1(ESR2) c2(NP_001201831) c3(estrogen receptor beta isoform 3) c4(83528) c5(83529, 83530, 83531, 83532, 83533, 83534, 83535, 83536, 83537, 83538, 83539, 83540, 83541, 83542, 83543, 83544) c6( ) c7(bM, T, auW, ea, e, al, bB, ur, ci, IN, bv, u, iI, iX, M, boB, iv, bbu, K, dQ, pk, eL, eN, aiJ, ye, zQ, dH, Jl, aW, Rr, hl, nY, vs, PQ, NR, g, eF, uC, GR, qJ, rq, nB, AM, eM, vA, ZT, U, m, yA, iu, dD, gU, FG, wh, wu, aw, NT, n, fr, et, ml, abQ, zP, jw, cd, ai, boz, b, h, dL, Dz, hB, wC, yi, PX, fe, aq, Pp, PU, cM, Ld, op, hq, bP, PI, bom, hL, bm, hR, at, gv, Pr, B, it, qc, boA, fM, oe, Lx, Nt, aA, cz, v, j, C, AO, q, eA, aHu, HJ, nv, BJ, aT, vH, an, rE, ae, af, eu, bA, jf, qw, hM, kl, ND, vT, nO, oV, Y, Lf, fO, r, cu, rs, en, cl, wA, t, f, iK, pb, bQ, bN, nM, sn, pZ, kP, ac, II, mf, aTU, EY, im, hS, HQ, nZ, sY, id, aZ, iW, jh, bS, uu, dG, eq, Fb, ad, dP, av, I, ib, sO, NS, le, io, hD, vc, hP, wm, ji, afe, qt, PE, ff, eZ, dq, aeV, aF, Z, bz, yE, bE, aeg, aS, ei, i, IC, X, y); #c1(ESR2) c2(NP_001258806) c3(estrogen receptor beta isoform 6) c4(96556) c5(96557, 96558, 96559, 96560, 96561, 96562) c6( ) c7(bM, T, auW, ea, e, al, bB, ur, ci, IN, bv, u, iI, iX, M, boB, iv, bbu, K, dQ, pk, eL, eN, aiJ, ye, zQ, dH, JI, aW, Rr, hl, nY, vs, PQ, NR, g, eF, uC, GR, qJ, rq, nB, AM, eM, vA, ZT, U, m, yA, iu, dD, gU, FG, wh, wu, aw, NT, n, fr, et, mL abQ, zP, jw, cd, ai, boz, b, h, dL, Dz, hB, wC, yi, PX, fe, aq, Pp, PU, cM, Ld, op, hq, bP, PI, bom, hL, bm, hR, at, gv, Pr, B, it, qc, boA, fM, oe, Lx, Nt, aA, cz, v, j, C, AO, q, eA, aHu, HJ, nv, BJ, aT, vH, an, rE, ae, af, eu, bA, jf, qw, hM, kl, ND, vT, nO, oV, Y, Lf, fO, r, cu, rs, en, cl, wA, t, f, iK, pb, bQ, bN, nM, sn, pZ, kP, ac, II, mf, aTU, EY, im, hS, HQ, nZ, sY, id, aZ, iW, jh, bS, uu, dG, eq, Fb, ad, dP, av, I, ib, sO, NS, le, io, hD, vc, hP, wm, ji, afe, qt, PE, ff, eZ, dq, aeV, aF, Z, bz, yE, bE, aeg, aS, ei, i, IC, X, y); #c1(ESR2) c2(NP_001278652) c3(estrogen receptor beta isoform 2) c4(109933, 109934) c5(109935, 109936, 109937, 109938, 109939, 109940, 109941, 109942, 109943, 109944, 109945, 109946, 109947, 109948) c6( ) c7(bM, T, auW, ea, e, al, bB, ur, ci, IN, bv, u, iI, iX, M, boB, iv, bbu, K, dQ, pk, eL, eN, aiJ, ye, zQ, dH, JI, aW, Rr, hl, nY, vs, PQ, NR, g, eF, uC, GR, qJ, rq, nB, AM, eM, vA, ZT, U, m, yA, iu, dD, gU, FG, wh, wu, aw, NT, n, fr, et, ml, abQ, zP, jw, cd, ai, boz, b, h, dL, Dz, hB, wC, yi, PX, fe, aq, Pp, PU, cM, Ld, op, hq, bP, PI, bom, hL, bm, hR, at, gv, Pr, B, it, qc, boA, fM, oe, Lx, Nt, aA, cz, v, j, C, AO, q, eA, aHu, HJ, nv, BJ, aT, vH, an, rE, ae, af, eu, bA, jf, qw, hM, kl, ND, vT, nO, oV, Y, Lf, fO, r, cu, rs, en, cl, wA, t, f, iK, pb, bQ, bN, nM, sn, pZ, kP, ac, II, mf, aTU, EY, im, hS, HQ, nZ, sY, id, aZ, iW, jh, bS, uu, dG, eq, Fb, ad, dP, av, I, ib, sO, NS, le, io, hD, vc, hP, wm, ji, afe, qt, PE, ff, eZ, dq, aeV, aF, Z, bz, yE, bE, aeg, aS, ei, i, IC, X, y); #c1(ESR2) c2(XP_011534847) c3(estrogen receptor beta isoform X2) c4( ) c5(331369, 331370, 331371, 331372, 331373, 331374) cG( ) c7(bM, T, auW, ea, e, al, bB, ur, ci, IN, bv, u, iI, iX, M, boB, iv, bbu, K, dQ, pk, eL, eN, aiJ, ye, zQ, dH, JI, aW, Rr, hi, nY, vs, PQ, NR, g, eF, uC, GR, qJ, rq, nB, AM, eM, vA, ZT, U, m, yA, iu, dD, gU, FG, wh, wu, aw, NT, n, fr, et, ml, abQ, zP, jw, cd, ai, boz, b, h, dL, Dz, hB, wC, yi, PX, fe, aq, Pp, PU, cM, Ld, op, hq, bP, PI, bom, hL, bm, hR, at, gv, Pr, B, it, qc, boA, fM, oe, Lx, Nt, aA, cz, v, j, C, AO, q, eA, aHu, HJ, nv, BJ, aT, vH, an, rE, ae, af, eu, bA, jf, qw, hM, kI, ND, vT, nO, oV, Y, Lf, fO, r, cu, rs, en, cl, wA, t, f, iK, pb, bQ, bN, nM, sn, pZ, kP, ac, II, mf, aTU, EY, im, hS, HQ, nZ, sY, id, aZ, iW, jh, bS, uu, dG, eq, Fb, ad, dP, av, I, ib, sO, NS, le, io, hD, vc, hP, wm, ji, afe, qt, PE, ff, eZ, dq, aeV, aF, Z, bz, yE, bE, aeg, aS, ei, i, IC, X, y); #c1(ESR2) c2(XP_011534848) c3(estrogen receptor beta isoform X1) c4(331375, 331376) c5(331377, 331378, 331379, 331380, 331381, 331382, 331383) c6( ) c7(bM, T, auW, ea, e, al, bB, ur, ci, IN, bv, u, iI, iX, M, boB, iv, bbu, K, dQ, pk, eL, eN, aiJ, ye, zQ, dH, JI, aW, Rr, hl, nY, vs, PQ, NR, g, eF, uC, GR, qJ, rq, nB, AM, eM, vA, ZT, U, m, yA, iu, dD, gU, FG, wh, wu, aw, NT, n, fr, et, ml, abQ, zP, jw, cd, ai, boz, b, h, dL, Dz, hB, wC, yi, PX, fe, aq, Pp, PU, cM, Ld, op, hq, bP, PI, bom, hL, bm, hR, at, gv, Pr, B, it, qc, boA, fM, oe, Lx, Nt, aA, cz, v, j, C, AO, q, eA, aHu, H J, nv, BJ, aT, vH, an, rE, ae, af, eu, bA, jf, qw, hM, kl, ND, vT, nO, oV, Y, Lf, fO, r, cu, rs, en, cl, wA, t, f, iK, pb, bQ, bN, nM, sn, pZ, kP, ac, II, mf, aTU, EY, im, hS, HQ, nZ, sY, id, aZ, iW, jh, bS, uu, dG, eq, Fb, ad, dP, av, I, ib, sO, NS, le, io, hD, vc, hP, wm, ji, afe, qt, PE, ff, eZ, dq, aeV, aF, Z, bz, yE, bE, aeg, aS, ei, i, IC, X, y); #c1(ESRP1) c2(NP_001030087) c3(epithelial splicing regulatory protein 1 isoform 2) c4(30918) c5(30919, 30920, 30921, 30922, 30923, 30924) cG( ) c7(T, aC, yo, aE, s, OG, bE, r, bB, rO, kp, fr, q, JW, X, ad); #c1(ESRP1) c2(NP_001116297) c3(epithelial splicing regulatory protein 1 isoform 4) c4(43732) c5(43733, 43734, 43735, 43736, 43737, 43738) c6( ) c7(T, aC, yo, aE, s, OG, bE, r, bB, rO, kp, fr, q, JW, X, ad); #c1(ESRP1) c2(NP_001116298) c3(epithelial splicing regulatory protein 1 isoform 3) c4(43739) c5(43740, 43741, 43742, 43743, 43744, 43745) cG( ) c7(T, aC, yo, aE, s, OG, bE, r, bB, rO, kp, fr, q, JW, X, ad); #c1(ESRP1) c2(NP_060167) c3(epithelial splicing regulatory protein 1 isoform 1) c4(194599) c5(194600, 194601, 194602, 194603, 194604, 194605) cG( ) c7(T, aC, yo, aE, s, OG, bE, r, bB, rO, kp, fr, q, JW, X, ad); #c1(ESRP2) c2(NP_079215) c3(epithelial splicing regulatory protein 2) c4(217466) c5(217467, 217468, 217469, 217470, 217471, 217472) cG( ) c7(T, g, r); #c1(ESRRA) c2(NP_001269379) c3(steroid hormone receptor ERR1 isoform 1) c4(101375, 101376) c5(101377, 101378, 101379, 101380, 101381, 101382, 101383, 101384, 101385, 101386, 101387, 101388, 101389) cG( ) c7(T, bB, v, ci, cd, q, ad, gJ, aql, aT, bq, dQ, bA, A, aW, iw, r, dq, aq, g, cl, iR, t, nB, bE, hL, m, ao); #c1(ESRRA) c2(NP_001269380) c3(steroid hormone receptor ERR1 isoform 2) c4(101390) c5(101391, 101392, 101393, 101394, 101395, 101396, 101397, 101398, 101399, 101400, 101401, 101402) cG( ) c7(T, bB, v, ci, cd, q, ad, gJ, aql, aT, bq, dQ, bA, A, aW, iw, r, dq, aq, g, cl, iR, t, nB, bE, hL, m, ao); #c1(ESRRB) c2(NP_004443) c3(steroid hormone receptor ERR2) c4(146362, 146363) c5( ) cG( ) c7(bL, Mb, T, dD, aNA, ea, Kh, eq, ai, q, ad, iu, aE, pN, aT, K, ae, dx, IR, aW, r, cl, t, dB, boC, hL, m, UF, Bh, B); #c1(ESRRB) c2(XP_005267461) c3(steroid hormone receptor ERR2 isoform X5) c4( ) c5(280977, 280978, 280979, 280980, 280981280982) cG( ) c7(bL, Mb, T, dD, aNA, ea, Kh, eq, ai, q, ad, iu, aE, pN, aT, K, ae, dx, IR, aW, r, cl, t, dB, boC, hL, m, UF, Bh, B); #c1(ESRRB) c2(XP_011534855) c3(steroid hormone receptor ERR2 isoform X3) c4(331384) c5(331385, 331386, 331387, 331388, 331389, 331390, 331391, 331392, 331393, 331394) c6( ) c7(bL, Mb, T, dD, aNA, ea, Kh, eq, ai, q, ad, iu, aE, pN, aT, K, ae, dx, IR, aW, r, cl, t, dB, boC, hL, m, UF, Bh, B); #c1(ESRRB) c2(XP_011534856) c3(steroid hormone receptor ERR2 isoform X4) c4(331395) c5(331396, 331397, 331398, 331399, 331400, 331401, 331402, 331403, 331404, 331405, 331406, 331407, 331408, 331409, 331410, 331411331412) c6( ) c7(bL, Mb, T, dD, aNA, ea, Kh, eq, ai, q, ad, iu, aE, pN, aT, K, ae, dx, IR, aW, r, cl, t, dB, boC, hL, m, UF, Bh, B); #c1(ESRR6) c2(NP_001230436) c3(estrogen-related receptor gamma isoform 5) c4(86287) c5(86288, 86289, 86290, 86291, 86292, 86293, 86294, 86295, 86296, 86297, 86298, 86299, 86300, 86301, 86302) c6( ) c7(bL, aW, ajP, aT, r, cz, dG, K, g, oQ, Kw, cl); #c1(ESRR6) c2(NP_001230447) c3(estrogen-related receptor gamma isoform 6) c4(86303) c5(86304, 86305, 86306, 86307, 86308, 86309, 86310) c6( ) c7(bL, aW, ajP, aT, r, cz, dG, K, g, oQ, Kw, cl); #c1(ESRR6) c2(NP_001429) c3(estrogen-related receptor gamma isoform 1) c4(117776, 117777) c5(117778, 117779, 117780, 117781117782, 117783, 117784, 117785, 117786, 117787, 117788, 117789, 117790) c6( ) c7(bL, aW, ajP, aT, r, cz, dG, K, g, oQ, Kw, cl); #c1(ESRR6) c2(NP_996317) c3(estrogen-related receptor gamma isoform 2) c4(263999, 264000, 264001) c5(264002, 264003, 264004, 264005, 264006, 264007, 264008, 264009, 264010, 264011, 264012, 264013, 264014, 264015, 264016, 264017, 264018, 264019, 264020, 264021, 264022, 264023, 264024, 264025, 264026, 264027, 264028, 264029, 264030, 264031, 264032, 264033, 264034, 264035, 264036, 264037, 264038, 264039, 264040) c6( ) c7(bL, aW, ajP, aT, r, cz, dG, K, g, oQ, Kw, cl); #c1(ESRR6) c2(XP_011507568) c3(estrogen-related receptor gamma isoform X4) c4(297484) c5(297485, 297486, 297487, 297488, 297489) c6( ) c7(bL, aW, ajP, aT, r, cz, dG, K, g, oQ, Kw, cl); #c1(ESRR6) c2(XP_011507574) c3(estrogen-related receptor gamma isoform XG) c4( ) c5(297490, 297491, 297492) c6( ) c7(bL, aW, ajP, aT, r, cz, dG, K, g, oQ, Kw, cl); #c1(ESRR6) c2(XP_011507584) c3(estrogen-related receptor gamma isoform X7) c4(297493) c5(297494, 297495, 297496, 297497, 297498) c6( ) c7(bL, aW, ajP, aT, r, cz, dG, K, g, oQ, Kw, cl); #c1(ESXI) c2(NP_703149) c3(homeobox protein ESXI) c4(246011) c5(246012, 246013, 246014, 246015, 246016, 246017, 246018, 246019) c6( ) c7(T, NO, MP, vH, UI, ci); #c1(ESYT1) c2(NP_001171725) c3(extended synaptotagmin-1 isoform 1) c4(71452) c5(71453, 71454, 71455, 71456, 71457, 71458, 71459, 71460, 71461, 71462) c6( ) c7(T, eM); #c1(ESYT1) c2(NP_056107) c3(extended synaptotagmin-1 isoform 2) c4(185733, 185734) c5(185735, 185736, 185737, 185738, 185739, 185740, 185741, 185742, 185743, 185744, 185745, 185746) c6( ) c7(T, eM); #c1(ESYT2) c2(NP_065779) c3(extended synaptotagmin-2) c4(205370, 205371, 205372, 205373, 205374) c5(205375, 205376, 205377, 205378, 205379, 205380, 205381, 205382, 205383, 205384, 205385, 205386, 205387, 205388, 205389, 205390, 205391, 205392, 205393, 205394, 205395, 205396, 205397, 205398, 205399, 205400, 205401, 205402, 205403, 205404) c6( ) c7(T); #c1(ESYT3) c2(NP_114119) c3(extended synaptotagmin-3) c4(222227) c5(222228, 222229, 222230, 222231, 222232, 222233) c6( ) c7(j); #c1(ETAA1) c2(NP_061875) c3(ewing's turner-associated antigen 1) c4(200881) c5(200882, 200883, 200884, 200885, 200886, 200887) c6( ) c7(yY, aw, cd, j); #c1(ETFI) c2(NP_001269114) c3(eukaryotic peptide chain release factor subunit 1 isoform 3) c4(100467) c5(100468, 100469, 100470, 100471, 100472, 100473) c6( ) c7(eR, aW, bnM, aT, cI, aY, bz); #c1(ETFI) c2(NP_001278903) c3(eukaryotic peptide chain release factor subunit 1 isoform 2) c4( ) c5(110856, 110857, 110858, 110859, 110860) c6( ) c7(eR, aW, bnM, aT, cI, aY, bz); #c1(ETFI) c2(NP_004721) c3(eukaryotic peptide chain release factor subunit 1 isoform 1) c4(149073, 149074) c5(149075, 149076, 149077, 149078, 149079, 149080, 149081) c6( ) c7(eR, aW, bnM, aT, cI, aY, bz); #c1(ETFA) c2(NP_000117) c3(electron transfer flavoprotein subunit alpha, mitochondrial isoform a) c4(1951) c5(1952, 1953, 1954, 1955, 1956, 1957) c6( ) c7(bL, T, ol, jh, aj, fr, ci, iJ, J, hd, F, ib, aoc, hb, oj, h, By, af, cp, jf, ZH, CN, So, hp, g, cm, nB, y, B); #c1(ETFA) c2(NP_001121188) c3(electron transfer flavoprotein subunit alpha, mitochondrial isoform b) c4(45726) c5(45727, 45728, 45729, 45730, 45731, 45732) c6( ) c7(bL, T, ol, jh, aj, fr, ci, iJ, J, hd, F, ib, aoc, hb, oj, h, By, af, cp, jf, ZH, CN, So, hp, g, cm, nB, y, B); #c1(ETFB) c2(NP_001014763) c3(electron transfer flavoprotein subunit beta isoform 2) c4(25976) c5(25977, 25978, 25979, 25980, 25981, 25982) cG( ) c7(T, hd, nB, ol, oj, By, aj, hp, K, cm, af, J); #c1(ETFB) c2(NP_001976) c3(electron transfer flavoprotein subunit beta isoform 1) c4(122801) c5(122802, 122803, 122804, 122805, 122806, 122807) c6( ) c7(T, hd, nB, ol, oj, By, aj, hp, K, cm, af, J); #c1(ETFDH) c2(NP_001268666) c3(electron transfer flavoprotein-ubiguinone oxidoreductase, mitochondrial isoform 2) c4(100106) c5(100107, 100108, 100109, 100110, 100111, 100112) c6( ) c7(EG, T, mO, hd, nB, aNJ, bo, el, oj, dq, By, arf, hp, aj, v, du, cm, af, J, MG); #c1(ETFDH) c2(NP_004444) c3(electron transfer flavoprotein-ubiguinone oxidoreductase, mitochondrial isoform 1 precursor) c4(146364) c5(146365, 146366, 146367, 146368, 146369, 146370) c6( ) c7(EG, T, mO, hd, nB, aNJ, bo, el, oj, dq, By, arf, hp, aj, v, du, cm, af, J, MG); #c1(ETHE1) c2(NP_055112) c3(persulfide dioxygenase ETHEL mitochondrial) c4(179012) c5(179013, 179014, 179015, 179016, 179017, 179018) c6( ) c7(IN, aA, uo, So, dq, aF, acJ, B); #c1(ETNK1) c2(NP_001034570) c3(ethannlamine kinase 1 isoform B) c4(31803) c5(31804, 31805, 31806, 31807, 31808, 31809) c6( ) c7(wu, ey, wm); #c1(ETNK1) c2(NP_061108) c3(ethannlamine kinase 1 isoform A) c4(199151) c5(199152, 199153, 199154, 199155, 199156, 199157) c6( ) c7(wu, ey, wm); #c1(ETNK1) c2(XP_011519042) c3(ethanolamine kinase 1 isoform X1) c4(313536) c5( ) c6( ) c7(wu, ey, wm); #c1(ETNK1) c2(XP_011519043) c3(ethanolamine kinase 1 isoform X2) c4( ) c5(313537, 313538, 313539, 313540, 313541, 313542) c6( ) c7(wu, ey, wm); #c1(ETNK2) c2(NP_001284689) c3(ethannlamine kinase 2 isoform 2) c4(112309) c5(112310, 112311, 112312, 112313, 112314, 112315) c6( ) c7(cz); #c1(ETNK2) c2(NP_001284690) c3(ethannlamine kinase 2 isoform 3) c4( ) c5(112316, 112317, 112318, 112319, 112320) c6( ) c7(cz); #c1(ETNK2) c2(NP_001284691) c3(ethannlamine kinase 2 isoform 4) c4(112321) c5(112322, 112323, 112324, 112325, 112326, 112327) c6( ) c7(cz); #c1(ETNK2) c2(NP_060678) c3(ethannlamine kinase 2 isoform 1) c4(197113, 197114, 197115) c5(197116, 197117, 197118, 197119, 197120, 197121, 197122, 197123, 197124, 197125, 197126, 197127, 197128) c6( ) c7(cz); #c1(ETNPPL) c2(NP_001140062) c3(ethannlamine-phosphate phospho-lyase isoform 2) c4(60011) c5(60012, 60013, 60014, 60015, 60016, 60017) c6( ) c7(uJ, bK, eZ); #c1(ETNPPL) c2(NP_001140099) c3(ethannlamine-phosphate phospho-lyase isoform 3) c4(60018) c5(60019, 60020, 60021, 60022, 60023, 60024) c6( ) c7(uJ, bK, eZ); #c1(ETNPPL) c2(NP_112569) c3(ethanolamine-phosphate phospho-lyase isoform 1) c4(221411) c5(221412, 221413, 221414, 221415, 221416, 221417) c6( ) c7(uJ, bK, eZ); #c1(ETS1) c2(NP_001137292) c3(protein C-ets-1 isoform 1) c4(55304) c5(55305, 55306, 55307, 55308, 55309, 55310) c6( ) c7(bM, T, aC, if, bB, ci, ip, Vp, gJ, aE, ja, K, hH, JI, aW, Ls, HA, g, as, cm, qJ, nB, xD, AM, cj, m, qy, aj, qN, qW, cq, acA, kl, IG, hn, dx, A, op, GU, dB, hL, fL, B, aA, j, pd, q, J, eA, eJ, aT, cy, Fx, bq, ae, Lu, s, NE, iU, iZ, Y, r, en, hf, cl, t, Px, iK, ck, iM, kP, dh, nG, np, bt, jh, hF, tK, mC, ad, dP, hd, yt, Yo, hD, fb, Yi, d, je, BO, ff, eZ, aF, hp, bz, bE, bC, y); #c1(ETS1) c2(NP_001155894) c3(protein C-ets-1 isoform 3) c4(61625) c5(61626, 61627, 61628, 61629, 61630, 61631) c6( ) c7(bM, T, aC, if, bB, ci, ip, Vp, gJ, aE, ja, K, hH, JI, aW, Ls, HA, g, as, cm, qJ, nB, xD, AM, cj, m, qy, aj, qN, qW, cq, acA, kl, IG, hn, dx, A, op, GU, dB, hL, fL, B, aA, j, pd, q, J, eA, eJ, aT, cy, Fx, bq, ae, Lu, s, NE, iU, iZ, Y, r, en, hf, cl, t, Px, iK, ck, iM, kP, dh, nG, np, bt, jh, hF, tK, mC, ad, dP, hd, yt, Yo, hD, fb, Yi, d, je, BO, ff, eZ, aF, hp, bz, bE, bC, y); #c1(ETS1) c2(NP_005229) c3(protein C-ets-1 isoform 2) c4(154251, 154252) c5(154253, 154254, 154255, 154256, 154257, 154258, 154259, 154260, 154261, 154262, 154263, 154264, 154265) c6( ) c7(bM, T, aC, if, bB, ci, ip, Vp, gJ, aE, ja, K, hH, JI, aW, Ls, HA, g, as, cm, qJ, nB, xD, AM, cj, m, qy, aj, qN, qW, cq, acA, kl, IG, hn, dx, A, op, GU, dB, hL, fL, B, aA, j, pd, q, J, eA, eJ, aT, cy, Fx, bq, ae, Lu, s, NE, iU, iZ, Y, r, en, hf, cl, t, Px, iK, ck, iM, kP, dh, nG, np, bt, jh, hF, tK, mC, ad, dP, hd, yt, Yo, hD, fb, Yi, d, je, BO, ff, eZ, aF, hp, bz, bE, bC, y); #c1(ETS1) c2(XP_011540954) c3(protein C-ets-1 isoform X4) c4(339487) c5(339488, 339489, 339490, 339491, 339492, 339493, 339494, 339495, 339496, 339497) c6( ) c7(bM, T, aC, if, bB, ci, ip, Vp, gJ, aE, ja, K, hH, JI, aW, Ls, HA, g, as, cm, qJ, nB, xD, AM, cj, m, qy, aj, qN, qW, cq, acA, kl, IG, hn, dx, A, op, GU, dB, hL, fL, B, aA, j, pd, q, J, eA, eJ, aT, cy, Fx, bq, ae, Lu, s, NE, iU, iZ, Y, r, en, hf, cl, t, Px iK, ck, iM, kP, dh, nG, np, bt, jh, hF, tK, mC, ad, dP, hd, yt, Yo, hD, fb, Yi, d, je, BO, ff, eZ, aF, hp, bz, bE, bC, y); #c1(ETS2) c2(NP_001243224) c3(protein C-ets-2 isoform 2) c4(90194, 90195, 90196) c5(90197, 90198, 90199) c6( ) c7(bM, T, fG, aA, bB, n, bS, j, et, ci, hF, q, ad, hX, anj, ib, aE, HC, aT, cU, iY, dL, ji, K, nJ, ae, af, eL, d, je, aW, f J, ff, Az, eZ, r, aF, en, g, Z, t, f, bz, LB, ck, EW, It, iM, GU, c, bE, eM, m, fD, y, bt, ik, B); #c1(ETS2) c2(XP_005260992) c3(protein C-ets-2 isoform X1) c4( ) c5(277050, 277051, 277052, 277053, 277054, 277055, 277056, 277057, 277058, 277059, 277060, 277061, 277062, 277063, 277064, 277065, 277066, 277067, 277068, 277069) c6( ) c7(bM, T, fG, aA, bB, n, bS, j, et, ci, hF, q, ad, hX, anj, ib, aE, HC, aT, cU, iY, dL, ji, K, nJ, ae, af, eL, d, je, aW, f J, ff, Az, eZ, r, aF, en, g, Z, t, f, bz, LB, ck, EW, It, iM, GU, c, bE, eM, m, fD, y, bt, ik, B); #c1(ETV1) c2(NP_001156619) c3(ETS translocation variant 1 isoform b) c4(61794, 61795) c5(61796, 61797, 61798, 61799, 61800, 61801, 61802, 61803, 61804, 61805, 61806, 61807, 61808, 61809, 61810, 61811, 61812, 61813, 61814) c6( ) c7(gh, T, fb, pf, JI, aW, Y, aT, m, g, t, ae, ad); #c1(ETV1) c2(NP_001156622) c3(ETS translocation variant 1 isoform d) c4(61815) c5(61816, 61817, 61818, 61819, 61820, 61821) c6( ) c7(gh, T, fb, pf, JI, aW, Y, aT, m, g, t, ae, ad); #c1(ETV1) c2(NP_001156623) c3(ETS translocation variant 1 isoform e) c4(61822) c5(61823, 61824, 61825, 61826, 61827, 61828) c6( ) c7(gh, T, fb, pf, JI, aW, Y, aT, m, g, t, ae, ad); #c1(ETV1) c2(NP_001156624) c3(ETS translocation variant 1 isoform f) c4(61829) c5(61830, 61831, 61832, 61833, 61834, 61835) c6( ) c7(gh, T, fb, pf, JI, aW, Y, aT, m, g, t, ae, ad); #c1(ETV1) c2(XP_011513470) c3(ETS translocation variant 1 isoform X1) c4(305731, 305732) c5(305733, 305734, 305735, 305736, 305737, 305738, 305739, 305740, 305741, 305742, 305743, 305744, 305745, 305746, 305747, 305748) c6( ) c7(gh, T, fb, pf, JI, aW, Y, aT, m, g, t, ae, ad); #c1(ETV1) c2(XP_011513474) c3(ETS translocation variant 1 isoform X2) c4(305749, 305750) c5(305751, 305752, 305753, 305754, 305755, 305756, 305757, 305758, 305759, 305760, 305761, 305762, 305763, 305764) c6( ) c7(gh, T, fb, pf, JI, aW, Y, aT, m, g, t, ae, ad); #c1(ETV3) c2(NP_005231) c3(ETS translocation variant 3 isoform 2) c4(154266) c5(154267, 154268, 154269, 154270, 154271, 154272) c6( ) c7(aW, om, cz, cj, aT); #c1(ETV3) c2(XP_006711273) c3(ETS translocation variant 3 isoform X1) c4(285830) c5(285831, 285832, 285833, 285834, 285835, 285836, 285837, 285838) c6( ) c7(aW, om, cz, cj, aT); #c1(ETV4) c2(NP_001073143) c3(ETS translocation variant 4 isoform 1) c4(35633, 35634, 35635) c5(35636, 35637, 35638, 35639, 35640, 35641, 35642, 35643, 35644, 35645, 35646, 35647, 35648, 35649, 35650, 35651, 35652, 35653) c6( ) c7(gx, T, aC, pf, wu, NT, aA, bB, n, ci, q, ad, eA, av, aE, NS, aT, K, wm, ae, dx, Qe, gw, eG, boE, JI, aW, Y, ff, r, aF, en, g, t, boD, bz, eM, bE, m, X); #c1(ETV4) c2(NP_001248366) c3(ETS translocation variant 4 isoform 2) c4( ) c5(93823, 93824, 93825, 93826, 93827, 93828, 93829, 93830) c6( ) c7(gx, T, aC, pf, wu, NT, aA, bB, n, ci, q, ad, eA, av, aE, NS, al K, wm, ae, dx, Qe, qw, eG, boE, JI, aW, Y, ff, r, aF, en, g, t, boD, bz, eM, bE, m, X); #c1(ETV4) c2(XP_011522815) c3(ETS translocation variant 4 isoform X1) c4( ) c5(317311) c6( ) c7(gx, T, aC, pf, wu, NT, aA, bB, n, ci, q, ad, eA, av, aE, NS, aT, K, wm, ae, dx, Qe, qw, eG, boE, JI, aW, Y, ff, r, aF, en, g, t, boD, bz, eM, bE, m, X); #c1(ETV5) c2(NP_004445) c3(ETS translocation variant 5) c4(146371, 146372, 146373, 146374, 146375) c5(146376, 146377, 146378, 146379, 146380, 146381, 146382, 146383, 146384, 146385, 146386, 146387, 146388, 146389, 146390, 146391, 146392, 146393, 146394, 146395, 146396, 146397, 146398, 146399, 146400, 146401, 146402, 146403, 146404, 146405, 146406, 146407, 146408, 146409, 146410) c6( ) c7(bL, bM, T, kh, fM, asW, zX, eX, aj, v, ci, UI, anu, J, ad, av, aT, h, eV, By, boF, K, yb, vx, ae, dx, li, aW, Y, Ls, cl, pt, t, fq, bz, Ye, ck, Ew, dB, hL, m, YH, iu); #c1(ETV6) c2(NP_001978) c3(transcription factor ETV6) c4(122808) c5(122809, 122810, 122811, 122812, 122813, 122814, 122815) c6( ) c7(aiu, T, fM, dA, gp, aHx, VT, bs, cz, n, ol, oY, vr, ci, GC, pz, hF, AO, avD, hr, ad, ip, afb, x, b, fX, hd, pp, Xe, Bj, oW, kH, aT, dz, hn, iY, jj, bby, an, ae, iL, YI, sb, eG, Nr, Qr, et, iU, aW, gK, boG, po, An, jh, pm, avG, me, t, cM, hf, f, dr, bw, Nq, ck, nu, ac, iT, kB, nB, aHB, oy, bt, bnR, pg, aKC, dW, oX, k, m, bC, i, Kg, IB, boH); #c1(ETV7) c2(NP_001193964) c3(transcription factor ETV7 isoform 2) c4(83364) c5(83365, 83366, 83367, 83368, 83369, 83370) c6( ) c7(ck, T, dz, jh, fd); #c1(ETV7) c2(NP_001193965) c3(transcriptinn factor ETV7 isoform 3) c4(83371, 83372) c5(83373, 83374, 83375, 83376, 83377, 83378) c6( ) c7(ck, T, dz, jh, fd); #c1(ETV7) c2(NP_001193966) c3(transcriptinn factor ETV7 isoform 4) c4( ) c5(83379) c6( ) c7(ck, T, dz, jh, fd); #c1(ETV7) c2(NP_001193967) c3(transcriptinn factor ETV7 isoform 5) c4(83380) c5(83381, 83382, 83383, 83384, 83385, 83386) c6( ) c7(ck, T, dz, jh, fd); #c1(ETV7) c2(NP_001193970) c3(transcriptinn factor ETV7 isoform 8) c4( ) c5(83387, 83388, 83389, 83390, 83391) c6( ) c7(ck, T, dz, jh, fd); #c1(ETV7) c2(NP_057219) c3(transcriptinn factor ETV7 isoform 1) c4(189546) c5(189547, 189548, 189549, 189550, 189551, 189552, 189553) c6( ) c7(ck, T, dz, jh, fd); #c1(EVAIA) c2(NP_115557) c3(protein eva-1 homolog A) c4(223161, 223162, 223163) c5(223164, 223165, 223166, 223167, 223168, 223169, 223170, 223171, 223172, 223173, 223174, 223175, 223176, 223177, 223178, 223179, 223180, 223181, 223182, 223183, 223184, 223185, 223186, 223187, 223188, 223189, 223190, 223191, 223192, 223193) c6( ) c7(T, fq, aw, yA); #c1(EVAIC) c2(NP_478067) c3(protein eva-1 homolog C isoform 1 precursor) c4(230887) c5(230888, 230889, 230890, 230891, 230892, 230893) c6( ) c7(aot, aw, g, Ro); #c1(EVC) c2(NP_714928) c3(ellis-van Creveld syndrome protein) c4(246651) c5(246652, 246653, 246654, 246655, 246656, 246657, 246658, 246659, 246660, 246661) c6( ) c7(Na, tJ, apM, aOH, rD, bS, boI, Nc, rz, boJ, ad); #c1(EVC2) c2(NP_001159608) c3(limbin isoform 2) c4(64470) c5(64471, 64472, 64473, 64474, 64475) c6( ) c7(Na, Al, In, Nc, boI, boJ); #c1(EVC2) c2(NP_667338) c3(limbin isoform 1) c4(242006, 242007) c5(242008, 242009, 242010, 242011, 242012, 242013, 242014, 242015, 242016, 242017, 242018, 242019, 242020) c6( ) c7(Na, Al, In, Nc, boI, boJ); #c1(EVI2A) c2(NP_001003927) c3(protein EVI2A isoform 1) c4(20282) c5(20283, 20284, 20285, 20286, 20287, 20288, 20289, 20290, 20291) c6( ) c7(ey, V, hP, Ew); #c1(EVI2A) c2(NP_055025) c3(protein EVI2A isoform 2 precursor) c4(178352, 178353) c5(178354, 178355, 178356, 178357, 178358, 178359, 178360, 178361, 178362, 178363, 178364, 178365, 178366) c6( ) c7(ey, V, hP, Ew); #c1(EVI2B) c2(NP_006486) c3(protein EVI2B precursor) c4( ) c5(165627, 165628, 165629, 165630, 165631) c6( ) c7(ey); #c1(EVI2B) c2(XP_005258003) c3(protein EVI2B isoform X2) c4(275449) c5(275450, 275451, 275452, 275453, 275454, 275455) c6( ) c7(ey); #c1(EVI2B) c2(XP_011522817) c3(protein EVI2B isoform X1) c4(317312) c5(317313) c6( ) c7(ey); #c1(EVI5) c2(XP_011540402) c3(ecntrnpic viral integration site 5 protein homolog isoform X3) c4(338912) c5( ) c6( ) c7(ck, cm, V, Y); #c1(EVI5) c2(XP_011540411) c3(ecntrnpic viral integration site 5 protein homolog isoform X11) c4( ) c5(338913, 338914, 338915, 338916, 338917, 338918) c6( ) c7(ck, cm, V, Y); #c1(EVL) c2(NP_057421) c3(ena/VASP-like protein) c4(190697, 190698, 190699) c5(190700, 190701, 190702, 190703, 190704, 190705, 190706, 190707, 190708, 190709, 190710, 190711) c6( ) c7(q, r, aT); #c1(EVL) c2(XP_005267806) c3(ena/VASP-like protein isoform X1) c4(281252) c5(281253, 281254, 281255, 281256, 281257, 281258) c6( ) c7(q, r, aT); #c1(EVL) c2(XP_011535129) c3(ena/VASP-like protein isoform X3) c4(331964) c5(331965, 331966, 331967, 331968, 331969, 331970, 331971) c6( ) c7(q, r, aT); #c1(EVL) c2(XP_011535131) c3(ena/VASP-like protein isoform X5) c4( ) c5(331972, 331973, 331974, 331975, 331976, 331977) c6( ) c7(q, r, aT); #c1(EVPL) c2(NP_001979) c3(envoplakin) c4(122816) c5(122817, 122818, 122819, 122820, 122821, 122822) c6( ) c7(dD, dA, ow, ea, gp, ht, oE, oD, by, eq, hF, hr, x, fX, oC, oN, dz, oF, hn, ox, iY, hu, iL, iU, et, axu, baP, bw, ck, ay, ou, pc, hP, iT, k, bt); #c1(EVX1) c2(NP_001291449) c3(homeobox even-skipped homolog protein 1 isoform 2) c4( ) c5(116062, 116063, 116064, 116065, 116066) c6( ) c7(n, T, ae, ad); #c1(EVX1) c2(NP_001980) c3(hnmenbnx even-skipped homolog protein 1 isoform 1) c4(122823, 122824) c5(122825, 122826, 122827, 122828, 122829, 122830, 122831, 122832) c6( ) c7(n, T, ae, ad); #c1(EVX2) c2(XP_011509410) c3(hnmenbnx even-skipped homolog protein 2 isoform X1) c4(299959) c5(299960, 299961, 299962, 299963, 299964, 299965, 299966, 299967) c6( ) c7(aHC, en, ff, g, arA); #c1(EWSR1) c2(NP_001156757) c3(RNA-binding protein EWS isoform 3) c4(61879) c5(61880, 61881, 61882, 61883, 61884, 61885, 61886, 61887, 61888, 61889, 61890, 61891) c6( ) c7(Fv, T, kh, aiH, aGn, aNA, boK, YU, iB, zt, aHA, boM, oH, ci, lu, hF, iJ, er, qH, bv, av, ib, Rq, oG, aWi, avA, SV, yg, Ou, ahK, on, dx, jf, iF, eG, oV, Y, Ls, eH, hQ, boL, eF, cm, adj, QA, aVz, ck, es, bnN, QG, YV, hP, GU, c, au, U, qF, Xu, aiG, bt); #c1(EWSR1) c2(NP_001156758) c3(RNA-binding protein EWS isoform 4) c4(61892) c5(61893, 61894, 61895, 61896, 61897, 61898, 61899, 61900, 61901, 61902, 61903, 61904, 61905, 61906, 61907, 61908, 61909, 61910, 61911, 61912, 61913, 61914, 61915, 61916, 61917) c6( ) c7(Fv, T, kh, aiH, aGn, aNA, boK, YU, iB, zt, aHA, boM, oH, ci, lu, hF, iJ, er, qH, bv, av, ib, Rq, oG, aWi, avA, SV, yg, Ou, ahK, on, dx, jf, if, eG, oV, Y, Ls, eH, hQ, boL, eF, cm, adj, QA, aVz, ck, es, bnN, QG, YV, hP, GU, c, au, U, qF, Xu, aiG, bt); #c1(EWSR1) c2(NP_001156759) c3(RNA-binding protein EWS isoform 5) c4(61918) c5(61919, 61920, 61921, 61922, 61923, 61924, 61925, 61926, 61927, 61928, 61929, 61930) c6( ) c7(Fv, T, kh, aiH, aGn, aNA, boK, YU, iB, zt, aHA, boM, oH, ci, lu, hF, iJ, er, qH, bv, av, ib, Rq, oG, aWi, avA, SV, yg, Ou, ahK, on, dx, jf, if, eG, oV, Y, Ls, eH, hQ, boL, eF, cm, adj, QA, aVz, ck, es, bnN, QG, YV, hP, GU, c, au, U, qF, Xu, aiG, bt); #c1(EWSR1) c2(NP_005234) c3(RNA-binding protein EWS isoform 2) c4(154280, 154281) c5( ) c6( ) c7(Fv, T, kh, aiH, aGn, aNA, boK, YU, iB, zt, aHA, boM, oH, ci, lu, hF, iJ, er, qH, bv, av, ib, Rq, oG, aWi, avA, SV, yg, Ou, ahK, on, dx, jf, if, eG, oV, Y, Ls, eH, hQ, boL, eF, cm, adj, QA, aVz, ck, es, bnN, QG, YV, hP, GU, c, au, U, qF, Xu, aiG, bt); #c1(EWSR1) c2(NP_053733) c3(RNA-binding protein EWS isoform 1) c4(177265) c5( ) c6( ) c7(Fv, T, kh, aiH, aGn, aNA, boK, YU, iB, zt, aHA, boM, oH, ci, lu, hF, iJ, er, qH, bv, av, ib, Rq, oG, aWi, avA, SV, yg, Ou, ahK, on, dx, jf, if, eG, oV, Y, Ls, eH, hQ, boL, eF, cm, adj, QA, aVz, ck, es, bnN, QG, YV, bP, GU, c, au, U, qF, Xu, aiG, bt); #c1(EWSR1) c2(XP_011528304) c3(RNA-binding protein EWS isoform X10) c4(323373, 323374) c5( ) c6( ) c7(Fv, T, kh, aiH, aGn, aNA, boK, YU, iB, zt, aHA, boM, oH, ci, lu, hF, iJ, er, qH, bv, av, ib, Rq, oG, aWi, avA, SV, yg, Ou, ahK, on, dx, jf, iF, eG, oV, Y, Ls, eH, hQ, boL, eF, cm, adj, QA, aVz, ck, es, bnN, QG, YV, bP, GU, c, au, U, qF, Xu, aiG, bt); #c1(EXD2) c2(NP_001180292) c3(exonuclease 3′-5′ domain-containing protein 2 isoform 1) c4(73744, 73745, 73746, 73747) c5(73748, 73749, 73750, 73751, 73752, 73753, 73754, 73755, 73756, 73757, 73758, 73759, 73760, 73761, 73762, 73763, 73764, 73765, 73766, 73767, 73768) c6( ) c7(an); #c1(EXD2) c2(XP_011535210) c3(exonuclease 3′-5′ domain-containing protein 2 isoform X1) c4( ) c5(332023, 332024, 332025, 332026, 332027, 332028, 332029, 332030, 332031, 332032, 332033, 332034, 332035, 332036, 332037, 332038, 332039, 332040, 332041, 332042, 332043, 332044) c6( ) c7(an); #c1(EXD3) c2(NP_060290) c3(exonuclease mut-7 homolog isoform a) c4(195209, 195210) c5(195211, 195212, 195213, 195214, 195215, 195216, 195217, 195218, 195219, 195220, 195221, 195222) c6( ) c7(wr); #c1(EXO1) c2(NP_003677) c3(exonuclease 1 isoform a) c4(140118, 140119) c5(140120, 140121, 140122, 140123, 140124, 140125) c6( ) c7(T, os, aC, QO, aA, oZ, bX, V, q, av, arV, aT, dL, d, 80, Y, r, aq, g, iR, bz, boN, dB, wB, cj, at, gv, m, B); #c1(EXO1) c2(XP_011542624) c3(exonuclease 1 isoform X1) c4(341188) c5(341189, 341190, 341191, 341192, 341193, 341194, 341195, 341196, 341197, 341198, 341199, 341200, 341201) c6( ) c7(T, os, aC, QO, aA, oZ, bX, V, q, av, arV, aT, dL, d, 80, Y, r, aq, g, iR, bz, boN, dB, wB, cj, at, gv, m, B); #c1(EXO1) c2(XP_011542626) c3(exonuclease 1 isoform X3) c4(341202) c5(341203, 341204, 341205, 341206, 341207, 341208) c6( ) c7(T, os, aC, QO, aA, oZ, bX, V, q, av, arV, aT, dL, d, BO, Y, r, aq, g, iR, bz, boN, dB, wB, cj, at, gv, m, B); #c1(EXO1) c2(XP_011542629) c3(exonuclease 1 isoform X6) c4( ) c5(341209, 341210, 341211, 341212, 341213, 341214) c6( ) c7(T, os, aC, QO, aA, oZ, bX, V, q, av, arV, aT, dL, d, BO, Y, r, aq, g, iR, bz, boN, dB, wB, cj, at, gv, m, B); #c1(EXOC1) c2(NP_001020095) c3(exocyst complex component 1 isoform 1) c4(28135) c5(28136, 28137, 28138, 28139, 28140, 28141, 28142, 28143, 28144, 28145) c6( ) c7(boO); #c1(EXOC1) c2(XP_005265807) c3(exocyst complex component 1 isoform X1) c4(279733) c5(279734, 279735, 279736, 279737, 279738, 279739) c6( ) c7(boO); #c1(EXOC2) c2(NP_060773) c3(exocyst complex component 2) c4(197698, 197699, 197700) c5(197701, 197702, 197703, 197704, 197705, 197706, 197707, 197708, 197709, 197710, 197711, 197712, 197713, 197714, 197715, 197716, 197717, 197718) c6( ) c7(T, sS, aE); #c1(EXOC3L1) c2(NP_848611) c3(exocyst complex component 3-like protein) c4(253956, 253957, 253958) c5(253959, 253960, 253961, 253962, 253963, 253964, 253965, 253966, 253967, 253968, 253969, 253970, 253971, 253972, 253973, 253974, 253975, 253976) c6( ) c7(j); #c1(EXOC3L2) c2(NP_612635) c3(exocyst complex component 3-like protein 2) c4(236718) c5(236719, 236720, 236721, 236722, 236723, 236724, 236725, 236726, 236727, 236728) c6( ) c7(bL, B, af); #c1(EXOC4) c2(NP_001032203) c3(exocyst complex component 4 isoform b) c4(31078) c5(31079, 31080, 31081, 31082, 31083, 31084) c6( ) c7(bL, c, oe, ff, en, y); #c1(EXOC4) c2(NP_068579) c3(exocyst complex component 4 isoform a) c4(209654, 209655, 209656, 209657, 209658) c5(209659, 209660, 209661, 209662, 209663, 209664, 209665, 209666, 209667, 209668, 209669, 209670, 209671, 209672, 209673, 209674, 209675, 209676, 209677, 209678, 209679, 209680, 209681, 209682, 209683, 209684, 209685, 209686, 209687, 209688) c6( ) c7(bL, c, oe, ff, en, y); #c1(EXOC5) c2(NP_006535) c3(exocyst complex component 5) c4(166068, 166069) c5(166070, 166071, 166072, 166073, 166074, 166075, 166076, 166077, 166078, 166079, 166080, 166081) c6( ) c7(y, K); #c1(EXOC7) c2(NP_001013861) c3(exocyst complex component 7 isoform 1) c4(25771, 25772) c5(25773, 25774, 25775, 25776, 25777, 25778, 25779, 25780, 25781, 25782, 25783, 25784, 25785, 25786, 25787, 25788) c6( ) c7(T, AH, boP); #c1(EXOC7) c2(NP_001138769) c3(exocyst complex component 7 isoform 4) c4(57628) c5(57629, 57630, 57631, 57632, 57633, 57634) c6( ) c7(T, AH, boP); #c1(EXOC7) c2(NP_001138770) c3(exocyst complex component 7 isoform 5) c4(57635) c5(57636, 57637, 57638, 57639, 57640, 57641) c6( ) c7(T, AH, boP); #c1(EXOC7) c2(NP_001138771) c3(exocyst complex component 7 isoform 6) c4(57642) c5(57643, 57644, 57645, 57646, 57647, 57648) c6( ) c7(T, AH, boP); #c1(EXOC7) c2(NP_001269243) c3(exocyst complex component 7 isoform 7) c4(100910) c5(100911, 100912, 100913, 100914, 100915, 100916) c6( ) c7(T, AH, boP); #c1(EXOC7) c2(NP_056034) c3(exocyst complex component 7 isoform 2) c4(185221, 185222, 185223) c5(185224, 185225, 185226, 185227, 185228, 185229, 185230, 185231, 185232, 185233, 185234, 185235) c6( ) c7(T, AH, boP); #c1(EXOC7) c2(XP_011522874) c3(exocyst complex component 7 isoform X6) c4( ) c5(317349, 317350, 317351, 317352, 317353, 317354) c6( ) c7(T, AH, boP); #c1(EXOG) c2(NP_001138936) c3(nuclease EXOG, mitochondrial isoform 2 precursor) c4(58342) c5(58343, 58344, 58345, 58346, 58347, 58348) c6( ) c7(bL, Ea); #c1(EXOG) c2(NP_005098) c3(nuclease EXOG, mitochondrial isoform 1 precursor) c4(152852) c5(152853, 152854, 152855, 152856, 152857, 152858, 152859) c6( ) c7(bL, Ea); #c1(EXOG) c2(XP_006713510) c3(nuclease EXOG, mitochondrial isoform X2) c4(287177) c5(287178, 287179, 287180, 287181, 287182) c6( ) c7(bL, Ea); #c1(EXOSC1) c2(NP_057130) c3(exosome complex component CSL4) c4(189046, 189047, 189048) c5(189049, 189050, 189051, 189052, 189053, 189054, 189055, 189056, 189057, 189058, 189059, 189060, 189061, 189062, 189063, 189064, 189065, 189066) c6( ) c7(fe); #c1(EXOSC2) c2(NP_001269637) c3(exosome complex component RRP4 isoform 2) c4(102334, 102335) c5(102336, 102337, 102338, 102339, 102340, 102341, 102342, 102343, 102344, 102345, 102346, 102347) c6( ) c7(aq); #c1(EXOSC2) c2(NP_001269638) c3(exosome complex component RRP4 isoform 3) c4(102348) c5(102349, 102350, 102351, 102352, 102353, 102354) c6( ) c7(aq); #c1(EXOSC2) c2(NP_055100) c3(exosome complex component RRP4 isoform 1) c4(178927, 178928, 178929) c5(178930, 178931, 178932, 178933, 178934, 178935, 178936, 178937, 178938, 178939, 178940, 178941, 178942, 178943, 178944, 178945, 178946, 178947) c6( ) c7(aq); #c1(EXOSC3) c2(NP_001002269) c3(exosome complex component RRP40 isoform 2) c4(19537) c5(19538, 19539, 19540, 19541, 19542, 19543) c6( ) c7(d, boQ, Ol, hc, ha, boR, h, UR, wR, aFU, ip); #c1(EXOSC3) c2(NP_057126) c3(exosome complex component RRP40 isoform 1) c4(189021) c5(189022, 189023, 189024, 189025, 189026, 189027) c6( ) c7(d, boQ, Ol, hc, ha, boR, h, UR, wR, aFU, ip); #c1(EXOSC4) c2(NP_061910) c3(exosome complex component RRP41) c4(201161) c5(201162, 201163, 201164, 201165, 201166, 201167) c6( ) c7(bL, T, aE, e, r, eb, aj, mf, cS, j, v, ei, fr, nS, q, J, c1); #c1(EXOSC5) c2(NP_064543) c3(exosome complex component RRP46) c4(202906) c5(202907, 202908, 202909, 202910, 202911, 202912) c6( ) c7(ck, iU, aA, ci, bu, bt); #c1(EXOSC6) c2(NP_478126) c3(exosome complex component MTR3) c4(230972) c5(230973, 230974, 230975, 230976, 230977, 230978) c6( ) c7(aW, Ei, U, aT, bO, bS, bK, K, ct, Z, he, ra, hq); #c1(EXOSC7) c2(NP_055819) c3(exosome complex component RRP42) c4(183703) c5(183704, 183705, 183706, 183707, 183708, 183709) c6( ) c7(ck, T, iM, aE, aDs, je, asP, aBq, cd, agf, K, aan, eg, B, aGW, boS); #c1(EXOSC8) c2(NP_852480) c3(exosome complex component RRP43) c4(255026, 255027) c5(255028, 255029, 255030, 255031, 255032, 255033, 255034, 255035, 255036, 255037, 255038, 255039) c6( ) c7(A, oV, h, hN, By, ai); #c1(EXPH5) c2(NP_055880) c3(exophilin-5) c4(184149, 184150) c5(184151, 184152, 184153, 184154, 184155, 184156, 184157) c6( ) c7(boT, boU); #c1(EXT1) c2(NP_000118) c3(exostosin-1) c4(1958) c5(1959, 1960, 1961, 1962, 1963, 1964) c6( ) c7(T, kh, aw, boZ, NT, fd, asM, n, ah, nA, Qo, bpb, aoH, hX, boY, IE, zw, tT, yg, aT, h, an, Wr, he, bA, Dg, OV, TY, aW, hl, aSt, atf, asV, gG, eF, boW, cm, dr, bN, ck, y, kg, dc, boV, Fk, bim, boX, hE, bpa, B, hv, vi); #c1(EXT2) c2(NP_000392) c3(exostosin-2 isoform 1) c4(8430, 8431) c5(8432, 8433, 8434, 8435, 8436, 8437, 8438, 8439, 8440, 8441, 8442, 8443, 8444, 8445, 8446, 8447, 8448) c6( ) c7(bL, T, Dg, kh, IE, TY, pN, kg, zw, boV, yg, h, aj, dG, j, v, Wr, bpa, dr); #c1(EXT2) c2(NP_001171554) c3(exostosin-2 isoform 3) c4(70570) c5(70571, 70572, 70573, 70574, 70575, 70576) c6( ) c7(bL, T, Dg, kh, IE, TY, pN, kg, zw, boV, yg, h, aj, dG, j, v, Wr, bpa, dr); #c1(EXT2) c2(NP_997005) c3(exostosin-2 isoform 2) c4( ) c5(264939, 264940, 264941, 264942, 264943, 264944, 264945, 264946, 264947, 264948) c6( ) c7(bL, T, Dg, kh, IE, TY, pN, kg, zw, boV, yg, h, aj, dG, j, v, Wr, bpa, dr); #c1(EXT2) c2(XP_011518252) c3(exostosin-2 isoform X1) c4( ) c5(312278) c6( ) c7(bL, T, Dg, kh, IE, TY, pN, kg, zw, boV, yg, h, aj, dG, j, v, Wr, bpa, dr); #c1(EXT2) c2(XP_011518253) c3(exostosin-2 isoform X2) c4(312279, 312280) c5( ) c6( ) c7(bL, T, Dg, kh, IE, TY, pN, kg, zw, boV, yg, h, aj, dG, j, v, Wr, bpa, dr); #c1(EXTL2) c2(XP_011539298) c3(exostosin-like 2 isoform X3) c4( ) c5(337362) c6( ) c7(bpc, Ly, kg); #c1(EXTL2) c2(XP_011539300) c3(exostosin-like 2 isoform X4) c4(337363, 337364) c5(337365, 337366, 337367, 337368, 337369) c6( ) c7(bpc, Ly, kg); #c1(EXTL3) c2(NP_001431) c3(exostosin-like 3) c4(117791, 117792) c5(117793, 117794, 117795, 117796, 117797, 117798, 117799, 117800, 117801, 117802, 117803, 117804) c6( ) c7(DA, Dg, d, kg, aW, bpc, aT, cR, r, j, bz, g); #c1(EYA1) c2(NP_000494) c3(eyes absent homolog 1 isoform 1) c4(9923) c5(9924, 9925, 9926, 9927, 9928, 9929, 9930, 9931, 9932, 9933, 9934) c6( ) c7(bL, bcX, bpe, yQ, wG, aW, arH, oe, RX, Az, aMT, aT, aA, aNy, bpf, Pp, bD, bpd, bz, iu, er); #c1(EYA1) c2(NP_742056) c3(eyes absent homolog 1 isoform 3) c4(247911) c5(247912, 247913, 247914, 247915, 247916, 247917) c6( ) c7(bL, bcX, bpe, yQ, wG, aW, arH, oe, RX, Az, aMT, aT, aA, aNy, bpf, Pp, bD, bpd, bz, iu, er); #c1(EYA1) c2(NP_742057) c3(eyes absent homolog 1 isoform 2) c4(247918, 247919) c5(247920, 247921, 247922, 247923, 247924, 247925, 247926, 247927, 247928, 247929, 247930, 247931) c6( ) c7(bL, bcX, bpe, yQ, wG, aW, arH, oe, RX, Az, aMT, aT, aA, aNy, bpf, Pp, bD, bpd, bz, iu, er); #c1(EYA2) c2(NP_005235) c3(eyes absent homolog 2 isoform a) c4(154282, 154283, 154284) c5(154285, 154286, 154287, 154288, 154289, 154290, 154291, 154292, 154293, 154294, 154295, 154296, 154297, 154298, 154299, 154300, 154301, 154302) c6( ) c7(T, yQ, aE, aW, aT, m, g, t, eJ); #c1(EYA2) c2(NP_742108) c3(eyes absent homolog 2 isoform c) c4(248167) c5(248168, 248169, 248170, 248171, 248172, 248173) c6( ) c7(T, yQ, aE, aW, aT, m, g, t, eJ); #c1(EYA4) c2(NP_004091) c3(eyes absent homolog 4 isoform a) c4(143497) c5(143498, 143499, 143500, 143501, 143502, 143503) c6( ) c7(T, bph, oe, ht, ci, cd, q, av, cc, yQ, Bh, hP, hu, ZW, ge, r, g, iV, bz, bpg, eM, aBU, mG, mx, it); #c1(EYA4) c2(NP_742101) c3(eyes absent homolog 4 isoform b) c4(248108) c5(248109, 248110, 248111, 248112, 248113, 248114) c6( ) c7(T, bph, oe, ht, ci, cd, q, av, cc, yQ, Bh, hP, hu, ZW, ge, r, g, iV, bz, bpg, eM, aBU, mG, mx, it); #c1(EYA4) c2(NP_742103) c3(eyes absent homolog 4 isoform d) c4(248115) c5(248116, 248117, 248118, 248119, 248120, 248121) c6( ) c7(T, bph, oe, ht, ci, cd, q, av, cc, yQ, Bh, hP, hu, ZW, ge, r, g, iV, bz, bpg, eM, aBU, mG, mx, it); #c1(EYS) c2(NP_001136272) c3(protein eyes shut homolog isoform 1 precursor) c4(54750) c5(54751, 54752, 54753, 54754, 54755, 54756) c6( ) c7(IR, bpi, nw, nk, nC, ayj, ad); #c1(EYS) c2(NP_001136273) c3(protein eyes shut homolog isoform 2 precursor) c4(54757) c5(54758, 54759, 54760, 54761, 54762, 54763) c6( ) c7(IR, bpi, nw, nk, nC, ayj, ad); #c1(EYS) c2(NP_001278938) c3(protein eyes shut homolog isoform 4 precursor) c4(111075, 111076) c5(111077, 111078, 111079, 111080, 111081, 111082, 111083, 111084, 111085, 111086) c6( ) c7(IR, bpi, nw, nk, nC, ayj, ad); #c1(EYS) c2(NP_938024) c3(protein eyes shut homolog isoform 3 precursor) c4( ) c5(259545, 259546, 259547, 259548, 259549, 259550, 259551, 259552, 259553, 259554) c6( ) c7(IR, bpi, nw, nk, nC, ayj, ad); #c1(EZH1) c2(NP_001982) c3(histone-lysine N-methyltransferase EZH1) c4( ) c5(122833, 122834, 122835, 122836, 122837, 122838, 122839, 122840, 122841, 122842, 122843) c6( ) c7(hy, ne, BN, as); #c1(EZH1) c2(XP_005257201) c3(histone-lysine N-methyltransferase EZH1 isoform X1) c4(274740, 274741, 274742) c5(274743, 274744, 274745, 274746, 274747, 274748) c6( ) c7(hy, ne, BN, as); #c1(EZH1) c2(XP_005257202) c3(histone-lysine N-methyltransferase EZH1 isoform X4) c4(274749) c5(274750) c6( ) c7(hy, ne, BN, as); #c1(EZH1) c2(XP_005257203) c3(histone-lysine N-methyltransferase EZH1 isoform X5) c4( ) c5(274751, 274752, 274753, 274754, 274755) c6( ) c7(hy, ne, BN, as); #c1(EZH2) c2(XP_005250019) c3(histone-lysine N-methyltransferase EZH2 isoform X3) c4(270001) c5(270002, 270003, 270004, 270005, 270006, 270007) c6( ) c7(lD, gh, T, aC, if, fd, bB, ci, oB, bv, aE, fm, aDZ, MO, pk, eL, ly, oP, aW, uY, g, as, eF, cm, bw, iP, yd, qJ, eM, nB, iA, iT, U, cj, iS, dW, k, m, ajm, Or, n, aj, fr, qN, ft, jz, TK, gd, kH, h, dL, ey, dx, RT, MD, PX, aq, kp, yq, cM, op, lx, YE, bP, dB, hL, pV, pg, fL, ph, nz, it, B, fM, dA, aA, aYh, q, J, qH, er, eA, eJ, XX, nv, aT, rO, bq, ae, af, jf, iU, Y, r, qL, en, t, f, iK, ck, aRp, iM, kP, ac, RW, np, bt, LS, id, iW, oA, jh, hF, Fc, iJ, mC, ad, hd, py, io, hP, d, je, vj, ff, eZ, aF, iR, bz, LB, bE, bC, y); #c1(EZH2) c2(XP_005250020) c3(histone-lysine N-methyltransferase EZH2 isoform X5) c4(270008) c5(270009, 270010, 270011, 270012, 270013, 270014) c6( ) c7(lD, gh, T, aC, if, fd, bB, ci, oB, bv, aE, fm, aDZ, MO, pk, eL, ly, oP, aW, uY, g, as, eF, cm, bw, iP, yd, qJ, eM, nB, iA, iT, U, cj, iS, dW, k, m, ajm, Or, n, aj, fr, qN, ft, jz, TK, gd, kH, h, dL, ey, dx, RT, MD, PX, aq, kp, yq, cM, op, lx, YE, bP, dB, hL, pV, pg, fL, ph, nz, it, B, fM, dA, aA, aYh, q, J, qH, er, eA, eJ, XX, nv, aT, rO, bq, ae, af, jf, iU, Y, r, qL, en, t, f, iK, ck, aRp, iM, kP, ac, RW, np, bt, LS, id, iW, oA, jh, hF, Fc, iJ, mC, ad, hd, py, io, hP, d, je, vj, ff, eZ, aF, iR, bz, LB, bE, bC, y); #c1(EZH2) c2(XP_005250021) c3(histone-lysine N-methyltransferase EZH2 isoform X15) c4(270015, 270016) c5(270017, 270018, 270019, 270020, 270021, 270022, 270023, 270024, 270025, 270026) c6( ) c7(lD, gh, T, aC, if, fd, bB, ci, oB, bv, aE, fm, aDZ, MO, pk, eL, ly, oP, aW, uY, g, as, eF, cm, bw, iP, yd, qJ, eM, nB, iA, iT, U, cj, iS, dW, k, m, ajm, Or, n, aj, fr, qN, ft, jz, TK, gd, kH, h, dL, ey, dx, RT, MD, PX, aq, kp, yq, cM, op, lx, YE, bP, dB, hL, pV, pg, fL, ph, nz, it, B, fM, dA, aA, aYh, q, J, qH, er, eA, eJ, XX, nv, aT, rO, bq, ae, af, jf, iU, Y, r, qL, en, t, f, iK, ck, aRp, iM, kP, ac, RW, np, bt, LS, id, iW, oA, jh, hF, Fc, iJ, mC, ad, hd, py, io, hP, d, je, vj, ff, eZ, aF, iR, bz, LB, bE, bC, y); #c1(EZH2) c2(XP_011514185) c3(histone-lysine N-methyltransferase EZH2 isoform X2) c4( ) c5(306796) c6( ) c7(lD, gh, T, aC, if, fd, bB, ci, oB, bv, aE, fm, aDZ, MO, pk, eL, ly, oP, aW, uY, g, as, eF, cm, bw, iP, yd, qJ, eM, nB, iA, iT, U, cj, iS, dW, k, m, ajm, Or, n, aj, fr, qN, ft, jz, TK, gd, kH, h, dL, ey, dx, RT, MD, PX, aq, kp, yq, cM, op, lx, YE, bP, dB, hL, pV, pg, fL, ph, nz, it, B, fM, dA, aA, aYh, q, J, qH, er, eA, eJ, XX, nv, aT, rO, bq, ae, af, jf, iU, Y, r, qL, en, t, f, iK, ck, aRp, iM, kP, ac, RW, np, bt, LS, id, iW, oA, jh, hF, Fc, iJ, mC, ad, hd, py, io, hP, d, je, vj, ff, eZ, aF, iR, bz, LB, bE, bC, y); #c1(EZH2) c2(XP_011514186) c3(histone-lysine N-methyltransferase EZH2 isoform X1) c4(306797) c5(306798, 306799, 306800, 306801, 306802) c6( ) c7(lD, gh, T, aC, if, fd, bB, ci, oB, bv, aE, fm, aDZ, MO, pk, eL, ly, oP, aW, uY, g, as, eF, cm, bw, iP, yd, qJ, eM, nB, iA, iT, U, cj, iS, dW, k, m, ajm, Or, n, aj, fr, qN, ft, jz, TK, gd, kH, h, dL, ey, dx, RT, MD, PX, aq, kp, yq, cM, op, lx, YE, bP, dB, hL, pV, pg, fL, ph, nz, it, B, fM, dA, aA, aYh, q, J, qH, er, eA, eJ, XX, nv, aT, rO, bq, ae, af, jf, iU, Y, r, qL, en, t, f, iK, ck, aRp, iM, kP, ac, RW, np, bt, LS, id, iW, oA, jh, hF, Fc, iJ, mC, ad, hd, py, io, hP, d, je, vj, ff, eZ, aF, iR, bz, LB, bE, bC, y); #c1(EZH2) c2(XP_011514188) c3(histone-lysine N-methyltransferase EZH2 isoform X6) c4( ) c5(306803) c6( ) c7(lD, gh, T, aC, if, fd, bB, ci, oB, bv, aE, fm, aDZ, MO, pk, eL, ly, oP, aW, uY, g, as, eF, cm, bw, iP, yd, qJ, eM, nB, iA, iT, U, cj, iS, dW, k, m, ajm, Or, n, aj, fr, qN, ft, jz, TK, gd, kH, h, dL, ey, dx, RT, MD, PX, aq, kp, yq, cM, op, lx, YE, bP, dB, hL, pV, pg, fL, ph, nz, it, B, fM, dA, aA, aYh, q, J, qH, er, eA, eJ, XX, nv, aT, rO, bq, ae, af, jf, iU, Y, r, qL, en, t, f, iK, ck, aRp, iM, kP, ac, RW, np, bt, LS, id, iW, oA, jh, hF, Fc, iJ, mC, ad, hd, py, io, hP, d, je, vj, ff, eZ, aF, iR, bz, LB, bE, bC, y); #c1(EZH2) c2(XP_011514195) c3(histone-lysine N-methyltransferase EZH2 isoform X12) c4(306804) c5(306805, 306806, 306807, 306808, 306809, 306810) c6( ) c7(lD, gh, T, aC, if, fd, bB, ci, oB, bv, aE, fm, aDZ, MO, pk, eL, ly, oP, aW, uY, g, as, eF, cm, bw, iP, yd, qJ, eM, nB, iA, iT, U, cj, iS, dW, k, m, ajm, Or, n, aj, fr, qN, ft, jz, TK, gd, kH, h, dL, ey, dx, RT, MD, PX, aq, kp, yq, cM, op, lx, YE, bP, dB, hL, pV, pg, fL, ph, nz, it, B, fM, dA, aA, aYh, q, J, qH, er, eA, eJ, XX, nv, aT, rO, bq, ae, af, jf, iU, Y, r, qL, en, t, f, iK, ck, aRp, iM, kP, ac, RW, np, bt, LS, id, iW, oA, jh, hF, Fc, iJ, mC, ad, hd, py, io, hP, d, je, vj, ff, eZ, aF, iR, bz, LB, bE, bC, y); #c1(EZH2) c2(XP_011514204) c3(histone-lysine N-methyltransferase EZH2 isoform X20) c4( ) c5(306811, 306812, 306813, 306814, 306815) c6( ) c7(lD, gh, T, aC, if, fd, bB, ci, oB, bv, aE, fm, aDZ, MO, pk, eL, ly, oP, aW, uY, g, as, eF, cm, bw, iP, yd, qJ, eM, nB, iA, iT, U, cj, iS, dW, k, m, ajm, Or, n, aj, fr, qN, ft, jz, TK, gd, kH, h, dL, ey, dx, RT, MD, PX, aq, kp, yq, cM, op, lx, YE, bP, dB, hL, pV, pg, fL, ph, nz, it, B, fM, dA, aA, aYh, q, J, qH, er, eA, eJ, XX, nv, aT, rO, bq, ae, af, jf, iU, Y, r, qL, en, t, f, iK, ck, aRp, iM, kP, ac, RW, np, bt, LS, id, iW, oA, jh, hF, Fc, iJ, mC, ad, hd, py, io, hP, d, je, vj, ff, eZ, aF, iR, bz, LB, bE, bC, y); #c1(EZR) c2(NP_001104547) c3(ezrin) c4(42161, 42162) c5(42163, 42164, 42165, 42166, 42167, 42168, 42169, 42170, 42171, 42172, 42173, 42174, 42175, 42176, 42177, 42178) c6( ) c7(bM, T, aC, lk, fR, hV, sw, fG, if, aA, ajp, bB, BF, ci, qN, fr, zP, q, ad, eA, ip, dP, bv, av, iu, aE, bpj, bW, cE, aT, h, By, dL, ey, K, hu, fb, ae, jf, zQ, d, aW, Ls, mQ, aFK, eH, r, hQ, Ej, ff, aF, en, cl, eF, t, cM, bz, RV, W, eM, Ew, bE, X, hL, at, m, gn, qF, nz, it, B); #c1(F10) c2(NP_000495) c3(coagulation factor X preproprotein) c4(9935) c5(9936, 9937, 9938, 9939, 9940, 9941, 9942, 9943, 9944, 9945, 9946, 9947, 9948, 9949, 9950, 9951, 9952, 9953, 9954, 9955, 9956, 9957, 9958, 9959, 9960, 9961, 9962, 9963, 9964, 9965, 9966, 9967, 9968, 9969, 9970, 9971, 9972, 9973, 9974, 9975, 9976, 9977, 9978, 9979, 9980, 9981, 9982, 9983, 9984, 9985, 9986, 9987, 9988, 9989, 9990, 9991, 9992, 9993, 9994, 9995, 9996, 9997, 9998, 9999, 10000, 10001, 10002, 10003, 10004, 10005, 10006, 10007, 10008, 10009, 10010, 10011, 10012, 10013, 10014, 10015, 10016, 10017, 10018, 10019, 10020, 10021, 10022, 10023, 10024, 10025, 10026, 10027, 10028, 10029, 10030, 10031, 10032, 10033, 10034, 10035, 10074, 10075, 10076, 10077, 10078, 10079, 10080, 10081, 10082, 10083) c6(10084, 10085) c7(bM, T, jv, bpn, fR, e, aw, bpk, j, bpl, eA, UE, aE, Ot, qh, dV, aT, h, af, hm, arl, bpm, IE, Y, aaD, aUF, ac, dX, dy); #c1(F11) c2(NP_000119) c3(coagulation factor XI precursor) c4(1965, 1966, 1967) c5(1968, 1969, 1970, 1971, 1972, 1973, 1974, 1975, 1976, 1977, 1978, 1979, 1980, 1981, 1982, 1983, 1984, 1985, 1986, 1987, 1988, 1989, 1990, 1991, 1992, 1993, 1994, 1995, 1996, 1997, 1998, 1999, 2000, 2001, 2002, 2003, 2004, 2005, 2006, 2007, 2008, 2009, 2010, 2011, 2012, 2013, 2014, 2015, 2016, 2017, 2018, 2019, 2020, 2021, 2022, 2023, 2024, 2025, 2026, 2027, 2028, 2029, 2030, 2031, 2032, 2033, 2034, 2035, 2036, 2037, 2038, 2039, 2040, 2041, 2042, 2043, 2044, 2045, 2046, 2047, 2048, 2049, 2050, 2051, 2052, 2053, 2054, 2055, 2056, 2057, 2058, 2059, 2060, 2061, 2062, 2063, 2064, 2065, 2066, 2067, 2068, 2069, 2070, 2071, 2072, 2073, 2074, 2075, 2076, 2077, 2078, 2079, 2080, 2081) c6(2082, 2083, 2084, 2085, 2086, 2087, 2088) c7(P, qk, wA, A, ag, bpp, M, cz, dX, j, bpo, Pd, be, bpq, uC, ae, ad); #c1(F11R) c2(NP_058642) c3(junctional adhesion molecule A precursor) c4(192913, 192914, 192915) c5(192916, 192917, 192918, 192919, 192920, 192921, 192922, 192923, 192924, 192925, 192926, 192927, 192928, 192929, 192930, 192931, 192932, 192933, 192934, 192935, 192936, 192937, 192938, 192939, 192940, 192941) c6( ) c7(bL, T, dD, ea, atj, cz, v, j, eq, eA, av, Db, Ml, aT, cy, ji, K, bq, BO, qt, aW, Y, fe, vs, aF, iV, t, ac, eM, Fi, dh); #c1(F12) c2(NP_000496) c3(coagulation factor XII precursor) c4(10086) c5(10087, 10171, 10172, 10173, 10174, 10175, 10176, 10177, 10178, 10179, 10180) c6(10181) c7(bL, sY, bpt, eR, jp, e, aw, cz, j, vh, vC, M, ey, bpr, cH, bps, dN, YG, uC, cM, el, ac, ag, RJ, qq); #c1(F13A1) c2(NP_000120) c3(coagulation factor XIII A chain precursor) c4(2089, 2090, 2091) c5(2092, 2093, 2094, 2095, 2096, 2097, 2098, 2099, 2100, 2101, 2102, 2103, 2104, 2105, 2106, 2107, 2108, 2109, 2110, 2111, 2112, 2113, 2114, 2115, 2116, 2117, 2118, 2119, 2120, 2121, 2122, 2123, 2124, 2125, 2126, 2127, 2128, 2129, 2130, 2131, 2132, 2133, 2134, 2135, 2136, 2137, 2138, 2139, 2140, 2141, 2142, 2143, 2144, 2145, 2146, 2147, 2148, 2149, 2150, 2151, 2152, 2153, 2154, 2155, 2156, 2157, 2158, 2159, 2160, 2161, 2162, 2163, 2164, 2165, 2166, 2167, 2168, 2169, 2170, 2171, 2172, 2173, 2174, 2175, 2176, 2177, 2178, 2179, 2180, 2181, 2182, 2183, 2184, 2185, 2186, 2187, 2188, 2189, 2190, 2191, 2192, 2193, 2194, 2195, 2196) c6(2197) c7(azs, sY, dD, ahf, aaJ, qb, ea, wL, e, aw, DV, bpu, cz, vr, ez, aj, v, j, eq, C, ad, ip, Na, vh, bpy, M, Nc, jj, dQ, ae, af, aiJ, eu, fJ, cr, yy, fe, yq, cM, aVc, bz, bpx, uC, adA, DT, Cq, apM, W, ac, kB, bpv, vb, U, qq, sU, tz, dX, aS, k, m, pw, GF, y, wx, us, bpw); #c1(F13A1) c2(XP_011512644) c3(coagulation factor XIII A chain isoform X2) c4(303625) c5(303626, 303627) c6( ) c7(azs, sY, dD, ahf, aaJ, qb, ea, wL, e, aw, DV, bpu, cz, vr, ez, aj, v, j, eq, C, ad, ip, Na, vh, bpy, M, Nc, jj, dQ, ae, af, aiJ, eu, fJ, cr, yy, fe, yq, cM, aVc, bz, bpx, uC, adA, DT, Cq, apM, W, ac, kB, bpv, vb, U, qq, sU, tz, dX, aS, k, m, pw, GF, y, wx, us, bpw); #c1(F13B) c2(NP_001985) c3(coagulation factor XIII B chain precursor) c4(122851) c5(122852, 122853, 122854, 122855, 122856, 122857) c6( ) c7(sY, dD, aaJ, aw, vr, j, eq, ad, bpz, jj, ae, eu, aiJ, jf, r, fe, nk, uC, bz, W, ac, U, aS, bpy); #c1(F2) c2(NP_000497) c3(prothrombin preproprotein) c4(10182, 10183) c5(10184, 10185, 10186, 10187, 10188, 10189, 10190, 10191, 10192, 10193, 10194, 10195, 10196, 10197, 10198, 10199, 10200, 10201, 10202, 10203, 10204, 10205, 10206, 10207, 10208, 10209, 10210, 10211, 10212, 10213, 10214, 10215, 10216, 10217, 10218, 10219, 10220, 10221, 10222, 10223, 10224, 10225, 10226, 10227, 10228, 10229, 10230, 10231, 10232, 10233, 10234, 10235, 10236, 10237, 10238, 10239, 10240, 10241, 10242, 10243, 10244, 10245, 10246, 10247, 10248, 10249, 10250, 10251, 10252, 10253, 10254, 10255, 10256, 10257, 10258, 10259, 10260, 10261, 10262, 10263, 10264, 10265, 10266, 10267, 10268, 10269, 10270, 10271, 10272, 10273, 10274, 10275, 10276, 10277, 10278, 10279, 10280, 10281, 10282, 10283, 10284, 10285, 10286, 10287, 10288) c6(10289, 10290, 10291, 10292, 10293) c7(bPX, bPG, T, ahf, qo, fR, aSz, UH, ea, e, aI, I, eb, aiC, ame, ur, ss, aR, Hr, x, bpl, xE, vh, M, JT, Yk, K, dQ, hH, eN, aiJ, hm, aa, bpU, DA, bpR, bpL, LG, aW, ih, hl, fc, bpP, YG, vs, aUG, bpM, aaD, aVc, uC, ve, wE, aBO, Gs, mx, uo, sU, wx, mk, k, m, pw, Re, P, bpH, dD, Rx, aaJ, sQ, xu, aw, O, ez, n, BH, aj, fr, Mo, ec, bpN, vC, qI, bpF, bpK, IG, aaL, DU, aBR, aWY, ux, is, Gc, Vb, hi, OV, MX, sq, QM, vu, Ff, ge, fe, aq, aUP, pm, cM, bpD, vU, iO, kT, W, bpC, se, afc, aoB, qq, oh, ut, gv, fL, va, bD, B, bL, bpS, jv, eR, AL, mr, wL, fG, DV, aA, sM, cz, vv, v, j, C, aqf, bpW, q, J, eA, oT, ga, hb, nX, rS, sI, HC, bpJ, aT, cy, dz, rz, qk, af, eu, kI, arl, Y, r, iy, aPf, en, pb, el, sn, c, ac, WP, mG, bpB, tz, bpE, bpQ, dy, jQ, vi, gx, sY, uq, qb, dM, ha, Jy, vr, oR, aET, bpT, uu, jE, eq, gb, atK, mC, hX, dP, F, ez, vJ, bpp, qh, qV, IC, LA, dm, IQ, jo, adx, sj, bpm, azS, Di, bpV, cH, cW, ff, wc, bpO, eZ, yy, bpA, aF, Pd, iV, dr, eK, gk, DT, pc, pE, ag, gZ, MJ, dX, aS, ei, oQ, GF, hE, ra, sH); #c1(F2R) c2(NP_001983) c3(proteinase-activated receptor 1 precursor) c4(122844) c5(122845, 122846, 122847, 122848, 122849, 122850) c6( ) c7(lD, bM, G, T, aC, fR, Js, pf, ea, e, al, bO, bB, ci, bv, aE, K, cp, aa, mH, aW, az, fc, Qm, hJ, eM, bpY, iA, acS, cj, uJ, mk, m, hh, cE, dD, aw, n, fr, et, rc, jz, Ha, jK, OV, anP, auM, fe, aq, jq, kT, Qu, kz, vb, bo, hL, at, aiS, B, Jo, fG, jx, aA, cz, j, C, q, eA, ady, aT, cy, an, ae, af, eu, nO, oV, Y, Io, HL, en, cl, iK, pb, ck, ov, ac, fD, bt, wV, bS, eq, ad, BY, dP, av, HF, F, vJ, ds, nJ, d, ue, cW, ff, eZ, aF, Z, bz, bdu, eK, LB, pv, EW, es, bE, uR, IF, Hs, dX, MC, y, X); #c1(F2RL1) c2(NP_005233) c3(proteinase-activated receptor 2 precursor) c4(154273) c5(154274, 154275, 154276, 154277, 154278, 154279) c6( ) c7(oO, bM, T, lD, aC, ea, if, bB, ci, fw, aE, rw, aa, aW, mQ, zD, Qq, g, eE, zV, ba, Hb, m, aCS, cE, aZN, dD, aw, ez, fr, qN, cd, ai, ke, jz, h, sp, Ni, fe, hk, hL, JM, at, uz, zB, B, fG, aA, v, j, V, q, eA, aT, cy, ae, Y, bg, r, lo, en, t, cT, EY, fD, bt, ao, Mb, eq, ad, BY, dP, av, sN, ds, ji, d, ff, cr, dN, gl, aF, iV, DF, LB, zr, xZ, bE, X, IC, ra, iu, y); #c1(F2RL2) c2(NP_001243495) c3(proteinase-activated receptor 3 isoform 2) c4( ) c5(90937, 90938, 90939, 90940, 90941) c6( ) c7(LB, bv, s, fG, aT, fr, ci, hE, it, B); #c1(F2RL2) c2(NP_004092) c3(proteinase-activated receptor 3 isoform 1 precursor) c4(143504, 143505) c5(143506, 143507, 143508, 143509, 143510, 143511, 143512) c6( ) c7(LB, bv, s, fG, aT, fr, ci, hE, it, B); #c1(F2RL3) c2(NP_003941) c3(proteinase-activated receptor 4 precursor) c4(142346) c5(142347, 142348, 142349, 142350, 142351, 142352) c6( ) c7(gh, T, aC, fG, bS, j, et, eA, ad, av, jz, aT, h, K, he, ae, af, GB, jf, Uf, B, aW, Y, auM, eH, bpZ, cl, Z, hJ, eF, bz, cm, eK, ck, ac, wO, acS, U, hL, IF, dX, EY, ra, X); #c1(F5) c2(NP_000121) c3(coagulation factor V precursor) c4(2198, 2199, 2200) c5(2201, 2202, 2203, 2204, 2205, 2206, 2207, 2208, 2209, 2210, 2211, 2212, 2213, 2214, 2215, 2216, 2217, 2218, 2219, 2220, 2221, 2222, 2223, 2224, 2225, 2226, 2227, 2228, 2229, 2230, 2231, 2232, 2233, 2234, 2235, 2236, 2237, 2238, 2239, 2240, 2241, 2242, 2243, 2244, 2245, 2246, 2247, 2248, 2249, 2250, 2251, 2252, 2253, 2254, 2255, 2256, 2257, 2258, 2259, 2260, 2261, 2262, 2263, 2264, 2265, 2266, 2267, 2268, 2269, 2270, 2271, 2272, 2273, 2274, 2275, 2276, 2277, 2278, 2279, 2280, 2281, 2282, 2283, 2284, 2285, 2286, 2287, 2288, 2289, 2290, 2291, 2292, 2293, 2294, 2295, 2296, 2297, 2298, 2299, 2300, 2301, 2302, 2303, 2304, 2305, 2306, 2307, 2308, 2309, 2310, 2311, 2312, 2313, 2314, 2315, 2316, 2317, 2318, 2319, 2320, 2321, 2322, 2323, 2324, 2325, 2326, 2327, 2328, 2329, 2330, 2331, 2332, 2333, 2334, 2335, 2336, 2337, 2338, 2339, 2340, 2341, 2342, 2343, 2344, 2345, 2346, 2347, 2348, 2349, 2350, 2351, 2352, 2353, 2354, 2355, 2356, 2357, 2358) c6( ) c7(lD, bpG, T, ahf, qo, fR, aSz, UH, ea, e, al, eb, aiC, fd, ame, ur, Lw, aY, ss, aR, Hr, bpl, dY, vh, M, JT, Vv, us, dQ, hH, eN, aid, hm, bpU, bpR, aW, ih, hl, YG, vs, aUG, g, bpM, uC, aVc, aHQ, ve, wE, aBO, bqd, mx, Gs, uo, sU, wx, bqh, k, m, pw, sr, P, bqn, FW, bpH, dD, aaJ, sQ, xu, aw, fN, O, ez, n, aj, oY, bqq, ld, aSv, b, vC, ql, i, bqp, aaL, DU, wb, aWY, ux, aBR, is, Gc, Vb, bqh, hi, OV, MX, sq, vu, Ff, ge, fQ, fe, aUP, pm, cM, sE, vU, ar, kT, bqk, W, bpC, se, aoB, qq, oh, ut, gv, fL, bqo, aHP, bqg, bD, B, Ip, bL, ach, jv, bpS, eR, AL, mr, wL, dK, oe, DV, aA, sM, cz, fF, Cg, j, v, C, agf, vv, bpW, q, J, UE, oT, ga, DK, hb, nX, sl, MP, aT, cy, dz, nQ, rz, bqe, qk, eu, bA, kl, arl, r, iy, lo, en, pb, el, BU, wg, sn, c, ac, mG, DW, gX, bpB, tz, cS, bpE, bpQ, dy, bqa, ao, gx, sY, bqf, uq, qb, aZ, dM, ha, Jy, vr, oR, bqr, uu, ah, eq, gb, mC, bqs, BY, F, vJ, qh, qV, IC, LA, dm, bql, ji, IQ, jo, adx, sj, azS, ue, bpV, cH, bqc, ff, wc, bpO, eZ, yy, hv, bpA, Pd, iV, aUC, dr, eK, bqj, gk, DT, pc, pE, ag, sG, gZ, bgi, MJ, dX, aLA, aS, ei, Hs, GF, bqm, vt, X, sH); #c1(F7) c2(NP_000122) c3(coagulation factor VII isoform a preproprotein) c4(2359) c5(2360, 2361, 2362, 2363, 2364, 2365, 2366, 2367, 2368, 2369, 2370, 2371, 2372, 2373, 2374, 2375, 2376, 2377, 2378, 2379, 2380, 2381, 2382, 2383, 2384, 2385, 2386, 2387, 2388, 2389, 2390, 2391, 2392, 2393, 2394, 2395, 2396, 2397, 2398, 2399, 2400, 2401, 2402, 2403, 2404, 2405, 2406, 2407, 2408, 2409, 2410, 2411, 2412, 2413, 2414, 2415, 2416, 2417, 2418, 2419, 2420, 2421, 2422, 2423, 2424, 2425, 2426, 2427, 2428, 2429, 2430, 2431, 2432, 2433, 2434, 2435, 2436, 2437, 2438, 2439, 2440, 2441, 2442, 2443, 2444, 2445, 2446, 2447, 2448, 2449, 2450, 2451, 2452, 2453, 2454, 2455) c6(2456, 2457, 2458) c7(T, fR, ea, e, al, bB, GK, M, dQ, eL, eN, hm, bqt, aW, hC, hl, aaD, ahv, DL, uC, wE, uo, m, aUL, dD, sQ, aw, jA, aj, TB, acb, bpq, MQ, bqy, aq, cM, bJ, kT, bqx, qq, ut, B, bL, dA, eR, mr, wL, oe, bqv, DV, cz, sM, bqu, v, j, C, q, eA, ga, aT, cy, bq, qk, af, eu, bg, r, iy, t, f, ck, ac, c, cS, dy, qT, sY, qb, vr, oR, bpT, Sv, uu, eq, ad, qh, ZU, IQ, bqw, uX, bpm, bpV, cW, dq, Pd, eK, gk, bE, ag, MJ, dX, aS, GF); #c1(F7) c2(NP_001254483) c3(coagulation factor VII isoform c preproprotein) c4(94444) c5(94445, 94446, 94447, 94448, 94449, 94450, 94451, 94452, 94453) c6(94454, 94455) c7(T, fR, ea, e, al, bB, GK, M, dQ, eL, eN, hm, bqt, aW, hC, hi, aaD, ahv, DL, uC, wE, uo, m, aUL, dD, sQ, aw, jA, aj, TB, acb, bpq, MQ, bqy, aq, cM, bJ, kT, bqx, qq, ut, B, bL, dA, eR, mr, wL, oe, bqv, DV, cz, sM, bqu, v, j, C, q, eA, ga, aT, cy, bq, qk, af, eu, bg, r, iy, t, f, ck, ac, c, cS, dy, gT, sY, qb, vr, oR, bpT, Sv, uu, eq, ad, qh, ZU, IQ, bqw, uX, bpm, bpV, cW, dq, Pd, eK, gk, bE, ag, MJ, dX, aS, GF); #c1(F7) c2(NP_062562) c3(coagulation factor VII isoform b preproprotein) c4(201965) c5(201966, 201967, 201968, 201969, 201970, 201971, 201972, 201973, 201974) c6(201975, 201976) c7(T, fR, ea, e, al, bB, GK, M, dQ, eL, eN, hm, bqt, aW, hC, hl, aaD, ahv, DL, uC, wE, uo, m, aUL, dD, sQ, aw, jA, aj, TB, acb, bpq, MQ, bqy, aq, cM, bJ, kT, bqx, qq, ut, B, bL, dA, eR, mr, wL, oe, bqv, DV, cz, sM, bqu, v, j, C, q, eA, ga, aT, cy, bq, gk, af, eu, bg, r, iy, t, f, ck, ac, c, cS, dy, gT, sY, gb, vr, oR, bpT, Sv, uu, eq, ad, qh, ZU, IQ, bqw, uX, bpm, bpV, cW, dq, Pd, eK, gk, bE, ag, MJ, dX, aS, GF); #c1(F8) c2(NP_000123) c3(coagulation factor VIII isoform a precursor) c4(2459, 2460) c5(2461, 2462, 2463, 2464, 2465, 2466, 2467, 2468, 2469, 2470) c6(2471, 2472, 2473) c7(T, dA, pA, aUI, gb, aw, al, cz, sM, n, vv, bpT, j, aiC, bqA, aSw, ib, rw, qh, M, aT, acb, h, ux, aUH, qk, Ck, bqB, aeT, sq, xs, hl, aUD, YG, aMJ, Pd, aUC, bqz, DI, dr, bJ, hq, wg, sn, ac, aUJ, se, ag, wE, Ei, qq, dX, bqC, hE, ao, Ro); #c1(F8) c2(NP_063916) c3(coagulation factor VIII isoform b) c4(202215) c5(202216, 202217, 202218, 202219, 202220, 202221, 202222, 202223) c6(202224, 202225) c7(T, dA, pA, aUI, qb, aw, al, cz, sM, n, vv, bpT, j, aiC, bqA, aSw, ib, rw, qh, M, aT, acb, h, ux, aUH, qk, Ck, bqB, aeT, sq, xs, hl, aUD, YG, aMJ, Pd, aUG, bqz, Dl, dr, bJ, hq, wg, sn, ac, aUJ, se, ag, wE, Ei, qq, dX, bqC, hE, ao, Ro); #c1(F9) c2(NP_000124) c3(coagulation factor IX preproprotein) c4(2474, 2475) c5(2476, 2477, 2478, 2479, 2480, 2481, 2482, 2483, 2484, 2485, 2486, 2487, 2488, 2489, 2490, 2491, 2492, 2493, 2494, 2495, 2496, 2497, 2498, 2499, 2500, 2501, 2502, 2503, 2504, 2505, 2506, 2507, 2508, 2509, 2510, 2511, 2512, 2513, 2514, 2515, 2516, 2517, 2518, 2519, 2520, 2521, 2522, 2523, 2524, 2525, 2526, 2527, 2528, 2529, 2530, 2531, 2532, 2533, 2534, 2535, 2536, 2537, 2538, 2539, 2540, 2541, 2542, 2543, 2544, 2545, 2546, 2547, 2548, 2549, 2550, 2551, 2552, 2553, 2554, 2555, 2556, 2557, 2558, 2559, 2560, 2561, 2562, 2563, 2564, 2565, 2566, 2567, 2568, 2569, 2570, 2571, 2572, 2573, 2574, 2575, 2576, 2577, 2578, 2579, 2580, 2581, 2582, 2583, 2584, 2585, 2586, 2587, 2588, 2589, 2590, 2591, 2592, 2593, 2594, 2595, 2596, 2597, 2598, 2599, 2600, 2601, 2602, 2603, 2604, 2605, 2606, 2607, 2608, 2609, 2610, 2611, 2612, 2613, 2614, 2615, 2616, 2617, 2618, 2619, 2620, 2621, 2622, 2623, 2624, 2625, 2626, 2627, 2628, 2629, 2630, 2631, 2632, 2633, 2634, 2635, 2636, 2637, 2638, 2639, 2640, 2641, 2642, 2643, 2644, 2645, 2646, 2647, 2648, 2649, 2650, 2651, 2652, 2653, 2654, 2655, 2656, 2657, 2658, 2659, 2660, 2661, 2662, 2663, 2664, 2665, 2666, 2667, 2668, 2669, 2670, 2671, 2672, 2673, 2674) c6(2675, 2676, 2677, 2678, 2679, 2680, 2681, 2682, 2683) c7(T, aCh, al, aiC, ame, ci, aon, xY, Vp, xy, bqD, vh, rw, K, bqE, hH, eL, aCg, aW, aoo, hl, YG, Ku, ir, bw, aaD, aAW, qJ, Jr, nB, U, wx, qR, P, NK, aw, n, nA, aCi, azj, kH, h, mY, bpq, Lg, wC, sq, agG, aq, aMJ, bP, se, hk, eD, qq, oh, YH, AN, B, AS, rG, dA, hz, V, nv, Qg, aT, Fx, bK, qk, jf, oV, r, lo, Vk, ck, sS, nM, iM, c, iQ, ao, Dd, Hn, bpT, ah, hF, hd, Db, qh, io, pq, je, xs, cr, nf, Pd, dr, aJx, ag, dX, bcc, hE, y); #c1(F9) c2(XP_005262454) c3(coagulation factor IX isoform X1) c4(277929) c5( ) c6( ) c7(T, aCh, al, aiC, ame, ci, aon, xY, Vp, xy, bqD, vh, rw, K, bqE, hH, eL, aCg, aW, aoo, hl, YG, Ku, ir, bw, aaD, aAW, qJ, Jr, nB, U, wx, qR, P, NK, aw, n, nA, aCi, azj, kH, h, mY, bpq, Lg, wC, sq, agG, aq, aMJ, bP, se, hk, eD, qq, oh, YH, AN, B, AS, rG, dA, hz, V, nv, Qg, aT, Fx, bK, qk, jf, oV, r, lo, Vk, ck, sS, nM, iM, c, iQ, ao, Dd, Hn, bpT, ah, hF, hd, Db, qh, io, pq, je, xs, cr, nf, Pd, dr, aJx, ag, dX, bcc, hE, y); #c1(FA2H) c2(NP_077282) c3(fatty acid 2-hydroxylase) c4(214900, 214901) c5(214902, 214903, 214904, 214905, 214906, 214907) c6( ) c7(aPR, bO, v, Vs, ad, axa, cc, aV, iX, aT, aU, bqF, bK, K, cb, bqG, ae, af, aHE, Pw, aW, aAm, Mz, hp, jb, bN, ac, eM, U); #c1(FA2H) c2(XP_011521621) c3(fatty acid 2-hydroxylase isoform X3) c4( ) c5(316419, 316420, 316421, 316422, 316423, 316424) c6( ) c7(aPR, bO, v, Vs, ad, axa, cc, aV, iX, aT, aU, bqF, bK, K, cb, bqG, ae, af, aHE, Pw, aW, aAm, Mz, hp, jb, bN, ac, eM, U); #c1(FAAH2) c2(NP_777572) c3(fatty-acid amide hydrolase 2) c4(251164) c5(251165, 251166, 251167, 251168, 251169, 251170) c6( ) c7(fr); #c1(FABP1) c2(NP_001434) c3(fatty acid-binding protein, liver) c4(117812) c5(117813, 117814, 117815, 117816, 117817, 117818) c6( ) c7(bL, fU, D, eR, e, fc, oW, n, aET, dG, v, ey, ei, du, B, eK); #c1(FABP2) c2(NP_000125) c3(fatty acid-binding protein, intestinal) c4(2684) c5(2685, 2686, 2687, 2688, 2689, 2690) c6( ) c7(bL, sY, dD, Ht, eR, ea, e, aw, cz, aj, v, j, eq, nS, q, J, kL, GK, td, bv, nH, Mm, ec, jy, qM, wt, dQ, eu, A, cH, fc, r, dq, iV, uC, fq, eK, bJ, kT, ac, cO, Fi, mg, mf, cS, dy, ei); #c1(FABP4) c2(NP_001433) c3(fatty acid-binding protein, adipocyte) c4(117805) c5(117806, 117807, 117808, 117809, 117810, 117811) c6( ) c7(bL, bM, T, dD, id, ajN, aZ, ea, e, qQ, aj, v, j, ci, eq, zP, J, ad, M, aT, Vv, LA, h, dL, K, bq, ae, eL, jf, kl, zQ, cH, aW, t, uC, GR, baa, cS, m, ei); #c1(FABP5) c2(NP_001435) c3(fatty acid-binding protein, epidermal) c4(117819) c5(117820, 117821, 117822, 117823, 117824, 117825) c6( ) c7(kV, oO, G, bL, yG, n, v, j, ci, ad, aT, bK, aiJ, yF, aW, ff, cr, kp, en, kP, W, hL, at, fD, y, B); #c1(FABP6) c2(NP_001124430) c3(gastrotropin isoform 1) c4(48832, 48833) c5(48834, 48835, 48836, 48837, 48838, 48839, 48840, 48841, 48842, 48843) c6( ) c7(bL, T, I, s, u, pf, wz, r, v, q); #c1(FABP6) c2(XP_006714893) c3(gastrotropin isoform X1) c4( ) c5(288302, 288303, 288304, 288305, 288306, 288307) c6( ) c7(bL, T, I, s, u, pf, wz, r, v, q); #c1(FABP7) c2(NP_001437) c3(fatty acid-binding protein, brain) c4(117826) c5(117827, 117828, 117829, 117830, 117831, 117832) c6( ) c7(ha, n, bS, fr, ct, V, eA, aR, aeO, aT, bK, hP, atX, d, aW, Y, fQ, as, Z, f, cm, bN, Hp, Dy, iA, dB); #c1(FABP7) c2(XP_005266915) c3(fatty acid-binding protein, brain isoform X1) c4(280397) c5(280398, 280399, 280400, 280401, 280402, 280403) c6( ) c7(ha, n, bS, fr, ct, V, eA, aR, aeO, aT, bK, hP, atX, d, aW, Y, fQ, as, Z, f, cm, bN, Hp, Dy, iA, dB); #c1(FABP9) c2(NP_001073995) c3(fatty acid-binding protein 9) c4(36847) c5(36848, 36849, 36850, 36851, 36852, 36853) c6( ) c7(H, eZ); #c1(FADD) c2(NP_003815) c3(FAS-associated death domain protein) c4(141097) c5(141098, 141099, 141100, 141101, 141102, 141103) c6( ) c7(T, dA, fR, aA, fd, oY, aj, aDO, fr, ci, Qp, eA, J, ad, eW, bv, av, bql, akJ, oW, aT, h, an, ae, eG, A, d, eH, Az, eZ, yq, g, eF, mK, kn, bqH, bP, dB, mG, gX, cj, aS, m, y, bt, it, B); #c1(FADS1) c2(NP_037534) c3(fatty acid desaturase 1) c4(176075, 176076, 176077) c5(176078, 176079, 176080, 176081, 176082, 176083) c6( ) c7(bL, bM, T, e, EQ, aA, cz, aj, bS, j, et, v, J, aqN, afR, nX, M, bq, Z, W, Fi, Zw); #c1(FADS1) c2(XP_011543324) c3(fatty acid desaturase 1 isoform X1) c4( ) c5(342106, 342107, 342108, 342109, 342110, 342111, 342112, 342113, 342114, 342115, 342116, 342117, 342118, 342119, 342120, 342121, 342122, 342123, 342124, 342125) c6( ) c7(bL, bM, T, e, EQ, aA, cz, aj, bS, j, et, v, J, aqN, afR, nX, M, bq, Z, W, Fi, Zw); #c1(FADS2) c2(NP_001268430) c3(fatty acid desaturase 2 isoform 2 precursor) c4(99923) c5(99924, 99925, 99926, 99927, 99928, 99929) c6( ) c7(bL, bM, T, W, nX, e, aw, aT, h, aj, bS, j, ct, bK, du, Z, v, ei, J, wD, aqN); #c1(FADS2) c2(NP_004256) c3(fatty acid desaturase 2 isoform 1) c4(144639, 144640) c5(144641, 144642, 144643, 144644, 144645, 144646, 144647, 144648, 144649, 144650, 144651, 144652) c6( ) c7(bL, bM, T, W, nX, e, aw, aT, h, aj, bS, j, ct, bK, du, Z, v, ei, J, wD, aqN); #c1(FADS3) c2(NP_068373) c3(fatty acid desaturase 3) c4(209360) c5(209361, 209362, 209363, 209364, 209365, 209366, 209367, 209368, 209369, 209370, 209371, 209372) c6( ) c7(bL, c, fm, nX, bci, j, bqJ); #c1(FADS3) c2(XP_011543325) c3(fatty acid desaturase 3 isoform X1) c4(342126) c5( ) c6( ) c7(bL, c, fm, nX, bci, j, bqJ); #c1(FAF2) c2(NP_055428) c3(FAS-associated factor 2) c4(181077, 181078) c5(181079, 181080, 181081, 181082, 181083, 181084) c6( ) c7(ad); #c1(FAF2) c2(XP_011532778) c3(FAS-associated factor 2 isoform X2) c4( ) c5(328859, 328860, 328861, 328862, 328863, 328864) c6( ) c7(ad); #c1(FAH) c2(NP_000128) c3(fumarylacetoacetase) c4(2698, 2699, 2700, 2701, 2702, 2703, 2704) c5(2705, 2706, 2707, 2708, 2709, 2710, 2711, 2712, 2713, 2714, 2715, 2716, 2717, 2718, 2719, 2720, 2721, 2722, 2723, 2724, 2725, 2726, 2727, 2728, 2729, 2730, 2731, 2732, 2733, 2734, 2735, 2736, 2737, 2738, 2739, 2740, 2741, 2742, 2743, 2744, 2745, 2746, 2747, 2748, 2749, 2750, 2751, 2752, 2753, 2754, 2755, 2756, 2757, 2758, 2759, 2760, 2761, 2762, 2763, 2764, 2765, 2766, 2767, 2768, 2769, 2770, 2771, 2772, 2773, 2774, 2775, 2776, 2777, 2778, 2779, 2780, 2781, 2782, 2783, 2784, 2785, 2786, 2787, 2788, 2789, 2790, 2791, 2792, 2793, 2794, 2795, 2796, 2797, 2798, 2799, 2800, 2801, 2802, 2803, 2804, 2805, 2806, 2807, 2808, 2809, 2810, 2811, 2812, 2813, 2814, 2815, 2816, 2817, 2818, 2819, 2820, 2821, 2822, 2823, 2824, 2825, 2826, 2827, 2828, 2829, 2830, 2831, 2832, 2833, 2834, 2835, 2836, 2837, 2838, 2839, 2840, 2841, 2842, 2843, 2844, 2845, 2846, 2847, 2848, 2849, 2850, 2851, 2852, 2853, 2854, 2855, 2856, 2857) c6(2858) c7(os, oe, al, cz, aj, oZ, ci, q, bqK, aT, K, Gy, aW, hl, r, dq, lo, aq, iR, dr, gk, kQ, QT, B); #c1(FAHD2A) c2(NP_057128) c3(fumarylacetoacetate hydrolase domain-containing protein 2A) c4(189028) c5(189029, 189030, 189031, 189032, 189033, 189034, 189035, 189036, 189037, 189038) c6( ) c7(v); #c1(FAHD2A) c2(XP_011509589) c3(fumarylacetoacetate hydrolase domain-containing protein 2A isoform X2) c4(300154) c5( ) c6( ) c7(v); #c1(FAHD2A) c2(XP_011509592) c3(fumarylacetoacetate hydrolase domain-containing protein 2A isoform X4) c4(300155) c5(300156, 300157, 300158, 300159, 300160, 300161, 300162, 300163, 300164, 300165, 300166, 300167) c6( ) c7(v); #c1(FAIM2) c2(NP_036438) c3(protein lifeguard 2) c4(173856, 173857) c5(173858, 173859, 173860, 173861, 173862, 173863, 173864, 173865, 173866, 173867, 173868, 173869, 173870, 173871, 173872, 173873) c6( ) c7(bL, aw, cz, jy, v, fq); #c1(FAIM3) c2(NP_001135945) c3(fas apoptotic inhibitory molecule 3 isoform b) c4(53677) c5(53678, 53679, 53680, 53681, 53682, 53683) c6( ) c7(cj); #c1(FAIM3) c2(NP_001180267) c3(fas apoptotic inhibitory molecule 3 isoform c precursor) c4(73602) c5(73603, 73604, 73605, 73606, 73607, 73608, 73609, 73610, 73611, 73612, 73613, 73614, 73615, 73616, 73617, 73618, 73619, 73620, 73621, 73622, 73623, 73624, 73625, 73626) c6( ) c7(cj); #c1(FAIM3) c2(NP_005440) c3(fas apoptotic inhibitory molecule 3 isoform a precursor) c4(156191, 156192) c5(156193, 156194, 156195, 156196, 156197, 156198) c6( ) c7(cj); #c1(FAIM3) c2(XP_005273408) c3(fas apoptotic inhibitor molecule 3 isoform X1) c4(284577, 284578) c5( ) c6( ) c7(cj); #c1(FAM102A) c2(NP_001030331) c3(protein FAM102A isoform a) c4(31012, 31013) c5(31014, 31015, 31016, 31017, 31018, 31019) c6( ) c7(aW, IH, aT); #c1(FAM102A) c2(NP_976050) c3(protein FAM102A isoform b) c4( ) c5(262899, 262900, 262901, 262902, 262903) c6( ) c7(aW, IH, aT); #c1(FAM102A) c2(XP_011516980) c3(protein FAM102A isoform X3) c4( ) c5(310479) c6( ) c7(aW, IH, aT); #c1(FAM103A1) c2(NP_113640) c3(RNMT-activating mini protein) c4(221870) c5(221871, 221872, 221873, 221874, 221875, 221876) c6( ) c7(ck, dE, y); #c1(FAM105A) c2(NP_061891) c3(inactive ubiquitin thioesterase FAM105A) c4(201002) c5(201003, 201004, 201005, 201006, 201007, 201008) c6( ) c7(ey); #c1(FAM107A) c2(NP_001269642) c3(protein FAM107A isoform b) c4(102362) c5(102363, 102364, 102365, 102366, 102367, 102368, 102369, 102370) c6( ) c7(fr, T, d, eA, y); #c1(FAM107A) c2(NP_001269643) c3(protein FAM107A isoform c) c4(102371, 102372, 102373, 102374) c5(102375, 102376, 102377, 102378, 102379, 102380, 102381, 102382) c6( ) c7(fr, T, d, eA, y); #c1(FAM107A) c2(NP_009108) c3(protein FAM107A isoform a) c4( ) c5(170707, 170708, 170709, 170710, 170711, 170712, 170713, 170714, 170715, 170716, 170717, 170718, 170719, 170720, 170721, 170722, 170723, 170724) c6( ) c7(fr, T, d, eA, y); #c1(FAM107B) c2(NP_001269625) c3(protein FAM107B isoform a) c4( ) c5(102239, 102240, 102241, 102242, 102243, 102244, 102245, 102246, 102247, 102248, 102249, 102250, 102251, 102252, 102253, 102254, 102255, 102256, 102257, 102258, 102259, 102260, 102261, 102262, 102263, 102264, 102265, 102266, 102267, 102268, 102269, 102270, 102271, 102272, 102273, 102274, 102275, 102276, 102277, 102278, 102279, 102280, 102281, 102282, 102283, 102284, 102285, 102286, 102287, 102288, 102289, 102290, 102291, 102292, 102293, 102294, 102295, 102296, 102297, 102298, 102299, 102300, 102301, 102302, 102303, 102304, 102305, 102306, 102307, 102308, 102309, 102310, 102311, 102312, 102313) c6( ) c7(T, oe, gX); #c1(FAM107B) c2(NP_113641) c3(protein FAM107B isoform b) c4(221877, 221878, 221879, 221880, 221881, 221882, 221883, 221884, 221885, 221886) c5(221887, 221888, 221889, 221890, 221891, 221892) c6( ) c7(T, oe, gX); #c1(FAM107B) c2(XP_011518033) c3(protein FAM107B isoform X2) c4( ) c5(312033, 312034, 312035, 312036, 312037, 312038, 312039, 312040, 312041, 312042, 312043, 312044, 312045, 312046, 312047, 312048, 312049, 312050, 312051) c6( ) c7(T, oe, gX); #c1(FAM109A) c2(NP_001171467) c3(sesguipedalian-1 isoform 1) c4(70153, 70154, 70155, 70156, 70157, 70158) c5(70159, 70160, 70161, 70162, 70163, 70164, 70165, 70166, 70167, 70168, 70169, 70170, 70171, 70172) c6( ) c7(mU, aPt, mW, mZ, KW, mS, mY, bK, mV, mT, mX); #c1(FAM109A) c2(NP_001171468) c3(sesguipedalian-1 isoform 2) c4( ) c5(70173, 70174, 70175, 70176, 70177, 70178, 70179, 70180, 70181, 70182, 70183, 70184, 70185, 70186, 70187, 70188, 70189, 70190, 70191, 70192, 70193, 70194, 70195, 70196, 70197, 70198, 70199, 70200, 70201, 70202, 70203, 70204, 70205, 70206, 70207, 70208) c6( ) c7(mU, aPt, mW, mZ, KW, mS, mY, bK, mV, mT, mX); #c1(FAM110A) c2(NP_001276075) c3(protein FAM110A) c4(107865) c5(107866, 107867, 107868, 107869, 107870, 107871, 107872, 107873, 107874, 107875, 107876, 107877, 107878, 107879, 107880, 107881, 107882, 107883, 107884, 107885, 107886, 107887, 107888, 107889) c6( ) c7(dX, bpm, eA, aUF); #c1(FAM110B) c2(NP_671722) c3(protein FAM110B) c4(242160) c5(242161, 242162, 242163, 242164, 242165, 242166) c6( ) c7(ae, np, ad); #c1(FAM110C) c2(NP_001071178) c3(protein FAM110C) c4(35346) c5(35347, 35348, 35349, 35350, 35351, 35352) c6( ) c7(aaw); #c1(FAM111B) c2(NP_001136176) c3(protein FAM111B isoform b) c4( ) c5(54500, 54501, 54502, 54503, 54504, 54505, 54506, 54507, 54508, 54509, 54510, 54511, 54512) c6( ) c7(bqM, fG, fr, bqL, ask); #c1(FAM111B) c2(NP_945185) c3(protein FAM111B isoform a) c4(260704, 260705, 260706) c5(260707, 260708, 260709, 260710, 260711, 260712, 260713, 260714, 260715, 260716) c6( ) c7(bqM, fG, fr, bqL, ask); #c1(FAM114A1) c2(NP_612398) c3(protein NOXP20) c4(236377, 236378) c5(236379, 236380, 236381, 236382, 236383, 236384) c6( ) c7(cm); #c1(FAM114A1) c2(XP_005262730) c3(protein NOXP20 isoform X3) c4( ) c5(278076, 278077, 278078, 278079, 278080, 278081) c6( ) c7(cm); #c1(FAM114A1) c2(XP_006714096) c3(protein NOXP20 isoform X4) c4( ) c5(287541, 287542, 287543, 287544, 287545, 287546) c6( ) c7(cm); #c1(FAM114A1) c2(XP_011512065) c3(protein NOXP20 isoform X2) c4(302720) c5( ) c6( ) c7(cm); #c1(FAM120B) c2(NP_001273308) c3(constitutive coactivator of peroxisome proliferator-activated receptor gamma isoform a) c4(104663, 104664, 104665) c5(104666, 104667, 104668, 104669, 104670, 104671, 104672, 104673, 104674, 104675, 104676, 104677) c6( ) c7(adz); #c1(FAM120B) c2(NP_001273309) c3(constitutive coactivator of peroxisome proliferator-activated receptor gamma isoform b) c4(104678) c5(104679, 104680, 104681, 104682, 104683, 104684) c6( ) c7(adz); #c1(FAM120B) c2(NP_001273310) c3(constitutive coactivator of peroxisome proliferator-activated receptor gamma isoform d) c4( ) c5(104685, 104686, 104687, 104688, 104689) c6( ) c7(adz); #c1(FAM120B) c2(NP_115824) c3(constitutive coactivator of peroxisome proliferator-activated receptor gamma isoform c) c4( ) c5(224164) c6( ) c7(adz); #c1(FAM120C) c2(NP_060318) c3(constitutive coactivator of PPAR-gamma-like protein 2 isoform 1) c4(195388, 195389) c5(195390, 195391, 195392, 195393, 195394, 195395) c6( ) c7(nf, bN, bqN); #c1(FAM120C) c2(NP_940858) c3(constitutive coactivator of PPAR-gamma-like protein 2 isoform 2) c4( ) c5(259977, 259978, 259979, 259980, 259981, 259982) c6( ) c7(nf, bN, bqN); #c1(FAM124B) c2(NP_001116251) c3(protein FAM124B isoform a) c4(43718) c5(43719, 43720, 43721, 43722, 43723, 43724) c6( ) c7(aw, aT); #c1(FAM124B) c2(NP_079061) c3(protein FAM124B isoform b) c4(216841) c5(216842, 216843, 216844, 216845, 216846, 216847, 216848, 216849, 216850, 216851) c6( ) c7(aw, aT); #c1(FAM126A) c2(NP_115970) c3(hyccin) c4(224993) c5(224994, 224995, 224996, 224997, 224998, 224999) c6( ) c7(Kd, T, am, aC, bqP, Dd, uG, al, jx, aA, bB, n, jE, nA, ci, bX, q, aEl, hX, b, F, aE, Iv, aT, yu, bK, K, aYF, pl, aAA, s, aW, Y, fc, hl, r, yy, aq, lo, aF, bqO, iR, boD, KM, dr, YR, ck, iO, gk, bP, bE, X, rH, cP, be, i, hE, IB, B, vi); #c1(FAM129A) c2(NP_443198) c3(protein Niban) c4(229815, 229816) c5(229817, 229818, 229819, 229820, 229821, 229822, 229823, 229824, 229825, 229826, 229827, 229828) c6( ) c7(qJ, es, ci, MU); #c1(FAM129B) c2(NP_001030611) c3(niban-like protein 1 isoform 2) c4(31064) c5(31065, 31066, 31067, 31068, 31069, 31070, 31071, 31072, 31073, 31074, 31075, 31076) c6( ) c7(Y); #c1(FAM129B) c2(NP_073744) c3(niban-like protein 1 isoform 1) c4(213433) c5(213434, 213435, 213436, 213437, 213438, 213439) c6( ) c7(Y); #c1(FAM129B) c2(XP_005252192) c3(niban-like protein 1 isoform X1) c4(271593) c5( ) c6( ) c7(Y); #c1(FAM134B) c2(NP_001030022) c3(protein FAM134B isoform 1) c4(30874) c5(30875, 30876, 30877, 30878, 30879, 30880) c6( ) c7(bqR, cZ, T, s, RD, bE, aFa, Dd, ff, r, bB, bqQ, ci, en, dd, g, q, akS); #c1(FAM134B) c2(NP_061873) c3(protein FAM134B isoform 2) c4(200867) c5(200868, 200869, 200870, 200871, 200872, 200873) c6( ) c7(bqR, cZ, T, s, RD, bE, aFa, Dd, ff, r, bB, bqQ, ci, en, dd, g, q, akS); #c1(FAM134B) c2(XP_011512355) c3(protein FAM134B isoform X1) c4( ) c5(303063, 303064, 303065, 303066, 303067, 303068) c6( ) c7(bqR, cZ, T, s, RD, bE, aFa, Dd, ff, r, bB, bqQ, ci, en, dd, g, g, akS); #c1(FAM135A) c2(NP_001099001) c3(protein FAM135A isoform a) c4(41596) c5(41597, 41598, 41599, 41600, 41601, 41602) c6( ) c7(bL, y, A, j, cz); #c1(FAM135A) c2(NP_001156001) c3(protein FAM135A isoform c) c4(61689, 61690, 61691) c5(61692, 61693, 61694, 61695, 61696, 61697, 61698, 61699, 61700, 61701, 61702, 61703) c6( ) c7(bL, y, A, j, cz); #c1(FAM135A) c2(NP_065870) c3(protein FAM135A isoform b) c4(205964) c5(205965, 205966, 205967, 205968, 205969, 205970, 205971, 205972, 205973, 205974) c6( ) c7(bL, y, A, j, cz); #c1(FAM135A) c2(XP_005248808) c3(protein FAM135A isoform X6) c4(268584) c5(268585, 268586) c6( ) c7(bL, y, A, j, cz); #c1(FAM135A) c2(XP_011534298) c3(protein FAM135A isoform X2) c4( ) c5(330671, 330672, 330673, 330674, 330675, 330676, 330677, 330678, 330679, 330680) c6( ) c7(bL, y, A, j, cz); #c1(FAM135B) c2(NP_056996) c3(protein FAM135B) c4(188383) c5(188384, 188385, 188386, 188387, 188388, 188389) c6( ) c7(en, T, ff, cd, bA); #c1(FAM135B) c2(XP_011515372) c3(protein FAM135B isoform X8) c4(308202, 308203) c5( ) c6( ) c7(en, T, ff, cd, bA); #c1(FAM135B) c2(XP_011515373) c3(protein FAM135B isoform X9) c4( ) c5(308204, 308205, 308206, 308207, 308208, 308209, 308210, 308211, 308212, 308213, 308214, 308215, 308216, 308217) c6(308218, 308219) c7(en, T, ff, cd, bA); #c1(FAM136A) c2(NP_116211) c3(protein FAM136A) c4(225759) c5(225760, 225761, 225762, 225763, 225764, 225765, 225766, 225767) c6(225768, 225769) c7(Fh); #c1(FAM13A) c2(NP_001015045) c3(protein FAM13A isoform b) c4(26135) c5(26136, 26137, 26138, 26139, 26140, 26141) c6( ) c7(LB, ant, ac, oe, la, at, dy, aa); #c1(FAM13A) c2(NP_001252508) c3(protein FAM13A isoform d) c4(94035) c5(94036, 94037, 94038, 94039, 94040, 94041) c6( ) c7(LB, ant, ac, oe, la, at, dy, aa); #c1(FAM13A) c2(NP_055698) c3(protein FAM13A isoform a) c4(182854) c5(182855, 182856, 182857, 182858, 182859, 182860) c6( ) c7(LB, ant, ac, oe, la, at, dy, aa); #c1(FAM13A) c2(XP_005262740) c3(protein FAM13A isoform X5) c4( ) c5(278082, 278083, 278084, 278085, 278086, 278087) c6( ) c7(LB, ant, ac, oe, la, at, dy, aa); #c1(FAM13A) c2(XP_011529819) c3(protein FAM13A isoform X4) c4(325628) c5( ) c6( ) c7(LB, ant, ac, oe, la, at, dy, aa); #c1(FAM13C) c2(NP_001001971) c3(protein FAM13C isoform 2) c4(19223) c5(19224, 19225, 19226, 19227, 19228, 19229) c6( ) c7(e, ac); #c1(FAM13C) c2(NP_001137245) c3(protein FAM13C isoform 3) c4(55160) c5( ) c6( ) c7(e, ac); #c1(FAM13C) c2(NP_001160170) c3(protein FAM13C isoform 4) c4(65195) c5(65196, 65197, 65198, 65199, 65200) c6( ) c7(e, ac); #c1(FAM13C) c2(NP_937858) c3(protein FAM13C isoform 1) c4(259315, 259316) c5(259317, 259318, 259319, 259320, 259321, 259322, 259323, 259324, 259325, 259326, 259327, 259328, 259329, 259330, 259331, 259332, 259333) c6( ) c7(e, ac); #c1(FAM13C) c2(XP_005269675) c3(protein FAM13C isoform X2) c4(282703) c5(282704, 282705, 282706, 282707, 282708, 282709, 282710) c6( ) c7(e, ac); #c1(FAM13C) c2(XP_005269676) c3(protein FAM13C isoform X4) c4( ) c5(282711, 282712) c6( ) c7(e, ac); #c1(FAM149A) c2(NP_056213) c3(protein FAM149A) c4(186420, 186421, 186422) c5(186423, 186424, 186425, 186426, 186427, 186428, 186429, 186430, 186431, 186432, 186433, 186434, 186435, 186436, 186437, 186438, 186439, 186440, 186441, 186442) c6( ) c7(aC); #c1(FAM149A) c2(XP_011530139) c3(protein FAM149A isoform X5) c4( ) c5(326037, 326038, 326039, 326040, 326041, 326042) c6( ) c7(aC); #c1(FAM150B) c2(NP_001002919) c3(protein FAM150B precursor) c4(19777, 19778) c5(19779, 19780, 19781, 19782, 19783, 19784, 19785, 19786, 19787, 19788, 19789, 19790, 19791, 19792, 19793) c6(19794, 19795, 19796) c7(fq); #c1(FAM155A) c2(NP_001073865) c3(transmembrane protein FAM155A) c4(36175) c5(36176, 36177, 36178, 36179, 36180, 36181) c6( ) c7(ac, pN, iX, aw, oe, alv, cd); #c1(FAM160B1) c2(NP_001128523) c3(protein FAM160B1 isoform b) c4(50153) c5(50154, 50155, 50156, 50157, 50158, 50159, 50160, 50161, 50162, 50163, 50164, 50165) c6( ) c7(Y); #c1(FAM160B1) c2(NP_065991) c3(protein FAM160B1 isoform a) c4(206612, 206613, 206614) c5(206615, 206616, 206617, 206618, 206619, 206620, 206621, 206622, 206623, 206624, 206625, 206626) c6( ) c7(Y); #c1(FAM161A) c2(NP_001188472) c3(protein FAM161A isoform 1) c4(79204) c5(79205, 79206, 79207, 79208, 79209, 79210) c6( ) c7(oh, nC, nk); #c1(FAM161A) c2(NP_115556) c3(protein FAM161A isoform 2) c4(223154) c5(223155, 223156, 223157, 223158, 223159, 223160) c6( ) c7(oh, nC, nk); #c1(FAM163A) c2(NP_775780) c3(protein FAM163A) c4(250273) c5(250274, 250275, 250276, 250277, 250278, 250279) c6( ) c7(cm, T); #c1(FAM163B) c2(NP_001073984) c3(protein FAM163B) c4(36776, 36777) c5(36778, 36779, 36780, 36781, 36782, 36783, 36784, 36785, 36786, 36787, 36788, 36789, 36790, 36791, 36792, 36793) c6( ) c7(aj, ac); #c1(FAM167A) c2(NP_444509) c3(protein FAM167A) c4(230341) c5(230342, 230343, 230344, 230345, 230346, 230347) c6( ) c7(Bv, A, fN, eZ, fL, pb, lf, V, Pr, mC, y); #c1(FAM168A) c2(NP_001272979) c3(protein FAM168A isoform 1) c4(104127) c5(104128, 104129, 104130, 104131, 104132, 104133, 104134, 104135) c6( ) c7(nz, ff, en, aA); #c1(FAM168A) c2(NP_001272980) c3(protein FAM168A isoform 3) c4(104136) c5(104137, 104138, 104139, 104140, 104141, 104142) c6( ) c7(nz, ff, en, aA); #c1(FAM168A) c2(NP_055974) c3(protein FAM168A isoform 2) c4(184819) c5(184820, 184821, 184822, 184823, 184824, 184825) c6( ) c7(nz, ff, en, aA); #c1(FAM1688) c2(NP_001009993) c3(myelin-associated neurite-outgrowth inhibitor) c4(23783, 23784) c5(23785, 23786, 23787, 23788, 23789, 23790, 23791, 23792, 23793, 23794, 23795, 23796, 23797, 23798, 23799, 23800) c6( ) c7(xs); #c1(FAM1688) c2(XP_011508896) c3(myelin-associated neurite-outgrowth inhibitor isoform X2) c4( ) c5(299475) c6( ) c7(xs); #c1(FAM1698) c2(NP_872368) c3(protein FAM1698) c4(256259) c5(256260, 256261, 256262, 256263, 256264, 256265, 256266, 256267, 256268, 256269) c6( ) c7(fq, bqS); #c1(FAM170A) c2(NP_001157463) c3(protein FAM170A isoform 2) c4(62210, 62211) c5(62212, 62213, 62214, 62215, 62216, 62217, 62218, 62219, 62220, 62221, 62222, 62223) c6( ) c7(cd); #c1(FAM170A) c2(NP_877438) c3(protein FAM170A isoform 1) c4(256820, 256821) c5(256822, 256823, 256824, 256825, 256826, 256827, 256828, 256829, 256830, 256831, 256832, 256833) c6( ) c7(cd); #c1(FAM172A) c2(NP_001156889) c3(protein FAM172A isoform 2) c4( ) c5(62008, 62009, 62010, 62011, 62012, 62013, 62014) c6(62015, 62016) c7(fq); #c1(FAM172A) c2(NP_001156890) c3(protein FAM172A isoform 3) c4( ) c5(62017, 62018, 62019, 62020, 62021, 62022, 62023) c6(62024, 62025) c7(fq); #c1(FAM172A) c2(NP_114431) c3(protein FAM172A isoform 1 precursor) c4(222747, 222748) c5(222749, 222750, 222751, 222752, 222753, 222754, 222755, 222756, 222757) c6(222758, 222759) c7(fq); #c1(FAM172A) c2(XP_005272162) c3(protein FAM172A isoform X8) c4(283731) c5(283732) c6( ) c7(fq); #c1(FAM1738) c2(NP_954584) c3(protein FAM1738 isoform 1) c4(261065) c5(261066, 261067, 261068, 261069, 261070, 261071) c6( ) c7(xZ, cZ); #c1(FAM174A) c2(NP_940909) c3(membrane protein FAM174A precursor) c4( ) c5(260097, 260098, 260099, 260100, 260101, 260102) c6( ) c7(fq, ww); #c1(FAM174A) c2(XP_006714663) c3(membrane protein FAM174A isoform X1) c4(287979) c5( ) c6( ) c7(fq, ww); #c1(FAM175A) c2(NP_620775) c3(BRCA1-A complex subunit Abraxas) c4(238118, 238119, 238120) c5(238121, 238122, 238123, 238124, 238125, 238126, 238127, 238128) c6( ) c7(aW, t, m, aT); #c1(FAM175A) c2(XP_005263337) c3(BRCA1-A complex subunit Abraxas isoform X1) c4( ) c5(278434, 278435, 278436, 278437, 278438, 278439, 278440, 278441, 278442, 278443) c6( ) c7(aW, t, m, aT); #c1(FAM1758) c2(NP_115558) c3(BRISC complex subunit Abro1) c4(223194) c5(223195, 223196, 223197, 223198, 223199, 223200) c6( ) c7(aw, j, K); #c1(FAM177A1) c2(NP_001072987) c3(protein FAM177A1 isoform 2) c4( ) c5(35461, 35462, 35463, 35464, 35465, 35466, 35467, 35468, 35469, 35470, 35471, 35472, 35473) c6( ) c7(cL); #c1(FAM177A1) c2(NP_775878) c3(protein FAM177A1 isoform 1 precursor) c4(250549, 250550, 250551) c5(250552, 250553, 250554, 250555, 250556, 250557, 250558, 250559, 250560) c6( ) c7(cL); #c1(FAM1778) c2(NP_997351) c3(protein FAM1778) c4(265418, 265419, 265420) c5(265421, 265422, 265423, 265424, 265425, 265426, 265427, 265428, 265429, 265430, 265431, 265432, 265433, 265434, 265435, 265436, 265437, 265438, 265439, 265440, 265441, 265442) c6( ) c7(W); #c1(FAM178A) c2(NP_001129595) c3(protein FAM178A isoform 2) c4(51955) c5(51956, 51957, 51958, 51959, 51960, 51961, 51962, 51963, 51964, 51965, 51966, 51967) c6( ) c7(Ea); #c1(FAM178A) c2(NP_060591) c3(protein FAM178A isoform 1) c4(196712) c5(196713, 196714, 196715, 196716, 196717, 196718) c6( ) c7(Ea); #c1(FAM178A) c2(XP_011538247) c3(protein FAM178A isoform X4) c4(335855) c5( ) c6( ) c7(Ea); #c1(FAM1788) c2(NP_001116118) c3(protein FAM1788 isoform A) c4(43627, 43628) c5(43629, 43630, 43631, 43632, 43633, 43634, 43635, 43636, 43637, 43638, 43639, 43640, 43641, 43642, 43643, 43644, 43645, 43646) c6( ) c7(fq); #c1(FAM1788) c2(NP_057574) c3(protein FAM1788 isoform 8) c4( ) c5(191409, 191410, 191411, 191412, 191413, 191414) c6( ) c7(fq); #c1(FAM1788) c2(XP_011509595) c3(protein FAM1788 isoform X1) c4(300175, 300176) c5( ) c6( ) c7(fq); #c1(FAM1798) c2(NP_055906) c3(protein FAM1798) c4(184389) c5(184390, 184391, 184392, 184393, 184394, 184395, 184396, 184397, 184398, 184399, 184400, 184401, 184402, 184403, 184404, 184405, 184406, 184407) c6( ) c7(fe, T); #c1(FAM1798) c2(XP_011534873) c3(protein FAM1798 isoform X2) c4(331413) c5( ) c6( ) c7(fe, T); #c1(FAM180A) c2(NP_995327) c3(protein FAM180A precursor) c4(263893) c5(263894, 263895, 263896, 263897, 263898, 263899, 263900, 263901, 263902, 263903, 263904, 263905, 263906, 263907, 263908, 263909, 263910, 263911, 263912) c6(263913, 263914, 263915, 263916, 263917) c7(dP); #c1(FAM184A) c2(NP_001093881) c3(protein FAM184A isoform 2) c4(40483) c5(40484, 40485, 40486, 40487, 40488) c6( ) c7(IB); #c1(FAM184A) c2(NP_078857) c3(protein FAM184A isoform 1) c4(215804) c5(215805, 215806, 215807, 215808, 215809, 215810, 215811) c6( ) c7(IB); #c1(FAM1848) c2(NP_056503) c3(protein FAM1848) c4(187798) c5(187799, 187800, 187801, 187802, 187803, 187804) c6( ) c7(IB); #c1(FAM1878) c2(NP_689694) c3(protein FAM1878 precursor) c4(243588, 243589) c5(243590, 243591, 243592, 243593, 243594, 243595, 243596, 243597, 243598, 243599, 243600, 243601, 243602, 243603) c6( ) c7(j); #c1(FAM188A) c2(NP_079224) c3(protein FAM188A) c4(217513) c5(217514, 217515, 217516, 217517, 217518, 217519) c6( ) c7(bv, T, cc, eM, sN, mx, fe, v, nA, im, bz); #c1(FAM188A) c2(XP_006717571) c3(protein FAM188A isoform X2) c4(291180) c5( ) c6( ) c7(bv, T, cc, eM, sN, mx, fe, v, nA, im, bz); #c1(FAM188A) c2(XP_011517994) c3(protein FAM188A isoform X4) c4(312009) c5( ) c6( ) c7(bv, T, cc, eM, sN, mx, fe, v, nA, im, bz); #c1(FAM188A) c2(XP_011517995) c3(protein FAM188A isoform X5) c4(312010) c5(312011, 312012, 312013, 312014, 312015, 312016, 312017, 312018, 312019, 312020, 312021, 312022) c6( ) c7(bv, T, cc, eM, sN, mx, fe, v, nA, im, bz); #c1(FAM1888) c2(NP_115598) c3(protein FAM1888) c4(223339) c5(223340, 223341, 223342, 223343, 223344, 223345, 223346) c6( ) c7(aw); #c1(FAM189B) c2(NP_001254537) c3(protein FAM189B isoform c) c4(94606) c5(94607, 94608, 94609, 94610, 94611, 94612, 94613, 94614, 94615, 94616, 94617, 94618, 94619, 94620) c6( ) c7(B); #c1(FAM189B) c2(NP_006580) c3(protein FAM189B isoform a) c4(166377) c5(166378, 166379, 166380, 166381, 166382, 166383, 166384, 166385) c6( ) c7(B); #c1(FAM189B) c2(NP_937995) c3(protein FAM189B isoform b) c4(259465, 259466, 259467) c5(259468, 259469, 259470, 259471, 259472, 259473, 259474, 259475, 259476, 259477, 259478, 259479, 259480, 259481, 259482, 259483, 259484) c6( ) c7(B); #c1(FAM189B) c2(XP_005276795) c3(protein FAM189B isoform X1) c4(285713) c5( ) c6( ) c7(B); #c1(FAM189B) c2(XP_005276798) c3(protein FAM189B isoform X4) c4( ) c5(285714, 285715, 285716, 285717, 285718, 285719, 285720) c6( ) c7(B); #c1(FAM193B) c2(NP_001177875) c3(protein FAM193B) c4(73109) c5(73110, 73111, 73112, 73113, 73114, 73115) c6( ) c7(bv, Xu); #c1(FAM193B) c2(XP_006714938) c3(protein FAM193B isoform X1) c4( ) c5(288365) c6( ) c7(bv, Xu); #c1(FAM193B) c2(XP_006714942) c3(protein FAM193B isoform X7) c4(288366) c5(288367, 288368, 288369, 288370, 288371) c6( ) c7(bv, Xu); #c1(FAM193B) c2(XP_006714948) c3(protein FAM193B isoform X9) c4( ) c5(288372, 288373, 288374, 288375, 288376) c6( ) c7(bv, Xu); #c1(FAM193B) c2(XP_006714949) c3(protein FAM193B isoform X10) c4( ) c5(288377) c6( ) c7(bv, Xu); #c1(FAM193B) c2(XP_011532880) c3(protein FAM193B isoform X5) c4(329069) c5( ) c6( ) c7(bv, Xu); #c1(FAM193B) c2(XP_011532883) c3(protein FAM193B isoform X8) c4( ) c5(329070) c6( ) c7(bv, Xu); #c1(FAM196A) c2(NP_001034851) c3(protein FAM196A) c4(32364) c5(32365, 32366, 32367, 32368, 32369, 32370) c6( ) c7(aur, c); #c1(FAM196B) c2(NP_001123363) c3(protein FAM196B) c4(47061) c5(47062, 47063, 47064, 47065, 47066, 47067) c6( ) c7(bM, aw, ac); #c1(FAM198B) c2(NP_001026870) c3(protein FAM198B isoform 1) c4(29729) c5(29730, 29731, 29732, 29733, 29734, 29735) c6( ) c7(ey); #c1(FAM198B) c2(NP_001121896) c3(protein FAM198B isoform 2) c4(46258, 46259) c5(46260, 46261, 46262, 46263, 46264, 46265, 46266, 46267, 46268, 46269, 46270, 46271, 46272, 46273, 46274, 46275, 46276, 46277, 46278) c6( ) c7(ey); #c1(FAM19A1) c2(NP_998774) c3(protein FAM19A1 precursor) c4(265940) c5(265941, 265942, 265943, 265944, 265945, 265946, 265947, 265948, 265949, 265950, 265951, 265952, 265953, 265954) c6(265955, 265956, 265957, 265958) c7(bL, Be); #c1(FAM19A2) c2(NP_848634) c3(protein FAM19A2 precursor) c4(254030) c5(254031, 254032, 254033, 254034, 254035, 254036, 254037, 254038, 254039, 254040) c6( ) c7(fq); #c1(FAM19A4) c2(NP_001005527) c3(protein FAM19A4 precursor) c4(21827) c5(21828, 21829, 21830, 21831, 21832, 21833, 21834, 21835, 21836, 21837, 21838, 21839, 21840, 21841, 21842) c6(21843, 21844, 21845) c7(ac, ci, aT); #c1(FAM19A4) c2(XP_011531674) c3(protein FAM19A4 isoform X1) c4(327792) c5( ) c6( ) c7(ac, ci, aT); #c1(FAM19A5) c2(NP_001076436) c3(protein FAM19A5 isoform 1) c4(37421) c5(37422, 37423, 37424, 37425, 37426, 37427, 37428, 37429) c6(37430, 37431) c7(aC, aw, c, pN); #c1(FAM19A5) c2(NP_056196) c3(protein FAM19A5 isoform 2 precursor) c4(186274) c5(186275, 186276, 186277, 186278, 186279, 186280, 186281, 186282) c6(186283, 186284) c7(aC, aw, c, pN); #c1(FAM204A) c2(NP_071346) c3(protein FAM204A) c4( ) c5(211114, 211115, 211116, 211117, 211118, 211119, 211120, 211121, 211122, 211123, 211124, 211125, 211126) c6( ) c7(aC); #c1(FAM204A) c2(XP_005270081) c3(protein FAM204A isoform X2) c4(283105, 283106) c5(283107, 283108, 283109) c6( ) c7(aC); #c1(FAM205A) c2(NP_001135389) c3(protein FAM205A) c4(52832, 52833, 52834) c5(52835, 52836, 52837, 52838, 52839, 52840, 52841, 52842, 52843, 52844, 52845, 52846, 52847, 52848, 52849, 52850, 52851, 52852) c6( ) c7(y); #c1(FAM20A) c2(NP_001230675) c3(protein FAM20A isoform b) c4( ) c5(86553, 86554, 86555, 86556, 86557, 86558) c6( ) c7(bqT, asU, j, Ud); #c1(FAM20A) c2(NP_060035) c3(protein FAM20A isoform a precursor) c4(193806) c5(193807, 193808, 193809, 193810, 193811, 193812, 193813, 193814, 193815, 193816) c6( ) c7(bqT, asU, j, Ud); #c1(FAM20A) c2(XP_011523219) c3(protein FAM20A isoform X2) c4(317756) c5( ) c6( ) c7(bqT, asU, j, Ud); #c1(FAM208) c2(NP_055679) c3(glycosaminoglycan xylosylkinase) c4(182719, 182720) c5(182721, 182722, 182723, 182724, 182725, 182726, 182727, 182728, 182729, 182730, 182731, 182732) c6( ) c7(fq, Ly); #c1(FAM20C) c2(NP_064608) c3(extracellular serine/threonine protein kinase FAM20C precursor) c4(203258) c5(203259, 203260, 203261, 203262, 203263, 203264) c6( ) c7(Kd, bqU, AB, aDs, Hz, afS, Ay, zV, K, fr, PJ, bqV, ars, sH); #c1(FAM210B) c2(NP_543011) c3(protein FAM210B) c4(233236) c5(233237, 233238, 233239, 233240, 233241, 233242, 233243) c6( ) c7(m); #c1(FAM213A) c2(NP_001230707) c3(redox-regulatory protein FAM213A isoform 1 precursor) c4(86645, 86646) c5(86647, 86648, 86649, 86650, 86651, 86652, 86653, 86654, 86655, 86656, 86657, 86658, 86659, 86660, 86661, 86662, 86663, 86664, 86665, 86666, 86667) c6(86668, 86669, 86670, 86671, 86672, 86673) c7(bqW); #c1(FAM213A) c2(NP_001230710) c3(redox-regulatory protein FAM213A isoform 2 precursor) c4( ) c5(86674, 86675, 86676, 86677, 86678, 86679, 86680) c6(86681, 86682) c7(bqW); #c1(FAM214A) c2(NP_001273424) c3(protein FAM214A isoform 2) c4(104865) c5(104866, 104867, 104868, 104869, 104870, 104871) c6( ) c7(ac); #c1(FAM214A) c2(NP_062546) c3(protein FAM214A isoform 1) c4(201915, 201916, 201917) c5(201918, 201919, 201920, 201921, 201922, 201923, 201924, 201925, 201926, 201927, 201928, 201929, 201930, 201931, 201932, 201933, 201934, 201935) c6( ) c7(ac); #c1(FAM216A) c2(NP_037432) c3(protein FAM216A) c4(175515) c5(175516, 175517, 175518, 175519, 175520, 175521) c6( ) c7(ey); #c1(FAM216A) c2(XP_005253932) c3(protein FAM216A isoform X2) c4( ) c5(272771) c6( ) c7(ey); #c1(FAM220A) c2(NP_001032240) c3(protein FAM220A) c4(31124, 31125, 31126, 31127) c5(31128, 31129, 31130, 31131, 31132, 31133, 31134, 31135, 31136, 31137, 31138, 31139, 31140, 31141, 31142, 31143, 31144, 31145, 31146, 31147, 31148, 31149, 31150, 31151) c6( ) c7(Y); #c1(FAM227B) c2(NP_689860) c3(protein FAM227B) c4(244188) c5(244189, 244190, 244191, 244192, 244193, 244194) c6( ) c7(Vp); #c1(FAM227B) c2(XP_005254273) c3(protein FAM227B isoform X4) c4(273136, 273137, 273138) c5(273139) c6( ) c7(Vp); #c1(FAM227B) c2(XP_011519627) c3(protein FAM227B isoform X14) c4( ) c5(314300) c6( ) c7(Vp); #c1(FAM227B) c2(XP_011519628) c3(protein FAM227B isoform X15) c4( ) c5(314301, 314302, 314303, 314304, 314305, 314306, 314307, 314308, 314309, 314310, 314311, 314312, 314313, 314314, 314315, 314316, 314317) c6( ) c7(Vp); #c1(FAM32A) c2(NP_054796) c3(protein FAM32A) c4(177986) c5(177987, 177988, 177989, 177990, 177991) c6( ) c7(t, m, aT); #c1(FAM32A) c2(XP_011526200) c3(protein FAM32A isoform X1) c4( ) c5(320471) c6( ) c7(t, m, aT); #c1(FAM3A) c2(NP_001164604) c3(protein FAM3A isoform 2) c4(67030) c5(67031, 67032, 67033, 67034, 67035, 67036, 67037, 67038) c6(67039, 67040) c7(bF, T, pa, eG, dA, baE, eM, bE, ev, X, gd, r, bB, dq, ey, ci, bz, q, adn); #c1(FAM3A) c2(NP_001164605) c3(protein FAM3A isoform 3) c4(67041) c5(67042, 67043, 67044, 67045, 67046, 67047, 67048, 67049) c6(67050, 67051) c7(bF, T, pa, eG, dA, baE, eM, bE, ev, X, gd, r, bB, dq, ey, ci, bz, q, adn); #c1(FAM3A) c2(NP_001269241) c3(protein FAM3A isoform 1 precursor) c4(100879) c5(100880, 100881, 100882, 100883, 100884, 100885, 100886, 100887, 100888, 100889, 100890, 100891, 100892, 100893, 100909) c7(bF, T, pa, eG, dA, baE, eM, bE, ev, X, gd, r, bB, dg, ey, ci, bz, g, adn); #c1(FAM3A) c2(XP_006724896) c3(protein FAM3A isoform X6) c4( ) c5(296492) c6( ) c7(bF, T, pa, eG, dA, baE, eM, bE, ev, X, gd, r, bB, dq, ey, ci, bz, q, adn); #c1(FAM3B) c2(NP_478066) c3(protein FAM3B isoform a precursor) c4(230876) c5(230877, 230878, 230879, 230880, 230881, 230882, 230883, 230884) c6(230885, 230886) c7(T, dA, bE, fc, Pg, aA, bB, dG, xH, g, bD, bz, q); #c1(FAM3B) c2(NP_996847) c3(protein FAM3B isoform b) c4(264761) c5(264762, 264763, 264764, 264765, 264766, 264767, 264768, 264769) c6(264770, 264771) c7(T, dA, bE, fc, Pg, aA, bB, dG, xH, g, bD, bz, q); #c1(FAM3C) c2(NP_055703) c3(protein FAM3C precursor) c4(182893, 182894, 182895) c5(182896, 182897, 182898, 182899, 182900, 182901, 182902, 182903, 182904, 182905, 182906, 182907, 182908, 182909, 182910, 182911, 182912, 182913, 182914, 182915, 182916, 182917, 182918) c6(182919, 182920, 182921, 182922, 182923) c7(aE, v, agk, il, bz, B); #c1(FAM3D) c2(NP_620160) c3(protein FAM3D precursor) c4(237401, 237402) c5(237403, 237404, 237405, 237406, 237407, 237408, 237409, 237410, 237411, 237412, 237413, 237414, 237415, 237416, 237417, 237418) c6(237419, 237420, 237421, 237422) c7(cF); #c1(FAM46A) c2(NP_060103) c3(protein FAM46A) c4(194140, 194141, 194142, 194143, 194144) c5(194145, 194146, 194147, 194148, 194149, 194150, 194151, 194152, 194153, 194154, 194155, 194156, 194157, 194158, 194159, 194160, 194161, 194162, 194163, 194164, 194165, 194166, 194167, 194168, 194169, 194170, 194171, 194172, 194173, 194174) c6( ) c7(IR, aW, r, aT, j, nC, fq, q); #c1(FAM46D) c2(NP_689843) c3(protein FAM46D) c4(244131) c5(244132, 244133, 244134, 244135, 244136, 244137, 244138, 244139, 244140, 244141) c6( ) c7(T, bu); #c1(FAM49A) c2(NP_110424) c3(protein FAM49A) c4(220269, 220270, 220271) c5(220272, 220273, 220274, 220275, 220276, 220277, 220278, 220279, 220280, 220281, 220282, 220283, 220284, 220285, 220286, 220287, 220288, 220289, 220290, 220291220292, 220293, 220294, 220295, 220296, 220297) c6( ) c7(ey, cd, af, an); #c1(FAM49B) c2(NP_001243692) c3(protein FAM49B) c4(91413, 91414, 91415, 91416, 91417, 91418, 91419, 91420, 91421, 91422, 91423) c5(91424, 91425, 91426, 91427, 91428, 91429, 91430, 91431, 91432, 91433, 91434, 91435, 91436, 91437, 91438, 91439, 91440, 91441, 91442, 91443, 91444, 91445, 91446, 91447, 91448, 91449, 91450, 91451, 91452, 91453, 91454, 91455, 91456, 91457, 91458, 91459, 91460, 91461, 91462, 91463, 91464, 91465, 91466, 91467, 91468, 91469, 91470, 91471, 91472, 91473, 91474, 91475, 91476, 91477, 91478, 91479, 91480, 91481, 91482, 91483, 91484, 91485, 91486, 91487, 91488, 91489, 91490, 91491, 91492, 91493, 91494, 91495, 91496, 91497, 91498, 91499, 91500, 91501, 91502, 91503, 91504, 91505, 91506, 91507, 91508, 91509, 91510, 91511, 91512, 91513, 91514, 91515, 91516, 91517, 91518) c6( ) c7(ey); #c1(FAM49B) c2(XP_011515409) c3(protein FAM49B isoform X2) c4( ) c5(308236) c6( ) c7(ey); #c1(FAM49B) c2(XP_011515422) c3(protein FAM49B isoform X3) c4(308237) c5( ) c6( ) c7(ey); #c1(FAM50B) c2(NP_036267) c3(protein FAM50B) c4(172728) c5(172729, 172730, 172731, 172732, 172733, 172734, 172735, 172736, 172737, 172738) c6( ) c7(vT); #c1(FAM53B) c2(NP_055476) c3(protein FAM53B) c4(181348) c5(181349, 181350, 181351, 181352, 181353, 181354, 181355, 181356, 181357, 181358) c6( ) c7(fq, Gx); #c1(FAM57A) c2(NP_079068) c3(protein FAM57A) c4(216869, 216870) c5(216871, 216872, 216873, 216874, 216875, 216876, 216877, 216878, 216879, 216880, 216881, 216882) c6( ) c7(av, T); #c1(FAM58A) c2(NP_001124469) c3(cyclin-related protein FAM58A isoform 2) c4(49108, 49109) c5(49110, 49111, 49112, 49113, 49114, 49115, 49116, 49117, 49118, 49119, 49120, 49121) c6( ) c7(qC, gh, aK, T, bqX, avH, aqp, dP, hK, aZ, baV, bO, cz, h, n, Rm, bS, bK, et, Z); #c1(FAM58A) c2(NP_689487) c3(cyclin-related protein FAM58A isoform 1) c4(242848, 242849, 242850, 242851, 242852) c5(242853, 242854, 242855, 242856, 242857, 242858, 242859, 242860, 242861, 242862, 242863, 242864, 242865, 242866, 242867, 242868, 242869, 242870, 242871, 242872, 242873, 242874, 242875, 242876) c6( ) c7(qC, gh, aK, T, bqX, avH, aqp, dP, hK, aZ, baV, bO, cz, h, n, Rm, bS, bK, et, Z); #c1(FAM58A) c2(XP_005277978) c3(cyclin-related protein FAM58A isoform X2) c4(285751) c5(285752, 285753, 285754, 285755, 285756, 285757, 285758, 285759, 285760, 285761, 285762, 285763) c6( ) c7(qC, gh, aK, T, bqX, avH, aqp, dP, hK, aZ, baV, bO, cz, h, n, Rm, bS, bK, et, Z); #c1(FAM58A) c2(XP_011529517) c3(cyclin-related protein FAM58A isoform X3) c4(325047) c5(325048, 325049, 325050, 325051, 325052, 325053) c6( ) c7(qC, gh, aK, T, bqX, avH, aqp, dP, hK, aZ, baV, bO, cz, h, n, Rm, bS, bK, et, Z); #c1(FAM60A) c2(NP_001129284) c3(protein FAM60A) c4(51337) c5(51338, 51339, 51340, 51341, 51342, 51343, 51344, 51345, 51346, 51347, 51348, 51349, 51350, 51351, 51352, 51353, 51354, 51355, 51356, 51357, 51358, 51359, 51360, 51361) c6( ) c7(Lf, bu); #c1(FAM60A) c2(XP_011544915) c3(protein FAM60A isoform X1) c4(343868, 343869, 343870, 343871) c5(343872, 343873, 343874, 343875, 343876, 343877, 343878, 343879, 343880, 343881, 343882) c6( ) c7(Lf, bu); #c1(FAM63B) c2(NP_001035540) c3(protein FAM63B isoform a) c4(32894) c5(32895, 32896, 32897, 32898, 32899, 32900) c6( ) c7(aj, ac); #c1(FAM63B) c2(NP_001035543) c3(protein FAM63B isoform b) c4(32903) c5(32904, 32905, 32906, 32907, 32908, 32909, 32910) c6( ) c7(aj, ac); #c1(FAM64A) c2(NP_001182157) c3(protein FAM64A isoform 2) c4(74631) c5(74632, 74633, 74634, 74635, 74636, 74637, 74638, 74639) c6( ) c7(ck, aW, ey, kP, aT); #c1(FAM64A) c2(NP_061886) c3(protein FAM64A isoform 1) c4(200981) c5(200982, 200983, 200984, 200985, 200986, 200987, 200988, 200989) c6( ) c7(ck, aW, ey, kP, aT); #c1(FAM65B) c2(NP_001273374) c3(protein FAM65B isoform 3) c4(104791) c5(104792, 104793, 104794, 104795, 104796, 104797) c6( ) c7(T, km, oj); #c1(FAM65B) c2(NP_001273375) c3(protein FAM65B isoform 4) c4(104798) c5(104799, 104800, 104801, 104802, 104803, 104804, 104805) c6( ) c7(T, km, oj); #c1(FAM65B) c2(NP_001273376) c3(protein FAM65B isoform 5) c4(104806) c5(104807, 104808, 104809, 104810, 104811) c6( ) c7(T, km, oj); #c1(FAM65B) c2(NP_055537) c3(protein FAM65B isoform 1) c4(181826) c5(181827, 181828, 181829, 181830, 181831) c6( ) c7(T, km, oj); #c1(FAM65B) c2(NP_056948) c3(protein FAM65B isoform 2) c4( ) c5(188171, 188172, 188173, 188174, 188175) c6( ) c7(T, km, oj); #c1(FAM65B) c2(XP_006715344) c3(protein FAM65B isoform X5) c4( ) c5(289497) c6( ) c7(T, km, oj); #c1(FAM65B) c2(XP_011513312) c3(protein FAM65B isoform X3) c4(305586) c5( ) c6( ) c7(T, km, oj); #c1(FAM65B) c2(XP_011513314) c3(protein FAM65B isoform X6) c4( ) c5(305587) c6( ) c7(T, km, oj); #c1(FAM69C) c2(NP_001037834) c3(protein FAM69C) c4(34136) c5(34137, 34138, 34139, 34140, 34141, 34142) c6( ) c7(fq); #c1(FAM71F1) c2(NP_115988) c3(protein FAM71F1 isoform 1) c4(225112) c5(225113, 225114, 225115, 225116, 225117, 225118) c6( ) c7(v, ac); #c1(FAM71F2) c2(NP_001012457) c3(protein FAM71F2 isoform a) c4(25005) c5(25006, 25007, 25008, 25009, 25010, 25011) c6( ) c7(wu, wm, bu); #c1(FAM71F2) c2(NP_001122398) c3(protein FAM71F2 isoform b) c4(46671) c5(46672, 46673, 46674, 46675, 46676, 46677, 46678, 46679, 46680, 46681, 46682, 46683, 46684, 46685) c6( ) c7(wu, wm, bu); #c1(FAM728) c2(XP_011540322) c3(protein FAM728 isoform X3) c4(338742) c5(338743, 338744, 338745, 338746, 338747, 338748) c6( ) c7(Ke, NL, fG, aA, h, aoG); #c1(FAM788) c2(NP_001017961) c3(protein FAM788) c4(26651) c5(26652, 26653, 26654, 26655, 26656, 26657, 26658, 26659, 26660, 26661) c6( ) c7(bL, cm, bA, cz); #c1(FAM81B) c2(NP_689761) c3(protein FAM81B) c4(243895) c5(243896, 243897, 243898, 243899, 243900, 243901) c6( ) c7(cz); #c1(FAM83A) c2(NP_001275516) c3(protein FAM83A isoform c) c4(106781) c5(106782, 106783, 106784, 106785, 106786, 106787, 106788, 106789, 106790, 106791) c6( ) c7(av, T, aW, aT, n, bz, iu); #c1(FAM83A) c2(NP_116288) c3(protein FAM83A isoform a) c4(226094) c5(226095, 226096, 226097, 226098, 226099, 226100, 226101, 226102, 226103, 226104) c6( ) c7(av, T, aW, aT, n, bz, iu); #c1(FAM83A) c2(NP_996889) c3(protein FAM83A isoform b) c4(264815) c5(264816, 264817, 264818, 264819, 264820, 264821, 264822, 264823, 264824, 264825) c6( ) c7(av, T, aW, aT, n, bz, iu); #c1(FAM838) c2(NP_001010872) c3(protein FAM838) c4(23884) c5(23885, 23886, 23887, 23888, 23889, 23890) c6( ) c7(cm, aW, T, j, aT); #c1(FAM83D) c2(NP_112181) c3(protein FAM83D) c4(220653, 220654) c5(220655, 220656, 220657, 220658, 220659, 220660, 220661, 220662, 220663, 220664, 220665, 220666) c6( ) c7(aW, aT); #c1(FAM83H) c2(XP_006725151) c3(protein FAM83H isoform X4) c4( ) c5(296695) c6( ) c7(Ud, bqY, q, Az, r); #c1(FAM83H) c2(XP_006725152) c3(protein FAM83H isoform X5) c4(296696) c5(296697, 296698, 296699, 296700, 296701) c6( ) c7(Ud, bqY, q, Az, r); #c1(FAM84A) c2(NP_660158) c3(protein FAM84A) c4(240429, 240430, 240431) c5(240432, 240433, 240434, 240435, 240436, 240437, 240438, 240439, 240440, 240441, 240442, 240443, 240444, 240445, 240446, 240447, 240448, 240449, 240450, 240451, 240452, 240453) c6( ) c7(bB, bE, Kc, kl, X); #c1(FAM84B) c2(NP_777571) c3(protein FAM84B) c4(251157) c5(251158, 251159, 251160, 251161251162, 251163) c6( ) c7(t, T, aw, cd, ad); #c1(FAM89A) c2(NP_940954) c3(protein FAM89A) c4(260195) c5(260196, 260197, 260198, 260199, 260200, 260201) c6( ) c7(AW); #c1(FAM92A1) c2(NP_001269963) c3(protein FAM92A1 isoform 2) c4(103295) c5(103296, 103297, 103298, 103299, 103300, 103301) c6( ) c7(es, oe, fr, iA); #c1(FAM92A1) c2(NP_660312) c3(protein FAM92A1 isoform 1) c4(240878, 240879, 240880) c5(240881, 240882, 240883, 240884, 240885, 240886, 240887, 240888, 240889, 240890, 240891, 240892, 240893, 240894, 240895, 240896, 240897, 240898) c6( ) c7(es, oe, fr, iA); #c1(FAM92B) c2(NP_940893) c3(protein FAM92B) c4(260049, 260050) c5(260051, 260052, 260053, 260054, 260055, 260056, 260057, 260058, 260059, 260060, 260061, 260062) c6( ) c7(fe, xN, iV); #c1(FAM9B) c2(NP_995321) c3(protein FAM9B) c4(263829, 263830) c5(263831, 263832, 263833, 263834, 263835, 263836, 263837, 263838, 263839, 263840) c6( ) c7(c); #c1(FAM9B) c2(XP_011543767) c3(protein FAM9B isoform X2) c4( ) c5(342796, 342797, 342798, 342799, 342800, 342801) c6( ) c7(c); #c1(FAN1) c2(NP_001139568) c3(fanconi-associated nuclease 1 isoform b) c4(59490) c5(59491, 59492, 59493, 59494, 59495, 59496) c6( ) c7(T, os, bqZ, aW, Y, aT, oZ, Hb, bra); #c1(FAN1) c2(NP_055782) c3(fanconi-associated nuclease 1 isoform a) c4(183470) c5(183471, 183472, 183473, 183474, 183475, 183476) c6( ) c7(T, os, bqZ, aW, Y, aT, oZ, Hb, bra); #c1(FANCA) c2(NP_000126) c3(Fanconi anemia group A protein isoform a) c4(2691) c5(2692, 2693, 2694, 2695, 2696, 2697) c6( ) c7(T, os, aC, QO, if, al, oY, oZ, qN, q, qK, aT, dL, K, eL, Gy, aW, ff, hl, r, dq, en, g, t, gk, kP, iT, QT, at, m, bt); #c1(FANCA) c2(NP_001018122) c3(Fanconi anemia group A protein isoform b) c4( ) c5(27392, 27393, 27394, 27395, 27396, 27397, 27398, 27399, 27400, 27401, 27402, 27403, 27404, 27405, 27406, 27407, 27408, 27409) c6( ) c7(T, os, aC, QO, if, al, oY, oZ, qN, q, qK, aT, dL, K, eL, Gy, aW, ff, hl, r, dq, en, g, t, gk, kP, iT, QT, at, m, bt); #c1(FANCA) c2(NP_001273096) c3(Fanconi anemia group A protein isoform c) c4(104320) c5( ) c6( ) c7(T, os, aC, QO, if, al, oY, oZ, qN, q, qK, aT, dL, K, eL, Gy, aW, ff, hl, r, dq, en, g, t, gk, kP, iT, QT, at, m, bt); #c1(FANCA) c2(XP_011521247) c3(Fanconi anemia group A protein isoform X2) c4( ) c5(316162) c6( ) c7(T, os, aC, QO, if, al, oY, oZ, qN, q, qK, aT, dL, K, eL, Gy, aW, ff, hl, r, dq, en, g, t, gk, kP, iT, QT, at, m, bt); #c1(FANCA) c2(XP_011521249) c3(Fanconi anemia group A protein isoform X3) c4( ) c5(316163, 316164, 316165, 316166, 316167) c6( ) c7(T, os, aC, QO, if, al, oY, oZ, qN, q, qK, aT, dL, K, eL, Gy, aW, ff, hl, r, dq, en, g, t, gk, kP, iT, QT, at, m, bt); #c1(FANCA) c2(XP_011521250) c3(Fanconi anemia group A protein isoform X4) c4(316168, 316169, 316170) c5( ) c6( ) c7(T, os, aC, QO, if, al, oY, oZ, qN, q, qK, aT, dL, K, eL, Gy, aW, ff, hl, r, dq, en, g, t, gk, kP, iT, QT, at, m, bt); #c1(FANCB) c2(NP_001018123) c3(Fanconi anemia group B protein) c4(27410, 27411) c5(27412, 27413, 27414, 27415, 27416, 27417, 27418, 27419, 27420, 27421, 27422, 27423, 27424, 27425, 27426, 27427) c6( ) c7(T, os, ow, WL, qx, oA, bs, jh, oZ, hF, br, er, x, pp, oW, aT, dz, hn, iY, ex, jj, pq, Nr, iU, iZ, aW, po, brb, brc, ho, f, bw, Nq, ck, iT, kz, brd, cj, k, bt, kS); #c1(FANCC) c2(NP_001230672) c3(Fanconi anemia group C protein isoform a) c4(86535) c5(86536, 86537, 86538, 86539, 86540, 86541, 86542, 86543, 86544, 86545) c6( ) c7(T, os, aC, bre, if, ew, oZ, qN, hF, azn, x, jz, aE, aT, h, dL, K, adV, Gc, aW, g, iK, ajj, ck, iT, oX, m, bt, B, sH); #c1(FANCC) c2(XP_006717067) c3(Fanconi anemia group C protein isoform X6) c4(290678) c5(290679, 290680, 290681, 290682, 290683, 290684) c6( ) c7(T, os, aC, bre, if, ew, oZ, qN, hF, azn, x, jz, aE, aT, h, dL, K, adV, Gc, aW, g, iK, ajj, ck, iT, oX, m, bt, B, sH); #c1(FANCD2) c2(NP_001018125) c3(Fanconi anemia group D2 protein isoform b) c4(27428) c5(27429, 27430, 27431, 27432, 27433, 27434, 27435, 27436, 27437, 27438, 27439, 27440, 27441, 27442, 27443, 27444) c6( ) c7(bL, T, os, aC, aaH, ew, fd, n, hy, oZ, q, ad, eA, ib, aE, aT, ta, cy, dL, K, aDZ, ak, qw, B, BN, wr, iU, aW, CW, r, dq, en, g, t, avf, KM, bw, dr, iP, avz, ck, iT, aWZ, hk, ajn, avF, wR, m, aan, bC, brf, bt, ne); #c1(FANCD2) c2(NP_149075) c3(Fanconi anemia group D2 protein isoform a) c4(227020) c5(227021, 227022, 227023, 227024, 227025, 227026) c6( ) c7(bL, T, os, aC, aaH, ew, fd, n, hy, oZ, q, ad, eA, ib, aE, aT, ta, cy, dL, K, aDZ, ak, qw, B, BN, wr, iU, aW, CW, r, dq, en, g, t, avf, KM, bw, dr, iP, avz, ck, iT, aWZ, hk, ajn, avF, wR, m, aan, bC, brf, bt, ne); #c1(FANCD2) c2(XP_011531781) c3(Fanconi anemia group D2 protein isoform X5) c4(327872) c5( ) c6( ) c7(bL, T, os, aC, aaH, ew, fd, n, hy, oZ, q, ad, eA, ib, aE, aT, ta, cy, dL, K, aDZ, ak, qw, B, BN, wr, iU, aW, CW, r, dq, en, g, t, avf, KM, bw, dr, iP, avz, ck, iT, aWZ, hk, ajn, avF, wR, m, aan, bC, brf, bt, ne); #c1(FANCE) c2(NP_068741) c3(Fanconi anemia group E protein) c4(210130) c5(210131, 210132, 210133, 210134, 210135, 210136) c6( ) c7(aC, os, aA, aT, oZ, v, bqS, m, g, aF); #c1(FANCF) c2(NP_073562) c3(Fanconi anemia group F protein) c4(212853) c5(212854, 212855, 212856, 212857, 212858, 212859) c6( ) c7(ck, T, os, aC, cc, iT, aW, if, YZ, mx, iK, aT, oZ, m, ci, qN, dw, H, bt, g, t); #c1(FANCG) c2(NP_004620) c3(Fanconi anemia group G protein) c4(148249, 148250, 148251) c5(148252, 148253, 148254, 148255, 148256, 148257, 148258, 148259, 148260, 148261, 148262, 148263, 148264, 148265, 148266, 148267, 148268, 148269) c6( ) c7(Gl, T, os, aC, ht, hy, oZ, ad, aE, aT, Gw, dL, avn, brg, r, g, eM, iT, bdP, m, Gu, B); #c1(FANCI) c2(NP_001106849) c3(Fanconi anemia group I protein isoform 1) c4(42616, 42617) c5(42618, 42619, 42620, 42621, 42622, 42623) c6( ) c7(brh, os, aT, oZ, ey, K, bX); #c1(FANCI) c2(NP_060663) c3(Fanconi anemia group I protein isoform 2) c4(197052, 197053) c5(197054, 197055, 197056, 197057, 197058, 197059, 197060, 197061, 197062, 197063, 197064, 197065) c6( ) c7(brh, os, aT, oZ, ey, K, bX); #c1(FANCI) c2(XP_011520071) c3(Fanconi anemia group I protein isoform X6) c4( ) c5(314964, 314965, 314966, 314967, 314968, 314969) c6( ) c7(brh, os, aT, oZ, ey, K, bX); #c1(FANCL) c2(NP_001108108) c3(E3 ubiquitin-protein ligase FANCL isoform 1) c4(43133) c5(43134, 43135, 43136, 43137, 43138, 43139) c6( ) c7(ck, av, aC, os, x, if, asQ, aT, oZ, dL, bK, qN, g, hF, bt, eL, er); #c1(FANCL) c2(NP_060532) c3(E3 ubiquitin-protein ligase FANCL isoform 2) c4(196428) c5(196429, 196430, 196431, 196432, 196433, 196434, 196435, 196436, 196437, 196438, 196439, 196440) c6( ) c7(ck, av, aC, os, x, if, asQ, aT, oZ, dL, bK, qN, g, hF, bt, eL, er); #c1(FANCL) c2(XP_011531241) c3(E3 ubiquitin-protein ligase FANCL isoform X1) c4(327230) c5( ) c6( ) c7(ck, av, aC, os, x, if, asQ, aT, oZ, dL, bK, qN, g, hF, bt, eL, er); #c1(FANCM) c2(NP_065988) c3(Fanconi anemia group M protein) c4(206605) c5(206606, 206607, 206608, 206609, 206610, 206611) c6( ) c7(T, os, aC, eH, awd, oW, r, aT, oZ, K, g, eF); #c1(FANCM) c2(XP_011535336) c3(Fanconi anemia group M protein isoform X1) c4( ) c5(332335) c6( ) c7(T, os, aC, eH, awd, oW, r, aT, oZ, K, g, eF); #c1(FANCM) c2(XP_011535338) c3(Fanconi anemia group M protein isoform X4) c4(332336) c5( ) c6( ) c7(T, os, aC, eH, awd, oW, r, aT oZ, K, g, eF); #c1(FANK1) c2(NP_660278) c3(fibronectin type 3 and ankyrin repeat domains protein 1) c4(240618, 240619) c5(240620, 240621, 240622, 240623, 240624, 240625, 240626) c6( ) c7(bM, j, bK, mQ); #c1(FANK1) c2(XP_006718121) c3(fibronectin type 3 and ankyrin repeat domains protein 1 isoform X5) c4( ) c5(291523, 291524, 291525) c6( ) c7(bM, j, bK, mQ); #c1(FANK1) c2(XP_006718127) c3(fibronectin type 3 and ankyrin repeat domains protein 1 isoform X8) c4(291526, 291527, 291528) c5(291529, 291530, 291531, 291532, 291533, 291534, 291535, 291536, 291537, 291538, 291539, 291540, 291541) c6( ) c7(bM, j, bK, mQ); #c1(FANK1) c2(XP_006718130) c3(fibronectin type 3 and ankyrin repeat domains protein 1 isoform X10) c4(291542) c5(291543, 291544, 291545, 291546, 291547) c6( ) c7(bM, j, bK, mQ); #c1(FANK1) c2(XP_011538652) c3(fibronectin type 3 and ankyrin repeat domains protein 1 isoform X3) c4(336391) c5(336392, 336393, 336394, 336395, 336396, 336397) c6( ) c7(bM, j, bK, mQ); #c1(FANK1) c2(XP_011538659) c3(fibronectin type 3 and ankyrin repeat domains protein 1 isoform X9) c4(336398) c5( ) c6( ) c7(bM, j, bK, mQ); #c1(FANK1) c2(XP_011538660) c3(fibronectin type 3 and ankyrin repeat domains protein 1 isoform X11) c4( ) c5(336399, 336400, 336401, 336402, 336403, 336404, 336405, 336406, 336407, 336408, 336409, 336410) c6( ) c7(bM, j, bK, mQ); #c1(FANK1) c2(XP_011538665) c3(fibronectin type 3 and ankyrin repeat domains protein 1 isoform X15) c4( ) c5(336411, 336412, 336413, 336414, 336415, 336416) c6( ) c7(bM, j, bK, mQ); #c1(FAP) c2(NP_001278736) c3(prolyl endopeptidase FAP isoform 2) c4(110005) c5(110006, 110007, 110008, 110009, 110010, 110011) c6( ) c7(T, AS, dA, fR, ob, aKu, aKw, asB, ht, al, aA, bB, n, jx, NT, aKs, ci, fu, Jt, q, ad, ip, alZ, aHF, hd, aT, AN, ey, H, ae, mJ, BO, s, aW, Y, YC, r, ks, Kf, g, lm, t, bF, YI, gk, bP, eM, nB, aKp, bE, afd, cj, m, R, B); #c1(FAP) c2(NP_004451) c3(prolyl endopeptidase FAP isoform 1) c4(146425) c5(146426, 146427, 146428, 146429, 146430, 146431) c6( ) c7(T, AS, dA, fR, ob, aKu, aKw, asB, ht, al, aA, bB, n, jx, NT, aKs, ci, fu, Jt, q, ad, ip, alZ, aHF, hd, aT, AN, ey, H, ae, mJ, BO, s, aW, Y, YC, r, ks, Kf, g, lm, t, bF, Yl, gk, bP, eM, nB, aKp, bE, afd, cj, m, R, B); #c1(FAR1) c2(NP_115604) c3(fatty acyl-CoA reductase 1) c4(223347, 223348) c5(223349, 223350, 223351, 223352, 223353, 223354, 223355, 223356, 223357, 223358, 223359, 223360) c6( ) c7(WI); #c1(FAR1) c2(XP_011518703) c3(fatty acyl-CoA reductase 1 isoform X2) c4( ) c5(313078) c6( ) c7(WI); #c1(FARP1) c2(NP_001001715) c3(FERM, RhoGEF and pleckstrin domain-containing protein 1 isoform 2) c4(18989) c5(18990, 18991, 18992, 18993, 18994, 18995) c6( ) c7(hb, IB, af, Ea, an); #c1(FARP1) c2(NP_001273768) c3(FERM, RhoGEF and pleckstrin domain-containing protein 1 isoform 3) c4(105828, 105829) c5(105830, 105831, 105832, 105833, 105834, 105835, 105836, 105837, 105838, 105839, 105840, 105841, 105842) c6( ) c7(hb, IB, af, Ea, an); #c1(FARP1) c2(NP_005757) c3(FERM, RhoGEF and pleckstrin domain-containing protein 1 isoform 1) c4(159108, 159109, 159110) c5(159111, 159112, 159113, 159114, 159115, 159116, 159117, 159118, 159119, 159120, 159121, 159122, 159123, 159124, 159125, 159126, 159127) c6( ) c7(hb, IB, af, Ea, an); #c1(FARP2) c2(NP_001269912) c3(FERM, RhoGEF and pleckstrin domain-containing protein 2 isoform b) c4(103155) c5(103156, 103157, 103158, 103159, 103160, 103161) c6( ) c7(Cv, ck, bri, cj, aYK, bN); #c1(FARP2) c2(NP_001269913) c3(FERM, RhoGEF and pleckstrin domain-containing protein 2 isoform c) c4(103162, 103163) c5(103164, 103165, 103166, 103167, 103168, 103169, 103170, 103171, 103172, 103173, 103174, 103175, 103176, 103177, 103178, 103179, 103180, 103181, 103182) c6( ) c7(Cv, ck, bri, cj, aYK, bN); #c1(FARP2) c2(NP_055623) c3(FERM, RhoGEF and pleckstrin domain-containing protein 2 isoform a) c4(182322, 182323) c5(182324, 182325, 182326, 182327, 182328, 182329) c6( ) c7(Cv, ck, bri, cj, aYK, bN); #c1(FARP2) c2(XP_011510539) c3(FERM, RhoGEF and pleckstrin domain-containing protein 2 isoform X3) c4(301067) c5(301068, 301069, 301070, 301071, 301072, 301073) c6( ) c7(Cv, ck, bri, cj, aYK, bN); #c1(FARS2) c2(XP_005248868) c3(phenylalanine—tRNA ligase, mitochondrial isoform X1) c4(268699) c5(268700, 268701, 268702, 268703, 268704, 268705, 268706, 268707, 268708, 268709) c6( ) c7(Fr, hb, brj, ha, dF, cd, Ft); #c1(FARS2) c2(XP_006715029) c3(phenylalanine—tRNA ligase, mitochondrial isoform X7) c4(288521, 288522) c5(288523, 288524, 288525, 288526, 288527, 288528, 288529, 288530, 288531, 288532, 288533, 288534) c6( ) c7(Fr, hb, brj, ha, dF, cd, Ft); #c1(FARSA) c2(NP_004452) c3(phenylalanine—tRNA ligase alpha subunit) c4(146432, 146433) c5(146434, 146435, 146436, 146437, 146438, 146439, 146440, 146441, 146442, 146443, 146444, 146445) c6( ) c7(iT, wT); #c1(FAS) c2(NP_000034) c3(tumor necrosis factor receptor superfamily member 6 isoform 1 precursor) c4(316, 317, 318) c5(319, 320, 321, 322, 323, 324, 325, 326, 327, 328, 329, 330) c6( ) c7(bM, T, aC, fR, pf, if, al, eb, brl, bB, cL, fd, qj, ci, bh, amW, aR, brq, x, afr, xy, aE, Bc, fm, bW, dV, ja, K, hu, dQ, hH, DY, dF, bc, aiJ, eL, Qe, kS, JI, aW, az, hl, wF, fc, hN, vs, brr, apm, brk, g, as, uC, eF, GR, cm, mK, bw, y, fT, eM, nB, iT, aDs, vA, mx, bru, cj, PV, uo, dW, k, m, eg, cE, iu, gU, sQ, wu, sw, aw, ht, fN, n, BH, aj, aGU, oY, qN, fr, qW, cd, eW, brn, aOu, jz, cc, kH, Lv, IG, cU, By, dL, DU, h, hB, eV, A, CM, tx, fQ, aq, ks, aVD, pm, dw, Wt, iO, GG, dB, hk, eD, brt, hL, at, oh, ut, SZ, fL, brs, jd, Pr, B, it, bL, Ob, Dw, EM, fM, AL, fG, hx, yk, jx, eX, aA, cz, fF, hy, v, OY, GC, C, aYW, V, q, J, o, eA, bjA, fh, nX, afQ, yg, aT, vH, cy, bq, an, ae, af, eu, Su, jf, hM, s, ND, vT, iU, Y, Lf, xR, r, lo, en, hf, bu, t, kC, iK, brm, pb, vk, Cv, ck, sS, OW, Dy, c, ac, pZ, nM, hc, aGo, iM, RW, Da, dy, aEr, bt, ao, Kd, id, Ke, MH, iW, jh, lD, bS, oH, fu, mC, ad, kL, hX, dP, av, hd, F, io, hD, ji, IQ, jo, wm, yF, uQ, iQ, d, BN, IU, je, ff, eH, eZ, brp, aF, hp, iV, iR, bz, Hv, LB, D, gk, Bv, eU, bE, pE, Ny, dO, X, brn, Lb, cP, oQ, adg, hE, xg, ne, hv, pC); #c1(FAS) c2(NP_690610) c3(tumor necrosis factor receptor superfamily member 6 isoform 2 precursor) c4(244917) c5(244918, 244919, 244920, 244921, 244922, 244923) c6( ) c7(bM, T, aC, fR, pf, if, al, eb, brl, bB, cL, fd, qj, ci, bh, amW, aR, brq, x, afr, xy, aE, Bc, fm, bW, dV, ja, K, hu, dQ, hH, DY, dF, bc, aiJ, eL, Qe, kS, Jl, aW, az, hl, wf, fc, hN, vs, brr, apm, brk, g, as, uC, eF, GR, cm, mK, bw, y, fT, eM, nB, iT, aDs, vA, mx, bru, cj, PV, uo, dW, k, m, eg, cE, iu, gU, sQ, wu, sw, aw, ht, fN, n, BH, aj, aGU, oY, qN, fr, qW, cd, eW, brn, aOu, jz, cc, kH, Lv, IG, cU, By, dL, DU, h, hB, eV, A, CM, tx, fQ, aq, ks, aVD, pm, dw, Wt, iO, GG, dB, hk, eD, brt, hL, at, oh, ut, SZ, fL, brs, jd, Pr, B, it, bL, Ob, Dw, EM, fM, AL, fG, hx, yk, jx, eX, aA, cz, fF, hy, v, OY, GC, C, aYW, V, q, J, o, eA, bjA, fh, nX, afQ, yg, aT, vH, cy, bq, an, ae, af, eu, Su, jf, hM, s, ND, vT, iU, Y, Lf, xR, r, lo, en, hf, bu, t, kC, iK, brm, pb, vk, Cv, ck, sS, OW, Dy, c, ac, pZ, nM, hc, aGo, iM, RW, Da, dy, aEr, bt, ao, Kd, id, Ke, MH, iW, jh, lD, bS, oH, fu, mC, ad, kL, hX, dP, av, hd, F, io, hD, ji, IQ, jo, wm, yF, uQ, iQ, d, BN, IU, je, ff, eH, eZ, brp, aF, hp, iV, iR, bz, Hv, LB, D, gk, Bv, eU, bE, pE, Ny, dO, X, bro, Lb, cP, oQ, adg, hE, xg, ne, hv, pC); #c1(FAS) c2(NP_690611) c3(tumor necrosis factor receptor superfamily member 6 isoform 3 precursor) c4( ) c5(244924, 244925, 244926, 244927, 244928, 244929) c6( ) c7(bM, T, aC, fR, pf, if, al, eb, brl, bB, cL, fd, qj, ci, bh, amW, aR, brq, x, afr, xy, aE, Bc, fm, bW, dV, ja, K, hu, dQ, hH, DY, dF, bc, aiJ, eL, Qe, kS, Jl, aW, az, hl, wF, fc, hN, vs, brr, apm, brk, g, as, uC, eF, GR, cm, mK, bw, y, fT, eM, nB, iT, aDs, vA, mx, bru, cj, PV, uo, dW, k, m, eg, cE, iu, gU, sQ, wu, sw, aw, ht, fN, n, BH, aj, aGU, oY, qN, fr, qW, cd, eW, brn, aOu, jz, cc, kH, Lv, IG, cU, By, dL, DU, h, hB, eV, A, CM, tx, fQ, aq, ks, aVD, pm, dw, Wt, iO, GG, dB, hk, eD, brt, hL, at, oh, ut, SZ, fL, brs, jd, Pr, B, it, bL, Ob, Dw, EM, fM, AL, fG, hx, yk, jx, eX, aA, cz, fF, hy, v, OY, GC, C, aYW, V, q, J, o, eA, bjA, fh, nX, afQ, yg, aT, vH, cy, bq, an, ae, af, eu, Su, jf, hM, s, ND, vT, iU, Y, Lf, xR, r, lo, en, hf, bu, t, kC, iK, brm, pb, vk, Cv, ck, sS, OW, Dy, c, ac, pZ, nM, hc, aGo, iM, RW, Da, dy, aEr, bt, ao, Kd, id, Ke, MH, iW, jh, lD, bS, oH, fu, mC, ad, kL, hX, dP, av, hd, F, io, hD, ji, IQ, jo, wm, yF, uQ, iQ, d, BN, IU, je, ff, eH, eZ, brp, aF, hp, iV, iR, bz, Hv, LB, D, gk, Bv, eU, bE, pE, Ny, dO, X, bro, Lb, cP, oQ, adg, hE, xg, ne, hv, pC); #c1(FAS) c2(XP_011538068) c3(tumor necrosis factor receptor superfamily member 6 isoform X3) c4(335609) c5(335610, 335611, 335612, 335613, 335614, 335615) c6( ) c7(bM, T, aC, fR, pf, if, al, eb, brl, bB, cL, fd, qj, ci, bh, amW, aR, brq, x, afr, xy, aE, Bc, fm, bW, dV, ja, K, hu, dQ, hH, DY, dF, bc, aiJ, eL, Qe, kS, Jl, aW, az, hl, wF, fc, hN, vs, brr, apm, brk, g, as, uC, eF, GR, cm, mK, bw, y, fT, eM, nB, iT, aDs, vA, mx, bru, cj, PV, uo, dW, k, m, eg, cE, iu, gU, sQ, wu, sw, aw, ht, fN, n, BH, aj, aGU, oY, qN, fr, qW, cd, eW, brn, aOu, jz, cc, kH, Lv, IG, cU, By, dL, DU, h, hB, eV, A, CM, tx, fQ, aq, ks, aVD, pm, dw, Wt, iO, GG, dB, hk, eD, brt, hL, at, oh, ut, SZ, fL, brs, jd, Pr, B, it, bL, Ob, Dw, EM, fM, AL, fG, hx, yk, jx, eX, aA, cz, fF, hy, v, OY, GC, C, aYW, V, q, J, o, eA, bjA, fh, nX, afQ, yg, aT, vH, cy, bq, an, ae, af, eu, Su, jf, hM, s, ND, vT, iU, Y, Lf, xR, r, lo, en, hf, bu, t, kC, iK, brm, pb, vk, Cv, ck, sS, OW, Dy, c, ac, pZ, nM, hc, aGo, iM, RW, Da, dy, aEr, bt, ao, Kd, id, Ke, MH, iW, jh, lD, bS, oH, fu, mC, ad, kL, hX, dP, av, hd, F, io, hD, ji, IQ, jo, wm, yF, uQ, iQ, d, BN, IU, je, ff, eH, eZ, brp, aF, hp, iV, iR, bz, Hv, LB, D, gk, Bv, eU, bE, pE, Ny, dO, X, bro, Lb, cP, oQ, adg, hE, xg, ne, hv, pC); #c1(FASLG) c2(NP_000630) c3(tumor necrosis factor ligand superfamily member 6 isoform 1) c4(14105) c5(14106, 14107, 14108, 14109, 14110, 14111, 14112, 14113, 14114) c6(14115, 14116) c7(bM, T, aC, xS, fR, pf, if, fd, brl, bB, ur, ci, qj, UI, amW, aR, xy, dY, aE, fm, fS, hu, brw, eL, bc, aiJ, hm, Qe, Jl, aW, LZ, g, cm, uC, mK, fT, eM, nB, iT, aDs, mx, cj, PV, uo, dW, m, cE, dD, gU, sQ, wu, sw, ht, fN, n, BH, aj, fr, qN, brv, cc, h, dL, DU, ey, hB, A, ks, aq, Og, aVD, fq, iO, dB, hk, Fi, Pl, at, ut, fL, IB, Pr, B, bL, Ob, fM, AL, jx, aA, fF, hz, hy, C, aYW, aoC, V, q, er, eA, afQ, aT, vH, cy, jj, bq, an, ae, af, eu, jf, s, ND, iU, Y, fO, r, en, cl, t, aER, iK, Cv, ck, sS, OW, Dy, pZ, ac, iQ, RW, Da, UF, bt, Kd, id, jh, vr, bS, oH, jE, eq, mC, ad, hX, dP, av, hd, F, oW, io, hD, IQ, wm, DI, d, BN, IU, ff, Of, cr, eZ, brp, aF, hp, bz, D, bE, Ny, hE, kS, X, y, pC); #c1(FASLG) c2(NP_001289675) c3(tumor necrosis factor ligand superfamily member 6 isoform 2) c4(114352) c5(114353, 114354, 114355, 114356, 114357, 114358) c6(114359) c7(bM, T, aC, xS, fR, pf, if, fd, brl, bB, ur, ci, qj, UI, amW, aR, xy, dY, aE, fm, fS, hu, brw, eL, bc, aiJ, hm, Qe, Jl, aW, LZ, g, cm, uC, mK, fT, eM, nB, iT, aDs, mx, cj, PV, uo, dW, m, cE, dD, gU, sQ, wu, sw, ht, fN, n, BH, aj, fr, qN, brv, cc, h, dL, DU, ey, hB, A, ks, aq, Og, aVD, fq, iO, dB, hk, Fi, Pl, at, ut, fL, IB, Pr, B, bL, Ob, fM, AL, jx, aA, fF, hz, hy, C, aYW, aoC, V, q, er, eA, afQ, aT, vH, cy, jj, bq, an, ae, af, eu, jf, s, ND, iU, Y, fO, r, en, cl, t, aER, iK, Cv, ck, sS, OW, Dy, pZ, ac, iQ, RW, Da, UF, bt, Kd, id, jh, vr, bS, oH, jE, eq, mC, ad, hX, dP, av, hd, F, oW, io, hD, IQ, wm, Dl, d, BN, IU, ff, Of, cr, eZ, brp, aF, hp, bz, D, bE, Ny, hE, kS, X, y, pC); #c1(FASN) c2(NP_004095) c3(fatty acid synthase) c4(143513, 143514) c5(143515, 143516, 143517, 143518, 143519, 143520, 143521, 143522, 143523, 143524, 143525, 143526) c6( ) c7(bM, T, fR, pf, if, al, fd, brl, bB, cL, gf, gj, ci, bh, ip, x, xy, bW, dV, K, hu, DY, dF, bc, eL, Jl, aW, az, hl, fc, hN, apm, g, as, eF, cm, bw, mK, eM, nB, vA, bru, PV, dW, k, m, in, cE, iu, aw, ht, n, aj, aGU, fr, nA, qN, eW, brn, jz, kH, h, jy, eV, dL, hB, cY, A, tx, fe, aq, kp, iO, mg, hL, oh, SZ, fL, qF, Pr, B, it, bL, fM, eR, AL, jx, eX, aA, GC, v, V, q, J, o, Ql, eA, bjA, fh, aT, vH, cy, ae, af, s, ND, vT, oV, Y, Lf, xR, r, lo, en, hu, cl, t, iK, brm, pb, ck, sS, OW, Dy, ac, nM, iM, hc, au, wR, bt, ao, id, iW, jh, Fb, mC, ad, hX, av, hd, F, aVq, io, hD, ji, fb, yF, d, je, cH, ff, eH, eZ, aF, hp, iV, bz, LB, gk, eU, pu, bE, dO, bro, cP, pK, y, xg, X, pC); #c1(FASTK) c2(NP_001245390) c3(fas-activated serine/threonine kinase isoform 5) c4(93436) c5(93437, 93438, 93439, 93440, 93441, 93442) c6( ) c7(qe, eM, as, ER, Bh, aMk); #c1(FASTK) c2(NP_006703) c3(fas-activated serine/threonine kinase isoform 1) c4(167254) c5(167255, 167256, 167257, 167258, 167259, 167260) c6( ) c7(qe, eM, as, ER, Bh, aMk); #c1(FASTK) c2(NP_148936) c3(fas-activated serine/threonine kinase isoform 4) c4(226629) c5(226630, 226631, 226632, 226633, 226634, 226635) c6( ) c7(qe, eM, as, ER, Bh, aMk); #c1(FASTK) c2(XP_011514063) c3(fas-activated serine/threonine kinase isoform X2) c4(306605, 306606) c5(306607, 306608, 306609, 306610, 306611, 306612) c6( ) c7(qe, eM, as, ER, Bh, aMk); #c1(FASTK) c2(XP_011514064) c3(fas-activated serine/threonine kinase isoform X3) c4( ) c5(306613, 306614, 306615, 306616, 306617, 306618) c6( ) c7(qe, eM, as, ER, Bh, aMk); #c1(FASTKD2) c2(NP_055744) c3(FAST kinase domain-containing protein 2) c4(183229, 183230) c5(183231, 183232, 183233, 183234, 183235, 183236, 183237, 183238, 183239, 183240, 183241, 183242, 183243, 183244, 183245, 183246, 183247, 183248, 183249, 183250) c6( ) c7(T, aW, aT, ey, acJ, px); #c1(FAT1) c2(XP_006714202) c3(protocadherin Fat 1 isoform X1) c4(287637, 287638, 287639) c5(287640, 287641, 287642, 287643, 287644, 287645, 287646, 287647, 287648, 287649, 287650, 287651, 287652, 287653, 287654, 287655, 287656, 287657, 287658) c6( ) c7(bL, T, e, EQ, aj, hy, v, q, J, ad, eA, x, aE, qK, aT, bK, ae, af, kl, d, B, aW, Y, oV, fc, ff, r, en, bz, ck, Fi, cj, k, cP, ei, bt, it, X); #c1(FAT2) c2(XP_011535905) c3(protocadherin Fat 2 isoform X1) c4(333163) c5(333164, 333165, 333166, 333167, 333168, 333169) c6( ) c7(it, iu); #c1(FAT3) c2(NP_001008781) c3(protocadherin Fat 3 precursor) c4(23403, 23404) c5(23405, 23406, 23407, 23408, 23409, 23410, 23411, 23412, 23413, 23414, 23415) c6( ) c7(it, ip); #c1(FAT3) c2(XP_011540886) c3(protocadherin Fat 3 isoform X1) c4(339426) c5(339427, 339428, 339429, 339430, 339431, 339432, 339433) c6( ) c7(it, ip); #c1(FAT4) c2(NP_078858) c3(protocadherin Fat 4 isoform 3 precursor) c4(215812, 215813) c5(215814, 215815, 215816, 215817, 215818, 215819, 215820, 215821, 215822, 215823, 215824, 215825) c6( ) c7(T, bdG, ac, aW, Y, oe, ht, aT, aA, it, afw, j, bK, bz, hu, g, brx, fq, B, Hr); #c1(FATE1) c2(NP_149076) c3(fetal and adult testis-expressed transcript protein) c4(227027) c5(227028, 227029, 227030, 227031, 227032, 227033) c6( ) c7(T, gU, aW, aT, nY, bu, V, ra, B, ek); #c1(FAU) c2(NP_001988) c3(ubiquitin-like protein fubi and ribosomal protein S30 precursor) c4(122880, 122881, 122882, 122883, 122884, 122885, 122886, 122887, 122888, 122889, 122890) c5(122891, 122892, 122893, 122894, 122895, 122896, 122897, 122898, 122899, 122900, 122901, 122902, 122903, 122904, 122905, 122906, 122907, 122908, 122909, 122910, 122911, 122912, 122913, 122914, 122915, 122916, 122917, 122918, 122919, 122920, 122921, 122922, 122923, 122924, 122925, 122926, 122927, 122928, 122929, 122930, 122931, 122932) c6( ) c7(eF); #c1(FBF1) c2(NP_001074011) c3(fas-binding factor 1) c4(36944, 36945, 36946, 36947) c5(36948, 36949, 36950, 36951, 36952, 36953, 36954, 36955, 36956, 36957, 36958, 36959, 36960, 36961, 36962, 36963, 36964, 36965, 36966, 36967, 36968, 36969, 36970, 36971, 36972) c6( ) c7(Rs, B, jE); #c1(FBL) c2(NP_001427) c3(rRNA 2′-O-methyltransferase fibrillarin) c4(117775) c5( ) c6( ) c7(T, qt, aW, hl, aT, h, aq, IR, K, Dz, pb, B, ad); #c1(FBL) c2(XP_011524925) c3(rRNA 2′-O-methyltransferase fibrillarin isoform X2) c4( ) c5(319406, 319407, 319408, 319409, 319410, 319411) c6( ) c7(T, qt, aW, hl, aT, h, aq, IR, K, Dz, pb, B, ad); #c1(FBLIM1) c2(XP_011539920) c3(filamin-binding LIM protein 1 isoform X4) c4(338215) c5(338216, 338217, 338218, 338219, 338220, 338221, 338222, 338223, 338224, 338225, 338226, 338227) c6( ) c7(T, ha, fd, aon, eA, b, aFl, hW, aeO, aT, K, Tj, aeR, aW, eH, arK, eF, Ew, aGY, cj, ER, i, lf); #c1(FBLIM1) c2(XP_011539921) c3(filamin-binding LIM protein 1 isoform X3) c4(338228, 338229, 338230, 338231, 338232, 338233) c5(338234, 338235, 338236, 338237, 338238, 338239, 338240, 338241, 338242, 338243, 338244, 338245, 338246, 338247, 338248, 338249, 338250, 338251, 338252, 338253, 338254, 338255, 338256, 338257, 338258, 338259, 338260, 338261, 338262, 338263, 338264, 338265, 338266, 338267, 338268, 338269, 338270, 338271, 338272, 338273, 338274, 338275) c6( ) c7(T, ha, fd, aon, eA, b, aFl, hW, aeO, aT, K, Tj, aeR, aW, eH, arK, eF, Ew, aGY, cj, ER, i, lf); #c1(FBLN1) c2(NP_001987) c3(fibulin-1 isoform C precursor) c4(122858, 122859, 122860, 122861, 122862, 122863) c5(122864, 122865, 122866, 122867, 122868, 122869, 122870, 122871, 122872, 122873, 122874, 122875, 122876, 122877, 122878, 122879) c6( ) c7(bM, T, IP, e, aA, aHC, bry, ci, zU, fr, ad, ip, dP, Bc, bpp, aT, bK, brA, MO, ae, eG, aW, Y, PX, ev, aF, brz, t, atb, op, sn, Dy, m, bD, B); #c1(FBLN1) c2(NP_006476) c3(fibulin-1 isoform B precursor) c4(165489) c5(165490, 165491, 165492, 165493, 165494, 165495, 165496, 165497, 165498, 165499, 165500, 165501, 165502, 165503, 165504, 165505) c6( ) c7(bM, T, IP, e, aA, aHC, bry, ci, zU, fr, ad, ip, dP, Bc, bpp, aT, bK, brA, MO, ae, eG, aW, Y, PX, ev, aF, brz, t, atb, op, sn, Dy, m, bD, B); #c1(FBLN1) c2(NP_006477) c3(fibulin-1 isoform D precursor) c4(165506, 165507, 165508, 165509, 165510) c5(165511, 165512, 165513, 165514, 165515, 165516, 165517, 165518, 165519, 165520, 165521, 165522, 165523, 165524, 165525, 165526, 165527, 165528, 165529, 165530, 165531, 165532, 165533) c6(165534) c7(bM, T, IP, e, aA, aHC, bry, ci, zU, fr, ad, ip, dP, Bc, bpp, aT, bK, brA, MO, ae, eG, aW, Y, PX, ev, aF, brz, t, atb, op, sn, Dy, m, bD, B); #c1(FBLN1) c2(NP_006478) c3(fibulin-1 isoform A precursor) c4( ) c5(165535, 165536, 165537, 165538, 165539, 165540, 165541, 165542, 165543, 165544, 165545, 165546, 165547, 165548, 165549, 165550, 165551, 165552, 165553, 165554, 165555, 165556, 165557, 165558, 165559, 165560, 165561, 165562, 165563, 165564, 165565, 165566, 165567, 165568, 165569, 165570, 165571, 165572, 165573, 165574) c6(165575) c7(bM, T, IP, e, aA, aHC, bry, ci, zU, fr, ad, ip, dP, Bc, bpp, aT, bK, brA, MO, ae, eG, aW, Y, PX, ev, aF, brz, t, atb, op, sn, Dy, m, bD, B); #c1(FBLN2) c2(NP_001158507) c3(fibulin-2 isoform a precursor) c4(63679, 63680) c5(63681, 63682, 63683, 63684, 63685, 63686, 63687, 63688, 63689, 63690, 63691) c6( ) c7(iu, T, aE, aW, brB, beA, aT, cz, brC, ci, g, af, vk); #c1(FBLN2) c2(NP_001989) c3(fibulin-2 isoform b precursor) c4(122933, 122934) c5(122935, 122936, 122937, 122938, 122939, 122940, 122941, 122942, 122943, 122944, 122945, 122946, 122947, 122948, 122949, 122950, 122951, 122952, 122953, 122954) c6( ) c7(iu, T, aE, aW, brB, beA, aT, cz, brC, ci, g, af, vk); #c1(FBLN5) c2(NP_006320) c3(fibulin-5 precursor) c4(164006) c5(164007, 164008, 164009, 164010, 164011, 164012, 164013, 164014, 164015, 164016, 164017, 164018) c6( ) c7(bIK, T, dD, bM, id, IP, e, aLv, bIH, ci, fu, bX, eq, fr, brD, sD, cd, ad, av, afm, le, bkc, brC, dL, bU, brE, eL, bIG, bz, W, Uj, bm, aS, bIL, IC); #c1(FBLN5) c2(XP_011534659) c3(fibulin-5 isoform X3) c4(331166) c5( ) c6( ) c7(bIK, T, dD, bM, id, IP, e, aLv, bIH, ci, fu, bX, eq, fr, brD, sD, cd, ad, av, afm, le, bkc, brC, dL, bU, brE, eL, bIG, bz, W, Uj, bm, aS, bIL, IC); #c1(FBN1) c2(NP_000129) c3(fibrillin-1 precursor) c4(2859, 2860, 2861) c5(2862, 2863, 2864, 2865, 2866, 2867, 2868, 2869, 2870, 2871, 2872, 2873, 2874, 2875, 2876, 2877, 2878, 2879) c6( ) c7(T, Ap, rV, tQ, e, Av, IR, ci, brJ, bW, K, aW, eF, GR, zV, qJ, vA, mx, uo, m, vF, brN, Vj, aTe, brE, vl, brL, FG, wJ, n, Mi, brK, cd, no, azj, KN, jy, MX, mR, As, Vt, dw, fq, op, vD, Be, uz, vQ, bL, tf, eR, mr, DD, cz, lj, j, Eh, Mg, KB, brH, Er, aT, bK, bq, an, bf, brl, Ue, En, t, pb, asw, pZ, hc, uS, DE, Ep, Mt, ao, bgQ, jh, dG, sg, dP, hd, oj, ji, eH, brM, BG, dr, qa, LB, Bv, brG, aS, be, jr); #c1(FBN2) c2(NP_001990) c3(fibrillin-2 precursor) c4(122955) c5(122956, 122957, 122958, 122959, 122960, 122961, 122962, 122963, 122964, 122965, 122966) c6( ) c7(bL, T, vl, eR, brL, e, aw, I, Ij, bB, aj, v, j, ci, zU, IR, fr, aY, q, J, ft, no, aE, py, Db, aT, h, jf, s, aW, r, hN, t, bz, pb, dr, LB, W, eM, bE, uo, m, pw, be, bt, us, brf); #c1(FBN3) c2(NP_115823) c3(fibrillin-3 precursor) c4(224134, 224135) c5(224136, 224137, 224138, 224139, 224140, 224141, 224142, 224143, 224144, 224145, 224146, 224147, 224148, 224149, 224150, 224151, 224152, 224153, 224154, 224155, 224156, 224157) c6(224158, 224159, 224160, 224161, 224162, 224163) c7(Hd, kl, aZ, cz, m, bQ, t); #c1(FBP1) c2(NP_000498) c3(fructose-1,6-bisphosphatase 1) c4(10294, 10295) c5(10296, 10297, 10298, 10299, 10300, 10301, 10302, 10303, 10304, 10305, 10306) c6( ) c7(Qi, brO, B, py, eM, bE, aW, aA, aT, bB, aq, aF, ci, an, iR, X); #c1(FBP1) c2(XP_006717068) c3(fructose-1,6-bisphosphatase 1 isoform X1) c4( ) c5(290685, 290686, 290687, 290688, 290689) c6( ) c7(Qi, brO, B, py, eM, bE, aW, aA, aT, bB, aq, aF, ci, an, iR, X); #c1(FBP2) c2(NP_003828) c3(fructose-1,6-bisphosphatase isozyme 2) c4(141193) c5(141194, 141195, 141196, 141197, 141198, 141199) c6( ) c7(Qi, aF, aA); #c1(FBRS) c2(NP_001098549) c3(probable fibrosin-1) c4(41374) c5( ) c6( ) c7(bM, bP, vA, ff, aq, en, iR, cm, ae, B, op, ad); #c1(FBRS) c2(XP_011544218) c3(probable fibrosin-1 isoform X2) c4(343363) c5( ) c6( ) c7(bM, bP, vA, ff, aq, en, iR, cm, ae, B, op, ad); #c1(FBRS) c2(XP_011544221) c3(probable fibrosin-1 isoform X5) c4( ) c5(343364, 343365, 343366, 343367, 343368, 343369, 343370, 343371, 343372, 343373, 343374, 343375, 343376, 343377, 343378) c6( ) c7(bM, bP, vA, ff, aq, en, iR, cm, ae, B, op, ad); #c1(FBXL15) c2(NP_077302) c3(F-box/LRR-repeat protein 15) c4( ) c5(215126, 215127, 215128, 215129, 215130, 215131, 215132, 215133, 215134, 215135, 215136, 215137, 215138, 215139, 215140, 215141, 215142, 215143, 215144, 215145, 215146, 215147, 215148, 215149, 215150) c6( ) c7(rz, bO, Ko, iV, he, bN); #c1(FBXL15) c2(XP_005270206) c3(F-box/LRR-repeat protein 15 isoform X2) c4(283271, 283272, 283273, 283274, 283275, 283276) c5(283277, 283278, 283279, 283280, 283281, 283282, 283283, 283284, 283285, 283286, 283287) c6( ) c7(rz, bO, Ko, iV, he, bN); #c1(FBXL17) c2(NP_001156787) c3(F-box/LRR-repeat protein 17) c4(61969, 61970) c5(61971, 61972, 61973, 61974, 61975, 61976, 61977, 61978, 61979, 61980, 61981, 61982) c6( ) c7(aT); #c1(FBXL17) c2(XP_005272105) c3(F-box/LRR-repeat protein 17 isoform X1) c4(283700) c5(283701, 283702, 283703, 283704, 283705, 283706) c6( ) c7(aT); #c1(FBXL19) c2(NP_001093254) c3(F-box/LRR-repeat protein 19 isoform 1) c4(40188, 40189, 40190) c5(40191, 40192, 40193, 40194, 40195, 40196, 40197, 40198, 40199, 40200, 40201, 40202, 40203, 40204, 40205, 40206, 40207, 40208) c6( ) c7(wD, ht, cr, hu); #c1(FBXL2) c2(NP_001165184) c3(F-box/LRR-repeat protein 2 isoform 2) c4(67528) c5(67529, 67530, 67531, 67532, 67533, 67534, 67535, 67536, 67537, 67538) c6( ) c7(x, T, jh, k, hH, bt, af); #c1(FBXL2) c2(NP_036289) c3(F-box/LRR-repeat protein 2 isoform 1) c4(172861, 172862, 172863) c5(172864, 172865, 172866, 172867, 172868, 172869, 172870, 172871, 172872, 172873, 172874, 172875, 172876) c6( ) c7(x, T, jh, k, hH, bt, af); #c1(FBXL2) c2(XP_005265071) c3(F-box/LRR-repeat protein 2 isoform X1) c4(279418) c5(279419) c6( ) c7(x, T, jh, k, hH, bt, af); #c1(FBXL2) c2(XP_005265074) c3(F-box/LRR-repeat protein 2 isoform X3) c4( ) c5(279420, 279421, 279422, 279423, 279424) c6( ) c7(x, T, jh, k, hH, bt, af); #c1(FBXL2) c2(XP_011531861) c3(F-box/LRR-repeat protein 2 isoform X2) c4( ) c5(327924, 327925, 327926, 327927, 327928) c6( ) c7(x, T, jh, k, hH, bt, af); #c1(FBXL20) c2(NP_001171835) c3(F-box/LRR-repeat protein 20 isoform 2) c4(71944) c5(71945, 71946, 71947, 71948, 71949, 71950) c6( ) c7(bc); #c1(FBXL20) c2(NP_116264) c3(F-box/LRR-repeat protein 20 isoform 1) c4(226027) c5(226028, 226029, 226030, 226031, 226032, 226033) c6( ) c7(bc); #c1(FBXL3) c2(NP_036290) c3(F-box/LRR-repeat protein 3) c4(172877) c5(172878, 172879, 172880, 172881, 172882, 172883) c6( ) c7(jh); #c1(FBXL4) c2(NP_001265645) c3(F-box/LRR-repeat protein 4) c4(99087) c5(99088, 99089, 99090, 99091, 99092, 99093, 99094, 99095, 99096, 99097) c6( ) c7(px, brP, ey); #c1(FBXL5) c2(NP_001180464) c3(F-box/LRR-repeat protein 5 isoform 4) c4(74140) c5(74141, 74142, 74143, 74144, 74145, 74146, 74147, 74148, 74149, 74150, 74151, 74152) c6( ) c7(aF, aA); #c1(FBXL5) c2(NP_036293) c3(F-box/LRR-repeat protein 5 isoform 1) c4(172884, 172885) c5(172886, 172887, 172888, 172889, 172890, 172891) c6( ) c7(aF, aA); #c1(FBXL7) c2(NP_036436) c3(F-box/LRR-repeat protein 7 isoform 1) c4(173842, 173843) c5(173844, 173845, 173846, 173847, 173848, 173849, 173850, 173851, 173852, 173853, 173854, 173855) c6( ) c7(aW, aj, oe, cd, aT); #c1(FBX010) c2(XP_005251496) c3(F-box only protein 10 isoform X2) c4( ) c5(270961, 270962, 270963, 270964, 270965, 270966) c6( ) c7(aW, zP, K, aT); #c1(FBX010) c2(XP_006716817) c3(F-box only protein 10 isoform X3) c4(290503) c5(290504, 290505, 290506, 290507, 290508) c6( ) c7(aW, zP, K, aT); #c1(FBX010) c2(XP_011516147) c3(F-box only protein 10 isoform X1) c4(309374, 309375) c5(309376, 309377, 309378, 309379, 309380, 309381, 309382) c6( ) c7(aW, zP, K, aT); #c1(FBX011) c2(NP_001177203) c3(F-box only protein 11 isoform 4) c4(72515, 72516, 72517) c5(72518, 72519, 72520, 72521, 72522, 72523, 72524, 72525, 72526, 72527, 72528, 72529, 72530, 72531, 72532, 72533, 72534, 72535) c6( ) c7(aBU, zo, fM, qj, PC); #c1(FBX011) c2(NP_079409) c3(F-box only protein 11 isoform 1) c4(217994) c5(217995, 217996, 217997, 217998, 217999, 218000, 218001, 218002, 218003, 218004) c6( ) c7(aBU, zo, fM, qj, PC); #c1(FBX015) c2(NP_001136430) c3(F-box only protein 15 isoform 2) c4(54953, 54954) c5(54955, 54956, 54957, 54958, 54959, 54960, 54961) c6( ) c7(W, fD); #c1(FBX015) c2(NP_689889) c3(F-box only protein 15 isoform 1) c4( ) c5(244271, 244272, 244273, 244274, 244275) c6( ) c7(W, fD); #c1(FBX017) c2(NP_079183) c3(F-box only protein 17 isoform 2) c4(217333) c5(217334, 217335, 217336, 217337, 217338) c6( ) c7(fq); #c1(FBX017) c2(NP_680474) c3(F-box only protein 17 isoform 1) c4(242283) c5(242284, 242285, 242286, 242287, 242288, 242289, 242290) c6( ) c7(fq); #c1(FBX018) c2(NP_001245381) c3(F-box only protein 18 isoform 3) c4(93365) c5(93366, 93367, 93368, 93369, 93370) c6( ) c7(aW, Y, aKO, K, aT); #c1(FBX018) c2(NP_001245382) c3(F-box only protein 18 isoform 4) c4( ) c5(93371) c6( ) c7(aW, Y, aKO, K, aT); #c1(FBX018) c2(NP_116196) c3(F-box only protein 18 isoform 1) c4(225699) c5(225700, 225701, 225702, 225703, 225704, 225705) c6( ) c7(aW, Y, aKO, K, aT); #c1(FBX018) c2(NP_835363) c3(F-box only protein 18 isoform 2) c4(253476) c5(253477, 253478, 253479, 253480, 253481, 253482, 253483, 253484) c6( ) c7(aW, Y, aKO, K, aT); #c1(FBX018) c2(XP_011518051) c3(F-box only protein 18 isoform X2) c4(312089) c5(312090, 312091, 312092, 312093, 312094, 312095, 312096, 312097) c6( ) c7(aW, Y, aKO, K, aT); #c1(FBX028) c2(NP_001129587) c3(F-box only protein 28 isoform b) c4(51948) c5(51949, 51950, 51951, 51952, 51953, 51954) c6( ) c7(aW, T, aT); #c1(FBX028) c2(NP_055991) c3(F-box only protein 28 isoform a) c4(184987) c5(184988, 184989, 184990, 184991, 184992, 184993) c6( ) c7(aW, T, aT); #c1(FBX03) c2(NP_036307) c3(F-box only protein 3 isoform 1) c4(172903) c5(172904, 172905, 172906, 172907, 172908, 172909, 172910) c6( ) c7(bdR, an); #c1(FBX03) c2(NP_208385) c3(F-box only protein 3 isoform 2) c4(228553, 228554) c5(228555, 228556, 228557, 228558, 228559, 228560, 228561, 228562, 228563, 228564, 228565) c6( ) c7(bdR, an); #c1(FBX030) c2(XP_005267216) c3(F-box only protein 30 isoform X1) c4(280829) c5(280830, 280831, 280832, 280833, 280834, 280835) c6( ) c7(ci); #c1(FBXO31) c2(NP_001269612) c3(F-box only protein 31 isoform 2) c4( ) c5(102212) c6( ) c7(aW, aT, K, nA, rz, it, ad); #c1(FBXO31) c2(NP_079011) c3(F-box only protein 31 isoform 1) c4(216545) c5(216546, 216547, 216548, 216549, 216550, 216551, 216552) c6( ) c7(aW, aT K, nA, rz, it, ad); #c1(FBXO32) c2(NP_001229392) c3(F-box only protein 32 isoform 3) c4(84346) c5(84347, 84348, 84349, 84350, 84351, 84352) c6( ) c7(lD, ht, aj, ci, C, aY, J, no, oj, cy, bl, K, hu, brQ, li, ly, t, Bu, lx, c, at, aS, m, it); #c1(FBXO32) c2(NP_478136) c3(F-box only protein 32 isoform 1) c4(230979) c5(230980, 230981, 230982, 230983, 230984, 230985) c6( ) c7(lD, ht, aj, ci, C, aY, J, no, oj, cy, bl, K, hu, brQ, li, ly, t, Bu, lx, c, at, aS, m, it); #c1(FBXO33) c2(NP_976046) c3(F-box only protein 33) c4(262879) c5(262880, 262881, 262882, 262883, 262884, 262885, 262886) c6( ) c7(bM, dY, oe, EQ, aHP, cm, aHQ, cd); #c1(FBXO38) c2(NP_001258652) c3(F-box only protein 38 isoform c) c4(96278) c5(96279, 96280, 96281, 96282, 96283, 96284, 96285, 96286, 96287, 96288) c6( ) c7(Oq, brR, bL, A, no, cz, j, y); #c1(FBXO38) c2(NP_110420) c3(F-box only protein 38 isoform a) c4(220238) c5(220239, 220240, 220241, 220242, 220243, 220244) c6( ) c7(Oq, brR, bL, A, no, cz, j, y); #c1(FBXO38) c2(XP_005268570) c3(F-box only protein 38 isoform X1) c4(281922) c5(281923, 281924, 281925, 281926, 281927, 281928) c6( ) c7(Oq, brR, bL, A, no, cz, j, y); #c1(FBXO4) c2(NP_036308) c3(F-box only protein 4 isoform 1) c4(172911) c5(172912, 172913, 172914, 172915, 172916, 172917) c6( ) c7(T, Y); #c1(FBXO4) c2(NP_277019) c3(F-box only protein 4 isoform 2) c4(228738) c5(228739, 228740, 228741, 228742, 228743, 228744) c6( ) c7(T, Y); #c1(FBXO40) c2(NP_057382) c3(F-box only protein 40) c4(190477) c5(190478, 190479, 190480, 190481, 190482, 190483) c6( ) c7(bN); #c1(FBXO47) c2(XP_011523166) c3(F-box only protein 47 isoform X1) c4(317697) c5(317698, 317699, 317700, 317701, 317702, 317703) c6( ) c7(rP); #c1(FBXO5) c2(NP_001135994) c3(F-box only protein 5 isoform b) c4( ) c5(53931, 53932, 53933, 53934, 53935) c6( ) c7(T, rz, aW, aT, K, nA, t, it, B, ad, bA); #c1(FBXO5) c2(NP_036309) c3(F-box only protein 5 isoform a) c4(172918) c5(172919, 172920, 172921, 172922, 172923, 172924) c6( ) c7(T, rz, aW, aT, K, nA, t, it, B, ad, bA); #c1(FBXO5) c2(XP_011534051) c3(F-box only protein 5 isoform X1) c4(330224) c5(330225) c6( ) c7(T, rz, aW, aT, K, nA, t, it, B, ad, bA); #c1(FBXO7) c2(NP_001028196) c3(F-box only protein 7 isoform 2) c4(30353) c5(30354, 30355, 30356, 30357, 30358, 30359) c6( ) c7(T, brS, U, kH, GC, ci, brT, an); #c1(FBXO7) c2(NP_001244919) c3(F-box only protein 7 isoform 3) c4( ) c5(92330, 92331, 92332, 92333, 92334) c6( ) c7(T, brS, U, kH, GC, ci, brT, an); #c1(FBXO7) c2(NP_036311) c3(F-box only protein 7 isoform 1) c4(172925, 172926) c5(172927, 172928, 172929, 172930, 172931, 172932, 172933, 172934, 172935, 172936, 172937) c6( ) c7(T, brS, U, kH, GC, ci, brT, an); #c1(FBXO8) c2(NP_036312) c3(F-box only protein 8) c4(172938, 172939, 172940) c5(172941, 172942, 172943, 172944, 172945, 172946, 172947, 172948, 172949, 172950, 172951, 172952, 172953, 172954, 172955, 172956, 172957, 172958) c6( ) c7(bM, bP, c, vA, ff, aq, en, iR, cm, ae, B, op, ad); #c1(FBXO9) c2(NP_036479) c3(F-box only protein 9 isoform 1) c4(174154) c5(174155, 174156, 174157, 174158, 174159, 174160, 174161) c6( ) c7(fd); #c1(FBXO9) c2(NP_258441) c3(F-box only protein 9 isoform 2) c4(228704, 228705) c5(228706, 228707, 228708, 228709, 228710, 228711, 228712, 228713, 228714) c6( ) c7(fd); #c1(FBXO9) c2(NP_258442) c3(F-box only protein 9 isoform 3) c4(228715, 228716, 228717) c5(228718, 228719, 228720, 228721, 228722, 228723, 228724, 228725, 228726, 228727, 228728, 228729, 228730, 228731, 228732, 228733, 228734, 228735, 228736, 228737) c6( ) c7(fd); #c1(FBXW11) c2(NP_036432) c3(F-box/WD repeat-containing protein 11 isoform C) c4(173815) c5(173816, 173817, 173818, 173819, 173820, 173821) c6( ) c7(bF, T, ft, eG, aE, atk, bkF, eH, Hn, h, aF, zG, ci, ZW, eF, cm, eL, B, afb, qH); #c1(FBXW11) c2(NP_387448) c3(F-box/WD repeat-containing protein 11 isoform B) c4(228949, 228950) c5(228951, 228952, 228953, 228954, 228955, 228956, 228957, 228958, 228959, 228960, 228961) c6( ) c7(bF, T, ft, eG, aE, atk, bkF, eH, Hn, h, aF, zG, ci, ZW, eF, cm, eL, B, afb, qH); #c1(FBXW11) c2(NP_387449) c3(F-box/WD repeat-containing protein 11 isoform A) c4(228962) c5(228963, 228964, 228965, 228966, 228967, 228968) c6( ) c7(bF, T, ft, eG, aE, atk, bkF, eH, Hn, h, aF, zG, ci, ZW, eF, cm, eL, B, afb, qH); #c1(FBXW11) c2(XP_005265913) c3(F-box/WD repeat-containing protein 11 isoform X3) c4( ) c5(279842) c6( ) c7(bF, T, ft, eG, aE, atk, bkF, eH, Hn, h, aF, zG, ci, ZW, eF, cm, eL, B, afb, qH); #c1(FBXW4) c2(NP_071322) c3(F-box/WD repeat-containing protein 4) c4(210949, 210950, 210951) c5(210952, 210953, 210954, 210955, 210956, 210957, 210958, 210959, 210960, 210961, 210962, 210963, 210964, 210965, 210966, 210967, 210968, 210969, 210970, 210971, 210972, 210973, 210974, 210975) c6( ) c7(bv, arB, d, arA, aW, bs, aT, bw, m, hr, bu, t, bt, atb); #c1(FBXW4) c2(XP_005270110) c3(F-box/WD repeat-containing protein 4 isoform X1) c4(283110) c5( ) c6( ) c7(bv, arB, d, arA, aW, bs, aT, bw, m, hr, bu, t, bt, atb); #c1(FBXW7) c2(NP_060785) c3(F-box/WD repeat-containing protein 7 isoform 2) c4(197795) c5(197796, 197797, 197798, 197799, 197800, 197801) c6( ) c7(ph, brU, T, am, qo, aC, ht, jN, jh, aA, n, ci, q, ad, er, hX, eA, eJ, iu, x, fX, aE, aaU, dE, qK, dV, kH, aT, rO, h, hn, dL, K, hu, brV, KV, ae, vO, cp, Qe, le, d, s, dH, iU, aW, Y, ff, eZ, r, aF, en, cl, g, t, eF, awi, dr, ck, es, bF, BU, vD, eM, aiM, cj, pP, hL, CD, at, IF, m, k, cP, pw, it, B, jr); #c1(FBXW7) c2(XP_011530387) c3(F-box/WD repeat-containing protein 7 isoform X1) c4(326227, 326228) c5(326229, 326230, 326231, 326232, 326233, 326234) c6( ) c7(ph, brU, T, am, qo, aC, ht, jN, jh, aA, n, ci, q, ad, er, hX, eA, eJ, iu, x, fX, aE, aaU, dE, qK, dV, kH, aT, rO, h, hn, dL, K, hu, brV, KV, ae, vO, cp, Qe, le, d, s, dH, iU, aW, Y, ff, eZ, r, aF, en, cl, g, t, eF, awi, dr, ck, es, bF, BU, vD, eM, aiM, cj, pP, hL, CD, at, lF, m, k, cP, pw, it, B, jr); #c1(FBXW7) c2(XP_011530389) c3(F-box/WD repeat-containing protein 7 isoform X2) c4(326235) c5(326236, 326237, 326238, 326239, 326240, 326241) c6( ) c7(ph, brU, T, am, qo, aC, ht, jN, jh, aA, n, ci, q, ad, er, hX, eA, eJ, iu, x, fX, aE, aaU, dE, qK, dV, kH, aT, rO, h, hn, dL, K, hu, brV, KV, ae, vO, cp, Qe, le, d, s, dH, iU, aW, Y, ff, eZ, r, aF, en, cl, g, t, eF, awi, dr, ck, es, bF, BU, vD, eM, aiM, cj, pP, hL, CD, at, lF, m, k, cP, pw, it, B, jr); #c1(FBXW7) c2(XP_011530390) c3(F-box/WD repeat-containing protein 7 isoform X3) c4( ) c5(326242, 326243, 326244, 326245, 326246, 326247) c6( ) c7(ph, brU, T, am, qo, aC, ht, jN, jh, aA, n, ci, q, ad, er, hX, eA, eJ, iu, x, fX, aE, aaU, dE, qK, dV, kH, aT, rO, h, hn, dL, K, hu, brV, KV, ae, vO, cp, Qe, le, d, s, dH, iU, aW, Y, ff, eZ, r, aF, en, cl, g, t, eF, awi, dr, ck, es, bF, BU, vD, eM, aiM, cj, pP, hL, CD, at, IF, m, k, cP, pw, it, B, jr); #c1(FBXW8) c2(NP_036306) c3(F-box/WD repeat-containing protein 8 isoform 2) c4(172892) c5(172893, 172894, 172895, 172896, 172897, 172898, 172899, 172900, 172901, 172902) c6( ) c7(nJ, aE); #c1(FBXW8) c2(NP_699179) c3(F-box/WD repeat-containing protein 8 isoform 1) c4(245806) c5(245807, 245808, 245809, 245810, 245811, 245812) c6( ) c7(nJ, aE); #c1(FCAR) c2(NP_001991) c3(immunoglobulin alpha Fc receptor isoform a precursor) c4(122967, 122968) c5(122969, 122970, 122971, 122972, 122973, 122974, 122975, 122976, 122977, 122978, 122979, 122980) c6( ) c7(aFe, fR, eR, e, aw, fd, j, C, Tz, F, ey, eu, eZ, brW, iV, pb, ac, hc, aFb, uz, fL, y); #c1(FCAR) c2(NP_579803) c3(immunoglobulin alpha Fc receptor isoform b precursor) c4(234620) c5(234621, 234622, 234623, 234624, 234625, 234626) c6( ) c7(aFe, fR, eR, e, aw, fd, j, C, Tz, F, ey, eu, eZ, brW, iV, pb, ac, hc, aFb, uz, fL, y); #c1(FCAR) c2(NP_579805) c3(immunoglobulin alpha Fc receptor isoform c precursor) c4(234627) c5(234628, 234629, 234630, 234631, 234632, 234633) c6( ) c7(aFe, fR, eR, e, aw, fd, j, C, Tz, F, ey, eu, eZ, brW, iV, pb, ac, hc, aFb, uz, fL, y); #c1(FCAR) c2(NP_579806) c3(immunoglobulin alpha Fc receptor isoform d) c4(234634) c5(234635, 234636, 234637, 234638, 234639, 234640) c6( ) c7(aFe, fR, eR, e, aw, fd, j, C, Tz, F, ey, eu, eZ, brW, iV, pb, ac, hc, aFb, uz, fL, y); #c1(FCAR) c2(NP_579807) c3(immunoglobulin alpha Fc receptor isoform e) c4(234641) c5(234642, 234643, 234644, 234645, 234646, 234647) c6( ) c7(aFe, fR, eR, e, aw, fd, j, C, Tz, F, ey, eu, eZ, brW, iV, pb, ac, hc, aFb, uz, fL, y); #c1(FCAR) c2(NP_579808) c3(immunoglobulin alpha Fc receptor isoform f) c4(234648) c5(234649, 234650, 234651, 234652, 234653, 234654) c6( ) c7(aFe, fR, eR, e, aw, fd, j, C, Tz, F, ey, eu, eZ, brW, iV, pb, ac, hc, aFb, uz, fL, y); #c1(FCAR) c2(NP_579811) c3(immunoglobulin alpha Fc receptor isoform g) c4(234655) c5(234656, 234657, 234658, 234659, 234660, 234661) c6( ) c7(aFe, fR, eR, e, aw, fd, j, C, Tz, F, ey, eu, eZ, brW, iV, pb, ac, hc, aFb, uz, fL, y); #c1(FCAR) c2(NP_579812) c3(immunoglobulin alpha Fc receptor isoform h) c4(234662) c5(234663, 234664, 234665, 234666, 234667, 234668) c6( ) c7(aFe, fR, eR, e, aw, fd, j, C, Tz, F, ey, eu, eZ, brW, iV, pb, ac, hc, aFb, uz, fL, y); #c1(FCER1A) c2(NP_001992) c3(high affinity immunoglobulin epsilon receptor subunit alpha precursor) c4(122981) c5(122982, 122983, 122984, 122985, 122986, 122987) c6( ) c7(ck, bM, cT, Dw, aW, fS, e, eE, JM, aT, bm, uz, Ds, fe, j, Jx, ve, Vk, eA); #c1(FCERIG) c2(NP_004097) c3(high affinity immunoglobulin epsilon receptor subunit gamma precursor) c4(143527, 143528) c5(143529, 143530, 143531, 143532, 143533, 143534, 143535, 143536, 143537, 143538, 143539, 143540) c6( ) c7(bM, iU, e, fS, eZ, ah, aak, eE, ip); #c1(FCER2) c2(NP_001193948) c3(low affinity immunoglobulin epsilon Fc receptor isoform b) c4(83310) c5(83311, 83312, 83313, 83314, 83315, 83316) c6( ) c7(bM, Dw, fM, iW, Ju, eX, jh, fd, v, PM, ai, zn, Oe, F, bW, brX, hD, h, Ds, hn, eV, an, pk, Xl, A, sp, zb, wc, BG, aoD, eE, asE, yR, Cv, ck, cT, iQ, z, kz, cj, hh, y, Ze); #c1(FCER2) c2(NP_001207429) c3(low affinity immunoglobulin epsilon Fc receptor isoform a) c4(83711) c5(83712, 83713, 83714, 83715, 83716, 83717) c6( ) c7(bM, Dw, fM, iW, Ju, eX, jh, fd, v, pM, ai, zn, Oe, F, bW, brX, hD, h, Ds, hn, eV, an, pk, Xl, A, sp, zb, wc, BG, aoD, eE, asE, yR, Cv, ck, cT, iQ, z, kz, cj, hh, y, Ze); #c1(FCGBP) c2(NP_003881) c3(IgGFc-binding protein precursor) c4(141779, 141780) c5(141781, 141782, 141783, 141784, 141785, 141786, 141787, 141788) c6(141789, 141790) c7(qJ, hd, AS, aA, ae, AN, ad); #c1(FCGBP) c2(XP_011547114) c3(IgGFc-binding protein isoform X2) c4( ) c5(345869, 345870, 345871, 345872, 345873, 345874, 345875) c6( ) c7(qJ, hd, AS, aA, ae, AN, ad); #c1(FCGR2A) c2(NP_001129691) c3(low affinity immunoglobulin gamma Fc region receptor II-a isoform 1 precursor) c4(52208) c5(52209, 52210, 52211, 52212, 52213, 52214) c6( ) c7(oO, bM, fR, e, fd, hh, aDl, Tz, dY, dV, M, DY, hH, azx, UC, aiV, aW, asD, pD, ve, cm, bqd, cj, Zn, k, eg, aFf, dD, fN, ez, uE, bsa, zo, ai, brY, gd, h, nm, dL, DU, ey, A, fe, cM, Wt, dB, JM, uz, fL, Pr, fM, qd, aA, bcE, OY, j, C, V, pd, q, zT, jZ, si, aT, kf, aFm, lM, ae, eu, hM, Ue, bsb, bg, apK, r, aDm, pb, brZ, cT, ac, ig, AH, bsc, dT, wR, CZ, dy, fD, bt, ao, gV, id, aFe, qb, aZ, iW, jh, ah, eq, atK, mC, ad, wD, aZp, afm, oW, Os, hD, lQ, vO, sj, wc, bps, eZ, brp, aF, hp, S, iV, aYt, LB, aFb, aS, XO, ME, lf, ne, y); #c1(FCGR2A) c2(NP_067674) c3(low affinity immunoglobulin gamma Fc region receptor II-a isoform 2 precursor) c4(209261) c5(209262, 209263, 209264, 209265, 209266, 209267, 209268, 209269, 209270) c6( ) c7(oO, bM, fR, e, fd, hh, aDl, Tz, dY, dV, M, DY, hH, azx, UC, aiV, aW, asD, PD, ve, cm, bqd, cj, Zn, k, eg, aFf, dD, fN, ez, uE, bsa, zo, ai, brY, gd, h, nm, dL, DU, ey, A, fe, cM, Wt, dB, JM, uz, fL, Pr, fM, qd, aA, bcE, OY, j, C, V, pd, q, zT, jZ, sl, aT, kf, aFm, IM, ae, eu, hM, Ue, bsb, bg, apK, r, aDm, pb, brZ, cT, ac, ig, AH, bsc, dT, wR, CZ, dy, fD, bt, ao, gV, id, aFe, qb, aZ, iW, jh, ah, eq, atK, mC, ad, wD, aZp, afm, oW, Os, hD, lQ, vO, sj, wc, bps, eZ, brp, aF, hp, S, iV, aYt, LB, aFb, aS, XO, ME, lf, ne, y); #c1(FCGR2B) c2(NP_001002273) c3(low affinity immunoglobulin gamma Fc region receptor II-b isoform 2 precursor) c4( ) c5(19544, 19545, 19546, 19547, 19548, 19549) c6( ) c7(oO, gV, hM, fM, id, aZ, jh, fd, cR, ol, BH, j, ah, bh, mC, ad, aDl, ai, x, aZp, afm, oz, jZ, oW, Os, aT, dV, h, ey, lQ, DY, ae, bsd, UC, bsb, Y, eZ, anQ, aDm, pD, VE, S, Wt, cT, y, yW, uz, dT, dy, k, fL, eg, XO, lf, bt, Pr, ME, hv); #c1(FCGR2B) c2(NP_001002274) c3(low affinity immunoglobulin gamma Fc region receptor II-b isoform 3 precursor) c4(19550, 19551) c5(19552, 19553, 19554, 19555, 19556, 19557, 19558, 19559, 19560, 19561) c6( ) c7(oO, gV, hM, fM, id, aZ, jh, fd, cR, ol, BH, j, ah, bh, mC, ad, aDl, ai, x, aZp, afm, oz, jZ, oW, Os, aT, dV, h, ey, lQ, DY, ae, bsd, UC, bsb, Y, eZ, anQ, aDm, pD, VE, S, Wt, cT, y, yW, uz, dT, dy, k, fL, eg, XO, lf, bt, Pr, ME, hv); #c1(FCGR2B) c2(NP_001177757) c3(low affinity immunoglobulin gamma Fc region receptor II-b isoform 5) c4(72969) c5(72970, 72971, 72972, 72973, 72974, 72975, 72976, 72977, 72978, 72979) c6( ) c7(oO, gV, hM, fM, id, aZ, jh, fd, cR, ol, BH, j, ah, bh, mC, ad, aDl, ai, x, aZp, afm, oz, jZ, oW, Os, aT, dV, h, ey, lQ, DY, ae, bsd, UC, bsb, Y, eZ, anQ, aDm, pD, VE, S, Wt, cT, y, yW, uz, dT, dy, k, fL, eg, XO, lf, bt, Pr, ME, hv); #c1(FCGR2B) c2(NP_003992) c3(low affinity immunoglobulin gamma Fc region receptor II-b isoform 1 precursor) c4(142688) c5(142689, 142690, 142691, 142692, 142693, 142694, 142695, 142696, 142697, 142698) c6( ) c7(oO, gV, bM, fM, id, aZ, jh, fd, cR, ol, BH, j, ah, bh, mC, ad, aDl, ai, x, aZp, afm, oz, jZ, oW, Os, aT, dV, h, ey, lQ, DY, ae, bsd, UC, bsb, Y, eZ, anQ, aDm, pD, VE, S, Wt, cT, y, yW, uz, dT, dy, k, fL, eg, XO, lf, bt, Pr, ME, hv); #c1(FCGR2B) c2(XP_011507594) c3(low affinity immunoglobulin gamma Fc region receptor II-b isoform X1) c4(297499) c5(297500, 297501, 297502, 297503, 297504, 297505) c6( ) c7(oO, gV, bM, fM, id, aZ, jh, fd, cR, ol, BH, j, ah, bh, mC, ad, aDl, ai, x, aZp, afm, oz, jZ, oW, Os, aT, dV, h, ey, lQ, DY, ae, bsd, UC, bsb, Y, eZ, anQ, aDm, pD, VE, S, Wt, cT, y, yW, uz, dT, dy, k, fL, eg, XO, lf, bt, Pr, ME, hv); #c1(FCGR3A) c2(NP_000560) c3(low affinity immunoglobulin gamma Fc region receptor III-A isoform a precursor) c4(12666, 12667) c5(12668, 12669, 12670, 12671, 12672, 12673, 12674, 12675, 12676, 12677, 12678) c6( ) c7(bM, T, fR, ea, e, fd, bB, ci, aY, aDl, amW, Tz, dV, DY, hH, hm, aiV, aW, az, pD, g, ve, cm, ba, eM, xD, dc, Fh, cj, Zn, hh, fy, dD, aYZ, aw, fr, uE, aHj, ai, eW, gd, kH, bsg, h, eV, hn, DU, ey, afu, A, anP, aHW, CM, lb, fe, ax, Og, yq, bse, cM, Wt, asE, bsf, dB, gw, uz, eo, fL, Pr, fM, dA, eR, jx, eX, fZ, aA, hy, v, j, OY, C, bcE, aDO, V, aFv, q, aGT, zT, ld, aT, lM, ae, hM, iU, Y, bg, r, lo, en, zM, aER, iK, pb, Cv, pa, iQ, ig, hc, CZ, dy, fD, bt, vi, gV, aFe, Ke, Zl, ob, aD, iW, jh, ah, eq, mC, ad, wD, F, afm, uQ, ue, hG, cW, ff, Of, eZ, brp, xH, hp, Fq, iV, dr, bE, aFb, XO, ME, lf, fh, y); #c1(FCGR3A) c2(NP_001121064) c3(low affinity immunoglobulin gamma Fc region receptor III-A isoform b precursor) c4(45120, 45121) c5(45122, 45123, 45124, 45125, 45126, 45127, 45128, 45129, 45130, 45131, 45132, 45133, 45134) c6( ) c7(bM, T, fR, ea, e, fd, bB, ci, aY, aDl, amW, Tz, dV, DY, hH, hm, aiV, aW, az, pD, g, ve, cm, ba, eM, xD, dc, Fh, cj, Zn, hh, fy, dD, aYZ, aw, fr, uE, aHj, ai, eW, gd, kH, bsg, h, eV, hn, DU, ey, afu, A, anP, aHW, CM, lb, fe, ax, Og, yq, bse, cM, Wt, asE, bsf, dB, gw, uz, eo, fL, Pr, fM, dA, eR, jx, eX, fZ, aA, hy, v, j, OY, C, bcE, aDO, V, aFv, q, aGT, zT, Id, aT, IM, ae, hM, iU, Y, bg, r, lo, en, zM, aER, iK, pb, Cv, pa, iQ, ig, hc, CZ, dy, fD, bt, vi, gV, aFe, Ke, Zl, ob, aD, iW, jh, ah, eq, mC, ad, wD, F, afm, uQ, ue, hG, cW, ff, Of, eZ, brp, xH, hp, Eq, iV, dr, bE, aFb, XO, ME, lf, fh, y); #c1(FCGR3A) c2(NP_001121065) c3(low affinity immunoglobulin gamma Fc region receptor III-A isoform c precursor) c4( ) c5(45135, 45136, 45137, 45138, 45139, 45140, 45141, 45142, 45143, 45144, 45145) c6( ) c7(bM, T, fR, ea, e, fd, bB, ci, aY, aDl, amW, Tz, dV, DY, hH, hm, aiV, aW, az, pD, g, ve, cm, ba, eM, xD, dc, Fh, cj, Zn, hh, fy, dD, aYZ, aw, fr, uE, aHj, ai, eW, gd, kH, bsg, h, eV, hn, DU, ey, afu, A, anP, aHW, CM, lb, fe, ax, Og, yq, bse, cM, Wt, asE, bsf, dB, gw, uz, eo, fL, Pr, fM, dA, eR, jx, eX, fZ, aA, hy, v, j, OY, C, bcE, aDO, V, aFv, q, aGT, zT, ld, aT, lM, ae, hM, iU, Y, bg, r, lo, en, zM, aER, iK, pb, Cv, pa, iQ, ig, hc, CZ, dy, fD, bt, vi, gV, aFe, Ke, Zl, ob, aD, iW, jh, ah, eq, mC, ad, wD, F, afm, uQ, ue, hG, cW, ff, Of, eZ, brp, xH, hp, Fq, iV, dr, bE, aFb, XO, ME, lf, fh, y); #c1(FCGR3A) c2(NP_001121068) c3(low affinity immunoglobulin gamma Fc region receptor III-A isoform d precursor) c4(45146) c5(45147, 45148, 45149, 45150, 45151) c6( ) c7(bM, T, fR, ea, e, fd, bB, ci, aY, aDl, amW, Tz, dV, DY, hH, hm, aiV, aW, az, pD, g, ve, cm, ha, eM, xD, dc, Fh, cj, Zn, hh, fy, dD, aYZ, aw, fr, uE, aHj, ai, eW, gd, kH, bsg, h, eV, hn, DU, ey, afu, A, anP, aHW, CM, lb, fe, ax, Og, yq, bse, cM, Wt, asE, bsf, dB, gw, uz, eo, fL, Pr, fM, dA, eR, jx, eX, fZ, aA, hy, v, j, OY, C, bcE, aDO, V, aFv, q, aGT, zT, ld, aT, lM, ae, hM, iU, Y, bg, r, lo, en, zM, aER, iK, pb, Cv, pa, iQ, ig, hc, CZ, dy, fD, bt, vi, gV, aFe, Ke, Zl, ob, aD, iW, jh, ah, eq, mC, ad, wD, F, afm, uQ, ue, hG, cW, ff, Of, eZ, brp, xH, hp, Fq, iV, dr, bE, aFb, XO, ME, lf, fh, y); #c1(FCGR3B) c2(NP_000561) c3(low affinity immunoglobulin gamma Fc region receptor III-B isoform 2 precursor) c4(12679) c5(12680, 12681, 12682, 12683, 12684, 12685, 12686, 12687) c6( ) c7(oO, bM, T, ea, e, fd, ci, Tz, amW, dV, DY, hH, hm, aiV, aW, az, pD, g, ve, cm, y, eM, dc, cj, dW, hh, fy, dD, aYZ, aw, fr, uE, aHj, ai, eW, kH, h, DU, ey, afu, anP, fJ, fe, Wt, asE, bsf, uz, eo, fL, Pr, dA, eR, jx, fZ, v, j, OY, C, aDO, V, aFv, zT, ld, aT, kf, aFm, hM, iU, Y, bg, lo, en, zM, aER, pb, Cv, pa, hc, CZ, fD, bt, vi, gV, aFe, Ke, qb, aD, jh, ah, eq, mC, F, afm, oW, vO, ue, hG, ff, eZ, brp, xH, Fq, iV, LB, aFb, aS, ME, lf, fh, hv); #c1(FCGRT) c2(NP_001129491) c3(IgG receptor FcRn large subunit p51 precursor) c4(51625, 51626, 51627) c5(51628, 51629, 51630, 51631, 51632, 51633, 51634, 51635, 51636, 51637) c6( ) c7(bM, fM, dM, jh, V, ai, q, mC, x, xy, Bj, jk, kH, ey, DY, uM, A, d, bf, je, eZ, r, afq, hp, eE, Wt, ck, iM, lV, awM, dy, fL, k, ER, R, bC, bt, be, aLL); #c1(FCGRT) c2(XP_011524929) c3(IgG receptor FcRn large subunit p51 isoform X1) c4( ) c5(319412) c6( ) c7(bM, fM, dM, jh, V, ai, q, mC, x, xy, Bj, jk, kH, ey, DY, uM, A, d, bf, je, eZ, r, afq, hp, eE, Wt, ck, iM, lV, awM, dy, fL, k, ER, R, bC, bt, be, aLL); #c1(FCGRT) c2(XP_011524930) c3(IgG receptor FcRn large subunit P51 isoform X3) c4( ) c5(319413, 319414, 319415, 319416, 319417, 319418, 319419, 319420, 319421, 319422, 319423) c6( ) c7(bM, fM, dM, jh, V, ai, q, mC, x, xy, Bj, jk, kH, ey, DY, uM, A, d, bf, je, eZ, r, afq, hp, eE, Wt, ck, iM, lV, awM, dy, fL, k, ER, R, bC, bt, be, aLL); #c1(FCHO1) c2(NP_001154829) c3(FCH domain only protein 1 isoform a) c4(61170) c5(61171, 61172, 61173, 61174, 61175, 61176) c6( ) c7(oe); #c1(FCHO1) c2(NP_055937) c3(FCH domain only protein 1 isoform b) c4(184533, 184534) c5(184535, 184536, 184537, 184538, 184539, 184540, 184541, 184542, 184543, 184544, 184545, 184546, 184547, 184548, 184549, 184550, 184551, 184552, 184553, 184554, 184555, 184556, 184557, 184558, 184559, 184560, 184561, 184562) c6( ) c7(oe); #c1(FCHO2) c2(NP_001139504) c3(FCH domain only protein 2 isoform b) c4(59442) c5(59443, 59444, 59445, 59446, 59447, 59448) c6( ) c7(ad); #c1(FCHO2) c2(NP_620137) c3(FCH domain only protein 2 isoform a) c4(237331, 237332, 237333) c5(237334, 237335, 237336, 237337, 237338, 237339, 237340, 237341, 237342, 237343, 237344, 237345, 237346, 237347, 237348, 237349, 237350, 237351) c6( ) c7(ad); #c1(FCHSD2) c2(NP_055639) c3(FCH and double SH3 domains protein 2) c4(182439) c5(182440, 182441, 182442, 182443, 182444, 182445, 182446, 182447, 182448, 182449, 182450, 182451, 182452, 182453, 182454, 182455, 182456, 182457) c6( ) c7(ck, bt); #c1(FCHSD2) c2(XP_011543711) c3(FCH and double SH3 domains protein 2 isoform X1) c4(342785) c5( ) c6( ) c7(ck, bt); #c1(FCHSD2) c2(XP_011543714) c3(FCH and double SH3 domains protein 2 isoform X4) c4(342786) c5( ) c6( ) c7(ck, bt); #c1(FCN1) c2(NP_001994) c3(ficolin-1 precursor) c4(122988, 122989, 122990) c5(122991, 122992, 122993, 122994, 122995, 122996, 122997, 122998, 122999, 123000, 123001, 123002, 123003, 123004, 123005, 123006, 123007, 123008) c6( ) c7(y, wz, aYt, aa); #c1(FCN2) c2(NP_004099) c3(ficolin-2 isoform a precursor) c4(143541) c5(143542, 143543, 143544, 143545, 143546, 143547) c6( ) c7(oO, bM, T, hl, JZ, jx, oH, fw, aR, aEl, hX, AW, ga, afm, hb, afn, dV, Os, bsi, hH, vO, af, A, Cw, Y, eH, Pg, eZ, lo, as, eE, t, acD, cm, kT, WO, ac, ig, aDs, WP, U, m, y, xg, bsh, ek); #c1(FCN2) c2(NP_056652) c3(ficolin-2 isoform b precursor) c4(188105) c5(188106, 188107, 188108, 188109, 188110, 188111) c6( ) c7(oO, bM, T, hl, JZ, jx, oH, fw, aR, aEl, hX, AW, ga, afm, hb, afn, dV, Os, bsi, hH, vO, af, A, Cw, Y, eH, Pg, eZ, lo, as, eF, t, acD, cm, kT, WO, ac, ig, aDs, WP, U, m, y, xg, bsh, ek); #c1(FCRL1) c2(NP_001152869) c3(Fc receptor-like protein 1 isoform 2 precursor) c4(60264) c5(60265, 60266, 60267, 60268, 60269, 60270) c6( ) c7(x, Y, k, cj); #c1(FCRL1) c2(NP_001152870) c3(Fc receptor-like protein 1 isoform 3 precursor) c4(60271) c5(60272, 60273, 60274, 60275, 60276, 60277) c6( ) c7(x, Y, k, cj); #c1(FCRL1) c2(NP_443170) c3(Fc receptor-like protein 1 isoform 1 precursor) c4(229716) c5(229717) c6( ) c7(x, Y, k, cj); #c1(FCRL1) c2(XP_011507429) c3(Fc receptor-like protein 1 isoform X3) c4( ) c5(297352, 297353, 297354, 297355, 297356) c6( ) c7(x, Y, k, cj); #c1(FCRL2) c2(NP_001152960) c3(Fc receptor-like protein 2 isoform 2 precursor) c4(60278) c5(60279, 60280, 60281, 60282, 60283, 60284) c6( ) c7(cj); #c1(FCRL2) c2(NP_110391) c3(Fc receptor-like protein 2 isoform 1 precursor) c4(219989) c5(219990, 219991, 219992, 219993, 219994, 219995) c6( ) c7(cj); #c1(FCRL2) c2(XP_006711598) c3(Fc receptor-like protein 2 isoform X7) c4( ) c5(286165, 286166, 286167, 286168, 286169, 286170, 286171, 286172, 286173, 286174, 286175, 286176) c6( ) c7(cj); #c1(FCRL2) c2(XP_011508278) c3(Fc receptor-like protein 2 isoform X3) c4(298972, 298973) c5( ) c6( ) c7(cj); #c1(FCRL2) c2(XP_011508282) c3(Fc receptor-like protein 2 isoform X8) c4(298974) c5(298975, 298976, 298977, 298978, 298979, 298980) c6( ) c7(cj); #c1(FCRL3) c2(XP_006711208) c3(Fc receptor-like protein 3 isoform X1) c4(285771, 285772, 285773) c5(285774, 285775, 285776, 285777, 285778, 285779, 285780, 285781, 285782, 285783, 285784, 285785, 285786, 285787, 285788, 285789, 285790, 285791, 285792, 285793, 285794, 285795) c6( ) c7(bM, hz, cL, OY, bh, V, ai, o, dP, aT, hD, hH, yF, A, zQ, mR, HA, eZ, fe, OC, eU, OW, Lj, cj, oQ, y); #c1(FCRL4) c2(NP_112572) c3(Fc receptor-like protein 4 precursor) c4(221435) c5(221436, 221437, 221438, 221439, 221440, 221441) c6( ) c7(bsj, T, cj, ac, aoH); #c1(FCRL4) c2(XP_011508336) c3(Fc receptor-like protein 4 isoform X1) c4( ) c5(299022) c6( ) c7(bsj, T, cj, ac, aoH); #c1(FCRL5) c2(NP_112571) c3(Fc receptor-like protein 5 isoform 1 precursor) c4(221418, 221419, 221420, 221421, 221422) c5(221423, 221424, 221425, 221426, 221427, 221428, 221429, 221430, 221431, 221432, 221433, 221434) c6( ) c7(T, mR, jh, cj, hD, zn); #c1(FCRL5) c2(XP_011508332) c3(Fc receptor-like protein 5 isoform X1) c4(298997) c5(298998, 298999, 299000, 299001, 299002, 299003) c6( ) c7(T, mR, jh, cj, hD, zn); #c1(FCRL5) c2(XP_011508335) c3(Fc receptor-like protein 5 isoform X4) c4( ) c5(299004, 299005, 299006, 299007, 299008, 299009, 299010, 299011, 299012, 299013, 299014, 299015, 299016, 299017, 299018, 299019, 299020, 299021) c6( ) c7(T, mR, jh, cj, hD, zn); #c1(FCRL6) c2(NP_001271146) c3(Fc receptor-like protein 6 isoform 2) c4( ) c5(103467, 103468, 103469, 103470, 103471, 103472) c6( ) c7(dD, ea, eZ, h, wR, eq, bN); #c1(FCRL6) c2(XP_005245185) c3(Fc receptor-like protein 6 isoform X1) c4(266349) c5( ) c6( ) c7(dD, ea, eZ, h, wR, eq, bN); #c1(FCRL6) c2(XP_005245188) c3(Fc receptor-like protein 6 isoform X5) c4(266350) c5(266351, 266352, 266353, 266354, 266355, 266356) c6( ) c7(dD, ea, eZ, h, wR, eq, bN); #c1(FCRL6) c2(XP_006711355) c3(Fc receptor-like protein 6 isoform X4) c4(285935) c5( ) c6( ) c7(dD, ea, eZ, h, wR, eq, bN); #c1(FCRL6) c2(XP_011507782) c3(Fc receptor-like protein 6 isoform X2) c4( ) c5(297845, 297846, 297847, 297848, 297849, 297850) c6( ) c7(dD, ea, eZ, h, wR, eq, bN); #c1(FCRLA) c2(NP_001171795) c3(Fc receptor-like A isoform 1 precursor) c4(71662, 71663, 71664) c5(71665, 71666, 71667, 71668, 71669, 71670, 71671, 71672, 71673, 71674, 71675, 71676, 71677, 71678, 71679, 71680, 71681, 71682, 71683, 71684, 71685, 71686, 71687, 71688) c6(71689, 71690, 71691, 71692, 71693, 71694) c7(T, fM, Y, cj, hD, ey, cm, y); #c1(FCRLA) c2(NP_001171796) c3(Fc receptor-like A isoform 3 precursor) c4(71695, 71696) c5(71697, 71698, 71699, 71700, 71701, 71702, 71703, 71704, 71705, 71706, 71707, 71708, 71709, 71710, 71711, 71712) c6(71713, 71714, 71715, 71716) c7(T, fM, Y, cj, hD, ey, cm, y); #c1(FCRLA) c2(NP_001171799) c3(Fc receptor-like A isoform 4 precursor) c4(71717, 71718) c5(71719, 71720, 71721, 71722, 71723, 71724, 71725, 71726, 71727, 71728, 71729, 71730, 71731, 71732, 71733, 71734) c6(71735, 71736, 71737, 71738) c7(T, fM, Y, cj, hD, ey, cm, y); #c1(FCRLA) c2(NP_001171800) c3(Fc receptor-like A isoform 7 precursor) c4(71739) c5(71740, 71741, 71742, 71743, 71744, 71745, 71746, 71747, 71748) c6(71749, 71750) c7(T, fM, Y, cj, hD, ey, cm, y); #c1(FCRLA) c2(NP_001171801) c3(Fc receptor-like A isoform 5 precursor) c4(71751) c5(71752, 71753, 71754, 71755, 71756, 71757, 71758, 71759) c6(71760, 71761) c7(T, fM, Y, cj, hD, ey, cm, y); #c1(FCRLA) c2(NP_001171802) c3(Fc receptor-like A isoform 6 precursor) c4(71762, 71763) c5(71764, 71765, 71766, 71767, 71768, 71769, 71770, 71771, 71772, 71773, 71774, 71775, 71776, 71777, 71778, 71779) c6(71780, 71781, 71782, 71783) c7(T, fM, Y, cj, hD, ey, cm, y); #c1(FCRLA) c2(NP_116127) c3(Fc receptor-like A isoform 2 precursor) c4(225447) c5(225448, 225449, 225450, 225451, 225452, 225453, 225454, 225455) c6(225456, 225457) c7(T, fM, Y, cj, hD, ey, cm, y); #c1(FCRLA) c2(XP_011508368) c3(Fc receptor-like A isoform X4) c4(299052) c5(299053, 299054, 299055, 299056, 299057, 299058, 299059, 299060) c6(299061, 299062) c7(T, fM, Y, cj, hD, ey, cm, y); #c1(FCRLB) c2(NP_001275758) c3(Fc receptor-like B isoform 2 precursor) c4(107242) c5(107243, 107244, 107245, 107246, 107247, 107248) c6( ) c7(ac, e, aw, cj, ey, j, cm, eu); #c1(FCRLB) c2(NP_001275759) c3(Fc receptor-like B isoform 3 precursor) c4(107249) c5(107250, 107251, 107252, 107253, 107254, 107255) c6( ) c7(ac, e, aw, cj, ey, j, cm, eu); #c1(FCRLB) c2(NP_001275760) c3(Fc receptor-like B isoform 4 precursor) c4(107256) c5(107257, 107258, 107259, 107260, 107261, 107262) c6( ) c7(ac, e, aw, cj, ey, j, cm, eu); #c1(FCRLB) c2(NP_001275761) c3(Fc receptor-like B isoform 5 precursor) c4(107263) c5(107264, 107265, 107266, 107267, 107268, 107269) c6( ) c7(ac, e, aw, cj, ey, j, cm, eu); #c1(FCRLB) c2(XP_011507495) c3(Fc receptor-like B isoform X1) c4(297393) c5(297394, 297395, 297396, 297397, 297398, 297399, 297400, 297401, 297402, 297403) c6( ) c7(ac, e, aw, cj, ey, j, cm, eu); #c1(FDFT1) c2(NP_001274672) c3(squalene synthase isoform 1) c4(106610, 106611, 106612, 106613, 106614, 106615) c5(106616, 106617, 106618, 106619, 106620, 106621, 106622, 106623, 106624, 106625, 106626, 106627, 106628, 106629, 106630, 106631, 106632, 106633, 106634, 106635, 106636) c6( ) c7(ae, T, mO, cH, iW, e, an, dN, bsk, cu, v, acl, aYT, ei, dQ, g, bz, B, ad, jb); #c1(FDFT1) c2(NP_001274678) c3(squalene synthase isoform 2) c4( ) c5(106637, 106638, 106639, 106640, 106641, 106642, 106643, 106644, 106645, 106646) c6( ) c7(ae, T, mO, cH, iW, e, an, dN, bsk, cu, v, acl, aYT, ei, dQ, g, bz, B, ad, jb); #c1(FDFT1) c2(NP_001274680) c3(squalene synthase isoform 4) c4( ) c5(106647, 106648, 106649, 106650, 106651, 106652, 106653, 106654, 106655, 106656, 106657, 106658, 106659) c6( ) c7(ae, T, mO, cH, iW, e, an, dN, bsk, cu, v, acl, aYT, ei, dQ, g, bz, B, ad, jb); #c1(FDPS) c2(NP_001129293) c3(farnesyl pyrophosphate synthase isoform a) c4(51377) c5(51378, 51379, 51380, 51381, 51382, 51383, 51384, 51385, 51386, 51387) c6( ) c7(T, aE, af, up, bE, FV, X, U, r, bB, cd, v, K, eF, q, bA); #c1(FDPS) c2(NP_001129294) c3(farnesyl pyrophosphate synthase isoform b) c4(51388) c5(51389, 51390, 51391, 51392, 51393, 51394) c6( ) c7(T, aE, af, up, bE, FV, X, U, r, bB, cd, v, K, eF, q, bA); #c1(FDPS) c2(NP_001229754) c3(farnesyl pyrophosphate synthase isoform c) c4( ) c5(85112) c6( ) c7(T, aE, af, up, bE, FV, X, U, r, bB, cd, v, K, eF, q, bA); #c1(FDX1) c2(NP_004100) c3(adrenodoxin, mitochondrial precursor) c4(143548) c5(143549, 143550, 143551, 143552, 143553, 143554) c6( ) c7(ar, gk, al, jN, v, nJ, B, hX); #c1(FDX1L) c2(NP_001026904) c3(adrenodoxin-like protein, mitochondrial precursor) c4(29955, 29956) c5(29957, 29958, 29959, 29960, 29961, 29962, 29963, 29964, 29965, 29966, 29967, 29968) c6( ) c7(aNG, oj); #c1(FDXR) c2(NP_001244941) c3(NADPH:adrenodoxin oxidoreductase, mitochondrial isoform 3 precursor) c4(92349) c5(92350, 92351, 92352, 92353, 92354, 92355, 92356) c6( ) c7(bB, bE, eM, X, gd); #c1(FDXR) c2(NP_001244942) c3(NADPH:adrenodoxin oxidoreductase, mitochondrial isoform 4) c4(92357) c5(92358, 92359, 92360, 92361, 92362, 92363) c6( ) c7(bB, bE, eM, X, gd); #c1(FDXR) c2(NP_001244943) c3(NADPH:adrenodoxin oxidoreductase, mitochondrial isoform 5 precursor) c4(92364) c5(92365, 92366, 92367, 92368, 92369, 92370) c6( ) c7(bB, bE, eM, X, gd); #c1(FDXR) c2(NP_001244944) c3(NADPH:adrenodoxin oxidoreductase, mitochondrial isoform 6 precursor) c4(92371) c5(92372, 92373, 92374, 92375, 92376, 92377) c6( ) c7(bB, bE, eM, X, gd); #c1(FDXR) c2(NP_001244945) c3(NADPH:adrenodoxin oxidoreductase, mitochondrial isoform 7) c4(92378) c5(92379, 92380, 92381, 92382, 92383, 92384) c6( ) c7(bB, bE, eM, X, gd); #c1(FDXR) c2(NP_004101) c3(NADPH:adrenodoxin oxidoreductase, mitochondrial isoform 2 precursor) c4(143555) c5(143556, 143557, 143558, 143559, 143560, 143561, 143562, 143563, 143564, 143565) c6( ) c7(bB, bE, eM, X, gd); #c1(FDXR) c2(XP_011522832) c3(NADPH:adrenodoxin oxidoreductase, mitochondrial isoform X5) c4( ) c5(317328, 317329, 317330, 317331, 317332) c6( ) c7(bB, bE, eM, X, gd); #c1(FDXR) c2(XP_011522835) c3(NADPH:adrenodoxin oxidoreductase, mitochondrial isoform X8) c4(317333) c5( ) c6( ) c7(bB, bE, eM, X, gd); #c1(FECH) c2(NP_000131) c3(ferrochelatase, mitochondrial isoform b precursor) c4(2880) c5(2881, 2882, 2883, 2884, 2885, 2886) c6( ) c7(T, QW, bsl, bs, bB, n, ci, nE, q, br, eA, yw, nl, oW, aT, dV, dz, aMC, d, et, aW, hl, nh, KX, dq, CE, bw, bmj, dr, bsm, OC, aBr, iT, bE, QV); #c1(FECH) c2(NP_001012533) c3(ferrochelatase, mitochondrial isoform a precursor) c4(25087) c5(25088, 25089, 25090, 25091, 25092, 25093) c6( ) c7(T, QW, bsl, bs, bB, n, ci, nE, q, br, eA, yw, nl, oW, aT, dV, dz, aMC, d, et, aW, hl, nh, KX, dq, CE, bw, bmj, dr, bsm, OC, aBr, iT, bE, QV); #c1(FEM1A) c2(NP_061178) c3(protein fem-1 homolog A) c4(199789) c5(199790, 199791, 199792, 199793, 199794, 199795, 199796) c6( ) c7(aZ, kl, dD, eg, bv); #c1(FEM1B) c2(NP_056137) c3(protein fem-1 homolog 8) c4(185895) c5(185896, 185897, 185898, 185899, 185900, 185901) c6( ) c7(bL, T, dD, kl, bE, aZ, bB, eq); #c1(FEM1C) c2(NP_064562) c3(protein fem-1 homolog C) c4(202983) c5(202984, 202985, 202986, 202987, 202988, 202989) c6( ) c7(aZ, kl, bv); #c1(FEN1) c2(NP_004102) c3(flap endonuclease 1) c4(143566, 143567) c5(143568, 143569, 143570, 143571, 143572, 143573, 143574, 143575, 143576, 143577, 143578, 143579) c6( ) c7(T, hy, j, V, q, eA, ad, av, aT, ae, B, BN, wr, aW, eZ, r, La, cl, bz, dR, bF, rR, gX, bD, ne); #c1(FER) c2(NP_005237) c3(tyrosine-protein kinase Fer) c4(154303, 154304) c5(154305, 154306, 154307, 154308, 154309, 154310, 154311) c6( ) c7(adu, ae, T, x, bF, eM, fe, k, ei, bt, Bh, B, ad); #c1(FER) c2(XP_011541580) c3(tyrosine-protein kinase Fer isoform X8) c4(340111) c5(340112, 340113, 340114, 340115, 340116, 340117) c6( ) c7(adu, ae, T, x, bF, eM, fe, k, ei, bt, Bh, B, ad); #c1(FERD3L) c2(NP_690862) c3(fer3-like protein) c4(244991) c5(244992, 244993, 244994, 244995, 244996, 244997) c6( ) c7(aw, fq, cd, ac); #c1(FERMT1) c2(NP_060141) c3(fermitin family homolog 1) c4(194392, 194393, 194394, 194395) c5(194396, 194397, 194398, 194399, 194400, 194401, 194402, 194403, 194404, 194405, 194406, 194407, 194408, 194409, 194410, 194411, 194412, 194413, 194414, 194415, 194416, 194417, 194418, 194419) c6( ) c7(T, yk, bB, b, no, aE, nl, aT, dL, ji, K, lQ, bsn, eL, Us, li, aW, ff, nh, fe, arK, en, iV, arJ, bz, dr, bE, iu); #c1(FERMT2) c2(NP_001128471) c3(fermitin family homolog 2 isoform 2) c4(50012) c5(50013, 50014, 50015, 50016, 50017, 50018, 50019, 50020, 50021, 50022) c6( ) c7(T, aA, bB, v, ad, hW, aT, By, dL, K, ae, aW, arK, kp, aF, arJ, op, bE, vA, dy, Hb, it); #c1(FERMT2) c2(NP_001128472) c3(fermitin family homolog 2 isoform 3) c4(50023) c5(50024, 50025, 50026, 50027, 50028, 50029, 50030, 50031, 50032, 50033, 50034, 50035) c6( ) c7(T, aA, bB, v, ad, hW, aT, By, dL, K, ae, aW, arK, kp, aF, arJ, op, bE, vA, dy, Hb, it); #c1(FERMT2) c2(NP_006823) c3(fermitin family homolog 2 isoform 1) c4(168427, 168428) c5(168429, 168430, 168431, 168432, 168433, 168434, 168435, 168436, 168437, 168438) c6( ) c7(T, aA, bB, v, ad, hW, aT, By, dL, K, ae, aW, arK, kp, aF, arJ, op, bE, vA, dy, Hb, it); #c1(FERMT3) c2(NP_113659) c3(fermitin family homolog 3 short form) c4(221982, 221983) c5(221984, 221985, 221986, 221987, 221988, 221989, 221990, 221991, 221992, 221993, 221994, 221995) c6( ) c7(xu, hW, op, oV, zs, vA, bE, bfM, bB, arK, arJ, dr); #c1(FERMT3) c2(XP_011543596) c3(fermitin family homolog 3 isoform X1) c4(342615) c5(342616, 342617, 342618, 342619, 342620, 342621) c6( ) c7(xu, hW, op, oV, zs, vA, bE, bfM, bB, arK, arJ, dr); #c1(FES) c2(NP_001137257) c3(tyrosine-protein kinase Fes/Fps isoform 4) c4(55173, 55174, 55175) c5(55176, 55177, 55178, 55179, 55180, 55181, 55182, 55183, 55184, 55185, 55186, 55187, 55188, 55189, 55190, 55191, 55192, 55193, 55194, 55195, 55196, 55197) c6( ) c7(AX, ck, af, iT, Y, oe, iK, ew, r, cz, gl, v, ci, K, hf, bw, bt, bz, q); #c1(FES) c2(NP_001996) c3(tyrosine-protein kinase Fes/Fps isoform 1) c4(123009) c5(123010, 123011123012, 123013, 123014, 123015, 123016, 123017, 123018, 123019, 123020) c6( ) c7(AX, ck, af, iT, Y, oe, iK, ew, r, cz, gl, v, ci, K, hf, bw, bt, bz, q); #c1(FES) c2(XP_005254937) c3(tyrosine-protein kinase Fes/Fps isoform X1) c4(273380) c5(273381, 273382, 273383, 273384, 273385, 273386) c6( ) c7(AX, ck, af, iT, Y, oe, iK, ew, r, cz, gl, v, ci, K, hf, bw, bt, bz, q); #c1(FES) c2(XP_005254939) c3(tyrosine-protein kinase Fes/Fps isoform X2) c4(273387, 273388, 273389, 273390, 273391) c5(273392, 273393, 273394, 273395, 273396, 273397, 273398, 273399, 273400, 273401, 273402, 273403, 273404, 273405, 273406, 273407, 273408, 273409, 273410, 273411, 273412, 273413, 273414, 273415, 273416) c6( ) c7(AX, ck, af, iT, Y, oe, iK, ew, r, cz, gl, v, ci, K, hf, bw, bt, bz, q); #c1(FES) c2(XP_011519662) c3(tyrosine-protein kinase Fes/Fps isoform X3) c4(314332) c5(314333, 314334, 314335, 314336, 314337, 314338) c6( ) c7(AX, ck, af, iT, Y, oe, iK, ew, r, cz, gl, v, ci, K, hf, bw, bt, bz, q); #c1(FEV) c2(NP_059991) c3(protein FEV) c4(193538) c5(193539, 193540, 193541, 193542, 193543, 193544, 193545, 193546) c6( ) c7(bM, am, aDy, df, bS, j, ct, pM, bv, bW, aT, cU, bl, K, Cy, dx, aa, ajV, Nr, sp, ap, Xm, EZ, Z, bz, DF, hq, Nq, TA, cT, aDu, cA, aCT, z, bjL, at, mf, aZo, afp); #c1(FEZ1) c2(NP_005094) c3(fasciculation and elongation protein zeta-1 isoform 1) c4(152844, 152845) c5(152846, 152847, 152848, 152849, 152850, 152851) c6( ) c7(ck, T, id, aW, eL, AQ, ff, aT, gl, dL, bK, ci, en, Tp, aF, he, bz, ad); #c1(FEZ1) c2(NP_072043) c3(fasciculation and elongation protein zeta-1 isoform 2) c4( ) c5(212429, 212430, 212431, 212432, 212433, 212434, 212435, 212436, 212437, 212438) c6( ) c7(ck, T, id, aW, eL, AQ, ff, aT, gl, dL, bK, ci, en, Tp, aF, he, bz, ad); #c1(FEZ2) c2(NP_001036013) c3(fasciculation and elongation protein zeta-2 isoform 2) c4(33700) c5(33701, 33702, 33703, 33704, 33705, 33706) c6( ) c7(j); #c1(FEZ2) c2(NP_005093) c3(fasciculation and elongation protein zeta-2 isoform 1) c4(152830, 152831) c5(152832, 152833, 152834, 152835, 152836, 152837, 152838, 152839, 152840, 152841, 152842, 152843) c6( ) c7(j); #c1(FEZF1) c2(NP_001019784) c3(fez family zinc finger protein 1 isoform 1) c4(27826, 27827, 27828) c5(27829, 27830, 27831, 27832, 27833, 27834, 27835, 27836, 27837, 27838, 27839, 27840) c6( ) c7(T, aF, yn, bN, aA); #c1(FEZF1) c2(NP_001153736) c3(fez family zinc finger protein 1 isoform 2) c4(60951) c5(60952, 60953, 60954, 60955, 60956, 60957, 60958, 60959, 60960, 60961, 60962, 60963, 60964) c6( ) c7(T, aF, yn, bN, aA); #c1(FEZF2) c2(NP_060478) c3(fez family zinc finger protein 2) c4(196140) c5(196141, 196142, 196143, 196144, 196145, 196146, 196147, 196148, 196149, 196150, 196151) c6( ) c7(QK); #c1(FEZF2) c2(XP_011532183) c3(fez family zinc finger protein 2 isoform X1) c4( ) c5(328228, 328229, 328230, 328231) c6( ) c7(QK); #c1(FFAR1) c2(NP_005294) c3(free fatty acid receptor 1) c4(154740) c5(154741, 154742, 154743, 154744, 154745, 154746) c6( ) c7(bL, T, mj, aW, AR, fc, aT, blg, mf, aj, v, cP, cm, J); #c1(FFAR2) c2(NP_005297) c3(free fatty acid receptor 2) c4(154757) c5(154758, 154759, 154760, 154761, 154762, 154763) c6( ) c7(nO, dq, T, e, v); #c1(FFAR3) c2(NP_005295) c3(free fatty acid receptor 3) c4( ) c5(154747, 154748, 154749, 154750, 154751, 154752, 154753, 154754, 154755, 154756) c6( ) c7(v); #c1(FFAR3) c2(XP_011525160) c3(free fatty acid receptor 3 isoform X1) c4(319608, 319609) c5(319610, 319611) c6( ) c7(v); #c1(FFAR4) c2(NP_001182684) c3(free fatty acid receptor 4 isoform GPR120-S) c4(75147) c5(75148, 75149, 75150, 75151, 75152, 75153) c6( ) c7(bL, T, cF, fc, aj, bso, v, q, J); #c1(FFAR4) c2(NP_859529) c3(free fatty acid receptor 4 isoform GPR120-L) c4(255543) c5(255544, 255545, 255546, 255547, 255548, 255549) c6( ) c7(bL, T, cF, fc, aj, bso, v, q, J); #c1(FGA) c2(NP_000499) c3(fibrinogen alpha chain isoform alpha-E preproprotein) c4(10307) c5(10308, 10309, 10310, 10311, 10312, 10313, 10314, 10315, 10316, 10317, 10318, 10319, 10320, 10321, 10322, 10323, 10324, 10325, 10326, 10327, 10328, 10329, 10330, 10331, 10332, 10333, 10334, 10335, 10336, 10337, 10338, 10339, 10340, 10341, 10342, 10343, 10344, 10345, 10346, 10347, 10348, 10349, 10350, 10351, 10352, 10353, 10354, 10355, 10356, 10357, 10358, 10359, 10360, 10361, 10362, 10363, 10364, 10365, 10366, 10367, 10368, 10369, 10370, 10371, 10372, 10373, 10374, 10375, 10376, 10377, 10378, 10379, 10380, 10381, 10382, 10383, 10384, 10385, 10386, 10387, 10388, 10389, 10390, 10391, 10392, 10393, 10394, 10395, 10396, 10397, 10398, 10399, 10400, 10401, 10402, 10403, 10404, 10405, 10406, 10407, 10408, 10409, 10410, 10411, 10412, 10413, 10414, 10415, 10416, 10417, 10418, 10419, 10420, 10421, 10422, 10423, 10424, 10425, 10426, 10427, 10428, 10429, 10430, 10431, 10432, 10433, 10434, 10435, 10436, 10437, 10438, 10439, 10440, 10441, 10442, 10443, 10444, 10445, 10446, 10447, 10448, 10449, 10450, 10451, 10452) c6(10453) c7(P, bL, dD, ahf, aXW, qb, fV, ea, e, aw, cz, vr, v, j, ah, C, eq, av, dY, jk, bsp, M, cy, bq, bsq, amO, af, bA, bpU, eu, bsr, hJ, cm, eK, aUF, ar, W, ac, ag, E, Km, aS, R, dy, lC, aLL); #c1(FGA) c2(NP_068657) c3(fibrinogen alpha chain isoform alpha preproprotein) c4(209934, 209935, 209936, 209937, 209938) c5(209939, 209940, 209941, 209942, 209943, 209944, 209945, 209946, 209947, 209948, 209949, 209950, 209951) c6( ) c7(P, bL, dD, ahf, aXW, qb, fV, ea, e, aw, cz, vr, v, j, ah, C, eq, av, dY, jk, bsp, M, cy, bq, bsq, amO, af, bA, bpU, eu, bsr, hJ, cm, eK, aUF, ar, W, ac, ag, E, Km, aS, R, dy, lC, aLL); #c1(FGB) c2(NP_005132) c3(fibrinogen beta chain isoform 1 preproprotein) c4(153127, 153128) c5(153129, 153130, 153131, 153132, 153133, 153134, 153135, 153136, 153137, 153138, 153139, 153140, 153141, 153142, 153143, 153144, 153145, 153146, 153147, 153148, 153149, 153150, 153151, 153152, 153153, 153154, 153155, 153156, 153157, 153158, 153159, 153160, 153161, 153162, 153163, 153164, 153165, 153166, 153167, 153168, 153169, 153170, 153171, 153172, 153173, 153174, 153175, 153176, 153177, 153178, 153179, 153180, 153181, 153182, 153183, 153184, 153185, 153186, 153187, 153188, 153189, 153190, 153191, 153192, 153193, 153194, 153195, 153196, 153197, 153198, 153199, 153200, 153201, 153202, 153203, 153204, 153205, 153206, 153207, 153208, 153209, 153210, 153211, 153212, 153213, 153214, 153215, 153216, 153217, 153218, 153219, 153220, 153221, 153222, 153223, 153224, 153225, 153226, 153227, 153228, 153229, 153230, 153231, 153232, 153233, 153234, 153235, 153236, 153237, 153238, 153239, 153240, 153241, 153242, 153243, 153244, 153245, 153246, 153247, 153248, 153249, 153250, 153251, 153252, 153253, 153254, 153255, 153256, 153257, 153258, 153259, 153260, 153261, 153262, 153263, 153264, 153265, 153266, 153267, 153268, 153269, 153270, 153271, 153272, 153273, 153274, 153275, 153276, 153277, 153278) c6( ) c7(bL, sY, dD, aSz, aFe, eR, qb, ea, wL, oe, e, aw, cz, cR, oR, vr, v, j, eq, C, aY, mC, Tz, TB, dY, vh, vC, rS, jk, M, cy, an, af, eu, hm, sj, bA, eZ, fe, cM, aVc, uC, pb, eK, ar, kT, sn, c, W, ac, ag, vb, aFb, lf, sG, at, sU, te, tz, aS, fL, dy, uz, pw, lC, ei, eo, wx, y, aLL); #c1(FGD1) c2(NP_004454) c3(FYVE, RhoGEF and PH domain-containing protein 1) c4(146446) c5(146447, 146448, 146449, 146450, 146451, 146452, 146453) c6( ) c7(aK, xb, aW, eF, eH, Az, afU, aT, nf, K, hK, aOV, dr); #c1(FGD2) c2(NP_775829) c3(FYVE, RhoGEF and PH domain-containing protein 2) c4(250460, 250461) c5(250462, 250463, 250464, 250465, 250466, 250467, 250468) c6( ) c7(fe); #c1(FGD2) c2(XP_011512676) c3(FYVE, RhoGEF and PH domain-containing protein 2 isoform X7) c4( ) c5(303688, 303689, 303690, 303691, 303692) c6( ) c7(fe); #c1(FGD3) c2(NP_001077005) c3(FYVE, RhoGEF and PH domain-containing protein 3 isoform a) c4(37587, 37588) c5(37589, 37590, 37591, 37592, 37593, 37594, 37595, 37596, 37597, 37598, 37599, 37600, 37601, 37602, 37603, 37604) c6( ) c7(hd, afU); #c1(FGD3) c2(NP_001273922) c3(FYVE, RhoGEF and PH domain-containing protein 3 isoform b) c4(105896) c5(105897, 105898, 105899, 105900, 105901, 105902) c6( ) c7(hd, afU); #c1(FGD4) c2(NP_001291409) c3(FYVE, RhoGEF and PH domain-containing protein 4 isoform 1) c4(115936, 115937) c5(115938, 115939, 115940, 115941, 115942, 115943, 115944, 115945, 115946, 115947, 115948, 115949, 115950) c6( ) c7(ac, Rz, Pt, agU, fu, bU, fq, bss, sj); #c1(FGD4) c2(NP_001291410) c3(FYVE, RhoGEF and PH domain-containing protein 4 isoform 2) c4(115951) c5(115952, 115953, 115954, 115955, 115956, 115957) c6( ) c7(ac, Rz, Pt, agU, fu, bU, fq, bss, sj); #c1(FGD4) c2(NP_001291412) c3(FYVE, RhoGEF and PH domain-containing protein 4 isoform 4) c4(115964) c5(115965, 115966, 115967, 115968, 115969, 115970, 115971, 115972, 115973, 115974, 115975) c6( ) c7(ac, Rz, Pt, agU, fu, bU, fq, bss, sj); #c1(FGD4) c2(XP_005253361) c3(FYVE, RhoGEF and PH domain-containing protein 4 isoform X2) c4(272442) c5(272443, 272444, 272445, 272446, 272447, 272448) c6( ) c7(ac, Rz, Pt, agU, fu, bU, fq, bss, sj); #c1(FGD4) c2(XP_011518856) c3(FYVE, RhoGEF and PH domain-containing protein 4 isoform X3) c4(313204) c5( ) c6( ) c7(ac, Rz, Pt, agU, fu, bU, fq, bss, sj); #c1(FGD4) c2(XP_011518858) c3(FYVE, RhoGEF and PH domain-containing protein 4 isoform X1) c4(313205, 313206) c5(313207, 313208, 313209, 313210, 313211, 313212, 313213, 313214, 313215, 313216, 313217) c6( ) c7(ac, Rz, Pt, agU, fu, bU, fq, bss, sj); #c1(FGD4) c2(XP_011518860) c3(FYVE, RhoGEF and PH domain-containing protein 4 isoform X6) c4( ) c5(313218) c6( ) c7(ac, Rz, Pt, agU, fu, bU, fq, bss, sj); #c1(FGD5) c2(NP_689749) c3(FYVE, RhoGEF and PH domain-containing protein 5) c4(243841) c5(243842, 243843, 243844, 243845, 243846, 243847) c6( ) c7(aT); #c1(FGD5) c2(XP_011531724) c3(FYVE, RhoGEF and PH domain-containing protein 5 isoform X1) c4( ) c5(327815) c6( ) c7(aT); #c1(FGD5) c2(XP_011531726) c3(FYVE, RhoGEF and PH domain-containing protein 5 isoform X3) c4(327816) c5(327817, 327818, 327819, 327820, 327821, 327822, 327823) c6( ) c7(aT); #c1(FGD6) c2(NP_060821) c3(FYVE, RhoGEF and PH domain-containing protein 6) c4(197986, 197987, 197988) c5(197989, 197990, 197991, 197992, 197993, 197994, 197995, 197996, 197997, 197998, 197999, 198000, 198001, 198002, 198003, 198004, 198005, 198006) c6( ) c7(j); #c1(FGF1) c2(NP_001244139) c3(fibroblast growth factor 1 isoform 1 precursor) c4(91980, 91981, 91982) c5(91983, 91984, 91985, 91986, 91987, 91988, 91989, 91990, 91991, 91992, 91993, 91994, 91995, 91996, 91997, 91998, 91999, 92000, 92001, 92002, 92003, 92004, 92005, 92006, 92007, 92008, 92009, 92010, 92011, 92012, 92013, 92014, 92015, 92016, 92017, 92018, 92019) c6( ) c7(sY, T, dD, Js, pf, ea, fG, qx, fg, cz, fd, v, j, ci, eq, sl, Vh, eA, ad, eJ, wD, dP, av, Na, ft, F, ib, Rq, rw, aT, FN, lG, cy, us, dL, K, Dz, Nc, ae, af, eu, WZ, eL, LC, Y, aW, vj, eH, hp, g, eF, t, uC, bw, op, ck, iQ, ac, bP, U, gZ, m, y, bt, Jo); #c1(FGF1) c2(NP_149127) c3(fibroblast growth factor 1 isoform 2 precursor) c4(227342) c5(227343, 227344, 227345, 227346, 227347) c6( ) c7(sY, T, dD, Js, pf, ea, fG, qx, fg, cz, fd, v, j, ci, eq, sl, Vh, eA, ad, eJ, wD, dP, av, Na, ft, F, ib, Rq, rw, aT, FN, lG, cy, us, dL, K, Dz, Nc, ae, af, eu, WZ, eL, LC, Y, aW, vj, eH, hp, g, eF, t, uC, bw, op, ck, iQ, ac, bP, U, gZ, m, y, bt, Jo); #c1(FGF1) c2(XP_005268447) c3(fibroblast growth factor 1 isoform X2) c4(281812) c5(281813, 281814, 281815, 281816, 281817, 281818, 281819, 281820, 281821) c6( ) c7(sY, T, dD, Js, pf, ea, fG, qx, fg, cz, fd, v, j, ci, eq, sl, Vh, eA, ad, eJ, wD, dP, av, Na, ft, F, ib, Rq, rw, aT, FN, lG, cy, us, dL, K, Dz, Nc, ae, af, eu, WZ, eL, LC, Y, aW, vj, eH, hp, g, eF, t, uC, bw, op, ck, iQ, ac, bP, U, gZ, m, y, bt, Jo); #c1(FGF1) c2(XP_011535910) c3(fibroblast growth factor 1 isoform X1) c4(333170) c5(333171, 333172, 333173, 333174, 333175, 333176) c6( ) c7(sY, T, dD, Js, pf, ea, fG, qx, fg, cz, fd, v, j, ci, eq, sl, Vh, eA, ad, eJ, wD, dP, av, Na, ft, F, ib, Rq, rw, aT, FN, lG, cy, us, dL, K, Dz, Nc, ae, af, eu, WZ, eL, LC, Y, aW, vj, eH, hp, g, eF, t, uC, bw, op, ck, iQ, ac, bP, U, gZ, m, y, bt, Jo); #c1(FGF10) c2(XP_005248321) c3(fibroblast growth factor ID isoform X1) c4(268303, 268304) c5(268305, 268306, 268307, 268308, 268309, 268310, 268311, 268312, 268313, 268314, 268315, 268316, 268317) c6( ) c7(T, aC, bsy, bsv, bsu, bsx, ci, adg, zP, ad, bsz, Na, aE, Ig, aT, Nc, bsA, aW, vj, yL, Pp, cl, bz, bst, II, Be, bhl, bD, bsw, bmY); #c1(FGF11) c2(NP_004103) c3(fibroblast growth factor 11 isoform 1) c4(143580) c5(143581, 143582, 143583, 143584, 143585, 143586, 143587) c6( ) c7(ajM); #c1(FGF12) c2(NP_004104) c3(fibroblast growth factor 12 isoform 2) c4(143588, 143589) c5(143590, 143591, 143592, 143593, 143594, 143595, 143596, 143597, 143598, 143599, 143600, 143601, 143602, 143603, 143604, 143605, 143606, 143607, 143608, 143609, 143610, 143611, 143612, 143613, 143614, 143615, 143616) c6( ) c7(ajM, ff, an, en, aOX); #c1(FGF12) c2(NP_066360) c3(fibroblast growth factor 12 isoform 1) c4(207195, 207196) c5(207197, 207198, 207199, 207200, 207201, 207202, 207203) c6( ) c7(ajM, ff, an, en, aOX); #c1(FGF13) c2(NP_001132970) c3(fibroblast growth factor 13 isoform 4) c4(52734) c5(52735, 52736, 52737, 52738, 52739, 52740, 52741) c6( ) c7(lD, bM, T, aC, pf, ea, if, bO, ci, Vp, aE, K, hu, eL, li, eG, LC, aW, g, eF, cm, zV, iP, eM, nB, AM, vA, nw, m, bsB, ik, dD, ht, n, aj, ct, nA, qN, eW, amB, ft, Nn, h, eV, aq, op, W, Be, hR, B, AB, fM, wj, eX, aA, cR, v, amC, q, J, eA, mj, aT, cy, jj, bau, ae, af, s, iU, Y, r, lo, t, iK, Vn, rR, kP, dy, auN, bt, yv, jh, bS, eq, ad, BY, dP, hd, ib, WZ, d, lR, eH, nf, aF, Z, bsC, MJ, lC, y); #c1(FGF13) c2(NP_001132974) c3(fibroblast growth factor 13 isoform 3) c4( ) c5(52742, 52743, 52744, 52745, 52746, 52747, 52748, 52749, 52750, 52751) c6( ) c7(lD, bM, T, aC, pf, ea, if, bO, ci, Vp, aE, K, hu, eL, li, eG, LC, aW, g, eF, cm, zV, iP, eM, nB, AM, vA, nw, m, bsB, ik, dD, ht, n, aj, ct, nA, qN, eW, amB, ft, Nn, h, eV, aq, op, W, Be, hR, B, AB, fM, wj, eX, aA, cR, v, amC, q, J, eA, mj, aT, cy, jj, bau, ae, af, s, iU, Y, r, lo, t, iK, Vn, rR, kP, dy, auN, bt, yv, jh, bS, eq, ad, BY, dP, hd, ib, WZ, d, lR, eH, nf, aF, Z, bsC, MJ, lC, y); #c1(FGF13) c2(NP_004105) c3(fibroblast growth factor 13 isoform 1) c4(143617) c5(143618, 143619, 143620, 143621, 143622, 143623, 143624) c6( ) c7(lD, bM, T, aC, pf, ea, if, bO, ci, Vp, aE, K, hu, eL, li, eG, LC, aW, g, eF, cm, zV, iP, eM, nB, AM, vA, nw, m, bsB, ik, dD, ht, n, aj, ct, nA, qN, eW, amB, ft, Nn, h, eV, aq, op, W, Be, hR, B, AB, fM, wj, eX, aA, cR, v, amC, q, J, eA, mj, aT, cy, jj, bau, ae, af, s, iU, Y, r, lo, t, iK, Vn, rR, kP, dy, auN, bt, yv, jh, bS, eq, ad, BY, dP, hd, ib, WZ, d, lR, eH, nf, aF, Z, bsC, MJ, lC, y); #c1(FGF13) c2(NP_378668) c3(fibroblast growth factor 13 isoform 5) c4(228941) c5(228942, 228943, 228944, 228945, 228946, 228947, 228948) c6( ) c7(lD, bM, T, aC, pf, ea, if, bO, ci, Vp, aE, K, hu, eL, li, eG, LC, aW, g, eF, cm, zV, iP, eM, nB, AM, vA, nw, m, bsB, ik, dD, ht, n, aj, ct, nA, qN, eW, amB, ft, Nn, h, eV, aq, op, W, Be, hR, B, AB, fM, wj, eX, aA, cR, v, amC, q, J, eA, mj, aT, cy, jj, bau, ae, af, s, iU, Y, r, lo, t, iK, Vn, rR, kP, dy, auN, bt, yv, jh, bS, eq, ad, BY, dP, hd, ib, WZ, d, lR, eH, nf, aF, Z, bsC, MJ, lC, y); #c1(FGF13) c2(XP_005262456) c3(fibroblast growth factor 13 isoform X1) c4(277930, 277931, 277932, 277933, 277934, 277935) c5(277936, 277937, 277938, 277939, 277940, 277941, 277942, 277943, 277944, 277945, 277946, 277947, 277948, 277949, 277950, 277951, 277952, 277953, 277954, 277955, 277956, 277957, 277958, 277959, 277960, 277961, 277962) c6( ) c7(lD, bM, T, aC, pf, ea, if, bO, ci, Vp, aE, K, hu, eL, li, eG, LC, aW, g, eF, cm, zV, iP, eM, nB, AM, vA, nw, m, bsB, ik, dD, ht, n, aj, ct, nA, qN, eW, amB, ft, Nn, h, eV, aq, op, W, Be, hR, B, AB, fM, wj, eX, aA, cR, v, amC, q, J, eA, mj, aT, cy, jj, bau, ae, af, s, iU, Y, r, lo, t, iK, Vn, rR, kP, dy, auN, bt, yv, jh, bS, eq, ad, BY, dP, hd, ib, WZ, d, lR, eH, nf, aF, Z, bsC, MJ, lC, y); #c1(FGF13) c2(XP_011529617) c3(fibroblast growth factor 13 isoform X2) c4( ) c5(325143, 325144) c6( ) c7(lD, bM, T, aC, pf, ea, if, bO, ci, Vp, aE, K, hu, eL, li, eG, LC, aW, g, eF, cm, zV, iP, eM, nB, AM, vA, nw, m, bsB, ik, dD, ht, n, aj, ct, nA, qN, eW, amB, ft, Nn, h, eV, aq, op, W, Be, hR, B, AB, fM, wj, eX, aA, cR, v, amC, q, J, eA, mj, aT, cy, jj, bau, ae, af, s, iU, Y, r, lo, t, iK, Vn, rR, kP, dy, auN, bt, yv, jh, bS, eq, ad, BY, dP, hd, ib, WZ, d, lR, eH, nf, aF, Z, bsC, MJ, lC, y); #c1(FGF14) c2(NP_004106) c3(fibroblast growth factor 14 isoform 1A) c4(143625) c5(143626, 143627, 143628, 143629, 143630, 143631, 143632) c6( ) c7(ky, kB, hb, bsD, rf, yZ, bsE, ajM, Ea, xg, cd, aRo); #c1(FGF14) c2(NP_787125) c3(fibroblast growth factor 14 isoform 1B) c4(252135) c5(252136, 252137, 252138, 252139, 252140, 252141, 252142) c6( ) c7(ky, kB, hb, bsD, rf, yZ, bsE, ajM, Ea, xg, cd, aRo); #c1(FGFIG) c2(NP_003859) c3(fibroblast growth factor IG) c4(141565, 141566) c5(141567, 141568, 141569, 141570, 141571, 141572, 141573) c6( ) c7(T, yt, qK, bsF, m, t); #c1(FGF17) c2(NP_001291407) c3(fibroblast growth factor 17 isoform 2 precursor) c4(115924) c5(115925, 115926, 115927, 115928, 115929, 115930, 115931, 115932) c6(115933, 115934) c7(G, bsG, aW, aT, Xr, ae, B, ad); #c1(FGF17) c2(NP_003858) c3(fibroblast growth factor 17 isoform 1 precursor) c4(141553) c5(141554, 141555, 141556, 141557, 141558, 141559, 141560, 141561, 141562) c6(141563, 141564) c7(G, bsG, aW, aT, Xr, ae, B, ad); #c1(FGF18) c2(NP_003853) c3(fibroblast growth factor 18 precursor) c4(141427, 141428) c5(141429, 141430, 141431, 141432, 141433, 141434, 141435, 141436, 141437, 141438, 141439, 141440, 141441, 141442, 141443, 141444, 141445, 141446, 141447, 141448, 141449, 141450, 141451, 141452, 141453, 141454, 141455, 141456, 141457, 141458, 141459, 141460, 141461, 141462, 141463, 141464, 141465, 141466, 141467, 141468, 141469, 141470, 141471, 141472, 141473, 141474, 141475, 141476, 141477, 141478, 141479, 141480, 141481, 141482, 141483, 141484, 141485, 141486, 141487, 141488, 141489, 141490, 141491, 141492, 141493, 141494, 141495, 141496, 141497, 141498, 141499, 141500, 141501, 141502, 141503, 141504, 141505, 141506, 141507, 141508, 141509, 141510, 141511, 141512, 141513, 141514, 141515, 141516, 141517, 141518, 141519, 141520, 141521, 141522) c6(141523) c7(kl, B, bE, Y, oe, X, wk, U, r, bB, Nc, nw, iJ, K, nC, fq, q); #c1(FGF19) c2(NP_005108) c3(fibroblast growth factor 19 precursor) c4(152956) c5(152957, 152958, 152959, 152960, 152961, 152962, 152963) c6( ) c7(T, aZ, al, bB, aj, v, J, ad, bsH, h, ji, ae, kl, B, ev, dq, aq, kp, iR, fq, GR, jq, gk, bE, mg, it, X); #c1(FGF2) c2(NP_001997) c3(fibroblast growth factor 2) c4(123021, 123022) c5(123023, 123024, 123025, 123026, 123027, 123028, 123029) c6( ) c7(oO, bM, G, T, lD, aC, pf, ea, if, al, bO, fd, bB, qj, ci, lR, DB, pC, amW, aDl, ip, x, Vp, Na, aE, rw, Qk, iv, K, hu, DY, eL, cp, li, eG, yo, Jl, LC, aW, LZ, g, as, eF, ir, uC, cm, zV, iP, yX, qJ, y, eM, nB, AM, iA, vA, vy, cj, sv, nw, m, bsB, fy, ik, iu, de, FW, dD, lT, aw, ht, qy, n, aj, fr, ct, uE, qN, cd, asS, El, ai, eW, amB, ft, amJ, kl, Nn, Cf, h, lG, eV, dL, vx, bsL, dx, Dg, bsK, A, fQ, aq, fe, yq, cM, op, W, bP, dB, eD, wk, bsO, mg, Be, hL, hR, at, pg, it, B, bL, AB, fM, dA, wj, fG, nx, eX, bsN, aA, cR, cz, hy, v, j, amC, q, J, eA, xx, aHu, qK, HC, aT, cy, dz, rO, rD, Nc, bq, bau, ae, af, dl, bA, jf, s, iU, xR, Y, bsl, r, cu, lo, en, hf, cl, t, iK, bQ, pb, Vn, ck, sS, rR, kP, c, Dy, wg, wO, nM, iQ, dy, oX, auN, bt, Mj, yv, hS, sY, kh, id, acv, pY, aD, Cl, iW, jh, bS, dG, ah, eq, bsM, Fc, ad, wD, BY, Jm, dP, hd, F, ib, oW, Dj, aNR, uD, adx, nJ, WZ, Dl, d, BN, lR, IU, cW, ff, eH, aF, iV, Z, jb, bz, wW, eK, LB, es, D, pu, pc, Uj, bE, MJ, aS, GF, lC, ne, us, bsJ); #c1(FGF20) c2(NP_062825) c3(fibroblast growth factor 20) c4(202160, 202161) c5(202162, 202163, 202164, 202165, 202166, 202167, 202168, 202169, 202170, 202171) c6( ) c7(bsP, T, s, fe, an, GB); #c1(FGF21) c2(XP_005258788) c3(fibroblast growth factor 21 isoform X1) c4(275734) c5(275735, 275736, 275737, 275738, 275739, 275740, 275741, 275742, 275743, 275744, 275745, 275746, 275747, 275748, 275749, 275750, 275751, 275752, 275753, 275754, 275755, 275756, 275757, 275758, 275759, 275760, 275761, 275762, 275763, 275764, 275765, 275766, 275767, 275768, 275769, 275770, 275771, 275772, 275773, 275774, 275775, 275776, 275777, 275778, 275779, 275780, 275781, 275782, 275783, 275784, 275785, 275786, 275787, 275788, 275789, 275790, 275791, 275792, 275793, 275794, 275795, 275796, 275797, 275798, 275799, 275800, 275801, 275802, 275803, 275804, 275805, 275806, 275807, 275808, 275809, 275810, 275811, 275812, 275813, 275814, 275815, 275816, 275817, 275818, 275819, 275820, 275821, 275822, 275823, 275824, 275825, 275826, 275827, 275828, 275829, 275830, 275831, 275832, 275833, 275834) c6(275835) c7(bL, T, e, cz, aj, v, j, J, KB, hb, iX, oj, Ak, h, cy, jy, K, bq, dQ, bsQ, A, fc, dq, aq, kC, GR, kB, awN, mg, cP, ei); #c1(FGF23) c2(NP_065689) c3(fibrnblast growth factor 23 precursor) c4(204836, 204837, 204838, 204839, 204840, 204841, 204842) c5(204843, 204844, 204845, 204846, 204847, 204848, 204849, 204850, 204851, 204852, 204853, 204854, 204855, 204856, 204857, 204858, 204859, 204860, 204861, 204862, 204863, 204864, 204865, 204866, 204867, 204868, 204869, 204870, 204871, 204872, 204873, 204874, 204875, 204876, 204877, 204878, 204879, 204880, 204881, 204882, 204883, 204884, 204885, 204886, 204887, 204888, 204889, 204890, 204891, 204892, 204893, 204894, 204895, 204896, 204897, 204898, 204899, 204900, 204801, 204902, 204903, 204904, 204905, 204906, 204907, 204908, 204909, 204910, 204911, 204912, 204913, 204914, 204915, 204916, 204917, 204918, 204919, 204920, 204921, 204922, 204923, 204924, 204925, 204926, 204927, 204928, 204929, 204930, 204931, 204932, 204933, 204934, 204935, 204936, 204937) c6(204938) c7(T, AB, eR, e, Ay, aj, amC, j, bqV, aY, pd, J, ad, adf, fU, bsU, amB, zw, MR, yw, oW, bsW, hP, bsR, lQ, bta, zu, bsX, ae, af, azh, aOy, bmg, OX, vj, Hz, ev, arp, zq, bsZ, akb, bfH, AA, Hl, dr, aOx, amK, arr, acW, Qf, bsY, eD, fP, gZ, lO, Km, bsS, bsT, aS, dy, bfl, bsV, azg, lS, ars, azr); #c1(FGF3) c2(NP_005238) c3(fibroblast growth factor 3 precursor) c4(154312) c5(154313, 154314, 154315, 154316, 154317, 154318, 154319) c6( ) c7(btc, T, fM, dA, pY, fZ, aA, n, Hn, aml, ci, oc, q, YD, er, Na, lg, aMT, aT, h, Nc, dL, hu, avt, fb, Cy, eL, Yi, ia, OV, aQX, vT, aW, Y, ff, Az, aF, yq, en, hf, aQZ, t, cl, bz, btb, zV, g, iK, ck, kn, bw, bqH, bE, AM, mG, vy, hL, btd, m, bt, it, B); #c1(FGF4) c2(XP_006718538) c3(fibroblast growth factor 4 isoform X1) c4(291894) c5(291895, 291896, 291897, 291898, 291899, 291900, 291901, 291902) c6(291903, 291904) c7(sY, T, IT, wu, ht, aA, Hn, n, fd, j, ci, q, aT, cy, dL, K, wm, hu, nJ, eL, yo, A, s, vT, aW, Y, ff, r, aF, en, t, uC, zV, ck, eD, cj, m, bt, it, B); #c1(FGF5) c2(NP_004455) c3(fibroblast growth factor 5 isoform 1 precursor) c4(146454) c5(146455, 146456, 146457, 146458, 146459, 146460, 146461, 146462, 146463) c6( ) c7(T, d, BN, iQ, dB, Y, U, cz, hy, nw, fr, g, nC, ne); #c1(FGF5) c2(NP_149134) c3(fibroblast growth factor 5 isoform 2 precursor) c4(227401) c5(227402, 227403, 227404, 227405, 227406, 227407) c6( ) c7(T, d, BN, iQ, dB, Y, U, cz, hy, nw, fr, g, nC, ne); #c1(FGF6) c2(NP_066276) c3(fibroblast growth factor 6 precursor) c4(206923) c5(206924, 206925, 206926, 206927, 206928, 206929, 206930) c6( ) c7(ck, YL, T, jf, r, aA, PJ, cm, ae, q, ad); #c1(FGF7) c2(NP_002000) c3(fibroblast growth factor 7 precursor) c4(123030) c5(123031, 123032, 123033, 123034, 123035, 123036, 123037, 123038, 123039, 123040, 123041, 123042, 123043, 123044, 123045, 123046, 123047, 123048, 123049, 123050, 123051, 123052, 123053, 123054, 123055, 123056, 123057, 123058, 123059, 123060, 123061, 123062, 123063, 123064, 123065, 123066, 123067, 123068, 123069, 123070, 123071, 123072, 123073, 123074, 123075, 123076, 123077, 123078, 123079, 123080, 123081, 123082, 123083, 123084, 123085, 123086, 123087, 123088, 123089, 123090, 123091, 123092, 123093, 123094, 123095, 123096, 123097, 123098, 123099, 123100, 123101, 123102, 123103, 123104, 123105, 123106, 123107, 123108, 123109, 123110, 123111, 123112, 123113, 123114, 123115, 123116, 123117, 123118, 123119, 123120, 123121, 123122, 123123, 123124, 123125, 123126, 123127, 123128, 123129, 123130, 123131, 123132, 123133, 123134) c6(123135, 123136, 123137, 123138, 123139) c7(G, T, aC, Ht, fG, Lx, bte, ht, aA, fF, al, Hn, ci, qN, sD, q, ad, asS, eA, Na, Vp, amB, aHu, aE, qg, arV, aT, lG, Nc, ji, K, lQ, aDZ, bsA, MO, nJ, ae, ao, Jl, aW, ff, bg, cr, r, fe, Qm, kp, aF, en, cl, g, t, iV, LB, bE, AM, wk, uR, wB, hL, at, uJ, m, fD, azr, jr, btf); #c1(FGF8) c2(NP_006110) c3(fibroblast growth factor 8 isoform 8 precursor) c4(161939, 161940) c5(161941, 161942, 161943, 161944, 161945, 161946, 161947) c6( ) c7(gh, T, jW, Dh, RX, Hn, ci, bth, agY, iJ, ad, yn, Mg, Tg, anB, Na, bti, gH, ath, aT, Nc, nJ, ae, avP, btg, aW, fO, Az, btj, Pp, si, t, cm, amF, eD, RZ, m, UF, ZW, B, LS); #c1(FGF8) c2(NP_149353) c3(fibroblast growth factor 8 isoform F precursor) c4(227475) c5(227476, 227477, 227478, 227479, 227480, 227481, 227482) c6( ) c7(gh, T, jW, Dh, RX, Hn, ci, bth, agY, iJ, ad, yn, Mg, Tg, anB, Na, bti, gH, ath, aT, Nc, nJ, ae, avP, btg, aW, fO, Az, btj, Pp, si, t, cm, amF, eD, RZ, m, UF, ZW, B, LS); #c1(FGF8) c2(NP_149354) c3(fibroblast growth factor 8 isoform E precursor) c4(227483) c5(227484, 227485, 227486, 227487, 227488, 227489, 227490) c6( ) c7(gh, T, jW, Dh, RX, Hn, ci, bth, agY, iJ, ad, yn, Mg, Tg, anB, Na, bti, gH, ath, aT, Nc, nJ, ae, avP, btg, aW, fO, Az, btj, Pp, si, t, cm, amF, eD, RZ, m, UF, ZW, B, LS); #c1(FGF8) c2(NP_149355) c3(fibroblast growth factor 8 isoform A precursor) c4(227491) c5(227492, 227493, 227494, 227495, 227496, 227497, 227498, 227499) c6( ) c7(gh, T, jW, Dh, RX, Hn, ci, bth, agY, iJ, ad, yn, Mg, Tg, anB, Na, bti, gH, ath, aT, Nc, nJ, ae, avP, btg, aW, fO, Az, btj, Pp, si, t, cm, amF, eD, RZ, m, UF, ZW, B, LS); #c1(FGF9) c2(NP_002001) c3(fibroblast growth factor 9 precursor) c4(123140) c5(123141, 123142, 123143, 123144, 123145, 123146, 123147, 123148) c6( ) c7(T, akc, zX, EQ, aA, bB, hy, Ul, q, ad, eA, ip, dP, xx, av, iu, Na, dY, btk, vJ, btl, UD, Nc, ae, ant, d, BN, vj, ff, la, gl, akY, aF, en, cl, g, zV, wW, eM, dB, bE, eD, aND, ne); #c1(FGFBP1) c2(NP_005121) c3(fibroblast growth factor-binding protein 1 precursor) c4(153053) c5(153054, 153055, 153056, 153057, 153058, 153059, 153060, 153061, 153062, 153063) c6( ) c7(ar, cF, eJ, bE, aW, ff, r, aT, cz, h, dy, en, LV, q); #c1(FGFBP2) c2(NP_114156) c3(fibroblast growth factor-binding protein 2 precursor) c4(222412) c5(222413, 222414, 222415, 222416, 222417, 222418, 222419, 222420) c6(222421, 222422) c7(ci, m); #c1(FGFBP3) c2(NP_689642) c3(fibroblast growth factor-binding protein 3 precursor) c4(243393) c5(243394, 243395, 243396, 243397, 243398, 243399, 243400, 243401) c6(243402, 243403) c7(hq); #c1(FGFR1) c2(NP_001167535) c3(fibroblast growth factor receptor 1 isoform 11 precursor) c4(69008) c5(69009, 69010, 69011, 69012, 69013, 69014) c6( ) c7(bM, T, bO, fd, amj, ci, mF, ip, x, Vp, bv, Na, aE, arA, il, btA, eL, aTq, bjy, iE, pr, aW, aVQ, Az, btB, g, as, eE, eF, cm, aiv, zV, iP, y, aMP, eM, nB, BK, oy, PV, sv, nw, k, m, Xu, in, ik, btv, n, oY, ct, btF, yn, btm, ft, bti, bto, amJ, dL, wb, Wr, btr, Nr, yi, avP, sp, hQ, btj, aq, btp, kp, po, op, bty, Qy, YE, btn, bP, dB, Qu, eD, avF, anx, B, bL, fM, aA, cz, v, j, q, btx, eA, UE, aT, bts, dz, btE, Nc, jj, ae, af, dl, bA, btz, kl, wr, iU, Y, btq, aeS, r, en, t, KQ, iK, aoy, ck, baz, kP, mG, JL, UF, bt, bjX, id, jh, btu, Fb, zU, EA, hF, ad, fU, btD, btw, hd, av, lQ, nJ, btt, d, et, vj, ff, btC, eH, cr, aF, jb, bz, Hp, Nq, z, aKC, lC, iu, sH, DB); #c1(FGFR1) c2(NP_001167538) c3(fibroblast growth factor receptor 1 isoform 14 precursor) c4(69015) c5(69016, 69017, 69018, 69019, 69020, 69021, 69022, 69023, 69024, 69025, 69026, 69027, 69028, 69029, 69030, 69031, 69032, 69033, 69034, 69035, 69036, 69037, 69038, 69039, 69040, 69041) c6( ) c7(bM, T, bO, fd, amj, ci, mF, ip, x, Vp, bv, Na, aE, arA, il, btA, eL, aTq, bjy, iE, pr, aW, aVQ, Az, btB, g, as, eE, eF, cm, aiv, zV, iP, y, aMP, eM, nB, BK, oy, PV, sv, nw, k, m, Xu, in, ik, btv, n, oY, ct, btF, yn, btm, ft, bti, bto, amJ, dL, wb, Wr, btr, Nr, yi, avP, sp, hQ, btj, aq, btp, kp, po, op, bty, Qy, YE, btn, bP, dB, Qu, eD, avF, anx, B, bL, fM, aA, cz, v, j, q, btx, eA, UE, aT, bts, dz, btE, Nc, jj, ae, af, dl, bA, btz, kl, wr, iU, Y, btq, aeS, r, en, t, KQ, iK, aoy, ck, baz, kP, mG, JL, UF, bt, bjX, id, jh, btu, Fb, zU, EA, hF, ad, fU, btD, btw, hd, av, lQ, nJ, btt, d, et, vj, ff, btC, eH, cr, aF, jb, bz, Hp, Nq, z, aKC, lC, iu, sH, DB); #c1(FGFR1) c2(NP_056934) c3(fibroblast growth factor receptor 1 isoform 2 precursor) c4(188151, 188152) c5( ) c6( ) c7(bM, T, bO, fd, amj, ci, mF, ip, x, Vp, bv, Na, aE, arA, il, btA, eL, aTq, bjy, iE, pr, aW, aVQ, Az, btB, g, as, eE, eF, cm, aiv, zV, iP, y, aMP, eM, nB, BK, oy, PV, sv, nw, k, m, Xu, in, ik, btv, n, oY, ct, btF, yn, btm, ft, bti, bto, amJ, dL, wb, Wr, btr, Nr, yi, avP, sp, hQ, btj, aq, btp, kp, po, op, bty, Qy, YE, btn, bP, dB, Qu, eD, avF, anx, B, bL, fM, aA, cz, v, j, q, btx, eA, UE, aT, bts, dz, btE, Nc, jj, ae, af, dl, bA, btz, kl, wr, iU, Y, btq, aeS, r, en, t, KQ, iK, aoy, ck, baz, kP, mG, JL, UF, bt, bjX, id, jh, btu, Fb, zU, EA, hF, ad, fU, btD, btw, hd, av, lQ, nJ, btt, d, et, vj, ff, btC, eH, cr, aF, jb, bz, Hp, Nq, z, aKC, lC, iu, sH, DB); #c1(FGFR1) c2(NP_075593) c3(fibroblast growth factor receptor 1 isoform 3 precursor) c4(214021, 214022) c5(214023, 214024, 214025, 214026, 214027, 214028, 214029, 214030, 214031, 214032) c6( ) c7(bM, T, bO, fd, amj, ci, mF, ip, x, Vp, bv, Na, aE, arA, il, btA, eL, aTq, bjy, iE, pr, aW, aVQ, Az, btB, g, as, eE, eF, cm, aiv, zV, iP, y, aMP, eM, nB, BK, oy, PV, sv, nw, k, m, Xu, in, ik, btv, n, oY, ct, btF, yn, btm, ft, bti, bto, amJ, dL, wb, Wr, btr, Nr, yi, avP, sp, hQ, btj, aq, btp, kp, po, op, bty, Qy, YE, btn, bP, dB, Qu, eD, avF, anx, B, bL, fM, aA, cz, v, j, q, btx, eA, UE, aT, bts, dz, btE, Nc, jj, ae, af, dl, bA, btz, kl, wr, iU, Y, btq, aeS, r, en, t, KQ, iK, aoy, ck, baz, kP, mG, JL, UF, bt, bjX, id, jh, btu, Fb, zU, EA, hF, ad, fU, btD, btw, hd, av, lQ, nJ, btt, d, et, vj, ff, btC, eH, cr, aF, jb, bz, Hp, Nq, z, aKC, lC, iu, sH, DB); #c1(FGFR1) c2(NP_075594) c3(fibroblast growth factor receptor 1 isoform 4 precursor) c4(214033, 214034, 214035, 214036) c5(214037, 214038, 214039, 214040, 214041, 214042, 214043, 214044, 214045, 214046, 214047, 214048, 214049, 214050, 214051) c6( ) c7(bM, T, bO, fd, amj, ci, mF, ip, x, Vp, bv, Na, aE, arA, il, btA, eL, aTq, bjy, iE, pr, aW, aVQ, Az, btB, g, as, eE, eF, cm, aiv, zV, iP, y, aMP, eM, nB, BK, oy, PV, sv, nw, k, m, Xu, in, ik, btv, n, oY, ct, btF, yn, btm, ft, bti, bto, amJ, dL, wb, Wr, btr, Nr, yi, avP, sp, hQ, btj, aq, btp, kp, po, op, bty, Qy, YE, btn, bP, dB, Qu, eD, avF, anx, B, bL, fM, aA, cz, v, j, q, btx, eA, UE, aT, bts, dz, btE, Nc, jj, ae, af, dl, bA, btz, kl, wr, iU, Y, btq, aeS, r, en, t, KQ, iK, aoy, ck, baz, kP, mG, JL, UF, bt, bjX, id, jh, btu, Fb, zU, EA, hF, ad, fU, btD, btw, hd, av, lQ, nJ, btt, d, et, vj, ff, btC, eH, cr, aF, jb, bz, Hp, Nq, z, aKC, lC, iu, sH, DB); #c1(FGFR1) c2(NP_075598) c3(fibroblast growth factor receptor 1 isoform 1 precursor) c4(214052, 214053, 214054) c5( ) c6( ) c7(bM, T, bO, fd, amj, ci, mF, ip, x, Vp, bv, Na, aE, arA, il, btA, eL, aTq, bjy, iE, pr, aW, aVQ, Az, btB, g, as, eE, eF, cm, aiv, zV, iP, y, aMP, eM, nB, BK, oy, PV, sv, nw, k, m, Xu, in, ik, btv, n, oY, ct, btF, yn, btm, ft, bti, bto, amJ, dL, wb, Wr, btr, Nr, yi, avP, sp, hQ, btj, aq, btp, kp, po, op, bty, Qy, YE, btn, bP, dB, Qu, eD, avF, anx, B, bL, fM, aA, cz, v, j, q, btx, eA, UE, aT, bts, dz, btE, Nc, jj, ae, af, dl, bA, btz, kl, wr, iU, Y, btq, aeS, r, en, t, KQ, iK, aoy, ck, baz, kP, mG, JL, UF, bt, bjX, id, jh, btu, Fb, zU, EA, hF, ad, fU, btD, btw, hd, av, lQ, nJ, btt, d, et, vj, ff, btC, eH, cr, aF, jb, bz, Hp, Nq, z, aKC, lC, iu, sH, DB); #c1(FGFR1) c2(XP_006716368) c3(fibroblast growth factor receptor 1 isoform XG) c4( ) c5(290269, 290270, 290271, 290272, 290273) c6( ) c7(bM, T, bO, fd, amj, ci, mF, ip, x, Vp, bv, Na, aE, arA, il, btA, eL, aTq, bjy, iE, pr, aW, aVQ, Az, btB, g, as, eE, eF, cm, aiv, zV, iP, y, aMP, eM, nB, BK, oy, PV, sv, nw, k, m, Xu, in, ik, btv, n, oY, ct, btF, yn, btm, ft, bti, bto, amJ, dL, wb, Wr, btr, Nr, yi, avP, sp, hQ, btj, aq, btp, kp, po, op, bty, Qy, YE, btn, bP, dB, Qu, eD, avF, anx, B, bL, fM, aA, cz, v, j, q, btx, eA, UE, aT, bts, dz, btE, Nc, jj, ae, af, dl, bA, btz, kl, wr, iU, Y, btq, aeS, r, en, t, KQ, iK, aoy, ck, baz, kP, mG, JL, UF, bt, bjX, id, jh, btu, Fb, zU, EA, hF, ad, fU, btD, btw, hd, av, lQ, nJ, btt, d, et, vj, ff, btC, eH, cr, aF, jb, bz, Hp, Nq, z, aKC, lC, iu, sH, DB); #c1(FGFR1) c2(XP_011542748) c3(fibroblast growth factor receptor 1 isoform X4) c4(341336) c5(341337, 341338, 341339, 341340, 341341, 341342, 341343) c6( ) c7(bM, T, bO, fd, amj, ci, mF, ip, x, Vp, bv, Na, aE, arA, il, btA, eL, aTq, bjy, iE, pr, aW, aVQ, Az, btB, g, as, eE, eF, cm, aiv, zV, iP, y, aMP, eM, nB, BK, oy, PV, sv, nw, k, m, Xu, in, ik, btv, n, oY, ct, btF, yn, btm, ft, bti, bto, amJ, dL, wb, Wr, btr, Nr, yi, avP, sp, hQ, btj, aq, btp, kp, po, op, bty, Qy, YE, btn, bP, dB, Qu, eD, avF, anx, B, bL, fM, aA, cz, v, j, q, btx, eA, UE, aT, bts, dz, btE, Nc, jj, ae, af, dl, bA, btz, kl, wr, iU, Y, btq, aeS, r, en, t, KQ, iK, aoy, ck, baz, kP, mG, JL, UF, bt, bjX, id, jh, btu, Fb, zU, EA, hF, ad, fU, btD, btw, hd, av, lQ, nJ, btt, d, et, vj, ff, btC, eH, cr, aF, jb, bz, Hp, Nq, z, aKC, lC, iu, sH, DB); #c1(FGFR1) c2(XP_011542749) c3(fibroblast growth factor receptor 1 isoform X5) c4(341344) c5(341345, 341346, 341347, 341348, 341349, 341350) c6( ) c7(bM, T, bO, fd, amj, ci, mF, ip, x, Vp, bv, Na, aE, arA, il, btA, eL, aTq, bjy, iE, pr, aW, aVQ, Az, btB, g, as, eE, eF, cm, aiv, zV, iP, y, aMP, eM, nB, BK, oy, PV, sv, nw, k, m, Xu, in, ik, btv, n, oY, ct, btF, yn, btm, ft, bti, bto, amJ, dL, wb, Wr, btr, Nr, yi, avP, sp, hQ, btj, aq, btp, kp, po, op, bty, Qy, YE, btn, bP, dB, Qu, eD, avF, anx, B, bL, fM, aA, cz, v, j, q, btx, eA, UE, aT, bts, dz, btE, Nc, jj, ae, af, dl, bA, btz, kl, wr, iU, Y, btq, aeS, r, en, t, KQ, iK, aoy, ck, baz, kP, mG, JL, UF, bt, bjX, id, jh, btu, Fb, zU, EA, hF, ad, fU, btD, btw, hd, av, lQ, nJ, btt, d, et, vj, ff, btC, eH, cr, aF, jb, bz, Hp, Nq, z, aKC, lC, iu, sH, DB); #c1(FGFR1) c2(XP_011542750) c3(fibroblast growth factor receptor 1 isoform X9) c4( ) c5(341351) c6( ) c7(bM, T, bO, fd, amj, ci, mF, ip, x, Vp, bv, Na, aE, arA, il, btA, eL, aTq, bjy, iE, pr, aW, aVQ, Az, btB, g, as, eE, eF, cm, aiv, zV, iP, y, aMP, eM, nB, BK, oy, PV, sv, nw, k, m, Xu, in, ik, btv, n, oY, ct, btF, yn, btm, ft, bti, bto, amJ, dL, wb, Wr, btr, Nr, yi, avP, sp, hQ, btj, aq, btp, kp, po, op, bty, Qy, YE, btn, bP, dB, Qu, eD, avF, anx B, bL, fM, aA, cz, v, j, q, btx, eA, UE, aT, bts, dz, btE, Nc, jj, ae, af, dl, bA, btz, kl, wr, iU, Y, btq, aeS, r, en, t, KQ, iK, aoy, ck, baz, kP, mG, JL, UF, bt, bjX, id, jh, btu, Fb, zU, EA, hF, ad, fU, btD, btw, hd, av, lQ, nJ, btt, d, et, vj, ff, btC, eH, cr, aF, jb, bz, Hp, Nq, z, aKC, lC, iu, sH, DB); #c1(FGFR1) c2(XP_011542752) c3(fibroblast growth factor receptor 1 isoform X11) c4(341352) c5(341353, 341354, 341355, 341356, 341357, 341358, 341359, 341360, 341361, 341362, 341363, 341364, 341365, 341366, 341367, 341368) c6( ) c7(bM, T, bO, fd, amj, ci, mF, ip, x, Vp, bv, Na, aE, arA, il, btA, eL, aTq, bjy, iE, pr, aW, aVQ, Az, btB, g, as, eE, eF, cm, aiv, zV, iP, y, aMP, eM, nB, BK, oy, PV, sv, nw, k, m, Xu, in, ik, btv, n, oY, ct, btE, yn, btm, ft, bti, bto, amJ, dL, wb, Wr, btr, Nr, yi, avP, sp, hQ, btj, aq, btp, kp, po, op, bty, Qy, YE, btn, bP, dB, Qu, eD, avF, anx, B, bL, fM, aA, cz, v, j, q, btx, eA, UE, aT, bts, dz, btE, Nc, jj, ae, af, dl, bA, btz, kl, wr, iU, Y, btq, aeS, r, en, t, KQ, iK, aoy, ck, baz, kP, mG, JL, UF, bt, bjX, id, jh, btu, Fb, zU, EA, hF, ad, fU, btD, btw, hd, av, lQ, nJ, btt, d, et, vj, ff, btC, eH, cr, aF, jb, bz, Hp, Nq, z, aKC, lC, iu, sH, DB); #c1(FGFR1) c2(XP_011542754) c3(fibroblast growth factor receptor 1 isoform X15) c4(341369) c5(341370, 341371, 341372, 341373, 341374, 341375, 341376, 341377, 341378, 341379, 341380, 341381, 341382, 341383, 341384, 341385, 341386, 341387, 341388) c6( ) c7(bM, T, bO, fd, amj, ci, mF, ip, x, Vp, bv, Na, aE, arA, il, btA, eL, aTq, bjy, iE, pr, aW, aVQ, Az, btB, g, as, eE, eF, cm, aiv, zV, iP, y, aMP, eM, nB, BK, oy, PV, sv, nw, k, m, Xu, in, ik, btv, n, oY, ct, btF, yn, btm, ft, bti, bto, amJ, dL, wb, Wr, btr, Nr, yi, avP, sp, hQ, btj, aq, btp, kp, po, op, bty, Qy, YE, btn, bP, dB, Qu, eD, avF, anx, B, bL, fM, aA, cz, v, j, q, btx, eA, UE, aT, bts, dz, btE, Nc, jj, ae, af, dl, bA, btz, kl, wr, iU, Y, btq, aeS, r, en, t, KQ, iK, aoy, ck, baz, kP, mG, JL, UF, bt, bjX, id, jh, btu, Fb, zU, EA, hF, ad, fU, btD, btw, hd, av, lQ, nJ, btt, d, et, vj, ff, btC, eH, cr, aF, jb, bz, Hp, Nq, z, aKC, lC, iu, sH, DB); #c1(FGFR10P) c2(NP_001265619) c3(FGFR1 oncogene partner isoform c) c4(99028) c5(99029, 99030, 99031, 99032, 99033, 99034) c6( ) c7(av, iV, eM, et, w, HA, pg, dz, qj, ci, hf, bt, bz); #c1(FGFR10P) c2(NP_008976) c3(FGFR1 oncogene partner isoform a) c4(169987) c5(169988, 169989, 169990, 169991, 169992, 169993) c6( ) c7(av, iV, eM, et, w, HA, pg, dz, qj, ci, hf, bt, bz); #c1(FGFR10P) c2(NP_919410) c3(FGFR1 oncogene partner isoform b) c4(258539) c5(258540, 258541, 258542, 258543, 258544, 258545) c6( ) c7(av, iV, eM, et, w, HA, pg, dz, qj, ci, hf, bt, bz); #c1(FGFR10P2) c2(NP_001165358) c3(FGFR1 oncogene partner 2 isoform 2) c4(67632, 67633) c5(67634, 67635, 67636, 67637, 67638, 67639) c6( ) c7(et, dz, btG); #c1(FGFR10P2) c2(NP_001165359) c3(FGFR1 oncogene partner 2 isoform 3) c4(67640) c5(67641, 67642, 67643, 67644, 67645, 67646, 67647, 67648, 67649, 67650, 67651, 67652) c6( ) c7(et, dz, btG); #c1(FGFR10P2) c2(NP_056448) c3(FGFR1 oncogene partner 2 isoform 1) c4(187588) c5(187589, 187590, 187591, 187592, 187593, 187594) c6( ) c7(et, dz, btG); #c1(FGFR2) c2(NP_000132) c3(fibroblast growth factor receptor 2 isoform 1 precursor) c4(2887) c5(2888, 2889, 2890, 2891, 2892) c6( ) c7(aOR, G, T, aC, jW, if, al, bO, fd, btM, aeu, bB, ci, sD, YD, Na, aE, ta, K, hu, eL, li, yo, btH, zQ, btN, aW, are, Az, btB, Qm, agj, g, as, eF, cm, aiv, ajj, zV, bst, eM, nB, lp, AM, iS, cX, uJ, k, m, bsB, ik, iu, bnL, QO, zt, Pi, qy, btv, n, aLn, nA, qN, BM, acy, rc, yn, md, btm, jz, bto, amJ, agi, btQ, h, eV, dL, wb, Wr, he, Gc, sp, btj, Pp, kp, yq, btL, btK, bP, Qu, hk, hL, hR, avF, zG, art, bD, it, B, btf, aGn, yk, eX, aA, cz, bsx, q, eA, bke, xx, aHu, afQ, aT, bts, rD, btE, bK, Nc, ae, af, dl, eC, qw, avg, btz, vT, Y, r, lo, eS, en, bu, cl, t, btO, iK, sS, rR, au, JL, btJ, bt, LS, gx, Mb, kh, id, bsv, acl, atS, Hn, btl, zU, iJ, ad, afb, bsz, dP, av, btw, hd, ib, Db, bj, lQ, nJ, btP, btt, d, PE, ff, btC, eH, aF, atb, wW, gk, bE, adg, aed, VK, X, jr, bmY); #c1(FGFR2) c2(NP_001138385) c3(fibroblast growth factor receptor 2 isoform 3 precursor) c4(56495, 56496, 56497) c5(56498, 56499, 56500, 56501, 56502, 56503, 56504, 56505, 56506, 56507) c6( ) c7(aOR, G, T, aC, jW, if, al, bO, fd, btM, aeu, bB, ci, sD, YD, Na, aE, ta, K, hu, eL, li, yo, btH, zQ, btN, aW, are, Az, btB, Qm, agj, g, as, eF, cm, aiv, ajj, zV, bst, eM, nB, lp, AM, iS, cX, uJ, k, m, bsB, ik, iu, bnL, QO, zt, Pi, qy, btv, n, aLn, nA, qN, BM, acy, rc, yn, md, btm, jz, bto, amJ, agi, btQ, h, eV, dL, wb, Wr, he, Gc, sp, btj, Pp, kp, yq, btL, btK, bP, Qu, hk, hL, hR, avF, zG, art, bD, it, B, btf, aGn, yk, eX, aA, cz, bsx, q, eA, bke, xx, aHu, afQ, aT, bts, rD, btE, bK, Nc, ae, af, dl, eC, qw, avg, btz, vT, Y, r, lo, eS, en, bu, cl, t, btO, iK, sS, rR, au, JL, btJ, bt, LS, gx, Mb, kh, id, bsv, acl, atS, Hn, btl, zU, iJ, ad, afb, bsz, dP, av, btw, hd, ib, Db, bj, lQ, nJ, btP, btt, d, PE, ff, btC, eH, aF, atb, wW, gk, bE, adg, aed, VK, X, jr, bmY); #c1(FGFR2) c2(NP_001138386) c3(fibroblast growth factor receptor 2 isoform 4 precursor) c4(56508) c5(56509, 56510, 56511, 56512, 56513, 56514) c6( ) c7(aOR, G, T, aC, jW, if, al, bO, fd, btM, aeu, bB, ci, sD, YD, Na, aE, ta, K, hu, eL, li, yo, btH, zQ, btN, aW, are, Az, btB, Qm, agj, g, as, eF, cm, aiv, ajj, zV, bst, eM, nB, lp, AM, iS, cX, uJ, k, m, bsB, ik, iu, bnL, QO, zt, Pi, qy, btv, n, aLn, nA, qN, BM, acy, rc, yn, md, btm, jz, bto, amJ, agi, btQ, h, eV, dL, wb, Wr, he, Gc, sp, btj, Pp, kp, yq, btL, btK, bP, Qu, hk, hL, hR, avF, zG, art, bD, it, B, btf, aGn, yk, eX, aA, cz, bsx, q, eA, bke, xx, aHu, afQ, aT, bts, rD, btE, bK, Nc, ae, af, dl, eC, qw, avg, btz, vT, Y, r, lo, eS, en, bu, cl, t, btO, iK, sS, rR, au, JL, btJ, bt, LS, gx, Mb, kh, id, bsv, acl, atS, Hn, btl, zU, iJ, ad, afb, bsz, dP, av, btw, hd, ib, Db, bj, lQ, nJ, btP, btt, d, PE, ff, btC, eH, aF, atb, wW, gk, bE, adg, aed, VK, X, jr, bmY); #c1(FGFR2) c2(NP_001138387) c3(fibroblast growth factor receptor 2 isoform 5 precursor) c4(56515, 56516) c5(56517, 56518, 56519, 56520, 56521, 56522, 56523, 56524, 56525, 56526, 56527, 56528) c6( ) c7(aOR, G, T, aC, jW, if, al, bO, fd, btM, aeu, bB, ci, sD, YD, Na, aE, ta, K, hu, eL, li, yo, btH, zQ, btN, aW, are, Az, btB, Qm, agj, g, as, eF, cm, aiv, ajj, zV, bst, eM, nB, lp, AM, iS, cX, uJ, k, m, bsB, ik, iu, bnL, QO, zt, Pi, qy, btv, n, aLn, nA, qN, BM, acy, rc, yn, md, btm, jz, bto, amJ, agi, btQ, h, eV, dL, wb, Wr, he, Gc, sp, btj, Pp, kp, yq, btL, btK, bP, Qu, hk, hL, hR, avF, zG, art, bD, it, B, btf, aGn, yk, eX, aA, cz, bsx, q, eA, bke, xx, aHu, afQ, aT, bts, rD, btE, bK, Nc, ae, af, dl, eC, qw, avg, btz, vT, Y, r, lo, eS, en, bu, cl, t, btO, iK, sS, rR, au, JL, btJ, bt, LS, gx, Mb, kh, id, bsv, acl, atS, Hn, btl, zU, iJ, ad, afb, bsz, dP, av, btw, hd, ib, Db, bj, lQ, nJ, btP, btt, d, PE, ff, btC, eH, aF, atb, wW, gk, bE, adg, aed, VK, X, jr, bmY); #c1(FGFR2) c2(NP_001138389) c3(fibroblast growth factor receptor 2 isoform 7 precursor) c4(56529) c5(56530, 56531, 56532, 56533, 56534, 56535, 56536, 56537, 56538, 56539, 56540) c6( ) c7(aOR, G, T, aC, jW, if, al, bO, fd, btM, aeu, bB, ci, sD, YD, Na, aE, ta, K, hu, eL, li, yo, btH, zQ, btN, aW, are, Az, btB, Qm, agj, g, as, eF, cm, aiv, ajj, zV, bst, eM, nB, lp, AM, iS, cX, uJ, k, m, bsB, ik, iu, bnL, QO, zt, Pi, qy, btv, n, aLn, nA, qN, BM, acy, rc, yn, md, btm, jz, bto, amJ, agi, btQ, h, eV, dL, wb, Wr, he, Gc, sp, btj, Pp, kp, yq, btL, btK, bP, Qu, hk, hL, hR, avF, zG, art, bD, it, B, btf, aGn, yk, eX, aA, cz, bsx, q, eA, bke, xx, aHu, afQ, aT, bts, rD, btE, bK, Nc, ae, af, dl, eC, qw, avg, btz, vT, Y, r, lo, eS, en, bu, cl, t, btO, iK, sS, rR, au, JL, btJ, bt, LS, gx, Mb, kh, id, bsv, acl, atS, Hn, btl, zU, iJ, ad, afb, bsz, dP, av, btw, hd, ib, Db, bj, lQ, nJ, btP, btt, d, PE, ff, btC, eH, aF, atb, wW, gk, bE, adg, aed, VK, X, jr, bmY); #c1(FGFR2) c2(NP_001138390) c3(fibroblast growth factor receptor 2 isoform 8 precursor) c4(56541) c5(56542, 56543, 56544, 56545, 56546, 56547) c6( ) c7(aOR, G, T, aC, jW, if, al, bO, fd, btM, aeu, bB, ci, sD, YD, Na, aE, ta, K, hu, eL, li, yo, btH, zQ, btN, aW, are, Az, btB, Qm, agj, g, as, eF, cm, aiv, ajj, zV, bst, eM, nB, lp, AM, iS, cX, uJ, k, m, bsB, ik, iu, bnL, QO, zt, Pi, qy, btv, n, aLn, nA, qN, BM, acy, rc, yn, md, btm, jz, bto, amJ, agi, btQ, h, eV, dL, wb, Wr, he, Gc, sp, btj, Pp, kp, yq, btL, btK, bP, Qu, hk, hL, hR, avF, zG, art, bD, it, B, btf, aGn, yk, eX, aA, cz, bsx, q, eA, bke, xx, aHu, afQ, aT, bts, rD, btE, bK, Nc, ae, af, dl, eC, qw, avg, btz, vT, Y, r, lo, eS, en, bu, cl, t, btO, iK, sS, rR, au, JL, btJ, bt, LS, gx, Mb, kh, id, bsv, acl, atS, Hn, btl, zU, iJ, ad, afb, bsz, dP, av, btw, hd, ib, Db, bj, lQ, nJ, btP, btt, d, PE, ff, btC, eH, aF, atb, wW, gk, bE, adg, aed, VK, X, jr, bmY); #c1(FGFR2) c2(NP_001138391) c3(fibroblast growth factor receptor 2 isoform 9 precursor) c4(56548) c5(56549, 56550, 56551, 56552, 56553) c6( ) c7(aOR, G, T, aC, jW, if, al, bO, fd, btM, aeu, bB, ci, sD, YD, Na, aE, ta, K, hu, eL, li, yo, btH, zQ, btN, aW, are, Az, btB, Qm, agj, g, as, eF, cm, aiv, ajj, zV, bst, eM, nB, lp, AM, iS, cX, uJ, k, m, bsB, ik, iu, bnL, QO, zt, Pi, qy, btv, n, aLn, nA, qN, BM, acy, rc, yn, md, btm, jz, bto, amJ, agi, btQ, h, eV, dL, wb, Wr, he, Gc, sp, btj, Pp, kp, yq, btL, btK, bP, Qu, hk, hL, hR, avF, zG, art, bD, it, B, btf, aGn, yk, eX, aA, cz, bsx, q, eA, bke, xx, aHu, afQ, aT, bts, rD, btE, bK, Nc, ae, af, dl, eC, qw, avg, btz, vT, Y, r, lo, eS, en, bu, cl, t, btO, iK, sS, rR, au, JL, btJ, bt, LS, gx, Mb, kh, id, bsv, acl, atS, Hn, btl, zU, iJ, ad, afb, bsz, dP, av, btw, hd, ib, Db, bj, lQ, nJ, btP, btt, d, PE, ff, btC, eH, aF, atb, wW, gk, bE, adg, aed, VK, X, jr, bmY); #c1(FGFR2) c2(NP_075259) c3(fibroblast growth factor receptor 2 isoform 2 precursor) c4(213768) c5(213769, 213770, 213771, 213772, 213773) c6( ) c7(aOR, G, T, aC, jW, if, al, bO, fd, btM, aeu, bB, ci, sD, YD, Na, aE, ta, K, hu, eL, li, yo, btH, zQ, btN, aW, are, Az, btB, Qm, agj, g, as, eF, cm, aiv, ajj, zV, bst, eM, nB, lp, AM, iS, cX, uJ, k, m, bsB, ik, iu, bnL, QO, zt, Pi, qy, btv, n, aLn, nA, qN, BM, acy, rc, yn, md, btm, jz, bto, amJ, agi, btQ, h, eV, dL, wb, Wr, he, Gc, sp, btj, Pp, kp, yq, btL, btK, bP, Qu, hk, hL, hR, avF, zG, art, bD, it, B, btf, aGn, yk, eX, aA, cz, bsx, q, eA, bke, xx, aHu, afQ, aT, bts, rD, btE, bK, Nc, ae, af, dl, eC, qw, avg, btz, vT, Y, r, lo, eS, en, bu, cl, t, btO, iK, sS, rR, au, JL, btJ, bt, LS, gx, Mb, kh, id, bsv, acl, atS, Hn, btl, zU, iJ, ad, afb, bsz, dP, av, btw, hd, ib, Db, bj, lQ, nJ, btP, btt, d, PE, ff, btC, eH, aF, atb, wW, gk, bE, adg, aed, VK, X, jr, bmY); #c1(FGFR2) c2(XP_006717771) c3(fibroblast growth factor receptor 2 isoform X1) c4( ) c5(291322) c6( ) c7(aOR, G, T, aC, jW, if, al, bO, fd, btM, aeu, bB, ci, sD, YD, Na, aE, ta, K, hu, eL, li, yo, btH, zQ, btN, aW, are, Az, btB, Qm, agj, g, as, eF, cm, aiv, ajj, zV, bst, eM, nB, lp, AM, iS, cX, uJ, k, m, bsB, ik, iu, bnL, QO, zt, Pi, qy, btv, n, aLn, nA, qN, BM, acy, rc, yn, md, btm, jz, bto, amJ, agi, btQ, h, eV, dL, wb, Wr, he, Gc, sp, btj, Pp, kp, yq, btL, btK, bP, Qu, hk, hL, hR, avF, zG, art, bD, it, B, btf, aGn, yk, eX, aA, cz, bsx, q, eA, bke, xx, aHu, afQ, aT, bts, rD, btE, bK, Nc, ae, af, dl, eC, qw, avg, btz, vT, Y, r, lo, eS, en, bu, cl, t, btO, iK, sS, rR, au, JL, btJ, bt, LS, gx, Mb, kh, id, bsv, acl, atS, Hn, btl, zU, iJ, ad, afb, bsz, dP, av, btw, hd, ib, Db, bj, lQ, nJ, btP, btt, d, PE, ff, btC, eH, aF, atb, wW, gk, bE, adg, aed, VK, X, jr, bmY); #c1(FGFR2) c2(XP_006717772) c3(fibroblast growth factor receptor 2 isoform X2) c4(291323, 291324, 291325) c5(291326, 291327, 291328, 291329, 291330, 291331, 291332, 291333, 291334, 291335, 291336, 291337, 291338) c6( ) c7(aOR, G, T, aC, jW, if, al, bO, fd, btM, aeu, bB, ci, sD, YD, Na, aE, ta, K, hu, eL, li, yo, btH, zQ, btN, aW, are, Az, btB, Qm, agj, g, as, eF, cm, aiv, ajj, zV, bst, eM, nB, lp, AM, iS, cX, uJ, k, m, bsB, ik, iu, bnL, QO, zt, Pi, qy, btv, n, aLn, nA, qN, BM, acy, rc, yn, md, btm, jz, bto, amJ, agi, btQ, h, eV, dL, wb, Wr, he, Gc, sp, btj, Pp, kp, yq, btL, btK, bP, Qu, hk, hL, hR, avF, zG, art, bD, it, B, btf, aGn, yk, eX, aA, cz, bsx, q, eA, bke, xx aHu, afQ, aT, bts, rD, btE, bK, Nc, ae, af, dl, eC, qw, avg, btz, vT, Y, r, lo, eS, en, bu, cl, t, btO, iK, sS, rR, au, JL, btJ, bt, LS, gx, Mb, kh, id, bsv, acl, atS, Hn, btl, zU, iJ, ad, afb, bsz, dP, av, btw, hd, ib, Db, bj, lQ, nJ, btP, btt, d, PE, ff, btC, eH, aF, atb, wW, gk, bE, adg, aed, VK, X, jr, bmY); #c1(FGFR2) c2(XP_006717773) c3(fibroblast growth factor receptor 2 isoform X3) c4( ) c5(291339, 291340) c6( ) c7(aOR, G, T, aC, jW, if, al, bO, fd, btM, aeu, bB, ci, sD, YD, Na, aE, ta, K, hu, eL, li, yo, btH, zQ, btN, aW, are, Az, btB, Qm, agj, g, as, eF, cm, aiv, ajj, zV, bst, eM, nB, lp, AM, iS, cX, uJ, k, m, bsB, ik, iu, bnL, QO, zt, Pi, qy, btv, n, aLn, nA, qN, BM, acy, rc, yn, md, btm, jz, bto, amJ, agi, btQ, h, eV, dL, wb, Wr, he, Gc, sp, btj, Pp, kp, yq, btL, btK, bP, Qu, hk, hL, hR, avF, zG, art, bD, it, B, btf, aGn, yk, eX, aA, cz, bsx, q, eA, bke, xx, aHu, afQ, aT, bts, rD, btE, bK, Nc, ae, af, dl, eC, qw, avg, btz, vT, Y, r, lo, eS, en, bu, cl, t, btO, iK, sS, rR, au, JL, btJ, bt, LS, gx, Mb, kh, id, bsv, acl, atS, Hn, btl, zU, iJ, ad, afb, bsz, dP, av, btw, hd, ib, Db, bj, lQ, nJ, btP, btt, d, PE, ff, btC, eH, aF, atb, wW, gk, bE, adg, aed, VK, X, jr, bmY); #c1(FGFR2) c2(XP_006717774) c3(fibroblast growth factor receptor 2 isoform X4) c4( ) c5(291341) c6( ) c7(aOR, G, T, aC, jW, if, al, bO, fd, btM, aeu, bB, ci, sD, YD, Na, aE, ta, K, hu, eL, li, yo, btH, zQ, btN, aW, are, Az, btB, Qm, agj, g, as, eF, cm, aiv, ajj, zV, bst, eM, nB, lp, AM, iS, cX, uJ, k, m, bsB, ik, iu, bnL, QO, zt, Pi, qy, btv, n, aLn, nA, qN, BM, acy, rc, yn, md, btm, jz, bto, amJ, agi, btQ, h, eV, dL, wb, Wr, he, Gc, sp, btj, Pp, kp, yq, btL, btK, bP, Qu, hk, hL, hR, avF, zG, art, bD, it, B, btf, aGn, yk, eX, aA, cz, bsx, q, eA, bke, xx, aHu, afQ, aT, bts, rD, btE, bK, Nc, ae, af, dl, eC, qw, avg, btz, vT, Y, r, lo, eS, en, bu, cl, t, btO, iK, sS, rR, au, JL, btJ, bt, LS, gx, Mb, kh, id, bsv, acl, atS, Hn, btl, zU, iJ, ad, afb, bsz, dP, av, btw, hd, ib, Db, bj, lQ, nJ, btP, btt, d, PE, ff, btC, eH, aF, atb, wW, gk, bE, adg, aed, VK, X, jr, bmY); #c1(FGFR2) c2(XP_006717775) c3(fibroblast growth factor receptor 2 isoform X5) c4(291342) c5(291343, 291344, 291345, 291346, 291347, 291348) c6( ) c7(aOR, G, T, aC, jW, if, al, bO, fd, btM, aeu, bB, ci, sD, YD, Na, aE, ta, K, hu, eL, li, yo, btH, zQ, btN, aW, are, Az, btB, Qm, agj, g, as, eF, cm, aiv, ajj, zV, bst, eM, nB, lp, AM, iS, cX, uJ, k, m, bsB, ik, iu, bnL, QO, zt, Pi, qy, btv, n, aLn, nA, qN, BM, acy, rc, yn, md, btm, jz, bto, amJ, agi, btQ, h, eV, dL, wb, Wr, he, Gc, sp, btj, Pp, kp, yq, btL, btK, bP, Qu, hk, hL, hR, avF, zG, art, bD, it, B, btf, aGn, yk, eX, aA, cz, bsx, q, eA, bke, xx, aHu, afQ, aT, bts, rD, btE, bK, Nc, ae, af, dl, eC, qw, avg, btz, vT, Y, r, lo, eS, en, bu, cl, t, btO, iK, sS, rR, au, JL, btJ, bt, LS, gx, Mb, kh, id, bsv, acl, atS, Hn, btl, zU, iJ, ad, afb, bsz, dP, av, btw, hd, ib, Db, bj, lQ, nJ, btP, btt, d, PE, ff, btC, eH, aF, atb, wW, gk, bE, adg, aed, VK, X, jr, bmY); #c1(FGFR2) c2(XP_006717776) c3(fibroblast growth factor receptor 2 isoform X7) c4( ) c5(291349, 291350, 291351, 291352, 291353, 291354, 291355) c6( ) c7(aOR, G, T, aC, jW, if, al, bO, fd, btM, aeu, bB, ci, sD, YD, Na, aE, ta, K, hu, eL, li, yo, btH, zQ, btN, aW, are, Az, btB, Qm, agj, g, as, eF, cm, aiv, ajj, zV, bst, eM, nB, lp, AM, iS, cX, uJ, k, m, bsB, ik, iu, bnL, QO, zt, Pi, qy, btv, n, aLn, nA, qN, BM, acy, rc, yn, md, btm, jz, bto, amJ, agi, btQ, h, eV, dL, wb, Wr, he, Gc, sp, btj, Pp, kp, yq, btL, btK, bP, Qu, hk, hL, hR, avF, zG, art, bD, it, B, btf, aGn, yk, eX, aA, cz, bsx, q, eA, bke, xx, aHu, afQ, aT, bts, rD, btE, bK, Nc, ae, af, dl, eC, qw, avg, btz, vT, Y, r, lo, eS, en, bu, cl, t, btO, iK, sS, rR, au, JL, btJ, bt, LS, gx, Mb, kh, id, bsv, acl, atS, Hn, btl, zU, iJ, ad, afb, bsz, dP, av, btw, hd, ib, Db, bj, lQ, nJ, btP, btt, d, PE, ff, btC, eH, aF, atb, wW, gk, bE, adg, aed, VK, X, jr, bmY); #c1(FGFR3) c2(NP_000133) c3(fibroblast growth factor receptor 3 isoform 1 precursor) c4(2893) c5(2894, 2895, 2896, 2897, 2898, 2899, 2900, 2901, 2902, 2903) c6( ) c7(T, aC, if, fd, aeu, ci, YD, ip, Na, bjt, K, eL, Zm, azh, btS, aW, agj, g, Qt, zV, bst, eM, bpY, cj, iu, btR, wu, aw, btv, n, fr, nA, qN, MT, axC, Bl, btm, zw, agi, Nn, dL, Wr, bub, ks, Og, Ld, btK, op, xA, bP, Qu, hk, btW, ln, art, NB, aNW, fM, yk, aA, btT, cz, btX, q, eA, xx, XX, lg, Vr, yg, aT, rD, btE, Nc, zp, rv, ae, af, jr, hM, iU, rh, Y, r, lo, en, bu, f, iK, ck, vK, sS, btU, mG, JL, aoJ, bsT, LR, hl, kh, id, btY, jh, buc, ade, ad, MS, Db, yt, lQ, wm, bua, apw, d, bjs, ff, btC, Of, btV, aF, btZ, bz, dr, wW, es, amS, bE, Km, adg, ne, sH); #c1(FGFR3) c2(NP_001156685) c3(fibroblast growth factor receptor 3 isoform 3 precursor) c4(61836) c5(61837, 61838, 61839, 61840, 61841, 61842) c6( ) c7(T, aC, if, fd, aeu, ci, YD, ip, Na, bjt, K, eL, Zm, azh, btS, aW, agj, g, Qt, zV, bst, eM, bpY, cj, iu, btR, wu, aw, btv, n, fr, nA, qN, MT, axC, Bl, btm, zw, agi, Nn, dL, Wr, bub, ks, Og, Ld, btK, op, xA, bP, Qu, hk, btW, ln, art, NB, aNW, fM, yk, aA, btT, cz, btX, q, eA, xx, XX, lg, Vr, yg, aT, rD, btE, Nc, zp, rv, ae, af, jr, hM, iU, rh, Y, r, lo, en, bu, f, iK, ck, vK, sS, btU, mG, JL, aoJ, bsT, LR, hl, kh, id, btY, jh, buc, ade, ad, MS, Db, yt, lQ, wm, bua, apw, d, bjs, ff, btC, Of, btV, aF, btZ, bz, dr, wW, es, amS, bE, Km, adg, ne, sH); #c1(FGFR3) c2(NP_075254) c3(fibroblast growth factor receptor 3 isoform 2 precursor) c4(213731) c5(213732, 213733, 213734, 213735, 213736, 213737, 213738, 213739, 213740, 213741, 213742, 213743) c6( ) c7(T, aC, if, fd, aeu, ci, YD, ip, Na, bjt, K, eL, Zm, azh, btS, aW, agj, g, Qt, zV, bst, eM, bpY, cj, iu, btR, wu, aw, btv, n, fr, nA, qN, MT, axC, BL btm, zw, agi, Nn, dL, Wr, bub, ks, Og, Ld, btK, op, xA, bP, Qu, hk, btW, ln, art, NB, aNW, fM, yk, aA, btT, cz, btX, q, eA, xx, XX, lg, Vr, yg, aT, rD, btE, Nc, zp, rv, ae, af, jr, hM, iU, rh, Y, r, lo, en, bu, f, iK, ck, vK, sS, btU, mG, JL, aoJ, bsT, LR, hl, kh, id, btY, jh, buc, ade, ad, MS, Db, yt, lQ, wm, bua, apw, d, bjs, ff, btC, Of, btV, aF, btZ, bz, dr, wW, es, amS, bE, Km, adg, ne, sH); #c1(FGFR3) c2(XP_006713932) c3(fibroblast growth factor receptor 3 isoform X2) c4(287428) c5( ) c6( ) c7(T, aC, if, fd, aeu, ci, YD, ip, Na, bjt, K, eL, Zm, azh, btS, aW, agj, g, Qt, zV, bst, eM, bpY, cj, iu, btR, wu, aw, btv, n, fr, nA, qN, MT, axC, Bl, btm, zw, agi, Nn, dL, Wr, bub, ks, Og, Ld, btK, op, xA, bP, Qu, hk, btW, ln, art, NB, aNW, fM, yk, aA, btT, cz, btX, q, eA, xx, XX, lg, Vr, yg, aT, rD, btE, Nc, zp, rv, ae, af, jr, hM, iU, rh, Y, r, lo, en, bu, f, iK, ck, vK, sS, btU, mG, JL, aoJ, bsT, LR, hl, kh, id, btY, jh, buc, ade, ad, MS, Db, yt, lQ, wm, bua, apw, d, bjs, ff, btC, Of, btV, aF, btZ, bz, dr, wW, es, amS, bE, Km, adg, ne, sH); #c1(FGFR3) c2(XP_011511724) c3(fibroblast growth factor receptor 3 isoform X8) c4(302448) c5(302449, 302450, 302451, 302452, 302453, 302454) c6( ) c7(T, aC, if, fd, aeu, ci, YD, ip, Na, bjt, K, eL, Zm, azh, btS, aW, agj, g, Qt, zV, bst, eM, bpY, cj, iu, btR, wu, aw, btv, n, fr, nA, qN, MT, axC, Bl, btm, zw, agi, Nn, dL, Wr, bub, ks, Og, Ld, btK, op, xA, bP, Qu, hk, btW, ln, art, NB, aNW, fM, yk, aA, btT, cz, btX, q, eA, xx, XX, lg, Vr, yg, aT, rD, btE, Nc, zp, rv, ae, af, jr, hM, iU, rh, Y, r, lo, en, bu, f, iK, ck, vK, sS, btU, mG, JL, aoJ, bsT, LR, hl, kh, id, btY, jh, buc, ade, ad, MS, Db, yt, lQ, wm, bua, apw, d, bjs, ff, btC, Of, btV, aF, btZ, bz, dr, wW, es, amS, bE, Km, adg, ne, sH); #c1(FGFR4) c2(NP_001278909) c3(fibroblast growth factor receptor 4 isoform 3 precursor) c4( ) c5(110868, 110869, 110870, 110871, 110872, 110873, 110874, 110875, 110876, 110877, 110878, 110879, 110880, 110881, 110882, 110883, 110884, 110885, 110886, 110887) c6( ) c7(G, T, pf, zs, al, fd, bB, ci, ip, x, bv, aE, K, eL, azh, yo, bbM, aW, g, as, eF, cm, aHd, eM, nB, iA, U, cj, OD, m, Xu, ik, iu, qy, n, aj, fr, ct, bud, h, dL, Dz, sp, Xg, aq, kp, cM, asE, hk, eD, hR, B, bL, fM, dA, yk, aoE, aA, cz, hy, v, j, bX, q, J, eA, afQ, qK, aT, dz, ae, jf, s, iU, Y, r, en, cl, LV, t, iK, pb, aDQ, ck, sS, alC, Dy, gX, aDR, bt, aZ, btY, jh, bS, OH, ad, hX, av, hd, fb, d, asf, ff, aF, anW, Z, bz, dr, OG, bE, ag, ra, X); #c1(FGFR4) c2(NP_075252) c3(fibroblast growth factor receptor 4 isoform 2 precursor) c4(213719) c5(213720, 213721, 213722, 213723, 213724, 213725, 213726, 213727, 213728, 213729, 213730) c6( ) c7(G, T, pf, zs, al, fd, bB, ci, ip, x, bv, aE, K, eL, azh, yo, bbM, aW, g, as, eF, cm, aHd, eM, nB, iA, U, cj, OD, m, Xu, ik, iu, qy, n, aj, fr, ct, bud, h, dL, Dz, sp, Xg, aq, kp, cM, asE, hk, eD, hR, B, bL, fM, dA, yk, aoE, aA, cz, hy, v, j, bX, q, J, eA, afQ, qK, aT, dz, ae, jf, s, iU, Y, r, en, cl, LV, t, iK, pb, aDQ, ck, sS, alC, Dy, gX, aDR, bt, aZ, btY, jh, bS, OH, ad, hX, av, hd, fb, d, asf, ff, aF, anW, Z, bz, dr, OG, bE, ag, ra, X); #c1(FGFR4) c2(XP_005265895) c3(fibroblast growth factor receptor 4 isoform X1) c4(279824, 279825, 279826, 279827, 279828) c5(279829, 279830, 279831, 279832, 279833, 279834, 279835, 279836) c6( ) c7(G, T, pf, zs, al, fd, bB, ci, ip, x, bv, aE, K, eL, azh, yo, bbM, aW, g, as, eF, cm, aHd, eM, nB, iA, U, cj, OD, m, Xu, ik, iu, qy, n, aj, fr, ct, bud, h, dL, Dz, sp, Xg, aq, kp, cM, asE, hk, eD, hR, B, bL, fM, dA, yk, aoE, aA, cz, hy, v, j, bX, q, J, eA, afQ, qK, aT, dz, ae, jf, s, iU, Y, r, en, cl, LV, t, iK, pb, aDQ, ck, sS, alC, Dy, gX, aDR, bt, aZ, btY, jh, bS, OH, ad, hX, av, hd, fb, d, asf, ff, aF, anW, Z, bz, dr, OG, bE, ag, ra, X); #c1(FGFR4) c2(XP_011532766) c3(fibroblast growth factor receptor 4 isoform X2) c4( ) c5(328837, 328838, 328839, 328840, 328841, 328842) c6( ) c7(G, T, pf, zs, al, fd, bB, ci, ip, x, bv, aE, K, eL, azh, yo, bbM, aW, g, as, eF, cm, aHd, eM, nB, iA, U, cj, OD, m, Xu, ik, iu, qy, n, aj, fr, ct, bud, h, dL, Dz, sp, Xg, aq, kp, cM, asE, hk, eD, hR, B, bL, fM, dA, yk, aoE, aA, cz, hy, v, j, bX, q, J, eA, afQ, qK, aT, dz, ae, jf, s, iU, Y, r, en, cl, LV, t, iK, pb, aDQ, ck, sS, alC, Dy, gX, aDR, bt, aZ, btY, jh, bS, OH, ad, hX, av, hd, fb, d, asf, ff, aF, anW, Z, bz, dr, OG, bE, ag, ra, X); #c1(FGFR4) c2(XP_011532767) c3(fibroblast growth factor receptor 4 isoform X3) c4(328843) c5(328844, 328845, 328846, 328847, 328848, 328849) c6( ) c7(G, T, pf, zs, al, fd, bB, ci, ip, x, bv, aE, K, eL, azh, yo, bbM, aW, g, as, eF, cm, aHd, eM, nB, iA, U, cj, OD, m, Xu, ik, iu, qy, n, aj, fr, ct, bud, h, dL, Dz, sp, Xg, aq, kp, cM, asE, hk, eD, hR, B, bL, fM, dA, yk, aoE, aA, cz, hy, v, j, bX, q, J, eA, afQ, qK, aT, dz, ae, jf, s, iU, Y, r, en, cl, LV, t, iK, pb, aDQ, ck, sS, alC, Dy, gX, aDR, bt, aZ, btY, jh, bS, OH, ad, hX, av, hd, fb, d, asf, ff, aF, anW, Z, bz, dr, OG, bE, ag, ra, X); #c1(FGFRL1) c2(NP_001004358) c3(fibroblast growth factor receptor-like 1 precursor) c4(20619, 20620, 20621, 20622) c5(20623, 20624, 20625, 20626, 20627, 20628, 20629, 20630, 20631, 20632, 20633, 20634, 20635, 20636, 20637, 20638, 20639, 20640, 20641, 20642, 20643, 20644, 20645, 20646, 20647, 20648, 20649, 20650, 20651, 20652, 20653, 20654, 20655, 20656, 20657, 20658) c6( ) c7(bM, T, aW, aT, it, dL, m, t, eL, axC); #c1(FGG) c2(NP_000500) c3(fibrinogen gamma chain isoform gamma-A precursor) c4(10454) c5(10455, 10456, 10457, 10458, 10459, 10460, 10461) c6( ) c7(dD, ea, iW, e, aw, aA, cz, vr, j, eq, ad, dY, jk, M, cy, af, eu, fQ, vs, aUF, ar, W, ac, wx, aS, dy, fD, aLL); #c1(FGG) c2(NP_068656) c3(fibrinogen gamma chain isoform gamma-B precursor) c4(209789) c5(209790, 209791, 209792, 209793, 209794, 209795, 209796, 209797, 209798, 209799, 209800, 209801, 209802, 209803, 209804, 209805, 209806, 209807, 209808, 209809, 209810, 209811, 209812, 209813, 209814, 209815, 209816, 209817, 209818, 209819, 209820, 209821, 209822, 209823, 209824, 209825, 209826, 209827, 209828, 209829, 209830, 209831, 209832, 209833, 209834, 209835, 209836, 209837, 209838, 209839, 209840, 209841, 209842, 209843, 209844, 209845, 209846, 209847, 209848, 209849, 209850, 209851, 209852, 209853, 209854, 209855, 209856, 209857, 209858, 209859, 209860, 209861, 209862, 209863, 209864, 209865, 209866, 209867, 209868, 209869, 209870, 209871, 209872, 209873, 209874, 209875, 209876, 209877, 209878, 209879, 209880, 209881, 209882, 209883, 209884, 209885, 209886, 209887, 209888, 209889, 209890, 209891, 209892, 209893, 209894, 209895, 209896, 209897, 209898, 209899, 209900, 209901, 209902, 209903, 209904, 209905, 209906, 209907, 209908, 209909, 209910, 209911, 209912, 209913, 209914, 209915, 209916, 209917, 209918, 209919, 209920, 209921, 209922, 209923, 209924, 209925, 209926, 209927, 209928, 209929, 209930, 209931, 209932, 209933) c6( ) c7(dD, ea, iW, e, aw, aA, cz, vr, j, eq, ad, dY, jk, M, cy, af, eu, fQ, vs, aUF, ar, W, ac, wx, aS, dy, fD, aLL); #c1(FGGY) c2(XP_011540039) c3(FGGY carbohydrate kinase domain-containing protein isoform X7) c4( ) c5(338334, 338335, 338336, 338337, 338338, 338339) c6( ) c7(bL, Vd, c); #c1(FGL1) c2(NP_004458) c3(fibrinogen-like protein 1 precursor) c4(146471, 146472) c5(146473, 146474, 146475, 146476, 146477, 146478, 146479, 146480, 146481, 146482, 146483, 146484, 146485, 146486, 146487, 146488, 146489, 146490, 146491, 146492, 146493, 146494, 146495, 146496, 146497, 146498, 146499, 146500, 146501, 146502, 146503, 146504, 146505, 146506, 146507, 146508, 146509, 146510, 146511, 146512, 146513, 146514, 146515, 146516, 146517, 146518, 146519, 146520, 146521, 146522, 146523, 146524, 146525, 146526, 146527, 146528, 146529, 146530) c6(146531, 146532) c7(T, KM, B, vi); #c1(FGL2) c2(NP_006673) c3(fibrnleukin precursor) c4(167042) c5(167043, 167044, 167045, 167046, 167047, 167048) c6( ) c7(T, fJ, uz, lo, jE, B, hX); #c1(FGR) c2(XP_011539313) c3(tyrosine-protein kinase Fgr isoform X2) c4( ) c5(337382, 337383, 337384, 337385, 337386, 337387) c6( ) c7(gx, aEQ, A, aW, EQ, aT, mg, PD, h, ci, bt, B); #c1(FGR) c2(XP_011539314) c3(tyrosine-protein kinase Fgr isoform X3) c4(337388) c5( ) c6( ) c7(gx, aEQ, A, aW, EQ, aT, mg, PD, h, ci, bt, B); #c1(FGR) c2(XP_011539315) c3(tyrosine-protein kinase Fgr isoform X4) c4( ) c5(337389, 337390, 337391, 337392, 337393, 337394) c6( ) c7(gx, aEQ, A, aW, EQ, aT, mg, PD, h, ci, bt, B); #c1(FH) c2(NP_000134) c3(fumarate hydratase, mitochondrial) c4(2904) c5(2905, 2906, 2907, 2908, 2909, 2910) c6( ) c7(T, buf, fM, qb, vf, iW, jh, fr, jE, ci, bh, V, anu, ady, ad, er, zn, Zp, lS, x, cF, F, hw, py, hW, hb, amg, bue, dL, ae, bc, cY, aHE, aNC, iU, eZ, Hu, bu, ho, op, yR, ck, es, iA, vA, cj, k, anx, aps, bt); #c1(FHDC1) c2(NP_203751) c3(FH2 domain-containing protein 1) c4(228496) c5(228497, 228498, 228499, 228500, 228501, 228502, 228503, 228504, 228505, 228506) c6( ) c7(c); #c1(FHIT) c2(NP_002003) c3(bis(5′-adennsyl)-triphosphatase) c4(123149) c5(123150, 123151, 123152, 123153, 123154, 123155, 123156, 123157, 123158, 123159, 123160, 123161, 123162, 123163, 123164, 123165, 123166, 123167, 123168, 123169, 123170) c6( ) c7(T, os, aC, jW, fR, aEn, pf, if, al, WV, EQ, CH, bB, ci, ip, x, aE, Iv, gs, K, hu, eL, xa, li, ayT, iE, aW, Ls, Ku, g, eF, cm, hw, qJ, eM, nB, iA, iT, buk, go, cj, azg, k, m, bul, ik, bui, sw, iB, aw, ht, n, fr, qN, cd, br, ajL, Bl, ft, cq, jz, aMT, h, auS, dL, Gw, pi, pl, aiB, AQ, fe, aq, yq, fq, Ld, Zj, hq, oU, kn, kT, Qy, YE, bP, dB, Qu, Pl, hL, lB, it, B, cn, bL, fM, oe, jx, fZ, aA, hy, j, Qo, AO, pd, q, er, eA, XX, oT, Rl, lg, BJ, eO, aT, rO, qv, Nc, Fx, Tj, ahg, jj, ae, jf, qw, bum, s, vT, iU, oV, Y, ev, r, aYp, en, hf, cl, t, iK, ck, sS, ac, ig, nG, gX, oX, zu, bt, VB, hS, Gl, hl, id, akd, pY, em, jh, oZ, Fb, hF, buj, ad, qC, av, hd, ib, py, io, iL, avQ, buh, auY, d, bug, cH, qt, ff, eH, aeV, aF, iV, gW, iR, bz, LB, es, bF, Ew, bE, afd, Gu, kS, X, jr); #c1(FHIT) c2(XP_011531788) c3(bis(5′-adenosyl)-triphosphatase isoform X2) c4(327873) c5(327874, 327875, 327876, 327877, 327878, 327879) c6( ) c7(T, os, aC, jW, fR, aEn, pf, if, al, WV, EQ, CH, bB, ci, ip, x, aE, lv, gs, K, hu, eL, xa, li, ayT, iE, aW, Ls, Ku, g, eF, cm, bw, qJ, eM, nB, iA, iT, buk, go, cj, azg, k, m, bul, ik, bui, sw, iB, aw, ht, n, fr, qN, cd, br, ajL, Bl, ft, cq, jz, aMT, h, auS, dL, Gw, pi, pl, aiB, AQ, fe, aq, yq, fq, Ld, Zj, hq, oU, kn, kT, Qy, YE, bP, dB, Qu, Pl, hL, lB, it, B, cn, bL, fM, oe, jx, fZ, aA, hy, j, Qo, AO, pd, q, er, eA, XX, oT, Rl, lg, BJ, eO, aT, rO, qv, Nc, Fx, Tj, ahg, jj, ae, jf, qw, bum, s, vT, iU, oV, Y, ev, r, aYp, en, hf, cl, t, iK, ck, sS, ac, ig, nG, gX, oX, zu, bt, VB, hS, Gl, hl, id, akd, pY, em, jh, oZ, Fb, hF, buj, ad, qC, av, hd, ib, py, io, iL, avQ, buh, auY, d, bug, cH, qt, ff, eH, aeV, aF, iV, gW, iR, bz, LB, es, bF, Ew, bE, afd, Gu, kS, X, jr); #c1(FHL1) c2(NP_001153171) c3(four and a half LIM domains protein 1 isoform 5) c4(60492, 60493, 60494) c5(60495, 60496, 60497, 60498, 60499, 60500, 60501, 60502, 60503, 60504, 60505, 60506, 60507, 60508, 60509, 60510, 60511, 60512, 60513, 60514, 60515, 60516, 60517, 60518, 60519, 60520, 60521, 60522) c6( ) c7(lD, T, bun, aLx, yS, bur, aA, cz, fr, ci, BY, XW, cc, aLs, Ae, lG, oj, vc, azm, bl, db, ae, d, s, aW, xs, Pg, Ad, buq, ks, uY, aF, buo, aLw, W, iA, bup, hc, Fw, adg, pJ, y, DH); #c1(FHL1) c2(NP_001153173) c3(four and a half LIM domains protein 1 isoform 3 precursor) c4(60523, 60524, 60525, 60526) c5(60527, 60528, 60529, 60530, 60531, 60532) c6( ) c7(lD, T, bun, aLx, yS, bur, aA, cz, fr, ci, BY, XW, cc, aLs, Ae, lC, oj, vc, azm, bl, db, ae, d, s, aW, xs, Pg, Ad, buq, ks, uY, aF, buo, aLw, W, iA, bup, hc, Fw, adg, pJ, y, DH); #c1(FHL1) c2(NP_001153175) c3(four and a half LIM domains protein 1 isoform 4) c4( ) c5(60533, 60534, 60535, 60536, 60537, 60538, 60539, 60540, 60541, 60542) c6( ) c7(lD, T, bun, aLx, yS, bur, aA, cz, fr, ci, BY, XW, cc, aLs, Ae, lC, oj, vc, azm, bl, db, ae, d, s, aW, xs, Pg, Ad, buq, ks, uY, aF, buo, aLw, W, iA, bup, hc, Fw, adg, pJ, y, DH); #c1(FHL1) c2(XP_006724806) c3(four and a half LIM domains protein 1 isoform X3) c4(296342, 296343, 296344, 296345, 296346, 296347) c5(296348, 296349) c6( ) c7(lD, T, bun, aLx, yS, bur, aA, cz, fr, ci, BY, XW, cc, aLs, Ae, lC, oj, vc, azm, bl, db, ae, d, s, aW, xs, Pg, Ad, buq, ks, uY, aF, buo, aLw, W, iA, bup, hc, Fw, adg, pJ, y, DH); #c1(FHL1) c2(XP_006724809) c3(four and a half LIM domains protein 1 isoform X2) c4( ) c5(296350, 296351, 296352, 296353, 296354, 296355, 296356, 296357) c6( ) c7(lD, T, bun, aLx, yS, bur, aA, cz, fr, ci, BY, XW, cc, aLs, Ae, lC, oj, vc, azm, bl, db, ae, d, s, aW, xs, Pg, Ad, buq, ks, uY, aF, buo, aLw, W, iA, bup, hc, Fw, adg, pJ, y, DH); #c1(FHL1) c2(XP_006724810) c3(four and a half LIM domains protein 1 isoform X1) c4( ) c5(296358, 296359, 296360, 296361, 296362, 296363, 296364, 296365, 296366, 296367, 296368, 296369, 296370, 296371, 296372, 296373, 296374, 296375, 296376, 296377, 296378, 296379, 296380, 296381, 296382, 296383, 296384, 296385, 296386, 296387, 296388, 296389, 296390, 296391, 296392, 296393, 296394, 296395, 296396, 296397, 296398, 296399) c6( ) c7(lD, T, bun, aLx, yS, bur, aA, cz, fr, ci, BY, XW, cc, aLs, Ae, lC, oj, vc, azm, bl, db, ae, d, s, aW, xs, Pg, Ad, buq, ks, uY, aF, buo, aLw, W, iA, bup, hc, Fw, adg, pJ, y, DH); #c1(FHL1) c2(XP_011529618) c3(four and a half LIM domains protein 1 isoform X4) c4(325145) c5(325146, 325147, 325148, 325149, 325150, 325151, 325152, 325153) c6( ) c7(lD, T, bun, aLx, yS, bur, aA, cz, fr, ci, BY, XW, cc, aLs, Ae, lC, oj, vc, azm, bl, db, ae, d, s, aW, xs, Pg, Ad, buq, ks, uY, aF, buo, aLw, W, iA, bup, hc, Fw, adg, pJ, y, DH); #c1(FHL2) c2(XP_005263959) c3(four and a half LIM domains protein 2 isoform X2) c4(278583, 278584, 278585) c5(278586, 278587, 278588, 278589, 278590, 278591, 278592, 278593, 278594, 278595, 278596, 278597, 278598, 278599, 278600, 278601, 278602, 278603, 278604, 278605) c6( ) c7(T, Dh, ha, al, cz, bB, j, ci, pz, q, ad, bv, yg, aT, cy, ae, d, s, aW, Y, eH, r, aq, iV, eF, cm, iR, KM, fq, ck, gk, bE, mx, gX, aS, bt, B); #c1(FHL2) c2(XP_005263963) c3(four and a half LIM domains protein 2 isoform X1) c4( ) c5(278606, 278607, 278608, 278609, 278610, 278611, 278612, 278613, 278614, 278615, 278616, 278617, 278618, 278619, 278620, 278621, 278622, 278623, 278624, 278625, 278626, 278627, 278628, 278629) c6( ) c7(T, Dh, ha, al, cz, bB, j, ci, pz, q, ad, bv, yg, aT, cy, ae, d, s, aW, Y, eH, r, aq, iV, eF, cm, iR, KM, fq, ck, gk, bE, mx, gX, aS, bt, B); #c1(FHL2) c2(XP_011509102) c3(four and a half LIM domains protein 2 isoform X3) c4(299685, 299686) c5(299687, 299688, 299689, 299690, 299691, 299692, 299693, 299694, 299695, 299696) c6( ) c7(T, Dh, ha, al, cz, bB, j, ci, pz, q, ad, bv, yg, aT, cy, ae, d, s, aW, Y, eH, r, aq, iV, eF, cm, iR, KM, fq, ck, gk, bE, mx, gX, aS, bt, B); #c1(FHL5) c2(XP_006715676) c3(four and a half LIM domains protein 5 isoform X1) c4(289714, 289715) c5(289716, 289717, 289718, 289719, 289720, 289721, 289722, 289723, 289724, 289725, 289726, 289727, 289728, 289729, 289730, 289731, 289732) c6( ) c7(bL, bM, T, gU, aw, j, ct, uu, eA, qH, AW, sO, gd, aT, dV, vH, iv, bK, an, af, A, s, ND, aW, AV, kQ, at, eg); #c1(FHOD1) c2(NP_037373) c3(FH1/FH2 domain-containing protein 1) c4(175097) c5(175098, 175099, 175100, 175101, 175102, 175103) c6( ) c7(By, T); #c1(FHOD3) c2(NP_001268668) c3(FH1/FH2 domain-containing protein 3 isoform 2) c4(100113) c5(100114, 100115, 100116, 100117, 100118, 100119) c6( ) c7(dQ, cc, lB, vc, mx); #c1(FHOD3) c2(NP_079411) c3(FH1/FH2 domain-containing protein 3 isoform 1) c4(218005) c5(218006, 218007, 218008, 218009, 218010, 218011) c6( ) c7(dQ, cc, lB, vc, mx); #c1(FHOD3) c2(XP_005258412) c3(FH1/FH2 domain-containing protein 3 isoform X12) c4(275648) c5(275649, 275650, 275651, 275652, 275653, 275654) c6( ) c7(dQ, cc, lB, vc, mx); #c1(FIBP) c2(NP_004205) c3(acidic fibroblast growth factor intracellular-binding protein isoform b) c4(144321) c5(144322, 144323, 144324, 144325, 144326, 144327) c6( ) c7(al); #c1(FIBP) c2(NP_942600) c3(acidic fibroblast growth factor intracellular-binding protein isoform a) c4(260608) c5(260609, 260610, 260611, 260612, 260613, 260614) c6( ) c7(al); #c1(FIG4) c2(NP_055660) c3(polyphosphoinositide phosphatase) c4(182580, 182581, 182582, 182583, 182584) c5(182585, 182586, 182587, 182588, 182589, 182590) c6( ) c7(ql, c, Ol, but, axW, ha, agU, TQ, Lq, buu, fu, bus, bU, mF, bX, eA, cd, buv); #c1(FIG4) c2(XP_011534583) c3(polyphosphoinositide phosphatase isoform X1) c4(331129) c5(331130, 331131, 331132, 331133, 331134, 331135, 331136, 331137, 331138, 331139, 331140, 331141, 331142, 331143, 331144, 331145, 331146, 331147, 331148, 331149, 331150, 331151, 331152, 331153, 331154, 331155, 331156, 331157, 331158, 331159) c6( ) c7(ql, c, Ol, but, axW, ha, agU, TQ, Lq, buu, fu, bus, bU, mF, bX, eA, cd, buv); #c1(FIGF) c2(NP_004460) c3(vascular endothelial growth factor D preproprotein) c4(146533) c5(146534, 146535, 146536, 146537, 146538, 146539) c6( ) c7(sY, T, fM, dD, aC, Tb, QO, sw, ea, e, Xi, jh, aA, eq, ci, fr, q, ad, eA, ft, hd, aE, py, aT, Vv, lG, io, dL, hB, eL, d, mR, s, Jl, aW, qS, ff, r, kp, aF, en, g, t, uC, bz, Bx, cm, LB, ck, pu, W, eM, nB, nM, iA, PN, lf, iu, y); #c1(FIGLA) c2(NP_001004311) c3(factor in the germline alpha) c4(20539) c5(20540, 20541, 20542, 20543, 20544, 20545) c6( ) c7(il, zZ, buw); #c1(FIGN) c2(NP_060556) c3(fidgetin) c4(196546) c5(196547, 196548, 196549, 196550, 196551, 196552) c6( ) c7(oe, aw, pN); #c1(FILIP1) c2(NP_001276916) c3(filamin-A-interacting protein 1 isoform 1) c4(108623) c5(108624) c6( ) c7(aA); #c1(FILIP1) c2(NP_001287795) c3(filamin-A-interacting protein 1 isoform 3) c4(112890) c5(112891, 112892, 112893, 112894, 112895, 112896) c6( ) c7(aA); #c1(FILIP1) c2(XP_005248770) c3(filamin-A-interacting protein 1 isoform X1) c4(268562) c5(268563, 268564, 268565, 268566, 268567, 268568, 268569, 268570, 268571, 268572, 268573) c6( ) c7(aA); #c1(FILIP1L) c2(NP_001035924) c3(filamin A-interacting protein 1-like isoform 3) c4(33405, 33406) c5(33407, 33408, 33409, 33410, 33411, 33412, 33413, 33414, 33415, 33416, 33417, 33418, 33419, 33420, 33421, 33422, 33423, 33424, 33425, 33426, 33427, 33428, 33429, 33430, 33431) c6( ) c7(T, EQ, r, m, t, ae, q, ad); #c1(FILIP1L) c2(NP_001269723) c3(filamin A-interacting protein 1-like isoform 5) c4(102702, 102703) c5(102704, 102705, 102706, 102707, 102708, 102709, 102710, 102711, 102712, 102713, 102714, 102715, 102716, 102717, 102718, 102719) c6( ) c7(T, EQ, r, m, t, ae, q, ad); #c1(FILIP1L) c2(NP_878913) c3(filamin A-interacting protein 1-like isoform 1) c4(257159) c5(257160, 257161, 257162, 257163, 257164, 257165, 257166) c6( ) c7(T, EQ, r, m, t, ae, q, ad); #c1(FILIP1L) c2(XP_011510673) c3(filamin A-interacting protein 1-like isoform X2) c4(301132, 301133, 301134) c5( ) c6( ) c7(T, EQ, r, m, t, ae, q, ad); #c1(FIPIL1) c2(NP_001128409) c3(pre-mRNA 3′-end-processing factor FIP1 isoform 2) c4(49970) c5(49971, 49972, 49973, 49974, 49975, 49976) c6( ) c7(Nq, ck, aiu, Nr, T, Ta, iU, pr, oy, qd, aKC, apY, dz, po, Fu, fb, bt, op, yR, Tc); #c1(FIPIL1) c2(NP_001128410) c3(pre-mRNA 3′-end-processing factor FIP1 isoform 3) c4(49977) c5(49978, 49979, 49980, 49981, 49982, 49983) c6( ) c7(Nq, ck, aiu, Nr, T, Ta, iU, pr, oy, qd, aKC, apY, dz, po, Fu, fb, bt, op, yR, Tc); #c1(FIPIL1) c2(NP_112179) c3(pre-mRNA 3′-end-processing factor FIP1 isoform 1) c4(220646) c5(220647, 220648, 220649, 220650, 220651, 220652) c6( ) c7(Nq, ck, aiu, Nr, T, Ta, iU, pr, oy, qd, aKC, apY, dz, po, Fu, fb, bt, op, yR, Tc); #c1(FIS1) c2(NP_057152) c3(mitochondrial fission 1 protein) c4(189166) c5(189167, 189168, 189169, 189170, 189171, 189172) c6( ) c7(bt, bux, c); #c1(FITM1) c2(NP_981947) c3(fat storage-inducing transmembrane protein 1) c4(263177) c5(263178, 263179, 263180, 263181, 263182, 263183) c6( ) c7(q, iT, r); #c1(FITM2) c2(NP_001073941) c3(fat storage-inducing transmembrane protein 2) c4(36635) c5(36636, 36637, 36638, 36639, 36640, 36641) c6( ) c7(bL); #c1(FJXI) c2(NP_055159) c3(four-jointed hex protein 1 precursor) c4(179519) c5(179520, 179521, 179522, 179523, 179524, 179525) c6( ) c7(bB, bE, q, r); #c1(FKBP10) c2(NP_068758) c3(peptidyl-prolyl cis-trans isomerase FKBP10 precursor) c4(210202, 210203, 210204, 210205, 210206) c5(210207, 210208, 210209, 210210, 210211, 210212, 210213, 210214, 210215, 210216, 210217, 210218, 210219, 210220, 210221, 210222, 210223, 210224, 210225, 210226, 210227, 210228, 210229, 210230, 210231, 210232, 210233, 210234, 210235, 210236, 210237, 210238, 210239, 210240, 210241, 210242) c6( ) c7(T, gU, aLt, fG, buA, ci, PJ, q, aLl, vH, K, zp, azh, buB, aRV, r, agF, t, buy, alC, buz, m); #c1(FKBP10) c2(XP_011523401) c3(peptidyl-prolyl cis-trans isomerase FKBP10 isoform X1) c4(317941) c5( ) c6( ) c7(T, gU, aLt, fG, buA, ci, PJ, q, aLl, vH, K, zp, azh, buB, aRV, r, agF, t, buy, alC, buz, m); #c1(FKBP11) c2(NP_001137253) c3(peptidyl-prolyl cis-trans isomerase FKBP11 isoform 2) c4( ) c5(55161, 55162, 55163, 55164, 55165) c6( ) c7(PJ); #c1(FKBP11) c2(NP_001137254) c3(peptidyl-prolyl cis-trans isomerase FKBP11 isoform 3 precursor) c4(55166) c5(55167, 55168, 55169, 55170, 55171, 55172) c6( ) c7(PJ); #c1(FKBP11) c2(NP_057678) c3(peptidyl-prolyl cis-trans isomerase FKBP11 isoform 1 precursor) c4(192317, 192318) c5(192319, 192320, 192321, 192322, 192323, 192324, 192325) c6( ) c7(PJ); #c1(FKBP14) c2(NP_060416) c3(peptidyl-prolyl cis-trans isomerase FKBP14 precursor) c4(195844) c5(195845, 195846, 195847, 195848, 195849, 195850) c6( ) c7(Eh, buC, PJ); #c1(FKBP15) c2(NP_056073) c3(FK506-binding protein 15) c4(185518, 185519, 185520) c5(185521, 185522, 185523, 185524, 185525, 185526, 185527, 185528, 185529, 185530, 185531, 185532) c6( ) c7(lB, xa); #c1(FKBP15) c2(XP_006717081) c3(FK506-binding protein 15 isoform X1) c4( ) c5(290706, 290707, 290708, 290709, 290710, 290711) c6( ) c7(lB, xa); #c1(FKBPIA) c2(NP_000792) c3(peptidyl-prolyl cis-trans isomerase FKBPIA isoform a) c4(16073, 16074, 16075, 16076, 16077) c5(16078, 16079, 16080, 16081, 16082, 16083, 16084, 16085, 16086, 16087, 16088, 16089, 16090, 16091, 16092, 16093, 16094, 16095, 16096, 16097, 16098, 16099, 16100, 16101, 16102, 16103, 16104, 16105, 16106, 16107, 16108, 16109, 16110, 16111, 16112, 16113, 16114, 16115) c6( ) c7(aiV, pe, aW, Ol, an, eZ, aT, akB, bK, lQ, app, PJ, bp, it, cd); #c1(FKBP1B) c2(NP_004107) c3(peptidyl-prolyl cis-trans isomerase FKBP1B isoform a) c4(143633) c5(143634, 143635, 143636, 143637, 143638, 143639, 143640) c6( ) c7(qa, cc, cz, gZ, aj, PJ, cd, J); #c1(FKBP1B) c2(NP_473374) c3(peptidyl-prolyl cis-trans isomerase FKBP1B isoform b) c4(230494) c5(230495, 230496, 230497, 230498, 230499) c6( ) c7(qa, cc, cz, gZ, aj, PJ, cd, J); #c1(FKBP2) c2(NP_004461) c3(peptidyl-prolyl cis-trans isomerase FKBP2 precursor) c4(146540, 146541) c5(146542, 146543, 146544, 146545, 146546, 146547, 146548, 146549, 146550, 146551, 146552, 146553, 146554, 146555, 146556, 146557, 146558, 146559, 146560, 146561) c6( ) c7(T, aF, aA, jx, PJ); #c1(FKBP3) c2(NP_002004) c3(peptidyl-prolyl cis-trans isomerase FKBP3) c4(123171) c5(123172, 123173, 123174, 123175, 123176, 123177, 123178, 123179, 123180, 123181) c6( ) c7(PJ); #c1(FKBP4) c2(NP_002005) c3(peptidyl-prolyl cis-trans isomerase FKBP4) c4(123182) c5(123183, 123184, 123185, 123186, 123187, 123188, 123189, 123190) c6(123191, 123192) c7(bM, T, aC, pf, wu, jx, bO, Nt, bS, ct, ci, PJ, ad, dP, x, Hx, aE, ws, dV, axc, aT, PD, h, K, wm, an, he, ae, af, Nr, aW, Y, lo, Pp, Xm, g, Z, PU, cm, iK, hq, Nq, pZ, cA, bE, Ei, pg, Le, B); #c1(FKBP5) c2(NP_001139247) c3(peptidyl-prolyl cis-trans isomerase FKBP5 isoform 1) c4(58969, 58970, 58971) c5(58972, 58973, 58974, 58975, 58976, 58977, 58978, 58979, 58980, 58981, 58982, 58983, 58984, 58985, 58986, 58987, 58988, 58989, 58990, 58991, 58992, 58993, 58994, 58995, 58996, 58997, 58998, 58999, 59000, 59001) c6( ) c7(tJ, T, bM, jx, bO, Nt, aA, n, bS, gf, ct, ci, PJ, q, ad, eA, eJ, buD, dP, Hx, x, aE, ws, aT, h, aaw, bK, K, hK, he, ae, af, hZ, gj, Nr, aWm, Y, gl, lo, aF, po, g, Eg, PU, FX, cM, Z, iV, jb, FT, hq, Nq, ok, pZ, cA, abS, Ei, vL, pg, sv, pK, y, lB); #c1(FKBP5) c2(NP_001139249) c3(peptidyl-prolyl cis-trans isomerase FKBP5 isoform 2) c4(59002, 59003) c5(59004, 59005, 59006, 59007, 59008, 59009, 59010, 59011, 59012, 59013, 59014, 59015) c6( ) c7(tJ, T, bM, jx, bO, Nt, aA, n, bS, gf, ct, ci, PJ, q, ad, eA, eJ, buD, dP, Hx, x, aE, ws, aT, h, aaw, bK, K, hK, he, ae, af, hZ, gj, Nr, aWm, Y, gl, lo, aF, po, g, Eg, PU, FX, cM, Z, iV, jb, FT, hq, Nq, ok, pZ, cA, abS, Ei, vL, pg, sv, pK, y, lB); #c1(FKBP6) c2(NP_001128683) c3(inactive peptidyl-prolyl cis-trans isomerase FKBP6 isoform b) c4(50503) c5(50504, 50505, 50506, 50507, 50508, 50509) c6( ) c7(gU, alC, ND, aer, vH, PJ, af, azh, aLl); #c1(FKBP6) c2(NP_003593) c3(inactive peptidyl-prolyl cis-trans isomerase FKBP6 isoform a) c4(139436) c5(139437, 139438, 139439, 139440, 139441, 139442) c6( ) c7(gU, alC, ND, aer, vH, PJ, af, azh, aLl); #c1(FKBP7) c2(NP_001128684) c3(peptidyl-prolyl cis-trans isomerase FKBP7 isoform b precursor) c4(50510) c5(50511, 50512, 50513, 50514, 50515, 50516) c6( ) c7(PJ); #c1(FKBP7) c2(NP_851939) c3(peptidyl-prolyl cis-trans isomerase FKBP7 isoform a precursor) c4(254714, 254715) c5(254716, 254717, 254718, 254719, 254720, 254721, 254722, 254723, 254724, 254725, 254726, 254727) c6( ) c7(PJ); #c1(FKBP8) c2(NP_036313) c3(peptidyl-prolyl cis-trans isomerase FKBP8) c4(172959) c5(172960, 172961, 172962, 172963, 172964, 172965) c6( ) c7(XW, PJ); #c1(FKBP9) c2(NP_001271270) c3(peptidyl-prolyl cis-trans isomerase FKBP9 isoform 2 precursor) c4(103799) c5(103800, 103801, 103802, 103803, 103804, 103805) c6( ) c7(PJ); #c1(FKBP9) c2(NP_001271272) c3(peptidyl-prolyl cis-trans isomerase FKBP9 isoform 3) c4(103806) c5(103807, 103808, 103809, 103810, 103811, 103812) c6( ) c7(PJ); #c1(FKBP9) c2(NP_009201) c3(peptidyl-prolyl cis-trans isomerase FKBP9 isoform 1 precursor) c4(171484, 171485) c5(171486, 171487, 171488, 171489, 171490, 171491, 171492, 171493, 171494, 171495, 171496, 171497) c6( ) c7(PJ); #c1(FKBPL) c2(NP_071393) c3(FK506-binding protein-like) c4(211408) c5(211409, 211410, 211411, 211412, 211413, 211414, 211415, 211416, 211417, 211418, 211419, 211420, 211421) c6( ) c7(T, gU, W, aW, eZ, aT); #c1(FKBPL) c2(XP_011545979) c3(FK506-binding protein-like isoform X1) c4(344808) c5(344809, 344810, 344811, 344812, 344813, 344814) c6( ) c7(T, gU, W, aW, eZ, aT); #c1(FKRP) c2(XP_011525609) c3(fukutin-related protein isoform X1) c4(320016) c5(320017, 320018, 320019, 320020, 320021, 320022, 320023, 320024, 320025, 320026, 320027) c6( ) c7(buE, buG, nA, cd, azL, Ae, oj, Ak, K, Wq, buF, VC, aqZ, xs, FB, mx, km, cj, rx, bcZ, bD, lf); #c1(FKTN) c2(NP_001073270) c3(fukutin isoform a) c4(35661) c5(35662, 35663, 35664, 35665, 35666, 35667, 35668) c6( ) c7(T, buJ, nA, Mo, cc, aLs, Ae, hb, Ak, io, vc, buH, hB, Wq, VC, aqZ, xs, uY, axZ, mx, bul, km, bcZ, lf); #c1(FKTN) c2(NP_001185892) c3(fukutin isoform b) c4(76664, 76665) c5(76666, 76667, 76668, 76669, 76670, 76671, 76672, 76673, 76674, 76675, 76676, 76677, 76678, 76679) c6( ) c7(T, buJ, nA, Mo, cc, aLs, Ae, hb, Ak, io, vc, buH, hB, Wq, VC, aqZ, xs, uY, axZ, mx, bul, km, bcZ, lf); #c1(FKTN) c2(XP_006717077) c3(fukutin isoform X12) c4(290690, 290691) c5(290692, 290693, 290694, 290695, 290696, 290697, 290698, 290699, 290700, 290701, 290702, 290703, 290704, 290705) c6( ) c7(T, buJ, nA, Mo, cc, aLs, Ae, hb, Ak, io, vc, buH, hB, Wq, VC, aqZ, xs, uY, axZ, mx, bul, km, bcZ, lf); #c1(FKTN) c2(XP_011516681) c3(fukutin isoform X4) c4(310095) c5(310096, 310097, 310098, 310099, 310100, 310101, 310102) c6( ) c7(T, buJ, nA, Mo, cc, aLs, Ae, hb, Ak, io, vc, buH, hB, Wq, VC, aqZ, xs, uY, axZ, mx, bul, km, bcZ, lf); #c1(FLAD1) c2(NP_001171820) c3(FAD synthase isoform 3) c4( ) c5(71843, 71844, 71845, 71846, 71847) c6( ) c7(bL, bM, om, e, M, wR, aj, j, H, J, L); #c1(FLAD1) c2(NP_001171821) c3(FAD synthase isoform 4) c4(71848, 71849) c5(71850, 71851, 71852, 71853, 71854, 71855, 71856, 71857, 71858, 71859, 71860, 71861, 71862, 71863, 71864, 71865, 71866, 71867) c6( ) c7(bL, bM, om, e, M, wR, aj, j, H, J, L); #c1(FLAD1) c2(NP_079483) c3(FAD synthase isoform 1) c4(218284, 218285) c5(218286, 218287, 218288, 218289, 218290, 218291, 218292, 218293, 218294, 218295, 218296, 218297, 218298, 218299, 218300, 218301, 218302, 218303, 218304) c6( ) c7(bL, bM, om, e, M, wR, aj, j, H, J, L); #c1(FLAD1) c2(NP_958800) c3(FAD synthase isoform 2) c4(262205, 262206, 262207) c5( ) c6( ) c7(bL, bM, om, e, M, wR, aj, j, H, J, L); #c1(FLAD1) c2(XP_005245559) c3(FAD synthase isoform X1) c4(266718) c5( ) c6( ) c7(bL, bM, om, e, M, wR, aj, j, H, J, L); #c1(FLAD1) c2(XP_005245560) c3(FAD synthase isoform X2) c4( ) c5(266719, 266720, 266721, 266722, 266723, 266724) c6( ) c7(bL, bM, om, e, M, wR, aj, j, H, J, L); #c1(FLCN) c2(NP_653207) c3(folliculin isoform 2) c4(239071) c5(239072, 239073, 239074, 239075, 239076, 239077, 239078, 239079, 239080, 239081, 239082, 239083, 239084, 239085, 239086, 239087, 239088, 239089, 239090, 239091, 239092, 239093) c6( ) c7(T, Uc, WA, rQ, aA, buK, buN, ci, fr, lu, q, lS, buM, hd, py, Db, nX, buL, bj, K, lQ, ni, bug, r, aq, aF, cl, es, iA, bE, hk, buO, VB); #c1(FLCN) c2(NP_659434) c3(folliculin isoform 1) c4(239873, 239874) c5(239875, 239876, 239877, 239878, 239879, 239880) c6( ) c7(T, Uc, WA, rQ, aA, buK, buN, ci, fr, lu, q, lS, buM, hd, py, Db, nX, buL, bj, K, lQ, ni, bug, r, aq, aF, cl, es, iA, bE, hk, buO, VB); #c1(FLCN) c2(XP_011522022) c3(folliculin isoform X3) c4(316709) c5( ) c6( ) c7(T, Uc, WA, rQ, aA, buK, buN, ci, fr, Iu, q, IS, buM, hd, py, Db, nX, buL, bj, K, lQ, ni, bug, r, aq, aF, cI, es, iA, bE, hk, buO, VB); #c1(FLG) c2(NP_002007) c3(filaggrin) c4(123202, 123203) c5(123204, 123205, 123206, 123207, 123208, 123209, 123210, 123211, 123212, 123213, 123214, 123215, 123216, 123217, 123218, 123219, 123220, 123221, 123222, 123223, 123224, 123225, 123226, 123227) c6( ) c7(bM, bjX, T, JN, akc, buX, buP, btu, Pe, aj, pM, Jx, aVU, J, wD, NF, btD, aCF, oz, buR, apJ, buY, buW, aT, btA, fn, bam, lQ, Xl, Cy, bvb, xP, buV, buU, aTg, ff, sp, fJ, mQ, buZ, Sn, hQ, dN, cr, aEW, buS, fe, buQ, Xk, en, eE, Vk, fq, aTi, dr, ck, cT, bva, OW, pa, buT, Jr, vZ, z, JM, NI, bvc, Km, y, cE, bIT); #c1(FLG) c2(XP_011507631) c3(filaggrin isoform X1) c4(297568, 297569) c5(297570, 297571, 297572, 297573, 297574, 297575, 297576, 297577) c6(297578, 297579) c7(bM, bjX, T, JN, akc, buX, buP, btu, Pe, aj, pM, Jx, aVU, J, wD, NF, btD, aCF, oz, buR, apJ, buY, buW, aT, btA, fn, bam, lQ, Xl, Gy, bvb, xP, buV, buU, aTq, ff, sp, fJ, mQ, buZ, Sn, hQ, dN, cr, aEW, buS, fe, buQ, Xk, en, eE, Vk, fq, aTi, dr, ck, cT, bva, OW, pa, buT, Jr, vZ, z, JM, NI, bvc, Km, y, cE, bIT); #c1(FLG2) c2(NP_001014364) c3(filaggrin-2) c4(25817) c5(25818, 25819, 25820, 25821, 25822, 25823, 25824) c6( ) c7(eE); #c1(FLG2) c2(XP_011507833) c3(filaggrin-2 isoform X1) c4( ) c5(297980) c6( ) c7(eE); #c1(FLI1) c2(NP_001257939) c3(Friend leukemia integration 1 transcription factor isoform 3) c4(95828) c5(95829, 95830, 95831, 95832, 95833, 95834) c6( ) c7(T, dA, ya, zt, jh, bB, oH, ci, C, aGK, Wa, brK, uE, aY, mC, ad, hF, er, aHZ, bv, iJ, x, cq, ady, aCX, pX, avA, SV, aT, Ou, fb, ae, dx, jf, iF, IR, iU, aW, Y, oV, eH, eZ, eF, t, cm, fq, pb, adj, bw, ck, bnN, ac, bP, aDs, bE, bvd, hc, gX, dy, m, qF, fL, Xu, zu, bt); #c1(FLI1) c2(NP_001257941) c3(Friend leukemia integration 1 transcription factor isoform 4) c4(95835) c5(95836, 95837, 95838, 95839, 95840, 95841) c6( ) c7(T, dA, ya, zt, jh, bB, oH, ci, C, aGK, Wa, brK, uE, aY, mC, ad, hF, er, aHZ, bv, iJ, x, cq, ady, aCX, pX, avA, SV, aT, Ou, fb, ae, dx, jf, iF, IR, iU, aW, Y, oV, eH, eZ, eF, t, cm, fq, pb, adj, bw, ck, bnN, ac, bP, aDs, bE, bvd, hc, gX, dy, m, qF, fL, Xu, zu, bt); #c1(FLI1) c2(NP_002008) c3(Friend leukemia integration 1 transcription factor isoform 1) c4(123228, 123229) c5(123230, 123231, 123232, 123233, 123234, 123235, 123236, 123237) c6( ) c7(T, dA, ya, zt, jh, bB, oH, ci, C, aGK, Wa, brK, uE, aY, mC, ad, hF, er, aHZ, bv, iJ, x, cq, ady, aCX, pX, avA, SV, aT, Ou, fb, ae, dx, jf, iF, IR, iU, aW, Y, oV, eH, eZ, eF, t, cm, fq, pb, adj, bw, ck, bnN, ac, bP, aDs, bE, bvd, hc, gX, dy, m, qF, fL, Xu, zu, bt); #c1(FLI1) c2(XP_011541003) c3(Friend leukemia integration 1 transcription factor isoform X1) c4( ) c5(339535, 339536, 339537, 339538, 339539) c6( ) c7(T, dA, ya, zt, jh, bB, oH, ci, C, aGK, Wa, brK, uE, aY, mC, ad, hF, er, aHZ, bv, iJ, x, cq, ady, aCX, pX, avA, SV, aT, Ou, fb, ae, dx, jf, iF, IR, iU, aW, Y, oV, eH, eZ, eF, t, cm, fq, pb, adj, bw, ck, bnN, ac, bP, aDs, bE, bvd, hc, gX, dy, m, qF, fL, Xu, zu, bt); #c1(FLI1) c2(NP_001243194) c3(protein flightless-1 homolog isoform 3) c4(90087) c5(90088, 90089, 90090, 90091, 90092, 90093) c6( ) c7(T, dA, ya, zt, jh, aTy, oH, ci, uE, aGK, IR, aY, hF, XM, mC, ad, er, aHZ, iJ, bv, x, ady, cq, aCX, pX, avA, SV, aT, Ou, fb, ae, dx, jf, iF, iU, aW, oV, eH, eZ, eF, t, cm, adj, pb, bw, ck, bnN, QG, bP, aDs, bvd, hc, gX, dy, m, qF, fL, Xu, zu, bt); #c1(FLI1) c2(NP_002009) c3(protein flightless-1 homolog isoform 1) c4(123238) c5(123239, 123240, 123241, 123242, 123243, 123244, 123245, 123246, 123247, 123248, 123249, 123250) c6( ) c7(T, dA, ya, zt, jh, aTy, oH, ci, uE, aGK, IR, aY, hF, XM, mC, ad, er, aHZ, iJ, bv, x, ady, cq, aCX, pX, avA, SV, aT, Ou, fb, ae, dx, jf, iF, iU, aW, oV, eH, eZ, eF, t, cm, adj, pb, bw, ck, bnN, QG, bP, aDs, bvd, hc, gX, dy, m, qF, fL, Xu, zu, bt); #c1(FLI1) c2(XP_005256612) c3(protein flightless-1 homolog isoform X1) c4(274231) c5( ) c6( ) c7(T, dA, ya, zt, jh, aTy, oH, ci, uE, aGK, IR, aY, hF, XM, mC, ad, er, aHZ, iJ, bv, x, ady, cq, aCX, pX, avA, SV, aT, Ou, fb, ae, dx, jf, iF, iU, aW, oV, eH, eZ, eF, t, cm, adj, pb, bw, ck, bnN, QG, bP, aDs, bvd, hc, gX, dy, m, qF, fL, Xu, zu, bt); #c1(FLNA) c2(NP_001104026) c3(filamin-A isoform 2) c4(42070) c5(42071, 42072, 42073, 42074, 42075, 42076, 42077, 42078, 42079, 42080, 42081, 42082) c6( ) c7(T, dD, bvh, hI, fR, qo, lT, ea, acz, e, ha, aA, cz, n, aj, bS, j, bvf, ct, cq, bvn, Cd, Eh, afz, J, ad, hX, md, aE, asY, oj, aT, hD, dV, h, dL, ja, K, bvo, afx, rv, ae, aAe, cC, aa, bvm, eL, eG, A, ago, amx, bvg, up, cH, bvk, Y, aW, lW, hI, bvi, Ll, aEW, aGd, aF, brr, Lk, aot, Z, akb, QK, bz, TA, WO, ac, iT, bve, Ji, uJ, Km, aS, Fw, bvj, fh, B, bvI); #c1(FLNA) c2(NP_001447) c3(filamin-A isoform 1) c4(117891, 117892) c5(117893, 117894, 117895, 117896, 117897, 117898, 117899, 117900, 117901) c6( ) c7(T, dD, bvh, hI, fR, qo, IT, ea, acz, e, ha, aA, cz, n, aj, bS, j, bvf, ct, eq, bvn, Cd, Eh, afz, J, ad, hX, md, aE, asY, oj, aT, hD, dV, h, dL, ja, K, bvo, afx, rv, ae, aAe, cC, aa, bvm, eL, eG, A, ago, amx, bvg, up, cH, bvk, Y, aW, IW, hI bvi, Ll, aEW, aGd, aF, brr, Lk, aot, Z, akb, QK, bz, TA, WO, ac, iT, bve, Ji, uJ, Km, aS, Fw, bvj, fh, B, bvl); #c1(FLNA) c2(XP_011529431) c3(filamin-A isoform X3) c4(324862) c5( ) c6( ) c7(T, dD, bvh, hI, fR, qo, IT, ea, acz, e, ha, aA, cz, n, aj, bS, j, bvf, ct, eq, bvn, Cd, Eh, afz, J, ad, hX, md, aE, asY, oj, aT, hD, dV, h, dL, ja, K, bvo, afx, rv, ae, aAe, cC, aa, bvm, eL, eG, A, ago, amx, bvg, up, cH, bvk, Y, aW, IW, hI bvi, Ll, aEW, aGd, aF, brr, Lk, aot, Z, akb, QK, bz, TA, WO, ac, iT, bve, Ji, uJ, Km, aS, Fw, bvj, fh, B, bvl); #c1(FLNA) c2(XP_011529432) c3(filamin-A isoform X4) c4( ) c5(324863, 324864, 324865, 324866, 324867, 324868) c6( ) c7(T, dD, bvh, hI fR, qo, IT, ea, acz, e, ha, aA, cz, n, aj, bS, j, bvf, ct, eq, bvn, Cd, Eh, afz, J, ad, hX, md, aE, asY, oj, aT, hD, dV, h, dL, ja, K, bvo, afx, rv, ae, aAe, cC, aa, bvm, eL, eG, A, ago, amx, bvg, up, cH, bvk, Y, aW, IW, hI bvi, Ll, aEW, aGd, aF, brr, Lk, aot, Z, akb, QK, bz, TA, WO, ac, iT, bve, Ji, uJ, Km, aS, Fw, bvj, fh, B, bvI); #c1(FLNB) c2(NP_001157789) c3(filamin-B isoform 1) c4(62672) c5(62673, 62674, 62675, 62676, 62677, 62678, 62679, 62680, 62681, 62682, 62683, 62684) c6( ) c7(oO, T, os, if, eb, bvq, cL, bvx, ci, aY, x, Na, azY, K, hu, hH, aa, dH, bbe, bhd, agj, eE, cm, bw, bvr, CC, iT, aiM, cj, k, qR, bvp, aw, fN, n, fr, qN, eW, hr, h, eV, A, mR, bhg, aNd, bvv, pg, ut, it, B, bvt, jx, eX, rf, aA, bvu, aNe, V, o, jF, Nc, adV, Fg, rv, bA, iU, Y, afq, lo, iK, ck, BU, iM, ig, bvy, hr, fP, bt, bvw, kV, bvs, ow, qb, jh, oZ, hF, hX, av, F, oj, hD, iL, yF, uQ, je, KS, cr, eZ, aF, xH, hp, aot, iV, bz, Lj, ag, Fw, y, VK, hv); #c1(FLNB) c2(NP_001157790) c3(filamin-B isoform 3) c4(62685, 62686) c5(62687, 62688, 62689, 62690, 62691, 62692, 62693, 62694, 62695, 62696, 62697, 62698) c6( ) c7(oO, T, os, if, eb, bvq, cL, bvx, ci, aY, x, Na, azY, K, hu, hH, aa, dH, bbe, bhd, agj, eE, cm, bw, bvr, CC, iT, aiM, cj, k, qR, bvp, aw, fN, n, fr, qN, eW, hr, h, eV, A, mR, bhg, aNd, bvv, pg, ut, it, B, bvt, jx, eX, rf, aA, bvu, aNe, V, o, jF, Nc, adV, Fg, rv, bA, iU, Y, afq, lo, iK, ck, BU, iM, ig, bvy, hr, fP, bt, bvw, kV, bvs, ow, qb, jh, oZ, hF, hX, av, F, oj, hD, iL, yF, uQ, je, KS, cr, eZ, aF, xH, hp, aot, iV, bz, Lj, ag, Fw, y, VK, hv); #c1(FLNB) c2(NP_001157791) c3(filamin-B isoform 4) c4(62699) c5(62700, 62701, 62702, 62703, 62704, 62705) c6( ) c7(oO, T, os, if, eb, bvq, cL, bvx, ci, aY, x, Na, azY, K, hu, hH, aa, dH, bbe, bhd, agj, eE, cm, bw, bvr, CC, iT, aiM, cj, k, qR, bvp, aw, fN, n, fr, qN, eW, hr, h, eV, A, mR, bhg, aNd, bvv, pg, ut, it, B, bvt, jx, eX, rf, aA, bvu, aNe, V, o, jF, Nc, adV, Fg, rv, bA, iU, Y, afq, lo, iK, ck, BU, iM, ig, bvy, hr, fP, bt, bvw, kV, bvs, ow, qb, jh, oZ, hF, hX, av, F, oj, hD, iL, yF, uQ, je, KS, cr, eZ, aF, xH, hp, aot, iV, bz, Lj, ag, Fw, y, VK, hv); #c1(FLNB) c2(NP_001448) c3(filamin-B isoform 2) c4(117902, 117903) c5(117904, 117905, 117906, 117907, 117908, 117909, 117910, 117911, 117912, 117913, 117914, 117915) c6( ) c7(oO, T, os, if, eb, bvq, cL, bvx, ci, aY, x, Na, azY, K, hu, hH, aa, dH, bbe, bhd, agj, eE, cm, bw, bvr, CC, iT, aiM, cj, k, qR, bvp, aw, fN, n, fr, qN, eW, br, h, eV, A, mR, bhg, aNd, bvv, pg, ut, it, B, bvt, jx, eX, rf, aA, bvu, aNe, V, o, jF, Nc, adV, Fg, rv, bA, iU, Y, afq, lo, iK, ck, BU, iM, ig, bvy, hr, fP, bt, bvw, kV, bvs, ow, qb, jh, oZ, hF, hX, av, F, oj, hD, iL, yF, uQ, je, KS, cr, eZ, aF, xH, hp, aot, iV, bz, Lj, ag, Fw, y, VK, hv); #c1(FLNB) c2(XP_005265034) c3(filamin-B isoform X1) c4(279403) c5( ) c6( ) c7(oO, T, os, if, eb, bvq, cL, bvx, ci, aY, x, Na, azY, K, hu, hH, aa, dH, bbe, bhd, agj, eE, cm, bw, bvr, CC, iT, aiM, cj, k, qR, bvp, aw, fN, n, fr, qN, eW, br, h, eV, A, mR, bhg, aNd, bvv, pg, ut, it, B, bvt, jx, eX, rf, aA, bvu, aNe, V, o, jF, Nc, adV, Fg, rv, bA, iU, Y, afq, lo, iK, ck, BU, iM, ig, bvy, hr, fP, bt, bvw, kV, bvs, ow, qb, jh, oZ, hF, hX, av, F, oj, hD, iL, yF, uQ, je, KS, cr, eZ, aF, xH, hp, aot, iV, bz, Lj, ag, Fw, y, VK, hv); #c1(FLNB) c2(XP_005265038) c3(filamin-B isoform X3) c4(279404) c5(279405, 279406, 279407, 279408, 279409, 279410) c6( ) c7(oO, T, os, if, eb, bvq, cL, bvx, ci, aY, x, Na, azY, K, hu, hH, aa, dH, bbe, bhd, agj, eE, cm, bw, bvr, CC, iT, aiM, cj, k, qR, bvp, aw, fN, n, fr, qN, eW, br, h, eV, A, mR, bhg, aNd, bvv, pg, ut, it, B, bvt, jx, eX, rf, aA, bvu, aNe, V, o, jF, Nc, adV, Fg, rv, bA, iU, Y, afq, lo, iK, ck, BU, iM, ig, bvy, hr, fP, bt, bvw, kV, bvs, ow, qb, jh, oZ, hF, hX, av, F, oj, hD, iL, yF, uQ, je, KS, cr, eZ, aF, xH, hp, aot, iV, bz, Lj, ag, Fw, y, VK, hv); #c1(FLNC) c2(NP_001120959) c3(filamin-C isoform b) c4(44989) c5(44990, 44991, 44992, 44993, 44994, 44995) c6( ) c7(bM, T, no, pe, Ws, iW, bvA, xs, Il, oj, aA, km, mx, aF, Fw, bvz, vQ); #c1(FLNC) c2(NP_001449) c3(filamin-C isoform a) c4(117916) c5(117917, 117918, 117919, 117920, 117921, 117922) c6( ) c7(bM, T, no, pe, Ws, iW, bvA, xs, Il, oj, aA, km, mx, aF, Fw, bvz, vQ); #c1(FLOT1) c2(NP_005794) c3(flotillin-1) c4(159383, 159384, 159385, 159386, 159387, 159388, 159389, 159390, 159391, 159392, 159393) c5(159394, 159395, 159396, 159397, 159398, 159399, 159400, 159401, 159402, 159403, 159404, 159405, 159406, 159407, 159408, 159409, 159410, 159411, 159412, 159413, 159414, 159415, 159416, 159417, 159418, 159419, 159420, 159421, 159422, 159423, 159424, 159425, 159426, 159427, 159428, 159429, 159430, 159431, 159432, 159433, 159434, 159435, 159436, 159437, 159438, 159439, 159440, 159441, 159442, 159443, 159444, 159445, 159446, 159447, 159448, 159449, 159450, 159451, 159452, 159453, 159454, 159455, 159456, 159457, 159458, 159459, 159460, 159461, 159462, 159463, 159464, 159465, 159466, 159467, 159468, 159469, 159470, 159471, 159472, 159473, 159474, 159475, 159476, 159477, 159478, 159479, 159480, 159481, 159482, 159483, 159484, 159485, 159486, 159487, 159488, 159489, 159490, 159491, 159492, 159493, 159494, 159495, 159496, 159497, 159498, 159499, 159500, 159501, 159502, 159503, 159504, 159505, 159506, 159507) c6( ) c7(T, eM, aW, eZ, aT, cm, H, V, af, L); #c1(FLOT1) c2(XP_005248838) c3(flotillin-1 isoform X2) c4(268637) c5(268638, 268639, 268640, 268641, 268642, 268643, 268644, 268645, 268646, 268647, 268648, 268649, 268650, 268651, 268652, 268653, 268654, 268655) c6( ) c7(T, eM, aW, eZ, aT, cm, H, V, af, L); #c1(FLOT1) c2(XP_006715010) c3(flotillin-1 isoform X3) c4(288391, 288392, 288393, 288394, 288395, 288396, 288397, 288398, 288399, 288400) c5(288401, 288402, 288403, 288404, 288405, 288406, 288407, 288408, 288409, 288410, 288411, 288412, 288413, 288414, 288415, 288416, 288417, 288418, 288419, 288420, 288421, 288422, 288423, 288424, 288425, 288426, 288427, 288428, 288429, 288430, 288431, 288432, 288433, 288434, 288435, 288436, 288437, 288438, 288439, 288440, 288441, 288442, 288443, 288444, 288445, 288446, 288447, 288448, 288449, 288450, 288451, 288452, 288453, 288454, 288455, 288456, 288457, 288458, 288459, 288460, 288461, 288462, 288463, 288464, 288465, 288466, 288467, 288468, 288469, 288470, 288471, 288472, 288473, 288474, 288475, 288476, 288477, 288478, 288479, 288480, 288481, 288482, 288483, 288484, 288485, 288486, 288487, 288488, 288489, 288490, 288491, 288492, 288493, 288494, 288495, 288496, 288497, 288498, 288499, 288500, 288501, 288502, 288503, 288504, 288505, 288506, 288507, 288508, 288509, 288510, 288511, 288512, 288513, 288514) c6( ) c7(T, eM, aW, eZ, aT, cm, H, V, af, L); #c1(FLOT2) c2(NP_004466) c3(flotillin-2) c4(146579, 146580) c5(146581, 146582, 146583, 146584, 146585, 146586, 146587, 146588, 146589, 146590, 146591, 146592) c6( ) c7(fU, T, dA, eM, aW, Y, oW, aT, aot, ci, K, bmA, iK, cp); #c1(FLRT2) c2(NP_037363) c3(leucine-rich repeat transmembrane protein FLRT2 precursor) c4(175012, 175013) c5(175014, 175015, 175016, 175017, 175018, 175019, 175020, 175021, 175022, 175023, 175024, 175025, 175026, 175027, 175028, 175029) c6( ) c7(y, eZ); #c1(FLRT3) c2(NP_938205) c3(leucine-rich repeat transmembrane protein FLRT3 precursor) c4(259790, 259791) c5(259792, 259793, 259794, 259795, 259796, 259797, 259798, 259799, 259800, 259801, 259802, 259803, 259804, 259805, 259806, 259807) c6( ) c7(bvB, UF); #c1(FLT1) c2(NP_001153392) c3(vascular endothelial growth factor receptor 1 isoform 2 precursor) c4(60565) c5(60566, 60567) c6( ) c7(T, aC, UH, pf, ea, e, aI, eb, bB, fd, ci, aY, Hr, x, Vp, bv, aE, rw, K, hu, eL, DA, eG, Jl, aW, bvD, Ls, NR, g, as, eF, uC, cm, QA, bw, qJ, y, eM, nB, iT, vy, cj, k, m, bvC, cE, YK, Vj, cZ, dD, iB, aw, ht, NT, n, fr, eh, ai, br, b, jz, gd, dL, Jn, dd, Um, cY, sp, pm, fs, W, bP, dB, hk, Vy, pg, aAI, B, aJJ, fM, dA, AL, jx, aA, cz, wo, v, j, AO, q, eA, MP, aT, cy, Tj, jj, sR, rv, ae, dI, vT, oV, Y, r, en, bu, t, acp, pb, ck, nM, ac, gX, dy, im, bt, VB, hS, sY, hI iW, Hn, Fb, ah, cq, hF, Fc, ad, afb, Jm, fU, av, iC, ib, NS, Hk, vB, nJ, uQ, d, qt, ff, eH, cr, eZ, aFr, aF, iV, Hp, LB, gk, Ew, pc, nb, bE, i, If, vt, X, jr); #c1(FLT1) c2(NP_001153502) c3(vascular endothelial growth factor receptor 1 isoform 3 precursor) c4(60604) c5(60605, 60606, 60607, 60608, 60609, 60610, 60611) c6( ) c7(T, aC, UH, pf, ea, e, al, eb, bB, fd, ci, aY, Hr, x, Vp, bv, aE, rw, K, hu, eL, DA, eG, JI, aW, bvD, Ls, NR, g, as, eF, uC, cm, QA, bw, qJ, y, eM, nB, iT, vy, cj, k, m, bvC, cE, YK, Vj, cZ, dD, iB, aw, ht, NT, n, fr, eh, ai, br, b, jz, gd, dL, Jn, dd, Um, cY, sp, pm, fs, W, bP, dB, hk, Vy, pg, aAl, B, aJJ, fM, dA, AL, jx, aA, cz, we, v, j, AO, q, eA, MP, aT, cy, Tj, jj, sR, rv, ae, dI, vT, oV, Y, r, en, bu, t, acp, pb, ck, nM, ac, gX, dy, im, bt, VB, hS, sY, hI, iW, Hn, Fb, ah, eq, hF, Fc, ad, afb, Jm, fU, av, iC, ib, NS, Hk, vB, nJ, uQ, d, qt, ff, eH, cr, eZ, aFr, aF, iV, Hp, LB, gk, Ew, pc, nb, bE, i, lf, vt, X, jr); #c1(FLT1) c2(NP_001153503) c3(vascular endothelial growth factor receptor 1 isoform 4 precursor) c4(60612, 60613) c5(60614, 60615, 60616, 60617, 60618, 60619, 60620, 60621, 60622, 60623, 60624, 60625, 60626, 60627, 60628, 60629) c6( ) c7(T, aC, UH, pf, ea, e, al, eb, bB, fd, ci, aY, Hr, x, Vp, bv, aE, rw, K, hu, eL, DA, eG, JI, aW, bvD, Ls, NR, g, as, eF, uC, cm, QA, bw, qJ, y, eM, nB, iT, vy, cj, k, m, bvC, cE, YK, Vj, cZ, dD, iB, aw, ht, NT, n, fr, eh, ai, br, b, jz, gd, dL, Jn, dd, Um, cY, sp, pm, fs, W, bP, dB, hk, Vy, pg, aAI, B, aJJ, fM, dA, AL, jx, aA, cz, wo, v, j, AO, q, eA, MP, aT, cy, Tj, jj, sR, rv, ae, dI, vT, oV, Y, r, en, bu, t, acp, pb, ck, nM, ac, gX, dy, im, bt, VB, hS, sY, hI iW, Hn, Fb, ah, eq, hF, Fc, ad, afb, Jm, fU, av, iC, ib, NS, Hk, vB, nJ, uQ, d, qt, ff, eH, cr, eZ, aFr, aF, iV, Hp, LB, gk, Ew, pc, nb, bE, i, lf, vt, X, jr); #c1(FLT1) c2(NP_002010) c3(vascular endothelial growth factor receptor 1 isoform 1 precursor) c4(123251, 123252, 123253) c5(123254, 123255, 123256, 123257, 123258, 123259, 123260, 123261, 123262, 123263, 123264, 123265, 123266, 123267, 123268, 123269, 123270, 123271) c6( ) c7(T, aC, UH, pf, ea, e, aI, eb, bB, fd, ci, aY, Hr, x, Vp, bv, aE, rw, K, hu, eL, DA, eG, Jl, aW, bvD, Ls, NR, g, as, eF, uC, cm, QA, bw, qJ, y, eM, nB, iT, vy, cj, k, m, bvC, cE, YK, Vj, cZ, dD, iB, aw, ht, NT, n, fr, eh, ai, br, b, jz, gd, dL, Jn, dd, Um, cY, sp, pm, fs, W, bP, dB, hk, Vy, pg, aAl, B, aJJ, fM, dA, AL, jx, aA, cz, wo, v, j, AO, q, eA, MP, aT, cy, Tj, jj, sR, rv, ae, dI, vT, oV, Y, r, en, bu, t, acp, pb, ck, nM, ac, gX, dy, im, bt, VB, hS, sY, hI iW, Hn, Fb, ah, eq, hF, Fc, ad, afb, Jm, fU, av, iC, ib, NS, Hk, vB, nJ, uQ, d, qt, ff, eH, cr, eZ, aFr, aF, iV, Hp, LB, gk, Ew, pc, nb, bE, i, lf, vt, X, jr); #c1(FLT3) c2(NP_004110) c3(receptor-type tyrosine-protein kinase FLT3 precursor) c4(143641, 143642, 143643) c5(143644, 143645, 143646, 143647, 143648, 143649, 143650, 143651, 143652, 143653, 143654, 143655, 143656, 143657, 143658, 143659, 143660, 143661) c6( ) c7(eW, aiu, T, aC, ya, qx, jh, bs, n, axk, bvH, oH, aj, v, oY, hF, bvE, q, br, J, SW, zn, ai, er, bvG, fX, hd, aE, x, dn, aT, dz, hn, Ou, K, IQ, jj, iZ, pq, iL, aBl, dx, bvF, bA, iF, jf, Nr, d, iU, hG, bvI, oV, et, bvJ, fO, gK, ace, r, po, gm, pm, hf, Fu, f, cM, cm, Qt, bw, yR, Ng, ov, ou, ck, iT, dB, kz, cj, k, eA, ph, bt, kS); #c1(FLT3LG) c2(NP_001450) c3(fms-related tyrosine kinase 3 ligand isoform 1 precursor) c4(117923) c5(117924, 117925, 117926, 117927, 117928, 117929, 117930, 117931, 117932, 117933, 117934, 117935) c6(117936, 117937) c7(oO, bM, T, fR, ya, iW, fd, axk, Qp, aYs, ai, q, ad, eA, eW, jZ, aT, dz, Ou, pq, ae, d, je, aW, r, t, cm, bw, ck, iM, dB, Lj, cj, oX, y, bt, bvK); #c1(FLT3LG) c2(XP_006723179) c3(fms-related tyrosine kinase 3 ligand isoform X8) c4( ) c5(295021) c6( ) c7(oO, bM, T, fR, ya, iW, fd, axk, Qp, aYs, ai, q, ad, eA, eW, jZ, aT, dz, Ou, pg, ae, d, je, aW, r, t, cm, bw, ck, iM, dB, Lj, cj, oX, y, bt, bvK); #c1(FLT3LG) c2(XP_011524979) c3(fms-related tyrosine kinase 3 ligand isoform X9) c4(319464) c5(319465, 319466, 319467, 319468, 319469, 319470, 319471, 319472) c6(319473, 319474) c7(oO, bM, T, fR, ya, iW, fd, axk, Qp, aYs, ai, g, ad, eA, eW, jZ, aT, dz, Ou, pq, ae, d, je, aW, r, t, cm, bw, ck, iM, dB, Lj, cj, oX, y, bt, bvK); #c1(FLT3LG) c2(XP_011524981) c3(fms-related tyrosine kinase 3 ligand isoform X10) c4( ) c5(319475) c6( ) c7(oO, bM, T, fR, ya, iW, fd, axk, Qp, aYs, ai, q, ad, eA, eW, jZ, aT, dz, Ou, pq, ae, d, je, aW, r, t, cm, bw, ck, iM, dB, Lj, cj, oX, y, bt, bvK); #c1(FLT4) c2(NP_002011) c3(vascular endothelial growth factor receptor 3 isoform 2 precursor) c4(123272, 123273) c5(123274, 123275, 123276, 123277, 123278, 123279) c6( ) c7(T, uK, aC, Tb, ea, if, hE, fd, bB, ci, aGm, aE, blI, Vv, K, aCU, cp, JI, aW, g, eE, eF, uC, cm, eM, nB, xD, go, vy, cj, PO, k, m, ym, cE, dD, QO, sw, fr, qN, Gd, jz, boz, aq, yq, W, Vy, B, fM, aA, WD, Cb, q, nv, aT, ae, af, kl, s, xR, Y, r, cl, t, ck, bvL, aor, PN, bt, sY, jh, eq, ad, hX, Jm, av, aop, ib, Db, Ot, tT, bvM, MG, azH, d, cr, aF, iR, bz, pu, bE, y, EB); #c1(FLT4) c2(NP_891555) c3(vascular endothelial growth factor receptor 3 isoform 1 precursor) c4(257317) c5(257318, 257319, 257320, 257321, 257322, 257323, 257324, 257325, 257326, 257327, 257328, 257329, 257330, 257331, 257332, 257333, 257334, 257335) c6( ) c7(T, uK, aC, Tb, ea, if, hE, fd, bB, ci, aGm, aE, bIl, Vv, K, aCU, cp, Jl, aW, g, eE, eF, uC, cm, eM, nB, xD, go, vy, cj, PO, k, m, ym, cE, dD, QO, sw, fr, qN, Cd, jz, boz, aq, yq, W, Vy, B, fM, aA, WD, Cb, q, nv, aT, ae, af, kl, s, xR, Y, r, cl, t, ck, bvL, aor, PN, bt, sY, jh, eq, ad, hX, Jm, av, aop, ib, Db, Ot, tT, bvM, MG, azH, d, cr, aF, iR, bz, pu, bE, y, EB); #c1(FLT4) c2(XP_011532785) c3(vascular endothelial growth factor receptor 3 isoform X6) c4(328865) c5( ) c6( ) c7(T, uK, aC, Tb, ea, if, hE, fd, bB, ci, aGm, aE, blI, Vv, K, aCU, cp, JI, aW, g, eE, eF, uC, cm, eM, nB, xD, go, vy, cj, PO, k, m, ym, cE, dD, QO, sw, fr, qN, Cd, jz, boz, aq, yq, W, Vy, B, fM, aA, WD, Cb, q, nv, aT, ae, af, kl, s, xR, Y, r, cl, t, ck, bvL, aor, PN, bt, sY, jh, eq, ad, hX, Jm, av, aop, ib, Db, Ot, tT, bvM, MG, azH, d, cr, aF, iR, bz, pu, bE, y, EB); #c1(FLVCR1) c2(NP_054772) c3(feline leukemia virus subgroup C receptor-related protein 1) c4(177725) c5(177726, 177727, 177728, 177729, 177730, 177731) c6( ) c7(T, fR, Pt, oe, zo, eA, bvN, ad, CJ, aE, bvS, ae, bvO, bvR, are, cr, xw, nC, bvP, bvQ, U, Br, aS); #c1(FLVCR2) c2(NP_001182212) c3(feline leukemia virus subgroup C receptor-related protein 2 isoform 2) c4(74687) c5(74688, 74689, 74690, 74691, 74692, 74693) c6( ) c7(bM, aoU, bvT, aI, Wb, VV, l, u, aMC, ZH, s, CN, FD, Tp, Pd, bvP, ej, bF, qe, z, aS, ER); #c1(FLVCR2) c2(NP_060261) c3(feline leukemia virus subgroup C receptor-related protein 2 isoform 1) c4(195109) c5(195110, 195111, 195112, 195113, 195114, 195115) c6( ) c7(bM, aoU, bvT, al, Wb, VV, l, u, aMC, ZH, s, CN, FD, Tp, Pd, bvP, ej, bF, qe, z, aS, ER); #c1(FMN1) c2(NP_001096654) c3(formin-1 isoform b) c4(41263, 41264) c5(41265, 41266, 41267, 41268, 41269, 41270, 41271, 41272, 41273, 41274, 41275, 41276) c6( ) c7(arB, dY, bvV, r, iG, q, cm, bvU, ad); #c1(FMN1) c2(NP_001264242) c3(formin-1 isoform a) c4(97640) c5(97641, 97642, 97643, 97644, 97645, 97646) c6( ) c7(arB, dY, bvV, r, iG, q, cm, bvU, ad); #c1(FMN1) c2(NP_001264243) c3(formin-1 isoform c) c4(97647) c5(97648, 97649, 97650, 97651, 97652, 97653) c6( ) c7(arB, dY, bvV, r, iG, q, cm, bvU, ad); #c1(FMN2) c2(NP_064450) c3(formin-2) c4(202527, 202528) c5(202529, 202530, 202531, 202532, 202533, 202534, 202535, 202536, 202537, 202538, 202539, 202540, 202541, 202542, 202543, 202544, 202545, 202546, 202547, 202548, 202549, 202550, 202551, 202552, 202553) c6( ) c7(ou, A, ac, c, e, hn, j, fr, V, fq); #c1(FMN2) c2(XP_011542539) c3(formin-2 isoform X2) c4( ) c5(341088) c6( ) c7(ou, A, ac, c, e, hn, j, fr, V, fq); #c1(FMNL1) c2(NP_005883) c3(formin-like protein 1) c4(160099) c5(160100, 160101, 160102, 160103, 160104, 160105, 160106, 160107, 160108, 160109, 160110, 160111) c6( ) c7(ck, T, iW, jh, cj, hf); #c1(FMNL1) c2(XP_006722129) c3(formin-like protein 1 isoform X7) c4( ) c5(294627) c6( ) c7(ck, T, iW, jh, cj, hf); #c1(FMNL1) c2(XP_006722132) c3(formin-like protein 1 isoform X9) c4( ) c5(294628, 294629, 294630, 294631, 294632) c6( ) c7(ck, T, iW, jh, cj, hf); #c1(FMNL1) c2(XP_006722133) c3(formin-like protein 1 isoform X10) c4(294633) c5( ) c6( ) c7(ck, T, iW, jh, cj, hf); #c1(FMNL2) c2(NP_443137) c3(formin-like protein 2) c4(229612) c5(229613, 229614, 229615, 229616, 229617, 229618) c6( ) c7(T, oe, r, q, B, bN); #c1(FMNL2) c2(XP_005246320) c3(formin-like protein 2 isoform X5) c4(267044) c5(267045, 267046, 267047, 267048, 267049, 267050) c6( ) c7(T, oe, r, q, B, bN); #c1(FMNL3) c2(NP_783863) c3(formin-like protein 3 isoform 1) c4(251771) c5(251772, 251773, 251774, 251775, 251776, 251777) c6( ) c7(dQ, cc, A, mx); #c1(FMNL3) c2(NP_944489) c3(formin-like protein 3 isoform 2) c4(260615) c5(260616, 260617, 260618, 260619, 260620, 260621) c6( ) c7(dQ, cc, A, mx); #c1(FMNL3) c2(XP_005269275) c3(formin-like protein 3 isoform X4) c4(282520, 282521) c5(282522, 282523, 282524, 282525, 282526, 282527, 282528, 282529, 282530, 282531, 282532, 282533) c6( ) c7(dQ, cc, A, mx); #c1(FMNL3) c2(XP_011537275) c3(formin-like protein 3 isoform X7) c4(334998) c5( ) c6( ) c7(dQ, cc, A, mx); #c1(FMO1) c2(NP_001269621) c3(dimethylaniline monooxygenase [N-oxide-forming] 1 isoform a) c4(102220) c5(102221, 102222, 102223) c6( ) c7(fQ, bK, Vd, c); #c1(FMO1) c2(NP_001269622) c3(dimethylaniline monooxygenase [N-oxide-forming] 1 isoform b) c4( ) c5(102224, 102225, 102226, 102227, 102228, 102229, 102230, 102231) c6( ) c7(fQ, bK, Vd, c); #c1(FMO1) c2(NP_001269623) c3(dimethylaniline monooxygenase [N-oxide-forming] 1 isoform c) c4(102232) c5(102233, 102234, 102235, 102236, 102237, 102238) c6( ) c7(fQ, bK, Vd, c); #c1(FMO1) c2(XP_005245095) c3(dimethylaniline monooxygenase [N-oxide-forming] 1 isoform X4) c4(266275) c5(266276, 266277, 266278, 266279, 266280) c6( ) c7(fQ, bK, Vd, c); #c1(FMO2) c2(NP_001451) c3(dimethylaniline monooxygenase [N-oxide-forming] 2 isoform a) c4(117938) c5(117939, 117940, 117941, 117942, 117943, 117944, 117945, 117946, 117947, 117948) c6( ) c7(dP, iT, bX, qt); #c1(FMO3) c2(NP_008825) c3(dimethylaniline monooxygenase [N-oxide-forming] 3) c4(168840) c5(168841, 168842, 168843, 168844, 168845, 168846, 168847, 168848, 168849, 168850) c6( ) c7(bF, T, dD, c, s, iT, ea, r, cz, dq, eq, K, bX, EZ, bz, q, dr); #c1(FMO3) c2(XP_005245101) c3(dimethylaniline monooxygenase [N-oxide-forming] 3 isoform X2) c4(266281) c5(266282, 266283, 266284, 266285, 266286, 266287) c6( ) c7(bF, T, dD, c, s, iT, ea, r, cz, dq, eq, K, bX, EZ, bz, q, dr); #c1(FMO3) c2(XP_011507648) c3(dimethylaniline monooxygenase [N-oxide-forming] 3 isoform X1) c4(297594) c5(297595, 297596, 297597, 297598, 297599, 297600) c6( ) c7(bF, T, dD, c, s, iT, ea, r, cz, dq, eq, K, bX, EZ, bz, q, dr); #c1(FMO4) c2(NP_002013) c3(dimethylaniline monooxygenase [N-oxide-forming] 4) c4(123280, 123281) c5(123282, 123283, 123284, 123285, 123286, 123287) c6( ) c7(qt); #c1(FMO4) c2(XP_005245105) c3(dimethylaniline monooxygenase [N-oxide-forming] 4 isoform X6) c4( ) c5(266288) c6( ) c7(qt); #c1(FMOD) c2(NP_002014) c3(fibromodulin precursor) c4(123288, 123289, 123290) c5(123291, 123292, 123293, 123294, 123295, 123296, 123297, 123298, 123299, 123300, 123301, 123302, 123303, 123304, 123305, 123306, 123307, 123308) c6( ) c7(gk, dD, W, pG, ea, al, Be, cj, Ij, cz, dy, eq); #c1(FMR1) c2(NP_001172004) c3(fragile X mental retardation protein 1 isoform ISO6) c4(72180) c5(72181, 72182, 72183, 72184, 72185, 72186) c6( ) c7(bM, bdo, T, ahc, aKu, bO, Jd, aTS, aR, Gt, wM, il, K, asP, aW, Az, hI, FS, Ku, Jl, aiv, wT, Kv, Kr, U, yA, Uw, Kk, To, bvW, ct, nA, rc, aLl, b, i, h, UD, yZ, he, on, aIM, amI, agG, atf, zZ, hq, ky, cA, agZ, pQ, GC, Kh, pK, V, Kx, boY, KB, QU, aT, wP, bK, an, rz, afx, bvX, kl, abi, aeS, f, xw, bN, aIT, Ki, rR, kP, c, kB, aan, UF, gT, aen, FI, gX, aZ, ha, bS, uu, bwa, bfD, xt, av, bvY, vJ, nd, Kq, Ng, nf, dq, Z, Kp, Kl, dr, dR, bwb, bC, bvZ, xg, Ex); #c1(FMR1) c2(NP_001172005) c3(fragile X mental retardation protein 1 isoform ISO7) c4(72187, 72188, 72189, 72190) c5(72191, 72192, 72193, 72194, 72195, 72196, 72197, 72198, 72199, 72200, 72201, 72202, 72203, 72204, 72205, 72206, 72207, 72208, 72209, 72210, 72211, 72212, 72213, 72214) c6( ) c7(bM, bdo, T, ahc, aKu, bO, Jd, aTS, aR, Gt, wM, il, K, asP, aW, Az, hI, FS, Ku, Jl, aiv, wT, Kv, Kr, U, yA, Uw, Kk, To, bvW, ct, nA, rc, aLl, b, i, h, UD, yZ, he, on, aIM, aml, agG, atf, zZ, hq, ky, cA, agZ, pQ, GC, Kh, pK, V, Kx, boY, KB, QU, aT, wP, bK, an, rz, afx, bvX, kl, abi, aeS, f, xw, bN, aIT, Ki, rR, kP, c, kB, aan, UF, gT, aen, Fl, gX, aZ, ha, bS, uu, bwa, bfD, xt, av, bvY, vJ, nd, Kq, Ng, nf, dq, Z, Kp, Kl, dr, dR, bwb, bC, bvZ, xg, Ex); #c1(FMR1) c2(NP_001172010) c3(fragile X mental retardation protein 1 isoform ISO12) c4( ) c5(72226, 72227, 72228, 72229, 72230, 72231) c6( ) c7(bM, bdo, T, ahc, aKu, bO, Jd, aTS, aR, Gt, wM, il, K, asP, aW, Az, hI, FS, Ku, JI, aiv, wT, Kv, Kr, U, yA, Uw, Kk, To, bvW, ct, nA, rc, aLI, b, i, h, UD, yZ, he, on, aIM, aml, agG, atf, zZ, hg, ky, cA, agZ, pQ, GC, Kh, pK, V, Kx, boY, KB, QU, aT, wP, bK, an, rz, afx, bvX, kl, abi, aeS, f, xw, bN, aIT, Ki, rR, kP, c, kB, aan, UF, gT, aen, FI, gX, aZ, ha, bS, uu, bwa, bfD, xt, av, bvY, vJ, nd, Kq, Ng, nf, dq, Z, Kp, KI, dr, dR, bwb, bC, bvZ, xg, Ex); #c1(FMR1) c2(NP_001172011) c3(fragile X mental retardation protein 1 isoform ISO9) c4( ) c5(72232, 72233, 72234, 72235) c6( ) c7(bM, bdo, T, ahc, aKu, bO, Jd, aTS, aR, Gt, wM, il, K, asP, aW, Az, hI, FS, Ku, JI, aiv, wT, Kv, Kr, U, yA, Uw, Kk, To, bvW, ct, nA, rc, aLI, b, i, h, UD, yZ, he, on, aIM, aml, agG, atf, zZ, hq, ky, cA, agZ, pQ, GC, Kh, pK, V, Kx, boY, KB, QU, aT, wP, bK, an, rz, afx, bvX, kl, abi, aeS, f, xw, bN, aIT, Ki, rR, kP, c, kB, aan, UF, gT, aen, FI, gX, aZ, ha, bS, uu, bwa, bfD, xt, av, bvY, vJ, nd, Kq, Ng, nf, dq, Z, Kp, KI, dr, dR, bwb, bC, bvZ, xg, Ex); #c1(FMR1) c2(NP_002015) c3(fragile X mental retardation protein 1 isoform ISOI) c4(123309, 123310, 123311) c5(123312, 123313, 123314, 123315, 123316, 123317, 123318, 123319, 123320, 123321, 123322, 123323) c6( ) c7(bM, bdo, T, ahc, aKu, bO, Jd, aTS, aR, Gt, wM, il, K, asP, aW, Az, hI, FS, Ku, JI, aiv, wT, Kv, Kr, U, yA, Uw, Kk, To, bvW, ct, nA, rc, aLI, b, i, h, UD, yZ, he, on, aIM, aml, agG, atf, zZ, hg, ky, cA, agZ, pQ, GC, Kh, pK, V, Kx, boY, KB, QU, aT, wP, bK, an, rz, afx, bvX, kl, abi, aeS, f, xw, bN, aIT, Ki, rR, kP, c, kB, aan, UF, gT, aen, FI, qX, aZ, ha, bS, uu, bwa, bfD, xt, av, bvY, vJ, nd, Kq, Ng, nf, dq, Z, Kp, KI, dr, dR, bwb, bC, bvZ, xg, Ex); #c1(FN1) c2(NP_002017) c3(fibronectin isoform 3 preproprotein) c4(123334) c5(123335, 123336, 123337, 123338, 123339, 123340, 123341, 123342) c6(123343, 123344) c7(bM, T, os, ea, if, al, fd, bB, aTy, zh, ci, IR, Lw, aao, x, Na, aE, ws, rJ, aeO, us, azm, K, eL, bc, cp, aa, DA, eG, zQ, aeR, yo, aW, yK, hI, g, as, eE, eF, bwe, uC, cm, aAW, ha, It, eM, nB, iA, iT, go, vA, mx, vy, cj, Gs, Zn, uJ, qr, wx, Hb, m, fy, Vj, iu, bcO, bks, rt, cZ, dD, sw, aw, n, aj, fr, apt, uE, qN, zP, cd, asS, ai, yn, eW, b, ft, Xe, kl, h, nm, By, dL, ey, dd, vx, Ha, bwj, Nr, A, bwi, fJ, hQ, bwc, aq, po, kp, mo, dw, mb, cM, wU, op, bwd, Qy, ky, IX, dB, xO, Fi, bjd, ajd, JM, at, E, uz, XG, pg, bwg, it, B, arO, vQ, bL, fM, dA, atB, dK, fG, jx, aA, cz, v, j, C, sl, yV, AO, Eh, q, J, bag, er, eA, IO, qK, aT, cy, dz, Nc, Ex, zp, bg, IM, ae, bsq, af, dl, Lu, wr, s, iU, Ue, Y, oV, bg, Pg, ev, r, aYp, aSJ, en, hf, apx, t, Vq, iK, pb, wA, vk, amF, ck, sS, nM, iM, vZ, WP, hc, nG, DW, hr, adR, bwh, dy, fD, bt, rA, VB, vi, sY, id, qb, LX, ha, jh, vm, dG, oZ, eq, ad, aoH, bwf, aHF, dP, hd, av, Db, Os, vw, aSf, hP, ji, vP, uX, d, IR, je, bwk, qt, ff, xs, wc, eH, cr, dN, hv, aFr, aF, si, VI, aiz, eZ, iR, bz, dr, Hp, Nq, LB, gk, es, mi, zr, bE, Hs, aS, bC, be, i, y, X, jr); #c1(FN1) c2(NP_473375) c3(fibronectin isoform 7 preproprotein) c4(230500) c5(230501, 230502, 230503, 230504, 230505, 230506, 230507, 230508) c6(230509, 230510) c7(bM, T, os, ea, if, al, fd, bB, aTy, zh, ci, IR, Lw, aao, x, Na, aE, ws, rJ, aeO, us, azm, K, eL, bc, cp, aa, DA, eG, zQ, aeR, yo, aW, yK, hI, g, as, eE, eF, bwe, uC, cm, aAW, ba, It, eM, nB, iA, iT, go, vA, mx, vy, cj, Gs, Zn, uJ, gr, wx, Hb, m, fy, Vj, iu, bcO, bks, rt, cZ, dD, sw, aw, n, aj, fr, apt, uE, qN, zP, cd, asS, ai, yn, eW, b, ft, Xe, kl, h, nm, By, dL, ey, dd, vx, Ha, bwj, Nr, A, bwi, fJ, hQ, bwc, aq, po, kp, mo, dw, mb, cM, wU, op, bwd, Qy, ky, IX, dB, xO, Fi, bjd, ajd, JM, at, E, uz, XG, pg, bwg, it, B, arO, vQ, bL, fM, dA, atB, dK, fG, jx, aA, cz, v, j, C, sl, yV, AO, Eh, q, J, bag, er, eA, IO, qK, aT, cy, dz, Nc, Ex, zp, bq, IM, ae, bsq, af, dl, Lu, wr, s, iU, Ue, Y, oV, bg, Pg, ev, r, aYp, aSJ, en, hf, apx, t, Vq, iK, pb, wA, vk, amF, ck, sS, nM, iM, vZ, WP, hc, nG, DW, hr, adR, bwh, dy, fD, bt, rA, VB, vi, sY, id, qb, LX, ha, jh, vm, dG, oZ, eq, ad, aoH, bwf, aHF, dP, hd, av, Db, Os, vw, aSf, hP, ji, vP, uX, d, IR, je, bwk, qt, ff, xs, wc, eH, cr, dN, hv, aFr, aF, si, VI, aiz, eZ, iR, bz, dr, Hp, Nq, LB, gk, es, mi, zr, bE, Hs, aS, bC, be, i, y, X, jr); #c1(FN1) c2(NP_997639) c3(fibronectin isoform 6 preproprotein) c4(265624) c5(265625, 265626, 265627, 265628, 265629, 265630, 265631, 265632) c6(265633, 265634) c7(bM, T, os, ea, if, al, fd, bB, aTy, zh, ci, IR, Lw, aao, x, Na, aE, ws, rJ, aeO, us, azm, K, eL, bc, cp, aa, DA, eG, zQ, aeR, yo, aW, yK, hI, g, as, eE, eF, bwe, uC, cm, aAW, ba, It, eM, nB, iA, iT, go, vA, mx, vy, cj, Gs, Zn, uJ, qr, wx, Hb, m, fy, Vj, iu, bcO, bks, rt, cZ, dD, sw, aw, n, aj, fr, apt, uE, qN, zP, cd, asS, ai, yn, eW, b, ft, Xe, kl, h, nm, By, dL, ey, dd, vx, Ha, bwj, Nr, A, bwi, fJ, hQ, bwc, aq, po, kp, mo, dw, mb, cM, wU, op, bwd, Qy, ky, IX, dB, xO, Fi, bjd, ajd, JM, at, E, uz, XG, pg, bwg, it, B, arO, vQ, bL, fM, dA, atB, dK, fG, jx, aA, cz, v, j, C, sI, yV, AO, Eh, q, J, bag, er, eA, IO, qK, aT, cy, dz, Nc, Ex, zp, bq, IM, ae, bsq, af, dl, Lu, wr, s, iU, Ue, Y, oV, bg, Pg, ev, r, aYp, aSJ, en, hf, apx, t, Vq, iK, pb, wA, vk, amF, ck, sS, nM, iM, vZ, WP, hc, nG, DW, hr, adR, bwh, dy, fD, bt, rA, VB, vi, sY, id, qb, LX, ha, jh, vm, dG, oZ, eq, ad, aoH, bwf, aHF, dP, hd, av, Db, Os, vw, aSf, hP, ji, vP, uX, d, IR, je, bwk, qt, ff, xs, wc, eH, cr, dN, hv, aFr, aF, si, VI, aiz, eZ, iR, bz, dr, Hp, Nq, LB, gk, es, mi, zr, bE, Hs, aS, bC, be, i, y, X, jr); #c1(FN1) c2(NP_997641) c3(fibronectin isoform 5 preproprotein) c4(265635) c5(265636, 265637, 265638, 265639, 265640, 265641, 265642, 265643) c6(265644, 265645) c7(bM, T, os, ea, if, al, fd, bB, aTy, zh, ci, IR, Lw, aao, x, Na, aE, ws, rJ, aeO, us, azm, K, eL, bc, cp, aa, DA, eG, zQ, aeR, yo, aW, yK, hI, g, as, eE, eF, bwe, uC, cm, aAW, ha, It, eM, nB, iA, iT, go, vA, mx, vy, cj, Gs, Zn, uJ, qr, wx, Hb, m, fy, Vj, iu, bcO, bks, rt, cZ, dD, sw, aw, n, aj, fr, apt, uE, qN, zP, cd, asS, ai, yn, eW, b, ft, Xe, kl, h, nm, By, dL, ey, dd, vx, Ha, bwj, Nr, A, bwi, fJ, hQ, bwc, aq, po, kp, mo, dw, mb, cM, wU, op, bwd, Qy, ky, IX, dB, xO, Fi, bjd, ajd, JM, at, E, uz, XG, pg, bwg, it, B, arO, vQ, bL, fM, dA, atB, dK, fG, jx, aA, cz, v, j, C, sl, yV, AO, Eh, q, J, bag, er, eA, IO, qK, aT, cy, dz, Nc, Fx, zp, bq, IM, ae, bsq, af, dl, Lu, wr, s, iU, Ue, Y, oV, bg, Pg, ev, r, aYp, aSJ, en, hf, apx, t, Vq, iK, pb, wA, vk, amF, ck, sS, nM, iM, vZ, WP, hc, nG, DW, hr, adR, bwh, dy, fD, bt, rA, VB, vi, sY, id, qb, LX, ha, jh, vm, dG, oZ, eq, ad, aoH, bwf, aHF, dP, hd, av, Db, Os, vw, aSf, hP, ji, vP, uX, d, IR, je, bwk, qt, ff, xs, wc, eH, cr, dN, hv, aFr, aF, si, VI, aiz, eZ, iR, bz, dr, Hp, Nq, LB, gk, es, mi, zr, bE, Hs, aS, bC, be, i, y, X, jr); #c1(FN1) c2(NP_997643) c3(fibronectin isoform 4 preproprotein) c4(265646) c5(265647, 265648, 265649, 265650, 265651, 265652, 265653, 265654) c6(265655, 265656) c7(bM, T, os, ea, if, al, fd, bB, aTy, zh, ci, IR, Lw, aao, x, Na, aE, ws, rJ, aeO, us, azm, K, eL, bc, cp, aa, DA, eG, zQ, aeR, yo, aW, yK, hI, g, as, eE, eF, bwe, uC, cm, aAW, ba, It, eM, nB, iA, iT, go, vA, mx, vy, cj, Gs, Zn, uJ, qr, wx, Hb, m, fy, Vj, iu, bcO, bks, rt, cZ, dD, sw, aw, n, aj, fr, apt, uE, qN, zP, cd, asS, ai, yn, eW, b, ft, Xe, kl, h, nm, By, dL, ey, dd, vx, Ha, bwj, Nr, A, bwi, fJ, hQ, bwc, aq, po, kp, mo, dw, mb, cM, wU, op, bwd, Qy, ky, IX, dB, xO, Fi, bjd, ajd, JM, at, E, uz, XG, pg, bwg, it, B, arO, vQ, bL, fM, dA, atB, dK, fG, jx, aA, cz, v, j, C, sl, yV, AO, Eh, q, J, bag, er, eA, IO, qK, aT, cy, dz, Nc, Ex, zp, bq, IM, ae, bsq, af, dl, Lu, wr, s, iU, Ue, Y, oV, bg, Pg, ev, r, aYp, aSJ, en, hf, apx, t, Vq, iK, pb, wA, vk, amF, ck, sS, nM, iM, vZ, WP, hc, nG, DW, hr, adR, bwh, dy, fD, bt, rA, VB, vi, sY, id, qb, LX, ha, jh, vm, dG, oZ, eq, ad, aoH, bwf, aHF, dP, hd, av, Db, Os, vw, aSf, hP, ji, vP, uX, d, IR, je, bwk, qt, ff, xs, wc, eH, cr, dN, hv, aFr, aF, si, VI, aiz, eZ, iR, bz, dr, Hp, Nq, LB, gk, es, mi, zr, bE, Hs, aS, bC, be, i, y, X, jr); #c1(FN1) c2(NP_997647) c3(fibronectin isoform 1 preproprotein) c4(265664) c5(265665, 265666, 265667, 265668, 265669, 265670, 265671, 265672) c6(265673, 265674) c7(bM, T, os, ea, if, al, fd, bB, aTy, zh, ci, IR, Lw, aao, x, Na, aE, ws, rJ, aeO, us, azm, K, eL, bc, cp, aa, DA, eG, zQ, aeR, yo, aW, yK, hI, g, as, eE, eF, bwe, uC, cm, aAW, ba, It, eM, nB, iA, iT, go, vA, mx, vy, cj, Gs, Zn, uJ, qr, wx, Hb, m, fy, Vj, iu, bcO, bks, rt, cZ, dD, sw, aw, n, aj, fr, apt, uE, qN, zP, cd, asS, ai, yn, eW, b, ft, Xe, kl, h, nm, By, dL, ey, dd, vx, Ha, bwj, Nr, A, bwi, fJ, hQ, bwc, aq, po, kp, mo, dw, mb, cM, wU, op, bwd, Qy, ky, IX, dB, xO, Fi, bjd, ajd, JM, at, E, uz, XG, pg, bwg, it, B, arO, vQ, bL, fM, dA, atB, dK, fG, jx, aA, cz, v, j, C, sl, yV, AO, Eh, q, J, bag, er, eA, IO, gK, aT, cy, dz, Nc, Fx, zp, bg, IM, ae, bsq, af, dl, Lu, wr, s, iU, Ue, Y, oV, bg, Pg, ev, r, aYp, aSJ, en, hf, apx, t, Vq, iK, pb, wA, vk, amF, ck, sS, nM, iM, vZ, WP, hc, nG, DW, hr, adR, bwh, dy, fD, bt, rA, VB, vi, sY, id, qb, LX, ha, jh, vm, dG, oZ, eq, ad, aoH, bwf, aHF, dP, hd, av, Db, Os, vw, aSf, hP, ji, vP, uX, d, IR, je, bwk, qt, ff, xs, wc, eH, cr, dN, hv, aFr, aF, si, VI, aiz, eZ, iR, bz, dr, Hp, Nq, LB, gk, es, mi, zr, bE, Hs, aS, bC, be, i, y, X, jr); #c1(FN1) c2(XP_005246455) c3(fibronectin isoform X2) c4(267156) c5( ) c6( ) c7(bM, T, os, ea, if, al, fd, bB, aTy, zh, ci, IR, Lw, aao, x, Na, aE, ws, rJ, aeO, us, azm, K, eL, bc, cp, aa, DA, eG, zQ, aeR, yo, aW, yK, hI, g, as, eE, eF, bwe, uC, cm, aAW, ba, It, eM, nB, iA, iT, go, vA, mx, vy, cj, Gs, Zn, uJ, qr, wx, Hb, m, fy, Vj, iu, bcO, bks, rt, cZ, dD, sw, aw, n, aj, fr, apt, uE, qN, zP, cd, asS, ai, yn, eW, b, ft, Xe, kl, h, nm, By, dL, ey, dd, vx, Ha, bwj, Nr, A, bwi, fJ, hQ, bwc, aq, po, kp, mo, dw, mb, cM, wU, op, bwd, Qy, ky, IX, dB, xO, Fi, bjd, ajd, JM, at, E, uz, XG, pg, bwg, it, B, arO, vQ, bL, fM, dA, atB, dK, fG, jx, aA, cz, v, j, C, sl, yV, AO, Eh, q, J, bag, er, eA, IO, qK, aT, cy, dz, Nc, Fx, zp, bq, IM, ae, bsq, af, dl, Lu, wr, s, iU, Ue, Y, oV, bg, Pg, ev, r, aYp, aSJ, en, hf, apx, t, Vq, iK, pb, wA, vk, amF, ck, sS, nM, iM, vZ, WP, hc, nG, DW, hr, adR, bwh, dy, fD, bt, rA, VB, vi, sY, id, qb, LX, ha, jh, vm, dG, oZ, eq, ad, aoH, bwf, aHF, dP, hd, av, Db, Os, vw, aSf, hP, ji, vP, uX, d, IR, je, bwk, qt, ff, xs, wc, eH, cr, dN, hv, aFr, aF, si, VI, aiz, eZ, iR, bz, dr, Hp, Nq, LB, gk, es, mi, zr, bE, Hs, aS, bC, be, i, y, X, jr); #c1(FN1) c2(XP_005246462) c3(fibronectin isoform X9) c4(267157) c5(267158, 267159, 267160, 267161, 267162, 267163, 267164, 267165) c6(267166, 267167) c7(bM, T, os, ea, if, al, fd, bB, aTy, zh, ci, IR, Lw, aao, x, Na, aE, ws, rJ, aeO, us, azm, K, eL, bc, cp, aa, DA, eG, zQ, aeR, yo, aW, yK, hI, g, as, eE, eF, bwe, uC, cm, aAW, ha, It, eM, nB, iA, iT, go, vA, mx, vy, cj, Gs, Zn, uJ, qr, wx, Hb, m, fy, Vj, iu, bcO, bks, rt, cZ, dD, sw, aw, n, aj, fr, apt, uE, qN, zP, cd, asS, ai, yn, eW, b, ft, Xe, kl, h, nm, By, dL, ey, dd, vx, Ha, bwj, Nr, A, bwi, fJ, hQ, bwc, aq, po, kp, mo, dw, mb, cM, wU, op, bwd, Qy, ky, IX, dB, xO, Fi, bjd, ajd, JM, at, E, uz, XG, pg, bwg, it, B, arO, vQ, bL, fM, dA, atB, dK, fG, jx, aA, cz, v, j, C, sl, yV, AO, Eh, q, J, bag, er, eA, IO, qK, aT, cy, dz, Nc, Ex, zp, bq, IM, ae, bsq, af, dl, Lu, wr, s, iU, Ue, Y, oV, bg, Pg, ev, r, aYp, aSJ, en, hf, apx, t, Vq, iK, pb, wA, vk, amF, ck, sS, nM, iM, vZ, WP, hc, nG, DW, hr, adR, bwh, dy, fD, bt, rA, VB, vi, sY, id, qb, LX, ha, jh, vm, dG, oZ, eq, ad, aoH, bwf, aHF, dP, hd, av, Db, Os, vw, aSf, hP, ji, vP, uX, d, IR, je, bwk, qt, ff, xs, wc, eH, cr, dN, hv, aFr, aF, si, VI, aiz, eZ, iR, bz, dr, Hp, Nq, LB, gk, es, mi, zr, bE, Hs, aS, bC, be, i, y, X, jr); #c1(FN1) c2(XP_005246463) c3(fibronectin isoform X10) c4(267168, 267169) c5(267170, 267171, 267172, 267173, 267174, 267175, 267176, 267177, 267178, 267179, 267180, 267181, 267182, 267183, 267184, 267185) c6(267186, 267187, 267188, 267189) c7(bM, T, os, ea, if, al, fd, bB, aTy, zh, ci, IR, Lw, aao, x, Na, aE, ws, rJ, aeO, us, azm, K, eL, bc, cp, aa, DA, eG, zQ, aeR, yo, aW, yK, hI, g, as, eE, eF, bwe, uC, cm, aAW, ba, It, eM, nB, iA, iT, go, vA, mx, vy, cj, Gs, Zn, uJ, qr, wx, Hb, m, fy, Vj, iu, bcO, bks, rt, cZ, dD, sw, aw, n, aj, fr, apt, uE, qN, zP, cd, asS, ai, yn, eW, b, ft, Xe, kl, h, nm, By, dL, ey, dd, vx, Ha, bwj, Nr, A, bwi, fJ, hQ, bwc, aq, po, kp, mo, dw, mb, cM, wU, op, bwd, Qy, ky, IX, dB, xO, Fi, bjd, ajd, JM, at, E, uz, XG, pg, bwg, it, B, arO, vQ, bL, fM, dA, atB, dK, fG, jx, aA, cz, v, j, C, sl, yV, AO, Eh, q, J, bag, er, eA, IO, qK, aT, cy, dz, Nc, Fx, zp, bq, IM, ae, bsq, af, dl, Lu, wr, s, iU, Ue, Y, oV, bg, Pg, ev, r, aYp, aSJ, en, hf, apx, t, Vq, iK, pb, wA, vk, amF, ck, sS, nM, iM, vZ, WP, hc, nG, DW, hr, adR, bwh, dy, fD, bt, rA, VB, vi, sY, id, qb, LX, ha, jh, vm, dG, oZ, eq, ad, aoH, bwf, aHF, dP, hd, av, Db, Os, vw, aSf, hP, ji, vP, uX, d, IR, je, bwk, qt, ff, xs, wc, eH, cr, dN, hv, aFr, aF, si, VI, aiz, eZ, iR, bz, dr, Hp, Nq, LB, gk, es, mi, zr, bE, Hs, aS, bC, be, i, y, X, jr); #c1(FN1) c2(XP_005246464) c3(fibronectin isoform X11) c4(267190) c5( ) c6( ) c7(bM, T, os, ea, if, al, fd, bB, aTy, zh, ci, IR, Lw, aao, x, Na, aE, ws, rJ, aeO, us, azm, K, eL, bc, cp, aa, DA, eG, zQ, aeR, yo, aW, yK, hI, g, as, eE, eF, bwe, uC, cm, aAW, ba, It, eM, nB, iA, iT, go, vA, mx, vy, cj, Gs, Zn, uJ, qr, wx, Hb, m, fy, Vj, iu, bcO, bks, rt, cZ, dD, sw, aw, n, aj, fr, apt, uE, qN, zP, cd, asS, ai, yn, eW, b, ft, Xe, kl, h, nm, By, dL, ey, dd, vx, Ha, bwj, Nr, A, bwi, fJ, hQ, bwc, aq, po, kp, mo, dw, mb, cM, wU, op, bwd, Qy, ky, IX, dB, xO, Fi, bjd, ajd, JM, at, E, uz, XG, pg, bwg, it, B, arO, vQ, bL, fM, dA, atB, dK, fG, jx, aA, cz, v, j, C, sl, yV, AO, Eh, q, J, bag, er, eA, IO, qK, aT, cy, dz, Nc, Fx, zp, bq, IM, ae, bsq, af, dl, Lu, wr, s, iU, Ue, Y, oV, bg, Pg, ev, r, aYp, aSJ, en, hf, apx, t, Vq, iK, pb, wA, vk, amF, ck, sS, nM, iM, vZ, WP, hc, nG, DW, hr, adR, bwh, dy, fD, bt, rA, VB, vi, sY, id, qb, LX, ha, jh, vm, dG, oZ, eq, ad, aoH, bwf, aHF, dP, hd, av, Db, Os, vw, aSf, hP, ji, vP, uX, d, IR, je, bwk, qt, ff, xs, wc, eH, cr, dN, hv, aFr, aF, si, VI, aiz, eZ, iR, bz, dr, Hp, Nq, LB, gk, es, mi, zr, bE, Hs, aS, bC, be, i, y, X, jr); #c1(FN1) c2(XP_005246471) c3(fibronectin isoform X18) c4(267191, 267192, 267193) c5(267194, 267195, 267196, 267197, 267198, 267199, 267200, 267201, 267202, 267203, 267204, 267205, 267206, 267207, 267208, 267209, 267210, 267211, 267212, 267213, 267214, 267215, 267216, 267217) c6(267218, 267219, 267220, 267221, 267222, 267223) c7(bM, T, os, ea, if, al, fd, bB, aTy, zh, ci, IR, Lw, aao, x, Na, aE, ws, rJ, aeO, us, azm, K, eL, be, cp, aa, DA, eG, zQ, aeR, yo, aW, yK, hI, g, as, eE, eF, bwe, uC, cm, aAW, ba, It, eM, nB, iA, iT, go, vA, mx, vy, cj, Gs, Zn, uJ, qr, wx, Hb, m, fy, Vj, iu, bcO, bks, rt, cZ, dD, sw, aw, n, aj, fr, apt, uE, qN, zP, cd, asS, ai, yn, eW, b, ft, Xe, kl, h, nm, By, dL, ey, dd, vx, Ha, bwj, Nr, A, bwi, fJ, hQ, bwc, aq, po, kp, mo, dw, mb, cM, wU, op, bwd, Qy, ky, IX, dB, xO, Fi, bjd, ajd, JM, at, E, uz, XG, pg, bwg, it, B, arO, vQ, bL, fM, dA, atB, dK, fG, jx, aA, cz, v, j, C, sl, yV, AO, Eh, q, J, bag, er, eA, IO, qK, aT, cy, dz, Nc, Fx, zp, bq, IM, ae, bsq, af, dl, Lu, wr, s, iU, Ue, Y, oV, bg, Pg, ev, r, aYp, aSJ, en, hf, apx, t, Vq, iK, pb, wA, vk, amF, ck, sS, nM, iM, vZ, WP, hc, nG, DW, hr, adR, bwh, dy, fD, bt, rA, VB, vi, sY, id, qb, LX, ha, jh, vm, dG, oZ, eq, ad, aoH, bwf, aHF, dP, hd, av, Db, Os, vw, aSf, hP, ji, vP, uX, d, IR, je, bwk, qt, ff, xs, wc, eH, cr, dN, hv, aFr, aF, si, VI, aiz, eZ, iR, bz, dr, Hp, Nq, LB, gk, es, mi, zr, bE, Hs, aS, bC, be, i, y, X, jr); #c1(FN3K) c2(NP_071441) c3(fructosamine-3-kinase) c4(211673, 211674, 211675) c5(211676, 211677, 211678, 211679, 211680, 211681, 211682, 211683, 211684, 211685, 211686, 211687, 211688, 211689, 211690, 211691, 211692, 211693) c6( ) c7(bL, T, r, aT, aj, dG, q, J); #c1(FN3KRP) c2(NP_078895) c3(ketosamine-3-kinase) c4(215965, 215966) c5(215967, 215968, 215969, 215970, 215971, 215972, 215973, 215974, 215975, 215976, 215977, 215978) c6( ) c7(e); #c1(FNBP1) c2(NP_055848) c3(formin-binding protein 1) c4(183906, 183907, 183908) c5(183909, 183910, 183911, 183912, 183913, 183914, 183915, 183916, 183917, 183918, 183919, 183920, 183921, 183922, 183923, 183924, 183925, 183926) c6( ) c7(ck, bt); #c1(FNBP1) c2(XP_005251882) c3(formin-binding protein 1 isoform X13) c4(271255) c5(271256, 271257, 271258, 271259, 271260, 271261) c6( ) c7(ck, bt); #c1(FNBP1) c2(XP_005251883) c3(formin-binding protein 1 isoform X14) c4(271262) c5(271263, 271264, 271265, 271266, 271267, 271268) c6( ) c7(ck, bt); #c1(FNBP1) c2(XP_005251886) c3(formin-binding protein 1 isoform X17) c4(271269) c5(271270, 271271, 271272, 271273, 271274, 271275) c6( ) c7(ck, bt); #c1(FNBP1) c2(XP_011516704) c3(formin-binding protein 1 isoform X4) c4(310151) c5(310152, 310153, 310154, 310155, 310156, 310157) c6( ) c7(ck, bt); #c1(FNDC1) c2(NP_115921) c3(fibronectin type III domain-containing protein 1 precursor) c4(224703) c5(224704, 224705, 224706, 224707, 224708, 224709, 224710) c6( ) c7(j, Ea); #c1(FNDC1) c2(XP_011534493) c3(fibronectin type III domain-containing protein 1 isoform X2) c4(330950) c5(330951, 330952, 330953, 330954, 330955, 330956) c6( ) c7(j, Ea); #c1(FNDC3A) c2(NP_001073141) c3(fibronectin type-III domain-containing protein 3A isoform 1) c4(35608, 35609, 35610) c5(35611, 35612, 35613, 35614, 35615, 35616, 35617, 35618, 35619, 35620, 35621, 35622, 35623, 35624, 35625, 35626, 35627, 35628, 35629, 35630, 35631, 35632) c6( ) c7(ae, y, c, WY, vA, mQ, aaE, bK, aS, MC, rz, bt, bz, bgv); #c1(FNDC3A) c2(NP_055738) c3(fibronectin type-III domain-containing protein 3A isoform 2) c4(183196) c5(183197, 183198, 183199, 183200, 183201, 183202) c6( ) c7(ae, y, c, WY, vA, mQ, aaE, bK, aS, MC, rz, bt, bz, bgv); #c1(FNDC3B) c2(NP_001128567) c3(fibronectin type III domain-containing protein 38) c4(50251, 50252) c5(50253, 50254, 50255, 50256, 50257, 50258, 50259, 50260, 50261, 50262, 50263, 50264, 50265, 50266, 50267, 50268, 50269, 50270, 50271, 50272) c6( ) c7(ab, T, B, j, dH); #c1(FNDC3B) c2(XP_011511385) c3(fibronectin type III domain-containing protein 38 isoform X1) c4(301957) c5(301958, 301959, 301960, 301961, 301962, 301963, 301964) c6( ) c7(ab, T, B, j, dH); #c1(FNDC4) c2(NP_073734) c3(fibronectin type III domain-containing protein 4 precursor) c4(213312) c5(213313, 213314, 213315, 213316, 213317, 213318) c6( ) c7(gv, du); #c1(FNTA) c2(NP_002018) c3(protein farnesyltransferase/geranylgeranyltransferase type-1 subunit alpha) c4(123345, 123346) c5(123347, 123348, 123349, 123350, 123351, 123352, 123353, 123354, 123355, 123356, 123357, 123358) c6( ) c7(om, T); #c1(FNTB) c2(NP_002019) c3(protein farnesyltransferase subunit beta) c4(123359) c5(123360, 123361, 123362, 123363, 123364, 123365) c6( ) c7(om); #c1(FOCAD) c2(NP_060264) c3(focadhesin) c4(195127) c5(195128, 195129, 195130, 195131, 195132, 195133, 195134, 195135, 195136, 195137) c6( ) c7(cd, e, d, eA, af); #c1(FOLH1) c2(NP_001014986) c3(glutamate carboxypeptidase 2 isoform 2) c4(26099, 26100) c5(26101, 26102, 26103, 26104, 26105, 26106) c6( ) c7(ng, T, eR, e, aw, fd, aA, sM, n, cz, bS, j, ct, gf, ci, Fb, acU, q, ad, aZJ, x, Na, gH, aT, Nc, K, ae, eu, bwl, aW, r, Io, CQ, g, Z, kk, bz, hq, es, ac, iA, bP, Ip, wE, bm, at, k, Tw, gg, LS); #c1(FOLH1) c2(NP_001180400) c3(glutamate carboxypeptidase 2 isoform 3) c4(73939) c5(73940, 73941, 73942, 73943, 73944, 73945) c6( ) c7(ng, T, eR, e, aw, fd, aA, sM, n, cz, bS, j, ct, gf, ci, Fb, acU, q, ad, aZJ, x, Na, gH, aT, Nc, K, ae, eu, bwl, aW, r, Io, CQ, g, Z, kk, bz, hq, es, ac, iA, bP, Ip, wE, bm, at, k, Tw, gg, LS); #c1(FOLH1) c2(NP_001180401) c3(glutamate carboxypeptidase 2 isoform 4) c4(73946) c5(73947, 73948, 73949, 73950, 73951, 73952) c6( ) c7(ng, T, eR, e, aw, fd, aA, sM, n, cz, bS, j, ct, gf, ci, Fb, acU, q, ad, aZJ, x, Na, gH, aT, Nc, K, ae, eu, bwl, aW, r, Io, CQ, g, Z, kk, bz, hq, es, ac, iA, bP, Ip, wE, bm, at, k, Tw, gg, LS); #c1(FOLH1) c2(NP_001180402) c3(glutamate carboxypeptidase 2 isoform 5) c4(73953) c5( ) c6( ) c7(ng, T, eR, e, aw, fd, aA, sM, n, cz, bS, j, ct, gf, ci, Fb, acU, q, ad, aZJ, x, Na, gH, aT, Nc, K, ae, eu, bwl, aW, r, Io, CQ, g, Z, kk, bz, hq, es, ac, iA, bP, Ip, wE, bm, at, k, Tw, gg, LS); #c1(FOLH1) c2(NP_004467) c3(glutamate carboxypeptidase 2 isoform 1) c4(146593) c5(146594, 146595, 146596, 146597, 146598, 146599, 146600, 146601, 146602, 146603, 146604, 146605, 146606, 146607, 146608, 146609, 146610, 146611) c6( ) c7(ng, T, eR, e, aw, fd, aA, sM, n, cz, bS, j, ct, gf, ci, Fb, acU, q, ad, aZJ, x, Na, gH, aT, Nc, K, ae, eu, bwl, aW, r, Io, CQ, g, Z, kk, bz, hq, es, ac, iA, bP, Ip, wE, bm, at, k, Tw, gg, LS); #c1(FOLR1) c2(NP_000793) c3(folate receptor alpha precursor) c4(16116) c5(16117, 16118, 16119, 16120, 1612116122, 16123, 16124, 16125, 16126, 16127, 16128, 16129, 16130, 16131, 16132, 16133, 16134) c6( ) c7(ng, T, ha, aA, ci, nA, Na, iu, ib, hw, hb, btQ, bwo, aT, Nc, cx, xQ, yr, MX, bwn, bwm, aW, Y, vj, eH, Az, ff, r, aq, en, g, eF, t, xw, bz, btb, ck, Qi, eM, Ip, wE, X, bwp, U, hR, m, bD, y, bt, B, hS); #c1(FOLR2) c2(NP_001107008) c3(folate receptor beta precursor) c4( ) c5(42788, 42789, 42790, 42791, 42792, 42793, 42794, 42795, 42796, 42797, 42798) c6( ) c7(LB, Qi, Na, Ip, fG, vj, eh, Nc, aS, bD, y, bt, IU); #c1(FOLR2) c2(XP_011543171) c3(folate receptor beta isoform X1) c4(342001, 342002) c5(342003, 342004, 342005, 342006, 342007, 342008, 342009) c6( ) c7(LB, Qi, Na, Ip, fG, vj, eb, Nc, aS, bD, y, bt, IU); #c1(FOLR2) c2(XP_011543172) c3(folate receptor beta isoform X2) c4(342010) c5(342011) c6( ) c7(LB, Qi, Na, Ip, fG, vj, eh, Nc, aS, bD, y, bt, IU); #c1(FOLR3) c2(NP_000795) c3(folate receptor gamma precursor) c4(16135, 16136) c5(16137, 16138, 16139, 16140, 16141, 16142, 16143) c6( ) c7(Na, ib, Ip, aW, IU, aT, Nc, m, hS); #c1(FOPNL) c2(NP_653201) c3(lisH domain-containing protein FOPNL isoform 1) c4(239043) c5(239044, 239045, 239046, 239047, 239048, 239049) c6( ) c7(bL, T, kh, dD, qb, ea, aw, jx, aA, fd, n, aj, v, eq, ci, acU, iJ, q, ad, hX, iC, mj, F, Uh, aT, h, cy, ae, jf, A, BO, aW, xi, oV, ih, fc, eZ, r, g, cl, cm, dr, bN, ck, bm, wq, adg, fh, B); #c1(FOS) c2(NP_005243) c3(proto-oncogene c-Fos) c4(154348) c5(154349, 154350, 154351, 154352, 154353, 154354, 154355) c6( ) c7(bM, T, fR, ea, if, e, bO, bB, ci, amW, aR, ip, x, xE, aE, dV, Ds, K, eL, xa, aHE, aa, eG, aW, Ls, az, g, eE, eF, cm, bw, eM, nB, Ip, iT, bwr, vA, wB, cj, k, m, iu, dD, IT, bws, nA, PJ, qN, cd, br, ai, adf, rC, Nn, h, IG, dL, uV, A, anP, aq, op, hq, kT, GU, hk, hL, at, cB, B, vQ, Dw, NQ, dA, fG, yk, rf, aA, cz, hz, v, j, C, q, eA, nv, aT, jj, ae, af, kl, bf, s, iU, Y, r, cu, lo, tu, en, t, iK, pb, ck, nM, iM, hc, CZ, fD, zu, bt, ao, wi, Ke, qb, aZ, aD, ha, jh, dG, eq, ad, bwq, dP, av, hd, F, Yi, uQ, gj, d, je, ff, eH, cr, eZ, gl, tv, aF, si, EZ, iV, adj, bz, eK, iq, bF, bE, aS, aGg, IC, kS, CW, y); #c1(FOSB) c2(NP_001107643) c3(protein fosB isoform 2) c4(42926) c5(42927, 42928, 42929, 42930, 42931, 42932, 42933, 42934, 42935, 42936, 42937, 42938) c6( ) c7(bM, T, aUk, if, e, bB, ci, x, aE, K, eL, aa, eG, aW, az, CT, eE, qJ, eM, nB, iT, wB, k, m, ct, qN, ai, h, dL, anP, aq, cv, kT, ok, GO, B, vQ, NQ, yk, rf, aA, cz, hz, v, C, q, eA, nv, aT, ae, af, bf, Y, r, cu, lo, tu, en, t, xw, iK, pb, bN, QG, iM, hc, CZ, fD, bt, ao, Ke, qb, aD, ha, bS, dG, ad, hd, Yi, gj, d, je, ff, cr, eZ, tv, aF, si, Z, bz, eK, bE, aS, IC, iu, y); #c1(FOSB) c2(NP_006723) c3(protein fosB isoform 1) c4(167437, 167438) c5(167439, 167440, 167441, 167442, 167443, 167444, 167445) c6( ) c7(bM, T, aUk, if, e, bB, ci, x, aE, K, eL, aa, eG, aW, az, CT, eE, qJ, eM, nB, iT, wB, k, m, ct, qN, ai, h, dL, anP, aq, cv, kT, ok, GU, B, vQ, NQ, yk, rf, aA, cz, hz, v, C, g, eA, nv, aT, ae, af, bf, Y, r, cu, lo, tu, en, t, xw, iK, pb, bN, QG, iM, hc, CZ, fD, bt, ao, Ke, qb, aD, ha, bS, dG, ad, hd, Yi, gj, d, je, ff, cr, eZ, tv, aF, si, Z, bz, eK, bE, aS, IC, iu, y); #c1(FOSB) c2(XP_005258748) c3(protein fosB isoform X1) c4(275720) c5(275721, 275722, 275723, 275724, 275725, 275726) c6( ) c7(bM, T, aUk, if, e, bB, ci, x, aE, K, eL, aa, eG, aW, az, CT, eE, qJ, eM, nB, iT, wB, k, m, ct, qN, ai, h, dL, anP, aq, cv, kT, ok, GU, B, vQ, NQ, yk, rf, aA, cz, hz, v, C, q, eA, nv, aT, ae, af, bf, Y, r, cu, lo, tu, en, t, xw, iK, pb, bN, QG, iM, hc, CZ, fD, bt, ao, Ke, qb, aD, ha, bS, dG, ad, hd, Yi, gj, d, je, ff, cr, eZ, tv, aF, si, Z, bz, eK, bE, aS, IC, iu, y); #c1(FOSL1) c2(NP_001287784) c3(fos-related antigen 1 isoform 3) c4( ) c5(112864) c6( ) c7(bM, T, qo, fG, if, bB, hz, fr, ci, nA, qN, cd, q, ad, eA, Vp, av, hd, Vr, aT, IG, dL, Fx, ey, ae, be, eL, pl, d, s, aW, Y, ff, r, Ku, en, g, zE, t, bz, as, bE, es, kP, eM, nB, bE, iA, m, it, X); #c1(FOSL1) c2(NP_001287786) c3(fos-related antigen 1 isoform 5) c4(112865) c5(112866, 112867, 112868, 112869, 112870, 112871) c6( ) c7(bM, T, qo, fG, if, bB, hz, fr, ci, nA, qN, cd, q, ad, eA, Vp, av, hd, Vr, aT, IG, dL, Fx, ey, ae, be, eL, pl, d, s, aW, Y, ff, r, Ku, en, g, zE, t, bz, as, bF, es, kP, eM, nB, bE, iA, m, it, X); #c1(FOSL1) c2(NP_005429) c3(fos-related antigen 1 isoform 1) c4(156095, 156096) c5(156097, 156098, 156099, 156100, 156101, 156102, 156103, 156104, 156105, 156106, 156107, 156108, 156109) c6( ) c7(bM, T, qo, fG, if, bB, hz, fr, ci, nA, qN, cd, q, ad, eA, Vp, av, hd, Vr, aT, IG, dL, Fx, ey, ae, bc, eL, pl, d, s, aW, Y, ff, r, Ku, en, g, zE, t, bz, as, bF, es, kP, eM, nB, bE, iA, m, it, X); #c1(FOSL2) c2(NP_005244) c3(fos-related antigen 2) c4(154356, 154357) c5(154358, 154359, 154360, 154361, 154362, 154363, 154364, 154365, 154366, 154367, 154368, 154369, 154370) c6( ) c7(lD, T, fG, ci, ad, BY, aE, aT, IG, an, ae, A, je, aW, Y, ev, cl, t, pb, LB, es, iM, aS, m, bt); #c1(FOXA1) c2(NP_004487) c3(hepatocyte nuclear factor 3-alpha) c4(146839, 146840) c5(146841, 146842, 146843, 146844, 146845, 146846, 146847, 146848, 146849, 146850, 146851, 146852, 146853) c6( ) c7(T, ht, n, ci, AO, ad, av, Yn, hd, aE, aT, K, hu, ae, bA, aW, ff, fc, aeF, aq, kp, en, cl, g, bz, nB, hL, B); #c1(FOXA2) c2(NP_068556) c3(hepatocyte nuclear factor 3-beta isoform 1) c4(209407, 209408) c5(209409, 209410, 209411, 209412, 209413, 209414, 209415, 209416, 209417) c6( ) c7(bL, T, jx, fF, aj, J, ad, av, aE, bq, ae, aa, AQ, hI, aeF, aq, kp, g, bz, LB, nM, eM, Jr, nB, wk, nG, bo, ZW, B, Ex); #c1(FOXA2) c2(XP_006723625) c3(hepatocyte nuclear factor 3-beta isoform X1) c4( ) c5(295260, 295261, 295262, 295263, 295264, 295265, 295266, 295267) c6( ) c7(bL, T, jx, fF, aj, J, ad, av, aE, bq, ae, aa, AQ, hI, aeF, aq, kp, g, bz, LB, nM, eM, Jr, nB, wk, nG, bo, ZW, B, Ex); #c1(FOXA2) c2(XP_011527533) c3(hepatocyte nuclear factor 3-beta isoform X2) c4(322347) c5(322348, 322349, 322350, 322351, 322352, 322353) c6( ) c7(bL, T, jx, fF, aj, J, ad, av, aE, bq, ae, aa, AQ, hI, aeF, aq, kp, g, bz, LB, nM, eM, Jr, nB, wk, nG, bo, ZW, B, Ex); #c1(FOXA3) c2(NP_004488) c3(hepatocyte nuclear factor 3-gamma) c4(146854) c5(146855, 146856, 146857, 146858, 146859, 146860) c6( ) c7(aq, B, aa, ad, bq); #c1(FOXB1) c2(NP_036314) c3(forkhead box protein 81) c4(172966) c5(172967, 172968, 172969, 172970, 172971, 172972) c6( ) c7(dY, sj); #c1(FOXC1) c2(NP_001444) c3(forkhead box protein C1) c4(117869, 117870) c5(117871, 117872, 117873, 117874, 117875, 117876, 117877, 117878, 117879, 117880, 117881, 117882) c6( ) c7(bL, T, ul, JJ, pQ, bbH, bwt, n, aj, ko, jE, nA, aSL, Xr, cd, J, bwu, ad, Mg, anA, asY, ath, bki, aT, Vv, dL, K, anz, rz, bbG, ae, gc, bwv, aW, eZ, kp, cl, dw, t, Ye, ck, eM, kB, hL, at, bbF, Hb, m, y, bt, B); #c1(FOXC2) c2(NP_005242) c3(forkhead box protein C2) c4(154341) c5(154342, 154343, 154344, 154345, 154346, 154347) c6( ) c7(bL, T, if, e, ht, bbH, n, v, qN, bwx, q, Hr, Mg, Na, bbp, acA, bwy, cE, aT, Vv, hu, aiJ, kl, aW, ff, Az, r, yy, zC, bww, en, dw, bz, dr, bJ, alu, eM, mg, PO, PN, ei, it); #c1(FOXD1) c2(NP_004463) c3(forkhead box protein D1) c4(146562) c5(146563, 146564, 146565, 146566, 146567, 146568, 146569) c6( ) c7(aOM); #c1(FOXE1) c2(NP_004464) c3(forkhead box protein E1) c4(146570) c5(146571, 146572, 146573, 146574, 146575, 146576, 146577, 146578) c6( ) c7(T, aMW, v, q, aR, Na, hd, aE, Db, il, RN, nX, Nc, ji, aOX, aoa, bwB, ff, bfu, r, en, bwA, zZ, sS, apM, nM, nB, adg, gT, bwz); #c1(FOXF1) c2(NP_001442) c3(forkhead box protein F1) c4(117854) c5(117855, 117856, 117857, 117858, 117859, 117860, 117861) c6( ) c7(T, pf, sw, fG, nA, AO, q, bv, acA, aT, Vv, hu, rz, aa, qt, aW, ap, r, fH, aDP, g, bz, LB, ac, ajd, Tc); #c1(FOXF2) c2(NP_001443) c3(forkhead box protein F2) c4(117862) c5(117863, 117864, 117865, 117866, 117867, 117868) c6( ) c7(T, kP, c, aW, aT, cz, cm, ae, ad); #c1(FOXG1) c2(NP_005240) c3(forkhead box protein G1) c4(154320) c5(154321, 154322, 154323, 154324, 154325, 154326, 154327, 154328, 154329, 154330, 154331) c6( ) c7(jf, Qi, iO, alW, QK, bwC, hb, aW, ha, cC, aT, m, nA, Wl, t, bwD, ZW, aR, bN); #c1(FOXH1) c2(NP_003914) c3(forkhead box protein H1) c4(142123, 142124) c5(142125, 142126, 142127, 142128, 142129, 142130, 142131, 142132, 142133, 142134, 142135, 142136, 142137, 142138) c6( ) c7(acl, bwE, ZW, bD, ae, ad, wT); #c1(FOXI1) c2(NP_036320) c3(forkhead box protein I1 isoform a) c4(172973) c5(172974, 172975, 172976, 172977, 172978, 172979, 172980) c6( ) c7(bwF, ale, Az, bwG); #c1(FOXI1) c2(NP_658982) c3(forkhead box protein I1 isoform b) c4(239613) c5(239614, 239615, 239616, 239617, 239618, 239619) c6( ) c7(bwF, ale, Az, bwG); #c1(FOXJ1) c2(NP_001445) c3(forkhead box protein J1) c4(117883) c5(117884, 117885, 117886, 117887, 117888, 117889, 117890) c6( ) c7(aE, afm, aW, CM, JM, aT, cU, kt, lo, eZ, K, m, fL, t, mC, y); #c1(FOXJ2) c2(NP_060886) c3(forkhead box protein J2) c4(198378) c5(198379, 198380, 198381, 198382, 198383, 198384, 198385, 198386, 198387, 198388, 198389, 198390, 198391, 198392, 198393) c6(198394, 198395) c7(Vv, aW, aT); #c1(FOXJ2) c2(XP_011519063) c3(forkhead box protein J2 isoform X1) c4(313664) c5( ) c6( ) c7(Vv, aW, aT); #c1(FOXK1) c2(NP_001032242) c3(forkhead box protein K1) c4(31152, 31153, 31154) c5(31155, 31156, 31157, 31158, 31159, 31160, 3116131162, 31163, 31164, 31165, 31166, 31167) c6( ) c7(bwH); #c1(FOXK1) c2(XP_011513493) c3(forkhead box protein K1 isoform X1) c4(305777) c5(305778, 305779, 305780, 305781, 305782, 305783, 305784, 305785, 305786, 305787, 305788) c6( ) c7(bwH); #c1(FOXK2) c2(NP_004505) c3(forkhead box protein K2) c4(146976, 146977, 146978) c5(146979, 146980, 146981, 146982, 146983, 146984, 146985, 146986, 146987, 146988, 146989, 146990, 146991) c6( ) c7(bwH); #c1(FOXK2) c2(XP_011521875) c3(forkhead box protein K2 isoform X1) c4( ) c5(316474, 316475, 316476, 316477, 316478, 316479) c6( ) c7(bwH); #c1(FOXL1) c2(NP_005241) c3(forkhead box protein L1) c4(154332) c5(154333, 154334, 154335, 154336, 154337, 154338, 154339, 154340) c6( ) c7(aC, aE, BJ, Vv, kp, t, af); #c1(FOXL2) c2(NP_075555) c3(forkhead box protein L2) c4(213934, 213935) c5(213936, 213937, 213938, 213939, 213940, 213941, 213942, 213943, 213944, 213945, 213946, 213947) c6( ) c7(T, aAz, n, aTS, nA, aOr, zW, bvd, anB, vJ, il, nX, arH, BJ, aOq, PI, K, uc, aKo, bwM, iL, bwK, bwO, yo, s, asP, alB, xv, baZ, bwL, g, bwJ, t, zZ, QK, bfw, dr, arB, avN, aNy, aXt, bwN); #c1(FOXM1) c2(NP_068772) c3(forkhead box protein M1 isoform 2) c4(210322) c5(210323, 210324, 210325, 210326, 210327, 210328, 210329) c6( ) c7(T, aC, fM, dA, jp, pf, fG, yk, if, qy, aA, bB, n, v, ci, qN, q, ad, ai, hX, eA, bv, av, hd, F, aE, Ig, mj, iu, py, jz, anV, aT, dL, hP, K, ey, KV, ae, eL, dx, pl, jf, A, d, s, aW, ff, az, eH, r, aq, Ej, kp, aF, en, g, eF, t, cm, bz, iK, asE, oU, bwQ, ck, bF, sS, nM, kP, eM, nB, dB, bE, np, m, bwP, fD, bt, B, cn, hS); #c1(FOXM1) c2(NP_973731) c3(forkhead box protein M1 isoform 1) c4(262701) c5(262702, 262703, 262704, 262705, 262706, 262707) c6( ) c7(T, aC, fM, dA, jp, pf, fG, yk, if, qy, aA, bB, n, v, ci, qN, q, ad, ai, hX, eA, bv, av, hd, F, aE, Ig, mj, iu, py, jz, anV, aT, dL, hP, K, ey, KV, ae, eL, dx, pl, jf, A, d, s, aW, ff, az, eH, r, aq, Ej, kp, aF, en, g, eF, t, cm, bz, iK, asE, oU, bwQ, ck, bF, sS, nM, kP, eM, nB, dB, bE, np, m, bwP, fD, bt, B, cn, hS); #c1(FOXM1) c2(NP_973732) c3(forkhead box protein M1 isoform 3) c4(262708) c5(262709, 262710, 262711, 262712, 262713, 262714) c6( ) c7(T, aC, fM, dA, jp, pf, fG, yk, if, qy, aA, bB, n, v, ci, qN, q, ad, ai, hX, eA, bv, av, hd, F, aE, Ig, mj, iu, py, jz, anV, aT, dL, hP, K, ey, KV, ae, eL, dx, pl, jf, A, d, s, aW, ff, az, eH, r, aq, Ej, kp, aF, en, g, eF, t, cm, bz, iK, asE, oU, bwQ, ck, bF, sS, nM, kP, eM, nB, dB, bE, np, m, bwP, fD, bt, B, cn, hS); #c1(FOXN1) c2(XP_005258103) c3(forkhead box protein N1 isoform X1) c4( ) c5(275494, 275495, 275496, 275497, 275498, 275499, 275500, 275501) c6( ) c7(T, dA, Ip, Y, RX, yk, ev, ff, aeM, bwS, YD, ci, bwR, en, pd, ae, Zm, bwT); #c1(FOXN1) c2(XP_011523658) c3(forkhead box protein N1 isoform X4) c4(318162) c5(318163) c6( ) c7(T, dA, Ip, Y, RX, yk, ev, ff, aeM, bwS, YD, ci, bwR, en, pd, ae, Zm, bwT); #c1(FOXN1) c2(XP_011523672) c3(forkhead box protein N1 isoform X13) c4( ) c5(318164) c6( ) c7(T, dA, Ip, Y, RX, yk, ev, ff, aeM, bwS, YD, ci, bwR, en, pd, ae, Zm, bwT); #c1(FOXN2) c2(NP_002149) c3(forkhead box protein N2) c4(125941, 125942, 125943) c5(125944, 125945, 125946, 125947, 125948, 125949, 125950, 125951, 125952, 125953, 125954, 125955, 125956, 125957, 125958, 125959, 125960, 125961) c6( ) c7(je, iM); #c1(FOXN3) c2(NP_001078940) c3(forkhead box protein N3 isoform 1) c4(38137) c5(38138, 38139, 38140, 38141, 38142, 38143, 38144, 38145, 38146, 38147) c6( ) c7(B, iT, iZ, aw, fq, cd); #c1(FOXN3) c2(NP_005188) c3(forkhead box protein N3 isoform 2) c4(153747, 153748, 153749, 153750) c5(153751, 153752, 153753, 153754, 153755, 153756, 153757, 153758, 153759, 153760, 153761, 153762, 153763, 153764, 153765, 153766, 153767, 153768, 153769, 153770, 153771, 153772, 153773, 153774, 153775, 153776, 153777, 153778, 153779) c6( ) c7(B, iT, iZ, aw, fq, cd); #c1(FOXO1) c2(NP_002006) c3(forkhead box protein O1) c4(123193) c5(123194, 123195, 123196, 123197, 123198, 123199, 123200, 123201) c6( ) c7(T, aC, bwU, if, bB, bv, aE, il, K, aW, fc, cm, eM, nB, AM, iT, vA, m, Xu, dD, aj, qN, jz, jy, eV, bl, dx, aq, zZ, op, bJ, hP, eD, hL, at, fL, B, bL, fM, dA, jx, eX, fZ, cR, aA, hy, v, j, eA, J, aT, kf, ae, ne, kl, Qr, iU, oV, ev, cl, t, OC, rR, bnR, mf, aps, bt, aZ, iW, dG, eq, mC, ad, dP, py, ab, iY, bwV, d, BN, eZ, aF, bz, bF, bE, cP, ei, IC, iu, y); #c1(FOXO3) c2(NP_963853) c3(forkhead box protein O3) c4(262433) c5(262434, 262435, 262436, 262437, 262438, 262439, 262440, 262441, 262442, 262443) c6( ) c7(oO, gh, T, aAx, EQ, bB, ci, x, xE, il, dV, K, dF, bc, eL, aW, fc, Qq, hN, cm, qJ, eM, nB, iA, vA, cj, m, k, dD, aw, h, hn, dL, bl, aq, jT, zZ, op, bJ, hP, cA, Qu, at, B, Dh, jx, aA, v, j, AO, V, pd, q, eA, cF, qK, aT, cy, rO, bK, jj, bq, ae, iU, Y, aeS, r, Io, hf, t, iK, ck, rR, fD, bt, bwW, jh, eq, EA, ad, hd, py, iY, ji, d, qt, eZ, aF, bz, LB, es, bE, apv, y, iu); #c1(FOXO3) c2(XP_005266924) c3(forkhead box protein O3 isoform X3) c4(280404) c5(280405) c6( ) c7(oO, gh, T, aAx, EQ, bB, ci, x, xE, il, dV, K, dF, bc, eL, aW, fc, Qq, hN, cm, qJ, eM, nB, iA, vA, cj, m, k, dD, aw, h, hn, dL, bl, aq, jT, zZ, op, bJ, hP, cA, Qu, at, B, Dh, jx, aA, v, j, AO, V, pd, q, eA, cF, qK, aT, cy, rO, bK, jj, bq, ae, iU, Y, aeS, r, Io, hf, t, iK, ck, rR, fD, bt, bwW, jh, eq, EA, ad, hd, py, iY, ji, d, qt, eZ, aF, bz, LB, es, bE, apv, y, iu); #c1(FOXO3) c2(XP_011533928) c3(forkhead box protein O3 isoform X1) c4( ) c5(330118) c6( ) c7(oO, gh, T, aAx, EQ, bB, ci, x, xE, il, dV, K, dF, bc, eL, aW, fc, Qq, hN, cm, qJ, eM, nB, iA, vA, cj, m, k, dD, aw, h, hn, dL, bl, aq, jT, zZ, op, bJ, bP, cA, Qu, at, B, Dh, jx, aA, v, j, AO, V, pd, q, eA, cF, qK, aT, cy, rO, bK, jj, bq, ae, iU, Y, aeS, r, Io, hf, t, iK, ck, rR, fD, bt, bwW, jh, eq, EA, ad, hd, py, iY, ji, d, qt, eZ, aF, bz, LB, es, bE, apv, y, iu); #c1(FOXO3) c2(XP_011533931) c3(forkhead box protein O3 isoform X4) c4(330119) c5(330120, 330121, 330122, 330123, 330124, 330125, 330126, 330127, 330128, 330129) c6( ) c7(oO, gh, T, aAx, EQ, bB, ci, x, xE, il, dV, K, dF, bc, eL, aW, fc, Qq, hN, cm, qJ, eM, nB, iA, vA, cj, m, k, dD, aw, h, hn, dL, bl, aq, jT, zZ, op, bJ, bP, cA, Qu, at, B, Dh, jx, aA, v, j, AO, V, pd, q, eA, cF, qK, aT, cy, rO, bK, jj, bq, ae, iU, Y, aeS, r, Io, hf, t, iK, ck, rR, fD, bt, bwW, jh, eq, EA, ad, hd, py, iY, ji, d, qt, eZ, aF, bz, LB, es, bE, apv, y, iu); #c1(FOXO4) c2(NP_001164402) c3(forkhead box protein O4 isoform 2) c4(66921) c5(66922, 66923, 66924, 66925, 66926, 66927) c6( ) c7(T, y, bP, Kv, il, SV, aA, eZ, aj, v, aF, K, k, aiG, hF, bt, J, bJ); #c1(FOXO4) c2(NP_005929) c3(forkhead box protein O4 isoform 1) c4(160495) c5(160496, 160497, 160498, 160499, 160500, 160501, 160502) c6( ) c7(T, y, bP, Kv, il, SV, aA, eZ, aj, v, aF, K, k, aiG, hF, bt, J, bJ); #c1(FOXO6) c2(NP_001278210) c3(forkhead box protein O6) c4(109490) c5(109491, 109492, 109493, 109494, 109495, 109496, 109497) c6( ) c7(bL, aA, aj, dG, bK, v, aF, avf, J); #c1(FOXP1) c2(NP_001012523) c3(forkhead box protein P1 isoform 2) c4(25019) c5(25020, 25021, 25022, 25023, 25024, 25025, 25026) c6( ) c7(T, aC, fM, pf, sw, VT, aA, bD, bwX, jh, j, ci, nA, qj, ad, anU, x, yt, acA, zK, aT, LA, cy, Ko, KU, he, hH, ake, ae, rz, d, VX, BO, aW, eH, bwY, eF, t, bN, aUn, rR, yl, QG, eM, au, X, cj, MW, QC, m, ij, sx, B); #c1(FOXP1) c2(NP_001231737) c3(forkhead box protein P1 isoform 3) c4( ) c5(87440, 87441) c6( ) c7(T, aC, fM, pf, sw, VT, aA, bD, bwX, jh, j, ci, nA, qj, ad, anU, x, yt, acA, zK, aT, LA, cy, Ko, KU, he, hH, ake, ae, rz, d, VX, BO, aW, eH, bwY, eF, t, bN, aUn, rR, yl, QG, eM, au, X, cj, MW, QC, m, ij, sx, B); #c1(FOXP1) c2(NP_001231741) c3(forkhead box protein P1 isoform 5) c4(87442) c5(87443, 87444, 87445, 87446, 87447, 87448) c6( ) c7(T, aC, fM, pf, sw, VT, aA, bD, bwX, jh, j, ci, nA, qj, ad, anU, x, yt, acA, zK, aT, LA, cy, Ko, KU, he, hH, ake, ae, rz, d, VX, BO, aW, eH, bwY, eF, t, bN, aUn, rR, yl, QG, eM, au, X, cj, MW, QC, m, ij, sx, B); #c1(FOXP1) c2(NP_001231742) c3(forkhead box protein P1 isoform 6) c4(87449, 87450, 87451) c5( ) c6( ) c7(T, aC, fM, pf, sw, VT, aA, bD, bwX, jh, j, ci, nA, qj, ad, anU, x, yt, acA, zK, aT, LA, cy, Ko, KU, he, hH, ake, ae, rz, d, VX, BO, aW, eH, bwY, eF, t, bN, aUn, rR, yl, QG, eM, au, X, cj, MW, QC, m, ij, sx, B); #c1(FOXP1) c2(NP_001231744) c3(forkhead box protein P1 isoform 8) c4(87452, 87453) c5(87454, 87455, 87456, 87457, 87458, 87459) c6( ) c7(T, aC, fM, pf, sw, VT, aA, bD, bwX, jh, j, ci, nA, qj, ad, anU, x, yt, acA, zK, aT, LA, cy, Ko, KU, he, hH, ake, ae, rz, d, VX, BO, aW, eH, bwY, eF, t, bN, aUn, rR, yl, QG, eM, au, X, cj, MW, QC, m, ij, sx, B); #c1(FOXP1) c2(NP_001231745) c3(forkhead box protein P1 isoform 1) c4(87460, 87461) c5(87462, 87463, 87464, 87465, 87466, 87467, 87468, 87469, 87470, 87471, 87472, 87473, 87474, 87475, 87476, 87477, 87478, 87479, 87480, 87481, 87482) c6( ) c7(T, aC, fM, pf, sw, VT, aA, bD, bwX, jh, j, ci, nA, qj, ad, anU, x, yt, acA, zK, aT, LA, cy, Ko, KU, he, hH, ake, ae, rz, d, VX, BO, aW, eH, bwY, eF, t, bN, aUn, rR, yl, QG, eM, au, X, cj, MW, QC, m, ij, sx, B); #c1(FOXP1) c2(XP_005264799) c3(forkhead box protein P1 isoform XG) c4( ) c5(279232, 279233, 279234, 279235, 279236, 279237, 279238, 279239, 279240, 279241, 279242, 279243, 279244, 279245, 279246, 279247) c6( ) c7(T, aC, fM, pf, sw, VT, aA, bD, bwX, jh, j, ci, nA, qj, ad, anU, x, yt, acA, zK, aT, LA, cy, Ko, KU, he, hH, ake, ae, rz, d, VX, BO, aW, eH, bwY, eF, t, bN, aUn, rR, yl, QG, eM, au, X, cj, MW, QC, m, ij, sx, B); #c1(FOXP2) c2(NP_001166237) c3(forkhead box protein P2 isoform V) c4( ) c5(68492, 68493, 68494, 68495, 68496, 68497, 68498, 68499, 68500, 68501, 68502, 68503, 68504, 68505, 68506, 68507, 68508, 68509, 68510, 68511, 68512, 68513, 68514, 68515, 68516, 68517, 68518, 68519, 68520, 68521, 68522, 68523, 68524, 68525, 68526, 68527) c6( ) c7(bL, T, iH, ha, VT, bO, fd, n, jh, v, bxb, aR, ad, anU, bxc, aup, bwZ, HJ, WY, qK, aQQ, acg, bK, aQM, K, KU, he, rz, ake, ae, je, LO, Az, fe, aaE, aha, QK, xw, bN, bxa, aUn, iM, abV, Km, yA); #c1(FOXP2) c2(NP_001166238) c3(forkhead box protein P2 isoform VI) c4(68528) c5( ) c6( ) c7(bL, T, iH, ha, VT, bO, fd, n, jh, v, bxb, aR, ad, anU, bxc, aup, bwZ, HJ, WY, qK, aQQ, acg, bK, aQM, K, KU, he, rz, ake, ae, je, LO, Az, fe, aaE, aha, QK, xw, bN, bxa, aUn, iM, abV, Km, yA); #c1(FOXP2) c2(NP_055306) c3(forkhead box protein P2 isoform 1) c4(180386, 180387) c5( ) c6( ) c7(bL, T, iH, ha, VT, bO, fd, n, jh, v, bxb, aR, ad, anU, bxc, aup, bwZ, HJ, WY, qK, aQQ, acg, bK, aQM, K, KU, he, rz, ake, ae, je, LO, Az, fe, aaE, aha, QK, xw, bN, bxa, aUn, iM, abV, Km, yA); #c1(FOXP2) c2(NP_683696) c3(forkhead box protein P2 isoform II) c4(242402) c5( ) c6( ) c7(bL, T, iH, ha, VT, bO, fd, n, jh, v, bxb, aR, ad, anU, bxc, aup, bwZ, HJ, WY, qK, aQQ, acg, bK, aQM, K, KU, he, rz, ake, ae, je, LO, Az, fe, aaE, aha, QK, xw, bN, bxa, aUn, iM, abV, Km, yA); #c1(FOXP2) c2(NP_683697) c3(forkhead box protein P2 isoform III) c4(242403) c5(242404, 242405, 242406, 242407, 242408, 242409, 242410, 242411, 242412, 242413, 242414, 242415, 242416, 242417, 242418, 242419, 242420, 242421, 242422, 242423, 242424, 242425, 242426, 242427, 242428) c6( ) c7(bL, T, iH, ha, VT, bO, fd, n, jh, v, bxb, aR, ad, anU, bxc, aup, bwZ, HJ, WY, qK, aQQ, acg, bK, aQM, K, KU, he, rz, ake, ae, je, LO, Az, fe, aaE, aha, QK, xw, bN, bxa, aUn, iM, abV, Km, yA); #c1(FOXP2) c2(NP_683698) c3(forkhead box protein P2 isoform IV) c4(242429, 242430, 242431, 242432) c5( ) c6( ) c7(bL, T, iH, ha, VT, bO, fd, n, jh, v, bxb, aR, ad, anU, bxc, aup, bwZ, HJ, WY, qK, aQQ, acg, bK, aQM, K, KU, he, rz, ake, ae, je, LO, Az, fe, aaE, aha, QK, xw, bN, bxa, aUn, iM, abV, Km, yA); #c1(FOXP3) c2(NP_001107849) c3(forkhead box protein P3 isoform b) c4( ) c5(43014, 43015, 43016, 43017, 43018, 43019, 43020, 43021, 43022, 43023, 43024) c6( ) c7(bM, G, T, bwU, fR, bxe, if, eh, bB, fd, cL, qj, ci, bh, Qp, AW, xE, aE, rw, dV, Ds, rB, K, DY, bhm, bc, cp, mH, YL, akV, aW, az, hN, g, as, eE, bw, mK, iP, yd, eM, Jr, mx, cj, dW, m, eg, fy, cE, abh, akc, aO, NT, fN, n, bwX, aj, ml, qN, qW, cd, ai, Vs, jz, mh, auj, ju, gd, kH, Ne, h, bxi, eV, OM, bxg, aVn, ajV, A, CM, lb, ks, fe, kp, bxh, beP, YE, jT, adz, Wt, dB, at, uz, eo, fL, B, Dw, dA, fG, IH, jx, eX, aA, cz, hz, v, j, ON, C, V, pd, q, J, o, eA, Ig, afQ, aT, qG, bK, aFm, ae, hM, kl, bf, xR, nO, oV, Y, fO, Pg, r, aMA, afg, Io, en, t, f, pb, OC, ck, cT, OW, Dy, iM, ig, hc, gX, hr, bxj, Da, yH, gT, bt, zA, aya, hS, Kd, aD, iW, jh, jE, afD, mC, ad, wD, LH, dP, hX, av, F, oz, Dq, ds, qh, hD, JK, ji, bxf, IQ, yF, uQ, d, je, ff, cr, eZ, dN, bxd, aF, hp, S, BG, iV, bz, Bv, eU, bE, Lj, anY, z, Km, XO, aEN, If, ra, y, pC); #c1(FOXP3) c2(NP_054728) c3(forkhead box protein P3 isoform a) c4(177381, 177382) c5(177383, 177384, 177385, 177386, 177387, 177388, 177389, 177390, 177391, 177392, 177393) c6( ) c7(bM, G, T, bwU, fR, bxe, if, eb, bB, fd, cL, qj, ci, bh, Qp, AW, xE, aE, rw, dV, Ds, rB, K, DY, bhm, bc, cp, mH, YL, akV, aW, az, hN, g, as, eE, bw, mK, iP, yd, eM, Jr, mx, cj, dW, m, eg, fy, cE, abh, akc, aO, NT, fN, n, bwX, aj, ml, qN, qW, cd, ai, Vs, jz, mh, auj, ju, gd, kH, Ne, h, bxi, eV, OM, bxg, aVn, ajV, A, CM, lb, ks, fe, kp, bxh, beP, YF, jT, adz, Wt, dB, at, uz, eo, fL, B, Dw, dA, fG, IH, jx, eX, aA, cz, hz, v, j, ON, C, V, pd, q, J, o, eA, Ig, afQ, aT, gG, bK, aFm, ae, hM, kl, bf, xR, nO, oV, Y, fO, Pg, r, aMA, afq, Io, en, t, f, pb, OC, ck, cT, OW, Dy, iM, ig, hc, gX, hr, bxj, Da, yH, gT, bt, zA, aya, hS, Kd, aD, iW, jh, jE, afD, mC, ad, wD, LH, dP, hX, av, F, oz, Dq, ds, qh, hD, JK, ji, bxf, IQ, yF, uQ, d, je, ff, cr, eZ, dN, bxd, aF, hp, S, BG, iV, bz, Bv, eU, bE, Lj, anY, z, Km, XO, aEN, If, ra, y, pC); #c1(FOXP3) c2(XP_011542220) c3(forkhead box protein P3 isoform X4) c4( ) c5(340719, 340720) c6( ) c7(bM, G, T, bwU, fR, bxe, if, eb, bB, fd, cL, qj, ci, bh, Qp, AW, xE, aE, rw, dV, Ds, rB, K, DY, bhm, bc, cp, mH, YL, akV, aW, az, hN, g, as, eE, bw, mK, iP, yd, eM, Jr, mx, cj, dW, m, eg, fy, cE, abh, akc, aO, NT, fN, n, bwX, aj, ml, qN, qW, cd, ai, Vs, jz, mh, auj, ju, gd, kH, Ne, h, bxi, eV, DM, bxg, aVn, ajV, A, CM, lb, ks, fe, kp, bxh, beP, YF, jT, adz, Wt, dB, at, uz, eo, fL, B, Dw, dA, fG, IH, jx, eX, aA, cz, hz, v, j, ON, C, V, pd, q, J, o, eA, Ig, afQ, aT, qG, bK, aFm, ae, hM, kl, bf, xR, nO, oV, Y, fO, Pg, r, aMA, afq, Io, en, t, f, pb, OC, ck, cT, OW, Dy, iM, ig, hc, gX, hr, bxj, Da, yH, gT, bt, zA, aya, hS, Kd, aD, iW, jh, jE, afD, mC, ad, wD, LH, dP, hX, av, F, oz, Dq, ds, qh, hD, JK, ji, bxf, IQ, yF, uQ, d, je, ff, cr, eZ, dN, bxd, aF, hp, S, BG, iV, bz, Bv, eU, bE, Lj, anY, z, Km, XO, aEN, If, ra, y, pC); #c1(FOXP3) c2(XP_011542221) c3(forkhead box protein P3 isoform X5) c4(340721) c5(340722, 340723) c6( ) c7(bM, G, T, bwU, fR, bxe, if, eb, bB, fd, cL, qj, ci, bh, Qp, AW, xE, aE, rw, dV, Ds, rB, K, DY, bhm, bc, cp, mH, YL, akV, aW, az, hN, g, as, eE, bw, mK, iP, yd, eM, Jr, mx, cj, dW, m, eg, fy, cE, abh, akc, aO, NT, fN, n, bwX, aj, ml, qN, qW, cd, ai, Vs, jz, mh, auj, ju, gd, kH, Ne, h, bxi, eV, OM, bxg, aVn, ajV, A, CM, lb, ks, fe, kp, bxh, beP, YF, jT, adz, Wt, dB, at, uz, eo, fL, B, Dw, dA, fG, IH, jx, eX, aA, cz, hz, v, j, ON, C, V, pd, q, J, o, eA, Ig, afQ, aT, qG, bK, aFm, ae, hM, kl, bf, xR, nO, oV, Y, fO, Pg, r, aMA, afq, Io, en, t, f, pb, OC, ck, cT, OW, Dy, iM, ig, hc, gX, hr, bxj, Da, yH, gT, bt, zA, aya, hS, Kd, aD, iW, jh, jE, afD, mC, ad, wD, LH, dP, hX, av, F, oz, Dq, ds, qh, hD, JK, ji, bxf, IQ, yF, uQ, d, je, ff, cr, eZ, dN, bxd, aF, hp, S, BG, iV, bz, Bv, eU, bE, Lj, anY, z, Km, XO, aEN, If, ra, y, PC); #c1(FOXP4) c2(NP_001012426) c3(forkhead box protein P4 isoform 1) c4(24987) c5(24988, 24989, 24990, 24891, 24992, 24993, 24994, 24995, 24996, 24997) c6( ) c7(T, ae, ad); #c1(FOXP4) c2(NP_001012427) c3(forkhead box protein P4 isoform 3) c4(24998) c5(24999, 25000, 25001, 25002, 25003, 25004) c6( ) c7(T, ae, ad); #c1(FOXP4) c2(NP_612466) c3(forkhead box protein P4 isoform 2) c4(236592, 236593) c5(236594, 236595, 236596, 236597, 236598, 236599, 236600, 236601, 236602, 236603, 236604, 236605, 236606) c6( ) c7(T, ae, ad); #c1(FOXQ1) c2(NP_150285) c3(forkhead box protein O1) c4(228051) c5(228052, 228053, 228054, 228055, 228056, 228057, 228058) c6( ) c7(XX, T, aC, eM, aW, ff, aT, r, n, adR, aA, dL, m, q, en, g, eA, aF, eL, B); #c1(FOXR1) c2(NP_859072) c3(forkhead box protein Rl) c4(255501) c5(255502, 255503, 255504, 255505, 255506, 255507) c6( ) c7(eF, cm, eH); #c1(FOXR2) c2(NP_940853) c3(forkhead box protein R2) c4(259953) c5(259954, 259955, 259956, 259957, 259958, 259959) c6( ) c7(jf, aW, aeO, hP, aT); #c1(FOXRED1) c2(NP_060017) c3(FAD-dependent oxidoreductase domain-containing protein 1) c4(193666, 193667, 193668) c5(193669, 193670, 193671, 193672, 193673, 193674, 193675, 193676, 193677, 193678, 193679, 193680, 193681) c6( ) c7(aM, bxk, bxl, px, kC, ajU); #c1(FOXRED1) c2(XP_006718942) c3(FAD-dependent oxidoreductase domain-containing protein 1 isoform X1) c4( ) c5(292114, 292115, 292116, 292117, 292118) c6( ) c7(aM, bxk, bxl, px, kC, ajU); #c1(FPGS) c2(NP_001275732) c3(folylpolyglutamate synthase, mitochondrial isoform c precursor) c4(107223, 107224) c5(ID7225, 107226, 107227, 107228, 107229, 107230, 107231, 107232, 107233, 107234, 107235, 107236) c6( ) c7(ng, ck, T, x, fM, Ip, bE, iW, eH, cr, r, bB, hn, k, qN, eF, y, q); #c1(FPGS) c2(NP_004948) c3(folylpolyglutamate synthase, mitochondrial isoform a precursor) c4(151398, 151399, 151400, 151401) c5(151402, 151403, 151404, 151405, 151406, 151407, 151408) c6( ) c7(ng, ck, T, x, fM, Ip, bE, iW, eH, cr, r, bB, hn, k, qN, eF, y, q); #c1(FPGS) c2(XP_005251921) c3(folylpolyglutamate synthase, mitochondrial isoform X2) c4( ) c5(271285, 271286, 271287, 271288, 271289, 271290, 271291, 271292, 271293, 271294, 271295, 271296, 271297, 271298, 271299) c6( ) c7(ng, ck, T, x, fM, Ip, bE, iW, eH, cr, r, bB, hn, k, qN, eF, y, g); #c1(FPGS) c2(XP_011516740) c3(folylpolyglutamate synthase, mitochondrial isoform X1) c4( ) c5(310200, 310201, 310202, 310203, 310204) c6( ) c7(ng, ck, T, x, fM, Ip, bE, iW, eH, cr, r, bB, hn, k, qN, eF, y, q); #c1(FPGS) c2(XP_011516741) c3(folylpolyglutamate synthase, mitochondrial isoform X3) c4( ) c5(310205) c6( ) c7(ng, ck, T, x, fM, Ip, bE, iW, eH, cr, r, bB, hn, k, qN, eF, y, q); #c1(FPR1) c2(NP_001180235) c3(fMet-Leu-Phe receptor) c4(73486) c5(73487, 73488, 73489, 73490, 73491, 73492, 73493, 73494, 73495, 73496) c6( ) c7(d, aFe, eZ, aFb, Id, uR, aT, cz, uz, ace, v, h, eA, cP, as, bD, f, Df, Tz, fc); #c1(FPR2) c2(XP_006723183) c3(N-formyl peptide receptor 2 isoform X1) c4(295022) c5(295023, 295024, 295025, 295026, 295027, 295028, 295029, 295030, 295031, 295032) c6( ) c7(bM, T, dD, ea, bkF, bB, eq, ai, eA, afb, dP, aE, ju, adX, aT, h, dL, K, eL, Y, eH, fe, as, eF, t, nM, adZ, bE, wO, m, y, L); #c1(FPR3) c2(NP_002021) c3(N-formyl peptide receptor 3) c4(123366) c5(123367, 123368, 123369, 123370, 123371, 123372) c6( ) c7(oe, ey); #c1(FRAS1) c2(NP_001159605) c3(extracellular matrix protein FRAS1 isoform 2 precursor) c4(64433) c5(64434, 64435, 64436, 64437, 64438, 64439, 64440, 64441, 64442, 64443, 64444, 64445, 64446, 64447, 64448, 64449, 64450, 64451, 64452, 64453, 64454, 64455, 64456, 64457, 64458, 64459, 64460, 64461, 64462) c6( ) c7(XW, PN, bxn, bxm, bxo, Qt, aMi); #c1(FRAS1) c2(NP_079350) c3(extracellular matrix protein FRAS1 isoform 1 precursor) c4(217794, 217795, 217796, 217797, 217798) c5(217799, 217800, 217801, 217802, 217803, 217804, 217805, 217806, 217807, 217808, 217809, 217810, 217811) c6( ) c7(XW, PN, bxn, bxm, bxo, Qt, aMi); #c1(FRAS1) c2(XP_011530572) c3(extracellular matrix protein FRAS1 isoform X3) c4(326493) c5( ) c6( ) c7(XW, pN, bxn, bxm, bxo, Qt, aMi); #c1(FRAS1) c2(XP_011530573) c3(extracellular matrix protein FRAS1 isoform X4) c4(326494) c5( ) c6( ) c7(XW, pN, bxn, bxm, bxo, Qt, aMi); #c1(FRAT1) c2(NP_005470) c3(proto-oncogene FRAT1) c4(156435) c5(156436, 156437, 156438, 156439, 156440, 156441) c6( ) c7(T, d, aE, eM, iU, aW, if, ht, aT, aA, aF, m, qN, hu, g, t, bz, eA); #c1(FRAT2) c2(NP_036215) c3(GSK-3-binding protein FRAT2) c4(172418) c5(172419, 172420, 172421, 172422, 172423, 172424) c6( ) c7(T, aF, W, aA); #c1(FREM1) c2(XP_006716792) c3(FRAS1-related extracellular matrix protein 1 isoform X2) c4( ) c5(290453, 290454, 290455, 290456, 290457, 290458, 290459, 290460, 290461, 290462, 290463) c6( ) c7(bxt, bxs, tL, bxn, oe, wk, bxp, bxq, aw, bxr, aMi); #c1(FREM1) c2(XP_011516053) c3(FRAS1-related extracellular matrix protein 1 isoform X1) c4(309243, 309244) c5(309245, 309246, 309247, 309248, 309249, 309250, 309251, 309252, 309253, 309254, 309255, 309256, 309257, 309258, 309259, 309260) c6( ) c7(bxt, bxs, tL, bxn, oe, wk, bxp, bxq, aw, bxr, aMi); #c1(FREM1) c2(XP_011516057) c3(FRAS1-related extracellular matrix protein 1 isoform X6) c4(309261) c5( ) c6( ) c7(bxt, bxs, tL, bxn, oe, wk, bxp, bxq, aw, bxr, aMi); #c1(FREM1) c2(XP_011516060) c3(FRAS1-related extracellular matrix protein 1 isoform X11) c4(309262) c5(309263) c6( ) c7(bxt, bxs, tL, bxn, oe, wk, bxp, bxq, aw, bxr, aMi); #c1(FREM2) c2(NP_997244) c3(FRAS1-related extracellular matrix protein 2 precursor) c4(265293) c5(265294, 265295, 265296, 265297, 265298, 265299) c6( ) c7(Qf, bxn, cd, eA, aMi, On); #c1(FREM3) c2(NP_001161707) c3(FRAS1-related extracellular matrix protein 3 precursor) c4( ) c5(65834) c6( ) c7(bO); #c1(FRG1) c2(NP_004468) c3(protein FRG1) c4(146612, 146613, 146614, 146615) c5(146616, 146617, 146618, 146619, 146620, 146621, 146622, 146623, 146624, 146625, 146626, 146627, 146628, 146629, 146630, 146631, 146632, 146633, 146634, 146635, 146636, 146637, 146638, 146639, 146640, 146641, 146642, 146643) c6( ) c7(asp, Ae, xs, oj, rx, bxu); #c1(FRG2) c2(NP_001005217) c3(protein FRG2 isoform 2) c4(21198) c5(21199, 21200, 21201, 21202, 21203, 21204, 21205, 21206, 21207) c6( ) c7(Z, rx, bS, et); #c1(FRG2) c2(NP_001273749) c3(protein FRG2 isoform 1) c4(105760) c5(105761, 105762, 105763, 105764, 105765, 105766) c6( ) c7(Z, rx, bS, et); #c1(FRK) c2(XP_011533957) c3(tyrosine-protein kinase ERK isoform X1) c4(330159) c5(330160, 330161, 330162, 330163, 330164, 330165) c6( ) c7(T, W, af, aW, aT, h, aq, mf, iR, bt, ae, B, ad); #c1(FRK) c2(XP_011533958) c3(tyrosine-protein kinase ERK isoform X2) c4(330166) c5(330167, 330168, 330169, 330170, 330171, 330172) c6( ) c7(T, W, af, aW, aT, h, aq, mf, iR, bt, ae, B, ad); #c1(FRMD3) c2(NP_001231888) c3(FERM domain-containing protein 3 isoform 2) c4(87643, 87644) c5(87645, 87646, 87647, 87648, 87649, 87650) c6( ) c7(bL, av, A, eR, vy, NI, aj, dy, aY, bz, J); #c1(FRMD3) c2(NP_001231890) c3(FERM domain-containing protein 3 isoform 4) c4(87651) c5(87652, 87653, 87654, 87655, 87656, 87657, 87658, 87659, 87660, 87661, 87662, 87663) c6( ) c7(bL, av, A, eR, vy, NI, aj, dy, aY, bz, J); #c1(FRMD3) c2(NP_001231891) c3(FERM domain-containing protein 3 isoform 5) c4(87664) c5(87665, 87666, 87667, 87668, 87669, 87670) c6( ) c7(bL, av, A, eR, vy, NI, aj, dy, aY, bz, J); #c1(FRMD3) c2(NP_777598) c3(FERM domain-containing protein 3 isoform 1) c4(251300) c5(251301, 251302, 251303, 251304, 251305, 251306) c6( ) c7(bL, av, A, eR, vy, NI, aj, dy, aY, bz, J); #c1(FRMD3) c2(XP_005251939) c3(FERM domain-containing protein 3 isoform X1) c4(271316) c5( ) c6( ) c7(bL, av, A, eR, vy, NI, aj, dy, aY, bz, J); #c1(FRMD3) c2(XP_011516778) c3(FERM domain-containing protein 3 isoform X2) c4( ) c5(310224, 310225, 310226, 310227, 310228, 310229) c6( ) c7(bL, av, A, eR, vy, NI, aj, dy, aY, bz, J); #c1(FRMD4A) c2(NP_060497) c3(FERM domain-containing protein 4A) c4(196247) c5(196248, 196249, 196250, 196251, 196252, 196253, 196254, 196255, 196256) c6( ) c7(IB, XY); #c1(FRMD4A) c2(XP_005252546) c3(FERM domain-containing protein 4A isoform X9) c4( ) c5(271874) c6( ) c7(IB, XY); #c1(FRMD4A) c2(XP_011517845) c3(FERM domain-containing protein 4A isoform X13) c4( ) c5(311784) c6( ) c7(IB, XY); #c1(FRMD4B) c2(NP_055938) c3(FERM domain-containing protein 48) c4(184563) c5(184564, 184565, 184566, 184567, 184568, 184569, 184570) c6( ) c7(cc, fq, cd, hp, bX); #c1(FRMD4B) c2(XP_005264780) c3(FERM domain-containing protein 48 isoform X6) c4( ) c5(279227, 279228, 279229, 279230, 279231) c6( ) c7(cc, fq, cd, hp, bX); #c1(FRMD4B) c2(XP_006713127) c3(FERM domain-containing protein 48 isoform X5) c4(287046) c5(287047) c6( ) c7(cc, fq, cd, hp, bX); #c1(FRMD4B) c2(XP_011531828) c3(FERM domain-containing protein 48 isoform X3) c4(327896) c5(327897, 327898, 327899, 327900, 327901) c6( ) c7(cc, fq, cd, hp, bX); #c1(FRMD5) c2(NP_001273419) c3(FERM domain-containing protein 5 isoform 3) c4(104859) c5(104860, 104861, 104862, 104863, 104864) c6( ) c7(bz); #c1(FRMD5) c2(NP_116281) c3(FERM domain-containing protein 5 isoform 2) c4(226080) c5(226081, 226082, 226083, 226084, 226085, 226086) c6( ) c7(bz); #c1(FRMD5) c2(XP_011520425) c3(FERM domain-containing protein 5 isoform X3) c4( ) c5(315316) c6( ) c7(bz); #c1(FRMD6) c2(NP_001253976) c3(FERM domain-containing protein 6 isoform 3) c4( ) c5(94343, 94344, 94345, 94346, 94347) c6( ) c7(hb, bM, fq, cd); #c1(FRMD6) c2(XP_006720092) c3(FERM domain-containing protein 6 isoform X2) c4(293213, 293214, 293215) c5(293216, 293217, 293218, 293219, 293220, 293221) c6( ) c7(hb, bM, fq, cd); #c1(FRMD6) c2(XP_006720093) c3(FERM domain-containing protein 6 isoform X1) c4(293222) c5(293223, 293224, 293225, 293226, 293227, 293228, 293229, 293230, 293231, 293232, 293233, 293234, 293235, 293236, 293237, 293238, 293239) c6( ) c7(hb, bM, fq, cd); #c1(FRMD7) c2(NP_919253) c3(FERM domain-containing protein 7) c4(258300) c5(258301, 258302, 258303, 258304, 258305, 258306) c6( ) c7(aAd, KE, bxv, aQu, aiM, aSW, NG, bxx, bxw, oQ, amA, bna); #c1(FRMPD1) c2(NP_055722) c3(FERM and PDZ domain-containing protein 1) c4(183072, 183073, 183074, 183075) c5(183076, 183077, 183078, 183079, 183080, 183081, 183082, 183083, 183084, 183085, 183086, 183087, 183088, 183089, 183090, 183091, 183092, 183093, 183094, 183095, 183096, 183097, 183098, 183099, 183100, 183101, 183102, 183103) c6( ) c7(zP, oe, ac); #c1(FRMPD1) c2(XP_011516108) c3(FERM and PDZ domain-containing protein 1 isoform X3) c4( ) c5(309332) c6( ) c7(zP, oe, ac); #c1(FRMPD2) c2(NP_001018081) c3(FERM and PDZ domain-containing protein 2 isoform 3) c4(27139, 27140) c5(27141, 27142, 27143, 27144, 27145, 27146) c6( ) c7(iJ, fN); #c1(FRMPD2) c2(NP_001035977) c3(FERM and PDZ domain-containing protein 2 isoform 4) c4( ) c5(33605, 33606, 33607, 33608, 33609) c6( ) c7(iJ, fN); #c1(FRMPD4) c2(NP_055543) c3(FERM and PDZ domain-containing protein 4) c4(181849) c5(181850, 181851, 181852, 181853, 181854, 181855, 181856, 181857, 181858, 181859, 181860, 181861, 181862, 181863, 181864, 181865, 181866, 181867) c6( ) c7(oe, an); #c1(FRMPD4) c2(XP_011543915) c3(FERM and PDZ domain-containing protein 4 isoform X2) c4(343105, 343106) c5(343107) c6( ) c7(oe, an); #c1(FRRS1L) c2(NP_055149) c3(DOMON domain-containing protein FRRS1L) c4(179456) c5(179457, 179458, 179459, 179460, 179461, 179462) c6( ) c7(j); #c1(FRS2) c2(NP_001265286) c3(fibroblast growth factor receptor substrate 2) c4(98127, 98128, 98129, 98130, 98131, 98132, 98133) c5(98134, 98135, 98136, 98137, 98138, 98139, 98140, 98141, 98142, 98143, 98144, 98145, 98146, 98147, 98148, 98149, 98150, 98151, 98152, 98153, 98154, 98155, 98156, 98157, 98158, 98159, 98160, 98161, 98162, 98163, 98164, 98165, 98166, 98167, 98168, 98169, 98170, 98171, 98172, 98173, 98174, 98175, 98176, 98177, 98178, 98179, 98180, 98181, 98182, 98183, 98184, 98185, 98186, 98187, 98188, 98189, 98190) c6( ) c7(bxy, hd, YE, ik, aE, hV, aW, Y, au, aT, cz, ae, ad); #c1(FRS3) c2(XP_011512557) c3(fibroblast growth factor receptor substrate 3 isoform X1) c4(303429, 303430, 303431) c5(303432, 303433, 303434, 303435, 303436, 303437, 303438, 303439, 303440, 303441, 303442, 303443, 303444, 303445, 303446, 303447, 303448, 303449, 303450, 303451, 303452, 303453) c6( ) c7(ae, af, ad, eM); #c1(FRY) c2(NP_075463) c3(protein furry homolog) c4(213906, 213907, 213908) c5(213909, 213910, 213911, 213912, 213913, 213914, 213915, 213916, 213917, 213918, 213919, 213920, 213921, 213922, 213923, 213924, 213925, 213926, 213927, 213928, 213929, 213930, 213931, 213932, 213933) c6( ) c7(T, aW, aT, Ea, bX, nA); #c1(FRY) c2(XP_006719812) c3(protein furry homolog isoform X1) c4(292973, 292974, 292975, 292976) c5(292977, 292978, 292979, 292980, 292981, 292982, 292983, 292984, 292985, 292986, 292987, 292988, 292989, 292990, 292991, 292992, 292993) c6( ) c7(T, aW, aT, Ea, bX, nA); #c1(FRYL) c2(NP_055845) c3(protein furry homolog-like) c4(183875, 183876) c5(183877, 183878, 183879, 183880, 183881, 183882, 183883, 183884, 183885, 183886, 183887, 183888, 183889, 183890, 183891, 183892) c6( ) c7(ck, cm, bw, br); #c1(FRYL) c2(XP_011511984) c3(protein furry homolog-like isoform X3) c4(302644) c5(302645, 302646) c6( ) c7(ck, cm, bw, br); #c1(FRYL) c2(XP_011511986) c3(protein furry homolog-like isoform X5) c4( ) c5(302647, 302648, 302649, 302650, 302651, 302652, 302653, 302654, 302655) c6( ) c7(ck, cm, bw, br); #c1(FRZB) c2(NP_001454) c3(secreted frizzled-related protein 3 precursor) c4(117949) c5(117950, 117951, 117952, 117953, 117954, 117955) c6( ) c7(gh, T, os, AB, pf, if, aA, fd, nZ, j, fr, qN, ai, ad, cd, q, zw, ib, aT, bav, YT, bA, jf, s, aW, Y, r, aF, bu, aDQ, es, iA, tV, nw, y, atO); #c1(FSBP) c2(NP_001243070) c3(fibrinogen silencer-binding protein) c4(89729, 89730) c5(89731, 89732, 89733, 89734, 89735, 89736, 89737, 89738, 89739, 89740, 89741, 89742) c6( ) c7(T, kl, bE, aZ, bB, uV); #c1(FSCB) c2(NP_115511) c3(fibrous sheath CABYR-binding protein) c4(222997, 222998) c5(222999, 223000, 223001, 223002, 223003, 223004, 223005, 223006, 223007, 223008, 223009, 223010) c6( ) c7(bM, ad); #c1(FSCN1) c2(NP_003079) c3(fascin) c4(135032, 135033, 135034) c5(135035, 135036, 135037, 135038, 135039, 135040, 135041, 135042, 135043, 135044, 135045, 135046, 135047, 135048, 135049, 135050, 135051, 135052) c6( ) c7(gh, T, ns, Mb, Pt, aA, fd, n, oZ, fr, ci, aub, q, amW, cd, ad, eA, afb, jz, F, bqZ, xE, no, aE, dV, aT, h, By, dL, bU, hu, fb, ae, eL, uQ, A, je, s, aW, xi, PX, bxz, Y, ev, r, ff, Ej, kp, aF, en, g, LV, cM, f, auC, Bv, iM, ql, nB, bE, avZ, X, Hb, y, bt, it, B, LS); #c1(FSCN2) c2(XP_011522894) c3(fascin-2 isoform X2) c4(317373) c5(317374, 317375, 317376, 317377, 317378, 317379) c6( ) c7(bxA, alF, xX, W, nb, dA, nw, nC, bxB, VF); #c1(FSCN2) c2(XP_011522895) c3(fascin-2 isoform X1) c4(317380) c5(317381, 317382, 317383, 317384, 317385, 317386) c6( ) c7(bxA, alF, xX, W, nb, dA, nw, nC, bxB, VF); #c1(FSD1) c2(NP_077309) c3(fibronectin type III and SPRY domain-containing protein 1) c4(215179) c5(215180, 215181, 215182, 215183, 215184, 215185) c6( ) c7(bM, T, bxC, aw, al, aA, bB, n, Fb, j, cd, q, ad, afb, bv, cc, cy, dL, K, ae, eL, hm, d, Qr, nO, Rj, xs, eH, r, aq, aF, g, eF, iR, iK, bz, bw, dR, ck, es, LB, nM, eM, bE, gZ, np, bD, rA, ik, B, hS); #c1(FSD1L) c2(NP_001138785) c3(FSD1-like protein isoform 3) c4(57691) c5(57692, 57693, 57694, 57695, 57696, 57697) c6( ) c7(bM, T, bxC, aw, al, aA, bB, n, Fb, j, cd, q, ad, bv, cc, cy, dL, K, ae, eL, hm, d, Qr, nO, Rj, xs, eH, r, aq, aF, g, eF, iR, iK, bz, bw, dR, ck, es, nM, eM, bE, gZ, np, bD, rA, ik, B, hS); #c1(FSD1L) c2(NP_001274120) c3(FSD1-like protein isoform 4) c4(106054) c5(106055) c6( ) c7(bM, T, bxC, aw, al, aA, bB, n, Fb, j, cd, q, ad, bv, cc, cy, dL, K, ae, eL, hm, d, Qr, nO, Rj, xs, eH, r, aq, aF, g, eF, iR, iK, bz, bw, dR, ck, es, nM, eM, bE, gZ, np, bD, rA, ik, B, hS); #c1(FSD1L) c2(NP_001274121) c3(FSD1-like protein isoform 5) c4(106056) c5(106057, 106058, 106059, 106060, 106061) c6( ) c7(bM, T, bxC, aw, al, aA, bB, n, Fb, j, cd, q, ad, bv, cc, cy, dL, K, ae, eL, hm, d, Qr, nO, Rj, xs, eH, r, aq, aF, g, eF, iR, iK, bz, bw, dR, ck, es, nM, eM, bE, gZ, np, bD, rA, ik, B, hS); #c1(FSD1L) c2(NP_114125) c3(FSD1-like protein isoform 2) c4(222271) c5(222272, 222273, 222274, 222275, 222276, 222277) c6( ) c7(bM, T, bxC, aw, al, aA, bB, n, Fb, j, cd, q, ad, bv, cc, cy, dL, K, ae, eL, hm, d, Qr, nO, Rj, xs, eH, r, aq, aF, g, eF, iR, iK, bz, bw, dR, ck, es, nM, eM, bE, gZ, np, bD, rA, ik, B, hS); #c1(FSD1L) c2(XP_005252317) c3(FSD1-like protein isoform XB) c4( ) c5(271655, 271656, 271657, 271658, 271659) c6( ) c7(bM, T, bxC, aw, al, aA, bB, n, Fb, j, cd, q, ad, bv, cc, cy, dL, K, ae, eL, hm, d, Qr, nO, Rj, xs, eH, r, aq, aF, g, eF, iR, iK, bz, bw, dR, ck, es, nM, eM, bE, gZ, np, bD, rA, ik, B, hS); #c1(FSD1L) c2(XP_011517380) c3(FSD1-like protein isoform X3) c4( ) c5(311099) c6( ) c7(bM, T, bxC, aw, al, aA, bB, n, Fb, j, cd, q, ad, bv, cc, cy, dL, K, ae, eL, hm, d, Qr, nO, Rj, xs, eH, r, aq, aF, g, eF, iR, iK, bz, bw, dR, ck, es, nM, eM, bE, gZ, np, bD, rA, ik, B, hS); #c1(FSD2) c2(NP_001007123) c3(fibronectin type III and SPRY domain-containing protein 2 isoform a) c4(22506, 22507) c5(22508, 22509, 22510, 22511, 22512, 22513) c6( ) c7(dY); #c1(FSD2) c2(XP_011519538) c3(fibronectin type III and SPRY domain-containing protein 2 isoform X3) c4( ) c5(314191, 314192, 314193, 314194, 314195, 314196) c6( ) c7(dY); #c1(FSHB) c2(NP_001018090) c3(follitropin subunit beta precursor) c4(27194, 27195) c5(27196, 27197, 27198, 27199, 27200, 27201, 27202, 27203, 27204, 27205, 27206, 27207, 27208, 27209, 27210, 27211, 27212, 27213, 27214, 27215, 27216, 27217, 27218, 27219, 27220, 27221, 27222, 27223, 27224, 27225, 27226, 27227, 27228, 27229, 27230, 27231, 27232, 27233, 27234, 27235, 27236, 27237, 27238, 27239, 27240, 27241, 27242, 27243, 27244, 27245, 27246, 27247, 27248, 27249, 27250, 27251, 27252, 27253, 27254, 27255, 27256, 27257, 27258, 27259, 27260, 27261, 27262, 27263, 27264, 27265, 27266, 27267, 27268, 27269, 27270, 27271, 27272, 27273, 27274, 27275, 27276, 27277, 27278, 27279, 27280, 27281, 27282, 27283, 27284, 27285, 27286, 27287, 27288, 27289, 27290, 27291, 27292, 27293, 27294, 27295, 27296, 27297, 27298, 27299, 27300, 27301, 27302) c6(27303, 27304, 27305, 27306, 27307, 27308, 27309) c7(bxD, yo, kl, gU, ND, il, aeS, aT, vH, m, nA, er, ad, bN, UE); #c1(FSHR) c2(NP_000136) c3(follicle-stimulating hormone receptor isoform 1 precursor) c4(2918, 2919) c5(2920, 2921, 2922, 2923, 2924, 2925, 2926) c6( ) c7(T, Ut, gU, UH, wu, aZ, aMv, cz, hz, bS, ur, ct, aTS, ci, bxH, uu, v, UI, ad, dP, il, BJ, avL, zf, auB, aT, vH, UG, wm, uV, af, bA, yo, aev, kl, ZE, ND, Lf, asQ, aeS, eZ, avJ, bxF, dq, Hu, baZ, bu, Z, t, uC, zZ, bfw, qa, bxE, sn, AV, afe, Uv, bxl, KZ, CZ, bxG, m, Lb, gT); #c1(FSHR) c2(NP_852111) c3(follicle-stimulating hormone receptor isoform 2 precursor) c4(254853) c5(254854, 254855, 254856, 254857, 254858, 254859, 254860, 254861, 254862, 254863, 254864, 254865) c6( ) c7(T, Ut, gU, UH, wu, aZ, aMv, cz, hz, bS, ur, ct, aTS, ci, bxH, uu, v, UI, ad, dP, il, BJ, avL, zf, auB, aT, vH, UG, wm, uV, af, bA, yo, aev, kl, ZE, ND, Lf, asQ, aeS, eZ, avJ, bxF, dq, Hu, baZ, bu, Z, t, uC, zZ, bfw, qa, bxE, sn, AV, afc, Uv, bxl, KZ, CZ, bxG, m, Lb, gT); #c1(FSHR) c2(XP_011531035) c3(follicle-stimulating hormone receptor isoform X1) c4(326998) c5( ) c6( ) c7(T, Ut, gU, UH, wu, aZ, aMv, cz, hz, bS, ur, ct, aTS, ci, bxH, uu, v, UI, ad, dP, il, BJ, avL, zf, auB, aT, vH, UG, wm, uV, af, bA, yo, aev, kl, ZE, ND, Lf, asQ, aeS, eZ, avJ, bxF, dq, Hu, baZ, bu, Z, t, uC, zZ, bfw, qa, bxE, sn, AV, afc, Uv, bxl, KZ, CZ, bxG, m, Lb, gT); #c1(FSHR) c2(XP_011531038) c3(follicle-stimulating hormone receptor isoform X3) c4( ) c5(326999, 327000, 327001, 327002, 327003) c6( ) c7(T, Ut, gU, UH, wu, aZ, aMv, cz, hz, bS, ur, ct, aTS, ci, bxH, uu, v, UI, ad, dP, il, BJ, avL, zf, auB, aT, vH, UG, wm, uV, af, bA, yo, aev, kl, ZE, ND, Lf, asQ, aeS, eZ, avJ, bxF, dq, Hu, baZ, bu, Z, t, uC, zZ, bfw, qa, bxE, sn, AV, afc, Uv, bxl, KZ, CZ, bxG, m, Lb, gT); #c1(FSIP1) c2(XP_011519608) c3(fibrous sheath-interacting protein 1 isoform X1) c4(314263) c5(314264, 314265, 314266, 314267, 314268, 314269, 314270, 314271, 314272, 314273, 314274) c6( ) c7(bM, aqg, aW, aT, dL, j, nA, bu, H, eL, af, xt, L); #c1(FSIP1) c2(XP_011519613) c3(fibrous sheath-interacting protein 1 isoform X6) c4(314275) c5( ) c6( ) c7(bM, aqg, aW, aT, dL, j, nA, bu, H, eL, af, xt, L); #c1(FST) c2(NP_006341) c3(follistatin isoform FST317 precursor) c4(164168, 164169) c5(164170, 164171, 164172, 164173, 164174, 164175) c6( ) c7(T, dD, aFG, wu, aZ, ea, pQ, cV, aA, eb, oY, v, eq, ci, C, V, cd, ad, Vs, dP, aHF, ft, rw, BJ, rS, aT, dL, bl, wm, Dz, ji, ae, eL, yo, kl, s, qt, aW, Y, ff, xs, uY, aq, zC, en, bu, dw, ajz, t, zE, Px, bxJ, cl, cm, sS, AM, hL, hR, Zn, Da, m, IC, B); #c1(FST) c2(NP_037541) c3(follistatin isoform FST344 precursor) c4(176105, 176106) c5(176107, 176108, 176109, 176110, 176111, 176112, 176113, 176114, 176115, 176116, 176117, 176118, 176119, 176120, 176121, 176122, 176123, 176124, 176125, 176126, 176127, 176128, 176129, 176130, 176131, 176132, 176133, 176134, 176135, 176136, 176137, 176138, 176139, 176140, 176141, 176142, 176143, 176144, 176145, 176146, 176147, 176148, 176149, 176150, 176151, 176152, 176153, 176154, 176155, 176156, 176157, 176158, 176159, 176160, 176161, 176162, 176163, 176164, 176165, 176166, 176167, 176168, 176169, 176170, 176171, 176172, 176173, 176174, 176175, 176176, 176177, 176178, 176179, 176180, 176181, 176182, 176183, 176184, 176185, 176186, 176187, 176188, 176189, 176190, 176191, 176192, 176193, 176194, 176195, 176196, 176197, 176198, 176199, 176200, 176201, 176202, 176203, 176204, 176205, 176206, 176207, 176208, 176209, 176210, 176211, 176212, 176213, 176214, 176215, 176216, 176217, 176218, 176219, 176220, 176221, 176222, 176223, 176224, 176225, 176226, 176227, 176228, 176229, 176230, 176231, 176232, 176233, 176234, 176235, 176236, 176237, 176238, 176239, 176240, 176241, 176242, 176243, 176244, 176245, 176246, 176247, 176248, 176249, 176250, 176251, 176252, 176253, 176254, 176255, 176256) c6(176257) c7(T, dD, aFG, wu, aZ, ea, pQ, cV, aA, eh, oY, v, eq, ci, C, V, cd, ad, Vs, dP, aHF, ft, rw, BJ, rS, aT, dL, bl, wm, Dz, ji, ae, eL, yo, kl, s, qt, aW, Y, ff, xs, uY, aq, zC, en, bu, dw, ajz, t, zE, Px, bxJ, cl, cm, sS, AM, hL, hR, Zn, Da, m, IC, B); #c1(FSTL1) c2(NP_009016) c3(follistatin-related protein 1 precursor) c4(170260, 170261, 170262) c5(170263, 170264, 170265, 170266, 170267, 170268, 170269, 170270, 170271, 170272, 170273, 170274, 170275, 170276, 170277, 170278, 170279, 170280) c6( ) c7(T, os, bxK, aw, oZ, ai, cd, ad, xE, aE, ws, h, cy, ae, B, cl, t, bz, eM, hL, E, m, y, iu); #c1(FSTL3) c2(NP_005851) c3(follistatin-related protein 3 precursor) c4(159874) c5(159875, 159876, 159877, 159878, 159879, 159880, 159881, 159882) c6( ) c7(T, sN, aW, fc, pQ, aT, eb, aq, cP, y, cd); #c1(FSTL4) c2(NP_055897) c3(follistatin-related protein 4 precursor) c4(184288) c5(184289, 184290, 184291, 184292, 184293, 184294, 184295, 184296, 184297, 184298, 184299, 184300, 184301, 184302, 184303, 184304) c6(184305, 184306, 184307, 184308) c7(bM, A, ac, e, aw, cz, alv, j, eu); #c1(FSTL4) c2(XP_011541588) c3(follistatin-related protein 4 isoform X4) c4(340132) c5( ) c6( ) c7(bM, A, ac, e, aw, cz, alv, j, eu); #c1(FSTL5) c2(NP_001121899) c3(follistatin-related protein 5 isoform b precursor) c4(46286) c5(46287, 46288, 46289, 46290, 46291, 46292, 46293, 46294, 46295, 46296, 46297, 46298, 46299, 46300) c6(46301, 46302, 46303, 46304) c7(jf, oe, ad); #c1(FSTL5) c2(NP_001121900) c3(follistatin-related protein 5 isoform c precursor) c4(46305) c5(46306, 46307, 46308, 46309, 46310, 46311, 46312, 46313) c6(46314, 46315) c7(jf, oe, ad); #c1(FSTL5) c2(NP_064501) c3(follistatin-related protein 5 isoform a precursor) c4(202636) c5(202637, 202638, 202639, 202640, 202641, 202642, 202643, 202644) c6(202645, 202646) c7(jf, oe, ad); #c1(FTCD) c2(NP_996848) c3(formimidoyltransferase-cyclodeaminase) c4(264772, 264773) c5(264774, 264775, 264776, 264777, 264778, 264779, 264780, 264781) c6( ) c7(Na, af, Iv, Ip, Nc, bh, pk, bxL, B); #c1(FTCD) c2(XP_006724025) c3(formimidoyltransferase-cyclodeaminase isoform X2) c4( ) c5(295623, 295624, 295625, 295626, 295627, 295628, 295629, 295630, 295631, 295632) c6( ) c7(Na, af, Iv, Ip, Nc, bh, pk, bxL, B); #c1(FTCD) c2(XP_011527737) c3(formimidoyltransferase-cyclodeaminase isoform X3) c4( ) c5(322703) c6( ) c7(Na, af, Iv, Ip, Nc, bh, pk, bxL, B); #c1(FTCD) c2(XP_011527739) c3(formimidoyltransferase-cyclodeaminase isoform X5) c4( ) c5(322704, 322705) c6( ) c7(Na, af, Iv, Ip, Nc, bh, pk, bxL, B); #c1(FTCD) c2(XP_011527740) c3(formimidoyltransferase-cyclodeaminase isoform X6) c4(322706) c5(322707, 322708, 322709, 322710, 322711, 322712, 322713, 322714, 322715, 322716, 322717) c6( ) c7(Na, af, Iv, Ip, Nc, bh, pk, bxL, B); #c1(FTCD) c2(XP_011527742) c3(formimidoyltransferase-cyclodeaminase isoform X8) c4( ) c5(322718, 322719, 322720, 322721, 322722, 322723, 322724, 322725) c6( ) c7(Na, af, Iv, Ip, Nc, bh, pk, bxL, B); #c1(FTH1) c2(NP_002023) c3(ferritin heavy chain) c4(123373, 123374, 123375) c5(123376, 123377, 123378, 123379, 123380, 123381, 123382, 123383, 123384, 123385, 123386, 123387, 123388, 123389, 123390, 123391, 123392, 123393) c6( ) c7(mR, fR, ec, yt, pf, Id, U, r, yy, aeu, Io, cd, jh, ct, q, an, Jx, bxM, eA, B); #c1(FTL) c2(NP_000137) c3(ferritin light chain) c4(2927, 2928) c5(2929, 2930, 2931, 2932, 2933, 2934, 2935, 2936, 2937, 2938, 2939, 2940) c6( ) c7(fR, aWG, fF, v, et, hX, axa, yt, oW, aT, aU, K, an, aUV, aUQ, cp, Pw, ZH, CN, aW, Y, eH, bcD, aAm, gl, yy, fe, eF, xw, dr, bxN, aeb, aUW, wk, U, y); #c1(FTMT) c2(NP_803431) c3(ferritin, mitochondrial precursor) c4(252629) c5(252630, 252631, 252632, 252633, 252634, 252635) c6( ) c7(W, kA, kz, oW, bw, jy, K, an, cm, hr, wT); #c1(FTO) c2(NP_001073901) c3(alpha-ketoglutarate-dependent dioxygenase FTO) c4(36371, 36372, 36373, 36374) c5(36375, 36376, 36377, 36378, 36379, 36380, 36381, 36382, 36383, 36384, 36385, 36386, 36387, 36388, 36389, 36390, 36391, 36392, 36393, 36394, 36395, 36396, 36397, 36398, 36399, 36400, 36401, 36402, 36403, 36404, 36405, 36406, 36407, 36408, 36409, 36410, 36411) c6( ) c7(bL, bxO, T, jv, dD, bM, eR, aoq, aZ, ea, e, aw, gQ, aOH, cz, bO, fq, cQ, bS, j, ct, afE, aj, hy, v, eq, aR, J, ad, hX, fU, aPW, av, aE, iX, aql, aT, h, qM, he, ae, af, bA, kl, aW, Y, Mz, dq, aq, as, cl, Z, cm, bz, fq, qa, es, pO, cA, bxP, mg, hL, at, mf, IS, ei, B); #c1(FTO) c2(XP_011521615) c3(alpha-ketoglutarate-dependent dioxygenase FTO isoform X1) c4(316417) c5(316418) c6( ) c7(bL, bxO, T, jv, dD, bM, eR, aoq, aZ, ea, e, aw, qQ, aOH, cz, bO, fq, cQ, bS, j, ct, afE, aj, hy, v, eq, aR, J, ad, hX, fU, aPW, av, aE, iX, aql, aT, h, qM, he, ae, af, bA, kl, aW, Y, Mz, dq, aq, as, cl, Z, cm, bz, fq, qa, es, pO, cA, bxP, mg, hL, at, mf, IS, ei, B); #c1(FTSJ1) c2(NP_001269086) c3(putative tRNA (cytidine(32)/guanosine(34)-2′-O)-methyltransferase isoform c) c4( ) c5(100396, 100397, 100398, 100399, 100400, 100401) c6( ) c7(nf, t, nX, nA, bxQ); #c1(FTSJ1) c2(NP_036412) c3(putative tRNA (cytidine(32)/guanosine(34)-2′-O)-methyltransferase isoform a) c4(173643, 173644) c5(173645, 173646, 173647, 173648, 173649, 173650) c6( ) c7(nf, t, nX, nA, bxQ); #c1(FTSJ1) c2(NP_803188) c3(putative tRNA (cytidine(32)/guanosine(34)-2′-O)-methyltransferase isoform b) c4(252554) c5(252555, 252556, 252557, 252558, 252559, 252560, 252561, 252562, 252563, 252564, 252565, 252566, 252567, 252568, 252569, 252570, 252571, 252572) c6( ) c7(nf, t, nX, nA, bxQ); #c1(FTSJ2) c2(NP_037525) c3(putative ribosomal RNA methyltransferase 2) c4(176012, 176013) c5(176014, 176015, 176016, 176017, 176018, 176019, 176020, 176021, 176022, 176023, 176024, 176025) c6( ) c7(bv, T, iu, eM); #c1(FTSJ3) c2(NP_060117) c3(pre-rRNA processing protein FTSJ3) c4(194241) c5(194242, 194243, 194244, 194245, 194246, 194247) c6( ) c7(t); #c1(FUBP1) c2(NP_001290362) c3(far upstream element-binding protein 1 isoform 1) c4( ) c5(115319, 115320, 115321, 115322, 115323) c6( ) c7(Qi, dB, aq, eA, as, an, iR, Fc, B); #c1(FUBP1) c2(XP_011540693) c3(far upstream element-binding protein 1 isoform X1) c4(339244) c5( ) c6( ) c7(Qi, dB, aq, eA, as, an, iR, Fc, B); #c1(FUBP1) c2(XP_011540694) c3(far upstream element-binding protein 1 isoform X2) c4(339245) c5(339246, 339247, 339248, 339249, 339250, 339251) c6( ) c7(Qi, dB, aq, eA, as, an, iR, Fc, B); #c1(FUBP1) c2(XP_011540695) c3(far upstream element-binding protein 1 isoform X3) c4(339252, 339253) c5( ) c6( ) c7(Qi, dB, aq, eA, as, an, iR, Fc, B); #c1(FUBP1) c2(XP_011540696) c3(far upstream element-binding protein 1 isoform X4) c4(339254, 339255) c5(339256, 339257, 339258, 339259, 339260, 339261, 339262, 339263, 339264, 339265, 339266, 339267) c6( ) c7(Qi, dB, aq, eA, as, an, iR, Fc, B); #c1(FUBP1) c2(XP_011540697) c3(far upstream element-binding protein 1 isoform X5) c4( ) c5(339268) c6( ) c7(Qi, dB, aq, eA, as, an, iR, Fc, B); #c1(FUBP3) c2(NP_003925) c3(far upstream element-binding protein 3) c4(142225, 142226) c5(142227, 142228, 142229, 142230, 142231, 142232) c6( ) c7(B); #c1(FUBP3) c2(XP_006717377) c3(far upstream element-binding protein 3 isoform X7) c4( ) c5(291041) c6( ) c7(B); #c1(FUBP3) c2(XP_011517473) c3(far upstream element-binding protein 3 isoform X1) c4(311205) c5( ) c6( ) c7(B); #c1(FUBP3) c2(XP_011517474) c3(far upstream element-binding protein 3 isoform X4) c4( ) c5(311206, 311207, 311208, 311209, 311210, 311211, 311212, 311213, 311214, 311215, 311216, 311217) c6( ) c7(B); #c1(FUCA1) c2(XP_011539469) c3(tissue alpha-L-fucosidase isoform X2) c4( ) c5(337672, 337673, 337674, 337675, 337676) c6( ) c7(h, bxR, Lq, m, vy); #c1(FUCA2) c2(NP_114409) c3(plasma alpha-L-fucosidase precursor) c4(222608, 222609, 222610) c5(222611, 222612, 222613, 222614, 222615, 222616, 222617, 222618, 222619, 222620, 222621, 222622, 222623, 222624, 222625, 222626, 222627, 222628, 222629, 222630, 222631, 222632, 222633, 222634) c6( ) c7(beZ); #c1(FUNDC1) c2(NP_776155) c3(FUN14 domain-containing protein 1) c4(250870) c5(250871, 250872, 250873, 250874, 250875, 250876) c6( ) c7(na); #c1(FUNDC2) c2(NP_076423) c3(FUN14 domain-containing protein 2) c4(214119) c5(214120, 214121, 214122, 214123, 214124, 214125) c6( ) c7(qh, B); #c1(FURIN) c2(NP_001276752) c3(furin preproprotein) c4(108350, 108351, 108352) c5(108353, 108354, 108355, 108356, 108357, 108358, 108359, 108360, 108361, 108362, 108363, 108364, 108365, 108366, 108367, 108368, 108369, 108370, 108371) c6(108372) c7(dD, ea, oe, al, cz, hy, eq, jE, ci, zP, q, eA, hX, aT, h, ox, bq, zQ, iU, oo, ff, r, en, eM, aS, ao); #c1(FOS) c2(NP_001164408) c3(RNA-binding protein FUS isoform 3) c4( ) c5(66928, 66929, 66930, 66931, 66932, 66933, 66934, 66935, 66936, 66937, 66938, 66939) c6( ) c7(bL, T, aGn, gU, YU, hV, OI, bxU, bB, TM, Vd, v, bxV, PJ, QG, aHy, aR, ad, av, ft, Gt, di, WY, aT, kf, vH, dz, K, hu, bxT, ae, dx, eG, acR, ND, aW, CT, aaE, cm, bz, QA, dr, iN, ck, rR, RV, bxW, c, bb, Kv, Qu, eM, dJ, au, bxS, U, iT, k, IM, bt); #c1(FOS) c2(NP_004951) c3(RNA-binding protein FUS isoform 1) c4(151418) c5( ) c6( ) c7(bL, T, aGn, gU, YU, hV, OI, bxU, bB, TM, Vd, v, bxV, PJ, QG, aHy, aR, ad, av, ft, Gt, di, WY, aT, kf, vH, dz, K, hu, bxT, ae, dx, eG, acR, ND, aW, CT, aaE, cm, bz, QA, dr, iN, ck, rR, RV, bxW, c, bb, Kv, Qu, eM, dJ, au, bxS, U, iT, k, IM, bt); #c1(FOS) c2(XP_011544083) c3(RNA-binding protein FUS isoform X1) c4(343258, 343259) c5( ) c6( ) c7(bL, T, aGn, gU, YU, hV, OI, bxU, bB, TM, Vd, v, bxV, PJ, QG, aHy, aR, ad, av, ft, Gt, di, WY, aT, kf, vH, dz, K, hu, bxT, ae, dx, eG, acR, ND, aW, CT, aaE, cm, bz, QA, dr, iN, ck, rR, RV, bxW, c, bb, Kv, Qu, eM, dJ, au, bxS, U, iT, k, IM, bt); #c1(FOS) c2(XP_011544084) c3(RNA-binding protein FUS isoform X2) c4( ) c5(343260, 343261, 343262, 343263, 343264, 343265) c6( ) c7(bL, T, aGn, gU, YU, hV, OI, bxU, bB, TM, Vd, v, bxV, PJ, QG, aHy, aR, ad, av, ft, Gt, di, WY, aT, kf, vH, dz, K, hu, bxT, ae, dx, eG, acR, ND, aW, CT, aaE, cm, bz, QA, dr, iN, ck, rR, RV, bxW, c, bb, Kv, Qu, eM, dJ, au, bxS, U, iT, k, IM, bt); #c1(FUT1) c2(NP_000139) c3(galactoside 2-alpha-L-fucosyltransferase 1) c4( ) c5(2941, 2942, 2943, 2944, 2945, 2946, 2947, 2948, 2949, 2950, 2951) c6( ) c7(Cx, T, os, dA, al, jh, aA, n, oY, oZ, oH, ci, pz, aR, ad, oT, IE, aE, qh, Co, h, dL, K, jj, an, ae, eL, B, ff, hI, aF, BG, en, jg, t, btO, bz, KM, dr, iK, bw, ck, gk, iQ, ac, bE, hk, CO, aEG, Lq, m, be, adg, bt, fh, X); #c1(FUT1) c2(XP_006723190) c3(galactoside 2-alpha-L-fucosyltransferase 1 isoform X1) c4(295033, 295034) c5(295035) c6( ) c7(Cx, T, os, dA, al, jh, aA, n, oY, oZ, oH, ci, pz, aR, ad, oT, IE, aE, qh, Co, h, dL, K, jj, an, ae, eL, B, ff, hI, aF, BG, en, jg, t, btO, bz, KM, dr, iK, bw, ck, gk, iQ, ac, bE, hk, CO, aEG, Lg, m, be, adg, bt, fh, X); #c1(FUT10) c2(NP_116053) c3(alpha-(L3)-fucosyltransferase 10) c4(225287) c5(225288, 225289, 225290, 225291, 225292, 225293, 225294, 225295, 225296, 225297, 225298, 225299) c6( ) c7(fq); #c1(FUT10) c2(XP_011542978) c3(alpha-(1,3)-fucosyltransferase 10 isoform X1) c4(341675) c5( ) c6( ) c7(fq); #c1(FUT10) c2(XP_011542980) c3(alpha-(1,3)-fucosyltransferase 10 isoform X3) c4( ) c5(341676, 341677) c6( ) c7(fq); #c1(FUT10) c2(XP_011542982) c3(alpha-(1,3)-fucosyltransferase 10 isoform X5) c4(341678) c5(341679, 341680, 341681, 341682, 341683, 341684) c6( ) c7(fq); #c1(FUT10) c2(XP_011542983) c3(alpha-(1,3)-fucosyltransferase 10 isoform X6) c4(341685) c5( ) c6( ) c7(fq); #c1(FUT11) c2(NP_001271123) c3(alpha-(1,3)-fucosyltransferase II isoform 2 precursor) c4(103431) c5(103432, 103433, 103434, 103435, 103436, 103437) c6( ) c7(py); #c1(FUT11) c2(NP_775811) c3(alpha-(1,3)-fucosyltransferase 11 isoform 1 precursor) c4(250389) c5(250390, 250391, 250392, 250393, 250394, 250395) c6( ) c7(py); #c1(FUT2) c2(NP_001091107) c3(galactoside 2-alpha-L-fucosyltransferase 2) c4(38507, 38508) c5(38509, 38510, 38511, 38512, 38513, 38514, 38515, 38516, 38517, 38518, 38519, 38520, 38521, 38522, 38523, 38524) c6( ) c7(bM, T, Ht, pF, fR, LX, aD, bxY, aA, bB, mN, bS, ct, ad, jz, aE, bxZ, oW, aT, hD, h, dL, K, an, ao, A, az, yy, hN, Io, aF, EZ, Z, t, bya, bxX, bE, at, CZ, m, jM, y, B, LT); #c1(FUT3) c2(XP_011526169) c3(galactoside 3(4)-L-fucosyltransferase isoform X1) c4(320452) c5(320453, 320454, 320455, 320456, 320457, 320458, 320459, 320460, 320461, 320462, 320463, 320464, 320465, 320466, 320467, 320468, 320469, 320470) c6( ) c7(bM, T, aC, pF, fR, e, aA, v, ci, fw, q, jz, aE, gd, aT, aa, d, Y, az, r, aF, aB, bz, ck, bE, cS, ao); #c1(FUT4) c2(NP_002024) c3(alpha-(1,3)-fucosyltransferase 4) c4(123394) c5(123395, 123396, 123397, 123398, 123399, 123400, 123401) c6( ) c7(T, byb, hV, jh, bs, aA, n, bB, Hn, ci, q, hr, ad, Nh, eA, av, x, aE, bud, kH, aT, ey, ox, NM, ae, iL, jf, d, je, s, iU, Cw, aW, Y, ev, az, xR, ff, r, aF, en, g, bw, bz, ck, bF, iM, eM, dB, bE, AM, gX, PV, k, pw, bt, it, B); #c1(FUT5) c2(NP_002025) c3(alpha-(1,3)-fucosyltransferase 5) c4(123402) c5(123403, 123404, 123405, 123406, 123407, 123408, 123409, 123410, 123411, 123412) c6( ) c7(iu, bE, Y, aA, bB, aF, ci, bz, B, ad); #c1(FUT6) c2(NP_001035791) c3(alpha-(1,3)-fucosyltransferase 6) c4(33071, 33072, 33073, 33074, 33075) c5(33076, 33077, 33078, 33079, 33080, 33081, 33082, 33083, 33084, 33085, 33086, 33087, 33088, 33089, 33090, 33091, 33092, 33093) c6( ) c7(ae, T, iu, B, bE, byc, gd, r, aA, bB, aq, aF, ci, bX, bz, q, ad); #c1(FUT6) c2(XP_005259584) c3(alpha-(1,3)-fucosyltransferase 6 isoform X2) c4(276151, 276152) c5(276153, 276154, 276155, 276156, 276157, 276158, 276159, 276160, 276161, 276162, 276163, 276164, 276165, 276166, 276167, 276168, 276169, 276170, 276171, 276172, 276173, 276174, 276175, 276176, 276177, 276178, 276179, 276180, 276181, 276182, 276183, 276184, 276185, 276186, 276187, 276188) c6( ) c7(ae, T, iu, B, bE, bye, gd, r, aA, bB, aq, aF, ci, bX, bz, q, ad); #c1(FUT7) c2(NP_004470) c3(alpha-(1,3)-fucosyltransferase 7) c4(146644) c5(146645, 146646, 146647, 146648, 146649, 146650) c6( ) c7(T, kl, ac, bP, bE, bB, cL, dL, bz, B, o); #c1(FUT8) c2(NP_004471) c3(alpha-(1,6)-fucosyltransferase isoform b) c4( ) c5(146651, 146652, 146653, 146654, 146655) c6( ) c7(T, Db, n, aq, K, Hb, ci, ae, B, gF, ad, asw); #c1(FUT8) c2(XP_011534915) c3(alpha-(1,6)-fucosyltransferase isoform X1) c4(331428, 331429, 331430, 331431, 331432, 331433, 331434, 331435, 331436) c5(331437, 331438, 331439, 331440, 331441, 331442, 331443, 331444, 331445, 331446, 331447, 331448, 331449, 331450, 331451, 331452, 331453, 331454, 331455, 331456, 331457, 331458, 331459, 331460, 331461, 331462, 331463, 331464, 331465, 331466, 331467, 331468, 331469, 331470, 331471, 331472, 331473, 331474, 331475, 331476, 331477, 331478, 331479, 331480, 331481, 331482, 331483, 331484, 331485, 331486, 331487) c6( ) c7(T, Db, n, aq, K, Hb, ci, ae, B, gF, ad, asw); #c1(FUT8) c2(XP_011534916) c3(alpha-(1,6)-fucosyltransferase isoform X2) c4( ) c5(331488, 331489, 331490, 331491, 331492, 331493) c6( ) c7(T, Db, n, aq, K, Hb, ci, ae, B, gF, ad, asw); #c1(FUT9) c2(XP_011533687) c3(alpha-(1,3)-fucosyltransferase 9 isoform X1) c4(329742) c5(329743, 329744, 329745, 329746, 329747, 329748) c6( ) c7(oe, j); #c1(FUZ) c2(NP_001165408) c3(protein fuzzy homolog isoform 2) c4(67655) c5(67656, 67657, 67658, 67659, 67660, 67661) c6( ) c7(ng, HF, BU, hI, Ip, aX, mg, n, HL, byd, v, K, pw, hK, Gc, Bp, IU); #c1(FUZ) c2(NP_079405) c3(protein fuzzy homolog isoform 1) c4(217938, 217939) c5(217940, 217941, 217942, 217943, 217944, 217945, 217946, 217947, 217948, 217949, 217950, 217951) c6( ) c7(ng, HF, BU, hI, Ip, aX, mg, n, HL, byd, v, K, pw, hK, Gc, Bp, IU); #c1(FUZ) c2(XP_011525646) c3(protein fuzzy homolog isoform X5) c4(320048) c5(320049, 320050, 320051, 320052, 320053, 320054) c6( ) c7(ng, HF, BU, hI, Ip, aX, mg, n, HL, byd, v, K, pw, hK, Gc, Bp, IU); #c1(FXN) c2(NP_000135) c3(frataxin, mitochondrial isoform 1 preproprotein) c4(2911) c5(2912, 2913, 2914, 2915, 2916, 2917) c6( ) c7(bL, T, Pt, aw, yY, ew, bB, aj, Kh, bX, aoz, aR, J, ad, eW, Kx, cc, no, aV, Iu, aN, Ak, aU, yu, vc, adV, DG, agW, K, KU, an, af, ev, KH, dq, aq, Ku, bQ, cm, kC, dr, aeb, dR, wT, rR, ky, kB, dB, Iq, Kv, bE, mx, U, gZ, oh, mf, aan, bC, alq, bye, ao); #c1(FXN) c2(NP_001155178) c3(frataxin, mitochondrial isoform 3 preproprotein) c4(61498) c5(61499, 61500, 61501, 61502, 61503, 61504) c6( ) c7(bL, T, Pt, aw, yY, ew, bB, aj, Kh, bX, aoz, aR, J, ad, eW, Kx, cc, no, aV, Iu, aN, Ak, aU, yu, vc, adV, DG, agW, K, KU, an, af, ev, KH, dq, aq, Ku, bQ, cm, kC, dr, aeb, dR, wT, rR, ky, kB, dB, Iq, Kv, bE, mx, U, gZ, oh, mf, aan, bC, alq, bye, ao); #c1(FXN) c2(NP_852090) c3(frataxin, mitochondrial isoform 2 preproprotein) c4(254806) c5(254807, 254808, 254809, 254810, 254811, 254812) c6( ) c7(bL, T, Pt, aw, yY, ew, bB, aj, Kh, bX, aoz, aR, J, ad, eW, Kx, cc, no, aV, lu, aN, Ak, aU, yu, vc, adV, DG, agW, K, KU, an, af, ev, KH, dq, aq, Ku, bQ, cm, kC, dr, aeb, dR, wT, rR, ky, kB, dB, Iq, Kv, bE, mx, U, gZ, oh, mf, aan, bC, alq, bye, ao); #c1(FXR1) c2(NP_001013456) c3(fragile X mental retardation syndrome-related protein 1 isoform b) c4(25610) c5(25611, 25612, 25613, 25614, 25615, 25616) c6( ) c7(T, ff, h, Wb, rx, Ku, nA, en, g, ae, ad); #c1(FXR1) c2(NP_001013457) c3(fragile X mental retardation syndrome-related protein 1 isoform c) c4(25617) c5(25618, 25619, 25620, 25621, 25622) c6( ) c7(T, ff, h, Wb, rx, Ku, nA, en, g, ae, ad); #c1(FXR1) c2(NP_005078) c3(fragile X mental retardation syndrome-related protein 1 isoform a) c4(152691, 152692) c5(152693, 152694, 152695, 152696, 152697, 152698, 152699, 152700, 152701, 152702, 152703, 152704, 152705) c6( ) c7(T, ff, h, Wb, rx, Ku, nA, en, g, ae, ad); #c1(FXR2) c2(NP_004851) c3(fragile X mental retardation syndrome-related protein 2) c4(150310) c5(150311, 150312, 150313, 150314, 150315, 150316) c6( ) c7(h, Ku); #c1(FXYD1) c2(NP_001265647) c3(phospholemman precursor) c4(99098) c5(99099, 99100, 99101, 99102, 99103, 99104, 99105, 99106, 99107, 99108) c6( ) c7(Qi, q, j, r); #c1(FXYD2) c2(NP_001671) c3(sodium/potassium-transporting ATPase subunit gamma isoform 1) c4(119895) c5(119896, 119897, 119898, 119899, 119900, 119901) c6( ) c7(byf, aj, J, cz); #c1(FXYD2) c2(NP_067614) c3(sodium/potassium-transporting ATPase subunit gamma isoform 2) c4(209066) c5(209067, 209068, 209069, 209070, 209071, 209072, 209073, 209074, 209075, 209076) c6( ) c7(byf, aj, J, cz); #c1(FXYD3) c2(NP_001129479) c3(FXYD domain-containing inn transport regulator 3 isoform 3) c4(51561, 51562) c5(51563, 51564, 51565, 51566, 51567, 51568, 51569, 51570, 51571, 51572, 51573, 51574) c6( ) c7(ae, T, aC, aE, r, aT, kp, ci, bz, q, ad); #c1(FXYD3) c2(NP_001129480) c3(FXYD domain-containing inn transport regulator 3 isoform 4 precursor) c4( ) c5(51575, 51576, 51577, 51578, 51579) c6( ) c7(ae, T, aC, aE, r, aT, kp, ci, bz, q, ad); #c1(FXYD3) c2(NP_001129482) c3(FXYD domain-containing inn transport regulator 3 isoform 5 precursor) c4(51580) c5(51581, 51582, 51583, 51584, 51585, 51586) c6( ) c7(ae, T, aC, aE, r, aT, kp, ci, bz, q, ad); #c1(FXYD3) c2(NP_001129483) c3(FXYD domain-containing inn transport regulator 3 isoform 1 precursor) c4( ) c5(51587, 51588, 51589, 51590, 51591, 51592, 51593, 51594) c6( ) c7(ae, T, aC, aE, r, aT, kp, ci, bz, q, ad); #c1(FXYD3) c2(XP_005259053) c3(FXYD domain-containing inn transport regulator 3 isoform X1) c4( ) c5(275936, 275937, 275938, 275939, 275940) c6( ) c7(ae, T, aC, aE, r, aT, kp, ci, bz, q, ad); #c1(FXYD3) c2(XP_011525334) c3(FXYD domain-containing inn transport regulator 3 isoform X2) c4(319801, 319802) c5(319803, 319804) c6( ) c7(ae, T, aC, aE, r, aT, kp, ci, bz, q, ad); #c1(FXYD5) c2(NP_659003) c3(FXYD domain-containing inn transport regulator 5 precursor) c4(239682, 239683, 239684) c5(239685, 239686, 239687, 239688, 239689, 239690, 239691, 239692, 239693, 239694, 239695, 239696, 239697, 239698, 239699, 239700, 239701, 239702, 239703, 239704, 239705, 239706, 239707, 239708) c6( ) c7(T, aC, wu, Or, aA, ci, iJ, byh, aE, byg, aT, K, wm, hH, aW, Y, ff, aq, en, bu, iR, eD, RW, pg, adR, bt, B, ao); #c1(FXYD5) c2(XP_006723309) c3(FXYD domain-containing inn transport regulator 5 isoform X1) c4(295116) c5(295117, 295118, 295119, 295120, 295121, 295122) c6( ) c7(T, aC, wu, Or, aA, ci, iJ, byh, aE, byg, aT, K, wm, hH, aW, Y, ff, aq, en, bu, iR, eD, RW, pg, adR, bt, B, ao); #c1(FXYD5) c2(XP_006723310) c3(FXYD domain-containing inn transport regulator 5 isoform X2) c4( ) c5(295123, 295124, 295125, 295126, 295127, 295128) c6( ) c7(T, aC, wu, Or, aA, ci, iJ, byh, aE, byg, aT, K, wm, hH, aW, Y, ff, aq, en, bu, iR, eD, RW, pg, adR, bt, B, ao); #c1(FXYD6) c2(NP_001158303) c3(FXYD domain-containing inn transport regulator 6 precursor) c4(63572) c5(63573, 63574, 63575, 63576, 63577, 63578, 63579, 63580, 63581, 63582, 63583, 63584, 63585, 63586, 63587, 63588, 63589, 63590, 63591, 63592, 63593, 63594, 63595, 63596, 63597, 63598) c6( ) c7(bt); #c1(FYB) c2(NP_001230022) c3(FYN-binding protein isoform 3) c4(85797, 85798, 85799, 85800) c5(85801, 85802, 85803, 85804, 85805, 85806, 85807, 85808, 85809, 85810, 85811, 85812, 85813, 85814, 85815, 85816, 85817, 85818, 85819, 85820, 85821, 85822, 85823, 85824, 85825, 85826, 85827, 85828, 85829, 85830, 85831) c6( ) c7(anX, cy, fJ, dV, hX); #c1(FYB) c2(NP_955367) c3(FYN-binding protein isoform 2) c4( ) c5(261582, 261583, 261584, 261585, 261586, 261587, 261588, 261589) c6( ) c7(anX, cy, fJ, dV, hX); #c1(FYB) c2(XP_011512313) c3(FYN-binding protein isoform X3) c4(302859) c5(302860, 302861) c6( ) c7(anX, cy, fJ, dV, hX); #c1(FYB) c2(XP_011512314) c3(FYN-binding protein isoform X4) c4(302862, 302863, 302864) c5( ) c6( ) c7(anX, cy, fJ, dV, hX); #c1(FYB) c2(XP_011512315) c3(FYN-binding protein isoform X5) c4( ) c5(302865, 302866, 302867, 302868, 302869, 302870, 302871, 302872, 302873, 302874, 302875, 302876, 302877, 302878) c6( ) c7(anX, cy, fJ, dV, hX); #c1(FYCO1) c2(NP_078789) c3(FYVE and coiled-coil domain-containing protein 1) c4(215455, 215456, 215457, 215458) c5(215459, 215460, 215461, 215462, 215463, 215464, 215465, 215466, 215467, 215468, 215469, 215470, 215471, 215472, 215473, 215474, 215475, 215476) c6( ) c7(hH, byi); #c1(FYCO1) c2(XP_011532414) c3(FYVE and coiled-coil domain-containing protein 1 isoform X2) c4( ) c5(328602, 328603, 328604, 328605) c6( ) c7(hH, byi); #c1(FYN) c2(NP_002028) c3(tyrosine-protein kinase Fyn isoform a) c4(123449) c5(123450, 123451, 123452, 123453, 123454, 123455, 123456, 123457, 123458, 123459) c6( ) c7(bM, T, aAx, aA, GC, Fb, j, C, il, eA, ad, x, zw, ib, aT, h, bK, K, an, ae, af, bA, ak, yo, Pw, d, A, s, aW, ff, eZ, zC, en, g, cm, hq, ky, Gs, U, k, aen); #c1(FYN) c2(XP_005266947) c3(tyrosine-protein kinase Fyn isoform X2) c4(280420, 280421, 280422, 280423, 280424, 280425, 280426) c5(280427, 280428, 280429, 280430, 280431, 280432, 280433, 280434, 280435, 280436, 280437, 280438, 280439, 280440, 280441, 280442, 280443, 280444, 280445, 280446, 280447, 280448, 280449, 280450, 280451, 280452) c6( ) c7(bM, T, aAx, aA, GC, Fb, j, C, il, eA, ad, x, zw, ib, aT, h, bK, K, an, ae, af, bA, ak, yo, Pw, d, A, s, aW, ff, eZ, zC, en, g, cm, hq, ky, Gs, U, k, aen); #c1(FYN) c2(XP_005266949) c3(tyrosine-protein kinase Fyn isoform X1) c4(280453, 280454, 280455, 280456, 280457, 280458) c5(280459, 280460, 280461, 280462, 280463, 280464, 280465, 280466, 280467, 280468, 280469, 280470, 280471, 280472, 280473, 280474, 280475, 280476, 280477, 280478, 280479, 280480, 280481, 280482, 280483, 280484, 280485, 280486, 280487, 280488, 280489, 280490, 280491, 280492, 280493, 280494, 280495, 280496, 280497, 280498, 280499, 280500, 280501, 280502, 280503, 280504, 280505, 280506, 280507, 280508, 280509, 280510, 280511, 280512, 280513, 280514, 280515, 280516, 280517, 280518, 280519, 280520, 280521, 280522, 280523, 280524, 280525, 280526, 280527, 280528, 280529, 280530, 280531, 280532, 280533, 280534, 280535, 280536, 280537, 280538, 280539, 280540, 280541, 280542, 280543, 280544, 280545, 280546) c6( ) c7(bM, T, aAx, aA, GC, Fb, j, C, il, eA, ad, x, zw, ib, aT, h, bK, K, an, ae, af, bA, ak, yo, Pw, d, A, s, aW, ff, eZ, zC, en, g, cm, hq, ky, Gs, U, k, aen); #c1(FYN) c2(XP_011533970) c3(tyrosine-protein kinase Fyn isoform X3) c4(330173, 330174, 330175, 330176) c5( ) c6( ) c7(bM, T, aAx, aA, GC, Fb, j, C, il, eA, ad, x, zw, ib, aT, h, bK, K, an, ae, af, bA, ak, yo, Pw, d, A, s, aW, ff, eZ, zC, en, g, cm, hq, ky, Gs, U, k, aen); #c1(FZD1) c2(NP_003496) c3(frizzled-1) c4(138769) c5(138770, 138771, 138772, 138773, 138774, 138775, 138776, 138777) c6( ) c7(T, ht, bB, Hn, bS, ct, aT, hu, jf, byj, aW, eH, eF, cm, Z, t, HI, qJ, LB, alC, kP, nB, bE, iS, byk); #c1(FZD10) c2(NP_009128) c3(frizzled-10 precursor) c4(170952) c5(170953, 170954, 170955, 170956, 170957, 170958, 170959, 170960, 170961, 170962) c6( ) c7(T, bE, if, bhU, r, bB, qN, he, iJ); #c1(FZD2) c2(NP_001457) c3(frizzled-2 precursor) c4(117963, 117964) c5(117965, 117966, 117967, 117968, 117969, 117970, 117971, 117972, 117973, 117974, 117975, 117976) c6( ) c7(LB, bF, T, jf, vA, ht, aw, aT, bK, ci, hu, er, X, op); #c1(FZD3) c2(NP_665873) c3(frizzled-3 precursor) c4(241885, 241886) c5(241887, 241888, 241889, 241890, 241891, 241892, 241893, 241894, 241895, 241896) c6( ) c7(bF, ul, alC, BN, s, cA, dO, cj, gl, hy, Z, ne); #c1(FZD3) c2(XP_011542950) c3(frizzled-3 isoform X3) c4( ) c5(341657, 341658, 341659, 341660, 341661, 341662) c6( ) c7(bF, ul, alC, BN, s, cA, dO, cj, gl, hy, Z, ne); #c1(FZD4) c2(NP_036325) c3(frizzled-4 precursor) c4(173025) c5(173026, 173027, 173028, 173029, 173030, 173031, 173032) c6( ) c7(bL, bM, T, n, hy, Ja, v, zU, eA, ad, Na, aE, pX, BJ, h, dL, he, Fg, ae, eL, d, BN, byj, IR, nO, Y, ff, Az, vt, byl, en, vk, W, nb, ajw, Hs, dX, oQ, ht, cE, ne); #c1(FZD5) c2(NP_003459) c3(frizzled-5 precursor) c4(138477) c5(138478, 138479, 138480, 138481, 138482, 138483) c6( ) c7(T, ht, aA, bB, Hn, bS, ct, ci, hu, H, byj, eH, cr, aF, eF, Z, HI, cm, es, alC, kP, bE, Be, iS, Bd, byk, L); #c1(FZD6) c2(NP_001158088) c3(frizzled-6 isoform b) c4(63101, 63102) c5(63103, 63104, 63105, 63106, 63107, 63108, 63109, 63110, 63111, 63112, 63113) c6( ) c7(nM, s, bym, byn, cj, hR, bS, ct, IQ, Z, cm, byk); #c1(FZD6) c2(NP_003497) c3(frizzled-6 isoform a precursor) c4(138778) c5(138779, 138780, 138781, 138782, 138783, 138784, 138785, 138786, 138787, 138788, 138789) c6( ) c7(nM, s, bym, byn, cj, hR, bS, ct, IQ, Z, cm, byk); #c1(FZD7) c2(NP_003498) c3(frizzled-7 precursor) c4(138790) c5(138791, 138792, 138793, 138794, 138795, 138796) c6( ) c7(bF, T, B, kP, bE, X, ht, r, aA, bB, at, dL, aF, ci, jE, hu, q, er, hX); #c1(FZD8) c2(NP_114072) c3(frizzled-8 precursor) c4(222128) c5(222129, 222130, 222131, 222132, 222133, 222134) c6( ) c7(eL, dL, kP); #c1(FZD9) c2(NP_003499) c3(frizzled-9 precursor) c4(138797) c5(138798, 138799, 138800, 138801, 138802, 138803, 138804) c6( ) c7(bF, av, ul, alC, s, Pt, eM, atB, dO, r, cj, aA, bw, aF, he, bt, q, bN); #c1(FZR1) c2(NP_001129669) c3(fizzy-related protein homolog isoform 3) c4(52169) c5(52170, 52171, 52172, 52173, 52174, 52175) c6( ) c7(bM, T, pf, if, fd, bB, ci, ajv, gs, eL, alo, YL, yo, aW, az, ir, g, as, eF, eM, m, alm, in, Uc, QO, sw, n, fr, qN, pM, BI, jz, dL, hB, kp, mo, fs, hL, it, B, fM, aA, pd, q, er, eA, XX, hW, aT, ae, jf, avg, s, iU, Y, r, en, avb, cl, t, iK, nM, hS, Mb, id, aD, iW, ad, iC, av, hd, py, fb, BO, Ub, qt, ff, eH, aF, iV, bz, bF, es, apM, bE, ra, iu); #c1(FZR1) c2(NP_001129670) c3(fizzy-related protein homolog isoform 1) c4(52176) c5(52177, 52178, 52179, 52180, 52181, 52182) c6( ) c7(bM, T, pf, if, fd, bB, ci, ajv, gs, eL, alo, YL, yo, aW, az, ir, g, as, eF, eM, m, alm, in, Uc, QO, sw, n, fr, qN, pM, BI, jz, dL, hB, kp, mo, fs, hL, it, B, fM, aA, pd, q, er, eA, XX, hW, aT, ae, jf, avg, s, iU, Y, r, en, avb, cl, t, iK, nM, hS, Mb, id, aD, iW, ad, iC, av, hd, py, fb, BO, Ub, qt, ff, eH, aF, iV, bz, bF, es, apM, bE, ra, iu); #c1(FZR1) c2(NP_057347) c3(fizzy-related protein homolog isoform 2) c4(190246) c5(190247, 190248, 190249, 190250, 190251, 190252) c6( ) c7(bM, T, pf, if, fd, bB, ci, ajv, gs, eL, alo, YL, yo, aW, az, ir, g, as, eF, eM, m, alm, in, Uc, QO, sw, n, fr, qN, pM, BI, jz, dL, hB, kp, mo, fs, hL, it, B, fM, aA, pd, q, er, eA, XX, hW, aT, ae, jf, avg, s, iU, Y, r, en, avb, cl, t, iK, nM, hS, Mb, id, aD, iW, ad, iC, av, hd, py, fb, BO, Ub, qt, ff, eH, aF, iV, bz, bF, es, apM, bE, ra, iu); #c1(G0S2) c2(NP_056529) c3(G0/G1 switch protein 2) c4(187957) c5(187958, 187959, 187960, 187961, 187962, 187963) c6( ) c7(bL, ae, T, y, zQ, dq, v, ci, jj, zP, bz, ad); #c1(G2E3) c2(NP_060239) c3(G2/M phase-specific E3 ubiquitin-protein ligase) c4(194911, 194912) c5(194913, 194914, 194915, 194916, 194917, 194918, 194919, 194920, 194921, 194922, 194923, 194924) c6( ) c7(bM); #c1(G2E3) c2(XP_011535228) c3(G2/M phase-specific E3 ubiquitin-protein ligase isoform X2) c4(332045, 332046, 332047, 332048) c5( ) c6( ) c7(bM); #c1(G2E3) c2(XP_011535230) c3(G2/M phase-specific E3 ubiquitin-protein ligase isoform X5) c4( ) c5(332049, 332050, 332051, 332052, 332053, 332054, 332055, 332056, 332057, 332058, 332059, 332060, 332061, 332062, 332063, 332064, 332065, 332066, 332067, 332068, 332069, 332070, 332071, 332072) c6( ) c7(bM); #c1(G3BP1) c2(XP_006714813) c3(ras GTPase-activating protein-binding protein 1 isoform X1) c4(288177, 288178, 288179, 288180, 288181, 288182, 288183) c5(288184, 288185, 288186, 288187, 288188, 288189, 288190, 288191, 288192, 288193, 288194, 288195, 288196, 288197, 288198, 288199, 288200, 288201, 288202, 288203, 288204, 288205, 288206, 288207, 288208, 288209, 288210, 288211, 288212, 288213, 288214, 288215, 288216, 288217, 288218, 288219, 288220, 288221, 288222, 288223, 288224, 288225, 288226, 288227, 288228, 288229, 288230, 288231, 288232, 288233) c6( ) c7(Dw, T, aE, aW, IH, jx, ff, aT, By, ey, K, en, y, bz); #c1(G6PC) c2(NP_000142) c3(glucose-6-phosphatase isoform 1) c4(2952) c5(2953, 2954, 2955, 2956, 2957, 2958, 2959, 2960, 2961, 2962, 2963, 2964, 2965, 2966, 2967, 2968, 2969, 2970, 2971, 2972, 2973, 2974, 2975, 2976, 2977, 2978, 2979, 2980, 2981, 2982, 2983, 2984, 2985, 2986, 2987, 2988, 2989, 2990, 2991, 2992, 2993, 2994, 2995, 2996, 2997, 2998, 2999, 3000, 3001, 3002, 3003, 3004, 3005, 3006, 3007, 3008, 3009, 3010, 3011, 3012, 3013, 3014, 3015, 3016, 3017, 3018, 3019, 3020, 3021, 3022, 3023, 3024, 3025, 3026, 3027, 3028, 3029, 3030, 3031, 3032, 3033, 3034, 3035, 3036, 3037, 3038, 3039, 3040, 3041, 3042, 3043, 3044, 3045, 3046, 3047, 3048, 3049, 3050, 3051, 3052, 3053, 3054, 3055, 3056, 3057, 3058, 3059, 3060, 3061, 3062, 3063, 3064, 3065, 3066, 3067, 3068, 3069, 3070, 3071, 3072, 3073, 3074, 3075, 3076, 3077, 3078, 3079, 3080, 3081, 3082, 3083, 3084, 3085, 3086, 3087, 3088, 3089, 3090, 3091, 3092, 3093, 3094, 3095) c6( ) c7(bL, gV, T, ZF, afK, dG, aj, ci, fr, vY, aY, eA, J, byp, nH, Yn, mj, byq, ju, io, jy, dz, bq, hB, ex, aK, kl, d, A, s, hG, Bw, fc, dq, aq, EZ, dr, byo, SE, dB, acY, bo, mf, dy, cP, B); #c1(G6PC2) c2(NP_001075155) c3(glucose-6-phosphatase 2 isoform 2) c4(37260) c5(37261, 37262, 37263, 37264, 37265, 37266) c6( ) c7(bL, dD, A, yG, Bw, mg, GP, jy, aj, mf, dG, v, ei, eq, J); #c1(G6PC2) c2(NP_066999) c3(glucose-6-phosphatase 2 isoform 1) c4(208210) c5(208211, 208212, 208213, 208214, 208215, 208216) c6( ) c7(bL, dD, A, yG, Bw, mg, GP, jy, aj, mf, dG, v, ei, eq, J); #c1(G6PC3) c2(NP_612396) c3(glucose-6-phosphatase 3) c4(236370) c5(236371, 236372, 236373, 236374, 236375, 236376) c6( ) c7(gV, byt, Gc, hG, XE, ex, CM, bys, uO, fe, byr, afK, aoF, K, C, AE, bD, bw, bt, br); #c1(G6PD) c2(NP_000393) c3(glucose-6-phosphate 1-dehydrogenase isoform a) c4(8449) c5(8450, 8451, 8452, 8453, 8454, 8455, 8456, 8457, 8458) c6( ) c7(T, qo, Fj, fR, e, fd, x, dV, K, hu, ex, qD, byv, aW, hC, uY, Ku, hJ, byH, bw, eY, xK, aDs, cj, iS, k, pw, Cl, hh, eg, byy, gp, aWG, ht, aFc, mN, xJ, aj, nA, cd, br, aCi, b, cc, byF, KN, h, IG, byw, A, aq, pm, aFj, byl, byz, yN, byG, E, ER, B, bL, agx, rf, v, j, qf, C, byu, J, oT, boY, MR, aCX, nX, byE, aT, dz, bK, bq, yj, avV, iU, oV, Y, byA, Io, qs, zz, hY, ck, byB, BU, byx, ac, VJ, hO, mf, oX, bt, byD, Ke, qb, iW, KW, KO, bmJ, agz, hX, I, qh, oj, oW, iY, hP, NM, aHp, byC, JU, Fm, xs, nf, dq, S, BG, avG, aot, Pd, iR, dr, eK, adA, mO, adc, Ew, qe, pc, eB, Km, bC, ei, i, IC, X); #c1(G6PD) c2(NP_001035810) c3(glucose-6-phosphate 1-dehydrogenase isoform b) c4(33142, 33143, 33144) c5(33145, 33146, 33147, 33148, 33149, 33150, 33151, 33152, 33153, 33154, 33155, 33156, 33157) c6( ) c7(T, qo, Fj, fR, e, fd, x, dV, K, hu, ex, qD, byv, aW, hC, uY, Ku, hJ, byH, bw, eY, xK, aDs, cj, iS, k, pw, Cl, hh, eg, byy, gp, aWG, ht, aFc, mN, xJ, aj, nA, cd, br, aCi, b, cc, byF, KN, h, IG, byw, A, aq, pm, aFj, byl, byz, yN, byG, E, ER, B, bL, agx, rf, v, j, qf, C, byu, J, oT, boY, MR, aCX, nX, byE, aT, dz, bK, bq, yj, avV, iU, oV, Y, byA, Io, qs, zz, hY, ck, byB, BU, byx, ac, VJ, hO, mf, oX, bt, byD, Ke, qb, iW, KW, KO, bmJ, agz, hX, I, qh, oj, oW, iY, hP, NM, aHp, byC, JU, Fm, xs, nf, dq, S, BG, avG, aot, Pd, iR, dr, eK, adA, mO, adc, Ew, qe, pc, eB, Km, bC, ei, i, IC, X); #c1(G6PD) c2(XP_011529434) c3(glucose-6-phosphate 1-dehydrogenase isoform X3) c4( ) c5(324869, 324870, 324871, 324872, 324873, 324874) c6( ) c7(T, qo, Fj, fR, e, fd, x, dV, K, hu, ex, qD, byv, aW, hC, uY, Ku, hJ, byH, bw, eY, xK, aDs, cj, iS, k, pw, Cl, hh, eg, byy, gp, aWG, ht, aFc, mN, xJ, aj, nA, cd, br, aCi, b, cc, byF, KN, h, IG, byw, A, aq, pm, aFj, byl, byz, yN, byG, E, ER, B, bL, agx, rf, v, j, qf, C, byu, J, oT, boY, MR, aCX, nX, byE, aT, dz, bK, bq, yj, avV, iU, oV, Y, byA, Io, qs, zz, hY, ck, byB, BU, byx, ac, VJ, hO, mf, oX, bt, byD, Ke, qb, iW, KW, KO, bmJ, agz, hX, I, qh, oj, oW, iY, hP, NM, aHp, byC, JU, Fm, xs, nf, dq, S, BG, avG, aot, Pd, iR, dr, eK, adA, mO, adc, Ew, qe, pc, eB, Km, bC, ei, i, IC, X); #c1(GAA) c2(XP_005257251) c3(lysosomal alpha-glucosidase isoform X1) c4(274813) c5(274814, 274815, 274816, 274817, 274818, 274819, 274820, 274821, 274822, 274823, 274824, 274825, 274826, 274827, 274828, 274829, 274830, 274831, 274832, 274833, 274834, 274835, 274836, 274837, 274838, 274839, 274840, 274841, 274842, 274843, 274844, 274845, 274846, 274847, 274848, 274849, 274850, 274851, 274852, 274853, 274854, 274855, 274856, 274857, 274858, 274859, 274860, 274861, 274862, 274863, 274864, 274865, 274866, 274867, 274868, 274869, 274870, 274871, 274872, 274873, 274874, 274875, 274876, 274877, 274878, 274879, 274880, 274881, 274882, 274883, 274884, 274885, 274886, 274887, 274888, 274889, 274890, 274891, 274892, 274893, 274894, 274895, 274896, 274897, 274898, 274899, 274900, 274901, 274902, 274903, 274904, 274905, 274906, 274907, 274908, 274909, 274910, 274911, 274912, 274913, 274914, 274915, 274916, 274917, 274918, 274919, 274920, 274921, 274922, 274923, 274924, 274925, 274926, 274927, 274928, 274929, 274930, 274931, 274932, 274933, 274934, 274935, 274936, 274937, 274938, 274939, 274940, 274941, 274942, 274943, 274944, 274945, 274946, 274947, 274948, 274949, 274950, 274951, 274952, 274953, 274954, 274955, 274956, 274957, 274958, 274959, 274960, 274961, 274962, 274963, 274964, 274965, 274966, 274967, 274968, 274969, 274970, 274971, 274972, 274973, 274974, 274975, 274976, 274977, 274978, 274979, 274980, 274981, 274982, 274983, 274984, 274985, 274986, 274987, 274988, 274989, 274990, 274991, 274992, 274993, 274994, 274995, 274996, 274997, 274998, 274999, 275000, 275001) c6(275002, 275003, 275004, 275005, 275006, 275007) c7(bL, gU, ads, Pt, dK, aA, bjW, aj, ci, vY, J, cc, Db, oj, aT, vH, nm, vc, bj, K, adV, agW, af, aa, byJ, bf, aW, Y, oV, Bw, azP, cr, UJ, ax, EH, aF, Ku, dR, wT, BU, W, nb, kB, mx, U, gZ, pg, wR, Lq, mf, bk, be, byK, sT, y, Ro); #c1(GAB1) c2(NP_002030) c3(GRB2-associated-binding protein 1 isoform b) c4(123460, 123461) c5(123462, 123463, 123464, 123465, 123466, 123467, 123468, 123469, 123470, 123471, 123472, 123473) c6( ) c7(T, aZ, fd, yO, ci, iJ, ad, biS, cF, aT, ae, kl, d, aW, Y, kt, iK, bz, kT, fT, cj, B); #c1(GAB1) c2(NP_997006) c3(GRB2-associated-binding protein 1 isoform a) c4(264949) c5(264950, 264951, 264952, 264953, 264954, 264955) c6( ) c7(T, aZ, fd, yO, ci, iJ, ad, biS, cF, aT, ae, kl, d, aW, Y, kt, iK, bz, kT, fT, cj, B); #c1(GAB2) c2(NP_036428) c3(GRB2-associated-binding protein 2 isoform b) c4(173795, 173796, 173797) c5(173798, 173799, 173800, 173801, 173802, 173803, 173804, 173805, 173806, 173807) c6( ) c7(T, dA, zs, fd, v, ci, eA, yt, aT, h, K, af, iU, aW, Y, gK, t, bw, bz, cT, ig, Om, at, m, y, bt, L); #c1(GAB2) c2(NP_536739) c3(GRB2-associated-binding protein 2 isoform a) c4(231317) c5(231318, 231319, 231320, 231321, 231322, 231323, 231324, 231325, 231326, 231327, 231328, 231329, 231330, 231331) c6( ) c7(T, dA, zs, fd, v, ci, eA, yt, aT, h, K, af, iU, aW, Y, gK, t, bw, bz, cT, ig, Om, at, m, y, bt, L); #c1(GAB3) c2(NP_001075042) c3(GRB2-associated-binding protein 3 isoform 1) c4( ) c5(37232, 37233, 37234, 37235, 37236) c6( ) c7(A, fR); #c1(GAB3) c2(NP_542179) c3(GRB2-associated-binding protein 3 isoform 2) c4(232241) c5(232242, 232243, 232244, 232245, 232246, 232247) c6( ) c7(A, fR); #c1(GAB3) c2(XP_011529405) c3(GRB2-associated-binding protein 3 isoform X2) c4(324785) c5(324786) c6( ) c7(A, fR); #c1(GABARAP) c2(NP_009209) c3(gamma-aminobutyric acid receptor-associated protein) c4(171525) c5(171526, 171527, 171528, 171529, 171530, 171531) c6( ) c7(ib, XY, ha, in, aT); #c1(GABARAPL1) c2(NP_113600) c3(gamma-aminobutyric acid receptor-associated protein-like 1) c4(221633, 221634) c5(221635, 221636, 221637, 221638, 221639, 221640, 221641, 221642, 221643, 221644, 221645, 221646, 221647, 221648, 221649, 221650, 221651, 221652, 221653, 221654, 221655, 221656) c6( ) c7(T, aE, aW, U, aT, n, im, t); #c1(GABARAPL1) c2(XP_005253401) c3(gamma-aminobutyric acid receptor-associated protein-like 1 isoform X1) c4(272466, 272467) c5(272468, 272469, 272470, 272471, 272472, 272473, 272474, 272475, 272476, 272477) c6( ) c7(T, aE, aW, U, aT, n, im, t); #c1(GABARAPL2) c2(NP_009216) c3(gamma-aminobutyric acid receptor-associated protein-like 2) c4(171555) c5(171556, 171557, 171558, 171559, 171560, 171561, 171562, 171563) c6( ) c7(aE); #c1(GABBR1) c2(NP_001461) c3(gamma-aminobutyric acid type B receptor subunit 1 isoform a precursor) c4(117977, 117978, 117979) c5( ) c6( ) c7(T, aC, ha, bO, cz, iD, ci, il, V, cF, ft, Gt, aE, wM, aql, bq, rE, he, af, Gv, eZ, cu, bN, Cq, aap, GD, HN, yA, gD, qc); #c1(GABBR1) c2(NP_068703) c3(gamma-aminobutyric acid type B receptor subunit 1 isoform b precursor) c4(209967) c5(209968, 209969, 209970, 209971, 209972, 209973, 209974, 209975, 209976, 209977, 209978, 209979, 209980, 209981, 209982, 209983, 209984, 209985, 209986, 209987, 209988, 209989, 209990, 209991, 209992, 209993, 209994, 209995, 209996, 209997, 209998, 209999, 210000, 210001, 210002, 210003, 210004, 210005, 210006, 210007, 210008, 210009, 210010, 210011, 210012, 210013, 210014, 210015, 210016, 210017, 210018, 210019, 210020, 210021, 210022, 210023, 210024, 210025, 210026, 210027, 210028, 210029, 210030, 210031, 210032, 210033, 210034, 210035, 210036, 210037, 210038, 210039, 210040, 210041, 210042, 210043, 210044, 210045, 210046, 210047, 210048) c6(210049, 210050, 210051, 210052, 210053, 210054, 210055, 210056, 210057, 210058, 210059, 210060, 210061, 210062, 210063, 210064, 210065, 210066, 210067, 210068, 210069, 210070, 210071, 210072) c7(T, aC, ha, bO, cz, iD, ci, il, V, cF, ft, Gt, aE, wM, aql, bq, rE, he, af, Gv, eZ, cu, bN, Cq, aap, GD, HN, yA, gD, qc); #c1(GABBR1) c2(NP_068704) c3(gamma-aminobutyric acid type B receptor subunit 1 isoform c precursor) c4(210073, 210074) c5( ) c6( ) c7(T, aC, ha, bO, cz, iD, ci, il, V, cF, ft, Gt, aE, wM, aql, bq, rE, he, af, Gv, eZ, cu, bN, Cq, aap, GD, HN, yA, gD, qc); #c1(GABBR1) c2(XP_005249039) c3(gamma-aminobutyric acid type B receptor subunit 1 isoform X1) c4( ) c5(268881, 268882, 268883, 268884, 268885, 268886, 268887, 268888, 268889, 268890, 268891, 268892, 268893, 268894, 268895, 268896, 268897, 268898, 268899, 268900, 268901, 268902, 268903, 268904, 268905, 268906, 268907, 268908, 268909, 268910, 268911, 268912, 268913, 268914, 268915, 268916, 268917, 268918, 268919, 268920, 268921, 268922) c6(268923, 268924, 268925, 268926, 268927, 268928, 268929, 268930, 268931, 268932, 268933, 268934, 268935, 268936) c7(T, aC, ha, bO, cz, iD, ci, il, V, cF, ft, Gt, aE, wM, aql, bq, rE, he, af, Gv, eZ, cu, bN, Cq, aap, GD, HN, yA, gD, qc); #c1(GABBR1) c2(XP_005275145) c3(gamma-aminobutyric acid type B receptor subunit 1 isoform X1) c4(285544, 285545) c5(285546, 285547, 285548, 285549, 285550, 285551) c6( ) c7(T, aC, ha, bO, cz, iD, ci, il, V, cF, ft, Gt, aE, wM, aql, bq, rE, he, af, Gv, eZ, cu, bN, Cq, aap, GD, HN, yA, gD, qc); #c1(GABBR1) c2(XP_006715110) c3(gamma-aminobutyric acid type B receptor subunit 1 isoform X2) c4( ) c5(288650, 288651, 288652, 288653, 288654, 288655, 288656, 288657, 288658, 288659, 288660, 288661, 288662, 288663, 288664, 288665, 288666, 288667, 288668, 288669, 288670, 288671, 288672, 288673, 288674, 288675, 288676, 288677, 288678, 288679, 288680, 288681, 288682, 288683, 288684, 288685, 288686, 288687, 288688, 288689, 288690) c6(288691, 288692, 288693, 288694, 288695, 288696, 288697, 288698, 288699, 288700, 288701, 288702, 288703, 288704) c7(T, aC, ha, bO, cz, iD, ci, il, V, cF, ft, Gt, aE, wM, aql, bq, rE, he, af, Gv, eZ, cu, bN, Cq, aap, GD, HN, yA, gD, gc); #c1(GABBR1) c2(XP_006725870) c3(gamma-aminobutyric acid type B receptor subunit 1 isoform X2) c4( ) c5(297014, 297015, 297016, 297017, 297018, 297019) c6( ) c7(T, aC, ha, bO, cz, iD, ci, il, V, cF, ft, Gt, aE, wM, aql, bq, rE, he, af, Gv, eZ, cu, bN, Cq, aap, GD, HN, yA, gD, qc); #c1(GABBR1) c2(XP_011512758) c3(gamma-aminobutyric acid type B receptor subunit 1 isoform X6) c4( ) c5(303789, 303790, 303791, 303792, 303793, 303794, 303795, 303796, 303797, 303798, 303799, 303800, 303801, 303802, 303803, 303804, 303805, 303806, 303807, 303808, 303809, 303810, 303811, 303812, 303813, 303814, 303815, 303816, 303817, 303818, 303819, 303820, 303821, 303822, 303823, 303824, 303825, 303826, 303827, 303828, 303829, 303830, 303831) c6(303832, 303833, 303834, 303835, 303836, 303837, 303838, 303839, 303840, 303841, 303842, 303843, 303844, 303845) c7(T, aC, ha, bO, cz, iD, ci, il, V, cF, ft, Gt, aE, wM, aql, bq, rE, he, af, Gv, eZ, cu, bN, Cq, aap, GD, HN, yA, gD, qc); #c1(GABBR1) c2(XP_011546151) c3(gamma-aminobutyric acid type B receptor subunit 1 isoform X6) c4( ) c5 (344860, 344861, 344862, 344863, 344864, 344865) c6( ) c7(T, aC, ha, bO, cz, iD, ci, il, V, cF, ft, Gt, aE, wM, aql, bq, rE, he, af, Gv, eZ, cu, bN, Cq, aap, GD, HN, yA, gD, qc); #c1(GABBR2) c2(NP_005449) c3(gamma-aminobutyric acid type B receptor subunit 2 precursor) c4(156284) c5(156285, 156286, 156287, 156288, 156289, 156290) c6( ) c7(Na, bM, xU, aqh, vj, XY, bO, Nc, bK, an, il, bN); #c1(GABPA) c2(NP_002031) c3(GA-binding protein alpha chain) c4(123474) c5(123475, 123476, 123477, 123478, 123479, 123480, 123481, 123482, 123483, 123484, 123485) c6( ) c7(oO, bM, T, aC, ea, if, e, al, bB, qj, aY, fw, aR, bv, aE, dV, K, aDZ, eL, bc, aa, LC, aW, fc, hl, nY, Qq, g, cm, eM, nB, U, cj, NI, vy, tG, Hb, m, bi, iu, dD, JY, aWG, n, aj, asF, qN, PJ, rP, Hx, ft, cc, bud, cU, h, dL, hB, db, aq, Ye, W, Fi, hL, at, fL, cB, B, bL, eR, yk, hx, fF, cR, v, j, C, V, q, J, er, eA, Wu, aT, cy, jj, ae, af, Lu, s, oV, Y, r, Io, en, cl, t, ck, sk, rR, nM, c, kB, dh, dy, fD, bt, ao, qb, ha, eq, ad, hX, fU, av, hd, ib, byL, oz, oW, io, ji, IQ, d, ff, aF, byM, iR, KM, bz, eK, xZ, bE, aS, cP, tP, kS, X, pC); #c1(GABPB1) c2(NP_002032) c3(GA-binding protein subunit beta-1 isoform gamma 1) c4(123486) c5(123487, 123488, 123489, 123490, 123491, 123492) c6( ) c7(Fi, fq, ey, eu, JY); #c1(GABPB1) c2(NP_057738) c3(GA-binding protein subunit beta-1 isoform beta 2) c4(192593) c5(192594, 192595, 192596, 192597, 192598, 192599) c6( ) c7(Fi, fq, ey, eu, JY); #c1(GABPB1) c2(NP_852092) c3(GA-binding protein subunit beta-1 isoform gamma 2) c4(254827) c5(254828, 254829, 254830, 254831, 254832, 254833, 254834, 254835, 254836, 254837, 254838) c6( ) c7(Fi, fq, ey, eu, JY); #c1(GABPB1) c2(XP_005254331) c3(GA-binding protein subunit beta-1 isoform X1) c4(273150, 273151) c5(273152, 273153, 273154, 273155, 273156, 273157, 273158) c6( ) c7(Fi, fq, ey, eu, JY); #c1(GABPB1) c2(XP_011519729) c3(GA-binding protein subunit beta-1 isoform X4) c4( ) c5(314385, 314386, 314387, 314388, 314389, 314390, 314391, 314392, 314393, 314394) c6( ) c7(Fi, fq, ey, eu, JY); #c1(GABRA1) c2(NP_001121120) c3(gamma-aminobutyric acid receptor subunit alpha-1 precursor) c4(45213, 45214) c5(45215, 45216, 45217, 45218, 45219, 45220, 45221, 45222, 45223, 45224, 45225, 45226, 45227, 45228, 45229, 45230, 45231, 45232, 45233, 45234, 45235, 45236, 45237, 45238, 45239, 45240, 45241, 45242, 45243, 45244, 45245, 45246, 45247, 45248) c6( ) c7(ha, bB, iD, PJ, q, kL, aqt, Gt, byN, aqk, aU, bK, byO, d, r, gl, aPf, akq, bN, alT, Cq, ok, cA, bE, Gs, HN, byP, byQ); #c1(GABRA2) c2(NP_000798) c3(gamma-aminobutyric acid receptor subunit alpha-2 isoform a precursor) c4(16151, 16152) c5(16153, 16154, 16155, 16156, 16157, 16158, 16159, 16160, 16161, 16162, 16163, 16164, 16165, 16166, 16167, 16168, 16169, 16170, 16171, 16172, 16173, 16174, 16175, 16176, 16177, 16178, 16179, 16180, 16181, 16182, 16183, 16184, 16185, 16186, 16187, 16188) c6( ) c7(byR, hU, ha, Gd, pK, VV, Si, DK, byS, XY, bK, K, Jc, gC, da, cu, jb, bN, hq, Oh, FT, HP, Gs, Gp, jd, bhP); #c1(GABRA2) c2(NP_001273756) c3(gamma-aminobutyric acid receptor subunit alpha-2 isoform b) c4(105774) c5(105775, 105776, 105777, 105778, 105779, 105780) c6( ) c7(byR, hU, ha, Gd, pK, VV, Si, DK, byS, XY, bK, K, Jc, gC, da, cu, jb, bN, hq, Oh, FT, HP, Gs, Gp, jd, bhP); #c1(GABRA2) c2(XP_011511978) c3(gamma-aminobutyric acid receptor subunit alpha-2 isoform X1) c4(302629, 302630, 302631) c5(302632, 302633, 302634, 302635, 302636, 302637) c6( ) c7(byR, hU, ha, Gd, pK, VV, Si, DK, byS, XY, bK, K, Jc, gC, da, cu, jb, bN, hq, Oh, FT, HP, Gs, Gp, jd, bhP); #c1(GABRA3) c2(NP_000799) c3(gamma-aminobutyric acid receptor subunit alpha-3 precursor) c4(16189) c5(16190, 16191, 16192, 16193, 16194, 16195, 16196, 16197, 16198, 16199, 16200, 16201, 16202, 16203) c6( ) c7(IJ, cA, xz, ha, hr, byT, bO, da, bS, bK, uu, V, bN, cv); #c1(GABRA3) c2(XP_005274716) c3(gamma-aminobutyric acid receptor subunit alpha-3 isoform X1) c4(285337) c5( ) c6( ) c7(IJ, cA, xz, ha, hr, byT, bO, da, bS, bK, uu, V, bN, cv); #c1(GABRA3) c2(XP_011529436) c3(gamma-aminobutyric acid receptor subunit alpha-3 isoform X4) c4( ) c5(324875, 324876, 324877, 324878, 324879, 324880, 324881) c6( ) c7(IJ, cA, xz, ha, hr, byT, bO, da, bS, bK, uu, V, bN, cv); #c1(GABRA4) c2(NP_000800) c3(gamma-aminobutyric acid receptor subunit alpha-4 isoform 1 precursor) c4(16204) c5(16205, 16206, 16207, 16208, 16209, 16210) c6( ) c7(yL, ha, XY, bK, cB, bN, cv); #c1(GABRA5) c2(XP_005268315) c3(gamma-aminobutyric acid receptor subunit alpha-5 isoform X1) c4(281697, 281698, 281699, 281700, 281701) c5(281702, 281703, 281704, 281705, 281706, 281707, 281708, 281709, 281710, 281711, 281712, 281713, 281714, 281715, 281716, 281717, 281718, 281719, 281720, 281721, 281722, 281723, 281724, 281725, 281726, 281727, 281728, 281729, 281730, 281731, 281732, 281733, 281734, 281735, 281736, 281737, 281738) c6( ) c7(Na, mU, rc, jf, ot, mW, mZ, ha, bO, HN, agl, mS, mY, bK, ur, mV, mT, bN, mX); #c1(GABRA6) c2(NP_000802) c3(gamma-aminobutyric acid receptor subunit alpha-6 precursor) c4(16211, 16212) c5(16213, 16214, 16215, 16216, 16217, 16218, 16219, 16220, 16221, 16222, 16223, 16224) c6( ) c7(vf, oe, ha, bS, v, ct, kL, tg, aqk, vg, bK, K, bds, da, aiL, Z, jb, bN, hq, pH, Gs, sv, pK); #c1(GABRB1) c2(NP_000803) c3(gamma-aminobutyric acid receptor subunit beta-1 precursor) c4(16225, 16226) c5(16227, 16228, 16229, 16230, 16231, 16232) c6( ) c7(DK, HP, ha, Gs, aPf, aga, ww, bK, il, mY, bN); #c1(GABRB1) c2(XP_011511980) c3(gamma-aminobutyric acid receptor subunit beta-1 isoform X1) c4( ) c5(302638, 302639, 302640, 302641, 302642, 302643) c6( ) c7(DK, HP, ha, Gs, aPf, aga, ww, bK, il, mY, bN); #c1(GABRB2) c2(NP_000804) c3(gamma-aminobutyric acid receptor subunit beta-2 isoform 2 precursor) c4(16233, 16234, 16235) c5(16236, 16237, 16238, 16239, 16240, 16241, 16242, 16243, 16244, 16245, 16246, 16247, 16248, 16249, 16250, 16251, 16252, 16253, 16254, 16255, 16256, 16257) c6( ) c7(bhB, cA, ha, Gs, aqk, gl, ti, uJ, bK, kL, il, cd, agZ, bN, cv); #c1(GABRB2) c2(NP_068711) c3(gamma-aminobutyric acid receptor subunit beta-2 isoform 1 precursor) c4(210094) c5(210095, 210096, 210097, 210098, 210099, 210100, 210101, 210102, 210103, 210104) c6( ) c7(bhB, cA, ha, Gs, aqk, gl, ti, uJ, bK, kL, il, cd, agZ, bN, cv); #c1(GABRB3) c2(NP_000805) c3(gamma-aminobutyric acid receptor subunit beta-3 isoform 1 precursor) c4(16258) c5(16259, 16260, 16261, 16262, 16263, 16264) c6( ) c7(aC, ha, iD, bS, ct, il, rc, Na, amJ, Wk, aU, Nc, Im, bK, hg, rz, Cr, na, VX, Az, Z, byU, bN, hq, Qi, Cq, apM, agl, HN, Ei, Km, B); #c1(GABRB3) c2(NP_001178249) c3(gamma-aminobutyric acid receptor subunit beta-3 isoform 3) c4(73280) c5(73281, 73282, 73283, 73284, 73285, 73286, 73287, 73288, 73289, 73290) c6( ) c7(aC, ha, iD, bS, ct, il, rc, Na, amJ, Wk, aU, Nc, Im, bK, hg, rz, Cr, na, VX, Az, Z, byU, bN, hq, Qi, Cq, apM, agl, HN, Ei, Km, B); #c1(GABRB3) c2(NP_001178250) c3(gamma-aminobutyric acid receptor subunit beta-3 isoform 4) c4(73291, 73292) c5(73293, 73294, 73295, 73296, 73297, 73298, 73299, 73300) c6( ) c7(aC, ha, iD, bS, ct, il, rc, Na, amJ, Wk, aU, Nc, Im, bK, hg, rz, Cr, na, VX, Az, Z, byU, bN, hq, Qi, Cq, apM, agl, HN, Ei, Km, B); #c1(GABRB3) c2(NP_068712) c3(gamma-aminobutyric acid receptor subunit beta-3 isoform 2 precursor) c4(210105) c5(210106, 210107, 210108, 210109, 210110, 210111) c6( ) c7(aC, ha, iD, bS, ct, il, rc, Na, amJ, Wk, aU, Nc, Im, bK, hg, rz, Cr, na, VX, Az, Z, byU, bN, hq, Qi, Cq, apM, agl, HN, Ei, Km, B); #c1(GABRE) c2(NP_004952) c3(gamma-aminobutyric acid receptor subunit epsilon precursor) c4(151419) c5(151420, 151421, 151422, 151423, 151424, 151425) c6( ) c7(T, Gt, XY, n, ur, bK, vo, ae, ad); #c1(GABRE) c2(XP_011529440) c3(gamma-aminobutyric acid receptor subunit epsilon isoform X4) c4(324882) c5(324883, 324884, 324885, 324886, 324887) c6( ) c7(T, Gt, XY, n, ur, bK, vo, ae, ad); #c1(GABRE) c2(XP_011529441) c3(gamma-aminobutyric acid receptor subunit epsilon isoform X5) c4( ) c5(324888) c6( ) c7(T, Gt, XY, n, ur, bK, vo, ae, ad); #c1(GABRG1) c2(NP_775807) c3(gamma-aminobutyric acid receptor subunit gamma-1 precursor) c4(250348, 250349) c5(250350, 250351, 250352, 250353, 250354, 250355, 250356, 250357, 250358, 250359, 250360, 250361) c6( ) c7(os, dY, bre, oe, Gd, uJ, oZ, bK, bN); #c1(GABRG2) c2(NP_000807) c3(gamma-aminobutyric acid receptor subunit gamma-2 isoform 2 precursor) c4(16265, 16266) c5(16267, 16268, 16269, 16270, 16271, 16272, 16273, 16274, 16275, 16276, 16277, 16278) c6( ) c7(byX, ha, al, iD, byV, bkd, kL, aqk, Wk, aU, bK, hg, xa, yr, PT, gl, cu, da, aPf, byW, hq, Cq, ok, byY, cA, Gs, HN); #c1(GABRG2) c2(NP_944493) c3(gamma-aminobutyric acid receptor subunit gamma-2 isoform 3 precursor) c4(260635) c5(260636, 260637, 260638, 260639, 260640, 260641) c6( ) c7(byX, ha, al, iD, byV, bkd, kL, aqk, Wk, aU, bK, hg, xa, yr, PT, gl, cu, da, aPf, byW, hq, Cq, ok, byY, cA, Gs, HN); #c1(GABRG2) c2(NP_944494) c3(gamma-aminobutyric acid receptor subunit gamma-2 isoform 1 precursor) c4(260642) c5(260643, 260644, 260645, 260646, 260647, 260648) c6( ) c7(byX, ha, al, iD, byV, bkd, kL, aqk, Wk, aU, bK, hg, xa, yr, PT, gl, cu, da, aPf, byW, hq, Cq, ok, byY, cA, Gs, HN); #c1(GABRG3) c2(NP_001257802) c3(gamma-aminobutyric acid receptor subunit gamma-3 isoform 2 precursor) c4(95639) c5(95640, 95641, 95642, 95643, 95644, 95645) c6( ) c7(bhB, agl, gl, bS, bK, UE, an, he, rc, bN, cv); #c1(GABRG3) c2(NP_150092) c3(gamma-aminobutyric acid receptor subunit gamma-3 isoform 1 precursor) c4(227739) c5(227740, 227741, 227742, 227743, 227744, 227745) c6( ) c7(bhB, agl, gl, bS, bK, UE, an, he, rc, bN, cv); #c1(GABRP) c2(XP_011532807) c3(gamma-aminobutyric acid receptor subunit pi isoform X1) c4(328866, 328867, 328868, 328869, 328870, 328871) c5(328872, 328873, 328874, 328875, 328876, 328877, 328878, 328879, 328880, 328881) c6( ) c7(qw, T, lg, qt, aW, aT, bS, bK, cd); #c1(GABRP) c2(XP_011532808) c3(gamma-aminobutyric acid receptor subunit pi isoform X2) c4(328882) c5(328883, 328884, 328885, 328886, 328887, 328888, 328889, 328890, 328891, 328892, 328893, 328894, 328895, 328896, 328897, 328898, 328899, 328900, 328901, 328902, 328903, 328904, 328905, 328906, 328907, 328908, 328909, 328910, 328911, 328912, 328913, 328914, 328915, 328916, 328917, 328918) c6( ) c7(qw, T, lg, qt, aW, aT, bS, bK, cd); #c1(GABRQ) c2(NP_061028) c3(gamma-aminobutyric acid receptor subunit theta precursor) c4(199064, 199065) c5(199066, 199067, 199068, 199069, 199070, 199071) c6( ) c7(bM, Gt, eL, aq, dL, bK, uu, ur, byQ, vo, bz, B); #c1(GABRQ) c2(XP_011529486) c3(gamma-aminobutyric acid receptor subunit theta isoform X1) c4( ) c5(324950, 324951, 324952, 324953, 324954, 324955) c6( ) c7(bM, Gt, eL, aq, dL, bK, uu, ur, byQ, vo, bz, B); #c1(GABRR1) c2(NP_001243632) c3(gamma-aminobutyric acid receptor subunit rho-1 isoform b precursor) c4(91266) c5(91267, 91268, 91269, 91270, 91271, 91272) c6( ) c7(Gt, iH, bK); #c1(GABRR1) c2(NP_002033) c3(gamma-aminobutyric acid receptor subunit rho-1 isoform a precursor) c4(123493) c5(123494, 123495, 123496, 123497, 123498, 123499, 123500) c6( ) c7(Gt, iH, bK); #c1(GABRR1) c2(XP_006715501) c3(gamma-aminobutyric acid receptor subunit rho-1 isoform X2) c4( ) c5(289601) c6( ) c7(Gt, iH, bK); #c1(GABRR1) c2(XP_011534014) c3(gamma-aminobutyric acid receptor subunit rho-1 isoform X1) c4(330186) c5(330187, 330188, 330189, 330190, 330191, 330192, 330193, 330194) c6( ) c7(Gt, iH, bK); #c1(GABRR2) c2(NP_002034) c3(gamma-aminobutyric acid receptor subunit rho-2 precursor) c4(123501) c5(123502, 123503, 123504, 123505, 123506, 123507) c6( ) c7(Gt, nX, ha, hl, bK, byQ, iq); #c1(GAD1) c2(NP_000808) c3(glutamate decarboxylase 1 isoform GAD67) c4(16279, 16280, 16281, 16282, 16283) c5(16284, 16285, 16286, 16287, 16288, 16289) c6( ) c7(bL, eW, cZ, T, LX, yG, ha, aFc, bO, mS, n, byZ, bS, ct, ti, ci, fu, dG, V, bX, j, J, gF, aR, ad, IF, Fb, mj, F, aE, ww, HJ, Na, mW, bza, hD, Nc, bK, K, dd, an, mY, mV, bhm, he, ae, rz, rE, mU, A, tb, eZ, zD, Mz, gl, cu, Z, FX, kk, fr, mZ, jb, rY, mX, cv, hq, pH, aj, bN, ky, cA, Lj, wO, SC, yP, U, mg, sv, mf, uJ, avO, v, xg, mT, qc); #c1(GAD1) c2(NP_038473) c3(glutamate decarboxylase 1 isoform GAD25) c4(176613) c5(176614, 176615, 176616, 176617, 176618, 176619, 176620, 176621, 176622, 176623, 176624, 176625, 176626, 176627, 176628, 176629, 176630, 176631, 176632, 176633, 176634, 176635, 176636, 176637, 176638, 176639, 176640, 176641, 176642, 176643, 176644, 176645, 176646, 176647) c6( ) c7(bL, eW, cZ, T, LX, yG, ha, aFc, bO, mS, n, byZ, bS, ct, ti, ci, fu, dG, V, bX, j, J, gF, aR, ad, IF, Fb, mj, F, aE, ww, HJ, Na, mW, bza, hD, Nc, bK, K, dd, an, mY, mV, bhm, he, ae, rz, rE, mU, A, tb, eZ, zD, Mz, gl, cu, Z, FX, kk, fr, mZ, jb, rY, mX, cv, hq, pH, aj, bN, ky, cA, Lj, wO, SC, yP, U, mg, sv, mf, uJ, avO, v, xg, mT, qc); #c1(GAD2) c2(NP_001127838) c3(glutamate decarboxylase 2) c4(49308, 49309, 49310) c5(49311, 49312, 49313, 49314, 49315, 49316, 49317, 49318, 49319, 49320, 49321, 49322, 49323, 49324, 49325, 49326, 49327, 49328, 49329, 49330, 49331, 49332) c6( ) c7(bL, cZ, dD, LX, yG, qQ, aFc, bzb, bO, ti, aj, v, j, hz, Ea, eq, ww, J, IF, aqt, mj, cF, aE, hD, hg, uV, dd, qM, an, bhm, af, uX, A, IR, tb, s, Mz, dq, cu, gu, Z, fq, rY, hq, bN, pH, ky, aDX, cA, bo, yP, aiM, mg, vy, uJ, zB); #c1(GADD45B) c2(NP_056490) c3(growth arrest and DNA damage-inducible protein GADD45 beta) c4(187736) c5(187737, 187738, 187739, 187740, 187741, 187742) c6( ) c7(gx, T, ht, jx, bB, ai, q, cc, cq, hW, Dj, K, IQ, hu, dF, aiJ, Dg, gl, aq, pL, iR, zr, bE, m, Pk, Pr, B, y); #c1(GADD45G) c2(NP_006696) c3(growth arrest and DNA damage-inducible protein GADD45 gamma) c4(167213, 167214) c5(167215, 167216, 167217, 167218, 167219, 167220, 167221, 167222, 167223, 167224, 167225, 167226) c6( ) c7(T, os, aw, ht, aA, it, n, KO, oZ, uE, ad, av, pN, aT, rO, K, hu, ae, WW, aa, apL, yo, s, aW, bz, ac, pP, hR, dy, m, Pr, B); #c1(GADD45GIP1) c2(NP_443082) c3(growth arrest and DNA damage-inducible proteins-interacting protein 1) c4(229315) c5(229316, 229317, 229318, 229319, 229320, 229321, 229322) c6( ) c7(ck, bt, ae, ad); #c1(GADL1) c2(NP_997242) c3(acidic amine acid decarboxylase GADL1) c4(265261) c5(265262, 265263, 265264, 265265, 265266, 265267) c6( ) c7(amN, av, Qy, d, eM, Tf, Y, ff, aq, amM, m, bz, en, oi, t, g, fq, as, Hr); #c1(GAGE1) c2(NP_001035753) c3(G antigen 1) c4(33031) c5(33032, 33033, 33034, 33035, 33036, 33037) c6( ) c7(Y, aC, B, g, bu); #c1(GAGE10) c2(NP_001091883) c3(G antigen 10) c4(38782) c5(38783, 38784, 38785, 38786, 38787, 38788) c6( ) c7(T); #c1(GAK) c2(NP_005246) c3(cyclin-G-associated kinase isoform 1) c4(154371, 154372) c5(154373, 154374, 154375, 154376, 154377, 154378) c6( ) c7(LS, an); #c1(GAL) c2(NP_057057) c3(galanin peptides preproprotein) c4(188673) c5(188674, 188675, 188676, 188677, 188678, 188679) c6( ) c7(cZ, T, Tb, e, ha, aw, bO, cz, bB, aj, bS, uu, ct, C, ci, bze, v, il, fr, q, J, eA, eW, bjV, ft, ww, uT, il, sO, acu, bzd, aT, cU, Ps, bK, K, wb, dd, bq, dQ, Ha, af, eu, hZ, eG, Uf, d, yo, tb, A, aW, ev, Gv, ff, r, Io, en, Z, cm, iK, bzc, FT, hq, ok, cA, dB, bE, eD, Gs, hO, hR, Hs, Lq, m, jd, B, hS); #c1(GALC) c2(NP_000144) c3(galactocerebrosidase isoform a precursor) c4(3096, 3097) c5(3098, 3099, 3100, 3101, 3102, 3103, 3104) c6( ) c7(bzg, cb, dH, ff, U, dq, aYR, Lq, aAt, en, mF, bzf, aR); #c1(GALC) c2(NP_001188330) c3(galactocerebrosidase isoform c precursor) c4(79069) c5(79070, 79071, 79072, 79073, 79074, 79075, 79076) c6( ) c7(bzg, cb, dH, ff, U, dq, aYR, Lq, aAt, en, mF, bzf, aR); #c1(GALC) c2(NP_001188331) c3(galactocerebrosidase isoform d) c4(79077) c5(79078, 79079, 79080, 79081, 79082, 79083, 79084) c6( ) c7(bzg, cb, dH, ff, U, dq, aYR, Lq, aAt, en, mF, bzf, aR); #c1(GALC) c2(XP_011534920) c3(galactocerebrosidase isoform X1) c4(331494) c5(331495, 331496, 331497, 331498, 331499, 331500, 331501, 331502, 331503, 331504, 331505, 331506) c6( ) c7(bzg, cb, dH, ff, U, dq, aYR, Lq, aAt, en, mF, bzf, aR); #c1(GALK1) c2(NP_000145) c3(galactokinase) c4(3105, 3106, 3107) c5(3108, 3109, 3110, 3111, 3112, 3113, 3114, 3115, 3116, 3117, 3118, 3119, 3120, 3121, 3122, 3123, 3124, 3125, 3126, 3127, 3128, 3129, 3130, 3131, 3132, 3133, 3134, 3135, 3136, 3137, 3138, 3139, 3140, 3141, 3142, 3143, 3144, 3145, 3146, 3147, 3148, 3149, 3150, 3151, 3152, 3153, 3154, 3155, 3156, 3157, 3158, 3159, 3160, 3161, 3162, 3163, 3164, 3165, 3166, 3167, 3168, 3169, 3170, 3171, 3172, 3173, 3174, 3175, 3176, 3177, 3178, 3179, 3180, 3181, 3182, 3183, 3184, 3185, 3186, 3187, 3188, 3189, 3190, 3191, 3192, 3193, 3194, 3195, 3196, 3197, 3198, 3199, 3200, 3201, 3202, 3203, 3204, 3205, 3206, 3207, 3208, 3209, 3210, 3211, 3212, 3213, 3214, 3215, 3216) c6(3217) c7(mO, bzj, aWG, bzi, r, QT, bzh); #c1(GALK2) c2(NP_001001556) c3(N-acetylgalactosamine kinase isoform 2) c4(18712) c5(18713, 18714, 18715, 18716, 18717, 18718, 18719, 18720, 18721) c6( ) c7(ey); #c1(GALK2) c2(NP_001275959) c3(N-acetylgalactosamine kinase isoform 3) c4( ) c5(107533, 107534, 107535, 107536, 107537, 107538, 107539, 107540, 107541, 107542, 107543) c6( ) c7(ey); #c1(GALK2) c2(NP_002035) c3(N-acetylgalactosamine kinase isoform 1) c4(123508, 123509, 123510) c5(123511, 123512, 123513, 123514, 123515, 123516) c6( ) c7(ey); #c1(GALK2) c2(XP_005254336) c3(N-acetylgalactnsamine kinase isoform X1) c4( ) c5(273159) c6( ) c7(ey); #c1(GALK2) c2(XP_011519742) c3(N-acetylgalactnsamine kinase isoform X8) c4( ) c5(314431, 314432, 314433, 314434, 314435) c6( ) c7(ey); #c1(GALM) c2(NP_620156) c3(aldose 1-epimerase) c4(237381) c5(237382, 237383, 237384, 237385, 237386, 237387) c6( ) c7(r, fe, baK, iV, q, dr); #c1(GALNS) c2(NP_000503) c3(N-acetylgalactosamine-6-sulfatase precursor) c4(10462, 10463) c5(10464, 10465, 10466, 10467, 10468, 10469, 10470, 10471, 10472, 10473, 10474, 10475, 10476, 10477, 10478, 10479, 10480, 10481, 10482, 10483, 10484, 10485, 10486, 10487, 10488, 10489, 10490, 10491, 10492, 10493, 10494, 10495, 10496, 10497, 10498, 10499, 10500, 10501, 10502, 10503, 10504, 10505, 10506, 10507, 10508, 10509, 10510, 10511, 10512, 10513, 10514, 10515, 10516, 10517, 10518, 10519, 10520, 10521, 10522, 10523, 10524, 10525, 10526, 10527, 10528, 10529, 10530, 10531, 10532, 10533, 10534, 10535, 10536, 10537, 10538, 10539, 10540, 10541, 10542, 10543, 10544, 10545, 10546, 10547, 10548, 10549, 10550, 10551, 10552, 10553, 10554, 10555, 10556, 10557, 10558, 10559, 10560, 10561, 10562, 10563, 10564, 10565, 10566, 10567, 10568, 10569, 10570, 10571, 10572) c6(10573, 10574, 10575, 10576, 10577) c7(aA, ade, C, auu, bjQ, BI, pN, bzk, aT, h, vO, adn, bA, aW, dq, aF, afs, bzl, W, kg, qr, cj, Zn, bzm, acZ, Lq, azy, bH); #c1(GALNS) c2(XP_005256358) c3(N-acetylgalactosamine-6-sulfatase isoform X2) c4(274127) c5(274128, 274129, 274130) c6(274131) c7(aA, ade, C, auu, bjQ, BI, pN, bzk, aT, h, vO, adn, bA, aW, dq, aF, afs, bzl, W, kg, qr, cj, Zn, bzm, acZ, Lq, azy, bH); #c1(GALNT1) c2(XP_005258296) c3(polypeptide N-acetylgalactosaminyltransferase 1 isoform X1) c4(275608, 275609) c5(275610, 275611, 275612, 275613, 275614, 275615, 275616, 275617, 275618, 275619, 275620, 275621, 275622, 275623, 275624, 275625) c6( ) c7(t, ey, m, c); #c1(GALNT12) c2(NP_078918) c3(polypeptide N-acetylgalactosaminyltransferase 12) c4(216117) c5(216118, 216119, 216120, 216121216122, 216123) c6( ) c7(T, ac, r, q, X, bzn); #c1(GALNT12) c2(XP_006717350) c3(polypeptide N-acetylgalactosaminyltransferase 12 isoform X4) c4( ) c5(290962) c6( ) c7(T, ac, r, q, X, bzn); #c1(GALNT13) c2(NP_001288556) c3(polypeptide N-acetylgalactosaminyltransferase 13 isoform 2) c4(113749) c5(113750, 113751, 113752, 113753, 113754, 113755) c6( ) c7(qb, ff, ht, gv, j, en); #c1(GALNT13) c2(NP_443149) c3(polypeptide N-acetylgalactosaminyltransferase 13 isoform 1) c4(229647, 229648) c5(229649, 229650, 229651, 229652, 229653, 229654, 229655) c6( ) c7(qb, ff, ht, gv, j, en); #c1(GALNT13) c2(XP_011508839) c3(polypeptide N-acetylgalactosaminyltransferase 13 isoform X1) c4( ) c5(299425, 299426, 299427, 299428, 299429) c6( ) c7(qb, ff, ht, gv, j, en); #c1(GALNT14) c2(NP_001240755) c3(polypeptide N-acetylgalactosaminyltransferase 14 isoform 2) c4(88756) c5(88757, 88758, 88759, 88760, 88761, 88762) c6( ) c7(zo, T, B, Y); #c1(GALNT14) c2(NP_078848) c3(polypeptide N-acetylgalactosaminyltransferase 14 isoform 1) c4(215696, 215697) c5(215698, 215699, 215700, 215701, 215702, 215703, 215704, 215705, 215706, 215707, 215708, 215709) c6( ) c7(zo, T, B, Y); #c1(GALNT14) c2(XP_011531406) c3(polypeptide N-acetylgalactosaminyltransferase 14 isoform X2) c4(327479) c5(327480, 327481, 327482, 327483, 327484, 327485) c6( ) c7(zo, T, B, Y); #c1(GALNT14) c2(XP_011531407) c3(polypeptide N-acetylgalactosaminyltransferase 14 isoform X1) c4(327486) c5(327487, 327488, 327489, 327490, 327491, 327492) c6( ) c7(zo, T, B, Y); #c1(GALNT15) c2(NP_473451) c3(polypeptide N-acetylgalactosaminyltransferase 15) c4(230539, 230540) c5(230541, 230542, 230543, 230544, 230545, 230546, 230547, 230548, 230549, 230550, 230551, 230552) c6( ) c7(qb, if, q, qN, r); #c1(GALNT18) c2(NP_940918) c3(polypeptide N-acetylgalactosaminyltransferase 18) c4(260110) c5(260111, 260112, 260113, 260114, 260115, 260116) c6( ) c7(y, fq, ad); #c1(GALNT2) c2(NP_001278795) c3(polypeptide N-acetylgalactosaminyltransferase 2 isoform 2) c4(110123, 110124) c5(110125, 110126, 110127, 110128, 110129, 110130) c6( ) c7(bL, Zu, ac, cO, ff, cz, n, dG, j, ci, v, ei, en, B, eu); #c1(GALNT2) c2(NP_004472) c3(polypeptide N-acetylgalactosaminyltransferase 2 precursor) c4(146656, 146657) c5(146658, 146659, 146660, 146661, 146662, 146663, 146664) c6( ) c7(bL, Zu, ac, cO, ff, cz, n, dG, j, ci, v, ei, en, B, eu); #c1(GALNT2) c2(XP_011542457) c3(polypeptide N-acetylgalactnsaminyltransferase 2 isoform X2) c4( ) c5(340955, 340956, 340957, 340958, 340959, 340960, 340961, 340962, 340963, 340964, 340965) c6( ) c7(bL, Zu, ac, cO, ff, cz, n, dG, j, ci, v, ei, en, B, eu); #c1(GALNT3) c2(NP_004473) c3(polypeptide N-acetylgalactosaminyltransferase 3) c4(146665, 146666) c5(146667, 146668, 146669, 146670, 146671, 146672, 146673, 146674, 146675, 146676, 146677, 146678, 146679, 146680, 146681, 146682, 146683, 146684, 146685, 146686, 146687, 146688) c6( ) c7(n, aj, fr, ci, J, ad, av, aE, io, bta, bsR, hB, ae, bA, aOy, A, ff, dq, bzo, en, g, akb, t, cM, bz, aOx, oX, IS, m, iu); #c1(GALNT3) c2(XP_006712465) c3(polypeptide N-acetylgalactosaminyltransferase 3 isoform X2) c4(286667, 286668, 286669) c5(286670, 286671, 286672, 286673, 286674, 286675, 286676, 286677, 286678, 286679, 286680, 286681, 286682) c6( ) c7(n, aj, fr, ci, J, ad, av, aE, io, bta, bsR, hB, ae, bA, aOy, A, ff, dq, bzo, en, g, akb, t, cM, bz, aOx, oX, IS, m, iu); #c1(GALNT4) c2(NP_003765) c3(polypeptide N-acetylgalactosaminyltransferase 4) c4(140664) c5(140665, 140666, 140667, 140668, 140669, 140670) c6( ) c7(j); #c1(GALNT5) c2(NP_055383) c3(polypeptide N-acetylgalactosaminyltransferase 5) c4(180705) c5(180706, 180707, 180708, 180709, 180710, 180711) c6( ) c7(aF, aA); #c1(GALNT6) c2(XP_006719277) c3(polypeptide N-acetylgalactosaminyltransferase 6 isoform X1) c4(292370, 292371) c5(292372, 292373, 292374, 292375, 292376, 292377, 292378, 292379, 292380, 292381, 292382, 292383, 292384, 292385, 292386, 292387) c6( ) c7(aW, n, T, ci, aT); #c1(GALNT7) c2(NP_059119) c3(N-acetylgalactosaminyltransferase 7) c4(193142) c5(193143, 193144, 193145, 193146, 193147, 193148) c6( ) c7(if, ey, qN); #c1(GALNT7) c2(XP_005263119) c3(N-acetylgalactosaminyltransferase 7 isoform X1) c4(278320) c5(278321, 278322, 278323, 278324, 278325, 278326) c6( ) c7(if, ey, qN); #c1(GALNT8) c2(NP_059113) c3(probable polypeptide N-acetylgalactosaminyltransferase 8) c4(193106) c5(193107, 193108, 193109, 193110, 193111, 193112) c6( ) c7(F); #c1(GALNT9) c2(NP_001116108) c3(polypeptide N-acetylgalactnsaminyltransferase 9 isoform A) c4(43603, 43604, 43605, 43606, 43607) c5(43608, 43609, 43610, 43611, 43612, 43613, 43614, 43615, 43616, 43617, 43618, 43619, 43620, 43621, 43622, 43623, 43624, 43625, 43626) c6( ) c7(cm); #c1(GALNT9) c2(NP_068580) c3(polypeptide N-acetylgalactosaminyltransferase 9 isoform B) c4( ) c5(209689, 209690, 209691, 209692, 209693, 209694, 209695, 209696, 209697, 209698, 209699, 209700, 209701, 209702, 209703, 209704, 209705, 209706, 209707, 209708, 209709) c6( ) c7(cm); #c1(GALNTL6) c2(NP_001030017) c3(polypeptide N-acetylgalactnsaminyltransferase-like 6) c4(30860, 30861) c5(30862, 30863, 30864, 30865, 30866, 30867, 30868, 30869, 30870, 30871, 30872, 30873) c6( ) c7(fe, Ea, oe, fq); #c1(GALP) c2(NP_001139018) c3(galanin-like peptide isoform 2 precursor) c4(58617) c5(58618, 58619, 58620, 58621, 58622, 58623) c6(58624) c7(Tg, v, af, Tb, bq); #c1(GALP) c2(NP_149097) c3(galanin-like peptide isoform 1 precursor) c4(227131) c5(227132, 227133, 227134, 227135, 227136, 227137, 227138, 227139, 227140) c6(227141, 227142) c7(Tg, v, af, Tb, bq); #c1(GALR1) c2(NP_001471) c3(galanin receptor type 1) c4(117987) c5(117988, 117989, 117990, 117991, 117992, 117993) c6( ) c7(d, Gv, ff, EQ, r, hR, v, en, he, iK, q); #c1(GALR2) c2(NP_003848) c3(galanin receptor type 2) c4(141404) c5(141405, 141406, 141407, 141408, 141409, 141410) c6( ) c7(T, ft, d, bS, wb, K, ct, Z, cm, iK, hq); #c1(GALR3) c2(XP_011528770) c3(galanin receptor type 3 isoform X1) c4(324077) c5(324078, 324079, 324080, 324081, 324082, 324083) c6( ) c7(hR, he, cF, wb); #c1(GALT) c2(NP_000146) c3(galactose-1-phosphate uridylyltransferase isoform 1) c4(3218, 3219) c5(3220, 3221, 3222, 3223, 3224, 3225, 3226, 3227, 3228, 3229, 3230, 3231, 3232, 3233, 3234, 3235, 3236, 3237, 3238, 3239, 3240, 3241, 3242, 3243, 3244, 3245, 3246, 3247, 3248, 3249, 3250, 3251, 3252, 3253, 3254, 3255, 3256, 3257, 3258, 3259, 3260, 3261, 3262, 3263, 3264, 3265, 3266, 3267, 3268, 3269, 3270, 3271, 3272, 3273, 3274, 3275, 3276, 3277, 3278, 3279, 3280, 3281, 3282, 3283, 3284, 3285, 3286, 3287, 3288, 3289, 3290, 3291, 3292, 3293, 3294, 3295, 3296, 3297, 3298, 3299, 3300, 3301, 3302, 3303, 3304, 3305, 3306, 3307, 3308, 3309, 3310, 3311, 3312, 3313, 3314, 3315, 3316, 3317, 3318, 3319, 3320, 3321, 3322, 3323, 3324, 3325, 3326, 3327, 3328, 3329, 3330, 3331, 3332, 3333, 3334, 3335, 3336, 3337, 3338, 3339, 3340, 3341, 3342, 3343, 3344, 3345, 3346, 3347, 3348, 3349, 3350, 3351, 3352, 3353, 3354, 3355, 3356, 3357, 3358, 3359, 3360, 3361, 3362, 3363, 3364, 3365, 3366, 3367, 3368) c6(3369) c7(dP, bfP, mO, b, zZ, il, WQ, blA, Ps, dq, aj, CZ, h, m, aTS, i, t, dr, anU); #c1(GALT) c2(NP_001245261) c3(galactose-1-phosphate uridylyltransferase isoform 2) c4(92944) c5(92945, 92946, 92947, 92948, 92949, 92950) c6( ) c7(dP, bfP, mO, b, zZ, il, WQ, blA, Ps, dq, aj, CZ, h, m, aTS, i, t, dr, anU); #c1(GAMT) c2(NP_000147) c3(guanidinoacetate N-methyltransferase isoform a) c4(3370) c5(3371, 3372, 3373, 3374, 3375, 3376) c6( ) c7(nc, Ip, M, bzp, nA, rL); #c1(GAMT) c2(NP_620279) c3(guanidinoacetate N-methyltransferase isoform b) c4(237500) c5(237501, 237502, 237503, 237504, 237505, 237506) c6( ) c7(nc, Ip, M, bzp, nA, rL); #c1(GAN) c2(NP_071324) c3(gigaxonin) c4(210976) c5(210977, 210978, 210979, 210980, 210981, 210982) c6( ) c7(T, U, bk, aTe, fu, bU, bX, Kq, aR); #c1(GANAB) c2(NP_001265123) c3(neutral alpha-glucosidase AB isoform 6) c4( ) c5(97815, 97816, 97817, 97818, 97819) c6( ) c7(T); #c1(GANAB) c2(NP_938148) c3(neutral alpha-glucosidase AB isoform 2 precursor) c4(259624, 259625) c5(259626, 259627, 259628, 259629, 259630, 259631, 259632) c6( ) c7(T); #c1(GANAB) c2(NP_938149) c3(neutral alpha-glucosidase AB isoform 3 precursor) c4(259633) c5(259634, 259635, 259636, 259637, 259638, 259639) c6( ) c7(T); #c1(GANC) c2(NP_001288339) c3(neutral alpha-glucosidase C isoform 3) c4(113737, 113738) c5(113739, 113740, 113741, 113742, 113743, 113744, 113745, 113746, 113747, 113748) c6( ) c7(adw); #c1(GANC) c2(NP_937784) c3(neutral alpha-glucosidase C isoform 1) c4(259076) c5(259077, 259078, 259079, 259080, 259081, 259082) c6( ) c7(adw); #c1(GAP43) c2(NP_001123536) c3(neuromodulin isoform 1) c4(47442) c5(47443, 47444, 47445, 47446, 47447, 47448) c6( ) c7(amt, xw, sS, bb, c, OI, qr, jx, ti, cd, bS, ct, aUO, Z, cm, V, cB, X, aR, rY, L); #c1(GAP43) c2(NP_002036) c3(neuromodulin isoform 2) c4(123517) c5(123518, 123519, 123520, 123521, 123522, 123523) c6( ) c7(amt, xw, sS, bb, c, OI, qr, jx, ti, cd, bS, ct, aUO, Z, cm, V, cB, X, aR, rY, L); #c1(GAPDH) c2(NP_001243728) c3(glyceraldehyde-3-phosphate dehydrogenase isoform 2) c4(91598, 91599) c5(91600, 91601, 91602, 91603, 91604, 91605, 91606, 91607, 91608, 91609) c6( ) c7(bM, T, Tb, if, al, eb, fd, Ja, IR, ci, UI, ip, aE, K, zy, eL, aW, hl, pD, g, as, eF, cm, eM, nB, aeB, wK, mx, U, vy, iS, nw, m, IT, wu, ht, n, cQ, aj, fr, qN, fK, BI, cc, h, nm, dL, ey, ox, bzs, bzr, fe, aq, mo, hR, sZ, B, it, bL, fM, AS, AL, Ju, jx, aA, aBo, v, j, V, pd, q, J, eA, eJ, mP, aT, vH, cy, ae, af, bA, s, Y, r, en, t, f, iK, pb, ck, rR, c, VA, bt, yv, pY, qb, iW, jh, bzq, OH, ad, av, Tg, hd, Db, vJ, ds, wm, Od, nJ, d, ff, wc, eH, cr, yy, aF, iR, bz, es, gk, II, aS, cP, y, X); #c1(GAPDH) c2(NP_001276674) c3(glyceraldehyde-3-phosphate dehydrogenase isoform 1) c4(108225, 108226) c5(108227, 108228, 108229, 108230, 108231, 108232, 108233, 108234, 108235, 108236, 108237, 108238, 108239, 108240, 108241, 108242, 108243, 108244, 108245, 108246, 108247, 108248) c6( ) c7(bM, T, Tb, if, al, eb, fd, Ja, IR, ci, UI, ip, aE, K, zy, eL, aW, hl, pD, g, as, eF, cm, eM, nB, aeB, wK, mx, U, vy, iS, nw, m, IT, wu, ht, n, cQ, aj, fr, qN, fK, BI, cc, h, nm, dL, ey, ox, bzs, bzr, fe, aq, mo, hR, sZ, B, it, bL, fM, AS, AL, Ju, jx, aA, aBo, v, j, V, pd, q, J, eA, eJ, mP, aT, vH, cy, ae, af, bA, s, Y, r, en, t, f, iK, pb, ck, rR, c, VA, bt, yv, pY, qb, iW, jh, bzq, OH, ad, av, Tg, hd, Db, vJ, ds, wm, Od, nJ, d, ff, wc, eH, cr, yy, aF, iR, bz, es, gk, II, aS, cP, y, X); #c1(GAPDHS) c2(NP_055179) c3(glyceraldehyde-3-phosphate dehydrogenase, testis-specific) c4(179605) c5(179606, 179607, 179608, 179609, 179610, 179611) c6( ) c7(af); #c1(GAR1) c2(NP_061856) c3(H/ACA ribonucleoprotein complex subunit 1) c4(200821) c5(200822, 200823, 200824, 200825, 200826, 200827, 200828, 200829, 200830, 200831) c6( ) c7(yd, oY, dW, sb); #c1(GAREM) c2(NP_001229338) c3(GRB2-associated and regulator of MAPK protein isoform 1) c4(84233) c5(84234, 84235, 84236, 84237, 84238, 84239) c6( ) c7(oe); #c1(GAREM) c2(NP_073588) c3(GRB2-associated and regulator of MAPK protein isoform 2) c4(212994) c5(212995, 212996, 212997, 212998, 212999, 213000) c6( ) c7(oe); #c1(GARNL3) c2(NP_001273708) c3(GTPase-activating Rap/Ran-GAP domain-like protein 3 isoform b) c4(105695) c5(105696, 105697, 105698, 105699, 105700, 105701) c6( ) c7(bK); #c1(GARNL3) c2(NP_115669) c3(GTPase-activating Rap/Ran-GAP domain-like protein 3 isoform a) c4(223505, 223506) c5(223507, 223508, 223509, 223510, 223511, 223512, 223513, 223514, 223515, 223516, 223517, 223518) c6( ) c7(bK); #c1(GARNL3) c2(XP_005252324) c3(GTPase-activating Rap/Ran-GAP domain-like protein 3 isoform X1) c4(271660) c5(271661) c6( ) c7(bK); #c1(GARNL3) c2(XP_011517391) c3(GTPase-activating Rap/Ran-GAP domain-like protein 3 isoform X3) c4( ) c5(311114, 311115, 311116, 311117, 311118, 311119, 311120, 311121, 311122) c6( ) c7(bK); #c1(GARS) c2(NP_002038) c3(glycine-tRNA ligase precursor) c4(123524) c5(123525, 123526, 123527, 123528, 123529, 123530) c6( ) c7(II, T, if, jh, aA, j, fu, bX, qN, ad, IF, LN, no, aE, BJ, Id, HC, aT, kf, bI, bU, ae, Oq, aW, bT, ff, lb, bhi, eH, r, aq, aF, en, LK, t, eF, Bv, Ew, ql, c, w, bk, m, B); #c1(GART) c2(NP_780294) c3(trifunctional purine biosynthetic protein adenosine-3 isoform 2) c4( ) c5(251530, 251531, 251532, 251533, 251534, 251535, 251536, 251537, 251538, 251539, 251540, 251541, 251542, 251543, 251544, 251545, 251546, 251547, 251548, 251549, 251550, 251551, 251552, 251553, 251554, 251555, 251556, 251557, 251558, 251559) c6( ) c7(Na, no, W, Ip, r, adW, PD, Nc, K, fu, bU, LK, f, af, ad); #c1(GART) c2(XP_006724053) c3(trifunctional purine biosynthetic protein adenosine-3 isoform X1) c4(295633, 295634, 295635, 295636, 295637, 295638, 295639) c5(295640, 295641, 295642, 295643, 295644, 295645, 295646, 295647, 295648, 295649, 295650, 295651, 295652, 295653, 295654, 295655, 295656, 295657, 295658, 295659, 295660, 295661, 295662, 295663, 295664, 295665, 295666, 295667, 295668) c6( ) c7(Na, no, W, Ip, r, adW, PD, Nc, K, fu, bU, LK, f, af, ad); #c1(GAS1) c2(NP_002039) c3(growth arrest-specific protein 1 precursor) c4(123531) c5(123532, 123533, 123534, 123535, 123536, 123537, 123538) c6( ) c7(Na, T, asp, nM, dH, Db, eL, Y, r, aA, n, cy, dL, cm, eA, aF, ZW, t, ae, q, ad); #c1(GAS2) c2(NP_001137302) c3(growth arrest-specific protein 2) c4(55401) c5(55402, 55403, 55404, 55405, 55406, 55407, 55408, 55409, 55410, 55411, 55412, 55413, 55414, 55415) c6( ) c7(gZ, bL, cF, qK, iU); #c1(GAS2) c2(XP_011518275) c3(growth arrest-specific protein 2 isoform X1) c4(312281, 312282, 312283, 312284) c5( ) c6( ) c7(gZ, bL, cF, qK, iU); #c1(GAS2) c2(XP_011518281) c3(growth arrest-specific protein 2 isoform X6) c4( ) c5(312285, 312286, 312287, 312288, 312289, 312290, 312291, 312292, 312293, 312294, 312295, 312296, 312297, 312298, 312299, 312300, 312301, 312302, 312303, 312304, 312305, 312306, 312307, 312308) c6( ) c7(gZ, bL, cF, qK, iU); #c1(GAS2L1) c2(NP_001265659) c3(GAS2-like protein 1 isoform c) c4( ) c5(99144, 99145, 99146, 99147, 99148, 99149, 99150, 99151, 99152, 99153, 99154, 99155, 99156, 99157, 99158, 99159, 99160, 99161, 99162, 99163, 99164, 99165, 99166, 99167) c6( ) c7(bt); #c1(GAS2L1) c2(NP_689422) c3(GAS2-like protein 1 isoform a) c4(242710, 242711, 242712, 242713, 242714, 242715) c5(242716, 242717, 242718, 242719, 242720, 242721, 242722, 242723, 242724, 242725, 242726, 242727, 242728, 242729, 242730, 242731, 242732, 242733, 242734, 242735, 242736, 242737, 242738, 242739) c6( ) c7(bt); #c1(GAS6) c2(NP_000811) c3(growth arrest-specific protein 6 precursor) c4(16290, 16291, 16292, 16293, 16294) c5(16295, 16296, 16297, 16298, 16299, 16300, 16301, 16302, 16303, 16304, 16305, 16306, 16307, 16308, 16309, 16310, 16311, 16312, 16313, 16314, 16315, 16316, 16317, 16318, 16319, 16320, 16321, 16322, 16323, 16324) c6( ) c7(bL, bM, T, dD, gU, Uc, ea, e, jh, aA, Bm, eq, fr, V, ai, ad, eA, x, oT, hd, hW, Db, qK, oW, aT, dz, ji, hH, ae, eu, Qe, aW, Ls, bzu, eZ, gm, kp, aF, cI, pL, t, pt, bz, ck, bzt, W, nb, ac, hc, vA, E, cS, m, k, y, bt, iu); #c1(GAS7) c2(NP_001124303) c3(growth arrest-specific protein 7 isoform d) c4(48523, 48524) c5(48525, 48526, 48527, 48528, 48529) c6( ) c7(ck, ac, dH, Qu, r, v, ey, eA, iV, bt, q); #c1(GAS7) c2(NP_003635) c3(growth arrest-specific protein 7 isoform a) c4(139768) c5(139769, 139770, 139771, 139772, 139773, 139774, 139775, 139776, 139777, 139778, 139779, 139780, 139781, 139782, 139783, 139784, 139785, 139786, 139787, 139788, 139789) c6( ) c7(ck, ac, dH, Qu, r, v, ey, eA, iV, bt, q); #c1(GAS7) c2(NP_958836) c3(growth arrest-specific protein 7 isoform b) c4(262237, 262238, 262239) c5(262240, 262241, 262242, 262243, 262244, 262245, 262246, 262247, 262248, 262249, 262250, 262251, 262252, 262253, 262254, 262255, 262256) c6( ) c7(ck, ac, dH, Qu, r, v, ey, eA, iV, bt, q); #c1(GAS7) c2(NP_958839) c3(growth arrest-specific protein 7 isoform c) c4(262257) c5(262258, 262259, 262260, 262261, 262262, 262263, 262264) c6( ) c7(ck, ac, dH, Qu, r, v, ey, eA, iV, bt, q); #c1(GAS8) c2(NP_001273137) c3(growth arrest-specific protein 8 isoform c) c4( ) c5(104336) c6( ) c7(aW, cd, aT); #c1(GAS8) c2(NP_001273138) c3(growth arrest-specific protein 8 isoform d) c4(104337) c5(104338, 104339, 104340, 104341, 104342, 104343, 104344, 104345, 104346, 104347, 104348) c6( ) c7(aW, cd, aT); #c1(GAS8) c2(NP_001472) c3(growth arrest-specific protein 8 isoform a) c4(117994, 117995, 117996) c5(117997, 117998, 117999, 118000, 118001, 118002, 118003, 118004, 118005, 118006, 118007, 118008, 118009) c6( ) c7(aW, cd, aT); #c1(GAST) c2(NP_000796) c3(gastrin preproprotein) c4(16144) c5(16145, 16146, 16147, 16148, 16149, 16150) c6( ) c7(T, bzx, aC, fR, atj, bB, ci, xy, aE, pX, bzw, azh, li, iE, JI, aW, az, LZ, nY, kt, aB, g, as, aoS, qr, cj, Zn, azg, m, ct, BI, ft, Do, h, IG, Yd, ahJ, asE, bzv, W, pV, bzm, bzy, dA, aA, C, q, eA, eJ, nv, qp, aT, bau, dl, bA, jf, s, aBN, r, aNi, afs, t, ck, aJt, gX, Ze, bH, On, akd, pY, aD, bS, bjQ, av, hD, yh, fb, vO, Yi, mu, d, yy, aF, Z, HI, bz, bF, bE, AR, gZ, azy, X, Ex); #c1(GATA1) c2(NP_002040) c3(erythroid transcription factor) c4(123539, 123540) c5(123541, 123542, 123543, 123544, 123545, 123546, 123547, 123548, 123549, 123550, 123551, 123552, 123553, 123554, 123555, 123556, 123557, 123558, 123559) c6( ) c7(bM, T, aC, xu, bzE, alT, oA, bzA, bzC, oY, ci, hF, aYh, br, ad, er, x, CJ, fX, yw, BR, dE, oW, aT, bzB, h, dz, iY, DU, ae, af, Nr, iU, et, aW, adw, eH, KX, po, aGd, bzD, pm, eF, f, bw, dr, Nq, ck, EW, BU, pc, bzz, iT, azK, bt, pg, oh, bfX, dW, k, pw, dX, QV, bzF); #c1(GATA1) c2(XP_011542199) c3(erythroid transcription factor isoform X1) c4(340682) c5( ) c6( ) c7(bM, T, aC, xu, bzE, alT, oA, bzA, bzC, oY, ci, hF, aYh, br, ad, er, x, CJ, fX, yw, BR, dE, oW, aT, bzB, h, dz, iY, DU, ae, af, Nr, iU, et, aW, adw, eH, KX, po, aGd, bzD, pm, eF, f, bw, dr, Nq, ck, EW, BU, pc, bzz, iT, azK, bt, pg, oh, bfX, dW, k, pw, dX, QV, bzE); #c1(GATA2) c2(NP_001139133) c3(endothelial transcription factor GATA-2 isoform 1) c4(58732, 58733) c5(58734, 58735, 58736, 58737, 58738, 58739, 58740, 58741, 58742, 58743, 58744) c6( ) c7(gV, T, bM, xu, qx, oA, bs, uO, n, jh, j, hF, br, ad, er, dP, av, iu, azD, bzG, tL, aT, Vv, jj, an, DY, pk, ae, bzH, yo, s, hG, iU, aW, oV, bvK, gK, CM, Io, gm, aKk, cm, sK, bz, bw, ck, ac, eM, iT, dW, PO, PN, oX, bt, kS, B); #c1(GATA2) c2(NP_001139134) c3(endothelial transcription factor GATA-2 isoform 2) c4(58745) c5(58746, 58747, 58748, 58749, 58750, 58751, 58752, 58753, 58754, 58755, 58756, 58757) c6( ) c7(gV, T, bM, xu, qx, oA, bs, uO, n, jh, j, hF, br, ad, er, dP, av, iu, azD, bzG, tL, aT, Vv, jj, an, DY, pk, ae, bzH, yo, s, hG, iU, aW, oV, bvK, gK, CM, Io, gm, aKk, cm, sK, bz, bw, ck, ac, eM, iT, dW, PO, PN, oX, bt, kS, B); #c1(GATA3) c2(NP_002042) c3(trans-acting T-cell-specific transcription factor GATA-3 isoform 2) c4(123560) c5(123561, 123562, 123563, 123564, 123565, 123566, 123567, 123568, 123569, 123570, 123571, 123572, 123573) c6( ) c7(bM, T, os, aC, auW, ci, Tz, Ds, K, zQ, aW, mQ, vs, eE, cm, ou, aKI, dW, k, fy, QO, ajm, n, aj, fr, ct, uE, qN, zP, eV, dL, OM, bxg, aVn, oS, A, aiB, sp, OX, JM, at, uz, fL, Dw, eX, aA, cz, bzl, J, di, aT, Cy, ae, aFK, aDm, en, pb, kP, ac, mG, AH, fD, id, jh, oZ, bS, NI, mC, ad, py, MS, oz, ds, hD, IQ, ff, cr, eZ, dN, hp, Z, bz, baa, z, dJ, If, ra, iu, y); #c1(GATA3) c2(XP_005252500) c3(trans-acting T-cell-specific transcription factor GATA-3 isoform X1) c4(271826, 271827) c5(271828, 271829, 271830, 271831, 271832, 271833) c6( ) c7(bM, T, os, aC, auW, ci, Tz, Ds, K, zQ, aW, mQ, vs, eE, cm, ou, aKI, dW, k, fy, QO, ajm, n, aj, fr, ct, uE, qN, zP, eV, dL, OM, bxg, aVn, oS, A, aiB, sp, OX, JM, at, uz, fL, Dw, eX, aA, cz, bzl, J, di, aT, Cy, ae, aFK, aDm, en, pb, kP, ac, mG, AH, fD, id, jh, oZ, bS, NI, mC, ad, py, MS, oz, ds, hD, IQ, ff, cr, eZ, dN, hp, Z, bz, baa, z, dJ, If, ra, iu, y); #c1(GATA4) c2(NP_002043) c3(transcription factor GATA-4) c4(123574, 123575) c5(123576, 123577, 123578, 123579, 123580, 123581, 123582, 123583, 123584, 123585, 123586, 123587, 123588, 123589, 123590, 123591, 123592, 123593, 123594) c6( ) c7(T, ahf, aC, wL, mr, pf, aAz, aZ, acl, ht, bzO, aw, aA, bB, n, aj, bD, j, ci, BM, q, tO, J, cd, md, eA, av, Mg, mh, aE, cc, nX, BJ, IC, aT, bzJ, bzK, iv, bq, hu, rz, bzL, hm, yi, anR, A, vT, Jl, aW, ff, bIP, r, aq, aF, Hu, en, bu, cI, t, f, g, as, cm, iO, ac, eM, gY, dB, bE, AM, wk, mx, II, hL, gZ, Qu, Km, bzM, m, sx, bzN, iu, vQ); #c1(GATA5) c2(XP_006723762) c3(transcription factor GATA-5 isoform X1) c4(295370, 295371) c5(295372, 295373, 295374, 295375, 295376, 295377, 295378, 295379, 295380, 295381, 295382, 295383, 295384, 295385, 295386) c6( ) c7(T, aC, pf, acl, ht, aA, bB, n, fr, ci, q, Mg, av, py, aE, aT, hu, Gc, Jl, aW, ff, r, aF, si, en, g, wU, amF, bE, go, bD, vQ); #c1(GATA6) c2(NP_005248) c3(transcription factor GATA-6) c4(154379) c5(154380, 154381, 154382, 154383, 154384, 154385, 154386) c6( ) c7(bL, lD, T, aC, id, mr, aZ, acl, aD, qy, aA, bB, n, bzS, bzR, aj, ci, j, q, J, eA, eJ, dP, bzQ, av, jz, mh, aE, Mg, aT, iv, rO, HR, aKG, rz, ly, kl, d, s, vT, aW, Lh, r, bzP, aq, fe, kp, aF, Hu, g, as, LV, t, pb, lx, LB, aLi, ac, gY, bE, Qu, wk, ajd, m, bD, IC, KY, bzT, iu); #c1(GATAD1) c2(NP_066990) c3(GATA zinc finger domain-containing protein 1) c4(208065) c5(208066, 208067, 208068, 208069, 208070, 208071) c6( ) c7(nJ, bzU, mx); #c1(GATAD2A) c2(NP_001287875) c3(transcriptional repressor p66-alpha isoform 1) c4(113103) c5( ) c6( ) c7(bL); #c1(GATAD2A) c2(NP_060130) c3(transcriptional repressor P66-alpha isoform 2) c4(194315) c5(194316, 194317, 194318, 194319, 194320, 194321, 194322, 194323, 194324, 194325) c6( ) c7(bL); #c1(GATAD2A) c2(XP_005260013) c3(transcriptional repressor p66-alpha isoform X3) c4(276371, 276372, 276373) c5(276374, 276375, 276376, 276377, 276378, 276379, 276380, 276381, 276382, 276383, 276384) c6( ) c7(bL); #c1(GATAD2A) c2(XP_011526406) c3(transcriptional repressor p66-alpha isoform X2) c4(320673, 320674, 320675, 320676) c5(320677, 320678, 320679, 320680, 320681, 320682, 320683, 320684, 320685, 320686, 320687, 320688, 320689, 320690, 320691, 320692, 320693, 320694, 320695, 320696, 320697, 320698, 320699, 320700, 320701, 320702, 320703, 320704, 320705, 320706, 320707, 320708, 320709, 320710, 320711, 320712, 320713) c6( ) c7(bL); #c1(GATAD2A) c2(XP_011526409) c3(transcriptional repressor p66-alpha isoform X4) c4(320714) c5( ) c6( ) c7(bL); #c1(GATAD2A) c2(XP_011526410) c3(transcriptional repressor p66-alpha isoform X5) c4( ) c5(320715, 320716, 320717, 320718, 320719, 320720, 320721) c6( ) c7(bL); #c1(GATAD2B) c2(XP_006711532) c3(transcriptional repressor P66-beta isoform X1) c4(286062) c5(286063, 286064, 286065, 286066, 286067, 286068) c6( ) c7(ae, T, bE, aW, ds, iw, aT, bB, bzV, nA, WI, iK, bz, eA, ad); #c1(GATB) c2(NP_004555) c3(glutamyl-tRNA(Gln) amidotransferase subunit B, mitochondrial precursor) c4(147615) c5(147616, 147617, 147618, 147619, 147620, 147621) c6( ) c7(hb, cz); #c1(GATM) c2(NP_001473) c3(glycine amidinotransferase, mitochondrial precursor) c4(118010, 118011) c5(118012, 118013, 118014, 118015, 118016, 118017, 118018, 118019, 118020, 118021, 118022, 118023) c6( ) c7(zQ, bzW, E, PQ, ci, dy, bq, j, zP, ae, cd, ad, bc); #c1(GBA) c2(NP_001165282) c3(glucosylceramidase isoform 2) c4( ) c5(67551, 67552, 67553, 67554, 67555, 67556, 67557, 67558) c6(67559, 67560) c7(bzZ, T, fM, bzX, jh, fd, GC, xg, aR, bzY, oW, fn, yZ, K, an, af, ak, yr, aGf, dq, aEW, vU, aGe, Ji, U, Lq, IC, aen, sH, ek); #c1(GBA) c2(NP_001165283) c3(glucosylceramidase isoform 3 precursor) c4(67561, 67562, 67563) c5(67564, 67565, 67566, 67567, 67568, 67569, 67570, 67571, 67572, 67573, 67574, 67575, 67576, 67577, 67578, 67579, 67580, 67581, 67582, 67583) c6(67584, 67585) c7(bzZ, T, fM, bzX, jh, fd, GC, xg, aR, bzY, oW, fn, yZ, K, an, af, ak, yr, aGf, dq, aEW, vU, aGe, Ji, U, Lq, IC, aen, sH, ek); #c1(GBA) c2(XP_011507709) c3(glucosylceramidase isoform X1) c4(297739, 297740, 297741, 297742, 297743) c5(297744, 297745, 297746, 297747, 297748, 297749, 297750, 297751, 297752, 297753, 297754, 297755, 297756, 297757, 297758, 297759, 297760, 297761, 297762, 297763, 297764, 297765, 297766, 297767, 297768, 297769, 297770, 297771, 297772, 297773, 297774, 297775, 297776, 297777) c6(297778, 297779, 297780, 297781, 297782, 297783, 297784, 297785, 297786, 297787, 297788) c7(bzZ, T, fM, bzX, jh, fd, GC, xg, aR, bzY, oW, fn, yZ, K, an, af, ak, yr, aGf, dq, aEW, vU, aGe, Ji, U, Lq, IC, aen, sH, ek); #c1(GBA) c2(XP_011545232) c3(glucosylceramidase isoform X1) c4( ) c5(344019, 344020, 344021, 344022, 344023, 344024, 344025, 344026, 344027) c6( ) c7(bzZ, T, fM, bzX, jh, fd, GC, xg, aR, bzY, oW, fn, yZ, K, an, af, ak, yr, aGf, dq, aEW, vU, aGe, Ji, U, Lq, IC, aen, sH, ek); #c1(GBA2) c2(NP_065995) c3(non-lysosomal glucosylceramidase) c4(206648) c5(206649, 206650, 206651, 206652, 206653, 206654) c6( ) c7(vU, ky, bcS, aV, Y, Kk, Lp, Lq, K, bAa); #c1(GBA2) c2(XP_006716872) c3(non-lysosomal glucosylceramidase isoform X2) c4(290532) c5(290533, 290534, 290535, 290536, 290537, 290538) c6( ) c7(vU, ky, bcS, aV, Y, Kk, Lp, Lq, K, bAa); #c1(GBA2) c2(XP_011516274) c3(non-lysosomal glucosylceramidase isoform X6) c4( ) c5(309482) c6( ) c7(vU, ky, bcS, aV, Y, Kk, Lp, Lq, K, bAa); #c1(GBA2) c2(XP_011516275) c3(non-lysosomal glucosylceramidase isoform X7) c4(309483, 309484) c5(309485, 309486, 309487, 309488, 309489, 309490, 309491, 309492, 309493, 309494, 309495) c6( ) c7(vU, ky, bcS, aV, Y, Kk, Lp, Lq, K, bAa); #c1(GBAS) c2(NP_001189398) c3(protein NipSnap homolog 2 isoform 2) c4(79358) c5(79359, 79360, 79361, 79362, 79363, 79364) c6( ) c7(kC); #c1(GBAS) c2(NP_001474) c3(protein NipSnap homolog 2 isoform 1) c4(118024) c5(118025, 118026, 118027, 118028, 118029, 118030) c6( ) c7(kC); #c1(GBE1) c2(NP_000149) c3(1,4-alpha-glucan-branching enzyme) c4(3377, 3378, 3379, 3380, 3381) c5(3382, 3383, 3384, 3385, 3386, 3387, 3388, 3389, 3390, 3391, 3392, 3393, 3394, 3395, 3396, 3397, 3398, 3399, 3400, 3401, 3402, 3403, 3404, 3405, 3406, 3407, 3408, 3409, 3410, 3411, 3412, 3413, 3414, 3415, 3416, 3417, 3418, 3419, 3420, 3421, 3422, 3423, 3424, 3425, 3426, 3427, 3428, 3429, 3430, 3431, 3432, 3433, 3434, 3435, 3436, 3437, 3438, 3439, 3440, 3441, 3442, 3443, 3444, 3445, 3446, 3447, 3448, 3449, 3450, 3451, 3452, 3453, 3454, 3455, 3456, 3457, 3458, 3459, 3460, 3461, 3462, 3463, 3464, 3465, 3466, 3467, 3468, 3469, 3470, 3471, 3472, 3473, 3474, 3475, 3476, 3477, 3478, 3479, 3480, 3481, 3482, 3483, 3484, 3485, 3486, 3487, 3488, 3489, 3490, 3491, 3492, 3493, 3494, 3495, 3496, 3497, 3498, 3499, 3500, 3501, 3502, 3503, 3504, 3505, 3506, 3507, 3508, 3509, 3510, 3511, 3512, 3513, 3514, 3515, 3516, 3517, 3518, 3519, 3520, 3521, 3522, 3523, 3524, 3525, 3526, 3527, 3528, 3529, 3530, 3531, 3532, 3533, 3534, 3535, 3536, 3537, 3538) c6(3539) c7(bM, gk, cc, aOi, bAd, cb, Bw, hl, Ad, oj, al, bAe, v, ey, bAb, bAc, fq); #c1(GBF1) c2(NP_004184) c3(Golgi-specific brefeldin A-resistance guanine nucleotide exchange factor 1 isoform 1) c4(144163) c5(144164, 144165, 144166, 144167, 144168, 144169) c6( ) c7(fR, vi); #c1(GBGT1) c2(NP_001269558) c3(globoside alpha-1,3-N-acetylgalactosaminyltransferase 1 isoform 2) c4(101960) c5(101961, 101962, 101963, 101964, 101965, 101966, 101967, 101968, 101969, 101970) c6( ) c7(aA, hp, q, aF, r); #c1(GBGT1) c2(NP_001269561) c3(globoside alpha-1,3-N-acetylgalactosaminyltransferase 1 isoform 3) c4(101986, 101987) c5(101988, 101989, 101990, 101991, 101992, 101993, 101994, 101995, 101996, 101997, 101998) c6( ) c7(aA, hp, q, aF, r); #c1(GBGT1) c2(NP_068836) c3(globoside alpha-1,3-N-acetylgalactosaminyltransferase 1 isoform 1) c4(210851, 210852) c5(210853, 210854, 210855, 210856, 210857, 210858, 210859, 210860) c6( ) c7(aA, hp, q, aF, r); #c1(GBX1) c2(NP_001092304) c3(homeobox protein GBX-1) c4(39542) c5(39543, 39544, 39545, 39546, 39547, 39548, 39549) c6( ) c7(ae, bt, fq, ad); #c1(GBX2) c2(NP_001476) c3(homeobox protein GBX-2 isoform 1) c4(118031) c5(118032, 118033, 118034, 118035, 118036, 118037, 118038) c6( ) c7(T, eX, fq, eV, PJ, bt, ae, oc, ad); #c1(GC) c2(NP_000574) c3(vitamin D-binding protein isoform 1 precursor) c4( ) c5(12832, 12833, 12834, 12835, 12836) c6( ) c7(bL, bM, T, am, hl, eP, eW, al, jh, cz, bB, aj, dG, j, uu, v, pM, fr, V, qW, q, J, ad, ai, dP, kL, eA, av, F, xy, aE, oz, awa, aT, cU, hD, h, dL, afV, K, bq, an, aDp, ae, af, vO, bA, eu, eL, A, mR, aW, Y, vj, fc, r, yy, aPf, fe, Pd, Z, Ik, cM, bN, hq, D, sS, iQ, Dy, yE, bE, aZL, Be, at, QF, IS, cP, pK, y, B, ao, yv); #c1(GC) c2(NP_001191236) c3(vitamin D-binding protein isoform 3 precursor) c4(81177, 81178, 81179) c5(81180, 81181, 81182, 81183, 81184, 81185, 81186, 81187) c6( ) c7(bL, bM, T, am, hl, eP, eW, al, jh, cz, bB, aj, dG, j, uu, v, pM, fr, V, qW, q, J, ad, ai, dP, kL, eA, av, F, xy, aE, oz, awa, aT, cU, hD, h, dL, afV, K, bq, an, aDp, ae, af, vO, bA, eu, eL, A, mR, aW, Y, vj, fc, r, yy, aPf, fe, Pd, Z, Ik, cM, bN, hq, D, sS, iQ, Dy, yE, bE, aZL, Be, at, QF, IS, cP, pK, y, B, ao, yv); #c1(GC) c2(XP_006714240) c3(vitamin D-binding protein isoform X1) c4( ) c5(287659, 287660, 287661, 287662, 287663) c6( ) c7(bL, bM, T, am, hl, eP, eW, al, jh, cz, bB, aj, dG, j, uu, v, pM, fr, V, qW, q, J, ad, ai, dP, kL, eA, av, F, xy, aE, oz, awa, aT, cU, hD, h, dL, afV, K, bq, an, aDp, ae, af, vO, bA, eu, eL, A, mR, aW, Y, vj, fc, r, yy, aPf, fe, Pd, Z, Ik, cM, bN, hq, D, sS, iQ, Dy, yE, bE, aZL, Be, at, QF, IS, cP, pK, y, B, ao, yv); #c1(GCA) c2(NP_036330) c3(grancalcin) c4(173033) c5(173034, 173035, 173036, 173037, 173038, 173039) c6( ) c7(bM, T, I, eM, kq, r, cm, it, aiC, v, j, K, app, pw, he, V, Pr, q, WW, bAf); #c1(GCC1) c2(NP_078799) c3(GRIP and coiled-coil domain-containing protein 1) c4(215527) c5(215528, 215529, 215530, 215531, 215532, 215533) c6( ) c7(jb, cu, acl); #c1(GCDH) c2(NP_000150) c3(glutaryl-CoA dehydrogenase, mitochondrial isoform a precursor) c4(3540, 3541, 3542) c5(3543, 3544, 3545, 3546, 3547, 3548, 3549, 3550, 3551, 3552, 3553, 3554) c6( ) c7(mO, xT, awC, aU, n, dq, K, rL, dr); #c1(GCDH) c2(NP_039663) c3(glutaryl-CoA dehydrogenase, mitochondrial isoform b precursor) c4(177203) c5(177204, 177205, 177206, 177207, 177208, 177209, 177210, 177211, 177212, 177213, 177214, 177215) c6( ) c7(mO, xT, awC, aU, n, dq, K, rL, dr); #c1(GCFC2) c2(NP_003194) c3(GC-rich sequence DNA-binding factor 2 isoform 1) c4(136164, 136165, 136166) c5(136167, 136168, 136169, 136170, 136171, 136172, 136173, 136174, 136175, 136176, 136177, 136178) c6( ) c7(ajl, ci, yA, d, k); #c1(GCFC2) c2(XP_005264577) c3(GC-rich sequence DNA-binding factor 2 isoform X1) c4( ) c5(279108, 279109) c6( ) c7(ajl, ci, yA, d, k); #c1(GCFC2) c2(XP_011531376) c3(GC-rich sequence DNA-binding factor 2 isoform X2) c4( ) c5(327377) c6( ) c7(ajl, ci, yA, d, k); #c1(GCFC2) c2(XP_011531377) c3(GC-rich sequence DNA-binding factor 2 isoform X3) c4( ) c5(327378, 327379, 327380, 327381, 327382) c6( ) c7(ajl, ci, yA, d, k); #c1(GCG) c2(NP_002045) c3(glucagon preproprotein) c4(123595, 123596, 123597, 123598, 123599, 123600, 123601) c5(123602, 123603, 123604, 123605, 123606, 123607, 123608, 123609, 123610, 123611, 123612, 123613, 123614, 123615, 123616, 123617, 123618, 123619, 123620, 123621, 123622, 123623, 123624, 123625, 123626, 123627, 123628, 123629, 123630, 123631, 123632, 123633, 123634, 123635, 123636, 123637, 123638, 123639, 123640, 123641, 123642, 123643, 123644, 123645, 123646, 123647, 123648, 123649, 123650, 123651, 123652, 123653, 123654, 123655, 123656, 123657, 123658, 123659, 123660, 123661, 123662, 123663, 123664, 123665, 123666, 123667, 123668, 123669, 123670, 123671, 123672, 123673, 123674, 123675, 123676, 123677, 123678, 123679, 123680, 123681, 123682, 123683, 123684, 123685, 123686, 123687, 123688, 123689, 123690, 123691, 123692, 123693, 123694, 123695, 123696, 123697, 123698, 123699, 123700, 123701, 123702, 123703, 123704, 123705, 123706, 123707, 123708, 123709, 123710, 123711, 123712, 123713, 123714, 123715, 123716, 123717, 123718, 123719, 123720, 123721, 123722, 123723, 123724, 123725, 123726, 123727, 123728, 123729, 123730, 123731, 123732, 123733, 123734, 123735, 123736, 123737, 123738, 123739, 123740, 123741, 123742, 123743, 123744, 123745, 123746, 123747, 123748, 123749, 123750, 123751, 123752, 123753, 123754, 123755, 123756, 123757, 123758, 123759, 123760, 123761, 123762, 123763, 123764, 123765, 123766, 123767, 123768, 123769, 123770, 123771, 123772, 123773, 123774, 123775, 123776, 123777, 123778, 123779, 123780, 123781, 123782, 123783, 123784, 123785, 123786, 123787, 123788, 123789, 123790, 123791, 123792, 123793, 123794, 123795, 123796, 123797, 123798, 123799, 123800, 123801, 123802, 123803, 123804, 123805, 123806, 123807, 123808, 123809, 123810, 123811, 123812, 123813, 123814, 123815, 123816, 123817, 123818, 123819, 123820, 123821, 123822, 123823, 123824, 123825, 123826, 123827, 123828, 123829, 123830, 123831, 123832, 123833, 123834, 123835, 123836, 123837, 123838, 123839, 123840, 123841, 123842, 123843, 123844, 123845, 123846, 123847, 123848, 123849, 123850, 123851, 123852, 123853, 123854, 123855, 123856, 123857, 123858, 123859, 123860, 123861, 123862, 123863, 123864, 123865, 123866, 123867, 123868, 123869, 123870, 123871, 123872, 123873, 123874, 123875, 123876, 123877, 123878, 123879, 123880, 123881, 123882, 123883, 123884, 123885, 123886, 123887, 123888, 123889, 123890, 123891, 123892, 123893, 123894, 123895, 123896, 123897, 123898, 123899, 123900, 123901, 123902, 123903, 123904, 123905, 123906, 123907, 123908, 123909, 123910, 123911, 123912, 123913, 123914, 123915, 123916, 123917, 123918, 123919, 123920, 123921, 123922, 123923, 123924, 123925, 123926, 123927, 123928, 123929, 123930, 123931, 123932, 123933, 123934, 123935, 123936, 123937, 123938, 123939, 123940, 123941, 123942, 123943, 123944, 123945, 123946, 123947, 123948, 123949, 123950, 123951, 123952, 123953, 123954, 123955, 123956, 123957, 123958, 123959, 123960, 123961, 123962, 123963, 123964, 123965, 123966, 123967, 123968, 123969, 123970, 123971, 123972, 123973, 123974, 123975, 123976, 123977, 123978, 123979, 123980, 123981, 123982, 123983, 123984, 123985, 123986, 123987, 123988, 123989, 123990, 123991, 123992, 123993, 123994, 123995, 123996, 123997, 123998, 123999, 124000, 124001, 124002, 124003, 124004, 124005, 124006, 124007, 124008, 124009, 124010, 124011, 124012, 124013, 124014, 124015, 124016, 124017, 124018, 124019, 124020, 124021, 124022, 124023, 124024, 124025, 124026, 124027, 124028, 124029, 124030, 124031, 124032, 124033, 124034, 124035, 124036, 124037, 124038, 124039, 124040, 124041, 124042, 124043, 124044, 124045, 124046, 124047, 124048, 124049, 124050, 124051, 124052) c6(124053, 124054, 124055, 124056, 124057) c7(bL, T, dD, dA, pY, ea, e, al, bAg, aw, cz, bB, cQ, dG, j, aj, v, eq, nS, cd, J, ad, ip, mj, aE, iX, pX, bAi, ju, aT, kf, vH, blg, bci, jy, K, ji, dQ, fb, XI, ae, aPB, hm, Qe, eG, A, qZ, De, aW, baT, QM, hl, ap, cr, yc, dq, kp, app, g, Sm, cm, KM, bAh, iO, gk, bE, bAj, bo, Ji, mx, U, fP, gZ, QF, mf, aS, aJQ, ei, ra, X, VB); #c1(GCGR) c2(XP_006722340) c3(glucagon receptor isoform X1) c4(294682) c5(294683, 294684, 294685, 294686, 294687, 294688) c6( ) c7(bL, qa, mj, eR, pX, cz, ahJ, blg, mf, dG, aj, v, J, bJ); #c1(GCH1) c2(NP_001019195) c3(GTP cyclohydrolase 1 isoform 1) c4(27601) c5(27602, 27603, 27604, 27605, 27606, 27607, 27608, 27609, 27610, 27611, 27612, 27613, 27614, 27615, 27616, 27617, 27618, 27619, 27620, 27621, 27622, 27623, 27624, 27625, 27626, 27627, 27628, 27629, 27630, 27631, 27632, 27633, 27634, 27635, 27636, 27637, 27638, 27639, 27640, 27641, 27642, 27643, 27644, 27645, 27646, 27647, 27648, 27649, 27650, 27651, 27652, 27653, 27654, 27655, 27656, 27657, 27658, 27659, 27660, 27661, 27662, 27663, 27664, 27665, 27666, 27667, 27668, 27669, 27670, 27671, 27672, 27673, 27674, 27675, 27676, 27677, 27678, 27679, 27680, 27681, 27682, 27683, 27684, 27685, 27686, 27687, 27688, 27689, 27690, 27691, 27692, 27693, 27694, 27695, 27696, 27697, 27698, 27699, 27700, 27701, 27702) c6(27703, 27704, 27705, 27706, 27707) c7(T, bfb, dD, qX, Pt, qb, ea, yk, e, yY, bAp, bO, cz, aNN, cR, oR, dG, j, Sv, uu, aj, eq, acU, aWT, bAo, ai, J, bAt, aR, ahR, HF, bgk, aji, DK, hb, M, Wk, aU, h, bK, Wm, bAm, bAr, an, bAI, Gc, aTm, Wi, yL, dN, HL, gu, cm, xw, dr, bN, cv, bAn, bAs, yf, cA, HP, mx, VU, uJ, aS, bAq, aks, aCS, bAk, aWX, WI, y, afX, rf); #c1(GCH1) c2(NP_001019242) c3(GTP cyclohydrolase 1 isoform 3) c4(27708) c5(27709, 27710, 27711, 27712, 27713, 27714, 27715, 27716) c6(27717, 27718) c7(T, bfb, dD, qX, Pt, qb, ea, yk, e, yY, bAp, bO, cz, aNN, cR, oR, dG, j, Sv, uu, aj, eq, acU, aWT, bAo, ai, J, bAt, aR, ahR, HF, bgk, aji, DK, hb, M, Wk, aU, h, bK, Wm, bAm, bAr, an, bAI, Gc, aTm, Wi, yL, dN, HL, gu, cm, xw, dr, bN, cv, bAn, bAs, yf, cA, HP, mx, VU, uJ, aS, bAq, aks, aCS, bAk, aWX, WI, y, afX, rf); #c1(GCH1) c2(XP_005267587) c3(GTP cyclohydrolase 1 isoform X1) c4(281033, 281034) c5(281035, 281036, 281037, 281038, 281039, 281040, 281041, 281042, 281043, 281044, 281045, 281046, 281047, 281048, 281049, 281050) c6(281051, 281052, 281053, 281054) c7(T, bfb, dD, qX, Pt, qb, ea, yk, e, yY, bAp, bO, cz, aNN, cR, oR, dG, j, Sv, uu, aj, eq, acU, aWT, bAo, ai, J, bAt, aR, ahR, HF, bgk, aji, DK, hb, M, Wk, aU, h, bK, Wm, bAm, bAr, an, bAI, Gc, aTm, Wi, yL, dN, HL, gu, cm, xw, dr, bN, cv, bAn, bAs, yf, cA, HP, mx, VU, uJ, aS, bAq, aks, aCS, bAk, aWX, Wl, y, afX, rf); #c1(GCHFR) c2(NP_005249) c3(GTP cyclohydrolase 1 feedback regulatory protein) c4(154387) c5(154388, 154389, 154390, 154391, 154392, 154393) c6( ) c7(hl, acU, aR, hX, hb, dV, aU, af, A, Y, eH, Pg, eZ, as, eF, cm, bN, kT, WO, ac, WP, U, xg, ek); #c1(GCK) c2(NP_000153) c3(glucokinase isoform 1) c4(3555) c5(3556, 3557, 3558, 3559, 3560, 3561) c6( ) c7(bL, aC, jv, dD, eR, yG, bAu, bAg, cz, cQ, dG, j, fu, aj, v, eq, GS, add, J, md, aPW, mj, mh, xE, aE, bza, ep, jy, K, bq, af, yo, A, wr, IR, bAv, fc, eZ, fQ, dq, aq, EZ, bAw, mb, dr, qa, mi, akm, bo, mg, mf, dy, cP, ei, y, B, BA, yv); #c1(GCK) c2(NP_277042) c3(glucokinase isoform 2) c4(228793) c5(228794, 228795, 228796, 228797, 228798, 228799) c6( ) c7(bL, aC, jv, dD, eR, yG, bAu, bAg, cz, cQ, dG, j, fu, aj, v, eq, GS, add, J, md, aPW, mj, mh, xE, aE, bza, ep, jy, K, bq, af, yo, A, wr, IR, bAv, fc, eZ, fQ, dq, aq, EZ, bAw, mb, dr, qa, mi, akm, bo, mg, mf, dy, cP, ei, y, B, BA, yv); #c1(GCK) c2(NP_277043) c3(glucokinase isoform 3) c4(228800) c5(228801, 228802, 228803, 228804, 228805, 228806) c6( ) c7(bL, aC, jv, dD, eR, yG, bAu, bAg, cz, cQ, dG, j, fu, aj, v, eq, GS, add, J, md, aPW, mj, mh, xE, aE, bza, ep, jy, K, bq, af, yo, A, wr, IR, bAv, fc, eZ, fQ, dq, aq, EZ, bAw, mb, dr, qa, mi, akm, bo, mg, mf, dy, cP, ei, y, B, BA, yv); #c1(GCKR) c2(NP_001477) c3(glucokinase regulatory protein) c4(118039, 118040) c5(118041, 118042, 118043, 118044, 118045, 118046, 118047) c6( ) c7(bL, nD, dD, eR, e, aw, bAg, qQ, aj, dG, j, v, eq, aY, J, mj, aE, M, h, sj, nn, fc, fe, iV, ac, cO, mg, dy, cP, ei); #c1(GCKR) c2(XP_011531064) c3(glucokinase regulatory protein isoform X2) c4( ) c5(327030, 327031, 327032, 327033, 327034) c6( ) c7(bL, nD, dD, eR, e, aw, bAg, qQ, aj, dG, j, v, eq, aY, J, mj, aE, M, h, sj, nn, fc, fe, iV, ac, cO, mg, dy, cP, ei); #c1(GCLC) c2(NP_001489) c3(glutamate-cysteine ligase catalytic subunit isoform a) c4(118157) c5(118158, 118159, 118160, 118161, 118162, 118163) c6( ) c7(bM, T, dD, eR, e, aw, cz, bB, fd, arl, gA, j, fu, qf, eq, q, ad, av, ft, ib, aE, bAy, aT, ab, K, he, ae, rL, aa, A, d, B, anv, nO, aW, bAx, r, aq, S, g, as, t, cm, bz, UZ, Hp, ck, ac, eM, bE, uy, bo, at, bzm, m, fD, y, bt, X, ao); #c1(GCM1) c2(NP_003634) c3(chorion-specific transcription factor GCMa) c4(139760) c5(139761, 139762, 139763, 139764, 139765, 139766, 139767) c6( ) c7(nJ, HI, jv, e, cz, eb, Io, ey, uC, af); #c1(GCM2) c2(XP_011513293) c3(chorion-specific transcription factor GCMb isoform X1) c4(305579) c5(305580, 305581, 305582, 305583, 305584, 305585) c6( ) c7(HI, T, s, OX, vj, Lm, wo, iS, azg, bAz); #c1(GCN1L1) c2(NP_006827) c3(translational activator GCN1) c4(168482) c5(168483, 168484, 168485, 168486, 168487, 168488) c6( ) c7(jf, pi, fr); #c1(GCNT1) c2(XP_006717115) c3(beta-1,3-galactosyl-O-glycosyl-glycoprotein beta-1,6-N-acetylglucosaminyltransferase isoform X1) c4(290734) c5(290735, 290736, 290737, 290738, 290739, 290740, 290741, 290742, 290743, 290744, 290745, 290746, 290747, 290748, 290749, 290750, 290751, 290752) c6( ) c7(ae, aC, B, aE, bE, oe, r, cz, n, Ld, ci, g, bq, bz, q, ad); #c1(GCNT2) c2(NP_001482) c3(N-acetyllactosaminide beta-1,6-N-acetylglucosaminyl-transferase isoform B) c4(118056) c5(118057, 118058, 118059, 118060, 118061, 118062) c6( ) c7(lD, bM, T, xS, ea, zs, bAH, e, if, Av, fd, bB, ame, qj, ci, bh, aGX, mF, NF, oB, AW, xy, vV, aE, il, M, bAJ, dV, BZ, K, hu, eL, bc, aiJ, ly, yo, Jl, aW, WE, az, asD, nY, UJ, hN, YG, g, as, eE, eF, cm, bw, iP, aUF, eM, mx, dW, wx, bAD, m, bpy, nD, btc, dD, gU, vl, bAB, aw, ht, aFc, ez, n, amk, aj, fr, nA, uE, qN, Za, qW, ai, br, eW, KL, Vs, bAK, ft, pe, wG, ql, Bj, h, eV, bxi, dL, ey, hB, SD, on, dx, A, mR, bAG, bAF, aRL, fe, aq, kp, mo, boD, Ld, lx, jq, bAL, Qy, bP, dB, w, Qu, aZL, In, FV, bm, hR, pg, Xa, anx, it, B, bL, fM, dA, kA, bkY, hx, jx, eX, aA, cz, zN, hz, j, bAM, wy, V, q, J, o, eA, cF, DK, hb, aWc, BJ, bza, Id, Vr, aT, Tj, bau, ae, jf, bAE, hM, kl, PK, gP, s, iU, Y, r, Io, bAA, en, t, nC, iK, pb, dS, ck, cT, sS, iM, iQ, hA, ig, mG, dh, gX, hO, wR, dy, im, zu, bt, aps, ars, ao, aaT, ha, Me, jh, uu, jE, fu, eq, hF, bAI, aGW, ad, BY, qC, hX, av, bAC, F, bnC, wD, vJ, ds, alg, qh, oW, io, hD, IQ, vO, Yi, uQ, d, je, BO, azX, atA, yx, aFE, ff, eZ, CF, Ej, aF, xH, hp, EZ, iV, bz, dr, LB, bF, DT, eU, pc, bE, Lj, z, aCI, dX, aS, XO, bC, oQ, be, y, WX, iu, hv, pC); #c1(GCNT2) c2(NP_663630) c3(N-acetyllactosaminide beta-1,6-N-acetylglucosaminyl-transferase isoform C) c4(241375) c5(241376, 241377, 241378, 241379, 241380, 241381) c6( ) c7(lD, bM, T, xS, ea, zs, bAH, e, if, Av, fd, bB, ame, qj, ci, bh, aGX, mF, NF, oB, AW, xy, vV, aE, il, M, bAJ, dV, BZ, K, hu, eL, bc, aiJ, ly, yo, Jl, aW, WE, az, asD, nY, UJ, hN, YG, g, as, eE, eF, cm, bw, iP, aUF, eM, mx, dW, wx, bAD, m, bpy, nD, btc, dD, gU, vl, bAB, aw, ht, aFc, ez, n, amk, aj, fr, nA, uE, qN, Za, qW, ai, br, eW, KL, Vs, bAK, ft, pe, wG, ql, Bj, h, eV, bxi, dL, ey, hB, SD, on, dx, A, mR, bAG, bAF, aRL, fe, aq, kp, mo, boD, Ld, lx, jq, bAL, Qy, bP, dB, w, Qu, aZL, In, FV, bm, hR, pg, Xa, anx, it, B, bL, fM, dA, kA, bkY, hx, jx, eX, aA, cz, zN, hz, j, bAM, wy, V, q, J, o, eA, cF, DK, hb, aWc, BJ, bza, Id, Vr, aT, Tj, bau, ae, jf, bAE, hM, kl, PK, gP, s, iU, Y, r, Io, bAA, en, t, nC, iK, pb, dS, ck, cT, sS, iM, iQ, hA, ig, mG, dh, gX, hO, wR, dy, im, zu, bt, aps, ars, ao, aaT, ha, Me, jh, uu, jE, fu, eq, hF, bAI, aGW, ad, BY, qC, hX, av, bAC, F, bnC, wD, vJ, ds, alg, qh, oW, io, hD, IQ, vO, Yi, uQ, d, je, BO, azX, atA, yx, aFE, ff, eZ, CF, Ej, aF, xH, hp, EZ, iV, bz, dr, LB, bF, DT, eU, pc, bE, Lj, z, aCI, dX, aS, XO, bC, oQ, be, y, WX, iu, hv, PC); #c1(GCNT2) c2(XP_006715115) c3(N-acetyllactosaminide beta-1,6-N-acetylglucosaminyl-transferase isoform X1) c4(288734) c5(288735, 288736, 288737, 288738, 288739, 288740, 288741, 288742, 288743, 288744) c6( ) c7(lD, bM, T, xS, ea, zs, bAH, e, if, Av, fd, bB, ame, qj, ci, bh, aGX, mF, NF, oB, AW, xy, vV, aE, il, M, bAJ, dV, BZ, K, hu, eL, bc, aiJ, ly, yo, Jl, aW, WE, az, asD, nY, UJ, hN, YG, g, as, eE, eF, cm, bw, iP, aUF, eM, mx, dW, wx, bAD, m, bpy, nD, btc, dD, gU, vl, bAB, aw, ht, aFc, ez, n, amk, aj, fr, nA, uE, qN, Za, qW, ai, br, eW, KL, Vs, bAK, ft, pe, wG, ql, Bj, h, eV, bxi, dL, ey, hB, SD, on, dx, A, mR, bAG, bAF, aRL, fe, aq, kp, mo, boD, Ld, lx, jq, bAL, Qy, bP, dB, w, Qu, aZL, In, FV, bm, hR, pg, Xa, anx, it, B, bL, fM, dA, kA, bkY, hx, jx, eX, aA, cz, zN, hz, j, bAM, wy, V, q, J, o, eA, cF, DK, hb, aWc, BJ, bza, Id, Vr, aT, Tj, bau, ae, jf, bAE, hM, kl, PK, gP, s, iU, Y, r, Io, bAA, en, t, nC, iK, pb, dS, ck, cT, sS, iM, iQ, hA, ig, mG, dh, gX, hO, wR, dy, im, zu, bt, aps, ars, ao, aaT, ha, Me, jh, uu, jE, fu, eq, hF, bAI, aGW, ad, BY, qC, hX, av, bAC, F, bnC, wD, vJ, ds, alg, qh, oW, io, hD, IQ, vO, Yi, uQ, d, je, BO, azX, atA, yx, aFE, ff, eZ, CF, Ej, aF, xH, hp, EZ, iV, bz, dr, LB, bF, DT, eU, pc, bE, Lj, z, aCI, dX, aS, XO, bC, oQ, be, y, WX, iu, hv, pC); #c1(GCNT2) c2(XP_011512768) c3(N-acetyllactosaminide beta-1,6-N-acetylglucosaminyl-transferase isoform X5) c4(303846, 303847) c5(303848, 303849, 303850, 303851, 303852, 303853) c6( ) c7(lD, bM, T, xS, ea, zs, bAH, e, if, Av, fd, bB, ame, qj, ci, bh, aGX, mF, NF, oB, AW, xy, vV, aE, il, M, bAJ, dV, BZ, K, hu, eL, bc, aiJ, ly, yo, Jl, aW, WE, az, asD, nY, UJ, hN, YG, g, as, eE, eF, cm, bw, iP, aUF, eM, mx, dW, wx, bAD, m, bpy, nD, btc, dD, gU, vl, bAB, aw, ht, aFc, ez, n, amk, aj, fr, nA, uE, qN, Za, qW, ai, br, eW, KL, Vs, bAK, ft, pe, wG, ql, Bj, h, eV, bxi, dL, ey, hB, SD, on, dx, A, mR, bAG, bAF, aRL, fe, aq, kp, mo, boD, Ld, lx, jq, bAL, Qy, bP, dB, w, Qu, aZL, In, FV, bm, hR, pg, Xa, anx, it, B, bL, fM, dA, kA, bkY, hx, jx, eX, aA, cz, zN, hz, j, bAM, wy, V, q, J, o, eA, cF, DK, hb, aWc, BJ, bza, Id, Vr, aT, Tj, bau, ae, jf, bAE, hM, kl, PK, gP, s, iU, Y, r, Io, bAA, en, t, nC, iK, pb, dS, ck, cT, sS, iM, iQ, hA, ig, mG, dh, gX, hO, wR, dy, im, zu, bt, aps, ars, ao, aaT, ha, Me, jh, uu, jE, fu, eq, hF, bAI, aGW, ad, BY, qC, hX, av, bAC, F, bnC, wD, vJ, ds, alg, qh, oW, io, hD, IQ, vO, Yi, uQ, d, je, BO, azX, atA, yx, aFE, ff, eZ, CF, Ej, aF, xH, hp, EZ, iV, bz, dr, LB, bF, DT, eU, pc, bE, Lj, z, aCI, dX, aS, XO, bC, oQ, be, y, WX, iu, hv, pC); #c1(GCNT2) c2(XP_011512770) c3(N-acetyllactosaminide beta-1,6-N-acetylglucosaminyl-transferase isoform X7) c4( ) c5(303854, 303855, 303856, 303857, 303858, 303859) c6( ) c7(lD, bM, T, xS, ea, zs, bAH, e, if, Av, fd, bB, ame, qj, ci, bh, aGX, mF, NF, oB, AW, xy, vV, aE, il, M, bAJ, dV, BZ, K, hu, eL, bc, aiJ, ly, yo, Jl, aW, WE, az, asD, nY, UJ, hN, YG, g, as, eE, eF, cm, bw, iP, aUF, eM, mx, dW, wx, bAD, m, bpy, nD, btc, dD, gU, vl, bAB, aw, ht, aFc, ez, n, amk, aj, fr, nA, uE, qN, Za, qW, ai, br, eW, KL, Vs, bAK, ft, pe, wG, ql, Bj, h, eV, bxi, dL, ey, hB, SD, on, dx, A, mR, bAG, bAF, aRL, fe, aq, kp, mo, boD, Ld, lx, jq, bAL, Qy, bP, dB, w, Qu, aZL, In, FV, bm, hR, pg, Xa, anx, it, B, bL, fM, dA, kA, bkY, hx, jx, eX, aA, cz, zN, hz, j, bAM, wy, V, q, J, o, eA, cF, DK, hb, aWc, BJ, bza, Id, Vr, aT, Tj, bau, ae, jf, bAE, hM, kl, PK, gP, s, iU, Y, r, Io, bAA, en, t, nC, iK, pb, dS, ck, cT, sS, iM, iQ, hA, ig, mG, dh, gX, hO, wR, dy, im, zu, bt, aps, ars, ao, aaT, ha, Me, jh, uu, jE, fu, eq, hF, bAI, aGW, ad, BY, qC, hX, av, bAC, F, bnC, wD, vJ, ds, alg, qh, oW, io, hD, IQ, vO, Yi, uQ, d, je, BO, azX, atA, yx, aFE, ff, eZ, CF, Ej, aF, xH, hp, EZ, iV, bz, dr, LB, bF, DT, eU, pc, bE, Lj, z, aCI, dX, aS, XO, bC, oQ, be, y, WX, iu, hv, pC); #c1(GCNT3) c2(NP_004742) c3(beta-1,3-galactosyl-O-glycosyl-glycoprotein beta-1,6-N-acetylglucosaminyltransferase 3) c4(149193, 149194, 149195, 149196) c5(149197, 149198, 149199, 149200, 149201, 149202, 149203, 149204, 149205, 149206, 149207, 149208, 149209, 149210, 149211, 149212, 149213, 149214, 149215, 149216, 149217, 149218, 149219, 149220, 149221, 149222, 149223, 149224) c6( ) c7(T, aE, bE, r, bB, q, X); #c1(GCNT7) c2(NP_542182) c3(beta-1,3-galactosyl-O-glycosyl-glycoprotein beta-1,6-N-acetylglucosaminyltransferase 7) c4(232248) c5(232249, 232250, 232251, 232252, 232253, 232254) c6( ) c7(q, aE, r); #c1(GCOM1) c2(NP_001018100) c3(GRINL1A combined protein isoform 1) c4(27327) c5(27328, 27329, 27330, 27331, 27332, 27333) c6( ) c7(ae, j, K, ad); #c1(GCOM1) c2(NP_001018101) c3(GRINL1A combined protein isoform 2) c4(27334) c5(27335, 27336, 27337, 27338, 27339, 27340) c6( ) c7(ae, j, K, ad); #c1(GCSAM) c2(NP_001177188) c3(germinal center-associated signaling and motility protein isoform 3) c4(72501) c5(72502, 72503, 72504, 72505, 72506, 72507) c6( ) c7(fM, eX, bO, jh, fr, eW, eA, cU, eV, bK, eG, Uf, d, ff, en, cA, bE, eD, hO, Lq, R, B, hS); #c1(GCSAM) c2(NP_001177189) c3(germinal center-associated signaling and motility protein isoform 4) c4(72508) c5(72509, 72510, 72511, 72512, 72513, 72514) c6( ) c7(fM, eX, bO, jh, fr, eW, eA, cU, eV, bK, eG, Uf, d, ff, en, cA, bE, eD, hO, Lq, R, B, hS); #c1(GCSAM) c2(NP_689998) c3(germinal center-associated signaling and motility protein isoform 1) c4(244681) c5(244682, 244683, 244684, 244685, 244686, 244687) c6( ) c7(fM, eX, bO, jh, fr, eW, eA, cU, eV, bK, eG, Uf, d, ff, en, cA, bE, eD, hO, Lq, R, B, hS); #c1(GCSAM) c2(XP_005247329) c3(germinal center-associated signaling and motility protein isoform X4) c4( ) c5(267798) c6( ) c7(fM, eX, bO, jh, fr, eW, eA, cU, eV, bK, eG, Uf, d, ff, en, cA, bE, eD, hO, Lq, R, B, hS); #c1(GCSAML) c2(NP_001268764) c3(germinal center-associated signaling and motility-like protein isoform b) c4(100223) c5(100224, 100225, 100226, 100227, 100228, 100229, 100230, 100231, 100232, 100233, 100234, 100235, 100236) c6( ) c7(Ea); #c1(GCSAML) c2(NP_660321) c3(germinal center-associated signaling and motility-like protein isoform a) c4(240899, 240900) c5(240901, 240902, 240903, 240904, 240905, 240906, 240907, 240908, 240909, 240910, 240911, 240912) c6( ) c7(Ea); #c1(GCSAML) c2(XP_011542402) c3(germinal center-associated signaling and motility-like protein isoform X3) c4(340940) c5(340941, 340942, 340943, 340944, 340945, 340946, 340947) c6( ) c7(Ea); #c1(GCSH) c2(NP_004474) c3(glycine cleavage system H protein, mitochondrial precursor) c4(146689) c5(146690, 146691, 146692, 146693, 146694, 146695) c6( ) c7(y, bAN, UZ, jh); #c1(GDA) c2(NP_001229434) c3(guanine deaminase isoform a) c4(84421, 84422) c5(84423, 84424, 84425, 84426, 84427, 84428, 84429, 84430, 84431, 84432, 84433, 84434) c6( ) c7(bAO, zP, zQ, ci, c); #c1(GDA) c2(NP_001229436) c3(guanine deaminase isoform c) c4(84435, 84436) c5(84437, 84438, 84439, 84440, 84441) c6( ) c7(bAO, zP, zQ, ci, c); #c1(GDA) c2(NP_004284) c3(guanine deaminase isoform b) c4(144835) c5(144836, 144837, 144838, 144839, 144840, 144841, 144842, 144843, 144844, 144845, 144846) c6( ) c7(bAO, zP, zQ, ci, c); #c1(GDA) c2(XP_011517520) c3(guanine deaminase isoform X5) c4(311307) c5( ) c6( ) c7(bAO, zP, zQ, ci, c); #c1(GDA) c2(XP_011517522) c3(guanine deaminase isoform X7) c4(311308) c5(311309, 311310, 311311, 311312, 311313, 311314) c6( ) c7(bAO, zP, zQ, ci, c); #c1(GDA) c2(XP_011517525) c3(guanine deaminase isoform X9) c4( ) c5(311315, 311316, 311317, 311318, 311319, 311320, 311321, 311322, 311323, 311324, 311325, 311326) c6( ) c7(bAO, zP, zQ, ci, c); #c1(GDAP1) c2(NP_001035808) c3(ganglioside-induced differentiation-associated protein 1 isoform b) c4( ) c5(33137, 33138, 33139, 33140, 33141) c6( ) c7(bAQ, Rz, ob, Pt, aw, Jz, fu, bX, K, bU, bAP, bT, bhi, bAS, cm, kC, ql, U, bxk, bAR, y, aof); #c1(GDAP1) c2(NP_061845) c3(ganglioside-induced differentiation-associated protein 1 isoform a) c4(200745, 200746) c5(200747, 200748, 200749, 200750, 200751, 200752, 200753) c6( ) c7(bAQ, Rz, ob, Pt, aw, Jz, fu, bX, K, bU, bAP, bT, bhi, bAS, cm, kC, ql, U, bxk, bAR, y, aof); #c1(GDE1) c2(NP_057725) c3(glycerophosphodiester phosphodiesterase 1) c4(192526) c5(192527, 192528, 192529, 192530, 192531, 192532) c6( ) c7(oO, T, jv, xo, aA, fd, n, axk, Gn, C, eA, br, ad, aoH, fX, py, aT, xp, ae, yo, mR, nO, aW, oV, ff, eH, r, aq, aF, en, g, eF, t, iV, pm, bw, ck, eM, cj, hR, m, rA, B); #c1(GDF1) c2(NP_001483) c3(embryonic growth/differentiation factor 1 precursor) c4(118063) c5(118064, 118065, 118066, 118067, 118068, 118069) c6( ) c7(md, aLi, sS, hd, BT, nB, bAT, aW, Lf, bwE, aT, cj, aLn, bu, bD, bz, zn); #c1(GDF10) c2(NP_004953) c3(bone morphogenetic protein 38 precursor) c4(151426, 151427) c5(151428, 151429, 151430, 151431, 151432, 151433, 151434, 151435) c6(151436, 151437) c7(qJ, av, T, eG, ib, x, eM, qt, aw, eH, NT, aT, j, K, eF, bz); #c1(GDF10) c2(XP_006717825) c3(bone morphogenetic protein 38 isoform X1) c4( ) c5(291369, 291370, 291371, 291372, 291373, 291374, 291375, 291376) c6(291377, 291378) c7(qJ, av, T, eG, ib, x, eM, qt, aw, eH, NT, aT, j, K, eF, bz); #c1(GDF11) c2(XP_006719257) c3(growth/differentiation factor 11 isoform X1) c4(292356, 292357) c5(292358, 292359, 292360, 292361, 292362, 292363, 292364, 292365, 292366, 292367, 292368, 292369) c6( ) c7(Lk, T, q, Ll, r); #c1(GDF15) c2(NP_004855) c3(growth/differentiation factor 15 precursor) c4(150324) c5(150325, 150326, 150327, 150328, 150329, 150330, 150331, 150332, 150333, 150334) c6( ) c7(lD, T, aC, aiR, ea, if, e, bB, ci, aE, K, eL, avn, cp, Qe, hm, ly, aW, pL, aVc, eM, nB, wx, m, pw, P, dD, aw, n, aj, qN, cd, Yc, dL, KV, aq, lx, dB, kz, at, B, bL, kA, jx, aA, cR, cz, v, j, q, J, eA, aT, cy, ae, af, s, Y, r, en, t, iK, BU, ac, gX, LS, awY, yv, gx, Fb, eq, Fc, ad, BY, av, hd, sO, NM, d, ff, yy, aF, bz, qa, pu, bE, y, iu); #c1(GDF2) c2(NP_057288) c3(growth/differentiation factor 2 preproprotein) c4(189877) c5(189878, 189879, 189880, 189881, 189882, 189883) c6( ) c7(Cj, aE, aW, oe, al, bAU, eH, aT, cy, he, m, eF, t, Cb, ae, B, ad, wC); #c1(GDF3) c2(NP_065685) c3(growth/differentiation factor 3 precursor) c4(204829) c5(204830, 204831, 204832, 204833, 204834, 204835) c6( ) c7(bL, kn, bAV, vT, bAZ, aW, wu, Lh, aT, Hn, v, Lb, ci, wm, bAW, KY, bAX, bAY); #c1(GDF5) c2(XP_011527378) c3(growth/differentiation factor 5 isoform X1) c4(321984) c5(321985, 321986, 321987, 321988, 321989, 321990, 321991, 321992, 321993, 321994, 321995, 321996, 321997, 321998, 321999, 322000, 322001, 322002, 322003, 322004, 322005, 322006, 322007, 322008, 322009, 322010, 322011, 322012, 322013, 322014, 322015, 322016, 322017, 322018, 322019, 322020, 322021, 322022, 322023, 322024, 322025, 322026, 322027, 322028, 322029, 322030, 322031, 322032, 322033, 322034, 322035, 322036, 322037, 322038, 322039, 322040, 322041, 322042, 322043, 322044, 322045, 322046, 322047, 322048, 322049, 322050, 322051, 322052, 322053, 322054, 322055, 322056, 322057, 322058, 322059, 322060, 322061, 322062, 322063, 322064, 322065, 322066, 322067, 322068, 322069, 322070, 322071, 322072, 322073, 322074, 322075, 322076, 322077, 322078, 322079, 322080, 322081, 322082, 322083, 322084, 322085, 322086) c6( ) c7(atx, rV, bBb, zU, bBe, afb, bBf, btl, aT, bBh, bBa, bBc, aW, bBd, Qx, atb, aDQ, eM, In, ro, aDR, y, VK, bBg); #c1(GDF6) c2(NP_001001557) c3(growth/differentiation factor 6 precursor) c4(18722, 18723, 18724) c5(18725, 18726, 18727, 18728, 18729, 18730, 18731, 18732, 18733, 18734, 18735, 18736, 18737, 18738, 18739, 18740, 18741, 18742) c6( ) c7(kn, Na, bAV, jW, W, kj, bAZ, nx, Nc, bBi, Nh, bBk, bBj, bAY, de); #c1(GDF7) c2(NP_878248) c3(growth/differentiation factor 7 preproprotein) c4(257056) c5(257057, 257058, 257059, 257060, 257061, 257062) c6( ) c7(cF); #c1(GDF9) c2(XP_011541610) c3(growth/differentiation factor 9 isoform X1) c4(340159) c5(340160, 340161, 340162, 340163, 340164, 340165, 340166, 340167, 340168, 340169, 340170, 340171, 340172, 340173) c6(340174, 340175, 340176, 340177) c7(T, kl, vJ, asP, aZ, BJ, il, pQ, aT, Uv, aTS, zZ, ae, ad); #c1(GDI1) c2(NP_001484) c3(rab GDP dissociation inhibitor alpha) c4(118070, 118071) c5(118072, 118073, 118074, 118075, 118076, 118077, 118078, 118079, 118080, 118081, 118082, 118083) c6( ) c7(AT, bBI, IF, nf, K, nA, PJ, t, bBm); #c1(GDI2) c2(NP_001108628) c3(rab GDP dissociation inhibitor beta isoform 2) c4(43260) c5(43261, 43262, 43263, 43264, 43265, 43266, 43267, 43268, 43269, 43270, 43271, 43272, 43273, 43274, 43275, 43276, 43277) c6( ) c7(f, ci, it, K, nA); #c1(GDI2) c2(NP_001485) c3(rab GDP dissociation inhibitor beta isoform 1) c4(118084, 118085, 118086, 118087, 118088, 118089, 118090) c5(118091, 118092, 118093, 118094, 118095, 118096, 118097, 118098, 118119, 118120, 118121) c6( ) c7(f, ci, it, K, nA); #c1(GDNF) c2(NP_001177397) c3(glial cell line-derived neurotrophic factor isoform 3 preproprotein) c4(72743, 72744) c5(72745, 72746, 72747, 72748, 72749, 72750, 72751, 72752, 72753) c6(72754, 72755) c7(T, aC, aiH, bB, aE, fm, pX, Qk, K, bBp, xa, cp, aW, ahF, as, cm, QA, eM, nB, Ji, U, vy, QF, nw, m, cZ, wu, sw, OI, My, aj, ct, PJ, JW, eW, wG, bl, dd, he, aMi, dx, hQ, alw, mo, kk, cv, hq, ok, dB, hk, eD, cB, ail, bBo, GC, j, bX, lu, q, J, er, eA, Kx, cF, hb, Qg, aT, cy, rO, bK, an, ahE, ae, af, vT, Y, yL, r, cu, lo, ahl, hf, bu, t, iK, FT, rR, iM, Dy, c, ac, wO, bt, aen, FI, bBn, uO, jh, bS, dG, fu, Fc, iJ, ad, aAq, iC, hd, yt, wm, d, je, aQp, xs, Z, adj, bz, eK, Hw, Ew, bE, y); #c1(GDNF) c2(NP_001177398) c3(glial cell line-derived neurotrophic factor isoform 4 preproprotein) c4(72756, 72757, 72758) c5(72759, 72760, 72761, 72762, 72763, 72764, 72765, 72766, 72767, 72768, 72769, 72770) c6(72771, 72772) c7(T, aC, aiH, bB, aE, fm, pX, Qk, K, bBp, xa, cp, aW, ahF, as, cm, QA, eM, nB, Ji, U, vy, QF, nw, m, cZ, wu, sw, OI, My, aj, ct, PJ, JW, eW, wG, bl, dd, he, aMi, dx, hQ, alw, mo, kk, cv, hq, ok, dB, hk, eD, cB, ail, bBo, GC, j, bX, lu, q, J, er, eA, Kx, cF, hb, Qg, aT, cy, rO, bK, an, ahE, ae, af, vT, Y, yL, r, cu, lo, ahl, hf, bu, t, iK, FT, rR, iM, Dy, c, ac, wO, bt, aen, FI, bBn, uO, jh, bS, dG, fu, Fc, iJ, ad, aAq, iC, hd, yt, wm, d, je, aQp, xs, Z, adj, bz, eK, Hw, Ew, bE, y); #c1(GDNF) c2(NP_954701) c3(glial cell line-derived neurotrophic factor isoform 2 preproprotein) c4( ) c5(261298, 261299, 261300, 261301, 261302, 261303, 261304, 261305, 261306, 261307, 261308, 261309, 261310, 261311, 261312, 261313, 261314, 261315, 261316, 261317, 261318, 261319) c6(261320, 261321, 261322, 261323, 261324, 261325) c7(T, aC, aiH, bB, aE, fm, pX, Qk, K, bBp, xa, cp, aW, ahF, as, cm, QA, eM, nB, Ji, U, vy, QF, nw, m, cZ, wu, sw, OI, My, aj, ct, PJ, JW, eW, wG, bl, dd, he, aMi, dx, hQ, alw, mo, kk, cv, hq, ok, dB, hk, eD, cB, ail, bBo, GC, j, bX, lu, q, J, er, eA, Kx, cF, hb, Qg, aT, cy, rO, bK, an, ahE, ae, af, vT, Y, yL, r, cu, lo, ahl, hf, bu, t, iK, FT, rR, iM, Dy, c, ac, wO, bt, aen, FI, bBn, uO, jh, bS, dG, fu, Fc, iJ, ad, aAq, iC, hd, yt, wm, d, je, aQp, xs, Z, adj, bz, eK, Hw, Ew, bE, y); #c1(GDNF) c2(XP_011512331) c3(glial cell line-derived neurotrophic factor isoform X1) c4( ) c5(302886, 302887, 302888, 302889, 302890, 302891, 302892, 302893, 302894, 302895, 302896, 302897, 302898, 302899, 302900, 302901, 302902, 302903, 302904, 302905, 302906, 302907, 302908, 302909, 302910, 302911, 302912, 302913, 302914, 302915, 302916, 302917, 302918, 302919, 302920, 302921, 302922, 302923, 302924, 302925, 302926, 302927, 302928, 302929, 302930, 302931, 302932, 302933, 302934, 302935, 302936, 302937, 302938, 302939, 302940, 302941, 302942, 302943, 302944, 302945, 302946, 302947, 302948, 302949, 302950, 302951, 302952, 302953, 302954, 302955, 302956, 302957, 302958, 302959, 302960, 302961, 302962, 302963, 302964, 302965, 302966, 302967, 302968, 302969, 302970, 302971, 302972, 302973, 302974, 302975, 302976, 302977, 302978, 302979) c6(302980, 302981, 302982) c7(T, aC, aiH, bB, aE, fm, pX, Qk, K, bBp, xa, cp, aW, ahF, as, cm, QA, eM, nB, Ji, U, vy, QF, nw, m, cZ, wu, sw, OI, My, aj, ct, PJ, JW, eW, wG, bl, dd, he, aMi, dx, hQ, alw, mo, kk, cv, hq, ok, dB, hk, eD, cB, ail, bBo, GC, j, bX, lu, q, J, er, eA, Kx, cF, hb, Qg, aT, cy, rO, bK, an, ahE, ae, af, vT, Y, yL, r, cu, lo, ahl, hf, bu, t, iK, FT, rR, iM, Dy, c, ac, wO, bt, aen, FI, bBn, uO, jh, bS, dG, fu, Fc, iJ, ad, aAq, iC, hd, yt, wm, d, je, aQp, xs, Z, adj, bz, eK, Hw, Ew, bE, y); #c1(GDPD3) c2(NP_077283) c3(glycerophosphodiester phosphodiesterase domain-containing protein 3) c4(214908, 214909) c5(214910, 214911, 214912, 214913, 214914, 214915, 214916, 214917, 214918, 214919, 214920, 214921) c6( ) c7(du); #c1(GDPD5) c2(NP_110419) c3(glycerophosphodiester phosphodiesterase domain-containing protein 5) c4(220199, 220200) c5(220201, 220202, 220203, 220204, 220205, 220206, 220207, 220208, 220209, 220210, 220211, 220212, 220213, 220214, 220215, 220216, 220217, 220218, 220219, 220220, 220221, 220222, 220223, 220224, 220225, 220226, 220227, 220228, 220229, 220230, 220231, 220232, 220233, 220234, 220235, 220236, 220237) c6( ) c7(cm, aW, T, aT); #c1(GDPD5) c2(XP_011543581) c3(glycerophosphodiester phosphodiesterase domain-containing protein 5 isoform X2) c4(342497) c5( ) c6( ) c7(cm, aW, T, aT); #c1(GDPD5) c2(XP_011543582) c3(glycerophosphodiester phosphodiesterase domain-containing protein 5 isoform X3) c4( ) c5(342498) c6( ) c7(cm, aW, T, aT); #c1(GDPD5) c2(XP_011543587) c3(glycerophosphodiester phosphodiesterase domain-containing protein 5 isoform X5) c4(342499, 342500, 342501) c5(342502) c6( ) c7(cm, aW, T, aT); #c1(GDPD5) c2(XP_011543589) c3(glycerophosphodiester phosphodiesterase domain-containing protein 5 isoform X7) c4( ) c5(342503, 342504, 342505, 342506, 342507) c6( ) c7(cm, aW, T, aT); #c1(GEM) c2(NP_859053) c3(GTP-binding protein GEM) c4(255409, 255410) c5(255411, 255412, 255413, 255414, 255415, 255416, 255417, 255418, 255419, 255420, 255421, 255422, 255423, 255424, 255425, 255426) c6( ) c7(bL, T, jv, axd, al, jx, jh, fd, n, aeu, aj, uu, jE, v, IR, fr, V, mC, amW, J, aMp, hX, bBq, AW, x, F, wD, akU, Id, gd, aT, dV, h, IQ, hH, A, mR, iU, aW, Y, aFE, WQ, HA, eZ, Io, hp, bw, bz, pb, dr, aYt, bN, ck, iP, gk, W, iT, Jr, aWZ, ig, dW, oX, k, yH, fL, pw, eo, bt, fh, B, y, vi); #c1(GEMIN2) c2(NP_001009182) c3(gem-associated protein 2 isoform beta) c4(23517) c5(23518, 23519, 23520, 23521, 23522, 23523) c6( ) c7(T, aAf, OI, aA, bB, fr, ci, eA, aE, Tf, kf, h, hH, ahE, ff, aq, aF, ahl, en, iK, c, eM, bE, m, B, hv, hS); #c1(GEMIN2) c2(NP_001009183) c3(gem-associated protein 2 isoform gamma) c4(23524) c5(23525, 23526, 23527, 23528, 23529, 23530) c6( ) c7(T, aAf, OI, aA, bB, fr, ci, eA, aE, Tf, kf, h, hH, ahE, ff, aq, aF, ahl, en, iK, c, eM, bE, m, B, hv, hS); #c1(GEMIN2) c2(NP_003607) c3(gem-associated protein 2 isoform alpha) c4(139543) c5(139544, 139545, 139546, 139547, 139548, 139549) c6( ) c7(T, aAf, OI, aA, bB, fr, ci, eA, aE, Tf, kf, h, hH, ahE, ff, aq, aF, ahl, en, iK, c, eM, bE, m, B, hv, hS); #c1(GEMIN4) c2(NP_056536) c3(gem-associated protein 4) c4(187994, 187995) c5(187996, 187997, 187998, 187999, 188000, 188001, 188002, 188003, 188004, 188005, 188006) c6( ) c7(T, if, ht, hy, fr, ci, qN, oj, aT, kf, alO, dL, hP, K, hu, eL, af, B, BN, aW, Y, aq, iR, es, bb, c, Kv, U, it, ne); #c1(GEMIN4) c2(XP_011522215) c3(gem-associated protein 4 isoform X2) c4( ) c5(316842) c6( ) c7(T, if, ht, hy, fr, ci, qN, oj, aT, kf, alO, dL, hP, K, hu, eL, af, B, BN, aW, Y, aq, iR, es, bb, c, Kv, U, it, ne); #c1(GEMIN6) c2(NP_079051) c3(gem-associated protein 6) c4(216746, 216747) c5(216748, 216749, 216750, 216751, 216752, 216753, 216754, 216755, 216756, 216757, 216758) c6( ) c7(kf, OI); #c1(GEMIN6) c2(XP_005264625) c3(gem-associated protein 6 isoform X1) c4( ) c5(279152) c6( ) c7(kf, OI); #c1(GEN1) c2(NP_872431) c3(flap endonuclease GEN homolog 1) c4(256344, 256345, 256346, 256347) c5(256348, 256349, 256350, 256351, 256352, 256353, 256354, 256355, 256356, 256357, 256358, 256359, 256360, 256361, 256362, 256363, 256364, 256365, 256366, 256367, 256368, 256369, 256370, 256371, 256372, 256373, 256374, 256375) c6( ) c7(T, dB, aW, aT, m, t, ae, eA, ad); #c1(GET4) c2(NP_057033) c3(Golgi to ER traffic protein 4 homolog) c4(188570) c5(188571, 188572, 188573, 188574, 188575, 188576) c6( ) c7(bX); #c1(GFAP) c2(NP_001124491) c3(glial fibrillary acidic protein isoform 2) c4(49151) c5(49152, 49153, 49154, 49155, 49156, 49157, 49158, 49159, 49160, 49161, 49162) c6( ) c7(T, aiH, Tb, alW, aR, ip, aao, aEl, Hr, ku, fm, K, H, Bp, eG, aW, Ls, as, eF, kJ, apB, jV, Kv, wK, dc, ki, mx, U, nw, mk, act, gD, cZ, OI, aw, qy, aj, asF, PJ, eW, ke, aBy, h, dd, he, vx, Ha, pi, Lg, nP, A, bux, ack, dw, cA, dB, aWn, hR, HB, eo, arO, B, L, ka, bBr, GC, OY, bX, V, eA, J, bBs, hb, WY, aT, cy, rO, bK, an, qk, af, eu, jf, ak, Uf, la, qL, en, f, rY, dS, vk, Qi, tj, c, Kg, On, kh, bqP, aaz, ha, jN, bS, dG, Fc, afb, hX, iC, sO, oj, acQ, cb, NM, iL, d, IR, ff, aGS, aJK, eK, D, Ew, auH, Hs, xg, jr); #c1(GFAP) c2(NP_001229305) c3(glial fibrillary acidic protein isoform 3) c4(84191) c5(84192, 84193, 84194, 84195, 84196, 84197, 84198) c6( ) c7(T, aiH, Tb, alW, aR, ip, aao, aEl, Hr, ku, fm, K, H, Bp, eG, aW, Ls, as, eF, kJ, apB, jV, Kv, wK, dc, ki, mx, U, nw, mk, act, gD, cZ, OI, aw, qy, aj, asF, PJ, eW, ke, aBy, h, dd, he, vx, Ha, pi, Lg, nP, A, bux, ack, dw, cA, dB, aWn, hR, HB, eo, arO, B, L, ka, bBr, GC, OY, bX, V, eA, J, bBs, hb, WY, aT, cy, rO, bK, an, qk, af, eu, jf, ak, Uf, la, qL, en, f, rY, dS, vk, Qi, tj, c, Kg, On, kh, bqP, aaz, ha, jN, bS, dG, Fc, afb, hX, iC, sO, oj, acQ, cb, NM, iL, d, IR, ff, aGS, aJK, eK, D, Ew, auH, Hs, xg, jr); #c1(GFAP) c2(NP_002046) c3(glial fibrillary acidic protein isoform 1) c4(124058, 124059, 124060) c5(124061, 124062, 124063, 124064, 124065, 124066, 124067, 124068, 124069, 124070, 124071, 124072) c6( ) c7(T, aiH, Tb, alW, aR, ip, aao, aEl, Hr, ku, fm, K, H, Bp, eG, aW, Ls, as, eF, kJ, apB, jV, Kv, wK, dc, ki, mx, U, nw, mk, act, gD, cZ, OI, aw, qy, aj, asF, PJ, eW, ke, aBy, h, dd, he, vx, Ha, pi, Lg, nP, A, bux, ack, dw, cA, dB, aWn, hR, HB, eo, arO, B, L, ka, bBr, GC, OY, bX, V, eA, J, bBs, hb, WY, aT, cy, rO, bK, an, qk, af, eu, jf, ak, Uf, la, qL, en, f, rY, dS, vk, Qi, tj, c, Kg, On, kh, bqP, aaz, ha, jN, bS, dG, Fc, afb, hX, iC, sO, oj, acQ, cb, NM, iL, d, IR, ff, aGS, aJK, eK, D, Ew, auH, Hs, xg, jr); #c1(GFER) c2(NP_005253) c3(FAD-linked sulfhydryl oxidase ALR) c4(154401, 154402) c5(154403, 154404, 154405, 154406, 154407, 154408, 154409, 154410, 154411, 154412, 154413, 154414) c6( ) c7(T, al, jx, aj, ci, C, Lw, bX, eA, J, hX, x, jz, oj, cy, K, jo, yi, A, bBt, hl, aq, bBu, kC, KM, gk, mG, vy, E, k, B); #c1(GFI1) c2(XP_011539548) c3(zinc finger protein Gfi-1 isoform X1) c4(337742) c5(337743, 337744, 337745, 337746, 337747, 337748, 337749, 337750, 337751, 337752, 337753, 337754, 337755, 337756, 337757) c6( ) c7(gV, aKm, jh, fd, afK, ci, aoC, V, ad, br, bly, x, ft, zw, h, hn, ae, aXz, jf, bBv, hG, bBw, aq, bw, bz, ck, kB, k, bt); #c1(GFI1B) c2(NP_001128503) c3(zinc finger protein Gfi-1b isoform 2) c4(50107) c5(50108, 50109, 50110, 50111, 50112, 50113, 50114, 50115, 50116, 50117, 50118, 50119, 50120, 50121, 50122) c6( ) c7(x, jf, T, bBx, iU, jh, pg, iY, dX, bw, bt); #c1(GFI1B) c2(NP_004179) c3(zinc finger protein Gfi-1b isoform 1) c4(144119) c5(144120, 144121, 144122, 144123, 144124, 144125, 144126, 144127, 144128, 144129, 144130, 144131, 144132, 144133, 144134) c6( ) c7(x, jf, T, bBx, iU, jh, pg, iY, dX, bw, bt); #c1(GFM1) c2(NP_079272) c3(elongation factor G, mitochondrial) c4(217650, 217651) c5(217652, 217653, 217654, 217655, 217656, 217657) c6( ) c7(bBy, bBz, hb, aW, aT, wR, kC, ajU); #c1(GFPT1) c2(NP_001231639) c3(glutamine-fructose-6-phosphate aminotransferase [isomerizing] 1 isoform 1) c4(87376) c5(87377, 87378, 87379, 87380, 87381, 87382) c6( ) c7(bL, aC, xA, aE, dB, aDx, aeu, aj, dy, bBB, bBA, bq, dQ, v, jy, J, BA); #c1(GFPT1) c2(NP_002047) c3(glutamine-fructose-6-phosphate aminotransferase [isomerizing] 1 isoform 2) c4(124073) c5(124074, 124075, 124076, 124077, 124078, 124079) c6( ) c7(bL, aC, xA, aE, dB, aDx, aeu, aj, dy, bBB, bBA, bq, dQ, v, jy, J, BA); #c1(GFPT2) c2(NP_005101) c3(glutamine-fructose-6-phosphate aminotransferase [isomerizing] 2) c4(152881) c5(152882, 152883, 152884, 152885, 152886, 152887) c6( ) c7(bL, fU, aw, an); #c1(GFRA1) c2(NP_001138925) c3(GDNF family receptor alpha-1 isoform b preproprotein) c4(58222, 58223) c5(58224, 58225, 58226, 58227, 58228, 58229, 58230, 58231, 58232, 58233, 58234, 58235, 58236, 58237, 58238, 58239, 58240, 58241, 58242, 58243) c6( ) c7(cZ, OI, My, jx, uO, fu, bX, eA, Kx, HF, hd, aE, wG, nv, pX, aT, cy, rO, dd, ahE, eu, EV, Y, aW, vj, aq, HL, ahl, Hw, ac, c, nB, QF, Lb, B, DB); #c1(GFRA1) c2(XP_011537936) c3(GDNF family receptor alpha-1 isoform X1) c4(335444) c5(335445, 335446, 335447, 335448, 335449, 335450) c6( ) c7(cZ, OI, My, jx, uO, fu, bX, eA, Kx, HF, hd, aE, wG, nv, pX, aT, cy, rO, dd, ahE, eu, EV, Y, aW, vj, aq, HL, ahl, Hw, ac, c, nB, QF, Lb, B, DB); #c1(GFRA2) c2(NP_001158511) c3(GDNF family receptor alpha-2 isoform c precursor) c4(63699) c5(63700, 63701, 63702, 63703, 63704, 63705) c6( ) c7(HF, Hw, hd, aE, bBC, fu, ahl, ahE, af, cv); #c1(GFRA2) c2(XP_011542786) c3(GDNF family receptor alpha-2 isoform X2) c4(341392, 341393) c5(341394, 341395, 341396, 341397, 341398, 341399, 341400, 341401, 341402, 341403, 341404, 341405, 341406, 341407, 341408, 341409) c6( ) c7(HF, Hw, hd, aE, bBC, fu, ahl, ahE, af, cv); #c1(GFRA2) c2(XP_011542787) c3(GDNF family receptor alpha-2 isoform X1) c4(341410) c5(341411, 341412, 341413, 341414, 341415, 341416) c6( ) c7(HF, Hw, hd, aE, bBC, fu, ahl, ahE, af, cv); #c1(GFRA3) c2(NP_001487) c3(GDNF family receptor alpha-3 preproprotein) c4(118122, 118123) c5(118124, 118125, 118126, 118127, 118128, 118129, 118130, 118131, 118132, 118133, 118134, 118135) c6( ) c7(aW, hd, My, eR, eM); #c1(GFRA4) c2(NP_071422) c3(GDNF family receptor alpha-4 isoform a precursor) c4(211579) c5(211580, 211581, 211582, 211583, 211584, 211585, 211586, 211587) c6(211588, 211589) c7(bxy, bM, ahE, ahl); #c1(GFRA4) c2(NP_665705) c3(GDNF family receptor alpha-4 isoform b precursor) c4(241680) c5(241681, 241682, 241683, 241684, 241685, 241686, 241687, 241688) c6(241689, 241690) c7(bxy, bM, ahE, ahl); #c1(GGA1) c2(NP_001001560) c3(ADP-ribosylation factor-binding protein GGA1 isoform 2) c4(18743) c5(18744, 18745, 18746, 18747, 18748, 18749, 18750, 18751, 18752, 18753, 18754, 18755, 18756, 18757, 18758, 18759, 18760, 18761, 18762, 18763, 18764, 18765, 18766, 18767, 18768, 18769, 18770, 18771, 18772, 18773, 18774, 18775, 18776, 18777, 18778, 18779, 18780, 18781, 18782, 18783, 18784, 18785, 18786, 18787, 18788, 18789, 18790) c6( ) c7(af); #c1(GGA1) c2(NP_001166158) c3(ADP-ribosylation factor-binding protein GGA1 isoform 4) c4(68378) c5( ) c6( ) c7(af); #c1(GGA1) c2(NP_037497) c3(ADP-ribosylation factor-binding protein GGA1 isoform 1) c4(175845, 175846) c5(175847, 175848, 175849, 175850, 175851, 175852, 175853, 175854, 175855, 175856, 175857, 175858) c6( ) c7(af); #c1(GGA1) c2(XP_005261575) c3(ADP-ribosylation factor-binding protein GGA1 isoform X4) c4(277483) c5(277484, 277485, 277486, 277487, 277488, 277489, 277490, 277491) c6( ) c7(af); #c1(GGA1) c2(XP_011528424) c3(ADP-ribosylation factor-binding protein GGA1 isoform X2) c4(323538, 323539) c5(323540, 323541, 323542, 323543, 323544, 323545, 323546, 323547, 323548, 323549, 323550, 323551, 323552, 323553, 323554, 323555) c6( ) c7(af); #c1(GGA1) c2(XP_011528425) c3(ADP-ribosylation factor-binding protein GGA1 isoform X3) c4(323556, 323557) c5( ) c6( ) c7(af); #c1(GGA1) c2(XP_011528426) c3(ADP-ribosylation factor-binding protein GGA1 isoform X5) c4( ) c5(323558, 323559, 323560, 323561, 323562, 323563) c6( ) c7(af); #c1(GGA1) c2(XP_011528427) c3(ADP-ribosylation factor-binding protein GGA1 isoform X1) c4(323564, 323565, 323566, 323567, 323568, 323569) c5(323570, 323571, 323572, 323573, 323574) c6( ) c7(af); #c1(GGA3) c2(NP_001166175) c3(ADP-ribosylation factor-binding protein GGA3 isoform 2) c4(68435) c5(68436, 68437, 68438, 68439, 68440) c6( ) c7(af, eu); #c1(GGA3) c2(NP_001278570) c3(ADP-ribosylation factor-binding protein GGA3 isoform 1) c4( ) c5(109855, 109856, 109857, 109858, 109859, 109860, 109861, 109862, 109863, 109864, 109865, 109866, 109867, 109868) c6( ) c7(af, eu); #c1(GGA3) c2(NP_054720) c3(ADP-ribosylation factor-binding protein GGA3 isoform short) c4(177342) c5(177343, 177344, 177345, 177346, 177347, 177348, 177349) c6( ) c7(af, eu); #c1(GGA3) c2(NP_619525) c3(ADP-ribosylation factor-binding protein GGA3 isoform long) c4(236801, 236802, 236803) c5(236804, 236805, 236806, 236807, 236808, 236809, 236810, 236811, 236812, 236813, 236814, 236815, 236816) c6( ) c7(af, eu); #c1(GGA3) c2(XP_011522865) c3(ADP-ribosylation factor-binding protein GGA3 isoform X1) c4(317347) c5(317348) c6( ) c7(af, eu); #c1(GGACT) c2(NP_149101) c3(gamma-glutamylaminecyclotransferase) c4(227154) c5(227155, 227156, 227157, 227158, 227159, 227160, 227161, 227162, 227163, 227164) c6( ) c7(bM); #c1(GGCT) c2(NP_001186744) c3(gamma-glutamylcyclotransferase isoform 2) c4(78489) c5(78490, 78491, 78492, 78493, 78494, 78495) c6( ) c7(T, gU, hV, iB, aA, ci, ai, ad, bv, av, rC, aT, vH, h, ey, rz, on, ae, yi, Ln, s, Cw, aW, Lf, eH, eZ, aq, aF, Ku, bu, g, t, eF, bz, pb, iK, bN, dR, ck, qe, qr, ZT, hR, m, ER, aed, aJc); #c1(GGCT) c2(NP_001186745) c3(gamma-glutamylcyclotransferase isoform 3) c4(78496) c5(78497, 78498, 78499, 78500, 78501, 78502, 78503, 78504) c6( ) c7(T, gU, hV, iB, aA, ci, ai, ad, bv, av, rC, aT, vH, h, ey, rz, on, ae, yi, Ln, s, Cw, aW, Lf, eH, eZ, aq, aF, Ku, bu, g, t, eF, bz, pb, iK, bN, dR, ck, qe, qr, ZT, hR, m, ER, aed, aJc); #c1(GGCT) c2(NP_001186746) c3(gamma-glutamylcyclotransferase isoform 4) c4(78505) c5(78506, 78507, 78508, 78509, 78510, 78511) c6( ) c7(T, gU, hV, iB, aA, ci, ai, ad, bv, av, rC, aT, vH, h, ey, rz, on, ae, yi, Ln, s, Cw, aW, Lf, eH, eZ, aq, aF, Ku, bu, g, t, eF, bz, pb, iK, bN, dR, ck, qe, qr, ZT, hR, m, ER, aed, aJc); #c1(GGCT) c2(NP_076956) c3(gamma-glutamylcyclotransferase isoform 1) c4(214457, 214458) c5(214459, 214460, 214461, 214462, 214463, 214464, 214465, 214466, 214467, 214468, 214469, 214470) c6( ) c7(T, gU, hV, iB, aA, ci, ai, ad, bv, av, rC, aT, vH, h, ey, rz, on, ae, yi, Ln, s, Cw, aW, Lf, eH, eZ, aq, aF, Ku, bu, g, t, eF, bz, pb, iK, bN, dR, ck, qe, qr, ZT, hR, m, ER, aed, aJc); #c1(GGCX) c2(NP_000812) c3(vitamin K-dependent gamma-carboxylase isoform 1) c4(16325) c5(16326, 16327, 16328, 16329, 16330, 16331) c6( ) c7(dD, bBD, ac, bpN, bBE, dX, eq, bqA, aOh, aaD, fl, ad); #c1(GGCX) c2(NP_001135741) c3(vitamin K-dependent gamma-carboxylase isoform 2) c4(52963) c5(52964, 52965, 52966, 52967, 52968, 52969) c6( ) c7(dD, bBD, ac, bpN, bBE, dX, eq, bqA, aOh, aaD, fl, ad); #c1(GGH) c2(NP_003869) c3(gamma-glutamyl hydrolase precursor) c4(141646) c5(141647, 141648, 141649, 141650, 141651, 141652) c6( ) c7(T, if, e, cL, ci, qN, q, x, pX, aT, dL, In, eG, d, aW, ff, cr, r, aq, en, g, iV, cM, ck, Ip, at, k, y, B); #c1(GGN) c2(NP_689870) c3(gametogenetin) c4(244225, 244226) c5(244227, 244228, 244229, 244230, 244231, 244232, 244233, 244234, 244235, 244236, 244237, 244238) c6( ) c7(T, yi, gU, id, adZ, aW, Lf, hL, aT, adX, PD, Pp, v, ei, cI, ae, ad); #c1(GGN) c2(XP_011524905) c3(gametogenetin isoform X2) c4( ) c5(319305, 319306) c6( ) c7(T, yi, gU, id, adZ, aW, Lf, hL, aT, adX, PD, Pp, v, ei, cl, ae, ad); #c1(GGNBP2) c2(NP_079111) c3(gametogenetin-binding protein 2) c4(217077) c5(217078, 217079, 217080, 217081, 217082, 217083) c6( ) c7(cm, T, ci, rA); #c1(GGPS1) c2(NP_001032354) c3(geranylgeranyl pyrophosphate synthase) c4(31207, 31208, 31209) c5(31210, 31211, 31212, 31213, 31214, 31215, 31216, 31217, 31218, 31219, 31220, 31221, 31222, 31223, 31224, 31225, 31226, 31227, 31228, 31229, 31230, 31231, 31232, 31233, 31234, 31235, 31236, 31237, 31238, 31239) c6( ) c7(gk, al, r, n, jy, aq, q, iR, B); #c1(GGT1) c2(NP_038347) c3(gamma-glutamyltranspeptidase 1 precursor) c4(176369, 176370, 176371, 176372, 176373, 176374, 176375, 176376, 176377, 176378, 176379, 176380, 176381, 176382, 176383, 176384) c5(176385, 176386, 176387, 176388, 176389, 176390, 176391, 176392, 176393, 176394, 176395, 176396, 176397, 176398, 176399, 176400, 176401, 176402, 176403, 176404, 176405, 176406, 176407, 176408, 176409, 176410, 176411, 176412, 176413, 176414, 176415, 176416, 176417, 176418, 176419, 176420, 176421, 176422, 176423, 176424, 176425, 176426, 176427, 176428, 176429, 176430, 176431, 176432, 176433, 176434, 176435, 176436, 176437, 176438, 176439, 176440, 176441, 176442, 176443, 176444, 176445, 176446, 176447, 176448, 176449, 176450, 176451, 176452, 176453, 176454, 176455, 176456, 176457, 176458, 176459, 176460, 176461, 176462, 176463, 176464, 176465, 176466, 176467, 176468, 176469, 176470, 176471, 176472, 176473, 176474, 176475, 176476, 176477, 176478, 176479, 176480, 176481, 176482, 176483, 176484, 176485, 176486, 176487, 176488, 176489) c6( ) c7(T, aC, aI, fd, ame, ci, ip, aJM, x, Vp, aE, dV, dQ, aPB, aci, zQ, az, hl, fc, aB, g, hJ, bw, eM, k, pw, ik, wu, aw, bzb, asM, n, aj, nA, zP, rc, rC, Nf, OV, A, bBF, aq, bBG, vD, uz, eo, eQ, bD, B, eR, yk, jx, aOH, cz, ti, v, aIQ, V, q, J, hW, qK, bq, iU, Y, aZs, en, cl, t, kC, ck, BU, nM, aor, aJQ, mf, bt, akd, qb, uG, jh, ad, F, aop, Db, wm, MG, ff, eZ, EH, bz, bF, gk, bnn, qe, kq, cP, be, ei); #c1(GGT2) c2(XP_011528923) c3(inactive gamma-glutamyltranspeptidase 2 isoform X11) c4( ) c5(324286, 324287, 324288, 324289, 324290, 324291, 324292, 324293, 324294, 324295, 324296, 324297) c6( ) c7(T, aC, akd, wu, yk, uG, aI, jx, jh, n, aj, ci, q, J, ad, aJM, x, F, aE, hW, rC, qK, Nf, wm, dQ, OV, aZs, az, fc, eZ, aq, aB, cl, bBG, hJ, kC, bz, gk, nM, vD, eM, uz, k, cP, eQ, bt, B); #c1(GGT2) c2(XP_011528924) c3(inactive gamma-glutamyltranspeptidase 2 isoform X12) c4(324298, 324299) c5(324300, 324301, 324302, 324303, 324304, 324305, 324306, 324307, 324308, 324309, 324310, 324311, 324312, 324313, 324314, 324315) c6( ) c7(T, aC, akd, wu, yk, uG, al, jx, jh, n, aj, ci, q, J, ad, aJM, x, F, aE, hW, rC, qK, Nf, wm, dQ, OV, aZs, az, fc, eZ, aq, aB, cl, bBG, hJ, kC, bz, gk, nM, vD, eM, uz, k, cP, eQ, bt, B); #c1(GGT5) c2(NP_001093251) c3(gamma-glutamyltransferase 5 isoform 1) c4(40163) c5(40164, 40165, 40166, 40167, 40168, 40169) c6( ) c7(aq, av, B); #c1(GGT5) c2(NP_001093252) c3(gamma-glutamyltransferase 5 isoform 3) c4(40170) c5(40171, 40172, 40173, 40174, 40175, 40176) c6( ) c7(aq, av, B); #c1(GGT5) c2(NP_001289394) c3(gamma-glutamyltransferase 5 isoform 5) c4(114178) c5(114179, 114180, 114181, 114182, 114183, 114184) c6( ) c7(aq, av, B); #c1(GGT5) c2(NP_004112) c3(gamma-glutamyltransferase 5 isoform 2) c4(143662, 143663) c5(143664, 143665, 143666, 143667, 143668, 143669, 143670, 143671, 143672, 143673, 143674, 143675) c6( ) c7(aq, av, B); #c1(GGTLC1) c2(XP_005260922) c3(gamma-glutamyltransferase light chain 1 isoform X1) c4(276972) c5(276973, 276974, 276975, 276976, 276977, 276978, 276979, 276980, 276981, 276982, 276983) c6( ) c7(afk, uG, cz, jw, I, ah, h, H, ae, hG, az, hI, eZ, fc, aq, bBH, aB, hJ, aFj, jq, aOL, bjK, cP, bBI, B); #c1(GGTLC1) c2(XP_006723725) c3(gamma-glutamyltransferase light chain 1 isoform X4) c4( ) c5(295326, 295327, 295328, 295329) c6( ) c7(afk, uG, cz, jw, I, ah, h, H, ae, hG, az, hI, eZ, fc, aq, bBH, aB, hJ, aFj, jq, aOL, bjK, cP, bBI, B); #c1(GH1) c2(NP_000506) c3(somatotropin isoform 1 precursor) c4(10578, 10579, 10580, 10581, 10582) c5(10583, 10584, 10585, 10586, 10587, 10588, 10589, 10590, 10591, 10592, 10593, 10594, 10595, 10596, 10597, 10598, 10599, 10600, 10601, 10602, 10603, 10604, 10605, 10606, 10607, 10608, 10609, 10610, 10611, 10612, 10613, 10614, 10615, 10616, 10617, 10618, 10619, 10620, 10621, 10622, 10623, 10624, 10625, 10626, 10627, 10628, 10629, 10630, 10631, 10632, 10633, 10634, 10635, 10636, 10637, 10638, 10639, 10640, 10641, 10642, 10643, 10644, 10645, 10646, 10647, 10648, 10649, 10650, 10651, 10652, 10653, 10654, 10655, 10656, 10657, 10658, 10659, 10660, 10661, 10662, 10663, 10664, 10665, 10666, 10667, 10668, 10669, 10670, 10671, 10672, 10673, 10674, 10675, 10676, 10677, 10678, 10679, 10680, 10681) c6(10682, 10683, 10684) c7(oO, T, aC, ahS, bBK, vf, ea, e, al, yS, acz, bBR, amj, ci, aY, ku, tg, wM, aX, vg, K, EL, qM, dQ, pk, bIc, aVB, eL, bBQ, yo, ZH, aW, Fe, hl, fc, g, eF, avx, jV, nB, Iq, vA, mx, vy, CD, aYS, m, R, amz, bBP, Ht, bBJ, uf, dt, dD, IT, OI, wu, aw, ht, n, cQ, aj, kM, bBS, ml, zP, JW, cd, rc, biN, jL, rC, h, jy, eV, dL, bl, uV, Df, awV, avP, A, CN, EU, Rj, fQ, ahJ, aq, fe, OB, bmd, op, asE, bo, mg, hL, hR, HB, arg, B, AN, bL, AB, eR, Dh, eX, qQ, cz, adi, asA, v, amC, avO, q, J, UE, oT, mj, XD, aql, aT, bBN, rD, zp, rv, ae, af, bA, kl, bnk, abs, s, vT, Y, asy, LO, r, akY, bu, cl, t, f, bQ, bBL, aDQ, dS, bN, BU, acW, tW, ac, rR, mG, mf, dy, aDR, aoJ, UF, gT, xb, bBM, pY, Oy, acl, iW, dG, oH, eq, aXD, ad, qC, fU, dP, vJ, qh, ji, wm, DI, IR, PE, baT, xs, bBO, eH, cr, nf, jg, dr, bdu, dR, gk, OG, Ew, II, sG, aXJ, cP, bC, ei, y, jr); #c1(GH1) c2(NP_072053) c3(somatotropin isoform 2 precursor) c4(212620) c5(212621, 212622, 212623, 212624, 212625, 212626, 212627, 212628, 212629, 212630, 212631) c6(212632, 212633) c7(oO, T, aC, ahS, bBK, vf, ea, e, al, yS, acz, bBR, amj, ci, aY, ku, tg, wM, aX, vg, K, EL, qM, dQ, pk, blc, aVB, eL, bBQ, yo, ZH, aW, Fe, hl, fc, g, eF, avx, jV, nB, Iq, vA, mx, vy, CD, aYS, m, R, amz, bBP, Ht, bBJ, uf, dt, dD, IT, OI, wu, aw, ht, n, cQ, aj, kM, bBS, ml, zP, JW, cd, rc, biN, jL, rC, h, jy, eV, dL, bl, uV, Df, awV, avP, A, CN, EU, Rj, fQ, ahJ, aq, fe, OB, bmd, op, asE, bo, mg, hL, hR, HB, arg, B, AN, bL, AB, eR, Dh, eX, qQ, cz, adi, asA, v, amC, avO, q, J, UE, oT, mj, XD, aql, aT, bBN, rD, zp, rv, ae, af, bA, kl, bnk, abs, s, vT, Y, asy, LO, r, akY, bu, cl, t, f, bQ, bBL, aDU, dS, bN, BU, acW, tW, ac, rR, mG, mf, dy, aDR, aoJ, UF, gT, xb, bBM, pY, Oy, acl, iW, dG, oH, eq, aXD, ad, qC, fU, dP, vJ, qh, ji, wm, DI, IR, PE, baT, xs, bBO, eH, cr, nf, jg, dr, bdu, dR, gk, OG, Ew, II, sG, aXJ, cP, bC, ei, y, jr); #c1(GH1) c2(NP_072054) c3(somatotropin isoform 3 precursor) c4(212634) c5(212635, 212636, 212637, 212638, 212639, 212640, 212641, 212642) c6(212643, 212644) c7(oO, T, aC, ahS, bBK, vf, ea, e, al, yS, acz, bBR, amj, ci, aY, ku, tg, wM, aX, vg, K, EL, qM, dQ, pk, blc, aVB, eL, bBQ, yo, ZH, aW, Fe, hl, fc, g, eF, avx, jV, nB, Iq, vA, mx, vy, CD, aYS, m, R, amz, bBP, Ht, bBJ, uf, dt, dD, IT, OI, wu, aw, ht, n, cQ, aj, kM, bBS, ml, zP, JW, cd, rc, biN, jL, rC, h, jy, eV, dL, bl, uV, Df, awV, avP, A, CN, EU, Rj, fQ, ahJ, aq, fe, OB, bmd, op, asE, bo, mg, hL, hR, HB, arg, B, AN, bL, AB, eR, Dh, eX, qQ, cz, adi, asA, v, amC, avO, q, J, UE, oT, mj, XD, aql, aT, bBN, rD, zp, rv, ae, af, bA, kl, bnk, abs, s, vT, Y, asy, LO, r, akY, bu, cl, t, f, bQ, bBL, aDQ, dS, bN, BU, acW, tW, ac, rR, mG, mf, dy, aDR, aoJ, UF, gT, xb, bBM, pY, Oy, acl, iW, dG, oH, eq, aXD, ad, qC, fU, dP, vJ, qh, ji, wm, DI, IR, PE, baT, xs, bBO, eH, cr, nf, jg, dr, bdu, dR, gk, OG, Ew, II, sG, aXJ, cP, bC, ei, y, jr); #c1(GH2) c2(NP_002050) c3(growth hormone variant isoform 1 precursor) c4(124080) c5(124081, 124082, 124083, 124084, 124085, 124086, 124087, 124088) c6(124089, 124090) c7(bL, T, wu, ht, jh, v, ci, wm, nJ, s, vT, Lf, LO, akY, g, bu, uC, mg, hR, bko, ei, yv); #c1(GH2) c2(NP_072050) c3(growth hormone variant isoform 4 precursor) c4(212587) c5(212588, 212589, 212590, 212591, 212592, 212593, 212594, 212595) c6(212596, 212597) c7(bL, T, wu, ht, jh, v, ci, wm, nJ, s, vT, Lf, LO, akY, g, bu, uC, mg, hR, bko, ei, yv); #c1(GH2) c2(NP_072051) c3(growth hormone variant isoform 2 precursor) c4(212598) c5(212599, 212600, 212601, 212602, 212603, 212604, 212605, 212606) c6(212607, 212608) c7(bL, T, wu, ht, jh, v, ci, wm, nJ, s, vT, Lf, LO, akY, g, bu, uC, mg, hR, bko, ei, yv); #c1(GH2) c2(NP_072052) c3(growth hormone variant isoform 3 precursor) c4(212609) c5(212610, 212611, 212612, 212613, 212614, 212615, 212616, 212617) c6(212618, 212619) c7(bL, T, wu, ht, jh, v, ci, wm, nJ, s, vT, Lf, LO, akY, g, bu, uC, mg, hR, bko, ei, yv); #c1(GHITM) c2(NP_055209) c3(growth hormone-inducible transmembrane protein) c4(179826, 179827, 179828, 179829) c5(179830, 179831, 179832, 179833, 179834, 179835, 179836, 179837, 179838, 179839, 179840, 179841, 179842, 179843, 179844, 179845, 179846, 179847, 179848, 179849, 179850, 179851, 179852, 179853) c6( ) c7(hy, ne, BN); #c1(GHR) c2(NP_001229328) c3(growth hormone receptor isoform 2 precursor) c4( ) c5(84213) c6( ) c7(T, pf, aoq, zs, e, al, atj, if, ci, ip, yo, aW, hl, LZ, g, eF, vA, ZT, bBU, OD, m, bBT, FG, fg, aj, JW, rc, adf, ec, dL, bl, avP, A, Rj, iw, ks, fQ, aq, auC, op, hR, at, it, B, bL, dA, qQ, aA, cz, asA, v, j, C, bX, q, J, aT, bBN, bq, ae, af, bA, aRR, VC, s, Y, asy, r, aMA, bQ, aDQ, bN, cl, acW, ac, aJt, gX, mf, aDR, aoJ, dy, xb, bBM, iW, rr, ad, av, vJ, jo, eH, eZ, gl, aF, Fq, jg, dr, gk, OG, gZ, ei, asz, jr); #c1(GHR) c2(NP_001229329) c3(growth hormone receptor isoform 1 precursor) c4(84214, 84215, 84216) c5(84217, 84218, 84219, 84220, 84221, 84222, 84223, 84224, 84225, 84226, 84227, 84228, 84229, 84230, 84231, 84232) c6( ) c7(T, pf, aoq, zs, e, al, atj, if, ci, ip, yo, aW, hl, LZ, g, eF, vA, ZT, bBU, OD, m, bBT, FG, fg, aj, JW, rc, adf, ec, dL, bl, avP, A, Rj, iw, ks, fQ, aq, auC, op, hR, at, it, B, bL, dA, qQ, aA, cz, as A, v, j, C, bX, q, J, aT, bBN, bq, ae, af, bA, aRR, VC, s, Y, asy, r, aMA, bQ, aDQ, bN, cl, acW, ac, aJt, gX, mf, aDR, aoJ, dy, xb, bBM, iW, rr, ad, av, vJ, jo, eH, eZ, gl, aF, Fq, jg, dr, gk, OG, gZ, ei, asz, jr); #c1(GHR) c2(NP_001229389) c3(growth hormone receptor isoform 3 precursor) c4(84339) c5( ) c6( ) c7(T, pf, aoq, zs, e, al, atj, if, ci, ip, yo, aW, hl, LZ, g, eF, vA, ZT, bBU, OD, m, bBT, FG, fg, aj, JW, rc, adf, ec, dL, bl, avP, A, Rj, iw, ks, fQ, aq, auC, op, hR, at, it, B, bL, dA, qQ, aA, cz, asA, v, j, C, bX, q, J, aT, bBN, bq, ae, af, bA, aRR, VC, s, Y, asy, r, aMA, bQ, aDQ, bN, cl, acW, ac, aJt, gX, mf, aDR, aoJ, dy, xb, bBM, iW, rr, ad, av, vJ, jo, eH, eZ, gl, aF, Fq, jg, dr, gk, OG, gZ, ei, asz, jr); #c1(GHR) c2(NP_001229391) c3(growth hormone receptor isoform 5 precursor) c4( ) c5(84340, 84341, 84342, 84343, 84344, 84345) c6( ) c7(T, pf, aoq, zs, e, al, atj, if, ci, ip, yo, aW, hl, LZ, g, eF, vA, ZT, bBU, OD, m, bBT, FG, fg, aj, JW, rc, adf, ec, dL, bl, avP, A, Rj, iw, ks, fQ, aq, auC, op, hR, at, it, B, bL, dA, qQ, aA, cz, asA, v, j, C, bX, q, J, aT, bBN, bq, ae, af, bA, aRR, VC, s, Y, asy, r, aMA, bQ, aDQ, bN, cl, acW, ac, aJt, gX, mf, aDR, aoJ, dy, xb, bBM, iW, rr, ad, av, vJ, jo, eH, eZ, gl, aF, Fq, jg, dr, gk, OG, gZ, ei, asz, jr); #c1(GHR) c2(XP_011512333) c3(growth hormone receptor isoform X1) c4( ) c5(302983) c6( ) c7(T, pf, aoq, zs, e, al, atj, if, ci, ip, yo, aW, hl, LZ, g, eF, vA, ZT, bBU, OD, m, bBT, FG, fg, aj, JW, rc, adf, ec, dL, bl, avP, A, Rj, iw, ks, fQ, aq, auC, op, hR, at, it, B, bL, dA, qQ, aA, cz, asA, v, j, C, bX, q, J, aT, bBN, bq, ae, af, bA, aRR, VC, s, Y, asy, r, aMA, bQ, aDQ, bN, cl, acW, ac, aJt, gX, mf, aDR, aoJ, dy, xb, bBM, iW, rr, ad, av, vJ, jo, eH, eZ, gl, aF, Fq, jg, dr, gk, OG, gZ, ei, asz, jr); #c1(GHRH) c2(XP_011527089) c3(somatoliberin isoform X1) c4(321550) c5(321551, 321552, 321553, 321554, 321555, 321556, 321557, 321558, 321559, 321560) c6( ) c7(gh, T, bM, fM, aC, pY, OF, aA, adi, bBV, v, ci, fr, Tq, OH, aY, AO, JW, rc, ad, bBW, dP, ft, il, xW, pX, aql, oW, aT, bK, EL, ae, af, Yi, bA, yo, kl, d, s, aW, ff, Rj, aF, en, cl, g, t, bz, avx, EJ, hq, pv, dR, OG, kP, eM, bo, uR, hL, hR, m, Ex); #c1(GHRH) c2(XP_011527090) c3(somatoliberin isoform X2) c4(321561) c5(321562, 321563, 321564, 321565, 321566, 321567) c6( ) c7(gh, T, bM, fM, aC, pY, OF, aA, adi, bBV, v, ci, fr, Tq, OH, aY, AO, JW, rc, ad, bBW, dP, ft, il, xW, pX, aql, oW, aT, bK, EL, ae, af, Yi, bA, yo, kl, d, s, aW, ff, Rj, aF, en, cl, g, t, bz, avx, EJ, hq, pv, dR, OG, kP, eM, bo, uR, hL, hR, m, Ex); #c1(GHRHR) c2(NP_000814) c3(growth hormone-releasing hormone receptor precursor) c4(16332) c5(16333, 16334, 16335, 16336, 16337, 16338, 16339) c6( ) c7(T, dD, bBK, ea, IT, hy, bBS, eq, ci, asA, JW, ad, PC, dP, aT, iv, ae, af, bA, yo, BN, s, PE, Y, aW, Rj, vj, g, cl, eF, OG, kP, hR, gT, ne); #c1(GHRHR) c2(XP_011513565) c3(growth hormone-releasing hormone receptor isoform X1) c4(305850, 305851, 305852) c5(305853, 305854, 305855, 305856, 305857, 305858, 305859, 305860, 305861, 305862, 305863, 305864, 305865, 305866, 305867, 305868, 305869, 305870, 305871, 305872, 305873, 305874, 305875) c6( ) c7(T, dD, bBK, ea, IT, hy, bBS, eq, ci, asA, JW, ad, PC, dP, aT, iv, ae, af, bA, yo, BN, s, PE, Y, aW, Rj, vj, g, cl, eF, OG, kP, hR, gT, ne); #c1(GHRL) c2(NP_001128416) c3(appetite-regulating hormone isoform 3) c4(49984) c5(49985, 49986, 49987, 49988, 49989, 49990, 49991, 49992) c6( ) c7(bL, bM, T, dD, eR, fR, pf, aZ, vf, e, ht, qQ, al, aA, cz, tc, aj, v, j, et, eq, aoj, wo, aY, OH, JW, cd, J, ad, rc, aw, av, hd, nv, iX, pX, Gb, aql, HG, aT, IG, jy, ji, K, qM, fb, ae, dl, Yi, be, yo, kl, s, fc, r, kt, cu, aF, hp, g, iV, Z, ve, bJ, ar, rR, aD, ZT, mg, gZ, aqm, mf, OD, ei, y, X, iW); #c1(GHRL) c2(NP_001128417) c3(appetite-regulating hormone isoform 4) c4(49993) c5(49994, 49995, 49996, 49997, 49998, 49999, 50000, 50001) c6( ) c7(bL, bM, T, dD, eR, fR, pf, aZ, vf, e, ht, qQ, al, aA, cz, tc, aj, v, j, et, eq, aoj, wo, aY, OH, JW, cd, J, ad, rc, aw, av, hd, nv, iX, pX, Gb, aql, HG, aT, IG, jy, ji, K, qM, fb, ae, dl, Yi, be, yo, kl, s, fc, r, kt, cu, aF, hp, g, iV, Z, ve, bJ, ar, rR, aD, ZT, mg, gZ, aqm, mf, OD, ei, y, X, iW); #c1(GHRL) c2(NP_001128418) c3(appetite-regulating hormone isoform 5) c4(50002) c5(50003, 50004, 50005, 50006, 50007, 50008, 50009, 50010) c6(50011) c7(bL, bM, T, dD, eR, fR, pf, aZ, vf, e, ht, qQ, al, aA, cz, tc, aj, v, j, et, eq, aoj, wo, aY, OH, JW, cd, J, ad, rc, aw, av, hd, nv, iX, pX, Gb, aql, HC, aT, IG, jy, ji, K, qM, fb, ae, dl, Yi, be, yo, kl, s, fc, r, kt, cu, aF, hp, g, iV, Z, ve, bJ, ar, rR, aD, ZT, mg, gZ, aqm, mf, OD, ei, y, X, iW); #c1(GHRL) c2(NP_001289752) c3(appetite-regulating hormone isoform 2 preproprotein) c4(114396) c5(114397, 114398, 114399, 114400, 114401, 114402, 114403, 114404, 114405, 114406, 114407, 114408, 114409, 114410, 114411, 114412, 114413, 114414, 114415, 114416, 114417, 114418, 114419, 114420, 114421, 114422, 114423, 114424, 114425, 114426, 114427, 114428, 114429, 114430, 114431, 114432, 114433, 114434, 114435, 114436, 114437, 114438, 114439, 114440, 114441, 114442, 114443, 114444, 114445, 114446, 114447, 114448, 114449, 114450, 114451, 114452, 114453, 114454, 114455, 114456, 114457, 114458, 114459, 114460, 114461, 114462, 114463, 114464, 114465, 114466, 114467, 114468, 114469, 114470, 114471, 114472, 114473, 114474, 114475, 114476, 114477, 114478, 114479, 114480, 114481, 114482, 114483, 114484, 114485, 114486, 114487, 114488, 114489, 114490, 114491, 114492, 114493, 114494, 114495, 114496, 114497, 114498, 114499, 114500, 114501, 114502, 114503, 114504, 114505, 114506, 114507, 114508, 114509, 114510, 114511, 114512, 114513, 114514, 114515, 114516, 114517, 114518, 114519, 114520, 114521, 114522, 114523, 114524, 114525, 114526, 114527, 114528, 114529, 114530, 114531, 114532, 114533, 114534, 114535, 114536, 114537, 114538, 114539, 114540, 114541, 114542, 114543, 114544, 114545, 114546, 114547, 114548, 114549, 114550, 114551, 114552, 114553, 114554, 114555, 114556, 114557, 114558, 114559) c6(114560) c7(bL, bM, T, dD, eR, fR, pf, aZ, vf, e, ht, qQ, al, aA, cz, tc, aj, v, j, et, eq, aoj, wo, aY, OH, JW, cd, J, ad, rc, aw, av, hd, nv, iX, pX, Gb, aql, HC, aT, IG, jy, ji, K, qM, fb, ae, dl, Yi, be, yo, kl, s, fc, r, kt, cu, aF, hp, g, iV, Z, ve, bJ, ar, rR, aD, ZT, mg, gZ, aqm, mf, OD, ei, y, X, iW); #c1(GHRL) c2(NP_001289754) c3(appetite-regulating hormone isoform 1 preproprotein) c4(114561, 114562, 114563) c5(114564, 114565, 114566, 114567, 114568, 114569, 114570, 114571, 114572, 114573, 114574, 114575, 114576, 114577, 114578, 114579, 114580, 114581, 114582, 114583, 114584, 114585, 114586, 114587, 114588, 114589, 114590, 114591, 114592, 114593, 114594, 114595, 114596) c6(114597) c7(bL, bM, T, dD, eR, fR, pf, aZ, vf, e, ht, qQ, al, aA, cz, tc, aj, v, j, et, eq, aoj, wo, aY, OH, JW, cd, J, ad, rc, aw, av, hd, nv, iX, pX, Gb, aql, HC, aT, IG, jy, ji, K, qM, fb, ae, dl, Yi, be, yo, kl, s, fc, r, kt, cu, aF, hp, g, iV, Z, ve, bJ, ar, rR, aD, ZT, mg, gZ, aqm, mf, OD, ei, y, X, iW); #c1(GHSR) c2(NP_004113) c3(growth hormone secretagogue receptor type 1 isoform 1b) c4(143676) c5(143677, 143678, 143679, 143680, 143681, 143682) c6( ) c7(bL, bBM, T, dD, ea, aw, cz, bBX, tc, aj, v, j, afE, ci, eq, aoj, OH, cd, J, ad, rc, av, hd, iX, pX, aql, aT, iv, bj, ae, bA, yo, IR, s, aW, wF, r, fe, bu, cl, ve, iV, bz, OG, eM, dB, ZT, gX, hL, hR, mf, ei, bBY, y); #c1(GHSR) c2(NP_940799) c3(growth hormone secretagogue receptor type 1 isoform 1a) c4(259858) c5(259859, 259860, 259861, 259862, 259863, 259864) c6( ) c7(bL, bBM, T, dD, ea, aw, cz, bBX, tc, aj, v, j, afE, ci, eq, aoj, OH, cd, J, ad, rc, av, hd, iX, pX, aql, aT, iv, bj, ae, bA, yo, IR, s, aW, wF, r, fe, bu, cl, ve, iV, bz, OG, eM, dB, ZT, gX, hL, hR, mf, ei, bBY, y); #c1(GID8) c2(NP_060366) c3(glucose-induced degradation protein 8 homolog) c4(195626, 195627) c5(195628, 195629, 195630, 195631, 195632, 195633, 195634, 195635, 195636, 195637, 195638, 195639) c6( ) c7(aA); #c1(GIF) c2(NP_005133) c3(gastric intrinsic factor precursor) c4(153279, 153280) c5(153281, 153282, 153283, 153284, 153285, 153286, 153287, 153288, 153289, 153290, 153291, 153292) c6( ) c7(bM, bzx, eR, Ke, aD, jx, mN, aj, ci, aY, mC, J, bCa, cd, ai, cc, F, aEE, n/v, h, bBZ, dL, eL, uQ, aZh, eZ, r, Ni, pR, aiL, avG, bz, UP, dW, mz, my, aSu, fL, y, fh, kd, Ex, aMk); #c1(GIGYF1) c2(XP_005250589) c3(PERQ amino acid-rich with GYF domain-containing protein 1 isoform X1) c4(270416, 270417) c5(270418, 270419, 270420, 270421, 270422, 270423, 270424, 270425, 270426, 270427, 270428, 270429) c6( ) c7(aW, cd, aT, oQ); #c1(GIGYF2) c2(NP_001096616) c3(PERQ amino acid-rich with GYF domain-containing protein 2 isoform b) c4(41159, 41160, 41161, 41162, 41163) c5(41164, 41165, 41166, 41167, 41168, 41169, 41170, 41171, 41172, 41173, 41174, 41175, 41176, 41177, 41178, 41179, 41180, 41181, 41182, 41183, 41184, 41185) c6( ) c7(aW, bCb, an, aT); #c1(GIGYF2) c2(NP_001096617) c3(PERQ amino acid-rich with GYF domain-containing protein 2 isoform a) c4(41186, 41187) c5(41188, 41189, 41190, 41191, 41192, 41193, 41194, 41195, 41196, 41197, 41198, 41199, 41200, 41201, 41202, 41203, 41204, 41205, 41206, 41207) c6( ) c7(aW, bCb, an, aT); #c1(GIGYF2) c2(NP_001096618) c3(PERQ amino acid-rich with GYF domain-containing protein 2 isoform c) c4(41208, 41209, 41210, 41211, 41212, 41213) c5(41214, 41215, 41216, 41217, 41218, 41219, 41220, 41221, 41222, 41223, 41224, 41225, 41226, 41227, 41228, 41229, 41230, 41231, 41232, 41233, 41234, 41235, 41236, 41237, 41238, 41239, 41240, 41241, 41242, 41243, 41244, 41245, 41246, 41247, 41248, 41249, 41250, 41251, 41252, 41253, 41254, 41255) c6( ) c7(aW, bCb, an, aT); #c1(GIMAP5) c2(NP_060854) c3(GTPase IMAP family member 5) c4( ) c5(198124, 198125, 198126, 198127, 198128) c6( ) c7(T, A, CM, eZ, aj, fL, y, J); #c1(GIMAP7) c2(NP_694968) c3(GTPase IMAP family member 7) c4(245506) c5(245507, 245508, 245509, 245510, 245511, 245512) cG( ) c7(CM, A); #c1(GIMAP8) c2(XP_005250007) c3(GTPase IMAP family member 8 isoform X1) c4(269994) c5(269995, 269996, 269997, 269998, 269999, 270000) c6( ) c7(ad); #c1(GIN1) c2(NP_060146) c3(gypsy retrotransposon integrase-like protein 1) c4(194445, 194446) c5(194447, 194448, 194449, 194450, 194451, 194452, 194453, 194454, 194455, 194456, 194457, 194458) c6( ) c7(y); #c1(GINS1) c2(NP_066545) c3(DNA replication complex GINS protein PSF1) c4(207319, 207320) c5(207321, 207322, 207323, 207324, 207325, 207326, 207327, 207328, 207329, 207330, 207331, 207332) c6( ) c7(T, mR, bE, aW, if, aT, ey, K, qN); #c1(GINS2) c2(NP_057179) c3(DNA replication complex GINS protein PSF2) c4(189319) c5(189320, 189321, 189322, 189323, 189324, 189325) cG( ) c7(T, os, mR, aW, qK, aT, oZ, hp); #c1(GIP) c2(NP_004114) c3(gastric inhibitory polypeptide preproprotein) c4(143683, 143684) c5(143685, 143686, 143687, 143688, 143689, 143690) c6( ) c7(bL, dD, aoq, vf, ea, e, aj, Ja, dG, v, eq, J, mj, pX, jy, K, bq, H, fb, avH, s, vj, fc, hl, zR, iw, dq, Hu, g, mg, fP, cP, ei, gT, L); #c1(GIPC1) c2(NP_005707) c3(PDZ domain-containing protein GIPC1 isoform 1) c4(158673) c5(158674, 158675, 158676, 158677, 158678, 158679, 158680, 158681, 158682, 158683, 158684, 158685, 158686, 158687, 158688) c6( ) c7(es, T, aC, eJ, aE, iA, aW, oV, aT, r, n, aj, m, t, ae, q, J, ad); #c1(GIPC1) c2(NP_974198) c3(PDZ domain-containing protein GIPC1 isoform 2) c4(262715) c5(262716, 262717, 262718, 262719, 262720, 262721, 262722, 262723, 262724, 262725) c6( ) c7(es, T, aC, eJ, aE, iA, aW, oV, aT, r, n, aj, m, t, ae, q, J, ad); #c1(GIPC3) c2(NP_573568) c3(PDZ domain-containing protein GIPC3) c4(234552) c5(234553, 234554, 234555, 234556, 234557) c6( ) c7(cZ, bCd, bCc, aIA, aT, dd, Bh); #c1(GIPC3) c2(XP_005259549) c3(PDZ domain-containing protein GIPC3 isoform X1) c4( ) c5(276124, 276125) c6( ) c7(cZ, bCd, bCc, aIA, aT, dd, Bh); #c1(GIPR) c2(NP_000155) c3(gastric inhibitory polypeptide receptor precursor) c4(3562) c5(3563, 3564, 3565, 3566, 3567, 3568, 3569, 3570, 3571, 3572) c6( ) c7(bL, tg, T, eM, vf, vj, pX, e, qQ, iw, iv, Ja, mf, dG, v, bq, ei, Hu, V, fq); #c1(GIT1) c2(NP_001078923) c3(ARF GTPase-activating protein GIT1 isoform 1) c4(38004, 38005) c5(38006, 38007, 38008, 38009, 38010, 38011) cG( ) c7(qa, T, rR, cF, et, ig, bE, aW, Y, if, r, aT, cd, bB, m, an, ae, q, ad); #c1(GIT1) c2(NP_054749) c3(ARF GTPase-activating protein GIT1 isoform 2) c4(177573) c5(177574, 177575, 177576, 177577, 177578, 177579, 177580, 177581, 177582, 177583, 177584, 177585) c6( ) c7(qa, T, rR, cF, et, ig, bE, aW, Y, if, r, aT, cd, bB, m, an, ae, q, ad); #c1(GIT1) c2(XP_011522986) c3(ARF GTPase-activating protein GIT1 isoform X1) c4( ) c5(317461) c6( ) c7(qa, T, rR, cF, et, ig, bE, aW, Y, if, r, aT, cd, bB, m, an, ae, q, ad); #c1(GIT2) c2(NP_001128685) c3(ARF GTPase-activating protein GIT2 isoform 6) c4(50517, 50518) c5(50519, 50520, 50521, 50522, 50523, 50524, 50525, 50526, 50527, 50528, 50529, 50530) c6( ) c7(aj, aoo, J, C, ig); #c1(GIT2) c2(NP_001128686) c3(ARF GTPase-activating protein GIT2 isoform 5) c4(50531, 50532) c5(50533, 50534, 50535, 50536, 50537, 50538, 50539, 50540, 50541, 50542, 50543, 50544) c6( ) c7(aj, aoo, J, C, ig); #c1(GIT2) c2(NP_055591) c3(ARF GTPase-activating protein GIT2 isoform 3) c4(182152) c5(182153, 182154, 182155, 182156, 182157, 182158) c6( ) c7(aj, aoo, J, C, ig); #c1(GIT2) c2(NP_476510) c3(ARF GTPase-activating protein GIT2 isoform 1) c4(230687) c5(230688, 230689, 230690, 230691, 230692, 230693) c6( ) c7(aj, aoo, J, C, ig); #c1(GIT2) c2(NP_476511) c3(ARF GTPase-activating protein GIT2 isoform 2) c4(230694, 230695, 230696) c5(230697, 230698, 230699, 230700, 230701, 230702, 230703, 230704, 230705, 230706, 230707, 230708, 230709, 230710, 230711, 230712, 230713, 230714) c6( ) c7(aj, aoo, J, C, ig); #c1(GIT2) c2(NP_631940) c3(ARF GTPase-activating protein GIT2 isoform 4) c4(238363) c5(238364, 238365, 238366, 238367, 238368, 238369) c6( ) c7(aj, aoo, J, C, ig); #c1(GIT2) c2(XP_006719772) c3(ARF GTPase-activating protein GIT2 isoform X4) c4(292966) c5(292967, 292968, 292969, 292970, 292971, 292972) c6( ) c7(aj, aoo, J, C, ig); #c1(GJA1) c2(NP_000156) c3(gap junction alpha-1 protein) c4(3573, 3574) c5(3575, 3576, 3577, 3578, 3579, 3580, 3581, 3582, 3583, 3584, 3585, 3586) c6( ) c7(oO, T, bCf, ea, bB, Jd, ci, ip, biA, aE, Be, ja, K, bCi, hu, brw, eL, Us, cp, aW, are, vs, g, as, pL, eF, bdW, eM, wK, ki, vA, aIA, mx, PO, gn, asW, dD, wu, aw, ht, by, n, BH, qN, cd, bCj, bao, eW, bCh, acf, BI, cc, wG, acA, h, SH, dL, Dz, bbG, ES, aq, kp, mo, dw, cM, op, bCe, dB, hk, wk, bD, B, bL, mr, wL, aA, cz, v, il, q, eA, Mg, aT, vH, cy, Nc, bK, bq, ae, eu, jf, s, nV, bCg, Y, fO, r, lo, en, t, bN, ac, wO, aJQ, PN, im, bt, Bh, On, hl, bgQ, acl, ha, bS, eq, zU, tO, ad, dP, av, ib, od, sN, vc, wm, fb, vP, d, ff, eH, aF, EZ, avG, bz, arB, bE, Lj, dJ, gZ, aCP, IC); #c1(GJA3) c2(NP_068773) c3(gap junction alpha-3 protein) c4(210330) c5(210331, 210332, 210333, 210334, 210335, 210336) c6( ) c7(b, kj, bP, bCk, aW, arm, aT, bee, i); #c1(GJA8) c2(XP_011507719) c3(gap junction alpha-8 protein isoform X2) c4( ) c5(297789, 297790, 297791, 297792, 297793, 297794, 297795, 297796, 297797, 297798, 297799, 297800, 297801) c6( ) c7(bCI, T, dt, aWG, ha, fd, iD, ame, ci, q, ad, x, b, ib, aE, arm, aT, IQ, ae, Qe, kj, iU, aW, Y, ev, g, hf, t, cm, dr, sS, W, aPp, HN, aWy, m, oQ, i, bt, B); #c1(GJB1) c2(NP_000157) c3(gap junction beta-1 protein) c4(3587, 3588) c5(3589, 3590, 3591, 3592, 3593, 3594, 3595, 3596, 3597, 3598, 3599, 3600, 3601, 3602, 3603, 3604, 3605, 3606, 3607, 3608) c6( ) c7(T, ob, jp, Pt, xF, bkY, agU, cV, aA, n, fr, ci, fu, bX, V, eA, ad, av, iu, b, no, aE, K, bU, amA, ae, dF, Is, s, mD, nV, bT, qS, bhi, aFT, bCn, aq, aF, g, t, cM, bz, dr, dR, es, ql, iA, bgy, kB, yW, Lj, mG, dh, bCo, bCm, bk, eo, i, afO, B, aof); #c1(GJB2) c2(NP_003995) c3(gap junction beta-2 protein) c4(142699) c5(142700, 142701, 142702, 142703, 142704, 142705, 142706, 142707, 142708, 142709) c6( ) c7(T, aC, ci, adS, ip, aE, bCC, bU, hu, eL, Zm, bCu, aW, ih, uC, Jr, ajX, aGe, aIA, bgi, cZ, bCB, wh, aw, ht, bCy, cV, by, n, asS, eW, b, aMT, dL, aQM, dd, bCq, aRa, aq, cM, ale, bCF, dB, hk, bbx, hL, awM, JM, it, B, arO, qc, dA, jp, bCp, aA, hy, Xr, oc, q, nX, aT, bq, bCv, rE, ae, bCA, Ie, Is, s, Y, r, en, t, f, Ci, bCE, mG, bCz, bCr, bvc, Hy, bCG, Bh, ao, sY, Dd, bCx, ad, aOZ, wD, av, bnC, IQ, KU, bCs, ff, xs, cr, aTa, bCt, bz, bCD, pu, bCw, Lj, Km, i, rk); #c1(GJB6) c2(NP_001103691) c3(gap junction beta-6 protein) c4(41944) c5(41945, 41946, 41947, 41948, 41949, 41950, 41951, 41952, 41953, 41954, 41955, 41956, 41957, 41958, 41959, 41960, 41961, 41962) c6( ) c7(cZ, Am, bCy, bCp, by, hy, bS, adS, oc, cd, asS, aOZ, bjA, nX, bCH, bCI, cy, SH, bCK, IQ, dd, bq, bmo, cB, bCu, bnY, xs, vs, bCt, bCJ, mG, aIA, JM, awK, bgi, Bh, bca); #c1(GJC1) c2(NP_001073852) c3(gap junction gamma-1 protein) c4(36127) c5(36128, 36129, 36130, 36131, 36132, 36133, 36134, 36135, 36136, 36137) c6( ) c7(ib, s, wK, aW, cz, r, aT, v, g); #c1(GJC2) c2(NP_065168) c3(gap junction gamma-2 protein) c4(204362) c5(204363, 204364, 204365, 204366, 204367, 204368) c6( ) c7(bCM, KE, aV, lu, cb, aW, Pt, aT, Vv, bCL, PO, K, PN, bCN, mF, eo, V, bee, NG); #c1(GJC3) c2(NP_853516) c3(gap junction gamma-3 protein) c4( ) c5(255143, 255144, 255145, 255146, 255147, 255148) c6( ) c7(BM, Bh, mG, bX); #c1(GJC3) c2(XP_005250369) c3(gap junction gamma-3 protein isoform X1) c4(270283) c5( ) c6( ) c7(BM, Bh, mG, bX); #c1(GJD2) c2(NP_065711) c3(gap junction delta-2 protein) c4(205027) c5(205028, 205029, 205030, 205031, 205032, 205033) c6( ) c7(bL, cZ, T, Be, iD, dd, Bd, bmo, ad); #c1(GJD3) c2(NP_689343) c3(gap junction delta-3 protein) c4(242657) c5(242658, 242659, 242660, 242661, 242662, 242663, 242664) c6( ) c7(s, BM, r, bq); #c1(GK) c2(NP_000158) c3(glycerol kinase isoform b) c4(3609) c5(3610, 3611, 3612, 3613, 3614, 3615) c6( ) c7(bgp, bL, mO, xs, bCO, bzi, bgj, aj, uY, j, K, nA, v, aq, B, UF); #c1(GK) c2(NP_001121599) c3(glycerol kinase isoform c) c4(45825) c5(45826, 45827, 45828, 45829, 45830, 45831) cG( ) c7(bgp, bL, mO, xs, bCO, bzi, bgj, aj, uY, j, K, nA, v, aq, B, UF); #c1(GK) c2(NP_001191948) c3(glycerol kinase isoform d) c4(81886, 81887) c5(81888, 81889, 81890, 81891, 81892, 81893) cG( ) c7(bgp, bL, mO, xs, bCO, bzi, bgj, aj, uY, j, K, nA, v, aq, B, UF); #c1(GK) c2(NP_976325) c3(glycerol kinase isoform a) c4(263142, 263143) c5(263144, 263145, 263146, 263147, 263148, 263149, 263150, 263151, 263152, 263153, 263154, 263155) c6( ) c7(bgp, bL, mO, xs, bCO, bzi, bgj, aj, uY, j, K, nA, v, aq, B, UF); #c1(GK) c2(XP_005274545) c3(glycerol kinase isoform X6) c4( ) c5(285152, 285153, 285154, 285155, 285156, 285157) c6( ) c7(bgp, bL, mO, xs, bCO, bzi, bgj, aj, uY, j, K, nA, v, aq, B, UF); #c1(GK) c2(XP_011543793) c3(glycerol kinase isoform X1) c4( ) c5(342909) c6( ) c7(bgp, bL, mO, xs, bCO, bzi, bgj, aj, uY, j, K, nA, v, aq, B, UF); #c1(GK) c2(XP_011543794) c3(glycerol kinase isoform X3) c4(342910) c5( ) c6( ) c7(bgp, bL, mO, xs, bCO, bzi, bgj, aj, uY, j, K, nA, v, aq, B, UF); #c1(GK) c2(XP_011543796) c3(glycerol kinase isoform X5) c4( ) c5(342911, 342912, 342913, 342914, 342915) c6( ) c7(bgp, bL, mO, xs, bCO, bzi, bgj, aj, uY, j, K, nA, v, aq, B, UF); #c1(GKN1) c2(NP_062563) c3(gastrokine-1) c4(201977) c5(201978, 201979, 201980, 201981, 201982, 201983) c6( ) c7(T, s, fR, Kv, aW, if, az, aT, aA, aF, ci, qN, g, cm, nJ); #c1(GKN2) c2(NP_872342) c3(gastrokine-2 precursor) c4(256145) c5(256146, 256147, 256148, 256149, 256150, 256151, 256152, 256153) c6(256154, 256155) c7(av, T, aA, aF, g, ae, ad); #c1(GLA) c2(NP_000160) c3(alpha-galactosidase A precursor) c4(3616, 3617) c5(3618, 3619, 3620, 3621, 3622, 3623, 3624, 3625, 3626, 3627, 3628, 3629, 3630, 3631, 3632, 3633, 3634, 3635, 3636, 3637, 3638, 3639, 3640, 3641, 3642, 3643, 3644, 3645, 3646, 3647, 3648, 3649, 3650, 3651, 3652, 3653, 3654, 3655, 3656, 3657, 3658, 3659, 3660, 3661, 3662, 3663, 3664, 3665, 3666, 3667, 3668, 3669, 3670, 3671, 3672, 3673, 3674, 3675, 3676, 3677, 3678, 3679, 3680, 3681, 3682, 3683, 3684, 3685, 3686, 3687, 3688, 3689, 3690, 3691, 3692, 3693, 3694, 3695, 3696, 3697, 3698, 3699, 3700, 3701, 3702, 3703, 3704, 3705, 3706, 3707, 3708, 3709, 3710, 3711, 3712, 3713) c6(3714) c7(eR, bCQ, bCR, cz, cR, fo, aY, b, aOu, cc, ds, M, vc, aa, bCP, asD, ih, dq, dw, dr, asE, mO, nM, ac, Lp, hO, Lq, dy, bdA, i); #c1(GLB1) c2(NP_000395) c3(beta-galactosidase isoform a preproprotein) c4(8459, 8460) c5(8461, 8462, 8463, 8464, 8465, 8466) c6( ) c7(bM, T, aC, azf, fd, bB, IR, ci, x, xE, AI, dV, bCX, K, dQ, eL, be, DA, akV, eG, aW, fc, La, g, pL, eE, eF, cm, Qt, QA, bw, iA, bCT, iT, aYQ, U, cj, uo, k, Hb, m, afE, fr, cd, hr, ai, bCZ, eW, ke, cc, cU, jy, h, hn, dL, bl, hQ, fe, aq, vU, iO, kT, bP, aYa, Lq, bD, B, bCS, bL, fM, aYP, bDa, fG, aA, cz, v, beZ, q, eA, bzg, XX, lg, nv, aMb, aT, cy, jj, aAt, rv, ae, bA, bCV, iU, rh, oV, Y, bCU, r, lo, aYR, en, t, zz, pb, ck, nM, iM, bCY, hO, np, bt, hS, gx, kh, jh, btu, bS, ade, iJ, ad, hX, hd, bCW, bzk, aNp, ji, nJ, uQ, DI, d, lx, je, ff, aF, Pd, iV, KM, bz, dr, qa, eK, mO, aMa, aAS, bE, XO, arx, cP, ra, lf, afO, y); #c1(GLB1) c2(NP_001129074) c3(beta-galactosidase isoform c preproprotein) c4(50738) c5(50739, 50740, 50741, 50742, 50743, 50744) cG( ) c7(bM, T, aC, azf, fd, bB, IR, ci, x, xE, AI, dV, bCX, K, dQ, eL, be, DA, akV, eG, aW, fc, La, g, pL, eE, eF, cm, Qt, QA, bw, iA, bCT, iT, aYQ, U, cj, uo, k, Hb, m, afE, fr, cd, hr, ai, bCZ, eW, ke, cc, cU, jy, h, hn, dL, bl, hQ, fe, aq, vU, iO, kT, bP, aYa, Lq, bD, B, bCS, bL, fM, aYP, bDa, fG, aA, cz, v, beZ, q, eA, bzg, XX, lg, nv, aMb, aT, cy, jj, aAt, rv, ae, bA, bCV, iU, rh, oV, Y, bCU, r, lo, aYR, en, t, zz, pb, ck, nM, iM, bCY, hO, np, bt, hS, gx, kh, jh, btu, bS, ade, iJ, ad, hX, hd, bCW, bzk, aNp, ji, nJ, uQ, DI, d, lx, je, ff, aF, Pd, iV, KM, bz, dr, qa, eK, mO, aMa, aAS, bE, XO, arx, cP, ra, lf, afO, y); #c1(GLCCI1) c2(NP_612435) c3(glucocorticoid-induced transcript 1 protein) c4(236497) c5(236498, 236499, 236500, 236501, 236502, 236503, 236504) c6( ) c7(dw, bM, cm); #c1(GLCE) c2(XP_005254355) c3(D-glucuronyl C5-epimerase isoform X1) c4(273167, 273168) c5(273169, 273170, 273171, 273172, 273173, 273174, 273175, 273176, 273177, 273178, 273179, 273180) c6( ) c7(ae, T, ft, aW, aT, bz, ad); #c1(GLDC) c2(NP_000161) c3(glycine dehydrogenase (decarboxylating), mitochondrial precursor) c4(3715) c5(3716, 3717, 3718, 3719, 3720, 3721) c6( ) c7(T, eM, jh, dG, np, nA, bz, y, aZI, bAN, UZ, xt); #c1(GLDN) c2(NP_861454) c3(gliomedin) c4(255601, 255602) c5(255603, 255604, 255605, 255606, 255607, 255608) c6( ) c7(ans, aq, T, B, yW); #c1(GLDN) c2(XP_011519803) c3(gliomedin isoform X1) c4( ) c5(314550, 314551, 314552, 314553, 314554, 314555, 314556, 314557, 314558, 314559) c6( ) c7(ans, aq, T, B, yW); #c1(GLE1) c2(NP_001003722) c3(nucleoporin GLE1 isoform 1) c4(20061, 20062) c5(20063, 20064, 20065, 20066, 20067, 20068, 20069, 20070, 20071, 20072, 20073, 20074) c6( ) c7(bDb, bnq); #c1(GLE1) c2(NP_001490) c3(nucleoporin GLE1 isoform 2) c4(118164) c5(118165, 118166, 118167, 118168, 118169, 118170) c6( ) c7(bDb, bnq); #c1(GLG1) c2(NP_001139138) c3(Golgi apparatus protein 1 isoform 2 precursor) c4(58772) c5(58773, 58774, 58775, 58776, 58777, 58778) c6( ) c7(dB, T, aF, as, aT); #c1(GLG1) c2(NP_001139139) c3(Golgi apparatus protein 1 isoform 3 precursor) c4( ) c5(58779, 58780, 58781, 58782, 58783, 58784) c6( ) c7(dB, T, aF, as, aT); #c1(GLG1) c2(NP_036333) c3(Golgi apparatus protein 1 isoform 1 precursor) c4(173047, 173048) c5(173049, 173050, 173051, 173052, 173053, 173054) c6( ) c7(dB, T, aF, as, aT); #c1(GLI1) c2(NP_001161081) c3(zinc finger protein GLI1 isoform 3) c4(65295) c5(65296, 65297, 65298, 65299, 65300, 65301, 65302, 65303, 65304, 65305) c6( ) c7(T, aC, pf, if, fd, bB, axk, ci, bv, aE, hu, pk, eL, cp, aW, g, eF, cm, QA, Qt, zV, bDd, eM, cj, m, IG, ht, n, qN, ft, bDc, dL, hB, he, dx, pl, MD, fe, aq, kp, op, iO, dB, hk, eD, hL, zG, qF, YH, B, eR, fG, aA, bX, V, akW, q, eA, eJ, hW, afQ, aT, jj, ae, jf, s, Qr, nO, Y, r, en, cl, t, iK, sS, QG, kP, auo, nG, np, bt, hS, kh, id, acl, ad, hX, io, ji, IQ, fb, uQ, d, qt, ff, eH, aF, hp, aiz, iV, iR, bz, bE); #c1(GLI1) c2(XP_005268856) c3(zinc finger protein GLI1 isoform X2) c4( ) c5(282122, 282123, 282124, 282125, 282126, 282127, 282128, 282129, 282130, 282131, 282132, 282133, 282134, 282135, 282136, 282137, 282138) c6( ) c7(T, aC, pf, if, fd, bB, axk, ci, bv, aE, hu, pk, eL, cp, aW, g, eF, cm, QA, Qt, zV, bDd, eM, cj, m, IG, ht, n, qN, ft, bDc, dL, hB, he, dx, pl, MD, fe, aq, kp, op, iO, dB, hk, eD, hL, zG, qF, YH, B, eR, fG, aA, bX, V, akW, q, eA, eJ, hW, afQ, aT, jj, ae, jf, s, Qr, nO, Y, r, en, cl, t, iK, sS, QG, kP, auo, nG, np, bt, hS, kh, id, acl, ad, hX, io, ji, IQ, fb, uQ, d, qt, ff, eH, aF, hp, aiz, iV, iR, bz, bE); #c1(GLI1) c2(XP_011536491) c3(zinc finger protein GLI1 isoform X1) c4(333830, 333831, 333832, 333833) c5(333834, 333835, 333836, 333837, 333838, 333839, 333840, 333841, 333842, 333843, 333844, 333845, 333846, 333847) c6( ) c7(T, aC, pf, if, fd, bB, axk, ci, bv, aE, hu, pk, eL, cp, aW, g, eF, cm, QA, Qt, zV, bDd, eM, cj, m, IG, ht, n, qN, ft, bDc, dL, hB, he, dx, pl, MD, fe, aq, kp, op, iO, dB, hk, eD, hL, zG, qF, YH, B, eR, fG, aA, bX, V, akW, q, eA, eJ, hW, afQ, aT, jj, ae, jf, s, Qr, nO, Y, r, en, cl, t, iK, sS, QG, kP, auo, nG, np, bt, hS, kh, id, acl, ad, hX, io, ji, IQ, fb, uQ, d, qt, ff, eH, aF, hp, aiz, iV, iR, bz, bE); #c1(GLI1) c2(XP_011536492) c3(zinc finger protein GLI1 isoform X3) c4(333848, 333849) c5(333850, 333851, 333852, 333853, 333854, 333855, 333856) c6( ) c7(T, aC, pf, if, fd, bB, axk, ci, bv, aE, hu, pk, eL, cp, aW, g, eF, cm, QA, Qt, zV, bDd, eM, cj, m, IG, ht, n, qN, ft, bDc, dL, hB, he, dx, pl, MD, fe, aq, kp, op, iO, dB, hk, eD, hL, zG, qF, YH, B, eR, fG, aA, bX, V, akW, q, eA, eJ, hW, afQ, aT, jj, ae, jf, s, Qr, nO, Y, r, en, cl, t, iK, sS, QG, kP, auo, nG, np, bt, hS, kh, id, acl, ad, hX, io, ji, IQ, fb, uQ, d, qt, ff, eH, aF, hp, aiz, iV, iR, bz, bE); #c1(GLI2) c2(NP_005261) c3(zinc finger protein GLI2) c4(154415) c5(154416, 154417, 154418, 154419, 154420, 154421, 154422, 154423, 154424, 154425, 154426, 154427) c6( ) c7(gh, T, kh, id, acz, IH, al, aA, bB, n, bBS, BF, bDe, Qo, ad, biN, bv, HF, aE, arA, bDg, afQ, Id, aT, h, azm, dL, K, jj, ahK, fb, aOV, ae, af, eL, avP, bDf, B, qt, aW, Y, oV, eH, Az, ff, HL, kp, aF, en, eF, t, cm, hq, gk, sS, cA, bE, hk, zG, m, YH, ZW, X, hS); #c1(GLI2) c2(XP_006712485) c3(zinc finger protein GLI2 isoform X2) c4(286684, 286685) c5(286686, 286687, 286688, 286689, 286690, 286691, 286692, 286693, 286694, 286695, 286696) c6( ) c7(gh, T, kh, id, acz, IH, al, aA, bB, n, bBS, BF, bDe, Qo, ad, biN, bv, HF, aE, arA, bDg, afQ, Id, aT, h, azm, dL, K, jj, ahK, fb, aOV, ae, af, eL, avP, bDf, B, qt, aW, Y, oV, eH, Az, ff, HL, kp, aF, en, eF, t, cm, hq, gk, sS, cA, bE, hk, zG, m, YH, ZW, X, hS); #c1(GLI2) c2(XP_011509275) c3(zinc finger protein GLI2 isoform X5) c4(299898) c5(299899, 299900, 299901, 299902, 299903) cG( ) c7(gh, T, kh, id, acz, IH, al, aA, bB, n, bBS, BF, bDe, Qo, ad, biN, bv, HF, aE, arA, bDg, afQ, Id, aT, h, azm, dL, K, jj, ahK, fb, aOV, ae, af, eL, avP, bDf, B, qt, aW, Y, oV, eH, Az, ff, HL, kp, aF, en, eF, t, cm, hq, gk, sS, cA, bE, hk, zG, m, YH, ZW, X, hS); #c1(GLI2) c2(XP_011509276) c3(zinc finger protein GLI2 isoform X6) c4( ) c5(299904) cG( ) c7(gh, T, kh, id, acz, IH, al, aA, bB, n, bBS, BF, bDe, Qo, ad, biN, bv, HF, aE, arA, bDg, afQ, Id, aT, h, azm, dL, K, jj, ahK, fb, aOV, ae, af, eL, avP, bDf, B, qt, aW, Y, oV, eH, Az, ff, HL, kp, aF, en, eF, t, cm, hq, gk, sS, cA, bE, hk, zG, m, YH, ZW, X, hS); #c1(GLI3) c2(XP_011513575) c3(transcriptional activator GLI3 isoform X1) c4(305884, 305885) c5(305886, 305887, 305888, 305889, 305890, 305891, 305892, 305893, 305894, 305895, 305896, 305897, 305898) c6( ) c7(T, dA, aw, ha, atS, WT, aA, cz, bB, jx, aml, ci, PJ, zU, LI, akW, q, cd, ad, hX, eJ, XW, ahD, x, eW, aE, bDg, bDi, bxn, agi, afU, aT, h, BZ, cy, K, bDk, ZW, hH, avQ, sj, jf, ak, anR, B, d, aW, aVQ, Az, CT, OS, r, fe, lo, bDI, g, as, fq, pb, aUv, atb, zV, bDj, ck, Qi, sS, bDd, vW, c, iO, bE, iT, X, eB, U, zG, k, bkh, bC, art, bt, xg, bDh, bwD); #c1(GLIPR1) c2(NP_006842) c3(glioma pathogenesis-related protein 1 precursor) c4(168584) c5(168585, 168586, 168587, 168588, 168589, 168590) c6( ) c7(T, d, dB, eL, dL, ey, hf, er, ae, eA, ad); #c1(GLIPR2) c2(NP_001273939) c3(Golgi-associated plant pathogenesis-related protein 1 isoform b) c4(105926) c5(105927, 105928, 105929, 105930, 105931, 105932, 105933, 105934) c6(105935, 105936) c7(eA, oe, B, Hb); #c1(GLIPR2) c2(NP_071738) c3(Golgi-associated plant pathogenesis-related protein 1 isoform a) c4(211883) c5(211884, 211885, 211886, 211887, 211888, 211889, 211890, 211891, 211892) c6(211893, 211894) c7(eA, oe, B, Hb); #c1(GLIS2) c2(XP_005255699) c3(zinc finger protein GLIS2 isoform X1) c4(273810) c5(273811, 273812, 273813, 273814, 273815, 273816, 273817, 273818, 273819, 273820) c6( ) c7(ck, fU, T, Y, bDn, aq, vm, gm, dy, iY, bDm, Vz, aER, B, aY); #c1(GLIS3) c2(XP_006716794) c3(zinc finger protein GLIS3 isoform X8) c4( ) c5(290464, 290465, 290466, 290467, 290468, 290469, 290470, 290471, 290472, 290473, 290474, 290475, 290476, 290477, 290478, 290479, 290480, 290481, 290482, 290483, 290484, 290485, 290486, 290487) c6( ) c7(bL, A, mh, RN, mG, wB, aj, dy, K, Nj, aBZ, J, bDo); #c1(GLIS3) c2(XP_011516066) c3(zinc finger protein GLIS3 isoform X2) c4(309264, 309265) c5(309266, 309267, 309268, 309269, 309270, 309271, 309272) c6( ) c7(bL, A, mh, RN, mG, wB, aj, dy, K, Nj, aBZ, J, bDo); #c1(GLIS3) c2(XP_011516068) c3(zinc finger protein GLIS3 isoform X1) c4(309273, 309274) c5(309275, 309276, 309277, 309278, 309279) c6( ) c7(bL, A, mh, RN, mG, wB, aj, dy, K, Nj, aBZ, J, bDo); #c1(GLMN) c2(XP_011538848) c3(glomulin isoform X1) c4(336914) c5(336915, 336916, 336917, 336918, 336919, 336920) c6( ) c7(T, ob, aKu, aKw, asB, NT, bB, aKs, ci, bDq, fu, Jt, q, aIZ, aHF, h, H, mJ, BO, s, YC, r, ks, Kf, g, Im, t, bE, YI, GG, bP, bDr, aKp, bE, afd, cj, bDp, aS, m, R, B); #c1(GLO1) c2(NP_006699) c3(lactoylglutathione lyase) c4(167235) c5(167236, 167237, 167238, 167239, 167240, 167241) c6( ) c7(bL, T, dD, aC, eR, ea, eX, aA, bB, wo, aj, dG, ah, et, j, eq, fr, lu, V, ww, eA, J, ad, kL, adX, aT, cy, eV, K, he, af, sj, A, aW, Y, aF, zC, gG, bN, hq, ck, rR, cA, adZ, kB, bE, iA, iT, U, aS, ei, it); #c1(GLOD4) c2(NP_057164) c3(glyoxalase domain-containing protein 4) c4(189240, 189241, 189242) c5(189243, 189244, 189245, 189246, 189247, 189248, 189249, 189250, 189251, 189252, 189253, 189254, 189255, 189256, 189257, 189258, 189259, 189260) c6( ) c7(aq, B, ci); #c1(GLOD4) c2(XP_006721603) c3(glyoxalase domain-containing protein 4 isoform X1) c4(294111) c5(294112, 294113, 294114, 294115, 294116, 294117) c6( ) c7(aq, B, ci); #c1(GLP1R) c2(NP_002053) c3(glucagon-like peptide 1 receptor precursor) c4(124091) c5(124092, 124093, 124094, 124095, 124096, 124097) c6( ) c7(bL, aC, dD, ea, e, jN, cz, aj, dG, v, eq, J, mj, aE, pX, K, bq, uX, A, je, fc, ap, r, cm, iM, ac, U, gX); #c1(GLP2R) c2(NP_004237) c3(glucagon-like peptide 2 receptor) c4(144516, 144517, 144518) c5(144519, 144520, 144521, 144522, 144523, 144524, 144525, 144526, 144527, 144528, 144529, 144530, 144531, 144532, 144533, 144534, 144535, 144536, 144537, 144538, 144539, 144540, 144541, 144542) c6( ) c7(bB, fb, bE, ji, iV); #c1(GLP2R) c2(XP_011522379) c3(glucagon-like peptide 2 receptor isoform X1) c4(317063) c5( ) c6( ) c7(bB, fb, bE, ji, iV); #c1(GLRA1) c2(NP_000162) c3(glycine receptor subunit alpha-1 isoform 2 precursor) c4(3722, 3723) c5(3724, 3725, 3726, 3727, 3728, 3729, 3730, 3731, 3732) c6( ) c7(II, IF, aR, ft, aWm, ac, Js, aWN, HP, DK, aU, bDs, dg, Jo); #c1(GLRA1) c2(NP_001139512) c3(glycine receptor subunit alpha-1 isoform 1 precursor) c4(59455) c5(59456, 59457, 59458, 59459, 59460, 59461, 59462, 59463) c6( ) c7(II, IF, aR, ft, aWm, ac, Js, aWN, HP, DK, aU, bDs, dg, Jo); #c1(GLRA1) c2(NP_001278929) c3(glycine receptor subunit alpha-1 isoform 3) c4( ) c5(111051, 111052, 111053, 111054, 111055, 111056, 111057) cG( ) c7(II, IF, aR, ft, aWm, ac, Js, aWN, HP, DK, aU, bDs, dg, Jo); #c1(GLRA2) c2(NP_001112357) c3(glycine receptor subunit alpha-2 isoform A precursor) c4(43297, 43298) c5(43299, 43300, 43301, 43302, 43303, 43304) c6( ) c7(ha, af); #c1(GLRA2) c2(NP_001112358) c3(glycine receptor subunit alpha-2 isoform B precursor) c4(43305) c5(43306, 43307, 43308, 43309, 43310, 43311) cG( ) c7(ha, af); #c1(GLRA2) c2(NP_001165413) c3(glycine receptor subunit alpha-2 isoform C) c4( ) c5(67662, 67663, 67664, 67665, 67666) c6( ) c7(ha, af); #c1(GLRA2) c2(XP_006724550) c3(glycine receptor subunit alpha-2 isoform X1) c4(296068) c5(296069, 296070, 296071, 296072, 296073, 296074, 296075) c6( ) c7(ha, af); #c1(GLRA3) c2(NP_001036008) c3(glycine receptor subunit alpha-3 isoform b precursor) c4(33678) c5(33679, 33680, 33681, 33682, 33683, 33684) c6( ) c7(il, ha, Ea, bO); #c1(GLRA3) c2(NP_006520) c3(glycine receptor subunit alpha-3 isoform a precursor) c4(165961) c5(165962, 165963, 165964, 165965, 165966, 165967, 165968, 165969) c6( ) c7(il, ha, Ea, bO); #c1(GLRB) c2(NP_001159532) c3(glycine receptor subunit beta isoform A precursor) c4(64265, 64266) c5(64267, 64268, 64269, 64270, 64271, 64272, 64273, 64274, 64275, 64276) c6( ) c7(II, IF, lu, aWN, bDs, nA, aLI); #c1(GLRB) c2(NP_001159533) c3(glycine receptor subunit beta isoform B precursor) c4( ) c5(64277, 64278, 64279, 64280, 64281, 64282) c6( ) c7(II, IF, Iu, aWN, bDs, nA, aLI); #c1(GLRX) c2(NP_001230588) c3(glutaredoxin-1) c4(86371) c5(86372, 86373, 86374, 86375, 86376, 86377, 86378, 86379, 86380, 86381, 86382, 86383, 86384, 86385, 86386, 86387, 86388, 86389, 86390, 86391, 86392, 86393) c6( ) c7(T, jv, LG, Be, oe, OI, U, cz, aCI, v, vs, K, bq, uQ, uC, aa); #c1(GLRX2) c2(NP_057150) c3(glutaredoxin 2 isoform 1) c4(189159) c5(189160, 189161, 189162, 189163, 189164, 189165) c6( ) c7(gZ, cy, aw, ei, bu); #c1(GLRX2) c2(NP_932066) c3(glutaredoxin 2 isoform 2 precursor) c4(258779) c5(258780, 258781, 258782, 258783, 258784, 258785) c6( ) c7(gZ, cy, aw, ei, bu); #c1(GLRX3) c2(NP_006532) c3(glutaredoxin-3) c4(166053) c5(166054, 166055, 166056, 166057, 166058, 166059, 166060, 166061, 166062, 166063, 166064, 166065, 166066, 166067) c6( ) c7(es, T, ac, bE, aW, aT, cz, bB, ey, q, bz, B); #c1(GLRX5) c2(NP_057501) c3(glutaredoxin-related protein 5, mitochondrial precursor) c4(191185) c5(191186, 191187, 191188, 191189, 191190, 191191) c6( ) c7(kA, oe, oj, oW, bDt, awK, avG, UZ, wT); #c1(GLS) c2(NP_001243239) c3(glutaminase kidney isoform, mitochondrial isoform 2) c4(90230) c5(90231, 90232, 90233, 90234, 90235, 90236) c6( ) c7(T, dt, hV, ha, al, bB, axA, bS, ci, eA, x, av, mj, NS, aT, h, bj, dL, eL, Uf, d, aW, Y, aPf, aq, S, NR, g, eE, bz, dr, ck, gk, BU, qe, vD, eM, aiM, hR, pg, QF, k, ER, pw, y, bt, B); #c1(GLS) c2(NP_055720) c3(glutaminase kidney isoform, mitochondrial isoform 1 precursor) c4(183044, 183045) c5(183046, 183047, 183048, 183049, 183050, 183051, 183052, 183053, 183054, 183055, 183056, 183057) c6( ) c7(T, dt, hV, ha, al, bB, axA, bS, ci, eA, x, av, mj, NS, aT, h, bj, dL, eL, Uf, d, aW, Y, aPf, aq, S, NR, g, eE, bz, dr, ck, gk, BU, qe, vD, eM, aiM, hR, pg, QF, k, ER, pw, y, bt, B); #c1(GLS2) c2(NP_037399) c3(glutaminase liver isoform, mitochondrial isoform 1 precursor) c4(175281, 175282) c5(175283, 175284, 175285, 175286, 175287, 175288, 175289, 175290, 175291, 175292, 175293, 175294) c6( ) c7(iC, T, jv, d, bE, ev, ha, mg, bB, aq, Xj, mf, eA, as, il, y, Fc, B, Lg); #c1(GLT1D1) c2(NP_653270) c3(glycosyltransferase 1 domain-containing protein 1 precursor) c4(239439) c5(239440, 239441, 239442, 239443, 239444, 239445, 239446, 239447) c6(239448, 239449) c7(aw, ci, aT); #c1(GLT1D1) c2(XP_005253610) c3(glycosyltransferase 1 domain-containing protein 1 isoform X2) c4(272581) c5(272582, 272583, 272584, 272585, 272586, 272587, 272588, 272589) c6(272590, 272591) c7(aw, ci, aT); #c1(GLT1D1) c2(XP_011536258) c3(glycosyltransferase 1 domain-containing protein 1 isoform X1) c4(333594) c5(333595) c6( ) c7(aw, ci, aT); #c1(GLT1D1) c2(XP_011536259) c3(glycosyltransferase 1 domain-containing protein 1 isoform X3) c4( ) c5(333596, 333597, 333598, 333599, 333600, 333601, 333602) c6(333603, 333604) c7(aw, ci, aT); #c1(GLT6D1) c2(XP_011516939) c3(glycosyltransferase 6 domain-containing protein 1 isoform X1) c4(310468) c5(310469, 310470, 310471, 310472, 310473, 310474) c6( ) c7(uz, Tz); #c1(GLT8D1) c2(NP_001010983) c3(glycosyltransferase 8 domain-containing protein 1) c4(24395, 24396, 24397, 24398, 24399, 24400, 24401, 24402) c5(24403, 24404, 24405, 24406, 24407, 24408, 24409, 24410, 24411, 24412, 24413, 24414, 24415, 24416, 24417, 24418, 24419, 24420, 24421, 24422, 24423, 24424, 24425, 24426, 24427, 24428, 24429, 24430, 24431, 24432, 24433, 24434, 24435, 24436, 24437, 24438, 24439, 24440, 24441, 24442, 24443, 24444, 24445, 24446, 24447, 24448, 24449, 24450, 24451, 24452, 24453, 24454, 24455, 24456, 24457, 24458, 24459, 24460) c6( ) c7(he, bO); #c1(GLTSCR1) c2(XP_005258890) c3(glioma turner suppressor candidate region gene 1 protein isoform X1) c4(275865) c5(275866, 275867, 275868, 275869, 275870, 275871) c6( ) c7(dB, Fc, Qk, eA, ip); #c1(GLTSCR1) c2(XP_011525185) c3(glioma turner suppressor candidate region gene 1 protein isoform X3) c4( ) c5(319626, 319627, 319628) c6( ) c7(dB, Fc, Qk, eA, ip); #c1(GLTSCR2) c2(NP_056525) c3(glioma turner suppressor candidate region gene 2 protein) c4(187917, 187918, 187919) c5(187920, 187921, 187922, 187923, 187924, 187925, 187926, 187927, 187928, 187929, 187930, 187931, 187932, 187933, 187934, 187935, 187936, 187937) c6( ) c7(T, kl, d, dB, U, aT, aA, cm, aF, EY, g, as, eA, f, nJ, B, ad, Fc); #c1(GLUD1) c2(NP_005262) c3(glutamate dehydrogenase 1, mitochondrial precursor) c4(154428, 154429, 154430, 154431, 154432, 154433) c5(154434, 154435, 154436, 154437, 154438, 154439, 154440, 154441, 154442, 154443, 154444, 154445, 154446, 154447, 154448, 154449, 154450, 154451, 154452, 154453, 154454, 154455, 154456, 154457, 154458) c6( ) c7(yr, aYX, IV, dc, eu, ha, HN, aWJ, aip, bo, IG, aPf, jy, pw, il, xw, bDu, aR); #c1(GLUD1) c2(XP_011537971) c3(glutamate dehydrogenase 1, mitochondrial isoform X1) c4( ) c5(335510, 335511, 335512, 335513, 335514, 335515, 335516, 335517, 335518, 335519, 335520) c6( ) c7(yr, aYX, IV, dc, eu, ha, HN, aWJ, aip, bo, IG, aPf, jy, pw, il, xw, bDu, aR); #c1(GLUD2) c2(NP_036216) c3(glutamate dehydrogenase 2, mitochondrial precursor) c4(172425) c5(172426, 172427, 172428, 172429, 172430, 172431) c6( ) c7(an); #c1(GLUL) c2(XP_006711341) c3(glutamine synthetase isoform X1) c4(285870, 285871) c5(285872, 285873, 285874, 285875, 285876, 285877, 285878, 285879, 285880, 285881, 285882, 285883, 285884, 285885, 285886, 285887, 285888, 285889, 285890, 285891, 285892, 285893, 285894, 285895) c6( ) c7(bL, ka, jp, ha, aFc, bO, ti, aj, bS, v, et, il, bfD, eA, aR, J, IF, av, bwo, h, bK, K, hK, DX, dF, af, A, d, B, kt, dq, aq, bDv, Z, Ym, bN, iO, Lj, ki, FB, SC, vy, nw, ra, bt, xg, gD); #c1(GLYAT) c2(NP_005829) c3(glycine N-acyltransferase isoform b) c4(159727) c5(159728, 159729, 159730, 159731, 159732, 159733) c6( ) c7(bM, T, IP, if, bB, Vd, ci, qj, aJM, aE, dV, K, aW, CT, La, aoD, Ku, eF, g, eE, cm, aAW, qJ, eM, nB, m, n, nA, qN, eh, eW, ft, pe, cU, h, on, pi, dx, A, aq, aMJ, CQ, ej, iO, ZL, IX, eD, QT, hR, aez, at, B, bL, rf, aA, j, Kh, AO, q, er, eA, oT, mj, hW, nv, aT, bK, IM, ae, jf, if, s, aMG, NE, Y, r, en, cl, t, iK, hY, ck, BU, VJ, bDw, c, kB, nM, iM, jh, Hn, ad, hX, hd, ds, nJ, je, BO, qt, Fm, ff, eH, eZ, aF, bz, pu, bE, aS, be, ei, pC); #c1(GLYAT) c2(NP_964011) c3(glycine N-acyltransferase isoform a) c4(262618) c5(262619, 262620, 262621, 262622, 262623, 262624, 262625, 262626, 262627, 262628) c6( ) c7(bM, T, IP, if, bB, Vd, ci, qj, aJM, aE, dV, K, aW, CT, La, aoD, Ku, eF, g, eE, cm, aAW, qJ, eM, nB, m, n, nA, qN, eh, eW, ft, pe, cU, h, on, pi, dx, A, aq, aMJ, CQ, ej, iO, ZL, IX, eD, QT, hR, aez, at, B, bL, rf, aA, j, Kh, AO, q, er, eA, oT, mj, hW, nv, aT, bK, IM, ae, jf, if, s, aMG, NE, Y, r, en, cl, t, iK, hY, ck, BU, VJ, bDw, c, kB, nM, iM, jh, Hn, ad, hX, hd, ds, nJ, je, BO, qt, Fm, ff, eH, eZ, aF, bz, pu, bE, aS, be, ei, pC); #c1(GLYATL3) c2(NP_001010904) c3(glycine N-acyltransferase-like protein 3) c4(24036, 24037) c5(24038, 24039, 24040, 24041, 24042, 24043, 24044, 24045, 24046, 24047, 24048, 24049) c6( ) c7(hb); #c1(GLYCTK) c2(NP_001138423) c3(glycerate kinase isoform 2) c4(56645) c5(56646, 56647, 56648, 56649, 56650, 56651, 56652, 56653, 56654, 56655, 56656, 56657, 56658, 56659) c6( ) c7(bDy, bDx); #c1(GLYCTK) c2(NP_660305) c3(glycerate kinase isoform 1) c4(240815, 240816, 240817, 240818, 240819, 240820) c5(240821, 240822, 240823, 240824, 240825, 240826, 240827, 240828, 240829, 240830, 240831, 240832, 240833, 240834, 240835, 240836, 240837, 240838, 240839, 240840, 240841, 240842, 240843, 240844, 240845, 240846, 240847, 240848, 240849, 240850, 240851, 240852) c6( ) c7(bDy, bDx); #c1(GM2A) c2(NP_000396) c3(ganglioside GM2 activator isoform 1 precursor) c4(8467) c5(8468, 8469, 8470, 8471, 8472, 8473) c6( ) c7(kf, bDa, bDz, IR, awM); #c1(GMCL1) c2(NP_848526) c3(germ cell-less protein-like 1) c4(253778) c5(253779, 253780, 253781, 253782, 253783, 253784) c6( ) c7(cm, he, T, j, K); #c1(GMDS) c2(NP_001240775) c3(GDP-mannose 4,6 dehydratase isoform 2) c4(88801) c5(88802, 88803, 88804, 88805, 88806, 88807) c6( ) c7(T, dH, bE, r, bB, q); #c1(GMDS) c2(NP_001491) c3(GDP-mannose 4,6 dehydratase isoform 1) c4(118171) c5(118172, 118173, 118174, 118175, 118176, 118177) c6( ) c7(T, dH, bE, r, bB, q); #c1(GMFB) c2(NP_004115) c3(glia maturation factor beta) c4(143691, 143692) c5(143693, 143694, 143695, 143696, 143697, 143698, 143699, 143700, 143701, 143702, 143703, 143704) c6( ) c7(cm, pd, d, bDA, bDB); #c1(GMFG) c2(NP_004868) c3(glia maturation factor gamma isoform 1) c4(150435) c5(150436, 150437, 150438, 150439, 150440, 150441, 150442, 150443, 150444, 150445) c6( ) c7(t, e, j, m); #c1(GMIP) c2(NP_001275927) c3(GEM-interacting protein isoform 2) c4(107415) c5(107416, 107417, 107418, 107419, 107420, 107421) c6( ) c7(bO); #c1(GMIP) c2(NP_057657) c3(GEM-interacting protein isoform 1) c4(192127) c5(192128, 192129, 192130, 192131, 192132, 192133) c6( ) c7(bO); #c1(GML) c2(XP_011515271) c3(glycosyl-phosphatidylinositol-anchored molecule-like protein isoform X2) c4(308111) c5( ) c6( ) c7(T, ht, eM, hu); #c1(GML) c2(XP_011515274) c3(glycosyl-phosphatidylinositol-anchored molecule-like protein isoform X1) c4( ) c5(308112, 308113, 308114, 308115, 308116, 308117) c6( ) c7(T, ht, eM, hu); #c1(GMNN) c2(XP_005249216) c3(geminin isoform X1) c4(269109, 269110, 269111, 269112) c5(269113, 269114, 269115, 269116, 269117, 269118, 269119, 269120, 269121, 269122, 269123, 269124, 269125, 269126, 269127, 269128, 269129, 269130, 269131, 269132, 269133, 269134, 269135, 269136, 269137, 269138, 269139, 269140) c6( ) c7(T, aC, dA, al, NT, jh, fd, uu, V, aE, dE, aT, h, pk, NE, aW, Y, aJD, nY, bz, gk, cj, eo, m, B); #c1(GMPPA) c2(NP_995319) c3(mannose-1-phosphate guanyltransferase alpha) c4(263807, 263808, 263809) c5(263810, 263811, 263812, 263813, 263814, 263815, 263816, 263817, 263818, 263819, 263820, 263821, 263822, 263823, 263824, 263825, 263826, 263827, 263828) c6( ) c7(bDC); #c1(GMPPA) c2(XP_011509337) c3(mannose-1-phosphate guanyltransferase alpha isoform X5) c4( ) c5(299907, 299908, 299909, 299910, 299911, 299912, 299913, 299914, 299915, 299916, 299917) c6( ) c7(bDC); #c1(GMPPB) c2(NP_037466) c3(mannose-1-phosphate guanyltransferase beta isoform 1) c4(175650) c5(175651, 175652, 175653, 175654, 175655, 175656) c6( ) c7(bDE, bDF, km, bDD); #c1(GMPPB) c2(NP_068806) c3(mannose-1-phosphate guanyltransferase beta isoform 2) c4(210650) c5(210651, 210652, 210653, 210654, 210655, 210656, 210657, 210658, 210659) c6( ) c7(bDE, bDF, km, bDD); #c1(GMPR) c2(NP_006868) c3(GMP reductase 1) c4(168752) c5(168753, 168754, 168755, 168756, 168757, 168758) c6( ) c7(Y, j); #c1(GMPR2) c2(NP_001002000) c3(GMP reductase 2 isoform 2) c4(19317) c5(19318, 19319, 19320, 19321, 19322, 19323, 19324, 19325, 19326, 19327, 19328, 19329, 19330, 19331, 19332, 19333) c6( ) c7(ck, aW, aA, g, aT); #c1(GMPR2) c2(NP_001269951) c3(GMP reductase 2 isoform 4) c4(103286) c5(103287) c6( ) c7(ck, aW, aA, g, aT); #c1(GMPR2) c2(NP_057660) c3(GMP reductase 2 isoform 1) c4(192154, 192155) c5(192156, 192157, 192158, 192159, 192160, 192161, 192162, 192163, 192164, 192165) c6( ) c7(ck, aW, aA, g, aT); #c1(GMPR2) c2(XP_005267799) c3(GMP reductase 2 isoform X2) c4( ) c5(281247, 281248, 281249, 281250, 281251) c6( ) c7(ck, aW, aA, g, aT); #c1(GMPS) c2(NP_003866) c3(GMP synthase [glutamine-hydrolyzing]) c4(141622) c5(141623, 141624, 141625, 141626, 141627, 141628, 141629, 141630, 141631, 141632, 141633, 141634, 141635, 141636, 141637, 141638) c6( ) c7(bt, B, bq); #c1(GMPS) c2(XP_011511565) c3(GMP synthase [glutamine-hydrolyzing] isoform X1) c4(302301) c5( ) c6( ) c7(bt, B, bq); #c1(GNA11) c2(NP_002058) c3(guanine nucleotide-binding protein subunit alpha-11) c4(124098) c5(124099, 124100, 124101, 124102, 124103, 124104, 124105, 124106) c6( ) c7(bDG, T, aAI, Dy, TG, Y, aT, OM, bD, iP, HI, bDH, azh, avq); #c1(GNA12) c2(NP_001269369) c3(guanine nucleotide-binding protein subunit alpha-12 isoform 2) c4(101310) c5(101311, 101312, 101313, 101314, 101315, 101316) c6( ) c7(cZ, T, hl, Fj, pY, fG, eX, jh, cz, fd, j, ci, q, ad, hX, Do, pX, bDJ, aT, eV, dd, aW, ff, r, kt, en, iV, pL, t, bw, ig, dB, bDI, m, anx, y, bt, B, VB, On); #c1(GNA12) c2(NP_001280021) c3(guanine nucleotide-binding protein subunit alpha-12 isoform 4) c4(111272) c5(111273, 111274, 111275, 111276, 111277, 111278) cG( ) c7(cZ, T, hl, Fj, pY, fG, eX, jh, cz, fd, j, ci, q, ad, hX, Do, pX, bDJ, aT, eV, dd, aW, ff, r, kt, en, iV, pL, t, bw, ig, dB, bDI, m, anx, y, bt, B, VB, On); #c1(GNA12) c2(NP_031379) c3(guanine nucleotide-binding protein subunit alpha-12 isoform 1) c4(172100) c5(172101, 172102, 172103, 172104, 172105, 172106) c6( ) c7(cZ, T, hl, Fj, pY, fG, eX, jh, cz, fd, j, ci, q, ad, hX, Do, pX, bDJ, aT, eV, dd, aW, ff, r, kt, en, iV, pL, t, bw, ig, dB, bDI, m, anx, y, bt, B, VB, On); #c1(GNA13) c2(NP_001269354) c3(guanine nucleotide-binding protein subunit alpha-13 isoform 2) c4( ) c5(101249, 101250, 101251, 101252, 101253, 101254) cG( ) c7(aE, aW, Y, jh, aT, hp, pk, ad); #c1(GNA13) c2(NP_006563) c3(guanine nucleotide-binding protein subunit alpha-13 isoform 1) c4(166250, 166251, 166252) c5(166253, 166254, 166255, 166256, 166257, 166258, 166259, 166260, 166261, 166262, 166263, 166264) c6( ) c7(aE, aW, Y, jh, aT, hp, pk, ad); #c1(GNA14) c2(NP_004288) c3(guanine nucleotide-binding protein subunit alpha-14) c4(144875) c5(144876, 144877, 144878, 144879, 144880, 144881) c6( ) c7(il, cz, B, aA); #c1(GNA15) c2(NP_002059) c3(guanine nucleotide-binding protein subunit alpha-15) c4(124107) c5(124108, 124109, 124110, 124111, 124112, 124113) c6( ) c7(x, ou, T, aE, pe, iW, hF, bt, cd, zn); #c1(GNAI1) c2(NP_001243343) c3(guanine nucleotide-binding protein G(i) subunit alpha-1 isoform 2) c4( ) c5(90445, 90446, 90447, 90448, 90449) c6( ) c7(H, fq, cd, dJ, L); #c1(GNAI1) c2(NP_002060) c3(guanine nucleotide-binding protein G(i) subunit alpha-1 isoform 1) c4(124114, 124115) c5(124116, 124117, 124118, 124119, 124120, 124121124122) c6( ) c7(H, fq, cd, dJ, L); #c1(GNAI2) c2(NP_001159897) c3(guanine nucleotide-binding protein G(i) subunit alpha-2 isoform 2) c4(64950) c5(64951, 64952, 64953, 64954, 64955, 64956, 64957) c6( ) c7(bL, oe, cz, bB, Ja, dG, ci, v, afv, zP, pX, bDK, beD, bDM, zQ, fc, hl, fe, Hu, bDL, bz, qa, bE, hR, OD, cP, ei, B); #c1(GNAI2) c2(NP_001269546) c3(guanine nucleotide-binding protein G(i) subunit alpha-2 isoform 3) c4( ) c5(101869, 101870, 101871, 101872, 101873, 101874) cG( ) c7(bL, oe, cz, bB, Ja, dG, ci, v, afv, zP, pX, bDK, beD, bDM, zQ, fc, hl, fe, Hu, bDL, bz, qa, bE, hR, OD, cP, ei, B); #c1(GNAI2) c2(NP_001269547) c3(guanine nucleotide-binding protein G(i) subunit alpha-2 isoform 4) c4( ) c5(101875, 101876, 101877, 101878, 101879) c6( ) c7(bL, oe, cz, bB, Ja, dG, ci, v, afv, zP, pX, bDK, beD, bDM, zQ, fc, hl, fe, Hu, bDL, bz, qa, bE, hR, OD, cP, ei, B); #c1(GNAI2) c2(NP_001269548) c3(guanine nucleotide-binding protein G(i) subunit alpha-2 isoform 5) c4(101880) c5(101881, 101882, 101883, 101884, 101885, 101886) c6( ) c7(bL, oe, cz, bB, Ja, dG, ci, v, afv, zP, pX, bDK, beD, bDM, zQ, fc, hl, fe, Hu, bDL, bz, qa, bE, hR, OD, cP, ei, B); #c1(GNAI2) c2(NP_001269549) c3(guanine nucleotide-binding protein G(i) subunit alpha-2 isoform 6) c4(101887) c5(101888, 101889, 101890, 101891, 101892, 101893) cG( ) c7(bL, oe, cz, bB, Ja, dG, ci, v, afv, zP, pX, bDK, beD, bDM, zQ, fc, hl, fe, Hu, bDL, bz, qa, bE, hR, OD, cP, ei, B); #c1(GNAI2) c2(NP_002061) c3(guanine nucleotide-binding protein G(i) subunit alpha-2 isoform 1) c4(124123, 124124, 124125, 124126) c5(124127, 124128, 124129, 124130, 124131124132, 124133, 124134, 124135, 124136, 124137, 124138) c6( ) c7(bL, oe, cz, bB, Ja, dG, ci, v, afv, zP, pX, bDK, beD, bDM, zQ, fc, hl, fe, Hu, bDL, bz, qa, bE, hR, OD, cP, ei, B); #c1(GNAL) c2(NP_001248373) c3(guanine nucleotide-binding protein G(olf) subunit alpha isoform 3) c4( ) c5(93831, 93832, 93833, 93834, 93835) cG( ) c7(aji, bDN, c, Wk, aU, Wl, bK, Wm, bDO, aH); #c1(GNAL) c2(NP_892023) c3(guanine nucleotide-binding protein G(olf) subunit alpha isoform 1) c4(257632, 257633, 257634) c5(257635, 257636, 257637, 257638, 257639, 257640, 257641) c6( ) c7(aji, bDN, c, Wk, aU, Wl, bK, Wm, bDO, aH); #c1(GNAL) c2(XP_011523956) c3(guanine nucleotide-binding protein G(olf) subunit alpha isoform X1) c4(318492) c5(318493, 318494, 318495, 318496, 318497, 318498, 318499, 318500, 318501, 318502, 318503, 318504, 318505, 318506, 318507, 318508, 318509, 318510, 318511, 318512) c6( ) c7(aji, bDN, c, Wk, aU, Wl, bK, Wm, bDO, aH); #c1(GNAO1) c2(NP_066268) c3(guanine nucleotide-binding protein G(o) subunit alpha isoform a) c4(206860) c5(206861, 206862, 206863, 206864, 206865, 206866) c6( ) c7(hb, aW, vH, bDP, Im, B); #c1(GNAO1) c2(NP_620073) c3(guanine nucleotide-binding protein G(e) subunit alpha isoform b) c4(237269) c5(237270, 237271, 237272, 237273, 237274, 237275) c6( ) c7(hb, aW, vH, bDP, Im, B); #c1(GNAQ) c2(NP_002063) c3(guanine nucleotide-binding protein G(g) subunit alpha) c4(124139, 124140, 124141) c5(124142, 124143, 124144, 124145, 124146, 124147, 124148, 124149, 124150, 124151, 124152, 124153, 124154, 124155, 124156, 124157, 124158, 124159) c6( ) c7(T, aZ, hz, v, cd, aFy, vw, h, Dj, avq, cp, sj, Ck, Dg, kl, Y, Az, iP, Sc, bDR, Dy, aQn, auw, qq, dX, bD, bDQ); #c1(GNAS) c2(NP_000507) c3(protein GNAS isoform GNASL) c4(10685) c5(10686, 10687, 10688, 10689, 10690, 10691, 10692) c6( ) c7(bDV, bM, T, aC, ahS, rV, vf, bB, Ja, ci, bEa, acX, pX, dV, K, EL, hu, qM, eL, bDT, eG, yo, JI, aW, dg, g, eF, cm, bw, eM, nB, cj, uJ, OD, m, eg, OF, dD, IT, ht, aVF, bzb, n, aj, fr, nA, Ea, ml, JW, adf, jz, cc, Do, WB, Mv, RN, dL, bta, iw, ahJ, aq, Hu, cM, hk, bDX, bed, hR, qq, oh, HB, bDS, oe, aA, cz, adi, hy, v, q, ahy, bDZ, nX, xW, yg, aT, ae, ne, jf, bDM, kl, s, NE, xR, Y, bEc, aXY, r, en, EJ, ck, bEb, bdn, QG, acW, ac, yl, aru, gT, aAO, ao, Gl, Mb, bDU, id, pY, aZ, ml, aug, uu, eq, OH, bDY, ad, fU, py, aQS, IQ, bDW, yF, beD, aus, vj, ff, dq, anW, dr, qa, pv, es, OG, RV, bE, MG, X); #c1(GNAS) c2(NP_001070956) c3(protein GNAS isoform f) c4(35077) c5(35078, 35079, 35080, 35081, 35082, 35083, 35084) cG( ) c7(bDV, bM, T, aC, ahS, rV, vf, bB, Ja, ci, bEa, acX, pX, dV, K, EL, hu, qM, eL, bDT, eG, yo, JI, aW, dg, g, eF, cm, bw, eM, nB, cj, uJ, OD, m, eg, OF, dD, IT, ht, aVF, bzb, n, aj, fr, nA, Ea, ml, JW, adf, jz, cc, Do, WB, Mv, RN, dL, bta, iw, ahJ, aq, Hu, cM, hk, bDX, bed, hR, qq, oh, HB, bDS, oe, aA, cz, adi, hy, v, q, ahy, bDZ, nX, xW, yg, aT, ae, ne, jf, bDM, kl, s, NE, xR, Y, bEc, aXY, r, en, EJ, ck, bEb, bdn, QG, acW, ac, yl, aru, gT, aAO, ao, Gl, Mb, bDU, id, pY, aZ, ml, aug, uu, eq, OH, bDY, ad, fU, py, aQS, IQ, bDW, yF, beD, aus, vj, ff, dq, anW, dr, qa, pv, es, OG, RV, bE, MG, X); #c1(GNAS) c2(NP_001070957) c3(protein GNAS isoform g) c4(35085) c5(35086, 35087, 35088, 35089, 35090, 35091, 35092) cG( ) c7(bDV, bM, T, aC, ahS, rV, vf, bB, Ja, ci, bEa, acX, pX, dV, K, EL, hu, qM, eL, bDT, eG, yo, JI, aW, dg, g, eF, cm, bw, eM, nB, cj, uJ, OD, m, eg, OF, dD, IT, ht, aVF, bzb, n, aj, fr, nA, Ea, ml, JW, adf, jz, cc, Do, WB, Mv, RN, dL, bta, iw, ahJ, aq, Hu, cM, hk, bDX, bed, hR, qq, oh, HB, bDS, oe, aA, cz, adi, hy, v, q, ahy, bDZ, nX, xW, yg, aT, ae, ne, jf, bDM, kl, s, NE, xR, Y, bEc, aXY, r, en, EJ, ck, bEb, bdn, QG, acW, ac, yl, aru, gT, aAO, ao, Gl, Mb, bDU, id, pY, aZ, ml, aug, uu, eq, OH, bDY, ad, fU, py, aQS, IQ, bDW, yF, beD, aus, vj, ff, dq, anW, dr, qa, pv, es, OG, RV, bE, MG, X); #c1(GNAS) c2(NP_057676) c3(protein NESP55 isoform NESP55) c4(192284, 192285, 192286) c5(192287, 192288, 192289, 192290, 192291, 192292, 192293, 192294, 192295, 192296, 192297, 192298, 192299, 192300, 192301, 192302, 192303, 192304, 192305, 192306, 192307, 192308, 192309) c6( ) c7(bDV, bM, T, aC, ahS, rV, vf, bB, Ja, ci, bEa, acX, pX, dV, K, EL, hu, qM, eL, bDT, eG, yo, JI, aW, dg, g, eF, cm, bw, eM, nB, cj, uJ, OD, m, eg, OF, dD, IT, ht, aVF, bzb, n, aj, fr, nA, Ea, ml, JW, adf, jz, cc, Do, WB, Mv, RN, dL, bta, iw, ahJ, aq, Hu, cM, hk, bDX, bed, hR, qq, oh, HB, bDS, oe, aA, cz, adi, hy, v, q, ahy, bDZ, nX, xW, yg, aT, ae, ne, jf, bDM, kl, s, NE, xR, Y, bEc, aXY, r, en, EJ, ck, bEb, bdn, QG, acW, ac, yl, aru, gT, aAO, ao, Gl, Mb, bDU, id, pY, aZ, ml, aug, uu, eq, OH, bDY, ad, fU, py, aQS, IQ, bDW, yF, beD, aus, vj, ff, dq, anW, dr, qa, pv, es, OG, RV, bE, MG, X); #c1(GNAS) c2(NP_536350) c3(protein GNAS isoform XLas) c4(231263, 231264) c5(231265, 231266, 231267, 231268, 231269) c6( ) c7(bDV, bM, T, aC, ahS, rV, vf, bB, Ja, ci, bEa, acX, pX, dV, K, EL, hu, qM, eL, bDT, eG, yo, JI, aW, dg, g, eF, cm, bw, eM, nB, cj, uJ, OD, m, eg, OF, dD, IT, ht, aVF, bzb, n, aj, fr, nA, Ea, ml, JW, adf, jz, cc, Do, WB, Mv, RN, dL, bta, iw, ahJ, aq, Hu, cM, hk, bDX, bed, hR, qq, oh, HB, bDS, oe, aA, cz, adi, hy, v, q, ahy, bDZ, nX, xW, yg, aT, ae, ne, jf, bDM, kl, s, NE, xR, Y, bEc, aXY, r, en, EJ, ck, bEb, bdn, QG, acW, ac, yl, aru, gT, aAO, ao, Gl, Mb, bDU, id, pY, aZ, ml, aug, uu, eq, OH, bDY, ad, fU, py, aQS, IQ, bDW, yF, beD, aus, vj, ff, dq, anW, dr, qa, pv, es, OG, RV, bE, MG, X); #c1(GNAS) c2(NP_536351) c3(protein GNAS isoform GNASS) c4(231270) c5(231271, 231272, 231273, 231274, 231275, 231276, 231277, 231278, 231279, 231280) c6( ) c7(bDV, bM, T, aC, ahS, rV, vf, bB, Ja, ci, bEa, acX, pX, dV, K, EL, hu, qM, eL, bDT, eG, yo, JI, aW, dg, g, eF, cm, bw, eM, nB, cj, uJ, OD, m, eg, OF, dD, IT, ht, aVF, bzb, n, aj, fr, nA, Ea, ml, JW, adf, jz, cc, Do, WB, Mv, RN, dL, bta, iw, ahJ, aq, Hu, cM, hk, bDX, bed, hR, qq, oh, HB, bDS, oe, aA, cz, adi, hy, v, q, ahy, bDZ, nX, xW, yg, aT, ae, ne, jf, bDM, kl, s, NE, xR, Y, bEc, aXY, r, en, EJ, ck, bEb, bdn, QG, acW, ac, yl, aru, gT, aAO, ao, Gl, Mb, bDU, id, pY, aZ, ml, aug, uu, eq, OH, bDY, ad, fU, py, aQS, IQ, bDW, yF, beD, aus, vj, ff, dq, anW, dr, qa, pv, es, OG, RV, bE, MG, X); #c1(GNAT1) c2(NP_653082) c3(guanine nucleotide-binding protein G(t) subunit alpha-1) c4(238840) c5(238841, 238842, 238843, 238844, 238845, 238846, 238847, 238848, 238849, 238850) c6( ) c7(bEd, ayj, IR, bq); #c1(GNAT3) c2(NP_001095856) c3(guanine nucleotide-binding protein G(t) subunit alpha-3) c4(40863) c5(40864, 40865, 40866, 40867, 40868, 40869) c6( ) c7(gU, om, ki, yc, v, bq); #c1(GNAZ) c2(NP_002064) c3(guanine nucleotide-binding protein G(z) subunit alpha) c4(124160, 124161) c5(124162, 124163, 124164, 124165, 124166, 124167, 124168, 124169, 124170, 124171, 124172, 124173) c6( ) c7(Y, bK, yo); #c1(GNB1L) c2(NP_443730) c3(guanine nucleotide-binding protein subunit beta-like protein 1) c4(230048, 230049) c5(230050, 230051, 230052, 230053, 230054, 230055, 230056, 230057, 230058, 230059, 230060, 230061, 230062, 230063, 230064, 230065) c6( ) c7(bO, gl, bK, he, agY, bN); #c1(GNB2L1) c2(NP_006089) c3(guanine nucleotide-binding protein subunit beta-2-like 1) c4(161817, 161818) c5(161819, 161820, 161821, 161822, 161823, 161824, 161825, 161826, 161827, 161828, 161829, 161830) c6( ) c7(lD, T, aA, bB, n, aj, cd, ad, J, aT, K, ae, af, cp, ly, aW, Y, ff, aq, aF, en, g, f, iK, lx, nM, bE, U, m, it, B, ao); #c1(GNB3) c2(NP_002066) c3(guanine nucleotide-binding protein G(I)/G(S)/G(T) subunit beta-3 isoform 1) c4(124174) c5(124175, 124176, 124177, 124178, 124179, 124180) c6( ) c7(fR, ea, e, al, bO, gf, aY, Vp, dY, ta, qM, dQ, tw, aW, Qv, uC, nB, Ji, vy, cj, cE, dD, Uc, aw, cQ, aj, afE, et, cd, TB, td, Mm, ec, wG, h, dL, ey, ux, A, cM, fq, bJ, kT, W, cA, tl, IB, AN, bL, eR, AL, mr, wL, oe, jx, cz, cR, hz, hy, v, j, V, J, XX, uT, aT, bK, sR, ae, af, eu, kl, s, iU, sV, en, iK, bdn, pO, c, ac, cS, dy, sY, VR, akd, vr, oR, bS, oH, uu, eq, ad, nH, hd, Db, oz, sj, d, cH, ff, EZ, Z, qa, gk, aED, gZ, aS, ei, tP, ra, ne); #c1(GNB4) c2(XP_006713784) c3(guanine nucleotide-binding protein subunit beta-4 isoform X1) c4(287348, 287349) c5(287350, 287351, 287352, 287353, 287354, 287355, 287356, 287357, 287358, 287359) c6( ) c7(eL, bEe, dL, bU); #c1(GNB4) c2(XP_011511363) c3(guanine nucleotide-binding protein subunit beta-4 isoform X2) c4( ) c5(301937, 301938, 301939, 301940, 301941, 301942) c6( ) c7(eL, bEe, dL, bU); #c1(GNB5) c2(NP_006569) c3(guanine nucleotide-binding protein subunit beta-5 isoform a) c4( ) c5(166282, 166283, 166284, 166285, 166286, 166287, 166288, 166289, 166290, 166291, 166292, 166293) c6( ) c7(bB, bE); #c1(GNB5) c2(NP_057278) c3(guanine nucleotide-binding protein subunit beta-5 isoform b) c4(189815, 189816, 189817, 189818) c5(189819, 189820, 189821, 189822, 189823, 189824) c6( ) c7(bB, bE); #c1(GNB5) c2(XP_011519465) c3(guanine nucleotide-binding protein subunit beta-5 isoform X2) c4( ) c5(314131, 314132, 314133, 314134, 314135, 314136) c6( ) c7(bB, bE); #c1(GNE) c2(NP_001121699) c3(bifunctional UDP-N-acetylglucosamine 2-epimerase/N-acetylmannosamine kinase isoform 1) c4(46104, 46105) c5(46106, 46107, 46108, 46109, 46110, 46111, 46112, 46113, 46114) c6( ) c7(T, ajy, fr, ad, no, aE, alp, Dq, Ws, oj, Ak, h, aiW, bl, ae, bht, Y, lb, alj, alm, bb, bEf, bi); #c1(GNE) c2(NP_001177312) c3(bifunctional UDP-N-acetylglucosamine 2-epimerase/N-acetylmannosamine kinase isoform 4) c4(72643) c5(72644, 72645, 72646, 72647, 72648, 72649, 72650, 72651, 72652, 72653, 72654) c6( ) c7(T, ajy, fr, ad, no, aE, alp, Dq, Ws, oj, Ak, h, aiW, bl, ae, bht, Y, lb, alj, alm, bb, bEf, bi); #c1(GNE) c2(NP_001177317) c3(bifunctional UDP-N-acetylglucosamine 2-epimerase/N-acetylmannosamine kinase isoform 3) c4(72655, 72656) c5(72657, 72658, 72659, 72660, 72661, 72662) c6( ) c7(T, ajy, fr, ad, no, aE, alp, Dq, Ws, oj, Ak, h, aiW, bl, ae, bht, Y, lb, alj, alm, bb, bEf, bi); #c1(GNE) c2(NP_005467) c3(bifunctional UDP-N-acetylglucosamine 2-epimerase/N-acetylmannosamine kinase isoform 2) c4( ) c5(156419, 156420, 156421, 156422, 156423, 156424, 156425, 156426) c6( ) c7(T, ajy, fr, ad, no, aE, alp, Dq, Ws, oj, Ak, h, aiW, bl, ae, bht, Y, lb, alj, alm, bb, bEf, bi); #c1(GNE) c2(XP_005251391) c3(bifunctional UDP-N-acetylglucosamine 2-epimerase/N-acetylmannosamine kinase isoform X1) c4(270935) c5(270936, 270937, 270938, 270939, 270940, 270941) c6( ) c7(T, ajy, fr, ad, no, aE, alp, Dq, Ws, oj, Ak, h, aiW, bl, ae, bht, Y, lb, alj, alm, bb, bEf, bi); #c1(GNG10) c2(NP_001017998) c3(guanine nucleotide-binding protein G(I)/G(S)/G(O) subunit gamma-10 precursor) c4(26753) c5(26754, 26755, 26756, 26757, 26758, 26759) c6( ) c7(Y); #c1(GNG11) c2(NP_004117) c3(guanine nucleotide-binding protein G(I)/G(S)/G(O) subunit gamma-11 precursor) c4(143705) c5(143706, 143707, 143708, 143709, 143710, 143711) c6( ) c7(iu); #c1(GNG2) c2(XP_011535148) c3(guanine nucleotide-binding protein G(I)/G(S)/G(O) subunit gamma-2 isoform X1) c4(331985, 331986, 331987) c5(331988, 331989, 331990, 331991, 331992, 331993, 331994, 331995, 331996, 331997, 331998, 331999, 332000, 332001, 332002, 332003, 332004, 332005, 332006, 332007, 332008, 332009, 332010, 332011, 332012, 332013, 332014, 332015, 332016, 332017, 332018, 332019, 332020, 332021) c6( ) c7(T, Y); #c1(GNG4) c2(NP_004476) c3(guanine nucleotide-binding protein G(I)/G(S)/G(O) subunit gamma-4 precursor) c4(146704) c5(146705, 146706, 146707, 146708, 146709, 146710, 146711, 146712, 146713, 146714, 146715, 146716, 146717, 146718, 146719, 146720, 146721, 146722) c6( ) c7(fr, gv); #c1(GNG7) c2(NP_443079) c3(guanine nucleotide-binding protein G(I)/G(S)/G(O) subunit gamma-7 precursor) c4(229302) c5(229303, 229304, 229305, 229306, 229307) c6( ) c7(iK, ht, gX); #c1(GNG8) c2(NP_150283) c3(guanine nucleotide-binding protein G(I)/G(S)/G(O) subunit gamma-8 precursor) c4(228042) c5(228043, 228044, 228045, 228046, 228047, 228048, 228049) c6(228050) c7(ou, xR, hl, eZ, cj, h, m, ci, y, bEg, uQ); #c1(GNG8) c2(XP_011525827) c3(guanine nucleotide-binding protein G(I)/G(S)/G(O) subunit gamma-8 isoform X2) c4( ) c5(320235) c6( ) c7(ou, xR, hl, eZ, cj, h, m, ci, y, bEg, uQ); #c1(GNGT1) c2(NP_068774) c3(guanine nucleotide-binding protein G(T) subunit gamma-TI precursor) c4(210337, 210338) c5(210339, 210340, 210341, 210342, 210343, 210344, 210345, 210346, 210347, 210348, 210349, 210350, 210351, 210352, 210353, 210354, 210355, 210356, 210357, 210358, 210359, 210360, 210361, 210362) c6( ) c7(bM); #c1(GNGT2) c2(XP_006721882) c3(guanine nucleotide-binding protein G(I)/G(S)/G(O) subunit gamma-T2 isoform X1) c4(294338) c5(294339, 294340, 294341, 294342, 294343, 294344, 294345, 294346, 294347, 294348, 294349, 294350, 294351, 294352, 294353, 294354, 294355, 294356, 294357, 294358, 294359, 294360) c6( ) c7(cj); #c1(GNL1) c2(NP_005266) c3(guanine nucleotide-binding protein-like 1) c4(154459, 154460, 154461, 154462, 154463, 154464, 154465) c5(154466, 154467, 154468, 154469, 154470, 154471, 154472, 154473, 154474, 154475, 154476, 154477, 154478, 154479, 154480, 154481, 154482, 154483, 154484, 154485, 154486, 154487, 154488, 154489, 154490, 154491, 154492, 154493, 154494, 154495, 154496, 154497, 154498, 154499, 154500, 154501, 154502, 154503, 154504, 154505, 154506, 154507, 154508, 154509, 154510, 154511, 154512, 154513, 154514, 154515, 154516, 154517, 154518, 154519, 154520, 154521, 154522, 154523, 154524, 154525, 154526, 154527, 154528, 154529, 154530, 154531, 154532, 154533, 154534, 154535, 154536, 154537, 154538, 154539, 154540, 154541, 154542, 154543, 154544, 154545, 154546, 154547, 154548, 154549, 154550, 154551, 154552, 154553, 154554, 154555, 154556, 154557, 154558, 154559, 154560, 154561, 154562, 154563, 154564, 154565, 154566, 154567, 154568, 154569, 154570, 154571, 154572, 154573, 154574, 154575, 154576, 154577, 154578, 154579, 154580, 154581, 154582, 154583, 154584, 154585, 154586, 154587, 154588, 154589, 154590, 154591, 154592, 154593, 154594, 154595, 154596, 154597, 154598, 154599, 154600, 154601, 154602, 154603, 154604, 154605) c6( ) c7(hD, mR, wc, eZ, mP); #c1(GNL3) c2(NP_055181) c3(guanine nucleotide-binding protein-like 3 isoform 1) c4(179619, 179620, 179621) c5(179622, 179623, 179624, 179625, 179626, 179627, 179628, 179629, 179630, 179631, 179632, 179633, 179634, 179635, 179636) c6( ) c7(NK, T, sw, jx, jh, aA, n, bS, ah, et, ci, yO, qN, fr, eA, ad, IE, tT, ds, aT, cU, io, dL, bK, hu, hB, ae, eL, jf, d, iU, JI, aW, ff, eH, aq, aF, en, as, Z, eF, bz, ck, dB, AH, hh, bt, it, B, Ro); #c1(GNL3) c2(NP_996562) c3(guanine nucleotide-binding protein-like 3 isoform 2) c4(264316, 264317) c5(264318, 264319, 264320, 264321, 264322, 264323, 264324, 264325, 264326, 264327, 264328, 264329, 264330, 264331, 264332) c6( ) c7(NK, T, sw, jx, jh, aA, n, bS, ah, et, ci, yO, qN, fr, eA, ad, IE, tT, ds, aT, cU, io, dL, bK, hu, hB, ae, eL, jf, d, iU, JI, aW, ff, eH, aq, aF, en, as, Z, eF, bz, ck, dB, AH, hh, bt, it, B, Ro); #c1(GNL3L) c2(NP_061940) c3(guanine nucleotide-binding protein-like 3-like protein) c4(201232) c5(201233, 201234, 201235, 201236, 201237, 201238, 201239, 201240, 201241, 201242) c6( ) c7(ae, ad, gX); #c1(GNLY) c2(NP_001289687) c3(granulysin isoform 1 precursor) c4(114360, 114361, 114362, 114363, 114364, 114365) c5(114366) c6( ) c7(ck, bM, T, Dw, xS, aiV, qZ, bDJ, M, cj, h, fd, wR, Ds, pz, CQ, eg, f, be); #c1(GNLY) c2(NP_006424) c3(granulysin isoform 2 precursor) c4(164935, 164936) c5(164937, 164938, 164939, 164940, 164941, 164942, 164943, 164944, 164945, 164946, 164947, 164948, 164949, 164950, 164951, 164952, 164953, 164954, 164955, 164956, 164957, 164958, 164959, 164960, 164961, 164962, 164963, 164964, 164965, 164966, 164967, 164968, 164969, 164970, 164971, 164972, 164973, 164974, 164975, 164976, 164977, 164978, 164979, 164980, 164981, 164982, 164983, 164984, 164985, 164986, 164987, 164988, 164989, 164990, 164991, 164992, 164993, 164994, 164995, 164996, 164997, 164998, 164999, 165000, 165001, 165002, 165003, 165004, 165005, 165006, 165007, 165008, 165009, 165010, 165011, 165012, 165013, 165014, 165015, 165016, 165017, 165018, 165019, 165020, 165021, 165022, 165023, 165024, 165025, 165026, 165027, 165028, 165029, 165030, 165031, 165032, 165033, 165034, 165035, 165036, 165037, 165038, 165039, 165040, 165041, 165042, 165043, 165044, 165045, 165046, 165047, 165048, 165049, 165050, 165051, 165052, 165053, 165054, 165055, 165056, 165057, 165058, 165059, 165060, 165061, 165062, 165063, 165064, 165065, 165066, 165067, 165068, 165069, 165070, 165071, 165072, 165073, 165074, 165075, 165076, 165077, 165078, 165079, 165080, 165081, 165082, 165083, 165084, 165085, 165086, 165087, 165088, 165089, 165090, 165091, 165092, 165093, 165094, 165095, 165096, 165097, 165098, 165099, 165100, 165101, 165102, 165103, 165104, 165105, 165106, 165107, 165108, 165109, 165110, 16511L165112, 165113, 165114, 165115, 165116, 165117, 165118) c6( ) c7(ck, bM, T, Dw, xS, aiV, qZ, bDJ, M, cj, h, fd, wR, Ds, pz, CQ, eg, f, be); #c1(GNLY) c2(NP_036615) c3(granulysin isoform 3) c4( ) c5(174848, 174849, 174850, 174851, 174852, 174853, 174854, 174855, 174856, 174857, 174858, 174859, 174860, 174861, 174862, 174863, 174864, 174865, 174866, 174867, 174868, 174869, 174870, 174871, 174872, 174873, 174874, 174875, 174876, 174877, 174878, 174879, 174880, 174881, 174882, 174883, 174884, 174885, 174886, 174887, 174888, 174889, 174890, 174891, 174892, 174893, 174894, 174895, 174896, 174897, 174898, 174899, 174900, 174901, 174902, 174903, 174904, 174905, 174906, 174907, 174908, 174909, 174910, 174911, 174912, 174913, 174914, 174915, 174916, 174917, 174918, 174919, 174920, 174921, 174922, 174923, 174924, 174925, 174926, 174927, 174928, 174929, 174930, 174931, 174932, 174933, 174934, 174935, 174936, 174937, 174938, 174939, 174940, 174941, 174942) c6( ) c7(ck, bM, T, Dw, xS, aiV, qZ, bDJ, M, cj, h, fd, wR, Ds, pz, CQ, eg, f, be); #c1(GNLY) c2(XP_011530782) c3(granulysin isoform X4) c4(326811) c5( ) cG( ) c7(ck, bM, T, Dw, xS, aiV, qZ, bDJ, M, cj, h, fd, wR, Ds, pz, CQ, eg, f, be); #c1(GNLY) c2(XP_011530783) c3(granulysin isoform X5) c4( ) c5(326812) cG( ) c7(ck, bM, T, Dw, xS, aiV, qZ, bDJ, M, cj, h, fd, wR, Ds, pz, CQ, eg, f, be); #c1(GNMT) c2(NP_061833) c3(glycine N-methyltransferase) c4(200688) c5(200689, 200690, 200691, 200692, 200693, 200694) c6( ) c7(Na, T, jz, B, Ip, aW, Y, wE, hl, aT, aq, Nc, iR, bt, ae, bEh, ad, vi); #c1(GNPAT) c2(NP_055051) c3(dihydroxyacetone phosphate acyltransferase) c4(178609, 178610) c5(178611, 178612, 178613, 178614, 178615, 178616, 178617, 178618, 178619, 178620, 178621, 178622) c6( ) c7(mL, bEi, Fo, LR); #c1(GNPDA1) c2(XP_005268405) c3(glucosamine-6-phosphate isomerase 1 isoform X2) c4( ) c5(281804, 281805, 281806, 281807, 281808, 281809, 281810, 281811) c6( ) c7(T, dt, dD, ea, ez, eq, ai, mC, hX, bEk, dV, OV, iU, iZ, bEj, eZ, aq, S, aFU, t, iK, bw, dr, yd, dW, oX, m, fL, ei, bt, fh, B); #c1(GNPDA1) c2(XP_011535839) c3(glucosamine-6-phosphate isomerase 1 isoform X1) c4(333064, 333065, 333066, 333067, 333068, 333069) c5(333070, 333071, 333072, 333073, 333074, 333075, 333076, 333077, 333078, 333079, 333080, 333081, 333082, 333083, 333084, 333085, 333086, 333087, 333088, 333089, 333090, 333091, 333092, 333093, 333094, 333095, 333096, 333097, 333098, 333099, 333100, 333101, 333102, 333103) c6( ) c7(T, dt, dD, ea, ez, eq, ai, mC, hX, bEk, dV, OV, iU, iZ, bEj, eZ, aq, S, aFU, t, iK, bw, dr, yd, dW, oX, m, fL, ei, bt, fh, B); #c1(GNPDA2) c2(NP_001257809) c3(glucosamine-6-phosphate isomerase 2 isoform 2) c4(95651) c5(95652, 95653, 95654, 95655, 95656, 95657, 95658, 95659, 95660, 95661, 95662, 95663) c6( ) c7(bL, bM, dY, hb, om, e, cz, Jd, v, fq); #c1(GNPDA2) c2(NP_612208) c3(glucosamine-6-phosphate isomerase 2 isoform 1) c4(236210, 236211) c5(236212, 236213, 236214, 236215, 236216, 236217, 236218, 236219, 236220, 236221, 236222, 236223) c6( ) c7(bL, bM, dY, hb, om, e, cz, Jd, v, fq); #c1(GNPTAB) c2(NP_077288) c3(N-acetylglucosamine-1-phosphotransferase subunits alpha/beta precursor) c4(214955, 214956) c5(214957, 214958, 214959, 214960, 214961, 214962, 214963, 214964, 214965, 214966, 214967, 214968, 214969, 214970, 214971, 214972, 214973, 214974, 214975, 214976, 214977, 214978, 214979, 214980, 214981, 214982, 214983, 214984, 214985, 214986, 214987, 214988, 214989, 214990, 214991, 214992, 214993, 214994, 214995, 214996, 214997, 214998, 214999, 215000, 215001, 215002, 215003, 215004, 215005, 215006, 215007, 215008, 215009, 215010, 215011, 215012, 215013, 215014, 215015, 215016, 215017, 215018, 215019, 215020, 215021, 215022, 215023, 215024, 215025, 215026, 215027, 215028, 215029, 215030, 215031, 215032, 215033, 215034, 215035, 215036, 215037, 215038, 215039, 215040, 215041, 215042, 215043, 215044, 215045, 215046, 215047, 215048, 215049, 215050, 215051, 215052, 215053, 215054, 215055, 215056, 215057, 215058, 215059, 215060, 215061, 215062, 215063, 215064, 215065, 215066, 215067, 215068, 215069, 215070, 215071, 215072, 215073, 215074, 215075, 215076, 215077, 215078, 215079, 215080, 215081, 215082, 215083, 215084, 215085, 215086, 215087, 215088, 215089, 215090, 215091, 215092, 215093, 215094, 215095, 215096, 215097, 215098, 215099, 215100) c6( ) c7(IE, bEm, aQQ, dq, bEI, Lq, beZ, bCS); #c1(GNPTAB) c2(XP_006719656) c3(N-acetylglucosamine-1-phosphotransferase subunits alpha/beta isoform X2) c4(292868) c5(292869, 292870, 292871, 292872, 292873, 292874, 292875, 292876, 292877, 292878, 292879, 292880) c6( ) c7(IE, bEm, aQQ, dq, bEI, Lq, beZ, bCS); #c1(GNPTG) c2(NP_115909) c3(N-acetylglucosamine-1-phosphotransferase subunit gamma precursor) c4(224626) c5(224627, 224628, 224629, 224630, 224631, 224632, 224633, 224634, 224635) c6( ) c7(nC, bEm, beZ, Lq, bCS); #c1(GNRH1) c2(NP_000816) c3(progonadoliberin-1 isoform 1 precursor) c4( ) c5(16340, 16341) c6( ) c7(bEn, T, gU, bEp, cz, avO, ad, ip, UE, dP, aX, adX, aT, uV, Fg, ae, iz, jf, yo, kl, d, aW, Y, vj, Hu, aqP, cl, t, op, iP, adZ, dB, bEo, vA, hL, uz, m, UF, LS); #c1(GNRH1) c2(NP_001076580) c3(progonadoliberin-1 isoform 2 preproprotein) c4(37452) c5(37453, 37454, 37455, 37456, 37457, 37458, 37459, 37460) c6( ) c7(bEn, T, gU, bEp, cz, avO, ad, ip, UE, dP, aX, adX, aT, uV, Fg, ae, iz, jf, yo, kl, d, aW, Y, vj, Hu, aqP, cl, t, op, iP, adZ, dB, bEo, vA, hL, uz, m, UF, LS); #c1(GNRH2) c2(NP_847901) c3(progonadoliberin-2 isoform c preproprotein) c4( ) c5(253679, 253680, 253681, 253682, 253683, 253684, 253685, 253686, 253687) c6( ) c7(T, op, vA, m, t, bEq, ae, ad); #c1(GNRH2) c2(NP_847902) c3(progonadoliberin-2 isoform b preproprotein) c4(253688) c5(253689, 253690, 253691, 253692, 253693, 253694, 253695, 253696, 253697, 253698) c6( ) c7(T, op, vA, m, t, bEq, ae, ad); #c1(GNRH2) c2(XP_011527522) c3(progonadoliberin-2 isoform X1) c4(322338) c5(322339) c6( ) c7(T, op, vA, m, t, bEq, ae, ad); #c1(GNRHR) c2(NP_000397) c3(gonadotropin-releasing hormone receptor isoform 1) c4(8474, 8475, 8476) c5(8477, 8478, 8479, 8480, 8481, 8482, 8483, 8484, 8485, 8486, 8487, 8488, 8489, 8490, 8491, 8492, 8493, 8494) c6( ) c7(T, aZ, bBX, v, ci, ad, ip, UE, dP, yn, BJ, aT, Fg, ae, yo, kl, s, ND, aW, Y, aVQ, aeS, Hu, cl, t, bEr, aiv, Px, op, vA, hL, hR, m, UF, Th); #c1(GNRHR) c2(NP_001012781) c3(gonadotropin-releasing hormone receptor isoform 2) c4(25354) c5(25355, 25356, 25357, 25358, 25359, 25360) c6( ) c7(T, aZ, bBX, v, ci, ad, ip, UE, dP, yn, BJ, aT, Fg, ae, yo, kl, s, ND, aW, Y, aVQ, aeS, Hu, cl, t, bEr, aiv, Px, op, vA, hL, hR, m, UF, Th); #c1(GNS) c2(NP_002067) c3(N-acetylglucosamine-6-sulfatase precursor) c4(124181, 124182, 124183) c5(124184, 124185, 124186, 124187, 124188, 124189, 124190, 124191, 124192, 124193, 124194, 124195, 124196, 124197, 124198, 124199, 124200, 124201) c6( ) c7(IE, Lq, ey, kg); #c1(GOLGA1) c2(NP_002068) c3(Golgin subfamily A member 1) c4(124202) c5(124203, 124204, 124205, 124206, 124207, 124208, 124209, 124210, 124211, 124212, 124213, 124214) c6( ) c7(bEs, Na, Nc); #c1(GOLGA1) c2(XP_006717126) c3(golgin subfamily A member 1 isoform X1) c4(290753, 290754) c5(290755, 290756, 290757, 290758, 290759, 290760) c6( ) c7(bEs, Na, Nc); #c1(GOLGA2) c2(NP_004477) c3(Golgin subfamily A member 2) c4(146723, 146724, 146725) c5(146726, 146727, 146728, 146729, 146730, 146731) c6( ) c7(T, bz); #c1(GOLGA2) c2(XP_005251987) c3(golgin subfamily A member 2 isoform X1) c4(271392) c5(271393, 271394, 271395, 271396, 271397, 271398, 271399, 271400) c6( ) c7(T, bz); #c1(GOLGA2) c2(XP_005251989) c3(golgin subfamily A member 2 isoform X3) c4( ) c5(271401, 271402, 271403, 271404, 271405, 271406, 271407, 271408, 271409, 271410) c6( ) c7(T, bz); #c1(GOLGA3) c2(NP_001166028) c3(Golgin subfamily A member 3 isoform 2) c4(68071) c5(68072, 68073, 68074, 68075, 68076, 68077) c6( ) c7(j); #c1(GOLGA3) c2(NP_005886) c3(Golgin subfamily A member 3 isoform 1) c4(160119, 160120) c5(160121, 160122, 160123, 160124, 160125, 160126, 160127, 160128, 160129, 160130, 160131, 160132, 160133, 160134, 160135, 160136) c6( ) c7(j); #c1(GOLGA4) c2(NP_001166184) c3(Golgin subfamily A member 4 isoform 1) c4(68471) c5(68472, 68473, 68474, 68475, 68476, 68477) c6( ) c7(aZJ, T, os, pc, iU, aw, oZ, fr, IQ, Pk, ad); #c1(GOLGA4) c2(NP_002069) c3(Golgin subfamily A member 4 isoform 2) c4(124215) c5(124216, 124217, 124218, 124219, 124220, 124221) c6( ) c7(aZJ, T, os, pc, iU, aw, oZ, fr, IQ, Pk, ad); #c1(GOLGA5) c2(NP_005104) c3(Golgin subfamily A member 5) c4(152905, 152906) c5(152907, 152908, 152909, 152910, 152911, 152912, 152913, 152914, 152915, 152916, 152917, 152918, 152919, 152920) c6( ) c7(nM, hd, q, nB); #c1(GOLGA5) c2(XP_011535722) c3(golgin subfamily A member 5 isoform X1) c4(332961) c5(332962, 332963, 332964, 332965, 332966, 332967, 332968) c6( ) c7(nM, hd, q, nB); #c1(GOLGA8B) c2(NP_001018861) c3(Golgin subfamily A member 8B) c4(27538, 27539) c5(27540, 27541, 27542, 27543, 27544, 27545, 27546, 27547, 27548, 27549, 27550, 27551, 27552, 27553, 27554, 27555) c6( ) c7(Bd, q); #c1(GOLGA8B) c2(XP_011519900) c3(golgin subfamily A member 8B isoform X2) c4(314682) c5(314683, 314684, 314685, 314686, 314687, 314688) c6( ) c7(Bd, q); #c1(GOLGB1) c2(NP_001243415) c3(Golgin subfamily B member 1 isoform 1) c4(90724) c5(90725, 90726, 90727, 90728, 90729, 90730, 90731, 90732, 90733, 90734, 90735) c6( ) c7(jf, T, ac, h, Fw, cd); #c1(GOLGB1) c2(NP_004478) c3(Golgin subfamily B member 1 isoform 2) c4(146732) c5(146733, 146734, 146735, 146736, 146737, 146738) c6( ) c7(jf, T, ac, h, Fw, cd); #c1(GOLGB1) c2(XP_005247430) c3(golgin subfamily B member 1 isoform X6) c4(267833) c5( ) c6( ) c7(jf, T, ac, h, Fw, cd); #c1(GOLGB1) c2(XP_006713653) c3(golgin subfamily B member 1 isoform X7) c4( ) c5(287258, 287259, 287260, 287261, 287262, 287263) c6( ) c7(jf, T, ac, h, Fw, cd); #c1(GOLGB1) c2(XP_006713654) c3(golgin subfamily B member 1 isoform X8) c4(287264) c5(287265, 287266, 287267, 287268, 287269, 287270) c6( ) c7(jf, T, ac, h, Fw, cd); #c1(GOLGB1) c2(XP_011511002) c3(golgin subfamily B member 1 isoform X9) c4(301458) c5(301459) c6( ) c7(jf, T, ac, h, Fw, cd); #c1(GOLM1) c2(NP_808800) c3(Golgi membrane protein 1) c4(252912, 252913, 252914) c5(252915, 252916, 252917, 252918, 252919, 252920, 252921, 252922, 252923, 252924, 252925, 252926, 252927, 252928, 252929, 252930, 252931, 252932, 252933, 252934, 252935, 252936) c6( ) c7(gk, T, jz, af, al, hl, jx, aA, it, aq, bEt, aF, bh, hE, ae, B, ad); #c1(GOLPH3) c2(NP_071413) c3(Golgi phosphoprotein 3) c4(211530, 211531) c5(211532, 211533, 211534, 211535, 211536, 211537, 211538, 211539, 211540, 211541, 211542, 211543) c6( ) c7(T, ht, jx, aA, n, oY, j, fr, q, ad, RD, eA, aT, cU, h, hu, MO, ae, d, arl, aW, ff, hl, r, aF, en, as, t, bz, bEu, Hp, cT, m, nz, it, B, afH); #c1(GOLT1A) c2(NP_940849) c3(vesicle transport protein GOT1A) c4(259939) c5(259940, 259941, 259942, 259943, 259944, 259945) cG( ) c7(cz, hr, bEv, bw, Yi, eK); #c1(GOLT1B) c2(NP_057156) c3(vesicle transport protein GOT1B) c4(189187) c5(189188, 189189, 189190, 189191, 189192, 189193) cG( ) c7(wu, wm, hr, bEv, bw, Yi, eK); #c1(GON4L) c2(NP_001269787) c3(GON-4-like protein isoform a) c4(102779) c5(102780, 102781, 102782, 102783, 102784, 102785, 102786, 102787, 102788, 102789) c6( ) c7(nA); #c1(GON4L) c2(NP_001269789) c3(GON-4-like protein isoform c) c4(102804, 102805) c5(102806, 102807, 102808, 102809, 102810, 102811, 102812, 102813, 102814, 102815, 102816, 102817) c6( ) c7(nA); #c1(GON4L) c2(NP_115668) c3(GON-4-like protein isoform b) c4(223498) c5(223499, 223500, 223501, 223502, 223503, 223504) c6( ) c7(nA); #c1(GON4L) c2(XP_011507960) c3(GON-4-like protein isoform X2) c4(298378) c5(298379, 298380, 298381, 298382, 298383, 298384) c6( ) c7(nA); #c1(GOPC) c2(NP_001017408) c3(Golgi-associated PDZ and coiled-coil motif-containing protein isoform b) c4(26462) c5(26463, 26464, 26465, 26466, 26467, 26468, 26469, 26470) c6( ) c7(T, ha, fd, aon, eA, b, aFI, aeO, aT, K, Tj, d, aeR, aW, Y, eH, CQ, eF, bz, bEw, Ew, aGY, cj, ER, i, lf); #c1(GOPC) c2(NP_065132) c3(Golgi-associated PDZ and coiled-coil motif-containing protein isoform a) c4(204114, 204115) c5(204116, 204117, 204118, 204119, 204120, 204121, 204122, 204123, 204124, 204125, 204126, 204127) c6( ) c7(T, ha, fd, aon, eA, b, aFI, aeO, aT, K, Tj, d, aeR, aW, Y, eH, CQ, eF, bz, bEw, Ew, aGY, cj, ER, i, lf); #c1(GORAB) c2(NP_001139511) c3(RAB6-interacting golgin isoform b precursor) c4( ) c5(59449, 59450, 59451, 59452, 59453, 59454) c6( ) c7(Uj, bEx, ale, uo, Un, B, bA); #c1(GORAB) c2(NP_689494) c3(RAB6-interacting golgin isoform a precursor) c4(242932, 242933) c5(242934, 242935, 242936, 242937, 242938, 242939) c6( ) c7(Uj, bEx, ale, uo, Un, B, bA); #c1(GORASP1) c2(NP_114105) c3(Golgi reassembly-stacking protein 1 isoform 1) c4(222169) c5(222170, 222171, 222172, 222173, 222174, 222175) c6( ) c7(oO, bM, T, os, if, al, bEy, eh, fd, IR, ci, bv, aE, K, eG, aW, az, asD, g, eE, cm, bw, axG, nB, cj, m, ht, aj, BE, qN, eW, kH, cU, pi, gi, fe, kp, dB, it, B, aA, C, V, q, J, eA, eJ, yg, aT, ae, af, aAi, jf, nO, Y, r, en, t, f, iK, pb, ck, iM, ac, c, ig, hr, bt, qb, oZ, dG, ad, XB, dP, hd, azq, ji, azR, gj, d, je, ff, xs, eZ, aF, iV, DF, bF, y, kS, X, brt); #c1(GORASP2) c2(NP_056345) c3(Golgi reassembly-stacking protein 2 isoform 1) c4(187172, 187173) c5(187174, 187175, 187176, 187177, 187178, 187179, 187180, 187181, 187182, 187183, 187184, 187185) c6( ) c7(bL, v); #c1(GOSR1) c2(NP_001007026) c3(Golgi SNAP receptor complex member 1 isoform 2) c4(22389, 22390) c5(22391, 22392, 22393, 22394, 22395, 22396, 22397, 22398, 22399, 22400, 22401, 22402, 22403, 22404) c6( ) c7(T, fM, iM, anT, je, aW, U, aT, Be, nw, hu, B, hX); #c1(GOSR1) c2(NP_004862) c3(Golgi SNAP receptor complex member 1 isoform 1) c4(150399, 150400) c5(150401, 150402, 150403, 150404, 150405, 150406, 150407, 150408, 150409, 150410, 150411, 150412) c6( ) c7(T, fM, iM, anT, je, aW, U, aT, Be, nw, hu, B, hX); #c1(GOSR1) c2(XP_005258127) c3(Golgi SNAP receptor complex member 1 isoform X2) c4(275509) c5( ) c6( ) c7(T, fM, iM, anT, je, aW, U, aT, Be, nw, hu, B, hX); #c1(GOSR1) c2(XP_005258129) c3(Golgi SNAP receptor complex member 1 isoform X1) c4( ) c5(275510, 275511, 275512, 275513, 275514, 275515, 275516, 275517) c6( ) c7(T, fM, iM, anT, je, aW, U, aT, Be, nw, hu, B, hX); #c1(GOSR2) c2(NP_001012529) c3(Golgi SNAP receptor complex member 2 isoform C) c4(25059) c5(25060, 25061, 25062, 25063, 25064, 25065) c6( ) c7(dD, bEA, ea, e, oe, cz, bEB, yZ, eq, yU, xw, bEz); #c1(GOSR2) c2(NP_004278) c3(Golgi SNAP receptor complex member 2 isoform A) c4(144778) c5(144779, 144780, 144781, 144782, 144783, 144784) c6( ) c7(dD, bEA, ea, e, oe, cz, bEB, yZ, eq, yU, xw, bEz); #c1(GOSR2) c2(NP_473363) c3(Golgi SNAP receptor complex member 2 isoform B) c4(230396) c5(230397, 230398, 230399, 230400, 230401, 230402) c6( ) c7(dD, bEA, ea, e, oe, cz, bEB, yZ, eq, yU, xw, bEz); #c1(GOSR2) c2(XP_005257900) c3(Golgi SNAP receptor complex member 2 isoform X2) c4(275410) c5(275411, 275412, 275413, 275414, 275415, 275416) c6( ) c7(dD, bEA, ea, e, oe, cz, bEB, yZ, eq, yU, xw, bEz); #c1(GOT1) c2(NP_002070) c3(aspartate aminotransferase, cytoplasmic) c4(124222, 124223, 124224) c5(124225, 124226, 124227, 124228, 124229, 124230, 124231, 124232, 124233, 124234, 124235, 124236, 124237, 124238, 124239, 124240, 124241, 124242) c6( ) c7(iV, hB, bg, wc, bEC, fQ, io, mf, eK, hr, bEv, ei, bw, be, ae, cd, Yi, ad); #c1(GOT2) c2(NP_001273149) c3(aspartate aminotransferase, mitochondrial isoform 2 precursor) c4(104379) c5(104380, 104381, 104382, 104383, 104384, 104385, 104386) c6( ) c7(bL, T, dD, ea, e, bB, aj, v, j, eq, q, J, eA, hd, aT, bci, bK, K, uV, kl, aW, fc, cr, r, g, qJ, nB, aep, ei); #c1(GOT2) c2(NP_002071) c3(aspartate aminotransferase, mitochondrial isoform 1 precursor) c4(124243, 124244) c5(124245, 124246, 124247, 124248, 124249, 124250, 124251, 124252, 124253, 124254, 124255) c6( ) c7(bL, T, dD, ea, e, bB, aj, v, j, eq, q, J, eA, hd, aT, bci, bK, K, uV, kl, aW, fc, cr, r, g, qJ, nB, aep, ei); #c1(GP1BA) c2(NP_000164) c3(platelet glycoprotein 1b alpha chain precursor) c4(3733, 3734) c5(3735, 3736, 3737, 3738, 3739, 3740, 3741, 3742, 3743, 3744, 3745, 3746, 3747) c6( ) c7(sY, dD, uq, eR, qb, ea, aw, cz, vr, ez, aj, j, eq, bED, V, bEE, TB, ql, bpp, qh, rS, aT, iY, DU, K, DY, qk, eu, iU, cH, ff, eZ, lo, vs, bEG, en, uC, cM, DI, eK, bEE, ac, wE, ag, aka, vb, qq, wx, aS, jQ, vt, us); #c1(GP1BB) c2(NP_000398) c3(platelet glycoprotein 1b beta chain precursor) c4(8495, 8496) c5(8497, 8498, 8499, 8500, 8501, 8502, 8503, 8504, 8505, 8506, 8507, 8508) c6( ) c7(kl, RX, bpp, Az, DU, jQ, bD); #c1(GP2) c2(NP_001007241) c3(pancreatic secretory granule membrane major glycoprotein GP2 isoform 1 preproprotein) c4(22601) c5(22602, 22603, 22604, 22605, 22606, 22607) c6( ) c7(A, boa); #c1(GP2) c2(NP_001007242) c3(pancreatic secretory granule membrane major glycoprotein GP2 isoform 3 precursor) c4( ) c5(22608, 22609, 22610, 22611, 22612) c6( ) c7(A, boa); #c1(GP2) c2(NP_001007243) c3(pancreatic secretory granule membrane major glycoprotein GP2 isoform 4 precursor) c4(22613) c5(22614, 22615, 22616, 22617, 22618) c6( ) c7(A, boa); #c1(GP2) c2(NP_001493) c3(pancreatic secretory granule membrane major glycoprotein GP2 isoform 2 precursor) c4(118178) c5(118179, 118180, 118181, 118182, 118183, 118184) c6( ) c7(A, boa); #c1(GP2) c2(XP_011544099) c3(pancreatic secretory granule membrane major glycoprotein GP2 isoform X1) c4(343267, 343268) c5(343269, 343270, 343271, 343272, 343273, 343274, 343275, 343276) c6( ) c7(A, boa); #c1(GP5) c2(NP_004479) c3(platelet glycoprotein V precursor) c4(146739) c5(146740, 146741, 146742, 146743, 146744, 146745, 146746, 146747, 146748, 146749) c6( ) c7(xu, vb, bpp, DU, xH, rH, jQ); #c1(GP6) c2(NP_001077368) c3(platelet glycoprotein VI isoform 1 precursor) c4(37759) c5(37760, 37761, 37762, 37763, 37764, 37765, 37766, 37767, 37768, 37769, 37770, 37771, 37772, 37773, 37774) c6( ) c7(bL, dD, eR, PA, e, jx, aw, cz, vr, aj, j, Sv, eq, ai, cd, J, M, dz, qk, eu, hm, DL, bEH, wg, ac, vb, vy, dX, aS, dy, y); #c1(GP6) c2(NP_001242946) c3(platelet glycoprotein VI isoform 3 precursor) c4(89341) c5(89342, 89343, 89344, 89345, 89346, 89347, 89348, 89349, 89350, 89351, 89352, 89353, 89354, 89355, 89356, 89357, 89358, 89359, 89360, 89361, 89362, 89363, 89364, 89365, 89366, 89367, 89368, 89369, 89370) c6( ) c7(bL, dD, eR, PA, e, jx, aw, cz, vr, aj, j, Sv, eq, ai, cd, J, M, dz, qk, eu, hm, DL, bEH, wg, ac, vb, vy, dX, aS, dy, y); #c1(GP6) c2(NP_057447) c3(platelet glycoprotein VI isoform 2 precursor) c4(190930) c5(190931, 190932, 190933, 190934, 190935, 190936) c6( ) c7(bL, dD, eR, pA, e, jx, aw, cz, vr, aj, j, Sv, eq, ai, cd, J, M, dz, qk, eu, hm, DL, bEH, wg, ac, vb, vy, dX, aS, dy, y); #c1(GP9) c2(NP_000165) c3(platelet glycoprotein IX precursor) c4(3748) c5(3749, 3750, 3751, 3752, 3753, 3754) c6( ) c7(xu, ac, eR, bEI, eu, bpp, dX, DU, jQ, DY, bw, cM, sE, hr); #c1(GPA33) c2(NP_005805) c3(cell surface A33 antigen precursor) c4(159588) c5(159589, 159590, 159591, 159592, 159593, 159594) c6( ) c7(bB, bE, bA, cz); #c1(GPAA1) c2(NP_003792) c3(glycosylphosphatidylinositol anchor attachment 1 protein) c4(140880, 140881) c5(140882, 140883, 140884, 140885, 140886, 140887, 140888, 140889, 140890, 140891, 140892, 140893) c6( ) c7(gk, T, aW, ff, al, aT, GC, dL, en, iK, eL, B, wT); #c1(GPALPP1) c2(NP_061029) c3(GPALPP motifs-containing protein 1) c4(199072) c5(199073, 199074, 199075, 199076, 199077, 199078, 199079, 199080, 199081, 199082) c6( ) c7(bK, ac); #c1(GPAM) c2(XP_005270055) c3(glycerol-3-phosphate acyltransferase 1, mitochondrial isoform X1) c4(283063, 283064) c5(283065, 283066, 283067, 283068, 283069, 283070, 283071, 283072, 283073, 283074, 283075, 283076, 283077, 283078, 283079, 283080) c6( ) c7(bL, Y, fc, v, ah, cP, bq, af); #c1(GPANK1) c2(NP_149417) c3(G patch domain and ankyrin repeat-containing protein 1) c4(227519, 227520, 227521, 227522) c5(227523, 227524, 227525, 227526, 227527, 227528, 227529, 227530, 227531, 227532, 227533, 227534, 227535, 227536, 227537, 227538, 227539, 227540, 227541, 227542, 227543, 227544, 227545, 227546, 227547, 227548, 227549, 227550, 227551, 227552, 227553, 227554, 227555, 227556, 227557, 227558, 227559, 227560, 227561, 227562, 227563, 227564, 227565, 227566, 227567, 227568, 227569, 227570, 227571, 227572, 227573, 227574, 227575, 227576, 227577, 227578, 227579, 227580, 227581, 227582, 227583, 227584, 227585, 227586, 227587, 227588, 227589, 227590, 227591, 227592, 227593, 227594, 227595, 227596, 227597, 227598, 227599, 227600, 227601, 227602, 227603, 227604, 227605, 227606, 227607, 227608, 227609, 227610, 227611, 227612, 227613, 227614, 227615, 227616, 227617, 227618, 227619, 227620, 227621, 227622, 227623, 227624, 227625, 227626, 227627, 227628, 227629, 227630, 227631, 227632, 227633, 227634, 227635, 227636, 227637, 227638, 227639, 227640, 227641, 227642, 227643, 227644, 227645, 227646, 227647, 227648, 227649, 227650, 227651, 227652) c6( ) c7(y, iW, iQ, eZ, bX); #c1(GPANK1) c2(XP_006725801) c3(G patch domain and ankyrin repeat-containing protein 1 isoform X1) c4(296980, 296981, 296982) c5(296983, 296984, 296985, 296986, 296987, 296988, 296989, 296990, 296991, 296992, 296993, 296994, 296995, 296996, 296997, 296998, 296999, 297000, 297001, 297002, 297003, 297004) c6( ) c7(y, iW, iQ, eZ, bX); #c1(GPANK1) c2(XP_011545613) c3(G patch domain and ankyrin repeat-containing protein 1 isoform X1) c4(344429, 344430, 344431, 344432, 344433, 344434) c5(344435, 344436, 344437, 344438, 344439, 344440, 344441, 344442, 344443, 344444, 344445, 344446, 344447, 344448, 344449, 344450, 344451, 344452, 344453, 344454, 344455, 344456, 344457, 344458, 344459, 344460, 344461, 344462, 344463, 344464, 344465, 344466, 344467, 344468, 344469, 344470, 344471, 344472, 344473, 344474, 344475, 344476, 344477, 344478, 344479, 344480, 344481, 344482, 344483, 344484, 344485, 344486, 344487, 344488, 344489, 344490, 344491, 344492, 344493, 344494, 344495, 344496, 344497, 344498, 344499, 344500, 344501, 344502, 344503, 344504, 344505, 344506, 344507, 344508, 344509, 344510, 344511, 344512, 344513, 344514, 344515, 344516, 344517, 344518, 344519, 344520, 344521, 344522, 344523, 344524, 344525, 344526, 344527, 344528, 344529, 344530, 344531, 344532, 344533, 344534, 344535, 344536, 344537, 344538, 344539, 344540, 344541, 344542, 344543, 344544, 344545, 344546, 344547, 344548, 344549, 344550, 344551) c6( ) c7(y, iW, iQ, eZ, bX); #c1(GPAT2) c2(NP_997211) c3(glycerol-3-phosphate acyltransferase 2, mitochondrial) c4(265180, 265181) c5(265182, 265183, 265184, 265185, 265186, 265187, 265188, 265189, 265190, 265191) c6( ) c7(aW, Y, aT); #c1(GPAT2) c2(XP_006712378) c3(glycerol-3-phosphate acyltransferase 2, mitochondrial isoform X11) c4(286616) c5(286617, 286618, 286619, 286620, 286621, 286622, 286623, 286624, 286625, 286626, 286627, 286628) c6( ) c7(aW, Y, aT); #c1(GPATCH1) c2(NP_060495) c3(G patch domain-containing protein 1) c4(196231) c5(196232, 196233, 196234, 196235, 196236, 196237, 196238) c6( ) c7(bA); #c1(GPATCH2) c2(NP_001284683) c3(G patch domain-containing protein 2 isoform 2) c4(112302) c5(112303, 112304, 112305, 112306, 112307, 112308) c6( ) c7(aW, T, cd, bu, aT); #c1(GPATCH2) c2(NP_060510) c3(G patch domain-containing protein 2 isoform 1) c4(196295) c5(196296, 196297, 196298, 196299, 196300, 196301) c6( ) c7(aW, T, cd, bu, aT); #c1(GPATCH2L) c2(NP_060396) c3(G patch domain-containing protein 2-like isoform 1) c4(195805, 195806, 195807) c5(195808, 195809, 195810, 195811, 195812, 195813) c6( ) c7(oe, k); #c1(GPATCH2L) c2(NP_060442) c3(G patch domain-containing protein 2-like isoform 2) c4(195961) c5(195962, 195963, 195964, 195965, 195966, 195967, 195968) c6( ) c7(oe, k); #c1(GPATCH2L) c2(XP_011535237) c3(G patch domain-containing protein 2-like isoform X4) c4( ) c5(332073, 332074, 332075, 332076, 332077, 332078, 332079, 332080, 332081, 332082, 332083, 332084, 332085, 332086, 332087) c6( ) c7(oe, k); #c1(GPATCH8) c2(NP_001002909) c3(G patch domain-containing protein 8 isoform 1) c4(19728) c5(19729, 19730, 19731, 19732, 19733, 19734, 19735, 19736, 19737, 19738, 19739, 19740) c6( ) c7(nH, zp); #c1(GPATCH8) c2(NP_001291869) c3(G patch domain-containing protein 8 isoform 3) c4(116484) c5(116485, 116486, 116487, 116488, 116489, 116490) c6( ) c7(nH, zp); #c1(GPATCH8) c2(XP_011522859) c3(G patch domain-containing protein 8 isoform X2) c4(317341) c5(317342, 317343, 317344, 317345, 317346) c6( ) c7(nH, zp); #c1(GPBAR1) c2(XP_011509046) c3(G-protein coupled bile acid receptor 1 isoform X1) c4(299647) c5(299648, 299649, 299650, 299651, 299652, 299653, 299654, 299655, 299656, 299657, 299658, 299659, 299660, 299661, 299662, 299663, 299664, 299665) c6( ) c7(bL, bM, pf, aj, Ja, v, J, aE, pX, ju, h, Pn, he, Fg, d, Y, ff, ge, dq, hN, en, iV, hJ, bmj, Jh, jg, Ji, dX, ra, cE); #c1(GPC1) c2(NP_002072) c3(glypican-1 precursor) c4(124256) c5(124257, 124258, 124259, 124260, 124261, 124262) c6( ) c7(T, aC, aE, EJ, af, aW, w, aal, fg, aT, uY, kp, K, Fq, eA, t, B, acM, L); #c1(GPC2) c2(NP_689955) c3(glypican-2 precursor) c4(244513) c5(244514, 244515, 244516, 244517, 244518, 244519, 244520, 244521) c6(244522, 244523) c7(T, aT); #c1(GPC3) c2(NP_001158089) c3(glypican-3 isoform 1 precursor) c4(63114) c5(63115, 63116, 63117, 63118, 63119, 63120) c6( ) c7(T, kh, AS, Or, al, jx, ml, fg, n, ci, nA, bEJ, lu, er, hX, av, hd, ib, MS, jz, Db, TK, qK, aT, io, Ex, AN, hB, pi, jf, s, aW, Y, ff, aq, aE, en, g, iR, t, cm, bz, Ld, qJ, iO, vW, nB, Qu, RW, ln, nG, m, KY, B, hS); #c1(GPC3) c2(NP_001158091) c3(glypican-3 isoform 4 precursor) c4(G3121) c5(63122, 63123, 63124, 63125, 63126, 63127, 63128, 63129, 63130, 63131, 63132, 63133) c6( ) c7(T, kh, AS, Or, al, jx, ml, fg, n, ci, nA, bEJ, lu, er, hX, av, hd, ib, MS, jz, Db, TK, qK, aT, io, Ex, AN, hB, pi, jf, s, aW, Y, ff, aq, aE, en, g, iR, t, cm, bz, Ld, qJ, iO, vW, nB, Qu, RW, ln, nG, m, KY, B, hS); #c1(GPC3) c2(NP_004475) c3(glypican-3 isoform 2 precursor) c4(146696, 146697) c5(146698, 146699, 146700, 146701, 146702, 146703) c6( ) c7(T, kh, AS, Or, al, jx, ml, fg, n, ci, nA, bEJ, lu, er, hX, av, hd, ib, MS, jz, Db, TK, qK, aT, io, Ex, AN, hB, pi, jf, s, aW, Y, ff, aq, aE, en, g, iR, t, cm, bz, Ld, qJ, iO, vW, nB, Qu, RW, ln, nG, m, KY, B, hS); #c1(GPC4) c2(NP_001439) c3(glypican-4 precursor) c4(117833, 117834, 117835) c5(117836, 117837, 117838, 117839, 117840, 117841, 117842, 117843, 117844, 117845, 117846, 117847, 117848, 117849, 117850, 117851, 117852, 117853) c6( ) c7(TY, Az, fg, rO, fq, er); #c1(GPC5) c2(NP_004457) c3(glypican-5 precursor) c4(146464) c5(146465, 146466, 146467, 146468, 146469, 146470) c6( ) c7(bv, av, ac, eM, Ip, jh, rf, gZ, Da, j, ah, V, bz, cM, fq, iu, sj); #c1(GPC6) c2(NP_005699) c3(glypican-6 precursor) c4(158633) c5(158634, 158635, 158636, 158637, 158638, 158639) c6( ) c7(agJ, pH, Kc, aHe, bP, PN, aW, oe, Az, aT, r, v, ci, V, g, atb); #c1(GPCPD1) c2(NP_062539) c3(glycerophosphocholine phosphodiesterase GPCPD1) c4(201867) c5(201868, 201869, 201870, 201871, 201872, 201873) c6( ) c7(bl); #c1(GPCPD1) c2(XP_005260818) c3(glycerophosphocholine phosphodiesterase GPCPD1 isoform X2) c4(276910, 276911) c5(276912, 276913, 276914, 276915, 276916, 276917, 276918, 276919, 276920, 276921, 276922) c6( ) c7(bl); #c1(GPCPD1) c2(XP_011527609) c3(glycerophosphocholine phosphodiesterase GPCPD1 isoform X3) c4( ) c5(322492) c6( ) c7(bl); #c1(GPD1) c2(NP_001244128) c3(glycerol-3-phosphate dehydrogenase [NAD(+)], cytoplasmic isoform 2) c4( ) c5(91974, 91975, 91976, 91977, 91978, 91979) c6( ) c7(bL, aW, bEK, B, aT); #c1(GPD1) c2(NP_005267) c3(glycerol-3-phosphate dehydrogenase [NAD(+)], cytoplasmic isoform 1) c4(154606, 154607) c5(154608, 154609, 154610, 154611, 154612, 154613) c6( ) c7(bL, aW, bEK, B, aT); #c1(GPD1L) c2(NP_055956) c3(glycerol-3-phosphate dehydrogenase 1-like protein) c4(184686) c5(184687, 184688, 184689, 184690, 184691, 184692) c6( ) c7(rf, bEL, n, ajM, j, EZ, iK, cd); #c1(GPD2) c2(NP_001076581) c3(glycerol-3-phosphate dehydrogenase, mitochondrial precursor) c4(37461, 37462, 37463, 37464) c5(37465, 37466, 37467, 37468, 37469, 37470, 37471, 37472, 37473, 37474, 37475, 37476, 37477, 37478, 37479, 37480, 37481, 37482, 37483, 37484, 37485, 37486, 37487, 37488, 37489, 37490, 37491, 37492, 37493, 37494, 37495, 37496, 37497, 37498, 37499, 37500) c6( ) c7(bL, aHq, bEN, dY, bEM, K, nA, bq, ais, jw, ad, bA); #c1(GPD2) c2(XP_011509282) c3(glycerol-3-phosphate dehydrogenase, mitochondrial isoform X4) c4( ) c5(299905) c6( ) c7(bL, aHq, bEN, dY, bEM, K, nA, bq, ais, jw, ad, bA); #c1(GPER1) c2(NP_001091671) c3(G-protein coupled estrogen receptor 1) c4(38602, 38603, 38604) c5(38605, 38606, 38607, 38608, 38609, 38610, 38611, 38612, 38613, 38614, 38615, 38616, 38617, 38618, 38619, 38620, 38621, 38622, 38623, 38624, 38625, 38626, 38627, 38628, 38629, 38630, 38631, 38632, 38633, 38634) c6( ) c7(gh, T, dD, ea, e, atS, aA, hy, j, ci, eq, AO, V, ad, dP, aT, cy, hP, ae, d, BN, zH, aW, wc, aF, cl, t, op, kP, vA, hL, gZ, m, ei, ne); #c1(GPHA2) c2(NP_57D125) c3(glycoprotein hormone alpha-2 precursor) c4( ) c5(233990, 233991, 233992, 233993, 233994, 233995, 233996, 233997, 233998, 233999, 234000, 234001, 234002) c6(234003, 234004, 234005, 234006) c7(Y); #c1(GPHA2) c2(XP_011543076) c3(glycoprotein hormone alpha-2 isoform X2) c4(341876) c5(341877) c6( ) c7(Y); #c1(GPHN) c2(NP_001019389) c3(gephyrin isoform 2) c4(27748, 27749) c5(27750, 27751, 27752, 27753, 27754, 27755, 27756, 27757, 27758, 27759, 27760, 27761) c6( ) c7(II, ck, IF, Cq, bEO, s, aWN, iZ, oe, ha, nf, cu, K, il, af, cv); #c1(GPHN) c2(NP_065857) c3(gephyrin isoform 1) c4(205926) c5(205927, 205928, 205929, 205930, 205931, 205932) c6( ) c7(II, ck, IF, Cq, bEO, s, aWN, iZ, oe, ha, nf, cu, K, il, af, cv); #c1(GPI) c2(NP_001171651) c3(glucose-6-phosphate isomerase isoform 1) c4(71154) c5(71155, 71156, 71157, 71158, 71159, 71160) c6( ) c7(lD, eW, T, dt, dD, qo, aC, ea, ez, eq, qf, mC, Pm, q, jY, qC, ai, hX, hd, bEk, aE, bpN, Db, fh, ds, oW, aT, cU, cy, bEP, dV, h, K, vO, bEQ, ly, eG, OV, iU, iZ, LG, aW, IW, eH, bEj, eZ, r, aq, xH, S, aFU, t, eF, bz, iK, dr, lx, wA, yd, bw, jV, zr, eM, bE, iT, MB, byG, adR, aFp, dW, aS, m, fL, oX, CI, IC, bt, ei, B, y, BA, L); #c1(GPI) c2(XP_006723211) c3(glucose-6-phosphate isomerase isoform X1) c4( ) c5(295042, 295043, 295044, 295045, 295046, 295047) c6( ) c7(lD, eW, T, dt, dD, qo, aC, ea, ez, eq, qf, mC, Pm, q, jY, qC, ai, hX, hd, bEk, aE, bpN, Db, fh, ds, oW, aT, cU, cy, bEP, dV, h, K, vO, bEQ, ly, eG, OV, iU, iZ, LG, aW, IW, eH, bEj, eZ, r, aq, xH, S, aFU, t, eF, bz, iK, dr, lx, wA, yd, bw, jV, zr, eM, bE, iT, MB, byG, adR, aFp, dW, aS, m, fL, oX, CI, IC, bt, ei, B, y, BA, L); #c1(GPI) c2(XP_011525056) c3(glucose-6-phosphate isomerase isoform X2) c4(319507) c5( ) c6( ) c7(lD, eW, T, dt, dD, qo, aC, ea, ez, eq, qf, mC, Pm, q, jY, qC, ai, hX, hd, bEk, aE, bpN, Db, fh, ds, oW, aT, cU, cy, bEP, dV, h, K, vO, bEQ, ly, eG, OV, iU, iZ, LG, aW, IW, eH, bEj, eZ, r, aq, xH, S, aFU, t, eF, bz, iK, dr, lx, wA, yd, bw, jV, zr, eM, bE, iT, MB, byG, adR, aFp, dW, aS, m, fL, oX, CI, IC, bt, ei, B, y, BA, L); #c1(GPI) c2(XP_011525057) c3(glucose-6-phosphate isomerase isoform X3) c4(319508) c5(319509, 319510, 319511, 319512, 319513, 319514) cG( ) c7(lD, eW, T, dt, dD, qo, aC, ea, ez, eq, qf, mC, Pm, q, jY, qC, ai, hX, hd, bEk, aE, bpN, Db, fh, ds, oW, aT, cU, cy, bEP, dV, h, K, vO, bEQ, ly, eG, OV, iU, iZ, LG, aW, IW, eH, bEj, eZ, r, aq, xH, S, aFU, t, eF, bz, iK, dr, lx, wA, yd, bw, jV, zr, eM, bE, iT, MB, byG, adR, aFp, dW, aS, m, fL, oX, CI, IC, bt, ei, B, y, BA, L); #c1(GPIHBP1) c2(NP_835466) c3(glycosylphosphatidylinositol-anchored high density lipoprotein-binding protein 1 isoform 1 precursor) c4(253532) c5(253533, 253534, 253535, 253536, 253537, 253538) c6( ) c7(aW, aT, vG, n, K, ae, Zx, ad); #c1(GPKOW) c2(NP_056513) c3(G patch domain and KOW motifs-containing protein) c4(187872) c5(187873, 187874, 187875, 187876, 187877, 187878, 187879, 187880) c6(187881, 187882) c7(cr); #c1(GPLD1) c2(NP_001494) c3(phosphatidylinositol-glycan-specific phospholipase D precursor) c4(118185, 118186) c5(118187, 118188, 118189, 118190, 118191, 118192) c6( ) c7(T, cK, nM, Db, Y, fc, Ex, ei, ee, t); #c1(GPLD1) c2(XP_011512811) c3(phosphatidylinositol-glycan-specific phospholipase D isoform X2) c4( ) c5(303874, 303875, 303876, 303877, 303878, 303879) c6( ) c7(T, cK, nM, Db, Y, fc, Ex, ei, ee, t); #c1(GPM6A) c2(NP_001248377) c3(neuronal membrane glycoprotein M6-a isoform 4) c4(93898) c5(93899, 93900, 93901, 93902, 93903, 93904) c6( ) c7(sv, bS, bK, K, et, Z, hH, cd, jb); #c1(GPM6A) c2(NP_963885) c3(neuronal membrane glycoprotein M6-a isoform 1) c4(262503, 262504) c5(262505, 262506, 262507, 262508, 262509, 262510, 262511, 262512, 262513, 262514, 262515, 262516, 262517, 262518, 262519, 262520, 262521, 262522, 262523) c6( ) c7(sv, bS, bK, K, et, Z, hH, cd, jb); #c1(GPM6A) c2(NP_963886) c3(neuronal membrane glycoprotein M6-a isoform 3) c4(262524) c5(262525, 262526, 262527, 262528, 262529, 262530) c6( ) c7(sv, bS, bK, K, et, Z, hH, cd, jb); #c1(GPM6B) c2(NP_001001994) c3(neuronal membrane glycoprotein M6-b isoform 4) c4(19290) c5(19291, 19292, 19293, 19294, 19295, 19296, 19297, 19298, 19299, 19300, 19301) c6( ) c7(cb, Y, aR, bee, qb); #c1(GPM6B) c2(NP_001001995) c3(neuronal membrane glycoprotein M6-b isoform 1) c4(19302, 19303) c5(19304, 19305, 19306, 19307, 19308, 19309) c6( ) c7(cb, Y, aR, bee, qb); #c1(GPM6B) c2(NP_001001996) c3(neuronal membrane glycoprotein M6-b isoform 2) c4(19310) c5(19311, 19312, 19313, 19314, 19315, 19316) c6( ) c7(cb, Y, aR, bee, qb); #c1(GPM6B) c2(NP_005269) c3(neuronal membrane glycoprotein M6-b isoform 3) c4(154614, 154615) c5(154616, 154617, 154618, 154619, 154620, 154621, 154622, 154623, 154624, 154625, 154626, 154627, 154628) c6( ) c7(cb, Y, aR, bee, qb); #c1(GPM6B) c2(XP_005274546) c3(neuronal membrane glycoprotein M6-b isoform X1) c4(285158) c5( ) c6( ) c7(cb, Y, aR, bee, qb); #c1(GPM6B) c2(XP_011543799) c3(neuronal membrane glycoprotein M6-b isoform X3) c4( ) c5(342916, 342917, 342918, 342919, 342920, 342921) c6( ) c7(cb, Y, aR, bee, qb); #c1(GPN1) c2(NP_001138519) c3(GPN-loop GTPase 1 isoform b) c4(56933) c5(56934, 56935, 56936, 56937, 56938, 56939) c6( ) c7(om); #c1(GPN1) c2(NP_001138520) c3(GPN-loop GTPase 1 isoform c) c4(56940) c5(56941, 56942, 56943, 56944, 56945) c6( ) c7(om); #c1(GPN1) c2(NP_001138521) c3(GPN-loop GTPase 1 isoform d) c4(56946) c5(56947, 56948, 56949, 56950, 56951, 56952) c6( ) c7(om); #c1(GPN1) c2(NP_009197) c3(GPN-loop GTPase 1 isoform a) c4(171452) c5(171453, 171454, 171455, 171456, 171457, 171458, 171459) c6( ) c7(om); #c1(GPNMB) c2(NP_001005340) c3(transmembrane glycoprotein NMB isoform a precursor) c4(21417, 21418, 21419, 21420) c5(21421, 21422, 21423, 21424, 21425, 21426, 21427, 21428, 21429, 21430, 21431, 21432, 21433, 21434, 21435, 21436, 21437, 21438, 21439, 21440, 21441, 21442, 21443, 21444, 21445) c6( ) c7(oO, T, yS, al, n, v, yO, ci, qN, q, ad, eA, bER, aE, aT, h, ey, fb, ae, cp, afu, hM, yo, aW, Y, r, aq, Tp, g, t, f, ck, es, gk, Dy, iA, dB, avZ, E, m, pJ, B); #c1(GPNMB) c2(NP_002501) c3(transmembrane glycoprotein NMB isoform b precursor) c4(129356, 129357) c5(129358, 129359, 129360, 129361, 129362, 129363, 129364, 129365, 129366, 129367, 129368, 129369) c6( ) c7(oO, T, yS, al, n, v, yO, ci, qN, q, ad, eA, bER, aE, aT, h, ey, fb, ae, cp, afu, hM, yo, aW, Y, r, aq, Tp, g, t, f, ck, es, gk, Dy, iA, dB, avZ, E, m, pJ, B); #c1(GPNMB) c2(XP_005249635) c3(transmembrane glycoprotein NMB isoform X1) c4(269764) c5(269765, 269766, 269767, 269768, 269769, 269770) c6( ) c7(oO, T, yS, al, n, v, yO, ci, qN, q, ad, eA, bER, aE, aT, h, ey, fb, ae, cp, afu, hM, yo, aW, Y, r, aq, Tp, g, t, f, ck, es, gk, Dy, iA, dB, avZ, E, m, pJ, B); #c1(GPR1) c2(NP_001091669) c3(G-protein coupled receptor 1) c4(38555, 38556, 38557, 38558, 38559, 38560, 38561) c5(38562, 38563, 38564, 38565, 38566, 38567, 38568, 38569, 38570, 38571, 38572, 38573, 38574, 38575, 38576, 38577, 38578, 38579, 38580, 38581, 38582, 38583, 38584, 38585, 38586, 38587, 38588, 38589, 38590, 38591, 38592, 38593, 38594, 38595, 38596, 38597, 38598, 38599, 38600, 38601) c6( ) c7(h, dy); #c1(GPR101) c2(NP_473362) c3(probable G-protein coupled receptor 101) c4(230389) c5(230390, 230391, 230392, 230393, 230394, 230395) c6( ) c7(bES, OB, oe); #c1(GPR119) c2(NP_848566) c3(glucose-dependent insulinotropic receptor) c4(253871) c5(253872, 253873, 253874, 253875, 253876, 253877) c6( ) c7(bL, dD, ea, dq, aj, v, eq, J); #c1(GPR12) c2(NP_005279) c3(G-protein coupled receptor 12) c4(154656) c5(154657, 154658, 154659, 154660, 154661, 154662, 154663, 154664, 154665, 154666) c6( ) c7(bM, v, cd, iV); #c1(GPR132) c2(NP_001265623) c3(probable G-protein coupled receptor 132 isoform 1) c4(99035) c5(99036, 99037, 99038, 99039, 99040, 99041, 99042, 99043, 99044, 99045, 99046, 99047, 99048, 99049) c6( ) c7(dD, eq, eZ, en, ff); #c1(GPR132) c2(NP_001265624) c3(probable G-protein coupled receptor 132 isoform 2) c4(99050) c5(99051, 99052, 99053, 99054, 99055, 99056) c6( ) c7(dD, eq, eZ, en, ff); #c1(GPR135) c2(NP_072093) c3(probable G-protein coupled receptor 135) c4(212677, 212678) c5(212679, 212680, 212681, 212682, 212683, 212684, 212685, 212686, 212687, 212688, 212689, 212690, 212691, 212692, 212693, 212694) c6( ) c7(z); #c1(GPR137C) c2(NP_001093122) c3(integral membrane protein GPR137C) c4(39794) c5(39795, 39796, 39797, 39798, 39799, 39800) c6( ) c7(cd); #c1(GPR139) c2(NP_001002911) c3(probable G-protein coupled receptor 139) c4(19741) c5(19742, 19743, 19744, 19745, 19746, 19747, 19748, 19749, 19750, 19751) c6( ) c7(fq); #c1(GPR143) c2(NP_000264) c3(G-protein coupled receptor 143) c4(5923, 5924, 5925, 5926) c5(5927, 5928, 5929, 5930, 5931, 5932, 5933, 5934, 5935, 5936, 5937, 5938) c6( ) c7(KE, aAd, Y, NG, oQ, bET); #c1(GPR143) c2(XP_005274598) c3(G-protein coupled receptor 143 isoform X1) c4( ) c5(285174, 285175, 285176, 285177, 285178, 285179, 285180, 285181, 285182, 285183, 285184, 285185) c6( ) c7(KE, aAd, Y, NG, oQ, bET); #c1(GPR148) c2(NP_997247) c3(probable G-protein coupled receptor 148) c4(265311) c5(265312, 265313, 265314, 265315, 265316, 265317) c6( ) c7(K); #c1(GPR149) c2(NP_001033794) c3(probable G-protein coupled receptor 149) c4(31567) c5(31568, 31569, 31570, 31571, 31572, 31573) c6( ) c7(fq); #c1(GPR15) c2(NP_005281) c3(G-protein coupled receptor 15) c4(154667) c5(154668, 154669, 154670, 154671, 154672, 154673) c6( ) c7(h, y, bX); #c1(GPR150) c2(NP_954713) c3(probable G-protein coupled receptor 150) c4(261354) c5(261355, 261356, 261357, 261358, 261359, 261360) c6( ) c7(t); #c1(GPR151) c2(NP_919227) c3(probable G-protein coupled receptor 151) c4(258268) c5(258269, 258270, 258271, 258272, 258273, 258274) c6( ) c7(bL, bM, T, d, aE, Y, pX, ff, h, Ja, v, dX, en, he, Fg, cE); #c1(GPR152) c2(NP_996880) c3(probable G-protein coupled receptor 152) c4(264789) c5(264790, 264791, 264792, 264793, 264794, 264795, 264796) c6( ) c7(W); #c1(GPR153) c2(XP_011539736) c3(probable G-protein coupled receptor 153 isoform X1) c4(337956) c5(337957, 337958, 337959, 337960, 337961, 337962, 337963) c6( ) c7(g, hS); #c1(GPR155) c2(NP_001253980) c3(integral membrane protein GPR155 isoform 2) c4( ) c5(94348, 94349, 94350, 94351, 94352, 94353) c6( ) c7(bN); #c1(GPR155) c2(NP_689742) c3(integral membrane protein GPR155 isoform 1) c4(243816, 243817) c5(243818, 243819, 243820, 243821, 243822, 243823, 243824, 243825, 243826, 243827, 243828, 243829, 243830, 243831) c6( ) c7(bN); #c1(GPR156) c2(NP_001161743) c3(probable G-protein coupled receptor 15G isoform 2) c4(65895) c5(65896, 65897, 65898, 65899, 65900, 65901) c6( ) c7(cF, ac, an); #c1(GPR156) c2(NP_694547) c3(probable G-protein coupled receptor 15G isoform 1) c4(245118) c5(245119, 245120, 245121, 245122, 245123, 245124, 245125, 245126, 245127, 245128) c6( ) c7(cF, ac, an); #c1(GPR158) c2(NP_065803) c3(probable G-protein coupled receptor 158 precursor) c4(205610) c5(205611, 205612, 205613, 205614, 205615, 205616) c6( ) c7(ht, ff, j, en); #c1(GPR160) c2(NP_055188) c3(probable G-protein coupled receptor 160) c4(179653, 179654, 179655, 179656) c5(179657, 179658, 179659, 179660, 179661, 179662, 179663, 179664, 179665, 179666, 179667, 179668, 179669, 179670, 179671, 179672, 179673, 179674, 179675, 179676, 179677, 179678, 179679) c6( ) c7(T, ac); #c1(GPR160) c2(XP_011510981) c3(probable G-protein coupled receptor 160 isoform X2) c4( ) c5(301429) c6( ) c7(T, ac); #c1(GPR160) c2(XP_011510982) c3(probable G-protein coupled receptor 160 isoform X3) c4( ) c5(301430, 301431) c6( ) c7(T, ac); #c1(GPR161) c2(NP_001254540) c3(G-protein coupled receptor 161 isoform 3) c4(94621) c5(94622) c6( ) c7(bA, cz); #c1(GPR161) c2(NP_001254542) c3(G-protein coupled receptor 161 isoform 5) c4(94623) c5(94624, 94625, 94626, 94627, 94628, 94629) c6( ) c7(bA, cz); #c1(GPR161) c2(NP_001254543) c3(G-protein coupled receptor 161 isoform 6) c4(94630) c5(94631, 94632, 94633, 94634, 94635, 94636) c6( ) c7(bA, cz); #c1(GPR161) c2(XP_005245112) c3(G-protein coupled receptor 161 isoform X1) c4(266301) c5(266302, 266303, 266304, 266305, 266306, 266307) c6( ) c7(bA, cz); #c1(GPR161) c2(XP_011507676) c3(G-protein coupled receptor 161 isoform X3) c4( ) c5(297681, 297682) c6( ) c7(bA, cz); #c1(GPR161) c2(XP_011507680) c3(G-protein coupled receptor 161 isoform X2) c4( ) c5(297683, 297684, 297685, 297686, 297687, 297688, 297689, 297690, 297691, 297692, 297693, 297694, 297695, 297696) c6( ) c7(bA, cz); #c1(GPR162) c2(NP_055264) c3(probable G-protein coupled receptor 162 isoform 1) c4( ) c5(180141, 180142, 180143, 180144, 180145, 180146) c6( ) c7(dD, ef, ea, aw, aj, j, eq, ee, q, J, ad, GK, Zu, dQ, ae, uQ, Zt, r, aq, iO, Xa, WX, qR, B); #c1(GPR162) c2(NP_062832) c3(probable G-protein coupled receptor 162 isoform 2) c4(202186, 202187) c5(202188, 202189, 202190, 202191, 202192, 202193) c6( ) c7(dD, ef, ea, aw, aj, j, eq, ee, q, J, ad, GK, Zu, dQ, ae, uQ, Zt, r, aq, iO, Xa, WX, qR, B); #c1(GPR17) c2(NP_001154889) c3(uracil nucleotide/cysteinyl leukotriene receptor isoform b) c4(61207) c5(61208, 61209, 61210, 61211, 61212) c6( ) c7(wD, wg, cy); #c1(GPR17) c2(NP_005282) c3(uracil nucleotide/cysteinyl leukotriene receptor isoform a) c4(154674, 154675) c5(154676, 154677, 154678, 154679, 154680, 154681, 154682, 154683, 154684, 154685, 154686, 154687, 154688, 154689, 154690, 154691, 154692, 154693, 154694, 154695, 154696) c6( ) c7(wD, wg, cy); #c1(GPR171) c2(NP_037440) c3(probable G-protein coupled receptor 171) c4(175530, 175531) c5(175532, 175533, 175534, 175535, 175536, 175537, 175538, 175539, 175540, 175541, 175542, 175543) c6( ) c7(oc); #c1(GPR174) c2(NP_115942) c3(probable G-protein coupled receptor 174) c4(224829) c5(224830, 224831, 224832, 224833, 224834, 224835) c6( ) c7(hD); #c1(GPR176) c2(NP_001258784) c3(probable G-protein coupled receptor 176 isoform 3) c4(96528) c5(96529, 96530, 96531, 96532, 96533, 96534) c6( ) c7(cF, oe, Hr, fq); #c1(GPR176) c2(NP_009154) c3(probable G-protein coupled receptor 176 isoform 1) c4(171178) c5(171179, 171180, 171181, 171182, 171183, 171184, 171185, 171186, 171187) c6( ) c7(cF, oe, Hr, fq); #c1(GPR179) c2(NP_001004334) c3(probable G-protein coupled receptor 179 precursor) c4(20605) c5(20606, 20607, 20608, 20609, 20610, 20611) c6( ) c7(bEU); #c1(GPR180) c2(NP_851320) c3(integral membrane protein GPR180 precursor) c4(254541) c5(254542, 254543, 254544, 254545, 254546, 254547) c6( ) c7(Ae, kT); #c1(GPR182) c2(XP_011536129) c3(G-protein coupled receptor 182 isoform X1) c4(333434) c5(333435, 333436, 333437, 333438, 333439, 333440) c6( ) c7(aE, aW, ea, cz, aT, at, azl, IC); #c1(GPR183) c2(NP_004942) c3(G-protein coupled receptor 183) c4(151332) c5(151333, 151334, 151335, 151336, 151337, 151338) c6( ) c7(A, ey); #c1(GPR19) c2(XP_011518926) c3(probable G-protein coupled receptor 19 isoform X2) c4(313366, 313367) c5(313368, 313369, 313370) c6( ) c7(bz); #c1(GPR19) c2(XP_011518927) c3(probable G-protein coupled receptor 19 isoform X1) c4( ) c5(313371, 313372, 313373, 313374, 313375, 313376, 313377, 313378, 313379, 313380, 313381, 313382, 313383) c6( ) c7(bz); #c1(GPR20) c2(NP_005284) c3(G-protein coupled receptor 20) c4(154697) c5(154698, 154699, 154700, 154701, 154702, 154703) c6( ) c7(bL); #c1(GPR22) c2(XP_011514358) c3(probable G-protein coupled receptor 22 isoform X1) c4(307057) c5(307058, 307059, 307060, 307061, 307062, 307063) c6( ) c7(Dg, Dj, K); #c1(GPR26) c2(NP_703143) c3(G-protein coupled receptor 26) c4(245969) c5(245970, 245971, 245972, 245973, 245974, 245975) c6( ) c7(d, bS, ct, Z, eA, hq); #c1(GPR34) c2(NP_001091048) c3(probable G-protein coupled receptor 34) c4(38370, 38371) c5(38372, 38373, 38374, 38375, 38376, 38377, 38378, 38379, 38380, 38381, 38382, 38383, 38384, 38385, 38386, 38387) c6( ) c7(dB, iW, jh); #c1(GPR35) c2(NP_001182311) c3(G-protein coupled receptor 35 isoform b) c4(74763, 74764) c5(74765, 74766, 74767, 74768, 74769, 74770, 74771, 74772, 74773) c6( ) c7(bL, bri, hN, IS, iV, EJ); #c1(GPR35) c2(NP_005292) c3(G-protein coupled receptor 35 isoform a) c4( ) c5(154719, 154720, 154721, 154722, 154723, 154724, 154725, 154726, 154727, 154728, 154729, 154730, 154731, 154732) c6( ) c7(bL, bri, hN, IS, iV, EJ); #c1(GPR37) c2(NP_005293) c3(prosaposin receptor GPR37 precursor) c4(154733) c5(154734, 154735, 154736, 154737, 154738, 154739) c6( ) c7(bgk, vj, K, an, rz, bt); #c1(GPR37L1) c2(NP_004758) c3(prosaposin receptor GPR37L1 precursor) c4(149365, 149366) c5(149367, 149368, 149369, 149370, 149371, 149372, 149373, 149374, 149375, 149376, 149377, 149378) c6( ) c7(gZ); #c1(GPR39) c2(NP_001499) c3(G-protein coupled receptor 39) c4(118214) c5(118215, 118216, 118217, 118218, 118219, 118220, 118221) c6( ) c7(bL, vj, ht, it, v, Ea, hu, ae, cd, ad); #c1(GPR4) c2(NP_005273) c3(G-protein coupled receptor 4) c4(154629) c5(154630, 154631, 154632, 154633, 154634, 154635) c6( ) c7(T, aPm, K, m, t, bz); #c1(GPR50) c2(NP_004215) c3(melatonin-related receptor) c4(144346, 144347) c5(144348, 144349, 144350, 144351, 144352, 144353, 144354, 144355, 144356, 144357, 144358, 144359) c6( ) c7(VX, cA, vj, v, bK, bQ, rz); #c1(GPR52) c2(NP_005675) c3(probable G-protein coupled receptor 52) c4(158429) c5(158430, 158431, 158432, 158433, 158434, 158435) c6( ) c7(gl, ayR); #c1(GPR55) c2(XP_011510479) c3(G-protein coupled receptor 55 isoform X1) c4(300984, 300985) c5(300986, 300987, 300988, 300989, 300990, 300991, 300992, 300993, 300994, 300995, 300996, 300997, 300998, 300999, 301000, 301001, 301002, 301003, 301004, 301005) c6( ) c7(bL, T, hk, yk, ff, v, ci, m, en, t, jb); #c1(GPR6) c2(NP_001273028) c3(G-protein coupled receptor 6 isoform a) c4(104185, 104186) c5(104187, 104188, 104189, 104190, 104191, 104192) c6( ) c7(cF); #c1(GPR6) c2(NP_005275) c3(G-protein coupled receptor 6 isoform b) c4(154636) c5(154637, 154638, 154639, 154640, 154641, 154642, 154643, 154644, 154645, 154646, 154647, 154648) c6( ) c7(cF); #c1(GPR65) c2(NP_003599) c3(psychesine receptor) c4(139481) c5(139482, 139483, 139484, 139485, 139486, 139487) c6( ) c7(T, aw, ey, bK, V, ad); #c1(GPR68) c2(NP_001171147) c3(ovarian cancer G-protein coupled receptor 1) c4( ) c5(69949, 69950, 69951, 69952, 69953, 69954, 69955, 69956, 69957, 69958, 69959, 69960, 69961) c6( ) c7(t, ae, m, ad); #c1(GPR68) c2(XP_011535502) c3(ovarian cancer G-protein coupled receptor 1 isoform X1) c4(332548, 332549, 332550) c5(332551, 332552, 332553, 332554, 332555, 332556, 332557, 332558, 332559) c6( ) c7(t, ae, m, ad); #c1(GPR75) c2(NP_006785) c3(probable G-protein coupled receptor 75) c4(168052) c5(168053, 168054, 168055, 168056, 168057, 168058) c6( ) c7(W); #c1(GPR78) c2(NP_543009) c3(G-protein coupled receptor 78) c4(233222) c5(233223, 233224, 233225, 233226, 233227, 233228) c6( ) c7(bK, vi); #c1(GPR83) c2(NP_057624) c3(probable G-protein coupled receptor 83 precursor) c4(191926) c5(191927, 191928, 191929, 191930, 191931, 191932) c6( ) c7(v, aZ, mf); #c1(GPR87) c2(NP_076404) c3(G-protein coupled receptor 87) c4(214055) c5(214056, 214057, 214058, 214059, 214060, 214061) c6( ) c7(vj, ff, en); #c1(GPRASP1) c2(NP_001092881) c3(G-protein coupled receptor-associated sorting protein 1) c4(39705) c5(39706, 39707, 39708, 39709, 39710, 39711, 39712, 39713, 39714, 39715, 39716, 39717, 39718, 39719, 39720, 39721, 39722, 39723) c6( ) c7(bM); #c1(GPRC5A) c2(NP_003970) c3(retinoic acid-induced protein 3) c4(142530, 142531) c5(142532, 142533, 142534, 142535, 142536, 142537, 142538, 142539, 142540, 142541, 142542, 142543, 142544, 142545) c6(142546, 142547) c7(T, aA, bB, ci, ad, av, iu, ft, jz, aT, jj, ae, Yi, aa, IU, iU, MD, pr, aW, ff, cr, gE, aF, en, cl, g, cm, bz, ck, bF, eM, bE, cj, at, fD, it, B); #c1(GPRC5B) c2(NP_001291700) c3(G-protein coupled receptor family C group 5 member B isoform 2) c4(116362) c5(116363, 116364, 116365, 116366, 116367, 116368) c6( ) c7(Jd, bL, fq, v, EE); #c1(GPRC5B) c2(XP_006721115) c3(G-protein coupled receptor family C group 5 member B isoform X1) c4(293840, 293841, 293842) c5(293843, 293844, 293845, 293846, 293847, 293848, 293849, 293850, 293851, 293852, 293853, 293854, 293855, 293856, 293857, 293858, 293859, 293860) c6( ) c7(Jd, bL, fq, v, EE); #c1(GPRC5C) c2(NP_061123) c3(G-protein coupled receptor family C group 5 member C isoform b precursor) c4(199245) c5(199246, 199247, 199248, 199249, 199250, 199251, 199252, 199253, 199254, 199255, 199256) c6( ) c7(bEV, bM, ft, alu, cA, aW, aT, it, fd, bz, B); #c1(GPRC5C) c2(NP_071319) c3(G-protein coupled receptor family C group 5 member C isoform a) c4(210933, 210934) c5(210935, 210936, 210937, 210938, 210939, 210940, 210941) c6( ) c7(bEV, bM, ft, alu, cA, aW, aT, it, fd, bz, B); #c1(GPRC5C) c2(XP_005257571) c3(G-protein coupled receptor family C group 5 member C isoform X4) c4( ) c5(275268, 275269, 275270, 275271, 275272, 275273) c6( ) c7(bEV, bM, ft, alu, cA, aW, aT, it, fd, bz, B); #c1(GPRC5C) c2(XP_011523324) c3(G-protein coupled receptor family C group 5 member C isoform X1) c4(317864) c5( ) c6( ) c7(bEV, bM, ft, alu, cA, aW, aT, it, fd, bz, B); #c1(GPRC5C) c2(XP_011523325) c3(G-protein coupled receptor family C group 5 member C isoform X2) c4(317865) c5(317866, 317867, 317868, 317869, 317870, 317871) c6( ) c7(bEV, bM, ft, alu, cA, aW, aT, it, fd, bz, B); #c1(GPRC5D) c2(NP_061124) c3(G-protein coupled receptor family C group 5 member D) c4(199257, 199258) c5(199259, 199260, 199261, 199262, 199263, 199264) c6( ) c7(bEV, bM, T, ft, alu, cA, aW, vj, aT, it, fd, bz, B); #c1(GPRC5D) c2(XP_011519048) c3(G-protein coupled receptor family C group 5 member D isoform X2) c4(313543) c5(313544, 313545, 313546, 313547, 313548, 313549, 313550, 313551, 313552, 313553, 313554, 313555) c6( ) c7(bEV, bM, T, ft, alu, cA, aW, vj, aT, it, fd, bz, B); #c1(GPRC6A) c2(NP_001273283) c3(G-protein coupled receptor family C group 6 member A isoform 2 precursor) c4(104607) c5(104608, 104609, 104610, 104611, 104612, 104613) c6( ) c7(bL, bM, d, aE, Y, pX, cE, ff, h, Ja, v, dX, en, he, Fg, ae, ad); #c1(GPRC6A) c2(NP_001273284) c3(G-protein coupled receptor family C group 6 member A isoform 3 precursor) c4(104614, 104615, 104616, 104617) c5(104618, 104619, 104620, 104621, 104622, 104623) c6( ) c7(bL, bM, d, aE, Y, pX, cE, ff, h, Ja, v, dX, en, he, Fg, ae, ad); #c1(GPRC6A) c2(NP_683766) c3(G-protein coupled receptor family C group 6 member A isoform 1 precursor) c4(242579, 242580, 242581, 242582) c5(242583, 242584, 242585, 242586, 242587, 242588, 242589) c6( ) c7(bL, bM, d, aE, Y, pX, cE, ff, h, Ja, v, dX, en, he, Fg, ae, ad); #c1(GPRIN1) c2(XP_005265863) c3(G protein-regulated inducer of neurite outgrowth 1 isoform X1) c4(279804, 279805) c5(279806, 279807, 279808, 279809, 279810, 279811, 279812, 279813, 279814, 279815, 279816, 279817) c6( ) c7(FX, v, bK, cC); #c1(GPRIN2) c2(XP_011538700) c3(G protein-regulated inducer of neurite outgrowth 2 isoform X2) c4(336456) c5(336457, 336458) c6( ) c7(bK, bO); #c1(GPRIN2) c2(XP_011538702) c3(G protein-regulated inducer of neurite outgrowth 2 isoform X1) c4( ) c5(336459, 336460, 336461, 336462, 336463, 336464, 336465, 336466, 336467, 336468, 336469) c6( ) c7(bK, bO); #c1(GPRIN3) c2(XP_005262993) c3(G protein-regulated inducer of neurite outgrowth 3 isoform X1) c4(278191) c5(278192, 278193, 278194, 278195, 278196, 278197) c6( ) c7(aw, an); #c1(GPS2) c2(NP_004480) c3(G protein pathway suppressor 2) c4(146750, 146751) c5(146752, 146753, 146754, 146755, 146756, 146757, 146758, 146759, 146760, 146761, 146762, 146763, 146764, 146765, 146766, 146767, 146768, 146769, 146770) c6( ) c7(h, Y, v, qM); #c1(GPSM1) c2(NP_001139110) c3(G-protein-signaling modulator 1 isoform a) c4(58681, 58682) c5(58683, 58684, 58685, 58686, 58687, 58688, 58689, 58690, 58691) c6( ) c7(cu, aBZ, Nj, wR, wB); #c1(GPSM1) c2(NP_001186932) c3(G-protein-signaling modulator 1 isoform c) c4(78824) c5(78825, 78826, 78827, 78828, 78829, 78830, 78831, 78832, 78833, 78834, 78835) c6( ) c7(cu, aBZ, Nj, wR, wB); #c1(GPSM1) c2(NP_056412) c3(G-protein-signaling modulator 1 isoform b) c4(187491) c5(187492, 187493, 187494, 187495, 187496, 187497) c6( ) c7(cu, aBZ, Nj, wR, wB); #c1(GPSM1) c2(XP_011516800) c3(G-protein-signaling modulator 1 isoform X1) c4( ) c5(310254, 310255, 310256, 310257, 310258, 310259) c6( ) c7(cu, aBZ, Nj, wR, wB); #c1(GPSM2) c2(XP_011539605) c3(G-protein-signaling modulator 2 isoform X3) c4( ) c5(337825, 337826, 337827, 337828, 337829, 337830, 337831, 337832, 337833, 337834, 337835, 337836, 337837, 337838, 337839, 337840, 337841, 337842) c6( ) c7(bEW, bF, T, aW, FB, mG, aT, Bh); #c1(GPSM3) c2(NP_071390) c3(G-protein-signaling modulator 3) c4(211359) c5(211360, 211361, 211362, 211363, 211364, 211365, 211366, 211367, 211368, 211369, 211370, 211371, 211372, 211373, 211374, 211375, 211376, 211377, 211378, 211379, 211380, 211381, 211382, 211383, 211384, 211385, 211386, 211387, 211388, 211389, 211390, 211391, 211392, 211393, 211394, 211395, 211396, 211397, 211398, 211399, 211400, 211401, 211402, 211403, 211404, 211405, 211406, 211407) c6( ) c7(eZ, cr, iV); #c1(GPT) c2(XP_011515295) c3(alanine aminotransferase 1 isoform X1) c4(308164) c5(308165, 308166, 308167, 308168, 308169, 308170, 308171, 308172, 308173, 308174) c6( ) c7(ck, bv, D, jx, hl, bu, wc, fQ, cy, aq, mf, aNp, K, fc, avG, B); #c1(GPT2) c2(NP_001135938) c3(alanine aminotransferase 2 isoform 2) c4( ) c5(53626, 53627, 53628, 53629, 53630) c6( ) c7(aNp, hl, K, fc); #c1(GPT2) c2(NP_597700) c3(alanine aminotransferase 2 isoform 1) c4(235042, 235043) c5(235044, 235045, 235046, 235047, 235048, 235049, 235050) c6( ) c7(aNp, hl, K, fc); #c1(GPX1) c2(NP_000572) c3(glutathione peroxidase 1 isoform 1) c4(12817) c5(12818, 12819, 12820, 12821, 12822, 12823, 12824) c6( ) c7(bM, T, aC, ea, e, al, bB, fo, ip, K, qM, eL, xa, aW, fc, hl, bEX, g, cm, wT, mx, mk, IS, dD, gU, zt, aw, n, aj, PJ, TB, axc, h, IG, jy, dL, KV, cM, kT, W, dB, hk, at, IB, B, bL, eR, Dh, cz, hy, v, j, bX, q, J, eA, uT, afQ, aT, cy, bq, an, ae, af, eu, bA, s, Y, r, HL, en, bN, ac, hr, im, oq, id, iW, ha, jh, dG, Gn, eq, ad, kL, av, HF, ji, uX, ff, bz, qa, D, gk, pu, bE, aS, be, ei, rk); #c1(GPX1) c2(NP_958799) c3(glutathione peroxidase 1 isoform 2) c4(262199) c5(262200, 262201, 262202, 262203, 262204) c6( ) c7(bM, T, aC, ea, e, al, bB, fo, ip, K, qM, eL, xa, aW, fc, hl, bEX, g, cm, wT, mx, mk, IS, dD, gU, zt, aw, n, aj, PJ, TB, axc, h, IG, jy, dL, KV, cM, kT, W, dB, hk, at, IB, B, bL, eR, Dh, cz, hy, v, j, bX, q, J, eA, uT, afQ, aT, cy, bq, an, ae, af, eu, bA, s, Y, r, HL, en, bN, ac, hr, im, oq, id, iW, ha, jh, dG, Gn, eq, ad, kL, av, HF, ji, uX, ff, bz, qa, D, gk, pu, bE, aS, be, ei, rk); #c1(GPX2) c2(NP_002074) c3(glutathione peroxidase 2) c4(124272) c5(124273, 124274, 124275, 124276, 124277, 124278) c6( ) c7(T, pf, Dh, iW, NT, bB, n, ci, q, ad, azn, aT, dL, ji, KV, ae, s, aW, LZ, r, g, bz, bE, at, B); #c1(GPX3) c2(NP_002075) c3(glutathione peroxidase 3 precursor) c4(124279, 124280) c5(124281, 124282, 124283, 124284, 124285, 124286, 124287, 124288, 124289, 124290, 124291, 124292) c6( ) c7(bL, bM, T, dD, dA, iW, e, NT, aA, bB, aj, v, eq, ci, fr, lu, ad, dP, av, b, awd, M, aT, h, dL, bK, K, bq, nJ, ae, aa, xQ, d, s, MD, qt, aW, Y, az, hl, LZ, uY, aq, vs, aF, g, mo, f, bw, qa, ck, ac, c, nB, bE, iA, U, hL, at, m, i, it, B); #c1(GPX4) c2(NP_002076) c3(phospholipid hydroperoxide glutathione peroxidase, mitochondrial isoform A precursor) c4(124293) c5(124294, 124295, 124296, 124297, 124298, 124299) c6( ) c7(bL, bM, oq, T, gU, fM, dD, ea, iW, bmk, oR, arw, eq, fr, AO, cd, q, ad, av, JT, aT, dL, ae, A, s, aW, Y, ff, hl, r, en, t, bz, qa, ac, at, dy, im, iu); #c1(GPX5) c2(NP_001500) c3(epididymal secretory glutathione peroxidase isoform 1 precursor) c4(118222) c5(118223, 118224, 118225, 118226, 118227, 118228, 118229, 118230, 118231, 118232, 118233, 118234, 118235, 118236) c6(118237, 118238) c7(fq); #c1(GPX5) c2(NP_003987) c3(epididymal secretory glutathione peroxidase isoform 2 precursor) c4(142662) c5(142663, 142664, 142665, 142666, 142667, 142668, 142669, 142670, 142671) c6(142672) c7(fq); #c1(GRAMD1B) c2(NP_001273492) c3(GRAM domain-containing protein 1B isoform 1) c4(105052) c5(105053, 105054, 105055, 105056, 105057, 105058) c6( ) c7(cj); #c1(GRAMD1B) c2(NP_065767) c3(GRAM domain-containing protein IB isoform 2) c4(205275, 205276) c5(205277, 205278, 205279, 205280, 205281, 205282, 205283, 205284, 205285, 205286, 205287, 205288) c6( ) c7(cj); #c1(GRAMD3) c2(NP_001139791) c3(GRAM domain-containing protein 3 isoform 1) c4(59923) c5(59924, 59925, 59926, 59927, 59928, 59929, 59930) c6( ) c7(fK); #c1(GRAMD3) c2(NP_001139792) c3(GRAM domain-containing protein 3 isoform 3) c4( ) c5(59931, 59932, 59933, 59934, 59935, 59936) c6( ) c7(fK); #c1(GRAMD3) c2(NP_001139793) c3(GRAM domain-containing protein 3 isoform 4) c4(59937) c5(59938, 59939, 59940, 59941, 59942, 59943) c6( ) c7(fK); #c1(GRAMD3) c2(NP_001139794) c3(GRAM domain-containing protein 3 isoform 5) c4(59944, 59945) c5(59946, 59947, 59948, 59949, 59950, 59951, 59952, 59953, 59954, 59955, 59956, 59957) c6( ) c7(fK); #c1(GRAMD3) c2(NP_076416) c3(GRAM domain-containing protein 3 isoform 2) c4(214098) c5(214099, 214100, 214101, 214102, 214103, 214104) c6( ) c7(fK); #c1(GRAMD3) c2(XP_005272115) c3(GRAM domain-containing protein 3 isoform X6) c4(283707) c5( ) c6( ) c7(fK); #c1(GRAMD3) c2(XP_005272117) c3(GRAM domain-containing protein 3 isoform X8) c4(283708) c5(283709, 283710, 283711, 283712, 283713, 283714) c6( ) c7(fK); #c1(GRAMD4) c2(NP_055939) c3(GRAM domain-containing protein 4) c4( ) c5(184571, 184572, 184573, 184574, 184575, 184576, 184577, 184578) c6( ) c7(byn, Y, rs, rq); #c1(GRAMD4) c2(XP_005261453) c3(GRAM domain-containing protein 4 isoform X3) c4( ) c5(277360) c6( ) c7(byn, Y, rs, rq); #c1(GRAMD4) c2(XP_006724232) c3(GRAM domain-containing protein 4 isoform X5) c4(295871) c5(295872, 295873) c6( ) c7(byn, Y, rs, rq); #c1(GRAMD4) c2(XP_011528314) c3(GRAM domain-containing protein 4 isoform X4) c4(323375) c5( ) c6( ) c7(byn, Y, rs, rq); #c1(GRAMD4) c2(XP_011528316) c3(GRAM domain-containing protein 4 isoform X7) c4( ) c5(323376, 323377, 323378, 323379, 323380) c6( ) c7(byn, Y, rs, rq); #c1(GRAP) c2(NP_006604) c3(GRB2-related adapter protein) c4(166567, 166568) c5(166569, 166570, 166571, 166572, 166573, 166574, 166575, 166576, 166577, 166578, 166579, 166580) c6( ) c7(gU, fN); #c1(GRAP) c2(XP_005256482) c3(GRB2-related adapter protein isoform X1) c4( ) c5(274187, 274188) c6( ) c7(gU, fN); #c1(GRAP2) c2(NP_001278754) c3(GRB2-related adapter protein 2 isoform 1) c4(110012, 110013, 110014) c5(110015, 110016, 110017, 110018, 110019, 110020, 110021, 110022, 110023, 110024, 110025, 110026, 110027, 110028, 110029, 110030, 110031, 110032, 110033, 110034, 110035, 110036, 110037, 110038, 110039, 110040, 110041, 110042, 110043) c6( ) c7(T, aC, ea, if, fd, bB, gf, IR, Lw, bv, xE, aE, rw, dV, K, aW, zC, g, as, eF, cm, bw, eM, nB, cj, NO, Hb, m, NN, NK, dD, NJ, aj, BF, ct, qN, fr, cd, ai, Hx, jz, cU, h, fe, aq, NL, w, hR, B, bL, Dw, NQ, fM, yk, IH, jx, aA, cR, cz, v, C, V, q, eA, eJ, zn, yw, nv, aT, kf, cy, ae, af, hM, wr, iU, Y, r, lo, en, t, iK, pb, ck, im, bt, ao, kh, jh, dG, eq, iJ, ad, dP, av, CJ, F, ds, ji, IQ, NM, NP, d, ff, eH, cr, aF, bz, bE, y, iu); #c1(GRAP2) c2(NP_001278757) c3(GRB2-related adapter protein 2 isoform 3) c4(110044) c5(110045, 110046, 110047, 110048, 110049, 110050) c6( ) c7(T, aC, ea, if, fd, bB, gf, IR, Lw, bv, xE, aE, rw, dV, K, aW, zC, g, as, eF, cm, bw, eM, nB, cj, NO, Hb, m, NN, NK, dD, NJ, aj, BF, ct, qN, fr, cd, ai, Hx, jz, cU, h, fe, aq, NL, w, hR, B, bL, Dw, NQ, fM, yk, IH, jx, aA, cR, cz, v, C, V, q, eA, eJ, zn, yw, nv, aT, kf, cy, ae, af, hM, wr, iU, Y, r, lo, en, t, iK, pb, ck, im, bt, ao, kh, jh, dG, eq, iJ, ad, dP, av, CJ, F, ds, ji, IQ, NM, NP, d, ff, eH, cr, aF, bz, bE, y, iu); #c1(GRAP2) c2(XP_006724439) c3(GRB2-related adapter protein 2 isoform X2) c4(295968, 295969, 295970) c5(295971, 295972, 295973, 295974, 295975, 295976, 295977, 295978, 295979, 295980, 295981) c6( ) c7(T, aC, ea, if, fd, bB, gf, IR, Lw, bv, xE, aE, rw, dV, K, aW, zC, g, as, eF, cm, bw, eM, nB, cj, NO, Hb, m, NN, NK, dD, NJ, aj, BF, ct, qN, fr, cd, ai, Hx, jz, cU, h, fe, aq, NL, w, hR, B, bL, Dw, NQ, fM, yk, IH, jx, aA, cR, cz, v, C, V, q, eA, eJ, zn, yw, nv, aT, kf, cy, ae, af, hM, wr, iU, Y, r, lo, en, t, iK, pb, ck, im, bt, ao, kh, jh, dG, eq, iJ, ad, dP, av, CJ, F, ds, ji, IQ, NM, NP, d, ff, eH, cr, aF, bz, bE, y, iu); #c1(GRASP) c2(NP_001258785) c3(general receptor for phosphoinositides 1-associated scaffold protein isoform 2) c4(96535) c5(96536, 96537, 96538, 96539, 96540, 96541, 96542, 96543, 96544) c6( ) c7(q, ci, s, r); #c1(GRASP) c2(NP_859062) c3(general receptor for phosphoinositides 1-associated scaffold protein isoform 1) c4(255448) c5(255449, 255450, 255451, 255452, 255453, 255454, 255455) c6( ) c7(q, ci, s, r); #c1(GRB10) c2(NP_001001549) c3(growth factor receptor-bound protein 10 isoform b) c4(18670) c5(18671, 18672, 18673, 18674, 18675, 18676) c6( ) c7(bL, EW, bP, vJ, aW, ff, AH, LO, jx, aT, ml, amj, QF, m, ahl, en, bt, ahE, pb); #c1(GRB10) c2(NP_001001555) c3(growth factor receptor-bound protein 10 isoform c) c4( ) c5(18692, 18693, 18694, 18695, 18696, 18697, 18698, 18699, 18700, 18701, 18702, 18703, 18704, 18705, 18706, 18707, 18708, 18709, 18710, 18711) c6( ) c7(bL, EW, bP, vJ, aW, ff, AH, LO, jx, aT, ml, amj, QF, m, ahl, en, bt, ahE, pb); #c1(GRB10) c2(NP_005302) c3(growth factor receptor-bound protein 10 isoform a) c4(154779) c5(154780, 154781, 154782, 154783, 154784, 154785, 154786, 154787, 154788, 154789, 154790, 154791, 154792, 154793, 154794, 154795) c6( ) c7(bL, EW, bP, vJ, aW, ff, AH, LO, jx, aT, ml, amj, QF, m, ahl, en, bt, ahE, pb); #c1(GRB10) c2(XP_011513614) c3(growth factor receptor-bound protein 10 isoform X3) c4(305917, 305918, 305919, 305920) c5(305921, 305922, 305923, 305924, 305925, 305926, 305927, 305928, 305929, 305930, 305931, 305932, 305933, 305934, 305935, 305936) c6( ) c7(bL, EW, bP, vJ, aW, ff, AH, LO, jx, al ml, amj, QF, m, ahl, en, bt, ahE, pb); #c1(GRB10) c2(XP_011513625) c3(growth factor receptor-bound protein 10 isoform X4) c4( ) c5(305937, 305938, 305939, 305940, 305941) c6( ) c7(bL, EW, bP, vJ, aW, ff, AH, LO, jx, aT, ml, amj, QF, m, ahl, en, bt, ahE, pb); #c1(GRB14) c2(NP_001290351) c3(growth factor receptor-bound protein 14 isoform 2) c4(115234) c5(115235, 115236, 115237, 115238, 115239, 115240) c6( ) c7(bL, aW, hd, nB, aT); #c1(GRB14) c2(NP_004481) c3(growth factor receptor-bound protein 14 isoform 1) c4(146771) c5(146772, 146773, 146774, 146775, 146776, 146777) c6( ) c7(bL, aW, hd, nB, aT); #c1(GRB2) c2(NP_002077) c3(growth factor receptor-bound protein 2 isoform 1) c4(124300) c5(124301, 124302, 124303, 124304, 124305, 124306, 124307, 124308, 124309, 124310, 124311124312, 124313, 124314) c6( ) c7(bL, Mb, T, jx, aA, fd, ci, q, eA, ip, aT, hD, h, hn, dL, eL, aT, jf, yo, Oz, iU, aW, r, aF, cm, t, op, ck, vA, B); #c1(GRB2) c2(NP_987102) c3(growth factor receptor-bound protein 2 isoform 2) c4(263417) c5(263418, 263419, 263420, 263421, 263422, 263423) c6( ) c7(bL, Mb, T, jx, aA, fd, ci, q, eA, ip, aT, hD, h, hn, dL, eL, af, jf, yo, Oz, iU, aW, r, aF, cm, t, op, ck, vA, B); #c1(GRB7) c2(NP_001229371) c3(growth factor receptor-bound protein 7 isoform b) c4(84273, 84274) c5(84275, 84276, 84277, 84278, 84279, 84280, 84281, 84282) c6( ) c7(T, ht, aA, n, fr, ci, ad, av, aE, aT, yu, hu, iU, aW, aF, g, t, Ld, kP, cj, m, B); #c1(GRB7) c2(NP_001229372) c3(growth factor receptor-bound protein 7 isoform a) c4( ) c5(84283, 84284, 84285, 84286, 84287, 84288, 84289, 84290, 84291, 84292, 84293) c6( ) c7(T, ht, aA, n, fr, ci, ad, av, aE, aT, yu, hu, iU, aW, aF, g, t, Ld, kP, cj, m, B); #c1(GRB7) c2(XP_011522985) c3(growth factor receptor-bound protein 7 isoform X1) c4(317450) c5(317451, 317452, 317453, 317454, 317455, 317456, 317457, 317458, 317459, 317460) c6( ) c7(T, ht, aA, n, fr, ci, ad, av, aE, aT, yu, hu, iU, aW, aF, g, t, Ld, kP, cj, m, B); #c1(GREB1) c2(NP_683701) c3(protein GREB1 isoform c) c4(242433) c5(242434, 242435, 242436, 242437, 242438, 242439) c6( ) c7(dP, ae, T, kl, aW, aZ, aT, cz, m, t, bz, LS, ad); #c1(GREB1) c2(XP_005246249) c3(protein GREB1 isoform X1) c4(266983) c5(266984, 266985, 266986, 266987, 266988, 266989, 266990, 266991, 266992, 266993, 266994, 266995) c6( ) c7(dP, ae, T, kl, aW, aZ, aT, cz, m, t, bz, LS, ad); #c1(GREB1) c2(XP_011508725) c3(protein GREB1 isoform X2) c4(299341) c5(299342, 299343, 299344, 299345, 299346, 299347) c6( ) c7(dP, ae, T, kl, aW, aZ, aT, cz, m, t, bz, LS, ad); #c1(GREM1) c2(NP_001178252) c3(gremlin-1 isoform 2 precursor) c4(73301) c5(73302, 73303, 73304, 73305, 73306, 73307, 73308, 73309, 73310, 73311, 73312, 73313) c6(73314, 73315, 73316) c7(bL, T, dD, ea, fG, jh, aA, eq, ci, uE, rc, q, ad, dP, av, py, wG, afQ, oj, aT, h, Nc, ae, aa, s, are, ff, r, en, bvU, pb, bF, sS, arB, kP, eM, IC); #c1(GREM1) c2(NP_037504) c3(gremlin-1 isoform 1 precursor) c4(175879) c5(175880, 175881, 175882, 175883, 175884, 175885, 175886) c6(175887, 175888) c7(bL, T, dD, ea, fG, jh, aA, eq, ci, uE, rc, q, ad, dP, av, py, wG, afQ, oj, aT, h, Nc, ae, aa, s, are, ff, r, en, bvU, pb, bF, sS, arB, kP, eM, IC); #c1(GREM1) c2(XP_006725605) c3(gremlin-1 isoform X1) c4( ) c5(296912, 296913) c6( ) c7(bL, T, dD, ea, fG, jh, aA, eq, ci, uE, rc, q, ad, dP, av, py, wG, afQ, oj, aT, h, Nc, ae, aa, s, are, ff, r, en, bvU, pb, bF, sS, arB, kP, eM, IC); #c1(GREM2) c2(XP_005273283) c3(gremlin-2 isoform X2) c4(284432) c5(284433) c6( ) c7(V, bA, mr); #c1(GREM2) c2(XP_011542551) c3(gremlin-2 isoform X1) c4( ) c5(341102, 341103, 341104, 341105, 341106) c6( ) c7(V, bA, mr); #c1(GRHL1) c2(NP_937825) c3(grainyhead-like protein 1 homolog) c4(259210, 259211) c5(259212, 259213, 259214, 259215, 259216, 259217, 259218, 259219, 259220, 259221, 259222, 259223, 259224) c6( ) c7(B, bik, bE, bEY, r, bB, aq, cm, q); #c1(GRHL1) c2(XP_005246216) c3(grainyhead-like protein 1 homolog isoform X5) c4(266963) c5(266964, 266965, 266966, 266967, 266968, 266969, 266970, 266971, 266972, 266973, 266974) c6( ) c7(B, bik, bE, bEY, r, bB, aq, cm, q); #c1(GRHL2) c2(NP_079191) c3(grainyhead-like protein 2 homolog) c4(217416, 217417, 217418) c5(217419, 217420, 217421, 217422, 217423, 217424, 217425, 217426, 217427, 217428, 217429, 217430, 217431, 217432, 217433, 217434, 217435, 217436) c6( ) c7(LB, es, T, py, iA, lp, aW, fG, ff, aT, r, n, aq, q, en, bEZ, cM, B); #c1(GRHPR) c2(NP_036335) c3(glyoxylate reductase/hydrnxypyruvate reductase) c4(173055, 173056, 173057) c5(173058, 173059, 173060, 173061, 173062, 173063, 173064, 173065, 173066, 173067, 173068, 173069) c6( ) c7(TI, MB, ad); #c1(GRHPR) c2(XP_005251688) c3(glyoxylate reductase/hydroxypyruvate reductase isoform X1) c4( ) c5(271D43, 271044, 271045, 271046, 271047, 271048) c6( ) c7(TI, MB, ad); #c1(GRIA1) c2(NP_000818) c3(glutamate receptor 1 isoform 1 precursor) c4(16354, 16355) c5(16356, 16357, 16358, 16359, 16360, 16361, 16362, 16363, 16364, 16365, 16366) c6( ) c7(T, ha, bO, qy, bS, uu, ct, il, eA, xt, Ef, gM, lu, fS, h, IG, bK, he, af, d, aCt, bFc, aPf, cu, Z, bN, cT, ac, c, bFb, lw, bFa, cB, g0); #c1(GRIA1) c2(NP_001107655) c3(glutamate receptor 1 isoform 2 precursor) c4(42959, 42960) c5(42961, 42962, 42963, 42964, 42965, 42966, 42967, 42968, 42969, 42970, 42971, 42972, 42973, 42974, 42975, 42976) c6( ) c7(T, ha, bO, qy, bS, uu, ct, il, eA, xt, Ef, gM, lu, fS, h, IG, bK, he, af, d, aCt, bFc, aPf, cu, Z, bN, cT, ac, c, bFb, lw, bFa, cB, gU); #c1(GRIA1) c2(NP_001244948) c3(glutamate receptor 1 isoform 3 precursor) c4(92407) c5(92408, 92409, 92410, 92411, 92412, 92413) c6( ) c7(T, ha, bO, qy, bS, uu, ct, il, eA, xt, Ef, gM, lu, fS, h, IG, bK, he, af, d, aCt, bFc, aPf, cu, Z, bN, cT, ac, c, bFb, lw, bFa, cB, gO); #c1(GRIA1) c2(NP_001244950) c3(glutamate receptor 1 isoform 5) c4(92414) c5(92415, 92416, 92417, 92418, 92419, 92420, 92421) c6( ) c7(T, ha, bO, qy, bS, uu, ct, il, eA, xt, Ef, gM, lu, fS, h, IG, bK, he, af, d, aCt, bFc, aPf, cu, Z, bN, cT, ac, c, bFb, lw, bFa, cB, gO); #c1(GRIA1) c2(NP_001244951) c3(glutamate receptor 1 isoform 6) c4(92422) c5(92423, 92424, 92425, 92426, 92427, 92428) c6( ) c7(T, ha, bO, qy, bS, uu, ct, il, eA, xt, Ef, gM, lu, fS, h, IG, bK, he, af, d, aCt, bFc, aPf, cu, Z, bN, cT, ac, c, bFb, lw, bFa, cB, gO); #c1(GRIA2) c2(NP_000817) c3(glutamate receptor 2 isoform 1 precursor) c4(16342, 16343) c5(16344, 16345, 16346, 16347, 16348, 16349, 16350, 16351, 16352, 16353) c6( ) c7(ha, bO, aj, Vd, ci, nA, uu, il, abe, eA, aR, J, lu, M, bK, he, af, bFd, d, TQ, cu, g, ir, hq, ac, c, nG, bFb, cB); #c1(GRIA2) c2(NP_001077088) c3(glutamate receptor 2 isoform 2 precursor) c4(37726, 37727, 37728, 37729) c5(37730, 37731, 37732, 37733, 37734, 37735, 37736, 37737, 37738, 37739, 37740) c6( ) c7(ha, bO, aj, Vd, ci, nA, uu, il, abe, eA, aR, J, lu, M, bK, he, af, bFd, d, TQ, cu, g, ir, hq, ac, c, nG, bFb, cB); #c1(GRIA2) c2(NP_001077089) c3(glutamate receptor 2 isoform 3) c4( ) c5(37741, 37742, 37743, 37744, 37745, 37746, 37747, 37748, 37749, 37750, 37751) c6( ) c7(ha, bO, aj, Vd, ci, nA, uu, il, abe, eA, aR, J, lu, M, bK, he, af, bFd, d, TQ, cu, g, ir, hq, ac, c, nG, bFb, cB); #c1(GRIA2) c2(XP_011530194) c3(glutamate receptor 2 isoform X1) c4(326085, 326086, 326087, 326088) c5(326089, 326090, 326091, 326092, 326093, 326094, 326095, 326096, 326097, 326098, 326099, 326100, 326101, 326102, 326103, 326104, 326105, 326106, 326107, 326108, 326109, 326110, 326111, 326112, 326113, 326114, 326115, 326116, 326117, 326118, 326119, 326120, 326121, 326122, 326123) c6( ) c7(ha, bO, aj, Vd, ci, nA, uu, il, abe, eA, aR, J, lu, M, bK, he, af, bFd, d, TQ, cu, g, ir, hq, ac, c, nG, bFb, cB); #c1(GRIA3) c2(NP_000819) c3(glutamate receptor 3 isoform 2 precursor) c4(16367, 16368) c5(16369, 16370, 16371, 16372, 16373, 16374, 16375, 16376, 16377, 16378, 16379, 16380, 16381, 16382, 16383, 16384, 16385, 16386, 16387, 16388, 16389, 16390) c6( ) c7(T, ha, jh, bS, uu, ct, nA, PJ, il, pK, Ef, aE, iX, bK, rE, af, nf, Z, bFf, ck, c, bFe, bFb, hh, gO, qc); #c1(GRIA3) c2(NP_001243672) c3(glutamate receptor 3 isoform 3 precursor) c4(91328, 91329) c5(91330, 91331, 91332, 91333, 91334, 91335, 91336, 91337, 91338, 91339, 91340, 91341, 91342, 91343, 91344, 91345) c6( ) c7(T, ha, jh, bS, uu, ct, nA, PJ, il, PK, Ef, aE, iX, bK, rE, af, nf, Z, bFf, ck, c, bFe, bFb, hh, gO, qc); #c1(GRIA3) c2(NP_015564) c3(glutamate receptor 3 isoform 1 precursor) c4(171890, 171891) c5(171892, 171893, 171894, 171895, 171896, 171897) c6( ) c7(T, ha, jh, bS, uu, ct, nA, PJ, il, pK, Ef, aE, iX, bK, rE, af, nf, Z, bFf, ck, c, bFe, bFb, hh, gO, qc); #c1(GRIA4) c2(NP_001070711) c3(glutamate receptor 4 isoform 2 precursor) c4(34790) c5(34791, 34792, 34793, 34794, 34795, 34796, 34797, 34798, 34799, 34800) c6( ) c7(d, c, HN, Be, bO, uu, bC, IB); #c1(GRIA4) c2(NP_001106283) c3(glutamate receptor 4 isoform 3 precursor) c4(42430) c5(42431, 42432, 42433, 42434, 42435, 42436, 42437, 42438, 42439, 42440, 42441, 42442, 42443, 42444, 42445, 42446, 42447, 42448, 42449, 42450) c6( ) c7(d, c, HN, Be, bO, uu, bC, IB); #c1(GRIA4) c2(XP_005271575) c3(glutamate receptor 4 isoform X2) c4( ) c5(283480) c6( ) c7(d, c, HN, Be, bO, uu, bC, IB); #c1(GRIA4) c2(XP_006718886) c3(glutamate receptor 4 isoform X1) c4(292033, 292034) c5(292035, 292036, 292037, 292038, 292039, 292040, 292041, 292042, 292043, 292044) c6( ) c7(d, c, HN, Be, bO, uu, bC, IB); #c1(GRID1) c2(NP_060021) c3(glutamate receptor ionotropic, delta-1 precursor) c4(193718, 193719) c5(193720, 193721, 193722, 193723, 193724, 193725, 193726, 193727, 193728, 193729, 193730, 193731) c6( ) c7(iH, IV, e, ha, bo, jy, bK, xw, bDu); #c1(GRID2) c2(NP_001273767) c3(glutamate receptor ionotropic, delta-2 isoform 2 precursor) c4(105821) c5(105822, 105823, 105824, 105825, 105826, 105827) c6( ) c7(cd, ky); #c1(GRID2) c2(NP_001501) c3(glutamate receptor ionotropic, delta-2 isoform 1 precursor) c4(118239) c5(118240, 118241, 118242, 118243, 118244, 118245) c6( ) c7(cd, ky); #c1(GRIK1) c2(NP_000821) c3(glutamate receptor ionotropic, kainate 1 isoform 1 precursor) c4(16391, 16392) c5(16393, 16394, 16395, 16396, 16397, 16398, 16399, 16400, 16401, 16402, 16403, 16404, 16405, 16406, 16407, 16408, 16409, 16410) c6( ) c7(Cq, rR, c, ha, HN, bO, aT, bK, PJ, il, f, fq, aR, cB); #c1(GRIK1) c2(NP_783300) c3(glutamate receptor ionotropic, kainate 1 isoform 2 precursor) c4(251580) c5(251581, 251582, 251583, 251584, 251585, 251586, 251587, 251588, 251589, 251590, 251591, 251592) c6( ) c7(Cq, rR, c, ha, HN, bO, aT, bK, PJ, il, f, fq, aR, cB); #c1(GRIK1) c2(XP_005260999) c3(glutamate receptor ionotropic, kainate 1 isoform X2) c4(277070, 277071) c5(277072, 277073, 277074, 277075, 277076, 277077) c6( ) c7(Cq, rR, c, ha, HN, bO, aT, bK, PJ, il, f, fq, aR, cB); #c1(GRIK1) c2(XP_005261000) c3(glutamate receptor ionotropic, kainate 1 isoform X3) c4(277078, 277079) c5(277080, 277081, 277082, 277083, 277084, 277085, 277086, 277087, 277088, 277089, 277090, 277091) c6( ) c7(Cq, rR, c, ha, HN, bO, aT, bK, PJ, il, f, fq, aR, cB); #c1(GRIK1) c2(XP_005261001) c3(glutamate receptor ionotropic, kainate 1 isoform X4) c4(277092) c5(277093, 277094, 277095, 277096, 277097, 277098) c6( ) c7(Cq, rR, c, ha, HN, bO, aT, bK, PJ, il, f, fq, aR, cB); #c1(GRIK1) c2(XP_006724054) c3(glutamate receptor ionotropic, kainate 1 isoform X1) c4(295669, 295670) c5(295671, 295672, 295673, 295674, 295675, 295676) c6( ) c7(Cg, rR, c, ha, HN, bO, aT, bK, PJ, il, f, fq, aR, cB); #c1(GRIK1) c2(XP_011527830) c3(glutamate receptor ionotropic, kainate 1 isoform X6) c4( ) c5(322770) c6( ) c7(Cq, rR, c, ha, HN, bO, aT, bK, PJ, il, f, fq, aR, cB); #c1(GRIK2) c2(XP_005267002) c3(glutamate receptor ionotropic, kainate 2 isoform X1) c4(280610) c5(280611, 280612, 280613, 280614, 280615, 280616, 280617, 280618, 280619) c6( ) c7(nD, oe, aw, aA, bS, ct, nA, il, Ef, x, bFg, lu, IG, hn, bK, hq, rE, ff, aF, en, Z, bN, hq, eK, rR, ac, c, cA, uJ, be, IB, gO, qc); #c1(GRIK2) c2(XP_005267003) c3(glutamate receptor ionotropic, kainate 2 isoform X4) c4(280620) c5(280621, 280622, 280623, 280624, 280625) c6( ) c7(nD, oe, aw, aA, bS, ct, nA, il, Ef, x, bFg, lu, IG, hn, bK, hg, rE, ff, aF, en, Z, bN, hq, eK, rR, ac, c, cA, uJ, be, IB, gO, qc); #c1(GRIK2) c2(XP_011534079) c3(glutamate receptor ionotropic, kainate 2 isoform X3) c4(330266, 330267) c5(330268, 330269, 330270, 330271, 330272) c6( ) c7(nD, oe, aw, aA, bS, ct, nA, il, Ef, x, bFg, lu, IG, hn, bK, hg, rE, ff, aF, en, Z, bN, hq, eK, rR, ac, c, cA, uJ, be, IB, gO, qc); #c1(GRIK2) c2(XP_011534080) c3(glutamate receptor ionotropic, kainate 2 isoform X2) c4(330273) c5(330274, 330275, 330276, 330277, 330278, 330279, 330280, 330281, 330282) c6( ) c7(nD, oe, aw, aA, bS, ct, nA, il, Ef, x, bFg, lu, IG, hn, bK, hg, rE, ff, aF, en, Z, bN, hq, eK, rR, ac, c, cA, uJ, be, IB, gO, qc); #c1(GRIK2) c2(XP_011534081) c3(glutamate receptor ionotropic, kainate 2 isoform X5) c4(330283, 330284) c5(330285, 330286, 330287, 330288, 330289, 330290) c6( ) c7(nD, oe, aw, aA, bS, ct, nA, il, Ef, x, bFg, lu, IG, hn, bK, hg, rE, ff, aF, en, Z, bN, hq, eK, rR, ac, c, cA, uJ, be, IB, gO, qc); #c1(GRIK2) c2(XP_011534082) c3(glutamate receptor ionotropic, kainate 2 isoform X6) c4( ) c5(330291, 330292, 330293, 330294, 330295, 330296) c6( ) c7(nD, oe, aw, aA, bS, ct, nA, il, Ef, x, bFg, lu, IG, hn, bK, hg, rE, ff, aF, en, Z, bN, hq, eK, rR, ac, c, cA, uJ, be, IB, gO, qc); #c1(GRIK2) c2(XP_011534083) c3(glutamate receptor ionotropic, kainate 2 isoform X7) c4( ) c5(330297, 330298, 330299, 330300, 330301, 330302) c6( ) c7(nD, oe, aw, aA, bS, ct, nA, il, Ef, x, bFg, lu, IG, hn, bK, hg, rE, ff, aF, en, Z, bN, hq, eK, rR, ac, c, cA, uJ, be, IB, gO, qc); #c1(GRIK4) c2(NP_001269399) c3(glutamate receptor ionotropic, kainate 4 isoform 1 precursor) c4(101584) c5(101585, 101586, 101587, 101588, 101589, 101590, 101591, 101592, 101593, 101594) c6( ) c7(ac, pN, Y, gl, bK, nA, he, jb); #c1(GRIK5) c2(NP_001287959) c3(glutamate receptor ionotropic, kainate 5 isoform 1 precursor) c4(113266, 113267) c5(113268, 113269, 113270, 113271, 113272, 113273) c6( ) c7(x, il, cA, ff, IG, uJ, bS, bK, ct, hg, hn, Z, qc, be, en, gO, bN, hq); #c1(GRIK5) c2(XP_005258878) c3(glutamate receptor ionotropic, kainate 5 isoform X1) c4(275844) c5(275845, 275846, 275847, 275848, 275849, 275850) c6( ) c7(x, il, cA, ff, IG, uJ, bS, bK, ct, hg, hn, Z, qc, be, en, gO, bN, hq); #c1(GRIK5) c2(XP_011525170) c3(glutamate receptor ionotropic, kainate 5 isoform X8) c4( ) c5(319612, 319613, 319614, 319615, 319616, 319617, 319618) c6( ) c7(x, il, cA, ff, IG, uJ, bS, bK, ct, hq, hn, Z, qc, be, en, gO, bN, hq); #c1(GRIN1) c2(NP_000823) c3(glutamate receptor ionotropic, NMDA 1 isoform GluN1-4a precursor) c4(16411) c5(16412, 16413, 16414, 16415, 16416, 16417) c6( ) c7(T, ha, v, il, MP, bFh, aT, gs, bK, Wm, an, af, Lg, cC, aW, cr, cu, FX, Hv, rR, bo, bFh, gD); #c1(GRIN1) c2(NP_001172019) c3(glutamate receptor ionotropic, NMDA 1 isoform GluN1-3b precursor) c4(72243) c5(72244, 72245, 72246, 72247, 72248, 72249) c6( ) c7(T, ha, v, il, MP, bFh, aT, gs, bK, Wm, an, af, Lg, cC, aW, cr, cu, FX, Hv, rR, bo, bFh, gD); #c1(GRIN1) c2(NP_001172020) c3(glutamate receptor ionotropic, NMDA 1 isoform GluN1-5b precursor) c4(72250) c5(72251, 72252, 72253, 72254, 72255, 72256) c6( ) c7(T, ha, v, il, MP, bFh, aT, gs, bK, Wm, an, af, Lg, cC, aW, cr, cu, FX, Hv, rR, bo, bFb, gD); #c1(GRIN1) c2(NP_015566) c3(glutamate receptor ionotropic, NMDA 1 isoform GluN1-1a precursor) c4(171898) c5(171899, 171900, 171901, 171902, 171903, 171904) c6( ) c7(T, ha, v, il, MP, bFh, aT, gs, bK, Wm, an, af, Lg, cC, aW, cr, cu, FX, Hv, rR, bo, bFb, gD); #c1(GRIN1) c2(NP_067544) c3(glutamate receptor ionotropic, NMDA 1 isoform GluN1-2a precursor) c4(208981) c5(208982, 208983, 208984, 208985, 208986, 208987) c6( ) c7(T, ha, v, il, MP, bFh, aT, gs, bK, Wm, an, af, Lg, cC, aW, cr, cu, FX, Hv, rR, bo, bFb, gD); #c1(GRIN1) c2(XP_005266128) c3(glutamate receptor ionotropic, NMDA 1 isoform X2) c4(279909, 279910) c5(279911, 279912, 279913, 279914, 279915, 279916, 279917, 279918, 279919, 279920, 279921, 279922) c6( ) c7(T, ha, v, il, MP, bFh, aT, gs, bK, Wm, an, af, Lg, cC, aW, cr, cu, FX, Hv, rR, bo, bFb, gD); #c1(GRIN1) c2(XP_005266129) c3(glutamate receptor ionotropic, NMDA 1 isoform X3) c4(279923) c5(279924, 279925, 279926, 279927, 279928, 279929) c6( ) c7(T, ha, v, il, MP, bFh, aT, gs, bK, Wm, an, af, Lg, cC, aW, cr, cu, FX, Hv, rR, bo, bFb, gD); #c1(GRIN2A) c2(NP_000824) c3(glutamate receptor ionotropic, NMDA 2A isoform 1 precursor) c4(16418) c5(16419, 16420, 16421, 16422, 16423, 16424, 16425, 16426, 16427, 16428, 16429, 16430, 16431, 16432) c6( ) c7(byR, bFk, T, aw, ha, al, lr, bO, bB, bS, ct, nA, C, bFj, il, q, hX, cF, hb, bFi, MP, nl, IG, cy, bK, aQM, he, rz, af, Lg, hZ, aWm, Y, aCt, nh, Z, akf, Hv, bN, aUn, gk, rR, ac, c, cA, bE, bFI, bFa, cB, gD); #c1(GRIN2A) c2(XP_011520763) c3(glutamate receptor ionotropic, NMDA 2A isoform X1) c4(315765, 315766) c5(315767, 315768, 315769, 315770, 315771, 315772, 315773, 315774, 315775, 315776, 315777, 315778) c6( ) c7(byR, bFk, T, aw, ha, al, lr, bO, bB, bS, ct, nA, C, bFj, il, q, hX, cF, hb, bFi, MP, nl, IG, cy, bK, aQM, he, rz, af, Lg, hZ, aWm, Y, aCt, nh, Z, akf, Hv, bN, aUn, gk, rR, ac, c, cA, bE, bFI, bFa, cB, gD); #c1(GRIN2B) c2(XP_011518932) c3(glutamate receptor ionotropic, NMDA 28 isoform X1) c4(313384) c5(313385, 313386, 313387, 313388, 313389, 313390) c6( ) c7(bM, cZ, T, iH, ha, al, lr, aA, bO, it, eX, bS, j, ct, nA, il, q, cd, kL, eW, HF, bFm, iX, MP, IG, cy, eV, bK, dd, bq, rz, an, rE, af, cC, VX, ff, HL, aF, en, sz, Z, FX, Hv, pH, gk, aqr, ac, c, rR, eM, bo, Gs, nw, yA, xh, cB, bFn, qc); #c1(GRIN2C) c2(NP_000826) c3(glutamate receptor ionotropic, NMDA 2C isoform 1 precursor) c4(16433) c5( ) c6( ) c7(bK); #c1(GRIN2C) c2(NP_001265482) c3(glutamate receptor ionotropic, NMDA 2C isoform 2 precursor) c4(98683) c5(98684, 98685, 98686, 98687, 98688, 98689) c6( ) c7(bK); #c1(GRIN2C) c2(XP_006721908) c3(glutamate receptor ionotropic, NMDA 2C isoform X4) c4( ) c5(294392, 294393, 294394, 294395, 294396, 294397) c6( ) c7(bK); #c1(GRIN2D) c2(NP_000827) c3(glutamate receptor ionotropic, NMDA 20 precursor) c4(16434) c5(16435, 16436, 16437, 16438, 16439, 16440, 16441) c6( ) c7(eW, bK, aR, HC); #c1(GRIN3A) c2(NP_597702) c3(glutamate receptor ionotropic, NMDA 3A precursor) c4(235051) c5(235052, 235053, 235054, 235055, 235056, 235057) c6( ) c7(od, Gv, ff, ht, l, oR, bK, en, lf, af, aR); #c1(GRIN3B) c2(NP_619635) c3(glutamate receptor ionotropic, NMDA 38 precursor) c4(236906) c5(236907, 236908, 236909, 236910, 236911, 236912) c6( ) c7(he, af, c); #c1(GRIN3B) c2(XP_011525971) c3(glutamate receptor ionotropic, NMDA 38 isoform X1) c4( ) c5(320353, 320354, 320355) c6( ) c7(he, af, c); #c1(GRINA) c2(NP_001009184) c3(protein lifeguard 1) c4(23531, 23532, 23533, 23534) c5(23535, 23536, 23537, 23538, 23539, 23540, 23541, 23542, 23543, 23544, 23545, 23546, 23547, 23548, 23549, 23550, 23551, 23552, 23553, 23554, 23555, 23556, 23557, 23558, 23559, 23560, 23561, 23562, 23563) c6( ) c7(rR, ha); #c1(GRIP1) c2(NP_066973) c3(glutamate receptor-interacting protein 1 isoform 1) c4(207922) c5(207923, 207924, 207925, 207926, 207927, 207928) c6( ) c7(aAW, XW, T, c, eM, aw, aT, ti, j); #c1(GRIP1) c2(XP_011536392) c3(glutamate receptor-interacting protein 1 isoform X2) c4(333693) c5( ) c6( ) c7(aAW, XW, T, c, eM, aw, aT, ti, j); #c1(GRIP1) c2(XP_011536395) c3(glutamate receptor-interacting protein 1 isoform X6) c4(333694) c5(333695, 333696, 333697, 333698, 333699, 333700, 333701, 333702, 333703, 333704, 333705, 333706) c6( ) c7(aAW, XW, T, c, eM, aw, aT, ti, j); #c1(GRK1) c2(NP_002920) c3(rhodopsin kinase) c4(133563, 133564) c5(133565, 133566, 133567, 133568, 133569, 133570, 133571, 133572, 133573, 133574, 133575, 133576) c6( ) c7(bFr, IR, bFo, Y, bgg, bFp, cd, bFg, bFs, bq, hh, nC, ayj); #c1(GRK4) c2(NP_001004056) c3(G protein-coupled receptor kinase 4 isoform beta) c4(20394) c5(20395, 20396, 20397, 20398, 20399, 20400) c6( ) c7(dD, ac, aW, vj, oe, uv, aw, aT, cz, j, K, eq, uC, ye, qa); #c1(GRK4) c2(NP_001004057) c3(G protein-coupled receptor kinase 4 isoform gamma) c4(20401) c5(20402, 20403, 20404, 20405, 20406, 20407) c6( ) c7(dD, ac, aW, vj, oe, uv, aw, aT, cz, j, K, eq, uC, ye, qa); #c1(GRK4) c2(NP_005298) c3(G protein-coupled receptor kinase 4 isoform delta) c4(154764) c5(154765, 154766, 154767, 154768, 154769, 154770) c6( ) c7(dD, ac, aW, vj, oe, uv, aw, aT, cz, j, K, eq, uC, ye, qa); #c1(GRK4) c2(NP_892027) c3(G protein-coupled receptor kinase 4 isoform alpha) c4(257660) c5(257661, 257662, 257663, 257664, 257665, 257666) c6( ) c7(dD, ac, aW, vj, oe, uv, aw, aT, cz, j, K, eq, uC, ye, qa); #c1(GRK4) c2(XP_011511759) c3(G protein-coupled receptor kinase 4 isoform X12) c4( ) c5(302456) c6( ) c7(dD, ac, aW, vj, oe, uv, aw, aT, cz, j, K, eq, uC, ye, qa); #c1(GRK5) c2(NP_005299) c3(G protein-coupled receptor kinase 5) c4(154771, 154772) c5(154773, 154774, 154775, 154776, 154777, 154778) c6( ) c7(bL, bM, T, cz, bB, j, C, cd, ad, cF, cc, an, ae, af, ak, hl, cm, W, bE, mx, ll, gZ); #c1(GRK5) c2(XP_005269764) c3(G protein-coupled receptor kinase 5 isoform X1) c4(282767) c5(282768, 282769, 282770, 282771, 282772, 282773, 282774) c6( ) c7(bL, bM, T, cz, bB, j, C, cd, ad, cF, cc, an, ae, af, ak, hl, cm, W, bE, mx, ll, gZ); #c1(GRK5) c2(XP_005269765) c3(G protein-coupled receptor kinase 5 isoform X2) c4(282775) c5(282776, 282777, 282778, 282779, 282780, 282781, 282782, 282783, 282784, 282785, 282786) c6( ) c7(bL, bM, T, cz, bB, j, C, cd, ad, cF, cc, an, ae, af, ak, hl, cm, W, bE, mx, ll, gZ); #c1(GRK6) c2(NP_001004105) c3(G protein-coupled receptor kinase 6 isoform C) c4( ) c5(20422, 20423, 20424, 20425, 20426) c6( ) c7(vj, Y, fd, an, y, cv); #c1(GRK6) c2(NP_001004106) c3(G protein-coupled receptor kinase 6 isoform A) c4(20427) c5(20428, 20429, 20430, 20431, 20432, 20433) c6( ) c7(vj, Y, fd, an, y, cv); #c1(GRK6) c2(NP_002073) c3(G protein-coupled receptor kinase 6 isoform B) c4(124263, 124264) c5(124265, 124266, 124267, 124268, 124269, 124270, 124271) c6( ) c7(vj, Y, fd, an, y, cv); #c1(GRK6) c2(XP_011532840) c3(G protein-coupled receptor kinase 6 isoform X4) c4( ) c5(328959, 328960) c6( ) c7(vj, Y, fd, an, y, cv); #c1(GRK7) c2(NP_631948) c3(G protein-coupled receptor kinase 7) c4(238409) c5(238410, 238411, 238412, 238413, 238414, 238415) c6( ) c7(bFo, bgg, bFs); #c1(GRM1) c2(NP_001264995) c3(metabotropic glutamate receptor 1 isoform beta precursor) c4(97676) c5(97677, 97678, 97679, 97680, 97681, 97682, 97683, 97684, 97685, 97686, 97687, 97688, 97689, 97690) c6( ) c7(bM, T, ha, bO, bS, fr, ct, ci, il, V, KB, aT, cB, aW, Y, eH, bFu, Ku, Z, eF, kP, ky, c, bFt, eo, aen, ao); #c1(GRM1) c2(XP_011534086) c3(metabotropic glutamate receptor 1 isoform X1) c4(330303) c5(330304, 330305, 330306, 330307, 330308, 330309, 330310, 330311, 330312, 330313) c6( ) c7(bM, T, ha, bO, bS, fr, ct, ci, il, V, KB, aT, cB, aW, Y, eH, bFu, Ku, Z, eF, kP, ky, c, bFt, eo, aen, ao); #c1(GRM2) c2(NP_000830) c3(metabotropic glutamate receptor 2 isoform a precursor) c4(16442) c5(16443, 16444, 16445, 16446, 16447, 16448) c6( ) c7(ha, bO, aj, bS, Vd, ct, il, abe, eA, J, lu, M, a aw, K, af, xa, d, TQ, gl, gu, Z, ac, c, cA, sv, bFb); #c1(GRM2) c2(XP_011531944) c3(metabotropic glutamate receptor 2 isoform X4) c4(327975) c5(327976, 327977, 327978, 327979, 327980, 327981) c6( ) c7(ha, bO, aj, bS, Vd, ct, il, abe, eA, J, lu, M, aaw, K, af, xa, d, TQ, gl, gu, Z, ac, c, cA, sv, bFb); #c1(GRM3) c2(NP_000831) c3(metabotropic glutamate receptor 3 precursor) c4(16449, 16450, 16451) c5(16452, 16453, 16454, 16455, 16456, 16457, 16458, 16459, 16460, 16461, 16462, 16463, 16464, 16465, 16466, 16467, 16468, 16469) c6( ) c7(T, iH, ha, bO, jh, mS, ti, bS, ct, il, eA, mW, bK, mY, mV, mU, Y, gl, Z, jb, mZ, FT, mX, bFf, ck, cA, sv, bFb, hh, jd, mT); #c1(GRM3) c2(XP_011514390) c3(metabotropic glutamate receptor 3 isoform X1) c4(307064, 307065, 307066) c5(307067, 307068, 307069, 307070, 307071, 307072, 307073, 307074, 307075, 307076, 307077) c6( ) c7(T, iH, ha, bO, jh, mS, ti, bS, ct, il, eA, mW, bK, mY, mV, mU, Y, gl, Z, jb, mZ, FT, mX, bFf, ck, cA, sv, bFb, hh, jd, mT); #c1(GRM3) c2(XP_011514392) c3(metabotropic glutamate receptor 3 isoform X3) c4(307078) c5(307079, 307080, 307081, 307082, 307083, 307084, 307085, 307086, 307087, 307088, 307089, 307090) c6( ) c7(T, iH, ha, bO, jh, mS, ti, bS, ct, il, eA, mW, bK, mY, mV, mU, Y, gl, Z, jb, ml, FT, mX, bFf, ck, cA, sv, bFb, hh, jd, mT); #c1(GRM4) c2(NP_000832) c3(metabntrnpic glutamate receptor 4 isoform 1 precursor) c4(16470) c5(16471, 16472, 16473, 16474, 16475, 16476, 16477, 16478, 16479, 16480) c6( ) c7(jf, Cg, iH, eF, ha, HN, HC, cD, eH, iD, bK, hg, eo, il, V, X); #c1(GRM4) c2(NP_001243738) c3(metabntrnpic glutamate receptor 4 isoform 2) c4(91610) c5(91611, 91612, 91613, 91614, 91615, 91616) c6( ) c7(jf, Cg, iH, eF, ha, HN, HC, cD, eH, iD, bK, hg, eo, il, V, X); #c1(GRM4) c2(NP_001243741) c3(metabntrnpic glutamate receptor 4 isoform 5) c4(91617, 91618, 91619) c5(91620, 91621, 91622, 91623, 91624, 91625) c6( ) c7(jf, Cg, iH, eF, ha, HN, HC, cD, eH, iD, bK, hg, eo, il, V, X); #c1(GRM4) c2(NP_001243742) c3(metabotropic glutamate receptor 4 isoform 6) c4(91626) c5(91627, 91628, 91629, 91630, 91631, 91632, 91633, 91634, 91635, 91636, 91637, 91638, 91639) c6( ) c7(jf, Cg, iH, eF, ha, HN, HC, cD, eH, iD, bK, hg, eo, il, V, X); #c1(GRM4) c2(NP_001269776) c3(metabotropic glutamate receptor 4 isoform 8) c4( ) c5(102747, 102748, 102749, 102750, 102751) c6( ) c7(jf, Cg, iH, eF, ha, HN, HC, cD, eH, iD, bK, hg, eo, il, V, X); #c1(GRM5) c2(NP_000833) c3(metabotropic glutamate receptor 5 isoform b precursor) c4(16481) c5(16482, 16483, 16484, 16485, 16486, 16487, 16488, 16489, 16490, 16491) c6( ) c7(eX, bO, ti, bS, ct, il, V, uT, eV, bK, rz, he, af, cB, ak, eH, gl, cu, Ku, as, Z, eF, cm, bN, ok, ac, c, eo, IB, xg); #c1(GRM5) c2(XP_011541096) c3(metabntrnpic glutamate receptor 5 isoform X1) c4(339600) c5(339601, 339602, 339603, 339604, 339605, 339606, 339607, 339608, 339609, 339610) c6( ) c7(eX, bO, ti, bS, ct, il, V, uT, eV, bK, rz, he, af, cB, ak, eH, gl, cu, Ku, as, Z, eF, cm, bN, ok, ac, c, eo, IB, xg); #c1(GRM5) c2(XP_011541097) c3(metabotropic glutamate receptor 5 isoform X2) c4(339611) c5(339612, 339613, 339614, 339615, 339616, 339617, 339618) c6( ) c7(eX, bO, ti, bS, ct, il, V, uT, eV, bK, rz, he, af, cB, ak, eH, gl, cu, Ku, as, Z, eF, cm, bN, ok, ac, c, eo, IB, xg); #c1(GRM6) c2(NP_000834) c3(metabotropic glutamate receptor 6 precursor) c4(16492, 16493) c5(16494, 16495, 16496, 16497, 16498, 16499, 16500, 16501, 16502, 16503, 16504, 16505, 16506, 16507, 16508, 16509) c6( ) c7(cZ, aWm, IR, VR, bFv, Be, dd, ayj, hZ); #c1(GRM7) c2(NP_000835) c3(metabotropic glutamate receptor 7 isoform a precursor) c4(16510, 16511, 16512, 16513, 16514) c5(16515, 16516, 16517, 16518, 16519, 16520, 16521, 16522, 16523, 16524, 16525, 16526) c6( ) c7(cZ, gM, Z, lu, oe, bO, vL, Nc, ww, bK, dd, oi, he, IB, fq, na, hq); #c1(GRM7) c2(NP_870989) c3(metabntrnpic glutamate receptor 7 isoform b precursor) c4(255877) c5(255878, 255879, 255880, 255881, 255882, 255883, 255884, 255885, 255886, 255887, 255888, 255889, 255890, 255891, 255892, 255893, 255894, 255895, 255896, 255897, 255898, 255899, 255900, 255901, 255902, 255903, 255904, 255905) c6( ) c7(cZ, gM, Z, lu, oe, bO, vL, Nc, ww, bK, dd, oi, he, IB, fq, na, hq); #c1(GRM8) c2(XP_006716001) c3(metabotropic glutamate receptor 8 isoform X1) c4(290007, 290008, 290009) c5( ) c6( ) c7(aWm, aap, ft, ac, dY, rz, hZ, e, ha, aw, EQ, j, eo, Z, he, V, fq, eu, bN, hq); #c1(GRM8) c2(XP_011514394) c3(metabntrnpic glutamate receptor 8 isoform X2) c4(307091, 307092) c5(307093, 307094, 307095, 307096, 307097, 307098, 307099, 307100, 307101, 307102, 307103, 307104, 307105, 307106, 307107, 307108, 307109, 307110, 307111, 307112, 307113) c6( ) c7(aWm, aap, ft, ac, dY, rz, hZ, e, ha, aw, EQ, j, eo, Z, he, V, fq, eu, bN, hq); #c1(GRM8) c2(XP_011514395) c3(metabotropic glutamate receptor 8 isoform X3) c4( ) c5(307114, 307115, 307116, 307117, 307118, 307119, 307120, 307121, 307122, 307123, 307124, 307125, 307126) c6( ) c7(aWm, aap, ft, ac, dY, rz, hZ, e, ha, aw, EQ, j, eo, Z, he, V, fq, eu, bN, hq); #c1(GRN) c2(XP_005257310) c3(granulins isoform X1) c4(275021, 275022, 275023, 275024) c5(275025, 275026, 275027, 275028, 275029, 275030, 275031, 275032, 275033, 275034, 275035, 275036, 275037, 275038, 275039, 275040, 275041, 275042, 275043, 275044) c6( ) c7(T, ea, fd, Vd, ci, GK, xE, pX, K, H, eL, aW, alR, kt, cm, bw, bb, iA, bxS, U, cj, mk, m, act, hh, gD, bFB, dD, OI, qN, ai, jz, Do, dL, aq, bFA, Lq, anx, it, B, L, bL, bFw, v, V, bFz, amg, hW, hh, WY, HC, aT, rO, an, ae, af, ak, azU, iU, Y, aaE, en, t, xw, rY, dS, ahN, c, bFx, bt, VB, hl, id, pY, jh, eq, ad, ct, sO, ds, KO, d, qt, ff, dq, iR, bFy, eK, es, dJ, aaG, ei, xg); #c1(GRP) c2(NP_001012530) c3(gastrin-releasing peptide isoform 2 preproprotein) c4(25066) c5(25067, 25068, 25069, 25070, 25071, 25072) c6( ) c7(gh, G, T, bM, jp, ht, aA, bB, it, hy, ww, fr, ci, C, q, aR, ad, eA, eW, av, ft, zw, aE, Db, gH, nv, pX, aT, Ze, K, hu, ae, dx, YI, gj, d, tb, JI, aW, oV, ev, fJ, AQ, YC, r, ff, kp, aF, en, cl, g, t, cm, bz, iK, asE, es, eM, iA, dB, bE, AR, dJ, gX, hL, hR, m, y, bFC, X); #c1(GRP) c2(NP_001012531) c3(gastrin-releasing peptide isoform 3 preproprotein) c4(25073) c5(25074, 25075, 25076, 25077, 25078, 25079) c6( ) c7(gh, G, T, bM, jp, ht, aA, bB, it, hy, ww, fr, ci, C, q, aR, ad, eA, eW, av, ft, zw, aE, Db, gH, nv, pX, aT, Ze, K, hu, ae, dx, YI, gj, d, tb, JI, aW, oV, ev, fJ, AQ, YC, r, ff, kp, aF, en, cl, g, t, cm, bz, iK, asE, es, eM, iA, dB, bE, AR, dJ, gX, hL, hR, m, y, bFC, X); #c1(GRP) c2(NP_002082) c3(gastrin-releasing peptide isoform 1 preproprotein) c4(124329) c5(124330, 124331, 124332, 124333, 124334, 124335) c6( ) c7(gh, G, T, bM, jp, ht, aA, bB, it, hy, ww, fr, ci, C, q, aR, ad, eA, eW, av, ft, zw, aE, Db, gH, nv, pX, aT, Ze, K, hu, ae, dx, YI, gj, d, tb, JI, aW, oV, ev, fJ, AQ, YC, r, ff, kp, aF, en, cl, g, t, cm, bz, iK, asE, es, eM, iA, dB, bE, AR, dJ, gX, hL, hR, m, y, bFC, X); #c1(GRPEL1) c2(NP_079472) c3(grpE protein homolog 1, mitochondrial precursor) c4(218223, 218224) c5(218225, 218226, 218227, 218228, 218229, 218230, 218231, 218232, 218233, 218234, 218235, 218236) c6( ) c7(h, Vp, Ea); #c1(GRPR) c2(NP_005305) c3(gastrin-releasing peptide receptor) c4(154835, 154836) c5(154837, 154838, 154839, 154840, 154841, 154842, 154843, 154844, 154845, 154846, 154847, 154848) c6( ) c7(T, aA, bB, ww, fr, ci, C, q, aR, ad, av, ft, ot, hw, ta, YB, dL, rz, ae, af, jf, tb, aW, ev, r, aF, t, cm, bz, iK, bN, es, eM, bE, AR, gX, Yz, m, X); #c1(GRSF1) c2(NP_001091947) c3(G-rich sequence factor 1 isoform 2) c4( ) c5(38796, 38797, 38798, 38799, 38800, 38801, 38802, 38803) c6( ) c7(ds); #c1(GRSF1) c2(NP_002083) c3(G-rich sequence factor 1 isoform 1) c4(124336, 124337) c5(124338, 124339, 124340, 124341, 124342, 124343, 124344, 124345, 124346, 124347, 124348, 124349, 124350, 124351, 124352, 124353, 124354, 124355) c6( ) c7(ds); #c1(GRSF1) c2(XP_005265738) c3(G-rich sequence factor 1 isoform X2) c4(279687, 279688, 279689, 279690) c5(279691, 279692, 279693, 279694, 279695, 279696, 279697, 279698, 279699, 279700, 279701, 279702, 279703, 279704) c6( ) c7(ds); #c1(GRXCR1) c2(NP_001073945) c3(glutaredoxin domain-containing cysteine-rich protein 1) c4(36642) c5(36643, 36644, 36645, 36646, 36647, 36648) c6( ) c7(bFD, Bh, aQi); #c1(GRXCR1) c2(XP_011511993) c3(glutaredoxin domain-containing cysteine-rich protein 1 isoform X1) c4( ) c5(302671) c6( ) c7(bFD, Bh, aQi); #c1(GRXCR2) c2(XP_011535976) c3(glutaredoxin domain-containing cysteine-rich protein 2 isoform X1) c4(333248) c5(333249, 333250, 333251, 333252, 333253, 333254) c6( ) c7(bFE); #c1(GSC) c2(NP_776248) c3(homeobox protein goosecoid) c4(251038) c5(251039, 251040, 251041, 251042, 251043, 251044, 251045, 251046, 251047, 251048, 251049) c6( ) c7(jf, T, A, d, iR, Kk, Az, ajn, jh, n, aNL, aq, K, bFG, eA, bFF, B); #c1(GSC2) c2(NP_005306) c3(homeobox protein goosecoid-2) c4(154849) c5(154850, 154851, 154852, 154853, 154854, 154855, 154856, 154857, 154858, 154859, 154860) c6(154861, 154862) c7(he, RX, xt, agd); #c1(GSDMA) c2(XP_006721895) c3(gasdermin-A isoform X1) c4(294385) c5(294386, 294387, 294388, 294389, 294390, 294391) c6( ) c7(bM, T, aF, A, aA); #c1(GSDMB) c2(XP_011523318) c3(gasdermin-B isoform X3) c4(317818, 317819) c5(317820, 317821, 317822, 317823, 317824, 317825, 317826, 317827, 317828, 317829, 317830, 317831) c6( ) c7(bM, T, iV, A, sp, mQ, aA, fe, aq, v, pM, y, cM, rk, JB); #c1(GSDMB) c2(XP_011523319) c3(gasdermin-B isoform X6) c4(317832) c5(317833, 317834, 317835, 317836, 317837, 317838, 317839, 317840, 317841, 317842) c6( ) c7(bM, T, iV, A, sp, mQ, aA, fe, aq, v, pM, y, cM, rk, JB); #c1(GSDMB) c2(XP_011523320) c3(gasdermin-B isoform X4) c4(317843) c5(317844, 317845, 317846, 317847, 317848, 317849) c6( ) c7(bM, T, iV, A, sp, mQ, aA, fe, aq, v, pM, y, cM, rk, JB); #c1(GSDMB) c2(XP_011523321) c3(gasdermin-B isoform X1) c4(317850) c5(317851, 317852, 317853, 317854, 317855, 317856) c6( ) c7(bM, T, iV, A, sp, mQ, aA, fe, aq, v, pM, y, cM, rk, JB); #c1(GSDMB) c2(XP_011523322) c3(gasdermin-B isoform X2) c4(317857) c5(317858, 317859, 317860, 317861, 317862, 317863) c6( ) c7(bM, T, iV, A, sp, mQ, aA, fe, aq, v, pM, y, cM, rk, JB); #c1(GSDMC) c2(NP_113603) c3(gasdermin-C) c4(221667) c5(221668, 221669, 221670, 221671, 221672, 221673) c6( ) c7(cT, eA, aA); #c1(GSDMD) c2(NP_079012) c3(gasdermin-D) c4(216553, 216554, 216555, 216556, 216557) c5(216558, 216559, 216560, 216561, 216562, 216563, 216564, 216565, 216566, 216567, 216568, 216569, 216570, 216571, 216572, 216573, 216574, 216575, 216576, 216577, 216578, 216579, 216580, 216581, 216582, 216583, 216584, 216585, 216586, 216587, 216588, 216589, 216590, 216591) c6( ) c7(aA); #c1(GSE1) c2(NP_001127945) c3(genetic suppressor element 1 isoform 2) c4( ) c5(49526, 49527, 49528, 49529, 49530, 49531, 49532, 49533, 49534, 49535, 49536, 49537, 49538) c6( ) c7(q, r); #c1(GSE1) c2(NP_055430) c3(genetic suppressor element 1 isoform 1) c4(181098) c5( ) c6( ) c7(q, r); #c1(GSE1) c2(XP_005255920) c3(genetic suppressor element 1 isoform X6) c4(273901) c5( ) c6( ) c7(q, r); #c1(GSG1L) c2(NP_001103233) c3(germ cell-specific gene 1-like protein isoform 1 precursor) c4(41858, 41859, 41860) c5(41861, 41862, 41863, 41864, 41865, 41866, 41867, 41868, 41869, 41870, 41871, 41872, 41873) c6( ) c7(af); #c1(GSG1L) c2(NP_653276) c3(germ cell-specific gene 1-like protein isoform 2) c4( ) c5(239478, 239479, 239480, 239481, 239482) c6( ) c7(af); #c1(GSG1L) c2(XP_011544051) c3(germ cell-specific gene 1-like protein isoform X1) c4(343243) c5(343244, 343245, 343246, 343247, 343248, 343249) c6( ) c7(af); #c1(GSK3A) c2(NP_063937) c3(glycogen synthase kinase-3 alpha) c4(202226, 202227) c5(202228, 202229, 202230, 202231, 202232, 202233, 202234, 202235, 202236, 202237, 202238, 202239, 202240, 202241, 202242, 202243) c6( ) c7(aC, aE, dq, aq, bK, ct, j, fr, ae, B, ad); #c1(GSK3B) c2(NP_001139628) c3(glycogen synthase kinase-3 beta isoform 2) c4(59571) c5(59572, 59573, 59574, 59575, 59576, 59577) c6( ) c7(T, aC, ea, bO, fd, bB, ci, aE, K, oi, ye, aW, g, eF, cm, mZ, bb, eM, U, dD, aw, aj, fr, ct, cd, Hx, zw, h, dL, bl, mY, mV, mU, aq, mX, cv, YE, cA, vL, at, E, B, mT, aA, mS, pd, q, J, eA, mj, aT, bK, jj, an, ae, af, jf, kl, s, iU, Y, ev, fO, r, lo, t, xw, ck, ac, gX, bt, aZ, atS, bS, eq, iJ, ad, hX, mW, sO, d, eH, dq, aF, Z, bz, LB, bF, D, bE, ZW, X); #c1(GSK3B) c2(NP_002084) c3(glycogen synthase kinase-3 beta isoform 1) c4(124356) c5(124357, 124358, 124359, 124360, 124361, 124362) c6( ) c7(T, aC, ea, bO, fd, bB, ci, aE, K, oi, ye, aW, g, eF, cm, mZ, bb, eM, U, dD, aw, aj, fr, ct, cd, Hx, zw, h, dL, bl, mY, mV, mU, aq, mX, cv, YE, cA, vL, at, E, B, mT, aA, mS, pd, q, J, eA, mj, aT, bK, jj, an, ae, af, jf, kl, s, iU, Y, ev, fO, r, lo, t, xw, ck, ac, gX, bt, aZ, atS, bS, eq, iJ, ad, hX, mW, sO, d, eH, dq, aF, Z, bz, LB, bF, D, bE, ZW, X); #c1(GSK3B) c2(XP_006713674) c3(glycogen synthase kinase-3 beta isoform X2) c4(287272) c5(287273, 287274, 287275, 287276, 287277, 287278) c6( ) c7(T, aC, ea, bO, fd, bB, ci, aE, K, oi, ye, aW, q, eF, cm, ml, bb, eM, U, dD, aw, aj, fr, ct, cd, Hx, zw, h, dL, bl, mY, mV, mU, aq, mX, cv, YE, cA, vL, at, E, B, mT, aA, mS, pd, q, J, eA, mj, aT, bK, jj, an, ae, af, jf, kl, s, iU, Y, ev, fO, r, lo, t, xw, ck, ac, gX, bt, aZ, atS, bS, eq, iJ, ad, hX, mW, sO, d, eH, dq, aF, Z, bz, LB, bF, D, bE, ZW, X); #c1(GSN) c2(NP_000168) c3(gelsolin isoform a precursor) c4(3755, 3756, 3757, 3758) c5(3759, 3760, 3761, 3762, 3763, 3764, 3765, 3766) c6( ) c7(bM, T, aC, aXW, IP, if, l, bB, aKs, ci, Qp, wM, aE, aU, K, hu, H, eL, aa, aW, g, as, eM, U, m, R, pw, hh, dt, aw, ht, qN, zP, pn, cd, aOu, aMV, dL, Wm, A, fQ, aay, boD, GU, eR, asB, C, bFJ, q, eA, bFH, aT, ae, bA, jf, s, Y, la, r, en, f, nC, ck, aKp, WP, dy, gT, bt, ob, aal, ah, fu, ad, av, ib, Dg, bFI, acQ, d, ff, YZ, bz, bF, bE, kq, dX, y, iu); #c1(GSN) c2(NP_001121135) c3(gelsolin isoform f) c4( ) c5(45267) c6( ) c7(bM, T, aC, aXW, IP, if, l, bB, aKs, ci, Qp, wM, aE, aU, K, hu, H, eL, aa, aW, g, as, eM, U, m, R, pw, hh, dt, aw, ht, qN, zP, pn, cd, aOu, aMV, dL, Wm, A, fQ, aay, boD, GU, eR, asB, C, bFJ, q, eA, bFH, aT, ae, bA, jf, s, Y, la, r, en, f, nC, ck, aKp, WP, dy, gT, bt, ob, aal, ah, fu, ad, av, ib, Dq, bFI, acQ, d, ff, YZ, bz, bF, bE, kq, dX, y, iu); #c1(GSN) c2(NP_001244959) c3(gelsolin isoform e) c4(92451) c5(92452, 92453, 92454, 92455, 92456, 92457, 92458, 92459, 92460) c6( ) c7(bM, T, aC, aXW, IP, if, l, bB, aKs, ci, Qp, wM, aE, aU, K, hu, H, eL, aa, aW, g, as, eM, U, m, R, pw, hh, dt, aw, ht, qN, zP, pn, cd, aOu, aMV, dL, Wm, A, fQ, aay, boD, GU, eR, asB, C, bFJ, q, eA, bFH, aT, ae, bA, jf, s, Y, la, r, en, f, nC, ck, aKp, WP, dy, gT, bt, ob, aal, ah, fu, ad, av, ib, Dg, bFI, acQ, d, ff, YZ, bz, bF, bE, kq, dX, y, iu); #c1(GSN) c2(XP_005251997) c3(gelsolin isoform XG) c4( ) c5(271418, 271419) c6( ) c7(bM, T, aC, aXW, IP, if, l, bB, aKs, ci, Qp, wM, aE, aU, K, hu, H, eL, aa, aW, g, as, eM, U, m, R, pw, hh, dt, aw, ht, qN, zP, pn, cd, aOu, aMV, dL, Wm, A, fQ, aay, boD, GU, eR, asB, C, bFJ, q, eA, bFH, aT, ae, bA, jf, s, Y, la, r, en, f, nC, ck, aKp, WP, dy, gT, bt, ob, aal, ah, fu, ad, av, ib, Dq, bFI, acQ, d, ff, YZ, bz, bF, bE, kq, dX, y, iu); #c1(GSN) c2(XP_005252002) c3(gelsolin isoform X1) c4( ) c5(271420, 271421, 271422, 271423, 271424, 271425, 271426, 271427, 271428, 271429, 271430, 271431, 271432, 271433, 271434, 271435, 271436, 271437, 271438, 271439, 271440, 271441, 271442, 271443, 271444, 271445, 271446, 271447, 271448, 271449, 271450, 271451, 271452, 271453, 271454, 271455, 271456, 271457, 271458, 271459, 271460, 271461, 271462, 271463, 271464, 271465, 271466, 271467) c6( ) c7(bM, T, aC, aXW, IP, if, l, bB, aKs, ci, Qp, wM, aE, aU, K, hu, H, eL, aa, aW, g, as, eM, U, m, R, pw, hh, dt, aw, ht, qN, zP, pn, cd, aOu, aMV, dL, Wm, A, fQ, aay, boD, GU, eR, asB, C, bFJ, q, eA, bFH, aT, ae, bA, jf, s, Y, la, r, en, f, nC, ck, aKp, WP, dy, gT, bt, ob, aal, ah, fu, ad, av, ib, Dq, bFI, acQ, d, ff, YZ, bz, bF, bE, kq, dX, y, iu); #c1(GSN) c2(XP_006717138) c3(gelsolin isoform X3) c4(290761) c5( ) c6( ) c7(bM, T, aC, aXW, IP, if, l, bB, aKs, ci, Qp, wM, aE, aU, K, hu, H, eL, aa, aW, g, as, eM, U, m, R, pw, hh, dt, aw, ht, qN, zP, pn, cd, aOu, aMV, dL, Wm, A, fQ, aay, boD, GU, eR, asB, C, bFJ, q, eA, bFH, aT, ae, bA, jf, s, Y, la, r, en, f, nC, ck, aKp, WP, dy, gT, bt, ob, aal, ah, fu, ad, av, ib, Dq, bFI, acQ, d, ff, YZ, bz, bF, bE, kq, dX, y, iu); #c1(GSN) c2(XP_006717142) c3(gelsolin isoform X2) c4(290762) c5(290763, 290764, 290765, 290766, 290767, 290768, 290769, 290770, 290771, 290772, 290773, 290774, 290775, 290776, 290777, 290778, 290779, 290780) c6( ) c7(bM, T, aC, aXW, IP, if, l, bB, aKs, ci, Qp, wM, aE, aU, K, hu, H, eL, aa, aW, g, as, eM, U, m, R, pw, hh, dt, aw, ht, qN, zP, pn, cd, aOu, aMV, dL, Wm, A, fQ, aay, boD, GU, eR, asB, C, bFJ, q, eA, bFH, aT, ae, bA, jf, s, Y, la, r, en, f, nC, ck, aKp, WP, dy, gT, bt, ob, aal, ah, fu, ad, av, ib, Dq, bFI, acQ, d, ff, YZ, bz, bF, bE, kq, dX, y, iu); #c1(GSPT1) c2(NP_001123478) c3(eukaryotic peptide chain release factor GTP-binding subunit ERF3A isoform 2) c4(47135) c5(47136, 47137, 47138, 47139, 47140, 47141, 47142) c6( ) c7(bM, T, cd, iU, Qu, aW, hl, aT, aA, aj, aF, ci, hE, bt, bz); #c1(GSPT1) c2(NP_001123479) c3(eukaryetic peptide chain release factor GTP-binding subunit ERF3A isoform 3) c4( ) c5(47143, 47144, 47145, 47146, 47147) c6( ) c7(bM, T, cd, iU, Qu, aW, hl, aT, aA, aj, aF, ci, hE, bt, bz); #c1(GSPT1) c2(NP_002085) c3(eukaryetic peptide chain release factor GTP-binding subunit ERF3A isoform 1) c4(124363, 124364) c5(124365, 124366, 124367, 124368, 124369, 124370, 124371) c6( ) c7(bM, T, cd, iU, Qu, aW, hl, aT, aA, aj, aF, ci, hE, bt, bz); #c1(GSPT2) c2(NP_060564) c3(eukaryetic peptide chain release factor GTP-binding subunit ERF3B) c4(196593, 196594) c5(196595, 196596, 196597, 196598, 196599, 196600, 196601, 196602, 196603, 196604, 196605, 196606) c6( ) c7(ad); #c1(GSR) c2(NP_000628) c3(glutathione reductase, mitochondrial isoform 1 precursor) c4(14076, 14077) c5(14078, 14079, 14080, 14081, 14082, 14083, 14084, 14085, 14086, 14087, 14088, 14089) c6( ) c7(dD, ea, ol, oR, BH, v, j, Vd, eY, aET, eq, mj, F, ZX, eW, aT, dV, K, bq, af, bA, jf, aW, ff, S, en, g, cm, bz, ac, c, bo, hr, U, cj, E, eh, mg, at, pw, eq, aAN); #c1(GSR) c2(NP_001182031) c3(glutathione reductase, mitochondrial isoform 2 precursor) c4(74493) c5(74494, 74495, 74496, 74497, 74498, 74499) c6( ) c7(dD, ea, ol, oR, BH, v, j, Vd, eY, aET, eq, mj, F, ZX, oW, aT, dV, K, bq, af, bA, jf, aW, ff, S, en, g, cm, bz, ac, c, bo, hr, U, cj, E, eh, mg, at, pw, eg, aAN); #c1(GSR) c2(NP_001182032) c3(glutathiene reductase, mitochondrial isoform 3 precursor) c4(74500) c5(74501, 74502, 74503, 74504, 74505, 74506) c6( ) c7(dD, ea, ol, oR, BH, v, j, Vd, eY, aET, eq, mj, F, ZX, oW, aT, dV, K, bq, af, bA, jf, aW, ff, S, en, g, cm, bz, ac, c, bo, hr, U, cj, E, eh, mg, at, pw, eg, aAN); #c1(GSR) c2(NP_001182033) c3(glutathiene reductase, mitochondrial isoform 4 precursor) c4(74507) c5(74508, 74509, 74510, 74511, 74512, 74513) c6( ) c7(dD, ea, ol, oR, BH, v, j, Vd, eY, aET, eq, mj, F, ZX, eW, aT, dV, K, bq, af, bA, jf, aW, ff, S, en, g, cm, bz, ac, c, bo, hr, U, cj, E, eh, mg, at, pw, eg, aAN); #c1(GSS) c2(XP_011527098) c3(glutathiene synthetase isoform X1) c4(321569, 321570, 321571) c5(321572, 321573, 321574, 321575, 321576, 321577, 321578, 321579, 321580, 321581, 321582, 321583, 321584, 321585, 321586, 321587, 321588, 321589) c6( ) c7(dD, nx, bFL, bBX, bB, eq, ci, zP, av, aaF, h, bxi, K, avn, zQ, bFK, S, g, zz, acp, dr, bF, axS, bE, U, at); #c1(GSTA1) c2(NP_665683) c3(glutathione S-transferase A1) c4(241652) c5(241653, 241654, 241655, 241656, 241657, 241658) c6( ) c7(bL, bM, T, eX, aA, cz, aj, j, q, J, ad, av, aT, eV, dL, K, ae, xa, eL, s, hG, aW, ev, ff, hl, r, hQ, aq, en, aot, g, t, aaD, cM, bz, bw, bF, gw, Lb, Yz, B); #c1(GSTA2) c2(XP_011512834) c3(glutathione S-transferase A2 isoform X1) c4(303880) c5(303881, 303882, 303883, 303884, 303885, 303886) c6( ) c7(Gl, ny, ib, aW, ht, cj, fQ, cy, aT, r, hy, K, Gu, Gw, bz, ad); #c1(GSTA4) c2(XP_005249092) c3(glutathione S-transferase A4 isoform XI) c4(268985, 268986, 268987) c5(268988, 268989, 268990, 268991, 268992, 268993, 268994, 268995, 268996, 268997) c6( ) c7(bL, bM, aC, dD, ea, aj, v, eq, ci, Qo, J, av, ib, afQ, dL, K, an, bq, af, ny, ff, r, aq, en, bz, eM, hk, at, B); #c1(GSTA4) c2(XP_011512837) c3(glutathione S-transferase A4 isoform X2) c4( ) c5(303887, 303888, 303889, 303890, 303891, 303892, 303893, 303894, 303895, 303896, 303897, 303898, 303899, 303900, 303901, 303902) c6( ) c7(bL, bM, aC, dD, ea, aj, v, eq, ci, Qo, J, av, ib, afQ, dL, K, an, bq, af, ny, ff, r, aq, en, bz, eM, hk, at, B); #c1(GSTA5) c2(NP_714543) c3(glutathione S-transferase A5) c4(246554) c5(246555, 246556, 246557, 246558, 246559, 246560, 246561, 246562, 246563, 246564) c6( ) c7(cz); #c1(GSTCD) c2(NP_001026890) c3(glutathione S-transferase C-terminal domain-containing protein isoform 1) c4(29861, 29862, 29863, 29864) c5(29865, 29866, 29867, 29868, 29869, 29870, 29871, 29872, 29873, 29874, 29875, 29876, 29877, 29878, 29879, 29880, 29881, 29882, 29883, 29884, 29885, 29886, 29887, 29888, 29889, 29890) c6( ) c7(cz, at, Dp, ad, hm, aa); #c1(GSTCD) c2(NP_079027) c3(glutathione S-transferase C-terminal domain-containing protein isoform 2) c4(216646) c5(216647, 216648, 216649, 216650, 216651, 216652, 216653, 216654, 216655, 216656, 216657, 216658) c6( ) c7(cz, at, Dp, ad, hm, aa); #c1(GSTK1) c2(NP_001137151) c3(glutathione S-transferase kappa 1 isoform b) c4(55032) c5(55033, 55034, 55035, 55036, 55037, 55038) c6( ) c7(bM, T, pf, ea, if, e, al, fd, bB, qj, ci, VV, x, aE, u, dV, K, bU, hu, hH, dF, eL, azh, eG, dH, Ow, aW, JI, iE, g, as, eE, eF, cm, bw, yd, xK, eM, nB, cj, dW, aZo, k, m, cE, dD, gU, aWG, ht, aw, n, aj, fr, qN, pM, ai, hr, b, ft, aMV, h, eV, hn, dL, vd, hB, he, dx, A, asp, sp, CM, AQ, bed, ge, fe, aq, bFN, pm, dw, kk, Ld, iO, W, bP, asl, dB, uw, at, bFO, it, B, ayV, bL, eR, aZy, Dh, yk, jx, eX, aA, cz, fF, v, j, Qo, q, J, eA, hb, aT, ae, af, bA, qw, avV, s, iU, Y, Lf, afS, r, lo, en, bu, t, iK, pb, zJ, ck, sS, nM, ac, c, ig, Nk, gX, wR, ht, rA, ao, hS, gx, id, akd, HM, jh, bs, lD, oZ, oH, Gn, eq, hF, ad, hX, dP, av, l, hd, oW, aNp, ji, d, IU, bFM, ff, eH, aZw, cr, eZ, Ej, aF, xH, S, bFP, iV, bz, Ga, qa, eK, es, bE, gZ, i, hE, iu, y, pC); #c1(GSTK1) c2(NP_001137152) c3(glutathione S-transferase kappa 1 isoform c) c4(55039) c5(55040, 55041, 55042, 55043, 55044, 55045) c6( ) c7(bM, T, pf, ea, if, e, al, fd, bB, qj, ci, VV, x, aE, u, dV, K, bU, hu, hH, dF, eL, azh, eG, dH, Ow, aW, JI, iE, g, as, eE, eF, cm, bw, yd, xK, eM, nB, cj, dW, aZo, k, m, cE, dD, gU, aWG, ht, aw, n, aj, fr, qN, pM, ai, br, b, ft, aMV, h, eV, hn, dL, vd, hB, he, dx, A, asp, sp, CM, AQ, bed, ge, fe, aq, bFN, pm, dw, kk, Ld, iO, W, bP, asl, dB, uw, at, bFO, it, B, ayV, bL, eR, aZy, Dh, yk, jx, eX, aA, cz, fF, v, j, Qo, q, J, eA, hb, aT, ae, af, bA, qw, avV, s, iO, Y, Lf, afS, r, lo, en, bu, t, iK, pb, zJ, ck, sS, nM, ac, c, ig, Nk, gX, wR, ht, rA, an, hS, gx, id, akd, HM, jh, bs, lD, al, oH, Gn, eq, hF, ad, hX, dP, av, l, hd, oW, aNp, ji, d, IU, bFM, ff, eH, aZw, cr, al, Ej, aF, xH, S, bFP, iV, bz, Ga, qa, eK, es, bE, gZ, i, hE, iu, y, pC); #c1(GSTK1) c2(NP_001137153) c3(glutathione S-transferase kappa 1 isoform d) c4(55046) c5(55047, 55048, 55049, 55050, 55051, 55052) c6( ) c7(bM, T, pf, ea, if, e, al, fd, bB, qj, ci, VV, x, aE, u, dV, K, bU, hu, hH, dF, eL, azh, eG, dH, Ow, aW, JI, iE, g, as, eE, eF, cm, bw, yd, xK, eM, nB, cj, dW, aZo, k, m, cE, dD, gU, aWG, ht, aw, n, aj, fr, qN, pM, ai, br, b, ft, aMV, h, eV, hn, dL, vd, hB, he, dx, A, asp, sp, CM, AQ, bed, ge, fe, aq, bFN, pm, dw, kk, Ld, iO, W, bP, asl, dB, uw, at, bFO, it, B, ayV, bL, eR, aZy, Dh, yk, jx, eX, aA, cz, fF, v, j, Qo, q, J, eA, hb, aT, ae, af, bA, qw, avV, s, iU, Y, Lf, afS, r, lo, en, bu, t, iK, pb, zJ, ck, sS, nM, ac, c, ig, Nk, gX, wR, ht, rA, ao, hS, gx, id, akd, HM, jh, bs, lD, al, oH, Gn, eq, hF, ad, hX, dP, av, l, hd, oW, aNp, ji, d, IU, bFM, ff, eH, aZw, cr, al, Ej, aF, xH, S, bFP, iV, bz, Ga, qa, eK, es, bE, gZ, i, hE, iu, y, pC); #c1(GSTK1) c2(NP_057001) c3(glutathione S-transferase kappa 1 isoform a) c4(188409, 188410) c5(188411, 188412, 188413, 188414, 188415, 188416, 188417, 188418, 188419, 188420, 188421, 188422) c6( ) c7(bM, T, pf, ea, if, e, al, fd, bB, qj, ci, VV, x, aE, u, dV, K, bU, hu, hH, dF, eL, azh, eG, dH, Ow, aW, JI, iE, g, as, eE, eF, cm, bw, yd, xK, eM, nB, cj, dW, aZo, k, m, cE, dD, gU, aWG, ht, aw, n, aj, fr, qN, pM, ai, br, b, ft, aMV, h, eV, hn, dL, vd, hB, he, dx, A, asp, sp, CM, AQ, bed, ge, fe, aq, bFN, pm, dw, kk, Ld, iO, W, bP, asl, dB, uw, at, bFO, it, B, ayV, bL, eR, aZy, Dh, yk, jx, eX, aA, cz, fF, v, j, Qo, q, J, eA, hb, aT, ae, af, bA, qw, avV, s, iU, Y, Lf, afS, r, lo, en, bu, t, iK, pb, zJ, ck, sS, nM, ac, c, ig, Nk, gX, wR, bt, rA, ao, hS, gx, id, akd, HM, jh, bs, lD, oZ, oH, Gn, eq, hF, ad, hX, dP, av, l, hd, oW, aNp, ji, d, IU, bFM, ff, eH, aZw, cr, eZ, Ej, aF, xH, S, bFP, iV, bz, Ga, qa, eK, es, bE, gZ, i, hE, iu, y, pC); #c1(GSTM3) c2(XP_011539598) c3(glutathione S-transferase Mu 3 isoform X1) c4( ) c5(337824) c6( ) c7(Gl, G, FW, atT, T, dD, bM, id, if, aWG, ht, iW, aA, cz, hy, Gn, j, eq, Qo, qN, fw, q, ad, eA, ip, av, co, ib, afQ, aT, io, Gw, dL, K, hu, hB, an, ae, af, bA, ny, B, BN, aW, Y, ff, mQ, r, GA, aq, Ej, en, g, dw, t, as, bz, bmH, eF, es, fT, sS, dB, hk, Gs, cj, NI, at, Gu, oQ, bD, rA, ne, ao); #c1(GSTO1) c2(NP_001177931) c3(glutathione S-transferase omega-1 isoform 2) c4(73194, 73195) c5(73196, 73197, 73198, 73199, 73200, 73201, 73202, 73203, 73204, 73205, 73206, 73207) c6( ) c7(bM, T, dD, fM, id, AS, ea, e, eq, ci, ad, hX, Vp, hd, jz, dY, ec, lg, Db, Bj, aT, dL, K, IQ, hu, an, eL, xa, af, eu, aa, zQ, je, aW, LZ, r, aq, gW, wA, cM, ck, es, rR, iM, ac, anT, c, nB, U, Be, at, vn, cS, k, ei, NB, Pk, it, B, us); #c1(GSTO1) c2(NP_001177932) c3(glutathione S-transferase omega-1 isoform 3) c4( ) c5(73208, 73209, 73210, 73211, 73212, 73213, 73214, 73215, 73216, 73217) c6( ) c7(bM, T, dD, fM, id, AS, ea, e, eq, ci, ad, hX, Vp, hd, jz, dY, ec, lg, Db, Bj, aT, dL, K, IQ, hu, an, eL, xa, af, eu, aa, zQ, je, aW, LZ, r, aq, gW, wA, cM, ck, es, rR, iM, ac, anT, c, nB, U, Be, at, vn, cS, k, ei, NB, Pk, it, B, us); #c1(GSTO1) c2(NP_004823) c3(glutathione S-transferase omega-1 isoform 1) c4(150068, 150069, 150070) c5(150071, 150072, 150073, 150074, 150075, 150076, 150077, 150078) c6( ) c7(bM, T, dD, fM, id, AS, ea, e, eq, ci, ad, hX, Vp, hd, jz, dY, ec, lg, Db, Bj, aT, dL, K, IQ, hu, an, eL, xa, af, eu, aa, zQ, je, aW, LZ, r, aq, gW, wA, cM, ck, es, rR, iM, ac, anT, c, nB, U, Be, at, vn, cS, k, ei, NB, Pk, it, B, us); #c1(GSTO2) c2(NP_001177942) c3(glutathione S-transferase omega-2 isoform 2) c4(73218) c5(73219, 73220, 73221, 73222, 73223, 73224) c6( ) c7(bM, T, id, e, aA, ci, Qo, aT, dL, K, IQ, an, eL, af, zQ, aW, r, aq, gW, t, es, rR, c, at, cS, m, k, NB, Pk, B); #c1(GSTO2) c2(NP_001177943) c3(glutathione S-transferase omega-2 isoform 3) c4( ) c5(73225, 73226, 73227, 73228, 73229) c6( ) c7(bM, T, id, e, aA, ci, Qo, aT, dL, K, IQ, an, eL, af, zQ, aW, r, aq, gW, t, es, rR, c, at, cS, m, k, NB, Pk, B); #c1(GSTO2) c2(XP_011537572) c3(glutathione S-transferase omega-2 isoform X1) c4(335159, 335160) c5(335161, 335162, 335163, 335164, 335165, 335166, 335167, 335168, 335169, 335170, 335171) c6( ) c7(bM, T, id, e, aA, ci, Qo, aT, dL, K, IQ, an, eL, af, zQ, aW, r, aq, gW, t, es, rR, c, at, cS, m, k, NB, Pk, B); #c1(GSTO2) c2(XP_011537574) c3(glutathione S-transferase omega-2 isoform X3) c4(335172) c5(335173, 335174, 335175, 335176, 335177, 335178) c6( ) c7(bM, T, id, e, aA, ci, Qo, aT, dL, K, IQ, an, eL, af, zQ, aW, r, aq, gW, t, es, rR, c, at, cS, m, k, NB, Pk, B); #c1(GSTO2) c2(XP_011537575) c3(glutathione S-transferase omega-2 isoform X4) c4(335179) c5(335180, 335181, 335182, 335183, 335184, 335185) c6( ) c7(bM, T, id, e, aA, ci, Qo, aT, dL, K, IQ, an, eL, af, zQ, aW, r, aq, gW, t, es, rR, c, at, cS, m, k, NB, Pk, B); #c1(GSTP1) c2(NP_000843) c3(glutathione S-transferase P) c4(16527) c5(16528, 16529, 16530, 16531, 16532, 16533) c6( ) c7(bM, G, T, aC, fR, pf, atj, if, al, hE, fd, bB, cL, qj, ci, Jx, fw, sD, VV, aR, x, aEQ, Na, Gt, dY, aE, fS, Qk, dV, K, hu, dF, xa, bc, hm, eL, li, ye, zQ, dH, iE, aW, Ls, az, hl, mQ, LZ, kt, iG, fc, aB, g, as, eE, eF, uC, cm, bw, y, fT, xK, eM, nB, ii, nF, Jp, iA, iT, cj, uo, sv, bFS, dW, k, m, eg, cE, iu, FW, gU, dD, sQ, OI, aWG, ht, NT, qy, aw, n, BH, aj, oY, fr, qN, pM, rP, ai, awq, co, ft, jz, Bj, gd, eV, Gw, dL, hB, Um, pl, bFQ, Ck, PT, RT, sp, AQ, aRa, ge, ks, aq, kp, mo, wZ, dw, cM, Ld, Zj, cv, ar, bbz, ok, W, vD, asl, dB, hk, eD, Qu, hL, hR, E, ut, at, aiS, fL, YH, IB, sZ, B, aAE, it, ayV, bL, pF, fM, aCw, jp, Dh, eR, oe, eX, aA, cz, fF, hy, v, j, azF, hX, Qo, Eh, q, J, o, zn, eA, XX, ga, mP, nv, afQ, aT, cy, rO, Nc, adV, an, ae, af, qw, avV, s, iU, Y, Lf, r, akY, en, bu, cl, t, f, iK, bN, ck, sS, Dy, c, pZ, aJt, gX, cS, dy, Yz, fD, bt, rA, bFR, ao, blu, vi, hS, gV, Gl, am, id, akd, ob, Mb, iW, uG, jh, al, Fb, Jz, jE, fu, uu, ah, Gn, hF, eq, Fc, ad, kL, hX, dP, av, iC, hd, afm, yt, Db, NS, IC, oW, io, hD, IQ, Od, aNR, bsn, NP, d, BN, BO, hG, qt, bFM, ff, eH, al, gl, aF, aot, gW, aGj, Sm, bz, iV, iq, TA, es, gk, hF, bE, z, Ny, X, azT, Lb, bkh, Gu, oQ, Pk, aax, ne, rk, pC); #c1(GSTT1) c2(NP_000844) c3(glutathione S-transferase theta-1 isoform a) c4(16534, 16535) c5(16536, 16537, 16538, 16539, 16540, 16541, 16542) c6( ) c7(T, ea, fd, ci, aY, aE, hu, hH, az, Qv, lk, fT, iA, nB, cj, k, eq, cE, Uc, ht, aj, hr, Gw, mJ, pl, ge, fe, pm, bbz, dB, bFW, bFV, abW, aAE, jv, aA, GP, cz, bX, Eh, q, akU, jj, sR, sX, eu, bA, avV, aMA, lo, cl, pb, ac, ig, mG, bt, rA, an, gV, iW, jh, KD, oZ, uu, fu, ask Gn, ad, hX, iC, yt, oW, IQ, NP, ZE, BO, cW, bFM, ff, gK, Ce, bpA, EZ, iV, Sm, bz, iq, oQ, i, Pk, iu, ne, rk, bM, if, e, bB, cL, bh, sD, Tz, ip, x, Na, bFU, ja, bc, dH, JI, fc, hl, kt, NR, as, eE, eF, bw, qJ, ii, vy, dD, gU, n, oY, awq, b, Bj, gd, aMj, eV, hn, aOX, A, fJ, AQ, bpx, cv, abV, hL, at, ut, B, pF, aCw, eX, fF, v, Qo, V, eJ, ae, jf, hM, HL, bu, t, ck, gX, Yz, vi, HQ, eq, Fc, hd, Db, Hk, hD, d, hG, gW, Z, bF, pP, y, pC, atT, aC, fR, atj, al, lj, qj, K, wt, dF, xa, eL, aAX, mQ, wf, LZ, hN, aB, g, uC, ou, uo, dW, bFS, m, FW, sQ, sw, OI, aw, fN, qy, BH, pM, ft, vd, wb, FZ, ks, Pp, wZ, cM, Ld, Zj, ar, W, aiS, it, ayV, fM, AL, jx, azF, j, qf, eA, J, o, XX, hb, Nc, kl, Y, r, en, iK, sn, auo, Dy, cS, dy, fD, bFR, gx, Gl, id, akd, bs, iG, ah, hF, dP, fU, io, aOh, IU, BN, eH, Sn, cr, qa, TA, Zi, bkh, Gu, hE, G, pf, qx, eh, fw, aR, aEQ, dY, il, hm, ayT, zQ, aW, Rr, OR, yd, eM, iT, Jp, uJ, pw, aWG, fr, qN, ai, FY, ce, cc, h, dL, hB, Gc, aq, dw, Qy, vD, hk, uw, hR, uz, YH, bFT, hL, eR, yk, hy, ga, uT, aoA, afQ, aT, vH, bK, an, af, qw, s, ND, iU, hf, f, sS, nM, pZ, aJt, hS, qb, aD, ha, lD, jE, kL, av, F, NS, Od, fb, eZ, gl, Ej, aF, aot, bmH, eK, es, apM, bE, z, X); #c1(GSTT1) c2(NP_001280736) c3(glutathione S-transferase theta-1 isoform b) c4(111580) c5(111581) c6( ) c7(T, ea, fd, ci, aY, aE, hu, hH, az, Qv, lk, fT, iA, nB, cj, k, eg, cE, Uc, ht, aj, br, Gw, mJ, pl, ge, fe, pm, bbz, dB, bFW, bFV, abW, aAE, jv, aA, GP, cz, bX, Eh, q, akU, jj, sR, sX, eu, bA, avV, aMA, lo, cl, pb, ac, ig, mG, bt, rA, ao, gV, iW, jh, KD, oZ, uu, fu, asl, Gn, ad, hX, iC, yt, oW, IQ, NP, ZE, BO, cW, bFM, ff, gK, Ce, bpA, EZ, iV, Sm, bz, iq, oQ, i, Pk, iu, ne, rk, bM, if, e, bB, cL, bh, sD, Tz, ip, x, Na, bFU, ja, be, dH, JI, fc, hl, kt, NR, as, eE, eF, bw, qJ, ii, vy, dD, gU, n, oY, awg, b, Bj, gd, aMj, eV, hn, aOX, A, fJ, AQ, bpx, cv, abV, hL, at, ut, B, pF, aCw, eX, fF, v, Qo, V, eJ, ae, jf, hM, HL, bu, t, ck, gX, Yz, vi, HQ, eq, Fc, hd, Db, Hk, hD, d, hG, gW, Z, bF, pP, y, pC, atT, aC, fR, atj, al, lj, gj, K, wt, dF, xa, eL, aAX, mQ, wF, LZ, hN, aB, g, uC, ou, uo, dW, bFS, m, FW, sQ, sw, OL aw, fN, qy, BH, pM, ft, vd, wb, FZ, ks, Pp, wZ, cM, Ld, Zj, ar, W, aiS, it, ayV, fM, AL, jx, azF, j, qf, eA, J, o, XX, hb, Nc, kl, Y, r, en, iK, sn, auo, Dy, cS, dy, fD, bFR, gx, Gl, id, akd, bs, iG, ah, hF, dP, fU, io, aOh, IU, BN, eH, Sn, cr, qa, TA, Zi, bkh, Gu, hE, G, pf, qx, eh, fw, aR, aEQ, dY, il, hm, ayT, zQ, aW, Rr, OR, yd, eM, iT, Jp, uJ, pw, aWG, fr, qN, ai, FY, ce, cc, h, dL, hB, Gc, aq, dw, Qy, vD, hk, uw, hR, uz, YH, bFT, hL, eR, yk, hy, ga, uT, aoA, afQ, aT, vH, bK, an, af, qw, s, ND, iU, hf, f, sS, nM, pZ, aJt, hS, qb, aD, ha, lD, jE, kL, av, F, NS, Od, fb, eZ, gl, Ej, aF, aot, bmH, eK, es, apM, bE, z, X); #c1(GSTT1) c2(NP_001280741) c3(glutathione S-transferase theta-1 isoform c) c4( ) c5(111582, 111583, 111584, 111585, 111586, 111587, 111588, 111589, 111590, 111591, 111592, 111593) c6( ) c7(T, ea, fd, ci, aY, aE, hu, hH, az, Qv, lk, fT, iA, nB, cj, k, eg, cE, Uc, ht, aj, br, Gw, mJ, pl, ge, fe, pm, bbz, dB, bFW, bFV, abW, aAE, jv, aA, GP, cz, bX, Eh, q, akU, jj, sR, sX, eu, bA, avV, aMA, lo, cl, pb, ac, ig, mG, bt, rA, ao, gV, iW, jh, KD, oZ, uu, fu, asl, Gn, ad, hX, iC, yt, oW, IQ, NP, ZE, BO, cW, bFM, ff, gK, Ce, bpA, EZ, iV, Sm, bz, ig, oQ, i, Pk, iu, ne, rk, bM, if, e, bB, cL, bh, sD, Tz, ip, x, Na, bFU, ja, bc, dH, JI, fc, hl, kt, NR, as, eE, eF, bw, qJ, ii, vy, dD, gU, n, oY, awg, b, Bj, gd, aMj, eV, hn, aOX, A, fJ, AQ, bpx, cv, abV, hL, at, ut, B, pF, aCw, eX, fF, v, Qo, V, eJ, ae, jf, hM, HL, bu, t, ck, gX, Yz, vi, HQ, eq, Fc, hd, Db, Hk, hD, d, hG, gW, Z, bF, pP, y, pC, atT, aC, fR, atj, al, lj, qj, K, wt, dF, xa, eL, aAX, mQ, wF, LZ, hN, aB, g, uC, ou, uo, dW, bFS, m, FW, sQ, sw, OI, aw, fN, qy, BH, pM, ft, vd, wb, FZ, ks, Pp, wZ, cM, Ld, Zj, ar, W, aiS, it, ayV, fM, AL, jx, azF, j, qf, eA, J, o, XX, hb, Nc, kl, Y, r, en, iK, sn, auo, Dy, cS, dy, fD, bFR, gx, Gl, id, akd, bs, iG, ah, hE, dP, fU, io, aOh, IU, BN, eH, Sn, cr, qa, TA, Zi, bkh, Gu, hE, G, pf, qx, eh, fw, aR, aEQ, dY, il, hm, ayT, zQ, aW, Rr, OR, yd, eM, iT, Jp, uJ, pw, aWG, fr, qN, ai, FY, ce, cc, h, dL, hB, Gc, aq, dw, Qy, vD, hk, uw, hR, uz, YH, bFT, hL, eR, yk, hy, ga, uT, aoA, afQ, aT, vH, bK, an, af, qw, s, ND, iU, hf, f, sS, nM, pZ, aJt, hS, qb, aD, ha, lD, jE, kL, av, F, NS, Od, fb, eZ, gl, Ej, aF, aot, bmH, eK, es, apM, bE, z, X); #c1(GSTT1) c2(NP_001280742) c3(glutathione S-transferase theta-1 isoform d) c4(111594) c5(111595, 111596, 111597, 111598, 111599, 111600) c6( ) c7(T, ea, fd, ci, aY, aE, hu, hH, az, Qv, lk, fT, iA, nB, cj, k, eg, cE, Uc, ht, aj, br, Gw, mJ, pl, ge, fe, pm, bbz, dB, bFW, bFV, abW, aAE, jv, aA, GP, cz, bX, Eh, q, akU, jj, sR, sX, eu, bA, avV, aMA, lo, cl, pb, ac, ig, mG, bt, rA, ao, gV, iW, jh, KD, oZ, uu, fu, asl, Gn, ad, hX, iC, yt, oW, IQ, NP, ZE, BO, cW, bFM, ff, gK, Ce, bpA, EZ, iV, Sm, bz, iq, oQ, i, Pk, iu, ne, rk, bM, if, e, bB, cL, bh, sD, Tz, ip, x, Na, bFU, ja, bc, dH, JI, fc, hl, kt, NR, as, eE, eF, bw, qJ, ii, vy, dD, gU, n, oY, awq, b, Bj, gd, aMj, eV, hn, aOX, A, fJ, AQ, bpx, cv, abV, hL, at, ut, B, pF, aCw, eX, fF, v, Qo, V, eJ, ae, jf, hM, HL, bu, t, ck, gX, Yz, vi, HQ, eq, Fc, hd, Db, Hk, hD, d, hG, gW, Z, bF, pP, y, pC, atT, aC, fR, atj, al, lj, qj, K, wt, dF, xa, eL, aAX, mQ, wF, LZ, hN, aB, g, uC, ou, uo, dW, bFS, m, FW, sQ, sw, OI, aw, fN, qy, BH, pM, ft, vd, wb, FZ, ks, Pp, wZ, cM, Ld, Zj, ar, W, aiS, it, ayV, fM, AL, jx, azF, j, qf, eA, J, o, XX, hb, Nc, kl, Y, r, en, iK, sn, auo, Dy, cS, dy, fD, bFR, gx, Gl, id, akd, bs, iG, ah, hF, dP, fU, io, aOh, IU, BN, eH, Sn, cr, qa, TA, Zi, bkh, Gu, hE, G, pf, qx, eh, fw, aR, aEQ, dY, il, hm, ayT, zQ, aW, Rr, OR, yd, eM, iT, Jp, uJ, pw, aWG, fr, qN, ai, FY, co, cc, h, dL, hB, Gc, aq, dw, Qy, vD, hk, uw, hR, uz, YH, bFT, hL, eR, yk, hy, ga, uT, aoA, afQ, aT, vH, bK, an, af, qw, s, ND, iU, hf, f, sS, nM, pZ, aJt, hS, qb, aD, ha, lD, jE, kL, av, F, NS, Od, fb, eZ, gl, Ej, aF, aot, bmH, eK, es, apM, bE, z, X); #c1(GSTT1) c2(NP_001280743) c3(glutathione S-transferase theta-1 isoform e) c4(111601) c5(111602, 111603, 111604, 111605, 111606) c6( ) c7(T, ea, fd, ci, aY, aE, hu, hH, az, Qv, lk, fT, iA, nB, cj, k, eg, cE, Uc, ht, aj, br, Gw, mJ, pl, ge, fe, pm, bbz, dB, bFW, bFV, abW, aAE, jv, aA, GP, cz, bX, Eh, q, akU, jj, sR, sX, eu, bA, avV, aMA, lo, cl, pb, ac, ig, mG, bt, rA, ao, gV, iW, jh, KD, oZ, uu, fu, asl, Gn, ad, hX, iC, yt, oW, IQ, NP, ZE, BO, cW, bFM, ff, gK, Ce, bpA, EZ, iV, Sm, bz, iq, oQ, i, Pk, iu, ne, rk, bM, if, e, bB, cL, bh, sD, Tz, ip, x, Na, bFU, ja, bc, dH, JI, fc, hl, kt, NR, as, eE, eF, bw, qJ, ii, vy, dD, gU, n, oY, awq, b, Bj, gd, aMj, eV, hn, aOX, A, fJ, AQ, bpx, cv, abV, hL, at, ut, B, pF, aCw, eX, fF, v, Qo, V, eJ, ae, jf, hM, HL, bu, t, ck, gX, Yz, vi, HQ, eq, Fc, hd, Db, Hk, hD, d, hG, gW, Z, bF, pP, y, pC, atT, aC, fR, atj, al, lj, qj, K, wt, dF, xa, eL, aAX, mQ, wF, LZ, hN, aB, g, uC, ou, uo, dW, bFS, m, FW, sQ, sw, OI, aw, fN, qy, BH, pM, ft, vd, wb, FZ, ks, Pp, wZ, cM, Ld, Zj, ar, W, aiS, it, ayV, fM, AL, jx, azF, j, qf, eA, J, o, XX, hb, Nc, kl, Y, r, en, iK, sn, auo, Dy, cS, dy, fD, bFR, gx, Gl, id, akd, bs, iG, ah, hF, dP, fU, io, aOh, IU, BN, eH, Sn, cr, qa, TA, Zi, bkh, Gu, hE, G, pf, qx, eh, fw, aR, aEQ, dY, il, hm, ayT, zQ, aW, Rr, OR, yd, eM, iT, Jp, uJ, pw, aWG, fr, qN, ai, FY, co, cc, h, dL, hB, Gc, aq, dw, Qy, vD, hk, uw, hR, uz, YH, bFT, hL, eR, yk, hy, ga, uT, aoA, afQ, aT, vH, bK, an, af, gw, s, ND, iU, hf, f, sS, nM, pZ, aJt, hS, qb, aD, ha, lD, jE, kL, av, F, NS, Od, fb, eZ, gl, Ej, aF, aot, bmH, eK, es, apM, bE, z, X); #c1(GSTT2) c2(NP_000845) c3(glutathione S-transferase theta-2 isoform a) c4(16543) c5(16544, 16545, 16546, 16547, 16548, 16549) c6( ) c7(Gl, ny, fT, ib, fR, ht, Gs, r, cz, rx, hy, Gw, K, q, bU, Gu, cM, xa); #c1(GSTT2B) c2(NP_001074312) c3(glutathione S-transferase theta-28) c4(37082) c5(37083, 37084, 37085, 37086, 37087, 37088) c6( ) c7(T, ff, r, K, en, q); #c1(GSTZ1) c2(NP_665877) c3(maleylacetoacetate isomerase isoform 1) c4(241904, 241905, 241906) c5(241907, 241908, 241909, 241910, 241911, 241912, 241913, 241914, 241915, 241916, 241917) c6( ) c7(qw, SE, aHV, aW, aRa, cj, aT, at, uJ, dL, bK, ks, bX, an, Th, aax, eL); #c1(GSTZ1) c2(NP_665878) c3(maleylacetoacetate isomerase isoform 2) c4(241918) c5(241919, 241920, 241921, 241922, 241923, 241924) c6( ) c7(qw, SE, aHV, aW, aRa, cj, aT, at, uJ, dL, bK, ks, bX, an, Th, aax, eL); #c1(GSX1) c2(NP_663632) c3(GS homeobox 1) c4(241382) c5(241383, 241384, 241385, 241386, 241387, 241388) c6( ) c7(alv); #c1(GSX2) c2(NP_573574) c3(GS homeobox 2) c4(234609) c5(234610, 234611, 234612, 234613, 234614, 234615, 234616, 234617, 234618, 234619) c6( ) c7(PJ); #c1(GTDC1) c2(NP_001006637) c3(glycosyltransferase-like domain-containing protein 1 isoform a) c4(22257) c5(22258, 22259, 22260, 22261, 22262, 22263, 22264, 22265, 22266, 22267, 22268, 22269, 22270, 22271, 22272, 22273, 22274, 22275) c6( ) c7(ff, ht, en); #c1(GTDC1) c2(NP_001271164) c3(glycosyltransferase-like domain-containing protein 1 isoform e) c4(103503, 103504) c5(103505, 103506, 103507, 103508, 103509, 103510, 103511, 103512, 103513, 103514, 103515, 103516) c6( ) c7(ff, ht, en); #c1(GTDC1) c2(NP_078935) c3(glycnsyItransferase-like domain-containing protein 1 isoform b) c4(216169) c5(216170, 216171, 216172, 216173, 216174, 216175, 216176, 216177, 216178, 216179) c6( ) c7(ff, ht, en); #c1(GTF2A1) c2(NP_056943) c3(transcription initiation factor IIA subunit 1 isoform 1) c4(188160, 188161, 188162) c5(188163, 188164, 188165, 188166, 188167, 188168, 188169, 188170) c6( ) c7(eD, aA, h, aT, aF, hp); #c1(GTF2A1) c2(NP_963889) c3(transcription initiation factor IIA subunit 1 isoform 2) c4( ) c5(262531, 262532, 262533, 262534, 262535, 262536, 262537, 262538, 262539, 262540, 262541) c6( ) c7(eD, aA, h, aT, aF, hp); #c1(GTF2A1L) c2(NP_001180416) c3(TFIIA-alpha and beta-like factor isoform 2) c4(74005) c5(74006, 74007, 74008, 74009, 74010, 74011) c6( ) c7(Ki, gU, ND, jx, hl, nA, B, vi); #c1(GTF2A1L) c2(NP_006863) c3(TFIIA-alpha and beta-like factor isoform 1) c4(168702, 168703) c5(168704, 168705, 168706, 168707, 168708, 168709, 168710, 168711, 168712, 168713, 168714, 168715) c6( ) c7(Ki, gU, ND, jx, hl, nA, B, vi); #c1(GTF2A2) c2(NP_004483) c3(transcriptinn initiation factor IIA subunit 2) c4(146794) c5(146795, 146796, 146797, 146798, 146799, 146800, 146801, 146802, 146803, 146804, 146805, 146806, 146807, 146808) c6( ) c7(h, eD); #c1(GTF2E1) c2(NP_005504) c3(general transcription factor IIE subunit 1) c4(156873, 156874, 156875) c5(156876, 156877, 156878, 156879, 156880, 156881, 156882, 156883, 156884, 156885, 156886, 156887, 156888, 156889, 156890, 156891, 156892, 156893, 156894) c6( ) c7(aT); #c1(GTF2E2) c2(NP_002086) c3(transcriptinn initiation factor IIE subunit beta) c4(124372, 124373, 124374) c5(124375, 124376, 124377, 124378, 124379, 124380, 124381) c6( ) c7(iV); #c1(GTF2E2) c2(XP_011542812) c3(transcriptinn initiation factor IIE subunit beta isoform X2) c4( ) c5(341438, 341439, 341440, 341441, 341442, 341443, 341444, 341445, 341446, 341447, 341448, 341449) c6( ) c7(iV); #c1(GTF2F1) c2(NP_002087) c3(general transcription factor IIF subunit 1) c4(124382, 124383, 124384) c5(124385, 124386, 124387, 124388, 124389, 124390, 124391, 124392, 124393, 124394, 124395, 124396, 124397, 124398, 124399, 124400, 124401, 124402, 124403) c6( ) c7(m, aT); #c1(GTF2F2) c2(NP_004119) c3(general transcription factor IIF subunit 2) c4(143712) c5(143713, 143714, 143715, 143716, 143717, 143718, 143719) c6( ) c7(m); #c1(GTF2H1) c2(NP_001135779) c3(general transcription factor IIH subunit 1) c4(53220, 53221, 53222) c5(53223, 53224, 53225, 53226, 53227, 53228, 53229, 53230, 53231, 53232, 53233, 53234, 53235, 53236, 53237, 53238, 53239, 53240, 53241, 53242, 53243, 53244, 53245) c6( ) c7(bM, T, if, GC, To, v, BF, ci, bX, V, q, ad, eW, Kx, ke, av, jz, no, cF, zw, WY, aT, h, K, IQ, Wr, ae, af, d, aW, aBq, ff, az, alR, CT, r, aq, aaE, kp, La, en, g, bz, dr, bb, kP, c, eM, U, Kj, bdR, hl, xg, B); #c1(GTF2H2) c2(NP_001506) c3(general transcription factor IIH subunit 2) c4(118253, 118254) c5(118255, 118256, 118257, 118258, 118259, 118260, 118261, 118262, 118263, 118264, 118265, 118266, 118267, 118268, 118269, 118270, 118271, 118272) c6( ) c7(ke, G, T, no, dA, ad, apl, arX, aBq, wu, CT, kf, IQ, bdR, bu, La, wm, ae, dr, VF); #c1(GTF2H2C) c2(XP_005248650) c3(general transcription factor IIH subunit 2-like protein isoform X6) c4( ) c5(268487, 268488, 268489, 268490, 268491, 268492) c6( ) c7(ke, G, T, no, dA, ad, wu, aBq, CT, kf, IQ, La, bu, wm, ae, dr, VF); #c1(GTF2H2C) c2(XP_005276846) c3(general transcription factor IIH subunit 2-like protein isoform X6) c4( ) c5(285736, 285737, 285738, 285739, 285740, 285741) c6( ) c7(ke, G, T, no, dA, ad, wu, aBq, CT, kf, IQ, La, bu, wm, ae, dr, VF); #c1(GTF2H2C_2) c2(NP_001035955) c3(general transcription factor IIH subunit 2-like protein) c4(33522, 33523) c5(33524, 33525, 33526, 33527, 33528, 33529, 33530, 33531, 33532, 33533, 33534, 33535, 33536, 33537) c6( ) c7(ke, G, T, no, dA, ad, wu, aBq, CT, kf, IQ, La, bu, wm, ae, dr, VF); #c1(GTF2H3) c2(NP_001258796) c3(general transcription factor IIH subunit 3 isoform c) c4( ) c5(96546, 96547, 96548, 96549, 96550, 96551, 96552, 96553, 96554, 96555) c6( ) c7(bF, ke, T, ae, no, bE, aBq, CT, bB, IQ, bC, La, bD, pm, bz, dr, ad); #c1(GTF2H3) c2(NP_001507) c3(general transcription factor IIH subunit 3 isoform a) c4(118273, 118274, 118275) c5(118276, 118277, 118278, 118279, 118280, 118281, 118282, 118283) c6( ) c7(bF, ke, T, ae, no, bE, aBg, CT, bB, IQ, bC, La, bD, pm, bz, dr, ad); #c1(GTF2H4) c2(NP_001508) c3(general transcription factor IIH subunit 4) c4(118284, 118285, 118286) c5(118287, 118288, 118289, 118290, 118291, 118292, 118293, 118294, 118295, 118296, 118297, 118298, 118299, 118300, 118301, 118302, 118303, 118304, 118305, 118306, 118307, 118308, 118309, 118310, 118311, 118312, 118313, 118314, 118315, 118316, 118317, 118318, 118319, 118320, 118321, 118322, 118323, 118324, 118325, 118326, 118327, 118328, 118329, 118330, 118331, 118332, 118333, 118334, 118335, 118336, 118337, 118338, 118339, 118340, 118341, 118342, 118343, 118344, 118345, 118346, 118347, 118348, 118349, 118350, 118351, 118352, 118353, 118354, 118355, 118356, 118357, 118358, 118359, 118360, 118361, 118362, 118363, 118364, 118365, 118366, 118367, 118368, 118369, 118370, 118371, 118372, 118373, 118374, 118375, 118376, 118377) c6( ) c7(ke, T, aC, no, aE, bE, aBq, CT, dV, eZ, h, ci, IQ, La, g, V, ae, dr, ad); #c1(GTF2H5) c2(NP_997001) c3(general transcription factor IIH subunit 5) c4(264932) c5(264933, 264934, 264935, 264936, 264937, 264938) c6( ) c7(ke, T, ae, no, aBq, yk, rC, nl, nh, r, afB, uz, CT, IQ, La, bnB, V, q, dr, ad, bnA); #c1(GTF2I) c2(NP_001267729) c3(general transcription factor II-I isoform 6) c4( ) c5(99666, 99667, 99668, 99669, 99670, 99671, 99672, 99673, 99674, 99675, 99676, 99677) c6( ) c7(agK, ae, T, alC, VX, Az, fN, bhG, K, nA, ci, anN, bt, xg, ad, hq); #c1(GTF2I) c2(NP_001509) c3(general transcription factor II-I isoform 4) c4(118378, 118379) c5(118380, 118381, 118382, 118383, 118384, 118385) c6( ) c7(agK, ae, T, alC, VX, Az, fN, bhG, K, nA, ci, anN, bt, xg, ad, hq); #c1(GTF2I) c2(NP_127492) c3(general transcription factor II-I isoform 1) c4(226509, 226510) c5(226511, 226512, 226513, 226514, 226515, 226516, 226517, 226518, 226519, 226520, 226521, 226522) c6( ) c7(agK, ae, T, alC, VX, Az, fN, bhG, K, nA, ci, anN, bt, xg, ad, hq); #c1(GTF2I) c2(NP_127493) c3(general transcription factor II-I isoform 2) c4(226523, 226524) c5(226525, 226526, 226527, 226528, 226529, 226530) c6( ) c7(agK, ae, T, alC, VX, Az, fN, bhG, K, nA, ci, anN, bt, xg, ad, hq); #c1(GTF2I) c2(NP_127494) c3(general transcription factor II-I isoform 3) c4(226531) c5(226532, 226533, 226534, 226535, 226536, 226537) c6( ) c7(agK, ae, T, alC, VX, Az, fN, bhG, K, nA, ci, anN, bt, xg, ad, hq); #c1(GTF2IRD1) c2(NP_001186136) c3(general transcription factor II-I repeat domain-containing protein 1 isoform 3) c4(77190) c5(77191, 77192, 77193, 77194, 77195, 77196) c6( ) c7(av, alC, azj, Qu, ff, Az, FI, en, bz, bwa, xg); #c1(GTF2IRD1) c2(NP_005676) c3(general transcription factor II-I repeat domain-containing protein 1 isoform 2) c4(158436) c5(158437, 158438, 158439, 158440, 158441, 158442, 158443) c6( ) c7(av, alC, azj, Qu, ff, Az, FI, en, bz, bwa, xg); #c1(GTF2IRD1) c2(NP_057412) c3(general transcription factor II-I repeat domain-containing protein 1 isoform 1) c4(190627) c5(190628, 190629, 190630, 190631, 190632, 190633) c6( ) c7(av, alC, azj, Qu, ff, Az, FI, en, bz, bwa, xg); #c1(GTF2IRD2) c2(NP_775808) c3(general transcription factor II-I repeat domain-containing protein 2A isoform 1) c4(250362) c5(250363, 250364, 250365, 250366, 250367, 250368, 250369, 250370, 250371, 250372, 250373, 250374, 250375, 250376, 250377, 250378, 250379, 250380, 250381) c6( ) c7(alC); #c1(GTF2IRD2) c2(XP_011514922) c3(general transcription factor II-I repeat domain-containing protein 2A isoform X1) c4(307680) c5(307681, 307682) c6( ) c7(alC); #c1(GTF2IRD2) c2(XP_011514923) c3(general transcription factor II-I repeat domain-containing protein 2A isoform X2) c4(307683) c5(307684, 307685) c6( ) c7(alC); #c1(GTF2IRD2) c2(XP_011514927) c3(general transcription factor II-I repeat domain-containing protein 2A isoform X6) c4( ) c5(307686) c6( ) c7(alC); #c1(GTF3A) c2(NP_002088) c3(transcriptinn factor IIIA) c4(124404, 124405) c5(124406, 124407, 124408, 124409, 124410, 124411, 124412, 124413, 124414, 124415, 124416, 124417, 124418) c6( ) c7(T, dD, aW, ea, aT, h, lo, v, eq, ae, ad); #c1(GTF3C1) c2(NP_001511) c3(general transcription factor 3C polypeptide 1 isoform 1) c4(118407, 118408) c5(118409, 118410, 118411, 118412, 118413, 118414, 118415, 118416, 118417, 118418, 118419, 118420, 118421) c6( ) c7(ady); #c1(GTF3C1) c2(XP_011544117) c3(general transcription factor 3C polypeptide 1 isoform X3) c4( ) c5(343277) c6( ) c7(ady); #c1(GTPBP1) c2(NP_004277) c3(GTP-binding protein 1) c4(144771) c5(144772, 144773, 144774, 144775, 144776, 144777) c6( ) c7(ag, ame); #c1(GTPBP3) c2(NP_001122327) c3(tRNA modification GTPase GTPBP3, mitochondrial isoform III) c4(46539) c5(46540, 46541, 46542, 46543, 46544, 46545, 46546, 46547, 46548, 46549, 46550, 46551) c6( ) c7(bL); #c1(GTPBP3) c2(NP_001182351) c3(tRNA modification GTPase GTPBP3, mitochondrial isoform VII) c4(74817) c5(74818, 74819, 74820, 74821, 74822, 74823) c6( ) c7(bL); #c1(GTPBP3) c2(NP_116009) c3(tRNA modification GTPase GTPBP3, mitochondrial isoform V) c4(225190, 225191) c5(225192, 225193, 225194, 225195, 225196, 225197) c6( ) c7(bL); #c1(GTPBP3) c2(NP_598399) c3(tRNA modification GTPase GTPBP3, mitochondrial isoform IV) c4(235496) c5(235497, 235498, 235499, 235500, 235501, 235502) c6( ) c7(bL); #c1(GTPBP4) c2(NP_036473) c3(nucleolar GTP-binding protein 1) c4(174103, 174104, 174105, 174106) c5(174107, 174108, 174109, 174110, 174111, 174112, 174113, 174114, 174115, 174116, 174117, 174118, 174119, 174120, 174121, 174122, 174123, 174124, 174125) c6( ) c7(ka, T, eR, adi, aj, J, kH, aT, EL, af, bmc, d, aW, hf, cm, bz, EJ, nB, dB, ki, HR, HB, AN); #c1(GTSF1) c2(NP_653195) c3(gametncyte-specific factor 1) c4(239007) c5(239008, 239009, 239010, 239011, 239012, 239013, 239014, 239015, 239016, 239017) c6( ) c7(xR); #c1(GUCA1A) c2(NP_000400) c3(guanylyl cyclase-activating protein 1) c4(8509, 8510, 8511) c5(8512, 8513, 8514, 8515, 8516, 8517, 8518, 8519, 8520, 8521, 8522, 8523, 8524, 8525, 8526, 8527, 8528, 8529, 8530, 8531, 8532, 8533, 8534, 8535, 8536, 8537, 8538, 8539, 8540, 8541, 8542, 8543) c6( ) c7(nJ, 81, IR, W, wu, bFX, Sr, nx, nw, bfR, wm, OL, Nh, on, nC); #c1(GUCA1B) c2(NP_002089) c3(guanylyl cyclase-activating protein 2) c4(124419, 124420) c5(124421, 124422, 124423, 124424, 124425, 124426, 124427, 124428, 124429, 124430, 124431, 124432) c6( ) c7(bFY, nC, nw, IR, nx); #c1(GUCD1) c2(NP_001271183) c3(protein GUCD1 isoform e) c4(103517) c5( ) c6( ) c7(KM, B, c); #c1(GUCD1) c2(NP_001271186) c3(protein GUCD1 isoform h) c4( ) c5(103518, 103519, 103520, 103521, 103522, 103523) c6( ) c7(KM, B, c); #c1(GUCD1) c2(NP_113632) c3(protein GUCD1 isoform d) c4(221831) c5(221832, 221833, 221834, 221835, 221836, 221837) c6( ) c7(KM, B, c); #c1(GUCY1A2) c2(NP_000846) c3(guanylate cyclase soluble subunit alpha-2 isoform 2) c4(16550) c5(16551, 16552, 16553, 16554, 16555, 16556) c6( ) c7(aw, aT); #c1(GUCY1A2) c2(NP_001243353) c3(guanylate cyclase soluble subunit alpha-2 isoform 1) c4(90482) c5(90483, 90484, 90485, 90486, 90487, 90488) c6( ) c7(aw, aT); #c1(GUCY1A3) c2(NP_001124157) c3(guanylate cyclase soluble subunit alpha-3 isoform 8) c4( ) c5(48313, 48314, 48315, 48316, 48317) c6( ) c7(bGa, oe, bFZ, qK, aw, cz, j, mq, bd, eA, X); #c1(GUCY1A3) c2(NP_001124159) c3(guanylate cyclase soluble subunit alpha-3 isoform 0) c4(48318) c5(48319, 48320, 48321, 48322, 48323, 48324) c6( ) c7(bGa, oe, bFZ, qK, aw, cz, j, mg, bd, eA, X); #c1(GUCY1A3) c2(NP_001243378) c3(guanylate cyclase soluble subunit alpha-3 isoform A) c4(90632, 90633) c5(90634, 90635, 90636, 90637, 90638, 90639, 90640, 90641, 90642, 90643, 90644, 90645, 90646, 90647, 90648, 90649, 90650, 90651, 90652, 90653, 90654, 90655, 90656) c6( ) c7(bGa, oe, bFZ, qK, aw, cz, j, mq, bd, eA, X); #c1(GUCY1B3) c2(NP_000848) c3(guanylate cyclase soluble subunit beta-1 isoform 2) c4(16557) c5(16558, 16559, 16560, 16561, 16562, 16563, 16564) c6( ) c7(t, m); #c1(GUCY1B3) c2(NP_001278881) c3(guanylate cyclase soluble subunit beta-1 isoform 3) c4(110776, 110777) c5(110778, 110779, 110780, 110781, 110782, 110783, 110784, 110785, 110786, 110787, 110788, 110789, 110790, 110791, 110792) c6( ) c7(t, m); #c1(GUCY2C) c2(NP_004954) c3(heat-stable enterotoxin receptor precursor) c4(151438) c5(151439, 151440, 151441, 151442, 151443, 151444) c6( ) c7(gh, T, aZ, baV, bO, cz, bB, n, bS, v, ct, q, qC, dP, bGb, gd, h, jH, bK, K, ji, hK, Qe, aK, avH, r, fe, g, Z, bGc, bF, aqp, bE, Ji, Rm, cE, ao); #c1(GUCY2D) c2(NP_000171) c3(retinal guanylyl cyclase 1) c4(3789) c5(3790, 3791, 3792, 3793, 3794, 3795) c6( ) c7(bGg, nx, bFp, jh, uu, ci, aQw, Nh, bGe, bfR, bGd, OK, bFr, IR, nO, bGf, nC, ac, aVv, nw, eQ, OL, de); #c1(GUCY2F) c2(NP_001513) c3(retinal guanylyl cyclase 2) c4(118422) c5(118423, 118424, 118425, 118426, 118427, 118428) c6( ) c7(aC, Nh); #c1(GUK1) c2(NP_001152862) c3(guanylate kinase isoform a) c4(60200, 60201, 60202) c5(60203, 60204, 60205, 60206, 60207, 60208, 60209, 60210, 60211, 60212, 60213, 60214, 60215, 60216, 60217, 60218, 60219, 60220, 60221, 60222, 60223, 60224, 60225, 60226, 60227) c6( ) c7(eW, j, s, bq); #c1(GUK1) c2(NP_001152863) c3(guanylate kinase isoform b) c4(60228, 60229, 60230, 60231) c5(60232, 60233, 60234, 60235, 60236, 60237, 60238, 60239, 60240, 60241, 60242, 60243, 60244, 60245, 60246, 60247, 60248, 60249, 60250, 60251, 60252, 60253, 60254, 60255, 60256, 60257, 60258, 60259, 60260, 60261, 60262, 60263) c6( ) c7(eW, j, s, bq); #c1(GUK1) c2(NP_001229769) c3(guanylate kinase isoform c) c4(85222) c5(85223, 85224, 85225, 85226, 85227, 85228) c6( ) c7(eW, j, s, bq); #c1(GUK1) c2(XP_005273160) c3(guanylate kinase isoform X1) c4(284312) c5(284313, 284314, 284315, 284316, 284317, 284318) c6( ) c7(eW, j, s, bq); #c1(GUK1) c2(XP_005273161) c3(guanylate kinase isoform X2) c4(284319) c5(284320, 284321, 284322, 284323, 284324, 284325) c6( ) c7(eW, j, s, bq); #c1(GUK1) c2(XP_011542476) c3(guanylate kinase isoform X3) c4( ) c5(340973) c6( ) c7(eW, j, s, bq); #c1(GULP1) c2(NP_001239597) c3(PTB domain-containing engulfment adapter protein 1 isoform b) c4( ) c5(88559, 88560, 88561, 88562, 88563, 88564, 88565, 88566, 88567, 88568) c6( ) c7(hz, oe, ir, g, cG); #c1(GULP1) c2(XP_006712653) c3(PTB domain-containing engulfment adapter protein 1 isoform X1) c4(286769, 286770, 286771) c5(286772, 286773, 286774, 286775, 286776, 286777, 286778, 286779, 286780, 286781, 286782, 286783, 286784, 286785, 286786, 286787, 286788, 286789) c6( ) c7(hz, oe, ir, g, cG); #c1(GULP1) c2(XP_011509637) c3(PTB domain-containing engulfment adapter protein 1 isoform X10) c4( ) c5(300211, 300212, 300213, 300214, 300215, 300216) c6( ) c7(hz, oe, ir, g, cG); #c1(GUSB) c2(NP_000172) c3(beta-glucurnnidase isoform 1 precursor) c4(3796) c5(3797, 3798, 3799, 3800, 3801, 3802) c6( ) c7(T, aiR, q, aR, er, hX, iu, l, u, aT, h, dz, wt, iU, Y, r, aq, bGh, dr, bGi, ck, ajH, kg, ig, cj, Lp, Lq, anx, y, bt, B, vi); #c1(GUSB) c2(XP_005250354) c3(beta-glucuronidase isoform X1) c4(270260) c5(270261, 270262, 270263, 270264, 270265, 270266) c6( ) c7(T, aiR, q, aR, er, hX, iu, l, u, aT, h, dz, wt, iU, Y, r, aq, bGh, dr, bGi, ck, ajH, kg, ig, cj, Lp, Lq, anx, y, bt, B, vi); #c1(GYG1) c2(NP_001171649) c3(glycogenin-1 isoform 2) c4(71140) c5(71141, 71142, 71143, 71144, 71145, 71146) c6( ) c7(Bw, j, bGj); #c1(GYG1) c2(NP_001171650) c3(glycngenin-1 isoform 3) c4(71147) c5(71148, 71149, 71150, 71151, 71152, 71153) c6( ) c7(Bw, j, bGj); #c1(GYG1) c2(NP_004121) c3(glycngenin-1 isoform 1) c4(143720) c5(143721, 143722, 143723, 143724, 143725, 143726) c6( ) c7(Bw, j, bGj); #c1(GYG2) c2(NP_001073324) c3(glycngenin-2 isoform a) c4( ) c5(35846, 35847, 35848, 35849, 35850, 35851) c6( ) c7(ajU); #c1(GYG2) c2(NP_001171631) c3(glycngenin-2 isoform c) c4(71057, 71058, 71059, 71060) c5(71061, 71062, 71063, 71064, 71065, 71066, 71067, 71068, 71069, 71070, 71071, 71072, 71073, 71074, 71075, 71076, 71077, 71078) c6( ) c7(ajU); #c1(GYG2) c2(NP_001171632) c3(glycngenin-2 isoform d) c4(71079) c5(71080, 71081, 71082, 71083, 71084, 71085) c6( ) c7(ajU); #c1(GYG2) c2(NP_003909) c3(glycogenin-2 isoform b) c4(142092, 142093) c5(142094, 142095, 142096, 142097, 142098, 142099) c6( ) c7(ajU); #c1(GYG2) c2(XP_006724584) c3(glycogenin-2 isoform X2) c4(296095) c5(296096, 296097, 296098, 296099, 296100, 296101) c6( ) c7(ajU); #c1(GYG2) c2(XP_011543903) c3(glycngenin-2 isoform X3) c4(343092) c5(343093, 343094, 343095, 343096, 343097, 343098, 343099, 343100, 343101, 343102, 343103, 343104) c6( ) c7(ajU); #c1(GYLTL1B) c2(NP_001287650) c3(glycnsyltransferase-like protein LARGE2 isoform a precursor) c4(112420) c5(112421, 112422, 112423, 112424, 112425, 112426, 112427, 112428, 112429, 112430, 112431, 112432, 112433, 112434, 112435, 112436, 112437, 112438, 112439, 112440) c6( ) c7(T, ac, xs, aT, dy, ci, ae, ad); #c1(GYLTL1B) c2(NP_001287651) c3(glycnsyltransferase-like protein LARGE2 isoform b) c4(112441) c5( ) c6( ) c7(T, ac, xs, aT, dy, ci, ae, ad); #c1(GYLTL1B) c2(XP_006718204) c3(glycnsyltransferase-like protein LARGE2 isoform X8) c4(291576) c5(291577, 291578, 291579, 291580, 291581, 291582) c6( ) c7(T, ac, xs, aT, dy, ci, ae, ad); #c1(GYLTL1B) c2(XP_011518192) c3(glycnsyltransferase-like protein LARGE2 isoform X5) c4( ) c5(312237) c6( ) c7(T, ac, xs, aT, dy, ci, ae, ad); #c1(GYLTL1B) c2(XP_011518195) c3(glycnsyltransferase-like protein LARGE2 isoform X9) c4( ) c5(312238) c6( ) c7(T, ac, xs, aT, dy, ci, ae, ad); #c1(GYPA) c2(NP_002090) c3(glycnphnrin-A precursor) c4(124433, 124434, 124435) c5(124436, 124437, 124438, 124439, 124440, 124441, 124442, 124443, 124444, 124445, 124446, 124447, 124448, 124449, 124450, 124451, 124452, 124453) c6( ) c7(bM, T, os, qo, dM, lo, SO, qd, aw, cz, aj, bS, oZ, ct, x, oT, no, asY, dV, hD, bK, adV, MY, wr, amx, Em, IW, aEW, La, pm, aot, Z, ve, bw, bz, aYt, ck, TA, VJ, hk, at, dW, bC, lf, bt, fh); #c1(GYPB) c2(NP_002091) c3(glycophorin-B isoform 1 precursor) c4(124454, 124455) c5(124456, 124457, 124458, 124459, 124460, 124461, 124462, 124463, 124464, 124465, 124466, 124467, 124468, 124469, 124470, 124471, 124472, 124473, 124474, 124475, 124476, 124477, 124478, 124479, 124480, 124481, 124482, 124483) c6( ) c7(TA, qo, VJ, amx, asY, Em, IW, dV, cz, hD, fN, aEW, bS, ct, aot, Z); #c1(GYPB) c2(XP_011530205) c3(glycophorin-B isoform X1) c4(326124, 326125) c5( ) c6( ) c7(TA, qo, VJ, amx, asY, Em, IW, dV, cz, hD, fN, aEW, bS, ct, aot, Z); #c1(GYPC) c2(NP_001243513) c3(glycophorin-C isoform 3) c4(90981) c5(90982, 90983, 90984, 90985, 90986) c6( ) c7(bpn, xK, bsd, dV, mL, m, k, qs, cd); #c1(GYPC) c2(NP_002092) c3(glycophorin-C isoform 1) c4(124484) c5(124485, 124486, 124487, 124488, 124489, 124490, 124491) c6( ) c7(bpn, xK, bsd, dV, mL, m, k, qs, cd); #c1(GYPC) c2(NP_058131) c3(glycophorin-C isoform 2) c4(192646) c5(192647, 192648, 192649, 192650, 192651, 192652) c6( ) c7(bpn, xK, bsd, dV, mL, m, k, qs, cd); #c1(GYPE) c2(NP_002093) c3(glycophorin-E precursor) c4(124492, 124493) c5(124494, 124495, 124496, 124497, 124498, 124499, 124500, 124501, 124502, 124503, 124504, 124505, 124506, 124507, 124508, 124509) c6( ) c7(TA, Qi, qo, amx, asY, ex, IW, dV, cz, hD, aEW, bS, ct, aot, Z); #c1(GYS1) c2(NP_001155059) c3(glycogen [starch] synthase, muscle isoform 2) c4(61426, 61427) c5(61428, 61429, 61430, 61431, 61432, 61433, 61434, 61435, 61436, 61437, 61438, 61439) c6( ) c7(bL, bGk, cc, eR, aw, hl, cz, dG, ei, nS); #c1(GYS1) c2(NP_002094) c3(glycogen [starch] synthase, muscle isoform 1) c4(124510, 124511, 124512) c5(124513, 124514, 124515, 124516, 124517, 124518, 124519, 124520, 124521, 124522, 124523, 124524, 124525, 124526, 124527, 124528, 124529, 124530) c6( ) c7(bL, bGk, cc, eR, aw, hl, cz, dG, ei, nS); #c1(GYS2) c2(NP_068776) c3(glycogen [starch] synthase, liver) c4(210363, 210364) c5(210365, 210366, 210367, 210368, 210369, 210370, 210371, 210372, 210373, 210374, 210375, 210376, 210377, 210378, 210379, 210380, 210381, 210382, 210383, 210384, 210385, 210386, 210387, 210388, 210389, 210390, 210391, 210392, 210393, 210394, 210395, 210396, 210397, 210398, 210399, 210400, 210401, 210402, 210403, 210404, 210405, 210406, 210407, 210408, 210409, 210410, 210411, 210412, 210413, 210414, 210415, 210416, 210417, 210418, 210419, 210420, 210421, 210422, 210423, 210424, 210425, 210426, 210427, 210428, 210429, 210430, 210431, 210432, 210433, 210434, 210435, 210436, 210437, 210438, 210439, 210440, 210441, 210442, 210443, 210444, 210445, 210446, 210447, 210448, 210449, 210450, 210451, 210452, 210453, 210454, 210455, 210456, 210457) c6(210458) c7(bL, bGl, kl, blo, aZ, qQ, hl, mg, v); #c1(GZFI) c2(XP_005260860) c3(GDNF-inducible zinc finger protein 1 isoform X5) c4(276937) c5(276938, 276939, 276940, 276941, 276942, 276943) c6( ) c7(fq); #c1(GZMA) c2(NP_006135) c3(granzyme A precursor) c4(162296) c5(162297, 162298, 162299, 162300, 162301, 162302) c6( ) c7(x, bM, Dw, EM, fR, ig, aHW, ds, fN, at, h, Ds, IR, k, y, pb, boN); #c1(GZMB) c2(NP_004122) c3(granzyme B precursor) c4(143727, 143728, 143729, 143730) c5(143731, 143732, 143733, 143734, 143735, 143736, 143737, 143738, 143739, 143740, 143741, 143742, 143743, 143744, 143745, 143746, 143747, 143748) c6( ) c7(oO, bM, T, lD, xS, fR, Zz, ea, qx, hE, cL, qj, ci, x, aE, fS, Ds, bGm, eL, adT, cp, ly, aW, mQ, aB, bw, cj, k, m, dD, n, fr, qN, ju, cU, h, eV, dL, bxg, A, fJ, lb, fe, lx, bm, at, Dw, eX, fF, C, q, o, aT, rz, ae, af, hM, bf, iU, axW, Y, r, lo, en, aER, bN, ck, OW, dh, dy, fD, rA, bt, Ke, jh, wV, ah, jE, Gn, EA, eq, pz, ad, hX, F, ds, aak, uD, ff, cr, eZ, iV, aS, lf, y); #c1(GZMB) c2(XP_011534987) c3(granzyme B isoform X1) c4(331541, 331542, 331543) c5(331544, 331545, 331546, 331547, 331548, 331549, 331550, 331551, 331552, 331553, 331554, 331555) c6( ) c7(oO, bM, T, lD, xS, fR, Zz, ea, qx, hE, cL, qj, ci, x, aE, fS, Ds, bGm, eL, adT, cp, ly, aW, mQ, aB, bw, cj, k, m, dD, n, fr, qN, ju, cU, h, eV, dL, bxg, A, fJ, lb, fe, lx, bm, at, Dw, eX, fF, C, q, o, aT, rz, ae, af, hM, bf, iU, axW, Y, r, lo, en, aER, bN, ck, OW, dh, dy, fD, rA, bt, Ke, jh, wV, ah, jE, Gn, EA, eq, pz, ad, hX, F, ds, aak, uD, ff, cr, eZ, iV, aS, lf, y); #c1(GZMH) c2(NP_001257710) c3(granzyme H isoform 3 precursor) c4(95604, 95605) c5(95606, 95607, 95608, 95609, 95610, 95611, 95612, 95613, 95614, 95615, 95616, 95617) c6( ) c7(iU, jx, hX); #c1(GZMH) c2(NP_219491) c3(granzyme H isoform 1 precursor) c4(228595) c5(228596, 228597, 228598, 228599, 228600, 228601) c6( ) c7(iU, jx, hX); #c1(GZMK) c2(NP_002095) c3(granzyme K precursor) c4(124531) c5(124532, 124533, 124534, 124535, 124536, 124537, 124538, 124539) c6( ) c7(V, C); #c1(GZMM) c2(NP_005308) c3(granzyme M isoform 1 preproprotein) c4(154863) c5(154864, 154865, 154866, 154867, 154868, 154869) c6( ) c7(fM, iM, Ew, awS, je, oV, bO, kH, aT, ci, iK, ae, ad); #c1(H1F0) c2(NP_005309) c3(histone H1.0) c4(154870, 154871) c5(154872, 154873, 154874, 154875, 154876, 154877, 154878, 154879, 154880, 154881, 154882, 154883) c6( ) c7(ck, T, bP, aW, Dq, aT, h, aq, bC, iV, t, bt, B, hX); #c1(HIFX) c2(NP_006017) c3(histone Hlx) c4(161204) c5(161205, 161206, 161207, 161208, 161209, 161210) c6( ) c7(pX); #c1(H2AFJ) c2(NP_808760) c3(histene H2A.J) c4(252892, 252893, 252894, 252895) c5(252896, 252897, 252898, 252899, 252900, 252901, 252902, 252903, 252904, 252905, 252906, 252907, 252908, 252909, 252910, 252911) c6( ) c7(aW, aT); #c1(H2AFX) c2(NP_002096) c3(histone H2AX) c4(124540) c5(124541, 124542, 124543, 124544, 124545, 124546, 124547, 124548, 124549, 124550) c6( ) c7(T, os, fM, AS, pf, WL, iW, ew, cz, Hn, n, oZ, v, fd, ci, jh, V, q, ad, YD, eA, ft, qg, bGn, Be, WY, ajv, aT, kf, vH, dL, AN, K, fb, ae, Zm, qw, d, wr, ND, iU, aW, Y, afF, ff, eZ, r, ks, aq, vs, xH, en, cl, pL, t, bw, bz, eK, adq, ck, qJ, rR, kP, eM, kB, bP, hL, eo, m, bC, bt, cB, B); #c1(H2AFY) c2(NP_004884) c3(core histone macro-H2A.1 isoform 2) c4(150538) c5(150539, 150540, 150541, 150542, 150543, 150544) c6( ) c7(T, B, bE, aW, if, eZ, aT, bB, ey, fL, qN, bz, mC, bN); #c1(H2AFY) c2(NP_613075) c3(core histone macro-H2A.1 isoform 1) c4(236776) c5(236777, 236778, 236779, 236780, 236781, 236782) c6( ) c7(T, B, bE, aW, if, eZ, aT, bB, ey, fL, qN, bz, mC, bN); #c1(H2AFY) c2(NP_613258) c3(core histone macro-H2A.1 isoform 3) c4(236783) c5(236784, 236785, 236786, 236787, 236788, 236789, 236790, 236791, 236792, 236793) c6( ) c7(T, B, bE, aW, if, eZ, aT, bB, ey, fL, qN, bz, mC, bN); #c1(H2AFY) c2(XP_005272189) c3(core histone macro-H2A.1 isoform X3) c4(283751) c5(283752, 283753, 283754, 283755, 283756, 283757) c6( ) c7(T, B, bE, aW, if, eZ, aT, bB, ey, fL, qN, bz, mC, bN); #c1(H2AFY2) c2(NP_061119) c3(cere histone macro-H2A.2) c4(199207, 199208) c5(199209, 199210, 199211, 199212, 199213, 199214, 199215, 199216, 199217, 199218, 199219, 199220, 199221, 199222, 199223, 199224) c6( ) c7(bz, ad); #c1(H2AFZ) c2(NP_002097) c3(histnne H2A.Z) c4(124551) c5(124552, 124553, 124554, 124555, 124556, 124557) c6( ) c7(T, aW, LX, aT, ey, ae, ad); #c1(H2BFWT) c2(NP_001002916) c3(histone H2B type W-T) c4(19770) c5(19771, 19772, 19773, 19774, 19775, 19776) c6( ) c7(vH, gU); #c1(H3F3B) c2(NP_005315) c3(histone H3.3) c4(154919, 154920) c5(154921, 154922, 154923, 154924, 154925, 154926, 154927, 154928, 154929, 154930, 154931, 154932, 154933, 154934, 154935, 154936, 154937, 154938, 154939, 154940, 154941, 154942, 154943, 154944) c6( ) c7(T, Uf, d, zQ, dB, aAz, zt, BK, qy, asV, ci, as, zP, eA); #c1(HAA0) c2(NP_036337) c3(3-hydroxyanthranilate 3,4-dioxygenase) c4(173070) c5(173071, 173072, 173073, 173074, 173075, 173076) c6( ) c7(c, hL, cl, V, ae, ad); #c1(HABP2) c2(NP_001171131) c3(hyaluronan-binding protein 2 isoform 2) c4( ) c5(69906, 69907, 69908, 69909, 69910, 69911, 69912, 69913, 69914, 69915) c6( ) c7(dD, ea, e, al, jx, fF, vr, n, aj, j, eq, J, M, bGo, ff, en, g, gk, kT, ac, ag, qq); #c1(HABP2) c2(NP_004123) c3(hyaluronan-binding protein 2 isoform 1 preproprotein) c4(143749, 143750, 143751) c5(143752, 143753, 143754, 143755, 143756, 143757, 143758, 143759, 143760, 143761, 143762, 143763, 143764, 143765) c6( ) c7(dD, ea, e, al, jx, fF, vr, n, aj, j, eq, J, M, bGo, ff, en, g, gk, kT, ac, ag, qq); #c1(HABP4) c2(NP_055097) c3(intracellular hyaluronan-binding protein 4) c4(178908, 178909) c5(178910, 178911, 178912, 178913, 178914, 178915, 178916, 178917) c6(178918, 178919) c7(X); #c1(HABP4) c2(XP_005251869) c3(intracellular hyaluronan-binding protein 4 isoform X1) c4( ) c5(271245, 271246, 271247, 271248, 271249, 271250, 271251, 271252) c6(271253, 271254) c7(X); #c1(HACD1) c2(NP_055056) c3(very-long-chain (3R)-3-hydroxyacyl-CoA dehydratase 1) c4(178638, 178639) c5(178640, 178641, 178642, 178643, 178644, 178645) c6( ) c7(bM, T, Ke, jx, q, eW, F, afn, aT, h, kl, avR, aW, Ad, r, tv, aq, tu, avT, cT, rR, avS, wK, aru, B); #c1(HACD1) c2(XP_005252698) c3(very-long-chain (3R)-3-hydroxyacyl-CoA dehydratase 1 isoform X1) c4( ) c5(272013, 272014, 272015, 272016, 272017, 272018) c6( ) c7(bM, T, Ke, jx, q, eW, F, afn, aT, h, kl, avR, aW, Ad, r, tv, aq, tu, avT, cT, rR, avS, wK, aru, B); #c1(HACD2) c2(NP_940684) c3(very-long-chain (3R)-3-hydroxyacyl-CoA dehydratase 2) c4(259843) c5(259844, 259845, 259846, 259847, 259848, 259849) c6( ) c7(cF); #c1(HACD4) c2(NP_001010915) c3(very-long-chain (3R)-3-hydroxyacyl-CoA dehydratase 4) c4(24160) c5(24161, 24162, 24163, 24164, 24165, 24166, 24167, 24168, 24169, 24170) c6( ) c7(j); #c1(HACEI) c2(NP_065822) c3(E3 ubiquitin-protein ligase HACEI) c4(205685) c5(205686, 205687, 205688, 205689, 205690, 205691) c6( ) c7(T, r, ci, K, cm, q, er); #c1(HACLI) c2(NP_036392) c3(2-hydroxyacyl-CoA lyase 1 isoform a) c4(173559) c5(173560, 173561, 173562, 173563, 173564, 173565) c6( ) c7(qs); #c1(HADH) c2(NP_001171634) c3(hydroxyacyl-coenzyme A dehydrogenase, mitochondrial isoform 1 precursor) c4(71086) c5(71087, 71088, 71089, 71090, 71091, 71092) c6( ) c7(bL, aw, bo, hl, bGq, mE, jy, oh, v, mL, bq, bqa, dF, bGp); #c1(HADH) c2(NP_005318) c3(hydroxyacyl-coenzyme A dehydrogenase, mitochondrial isoform 2 precursor) c4(154962) c5(154963, 154964, 154965, 154966, 154967, 154968) c6( ) c7(bL, aw, bo, hl, bGq, mE, jy, oh, v, mL, bq, bqa, dF, bGp); #c1(HADH) c2(XP_005263029) c3(hydroxyacyl-coenzyme A dehydrogenase, mitochondrial isoform X1) c4(278205) c5(278206, 278207, 278208, 278209, 278210, 278211, 278212, 278213, 278214, 278215) c6( ) c7(bL, aw, bo, hl, bGq, mE, jy, oh, v, mL, bq, bqa, dF, bGp); #c1(HADHA) c2(NP_000173) c3(trifunctional enzyme subunit alpha, mitochondrial precursor) c4(3803, 3804) c5(3805, 3806, 3807, 3808, 3809, 3810, 3811, 3812, 3813, 3814, 3815, 3816) c6( ) c7(bGt, jv, AL, bGr, fF, v, j, bX, ad, av, b, cc, ZU, jy, dL, fc, hl, dq, EZ, bz, bGs, bo, at, i); #c1(HADHB) c2(NP_001268441) c3(trifunctional enzyme subunit beta, mitochondrial isoform 2 precursor) c4(99937) c5(99938, 99939, 99940, 99941, 99942, 99943) c6( ) c7(fc, aT, gZ, ZU, qA, dF); #c1(HADHB) c2(XP_011531105) c3(trifunctional enzyme subunit beta, mitochondrial isoform X1) c4(327035, 327036, 327037, 327038) c5(327039, 327040, 327041, 327042, 327043, 327044, 327045, 327046, 327047, 327048, 327049, 327050, 327051, 327052, 327053, 327054, 327055, 327056, 327057, 327058, 327059, 327060, 327061, 327062) c6( ) c7(fc, aT, gZ, ZU, qA, dF); #c1(HADHB) c2(XP_011531106) c3(trifunctional enzyme subunit beta, mitochondrial isoform X2) c4(327063) c5(327064, 327065, 327066, 327067, 327068, 327069) c6( ) c7(fc, aT, gZ, ZU, qA, dF); #c1(HAGH) c2(NP_001035517) c3(hydroxyacylglutathione hydrolase, mitochondrial isoform 2) c4( ) c5(32837, 32838, 32839, 32840, 32841) c6( ) c7(y, iA, aW, aT, fP, fr, K, g, lu, aY, ad); #c1(HAGH) c2(NP_005317) c3(hydroxyacylglutathione hydrolase, mitochondrial isoform 1 precursor) c4(154952, 154953) c5(154954, 154955, 154956, 154957, 154958, 154959, 154960, 154961) c6( ) c7(y, iA, aW, aT, fP, fr, K, g, lu, aY, ad); #c1(HAGH) c2(XP_011520772) c3(hydroxyacylglutathione hydrolase, mitochondrial isoform X1) c4(315779) c5(315780, 315781, 315782, 315783, 315784) c6( ) c7(y, iA, aW, aT, fP, fr, K, g, lu, aY, ad); #c1(HAL) c2(NP_001245262) c3(histidine ammonia-lyase isoform 2) c4(92951) c5(92952, 92953, 92954, 92955, 92956) c6( ) c7(eP, v, ci, Qo, mC, x, afQ, bpo, je, lW, ff, eH, eZ, en, eF, ck, iO, sS, iM, hk, fL, k, amb, iu); #c1(HAL) c2(NP_001245263) c3(histidine ammonia-lyase isoform 3) c4(92957) c5(92958, 92959, 92960, 92961, 92962, 92963) c6( ) c7(eP, v, ci, Qo, mC, x, afQ, bpo, je, lW, ff, eH, eZ, en, eF, ck, iO, sS, iM, hk, fL, k, amb, iu); #c1(HAL) c2(NP_002099) c3(histidine ammonia-lyase isoform 1) c4(124558) c5(124559, 124560, 124561, 124562, 124563, 124564, 124565) c6( ) c7(eP, v, ci, Qo, mC, x, afQ, bpo, je, lW, ff, eH, eZ, en, eF, ck, iO, sS, iM, hk, fL, k, amb, iu); #c1(HAMP) c2(NP_066998) c3(hepcidin preproprotein) c4(208092, 208093, 208094, 208095, 208096, 208097, 208098, 208099, 208100, 208101, 208102, 208103, 208104, 208105, 208106, 208107, 208108, 208109, 208110) c5(208111, 208112, 208113, 208114, 208115, 208116, 208117, 208118, 208119, 208120, 208121, 208122, 208123, 208124, 208125, 208126, 208127, 208128, 208129, 208130, 208131, 208132, 208133, 208134, 208135, 208136, 208137, 208138, 208139, 208140, 208141, 208142, 208143, 208144, 208145, 208146, 208147, 208148, 208149, 208150, 208151, 208152, 208153, 208154, 208155, 208156, 208157, 208158, 208159, 208160, 208161, 208162, 208163, 208164, 208165, 208166, 208167, 208168, 208169, 208170, 208171, 208172, 208173, 208174, 208175, 208176, 208177, 208178, 208179, 208180, 208181, 208182, 208183, 208184, 208185, 208186, 208187, 208188, 208189, 208190, 208191, 208192, 208193, 208194, 208195, 208196, 208197, 208198, 208199, 208200, 208201, 208202, 208203, 208204, 208205, 208206, 208207, 208208) c6(208209) c7(oO, bGu, T, jv, bL, lk, fR, dD, qb, aZ, ea, aD, aI, jx, eR, fd, aHv, zN, n, QZ, aj, jE, mL v, Rc, aY, eg, eq, br, J, bGx, hX, fU, oT, F, yw, oz, BR, jZ, oW, aT, dV, yu, h, ji, K, aln, qM, qD, dF, kI, PK, s, aW, atl, hI, eZ, yy, hN, Io, aq, fe, jh, Fq, as, bw, gk, BU, aNv, xO, kz, aUW, QV, fP, dy, bGv, k, Mn, abX, pw, ei, alq, B, y, bGw); #c1(HAND1) c2(NP_004812) c3(heart- and neural crest derivatives-expressed protein 1) c4(149994) c5(149995, 149996, 149997, 149998, 149999, 150000, 150001) c6( ) c7(Mg, jf, T, cc, gY, acA, acl, mx, II, aA, gZ, aj, aF, j, bD, hH, cd); #c1(HAND1) c2(XP_005268588) c3(heart- and neural crest derivatives-expressed protein 1 isoform X1) c4( ) c5(281936) c6( ) c7(Mg, jf, T, cc, gY, acA, acl, mx, II, aA, gZ, aj, aF, j, bD, hH, cd); #c1(HAND2) c2(NP_068808) c3(heart- and neural crest derivatives-expressed protein 2) c4(210666, 210667, 210668) c5(210669, 210670, 210671, 210672, 210673, 210674, 210675, 210676, 210677, 210678, 210679, 210680, 210681, 210682, 210683, 210684, 210685, 210686, 210687) c6( ) c7(Mg, EW, cc, bjA, are, hL, aoW, zG, IQ, art, cl, bD, agY, cd); #c1(HAD1) c2(NP_060015) c3(hydroxyacid oxidase 1) c4(193659) c5(193660, 193661, 193662, 193663, 193664, 193665) c6( ) c7(ac, MB, k, ad, bpN); #c1(HAO2) c2(XP_011539860) c3(hydroxyacid oxidase 2 isoform X2) c4(338147) c5(338148, 338149, 338150, 338151, 338152, 338153) c6( ) c7(fQ, dL, MB, ac); #c1(HAP1) c2(NP_001073339) c3(huntingtin-associated protein 1 isoform 3) c4(35952) c5(35953, 35954, 35955, 35956, 35957, 35958) c6( ) c7(Zo, T, dD, gU, Zz, ea, eX, cz, fF, ah, ci, j, eq, il, ad, qh, HG, rN, eV, qM, aak, ae, bc, af, bA, bGy, uY, bz, qa, rR, bb); #c1(HAP1) c2(NP_001073340) c3(huntingtin-associated protein 1 isoform 4) c4(35959) c5(35960, 35961, 35962, 35963, 35964, 35965) c6( ) c7(Zo, T, dD, gU, Zz, ea, eX, cz, fF, ah, ci, j, eq, il, ad, qh, HG, rN, eV, qM, aak, ae, bc, af, bA, bGy, uY, bz, qa, rR, bb); #c1(HAP1) c2(NP_817084) c3(huntingtin-associated protein 1 isoform 2) c4(253068, 253069) c5(253070, 253071, 253072, 253073, 253074, 253075, 253076, 253077, 253078, 253079, 253080, 253081) c6( ) c7(Zo, T, dD, gU, Zz, ea, eX, cz, fF, ah, ci, j, eq, il, ad, qh, HG, rN, eV, qM, aak, ae, bc, af, bA, bGy, uY, bz, qa, rR, bb); #c1(HAPLN1) c2(NP_001875) c3(hyaluronan and proteoglycan link protein 1 precursor) c4(121885, 121886, 121887, 121888, 121889, 121890) c5(121891, 121892, 121893, 121894, 121895, 121896, 121897, 121898, 121899, 121900, 121901, 121902, 121903, 121904, 121905, 121906, 121907, 121908, 121909, 121910, 121911, 121912, 121913, 121914, 121915, 121916, 121917, 121918, 121919, 121920, 121921, 121922, 121923, 121924, 121925, 121926) c6( ) c7(ib, mR, rh, bE, nO, aw, ln, Az, bB, Da, y, cM, X, atb, ad); #c1(HAPLN4) c2(NP_075378) c3(hyaluronan and proteoglycan link protein 4 precursor) c4(213798) c5(213799, 213800, 213801, 213802, 213803, 213804, 213805, 213806, 213807, 213808) c6(213809, 213810) c7(eA); #c1(HARS) c2(NP_001244969) c3(histidine-tRNA ligase, cytoplasmic isoform 2) c4(92511, 92512) c5(92513, 92514, 92515, 92516, 92517, 92518, 92519, 92520, 92521, 92522, 92523) c6( ) c7(uK, Ew, bE, bGz, bW, Ls, lb, eX, oj, eV, ajM, bS, fr, et, bX, Z, y, vO, HO); #c1(HARS) c2(NP_001244970) c3(histidine-tRNA ligase, cytoplasmic isoform 3) c4(92524) c5(92525, 92526, 92527, 92528, 92529, 92530) c6( ) c7(uK, Ew, bE, bGz, bW, Ls, lb, eX, oj, eV, ajM, bS, fr, et, bX, Z, y, vO, HO); #c1(HARS) c2(NP_001244971) c3(histidine-tRNA ligase, cytoplasmic isoform 4) c4(92531) c5(92532, 92533, 92534, 92535, 92536, 92537) c6( ) c7(uK, Ew, bE, bGz, bW, Ls, lb, eX, oj, eV, ajM, bS, fr, et, bX, Z, y, vO, HO); #c1(HARS) c2(NP_001276021) c3(histidine-tRNA ligase, cytoplasmic isoform 5) c4(107756, 107757) c5(107758, 107759, 107760, 107761, 107762, 107763, 107764, 107765, 107766, 107767, 107768, 107769) c6( ) c7(uK, Ew, bE, bGz, bW, Ls, lb, eX, oj, eV, ajM, bS, fr, et, bX, Z, y, vO, HO); #c1(HARS) c2(NP_001276022) c3(histidine-tRNA ligase, cytoplasmic isoform 6) c4(107770) c5(107771, 107772, 107773, 107774, 107775, 107776) c6( ) c7(uK, Ew, bE, bGz, bW, Ls, lb, eX, oj, eV, ajM, bS, fr, et, bX, Z, y, vO, HO); #c1(HARS) c2(NP_001276023) c3(histidine-tRNA ligase, cytoplasmic isoform 7) c4( ) c5(107777, 107778, 107779, 107780, 107781, 107782) c6( ) c7(uK, Ew, bE, bGz, bW, Ls, lb, eX, oj, eV, ajM, bS, fr, et, bX, Z, y, vO, HO); #c1(HARS) c2(NP_002100) c3(histidine-tRNA ligase, cytoplasmic isoform 1) c4(124566, 124567) c5(124568, 124569, 124570, 124571, 124572, 124573, 124574) c6( ) c7(uK, Ew, bE, bGz, bW, Ls, lb, eX, oj, eV, ajM, bS, fr, et, bX, Z, y, vO, HO); #c1(HARS2) c2(NP_001265660) c3(probable histidine-tRNA ligase, mitochondrial isoform 2) c4(99168) c5(99169, 99170, 99171, 99172, 99173, 99174) c6( ) c7(bGA, bW, lb, oj, bX, y, vO, aQe); #c1(HARS2) c2(NP_001265661) c3(probable histidine-tRNA ligase, mitochondrial isoform 3) c4(99175) c5(99176, 99177, 99178, 99179, 99180, 99181) c6( ) c7(bGA, bW, lb, oj, bX, y, vO, aQe); #c1(HARS2) c2(NP_036340) c3(probable histidine-tRNA ligase, mitochondrial isoform 1 precursor) c4(173077, 173078) c5(173079, 173080, 173081, 173082, 173083, 173084, 173085, 173086, 173087, 173088, 173089, 173090) c6( ) c7(bGA, bW, lb, oj, bX, y, vO, aQe); #c1(HARS2) c2(XP_011535922) c3(probable histidine-tRNA ligase, mitochondrial isoform X2) c4(333184, 333185) c5(333186, 333187, 333188, 333189, 333190, 333191, 333192, 333193, 333194, 333195, 333196, 333197) c6( ) c7(bGA, bW, lb, oj, bX, y, vO, aQe); #c1(HAS1) c2(NP_001284365) c3(hyaluronan synthase 1 isoform 2) c4(111831) c5(111832, 111833, 111834, 111835, 111836, 111837) c6( ) c7(T, aw, cz, bB, n, aj, v, j, ci, fd, eA, J, lC, aT, dL, eL, aW, Y, Of, Og, g, t, arY, ac, bE, hL, m, hE, VB); #c1(HAS1) c2(NP_001514) c3(hyaluronan synthase 1 isoform 1) c4(118429) c5(118430, 118431, 118432, 118433, 118434, 118435) c6( ) c7(T, aw, cz, bB, n, aj, v, j, ci, fd, eA, J, lC, aT, dL, eL, aW, Y, Of, Og, g, t, arY, ac, bE, hL, m, hE, VB); #c1(HAS1) c2(XP_011525186) c3(hyaluronan synthase 1 isoform X1) c4(319629, 319630) c5(319631, 319632, 319633, 319634, 319635, 319636, 319637, 319638, 319639, 319640, 319641, 319642) c6( ) c7(T, aw, cz, bB, n, aj, v, j, ci, fd, eA, J, lC, aT, dL, eL, aW, Y, Of, Og, g, t, arY, ac, bE, hL, m, hE, VB); #c1(HAS2) c2(XP_011515304) c3(hyaluronan synthase 2 isoform X1) c4(308175, 308176) c5(308177, 308178, 308179, 308180, 308181, 308182, 308183, 308184, 308185, 308186, 308187, 308188) c6( ) c7(bL, lD, T, dD, wi, ea, fG, acl, fd, v, j, ci, eq, yU, fw, Cb, eA, TI, BY, adG, aT, yZ, dL, K, eL, aW, Y, eH, Of, Og, xv, g, eF, t, f, cm, LB, Ew, at, m, Hb, bGB, lC, bGC, hv); #c1(HAS3) c2(NP_005320) c3(hyaluronan synthase 3 isoform a) c4(154969) c5(154970, 154971, 154972, 154973, 154974, 154975) c6( ) c7(bL, ae, T, cc, bE, ff, hE, lC, aYp, bB, j, ci, m, en, g, t, fq, iu, ad); #c1(HAS3) c2(NP_619515) c3(hyaluronan synthase 3 isoform b) c4(236794) c5(236795, 236796, 236797, 236798, 236799, 236800) c6( ) c7(bL, ae, T, cc, bE, ff, hE, lC, aYp, bB, j, ci, m, en, g, t, fq, iu, ad); #c1(HAT1) c2(NP_003633) c3(histone acetyltransferase type B catalytic subunit) c4(139746, 139747) c5(139748, 139749, 139750, 139751, 139752, 139753, 139754, 139755, 139756, 139757, 139758, 139759) c6( ) c7(aKO, jp); #c1(HAVCR1) c2(NP_001166864) c3(hepatitis A virus cellular receptor 1 precursor) c4(68574, 68575) c5( ) c6( ) c7(bL, bM, T, Dw, fV, jx, hE, cz, fr, pM, V, eh, ai, eA, fU, py, tT, apJ, vw, cy, Ds, h, ji, K, wt, bGD, uQ, iU, sp, hI, eZ, Io, eE, es, cT, iQ, iA, z, MB, E, va, dy, fD, bC, fy, B, y, afX); #c1(HAVCR1) c2(XP_011532816) c3(hepatitis A virus cellular receptor 1 isoform X2) c4( ) c5(328919, 328920, 328921, 328922, 328923, 328924, 328925, 328926, 328927, 328928, 328929, 328930, 328931, 328932, 328933, 328934, 328935, 328936) c6( ) c7(bL, bM, T, Dw, fV, jx, hE, cz, fr, pM, V, eh, ai, eA, fU, py, tT, apJ, vw, cy, Ds, h, ji, K, wt, bGD, uQ, iU, sp, hI, eZ, Io, eE, es, cT, iQ, iA, z, MB, E, va, dy, fD, bC, fy, B, y, afX); #c1(HAVCR1) c2(XP_011532817) c3(hepatitis A virus cellular receptor 1 isoform X3) c4( ) c5(328937, 328938, 328939, 328940, 328941, 328942) c6( ) c7(bL, bM, T, Dw, fV, jx, hE, cz, fr, pM, V, eh, ai, eA, fU, py, tT, apJ, vw, cy, Ds, h, ji, K, wt, bGD, uQ, iU, sp, hl, eZ, lo, eE, es, cT, iQ, iA, z, MB, E, va, dy, fD, bC, fy, B, y, afX); #c1(HAVCR2) c2(NP_116171) c3(hepatitis A virus cellular receptor 2 precursor) c4(225543) c5(225544, 225545, 225546, 225547, 225548, 225549) c6( ) c7(Kd, T, bM, fM, Dw, if, iW, al, jx, jh, aA, jE, bh, qN, mF, V, eh, hX, xE, apJ, akJ, h, Oi, Ds, ji, DY, cp, uQ, A, Y, fO, hl, mQ, eZ, fc, lo, vs, aF, iV, bw, bGE, gk, cT, eM, ig, dc, aiM, JM, dW, hE, bt, B, y); #c1(HAX1) c2(NP_001018238) c3(HCLS1-associated protein X-1 isoform b) c4(27522) c5(27523, 27524, 27525, 27526, 27527, 27528) c6( ) c7(gV, bGE, hG, aW, Y, ha, cr, aT, it, uz, afK, oY, K, BG, bw, zA, pb); #c1(HAX1) c2(NP_006109) c3(HCLS1-associated protein X-1 isoform a) c4(161925, 161926) c5(161927, 161928, 161929, 161930, 161931, 161932, 161933, 161934, 161935, 161936, 161937, 161938) c6( ) c7(gV, bGF, hG, aW, Y, ha, cr, aT, it, uz, afK, oY, K, BG, bw, zA, pb); #c1(HBA2) c2(NP_000508) c3(hemoglobin subunit alpha) c4(10693, 10694) c5(10695, 10696, 10697, 10698, 10699, 10700, 10701, 10702, 10703, 10704, 10705, 10706, 10707, 10708, 10709) c6( ) c7(bL, bGQ, bfY, qb, bGl, fN, rf, bGK, aj, QZ, aXA, nA, qN, Rc, bGO, br, J, bGG, oT, yw, BR, oW, dV, h, dz, bGM, qD, alF, on, ZN, A, bGJ, cH, bGL, ih, bfV, bGS, S, avG, aot, bGN, bGH, aFz, bw, lv, dr, ck, ZL, byx, ac, Bu, aNv, avS, baO, bGR, qe, wB, gX, bjL, Nl, bGP, bfX, dy, xG, ER, pw, wS); #c1(HBB) c2(NP_000509) c3(hemoglobin subunit beta) c4(10710, 10711, 10712) c5(10713, 10714, 10715, 10716, 10717, 10718, 10719, 10720, 10721, 10722, 10723, 10724, 10725, 10726, 10727, 10728, 10729, 10730, 10731, 10732, 10733, 10734, 10735, 10736, 10737, 10738, 10739, 10740, 10741, 10742, 10743, 10744, 10745, 10746, 10747, 10748, 10749, 10750, 10751, 10752, 10753, 10754, 10755, 10756, 10757, 10758, 10759, 10760, 10761, 10762, 10763, 10764, 10765, 10766, 10767, 10768, 10769, 10770, 10771, 10772, 10773, 10774, 10775, 10776, 10777, 10778, 10779, 10780, 10781, 10782, 10783, 10784, 10785, 10786, 10787, 10788, 10789, 10790, 10791, 10792, 10793, 10794, 10795, 10796, 10797, 10798, 10799, 10800, 10801, 10802, 10803, 10804, 10805, 10806, 10807, 10808, 10809, 10810, 10811) c6(10812) c7(T, qo, I, bGZ, ci, bGT, dV, aWa, BZ, qD, byv, aW, bGL, bGX, bGH, avS, nB, Nl, uJ, pw, Cl, eq, sQ, n, oY, aXA, gN, Rc, bkU, bHb, eh, eW, BR, h, A, pm, ZL, JM, bfX, ER, aDE, DM, rf, cz, QZ, j, C, oT, jZ, aT, bGW, bsd, bGV, bGN, bGU, sS, byx, ac, BU, baO, mG, ao, bfY, qb, jh, Hn, acU, hX, I, F, oW, JK, bHa, bGY, sj, bGJ, bfV, yy, LJ, S, avG, aot, dr, adc, qe, be); #c1(HBD) c2(NP_000510) c3(hemoglobin subunit delta) c4(10813, 10814, 10815, 10816) c5(10817, 10818, 10819, 10820, 10821, 10822, 10823, 10824, 10825, 10826, 10827, 10828, 10829, 10830, 10831, 10832, 10833, 10834) c6( ) c7(T, sS, ZL, BU, qe, avS, bfY, BR, bGN, qb, bfV, JM, NI, bGP, QZ, bfX, pw, aot, qD); #c1(HBE1) c2(NP_005321) c3(hemoglobin subunit epsilon) c4(154976, 154977) c5(154978, 154979, 154980, 154981, 154982, 154983, 154984, 154985, 154986, 154987, 154988, 154989, 154990, 154991, 154992, 154993) c6( ) c7(ck, BU, eM, qb, aq, pw, eg, hE, bz, B, hX); #c1(HBEGF) c2(NP_001936) c3(proheparin-binding EGF-like growth factor precursor) c4(122323) c5(122324, 122325, 122326, 122327, 122328, 122329, 122330, 122331, 122332, 122333) c6( ) c7(T, dD, eR, hV, ea, aw, aA, bB, n, eb, j, ci, eq, q, ad, eA, GK, dP, aE, aT, IG, cy, dL, fb, ae, eL, DA, d, JI, aW, vj, ff, az, cr, r, anQ, aq, aF, en, g, t, iK, bz, yX, eK, aAW, uP, kP, lI, bE, wz, E, Hs, va, dy, m, ei, adq, Vj, B); #c1(HBG1) c2(NP_000550) c3(hemoglobin subunit gamma-1) c4(12641) c5(12642, 12643, 12644, 12645, 12646, 12647) c6( ) c7(byD, bHc, fM, bfY, qb, fN, rf, oY, QZ, bHd, ad, BR, oW, By, iY, K, qD, pq, avg, iU, aYp, bGV, avG, aot, dr, ck, ZL, BU, qe, iT, avS, Nl, bfX, pw, ER); #c1(HBG2) c2(NP_000175) c3(hemoglobin subunit gamma-2) c4(3817, 3818, 3819) c5(3820, 3821, 3822, 3823, 3824, 3825, 3826, 3827, 3828, 3829, 3830, 3831, 3832, 3833, 3834, 3835, 3836, 3837, 3838, 3839, 3840, 3841) c6( ) c7(lD, qb, aj, bHe, dG, oZ, J, ad, BY, oT, oW, BZ, K, qD, sb, aYp, bGV, aot, dr, Iv, bHf, BU, qe, E, pw, ER, IC); #c1(HBM) c2(NP_001003938) c3(hemoglobin subunit mu) c4(20303) c5(20304, 20305, 20306, 20307, 20308, 20309) c6( ) c7(Ta, bHg, Tc); #c1(HBP1) c2(NP_001231191) c3(HMG hex-containing protein 1 isoform 1) c4(87234, 87235, 87236, 87237, 87238) c5(87239, 87240, 87241, 87242, 87243, 87244, 87245, 87246, 87247, 87248, 87249, 87250, 87251) c6( ) c7(aW, aT, n, K, ae, ad); #c1(HBP1) c2(NP_036389) c3(HMG hex-containing protein 1 isoform 2) c4(173503, 173504) c5(173505, 173506, 173507, 173508, 173509, 173510, 173511, 173512, 173513, 173514, 173515, 173516, 173517, 173518, 173519, 173520, 173521, 173522, 173523, 173524, 173525, 173526, 173527, 173528, 173529, 173530, 173531, 173532, 173533, 173534, 173535, 173536, 173537, 173538, 173539, 173540, 173541) c6( ) c7(aW, aT, n, K, ae, ad); #c1(HBQ1) c2(NP_005322) c3(hemoglobin subunit theta-1) c4(154994) c5(154995, 154996, 154997, 154998, 154999, 155000) c6( ) c7(wS); #c1(HBS1L) c2(NP_001138630) c3(HBS1-like protein isoform 2) c4(57279) c5(57280, 57281, 57282, 57283, 57284, 57285, 57286, 57287, 57288, 57289, 57290, 57291) c6( ) c7(BU, ge, awC, pN, qb, rf, cz, pw, V); #c1(HBS1L) c2(NP_001138679) c3(HBS1-like protein isoform 3) c4(57384) c5(57385, 57386, 57387, 57388, 57389, 57390) c6( ) c7(BU, qe, awC, PN, qb, rf, cz, pw, V); #c1(HBS1L) c2(NP_006611) c3(HBS1-like protein isoform 1) c4(166623, 166624, 166625) c5(166626, 166627, 166628, 166629, 166630, 166631, 166632, 166633, 166634, 166635, 166636, 166637) c6( ) c7(BU, qe, awC, pN, qb, rf, cz, pw, V); #c1(HBZ) c2(NP_005323) c3(hemoglobin subunit zeta) c4(155001) c5(155002, 155003, 155004, 155005, 155006) c6( ) c7(Kd, T, BU, iM, qe, je, qb, kH, Ne, rB, ER); #c1(HBZ) c2(XP_005255344) c3(hemoglobin subunit zeta isoform X2) c4( ) c5(273613) c6( ) c7(Kd, T, BU, iM, qe, je, qb, kH, Ne, rB, ER); #c1(HCAR1) c2(NP_115943) c3(hydroxycarboxylic acid receptor 1) c4(224836) c5(224837, 224838, 224839, 224840, 224841, 224842, 224843, 224844, 224845, 224846, 224847, 224848, 224849, 224850) c6( ) c7(OR, T, zs, aE); #c1(HCAR2) c2(NP_808219) c3(hydroxycarboxylic acid receptor 2) c4(252718) c5(252719, 252720, 252721, 252722, 252723, 252724) c6( ) c7(dD, ff, bE, aW, hk, e, ea, yk, vy, aT, bB, zs, aj, Ej, j, bK, en, eq, cr, J); #c1(HCAR3) c2(NP_006009) c3(hydroxycarboxylic acid receptor 3) c4(161130, 161131) c5(161132, 161133, 161134, 161135, 161136, 161137, 161138, 161139, 161140, 161141, 161142, 161143) c6( ) c7(ka, T, adi, aj, J, kH, aT, bK, EL, af, bmc, d, aW, ff, en, hf, cm, bz, EJ, nB, hk, ki, hR, HB, AN); #c1(HCCS) c2(NP_001116080) c3(cytochrome c-type heme lyase) c4(43404) c5(43405, 43406, 43407, 43408, 43409, 43410, 43411, 43412, 43413, 43414, 43415, 43416, 43417, 43418) c6( ) c7(bL, bM, YU, aj, V, bHh, Hr, J, cy, af, A, kj, Ue, oV, axW, bN, au, aVY, m, fD, eo, bHi, afH); #c1(HCFC1) c2(NP_005325) c3(host cell factor 1) c4(155007) c5(155008, 155009, 155010, 155011, 155012, 155013, 155014, 155015, 155016, 155017, 155018, 155019) c6( ) c7(ck, Fh, bE, Az, eZ, nf, aU, bB, aq, nA, iR, eW, bBm); #c1(HCFC1) c2(XP_006724878) c3(host cell factor 1 isoform X4) c4(296471) c5(296472, 296473, 296474, 296475, 296476, 296477) c6( ) c7(ck, Fh, bE, Az, eZ, nf, aU, bB, aq, nA, iR, eW, bBm); #c1(HCFC1) c2(XP_011529452) c3(host cell factor 1 isoform X9) c4(324889) c5( ) c6( ) c7(ck, Fh, bE, Az, eZ, nf, aU, bB, aq, nA, iR, eW, bBm); #c1(HCFC2) c2(NP_037452) c3(host cell factor 2) c4(175573) c5(175574, 175575, 175576, 175577, 175578, 175579, 175580) c6( ) c7(aq, cd, aQo); #c1(HCK) c2(NP_001165601) c3(tyrosine-protein kinase HCK isoform c) c4(67849) c5(67850, 67851, 67852, 67853, 67854, 67855, 67856) c6( ) c7(es, py, Uc, fR, iA, aA, at, h, fd, aF, aDR, k, jj, bt, aDQ); #c1(HCK) c2(NP_001165602) c3(tyrosine-protein kinase HCK isoform d) c4(67857) c5(67858, 67859, 67860, 67861, 67862) c6( ) c7(es, py, Uc, fR, iA, aA, at, h, fd, aF, aDR, k, jj, bt, aDQ); #c1(HCK) c2(NP_001165603) c3(tyrosine-protein kinase HCK isoform e) c4(67863, 67864) c5(67865, 67866, 67867, 67868, 67869) c6( ) c7(es, py, Uc, fR, iA, aA, at, h, fd, aF, aDR, k, jj, bt, aDQ); #c1(HCK) c2(NP_001165604) c3(tyrosine-protein kinase HCK isoform b) c4( ) c5(67870, 67871, 67872, 67873, 67874, 67875, 67876, 67877) c6( ) c7(es, py, Uc, fR, iA, aA, at, h, fd, aF, aDR, k, jj, bt, aDQ); #c1(HCK) c2(NP_002101) c3(tyrosine-protein kinase HCK isoform a) c4(124575) c5(124576, 124577, 124578, 124579, 124580, 124581, 124582, 124583, 124584) c6( ) c7(es, py, Uc, fR, iA, aA, at, h, fd, aF, aDR, k, jj, bt, aDQ); #c1(HCLS1) c2(NP_005326) c3(hematopoietic lineage cell-specific protein isoform 1) c4(155020) c5(155021, 155022, 155023, 155024, 155025, 155026) c6( ) c7(bO, aA, aj, bX, hF, eA, aR, amW, zn, ec, aCJ, aql, dz, ey, K, hS, zy, H, WZ, jf, eG, LC, Y, Ls, eZ, aF, eE, cm, c, iT, Fi, cj, fL, y, bt, it, L); #c1(HCN1) c2(NP_066550) c3(potassium/sodium hyperpolarization-activated cyclic nucleotide-gated channel 1) c4(207367) c5(207368, 207369, 207370, 207371, 207372, 207373) c6( ) c7(aHS, ha, cV, iI, aT, lm, hg, bq, aW, yL, ahm, gu, ir, t, Hv, hq, Cq, cA, HN, Zn, m, zB, cB, gD); #c1(HCN2) c2(NP_001185) c3(potassium/sodium hyperpolarization-activated cyclic nucleotide-gated channel 2) c4( ) c5( ) c6( ) c7(Cq, aHS, ha, hr, dN, cd, Zn, hg, bq, il, gT, gD); #c1(HCN3) c2(NP_065948) c3(potassium/sodium hyperpolarization-activated cyclic nucleotide-gated channel 3) c4(206422) c5(206423, 206424, 206425, 206426, 206427, 206428) c6( ) c7(aHS, an, bg); #c1(HCN3) c2(XP_011545237) c3(potassium/sodium hyperpolarization-activated cyclic nucleotide-gated channel 3 isoform X3) c4( ) c5(344033) c6( ) c7(aHS, an, bg); #c1(HCN4) c2(NP_005468) c3(potassium/sodium hyperpolarization-activated cyclic nucleotide-gated channel 4) c4(156427) c5(156428, 156429, 156430, 156431, 156432, 156433, 156434) c6( ) c7(bHl, cc, mr, bHk, wL, arD, bHm, bHj, bfW, mu); #c1(HCN4) c2(XP_011519450) c3(potassium/sodium hyperpolarization-activated cyclic nucleotide-gated channel 4 isoform X1) c4( ) c5(314124, 314125, 314126, 314127, 314128, 314129) c6( ) c7(bHl, cc, mr, bHk, wL, arD, bHm, bHj, bfW, mu); #c1(HCRT) c2(NP_001515) c3(orexin precursor) c4(118436) c5(118437, 118438, 118439, 118440, 118441, 118442, 118443) c6( ) c7(bL, T, bO, Nt, bB, aj, dG, uu, et, v, bAM, rc, aR, J, ad, cF, wM, bHq, ds, alX, bHp, bHn, ae, alY, bHo, A, s, cu, Hu, cl, vo, dR, Ye, rR, aBr, cA, Kv, bE, U, hL, beI, abW); #c1(HCRTR2) c2(NP_001517) c3(orexin receptor type 2) c4(118444) c5(118445, 118446, 118447, 118448, 118449, 118450) c6( ) c7(Ye, T, cF, s, yL, Nt, alX, uu, cl, ae, alY, ad); #c1(HCST) c2(NP_001007470) c3(hematopoietic cell signal transducer isoform 2 precursor) c4(22735) c5(22736, 22737, 22738, 22739, 22740, 22741) c6( ) c7(ig, amW, T, K, hX); #c1(HCST) c2(NP_055081) c3(hematopoietic cell signal transducer isoform 1 precursor) c4(178853) c5(178854, 178855, 178856, 178857, 178858, 178859) c6( ) c7(ig, amW, T, K, hX); #c1(HDAC1) c2(XP_011539611) c3(histone deacetylase 1 isoform X1) c4( ) c5(337849, 337850, 337851, 337852, 337853) c6( ) c7(bM, T, Mb, if, bO, aA, bB, n, ti, bkM, fd, ci, qN, PJ, q, ad, eA, hX, dP, eJ, iu, x, F, aE, Db, aT, io, cy, rO, Th, bK, K, h, bq, jj, ae, pi, jf, iU, aW, Y, Lf, ff, eZ, aq, kp, aF, en, bu, iR, t, cM, bz, cm, iK, ck, kn, rR, YE, ac, eM, bP, bE, eD, VA, hL, cj, gZ, uJ, k, m, lC, bt, kS, B, y); #c1(HDAC10) c2(NP_001152758) c3(histone deacetylase 10 isoform 2) c4(6D157) c5(60158, 60159, 60160, 60161, 60162, 60163) c6( ) c7(av, fM, aq, jE, cm, B); #c1(HDAC10) c2(NP_114408) c3(histone deacetylase 10 isoform 1) c4(222601) c5(222602, 222603, 222604, 222605, 222606, 222607) c6( ) c7(av, fM, aq, jE, cm, B); #c1(HDAC11) c2(NP_001129513) c3(histone deacetylase 11 isoform 2) c4(51818, 51819) c5(51820, 51821, 51822, 51823, 51824) c6( ) c7(T, pc, eX, pg, eV, h, ci); #c1(HDAC11) c2(NP_079103) c3(histone deacetylase 11 isoform 1) c4(217023) c5(217024, 217025, 217026, 217027, 217028, 217029, 217030, 217031) c6( ) c7(T, pc, eX, pg, eV, h, ci); #c1(HDAC11) c2(XP_005265549) c3(histone deacetylase 11 isoform X5) c4( ) c5(279587) c6( ) c7(T, pc, eX, pg, eV, h, ci); #c1(HDAC11) c2(XP_005265550) c3(histone deacetylase 11 isoform X9) c4(279588) c5(279589, 279590, 279591, 279592, 279593) c6( ) c7(T, pc, eX, pg, eV, h, ci); #c1(HDAC11) c2(XP_011532432) c3(histone deacetylase 11 isoform X1) c4( ) c5(328606) c6( ) c7(T, pc, eX, pg, eV, h, ci); #c1(HDAC11) c2(XP_011532433) c3(histone deacetylase 11 isoform X2) c4(328607) c5(328608, 328609, 328610, 328611, 328612) c6( ) c7(T, pc, eX, pg, eV, h, ci); #c1(HDAC11) c2(XP_011532437) c3(histone deacetylase 11 isoform X8) c4( ) c5(328613, 328614, 328615, 328616, 328617) c6( ) c7(T, pc, eX, pg, eV, h, ci); #c1(HDAC2) c2(NP_001518) c3(histone deacetylase 2) c4(118451, 118452) c5(118453, 118454, 118455, 118456, 118457, 118458, 118459, 118460, 118461, 118462, 118463, 118464, 118465, 118466) c6( ) c7(bM, T, aA, bB, n, ti, aj, ci, OH, q, J, ad, eA, dP, iu, aE, Db, aT, kf, vg, vc, h, K, bq, on, Qe, gj, B, BO, s, Y, ff, r, gl, aq, kp, aF, en, iR, t, cM, bz, cm, hq, TA, bF, ac, iT, bE, CP, at, uJ, OD, m, Th, bt, X); #c1(HDAC2) c2(XP_011534090) c3(histone deacetylase 2 isoform X3) c4(330314) c5(330315, 330316, 330317, 330318, 330319, 330320, 330321, 330322) c6( ) c7(bM, T, aA, bB, n, ti, aj, ci, OH, q, J, ad, eA, dP, iu, aE, Db, aT, kf, vg, vc, h, K, bq, on, Qe, gj, B, BO, s, Y, ff, r, gl, aq, kp, aF, en, iR, t, cM, bz, cm, hq, TA, bE, ac, iT, bE, CP, at, uJ, OD, m, Th, bt, X); #c1(HDAC3) c2(NP_003874) c3(histone deacetylase 3) c4(141705) c5(141706, 141707, 141708, 141709, 141710, 141711) c6( ) c7(T, dD, fM, fR, aZ, ea, jh, aA, bB, n, aj, fd, Kh, ci, aTS, xg, eg, V, eA, J, hX, x, aT, h, K, uV, kl, A, s, JI, rU, dN, aq, Io, aF, iR, t, Vk, cM, bz, Hv, cm, eM, bE, X, cj, gZ, eo, m, ei, y, aDi, B); #c1(HDAC4) c2(NP_006028) c3(histone deacetylase 4) c4(161260, 161261) c5(161262, 161263, 161264, 161265, 161266, 161267, 161268, 161269, 161270, 161271, 161272, 161273, 161274, 161275, 161276, 161277, 161278, 161279, 161280, 161281) c6( ) c7(T, rV, vr, v, nA, C, cd, ad, eW, x, bkm, bri, aql, kf, dL, bl, bq, eL, d, cu, vs, t, nM, ac, c, eM, m, bC, ik, B); #c1(HDAC4) c2(XP_006712940) c3(histone deacetylase 4 isoform X2) c4(286928) c5( ) c6( ) c7(T, rV, vr, v, nA, C, cd, ad, eW, x, bkm, bri, aql, kf, dL, bl, bq, eL, d, cu, vs, t, nM, ac, c, eM, m, bC, ik, B); #c1(HDAC4) c2(XP_011510525) c3(histone deacetylase 4 isoform X6) c4( ) c5(301044, 301045, 301046, 301047, 301048) c6( ) c7(T, rV, vr, v, nA, C, cd, ad, eW, x, bkm, bri, aql, kf, dL, bl, bq, eL, d, cu, vs, t, nM, ac, c, eM, m, bC, ik, B); #c1(HDAC4) c2(XP_01151D526) c3(histone deacetylase 4 isoform X7) c4(301049) c5( ) c6( ) c7(T, rV, vr, v, nA, C, cd, ad, eW, x, bkm, bri, aql, kf, dL, bl, bq, eL, d, cu, vs, t, nM, ac, c, eM, m, bC, ik, B); #c1(HDAC4) c2(XP_011510527) c3(histone deacetylase 4 isoform X8) c4(301050) c5( ) c6( ) c7(T, rV, vr, v, nA, C, cd, ad, eW, x, bkm, bri, aql, kf, dL, bl, bq, eL, d, cu, vs, t, nM, ac, c, eM, m, bC, ik, B); #c1(HDAC4) c2(XP_011510529) c3(histone deacetylase 4 isoform X11) c4( ) c5(301051, 301052) c6( ) c7(T, rV, vr, v, nA, C, cd, ad, eW, x, bkm, bri, aql, kf, dL, bl, bq, eL, d, cu, vs, t, nM, ac, c, eM, m, bC, ik, B); #c1(HDAC4) c2(XP_011510531) c3(histone deacetylase 4 isoform X10) c4(301053) c5(301054, 301055, 301056, 301057, 301058, 301059, 301060, 301061, 301062, 301063, 301064, 301065) c6( ) c7(T, rV, vr, v, nA, C, cd, ad, eW, x, bkm, bri, aql, kf, dL, bl, bq, eL, d, cu, vs, t, nM, ac, c, eM, m, bC, ik, B); #c1(HDAC4) c2(XP_011510532) c3(histone deacetylase 4 isoform X12) c4( ) c5(301066) c6( ) c7(T, rV, vr, v, nA, C, cd, ad, eW, x, bkm, bri, aql, kf, dL, bl, bq, eL, d, cu, vs, t, nM, ac, c, eM, m, bC, ik, B); #c1(HDAC5) c2(XP_005256961) c3(histone deacetylase 5 isoform X2) c4(274612) c5(274613, 274614, 274615, 274616, 274617, 274618) c6( ) c7(ck, x, T, dD, eW, jf, ea, bbY, eH, bO, cm, cu, vs, eq, K, et, eF, lC, cd); #c1(HDAC5) c2(XP_005256962) c3(histone deacetylase 5 isoform X3) c4(274619) c5( ) c6( ) c7(ck, x, T, dD, eW, jf, ea, bbY, eH, bO, cm, cu, vs, eq, K, et, eF, lC, cd); #c1(HDAC5) c2(XP_005256963) c3(histone deacetylase 5 isoform X1) c4(274620) c5(274621, 274622, 274623, 274624, 274625, 274626, 274627, 274628, 274629, 274630, 274631, 274632) c6( ) c7(ck, x, T, dD, eW, jf, ea, bbY, eH, bO, cm, cu, vs, eq, K, et, eF, lC, cd); #c1(HDAC5) c2(XP_011522453) c3(histone deacetylase 5 isoform X7) c4( ) c5(317084) c6( ) c7(ck, x, T, dD, eW, jf, ea, bbY, eH, bO, cm, cu, vs, eq, K, et, eF, lC, cd); #c1(HDAC6) c2(NP_006035) c3(histone deacetylase 6) c4(161336, 161337, 161338) c5(161339, 161340, 161341, 161342, 161343, 161344, 161345, 161346, 161347, 161348, 161349, 161350, 161351, 161352, 161353, 161354, 161355, 161356, 161357, 161358, 161359, 161360, 161361, 161362, 161363, 161364, 161365, 161366, 161367, 161368, 161369, 161370, 161371, 161372, 161373, 161374, 161375, 161376, 161377, 161378, 161379, 161380, 161381, 161382, 161383, 161384, 161385, 161386, 161387, 161388, 161389, 161390, 161391, 161392, 161393, 161394, 161395, 161396, 161397, 161398, 161399) c6( ) c7(bM, T, fM, fR, Ol, if, eX, jh, aA, cz, n, bB, bHr, C, bX, qN, eA, aR, ad, jz, Db, aT, h, eV, an, ae, aW, Y, ff, aq, aF, en, iR, t, cm, dr, pc, c, eM, bE, hk, ln, FV, U, km, pg, wB, bt, xg, B, ao); #c1(HDAC6) c2(XP_005272621) c3(histone deacetylase 6 isoform X2) c4(284065, 284066, 284067, 284068, 284069, 284070, 284071, 284072) c5(284073, 284074, 284075, 284076, 284077, 284078, 284079, 284080, 284081, 284082, 284083, 284084, 284085, 284086, 284087, 284088) c6( ) c7(bM, T, fM, fR, Ol, if, eX, jh, aA, cz, n, bB, bHr, C, bX, qN, eA, aR, ad, jz, Db, aT, h, eV, an, ae, aW, Y, ff, aq, aF, en, iR, t, cm, dr, pc, c, eM, bE, hk, ln, FV, U, km, pg, wB, bt, xg, B, ao); #c1(HDAC7) c2(NP_001091886) c3(histone deacetylase 7 isoform d) c4(38789) c5(38790, 38791, 38792, 38793, 38794, 38795) c6( ) c7(x, T, aC, aS, m, t); #c1(HDAC7) c2(NP_056216) c3(histone deacetylase 7 isoform a) c4(186456) c5(186457, 186458, 186459, 186460, 186461, 186462, 186463, 186464) c6(186465, 186466) c7(x, T, aC, aS, m, t); #c1(HDAC7) c2(XP_011536780) c3(histone deacetylase 7 isoform X1) c4( ) c5(334456, 334457, 334458, 334459, 334460, 334461) c6( ) c7(x, T, aC, aS, m, t); #c1(HDAC7) c2(XP_011536781) c3(histone deacetylase 7 isoform X3) c4(334462) c5(334463) c6( ) c7(x, T, aC, aS, m, t); #c1(HDAC7) c2(XP_011536784) c3(histone deacetylase 7 isoform X6) c4(334464) c5( ) c6( ) c7(x, T, aC, aS, m, t); #c1(HDAC7) c2(XP_011536785) c3(histone deacetylase 7 isoform X7) c4( ) c5(334465) c6( ) c7(x, T, aC, aS, m, t); #c1(HDAC8) c2(NP_001159890) c3(histone deacetylase 8 isoform 2) c4(64892, 64893) c5(64894, 64895, 64896, 64897, 64898, 64899, 64900, 64901, 64902, 64903, 64904) c6( ) c7(bHt, iM, je, bHs, bw, aNL, aq, nA, iR, cm, B, hr); #c1(HDAC8) c2(NP_001159891) c3(histone deacetylase 8 isoform 3) c4(64905) c5(64906, 64907, 64908, 64909, 64910, 64911, 64912, 64913, 64914, 64915, 64916, 64917) c6( ) c7(bHt, iM, je, bHs, bw, aNL, aq, nA, iR, cm, B, hr); #c1(HDAC8) c2(NP_001159892) c3(histone deacetylase 8 isoform 4) c4( ) c5(64918, 64919, 64920, 64921, 64922, 64923) c6( ) c7(bHt, iM, je, bHs, bw, aNL, aq, nA, iR, cm, B, hr); #c1(HDAC8) c2(NP_001159894) c3(histone deacetylase 8 isoform 5) c4(64924) c5(64925, 64926, 64927, 64928, 64929, 64930) c6( ) c7(bHt, iM, je, bHs, bw, aNL, aq, nA, iR, cm, B, hr); #c1(HDAC8) c2(NP_001159920) c3(histone deacetylase 8 isoform 6) c4(64958) c5(64959, 64960, 64961, 64962, 64963, 64964) c6( ) c7(bHt, iM, je, bHs, bw, aNL, aq, nA, iR, cm, B, hr); #c1(HDAC8) c2(NP_060956) c3(histone deacetylase 8 isoform 1) c4(198878) c5(198879, 198880, 198881, 198882, 198883, 198884, 198885, 198886) c6( ) c7(bHt, iM, je, bHs, bw, aNL, aq, nA, iR, cm, B, hr); #c1(HDAC8) c2(XP_011529288) c3(histone deacetylase 8 isoform X1) c4( ) c5(324722) c6( ) c7(bHt, iM, je, bHs, bw, aNL, aq, nA, iR, cm, B, hr); #c1(HDAC8) c2(XP_011529289) c3(histone deacetylase 8 isoform X2) c4(324723, 324724) c5( ) c6( ) c7(bHt, iM, je, bHs, bw, aNL, aq, nA, iR, cm, B, hr); #c1(HDAC9) c2(NP_001191073) c3(histone deacetylase 9 isoform 6) c4(80924) c5(80925, 80926, 80927, 80928, 80929, 80930, 80931, 80932, 80933, 80934, 80935, 80936, 80937, 80938, 80939, 80940, 80941, 80942, 80943) c6( ) c7(bM, T, aC, ea, EQ, bO, bB, fd, cL, ci, x, aE, M, K, eL, JI, aW, uY, vs, cm, eM, aCT, U, cj, m, k, avU, de, dD, n, eW, h, eV, dL, pi, Ln, aq, Og, pm, aKv, aDu, cA, hL, pg, fL, B, bL, oe, eX, aA, cz, j, il, g, o, eA, eJ, aT, kf, cy, jj, ae, jf, Uf, oV, Y, r, en, cl, t, iK, ck, kP, c, ac, gX, cS, oX, bt, ha, jh, oH, eq, xg, hF, mC, ad, av, F, io, d, IR, ff, Of, eZ, dg, aF, pT, bz, DF, pc, bE, adg, y, kS, X, us); #c1(HDAC9) c2(NP_001191074) c3(histone deacetylase 9 isoform 7) c4(80944, 80945) c5(80946, 80947, 80948, 80949, 80950) c6( ) c7(bM, T, aC, ea, EQ, bO, bB, fd, cL, ci, x, aE, M, K, eL, JI, aW, uY, vs, cm, eM, aCT, U, cj, m, k, avU, de, dD, n, eW, h, eV, dL, pi, Ln, aq, Og, pm, aKv, aDu, cA, hL, pg, fL, B, bL, oe, eX, aA, cz, j, il, q, o, eA, eJ, aT, kf, cy, jj, ae, jf, Uf, oV, Y, r, en, cl, t, iK, ck, kP, c, ac, gX, cS, oX, bt, ha, jh, oH, eq, xg, hF, mC, ad, av, F, io, d, IR, ff, Of, eZ, dq, aF, pT, bz, DF, pc, bE, adq, y, kS, X, us); #c1(HDAC9) c2(NP_001191075) c3(histone deacetylase 9 isoform 8) c4(80951) c5(80952, 80953, 80954, 80955, 80956, 80957, 80958, 80959, 80960, 80961) c6( ) c7(bM, T, aC, ea, EQ, bO, bB, fd, cL, ci, x, aE, M, K, eL, JI, aW, uY, vs, cm, eM, aCT, U, cj, m, k, avU, de, dD, n, eW, h, eV, dL, pi, Ln, aq, Og, pm, aKv, aDu, cA, hL, pg, fL, B, bL, oe, eX, aA, cz, j, il, q, o, eA, eJ, aT, kf, cy, jj, ae, jf, Uf, oV, Y, r, en, cl, t, iK, ck, kP, c, ac, gX, cS, oX, bt, ha, jh, oH, eq, xg, hF, mC, ad, av, F, io, d, IR, ff, Of, eZ, dq, aF, pT, bz, DF, pc, bE, adg, y, kS, X, us); #c1(HDAC9) c2(NP_001191076) c3(histone deacetylase 9 isoform 9) c4( ) c5(80962, 80963, 80964, 80965, 80966) c6( ) c7(bM, T, aC, ea, EQ, bO, bB, fd, cL, ci, x, aE, M, K, eL, JI, aW, uY, vs, cm, eM, aCT, U, cj, m, k, avU, de, dD, n, eW, h, eV, dL, pi, Ln, aq, Og, pm, aKv, aDu, cA, hL, pg, fL, B, bL, oe, eX, aA, cz, j, il, g, o, eA, eJ, aT, kf, cy, jj, ae, jf, Uf, oV, Y, r, en, cl, t, iK, ck, kP, c, ac, gX, cS, oX, bt, ha, jh, oH, eq, xg, hF, mC, ad, av, F, io, d, IR, ff, Of, eZ, dq, aF, pT, bz, DF, pc, bE, adg, y, kS, X, us); #c1(HDAC9) c2(NP_001191077) c3(histone deacetylase 9 isoform 10) c4(80967) c5(80968, 80969, 80970, 80971, 80972) c6( ) c7(bM, T, aC, ea, EQ, bO, bB, fd, cL, ci, x, aE, M, K, eL, JI, aW, uY, vs, cm, eM, aCT, U, cj, m, k, avU, de, dD, n, eW, h, eV, dL, pi, Ln, aq, Og, pm, aKv, aDu, cA, hL, pg, fL, B, bL, oe, eX, aA, cz, j, il, q, o, eA, eJ, aT, kf, cy, jj, ae, jf, Uf, oV, Y, r, en, cl, t, iK, ck, kP, c, ac, gX, cS, oX, bt, ha, jh, oH, eq, xg, hF, mC, ad, av, F, io, d, IR, ff, Of, eZ, dq, aF, pT, bz, DF, pc, bE, adg, y, kS, X, us); #c1(HDAC9) c2(NP_055522) c3(histone deacetylase 9 isoform 3) c4(181736, 181737, 181738) c5(181739, 181740, 181741, 181742, 181743, 181744, 181745) c6( ) c7(bM, T, aC, ea, EQ, bO, bB, fd, cL, ci, x, aE, M, K, eL, JI, aW, uY, vs, cm, eM, aCT, U, cj, m, k, avU, de, dD, n, eW, h, eV, dL, pi, Ln, aq, Og, pm, aKv, aDu, cA, hL, pg, fL, B, bL, oe, eX, aA, cz, j, il, q, o, eA, eJ, aT, kf, cy, jj, ae, jf, Uf, oV, Y, r, en, cl, t, iK, ck, kP, c, ac, gX, cS, oX, bt, ha, jh, oH, eq, xg, hF, mC, ad, av, F, io, d, IR, ff, Of, eZ, dq, aF, pT, bz, DF, pc, bE, adg, y, kS, X, us); #c1(HDAC9) c2(NP_478056) c3(histone deacetylase 9 isoform 1) c4(230849) c5(230850, 230851, 230852, 230853, 230854, 230855, 230856, 230857, 230858, 230859, 230860, 230861) c6( ) c7(bM, T, aC, ea, EQ, bO, bB, fd, cL, ci, x, aE, M, K, eL, JI, aW, uY, vs, cm, eM, aCT, U, cj, m, k, avU, de, dD, n, eW, h, eV, dL, pi, Ln, aq, Og, pm, aKv, aDu, cA, hL, pg, fL, B, bL, oe, eX, aA, cz, j, il, q, o, eA, eJ, aT, kf, cy, jj, ae, jf, Uf, oV, Y, r, en, cl, t, iK, ck, kP, c, ac, gX, cS, oX, bt, ha, jh, oH, eq, xg, hF, mC, ad, av, F, io, d, IR, ff, Of, eZ, dq, aF, pT, bz, DF, pc, bE, adg, y, kS, X, us); #c1(HDAC9) c2(NP_848510) c3(histone deacetylase 9 isoform 4) c4(253746) c5(253747, 253748, 253749, 253750, 253751) c6( ) c7(bM, T, aC, ea, EQ, bO, bB, fd, cL, ci, x, aE, M, K, eL, JI, aW, uY, vs, cm, eM, aCT, U, cj, m, k, avU, de, dD, n, eW, h, eV, dL, pi, Ln, aq, Og, pm, aKv, aDu, cA, hL, pg, fL, B, bL, oe, eX, aA, cz, j, il, q, o, eA, eJ, aT, kf, cy, jj, ae, jf, Uf, oV, Y, r, en, cl, t, iK, ck, kP, c, ac, gX, cS, oX, bt, ha, jh, oH, eg, xg, hF, mC, ad, av, F, io, d, IR, ff, Of, eZ, dq, aF, pT, bz, DF, pc, bE, adg, y, kS, X, us); #c1(HDAC9) c2(NP_848512) c3(histone deacetylase 9 isoform 5) c4(253752) c5(253753, 253754, 253755, 253756, 253757, 253758) c6( ) c7(bM, T, aC, ea, EQ, bO, bB, fd, cL, ci, x, aE, M, K, eL, JI, aW, uY, vs, cm, eM, aCT, U, cj, m, k, avU, de, dD, n, eW, h, eV, dL, pi, Ln, aq, Og, pm, aKv, aDu, cA, hL, pg, fL, B, bL, oe, eX, aA, cz, j, il, q, o, eA, eJ, aT, kf, cy, jj, ae, jf, Uf, oV, Y, r, en, cl, t, iK, ck, kP, c, ac, gX, cS, oX, bt, ha, jh, oH, eq, xg, hF, mC, ad, av, F, io, d, IR, ff, Of, eZ, dq, aF, pT, bz, DF, pc, bE, adg, y, kS, X, us); #c1(HDAC9) c2(XP_011513928) c3(histone deacetylase 9 isoform X2) c4( ) c5(306356, 306357, 306358, 306359, 306360, 306361, 306362) c6( ) c7(bM, T, aC, ea, EQ, bO, bB, fd, cL, ci, x, aE, M, K, eL, JI, aW, uY, vs, cm, eM, aCT, U, cj, m, k, avU, de, dD, n, eW, h, eV, dL, pi, Ln, aq, Og, pm, aKv, aDu, cA, hL, pg, fL, B, bL, oe, eX, aA, cz, j, il, q, o, eA, eJ, aT, kf, cy, jj, ae, jf, Uf, oV, Y, r, en, cl, t, iK, ck, kP, c, ac, gX, cS, oX, bt, ha, jh, oH, eq, xg, hF, mC, ad, av, F, io, d, IR, ff, Of, eZ, dq, aF, pT, bz, DF, pc, bE, adg, y, kS, X, us); #c1(HDAC9) c2(XP_011513931) c3(histone deacetylase 9 isoform X5) c4(306363, 306364) c5(306365) c6( ) c7(bM, T, aC, ea, EQ, bO, bB, fd, cL, ci, x, aE, M, K, eL, JI, aW, uY, vs, cm, eM, aCT, U, cj, m, k, avU, de, dD, n, eW, h, eV, dL, pi, Ln, aq, Og, pm, aKv, aDu, cA, hL, pg, fL, B, bL, oe, eX, aA, cz, j, il, q, o, eA, eJ, aT, kf, cy, jj, ae, jf, Uf, oV, Y, r, en, cl, t, iK, ck, kP, c, ac, gX, cS, oX, bt, ha, jh, oH, eq, xg, hF, mC, ad, av, F, io, d, IR, ff, Of, eZ, dq, aF, pT, bz, DF, pc, bE, adg, y, kS, X, us); #c1(HDAC9) c2(XP_011513936) c3(histone deacetylase 9 isoform X10) c4(306366) c5(306367, 306368, 306369, 306370, 306371, 306372, 306373) c6( ) c7(bM, T, aC, ea, EQ, bO, bB, fd, cL, ci, x, aE, M, K, eL, JI, aW, uY, vs, cm, eM, aCT, U, cj, m, k, avU, de, dD, n, eW, h, eV, dL, pi, Ln, aq, Og, pm, aKv, aDu, cA, hL, pg, fL, B, bL, oe, eX, aA, cz, j, il, q, o, eA, eJ, aT, kf, cy, jj, ae, jf, Uf, oV, Y, r, en, cl, t, iK, ck, kP, c, ac, gX, cS, oX, bt, ha, jh, oH, eq, xg, hF, mC, ad, av, F, io, d, IR, ff, Of, eZ, dq, aF, pT, bz, DF, pc, bE, adg, y, kS, X, us); #c1(HDAC9) c2(XP_011513953) c3(histone deacetylase 9 isoform X18) c4(306374) c5(306375) c6( ) c7(bM, T, aC, ea, EQ, bO, bB, fd, cL, ci, x, aE, M, K, eL, JI, aW, uY, vs, cm, eM, aCT, U, cj, m, k, avU, de, dD, n, eW, h, eV, dL, pi, Ln, aq, Og, pm, aKv, aDu, cA, hL, pg, fL, B, bL, oe, eX, aA, cz, j, il, q, o, eA, eJ, aT, kf, cy, jj, ae, jf, Uf, oV, Y, r, en, cl, t, iK, ck, kP, c, ac, gX, cS, oX, bt, ha, jh, oH, eq, xg, hF, mC, ad, av, F, io, d, IR, ff, Of, eZ, dq, aF, pT, bz, DF, pc, bE, adg, y, kS, X, us); #c1(HDC) c2(NP_002103) c3(histidine decarboxylase) c4(124591) c5(124592, 124593, 124594, 124595, 124596, 124597) c6( ) c7(bM, T, kh, Dw, aA, ON, asr, rc, baA, cF, bHu, aT, Ds, K, cp, tN, iU, aW, Y, yL, mQ, ff, aF, en, uC, yR, cT, Ta, ac, asq, JM, gv, Dv, Tc); #c1(HDDC2) c2(NP_057147) c3(HD domain-containing protein 2) c4(189103, 189104) c5(189105, 189106, 189107, 189108, 189109, 189110, 189111, 189112, 189113, 189114, 189115, 189116, 189117, 189118, 189119, 189120) c6( ) c7(EQ); #c1(HDGF) c2(NP_001119522) c3(hepatoma-derived growth factor isoform b) c4(44061) c5(44062, 44063, 44064, 44065, 44066, 44067) c6( ) c7(av, T, d, bP, BA, eM, Y, ff, ht, r, bB, n, aq, h, q, en, hu, eA, bz, B, cp); #c1(HDGF) c2(NP_001119523) c3(hepatoma-derived growth factor isoform c) c4(44068, 44069) c5(44070, 44071, 44072, 44073, 44074, 44075, 44076) c6( ) c7(av, T, d, bP, BA, eM, Y, ff, ht, r, bB, n, aq, h, q, en, hu, eA, bz, B, cp); #c1(HDGF) c2(NP_004485) c3(hepatoma-derived growth factor isoform a) c4(146820, 146821) c5(146822, 146823, 146824, 146825, 146826, 146827, 146828, 146829, 146830, 146831, 146832, 146833, 146834, 146835, 146836, 146837) c6( ) c7(av, T, d, bP, BA, eM, Y, ff, ht, r, bB, n, aq, h, q, en, hu, eA, bz, B, cp); #c1(HDGF) c2(XP_011507757) c3(hepatoma-derived growth factor isoform X2) c4( ) c5(297831, 297832, 297833, 297834, 297835) c6( ) c7(av, T, d, bP, BA, eM, Y, ff, ht, r, bB, n, aq, h, q, en, hu, eA, bz, B, cp); #c1(HDGFL1) c2(NP_612641) c3(hepatoma-derived growth factor-like protein 1) c4(236758) c5(236759, 236760, 236761, 236762, 236763, 236764, 236765, 236766, 236767, 236768) c6( ) c7(dY, ac); #c1(HDGFRP3) c2(NP_057157) c3(hepatoma-derived growth factor-related protein 3) c4(189194) c5(189195, 189196, 189197, 189198, 189199, 189200) c6( ) c7(xg); #c1(HDHD1) c2(NP_001129037) c3(pseudouridine-5′-monophosphatase isoform a) c4(50691, 50692) c5(50693, 50694, 50695, 50696, 50697, 50698, 50699, 50700, 50701, 50702, 50703, 50704) c6( ) c7(btu, hQ); #c1(HDHD1) c2(NP_001171606) c3(pseudouridine-5′-monophosphatase isoform c) c4(70758) c5(70759, 70760, 70761, 70762, 70763, 70764) c6( ) c7(btu, hQ); #c1(HDHD1) c2(NP_001171607) c3(pseudouridine-5′-monophosphatase isoform d) c4(70765) c5(70766, 70767, 70768, 70769, 70770, 70771) c6( ) c7(btu, hQ); #c1(HDHD1) c2(NP_036212) c3(pseudouridine-5′-monophosphatase isoform b) c4(172396) c5(172397, 172398, 172399, 172400, 172401, 172402) c6( ) c7(btu, hQ); #c1(HDLBP) c2(NP_001230829) c3(vigilin isoform b) c4(86782, 86783) c5(86784, 86785, 86786, 86787, 86788, 86789, 86790, 86791, 86792, 86793, 86794, 86795, 86796, 86797, 86798, 86799, 86800, 86801, 86802, 86803, 86804, 86805, 86806, 86807, 86808, 86809, 86810, 86811, 86812, 86813, 86814, 86815, 86816, 86817, 86818, 86819, 86820, 86821, 86822, 86823, 86824, 86825, 86826, 86827, 86828, 86829, 86830, 86831, 86832, 86833, 86834, 86835, 86836, 86837, 86838, 86839, 86840) c6( ) c7(T, dD, bri, aW, dc, ea, fZ, aT, hD, eq, ad, bN); #c1(HDLBP) c2(NP_976221) c3(vigilin isoform a) c4(262934) c5(262935, 262936, 262937, 262938, 262939, 262940, 262941, 262942, 262943, 262944, 262945, 262946, 262947, 262948, 262949, 262950, 262951, 262952, 262953, 262954, 262955, 262956, 262957, 262958, 262959, 262960, 262961, 262962, 262963, 262964, 262965, 262966, 262967, 262968, 262969, 262970, 262971, 262972, 262973, 262974, 262975, 262976, 262977, 262978, 262979, 262980, 262981, 262982, 262983, 262984, 262985, 262986, 262987, 262988, 262989, 262990, 262991, 262992) c6( ) c7(T, dD, bri, aW, dc, ea, fZ, aT, hD, eq, ad, bN); #c1(HDLBP) c2(XP_011509363) c3(vigilin isoform X2) c4(299939, 299940, 299941, 299942, 299943, 299944, 299945, 299946, 299947, 299948, 299949, 299950, 299951, 299952) c5( ) c6( ) c7(T, dD, bri, aW, dc, ea, fZ, aT, hD, eq, ad, bN); #c1(HEATR1) c2(NP_060542) c3(HEAT repeat-containing protein 1) c4(196455, 196456, 196457) c5(196458, 196459, 196460, 196461, 196462, 196463, 196464, 196465, 196466, 196467, 196468, 196469, 196470, 196471, 196472, 196473, 196474, 196475) c6( ) c7(aW, aT); #c1(HEATR3) c2(NP_891552) c3(HEAT repeat-containing protein 3) c4(257291) c5(257292, 257293, 257294, 257295, 257296, 257297) c6( ) c7(blC, iJ); #c1(HEATR5B) c2(NP_061897) c3(HEAT repeat-containing protein 58) c4(201029, 201030) c5(201031, 201032, 201033, 201034, 201035, 201036, 201037, 201038, 201039, 201040, 201041, 201042, 201043, 201044, 201045, 201046, 201047, 201048) c6( ) c7(aw, eu, e, j, ac); #c1(HEATR5B) c2(XP_005264436) c3(HEAT repeat-containing protein 58 isoform X4) c4(278940) c5( ) c6( ) c7(aw, eu, e, j, ac); #c1(HEATR6) c2(NP_071353) c3(HEAT repeat-containing protein 6) c4(211166, 211167) c5(211168, 211169, 211170, 211171, 211172, 211173, 211174, 211175, 211176, 211177, 211178, 211179) c6( ) c7(T, cK, eM, aW, ds, e, Y, aT, j, ci, cJ, ee, eC); #c1(HEBP1) c2(NP_057071) c3(heme-binding protein 1) c4(188776) c5(188777, 188778, 188779, 188780, 188781, 188782, 188783, 188784) c6( ) c7(dc, T, ad); #c1(HEBP2) c2(NP_055135) c3(heme-binding protein 2) c4(179202) c5(179203, 179204, 179205, 179206, 179207, 179208, 179209, 179210) c6(179211, 179212) c7(aq); #c1(HECA) c2(NP_057301) c3(headcase protein homolog) c4(189978) c5(189979, 189980, 189981, 189982, 189983, 189984) c6( ) c7(T, kh, aW, yL, JM, aT, rc); #c1(HECTD2) c2(NP_001271203) c3(probable E3 ubiquitin-protein ligase HECTD2 isoform c) c4(103578, 103579, 103580) c5(103581, 103582, 103583, 103584, 103585, 103586, 103587, 103588, 103589) c6( ) c7(aaF, dt, jV, ae, ad, dS); #c1(HECTD2) c2(NP_775768) c3(probable E3 ubiquitin-protein ligase HECTD2 isoform b) c4(250236) c5(250237, 250238, 250239, 250240, 250241, 250242) c6( ) c7(aaF, dt, jV, ae, ad, dS); #c1(HECTD2) c2(NP_877497) c3(probable E3 ubiquitin-protein ligase HECTD2 isoform a) c4(256879, 256880) c5(256881, 256882, 256883, 256884, 256885, 256886, 256887, 256888, 256889, 256890, 256891) c6( ) c7(aaF, dt, jV, ae, ad, dS); #c1(HECTD2) c2(XP_011537640) c3(probable E3 ubiquitin-protein ligase HECTD2 isoform X2) c4( ) c5(335190, 335191, 335192, 335193, 335194, 335195, 335196, 335197, 335198, 335199) c6( ) c7(aaF, dt, jV, ae, ad, dS); #c1(HECTD4) c2(NP_001103132) c3(probable E3 ubiquitin-protein ligase HECTD4) c4(41838, 41839) c5(41840, 41841, 41842, 41843, 41844, 41845, 41846, 41847, 41848, 41849, 41850) c6( ) c7(bL, ht, oe, j, cz); #c1(HECW1) c2(NP_001273988) c3(E3 ubiquitin-protein ligase HECW1 isoform b) c4(105964) c5(105965, 105966, 105967, 105968, 105969, 105970) c6( ) c7(aW, oe, eZ, aT); #c1(HECW1) c2(NP_055867) c3(E3 ubiquitin-protein ligase HECW1 isoform a) c4(184032) c5(184033, 184034, 184035, 184036, 184037, 184038, 184039) c6( ) c7(aW, oe, eZ, aT); #c1(HECW1) c2(XP_011513522) c3(E3 ubiquitin-protein ligase HECW1 isoform X4) c4(305804) c5(305805, 305806, 305807, 305808, 305809, 305810) c6( ) c7(aW, oe, eZ, aT); #c1(HECW2) c2(NP_065811) c3(E3 ubiquitin-protein ligase HECW2 isoform 1) c4(205649, 205650, 205651) c5(205652, 205653, 205654, 205655, 205656, 205657, 205658, 205659, 205660, 205661, 205662, 205663) c6( ) c7(bB, bE, if, qN); #c1(HECW2) c2(XP_006712709) c3(E3 ubiquitin-protein ligase HECW2 isoform X1) c4( ) c5(286812, 286813, 286814, 286815, 286816, 286817) c6( ) c7(bB, bE, if, qN); #c1(HEG1) c2(NP_065784) c3(protein HEG homolog 1 precursor) c4(205428) c5(205429, 205430, 205431, 205432, 205433, 205434) c6( ) c7(t); #c1(HELLS) c2(NP_001275996) c3(lymphoid-specific helicase isoform 2) c4(107691, 107692) c5(107693, 107694, 107695, 107696, 107697, 107698, 107699) c6( ) c7(T, kl, eU, eM, xR, qt, aW, r, aT, aA, aF, m, iK, q); #c1(HELLS) c2(NP_001275997) c3(lymphoid-specific helicase isoform 3) c4( ) c5(107700) c6( ) c7(T, kl, eU, eM, xR, qt, aW, r, aT, aA, aF, m, iK, q); #c1(HELLS) c2(NP_001275999) c3(lymphoid-specific helicase isoform 5) c4(107701, 107702, 107703, 107704) c5(107705, 107706, 107707, 107708, 107709, 107710) c6( ) c7(T, kl, eU, eM, xR, qt, aW, r, aT, aA, aF, m, iK, q); #c1(HELLS) c2(NP_001276001) c3(lymphoid-specific helicase isoform 7) c4( ) c5(107712, 107713, 107714, 107715, 107716, 107717, 107718, 107719, 107720, 107721, 107722, 107723, 107724, 107725, 107726, 107727, 107728, 107729, 107730, 107731, 107732, 107733) c6( ) c7(T, kl, eU, eM, xR, qt, aW, r, aT, aA, aF, m, iK, q); #c1(HELLS) c2(NP_001276002) c3(lymphoid-specific helicase isoform 8) c4( ) c5(107734) c6( ) c7(T, kl, eU, eM, xR, qt, aW, r, aT, aA, aF, m, iK, q); #c1(HELLS) c2(NP_060533) c3(lymphoid-specific helicase isoform 1) c4(196441) c5(196442, 196443, 196444, 196445, 196446, 196447) c6( ) c7(T, kl, eU, eM, xR, qt, aW, r, aT, aA, aF, m, iK, q); #c1(HELQ) c2(NP_598375) c3(helicase POLQ-like isoform 1) c4(235457) c5(235458, 235459, 235460, 235461, 235462, 235463) c6( ) c7(hy, gv, m, bX, t, iK, it); #c1(HELT) c2(NP_001287710) c3(hairy and enhancer of split-related protein HELT isoform 1) c4(112592, 112593) c5(112594, 112595, 112596, 112597, 112598, 112599, 112600, 112601, 112602, 112603, 112604, 112605) c6( ) c7(uL, bxg, ey, dK); #c1(HELT) c2(NP_001287711) c3(hairy and enhancer of split-related protein HELT isoform 2) c4(112606) c5(112607, 112608, 112609, 112610, 112611, 112612) c6( ) c7(uL, bxg, ey, dK); #c1(HELZ) c2(NP_055692) c3(probable helicase with zinc finger domain) c4(182797) c5(182798, 182799, 182800, 182801, 182802, 182803) c6( ) c7(v, T, fq, V); #c1(HELZ) c2(XP_005257946) c3(probable helicase with zinc finger domain isoform X3) c4(275435) c5( ) c6( ) c7(v, T, fq, V); #c1(HELZ) c2(XP_005257947) c3(probable helicase with zinc finger domain isoform X4) c4( ) c5(275436, 275437, 275438, 275439, 275440, 275441) c6( ) c7(v, T, fq, V); #c1(HELZ2) c2(NP_001032412) c3(helicase with zinc finger domain 2 isoform 1) c4(31332) c5(31333, 31334, 31335, 31336, 31337, 31338, 31339) c6( ) c7(dQ, v); #c1(HELZ2) c2(NP_208384) c3(helicase with zinc finger domain 2 isoform 2) c4(228547) c5(228548, 228549, 228550, 228551, 228552) c6( ) c7(dQ, v); #c1(HEMGN) c2(XP_011517148) c3(hemogen isoform X1) c4(310690) c5(310691, 310692, 310693, 310694, 310695, 310696, 310697, 310698, 310699, 310700) c6( ) c7(ck, Na, hF, Nc, j, Mu, bt); #c1(HEPACAM) c2(NP_689935) c3(hepatocyte cell adhesion molecule precursor) c4(244389) c5(244390, 244391, 244392, 244393, 244394, 244395) c6( ) c7(XX, es, T, d, aPn, id, iA, aW, aT, By, bHv, bHw, K, bHx, nA, cb, dL, fr, eL, B, bN); #c1(HEPACAM) c2(XP_005271506) c3(hepatocyte cell adhesion molecule isoform X3) c4(283432) c5(283433, 283434, 283435, 283436, 283437, 283438) c6( ) c7(XX, es, T, d, aPn, id, iA, aW, aT, By, bHv, bHw, K, bHx, nA, cb, dL, fr, eL, B, bN); #c1(HEPH) c2(NP_001124332) c3(hephaestin isoform c precursor) c4(48704) c5( ) c6( ) c7(yw, hl, oW, r, yy, yu, uu, aln, q); #c1(HEPH) c2(NP_001269070) c3(hephaestin isoform d precursor) c4(100357) c5(100358, 100359, 100360, 100361, 100362, 100363, 100364, 100365, 100366, 100367, 100368, 100369) c6( ) c7(yw, hl, oW, r, yy, yu, uu, aln, q); #c1(HEPH) c2(NP_055614) c3(hephaestin isoform b) c4(182294) c5(182295, 182296, 182297, 182298, 182299) c6( ) c7(yw, hl, oW, r, yy, yu, uu, aln, q); #c1(HEPH) c2(NP_620074) c3(hephaestin isoform a) c4(237276, 237277, 237278) c5(237279, 237280, 237281, 237282, 237283, 237284, 237285, 237286) c6( ) c7(yw, hl, oW, r, yy, yu, uu, aln, q); #c1(HEPH) c2(XP_006724785) c3(hephaestin isoform X2) c4( ) c5(296325, 296326, 296327, 296328, 296329, 296330, 296331, 296332, 296333, 296334, 296335) c6( ) c7(yw, hl, oW, r, yy, yu, uu, aln, q); #c1(HEPH) c2(XP_011529375) c3(hephaestin isoform X1) c4( ) c5(324757, 324758, 324759, 324760, 324761, 324762) c6( ) c7(yw, hl, oW, r, yy, yu, uu, aln, q); #c1(HEPH) c2(XP_011529377) c3(hephaestin isoform X4) c4(324763, 324764) c5(324765, 324766, 324767, 324768, 324769, 324770) c6( ) c7(yw, hl, oW, r, yy, yu, uu, aln, q); #c1(HEPN1) c2(NP_001032647) c3(putative cancer susceptibility gene HEPN1 protein) c4(31404) c5(31405, 31406, 31407, 31408, 31409, 31410) c6( ) c7(yo, OG, B); #c1(HERC1) c2(NP_003913) c3(probable E3 ubiquitin-protein ligase HERC1) c4(142115, 142116) c5(142117, 142118, 142119, 142120, 142121, 142122) c6( ) c7(agl, nA); #c1(HERC1) c2(XP_011520442) c3(probable E3 ubiquitin-protein ligase HERC1 isoform X1) c4( ) c5(315323, 315324, 315325, 315326, 315327, 315328, 315329, 315330, 315331, 315332, 315333, 315334) c6( ) c7(agl, nA); #c1(HERC1) c2(XP_011520445) c3(probable E3 ubiquitin-protein ligase HERC1 isoform X4) c4( ) c5(315335, 315336, 315337, 315338, 315339) c6( ) c7(agl, nA); #c1(HERC1) c2(XP_011520448) c3(probable E3 ubiquitin-protein ligase HERC1 isoform X7) c4( ) c5(315340, 315341, 315342, 315343, 315344, 315345) c6( ) c7(agl, nA); #c1(HERC1) c2(XP_011520453) c3(probable E3 ubiquitin-protein ligase HERC1 isoform X12) c4(315346) c5( ) c6( ) c7(agl, nA); #c1(HERC1) c2(XP_011520454) c3(probable E3 ubiquitin-protein ligase HERC1 isoform X13) c4(315347, 315348) c5( ) c6( ) c7(agl, nA); #c1(HERC2) c2(NP_004658) c3(E3 ubiquitin-protein ligase HERC2) c4(148581) c5(148582, 148583, 148584, 148585, 148586, 148587, 148588) c6( ) c7(bHz, bM, iV, A, hk, Y, bHB, agl, ge, fe, nA, bHy, cm, bHA, rc); #c1(HERC2) c2(XP_011520433) c3(E3 ubiquitin-protein ligase HERC2 isoform X4) c4(315317) c5( ) c6( ) c7(bHz, bM, iV, A, hk, Y, bHB, agl, ge, fe, nA, bHy, cm, bHA, rc); #c1(HERC2) c2(XP_011520439) c3(E3 ubiquitin-protein ligase HERC2 isoform X10) c4( ) c5(315318, 315319, 315320, 315321, 315322) c6( ) c7(bHz, bM, iV, A, hk, Y, bHB, agl, ge, fe, nA, bHy, cm, bHA, rc); #c1(HERC3) c2(NP_001258531) c3(probable E3 ubiquitin-protein ligase HERC3 isoform 2) c4(96110) c5( ) c6( ) c7(aq); #c1(HERC3) c2(NP_055421) c3(probable E3 ubiquitin-protein ligase HERC3 isoform 1) c4(181043, 181044, 181045, 181046) c5(181047, 181048, 181049, 181050, 181051, 181052, 181053, 181054, 181055, 181056, 181057, 181058, 181059, 181060, 181061, 181062) c6( ) c7(aq); #c1(HERC3) c2(XP_005263386) c3(probable E3 ubiquitin-protein ligase HERC3 isoform X2) c4(278468, 278469) c5( ) c6( ) c7(aq); #c1(HERC5) c2(NP_057407) c3(E3 ISG15-protein ligase HERC5) c4(190589) c5(190590, 190591, 190592, 190593, 190594, 190595) c6( ) c7(ck, bM, dP, Bv, ds, h, gA, aAE); #c1(HERC6) c2(NP_001158608) c3(probable E3 ubiquitin-protein ligase HERC6 isoform 2) c4(63706) c5(63707, 63708, 63709, 63710, 63711, 63712, 63713, 63714, 63715, 63716, 63717, 63718, 63719, 63720, 63721, 63722, 63723, 63724, 63725, 63726, 63727, 63728) c6( ) c7(ds); #c1(HERC6) c2(NP_060382) c3(probable E3 ubiquitin-protein ligase HERC6 isoform 1) c4(195712, 195713, 195714, 195715) c5(195716, 195717, 195718, 195719, 195720, 195721) c6( ) c7(ds); #c1(HERC6) c2(XP_005263140) c3(probable E3 ubiquitin-protein ligase HERC6 isoform X1) c4( ) c5(278339, 278340) c6( ) c7(ds); #c1(HERPUD1) c2(NP_001010989) c3(homocysteine-responsive endoplasmic reticulum-resident ubiquitin-like domain member 1 protein isoform 2) c4(24468, 24469) c5(24470, 24471, 24472, 24473, 24474, 24475, 24476, 24477, 24478, 24479, 24480) c6( ) c7(T, id, e, jh, sM, bX, ad, x, kH, h, dL, K, ox, eL, je, ck, iM, W, wE, k, bC, ei); #c1(HERPUD1) c2(NP_055500) c3(homocysteine-responsive endoplasmic reticulum-resident ubiquitin-like domain member 1 protein isoform 1) c4(181568) c5(181569, 181570, 181571, 181572, 181573) c6( ) c7(T, id, e, jh, sM, bX, ad, x, kH, h, dL, K, ox, eL, je, ck, iM, W, wE, k, bC, ei); #c1(HERPUD1) c2(XP_006721415) c3(homocysteine-responsive endoplasmic reticulum-resident ubiquitin-like domain member 1 protein isoform X1) c4(293994) c5(293995, 293996, 293997, 293998, 293999, 294000, 294001, 294002) c6( ) c7(T, id, e, jh, sM, bX, ad, x, kH, h, dL, K, ox, eL, je, ck, iM, W, wE, k, bC, ei); #c1(HES1) c2(NP_005515) c3(transcription factor HES-1) c4(157008) c5(157009, 157010, 157011, 157012, 157013, 157014, 157015) c6( ) c7(Fv, T, os, fM, aC, iB, if, ha, aA, bB, n, axk, v, oZ, ci, il, Fc, q, ad, eA, ip, iC, bv, av, ft, jz, aE, x, ahL, kH, aT, bl, Tj, fb, ae, Qe, jf, axl, A, d, B, s, bf, As, aW, Y, iU, eH, cr, r, nY, hN, aq, aF, g, cl, as, t, eF, bz, cm, iV, ck, iO, c, eM, bE, E, m, be, bt, X, BA); #c1(HES2) c2(XP_011539915) c3(transcription factor HES-2 isoform X1) c4(338197, 338198) c5(338199, 338200, 338201, 338202, 338203, 338204, 338205, 338206, 338207, 338208, 338209, 338210, 338211, 338212, 338213, 338214) c6( ) c7(cm); #c1(HES6) c2(NP_001136325) c3(transcription cofactor HES-6 isoform b) c4(54812) c5(54813, 54814, 54815, 54816, 54817, 54818, 54819) c6( ) c7(bv, gk, T, QG, cA, bE, aW, oV, al, aT, ci, eA, Xu, Fc, B); #c1(HES6) c2(NP_061115) c3(transcription cofactor HES-6 isoform a) c4(199165, 199166) c5(199167, 199168, 199169, 199170, 199171, 199172, 199173, 199174, 199175, 199176, 199177, 199178) c6( ) c7(bv, gk, T, QG, cA, bE, aW, oV, al, aT, ci, eA, Xu, Fc, B); #c1(HES7) c2(NP_001159439) c3(transcription factor HES-7 isoform 1) c4( ) c5(64051, 64052, 64053, 64054, 64055) c6( ) c7(qb, bfU, bBk, Al, bHC); #c1(HES7) c2(NP_115969) c3(transcription factor HES-7 isoform 2) c4(224985) c5(224986, 224987, 224988, 224989, 224990, 224991, 224992) c6( ) c7(qb, bfU, bBk, Al, bHC); #c1(HES7) c2(XP_011522340) c3(transcription factor HES-7 isoform X1) c4(317017) c5(317018) c6( ) c7(qb, bfU, bBk, Al, bHC); #c1(HESX1) c2(NP_003856) c3(homeobox expressed in ES cells 1) c4(141538, 141539) c5(141540, 141541, 141542, 141543, 141544, 141545, 141546, 141547, 141548, 141549, 141550, 141551, 141552) c6( ) c7(bBJ, bHD, acz, bHE, tT, cz, v, y, afx, bHF, yn); #c1(HEXA) c2(NP_000511) c3(beta-hexosaminidase subunit alpha preproprotein) c4(10835, 10836, 10837) c5(10838, 10839, 10840, 10841, 10842, 10843, 10844, 10845, 10846, 10847, 10848, 10849, 10850, 10851, 10852, 10853, 10854, 10855, 10856) c6( ) c7(Ol, bDa, jh, nA, arX, eA, bCZ, bDz, aV, bzk, kf, aU, h, an, apl, xi, dq, aYR, dr, ck, mO, rR, bHG, ky, aDA, bHl, U, Lp, awM, bHH, Lq, ati, y, ao); #c1(HEXB) c2(NP_000512) c3(beta-hexosaminidase subunit beta isoform 1 preproprotein) c4(10857, 10858) c5(10859, 10860, 10861, 10862, 10863, 10864, 10865, 10866) c6( ) c7(bM, gk, mO, bHJ, bHL, IR, bHM, zn, Ol, bDa, aDA, al, awM, h, E, Lg, ey, bHK, y, eA, bHN); #c1(HEXB) c2(NP_001278933) c3(beta-hexosaminidase subunit beta isoform 2) c4( ) c5(111070, 111071, 111072, 111073, 111074) c6( ) c7(bM, gk, mD, bHJ, bHL, IR, bHM, zn, Ol, bDa, aDA, al, awM, h, E, Lq, ey, bHK, y, eA, bHN); #c1(HEXDC) c2(NP_775891) c3(hexosaminidase D) c4(250583) c5(250584, 250585, 250586, 250587, 250588, 250589) c6( ) c7(bDa, awM, aDA, U); #c1(HEXDC) c2(XP_005256404) c3(hexosaminidase D isoform X4) c4(274177) c5(274178, 274179, 274180, 274181, 274182, 274183) c6( ) c7(bDa, awM, aDA, U); #c1(HEXDC) c2(XP_011521863) c3(hexosaminidase D isoform X3) c4( ) c5(316473) c6( ) c7(bDa, awM, aDA, U); #c1(HEXIM1) c2(NP_006451) c3(protein HEXIM1) c4(165326) c5(165327, 165328, 165329, 165330, 165331, 165332) c6( ) c7(ck, ly, T, lD, jW, iT, Ae, IC, oj, Ak, cm, it, Fb, QK, bt, ae, B, ad, lx); #c1(HEY1) c2(NP_001035798) c3(hairy/enhancer-of-split related with YRPW motif protein 1 isoform b) c4(33112) c5(33113, 33114, 33115, 33116, 33117, 33118, 33119, 33120, 33121, 33122) c6( ) c7(ck, ae, av, kh, d, VX, Tb, jf, fG, aT, cz, apy, uU, Fb, fr, yq, as, Fc, bz, ad, BA); #c1(HEY1) c2(NP_036390) c3(hairy/enhancer-of-split related with YRPW motif protein 1 isoform a) c4(173542) c5(173543, 173544, 173545, 173546, 173547, 173548, 173549) c6( ) c7(ck, ae, av, kh, d, VX, Tb, jf, fG, aT, cz, apy, uU, Fb, fr, yq, as, Fc, bz, ad, BA); #c1(HEY2) c2(NP_036391) c3(hairy/enhancer-of-split related with YRPW motif protein 2) c4(173550, 173551) c5(173552, 173553, 173554, 173555, 173556, 173557, 173558) c6( ) c7(T, acl, sM, ajM, j, ci, MT, ad, md, iC, Mg, Dt, aT, h, vc, uV, aVI, rz, ae, qw, bf, aVJ, aW, as, hJ, f, sx, acw, gY, wE, bD, BA); #c1(HEY2) c2(XP_011533951) c3(hairy/enhancer-of-split related with YRPW motif protein 2 isoform X1) c4( ) c5(330148) c6( ) c7(T, acl, sM, ajM, j, ci, MT, ad, md, iC, Mg, Dt, aT, h, vc, uV, aVI, rz, ae, qw, bf, aVJ, aW, as, hJ, f, sx, acw, gY, wE, bD, BA); #c1(HEY2) c2(XP_011533952) c3(hairy/enhancer-of-split related with YRPW motif protein 2 isoform X3) c4( ) c5(330149, 330150, 330151, 330152, 330153) c6( ) c7(T, acl, sM, ajM, j, ci, MT, ad, md, iC, Mg, Ot, aT, h, vc, uV, aVI, rz, ae, qw, bf, aVJ, aW, as, hJ, f, sx, acw, gY, wE, bD, BA); #c1(HFE) c2(NP_000401) c3(hereditary hemochromatosis protein isoform 1 precursor) c4(8544, 8545) c5(8546, 8547, 8548, 8549, 8550, 8551) c6( ) c7(oO, atT, T, fR, ea, if, e, al, fd, bB, cL, Vd, ci, bHU, aY, ip, x, aEQ, bHS, dY, aE, rw, Gb, M, dV, K, bHT, wt, dQ, qD, dF, N, aiJ, tw, aa, hm, zQ, pr, aW, adw, az, bGL, hl, LZ, fc, bHW, alb, g, as, cm, bw, bHP, wT, bwQ, eY, aBr, rq, aNv, iT, aGe, mx, U, cj, vy, Gs, cX, dW, QF, k, m, abX, pw, dD, gU, aw, ht, oY, aj, fr, aUX, bHO, cd, br, ai, bbB, cc, hw, pN, Bj, aMD, h, eV, dL, ZN, A, sq, aq, pm, mo, bHR, Zj, Wt, op, vU, GG, cO, mg, at, eo, aDE, B, bL, bGu, jv, pF, eR, kA, oe, jx, eX, aA, cz, QZ, j, v, bX, Qo, V, q, J, eA, UE, yw, uT, aT, yu, dz, jj, an, bau, ae, af, eu, kl, alX, s, aDf, atl, r, lo, rs, eS, sK, xw, el, aDQ, ck, BU, rR, ac, c, VJ, wg, aUW, bbA, hr, mf, cS, aDR, gT, bt, ao, vi, Kd, am, qX, qb, uG, jh, aHv, uu, jE, fu, eq, hF, ad, dZ, kL, qC, fU, hX, wD, F, oz, sO, tT, qh, oW, bHQ, mu, uX, VX, BO, et, cH, Em, bHX, eZ, yy, bHV, aF, hp, S, aot, iR, dr, eK, D, gk, Bv, qe, pc, bE, ag, QV, II, gZ, cP, ei, hE, aed, alq, y); #c1(HFE) c2(NP_001287678) c3(hereditary hemochromatosis protein isoform 12 precursor) c4(112528, 112529) c5(112530, 112531112532, 112533, 112534, 112535, 112536) c6( ) c7(oO, atT, T, fR, ea, if, e, al, fd, bB, cL, Vd, ci, bHU, aY, ip, x, aEQ, bHS, dY, aE, rw, Gb, M, dV, K, bHT, wt, dQ, qD, dF, N, aiJ, tw, aa, hm, zQ, pr, aW, adw, az, bGL, hl, LZ, fc, bHW, alb, g, as, cm, bw, bHP, wT, bwQ, eY, aBr, rq, aNv, iT, aGe, mx, U, cj, vy, Gs, cX, dW, QF, k, m, abX, pw, dD, gU, aw, ht, oY, aj, fr, aUX, bHQ, cd, br, ai, bbB, cc, hw, pN, Bj, aMD, h, eV, dL, ZN, A, sq, aq, pm, mo, bHR, Zj, Wt, op, vU, GG, cO, mg, at, eo, aDE, B, bL, bGu, jv, pF, eR, kA, oe, jx, eX, aA, cz, QZ, j, v, bX, Qo, V, q, J, eA, UE, yw, uT, aT, yu, dz, jj, an, bau, ae, af, eu, kl, alX, s, aDf, atl, r, lo, rs, eS, sK, xw, el, aDQ, ck, BU, rR, ac, c, VJ, wg, aUW, bbA, hr, mf, cS, aDR, gT, bt, ao, vi, Kd, am, qX, qb, uG, jh, aHv, uu, jE, fu, eq, hF, ad, dZ, kL, qC, fU, hX, wD, F, oz, sD, tT, qh, oW, bHQ, mu, uX, VX, BO, et, cH, Em, bHX, eZ, yy, bHV, aF, hp, S, aot, iR, dr, eK, D, gk, Bv, qe, pc, bE, ag, QV, II, gZ, cP, ei, hE, aed, alq, y); #c1(HFE) c2(NP_620572) c3(hereditary hemochromatosis protein isoform 3 precursor) c4(237716) c5(237717, 237718, 237719, 237720, 237721, 237722) c6( ) c7(oO, atT, T, fR, ea, if, e, al, fd, bB, cL, Vd, ci, bHU, aY, ip, x, aEQ, bHS, dY, aE, rw, Gb, M, dV, K, bHT, wt, dQ, qD, dF, N, aiJ, tw, aa, hm, zQ, pr, aW, adw, az, bGL, hl, LZ, fc, bHW, alb, g, as, cm, bw, bHP, wT, bwQ, eY, aBr, rq, aNv, iT, aGe, mx, U, cj, vy, Gs, cX, dW, QF, k, m, abX, pw, dD, gU, aw, ht, oY, aj, fr, aUX, bHO, cd, br, ai, bbB, cc, hw, pN, Bj, aMD, h, eV, dL, ZN, A, sq, aq, pm, mo, bHR, Zj, Wt, op, vU, GG, cO, mg, at, eo, aDE, B, bL, bGu, jv, pF, eR, kA, oe, jx, eX, aA, cz, QZ, j, v, bX, Qo, V, q, J, eA, UE, yw, uT, aT, yu, dz, jj, an, bau, ae, af, eu, kl, alX, s, aDf, atl, r, lo, rs, eS, sK, xw, el, aDQ, ck, BU, rR, ac, c, VJ, wg, aUW, bbA, hr, mf, cS, aDR, gT, bt, ao, vi, Kd, am, qX, qb, uG, jh, aHv, uu, jE, fu, eq, hF, ad, dZ, kL, qC, fU, hX, wD, F, oz, sD, tT, qh, oW, bHQ, mu, uX, VX, BO, et, cH, Em, bHX, eZ, yy, bHV, aF, hp, S, aot, iR, dr, eK, D, gk, Bv, qe, pc, bE, ag, QV, II, gZ, cP, ei, hE, aed, alq, y); #c1(HFE) c2(NP_620573) c3(hereditary hemochromatosis protein isoform 4 precursor) c4(237723) c5(237724, 237725, 237726, 237727, 237728, 237729) c6( ) c7(oO, atT, T, fR, ea, if, e, al, fd, bB, cL, Vd, ci, bHU, aY, ip, x, aEQ, bHS, dY, aE, rw, Gb, M, dV, K, bHT, wt, dQ, qD, dF, N, aiJ, tw, aa, hm, zQ, pr, aW, adw, az, bGL, hl, LZ, fc, bHW, alb, g, as, cm, bw, bHP, wT, bwQ, eY, aBr, rq, aNv, iT, aGe, mx, U, cj, vy, Gs, cX, dW, QF, k, m, abX, pw, dD, gU, aw, ht, oY, aj, fr, aUX, bHO, cd, br, ai, bbB, cc, hw, pN, Bj, aMD, h, eV, dL, ZN, A, sq, aq, pm, mo, bHR, Zj, Wt, op, vU, GG, cO, mg, at, eo, aDE, B, bL, bGu, jv, pF, eR, kA, oe, jx, eX, aA, cz, QZ, j, v, bX, Qo, V, q, J, eA, UE, yw, uT, aT, yu, dz, jj, an, bau, ae, af, eu, kl, alX, s, aDf, atl, r, lo, rs, eS, sK, xw, el, aDQ, ck, BU, rR, ac, c, VJ, wg, aUW, bbA, hr, mf, cS, aDR, gT, bt, ao, vi, Kd, am, qX, qb, uG, jh, aHv, uu, jE, fu, eq, hF, ad, dZ, kL, qC, fU, hX, wD, F, oz, sO, tT, qh, oW, bHQ, mu, uX, VX, BO, et, cH, Em, bHX, eZ, yy, bHV, aF, hp, S, aot, iR, dr, eK, D, gk, Bv, qe, pc, bE, ag, QV, II, gZ, cP, ei, hE, aed, alq, y); #c1(HFE) c2(NP_620575) c3(hereditary hemochromatosis protein isoform 6 precursor) c4(237730) c5(237731, 237732, 237733, 237734, 237735, 237736, 237737, 237738, 237739, 237740, 237741, 237742) c6( ) c7(oO, atT, T, fR, ea, if, e, al, fd, bB, cL, Vd, ci, bHU, aY, ip, x, aEQ, bHS, dY, aE, rw, Gb, M, dV, K, bHT, wt, dQ, qD, dF, N, aiJ, tw, aa, hm, zQ, pr, aW, adw, az, bGL, hl, LZ, fc, bHW, alb, g, as, cm, bw, bHP, wT, bwQ, eY, aBr, rq, aNv, iT, aGe, mx, U, cj, vy, Gs, cX, dW, QF, k, m, abX, pw, dD, gU, aw, ht, oY, aj, fr, aUX, bHO, cd, br, ai, bbB, cc, hw, pN, Bj, aMD, h, eV, dL, ZN, A, sq, aq, pm, mo, bHR, Zj, Wt, op, vU, GG, cO, mg, at, eo, aDE, B, bL, bGu, jv, pF, eR, kA, oe, jx, eX, aA, cz, QZ, j, v, bX, Qo, V, q, J, eA, UE, yw, uT, aT, yu, dz, jj, an, bau, ae, af, eu, kl, alX, s, aDf, atl, r, lo, rs, eS, sK, xw, el, aDQ, ck, BU, rR, ac, c, VJ, wg, aUW, bbA, hr, mf, cS, aDR, gT, bt, ao, vi, Kd, am, qX, qb, uG, jh, aHv, uu, jE, fu, eq, hF, ad, dZ, kL, qC, fU, hX, wD, F, oz, sO, tT, qh, oW, bHQ, mu, uX, VX, BO, et, cH, Em, bHX, eZ, yy, bHV, aF, hp, S, aot, iR, dr, eK, D, gk, Bv, qe, pc, bE, ag, QV, II, gZ, cP, ei, hE, aed, alq, y); #c1(HFE) c2(NP_620576) c3(hereditary hemochromatosis protein isoform 7 precursor) c4(237743) c5(237744, 237745, 237746, 237747, 237748, 237749) c6( ) c7(oO, atT, T, fR, ea, if, e, al, fd, bB, cL, Vd, ci, bHU, aY, ip, x, aEQ, bHS, dY, aE, rw, Gb, M, dV, K, bHT, wt, dQ, qD, dF, N, aiJ, tw, aa, hm, zQ, pr, aW, adw, az, bGL, hl, LZ, fc, bHW, alb, g, as, cm, bw, bHP, wT, bwQ, eY, aBr, rq, aNv, iT, aGe, mx, U, cj, vy, Gs, cX, dW, QF, k, m, abX, pw, dD, gU, aw, ht, oY, aj, fr, aUX, bHO, cd, br, ai, bbB, cc, hw, pN, Bj, aMD, h, eV, dL, ZN, A, sq, aq, pm, mo, bHR, Zj, Wt, op, vU, GG, cO, mg, at, eo, aDE, B, bL, bGu, jv, pF, eR, kA, oe, jx, eX, aA, cz, QZ, j, v, bX, Qo, V, q, J, eA, UE, yw, uT, aT, yu, dz, jj, an, bau, ae, af, eu, kl, alX, s, aDf, atl, r, lo, rs, eS, sK, xw, el, aDQ, ck, BU, rR, ac, c, VJ, wg, aUW, bbA, hr, mf, cS, aDR, gT, bt, ao, vi, Kd, am, qX, qb, uG, jh, aHv, uu, jE, fu, eq, hF, ad, dZ, kL, qC, fU, hX, wD, F, oz, sD, tT, qh, oW, bHQ, mu, uX, VX, BO, et, cH, Fm, bHX, eZ, yy, bHV, aF, hp, S, aot, iR, dr, eK, D, gk, Bv, qe, pc, bE, ag, QV, II, gZ, cP, ei, hE, aed, alq, y); #c1(HFE) c2(NP_620577) c3(hereditary hemochromatosis protein isoform 8 precursor) c4(237750) c5(237751, 237752, 237753, 237754, 237755, 237756) c6( ) c7(oO, atT, T, fR, ea, if, e, al, fd, bB, cL, Vd, ci, bHU, aY, ip, x, aEQ, bHS, dY, aE, rw, Gb, M, dV, K, bHT, wt, dD, qD, dF, N, aiJ, tw, aa, hm, zQ, pr, aW, adw, az, bGL, hl, LZ, fc, bHW, alb, g, as, cm, bw, bHP, wT, bwQ, eY, aBr, rq, aNv, iT, aGe, mx, U, cj, vy, Gs, cX, dW, QF, k, m, abX, pw, dD, gU, aw, ht, oY, aj, fr, aUX, bHO, cd, br, ai, bbB, cc, hw, pN, Bj, aMD, h, eV, dL, ZN, A, sq, aq, pm, mo, bHR, Zj, Wt, op, vU, GG, cO, mg, at, eo, aDE, B, bL, bGu, jv, pF, eR, kA, oe, jx, eX, aA, cz, QZ, j, v, bX, Qo, V, q, J, eA, UE, yw, uT, aT, yu, dz, jj, an, bau, ae, af, eu, kl, alX, s, aDf, atl, r, lo, rs, eS, sK, xw, el, aDQ, ck, BU, rR, ac, c, VJ, wg, aUW, bbA, hr, mf, cS, aDR, gT, bt, ao, vi, Kd, am, qX, qb, uG, jh, aHv, uu, jE, fu, eq, hF, ad, dZ, kL, qC, fU, hX, wD, F, oz, sO, tT, qh, oW, bHQ, mu, uX, VX, BO, et, cH, Fm, bHX, eZ, yy, bHV, aF, hp, S, aot, iR, dr, eK, D, gk, Bv, qe, pc, bE, ag, QV, II, gZ, cP, ei, hE, aed, alq, y); #c1(HFE) c2(NP_620578) c3(hereditary hemochromatosis protein isoform 9 precursor) c4(237757) c5(237758, 237759, 237760, 237761, 237762, 237763, 237764, 237765, 237766, 237767, 237768) c6( ) c7(oO, atT, T, fR, ea, if, e, al, fd, bB, cL, Vd, ci, bHU, aY, ip, x, aEQ, bHS, dY, aE, rw, Gb, M, dV, K, bHT, wt, dQ, qD, dF, N, aiJ, tw, aa, hm, zQ, pr, aW, adw, az, bGL, hl, LZ, fc, bHW, alb, g, as, cm, bw, bHP, wT, bwQ, eY, aBr, rq, aNv, iT, aGe, mx, U, cj, vy, Gs, cX, dW, QF, k, m, abX, pw, dD, gU, aw, ht, oY, aj, fr, aUX, bHO, cd, br, ai, bbB, cc, hw, pN, Bj, aMD, h, eV, dL, ZN, A, sq, aq, pm, mo, bHR, Zj, Wt, op, vU, GG, cO, mg, at, eo, aDE, B, bL, bGu, jv, pF, eR, kA, oe, jx, eX, aA, cz, QZ, j, v, bX, Qo, V, q, J, eA, UE, yw, uT, aT, yu, dz, jj, an, bau, ae, af, eu, kl, alX, s, aDf, atl, r, lo, rs, eS, sK, xw, el, aDQ, ck, BU, rR, ac, c, VJ, wg, aUW, bbA, hr, mf, cS, aDR, gT, bt, ao, vi, Kd, am, qX, qb, uG, jh, aHv, uu, jE, fu, eq, hF, ad, dZ, kL, qC, fU, hX, wD, F, oz, sD, tT, qh, oW, bHQ, mu, uX, VX, BO, et, cH, Em, bHX, eZ, yy, bHV, aF, hp, S, aot, iR, dr, eK, D, gk, Bv, qe, pc, bE, ag, QV, II, gZ, cP, ei, hE, aed, alq, y); #c1(HFE) c2(NP_620579) c3(hereditary hemochromatosis protein isoform ID precursor) c4(237769) c5(237770, 237771, 237772, 237773, 237774, 237775) c6( ) c7(oO, atT, T, fR, ea, if, e, al, fd, bB, cL, Vd, ci, bHU, aY, ip, x, aEQ, bHS, dY, aE, rw, Gb, M, dV, K, bHT, wt, dQ, qD, dF, N, aiJ, tw, aa, hm, zQ, pr, aW, adw, az, bGL, hl, LZ, fc, bHW, alb, g, as, cm, bw, bHP, wT, bwQ, eY, aBr, rq, aNv, iT, aGe, mx, U, cj, vy, Gs, cX, dW, QF, k, m, abX, pw, dD, gU, aw, ht, oY, aj, fr, aUX, bHO, cd, br, ai, bbB, cc, hw, pN, Bj, aMD, h, eV, dL, ZN, A, sq, ag, pm, mo, bHR, Zj, Wt, op, vU, GG, cO, mg, at, eo, aDE, B, bL, bGu, jv, pF, eR, kA, oe, jx, eX, aA, cz, QZ, j, v, bX, Qo, V, q, J, eA, UE, yw, uT, aT, yu, dz, jj, an, bau, ae, af, eu, kl, alX, s, aDf, atl, r, lo, rs, eS, sK, xw, el, aDQ, ck, BU, rR, ac, c, VJ, wg, aUW, bbA, hr, mf, cS, aDR, gT, bt, ao, vi, Kd, am, qX, qb, uG, jh, aHv, uu, jE, fu, eq, hF, ad, dZ, kL, qC, fU, hX, wD, F, oz, sO, tT, qh, oW, bHQ, mu, uX, VX, BO, et, cH, Em, bHX, eZ, yy, bHV, aF, hp, S, aot, iR, dr, eK, D, gk, Bv, qe, pc, bE, ag, QV, II, gZ, cP, ei, hE, aed, alq, y); #c1(HFE) c2(NP_620580) c3(hereditary hemochromatosis protein isoform II precursor) c4(237776) c5(237777, 237778, 237779, 237780, 237781, 237782) c6( ) c7(oO, atT, T, fR, ea, if, e, al, fd, bB, cL, Vd, ci, bHU, aY, ip, x, aEQ, bHS, dY, aE, rw, Gb, M, dV, K, bHT, wt, dQ, qD, dF, N, aiJ, tw, aa, hm, zQ, pr, aW, adw, az, bGL, hl, LZ, fc, bHW, alb, g, as, cm, bw, bHP, wT, bwQ, eY, aBr, rq, aNv, iT, aGe, mx, U, cj, vy, Gs, cX, dW, QF, k, m, abX, pw, dD, gU, aw, ht, oY, aj, fr, aUX, bHO, cd, br, ai, bbB, cc, hw, pN, Bj, aMD, h, eV, dL, ZN, A, sq, aq, pm, mo, bHR, Zj, Wt, op, vU, GG, cO, mg, at, eo, aDE, B, bL, bGu, jv, pF, eR, kA, oe, jx, eX, aA, cz, QZ, j, v, bX, Qo, V, q, J, eA, UE, yw, uT, aT, yu, dz, jj, an, bau, ae, af, eu, kl, alX, s, aDf, atl, r, lo, rs, eS, sK, xw, el, aDQ, ck, BU, rR, ac, c, VJ, wg, aUW, bbA, hr, mf, cS, aDR, gT, bt, ao, vi, Kd, am, qX, qb, uG, jh, aHv, uu, jE, fu, eq, hF, ad, dZ, kL, qC, fU, hX, wD, F, oz, sO, tT, qh, oW, bHQ, mu, uX, VX, BO, et, cH, Em, bHX, eZ, yy, bHV, aF, hp, S, aot, iR, dr, eK, D, gk, Bv, qe, pc, bE, ag, QV, II, gZ, cP, ei, hE, aed, alq, y); #c1(HFE) c2(XP_011512846) c3(hereditary hemochromatosis protein isoform X2) c4(303921) c5(303922, 303923, 303924, 303925, 303926, 303927) c6( ) c7(oO, atT, T, fR, ea, if, e, al, fd, bB, cL, Vd, ci, bHU, aY, ip, x, aEQ, bHS, dY, aE, rw, Gb, M, dV, K, bHT, wt, dQ, qD, dF, N, aiJ, tw, aa, hm, zQ, pr, aW, adw, az, bGL, hl, LZ, fc, bHW, alb, g, as, cm, bw, bHP, wT, bwQ, eY, aBr, rq, aNv, iT, aGe, mx, U, cj, vy, Gs, cX, dW, QF, k, m, abX, pw, dD, gU, aw, ht, oY, aj, fr, aUX, bHO, cd, br, ai, bbB, cc, hw, pN, Bj, aMD, h, eV, dL, ZN, A, sq, aq, pm, mo, bHR, Zj, Wt, op, vU, GG, cO, mg, at, eo, aDE, B, bL, bGu, jv, pF, eR, kA, oe, jx, eX, aA, cz, QZ, j, v, bX, Qo, V, q, J, eA, UE, yw, uT, aT, yu, dz, jj, an, bau, ae, af, eu, kl, alX, s, aDf, atl, r, lo, rs, eS, sK, xw, el, aDQ, ck, BU, rR, ac, c, VJ, wg, aUW, bbA, hr, mf, cS, aDR, gT, bt, ao, vi, Kd, am, qX, qb, uG, jh, aHv, uu, jE, fu, eq, hF, ad, dZ, kL, qC, fU, hX, wD, F, oz, sO, tT, qh, oW, bHQ, mu, uX, VX, BO, et, cH, Em, bHX, eZ, yy, bHV, aF, hp, S, aot, iR, dr, eK, D, gk, Bv, ge, pc, bE, ag, QV, II, gZ, cP, ei, hE, aed, alq, y); #c1(HFM1) c2(XP_011539154) c3(probable ATP-dependent DNA helicase HFM1 isoform X1) c4(337241) c5(337242, 337243, 337244, 337245, 337246, 337247) c6( ) c7(bHZ, T, wr, bHY, MR, A, aW, ask, bnw, rC, CT, ew, aT, hD, lo, dy, La, pb, q, atb); #c1(HFM1) c2(XP_011539155) c3(probable ATP-dependent DNA helicase HFM1 isoform X4) c4(337248) c5( ) c6( ) c7(bHZ, T, wr, bHY, MR, A, aW, ask, bnw, rC, CT, ew, aT, hD, lo, dy, La, pb, q, atb); #c1(HFM1) c2(XP_011539156) c3(probable ATP-dependent DNA helicase HFM1 isoform X5) c4(337249) c5(337250) c6( ) c7(bHZ, T, wr, bHY, MR, A, aW, ask, bnw, rC, CT, ew, aT, hD, lo, dy, La, pb, q, atb); #c1(HFM1) c2(XP_011539157) c3(probable ATP-dependent DNA helicase HFM1 isoform X6) c4(337251) c5( ) c6( ) c7(bHZ, T, wr, bHY, MR, A, aW, ask, bnw, rC, CT, ew, aT, hD, lo, dy, La, pb, q, atb); #c1(HFM1) c2(XP_011539158) c3(probable ATP-dependent DNA helicase HFM1 isoform X7) c4(337252) c5(337253, 337254, 337255, 337256, 337257) c6( ) c7(bHZ, T, wr, bHY, MR, A, aW, ask, bnw, rC, CT, ew, aT, hD, lo, dy, La, pb, q, atb); #c1(HFM1) c2(XP_011539159) c3(probable ATP-dependent DNA helicase HFM1 isoform X8) c4(337258) c5( ) c6( ) c7(bHZ, T, wr, bHY, MR, A, aW, ask, bnw, rC, CT, ew, aT, hD, lo, dy, La, pb, q, atb); #c1(HFM1) c2(XP_011539162) c3(probable ATP-dependent DNA helicase HFM1 isoform X11) c4( ) c5(337259, 337260, 337261, 337262, 337263, 337264, 337265, 337266, 337267, 337268, 337269, 337270) c6( ) c7(bHZ, T, wr, bHY, MR, A, aW, ask, bnw, rC, CT, ew, aT, hD, lo, dy, La, pb, q, atb); #c1(HGD) c2(NP_000178) c3(homogentisate 1,2-dioxygenase) c4(3868) c5(3869, 3870, 3871, 3872, 3873, 3874) c6( ) c7(blc, bib, mO, jr, s, bid, bla, dq, iV, aY, ai, Us); #c1(HGF) c2(NP_000592) c3(hepatocyte growth factor isoform 1 preproprotein) c4(13398, 13399) c5(13400, 13401, 13402, 13403, 13404, 13405, 13406, 13407, 13408, 13409, 13410, 13411, 13412, 13413, 13414, 13415, 13416, 13417, 13418, 13419, 13420, 13421, 13422, 13423, 13424, 13425, 13426, 13427, 13428, 13429, 13430, 13431, 13432, 13433, 13434, 13435, 13436, 13437, 13438, 13439, 13440, 13441, 13442, 13443, 13444, 13445, 13446, 13447, 13448, 13449, 13450, 13451, 13452, 13453, 13454, 13455, 13456, 13457, 13458, 13459, 13460, 13461, 13462, 13463, 13464, 13465, 13466, 13467, 13468, 13469, 13470, 13471, 13472, 13473, 13474, 13475, 13476, 13477, 13478, 13479, 13480, 13481, 13482, 13483, 13484, 13485, 13486, 13487, 13488, 13489, 13490, 13491, 13492, 13493) c6(13494) c7(oO, T, asg, aC, pf, ea, if, e, al, bll, fd, bB, axk, Vd, ci, qj, IR, sD, blk, blg, bv, dY, aE, fm, aeO, ja, Vv, Ou, HR, K, hu, ex, eL, bc, cp, aa, hm, DA, eG, aeR, iE, HI, LC, EV, bvR, az, aW, hl, LZ, fc, CT, bjk, brr, g, as, eF, cm, Qt, iP, gJ, blj, eM, nB, iA, acS, acw, mx, U, vy, wB, wx, Hb, m, jM, fy, dD, zt, aw, ht, NT, RC, aBx, n, cQ, aj, fr, bd, qN, cd, asS, ai, ft, jz, cc, zw, Nn, gd, kH, IG, GT, dL, bl, eV, hB, vx, Ha, aqi, A, blh, fQ, aq, fe, kp, yq, pm, boD, ar, kT, Sc, iO, asl, dB, hk, Pl, If, Be, hL, at, bjK, uz, fL, bli, B, cn, bL, jv, fM, dA, AS, jp, eR, fG, oe, eX, aA, cR, cz, fF, v, j, bX, q, J, er, eA, asG, Yn, uT, blf, aT, cy, jj, bq, an, rz, bau, ae, dl, bA, eu, jf, Uf, Sh, s, nO, iU, oV, Y, ev, bg, r, aYp, lo, en, aDY, cl, t, iK, pb, ck, ev, sS, rR, ac, c, wg, nM, wO, hc, iM, QG, agf, cS, dy, fD, Bd, bt, IJ, ao, vi, hS, On, hl, kh, tS, aD, iW, jh, vr, dG, eq, fu, iJ, mC, ad, qC, fU, dP, hd, ib, MS, av, Db, yt, sN, py, IC, LA, rX, ab, io, hP, ble, ji, uQ, d, IR, je, cW, qt, vj, ff, eH, eZ, aJW, aF, Sm, iR, iV, KM, bz, dr, qa, eK, LB, es, gk, Bv, Ew, KD, bE, AR, aVv, aFb, II, wz, gZ, Hs, aS, cP, ei, GF, hE, vt, iu, y, pC); #c1(HGF) c2(NP_001010931) c3(hepatocyte growth factor isoform 2 precursor) c4(24192) c5(24193, 24194, 24195, 24196, 24197, 24198, 24199, 24200, 24201, 24202, 24203, 24204, 24205) c6( ) c7(oO, T, asg, aC, pf, ea, if, e, al, bll, fd, bB, axk, Vd, ci, qj, IR, sD, blk, blg, bv, dY, aE, fm, aeO, ja, Vv, Ou, HR, K, hu, ex, eL, bc, cp, aa, hm, DA, eG, aeR, iE, HI, LG, EV, bvR, az, aW, hl, LZ, fc, CT, bjk, brr, g, as, eF, cm, Qt, iP, qJ, blj, eM, nB, iA, acS, acw, mx, U, vy, wB, wx, Hb, m, jM, fy, dD, zt, aw, ht, NT, RC, aBx, n, cQ, aj, fr, bd, qN, cd, asS, ai, ft, jz, cc, zw, Nn, gd, kH, IG, GT, dL, bl, eV, hB, vx, Ha, aqi, A, blh, fQ, aq, fe, kp, yq, pm, boD, ar, kT, Sc, iO, asl, dB, hk, Pl, If, Be, hL, at, bjK, uz, fL, bli, B, cn, bL, jv, fM, dA, AS, jp, eR, fG, oe, eX, aA, cR, cz, fF, v, j, bX, g, J, er, eA, asG, Yn, uT, blf, aT, cy, jj, bq, an, rz, bau, ae, dl, bA, eu, jf, Uf, Sh, s, nO, iU, oV, Y, ev, bg, r, aYp, lo, en, aDY, cl, t, iK, pb, ck, ov, sS, rR, ac, c, wg, nM, wO, hc, iM, QG, agf, cS, dy, fD, Bd, bt, IJ, ao, vi, hS, On, hl, kh, tS, aD, iW, jh, vr, dG, eq, fu, iJ, mC, ad, qC, fU, dP, hd, ib, MS, av, Db, yt, sN, py, IC, LA, rX, ah, io, hP, ble, ji, uQ, d, IR, je, cW, qt, vj, ff, eH, eZ, aJW, aF, Sm, iR, iV, KM, bz, dr, qa, eK, LB, es, gk, Bv, Ew, KD, bE, AR, aVv, aFb, II, wz, gZ, Hs, aS, cP, ei, GF, hE, vt, iu, y, pC); #c1(HGF) c2(NP_001010932) c3(hepatocyte growth factor isoform 3 precursor) c4(24206, 24207, 24208) c5(24209, 24210, 24211, 24212, 24213, 24214, 24215) c6( ) c7(oO, T, asg, aC, pf, ea, if, e, al, bll, fd, bB, axk, Vd, ci, qj, IR, sD, blk, blg, bv, dY, aE, fm, aeO, ja, Vv, Ou, HR, K, hu, ex, eL, bc, cp, aa, hm, DA, eG, aeR, iE, HI, LG, EV, bvR, az, aW, hl, LZ, fc, CT, bjk, brr, g, as, eF, cm, Qt, iP, qJ, blj, eM, nB, iA, acS, acw, mx, U, vy, wB, wx, Hb, m, jM, fy, dD, zt, aw, ht, NT, RC, aBx, n, cQ, aj, fr, bd, qN, cd, asS, ai, ft, jz, cc, zw, Nn, gd, kH, IG, GT, dL, bl, eV, hB, vx, Ha, aqi, A, blh, fQ, aq, fe, kp, yq, pm, boD, ar, kT, Sc, iO, asl, dB, hk, Pl, If, Be, hL, at, bjK, uz, fL, bli, B, cn, bL, jv, fM, dA, AS, jp, eR, fG, oe, eX, aA, cR, cz, fF, v, j, bX, q, J, er, eA, asG, Yn, uT, blf, aT, cy, jj, bg, an, rz, bau, ae, dl, bA, eu, jf, Uf, Sh, s, nO, iU, oV, Y, ev, bg, r, aYp, lo, en, aDY, cl, t, iK, pb, ck, ov, sS, rR, ac, c, wg, nM, wO, hc, iM, QG, agf, cS, dy, fD, Bd, bt, IJ, ao, vi, hS, On, hl, kh, tS, aD, iW, jh, vr, dG, eq, fu, iJ, mC, ad, qC, fU, dP, hd, ib, MS, av, Db, yt, sN, py, IC, LA, rX, ab, io, hP, ble, ji, uQ, d, IR, je, cW, qt, vj, ff, eH, eZ, aJW, aF, Sm, iR, iV, KM, bz, dr, qa, eK, LB, es, gk, Bv, Ew, KD, bE, AR, aVv, aFb, II, wz, gZ, Hs, aS, cP, ei, GF, hE, vt, iu, y, pC); #c1(HGF) c2(NP_001010933) c3(hepatocyte growth factor isoform 4 precursor) c4(24216) c5(24217, 24218, 24219, 24220, 24221, 24222, 24223) c6( ) c7(oO, T, asg, aC, pf, ea, if, e, al, bll, fd, bB, axk, Vd, ci, qj, IR, sD, blk, blg, bv, dY, aE, fm, aeO, ja, Vv, Ou, HR, K, hu, ex, eL, bc, cp, aa, hm, DA, eG, aeR, iE, HI, LG, EV, bvR, az, aW, hl, LZ, fc, CT, bjk, brr, g, as, eF, cm, Qt, iP, gJ, blj, eM, nB, iA, acS, acw, mx, U, vy, wB, wx, Hb, m, jM, fy, dD, zt, aw, ht, NT, RC, aBx, n, cQ, aj, fr, bd, qN, cd, asS, ai, ft, jz, cc, zw, Nn, gd, kH, IG, GT, dL, bl, eV, hB, vx, Ha, aqi, A, blh, fQ, aq, fe, kp, yq, pm, boD, ar, kT, Sc, iO, asl, dB, hk, Pl, If, Be, hL, at, bjK, uz, fL, bli, B, cn, bL, jv, fM, dA, AS, jp, eR, fG, oe, eX, aA, cR, cz, fF, v, j, bX, q, J, er, eA, asG, Yn, uT, blf, aT, cy, jj, bq, an, rz, bau, ae, dl, bA, eu, jf, Uf, Sh, s, nO, iU, oV, Y, ev, bg, r, aYp, lo, en, aDY, cl, t, iK, pb, ck, ev, sS, rR, ac, c, wg, nM, wO, hc, iM, QG, agf, cS, dy, fD, Bd, bt, IJ, ao, vi, hS, On, hl, kh, tS, aD, iW, jh, vr, dG, eq, fu, iJ, mC, ad, qC, fU, dP, hd, ib, MS, av, Db, yt, sN, py, IC, LA, rX, ah, io, hP, ble, ji, uQ, d, IR, je, cW, qt, vj, ff, eH, eZ, aJW, aF, Sm, iR, iV, KM, bz, dr, qa, eK, LB, es, gk, Bv, Ew, KD, bE, AR, aVv, aFb, II, wz, gZ, Hs, aS, cP, ei, GF, hE, vt, iu, y, pC); #c1(HGF) c2(NP_001010934) c3(hepatocyte growth factor isoform 5 precursor) c4(24224, 24225, 24226, 24227) c5(24228, 24229, 24230, 24231, 24232, 24233, 24234, 24235, 24236, 24237, 24238, 24239, 24240, 24241, 24242, 24243, 24244, 24245, 24246, 24247, 24248, 24249, 24250, 24251, 24252) c6( ) c7(oO, T, asg, aC, pf, ea, if, e, al, bll, fd, bB, axk, Vd, ci, qj, IR, sD, blk, blg, bv, dY, aE, fm, aeO, ja, Vv, Ou, HR, K, hu, ex, eL, bc, cp, aa, hm, DA, eG, aeR, iE, HI, LG, EV, bvR, az, aW, hl, LZ, fc, CT, bjk, brr, g, as, eF, cm, Qt, iP, qJ, blj, eM, nB, iA, acS, acw, mx, U, vy, wB, wx, Hb, m, jM, fy, dD, zt, aw, ht, NT, RC, aBx, n, cQ, aj, fr, bd, qN, cd, asS, ai, ft, jz, cc, zw, Nn, gd, kH, IG, GT, dL, bl, eV, hB, vx, Ha, aqi, A, blh, fQ, aq, fe, kp, yq, pm, boD, ar, kT, Sc, iO, asl, dB, hk, Pl, If, Be, hL, at, bjK, uz, fL, bli, B, cn, bL, jv, fM, dA, AS, jp, eR, fG, oe, eX, aA, cR, cz, fF, v, j, bX, q, J, er, eA, asG, Yn, uT, blf, aT, cy, jj, bq, an, rz, bau, ae, dl, bA, eu, jf, Uf, Sh, s, nO, iU, oV, Y, ev, bg, r, aYp, lo, en, aDY, cl, t, iK, pb, ck, ov, sS, rR, ac, c, wg, nM, wO, hc, iM, QG, agf, cS, dy, fD, Bd, bt, IJ, ao, vi, hS, On, hl, kh, tS, aD, iW, jh, vr, dG, eq, fu, iJ, mC, ad, qC, fU, dP, hd, ib, MS, av, Db, yt, sN, py, IC, LA, rX, ah, io, hP, ble, ji, uQ, d, IR, je, cW, qt, vj, ff, eH, eZ, aJW, aF, Sm, iR, iV, KM, bz, dr, qa, eK, LB, es, gk, Bv, Ew, KD, bE, AR, aVv, aFb, II, wz, gZ, Hs, aS, cP, ei, GF, hE, vt, iu, y, pC); #c1(HGFAC) c2(NP_001519) c3(hepatocyte growth factor activator isoform 2 preproprotein) c4(118467) c5(118468, 118469, 118470, 118471, 118472, 118473) c6( ) c7(hl, aC, d, fM, aE, amg, vj, if, hL, fd, fr, ci, m, Fq, qN, t, g, ae, B, ad, cl); #c1(HGH1) c2(NP_057542) c3(protein HGH1 homolog) c4(191314, 191315) c5(191316, 191317, 191318, 191319, 191320, 191321, 191322, 191323, 191324, 191325, 191326, 191327) c6( ) c7(n, bo, Rj); #c1(HGS) c2(NP_004703) c3(hepatocyte growth factor-regulated tyrosine kinase substrate) c4(148939, 148940) c5(148941, 148942, 148943, 148944, 148945, 148946) c6( ) c7(T, dD, uK, ea, eX, cz, n, ajM, bS, eq, et, ME, q, aR, h, eV, HO, s, Ls, Ib, r, Z, cm, Qt, Ew, W, bE); #c1(HGS) c2(XP_011523765) c3(hepatocyte growth factor-regulated tyrosine kinase substrate isoform X1) c4( ) c5(318259, 318260, 318261, 318262, 318263, 318264) c6( ) c7(T, dD, uK, ea, eX, cz, n, ajM, bS, eq, et, ME, q, aR, h, eV, HO, s, Ls, Ib, r, Z, cm, Qt, Ew, W, bE); #c1(HGSNAT) c2(NP_689632) c3(heparan-alpha-glucosaminide N-acetyltransferase precursor) c4(243354, 243355, 243356, 243357) c5(243358, 243359, 243360, 243361, 243362, 243363, 243364, 243365, 243366, 243367, 243368, 243369, 243370, 243371, 243372, 243373, 243374, 243375) c6( ) c7(agG, aHX, U, kg); #c1(HGSNAT) c2(XP_005273469) c3(heparan-alpha-glucosaminide N-acetyltransferase isoform X4) c4( ) c5(284599, 284600, 284601, 284602, 284603, 284604) c6( ) c7(agG, aHX, U, kg); #c1(HHAT) c2(NP_001164035) c3(protein-cysteine N-palmitoyltransferase HHAT isoform 2) c4(66524) c5(66525, 66526, 66527, 66528, 66529, 66530, 66531, 66532, 66533, 66534, 66535, 66536) c6( ) c7(T, tQ, Bm, BE, q, ad, eA, hW, brH, sO, h, Nc, K, ae, bln, blm, aOX, d, bf, oV, Y, r, kp, cm, apM, brG, Qu, hc, ag, cj, bt); #c1(HHAT) c2(NP_001164051) c3(protein-cysteine N-palmitoyltransferase HHAT isoform 1) c4(66537, 66538) c5(66539, 66540, 66541, 66542, 66543, 66544, 66545, 66546, 66547, 66548, 66549, 66550, 66551, 66552, 66553, 66554, 66555) c6( ) c7(T, tQ, Bm, BF, q, ad, eA, hW, brH, sO, h, Nc, K, ae, bln, blm, aOX, d, bf, oV, Y, r, kp, cm, apM, brG, Qu, hc, ag, cj, bt); #c1(HHAT) c2(NP_001164058) c3(protein-cysteine N-palmitoyltransferase HHAT isoform 4) c4(66563) c5(66564, 66565, 66566, 66567, 66568, 66569, 66570) c6( ) c7(T, tQ, Bm, BE, q, ad, eA, hW, brH, sO, h, Nc, K, ae, bln, blm, aOX, d, bf, oV, Y, r, kp, cm, apM, brG, Qu, hc, ag, cj, bt); #c1(HHAT) c2(NP_001164059) c3(protein-cysteine N-palmitoyltransferase HHAT isoform 3) c4(66571, 66572) c5(66573, 66574, 66575, 66576, 66577, 66578, 66579, 66580, 66581, 66582, 66583) c6( ) c7(T, tQ, Bm, BF, q, ad, eA, hW, brH, sO, h, Nc, K, ae, bln, blm, aOX, d, bf, oV, Y, r, kp, cm, apM, brG, Qu, hc, ag, cj, bt); #c1(HHAT) c2(XP_006711504) c3(protein-cysteine N-palmitoyltransferase HHAT isoform X2) c4(286042) c5(286043, 286044, 286045) c6( ) c7(T, tQ, Bm, BF, q, ad, eA, hW, brH, sO, h, Nc, K, ae, bln, blm, aOX, d, bf, oV, Y, r, kp, cm, apM, brG, Qu, hc, ag, cj, bt); #c1(HHAT) c2(XP_011508039) c3(protein-cysteine N-palmitoyltransferase HHAT isoform X1) c4( ) c5(298511) c6( ) c7(T, tQ, Bm, BF, q, ad, eA, hW, brH, sO, h, Nc, K, ae, bln, blm, aOX, d, bf, oV, Y, r, kp, cm, apM, brG, Qu, hc, ag, cj, bt); #c1(HHAT) c2(XP_011508043) c3(protein-cysteine N-palmitoyltransferase HHAT isoform X4) c4(298512) c5(298513, 298514, 298515, 298516, 298517) c6( ) c7(T, tQ, Bm, BF, q, ad, eA, hW, brH, sO, h, Nc, K, ae, bln, blm, aOX, d, bf, oV, Y, r, kp, cm, apM, brG, Qu, hc, ag, cj, bt); #c1(HHAT) c2(XP_011508047) c3(protein-cysteine N-palmitoyltransferase HHAT isoform X8) c4( ) c5(298518) c6( ) c7(T, tQ, Bm, BF, q, ad, eA, hW, brH, sO, h, Nc, K, ae, bln, blm, aOX, d, bf, oV, Y, r, kp, cm, apM, brG, Qu, hc, ag, cj, bt); #c1(HHAT) c2(XP_011508048) c3(protein-cysteine N-palmitoyltransferase HHAT isoform X9) c4(298519) c5( ) c6( ) c7(T, tQ, Bm, BF, q, ad, eA, hW, brH, sO, h, Nc, K, ae, bln, blm, aOX, d, bf, oV, Y, r, kp, cm, apM, brG, Qu, hc, ag, cj, bt); #c1(HHAT) c2(XP_011508049) c3(protein-cysteine N-palmitoyltransferase HHAT isoform X10) c4( ) c5(298520, 298521, 298522, 298523, 298524) c6( ) c7(T, tQ, Bm, BF, q, ad, eA, hW, brH, sO, h, Nc, K, ae, bln, blm, aOX, d, bf, oV, Y, r, kp, cm, apM, brG, Qu, hc, ag, cj, bt); #c1(HHATL) c2(NP_065758) c3(protein-cysteine N-palmitoyltransferase HHAT-like protein) c4( ) c5(205217, 205218, 205219, 205220, 205221, 205222, 205223, 205224, 205225, 205226, 205227, 205228, 205229, 205230, 205231, 205232, 205233, 205234) c6( ) c7(K); #c1(HHATL) c2(XP_011532271) c3(protein-cysteine N-palmitoyltransferase HHAT-like protein isoform X2) c4(328329, 328330, 328331) c5(328332, 328333, 328334, 328335) c6( ) c7(K); #c1(HHEX) c2(NP_002720) c3(hematopoietically-expressed homeobox protein HHEX) c4(131399) c5(131400, 131401, 131402, 131403, 131404, 131405, 131406) c6( ) c7(bL, dD, aZ, bDa, aj, dG, j, ci, v, eq, V, fK, J, aT, h, af, aQy, kl, A, aW, fc, zR, mo, eU, nB, mg, hL, awM, mf, IS, ei, bt, AN); #c1(HHIP) c2(NP_071920) c3(hedgehog-interacting protein precursor) c4(212309, 212310) c5(212311, 212312, 212313, 212314, 212315, 212316) c6( ) c7(bL, T, EM, aC, al, aA, bB, aj, v, ci, bh, q, J, ad, eA, aE, K, aa, jf, avP, aq, kp, aF, g, iV, cm, fq, bz, iO, gk, bE, hk, at, Dp, xb, B); #c1(HHIP) c2(XP_006714351) c3(hedgehog-interacting protein isoform X2) c4( ) c5(287781, 287782, 287783, 287784, 287785, 287786) c6( ) c7(bL, T, EM, aC, al, aA, bB, aj, v, ci, bh, q, J, ad, eA, aE, K, aa, jf, avP, aq, kp, aF, g, iV, cm, fq, bz, iO, gk, bE, hk, at, Dp, xb, B); #c1(HHIPL1) c2(NP_001120730) c3(HHIP-like protein 1 isoform a precursor) c4(44749) c5(44750, 44751, 44752, 44753, 44754, 44755, 44756, 44757) c6(44758, 44759) c7(j); #c1(HHIPL1) c2(NP_115801) c3(HHIP-like protein 1 isoform b precursor) c4(223950) c5(223951, 223952, 223953, 223954, 223955, 223956, 223957, 223958) c6(223959, 223960) c7(j); #c1(HHLA1) c2(NP_001138567) c3(HERV-H LTR-associating protein 1 precursor) c4(56997) c5(56998, 56999, 57000, 57001, 57002, 57003) c6( ) c7(Hn); #c1(HHLA2) c2(NP_001269487) c3(HERV-H LTR-associating protein 2 isoform b precursor) c4(101740) c5( ) c6( ) c7(ac); #c1(HHLA2) c2(NP_009003) c3(HERV-H LTR-associating protein 2 isoform a precursor) c4(170181, 170182, 170183) c5(170184, 170185, 170186, 170187, 170188, 170189, 170190, 170191, 170192, 170193, 170194, 170195, 170196, 170197) c6( ) c7(ac); #c1(HHLA2) c2(XP_011510669) c3(HERV-H LTR-associating protein 2 isoform X3) c4( ) c5(301114, 301115, 301116, 301117, 301118, 301119, 301120, 301121, 301122, 301123, 301124, 301125, 301126, 301127, 301128, 301129, 301130, 301131) c6( ) c7(ac); #c1(HIAT1) c2(XP_011540259) c3(hippocampus abundant transcript 1 protein isoform X2) c4(338674) c5( ) c6( ) c7(af); #c1(HIAT1) c2(XP_011540260) c3(hippocampus abundant transcript 1 protein isoform X3) c4( ) c5(338675, 338676, 338677, 338678, 338679, 338680) c6( ) c7(af); #c1(HIBADH) c2(NP_689953) c3(3-hydroxyisobutyrate dehydrogenase, mitochondrial precursor) c4(244506) c5(244507, 244508, 244509, 244510, 244511, 244512) c6( ) c7(cd, dy, SB); #c1(HIBCH) c2(NP_055177) c3(3-hydroxyisobutyryl-CoA hydrolase, mitochondrial isoform 1 precursor) c4(179585, 179586) c5(179587, 179588, 179589, 179590, 179591, 179592) c6( ) c7(blo, fq, ajU); #c1(HIBCH) c2(NP_932164) c3(3-hydroxyisobutyl-CoA hydrolase, mitochondrial isoform 2 precursor) c4(258849) c5(258850, 258851, 258852, 258853, 258854, 258855) c6( ) c7(blo, fq, ajU); #c1(HIBCH) c2(XP_011509256) c3(3-hydroxyisobutyryl-CoA hydrolase, mitochondrial isoform X2) c4( ) c5(299892, 299893, 299894, 299895, 299896, 299897) c6( ) c7(blo, fq, ajU); #c1(HIC1) c2(NP_001091672) c3(hypermethylated in cancer 1 protein isoform 2) c4(38635, 38636) c5(38637, 38638, 38639, 38640, 38641, 38642, 38643) c6( ) c7(T, os, fM, Tb, if, IH, qx, al, aw, aA, bB, n, oZ, fd, fr, ci, qN, jh, AO, q, ad, eA, eJ, iC, bv, iu, Tg, Na, aE, blp, TK, aT, Nc, K, Dz, jj, ae, pi, jf, ZH, s, CN, qt, aW, iU, ff, az, r, fe, aF, en, hf, eF, t, cm, iK, Ld, iV, ck, gk, YE, kP, Qu, gX, m, bt, kS, B, aA0, vi); #c1(HIC1) c2(NP_006488) c3(hypermethylated in cancer 1 protein isoform 1) c4( ) c5(165632, 165633, 165634, 165635, 165636) c6( ) c7(T, os, fM, Tb, if, IH, qx, al, aw, aA, bB, n, oZ, fd, fr, ci, qN, jh, AO, q, ad, eA, eJ, iC, bv, iu, Tg, Na, aE, blp, TK, aT, Nc, K, Dz, jj, ae, pi, jf, ZH, s, CN, qt, aW, iU, ff, az, r, fe, aF, en, hf, eF, t, cm, iK, Ld, iV, ck, gk, YE, kP, Qu, gX, m, bt, kS, B, aA0, vi); #c1(HIC2) c2(NP_055909) c3(hypermethylated in cancer 2 protein) c4(184444) c5(184445, 184446, 184447, 184448, 184449, 184450, 184451, 184452, 184453, 184454, 184455, 184456, 184457, 184458) c6( ) c7(md, agY, eZ); #c1(HID1) c2(NP_085133) c3(protein HID1) c4(219374, 219375) c5(219376, 219377, 219378, 219379, 219380, 219381, 219382, 219383, 219384, 219385, 219386, 219387) c6( ) c7(il, aW, T, zZ, aT); #c1(HIFIA) c2(NP_001230013) c3(hypoxia-inducible factor 1-alpha isoform 3) c4(85787, 85788, 85789) c5(85790, 85791, 85792, 85793, 85794, 85795, 85796) c6( ) c7(oO, gh, T, bM, lD, aC, fR, auW, ea, if, e, al, bll, eh, bB, fd, cL, ci, add, Hr, ip, wa, aJO, aE, Be, fm, bAy, aed, HR, K, qM, hu, aCU, eL, bc, aiJ, cp, Qe, aa, ly, DA, hm, eG, yo, JI, LG, aAg, blt, aW, XV, LZ, fc, hN, vt, vs, zC, g, as, eF, cm, uC, iP, aik, y, lt, eM, nB, iA, go, vA, U, tV, cj, vy, tG, nw, m, ym, fy, ik, iu, dD, sw, zt, vX, ht, NT, qy, wh, aw, n, aj, fr, qN, rP, zP, cd, md, aky, Bl, ft, cc, zw, Cf, gd, Lv, IG, cU, Nf, dL, jy, Jn, h, eV, pi, cY, wC, hi, avc, bFc, hQ, fe, ag, kp, yq, mo, YE, avf, op, Ix, Ye, W, bP, dB, hk, bsO, bo, ayS, If, hL, JM, hR, E, at, qF, anx, it, B, bkV, bL, jv, wj, dA, eR, mr, fG, oe, IH, aGu, eX, aA, buK, cz, hy, v, j, rf, C, AE, Iu, uW, V, AO, q, J, o, eA, azn, eJ, blr, oT, XX, Rl, yw, Mg, rS, yg, aT, cy, rO, nQ, jj, bq, sR, ae, dl, eu, jf, qw, s, De, NE, nO, Y, blq, fO, ev, iU, r, gm, en, afs, cl, t, apx, iK, pb, ck, nM, kP, ac, gX, fP, wR, mf, dy, fD, im, bt, rA, VB, an, gx, Kd, kh, id, Mb, eP, MH, qb, Dd, LX, CL rO, iW, lD, vr, jh, aET, dG, eq, Fb, pz, ad, afb, BY, Jm, hX, av, hd, ib, py, Db, yt, sN, sO, Ot, nI, oW, hD, ji, fb, Yj, d, IR, IU, qt, ff, eH, nh, dq, aeV, Ej, Vl, aDd, hp, avG, aF, iR, bz, Hv, eK, bis, Hp, es, gk, baa, pu, bF, bE, z, uR, blu, aS, GF, IC, tP, X, bEt, BA); #c1(HIFIA) c2(NP_001521) c3(hypoxia-inducible factor 1-alpha isoform 1) c4(118474, 118475) c5(118476, 118477, 118478, 118479, 118480, 118481, 118482, 118483, 118484, 118485, 118486, 118487, 118488, 118489, 118490, 118491, 118492, 118493, 118494, 118495, 118496, 118497, 118498, 118499, 118500, 118501, 118502, 118503, 118504, 118505, 118506, 118507, 118508, 118509, 118510, 118511, 118512, 118513, 118514, 118515, 118516, 118517, 118518, 118519, 118520, 118521, 118522, 118523, 118524, 118525, 118526, 118527, 118528, 118529, 118530, 118531, 118532, 118533, 118534, 118535, 118536, 118537, 118538, 118539, 118540, 118541, 118542, 118543, 118544, 118545, 118546, 118547, 118548, 118549, 118550, 118551, 118552, 118553, 118554, 118555, 118556, 118557, 118558, 118559, 118560, 118561, 118562, 118563, 118564, 118565, 118566, 118567, 118568, 118569, 118570, 118571, 118572, 118573, 118574, 118575, 118576, 118577, 118578, 118579, 118580, 118581, 118582, 118583, 118584, 118585, 118586, 118587, 118588, 118589, 118590, 118591, 118592) c6( ) c7(oO, gh, T, bM, lD, aC, fR, auW, ea, if, e, al, bll, eh, bB, fd, cL, ci, add, Hr, ip, wa, aJO, aE, Be, fm, bAy, aed, HR, K, qM, hu, aCU, eL, bc, aiJ, cp, Qe, aa, ly, DA, hm, eG, yo, JI, LG, aAg, blt, aW, XV, LZ, fc, hN, vt, vs, zC, g, as, eF, cm, uC, iP, aik, y, lt, eM, nB, iA, go, vA, U, tV, cj, vy, tG, nw, m, ym, fy, ik, iu, dD, sw, zt, vX, ht, NT, qy, wh, aw, n, aj, fr, qN, rP, zP, cd, md, aky, Bl, ft, cc, zw, Cf, gd, Lv, IG, cU, Nf, dL, jy, Jn, h, eV, pi, cY, wC, hi, avc, bFc, hQ, fe, aq, kp, yq, mo, YE, avf, op, Ix, Ye, W, bP, dB, hk, bsO, bo, ayS, If, hL, JM, hR, E, at, qF, anx, it, B, bkV, bL, jv, wj, dA, eR, mr, fG, oe, IH, aGu, eX, aA, buK, cz, hy, v, j, rf, C, AE, lu, uW, V, AO, q, J, o, eA, aza eJ, blr, oT, XX, Rl, yw, Mg, rS, yg, aT, cy, rO, nQ, jj, bq, sR, ae, dl, eu, jf, qw, s, De, NE, nO, Y, blq, fO, ev, iU, r, gm, en, afs, cl, t, apx, iK, pb, ck, nM, kP, ac, gX, fP, wR, mf, dy, fD, im, bt, rA, VB, ao, gx, Kd, kh, id, Mb, eP, MH, qb, Dd, LX, CL rO, iW, lD, vr, jh, aET, dG, eq, Fb, pz, ad, afb, BY, Jm, hX, av, hd, ib, py, Db, yt, sN, sO, Ot, nI, oW, hD, ji, fb, Yj, d, IR, IU, qt, ff, eH, nh, dq, aeV, Ej, Vl, aDd, hp, avG, aF, iR, bz, Hv, eK, bis, Hp, es, gk, baa, pu, bF, bE, z, uR, blu, aS, GF, IC, tP, X, bEt, BA); #c1(HIFIA) c2(NP_851397) c3(hypoxia-inducible factor 1-alpha isoform 2) c4(254575) c5(254576, 254577, 254578, 254579, 254580, 254581) c6( ) c7(oO, gh, T, bM, lD, aC, fR, auW, ea, if, e, al, bll, eh, bB, fd, cL, ci, add, Hr, ip, wa, aJO, aE, Bc, fm, bAy, aed, HR, K, qM, hu, aCU, eL, bc, aiJ, cp, Qe, aa, ly, DA, hm, eG, yo, JI, LC, aAg, blt, aW, XV, LZ, fc, hN, vt, vs, zC, g, as, eF, cm, uC, iP, aik, y, lt, eM, nB, iA, go, vA, U, tV, cj, vy, tG, nw, m, ym, fy, ik, iu, dD, sw, zt, vX, ht, NT, qy, wh, aw, n, aj, fr, qN, rP, zP, cd, md, aky, Bl, ft, cc, zw, Cf, gd, Lv, IG, cU, Nf, dL, jy, Jn, h, eV, pi, cY, wC, hi, avc, bFc, hQ, fe, ag, kp, yq, mo, YE, avf, op, Ix, Ye, W, bP, dB, hk, bsO, bo, ayS, If, hL, JM, hR, E, at, qF, anx, it, B, bkV, bL, jv, wj, dA, eR, mr, fG, oe, IH, aGu, eX, aA, buK, cz, hy, v, j, rf, C, AE, lu, uW, V, AO, q, J, o, eA, azn, eJ, blr, oT, XX, Rl, yw, Mg, rS, yg, aT, cy, rO, nQ, jj, bq, sR, ae, dl, eu, jf, qw, s, De, NE, nO, Y, blq, fO, ev, iU, r, gm, en, afs, cl, t, apx, iK, pb, ck, nM, kP, ac, gX, fP, wR, mf, dy, fD, im, bt, rA, VB, ao, gx, Kd, kh, id, Mb, eP, MH, qb, Dd, LX, Cl, rQ, iW, lD, vr, jh, aET, dG, eq, Fb, pz, ad, afb, BY, Jm, hX, av, hd, ib, py, Db, yt, sN, sD, Ot, nl, oW, hD, ji, fb, Yj, d, IR, IU, qt, ff, eH, nh, dq, aeV, Ej, Vl, aDd, hp, avG, aF, iR, bz, Hv, eK, bis, Hp, es, gk, baa, pu, bF, bE, z, uR, blu, aS, GF, IC, tP, X, bEt, BA); #c1(HIFIAN) c2(NP_060372) c3(hypoxia-inducible factor 1-alpha inhibitor) c4(195673, 195674) c5(195675, 195676, 195677, 195678, 195679, 195680, 195681, 195682, 195683, 195684, 195685, 195686, 195687) c6( ) c7(d, pf, at, dL, j, ci, fr, cE, af, ad); #c1(HIFIAN) c2(XP_011538242) c3(hypoxia-inducible factor 1-alpha inhibitor isoform X1) c4(335849) c5( ) c6( ) c7(d, pf, at, dL, j, ci, fr, cE, af, ad); #c1(HIFIAN) c2(XP_011538243) c3(hypoxia-inducible factor 1-alpha inhibitor isoform X2) c4( ) c5(335850, 335851, 335852, 335853, 335854) c6( ) c7(d, pf, at, dL, j, ci, fr, cE, af, ad); #c1(HIF3A) c2(NP_690007) c3(hypoxia-inducible factor 3-alpha isoform a) c4(244741) c5(244742, 244743, 244744, 244745, 244746, 244747) c6( ) c7(dA, hQ, aq, fr, K, B); #c1(HIF3A) c2(NP_690008) c3(hypoxia-inducible factor 3-alpha isoform c) c4(244748, 244749, 244750, 244751, 244752) c5(244753, 244754, 244755, 244756, 244757, 244758, 244759, 244760, 244761, 244762, 244763, 244764, 244765, 244766, 244767, 244768, 244769, 244770, 244771, 244772, 244773, 244774) c6( ) c7(dA, hQ, aq, fr, K, B); #c1(HIF3A) c2(NP_690009) c3(hypoxia-inducible factor 3-alpha isoform d) c4(244775) c5(244776, 244777, 244778, 244779, 244780, 244781, 244782, 244783, 244784, 244785, 244786, 244787, 244788, 244789, 244790, 244791, 244792, 244793) c6( ) c7(dA, hQ, aq, fr, K, B); #c1(HIF3A) c2(XP_005259209) c3(hypoxia-inducible factor 3-alpha isoform X2) c4( ) c5(275981, 275982, 275983, 275984, 275985, 275986, 275987, 275988, 275989, 275990, 275991, 275992) c6( ) c7(dA, hQ, aq, fr, K, B); #c1(HIF3A) c2(XP_005259210) c3(hypoxia-inducible factor 3-alpha isoform X3) c4(275993) c5(275994, 275995, 275996, 275997, 275998, 275999) c6( ) c7(dA, hQ, aq, fr, K, B); #c1(HIF3A) c2(XP_005259211) c3(hypoxia-inducible factor 3-alpha isoform X1) c4(276000, 276001, 276002) c5(276003, 276004, 276005, 276006, 276007, 276008) c6( ) c7(dA, hQ, aq, fr, K, B); #c1(HIGD1A) c2(NP_001093138) c3(HIG1 domain family member IA, mitochondrial isoform a) c4(39823, 39824) c5(39825, 39826, 39827, 39828, 39829, 39830, 39831, 39832) c6( ) c7(if, ey, K, qN); #c1(HIGD1A) c2(NP_001093139) c3(HIG1 domain family member IA, mitochondrial isoform b) c4( ) c5(39833, 39834, 39835, 39836, 39837, 39838, 39839, 39840) c6( ) c7(if, ey, K, qN); #c1(HIGD1C) c2(NP_001103089) c3(HIG1 domain family member 1C) c4( ) c5(41833, 41834, 41835, 41836, 41837) c6( ) c7(bL); #c1(HIGD1C) c2(XP_011536950) c3(HIG1 domain family member 1C isoform X1) c4(334632) c5(334633) c6( ) c7(bL); #c1(HIGD2A) c2(NP_620175) c3(HIG1 domain family member 2A, mitochondrial) c4(237471, 237472) c5(237473, 237474, 237475, 237476, 237477, 237478, 237479, 237480, 237481, 237482, 237483, 237484) c6( ) c7(aq); #c1(HILPDA) c2(NP_001092256) c3(hypoxia-inducible lipid droplet-associated protein) c4(39459) c5(39460, 39461, 39462, 39463, 39464, 39465, 39466, 39467, 39468, 39469, 39470, 39471) c6(39472, 39473) c7(es, T, d, py, eR, if, fc, r, rX, yu, fr, ci, qN, blv, q); #c1(HINFP) c2(NP_001230188) c3(histone H4 transcription factor isoform 2) c4(86076) c5(86077, 86078, 86079, 86080, 86081, 86082) c6( ) c7(aKO, ad); #c1(HINFP) c2(XP_011541046) c3(histone H4 transcription factor isoform X2) c4(339569) c5(339570) c6( ) c7(aKO, ad); #c1(HINFP) c2(XP_011541047) c3(histone H4 transcription factor isoform X1) c4( ) c5(339571, 339572, 339573, 339574, 339575) c6( ) c7(aKO, ad); #c1(HINT1) c2(NP_005331) c3(histidine triad nucleotide-binding protein 1) c4(155050) c5(155051, 155052, 155053, 155054, 155055, 155056) c6( ) c7(wY, aqh, Gv, jx, bhi, oj, aA, bw, aq, aF, bk, bV, f, B, hX); #c1(HINT2) c2(NP_115982) c3(histidine triad nucleotide-binding protein 2, mitochondrial precursor) c4(225096) c5(225097, 225098, 225099, 225100, 225101, 225102) c6( ) c7(B, dA, af); #c1(HIP1) c2(NP_001230127) c3(huntingtin-interacting protein 1 isoform 2) c4(85966) c5(85967, 85968, 85969, 85970, 85971, 85972, 85973, 85974, 85975) c6( ) c7(T, fM, ha, jh, bB, n, ci, nA, aR, ad, rC, aT, ae, B, blw, eZ, hf, bN, rR, eM, bE, X); #c1(HIP1) c2(NP_005329) c3(huntingtin-interacting protein 1 isoform 1) c4(155036) c5(155037, 155038, 155039, 155040, 155041, 155042) c6( ) c7(T, fM, ha, jh, bB, n, ci, nA, aR, ad, rC, aT, ae, B, blw, eZ, hf, bN, rR, eM, bE, X); #c1(HIP1R) c2(NP_003950) c3(huntingtin-interacting protein 1-related protein isoform 1) c4(142407) c5(142408, 142409, 142410, 142411, 142412, 142413) c6( ) c7(mU, T, Gt, mW, ml, cj, mS, oh, mY, bK, byQ, an, mV, mT, mX); #c1(HIPK1) c2(XP_011539282) c3(homeodomain-interacting protein kinase 1 isoform X7) c4(337340, 337341) c5(337342, 337343, 337344, 337345, 337346, 337347, 337348, 337349, 337350, 337351, 337352, 337353) c6( ) c7(T, g, K, r); #c1(HIPK2) c2(NP_001106710) c3(homeodomain-interacting protein kinase 2 isoform 2) c4(42609) c5(42610, 42611, 42612, 42613, 42614, 42615) c6( ) c7(bL, T, AS, bB, q, br, eW, hd, Rq, aT, h, K, pi, aW, r, as, t, cm, bw, Hp, ck, qJ, bE, nB, bE, dy, m, Hb, bt, kS, B, jr); #c1(HIPK2) c2(NP_073577) c3(homeodomain-interacting protein kinase 2 isoform 1) c4(212931, 212932) c5(212933, 212934, 212935, 212936, 212937, 212938, 212939, 212940, 212941, 212942, 212943, 212944) c6( ) c7(bL, T, AS, bB, q, br, eW, hd, Rq, aT, h, K, pi, aW, r, as, t, cm, bw, Hp, ck, gJ, bE, nB, bE, dy, m, Hb, bt, kS, B, jr); #c1(HIPK3) c2(NP_001265092) c3(homeodomain-interacting protein kinase 3 isoform 2) c4(97757) c5 (97758, 97759, 97760, 97761, 97762, 97763, 97764, 97765, 97766, 97767, 97768, 97769, 97770, 97771, 97772) c6( ) c7(bL, cF, ad, kH); #c1(HIPK3) c2(XP_011518137) c3(homeodomain-interacting protein kinase 3 isoform X1) c4(312115, 312116) c5(312117, 312118, 312119, 312120, 312121, 312122, 312123, 312124, 312125, 312126, 312127) c6( ) c7(bL, cF, ad, kH); #c1(HIRA) c2(NP_003316) c3(protein HIRA) c4(137417, 137418, 137419, 137420, 137421) c5(137422, 137423, 137424, 137425, 137426, 137427, 137428, 137429, 137430, 137431, 137432, 137433, 137434, 137435, 137436, 137437, 137438, 137439, 137440, 137441, 137442, 137443, 137444, 137445, 137446, 137447, 137448, 137449, 137450, 137451) c6( ) c7(bL, agd, RX, bwE, Mz, jy); #c1(HIRIP3) c2(NP_003600) c3(HIRA-interacting protein 3 isoform 1) c4(139488, 139489) c5(139490, 139491, 139492, 139493, 139494, 139495, 139496, 139497, 139498, 139499, 139500, 139501) c6( ) c7(bN); #c1(HIST1H1A) c2(NP_005316) c3(histone HIT) c4(154945) c5(154946, 154947, 154948, 154949, 154950, 154951) c6( ) c7(blx); #c1(HIST1H1B) c2(NP_005313) c3(histone H1.5) c4(154905) c5(154906, 154907, 154908, 154909, 154910, 154911) c6( ) c7(hE, jx, eZ); #c1(HIST1H1C) c2(NP_005310) c3(histone H1.2) c4(154884) c5(154885, 154886, 154887, 154888, 154889, 154890, 154891, 154892, 154893, 154894, 154895, 154896) c6( ) c7(ck, bt, an, aT); #c1(HIST1H1D) c2(NP_005311) c3(histone H1.3) c4(154897) c5( ) c6( ) c7(xb); #c1(HIST1H1E) c2(NP_005312) c3(histone H1.4) c4(154898) c5(154899, 154900, 154901, 154902, 154903, 154904) c6( ) c7(qK); #c1(HIST1H1T) c2(NP_005314) c3(histone Hit) c4(154912) c5(154913, 154914, 154915, 154916, 154917, 154918) c6( ) c7(ck, oe); #c1(HIST1H2AE) c2(NP_066390) c3(histone H2A type 1-B/E) c4(207291) c5(207292, 207293, 207294, 207295, 207296, 207297, 207298, 207299, 207300, 207301, 207302, 207303, 207304, 207305, 207306, 207307) c6( ) c7(cj); #c1(HIST1H2AH) c2(NP_542163) c3(histone H2A type 1-H) c4(231470, 231471) c5(231472, 231473, 231474, 231475, 231476, 231477, 231478, 231479, 231480, 231481, 231482, 231483) c6( ) c7(LB); #c1(HIST1H2BG) c2(NP_003509) c3(histone H2B type 1-C/E/F/G/I) c4(138805) c5( ) c6( ) c7(ad); #c1(HIST1H2BH) c2(NP_003515) c3(histone H2B type 1-H) c4(138813) c5( ) c6( ) c7(ac); #c1(HIST1H2BM) c2(NP_003512) c3(histone H2B type 1-M) c4(138806) c5(138807, 138808, 138809, 138810, 138811, 138812) c6( ) c7(aW, it, aT); #c1(HIST1H3G) c2(NP_003525) c3(histone H3.1) c4(138814) c5(138815, 138816, 138817, 138818, 138819, 138820, 138821, 138822, 138823, 138824, 138825, 138826, 138827, 138828, 138829, 138830, 138831, 138832, 138833, 138834, 138835, 138836, 138837, 138838, 138839, 138840, 138841, 138842, 138843, 138844, 138845, 138846, 138847, 138848, 138849, 138850, 138851, 138852, 138853, 138854, 138855, 138856, 138857, 138858, 138859, 138860) c6( ) c7(d, eA); #c1(HIST1H4D) c2(NP_003530) c3(histone H4) c4(138861) c5(138862, 138863, 138864, 138865, 138866, 138867, 138868, 138869, 138870, 138871, 138872, 138873, 138874, 138875, 138876, 138877, 138878, 138879, 138880, 138881, 138882, 138883, 138884, 138885, 138886, 138887, 138888, 138889, 138890, 138891, 138892, 138893, 138894, 138895, 138896, 138897, 138898, 138899, 138900, 138901, 138902, 138903, 138904, 138905, 138906, 138907, 138908, 138909, 138910, 138911, 138912, 138913, 138914, 138915, 138916, 138917, 138918, 138919, 138920, 138921, 138922, 138923, 138924, 138925, 138926, 138927, 138928, 138929, 138930, 138931, 138932, 138933, 138934, 138935, 138936, 138937, 138938, 138939, 138940, 138941, 138942, 138943, 138944, 138945, 138946, 138947, 138948, 138949, 138950, 138951, 138952, 138953, 138954, 138955, 138956, 138957, 138958, 138959, 138960, 138961, 138962, 138963) c6(138964, 138965, 138966, 138967, 138968, 138969, 138970, 138971, 138972, 138973, 138974, 138975, 138976, 138977, 138978, 138979) c7(Qi, T, ft, eM, iU, Y, eD, ff, eZ, r, rx, eA, en, pb, it, 8); #c1(HIST3H3) c2(NP_003484) c3(histone H3.1t) c4(138706) c5(138707, 138708, 138709, 138710, 138711, 138712) c6( ) c7(fq, ad, nA); #c1(HIVEP1) c2(XP_011512855) c3(zinc finger protein 40 isoform X1) c4(303928, 303929, 303930, 303931) c5(303932, 303933, 303934, 303935, 303936, 303937, 303938, 303939, 303940, 303941, 303942, 303943, 303944, 303945, 303946, 303947, 303948, 303949, 303950, 303951, 303952, 303953, 303954, 303955, 303956) c6( ) c7(T, ac, aW, FO, xs, FP, aT, ad); #c1(HIVEP1) c2(XP_011512856) c3(zinc finger protein 40 isoform X4) c4(303957) c5(303958) c6( ) c7(T, ac, aW, FO, xs, FP, aT, ad); #c1(HIVEP1) c2(XP_011512857) c3(zinc finger protein 40 isoform X5) c4(303959) c5(303960, 303961, 303962, 303963, 303964, 303965, 303966, 303967, 303968, 303969, 303970, 303971) c6( ) c7(T, ac, aW, FO, xs, FP, aT, ad); #c1(HIVEP2) c2(NP_006725) c3(transcription factor HIVEP2) c4(167446) c5(167447, 167448, 167449, 167450, 167451, 167452, 167453, 167454, 167455, 167456, 167457, 167458, 167459, 167460, 167461, 167462, 167463) c6( ) c7(aW, j, an, aT); #c1(HJURP) c2(NP_001269891) c3(Holliday junction recognition protein isoform b) c4(103074) c5(103075, 103076, 103077, 103078, 103079, 103080) c6( ) c7(aW, ey, aT); #c1(HJURP) c2(NP_001269892) c3(Holliday junction recognition protein isoform c) c4(103081) c5(103082, 103083, 103084, 103085, 103086, 103087, 103088) c6( ) c7(aW, ey, aT); #c1(HJURP) c2(NP_060880) c3(Holliday junction recognition protein isoform a) c4(198306) c5(198307, 198308, 198309, 198310, 198311, 198312) c6( ) c7(aW, ey, aT); #c1(HK1) c2(NP_000179) c3(hexokinase-1 isoform HKI) c4(3875, 3876) c5(3877, 3878, 3879, 3880, 3881, 3882, 3883, 3884, 3885, 3886, 3887, 3888) c6( ) c7(bL, T, Am, aA, v, blA, j, biz, ai, aR, ad, eA, dP, av, pN, oW, dV, K, jj, bq, ae, eG, xX, d, Y, yL, aF, S, nC, bz, bly, VJ, ql, eM, dB, Ip, IM); #c1(HK1) c2(NP_277031) c3(hexokinase-1 isoform HKI-R) c4(228745, 228746) c5(228747, 228748, 228749, 228750, 228751, 228752, 228753, 228754, 228755, 228756, 228757, 228758) c6( ) c7(bL, T, Am, aA, v, blA, j, biz, ai, aR, ad, eA, dP, av, PN, oW, dV, K, jj, bq, ae, eG, xX, d, Y, yL, aF, S, nC, bz, bly, VJ, ql, eM, dB, Ip, IM); #c1(HK1) c2(XP_005269793) c3(hexokinase-1 isoform X2) c4(282826, 282827, 282828) c5(282829, 282830, 282831, 282832, 282833, 282834, 282835, 282836, 282837, 282838, 282839, 282840, 282841, 282842, 282843, 282844, 282845, 282846, 282847, 282848) c6( ) c7(bL, T, Am, aA, v, blA, j, biz, ai, aR, ad, eA, dP, av, pN, oW, dV, K, jj, bq, ae, eG, xX, d, Y, yL, aF, S, nC, bz, bly, VJ, ql, eM, dB, Ip, IM); #c1(HK1) c2(XP_011538034) c3(hexokinase-1 isoform X1) c4(335597, 335598) c5(335599, 335600, 335601, 335602, 335603, 335604, 335605, 335606, 335607, 335608) c6( ) c7(bL, T, Am, aA, v, blA, j, biz, ai, aR, ad, eA, dP, av, pN, oW, dV, K, jj, bq, ae, eG, xX, d, Y, yL, aF, S, nC, bz, bly, VJ, ql, eM, dB, Ip, IM); #c1(HK2) c2(NP_000180) c3(hexokinase-2) c4(3889, 3890) c5(3891, 3892, 3893, 3894, 3895, 3896, 3897, 3898, 3899, 3900, 3901, 3902, 3903, 3904, 3905, 3906) c6( ) c7(bL, HQ, T, aC, bB, n, aj, v, j, ci, fr, cd, J, ad, eA, av, jz, aE, aT, jy, ae, d, B, dH, aW, Y, anx, aq, Ej, t, cm, bz, dB, bE, mf, m, im, X, BA); #c1(HK3) c2(NP_002106) c3(hexokinase-3) c4(124605) c5(124606, 124607, 124608, 124609, 124610, 124611) c6( ) c7(bt, jj, hi); #c1(HKDC1) c2(NP_079406) c3(putative hexokinase HKDC1) c4(217952, 217953, 217954) c5(217955, 217956, 217957, 217958, 217959, 217960, 217961, 217962, 217963, 217964, 217965, 217966) c6( ) c7(cm, T, bz); #c1(HKDC1) c2(XP_011538497) c3(putative hexokinase HKDC1 isoform X1) c4( ) c5(336249, 336250, 336251, 336252, 336253, 336254) c6( ) c7(cm, T, bz); #c1(HLA-A) c2(NP_001229687) c3(HLA class I histocompatibility antigen, A-1 alpha chain precursor) c4(84714, 84715, 84716, 84717, 84718) c5(84719, 84720, 84721, 84722, 84723, 84724, 84725, 84726, 84727, 84728, 84729, 84730, 84731, 84732, 84733, 84734, 84735, 84736, 84737, 84738, 84739, 84740, 84741, 84742, 84743, 84744, 84745, 84746, 84747, 84748, 84749, 84750, 84751, 84752, 84753, 84754, 84755, 84756, 84757, 84758, 84759, 84760, 84761, 84762, 84763, 84764, 84765, 84766, 84767, 84768, 84769, 84770, 84771, 84772, 84773, 84774, 84775, 84776, 84777, 84778, 84779, 84780, 84781, 84782, 84783, 84784, 84785, 84786) c6( ) c7(T, fd, aoj, ci, aY, xy, aE, rw, dV, bBp, hu, hH, cp, aa, uY, Ik, GR, fT, Jr, cj, bAD, k, vF, eg, uL, gm, blK, blB, vE, ht, blD, aj, qW, cd, tD, ey, nP, mR, ge, fe, CQ, dB, eD, aCD, abW, jv, fZ, aA, q, blN, yu, rz, DX, arl, bf, lC, lo, pb, cT, OW, ac, iM, ig, iQ, CP, aDR, bt, Ze, iW, aZU, jh, aHv, blM, ad, wD, hX, vJ, Ot, akJ, oW, IQ, blE, atJ, ff, iV, bz, IU, amS, Om, aDJ, oQ, i, lf, lC, WX, ne, rk, bM, xS, if, bB, cL, bh, ip, x, vV, fS, bFU, ja, azm, bc, JI, eE, eF, cm, xD, blQ, aiM, hh, avY, blG, oY, WB, RN, bsg, UD, eV, DU, cC, A, lb, yq, jq, bP, eo, fL, B, dA, eX, V, ld, ae, hM, ev, afq, bu, aaO, t, ck, yH, dM, iD, qi, od, afm, ds, qh, hD, rN, vc, JK, bsn, nJ, atX, d, je, wc, bHX, CF, gk, yE, y, sH, pC, aC, fR, hV, al, qj, IR, aMB, wa, AW, rB, wt, DY, mH, aEV, blP, axu, mQ, aGQ, hN, g, ve, uC, iP, dW, aDM, bsh, Ro, QO, Ol, fN, apt, aUX, ft, kH, aaA, blO, dx, aXy, blL, cM, Zj, blF, blH, W, bbx, aZL, mg, JM, Xa, blR, fM, fG, jx, hz, j, pd, eA, J, o, er, lg, hK, kl, Y, r, en, aoG, iK, bN, sn, Dy, kB, hA, hc, Da, dy, bGB, gT, LS, Gl, aaT, aFe, aZ, ah, hF, dP, acu, io, aNp, Yi, IU, BN, eH, cr, hp, Fq, Pd, iR, TA, Bv, Lj, aCI, hE, eh, bwS, aU, pk, aW, HA, aVc, bdc, eM, iT, aFc, fr, qN, Tl, aPb, ai, eW, bBq, h, dL, aDC, ux, hB, aq, gG, kk, Wt, Qu, hk, bm, uz, aDE, bL, bll, eR, dK, rf, blC, mP, qp, aT, af, aZQ, bid, iU, yL, aDm, f, lY, ajI, BU, yW, Zg, AH, Kd, qb, aD, jE, mC, qC, av, F, aaU, oz, azq, vO, yF, uQ, eZ, yy, Ej, aF, LB, axs, bE, aED, fh, X, Ex); #c1(HLA-A) c2(NP_002107) c3(HLA class I histocompatibility antigen, A-1 alpha chain precursor) c4(124612, 124613, 124614, 124615, 124616, 124617) c5(124618, 124619, 124620, 124621, 124622, 124623, 124624, 124625, 124626, 124627, 124628, 124629, 124630, 124631, 124632, 124633, 124634, 124635, 124636, 124637, 124638, 124639, 124640, 124641, 124642, 124643, 124644, 124645, 124646, 124647, 124648, 124649, 124650, 124651, 124652, 124653, 124654, 124655, 124656, 124657, 124658, 124659, 124660, 124661, 124662, 124663, 124664, 124665, 124666, 124667, 124668, 124669, 124670, 124671, 124672, 124673, 124674, 124675, 124676, 124677, 124678, 124679, 124680, 124681, 124682, 124683, 124684) c6( ) c7(T, fd, aoj, ci, aY, xy, aE, rw, dV, bBp, hu, hH, cp, aa, uY, lk, GR, fT, Jr, cj, bAD, k, vF, eg, uL, qm, blK, blB, vE, ht, blD, aj, qW, cd, tD, ey, nP, mR, ge, fe, CQ, dB, eD, aCD, abW, jv, fZ, aA, q, blN, yu, rz, DX, arl, bf, lC, lo, pb, cT, OW, ac, iM, ig, iQ, CP, aDR, bt, Ze, iW, aZU, jh, aHv, blM, ad, wD, hX, vJ, Ot, akJ, oW, IQ, blE, atJ, ff, iV, bz, IU, amS, Om, aDJ, oQ, i, If, lC, WX, ne, rk, bM, xS, if, bB, cL, bh, ip, x, vV, fS, bFU, ja, azm, bc, JI, eE, eF, cm, xD, blQ, aiM, hh, avY, blG, oY, WB, RN, bsg, UD, eV, DU, cC, A, lb, yq, jq, bP, eo, fL, B, dA, eX, V, ld, ae, hM, ev, afq, bu, aaO, t, ck, yH, dM, iD, qi, od, afm, ds, qh, hD, rN, vc, JK, bsn, nJ, atX, d, je, wc, bHX, CF, gk, yE, y, sH, pC, aC, fR, hV, al, qj, IR, aMB, wa, AW, rB, wt, DY, mH, aEV, blP, axu, mQ, aGQ, hN, g, ve, uC, iP, dW, aDM, bsh, Re, QO, Ol, fN, apt, aUX, ft, kH, aaA, blO, dx, aXy, blL, cM, Zj, blF, blH, W, bbx, aZL, mg, JM, Xa, blR, fM, fG, jx, hz, j, pd, eA, J, o, er, Ig, hK, kl, Y, r, en, aoG, iK, bN, sn, Dy, kB, hA, hc, Da, dy, bGB, gT, LS, Gl, aaT, aFe, al, ah, hF, dP, acu, in, aNp, Yi, IU, BN, eH, cr, hp, Fq, Pd, iR, TA, Bv, Lj, aCI, hE, eh, bwS, aU, pk, aW, HA, aVc, bdc, eM, iT, aFc, fr, qN, Tl, aPb, ai, eW, bBq, h, dL, aDC, ux, hB, aq, gG, kk, Wt, Qu, hk, bm, uz, aDE, bL, bll, eR, dK, rf, blG, mP, qp, aT, af, aZQ, bid, iU, yL, aDm, f, IY, ajl, BU, yW, Zg, AH, Kd, qb, aD, jE, mC, qC, av, F, aaU, oz, azq, vO, yF, uQ, eZ, yy, Ej, aF, LB, axs, bE, aED, fh, X, Ex); #c1(HLA-A) c2(XP_011546426) c3(HLA class I histocompatibility antigen, A-1 alpha chain isoform X1) c4(345181, 345182, 345183, 345184, 345185, 345186, 345187, 345188, 345189, 345190, 345191, 345192, 345193, 345194, 345195, 345196, 345197, 345198, 345199, 345200) c5(345201, 345202, 345203, 345204, 345205, 345206, 345207, 345208, 345209, 345210, 345211, 345212, 345213, 345214, 345215, 345216, 345217, 345218, 345219, 345220, 345221, 345222, 345223, 345224, 345225, 345226, 345227, 345228, 345229, 345230, 345231, 345232, 345233, 345234, 345235, 345236, 345237, 345238, 345239, 345240, 345241, 345242, 345243, 345244, 345245, 345246) c6( ) c7(T, fd, aoj, ci, aY, xy, aE, rw, dV, bBp, hu, hH, cp, aa, uY, Ik, GR, fT, Jr, cj, bAD, k, vF, eg, uL, qm, blK, blB, vE, ht, blD, aj, qW, cd, tD, ey, nP, mR, ge, fe, CQ, dB, eD, aCD, abW, jv, fZ, aA, q, blN, yu, rz, DX, arl, bf, IC, lo, pb, cT, OW, ac, iM, ig, iQ, CP, aDR, bt, Ze, iW, aZU, jh, aHv, blM, ad, wD, hX, vJ, Ot, akJ, oW, IQ, blE, atJ, ff, iV, bz, IU, amS, Om, aDJ, oQ, i, lf, IC, WX, ne, rk, bM, xS, if, bB, cL, bh, ip, x, vV, fS, bFU, ja, azm, bc, JI, eE, eF, cm, xD, blQ, aiM, hh, avY, blG, oY, WB, RN, bsg, UD, eV, DU, cC, A, lb, yq, jq, bP, eo, fL, B, dA, eX, V, ld, ae, hM, ev, afq, bu, aaO, t, ck, yH, dM, iD, qi, od, afm, ds, qh, hD, rN, vc, JK, bsn, nJ, atX, d, je, wc, bHX, CF, gk, yE, y, sH, pC, aC, fR, hV, al, gj, IR, aMB, wa, AW, rB, wt, DY, mH, aEV, blP, axu, mQ, aGQ, hN, g, ve, uC, iP, dW, aDM, bsh, Re, QO, Ol, fN, apt, aUX, ft, kH, aaA, blO, dx, aXy, blL, cM, Zj, blE, blH, W, bbx, aZL, mg, JM, Xa, blR, fM, fG, jx, hz, j, pd, eA, J, o, er, Ig, hK, kl, Y, r, en, aoG, iK, bN, sn, Dy, kB, hA, hc, Da, dy, bGB, gT, LS, Gl, aaT, aFe, aZ, ah, hF, dP, acu, io, aNp, Yi, IU, BN, eH, cr, hp, Fq, Pd, iR, TA, Bv, Lj, aCI, hE, eh, bwS, aU, pk, aW, HA, aVc, bdc, eM, iT, aFc, fr, qN, Tl, aPb, ai, eW, bBq, h, dL, aDC, ux, hB, aq, gG, kk, Wt, Qu, hk, bm, uz, aDE, bL, bll, eR, dK, rf, blC, mP, qp, aT, af, aZQ, blJ, iU, yL, aDm, f, IY, ajl, BU, yW, Zg, AH, Kd, qb, aD, jE, mC, qC, av, F, aaU, oz, azq, vO, yF, uQ, eZ, yy, Ej, aF, LB, axs, bE, aED, fh, X, Ex); #c1(HLA-B) c2(NP_005505) c3(major histocompatibility complex, class I, B precursor) c4(156895, 156896, 156897) c5(156898, 156899, 156900, 156901, 156902, 156903, 156904, 156905, 156906, 156907, 156908, 156909, 156910, 156911) c6( ) c7(bM, T, aC, xS, fR, fV, if, e, al, bO, CH, eb, fd, bwS, gA, gj, ci, bh, aoj, aY, Tz, aMB, bv, AW, wD, xy, vV, rw, aX, fS, bFU, dV, ja, aU, azm, rB, K, hu, wt, hH, LG, eL, bc, aiJ, cp, aa, hm, mH, aEV, bG, blP, aW, axu, asD, mQ, HA, LZ, blU, uY, hN, g, eE, ve, eF, aVc, GR, cm, y, fT, iT, Jr, aiM, cj, dW, bAD, k, m, aDM, vF, eg, uL, qR, qm, bsh, cE, blB, QO, vE, yG, ht, fN, pk, blG, n, blD, aj, oY, fr, uE, aUX, bd, qN, qW, cd, ai, eh, aJe, eW, aJf, aPb, ft, xC, adX, aMj, kH, h, dL, aaA, blO, aDC, ux, ey, he, blX, rk, nP, OV, mR, eZ, A, MD, aXy, aHW, sp, ff, lb, ge, fe, yq, aMJ, CQ, gG, kk, cM, Zj, lx, Wt, jq, blE, blH, abV, adZ, W, NL, dB, hk, aZL, If, mg, JM, bm, uz, fL, aCD, DY, Pr, B, abW, it, bL, blR, jv, fM, bll, eR, fG, jx, rf, aA, j, V, g, J, eA, o, ga, aWb, blG, blN, fh, qp, ld, yg, aT, yu, hK, rz, DX, ae, aZQ, blW, hM, bf, iU, Y, IC, r, afq, lo, aDm, en, t, pb, bN, IY, ck, ajl, Ta, OW, sn, c, aQd, hA, ig, nM, iM, AH, iQ, Zg, CP, auT, Da, dy, gT, bt, Kd, aaT, aFe, Ke, aD, dM, iW, ha, jh, aHv, iD, dG, jE, blT, oL, hF, bCx, XB, ad, qC, dP, kL, hX, F, od, av, afm, blV, acu, Ot, ds, azq, qh, oW, akJ, hD, rN, vc, JK, lQ, bsn, yF, uQ, d, BN, ue, lU, je, KS, wc, azP, bHX, eH, dN, hv, yy, aF, hp, cr, Fq, Pd, iV, dr, aYt, LB, Bv, zr, axs, yE, blS, arE, Ny, bE, aED, Om, Lj, aCl, oQ, i, lC, ra, ne, sH, pC); #c1(HLA-B) c2(XP_005275157) c3(major histocompatibility complex, class I, B isoform X3) c4(285552, 285553, 285554) c5(285555, 285556, 285557, 285558, 285559, 285560, 285561, 285562, 285563, 285564, 285565, 285566, 285567, 285568, 285569, 285570, 285571, 285572, 285573) c6( ) c7(bM, T, aC, xS, fR, fV, if, e, al, bO, CH, eb, fd, bwS, gA, qj, ci, bh, aoj, aY, Tz, aMB, bv, AW, wD, xy, vV, rw, aX, fS, bFU, dV, ja, aU, azm, rB, K, hu, wt, hH, LG, eL, bc, aiJ, cp, aa, hm, mH, aEV, bG, blP, aW, axu, asD, mQ, HA, LZ, blU, uY, hN, g, eE, ve, eF, aVc, GR, cm, y, fT, iT, Jr, aiM, cj, dW, bAD, k, m, aDM, vF, eg, uL, qR, qm, bsh, cE, blB, QO, vE, yG, ht, fN, pk, blG, n, blD, aj, oY, fr, uE, aUX, bd, qN, qW, cd, ai, eh, aJe, eW, aJf, aPb, ft, xC, adX, aMj, kH, h, dL, aaA, blO, aDC, ux, ey, he, blX, rk, nP, OV, mR, eZ, A, MD, aXy, aHW, sp, ff, lb, ge, fe, yq, aMJ, CQ, gG, kk, cM, Zj, lx, Wt, jq, blF, blH, abV, adZ, W, NL, dB, hk, aZL, lf, mg, JM, bm, uz, fL, aCD, DY, Pr, B, abW, it, bL, blR, jv, fM, blI, eR, fG, jx, rf, aA, j, V, q, J, eA, o, ga, aWb, blC, blN, fh, qp, ld, yg, aT, yu, hK, rz, DX, ae, aZQ, blW, hM, bf, iU, Y, lC, r, afq, lo, aDm, en, t, pb, bN, lY, ck, ajl, Ta, OW, sn, c, aQd, hA, ig, nM, iM, AH, iQ, Zg, CP, auT, Da, dy, gT, bt, Kd, aaT, aFe, Ke, aD, dM, iW, ha, jh, aHv, iD, dG, jE, blT, oL, hF, bCx, XB, ad, qC, dP, kL, hX, F, od, av, afm, blV, acu, Ot, ds, azq, qh, oW, akJ, hD, rN, vc, JK, lQ, bsn, yF, uQ, d, BN, ue, lU, je, KS, wc, azP, bHX, eH, dN, hv, yy, aF, hp, cr, Fq, Pd, iV, dr, aYt, LB, Bv, zr, axs, yE, blS, arE, Ny, bE, aED, Om, Lj, aCl, oQ, i, lC, ra, ne, sH, pC); #c1(HLA-B) c2(XP_005275592) c3(major histocompatibility complex, class I, B isoform X6) c4(285628, 285629, 285630) c5(285631, 285632, 285633, 285634, 285635, 285636, 285637, 285638, 285639, 285640, 285641, 285642, 285643, 285644, 285645, 285646, 285647, 285648) c6( ) c7(bM, T, aC, xS, fR, fV, if, e, al, bO, CH, eb, fd, bwS, gA, qj, ci, bh, aoj, aY, Tz, aMB, bv, AW, wD, xy, vV, rw, aX, fS, bFU, dV, ja, aU, azm, rB, K, hu, wt, hH, LG, eL, bc, aiJ, cp, aa, hm, mH, aEV, bG, blP, aW, axu, asD, mQ, HA, LZ, blU, uY, hN, g, eE, ve, eF, aVc, GR, cm, y, fT, iT, Jr, aiM, cj, dW, bAD, k, m, aDM, vF, eg, uL, qR, qm, bsh, cE, blB, QO, vE, yG, ht, fN, pk, blG, n, blD, aj, oY, fr, uE, aUX, bd, qN, qW, cd, ai, eh, aJe, eW, aJf, aPb, ft, xC, adX, aMj, kH, h, dL, aaA, blO, aDC, ux, ey, he, blX, rk, nP, OV, mR, eZ, A, MD, aXy, aHW, sp, ff, lb, ge, fe, yq, aMJ, CQ, gG, kk, cM, Zj, lx, Wt, jq, blF, blH, abV, adZ, W, NL, dB, hk, aZL, lf, mg, JM, bm, uz, fL, aCD, DY, Pr, B, abW, it, bL, blR, jv, fM, blI, eR, fG, jx, rf, aA, j, V, q, J, eA, o, ga, aWb, blC, blN, fh, qp, ld, yg, aT, yu, hK, rz, DX, ae, aZQ, blW, hM, bf, iU, Y, lC, r, afq, lo, aDm, en, t, pb, bN, lY, ck, ajl, Ta, OW, sn, c, aQd, hA, ig, nM, iM, AH, iQ, Zg, CP, auT, Da, dy, gT, bt, Kd, aaT, aFe, Ke, aD, dM, iW, ha, jh, aHv, iD, dG, jE, blT, oL, hF, bCx, XB, ad, qC, dP, kL, hX, F, od, av, afm, blV, acu, Ot, ds, azq, qh, oW, akJ, hD, rN, vc, JK, lQ, bsn, yF, uQ, d, BN, ue, lU, je, KS, wc, azP, bHX, eH, dN, hv, yy, aF, hp, cr, Fq, Pd, iV, dr, aYt, LB, Bv, zr, axs, yE, blS, arE, Ny, bE, aED, Om, Lj, aCl, oQ, i, lC, ra, ne, sH, pC); #c1(HLA-B) c2(XP_006725968) c3(major histocompatibility complex, class I, B isoform X5) c4(297020, 297021, 297022) c5(297023, 297024, 297025, 297026, 297027, 297028, 297029, 297030, 297031, 297032, 297033, 297034, 297035, 297036) c6( ) c7(bM, T, aC, xS, fR, fV, if, e, al, bO, CH, eb, fd, bwS, gA, qj, ci, bh, aoj, aY, Tz, aMB, bv, AW, wD, xy, vV, rw, aX, fS, bFU, dV, ja, aU, azm, rB, K, hu, wt, hH, LG, eL, bc, aiJ, cp, aa, hm, mH, aEV, bG, blP, aW, axu, asD, mQ, HA, LZ, blU, uY, hN, g, eE, ve, eF, aVc, GR, cm, y, fT, iT, Jr, aiM, cj, dW, bAD, k, m, aDM, vF, eg, uL, qR, qm, bsh, cE, blB, QO, vE, yG, ht, fN, pk, blG, n, blD, aj, oY, fr, uE, aUX, bd, qN, qW, cd, ai, eh, aJe, eW, aJf, aPb, ft, xC, adX, aMj, kH, h, dL, aaA, blO, aDC, ux, ey, he, blX, rk, nP, OV, mR, eZ, A, MD, aXy, aHW, sp, ff, lb, ge, fe, yq, aMJ, CQ, gG, kk, cM, Zj, lx, Wt, jq, blF, blH, abV, adZ, W, NL, dB, hk, aZL, lf, mg, JM, bm, uz, fL, aCD, DY, Pr, B, abW, it, bL, blR, jv, fM, blI, eR, fG, jx, rf, aA, j, V, q, J, eA, o, ga, aWb, blC, blN, fh, qp, ld, yg, aT, yu, hK, rz, DX, ae, aZQ, blW, hM, bf, iU, Y, lC, r, afq, lo, aDm, en, t, pb, bN, lY, ck, ajl, Ta, OW, sn, c, aQd, hA, ig, nM, iM, AH, iQ, Zg, CP, auT, Da, dy, gT, bt, Kd, aaT, aFe, Ke, aD, dM, iW, ha, jh, aHv, iD, dG, jE, blT, oL, hF, bCx, XB, ad, qC, dP, kL, hX, F, od, av, afm, blV, acu, Ot, ds, azq, qh, oW, akJ, hD, rN, vc, JK, lQ, bsn, yF, uQ, d, BN, ue, lU, je, KS, wc, azP, bHX, eH, dN, hv, yy, aF, hp, cr, Fq, Pd, iV, dr, aYt, LB, Bv, zr, axs, yE, blS, arE, Ny, bE, aED, Om, Lj, aCl, oQ, i, lC, ra, ne, sH, pC); #c1(HLA-B) c2(XP_011512858) c3(major histocompatibility complex, class I, B isoform X1) c4(303972) c5( ) c6( ) c7(bM, T, aC, xS, fR, fV, if, e, al, bO, CH, eb, fd, bwS, gA, qj, ci, bh, aoj, aY, Tz, aMB, bv, AW, wD, xy, vV, rw, aX, fS, bFU, dV, ja, aU, azm, rB, K, hu, wt, hH, LG, eL, bc, aiJ, cp, aa, hm, mH, aEV, bG, blP, aW, axu, asD, mQ, HA, LZ, blU, uY, hN, g, eE, ve, eF, aVc, GR, cm, y, fT, iT, Jr, aiM, cj, dW, bAD, k, m, aDM, vF, eg, uL, qR, qm, bsh, cE, blB, QO, vE, yG, ht, fN, pk, blG, n, blD, aj, oY, fr, uE, aUX, bd, qN, qW, cd, ai, eh, aJe, eW, aJf, aPb, ft, xC, adX, aMj, kH, h, dL, aaA, blO, aDC, ux, ey, he, blX, rk, nP, OV, mR, eZ, A, MD, aXy, aHW, sp, ff, lb, ge, fe, yq, aMJ, CQ, gG, kk, cM, Zj, lx, Wt, jq, blF, blH, abV, adZ, W, NL, dB, hk, aZL, lf, mg, JM, bm, uz, fL, aCD, DY, Pr, B, abW, it, bL, blR, jv, fM, blI, eR, fG, jx, rf, aA, j, V, q, J, eA, o, ga, aWb, blC, blN, fh, qp, ld, yg, aT, yu, hK, rz, DX, ae, aZQ, blW, hM, bf, iU, Y, lC, r, afq, lo, aDm, en, t, pb, bN, lY, ck, ajl, Ta, OW, sn, c, aQd, hA, ig, nM, iM, AH, iQ, Zg, CP, auT, Da, dy, gT, bt, Kd, aaT, aFe, Ke, aD, dM, iW, ha, jh, aHv, iD, dG, jE, blT, oL, hF, bCx, XB, ad, qC, dP, kL, hX, F, od, av, afm, blV, acu, Ot, ds, azq, qh, oW, akJ, hD, rN, vc, JK, lQ, bsn, yF, uQ, d, BN, ue, lU, je, KS, wc, azP, bHX, eH, dN, hv, yy, aF, hp, cr, Fq, Pd, iV, dr, aYt, LB, Bv, zr, axs, yE, blS, arE, Ny, bE, aED, Om, Lj, aCl, oQ, i, lC, ra, ne, sH, pC); #c1(HLA-B) c2(XP_011512859) c3(major histocompatibility complex, class I, B isoform X7) c4(303973) c5(303974, 303975, 303976, 303977, 303978, 303979, 303980, 303981, 303982, 303983, 303984, 303985, 303986, 303987, 303988, 303989, 303990, 303991, 303992, 303993, 303994, 303995, 303996, 303997, 303998, 303999, 304000, 304001, 304002, 304003, 304004, 304005, 304006, 304007) c6( ) c7(bM, T, aC, xS, fR, fV, if, e, al, bO, CH, eb, fd, bwS, gA, qj, ci, bh, aoj, aY, Tz, aMB, bv, AW, wD, xy, vV, rw, aX, fS, bFU, dV, ja, aU, azm, rB, K, hu, wt, hH, LG, eL, bc, aiJ, cp, aa, hm, mH, aEV, bG, blP, aW, axu, asD, mQ, HA, LZ, blU, uY, hN, g, eE, ve, eF, aVc, GR, cm, y, fT, iT, Jr, aiM, cj, dW, bAD, k, m, aDM, vF, eg, uL, qR, qm, bsh, cE, blB, QO, vE, yG, ht, fN, pk, blG, n, blD, aj, oY, fr, uE, aUX, bd, qN, qW, cd, ai, eh, aJe, eW, aJf, aPb, ft, xC, adX, aMj, kH, h, dL, aaA, blO, aDC, ux ey, he, blX, rk, nP, OV, mR, eZ, A, MD, aXy, aHW, sp, ff, lb, ge, fe, yq, aMJ, CQ, gG, kk, cM, Zj, lx, Wt, jq, blF, blH, abV, adZ, W, NL, dB, hk, aZL, lf, mg, JM, bm, uz, fL, aCD, DY, Pr, B, abW, it, bL, blR, jv, fM, blI, eR, fG, jx, rf, aA, j, V, q, J, eA, o, ga, aWb, blC, blN, fh, qp, ld, yg, aT, yu, hK, rz, DX, ae, aZQ, blW, hM, bf, iU, Y, lC, r, afq, lo, aDm, en, t, pb, bN, lY, ck, ajl, Ta, OW, sn, c, aQd, hA, ig, nM, iM, AH, iQ, Zg, CP, auT, Da, dy, gT, bt, Kd, aaT, aFe, Ke, aD, dM, iW, ha, jh, aHv, iD, dG, jE, blT, oL, hF, bCx, XB, ad, qC, dP, kL, hX, F, od, av, afm, blV, acu, Ot, ds, azq, qh, oW, akJ, hD, rN, vc, JK, lQ, bsn, yF, uQ, d, BN, ue, lU, je, KS, wc, azP, bHX, eH, dN, hv, yy, aF, hp, cr, Fq, Pd, iV, dr, aYt, LB, Bv, zr, axs, yE, blS, arE, Ny, bE, aED, Om, Lj, aCl, oQ, i, lC, ra, ne, sH, pC); #c1(HLA-B) c2(XP_011545539) c3(major histocompatibility complex, class I, B isoform X1) c4(344218, 344219) c5( ) c6( ) c7(bM, T, aC, xS, fR, fV, if, e, al, bO, CH, eb, fd, bwS, gA, qj, ci, bh, aoj, aY, Tz, aMB, bv, AW, wD, xy, vV, rw, aX, fS, bFU, dV, ja, aU, azm, rB, K, hu, wt, hH, LG, eL, bc, aiJ, cp, aa, hm, mH, aEV, bG, blP, aW, axu, asD, mQ, HA, LZ, blU, uY, hN, g, eE, ve, eF, aVc, GR, cm, y, fT, iT, Jr, aiM, cj, dW, bAD, k, m, aDM, vF, eg, uL, qR, qm, bsh, cE, blB, QO, vE, yG, ht, fN, pk, blG, n, blD, aj, oY, fr, uE, aUX, bd, qN, qW, cd, ai, eh, aJe, eW, aJf, aPb, ft, xC, adX, aMj, kH, h, dL, aaA, blO, aDC, ux, ey, he, blX, rk, nP, OV, mR, eZ, A, MD, aXy, aHW, sp, ff, lb, ge, fe, yq, aMJ, CQ, gG, kk, cM, Zj, lx, Wt, jq, blF, blH, abV, adZ, W, NL, dB, hk, aZL, lf, mg, JM, bm, uz, fL, aCD, DY, Pr, B, abW, it, bL, blR, jv, fM, blI, eR, fG, jx, rf, aA, j, V, q, J, eA, o, ga, aWb, blC, blN, fh, qp, ld, yg, aT, yu, hK, rz, DX, ae, aZQ, blW, hM, bf, iU, Y, lC, r, afq, lo, aDm, en, t, pb, bN, lY, ck, ajl, Ta, OW, sn, c, aQd, hA, ig, nM, iM, AH, iQ, Zg, CP, auT, Da, dy, gT, bt, Kd, aaT, aFe, Ke, aD, dM, iW, ha, jh, aHv, iD, dG, jE, blT, oL, hF, bCx, XB, ad, qC, dP, kL, hX, F, od, av, afm, blV, acu, Ot, ds, azq, qh, oW, akJ, hD, rN, vc, JK, lQ, bsn, yF, uQ, d, BN, ue, lU, je, KS, wc, azP, bHX, eH, dN, hv, yy, aF, hp, cr, Fq, Pd, iV, dr, aYt, LB, Bv, zr, axs, yE, blS, arE, Ny, bE, aED, Om, Lj, aCl, oQ, i, lC, ra, ne, sH, pC); #c1(HLA-B) c2(XP_011545540) c3(major histocompatibility complex, class I, B isoform X2) c4(344220, 344221, 344222) c5(344223, 344224, 344225, 344226, 344227, 344228, 344229, 344230, 344231, 344232, 344233, 344234, 344235, 344236, 344237, 344238, 344239, 344240, 344241) c6( ) c7(bM, T, aC, xS, fR, fV, if, e, al, bO, CH, eb, fd, bwS, gA, qj, ci, bh, aoj, aY, Tz, aMB, bv, AW, wD, xy, vV, rw, aX, fS, bFU, dV, ja, aU, azm, rB, K, hu, wt, hH, LG, eL, bc, aiJ, cp, aa, hm, mH, aEV, bG, blP, aW, axu, asD, mQ, HA, LZ, blU, uY, hN, g, eE, ve, eF, aVc, GR, cm, y, fT, iT, Jr, aiM, cj, dW, bAD, k, m, aDM, vF, eg, uL, qR, qm, bsh, cE, blB, QO, vE, yG, ht, fN, pk, blG, n, blD, aj, oY, fr, uE, aUX, bd, qN, qW, cd, ai, eh, aJe, eW, aJf, aPb, ft, xC, adX, aMj, kH, h, dL, aaA, blO, aDC, ux, ey, he, blX, rk, nP, OV, mR, eZ, A, MD, aXy, aHW, sp, ff, lb, ge, fe, yg, aMJ, CQ, gG, kk, cM, Zj, lx, Wt, jq, blF, blH, abV, adZ, W, NL, dB, hk, aZL, lf, mg, JM, bm, uz, fL, aCD, DY, Pr, B, abW, it, bL, blR, jv, fM, blI, eR, fG, jx, rf, aA, j, V, q, J, eA, o, ga, aWb, blC, blN, fh, qp, ld, yg, aT, yu, hK, rz, DX, ae, aZQ, blW, hM, bf, iU, Y, lC, r, afq, lo, aDm, en, t, pb, bN, lY, ck, ajl, Ta, OW, sn, c, aQd, hA, ig, nM, iM, AH, iQ, Zg, CP, auT, Da, dy, gT, bt, Kd, aaT, aFe, Ke, aD, dM, iW, ha, jh, aHv, iD, dG, jE, blT, oL, hF, bCx, XB, ad, qC, dP, kL, hX, F, od, av, afm, blV, acu, Ot, ds, azq, qh, oW, akJ, hD, rN, vc, JK, lQ, bsn, yF, uQ, d, BN, ue, lU, je, KS, wc, azP, bHX, eH, dN, hv, yy, aF, hp, cr, Fq, Pd, iV, dr, aYt, LB, Bv, zr, axs, yE, blS, arE, Ny, bE, aED, Om, Lj, aCl, oQ, i, lC, ra, ne, sH, pC); #c1(HLA-B) c2(XP_011545541) c3(major histocompatibility complex, class I, B isoform X7) c4( ) c5(344242, 344243, 344244, 344245, 344246, 344247, 344248, 344249, 344250, 344251, 344252) c6( ) c7(bM, T, aC, xS, fR, fV, if, e, al, bO, CH, eb, fd, bwS, gA, qj, ci, bh, aoj, aY, Tz, aMB, bv, AW, wD, xy, vV, rw, aX, fS, bFU, dV, ja, aU, azm, rB, K, hu, wt, hH, LG, eL, bc, aiJ, cp, aa, hm, mH, aEV, bG, blP, aW, axu, asD, mQ, HA, LZ, blU, uY, hN, g, eE, ve, eF, aVc, GR, cm, y, fT, iT, Jr, aiM, cj, dW, bAD, k, m, aDM, vF, eg, uL, qR, qm, bsh, cE, blB, QO, vE, yG, ht, fN, pk, blG, n, blD, aj, oY, fr, uE, aUX, bd, qN, qW, cd, ai, eh, aJe, eW, aJf, aPb, ft, xC, adX, aMj, kH, h, dL, aaA, blO, aDC, ux, ey, he, blX, rk, nP, OV, mR, eZ, A, MD, aXy, aHW, sp, ff, lb, ge, fe, yq, aMJ, CQ, gG, kk, cM, Zj, lx, Wt, jq, blF, blH, abV, adZ, W, NL, dB, hk, aZL, lf, mg, JM, bm, uz, fL, aCD, DY, Pr, B, abW, it, bL, blR, jv, fM, blI, eR, fG, jx, rf, aA, j, V, q, J, eA, o, ga, aWb, blC, blN, fh, qp, ld, yg, aT, yu, hK, rz, DX, ae, aZQ, blW, hM, bf, iU, Y, lC, r, afq, lo, aDm, en, t, pb, bN, lY, ck, ajl, Ta, OW, sn, c, aQd, hA, ig, nM, iM, AH, iQ, Zg, CP, auT, Da, dy, gT, bt, Kd, aaT, aFe, Ke, aD, dM, iW, ha, jh, aHv, iD, dG, jE, blT, oL, hF, bCx, XB, ad, qC, dP, kL, hX, F, od, av, afm, blV, acu, Ot, ds, azq, qh, oW, akJ, hD, rN, vc, JK, lQ, bsn, yF, uQ, d, BN, ue, lU, je, KS, wc, azP, bHX, eH, dN, hv, yy, aF, hp, cr, Fq, Pd, iV, dr, aYt, LB, Bv, zr, axs, yE, blS, arE, Ny, bE, aED, Om, Lj, aCl, oQ, i, lC, ra, ne, sH, pC); #c1(HLA-B) c2(XP_011546175) c3(major histocompatibility complex, class I, B isoform X4) c4(344866, 344867, 344868, 344869) c5(344870, 344871, 344872) c6( ) c7(bM, T, aC, xS, fR, fV, if, e, al, bO, CH, eb, fd, bwS, gA, qj, ci, bh, aoj, aY, Tz, aMB, bv, AW, wD, xy, vV, rw, aX, fS, bFU, dV, ja, aU, azm, rB, K, hu, wt, hH, LG, eL, bc, aiJ, cp, aa, hm, mH, aEV, bG, blP, aW, axu, asD, mQ, HA, LZ, blU, uY, hN, g, eE, ve, eF, aVc, GR, cm, y, fT, iT, Jr, aiM, cj, dW, bAD, k, m, aDM, vF, eg, uL, qR, qm, bsh, cE, blB, QO, vE, yG, ht, fN, pk, blG, n, blD, aj, oY, fr, uE, aUX, bd, qN, qW, cd, ai, eh, aJe, eW, aJf, aPb, ft, xC, adX, aMj, kH, h, dL, aaA, blO, aDC, ux, ey, he, blX, rk, nP, OV, mR, eZ, A, MD, aXy, aHW, sp, ff, lb, ge, fe, yq, aMJ, CQ, gG, kk, cM, Zj, lx, Wt, jq, blF, blH, abV, adZ, W, NL, dB, hk, aZL, lf, mg, JM, bm, uz, fL, aCD, DY, Pr, B, abW, it, bL, blR, jv, fM, blI, eR, fG, jx, rf, aA, j, V, q, J, eA, o, ga, aWb, blC, blN, fh, qp, ld, yg, aT, yu, hK, rz, DX, ae, aZQ, blW, hM, bf, iU, Y, lC, r, afq, lo, aDm, en, t, pb, bN, lY, ck, ajl, Ta, OW, sn, c, aQd, hA, ig, nM, iM, AH, iQ, Zg, CP, auT, Da, dy, gT, bt, Kd, aaT, aFe, Ke, aD, dM, iW, ha, jh, aHv, iD, dG, jE, blT, oL, hF, bCx, XB, ad, qC, dP, kL, hX, F, od, av, afm, blV, acu, Ot, ds, azq, qh, oW, akJ, hD, rN, vc, JK, lQ, bsn, yF, uQ, d, BN, ue, lU, je, KS, wc, azP, bHX, eH, dN, hv, yy, aF, hp, cr, Fq, Pd, iV, dr, aYt, LB, Bv, zr, axs, yE, blS, arE, Ny, bE, aED, Om, Lj, aCl, oQ, i, lC, ra, ne, sH, pC); #c1(HLA-B) c2(XP_011546176) c3(major histocompatibility complex, class I, B isoform X7) c4( ) c5(344873, 344874, 344875, 344876, 344877, 344878, 344879, 344880, 344881, 344882) c6( ) c7(bM, T, aC, xS, fR, fV, if, e, al, bO, CH, eb, fd, bwS, gA, qj, ci, bh, aoj, aY, Tz, aMB, bv, AW, wD, xy, vV, rw, aX, fS, bFU, dV, ja, aU, azm, rB, K, hu, wt, hH, LG, eL, bc, aiJ, cp, aa, hm, mH, aEV, bG, blP, aW, axu, asD, mQ, HA, LZ, blU, uY, hN, g, eE, ve, eF, aVc, GR, cm, y, fT, iT, Jr, aiM, cj, dW, bAD, k, m, aDM, vF, eg, uL, qR, qm, bsh, cE, blB, QO, vE, yG, ht, fN, pk, blG, n, blD, aj, oY, fr, uE, aUX, bd, qN, qW, cd, ai, eh, aJe, eW, aJf, aPb, ft, xC, adX, aMj, kH, h, dL, aaA, blO, aDC, ux, ey, he, blX, rk, nP, OV, mR, eZ, A, MD, aXy, aHW, sp, ff, lb, ge, fe, yq, aMJ, CQ, gG, kk, cM, Zj, lx, Wt, jq, blF, blH, abV, adZ, W, NL, dB, hk, aZL, lf, mg, JM, bm, uz, fL, aCD, DY, Pr, B, abW, it, bL, blR, jv, fM, blI, eR, fG, jx, rf, aA, j, V, q, J, eA, o, ga, aWb, blC, blN, fh, qp, ld, yg, aT, yu, hK, rz, DX, ae, aZQ, blW, hM, bf, iU, Y, lC, r, afq, lo, aDm, en, t, pb, bN, lY, ck, ajl, Ta, OW, sn, c, aQd, hA, ig, nM, iM, AH, iQ, Zg, CP, auT, Da, dy, gT, bt, Kd, aaT, aFe, Ke, aD, dM, iW, ha, jh, aHv, iD, dG, jE, blT, oL, hF, bCx, XB, ad, qC, dP, kL, hX, F, od, av, afm, blV, acu, Ot, ds, azq, qh, oW, akJ, hD, rN, vc, JK, lQ, bsn, yF, uQ, d, BN, ue, lU, je, KS, wc, azP, bHX, eH, dN, hv, yy, aF, hp, cr, Fq, Pd, iV, dr, aYt, LB, Bv, zr, axs, yE, blS, arE, Ny, bE, aED, Om, Lj, aCl, oQ, i, lC, ra, ne, sH, pC); #c1(HLA-B) c2(XP_011546344) c3(major histocompatibility complex, class I, B isoform X7) c4(345053) c5(345054, 345055, 345056, 345057, 345058, 345059, 345060, 345061, 345062, 345063, 345064, 345065, 345066, 345067, 345068, 345069) c6( ) c7(bM, T, aC, xS, fR, fV, if, e, al, bO, CH, eb, fd, bwS, gA, qj, ci, bh, aoj, aY, Tz, aMB, bv, AW, wD, xy, vV, rw, aX, fS, bFU, dV, ja, aU, azm, rB, K, hu, wt, hH, LG, eL, bc, aiJ, cp, aa, hm, mH, aEV, bG, blP, aW, axu, asD, mQ, HA, LZ, blU, uY, hN, g, eE, ve, eF, aVc, GR, cm, y, fT, iT, Jr, aiM, cj, dW, bAD, k, m, aDM, vF, eg, uL, qR, qm, bsh, cE, blB, QO, vE, yG, ht, fN, pk, blG, n, blD, aj, oY, fr, uE, aUX, bd, qN, qW, cd, ai, eh, aJe, eW, aJf, aPb, ft, xC, adX, aMj, kH, h, dL, aaA, blO, aDC, ux, ey, he, blX, rk, nP, OV, mR, eZ, A, MD, aXy, aHW, sp, ff, lb, ge, fe, yq, aMJ, CQ, gG, kk, cM, Zj, lx, Wt, jq, blF, blH, abV, adZ, W, NL, dB, hk, aZL, lf, mg, JM, bm, uz, fL, aCD, DY, Pr, B, abW, it, bL, blR, jv, fM, blI, eR, fG, jx, rf, aA, j, V, q, J, eA, o, ga, aWb, blC, blN, fh, qp, ld, yg, aT, yu, hK, rz, DX, ae, aZQ, blW, hM, bf, iU, Y, lC, r, afq, lo, aDm, en, t, pb, bN, lY, ck, ajl, Ta, OW, sn, c, aQd, hA, ig, nM, iM, AH, iQ, Zg, CP, auT, Da, dy, gT, bt, Kd, aaT, aFe, Ke, aD, dM, iW, ha, jh, aHv, iD, dG, jE, blT, oL, hF, bCx, XB, ad, qC, dP, kL, hX, F, od, av, afm, blV, acu, Ot, ds, azq, qh, oW, akJ, hD, rN, vc, JK, lQ, bsn, yF, uQ, d, BN, ue, lU, je, KS, wc, azP, bHX, eH, dN, hv, yy, aF, hp, cr, Fq, Pd, iV, dr, aYt, LB, Bv, zr, axs, yE, blS, arE, Ny, bE, aED, Om, Lj, aCl, oQ, i, lC, ra, ne, sH, pC); #c1(HLA-B) c2(XP_011546532) c3(major histocompatibility complex, class I, B isoform X7) c4(345247, 345248, 345249, 345250) c5(345251, 345252, 345253, 345254, 345255, 345256, 345257, 345258, 345259, 345260, 345261, 345262) c6( ) c7(bM, T, aC, xS, fR, fV, if, e, al, bO, CH, eb, fd, bwS, gA, qj, ci, bh, aoj, aY, Tz, aMB, bv, AW, wD, xy, vV, rw, aX, fS, bFU, dV, ja, aU, azm, rB, K, hu, wt, hH, LG, eL, bc, aiJ, cp, aa, hm, mH, aEV, bG, blP, aW, axu, asD, mQ, HA, LZ, blU, uY, hN, g, eE, ve, eF, aVc, GR, cm, y, fT, iT, Jr, aiM, cj, dW, bAD, k, m, aDM, vF, eg, uL, qR, qm, bsh, cE, blB, QO, vE, yG, ht, fN, pk, blG, n, blD, aj, oY, fr, uE, aUX, bd, qN, qW, cd, ai, eh, aJe, eW, aJf, aPb, ft, xC, adX, aMj, kH, h, dL, aaA, blO, aDC, ux, ey, he, blX, rk, nP, OV, mR, eZ, A, MD, aXy, aHW, sp, ff, lb, ge, fe, yq, aMJ, CQ, gG, kk, cM, Zj, lx, Wt, jq, blF, blH, abV, adZ, W, NL, dB, hk, aZL, lf, mg, JM, bm, uz, fL, aCD, DY, Pr, B, abW, it, bL, blR, jv, fM, blI, eR, fG, jx, rf, aA, j, V, q, J, eA, o, ga, aWb, blC, blN, fh, qp, ld, yg, aT, yu, hK, rz, DX, ae, aZQ, blW, hM, bf, iU, Y, lC, r, afq, lo, aDm, en, t, pb, bN, lY, ck, ajl, Ta, OW, sn, c, aQd, hA, ig, nM, iM, AH, iQ, Zg, CP, auT, Da, dy, gT, bt, Kd, aaT, aFe, Ke, aD, dM, iW, ha, jh, aHv, iD, dG, jE, blT, oL, hF, bCx, XB, ad, qC, dP, kL, hX, F, od, av, afm, blV, acu, Ot, ds, azq, qh, oW, akJ, hD, rN, vc, JK, lQ, bsn, yF, uQ, d, BN, ue, lU, je, KS, wc, azP, bHX, eH, dN, hv, yy, aF, hp, cr, Fq, Pd, iV, dr, aYt, LB, Bv, zr, axs, yE, blS, arE, Ny, bE, aED, Om, Lj, aCl, oQ, i, lC, ra, ne, sH, pC); #c1(HLA-B) c2(XP_011546724) c3(major histocompatibility complex, class I, B isoform X7) c4(345484) c5(345485, 345486, 345487, 345488, 345489, 345490, 345491, 345492, 345493, 345494, 345495) c6( ) c7(bM, T, aC, xS, fR, fV, if, e, al, bO, CH, eb, fd, bwS, gA, qj, ci, bh, aoj, aY, Tz, aMB, bv, AW, wD, xy, vV, rw, aX, fS, bFU, dV, ja, aU, azm, rB, K, hu, wt, hH, LG, eL, bc, aiJ, cp, aa, hm, mH, aEV, bG, blP, aW, axu, asD, mQ, HA, LZ, blU, uY, hN, g, eE, ve, eF, aVc, GR, cm, y, fT, iT, Jr, aiM, cj, dW, bAD, k, m, aDM, vF, eg, uL, qR, qm, bsh, cE, blB, QO, vE, yG, ht, fN, pk, blG, n, blD, aj, oY, fr, uE, aUX, bd, qN, qW, cd, ai, eh, aJe, eW, aJf, aPb, ft, xC, adX, aMj, kH, h, dL, aaA, blO, aDC, ux, ey, he, blX, rk, nP, OV, mR, eZ, A, MD, aXy, aHW, sp, ff, lb, ge, fe, yq, aMJ, CQ, gG, kk, cM, Zj, lx, Wt, jq, blF, blH, abV, adZ, W, NL, dB, hk, aZL, lf, mg, JM, bm, uz, fL, aCD, DY, Pr, B, abW, it, bL, blR, jv, fM, blI, eR, fG, jx, rf, aA, j, V, q, J, eA, o, ga, aWb, blC, blN, fh, qp, ld, yg, aT, yu, hK, rz, DX, ae, aZQ, blW, hM, bf, iU, Y, lC, r, afq, lo, aDm, en, t, pb, bN, lY, ck, ajl, Ta, OW, sn, c, aQd, hA, ig, nM, iM, AH, iQ, Zg, CP, auT, Da, dy, gT, bt, Kd, aaT, aFe, Ke, aD, dM, iW, ha, jh, aHv, iD, dG, jE, blT, oL, hF, bCx, XB, ad, qC, dP, kL, hX, F, od, av, afm, blV, acu, Ot, ds, azq, qh, oW, akJ, hD, rN, vc, JK, lQ, bsn, yF, uQ, d, BN, ue, lU, je, KS, wc, azP, bHX, eH, dN, hv, yy, aF, hp, cr, Fq, Pd, iV, dr, aYt, LB, Bv, zr, axs, yE, blS, arE, Ny, bE, aED, Om, Lj, aCl, oQ, i, lC, ra, ne, sH, pC); #c1(HLA-C) c2(NP_001229971) c3(HLA class I histocompatibility antigen, Cw-1 alpha chain precursor) c4(85540, 85541, 85542, 85543, 85544, 85545, 85546, 85547, 85548, 85549, 85550, 85551, 85552, 85553, 85554, 85555, 85556, 85557, 85558, 85559, 85560) c5(85561, 85562, 85563, 85564, 85565, 85566, 85567, 85568, 85569, 85570, 85571, 85572, 85573, 85574, 85575, 85576, 85577, 85578, 85579, 85580, 85581, 85582, 85583, 85584, 85585, 85586, 85587, 85588, 85589, 85590, 85591, 85592, 85593, 85594, 85595, 85596, 85597, 85598, 85599, 85600, 85601, 85602, 85603, 85604, 85605, 85606, 85607, 85608, 85609, 85610, 85611, 85612, 85613, 85614, 85615, 85616, 85617, 85618, 85619, 85620, 85621, 85622, 85623, 85624, 85625, 85626, 85627, 85628, 85629, 85630, 85631, 85632, 85633, 85634, 85635, 85636, 85637, 85638, 85639, 85640, 85641, 85642, 85643, 85644, 85645, 85646, 85647, 85648, 85649, 85650, 85651, 85652, 85653, 85654, 85655, 85656, 85657, 85658, 85659, 85660, 85661, 85662, 85663, 85664, 85665, 85666, 85667, 85668, 85669, 85670, 85671, 85672, 85673, 85674, 85675, 85676, 85677, 85678, 85679, 85680, 85681, 85682, 85683, 85684, 85685, 85686, 85687, 85688, 85689, 85690, 85691, 85692, 85693, 85694, 85695, 85696, 85697, 85698, 85699, 85700, 85701, 85702, 85703, 85704, 85705, 85706, 85707, 85708, 85709, 85710, 85711, 85712, 85713, 85714, 85715, 85716, 85717, 85718, 85719, 85720, 85721, 85722, 85723, 85724, 85725, 85726, 85727, 85728, 85729, 85730, 85731, 85732, 85733, 85734, 85735, 85736, 85737, 85738, 85739, 85740, 85741, 85742, 85743, 85744, 85745, 85746, 85747, 85748, 85749, 85750, 85751, 85752, 85753, 85754, 85755) c6( ) c7(bM, T, aC, xS, fR, fV, if, al, bO, eb, fd, gA, qj, ci, bh, aMB, Vp, AW, fS, bFU, blY, azm, rB, hH, mH, axu, mQ, hl, HA, da, hN, ve, uC, cm, GR, bw, iP, y, fT, iT, Jr, nB, qr, bAD, k, pw, eg, qm, avY, aFQ, ht, fN, n, aj, fr, qN, qW, eW, aMp, Bj, h, he, blX, nP, A, mR, bJc, byn, lb, ge, fe, aq, cM, Zj, aBs, jq, blF, blH, dB, bJa, hk, JM, uz, fL, aCD, lB, B, bL, blR, jv, fM, eR, aZy, jx, aA, v, j, V, eA, J, ga, blC, mP, blN, ld, aT, bJb, blW, aFS, hM, iU, Y, r, afq, lo, en, t, pb, vk, bN, ck, OW, sn, ua, nM, iQ, Zg, CP, AH, bJd, Da, byK, bt, Kd, aaT, aD, iW, jh, jE, oL, hF, mC, wD, hX, dP, hd, F, od, Db, qh, hD, rN, JK, lQ, uQ, d, lU, aus, ff, azP, cr, eZ, hv, aF, hp, Pd, iV, blZ, bF, D, gk, yE, aED, aCl, oQ, i, lf, fh, ne, rk, pC); #c1(HLA-C) c2(NP_002108) c3(HLA class I histocompatibility antigen, Cw-1 alpha chain precursor) c4(124685, 124686, 124687, 124688, 124689, 124690, 124691, 124692, 124693, 124694, 124695) c5(124696, 124697, 124698, 124699, 124700, 124701, 124702, 124703, 124704, 124705, 124706, 124707, 124708, 124709, 124710, 124711, 124712, 124713, 124714, 124715, 124716, 124717, 124718, 124719, 124720, 124721, 124722, 124723, 124724, 124725, 124726, 124727, 124728, 124729, 124730, 124731, 124732, 124733, 124734, 124735, 124736, 124737, 124738, 124739, 124740, 124741, 124742, 124743, 124744, 124745, 124746, 124747, 124748, 124749, 124750, 124751, 124752, 124753, 124754, 124755, 124756, 124757, 124758, 124759, 124760, 124761) c6( ) c7(bM, T, aC, xS, fR, fV, if, al, bO, eb, fd, gA, qj, ci, bh, aMB, Vp, AW, fS, bFU, blY, azm, rB, hH, mH, axu, mQ, hl, HA, da, hN, ve, uC, cm, GR, bw, iP, y, fT, iT, Jr, nB, qr, bAD, k, pw, eg, qm, avY, aFQ, ht, fN, n, aj, fr, qN, qW, eW, aMp, Bj, h, he, blX, nP, A, mR, bJc, byn, lb, ge, fe, aq, cM, Zj, aBs, jq, blF, blH, dB, bJa, hk, JM, uz, fL, aCD, lB, B, bL, blR, jv, fM, eR, aZy, jx, aA, v, j, V, eA, J, ga, blC, mP, blN, ld, aT, bJb, blW, aFS, hM, iU, Y, r, afq, lo, en, t, pb, vk, bN, ck, OW, sn, ua, nM, iQ, Zg, CP, AH, bJd, Da, byK, bt, Kd, aaT, aD, iW, jh, jE, oL, hF, mC, wD, hX, dP, hd, F, od, Db, qh, hD, rN, JK, lQ, uQ, d, lU, aus, ff, azP, cr, eZ, hv, aF, hp, Pd, iV, blZ, bF, D, gk, yE, aED, aCl, oQ, i, lf, fh, ne, rk, pC); #c1(HLA-DMA) c2(NP_006111) c3(HLA class II histocompatibility antigen, DM alpha chain precursor) c4(161948, 161949, 161950, 161951, 161952, 161953, 161954, 161955, 161956, 161957, 161958, 161959) c5(161960, 161961, 161962, 161963, 161964, 161965, 161966, 161967, 161968, 161969, 161970, 161971, 161972, 161973, 161974, 161975, 161976, 161977, 161978, 161979, 161980, 161981, 161982, 161983, 161984, 161985, 161986, 161987, 161988, 161989, 161990, 161991, 161992, 161993, 161994, 161995, 161996, 161997, 161998, 161999, 162000, 162001, 162002, 162003, 162004, 162005, 162006, 162007, 162008, 162009, 162010, 162011, 162012, 162013, 162014, 162015, 162016, 162017, 162018, 162019, 162020, 162021, 162022, 162023, 162024, 162025, 162026, 162027, 162028, 162029, 162030, 162031, 162032, 162033, 162034, 162035, 162036, 162037, 162038, 162039, 162040, 162041, 162042, 162043, 162044, 162045, 162046, 162047, 162048, 162049, 162050, 162051, 162052, 162053, 162054, 162055, 162056, 162057, 162058, 162059, 162060, 162061, 162062, 162063, 162064, 162065, 162066, 162067, 162068, 162069, 162070, 162071, 162072, 162073, 162074, 162075, 162076, 162077, 162078, 162079, 162080, 162081, 162082, 162083, 162084, 162085, 162086, 162087, 162088, 162089, 162090, 162091, 162092, 162093, 162094, 162095, 162096, 162097, 162098, 162099, 162100, 162101, 162102, 162103, 162104, 162105, 162106, 162107, 162108, 162109, 162110, 162111, 162112, 162113, 162114, 162115, 162116, 162117, 162118, 162119, 162120, 162121, 162122) c6( ) c7(bL, T, id, al, ez, aj, dG, bJe, V, eA, J, bv, dm, h, ey, uQ, OV, akV, Sn, cr, eZ, pL, pb, gk, iQ, vZ, mf, fL, y); #c1(HLA-DMB) c2(NP_002109) c3(HLA class II histocompatibility antigen, DM beta chain precursor) c4(124762, 124763, 124764, 124765, 124766, 124767, 124768, 124769, 124770, 124771, 124772, 124773, 124774, 124775) c5(124776, 124777, 124778, 124779, 124780, 124781, 124782, 124783, 124784, 124785, 124786, 124787, 124788, 124789, 124790, 124791, 124792, 124793, 124794, 124795, 124796, 124797, 124798, 124799, 124800, 124801, 124802, 124803, 124804, 124805, 124806, 124807, 124808, 124809, 124810, 124811, 124812, 124813, 124814, 124815, 124816, 124817, 124818, 124819, 124820, 124821, 124822, 124823, 124824, 124825, 124826, 124827, 124828, 124829, 124830, 124831, 124832, 124833, 124834, 124835, 124836, 124837, 124838, 124839, 124840, 124841, 124842, 124843, 124844, 124845, 124846, 124847, 124848, 124849, 124850, 124851, 124852, 124853, 124854, 124855, 124856, 124857, 124858, 124859, 124860, 124861, 124862, 124863, 124864, 124865, 124866, 124867, 124868, 124869, 124870, 124871, 124872, 124873, 124874, 124875, 124876, 124877, 124878, 124879, 124880, 124881, 124882, 124883, 124884, 124885, 124886, 124887, 124888, 124889, 124890, 124891, 124892, 124893, 124894, 124895, 124896, 124897, 124898, 124899, 124900, 124901, 124902, 124903, 124904, 124905, 124906, 124907, 124908, 124909, 124910, 124911, 124912, 124913, 124914, 124915, 124916, 124917, 124918, 124919, 124920, 124921, 124922, 124923, 124924, 124925, 124926, 124927, 124928, 124929, 124930, 124931, 124932, 124933, 124934, 124935, 124936, 124937, 124938, 124939, 124940, 124941, 124942, 124943, 124944, 124945, 124946, 124947, 124948, 124949, 124950, 124951, 124952, 124953, 124954, 124955, 124956, 124957, 124958, 124959, 124960, 124961, 124962, 124963, 124964, 124965, 124966, 124967, 124968, 124969, 124970, 124971, 124972, 124973, 124974, 124975, 124976, 124977, 124978, 124979, 124980, 124981, 124982, 124983, 124984, 124985, 124986, 124987, 124988, 124989, 124990, 124991, 124992, 124993, 124994, 124995, 124996, 124997, 124998, 124999, 125000, 125001, 125002, 125003, 125004, 125005, 125006, 125007, 125008, 125009, 125010, 125011) c6( ) c7(bL, ez, aj, dG, bJe, V, J, dm, h, ey, lM, uQ, OV, akV, A, cr, eZ, pL, t, pb, vZ, mf, fL, y); #c1(HLA-DOA) c2(NP_002110) c3(HLA class II histocompatibility antigen, DO alpha chain precursor) c4(125012) c5(125013, 125014, 125015, 125016, 125017, 125018, 125019, 125020, 125021, 125022, 125023, 125024, 125025, 125026, 125027, 125028, 125029, 125030, 125031, 125032, 125033, 125034, 125035, 125036, 125037, 125038, 125039, 125040, 125041) c6( ) c7(bM, T, if, yG, aA, fd, n, aj, qj, bh, qN, fr, V, J, bCx, hX, xy, aX, yg, adX, aMj, kH, aT, dL, hD, DY, LG, eL, bc, yF, hm, hM, A, mR, bf, CN, aW, sp, Y, hl, cr, eZ, aF, hp, aMJ, eE, t, adZ, bE, arE, cj, m, y, bt, pC); #c1(HLA-DOA) c2(XP_005249104) c3(HLA class II histocompatibility antigen, DO alpha chain isoform X1) c4(268998, 268999) c5(269000, 269001, 269002, 269003, 269004, 269005, 269006, 269007, 269008, 269009, 269010, 269011, 269012, 269013, 269014, 269015, 269016, 269017, 269018, 269019, 269020, 269021, 269022, 269023, 269024, 269025, 269026, 269027, 269028) c6( ) c7(bM, T, if, yG, aA, fd, n, aj, qj, bh, qN, fr, V, J, bCx, hX, xy, aX, yg, adX, aMj, kH, aT, dL, hD, DY, LG, eL, bc, yF, hm, hM, A, mR, bf, CN, aW, sp, Y, hl, cr, eZ, aF, hp, aMJ, eE, t, adZ, bE, arE, cj, m, y, bt, pC); #c1(HLA-DOA) c2(XP_005275163) c3(HLA class II histocompatibility antigen, DO alpha chain isoform X1) c4(285574) c5( ) c6( ) c7(bM, T, if, yG, aA, fd, n, aj, qj, bh, qN, fr, V, J, bCx, hX, xy, aX, yg, adX, aMj, kH, aT, dL, hD, DY, LG, eL, bc, yF, hm, hM, A, mR, bf, CN, aW, sp, Y, hl, cr, eZ, aF, hp, aMJ, eE, t, adZ, bE, arE, cj, m, y, bt, pC); #c1(HLA-DOA) c2(XP_006715139) c3(HLA class II histocompatibility antigen, DO alpha chain isoform X2) c4( ) c5(288764, 288765, 288766, 288767, 288768, 288769, 288770) c6( ) c7(bM, T, if, yG, aA, fd, n, aj, qj, bh, qN, fr, V, J, bCx, hX, xy, aX, yg, adX, aMj, kH, aT, dL, hD, DY, LG, eL, bc, yF, hm, hM, A, mR, bf, CN, aW, sp, Y, hl, cr, eZ, aF, hp, aMJ, eE, t, adZ, bE, arE, cj, m, y, bt, pC); #c1(HLA-DOA) c2(XP_011512860) c3(HLA class II histocompatibility antigen, DO alpha chain isoform X3) c4(304008) c5(304009, 304010, 304011, 304012, 304013, 304014, 304015, 304016, 304017, 304018, 304019, 304020, 304021, 304022, 304023, 304024, 304025, 304026, 304027, 304028, 304029, 304030, 304031, 304032, 304033, 304034, 304035, 304036, 304037, 304038, 304039, 304040, 304041, 304042, 304043, 304044, 304045, 304046, 304047, 304048, 304049, 304050, 304051, 304052, 304053, 304054, 304055, 304056) c6( ) c7(bM, T, if, yG, aA, fd, n, aj, qj, bh, qN, fr, V, J, bCx, hX, xy, aX, yg, adX, aMj, kH, aT, dL, hD, DY, LG, eL, bc, yF, hm, hM, A, mR, bf, CN, aW, sp, Y, hl, cr, eZ, aF, hp, aMJ, eE, t, adZ, bE, arE, cj, m, y, bt, pC); #c1(HLA-DOB) c2(NP_002111) c3(HLA class II histocompatibility antigen, DO beta chain precursor) c4(125042, 125043, 125044) c5(125045, 125046, 125047, 125048, 125049, 125050, 125051, 125052, 125053, 125054, 125055, 125056, 125057, 125058, 125059, 125060, 125061, 125062, 125063, 125064, 125065, 125066, 125067, 125068, 125069, 125070, 125071, 125072, 125073, 125074, 125075, 125076, 125077, 125078, 125079, 125080, 125081, 125082, 125083, 125084, 125085, 125086, 125087, 125088, 125089, 125090, 125091, 125092, 125093, 125094) c6( ) c7(AW, A, aW, eZ, cr, aT, fd, hH); #c1(HLA-DPA1) c2(NP_001229454) c3(HLA class II histocompatibility antigen, DP alpha 1 chain precursor) c4(84442, 84443, 84444, 84445) c5(84446, 84447, 84448, 84449, 84450, 84451, 84452, 84453, 84454, 84455, 84456, 84457, 84458, 84459, 84460, 84461, 84462, 84463, 84464, 84465, 84466, 84467, 84468, 84469, 84470, 84471, 84472, 84473, 84474, 84475, 84476, 84477, 84478, 84479, 84480, 84481, 84482, 84483, 84484, 84485, 84486, 84487, 84488, 84489, 84490, 84491, 84492, 84493, 84494, 84495, 84496, 84497, 84498, 84499, 84500, 84501, 84502, 84503, 84504, 84505, 84506, 84507, 84508, 84509, 84510, 84511, 84512, 84513, 84514, 84515, 84516, 84517, 84518, 84519, 84520, 84521, 84522, 84523, 84524, 84525, 84526, 84527, 84528, 84529, 84530, 84531, 84532, 84533, 84534, 84535, 84536, 84537, 84538, 84539, 84540, 84541, 84542, 84543, 84544, 84545, 84546, 84547, 84548, 84549, 84550, 84551, 84552, 84553, 84554, 84555, 84556) c6( ) c7(bL, bM, cL, jE, ci, ai, hX, ady, hd, cc, akJ, h, sX, yF, A, mR, Y, eZ, CQ, hJ, uC, pb, uy, bAD, dy, Xa, WX); #c1(HLA-DPA1) c2(XP_011512861) c3(HLA class II histocompatibility antigen, DP alpha 1 chain isoform X1) c4(304057) c5(304058, 304059, 304060, 304061, 304062, 304063, 304064, 304065, 304066, 304067, 304068, 304069, 304070, 304071, 304072, 304073, 304074, 304075, 304076, 304077, 304078, 304079, 304080, 304081, 304082, 304083, 304084, 304085, 304086, 304087, 304088, 304089, 304090, 304091, 304092, 304093, 304094, 304095, 304096, 304097, 304098, 304099, 304100, 304101, 304102, 304103, 304104, 304105, 304106, 304107, 304108, 304109, 304110, 304111, 304112, 304113) c6( ) c7(bL, bM, cL, jE, ci, ai, hX, ady, hd, cc, akJ, h, sX, yF, A, mR, Y, eZ, CQ, hJ, uC, pb, uy, bAD, dy, Xa, WX); #c1(HLA-DPBI) c2(NP_002112) c3(HLA class II histocompatibility antigen, DP beta 1 chain precursor) c4(125095, 125096, 125097, 125098, 125099, 125100, 125101, 125102, 125103, 125104, 125105, 125106, 125107, 125108, 125109, 125110, 125111, 125112, 125113, 125114, 125115, 125116, 125117, 125118, 125119, 125120, 125121, 125122) c5(125123, 125124, 125125, 125126, 125127, 125128, 125129, 125130, 125131, 125132, 125133, 125134, 125135, 125136, 125137, 125138, 125139, 125140, 125141, 125142, 125143, 125144, 125145, 125146, 125147, 125148, 125149, 125150, 125151, 125152, 125153, 125154, 125155, 125156, 125157, 125158, 125159, 125160, 125161, 125162, 125163, 125164, 125165, 125166, 125167, 125168, 125169, 125170, 125171, 125172, 125173, 125174, 125175, 125176, 125177, 125178, 125179, 125180, 125181, 125182, 125183, 125184, 125185, 125186, 125187, 125188, 125189, 125190, 125191, 125192, 125193, 125194, 125195, 125196, 125197, 125198, 125199, 125200, 125201, 125202, 125203, 125204, 125205, 125206, 125207, 125208, 125209, 125210, 125211, 125212, 125213, 125214, 125215, 125216, 125217, 125218, 125219, 125220, 125221, 125222, 125223, 125224, 125225, 125226, 125227, 125228, 125229, 125230, 125231, 125232, 125233, 125234, 125235, 125236, 125237, 125238, 125239, 125240, 125241, 125242, 125243, 125244, 125245, 125246, 125247, 125248, 125249, 125250, 125251, 125252, 125253, 125254, 125255, 125256, 125257, 125258, 125259, 125260, 125261, 125262, 125263, 125264, 125265, 125266, 125267, 125268, 125269, 125270, 125271, 125272, 125273, 125274, 125275, 125276, 125277, 125278, 125279, 125280, 125281, 125282, 125283, 125284, 125285, 125286, 125287, 125288, 125289, 125290, 125291, 125292, 125293, 125294, 125295, 125296, 125297, 125298, 125299, 125300, 125301, 125302, 125303, 125304, 125305, 125306, 125307, 125308, 125309, 125310, 125311, 125312, 125313, 125314, 125315, 125316, 125317, 125318, 125319, 125320, 125321, 125322, 125323, 125324, 125325, 125326, 125327, 125328, 125329, 125330, 125331, 125332, 125333) c6( ) c7(DS, bM, T, asg, adP, if, al, fd, cL, lR, bJh, rm, ci, bh, NF, x, vV, JD, bW, ja, hH, eL, bc, azh, aa, axu, mQ, hl, pL, ve, bw, aVc, GR, ou, y, iT, Jr, uy, vy, cj, bAD, k, pw, eg, P, bzb, ez, blG, aj, qN, ai, hr, tD, bJf, cc, vM, h, eV, dL, ey, bEg, mJ, nP, A, mR, fe, CQ, mo, kk, cM, jq, aZL, lf, uz, eo, Xa, abW, B, fG, jx, eX, bJg, V, pd, J, o, MK, ady, aT, sX, to, hM, s, iU, xR, Y, aDm, hf, pb, ck, ac, kB, ig, lV, Zg, AH, aGY, hr, Da, Tu, bt, blu, aDy, jh, bs, iD, jE, hF, hX, dP, et, od, oz, qh, LA, hD, vc, yF, uQ, d, ue, cr, eZ, hp, Pd, iV, qa, aYt, gk, Ny, aDg, rH, i, lC, WX, rk); #c1(HLA-DPBI) c2(XP_006715141) c3(HLA class II histocompatibility antigen, DP beta 1 chain isoform X1) c4( ) c5(288771, 288772, 288773, 288774, 288775, 288776, 288777, 288778, 288779, 288780, 288781, 288782, 288783, 288784, 288785, 288786, 288787, 288788, 288789, 288790, 288791, 288792) c6( ) c7(DS, bM, T, asg, adP, if, al, fd, cL, lR, bJh, rm, ci, bh, NF, x, vV, JD, bW, ja, hH, eL, bc, azh, aa, axu, mQ, hl, pL, ve, bw, aVc, GR, ou, y, iT, Jr, uy, vy, cj, bAD, k, pw, eg, P, bzb, ez, blG, aj, qN, ai, hr, tD, bJf, cc, vM, h, eV, dL, ey, bEg, mJ, nP, A, mR, fe, CQ, mo, kk, cM, jq, aZL, lf, uz, eo, Xa, abW, B, fG, jx, eX, bJg, V, pd, J, o, MK, ady, aT, sX, to, hM, s, iU, xR, Y, aDm, hf, pb, ck, ac, kB, ig, lV, Zg, AH, aGY, hr, Da, Tu, bt, blu, aDy, jh, bs, iD, jE, hF, hX, dP, et, od, oz, qh, LA, hD, vc, yF, uQ, d, ue, cr, eZ, hp, Pd, iV, qa, aYt, gk, Ny, aDg, rH, i, lC, WX, rk); #c1(HLA-DPBI) c2(XP_006725103) c3(HLA class II histocompatibility antigen, DP beta 1 chain isoform X1) c4(296564) c5(296565, 296566, 296567, 296568, 296569, 296570, 296571, 296572) c6( ) c7(DS, bM, T, asg, adP, if, al, fd, cL, lR, bJh, rm, ci, bh, NF, x, vV, JD, bW, ja, hH, eL, bc, azh, aa, axu, mQ, hl, pL, ve, bw, aVc, GR, ou, y, iT, Jr, uy, vy, cj, bAD, k, pw, eg, P, bzb, ez, blG, aj, qN, ai, hr, tD, bJf, cc, vM, h, eV, dL, ey, bEg, mJ, nP, A, mR, fe, CQ, mo, kk, cM, jq, aZL, lf, uz, eo, Xa, abW, B, fG, jx, eX, bJg, V, pd, J, o, MK, ady, aT, sX, to, hM, s, iU, xR, Y, aDm, hf, pb, ck, ac, kB, ig, lV, Zg, AH, aGY, hr, Da, Tu, bt, blu, aDy, jh, bs, iD, jE, hF, hX, dP, et, od, oz, qh, LA, hD, vc, yF, uQ, d, ue, cr, eZ, hp, Pd, iV, qa, aYt, gk, Ny, aDg, rH, i, lC, WX, rk); #c1(HLA-DQA1) c2(NP_002113) c3(HLA class II histocompatibility antigen, DQ alpha 1 chain precursor) c4(125334, 125335) c5(125336, 125337, 125338, 125339, 125340, 125341, 125342, 125343, 125344, 125345, 125346, 125347, 125348, 125349, 125350, 125351, 125352, 125353, 125354, 125355, 125356, 125357, 125358, 125359, 125360, 125361, 125362, 125363, 125364) c6( ) c7(bM, fR, al, aeu, cL, qj, ci, bh, lR, Jt, AW, WX, JD, fS, ja, wt, bc, bn, Jl, aW, axu, lh, az, hl, mQ, HA, kt, hN, g, eE, ve, uC, fT, yl, iT, uy, mx, vy, dW, bAD, pw, lS, eg, blB, dD, wu, Hm, aw, yG, fN, ez, blG, aj, qN, aYv, qW, ai, xC, cc, h, nP, OV, mR, A, lb, bJi, ge, Ni, aq, fe, CQ, mo, cM, adz, jq, ar, lX, Qu, mg, JM, bm, te, awQ, eo, fL, aDE, Xa, it, Wl, abW, B, bL, jv, eR, dK, jx, aA, GP, cz, OY, wy, V, pd, J, o, ady, cF, aEE, fh, jZ, sl, bza, qp, aT, jj, an, hK, kU, lM, sX, aFS, blJ, hM, Y, lC, r, afq, en, t, pb, lY, ck, OW, sn, ig, lV, Da, dy, aDj, ao, yv, gV, dM, axd, jh, eq, jE, aGW, wD, hX, dP, hd, F, afm, azq, akJ, hD, vB, wm, uD, vO, yF, uQ, uX, WZ, bHo, ff, wc, bps, cr, eZ, dN, aF, hp, iV, bz, es, Bv, yE, aED, Lb, qu, XO, oQ, y, kS, iu, rk, pC); #c1(HLA-DQA1) c2(XP_003846516) c3(HLA class II histocompatibility antigen, DQ alpha 1 chain isoform X4) c4(266124) c5(266125, 266126, 266127, 266128, 266129, 266130, 266131, 266132, 266133, 266134, 266135, 266136, 266137, 266138, 266139, 266140, 266141, 266142) c6( ) c7(bM, fR, al, aeu, cL, qj, ci, bh, lR, Jt, AW, WX, JD, fS, ja, wt, bc, bn, Jl, aW, axu, lh, az, hl, mQ, HA, kt, hN, g, eE, ve, uC, fT, yl, iT, uy, mx, vy, dW, bAD, pw, lS, eg, blB, dD, wu, Hm, aw, yG, fN, ez, blG, aj, qN, aYv, qW, ai, xC, cc, h, nP, OV, mR, A, lb, bJi, ge, Ni, aq, fe, CQ, mo, cM, adz, jq, ar, lX, Qu, mg, JM, bm, te, awQ, eo, fL, aDE, Xa, it, Wl, abW, B, bL, jv, eR, dK, jx, aA, GP, cz, OY, wy, V, pd, J, o, ady, cF, aEE, fh, jZ, sl, bza, qp, aT, jj, an, hK, kU, lM, sX, aFS, blJ, hM, Y, lC, r, afq, en, t, pb, lY, ck, OW, sn, ig, lV, Da, dy, aDj, ao, yv, gV, dM, axd, jh, eq, jE, aGW, wD, hX, dP, hd, F, afm, azq, akJ, hD, vB, wm, uD, vO, yF, uQ, uX, WZ, bHo, ff, wc, bps, cr, eZ, dN, aF, hp, iV, bz, es, Bv, yE, aED, Lb, qu, XO, oQ, y, kS, iu, rk, pC); #c1(HLA-DQA1) c2(XP_005275165) c3(HLA class II histocompatibility antigen, DQ alpha 1 chain isoform X4) c4(285575) c5(285576, 285577, 285578, 285579, 285580, 285581, 285582, 285583, 285584, 285585, 285586, 285587, 285588, 285589, 285590, 285591, 285592, 285593, 285594, 285595, 285596, 285597, 285598, 285599, 285600, 285601, 285602, 285603, 285604, 285605) c6( ) c7(bM, fR, al, aeu, cL, qj, ci, bh, lR, Jt, AW, WX, JD, fS, ja, wt, bc, bn, Jl, aW, axu, lh, az, hl, mQ, HA, kt, hN, g, eE, ve, uC, fT, yl, iT, uy, mx, vy, dW, bAD, pw, lS, eg, blB, dD, wu, Hm, aw, yG, fN, ez, blG, aj, qN, aYv, qW, ai, xC, cc, h, nP, OV, mR, A, lb, bJi, ge, Ni, aq, fe, CQ, mo, cM, adz, jq, ar, lX, Qu, mg, JM, bm, te, awQ, eo, fL, aDE, Xa, it, Wl, abW, B, bL, jv, eR, dK, jx, aA, GP, cz, OY, wy, V, pd, J, o, ady, cF, aEE, fh, jZ, sl, bza, qp, aT, jj, an, hK, kU, lM, sX, aFS, blJ, hM, Y, lC, r, afq, en, t, pb, lY, ck, OW, sn, ig, lV, Da, dy, aDj, ao, yv, gV, dM, axd, jh, eq, jE, aGW, wD, hX, dP, hd, F, afm, azq, akJ, hD, vB, wm, uD, vO, yF, uQ, uX, WZ, bHo, ff, wc, bps, cr, eZ, dN, aF, hp, iV, bz, es, Bv, yE, aED, Lb, qu, XO, oQ, y, kS, iu, rk, pC); #c1(HLA-DQA1) c2(XP_005275599) c3(HLA class II histocompatibility antigen, DQ alpha 1 chain isoform X4) c4(285649, 285650, 285651, 285652, 285653) c5(285654, 285655, 285656, 285657, 285658, 285659, 285660, 285661, 285662, 285663, 285664, 285665, 285666, 285667, 285668, 285669, 285670, 285671, 285672, 285673, 285674, 285675, 285676, 285677, 285678, 285679, 285680, 285681, 285682, 285683, 285684, 285685, 285686, 285687) c6( ) c7(bM, fR, al, aeu, cL, qj, ci, bh, lR, Jt, AW, WX, JD, fS, ja, wt, bc, bn, Jl, aW, axu, lh, az, hl, mQ, HA, kt, hN, g, eE, ve, uC, fT, yl, iT, uy, mx, vy, dW, bAD, pw, lS, eg, blB, dD, wu, Hm, aw, yG, fN, ez, blG, aj, qN, aYv, qW, ai, xC, cc, h, nP, OV, mR, A, lb, bJi, ge, Ni, aq, fe, CQ, mo, cM, adz, jq, ar, lX, Qu, mg, JM, bm, te, awQ, eo, fL, aDE, Xa, it, Wl, abW, B, bL, jv, eR, dK, jx, aA, GP, cz, OY, wy, V, pd, J, o, ady, cF, aEE, fh, jZ, sl, bza, qp, aT, jj, an, hK, kU, lM, sX, aFS, blJ, hM, Y, lC, r, afq, en, t, pb, lY, ck, OW, sn, ig, lV, Da, dy, aDj, ao, yv, gV, dM, axd, jh, eq, jE, aGW, wD, hX, dP, hd, F, afm, azq, akJ, hD, vB, wm, uD, vO, yF, uQ, uX, WZ, bHo, ff, wc, bps, cr, eZ, dN, aF, hp, iV, bz, es, Bv, yE, aED, Lb, qu, XO, oQ, y, kS, iu, rk, pC); #c1(HLA-DQA1) c2(XP_006715142) c3(HLA class II histocompatibility antigen, DQ alpha 1 chain isoform X1) c4(288793) c5(288794, 288795, 288796, 288797, 288798, 288799) c6( ) c7(bM, fR, al, aeu, cL, qj, ci, bh, lR, Jt, AW, WX, JD, fS, ja, wt, bc, bn, Jl, aW, axu, lh, az, hl, mQ, HA, kt, hN, g, eE, ve, uC, fT, yl, iT, uy, mx, vy, dW, bAD, pw, lS, eg, blB, dD, wu, Hm, aw, yG, fN, ez, blG, aj, qN, aYv, qW, ai, xC, cc, h, nP, OV, mR, A, lb, bJi, ge, Ni, aq, fe, CQ, mo, cM, adz, jq, ar, lX, Qu, mg, JM, bm, te, awQ, eo, fL, aDE, Xa, it, Wl, abW, B, bL, jv, eR, dK, jx, aA, GP, cz, OY, wy, V, pd, J, o, ady, cF, aEE, fh, jZ, sl, bza, qp, aT, jj, an, hK, kU, lM, sX, aFS, blJ, hM, Y, lC, r, afq, en, t, pb, lY, ck, OW, sn, ig, lV, Da, dy, aDj, ao, yv, gV, dM, axd, jh, eq, jE, aGW, wD, hX, dP, hd, F, afm, azq, akJ, hD, vB, wm, uD, vO, yF, uQ, uX, WZ, bHo, ff, wc, bps, cr, eZ, dN, aF, hp, iV, bz, es, Bv, yE, aED, Lb, qu, XO, oQ, y, kS, iu, rk, pC); #c1(HLA-DQA1) c2(XP_006725547) c3(HLA class II histocompatibility antigen, DQ alpha 1 chain isoform X4) c4(296835, 296836, 296837, 296838) c5(296839, 296840, 296841, 296842, 296843, 296844, 296845, 296846, 296847, 296848, 296849, 296850, 296851, 296852, 296853, 296854, 296855, 296856, 296857, 296858, 296859, 296860, 296861, 296862, 296863, 296864, 296865, 296866, 296867, 296868, 296869, 296870, 296871, 296872, 296873, 296874, 296875, 296876, 296877, 296878, 296879, 296880, 296881, 296882, 296883) c6( ) c7(bM, fR, al, aeu, cL, qj, ci, bh, lR, Jt, AW, WX, JD, fS, ja, wt, bc, bn, Jl, aW, axu, lh, az, hl, mQ, HA, kt, hN, g, eE, ve, uC, fT, yl, iT, uy, mx, vy, dW, bAD, pw, lS, eg, blB, dD, wu, Hm, aw, yG, fN, ez, blG, aj, qN, aYv, qW, ai, xC, cc, h, nP, OV, mR, A, lb, bJi, ge, Ni, aq, fe, CQ, me, cM, adz, jq, ar, lX, Qu, mg, JM, bm, te, awQ, eo, fL, aDE, Xa, it, Wl, abW, B, bL, jv, eR, dK, jx, aA, GP, cz, OY, wy, V, pd, J, o, ady, cF, aEE, fh, jZ, sl, bza, qp, aT, jj, an, hK, kU, lM, sX, aFS, hi J, hM, Y, lC, r, afq, en, t, pb, lY, ck, OW, sn, ig, lV, Da, dy, aDj, ao, yv, gV, dM, axd, jh, eq, jE, aGW, wD, hX, dP, hd, F, afm, azq, akJ, hD, vB, wm, uD, vO, yF, uQ, uX, WZ, bHo, ff, wc, bps, cr, eZ, dN, aF, hp, iV, bz, es, Bv, yE, aED, Lb, qu, XO, oQ, y, kS, iu, rk, pC); #c1(HLA-DQA1) c2(XP_011546178) c3(HLA class II histocompatibility antigen, DQ alpha 1 chain isoform X3) c4(344883, 344884) c5(344885, 344886, 344887, 344888, 344889, 344890, 344891, 344892, 344893, 344894, 344895, 344896, 344897, 344898, 344899, 344900, 344901) c6( ) c7(bM, fR, al, aeu, cL, qj, ci, bh, lR, Jt, AW, WX, JD, fS, ja, wt, bc, bn, Jl, aW, axu, lh, az, hl, mQ, HA, kt, hN, g, eE, ve, uC, fT, yl, iT, uy, mx, vy, dW, bAD, pw, lS, eg, blB, dD, wu, Hm, aw, yG, fN, ez, blG, aj, qN, aYv, qW, ai, xC, cc, h, nP, OV, mR, A, lb, bJi, ge, Ni, aq, fe, CQ, me, cM, adz, jq, ar, lX, Qu, mg, JM, bm, te, awQ, eo, fL, aDE, Xa, it, Wl, abW, B, bL, jv, eR, dK, jx, aA, GP, cz, OY, wy, V, pd, J, o, ady, cF, aEE, fh, jZ, sl, bza, qp, aT, jj, an, hK, kU, lM, sX, aFS, bid, hM, Y, lC, r, afq, en, t, pb, lY, ck, OW, sn, ig, lV, Da, dy, aDj, ao, yv, gV, dM, axd, jh, eq, jE, aGW, wD, hX, dP, hd, F, afm, azq, akJ, hD, vB, wm, uD, vO, yF, uQ, uX, WZ, bHo, ff, wc, bps, cr, eZ, dN, aF, hp, iV, bz, es, Bv, yE, aED, Lb, qu, XO, oQ, y, kS, iu, rk, pC); #c1(HLA-DQA2) c2(NP_064440) c3(HLA class II histocompatibility antigen, DQ alpha 2 chain precursor) c4(202429, 202430, 202431, 202432, 202433, 202434) c5(202435, 202436, 202437, 202438, 202439, 202440, 202441, 202442, 202443, 202444, 202445, 202446, 202447, 202448, 202449, 202450, 202451, 202452, 202453, 202454, 202455, 202456, 202457, 202458, 202459, 202460, 202461, 202462, 202463, 202464, 202465, 202466, 202467, 202468, 202469, 202470, 202471, 202472, 202473, 202474, 202475, 202476, 202477, 202478, 202479, 202480, 202481, 202482, 202483, 202484, 202485, 202486, 202487, 202488, 202489) c6( ) c7(bL, bM, dK, if, al, jh, aA, GP, aeu, aj, qj, jE, qN, lR, V, pd, ai, o, J, iu, AW, cF, F, JD, qp, bJj, aT, hD, kU, lM, vO, yF, hM, blJ, mR, A, bn, Jl, aW, Y, lh, az, hl, bJi, lb, cr, kt, eZ, aF, hp, g, mo, pb, adz, ar, yl, Qu, lV, bm, awQ, bAD, eo, oQ, y, it, Wl, an, pC); #c1(HLA-DQB1) c2(NP_001230890) c3(HLA class II histocompatibility antigen, DQ beta 1 chain isoform 2 precursor) c4(86943, 86944) c5(86945, 86946, 86947, 86948, 86949, 86950, 86951, 86952, 86953, 86954, 86955, 86956, 86957, 86958, 86959, 86960, 86961, 86962, 86963, 86964, 86965, 86966, 86967, 86968, 86969, 86970, 86971) c6( ) c7(bM, T, xS, fR, bJm, if, al, fd, aeu, cL, ur, ci, qj, bh, aGX, Jt, fw, aY, Tz, lR, aMB, ip, NF, lF, AW, xy, xE, aX, fS, bJj, dV, aU, ja, rB, DY, hH, LG, eL, bc, hm, aa, li, dH, Jl, aW, blP, bn, mQ, hl, HA, ih, aaN, hN, kt, aB, g, aFU, ve, uC, eE, GR, fT, iT, Fh, dc, uy, ki, mx, vy, cj, dW, bAD, k, m, pw, lS, eg, qm, aZN, sr, dD, QO, wu, vE, Hm, aw, yG, bzb, aFc, fN, blG, n, blD, aj, ez, apt, uE, aYv, qN, fr, qW, ai, jw, tD, xC, ft, cc, vM, i, aMj, kH, h, dL, ey, ux, Cr, mJ, alY, nP, OV, mR, A, sp, aRL, lb, CM, bJl, Ni, fe, aq, yq, aMJ, CQ, mo, gG, dw, cM, ve, Zj, Wt, aBs, ar, blF, blH, W, dB, hk, mg, Be, JM, uz, bm, Xa, fL, aDE, aCD, bni, lB, it, B, abW, bJp, bL, blR, jv, eR, dK, fG, jx, Nt, GP, aA, cz, DY, j, ajM, wy, V, eA, J, o, eJ, DJ, ady, mj, bJr, cF, blC, aEE, fh, bJn, nX, jZ, sl, bza, yg, aT, vH, cy, qp, hK, lM, sX, aZQ, to, ak, hM, iU, xR, Y, ayU, Pg, bg, r, axu, afq, aHU, ln, aDm, en, bu, aaO, t, pb, dS, ck, ajl, cT, BU, bJk, sn, OW, Dy, hA, ig, iQ, mG, of, AH, lV, auT, mf, dy, Da, gT, bt, aDj, ao, yv, Kd, bJg, aFe, akd, qb, aD, iW, axd, jh, wV, ah, jE, eq, bCx, aGW, hX, dP, hd, F, afm, ds, qh, akJ, oj, oW, dm, hD, rN, JK, vB, wm, ji, uD, vO, yF, uQ, uX, bHo, IU, lR, ff, aGS, bps, cr, eZ, dN, hv, Mz, aF, hp, Pd, iV, es, gk, Bv, DT, eU, yE, blS, arE, Ny, dO, aED, bE, Lj, aCl, aDB, gy, Lb, bJo, qu, oQ, afT, y, XO, WX, ME, rk, pC); #c1(HLA-DQB1) c2(NP_001230891) c3(HLA class II histocompatibility antigen, DQ beta 1 chain isoform 1 precursor) c4(86972, 86973, 86974, 86975, 86976, 86977, 86978, 86979, 86980, 86981, 86982, 86983, 86984, 86985, 86986, 86987, 86988, 86989, 86990, 86991, 86992, 86993, 86994, 86995) c5(86996, 86997, 86998, 86999, 87000, 87001, 87002, 87003, 87004, 87005, 87006, 87007, 87008, 87009, 87010, 87011, 87012, 87013, 87014, 87015, 87016, 87017, 87018, 87019, 87020, 87021, 87022, 87023, 87024, 87025, 87026, 87027, 87028, 87029, 87030, 87031, 87032, 87033, 87034, 87035, 87036, 87037, 87038, 87039, 87040, 87041, 87042, 87043, 87044, 87045, 87046, 87047, 87048, 87049, 87050, 87051, 87052, 87053, 87054, 87055, 87056, 87057, 87058, 87059, 87060, 87061, 87062, 87063, 87064, 87065, 87066, 87067, 87068, 87069, 87070, 87071, 87072, 87073, 87074, 87075, 87076, 87077, 87078, 87079, 87080, 87081, 87082, 87083, 87084, 87085, 87086, 87087, 87088, 87089, 87090, 87091, 87092, 87093, 87094, 87095, 87096, 87097, 87098, 87099, 87100, 87101, 87102, 87103, 87104, 87105, 87106, 87107, 87108, 87109, 87110, 87111, 87112, 87113, 87114, 87115, 87116, 87117, 87118, 87119) c6( ) c7(bM, T, xS, fR, bJm, if, al, fd, aeu, cL, ur, ci, qj, bh, aGX, Jt, fw, aY, Tz, lR, aMB, ip, NF, lF, AW, xy, xE, aX, fS, bJj, dV, aU, ja, rB, DY, hH, LG, eL, bc, hm, aa, li, dH, Jl, aW, blP, bn, mQ, hl, HA, ih, aaN, hN, kt, aB, g, aFU, ve, uC, eE, GR, fT, iT, Fh, dc, uy, ki, mx, vy, cj, dW, bAD, k, m, pw, lS, eg, qm, aZN, sr, dD, QO, wu, vE, Hm, aw, yG, bzb, aFc, fN, blG, n, blD, aj, ez, apt, uE, aYv, qN, fr, qW, ai, jw, tD, xC, ft, cc, vM, i, aMj, kH, h, dL, ey, ux, Cr, mJ, alY, nP, OV, mR, A, sp, aRL, lb, CM, bJl, Ni, fe, aq, yq, aMJ, CQ, mo, gG, dw, cM, ve, Zj, Wt, aBs, ar, blF, blH, W, dB, hk, mg, Be, JM, uz, hm, Xa, fL, aDE, aCD, bni, lB, it, B, abW, bJp, bL, blR, jv, eR, dK, fG, jx, Nt, GP, aA, cz, DY, j, ajM, wy, V, eA, J, o, eJ, DJ, ady, mj, bJr, cF, blC, aEE, fh, bJn, nX, jZ, sl, bza, yg, aT, vH, cy, qp, hK, lM, sX, aZQ, to, ak, hM, iU, xR, Y, ayU, Pg, bg, r, axu, afq, aHU, lo, aDm, en, bu, aaO, t, pb, dS, ck, ajl, cT, BU, bJk, sn, OW, Dy, hA, ig, iQ, mG, of, AH, lV, auT, mf, dy, Da, gT, bt, aDj, ao, yv, Kd, bJg, aFe, akd, qb, aD, iW, axd, jh, wV, ah, jE, eq, bCx, aGW, hX, dP, hd, F, afm, ds, qh, akJ, oj, oW, dm, hD, rN, JK, vB, wm, ji, uD, vO, yF, uQ, uX, bHo, lU, lR, ff, aGS, bps, cr, eZ, dN, hv, Mz, aF, hp, Pd, iV, es, gk, Bv, DT, eU, yE, blS, arE, Ny, dO, aED, bE, Lj, aCl, aDB, gy, Lb, bJo, qu, oQ, afT, y, XO, WX, ME, rk, pC); #c1(HLA-DQB1) c2(NP_002114) c3(HLA class II histocompatibility antigen, DQ beta 1 chain isoform 1 precursor) c4(125365, 125366, 125367, 125368, 125369) c5(125370, 125371, 125372, 125373, 125374, 125375, 125376, 125377, 125378, 125379, 125380, 125381, 125382, 125383, 125384, 125385, 125386, 125387, 125388, 125389, 125390, 125391, 125392, 125393, 125394, 125395, 125396, 125397, 125398, 125399, 125400, 125401, 125402, 125403, 125404, 125405, 125406, 125407, 125408, 125409, 125410, 125411, 125412, 125413, 125414, 125415, 125416, 125417, 125418, 125419, 125420, 125421, 125422, 125423, 125424, 125425, 125426, 125427, 125428, 125429) c6( ) c7(bM, T, xS, fR, bJm, if, al, fd, aeu, cL, ur, ci, qj, bh, aGX, Jt, fw, aY, Tz, lR, aMB, ip, NF, lF, AW, xy, xE, aX, fS, bJj, dV, aU, ja, rB, DY, hH, LG, eL, bc, hm, aa, li, dH, Jl, aW, blP, bn, mQ, hl, HA, ih, aaN, hN, kt, aB, g, aFU, ve, uC, eE, GR, fT, iT, Fh, dc, uy, ki, mx, vy, cj, dW, bAD, k, m, pw, lS, eg, qm, aZN, sr, dD, QO, wu, vE, Hm, aw, yG, bzb, aFc, fN, blG, n, blD, aj, ez, apt, uE, aYv, qN, fr, qW, ai, jw, tD, xC, ft, cc, vM, i, aMj, kH, h, dL, ey, ux, Cr, mJ, alY, nP, OV, mR, A, sp, aRL, lb, CM, bJl, Ni, fe, aq, yq, aMJ, CQ, mo, gG, dw, cM, ve, Zj, Wt, aBs, ar, blF, blH, W, dB, hk, mg, Be, JM, uz, hm, Xa, fL, aDE, aCD, bni, lB, it, B, abW, bJp, bL, blR, jv, eR, dK, fG, jx, Nt, GP, aA, cz, DY, j, ajM, wy, V, eA, J, o, eJ, DJ, ady, mj, bJr, cF, blC, aEE, fh, bJn, nX, jZ, sl, bza, yg, aT, vH, cy, qp, hK, lM, sX, aZQ, to, ak, hM, iU, xR, Y, ayU, Pg, bg, r, axu, afq, aHU, lo, aDm, en, bu, aaO, t, pb, dS, ck, ajl, cT, BU, bJk, sn, OW, Dy, hA, ig, iQ, mG, of, AH, lV, auT, mf, dy, Da, gT, bt, aDj, ao, yv, Kd, bJq, aFe, akd, qb, aD, iW, axd, jh, wV, ah, jE, eq, bCx, aGW, hX, dP, hd, F, afm, ds, qh, akJ, oj, oW, dm, hD, rN, JK, vB, wm, ji, uD, vO, yF, uQ, uX, bHo, lU, lR, ff, aGS, bps, cr, eZ, dN, hv, Mz, aF, hp, Pd, iV, es, gk, Bv, DT, eU, yE, blS, arE, Ny, dO, aED, bE, Lj, aCl, aDB, gy, Lb, bJo, qu, uQ, afT, y, XO, WX, ME, rk, pC); #c1(HLA-DQB2) c2(NP_001185787) c3(HLA class II histocompatibility antigen, DQ beta 2 chain isoform 2 precursor) c4(76354, 76355, 76356, 76357) c5(76358, 76359, 76360, 76361, 76362, 76363, 76364, 76365, 76366, 76367, 76368, 76369, 76370, 76371, 76372, 76373, 76374, 76375, 76376, 76377, 76378, 76379, 76380, 76381, 76382, 76383, 76384, 76385, 76386, 76387, 76388, 76389, 76390, 76391, 76392, 76393, 76394, 76395, 76396, 76397, 76398, 76399, 76400, 76401, 76402, 76403, 76404, 76405, 76406, 76407, 76408, 76409, 76410) c6( ) c7(bM, T, xS, bJm, if, aeu, lR, bh, aGX, aY, Tz, aMB, ip, NF, lF, xy, xE, bJj, aU, hH, bc, li, dH, Jl, aW, bn, kt, g, eE, y, dc, mx, cj, bAD, qm, aZN, QO, vE, yG, aFc, n, aj, qN, h, ey, alY, nP, A, aRL, bJl, fe, mo, gG, Wt, mg, uz, it, B, bJp, bL, dK, Nt, GP, aA, OY, j, V, eJ, o, J, mj, cF, aEE, bJn, bza, aT, lM, sX, hM, xR, Y, ayU, lo, aDm, en, pb, ajl, cT, OW, Dy, hA, ig, lV, of, AH, mf, ao, Kd, bJg, akd, wV, jE, hX, dP, F, od, dm, hD, rN, vB, yF, uQ, lR, ff, cr, eZ, aF, hp, DT, eU, Lj, Ny, aDB, gy, XO, bJo, oQ, lf, hv); #c1(HLA-DQB2) c2(NP_001287719) c3(HLA class II histocompatibility antigen, DQ beta 2 chain isoform 1 precursor) c4(112641) c5(112642, 112643, 112644, 112645, 112646, 112647, 112648, 112649, 112650, 112651, 112652, 112653, 112654, 112655) c6( ) c7(bM, T, xS, bJm, if, aeu, lR, bh, aGX, aY, Tz, aMB, ip, NF, lF, xy, xE, bJj, aU, hH, bc, li, dH, Jl, aW, bn, kt, g, eE, y, dc, mx, cj, bAD, qm, aZN, QO, vE, yG, aFc, n, aj, qN, h, ey, alY, nP, A, aRL, bJl, fe, mo, gG, Wt, mg, uz, it, B, bJp, bL, dK, Nt, GP, aA, OY, j, V, eJ, o, J, mj, cF, aEE, bJn, bza, aT, lM, sX, hM, xR, Y, ayU, lo, aDm, en, pb, ajl, cT, OW, Dy, hA, ig, lV, of, AH, mf, ao, Kd, bJq, akd, wV, jE, hX, dP, F, od, dm, hD, rN, vB, yF, uQ, lR, ff, cr, eZ, aF, hp, DT, eU, Lj, Ny, aDB, gy, XO, bJo, oQ, lf, hv); #c1(HLA-0082) c2(XP_005249108) c3(HLA class II histocompatibility antigen, DQ beta 2 chain isoform X13) c4(269029) c5(269030, 269031, 269032, 269033, 269034, 269035, 269036, 269037, 269038, 269039, 269040, 269041, 269042, 269043) c6( ) c7(bM, T, xS, bJm, if, aeu, lR, bh, aGX, aY, Tz, aMB, ip, NF, lF, xy, xE, bJj, aU, hH, bc, li, dH, Jl, aW, bn, kt, g, eE, y, dc, mx, cj, bAD, qm, aZN, QO, vE, yG, aFc, n, aj, qN, h, ey, alY, nP, A, aRL, bJl, fe, mo, gG, Wt, mg, uz, it, B, bJp, bL, dK, Nt, GP, aA, OY, j, V, eJ, o, J, mj, cF, aEE, bJn, bza, aT, lM, sX, hM, xR, Y, ayU, lo, aDm, en, pb, ajl, cT, OW, Dy, hA, ig, lV, of, AH, mf, ao, Kd, bJq, akd, wV, jE, hX, dP, F, od, dm, hD, rN, vB, yF, uQ, lR, ff, cr, eZ, aF, hp, DT, eU, Lj, Ny, aDB, gy, XO, bJo, oQ, lf, hv); #c1(HLA-DQB2) c2(XP_011512863) c3(HLA class II histocompatibility antigen, DQ beta 2 chain isoform X15) c4(304114) c5(304115, 304116, 304117, 304118, 304119, 304120, 304121, 304122, 304123, 304124, 304125, 304126, 304127, 304128, 304129, 304130) c6( ) c7(bM, T, xS, bJm, if, aeu, lR, bh, aGX, aY, Tz, aMB, ip, NF, lF, xy, xE, bJj, aU, hH, bc, li, dH, Jl, aW, bn, kt, g, eE, y, dc, mx, cj, bAD, qm, aZN, QO, vE, yG, aFc, n, aj, qN, h, ey, alY, nP, A, aRL, bJl, fe, mo, gG, Wt, mg, uz, it, B, bJp, bL, dK, Nt, GP, aA, OY, j, V, eJ, o, J, mj, cF, aEE, bJn, bza, aT, lM, sX, hM, xR, Y, ayU, lo, aDm, en, pb, ajl, cT, OW, Dy, hA, ig, lV, of, AH, mf, ao, Kd, bJq, akd, wV, jE, hX, dP, F, od, dm, hD, rN, vB, yF, uQ, lR, ff, cr, eZ, aF, hp, DT, eU, Lj, Ny, aDB, gy, XO, bJo, oQ, lf, hv); #c1(HLA-DQB2) c2(XP_011546535) c3(HLA class II histocompatibility antigen, DQ beta 2 chain isoform X10) c4( ) c5(345263, 345264, 345265, 345266) c6( ) c7(bM, T, xS, bJm, if, aeu, lR, bh, aGX, aY, Tz, aMB, ip, NF, lF, xy, xE, bJj, aU, hH, bc, li, dH, Jl, aW, bn, kt, g, eE, y, dc, mx, cj, bAD, qm, aZN, QO, vE, yG, aFc, n, aj, qN, h, ey, alY, nP, A, aRL, bJl, fe, mo, gG, Wt, mg, uz, it, B, bJp, bL, dK, Nt, GP, aA, OY, j, V, eJ, o, J, mj, cF, aEE, bJn, bza, aT, lM, sX, hM, xR, Y, ayU, lo, aDm, en, pb, ajl, cT, OW, Dy, hA, ig, lV, of, AH, mf, ao, Kd, bJq, akd, wV, jE, hX, dP, F, od, dm, hD, rN, vB, yF, uQ, lR, ff, cr, eZ, aF, hp, DT, eU, Lj, Ny, aDB, gy, XO, bJo, oQ, lf, hv); #c1(HLA-DQB2) c2(XP_011546536) c3(HLA class II histocompatibility antigen, DQ beta 2 chain isoform X11) c4(345267) c5(345268, 345269, 345270, 345271, 345272, 345273, 345274, 345275, 345276, 345277, 345278, 345279, 345280, 345281, 345282, 345283, 345284, 345285, 345286, 345287, 345288, 345289, 345290, 345291) c6( ) c7(bM, T, xS, bJm, if, aeu, lR, bh, aGX, aY, Tz, aMB, ip, NF, lF, xy, xE, bJj, aU, hH, bc, li, dH, Jl, aW, bn, kt, g, eE, y, dc, mx, cj, bAD, qm, aZN, QO, vE, yG, aFc, n, aj, qN, h, ey, alY, nP, A, aRL, bJl, fe, mo, gG, Wt, mg, uz, it, B, bJp, bL, dK, Nt, GP, aA, OY, j, V, eJ, o, J, mj, cF, aEE, bJn, bza, aT, lM, sX, hM, xR, Y, ayU, lo, aDm, en, pb, ajl, cT, OW, Dy, hA, ig, lV, of, AH, mf, ao, Kd, bJq, akd, wV, jE, hX, dP, F, od, dm, hD, rN, vB, yF, uQ, lR, ff, cr, eZ, aF, hp, DT, eU, Lj, Ny, aDB, gy, XO, bJo, oQ, lf, hv); #c1(HLA-DQB2) c2(XP_011546537) c3(HLA class II histocompatibility antigen, DQ beta 2 chain isoform X12) c4(345292, 345293, 345294) c5(345295, 345296, 345297, 345298, 345299, 345300, 345301, 345302, 345303, 345304, 345305, 345306, 345307, 345308, 345309, 345310, 345311, 345312, 345313, 345314, 345315, 345316, 345317, 345318, 345319, 345320, 345321, 345322, 345323, 345324, 345325, 345326, 345327, 345328, 345329, 345330, 345331, 345332, 345333, 345334, 345335, 345336, 345337, 345338, 345339, 345340, 345341) c6( ) c7(bM, T, xS, bJm, if, aeu, lR, bh, aGX, aY, Tz, aMB, ip, NF, lF, xy, xE, bJj, aU, hH, bc, li, dH, Jl, aW, bn, kt, g, eE, y, dc, mx, cj, bAD, qm, aZN, QO, vE, yG, aFc, n, aj, qN, h, ey, alY, nP, A, aRL, bJl, fe, mo, gG, Wt, mg, uz, it, B, bJp, bL, dK, Nt, GP, aA, OY, j, V, eJ, o, J, mj, cF, aEE, bJn, bza, aT, lM, sX, hM, xR, Y, ayU, lo, aDm, en, pb, ajl, cT, OW, Dy, hA, ig, lV, of, AH, mf, ao, Kd, bJq, akd, wV, jE, hX, dP, F, od, dm, hD, rN, vB, yF, uQ, lR, ff, cr, eZ, aF, hp, DT, eU, Lj, Ny, aDB, gy, XO, bJo, oQ, lf, hv); #c1(HLA-DRA) c2(NP_061984) c3(HLA class II histocompatibility antigen, DR alpha chain precursor) c4(201618, 201619, 201620, 201621, 201622, 201623, 201624, 201625, 201626, 201627) c5(201628, 201629, 201630, 201631, 201632, 201633, 201634, 201635, 201636, 201637, 201638, 201639, 201640, 201641, 201642, 201643, 201644, 201645, 201646, 201647, 201648, 201649, 201650, 201651, 201652, 201653, 201654, 201655, 201656, 201657, 201658, 201659, 201660, 201661, 201662, 201663, 201664, 201665, 201666, 201667, 201668, 201669, 201670, 201671, 201672, 201673, 201674, 201675, 201676, 201677, 201678, 201679, 201680, 201681, 201682, 201683, 201684, 201685, 201686, 201687, 201688, 201689, 201690, 201691, 201692, 201693, 201694, 201695, 201696, 201697, 201698, 201699, 201700, 201701, 201702, 201703, 201704, 201705, 201706, 201707, 201708, 201709, 201710, 201711, 201712, 201713, 201714, 201715, 201716, 201717, 201718, 201719, 201720, 201721, 201722, 201723, 201724, 201725, 201726, 201727, 201728, 201729, 201730, 201731, 201732, 201733, 201734, 201735, 201736, 201737, 201738, 201739, 201740, 201741, 201742, 201743, 201744, 201745, 201746, 201747, 201748, 201749, 201750, 201751, 201752, 201753, 201754, 201755, 201756, 201757, 201758, 201759, 201760, 201761, 201762) c6( ) c7(bL, bM, wL, aFc, V, AW, ld, vH, h, ey, an, af, uQ, hM, A, sp, HA, eZ, r, Mz, hp, iV, pt, cM, pb, eM, Xa, y, WX, B); #c1(HLA-DRB1) c2(NP_001230894) c3(major histocompatibility complex, class II, DR beta 1 precursor) c4(87120, 87121) c5(87122, 87123, 87124, 87125, 87126, 87127, 87128, 87129, 87130, 87131, 87132, 87133, 87134, 87135, 87136, 87137, 87138, 87139, 87140) c6( ) c7(T, bJN, fd, aeu, aoj, ci, aY, xy, rw, dV, iv, aFk, hH, aiJ, azh, aa, ly, uY, GR, fT, Jr, nB, dc, lp, cj, bAD, k, aZo, lS, vF, eg, uL, qm, sr, blB, bJF, aYZ, vE, ht, blD, cQ, aj, qW, cd, hr, tD, aJe, vM, KN, ey, OM, mJ, nP, mR, bJl, sp, ge, fe, CQ, adz, dB, bJD, aCD, Wl, abW, bJp, jv, aA, GP, cz, wy, zn, aWb, akU, bJE, cy, jj, DX, lM, sX, Cy, dl, aFS, bf, lC, aMA, sV, bJC, lo, pb, Cv, ans, cT, OW, tW, ac, ig, iM, iQ, mG, hr, bt, gV, oq, bJq, iW, axd, aZU, jh, sJ, dG, uu, aYs, aue, ad, wD, aoH, hX, vJ, aFh, Dq, akJ, oW, lQ, wm, WZ, atJ, ff, OQ, afi, brp, iV, bz, aYt, DF, DT, Om, aDJ, ME, bJo, oQ, afT, lG, lf, WX, ne, rk, ra, lD, bM, xS, adP, if, e, cL, ur, bh, Tz, ip, yM, x, vV, fS, bFU, ja, azm, bc, uM, dH, Jl, hl, kt, aVO, aFU, bJy, eE, bw, lt, xD, Fh, ki, ii, blQ, mx, vy, abh, xN, dD, bJs, wu, Hm, zt, yG, blG, n, oY, uE, jw, aMp, bJf, Mo, aMj, eV, DU, A, lb, ax, yq, vo, awQ, eo, fL, B, lH, eX, v, V, MK, sl, ld, ae, to, tN, aAi, hM, zH, aOK, axW, afS, afq, acB, bu, aaO, t, ck, auT, oX, Tu, vi, ob, dM, eq, aGW, BY, hd, od, afm, Db, ds, qh, LA, hD, rN, JK, bsn, uD, d, je, hG, wc, NH, dN, kD, dr, gk, yE, Ny, dO, gy, rH, y, hv, sH, pC, fR, al, qj, aGX, lR, Jt, bJe, aMB, AW, xE, bJG, bW, bJK, rB, K, wt, DY, dF, mH, aEV, blP, axu, mQ, hN, aB, g, pL, ve, uC, xK, uy, dW, m, bJv, Re, NK, QO, aiK, aw, fN, Qh, apt, pM, apz, eh, ft, aaA, blO, alY, aXy, aLE, cM, Ld, Zj, ar, blF, acC, blH, W, bbx, aZL, mg, JM, bzm, Xa, lB, Pr, it, blR, fM, bcb, fG, jx, Nt, wo, bJw, j, Vh, pd, eA, J, o, bJr, bJO, lg, nX, jZ, hK, kl, xR, Y, ayU, Pg, r, aHU, en, bN, sn, aQd, hA, hc, of, uS, Da, dy, fD, gT, blu, Gl, am, CS, aZ, awz, ah, hF, gb, ase, dP, acu, awd, oj, vB, ji, lU, lR, bps, cr, hp, Fq, Pd, Bu, qa, bJt, bJz, Bv, Lj, aCl, qu, ei, hE, DS, bJx, eb, aTy, bwS, aEV, Jx, mF, aR, NF, dY, il, aU, hm, UC, aW, lh, HA, aaN, aVc, iT, qr, R, qR, aFc, ez, fr, kD, qN, aPb, ai, ke, aJf, cc, wG, ql, h, jy, ux, OV, iw, aq, bJu, mo, gG, dw, acD, lx, oU, Wt, lX, hk, uw, bm, uz, aDE, bni, cn, bL, eR, dK, cR, aBo, ajM, OY, DJ, cF, ga, bJJ, blG, mP, bJA, qp, aT, vH, bJH, bJB, kU, af, aZQ, ak, iU, yL, OS, aOm, OC, wf, lY, ahN, bJk, wg, nM, yW, Zg, AH, aYx, Kd, qb, aD, ha, jE, mC, Uy, aiN, XB, qC, dZ, kL, F, ez, azq, bJL, alg, dm, vO, yF, uQ, bHo, bJM, aFE, aGS, azP, eZ, yy, aF, LB, ay, es, axs, atM, z, blS, Rv, aED, Lb, aS, XO, Lz, fh); #c1(HLA-DRB1) c2(NP_002115) c3(major histocompatibility complex, class II, DR beta 1 precursor) c4(125430, 125431, 125432, 125433, 125434) c5(125435, 125436, 125437, 125438, 125439, 125440, 125441, 125442, 125443, 125444, 125445, 125446, 125447, 125448, 125449, 125450, 125451, 125452, 125453, 125454, 125455, 125456, 125457, 125458, 125459, 125460, 125461, 125462, 125463, 125464, 125465) c6( ) c7(T, bJN, fd, aeu, aoj, ci, aY, xy, rw, dV, iv, aFk, hH, aiJ, azh, aa, ly, uY, GR, fT, Jr, nB, dc, lp, cj, bAD, k, aZo, lS, vF, eg, uL, qm, sr, blB, bJF, aYZ, vE, ht, blD, cQ, aj, qW, cd, hr, tD, aJe, vM, KN, ey, OM, mJ, nP, mR, bJl, sp, ge, fe, CQ, adz, dB, bJD, aCD, Wl, abW, bJp, jv, aA, GP, cz, wy, zn, aWb, akU, bJE, cy, jj, OX, lM, sX, Cy, dl, aFS, bf, lC, aMA, sV, bJC, lo, pb, Cv, ans, cT, OW, tW, ac, ig, iM, iQ, mG, hr, bt, gV, oq, bJq, iW, axd, aZU, jh, sJ, dG, uu, aYs, aue, ad, wD, aoH, hX, vJ, aFh, Dq, akJ, oW, lQ, wm, WZ, atJ, ff, OQ, afi, brp, iV, bz, aYt, DF, DT, Om, aDJ, ME, bJo, oQ, afT, lC, lf, WX, ne, rk, ra, lD, bM, xS, adP, if, e, cL, ur, bh, Tz, ip, yM, x, vV, fS, bFU, ja, azm, bc, uM, dH, Jl, hl, kt, aVO, aFh, bJy, eE, bw, lt, xD, Fh, ki, ii, blQ, mx, vy, abh, xN, dD, bJs, wu, Hm, zt, yG, blG, n, oY, uE, jw, aMp, bJf, Mo, aMj, eV, DU, A, lb, ax, yq, vo, awQ, eo, fL, B, lH, eX, v, V, MK, sl, ld, ae, to, tN, aAi, hM, zH, aOK, axW, afS, afq, acB, bu, aaO, t, ck, auT, oX, Tu, vi, ob, dM, eq, aGW, BY, hd, od, afm, Db, ds, qh, LA, hD, rN, JK, bsn, uD, d, je, hG, wc, NH, dN, kD, dr, gk, yE, Ny, dO, gy, rH, y, hv, sH, pC, fR, al, qj, aGX, lR, Jt, bJe, aMB, AW, xE, bJG, bW, bJK, rB, K, wt, DY, dF, mH, aEV, blP, axu, mQ, hN, aB, g, pL, ve, uC, xK, uy, dW, m, bJv, Re, NK, QO, aiK, aw, fN, Qh, apt, pM, apz, eh, ft, aaA, blO, alY, aXy, aLE, cM, Ld, Zj, ar, blF, acC, blH, W, bbx, aZL, mg, JM, bzm, Xa, lB, Pr, it, blR, fM, bcb, fG, jx, Nt, wo, bJw, j, Vh, pd, eA, J, o, bJr, bJO, lg, nX, jZ, hK, kl, xR, Y, ayU, Pg, r, aHU, en, bN, sn, aQd, hA, hc, of, uS, Da, dy, fD, gT, blu, Gl, am, CS, aZ, awz, ah, hF, gb, ase, dP, acu, awd, oj, vB, ji, lU, lR, bps, cr, hp, Fq, Pd, Bu, ga, bJt, bJz, Bv, Lj, aCl, qu, ei, hE, DS, bJx, eb, aTy, bwS, aEV, Jx, mF, aR, NF, dY, il, aU, hm, UC, aW, lh, HA, aaN, aVc, iT, qr, R, qR, aFc, ez, fr, kD, qN, aPb, ai, ke, aJf, cc, wG, ql, h, jy, ux, OV, iw, aq, bJu, mo, gG, dw, acD, lx, oU, Wt, lX, hk, uw, bm, uz, aDE, bni, cn, bL, eR, dK, cR, aBo, ajM, DY, DJ, cF, ga, bJJ, blG, mP, bJA, qp, aT, vH, bJH, bJB, kU, af, aZQ, ak, iU, yL, OS, aDm, OC, wf, lY, ahN, bJk, wg, nM, yW, Zg, AH, aYx, Kd, qb, aD, ha, jE, mC, Uy, aiN, XB, qC, dZ, kL, F, oz, azq, bJL, alg, dm, vO, yF, uQ, bHo, bJM, aFE, aGS, azP, eZ, yy, aF, LB, ay, es, axs, atM, z, blS, Rv, aED, Lb, aS, XO, Lz, fh); #c1(HLA-DRB3) c2(NP_072049) c3(major histocompatibility complex, class II, DR beta 3 precursor) c4(212568, 212569) c5(212570, 212571, 212572, 212573, 212574, 212575, 212576, 212577, 212578, 212579, 212580, 212581, 212582, 212583, 212584, 212585, 212586) c6( ) c7(blR, jv, al, jx, cL, v, aoj, bh, eA, ai, o, D J, cF, Dq, hD, h, DU, DY, uQ, ak, A, iU, eZ, hp, iV, aaO, ga, DT, sn, dB, hm); #c1(HLA-DRB4) c2(NP_068818) c3(major histocompatibility complex, class II, DR beta 4 precursor) c4(210818, 210819) c5(210820, 210821, 210822, 210823, 210824, 210825, 210826, 210827, 210828, 210829, 210830, 210831, 210832, 210833, 210834, 210835) c6( ) c7(oO, bM, T, xS, ea, aKu, if, al, eb, fd, cL, aoj, qj, ci, bh, aGX, lR, Tz, aR, bbo, x, AW, gJ, xy, vV, il, bW, fS, dV, ja, K, hu, hH, bc, dH, bn, aW, axu, az, hl, mQ, HA, aGQ, hN, bdk, as, akb, bJy, eF, cm, iP, bJP, y, lt, iA, Jr, lp, iT, cj, Zn, dW, k, m, Re, P, dD, Hm, lo, yG, ht, ez, n, blD, aj, oY, fr, bd, qN, ai, bbB, ft, mh, bbt, bJS, aZv, ju, adX, h, UD, dL, ey, OM, mJ, alY, nP, OV, mR, CN, A, oo, aJ, sp, bJi, fe, yq, CQ, mo, zZ, aRJ, aBs, blF, adZ, bbx, w, aZL, mg, JM, hm, uz, Xa, fL, B, abW, bL, blR, bJT, fM, aYB, dK, jx, aA, cz, j, C, lu, V, pd, q, J, o, zn, DJ, er, eA, cF, bJn, ld, aT, yu, sX, ak, hM, kl, iU, vT, oV, Y, Pg, r, ln, en, hf, t, f, iK, pb, bN, OC, ck, ajl, cT, sS, bJk, sn, OW, kB, hA, ig, nM, iQ, of, AH, lV, auT, mf, dy, bko, bt, blu, vi, bjX, aZ, iW, jh, iD, Fb, eq, jE, oL, blM, mC, wD, hX, dP, hd, F, bJQ, vJ, ds, alg, hD, vB, yF, uQ, d, ue, hG, KS, aFE, azP, eH, cr, yy, eZ, ff, aF, hp, iV, bz, dr, es, gk, DT, pc, bE, Lj, XO, ME, i, hE, bJR, WX, hv, pC); #c1(HLA-DRB5) c2(NP_002116) c3(major histocompatibility complex, class II, DR beta 5 precursor) c4(125466) c5(125467, 125468, 125469, 125470, 125471, 125472, 125473) c6( ) c7(bM, T, blR, fM, xS, if, jx, n, cL, aj, wV, bh, qN, lR, fr, wy, V, ME, Tz, o, eA, hX, NF, wD, cF, F, ds, bW, dV, hD, h, JK, lQ, an, aFk, bc, yF, uQ, ak, nP, A, XO, eZ, iU, je, oV, yL, mQ, afS, hl, r, aaN, Pg, ln, aF, hp, yq, cr, mo, dw, iV, pb, cT, bJk, sn, iM, ig, lV, of, mg, JM, hm, uz, bAD, bJo, dy, WX, en, Xa, bJR, zA, abW, y); #c1(HLA-E) c2(NP_005507) c3(HLA class I histocompatibility antigen, alpha chain E precursor) c4(156927, 156928, 156929) c5(156930, 156931, 156932, 156933, 156934, 156935, 156936, 156937, 156938, 156939, 156940, 156941, 156942, 156943, 156944, 156945, 156946, 156947, 156948, 156949, 156950, 156951, 156952, 156953, 156954, 156955, 156956, 156957, 156958, 156959, 156960, 156961, 156962, 156963) c6( ) c7(DS, oO, T, bM, bzx, aC, fR, xS, bJW, ea, e, bkF, if, fd, bB, cL, qj, ci, bh, lR, mF, Tz, aMB, x, Vp, AW, bv, xy, xE, rw, aX, dV, ja, azm, rB, K, zy, hH, LG, eL, bc, DY, hm, bJX, akX, eG, axz, aW, lh, az, axu, awv, uY, hN, dg, g, as, eE, bJy, uC, eF, mZ, cm, iP, ha, y, bJU, yl, eM, Jr, xD, dc, ki, iA, iT, mx, aiM, cj, bAD, k, m, gn, eg, zv, LT, dD, QO, JC, zt, aw, yG, qy, n, aj, oY, fr, et, jX, uE, bfO, qN, Tl, qW, cd, ai, eW, bbB, ft, cc, WB, vC, i, adX, cU, aMj, kH, dL, jy, ey, bav, aUH, h, mV, mY, on, mU, OV, asp, mR, A, sp, CM, lb, bJi, fe, aq, aMJ, CQ, mo, xe, Wt, mX, asE, bP, adZ, Qu, NL, aZL, lf, mg, abt, aDx, oh, uz, eo, aAl, fL, at, Xa, Tr, Pr, B, mT, cn, it, bL, Dw, jv, fM, dA, eR, fG, Ju, jx, eX, aA, aBo, mS, hz, v, j, bcE, V, pd, q, J, o, aGT, eA, ady, cF, fh, ld, yg, aT, yu, bK, Tj, jj, hK, kU, lM, sX, ae, bgp, ak, azU, hM, iU, oV, Y, aCH, bg, lC, eV, r, ln, Ph, axw, en, bu, aaO, t, iK, pb, bzc, bN, ck, lY, cT, sS, cl, OW, Dy, ig, vZ, awN, hc, bJY, of, iM, gX, lV, uS, Da, np, oX, gT, bt, zA, ao, vi, Kd, sY, aaT, hl, id, Ke, qb, LX, dM, iW, jh, Hn, wV, bS, eq, jE, iJ, mC, bCx, Uy, ad, qC, hX, afb, wD, F, od, mW, ds, Dq, alg, qh, oj, hD, vc, lQ, nJ, vO, yF, huh, uQ, d, lx, je, bJV, ff, aFE, xs, eH, cr, CF, yy, eZ, gE, hp, aF, Pd, Z, iV, bz, dr, kD, LB, es, Bv, bE, Lj, arE, eB, aS, rH, be, oQ, XO, hE, WX, X, hv, pC); #c1(HLA-F) c2(NP_001091948) c3(HLA class I histocompatibility antigen, alpha chain F isoform 3 precursor) c4(38804, 38805, 38806) c5(38807, 38808, 38809, 38810, 38811, 38812, 38813, 38814, 38815, 38816, 38817, 38818, 38819, 38820, 38821, 38822, 38823, 38824, 38825, 38826, 38827, 38828, 38829, 38830, 38831, 38832, 38833, 38834, 38835, 38836, 38837, 38838, 38839, 38840, 38841, 38842, 38843, 38844, 38845, 38846, 38847, 38848, 38849, 38850, 38851, 38852, 38853, 38854, 38855, 38856, 38857, 38858, 38859, 38860, 38861) c6( ) c7(nJ, T, aOu, Y, eZ, it, yy, yu, iD, dL, h, ci, qN, bu, hH, V, eL, vi); #c1(HLA-F) c2(NP_001091949) c3(HLA class I histocompatibility antigen, alpha chain F isoform 1 precursor) c4(38862, 38863, 38864, 38865, 38866, 38867, 38868, 38869, 38870, 38871, 38872, 38873, 38874, 38875, 38876) c5(38877, 38878, 38879, 38880, 38881, 38882, 38883, 38884, 38885, 38886, 38887, 38888, 38889, 38890, 38891, 38892, 38893, 38894, 38895, 38896, 38897, 38898, 38899, 38900, 38901, 38902, 38903, 38904, 38905, 38906, 38907, 38908, 38909, 38910, 38911, 38912, 38913, 38914, 38915, 38916, 38917, 38918, 38919, 38920, 38921, 38922, 38923, 38924, 38925, 38926, 38927, 38928, 38929, 38930, 38931, 38932, 38933, 38934, 38935, 38936, 38937, 38938, 38939, 38940, 38941, 38942, 38943, 38944, 38945, 38946, 38947, 38948, 38949, 38950, 38951, 38952, 38953, 38954, 38955, 38956, 38957, 38958, 38959, 38960, 38961, 38962, 38963, 38964, 38965, 38966, 38967, 38968, 38969, 38970, 38971, 38972, 38973, 38974, 38975, 38976, 38977, 38978, 38979, 38980, 38981, 38982, 38983, 38984, 38985, 38986, 38987, 38988, 38989, 38990, 38991, 38992, 38993, 38994, 38995) c6( ) c7(nJ, T, aOu, Y, eZ, it, yy, yu, iD, dL, h, ci, qN, bu, hH, V, eL, vi); #c1(HLA-F) c2(NP_061823) c3(HLA class I histocompatibility antigen, alpha chain F isoform 2 precursor) c4(200526, 200527, 200528, 200529, 200530) c5(200531, 200532, 200533, 200534, 200535, 200536, 200537, 200538, 200539, 200540, 200541, 200542, 200543, 200544, 200545, 200546, 200547, 200548, 200549, 200550, 200551, 200552, 200553, 200554, 200555, 200556, 200557, 200558, 200559, 200560, 200561, 200562, 200563, 200564, 200565, 200566, 200567, 200568, 200569, 200570, 200571, 200572, 200573, 200574, 200575, 200576, 200577, 200578, 200579, 200580, 200581, 200582, 200583, 200584, 200585, 200586, 200587, 200588, 200589, 200590, 200591, 200592, 200593, 200594, 200595, 200596, 200597, 200598, 200599, 200600, 200601, 200602, 200603, 200604, 200605, 200606) c6( ) c7(nJ, T, aOu, Y, eZ, it, yy, yu, iD, dL, h, ci, qN, bu, hH, V, eL, vi); #c1(HLA-F) c2(XP_005272866) c3(HLA class I histocompatibility antigen, alpha chain F isoform X1) c4(284204) c5( ) c6( ) c7(nJ, T, aOu, Y, eZ, it, yy, yu, iD, dL, h, ci, qN, bu, hH, V, eL, vi); #c1(HLA-F) c2(XP_011545547) c3(HLA class I histocompatibility antigen, alpha chain F isoform X2) c4(344253, 344254) c5(344255, 344256, 344257, 344258, 344259, 344260, 344261, 344262, 344263, 344264, 344265, 344266, 344267, 344268, 344269, 344270, 344271, 344272, 344273, 344274, 344275, 344276) c6( ) c7(nJ, T, aOu, Y, eZ, it, yy, yu, iD, dL, h, ci, qN, bu, hH, V, eL, vi); #c1(HLA-G) c2(NP_002118) c3(HLA class I histocompatibility antigen, alpha chain G precursor) c4(125489, 125490) c5(125491, 125492, 125493, 125494, 125495, 125496, 125497, 125498, 125499, 125500, 125501, 125502, 125503, 125504, 125505, 125506, 125507, 125508, 125509, 125510, 125511, 125512, 125513, 125514, 125515, 125516, 125517, 125518, 125519, 125520, 125521, 125522, 125523, 125524, 125525, 125526, 125527, 125528, 125529, 125530, 125531, 125532, 125533, 125534) c6( ) c7(bM, G, T, fR, if, hE, eh, bB, fd, cL, ci, dV, ja, K, hu, DY, hH, eL, aW, axu, g, as, cm, uC, iP, iA, dc, mx, cj, Zn, m, FW, ht, n, fr, qN, jw, Vs, kH, h, eV, dL, OV, A, sp, lb, fe, pm, Ca, Zj, Qy, dB, hk, mg, JM, eo, gg, B, cn, jv, fM, jx, eX, aA, AO, V, q, eA, aT, XZ, hM, Y, r, lo, en, bu, t, ck, BU, nM, sn, fD, bt, hS, vi, sY, id, qb, iW, Jy, jh, Hn, hF, hX, dP, av, py, od, dm, hD, lQ, bsn, nJ, yF, uQ, d, ff, cr, eZ, hp, iV, bz, bE, lf, X, y); #c1(HLA-G) c2(XP_011546539) c3(HLA class I histocompatibility antigen, alpha chain G isoform X5) c4(345342, 345343, 345344) c5(345345, 345346, 345347) c6( ) c7(bM, G, T, fR, if, hE, eh, bB, fd, cL, ci, dV, ja, K, hu, DY, hH, eL, aW, axu, g, as, cm, uC, iP, iA, dc, mx, cj, Zn, m, FW, ht, n, fr, qN, jw, Vs, kH, h, eV, dL, OV, A, sp, lb, fe, pm, Ca, Zj, Qy, dB, hk, mg, JM, eo, gg, B, cn, jv, fM, jx, eX, aA, AO, V, q, eA, aT, XZ, hM, Y, r, ln, en, bu, t, ck, BU, nM, sn, fD, bt, hS, vi, sY, id, qb, iW, Jy, jh, Hn, hF, hX, dP, av, py, od, dm, hD, lQ, bsn, nJ, yF, uQ, d, ff, cr, eZ, hp, iV, bz, bE, lf, X, y); #c1(HLA-G) c2(XP_011546732) c3(HLA class I histocompatibility antigen, alpha chain G isoform X6) c4(345496) c5(345497, 345498, 345499, 345500, 345501, 345502, 345503, 345504, 345505, 345506, 345507, 345508, 345509, 345510, 345511, 345512, 345513, 345514, 345515, 345516, 345517, 345518, 345519, 345520, 345521, 345522, 345523, 345524, 345525, 345526, 345527, 345528, 345529, 345530, 345531, 345532, 345533, 345534, 345535, 345536) c6( ) c7(bM, G, T, fR, if, hE, eh, bB, fd, cL, ci, dV, ja, K, hu, DY, hH, eL, aW, axu, g, as, cm, uC, iP, iA, dc, mx, cj, Zn, m, FW, ht, n, fr, qN, jw, Vs, kH, h, eV, dL, OV, A, sp, lb, fe, pm, Ca, Zj, Qy, dB, hk, mg, JM, eo, gg, B, cn, jv, fM, jx, eX, aA, AO, V, q, eA, aT, XZ, hM, Y, r, lo, en, bu, t, ck, BU, nM, sn, fD, bt, hS, vi, sY, id, qb, iW, Jy, jh, Hn, hF, hX, dP, av, py, od, dm, hD, lQ, bsn, nJ, yF, uQ, d, ff, cr, eZ, hp, iV, bz, bE, lf, X, y); #c1(HLA-G) c2(XP_011546733) c3(HLA class I histocompatibility antigen, alpha chain G isoform X7) c4(345537) c5(345538, 345539, 345540, 345541, 345542, 345543, 345544, 345545, 345546, 345547, 345548, 345549, 345550, 345551, 345552, 345553, 345554, 345555, 345556, 345557, 345558, 345559, 345560, 345561, 345562, 345563, 345564, 345565, 345566, 345567, 345568, 345569, 345570, 345571, 345572, 345573, 345574, 345575, 345576, 345577, 345578, 345579, 345580, 345581, 345582, 345583, 345584, 345585, 345586, 345587, 345588, 345589, 345590, 345591, 345592, 345593, 345594, 345595, 345596, 345597, 345598, 345599, 345600, 345601, 345602, 345603, 345604, 345605, 345606, 345607, 345608, 345609, 345610, 345611, 345612, 345613, 345614, 345615, 345616, 345617, 345618, 345619, 345620, 345621, 345622, 345623, 345624, 345625, 345626, 345627, 345628, 345629, 345630, 345631, 345632, 345633, 345634, 345635, 345636, 345637, 345638, 345639, 345640, 345641, 345642, 345643, 345644, 345645, 345646, 345647, 345648, 345649, 345650, 345651, 345652, 345653, 345654, 345655, 345656, 345657, 345658, 345659, 345660, 345661) c6( ) c7(bM, G, T, fR, if, hE, eh, bB, fd, cL, ci, dV, ja, K, hu, DY, hH, eL, aW, axu, g, as, cm, uC, iP, iA, dc, mx, cj, Zn, m, FW, ht, n, fr, qN, jw, Vs, kH, h, eV, dL, OV, A, sp, lb, fe, pm, Ca, Zj, Qy, dB, hk, mg, JM, eo, gg, B, cn, jv, fM, jx, eX, aA, AO, V, q, eA, aT, XZ, hM, Y, r, lo, en, bu, t, ck, BU, nM, sn, fD, bt, hS, vi, sY, id, qb, iW, Jy, jh, Hn, hF, hX, dP, av, py, od, dm, hD, lQ, bsn, nJ, yF, uQ, d, ff, cr, eZ, hp, iV, bz, bE, lf, X, y); #c1(HLCS) c2(XP_005261010) c3(biotin-protein ligase isoform X2) c4( ) c5(277099, 277100) c6( ) c7(BU, kh, PK, aW, oW, aT, zN, f, nJ, awp); #c1(HLCS) c2(XP_005261011) c3(biotin-protein ligase isoform X3) c4(277101, 277102, 277103) c5( ) c6( ) c7(BU, kh, PK, aW, oW, aT, zN, f, nJ, awp); #c1(HLCS) c2(XP_011527843) c3(biotin-protein ligase isoform X1) c4(322780) c5(322781, 322782, 322783, 322784, 322785, 322786, 322787, 322788) c6( ) c7(BU, kh, PK, aW, oW, aT, zN, f, nJ, awp); #c1(HLCS) c2(XP_011527844) c3(biotin-protein ligase isoform X5) c4( ) c5(322789, 322790, 322791, 322792, 322793, 322794, 322795, 322796, 322797, 322798, 322799, 322800, 322801, 322802, 322803, 322804, 322805, 322806) c6( ) c7(BU, kh, PK, aW, oW, aT, zN, f, nJ, awp); #c1(HLF) c2(NP_002117) c3(hepatic leukemia factor) c4(125474, 125475) c5(125476, 125477, 125478, 125479, 125480, 125481, 125482, 125483, 125484, 125485, 125486, 125487, 125488) c6( ) c7(ck, x, ou, T, iO, ac, aE, aq, k, iR, pk, vt, B, azh); #c1(HLF) c2(XP_011523007) c3(hepatic leukemia factor isoform X2) c4( ) c5(317492) c6( ) c7(ck, x, ou, T, iO, ac, aE, aq, k, iR, pk, vt, B, azh); #c1(HLTF) c2(NP_003062) c3(helicase-like transcription factor) c4(134850, 134851) c5(134852, 134853, 134854, 134855, 134856, 134857, 134858, 134859, 134860, 134861, 134862, 134863, 134864, 134865, 134866, 134867, 134868, 134869, 134870, 134871, 134872) c6( ) c7(bF, es, T, s, bE, if, ff, r, aA, bB, aE, ey, q, ci, en, qN, KV, X); #c1(HLTF) c2(XP_005247781) c3(helicase-like transcription factor isoform X3) c4(267982) c5(267983, 267984, 267985, 267986, 267987, 267988) c6( ) c7(bF, es, T, s, bE, if, ff, r, aA, bB, aE, ey, q, ci, en, qN, KV, X); #c1(HLX) c2(NP_068777) c3(H2.0-like homeobox protein) c4(210459) c5(210460, 210461, 210462, 210463, 210464, 210465, 210466, 210467, 210468) c6( ) c7(ck, bM, T, x, iT, iU, oe, wk, eZ, hD, k, pM, hF, bt); #c1(HMI3) c2(NP_110416) c3(minor histocompatibility antigen H13 isoform 1) c4(220156, 220157) c5(220158, 220159, 220160, 220161, 220162, 220163, 220164, 220165, 220166, 220167, 220168, 220169) c6( ) c7(bL, bM, T, dA, xR, bE, yx, dV, bB, h, nJ, af); #c1(HMI3) c2(NP_848695) c3(minor histocompatibility antigen H13 isoform 2) c4( ) c5(254177, 254178, 254179, 254180, 254181, 254182) c6( ) c7(bL, bM, T, dA, xR, bE, yx, dV, bB, h, nJ, af); #c1(HMI3) c2(NP_848696) c3(minor histocompatibility antigen H13 isoform 3) c4(254183, 254184) c5(254185, 254186, 254187, 254188, 254189, 254190) c6( ) c7(bL, bM, T, dA, xR, bE, yx, dV, bB, h, nJ, af); #c1(HMBOX1) c2(NP_001129198) c3(homeobox-containing protein 1) c4(51138) c5(51139, 51140, 51141, 51142, 51143, 51144, 51145, 51146, 51147, 51148) c6( ) c7(kS); #c1(HMBOX1) c2(XP_005273692) c3(homeobox-containing protein 1 isoform X2) c4(284803, 284804) c5(284805, 284806, 284807, 284808, 284809, 284810, 284811, 284812, 284813, 284814, 284815, 284816, 284817, 284818, 284819, 284820) c6( ) c7(kS); #c1(HMBOX1) c2(XP_006716459) c3(homeobox-containing protein 1 isoform X1) c4(290329) c5( ) c6( ) c7(kS); #c1(HMBOX1) c2(XP_011542943) c3(homeobox-containing protein 1 isoform X9) c4(341638) c5(341639, 341640, 341641, 341642, 341643, 341644) c6( ) c7(kS); #c1(HMBOX1) c2(XP_011542944) c3(homeobox-containing protein 1 isoform X10) c4( ) c5(341645, 341646, 341647, 341648, 341649, 341650) c6( ) c7(kS); #c1(HMBS) c2(NP_000181) c3(porphobilinogen deaminase isoform 1) c4(3907, 3908) c5(3909, 3910, 3911, 3912, 3913, 3914, 3915, 3916, 3917, 3918, 3919, 3920, 3921, 3922, 3923, 3924, 3925, 3926, 3927, 3928, 3929, 3930, 3931, 3932, 3933, 3934, 3935, 3936, 3937, 3938, 3939, 3940, 3941, 3942, 3943, 3944, 3945, 3946, 3947, 3948, 3949, 3950, 3951, 3952, 3953, 3954, 3955, 3956, 3957, 3958, 3959, 3960, 3961, 3962, 3963, 3964, 3965, 3966, 3967, 3968, 3969, 3970, 3971, 3972, 3973, 3974, 3975, 3976, 3977, 3978, 3979, 3980, 3981, 3982, 3983, 3984, 3985, 3986, 3987, 3988, 3989, 3990, 3991, 3992, 3993, 3994, 3995, 3996, 3997, 3998, 3999, 4000, 4001, 4002, 4003) c6( ) c7(wu, QW, al, jh, bJZ, ti, Bm, ah, fu, bX, cc, DK, WY, aT, vc, bl, K, wm, bq, bKa, bV, nJ, iz, s, iU, Ow, aW, yL, hC, hl, dq, aq, dr, OC, ck, gk, aBr, eM, U, bqa, QV, uL, B, AG); #c1(HMBS) c2(NP_001245137) c3(porphobilinogen deaminase isoform 3) c4(92567, 92568, 92569) c5(92570, 92571, 92572, 92573, 92574, 92575, 92576, 92577, 92578, 92579, 92580, 92581) c6( ) c7(wu, QW, al, jh, bJZ, ti, Bm, ah, fu, bX, cc, DK, WY, aT, vc, bl, K, wm, bq, bKa, bV, nJ, iz, s, iU, Ow, aW, yL, hC, hl, dq, aq, dr, OC, ck, gk, aBr, eM, U, bqa, QV, uL, B, AG); #c1(HMBS) c2(NP_001245138) c3(porphobilinogen deaminase isoform 4) c4( ) c5(92582, 92583, 92584, 92585, 92586, 92587, 92588, 92589, 92590, 92591, 92592, 92593, 92594, 92595, 92596, 92597) c6( ) c7(wu, QW, al, jh, bJZ, ti, Bm, ah, fu, bX, cc, DK, WY, aT, vc, bl, K, wm, bq, bKa, bV, nJ, iz, s, iU, Ow, aW, yL, hC, hl, dq, aq, dr, OC, ck, gk, aBr, eM, U, bqa, QV, uL, B, AG); #c1(HMBS) c2(XP_005271589) c3(porphobilinogen deaminase isoform X1) c4( ) c5(283487, 283488, 283489, 283490, 283491, 283492, 283493, 283494, 283495, 283496, 283497, 283498, 283499, 283500) c6( ) c7(wu, QW, al, jh, bJZ, ti, Bm, ah, fu, bX, cc, DK, WY, aT, vc, bl, K, wm, bq, bKa, bV, nJ, iz, s, iU, Ow, aW, yL, hC, hl, dq, aq, dr, OC, ck, gk, aBr, eM, U, bqa, QV, uL, B, AG); #c1(HMCN1) c2(NP_114141) c3(hemicentin-1 precursor) c4(222316) c5(222317, 222318, 222319, 222320, 222321, 222322) c6( ) c7(dD, ac, W, wL, ZC, EQ, eq); #c1(HMCN1) c2(XP_011508340) c3(hemicentin-1 isoform X2) c4(299023, 299024) c5(299025, 299026, 299027, 299028, 299029, 299030, 299031, 299032, 299033, 299034, 299035, 299036) c6( ) c7(dD, ac, W, wL, ZC, EQ, eq); #c1(HMCN1) c2(XP_011508341) c3(hemicentin-1 isoform X3) c4( ) c5(299037) c6( ) c7(dD, ac, W, wL, ZC, EQ, eq); #c1(HMG20A) c2(NP_001291433) c3(high mobility group protein 20A isoform a) c4(116016, 116017, 116018, 116019) c5(116020, 116021, 116022, 116023, 116024, 116025, 116026, 116027, 116028, 116029, 116030, 116031, 116032, 116033, 116034, 116035, 116036, 116037, 116038, 116039, 116040, 116041, 116042, 116043, 116044, 116045, 116046, 116047, 116048) c6( ) c7(bL, v); #c1(HMG20B) c2(NP_006330) c3(SWI/SNF-related matrix-associated actin-dependent regulator of chromatin subfamily E member 1-related) c4(164070, 164071, 164072) c5(164073, 164074, 164075, 164076, 164077, 164078, 164079, 164080, 164081, 164082, 164083, 164084, 164085, 164086, 164087, 164088, 164089, 164090, 164091, 164092, 164093) c6( ) c7(eA); #c1(HMGA1) c2(NP_665912) c3(high mobility group protein HMG-I/HMG-Y isoform b) c4(241977) c5(241978, 241979, 241980, 241981, 241982, 241983, 241984, 241985, 241986, 241987, 241988, 241989, 241990) c6( ) c7(bL, T, azf, auW, Dh, wu, if, jh, bB, n, aj, dG, fr, ci, qN, AO, iJ, q, J, ad, eA, dP, eJ, av, hd, hw, aE, hW, pX, aT, h, rO, bbu, dL, hP, K, wm, ae, eL, jf, qw, yo, d, je, s, aW, Yd, PX, ff, r, en, hf, g, t, ir, bz, cm, op, ck, Qy, iM, kP, eM, nB, bE, eD, vA, U, hj, hR, m, ei, B); #c1(HMGA1) c2(XP_011512867) c3(high mobility group protein HMG-I/HMG-Y isoform X1) c4(304131, 304132) c5(304133, 304134, 304135, 304136, 304137, 304138, 304139, 304140, 304141, 304142, 304143, 304144, 304145, 304146, 304147, 304148, 304149, 304150, 304151, 304152) c6( ) c7(bL, T, azf, auW, Dh, wu, if, jh, bB, n, aj, dG, fr, ci, qN, AO, iJ, q, J, ad, eA, dP, eJ, av, hd, hw, aE, hW, pX, aT, h, rO, bbu, dL, hP, K, wm, ae, eL, jf, qw, ye, d, je, s, aW, Yd, PX, ff, r, en, hf, g, t, ir, bz, cm, op, ck, Qy, iM, kP, eM, nB, bE, eD, vA, U, hj, hR, m, ei, B); #c1(HMGA2) c2(NP_001287847) c3(high mobility group protein HMGI-C isoform c) c4(113019, 113020, 113021) c5(113022, 113023, 113024, 113025, 113026, 113027) c6( ) c7(T, aC, aiH, e, bB, ci, aon, x, bv, aE, pX, bbu, K, eL, ye, aW, Qm, g, cm, hw, QA, qJ, eM, nB, bwr, vA, cj, m, k, pw, lT, iB, Or, qy, aKt, br, hw, aeX, h, dL, Dz, hB, ia, agF, pm, kk, op, aKA, hP, dB, eD, hj, hR, pg, B, bL, AS, bKc, aA, v, q, eA, qH, Zp, aHu, amg, mP, hb, aT, aHs, dz, rO, ae, GY, s, iU, Y, asy, LO, r, en, bu, t, iK, ck, QG, bKf, kP, au, dy, bKe, bKd, jh, bs, iJ, bKb, ad, afb, dP, av, hd, Db, io, hP, bwV, d, et, ff, aeV, aF, bz, bE, Fk, QC, fh); #c1(HMGA2) c2(NP_001287848) c3(high mobility group protein HMGI-C isoform d) c4(113028, 113029) c5(113030, 113031, 113032, 113033, 113034, 113035, 113036, 113037, 113038, 113039, 113040, 113041, 113042, 113043, 113044, 113045, 113046, 113047) c6( ) c7(T, aC, aiH, e, bB, ci, aon, x, bv, aE, pX, bbu, K, eL, ye, aW, Qm, g, cm, hw, QA, qJ, eM, nB, bwr, vA, cj, m, k, pw, lT, iB, Or, qy, aKt, hr, hw, aeX, h, dL, Dz, hB, ia, agF, pm, kk, op, aKA, hP, dB, eD, hj, hR, pg, B, bL, AS, bKc, aA, v, q, eA, qH, Zp, aHu, amg, mP, hb, aT, aHs, dz, rO, ae, GY, s, iU, Y, asy, LO, r, en, bu, t, iK, ck, QG, bKf, kP, au, dy, bKe, bKd, jh, bs, iJ, bKb, ad, afb, dP, av, hd, Db, io, hP, bwV, d, et, ff, aeV, aF, bz, bE, Fk, QC, fh); #c1(HMGA2) c2(NP_003474) c3(high mobility group protein HMGI-C isoform a) c4(138625) c5(138626, 138627, 138628, 138629, 138630, 138631, 138632, 138633, 138634, 138635, 138636, 138637) c6( ) c7(T, aC, aiH, e, bB, ci, aon, x, bv, aE, pX, bbu, K, eL, ye, aW, Qm, g, cm, hw, QA, qJ, eM, nB, bwr, vA, cj, m, k, pw, lT, iB, Or, qy, aKt, hr, hw, aeX, h, dL, Dz, hB, ia, agF, pm, kk, op, aKA, hP, dB, eD, hj, hR, pg, B, bL, AS, bKc, aA, v, q, eA, qH, Zp, aHu, amg, mP, hb, aT, aHs, dz, rO, ae, GY, s, iU, Y, asy, LO, r, en, bu, t, iK, ck, QG, bKf, kP, au, dy, bKe, bKd, jh, bs, iJ, bKb, ad, afb, dP, av, hd, Db, io, hP, bwV, d, et, ff, aeV, aF, bz, bE, Fk, QC, fh); #c1(HMGA2) c2(NP_003475) c3(high mobility group protein HMGI-C isoform b) c4(138638, 138639, 138640) c5(138641, 138642, 138643, 138644, 138645, 138646, 138647, 138648, 138649, 138650, 138651, 138652, 138653, 138654, 138655, 138656, 138657, 138658, 138659, 138660, 138661, 138662, 138663, 138664, 138665, 138666, 138667, 138668, 138669) c6( ) c7(T, aC, aiH, e, bB, ci, aon, x, bv, aE, PX, bbu, K, eL, ye, aW, Qm, g, cm, bw, QA, qJ, eM, nB, bwr, vA, cj, m, k, pw, lT, iB, Or, qy, aKt, hr, hw, aeX, h, dL, Dz, hB, ia, agF, pm, kk, op, aKA, bP, dB, eD, hj, hR, pg, B, bL, AS, bKc, aA, v, q, eA, qH, Zp, aHu, amg, mP, hb, aT, aHs, dz, rO, ae, GY, s, iU, Y, asy, LO, r, en, bu, t, iK, ck, QG, bKf, kP, au, dy, bKe, bKd, jh, bs, iJ, bKb, ad, afb, dP, av, hd, Db, io, hP, bwV, d, et, ff, aeV, aF, bz, bE, Fk, QC, fh); #c1(HMGB1) c2(XP_005266425) c3(high mobility group protein B1 isoform X2) c4(280001) c5(280002, 280003, 280004, 280005, 280006, 280007, 280008, 280009, 280010, 280011, 280012, 280013, 280014, 280015, 280016, 280017, 280018, 280019, 280020, 280021, 280022, 280023, 280024, 280025, 280026, 280027, 280028, 280029, 280030) c6(280031, 280032, 280033, 280034, 280035, 280036, 280037) c7(oO, bM, T, lD, aC, fR, ea, eh, bB, cL, ci, x, bv, gH, M, K, dF, hm, Jl, LG, aW, g, eF, iP, aAW, y, eM, tV, k, m, yA, aFf, de, dD, ajm, aiK, aw, RC, fN, n, aj, awr, cd, ai, b, Bj, kH, FN, h, wb, lb, fe, kp, jT, lx, ar, kT, dB, lf, bm, hj, fL, brs, it, B, fG, DV, aA, cR, cz, fF, j, C, il, V, q, J, o, eA, hb, si, aT, cy, ae, af, eu, bf, iZ, Y, r, t, vk, ck, ac, AH, dy, fD, aws, bt, LS, ao, hS, kh, id, iW, ha, jh, eq, jE, atK, Fc, mC, ad, BY, hX, av, ib, py, Ot, ds, fb, uX, d, eH, eZ, aF, iV, aGj, bz, eK, Bv, zr, bE, blS, wz, i, lC, X, hv); #c1(HMGB2) c2(NP_001124161) c3(high mobility group protein B2) c4(48325) c5(48326, 48327, 48328, 48329, 48330, 48331, 48332, 48333, 48334, 48335, 48336, 48337, 48338, 48339, 48340, 48341, 48342, 48343, 48344, 48345, 48346) c6( ) c7(ck, iu, T, gU, d, ND, nM, au, jh, r, vH, v, K, q, qN, B, o, lx); #c1(HMGB3) c2(NP_001288157) c3(high mobility group protein B3 isoform a) c4(113630) c5(113631, 113632, 113633, 113634, 113635, 113636, 113637, 113638, 113639, 113640, 113641, 113642, 113643, 113644, 113645, 113646, 113647, 113648, 113649, 113650, 113651, 113652, 113653, 113654, 113655, 113656) c6( ) c7(ck, aW, T, eM, aT); #c1(HMGB3) c2(NP_001288160) c3(high mobility group protein B3 isoform b) c4(113657, 113658, 113659) c5(113660, 113661, 113662, 113663, 113664, 113665) c6( ) c7(ck, aW, T, eM, aT); #c1(HMGCR) c2(NP_000850) c3(3-hydroxy-3-methylglutaryl-Coenzyme A reductase isoform 1) c4( ) c5(16565, 16566, 16567, 16568, 16569, 16570, 16571, 16572, 16573, 16574, 16575, 16576, 16577, 16578) c6( ) c7(bL, T, dD, eR, aZ, ea, e, aw, Xi, cz, bB, aj, v, j, eq, q, J, tg, ec, oj, aT, dV, lG, Oi, dL, K, bq, dQ, af, hm, bKg, kl, cH, PE, aW, eH, r, da, aq, eF, qa, eY, ac, bE, Fi, at, ei, lC, bFT, B, y); #c1(HMGCR) c2(NP_001124468) c3(3-hydroxy-3-methylglutaryl-Coenzyme A reductase isoform 2) c4(49090, 49091) c5(49092, 49093, 49094, 49095, 49096, 49097, 49098, 49099, 49100, 49101, 49102, 49103, 49104, 49105, 49106, 49107) c6( ) c7(bL, T, dD, eR, aZ, ea, e, aw, Xi, cz, bB, aj, v, j, eq, q, J, tg, ec, oj, aT, dV, lG, Oi, dL, K, bq, dQ, af, hm, bKg, kl, cH, PE, aW, eH, r, da, aq, eF, qa, eY, ac, bE, Fi, at, ei, lC, bFT, B, y); #c1(HMGCR) c2(XP_011541659) c3(3-hydroxy-3-methylglutaryl-Coenzyme A reductase isoform X2) c4(340199, 340200) c5(340201, 340202, 340203, 340204, 340205, 340206, 340207) c6( ) c7(bL, T, dD, eR, aZ, ea, e, aw, Xi, cz, bB, aj, v, j, eq, q, J, tg, ec, oj, aT, dV, lG, Oi, dL, K, bq, dQ, af, hm, bKg, kl, cH, PE, aW, eH, r, da, aq, eF, qa, eY, ac, bE, Fi, at, ei, lG, bFT, B, y); #c1(HMGCR) c2(XP_011541661) c3(3-hydroxy-3-methylglutaryl-Coenzyme A reductase isoform X3) c4(340208, 340209) c5(340210, 340211, 340212) c6( ) c7(bL, T, dD, eR, aZ, ea, e, aw, Xi, cz, bB, aj, v, j, eq, q, J, tg, ec, oj, aT, dV, lG, Oi, dL, K, bq, dQ, af, hm, bKg, kl, cH, PE, aW, eH, r, da, aq, eF, qa, eY, ac, bE, Fi, at, ei, lC, bFT, B, y); #c1(HMGCS1) c2(NP_002121) c3(hydroxymethylglutaryl-CoA synthase, cytoplasmic) c4(125535, 125536) c5(125537, 125538, 125539, 125540, 125541, 125542, 125543, 125544, 125545, 125546, 125547, 125548, 125549, 125550, 125551, 125552) c6( ) c7(af, iW, aq, v, bq, B); #c1(HMGCS1) c2(XP_011512337) c3(hydroxymethylglutaryl-CoA synthase, cytoplasmic isoform X2) c4(302990) c5(302991, 302992, 302993, 302994, 302995, 302996) c6( ) c7(af, iW, aq, v, bq, B); #c1(HMGN1) c2(NP_004956) c3(non-histone chromosomal protein HMG-14) c4(151445, 151446) c5(151447, 151448, 151449, 151450, 151451, 151452, 151453, 151454, 151455, 151456, 151457) c6( ) c7(lD, bN, hq, aW, acl, eZ, aT, jj, f, kS, Gc, lx, BY); #c1(HMGN1) c2(XP_011527851) c3(non-histone chromosomal protein HMG-14 isoform X1) c4(322807) c5(322808, 322809, 322810, 322811, 322812, 322813, 322814) c6( ) c7(lD, bN, hq, aW, acl, eZ, aT, jj, f, kS, Gc, lx, BY); #c1(HMGN4) c2(NP_006344) c3(high mobility group nucleosome-binding domain-containing protein 4) c4(164183) c5(164184, 164185, 164186, 164187, 164188, 164189, 164190, 164191, 164192, 164193) c6( ) c7(T, ey); #c1(HMGN5) c2(NP_110390) c3(high mobility group nucleosome-binding domain-containing protein 5) c4(219960, 219961, 219962, 219963, 219964) c5(219965, 219966, 219967, 219968, 219969, 219970, 219971, 219972, 219973, 219974, 219975, 219976, 219977, 219978, 219979, 219980, 219981, 219982, 219983, 219984, 219985, 219986, 219987, 219988) c6( ) c7(ae, T, py, AM, aW, eL, eH, aT, dL, eF, fs, eA, kG, ad); #c1(HMGN5) c2(XP_006724753) c3(high mobility group nucleosome-binding domain-containing protein 5 isoform X3) c4(296309, 296310) c5(296311, 296312, 296313, 296314, 296315, 296316, 296317, 296318, 296319, 296320, 296321, 296322) c6( ) c7(ae, T, py, AM, aW, eL, eH, aT, dL, eF, fs, eA, kG, ad); #c1(HMGXB3) c2(NP_055798) c3(HMG domain-containing protein 3) c4(183570) c5(183571, 183572, 183573, 183574, 183575, 183576) c6( ) c7(bv, an); #c1(HMGXB4) c2(NP_001003681) c3(HMG domain-containing protein 4) c4(19878, 19879) c5(19880, 19881, 19882, 19883, 19884, 19885) c6( ) c7(mU, mW, ml, mS, mY, bK, mV, mT, mX); #c1(HMGXB4) c2(XP_006724163) c3(HMG domain-containing protein 4 isoform X2) c4( ) c5(295824) c6( ) c7(mU, mW, mZ, mS, mY, bK, mV, mT, mX); #c1(HMGXB4) c2(XP_006724165) c3(HMG domain-containing protein 4 isoform X4) c4( ) c5(295825, 295826, 295827, 295828, 295829) c6( ) c7(mU, mW, mZ, mS, mY, bK, mV, mT, mX); #c1(HMHA1) c2(NP_001245257) c3(minor histocompatibility protein HA-1 isoform 2 precursor) c4(92902) c5(92903, 92904, 92905, 92906, 92907, 92908) c6( ) c7(y, T, fL, fN); #c1(HMHA1) c2(NP_001269264) c3(minor histocompatibility protein HA-1 isoform 4) c4(100994) c5(100995, 100996, 100997, 100998, 100999, 101000) c6( ) c7(y, T, fL, fN); #c1(HMHA1) c2(NP_036424) c3(minor histocompatibility protein HA-1 isoform 1 precursor) c4(173733, 173734) c5(173735, 173736, 173737, 173738, 173739, 173740, 173741, 173742, 173743, 173744, 173745, 173746, 173747, 173748, 173749, 173750, 173751, 173752) c6( ) c7(y, T, fL, fN); #c1(HMHA1) c2(XP_006722776) c3(minor histocompatibility protein HA-1 isoform X3) c4(294868) c5(294869, 294870, 294871, 294872, 294873, 294874) c6( ) c7(y, T, fL, fN); #c1(HMHA1) c2(XP_011526161) c3(minor histocompatibility protein HA-1 isoform X4) c4(320444, 320445) c5(320446, 320447, 320448, 320449, 320450, 320451) c6( ) c7(y, T, fL, fN); #c1(HMMR) c2(NP_001136028) c3(hyaluronan mediated motility receptor isoform a) c4(54069, 54070) c5(54071, 54072, 54073, 54074, 54075, 54076, 54077, 54078, 54079, 54080, 54081, 54082) c6( ) c7(T, fM, Uc, Js, jh, aA, bB, fd, ci, bX, q, ad, eA, eJ, x, aE, aT, dL, hP, ey, ae, eL, qw, kl, d, iU, aW, ff, r, aF, en, as, ck, bE, go, hL, cj, bt, Jo); #c1(HMMR) c2(NP_001136029) c3(hyaluronan mediated motility receptor isoform d) c4(54083) c5(54084, 54085, 54086, 54087, 54088, 54089) c6( ) c7(T, fM, Uc, Js, jh, aA, bB, fd, ci, bX, q, ad, eA, eJ, x, aE, aT, dL, hP, ey, ae, eL, qw, kl, d, iU, aW, ff, r, aF, en, as, ck, bE, go, hL, cj, bt, Jo); #c1(HMMR) c2(NP_036616) c3(hyaluronan mediated motility receptor isoform b) c4(174943) c5(174944, 174945, 174946, 174947, 174948, 174949) c6( ) c7(T, fM, Uc, Js, jh, aA, bB, fd, ci, bX, q, ad, eA, eJ, x, aE, aT, dL, hP, ey, ae, eL, qw, kl, d, iU, aW, ff, r, aF, en, as, ck, bE, go, hL, cj, bt, Jo); #c1(HMMR) c2(NP_036617) c3(hyaluronan mediated motility receptor isoform c) c4(174950, 174951) c5(174952, 174953, 174954, 174955, 174956, 174957, 174958, 174959, 174960, 174961, 174962, 174963) c6( ) c7(T, fM, Uc, Js, jh, aA, bB, fd, ci, bX, q, ad, eA, eJ, x, aE, aT, dL, hP, ey, ae, eL, qw, kl, d, iU, aW, ff, r, aF, en, as, ck, bE, go, hL, cj, bt, Jo); #c1(HMOX1) c2(NP_002124) c3(heme oxygenase 1) c4(125553, 125554) c5(125555, 125556, 125557, 125558, 125559, 125560, 125561, 125562, 125563, 125564, 125565, 125566, 125567) c6( ) c7(oO, bM, T, lD, aC, fR, fV, ea, e, al, fd, bB, cL, qj, ci, aY, sD, GK, x, dY, aE, Bc, fm, rw, Yy, M, dV, K, hu, dQ, hH, dF, eL, hm, aa, ly, aaC, LG, aW, qS, az, hl, Jl, hC, fc, VE, aB, g, eE, cm, uC, xK, eM, iA, dc, wB, U, tV, bjL, mk, k, m, pw, eg, fy, iu, dD, aw, ht, n, aj, fr, et, zP, aHj, eh, cd, eW, ke, Hx, jz, bKi, cc, bKk, h, lG, jy, dL, wb, ey, wo, eV, ZN, wC, A, ge, fQ, sm, aq, yq, fe, aMJ, jT, adz, lx, yR, ar, kT, JM, bm, at, E, uz, ER, gg, cB, B, it, L, hL, rf, DM, dA, eR, mr, DD, fG, uv, Lx, hx, jx, aA, cR, tc, cz, fF, j, uZ, C, AE, v, eX, V, q, J, o, eA, acj, MP, aT, cy, bq, an, ae, af, eu, jf, bf, s, iU, Y, r, lo, en, hf, t, iK, pb, ck, rR, iM, ac, bKh, c, wO, aUW, dh, AH, cS, dy, fD, bt, xb, bFR, LS, ao, bKj, nZ, qb, aD, uG, jh, lD, vr, KD, auq, bS, dG, eq, pz, hF, xt, ad, hX, fU, av, akN, F, l, ib, sO, ds, qh, Aa, lQ, ji, fb, vP, vl, mu, uX, d, je, cH, cW, ff, cr, eZ, dN, brp, aF, S, iV, Z, bz, qa, eK, LB, es, D, gk, qe, bE, X, sG, dX, aS, cP, ei, lC, gq, y, pC); #c1(HMOX2) c2(NP_001120676) c3(heme oxygenase 2 isoform b) c4( ) c5(44497, 44498, 44499, 44500, 44501, 44502, 44503, 44504, 44505, 44506, 44507, 44508, 44509, 44510, 44511, 44512, 44513, 44514, 44515, 44516) c6( ) c7(D, cZ, d, W, c, dD, sO, cz, fF, vs, eq, dd, af); #c1(HMOX2) c2(XP_011520775) c3(heme oxygenase 2 isoform X1) c4(315785) c5(315786, 315787, 315788, 315789, 315790, 315791) c6( ) c7(D, cZ, d, W, c, dD, sO, cz, fF, vs, eq, dd, af); #c1(HMP19) c2(NP_057064) c3(neuron-specific protein family member 2) c4(188710, 188711, 188712) c5(188713, 188714, 188715, 188716, 188717, 188718, 188719, 188720, 188721, 188722, 188723, 188724, 188725, 188726, 188727, 188728, 188729, 188730, 188731, 188732, 188733, 188734) c6( ) c7(aaw, j, anT); #c1(HMSD) c2(NP_001116838) c3(serpin-like protein HMSD) c4(43967) c5(43968, 43969, 43970, 43971, 43972, 43973, 43974, 43975, 43976, 43977, 43978, 43979) c6( ) c7(iB, bS, afb); #c1(HMXI) c2(NP_061815) c3(homeobox protein HMXI) c4(200461) c5(200462, 200463, 200464, 200465, 200466, 200467, 200468) c6( ) c7(kj, Az, bKl); #c1(HN1) c2(NP_001002032) c3(hematological and neurological expressed 1 protein isoform 2) c4(19412) c5(19413, 19414, 19415, 19416, 19417, 19418, 19419, 19420, 19421) c6( ) c7(F, e, h, g, ae, ad); #c1(HN1) c2(NP_001275538) c3(hematological and neurological expressed 1 protein isoform 3) c4(106815) c5(106816, 106817, 106818, 106819, 106820, 106821, 106822, 106823, 106824, 106825) c6( ) c7(F, e, h, g, ae, ad); #c1(HN1) c2(NP_001275540) c3(hematological and neurological expressed 1 protein isoform 4) c4( ) c5(106826) c6( ) c7(F, e, h, g, ae, ad); #c1(HN1) c2(NP_057269) c3(hematological and neurological expressed 1 protein isoform 1) c4(189776, 189777) c5(189778, 189779, 189780, 189781, 189782) c6( ) c7(F, e, h, g, ae, ad); #c1(HNIL) c2(NP_653171) c3(hematological and neurological expressed 1-like protein) c4(238907, 238908, 238909, 238910) c5(238911, 238912, 238913, 238914, 238915, 238916, 238917, 238918, 238919, 238920, 238921, 238922, 238923, 238924, 238925, 238926, 238927, 238928, 238929, 238930, 238931, 238932, 238933, 238934) c6( ) c7(e); #c1(HNF1A) c2(NP_000536) c3(hepatocyte nuclear factor 1-alpha) c4(12178, 12179, 12180, 12181, 12182, 12183, 12184, 12185) c5(12186, 12187, 12188, 12189, 12190, 12191, 12192, 12193, 12194, 12195, 12196, 12197, 12198, 12199, 12200, 12201, 12202, 12203, 12204, 12205, 12206, 12207, 12208, 12209, 12210, 12211, 12212, 12213, 12214, 12215, 12216, 12217, 12218, 12219, 12220, 12221, 12222, 12223, 12224, 12225, 12226, 12227, 12228, 12229, 12230, 12231, 12232, 12233, 12234, 12235, 12236, 12237, 12238, 12239, 12240, 12241, 12242, 12243, 12244, 12245, 12246, 12247, 12248, 12249, 12250, 12251, 12252, 12253, 12254, 12255, 12256, 12257, 12258, 12259, 12260, 12261, 12262, 12263, 12264, 12265, 12266, 12267, 12268, 12269, 12270) c6( ) c7(bL, gV, T, dD, bKq, bM, bqP, aC, eR, ea, Hm, e, bKo, yG, aw, aA, cz, bB, cQ, dG, j, ci, aj, v, eq, fr, GS, bKr, J, q, hX, mj, hd, mh, aE, Mm, py, lv, nX, bza, jy, wt, bKm, ex, on, rL, af, sj, A, d, bKp, s, cH, cW, fc, r, aq, aF, fd, iO, ac, nB, cO, bE, bKn, bo, X, KT, mg, hR, mf, aS, dy, ei, B, jr); #c1(HNF1A) c2(XP_005253988) c3(hepatocyte nuclear factor 1-alpha isoform X1) c4(272850) c5(272851, 272852, 272853, 272854, 272855, 272856) c6( ) c7(bL, gV, T, dD, bKq, bM, bqP, aC, eR, ea, Hm, e, bKo, yG, aw, aA, cz, bB, cQ, dG, j, ci, aj, v, eq, fr, GS, bKr, J, q, hX, mj, hd, mh, aE, Mm, py, lv, nX, bza, jy, wt, bKm, ex, on, rL, af, sj, A, d, bKp, s, cH, cW, fc, r, aq, aF, fd, iO, ac, nB, cO, bE, bKn, bo, X, KT, mg, hR, mf, aS, dy, ei, B, jr); #c1(HNF1B) c2(NP_000449) c3(hepatocyte nuclear factor 1-beta isoform 1) c4(9118, 9119, 9120) c5(9121, 9122, 9123, 9124, 9125, 9126, 9127, 9128, 9129, 9130, 9131, 9132) c6( ) c7(bL, nD, T, eR, bKu, byf, rQ, aMq, bKw, aj, aKt, v, aoM, ci, vm, fr, aY, lu, J, ad, fU, nH, mh, yQ, uT, wG, tL, alb, il, arV, rX, bKs, h, Nj, uD, rz, ae, A, s, aBq, bKt, aeq, alB, bKv, cl, t, cM, dr, aFj, bN, LB, bfP, amK, es, aKA, iA, nB, X, wB, hL, mf, dy, m, azg, B, VB); #c1(HNF1B) c2(NP_001159395) c3(hepatocyte nuclear factor 1-beta isoform 2) c4(63941) c5(63942, 63943, 63944, 63945, 63946, 63947) c6( ) c7(bL, nD, T, eR, bKu, byf, rQ, aMq, bKw, aj, aKt, v, aoM, ci, vm, fr, aY, lu, J, ad, fU, nH, mh, yQ, uT, wG, tL, alb, il, arV, rX, bKs, h, Nj, uD, rz, ae, A, s, aBq, bKt, aeq, alB, bKv, cl, t, cM, dr, aFj, bN, LB, bfP, amK, es, aKA, iA, nB, X, wB, hL, mf, dy, m, azg, B, VB); #c1(HNF1B) c2(NP_001291215) c3(hepatocyte nuclear factor 1-beta isoform 3) c4(115603) c5(115604, 115605, 115606, 115607, 115608, 115609) c6( ) c7(bL, nD, T, eR, bKu, byf, rQ, aMq, bKw, aj, aKt, v, aoM, ci, vm, fr, aY, lu, J, ad, fU, nH, mh, yQ, uT, wG, tL, alb, il, arV, rX, bKs, h, Nj, uD, rz, ae, A, s, aBq, bKt, aeq, alB, bKv, cl, t, cM, dr, aFj, bN, LB, bfP, amK, es, aKA, iA, nB, X, wB, hL, mf, dy, m, azg, B, VB); #c1(HNF1B) c2(XP_011523462) c3(hepatocyte nuclear factor 1-beta isoform X1) c4( ) c5(317998) c6( ) c7(bL, nD, T, eR, bKu, byf, rQ, aMq, bKw, aj, aKt, v, aoM, ci, vm, fr, aY, lu, J, ad, fU, nH, mh, yQ, uT, wG, tL, alb, il, arV, rX, bKs, h, Nj, uD, rz, ae, A, s, aBq, bKt, aeq, alB, bKv, cl, t, cM, dr, aFj, bN, LB, bfP, amK, es, aKA, iA, nB, X, wB, hL, mf, dy, m, azg, B, VB); #c1(HNF1B) c2(XP_011523463) c3(hepatocyte nuclear factor 1-beta isoform X2) c4( ) c5(317999, 318000, 318001, 318002, 318003) c6( ) c7(bL, nD, T, eR, bKu, byf, rQ, aMq, bKw, aj, aKt, v, aoM, ci, vm, fr, aY, lu, J, ad, fU, nH, mh, yQ, uT, wG, tL, alb, il, arV, rX, bKs, h, Nj, uD, rz, ae, A, s, aBq, bKt, aeq, alB, bKv, cl, t, cM, dr, aFj, bN, LB, bfP, amK, es, aKA, iA, nB, X, wB, hL, mf, dy, m, azg, B, VB); #c1(HNF4A) c2(NP_000448) c3(hepatocyte nuclear factor 4-alpha isoform HNF4alpha2) c4(9109) c5(9110, 9111, 9112, 9113, 9114, 9115, 9116, 9117) c6( ) c7(T, ea, al, fd, bB, ci, u, K, eL, bc, aW, nY, as, g, hJ, eF, cm, eM, iA, iT, m, dD, zX, Hm, yG, aj, bKx, fr, mh, h, jy, dL, A, fe, aq, aKv, mb, bKy, JR, bbT, iO, Fi, bo, mg, hL, it, B, hL, eR, aA, cz, v, acn, il, q, J, eA, mj, Tl, nX, bza, aah, yg, aT, bq, ae, af, jf, s, vT, Y, bAv, r, hf, cl, t, mf, dy, bt, gV, ha, bAg, vm, dG, oZ, jE, fu, eq, bpT, ad, hX, av, l, QJ, qh, awd, aSf, ji, bKm, hG, eH, dq, aF, iV, iR, dr, bF, es, gk, mi, bE, gZ, dX, ei); #c1(HNF4A) c2(NP_001025174) c3(hepatocyte nuclear factor 4-alpha isoform HNF4alpha7) c4(29398) c5(29399, 29400, 29401, 29402, 29403, 29404) c6( ) c7(T, ea, al, fd, bB, ci, u, K, eL, bc, aW, nY, as, g, hJ, eF, cm, eM, iA, iT, m, dD, zX, Hm, yG, aj, bKx, fr, mh, h, jy, dL, A, fe, aq, aKv, mb, bKy, JR, bbT, iO, Fi, bo, mg, hL, it, B, hL, eR, aA, cz, v, acn, il, q, J, eA, mj, Tl, nX, bza, aah, yg, aT, bq, ae, af, jf, s, vT, Y, bAv, r, hf, cl, t, mf, dy, bt, gV, ha, bAg, vm, dG, oZ, jE, fu, eq, bpT, ad, hX, av, l, QJ, qh, awd, aSf, ji, bKm, hG, eH, dq, aF, iV, iR, dr, bF, es, gk, mi, bE, gZ, dX, ei); #c1(HNF4A) c2(NP_001245284) c3(hepatocyte nuclear factor 4-alpha isoform HNF4alpha4) c4( ) c5(92990) c6( ) c7(T, ea, al, fd, bB, ci, u, K, eL, bc, aW, nY, as, g, hJ, eF, cm, eM, iA, iT, m, dD, zX, Hm, yG, aj, bKx, fr, mh, h, jy, dL, A, fe, aq, aKv, mb, bKy, JR, bbT, iO, Fi, bo, mg, hL, it, B, hL, eR, aA, cz, v, acn, il, q, J, eA, mj, Tl, nX, bza, aah, yg, aT, bq, ae, af, jf, s, vT, Y, bAv, r, hf, cl, t, mf, dy, bt, gV, ha, bAg, vm, dG, oZ, jE, fu, eq, bpT, ad, hX, av, l, QJ, qh, awd, aSf, ji, bKm, hG, eH, dq, aF, iV, iR, dr, bF, es, gk, mi, bE, gZ, dX, ei); #c1(HNF4A) c2(NP_787110) c3(hepatocyte nuclear factor 4-alpha isoform HNF4alpha8) c4(252103) c5(252104, 252105, 252106, 252107, 252108, 252109) c6( ) c7(T, ea, al, fd, bB, ci, u, K, eL, bc, aW, nY, as, g, hJ, eF, cm, eM, iA, iT, m, dD, zX, Hm, yG, aj, bKx, fr, mh, h, jy, dL, A, fe, aq, aKv, mb, bKy, JR, bbT, iO, Fi, bo, mg, hL, it, B, hL, eR, aA, cz, v, acn, il, q, J, eA, mj, Tl, nX, bza, aah, yg, aT, bq, ae, af, jf, s, vT, Y, bAv, r, hf, cl, t, mf, dy, bt, gV, ha, bAg, vm, dG, oZ, jE, fu, eq, bpT, ad, hX, av, l, QJ, qh, awd, aSf, ji, bKm, hG, eH, dq, aF, iV, iR, dr, bF, es, gk, mi, bE, gZ, dX, ei); #c1(HNF4A) c2(NP_849180) c3(hepatocyte nuclear factor 4-alpha isoform HNF4alpha1) c4(254434, 254435) c5(254436, 254437, 254438, 254439, 254440, 254441) c6( ) c7(T, ea, al, fd, bB, ci, u, K, eL, bc, aW, nY, as, g, hJ, eF, cm, eM, iA, iT, m, dD, zX, Hm, yG, aj, bKx, fr, mh, h, jy, dL, A, fe, aq, aKv, mb, bKy, JR, bbT, iO, Fi, bo, mg, hL, it, B, hL, eR, aA, cz, v, acn, il, q, J, eA, mj, Tl, nX, bza, aah, yg, aT, bq, ae, af, jf, s, vT, Y, bAv, r, hf, cl, t, mf, dy, bt, gV, ha, bAg, vm, dG, oZ, jE, fu, eq, bpT, ad, hX, av, l, QJ, qh, awd, aSf, ji, bKm, hG, eH, dq, aF, iV, iR, dr, bF, es, gk, mi, bE, gZ, dX, ei); #c1(HNF4A) c2(NP_849181) c3(hepatocyte nuclear factor 4-alpha isoform HNF4alpha3) c4(254442) c5(254443, 254444, 254445, 254446, 254447, 254448, 254449, 254450, 254451, 254452) c6( ) c7(T, ea, al, fd, bB, ci, u, K, eL, bc, aW, nY, as, g, hJ, eF, cm, eM, iA, iT, m, dD, zX, Hm, yG, aj, bKx, fr, mh, h, jy, dL, A, fe, aq, aKv, mb, bKy, JR, bbT, iO, Fi, bo, mg, hL, it, B, hL, eR, aA, cz, v, acn, il, q, J, eA, mj, Tl, nX, bza, aah, yg, aT, bq, ae, af, jf, s, vT, Y, bAv, r, hf, cl, t, mf, dy, bt, gV, ha, bAg, vm, dG, oZ, jE, fu, eq, bpT, ad, hX, av, l, QJ, qh, awd, aSf, ji, bKm, hG, eH, dq, aF, iV, iR, dr, bF, es, gk, mi, bE, gZ, dX, ei); #c1(HNF4A) c2(XP_005260464) c3(hepatocyte nuclear factor 4-alpha isoform X3) c4(276547) c5(276548, 276549, 276550, 276551, 276552, 276553, 276554) c6( ) c7(T, ea, al, fd, bB, ci, u, K, eL, bc, aW, nY, as, g, hJ, eF, cm, eM, iA, iT, m, dD, zX, Hm, yG, aj, bKx, fr, mh, h, jy, dL, A, fe, aq, aKv, mb, bKy, JR, bbT, iD, Fi, bo, mg, hL, it, B, bL, eR, aA, cz, v, acn, il, q, J, eA, mj, Tl, nX, bza, aah, yg, aT, bq, ae, af, jf, s, vT, Y, bAv, r, hf, cl, t, mf, dy, bt, gV, ha, bAg, vm, dG, oZ, jE, fu, eq, bpT, ad, hX, av, l, QJ, qh, awd, aSf, ji, bKm, hG, eH, dq, aF, iV, iR, dr, bF, es, gk, mi, bE, gZ, dX, ei); #c1(HNF4G) c2(NP_004124) c3(hepatocyte nuclear factor 4-gamma) c4(143766, 143767) c5(143768, 143769, 143770, 143771, 143772, 143773, 143774, 143775) c6( ) c7(aC, ac, EQ, aj, iV, fq, J); #c1(HNF4G) c2(XP_011515822) c3(hepatocyte nuclear factor 4-gamma isoform X1) c4( ) c5(308626, 308627, 308628, 308629, 308630) c6( ) c7(aC, ac, EQ, aj, iV, fq, J); #c1(HNMT) c2(NP_001019245) c3(histamine N-methyltransferase isoform 2) c4(27719) c5(27720, 27721, 27722, 27723, 27724, 27725) c6( ) c7(bL, bM, T, Dw, uu, V, Gt, aE, fS, qp, aT, Ds, an, tN, aW, sp, aCx, r, iV, eE, xw, wg, JM, Dv); #c1(HNMT) c2(NP_001019246) c3(histamine N-methyltransferase isoform 3) c4(27726) c5(27727, 27728, 27729, 27730, 27731, 27732) c6( ) c7(bL, bM, T, Dw, uu, V, Gt, aE, fS, qp, aT, Ds, an, tN, aW, sp, aCx, r, iV, eE, xw, wg, JM, Dv); #c1(HNMT) c2(NP_008826) c3(histamine N-methyltransferase isoform 1) c4(168851) c5(168852, 168853, 168854, 168855, 168856, 168857, 168858, 168859, 168860, 168861) c6( ) c7(bL, bM, T, Dw, uu, V, Gt, aE, fS, qp, aT, Ds, an, tN, aW, sp, aCx, r, iV, eE, xw, wg, JM, Dv); #c1(HNRNPAO) c2(NP_006796) c3(heterogeneous nuclear ribonucleoprotein AO) c4(168154) c5(168155, 168156, 168157, 168158, 168159, 168160) c6( ) c7(n, aF, aA); #c1(HNRNPA1) c2(NP_002127) c3(heterogeneous nuclear ribonucleoprotein A1 isoform a) c4(125568, 125569, 125570) c5(125571, 125572, 125573, 125574, 125575, 125576, 125577, 125578, 125579, 125580, 125581, 125582, 125583, 125584, 125585, 125586, 125587, 125588, 125589, 125590, 125591, 125592, 125593, 125594, 125595, 125596, 125597, 125598, 125599, 125600) c6( ) c7(T, fR, fd, bB, bKz, ci, zP, hF, Fc, q, ad, WY, bKA, kH, kf, oj, h, rB, K, af, zQ, d, iU, r, aq, aHU, aaE, app, iR, ck, es, bb, c, eM, bE, iA, U, Da, bi, B); #c1(HNRNPA1) c2(XP_005268883) c3(heterogeneous nuclear ribonucleoprotein A1 isoform X1) c4(282160, 282161) c5( ) c6( ) c7(T, fR, fd, bB, bKz, ci, zP, hF, Fc, q, ad, WY, bKA, kH, kf, oj, h, rB, K, af, zQ, d, iU, r, aq, aHU, aaE, app, iR, ck, es, bb, c, eM, bE, iA, U, Da, bi, B); #c1(HNRNPA2B1) c2(NP_002128) c3(heterogeneous nuclear ribonucleoproteins A2/B1 isoform A2) c4(125601, 125602) c5(125603, 125604, 125605, 125606, 125607, 125608, 125609, 125610, 125611, 125612, 125613, 125614) c6( ) c7(T, aA, pd, ad, av, aE, oj, aT, K, bq, af, d, bKB, Jl, aW, aq, kp, app, aF, iR, f, bz, c, eM, dB, hE, B, y); #c1(HNRNPA2B1) c2(XP_005249786) c3(heterogeneous nuclear ribonucleoproteins A2/B1 isoform X1) c4(269817) c5( ) c6( ) c7(T, aA, pd, ad, av, aE, oj, aT, K, bq, af, d, bKB, Jl, aW, aq, kp, app, aF, iR, f, bz, c, eM, dB, hE, B, y); #c1(HNRNPA2B1) c2(XP_006715777) c3(heterogeneous nuclear ribonucleoproteins A2/B1 isoform X2) c4( ) c5(289779, 289780, 289781, 289782, 289783, 289784, 289785, 289786, 289787, 289788) c6( ) c7(T, aA, pd, ad, av, aE, oj, aT, K, bq, af, d, bKB, Jl, aW, aq, kp, app, aF, iR, f, bz, c, eM, dB, hE, B, y); #c1(HNRNPA3) c2(XP_005246437) c3(heterogeneous nuclear ribonucleoprotein A3 isoform X1) c4(267132) c5( ) c6( ) c7(nv, bxy); #c1(HNRNPA3) c2(XP_005246438) c3(heterogeneous nuclear ribonucleoprotein A3 isoform X2) c4(267133, 267134) c5(267135, 267136, 267137, 267138, 267139, 267140, 267141, 267142, 267143, 267144, 267145, 267146) c6( ) c7(nv, bxy); #c1(HNRNPA3) c2(XP_006712428) c3(heterogeneous nuclear ribonucleoprotein A3 isoform X3) c4( ) c5(286649, 286650, 286651, 286652, 286653, 286654, 286655, 286656, 286657, 286658) c6( ) c7(nv, bxy); #c1(HNRNPAB) c2(NP_004490) c3(heterogeneous nuclear ribonucleoprotein A/B isoform b) c4(146869) c5(146870, 146871, 146872, 146873, 146874, 146875, 146876, 146877, 146878, 146879, 146880, 146881, 146882, 146883, 146884, 146885, 146886, 146887, 146888, 146889) c6( ) c7(zP, aGX, eM); #c1(HNRNPAB) c2(NP_112556) c3(heterogeneous nuclear ribonucleoprotein A/B isoform a) c4(221381) c5( ) c6( ) c7(zP, aGX, eM); #c1(HNRNPC) c2(XP_011535013) c3(heterogeneous nuclear ribonucleoproteins C1/C2 isoform X1) c4(331556, 331557, 331558, 331559, 331560, 331561, 331562) c5(331563, 331564, 331565, 331566, 331567, 331568, 331569, 331570, 331571, 331572, 331573, 331574, 331575, 331576, 331577, 331578, 331579, 331580, 331581, 331582, 331583, 331584, 331585, 331586, 331587, 331588, 331589, 331590, 331591, 331592, 331593, 331594, 331595, 331596, 331597, 331598, 331599, 331600, 331601, 331602, 331603, 331604, 331605, 331606, 331607, 331608, 331609, 331610, 331611, 331612, 331613, 331614) c6( ) c7(ae, T, y, iM, eW, eM, je, dR, eZ, h, aq, ci, K, aGX, iR, cm, bz, B, ad, Qe); #c1(HNRNPC) c2(XP_011535014) c3(heterogeneous nuclear ribonucleoproteins C1/C2 isoform X2) c4(331615, 331616, 331617, 331618, 331619, 331620) c5(331621, 331622, 331623, 331624, 331625, 331626, 331627, 331628, 331629, 331630, 331631, 331632, 331633, 331634, 331635, 331636, 331637, 331638, 331639, 331640, 331641, 331642, 331643, 331644, 331645, 331646, 331647, 331648, 331649, 331650, 331651, 331652, 331653, 331654, 331655, 331656, 331657, 331658, 331659, 331660, 331661, 331662, 331663, 331664, 331665, 331666, 331667, 331668, 331669, 331670, 331671, 331672, 331673, 331674, 331675, 331676, 331677, 331678, 331679, 331680, 331681, 331682, 331683, 331684, 331685, 331686, 331687, 331688, 331689, 331690, 331691, 331692, 331693, 331694, 331695, 331696) c6( ) c7(ae, T, y, iM, eW, eM, je, dR, eZ, h, aq, ci, K, aGX, iR, cm, bz, B, ad, Qe); #c1(HNRNPD) c2(NP_001003810) c3(heterogeneous nuclear ribonucleoprotein DO isoform d) c4(20169) c5(20170, 20171, 20172, 20173, 20174, 20175, 20176, 20177, 20178, 20179, 20180, 20181, 20182, 20183, 20184, 20185, 20186, 20187) c6( ) c7(iu, T, hd, eR, eM, Y, ff, jx, Pg, eZ, en, B); #c1(HNRNPD) c2(NP_002129) c3(heterogeneous nuclear ribonucleoprotein DO isoform c) c4(125615, 125616) c5(125617, 125618, 125619, 125620, 125621, 125622, 125623, 125624, 125625, 125626, 125627, 125628) c6( ) c7(iu, T, hd, eR, eM, Y, ff, jx, Pg, eZ, en, B); #c1(HNRNPD) c2(NP_112737) c3(heterogeneous nuclear ribonucleoprotein DO isoform b) c4(221569, 221570, 221571) c5(221572, 221573, 221574, 221575, 221576, 221577, 221578, 221579, 221580, 221581, 221582, 221583, 221584, 221585, 221586, 221587, 221588, 221589) c6( ) c7(iu, T, hd, eR, eM, Y, ff, jx, Pg, eZ, en, B); #c1(HNRNPD) c2(NP_112738) c3(heterogeneous nuclear ribonucleoprotein DO isoform a) c4(221590, 221591, 221592) c5(221593, 221594, 221595, 221596, 221597, 221598) c6( ) c7(iu, T, hd, eR, eM, Y, ff, jx, Pg, eZ, en, B); #c1(HNRNPDL) c2(NP_001193929) c3(heterogeneous nuclear ribonucleoprotein D-like isoform b) c4(83229) c5(83230, 83231, 83232, 83233, 83234, 83235) c6( ) c7(ae, T, y, iM, eW, eM, je, dR, km, aT, h, aq, eZ, ci, aGX, iR, cm, bz, B, ad, Qe); #c1(HNRNPDL) c2(NP_112740) c3(heterogeneous nuclear ribonucleoprotein D-like isoform a) c4(221607, 221608) c5(221609, 221610, 221611, 221612, 221613, 221614, 221615, 221616, 221617, 221618) c6( ) c7(ae, T, y, iM, eW, eM, je, dR, km, aT, h, aq, eZ, ci, aGX, iR, cm, bz, B, ad, Qe); #c1(HNRNPF) c2(NP_001091676) c3(heterogeneous nuclear ribonucleoprotein F) c4(38644, 38645) c5(38646, 38647, 38648, 38649, 38650, 38651, 38652, 38653, 38654, 38655, 38656, 38657, 38658, 38659, 38660, 38661, 38662, 38663, 38664, 38665, 38666, 38667, 38668, 38669, 38670, 38671, 38672, 38673) c6( ) c7(bB, bE, B, bxy); #c1(HNRNPH1) c2(NP_005511) c3(heterogeneous nuclear ribonucleoprotein H) c4(156964, 156965) c5(156966, 156967, 156968, 156969, 156970, 156971, 156972, 156973, 156974, 156975, 156976, 156977, 156978, 156979) c6( ) c7(xA, T, bb, aWm, c, ad, dR); #c1(HNRNPH1) c2(XP_006714926) c3(heterogeneous nuclear ribonucleoprotein H isoform X4) c4(288309) c5(288310, 288311, 288312, 288313, 288314, 288315, 288316, 288317, 288318, 288319, 288320, 288321, 288322, 288323, 288324, 288325, 288326, 288327, 288328, 288329, 288330, 288331, 288332, 288333, 288334, 288335, 288336, 288337, 288338, 288339, 288340, 288341, 288342, 288343, 288344, 288345, 288346, 288347, 288348, 288349, 288350, 288351, 288352, 288353, 288354, 288355, 288356, 288357, 288358, 288359, 288360, 288361, 288362, 288363) c6( ) c7(xA, T, bb, aWm, c, ad, dR); #c1(HNRNPH1) c2(XP_011532848) c3(heterogeneous nuclear ribonucleoprotein H isoform X1) c4(328961, 328962, 328963, 328964, 328965) c5( ) c6( ) c7(xA, T, bb, aWm, c, ad, dR); #c1(HNRNPH1) c2(XP_011532849) c3(heterogeneous nuclear ribonucleoprotein H isoform X2) c4(328966, 328967) c5( ) c6( ) c7(xA, T, bb, aWm, c, ad, dR); #c1(HNRNPH2) c2(NP_001027565) c3(heterogeneous nuclear ribonucleoprotein H2) c4(30277, 30278) c5(30279, 30280, 30281, 30282, 30283, 30284, 30285, 30286, 30287, 30288, 30289, 30290, 30291, 30292, 30293) c6( ) c7(aWm, xA, T, bb, c, dR); #c1(HNRNPK) c2(NP_112553) c3(heterogeneous nuclear ribonucleoprotein K isoform a) c4(221352, 221353) c5(221354, 221355, 221356, 221357, 221358, 221359, 221360, 221361, 221362, 221363, 221364, 221365, 221366, 221367, 221368, 221369, 221370, 221371, 221372, 221373) c6( ) c7(T, B, aE, aW, Y, ff, aT, fd, n, ci, en, bt, ae, q, ad); #c1(HNRNPL) c2(NP_001524) c3(heterogeneous nuclear ribonucleoprotein L isoform a) c4(118601, 118602) c5(118603, 118604, 118605, 118606, 118607, 118608) c6( ) c7(aA, aT); #c1(HNRNPL) c2(XP_011525188) c3(heterogeneous nuclear ribonucleoprotein L isoform X2) c4( ) c5(319643, 319644) c6( ) c7(aA, aT); #c1(HNRNPL) c2(XP_011525191) c3(heterogeneous nuclear ribonucleoprotein L isoform X1) c4( ) c5(319645, 319646, 319647, 319648, 319649, 319650, 319651, 319652, 319653) c6( ) c7(aA, aT); #c1(HNRNPL) c2(XP_011525192) c3(heterogeneous nuclear ribonucleoprotein L isoform X5) c4(319654, 319655) c5(319656, 319657, 319658, 319659, 319660, 319661, 319662, 319663, 319664, 319665, 319666, 319667) c6( ) c7(aA, aT); #c1(HNRNPM) c2(NP_005959) c3(heterogeneous nuclear ribonucleoprotein M isoform a) c4(160743, 160744) c5(160745, 160746, 160747, 160748, 160749, 160750, 160751, 160752, 160753, 160754, 160755) c6( ) c7(T); #c1(HNRNPM) c2(NP_112480) c3(heterogeneous nuclear ribonucleoprotein M isoform b) c4(221128) c5(221129, 221130, 221131, 221132, 221133, 221134, 221135) c6( ) c7(T); #c1(HNRNPM) c2(XP_005272535) c3(heterogeneous nuclear ribonucleoprotein M isoform X1) c4(284053) c5(284054, 284055, 284056, 284057, 284058, 284059) c6( ) c7(T); #c1(HNRNPM) c2(XP_005272540) c3(heterogeneous nuclear ribonucleoprotein M isoform X5) c4( ) c5(284060, 284061, 284062, 284063, 284064) c6( ) c7(T); #c1(HNRNPR) c2(NP_001284549) c3(heterogeneous nuclear ribonucleoprotein R isoform 5) c4(112049) c5(112050, 112051, 112052, 112053, 112054, 112055) c6( ) c7(kf, aT); #c1(HNRNPR) c2(NP_001284550) c3(heterogeneous nuclear ribonucleoprotein R isoform 7) c4( ) c5(112056, 112057, 112058, 112059, 112060) c6( ) c7(kf, aT); #c1(HNRNPR) c2(XP_011538773) c3(heterogeneous nuclear ribonucleoprotein R isoform X1) c4(336509) c5(336510, 336511, 336512, 336513, 336514, 336515) c6( ) c7(kf, aT); #c1(HNRNPR) c2(XP_011538775) c3(heterogeneous nuclear ribonucleoprotein R isoform X4) c4(336516) c5(336517) c6( ) c7(kf, aT); #c1(HNRNPU) c2(NP_004492) c3(heterogeneous nuclear ribonucleoprotein U isoform b) c4(146890) c5(146891, 146892, 146893, 146894, 146895, 146896, 146897, 146898, 146899, 146900, 146901, 146902) c6( ) c7(T, aE, qt, aW, r, aT, iY, ci, eA, an, zy, AO, B); #c1(HNRNPU) c2(NP_114032) c3(heterogeneous nuclear ribonucleoprotein U isoform a) c4(222070, 222071, 222072) c5(222073, 222074, 222075, 222076, 222077, 222078, 222079, 222080, 222081, 222082, 222083, 222084) c6( ) c7(T, aE, qt, aW, r, aT, iY, ci, eA, an, zy, AO, B); #c1(HNRNPOLI) c2(NP_008971) c3(heterogeneous nuclear ribonucleoprotein U-like protein 1 isoform a) c4(169978, 169979) c5( ) c6( ) c7(aw, ei, j, ec); #c1(HNRNPUL1) c2(XP_005258516) c3(heterogeneous nuclear ribonucleoprotein U-like protein 1 isoform X2) c4(275682) c5(275683) c6( ) c7(aw, ei, j, ec); #c1(HNRNPUL1) c2(XP_005258518) c3(heterogeneous nuclear ribonucleoprotein U-like protein 1 isoform X4) c4(275684) c5( ) c6( ) c7(aw, ei, j, ec); #c1(HNRNPUL1) c2(XP_005258523) c3(heterogeneous nuclear ribonucleoprotein U-like protein 1 isoform X1) c4( ) c5(275685, 275686, 275687, 275688, 275689, 275690) c6( ) c7(aw, ei, j, ec); #c1(HNRNPUL1) c2(XP_011524694) c3(heterogeneous nuclear ribonucleoprotein U-like protein 1 isoform X3) c4( ) c5(319179, 319180, 319181, 319182, 319183, 319184, 319185, 319186, 319187, 319188, 319189, 319190, 319191) c6( ) c7(aw, ei, j, ec); #c1(HOGA1) c2(NP_001128142) c3(4-hydroxy-2-oxoglutarate aldolase, mitochondrial isoform 2) c4(49628) c5(49629, 49630, 49631, 49632, 49633, 49634) c6( ) c7(MB, bpN); #c1(HOGA1) c2(NP_612422) c3(4-hydroxy-2-oxoglutarate aldolase, mitochondrial isoform 1) c4(236428) c5(236429, 236430, 236431, 236432, 236433, 236434) c6( ) c7(MB, bpN); #c1(HOMER1) c2(NP_001264006) c3(homer protein homolog 1 isoform 2) c4(97426) c5(97427, 97428, 97429, 97430, 97431, 97432) c6( ) c7(bN, T, bO, Gx, cu, bS, ct, nA, an, Z, FT, Jc); #c1(HOMER1) c2(NP_001264007) c3(homer protein homolog 1 isoform 3) c4( ) c5(97433, 97434, 97435, 97436, 97437, 97438) c6( ) c7(bN, T, bO, Gx, cu, bS, ct, nA, an, Z, FT, Jc); #c1(HOMER1) c2(NP_004263) c3(homer protein homolog 1 isoform 1) c4(144697, 144698, 144699) c5(144700, 144701, 144702, 144703, 144704, 144705, 144706, 144707, 144708, 144709, 144710, 144711) c6( ) c7(bN, T, bO, Gx, cu, bS, ct, nA, an, Z, FT, Jc); #c1(HOMER2) c2(NP_004830) c3(homer protein homolog 2 isoform 1) c4(150118, 150119) c5(150120, 150121, 150122, 150123, 150124, 150125, 150126, 150127, 150128, 150129, 150130, 150131) c6( ) c7(ae, T, VV, hV, yk, CT, cu, ci, cm, aed, xg, ad); #c1(HOMER2) c2(NP_955362) c3(homer protein homolog 2 isoform 2) c4(261556, 261557) c5(261558, 261559, 261560, 261561, 261562, 261563, 261564, 261565, 261566, 261567, 261568, 261569) c6( ) c7(ae, T, VV, hV, yk, CT, cu, ci, cm, aed, xg, ad); #c1(HOMER3) c2(NP_001139193) c3(homer protein homolog 3 isoform 2) c4(58920) c5(58921, 58922, 58923, 58924, 58925, 58926, 58927, 58928, 58929, 58930, 58931, 58932, 58933, 58934, 58935, 58936) c6( ) c7(qK); #c1(HOMER3) c2(NP_001139196) c3(homer protein homolog 3 isoform 3) c4(58937) c5(58938, 58939, 58940, 58941, 58942, 58943, 58944, 58945, 58946, 58947) c6( ) c7(qK); #c1(HOMER3) c2(XP_006723007) c3(homer protein homolog 3 isoform X1) c4(294964, 294965) c5(294966, 294967, 294968, 294969, 294970, 294971, 294972, 294973, 294974, 294975, 294976, 294977, 294978, 294979) c6( ) c7(qK); #c1(HOMEZ) c2(NP_065885) c3(homeobox and leucine zipper protein Homez) c4(206065, 206066) c5(206067, 206068, 206069, 206070, 206071, 206072, 206073, 206074, 206075, 206076, 206077, 206078) c6( ) c7(j); #c1(HOOK2) c2(NP_001093646) c3(protein Hook homolog 2 isoform 2) c4(40413) c5(40414, 40415, 40416, 40417, 40418, 40419) c6( ) c7(HQ, T, dH, aW, ht, aT, it, aj, m, hu, t, ae, J, ad); #c1(HOOK2) c2(NP_037444) c3(protein Hook homolog 2 isoform 1) c4(175544) c5(175545, 175546, 175547, 175548, 175549, 175550) c6( ) c7(HQ, T, dH, aW, ht, aT, it, aj, m, hu, t, ae, J, ad); #c1(HOOK3) c2(NP_115786) c3(protein Hook homolog 3) c4(223896) c5(223897, 223898, 223899, 223900, 223901, 223902) c6( ) c7(kl); #c1(HOPX) c2(NP_001138931) c3(homeodomain-only protein isoform b) c4(58282) c5(58283, 58284, 58285, 58286, 58287, 58288, 58289, 58290, 58291, 58292, 58293, 58294, 58295, 58296, 58297, 58298, 58299, 58300, 58301, 58302, 58303, 58304, 58305, 58306, 58307, 58308, 58309, 58310, 58311, 58312, 58313, 58314, 58315, 58316, 58317, 58318, 58319) c6( ) c7(T, qb, e, aBx, aA, cz, aj, ci, kO, eA, cd, J, ft, hd, IQ, nJ, d, ff, gm, aF, en, iK, bz, nM, it, iu); #c1(HOPX) c2(NP_001138932) c3(homeodomain-only protein isoform c) c4(58320, 58321) c5(58322, 58323, 58324, 58325, 58326, 58327, 58328, 58329, 58330, 58331, 58332, 58333, 58334, 58335, 58336, 58337, 58338, 58339, 58340, 58341) c6( ) c7(T, qb, e, aBx, aA, cz, aj, ci, kD, eA, cd, J, ft, hd, IQ, nJ, d, ff, gm, aF, en, iK, bz, nM, it, iu); #c1(HOPX) c2(NP_115884) c3(homeodomain-only protein isoform a) c4(224479, 224480) c5(224481, 224482, 224483, 224484, 224485, 224486, 224487, 224488, 224489, 224490, 224491, 224492, 224493, 224494, 224495, 224496, 224497, 224498, 224499, 224500, 224501, 224502) c6( ) c7(T, qb, e, aBx, aA, cz, aj, ci, kO, eA, cd, J, ft, hd, IQ, nJ, d, ff, gm, aF, en, iK, bz, nM, it, iu); #c1(HORMAD2) c2(NP_689723) c3(HORMA domain-containing protein 2) c4(243668) c5(243669, 243670, 243671, 243672, 243673, 243674, 243675, 243676, 243677, 243678) c6( ) c7(fe, bz, ey); #c1(HOXA1) c2(NP_005513) c3(homeobox protein Hox-A1 isoform a) c4(156990) c5(156991, 156992, 156993, 156994, 156995, 156996, 156997) c6( ) c7(T, Dh, if, Hn, ci, nA, qN, akW, Mg, iu, anB, ft, aMV, ib, arH, aT, dL, jj, rz, eL, aW, Y, ff, Az, en, g, bz, bN, ck, bKD, bKC, mG, gX, at, bD, xg, B); #c1(HOXA1) c2(NP_705873) c3(homeobox protein Hox-A1 isoform b) c4(246376) c5(246377, 246378, 246379, 246380, 246381, 246382) c6( ) c7(T, Dh, if, Hn, ci, nA, qN, akW, Mg, iu, anB, ft, aMV, ib, arH, aT, dL, jj, rz, eL, aW, Y, ff, Az, en, g, bz, bN, ck, bKD, bKC, mG, gX, at, bD, xg, B); #c1(HOXA10) c2(NP_061824) c3(homeobox protein Hox-A10) c4(200607, 200608, 200609) c5(200610, 200611, 200612, 200613, 200614, 200615, 200616, 200617, 200618, 200619, 200620, 200621, 200622, 200623, 200624, 200625, 200626, 200627, 200628, 200629) c6( ) c7(T, aZ, aA, ci, akW, eA, Vs, ip, bKE, dP, XW, x, aHu, ib, aT, bbu, dz, Ur, yi, d, kl, iU, et, aW, ff, aF, eF, mo, PU, t, Px, cl, g, op, ck, bfP, bF, iT, AM, vA, hL, at, anD, np, m, aAl, zl, bt); #c1(HOXA11) c2(NP_005514) c3(homeobox protein Hex-A11) c4(156998) c5(156999, 157000, 157001, 157002, 157003, 157004, 157005, 157006, 157007) c6( ) c7(T, hF, akW, Vs, bKE, dP, XW, x, aHu, Ie, Nn, bbu, pq, Ur, d, iU, Y, ff, aoW, en, g, t, bw, bz, atb, ck, eM, bKE, AM, bKG, iT, hL, at, dy, k, m, bt); #c1(HOXA13) c2(XP_011513646) c3(homeobox protein Hox-A13 isoform X1) c4(305945) c5(305946, 305947, 305948, 305949, 305950, 305951, 305952, 305953) c6( ) c7(bfP, T, bKH, rV, iU, are, cj, at, aq, it, Pp, aHC, ahl, bKl, iR, bw, bt, akW, B, Ur); #c1(HOXA2) c2(NP_006726) c3(homeobox protein Hox-A2) c4(167464) c5(167465, 167466, 167467, 167468, 167469, 167470, 167471, 167472) c6(167473) c7(XW, ff, aA, en, bKJ); #c1(HOXA3) c2(XP_005249788) c3(homeobox protein Hox-A3 isoform X1) c4(269818, 269819, 269820, 269821) c5(269822, 269823, 269824, 269825, 269826, 269827, 269828, 269829, 269830, 269831, 269832, 269833, 269834, 269835, 269836, 269837, 269838, 269839, 269840, 269841, 269842, 269843, 269844, 269845, 269846, 269847, 269848, 269849, 269850, 269851, 269852, 269853, 269854) c6( ) c7(bvL, RX, Az, at, bD, akW, eA, ip); #c1(HOXA4) c2(NP_002132) c3(homeobox protein Hox-A4) c4(125643) c5(125644, 125645, 125646, 125647, 125648, 125649, 125650, 125651, 125652, 125653, 125654) c6( ) c7(ck, T, iU, cj, at, Pp, ci, m, g, t, bt, akW); #c1(HOXA5) c2(NP_061975) c3(homeobox protein Hox-A5) c4(201423) c5(201424, 201425, 201426, 201427, 201428, 201429, 201430) c6( ) c7(ck, XW, T, akW, jf, eM, iU, aW, vA, wk, iK, ff, aT, at, ci, en, t, bt, bz, op); #c1(HOXA6) c2(NP_076919) c3(homeobox protein Hox-A6) c4(214237) c5(214238, 214239, 214240, 214241, 214242, 214243) c6( ) c7(at, Bj, T, akW); #c1(HOXA7) c2(NP_008827) c3(homeobox protein Hox-A7) c4(168862, 168863) c5(168864, 168865, 168866, 168867, 168868, 168869, 168870, 168871, 168872, 168873, 168874, 168875) c6( ) c7(ck, ib, iT, wu, aW, BJ, ff, aT, at, rO, ci, m, en, g, t, bt, akW, wm, ip); #c1(HOXA9) c2(NP_689952) c3(homeobox protein Hox-A9) c4(244485, 244486, 244487) c5(244488, 244489, 244490, 244491, 244492, 244493, 244494, 244495, 244496, 244497, 244498, 244499, 244500, 244501, 244502, 244503, 244504, 244505) c6( ) c7(T, gp, oA, n, oH, ci, hF, akW, eA, hr, ad, hX, ip, XW, x, jz, ib, pp, aT, h, cy, dz, K, jj, ae, d, iU, et, aW, Y, ff, en, g, t, bw, bz, pb, ck, eM, iT, dB, cj, at, m, k, bt, kS, B); #c1(HOXB1) c2(NP_002135) c3(homeobox protein Hox-BI) c4(125655) c5(125656, 125657, 125658, 125659, 125660, 125661) c6( ) c7(bKM, anB, Ew, aE, iA, pr, bKK, aW, eD, Az, aT, bKL, fr, rz, bt, bN); #c1(HOXB13) c2(NP_006352) c3(homeobox protein Hex-B13) c4(164270) c5(164271, 164272, 164273, 164274, 164275, 164276) c6( ) c7(iC, T, bKN, Ub, bE, aW, Y, bFc, hL, aT, r, n, bB, fr, IQ, m, t, ae, q, ad); #c1(HOXB2) c2(NP_002136) c3(homeobox protein Hox-B2) c4(125662, 125663) c5(125664, 125665, 125666, 125667, 125668, 125669, 125670, 125671, 125672, 125673, 125674, 125675) c6( ) c7(Ew, aE, iA, pr, aW, eD, aT, dL, fr, jj, g, LV, t, bt, eL); #c1(HOXB3) c2(XP_005257339) c3(homeobox protein Hox-B3 isoform X7) c4( ) c5(275045, 275046, 275047, 275048, 275049, 275050, 275051, 275052) c6( ) c7(ck, iu, Ew, aE, iA, pr, eD, wk, r, fr, bt, q); #c1(HOXB3) c2(XP_011523009) c3(homeobox protein Hox-B3 isoform X2) c4(317493, 317494) c5(317495, 317496) c6( ) c7(ck, iu, Ew, aE, iA, pr, eD, wk, r, fr, bt, q); #c1(HOXB3) c2(XP_011523010) c3(homeobox protein Hox-B3 isoform X3) c4( ) c5(317497, 317498) c6( ) c7(ck, iu, Ew, aE, iA, pr, eD, wk, r, fr, bt, q); #c1(HOXB3) c2(XP_011523022) c3(homeobox protein Hox-B3 isoform X1) c4(317499) c5(317500, 317501, 317502, 317503, 317504, 317505, 317506, 317507, 317508, 317509, 317510, 317511317512, 317513, 317514, 317515, 317516, 317517) c6( ) c7(ck, iu, Ew, aE, iA, pr, eD, wk, r, fr, bt, q); #c1(HOXB3) c2(XP_011523027) c3(homeobox protein Hox-B3 isoform X8) c4( ) c5(317518, 317519) c6( ) c7(ck, iu, Ew, aE, iA, pr, eD, wk, r, fr, bt, q); #c1(HOXB3) c2(XP_011523028) c3(homeobox protein Hox-B3 isoform XG) c4( ) c5(317520, 317521, 317522, 317523, 317524, 317525, 317526, 317527) c6( ) c7(ck, iu, Ew, aE, iA, pr, eD, wk, r, fr, bt, q); #c1(HOXB4) c2(NP_076920) c3(homeobox protein Hox-B4) c4(214244) c5(214245, 214246, 214247, 214248, 214249, 214250) c6( ) c7(ck, AK, T, sS, Ew, DY, iA, pr, oV, eD, bt, dW, fr, IQ, hf, mF, V, er); #c1(HOXB5) c2(NP_002138) c3(homeobox protein Hox-B5) c4(125676) c5(125677, 125678, 125679, 125680, 125681, 125682) c6( ) c7(T, Ew, iA, pr, eD, v, dL, fr, bt, eL); #c1(HOXB6) c2(XP_005257340) c3(homeobox protein Hox-B6 isoform X1) c4( ) c5(275053, 275054, 275055, 275056, 275057, 275058, 275059, 275060) c6( ) c7(bv, Ew, iA, pr, eD, r, Pp, fr, t, bt, q); #c1(HOXB6) c2(XP_011523029) c3(homeobox protein Hox-B6 isoform X2) c4(317528) c5(317529, 317530, 317531) c6( ) c7(bv, Ew, iA, pr, eD, r, Pp, fr, t, bt, q); #c1(HOXB7) c2(NP_004493) c3(homeobox protein Hox-B7) c4(146903, 146904) c5(146905, 146906, 146907, 146908, 146909, 146910, 146911, 146912, 146913, 146914, 146915, 146916) c6( ) c7(nZ, T, if, fd, fr, qN, eJ, q, aE, It, aT, aEL, d, pr, aW, Y, ff, r, nY, kp, ahl, en, g, ck, Ew, eM, iA, eD, cj, m, bt, iu); #c1(HOXB8) c2(NP_076921) c3(homeobox protein Hox-B8) c4(214251) c5(214252, 214253, 214254, 214255, 214256, 214257) c6( ) c7(Ew, iA, pr, eD, fr, bt, qc); #c1(HOXB9) c2(NP_076922) c3(homeobox protein Hox-89) c4(214258, 214259) c5(214260, 214261, 214262, 214263, 214264, 214265, 214266, 214267) c6( ) c7(T, hd, ib, nM, iA, Ew, pr, aW, ev, eD, eX, r, aT, eV, fr, q, bt, B); #c1(HOXB9) c2(XP_011523030) c3(homeobox protein Hnx-89 isoform X1) c4( ) c5(317532, 317533, 317534, 317535, 317536) c6( ) c7(T, hd, ib, nM, iA, Ew, pr, aW, ev, eD, eX, r, aT, eV, fr, q, bt, B); #c1(HOXC10) c2(NP_059105) c3(homeobox protein Hox-C10) c4(193027) c5(193028, 193029, 193030, 193031, 193032, 193033, 193034) c6( ) c7(ck, aW, if, ff, aT, qN, en); #c1(HOXC11) c2(NP_055027) c3(homeobox protein Hox-C11) c4(178367) c5(178368, 178369, 178370, 178371, 178372, 178373, 178374) c6( ) c7(ck, T, aW, Y, aT, hn, cm, bt); #c1(HOXC12) c2(NP_776272) c3(homeobox protein Hox-C12) c4(251065) c5(251066, 251067, 251068, 251069, 251070, 251071, 251072) c6( ) c7(CN); #c1(HOXC13) c2(NP_059106) c3(homeobox protein Hox-C13) c4(193035) c5(193036, 193037, 193038, 193039, 193040, 193041, 193042) c6( ) c7(XW, T, bKO, CN, bt); #c1(HOXC4) c2(NP_705897) c3(homeobox protein Hox-C4) c4(246383) c5(246384, 246385, 246386, 246387, 246388, 246389, 246390, 246391, 246392, 246393, 246394, 246395) c6( ) c7(ck, CN, aE, hk, ks, jj); #c1(HOXC5) c2(NP_061826) c3(homeobox protein Hox-C5) c4(200630) c5(200631, 200632, 200633, 200634, 200635, 200636, 200637) c6( ) c7(ck, fM, CN, jh, gZ, hn, Ca); #c1(HOXC6) c2(NP_004494) c3(homeobox protein Hox-CG isoform 1) c4(146917, 146918) c5(146919, 146920, 146921, 146922, 146923, 146924, 146925, 146926, 146927, 146928) c6( ) c7(ck, CN, jh, Ca, cm, ae, Yi, ad); #c1(HOXC6) c2(NP_710160) c3(homeobox protein Hox-CG isoform 2) c4(246524, 246525) c5(246526, 246527, 246528, 246529, 246530, 246531, 246532, 246533, 246534, 246535, 246536, 246537, 246538, 246539, 246540) c6( ) c7(ck, CN, jh, Ca, cm, ae, Yi, ad); #c1(HOXC8) c2(NP_073149) c3(homeobox protein Hox-C8) c4(212805) c5(212806, 212807, 212808, 212809, 212810, 212811, 212812, 212813, 212814) c6( ) c7(bfP, T, gh, CN, aW, if, aT, n, kp, ci, qN, ae, ad); #c1(HOXC9) c2(NP_008828) c3(homeobox protein Hox-C9) c4(168876) c5(168877, 168878, 168879, 168880, 168881, 168882, 168883, 168884, 168885, 168886, 168887) c6( ) c7(cm, aW, CN, aT); #c1(HOXD1) c2(NP_078777) c3(homeobox protein Hox-D1) c4(215425) c5(215426, 215427, 215428, 215429, 215430, 215431, 215432) cG( ) c7(t, XW); #c1(HOXD1) c2(XP_005246564) c3(homeobox protein Hox-D1 isoform X1) c4(267236) c5(267237, 267238, 267239, 267240, 267241, 267242) c6( ) c7(t, XW); #c1(HOXD10) c2(NP_002139) c3(homeobox protein Hox-D10) c4(125683) c5(125684, 125685, 125686, 125687, 125688, 125689, 125690) c6( ) c7(aeQ, XW, T, bKP, aW, iK, jh, aT, aA, dL, aF, m, ci, bU, bBe, t, zU, eA, B, y); #c1(HOXD11) c2(NP_067015) c3(homeobox protein Hex-D11) c4(208366, 208367) c5(208368, 208369, 208370, 208371, 208372, 208373, 208374, 208375, 208376, 208377, 208378, 208379, 208380) c6( ) c7(XW, y, gU, iK, aT, dy, aMi, t, bt, atb, bN, bKE); #c1(HOXD12) c2(NP_067016) c3(homeobox protein Hox-D12) c4(208381) c5(208382, 208383, 208384, 208385, 208386, 208387, 208388) c6( ) c7(bN, XW, Y, atb, zU); #c1(HOXD13) c2(NP_000514) c3(homeobox protein Hox-D13) c4(10867) c5(10868, 10869, 10870, 10871, 10872, 10873, 10874) c6( ) c7(T, xu, rV, bKR, bry, aHC, zU, bKU, hF, bKT, hr, bKS, XW, aE, aT, abj, aOV, af, bKH, IE, iU, aW, bKV, Pp, as, bw, bKQ, atb, bN, hq, ck, arB, bjd, dX, zG, y, bt); #c1(HOXD3) c2(XP_006712540) c3(homeobox protein Hox-D3 isoform X1) c4(286697, 286698) c5(286699, 286700, 286701, 286702, 286703, 286704, 286705, 286706, 286707, 286708, 286709, 286710, 286711, 286712, 286713, 286714, 286715, 286716, 286717, 286718, 286719) c6( ) c7(ck, aHF, T, ae, XW, Y, arH, n, jj, bz, t, kS, ad); #c1(HOXD4) c2(NP_055436) c3(homeobox protein Hox-D4) c4(181124) c5(181125, 181126, 181127, 181128, 181129, 181130, 181131) c6( ) c7(x, XW, T, eD, hn, k, cm); #c1(HOXD8) c2(NP_001186675) c3(homeobox protein Hox-D8 isoform 2) c4(78315) c5(78316, 78317, 78318, 78319, 78320, 78321, 78322, 78323, 78324, 78325) c6( ) c7(cm, XW, A, aHC); #c1(HOXD8) c2(NP_001186676) c3(homeobox protein Hox-D8 isoform 3) c4( ) c5(78326, 78327, 78328, 78329, 78330) c6( ) c7(cm, XW, A, aHC); #c1(HOXD8) c2(NP_062458) c3(homeobox protein Hox-D8 isoform 1) c4(201802, 201803) c5(201804, 201805, 201806, 201807, 201808, 201809, 201810, 201811) c6( ) c7(cm, XW, A, aHC); #c1(HOXD9) c2(NP_055028) c3(homeobox protein Hox-D9) c4(178375) c5(178376, 178377, 178378, 178379, 178380, 178381, 178382) c6( ) c7(XW, T, jz, d, dB, Y, if, ff, en, qN, cm, eA, y); #c1(HP) c2(NP_001119574) c3(haptoglobin isoform 2 preproprotein) c4(44148) c5(44149, 44150, 44151, 44152, 44153, 44154, 44155, 44156, 44157, 44158, 44159, 44160) c6( ) c7(bM, T, qo, aC, tQ, ea, aUT, e, al, bO, ci, aY, bv, aBb, AW, wM, aE, dV, K, bKW, wt, dQ, eN, aHo, hm, CG, aW, mQ, fc, uY, hJ, uC, yX, vy, QF, wx, m, R, eg, yJ, NK, dD, OI, aw, yG, bLa, n, cQ, aj, fr, ct, qN, ww, cd, ai, b, h, IG, hg, A, mR, fQ, aq, fe, kT, W, cA, mg, te, ER, B, bKX, bL, eR, jx, aA, cR, cz, hy, v, j, eA, J, xx, jZ, aT, yu, bq, an, ae, af, kl, bf, iU, Y, fO, lo, en, iK, pb, vk, ck, BU, gX, agf, mf, cS, dy, fD, aBp, bKY, ao, qb, iW, ha, vr, bS, eq, jE, bKZ, ad, kL, hX, dP, fU, avp, av, F, tT, ds, oW, JK, ji, sj, uX, d, IR, tb, cW, bFM, ff, xs, cr, eZ, kD, yy, aF, hp, Z, qa, wW, D, Cq, gk, qe, yE, aS, i, lf, gq, y); #c1(HP) c2(NP_005134) c3(haptoglobin isoform 1 preproprotein) c4(153293) c5(153294, 153295, 153296, 153297, 153298, 153299, 153300) c6( ) c7(bM, T, qo, aC, tQ, ea, aUT, e, al, bO, ci, aY, bv, aBb, AW, wM, aE, dV, K, bKW, wt, dQ, eN, aHo, hm, CG, aW, mQ, fc, uY, hJ, uC, yX, vy, QF, wx, m, R, eg, yJ, NK, dD, Ol, aw, yG, bLa, n, cQ, aj, fr, ct, qN, ww, cd, ai, b, h, IG, hg, A, mR, fQ, aq, fe, kT, W, cA, mg, te, ER, B, bKX, bL, eR, jx, aA, cR, cz, hy, v, j, eA, J, xx, jZ, aT, yu, bq, an, ae, af, kl, bf, iU, Y, fO, lo, en, iK, pb, vk, ck, BU, gX, agf, mf, cS, dy, fD, aBp, bKY, ao, qb, iW, ha, vr, bS, eq, jE, bKZ, ad, kL, hX, dP, fU, avp, av, F, tT, ds, oW, JK, ji, sj, uX, d, IR, tb, cW, bFM, ff, xs, cr, eZ, kD, yy, aF, hp, Z, qa, wW, U, Cq, gk, qe, yE, aS, i, lf, gq, y); #c1(HP1BP3) c2(XP_011539836) c3(heterochromatin protein 1-binding protein 3 isoform X2) c4(338074, 338075) c5(338076, 338077, 338078, 338079, 338080, 338081, 338082, 338083, 338084, 338085, 338086, 338087, 338088, 338089, 338090, 338091, 338092) c6( ) c7(aqN); #c1(HP1BP3) c2(XP_011539837) c3(heterochromatin protein 1-binding protein 3 isoform X3) c4(338093, 338094, 338095, 338096, 338097) c5(338098, 338099, 338100, 338101, 338102, 338103, 338104, 338105, 338106, 338107, 338108, 338109, 338110, 338111, 338112, 338113, 338114, 338115, 338116, 338117, 338118, 338119, 338120, 338121, 338122, 338123, 338124, 338125, 338126, 338127, 338128, 338129, 338130, 338131, 338132, 338133, 338134, 338135, 338136, 338137, 338138, 338139) c6( ) c7(aqN); #c1(HPCAL1) c2(XP_011508650) c3(hippocalcin-like protein 1 isoform X1) c4(299259, 299260) c5(299261, 299262, 299263, 299264, 299265, 299266, 299267, 299268, 299269, 299270, 299271) c6( ) c7(cm, T, cz, PN); #c1(HPCAL1) c2(XP_011508651) c3(hippocalcin-like protein 1 isoform X2) c4( ) c5(299272, 299273, 299274, 299275, 299276, 299277) c6( ) c7(cm, T, cz, pN); #c1(HPD) c2(NP_001165464) c3(4-hydroxyphenylpyruvate dioxygenase isoform 2) c4( ) c5(67752, 67753, 67754, 67755, 67756) c6( ) c7(gh, T, e, al, zU, LI, ad, LH, aE, ec, ds, bLb, aU, vw, LG, ae, bLc, aq, LJ, iR, cA, ig, QT, dy, zG); #c1(HPD) c2(NP_002141) c3(4-hydroxyphenylpyruvate dioxygenase isoform 1) c4(125691, 125692, 125693) c5(125694, 125695, 125696, 125697, 125698, 125699, 125700, 125701, 125702, 125703, 125704, 125705, 125706, 125707, 125708, 125709, 125710, 125711, 125712, 125713, 125714, 125715, 125716, 125717, 125718, 125719, 125720, 125721, 125722, 125723, 125724, 125725, 125726, 125727, 125728, 125729, 125730, 125731, 125732, 125733, 125734, 125735, 125736, 125737, 125738, 125739, 125740, 125741, 125742, 125743, 125744, 125745, 125746, 125747, 125748, 125749, 125750, 125751, 125752, 125753, 125754, 125755, 125756, 125757, 125758, 125759, 125760, 125761, 125762, 125763, 125764, 125765, 125766, 125767, 125768, 125769, 125770, 125771, 125772, 125773, 125774, 125775, 125776, 125777, 125778, 125779, 125780, 125781, 125782, 125783, 125784, 125785, 125786, 125787, 125788, 125789, 125790, 125791, 125792, 125793) c6(125794) c7(gh, T, e, al, zU, Ll, ad, LH, aE, ec, ds, bLb, aU, vw, LG, ae, bLc, aq, LJ, iR, cA, ig, QT, dy, zG); #c1(HPGD) c2(NP_000851) c3(15-hydroxyprostaglandin dehydrogenase [NAD(+)] isoform 1) c4(16579, 16580) c5(16581, 16582, 16583, 16584, 16585, 16586, 16587, 16588) c6( ) c7(sY, T, dA, aA, bB, bLd, ci, Ea, q, ad, dP, av, bLe, jz, aT, af, d, B, s, aW, aBN, aBM, r, aq, Au, aF, g, avG, jT, uC, bz, bF, c, nB, bE, gX, pg, IC, X); #c1(HPGD) c2(NP_001139288) c3(15-hydroxyprostaglandin dehydrogenase [NAD(+)] isoform 2) c4(59130) c5(59131, 59132, 59133, 59134, 59135, 59136) c6( ) c7(sY, T, dA, aA, bB, bLd, ci, Ea, q, ad, dP, av, bLe, jz, aT, af, d, B, s, aW, aBN, aBM, r, aq, Au, aF, g, avG, jT, uC, bz, bF, c, nB, bE, gX, pg, IC, X); #c1(HPGD) c2(NP_001243234) c3(15-hydroxyprostaglandin dehydrogenase [NAD(+)] isoform 4) c4(90209) c5(90210, 90211, 90212, 90213, 90214, 90215) c6( ) c7(sY, T, dA, aA, bB, bLd, ci, Ea, q, ad, dP, av, bLe, jz, aT, af, d, B, s, aW, aBN, aBM, r, aq, Au, aF, g, avG, jT, uC, bz, bF, c, nB, bE, gX, pg, IC, X); #c1(HPGD) c2(NP_001243236) c3(15-hydroxyprostaglandin dehydrogenase [NAD(+)] isoform 3) c4( ) c5(90216, 90217, 90218, 90219, 90220, 90221, 90222, 90223) c6( ) c7(sY, T, dA, aA, bB, bLd, ci, Ea, q, ad, dP, av, bLe, jz, aT, af, d, B, s, aW, aBN, aBM, r, aq, Au, aF, g, avG, jT, uC, bz, bF, c, nB, bE, gX, pg, IC, X); #c1(HPGDS) c2(NP_055300) c3(hematopoietic prostaglandin D synthase) c4(180371) c5(180372, 180373, 180374, 180375, 180376, 180377) c6( ) c7(bM, T, pf, ea, if, e, al, eb, bLf, bB, fd, qj, ci, bh, Jx, bLg, ip, x, Gt, aE, ja, K, hu, hH, pk, dF, bc, Zm, hm, Qe, aa, eL, dH, Jl, aW, iE, az, hl, CT, uY, Au, bBH, g, as, eE, DR, lk, eF, cm, bw, yd, bb, xK, eM, nB, iA, iT, go, vA, cj, uJ, dW, bcl, k, Hb, m, dD, gU, aWG, ht, NT, aw, n, aj, fr, qN, pM, fK, br, co, b, ft, oN, eT, gd, h, jy, eV, hn, dL, hB, he, Um, dx, OV, A, sp, hQ, fe, aq, bFN, pm, dw, Ld, pp, asE, W, bP, dB, hk, Qu, at, fL, YH, it, B, L, bL, eR, AL, aZy, yk, jx, eX, aA, GP, cz, fF, v, j, Qo, AO, V, q, J, er, eA, XX, akU, aoA, yg, aT, vH, yu, bK, aKG, an, ae, af, bA, jf, gw, s, ND, vT, iU, Y, Lf, r, en, bu, ll, t, f, iK, pb, bN, ck, cT, sS, tW, c, ac, Nk, gX, fD, bt, rA, ao, blu, gx, id, aDy, qb, aD, iW, rl, bs, lD, jh, oZ, Fb, Jz, fu, Gn, eq, iG, hF, pl, mC, ad, hX, dP, hd, F, py, io, ji, d, qt, bFM, ff, xs, eH, aZw, rM, dN, Ej, cr, aF, eZ, S, iV, bz, qa, eK, bF, es, gk, apM, bE, z, gZ, i, hE, iu, y, pC); #c1(HPN) c2(NP_892028) c3(serine protease hepsin precursor) c4(257667) c5(257668, 257669, 257670, 257671, 257672, 257673, 257674, 257675, 257676, 257677, 257678, 257679, 257680, 257681) c6( ) c7(T, ad, bm, aq, Fb, PQ, ci, m, du, fr, t, ae, B, us, pi, hX); #c1(HPN) c2(XP_011525193) c3(serine protease hepsin isoform X2) c4(319668) c5(319669, 319670, 319671, 319672, 319673, 319674) c6( ) c7(T, ad, bm, aq, Fb, PQ, ci, m, du, fr, t, ae, B, us, pi, hX); #c1(HPR) c2(NP_066275) c3(haptoglobin-related protein precursor) c4(206905, 206906) c5(206907, 206908, 206909, 206910, 206911, 206912, 206913, 206914, 206915, 206916, 206917, 206918, 206919, 206920, 206921, 206922) c6( ) c7(T, eA, ad, x, ft, dV, aT, dL, K, bKW, XZ, ae, eL, CG, d, aW, bLh, aq, cl, t, cm, ck, FV, hL, m, k, bt, B); #c1(HPRT1) c2(NP_000185) c3(hypoxanthine-guanine phosphoribosyltransferase) c4(4011, 4012, 4013) c5(4014, 4015, 4016, 4017, 4018, 4019, 4020, 4021, 4022, 4023, 4024, 4025, 4026, 4027, 4028, 4029, 4030, 4031, 4032, 4033, 4034, 4035, 4036, 4037, 4038, 4039, 4040, 4041, 4042, 4043, 4044, 4045, 4046, 4047, 4048, 4049, 4050, 4051, 4052, 4053, 4054, 4055, 4056, 4057, 4058, 4059, 4060, 4061, 4062, 4063, 4064, 4065, 4066, 4067, 4068, 4069, 4070, 4071, 4072, 4073, 4074, 4075, 4076, 4077, 4078, 4079, 4080, 4081, 4082, 4083, 4084, 4085, 4086, 4087, 4088, 4089, 4090, 4091, 4092, 4093, 4094, 4095, 4096, 4097, 4098, 4099, 4100, 4101, 4102, 4103, 4104, 4105, 4106, 4107, 4108, 4109, 4110, 4111, 4112, 4113, 4114, 4115, 4116, 4117) c6(4118, 4119, 4120, 4121, 4122) c7(nD, agx, os, T, aYP, jh, fg, bB, KO, oZ, OY, ci, agz, mF, hF, V, aR, ad, Oe, x, av, Mo, oT, nH, fh, dV, aT, dz, hn, adV, K, bq, bLj, jj, amA, Ha, ae, CA, A, aQp, hG, RO, aW, Y, zb, lb, CT, fe, uY, aq, cm, DL, bz, dr, pb, ck, mO, Bv, Dy, eM, yW, aYa, bE, X, HK, bLi, uo, Hs, eo, k, m, bC, y, kS, B, jr); #c1(HPRT1) c2(XP_011529630) c3(hypoxanthine-guanine phosphoribosyltransferase isoform X1) c4(325157) c5( ) c6( ) c7(nD, agx, os, T, aYP, jh, fg, bB, KO, oZ, OY, ci, agz, mF, hF, V, aR, ad, Oe, x, av, Mo, oT, nH, fh, dV, aT, dz, hn, adV, K, bq, bLj, jj, amA, Ha, ae, CA, A, aQp, hG, RO, aW, Y, zb, lb, CT, fe, uY, aq, cm, DL, bz, dr, pb, ck, mO, Bv, Dy, eM, yW, aYa, bE, X, HK, bLi, uo, Hs, en, k, m, bC, y, kS, B, jr); #c1(HPS1) c2(NP_000186) c3(Hermansky-Pudlak syndrome 1 protein isoform a) c4(4123) c5(4124, 4125, 4126, 4127, 4128, 4129, 4130, 4131, 4132, 4133) c6( ) c7(fG, e, aw, jN, j, q, XB, Tl, XD, bW, ji, af, eu, IE, Y, fc, XC, r, aq, Xz, Xy, KM, ac, hk, XF, IF, dX, cP, B); #c1(HPS1) c2(NP_872577) c3(Hermansky-Pudlak syndrome 4 protein isoform c) c4(256390, 256391) c5(256392, 256393, 256394, 256395, 256396, 256397, 256398, 256399, 256400, 256401, 256402, 256403) c6( ) c7(fG, e, aw, jN, j, q, XB, TL XD, bW, ji, af, eu, IE, Y, fc, XC, r, aq, Xz, Xy, KM, ac, hk, XF, IF, dX, cP, 8); #c1(HPS1) c2(XP_005269815) c3(Hermansky-Pudlak syndrome 1 protein isoform X2) c4(282877, 282878) c5(282879, 282880, 282881, 282882, 282883, 282884, 282885, 282886, 282887, 282888, 282889, 282890) c6( ) c7(fG, e, aw, jN, j, q, XB, Tl, XD, bW, ji, af, eu, IE, Y, fc, XC, r, aq, Xz, Xy, KM, ac, hk, XF, IF, dX, cP, B); #c1(HPS3) c2(NP_115759) c3(Hermansky-Pudlak syndrome 3 protein) c4(223845) c5(223846, 223847, 223848, 223849, 223850, 223851) c6( ) c7(XF, IE, bLk, IF); #c1(HPS4) c2(NP_071364) c3(Hermansky-Pudlak syndrome 4 protein isoform a) c4(211212) c5(211213, 211214, 211215, 211216, 211217, 211218, 211219, 211220, 211221, 211222) c6( ) c7(IE, bW, fG, XF, IF, dX, ji, bLl); #c1(HPS4) c2(NP_690054) c3(Hermansky-Pudlak syndrome 4 protein isoform b) c4(244849) c5(244850, 244851, 244852, 244853, 244854, 244855) c6( ) c7(IE, bW, fG, XF, IF, dX, ji, bLl); #c1(HPS4) c2(XP_006724417) c3(Hermansky-Pudlak syndrome 4 protein isoform X3) c4(295954, 295955) c5(295956, 295957, 295958, 295959, 295960, 295961, 295962, 295963, 295964, 295965, 295966, 295967) c6( ) c7(IE, bW, fG, XF, IF, dX, ji, bLl); #c1(HPS5) c2(NP_852608) c3(Hermansky-Pudlak syndrome 5 protein isoform a) c4(255055) c5(255056, 255057, 255058, 255059, 255060, 255061, 255062, 255063) c6( ) c7(IE, XF, bLm); #c1(HPS5) c2(NP_852609) c3(Hermansky-Pudlak syndrome 5 protein isoform b) c4(255064) c5(255065, 255066, 255067, 255068, 255069, 255070, 255071, 255072) c6( ) c7(IE, XF, bLm); #c1(HPS5) c2(XP_011518166) c3(Hermansky-Pudlak syndrome 5 protein isoform X1) c4( ) c5(312201) c6( ) c7(IE, XF, bLm); #c1(HPS6) c2(NP_079023) c3(Hermansky-Pudlak syndrome 6 protein) c4(216628) c5(216629, 216630, 216631, 216632, 216633, 216634, 216635, 216636, 216637, 216638) c6( ) c7(bLn, XF); #c1(HPSE) c2(NP_001092010) c3(heparanase isoform 1 preproprotein) c4(39248, 39249) c5(39250, 39251, 39252, 39253, 39254, 39255, 39256, 39257, 39258, 39259) c6( ) c7(T, aC, Zz, ea, if, fd, bB, ci, x, bv, aE, pX, K, hu, wt, DY, eL, Us, cp, Qe, hm, eG, aW, aEl, apn, g, as, eF, cm, bw, eM, nB, k, Hb, m, dD, pA, sw, aw, ht, fN, qy, n, aj, fr, cd, Vs, jz, Ru, bLp, h, hn, dL, ey, A, hQ, fQ, aq, fe, gG, cM, iO, dB, vb, hL, bm, hR, va, bLq, it, B, bL, AS, dA, dK, IH, aA, hy, v, j, C, q, J, eA, eJ, aT, ae, af, bA, jf, arl, Qr, NE, nO, oV, Y, ev, iU, r, en, t, iK, ck, ac, gX, cS, dy, im, bt, rA, hS, qb, bLo, eq, uu, ah, Gn, hF, Fc, ad, hX, dP, av, hd, Db, yt, nJ, d, IR, qt, ff, eH, cr, dN, Ej, aF, iR, bz, bE, aS, rH, y, iu); #c1(HPSE) c2(NP_001159970) c3(heparanase isoform 2 preproprotein) c4(65007) c5(65008, 65009, 65010, 65011, 65012, 65013) c6( ) c7(T, aC, Zz, ea, if, fd, bB, ci, x, bv, aE, pX, K, hu, wt, DY, eL, Us, cp, Qe, hm, eG, aW, aEl, apn, g, as, eF, cm, bw, eM, nB, k, Hb, m, dD, pA, sw, aw, ht, fN, qy, n, aj, fr, cd, Vs, jz, Ru, bLp, h, hn, dL, ey, A, hQ, fQ, aq, fe, gG, cM, iO, dB, vb, hL, bm, hR, va, bLq, it, B, bL, AS, dA, dK, IH, aA, hy, v, j, C, q, J, eA, eJ, aT, ae, af, bA, jf, arl, Qr, NE, nO, oV, Y, ev, iU, r, en, t, iK, ck, ac, gX, cS, dy, im, bt, rA, hS, qb, bLo, eq, uu, ah, Gn, hF, Fc, ad, hX, dP, av, hd, Db, yt, nJ, d, IR, qt, ff, eH, cr, dN, Ej, aF, iR, bz, bE, aS, rH, y, iu); #c1(HPSE) c2(NP_001186759) c3(heparanase isoform 3 preproprotein) c4(78523) c5(78524, 78525, 78526, 78527, 78528, 78529, 78530, 78531, 78532, 78533, 78534, 78535) c6( ) c7(T, aC, Zz, ea, if, fd, bB, ci, x, bv, aE, pX, K, hu, wt, DY, eL, Us, cp, Qe, hm, eG, aW, aEl, apn, g, as, eF, cm, bw, eM, nB, k, Hb, m, dD, pA, sw, aw, ht, fN, qy, n, aj, fr, cd, Vs, jz, Ru, bLp, h, hn, dL, ey, A, hQ, fQ, aq, fe, gG, cM, iO, dB, vb, hL, bm, hR, va, bLq, it, B, bL, AS, dA, dK, IH, aA, hy, v, j, C, q, J, eA, eJ, aT, ae, af, bA, jf, arl, Qr, NE, nO, oV, Y, ev, iU, r, en, t, iK, ck, ac, gX, cS, dy, im, bt, rA, hS, qb, bLo, eq, uu, ah, Gn, hF, Fc, ad, hX, dP, av, hd, Db, yt, nJ, d, IR, gt, ff, eH, cr, dN, Ej, aF, iR, bz, bE, aS, rH, y, iu); #c1(HPSE2) c2(NP_001159716) c3(inactive heparanase-2 isoform 2) c4(64609) c5(64610, 64611, 64612, 64613, 64614, 64615) c6( ) c7(T, aw, fd, n, aj, j, ci, uu, ad, J, x, qh, wt, or, hm, arl, ZH, CN, ff, en, bEv, iK, ac, avS, vb, mg, cj, bfX, bt); #c1(HPSE2) c2(NP_001159717) c3(inactive heparanase-2 isoform 3) c4(64616) c5(64617, 64618, 64619, 64620, 64621, 64622) c6( ) c7(T, aw, fd, n, aj, j, ci, uu, ad, J, x, qh, wt, or, hm, arl, ZH, CN, ff, en, bEv, iK, ac, avS, vb, mg, cj, bfX, bt); #c1(HPSE2) c2(NP_001159718) c3(inactive heparanase-2 isoform 4) c4(64623) c5(64624, 64625, 64626, 64627, 64628, 64629) c6( ) c7(T, aw, fd, n, aj, j, ci, uu, ad, J, x, gh, wt, or, hm, arl, ZH, CN, ff, en, bEv, iK, ac, avS, vb, mg, cj, bfX, bt); #c1(HPSE2) c2(NP_068600) c3(inactive heparanase-2 isoform 1) c4(209768) c5(209769, 209770, 209771, 209772, 209773, 209774) c6( ) c7(T, aw, fd, n, aj, j, ci, uu, ad, J, x, qh, wt, or, hm, arl, ZH, CN, ff, en, bEv, iK, ac, avS, vb, mg, cj, bfX, bt); #c1(HPX) c2(XP_005252940) c3(hemopexin isoform X1) c4(272074, 272075) c5(272076, 272077, 272078, 272079, 272080, 272081, 272082, 272083, 272084, 272085, 272086, 272087) c6( ) c7(md, bL, ai, bLr, uL, bLs, aW, cj, bjL, zo, uY, aq, ah, eg, Ud, cM, B, ad); #c1(HR) c2(NP_005135) c3(lysine-specific demethylase hairless isoform a) c4(153301) c5(153302, 153303, 153304, 153305, 153306, 153307, 153308) c6( ) c7(bLt, bbW, akR, bLv, bLu, bwS, bwT); #c1(HR) c2(NP_060881) c3(lysine-specific demethylase hairless isoform b) c4(198313) c5(198314, 198315, 198316, 198317, 198318, 198319) c6( ) c7(bLt, bbW, akR, bLv, bLu, bwS, bwT); #c1(HRAS) c2(NP_001123914) c3(GTPase HRas isoform 1) c4(47996) c5(47997, 47998, 47999, 48000, 48001, 48002, 48003, 48004, 48005, 48006, 48007, 48008, 48009, 48010) c6( ) c7(bLy, T, aC, fR, azf, hV, yS, if, fd, bB, ci, aon, aJM, bv, afr, aE, rJ, iv, Du, auF, K, hu, eL, Zm, eG, zQ, aW, CT, Qv, Qq, g, as, eF, zE, cm, apB, bw, qJ, eM, nB, vA, vy, azg, m, yA, sc, QO, wu, gp, n, ko, kv, nA, qN, zP, hr, co, aBy, b, Bl, ft, i, aMD, KN, Ak, aqK, jy, dL, A, ks, aq, np, ar, Qy, bP, dB, hk, Qu, Vy, hL, aMl, B, cn, bL, AS, dA, jp, dK, yk, WT, jx, fZ, aA, v, pd, aYD, q, er, eA, xx, Ig, nv, Vr, qK, aT, bK, bq, ae, ne, jf, s, vT, Qr, oV, Y, ev, bLA, iU, r, aMA, aJl, Io, en, bu, cl, t, bkp, iK, pb, bN, zJ, ov, ck, sS, Dy, gX, WU, aor, bsT, im, bt, bLx, id, pY, aD, ml, jh, bs, bLz, hF, ad, av, hd, aop, Db, NS, oj, hD, wm, mu, d, hG, ff, Mz, aF, iV, iR, bz, dr, wW, RV, Ew, bE, pP, Km, adg, bLw, X); #c1(HRAS) c2(NP_789765) c3(GTPase HRas isoform 2) c4(252211) c5(252212, 252213, 252214, 252215, 252216, 252217, 252218, 252219, 252220, 252221, 252222, 252223, 252224, 252225, 252226, 252227, 252228, 252229, 252230, 252231) c6( ) c7(bLy, T, aC, fR, azf, hV, yS, if, fd, bB, ci, aon, aJM, bv, afr, aE, rJ, iv, Ou, auF, K, hu, eL, Zm, eG, zQ, aW, CT, Qv, Qq, g, as, eF, zE, cm, apB, bw, qJ, eM, nB, vA, vy, azg, m, yA, sc, QO, wu, gp, n, ko, kv, nA, qN, zP, hr, cn, aBy, b, Bl, ft, i, aMD, KN, Ak, aqK, jy, dL, A, ks, aq, op, ar, Qy, bP, dB, hk, Qu, Vy, hL, aMl, B, cn, bL, AS, dA, jp, dK, yk, WT, jx, fZ, aA, v, pd, aYD, q, er, eA, xx, Ig, nv, Vr, qK, aT, bK, bq, ae, ne, jf, s, vT, Qr, oV, Y, ev, bLA, iU, r, aMA, aJl, Io, en, hu, cl, t, bkp, iK, pb, bN, zJ, ov, ck, sS, Dy, gX, WU, aor, bsT, im, bt, bLx, id, pY, aD, ml, jh, bs, bLz, hF, ad, av, hd, aop, Db, NS, oj, hD, wm, mu, d, hG, ff, Mz, aF, iV, iR, bz, dr, wW, RV, Ew, bE, pP, Km, adg, bLw, X); #c1(HRASLS) c2(NP_065119) c3(phospholipid-metabolizing enzyme A-CI) c4(204039) c5(204040, 204041, 204042, 204043, 204044, 204045) c6( ) c7(dD, aV, ec, cW, ea, az, aA, cz, j, eq, Sm, ae, ad); #c1(HRC) c2(NP_002143) c3(sarcoplasmic reticulum histidine-rich calcium-binding protein precursor) c4(125795, 125796, 125797) c5(125798, 125799, 125800, 125801, 125802, 125803, 125804, 125805, 125806, 125807, 125808, 125809, 125810, 125811, 125812, 125813, 125814, 125815) c6( ) c7(bL, es, iA, mx, aj, K, eA, me, nN, J, cd, dr); #c1(HRG) c2(NP_000403) c3(histidine-rich glycoprotein precursor) c4(8552) c5(8553, 8554, 8555, 8556, 8557, 8558, 8559, 8560, 8561, 8562, 8563) c6( ) c7(oO, T, aw, C, eA, aE, vh, aT, bLB, K, bLC, d, aW, sq, ff, en, DL, Qt, dr, dB, se, ag); #c1(HRG) c2(XP_005247472) c3(histidine-rich glycoprotein isoform X1) c4( ) c5(267851) c6( ) c7(oO, T, aw, C, eA, aE, vh, aT, bLB, K, bLC, d, aW, sq, ff, en, DL, Qt, dr, dB, se, ag); #c1(HRH1) c2(NP_001091683) c3(histamine HI receptor) c4(38704) c5(38705, 38706, 38707, 38708, 38709, 38710, 38711, 38712, 38713, 38714, 38715, 38716, 38717, 38718, 38719, 38720, 38721) c6( ) c7(bM, cT, dD, ac, ea, Jp, e, JM, aj, j, eq, an, aOJ, X, J); #c1(HRH2) c2(NP_001124527) c3(histamine H2 receptor isoform 1) c4(49186) c5(49187, 49188, 49189, 49190, 49191, 49192) c6( ) c7(ov, id, aJt, ea, Y, atj, az, aA, vs, aB, aF, Qo, aOJ, eN, X); #c1(HRH2) c2(NP_071640) c3(histamine H2 receptor isoform 2) c4( ) c5(211798, 211799, 211800, 211801, 211802, 211803) c6( ) c7(ov, id, aJt, ea, Y, atj, az, aA, vs, aB, aF, Qo, aOJ, eN, X); #c1(HRH2) c2(XP_006714928) c3(histamine H2 receptor isoform X2) c4(288364) c5( ) c6( ) c7(ov, id, aJt, ea, Y, atj, az, aA, vs, aB, aE, Qo, aOJ, eN, X); #c1(HRH3) c2(NP_009163) c3(histamine H3 receptor) c4( ) c5(171206, 171207, 171208, 171209, 171210, 171211, 171212, 171213, 171214, 171215, 171216, 171217) c6( ) c7(ke, bM, cF, ot, Bc, dJ, My, Nt, cz, IG, GC, dG, v, ci, cB, dl); #c1(HRH3) c2(XP_005260323) c3(histamine H3 receptor isoform X1) c4(276514, 276515, 276516) c5(276517, 276518, 276519, 276520, 276521, 276522) c6( ) c7(ke, bM, cF, ot, Be, dJ, My, Nt, cz, IG, GC, dG, v, ci, cB, dl); #c1(HRH3) c2(XP_005260324) c3(histamine H3 receptor isoform X2) c4( ) c5(276523, 276524) c6( ) c7(ke, bM, cF, ot, Be, dJ, My, Nt, cz, IG, GC, dG, v, ci, cB, dl); #c1(HRH4) c2(NP_001137300) c3(histamine H4 receptor isoform 2) c4(55380) c5(55381, 55382, 55383, 55384, 55385, 55386) c6( ) c7(ai, eE, cr, aA, r, eZ, aF, ci, g, aOJ, y, X, dr); #c1(HRH4) c2(NP_067637) c3(histamine H4 receptor isoform 1) c4(209134) c5(209135, 209136, 209137, 209138, 209139, 209140) c6( ) c7(ai, eE, cr, aA, r, eZ, aE, ci, g, aOJ, y, X, dr); #c1(HRK) c2(NP_003797) c3(activator of apoptosis harakiri) c4(140957) c5(140958, 140959, 140960, 140961, 140962, 140963) c6( ) c7(ck, T, d, iW, jh, r, aA, aE, as, ij, ae, ad); #c1(HRNR) c2(NP_001009931) c3(hornerin) c4(23735) c5(23736, 23737, 23738, 23739, 23740, 23741, 23742, 23743) c6( ) c7(T, aW, aT, eE, AD, eA); #c1(HRSP12) c2(NP_005827) c3(ribonuclease 0K114) c4(159720) c5(159721, 159722, 159723, 159724, 159725, 159726) c6( ) c7(ar, dt, jp, fQ, kp, act, ae, ad); #c1(HS1BP3) c2(NP_071905) c3(HCLS1-binding protein 3) c4(212212) c5(212213, 212214, 212215, 212216, 212217, 212218) c6( ) c7(Gt, aMV, byQ, an, bLD, xw); #c1(HS3ST1) c2(NP_005105) c3(heparan sulfate glucosamine 3-O-sulfotransferase 1 precursor) c4(152921, 152922) c5(152923, 152924, 152925, 152926, 152927, 152928, 152929, 152930, 152931, 152932, 152933, 152934, 152935, 152936, 152937, 152938, 152939, 152940) c6(152941, 152942) c7(T, aE, aw, cz, eW, bA); #c1(HS3ST2) c2(NP_006034) c3(heparan sulfate glucosamine 3-O-sulfotransferase 2) c4(161322, 161323) c5(161324, 161325, 161326, 161327, 161328, 161329, 161330, 161331, 161332, 161333, 161334, 161335) c6( ) c7(T, QO, fR, eM, aW, if, ff, jh, r, aT, en, qN, bt, bz, q); #c1(HS3ST3A1) c2(NP_006033) c3(heparan sulfate glucosamine 3-O-sulfotransferase 3A1) c4(161315) c5(161316, 161317, 161318, 161319, 161320, 161321) c6( ) c7(Gp, oe, eW, eZ, c); #c1(HS3ST3B1) c2(NP_006032) c3(heparan sulfate glucosamine 3-O-sulfotransferase 381) c4(161304) c5(161305, 161306, 161307, 161308, 161309, 161310, 161311, 161312, 161313, 161314) c6( ) c7(dP, Io, aE, hl); #c1(HS3ST4) c2(NP_006031) c3(heparan sulfate glucosamine 3-O-sulfotransferase 4) c4(161297) c5(161298, 161299, 161300, 161301, 161302, 161303) c6( ) c7(cd, xa, ac, bM); #c1(HS3ST5) c2(NP_705840) c3(heparan sulfate glucosamine 3-O-sulfotransferase 5) c4(246326) c5(246327, 246328, 246329, 246330, 246331, 246332, 246333, 246334, 246335, 246336) c6( ) c7(Y); #c1(HS3ST6) c2(NP_001009606) c3(heparan sulfate glucosamine 3-O-sulfotransferase 6) c4(23652, 23653, 23654) c5(23655, 23656, 23657, 23658, 23659, 23660, 23661, 23662, 23663, 23664, 23665, 23666, 23667, 23668, 23669, 23670, 23671, 23672) c6( ) c7(eW); #c1(HS6ST1) c2(NP_004798) c3(heparan-sulfate 6-O-sulfotransferase 1) c4(149935) c5(149936, 149937, 149938, 149939, 149940, 149941) c6( ) c7(LB, bLE); #c1(HS6ST2) c2(NP_001070656) c3(heparan-sulfate 6-O-sulfotransferase 2 isoform L) c4(34652, 34653) c5(34654, 34655, 34656, 34657, 34658, 34659) c6( ) c7(LB, aW, oq, aT); #c1(HS6ST2) c2(NP_671704) c3(heparan-sulfate 6-O-sulfotransferase 2 isoform S) c4(242081, 242082) c5(242083, 242084, 242085, 242086, 242087, 242088, 242089, 242090, 242091, 242092, 242093, 242094) c6( ) c7(LB, aW, oq, aT); #c1(HS6ST2) c2(XP_005262548) c3(heparan-sulfate 6-O-sulfotransferase 2 isoform X2) c4(278006) c5(278007, 278008, 278009, 278010, 278011, 278012) c6( ) c7(LB, aW, oq, aT); #c1(HS6ST2) c2(XP_011529708) c3(heparan-sulfate 6-O-sulfotransferase 2 isoform X3) c4(325335) c5(325336, 325337, 325338, 325339, 325340, 325341, 325342, 325343, 325344, 325345, 325346, 325347) c6( ) c7(LB, aW, oq, aT); #c1(HS6ST3) c2(NP_703157) c3(heparan-sulfate 6-O-sulfotransferase 3 precursor) c4(246076) c5(246077, 246078, 246079, 246080, 246081, 246082) c6( ) c7(vy, Wb, aj, v, J, sj); #c1(HS6ST3) c2(XP_011519378) c3(heparan-sulfate 6-O-sulfotransferase 3 isoform X6) c4( ) c5(314046, 314047, 314048) c6( ) c7(vy, Wb, aj, v, J, sj); #c1(HSBP1) c2(NP_001528) c3(heat shock factor-binding protein 1) c4(118618) c5(118619, 118620, 118621, 118622, 118623, 118624) c6( ) c7(Hy, K, aT); #c1(HSD11B1) c2(NP_001193670) c3(corticosteroid 11-beta-dehydrogenase isozyme 1) c4(82444) c5(82445, 82446, 82447, 82448, 82449, 82450, 82451, 82452, 82453, 82454, 82455, 82456, 82457, 82458) c6( ) c7(bL, T, bLH, bLI, eR, fR, sQ, aZ, vf, e, cz, bS, j, ct, dG, ml, v, OH, q, tg, aT, vg, K, IQ, bq, uV, bLG, dQ, dF, af, qM, bA, aRR, hK, kl, s, cW, aW, f J, eH, r, dq, Hu, aUO, Z, eF, bN, bJ, bbT, bLF, uo, hR, ut, mf, ei, arg, aOo); #c1(HSD11B1L) c2(NP_001254797) c3(hydroxysteroid 11-beta-dehydrogenase 1-like protein isoform g) c4( ) c5(94956, 94957, 94958, 94959, 94960) c6( ) c7(ae, ci, ad); #c1(HSD11B1L) c2(NP_001254798) c3(hydroxysteroid 11-beta-dehydrogenase 1-like protein isoform d) c4( ) c5(94961, 94962, 94963, 94964, 94965, 94966, 94967) c6(94968, 94969) c7(ae, ci, ad); #c1(HSD11B1L) c2(NP_001254800) c3(hydroxysteroid 11-beta-dehydrogenase 1-like protein isoform i precursor) c4(94970) c5(94971, 94972, 94973, 94974, 94975, 94976, 94977, 94978, 94979) c6(94980, 94981) c7(ae, ci, ad); #c1(HSD11B1L) c2(NP_940935) c3(hydroxysteroid 11-beta-dehydrogenase 1-like protein isoform e precursor) c4(26D137, 260138, 260139, 260140) c5(260141, 260142, 260143, 260144, 260145, 260146, 260147, 260148) c6(260149, 260150) c7(ae, ci, ad); #c1(HSD11B1L) c2(NP_941993) c3(hydroxysteroid 11-beta-dehydrogenase 1-like protein isoform f) c4( ) c5(260342, 260343, 260344, 260345, 260346, 260347, 260348) c6(260349, 260350) c7(ae, ci, ad); #c1(HSD11B1L) c2(NP_941994) c3(hydroxysteroid 11-beta-dehydrogenase 1-like protein isoform a precursor) c4(260351) c5(260352, 260353, 260354, 260355, 260356, 260357, 260358, 260359) c6(260360, 260361) c7(ae, ci, ad); #c1(HSD11B1L) c2(NP_941995) c3(hydroxysteroid 11-beta-dehydrogenase 1-like protein isoform b precursor) c4(260362, 260363, 260364) c5(260365, 260366, 260367, 260368, 260369, 260370, 260371, 260372, 260373, 260374, 260375, 260376, 260377, 260378, 260379, 260380, 260381, 260382, 260383, 260384, 260385, 260386, 260387, 260388, 260389) c6(260390, 260391, 260392, 260393, 260394, 260395) c7(ae, ci, ad); #c1(HSD11B1L) c2(NP_941996) c3(hydroxysteroid 11-beta-dehydrogenase 1-like protein isoform c) c4( ) c5(260396, 260397, 260398, 260399, 260400, 260401, 260402) c6(260403, 260404) c7(ae, ci, ad); #c1(HSD11B2) c2(NP_000187) c3(corticosteroid 11-beta-dehydrogenase isozyme 2) c4(4134) c5(4135, 4136, 4137, 4138, 4139, 4140) c6( ) c7(bM, jv, bLI, eR, DD, aZ, iW, e, al, aw, cz, fF, To, aj, v, ah, bB, fr, aY, q, J, ai, dP, AW, Tl, XD, bLJ, bLK, aT, vg, K, nJ, yo, A, s, aW, Fe, eH, r, aPz, iV, eF, t, uC, aiv, DL, qa, bLL, ck, hq, bE, afd, fP, tl, hR, dy, OD, ei, y, B, aOo); #c1(HSD17B1) c2(NP_000404) c3(estradiol 17-beta-dehydrogenase 1) c4(8564) c5(8565, 8566, 8567, 8568, 8569, 8570, 8571, 8572, 8573, 8574, 8575, 8576, 8577, 8578, 8579, 8580, 8581, 8582, 8583, 8584, 8585) c6( ) c7(T, aZ, iW, aA, q, ad, dP, aT, dL, nJ, ae, qw, kl, PE, aW, ev, r, aF, bu, cl, zE, t, Ld, anZ, Pl, afd, hL, at, Lb, m); #c1(HSD17B1) c2(XP_011523032) c3(estradiol 17-beta-dehydrogenase 1 isoform X4) c4( ) c5(317537, 317538) c6( ) c7(T, aZ, iW, aA, q, ad, dP, aT, dL, nJ, ae, qw, kl, PE, aW, ev, r, aF, bu, cl, zE, t, Ld, anZ, Pl, afd, hL, at, Lb, m); #c1(HSD17B1) c2(XP_011523033) c3(estradiol 17-beta-dehydrogenase 1 isoform X7) c4(317539, 317540) c5(317541) c6( ) c7(T, aZ, iW, aA, q, ad, dP, aT, dL, nJ, ae, qw, kl, PE, aW, ev, r, aF, bu, cl, zE, t, Ld, anZ, PL afd, hL, at, Lb, m); #c1(HSD17B10) c2(NP_001032900) c3(3-hydroxyacyl-CoA dehydrogenase type-2 isoform 2) c4(31491) c5(31492, 31493, 31494, 31495, 31496, 31497, 31498, 31499, 31500, 31501, 31502) c6( ) c7(bL, iu, aqg, eF, bLM, U, nf, jy, K, nA, f, H, bLN, af, aR, xt, L); #c1(HSD17B10) c2(NP_004484) c3(3-hydroxyacyl-CoA dehydrogenase type-2 isoform 1) c4(146809, 146810) c5(146811, 146812, 146813, 146814, 146815, 146816, 146817, 146818, 146819) c6( ) c7(bL, iu, aqg, eF, bLM, U, nf, jy, K, nA, f, H, bLN, af, aR, xt, L); #c1(HSD17B11) c2(NP_057329) c3(estradiol 17-beta-dehydrogenase II precursor) c4(190149) c5(190150, 190151, 190152, 190153, 190154, 190155) c6( ) c7(ae, ad); #c1(HSD17B12) c2(NP_057226) c3(estradiol 17-beta-dehydrogenase 12) c4(189581) c5(189582, 189583, 189584, 189585, 189586, 189587, 189588, 189589) c6(189590, 189591) c7(ke, T, cF, hb, aW, gt, aw, aT, cm, ci, m, t, iK); #c1(HSD17B13) c2(NP_001129702) c3(17-beta-hydroxysteroid dehydrogenase 13 isoform B) c4(52215) c5(52216, 52217, 52218, 52219, 52220, 52221) c6( ) c7(ck, dP, T, qw, vJ, aW, PE, aZ, qt, afd, aT, aez, UD, Pp, v, m, nJ, ae, ad); #c1(HSD17B13) c2(NP_835236) c3(17-beta-hydroxysteroid dehydrogenase 13 isoform A precursor) c4(253414) c5(253415, 253416, 253417, 253418, 253419, 253420) c6( ) c7(ck, dP, T, qw, vJ, aW, PE, aZ, qt, afd, aT, aez, UD, Pp, v, m, nJ, ae, ad); #c1(HSD17B14) c2(NP_057330) c3(17-beta-hydroxysteroid dehydrogenase 14) c4(190156) c5(190157, 190158, 190159, 190160, 190161, 190162) c6( ) c7(aw); #c1(HSD17B2) c2(NP_002144) c3(estradiol 17-beta-dehydrogenase 2) c4(125816) c5(125817, 125818, 125819, 125820, 125821, 125822, 125823) c6( ) c7(aZ, iW, aA, bB, mL g, ad, dP, aT, dL, ae, gw, kl, aW, r, fQ, aF, mo, cl, t, op, bN, bE, vA, afd, hL, at, m); #c1(HSD17B3) c2(NP_000188) c3(testosterone 17-beta-dehydrogenase 3) c4(4141, 4142) c5(4143, 4144, 4145, 4146, 4147, 4148, 4149, 4150, 4151, 4152, 4153, 4154) c6( ) c7(bL, aeQ, cF, UL, UB, Gs, r, adW, aez, aT, Pp, ae, ad, bN); #c1(HSD17B4) c2(NP_000405) c3(peroxisomal multifunctional enzyme type 2 isoform 2) c4(8586) c5(8587, 8588, 8589, 8590, 8591, 8592) cG( ) c7(bL, am, Ut, oe, jh, cz, aj, dG, v, V, qW, ai, ad, J, aQe, eA, eW, xy, il, aT, yB, hD, afV, dL, mL, K, cb, dF, ae, eL, bA, cC, A, mR, bu, Pd, zZ, t, cl, Ld, bN, hg, bLD, hL, mE, at, oh, bLP, Lb, pK); #c1(HSD17B4) c2(NP_001186220) c3(peroxisomal multifunctional enzyme type 2 isoform 1) c4(77428, 77429) c5(77430, 77431, 77432, 77433, 77434, 77435, 77436) c6( ) c7(bL, am, Ot, oe, jh, cz, aj, dG, v, V, qW, ai, ad, J, aQe, eA, eW, xy, il, aT, yB, hD, afV, dL, mL, K, cb, dF, ae, eL, bA, cC, A, mR, bu, Pd, zZ, t, cL, Ld, bN, hq, bLD, hL, mE, at, oh, bLP, Lb, pK); #c1(HSD17B4) c2(NP_001186221) c3(peroxisomal multifunctional enzyme type 2 isoform 3) c4(77437) c5(77438, 77439, 77440, 77441, 77442, 77443) cG( ) c7(bL, am, Ut, oe, jh, cz, aj, dG, v, V, qW, ai, ad, J, aQe, eA, eW, xy, il, aT, yB, hD, afV, dL, mL, K, cb, dF, ae, eL, bA, cC, A, mR, bu, Pd, zZ, t, cl, Ld, bN, hg, bLD, hL, mE, at, oh, bLP, Lb, pK); #c1(HSD17B4) c2(NP_001278956) c3(peroxisomal multifunctional enzyme type 2 isoform 4) c4(111099, 111100) c5(111101, 111102, 111103, 111104, 111105, 111106, 111107, 111108, 111109, 111110, 111111) cG( ) c7(bL, am, Ut, oe, jh, cz, aj, dG, v, V, qW, ai, ad, J, aQe, eA, eW, xy, il, aT, yB, hD, afV, dL, mL, K, cb, dF, ae, eL, bA, cC, A, mR, bu, Pd, zZ, t, cl, Ld, bN, hq, bLD, hL, mE, at, oh, bLP, Lb, pK); #c1(HSD17B4) c2(NP_001278957) c3(peroxisomal multifunctional enzyme type 2 isoform 5) c4( ) c5(111112, 111113, 111114, 111115, 111116) cG( ) c7(bL, am, Ut, oe, jh, cz, aj, dG, v, V, qW, ai, ad, J, aQe, eA, eW, xy, il, aT, yB, hD, afV, dL, mL, K, cb, dF, ae, eL, bA, cC, A, mR, bu, Pd, zZ, t, cl, Ld, bN, hq, bLD, hL, mE, at, oh, bLP, Lb, pK); #c1(HSD17BG) c2(XP_006719735) c3(17-beta-hydroxysteroid dehydrogenase type 6 isoform X1) c4(292915, 292916, 292917) c5(292918, 292919, 292920, 292921, 292922, 292923, 292924, 292925, 292926, 292927, 292928, 292929, 292930, 292931, 292932, 292933, 292934, 292935, 292936, 292937, 292938, 292939, 292940, 292941, 292942, 292943, 292944, 292945, 292946, 292947, 292948, 292949, 292950, 292951) c6( ) c7(bM, T, eR, WA, aZ, nx, ol, aA, tc, bZ, aj, Vd, PJ, J, ad, qC, fU, HF, av, yQ, hb, oj, aT, adX, Ak, bK, K, Gz, ae, ajU, aK, kl, aW, aM, az, hl, ff, fQ, So, dq, aF, HL, en, cl, Z, f, px, bz, eE, dr, bN, mO, adc, adZ, SE, dB, bE, awN, bo, U, hL, avF, eQ, anx, IM, ao); #c1(HSD17B7) c2(NP_001291441) c3(3-keto-steroid reductase isoform 2) c4(116049) c5( ) c6( ) c7(T, fR, IT, aZ, cz, bB, hz, aj, v, ci, AO, q, J, ad, Hr, dP, vJ, aT, PD, UD, mL, uV, nJ, ae, af, qw, yo, kl, s, qt, PE, aW, r, Pp, cl, t, op, ck, bE, JQ, vA, afd, hL, aez, m); #c1(HSD17B7) c2(NP_001291442) c3(3-keto-steroid reductase isoform 3) c4( ) c5(116050, 116051, 116052, 116053, 116054, 116055, 116056, 116057, 116058, 116059, 116060, 116061) c6( ) c7(T, fR, IT, aZ, cz, bB, hz, aj, v, ci, AO, q, J, ad, Hr, dP, vJ, aT, PD, UD, mL, uV, nJ, ae, af, qw, yo, kl, s, qt, PE, aW, r, Pp, cl, t, op, ck, bE, JQ, vA, afd, hL, aez, m); #c1(HSD17B7) c2(NP_057455) c3(3-keto-steroid reductase isoform 1) c4(190975, 190976, 190977, 190978) c5(190979, 190980, 190981, 190982, 190983, 190984, 190985, 190986, 190987, 190988, 190989, 190990, 190991, 190992, 190993, 190994, 190995, 190996) c6( ) c7(T, fR, IT, aZ, cz, bB, hz, aj, v, ci, AO, q, J, ad, Hr, dP, vJ, aT, PD, UD, mL, uV, nJ, ae, af, qw, yo, kl, s, qt, PE, aW, r, Pp, cl, t, op, ck, bE, JQ, vA, afd, hL, aez, m); #c1(HSD17B8) c2(NP_055049) c3(estradiol 17-beta-dehydrogenase 8) c4(178580) c5(178581, 178582, 178583, 178584, 178585, 178586, 178587, 178588, 178589, 178590, 178591, 178592, 178593, 178594, 178595, 178596, 178597, 178598, 178599, 178600, 178601) c6( ) c7(eZ, aT); #c1(HSD3B1) c2(XP_011539616) c3(3 beta-hydroxysteroid dehydrogenase/Delta 5->4-isomerase type 1 isoform X1) c4(337861, 337862, 337863) c5(337864, 337865, 337866, 337867, 337868, 337869, 337870, 337871, 337872) c6( ) c7(bL, G, iW, oe, cz, wo, ci, ad, dP, aT, dL, aUm, nJ, ae, eL, kl, zQ, PE, Pp, cl, qa, bJ, hL, at, aez, bko, aTW); #c1(HSD3B7) c2(NP_001136250) c3(3 beta-hydroxy steroid dehydrogenase type 7 isoform b) c4(54689) c5(54690, 54691, 54692, 54693, 54694, 54695, 54696, 54697, 54698, 54699) c6( ) c7(aFj, bLQ); #c1(HSD3B7) c2(NP_079469) c3(3 beta-hydroxy steroid dehydrogenase type 7 isoform a) c4(218209) c5(218210, 218211, 218212, 218213, 218214, 218215) c6( ) c7(aFj, bLQ); #c1(HSDL1) c2(NP_001139523) c3(inactive hydroxysteroid dehydrogenase-like protein 1 isoform b) c4(59464) c5(59465, 59466, 59467, 59468, 59469, 59470) c6( ) c7(beX); #c1(HSDL1) c2(NP_113651) c3(inactive hydroxysteroid dehydrogenase-like protein 1 isoform a) c4(221949) c5(221950, 221951, 221952, 221953, 221954, 221955) c6( ) c7(beX); #c1(HSDL2) c2(NP_001182751) c3(hydroxysteroid dehydrogenase-like protein 2 isoform 2) c4(75231) c5(75232, 75233, 75234, 75235, 75236, 75237, 75238) c6( ) c7(Na, aq, Nc); #c1(HSDL2) c2(NP_115679) c3(hydroxysteroid dehydrogenase-like protein 2 isoform 1) c4(223519, 223520, 223521) c5(223522, 223523, 223524, 223525, 223526, 223527, 223528, 223529, 223530, 223531, 223532, 223533) c6( ) c7(Na, aq, Nc); #c1(HSDL2) c2(XP_006717366) c3(hydroxysteroid dehydrogenase-like protein 2 isoform X2) c4( ) c5(291011, 291012, 291013, 291014, 291015) c6( ) c7(Na, aq, Nc); #c1(HSF1) c2(NP_005517) c3(heat shock factor protein 1) c4(157016) c5(157017, 157018, 157019, 157020, 157021, 157022, 157023) c6( ) c7(T, e, jh, aA, lb, n, aj, Fb, ci, C, PJ, qN, eA, J, ad, Kx, jz, aE, aT, DD, yT, hP, K, ae, B, aW, Y, ff, aq, en, cl, t, hz, es, ar, Ew, bP, c, eM, iA, gX, U, hL, m, R, bt, X); #c1(HSF2) c2(NP_001129036) c3(heat shock factor protein 2 isoform b) c4(50684) c5(50685, 50686, 50687, 50688, 50689, 50690) c6( ) c7(vH, aKv, K, iV); #c1(HSF2) c2(NP_004497) c3(heat shock factor protein 2 isoform a) c4(146936) c5(146937, 146938, 146939, 146940, 146941, 146942, 146943) c6( ) c7(vH, aKv, K, iV); #c1(HSF4) c2(NP_001035757) c3(heat shock factor protein 4 isoform b) c4(33038) c5(33039, 33040, 33041, 33042, 33043, 33044, 33045, 33046, 33047, 33048) c6( ) c7(F, bLR, aWG, jx, bLS, bwE, h, bLT, nA, lk, hX); #c1(HSF4) c2(NP_001529) c3(heat shock factor protein 4 isoform a) c4(118625, 118626) c5(118627, 118628, 118629, 118630, 118631, 118632, 118633, 118634, 118635, 118636, 118637, 118638, 118639) c6( ) c7(F, bLR, aWG, jx, bLS, bwE, h, bLT, nA, lk, hX); #c1(HSF5) c2(NP_001073908) c3(heat shock factor protein 5) c4(36477, 36478) c5(36479, 36480, 36481, 36482, 36483, 36484, 36485, 36486, 36487, 36488, 36489, 36490) c6( ) c7(Y); #c1(HSFY2) c2(NP_001001877) c3(heat shock transcription factor, Y-linked isoform 2) c4(19048) c5(19049, 19050, 19051, 19052, 19053, 19054, 19055, 19056, 19057, 19058, 19059, 19060, 19061, 19062, 19063, 19064, 19065, 19066, 19067) c6( ) c7(vH, pt, gU, Ul); #c1(HSFY2) c2(NP_714927) c3(heat shock transcription factor, Y-linked isoform 1) c4(246638, 246639) c5(246640, 246641, 246642, 246643, 246644, 246645, 246646, 246647, 246648, 246649, 246650) c6( ) c7(vH, pt, gU, 01); #c1(HSH2D) c2(NP_001278203) c3(hematopoietic SH2 domain-containing protein isoform 2) c4( ) c5(109489) c6( ) c7(TU, TR, ju, jh); #c1(HSH2D) c2(NP_116244) c3(hematopoietic SH2 domain-containing protein isoform 1) c4(225933) c5(225934, 225935, 225936, 225937, 225938, 225939, 225940) c6( ) c7(TU, TR, ju, jh); #c1(HSH2D) c2(XP_011526691) c3(hematopoietic SH2 domain-containing protein isoform X3) c4(320989) c5(320990, 320991, 320992, 320993, 320994, 320995) c6( ) c7(TU, TR, ju, jh); #c1(HSP90AA1) c2(NP_001017963) c3(heat shock protein HSP 90-alpha isoform 1) c4(26662) c5(26663, 26664, 26665, 26666, 26667, 26668, 26669, 26670, 26671, 26672, 26673, 26674, 26675, 26676) c6( ) c7(gh, SJ, os, T, bM, aC, ea, if, bD, fd, bB, aTy, ci, bv, azY, aE, bW, dV, DO, K, hu, eL, be, azu, aW, az, g, pL, eF, cm, iP, eM, nB, Kv, iA, iT, mx, U, cj, m, alm, iu, dD, ht, n, awr, ct, qN, bLU, ai, eW, Hx, ft, kH, h, dL, ox, A, bLX, PX, OX, fe, aq, yq, dw, adz, kT, bP, dB, Ei, fL, B, bLW, aA, cR, q, er, eA, Kx, hW, aT, cy, bLY, bq, ae, af, kl, iU, Y, r, en, cl, t, ck, nM, iM, gX, wR, np, yH, aws, bt, an, Kd, nZ, kh, qb, dM, uG, jh, oZ, bS, dG, fu, eq, Nl, hF, mC, ad, av, hd, MS, Db, ji, IQ, fb, bLV, Dl, xX, d, je, ff, eH, cr, eZ, kD, aF, EZ, Fq, iV, Z, iR, bz, dr, es, bE, aS, Kj, XO, MC, X); #c1(HSP90AA1) c2(NP_005339) c3(heat shock protein HSP 90-alpha isoform 2) c4(155232, 155233) c5(155234, 155235, 155236, 155237, 155238, 155239) c6( ) c7(gh, SJ, os, T, bM, aC, ea, if, bO, fd, bB, aTy, ci, bv, azY, aE, bW, dV, DO, K, hu, eL, be, azu, aW, az, g, pL, eF, cm, iP, eM, nB, Kv, iA, iT, mx, U, cj, m, alm, iu, dD, ht, n, awr, ct, qN, bLU, ai, eW, Hx, ft, kH, h, dL, ox, A, bLX, PX, OX, fe, aq, yq, dw, adz, kT, bP, dB, Ei, fL, B, bLW, aA, cR, q, er, eA, Kx, hW, aT, cy, bLY, bq, ae, af, kl, iU, Y, r, en, cl, t, ck, nM, iM, gX, wR, np, yH, aws, bt, ao, Kd, nZ, kh, qb, dM, uG, jh, oZ, bS, dG, fu, eq, Nl, hF, mC, ad, av, hd, MS, Db, ji, IQ, fb, bLV, DL xX, d, je, ff, eH, cr, eZ, kD, aF, EZ, Fq, iV, Z, iR, bz, dr, es, bE, aS, Kj, XO, MC, X); #c1(HSP90AB1) c2(NP_001258898) c3(heat shock protein HSP 90-beta isoform a) c4(96708, 96709, 96710, 96711, 96712, 96713, 96714) c5(96715, 96716, 96717, 96718, 96719, 96720, 96721, 96722, 96723, 96724, 96725, 96726, 96727, 96728, 96729) c6( ) c7(bM, T, sw, fd, n, bS, ct, hF, ad, aE, Db, aT, h, bl, K, ox, fb, gj, aW, eZ, Z, bz, ck, ar, nM, bt, B); #c1(HSP90AB1) c2(NP_001258900) c3(heat shock protein HSP 90-beta isoform b) c4(96730) c5(96731, 96732, 96733, 96734, 96735, 96736, 96737, 96738, 96739, 96740, 96741, 96742, 96743, 96744, 96745, 96746, 96747, 96748, 96749, 96750, 96751, 96752, 96753, 96754, 96755, 96756, 96757, 96758, 96759, 96760, 96761, 96762, 96763, 96764, 96765, 96766, 96767, 96768, 96769) c6( ) c7(bM, T, sw, fd, n, bS, ct, hF, ad, aE, Db, aT, h, bl, K, ox, fb, gj, aW, eZ, Z, bz, ck, ar, nM, bt, B); #c1(HSP90AB1) c2(NP_001258901) c3(heat shock protein HSP 90-beta isoform c) c4(96770) c5(96771, 96772, 96773) c6( ) c7(bM, T, sw, fd, n, bS, ct, hF, ad, aE, Db, aT, h, bl, K, ox, fb, gj, aW, eZ, Z, bz, ck, ar, nM, bt, B); #c1(HSP9081) c2(NP_003290) c3(endoplasmin precursor) c4(137179, 137180, 137181) c5(137182, 137183, 137184, 137185, 137186, 137187, 137188, 137189, 137190, 137191, 137192, 137193, 137194, 137195, 137196, 137197, 137198, 137199) c6( ) c7(T, fR, mr, pf, if, jh, aA, fd, n, ame, ci, qN, q, ad, ai, brq, hX, eA, 81, jz, aE, ju, gd, aT, cy, rO, bK, K, ak, azU, aGP, aW, Y, ff, eH, eZ, LZ, fe, kp, aF, en, g, dw, eF, cm, bz, iV, bLZ, aGo, hc, eD, Zn, y, B); #c1(HSPA12A) c2(NP_079291) c3(heat shock 70 kDa protein 12A) c4(217702) c5(217703, 217704, 217705, 217706, 217707, 217708) c6( ) c7(IB, bO); #c1(HSPA12B) c2(NP_443202) c3(heat shock 70 kDa protein 128 isoform 1) c4(229872, 229873, 229874) c5(229875, 229876, 229877, 229878, 229879, 229880, 229881, 229882, 229883, 229884, 229885, 229886, 229887, 229888, 229889, 229890, 229891) c6( ) c7(bM, e, C); #c1(HSPA12B) c2(XP_011527451) c3(heat shock 70 kDa protein 128 isoform X1) c4( ) c5(322229) c6( ) c7(bM, e, C); #c1(HSPA13) c2(NP_008879) c3(heat shock 70 kDa protein 13 precursor) c4(169462, 169463) c5(169464, 169465, 169466, 169467, 169468, 169469, 169470, 169471, 169472, 169473, 169474, 169475) c6( ) c7(v, aA); #c1(HSPA14) c2(NP_001265134) c3(heat shock 70 kDa protein 14 isoform 3) c4(97820) c5(97821, 97822, 97823, 97824, 97825, 97826, 97827, 97828, 97829) c6( ) c7(T, dD, NQ, aBe, fR, sQ, ea, aD, yG, aA, fd, cL, bZ, j, ci, aj, v, eq, ai, o, J, ad, xE, aEE, aV, qG, azm, K, IQ, ae, avn, eL, Dl, A, mR, az, Pg, aOW, In, aF, EZ, g, as, kk, t, f, cm, iV, y, bMb, AH, aDj, U, uo, uz, bMa, ut, at, m, fD, If, aEw); #c1(HSPA14) c2(NP_057383) c3(heat shock 70 kDa protein 14 isoform 1) c4(190484, 190485) c5(190486, 190487, 190488, 190489, 190490, 190491, 190492, 190493, 190494, 190495, 190496, 190497) c6( ) c7(T, dD, NQ, aBe, fR, sQ, ea, aD, yG, aA, fd, cL, bZ, j, ci, aj, v, eq, ai, o, J, ad, xE, aEE, aV, qG, azm, K, IQ, ae, avn, eL, Dl, A, mR, az, Pg, aOW, lo, aF, EZ, g, as, kk, t, f, cm, iV, y, bMb, AH, aDj, U, uo, uz, bMa, ut, at, m, fD, If, aEw); #c1(HSPA1A) c2(NP_005336) c3(heat shock 70 kDa protein IA/IB) c4(155057, 155058, 155059, 155060, 155061, 155062, 155063, 155064, 155065) c5(155066, 155067, 155068, 155069, 155070, 155071, 155072, 155073, 155074, 155075, 155076, 155077, 155078, 155079, 155080, 155081, 155082, 155083, 155084, 155085, 155086, 155087, 155088, 155089, 155090, 155091, 155092, 155093, 155094, 155095, 155096, 155097, 155098, 155099, 155100, 155101, 155102, 155103, 155104, 155105, 155106, 155107, 155108, 155109, 155110, 155111, 155112, 155113, 155114, 155115, 155116, 155117, 155118, 155119, 155120, 155121, 155122, 155123, 155124, 155125, 155126, 155127, 155128, 155129, 155130, 155131, 155132, 155133, 155134, 155135, 155136, 155137, 155138, 155139, 155140, 155141, 155142, 155143, 155144, 155145, 155146, 155147, 155148, 155149, 155150, 155151, 155152, 155153, 155154, 155155, 155156, 155157, 155158, 155159, 155160, 155161, 155162, 155163, 155164, 155165, 155166, 155167, 155168, 155169, 155170, 155171, 155172, 155173, 155174, 155175, 155176, 155177, 155178, 155179, 155180, 155181, 155182, 155183, 155184, 155185, 155186, 155187, 155188, 155189, 155190, 155191, 155192, 155193, 155194, 155195, 155196, 155197, 155198, 155199, 155200, 155201, 155202, 155203, 155204, 155205, 155206, 155207, 155208, 155209, 155210, 155211, 155212, 155213, 155214, 155215, 155216, 155217) c6( ) c7(bM, T, fR, ea, e, bO, aza, fd, qj, ci, aY, fS, M, dV, K, eL, eG, aW, az, hl, vs, cm, uC, eM, Fh, acS, U, uo, tG, dD, gU, sQ, tp, aWG, qy, aj, fr, qW, cd, Hx, ft, h, dL, vd, wb, A, mR, fe, CQ, hq, bMc, kT, ar, vL, E, ut, eo, gg, sZ, B, bL, aA, fF, tc, bJw, j, v, C, V, eA, J, mP, gp, Id, aT, cy, an, ae, af, kl, Y, wA, ck, ac, pZ, hA, fP, CZ, fD, vi, jh, vr, eq, iG, qi, sB, aGW, ad, hD, IQ, yF, uQ, d, aYu, eZ, dq, aF, hp, iV, bz, Hv, qa, eK, uR, aS, y, X, BA, PC); #c1(HSPA1L) c2(NP_005518) c3(heat shock 70 kDa protein 1-like) c4(157024, 157025, 157026) c5(157027, 157028, 157029, 157030, 157031, 157032, 157033, 157034, 157035, 157036, 157037, 157038, 157039, 157040, 157041, 157042, 157043, 157044, 157045, 157046, 157047, 157048, 157049, 157050, 157051, 157052, 157053, 157054, 157055, 157056, 157057, 157058, 157059, 157060, 157061, 157062, 157063, 157064, 157065, 157066, 157067, 157068) c6( ) c7(bL, T, DM, fR, sQ, tp, wL, bO, aA, cz, jh, j, jE, qi, qW, ad, ga, fS, Id, aT, h, K, IQ, an, ae, bA, uQ, A, mR, aW, eZ, uC, bz, qa, ck, bMc, kT, ac, pZ, dO, uR, vL, uo, ut, bMd, gT, sa, sZ, B, y, vi); #c1(HSPA1L) c2(XP_005249127) c3(heat shock 70 kDa protein 1-like isoform X2) c4(269044) c5(269045, 269046, 269047, 269048) c6( ) c7(bL, T, DM, fR, sQ, tp, wL, bO, aA, cz, jh, j, jE, qi, qW, ad, ga, fS, Id, aT, h, K, IQ, an, ae, bA, uQ, A, mR, aW, eZ, uC, bz, qa, ck, bMc, kT, ac, pZ, dO, uR, vL, uo, ut, bMd, gT, sa, sZ, B, y, vi); #c1(HSPA1L) c2(XP_005272874) c3(heat shock 70 kDa protein 1-like isoform X1) c4(284205, 284206) c5( ) c6( ) c7(bL, T, DM, fR, sQ, tp, wL, bO, aA, cz, jh, j, jE, qi, qW, ad, ga, fS, Id, aT, h, K, IQ, an, ae, bA, uQ, A, mR, aW, eZ, uC, bz, qa, ck, bMc, kT, ac, pZ, dO, uR, vL, uo, ut, bMd, gT, sa, sZ, B, y, vi); #c1(HSPA1L) c2(XP_005274916) c3(heat shock 70 kDa protein 1-like isoform X2) c4( ) c5(285530, 285531, 285532, 285533, 285534, 285535, 285536, 285537, 285538, 285539) c6( ) c7(bL, T, DM, fR, sQ, tp, wL, bO, aA, cz, jh, j, jE, qi, qW, ad, ga, fS, Id, aT, h, K, IQ, an, ae, bA, uQ, A, mR, aW, eZ, uC, bz, qa, ck, bMc, kT, ac, pZ, dO, uR, vL, uo, ut, bMd, gT, sa, sZ, B, y, vi); #c1(HSPA1L) c2(XP_005274919) c3(heat shock 70 kDa protein 1-like isoform X1) c4(285540) c5( ) c6( ) c7(bL, T, DM, fR, sQ, tp, wL, bO, aA, cz, jh, j, jE, qi, qW, ad, ga, fS, Id, aT, h, K, IQ, an, ae, bA, uQ, A, mR, aW, eZ, uC, bz, qa, ck, bMc, kT, ac, pZ, dO, uR, vL, uo, ut, bMd, gT, sa, sZ, B, y, vi); #c1(HSPA1L) c2(XP_011545549) c3(heat shock 70 kDa protein 1-like isoform X2) c4( ) c5(344277, 344278, 344279, 344280, 344281, 344282, 344283, 344284, 344285, 344286, 344287, 344288, 344289, 344290, 344291, 344292, 344293, 344294, 344295, 344296, 344297, 344298, 344299, 344300, 344301, 344302, 344303, 344304) c6( ) c7(bL, T, DM, fR, sQ, tp, wL, bO, aA, cz, jh, j, jE, qi, qW, ad, ga, fS, Id, aT, h, K, IQ, an, ae, bA, uQ, A, mR, aW, eZ, uC, bz, qa, ck, bMc, kT, ac, pZ, dO, uR, vL, uo, ut, bMd, gT, sa, sZ, B, y, vi); #c1(HSPA2) c2(NP_068814) c3(heat shock-related 70 kDa protein 2) c4(210792, 210793) c5(210794, 210795, 210796, 210797, 210798, 210799, 210800, 210801, 210802, 210803, 210804, 210805, 210806, 210807, 210808, 210809, 210810) c6( ) c7(bL, T, dD, gU, ea, jh, aA, lD, vr, aj, v, j, eq, C, fr, iG, cd, J, ad, qp, ju, Id, aT, hD, wb, K, ae, af, A, mR, aW, eZ, kt, fe, vs, aF, iV, bz, ar, fT, ac, eM, hA, fL, X); #c1(HSPA4) c2(NP_002145) c3(heat shock 70 kDa protein 4) c4(125824, 125825, 125826) c5(125827, 125828, 125829, 125830, 125831, 125832, 125833, 125834, 125835, 125836, 125837, 125838, 125839, 125840, 125841, 125842, 125843, 125844) c6( ) c7(bM, T, fR, ea, if, bO, fd, bB, qj, ci, IR, aY, x, xE, fm, bW, pX, M, dV, K, hH, brQ, eL, hm, aiV, aW, aEl, az, eF, cm, bw, eM, Kv, aDs, acS, wE, mx, U, cj, uo, tG, k, m, pw, xh, cE, dt, dD, sQ, aWG, aw, aj, fr, Qh, qN, PJ, cd, ai, eW, Mo, Hx, h, IG, yT, aPe, dL, ey, bl, eV, pl, xf, A, fe, aq, CQ, beP, adz, bP, dB, at, ut, Lq, rx, eo, amb, sZ, B, ek, bL, jv, lk, dA, mr, AL, fG, eX, aA, cz, tc, fF, j, C, V, q, J, er, eA, ady, Kx, qp, bza, Id, aT, cy, bK, aDt, an, ae, af, ak, s, iU, Y, Pg, r, Io, en, wA, t, pb, dS, ck, rR, kP, c, ac, hA, wO, mG, hr, fP, aan, bt, aDj, LS, on, wi, jh, eq, hF, ad, dP, ib, ds, hD, IQ, nJ, uQ, Dl, CL, d, ff, eH, eZ, aF, EZ, iV, Bu, bz, dr, qa, eK, LB, D, pc, bE, dO, wz, aS, aGg, Kj, y, tP, iu, pC); #c1(HSPA4L) c2(NP_055093) c3(heat shock 70 kDa protein 4L) c4(178887) c5( ) c6( ) c7(ck, K, bA); #c1(HSPA5) c2(NP_005338) c3(78 kDa glucose-regulated protein precursor) c4(155218, 155219) c5(155220, 155221, 155222, 155223, 155224, 155225, 155226, 155227, 155228, 155229, 155230, 155231) c6( ) c7(T, aC, al, fd, bB, ame, ci, x, aE, K, oi, cp, li, eG, adr, Jl, aW, fc, g, as, eF, cm, eM, Jr, nB, wE, Jp, U, fy, uL, xN, bMe, n, aj, fr, eW, ft, jz, fKs, lG, dL, bl, alM, A, mR, lb, aq, hL, it, B, bL, jv, fM, aA, v, j, q, J, eA, HC, aT, cy, bK, an, ae, af, ak, hM, s, iU, Y, r, aMA, en, cl, t, iK, ck, kB, aGi, id, jh, dG, ad, hX, av, akN, hd, oj, ahK, nJ, d, qt, ff, eH, aF, iR, bz, gk, bE, cP, ei, X, nQ); #c1(HSPA6) c2(NP_002146) c3(heat shock 70 kDa protein 6) c4(125845, 125846) c5(125847, 125848, 125849, 125850, 125851, 125852, 125853, 125854, 125855, 125856, 125857, 125858) c6( ) c7(T, fR, sQ, cj, uo, ut, aS, IQ, K, ae, ad); #c1(HSPA8) c2(NP_006588) c3(heat shock cognate 71 kDa protein isoform 1) c4(166425, 166426, 166427, 166428) c5(166429, 166430, 166431, 166432, 166433, 166434, 166435, 166436, 166437, 166438, 166439, 166440, 166441, 166442, 166443, 166444, 166445, 166446, 166447, 166448, 166449, 166450, 166451, 166452, 166453, 166454, 166455, 166456, 166457, 166458, 166459, 166460, 166461, 166462, 166463, 166464, 166465, 166466, 166467, 166468, 166469, 166470, 166471, 166472) c6(166473, 166474) c7(bM, T, BD, fR, eR, wL, aA, cz, bB, fd, j, ci, aY, eA, ad, eW, hX, Hx, akN, hw, ds, aT, aU, aNp, K, an, ae, af, eu, iU, aW, Y, ff, xs, dg, en, g, bz, kB, bE, E, be, ei, y, bBl, X, ao); #c1(HSPA8) c2(NP_694881) c3(heat shock cognate 71 kDa protein isoform 2) c4(245411) c5(245412, 245413, 245414, 245415, 245416, 245417, 245418, 245419) c6( ) c7(bM, T, BD, fR, eR, wL, aA, cz, bB, fd, j, ci, aY, eA, ad, eW, hX, Hx, akN, hw, ds, aT, aU, aNp, K, an, ae, af, eu, iU, aW, Y, ff, xs, dq, en, g, bz, kB, bE, E, be, ei, y, bBl, X, ao); #c1(HSPA9) c2(NP_004125) c3(stress-70 protein, mitochondrial precursor) c4(143776, 143777, 143778) c5(143779, 143780, 143781, 143782, 143783, 143784, 143785, 143786, 143787, 143788, 143789, 143790, 143791, 143792, 143793, 143794, 143795, 143796) c6( ) c7(T, aA, bB, n, j, ci, fr, qW, q, aR, hr, ad, ke, MR, aXH, jZ, dV, h, dz, KP, K, jo, an, ae, af, eu, gC, r, gl, aq, aF, La, iR, cm, bw, dr, ck, iT, bE, U, wz, bt, B); #c1(HSPB1) c2(NP_001531) c3(heat shock protein beta-1) c4(118651, 118652) c5(118653, 118654, 118655, 118656, 118657, 118658, 118659, 118660, 118661, 118662, 118663, 118664, 118665) c6( ) c7(bM, T, fR, pf, ea, e, fd, bB, ci, aR, x, aE, ws, bMh, ja, K, bU, H, eL, eG, Jl, aW, az, hi, LZ, g, eF, cm, iP, eM, Kv, U, cj, k, m, xh, cE, iu, dD, gU, Ol, aw, gy, aj, fr, asF, PJ, cd, b, h, IG, bMf, dL, bV, bT, aq, aoO, RB, aWn, amb, cB, B, L, DD, aA, j, bX, bgR, V, awg, J, q, eA, aT, cy, bMg, ae, kl, vT, Y, r, en, bu, t, kC, iK, ck, alC, ac, c, aXe, wO, bko, fD, im, bt, bCG, LS, tS, eP, Zl, Pt, aZ, jh, eq, fu, ad, brR, av, py, vc, nJ, iL, d, ff, eH, aF, bz, aZz, eK, bE, i, y, X, bsJ); #c1(HSPB2) c2(NP_001532) c3(heat shock protein beta-2) c4(118666) c5(118667, 118668, 118669, 118670, 118671, 118672, 118673, 118674, 118675, 118676, 118677, 118678, 118679) c6( ) c7(bM, T, pf, ea, e, fd, bB, ci, aR, aE, ws, ja, K, bU, H, eL, eG, Jl, aW, az, g, eF, cm, iP, Kv, U, cj, m, xh, cE, dD, aw, qy, aj, asF, Hx, b, bMf, dL, bV, cM, aoO, RB, aWn, amb, it, B, L, DD, aA, j, bgR, V, q, J, eA, aT, cy, ae, kl, vT, Y, r, en, bu, t, kC, iK, ck, ac, c, aXe, wO, bko, fD, bt, LS, tS, ob, Zl, aZ, jh, eq, fu, ad, brR, py, nJ, iL, d, ff, eH, aF, bz, aZz, eK, bE, i, y, bsJ); #c1(HSPB3) c2(NP_006299) c3(heat shock protein beta-3) c4(163810) c5(163811, 163812, 163813, 163814, 163815, 163816, 163817) c6( ) c7(bM, T, pf, ea, e, al, fd, bB, Vd, ci, aR, aE, ws, dV, ja, K, qM, bU, hu, H, eL, eG, Jl, aW, az, g, eF, cm, iP, eM, Kv, U, cj, m, eg, hh, xh, cE, dD, aw, ht, qy, aj, asF, ai, b, aZv, bMf, dL, bV, mo, aoO, RB, aWn, hL, amb, B, qc, bL, L, DD, fG, jx, aA, v, j, bgR, q, J, eA, aT, kf, cy, rE, ae, ajU, kl, vT, Y, aM, r, In, en, bu, cl, t, kC, iK, ck, ac, c, aXe, wD, AH, Uq, bko, fD, bt, LS, Mb, tS, Zl, aZ, jh, Hn, eq, fu, ad, brR, py, ds, oW, nJ, iL, d, ff, eH, eZ, aF, bz, aZz, eK, gk, bE, i, y, bMi, bsJ); #c1(HSPBG) c2(NP_653218) c3(heat shock protein beta-6) c4(239150, 239151) c5(239152, 239153, 239154, 239155, 239156, 239157, 239158, 239159, 239160, 239161, 239162, 239163, 239164, 239165, 239166, 239167, 239168, 239169, 239170) c6( ) c7(fV, fm, mx, gZ, cy, akA, j, K, B, L); #c1(HSPB7) c2(XP_011539551) c3(heat shock protein beta-7 isoform X1) c4(337759, 337760, 337761) c5(337762, 337763, 337764, 337765, 337766, 337767, 337768, 337769, 337770, 337771, 337772, 337773) c6( ) c7(T, wH, mx, uY, fr, mo, cd); #c1(HSPB7) c2(XP_011539552) c3(heat shock protein beta-7 isoform X2) c4( ) c5(337774, 337775) c6( ) c7(T, wH, mx, uY, fr, mo, cd); #c1(HSPB8) c2(NP_055180) c3(heat shock protein beta-8) c4(179612) c5(179613, 179614, 179615, 179616, 179617, 179618) c6( ) c7(T, Ol, l, aA, jh, n, hy, fu, bX, aR, ad, aao, brR, bMh, aT, kf, Ak, bMf, dL, K, bU, bMk, bV, ae, af, d, BN, iU, aW, bT, Y, aF, hf, aKv, bMj, ck, ac, c, Kv, U, at, ano, R, y, ne, L); #c1(HSPB9) c2(NP_149971) c3(heat shock protein beta-9) c4(227667) c5(227668, 227669, 227670, 227671, 227672, 227673) c6( ) c7(bu); #c1(HSPBAP1) c2(NP_078886) c3(HSPB1-associated protein 1) c4(215908) c5(215909, 215910, 215911, 215912, 215913, 215914) c6( ) c7(ha, K); #c1(HSPBAP1) c2(XP_011511432) c3(HSPB1-associated protein 1 isoform X3) c4( ) c5(302072) c6( ) c7(ha, K); #c1(HSPBAP1) c2(XP_011511433) c3(HSPB1-associated protein 1 isoform X5) c4(302073) c5(302074, 302075, 302076, 302077, 302078) c6( ) c7(ha, K); #c1(HSPBP1) c2(NP_001123578) c3(hsP70-binding protein 1 isoform 2) c4(47723) c5(47724, 47725, 47726, 47727, 47728, 47729, 47730, 47731, 47732, 47733, 47734, 47735, 47736) c6( ) c7(dB, av, y); #c1(HSPBP1) c2(NP_001284529) c3(hsP70-binding protein 1 isoform 1) c4( ) c5(111980, 111981, 111982) c6( ) c7(dB, av, y); #c1(HSPBP1) c2(XP_005258758) c3(hsP70-binding protein 1 isoform X1) c4(275727) c5( ) c6( ) c7(dB, av, y); #c1(HSPD1) c2(NP_002147) c3(60 kDa heat shock protein, mitochondrial) c4(125859, 125860, 125861, 125862, 125863, 125864, 125865, 125866) c5(125867, 125868, 125869, 125870, 125871, 125872, 125873, 125874, 125875, 125876, 125877, 125878, 125879, 125880, 125881, 125882, 125883, 125884, 125885, 125886, 125887, 125888, 125889, 125890, 125891, 125892, 125893, 125894, 125895, 125896, 125897, 125898, 125899, 125900, 125901, 125902, 125903, 125904, 125905, 125906, 125907, 125908, 125909, 125910, 125911, 125912, 125913, 125914, 125915, 125916, 125917, 125918) c6( ) c7(T, fR, aFg, ea, e, fd, cL, ci, AW, xE, dY, bMp, azm, K, hH, eL, be, VF, aEV, az, aOW, aDn, g, as, cm, U, cj, m, abh, aEw, dt, dD, aBe, aw, aj, fr, ai, eW, jz, cc, eT, h, hB, A, mR, aq, nN, bMl, kk, cM, bMh, aOL, bm, at, uz, bMa, B, vQ, ul, NQ, wL, aee, aA, cz, bZ, v, j, C, o, J, aEE, rS, cy, gG, bq, ae, af, bMn, Ue, fO, bMm, Pg, aEz, lo, t, f, iK, aff, AH, yH, fD, ao, aDj, wi, bMo, aD, lD, dG, eg, aGW, ad, hX, abZ, aV, in, vc, jo, Dl, blU, aFr, aF, si, hp, EZ, iV, Bv, If, y); #c1(HSPE1) c2(NP_002148) c3(10 kDa heat shock protein, mitochondrial) c4(125919, 125920, 125921) c5(125922, 125923, 125924, 125925, 125926, 125927, 125928, 125929, 125930, 125931, 125932, 125933, 125934, 125935, 125936, 125937, 125938, 125939, 125940) c6( ) c7(T, Yn, AW, aEE, aV, cc, zw, hL, eZ, h, aq, bJC, K, m, ci, uE, t, B, abh); #c1(HSPG2) c2(NP_001278789) c3(basement membrane-specific heparan sulfate proteoglycan core protein isoform a precursor) c4(110086, 110087) c5( ) c6( ) c7(xS, T, aPl, arX, aao, aE, us, K, hu, dQ, akT, eG, apl, aW, Az, uY, zC, uC, bhB, nB, cj, m, bmE, aLo, dD, ht, oY, ee, cd, h, he, A, bMg, aq, cv, iO, w, In, bm, uz, B, bL, AS, bll, dA, cz, v, j, q, xx, gK, aT, jj, bq, rv, ae, af, Y, HL, en, cK, vW, Nk, dy, sY, aaT, kh, eq, XM, ad, LH, hX, HF, F, Db, uD, anN, TY, ff, aF, iR, bz, wW, bE, i, hE, EB); #c1(HSPG2) c2(XP_011539619) c3(basement membrane-specific heparan sulfate proteoglycan core protein isoform X1) c4( ) c5(337873, 337874, 337875, 337876, 337877, 337878, 337879, 337880, 337881, 337882, 337883, 337884, 337885, 337886, 337887, 337888, 337889, 337890, 337891, 337892, 337893, 337894, 337895, 337896, 337897, 337898, 337899, 337900, 337901, 337902, 337903, 337904, 337905, 337906, 337907) c6( ) c7(xS, T, aPl, arX, aao, aE, us, K, hu, dQ, akT, eG, apl, aW, Az, uY, zC, uC, bhB, nB, cj, m, bmE, aLo, dD, ht, oY, ee, cd, h, he, A, bMq, aq, cv, iO, w, ln, bm, uz, B, bL, AS, bll, dA, cz, v, j, q, xx, qK, aT, jj, bq, rv, ae, af, Y, HL, en, cK, vW, Nk, dy, sY, aaT, kh, eq, XM, ad, LH, hX, HE, F, Db, uD, anN, TY, ff, aF, iR, bz, wW, bE, i, hE, EB); #c1(HSPG2) c2(XP_011539621) c3(basement membrane-specific heparan sulfate proteoglycan core protein isoform X6) c4(337908) c5( ) c6( ) c7(xS, T, aPl, arX, aao, aE, us, K, hu, dQ, akT, eG, apl, aW, Az, uY, zC, uC, bhB, nB, cj, m, bmE, aLo, dD, ht, oY, ee, cd, h, he, A, bMg, aq, cv, iO, w, In, bm, uz, B, bL, AS, bll, dA, cz, v, j, q, xx, qK, aT, jj, bq, rv, ae, af, Y, HL, en, cK, vW, Nk, dy, sY, aaT, kh, eq, XM, ad, LH, hX, HE, F, Db, uD, anN, TY, ff, aF, iR, bz, wW, bE, i, hE, EB); #c1(HSPG2) c2(XP_011539623) c3(basement membrane-specific heparan sulfate proteoglycan core protein isoform X8) c4(337909) c5( ) c6( ) c7(xS, T, aPl, arX, aao, aE, us, K, hu, dQ, akT, eG, apl, aW, Az, uY, zC, uC, bhB, nB, cj, m, bmE, aLo, dD, ht, oY, ee, cd, h, he, A, bMq, aq, cv, iO, w, ln, bm, uz, B, bL, AS, bll, dA, cz, v, j, q, xx, qK, aT, jj, bq, rv, ae, af, Y, HL, en, cK, vW, Nk, dy, sY, aaT, kh, eq, XM, ad, LH, hX, HE, F, Db, uD, anN, TY, ff, aF, iR, bz, wW, bE, i, hE, EB); #c1(HSPG2) c2(XP_011539624) c3(basement membrane-specific heparan sulfate proteoglycan core protein isoform X10) c4( ) c5(337910, 337911, 337912) c6( ) c7(xS, T, aPl, arX, aao, aE, us, K, hu, dQ, akT, eG, apl, aW, Az, uY, zC, uC, bhB, nB, cj, m, bmE, aLo, dD, ht, oY, ee, cd, h, he, A, bMq, aq, cv, iO, w, In, bm, uz, B, bL, AS, bll, dA, cz, v, j, q, xx, qK, aT, jj, bq, rv, ae, af, Y, HL, en, cK, vW, Nk, dy, sY, aaT, kh, eq, XM, ad, LH, hX, HE, F, Db, uD, anN, TY, ff, aF, iR, bz, wW, bE, i, hE, EB); #c1(HSPH1) c2(NP_001273432) c3(heat shock protein 105 kDa isoform 2) c4( ) c5(104881) cG( ) c7(T, Hx, fM, aE, oV, iW, jh, r, h, fr, K, q, fq, B); #c1(HSPH1) c2(NP_001273433) c3(heat shock protein 105 kDa isoform 3) c4(104882) c5(104883, 104884, 104885, 104886, 104887, 104888) cG( ) c7(T, Hx, fM, aE, oV, iW, jh, r, h, fr, K, q, fq, B); #c1(HSPH1) c2(NP_001273434) c3(heat shock protein 105 kDa isoform 4) c4(104889) c5(104890, 104891, 104892, 104893, 104894, 104895) cG( ) c7(T, Hx, fM, aE, oV, iW, jh, r, h, fr, K, q, fg, B); #c1(HSPH1) c2(NP_006635) c3(heat shock protein 105 kDa isoform 1) c4(166761, 166762) c5(166763, 166764, 166765, 166766, 166767, 166768, 166769, 166770, 166771, 166772, 166773, 166774, 166775) cG( ) c7(T, Hx, fM, aE, oV, iW, jh, r, h, fr, K, q, fq, B); #c1(HSPH1) c2(XP_011533189) c3(heat shock protein 105 kDa isoform X1) c4(329323) c5(329324, 329325, 329326, 329327, 329328) c6( ) c7(T, Hx, fM, aE, oV, iW, jh, r, h, fr, K, q, fq, B); #c1(HTATIP2) c2(NP_001091990) c3(oxidoreductase HTATIP2 isoform a precursor) c4(39164, 39165) c5(39166, 39167, 39168, 39169, 39170, 39171, 39172, 39173) c6( ) c7(T, aA, n, ci, V, q, ad, av, iu, ft, aE, aT, h, K, ae, s, aW, Y, oV, ff, r, kp, en, g, bz, eM, B); #c1(HTATIP2) c2(NP_001091991) c3(oxidoreductase HTATIP2 isoform b) c4( ) c5(39174, 39175, 39176, 39177, 39178, 39179, 39180, 39181, 39182, 39183, 39184, 39185) c6( ) c7(T, aA, n, ci, V, q, ad, av, iu, ft, aE, aT, h, K, ae, s, aW, Y, oV, ff, r, kp, en, g, bz, eM, B); #c1(HTATIP2) c2(NP_001091993) c3(oxidoreductase HTATIP2 isoform c) c4(39186) c5(39187, 39188, 39189, 39190, 39191, 39192, 39193, 39194, 39195, 39196, 39197, 39198, 39199, 39200) c6( ) c7(T, aA, n, ci, V, q, ad, av, iu, ft, aE, aT, h, K, ae, s, aW, Y, oV, ff, r, kp, en, g, bz, eM, B); #c1(HTNI) c2(NP_002150) c3(histatin-1 precursor) c4(125962, 125963) c5(125964, 125965, 125966, 125967, 125968, 125969, 125970, 125971, 125972, 125973) c6( ) c7(ck, iT, acG, acH, it, bN); #c1(HTN3) c2(NP_000191) c3(histatin-3 precursor) c4(4255, 4256, 4257, 4258, 4259, 4260) c5(4261, 4262, 4263, 4264, 4265, 4266, 4267, 4268, 4269, 4270) c6( ) c7(T, dD, IT, ea, aA, amj, eq, ci, eh, no, jZ, dV, aT, dL, bHF, yo, s, aW, Y, ck, iT, uz, R); #c1(HTR1A) c2(NP_000515) c3(5-hydroxytryptamine receptor 1A) c4(10875, 10876) c5(10877, 10878, 10879, 10880, 10881, 10882, 10883, 10884, 10885, 10886, 10887, 10888) c6( ) c7(bMr, bcq, tJ, aoU, ht, bO, aA, bMs, bS, gf, ct, uu, ww, Ge, qi, il, wy, aR, xt, aqN, PW, F, ot, wv, DK, QU, ta, abj, bK, K, an, he, af, na, aqv, A, tb, yL, eZ, akY, cu, EZ, g, bQ, Z, eE, cM, bN, cv, hq, pH, aqr, W, cA, HP, ZT, HK, Ei, bMt, VU, el, sv, Rm, aTU, uJ, vL, aqD); #c1(HTR1B) c2(NP_000854) c3(5-hydroxytryptamine receptor 1B) c4(16589) c5(16590, 16591, 16592, 16593, 16594, 16595) c6( ) c7(lD, uK, iH, jd, aqo, bO, cz, n, To, bS, uu, ct, ci, mw, Ge, bMu, v, il, aQF, ad, cF, zw, ww, iX, aqk, cy, dL, bK, K, rE, he, rz, xa, na, ly, aog, tb, up, cu, cl, Z, akb, cm, bQ, FT, lx, bJ, hq, bN, ok, ayt, cA, ZT, Gs, bhU, hL, vL, at, Rm, uJ, Gp, lC, aXu, ra, qc); #c1(HTRIE) c2(XP_011534092) c3(5-hydroxytryptamine receptor IE isoform X1) c4(330323) c5(330324, 330325, 330326, 330327, 330328, 330329, 330330, 330331, 330332, 330333) c6( ) c7(aw, bS, uu, wy); #c1(HTR1F) c2(NP_000857) c3(5-hydroxytryptamine receptor IF) c4(16596) c5(16597, 16598, 16599, 16600, 16601, 16602) c6( ) c7(mU, HE, bBC, af, mW, ml, mS, mY, bS, bK, uu, mV, mL mX); #c1(HTR2A) c2(NP_000612) c3(5-hydroxytryptamine receptor 2A isoform 1) c4(13769) c5(13770, 13771, 13772, 13773, 13774, 13775, 13776, 13777, 13778, 13779) c6( ) c7(bM, uK, aUk, e, al, bO, gf, Jd, ur, HH, VV, lu, iX, Fo, M, ta, HR, K, oi, H, hm, aW, bMC, Eg, eE, cm, uC, mZ, bhB, aCT, ZT, Gs, U, Ji, sv, uJ, cE, bok, aw, To, aj, ww, ct, cd, ke, aUb, mV, mY, Cr, he, pi, mU, aga, vo, cM, mX, cv, bJ, hq, ok, ar, bP, cA, aDu, yP, bMw, mg, bhU, VU, vL, at, jd, mT, L, bL, qc, iH, He, cz, mS, ti, bMB, j, v, Qo, il, wy, J, PW, bMz, cF, OK, aVM, sl, aql, aT, a aw, bK, bq, bMy, rz, an, rE, af, yL, bcD, cu, lo, HL, en, xw, pb, bN, sS, ac, azK, Iw, gO, ao, sY, gX, akd, ha, mw, bS, uu, dG, abZ, HF, nH, mW, sO, aqk, vc, bMv, nJ, na, tb, cW, aal, Gv, ff, cr, kD, gl, dq, EZ, Z, jb, bMx, qga, gk, HP, bMA, gZ, Rm, ei, y, ra); #c1(HTR2A) c2(NP_001159419) c3(5-hydroxytryptamine receptor 2A isoform 2) c4(63990) c5(63991, 63992, 63993, 63994, 63995, 63996) c6( ) c7(bM, uK, aUk, e, al, bO, gf, Jd, ur, HH, VV, lu, iX, Fo, M, ta, HR, K, oi, H, hm, aW, bMC, Eg, eE, cm, uC, ml, bhB, aCT, ZT, Gs, U, Ji, sv, uJ, cE, bok, aw, To, aj, ww, ct, cd, ke, aUb, mV, mY, Cr, he, pi, mU, aga, vo, cM, mX, cv, bJ, hq, ok, ar, bP, cA, aDu, yP, bMw, mg, bhU, VU, vL, at, jd, mT, L, bL, qc, iH, He, cz, mS, ti, bMB, j, v, Qn, il, wy, J, PW, bMz, cF, DK, aVM, si, aql, aT, aaw, bK, bq, bMy, rz, an, rE, af, yL, bcD, cu, lo, HL, en, xw, pb, bN, sS, ac, azK, lw, gO, ao, sY, qX, akd, ha, mw, bS, uu, dG, abZ, HF, nH, mW, sO, aqk, vc, bMv, nJ, na, tb, cW, aal, Gv, ff, cr, kD, gl, dq, EZ, Z, jb, bMx, qa, gk, HP, bMA, gZ, Rm, ei, y, ra); #c1(HTR2B) c2(NP_000858) c3(5-hydroxytryptamine receptor 28) c4(16603, 16604) c5(16605, 16606, 16607, 16608, 16609, 16610) c6( ) c7(lD, T, fV, al, cz, v, ur, uu, wy, cd, BY, wC, ly, up, mQ, vo, lx, mg, lC, lB, ra, B); #c1(HTR2B) c2(XP_005246577) c3(5-hydroxytryptamine receptor 28 isoform X3) c4( ) c5(267243) c6( ) c7(lD, T, fV, al, cz, v, ur, uu, wy, cd, BY, wC, ly, up, mQ, vo, lx, mg, 1C, IB, ra, B); #c1(HTR2B) c2(XP_011509375) c3(5-hydroxytryptamine receptor 28 isoform X2) c4( ) c5(299954, 299955, 299956, 299957, 299958) c6( ) c7(lD, T, fV, al, cz, v, ur, uu, wy, cd, BY, wC, ly, up, mQ, vo, lx, mg, lC, lB, ra, B); #c1(HTR2C) c2(NP_001243689) c3(5-hydroxytryptamine receptor 2C isoform a precursor) c4(91395) c5(91396, 91397, 91398, 91399, 91400, 91401, 91402, 91403, 91404, 91405, 91406) c6( ) c7(bL, hl, bBC, bMD, jp, ob, e, bO, mS, bhL, bS, bMB, ct, ur, uu, mL aj, v, il, rc, J, wy, HF, ww, bMG, mW, iX, sl, bMF, aql, ta, wP, jy, bK, K, an, mY, mV, he, bME, af, na, rz, mU, tb, aal, yL, bcD, gl, Eg, Z, cm, mZ, FT, mX, bJ, cv, hg, ok, bN, cA, bMA, ZT, Gs, bLi, vL, uJ, ei, IB, xg, mT); #c1(HTR2C) c2(NP_001243690) c3(5-hydroxytryptamine receptor 2C isoform b precursor) c4(91407) c5(91408, 91409, 91410, 91411, 91412) cG( ) c7(bL, hi, bBC, bMD, jp, ob, e, bO, mS, bhL, bS, bMB, ct, ur, uu, ml, aj, v, il, rc, J, wy, HE, ww, bMG, mW, iX, si, bMF, aql, ta, wP, jy, bK, K, an, mY, mV, he, bME, af, na, rz, mU, tb, aal, yL, bcD, gl, Eg, Z, cm, mZ, FT, mX, bJ, cv, hq, ok, bN, cA, bMA, ZT, Gs, bLi, vL, uJ, ei, lB, xg, mT); #c1(HTR3A) c2(NP_000860) c3(5-hydroxytryptamine receptor 3A isoform b precursor) c4(16611, 16612, 16613) c5(16614, 16615, 16616, 16617, 16618, 16619, 16620, 16621, 16622, 16623, 16624, 16625, 16626, 16627, 16628, 16629, 16630) c6( ) c7(T, jv, bcB, akd, bO, mS, bS, uu, ct, ml, ww, Ge, wy, mW, iX, Gb, aql, aT, bK, K, jj, rE, mY, mV, he, xa, na, hZ, mU, zQ, Gv, yL, Z, mZ, bN, mX, hq, cA, bMH, uJ, ra, pK, jd, kS, mT, qc); #c1(HTR3A) c2(NP_001155244) c3(5-hydroxytryptamine receptor 3A isoform c) c4(61542) c5(61543, 61544, 61545, 61546, 61547, 61548, 61549, 61550, 61551, 61552, 61553, 61554) c6( ) c7(T, jv, bcB, akd, bO, mS, bS, uu, ct, ml, ww, Ge, wy, mW, iX, Gb, aql, aT, bK, K, jj, rE, mY, mV, he, xa, na, hZ, mU, zQ, Gv, yL, Z, mZ, bN, mX, hq, cA, bMH, uJ, ra, pK, jd, kS, mT, qc); #c1(HTR3A) c2(NP_998786) c3(5-hydroxytryptamine receptor 3A isoform a precursor) c4(265959, 265960, 265961) c5(265962, 265963, 265964, 265965, 265966, 265967, 265968, 265969, 265970, 265971, 265972, 265973) c6( ) c7(T, jv, bcB, akd, bO, mS, bS, uu, ct, ml, ww, Ge, wy, mW, iX, Gb, aql, aT, bK, K, jj, rE, mY, mV, he, xa, na, hZ, mU, zQ, Gv, yL, Z, mZ, bN, mX, hq, cA, bMH, uJ, ra, pK, jd, kS, mT, qc); #c1(HTR3B) c2(NP_006019) c3(5-hydroxytryptamine receptor 38 precursor) c4(161211) c5(161212, 161213, 161214, 161215, 161216, 161217) cG( ) c7(jv, bcB, bO, mS, bS, ct, wy, mW, iX, XY, Gb, aql, oj, aT, bK, mY, he, mV, mU, zQ, yL, Z, ml, FT, mX, cA, jd, mT); #c1(HTR3B) c2(XP_011541365) c3(5-hydroxytryptamine receptor 38 isoform X1) c4(339967) c5(339968, 339969, 339970, 339971, 339972, 339973) c6( ) c7(jv, bcB, bO, mS, bS, ct, wy, mW, iX, XY, Gb, aql, oj, aT, bK, mY, he, mV, mU, zQ, yL, Z, mZ, FT, mX, cA, jd, mT); #c1(HTR3B) c2(XP_011541368) c3(5-hydroxytryptamine receptor 38 isoform X4) c4(339974) c5(339975, 339976, 339977, 339978, 339979, 339980) c6( ) c7(jv, bcB, bO, mS, bS, ct, wy, mW, iX, XY, Gb, aql, oj, aT, bK, mY, he, mV, mU, zQ, yL, Z, ml, FT, mX, cA, jd, mT); #c1(HTR3C) c2(NP_570126) c3(5-hydroxytryptamine receptor 3C precursor) c4(234007) c5(234008, 234009, 234010, 234011, 234012, 234013) c6( ) c7(T, jv, aT, rE, bN, qc); #c1(HTR3D) c2(NP_001138615) c3(5-hydroxytryptamine receptor 30 isoform 1 precursor) c4(57183, 57184) c5(57185, 57186, 57187, 57188, 57189, 57190) c6( ) c7(rE, jv, zQ, qc, aT); #c1(HTR3D) c2(NP_001157118) c3(5-hydroxytryptamine receptor 30 isoform 3 precursor) c4(62061) c5(62062, 62063, 62064, 62065, 62066, 62067) c6( ) c7(rE, jv, zQ, qc, aT); #c1(HTR3D) c2(NP_872343) c3(5-hydroxytryptamine receptor 30 isoform 2) c4(256156) c5(256157, 256158, 256159, 256160, 256161, 256162, 256163, 256164, 256165, 256166, 256167, 256168) c6( ) c7(rE, jv, zQ, qc, aT); #c1(HTR3E) c2(NP_001243542) c3(5-hydroxytryptamine receptor 3E isoform d precursor) c4(91000) c5(91001, 91002, 91003, 91004, 91005, 91006) c6( ) c7(jv, zQ, aT, rE, ra, qc); #c1(HTR3E) c2(NP_001243543) c3(5-hydroxytryptamine receptor 3E isoform e) c4(91007) c5(91008, 91009, 91010, 91011, 91012, 91013) c6( ) c7(jv, zQ, aT, rE, ra, qc); #c1(HTR3E) c2(NP_872395) c3(5-hydroxytryptamine receptor 3E isoform a) c4(256303) c5(256304, 256305, 256306, 256307, 256308, 256309) c6( ) c7(jv, zQ, aT, rE, ra, qc); #c1(HTR3E) c2(NP_938055) c3(5-hydroxytryptamine receptor 3E isoform c precursor) c4(259578) c5(259579, 259580, 259581, 259582, 259583, 259584) c6( ) c7(jv, zQ, aT, rE, ra, qc); #c1(HTR3E) c2(NP_938056) c3(5-hydroxytryptamine receptor 3E isoform b) c4(259585) c5(259586, 259587, 259588, 259589, 259590, 259591) c6( ) c7(jv, zQ, aT, rE, ra, qc); #c1(HTR4) c2(NP_000861) c3(5-hydroxytryptamine receptor 4 isoform b) c4(16631, 16632) c5(16633, 16634, 16635, 16636, 16637, 16638, 16639, 16640, 16641, 16642, 16643, 16644) c6( ) c7(T, ac, s, cA, wy, Jb, wL, afi, eZ, gZ, ti, Dp, Ja, bK, K, uu, at, ra, cd, bN, aa); #c1(HTR4) c2(NP_001035259) c3(5-hydroxytryptamine receptor 4 isoform a) c4(32701) c5(32702, 32703, 32704, 32705, 32706, 32707, 32708, 32709, 32710, 32711) c6( ) c7(T, ac, s, cA, wy, Jb, wL, afi, eZ, gZ, ti, Dp, Ja, bK, K, uu, at, ra, cd, bN, aa); #c1(HTR4) c2(NP_001035262) c3(5-hydroxytryptamine receptor 4 isoform d) c4(32712) c5(32713, 32714, 32715, 32716, 32717, 32718) c6( ) c7(T, ac, s, cA, wy, Jb, wL, afi, eZ, gZ, ti, Dp, Ja, bK, K, uu, at, ra, cd, bN, aa); #c1(HTR4) c2(NP_001035263) c3(5-hydroxytryptamine receptor 4 isoform i) c4(32719) c5(32720, 32721, 32722, 32723, 32724, 32725) c6( ) c7(T, ac, s, cA, wy, Jb, wL, afi, eZ, gZ, ti, Dp, Ja, bK, K, uu, at, ra, cd, bN, aa); #c1(HTR4) c2(NP_001273339) c3(5-hydroxytryptamine receptor 4 isoform c) c4(104704) c5(104705, 104706, 104707, 104708, 104709, 104710) c6( ) c7(T, ac, s, cA, wy, Jb, wL, afi, eZ, gZ, ti, Dp, Ja, bK, K, uu, at, ra, cd, bN, aa); #c1(HTR4) c2(NP_955525) c3(5-hydroxytryptamine receptor 4 isoform g) c4(261884) c5(261885, 261886, 261887, 261888, 261889, 261890, 261891, 261892, 261893, 261894, 261895, 261896, 261897, 261898) c6( ) c7(T, ac, s, cA, wy, Jb, wL, afi, eZ, gZ, ti, Dp, Ja, bK, K, uu, at, ra, cd, bN, aa); #c1(HTR5A) c2(NP_076917) c3(5-hydroxytryptamine receptor 5A) c4(214213) c5(214214, 214215, 214216, 214217, 214218, 214219, 214220, 214221, 214222, 214223, 214224, 214225) c6( ) click Gs, 60, bS, uu, bK, K, wy, he, bN); #c1(HTR7) c2(NP_000863) c3(5-hydroxytryptamine receptor 7 isoform a) c4(16645) c5(16646, 16647, 16648, 16649, 16650, 16651) c6( ) c7(mS, bS, uu, ct, ci, wy, aR, xt, ot, mW, iX, oj, iv, bK, K, mY, he, mV, aQa, bEV, mU, bMI, Z, mZ, bN, mX, hq, dJ, ZT, Gs, HN, ra, mT); #c1(HTR7) c2(NP_062873) c3(5-hydroxytryptamine receptor 7 isoform d) c4(202194, 202195) c5(202196, 202197, 202198, 202199, 202200, 202201, 202202, 202203, 202204, 202205, 202206, 202207, 202208) c6( ) c7(mS, bS, uu, ct, ci, wy, aR, xt, ot, mW, iX, oj, iv, bK, K, mY, he, mV, aQa, bEV, mU, bMI, Z, mZ, bN, mX, hq, dJ, ZT, Gs, HN, ra, mT); #c1(HTR7) c2(NP_062874) c3(5-hydroxytryptamine receptor 7 isoform b) c4(202209) c5(202210, 202211, 202212, 202213, 202214) cG( ) c7(mS, bS, uu, ct, ci, wy, aR, xt, ot, mW, iX, oj, iv, bK, K, mY, he, mV, aQa, bEV, mU, bMI, Z, mZ, bN, mX, hq, dJ, ZT, Gs, HN, ra, mT); #c1(HTRA1) c2(NP_002766) c3(serine protease HTRA1 precursor) c4(131811, 131812, 131813) c5(131814, 131815, 131816, 131817, 131818, 131819, 131820, 131821, 131822, 131823, 131824, 131825, 131826, 131827, 131828, 131829, 131830, 131831) c6( ) c7(bL, T, bMK, dD, NQ, agC, aA, eh, n, eq, ai, aR, aJr, XX, av, ib, xE, aT, agD, dL, K, an, acd, db, Um, af, eL, bMJ, aW, Y, aSJ, aF, cl, t, uC, Uk, W, nb, vy, hL, m, EY, GF, y, it, iu); #c1(HTRA2) c2(NP_037379) c3(serine protease HTRA2, mitochondrial isoform 1 preproprotein) c4(175161) c5(175162, 175163, 175164, 175165, 175166, 175167) c6( ) c7(T, wi, eX, bB, fr, ci, MR, kf, eV, K, an, zH, Y, vs, cl, t, xw, rR, c, bML, bE, U, hL, m, cB, X); #c1(HTRA2) c2(NP_659540) c3(serine protease HTRA2, mitochondrial isoform 2) c4(240288) c5(240289, 240290, 240291, 240292, 240293, 240294) c6( ) c7(T, wi, eX, bB, fr, ci, MR, kf, eV, K, an, zH, Y, vs, cl, t, xw, rR, c, bML, bE, U, hL, m, cB, X); #c1(HTRA3) c2(NP_001284488) c3(serine protease HTRA3 isoform 2 precursor) c4(111905) c5(111906, 111907, 111908, 111909, 111910, 111911) c6( ) c7(av, T, BJ, hL, K, m, cl, t, bz); #c1(HTRA3) c2(NP_444272) c3(serine protease HTRA3 isoform 1 precursor) c4(230222) c5(230223, 230224, 230225, 230226, 230227, 230228) c6( ) c7(av, T, BJ, hL, K, m, cl, t, bz); #c1(HTRA4) c2(NP_710159) c3(serine protease HTRA4 precursor) c4(246517) c5(246518, 246519, 246520, 246521, 246522, 246523) c6( ) c7(jv, eh); #c1(HTT) c2(NP_002102) c3(huntingtin) c4( ) c5(124585, 124586, 124587, 124588, 124589, 124590) c6( ) c7(tJ, T, mr, ahc, bMN, bmk, nx, bMM, e, bO, eX, amj, bS, gf, aKs, xg, bfD, cd, aR, ad, Hr, PW, mj, dE, aT, HG, IG, cy, eV, yZ, K, an, rE, he, on, af, li, aW, yL, QP, Rl, hf, cm, xw, dr, aeb, hq, ck, bN, rR, bb, kB, Kv, U, gZ, Kj, Lz, aen, qc); #c1(HONK) c2(NP_055401) c3(hormonally up-regulated neu turner-associated kinase) c4(180837) c5(180838, 180839, 180840, 180841, 180842, 180843) c6( ) c7(bL, aT, qj, g, aot, cm, Ro); #c1(HONK) c2(XP_011527839) c3(hormonally up-regulated neu turner-associated kinase isoform X1) c4( ) c5(322778, 322779) c6( ) c7(bL, aT, gj, g, aot, cm, Re); #c1(HUS1) c2(NP_004498) c3(checkpoint protein HUS1) c4(146944, 146945) c5(146946, 146947, 146948, 146949, 146950, 146951, 146952, 146953, 146954, 146955, 146956, 146957, 146958, 146959, 146960, 146961, 146962, 146963, 146964, 146965) c6( ) c7(nM, c, aT, at, dL, ci, bX); #c1(HUS1B) c2(NP_683762) c3(checkpoint protein HUS1B) c4(242565) c5(242566, 242567, 242568, 242569, 242570, 242571) c6( ) c7(cm); #c1(HUWE1) c2(XP_005262022) c3(E3 ubiquitin-protein ligase HUWE1 isoform X1) c4(277698, 277699) c5(277700, 277701, 277702, 277703, 277704, 277705, 277706, 277707, 277708, 277709, 277710, 277711, 277712, 277713, 277714, 277715, 277716, 277717, 277718, 277719) c6( ) c7(es, bMO, bLM, nf, h, lo, fr, nA, oU); #c1(HUWE1) c2(XP_011529053) c3(E3 ubiquitin-protein ligase HUWE1 isoform X2) c4(324405) c5(324406, 324407, 324408, 324409, 324410, 324411, 324412, 324413, 324414, 324415, 324416, 324417, 324418, 324419, 324420, 324421, 324422, 324423, 324424, 324425, 324426, 324427) c6( ) c7(es, bMO, bLM, nf, h, lo, fr, nA, oU); #c1(HUWE1) c2(XP_011529055) c3(E3 ubiquitin-protein ligase HUWE1 isoform X4) c4(324428, 324429) c5(324430, 324431, 324432, 324433, 324434, 324435) c6( ) c7(es, bMO, bLM, nf, h, lo, fr, nA, oU); #c1(HUWE1) c2(XP_011529059) c3(E3 ubiquitin-protein ligase HUWE1 isoform X8) c4(324436) c5( ) c6( ) c7(es, bMO, bLM, nf, h, lo, fr, nA, oU); #c1(HUWE1) c2(XP_011529060) c3(E3 ubiquitin-protein ligase HUWE1 isoform X9) c4(324437, 324438) c5(324439, 324440, 324441, 324442, 324443, 324444, 324445, 324446) c6( ) c7(es, bMO, bLM, nf, h, lo, fr, nA, oU); #c1(HVCN1) c2(XP_011537150) c3(voltage-gated hydrogen channel 1 isoform X1) c4(334899, 334900) c5(334901, 334902, 334903, 334904, 334905, 334906, 334907, 334908, 334909, 334910, 334911, 334912, 334913, 334914, 334915, 334916) c6( ) c7(eF, uE); #c1(HYAL1) c2(NP_149349) c3(hyaluronidase-1 isoform 1 precursor) c4(227435, 227436, 227437, 227438) c5(227439, 227440, 227441, 227442, 227443, 227444, 227445, 227446, 227447, 227448, 227449, 227450, 227451, 227452, 227453, 227454, 227455, 227456, 227457, 227458, 227459) c6( ) c7(T, bMP, n, cL, ci, Jx, eA, o, ad, av, ft, aT, dL, ae, eL, aW, ff, en, cl, t, iK, go, Lq, m, IC); #c1(HYAL1) c2(NP_695014) c3(hyaluronidase-1 isoform 2 precursor) c4(245672) c5(245673, 245674, 245675, 245676, 245677, 245678, 245679, 245680, 245681, 245682, 245683, 245684, 245685, 245686, 245687, 245688, 245689, 245690) c6( ) c7(T, bMP, n, cL, ci, Jx, eA, o, ad, av, ft, aT, dL, ae, eL, aW, ff, en, cl, t, iK, go, Lq, m, IC); #c1(HYAL1) c2(NP_695015) c3(hyaluronidase-1 isoform 3) c4( ) c5(245691, 245692, 245693, 245694, 245695, 245696) c6( ) c7(T, bMP, n, cL, ci, Jx, eA, o, ad, av, ft, aT, dL, ae, eL, aW, ff, en, cl, t, iK, go, Lq, m, IC); #c1(HYAL1) c2(NP_695017) c3(hyaluronidase-1 isoform 5) c4(245697) c5(245698, 245699, 245700, 245701, 245702) c6( ) c7(T, bMP, n, cL, ci, Jx, eA, o, ad, av, ft, aT, dL, ae, eL, aW, ff, en, cl, t, iK, go, Lq, m, IC); #c1(HYAL2) c2(XP_005265582) c3(hyaluronidase-2 isoform X1) c4(279594, 279595, 279596, 279597, 279598, 279599) c5(279600, 279601, 279602, 279603, 279604, 279605, 279606, 279607, 279608, 279609, 279610, 279611, 279612, 279613, 279614, 279615, 279616, 279617, 279618, 279619, 279620, 279621, 279622, 279623, 279624, 279625, 279626, 279627, 279628, 279629, 279630, 279631, 279632, 279633, 279634, 279635, 279636, 279637, 279638, 279639, 279640, 279641, 279642, 279643, 279644, 279645, 279646, 279647, 279648, 279649, 279650, 279651, 279652, 279653) c6( ) c7(lD, T, fM, dA, iW, bMP, jh, eA, BY, av, ft, aT, d, iE, aW, ff, en, g, cl, bz, DL, Dy, go, IC); #c1(HYAL3) c2(NP_001186959) c3(hyaluronidase-3 isoform 2 precursor) c4(78874, 78875) c5(78876, 78877, 78878, 78879, 78880, 78881, 78882, 78883, 78884, 78885, 78886, 78887, 78888, 78889, 78890, 78891, 78892, 78893, 78894) c6( ) c7(T, ft, eA, hL, cl); #c1(HYAL3) c2(NP_001186960) c3(hyaluronidase-3 isoform 3) c4(78895) c5(78896, 78897, 78898, 78899, 78900, 78901) c6( ) c7(T, ft, eA, hL, cl); #c1(HYAL3) c2(NP_001186961) c3(hyaluronidase-3 isoform 4) c4( ) c5(78902, 78903, 78904, 78905, 78906, 78907) c6( ) c7(T, ft, eA, hL, cl); #c1(HYAL3) c2(NP_003540) c3(hyaluronidase-3 isoform 1 precursor) c4(138980, 138981) c5(138982, 138983, 138984, 138985, 138986, 138987) c6( ) c7(T, ft, eA, hL, cl); #c1(HYAL4) c2(XP_011514292) c3(hyaluronidase-4 isoform X1) c4(306917, 306918, 306919) c5(306920, 306921, 306922, 306923, 306924, 306925, 306926, 306927, 306928, 306929) c6( ) c7(go, Uc); #c1(HYAL4) c2(XP_011514294) c3(hyaluronidase-4 isoform X3) c4( ) c5(306930, 306931, 306932, 306933, 306934, 306935, 306936, 306937, 306938, 306939, 306940, 306941) c6( ) c7(go, Uc); #c1(HYDIN) c2(NP_001185471) c3(hydrocephalus-inducing protein homolog isoform c) c4( ) c5(75691, 75692, 75693, 75694, 75695, 75696) c6( ) c7(bMQ, ul, Pf, MG, bN); #c1(HYDIN) c2(NP_001185472) c3(hydrocephalus-inducing protein homolog isoform d) c4(75697) c5(75698, 75699, 75700, 75701, 75702, 75703, 75704) c6( ) c7(bMQ, ul, Pf, MG, bN); #c1(HYDIN) c2(NP_001257903) c3(hydrocephalus-inducing protein homolog isoform a) c4(95737, 95738, 95739, 95740, 95741) c5(95742, 95743, 95744, 95745, 95746, 95747, 95748, 95749, 95750, 95751, 95752, 95753, 95754, 95755, 95756, 95757, 95758, 95759, 95760, 95761, 95762, 95763, 95764, 95765, 95766, 95767, 95768) c6( ) c7(bMQ, ul, Pf, MG, bN); #c1(HYDIN) c2(NP_060028) c3(hydrocephalus-inducing protein homolog isoform b) c4( ) c5(193773, 193774, 193775, 193776, 193777, 193778, 193779, 193780) c6( ) c7(bMQ, ul, Pf, MG, bN); #c1(HYDIN) c2(XP_006721269) c3(hydrocephalus-inducing protein homolog isoform X5) c4(293905) c5(293906, 293907, 293908, 293909) cG( ) c7(bMQ, ul, Pf, MG, bN); #c1(HYDIN) c2(XP_011521448) c3(hydrocephalus-inducing protein homolog isoform X1) c4( ) c5(316221, 316222, 316223, 316224, 316225) c6( ) c7(bMQ, ul, Pf, MG, bN); #c1(HYDIN) c2(XP_011521453) c3(hydrocephalus-inducing protein homolog isoform X4) c4(316226, 316227) c5(316228) c6( ) c7(bMQ, ul, Pf, MG, bN); #c1(HYKK) c2(NP_001013641) c3(hydroxylysine kinase isoform 1) c4(25630, 25631, 25632) c5(25633, 25634, 25635, 25636, 25637, 25638) c6( ) c7(av, bMS, at, bMR, bz, iu); #c1(HYKK) c2(NP_001077081) c3(hydroxylysine kinase isoform 2) c4( ) c5(37680, 37681, 37682, 37683, 37684, 37685) c6( ) c7(av, bMS, at, bMR, bz, iu); #c1(HYKK) c2(XP_011519533) c3(hydroxylysine kinase isoform X1) c4( ) c5(314185, 314186, 314187, 314188, 314189, 314190) c6( ) c7(av, bMS, at, bMR, bz, iu); #c1(HYLS1) c2(NP_659451) c3(hydrolethalus syndrome protein 1) c4(239978) c5(239979, 239980, 239981, 239982, 239983, 239984, 239985, 239986, 239987, 239988, 239989, 239990, 239991, 239992) c6( ) c7(n, bMT, VB, ben); #c1(HYOU1) c2(NP_001124463) c3(hypoxia up-regulated protein 1 precursor) c4(49069, 49070) c5(49071, 49072, 49073, 49074, 49075) c6( ) c7(bL, T, akN, d, ns, cy, aj, v, j, K, aF, uL, ae, eA, J, ad); #c1(HYOU1) c2(XP_005271450) c3(hypoxia up-regulated protein 1 isoform X3) c4(283404, 283405, 283406, 283407) c5(283408, 283409, 283410, 283411, 283412, 283413, 283414, 283415, 283416, 283417, 283418, 283419, 283420, 283421, 283422, 283423) c6( ) c7(bL, T, akN, d, ns, cy, aj, v, j, K, aF, uL, ae, eA, J, ad); #c1(HYOU1) c2(XP_011540859) c3(hypoxia up-regulated protein 1 isoform X1) c4( ) c5(339374) c6( ) c7(bL, T, akN, d, ns, cy, aj, v, j, K, aF, uL, ae, eA, J, ad); #c1(HYOU1) c2(XP_011540860) c3(hypoxia up-regulated protein 1 isoform X2) c4(339375) c5(339376, 339377, 339378, 339379, 339380, 339381, 339382, 339383, 339384, 339385, 339386, 339387, 339388, 339389, 339390, 339391, 339392, 339393, 339394, 339395) c6( ) c7(bL, T, akN, d, ns, cy, aj, v, j, K, aF, uL, ae, eA, J, ad); #c1(HYPM) c2(NP_036406) c3(huntingtin-interacting protein M) c4(173629) c5(173630, 173631, 173632, 173633, 173634, 173635) c6( ) c7(c); #c1(IAPP) c2(NP_000406) c3(islet amyloid polypeptide precursor) c4(8593, 8594) c5(8595, 8596, 8597, 8598, 8599, 8600, 8601, 8602, 8603, 8604, 8605, 8606, 8607, 8608, 8609, 8610) c6( ) c7(bL, T, dt, fM, eP, Zz, mr, eR, if, ha, eX, fd, aA, Bm, n, akA, cz, dG, ci, aj, PJ, v, vm, qN, q, J, ad, ai, XX, mj, aE, hW, nv, Vr, pX, dv, aT, kf, vH, blg, dL, eV, K, bq, H, ae, dl, eh, cp, eL, A, d, MD, nO, aW, Y, hl, r, aq, aF, jh, apm, iR, bw, iK, bz, bJ, LB, ck, kP, eM, iT, bE, HN, mg, cj, hR, mf, R, Lz, bt, B); #c1(IARS) c2(NP_038203) c3(isoleucine-tRNA ligase, cytoplasmic) c4(176273, 176274, 176275, 176276, 176277, 176278, 176279, 176280) c5(176281, 176282, 176283, 176284, 176285, 176286, 176287, 176288, 176289, 176290, 176291, 176292, 176293, 176294, 176295, 176296, 176297, 176298, 176299, 176300, 176301, 176302, 176303, 176304, 176305, 176306, 176307, 176308, 176309, 176310, 176311, 176312, 176313, 176314, 176315, 176316, 176317, 176318, 176319, 176320, 176321, 176322, 176323, 176324, 176325, 176326, 176327, 176328, 176329, 176330, 176331, 176332, 176333, 176334, 176335, 176336, 176337, 176338, 176339, 176340) c6( ) c7(bL, gh, T, wu, aZ, aj, v, ci, J, ad, kH, Ne, aT, vc, K, Dz, wm, ae, je, Qr, aW, dq, Io, aq, iM, B); #c1(IARS2) c2(NP_060530) c3(isoleucine-tRNA ligase, mitochondrial precursor) c4(196414, 196415) c5(196416, 196417, 196418, 196419, 196420, 196421, 196422, 196423, 196424, 196425, 196426, 196427) c6( ) c7(bL, vc, ajU, ey, K); #c1(IBA57) c2(NP_001010867) c3(putative transferase CAF17, mitochondrial precursor) c4(23854, 23855) c5(23856, 23857, 23858, 23859, 23860, 23861, 23862) c6( ) c7(hb, v, oj, bMU); #c1(IBSP) c2(NP_004958) c3(bone sialoprotein 2 precursor) c4(151458) c5(151459, 151460, 151461, 151462, 151463, 151464) c6( ) c7(gh, T, zt, if, fd, jE, ci, qN, eA, ad, Bl, aE, aT, dL, ae, eL, bA, aW, Y, hC, ff, kp, en, g, t, bz, fs, D, eM, m, art, bwg, y); #c1(IBTK) c2(NP_056340) c3(inhibitor of Bruton tyrosine kinase isoform 1) c4(187158) c5(187159, 187160, 187161, 187162, 187163, 187164) c6( ) c7(j); #c1(ICA1) c2(NP_001263407) c3(islet cell autoantigen 1 isoform b) c4(97264) c5(97265, 97266, 97267, 97268, 97269, 97270, 97271, 97272, 97273, 97274, 97275, 97276) c6( ) c7(y, A, J, bMV, eZ, hD, fe, aj, qj, dw, cm, V, ae, ad, yF); #c1(ICA1) c2(NP_004959) c3(islet cell autoantigen 1 isoform a) c4(151465) c5(151466, 151467, 151468, 151469, 151470, 151471, 151472, 151473, 151474, 151475, 151476, 151477, 151478, 151479, 151480, 151481, 151482, 151483, 151484, 151485, 151486, 151487, 151488, 151489, 151490, 151491) c6( ) c7(y, A, J, bMV, eZ, hD, fe, aj, qj, dw, cm, V, ae, ad, yF); #c1(ICA1) c2(XP_011513651) c3(islet cell autoantigen 1 isoform X2) c4(305954, 305955, 305956) c5(305957, 305958, 305959, 305960, 305961, 305962) c6( ) c7(y, A, J, bMV, eZ, hD, fe, aj, qj, dw, cm, V, ae, ad, yF); #c1(ICA1) c2(XP_011513655) c3(islet cell autoantigen 1 isoform X3) c4(305963) c5( ) c6( ) c7(y, A, J, bMV, eZ, hD, fe, aj, qj, dw, cm, V, ae, ad, yF); #c1(ICAM1) c2(NP_000192) c3(intercellular adhesion molecule 1 precursor) c4(4271, 4272) c5(4273, 4274, 4275, 4276, 4277, 4278, 4279, 4280, 4281, 4282, 4283, 4284) c6( ) c7(bM, T, aC, fR, bJW, ea, e, al, if, bMY, fd, bB, aeu, cL, fo, qj, ci, IR, mF, aY, bMW, Hr, wa, x, xy, dY, aE, Be, M, dV, Ds, K, hu, wt, hH, pk, ass, be, eL, cp, hm, eN, aW, az, hl, apn, mQ, CT, hN, vs, VE, La, g, as, hJ, eE, bwe, uC, eF, ir, cm, iP, qJ, bw, yl, eM, nB, iA, aau, iT, wE, U, cj, vy, Zn, mk, k, Hb, m, hh, fy, aFf, aDi, NN, qR, ajJ, eg, iu, cZ, dD, aFG, My, yG, ht, fN, aw, n, BH, aj, fr, ct, uE, pM, qN, qW, ai, eh, El, ke, ft, no, Wy, ec, pe, cc, kl, kH, aEB, IG, cU, aaL, dL, wb, ux, dd, ey, vx, aDp, wo, aqi, A, sp, EU, fJ, Ff, ge, fe, aq, aGq, cM, ar, kT, iO, RB, W, Pa, bP, dB, hk, GC, wk, JM, at, E, apY, uz, va, eo, Pr, B, fl, ayV, aMk, L, bL, Dw, fM, eR, DD, fG, yk, jx, rf, aA, cR, cz, fF, hy, j, v, C, ze, bX, hz, V, pd, q, J, eA, zT, mP, nv, nX, jZ, yg, aT, yu, cy, jj, bq, aFm, ae, af, eu, bA, wr, iU, nO, aOK, oV, Y, aBg, r, afq, lo, aDm, en, wA, t, pb, ck, sS, OW, Dy, c, ac, bMZ, aQd, hc, nM, iM, iQ, IV, hO, mf, rK, dy, fD, bt, ao, hS, hi, kh, wi, qb, dM, df, axd, jN, rl, iW, jh, auq, bS, dG, jE, eq, ad, hX, bwf, dP, hd, ib, h, ds, oW, LA, hD, vc, JK, ji, jo, NM, vO, yF, sj, uQ, uX, d, BN, IR, je, cH, cW, KS, eH, ff, cr, rM, dN, anQ, eZ, aF, hp, S, Fq, iV, Z, iR, BG, bz, DF, eK, TA, es, D, gk, Bv, bMX, zr, axs, yE, bE, atM, amS, X, aDB, aS, XO, ei, oQ, GF, y, vt, ne, hv, pC); #c1(ICAM2) c2(NP_001093259) c3(intercellular adhesion molecule 2 precursor) c4(40209) c5(40210, 40211, 40212, 40213, 40214, 40215, 40216, 40217, 40218, 40219, 40220, 40221, 40222, 40223, 40224, 40225, 40226, 40227, 40228, 40229, 40230, 40231) c6( ) c7(T, aE, Cj, ff, bm, aA, h, fd, aF, en, iV, XB); #c1(ICAM3) c2(NP_002153) c3(intercellular adhesion molecule 3 precursor) c4(125991) c5(125992, 125993, 125994, 125995, 125996, 125997, 125998, 125999) c6( ) c7(xR, if, ht, jx, wc, jh, h, qN, hu, y, be); #c1(ICAM4) c2(NP_001034221) c3(intercellular adhesion molecule 4 isoform 3 precursor) c4(31606) c5(31607, 31608, 31609, 31610, 31611, 31612) c6( ) c7(bL, qb, aW, bNa, jx, eZ, aT, fd, ta, ae, ad); #c1(ICAM4) c2(NP_001535) c3(intercellular adhesion molecule 4 isoform 1 precursor) c4(118680) c5(118681, 118682, 118683, 118684, 118685, 118686, 118687) c6( ) c7(bL, qb, aW, bNa, jx, eZ, aT, fd, ta, ae, ad); #c1(ICAM4) c2(NP_071772) c3(intercellular adhesion molecule 4 isoform 2 precursor) c4(212036) c5(212037, 212038, 212039, 212040, 212041) c6( ) c7(bL, qb, aW, bNa, jx, eZ, aT, fd, ta, ae, ad); #c1(ICAM5) c2(NP_003250) c3(intercellular adhesion molecule 5 precursor) c4(136820) c5(136821, 136822, 136823, 136824, 136825, 136826) c6( ) c7(T, aW, ff, jx, qK, eZ, aT, fd, hy, ci, en, ae, ad); #c1(ICE1) c2(NP_056140) c3(little elongation complex subunit 1) c4(185909) c5(185910, 185911, 185912, 185913, 185914, 185915) c6( ) c7(j, cz); #c1(ICE2) c2(NP_001263314) c3(little elongation complex subunit 2 isoform c) c4( ) c5(97175, 97176, 97177, 97178, 97179, 97180, 97181, 97182, 97183, 97184, 97185, 97186, 97187, 97188, 97189, 97190, 97191, 97192, 97193, 97194, 97195, 97196, 97197, 97198) c6( ) c7(cu); #c1(ICE2) c2(NP_078887) c3(little elongation complex subunit 2 isoform a) c4(215915, 215916, 215917, 215918, 215919, 215920) c5(215921, 215922, 215923, 215924, 215925, 215926, 215927, 215928, 215929, 215930, 215931, 215932) c6( ) c7(cu); #c1(ICK) c2(NP_057597) c3(serine/threonine-protein kinase ICK) c4(191547) c5(191548, 191549, 191550, 191551, 191552, 191553, 191554, 191555, 191556, 191557) c6( ) c7(T, jh, fd, bB, n, eA, eW, x, aE, kH, h, aT, K, bNb, Uf, d, Y, alJ, kp, bz, dB, bE, cj, k, MC, bt); #c1(ICMT) c2(XP_011539442) c3(protein-S-isoprenylcysteine O-methyltransferase isoform X1) c4( ) c5(337612, 337613, 337614, 337615, 337616) c6( ) c7(T, Ip, eH, kp, ey, ei, eF); #c1(ICOS) c2(NP_036224) c3(inducible T-cell costimulator precursor) c4(172439, 172440) c5(172441, 172442, 172443, 172444, 172445, 172446, 172447, 172448, 172449, 172450, 172451, 172452) c6( ) c7(bM, T, dD, dA, fR, aEj, ea, iW, jx, jh, wV, oH, aFF, bX, eq, Jx, qN, abC, V, mC, qW, Oe, xy, afm, qh, aT, hD, ji, be, yF, sj, qw, hM, A, Gw, aW, sp, bNc, Oj, Y, IC, awv, mQ, eZ, lo, hp, eE, jT, cM, Wt, IY, cT, W, hr, cj, fL, y, zA, cn); #c1(ICOSLG) c2(NP_001269979) c3(ICOS ligand isoform b precursor) c4(103342) c5(103343, 103344, 103345, 103346, 103347) c6( ) c7(Kd, bM, aA, wV, eA, cF, Dq, Nr, A, Y, ge, fe, po, aF, hp, iV, aaO, Wt, Nq, ck, Bv, OW, y, bt); #c1(ICOSLG) c2(NP_001269980) c3(ICOS ligand isoform c precursor) c4(103348) c5(103349, 103350, 103351, 103352, 103353, 103354) c6( ) c7(Kd, bM, aA, wV, eA, cF, Dq, Nr, A, Y, ge, fe, po, aF, hp, iV, aaO, Wt, Nq, ck, Bv, OW, y, bt); #c1(ID1) c2(NP_002156) c3(DNA-binding protein inhibitor ID-1 isoform a) c4(126039) c5(126040, 126041, 126042, 126043, 126044, 126045, 126046) c6( ) c7(bL, gh, T, aC, fG, if, ht, aA, cz, fd, j, ci, qN, zP, AO, eA, ad, eJ, hd, aE, nv, qK, aT, hD, dL, jj, bq, ae, eL, aW, Y, ff, cr, aF, yq, en, g, hJ, t, bz, ck, Qi, nM, eM, nB, dy, m, IC, iu); #c1(ID1) c2(NP_851998) c3(DNA-binding protein inhibitor ID-1 isoform b) c4(254769) c5(254770, 254771, 254772, 254773, 254774, 254775) cG( ) c7(bL, gh, T, aC, fG, if, ht, aA, cz, fd, j, ci, qN, zP, AO, eA, ad, eJ, hd, aE, nv, qK, aT, hD, dL, jj, bq, ae, eL, aW, Y, ff, cr, aF, yq, en, g, hJ, t, bz, ck, Qi, nM, eM, nB, dy, m, IC, iu); #c1(ID2) c2(NP_002157) c3(DNA-binding protein inhibitor ID-2) c4(126047) c5(126048, 126049, 126050, 126051, 126052, 126053, 126054, 126055, 126056, 126057, 126058, 126059, 126060, 126061, 126062, 126063) c6( ) c7(T, fM, eR, eX, cz, fd, hz, ci, aY, tK, eA, ad, av, ju, eV, IQ, jj, dQ, ae, A, ff, fQ, sm, en, t, cm, Qi, bP, bE, vy, m, Pk, bt, B); #c1(ID4) c2(NP_001537) c3(DNA-binding protein inhibitor ID-4) c4(118688) c5(118689, 118690, 118691, 118692, 118693, 118694, 118695) c6( ) c7(T, auW, oe, jh, aA, n, ci, zP, q, ad, eA, yt, aT, dL, IQ, ae, eL, bA, zQ, d, bNd, aW, ff, cr, r, aF, en, g, t, ck, Qi, dB, cj, m, k, bt); #c1(IDE) c2(NP_001159418) c3(insulin-degrading enzyme isoform 2) c4(63984) c5(63985, 63986, 63987, 63988, 63989) c6( ) c7(bL, aZ, cz, ti, aj, dG, v, fK, J, jy, an, H, af, kl, A, cm, t, mg, mf, R, ei, L); #c1(IDE) c2(NP_004960) c3(insulin-degrading enzyme isoform 1) c4(151492) c5(151493, 151494, 151495, 151496, 151497, 151498, 151499) c6( ) c7(bL, aZ, cz, ti, aj, dG, v, fK, J, jy, an, H, af, kl, A, cm, t, mg, mf, R, ei, L); #c1(IDE) c2(XP_005269823) c3(insulin-degrading enzyme isoform X1) c4(282891) c5( ) c6( ) c7(bL, aZ, cz, ti, aj, dG, v, fK, J, jy, an, H, af, kl, A, cm, t, mg, mf, R, ei, L); #c1(IDE) c2(XP_005269826) c3(insulin-degrading enzyme isoform X2) c4( ) c5(282892, 282893, 282894, 282895, 282896, 282897) c6( ) c7(bL, aZ, cz, ti, aj, dG, v, fK, J, jy, an, H, af, kl, A, cm, t, mg, mf, R, ei, L); #c1(IDH1) c2(NP_001269315) c3(isocitrate dehydrogenase [NADP] cytoplasmic) c4(101082, 101083, 101084, 101085) c5(101086, 101087, 101088, 101089, 101090, 101091, 101092, 101093, 101094, 101095, 101096, 101097, 101098, 101099, 101100, 101101, 101102, 101103, 101104, 101105, 101106, 101107, 101108, 101109, 101110, 101111, 101112, 101113, 101114, 101115, 101116, 101117) c6( ) c7(T, aC, bB, ci, bNe, x, ajv, K, eG, aW, nY, g, as, eF, bw, aHd, bEu, qJ, eM, nB, iT, k, ym, bcW, Wx, Uc, qy, n, oY, br, Mo, jz, h, he, Lg, fe, aq, pm, cM, fs, Yr, auC, oU, bNg, aul, dB, hk, ajn, pg, anx, WL, B, bzl, q, eA, aT, dz, jj, bcV, jf, Uf, iU, Y, auc, bEc, r, qL, gm, ck, QG, nM, im, bt, On, Mb, kh, iW, ha, bkL, jh, auq, hF, Fc, bNf, ad, Jm, av, iC, hd, fX, Rq, Db, Ot, d, aJK, dq, Vl, iV, iR, Hp, pc, bE, blu, Fk, jr); #c1(IDH2) c2(NP_001276839) c3(isocitrate dehydrogenase [NADP], mitochondrial isoform 2) c4( ) c5(108452, 108453, 108454, 108455, 108456, 108457) c6( ) c7(nZ, bcU, T, kh, dD, Mb, ea, e, qy, jh, n, oY, eq, ci, hF, Fc, eA, hr, Jm, av, Mo, hd, jz, x, cc, Ot, dz, K, jj, bcV, aJu, Lg, bA, Uf, d, alJ, iU, Y, auc, xs, aRO, bEc, nY, fe, dq, aq, gm, Vl, g, as, eF, iR, cM, fs, Yr, nC, pm, Hp, ck, bw, pc, GU, nB, dB, hk, iT, blu, mx, pg, Fk, k, anx, bt, bcW, B, jr); #c1(IDH2) c2(NP_001277043) c3(isocitrate dehydrogenase [NADP], mitochondrial isoform 3) c4( ) c5(108991, 108992, 108993, 108994, 108995) cG( ) c7(nZ, bcU, T, kh, dD, Mb, ea, e, qy, jh, n, oY, eq, ci, hF, Fc, eA, hr, Jm, av, Mo, hd, jz, x, cc, Ot, dz, K, jj, bcV, aJu, Lg, bA, Uf, d, alJ, iU, Y, auc, xs, aRO, bEc, nY, fe, dq, aq, gm, VI, g, as, eF, iR, cM, fs, Yr, nC, pm, Hp, ck, bw, pc, GU, nB, dB, hk, iT, blu, mx, pg, Fk, k, anx, bt, bcW, B, jr); #c1(IDH2) c2(NP_002159) c3(isocitrate dehydrogenase [NADP], mitochondrial isoform 1 precursor) c4(126064, 126065, 126066) c5(126067, 126068, 126069, 126070, 126071, 126072, 126073) c6( ) c7(nZ, bcU, T, kh, dD, Mb, ea, e, qy, jh, n, oY, eq, ci, hF, Fc, eA, hr, Jm, av, Mo, hd, jz, x, cc, Ot, dz, K, jj, bcV, aJu, Lg, bA, Uf, d, alJ, iU, Y, auc, xs, aRO, bEc, nY, fe, dq, aq, gm, VI, g, as, eF, iR, cM, fs, Yr, nC, pm, Hp, ck, bw, pc, GU, nB, dB, hk, iT, blu, mx, pg, Fk, k, anx, bt, bcW, B, jr); #c1(IDH3B) c2(NP_001245313) c3(isocitrate dehydrogenase [NAD] subunit beta, mitochondrial isoform d) c4( ) c5(93103, 93104, 93105, 93106, 93107, 93108) c6( ) c7(nC, bNh, aA); #c1(IDH3B) c2(NP_008830) c3(isocitrate dehydrogenase [NAD] subunit beta, mitochondrial isoform a precursor) c4(168888) c5(168889, 168890, 168891, 168892, 168893, 168894, 168895, 168896, 168897, 168898, 168899) c6( ) c7(nC, bNh, aA); #c1(IDH3B) c2(NP_777280) c3(isocitrate dehydrogenase [NAD] subunit beta, mitochondrial isoform b precursor) c4(251080) c5(251081, 251082, 251083, 251084, 251085, 251086) c6( ) c7(nC, bNh, aA); #c1(IDH3B) c2(XP_005260773) c3(isocitrate dehydrogenase [NAD] subunit beta, mitochondrial isoform X1) c4(276868, 276869) c5(276870) c6( ) c7(nC, bNh, aA); #c1(IDNK) c2(NP_001001551) c3(probable gluconokinase isoform 1) c4(18677, 18678, 18679) c5(18680, 18681, 18682, 18683, 18684, 18685, 18686, 18687, 18688, 18689, 18690, 18691) c6( ) c7(cz); #c1(IDNK) c2(XP_006717173) c3(probable gluconokinase isoform X3) c4(290784) c5(290785, 290786, 290787, 290788, 290789, 290790) c6( ) c7(cz); #c1(IDNK) c2(XP_006717174) c3(probable gluconokinase isoform X2) c4( ) c5(290791) c6( ) c7(cz); #c1(IDNK) c2(XP_011517002) c3(probable gluconokinase isoform X1) c4( ) c5(310487, 310488, 310489, 310490, 310491) c6( ) c7(cz); #c1(IDO1) c2(NP_002155) c3(indoleamine 2,3-dioxygenase 1) c4(126007, 126008, 126009, 126010) c5(126011, 126012, 126013, 126014, 126015, 126016, 126017, 126018, 126019, 126020, 126021, 126022, 126023, 126024, 126025, 126026, 126027, 126028, 126029, 126030, 126031, 126032, 126033, 126034, 126035, 126036, 126037, 126038) c6( ) c7(T, fR, aPJ, iW, jx, eh, bB, bS, gf, ct, fr, kO, pK, V, eh, dP, hd, F, xE, ds, aT, h, ji, K, be, aW, az, fe, CQ, iV, Z, t, uC, bz, iP, bJz, aDN, es, iA, nB, bE, NL, go, U, bko, m, xh, fy, bt, it, B, y); #c1(ID02) c2(NP_919270) c3(indoleamine 2,3-dioxygenase 2) c4(258382, 258383) c5(258384, 258385, 258386, 258387, 258388, 258389, 258390, 258391, 258392, 258393, 258394, 258395) c6( ) c7(T, aC, fr, aE, BA); #c1(IDS) c2(NP_000193) c3(iduronate 2-sulfatase isoform a preproprotein) c4(4285, 4286, 4287) c5(4288, 4289, 4290, 4291, 4292, 4293, 4294, 4295, 4296, 4297) c6(4298, 4299, 4300) c7(cZ, wM, afm, kg, bNi, aW, xz, bmE, cV, aT, dr, n, agG, gf, Lq, ade, Ku, dd, EZ, ajM, jr); #c1(IDS) c2(NP_001160022) c3(iduronate 2-sulfatase isoform c) c4( ) c5(65036, 65037, 65038, 65039, 65040, 65041, 65042, 65043, 65044, 65045, 65046, 65047, 65048, 65049, 65050, 65051, 65052) c6(65053, 65054, 65055, 65056) c7(cZ, wM, afm, kg, bNi, aW, xz, bmE, cV, aT, dr, n, agG, gf, Lq, ade, Ku, dd, EZ, ajM, jr); #c1(IDS) c2(NP_006114) c3(iduronate 2-sulfatase isoform b precursor) c4(162145, 162146, 162147, 162148) c5(162149, 162150, 162151, 162152, 162153, 162154, 162155, 162156, 162157, 162158, 162159, 162160, 162161, 162162, 162163, 162164, 162165, 162166, 162167, 162168, 162169, 162170, 162171, 162172, 162173, 162174, 162175, 162176, 162177, 162178, 162179, 162180) c6(162181, 162182, 162183, 162184, 162185, 162186, 162187) c7(cZ, wM, afm, kg, bNi, aW, xz, bmE, cV, aT, dr, n, agG, gf, Lq, ade, Ku, dd, EZ, ajM, jr); #c1(IDUA) c2(NP_000194) c3(alpha-L-iduronidase precursor) c4(4301) c5(4302, 4303, 4304, 4305, 4306, 4307, 4308, 4309, 4310, 4311, 4312, 4313, 4314, 4315, 4316, 4317, 4318, 4319, 4320, 4321, 4322, 4323, 4324, 4325, 4326, 4327, 4328, 4329, 4330, 4331, 4332, 4333, 4334, 4335, 4336, 4337, 4338, 4339, 4340, 4341, 4342, 4343, 4344, 4345, 4346, 4347, 4348, 4349, 4350, 4351, 4352, 4353, 4354, 4355, 4356, 4357, 4358, 4359, 4360, 4361, 4362, 4363, 4364, 4365, 4366, 4367, 4368, 4369, 4370, 4371, 4372, 4373, 4374, 4375, 4376, 4377, 4378, 4379, 4380, 4381, 4382, 4383, 4384, 4385, 4386, 4387, 4388, 4389, 4390, 4391, 4392, 4393, 4394, 4395, 4396, 4397) c6(4398, 4399, 4400) c7(T, aaH, aA, nA, Rc, aLl, IE, hb, oW, aT, bNj, K, af, MG, d, Y, dq, kp, aF, iK, DL, dr, rR, kg, aBU, vy, gZ, Lq, aS, ati, IM, wS); #c1(IDUA) c2(XP_011511761) c3(alpha-L-iduronidase isoform X1) c4(302457) c5(302458, 302459, 302460, 302461, 302462, 302463, 302464, 302465, 302466) c6(302467, 302468) c7(T, aaH, aA, nA, Rc, aLl, IE, hb, oW, aT, bNj, K, af, MG, d, Y, dq, kp, aF, iK, DL, dr, rR, kg, aBU, vy, gZ, Lq, aS, ati, IM, wS); #c1(IDUA) c2(XP_011511765) c3(alpha-L-iduronidase isoform X4) c4( ) c5(302469) cG( ) c7(T, aaH, aA, nA, Rc, aLl, IE, hb, oW, aT, bNj, K, af, MG, d, Y, dq, kp, aF, iK, DL, dr, rR, kg, aBU, vy, gZ, Lq, aS, ati, IM, wS); #c1(IER2) c2(NP_004898) c3(immediate early response gene 2 protein) c4(150637) c5(150638, 150639, 150640, 150641, 150642, 150643, 150644) c6( ) c7(T); #c1(IER3) c2(NP_003888) c3(radiation-inducible immediate-early gene IEX-1) c4(141837, 141838, 141839, 141840) c5(141841, 141842, 141843, 141844, 141845, 141846, 141847, 141848, 141849, 141850, 141851, 141852, 141853, 141854, 141855, 141856, 141857, 141858, 141859, 141860, 141861, 141862, 141863, 141864, 141865, 141866, 141867, 141868, 141869, 141870, 141871, 141872, 141873, 141874, 141875, 141876, 141877, 141878, 141879, 141880, 141881, 141882, 141883, 141884, 141885, 141886, 141887, 141888, 141889, 141890, 141891, 141892, 141893, 141894) c6( ) c7(T, aC, dA, fR, aA, cz, fd, V, q, mC, eA, aE, aT, ji, K, IQ, jj, hH, Jl, aW, cr, r, eZ, aq, fe, aF, iR, bw, ck, eU, aDs, k, fL, Pk); #c1(IER3IP1) c2(NP_057181) c3(immediate early response 3-interacting protein 1 precursor) c4(189326) c5(189327, 189328, 189329, 189330, 189331, 189332) c6( ) c7(mh, ha, aj, bNl, K, bNk, J); #c1(IER5) c2(NP_057629) c3(immediate early response gene 5 protein) c4(191962, 191963) c5(191964, 191965, 191966, 191967, 191968, 191969, 191970, 191971, 191972, 191973, 191974, 191975, 191976, 191977, 191978, 191979) c6( ) c7(bjW, bt, oe); #c1(IFFO1) c2(NP_001034759) c3(intermediate filament family orphan 1 isoform 4) c4(32263, 32264) c5(32265, 32266, 32267, 32268, 32269, 32270, 32271) c6( ) c7(t, m); #c1(IFFO1) c2(NP_542768) c3(intermediate filament family orphan 1 isoform 2) c4(233029, 233030) c5(233031, 233032, 233033, 233034, 233035, 233036) c6( ) c7(t, m); #c1(IFFO1) c2(XP_006719040) c3(intermediate filament family orphan 1 isoform X10) c4(292184) c5(292185, 292186, 292187, 292188, 292189, 292190) c6( ) c7(t, m); #c1(IFFO1) c2(XP_006719044) c3(intermediate filament family orphan 1 isoform X13) c4( ) c5(292191, 292192, 292193, 292194, 292195, 292196, 292197, 292198, 292199, 292200, 292201) c6( ) c7(t, m); #c1(IFF02) c2(XP_011538932) c3(intermediate filament family orphan 2 isoform X1) c4(337014) c5(337015, 337016, 337017, 337018, 337019, 337020) c6( ) c7(ac); #c1(IFI16) c2(NP_001193496) c3(gamma-interferon-inducible protein 16 isoform 1) c4(82231) c5(82232, 82233, 82234, 82235, 82236, 82237, 82238) c6( ) c7(T, kh, fR, bcE, ci, V, mC, er, ad, eW, nv, aT, h, IM, ae, aW, ff, eH, eZ, lo, en, eF, t, iK, iT, fL); #c1(IFI16) c2(NP_005522) c3(gamma-interferen-inducible protein 16 isoform 2) c4(157069) c5(157070, 157071, 157072, 157073, 157074, 157075, 157076, 157077, 157078, 157079) c6( ) c7(T, kh, fR, bcE, ci, V, mC, er, ad, eW, nv, aT, h, IM, ae, aW, ff, eH, eZ, lo, en, eF, t, iK, iT, fL); #c1(IFI16) c2(XP_005245184) c3(gamma-interferon-inducible protein 16 isoform X1) c4(266341, 266342) c5(266343, 266344, 266345, 266346, 266347, 266348) c6( ) c7(T, kh, fR, bcE, ci, V, mC, er, ad, eW, nv, aT, h, IM, ae, aW, ff, eH, eZ, lo, en, eF, t, iK, iT, fL); #c1(IFI16) c2(XP_006711353) c3(gamma-interferon-inducible protein 16 isoform X2) c4(285901, 285902, 285903, 285904) c5(285905, 285906, 285907, 285908, 285909, 285910, 285911, 285912, 285913, 285914, 285915, 285916, 285917, 285918, 285919, 285920, 285921, 285922, 285923, 285924, 285925, 285926, 285927, 285928, 285929, 285930, 285931, 285932, 285933, 285934) c6( ) c7(T, kh, fR, bcE, ci, V, mC, er, ad, eW, nv, aT, h, IM, ae, aW, ff, eH, eZ, lo, en, eF, t, iK, iT, fL); #c1(IFI27) c2(NP_001275885) c3(interferon alpha-inducible protein 27, mitochondrial isoform 1) c4(107283, 107284) c5(107285, 107286, 107287, 107288, 107289, 107290, 107291, 107292, 107293, 107294, 107295, 107296) c6( ) c7(T, ea, if, fd, bB, ci, aE, il, Qk, K, eL, be, xQ, yo, aW, as, cm, bw, GR, eM, nB, dc, go, vA, cj, m, dD, NT, fN, n, fr, qN, jz, cU, h, dL, aDp, ge, aq, zZ, iO, bP, hR, it, B, Dw, fM, aoE, jx, aA, C, q, eA, XX, aT, dz, ae, af, jf, s, iU, Y, r, en, cl, t, iK, aEp, ck, nM, iM, dy, bt, On, hS, hi, Ke, pY, jh, eq, ad, hX, hd, F, ib, ds, fb, d, je, et, ff, cr, apb, aF, bz, bE, aS, EB); #c1(IFI27) c2(NP_001275924) c3(interferon alpha-inducible protein 27, mitochondrial isoform 2) c4(107376, 107377, 107378, 107379, 107380) c5(107381, 107382, 107383, 107384, 107385, 107386, 107387, 107388, 107389, 107390, 107391, 107392, 107393, 107394, 107395, 107396, 107397, 107398, 107399, 107400, 107401, 107402, 107403, 107404, 107405, 107406, 107407, 107408, 107409, 107410, 107411, 107412, 107413, 107414) c6( ) c7(T, ea, if, fd, bB, ci, aE, il, Qk, K, eL, bc, xQ, yo, aW, as, cm, bw, GR, eM, nB, dc, go, vA, cj, m, dD, NT, fN, n, fr, qN, jz, cU, h, dL, aDp, ge, aq, zZ, iO, bP, hR, it, B, Dw, fM, aoE, jx, aA, C, q, eA, XX, aT, dz, ae, af, jf, s, iU, Y, r, en, cl, t, iK, aEp, ck, nM, iM, dy, bt, On, hS, hl, Ke, pY, jh, eq, ad, hX, hd, F, ib, ds, fb, d, je, et, ff, cr, apb, aF, bz, bE, aS, EB); #c1(IFI30) c2(NP_006323) c3(gamma-interferon-inducible lysosomal thiol reductase preproprotein) c4(164033) c5(164034, 164035, 164036, 164037, 164038, 164039) c6( ) c7(gk, sS, Y, e, al, fJ, bcP, aj, dG, v, ei, bt, J); #c1(IFI35) c2(NP_005524) c3(interferon-induced 35 kDa protein) c4(157080) c5(157081, 157082, 157083, 157084, 157085, 157086) c6( ) c7(ds, t, lo, y, afu); #c1(IFI35) c2(XP_005257359) c3(interferon-induced 35 kDa protein isoform X1) c4(275068) c5(275069, 275070, 275071, 275072, 275073, 275074) c6( ) c7(ds, t, lo, y, afu); #c1(IFI44) c2(XP_011538818) c3(interferon-induced protein 44 isoform X1) c4(336777, 336778, 336779) c5(336780, 336781, 336782, 336783, 336784, 336785) c6( ) c7(Dw, G, T, F, dA, wu, ds, au, jx, kf, n, h, wm, bX, bu, y, ae, ad, VF); #c1(IFI44) c2(XP_011538819) c3(interferon-induced protein 44 isoform X2) c4( ) c5(336786, 336787, 336788, 336789, 336790, 336791) c6( ) c7(Dw, G, T, F, dA, wu, ds, au, jx, kf, n, h, wm, bX, bu, y, ae, ad, VF); #c1(IFIH1) c2(NP_071451) c3(interferon-induced helicase C domain-containing protein 1) c4(211764, 211765) c5(211766, 211767, 211768, 211769, 211770, 211771, 211772, 211773, 211774, 211775) c6( ) c7(bL, bM, T, Ez, bNn, fR, lo, aFc, cz, cL, aj, qj, V, mC, q, J, wD, mP, ds, bW, cU, hD, h, K, hK, A, d, qZ, Y, Ib, IC, cr, eZ, dN, aiT, lo, hp, CQ, pm, bNm, IY, aBs, Bv, of, fL, y, B, Ex, aMk); #c1(IFIH1) c2(XP_011509931) c3(interferon-induced helicase C domain-containing protein 1 isoform X2) c4( ) c5(300538, 300539, 300540, 300541, 300542, 300543) c6( ) c7(bL, bM, T, Ez, bNn, fR, lo, aFc, cz, cL, aj, qj, V, mC, q, J, wD, mP, ds, bW, cU, hD, h, K, hK, A, d, qZ, Y, Ib, IC, cr, eZ, dN, aiT, lo, hp, CQ, pm, bNm, IY, aBs, Bv, of, fL, y, B, Ex, aMk); #c1(IFIT1) c2(NP_001257858) c3(interferon-induced protein with tetratricopeptide repeats 1 isoform 3) c4( ) c5(95671, 95672, 95673, 95674, 95675) c6( ) c7(dP, T, Bv, fR, ds, aw, Be, eZ, lo, Xh, as, t); #c1(IFIT1) c2(NP_001539) c3(interferon-induced protein with tetratricopeptide repeats 1 isoform 1) c4(118703, 118704) c5(118705, 118706, 118707, 118708, 118709, 118710, 118711) c6( ) c7(dP, T, Bv, fR, ds, aw, Be, eZ, lo, Xh, as, t); #c1(IFIT2) c2(NP_001538) c3(interferon-induced protein with tetratricopeptide repeats 2) c4(118696) c5(118697, 118698, 118699, 118700, 118701, 118702) c6( ) c7(fR, ds, Y, ff, aiM, cU, lo, ci, en, q); #c1(IFIT3) c2(NP_001276687) c3(interferon-induced protein with tetratricopeptide repeats 3 isoform b) c4( ) c5(108269, 108270, 108271, 108272, 108273, 108274) c6( ) c7(ck, hG, ds, U, aT, eZ, EY, f, nJ); #c1(IFIT3) c2(NP_001540) c3(interferon-induced protein with tetratricopeptide repeats 3 isoform a) c4(118712, 118713) c5(118714, 118715, 118716, 118717, 118718, 118719, 118720, 118721, 118722, 118723, 118724) c6( ) c7(ck, hG, ds, U, aT, eZ, EY, f, nJ); #c1(IFIT5) c2(NP_036552) c3(interferon-induced protein with tetratricopeptide repeats 5) c4(174358, 174359) c5(174360, 174361, 174362, 174363, 174364, 174365, 174366, 174367, 174368, 174369, 174370, 174371) c6( ) c7(ds); #c1(IFITM1) c2(NP_003632) c3(interferon-induced transmembrane protein 1) c4(139724, 139725) c5(139726, 139727, 139728, 139729, 139730, 139731, 139732, 139733, 139734, 139735, 139736, 139737, 139738, 139739, 139740, 139741, 139742, 139743, 139744, 139745) c6( ) c7(T, ht, jx, aA, r, Th, aF, g, t, q); #c1(IFITM2) c2(NP_006426) c3(interferon-induced transmembrane protein 2) c4(165119, 165120) c5(165121, 165122, 165123, 165124, 165125, 165126, 165127, 165128, 165129, 165130, 165131, 165132) c6( ) c7(bE, t); #c1(IFITM3) c2(NP_066362) c3(interferon-induced transmembrane protein 3) c4(207211, 207212) c5(207213, 207214, 207215, 207216, 207217, 207218, 207219, 207220, 207221, 207222, 207223, 207224) c6( ) c7(T, s, bE, ds, Y, bB, lo, uA, fD, iV, X, afu); #c1(IFITM5) c2(NP_001020466) c3(interferon-induced transmembrane protein 5) c4(28814) c5(28815, 28816, 28817, 28818, 28819, 28820) c6( ) c7(zp, bNo, zg, bNp); #c1(IFNA1) c2(NP_076918) c3(interferon alpha-1/13 precursor) c4(214226) c5(214227, 214228, 214229, 214230, 214231, 214232, 214233, 214234) c6(214235, 214236) c7(lD, bNu, T, os, bM, aC, fR, ea, al, fd, bB, gf, qj, ci, bh, Jx, aY, x, AW, xy, aE, bW, ajv, dV, Ds, K, hH, pk, eL, aa, ly, aW, bNq, az, hI, zD, asD, aiT, uY, fc, aoD, g, eF, ir, cm, iP, bNr, y, eM, nB, xD, dc, iA, iT, oy, aiM, cj, k, m, gn, hh, NK, Ez, dD, aiK, gp, Or, yG, bzb, fN, n, aj, oY, fr, ct, apt, kO, qW, ai, eh, eW, BI, ft, zw, pe, rC, gd, cU, h, hn, dL, OM, cY, afu, Nr, mR, A, lb, aJG, fQ, aq, po, kp, yq, CQ, pm, Ca, kk, bNw, Ix, Wt, NL, hk, hR, uz, pg, eo, fL, bkE, Pr, B, it, Dw, aoT, fM, dA, eR, jx, aA, v, j, ON, bX, V, q, J, eA, zn, eJ, EB, XX, bNv, Ig, Vr, jZ, rS, aCV, aT, cy, dz, qG, ae, VC, hM, Uf, iU, nO, Y, ev, r, lo, aDm, en, t, f, iK, awi, bNt, pb, ck, cT, sS, iM, Dy, iQ, AH, bdP, wR, Da, dy, yH, bt, ao, bNx, vi, hS, Kd, ra, BD, bxK, uG, bNs, jh, oZ, bS, eq, jE, Fb, wV, bkM, hF, ase, mC, ad, hX, qC, av, hd, F, ib, Rq, afm, Ot, ds, IC, oW, Os, ji, nJ, uQ, atJ, d, bkf, je, ff, wc, gC, eH, cr, kD, eZ, aF, hp, BG, avG, Z, iR, iV, bz, Nq, es, gk, Bv, pc, bE, z, ag, aKC, bNy, dX, XO, rH, cP, aEN, hE, xg, Ex, pC); #c1(IFNA10) c2(NP_002162) c3(interferon alpha-10 precursor) c4(126096) c5(126097, 126098, 126099, 126100, 126101, 126102, 126103, 126104) c6(126105, 126106) c7(hk, Y, vB, vi); #c1(IFNA13) c2(NP_008831) c3(interferon alpha-1/13 precursor) c4(168900) c5(168901, 168902, 168903, 168904, 168905, 168906, 168907, 168908) c6(168909, 168910) c7(lD, bNu, T, os, bM, ea, al, fd, bB, gf, qj, ci, bh, Jx, aY, x, AW, xy, aE, bW, ajv, dV, Ds, K, hH, pk, eL, aa, ly, aW, bNq, az, hI, zD, asD, aiT, uY, fc, aoD, g, eF, ir, cm, iP, bNr, y, eM, nB, xD, dc, iA, iT, oy, aiM, cj, Dt, k, m, gn, hh, NK, Ez, dD, aiK, gp, Or, yG, bzb, n, aj, oY, fr, ct, apt, kO, qW, ai, eh, eW, BL, ft, zw, pe, rC, gd, cU, h, hn, dL, OM, cY, afu, Nr, mR, A, lb, aq, po, kp, yq, CQ, pm, Ca, kk, lx, Wt, NL, hR, uz, pg, eo, fL, bkE, Pr, B, it, Dw, aoT, fM, dA, eR, jx, aA, v, j, ON, bX, V, q, J, eA, zn, eJ, EB, XX, bNv, Ig, Vr, jZ, rS, aCV, aT, cy, dz, qG, ae, VC, hM, Uf, iU, nO, Y, ev, r, lo, aDm, en, t, f, iK, awi, bNt, pb, ck, cT, sS, iM, Dy, AH, bdP, wR, Da, dy, yH, bt, ao, vi, hS, Kd, BD, bxK, uG, bNs, jh, oZ, bS, eq, jE, Fb, wV, bkM, hF, ase, mC, ad, hX, qC, av, hd, F, ib, Rq, afm, Ot, ds, IC, oW, Os, ji, nJ, uQ, atJ, d, bkf, je, ff, wc, gC, eH, cr, kD, eZ, aF, hp, BG, avG, Z, iR, iV, bz, Nq, es, gk, Bv, pc, bE, z, ag, aKC, bNy, dX, XO, rH, cP, aEN, hE, xg, Ex, pC); #c1(IFNA14) c2(NP_002163) c3(interferon alpha-14 precursor) c4(126107) c5(126108, 126109, 126110, 126111, 126112, 126113, 126114, 126115) c6(126116, 126117) c7(ck, Dw, bM, hk, Y, Ds, vi); #c1(IFNA16) c2(NP_002164) c3(interferon alpha-16 precursor) c4(126118) c5(126119, 126120, 126121, 126122, 126123, 126124, 126125, 126126) c6(126127, 126128) c7(hk, Y); #c1(IFNA17) c2(NP_067091) c3(interferon alpha-17 precursor) c4(208960) c5(208961, 208962, 208963, 208964, 208965, 208966, 208967, 208968) c6(208969, 208970) c7(T, if, jx, bkM, qN, V, av, Rq, vB, eL, uQ, d, iU, nO, Y, ff, eZ, lo, en, g, t, hk, hR, m, bkE, it, cn, hS); #c1(IFNA2) c2(NP_000596) c3(interferon alpha-2 precursor) c4(13535) c5(13536, 13537, 13538, 13539, 13540, 13541, 13542, 13543, 13544, 13545, 13546, 13547, 13548, 13549, 13550, 13551, 13552, 13553, 13554, 13555, 13556, 13557, 13558, 13559, 13560, 13561, 13562, 13563, 13564, 13565, 13566, 13567, 13568, 13569, 13570, 13571, 13572, 13573, 13574, 13575, 13576, 13577, 13578, 13579, 13580, 13581, 13582, 13583, 13584, 13585, 13586, 13587, 13588, 13589, 13590, 13591, 13592, 13593, 13594, 13595, 13596, 13597, 13598, 13599, 13600, 13601, 13602, 13603, 13604, 13605, 13606, 13607, 13608, 13609, 13610, 13611, 13612, 13613, 13614, 13615, 13616, 13617, 13618, 13619, 13620, 13621, 13622, 13623, 13624, 13625, 13626, 13627, 13628, 13629, 13630) c6(13631, 13632, 13633) c7(bM, T, aC, boZ, al, hE, fd, aeu, ip, dV, Ds, aoV, eL, HA, hl, fc, g, eE, cm, bw, bNr, nB, dc, oy, m, Vj, gp, aw, n, fr, ct, qN, cd, qg, aZv, h, eV, dL, DU, he, A, bNA, bep, fQ, pm, hq, hk, uw, hR, E, pg, bkE, it, B, Dw, jx, eX, C, XX, Vr, aCV, ae, VC, iU, nO, Y, lo, en, t, vk, bNB, BU, rR, iM, hc, gX, fP, hS, vi, gV, uq, id, iW, bNz, bkM, ah, jE, hF, ad, hX, qC, av, F, Rq, qh, oW, hD, IQ, uQ, d, IR, je, hG, et, ff, eZ, kD, S, avG, gk, pc, aKC, IG, EB); #c1(IFNA21) c2(NP_002166) c3(interferon alpha-21 precursor) c4(126129) c5(126130, 126131, 126132, 126133, 126134, 126135, 126136, 126137) c6(126138, 126139) c7(hk, Y, jx, cF); #c1(IFNA4) c2(NP_066546) c3(interferon alpha-4 precursor) c4(207333) c5(207334, 207335, 207336, 207337, 207338, 207339, 207340, 207341) c6(207342, 207343) c7(F, fR, vi); #c1(IFNA5) c2(NP_002160) c3(interferon alpha-5 precursor) c4(126074) c5(126075, 126076, 126077, 126078, 126079, 126080, 126081, 126082) c6(126083, 126084) c7(Dw, aC, Ig, hk, Y, jx, eZ, aq, jE, aDp, B, vi); #c1(IFNA6) c2(NP_066282) c3(interferon alpha-6 precursor) c4(206963) c5(206964, 206965, 206966, 206967, 206968, 206969, 206970, 206971) c6(206972, 206973) c7(bM, Dw, F, hk, ds, Y, jx, Ds, vi); #c1(IFNA7) c2(NP_066401) c3(interferon alpha-7 precursor) c4(207308) c5(207309, 207310, 207311, 207312, 207313, 207314, 207315, 207316) c6(207317, 207318) c7(vi); #c1(IFNA8) c2(NP_002161) c3(interferon alpha-8 precursor) c4(126085) c5(126086, 126087, 126088, 126089, 126090, 126091, 126092, 126093) c6(126094, 126095) c7(bM, Dw, hk, Y, oW, Ds, vi); #c1(IFNAR1) c2(NP_000620) c3(interferon alpha/beta receptor 1 precursor) c4(14000, 14001, 14002) c5(14003, 14004, 14005, 14006, 14007, 14008, 14009, 14010, 14011, 14012, 14013, 14014, 14015, 14016, 14017, 14018, 14019, 14020) c6( ) c7(lD, gV, bM, Dw, aC, fR, al, jx, aA, bD, fd, amk, Ja, bS, ct, jE, pl, V, eh, mC, q, ai, hX, F, aE, adG, ds, dV, Ds, aAn, adD, Ds, dL, DU, K, h, eL, ly, hG, adF, eZ, r, fe, aq, lo, aF, ir, Z, Rp, f, cm, pb, bNC, lx, hq, iT, AH, dX, dy, fL, bdR, hh, B, bND); #c1(IFNAR2) c2(NP_997467) c3(interferon alpha/beta receptor 2 isoform b) c4(265549) c5(265550, 265551, 265552, 265553, 265554, 265555, 265556, 265557, 265558, 265559, 265560) c6( ) c7(gV, bM, dD, Dw, dA, fR, aC, al, bNE, jx, fd, pl, eq, jE, fr, V, hX, F, aE, Ds, dL, DU, hH, pk, CM, lo, CQ, f, pb, RB, iT, at, Da, Dt, eo, B); #c1(IFNAR2) c2(NP_997468) c3(interferon alpha/beta receptor 2 isoform a) c4(265561) c5(265562, 265563, 265564, 265565, 265566, 265567, 265568, 265569, 265570, 265571) c6( ) c7(gV, bM, dD, Dw, dA, fR, aC, al, bNE, jx, fd, pl, eq, jE, fr, V, hX, F, aE, Ds, dL, DU, hH, pk, CM, lo, CQ, f, pb, RB, iT, at, Da, Dt, eo, B); #c1(IFNB1) c2(NP_002167) c3(interferon beta precursor) c4(126140) c5(126141, 126142, 126143, 126144, 126145, 126146, 126147, 126148, 126149, 126150, 126151, 126152, 126153, 126154, 126155, 126156, 126157, 126158, 126159, 126160, 126161, 126162, 126163, 126164, 126165, 126166, 126167, 126168, 126169, 126170, 126171, 126172, 126173, 126174, 126175, 126176, 126177, 126178, 126179, 126180, 126181, 126182, 126183, 126184, 126185, 126186, 126187, 126188, 126189, 126190, 126191, 126192, 126193, 126194, 126195, 126196, 126197, 126198, 126199, 126200, 126201, 126202, 126203, 126204, 126205, 126206, 126207, 126208, 126209, 126210, 126211, 126212, 126213, 126214, 126215, 126216, 126217, 126218, 126219, 126220, 126221, 126222, 126223, 126224, 126225, 126226, 126227, 126228, 126229, 126230, 126231, 126232, 126233, 126234, 126235) c6(126236, 126237, 126238) c7(oO, bM, T, aC, aEn, fR, if, fd, bB, ci, mF, aJO, x, AW, M, dV, iv, K, cp, akV, bkr, iE, aW, asD, aiT, La, as, cm, y, eM, bNF, aiM, mx, zv, k, m, gn, fN, qy, fr, qN, aOJ, eW, Mo, cU, h, hn, pi, cY, afu, nP, A, aiB, oo, lb, CQ, kk, RB, bP, dB, hk, eD, hL, eo, it, B, dA, jx, aA, v, V, q, eA, Ig, hh, aT, aAn, yu, cy, ae, af, bA, jf, azU, Uf, s, nO, iU, oV, Y, Pg, r, lo, en, cl, t, ck, wg, ac, bxj, Da, bt, vi, Ke, iW, jh, wV, pl, jE, fu, hF, ad, hX, qC, F, ib, aaU, xl, ds, uQ, d, ff, wc, rU, eZ, aF, bz, Bv, bE, agl, hE, Ex); #c1(IFNE) c2(NP_795372) c3(interferon epsilon precursor) c4(252444) c5(252445, 252446, 252447, 252448, 252449, 252450, 252451, 252452) c6(252453, 252454) c7(oO, ac, hk, Y, e, j, on, fq); #c1(IFNG) c2(NP_000610) c3(interferon gamma precursor) c4(13736) c5(13737, 13738, 13739, 13740, 13741, 13742) c6( ) c7(T, os, ea, aHH, bO, fd, ci, aY, bv, azY, xy, aE, dV, Ds, Bi, hu, hH, LG, azh, cp, VF, aa, az, ba, fT, iA, Jr, dc, cj, Dt, k, eg, bhp, aYZ, ht, aj, qW, cd, br, zo, baA, auj, aZv, IG, aNj, ey, bEg, pl, mR, Cw, sp, aRL, fQ, fe, bNY, CQ, adz, iO, dB, bOj, bjx, ajd, abW, aZy, DD, aA, cz, bX, wy, q, zn, bNX, bOc, bNQ, aWc, aCX, bOk, kf, aLM, jj, rz, DX, bf, fO, bg, lo, pb, Cv, ov, cT, pa, OW, iM, iQ, ig, Nk, aXt, tz, bNH, bt, ao, gV, aCA, iW, jh, oZ, dG, ad, afb, aoH, hX, wD, Dq, oW, bj, IQ, qZ, ff, aLI, aZw, Mz, bNZ, Sm, iV, bz, aZz, DF, aDH, Om, anY, aDB, oQ, If, ra, ne, bsJ, oO, bM, xS, qn, qo, bkF, if, e, bOa, bB, cL, bh, sD, Tz, x, fS, azm, bc, akX, eG, hl, bOg, VE, as, aFU, eE, eF, aiv, cm, bw, xD, bmt, Dv, ym, hh, abh, avY, aiu, dD, JZ, akc, yG, n, oY, Mo, b, Xe, Bj, aDa, eV, hn, pi, A, fJ, lb, QP, po, yq, amo, cA, Pa, at, ut, eo, fL, bNT, B, NQ, dA, eX, v, V, aGT, rS, ld, aDt, ae, blm, jf, hM, ev, aFK, afq, acB, bu, t, nC, ck, auT, oX, yH, Gg, bOo, vi, hl, MH, df, wV, eq, qi, bNM, bNN, afm, ds, LA, hD, rN, JK, nJ, Ng, d, je, azX, wc, aFt, CF, dN, aCK, Z, aGj, bOf, dr, aDN, D, gk, Ny, agl, y, kS, hv, pC, aC, fR, al, CH, axk, bNU, qj, IR, Qp, wa, bOI, AW, bOm, bOn, xE, bW, K, wt, DY, dF, eL, bNG, mH, bIP, bOh, axu, asD, mQ, aGQ, aB, g, ve, uC, iP, wT, aik, yl, xK, aDs, aWZ, AM, aer, uo, dW, m, Ro, NK, aFQ, sQ, sw, aw, fN, BH, BF, apt, aBI, pM, aCQ, eh, ft, bKk, kH, cU, aDp, gi, arp, cM, fq, Zj, ar, kT, acC, aZL, mg, hs, gg, bNS, bOe, bNV, Pr, it, L, bOi, fM, fG, jx, j, aYW, pd, eA, J, o, er, XX, lg, hb, bNO, jZ, qG, bq, bNR, xR, bsb, Y, Pg, r, en, zM, aER, bN, QG, aQd, c, hc, wR, bxj, rK, dy, fD, gx, id, bxK, em, bs, auq, bS, pl, EA, OH, hF, ase, dP, bOd, oj, vB, aNp, bNL, ji, NM, asn, IU, eH, cr, hp, Fq, KM, bNW, Nq, Lj, aFb, eB, aEs, aCI, ei, hE, st, EB, boI, aFg, aAx, bvq, mF, fw, aR, iX, Ou, aWf, H, bhm, bat, hm, DA, akV, aW, HA, yd, eM, iT, uJ, zv, gn, jM, aSs, aFc, Bm, fr, ct, qN, kO, alq, aPb, ai, eW, BI, cc, ju, zf, axE, jy, h, dL, Xh, afu, Nr, oo, Cu, bJI, bmu, aCE, aq, kp, mo, Ca, gG, kk, Wt, IX, bm, hR, uz, oh, aDE, aMk, bL, Dw, Ik, eR, dK, rf, bNI, C, ze, aFv, ady, ga, bOb, mP, HC, aT, aSX, an, af, iU, oV, aYp, aDm, Ph, ajF, f, sS, Zg, vZ, IV, bNJ, fP, aYx, mf, aDj, hS, Kd, Ke, Zl, qb, aD, vr, jE, pz, bNK, mC, kL, LH, qC, av, F, ib, oz, Os, jo, yF, uQ, yx, eZ, yy, xv, aF, WJ, LB, es, bhO, eU, zr, atM, bE, z, aS, be, bNP, fh, X); #c1(IFNGR1) c2(NP_000407) c3(interferon gamma receptor 1 precursor) c4(8611, 8612, 8613, 8614) c5(8615, 8616, 8617, 8618, 8619, 8620, 8621, 8622, 8623, 8624, 8625, 8626, 8627, 8628, 8629, 8630, 8631, 8632) c6( ) c7(bM, sY, bOi, T, bOw, fR, fM, dD, Dw, eq, axd, Ju, ht, al, aA, eh, jx, NT, wV, bNV, jE, bOq, bOt, ci, j, EA, eh, mC, st, Qp, hX, dP, cF, F, fS, bOr, dV, aT, h, aDa, cy, dL, bOp, ey, hu, bOu, af, pl, aa, uQ, li, qZ, iU, aW, sp, bg, eZ, kt, fe, aF, aCK, eE, bOv, uC, adz, ba, kT, fT, ig, z, aD, bOs, cj, hs, uz, at, fL, eg, y, bhp, ao, vi); #c1(IFNGR1) c2(XP_011534096) c3(interferon gamma receptor 1 isoform X1) c4(330334, 330335) c5(330336, 330337, 330338, 330339, 330340, 330341, 330342, 330343, 330344, 330345, 330346, 330347, 330348, 330349, 330350, 330351, 330352, 330353) c6( ) c7(bM, sY, bOi, T, bOw, fR, fM, dD, Dw, eq, axd, Ju, ht, al, aA, eb, jx, NT, wV, bNV, jE, bOq, bOt, ci, j, EA, eh, mC, st, Qp, hX, dP, cF, F, fS, bOr, dV, aT, h, aDa, cy, dL, bOp, ey, hu, bOu, af, pl, aa, uQ, li, qZ, iU, aW, sp, bg, eZ, kt, fe, aF, aCK, eE, bOv, uC, adz, ba, kT, fT, ig, z, aD, bOs, cj, hs, uz, at, fL, eg, y, bhp, ao, vi); #c1(IFNGR2) c2(NP_005525) c3(interferon gamma receptor 2 precursor) c4(157087) c5(157088, 157089, 157090, 157091, 157092, 157093) c6( ) c7(bM, sY, dD, Dw, fR, wu, iW, al, NT, aA, wV, j, jE, bX, eq, V, hX, F, aT, Ds, dL, bOp, wm, uQ, aa, A, qZ, iU, aW, sp, ff, eZ, aF, en, uC, kT, ig, z, at, fL, zA, st); #c1(IFNK) c2(NP_064509) c3(interferon kappa precursor) c4(202694) c5(202695, 202696, 202697, 202698, 202699, 202700, 202701, 202702) c6(202703, 202704) c7(c, hk, Y, eZ, qN, y, cd, afu); #c1(IFNL1) c2(NP_742152) c3(interferon lambda-1 precursor) c4(248217) c5(248218, 248219, 248220, 248221, 248222, 248223) c6( ) c7(bM, eW, F, mR, fR, rw, aZv, jx, cr, aq, lo, hE, aYF, NM, B, y, hX); #c1(IFNL2) c2(XP_011525058) c3(interferon lambda-2 isoform X1) c4(319515) c5(319516, 319517, 319518, 319519, 319520, 319521) c6( ) c7(bM, F, id, fR, jx, hl, dL, eL); #c1(IFNL3) c2(NP_742151) c3(interferon lambda-3 precursor) c4( ) c5(248212, 248213, 248214, 248215, 248216) c6( ) c7(bL, Kd, bM, Ke, al, jx, n, aj, v, jE, V, eW, J, aoH, hX, F, no, aZv, oW, h, rB, XI, je, IR, fc, hl, Mz, aiT, dq, lo, byM, eE, cM, iK, gk, cT, BU, W, nb, iM, dc, NL, Gs, bcI, cP, hE, B, EB, vi); #c1(IFNL3) c2(XP_011525059) c3(interferon lambda-3 isoform X1) c4(319522) c5(319523) c6( ) c7(bL, Kd, bM, Ke, al, jx, n, aj, v, jE, V, eW, J, aoH, hX, F, no, aZv, oW, h, rB, XI, je, IR, fc, hl, Mz, aiT, dq, lo, byM, eE, cM, iK, gk, cT, BU, W, nb, iM, dc, NL, Gs, bcI, cP, hE, B, EB, vi); #c1(IFNW1) c2(NP_002168) c3(interferon omega-1 precursor) c4(126239) c5(126240, 126241, 126242, 126243, 126244, 126245) c6( ) c7(hk, Y, A, jx, cF); #c1(IFRD1) c2(NP_001007246) c3(interferon-related developmental regulator 1 isoform 1) c4(22619, 22620, 22621) c5(22622, 22623, 22624, 22625, 22626, 22627, 22628, 22629, 22630, 22631, 22632, 22633, 22634, 22635, 22636, 22637, 22638, 22639, 22640, 22641, 22642) c6( ) c7(eM, j, ci, yb, cd, ao, aa); #c1(IFRD1) c2(NP_001184008) c3(interferon-related developmental regulator 1 isoform 2) c4( ) c5(75246, 75247, 75248, 75249, 75250, 75251, 75252, 75253, 75254, 75255, 75256) c6( ) c7(eM, j, ci, yb, cd, ao, aa); #c1(IFRD1) c2(XP_011514444) c3(interferon-related developmental regulator 1 isoform X1) c4(307134, 307135, 307136) c5(307137, 307138, 307139, 307140, 307141, 307142, 307143, 307144, 307145, 307146) c6( ) c7(eM, j, ci, yb, cd, ao, aa); #c1(IFT122) c2(NP_001267475) c3(intraflagellar transport protein 122 homolog isoform 7) c4( ) c5(99594, 99595, 99596, 99597, 99598) c6( ) c7(arv, ul, aV, Pf, bhD, adv, bvv, bOx, dy, zV, bee, bOy, dr); #c1(IFT122) c2(NP_060732) c3(intraflagellar transport protein 122 homolog isoform 3) c4(197498, 197499, 197500) c5(197501, 197502, 197503, 197504, 197505, 197506, 197507, 197508, 197509, 197510, 197511, 197512, 197513) c6( ) c7(arv, ul, aV, Pf, bhD, adv, bvv, bOx, dy, zV, bee, bOy, dr); #c1(IFT122) c2(NP_443711) c3(intraflagellar transport protein 122 homolog isoform 1) c4(229943) c5(229944, 229945, 229946, 229947, 229948, 229949) c6( ) c7(arv, ul, aV, Pf, bhD, adv, bvv, bOx, dy, zV, bee, bOy, dr); #c1(IFT122) c2(NP_443715) c3(intraflagellar transport protein 122 homolog isoform 2) c4(229969, 229970) c5(229971, 229972, 229973, 229974, 229975, 229976, 229977, 229978, 229979, 229980, 229981, 229982) c6( ) c7(arv, ul, aV, Pf, bhD, adv, bvv, bOx, dy, zV, bee, bOy, dr); #c1(IFT122) c2(NP_443716) c3(intraflagellar transport protein 122 homolog isoform 4) c4(229983, 229984, 229985) c5(229986, 229987, 229988, 229989, 229990, 229991, 229992, 229993, 229994, 229995, 229996, 229997, 229998, 229999, 230000, 230001, 230002, 230003) c6( ) c7(arv, ul, aV, Pf, bhD, adv, bvv, bOx, dy, zV, bee, bOy, dr); #c1(IFT140) c2(NP_055529) c3(intraflagellar transport protein 140 homolog) c4(181788, 181789, 181790) c5(181791, 181792, 181793, 181794, 181795, 181796, 181797, 181798, 181799, 181800, 181801, 181802, 181803, 181804, 181805) c6( ) c7(EP, bjb, nx, dy); #c1(IFT140) c2(XP_005255783) c3(intraflagellar transport protein 140 homolog isoform X9) c4( ) c5(273873, 273874, 273875, 273876, 273877, 273878) c6( ) c7(EP, bjb, nx, dy); #c1(IFT140) c2(XP_006721055) c3(intraflagellar transport protein 140 homolog isoform X10) c4( ) c5(293830) c6( ) c7(EP, bjb, nx, dy); #c1(IFT172) c2(NP_056477) c3(intraflagellar transport protein 172 homolog) c4(187694) c5(187695, 187696, 187697, 187698, 187699, 187700, 187701, 187702, 187703, 187704, 187705, 187706, 187707) c6( ) c7(iM, je, bjb, kH, sx, BM, bOz, bOA); #c1(IFT172) c2(XP_005264311) c3(intraflagellar transport protein 172 homolog isoform X2) c4(278803) c5( ) c6( ) c7(iM, je, bjb, kH, sx, BM, bOz, bOA); #c1(IFT27) c2(NP_001171172) c3(intraflagellar transport protein 27 homolog isoform 1) c4(69975, 69976, 69977) c5(69978, 69979, 69980, 69981, 69982, 69983, 69984, 69985, 69986, 69987, 69988, 69989, 69990, 69991) c6( ) c7(bK, Tp); #c1(IFT27) c2(NP_006851) c3(intraflagellar transport protein 27 homolog isoform 2) c4(168623, 168624, 168625, 168626) c5(168627, 168628, 168629, 168630, 168631, 168632, 168633, 168634, 168635, 168636, 168637, 168638, 168639, 168640, 168641, 168642, 168643, 168644, 168645, 168646, 168647, 168648, 168649, 168650, 168651, 168652, 168653, 168654) c6( ) c7(bK, Tp); #c1(IFT43) c2(NP_001096034) c3(intraflagellar transport protein 43 homolog isoform 2) c4(40982) c5(40983, 40984, 40985, 40986, 40987, 40988) c6( ) c7(bOB, oe, bOx); #c1(IFT43) c2(NP_001242924) c3(intraflagellar transport protein 43 homolog isoform 3) c4(89276) c5(89277, 89278, 89279, 89280, 89281, 89282) c6( ) c7(bOB, oe, bOx); #c1(IFT43) c2(NP_443105) c3(intraflagellar transport protein 43 homolog isoform 1) c4(229446) c5(229447, 229448, 229449, 229450, 229451, 229452) c6( ) c7(bOB, oe, bOx); #c1(IFT57) c2(NP_060480) c3(intraflagellar transport protein 57 homolog) c4(196159) c5(196160, 196161, 196162, 196163, 196164, 196165) c6( ) c7(rR, d); #c1(IFT74) c2(NP_001092693) c3(intraflagellar transport protein 74 homolog isoform a) c4(39557, 39558) c5(39559, 39560, 39561, 39562, 39563, 39564, 39565, 39566, 39567, 39568, 39569, 39570, 39571, 39572) c6( ) c7(aw, c); #c1(IFT74) c2(NP_001092694) c3(intraflagellar transport protein 74 homolog isoform b) c4(39573, 39574) c5(39575, 39576, 39577, 39578, 39579, 39580, 39581, 39582, 39583, 39584, 39585, 39586, 39587, 39588, 39589, 39590, 39591, 39592) c6( ) c7(aw, c); #c1(IFT74) c2(XP_011516337) c3(intraflagellar transport protein 74 homolog isoform X1) c4(309567) c5(309568, 309569, 309570, 309571, 309572, 309573) c6( ) c7(aw, c); #c1(IFT80) c2(NP_001177171) c3(intraflagellar transport protein 80 homolog isoform b) c4(72492) c5(72493, 72494, 72495, 72496, 72497, 72498, 72499, 72500) c6( ) c7(EP, bja, nw, zG, bOC); #c1(IFT80) c2(NP_065851) c3(intraflagellar transport protein 80 homolog isoform a) c4(205875, 205876, 205877, 205878) c5(205879, 205880, 205881, 205882, 205883, 205884, 205885, 205886, 205887, 205888, 205889, 205890, 205891, 205892, 205893, 205894, 205895, 205896, 205897, 205898, 205899, 205900, 205901, 205902, 205903, 205904) c6( ) c7(EP, bja, nw, zG, bOC); #c1(IFT88) c2(XP_005266603) c3(intraflagellar transport protein 88 homolog isoform X3) c4( ) c5(280253) c6( ) c7(asp, wB, aq, aS, ct, zG, Nj, anN, B); #c1(IFT88) c2(XP_005266604) c3(intraflagellar transport protein 88 homolog isoform X5) c4( ) c5(280254) c6( ) c7(asp, wB, aq, aS, ct, zG, Nj, anN, B); #c1(IFT88) c2(XP_005266606) c3(intraflagellar transport protein 88 homolog isoform X7) c4(280255) c5(280256, 280257, 280258, 280259, 280260, 280261) c6( ) c7(asp, wB, aq, aS, ct, zG, Nj, anN, B); #c1(IFT88) c2(XP_005266607) c3(intraflagellar transport protein 88 homolog isoform X8) c4(280262) c5(280263, 280264) c6( ) c7(asp, wB, aq, aS, ct, zG, Nj, anN, B); #c1(IFT88) c2(XP_005266609) c3(intraflagellar transport protein 88 homolog isoform X10) c4(280265) c5(280266, 280267, 280268, 280269, 280270, 280271) c6( ) c7(asp, wB, aq, aS, ct, zG, Nj, anN, B); #c1(IFT88) c2(XP_011533548) c3(intraflagellar transport protein 88 homolog isoform X13) c4(329659) c5(329660, 329661, 329662, 329663, 329664, 329665, 329666, 329667, 329668) c6( ) c7(asp, wB, aq, aS, ct, zG, Nj, anN, B); #c1(IGBP1) c2(NP_001542) c3(immunoglobulin-binding protein 1) c4(118725) c5(118726, 118727, 118728, 118729, 118730, 118731, 118732, 118733, 118734, 118735) c6( ) c7(wS, cV, lr, fd, jh, fr, HS, uE, bFj, aY, V, q, eW, av, Mo, no, aT, ta, ji, aSS, aAe, pi, Qe, bOD, A, Gv, aml, Y, bfV, r, fe, t, bz, ZL, BU, qe, zr, cj, Da, eo, m, ER, aSQ, y, bt, aNX, B, aNW, XL); #c1(IGDCC3) c2(NP_004875) c3(immunoglobulin superfamily DCC subclass member 3 precursor) c4(150466) c5(150467, 150468, 150469, 150470, 150471, 150472, 150473) c6( ) c7(aW, n, aT); #c1(IGDCC3) c2(XP_011520543) c3(immunoglobulin superfamily DCC subclass member 3 isoform X1) c4(315469) c5(315470, 315471, 315472, 315473, 315474, 315475) c6( ) c7(aW, n, aT); #c1(IGF1) c2(NP_000609) c3(insulin-like growth factor 1 isoform 4 preproprotein) c4(13724) c5(13725, 13726, 13727, 13728, 13729, 13730, 13731, 13732, 13733) c6(13734, 13735) c7(T, ea, fd, ci, aY, GK, bv, aE, fm, dV, hu, avM, cp, li, yo, ZH, Ls, zE, iA, nB, cj, bOJ, FG, ht, cQ, aj, cd, Ak, ey, bl, fQ, fe, pm, QK, ok, dB, eD, bOE, Be, E, bOF, AN, jv, aG, aA, cz, bX, bOI, avO, q, kf, cy, rv, eu, bA, iF, nO, fO, cl, pb, bOG, rR, acW, ac, tW, mG, hr, cG, aDR, aps, bt, rA, bMo, iW, jh, KD, dG, ad, hX, yt, vJ, IQ, ahK, BO, cW, PE, ff, Of, dq, bz, OG, ag, aed, iu, if, e, bB, brq, ip, bc, Ur, hl, as, eF, cm, aiv, It, vA, mx, vy, tV, bBT, Ht, dD, yG, n, nA, aje, cq, pe, eV, avP, A, RT, Rj, lb, hQ, yq, bP, PI, hl, at, ut, B, tq, vQ, AS, dA, eX, fF, GC, v, Qo, V, eJ, Kx, UE, hW, ae, jf, ev, asy, bbs, aom, bu, t, aoy, aff, zJ, kP, wO, gX, zu, xb, hl, acl, RH, oR, zF, eq, hd, aop, LA, hD, vc, Dj, d, Z, HI, dr, D, gk, II, gZ, Kj, y, ng, aC, fR, azf, yS, atj, al, bW, pX, M, K, eL, adT, bBQ, ago, apn, LZ, g, uC, iP, AM, U, uo, m, bBJ, sQ, OI, aw, NT, fg, aCQ, zP, JW, ft, uV, dx, CN, Og, W, anZ, wk, bo, it, ail, fG, gQ, aee, hz, j, sl, eA, J, XX, MR, Ig, bBN, bq, kl, Y, LO, r, en, wA, iK, bN, Qi, Dy, c, kB, hc, dy, fD, gT, gx, sY, kh, id, bxK, aZ, bS, iJ, dP, fU, aet, tt, bKm, Yi, uX, IR, aus, xs, eH, cr, Fq, Bu, qa, pu, nb, AR, sG, bC, ei, vt, xg, G, pf, acz, fV, amj, bBb, mF, dY, il, iX, Ou, zQ, aW, hJ, eM, iT, aYS, gn, pw, ez, fr, ct, qN, rc, ke, cc, hw, rl, zf, h, jy, dL, Xh, Um, Ck, Dg, aq, kk, op, bJ, Qy, hR, arg, hL, eR, yk, hy, asA, uT, HC, aT, bK, aPF, af, ak, qw, Uf, s, iU, la, aNi, akY, bQ, aDQ, BU, aJt, aGo, mf, aoJ, hS, Kd, qb, av, F, oz, sO, fb, uQ, aF, eK, LB, bOH, bE, Lb, aS, X); #c1(IGF1) c2(NP_001104753) c3(insulin-like growth factor 1 isoform 1 preproprotein) c4(42228, 42229, 42230) c5(42231, 42232, 42233, 42234, 42235, 42236, 42237, 42238, 42239, 42240, 42241, 42242, 42243, 42244, 42245, 42246, 42247, 42248, 42249, 42250, 42251, 42252, 42253, 42254, 42255, 42256, 42257, 42258, 42259, 42260, 42261) c6(42262, 42263, 42264, 42265, 42266, 42267, 42268, 42269) c7(T, ea, fd, ci, aY, GK, bv, aE, fm, dV, hu, avM, cp, li, yo, ZH, Ls, zE, iA, nB, cj, bOJ, FG, ht, cQ, aj, cd, Ak, ey, bl, fQ, fe, pm, QK, ok, dB, eD, bOE, Be, E, bOF, AN, jv, aG, aA, cz, bX, bOI, avO, q, kf, cy, rv, eu, bA, iF, nO, fO, cl, pb, bOG, rR, acW, ac, tW, mG, hr, cG, aDR, aps, bt, rA, bMo, iW, jh, KO, dG, ad, hX, yt, vJ, IQ, ahK, BO, cW, PE, ff, Of, dq, bz, OG, ag, aed, iu, if, e, bB, brq, ip, bc, Ur, hl, as, eF, cm, aiv, It, vA, mx, vy, tV, bBT, Ht, dD, yG, n, nA, aje, cq, pe, eV, avP, A, RT, Rj, Ib, hQ, yq, bP, PI, hL, at, ut, B, tq, vQ, AS, dA, eX, fF, GC, v, Qo, V, eJ, Kx, UE, hW, ae, jf, ev, asy, bbs, aom, bu, t, aoy, aff, zJ, kP, wO, gX, zu, xb, hl, acl, RH, oR, zE, eq, hd, aop, LA, hD, vc, Dj, d, Z, HI, dr, D, gk, II, gZ, Kj, y, ng, aC, fR, azf, yS, atj, al, bW, pX, M, K, eL, adT, bBQ, ago, apn, LZ, g, uC, iP, AM, U, uo, m, bBJ, sQ, OI, aw, NT, fg, aCQ, zP, JW, ft, uV, dx, CN, Dg, W, anZ, wk, bo, it, ail, fG, qQ, aee, hz, j, sl, eA, J, XX, MR, Ig, bBN, bq, kl, Y, LO, r, en, wA, iK, bN, Qi, Dy, c, kB, hv, dy, fD, gT, gx, sY, kh, id, bxK, aZ, bS, iJ, dP, fU, aet, tt, bKm, Yi, uX, IR, aus, xs, eH, cr, Fq, Bu, qa, pu, nb, AR, sG, bC, ei, vt, xg, G, pf, acz, fV, amj, bBb, mF, dY, il, iX, Ou, zQ, aW, hJ, eM, iT, aYS, gn, pw, ez, fr, ct, qN, rc, ke, cc, hw, rl, zf, h, jy, dL, Xh, Um, Ck, Dg, aq, kk, op, bJ, Qy, hR, arg, bL, eR, yk, hy, as A, uT, HC, aT, bK, aPF, af, ak, qw, Uf, s, iU, Ia, aNi, akY, bQ, aDQ, BU, aJt, aGo, mf, aoJ, hS, Kd, qb, av, F, oz, sO, fb, uQ, aF, eK, LB, bOH, bE, Lb, aS, X); #c1(IGF1) c2(NP_001104754) c3(insulin-like growth factor 1 isoform 2 preproprotein) c4(42270) c5(42271, 42272, 42273, 42274, 42275, 42276, 42277, 42278, 42279) c6(42280, 42281) c7(T, ea, fd, ci, aY, GK, bv, aE, fm, dV, hu, avM, cp, li, yo, ZH, Ls, zE, iA, nB, cj, bOJ, FG, ht, cQ, aj, cd, Ak, ey, bl, fQ, fe, pm, QK, ok, dB, eD, bOE, Be, E, bOF, AN, jv, aG, aA, cz, bX, bOI, avO, q, kf, cy, rv, eu, bA, iF, nO, fO, cl, pb, bOG, rR, acW, ac, tW, mG, hr, cG, aDR, aps, bt, rA, bMo, iW, jh, KO, dG, ad, hX, yt, vJ, IQ, ahK, BO, cW, PE, ff, Of, dq, bz, OG, ag, aed, iu, if, e, bB, brq, ip, bc, Ur, hl, as, eF, cm, aiv, It, vA, mx, vy, tV, bBT, Ht, dD, yG, n, nA, aje, cq, pe, eV, avP, A, RT, Rj, Ib, hQ, yq, bP, Pl, hL, at, ut, B, tq, vQ, AS, dA, eX, fF, GC, v, Qo, V, eJ, Kx, UE, hW, ae, jf, ev, asy, bbs, aom, bu, t, aoy, aff, zJ, kP, wO, gX, zu, xb, hl, acl, RH, oR, zF, eq, hd, aop, LA, hD, vc, Dj, d, Z, Hl, dr, D, gk, II, gZ, Kj, y, ng, aC, fR, azf, yS, atj, al, bW, pX, M, K, eL, adT, bBQ, ago, apn, LZ, g, uC, iP, AM, U, uo, m, bBJ, sQ, OI, aw, NT, fg, aCQ, zP, JW, ft, uV, dx, CN, Og, W, anZ, wk, bo, it, ail, fG, qQ, aee, hz, j, sl, eA, J, XX, MR, Ig, bBN, bq, kl, Y, LO, r, en, wA, iK, bN, Qi, Dy, c, kB, hc, dy, fD, gT, gx, sY, kh, id, bxK, aZ, bS, iJ, dP, fU, aet, tt, bKm, Yi, uX, IR, aus, xs, eH, cr, Fq, Bu, qa, pu, nb, AR, sG, bC, ei, vt, xg, G, pf, acz, fV, amj, bBb, mF, dY, il, iX, Ou, zQ, aW, hJ, eM, iT, aYS, gn, pw, ez, fr, ct, qN, rc, ke, cc, hw, rl, zf, h, jy, dL, Xh, Um, Ck, Dg, aq, kk, op, bJ, Qy, hR, arg, bL, eR, yk, hy, asA, uT, HC, aT, bK, aPF, af, ak, qw, Uf, s, iU, la, aNi, akY, bQ, aDQ, BU, aJt, aGo, mf, aoJ, hS, Kd, gb, av, F, oz, sO, fb, uQ, aF, eK, LB, bOH, bE, Lb, aS, X); #c1(IGF1R) c2(NP_000866) c3(insulin-like growth factor 1 receptor isoform 1 precursor) c4(16652) c5(16653, 16654, 16655, 16656, 16657, 16658) c6( ) c7(T, aC, pf, hV, if, fd, bB, amj, ci, x, bv, aE, bOL, pX, aeO, iv, K, hu, eL, cp, aa, yo, zQ, JI, aW, Ls, LZ, nY, g, eF, zE, uC, cm, GR, zV, bw, eM, nB, iA, vA, cj, k, m, Xu, cE, iu, dD, ht, n, bOK, fr, qN, JW, cd, b, ft, jz, cc, zw, i, gd, jy, dL, dx, AQ, fe, aq, kp, yq, pm, QK, auC, op, oU, W, dB, hk, JQ, hL, hR, E, at, WL, it, B, bL, oe, aA, cz, hy, v, j, bX, q, er, qH, eA, eJ, mP, afQ, aT, bq, an, ae, af, eu, bA, jf, ak, qw, kl, s, Qr, Y, LO, r, aNi, akY, en, hf, bu, t, cl, iK, ck, nM, ac, gX, hr, JL, mf, bt, xb, rA, VB, awY, sY, qb, Dd, acl, iW, ml, oH, Gn, eq, iJ, ad, dZ, hX, hd, ib, py, hD, vc, hP, fb, NP, d, ff, eH, cr, gl, aF, iR, bz, qa, es, Hw, Ew, bE, AR, pP, aef, Lb, ei, adg, IG, vt, X, y); #c1(IGF2) c2(NP_001121070) c3(insulin-like growth factor 11 isoform 2) c4(45152, 45153, 45154) c5(45155, 45156, 45157, 45158, 45159, 45160, 45161, 45162, 45163, 45164, 45165, 45166, 45167, 45168, 45169, 45170, 45171, 45172) c6( ) c7(G, T, aC, UH, fR, pf, ea, atj, e, al, if, aHx, eb, bB, ci, brq, ip, x, bv, IE, aE, pX, dV, JT, iv, DO, Ou, K, hu, eL, Qe, li, eG, ye, zQ, JI, aW, az, hl, Qm, g, as, eF, zE, uC, cm, Qt, bw, eM, nB, AM, iT, vA, ZT, k, m, pw, Xu, iu, bBP, bOJ, dD, gU, wu, aw, ht, fg, n, aj, fr, qN, cd, Vs, jz, no, hw, cc, aoc, TK, PD, aOM, bOO, jy, dL, Jn, h, uV, pl, A, CM, iw, hQ, ahJ, aq, fe, Hu, pm, bOP, op, bJ, iO, dB, hk, eD, Pl, wk, bOR, KT, mg, hL, at, pg, bo, azr, aDE, bOQ, it, B, L, bL, vQ, jv, fG, oe, Lx, gQ, jx, fZ, aA, cz, xk, j, v, q, J, er, eA, PC, Zp, mj, amg, hW, aql, aT, cy, bq, an, ae, af, jf, ak, kl, wr, s, ND, vT, Qr, Y, ev, LO, iU, bOT, r, akY, en, bu, cl, t, iK, alp, bOS, bN, ck, Qi, QG, wg, kP, pO, aJt, aGo, au, aJQ, aps, bt, xb, yv, vi, hS, sY, kh, id, MH, aZ, iW, jN, ml, jh, dG, eq, iJ, ad, afb, hX, qC, Jm, av, iC, ot, oz, Ot, Hk, oW, wm, fb, nJ, d, BO, et, ff, eH, Ej, Lk, aF, iV, iR, adj, Bu, bz, dr, bOM, bE, es, gk, bON, mi, pc, bE, II, Lb, Km, cP, ei, LD, y, X, jr); #c1(IGF2) c2(NP_001278791) c3(insulin-like growth factor 11 isoform 1 preproprotein) c4( ) c5(110088, 110089, 110090, 110091, 110092, 110093, 110094, 110095, 110096, 110097, 110098, 110099, 110100, 110101, 110102, 110103, 110104, 110105, 110106, 110107, 110108, 110109, 110110, 110111, 110112, 110113, 110114, 110115, 110116, 110117, 110118, 110119, 110120, 110121, 110122) c6( ) c7(G, T, aC, UH, fR, pf, ea, atj, e, al, if, aHx, eh, bB, ci, brq, ip, x, bv, IE, aE, pX, dV, JT, iv, DO, Ou, K, hu, eL, Qe, li, eG, yo, zQ, Jl, aW, az, hl, Qm, g, as, eF, zE, uC, cm, Qt, bw, eM, nB, AM, iT, vA, ZT, k, m, pw, Xu, iu, bBP, bOJ, dD, gU, wu, aw, ht, fg, n, aj, fr, qN, cd, Vs, jz, no, hw, cc, aoc, TK, PD, aOM, bOO, jy, dL, Jn, h, uV, pl, A, CM, iw, hQ, ahJ, aq, fe, Hu, pm, bOP, op, bJ, iO, dB, hk, eD, Pl, wk, bOR, KT, mg, hL, at, pg, bo, azr, aDE, bOQ, it, B, L, bL, vQ, jv, fG, oe, Lx, qQ, jx, fZ, aA, cz, xk, j, v, q, J, er, eA, PC, Zp, mj, amg, hW, aql, aT, cy, bq, an, ae, af, jf, ak, kl, wr, s, ND, vT, Qr, Y, ev, LO, iU, bOT, r, akY, en, bu, cl, t, iK, alp, bOS, bN, ck, Qi, QG, wg, kP, pO, aJt, aGo, au, aJQ, aps, bt, xb, yv, vi, hS, sY, kh, id, MH, aZ, iW, jN, ml, jh, dG, eq, iJ, ad, afb, hX, qC, Jm, av, iC, ot, oz, Ot, Hk, oW, wm, fb, nJ, d, BO, et, ff, eH, Ej, Lk, aF, iV, iR, adj, Bu, bz, dr, bOM, bF, es, gk, bON, mi, pc, bE, II, Lb, Km, cP, ei, LD, y, X, jr); #c1(IGF2BP1) c2(NP_001153895) c3(insulin-like growth factor 2 mRNA-binding protein 1 isoform 2) c4(61033) c5(61034, 61035, 61036, 61037, 61038, 61039) c6( ) c7(bL, T, dD, jh, bB, n, hy, v, eq, ci, ip, av, aT, nJ, cp, B, BN, aW, Y, yx, aq, iR, t, SE, dB, bE, X, qF, ei, ne); #c1(IGF2BP1) c2(NP_006537) c3(insulin-like growth factor 2 mRNA-binding protein 1 isoform 1) c4(166089) c5(166090, 166091, 166092, 166093, 166094, 166095) c6( ) c7(bL, T, dD, jh, bB, n, hy, v, eq, ci, ip, av, aT, nJ, cp, B, BN, aW, Y, yx, aq, iR, t, SE, dB, bE, X, qF, ei, ne); #c1(IGF2BP2) c2(NP_001007226) c3(insulin-like growth factor 2 mRNA-binding protein 2 isoform b) c4(22572) c5(22573, 22574, 22575, 22576, 22577, 22578) c6( ) c7(bL, T, dD, aC, e, jh, aj, dG, j, v, eq, GS, cd, q, J, ke, h, d, zR, r, au, mg, mf, IS, ei); #c1(IGF2BP2) c2(NP_001278801) c3(insulin-like growth factor 2 mRNA-binding protein 2 isoform d) c4(110132) c5(110133, 110134, 110135, 110136, 110137, 110138) c6( ) c7(bL, T, dD, aC, e, jh, aj, dG, j, v, eq, GS, cd, q, J, ke, h, d, zR, r, au, mg, mf, IS, ei); #c1(IGF2BP2) c2(NP_006539) c3(insulin-like growth factor 2 mRNA-binding protein 2 isoform a) c4(166103) c5(166104, 166105, 166106, 166107, 166108, 166109) c6( ) c7(bL, T, dD, aC, e, jh, aj, dG, j, v, eq, GS, cd, q, J, ke, h, d, zR, r, au, mg, mf, IS, ei); #c1(IGF2BP3) c2(NP_006538) c3(insulin-like growth factor 2 mRNA-binding protein 3) c4(166096) c5(166097, 166098, 166099, 166100, 166101, 166102) c6( ) c7(bL, gx, T, Mb, KR, jh, v, oH, ci, bX, fr, q, iu, hd, aE, aT, dL, eL, aol, aW, Y, AQ, eH, LZ, r, nY, en, cl, g, as, eF, kP, nG, aep, hL, qF, ei, B); #c1(IGF2R) c2(NP_000867) c3(cation-independent mannose-6-phosphate receptor precursor) c4(16659) c5(16660, 16661, 16662, 16663, 16664, 16665) c6( ) c7(bL, sY, T, aC, eR, fR, jp, Zl, iW, aw, ht, al, hE, aA, ml, v, ci, vY, V, q, ad, er, bOV, Jm, av, jz, aE, il, awd, yg, aT, iv, h, dL, K, ux, an, ex, ae, af, CB, aa, ak, kl, zQ, A, s, aW, Y, ff, az, eH, r, aq, lo, Ej, aF, bOU, en, cl, g, t, uC, bz, zZ, eF, iK, iR, bP, c, nB, dB, Qu, ag, eM, gX, cj, at, Hb, m, fD, sT, B); #c1(IGFALS) c2(NP_001139478) c3(insulin-like growth factor-binding protein complex acid labile subunit isoform 1 precursor) c4(59400) c5(59401, 59402, 59403, 59404, 59405, 59406, 59407, 59408, 59409, 59410, 59411, 59412) c6( ) c7(bLx, dt, mr, OI, rf, bBX, Vd, bOX, PJ, ad, PW, Hx, Gt, no, WY, aet, aT, kf, bBN, jy, h, ama, K, bl, an, wn, af, aIL, ak, zQ, apl, axR, PE, Zf, aav, axW, alR, TQ, yy, aaE, bOW, bu, QK, xw, bb, ac, c, apq, U, bel, at, Lb, IM, xb, L); #c1(IGFALS) c2(NP_004961) c3(insulin-like growth factor-binding protein complex acid labile subunit isoform 2 precursor) c4(151500) c5( ) c6( ) c7(bLx, dt, mr, OI, rf, bBX, Vd, bOX, PJ, ad, PW, Hx, Gt, no, WY, aet, aT, kf, bBN, jy, h, ama, K, bl, an, wn, af, aIL, ak, zQ, apl, axR, PE, Zf, aav, axW, aIR, TQ, yy, aaE, bOW, bu, QK, xw, bb, ac, c, apq, U, bel, at, Lb, IM, xb, L); #c1(IGFBP1) c2(NP_000587) c3(insulin-like growth factor-binding protein 1 precursor) c4(13257) c5(13258, 13259, 13260, 13261, 13262, 13263) c6( ) c7(bL, aC, dD, fV, ea, e, al, jN, iW, aA, eh, ez, aj, dG, j, v, eq, qN, fd, aY, Eh, eA, J, ad, Vs, dP, x, ft, aE, Xc, iX, pX, MP, dV, aT, jy, bOY, dL, vc, ey, ae, af, bc, kl, zQ, ZH, s, CN, PE, aW, Rr, hl, LO, r, fQ, aq, eH, EH, aF, Fq, cl, g, t, zE, uC, pm, op, gk, mi, eM, AM, AR, vA, X, hr, fP, hL, E, at, mf, m, ei, gT, B); #c1(IGFBP2) c2(NP_000588) c3(insulin-like growth factor-binding protein 2 precursor) c4(13264) c5(13265, 13266, 13267, 13268, 13269, 13270) c6( ) c7(T, bO, fd, bB, ci, mF, ip, x, bv, iv, DO, aW, hl, g, as, cm, eM, vA, Zn, k, m, aCo, Vj, dD, qy, aj, fr, b, ft, PD, Lv, dL, dx, A, iw, fQ, cM, fs, op, hq, iO, bP, cA, dB, hL, at, bL, aA, cz, hy, v, so, q, J, eA, mj, qK, aT, bK, ae, af, ne, jf, iF, Uf, s, Y, r, qL, en, cl, t, ck, sS, gT, bt, LS, aZ, aCm, Fb, eq, hF, Fc, iJ, ad, iC, av, uQ, d, BN, ff, aF, bz, bE, Lb, ei, i, X); #c1(IGFBP3) c2(NP_000589) c3(insulin-like growth factor-binding protein 3 isoform b precursor) c4(13271, 13272, 13273, 13274, 13275, 13276, 13277, 13278) c5(13279, 13280, 13281, 13282, 13283, 13284, 13285, 13286, 13287, 13288, 13289, 13290, 13291, 13292, 13293, 13294, 13295, 13296, 13297, 13298, 13299, 13300, 13301, 13302, 13303, 13304, 13305, 13306, 13307, 13308, 13309, 13310, 13311, 13312, 13313, 13314, 13315, 13316, 13317, 13318, 13319, 13320, 13321, 13322, 13323, 13324, 13325, 13326, 13327, 13328, 13329, 13330, 13331, 13332, 13333, 13334, 13335, 13336, 13337, 13338, 13339, 13340, 13341, 13342) c6(13343, 13344, 13345, 13346, 13347, 13348, 13349, 13350, 13351, 13352, 13353, 13354, 13355, 13356, 13357, 13358) c7(gh, G, T, bM, aC, fR, pf, atj, e, al, if, fd, bB, amj, ci, XW, dV, K, hi, eL, cp, azu, zQ, JI, aW, hl, LZ, g, as, eF, zE, bw, aAW, It, eM, iA, iT, vA, uo, m, Xu, Vj, dD, sQ, ht, NT, n, aj, fr, qN, JW, ai, ft, PD, jy, dL, hi, Ck, yi, Rj, asL, fe, aq, kp, cM, op, bJ, iO, bP, dB, anZ, Pl, bo, hL, at, ut, it, B, bL, dA, fG, aA, hz, hy, v, j, asA, AO, q, J, eA, XX, cF, MR, Ig, aT, cy, bq, ae, af, jf, wr, s, Y, LO, r, akY, en, bu, cl, t, iK, pb, bN, ck, Qi, acW, kP, ac, aJt, mf, aoJ, dy, anD, xb, hS, kh, id, bxK, qb, iW, oR, Fb, zF, eq, gb, Pm, ad, dP, av, iC, py, vJ, sO, vc, IQ, fb, uQ, d, IR, PE, ff, eH, eZ, aF, Fq, iR, Bu, bz, HI, LB, es, bE, II, ei, vt, X); #c1(IGFBP3) c2(NP_001013416) c3(insulin-like growth factor-binding protein 3 isoform a precursor) c4(25508) c5(25509, 25510, 25511, 25512, 25513, 25514, 25515, 25516) c6(25517, 25518) c7(gh, G, T, bM, aC, fR, pf, atj, e, al, if, fd, bB, amj, ci, XW, dV, K, hu, eL, cp, azu, zQ, JI, aW, hl, LZ, g, as, eF, zE, bw, aAW, It, eM, iA, iT, vA, uo, m, Xu, Vj, dD, sQ, ht, NT, n, aj, fr, qN, JW, ai, ft, PD, jy, dL, hi, Ck, yi, Rj, asL, fe, aq, kp, cM, op, bJ, iO, bP, dB, anZ, Pl, bo, hL, at, ut, it, B, bL, dA, fG, aA, hz, hy, v, j, asA, AO, q, J, eA, XX, cF, MR, Ig, aT, cy, bq, ae, af, jf, wr, s, Y, LO, r, akY, en, bu, cl, t, iK, pb, bN, ck, Qi, acW, kP, ac, aJt, mf, aoJ, dy, anD, xb, hS, kh, id, bxK, qb, iW, oR, Fb, zF, eq, gb, Pm, ad, dP, av, iC, py, vJ, sO, vc, IQ, fb, uQ, d, IR, PE, ff, eH, eZ, aF, Fq, iR, Bu, bz, HI, LB, es, bE, II, ei, vt, X); #c1(IGFBP4) c2(NP_001543) c3(insulin-like growth factor-binding protein 4 precursor) c4(118736, 118737) c5(118738, 118739, 118740, 118741, 118742, 118743, 118744, 118745, 118746, 118747, 118748, 118749) c6( ) c7(T, bB, Fb, fr, eA, q, ad, Vs, aT, ae, af, uQ, d, nO, aW, Y, r, aF, g, cl, as, cm, t, eM, bE, hL, zu, y); #c1(IGFBP5) c2(NP_000590) c3(insulin-like growth factor-binding protein 5 precursor) c4(13359) c5(13360, 13361, 13362, 13363, 13364, 13365, 13366, 13367) c6( ) c7(bL, T, aC, id, fG, qy, eh, n, aCm, aj, hy, ci, qN, fr, q, J, ad, ip, XX, Vp, iC, Db, aT, PD, dL, K, fb, ae, af, A, d, BN, B, aW, ff, eH, r, en, cl, g, t, eF, bz, pb, cm, iK, LB, nB, hL, at, aS, aCo, ei, y, ne); #c1(IGFBP6) c2(NP_002169) c3(insulin-like growth factor-binding protein 6 precursor) c4(126246, 126247, 126248) c5(126249, 126250, 126251, 126252, 126253, 126254, 126255, 126256, 126257, 126258, 126259, 126260, 126261, 126262, 126263, 126264, 126265, 126266, 126267, 126268, 126269, 126270, 126271, 126272) c6(126273, 126274, 126275, 126276, 126277, 126278) c7(gh, T, aZ, jN, bB, fr, eJ, eA, ad, ip, dP, bv, aT, dL, hP, ae, af, hl, t, cm, LS, eM, bE, bo, at, azr, bBP); #c1(IGFBP7) c2(NP_001240764) c3(insulin-like growth factor-binding protein 7 isoform 2 precursor) c4(88763) c5(88764, 88765, 88766, 88767, 88768, 88769) c6( ) c7(T, id, pf, oe, aA, bB, aj, hy, bzl, ci, v, fr, rP, hF, cd, q, ad, hX, dP, eA, av, x, aE, bPa, kH, aT, h, hn, ey, bOZ, ae, eL, cp, uX, d, aW, Y, ev, ff, bIP, r, aF, en, cl, g, cm, iK, bz, op, Hp, ck, es, W, eM, nB, bE, iA, vA, hL, JH, k, hE, bt, B); #c1(IGFBP7) c2(NP_001544) c3(insulin-like growth factor-binding protein 7 isoform 1 precursor) c4(118750) c5(118751, 118752, 118753, 118754, 118755, 118756) c6( ) c7(T, id, pf, oe, aA, bB, aj, hy, bzl, ci, v, fr, rP, hF, cd, q, ad, hX, dP, eA, av, x, aE, bPa, kH, aT, h, hn, ey, bOZ, ae, eL, cp, uX, d, aW, Y, ev, ff, bIP, r, aF, en, cl, g, cm, iK, bz, onp, Hp, ck, es, W, eM, nB, bE, iA, vA, hL, JH, k, hE, bt, B); #c1(IGFBPL1) c2(NP_001007564) c3(insulin-like growth factor-binding protein-like 1 precursor) c4(22812) c5(22813, 22814, 22815, 22816, 22817, 22818, 22819, 22820, 22821) c6(22822, 22823) c7(aW, T, cz, ci, aT); #c1(IGFL1) c2(NP_940943) c3(insulin growth factor-like family member 1 precursor) c4(260174) c5(260175, 260176, 260177, 260178, 260179, 260180) c6( ) c7(IQ, cr); #c1(IGFLR1) c2(NP_078936) c3(IGF-like family receptor 1 precursor) c4(216180, 216181) c5(216182, 216183, 216184, 216185, 216186, 216187, 216188, 216189, 216190, 216191, 216192, 216193, 216194) c6( ) c7(IQ); #c1(IGHMBP2) c2(NP_002171) c3(DNA-binding protein SMUBP-2) c4(126279) c5(126280, 126281, 126282, 126283, 126284, 126285, 126286) c6( ) c7(Og, aPN, apq, apl, aW, bT, OI, Ad, aT, kf, bej, oj, U, ey, fu, bX, EZ, fq, aof); #c1(IGJ) c2(NP_653247) c3(immunoglobulin J chain precursor) c4(239311, 239312, 239313) c5(239314, 239315, 239316, 239317, 239318, 239319, 239320, 239321, 239322, 239323, 239324, 239325, 239326, 239327, 239328, 239329, 239330, 239331, 239332, 239333, 239334, 239335) c6( ) c7(eE); #c1(IGLL1) c2(NP_064455) c3(immunoglobulin lambda-like polypeptide 1 isoform a precursor) c4(202572) c5(202573, 202574, 202575, 202576, 202577, 202578, 202579) c6( ) c7(bPb, bPc, cj, vo, Ze, asE); #c1(IGLL1) c2(NP_690594) c3(immunoglobulin lambda-like polypeptide 1 isoform b precursor) c4(244878) c5(244879, 244880, 244881, 244882, 244883) c6( ) c7(bPb, bPc, cj, vo, Ze, asE); #c1(IGSF1) c2(NP_001164432) c3(immunoglobulin superfamily member 1 isoform 3 precursor) c4(66948) c5(66949, 66950, 66951, 66952, 66953, 66954) c6( ) c7(T, aE, AO, qt, aW, RN, r, aT, ci, zW, zy, brw, bPd, eA); #c1(IGSF1) c2(NP_001164433) c3(immunoglobulin superfamily member 1 isoform 4) c4(66955) c5(66956, 66957, 66958, 66959, 66960, 66961, 66962, 66963, 66964, 66965) c6( ) c7(T, aE, AO, qt, aW, RN, r, aT, ci, zW, zy, brw, bPd, eA); #c1(IGSF1) c2(NP_001546) c3(immunoglobulin superfamily member 1 isoform 1 precursor) c4(118757) c5(118758, 118759, 118760, 118761, 118762, 118763) c6( ) c7(T, aE, AO, qt, aW, RN, r, aT, ci, zW, zy, brw, bPd, eA); #c1(IGSF1) c2(NP_991402) c3(immunoglobulin superfamily member 1 isoform 2 precursor) c4(263447) c5(263448, 263449, 263450, 263451, 263452, 263453, 263454, 263455, 263456, 263457) c6( ) c7(T, aE, AO, qt, aW, RN, r, aT, ci, zW, zy, brw, bPd, eA); #c1(IGSF1) c2(XP_011529636) c3(immunoglobulin superfamily member 1 isoform X4) c4( ) c5(325285) c6( ) c7(T, aE, AO, qt, aW, RN, r, aT, ci, zW, zy, brw, bPd, eA); #c1(IGSF10) c2(NP_849144) c3(immunoglobulin superfamily member 10 isoform 1 precursor) c4(254257, 254258) c5(254259, 254260, 254261, 254262, 254263, 254264, 254265, 254266, 254267, 254268, 254269, 254270, 254271, 254272, 254273, 254274, 254275) c6(254276, 254277, 254278, 254279) c7(cd); #c1(IGSF11) c2(NP_001015887) c3(immunoglobulin superfamily member 11 isoform b precursor) c4(26238) c5(26239, 26240, 26241, 26242, 26243, 26244) c6( ) c7(T, aF, B, bu, aA); #c1(IGSF11) c2(NP_689751) c3(immunoglobulin superfamily member 11 isoform a precursor) c4(243848) c5(243849, 243850, 243851, 243852, 243853, 243854, 243855, 243856, 243857, 243858) c6( ) c7(T, aF, B, bu, aA); #c1(IGSF5) c2(NP_001073913) c3(immunoglobulin superfamily member 5) c4(36506) c5(36507, 36508, 36509, 36510, 36511, 36512) c6( ) c7(j, ac, ad, an); #c1(IGSF6) c2(NP_005840) c3(immunoglobulin superfamily member 6 precursor) c4(159799) c5(159800, 159801, 159802, 159803, 159804, 159805) c6( ) c7(fJ); #c1(IGSF8) c2(NP_001193594) c3(immunoglobulin superfamily member 8 precursor) c4(82309, 82310) c5(82311, 82312, 82313, 82314, 82315, 82316, 82317, 82318, 82319, 82320) c6( ) c7(eA, jx, d, ad); #c1(IGSF8) c2(XP_006711694) c3(immunoglobulin superfamily member 8 isoform X2) c4(286219) c5(286220, 286221, 286222, 286223, 286224, 286225, 286226, 286227, 286228, 286229, 286230, 286231) c6( ) c7(eA, jx, d, ad); #c1(IHH) c2(NP_002172) c3(indian hedgehog protein precursor) c4(126287) c5(126288, 126289, 126290, 126291, 126292, 126293) c6( ) c7(T, kh, aC, rV, fg, aA, bB, zU, yn, dP, zw, MS, aE, aT, bpa, ahE, bPf, aW, r, atf, kp, aF, ahl, boW, dr, atb, zV, bF, bE, apy, zG, bPe, vt, xb, bwD); #c1(IK) c2(NP_006074) c3(protein Red) c4(161673, 161674) c5(161675, 161676, 161677, 161678, 161679, 161680, 161681, 161682, 161683, 161684, 161685, 161686) c6( ) c7(aCi, NU, mA, hp, cF); #c1(IKBKAP) c2(NP_003631) c3(elongator complex protein 1) c4(139716, 139717) c5(139718, 139719, 139720, 139721, 139722, 139723) c6( ) c7(bM, Dw, ahW, aFa, pl, bX, pM, RD, aqJ, ahL, rO, Ds, af, sp, xs, uY, ahl, cm, ps, mx, m, bD, y, sH); #c1(IKBKB) c2(NP_001177649) c3(inhibitor of nuclear factor kappa-B kinase subunit beta isoform 2) c4(72810) c5(72811, 72812, 72813, 72814, 72815, 72816, 72817, 72818, 72819, 72820, 72821, 72822) c6( ) c7(bPg, bL, T, dD, bM, dA, Dw, hl, ea, iW, jx, jh, aA, cz, fd, eq, q, ad, eA, av, kH, Lv, aT, Ds, h, bl, ji, bq, d, B, je, aW, Y, ff, fO, fc, eZ, r, CF, Pr, vs, kp, en, g, bz, es, eU, iM, eM, iA, gn, cP, fD, y, xg, X); #c1(IKBKB) c2(NP_001229707) c3(inhibitor of nuclear factor kappa-B kinase subunit beta isoform 5) c4(84855, 84856) c5(84857, 84858, 84859, 84860, 84861, 84862) c6( ) c7(bPg, bL, T, dD, bM, dA, Dw, hl, ea, iW, jx, jh, aA, cz, fd, eq, q, ad, eA, av, kH, Lv, aT, Ds, h, bl, ji, bq, d, B, je, aW, Y, ff, fO, fc, eZ, r, CF, Pr, vs, kp, en, g, bz, es, eU, iM, eM, iA, gn, cP, fD, y, xg, X); #c1(IKBKB) c2(NP_001547) c3(inhibitor of nuclear factor kappa-B kinase subunit beta isoform 1) c4(118764) c5(118765, 118766, 118767, 118768, 118769, 118770) c6( ) c7(bPg, bL, T, dD, bM, dA, Dw, hl, ea, iW, jx, jh, aA, cz, fd, eq, q, ad, eA, av, kH, Lv, aT, Ds, h, bl, ji, bq, d, B, je, aW, Y, ff, fO, fc, eZ, r, CF, Pr, vs, kp, en, g, bz, es, eU, iM, eM, iA, gn, cP, fD, y, xg, X); #c1(IKBKE) c2(NP_001180250) c3(inhibitor of nuclear factor kappa-B kinase subunit epsilon isoform 3) c4( ) c5(73561, 73562, 73563, 73564, 73565, 73566, 73567) c6( ) c7(T, tb, fR, eM, aW, ff, eX, bO, aT, eZ, aiT, eV, ww, en, y, eA, afu); #c1(IKBKE) c2(NP_054721) c3(inhibitor of nuclear factor kappa-B kinase subunit epsilon isoform 1) c4(177350, 177351) c5(177352, 177353, 177354, 177355, 177356, 177357, 177358) c6( ) c7(T, tb, fR, eM, aW, ff, eX, bO, aT, eZ, aiT, eV, ww, en, y, eA, afu); #c1(IKBKG) c2(NP_001093326) c3(NF-kappa-B essential modulator isoform b) c4(40247) c5(40248, 40249, 40250, 40251, 40252, 40253, 40254, 40255, 40256, 40257) c6( ) c7(oO, Dw, agx, dD, bPk, BF, aml, uE, agz, eq, hE, aLI, Oe, av, bPh, bjA, bjv, oj, aT, Vv, cy, bOp, K, IQ, ji, hH, Cw, aW, oV, zb, CF, bPj, lo, bw, dr, afg, ck, bjx, bPI, aGV, bPi, cP, UF, hE, bt, zA, B); #c1(IKBKG) c2(NP_001138727) c3(NF-kappa-B essential modulator isoform c) c4(57454) c5(57455, 57456, 57457, 57458, 57459, 57460) c6( ) c7(oO, Dw, agx, dD, bPk, BF, aml, uE, agz, eq, hF, aLI, Oe, av, bPh, bjA, bjv, oj, aT, Vv, cy, bOp, K, IQ, ji, hH, Cw, aW, oV, zb, CF, bPj, lo, bw, dr, afg, ck, bjx bPI, aGV, bPi, cP, UF, hE, bt, zA, B); #c1(IKBKG) c2(XP_005274817) c3(NF-kappa-B essential modulator isoform X2) c4( ) c5(285476) c6( ) c7(oO, Dw, agx, dD, bPk, BF, aml, uE, agz, eq, hF, aLI, Oe, av, bPh, bjA, bjv, oj, aT, Vv, cy, bOp, K, IQ, ji, hH, Cw, aW, oV, zb, CF, bPj, lo, bw, dr, afg, ck, bjx, bPI, aGV, bPi, cP, UF, hE, bt, zA, B); #c1(IKBKG) c2(XP_005274818) c3(NF-kappa-B essential modulator isoform X3) c4( ) c5(285477, 285478) c6( ) c7(oO, Dw, agx, dD, bPk, BF, aml, uE, agz, eq, hF, aLI, Oe, av, bPh, bjA, bjv, oj, aT, Vv, cy, bOp, K, IQ, ji, hH, Cw, aW, oV, zb, CF, bPj, lo, bw, dr, afg, ck, bjx, bPI, aGV, bPi, cP, UF, hE, bt, zA, B); #c1(IKBKG) c2(XP_005274821) c3(NF-kappa-B essential modulator isoform XG) c4(285479) c5(285480, 285481, 285482, 285483, 285484) c6( ) c7(oO, Dw, agx, dD, bPk, BF, aml, uE, agz, eq, hF, aLI, Oe, av, bPh, bjA, bjv, oj, aT, Vv, cy, bOp, K, IQ, ji, hH, Cw, aW, oV, zb, CF, bPj, lo, bw, dr, afg, ck, bjx, bPI, aGV, bPi, cP, UF, hE, bt, zA, B); #c1(IKBKG) c2(XP_011529505) c3(NF-kappa-B essential modulator isoform X4) c4(325001) c5(325002, 325003, 325004, 325005, 325006, 325007) c6( ) c7(oO, Dw, agx, dD, bPk, BF, aml, uE, agz, eq, hF, aLI, Oe, av, bPh, bjA, bjv, oj, aT, Vv, cy, bOp, K, IQ, ji, hH, Cw, aW, oV, zb, CF, bPj, lo, bw, dr, afg, ck, bjx, bPI, aGV, bPi, cP, UF, hE, bt, zA, B); #c1(IKBKG) c2(XP_011529507) c3(NF-kappa-B essential modulator isoform X1) c4(325008, 325009, 325010, 325011) c5(325012, 325013, 325014, 325015, 325016, 325017, 325018, 325019, 325020, 325021, 325022, 325023, 325024, 325025, 325026, 325027, 325028, 325029, 325030, 325031, 325032, 325033, 325034, 325035) c6( ) c7(oO, Dw, agx, dD, bPk, BF, aml, uE, agz, eq, hF, aLI, Oe, av, bPh, bjA, bjv, oj, aT, Vv, cy, bOp, K, IQ, ji, hH, Cw, aW, oV, zb, CF, bPj, lo, bw, dr, afg, ck, bjx, bPI, aGV, bPi, cP, UF, hE, bt, zA, B); #c1(IKBKG) c2(XP_011529509) c3(NF-kappa-B essential modulator isoform X7) c4( ) c5(325036, 325037, 325038, 325039, 325040, 325041) c6( ) c7(oO, Dw, agx, dD, bPk, BF, aml, uE, agz, eq, hF, aLI, Oe, av, bPh, bjA, bjv, oj, aT, Vv, cy, bOp, K, IQ, ji, hH, Cw, aW, oV, zb, CF, bPj, lo, bw, dr, afg, ck, bjx, bPI, aGV, bPi, cP, UF, hE, bt, zA, B); #c1(IKZF1) c2(NP_001207697) c3(DNA-binding protein Ikaros isoform 5) c4(83718) c5(83719, 83720, 83721, 83722, 83723, 83724) c6( ) c7(T, ow, al, jh, fd, n, oZ, hF, q, x, fX, Bj, ox, iL, wC, A, iU, eZ, r, fe, hf, iV, ck, ou, II, bt, k, WL, ne); #c1(IKZF1) c2(NP_001207700) c3(DNA-binding protein Ikaros isoform 8) c4(83725) c5(83726, 83727, 83728, 83729, 83730, 83731) c6( ) c7(T, ow, al, jh, fd, n, oZ, hF, q, x, fX, Bj, ox, iL, wC, A, iU, eZ, r, fe, hf, iV, ck, ou, II, bt, k, WL, ne); #c1(IKZF1) c2(NP_001278766) c3(DNA-binding protein Ikaros isoform 2) c4( ) c5(110058, 110059, 110060, 110061, 110062, 110063, 110064, 110065, 110066, 110067, 110068, 110069, 110070) c6( ) c7(T, ow, al, jh, fd, n, oZ, hE, q, x, fX, Bj, ox, iL, wC, A, iU, eZ, r, fe, hf, iV, ck, ou, II, bt, k, WL, ne); #c1(IKZF1) c2(NP_001278767) c3(DNA-binding protein Ikaros isoform 3) c4( ) c5(110071, 110072, 110073, 110074, 110075, 110076, 110077, 110078) c6( ) c7(T, ow, al, jh, fd, n, oZ, hF, q, x, fX, Bj, ox, iL, wC, A, iU, eZ, r, fe, hf, iV, ck, ou, II, bt, k, WL, ne); #c1(IKZF1) c2(NP_001278769) c3(DNA-binding protein Ikaros isoform Ik-6) c4(110079) c5(110080, 110081, 110082, 110083, 110084, 110085) c6( ) c7(T, ow, al, jh, fd, n, oZ, hF, q, x, fX, Bj, ox, iL, wC, A, iU, eZ, r, fe, hf, iV, ck, ou, II, bt, k, WL, ne); #c1(IKZF1) c2(NP_006051) c3(DNA-binding protein Ikaros isoform 1) c4( ) c5(161468, 161469, 161470, 161471, 161472) c6( ) c7(T, ow, al, jh, fd, n, oZ, hF, q, x, fX, Bj, ox, iL, wC, A, iU, eZ, r, fe, hf, iV, ck, ou, II, bt, k, WL, ne); #c1(IKZF1) c2(XP_011513363) c3(DNA-binding protein Ikaros isoform X6) c4(305598) c5(305599, 305600) c6( ) c7(T, ow, al, jh, fd, n, oZ, hF, q, x, fX, Bj, ox, iL, wC, A, iU, eZ, r, fe, hf, iV, ck, ou, II, bt, k, WL, ne); #c1(IKZF1) c2(XP_011513372) c3(DNA-binding protein Ikaros isoform X9) c4(305601, 305602) c5(305603, 305604, 305605) c6( ) c7(T, ow, al, jh, fd, n, oZ, hF, q, x, fX, Bj, ox, iL, wC, A, iU, eZ, r, fe, hf, iV, ck, ou, II, bt, k, WL, ne); #c1(IKZF1) c2(XP_011513374) c3(DNA-binding protein Ikaros isoform X11) c4(305606) c5(305607, 305608) c6( ) c7(T, ow, al, jh, fd, n, oZ, hF, q, x, fX, Bj, ox, iL, wC, A, iU, eZ, r, fe, hf, iV, ck, ou, II, bt, k, WL, ne); #c1(IKZF2) c2(NP_001072994) c3(zinc finger protein Helios isoform 2) c4(35534, 35535) c5(35536, 35537, 35538, 35539, 35540, 35541, 35542, 35543, 35544, 35545, 35546) c6( ) c7(ck, aW, oe, jh, aT, k); #c1(IKZF2) c2(NP_057344) c3(zinc finger protein Helios isoform 1) c4(190200, 190201, 190202) c5(190203, 190204, 190205, 190206, 190207, 190208, 190209, 190210, 190211, 190212, 190213, 190214, 190215, 190216, 190217, 190218, 190219, 190220, 190221, 190222, 190223) c6( ) c7(ck, aW, oe, jh, aT, k); #c1(IKZF2) c2(XP_005246443) c3(zinc finger protein Helios isoform X6) c4(267147) c5(267148) c6( ) c7(ck, aW, oe, jh, aT, k); #c1(IKZF2) c2(XP_011509115) c3(zinc finger protein Helios isoform X4) c4(299697, 299698) c5(299699, 299700, 299701, 299702, 299703, 299704, 299705, 299706, 299707, 299708) c6( ) c7(ck, aW, oe, jh, aT, k); #c1(IKZF2) c2(XP_011509117) c3(zinc finger protein Helios isoform X5) c4(299709) c5( ) c6( ) c7(ck, aW, oe, jh, aT, k); #c1(IKZF2) c2(XP_011509120) c3(zinc finger protein Helios isoform X9) c4( ) c5(299710, 299711, 299712, 299713, 299714, 299715, 299716, 299717) c6( ) c7(ck, aW, oe, jh, aT, k); #c1(IKZF2) c2(XP_011509121) c3(zinc finger protein Helios isoform X10) c4(299718, 299719) c5(299720, 299721, 299722, 299723, 299724, 299725, 299726, 299727, 299728, 299729, 299730, 299731, 299732, 299733, 299734, 299735, 299736, 299737, 299738, 299739, 299740, 299741, 299742, 299743) c6( ) c7(ck, aW, oe, jh, aT, k); #c1(IKZF3) c2(NP_001244337) c3(zinc finger protein Aiolos isoform 7) c4(92203, 92204) c5(92205, 92206, 92207, 92208, 92209, 92210, 92211, 92212, 92213, 92214, 92215, 92216) c6( ) c7(ck, bM, A, aE, aW, NT, gd, cj, gw, aT, r, eZ, fd, k, jh, y, q, bc); #c1(IKZF3) c2(NP_001244338) c3(zinc finger protein Aiolos isoform 8) c4(92217) c5(92218, 92219, 92220, 92221, 92222, 92223) c6( ) c7(ck, bM, A, aE, aW, NT, gd, cj, gw, aT, r, eZ, fd, k, jh, y, q, bc); #c1(IKZF3) c2(NP_001244339) c3(zinc finger protein Aiolos isoform 9) c4(92224) c5(92225, 92226, 92227, 92228, 92229, 92230) c6( ) c7(ck, bM, A, aE, aW, NT, gd, cj, gw, aT, r, eZ, fd, k, jh, y, q, bc); #c1(IKZF3) c2(NP_001244340) c3(zinc finger protein Aiolos isoform 10) c4(92231) c5(92232, 92233, 92234, 92235, 92236, 92237) c6( ) c7(ck, bM, A, aE, aW, NT, gd, cj, gw, aT, r, eZ, fd, k, jh, y, q, bc); #c1(IKZF3) c2(NP_001244341) c3(zinc finger protein Aiolos isoform 11) c4(92238) c5(92239, 92240, 92241, 92242, 92243, 92244) c6( ) c7(ck, bM, A, aE, aW, NT, gd, cj, gw, aT, r, eZ, fd, k, jh, y, q, bc); #c1(IKZF3) c2(NP_001244342) c3(zinc finger protein Aiolos isoform 12) c4(92245) c5(92246, 92247, 92248, 92249, 92250, 92251) c6( ) c7(ck, bM, A, aE, aW, NT, gd, cj, gw, aT, r, eZ, fd, k, jh, y, q, bc); #c1(IKZF3) c2(NP_001244343) c3(zinc finger protein Aiolos isoform 13) c4(92252) c5(92253, 92254, 92255, 92256, 92257, 92258) c6( ) c7(ck, bM, A, aE, aW, NT, gd, cj, gw, aT, r, eZ, fd, k, jh, y, q, bc); #c1(IKZF3) c2(NP_036613) c3(zinc finger protein Aiolos isoform 1) c4(174840) c5(174841, 174842, 174843, 174844, 174845, 174846, 174847) c6( ) c7(ck, bM, A, aE, aW, NT, gd, cj, gw, aT, r, eZ, fd, k, jh, y, q, bc); #c1(IKZF3) c2(NP_899051) c3(zinc finger protein Aiolos isoform 2) c4(257865) c5(257866, 257867, 257868, 257869, 257870, 257871) c6( ) c7(ck, bM, A, aE, aW, NT, gd, cj, gw, aT, r, eZ, fd, k, jh, y, q, bc); #c1(IKZF3) c2(NP_899052) c3(zinc finger protein Aiolos isoform 3) c4(257872) c5(257873, 257874, 257875, 257876, 257877, 257878) c6( ) c7(ck, bM, A, aE, aW, NT, gd, cj, gw, aT, r, eZ, fd, k, jh, y, q, bc); #c1(IKZF3) c2(NP_899053) c3(zinc finger protein Aiolos isoform 4) c4(257879) c5(257880, 257881, 257882, 257883, 257884, 257885) c6( ) c7(ck, bM, A, aE, aW, NT, gd, cj, gw, aT, r, eZ, fd, k, jh, y, q, bc); #c1(IKZF3) c2(NP_899054) c3(zinc finger protein Aiolos isoform 5) c4(257886) c5(257887, 257888, 257889, 257890, 257891257892) c6( ) c7(ck, bM, A, aE, aW, NT, gd, cj, gw, aT, r, eZ, fd, k, jh, y, q, bc); #c1(IKZF3) c2(NP_899055) c3(zinc finger protein Aiolos isoform 6) c4(257893) c5(257894, 257895, 257896, 257897, 257898, 257899) c6( ) c7(ck, bM, A, aE, aW, NT, gd, cj, gw, aT, r, eZ, fd, k, jh, y, q, bc); #c1(IKZF4) c2(NP_071910) c3(zinc finger protein Eos) c4(212259) c5(212260, 212261, 212262, 212263, 212264, 212265, 212266, 212267, 212268, 212269, 212270, 212271, 212272, 212273, 212274, 212275, 212276, 212277, 212278, 212279, 212280, 212281) c6( ) c7(Qi, bEg, A, OW, qj); #c1(IKZF4) c2(XP_011536970) c3(zinc finger protein Eos isoform X3) c4(334663) c5( ) c6( ) c7(Qi, bEg, A, OW, qj); #c1(IKZF4) c2(XP_011536971) c3(zinc finger protein Eos isoform X4) c4( ) c5(334664) c6( ) c7(Qi, bEg, A, OW, qj); #c1(IKZF4) c2(XP_011536972) c3(zinc finger protein Eos isoform X5) c4( ) c5(334665) c6( ) c7(Qi, bEg, A, OW, qj); #c1(IL10) c2(XP_011507808) c3(interleukin-10 isoform X1) c4(297856) c5(297857, 297858, 297859, 297860, 297861, 297862, 297863, 297864, 297865, 297866, 297867, 297868, 297869, 297870, 297871, 297872, 297873, 297874, 297875, 297876, 297877, 297878, 297879, 297880, 297881, 297882, 297883, 297884, 297885, 297886, 297887, 297888, 297889, 297890, 297891, 297892, 297893, 297894, 297895, 297896, 297897, 297898, 297899, 297900, 297901, 297902, 297903, 297904, 297905, 297906, 297907, 297908, 297909, 297910, 297911, 297912, 297913, 297914, 297915, 297916, 297917, 297918, 297919, 297920, 297921, 297922, 297923, 297924, 297925, 297926, 297927, 297928, 297929, 297930, 297931, 297932, 297933, 297934, 297935, 297936, 297937, 297938, 297939, 297940, 297941, 297942, 297943, 297944, 297945, 297946, 297947, 297948, 297949, 297950, 297951) c6(297952) c7(T, ea, bO, fd, aoj, ci, aY, xy, aE, rw, dV, Ds, Bi, hu, hH, cp, aa, VF, ly, az, nY, vs, zC, mK, axG, ba, fT, gt, Jr, nB, dc, iA, Ji, cj, Zn, Dt, k, eg, fy, cE, aEw, LT, aYZ, bPN, ht, aj, ww, bPL, qW, cd, br, zo, aSa, IG, ey, brT, mR, aJ, sp, EU, bPr, ge, fQ, fe, CQ, adz, aBs, bOj, E, apE, DM, jv, DD, aA, cz, ol, bX, wy, q, aRo, aEE, akU, cy, jj, IM, dl, eu, bA, aFS, bf, fD, IC, bg, iy, lo, Vk, pb, Cv, sk, cT, pa, iM, tW, ac, ig, iQ, Nk, tz, aan, bt, Ze, ao, gV, iW, axd, jh, dG, fu, aue, ad, wD, aoH, hX, yt, Ae, Ot, oW, IQ, wm, bPM, WZ, bPv, qZ, ff, Of, aLI, bNZ, EZ, avG, Sm, iV, bz, aYt, DF, aDH, iq, anY, aDB, ME, If, ZW, kd, ne, rk, iu, oO, bPB, bM, qo, lD, if, e, bB, cL, gA, bh, ajC, Tz, aZO, x, bPE, bPx, ws, fS, Gb, ja, azm, bc, akl, up, JI, fc, hl, zD, kt, pD, aFU, eE, bw, eY, xD, ki, mx, aiM, hh, pJ, abh, bBT, avY, Ht, dD, wu, yG, n, aCZ, Mo, jz, bae, ec, aMj, eV, hn, bmo, xP, A, fJ, QM, GA, bds, po, amo, xe, abV, cA, Pa, Pl, aOL, at, bPs, ut, eo, fL, B, vQ, pF, dA, wL, eX, YN, fF, GC, vv, bcE, v, Qn, V, aqN, DK, rS, sl, Id, bPE, XZ, ae, blm, hM, zH, vR, ev, acB, t, vk, ck, hO, yH, vi, MH, oR, wV, eq, adg, qi, Pm, hd, od, afm, Db, aLz, ds, qh, bPA, hD, rN, JK, Xl, sj, mu, bPm, d, je, wc, NH, aFt, dN, anW, Z, aDN, bF, D, gk, Qa, Ny, wz, rH, agl, ajt, y, kS, hv, pC, fR, atj, al, CH, bPw, Ij, qj, IR, wa, AW, xE, Bc, bW, bJK, M, rB, K, aZS, aDZ, DY, dF, eL, Us, bNG, bzH, mH, aCM, bPl, bn, aAT, axu, asD, mQ, LZ, hN, aB, g, ve, uC, bPH, xK, aDs, JA, nF, aer, bPC, U, uo, dW, m, asu, aZN, NK, QO, aFQ, sQ, sw, aw, fN, BH, BF, aBI, pM, zP, eh, fK, kH, cU, Ne, wb, aDp, Ni, Og, agF, nN, jT, cM, Zj, bMc, kT, ar, acC, W, SE, mg, hs, gg, IB, Pr, it, L, aGC, fM, fG, jx, wo, aSE, bJw, j, sl, aYW, pd, eA, J, o, hh, bNO, nX, jZ, bq, kl, xR, bPt, Y, aZs, Pg, apK, r, wl, aHU, en, iK, Ym, bN, sn, c, Dy, aQd, hc, of, dh, wR, Da, rK, dy, EY, fD, sY, am, aFe, bxK, azW, CS, LX, em, bs, bPD, auq, bS, atK, ase, Ho, dP, bPz, acu, bPG, aNp, bNL, ji, NM, qE, aVZ, tb, anX, vj, xs, Sn, cr, gE, si, hp, Bu, bNW, Nq, TA, Bv, bPn, aFb, sG, aEs, aCl, ei, hE, G, eh, Jx, mF, aR, bHS, dY, iX, pk, azx, eN, hm, DA, ayT, zQ, aAu, aW, Rr, aOW, eM, uJ, zv, aSs, qR, ajm, aEj, My, bzb, Wb, Mi, ct, hd, qN, fr, aHj, aPb, ai, eW, Vs, xC, cc, bPp, ju, h, bdp, aPe, dL, bam, Nr, asp, oo, CM, aq, mo, Ca, kk, acD, lx, oU, Wt, asE, Qy, aCz, hk, FB, bm, uz, aDE, zB, bL, Ob, ka, Dw, rG, bll, eR, yk, cR, hy, OY, C, ze, aoC, bPy, ady, ga, aCY, blC, mP, aoA, qp, afQ, aT, Tj, an, af, aZQ, Uf, s, iU, oV, akY, aDm, f, OC, IY, ajl, sS, nM, Zg, aJt, vZ, AH, fP, aYx, dT, CZ, ij, Kd, gX, bPo, Ke, Zl, aD, vr, jE, pz, mC, dZ, kL, LH, qC, av, bPu, F, oz, Os, vw, jo, aFl, vO, yF, uQ, bJM, bPq, yx azP, eZ, yy, gl, aFr, xv, aF, bPK, eK, LB, es, eU, axs, atM, bE, Rv, z, aS, aGg, bPJ, ra, GF, fh, X); #c1(IL10RA) c2(NP_001549) c3(interleukin-10 receptor subunit alpha precursor) c4(118771, 118772, 118773, 118774) c5(118775, 118776, 118777, 118778, 118779, 118780, 118781, 118782, 118783, 118784, 118785, 118786, 118787, 118788, 118789, 118790, 118791, 118792, 118793, 118794, 118795, 118796, 118797, 118798) c6( ) c7(bM, sY, Dw, fM, fR, sQ, iW, al, jx, jh, fd, n, v, fr, C, uE, ai, hX, av, AW, F, bPO, dY, dV, h, Ds, dL, JK, IQ, ey, ji, eL, Uf, mR, vj, mQ, eZ, aFr, fe, lo, hp, iV, uC, adz, vk, gk, iQO, uo, at, ut, aS, fy, y, cn); #c1(IL10RB) c2(NP_000619) c3(interleukin-10 receptor subunit beta precursor) c4(13986, 13987) c5(13988, 13989, 13990, 13991, 13992, 13993, 13994, 13995, 13996, 13997, 13998, 13999) c6( ) c7(bM, Dw, fM, fR, sQ, jx, bNE, fd, pl, jE, hX, AW, h, Ds, bPP, ji, IQ, IM, eu, vj, hl, eZ, aFr, fe, lo, CQ, iV, f, RB, wz, uo, ut, y, B); #c1(IL11) c2(NP_000632) c3(interleukin-11 isoform 1 precursor) c4(14131) c5(14132, 14133, 14134, 14135, 14136, 14137, 14138, 14139) c6(14140, 14141) c7(bM, T, dD, Dw, aUI, ea, IH, aw, aA, fd, aj, eq, ci, uE, JW, ai, J, ad, dP, bPE, aE, afm, aT, cy, Ds, qG, DU, iY, ji, ae, bPQ, af, hm, qk, yo, Nr, aW, Y, Hz, hl, Pg, eH, fe, aq, lo, aF, po, g, iV, eF, t, HI, pm, zV, Nq, ck, LB, aDu, iT, aCT, hk, AM, aer, AH, gX, cj, at, uz, m, EY, hE, B, y); #c1(IL11RA) c2(NP_001136256) c3(interleukin-11 receptor subunit alpha precursor) c4(54700, 54701, 54702, 54703, 54704) c5(54705, 54706, 54707, 54708, 54709, 54710, 54711, 54712, 54713, 54714, 54715, 54716, 54717, 54718, 54719, 54720, 54721, 54722, 54723, 54724, 54725, 54726, 54727, 54728, 54729, 54730, 54731, 54732, 54733, 54734, 54735, 54736, 54737, 54738, 54739, 54740, 54741, 54742) c6( ) c7(bPR, T, fM, Ny, eX, aT, cj, eV, fd, ey, ci, m, aGg, g, t, ae, ai, ad); #c1(IL12A) c2(NP_000873) c3(interleukin-12 subunit alpha precursor) c4(16694, 16695, 16696, 16697, 16698, 16699) c5(16700, 16701, 16702, 16703, 16704, 16705, 16706, 16707, 16708, 16709, 16710, 16711, 16712, 16713, 16714, 16715, 16716, 16717, 16718, 16719, 16720, 16721, 16722, 16723) c6(16724, 16725, 16726, 16727, 16728, 16729) c7(bM, T, if, fd, cL, ci, aR, vV, bW, pX, dV, Ds, wt, bc, axu, g, as, eE, eF, uC, cm, fT, WO, xD, U, cj, k, dD, fN, aj, qN, eh, ai, aPb, h, IG, eV, dL, A, fe, aq, yq, Wt, kT, at, uz, eo, B, ek, Dw, fG, jx, eX, aA, OY, V, eA, aEE, mP, hb, Id, aT, qG, ae, af, hM, Y, Pg, pb, ov, sn, ac, ig, WP, sY, hl, aD, iW, jh, eq, jE, ad, wD, hX, oW, hD, uQ, eH, eZ, aF, hp, bz, aCI, xg); #c1(IL12B) c2(NP_002178) c3(interleukin-12 subunit beta precursor) c4(126331) c5(126332, 126333, 126334, 126335, 126336, 126337) c6( ) c7(bM, T, fR, Js, atj, if, fd, gA, Tz, AW, vV, dV, Ds, hu, hH, bc, aa, axu, az, LZ, da, g, eE, uC, fT, Jr, xD, k, eg, dD, sw, aw, ht, n, qN, pM, eh, ai, cc, ju, cU, h, dL, bOp, A, mR, aXy, sp, fe, aq, CQ, gG, dB, at, fL, Pr, B, Jo, cn, bL, Dw, Ik, fG, jx, aA, cz, aSE, OY, j, C, Qo, V, pd, q, eA, ga, aEE, mP, jZ, apJ, aT, bPT, le, hM, aFK, r, lo, en, ov, iQ, ig, aJt, dy, sY, azW, em, axd, iW, jh, dG, ah, eq, pl, kL, hX, wD, F, oW, hD, rN, yF, uQ, bPS, qZ, ff, cr, eZ, hp, iV, atM, Om, z, Ny, aED, hE, y); #c1(IL12RB1) c2(NP_001276953) c3(interleukin-12 receptor subunit beta-1 isoform 4) c4( ) c5(108714, 108715) c6( ) c7(bM, sY, bOi, Dw, Ik, fR, iW, ht, jx, fd, C, wD, dP, AW, oW, dV, aDa, Ds, bOp, hu, bc, eu, uQ, aa, aEV, A, B, qZ, sp, vj, Zf, wc, cr, eZ, apx, eE, uC, bPK, op, xK, Pa, ig, bbx, cj, CZ, k, fL, y, bhp); #c1(IL12RB1) c2(NP_005526) c3(interleukin-12 receptor subunit beta-1 isoform 1 precursor) c4(157094) c5(157095, 157096, 157097, 157098, 157099, 157100, 157101, 157102) c6( ) c7(bM, sY, bOi, Dw, Ik, fR, iW, ht, jx, fd, C, wD, dP, AW, oW, dV, aDa, Ds, bOp, hu, bc, eu, uQ, aa, aEV, A, B, qZ, sp, vj, Zf, wc, cr, eZ, apx, eE, uC, bPK, op, xK, Pa, ig, bbx, cj, CZ, k, fL, y, bhp); #c1(IL12RB1) c2(NP_714912) c3(interleukin-12 receptor subunit beta-1 isoform 2 precursor) c4(246596) c5(246597, 246598, 246599, 246600, 246601) c6( ) c7(bM, sY, bOi, Dw, Ik, fR, iW, ht, jx, fd, C, wD, dP, AW, oW, dV, aDa, Ds, bOp, hu, bc, eu, uQ, aa, aEV, A, B, qZ, sp, vj, Zf, wc, cr, eZ, apx, eE, uC, bPK, op, xK, Pa, ig, bbx, cj, CZ, k, fL, y, bhp); #c1(IL12RB1) c2(XP_011526279) c3(interleukin-12 receptor subunit beta-1 isoform X13) c4( ) c5(320546) c6( ) c7(bM, sY, bOi, Dw, Ik, fR, iW, ht, jx, fd, C, wD, dP, AW, oW, dV, aDa, Ds, bOp, hu, bc, eu, uQ, aa, aEV, A, B, qZ, sp, vj, Zf, wc, cr, eZ, apx, eE, uC, bPK, op, xK, Pa, ig, bbx, cj, CZ, k, fL, y, bhp); #c1(IL13) c2(NP_002179) c3(interleukin-13 precursor) c4(126338) c5(126339, 126340, 126341, 126342, 126343, 126344) c6( ) c7(lD, bM, G, T, aC, xS, fR, atj, if, fd, cL, zh, ci, bh, IR, Jx, asr, fw, bPX, Tz, ip, wa, AW, xE, aE, fS, dV, Ds, aDZ, azx, bc, bzH, aa, ly, bbC, bn, aAg, aW, mQ, Du, bPU, nY, kt, aB, g, eE, bJy, bwe, uC, fT, It, buT, Jr, aCT, nB, Ip, iA, aDs, cj, uo, Hb, m, eg, hh, aSs, qR, uL, abh, bFn, bBT, cE, aZt, Ht, FW, dD, akc, sQ, NT, fN, n, BH, aj, fr, qN, pM, eh, ai, acy, baA, jz, aow, kH, cU, IG, h, dL, dU, ey, eV, aDp, Nr, asp, mR, A, sp, aCx, fe, po, kp, CQ, gG, kk, cM, lx, yR, ar, aDu, dB, ajd, JM, at, uz, ut, L, bPV, bL, Dw, jv, fM, dA, DD, fG, eX, aA, cz, hz, hy, j, C, q, J, o, eA, mP, blN, jZ, sl, apJ, aT, bPW, aAD, DX, IM, ae, af, aAi, jf, Uf, xR, oV, Y, fO, r, Ox, akY, lo, Xk, bu, en, t, iK, pb, bN, ajl, cT, Ta, bJk, OW, c, rR, iM, hr, wR, dy, yH, aan, fD, fl, blu, On, aCA, wi, aDy, iW, jh, bS, ah, eq, Fc, ase, ad, wD, aoH, dP, hX, av, hd, afm, oz, ds, Tx, hD, JK, aNp, IQ, ji, amY, Xl, NM, yF, uQ, Dl, d, je, bPY, ff, cr, eZ, dN, aFr, xv, aF, aDP, iV, jg, bz, DF, Nq, LB, Cq, eU, z, asq, aDB, aCl, rH, oQ, IC, xg, y, Tc); #c1(IL13RA1) c2(NP_001551) c3(interleukin-13 receptor subunit alpha-1 precursor) c4(118799, 118800) c5(118801, 118802, 118803, 118804, 118805, 118806, 118807, 118808, 118809, 118810, 118811, 118812) c6( ) c7(bM, T, AW, Dw, U, cr, at, Ds, JK, ey, K, eA, bu, eE, ji, pb); #c1(IL13RA1) c2(XP_011529639) c3(interleukin-13 receptor subunit alpha-1 isoform X2) c4(325286) c5(325287, 325288, 325289, 325290, 325291, 325292) c6( ) c7(bM, T, AW, Dw, U, cr, at, Ds, JK, ey, K, eA, bu, eE, ji, pb); #c1(IL13RA2) c2(NP_000631) c3(interleukin-13 receptor subunit alpha-2 precursor) c4(14117) c5(14118, 14119, 14120, 14121, 14122, 14123, 14124, 14125, 14126, 14127, 14128, 14129, 14130) c6( ) c7(bM, sY, T, Dw, hy, fr, ci, eA, ad, ib, aE, aT, Ds, JK, ji, amY, ae, d, oV, fc, cr, as, bu, eE, t, uC, iK, pb, DF, dB, at, m, hS); #c1(IL15) c2(NP_000576) c3(interleukin-15 isoform 1 preproprotein) c4(12844, 12845) c5(12846, 12847, 12848, 12849, 12850, 12851, 12852, 12853, 12854, 12855, 12856, 12857, 12858, 12859, 12860, 12861, 12862, 12863, 12864, 12865, 12866, 12867, 12868, 12869, 12870, 12871, 12872, 12873, 12874, 12875, 12876, 12877, 12878, 12879, 12880, 12881, 12882, 12883, 12884, 12885, 12886, 12887, 12888, 12889, 12890, 12891, 12892, 12893, 12894, 12895, 12896, 12897, 12898, 12899, 12900, 12901, 12902, 12903, 12904, 12905, 12906, 12907, 12908, 12909, 12910, 12911, 12912, 12913, 12914, 12915, 12916, 12917, 12918, 12919, 12920, 12921, 12922, 12923, 12924, 12925, 12926, 12927, 12928, 12929, 12930, 12931, 12932, 12933, 12934, 12935, 12936, 12937, 12938, 12939, 12940, 12941, 12942, 12943, 12944, 12945, 12946, 12947, 12948, 12949) c6(12950) c7(bM, T, fR, ea, e, eb, bB, fd, ci, Jx, amW, x, bv, AW, aE, Ds, rB, K, hH, cp, aa, mH, eG, aW, eE, eE, uC, bwe, cm, ou, eM, Jr, Jp, cj, uo, dW, k, m, Ht, dD, akc, sQ, NT, fr, qW, ai, eW, ft, cc, WB, ju, kH, cU, Ne, h, dL, bl, afu, Nr, A, RT, sp, CM, fe, aq, po, kk, xe, cM, adz, ar, at, pg, ut, aiS, fL, B, bL, Dw, Ik, dA, DD, cz, hz, v, j, V, o, aT, ae, bA, azU, xR, oV, Y, ev, bg, lo, Ph, en, t, f, FT, bN, ck, iM, kP, bdP, Da, rK, yH, bt, jh, eq, mC, ad, wD, dP, F, fX, oW, JK, ji, IQ, iL, yF, uQ, Dl, je, yx, eH, ff, cr, eZ, dN, Mz, hp, jg, iV, bz, aJx, Nq, TA, bPZ, Bv, bE, aFb, gZ, ei, y, X); #c1(IL15) c2(NP_751915) c3(interleukin-15 isoform 2 preproprotein) c4(248544) c5(248545, 248546, 248547, 248548, 248549, 248550, 248551, 248552, 248553, 248554, 248555, 248556, 248557, 248558) c6( ) c7(bM, T, fR, ea, e, eh, bB, fd, ci, Jx, amW, x, bv, AW, aE, Ds, rB, K, hH, cp, aa, mH, eG, aW, eE, eE, uC, bwe, cm, ou, eM, Jr, Jp, cj, uo, dW, k, m, Ht, dD, akc, sQ, NT, fr, qW, ai, eW, ft, cc, WB, ju, kH, cU, Ne, h, dL, bl, afu, Nr, A, RT, sp, CM, fe, aq, po, kk, xe, cM, adz, ar, at, pg, ut, aiS, fL, B, bL, Dw, Ik, dA, DD, cz, hz, v, j, V, o, aT, ae, bA, azU, xR, oV, Y, ev, bg, lo, Ph, en, t, f, FT, bN, ck, iM, kP, bdP, Da, rK, yH, bt, jh, eq, mC, ad, wD, dP, F, fX, oW, JK, ji, IQ, iL, yF, uQ, Dl, je, yx, eH, ff, cr, eZ, dN, Mz, hp, jg, iV, bz, aJx, Nq, TA, bPZ, Bv, bE, aFb, gZ, ei, y, X); #c1(IL15RA) c2(NP_001230468) c3(interleukin-15 receptor subunit alpha isoform 3) c4(86311, 86312) c5(86313, 86314, 86315, 86316, 86317, 86318, 86319, 86320, 86321, 86322, 86323) c6( ) c7(bM, Dw, fM, akc, v, j, ad, F, nX, kH, aT, Ds, dL, IQ, ae, Nr, aW, vj, cr, dN, po, fe, beP, g, iV, bJ, Nq, ck, bE, at, ei, ne); #c1(IL15RA) c2(NP_002180) c3(interleukin-15 receptor subunit alpha isoform 1 precursor) c4(126345, 126346) c5(126347, 126348, 126349, 126350, 126351, 126352, 126353) c6( ) c7(bM, Dw, fM, akc, v, j, ad, F, nX, kH, aT, Ds, dL, IQ, ae, Nr, aW, vj, cr, dN, po, fe, beP, g, iV, bJ, Nq, ck, bE, at, ei, ne); #c1(IL15RA) c2(NP_751950) c3(interleukin-15 receptor subunit alpha isoform 2 precursor) c4(248603, 248604) c5(248605, 248606, 248607, 248608, 248609, 248610) c6( ) c7(bM, Dw, fM, akc, v, j, ad, F, nX, kH, aT, Ds, dL, IQ, ae, Nr, aW, vj, cr, dN, po, fe, beP, g, iV, bJ, Nq, ck, bE, at, ei, ne); #c1(IL15RA) c2(XP_011517768) c3(interleukin-15 receptor subunit alpha isoform X6) c4( ) c5(311630, 311631, 311632, 311633, 311634, 311635, 311636, 311637, 311638, 311639, 311640, 311641, 311642, 311643, 311644, 311645, 311646, 311647) c6( ) c7(bM, Dw, fM, akc, v, j, ad, F, nX, kH, aT, Ds, dL, IQ, ae, Nr, aW, vj, cr, dN, po, fe, beP, g, iV, bJ, Nq, ck, bE, at, ei, ne); #c1(IL15RA) c2(XP_011517769) c3(interleukin-15 receptor subunit alpha isoform X7) c4( ) c5(311648) c6( ) c7(bM, Dw, fM, akc, v, j, ad, F, nX, kH, aT, Ds, dL, IQ, ae, Nr, aW, vj, cr, dN, po, fe, beP, g, iV, bJ, Nq, ck, bE, at, ei, ne); #c1(IL15RA) c2(XP_011517770) c3(interleukin-15 receptor subunit alpha isoform X8) c4(311649) c5(311650, 311651, 311652, 311653, 311654) c6( ) c7(bM, Dw, fM, akc, v, j, ad, F, nX, kH, aT, Ds, dL, IQ, ae, Nr, aW, vj, cr, dN, po, fe, beP, g, iV, bJ, Nq, ck, bE, at, ei, ne); #c1(IL15RA) c2(XP_011517774) c3(interleukin-15 receptor subunit alpha isoform X12) c4(311655) c5( ) c6( ) c7(bM, Dw, fM, akc, v, j, ad, F, nX, kH, aT, Ds, dL, IQ, ae, Nr, aW, vj, cr, dN, po, fe, beP, g, iV, bJ, Nq, ck, bE, at, ei, ne); #c1(IL15RA) c2(XP_011517778) c3(interleukin-15 receptor subunit alpha isoform X16) c4(311656) c5(311657, 311658, 311659, 311660, 311661, 311662) c6( ) c7(bM, Dw, fM, akc, v, j, ad, F, nX, kH, aT, Ds, dL, IQ, ae, Nr, aW, vj, cr, dN, po, fe, beP, g, iV, bJ, Nq, ck, bE, at, ei, ne); #c1(IL15RA) c2(XP_011517779) c3(interleukin-15 receptor subunit alpha isoform X17) c4(311663) c5(311664, 311665, 311666, 311667, 311668, 311669) c6( ) c7(bM, Dw, fM, akc, v, j, ad, F, nX, kH, aT, Ds, dL, IQ, ae, Nr, aW, vj, cr, dN, po, fe, beP, g, iV, bJ, Nq, ck, bE, at, ei, ne); #c1(IL16) c2(NP_001165599) c3(pro-interleukin-16 isoform 3) c4(67816, 67817, 67818, 67819, 67820) c5(67821, 67822, 67823, 67824, 67825, 67826, 67827, 67828, 67829, 67830, 67831, 67832, 67833, 67834, 67835, 67836, 67837, 67838, 67839, 67840, 67841, 67842, 67843, 67844, 67845, 67846, 67847, 67848) c6( ) c7(bM, T, Dw, fR, if, iW, jx, jh, aA, cz, n, fd, j, jE, qN, IR, fr, pz, q, cd, ad, hX, bOV, dP, x, Db, sN, apJ, aT, hD, SH, Ds, hn, h, ji, ae, aa, d, je, xR, aW, oV, fJ, bg, gC, eZ, r, dN, nY, fe, aF, iV, eE, t, uC, pb, ck, es, cT, ok, iM, xT, bQa, xO, z, cj, at, uz, k, m, oQ, hh, y, B); #c1(IL16) c2(XP_005254399) c3(pro-interleukin-16 isoform X3) c4(273181) c5(273182, 273183, 273184) c6( ) c7(bM, 1 Dw, fR, if, iW, jx, jh, aA, cz, n, fd, j, jE, qN, IR, fr, pz, q, cd, ad, hX, bOV, dP, x, Db, sN, apJ, aT, hD, SH, Ds, hn, h, ji, ae, aa, d, je, xR, aW, oV, fJ, bg, gC, eZ, r, dN, nY, fe, aF, iV, eE, t, uC, pb, ck, es, cT, ok, iM, xT, bQa, xO, z, cj, at, uz, k, m, oQ, hh, y, B); #c1(IL16) c2(XP_005254403) c3(pro-interleukin-16 isoform X1) c4(273185) c5(273186, 273187, 273188, 273189, 273190, 273191, 273192, 273193, 273194, 273195, 273196) c6( ) c7(bM, T, Dw, fR, if, iW, jx, jh, aA, cz, n, fd, j, jE, qN, IR, fr, pz, q, cd, ad, hX, bOV, dP, x, Db, sN, apJ, aT, hD, SH, Ds, hn, h, ji, ae, aa, d, je, xR, aW, oV, fJ, bg, gC, eZ, r, dN, nY, fe, aF, iV, eE, t, uC, pb, ck, es, cT, ok, iM, xT, bQa, xO, z, cj, at, uz, k, m, oQ, hh, y, B); #c1(IL16) c2(XP_011519820) c3(pro-interleukin-16 isoform X4) c4(314560) c5( ) c6( ) c7(bM, T, Dw, fR, if, iW, jx, jh, aA, cz, n, fd, j, jE, qN, IR, fr, pz, q, cd, ad, hX, bOV, dP, x, Db, sN, apJ, aT, hD, SH, Ds, hn, h, ji, ae, aa, d, je, xR, aW, oV, fJ, bg, gC, eZ, r, dN, nY, fe, aF, iV, eE, t, uC, pb, ck, es, cT, ok, iM, xT, bQa, xD, z, cj, at, uz, k, m, oQ, hh, y, B); #c1(IL16) c2(XP_011519821) c3(pro-interleukin-16 isoform X5) c4( ) c5(314561, 314562, 314563, 314564, 314565, 314566) c6( ) c7(bM, T, Dw, fR, if, iW, jx, jh, aA, cz, n, fd, j, jE, qN, IR, fr, pz, q, cd, ad, hX, bOV, dP, x, Db, sN, apJ, aT, hD, SH, Ds, hn, h, ji, ae, aa, d, je, xR, aW, oV, fJ, bg, gC, eZ, r, dN, nY, fe, aF, iV, eE, t, uC, pb, ck, es, cT, ok, iM, xT, bQa, xO, z, cj, at, uz, k, m, oQ, hh, y, B); #c1(IL16) c2(XP_011519822) c3(pro-interleukin-16 isoform X2) c4(314567) c5(314568, 314569, 314570, 314571, 314572, 314573, 314574) c6( ) c7(bM, T, Dw, fR, if, iW, jx, jh, aA, cz, n, fd, j, jE, qN, IR, fr, pz, q, cd, ad, hX, bOV, dP, x, Db, sN, apJ, aT, hD, SH, Ds, hn, h, ji, ae, aa, d, je, xR, aW, oV, fJ, bg, gC, eZ, r, dN, nY, fe, aF, iV, eE, t, uC, pb, ck, es, cT, ok, iM, xT, bQa, xO, z, cj, at, uz, k, m, oQ, hh, y, B); #c1(IL17A) c2(NP_002181) c3(interleukin-17A precursor) c4(126354) c5(126355, 126356, 126357, 126358, 126359, 126360) c6( ) c7(oO, bM, T, fR, ea, if, e, al, fd, bB, cL, Vd, zh, ci, qj, Qp, aY, aDI, wa, xE, aDk, Be, bW, dE, M, Ds, Bi, K, aDZ, hu, hH, LG, dF, bc, eL, hm, tw, DA, Jl, aW, az, hl, aXc, asD, mQ, HA, fc, pL, nr, eE, eF, mK, aik, ba, fT, It, y, eM, Jr, xD, aCT, aDs, mx, U, cj, m, gn, fy, aSs, uL, Ht, dD, aw, yG, ht, fN, aj, uE, pM, qN, pU, qW, cd, ai, eW, baA, ke, zw, pN, Xe, cU, h, eV, dL, ZN, aDp, bxg, hi, Nr, mR, A, EU, arp, bQc, po, fe, Zb, Wt, aBs, aDu, Pa, bbx, If, JM, bm, at, uz, eo, fL, Pr, B, Dw, Ik, eR, DD, aYB, fG, IH, eX, aA, cz, hz, v, j, ON, C, OY, V, pd, q, J, eA, ady, aCX, bNO, jZ, aCV, aT, Oi, cy, qG, jj, bq, Cy, dl, eu, Ie, qw, bNR, bf, s, xR, Y, fO, Pg, bg, la, r, aMA, lo, aDm, en, ajF, t, pb, cT, iQ, ua, c, ac, ig, wO, hc, dh, AH, dT, wR, CZ, yH, fD, byK, zu, ao, vi, hl, akd, Ke, aDy, aD, dM, df, bQb, ha, jh, wV, eq, jE, atK, mC, wD, LH, dP, hX, av, sN, oz, ds, oW, Os, dm, hD, JK, vB, IQ, ji, NM, yF, uQ, Dl, d, lx, Zf, ff, eH, cr, eZ, CF, dN, aF, hp, iV, bz, aDH, Nq, gk, Bv, eU, zr, bE, z, aCl, gy, aS, bPJ, cP, ME, hE, ra, iu, bEt, pC); #c1(IL17B) c2(NP_055258) c3(interleukin-17B precursor) c4(180101) c5(180102, 180103, 180104, 180105, 180106, 180107) c6( ) c7(bM, T, dD, ea, IH, qj, eq, mF, ai, xE, aE, ws, M, aT, cU, cy, K, IQ, bU, af, bA, aW, fO, cr, eZ, hp, iV, eE, bz, fq, DF, wg, ac, eM, bbx, Dt, byK, y, pC); #c1(IL17C) c2(NP_037410) c3(interleukin-17C precursor) c4(175360) c5(175361, 175362, 175363, 175364, 175365, 175366) c6( ) c7(T, hl, fM, dA, aNk, fN, aA, bB, fd, aj, jh, jE, V, mC, J, ai, hX, eA, xE, aT, cU, ahr, h, aNj, bK, ji, Qe, A, d, aW, Y, yx, ev, hl, cr, r, dN, eZ, lo, aF, hp, fe, jg, iV, kk, t, eE, cm, Wt, eK, eU, ac, bE, cj, at, MJ, eo, m, fL, y); #c1(IL17D) c2(NP_612141) c3(interleukin-17D precursor) c4(236041) c5(236042, 236043, 236044, 236045, 236046) c6( ) c7(oO, bM, T, ea, al, bB, zh, xE, ws, K, hu, DY, hH, DA, PL, eE, axp, ba, It, eM, dW, m, qR, cZ, dD, JZ, ht, aj, qW, ai, aDF, h, bQd, dd, A, mR, fe, jT, ar, W, bbx, at, eo, Pr, B, bL, jx, fF, v, ON, C, V, pd, q, J, DK, cy, Cy, ae, oV, Y, fO, bg, r, aMA, lo, aDm, ck, ig, AH, dT, wR, CZ, yH, fD, byK, bt, Ke, jh, eq, jE, atK, ad, hX, oz, ds, Os, hD, ji, IQ, Zf, cr, eZ, dN, iV, bz, bE, z, agl, hE, y); #c1(IL17D) c2(XP_011533418) c3(interleukin-17D isoform X1) c4( ) c5(329514) c6( ) c7(oO, bM, T, ea, al, bB, zh, xE, ws, K, hu, DY, hH, DA, pL, eE, axp, ba, It, eM, dW, m, qR, cZ, dD, JZ, ht, aj, qW, ai, aDF, h, bQd, dd, A, mR, fe, jT, ar, W, bbx, at, eo, Pr, B, bL, jx, fF, v, ON, C, V, pd, q, J, DK, cy, Cy, ae, oV, Y, fO, bg, r, aMA, lo, aDm, ck, ig, AH, dT, wR, CZ, yH, fD, byK, bt, Ke, jh, eq, jE, atK, ad, hX, oz, ds, Os, hD, ji, IQ, Zf, cr, eZ, dN, iV, bz, bE, z, agl, hE, y); #c1(IL17F) c2(XP_011512578) c3(interleukin-17F isoform X1) c4(303488) c5(303489, 303490, 303491, 303492, 303493, 303494) c6( ) c7(bM, T, aC, akd, aw, aA, bB, aj, wy, pd, J, xE, aE, ds, aT, hD, dL, ji, hH, eL, aa, qw, Nr, JI, aW, cr, eZ, bQc, po, fe, aF, iV, eE, bz, pb, mK, Nq, bQe, fT, It, Pa, bE, at, dT, CZ, y, bt); #c1(IL17RA) c2(NP_001276834) c3(interleukin-17 receptor A isoform 2 precursor) c4(108387) c5(108388, 108389, 108390, 108391, 108392, 108393) c6( ) c7(gh, bM, Dw, eR, cz, aY, atK, ad, wD, sN, ds, Ds, ae, eu, eH, lo, eF, Pa, bQf, wR, CZ, yH, y); #c1(IL17RA) c2(NP_055154) c3(interleukin-17 receptor A isoform 1 precursor) c4(179484) c5(179485, 179486, 179487, 179488, 179489, 179490) c6( ) c7(gh, bM, Dw, eR, cz, aY, atK, ad, wD, sN, ds, Ds, ae, eu, eH, lo, eF, Pa, bQf, wR, CZ, yH, y); #c1(IL17RB) c2(NP_061195) c3(interleukin-17 receptor B precursor) c4(199917) c5(199918, 199919, 199920, 199921, 199922, 199923) c6( ) c7(bM, T, A, xE, iT, aW, aT, fd, n, aoj, m, t); #c1(IL17RC) c2(NP_001190192) c3(interleukin-17 receptor C isoform 4 precursor) c4(80339) c5(80340, 80341, 80342, 80343, 80344, 80345) c6( ) c7(gh, T, W, jZ, wR, V, ae, ad); #c1(IL17RC) c2(NP_001190193) c3(interleukin-17 receptor C isoform 5 precursor) c4( ) c5(80346) c6( ) c7(gh, T, W, jZ, wR, V, ae, ad); #c1(IL17RC) c2(NP_001190194) c3(interleukin-17 receptor C isoform 6 precursor) c4(80347, 80348) c5(80349, 80350, 80351, 80352, 80353, 80354, 80355, 80356, 80357, 80358, 80359, 80360, 80361, 80362, 80363, 80364, 80365) c6( ) c7(gh, T, W, jZ, wR, V, ae, ad); #c1(IL17RC) c2(NP_116121) c3(interleukin-17 receptor C isoform 3 precursor) c4(225428, 225429) c5(225430, 225431, 225432, 225433, 225434, 225435) c6( ) c7(gh, T, W, jZ, wR, V, ae, ad); #c1(IL17RC) c2(NP_703190) c3(interleukin-17 receptor C isoform 1 precursor) c4(246083) c5(246084, 246085, 246086, 246087, 246088, 246089) c6( ) c7(gh, T, W, jZ, wR, V, ae, ad); #c1(IL17RC) c2(NP_703191) c3(interleukin-17 receptor C isoform 2 precursor) c4(246090) c5(246091, 246092, 246093, 246094, 246095, 246096) c6( ) c7(gh, T, W, jZ, wR, V, ae, ad); #c1(IL17RD) c2(NP_060033) c3(interleukin-17 receptor D precursor) c4(193781) c5(193782, 193783, 193784, 193785, 193786, 193787, 193788, 193789, 193790, 193791, 193792, 193793, 193794, 193795, 193796) c6( ) c7(T, agl, qK, oW, ci, bX, ae, ad, bQg); #c1(IL17RD) c2(XP_005265295) c3(interleukin-17 receptor D isoform X2) c4( ) c5(279462) c6( ) c7(T, agl, qK, oW, ci, bX, ae, ad, bQg); #c1(IL17RD) c2(XP_006713272) c3(interleukin-17 receptor D isoform X3) c4( ) c5(287066, 287067, 287068, 287069, 287070) c6( ) c7(T, agl, qK, oW, ci, bX, ae, ad, bQg); #c1(IL17RD) c2(XP_011532151) c3(interleukin-17 receptor D isoform X1) c4(328206, 328207, 328208) c5(328209, 328210, 328211, 328212, 328213, 328214, 328215) c6( ) c7(T, agl, qK, oW, ci, bX, ae, ad, bQg); #c1(IL17RE) c2(NP_001180309) c3(interleukin-17 receptor E isoform 6 precursor) c4(73822) c5(73823, 73824, 73825, 73826, 73827, 73828, 73829, 73830) c6(73831, 73832) c7(dV, oW, eg); #c1(IL17RE) c2(NP_705613) c3(interleukin-17 receptor E isoform 1 precursor) c4( ) c5(246126, 246127, 246128, 246129, 246130, 246131, 246132, 246133, 246134, 246135, 246136, 246137) c6(246138, 246139, 246140, 246141) c7(dV, oW, eg); #c1(IL17RE) c2(NP_705614) c3(interleukin-17 receptor E isoform 2) c4( ) c5(246142, 246143, 246144, 246145, 246146, 246147, 246148, 246149) c6(246150, 246151) c7(dV, oW, eg); #c1(IL17RE) c2(NP_705616) c3(interleukin-17 receptor E isoform 5) c4(246152, 246153) c5(246154, 246155, 246156, 246157, 246158, 246159, 246160, 246161, 246162, 246163) c6(246164, 246165) c7(dV, oW, eg); #c1(IL17RE) c2(XP_006713038) c3(interleukin-17 receptor E isoform X3) c4(286985) c5( ) c6( ) c7(dV, oW, eg); #c1(IL17REL) c2(NP_001001694) c3(putative interleukin-17 receptor E-like) c4(18950) c5(18951, 18952, 18953, 18954, 18955, 18956, 18957, 18958) c6( ) c7(iV); #c1(IL17REL) c2(XP_011528991) c3(putative interleukin-17 receptor E-like isoform X1) c4( ) c5(324356, 324357) c6( ) c7(iV); #c1(IL18) c2(NP_001230140) c3(interleukin-18 isoform 2 proprotein) c4(85982) c5(85983, 85984, 85985, 85986, 85987, 85988, 85989, 85990) c6(85991, 85992) c7(oO, bM, T, UH, fR, azf, pf, vf, ea, e, if, CH, fd, cL, ci, bh, aY, Tz, amW, oQ, xy, xE, lu, Bc, bW, M, JT, dV, ja, Ds, K, bah, hu, wt, hH, pk, DY, bc, akX, cp, aa, hm, DA, aiV, up, YY, aW, az, hl, asD, mQ, fc, g, eE, cm, uC, GR, ba, y, fT, It, iA, iT, Ip, vA, mx, wB, cj, uo, dW, mk, Hb, m, IS, eg, cE, abh, nD, dD, JZ, sQ, lo, ht, aw, fN, n, BH, aj, fr, ct, uE, qN, qW, cd, bQh, ai, baA, cc, hw, ec, brX, aAh, Lv, cU, jy, h, eV, uV, aDp, A, CN, sp, fe, aq, nN, cM, op, ar, kT, GG, W, xD, NL, If, JM, at, ut, eo, fL, bni, Pr, B, cB, it, bL, Ob, Dw, aAf, Ik, DD, wL, fG, jx, eX, rf, aA, cz, fF, hy, v, j, C, bX, V, q, J, o, ady, aPW, ga, aEE, mP, WY, apJ, qp, rS, aT, cy, qG, aAD, rz, Cy, ae, af, dl, eu, kl, iU, oV, Y, fO, bg, r, lo, aZg, en, t, iK, pb, ck, ajl, cT, bJk, sn, ac, pZ, ig, hc, AH, Uq, gX, fP, rK, dy, EY, JH, fD, bt, ao, vi, hS, Kd, sY, Ve, bmQ, akd, Ke, Zl, MH, aZ, dM, aD, iW, jh, oR, bS, bQi, jE, ah, eq, pz, hF, mC, ad, dZ, hX, qC, dP, I, F, afm, oz, qh, oW, hD, vB, ji, IQ, jo, bQj, adx, NM, nJ, yF, uQ, cW, ff, cr, eZ, brp, aF, hp, Fq, iV, Z, bz, eK, LB, D, zr, bE, z, aDB, aED, II, wz, gZ, aCI, rH, ei, Lz, GF, hE, hv); #c1(IL18) c2(NP_001553) c3(interleukin-18 isoform 1 proprotein) c4(118813) c5(118814, 118815, 118816, 118817, 118818, 118819, 118820, 118821, 118822, 118823, 118824, 118825, 118826, 118827, 118828, 118829, 118830, 118831, 118832, 118833, 118834, 118835, 118836, 118837, 118838, 118839, 118840, 118841, 118842, 118843, 118844, 118845, 118846, 118847, 118848, 118849, 118850, 118851, 118852, 118853, 118854, 118855, 118856, 118857, 118858, 118859, 118860, 118861, 118862, 118863, 118864, 118865, 118866, 118867, 118868, 118869, 118870, 118871, 118872, 118873, 118874, 118875, 118876, 118877, 118912, 118913) c6(118914, 118915, 118916, 118917) c7(oO, bM, T, UH, fR, azf, pf, vf, ea, e, if, CH, fd, cL, ci, bh, aY, Tz, amW, oQ, xy, xE, lu, Bc, bW, M, JT, dV, ja, Ds, K, bah, hu, wt, hH, pk, DY, bc, akX, cp, aa, hm, DA, aiV, up, YY, aW, az, hl, asD, mQ, fc, g, eE, cm, uC, GR, ba, y, fT, It, iA, iT, Ip, vA, mx, wB, cj, uo, dW, mk, Hb, m, IS, eg, cE, abh, nD, dD, JZ, sQ, lo, ht, aw, fN, n, BH, aj, fr, ct, uE, qN, qW, cd, bQh, ai, baA, cc, hw, ec, brX, aAh, Lv, cU, jy, h, eV, uV, aDp, A, CN, sp, fe, aq, nN, cM, op, ar, kT, GG, W, xD, NL, If, JM, at, ut, eo, fL, bni, Pr, B, cB, it, bL, Ob, Dw, aAf, Ik, DD, wL, fG, jx, eX, rf, aA, cz, fF, hy, v, j, C, bX, V, q, J, o, ady, aPW, ga, aEE, mP, WY, apJ, qp, rS, aT, cy, qG, aAD, rz, Cy, ae, af, dl, eu, kl, iU, oV, Y, fO, bg, r, lo, aZg, en, t, iK, pb, ck, ajl, cT, bJk, sn, ac, pZ, ig, hc, AH, Uq, gX, fP, rK, dy, EY, JH, fD, bt, ao, vi, hS, Kd, sY, Ve, bmQ, akd, Ke, ZI, MH, aZ, dM, aD, iW, jh, oR, bS, bQi, jE, ah, eq, pz, hF, mC, ad, dZ, hX, qC, dP, I, F, afm, oz, qh, oW, hD, vB, ji, IQ, jo, bQj, adx, NM, nJ, yF, uQ, cW, ff, cr, eZ, brp, aF, hp, Fq, iV, Z, bz, eK, LB, D, zr, bE, z, aDB, aED, II, wz, gZ, aCI, rH, ei, Lz, GF, hE, hv); #c1(IL18BP) c2(NP_001034749) c3(interleukin-18-binding protein isoform a precursor) c4(32205) c5(32206, 32207, 32208, 32209, 32210, 32211, 32212, 32213, 32214, 32215, 32216, 32217, 32218, 32219, 32220, 32221, 32222, 32223, 32224, 32225, 32226, 32227, 32228, 32229, 32230, 32231, 32232, 32233, 32234, 32235, 32236, 32237, 32238, 32239, 32240, 32241, 32242, 32243) c6(32244, 32245, 32246, 32247, 32248, 32249, 32250, 32251, 32252, 32253, 32254, 32255) c7(sY, T, dD, ea, aw, jx, aET, j, eq, zP, V, cd, ga, cy, DY, bQj, A, hl, uC, c, mx, m, hE, y); #c1(IL18BP) c2(NP_001138527) c3(interleukin-18-binding protein isoform b precursor) c4(56953) c5(56954, 56955, 56956, 56957, 56958, 56959, 56960, 56961) c6(56962, 56963) c7(sY, T, dD, ea, aw, jx, aET, j, eq, zP, V, cd, ga, cy, DY, bQj, A, hl, uC, c, mx, m, hE, y); #c1(IL18BP) c2(XP_006718473) c3(interleukin-18-binding protein isoform X2) c4(291876) c5(291877, 291878, 291879, 291880, 291881, 291882, 291883, 291884) c6(291885, 291886) c7(sY, T, dD, ea, aw, jx, aET, j, eq, zP, V, cd, ga, cy, DY, bQj, A, hl, uC, c, mx, m, hE, y); #c1(IL18BP) c2(XP_011543019) c3(interleukin-18-binding protein isoform X1) c4(341716) c5(341717, 341718, 341719, 341720, 341721, 341722, 341723, 341724) c6(341725, 341726) c7(sY, T, dD, ea, aw, jx, aET, j, eq, zP, V, cd, ga, cy, DY, bQj, A, hl, uC, c, mx, m, hE, y); #c1(IL18R1) c2(NP_003846) c3(interleukin-18 receptor 1 isoform 1 precursor) c4(141353) c5(141354, 141355, 141356, 141357, 141358, 141359, 141360, 141361, 141362, 141363, 141364, 141365, 141366, 141367) c6( ) c7(bL, bM, T, Dw, aAf, dA, fR, aEj, AL, lD, fG, jx, aA, n, v, j, pl, V, ip, hX, x, AW, aE, Bj, ds, rl, dV, aT, qU, h, Ds, dz, JK, aAD, pq, af, iL, uQ, ly, A, d, mR, aAu, aW, Y, zb, oV, vj, eZ, fe, aF, hp, CQ, jg, iV, eE, iK, bz, DF, lx, ck, cT, RB, eM, iT, z, rK, k, y, bt, B, cn); #c1(IL18R1) c2(XP_005264097) c3(interleukin-18 receptor 1 isoform X2) c4(278667) c5( ) c6( ) c7(bL, bM, T, Dw, aAf, dA, fR, aEj, AL, lD, fG, jx, aA, n, v, j, pl, V, ip, hX, x, AW, aE, Bj, ds, rl, dV, aT, qU, h, Ds, dz, JK, aAD, pq, af, iL, uQ, ly, A, d, mR, aAu, aW, Y, zb, oV, vj, eZ, fe, aE, hp, CQ, jg, iV, eE, iK, bz, DF, lx, ck, cT, RB, eM, iT, z, rK, k, y, bt, B, cn); #c1(IL18R1) c2(XP_011510401) c3(interleukin-18 receptor 1 isoform X3) c4( ) c5(300960, 300961, 300962, 300963, 300964, 300965) c6( ) c7(bL, bM, T, Dw, aAf, dA, fR, aEj, AL, lD, fG, jx, aA, n, v, j, pl, V, ip, hX, x, AW, aE, Bj, ds, rl, dV, aT, qU, h, Ds, dz, JK, aAD, pq, af, iL, uQ, ly, A, d, mR, aAu, aW, Y, zb, oV, vj, eZ, fe, aE, hp, CQ, jg, iV, eE, iK, bz, DF, lx, ck, cT, RB, eM, iT, z, rK, k, y, bt, B, cn); #c1(IL18RAP) c2(NP_003844) c3(interleukin-18 receptor accessory protein precursor) c4(141336, 141337) c5(141338, 141339, 141340, 141341, 141342, 141343, 141344) c6( ) c7(bM, AW, A, pf, rl, M, cj, nf, ge, cL, fe, hp, j, iV, y, aDW); #c1(IL18RAP) c2(XP_011510390) c3(interleukin-18 receptor accessory protein isoform X1) c4(300934) c5(300935, 300936, 300937, 300938, 300939) c6( ) c7(bM, AW, A, pf, rl, M, cj, nf, ge, cL, fe, hp, j, iV, y, aDW); #c1(IL18RAP) c2(XP_011510391) c3(interleukin-18 receptor accessory protein isoform X2) c4( ) c5(300940, 300941, 300942, 300943, 300944, 300945) c6( ) c7(bM, AW, A, pf, rl, M, cj, nf, ge, cL, fe, hp, j, iV, y, aDW); #c1(IL19) c2(NP_037503) c3(interleukin-19 isoform 2 precursor) c4(175873) c5(175874, 175875, 175876, 175877, 175878) c6( ) c7(bM, Dw, atj, jx, fd, jE, C, AO, hX, aT, cU, h, Ds, ji, IQ, A, qt, aW, ff, bg, cr, eZ, en, iV, eE, zV, cT, aJt, cj, Dt, byK, adg, y); #c1(IL19) c2(NP_715639) c3(interleukin-19 isoform 1) c4(246698) c5(246699, 246700, 246701, 246702, 246703, 246704, 246705) c6( ) c7(bM, Dw, atj, jx, fd, jE, C, AO, hX, aT, cU, h, Ds, ji, IQ, A, qt, aW, ff, bg, cr, eZ, en, iV, eE, zV, cT, aJt, cj, Dt, byK, adg, y); #c1(IL1A) c2(NP_000566) c3(interleukin-1 alpha proprotein) c4(12738) c5(12739, 12740, 12741, 12742, 12743, 12744) c6( ) c7(T, ea, bO, fd, ci, aY, aE, rw, dV, Ds, zy, hH, azh, cp, aa, yo, az, ih, nY, zC, GR, zV, ba, fT, dc, cj, Uz, eg, cE, dt, aYZ, aj, qW, cd, zo, IG, ey, on, pl, mR, anP, sp, aRL, ge, fe, CQ, ajz, bOj, DM, aA, cz, bgR, g, zn, cy, aAD, Cy, dl, eu, bA, bf, fO, bg, iy, lo, rs, pb, Cv, ov, cT, rR, OW, ac, iM, ig, awN, iQ, aDR, bt, zA, ao, iW, rl, aZH, jh, dG, uu, ad, wD, hX, abg, oW, fn, iY, IQ, cH, ff, dq, EZ, Sm, iV, bQk, bz, Xs, dX, If, IC, Pk, ne, rk, iu, ra, oO, bM, vS, if, e, bB, cL, bh, Ul, Tz, bQn, bQs, eG, dH, fc, hl, awv, kt, pD, as, ir, nr, eE, eF, qJ, bQI, ii, AV, aiM, apy, dD, yG, n, oY, uE, brY, b, no, Hx, pe, zw, eV, awL, xP, A, fJ, lb, bQq, ax, yq, amo, abV, cA, hL, at, pg, ut, eo, fL, B, dA, wL, eX, fF, GC, afK, v, aNG, V, eJ, yw, aLS, rS, sl, ld, ae, hM, ev, acB, bu, t, aff, zJ, ck, hO, yH, vi, df, bQb, oR, eq, Pm, hd, Db, ds, LA, rN, ah, hD, JK, d, je, wc, rM, dN, Z, D, gk, akQ, yE, Ny, wz, gZ, aef, y, CW, hv, aC, fR, al, Qp, aMB, xE, Bc, bQo, bW, M, K, aZS, dF, eL, bzH, Hl, axu, hN, g, pL, bwe, uC, ly, rq, aDs, uy, U, adl, uo, vn, m, bi, sQ, lo, aw, aBI, abQ, eh, asS, kH, cU, wb, ap, tx, alw, nN, jT, cM, amt, ar, kT, W, afc, JM, Pr, L, aAf, fM, fG, jx, aee, hz, j, il, pd, eA, J, o, MR, lg, qG, bq, bPQ, kl, Ue, Y, r, en, wA, iK, brZ, h, dh, rK, dy, bQm, fD, sY, aFe, bxK, aZ, bS, ah, dP, fU, NY, vB, ji, NM, qE, aZI, eH, Sn, cr, nf, hp, Bv, Lj, aFb, eB, ei, hE, vt, bJx, zh, H, eN, hm, ayT, aAu, aW, Ih, OZ, hJ, yd, Jp, R, qR, aEj, bQp, wh, fr, ct, qN, aPb, ai, Vs, cc, qg, ql, rl, h, jy, dL, bam, aq, kp, dw, Wt, hk, uw, bm, uz, te, eQ, amb, bni, bL, Dw, bll, eR, C, ady, mj, ga, cF, mP, qp, aT, bK, an, kU, af, iU, oV, f, aDQ, ajl, nM, pZ, Zg, vZ, aGo, fP, IJ, Kd, Ke, Zl, aD, ha, lD, pz, mC, dZ, XB, F, ib, xl, Os, jo, aFl, uQ, Di, eZ, aFr, aF, bQr, eK, LB, es, zr, atM, bE, dJ, aS, aGg, Lz, pK, aAN, us); #c1(IL1B) c2(NP_000567) c3(interleukin-1 beta proprotein) c4(12745, 12746, 12747, 12748) c5(12749, 12750, 12751, 12752, 12753, 12754, 12755, 12756, 12757, 12758, 12759, 12760, 12761, 12762, 12763, 12764, 12765, 12766, 12767, 12768, 12769, 12770, 12771, 12772) c6( ) c7(T, ea, bO, fd, Vd, ci, aY, aDI, bQB, aE, rw, dV, Ds, hu, zy, hH, bQJ, azh, cp, aa, li, yo, az, ih, nY, vs, zC, Ik, GR, zV, ba, fT, dc, WS, cj, k, IS, eg, cE, aEw, LT, nD, dt, aYZ, ht, aj, qW, cd, zo, IG, aNj, ey, pl, mR, anP, sp, EU, aRL, ge, fQ, fe, CQ, ajz, adz, hq, iO, RB, dB, bPc, bOj, bjx, Ei, ajd, pV, E, DM, aZy, aA, cz, yV, bgR, q, zn, yu, Oi, cy, aAD, jj, DX, dl, eu, bA, bf, fO, bg, iy, lo, rs, GE, pb, ov, rR, OW, ac, iM, ig, awN, iQ, bQC, mG, DW, tz, aDR, bt, zA, bQz, ao, rA, gV, wi, iW, uG, rl, jh, dG, uu, fu, Gn, xt, ad, hX, wD, abq, oW, iY, IQ, NP, atJ, lx, cH, cW, ff, Of, nh, dq, brp, EZ, Sm, aFd, bQk, iV, bz, aYt, DF, aDH, amK, baa, Xs, dX, ME, Pk, IG, If, ne, rk, iu, bsJ, oO, bM, ra, bQI, if, e, bB, cL, bh, Tz, x, bQD, aZn, azm, bQn, bc, bQs, akl, YL, eG, Mq, up, JI, dH, fc, hl, awv, Qq, kt, pD, aoD, as, bQA, bJy, nr, eE, eF, ir, bQF, cm, qJ, eY, bw, It, bQI, ii, AV, vA, mx, aiM, hh, Vj, dD, yG, n, oY, uE, brY, b, no, Hx, ec, pe, jz, zw, aAh, eV, hn, bQx, awL, xP, A, fJ, Ib, bQq, QP, yq, amo, bQL, cA, bQK, at, pg, ut, eo, fL, bdR, cB, B, bQt, NQ, dA, wL, eX, fF, GC, afK, v, aNG, Qo, V, eJ, aPW, bQG, yw, DK, aLS, sl, Id, bau, ae, Ir, aFs, hM, vR, ev, acB, bu, aaO, t, aff, ck, zJ, Ty, wO, gX, hO, auT, ro, JH, yH, vi, kV, MH, dM, df, bQb, amQ, oR, wV, eq, Pm, hd, CJ, afm, ds, Hk, qh, LA, ah, hD, rN, JK, bQw, sj, d, je, wc, NH, aFt, rM, dN, Z, Hv, D, gk, bQE, akQ, yE, Ny, dO, wz, gZ, aef, y, CW, hv, aC, fR, atj, al, gf, Qp, aMB, bOI, AW, bOn, xE, Bc, bQo, pX, bW, M, K, aZS, DY, dF, eL, bNG, bzH, Hl, axu, mQ, hN, aB, g, pL, bwe, uC, aJX, ly, xK, rq, aDs, uy, U, uo, dW, m, bi, sQ, sw, gp, lo, aw, fN, BH, BF, aBI, eh, asS, kH, Lv, cU, Ne, aFi, wb, ap, Ni, alw, Og, nN, jT, cM, Zb, amt, bMc, kT, ar, W, bo, mg, JM, hs, it, L, aAf, fM, fG, jx, aee, wo, hz, j, il, pd, eA, J, o, MR, nX, jZ, apJ, aG, bq, bPQ, kl, Y, Pg, r, en, wA, iK, bmS, brZ, sn, c, aQd, hc, Uq, wR, rK, dy, bQm, EY, fD gx, sY, kh, id, aFe, bxK, akd, aZ, LX, em, uO, bQH, bS, ah, pl, hF, iJ, aAq, dP, fU, NY, oj, vB, ji, Dn, asU, NM, qE, asn, aVZ, eH, Sn, cr, nf, gE, hp, Bv, Lj, aFb, eB, sG, aCI, ei, hE, vt, bNu, bJx, pf, eb, zh, aR, dQ, H, eN, bQv, byv, hm, DA, aAu, LG, aW, Ih, Rr, HA, aOW, eM, iT, Jp, uJ, mk, gn, R, gD, aEj, bQp, My, bQu, Mi, ct, qN, fr, aPb, ai, Vs, cc, hw, qg, ql, rl, kl, h, jy, dL, bam, hB, he, CM, aq, mo, dw, kk, op, Wt, NL, hk, uw, bm, uz, te, va, eQ, amb, bni, bL, Dw, Ik, rG, bll, eR, dK, cR, C, ady, mj, ga, aCY, mP, uT, qp, afQ, aT, vH, bK, adV, an, kU, af, aQk, s, aZB, oV, ND, yL, iU, akY, aDm, f, aDQ, ajl, wg, pZ, aJt, vZ, aGo, AH, fP, CZ, IJ, hS, Kd, bQy, Ke, aD, ha, lD, jE, mC, dZ, XB, kL, qC, av, F, ot, ib, xl, oz, sO, Os, jo, aFI, vO, uQ, Di, bPq, aaB, eZ, aFr, xv, bQr, aF, bPK, eK, LB, zr, atM, bE, aS, aGg, bon, Lz, pK, be, XO, X, us); #c1(IL1F10) c2(NP_115945) c3(interleukin-1 family member 10) c4(224851, 224852) c5(224853, 224854, 224855, 224856, 224857, 224858, 224859, 224860, 224861, 224862, 224863, 224864, 224865, 224866, 224867, 224868, 224869, 224870, 224871, 224872, 224873, 224874) c6(224875, 224876, 224877, 224878, 224879, 224880) c7(mR, ac, aw, e, iy, j, y, eu); #c1(IL1R1) c2(XP_011509420) c3(interleukin-1 receptor type 1 isoform X1) c4(299981, 299982, 299983, 299984, 299985) c5(299986, 299987, 299988, 299989, 299990, 299991, 299992, 299993, 299994, 299995) c6( ) c7(bM, T, fR, e, al, fd, cL, bW, dV, Ds, K, eN, aW, axu, mQ, vs, pD, eF, uC, aZx, vy, uo, m, eg, nD, dD, sQ, vE, ht, n, aj, oY, eh, ai, rl, h, eV, Gw, dL, ey, A, mR, XE, ap, ge, fe, cM, Wt, kT, uz, ut, bPV, bL, Dw, fM, rG, dA, fG, eX, aA, cz, fF, hy, v, j, C, V, eA, J, ga, mP, jZ, aT, af, kl, iU, bg, iy, t, pb, iQ, ac, aQd, fD, ao, Gl, sY, jh, ah, jE, eq, XB, hX, dP, wD, F, oW, hD, rN, vB, IQ, nJ, pq, gE, sj, uQ, Dl, atJ, BN, eH, cr, eZ, iV, gk, MJ, Gu, y, ra, ne, rk, DB); #c1(IL1R1) c2(XP_011509422) c3(interleukin-1 receptor type 1 isoform X3) c4( ) c5(299996, 299997, 299998, 299999, 300000, 300001, 300002, 300003, 300004, 300005, 300006, 300007, 300008, 300009, 300010, 300011, 300012, 300013, 300014, 300015, 300016, 300017, 300018, 300019) c6( ) c7(bM, T, fR, e, al, fd, cL, bW, dV, Ds, K, eN, aW, axu, mQ, vs, pD, eF, uC, aZx, vy, uo, m, eg, nD, dD, sQ, vE, ht, n, aj, oY, eh, ai, rl, h, eV, Gw, dL, ey, A, mR, XE, ap, ge, fe, cM, Wt, kT, uz, ut, bPV, bL, Dw, fM, rG, dA, fG, eX, aA, cz, fF, hy, v, j, C, V, eA, J, ga, mP, jZ, aT, af, kl, iU, bg, iy, t, pb, iQ, ac, aQd, fD, ao, Gl, sY, jh, ah, jE, eq, XB, hX, dP, wD, F, oW, hD, rN, vB, IQ, nJ, pq, qE, sj, uQ, Dl, atJ, BN, eH, cr, eZ, iV, gk, MJ, Gu, y, ra, ne, rk, DB); #c1(IL1R2) c2(NP_004624) c3(interleukin-1 receptor type 2 isoform 1 precursor) c4( ) c5(148272, 148273, 148274, 148275, 148276, 148277, 148278, 148279, 148280, 148281) c6( ) c7(bM, sY, dD, Dw, fR, sQ, iW, jx, fd, eq, apt, dP, rl, Ds, IQ, hH, af, mR, mQ, hl, eZ, kp, iV, t, uC, afc, sG, uo, uz, ut, fD, y); #c1(IL1R2) c2(XP_006712799) c3(interleukin-1 receptor type 2 isoform X3) c4(286840) c5(286841, 286842) c6( ) c7(bM, sY, dD, Dw, fR, sQ, iW, jx, fd, eq, apt, dP, rl, Ds, IQ, hH, af, mR, mQ, hl, eZ, kp, iV, t, uC, afc, sG, uo, uz, ut, fD, y); #c1(IL1R2) c2(XP_011510108) c3(interleukin-1 receptor type 2 isoform X7) c4(300703) c5( ) c6( ) c7(bM, sY, dD, Dw, fR, sQ, iW, jx, fd, eq, apt, dP, rl, Ds, IQ, hH, af, mR, mQ, hl, eZ, kp, iV, t, uC, afc, sG, uo, uz, ut, fD, y); #c1(IL1R2) c2(XP_011510109) c3(interleukin-1 receptor type 2 isoform X8) c4( ) c5(300704, 300705, 300706, 300707, 300708, 300709) c6( ) c7(bM, sY, dD, Dw, fR, sQ, iW, jx, fd, eq, apt, dP, rl, Ds, IQ, hH, af, mR, mQ, hl, eZ, kp, iV, t, uC, afc, sG, uo, uz, ut, fD, y); #c1(IL1RAP) c2(NP_001161401) c3(interleukin-1 receptor accessory protein isoform 1 precursor) c4(65700, 65701, 65702) c5(65703, 65704, 65705, 65706, 65707, 65708, 65709, 65710, 65711, 65712, 65713, 65714, 65715, 65716, 65717, 65718, 65719, 65720, 65721, 65722) c6( ) c7(dP, av, ga, jv, eJ, fR, sQ, A, aw, hl, nf, uo, ut, v, j, K, IQ, bw, bt, B, hr); #c1(IL1RAP) c2(NP_001161402) c3(interleukin-1 receptor accessory protein isoform 2 precursor) c4(65723) c5(65724, 65725, 65726, 65727, 65728, 65729, 65730, 65731, 65732, 65733, 65734, 65735, 65736, 65737, 65738, 65739, 65740, 65741, 65742, 65743, 65744, 65745) c6( ) c7(dP, av, ga, jv, eJ, fR, sQ, A, aw, hl, nf, uo, ut, v, j, K, IQ, bw, bt, B, hr); #c1(IL1RAP) c2(NP_001161403) c3(interleukin-1 receptor accessory protein isoform 3 precursor) c4(65746) c5(65747, 65748, 65749, 65750, 65751, 65752, 65753, 65754, 65755, 65756) c6( ) c7(dP, av, ga, jv, eJ, fR, sQ, A, aw, hl, nf, uo, ut, v, j, K, IQ, bw, bt, B, hr); #c1(IL1RAPL1) c2(XP_005274498) c3(interleukin-1 receptor accesses protein-like 1 isoform X1) c4(285111) c5(285112, 285113, 285114, 285115, 285116, 285117, 285118, 285119, 285120, 285121) c6( ) c7(sY, VX, bQM, aQc, dB, Y, bCO, nf, amj, nA, rz, uC, bN); #c1(IL1RAPL2) c2(NP_059112) c3(X-linked interleukin-1 receptor accessory protein-like 2 precursor) c4(193091, 193092) c5(193093, 193094, 193095, 193096, 193097, 193098, 193099, 193100, 193101, 193102, 193103, 193104, 193105) c6( ) c7(Bv, c, lb, nf, K, rz, bN, vi); #c1(IL1RAPL2) c2(XP_011529207) c3(X-linked interleukin-1 receptor accessory protein-like 2 isoform X1) c4( ) c5(324624, 324625, 324626, 324627, 324628, 324629) c6( ) c7(Bv, c, lb, nf, K, rz, bN, vi); #c1(IL1RL1) c2(NP_001269337) c3(interleukin-1 receptor-like 1 isoform 3) c4( ) c5(101155, 101156, 101157, 101158, 101159, 101160, 101161) c6( ) c7(bM, dD, fR, ea, aYJ, e, jx, aw, fd, amj, BH, v, j, eq, C, eJ, axC, rl, aDp, aa, Nr, sp, mQ, fe, po, aDm, hp, iV, eE, Kp, f, adz, Nq, zJ, D, EW, ck, iO, iT, AH, JM, cj, wR, bQN, y, bt, rk, aZN); #c1(IL1RL1) c2(NP_003847) c3(interleukin-1 receptor-like 1 isoform 2 precursor) c4(141368, 141369, 141370) c5(141371, 141372, 141373, 141374, 141375, 141376, 141377, 141378, 141379, 141380, 141381, 141382, 141383, 141384, 141385, 141386, 141387, 141388, 141389, 141390, 141391, 141392, 141393, 141394, 141395, 141396, 141397, 141398, 141399, 141400, 141401, 141402) c6(141403) c7(bM, dD, fR, ea, aYJ, e, jx, aw, fd, amj, BH, v, j, eq, C, eJ, axC, rl, aDp, aa, Nr, sp, mQ, fe, po, aDm, hp, iV, eE, Kp, f, adz, Nq, zJ, D, EW, ck, iO, iT, AH, JM, cj, wR, bQN, y, bt, rk, aZN); #c1(IL1RL1) c2(NP_057316) c3(interleukin-1 receptor-like 1 isoform 1 precursor) c4(190074, 190075, 190076) c5(190077, 190078, 190079, 190080, 190081, 190082, 190083, 190084) c6( ) c7(bM, dD, fR, ea, aYJ, e, jx, aw, fd, amj, BH, v, j, eq, C, eJ, axC, rl, aDp, aa, Nr, sp, mQ, fe, po, aDm, hp, iV, eE, Kp, f, adz, Nq, zJ, D, EW, ck, iO, iT, AH, JM, cj, wR, bQN, y, bt, rk, aZN); #c1(IL1RL2) c2(NP_003845) c3(interleukin-1 receptor-like 2 precursor) c4( ) c5(141345, 141346, 141347, 141348, 141349, 141350, 141351, 141352) c6( ) c7(bM, rl, cr, cj, hp, an, rk); #c1(IL1RL2) c2(XP_005264092) c3(interleukin-1 receptor-like 2 isoform X5) c4(278664) c5(278665, 278666) c6( ) c7(bM, rl, cr, cj, hp, an, rk); #c1(IL1RL2) c2(XP_006712883) c3(interleukin-1 receptor-like 2 isoform X9) c4( ) c5(286902) c6( ) c7(bM, rl, cr, cj, hp, an, rk); #c1(IL1RL2) c2(XP_011510398) c3(interleukin-1 receptor-like 2 isoform X8) c4(300946) c5(300947, 300948, 300949, 300950, 300951, 300952) c6( ) c7(bM, rl, cr, cj, hp, an, rk); #c1(IL1RL2) c2(XP_011510400) c3(interleukin-1 receptor-like 2 isoform X11) c4(300953) c5(300954, 300955, 300956, 300957, 300958, 300959) c6( ) c7(bM, rl, cr, cj, hp, an, rk); #c1(IL1RN) c2(NP_000568) c3(interleukin-1 receptor antagonist protein isoform 3) c4(12773, 12774) c5(12775, 12776, 12777, 12778, 12779, 12780, 12781) c6( ) c7(uB, T, ea, fd, aeu, ci, aY, xy, aE, rw, dV, Ds, hH, aa, li, yo, az, ih, vs, ba, fT, gt, Jr, cj, Zn, Dt, k, eg, cE, aEw, LT, bQO, aYZ, vE, iB, ht, aj, qW, zo, ey, pl, mR, sp, aRL, ge, fe, CQ, RB, ajd, aA, cz, aDO, bX, q, akU, cy, aAD, dl, eu, bA, bf, fO, bg, iy, rs, pb, DW, ac, iQ, ig, bt, bQz, ao, gV, iW, jh, dG, uu, ad, wD, hX, abq, oW, IQ, DI, atJ, lx, azS, cW, ff, brp, EZ, Sm, iV, bz, amK, ME, If, IC, Pk, ne, rk, ra, oO, bM, bQT, if, e, cL, bh, UI, Tz, x, Yy, bc, bQs, akl, YL, up, Jl, dH, hl, kt, pD, as, eE, It, Kv, ii, AV, vA, mx, hh, aFf, Vj, dD, gU, n, uE, zw, ec, xP, A, fJ, lb, yq, bQL, cA, bQU, at, ut, eo, fL, cB, B, dA, fF, v, V, aPW, rS, sl, Id, ae, t, ck, wO, ro, dM, df, bQb, eq, gi, LA, ab, hD, rN, JK, bQw, d, Z, gk, yE, Ny, bQS, gZ, MJ, y, hv, fR, atj, al, bQR, CH, qj, Qp, xE, bW, M, K, wt, DY, eL, bzH, axu, qS, asD, aB, g, pL, bwe, uC, rq, uy, uo, m, sQ, sw, lo, aw, BH, apt, aBl, pM, eh, cU, wb, ap, Ni, alw, cM, Zj, amt, bMc, kT, ar, xO, JM, Pr, it, aAf, fM, fG, jx, aee, hz, j, il, eA, J, o, nX, jZ, qG, kl, Y, r, en, bN, sn, aQd, hc, cS, dy, fD, sY, aFe, akd, aZ, LX, em, bQH, bS, ah, pl, bKZ, aAq, dP, NY, ji, adx, qE, cr, hp, TA, aFb, sG, ei, boI, G, bJx, eh, aTy, bwS, dY, eN, byv, UC, UO, aAu, aW, aOW, eM, Jp, mk, R, bQP, aEj, bQp, qN, aPb, ai, Vs, cc, rl, h, dL, hB, he, aq, op, Wt, vb, bm, uz, aDE, bni, bL, Dw, rG, eR, C, ga, mP, bQQ, qp, aT, bK, an, af, s, iU, yL, akY, aDm, ajl, aJt, AH, CZ, aD, ha, jE, mC, XB, kL, qC, av, F, oz, Os, jo, pq, uQ, eZ, aFr, aF, bPK, eK, LB, zr, axs, bE, atM, z, X); #c1(IL1RN) c2(NP_776213) c3(interleukin-1 receptor antagonist protein isoform 2) c4(251002) c5(251003, 251004, 251005, 251006, 251007, 251008) c6( ) c7(uB, T, ea, fd, aeu, ci, aY, xy, aE, rw, dV, Ds, hH, aa, li, yo, az, ih, vs, ba, fT, gt, Jr, cj, Zn, Dt, k, eg, cE, aEw, LT, bQO, aYZ, vE, iB, ht, aj, qW, zo, ey, pl, mR, sp, aRL, ge, fe, CQ, RB, ajd, aA, cz, aDO, bX, q, akU, cy, aAD, dl, eu, bA, bf, fO, bg, iy, rs, pb, DW, ac, iQ, ig, bt, bQz, ao, gV, iW, jh, dG, uu, ad, wD, hX, abq, oW, IQ, Dl, atJ, lx, azS, cW, ff, brp, EZ, Sm, iV, bz, amK, ME, If, IG, Pk, ne, rk, ra, nO, bM, bQT, if, e, cL, bh, UI, Tz, x, Yy, bc, bQs, akl, YL, up, Jl, dH, hl, kt, pD, as, eE, It, Kv, ii, AV, vA, mx, hh, aFf, Vj, dD, gU, n, uE, zw, ec, xP, A, fJ, lb, yq, bQL, cA, bQU, at, ut, eo, fL, cB, B, dA, fF, v, V, aPW, rS, sl, Id, ae, t, ck, wD, ro, dM, df, bQb, eq, qi, LA, ah, hD, rN, JK, bQw, d, Z, gk, yE, Ny, bQS, gZ, MJ, y, hv, fR, atj, al, bQR, CH, qj, Qp, xE, bW, M, K, wt, DY, eL, bzH, axu, qS, asD, aB, g, pL, bwe, uC, rq, uy, uo, m, sQ, sw, lo, aw, BH, apt, aBI, pM, eh, cU, wb, ap, Ni, alw, cM, Zj, amt, bMc, kT, ar, xO, JM, Pr, it, aAf, fM, fG, jx, aee, hz, j, il, eA, J, o, nX, jZ, qG, kl, Y, r, en, bN, sn, aQd, hc, cS, dy, fD, sY, aFe, akd, aZ, LX, em, bQH, bS, ah, pl, bKZ, aAq, dP, NY, ji, adx, qE, cr, hp, TA, aFb, sG, ei, boI, G, bJx, eb, aTy, bwS, dY, eN, byv, UC, UO, aAu, aW, aOW, eM, Jp, mk, R, bQP, aEj, bQp, qN, aPb, ai, Vs, cc, rl, h, dL, hB, he, aq, op, Wt, vb, bm, uz, aDE, bni, bL, Dw, rG, eR, C, ga, mP, bQQ, qp, aT, bK, an, af, s, iU, yL, akY, aDm, ajl, aJt, AH, CZ, aD, ha, jE, mC, XB, kL, qC, av, F, oz, Ds, jo, pq, uQ, eZ, aFr, aF, bPK, eK, LB, zr, axs, bE, atM, z, X); #c1(IL1RN) c2(NP_776214) c3(interleukin-1 receptor antagonist protein isoform 1 precursor) c4(251009) c5(251010, 251011, 251012, 251013, 251014, 251015) c6( ) c7(uB, T, ea, fd, aeu, ci, aY, xy, aE, rw, dV, Ds, hH, aa, li, yo, az, ih, vs, ba, fT, gt, Jr, cj, Zn, Dt, k, eg, cE, aEw, LT, bQO, aYZ, vE, iB, ht, aj, qW, zo, ey, pl, mR, sp, aRL, ge, fe, CQ, RB, ajd, aA, cz, aDO, bX, q, akU, cy, aAD, dl, eu, bA, bf, fO, bg, iy, rs, pb, OW, ac, iQ, ig, bt, bQz, ao, gV, iW, jh, dG, uu, ad, wD, hX, abq, oW, IQ, Dl, atJ, lx, azS, cW, ff, brp, EZ, Sm, iV, bz, amK, ME, If, IC, Pk, ne, rk, ra, oO, bM, bQT, if, e, cL, bh, Ul, Tz, x, Yy, bc, bQs, akl, YL, up, Jl, dH, hl, kt, pD, as, eE, It, Kv, ii, AV, vA, mx, hh, aFf, Vj, dD, gU, n, uE, zw, ec, xP, A, fJ, lb, yq, bQL, cA, bQU, at, ut, eo, fL, cB, B, dA, fF, v, V, aPW, rS, sl, Id, ae, t, ck, wO, ro, dM, df, bQb, eq, qi, LA, ah, hD, rN, JK, bQw, d, Z, gk, yE, Ny, bQS, gZ, MJ, y, hv, fR, atj, al, bQR, CH, qj, Qp, xE, bW, M, K, wt, DY, eL, bzH, axu, qS, asD, aB, g, pL, bwe, uC, rq, uy, uo, m, sQ, sw, lo, aw, BH, apt, aBI, pM, eh, cU, wb, ap, Ni, alw, cM, Zj, amt, bMc, kT, ar, xO, JM, Pr, it, aAf, fM, fG, jx, aee, hz, j, il, eA, J, o, nX, jZ, qG, kl, Y, r, en, bN, sn, aQd, hc, cS, dy, fD, sY, aFe, akd, aZ, LX, em, bQH, bS, ah, pl, bKZ, aAq, dP, NY, ji, adx, qE, cr, hp, TA, aFb, sG, ei, boI, G, bJx, eh, aTy, bwS, dY, eN, byv, UC, UO, aAu, aW, aOW, eM, Jp, mk, R, bQP, aEj, bQp, qN, aPb, ai, Vs, cc, rl, h, dL, hB, he, aq, op, Wt, vb, bm, uz, aDE, bni, bL, Dw, rG, eR, C, ga, mP, bQQ, qp, aT, bK, an, af, s, iU, yL, akY, aDm, ajl, aJt, AH, CZ, aD, ha, jE, mC, XB, kL, qC, av, F, oz, Os, jo, pq, uQ, eZ, aFr, aF, bPK, eK, LB, zr, axs, bE, atM, z, X); #c1(IL1RN) c2(XP_005263718) c3(interleukin-1 receptor antagonist protein isoform X1) c4( ) c5(278512, 278513, 278514, 278515, 278516) c6( ) c7(uB, T, ea, fd, aeu, ci, aY, xy, aE, rw, dV, Ds, hH, aa, li, yo, az, ih, vs, ba, fT, gt, Jr, cj, Zn, Dt, k, eg, cE, aEw, LT, bQO, aYZ, vE, iB, ht, aj, qW, zo, ey, pl, mR, sp, aRL, ge, fe, CQ, RB, ajd, aA, cz, aDO, bX, q, akU, cy, aAD, dl, eu, bA, bf, fO, bg, iy, rs, pb, OW, ac, iQ, ig, bt, bQz, an, gV, iW, jh, dG, uu, ad, wD, hX, abq, oW, IQ, Dl, atJ, lx, azS, cW, ff, brp, EZ, Sm, iV, bz, amK, ME, If, IC, Pk, ne, rk, ra, oO, bM, bQT, if, e, cL, bh, UI, Tz, x, Yy, bc, bQs, akl, YL, up, Jl, dH, hl, kt, pD, as, eE, It, Kv, ii, AV, vA, mx, hh, aFf, Vj, dD, gU, n, uE, zw, ec, xP, A, fJ, lb, yq, bQL, cA, bQU, at, ut, eo, fL, cB, B, dA, fF, v, V, aPW, rS, sl, Id, ae, t, ck, wD, re, dM, df, bQb, eq, qi, LA, ah, hD, rN, JK, bQw, d, Z, gk, yE, Ny, bQS, gZ, MJ, y, hv, fR, atj, al, bQR, CH, qj, Qp, xE, bW, M, K, wt, DY, eL, bzH, axu, qS, asD, aB, g, pL, bwe, uC, rq, uy, uo, m, sQ, sw, lo, aw, BH, apt, aBI, pM, eh, cU, wb, ap, Ni, alw, cM, Zj, amt, bMc, kT, ar, xO, JM, Pr, it, aAf, fM, fG, jx, aee, hz, j, il, eA, J, o, nX, jZ, qG, kl, Y, r, en, bN, sn, aQd, hc, cS, dy, fD, sY, aFe, akd, aZ, LX, em, bQH, bS, ah, pl, bKZ, aAg, dP, NY, ji, adx, qE, cr, hp, TA, aFb, sG, ei, boI, G, bJx, eb, aTy, bwS, dY, eN, byv, UC, UO, aAu, aW, aDW, eM, Jp, mk, R, bQP, aEj, bQp, qN, aPb, ai, Vs, cc, rl, h, dL, hB, he, aq, op, Wt, vb, bm, uz, aDE, bni, bL, Dw, rG, eR, C, ga, mP, bQQ, qp, aT, bK, an, af, s, iU, yL, akY, aDm, ajl, aJt, AH, CZ, aD, ha, jE, mC, XB, kL, qC, av, F, oz, Ds, jo, pq, uQ, eZ, aFr, aF, bPK, eK, LB, zr, axs, bE, atM, z, X); #c1(IL2) c2(NP_000577) c3(interleukin-2 precursor) c4(12951) c5(12952, 12953, 12954, 12955, 12956, 12957, 12958, 12959, 12960, 12961, 12962, 12963, 12964, 12965, 12966, 12967, 12968, 12969, 12970, 12971, 12972, 12973, 12974, 12975, 12976, 12977, 12978, 12979, 12980, 12981, 12982, 12983, 12984, 12985, 12986, 12987, 12988, 12989, 12990, 12991, 12992, 12993, 12994, 12995, 12996, 12997, 12998, 12999, 13000, 13001, 13002, 13003, 13004, 13005, 13006, 13007, 13008, 13009, 13010, 13011, 13012, 13013, 13014, 13015, 13016, 13017, 13018, 13019, 13020, 13021, 13022, 13023, 13024, 13025, 13026, 13027, 13028, 13029, 13030, 13031, 13032, 13033, 13034, 13035, 13036, 13037, 13038, 13039, 13040, 13041, 13042, 13043, 13044, 13045, 13046, 13047, 13048, 13049, 13050, 13051, 13052, 13053, 13054, 13055, 13056, 13057, 13058, 13059, 13060, 13061, 13062, 13063, 13064, 13065, 13066, 13067, 13068, 13069, 13070, 13071, 13072, 13073, 13074, 13075, 13076, 13077, 13078, 13079, 13080, 13081, 13082, 13083, 13084, 13085, 13086, 13087, 13088, 13089, 13090, 13091, 13092, 13093, 13094, 13095, 13096, 13097, 13098, 13099, 13100, 13101, 13102, 13103, 13104, 13105, 13106, 13107, 13108, 13109, 13110, 13111, 13112, 13113, 13114, 13115, 13116, 13117, 13118, 13119, 13120, 13121, 13122, 13123, 13124, 13125, 13126, 13127, 13128, 13129, 13130, 13131) c6( ) c7(T, ea, fd, ci, aY, amW, aE, rw, dV, Ds, Bi, hu, hH, azh, cp, VE, aa, yo, hC, az, ba, fT, iA, nB, avZ, dc, cj, k, act, eg, aYZ, ht, aj, qW, ey, bEg, mR, ge, fe, CQ, zZ, adz, aBs, bbz, apD, dB, Ei, aA, bX, wy, q, zn, cy, sX, dl, fO, bg, lo, pb, Cv, ov, cT, pa, OW, iM, iQ, ig, RW, bt, ao, On, aCA, iW, jh, dG, fu, ad, wD, hX, oW, iY, IQ, bQX, gj, qZ, asf, ff, avG, iV, bz, aYt, aJx, aKC, ra, iu, ne, bM, if, e, hB, cL, bh, asr, Tz, x, vV, bc, eG, hl, kt, eE, cm, bw, eY, vA, oy, mx, aiu, dD, yG, n, pe, eV, bQd, bav, A, fJ, po, at, ut, eo, fL, B, dA, eX, v, V, Id, ae, aFs, hM, iZ, axW, ev, aFK, t, ck, kP, aGi, bdP, HK, yH, bQW, vi, eq, qi, Fc, hd, py, afm, bQV, aCJ, ds, qh, hD, rN, d, je, hG, Z, gk, gy, y, hv, pC, ng, aC, fR, azf, atj, al, gf, gj, IR, wa, AW, bW, pX, rB, K, DY, eL, bNG, mH, aCM, axu, asD, mQ, LZ, aB, g, uC, iP, aJw, uy, uo, dW, m, NK, sQ, sw, lo, fN, BH, ft, kH, cU, aDp, dx, gi, aJG, aiS, gg, ph, WL, Pr, fM, fG, jx, aSE, j, pd, eA, J, o, er, XX, bq, hK, xR, Y, r, en, aER, iK, bN, hc, dy, EY, fD, LS, gx, sY, bmQ, aFe, em, auq, bS, ah, hF, vB, aNp, ji, IR, vj, cr, hp, BG, jg, bNW, Nq, Bv, asq, aFb, hE, eb, aR, il, pk, azx, DA, aAu, aW, iT, eM, Jp, aEj, bwX, fr, ct, qN, aPb, ai, eW, Bl, h, dL, Nr, asp, CM, aq, kp, mo, gG, kk, op, Wt, NL, uz, bCS, bL, Dw, eR, OY, C, ze, ga, blC, mP, nv, Vr, qp, aT, UN, an, af, s, iU, oV, hf, sS, aXm, aJt, im, bH, hS, Kd, aD, jE, pz, mC, kL, LH, qC, av, F, oz, uQ, eZ, bxd, aF, gu, aXs, es, eU, zr, axs, bE, z, dJ, uR, aS, fh, X); #c1(IL20) c2(NP_061194) c3(interleukin-20 precursor) c4(199901, 199902) c5(199903, 199904, 199905, 199906, 199907, 199908, 199909, 199910, 199911, 199912, 199913, 199914, 199915, 199916) c6( ) c7(bM, Dw, dD, eR, fR, ea, IH, jx, qj, jE, eq, ai, hX, xE, aE, ws, M, aT, cU, cy, Ds, h, K, IQ, bA, A, aW, fO, cr, eZ, iV, eE, bz, DF, wg, ac, eM, bbx, E, Dt, byK, y, pC); #c1(IL20) c2(XP_005273209) c3(interleukin-20 isoform X1) c4( ) c5(284335, 284336) c6( ) c7(bM, Dw, dD, eR, fR, ea, IH, jx, qj, jE, eq, ai, hX, xE, aE, ws, M, aT, cU, cy, Ds, h, K, IQ, bA, A, aW, fO, cr, eZ, iV, eE, bz, DF, wg, ac, eM, bbx, E, Dt, byK, y, pC); #c1(IL20RA) c2(NP_001265651) c3(interleukin-20 receptor subunit alpha isoform 2) c4(99123) c5( ) c6( ) c7(aW, V, Y, cr, aT); #c1(IL20RA) c2(NP_055247) c3(interleukin-20 receptor subunit alpha isoform 1 precursor) c4(180039, 180040) c5(180041, 180042, 180043, 180044, 180045, 180046, 180047, 180048, 180049, 180050, 180051, 180052, 180053, 180054, 180055, 180056, 180057, 180058) c6( ) c7(aW, V, Y, cr, aT); #c1(IL20RA) c2(XP_011534206) c3(interleukin-20 receptor subunit alpha isoform X2) c4(330527) c5(330528, 330529, 330530, 330531, 330532, 330533) c6( ) c7(aW, V, Y, cr, aT); #c1(IL20RB) c2(NP_653318) c3(interleukin-20 receptor subunit beta precursor) c4(239576) c5(239577, 239578, 239579, 239580, 239581, 239582, 239583) c6( ) c7(Y, j, cr, eM); #c1(IL20RB) c2(XP_006713728) c3(interleukin-20 receptor subunit beta isoform X2) c4( ) c5(287309, 287310, 287311, 287312, 287313) c6( ) c7(Y, j, cr, eM); #c1(IL20RB) c2(XP_011511212) c3(interleukin-20 receptor subunit beta isoform X1) c4(301695) c5( ) c6( ) c7(Y, j, cr, eM); #c1(IL21) c2(NP_068575) c3(interleukin-21 isoform 1 precursor) c4(209459) c5(209460, 209461, 209462, 209463, 209464, 209465, 209466, 209467, 209468, 209469, 209470, 209471, 209472, 209473, 209474, 209475, 209476, 209477, 209478, 209479, 209480, 209481, 209482, 209483, 209484, 209485, 209486, 209487, 209488, 209489, 209490, 209491, 209492, 209493, 209494, 209495, 209496, 209497, 209498, 209499, 209500, 209501, 209502, 209503, 209504, 209505, 209506, 209507, 209508, 209509, 209510, 209511, 209512, 209513, 209514, 209515, 209516, 209517, 209518, 209519, 209520, 209521, 209522, 209523, 209524, 209525, 209526, 209527, 209528, 209529, 209530, 209531, 209532, 209533, 209534, 209535, 209536, 209537, 209538, 209539, 209540, 209541, 209542, 209543, 209544, 209545, 209546, 209547, 209548, 209549, 209550, 209551, 209552) c6(209553) c7(bM, T, fR, fd, bB, cL, xE, Ds, DY, aW, HA, hl, hN, eE, cm, cj, m, eg, fN, aj, cU, eV, aNj, A, fe, aq, kk, Wt, at, ajl, eo, fL, Pr, bL, Ob, Dw, fM, dA, IH, eX, aA, abC, V, eA, o, J, aT, hK, Y, bg, IC, lo, t, pb, IY, OW, ac, iM, iQ, of, hl, aNk, jh, jE, mC, hX, ahr, ji, d, je, yx, eZ, cr, dN, aF, hp, jg, iV, iR, aGj, eK, eU, bE, MJ, gy, y, hv); #c1(IL21R) c2(NP_068570) c3(interleukin-21 receptor isoform 1 precursor) c4(209440) c5( ) c6( ) c7(bM, hl, bQZ, dA, oe, jh, fd, V, abC, mC, bGD, A, je, eZ, dN, fe, eE, bQY, Cq, iM, ac, eU, cj, eo, fL, y, zA); #c1(IL21R) c2(XP_011544159) c3(interleukin-21 receptor isoform X1) c4( ) c5(343320, 343321, 343322, 343323, 343324, 343325, 343326, 343327, 343328, 343329, 343330, 343331, 343332, 343333) c6( ) c7(bM, hl, bQZ, dA, oe, jh, fd, V, abC, mC, bGD, A, je, eZ, dN, fe, eE, bQY, Cq, iM, ac, eU, cj, eo, fL, y, zA); #c1(IL22) c2(NP_065386) c3(interleukin-22 precursor) c4(204640) c5(204641, 204642, 204643, 204644, 204645, 204646, 204647, 204648, 204649, 204650) c6( ) c7(oO, bM, T, fR, fd, bB, zh, ci, qj, bh, xE, ws, dV, Ds, Bi, hH, aW, hl, eE, cm, ba, It, eM, Jr, cj, m, qR, fN, aj, qW, ai, cU, h, aNj, A, mR, fe, aq, kk, jT, Wt, ar, Pa, bbx, at, eo, fL, B, bL, Dw, fM, dA, oe, jx, aA, v, ON, C, V, pd, q, J, eA, DK, aT, qU, cy, Cy, Y, bg, r, aMA, lo, aDm, en, t, ua, ac, AH, dT, wR, CZ, yH, fD, byK, hl, Ke, aNk, jh, wV, jE, atK, mC, hX, oz, ds, hD, ahr, ji, IQ, d, Zf, yx, ff, cr, eZ, dN, aF, hp, jg, iV, bz, eK, eU, bE, z, MJ, aql, hE, X, y, pC); #c1(IL22RA2) c2(NP_443194) c3(interleukin-22 receptor subunit alpha-2 isoform 1 precursor) c4(229788) c5(229789, 229790, 229791, 229792, 229793, 229794) c6( ) c7(hH, fq); #c1(IL22RA2) c2(NP_851826) c3(interleukin-22 receptor subunit alpha-2 isoform 2 precursor) c4(254645) c5(254646, 254647, 254648, 254649, 254650, 254651) c6( ) c7(hH, fq); #c1(IL22RA2) c2(NP_851827) c3(interleukin-22 receptor subunit alpha-2 isoform 3 precursor) c4(254652) c5(254653, 254654, 254655, 254656, 254657, 254658) c6( ) c7(hH, fq); #c1(IL23A) c2(XP_011536779) c3(interleukin-23 subunit alpha isoform X1) c4(334449) c5(334450, 334451, 334452, 334453, 334454, 334455) c6( ) c7(oO, bM, T, fR, if, al, fd, ci, mF, wa, xE, aE, dV, K, hH, LG, eL, bc, aoo, az, aoD, eE, bw, eM, Jr, U, m, jM, aDi, qR, fN, aj, uE, qN, qW, ai, kH, aNj, Lg, A, mR, fe, bP, eD, at, eo, fL, B, Ik, dA, IH, jx, aA, v, OY, C, V, q, J, eA, mP, jZ, Id, dn, Oi, xR, Y, r, lo, t, pb, iM, c, wR, yH, fD, kZ, aNk, Hn, jE, fu, hF, mC, Pm, wD, hX, ds, oW, io, dm, hD, ji, IQ, pq, je, cr, eZ, dN, aF, iV, aGj, bz, aJx, eu, aCl, bPJ, If, y); #c1(IL23R) c2(XP_011539091) c3(interleukin-23 receptor isoform X2) c4(337154) c5(337155, 337156, 337157, 337158, 337159) c6( ) c7(bM, T, cL, IR, rm, AW, rw, ja, Ds, hu, hH, zQ, bn, aW, bRa, HA, LZ, NR, PL, aFU, eM, Jr, mx, dW, aw, ht, bmW, fN, NT, qW, ai, ft, hi, A, mR, AQ, ge, fe, xe, cM, lx, Qu, it, Pr, B, bL, Dw, Ik, aA, cz, hz, j, V, q, o, mP, aT, af, qw, Lu, aZs, Pg, r, t, pb, wR, bt, xb, zA, hF, gb, wD, hX, NS, hD, ji, IQ, yF, bRb, eZ, cr, aF, hp, aDd, iV, axs, Lj, gy, IC, ra, iu, y); #c1(IL23R) c2(XP_011539093) c3(interleukin-23 receptor isoform X1) c4(337160, 337161, 337162, 337163, 337164, 337165, 337166) c5(337167, 337168, 337169, 337170, 337171, 337172, 337173, 337174, 337175, 337176, 337177, 337178, 337179, 337180, 337181, 337182, 337183, 337184, 337185, 337186, 337187, 337188, 337189, 337190, 337191, 337192, 337193, 337194, 337195, 337196) c6( ) c7(bM, T, cL, IR, rm, AW, rw, ja, Ds, hu, hH, zQ, bn, aW, bRa, HA, LZ, NR, pL, aFU, eM, Jr, mx, dW, aw, ht, bmW, fN, NT, qW, ai, ft, hi, A, mR, AQ, ge, fe, xe, cM, lx, Qu, it, Pr, B, bL, Dw, Ik, aA, cz, hz, j, V, q, o, mP, aT, af, qw, Lu, aZs, Pg, r, t, pb, wR, bt, xb, zA, hF, gb, wD, hX, NS, hD, ji, IQ, yF, bRb, eZ, cr, aF, hp, aDd, iV, axs, Lj, gy, IC, ra, iu, y); #c1(IL24) c2(NP_001172085) c3(interleukin-24 isoform 3 precursor) c4(72374) c5(72375, 72376, 72377, 72378, 72379, 72380, 72381, 72382) c6(72383, 72384) c7(bM, T, Dw, aC, Ik, if, jx, jh, aA, bB, n, qj, ci, qN, fr, q, ad, aMB, eA, x, av, ib, aE, aT, h, Ds, K, hS, ae, cp, d, iU, nO, JI, aW, Y, iZ, bg, ff, cr, zD, r, dN, aq, kp, aE, eZ, en, hf, g, t, cm, bz, QA, iR, iV, fe, ck, ov, bP, eM, iA, dB, bE, iT, cj, np, m, k, byK, y, bt, B, pC); #c1(IL24) c2(NP_001172086) c3(interleukin-24 isoform 4 precursor) c4(72385) c5(72386, 72387, 72388, 72389, 72390, 72391, 72392, 72393) c6(72394, 72395) c7(bM, T, Dw, aC, Ik, if, jx, jh, aA, bB, n, qj, ci, qN, fr, q, ad, aMB, eA, x, av, ib, aE, aT, h, Ds, K, hS, ae, cp, d, iU, nO, JI, aW, Y, iZ, bg, ff, cr, zD, r, dN, aq, kp, aF, eZ, en, hf, g, t, cm, bz, QA, iR, iV, fe, ck, ov, bP, eM, iA, dB, bE, iT, cj, np, m, k, byK, y, bt, B, pC); #c1(IL24) c2(NP_006841) c3(interleukin-24 isoform 1 precursor) c4(168573) c5(168574, 168575, 168576, 168577, 168578, 168579, 168580, 168581) c6(168582, 168583) c7(bM, T, Dw, aC, Ik, if, jx, jh, aA, bB, n, qj, ci, qN, fr, q, ad, aMB, eA, x, av, ib, aE, aT, h, Ds, K, hS, ae, cp, d, iU, nO, JI, aW, Y, iZ, bg, ff, cr, zD, r, dN, aq, kp, aF, eZ, en, hf, g, t, cm, bz, QA, iR, iV, fe, ck, ov, bP, eM, iA, dB, bE, iT, cj, np, m, k, byK, y, bt, B, pC); #c1(IL25) c2(NP_073626) c3(interleukin-25 isoform 1 precursor) c4(213185) c5(213186, 213187, 213188, 213189, 213190, 213191) c6( ) c7(Nq, bM, Nr, aDu, eR, A, aCT, aW, z, aT, fe, po, aoj, fD, eE, aY, DF); #c1(IL25) c2(NP_758525) c3(interleukin-25 isoform 2 precursor) c4(249246) c5(249247, 249248, 249249, 249250, 249251, 249252) c6( ) c7(Nq, bM, Nr, aDu, eR, A, aCT, aW, z, aT, fe, po, aoj, fD, eE, aY, DF); #c1(IL26) c2(XP_011536870) c3(interleukin-26 isoform X1) c4(334565) c5(334566, 334567, 334568, 334569, 334570, 334571) c6( ) c7(bM, Dw, A, dV, aA, ge, fe, Ds, aF, K, iV, y, V, fq); #c1(IL27) c2(NP_663634) c3(interleukin-27 subunit alpha precursor) c4(241396) c5(241397, 241398, 241399, 241400, 241401, 241402) c6( ) c7(oO, bM, cZ, T, fM, JZ, dD, Dw, ea, ht, al, jh, fF, aj, v, eq, jE, C, V, qW, ai, J, ad, aDF, hX, eA, ds, Os, aT, Ds, bQd, K, ji, dd, hu, DY, ae, DA, A, je, aW, Y, oV, fO, cr, ge, fe, lo, iV, pL, axp, bz, ck, iM, W, anT, ig, dB, bE, eM, z, Be, at, dW, Dt, m, fD, eo, y, bt, Pr, B); #c1(IL27RA) c2(NP_004834) c3(interleukin-27 receptor subunit alpha precursor) c4(150158) c5(150159, 150160, 150161, 150162, 150163, 150164, 150165) c6( ) c7(ai, bM, dD, Dw, z, ea, Y, Ds, dW, eg, ci, fD, y, bt, af); #c1(IL2RA) c2(NP_000408) c3(interleukin-2 receptor subunit alpha precursor) c4(8633, 8634) c5(8635, 8636, 8637, 8638, 8639, 8640, 8641, 8642, 8643, 8644, 8645, 8646) c6( ) c7(bM, T, fR, bO, CH, fd, cL, Vd, ci, qj, bh, aY, amW, aR, AW, xy, xE, aE, rw, dV, aYy, Ds, azm, bRd, rB, DY, bhm, bc, aa, li, Jl, aW, az, kt, hN, pL, eE, uC, cm, mK, bw, yd, ba, y, eM, Jr, iA, uy, iT, mx, cj, uo, k, m, gn, abh, aiu, sQ, aO, yG, fN, aj, fr, cd, ai, Oe, xC, baA, ft, cc, ql, kH, h, hn, dU, ox, Nr, A, zb, fJ, fe, po, bxh, CQ, jT, xe, adz, Wt, yR, ar, RB, W, If, JM, bm, uz, aEG, ut, eo, fL, auR, Pr, B, it, bL, Dw, fM, dA, eR, aYB, fG, wL, zN, hy, hz, OY, V, pd, eA, J, o, zn, eJ, Ig, qp, aT, qG, bK, bq, hK, aFm, Cy, ae, hM, PK, bf, nO, iU, Y, fO, bg, lo, en, t, f, iK, pb, ck, cT, sS, OW, Dy, Ta, ig, yW, iM, hc, AH, fP, wR, Da, bxj, yH, byK, gT, bt, Kd, sY, bjX, iW, bRc, oA, jh, wV, pl, jE, EA, hF, mC, ad, XB, LH, hX, wD, F, oz, qh, hD, ji, bxf, IQ, fb, iL, yF, uQ, d, je, vj, ff, cr, eZ, dN, bxd, Mz, hp, iV, bz, Nq, es, Bv, atM, Lj, z, XO, aEN, hE, ra, hv, Tc); #c1(IL2RB) c2(NP_000869) c3(interleukin-2 receptor subunit beta precursor) c4(16666, 16667, 16668, 16669) c5(16670, 16671, 16672, 16673, 16674, 16675, 16676, 16677, 16678, 16679, 16680, 16681, 16682, 16683, 16684, 16685, 16686, 16687, 16688, 16689, 16690, 16691, 16692, 16693) c6( ) c7(bM, Dw, iH, dA, fR, sQ, jx, bO, aA, fd, aj, pl, hF, V, Fc, q, aR, amW, zn, dP, eA, ady, ec, aCJ, aql, kH, h, Ds, dz, bK, K, IQ, an, zy, H, hS, rB, WZ, jf, hM, eG, A, je, LC, sp, Y, xs, oV, mQ, r, vj, Ls, eZ, aF, hp, CQ, fe, pL, eE, cm, pb, adz, DF, ck, RB, iM, c, iT, Fi, uo, ut, fD, y, bt, it, B, L); #c1(IL2RG) c2(NP_000197) c3(cytokine receptor common subunit gamma precursor) c4(4422, 4423, 4424, 4425) c5(4426, 4427, 4428, 4429, 4430, 4431, 4432, 4433, 4434, 4435, 4436, 4437, 4438, 4439, 4440, 4441, 4442, 4443, 4444, 4445, 4446, 4447, 4448, 4449) c6( ) c7(bCI, T, bM, Dw, dA, bRe, bLS, jh, bB, ci, kH, h, Ds, zA, rB, pq, DA, mR, je, iZ, oV, Y, CM, CF, bRf, jg, t, oU, ck, iM, dB, bE, cj, m, y, Ze); #c1(IL3) c2(NP_000579) c3(interleukin-3 precursor) c4(13141, 13142) c5(13143, 13144, 13145, 13146, 13147, 13148) c6( ) c7(bM, G, os, T, JN, fV, fd, x, Co, dV, Ds, eL, eF, cm, uC, bw, iT, oy, U, cj, k, eq, aiu, oY, aj, ai, br, eW, ke, pe, kH, h, hn, dL, DU, dU, Nr, A, sp, fe, aq, po, pm, bP, kz, JM, at, Pr, B, Dw, jv, dA, eR, IH, cz, afK, hX, eA, J, zn, aT, rO, dz, jj, af, bA, iU, oV, Y, ck, cT, BU, iM, bt, sY, oA, bs, jh, oZ, fu, EA, hF, ase, ad, CJ, fX, vJ, ds, oW, aZW, hD, iY, je, hG, vj, eH, cr, hp, uF, avG, iV, Nq, EW, amS, pc, zr, z, aKC, y); #c1(IL31) c2(XP_011536628) c3(interleukin-31 isoform X1) c4(334104) c5(334105, 334106, 334107, 334108, 334109, 334110, 334111, 334112) c6(334113, 334114) c7(bP, buT, iE, mQ, asL, cr, gw, dN, fe, IQ, eE); #c1(IL31RA) c2(NP_001229565) c3(interleukin-31 receptor subunit alpha isoform 2 precursor) c4( ) c5(84637) c6( ) c7(es, d, iA, bRg, aW, aT, aA, cm, v, aLA, K, m, aay, eE, t, aF, bz, fr, pl); #c1(IL31RA) c2(NP_001229566) c3(interleukin-31 receptor subunit alpha isoform 3) c4(84638) c5(84639, 84640, 84641, 84642, 84643, 84644) c6( ) c7(es, d, iA, bRg, aW, aT, aA, cm, v, aLA, K, m, aay, eE, t, aF, bz, fr, pl); #c1(IL31RA) c2(NP_001229567) c3(interleukin-31 receptor subunit alpha isoform 4 precursor) c4(84645) c5(84646, 84647, 84648, 84649, 84650, 84651, 84652, 84653, 84654, 84655) c6( ) c7(es, d, iA, bRg, aW, aT, aA, cm, v, aLA, K, m, aay, eE, t, aF, bz, fr, pl); #c1(IL31RA) c2(NP_001284499) c3(interleukin-31 receptor subunit alpha isoform 6) c4(111923, 111924) c5(111925, 111926, 111927, 111928, 111929, 111930, 111931) c6( ) c7(es, d, iA, bRg, aW, aT, aA, cm, v, aLA, K, m, aay, eE, t, aF, bz, fr, pl); #c1(IL31RA) c2(NP_001284501) c3(interleukin-31 receptor subunit alpha isoform 7) c4( ) c5(111932, 111933, 111934, 111935, 111936) c6( ) c7(es, d, iA, bRg, aW, aT, aA, cm, v, aLA, K, m, aay, eE, t, aF, bz, fr, pl); #c1(IL31RA) c2(NP_620586) c3(interleukin-31 receptor subunit alpha isoform 1) c4(237811) c5(237812, 237813, 237814, 237815, 237816, 237817) c6( ) c7(es, d, iA, bRg, aW, aT, aA, cm, v, aLA, K, m, aay, eE, t, aF, bz, fr, pl); #c1(IL31RA) c2 (XP_011541444) c3(interleukin-31 receptor subunit alpha isoform X3) c4(340031) c5( ) c6( ) c7(es, d, iA, bRg, aW, aT, aA, cm, v, aLA, K, m, aay, eE, t, aF, bz, fr, pl); #c1(IL31RA) c2(XP_011541446) c3(interleukin-31 receptor subunit alpha isoform X2) c4( ) c5(340032, 340033, 340034, 340035, 340036) c6( ) c7(es, d, iA, bRg, aW, aT, aA, cm, v, aLA, K, m, aay, eE, t, aF, bz, fr, pl); #c1(IL32) c2(NP_001012651) c3(interleukin-32 isoform A) c4(25120) c5(25121, 25122, 25123, 25124, 25125, 25126, 25127, 25128, 25129, 25130, 25131, 25132, 25133, 25134) c6( ) c7(T, dD, ea, aD, ht, aA, bB, fd, eq, ai, ad, hX, iu, AW, hd, aE, ds, kH, aT, io, h, hu, hB, ae, aa, aEV, d, B, mR, iU, xR, aW, Y, fJ, az, bkf, ff, fe, lo, aF, Fq, Sm, pL, jT, en, bz, q, iK, bw, Qy, eU, bE, yH, jM, y, Pr, X, nQ); #c1(IL32) c2(NP_001012652) c3(interleukin-32 isoform C) c4(25135) c5(25136, 25137, 25138, 25139, 25140, 25141, 25142, 25143, 25144, 25145, 25146, 25147, 25148, 25149, 25150, 25151) c6(25152, 25153) c7(T, dD, ea, aD, ht, aA, bB, fd, eq, ai, ad, hX, iu, AW, hd, aE, ds, kH, aT, io, h, hu, hB, ae, aa, aEV, d, B, mR, iU, xR, aW, Y, fJ, az, bkf, ff, fe, lo, aF, Fq, Sm, pL, jT, en, bz, q, iK, bw, Qy, eU, bE, yH, jM, y, Pr, X, nQ); #c1(IL32) c2(NP_001012654) c3(interleukin-32 isoform D) c4(25154) c5(25155, 25156, 25157, 25158, 25159, 25160, 25161, 25162, 25163, 25164) c6( ) c7(T, dD, ea, aD, ht, aA, bB, fd, eq, ai, ad, hX, iu, AW, hd, aE, ds, kH, aT, io, h, hu, hB, ae, aa, aEV, d, B, mR, iU, xR, aW, Y, fJ, az, bkf, ff, fe, lo, aF, Fq, Sm, pL, jT, en, bz, q, iK, bw, Qy, eU, bE, yH, jM, y, Pr, X, nQ); #c1(IL32) c2(NP_001012736) c3(interleukin-32 isoform B) c4(25193, 25194) c5(25195, 25196, 25197, 25198, 25199, 25200, 25201, 25202, 25203, 25204, 25205, 25206, 25207, 25208, 25209, 25210, 25211, 25212, 25213, 25214, 25215, 25216, 25217, 25218, 25219, 25220, 25221, 25222, 25223, 25224, 25225, 25226, 25227, 25228, 25229, 25230, 25231, 25232, 25233, 25234, 25235, 25236, 25237, 25238, 25239, 25240, 25241, 25242) c6( ) c7(T, dD, ea, aD, ht, aA, bB, fd, eq, ai, ad, hX, iu, AW, hd, aE, ds, kH, aT, io, h, hu, hB, ae, aa, aEV, d, B, mR, iU, xR, aW, Y, fJ, az, bkf, ff, fe, lo, aF, Fq, Sm, pL, jT, en, bz, q, iK, bw, Qy, eU, bE, yH, jM, y, Pr, X, nQ); #c1(IL33) c2(NP_001186569) c3(interleukin-33 isoform 2) c4(77855) c5(77856, 77857, 77858, 77859, 77860, 77861) c6( ) c7(bM, EM, dD, aCA, fR, ea, yk, e, aw, l, v, j, eq, Jx, V, ai, aFu, eJ, wD, xy, aE, oz, bW, wb, IQ, ji, aOh, hH, af, aa, bRh, Nr, asp, lx, mR, iE, ff, cr, dN, po, lo, fe, Fq, bRj, en, eE, iV, bRi, adz, Nq, LB, cT, It, aDu, aCT, NL, z, gw, at, aS, dy, fD, agl, hE, B, y); #c1(IL33) c2(NP_001186570) c3(interleukin-33 isoform 3) c4(77862) c5(77863, 77864, 77865, 77866, 77867, 77868) c6( ) c7(bM, EM, dD, aCA, fR, ea, yk, e, aw, l, v, j, eq, Jx, V, ai, aFu, eJ, wD, xy, aE, oz, bW, wb, IQ, ji, aOh, hH, af, aa, bRh, Nr, asp, lx, mR, iE, ff, cr, dN, po, lo, fe, Fq, bRj, en, eE, iV, bRi, adz, Nq, LB, cT, It, aDu, aCT, NL, z, gw, at, aS, dy, fD, agl, hE, B, y); #c1(IL33) c2(NP_254274) c3(interleukin-33 isoform 1 precursor) c4(228669) c5(228670, 228671, 228672, 228673, 228674, 228675) c6( ) c7(bM, EM, dD, aCA, fR, ea, yk, e, aw, l, v, j, eq, Jx, V, ai, aFu, eJ, wD, xy, aE, oz, bW, wb, IQ, ji, aOh, hH, af, aa, bRh, Nr, asp, lx, mR, iE, ff, cr, dN, po, lo, fe, Fq, bRj, en, eE, iV, bRi, adz, Nq, LB, cT, It, aDu, aCT, NL, z, gw, at, aS, dy, fD, agl, hE, B, y); #c1(IL34) c2(XP_011521205) c3(interleukin-34 isoform X1) c4(316130) c5(316131, 316132, 316133, 316134, 316135, 316136, 316137, 316138, 316139, 316140) c6( ) c7(v, y, kl, ai, zr); #c1(IL36A) c2(NP_055255) c3(interleukin-36 alpha) c4(180073, 180074) c5(180075, 180076, 180077, 180078, 180079, 180080, 180081, 180082, 180083, 180084, 180085, 180086) c6( ) c7(yE, y, mR); #c1(IL368) c2(NP_055253) c3(interleukin-36 beta isoform 1) c4(180059) c5(180060, 180061, 180062, 180063, 180064, 180065) c6( ) c7(y, mR); #c1(IL368) c2(NP_775270) c3(interleukin-36 beta isoform 2) c4(249746) c5(249747, 249748, 249749, 249750, 249751, 249752) c6( ) c7(y, mR); #c1(IL366) c2(NP_062564) c3(interleukin-36 gamma isoform 1) c4(201984, 201985) c5(201986, 201987, 201988, 201989, 201990, 201991, 201992, 201993, 201994, 201995, 201996, 201997) c6( ) c7(y, mR, eW); #c1(IL36RN) c2(NP_775262) c3(interleukin-36 receptor antagonist protein) c4(249691, 249692) c5(249693, 249694, 249695, 249696, 249697, 249698, 249699, 249700, 249701, 249702, 249703, 249704, 249705, 249706, 249707, 249708) c6( ) c7(mR, ac, Jr, atj, e, aw, cr, bRk, j, IQ, y, eu, wD); #c1(IL37) c2(NP_055254) c3(interleukin-37 isoform 1 precursor) c4(180066) c5(180067, 180068, 180069, 180070, 180071, 180072) c6( ) c7(oO, T, hF, q, ld, dm, hH, azU, mR, Pg, cr, eZ, fe, iV, eE, bz, Jr, vZ, dy, y, qR, B); #c1(IL37) c2(NP_775294) c3(interleukin-37 isoform 2) c4(249897) c5(249898, 249899, 249900, 249901, 249902, 249903) c6( ) c7(oO, T, hF, q, ld, dm, hH, azU, mR, Pg, cr, eZ, fe, iV, eE, bz, Jr, vZ, dy, y, qR, B); #c1(IL37) c2(NP_775295) c3(interleukin-37 isoform 3) c4(249904) c5(249905, 249906, 249907, 249908, 249909, 249910) c6( ) c7(oO, T, hF, q, ld, dm, hH, azU, mR, Pg, cr, eZ, fe, iV, eE, bz, Jr, vZ, dy, y, qR, B); #c1(IL37) c2(NP_775296) c3(interleukin-37 isoform 4) c4(249911) c5(249912, 249913, 249914, 249915, 249916, 249917) c6( ) c7(oO, T, hF, q, ld, dm, hH, azU, mR, Pg, cr, eZ, fe, iV, eE, bz, Jr, vZ, dy, y, qR, B); #c1(IL37) c2(NP_775297) c3(interleukin-37 isoform 5) c4(249918) c5(249919, 249920, 249921, 249922, 249923, 249924) c6( ) c7(oO, T, hF, q, ld, dm, hH, azU, mR, Pg, cr, eZ, fe, iV, eE, bz, Jr, vZ, dy, y, qR, B); #c1(IL3RA) c2(NP_001254642) c3(interleukin-3 receptor subunit alpha isoform 2 precursor) c4(94776, 94777) c5(94778, 94779, 94780, 94781, 94782, 94783, 94784, 94785, 94786, 94787, 94788, 94789) c6( ) c7(ck, x, sY, EW, fX, uC, vJ, zK, AH, hn, k, bt); #c1(IL3RA) c2(NP_002174) c3(interleukin-3 receptor subunit alpha isoform 1 precursor) c4(126294) c5(126295, 126296, 126297, 126298, 126299, 126300) c6( ) c7(ck, x, sY, EW, fX, uC, vJ, zK, AH, hn, k, bt); #c1(IL4) c2(NP_000580) c3(interleukin-4 isoform 1 precursor) c4(13149) c5(13150, 13151, 13152, 13153, 13154, 13155, 13156) c6( ) c7(gh, T, ea, fd, ci, bRn, aY, bv, xy, aE, fm, bRp, rw, dV, Ds, zy, hH, azh, cp, aa, li, az, ih, nY, bRm, zV, ha, fT, aZx, iA, nB, aCT, dc, cj, k, eg, fy, uL, aDi, qm, nD, aYZ, ht, aj, cd, zo, apG, ey, mR, sp, aRL, fe, CQ, adz, bbz, aDu, dB, ajd, abW, jv, aA, cz, q, zn, bIN, Oi, bPW, aAD, jj, DX, eu, fO, bg, Ox, Io, Xk, pb, cT, pa, iM, ac, iQ, ig, bRs, aor, bt, aCA, wi, BD, tS, aPJ, iW, jh, dG, fu, aue, ad, wD, hX, oW, IQ, DI, lx, qZ, ff, Of, iV, bRq, bz, DF, Cq, anY, aDB, ME, lf, ra, ne, rk, nO, bM, xS, if, bB, cL, IN, bh, asr, Tz, ip, x, fS, azm, bc, Du, hl, kt, pD, as, aFU, eE, cm, bw, xD, ki, vA, mx, OT, hh, Vj, bBT, dD, yG, n, uE, zw, WB, brX, eV, cY, bFQ, xP, A, fJ, po, yq, amo, xe, jq, bJa, at, bPs, ut, eo, fL, B, dA, lH, eX, fF, v, Qo, V, ld, bRt, bPF, ae, aAi, jf, hM, ev, afS, acB, t, ck, II, yH, vi, df, bQb, oR, wV, eq, bNM, hd, aop, afm, ds, aCJ, qh, hD, rN, JK, Zd, sj, d, je, bPY, wc, dN, kD, Z, dr, gk, dO, wz, y, kS, pC, aC, fR, al, lj, qj, IR, Qp, wa, bOm, AW, xE, bW, K, aZS, aDU, eL, aCM, axu, asD, mQ, aB, g, pL, uC, ou, aDs, uo, dW, Hh, m, aZN, sQ, sw, aw, fN, qy, BF, pM, eh, kH, cU, aDp, gi, Og, cM, bMc, kT, byl, xO, JM, Pr, bQZ, fM, fG, jx, hz, bJw, j, eA, J, o, er, XX, jZ, bRo, xR, Y, r, en, iK, bN, Qi, sn, aQd, hc, wR, Da, rK, dy, EY, fD, gT, LS, sY, bjX, id, aFe, Pt, em, bS, ah, hF, bRI, ase, dP, sN, aNp, hP, ji, adx, qE, vj, Sn, cr, Vl, hp, Eq, BG, jg, bNW, Nq, TA, Lj, asq, aFb, eB, bC, hE, xg, bRu, G, eh, Jx, mF, fw, aR, pk, azx, aW, OZ, hJ, eM, iT, Jp, zv, fr, et, qN, Tl, ai, eW, cc, h, dL, bxg, Nr, asp, bRr, aq, kp, bRv, gG, kk, op, Wt, asE, tk, NL, hk, uz, va, aDE, bni, bL, Dw, ka, eR, yk, C, ady, ga, aCY, mP, aT, adV, aSX, an, af, ls, Uf, iU, oV, Ph, f, ajl, nM, vZ, IV, CZ, ij, qX, qb, aD, vr, jE, mC, kL, qC, av, I, F, yF, uQ, bwk, yx, eZ, aFr, aF, eK, LB, es, eU, zr, bE, z, XO, bPJ, X); #c1(IL4) c2(NP_758858) c3(interleukin-4 isoform 2 precursor) c4(249286) c5(249287, 249288, 249289, 249290, 249291, 249292, 249293) c6( ) c7(gh, T, ea, fd, ci, bRn, aY, bv, xy, aE, fm, bRp, rw, dV, Ds, zy, hH, azh, cp, aa, li, az, ih, nY, bRm, zV, ha, fT, aZx, iA, nB, aCT, dc, cj, k, eg, fy, uL, aDi, qm, nD, aYZ, ht, aj, cd, zo, apG, ey, mR, sp, aRL, fe, CQ, adz, bbz, aDu, dB, ajd, abW, jv, aA, cz, q, zn, bIN, Oi, bPW, aAD, jj, DX, eu, fO, bg, Ox, Io, Xk, pb, cT, pa, iM, ac, iQ, ig, bRs, aor, bt, aCA, wi, BD, tS, aPJ, iW, jh, dG, fu, aue, ad, wD, hX, oW, IQ, DI, lx, qZ, ff, Of, iV, bRq, bz, DF, Cq, anY, aDB, ME, If, ra, ne, rk, nO, bM, xS, if, bB, cL, IN, bh, asr, Tz, ip, x, fS, azm, be, Du, hl, kt, pD, as, aFU, eE, cm, bw, xD, ki, vA, mx, OT, hh, Vj, bBT, dD, yG, n, uE, zw, WB, brX, eV, cY, bFQ, xP, A, fJ, po, yq, amo, xe, jq, bJa, at, bPs, ut, eo, fL, B, dA, lH, eX, fF, v, Qo, V, ld, bRt, bPF, ae, aAi, jf, hM, ev, afS, acB, t, ck, II, yH, vi, df, bQb, oR, wV, eq, bNM, hd, aop, afm, ds, aCJ, qh, hD, rN, JK, Zd, sj, d, je, bPY, wc, dN, kD, Z, dr, gk, dO, wz, y, kS, pC, aC, fR, al, lj, qj, IR, Qp, wa, bOm, AW, xE, bW, K, aZS, aDU, eL, aCM, axu, asD, mQ, aB, q, pL, uC, ou, aDs, uo, dW, Hh, m, aZN, sQ, sw, aw, fN, qy, BF, pM, eh, kH, cU, aDp, gi, Og, cM, bMc, kT, byl, xO, JM, Pr, bQZ, fM, fG, jx, hz, bJw, j, eA, J, o, er, XX, jZ, bRo, xR, Y, r, en, iK, bN, Qi, sn, aQd, hc, wR, Da, rK, dy, EY, fD, gT, LS, sY, bjX, id, aFe, Pt, em, bS, ah, hF, bRI, ase, dP, sN, aNp, hP, ji, adx, qE, vj, Sn, cr, VI, hp, Fq, BG, jg, bNW, Nq, TA, Lj, asq, aFb, eB, bC, hE, xg, bRu, G, eh, Jx, mF, fw, aR, pk, azx, aW, OZ, hJ, eM, iT, Jp, zv, fr, ct, qN, Tl, ai, eW, cc, h, dL, bxg, Nr, asp, bRr, aq, kp, bRv, gG, kk, op, Wt, asE, tk, NL, hk, uz, va, aDE, bni, bL, Dw, ka, eR, yk, C, ady, ga, aCY, mP, aT, adV, aSX, an, af, ls, Uf, iU, oV, Ph, f, ajl, nM, vZ, IV, CZ, ij, qX, qb, aD, vr, jE, mC, kL, qC, av, I, F, yF, uQ, bwk, yx, eZ, aFr, aF, eK, LB, es, eU, zr, bE, z, XO, bPJ, X); #c1(IL4I1) c2(NP_001244947) c3(L-amino-acid oxidase isoform 2 precursor) c4(92385, 92386, 92387, 92388, 92389, 92390) c5(92391, 92392, 92393, 92394, 92395, 92396, 92397, 92398, 92399, 92400, 92401, 92402, 92403, 92404, 92405, 92406) c6( ) c7(bNX, fM, ib, Y, ae, ad, uQ); #c1(IL4I1) c2(NP_690863) c3(L-amino-acid oxidase isoform 1 precursor) c4(244998, 244999, 245000, 245001, 245002, 245003, 245004, 245005, 245006, 245007, 245008, 245009, 245010, 245011) c5( ) c6( ) c7(bNX, fM, ib, Y, ae, ad, uQ); #c1(IL4R) c2(NP_001244336) c3(interleukin-4 receptor subunit alpha isoform c) c4(92196) c5(92197, 92198, 92199, 92200, 92201, 92202) c6( ) c7(bM, T, aC, xS, fR, if, al, fd, Ij, cL, IN, ci, aR, aE, aQI, bRx, bW, fS, dV, Ds, aW, axu, az, mQ, kt, q, pL, eE, uC, QA, fT, xK, cj, uo, k, eg, uL, FW, sQ, aw, aj, fr, pM, ai, ql, kH, cU, h, eV, dL, aDp, A, sp, aCx, fe, po, Og, CQ, xe, cM, adz, kT, RB, dB, hk, at, ut, gg, bL, Dw, oe, jx, eX, rf, aA, v, j, C, Qo, V, q, eA, ga, blN, aT, ae, af, ne, bA, eu, Uf, Y, ayU, bg, r, en, pb, cT, rR, iQ, ac, Ty, II, dy, blu, sY, bRw, Ke, qb, aD, iW, jh, auq, pl, ah, jE, ase, wD, hX, F, hD, rN, JK, IQ, bGD, sj, d, qZ, vj, ff, Of, cr, eZ, aFr, bpA, aF, hp, iV, LB, es, D, z, wz, sG, dX, aS, y, X); #c1(IL4R) c2(XP_011544129) c3(interleukin-4 receptor subunit alpha isoform X1) c4(343278, 343279, 343280) c5(343281, 343282, 343283, 343284, 343285, 343286, 343287, 343288, 343289, 343290, 343291, 343292, 343293, 343294, 343295, 343296, 343297, 343298, 343299, 343300, 343301, 343302, 343303, 343304, 343305, 343306) c6( ) c7(bM, T, aC, xS, fR, if, al, fd, lj, cL, IN, ci, aR, aE, aQI, bRx, bW, fS, dV, Ds, aW, axu, az, mQ, kt, g, pL, eE, uC, QA, fT, xK, cj, uo, k, eg, uL, FW, sQ, aw, aj, fr, pM, ai, ql, kH, cU, h, eV, dL, aDp, A, sp, aCx, fe, po, Og, CQ, xe, cM, adz, kT, RB, dB, hk, at, ut, gg, bL, Dw, oe, jx, eX, rf, aA, v, j, C, Qo, V, q, eA, ga, blN, aT, ae, af, ne, bA, eu, Uf, Y, ayU, bg, r, en, pb, cT, rR, iQ, ac, Ty, II, dy, blu, sY, bRw, Ke, qb, aD, iW, jh, auq, pl, ah, jE, ase, wD, hX, F, hD, rN, JK, IQ, bGD, sj, d, qZ, vj, ff, Of, cr, eZ, aFr, bpA, aF, hp, iV, LB, es, D, z, wz, sG, dX, aS, y, X); #c1(IL5) c2(XP_006714664) c3(interleukin-5 isoform X2) c4(287980) c5(287981) c6( ) c7(bM, T, fR, Js, bRC, ea, atj, e, fd, bPw, bh, Jx, AW, bJG, Ds, K, azx, eL, be, bNG, aa, axu, Du, nY, g, eE, bw, uC, zV, fT, iT, aCT, JA, oy, cj, uo, aZo, Dv, eg, aSs, LT, bBT, aZt, aiu, dD, Ht, akc, sQ, bRz, bRB, fN, cQ, et, uE, pM, ju, kH, cU, Ne, h, dL, ey, eV, aDp, Nr, asp, sp, aRL, Ib, fJ, fe, aq, po, kk, Wt, aDu, JM, ut, fL, WL, B, Jo, bL, Dw, jv, fM, bRA, dA, fG, Ju, eX, aA, cz, hz, aCY, bIC, mP, apJ, Nw, aT, bPF, ae, tn, iU, xR, Y, IC, Io, Ph, en, bN, IY, Cv, bnc, cT, ck, iM, iQ, ig, of, dT, fD, bt, vi, sY, bjX, LX, iW, df, jh, bS, eq, bRy, hF, ase, ad, F, afm, ds, hD, aNp, IQ, yF, uQ, je, lx, bPY, ff, eZ, dN, hp, iV, Z, DF, Nq, TA, eU, z, aDB, aKC, azM, i, hE, bRu, kd, y); #c1(IL5) c2(XP_011541676) c3(interleukin-5 isoform X1) c4( ) c5(340213, 340214, 340215, 340216, 340217) c6( ) c7(bM, T, fR, Js, bRC, ea, atj, e, fd, bPw, bh, Jx, AW, bJG, Ds, K, azx, eL, be, bNG, aa, axu, Du, nY, g, eE, bw, uC, zV, fT, iT, aCT, JA, oy, cj, uo, aZo, Dv, eg, aSs, LT, bBT, aZt, aiu, dD, Ht, akc, sQ, bRz, bRB, fN, cQ, et, uE, pM, ju, kH, cU, Ne, h, dL, ey, eV, aDp, Nr, asp, sp, aRL, Ib, fJ, fe, aq, po, kk, Wt, aDu, JM, ut, fL, WL, B, Jo, bL, Dw, jv, fM, bRA, dA, fG, Ju, eX, aA, cz, hz, aCY, bIC, mP, apJ, Nw, aT, bPF, ae, tn, iU, xR, Y, IC, lo, Ph, en, bN, IY, Cv, bnc, cT, ck, iM, iQ, ig, of, dT, fD, bt, vi, sY, bjX, LX, iW, df, jh, bS, eq, bRy, hF, ase, ad, F, afm, ds, hD, aNp, IQ, yF, uQ, je, lx, bPY, ff, eZ, dN, hp, iV, Z, DF, Nq, TA, eU, z, aDB, aKC, azM, i, hE, bRu, kd, y); #c1(IL5RA) c2(NP_000555) c3(interleukin-5 receptor subunit alpha isoform 1 precursor) c4(12648) c5(12649, 12650, 12651, 12652, 12653, 12654, 12655, 12656, 12657, 12658) c6( ) c7(bL, bM, sY, Dw, j, V, AW, apJ, Ds, dL, JK, ey, eL, eu, Nr, iU, sp, mQ, Xm, hp, eE, uC, cM, Nq, kT, ac, cj, fD, y); #c1(IL5RA) c2(NP_001230028) c3(interleukin-5 receptor subunit alpha isoform 4 precursor) c4(85832) c5(85833, 85834, 85835, 85836, 85837, 85838) c6( ) c7(bL, bM, sY, Dw, j, V, AW, apJ, Ds, dL, JK, ey, eL, eu, Nr, iU, sp, mQ, Xm, hp, eE, uC, cM, Nq, kT, ac, cj, fD, y); #c1(IL5RA) c2(NP_783854) c3(interleukin-5 receptor subunit alpha isoform 2 precursor) c4(251731, 251732, 251733) c5(251734, 251735, 251736, 251737, 251738, 251739, 251740, 251741, 251742, 251743) c6( ) c7(bL, bM, sY, Dw, j, V, AW, apJ, Ds, dL, JK, ey, eL, eu, Nr, iU, sp, mQ, Xm, hp, eE, uC, cM, Nq, kT, ac, cj, fD, y); #c1(IL5RA) c2(NP_783855) c3(interleukin-5 receptor subunit alpha isoform 3 precursor) c4(251744, 251745, 251746) c5(251747, 251748, 251749, 251750, 251751, 251752, 251753, 251754, 251755, 251756) c6( ) c7(bL, bM, sY, Dw, j, V, AW, apJ, Ds, dL, JK, ey, eL, eu, Nr, iU, sp, mQ, Xm, hp, eE, uC, cM, Nq, kT, ac, cj, fD, y); #c1(IL5RA) c2(XP_011531980) c3(interleukin-5 receptor subunit alpha isoform X1) c4(327983) c5(327984, 327985, 327986, 327987, 327988, 327989) c6( ) c7(bL, bM, sY, Dw, j, V, AW, apJ, Ds, dL, JK, ey, eL, eu, Nr, iU, sp, mQ, Xm, hp, eE, uC, cM, Nq, kT, ac, cj, fD, y); #c1(IL5RA) c2(XP_011531981) c3(interleukin-5 receptor subunit alpha isoform X2) c4( ) c5(327990, 327991, 327992, 327993, 327994, 327995, 327996, 327997, 327998, 327999, 328000, 328001, 328002, 328003, 328004, 328005, 328006, 328007, 328008, 328009, 328010, 328011, 328012, 328013) c6( ) c7(bL, bM, sY, Dw, j, V, AW, apJ, Ds, dL, JK, ey, eL, eu, Nr, iU, sp, mQ, Xm, hp, eE, uC, cM, Nq, kT, ac, cj, fD, y); #c1(IL6) c2(NP_000591) c3(interleukin-6 precursor) c4(13368, 13369) c5(13370, 13371, 13372, 13373, 13374, 13375, 13376, 13377, 13378, 13379, 13380, 13381, 13382, 13383, 13384, 13385, 13386, 13387, 13388, 13389, 13390, 13391) c6(13392, 13393, 13394, 13395, 13396, 13397) c7(uB, gh, T, os, ea, bO, fd, Vd, ci, aY, bv, bQB, aE, rw, dV, Vv, alX, Ds, Bi, hu, zy, hH, azh, cp, VF, aa, ly, CG, ye, az, nY, vs, zC, axp, Ik, akw, baR, GR, axG, zV, ba, fT, iA, Jr, nB, dc, wE, cj, Dt, k, azg, aEw, sr, nD, dt, FG, ht, aj, bPL, qW, cd, hr, zo, td, adf, aEB, IG, bxi, aNj, ey, hi, dd, nP, mR, fe, aVD, CQ, pm, adz, hq, vU, iO, aBs, ok, RB, dB, bPc, eD, bOj, Ei, E, avr, aZD, bli, abW, apE, DM, jv, aZy, DD, fZ, aA, cz, bX, yV, lu, wy, q, zn, aEE, aCX, yu, bPW, cy, aLM, aAD, jj, ch, dl, eu, bA, le, bf, nO, fO, lC, bg, bsl, aMA, aFC, lo, bRQ, cl, GF, pb, cT, rR, acW, tW, ac, pa, ig, iM, iQ, mG, aXB, bRN, hr, MB, bRJ, bt, Ze, bQz, ao, On, gV, Ve, wi, aag, arS, iW, uG, jN, rl, jh, aHv, mw, oZ, dG, uu, fu, ad, wD, aoH, hX, bRP, yt, bRE, oW, iY, IQ, bPM, WZ, MG, Dl, aFP, lx, azS, cH, PE, cW, ff, Of, Mz, tv, dq, EZ, iV, aFd, bz, baa, OG, amS, xZ, ag, dX, IC, If, bRE, ne, iu, ra, bsJ, oO, bM, lD, qo, vS, bQI, aiH, Tc, if, e, bB, cL, ur, IN, bh, ajC, Tz, ip, x, vV, Gb, ja, be, bQs, xQ, eG, up, Jl, fc, hl, kt, pD, as, Eg, eE, eF, cm, bw, qJ, eY, It, bQI, xD, ki, mx, vy, aGN, wx, Vj, aiu, dD, gU, IT, zt, n, nA, aCZ, uE, Mo, jz, no, pe, ec, zw, brX, gd, bsg, bRM, eV, hn, bQx, bRH, cY, A, RT, aix, hT, fJ, bQq, yq, amo, vo, xe, Sc, bP, cA, Pl, hL, at, bPs, bjK, ut, pg, fL, B, NQ, AS, dA, mr, wL, Lx, eX, fF, GC, vv, aNG, v, bcE, Qo, V, akG, eJ, aPW, asG, di, bQG, DK, rS, sl, ld, aWJ, XZ, bau, ae, to, blm, aFs, hM, jf, Sh, bRL, zH, aOK, vR, ev, DN, akB, aom, aDY, LV, t, acp, vk, bRK, ck, amv, kP, II, wO, gX, hO, ro, oX, yH, byK, zu, vi, dM, amQ, aBz, oR, wV, eq, adg, qi, hd, aop, py, afm, Db, ds, Hk, LA, hD, rN, JK, nJ, bOu, sj, atX, d, je, wc, NH, aFt, rM, dN, kD, anW, Z, aGj, Hl, Hv, dr, D, gk, KD, yE, dO, II, wz, gZ, aef, MJ, Hs, y, pC, aC, UH, fR, vf, atj, bll, al, axk, gf, qj, IR, wa, xE, u, aEX, Xc, bW, pX, M, rB, K, aZS, wt, DY, dF, eL, bNG, mH, aEV, ago, HI, bOh, IW, axu, asD, mQ, LZ, hN, FU, aB, Ku, q, uC, QA, Uk, bRI, aik, bRO, xK, aFO, aDs, uy, aer, U, uo, dW, Hb, m, P, NK, aFQ, sQ, sw, aw, NT, fN, To, BH, BF, aCQ, eh, ft, Nn, kH, Lv, cU, Ne, Jn, wb, uV, ZN, Ha, tx, zq, Ni, Og, jT, cM, bRD, auC, Zj, ar, kT, GG, W, xO, wk, bo, mg, aiS, gg, Pr, it, L, ayV, fM, wj, fG, oe, jx, Nt, wo, zN, hz, aSE, j, eA, J, o, er, hb, nX, jZ, dn, aCV, yg, qG, bq, bPQ, aRR, azU, kl, PK, Y, RF, Pg, r, wl, tu, en, wA, iK, bN, QG, sn, aQd, hc, of, dh, tM, wR, cS, dy, fD, Kg, LS, sY, kh, bmQ, aFe, bxK, am, id, aZ, em, bs, bPD, auq, bS, ah, pl, bKZ, hF, azk, atK, iJ, Ho, dP, fU, sN, aZW, ji, bNL, NM, qE, uX, IR, anX, vj, xs, eH, cr, aZM, hp, BG, iR, Bu, KM, bNW, qa, dR, TA, Bv, Lj, HP, aFb, sG, aEs, aCI, cP, ei, hE, pf, eb, aTy, aR, aEQ, dY, YX, iX, Ou, qM, bU, dQ, H, eN, bRR, hm, tw, DA, EX, bvR, LC, bRG, aW, bNq, Rr, aXc, aOW, aAu, brr, hJ, eM, iT, Jp, uJ, gn, R, xh, qR, cZ, JC, My, Mi, ct, qN, fr, kO, aPb, ai, rc, eW, aDF, ke, co, cc, ql, kl, ju, zf, h, jy, dL, ux, pj, vx, afu, asp, aiB, alt, aq, kp, kk, wU, op, lx, bJ, oU, Wt, asE, NL, hk, vb, bRS, hm, hR, uz, te, aDE, amb, bni, cn, aMk, hL, Dw, eR, dK, uv, DV, sM, cR, hy, C, aql, ady, ga, aCY, mP, qp, afQ, aT, an, af, ak, Uf, s, iU, aZB, oV, la, aNi, akY, aDm, aYp, bQ, f, Vq, IY, wf, Ta, sS, byx, wg, nM, Zg, aJt, AH, fP, wq, adR, dT, mf, hS, Kd, Ke, Zl, aD, ha, vr, oH, jE, mC, kL, av, bPu, I, F, MS, nH, xl, oz, ib, NS, alg, Os, vw, jo, yF, uQ, Di, qt, aEE, aGS, eZ, yy, gl, aFr, xv, aF, gu, byM, uF, eK, LB, es, pc, zr, axs, bE, pE, atM, dJ, uR, z, aS, aGg, tr, bPJ, pK, X, us); #c1(IL6) c2(XP_005249802) c3(interleukin-6 isoform X2) c4(269855, 269856, 269857) c5(269858, 269859, 269860, 269861, 269862, 269863, 269864, 269865, 269866, 269867, 269868, 269869, 269870, 269871, 269872, 269873, 269874, 269875, 269876, 269877, 269878, 269879, 269880, 269881) c6(269882, 269883, 269884, 269885, 269886, 269887) c7(uB, gh, T, os, ea, bO, fd, Vd, ci, aY, bv, bQB, aE, rw, dV, Vv, alX, Ds, Bi, hu, zy, hH, azh, cp, VF, aa, ly, CG, yo, az, nY, vs, zC, axp, Ik, akw, baR, GR, axG, zV, ba, fT, iA, Jr, nB, dc, wE, cj, Dt, k, azg, aEw, sr, nD, dt, FG, ht, aj, bPL, qW, cd, hr, zo, td, adf, aEB, IG, bxi, aNj, ey, hi, dd, nP, mR, fe, aVD, CQ, pm, adz, hq, vU, iO, aBs, ok, RB, dB, bPc, eD, bOj, Ei, E, avr, aZD, bli, abW, apE, DM, jv, aZy, DD, fZ, aA, cz, bX, yV, lu, wy, q, zn, aEE, aCX, yu, bPW, cy, aLM, aAD, jj, ch, dl, eu, bA, le, bf, nO, fO, IC, bg, bsl, aMA, aFC, lo, bRQ, cl, GF, pb, cT, rR, acW, tW, ac, pa, ig, iM, iQ, mG, aXB, bRN, hr, MB, bRJ, bt, Ze, bQz, ao, On, gV, Ve, wi, aag, arS, iW, uG, jN, rl, jh, aHv, mw, oZ, dG, uu, fu, ad, wD, aoH, hX, bRP, yt, bRE, oW, iY, IQ, bPM, WZ, MG, Dl, aFP, lx, azS, cH, PE, cW, ff, Of, Mz, tv, dq, EZ, iV, aFd, bz, baa, OG, amS, xZ, ag, dX, IC, If, bRE, ne, iu, ra, bsJ, oO, bM, lD, qo, vS, bQI, aiH, Tc, if, e, bB, cL, ur, IN, bh, ajC, Tz, ip, x, vV, Gb, ja, be, bQs, xQ, eG, up, Jl, fc, hl, kt, pD, as, Eg, eE, eF, cm, bw, qJ, eY, It, bQI, xD, ki, mx, vy, aGN, wx, Vj, aiu, dD, gU, IT, zt, n, nA, aCZ, uE, Me, jz, no, pe, ec, zw, brX, gd, bsg, bRM, eV, hn, bQx, bRH, cY, A, RT, aix, hT, fJ, bQq, yq, amo, vo, xe, Sc, bP, cA, Pl, hL, at, bPs, bjK, ut, pg, fL, B, NQ, AS, dA, mr, wL, Lx, eX, fF, GC, vv, aNG, v, bcE, Qo, V, akG, eJ, aPW, asG, di, bQG, DK, rS, sl, ld, aWJ, XZ, bau, ae, to, blm, aFs, hM, jf, Sh, bRL, zH, aOK, vR, ev, DN, akB, aom, aDY, LV, t, acp, vk, bRK, ck, amv, kP, II, wO, gX, hO, ro, oX, yH, byK, zu, vi, dM, amQ, aBz, oR, wV, eq, adg, qi, hd, aop, py, afm, Db, ds, Hk, LA, hD, rN, JK, nJ, bOu, sj, atX, d, je, wc, NH, aFt, rM, dN, kD, anW, Z, aGj, Hl, Hv, dr, D, gk, KD, yE, dO, II, wz, gZ, aef, MJ, Hs, y, pC, aC, UH, fR, vf, atj, bll, al, axk, gf, qj, IR, wa, xE, u, aEX, Xc, bW, pX, M, rB, K, aZS, wt, DY, dF, eL, bNG, mH, aEV, ago, HI, bOh, IW, axu, asD, mQ, LZ, hN, FU, aB, Ku, g, uC, QA, Uk, bRI, aik, bRO, xK, aFO, aDs, uy, aer, U, uo, dW, Hb, m, P, NK, aFQ, sQ, sw, aw, NT, fN, To, BH, BF, aCQ, eh, ft, Nn, kH, Lv, cU, Ne, Jn, wb, uV, ZN, Ha, tx, zq, Ni, Og, jT, cM, bRD, auC, Zj, ar, kT, GG, W, xO, wk, bo, mg, aiS, gg, Pr, it, L, ayV, fM, wj, fG, oe, jx, Nt, wo, zN, hz, aSE, j, eA, J, o, er, hb, nX, jZ, dn, aCV, yg, qG, bq, bPQ, aRR, azU, kl, PK, Y, RF, Pg, r, wl, tu, en, wA, iK, bN, QG, sn, aQd, hc, of, dh, tM, wR, cS, dy, fD, Kg, LS, sY, kh, bmQ, aFe, bxK, am, id, aZ, em, bs, bPD, auq, bS, ah, pl, bKZ, hF, azk, atK, iJ, Ho, dP, fU, sN, aZW, ji, bNL, NM, qE, uX, IR, anX, vj, xs, eH, cr, aZM, hp, BG, iR, Bu, KM, bNW, qa, dR, TA, Bv, Lj, HP, aFb, sG, aEs, aCI, cP, ei, hE, pf, eh, aTy, aR, aEQ, dY, YX, iX, Ou, qM, bU, dQ, H, eN, bRR, hm, tw, DA, EX, bvR, LG, bRG, aW, bNq, Rr, aXc, aOW, aAu, brr, hJ, eM, iT, Jp, uJ, gn, R, xh, gR, cZ, JC, My, Mi, et, qN, fr, kD, aPb, ai, rc, eW, aDF, ke, co, cc, ql, kl, ju, zf, h, jy, dL, ux, pj, vx, afu, asp, aiB, alt, aq, kp, kk, wU, op, lx, bJ, oU, Wt, asE, NL, hk, vb, bRS, bm, hR, uz, te, aDE, amb, bni, cn, aMk, hL, Dw, eR, dK, uv, DV, sM, cR, hy, C, aql, ady, ga, aCY, mP, qp, afQ, aT, an, af, ak, Uf, s, iU, aZB, oV, la, aNi, akY, aDm, aYp, bQ, f, Vq, IY, wf, Ta, sS, byx, wg, nM, Zg, aJt, AH, fP, wq, adR, dT, mf, hS, Kd, Ke, Zl, aD, ha, vr, oH, jE, mC, kL, av, bPu, I, F, MS, nH, xl, oz, ib, NS, alg, Os, vw, jo, yF, uQ, Di, qt, aFE, aGS, eZ, yy, gl, aFr, xv, aF, gu, byM, uF, eK, LB, es, pc, zr, axs, bE, pE, atM, dJ, uR, z, aS, aGg, tr, bPJ, pK, X, us); #c1(IL6R) c2(NP_000556) c3(interleukin-6 receptor subunit alpha isoform 1 precursor) c4(12659) c5(12660, 12661, 12662, 12663, 12664, 12665) c6( ) c7(bM, T, aC, fR, ea, fd, ci, Ds, rB, hH, eL, ye, Jl, aW, aDn, eF, cm, uC, bw, eM, cj, uo, aYS, m, azg, dD, sQ, sw, My, ht, aw, aj, cd, zo, pe, h, dL, bl, uV, fe, aq, CQ, hk, bm, at, uz, ut, hR, agy, B, bL, Dw, mr, fG, aA, v, j, V, eA, J, aT, cy, af, bA, Y, en, t, ck, Ta, iM, ac, np, sY, Ve, em, jh, dG, eq, ad, hX, iY, IQ, je, ff, eH, eZ, aF, hp, bz, LB, aGg, ei, y, Tc); #c1(IL6R) c2(NP_852004) c3(interleukin-6 receptor subunit alpha isoform 2 precursor) c4(254799) c5(254800, 254801, 254802, 254803, 254804, 254805) c6( ) c7(bM, T, aC, fR, ea, fd, ci, Ds, rB, hH, eL, ye, Jl, aW, aDn, eF, cm, uC, bw, eM, cj, uo, aYS, m, azg, dD, sQ, sw, My, ht, aw, aj, cd, zo, pe, h, dL, bl, uV, fe, aq, CQ, hk, hm, at, uz, ut, hR, agy, B, bL, Dw, mr, fG, aA, v, j, V, eA, J, aT, cy, af, bA, Y, en, t, ck, Ta, iM, ac, np, sY, Ve, em, jh, dG, eq, ad, hX, iY, IQ, je, ff, eH, eZ, aF, hp, bz, LB, aGg, ei, y, Tc); #c1(IL6ST) c2(NP_001177910) c3(interleukin-6 receptor subunit beta isoform 3 precursor) c4(73125, 73126) c5(73127, 73128, 73129, 73130, 73131, 73132, 73133) c6( ) c7(bL, T, dD, IT, aD, aw, aA, cz, fd, v, j, ci, bX, eq, qN, zP, hF, qW, cd, ai, eA, x, jz, aE, pe, Xc, rw, Ye, aT, h, ji, K, uV, ae, af, eu, jf, yo, zQ, s, aW, Y, ff, aGS, hl, mQ, fe, aq, lo, aF, yq, en, q, t, bmj, uC, ck, LB, pc, dB, afc, mx, cj, hR, uz, m, k, fD, hh, ei, bt, cB, B, y); #c1(IL6ST) c2(NP_002175) c3(interleukin-6 receptor subunit beta isoform 1 precursor) c4(126301) c5(126302, 126303, 126304, 126305, 126306, 126307, 126308, 126309, 126310, 126311, 126312, 126313) c6( ) c7(bL, T, dD, IT, aD, aw, aA, cz, fd, v, j, ci, bX, eq, qN, zP, hF, qW, cd, ai, eA, x, jz, aE, pe, Xc, rw, Yo, aT, h, ji, K, uV, ae, af, eu, jf, yo, zQ, s, aW, Y, ff, aGS, hl, mQ, fe, aq, lo, aF, yq, en, g, t, bmj, uC, ck, LB, pc, dB, afc, mx, cj, hR, uz, m, k, fD, hh, ei, bt, cB, B, y); #c1(IL6ST) c2(NP_786943) c3(interleukin-6 receptor subunit beta isoform 2 precursor) c4(251939) c5(251940, 251941, 251942, 251943, 251944, 251945, 251946, 251947, 251948, 251949, 251950, 251951, 251952, 251953, 251954, 251955, 251956) c6( ) c7(bL, T, dD, IT, aD, aw, aA, cz, fd, v, j, ci, bX, eq, qN, zP, hF, qW, cd, ai, eA, x, jz, aE, pe, Xc, rw, Ye, aT, h, ji, K, uV, ae, af, eu, jf, ye, zQ, s, aW, Y, ff, aGS, hl, mQ, fe, aq, lo, aF, yq, en, g, t, bmj, uC, ck, LB, pc, dB, afc, mx, cj, hR, uz, m, k, fD, hh, ei, bt, cB, B, y); #c1(IL7) c2(NP_001186815) c3(interleukin-7 isoform 2 precursor) c4(78625, 78626) c5(78627, 78628, 78629, 78630, 78631, 78632, 78633, 78634, 78635, 78636, 78637, 78638, 78639, 78640, 78641, 78642, 78643, 78644) c6(78645, 78646, 78647, 78648) c7(bM, T, fR, ea, fd, x, rw, Co, Ds, Us, aW, apm, pL, eE, cm, ou, eM, cj, k, m, dD, fN, aj, fr, ai, bRT, Mo, cc, kH, h, ox, OM, A, RT, CM, fe, CQ, Wt, eo, Dw, dA, fG, IH, j, C, V, q, J, eA, oT, rS, aT, ae, hM, xR, Y, r, t, f, dS, ck, iM, ac, iQ, yH, fD, bt, aJc, jh, eq, EA, ad, hX, av, F, ds, IQ, uQ, je, aF, jg, iV, bz, eU, zr, y); #c1(IL7) c2(NP_001186817) c3(interleukin-7 isoform 4 precursor) c4(78649) c5(78650, 78651, 78652, 78653, 78654, 78655, 78656, 78657, 78658, 78659, 78660, 78661, 78662, 78663, 78664, 78665, 78666, 78667, 78668, 78669, 78670, 78671, 78672, 78673, 78674, 78675, 78676, 78677, 78678, 78679, 78680) c6(78681, 78682, 78683, 78684, 78685) c7(bM, T, fR, ea, fd, x, rw, Co, Ds, Ds, aW, apm, PL, eE, cm, eu, eM, cj, k, m, dD, fN, aj, fr, ai, bRT, Mo, cc, kH, h, ox, OM, A, RT, CM, fe, CQ, Wt, eo, Dw, dA, fG, IH, j, C, V, q, J, eA, oT, rS, aT, ae, hM, xR, Y, r, t, f, dS, ck, iM, ac, iQ, yH, fD, bt, aJc, jh, eq, EA, ad, hX, av, F, ds, IQ, uQ, je, aF, jg, iV, bz, eU, zr, y); #c1(IL7) c2(XP_011515823) c3(interleukin-7 isoform X1) c4(308631, 308632) c5(308633, 308634, 308635, 308636, 308637, 308638, 308639, 308640, 308641, 308642, 308643, 308644, 308645, 308646, 308647, 308648, 308649, 308650, 308651, 308652, 308653, 308654, 308655, 308656, 308657, 308658, 308659, 308660, 308661, 308662, 308663, 308664, 308665, 308666, 308667, 308668, 308669, 308670, 308671, 308672, 308673, 308674, 308675, 308676, 308677, 308678, 308679, 308680, 308681, 308682, 308683, 308684, 308685, 308686, 308687, 308688, 308689, 308690, 308691, 308692, 308693, 308694, 308695, 308696, 308697, 308698, 308699, 308700, 308701, 308702, 308703, 308704, 308705, 308706, 308707, 308708, 308709, 308710, 308711, 308712, 308713, 308714, 308715, 308716, 308717, 308718, 308719, 308720, 308721, 308722, 308723, 308724, 308725, 308726, 308727, 308728, 308729, 308730, 308731, 308732, 308733, 308734, 308735, 308736, 308737, 308738, 308739, 308740, 308741, 308742, 308743, 308744, 308745, 308746, 308747, 308748, 308749, 308750, 308751, 308752, 308753, 308754, 308755, 308756, 308757, 308758, 308759, 308760, 308761, 308762, 308763, 308764, 308765, 308766, 308767, 308768, 308769, 308770, 308771, 308772, 308773, 308774, 308775, 308776, 308777, 308778, 308779, 308780) c6(308781, 308782, 308783) c7(bM, T, fR, ea, fd, x, rw, Co, Ds, Us, aW, apm, pL, eE, cm, ou, eM, cj, k, m, dD, fN, aj, fr, ai, bRT, Mo, cc, kH, h, ox, OM, A, RT, CM, fe, CQ, Wt, eo, Dw, dA, fG, IH, j, C, V, q, J, eA, oT, rS, aT, ae, hM, xR, Y, r, t, f, dS, ck, iM, ac, iQ, yH, fD, bt, aJc, jh, eq, EA, ad, hX, av, F, ds, IQ, uQ, je, aF, jg, iV, bz, eU, zr, y); #c1(IL7) c2(XP_011515824) c3(interleukin-7 isoform X2) c4(308784) c5( ) c6( ) c7(bM, T, fR, ea, fd, x, rw, Co, Ds, Us, aW, apm, pL, eE, cm, eu, eM, cj, k, m, dD, fN, aj, fr, ai, bRT, Mo, cc, kH, h, ox, OM, A, RT, CM, fe, Cq, Wt, eo, Dw, dA, fG, IH, j, C, V, q, J, eA, oT, rS, aT, ae, hM, xR, Y, r, t, f, dS, ck, iM, ac, iQ, yH, fD, bt, aJc, jh, eq, EA, ad, hX, av, F, ds, IQ, uQ, je, aF, jg, iV, bz, eU, zr, y); #c1(IL7) c2(XP_011515825) c3(interleukin-7 isoform X3) c4(308785) c5(308786) c6( ) c7(bM, T, fR, ea, fd, x, rw, Co, Ds, Us, aW, apm, pL, eE, cm, eu, eM, cj, k, m, dD, fN, aj, fr, ai, bRT, Mo, cc, kH, h, ox, DM, A, RT, CM, fe, CQ, Wt, eo, Dw, dA, fG, IH, j, C, V, q, J, eA, oT, rS, aT, ae, hM, xR, Y, r, t, f, dS, ck, iM, ac, iQ, yH, fD, bt, aJc, jh, eq, EA, ad, hX, av, F, ds, IQ, uQ, je, aF, jg, iV, bz, eU, zr, y); #c1(IL7R) c2(NP_002176) c3(interleukin-7 receptor subunit alpha precursor) c4(126314, 126315, 126316) c5(126317, 126318, 126319, 126320, 126321, 126322, 126323) c6( ) c7(Kd, T, bM, dA, Ke, iW, jx, aA, aGx, cL, v, ci, EA, aVU, mF, hF, V, pl, q, o, hX, dP, x, Ig, oz, ds, nX, dV, aYy, aT, h, dL, K, bxf, bc, aa, uQ, hM, A, aW, sp, vj, mQ, CM, ff, r, aGy, Io, CQ, en, iV, eE, aoG, f, bz, GR, cm, jg, ck, fT, eM, aDg, mx, at, eo, k, aEN, eg, y, bt, aJc); #c1(IL7R) c2(XP_005248356) c3(interleukin-7 receptor subunit alpha isoform X2) c4(268331, 268332, 268333, 268334) c5(268335, 268336, 268337, 268338, 268339) c6( ) c7(Kd, T, bM, dA, Ke, iW, jx, aA, aGx, cL, v, ci, EA, a VO, mF, hF, V, pl, q, o, hX, dP, x, Ig, oz, ds, nX, dV, aYy, aT, h, dL, K, bxf, be, aa, uQ, hM, A, aW, sp, vj, mQ, CM, ff, r, aGy, Io, CQ, en, iV, eE, aoG, f, bz, GR, cm, jg, ck, fT, eM, aDg, mx, at, eo, k, aEN, eg, y, bt, aJc); #c1(IL7R) c2(XP_005248357) c3(interleukin-7 receptor subunit alpha isoform X3) c4( ) c5(268340, 268341, 268342, 268343, 268344, 268345, 268346, 268347, 268348, 268349, 268350, 268351, 268352, 268353, 268354, 268355, 268356, 268357, 268358, 268359, 268360, 268361, 268362, 268363, 268364, 268365, 268366, 268367, 268368, 268369) c6( ) c7(Kd, T, bM, dA, Ke, iW, jx, aA, aGx, cL, v, ci, EA, aVU, mF, hF, V, pl, q, o, hX, dP, x, Ig, oz, ds, nX, dV, aYy, aT, h, dL, K, bxf, bc, aa, uQ, hM, A, aW, sp, vj, mQ, CM, ff, r, aGy, Io, CQ, en, iV, eE, aoG, f, bz, GR, cm, jg, ck, fT, eM, aDg, mx, at, eo, k, aEN, eg, y, bt, aJc); #c1(IL9) c2(NP_000581) c3(interleukin-9 precursor) c4(13157) c5(13158, 13159, 13160, 1316113162, 13163) c6( ) c7(bM, sY, Dw, dA, fR, fG, aw, yG, ht, jh, fd, Hn, oY, j, ur, uu, bh, V, q, bRT, C J, xT, dV, kH, cU, h, Ds, JK, ji, aDp, af, eu, aa, uQ, Nr, asp, A, je, sp, Y, fJ, afS, cr, r, dN, TA, eZ, po, hp, fe, jg, iV, eE, aKj, cM, boD, bz, uC, OF, vo, Nq, ck, kT, cT, Ta, ac, yR, Jr, iM, xO, Jp, uy, z, cj, Dt, eo, fD, adz, afT, y, Tc); #c1(IL9R) c2(NP_002177) c3(interleukin-9 receptor isoform 1 precursor) c4(126324) c5(126325, 126326, 126327, 126328, 126329, 126330) c6( ) c7(bM, sY, Dw, Ds, dL, ji, aT, uQ, sp, Y, vj, hl, cr, eE, uC, bz, TA, cT, z, uy, Jp, y); #c1(IL9R) c2(NP_789743) c3(interleukin-9 receptor isoform 2) c4(252188, 252189) c5(252190, 252191, 252192, 252193, 252194, 252195, 252196, 252197, 252198, 252199) c6( ) c7(bM, sY, Dw, Ds, dL, ji, aT, uQ, sp, Y, vj, hl, cr, eE, uC, bz, TA, cT, z, uy, Jp, y); #c1(IL9R) c2(XP_011543947) c3(interleukin-9 receptor isoform X1) c4( ) c5(343164, 343165) c6( ) c7(bM, sY, Dw, Ds, dL, ji, af, uQ, sp, Y, vj, hl, cr, eE, uC, bz, TA, cT, z, uy, Jp, y); #c1(IL9R) c2(XP_011543948) c3(interleukin-9 receptor isoform X2) c4( ) c5(343166) c6( ) c7(bM, sY, Dw, Ds, dL, ji, af, uQ, sp, Y, vj, hl, cr, eE, uC, bz, TA, cT, z, uy, Jp, y); #c1(IL9R) c2(XP_011543949) c3(interleukin-9 receptor isoform X3) c4(343167, 343168) c5( ) c6( ) c7(bM, sY, Dw, Ds, dL, ji, af, uQ, sp, Y, vj, hl, cr, eE, uC, bz, TA, cT, z, uy, Jp, y); #c1(IL9R) c2(XP_011543951) c3(interleukin-9 receptor isoform X4) c4( ) c5(343169, 343170, 343171, 343172, 343173) c6( ) c7(bM, sY, Dw, Ds, dL, ji, af, uQ, sp, Y, vj, hl, cr, eE, uC, bz, TA, cT, z, uy, Jp, y); #c1(IL9R) c2(XP_011543953) c3(interleukin-9 receptor isoform X6) c4( ) c5(343174, 343175, 343176, 343177, 343178, 343179) c6( ) c7(bM, sY, Dw, Ds, dL, ji, af, uQ, sp, Y, vj, hl, cr, eE, uC, bz, TA, cT, z, uy, Jp, y); #c1(ILDR1) c2(NP_001186728) c3(immunoglobulin-like domain-containing receptor 1 isoform 1 precursor) c4(78421) c5(78422, 78423, 78424, 78425, 78426, 78427) c6( ) c7(bRU, hH, V, bw); #c1(ILDR1) c2(NP_001186729) c3(immunoglobulin-like domain-containing receptor 1 isoform 3 precursor) c4(78428, 78429) c5(78430, 78431, 78432, 78433, 78434, 78435, 78436, 78437, 78438, 78439, 78440, 78441) c6( ) c7(bRU, hH, V, bw); #c1(ILDR1) c2(NP_787120) c3(immunoglobulin-like domain-containing receptor 1 isoform 2 precursor) c4(252128) c5(252129, 252130, 252131, 252132, 252133, 252134) c6( ) c7(bRU, hH, V, bw); #c1(ILDR1) c2(XP_005247446) c3(immunoglobulin-like domain-containing receptor 1 isoform X2) c4(267844) c5(267845, 267846, 267847, 267848, 267849, 267850) c6( ) c7(bRU, hH, V, bw); #c1(ILDR2) c2(NP_955383) c3(immunoglobulin-like domain-containing receptor 2 precursor) c4(261630) c5(261631, 261632, 261633, 261634, 261635, 261636) c6( ) c7(bA, cz); #c1(ILF2) c2(NP_001254738) c3(interleukin enhancer-binding factor 2 isoform 2) c4(94896) c5(94897, 94898, 94899, 94900, 94901) c6( ) c7(lg, if, AH, h, qN, Le); #c1(ILF2) c2(NP_004506) c3(interleukin enhancer-binding factor 2 isoform 1) c4(146992, 146993) c5(146994, 146995, 146996, 146997, 146998, 146999, 147000, 147001, 147002, 147003, 147004, 147005, 147006, 147007) c6( ) c7(lg, if, AH, h, qN, Le); #c1(ILF3) c2(NP_001131145) c3(interleukin enhancer-binding factor 3 isoform e) c4(52622) c5(52623, 52624, 52625, 52626, 52627, 52628) c6( ) c7(fR, ds, Ih, AH, aw, oj, aT, uY, bl, eA, kU, cd, y); #c1(ILF3) c2(NP_004507) c3(interleukin enhancer-binding factor 3 isoform b) c4(147008) c5(147009, 147010, 147011, 147012, 147013, 147014, 147015, 147016, 147017, 147018) c6( ) c7(fR, ds, Ih, AH, aw, oj, aT, uY, bl, eA, kU, cd, y); #c1(ILF3) c2(NP_036350) c3(interleukin enhancer-binding factor 3 isoform a) c4(173162, 173163) c5( ) c6( ) c7(fR, ds, Ih, AH, aw, oj, aT, uY, bl, eA, kU, cd, y); #c1(ILF3) c2(NP_060090) c3(interleukin enhancer-binding factor 3 isoform d) c4(194092) c5(194093, 194094, 194095, 194096, 194097, 194098) c6( ) c7(fR, ds, Ih, AH, aw, oj, aT, uY, bl, eA, kU, cd, y); #c1(ILF3) c2(NP_703194) c3(interleukin enhancer-binding factor 3 isoform c) c4(246097) c5(246098, 246099, 246100, 246101, 246102, 246103, 246104, 246105, 246106, 246107, 246108, 246109, 246110, 246111246112, 246113, 246114, 246115, 246116) c6( ) c7(fR, ds, Ih, AH, aw, oj, aT, uY, bl, eA, kU, cd, y); #c1(ILK) c2(NP_001014795) c3(integrin-linked protein kinase isoform 1) c4(25983, 25984) c5(25985, 25986, 25987, 25988, 25989, 25990, 25991, 25992, 25993, 25994, 25995, 25996, 25997, 25998, 25999) c6( ) c7(bL, T, aC, dA, eR, ha, aA, eb, n, wV, Fb, j, ci, fr, fd, q, cd, ad, eA, eJ, fU, bv, hd, av, cc, fm, aT, cy, dL, ji, K, Tj, hB, Ha, ae, eL, d, Qr, HI, aW, Y, eH, r, fQ, cu, alJ, Io, vs, q, as, eF, LV, t, bz, aF, ck, bF, sS, eM, nB, dB, bE, X, mx, gZ, nL, Hs, dy, Hb, m, Xu, nz, bt, B); #c1(ILK) c2(NP_001265371) c3(integrin-linked protein kinase isoform 3) c4( ) c5(98378, 98379, 98380, 98381, 98382) c6( ) c7(bL, T, aC, dA, eR, ha, aA, eb, n, wV, Fb, j, ci, fr, fd, q, cd, ad, eA, eJ, fU, bv, hd, av, cc, fm, aT, cy, dL, ji, K, Tj, hB, Ha, ae, eL, d, Qr, HI, aW, Y, eH, r, fQ, cu, alJ, Io, vs, q, as, eF, LV, t, bz, aF, ck, bF, sS, eM, nB, dB, bE, X, mx, gZ, nL, Hs, dy, Hb, m, Xu, nz, bt, B); #c1(IMMPIL) c2(NP_001291203) c3(mitochondrial inner membrane protease subunit 1) c4(115548, 115549, 115550) c5(115551, 115552, 115553, 115554, 115555, 115556, 115557, 115558, 115559, 115560, 115561115562, 115563, 115564, 115565, 115566, 115567, 115568, 115569, 115570, 115571, 115572) c6( ) c7(bB, bE, T, yx, nJ); #c1(IMMP2L) c2(XP_005250687) c3(mitochondrial inner membrane protease subunit 2 isoform X1) c4(270475) c5(270476, 270477, 270478, 270479, 270480, 270481, 270482, 270483, 270484, 270485, 270486, 270487, 270488, 270489, 270490, 270491, 270492, 270493) c6( ) c7(bL, T, d, yL, au, EQ, he, cd, bN); #c1(IMMP2L) c2(XP_011514906) c3(mitochondrial inner membrane protease subunit 2 isoform X2) c4(307666) c5( ) c6( ) c7(bL, T, d, yL, au, EQ, he, cd, bN); #c1(IMMP2L) c2(XP_011514911) c3(mitochondrial inner membrane protease subunit 2 isoform X7) c4(307667) c5( ) c6( ) c7(bL, T, d, yL, au, EQ, he, cd, bN); #c1(IMMP2L) c2(XP_011514915) c3(mitochondrial inner membrane protease subunit 2 isoform X11) c4( ) c5(307668, 307669, 307670, 307671, 307672, 307673, 307674, 307675, 307676, 307677, 307678, 307679) c6( ) c7(bL, T, d, yL, au, EQ, he, cd, bN); #c1(IMMT) c2(NP_001093639) c3(MICOS complex subunit MIC60 isoform 2) c4(40392) c5(40393, 40394, 40395, 40396, 40397, 40398) c6( ) c7(DS, T, eR, aj, bX, aY, V, aoz, J, ad, b, aE, aV, vc, K, ae, bjb, fe, cm, f, yf, Ew, dB, mG, i, iu); #c1(IMMT) c2(NP_001093640) c3(MICOS complex subunit MIC60 isoform 3) c4(40399, 40400) c5(40401, 40402, 40403, 40404, 40405, 40406, 40407, 40408, 40409, 40410, 40411, 40412) c6( ) c7(DS, T, eR, aj, bX, aY, V, aoz, J, ad, b, aE, aV, vc, K, ae, bjb, fe, cm, f, yf, Ew, dB, mG, i, iu); #c1(IMMT) c2(NP_006830) c3(MICOS complex subunit MIC60 isoform 1) c4(168504) c5(168505, 168506, 168507, 168508, 168509, 168510) c6( ) c7(DS, T, eR, aj, bX, aY, V, aoz, J, ad, b, aE, aV, vc, K, ae, bjb, fe, cm, f, yf, Ew, dB, mG, i, iu); #c1(IMMT) c2(XP_005264167) c3(MICOS complex subunit MIC60 isoform X1) c4(278678) c5(278679, 278680, 278681, 278682, 278683, 278684) c6( ) c7(DS, T, eR, aj, bX, aY, V, aoz, J, ad, b, aE, aV, vc, K, ae, bjb, fe, cm, f, yf, Ew, dB, mG, i, iu); #c1(IMMT) c2(XP_005264170) c3(MICOS complex subunit MIC60 isoform X2) c4(278685) c5(278686, 278687, 278688, 278689, 278690, 278691) c6( ) c7(DS, T, eR, aj, bX, aY, V, aoz, J, ad, b, aE, aV, vc, K, ae, bjb, fe, cm, f, yf, Ew, dB, mG, i, iu); #c1(IMMT) c2(XP_005264171) c3(MICOS complex subunit MIC60 isoform X3) c4(278692) c5(278693, 278694, 278695, 278696, 278697, 278698) c6( ) c7(DS, T, eR, aj, bX, aY, V, aoz, J, ad, b, aE, aV, vc, K, ae, bjb, fe, cm, f, yf, Ew, dB, mG, i, iu); #c1(IMP3) c2(NP_060755) c3(U3 small nucleolar ribonucleoprotein protein IMP3) c4(197609, 197610) c5(197611, 197612, 197613, 197614, 197615, 197616, 197617, 197618, 197619, 197620, 197621, 197622, 197623, 197624, 197625, 197626) c6( ) c7(Mb, T, hd, kP, aW, eH, aep, aT, dL, as, eF, eL, B); #c1(IMPA1) c2(NP_001138350) c3(inositol monophosphatase 1 isoform 2) c4(56248, 56249) c5(56250, 56251, 56252, 56253, 56254, 56255, 56256, 56257, 56258, 56259, 56260, 56261, 56262, 56263, 56264) c6( ) c7(bL, Si, T, ck, PF, bE, bB, auT, bK, ey, add); #c1(IMPA1) c2(NP_001138351) c3(inositol monophosphatase 1 isoform 3) c4(56265) c5(56266, 56267, 56268, 56269, 56270) c6( ) c7(bL, Si, T, ck, pF, bE, bB, auT, bK, ey, add); #c1(IMPA1) c2(NP_005527) c3(inositol monophosphatase 1 isoform 1) c4(157103, 157104) c5(157105, 157106, 157107, 157108, 157109, 157110, 157111, 157112, 157113, 157114) c6( ) c7(bL, Si, T, ck, PF, bE, bB, auT, bK, ey, add); #c1(IMPA2) c2(NP_055029) c3(inositol monophosphatase 2) c4(178383, 178384) c5(178385, 178386, 178387, 178388, 178389, 178390, 178391, 178392, 178393, 178394, 178395) c6( ) c7(dP, ac, M, uJ, bS, bK, he, mY, eu); #c1(IMPA2) c2(XP_011523961) c3(inositol monophosphatase 2 isoform X1) c4( ) c5(318522) c6( ) c7(dP, ac, M, uJ, bS, bK, he, mY, eu); #c1(IMPACT) c2(NP_060909) c3(protein IMPACT) c4(198580) c5(198581, 198582, 198583, 198584, 198585, 198586) c6( ) c7(ck, mU, T, eM, kB, mW, e, ml, mS, uJ, mY, j, et, bS, bK, Z, mV, ae, mL ad, mX); #c1(IMPAD1) c2(NP_060283) c3(inositol monophosphatase 3) c4(195195) c5(195196, 195197, 195198, 195199, 195200, 195201) c6( ) c7(ey, T, In, bA, bRV); #c1(IMPDH1) c2(NP_000874) c3(inosine-5′-monophosphate dehydrogenase 1 isoform a) c4(16730) c5(16731, 16732, 16733, 16734, 16735, 16736) c6( ) c7(xX, IR, nb, W, bRX, bRY, aW, bRZ, aT, fe, nw, bRW, Nh, nC, In, de); #c1(IMPDH1) c2(NP_001096075) c3(inosine-5′-monophosphate dehydrogenase 1 isoform c) c4(41050) c5(41051, 41052, 41053, 41054, 41055, 41056) c6( ) c7(xX, IR, nb, W, bRX, bRY, aW, bRZ, aT, fe, nw, bRW, Nh, nC, In, de); #c1(IMPDH1) c2(NP_001136046) c3(inosine-5′-menophesphate dehydrogenase 1 isoform f) c4(54164) c5(54165, 54166, 54167, 54168, 54169, 54170) c6( ) c7(xX, IR, nb, W, bRX, bRY, aW, bRZ, aT, fe, nw, bRW, Nh, nC, In, de); #c1(IMPDH1) c2(NP_001136047) c3(inosine-5′-monophosphate dehydrogenase 1 isoform g) c4(54171) c5(54172, 54173, 54174, 54175, 54176, 54177, 54178, 54179, 54180) c6( ) c7(xX, IR, nb, W, bRX, bRY, aW, bRZ, aT, fe, nw, bRW, Nh, nC, In, de); #c1(IMPDH1) c2(NP_001136048) c3(inosine-5′-monophosphate dehydrogenase 1 isoform d) c4(54181) c5(54182, 54183, 54184, 54185, 54186, 54187) c6( ) c7(xX, IR, nb, W, bRX, bRY, aW, bRZ, aT, fe, nw, bRW, Nh, nC, In, de); #c1(IMPDH1) c2(NP_001291450) c3(inosine-5′-menophesphate dehydrogenase 1 isoform h) c4(116067) c5(116068, 116069, 116070, 116071, 116072, 116073) c6( ) c7(xX, IR, nb, W, bRX, bRY, aW, bRZ, aT, fe, nw, bRW, Nh, nC, In, de); #c1(IMPDH1) c2(NP_899066) c3(inosine-5′-monophosphate dehydrogenase 1 isoform b) c4(257945) c5(257946, 257947, 257948, 257949, 257950, 257951, 257952) c6( ) c7(xX, IR, nb, W, bRX, bRY, aW, bRZ, aT, fe, nw, bRW, Nh, nC, In, de); #c1(IMPDH1) c2(XP_006716030) c3(inosine-5′-monophosphate dehydrogenase 1 isoform X1) c4( ) c5(290010) c6( ) c7(xX, IR, nb, W, bRX, bRY, aW, bRZ, aT, fe, nw, bRW, Nh, nC, In, de); #c1(IMPDH2) c2(NP_000875) c3(inosine-5′-monophosphate dehydrogenase 2) c4(16737, 16738) c5(16739, 16740, 16741, 16742, 16743, 16744, 16745, 16746, 16747, 16748) c6( ) c7(gV, 1 eR, hG, eH, aj, eF, y, In); #c1(IMPDH2) c2(XP_006713191) c3(inosine-5′-monophosphate dehydrogenase 2 isoform X1) c4( ) c5(287056, 287057) c6( ) c7(gV, T, eR, hG, eH, aj, eF, y, In); #c1(IMPG1) c2(NP_001269297) c3(interphotoreceptor matrix proteoglycan 1 isoform 2 precursor) c4(101055) c5(101056, 101057, 101058, 101059, 101060, 101061, 101062, 101063, 101064, 101065, 101066) c6( ) c7(IR, W, Sr, aw, k, db, bSa, Nh); #c1(IMPG1) c2(NP_001554) c3(interphotoreceptor matrix proteoglycan 1 isoform 1 precursor) c4(118918, 118919) c5(118920, 118921, 118922, 118923, 118924, 118925, 118926) c6( ) c7(IR, W, Sr, aw, k, db, bSa, Nh); #c1(IMPG2) c2(NP_057331) c3(interphotoreceptor matrix proteoglycan 2 precursor) c4(190163, 190164) c5(190165, 190166, 190167, 190168, 190169, 190170) c6( ) c7(aC, W, IR, U, nC, bSa, Nh, bSb); #c1(IMPG2) c2(XP_011511174) c3(interphotoreceptor matrix proteoglycan 2 isoform X2) c4( ) c5(301647, 301648, 301649, 301650, 301651, 301652) c6( ) c7(aC, W, IR, U, nC, bSa, Nh, bSb); #c1(INA) c2(NP_116116) c3(alpha-internexin) c4(225392) c5(225393, 225394, 225395, 225396, 225397, 225398) c6( ) c7(jf, dx, if, d, dA, bb, WY, oV, RJ, U, fd, n, aaE, bSc, PJ, cm, Fc, aHd, eA, aR); #c1(INADL) c2(XP_011538767) c3(inaD-like protein isoform X3) c4(336495, 336496) c5(336497, 336498, 336499, 336500, 336501, 336502, 336503, 336504, 336505, 336506, 336507) c6( ) c7(iM, alx, je, aw, oc, IB, q, ad); #c1(INADL) c2(XP_011538769) c3(inaD-like protein isoform X6) c4( ) c5(336508) c6( ) c7(iM, alx, je, aw, oc, IB, q, ad); #c1(INCENP) c2(NP_001035784) c3(inner centromere protein isoform 1) c4(33057) c5(33058, 33059, 33060, 33061, 33062, 33063) c6( ) c7(Y, aF, aA); #c1(INCENP) c2(NP_064623) c3(inner centromere protein isoform 2) c4(203341, 203342) c5(203343, 203344, 203345, 203346, 203347, 203348, 203349, 203350, 203351, 203352, 203353, 203354, 203355, 203356, 203357, 203358, 203359, 203360) c6( ) c7(Y, aF, aA); #c1(INF2) c2(NP_001026884) c3(inverted formin-2 isoform 2) c4(29835) c5(29836) c6( ) c7(sk, vW, eR, bSe, bSd, vw, dg, dy, Bz, nA, bU, fu, aY); #c1(INF2) c2(NP_071934) c3(inverted formin-2 isoform 1) c4(212394, 212395) c5( ) c6( ) c7(sk, vW, eR, bSe, bSd, vw, dg, dy, Bz, nA, bU, fu, aY); #c1(INF2) c2(NP_116103) c3(inverted formin-2 isoform 3) c4( ) c5(225354, 225355, 225356, 225357, 225358, 225359) c6( ) c7(sk, vW, eR, bSe, bSd, vw, dg, dy, Bz, nA, bU, fu, aY); #c1(INF2) c2(XP_005268061) c3(inverted formin-2 isoform X1) c4( ) c5(281449, 281450, 281451, 281452, 281453, 281454) c6( ) c7(sk, vW, eR, bSe, bSd, vw, dg, dy, Bz, nA, bU, fu, aY); #c1(INF2) c2(XP_005268062) c3(inverted formin-2 isoform X2) c4( ) c5(281455, 281456, 281457, 281458, 281459, 281460) c6( ) c7(sk, vW, eR, bSe, bSd, vw, dg, dy, Bz, nA, bU, fu, aY); #c1(ING1) c2(NP_001254657) c3(inhibitor of growth protein 1 isoform E) c4( ) c5(94804) c6( ) c7(bM, T, aA, fd, ci, q, eA, afb, av, afQ, rC, aT, K, pk, qw, d, aW, Y, ff, eH, r, fe, aq, aF, en, q, as, t, eF, bz, cm, iK, iV, sS, Dy, eM, iT, dB, m, bt, ra, B); #c1(ING1) c2(NP_005528) c3(inhibitnr of growth protein 1 isoform D) c4(157115) c5(157116, 157117, 157118, 157119, 157120, 157121) c6( ) c7(bM, T, aA, fd, ci, q, eA, afb, av, afQ, rC, aT, K, pk, qw, d, aW, Y, ff, eH, r, fe, aq, aF, en, q, as, t, eF, bz, cm, iK, iV, sS, Dy, eM, iT, dB, m, bt, ra, B); #c1(ING1) c2(NP_937860) c3(inhibitor of growth protein 1 isoform C) c4(259335) c5(259336, 259337, 259338, 259339, 259340, 259341) c6( ) c7(bM, T, aA, fd, ci, q, eA, afb, av, afQ, rC, aT, K, pk, qw, d, aW, Y, ff, eH, r, fe, aq, aF, en, g, as, t, eF, bz, cm, iK, iV, sS, Dy, eM, iT, dB, m, bt, ra, B); #c1(ING1) c2(NP_937861) c3(inhibitor of growth protein 1 isoform 8) c4( ) c5(259342, 259343, 259344, 259345, 259346) c6( ) c7(bM, T, aA, fd, ci, q, eA, afb, av, afQ, rC, aT, K, pk, qw, d, aW, Y, ff, eH, r, fe, aq, aF, en, g, as, t, eF, bz, cm, iK, iV, sS, Dy, eM, iT, dB, m, bt, ra, B); #c1(ING1) c2(NP_937862) c3(inhibitor of growth protein 1 isoform A) c4(259347, 259348) c5(259349, 259350, 259351, 259352, 259353, 259354) c6( ) c7(bM, T, aA, fd, ci, q, eA, afb, av, afQ, rC, aT, K, pk, qw, d, aW, Y, ff, eH, r, fe, aq, aF, en, g, as, t, eF, bz, cm, iK, iV, sS, Dy, eM, iT, dB, m, bt, ra, B); #c1(ING2) c2(NP_001278888) c3(inhibitor of growth protein 2 isoform 2) c4(110812) c5(110813, 110814, 110815, 110816, 110817, 110818) c6( ) c7(T, aMv, aA, jh, Ul, q, ip, av, qp, aT, h, dL, K, eL, aW, Y, ff, r, aF, en, q, cm, iK, eM, B); #c1(ING2) c2(NP_001555) c3(inhibitor of growth protein 2 isoform 1) c4(118927) c5(118928, 118929, 118930, 118931, 118932, 118933) c6( ) c7(T, aMv, aA, jh, Ul, q, ip, av, qp, aT, h, dL, K, eL, aW, Y, ff, r, aF, en, g, cm, iK, eM, B); #c1(ING3) c2(NP_061944) c3(inhibitor of growth protein 3 isoform 1) c4(201243, 201244) c5(201245, 201246, 201247, 201248, 201249, 201250) c6( ) c7(Gl, 1 aMv, aA, hy, Ul, q, aT, K, cp, aW, Y, ff, r, aF, en, g, iK, bN, Dy, eM, B); #c1(ING3) c2(NP_938008) c3(inhibitor of growth protein 3 isoform 3) c4( ) c5(259499, 259500, 259501, 259502, 259503, 259504) c6( ) c7(Gl, T, aMv, aA, hy, Ul, q, aT, K, cp, aW, Y, ff, r, aF, en, g, iK, bN, Dy, eM, B); #c1(ING4) c2(NP_001121054) c3(inhibitor of growth protein 4 isoform 9) c4(45085) c5(45086, 45087, 45088, 45089, 45090, 45091) c6( ) c7(T, fG, fd, bB, hy, q, ad, eA, iu, aE, aT, K, ae, d, Jl, aW, Y, aF, g, cl, as, t, iK, bz, LB, eM, dB, bE, AU, m, B); #c1(ING4) c2(NP_001121055) c3(inhibitor of growth protein 4 isoform 3) c4(45092) c5(45093, 45094, 45095, 45096, 45097, 45098) c6( ) c7(T, fG, fd, bB, hy, q, ad, eA, iu, aE, aT, K, ae, d, Jl, aW, Y, aF, q, cl, as, t, iK, bz, LB, eM, dB, bE, AU, m, B); #c1(ING4) c2(NP_001121056) c3(inhibitor of growth protein 4 isoform 4) c4(45099) c5(45100, 45101, 45102, 45103, 45104, 45105) c6( ) c7(T, fG, fd, bB, hy, q, ad, eA, iu, aE, aT, K, ae, d, Jl, aW, Y, aF, g, cl, as, t, iK, bz, LB, eM, dB, bE, AU, m, B); #c1(ING4) c2(NP_001121057) c3(inhibitor of growth protein 4 isoform 5) c4(45106) c5(45107, 45108, 45109, 45110, 4511145112) c6( ) c7(T, fG, fd, bB, hy, q, ad, eA, iu, aE, aT, K, ae, d, Jl, aW, Y, aF, g, cl, as, t, iK, bz, LB, eM, dB, bE, AU, m, B); #c1(ING4) c2(NP_001121058) c3(inhibitor of growth protein 4 isoform 6) c4(45113) c5(45114, 45115, 45116, 45117, 45118, 45119) c6( ) c7(T, fG, fd, bB, hy, q, ad, eA, iu, aE, aT, K, ae, d, Jl, aW, Y, aF, q, cl, as, t, iK, bz, LB, eM, dB, bE, AU, m, B); #c1(ING4) c2(NP_057246) c3(inhibitor of growth protein 4 isoform 1) c4(189708) c5(189709, 189710, 189711, 189712, 189713, 189714) c6( ) c7(T, fG, fd, bB, hy, q, ad, eA, iu, aE, aT, K, ae, d, Jl, aW, Y, aF, q, cl, as, t, iK, bz, LB, eM, dB, bE, AU, m, B); #c1(ING5) c2(NP_115705) c3(inhibitor of growth protein 5) c4(223654) c5(223655, 223656, 223657, 223658, 223659, 223660, 223661) c6( ) c7(bt, aE, ci, aF, aZF); #c1(ING5) c2(XP_011510291) c3(inhibitor of growth protein 5 isoform X3) c4(300871) c5(300872, 300873, 300874, 300875, 300876) c6( ) c7(bt, aE, ci, aF, aZF); #c1(INHA) c2(NP_002182) c3(inhibin alpha chain preproprotein) c4(126361) c5(126362, 126363, 126364, 126365, 126366, 126367) c6( ) c7(bM, T, bcb, apr, aA, cz, eh, Sv, ci, qN, fr, iJ, ad, UE, dP, il, BJ, bDJ, aT, iv, h, ae, kl, bbs, aF, Hu, q, bu, cl, zZ, f, t, uC, sn, AM, Lb, m, MG, B); #c1(INHBA) c2(NP_002183) c3(inhibin beta A chain precursor) c4(126368) c5(126369, 126370, 126371, 126372, 126373, 126374, 126375, 126376, 126377, 126378) c6( ) c7(ka, os, T, kh, pf, aw, aA, eh, oZ, v, fr, ci, Iu, cd, ad, dP, iu, hw, pN, aT, Dz, kl, ff, r, aF, en, bu, q, t, uC, op, c, ki, hL, Lb, m, UF, y, B); #c1(INHBB) c2(NP_002184) c3(inhibin beta B chain preproprotein) c4(126379) c5(126380, 126381, 126382, 126383, 126384, 126385, 126386) c6( ) c7(UH, kl, s, arA, il, iX, r, aT, cz, v, Lb, m, ci, bu, Ul, cd, ad, UE); #c1(INHBC) c2(NP_005529) c3(inhibin beta C chain preproprotein) c4(157122) c5(157123, 157124, 157125, 157126, 157127, 157128) c6( ) c7(W, eM, s, Lb, m, bu); #c1(INHBE) c2(NP_113667) c3(inhibin beta E chain precursor) c4(222026) c5(222027, 222028, 222029, 222030, 222031, 222032) c6( ) c7(lD, T, kh, aZ, aw, bB, ci, BY, dP, hd, Cj, aE, kl, BJ, kf, bl, K, cp, ly, yo, s, Y, fQ, kp, Hu, bu, t, lx, bP, nB, w, Lb, m, pw, du); #c1(IN080) c2(NP_060023) c3(DNA helicase IN080) c4(193732, 193733) c5(193734, 193735, 193736, 193737, 193738, 193739, 193740, 193741, 193742, 193743) c6( ) c7(Kw); #c1(IN080) c2(XP_011519988) c3(DNA helicase IN080 isoform X2) c4( ) c5(314849, 314850, 314851, 314852, 314853, 314854) c6( ) c7(Kw); #c1(IN0808) c2(NP_112578) c3(IN080 complex subunit B) c4(221464, 221465) c5(221466, 221467, 221468, 221469, 221470, 221471, 221472, 221473, 221474, 221475, 221476, 221477) c6( ) c7(ae, ad); #c1(IN080D) c2(NP_060229) c3(IN080 complex subunit D) c4(194869, 194870, 194871) c5(194872, 194873, 194874, 194875, 194876, 194877, 194878, 194879, 194880, 194881, 194882, 194883, 194884, 194885, 194886, 194887, 194888, 194889) c6( ) c7(EQ); #c1(INPP1) c2(NP_001122400) c3(inositol polyphosphate l-phosphatase) c4(46686, 46687, 46688, 46689, 46690, 46691, 46692, 46693, 46694) c5(46695, 46696, 46697, 46698, 46699, 46700, 46701, 46702, 46703, 46704, 46705, 46706, 46707, 46708, 46709, 46710, 46711, 46712, 46713, 46714, 46715, 46716, 46717, 46718, 46719, 46720, 46721, 46722, 46723, 46724, 46725, 46726, 46727, 46728, 46729, 46730, 46731, 46732, 46733, 46734, 46735, 46736, 46737, 46738, 46739, 46740, 46741, 46742, 46743, 46744, 46745, 46746, 46747, 46748, 46749, 46750, 46751, 46752, 46753, 46754, 46755, 46756) c6( ) c7(bL, T, bP, Ei, r, bK, mY, q, bN); #c1(INPP4A) c2(NP_001127696) c3(type I inositol 3,4-bisphosphate 4-phosphatase isoform d) c4(49238) c5(49239, 49240, 49241, 49242, 49243, 49244, 49245, 49246, 49247, 49248, 49249, 49250) c6( ) c7(z, bM, nA); #c1(INPP4A) c2(NP_001127697) c3(type I inositol 3,4-bisphosphate 4-phosphatase isoform c) c4(49251) c5(49252, 49253, 49254, 49255, 49256, 49257) c6( ) c7(z, bM, nA); #c1(INPP4A) c2(NP_001557) c3(type I inositol 3,4-bisphosphate 4-phosphatase isoform b) c4(118941) c5(118942, 118943, 118944, 118945, 118946, 118947) c6( ) c7(z, bM, nA); #c1(INPP4A) c2(NP_004018) c3(type I inositol 3,4-bisphosphate 4-phosphatase isoform a) c4(142880, 142881) c5(142882, 142883, 142884, 142885, 142886, 142887, 142888, 142889, 142890, 142891, 142892, 142893) c6( ) c7(z, bM, nA); #c1(INPP4B) c2(NP_001095139) c3(type II inositol 3,4-bisphosphate 4-phosphatase) c4(40815) c5(40816, 40817, 40818, 40819, 40820, 40821, 40822, 40823, 40824, 40825, 40826, 40827, 40828, 40829, 40830, 40831, 40832, 40833, 40834, 40835, 40836, 40837, 40838, 40839, 40840, 40841, 40842, 40843, 40844, 40845, 40846) c6( ) c7(ck, T, kP, aW, Y, aT, n, Gn, m, t, rA, ae, ad, bA); #c1(INPP4B) c2(XP_005263380) c3(type II inositol 3,4-bisphosphate 4-phosphatase isoform X7) c4(278462) c5(278463, 278464, 278465, 278466, 278467) c6( ) c7(ck, T, kP, aW, Y, aT, n, Gn, m, t, rA, ae, ad, bA); #c1(INPP4B) c2(XP_006714467) c3(type II inositol 3,4-bisphosphate 4-phosphatase isoform X11) c4( ) c5(287845, 287846, 287847, 287848, 287849, 287850, 287851, 287852, 287853, 287854, 287855, 287856, 287857, 287858, 287859, 287860, 287861, 287862, 287863) c6( ) c7(ck, T, kP, aW, Y, aT, n, Gn, m, t, rA, ae, ad, bA); #c1(INPP4B) c2(XP_011530693) c3(type II inositol 3,4-bisphosphate 4-phosphatase isoform X2) c4( ) c5(326756, 326757, 326758, 326759, 326760) c6( ) c7(ck, T, kP, aW, Y, aT, n, Gn, m, t, rA, ae, ad, bA); #c1(INPP4B) c2(XP_011530694) c3(type II inositol 3,4-bisphosphate 4-phosphatase isoform X3) c4(326761, 326762, 326763, 326764) c5(326765, 326766, 326767, 326768, 326769, 326770) c6( ) c7(ck, T, kP, aW, Y, aT, n, Gn, m, t, rA, ae, ad, bA); #c1(INPP4B) c2(XP_011530695) c3(type II inositol 3,4-bisphosphate 4-phosphatase isoform X5) c4(326771, 326772) c5( ) c6( ) c7(ck, T, kP, aW, Y, aT, n, Gn, m, t, rA, ae, ad, bA); #c1(INPP4B) c2(XP_011530698) c3(type II inositol 3,4-bisphosphate 4-phosphatase isoform X10) c4(326773) c5( ) c6( ) c7(ck, T, kP, aW, Y, aT, n, Gn, m, t, rA, ae, ad, bA); #c1(INPP5A) c2(NP_005530) c3(type I inositol 1,4,5-trisphosphate 5-phosphatase) c4(157129, 157130, 157131157132, 157133, 157134, 157135, 157136, 157137, 157138) c5(157139, 157140, 157141, 157142, 157143, 157144, 157145, 157146, 157147, 157148, 157149, 157150, 157151157152, 157153, 157154, 157155, 157156, 157157, 157158, 157159, 157160, 157161157162, 157163, 157164, 157165, 157166, 157167, 157168, 157169, 157170, 157171, 157172, 157173, 157174, 157175, 157176, 157177, 157178, 157179, 157180) c6( ) c7(adg, qy, KW, ks); #c1(INPP5A) c2(XP_011538070) c3(type I inositol 1,4,5-trisphosphate 5-phosphatase isoform X1) c4( ) c5(335616, 335617, 335618, 335619, 335620, 335621, 335622, 335623, 335624, 335625, 335626, 335627, 335628, 335629, 335630, 335631, 335632, 335633) c6( ) c7(adg, qy, KW, ks); #c1(INPP5B) c2(NP_001284363) c3(type II inositol 1,4,5-trisphosphate 5-phosphatase isoform 2 precursor) c4(111805, 111806, 111807, 111808) c5(111809, 111810, 111811, 111812, 111813, 111814, 111815, 111816, 111817, 111818, 111819, 111820, 111821, 111822, 111823, 111824, 111825, 111828, 111827, 111828, 111829, 111830) c6( ) c7(abV, KW); #c1(INPP5B) c2(XP_011539690) c3(type II inositol 1,4,5-trisphosphate 5-phosphatase isoform X2) c4( ) c5(337924, 337925, 337926) c6( ) c7(abV, KW); #c1(INPP5B) c2(XP_011539693) c3(type II inositol 1,4,5-trisphosphate 5-phosphatase isoform X6) c4( ) c5(337927, 337928, 337929, 337930, 337931, 337932) c6( ) c7(abV, KW); #c1(INPP5B) c2(XP_011539695) c3(type II inositol 1,4,5-trisphosphate 5-phosphatase isoform X7) c4( ) c5(337933, 337934, 337935, 337936, 337937, 337938) c6( ) c7(abV, KW); #c1(INPP5D) c2(NP_001017915) c3(phosphatidylinositol 3,4,5-trisphosphate 5-phosphatase 1 isoform a) c4(26613, 26614, 26615, 26616, 26617) c5(26618, 26619, 26620, 26621, 26622, 26623, 26624, 26625, 26626, 26627, 26628, 26629) c6( ) c7(ck, pq, T, dD, F, fM, iT, iU, ea, jx, fd, bw, DO, Io, dz, v, eq, hi, hF, bt); #c1(INPP5D) c2(NP_005532) c3(phosphatidylinositol 3,4,5-trisphosphate 5-phosphatase 1 isoform b) c4(157181) c5(157182, 157183, 157184, 157185, 157186, 157187, 157188, 157189, 157190, 157191, 157192, 157193, 157194, 157195, 157196, 157197, 157198, 157199, 157200, 157201, 157202, 157203, 157204, 157205, 157206, 157207, 157208, 157209, 157210, 157211, 157212) c6( ) c7(ck, pq, T, dD, F, fM, iT, iU, ea, jx, fd, bw, DO, Io, dz, v, eq, hi, hF, bt); #c1(INPP5D) c2(XP_011547153) c3(phosphatidylinositol 3,4,5-trisphosphate 5-phosphatase 1 isoform X1) c4(345876) c5(345877, 345878, 345879, 345880, 345881, 345882) c6( ) c7(ck, pq, T, dD, F, fM, iT, iU, ea, jx, fd, bw, DO, Io, dz, v, eq, bi, hF, bt); #c1(INPP5E) c2(NP_063945) c3(72 kDa inositol polyphosphate 5-phosphatase) c4(202387) c5(202388, 202389, 202390, 202391, 202392, 202393) c6( ) c7(aPt, Pf, Y, KW, aSW, v, bSf, nA, Tp); #c1(INPP5F) c2(NP_001230123) c3(phosphatidylinositide phosphatase SAC2 isoform 2) c4(85952) c5(85953, 85954, 85955, 85956, 85957, 85958) c6( ) c7(oe); #c1(INPP5F) c2(NP_001230124) c3(phosphatidylinositide phosphatase SAC2 isoform 3) c4(85959) c5(85960, 85961, 85962, 85963, 85964, 85965) c6( ) c7(oe); #c1(INPP5F) c2(NP_055752) c3(phosphatidylinositide phosphatase SAC2 isoform 1) c4(183284, 183285) c5(183286, 183287, 183288, 183289, 183290, 183291) c6( ) c7(oe); #c1(INPP5F) c2(XP_006717783) c3(phosphatidylinositide phosphatase SAC2 isoform X4) c4( ) c5(291356, 291357, 291358, 291359, 291360, 291361) c6( ) c7(oe); #c1(INPP5K) c2(NP_057616) c3(inositol polyphosphate 5-phosphatase K isoform 1) c4(191790, 191791, 191792, 191793) c5(191794, 191795, 191796, 191797, 191798, 191799, 191800, 191801, 191802, 191803) c6( ) c7(Dy, Y, eW, Ex, kk); #c1(INPP5K) c2(XP_005256740) c3(inositol polyphosphate 5-phosphatase K isoform X1) c4( ) c5(274306, 274307, 274308, 274309, 274310, 274311, 274312, 274313, 274314, 274315, 274316, 274317, 274318, 274319, 274320, 274321, 274322) c6( ) c7(Dy, Y, eW, Ex, kk); #c1(INPP5K) c2(XP_005256743) c3(inositol polyphosphate 5-phosphatase K isoform X2) c4( ) c5(274323, 274324, 274325, 274326, 274327) c6( ) c7(Dy, Y, eW, Ex, kk); #c1(INPP5K) c2(XP_011522238) c3(inositol polyphosphate 5-phosphatase K isoform X3) c4(316870) c5(316871, 316872, 316873, 316874, 316875, 316876) c6( ) c7(Dy, Y, eW, Ex, kk); #c1(INPPL1) c2(NP_001558) c3(phosphatidylinositol 3,4,5-trisphosphate 5-phosphatase 2) c4(118948, 118949, 118950) c5(118951, 118952, 118953, 118954, 118955, 118956, 118957, 118958, 118959, 118960, 118961, 118962, 118963, 118964, 118965) c6( ) c7(bL, T, cz, bB, fd, aj, v, ci, J, bsH, aT, A, d, B, iU, aW, qa, bSg, bE, bo, ei, X); #c1(INPPL1) c2(XP_005274035) c3(phosphatidylinositol 3,4,5-trisphosphate 5-phosphatase 2 isoform X2) c4(284905) c5(284906, 284907, 284908, 284909, 284910) c6( ) c7(bL, T, cz, bB, fd, aj, v, ci, J, bsH, aT, A, d, B, iU, aW, qa, bSg, bE, bo, ei, X); #c1(INPPL1) c2(XP_011543302) c3(phosphatidylinositol 3,4,5-trisphosphate 5-phosphatase 2 isoform X3) c4(342087, 342088) c5(342089, 342090, 342091, 342092, 342093, 342094, 342095) c6( ) c7(bL, 1 cz, bB, fd, aj, v, ci, J, bsH, aT, A, d, B, iU, aW, qa, bSg, bE, bo, ei, X); #c1(INS) c2(NP_001278826) c3(insulin preproprotein) c4(110156, 110157, 110213, 110214, 110215, 110216, 110217, 110218, 110219, 110220, 110221, 110222, 110223, 110224, 110225, 110226, 110227, 110228, 110229, 110230, 110231, 110232, 110233, 110234, 110235, 110236, 110237, 110238, 110239, 110240, 110241, 110242, 110243, 110244, 110245, 110246, 110247, 110248, 110249, 110250, 110251, 110252, 110253, 110254, 110255, 110256, 110257, 110258, 110259, 110260, 110261, 110262, 110263, 110264, 110265, 110266, 110267, 110268, 110269, 110270, 110271, 110272, 110273, 110274, 110275, 110276, 110277, 110278, 110279, 110280, 110281, 110282, 110283, 110284, 110285, 110286, 110287, 110288, 110289, 110290, 110291, 110292, 110293, 110294, 110295, 110296, 110297, 110298, 110299, 110300, 110301, 110302, 110303, 110304, 110305, 110306, 110307, 110308, 110309, 110310, 110311, 110312, 110313, 110314, 110315, 110316, 110317, 110318, 110319, 110320, 110321, 110322, 110323, 110324, 110325, 110326, 110327, 110328, 110329, 110330, 110331, 110332, 110333, 110334, 110335, 110336, 110337, 110338, 110339, 110340, 110341, 110342, 110343, 110344, 110345, 110346, 110347, 110348, 110349, 110350, 110351, 110352, 110353, 110354, 110355, 110356, 110357, 110358, 110359, 110360, 110361, 110362, 110363, 110364, 110365, 110366, 110367, 110368, 110369, 110370, 110371, 110372, 110373, 110374, 110375, 110376, 110377, 110378, 110379, 110380, 110381, 110382, 110383, 110384, 110385, 110386, 110387, 110388, 110389, 110390, 110391, 110392, 110393, 110394, 110395, 110396, 110397, 110398, 110399, 110400, 110401, 110402, 110403, 110404, 110405, 110406, 110407, 110408, 110409, 110410, 110411, 110412, 110413, 110414, 110415, 110416, 110417, 110418, 110419, 110420, 110421, 110422, 110423, 110424, 110425, 110426, 110427, 110428, 110429, 110430, 110431, 110432, 110433, 110434, 110435, 110436, 110437, 110438, 110439, 110440, 110441, 110442, 110443, 110444, 110445, 110446, 110447, 110448, 110449, 110450, 110451, 110452, 110453, 110454, 110455, 110456, 110457, 110458, 110459, 110460, 110461, 110462, 110463, 110464, 110465, 110466, 110467, 110468, 110469, 110470, 110471, 110472, 110473, 110474, 110475, 110476, 110477, 110478, 110479, 110480, 110481, 110482, 110483, 110484, 110485, 110486, 110487, 110488, 110489, 110490, 110491, 110492, 110493, 110494, 110495, 110496, 110497, 110498, 110499, 110500, 110501, 110502, 110503, 110504, 110505, 110506, 110507, 110508, 110509, 110510, 110511, 110512, 110513, 110514, 110515, 110516, 110517, 110518, 110519, 110520, 110521, 110522, 110523, 110524, 110525, 110526, 110527, 110528, 110529, 110530, 110531, 110532, 110533, 110534, 110535, 110536, 110537, 110538, 110539, 110540, 110541, 110542, 110543, 110544, 110545, 110546, 110547, 110548, 110549, 110550, 110551, 110552, 110553, 110554, 110555, 110556, 110557, 110558, 110559, 110560, 110561, 110562, 110563, 110564, 110565, 110566, 110567, 110568, 110569, 110570, 110571, 110572, 110573, 110574, 110575, 110576, 110577, 110578, 110579, 110580, 110581, 110582, 110583, 110584, 110585, 110586, 110587, 110588, 110589, 110590, 110591, 110592, 110593, 110594, 110595, 110596, 110597, 110598, 110599, 110600, 110601, 110602, 110603, 110604, 110605, 110606, 110607, 110608, 110609, 110610, 110611, 110612, 110613, 110614, 110615, 110616, 110617, 110618, 110619, 110620, 110621, 110622, 110623, 110624, 110625, 110626, 110627, 110628, 110629, 110630, 110631, 110632, 110633, 110634, 110635, 110636, 110637, 110638, 110639, 110640, 110641, 110642, 110643, 110644, 110645, 110646, 110647, 110648, 110649, 110650, 110651, 110652, 110653, 110654, 110655) c6(110656, 110657, 110658, 110659, 110660, 110661, 110662, 110663, 110664, 110665, 110666, 110667, 110668, 110669, 110670, 110671, 110672, 110673, 110674, 110675, 110676) c7(bSR, T, os, aoq, ea, abM, bO, fd, ci, aY, GK, bv, aex, aE, bJj, bSC, dV, BZ, iv, hu, li, ly, ye, Ls, Fe, nY, uY, YG, dg, bSE, GR, iA, nB, dc, wE, cj, azg, k, de, ZP, FG, ht, cQ, akA, aj, ww, ml, cd, hr, td, aow, aZv, rC, adX, KN, ey, hi, on, yi, Ln, MD, ahJ, pm, zZ, QK, iO, RB, ky, dB, Fi, eD, JQ, bSP, TF, E, mT, bSO, cz, aA, GP, avO, bOI, Tq, nS, q, Wu, Ql, yu, cy, rO, bSz, rz, dl, bA, wr, bSK, aeS, Io, uU, cl, pb, tR, pa, rR, iQ, ac, pO, tW, awN, mG, aDG, hr, cG, bSD, bt, rA, ars, ao, aag, iW, bAg, jN, jh, bgj, oZ, dG, bST, fu, bSj, ad, hX, abZ, LL, vJ, Dq, QJ, rX, bj, IQ, bSo, xX, lx, cH, PE, cW, Mz, dq, iV, bDu, bSJ, bz, mi, ag, IZ, IC, iu, lD, Zz, if, e, bB, cL, bSh, aTS, brq, ip, x, bSi, ws, Pq, Gb, bSN, be, azu, Hd, aCg, Jl, fc, hi, as, eF, cm, bw, aiv, mZ, aac, bSA, Kv, vA, vy, ym, Vj, dD, gU, Hm, yG, bSQ, n, nA, aje, aCi, RD, md, jz, aLs, ec, Dn, Bj, gd, bzd, aAG, mV, aeJ, mO, avP, A, bAF, Rj, lb, atf, yq, aFj, dC, hL, tl, GN, B, dA, mr, aOH, ti, aNG, v, GS, V, qH, zT, aPW, DK, wN, rS, bza, aql, ML rD, bSH, aKG, ae, jf, hM, ev, asy, aGp, bSI, bu, t, nC, ck, bSM, bAn, cl, kP, wO, IN, au, bSv, gX, Gg, zu, yv, vi, nZ, hl, pY, ml, vG, wV, eq, bSk, aoz, hd, ds, hD, vc, Dj, sj, d, aVd, Z, adj, dr, gk, akQ, pP, II, atg, gZ, Km, y, aXu, aC, bzx, al, gf, bSt, xE, u, pX, M, K, bLj, dF, eL, ago, bbC, IW, aNb, adE, aB, q, uC, iP, wT, bAh, ou, avS, AM, U, Hb, m, Uw, abX, IV, zX, bSp, OI, NT, aw, fg, JW, bKr, ft, mh, nV, It, bSG, uV, ZN, dx, RE, bSu, aev, bSS, jT, aHr, JP, ar, kT, GG, W, ml, bo, yP, mg, ZG, it, ZV, wj, fG, oe, jx, gQ, wo, mS, hz, j, sl, J, o, er, jF, MR, bBN, qG, bq, hK, Fg, kl, Y, IW, LO, r, bSy, wA, Qi, bmS, c, kB, hc, aNJ, dh, bSs, JL, cS, bSr, dy, UF, gT, bSL, gx, kh, aZ, LX, bs, bS, pl, EA, hF, dP, fU, sN, aet, UG, oj, vB, tt, bKm, aOh, vl, uX, IR, xs, eH, cr, bSn, hp, iR, Bu, agn, qa, bJt, dR, pu, Lj, bib, cP, bC, ei, sT, hE, xg, bSw, st, Fj, pf, eh, amj, aoM, aR, dY, ata, il, iX, qM, dQ, H, bhm, pk, hm, tw, aW, aeC, hJ, avx, eM, wB, nw, aYS, R, aFc, ko, bKx, fr, et, qN, vY, rc, eW, biN, bSq, BI, cc, Mm, bAi, PD, h, jy, dL, aKE, hB, mY, vx, Dg, OV, asp, ag, kp, Hu, kk, mb, op, lx, mX, bJ, arF, JR, adZ, Uv, hR, bSB, bL, eR, sM, cR, tc, asA, C, so, Ns, Zp, mj, GL, uT, qp, aT, bSx, bK, an, af, ak, bSL s, iU, oV, bAv, bSm, OS, hf, DC, BU, sS, nM, aGo, fP, mf, aoJ, Kd, bSF, ha, vr, jE, tK, qC, nH, I, F, ot, xl, oz, mW, sO, ts, aNR, fb, iL, yF, qt, eZ, yy, gl, aF, eK, bOM, LB, es, mO, bE, z, arC, awK, aS, pK); #c1(INSC) c2(NP_001027024) c3(protein inscuteable homolog isoform a) c4(30105) c5(30106, 30107, 30108, 30109, 30110, 30111, 30112, 30113, 30114, 30115) c6( ) c7(ac, ad); #c1(INSC) c2(NP_001265242) c3(protein inscuteable homolog isoform b) c4(98039) c5(98040, 98041, 98042, 98043, 98044, 98045, 98046, 98047) c6( ) c7(ac, ad); #c1(INSC) c2(NP_001265243) c3(protein inscuteable homolog isoform c) c4(98048) c5(98049, 98050, 98051, 98052, 98053, 98054) c6( ) c7(ac, ad); #c1(INSC) c2(NP_001265245) c3(protein inscuteable homolog isoform e) c4(98055) c5(98056, 98057, 98058, 98059, 98060, 98061, 98062, 98063) c6( ) c7(ac, ad); #c1(INSIG1) c2(NP_005533) c3(insulin-induced gene 1 protein isoform 1) c4(157213) c5(157214, 157215, 157216, 157217, 157218, 157219) c6( ) c7(bL, Zo, T, dD, ea, aw, aA, v, j, ci, eq, zP, ad, K, dQ, af, zQ, fc, aq, aF, gZ, cP, ei, B); #c1(INSIG1) c2(NP_938150) c3(insulin-induced gene 1 protein isoform 2) c4(259640) c5(259641, 259642, 259643, 259644, 259645, 259646) c6( ) c7(bL, Zo, T, dD, ea, aw, aA, v, j, ci, eq, zP, ad, K, dQ, af, zQ, fc, aq, aF, gZ, cP, ei, B); #c1(INSIG1) c2(NP_938151) c3(insulin-induced gene 1 protein isoform 3) c4(259647) c5(259648, 259649, 259650, 259651, 259652, 259653, 259654, 259655, 259656, 259657, 259658, 259659) c6( ) c7(bL, Zo, T, dD, ea, aw, aA, v, j, ci, eq, zP, ad, K, dQ, af, zQ, fc, aq, aF, gZ, cP, ei, B); #c1(INSIG1) c2(XP_005249600) c3(insulin-induced gene 1 protein isoform X1) c4(269712) c5( ) c6( ) c7(bL, Zo, T, dD, ea, aw, aA, v, j, ci, eq, zP, ad, K, dQ, af, zQ, fc, aq, aF, gZ, cP, ei, B); #c1(INSIG2) c2(XP_011509594) c3(insulin-induced gene 2 protein isoform X1) c4(300168) c5(300169, 300170, 300171, 300172, 300173, 300174) c6( ) c7(bM, dD, aw, bB, aj, v, j, eq, V, cd, J, aE, arA, aT, qM, cH, aW, qt, mo, LV, bJ, bE, gZ, ei, X); #c1(INS-IGF2) c2(NP_001035835) c3(insulin, isoform 2 precursor) c4(33204) c5(33205, 33206, 33207, 33208, 33209, 33210, 33211, 33212, 33213) c6(33214, 33215) c7(bSR, T, os, aoq, ea, abM, fd, ci, aY, GK, bv, aex, aE, bJj, dV, iv, BZ, hu, li, ly, yo, Ls, Fe, nY, uY, YG, dg, bSE, GR, iA, nB, dc, wE, cj, azg, k, ZP, EG, ht, cQ, akA, aj, ml, cd, hr, aZv, rC, adX, KN, ey, bl, on, yi, Ln, MD, ahJ, pm, zZ, QK, iO, ky, dB, Fi, eD, JQ, bSP, TF, mT, bSO, cz, aA, avO, bOI, Tq, nS, q, Wu, Ql, yu, cy, rO, bSz, bA, wr, bSK, Io, uU, cl, pb, tR, pa, rR, iQ, ac, pO, tW, awN, mG, aDG, hr, cG, bSD, bt, rA, ars, ao, aag, iW, bAg, jN, jh, bgj, oZ, dG, bST, fu, bSj, ad, hX, LL, vJ, Dq, QJ, rX, bj, IQ, bSo, lx, cH, PE, cW, Mz, dg, iV, bDu, bSJ, bz, mi, ag, IZ, IC, iu, lD, Zz, if, e, bB, bSh, aTS, brq, ip, x, ws, Pq, Gb, be, azu, Hd, aCg, Jl, fc, hi, as, eF, cm, bw, aiv, mZ, aac, Kv, vA, vy, ym, Vj, dD, gU, Hm, yG, n, nA, aje, RD, jz, aLs, ec, Do, Bj, gd, bzd, aAG, mV, aeJ, mU, avP, A, bAF, Rj, lb, atf, yq, aFj, dC, hL, tl, GN, B, dA, mr, aOH, ti, aNG, v, V, GS, qH, zT, DK, rS, bza, aql, Ml, rD, bSH, aKG, ae, jf, ev, asy, aGp, bu, t, bSM, cl, kP, wO, IN, au, bSv, gX, Gg, zu, yv, vi, nZ, hl, pY, mL vG, eq, aoz, hd, ds, hD, vc, Dj, yr, d, aVd, Z, adj, dr, gk, akQ, pP, II, atg, gZ, Km, y, aXu, aC, bzx, al, gf, bSt, xE, u, pX, M, K, bLj, dF, eL, ago, bbC, IW, aNb, adE, aB, g, iP, wT, bAh, ou, avS, AM, U, Hb, m, Uw, abX, IV, zX, bSp, aw, NT, fg, JW, bKr, ft, mh, nV, bSG, uV, ZN, dx, RE, bSu, aev, bSS, jT, aHr, JP, ar, kT, GG, W, anZ, bo, yP, mg, ZG, it, ZV, wj, fG, jx, gQ, wo, mS, hz, j, sl, J, er, jF, MR, bBN, qG, Fg, kl, Y, IW, LO, r, bSy, wA, Qi, bmS, c, kB, hc, aNJ, dh, JL, cS, bSr, dy, UF, gT, gx, kh, aZ, bs, bS, pl, EA, hF, vN, dP, fU, sN, aet, UG, oj, vB, tt, bKm, aOh, vl, uX, IR, xs, eH, cr, bSn, hp, iR, Bu, agn, qa, bJt, dR, pu, bib, cP, bC, ei, sT, hE, xg, bSw, st, Fj, pf, eh, amj, aoM, aR, ata, il, iX, qM, dQ, H, bhm, pk, hm, tw, aW, aeC, hJ, avx, eM, wB, aYS, R, aFc, ko, bKx, fr, et, qN, vY, rc, biN, bSq, cc, Mm, bAi, PD, h, jy, dL, aKE, mY, vx, Dg, asp, aq, kp, Hu, kk, mb, op, lx, mX, arF, JR, adZ, Uv, hR, bSB, bL, eR, sM, cR, tc, asA, C, so, Ns, Zp, mj, GL, uT, qp, aT, bSx, bK, af, ak, bSI, s, iU, oV, bAv, bSm, hf, OC, BU, sS, nM, aGo, fP, mf, aoJ, Kd, bSF, ha, vr, jE, tK, qC, nH, I, F, xl, oz, mW, sO, ts, fb, iL, yF, qt, yy, gl, aF, eK, LB, es, mO, bE, arC, awK, aS, PK); #c1(INSL3) c2(NP_001252516) c3(insulin-like 3 isoform 1 precursor) c4(94051) c5(94052, 94053, 94054, 94055, 94056, 94057) c6( ) c7(gU, aA, bLf, hz, aj, eh, Ul, AO, J, UE, ft, hd, bSU, nv, uV, ae, bA, UF, yi, kl, s, ND, aeC, Lf, aF, bu, t, nB, Pl, Uw); #c1(INSL3) c2(NP_005534) c3(insulin-like 3 isoform 2 precursor) c4(157220) c5(157221, 157222, 157223, 157224, 157225, 157226) c6( ) c7(gU, aA, bLf, hz, aj, eh, UI, AO, J, UE, ft, hd, bSU, nv, uV, ae, bA, UF, yi, kl, s, ND, aeC, Lf, aF, bu, t, nB, Pl, Uw); #c1(INSL4) c2(NP_002186) c3(early placenta insulin-like peptide precursor) c4(126387) c5(126388, 126389, 126390, 126391, 126392, 126393) c6( ) c7(f, nJ, CN, iV, aT); #c1(INSL6) c2(NP_009110) c3(insulin-like peptide INSL6 precursor) c4(170743) c5(170744, 170745, 170746, 170747, 170748, 170749) c6( ) c7(eG, iV); #c1(INSM1) c2(NP_002187) c3(insulinoma-associated protein 1) c4(126394) c5(126395, 126396, 126397, 126398, 126399, 126400, 126401) c6( ) c7(jf, T, ft, d, bP, pX, aq, cm, eW); #c1(INSM2) c2(NP_115983) c3(insulinoma-associated protein 2) c4(225103) c5(225104, 225105, 225106, 225107, 225108, 225109, 225110, 225111) c6( ) c7(aq, aj, A, J, bo); #c1(INSR) c2(NP_000199) c3(insulin receptor isoform Long preproprotein) c4(4450) c5(4451, 4452, 4453, 4454, 4455, 4456) c6( ) c7(T, ea, ur, ci, Ef, bv, aE, dv, bJj, K, qM, wt, dQ, pk, aa, azu, Hd, aW, fc, hl, uY, q, uC, GR, Qt, ou, eM, go, U, cj, m, R, aCo, dD, aw, aj, aje, JW, El, bSV, KN, jy, dL, uV, A, asp, atf, aq, JR, bJ, iO, kT, dB, bo, hL, mg, at, bSB, bSX, IB, B, bL, eR, oe, cz, v, j, avO, bSY, q, J, gH, QI, eA, aPW, mj, uT, bSW, aT, bq, an, ae, af, ak, kl, s, r, en, cl, t, pa, JL, mf, np, dy, gT, bt, rA, hi, aZ, jh, aCm, dG, oH, uu, eq, ad, dP, QJ, oj, nJ, ff, xs, bSn, dq, bz, qa, dR, ei); #c1(INSR) c2(NP_001073285) c3(insulin receptor isoform Short preproprotein) c4(35741, 35742) c5(35743, 35744, 35745, 35746, 35747, 35748, 35749) c6( ) c7(T, ea, ur, ci, Ef, bv, aE, dv, bJj, K, qM, wt, dQ, pk, aa, azu, Hd, aW, fc, hi, uY, q, uC, GR, Qt, ou, eM, go, U, cj, m, R, aCo, dD, aw, aj, aje, JW, El, bSV, KN, jy, dL, uV, A, asp, atf, aq, JR, bJ, iO, kT, dB, bo, hL, mg, at, bSB, bSX, IB, B, bL, eR, oe, cz, v, j, avO, bSY, q, J, qH, QI, eA, aPW, mj, uT, bSW, aT, bq, an, ae, af, ak, kl, s, r, en, cl, t, pa, JL, mf, np, dy, gT, bt, rA, hi, aZ, jh, aCm, dG, oH, uu, eq, ad, dP, QJ, oj, nJ, ff, xs, bSn, dq, bz, qa, dR, ei); #c1(INSR) c2(XP_011526290) c3(insulin receptor isoform X1) c4( ) c5(320554, 320555, 320556, 320557, 320558) c6( ) c7(T, ea, ur, ci, Ef, bv, aE, dv, bJj, K, qM, wt, dQ, pk, aa, azu, Hd, aW, fc, hi, uY, q, uC, GR, Qt, ou, eM, go, U, cj, m, R, aCo, dD, aw, aj, aje, JW, El, bSV, KN, jy, dL, uV, A, asp, atf, aq, JR, bJ, iO, kT, dB, bo, hL, mg, at, bSB, bSX, IB, B, bL, eR, oe, cz, v, j, avO, bSY, q, J, gH, QI, eA, aPW, mj, uT, bSW, aT, bq, an, ae, af, ak, kl, s, r, en, cl, t, pa, JL, mf, np, dy, gT, bt, rA, hi, aZ, jh, aCm, dG, oH, uu, eq, ad, dP, QJ, oj, nJ, ff, xs, bSn, dq, bz, qa, dR, ei); #c1(INSRR) c2(NP_055030) c3(insulin receptor-related protein precursor) c4(178396) c5(178397, 178398, 178399, 178400, 178401, 178402) c6( ) c7(bL, ck, bE, aW, e, qK, dV, aT, bB, bjL, h, fr, aoD, aot, cm, eW); #c1(INTS1) c2(NP_001073922) c3(integrator complex subunit 1) c4(36553, 36554) c5(36555, 36556, 36557, 36558, 36559, 36560, 36561, 36562, 36563, 36564, 36565, 36566) c6( ) c7(T, h, n, fr, bw, bt, QA); #c1(INTS12) c2(NP_001135943) c3(integrator complex subunit 12) c4(53631, 53632, 53633, 53634, 53635) c5(53636, 53637, 53638, 53639, 53640, 53641, 53642, 53643, 53644, 53645, 53646, 53647, 53648, 53649, 53650, 53651, 53652, 53653, 53654, 53655, 53656, 53657, 53658, 53659, 53660, 53661, 53662, 53663, 53664, 53665, 53666, 53667, 53668, 53669, 53670, 53671, 53672, 53673, 53674, 53675, 53676) c6( ) c7(at, Dp, cz, aa); #c1(INTS2) c2(NP_065799) c3(integrator complex subunit 2) c4(205540, 205541) c5(205542, 205543, 205544, 205545, 205546, 205547, 205548, 205549, 205550, 205551, 205552, 205553) c6( ) c7(btc, T, dA, PY, fZ, Hn, n, ci, oc, q, er, Ig, aT, h, dL, hu, avt, Cy, Yi, ia, OV, vT, aW, Y, ff, yq, en, hf, cl, t, q, iK, bw, ck, AM, hL, m, bt, it, B); #c1(INTS3) c2(NP_075391) c3(integrator complex subunit 3) c4(213844) c5(213845, 213846, 213847, 213848, 213849, 213850, 213851, 213852, 213853, 213854, 213855, 213856, 213857) c6( ) c7(ck, pg); #c1(INTS3) c2(XP_005276792) c3(integrator complex subunit 3 isoform X1) c4(285711) c5(285712) c6( ) c7(ck, pg); #c1(INTS3) c2(XP_011545224) c3(integrator complex subunit 3 isoform X2) c4( ) c5(344000, 344001, 344002, 344003, 344004, 344005, 344006, 344007, 344008) c6( ) c7(ck, pg); #c1(INTS4) c2(NP_291025) c3(integrator complex subunit 4) c4(228888, 228889) c5(228890, 228891, 228892, 228893, 228894, 228895, 228896, 228897, 228898, 228899, 228900, 228901) c6( ) c7(AW, c, ig, Ny, bKk, oW, GH, pb, aa); #c1(INTS4) c2(XP_005274450) c3(integrator complex subunit 4 isoform X2) c4(285082) c5( ) c6( ) c7(AW, c, ig, Ny, bKk, eW, GH, pb, aa); #c1(INTS4) c2(XP_011543654) c3(integrator complex subunit 4 isoform X1) c4( ) c5(342765, 342766, 342767, 342768, 342769, 342770) c6( ) c7(AW, c, ig, Ny, bKk, oW, CH, pb, aa); #c1(INTS5) c2(NP_085131) c3(integrator complex subunit 5) c4(219352) c5(219353, 219354, 219355, 219356, 219357, 219358) c6( ) c7(aW, aT); #c1(INTS6) c2(NP_001035026) c3(integrator complex subunit 6 isoform b) c4(32450, 32451) c5(32452, 32453, 32454, 32455, 32456, 32457, 32458, 32459, 32460, 32461, 32462, 32463, 32464, 32465, 32466, 32467) c6( ) c7(T, bP, eM, aW, eu, aT, cm, ci, t, ae, X, ad); #c1(INTS6) c2(NP_001035027) c3(integrator complex subunit 6 isoform c) c4(32468) c5(32469, 32470, 32471, 32472, 32473, 32474) c6( ) c7(T, bP, eM, aW, eu, aT, cm, ci, t, ae, X, ad); #c1(INTS6) c2(NP_036273) c3(integrator complex subunit 6 isoform a) c4(172782, 172783, 172784, 172785, 172786) c5(172787, 172788, 172789, 172790, 172791, 172792, 172793, 172794, 172795, 172796, 172797, 172798, 172799, 172800, 172801) c6( ) c7(T, bP, eM, aW, eu, aT, cm, ci, t, ae, X, ad); #c1(INTS7) c2(NP_001186738) c3(integrator complex subunit 7 isoform 4) c4(78468) c5(78469, 78470, 78471, 78472, 78473, 78474) c6( ) c7(bK, ac); #c1(INTS7) c2(NP_001186740) c3(integrator complex subunit 7 isoform 2) c4(78475) c5(78476, 78477, 78478, 78479, 78480, 78481) c6( ) c7(bK, ac); #c1(INTS7) c2(NP_001186741) c3(integrator complex subunit 7 isoform 3) c4(78482) c5(78483, 78484, 78485, 78486, 78487, 78488) c6( ) c7(bK, ac); #c1(INTS7) c2(NP_056249) c3(integrator complex subunit 7 isoform 1) c4(186720) c5(186721, 186722, 186723, 186724, 186725, 186726) c6( ) c7(bK, ac); #c1(INTS8) c2(NP_060334) c3(integrator complex subunit 8) c4(195435, 195436) c5(195437, 195438, 195439, 195440, 195441, 195442, 195443, 195444, 195445, 195446, 195447, 195448) c6( ) c7(Jj, aGd, BG, ok); #c1(INTU) c2(NP_056508) c3(protein inturned) c4(187844) c5(187845, 187846, 187847, 187848, 187849, 187850) c6( ) c7(ck, dA, aW, aT, h, ci, bC, q, eA); #c1(INTU) c2(XP_011530151) c3(protein inturned isoform X6) c4(326043) c5( ) c6( ) c7(ck, dA, aW, aT, h, ci, bC, g, eA); #c1(INTU) c2(XP_011530153) c3(protein inturned isoform X8) c4( ) c5(326044, 326045, 326046, 326047, 326048, 326049) c6( ) c7(ck, dA, aW, aT, h, ci, bC, g, eA); #c1(INVS) c2(NP_055240) c3(inversin isoform a) c4(180004) c5(180005, 180006, 180007, 180008, 180009, 180010) c6( ) c7(aKZ, ck, Mg, ago, eR, BV, bKt, cr, NI, vm, bSZ, Hb, Fq, Tp, aY, bt, vN, nC); #c1(INVS) c2(XP_011516834) c3(inversin isoform X1) c4(310268) c5(310269) c6( ) c7(aKZ, ck, Mg, ago, eR, BV, bKt, cr, NL vm, bSZ, Hb, Fq, Tp, aY, bt, vN, nC); #c1(INVS) c2(XP_011516835) c3(inversin isoform X2) c4(310270) c5(310271, 310272, 310273, 310274, 310275, 310276) c6( ) c7(aKZ, ck, Mg, ago, eR, BV, bKt, cr, NL vm, bSZ, Hb, Fq, Tp, aY, bt, vN, nC); #c1(INVS) c2(XP_011516840) c3(inversin isoform X3) c4( ) c5(310277, 310278, 310279, 310280, 310281) c6( ) c7(aKZ, ck, Mg, ago, eR, BV, bKt, cr, NL vm, bSZ, Hb, Fq, Tp, aY, bt, vN, nC); #c1(INVS) c2(XP_011516844) c3(inversin isoform X5) c4(310282, 310283) c5(310284, 310285, 310286, 310287, 310288, 310289) c6( ) c7(aKZ, ck, Mg, ago, eR, BV, bKt, cr, NL vm, bSZ, Hb, Fq, Tp, aY, bt, vN, nC); #c1(IP6KI) c2(NP_001006115) c3(inositol hexakisphosphate kinase 1 isoform 2) c4( ) c5(22180, 22181, 22182, 22183, 22184, 22185, 22186, 22187) c6( ) c7(bL); #c1(IP6KI) c2(NP_001229758) c3(inositol hexakisphosphate kinase 1 isoform 1) c4(85160, 85161) c5(85162, 85163, 85164, 85165, 85166, 85167, 85168, 85169) c6( ) c7(bL); #c1(IP6K2) c2(NP_001005911) c3(inositol hexakisphosphate kinase 2 isoform b) c4(22145) c5(22146, 22147, 22148, 22149, 22150, 22151, 22152, 22153) c6( ) c7(ci, T, np, m, rR); #c1(IP6K2) c2(NP_001177245) c3(inositol hexakisphosphate kinase 2 isoform d) c4(72536) c5(72537, 72538, 72539, 72540, 72541, 72542, 72543, 72544) c6( ) c7(ci, T, np, m, rR); #c1(IP6K2) c2(NP_001177246) c3(inositol hexakisphosphate kinase 2 isoform e) c4(72545) c5(72546, 72547, 72548, 72549, 72550, 72551) c6( ) c7(ci, T, np, m, rR); #c1(IP6K2) c2(NP_057375) c3(inositol hexakisphosphate kinase 2 isoform a) c4(190456) c5(190457, 190458, 190459, 190460, 190461) c6( ) c7(ci, T, np, m, rR); #c1(IP6K2) c2(XP_006713264) c3(inositol hexakisphosphate kinase 2 isoform X4) c4( ) c5(287065) c6( ) c7(ci, T, np, m, rR); #c1(IP6K2) c2(XP_011532123) c3(inositol hexakisphosphate kinase 2 isoform X7) c4(328162) c5(328163) c6( ) c7(ci, T, np, m, rR); #c1(IPGK2) c2(XP_011532125) c3(inositol hexakisphosphate kinase 2 isoform X1) c4( ) c5(328164, 328165, 328166, 328167, 328168) c6( ) c7(ci, T, np, m, rR); #c1(IP6K3) c2(NP_001136355) c3(inositol hexakisphosphate kinase 3) c4(54841) c5(54842, 54843, 54844, 54845, 54846, 54847, 54848, 54849, 54850, 54851) c6( ) c7(aw, eZ); #c1(IPCEF1) c2(XP_005266979) c3(interactor protein for cytohesin exchange factors 1 isoform X1) c4(280571) c5(280572, 280573, 280574, 280575, 280576, 280577, 280578, 280579, 280580, 280581) c6( ) c7(aj, hn, fJ); #c1(IPCEF1) c2(XP_005266980) c3(interactor protein for cytohesin exchange factors 1 isoform X2) c4(280582, 280583) c5(280584, 280585, 280586, 280587, 280588, 280589, 280590, 280591, 280592, 280593, 280594, 280595) c6( ) c7(aj, hn, fJ); #c1(IPMK) c2(NP_689416) c3(inositol polyphosphate multikinase) c4(242703) c5(242704, 242705, 242706, 242707, 242708, 242709) c6( ) c7(aw); #c1(IP011) c2(NP_001128251) c3(importin-11 isoform 1) c4(49799, 49800, 49801, 49802, 49803, 49804) c5(49805, 49806, 49807, 49808, 49809, 49810, 49811, 49812, 49813, 49814) c6( ) c7(aoU); #c1(IP011) c2(NP_057422) c3(importin-11 isoform 2) c4( ) c5(190712, 190713, 190714, 190715, 190716, 190717, 190718, 190719, 190720, 190721, 190722, 190723, 190724, 190725, 190726, 190727, 190728, 190729, 190730, 190731, 190732, 190733, 190734, 190735, 190736, 190737) c6( ) c7(aoU); #c1(IPO13) c2(XP_011540763) c3(impnrtin-13 isoform X1) c4(339333) c5(339334, 339335, 339336, 339337, 339338, 339339) c6( ) c7(bM, sp, T, aT, PM); #c1(IP07) c2(NP_006382) c3(importin-7) c4(164518) c5(164519, 164520, 164521, 164522, 164523, 164524) c6( ) c7(h, lo, ae, ey, cz); #c1(IP08) c2(NP_001177924) c3(impnrtin-8 isoform 2) c4(73173) c5(73174, 73175, 73176, 73177, 73178, 73179) c6( ) c7(fe); #c1(IP08) c2(NP_006381) c3(impnrtin-8 isoform 1) c4(164505) c5(164506, 164507, 164508, 164509, 164510, 164511, 164512, 164513, 164514, 164515, 164516, 164517) c6( ) c7(fe); #c1(IP08) c2(XP_011518849) c3(impnrtin-8 isoform X2) c4(313203) c5( ) c6( ) c7(fe); #c1(IP09) c2(NP_060555) c3(impnrtin-9) c4(196539) c5(196540, 196541, 196542, 196543, 196544, 196545) c6( ) c7(af); #c1(IP09) c2(XP_011508032) c3(importin-9 isoform X1) c4(298488) c5(298489, 298490, 298491, 298492, 298493, 298494) c6( ) c7(af); #c1(IQCB1) c2(NP_001018864) c3(IQ calmodulin-binding motif-containing protein 1 isoform a) c4(27556) c5(27557, 27558, 27559, 27560, 27561, 27562) c6( ) c7(bTb, vJ, gX, aA, vm, nw, dy, Nh, bTa, Sp, nC, xt, aY, UF); #c1(IQCB1) c2(NP_001018865) c3(IQ calmodulin-binding motif-containing protein 1 isoform c) c4(27563) c5(27564, 27565, 27566, 27567, 27568, 27569) c6( ) c7(bTb, vJ, gX, aA, vm, nw, dy, Nh, bTa, Sp, nC, xt, aY, UF); #c1(IQCB1) c2(XP_005247968) c3(IQ calmodulin-binding motif-containing protein 1 isoform X1) c4(268156) c5( ) c6( ) c7(bTb, vJ, gX, aA, vm, nw, dy, Nh, bTa, Sp, nC, xt, aY, UF); #c1(IQCB1) c2(XP_005247970) c3(IQ calmodulin-binding motif-containing protein 1 isoform X3) c4( ) c5(268157, 268158, 268159, 268160, 268161, 268162) c6( ) c7(bTb, vJ, gX, aA, vm, nw, dy, Nh, bTa, Sp, nC, xt, aY, UF); #c1(IQCG) c2(NP_001127907) c3(IQ domain-containing protein G) c4(49494, 49495) c5(49496, 49497, 49498, 49499, 49500, 49501, 49502, 49503, 49504, 49505, 49506, 49507, 49508, 49509, 49510, 49511) c6( ) c7(iT); #c1(IQCH) c2(NP_001026885) c3(IQ domain-containing protein H isoform 1) c4(29837) c5(29838, 29839, 29840, 29841, 29842, 29843) c6( ) c7(Y); #c1(IQCH) c2(NP_001271277) c3(IQ domain-containing protein H isoform 4) c4(103813) c5(103814, 103815, 103816, 103817, 103818, 103819) c6( ) c7(Y); #c1(IQCH) c2(NP_073621) c3(IQ domain-containing protein H isoform 2) c4( ) c5(213180, 213181, 213182, 213183, 213184) c6( ) c7(Y); #c1(IQCH) c2(XP_011520214) c3(IQ domain-containing protein H isoform X6) c4(315082, 315083) c5(315084, 315085, 315086, 315087, 315088, 315089, 315090, 315091, 315092, 315093, 315094, 315095) c6( ) c7(Y); #c1(IQCH) c2(XP_011520217) c3(IQ domain-containing protein H isoform X9) c4(315096) c5( ) c6( ) c7(Y); #c1(IQCH) c2(XP_011520225) c3(IQ domain-containing protein H isoform X16) c4( ) c5(315097) c6( ) c7(Y); #c1(IQCJ) c2(NP_001036170) c3(IQ domain-containing protein J isoform CaMBPv1) c4(34019) c5(34020, 34021, 34022, 34023, 34024, 34025) c6( ) c7(cm, eA); #c1(IQCJ) c2(NP_001036171) c3(IQ domain-containing protein J isoform CaMBPv2) c4(34026) c5(34027, 34028, 34029, 34030, 34031, 34032) c6( ) c7(cm, eA); #c1(IQCJ) c2(NP_001184029) c3(IQ domain-containing protein J isoform CaMBPv3) c4(75278) c5(75279, 75280, 75281, 75282, 75283, 75284) c6( ) c7(cm, eA); #c1(IQCJ-SCHIPI) c2(NP_001184042) c3(IQ motif containing J-schwannomin interacting protein 1 fusion protein isoform 1) c4(75319) c5(75320, 75321, 75322, 75323, 75324, 75325, 75326) c6( ) c7(bF, rQ, py, hp, rP); #c1(IQCJ-SCHIPI) c2(NP_001184043) c3(IQ motif containing J-schwannomin interacting protein 1 fusion protein isoform 2) c4(75327, 75328) c5(75329, 75330, 75331, 75332, 75333, 75334) c6( ) c7(bF, rQ, py, hp, rP); #c1(IQCK) c2(NP_694940) c3(IQ domain-containing protein K) c4(245444, 245445) c5(245446, 245447, 245448, 245449, 245450, 245451, 245452) c6( ) c7(v); #c1(IQCK) c2(XP_011544036) c3(IQ domain-containing protein K isoform XI) c4(343209) c5(343210, 343211, 343212, 343213, 343214) c6( ) c7(v); #c1(IQCK) c2(XP_011544038) c3(IQ domain-containing protein K isoform X3) c4( ) c5(343215, 343216, 343217, 343218, 343219) c6( ) c7(v); #c1(IQGAP1) c2(NP_003861) c3(ras GTPase-activating-like protein IQGAP1) c4(141581) c5(141582, 141583, 141584, 141585, 141586, 141587, 141588) c6( ) c7(T, aA, bB, ah, q, eA, hd, aT, IG, ey, K, aW, r, aF, q, t, fi, qJ, bF, nM, nB, bE, XO, m, it, B); #c1(IQGAP2) c2(NP_001272390) c3(ras GTPase-activating-like protein IQGAP2 isoform 3) c4(104054) c5(104055, 104056, 104057, 104058, 104059, 104060) c6( ) c7(aq, fq, B, aF, aA); #c1(IQGAP2) c2(NP_001272391) c3(ras GTPase-activating-like protein IQGAP2 isoform 4) c4(104061) c5( ) c6( ) c7(aq, fq, B, aF, aA); #c1(IQGAP2) c2(NP_006624) c3(ras GTPase-activating-like protein IQGAP2 isoform 1) c4(166706) c5(166707, 166708, 166709, 166710, 166711, 166712) c6( ) c7(aq, fq, B, aF, aA); #c1(IQGAP2) c2(XP_005248471) c3(ras GTPase-activating-like protein IQGAP2 isoform X3) c4(268404) c5(268405, 268406, 268407, 268408, 268409, 268410) c6( ) c7(aq, fq, B, aF, aA); #c1(IQGAP2) c2(XP_011541409) c3(ras GTPase-activating-like protein IQGAP2 isoform X2) c4( ) c5(340010, 340011, 340012, 340013, 340014, 340015) c6( ) c7(aq, fq, B, aF, aA); #c1(IQGAP3) c2(NP_839943) c3(ras GTPase-activating-like protein IQGAP3) c4(253570) c5(253571, 253572, 253573, 253574, 253575, 253576) c6( ) c7(T, bz); #c1(IQSEC1) c2(NP_001127854) c3(IQ motif and SEC7 domain-containing protein 1 isoform a) c4(49397, 49398) c5(49399, 49400, 49401, 49402, 49403, 49404, 49405, 49406, 49407, 49408, 49409, 49410) c6( ) c7(iu, T, aE, aW, aT, cy, aq, q, AO, B, us); #c1(IQSEC1) c2(NP_055684) c3(IQ motif and SEC7 domain-containing protein 1 isoform b) c4(182761) c5(182762, 182763, 182764, 182765, 182766, 182767) c6( ) c7(iu, T, aE, aW, aT, cy, ag, q, AO, B, us); #c1(IQSEC1) c2(XP_011532612) c3(IQ motif and SEC7 domain-containing protein 1 isoform X7) c4(328711) c5(328712, 328713, 328714, 328715, 328716, 328717) c6( ) c7(iu, 1 aE, aW, aT, cy, aq, q, AO, B, us); #c1(IQSEC1) c2(XP_011532616) c3(IQ motif and SEC7 domain-containing protein 1 isoform X8) c4( ) c5(328718) c6( ) c7(iu, T, aE, aW, aT, cy, aq, q, AO, B, us); #c1(IQSEC1) c2(XP_011532617) c3(IQ motif and SEC7 domain-containing protein 1 isoform X9) c4( ) c5(328719, 328720) c6( ) c7(iu, T, aE, aW, aT, cy, aq, q, AO, B, us); #c1(IQSEC2) c2(NP_001104595) c3(IQ motif and SEC7 domain-containing protein 2 isoform 1) c4(42207) c5(42208, 42209, 42210, 42211, 42212, 42213, 42214, 42215, 42216, 42217, 42218, 42219) c6( ) c7(nd, nf, afg, nA, 60, Wl, eA, aR); #c1(IQSEC2) c2(NP_055890) c3(IQ motif and SEC7 domain-containing protein 2 isoform 2) c4(184210) c5(184211, 184212, 184213, 184214, 184215, 184216) c6( ) c7(nd, nf, afg, nA, 60, WL eA, aR); #c1(IQSEC2) c2(XP_006724643) c3(IQ motif and SEC7 domain-containing protein 2 isoform X2) c4(296161) c5( ) c6( ) c7(nd, nf, afg, nA, bU, WL eA, aR); #c1(IQSEC2) c2(XP_011529075) c3(IQ motif and SEC7 domain-containing protein 2 isoform X4) c4( ) c5(324447) c6( ) c7(nd, nf, afg, nA, bU, WL eA, aR); #c1(IQSEC3) c2(NP_001164209) c3(IQ motif and SEC7 domain-containing protein 3 isoform 1) c4(66804) c5(66805, 66806, 66807, 66808, 66809, 66810, 66811, 66812, 66813, 66814) c6( ) c7(cd); #c1(IQSEC3) c2(NP_056047) c3(IQ motif and SEC7 domain-containing protein 3 isoform 2) c4(185281) c5( ) c6( ) c7(cd); #c1(IQSEC3) c2(XP_011519262) c3(IQ motif and SEC7 domain-containing protein 3 isoform X3) c4( ) c5(313914, 313915, 313916, 313917, 313918, 313919) c6( ) c7(cd); #c1(IRAK1) c2(NP_001020413) c3(interleukin-1 receptor-associated kinase 1 isoform 2) c4(28739) c5(28740, 28741, 28742, 28743, 28744, 28745) c6( ) c7(bL, bM, DM, dD, ea, fG, aA, aj, j, ci, C, eq, J, ad, wD, aE, Be, h, cy, dL, ae, eL, eu, Of, eZ, Og, aF, t, pb, eK, ac, nB, m, y, Pr); #c1(IRAK1) c2(NP_001020414) c3(interleukin-1 receptor-associated kinase 1 isoform 3) c4(28746) c5(28747, 28748, 28749, 28750, 28751, 28752) c6( ) c7(bL, bM, DM, dD, ea, fG, aA, aj, j, ci, C, eq, J, ad, wD, aE, Be, h, cy, dL, ae, eL, eu, Of, eZ, Og, aF, t, pb, eK, ac, nB, m, y, Pr); #c1(IRAK1) c2(NP_001560) c3(interleukin-1 receptor-associated kinase 1 isoform 1) c4(118973) c5(118974, 118975, 118976, 118977, 118978, 118979) c6( ) c7(bL, bM, DM, dD, ea, fG, aA, aj, j, ci, C, eq, J, ad, wD, aE, Be, h, cy, dL, ae, eL, eu, Of, eZ, Og, aF, t, pb, eK, ac, nB, m, y, Pr); #c1(IRAK1) c2(XP_005274725) c3(interleukin-1 receptor-associated kinase 1 isoform X1) c4(285338, 285339) c5(285340, 285341, 285342, 285343, 285344, 285345, 285346, 285347, 285348, 285349, 285350, 285351) c6( ) c7(bL, bM, DM, dD, ea, fG, aA, aj, j, ci, C, eq, J, ad, wD, aE, Be, h, cy, dL, ae, eL, eu, Of, eZ, Og, aF, t, pb, eK, ac, nB, m, y, Pr); #c1(IRAKIBPI) c2(NP_001010844) c3(interleukin-1 receptor-associated kinase 1-binding protein 1) c4(23824) c5(23825, 23826, 23827, 23828, 23829, 23830) c6( ) c7(fN); #c1(IRAK2) c2(NP_001561) c3(interleukin-1 receptor-associated kinase-like 2) c4(118980) c5(118981, 118982, 118983, 118984, 118985, 118986) c6( ) c7(oO, r, h, dz, q, pm, bTc); #c1(IRAK3) c2(NP_001135995) c3(interleukin-1 receptor-associated kinase 3 isoform b) c4(53936) c5(53937, 53938, 53939, 53940, 53941, 53942) c6( ) c7(oO, bM, Ik, jx, v, C, eA, aDF, av, aT, K, jo, bA, d, iV, bTd, axp, bz, bTe, fD, ei, y, iu); #c1(IRAK3) c2(NP_009130) c3(interleukin-1 receptor-associated kinase 3 isoform a) c4(170963) c5(170964, 170965, 170966, 170967, 170968, 170969) c6( ) c7(oO, bM, Ik, jx, v, C, eA, aDF, av, aT, K, jo, bA, d, iV, bTd, axp, bz, bTe, fD, ei, y, iu); #c1(IRAK4) c2(NP_001138728) c3(interleukin-1 receptor-associated kinase 4 isoform b) c4(57461) c5(57462, 57463, 57464, 57465, 57466, 57467, 57468, 57469) c6( ) c7(oO, bM, Dw, dD, fR, ea, eq, C, eA, ad, eW, dV, Os, h, cy, Ds, bTf, ae, eu, bNq, mQ, eZ, awv, ajz, zV, cj, aNn, y, Tr, zA, bTc); #c1(IRAK4) c2(NP_057207) c3(interleukin-1 receptor-associated kinase 4 isoform a) c4(189496, 189497, 189498) c5(189499, 189500, 189501, 189502, 189503, 189504, 189505, 189506, 189507, 189508, 189509, 189510, 189511, 189512, 189513, 189514, 189515, 189516, 189517, 189518, 189519, 189520, 189521, 189522) c6( ) c7(oO, bM, Dw, dD, fR, ea, eq, C, eA, ad, eW, dV, Os, h, cy, Ds, bTf, ae, eu, bNq, mQ, eZ, awv, ajz, zV, cj, aNn, y, Tr, zA, bTc); #c1(IREB2) c2(NP_004127) c3(iron-responsive element-binding protein 2) c4(143797) c5(143798, 143799, 143800, 143801, 143802, 143803, 143804) c6( ) c7(iu, T, EM, am, af, yt, eW, yy, yu, at, xw, bz, B, N); #c1(IRF1) c2(NP_002189) c3(interferon regulatory factor 1) c4(126434, 126435) c5(126436, 126437, 126438, 126439, 126440, 126441, 126442, 126443, 126444, 126445, 126446, 126447, 126448, 126449, 126450, 126451, 126452) c6( ) c7(bM, T, fR, Js, pf, ea, if, qx, fd, bB, cL, ci, x, dV, Ds, K, hH, aa, Jl, aW, mQ, cm, bw, ha, eM, iT, mx, aiM, k, m, eg, cZ, dD, n, fr, qN, pM, cd, hr, ai, Nh, cU, IG, h, dL, dd, sp, aq, mo, hL, hj, at, rx, eo, B, Jo, Dw, jx, aA, cR, j, V, o, aT, aHs, jj, jf, qw, iU, Y, bg, lo, en, hf, cl, t, f, ck, cT, sS, ac, gX, rK, bt, aCA, btY, bs, wV, eg, jE, hF, hX, av, F, Ot, hD, pq, qZ, qt, afF, ff, gK, cr, aF, hp, iR, bF, bE, z, aEN, bC, ei, y); #c1(IRF2) c2(NP_002190) c3(interferon regulatory factor 2) c4(126453, 126454, 126455) c5(126456, 126457, 126458, 126459, 126460, 126461, 126462) c6( ) c7(gV, T, bM, aC, aw, ht, jx, NT, bB, n, jE, aFv, eW, hX, F, aE, Rq, apJ, aT, cy, bK, IQ, DU, hu, pq, jf, iU, aW, sp, cr, lo, eE, t, cm, ck, bE, bNF, cj, m, bt, B); #c1(IRF2) c2(XP_005263041) c3(interferon regulatory factor 2 isoform X2) c4(278234) c5(278235, 278236, 278237, 278238, 278239, 278240, 278241, 278242, 278243, 278244, 278245, 278246) c6( ) c7(gV, T, bM, aC, aw, ht, jx, NT, bB, n, jE, aFv, eW, hX, F, aE, Rg, apJ, aT, cy, bK, IQ, DU, hu, pq, jf, iU, aW, sp, cr, lo, eE, t, cm, ck, bE, bNF, cj, m, bt, B); #c1(IRF2) c2(XP_011530231) c3(interferon regulatory factor 2 isoform X3) c4( ) c5(326126, 326127, 326128, 326129, 326130, 326131, 326132, 326133, 326134, 326135) c6( ) c7(gV, T, bM, aC, aw, ht, jx, NT, bB, n, jE, aFv, eW, hX, F, aE, Rq, apJ, aT, cy, bK, IQ, DU, hu, pq, jf, iU, aW, sp, cr, lo, eE, t, cm, ck, bE, bNF, cj, m, bt, B); #c1(IRF2BP2) c2(NP_001070865) c3(interferon regulatory factor 2-binding protein 2 isoform B) c4(34854) c5(34855, 34856, 34857, 34858, 34859, 34860, 34861, 34862, 34863, 34864) c6( ) c7(apy, cy); #c1(IRF2BP2) c2(NP_892017) c3(interferon regulatory factor 2-binding protein 2 isoform A) c4(257618) c5(257619, 257620, 257621, 257622, 257623, 257624) c6( ) c7(apy, cy); #c1(IRF2BPL) c2(NP_078772) c3(interferon regulatory factor 2-binding protein-like) c4(215418) c5(215419, 215420, 215421, 215422, 215423, 215424) c6( ) c7(cm, asP, aan); #c1(IRF3) c2(NP_001184052) c3(interferon regulatory factor 3 isoform 3) c4(75335) c5(75336, 75337) c6( ) c7(gV, T, bM, Dw, QO, fR, Ke, if, al, jx, NT, jh, bB, wV, v, EA, qN, eA, eW, F, ds, dV, cU, aAn, Ds, dL, DU, h, afu, Nr, Y, wc, apn, eZ, fc, aiT, dq, Is, Io, uF, Fq, CQ, yq, po, Nq, gk, ac, Ui, eM, bE, dc, bNF, aiM, at, wq, nw, cP, y, bt, B); #c1(IRF3) c2(NP_001184053) c3(interferon regulatory factor 3 isoform 4) c4(75338, 75339, 75340) c5(75341, 75342, 75343, 75344, 75345, 75346, 75347, 75348, 75349, 75350, 75351, 75352, 75353, 75354, 75355, 75356, 75357, 75358) c6( ) c7(gV, T, bM, Dw, QO, fR, Ke, if, al, jx, NT, jh, bB, wV, v, EA, qN, eA, eW, F, ds, dV, cU, aAn, Ds, dL, DU, h, afu, Nr, Y, wc, apn, eZ, fc, aiT, dg, Is, Io, uF, Fq, CQ, yq, po, Nq, gk, ac, Ui, eM, bE, dc, bNF, aiM, at, wq, nw, cP, y, bt, B); #c1(IRF3) c2(NP_001184055) c3(interferon regulatary factor 3 isoform 5) c4( ) c5(75359, 75360, 75361, 75362, 75363, 75364, 75365, 75366) c6( ) c7(gV, T, bM, Dw, QO, fR, Ke, if, al, jx, NT, jh, bB, wV, v, EA, qN, eA, eW, F, ds, dV, cU, aAn, Ds, dL, DU, h, afu, Nr, Y, wc, apn, eZ, fc, aiT, dq, Is, Io, uF, Fq, CQ, yq, po, Nq, gk, ac, Ui, eM, bE, dc, bNF, aiM, at, wq, nw, cP, y, bt, B); #c1(IRF3) c2(NP_001184057) c3(interferon regulatory factor 3 isoform 6) c4( ) c5(75367, 75368, 75369, 75370, 75371, 75372, 75373, 75374) c6( ) c7(gV, T, bM, Dw, QO, fR, Ke, if, al, jx, NT, jh, bB, wV, v, EA, qN, eA, eW, F, ds, dV, cU, aAn, Ds, dL, DU, h, afu, Nr, Y, wc, apn, eZ, fc, aiT, dq, Is, Io, uF, Fq, CQ, yq, po, Nq, gk, ac, Ui, eM, bE, dc, bNF, aiM, at, wq, nw, cP, y, bt, B); #c1(IRF3) c2(XP_006723262) c3(interferon regulatory factor 3 isoform X1) c4(295053) c5(295054, 295055, 295056, 295057, 295058, 295059, 295060, 295061, 295062, 295063, 295064) c6( ) c7(gV, T, bM, Dw, QO, fR, Ke, if, al, jx, NT, jh, bB, wV, v, EA, gN, eA, eW, F, ds, dV, cU, aAn, Ds, dL, DU, h, afu, Nr, Y, wc, apn, eZ, fc, aiT, dq, Is, Io, uF, Fq, CQ, yq, po, Nq, gk, ac, Ui, eM, bE, dc, bNF, aiM, at, wq, nw, cP, y, bt, B); #c1(IRF4) c2(NP_001182215) c3(interferon regulatory factor 4 isoform 2) c4(74694) c5(74695, 74696, 74697, 74698, 74699, 74700) c6( ) c7(bM, T, fM, ajm, yk, iW, eX, NT, jh, aA, fd, n, oY, bX, hF, V, q, apQ, pe, Bj, afQ, Nn, kH, Ne, aT, cy, hn, rB, h, apD, eV, ji, pk, bTh, je, iU, xR, aW, Y, ff, Of, aph, r, fe, Og, lo, aF, hp, yq, en, hf, iV, cm, Cv, ck, cT, sS, iM, Dy, ac, TA, z, hk, cj, gn, ij, bTg, act, bt); #c1(IRF4) c2(NP_002451) c3(interferon regulatory factor 4 isoform 1) c4(128624, 128625) c5(128626, 128627, 128628, 128629, 128630, 128631, 128632) c6( ) c7(bM, T, fM, ajm, yk, iW, eX, NT, jh, aA, fd, n, oY, bX, hF, V, q, apQ, pe, Bj, afQ, Nn, kH, Ne, aT, cy, hn, rB, h, apD, eV, ji, pk, bTh, je, iU, xR, aW, Y, ff, Of, aph, r, fe, Og, lo, aF, hp, yq, en, hf, iV, cm, Cv, ck, cT, sS, iM, Dy, ac, TA, z, hk, cj, gn, ij, bTg, act, bt); #c1(IRF4) c2(XP_006715153) c3(interferon regulatory factor 4 isoform X1) c4(288806) c5(288807, 288808, 288809, 288810, 288811) c6( ) c7(bM, T, fM, ajm, yk, iW, eX, NT, jh, aA, fd, n, oY, bX, hF, V, q, apQ, pe, Bj, afQ, Nn, kH, Ne, aT, cy, hn, rB, h, apD, eV, ji, pk, bTh, je, iU, xR, aW, Y, ff, Of, aph, r, fe, Og, lo, aF, hp, yq, en, hf, iV, cm, Cv, ck, cT, sS, iM, Dy, ac, TA, z, hk, cj, gn, ij, bTg, act, bt); #c1(IRF5) c2(NP_001092097) c3(interferon regulatory factor 5 isoform b) c4(39340) c5(39341, 39342, 39343, 39344, 39345, 39346, 39347, 39348, 39349, 39350, 39351, 39352, 39353, 39354) c6( ) c7(Kd, T, dD, bM, Dw, fG, aw, bTi, fN, ez, bB, vr, cL, jh, j, eq, pz, AO, V, qW, mC, o, dP, hd, bW, qh, aT, aAn, dm, Ds, bxi, ey, IM, bc, bTj, hM, OV, A, iU, qt, aW, cr, eZ, fe, lo, yq, mo, pL, iV, bz, pb, acp, adz, bTk, ac, axs, nB, bE, hc, ajd, cj, dy, fL, eo, y, Pr, hv); #c1(IRF5) c2(NP_001229381) c3(interferon regulatory factor 5 isoform e) c4(84294, 84295, 84296, 84297) c5(84298, 84299, 84300, 84301, 84302, 84303, 84304, 84305, 84306, 84307, 84308, 84309, 84310, 84311, 84312, 84313, 84314, 84315, 84316, 84317, 84318, 84319, 84320, 84321, 84322, 84323, 84324, 84325, 84326, 84327, 84328, 84329, 84330, 84331, 84332, 84333, 84334, 84335, 84336, 84337, 84338) c6( ) c7(Kd, 1 dD, bM, Dw, fG, aw, bTi, fN, ez, bB, vr, cL, jh, j, eq, pz, AO, V, qW, mC, o, dP, hd, bW, qh, aT, aAn, dm, Ds, bxi, ey, IM, bc, bTj, hM, OV, A, iU, qt, aW, cr, eZ, fe, lo, yq, mo, pL, iV, bz, pb, acp, adz, bTk, ac, axs, nB, bE, hc, ajd, cj, dy, fL, eo, y, Pr, hv); #c1(IRF5) c2(XP_011514462) c3(interferon regulatory factor 5 isoform X1) c4(307147, 307148, 307149) c5(307150, 307151, 307152, 307153, 307154, 307155) c6( ) c7(Kd, T, dD, bM, Dw, fG, aw, bTi, fN, ez, bB, vr, cL, jh, j, eq, pz, AO, V, qW, mC, o, dP, hd, bW, qh, aT, aAn, dm, Ds, bxi, ey, IM, bc, bTj, hM, OV, A, iU, qt, aW, cr, eZ, fe, lo, yq, mo, pL, iV, bz, pb, acp, adz, bTk, ac, axs, nB, bE, hc, ajd, cj, dy, fL, eo, y, Pr, hv); #c1(IRF5) c2(XP_011514463) c3(interferon regulatory factor 5 isoform X2) c4(307156) c5(307157) c6( ) c7(Kd, T, dD, bM, Dw, fG, aw, bTi, fN, ez, bB, vr, cL, jh, j, eq, pz, AO, V, qW, mC, o, dP, hd, bW, qh, aT, aAn, dm, Ds, bxi, ey, IM, bc, bTj, hM, OV, A, iU, qt, aW, cr, eZ, fe, lo, yq, mo, pL, iV, bz, pb, acp, adz, bTk, ac, axs, nB, bE, hc, ajd, cj, dy, fL, eo, y, Pr, hv); #c1(IRF5) c2(XP_011514466) c3(interferon regulatory factor 5 isoform X3) c4(307158) c5(307159, 307160, 307161, 307162, 307163, 307164, 307165) c6( ) c7(Kd, T, dD, bM, Dw, fG, aw, bTi, fN, ez, bB, vr, cL, jh, j, eq, pz, AO, V, qW, mC, o, dP, hd, bW, qh, aT, aAn, dm, Ds, bxi, ey, IM, bc, bTj, hM, OV, A, iU, qt, aW, cr, eZ, fe, lo, yq, mo, pL, iV, bz, pb, acp, adz, bTk, ac, axs, nB, bE, hc, ajd, cj, dy, fL, eo, y, Pr, hv); #c1(IRF6) c2(NP_001193625) c3(interferon regulatory factor 6 isoform 2) c4( ) c5(82374, 82375, 82376, 82377, 82378) c6( ) c7(FW, NT, n, aml, btF, Xt, eW, bTm, Na, amJ, aT, Nc, brT, bTI, aOX, bjy, aW, ff, Az, An, en, kk, bvU, atb, apM, bpv, Km, Vj, sH); #c1(IRF6) c2(NP_006138) c3(interferon regulatory factor 6 isoform 1) c4(162312, 162313, 162314) c5(162315, 162316, 162317, 162318, 162319, 162320, 162321, 162322, 162323, 162324, 162325, 162326, 162327, 162328) c6( ) c7(FW, NT, n, aml, btF, Xt, eW, bTm, Na, amJ, aT, Nc, brT, bTI, aOX, bjy, aW, ff, Az, An, en, kk, bvU, atb, apM, bpv, Km, Vj, sH); #c1(IRF7) c2(NP_001563) c3(interferon regulatory factor 7 isoform a) c4(118987, 118988) c5(118989, 118990, 118991, 118992, 118993, 118994, 118995) c6( ) c7(gV, T, fR, al, jx, jh, aA, aj, mC, eA, F, ds, aT, h, DU, K, afu, Nr, A, aW, ff, Pg, eZ, aiT, lo, aF, po, en, as, t, bz, pb, Nq, dB, NL, bdP, aiM, fL, eg); #c1(IRF7) c2(NP_004020) c3(interferon regulatory factor 7 isoform b) c4(142894) c5(142895, 142896, 142897, 142898, 142899, 142900, 142901, 142902, 142903, 142904, 142905, 142906, 142907, 142908, 142909, 142910) c6( ) c7(gV, T, fR, al, jx, jh, aA, aj, mC, eA, F, ds, aT, h, DU, K, afu, Nr, A, aW, ff, Pg, eZ, aiT, lo, aF, po, en, as, t, bz, pb, Nq, dB, NL, bdP, aiM, fL, eg); #c1(IRF7) c2(NP_004022) c3(interferon regulatory factor 7 isoform d) c4(142911) c5(142912, 142913, 142914, 142915, 142916, 142917, 142918, 142919, 142920, 142921) c6( ) c7(gV, T, fR, al, jx, jh, aA, aj, mC, eA, F, ds, aT, h, DU, K, afu, Nr, A, aW, ff, Pg, eZ, aiT, lo, aF, po, en, as, t, bz, pb, Nq, dB, NL, bdP, aiM, fL, eg); #c1(IRF8) c2(NP_002154) c3(interferon regulatory factor 8) c4(126000) c5(126001, 126002, 126003, 126004, 126005, 126006) c6( ) c7(cZ, T, iW, bTo, NT, aA, fd, jh, j, jE, ci, mF, bTn, V, bvE, q, F, aEX, aRD, aT, dz, hn, ey, K, apD, dd, an, jj, be, pi, nP, A, iU, et, aW, Y, oV, eH, eZ, hQ, lo, aF, hf, eF, iV, fq, pb, ck, iT, bE, cj, aS, eo, y, bt, kS); #c1(IRF9) c2(NP_006075) c3(interferon regulatory factor 9) c4(161687) c5(161688, 161689, 161690, 161691, 161692, 161693) c6( ) c7(gV, T, bM, Dw, id, jx, bB, fr, jE, EA, qN, V, eA, ad, F, ds, aCV, aT, h, Ds, DU, jj, aW, zy, ae, d, je, aW, Y, GT, aq, lo, iM, bE, kS, B); #c1(IRG1) c2(NP_001245335) c3(cis-aconitate decarboxylase) c4(93124, 93125) c5(93126, 93127, 93128, 93129, 93130, 93131, 93132, 93133, 93134, 93135, 93136, 93137) c6( ) c7(bL, T, dD, ZV, Zz, ea, e, aw, cz, sM, vr, bS, j, et, eq, q, ad, av, ec, rS, aT, h, jj, dQ, eN, hm, bf, cW, aW, Zt, r, Z, ac, nB, wE, aka, vb, hE, B); #c1(IRGM) c2(NP_001139277) c3(immunity-related GTPase family M protein) c4(59073) c5(59074, 59075, 59076, 59077, 59078, 59079) c6( ) c7(xN, T, dD, abV, iV, ig, oV, WP, ea, bTp, VT, aMA, n, aj, Ni, eq, rH, fe, aCK, y, eA); #c1(IRS1) c2(NP_005535) c3(insulin receptor substrate 1) c4(157227) c5(157228, 157229, 157230, 157231, 157232, 157233) c6( ) c7(T, aC, ea, e, fd, bB, ci, Hr, hv, aE, iv, K, dQ, hm, aW, fc, hl, g, eF, uC, aiv, zV, eM, bTq, m, dD, zX, NT, n, aj, mL El, jy, dL, hi, uV, A, aq, bJ, Fi, JQ, mg, hL, at, B, bL, eR, oe, jx, cz, cR, v, j, yO, C, nS, pd, q, J, aT, bq, ae, af, bA, jf, kl, s, nO, Y, r, t, mf, sY, hl, aZ, Dd, dG, eq, aoz, ad, anv, eH, dq, bz, qa, bE, bC, ei, hE, xg, X); #c1(IRS2) c2(NP_003740) c3(insulin receptor substrate 2) c4(140545) c5(140546, 140547, 140548, 140549, 140550, 140551, 140552) c6( ) c7(bL, bM, T, dD, fM, aC, aZ, ea, oe, fd, NT, bs, aA, cz, aj, dG, j, v, Ea, bB, eq, pd, q, hr, J, ad, dP, fU, eJ, Yn, aE, hW, bTr, aT, jy, dL, K, uV, bq, qM, rz, ae, af, bA, jf, kl, d, A, aW, ff, hi, r, fe, aq, en, g, t, bw, fq, bJ, bF, rR, bE, bo, X, mg, hL, mf, dy, m, cP, bC, ei, B); #c1(IRS4) c2(NP_003595) c3(insulin receptor substrate 4) c4(139454) c5(139455, 139456, 139457, 139458, 139459, 139460) c6( ) c7(bL, x, T, aC, iO, fR, af, Y, ff, hi, aj, CZ, K, uV, en, q, B, J); #c1(IRX1) c2(NP_077313) c3(iroguois-class homeodomain protein IRX-1) c4(215201) c5(215202, 215203, 215204, 215205, 215206, 215207, 215208) c6( ) c7(wu, oe, az, aw, Be, aA, cm, rO, ff, aF, wm, en, he, iK, aa); #c1(IRX2) c2(NP_150366) c3(iroguois-class homeodomain protein IRX-2) c4(228077) c5(228078, 228079, 228080, 228081, 228082, 228083, 228084, 228085, 228086, 228087, 228088) c6( ) c7(hP, Be, aa); #c1(IRX3) c2(NP_077312) c3(iroguois-class homeodomain protein IRX-3) c4(215193) c5(215194, 215195, 215196, 215197, 215198, 215199, 215200) c6( ) c7(bL, ac, v, aa, pN); #c1(IRX4) c2(NP_057442) c3(iroguois-class homeodomain protein IRX-4 isoform b) c4(190900) c5(190901, 190902, 190903, 190904, 190905, 190906, 190907, 190908, 190909, 190910, 190911, 190912, 190913, 190914, 190915) c6( ) c7(aC, cc, acl, e, oe, qK, M, vc, j, ae, af, ad); #c1(IRX5) c2(NP_001239126) c3(iroguois-class homeodomain protein IRX-5 isoform 2) c4( ) c5(88260, 88261, 88262, 88263, 88264) c6( ) c7(T, bjy, aNv, bE, TR, mG, bTt, Az, Be, cz, bB, bjB, bTs, aaw, Km, bD, cm, ae, ad, aa); #c1(IRX5) c2(NP_005844) c3(iroguois-class homeodomain protein IRX-5 isoform 1) c4(159821, 159822) c5(159823, 159824, 159825, 159826, 159827, 159828, 159829) c6( ) c7(T, bjy, aNv, bE, TR, mG, bTt, Az, Be, cz, bB, bjB, bTs, aaw, Km, bD, cm, ae, ad, aa); #c1(IRX5) c2(XP_011521111) c3(iroguois-class homeodomain protein IRX-5 isoform X1) c4( ) c5(316034, 316035, 316036) c6( ) c7(T, bjy, aNv, bE, TR, mG, bTt, Az, Be, cz, bB, bjB, bTs, aaw, Km, bD, cm, ae, ad, aa); #c1(ISC0) c2(NP_055116) c3(iron-sulfur cluster assembly enzyme ISCU, mitochondrial isoform ISCU1) c4(179038) c5(179039, 179040, 179041, 179042, 179043, 179044) c6( ) c7(fM, SE, kA, bTu, oj, jh, oh, aNG, hp, K, ci, Tl, aPE, wT); #c1(ISC0) c2(NP_998760) c3(iron-sulfur cluster assembly enzyme ISCU, mitochondrial isoform ISCU2 precursor) c4(265868) c5(265869, 265870, 265871, 265872, 265873, 265874) c6( ) c7(fM, SE, kA, bTu, oj, jh, oh, aNG, hp, K, ci, TL aPE, wT); #c1(ISCU) c2(XP_011536402) c3(iron-sulfur cluster assembly enzyme ISCU, mitochondrial isoform X2) c4(333707) c5(333708, 333709, 333710, 333711, 333712, 333713) c6( ) c7(fM, SE, kA, bTu, oj, jh, oh, aNG, hp, K, ci, TL aPE, wT); #c1(ISG20) c2(NP_001290163) c3(interferon-stimulated gene 20 kDa protein isoform a) c4(114994) c5(114995, 114996, 114997, 114998, 114999, 115000, 115001, 115002, 115003, 115004) c6( ) c7(bM, T, bO, CH, fd, cL, Vd, ci, bh, aY, aR, AW, xy, rw, dV, bRd, azm, rB, DY, bhm, bc, aa, li, Jl, aW, az, kt, hN, eE, bw, mK, yd, ba, eM, Jr, iA, mx, cj, m, gn, abh, aO, aj, fr, cd, ai, Oe, xC, baA, ft, cc, kH, h, dU, ox, Nr, A, zb, fe, po, bxh, jT, adz, Wt, yR, W, JM, bm, uz, aEG, auR, eo, fL, B, bL, fM, eR, fG, zN, OY, V, pd, eA, J, o, zn, eJ, Ig, qp, aT, qG, bK, aFm, Gy, ae, hM, PK, bf, nO, iU, Y, bg, lo, t, f, iK, pb, ck, cT, sS, Ta, Dy, iM, ig, yW, fP, wR, Da, bxj, yH, byK, gT, bt, Kd, bjX, oA, jh, wV, jE, EA, hF, mG, ad, XB, LH, hX, wD, gh, hD, ji, bxf, iL, yF, uQ, d, je, cr, eZ, dN, Mz, hp, iV, bz, Nq, es, Bv, atM, Lj, z, XO, aEN, If, ra, y, Tc); #c1(ISL1) c2(NP_002193) c3(insulin gene enhancer protein ISL-1) c4(126463, 126464) c5(126465, 126466, 126467, 126468, 126469, 126470, 126471, 126472, 126473, 126474, 126475, 126476, 126477) c6( ) c7(bL, cZ, mj, wK, aW, acl, yL, aw, oW, aT, nY, n, aj, v, j, qM, dd, bD, cm, cd, J); #c1(ISM1) c2(NP_543016) c3(isthmin-1 precursor) c4(233258, 233259) c5(233260, 233261, 233262, 233263, 233264, 233265, 233266, 233267, 233268, 233269, 233270, 233271, 233272, 233273, 233274, 233275) c6(233276, 233277, 233278, 233279) c7(T, aF, aw, an, aA); #c1(ISM2) c2(NP_872315) c3(isthmin-2 isoform 3 precursor) c4(256108) c5(256109, 256110, 256111, 256112, 256113) c6( ) c7(cc, ci, wK); #c1(ISM2) c2(NP_954993) c3(isthmin-2 isoform 1 precursor) c4(261521, 261522, 261523) c5(261524, 261525, 261526, 261527, 261528, 261529, 261530) c6( ) c7(cc, ci, wK); #c1(ISM2) c2(XP_011534791) c3(isthmin-2 isoform X1) c4(331233) c5(331234, 331235, 331236, 331237, 331238, 331239, 331240, 331241, 331242, 331243, 331244, 331245, 331246, 331247, 331248, 331249, 331250, 331251, 331252) c6( ) c7(cc, ci, wK); #c1(ISPD) c2(NP_001094896) c3(isoprenoid synthase domain-containing protein isoform a) c4(40779) c5(40780, 40781, 40782, 40783, 40784, 40785) c6( ) c7(ul, vJ, km, oj, UD, bTv, Cd); #c1(IST1) c2(NP_001257904) c3(IST1 homolog isoform a) c4( ) c5(95769, 95770, 95771, 95772, 95773, 95774, 95775, 95776, 95777, 95778) c6( ) c7(av, BI, aW, ff, ht, aT, it, BE, en, hu, bz); #c1(IST1) c2(NP_001257905) c3(IST1 homolog isoform c) c4(95779, 95780, 95781) c5(95782, 95783, 95784, 95785, 95786, 95787, 95788, 95789) c6( ) c7(av, BI, aW, ff, ht, aT, it, BE, en, hu, bz); #c1(IST1) c2(NP_001257906) c3(IST1 homolog isoform d) c4(95790) c5(95791, 95792, 95793, 95794, 95795, 95796) c6( ) c7(av, BI, aW, ff, ht, aT, it, BE, en, hu, bz); #c1(IST1) c2(NP_055576) c3(IST1 homolog isoform b) c4(182038) c5(182039, 182040, 182041, 182042, 182043, 182044) c6( ) c7(av, BI, aW, ff, ht, aT, it, BE, en, hu, bz); #c1(ISX) c2(NP_001290437) c3(intestine-specific homeobox) c4(115445) c5(115446, 115447, 115448, 115449, 115450, 115451, 115452, 115453, 115454, 115455, 115456) c6( ) c7(hH, B, aq); #c1(ISYNA1) c2(NP_001164409) c3(inositol-3-phosphate synthase 1 isoform 2) c4(66940, 66941) c5(66942, 66943, 66944, 66945, 66946, 66947) c6( ) c7(bL, bM, T, Dw, dA, jx, fN, aA, cz, bB, aj, wV, j, zh, C, qj, eh, q, J, cd, qK, dV, kH, cU, aT, K, JS, aDp, kl, IR, Jl, aW, Y, hl, cr, r, aiT, lo, aF, hp, q, iV, aaO, t, iK, pm, qa, eK, ck, es, iA, Ip, bE, cj, aS, m, eg, y, ao, pC); #c1(ISYNA1) c2(NP_001240318) c3(inositol-3-phosphate synthase 1 isoform 4) c4( ) c5(88611, 88612, 88613, 88614, 88615, 88616, 88617, 88618, 88619, 88620, 88621, 88622, 88623) c6( ) c7(bL, bM, T, Dw, dA, jx, fN, aA, cz, bB, aj, wV, j, zh, C, qj, eh, q, J, cd, qK, dV, kH, cU, aT, K, JS, aDp, kl, IR, Jl, aW, Y, hl, cr, r, aiT, lo, aF, hp, q, iV, aaO, t, iK, pm, qa, eK, ck, es, iA, Ip, bE, cj, aS, m, eg, y, ao, pC); #c1(ISYNA1) c2(NP_057452) c3(inositol-3-phosphate synthase 1 isoform 1) c4(190953, 190954) c5(190955, 190956, 190957, 190958, 190959, 190960) c6( ) c7(bL, bM, T, Dw, dA, jx, fN, aA, cz, bB, aj, wV, j, zh, C, qj, eh, q, J, cd, qK, dV, kH, cU, aT, K, JS, aDp, kl, IR, Jl, aW, Y, hl, cr, r, aiT, lo, aF, hp, q, iV, aaO, t, iK, pm, qa, eK, ck, es, iA, Ip, bE, cj, aS, m, eg, y, ao, pC); #c1(ITCH) c2(NP_001244066) c3(E3 ubiquitin-protein ligase Itchy homolog isoform 1) c4(91879) c5(91880, 91881, 91882, 91883, 91884, 91885) c6( ) c7(vU, hd, d, nM, nB, bTw, v, eo, ey, eE, y, V, atV); #c1(ITCH) c2(NP_001244067) c3(E3 ubiquitin-protein ligase Itchy homolog isoform 3) c4( ) c5(91886, 91887, 91888, 91889, 91890) c6( ) c7(vU, hd, d, nM, nB, bTw, v, eo, ey, eE, y, V, atV); #c1(ITCH) c2(NP_113671) c3(E3 ubiquitin-protein ligase Itchy homolog isoform 2) c4(222040, 222041) c5(222042, 222043, 222044, 222045, 222046, 222047, 222048) c6( ) c7(vU, hd, d, nM, nB, bTw, v, eo, ey, eE, y, V, atV); #c1(ITFG1) c2(NP_001291931) c3(T-cell immunomodulator protein isoform 2) c4(116511) c5(116512, 116513, 116514, 116515, 116516) c6( ) c7(ey); #c1(ITFG1) c2(NP_110417) c3(T-cell immunomodulatory protein isoform 1 precursor) c4(220170, 220171, 220172) c5(220173, 220174, 220175, 220176, 220177, 220178, 220179, 220180, 220181, 220182, 220183, 220184, 220185, 220186, 220187, 220188, 220189, 220190, 220191) c6( ) c7(ey); #c1(ITFG3) c2(NP_114428) c3(protein ITFG3) c4(222707, 222708, 222709, 222710) c5(222711, 222712, 222713, 222714, 222715, 222716, 222717, 222718, 222719, 222720, 222721, 222722, 222723, 222724, 222725, 222726, 222727, 222728, 222729, 222730, 222731, 222732) c6( ) c7(awC); #c1(ITFG3) c2(XP_005255680) c3(protein ITFG3 isoform X3) c4(273785) c5(273786, 273787, 273788, 273789, 273790, 273791, 273792, 273793, 273794, 273795, 273796, 273797, 273798, 273799, 273800, 273801, 273802, 273803, 273804, 273805, 273806, 273807, 273808, 273809) c6( ) c7(awC); #c1(ITFG3) c2(XP_006721020) c3(protein ITFG3 isoform X2) c4(293805, 293806, 293807, 293808) c5(293809, 293810, 293811, 293812, 293813, 293814, 293815, 293816, 293817, 293818, 293819, 293820) c6( ) c7(awC); #c1(ITGA1) c2(NP_852478) c3(integrin alpha-1 precursor) c4(255019) c5(255020, 255021, 255022, 255023, 255024, 255025) c6( ) c7(bL, aC, wD, bTx, aCJ, yL, hi, ji, K, y, V, X, bA); #c1(ITGA10) c2(NP_001289969) c3(integrin alpha-10 isoform 2) c4(114872) c5(114873, 114874, 114875, 114876, 114877, 114878) c6( ) c7(wR, Y); #c1(ITGA10) c2(NP_001289970) c3(integrin alpha-10 isoform 3 precursor) c4(114879) c5(114880, 114881114882, 114883, 114884, 114885) c6( ) c7(wR, Y); #c1(ITGA10) c2(XP_011508383) c3(integrin alpha-10 isoform X3) c4(299069) c5(299070, 299071, 299072, 299073, 299074, 299075) c6( ) c7(wR, Y); #c1(ITGA11) c2(NP_001004439) c3(integrin alpha-11 precursor) c4(20690, 20691, 20692) c5(20693, 20694, 20695, 20696, 20697, 20698, 20699, 20700, 20701, 20702, 20703, 20704, 20705, 20706, 20707, 20708, 20709, 20710, 20711, 20712, 20713, 20714, 20715, 20716) c6( ) c7(ba, eM, ff, bg, EQ, j, en, iu); #c1(ITGA11) c2(XP_005254285) c3(integrin alpha-11 isoform X2) c4(273140) c5( ) c6( ) c7(ba, eM, ff, bg, EQ, j, en, iu); #c1(ITGA2) c2(NP_002194) c3(integrin alpha-2 precursor) c4(126478, 126479, 126480, 126481) c5(126482, 126483, 126484, 126485, 126486, 126487, 126488, 126489, 126490, 126491, 126492, 126493, 126494, 126495, 126496, 126497, 126498, 126499, 126500, 126501, 126502, 126503, 126504, 126505) c6( ) c7(bL, T, dD, aC, eR, qb, bgP, ea, e, aw, wL, cz, ez, n, bLo, j, zh, ci, eq, q, ad, ai, TB, dP, bv, av, vC, ql, MP, M, aT, DU, K, ey, aWf, hH, adx, ae, af, qk, hm, eu, jf, eG, A, iU, cW, aW, Y, eZ, r, bEG, g, pL, cm, cM, sE, bz, uC, pb, LB, kT, ac, c, hc, vb, vy, qq, aS, Hb, X, us); #c1(ITGA2B) c2(NP_000410) c3(integrin alpha-IIb preproprotein) c4(8647) c5(8648, 8649, 8650, 8651, 8652, 8653) c6( ) c7(dD, eR, bTy, qb, ea, aw, oA, cz, bO, ez, QL, j, eq, fr, bED, hF, Fc, eA, vV, vC, bpp, rS, M, aT, LA, lG, cy, dz, bK, DU, jo, iY, cb, DY, af, eu, d, arI, cW, aW, Y, eZ, kD, bEG, bTz, pm, cm, cM, sE, uC, bw, ck, kT, ac, cA, pc, aka, vb, vy, aic, dW, dX, pw, jQ, y, jd); #c1(ITGA2B) c2(XP_011523051) c3(integrin alpha-IIb isoform X1) c4(317543, 317544) c5(317545, 317546, 317547, 317548, 317549, 317550) c6( ) c7(dD, eR, bTy, qb, ea, aw, oA, cz, bO, ez, QL, j, eq, fr, bED, hF, Fc, eA, vV, vC, bpp, rS, M, aT, LA, lG, cy, dz, bK, DU, jo, iY, cb, DY, af, eu, d, arI, cW, aW, Y, eZ, kD, bEG, bTz, pm, cm, cM, sE, uC, bw, ck, kT, ac, cA, pc, aka, vb, vy, aic, dW, dX, pw, jQ, y, jd); #c1(ITGA2B) c2(XP_011523052) c3(integrin alpha-IIb isoform X2) c4( ) c5(317551, 317552, 317553, 317554, 317555, 317556) c6( ) c7(dD, eR, bTy, qb, ea, aw, oA, cz, bO, ez, QL, j, eq, fr, bED, hF, Fc, eA, vV, vC, bpp, rS, M, aT, LA, lG, cy, dz, bK, DU, jo, iY, cb, DY, af, eu, d, arI, cW, aW, Y, eZ, kD, bEG, bTz, pm, cm, cM, sE, uC, bw, ck, kT, ac, cA, pc, aka, vb, vy, aic, dW, dX, pw, jQ, y, jd); #c1(ITGA3) c2(NP_002195) c3(integrin alpha-3 isoform a precursor) c4(126506, 126507, 126508, 126509) c5(126510, 126511, 126512, 126513, 126514, 126515, 126516, 126517, 126518, 126519, 126520, 126521, 126522, 126523, 126524, 126525, 126526, 126527, 126528, 126529, 126530, 126531, 126532, 126533, 126534, 126535) c6( ) c7(Gl, aw, ht, aA, bB, hy, ah, ci, C, j, BB, eA, ip, aT, vw, Gw, dL, IQ, bq, aa, d, B, ff, Pg, aF, en, g, vW, kP, bE, hc, cj, bTA, XN, Gu, X); #c1(ITGA4) c2(NP_000876) c3(integrin alpha-4 precursor) c4(16749, 16750) c5(16751, 16752, 16753, 16754, 16755, 16756, 16757, 16758, 16759, 16760, 16761, 16762) c6( ) c7(bM, aDT, jh, fd, ci, uE, mF, V, Qk, aT, h, ey, K, Lu, s, iU, qt, aW, Y, bvJ, Of, ff, Og, hp, en, g, eF, t, aZz, bN, ck, vy, cj, wR, ME, m, fD, y, bt, X); #c1(ITGA5) c2(NP_002196) c3(integrin alpha-5 precursor) c4(126536) c5(126537, 126538, 126539, 126540, 126541, 126542) c6( ) c7(T, id, fR, mr, qy, aA, bB, fd, IR, ci, fr, q, ad, MK, hX, dP, eA, av, Tg, aE, yt, aT, lG, By, ae, be, DA, eG, d, B, aW, Y, Tc, ff, r, nY, uY, aF, CQ, en, hf, t, bz, pb, aZz, acW, eM, dB, bE, m, fD, X, vi); #c1(ITGA6) c2(NP_000201) c3(integrin alpha-6 isoform b precursor) c4(4466, 4467, 4468) c5(4469, 4470, 4471, 4472, 4473, 4474, 4475, 4476, 4477, 4478, 4479, 4480, 4481, 4482, 4483, 4484, 4485, 4486, 4487) c6( ) c7(T, dD, aC, fR, XJ, n, eq, ci, XM, eA, ad, aT, IQ, arL, d, aW, Y, eH, hl, uY, g, eF, t, bz, Zj, bN, bdQ, ck, kP, ac, XG, bt, it); #c1(ITGA6) c2(NP_001073286) c3(integrin alpha-6 isoform a precursor) c4(35750, 35751, 35752) c5(35753, 35754, 35755, 35756, 35757, 35758, 35759, 35760, 35761, 35762, 35763, 35764, 35765, 35766, 35767, 35768, 35769, 35770, 35771, 35772, 35773, 35774) c6( ) c7(T, dD, aC, fR, XJ, n, eq, ci, XM, eA, ad, aT, IQ, arL, d, aW, Y, eH, hl, uY, g, eF, t, bz, Zj, bN, bdQ, ck, kP, ac, XG, bt, it); #c1(ITGA7) c2(NP_001138468) c3(integrin alpha-7 isoform 1 precursor) c4(56806) c5(56807, 56808, 56809, 56810, 56811, 56812) c6( ) c7(cc, d, hW, ea, xs, Ad, oj, aq, bTB, X, ad); #c1(ITGA7) c2(NP_001138469) c3(integrin alpha-7 isoform 3) c4(56813) c5(56814, 56815, 56816, 56817, 56818, 56819) c6( ) c7(cc, d, hW, ea, xs, Ad, oj, aq, bTB, X, ad); #c1(ITGA7) c2(NP_002197) c3(integrin alpha-7 isoform 2 precursor) c4(126543) c5(126544, 126545, 126546, 126547, 126548, 126549) c6( ) c7(cc, d, hW, ea, xs, Ad, oj, aq, bTB, X, ad); #c1(ITGA7) c2(XP_005268896) c3(integrin alpha-7 isoform X1) c4(282162) c5(282163, 282164, 282165, 282166, 282167, 282168) c6( ) c7(cc, d, hW, ea, xs, Ad, oj, aq, bTB, X, ad); #c1(ITGA7) c2(XP_005268898) c3(integrin alpha-7 isoform X3) c4(282169, 282170, 282171) c5(282172, 282173, 282174, 282175, 282176, 282177, 282178, 282179, 282180, 282181, 282182, 282183, 282184, 282185, 282186, 282187, 282188, 282189) c6( ) c7(cc, d, hW, ea, xs, Ad, oj, aq, bTB, X, ad); #c1(ITGA7) c2(XP_011536589) c3(integrin alpha-7 isoform X9) c4(334085) c5(334086, 334087, 334088, 334089, 334090, 334091) c6( ) c7(cc, d, hW, ea, xs, Ad, oj, aq, bTB, X, ad); #c1(ITGA8) c2(NP_001278423) c3(integrin alpha-8 Isoform 2 preproprotein) c4(109742) c5(109743, 109744, 109745, 109746, 109747, 109748) c6( ) c7(sN, Y, aA, fd, ci, an, t, btr); #c1(ITGA8) c2(NP_003629) c3(integrin alpha-8 Isoform 1 preproprotein) c4(139709) c5(139710, 139711, 139712, 139713, 139714, 139715) c6( ) c7(sN, Y, aA, fd, ci, an, t, btr); #c1(ITGA9) c2(NP_002198) c3(integrin alpha-9 precursor) c4(126550) c5(126551, 126552, 126553, 126554, 126555, 126556) c6( ) c7(jf, mU, T, av, py, BO, mW, mZ, aT, cz, mS, mY, bK, ci, mV, iK, bz, mT, mX); #c1(ITGAD) c2(NP_005344) c3(integrin alpha-D precursor) c4(155261, 155262) c5(155263, 155264, 155265, 155266, 155267, 155268, 155269, 155270, 155271, 155272, 155273) c6( ) c7(v, aKy); #c1(ITGAD) c2(XP_011544144) c3(integrin alpha-D isoform X8) c4( ) c5(343307) c6( ) c7(v, aKy); #c1(ITGAD) c2(XP_011544149) c3(integrin alpha-D isoform X13) c4(343308) c5( ) c6( ) c7(v, aKy); #c1(ITGAD) c2(XP_011544150) c3(integrin alpha-D isoform X14) c4( ) c5(343309, 343310, 343311, 343312, 343313) c6( ) c7(v, aKy); #c1(ITGAE) c2(NP_002199) c3(integrin alpha-E precursor) c4(126557) c5(126558, 126559, 126560, 126561, 126562) c6( ) c7(T, e, aw, j, av, mP, ds, bW, aAh, cU, hD, h, vB, eu, uQ, aa, Y, Of, Og, lo, Cv, ac, dB, cj); #c1(ITGAE) c2(XP_011522125) c3(integrin alpha-E isoform X1) c4( ) c5(316759) c6( ) c7(T, e, aw, j, av, mP, ds, bW, aAh, cU, hD, h, vB, eu, uQ, aa, Y, Of, Og, lo, Cv, ac, dB, cj); #c1(ITGAE) c2(XP_011522126) c3(integrin alpha-E isoform X2) c4( ) c5(316760) c6( ) c7(T, e, aw, j, av, mP, ds, bW, aAh, cU, hD, h, vB, eu, uQ, aa, Y, Of, Og, lo, Cv, ac, dB, cj); #c1(ITGAL) c2(NP_001107852) c3(integrin alpha-L isoform b precursor) c4(43025, 43026) c5(43027, 43028, 43029, 43030, 43031, 43032) c6( ) c7(oO, bM, T, aYZ, qb, iW, jx, bfM, fd, jh, wV, bS, ct, uE, V, mC, ai, Tz, eW, pe, tT, ayQ, dV, kH, aT, h, qG, dL, K, jj, an, hH, pk, ass, sX, dl, be, eN, pi, je, alV, cH, aW, Y, oV, axW, cr, awv, eZ, fe, beP, iV, Z, f, arJ, pb, eK, ck, iM, ac, iQ, hA, iT, cj, at, fL, y, bt); #c1(ITGAL) c2(NP_002200) c3(integrin alpha-L isoform a precursor) c4(126563, 126564) c5(126565, 126566, 126567, 126568, 126569, 126570, 126571) c6( ) c7(oO, bM, T, aYZ, qb, iW, jx, bfM, fd, jh, wV, bS, ct, uE, V, mC, ai, Tz, eW, pe, tT, ayQ, dV, kH, aT, h, qG, dL, K, jj, an, hH, pk, ass, sX, dl, be, eN, pi, je, alV, cH, aW, Y, oV, axW, cr, awv, eZ, fe, beP, iV, Z, f, arJ, pb, eK, ck, iM, ac, iQ, hA, iT, cj, at, fL, y, bt); #c1(ITGAL) c2(XP_005255370) c3(integrin alpha-L isoform X1) c4( ) c5(273626, 273627, 273628, 273629, 273630) c6( ) c7(oO, bM, T aYZ, qb, iW, jx, bfM, fd, jh, wV, bS, ct, uE, V, mC, ai, Tz, eW, pe, tT, ayQ, dV, kH, aT, h, qG, dL, K, jj, an, hH, pk, ass, sX, dl, be, eN, pi, je, alV, cH, aW, Y, oV, axW, cr, awv, eZ, fe, beP, iV, Z, f, arJ, pb, eK, ck, iM, ac, iQ, hA, iT, cj, at, fL, y, bt); #c1(ITGAL) c2(XP_011544151) c3(integrin alpha-L isoform X3) c4( ) c5(343314, 343315, 343316, 343317, 343318, 343319) c6( ) c7(oO, bM, T, aYZ, qb, iW, jx, bfM, fd, jh, wV, bS, et, uE, V, mC, ai, Tz, eW, pe, tT, ayQ, dV, kH, aT, h, qG, dL, K, jj, an, hH, pk, ass, sX, dl, be, eN, pi, je, alV, cH, aW, Y, oV, axW, cr, awv, eZ, fe, beP, iV, Z, f, arJ, pb, eK, ck, iM, ac, iQ, hA, iT, cj, at, fL, y, bt); #c1(ITGAM) c2(NP_000623) c3(integrin alpha-M isoform 2 precursor) c4(14028) c5(14029, 14030, 14031, 14032, 14033, 14034) c6( ) c7(oO, bM, T, ea, aFV, Tz, x, IE, K, H, hm, aW, zC, eE, cm, eM, iT, cj, hh, Ht, dD, aYZ, aw, oY, aj, uE, TI, ai, eW, cU, h, dL, ey, A, PX, fJ, Og, kp, jT, ar, kT, W, at, uz, fL, Pr, bL, dA, fF, cR, j, C, V, q, J, Id, aT, gG, bK, jj, ae, af, dl, iU, xR, Y, r, lo, en, arJ, pb, Cv, ck, hA, AH, hr, wR, dy, bt, jh, wV, eq, mC, ad, fX, tT, hD, ji, uX, ff, Of, cr, eZ, bz, oK, pc, z, aCI, MJ, gy, y); #c1(ITGAM) c2(NP_001139280) c3(integrin alpha-M isoform 1 precursor) c4(59080) c5(59081, 59082, 59083, 59084, 59085, 59086) c6( ) c7(oO, bM, T, ea, aFV, Tz, x, IE, K, H, hm, aW, zC, eE, cm, eM, iT, cj, hh, Ht, dD, aYZ, aw, oY, aj, uE, TL ai, eW, cU, h, dL, ey, A, PX, fJ, Og, kp, jT, ar, kT, W, at, uz, fL, Pr, bL, dA, fF, cR, j, C, V, q, J, Id, aT, qG, bK, jj, ae, af, dl, iU, xR, Y, r, lo, en, arJ, pb, Cv, ck, hA, AH, hr, wR, dy, bt, jh, wV, eq, mC, ad, fX, tT, hD, ji, uX, ff, Of, cr, eZ, bz, oK, pc, z, aCI, MJ, gy, y); #c1(ITGAV) c2(NP_001138471) c3(integrin alpha-V isoform 2 precursor) c4(56820) c5(56821, 56822, 56823, 56824, 56825, 56826) c6( ) c7(T, kh, dD, pf, ea, oe, qy, cz, fd, eq, jE, ci, IR, q, ad, EI, hX, dP, eA, Tg, aE, afQ, aah, aT, cy, By, pj, ae, af, bc, hm, bA, eN, d, arI, s, aW, Y, Tc, ff, hl, r, nY, aF, CQ, en, g, eF, t, cm, bz, pb, adA, bN, acW, ac, eM, dB, bdP, m, fD, GF, y, rA, B, vi); #c1(ITGAV) c2(NP_001138472) c3(integrin alpha-V isoform 3 precursor) c4(56827) c5(56828, 56829, 56830, 56831, 56832, 56833) c6( ) c7(T, kh, dD, pf, ea, oe, qy, cz, fd, eq, jE, ci, IR, q, ad, El, hX, dP, eA, Tg, aE, afQ, aah, aT, cy, By, pj, ae, af, bc, hm, bA, eN, d, arI, s, aW, Y, Tc, ff, hl, r, nY, aF, CQ, en, g, eF, t, cm, bz, pb, adA, bN, acW, ac, eM, dB, bdP, m, fD, GF, y, rA, B, vi); #c1(ITGAV) c2(NP_002201) c3(integrin alpha-V isoform 1 precursor) c4(126572, 126573) c5(126574, 126575, 126576, 126577, 126578, 126579, 126580, 126581, 126582, 126583, 126584, 126585) c6( ) c7(T, kh, dD, pf, ea, oe, qy, cz, fd, eq, jE, ci, IR, g, ad, El, hX, dP, eA, Tg, aE, afQ, aah, aT, cy, By, pj, ae, af, be, hm, bA, eN, d, arI, s, aW, Y, Tc, ff, hi, r, nY, aF, CQ, en, g, eF, t, cm, bz, pb, adA, bN, acW, ac, eM, dB, bdP, m, fD, GF, y, rA, B, vi); #c1(ITGAX) c2(NP_000878) c3(integrin alpha-X isoform 2 precursor) c4(16763) c5(16764, 16765, 16766, 16767, 16768, 16769) c6( ) c7(bM, T, dD, Dw, aZ, ea, I, fd, aj, v, eq, ci, V, eA, J, er, aoH, aao, zn, cc, aT, h, ey, acQ, jj, zy, H, af, dl, kl, asp, A, je, hG, Y, ff, cr, eZ, lo, en, iV, ho, bz, fg, Wt, ck, bax, cT, iM, AH, cj, wR, mf, eo, fD, ei, y, bt, aDi); #c1(ITGB1) c2(NP_391988) c3(integrin beta-1 isoform ID precursor) c4(229031) c5(229032, 229033, 229034, 229035, 229036, 229037, 229038, 229039, 229040, 229041, 229042, 229043, 229044, 229045, 229046, 229047) c6(229048, 229049, 229050, 229051) c7(T, dD, ul, aC, aw, jh, aA, fd, n, aj, j, ci, C, eq, fr, BB, g, J, cd, ad, Jm, dP, eA, av, x, aE, cc, yt, aT, hD, vw, dL, bq, ae, af, eu, jf, d, B, aW, Y, ff, eH, eZ, r, aq, lo, kp, aF, en, g, nr, t, cM, bz, Z, op, eF, iK, ck, sS, BU, ac, eM, hc, vA, mx, hL, cj, QF, agf, dy, m, IS, oQ, XO, y, bt, X); #c1(ITGB1) c2(NP_596867) c3(integrin beta-1 isoform IA precursor) c4(234843, 234844, 234845, 234846, 234847, 234848, 234849, 234850, 234851, 234852) c5(234853, 234854, 234855, 234856, 234857, 234858, 234859, 234860, 234861, 234862, 234863, 234864, 234865, 234866, 234867, 234868, 234869, 234870, 234871, 234872, 234873, 234874, 234875, 234876, 234877, 234878, 234879, 234880, 234881, 234882, 234883, 234884, 234885, 234886, 234887, 234888, 234889, 234890, 234891, 234892, 234893, 234894, 234895, 234896, 234897, 234898, 234899, 234900, 234901, 234902, 234903, 234904, 234905, 234906, 234907, 234908, 234909, 234910, 234911, 234912, 234913, 234914, 234915, 234916, 234917, 234918, 234919, 234920, 234921, 234922, 234923, 234924, 234925, 234926, 234927, 234928) c6(234929, 234930, 234931, 234932, 234933, 234934, 234935, 234936, 234937, 234938, 234939, 234940, 234941, 234942, 234943, 234944, 234945, 234946) c7(T, dD, ul, aC, aw, jh, aA, fd, n, aj, j, ci, C, eq, fr, BB, q, J, cd, ad, Jm, dP, eA, av, x, aE, cc, yt, aT, hD, vw, dL, bq, ae, af, eu, jf, d, B, aW, Y, ff, eH, eZ, r, aq, Io, kp, aF, en, g, nr, t, cM, bz, Z, op, eF, iK, ck, sS, BU, ac, eM, hc, vA, mx, hL, cj, QF, agf, dy, m, IS, oQ, XO, y, bt, X); #c1(ITGB1BP1) c2(NP_004754) c3(integrin beta-1-binding protein 1 isoform 1) c4(149324, 149325, 149326) c5(149327, 149328, 149329, 149330, 149331, 149332, 149333, 149334, 149335, 149336, 149337, 149338, 149339, 149340, 149341, 149342) c6( ) c7(Az); #c1(ITGB1BP1) c2(NP_071729) c3(integrin beta-1-binding protein 1 isoform 2) c4(211804, 211805, 211806, 211807, 211808) c5(211809, 211810, 211811, 211812, 211813, 211814, 211815, 211816, 211817, 211818, 211819, 211820, 211821, 211822, 211823, 211824, 211825, 211826, 211827, 211828, 211829, 211830, 211831, 211832, 211833, 211834, 211835, 211836, 211837, 211838, 211839, 211840, 211841, 211842, 211843, 211844) c6( ) c7(Az); #c1(ITGB2) c2(NP_000202) c3(integrin beta-2 isoform 1 precursor) c4(4488, 4489, 4490, 4491, 4492, 4493, 4494, 4495) c5(4496, 4497, 4498, 4499, 4500, 4501, 4502, 4503, 4504, 4505, 4506, 4507, 4508, 4509, 4510, 4511, 4512, 4513, 4514, 4515, 4516, 4517, 4518, 4519, 4520, 4521, 4522, 4523, 4524, 4525, 4526, 4527, 4528, 4529, 4530, 4531, 4532, 4533, 4534, 4535, 4536, 4537, 4538, 4539, 4540, 4541, 4542, 4543, 4544, 4545, 4546, 4547, 4548, 4549, 4550, 4551, 4552, 4553, 4554) c6( ) c7(oO, bM, T, aC, fR, byb, ea, e, fd, aoj, aFV, Tz, bTC, aE, dv, dV, Ds, K, hH, pk, ass, hm, alV, up, aW, mQ, awv, pL, iT, Jr, vy, cj, Nl, IS, dD, aYZ, bfM, n, BH, aj, et, nA, uE, bfO, ai, eW, pe, kH, h, lG, ey, A, aCq, Cw, beP, cM, adz, ar, kT, W, at, va, AN, aHI, bL, Dw, dA, eR, aA, cR, fF, v, C, V, q, J, eA, zn, cF, fh, aT, cy, jj, an, sX, eu, arI, s, iU, xR, oV, Y, fO, r, lo, ahl, f, arJ, pb, ck, iM, ac, iQ, wR, fD, bt, zA, qb, dM, df, iW, jh, bS, eq, tT, hD, lQ, d, je, cH, cr, dN, aF, iV, Z, dr, aYt, oK, Km, aS, ei, y, agT, hv); #c1(ITGB2) c2(NP_001290167) c3(integrin beta-2 isoform 2) c4( ) c5(115005, 115006, 115007, 115008, 115009) c6( ) c7(oO, bM, T, aC, fR, byb, ea, e, fd, aoj, aFV, Tz, bTC, aE, dv, dV, Ds, K, hH, pk, ass, hm, alV, up, aW, mQ, awv, pL, iT, Jr, vy, cj, NI, IS, dD, aYZ, bfM, n, BH, aj, ct, nA, uE, bfO, ai, eW, pe, kH, h, lG, ey, A, aCg, Cw, beP, cM, adz, ar, kT, W, at, va, AN, aHI, bL, Dw, dA, eR, aA, cR, fF, v, C, V, g, J, eA, zn, cF, fh, aT, cy, jj, an, sX, eu, arI, s, iU, xR, oV, Y, fO, r, lo, ahl, f, arJ, pb, ck, iM, ac, iQ, wR, fD, bt, zA, qb, dM, df, iW, jh, bS, eq, tT, hD, lQ, d, je, cH, cr, dN, aF, iV, Z, dr, aYt, oK, Km, aS, ei, y, agT, hv); #c1(ITGB3) c2(NP_000203) c3(integrin beta-3 precursor) c4(4555, 4556) c5(4557, 4558, 4559, 4560, 4561, 4562, 4563, 4564, 4565, 4566, 4567, 4568, 4569, 4570, 4571, 4572) c6( ) c7(bM, T, ea, e, fd, lR, ci, dY, vV, vh, M, JT, GO, dQ, hH, DY, eN, hm, aW, mQ, vs, aB, g, eF, bw, uC, y, fT, eM, wE, bqd, sU, dW, m, pw, P, dD, xu, sQ, bTy, aw, ez, QL, aGU, zP, bTG, br, TB, ec, vC, qI, h, lG, nm, eV, DU, ux, he, bsK, MQ, fe, yq, cM, sE, kT, W, vb, qq, te, eo, Pr, abW, bL, wj, dA, eR, mr, wL, oe, aGu, jx, eX, cz, vv, v, j, bX, Wa, q, eA, rS, aT, Nc, bq, rz, qk, eu, kl, arI, iU, Y, fO, r, aDm, bEG, en, t, pb, el, bN, ck, cT, sn, c, ac, hc, mG, tz, dy, bTE, sY, kh, uq, qb, iW, vr, oR, bLo, uu, eg, atK, ad, XB, tX, dP, av, jo, adx, sj, VX, cW, aaB, ff, eZ, kD, bpA, BG, bz, bTD, es, bTF, pc, pE, ag, gZ, aS, XO, zk, gq, us); #c1(ITGB4) c2(NP_000204) c3(integrin beta-4 isoform 1 precursor) c4( ) c5(4573, 4574, 4575, 4576, 4577) c6( ) c7(T, dD, ea, e, qx, eq, ci, aRE, XM, ad, av, Db, ju, qK, aT, hP, lQ, arL, arO, d, bTH, aW, ff, en, g, as, bw, dr, ck, nB, z, cj, XG, XO, XN, it, X); #c1(ITGB4) c2(NP_001005619) c3(integrin beta-4 isoform 2 precursor) c4( ) c5(21986, 21987, 21988, 21989, 21990, 21991, 21992, 21993) c6( ) c7(T, dD, ea, e, qx, eq, ci, aRE, XM, ad, av, Db, ju, qK, aT, hP, lQ, arL, arO, d, bTH, aW, ff, en, g, as, bw, dr, ck, nB, z, cj, XG, XO, XN, it, X); #c1(ITGB4) c2(NP_001005731) c3(integrin beta-4 isoform 3 precursor) c4( ) c5(21994, 21995, 21996, 21997, 21998, 21999) c6( ) c7(T, dD, ea, e, qx, eq, ci, aRE, XM, ad, av, Db, ju, qK, aT, hP, lQ, arL, arO, d, bTH, aW, ff, en, g, as, bw, dr, ck, nB, z, cj, XG, XO, XN, it, X); #c1(ITGB4) c2(XP_006721930) c3(integrin beta-4 isoform X4) c4(294402) c5(294403) cG( ) c7(T, dD, ea, e, qx, eq, ci, aRE, XM, ad, av, Db, ju, qK, aT, hP, lQ, arL, arO, d, bTH, aW, ff, en, g, as, bw, dr, ck, nB, z, cj, XG, XO, XN, it, X); #c1(ITGB4) c2(XP_006721931) c3(integrin beta-4 isoform X5) c4(294404) c5(294405, 294406) c6( ) c7(T, dD, ea, e, qx, eq, ci, aRE, XM, ad, av, Db, ju, qK, aT, hP, lQ, arL, arO, d, bTH, aW, ff, en, g, as, bw, dr, ck, nB, z, cj, XG, XO, XN, it, X); #c1(ITGB4) c2(XP_006721933) c3(integrin beta-4 isoform X7) c4(294407) c5( ) c6( ) c7(T, dD, ea, e, qx, eq, ci, aRE, XM, ad, av, Db, ju, qK, aT, hP, lQ, arL, arO, d, bTH, aW, ff, en, g, as, bw, dr, ck, nB, z, cj, XG, XO, XN, it, X); #c1(ITGB5) c2(NP_002204) c3(integrin beta-5 precursor) c4(126586) c5(126587, 126588, 126589, 126590, 126591, 126592) c6( ) c7(Yn, dD, aW, aA, aT, hz, at, aF, eq, ci, h, pj); #c1(ITGB6) c2(NP_000879) c3(integrin beta-6 isoform a precursor) c4(16770) c5(16771, 16772, 16773, 16774, 16775, 16776, 16777, 16778, 16779, 16780) c6( ) c7(bL, F, ac, aW, oe, aCx, hl, uR, aT, fQ, ff, eA, en, Ud, alV, X, eu, asw); #c1(ITGB7) c2(NP_000880) c3(integrin beta-7 precursor) c4(16781, 16782) c5(16783, 16784, 16785, 16786, 16787, 16788, 16789, 16790, 16791, 16792, 16793, 16794, 16795, 16796, 16797, 16798) c6( ) c7(Nq, bM, Ht, Nr, iM, je, jh, kH, h, pe, fe); #c1(ITGB8) c2(NP_002205) c3(integrin beta-8 precursor) c4(126593) c5(126594, 126595, 126596, 126597, 126598, 126599, 126600, 126601, 126602, 126603, 126604) c6( ) c7(LB, eM, hP, dP, pb); #c1(ITGB8) c2(XP_011513695) c3(integrin beta-8 isoform X2) c4( ) c5(305994) c6( ) c7(LB, eM, hP, dP, pb); #c1(ITGB8) c2(XP_011513696) c3(integrin beta-8 isoform X3) c4(305995) c5( ) c6( ) c7(LB, eM, hP, dP, pb); #c1(ITGBL1) c2(NP_001258683) c3(integrin beta-like protein 1 isoform 4) c4(96328) c5(96329, 96330, 96331, 96332, 96333, 96334, 96335, 96336) c6( ) c7(bX); #c1(ITGBL1) c2(NP_001258685) c3(integrin beta-like protein 1 isoform 3) c4(96337) c5(96338, 96339, 96340, 96341, 96342, 96343, 96344, 96345, 96346, 96347, 96348, 96349) c6( ) c7(bX); #c1(ITGBL1) c2(NP_004782) c3(integrin beta-like protein 1 isoform 1 precursor) c4(149583, 149584) c5(149585, 149586, 149587, 149588, 149589, 149590, 149591, 149592) c6( ) c7(bX); #c1(ITIH1) c2(NP_002206) c3(inter-alpha-trypsin inhibitor heavy chain H1 isoform a precursor) c4(126605, 126606, 126607, 126608) c5(126609, 126610, 126611, 126612, 126613, 126614, 126615, 126616, 126617, 126618, 126619, 126620, 126621, 126622, 126623, 126624, 126625, 126626, 126627, 126628, 126629, 126630, 126631, 126632) c6( ) c7(T, bO, aT, aq, bK, ci, bz); #c1(ITIH2) c2(NP_002207) c3(inter-alpha-trypsin inhibitor heavy chain H2 precursor) c4(126633) c5(126634, 126635, 126636, 126637, 126638, 126639) c6( ) c7(aW, t, aT); #c1(ITIH3) c2(NP_002208) c3(inter-alpha-trypsin inhibitor heavy chain H3 preproprotein) c4(126640, 126641, 126642) c5(126643, 126644, 126645, 126646, 126647, 126648, 126649, 126650, 126651, 126652, 126653, 126654, 126655, 126656, 126657, 126658, 126659, 126660, 126661, 126662, 126663, 126664, 126665, 126666) c6( ) c7(aw, gl, bS, bK, ci, he, B); #c1(ITIH3) c2(XP_006713193) c3(inter-alpha-trypsin inhibitor heavy chain H3 isoform X3) c4(287058) c5( ) c6( ) c7(aw, gl, bS, bK, ci, he, B); #c1(ITIH4) c2(NP_001159921) c3(inter-alpha-trypsin inhibitor heavy chain H4 isoform 2 precursor) c4(64965, 64966, 64967) c5(64968, 64969, 64970, 64971, 64972, 64973, 64974, 64975, 64976, 64977, 64978, 64979, 64980, 64981, 64982, 64983, 64984, 64985) c6( ) c7(DS, oO, Ke, gA, ze, EA, eW, hb, aT, h, bK, K, zy, CB, afu, lx, cH, aW, aCH, lo, aoD, beP, kk, aoG, as, cm, asE, ck, cl, iQ, NL, PI, EY, hh); #c1(ITIH4) c2(NP_002209) c3(inter-alpha-trypsin inhibitor heavy chain H4 isoform 1 precursor) c4(126667, 126668) c5(126669, 126670, 126671, 126672, 126673, 126674, 126675, 126676, 126677, 126678, 126679, 126680) c6( ) c7(DS, oO, Ke, gA, ze, EA, eW, hb, aT, h, bK, K, zy, CB, afu, lx, cH, aW, aCH, lo, aoD, beP, kk, aoG, as, cm, asE, ck, cl, iQ, NL, PI, EY, hh); #c1(ITIH5) c2(NP_001001851) c3(inter-alpha-trypsin inhibitor heavy chain H5 isoform 3 precursor) c4(19027, 19028) c5(19029, 19030, 19031, 19032, 19033, 19034, 19035, 19036, 19037, 19038, 19039, 19040) c6( ) c7(nB, qt, aW, eL, aw, aT, n, dL, v, ci, AO, qk); #c1(ITIH5) c2(NP_085046) c3(inter-alpha-trypsin inhibitor heavy chain H5 isoform 1 precursor) c4(219193, 219194) c5(219195, 219196, 219197, 219198, 219199, 219200, 219201, 219202, 219203, 219204, 219205, 219206) c6( ) c7(nB, qt, aW, eL, aw, aT, n, dL, v, ci, AO, qk); #c1(ITIH5) c2(NP_116206) c3(inter-alpha-trypsin inhibitor heavy chain H5 isoform 2) c4(225752) c5(225753, 225754, 225755, 225756, 225757, 225758) c6( ) c7(nB, qt, aW, eL, aw, aT, n, dL, v, ci, AO, qk); #c1(ITK) c2(NP_005537) c3(tyrosine-protein kinase ITK/TSK) c4(157234) c5(157235, 157236, 157237, 157238, 157239, 157240) c6( ) c7(bM, T, aC, Mb, jh, aA, bB, n, wV, fr, ci, pz, AO, g, ad, eA, zn, iu, asG, hd, aE, apJ, aCV, aT, h, dL, ey, K, rE, on, ae, eL, na, uQ, bTJ, bTI, nO, HI, aW, Y, oV, r, nY, aq, Qm, kp, aF, g, cl, t, fq, bz, LB, kP, eM, nB, bE, X, oh, np, Hb, m, adg, it, B, cn, gc); #c1(ITLN1) c2(NP_060095) c3(intelectin-1 precursor) c4(194099) c5(194100, 194101, 194102, 194103, 194104, 194105) c6( ) c7(bL, bM, T, kl, ib, aA, fe, aj, v, aF, ci, K); #c1(ITLN2) c2(XP_011507512) c3(intelectin-2 isoform X1) c4(297461) c5(297462, 297463, 297464, 297465, 297466, 297467) c6( ) c7(bL, aj); #c1(ITM2A) c2(NP_001165052) c3(integral membrane protein 2A isoform 2) c4(67262) c5(67263, 67264, 67265, 67266, 67267, 67268) c6( ) c7(hD, bX); #c1(ITM2A) c2(NP_004858) c3(integral membrane protein 2A isoform 1) c4(150371) c5(150372, 150373, 150374, 150375, 150376, 150377) c6( ) c7(hD, bX); #c1(ITM2B) c2(NP_068839) c3(integral membrane protein 28) c4(210873) c5(210874, 210875, 210876, 210877, 210878, 210879) c6( ) c7(axS, cZ, tj, IR, mr, aW, bW, aaI, nx, I, aT, U, cz, R, dd, H, on, af, acM, ad, L); #c1(ITM2C) c2(NP_001012532) c3(integral membrane protein 2C isoform 3) c4(25080) c5(25081, 25082, 25083, 25084, 25085, 25086) c6( ) c7(af, ac, bTK); #c1(ITM2C) c2(NP_001012534) c3(integral membrane protein 2C isoform 2) c4(25094) c5(25095, 25096, 25097, 25098, 25099, 25100) c6( ) c7(af, ac, bTK); #c1(ITM2C) c2(NP_001274170) c3(integral membrane protein 2C isoform 1) c4(106087, 106088) c5(106089, 106090, 106091, 106092, 106093, 106094, 106095, 106096, 106097, 106098, 106099, 106100) c6( ) c7(af, ac, bTK); #c1(ITPA) c2(NP_001254552) c3(inosine triphosphate pyrophosphatase isoform c) c4(94667) c5(94668, 94669, 94670, 94671, 94672, 94673) c6( ) c7(gV, bTL, al, jx, x, F, fS, oW, h, DU, hG, eZ, ge, fe, S, iV, gk, mO, hA, dc, k, y, ra, aeA); #c1(ITPA) c2(NP_258412) c3(inosine triphosphate pyrophosphatase isoform a) c4(228697) c5(228698, 228699, 228700, 228701, 228702, 228703) c6( ) c7(gV, bTL, al, jx, x, F, fS, oW, h, DU, hG, eZ, ge, fe, S, iV, gk, mO, hA, dc, k, y, ra, aeA); #c1(ITPA) c2(NP_852470) c3(inosine triphosphate pyrophosphatase isoform b) c4(255005) c5(255006, 255007, 255008, 255009, 255010, 255011) c6( ) c7(gV, bTL, al, jx, x, F, fS, oW, h, DU, hG, eZ, ge, fe, S, iV, gk, mO, hA, dc, k, y, ra, aeA); #c1(ITPK1) c2(NP_001136065) c3(inositol-tetrakisphosphate 1-kinase isoform a) c4(54188, 54189, 54190, 54191) c5(54192, 54193, 54194, 54195, 54196, 54197, 54198, 54199, 54200, 54201, 54202, 54203, 54204, 54205, 54206, 54207, 54208, 54209, 54210, 54211, 54212, 54213) c6( ) c7(lp, dy, ac); #c1(ITPK1) c2(NP_001136066) c3(inositol-tetrakisphosphate 1-kinase isoform b) c4(54214) c5(54215, 54216, 54217, 54218, 54219, 54220, 54221, 54222, 54223, 54224, 54225, 54226, 54227, 54228, 54229, 54230) c6( ) c7(lp, dy, ac); #c1(ITPKA) c2(NP_002211) c3(inositol-trisphosphate 3-kinase A) c4(126681) c5(126682, 126683, 126684, 126685, 126686, 126687) c6( ) c7(T, ff, en); #c1(ITPKC) c2(XP_006723467) c3(inositol-trisphosphate 3-kinase C isoform X1) c4(295214) c5(295215, 295216, 295217, 295218, 295219, 295220) c6( ) c7(od, if, lf, aS, qN, bTM, cn); #c1(ITPR1) c2(NP_001093422) c3(inositol 1,4,5-trisphosphate receptor type 1 isoform 1) c4(40265, 40266) c5(40267, 40268, 40269, 40270, 40271, 40272, 40273, 40274, 40275, 40276, 40277, 40278) c6( ) c7(bM, eX, fN, rf, uZ, cd, ad, lG, eV, dL, bK, K, ae, bmo, eL, xs, uY, EH, bTN, cm, cM, bTO, rR, ky, kB, U); #c1(ITPR1) c2(NP_001161744) c3(inositol 1,4,5-trisphosphate receptor type 1 isoform 3) c4(65902) c5(65903, 65904, 65905, 65906, 65907, 65908, 65909, 65910, 65911, 65912) c6( ) c7(bM, eX, fN, rf, uZ, cd, ad, lG, eV, dL, bK, K, ae, bmo, eL, xs, uY, EH, bTN, cm, cM, bTO, rR, ky, kB, U); #c1(ITPR1) c2(NP_002213) c3(inositol 1,4,5-trisphosphate receptor type 1 isoform 2) c4(126688) c5(126689, 126690, 126691, 126692, 126693, 126694, 126695, 126696, 126697, 126698, 126699, 126700) c6( ) c7(bM, eX, fN, rf, uZ, cd, ad, lG, eV, dL, bK, K, ae, bmo, eL, xs, uY, EH, bTN, cm, cM, bTO, rR, ky, kB, U); #c1(ITPR1) c2(XP_011531985) c3(inositol 1,4,5-trisphosphate receptor type 1 isoform X2) c4(328014, 328015, 328016) c5(328017, 328018, 328019, 328020, 328021, 328022, 328023, 328024, 328025, 328026, 328027, 328028, 328029, 328030, 328031, 328032, 328033) c6( ) c7(bM, eX, fN, rf, uZ, cd, ad, lG, eV, dL, bK, K, ae, bmo, eL, xs, uY, EH, bTN, cm, cM, bTO, rR, ky, kB, U); #c1(ITPR1) c2(XP_011531986) c3(inositol 1,4,5-trisphosphate receptor type 1 isoform X3) c4( ) c5(328034) c6( ) c7(bM, eX, fN, rf, uZ, cd, ad, lG, eV, dL, bK, K, ae, bmo, eL, xs, uY, EH, bTN, cm, cM, bTO, rR, ky, kB, U); #c1(ITPR1) c2(XP_011531992) c3(inositol 1,4,5-trisphosphate receptor type 1 isoform X12) c4(328035) c5( ) c6( ) c7(bM, eX, fN, rf, uZ, cd, ad, lG, eV, dL, bK, K, ae, bmo, eL, xs, uY, EH, bTN, cm, cM, bTO, rR, ky, kB, U); #c1(ITPR2) c2(NP_002214) c3(inositol 1,4,5-trisphosphate receptor type 2) c4(126701, 126702) c5(126703, 126704, 126705, 126706, 126707, 126708, 126709, 126710, 126711, 126712, 126713, 126714) c6( ) c7(c, oe, dL, bK, Vd, fr, cm, eL, bmo, y); #c1(ITPR3) c2(NP_002215) c3(inositol 1,4,5-trisphosphate receptor type 3) c4(126715) c5(126716, 126717, 126718, 126719, 126720, 126721) c6( ) c7(rR, A, kB, dH, xs, eZ, aA, hD, uY, dL, bK, K, v, cm, eL, cd, y); #c1(ITSN1) c2(NP_001001132) c3(intersectin-1 isoform ITSN-s) c4( ) c5(18135, 18136, 18137, 18138, 18139, 18140) c6( ) c7(cm, f, T, af, eA); #c1(ITSN1) c2(NP_003015) c3(intersectin-1 isoform ITSN-l) c4(134439, 134440, 134441, 134442) c5(134443, 134444, 134445, 134446, 134447, 134448, 134449, 134450, 134451, 134452, 134453, 134454, 134455, 134456, 134457, 134458, 134459, 134460, 134461, 134462, 134463, 134464, 134465, 134466) c6( ) c7(cm, f, T, af, eA); #c1(ITSN1) c2(XP_005261083) c3(intersectin-1 isoform X6) c4(277134, 277135, 277136, 277137, 277138) c5(277139, 277140, 277141, 277142, 277143, 277144, 277145, 277146, 277147, 277148, 277149, 277150, 277151, 277152, 277153, 277154, 277155, 277156, 277157, 277158, 277159, 277160, 277161, 277162, 277163, 277164, 277165, 277166, 277167, 277168, 277169, 277170, 277171, 277172, 277173, 277174, 277175, 277176, 277177, 277178, 277179) c6( ) c7(cm, f, T, af, eA); #c1(ITSN1) c2(XP_005261088) c3(intersectin-1 isoform X3) c4(277180, 277181, 277182) c5( ) c6( ) c7(cm, f, T, af, eA); #c1(ITSN1) c2(XP_011527993) c3(intersectin-1 isoform X2) c4(323052) c5( ) c6( ) c7(cm, f, T, af, eA); #c1(ITSN1) c2(XP_011527994) c3(intersectin-1 isoform X4) c4(323053) c5(323054, 323055, 323056, 323057, 323058, 323059, 323060, 323061, 323062, 323063, 323064, 323065) c6( ) c7(cm, f, T, af, eA); #c1(ITSN1) c2(XP_011527995) c3(intersectin-1 isoform X5) c4(323066, 323067, 323068) c5(323069, 323070, 323071, 323072, 323073, 323074, 323075, 323076, 323077, 323078, 323079, 323080, 323081, 323082, 323083, 323084, 323085, 323086, 323087) c6( ) c7(cm, f, T, af, eA); #c1(ITSN2) c2(NP_006268) c3(intersectin-2 isoform 1) c4(163443) c5(163444, 163445, 163446, 163447, 163448, 163449, 163450) c6( ) c7(fN, an); #c1(ITSN2) c2(NP_062541) c3(intersectin-2 isoform 3) c4(201889, 201890) c5(201891, 201892, 201893, 201894, 201895, 201896, 201897, 201898, 201899, 201900) c6( ) c7(fN, an); #c1(ITSN2) c2(NP_671494) c3(intersectin-2 isoform 2) c4(242039) c5(242040, 242041, 242042, 242043, 242044, 242045, 242046, 242047, 242048, 242049, 242050) c6( ) c7(fN, an); #c1(IVD) c2(NP_001152980) c3(isovaleryl-CoA dehydrogenase, mitochondrial isoform 2 precursor) c4(60292) c5(60293, 60294, 60295, 60296, 60297, 60298) c6( ) c7(h, auu, ac); #c1(IVD) c2(NP_002216) c3(isovaleryl-CoA dehydrogenase, mitochondrial isoform 1 precursor) c4(126722, 126723) c5(126724, 126725, 126726, 126727, 126728, 126729, 126730, 126731, 126732, 126733, 126734, 126735) c6( ) c7(h, auu, ac); #c1(IVL) c2(XP_006711363) c3(involucrin isoform X1) c4(285939, 285940) c5(285941, 285942, 285943, 285944, 285945, 285946, 285947, 285948, 285949, 285950, 285951, 285952, 285953, 285954, 285955, 285956) c6( ) c7(aAW, T, sS, Jr, Kv, hk, eE, ht, ff, cr, Nl, h, Kh, Xk, hu, en, qN, iK, akG, bTP); #c1(IVNS1ABP) c2(NP_006460) c3(influenza virus NS1A-binding protein) c4(165381, 165382) c5(165383, 165384, 165385, 165386, 165387, 165388, 165389, 165390, 165391, 165392, 165393, 165394, 165395) c6( ) c7(bL, Dw, NK, T, bpn, jx, aj, v, ai, J, ad, ds, cU, vd, atJ, hl, aGQ, lo, AH, Uq, aiM, rH, eQ, y, Ro); #c1(IVNS1ABP) c2(XP_005244900) c3(influenza virus NS1A-binding protein isoform X4) c4( ) c5(266156, 266157, 266158, 266159, 266160) c6( ) c7(bL, Dw, NK, T, bpn, jx, aj, v, ai, J, ad, ds, cU, vd, atJ, hl, aGQ, lo, AH, Uq, aiM, rH, eQ, y, Ro); #c1(IVNS1ABP) c2(XP_011507381) c3(influenza virus NS1A-binding protein isoform X1) c4(297242) c5( ) cG( ) c7(bL, Dw, NK, T, bpn, jx, aj, v, ai, J, ad, ds, cU, vd, atJ, hl, aGQ, lo, AH, Uq, aiM, rH, eQ, y, Ro); #c1(IVNS1ABP) c2(XP_011507382) c3(influenza virus NS1A-binding protein isoform X2) c4(297243) c5(297244, 297245, 297246, 297247, 297248, 297249) c6( ) c7(bL, Dw, NK, T, bpn, jx, aj, v, ai, J, ad, ds, cU, vd, atJ, hl, aGQ, lo, AH, Uq, aiM, rH, eQ, y, Ro); #c1(IYD) c2(NP_001158166) c3(iodotyrosine dehalogenase 1 isoform 1) c4(63239, 63240, 63241) c5(63242, 63243, 63244, 63245, 63246, 63247, 63248, 63249, 63250, 63251, 63252, 63253, 63254, 63255, 63256, 63257, 63258, 63259) c6( ) c7(qJ, Vp, hd, ac, nB, bzb, hD, ww, gT, aQy, bTQ); #c1(IYD) c2(NP_001158167) c3(iodotyrosine dehalogenase 1 isoform 3) c4(63260) c5(63261, 63262, 63263, 63264, 63265, 63266) c6( ) c7(qJ, Vp, hd, ac, nB, bzb, hD, ww, gT, aQy, bTQ); #c1(IYD) c2(NP_981932) c3(iodotyrosine dehalogenase 1 isoform 2) c4(263170) c5(263171, 263172, 263173, 263174, 263175, 263176) c6( ) c7(qJ, Vp, hd, ac, nB, bzb, hD, ww, gT, aQy, bTQ); #c1(IZUMO1) c2(XP_005258850) c3(izumo sperm-egg fusion protein 1 isoform X2) c4( ) c5(275836) c6( ) c7(bTR, gU, ND); #c1(IZUMO1) c2(XP_011525115) c3(izumo sperm-egg fusion protein 1 isoform X1) c4(319536) c5(319537, 319538, 319539, 319540, 319541) c6( ) c7(bTR, gU, ND); #c1(JADE1) c2(NP_001274366) c3(protein Jade-1 isoform 3) c4(106285) c5(106286, 106287, 106288, 106289, 106290, 106291) c6( ) c7(es, iA, dE, go, dy, fr, VB); #c1(JADE1) c2(NP_001274368) c3(protein Jade-1 isoform 1) c4(106305, 106306, 106307, 106308, 106309, 106310, 106311) c5(106312, 106313, 106314, 106315, 106316, 106317, 106318, 106319, 106320, 106321, 106322, 106323, 106324, 106325, 106326, 106327, 106328, 106329, 106330, 106331, 106332) c6( ) c7(es, iA, dE, go, dy, fr, VB); #c1(JADE1) c2(NP_001274370) c3(protein Jade-1 isoform 2) c4(106333) c5(106334, 106335, 106336, 106337, 106338, 106339, 106340, 106341, 106342, 106343, 106344, 106345, 106346, 106347, 106348, 106349, 106350, 106351, 106352, 106353, 106354, 106355, 106356, 106357, 106358, 106359, 106360, 106361, 106362, 106363, 106364, 106365, 106366, 106367, 106368, 106369, 106370, 106371, 106372, 106373, 106374) c6( ) c7(es, iA, dE, go, dy, fr, VB); #c1(JADE1) c2(XP_011530562) c3(protein Jade-1 isoform X2) c4(326485) c5( ) c6( ) c7(es, iA, dE, go, dy, fr, VB); #c1(JADE2) c2(NP_001276914) c3(protein Jade-2 isoform 2) c4(108610, 108611) c5(108612, 108613, 108614, 108615, 108616, 108617) c6( ) c7(v, cd); #c1(JADE2) c2(XP_011541595) c3(protein Jade-2 isoform X2) c4(340133) c5(340134, 340135, 340136, 340137, 340138, 340139) c6( ) c7(v, cd); #c1(JADE2) c2(XP_011541596) c3(protein Jade-2 isoform X1) c4(340140) c5(340141, 340142, 340143, 340144, 340145, 340146, 340147, 340148, 340149, 340150, 340151, 340152, 340153, 340154, 340155, 340156, 340157, 340158) c6( ) c7(v, cd); #c1(JAG1) c2(NP_000205) c3(protein jagged-1 precursor) c4(4578, 4579) c5(4580, 4581, 4582, 4583, 4584, 4585, 4586, 4587, 4588, 4589, 4590, 4591) c6( ) c7(T, aC, al, fd, ci, bTU, Hr, ip, aE, anI, iv, Qe, ajT, JI, aW, az, hl, Au, g, hJ, cm, bw, zV, iT, acw, cj, m, bga, n, aj, aLI, md, afo, zw, bTS, Jn, asT, bmF, Cw, blP, ack, yq, cM, bD, B, jx, aA, j, V, q, J, er, eA, Mg, qK, aT, aaw, jj, ae, af, bA, Y, r, lo, t, iK, ck, bLr, beH, beJ, gX, dy, bt, hS, bTT, rl, jh, ad, hX, Jm, av, py, MS, gj, d, rM, aF, Fq, bz, dr, LB, gk, adh, IM, y, kS, Ex, BA); #c1(JAG2) c2(NP_002217) c3(protein jagged-2 isoform a precursor) c4(126736) c5(126737, 126738, 126739, 126740, 126741, 126742) c6( ) c7(T, wu, fd, ci, zU, Qp, eW, Na, nX, aT, rO, Nc, wm, nJ, aOX, d, s, vT, aW, ff, Az, en, iP, ck, apM, ac, anx, iu, BA); #c1(JAG2) c2(NP_660142) c3(protein jagged-2 isoform b precursor) c4(240381) c5(240382, 240383, 240384, 240385, 240386, 240387) c6( ) c7(T, wu, fd, ci, zU, Qp, eW, Na, nX, aT, rO, Nc, wm, nJ, aOX, d, s, vT, aW, ff, Az, en, iP, ck, apM, ac, anx, iu, BA); #c1(JAGN1) c2(NP_115881) c3(protein jagunal homolog 1) c4(224450, 224451) c5(224452, 224453, 224454, 224455, 224456, 224457, 224458, 224459, 224460, 224461, 224462, 224463) c6( ) c7(gV, afK); #c1(JAK2) c2(NP_004963) c3(tyrosine-protein kinase JAK2) c4(151501, 151502) c5(151503, 151504, 151505, 151506, 151507, 151508, 151509, 151510, 151511, 151512, 151513, 151514, 151515, 151516, 151517, 151518) c6( ) c7(lD, bM, T, os, aC, bTV, Js, ea, if, fd, bB, ci, ip, x, bpI, Bc, fm, Ds, K, hH, cp, ly, bpR, up, pr, aW, az, hl, mQ, HA, vs, as, MV, Fu, cm, bw, eM, iT, wE, oy, cj, wx, k, m, IS, aeA, P, Ro, aiu, dD, n, oY, fr, qN, bkU, br, ft, kH, jy, eV, hn, DU, ox, ux, aBI, Nr, OV, mR, A, sq, fe, po, pm, cM, apX, lx, yR, bTX, dB, se, kz, nL, pg, B, Jo, bL, Dw, jv, fM, dA, kA, eX, aA, sM, ol, bTW, j, v, aqf, V, q, bTY, eA, oT, dn, aT, cy, dz, bTZ, ae, af, VC, iU, oV, Y, r, gm, en, hf, t, f, iK, ck, ac, bt, gV, ow, df, jh, oZ, eq, jE, hF, ad, iC, qV, oW, iY, IQ, adx, nJ, pq, DI, d, UT, hG, et, ff, cr, kD, aF, iV, bz, oK, bUa, Nq, age, eU, pc, Ew, bE, ag, aKC, gZ, aS, IC, X, sH, Tc); #c1(JAK3) c2(XP_005259953) c3(tyrosine-protein kinase JAKS isoform X2) c4( ) c5(276320, 276321, 276322) c6( ) c7(oO, bM, T, dA, dK, e, if, jh, fd, bB, oY, aGx, ci, qN, PJ, hF, ip, x, no, kH, aT, vw, dz, dL, ey, K, iY, ji, pq, bAE, je, anP, iU, aW, Y, oV, CM, fe, aGy, aF, jg, jT, f, bw, ck, CU, iM, Dy, iT, bE, azK, cj, at, pg, CO, k, bt, zA, Cp); #c1(JAK3) c2(XP_006722808) c3(tyrosine-protein kinase JAK3 isoform X1) c4(294875, 294876) c5(294877, 294878, 294879, 294880, 294881, 294882, 294883, 294884, 294885, 294886, 294887, 294888, 294889) c6( ) c7(oO, bM, T, dA, dK, e, if, jh, fd, bB, oY, aGx, ci, qN, PJ, hF, ip, x, no, kH, aT, vw, dz, dL, ey, K, iY, ji, pq, bAE, je, anP, iU, aW, Y, oV, CM, fe, aGy, aF, jg, jT, f, bw, ck, CU, iM, Dy, iT, bE, azK, cj, at, pg, CO, k, bt, zA, Cp); #c1(JAK3) c2(XP_011526292) c3(tyrosine-protein kinase JAK3 isoform X3) c4(320559) c5( ) c6( ) c7(oO, bM, T, dA, dK, e, if, jh, fd, bB, oY, aGx, ci, qN, PJ, hF, ip, x, no, kH, aT, vw, dz, dL, ey, K, iY, ji, pq, bAE, je, anP, iU, aW, Y, oV, CM, fe, aGy, aF, jg, jT, f, bw, ck, CU, iM, Dy, iT, bE, azK, cj, at, pg, CO, k, bt, zA, Cp); #c1(JAK3) c2(XP_011526293) c3(tyrosine-protein kinase JAK3 isoform X4) c4( ) c5(320560, 320561, 320562, 320563, 320564, 320565) c6( ) c7(oO, bM, T, dA, dK, e, if, jh, fd, bB, oY, aGx, ci, qN, PJ, hF, ip, x, no, kH, aT, vw, dz, dL, ey, K, iY, ji, pq, bAE, je, anP, iU, aW, Y, oV, CM, fe, aGy, aF, jg, jT, f, bw, ck, CU, iM, Dy, iT, bE, azK, cj, at, pg, CO, k, bt, zA, Cp); #c1(JAKMIP1) c2(NP_001092903) c3(janus kinase and microtubule-interacting protein 1 isoform 1) c4(39750, 39751) c5(39752, 39753, 39754, 39755, 39756, 39757, 39758, 39759, 39760, 39761, 39762, 39763) c6( ) c7(oe, bN); #c1(JAKMIP2) c2(NP_001257863) c3(janus kinase and microtubule-interacting protein 2 isoform 2) c4(95676, 95677) c5(95678, 95679, 95680, 95681, 95682, 95683, 95684, 95685, 95686, 95687, 95688, 95689) c6( ) c7(nJ, T, it, hp, Y); #c1(JAKMIP2) c2(NP_001269211) c3(janus kinase and microtubule-interacting protein 2 isoform 4) c4(100794) c5(100795, 100796, 100797, 100798, 100799, 100800) c6( ) c7(nJ, T, it, hp, Y); #c1(JAKMIP2) c2(NP_055605) c3(janus kinase and microtubule-interacting protein 2 isoform 3) c4(182199) c5(182200, 182201, 182202, 182203, 182204, 182205) c6( ) c7(nJ, T, it, hp, Y); #c1(JAKMIP3) c2(XP_011537986) c3(janus kinase and microtubule-interacting protein 3 isoform X1) c4(335521) c5(335522, 335523, 335524, 335525, 335526, 335527) c6( ) c7(ac); #c1(JAM2) c2(NP_001257336) c3(junctional adhesion molecule B isoform 2 precursor) c4(95209) c5(95210, 95211, 95212, 95213, 95214, 95215) c6( ) c7(oe, eA); #c1(JAM2) c2(NP_001257337) c3(junctional adhesion molecule B isoform 3 precursor) c4(95216) c5(95217, 95218, 95219, 95220, 95221, 95222) c6( ) c7(oe, eA); #c1(JAM2) c2(NP_067042) c3(junctional adhesion molecule B isoform 1 precursor) c4(208573, 208574) c5(208575, 208576, 208577, 208578, 208579, 208580, 208581, 208582, 208583, 208584, 208585, 208586) c6( ) c7(oe, eA); #c1(JAM3) c2(NP_001192258) c3(junctional adhesion molecule C isoform 2 precursor) c4(82160) c5(82161, 82162, 82163, 82164, 82165, 82166) c6( ) c7(bUb, fM, dD, eM, sw, Y, My, fO, acA, n, bK, m, fD, eq, eA, t, ai, y); #c1(JAM3) c2(NP_116190) c3(junctional adhesion molecule C isoform 1 precursor) c4(225652, 225653) c5(225654, 225655, 225656, 225657, 225658, 225659, 225660, 225661, 225662, 225663, 225664, 225665) c6( ) c7(bUb, fM, dD, eM, sw, Y, My, fO, acA, n, bK, m, fD, eq, eA, t, ai, y); #c1(JARID2) c2(NP_001253969) c3(protein Jumonji isoform 2) c4( ) c5(94316, 94317, 94318, 94319, 94320) c6( ) c7(bv, T, VX, rz, Ip, kH, cm, amj, pg, K, nA, bD, hH, cd, vQ); #c1(JARID2) c2(NP_004964) c3(protein Jumonji isoform 1) c4(151519, 151520) c5(151521, 151522, 151523, 151524, 151525, 151526, 151527, 151528, 151529, 151530, 151531, 151532, 151533, 151534) c6( ) c7(bv, T, VX, rz, Ip, kH, cm, amj, pg, K, nA, bD, hH, cd, vQ); #c1(JARID2) c2(XP_011512881) c3(protein Jumonji isoform X2) c4(304248) c5(304249) c6( ) c7(bv, T, VX, rz, Ip, kH, cm, amj, pg, K, nA, bD, hH, cd, vQ); #c1(JARID2) c2(XP_011512885) c3(protein Jumonji isoform X5) c4(304250) c5(304251, 304252, 304253, 304254, 304255, 304256) c6( ) c7(bv, T, VX, rz, Ip, kH, cm, amj, pg, K, nA, bD, hH, cd, vQ); #c1(JARID2) c2(XP_011512886) c3(protein Jumonji isoform X4) c4( ) c5(304257, 304258, 304259, 304260) c6( ) c7(bv, T, VX, rz, Ip, kH, cm, amj, pg, K, nA, bD, hH, cd, vQ); #c1(JAZF1) c2(NP_778231) c3(juxtaposed with another zinc finger protein 1) c4(251455) c5(251456, 251457, 251458, 251459, 251460, 251461) c6( ) c7(bL, T, oe, EQ, bB, aj, v, q, J, ad, h, ae, A, eZ, r, cl, aEm, t, pb, Qf, bE, hL, m, Th); #c1(JDP2) c2(XP_005267389) c3(jun dimerization protein 2 isoform X1) c4(280947, 280948) c5(280949, 280950, 280951, 280952, 280953, 280954, 280955, 280956, 280957, 280958, 280959, 280960, 280961, 280962, 280963, 280964, 280965) c6( ) c7(ck, aE, jh, y, bt, B, us); #c1(JDP2) c2(XP_006720095) c3(jun dimerization protein 2 isoform X2) c4(293240) c5(293241, 293242, 293243, 293244, 293245, 293246, 293247, 293248, 293249, 293250) c6( ) c7(ck, aE, jh, y, bt, B, us); #c1(JDP2) c2(XP_011534733) c3(jun dimerization protein 2 isoform X3) c4( ) c5(331199) c6( ) c7(ck, aE, jh, y, bt, B, us); #c1(JMJD1C) c2(NP_001269877) c3(probable JmjC domain-containing histone demethylation protein 2C isoform c) c4(103003) c5(103004, 103005, 103006, 103007, 103008, 103009, 103010, 103011, 103012, 103013, 103014, 103015) c6( ) c7(ck, x, T, aW, qK, fc, aT, aA, aF, bqS, k, afW, ei, bN); #c1(JMJD1C) c2(NP_116165) c3(probable JmjC domain-containing histone demethylation protein 2C isoform a) c4(225492) c5(225493, 225494, 225495, 225496, 225497, 225498, 225499, 225500) c6( ) c7(ck, x, T, aW, qK, fc, aT, aA, aF, bqS, k, afW, ei, bN); #c1(JMJD1C) c2(XP_011537807) c3(probable JmjC domain-containing histone demethylation protein 2C isoform X4) c4(335322) c5( ) c6( ) c7(ck, x, T, aW, qK, fc, aT, aA, aF, bqS, k, afW, ei, bN); #c1(JMJD1C) c2(XP_011537810) c3(probable JmjC domain-containing histone demethylation protein 2C isoform X7) c4(335323) c5(335324, 335325, 335326, 335327, 335328) c6( ) c7(ck, x, T, aW, qK, fc, aT, aA, aF, bqS, k, afW, ei, bN); #c1(JMJD6) c2(NP_001074930) c3(bifunctional arginine demethylase and lysyl-hydroxylase JMJD6 isoform 1) c4(37134, 37135) c5(37136, 37137, 37138, 37139, 37140, 37141) c6( ) c7(T, dB, aW, bE, aT, bB, uz, qG, afq, g, iu, an); #c1(JMJD6) c2(NP_055982) c3(bifunctional arginine demethylase and lysyl-hydroxylase JMJD6 isoform 2) c4(184864) c5(184865, 184866, 184867, 184868, 184869, 184870, 184871, 184872, 184873, 184874, 184875, 184876) c6( ) c7(T, dB, aW, bE, aT, bB, uz, qG, afq, g, iu, ao); #c1(JMY) c2(NP_689618) c3(junction-mediating and -regulatory protein) c4(243296, 243297) c5(243298, 243299, 243300, 243301, 243302, 243303, 243304, 243305, 243306, 243307, 243308, 243309) c6( ) c7(mR, K, aT); #c1(JPH2) c2(NP_787109) c3(junctophilin-2 isoform 2) c4( ) c5(252097, 252098, 252099, 252100, 252101, 252102) c6( ) c7(gZ, vc, cc, bUc); #c1(JPH2) c2(XP_006723895) c3(junctophilin-2 isoform X1) c4(295433, 295434) c5(295435, 295436, 295437, 295438, 295439, 295440) c6( ) c7(gZ, vc, cc, bUc); #c1(JPH3) c2(NP_001258533) c3(junctophilin-3 isoform 2) c4(96111) c5(96112, 96113, 96114, 96115, 96116, 96117, 96118) c6( ) c7(bL, dD, ea, aw, cz, v, j, eq, ec, Ak, ZU, jy, yZ, ZM, be, bUd, Pw, ajG, xw, dR, rR, ac, c, kB, Ei, U, dy, aan); #c1(JPH3) c2(NP_065706) c3(junctophilin-3 isoform 1) c4(205011) c5(205012, 205013, 205014, 205015, 205016, 205017, 205018) c6( ) c7(bL, dD, ea, aw, cz, v, j, eq, ec, Ak, ZU, jy, yZ, ZM, be, bUd, Pw, ajG, xw, dR, rR, ac, c, kB, Fi, U, dy, aan); #c1(JPH3) c2(XP_006721300) c3(junctophilin-3 isoform X1) c4(293933) c5(293934, 293935, 293936, 293937, 293938) c6( ) c7(bL, dD, ea, aw, cz, v, j, eq, ec, Ak, ZU, jy, yZ, ZM, be, bUd, Pw, ajG, xw, dR, rR, ac, c, kB, Fi, U, dy, aan); #c1(JPH4) c2(NP_115828) c3(junctophilin-4) c4(224165, 224166) c5(224167, 224168, 224169, 224170, 224171, 224172, 224173, 224174, 224175, 224176, 224177, 224178, 224179, 224180, 224181, 224182, 224183, 224184, 224185, 224186) c6( ) c7(Ye); #c1(JRK) c2(NP_001070995) c3(jerky protein homolog isoform b) c4(35257) c5(35258, 35259, 35260, 35261, 35262, 35263) c6( ) c7(GZ, ha, HN, iD, hg, il); #c1(JRK) c2(NP_003715) c3(jerky protein homolog isoform a) c4(140376) c5(140377, 140378, 140379, 140380, 140381, 140382) c6( ) c7(GZ, ha, HN, iD, hg, il); #c1(JSRP1) c2(NP_653217) c3(junctional sarcoplasmic reticulum protein 1) c4(239143) c5(239144, 239145, 239146, 239147, 239148, 239149) c6( ) c7(hD, IW, kl, Ak); #c1(JTB) c2(NP_006685) c3(protein JTB precursor) c4(167135, 167136) c5(167137, 167138, 167139, 167140, 167141, 167142, 167143, 167144, 167145, 167146, 167147, 167148, 167149, 167150, 167151, 167152, 167153, 167154, 167155, 167156) c6( ) c7(gh, NK, T, cR, n, Sv, ci, mC, ad, hX, sN, aT, cy, ae, OV, aW, Y, eZ, kT, bE, cj, fL, y, B); #c1(JUNB) c2(NP_002220) c3(transcription factor jun-B) c4(126743) c5(126744, 126745, 126746, 126747, 126748, 126749, 126750) c6( ) c7(bM, T, if, e, hE, bB, ci, x, aE, K, eL, aa, eG, aW, az, eE, eM, nB, wB, m, k, qN, ai, h, eV, dL, anP, aq, pm, kT, GU, cB, B, vQ, NQ, fM, yk, eX, rf, aA, cz, hz, v, j, C, q, eA, nv, aT, dz, ae, af, bf, iU, Y, r, lo, tu, en, cl, t, iK, pb, iM, hc, CZ, fD, ao, kh, wi, Ke, qb, aD, jh, dG, ad, av, hd, Yi, gj, d, je, et, ff, cr, eZ, tv, aF, si, bz, eK, es, bE, aS, IC, iu, y); #c1(JUND) c2(NP_005345) c3(transcription factor jun-D isoform JunD-FL) c4(155274) c5(155275, 155276, 155277, 155278, 155279, 155280, 155281) c6( ) c7(bM, T, if, e, al, bB, ci, x, aE, K, eL, aa, eG, aW, az, eE, eM, nB, wB, k, m, qN, PJ, ai, kH, h, dL, anP, aq, kT, GO, cB, B, vQ, NQ, yk, rf, aA, cz, hz, v, C, q, eA, nv, aT, ae, af, bf, Y, r, cu, lo, tu, en, t, iK, pb, ck, iM, hc, CZ, fD, bt, ao, Ke, qb, aD, jh, dG, ad, hd, IC, Yi, gj, d, je, ff, cr, eZ, tv, aF, si, bz, eK, es, bE, aS, y, iu); #c1(JUP) c2(XP_006721941) c3(junction plakoglobin isoform X1) c4(294408, 294409, 294410, 294411, 294412, 294413, 294414) c5(294415, 294416, 294417, 294418, 294419, 294420, 294421, 294422, 294423, 294424, 294425, 294426, 294427, 294428, 294429, 294430, 294431, 294432, 294433, 294434, 294435, 294436, 294437, 294438, 294439, 294440, 294441, 294442, 294443, 294444, 294445, 294446, 294447, 294448, 294449, 294450, 294451, 294452, 294453, 294454, 294455, 294456, 294457, 294458, 294459, 294460, 294461, 294462, 294463, 294464, 294465, 294466, 294467, 294468, 294469, 294470) c6( ) c7(dD, aEj, ea, n, j, ci, eq, fr, q, ad, bnC, alD, cc, aT, dL, Qr, bUe, aW, ff, hl, r, biv, en, nB, wK, hL); #c1(KAL1) c2(NP_000207) c3(anosmin-1 precursor) c4(4592) c5(4593, 4594, 4595, 4596, 4597, 4598) c6( ) c7(T, Ut, IP, fd, bB, ti, bUg, v, nA, mF, yn, UE, wG, bti, nd, he, btr, ae, aMi, avP, d, bUf, oV, aVQ, aeS, yq, bUh, eE, t, aiv, dB, bE, m, UF, cE, B); #c1(KALRN) c2(NP_001019831) c3(kalirin isoform 1) c4(27930) c5(27931, 27932, 27933, 27934, 27935, 27936) c6( ) c7(sc, T, aA, cz, j, ci, Ea, q, ad, eA, dP, aT, h, af, eu, aW, Y, ff, r, Ej, aF, en, t, sK, fq, bz, cm, ck, rR, Dy, ac, aS, m, B); #c1(KALRN) c2(NP_003938) c3(kalirin isoform 2) c4(142332) c5(142333, 142334, 142335, 142336, 142337, 142338) c6( ) c7(sc, T, aA, cz, j, ci, Ea, q, ad, eA, dP, aT, h, af, eu, aW, Y, ff, r, Ej, aF, en, t, sK, fq, bz, cm, ck, rR, Dy, ac, aS, m, B); #c1(KALRN) c2(NP_008995) c3(kalirin isoform 3) c4(170120, 170121) c5(170122, 170123, 170124, 170125, 170126, 170127, 170128, 170129, 170130, 170131, 170132, 170133) c6( ) c7(sc, T, aA, cz, j, ci, Ea, q, ad, eA, dP, aT, h, af, eu, aW, Y, ff, r, Ej, aF, en, t, sK, fq, bz, cm, ck, rR, Dy, ac, aS, m, B); #c1(KALRN) c2(XP_006713873) c3(kalirin isoform X1) c4( ) c5(287412) c6( ) c7(sc, T, aA, cz, j, ci, Ea, q, ad, eA, dP, aT, h, af, eu, aW, Y, ff, r, Ej, aF, en, t, sK, fq, bz, cm, ck, rR, Dy, ac, aS, m, B); #c1(KALRN) c2(XP_006713880) c3(kalirin isoform X15) c4( ) c5(287413) c6( ) c7(sc, T, aA, cz, j, ci, Ea, q, ad, eA, dP, aT, h, af, eu, aW, Y, ff, r, Ej, aF, en, t, sK, fq, bz, cm, ck, rR, Dy, ac, aS, m, B); #c1(KALRN) c2(XP_011511587) c3(kalirin isoform X12) c4( ) c5(302321, 302322, 302323, 302324) c6( ) c7(sc, T, aA, cz, j, ci, Ea, q, ad, eA, dP, aT, h, af, eu, aW, Y, ff, r, Ej, aF, en, t, sK, fq, bz, cm, ck, rR, Dy, ac, aS, m, B); #c1(KALRN) c2(XP_011511588) c3(kalirin isoform X14) c4(302325) c5(302326, 302327, 302328, 302329, 302330, 302331) c6( ) c7(sc, T, aA, cz, j, ci, Ea, q, ad, eA, dP, aT, h, af, eu, aW, Y, ff, r, Ej, aF, en, t, sK, fq, bz, cm, ck, rR, Dy, ac, aS, m, B); #c1(KANK1) c2(NP_001243806) c3(KN motif and ankyrin repeat domain-containing protein 1 isoform a) c4(91763) c5(91764, 91765, 91766, 91767, 91768, 91769, 91770, 31771, 91772, 91773, 91774, 91775, 91776, 91777, 91778, 91779, 91780, 91781, 91782, 91783, 91784, 91785, 91786) c6( ) c7(bM, 1 es, iA, aW, aT, kD, oR, axk, fr, pm, bUi, V); #c1(KANK1) c2(NP_694856) c3(KN motif and ankyrin repeat domain-containing protein 1 isoform b) c4(245397, 245398, 245399) c5(245400, 245401, 245402, 245403, 245404, 245405, 245406, 245407, 245408, 245409, 245410) c6( ) c7(bM, T, es, iA, aW, aT, kD, oR, axk, fr, pm, bUi, V); #c1(KANK1) c2(XP_011516127) c3(KN motif and ankyrin repeat domain-containing protein 1 isoform X5) c4(309347) c5(309348, 309349, 309350, 309351, 309352, 309353) c6( ) c7(bM, T, es, iA, aW, aT, kD, oR, axk, fr, pm, bUi, V); #c1(KANK1) c2(XP_011516128) c3(KN motif and ankyrin repeat domain-containing protein 1 isoform X6) c4(309354) c5( ) c6( ) c7(bM, T, es, iA, aW, aT, kD, oR, axk, fr, pm, bUi, V); #c1(KANK2) c2(NP_001129663) c3(KN motif and ankyrin repeat domain-containing protein 2 isoform 2) c4(52115) c5(52116, 52117, 52118, 52119, 52120, 52121, 52122, 52123, 52124, 52125) c6( ) c7(cc, aE, iA, aW, aA, aT, aF, fr, eA); #c1(KANK2) c2(NP_056308) c3(KN motif and ankyrin repeat domain-containing protein 2 isoform 1) c4(187021) c5(187022, 187023, 187024, 187025, 187026, 187027) c6( ) c7(cc, aE, iA, aW, aA, aT, aF, fr, eA); #c1(KANK4) c2(XP_011539148) c3(KN motif and ankyrin repeat domain-containing protein 4 isoform X3) c4(337222) c5(337223, 337224, 337225, 337226, 337227, 337228, 337229, 337230, 337231, 337232, 337233, 337234, 337235, 337236, 337237, 337238, 337239, 337240) c6( ) c7(y, mR); #c1(KANSL1) c2(XP_005275701) c3(KAT8 regulatory NSL complex subunit 1 isoform X1) c4(285704) c5(285705, 285706, 285707, 285708, 285709, 285710) c6( ) c7(bUj, bUk, hb, qK, Az, nA, an, IM, aYh); #c1(KANSL1) c2(XP_006721886) c3(KAT8 regulatory NSL complex subunit 1 isoform X1) c4(294366) c5(294367, 294368, 294369, 294370, 294371, 294372, 294373, 294374, 294375, 294376, 294377, 294378, 294379, 294380, 294381, 294382, 294383, 294384) c6( ) c7(bUj, bUk, hb, qK, Az, nA, an, IM, aYh); #c1(KANSL1) c2(XP_011522932) c3(KAT8 regulatory NSL complex subunit 1 isoform X4) c4(317435) c5(317436, 317437, 317438, 317439, 317440, 317441) c6( ) c7(bUj, bUk, hb, qK, Az, nA, an, IM, aYh); #c1(KANSL1) c2(XP_011544644) c3(KAT8 regulatory NSL complex subunit 1 isoform X4) c4(343755) c5(343756, 343757, 343758, 343759, 343760, 343761) c6( ) c7(bUj, bUk, hb, qK, Az, nA, an, IM, aYh); #c1(KANSL3) c2(NP_001108488) c3(KAT8 regulatory NSL complex subunit 3) c4(43256, 43257) c5( ) c6( ) c7(nw); #c1(KANSL3) c2(XP_005264044) c3(KAT8 regulatory NSL complex subunit 3 isoform X8) c4(278652, 278653) c5(278654, 278655, 278656, 278657, 278658, 278659, 278660, 278661, 278662) c6( ) c7(nw); #c1(KANSL3) c2(XP_011509762) c3(KAT8 regulatory NSL complex subunit 3 isoform X6) c4( ) c5(300318, 300319, 300320, 300321, 300322, 300323, 300324) c6( ) c7(nw); #c1(KANSL3) c2(XP_011509768) c3(KAT8 regulatory NSL complex subunit 3 isoform X12) c4(300325, 300326) c5(300327, 300328, 300329, 300330, 300331, 300332, 300333, 300334, 300335, 300336, 300337, 300338, 300339, 300340, 300341, 300342, 300343, 300344, 300345, 300346) c6( ) c7(nw); #c1(KARS) c2(NP_001123561) c3(lysine-tRNA ligase isoform 1) c4(47607) c5(47608, 47609, 47610, 47611, 47612, 47613) c6( ) c7(bUI, bUm, dt, aPR, ds, Pg, bUn, h, fu, bX, bU, kC); #c1(KARS) c2(NP_005539) c3(lysine-tRNA ligase isoform 2) c4(157241) c5(157242, 157243, 157244, 157245, 157246, 157247) c6( ) c7(bUI, bUm, dt, aPR, ds, Pg, bUn, h, fu, bX, bU, kC); #c1(KAT2A) c2(NP_066564) c3(histone acetyltransferase KAT2A) c4(207403) c5(207404, 207405, 207406, 207407, 207408, 207409) c6( ) c7(x, T, oG, aW, rU, U, aT, alw, dq, aA, k, bUo, bt); #c1(KAT2B) c2(NP_003875) c3(histone acetyltransferase KAT2B) c4(141712) c5(141713, 141714, 141715, 141716, 141717, 141718) c6( ) c7(bM, T, aA, bB, aj, j, Kx, J, x, bv, oG, kH, aT, bUo, jf, A, d, JI, aW, rU, eZ, alw, dq, iy, aF, t, bE, U, Kj, k, it, B); #c1(KAT5) c2(NP_001193762) c3(histone acetyltransferase KAT5 isoform 4) c4(82543) c5(82544, 82545, 82546, 82547, 82548, 82549, 82550) c6( ) c7(oO, bM, T, os, dD, ea, fG, jh, Nt, bB, oZ, v, Kh, ci, C, auu, eq, V, q, aR, ad, wD, bUp, hd, h, cy, dL, K, ae, af, eL, cp, pi, je, sp, Y, r, dq, aq, bz, eK, ck, nM, iM, eM, nB, bE, z, U, ph, y, bt, kS, B); #c1(KAT5) c2(NP_006379) c3(histone acetyltransferase KAT5 isoform 2) c4(164499) c5(164500, 164501, 164502, 164503, 164504) c6( ) c7(oO, bM, T, os, dD, ea, fG, jh, Nt, bB, oZ, v, Kh, ci, C, auu, eq, V, q, aR, ad, wD, bUp, hd, h, cy, dL, K, ae, af, eL, cp, pi, je, sp, Y, r, dq, aq, bz, eK, ck, nM, iM, eM, nB, bE, z, U, ph, y, bt, kS, B); #c1(KAT5) c2(NP_874368) c3(histone acetyltransferase KAT5 isoform 3) c4(256643) c5(256644, 256645, 256646, 256647, 256648) c6( ) c7(oO, bM, T, os, dD, ea, fG, jh, Nt, bB, oZ, v, Kh, ci, C, auu, eq, V, q, aR, ad, wD, bUp, hd, h, cy, dL, K, ae, af, eL, cp, pi, je, sp, Y, r, dq, aq, bz, eK, ck, nM, iM, eM, nB, bE, z, U, ph, y, bt, kS, B); #c1(KAT5) c2(NP_874369) c3(histone acetyltransferase KAT5 isoform 1) c4(256649) c5(256650, 256651, 256652, 256653, 256654, 256655, 256656) c6( ) c7(oO, bM, T, os, dD, ea, fG, jh, Nt, bB, oZ, v, Kh, ci, C, auu, eq, V, q, aR, ad, wD, bUp, hd, h, cy, dL, K, ae, af, eL, cp, pi, je, sp, Y, r, dq, aq, bz, eK, ck, nM, iM, eM, nB, bE, z, U, ph, y, bt, kS, B); #c1(KAT6A) c2(NP_006757) c3(histone acetyltransferase KAT6A) c4(167753, 167754, 167755) c5(167756, 167757, 167758, 167759, 167760, 167761, 167762, 167763, 167764, 167765, 167766, 167767, 167768, 167769, 167770, 167771, 167772, 167773, 167774, 167775, 167776) c6( ) c7(ck, x, T, jf, iZ, jp, RX, vA, qK, gE, k, hF, bt, aVE); #c1(KAT6B) c2(NP_001243397) c3(histone acetyltransferase KAT6B isoform 2) c4(90664) c5(90665, 90666, 90667, 90668, 90669, 90670) c6( ) c7(ck, T, yS, e, vA, all, bUs, oi, bt, bUq, bUr); #c1(KAT6B) c2(NP_001243398) c3(histone acetyltransferase KAT6B isoform 3) c4(90671) c5(90672, 90673, 90674, 90675, 90676, 90677, 90678, 90679, 90680, 90681, 90682, 90683, 90684, 90685) c6( ) c7(ck, T, yS, e, vA, all, bUs, oi, bt, bUq, bUr); #c1(KAT6B) c2(XP_005269721) c3(histone acetyltransferase KAT6B isoform X1) c4(282727) c5(282728, 282729, 282730, 282731, 282732, 282733, 282734, 282735, 282736, 282737, 282738) c6( ) c7(ck, T, yS, e, vA, all, bUs, oi, bt, bUq, bUr); #c1(KAT7) c2(NP_001186084) c3(histone acetyltransferase KAT7 isoform 2) c4(77057, 77058) c5(77059, 77060, 77061, 77062, 77063, 77064, 77065, 77066, 77067, 77068, 77069, 77070) c6( ) c7(aW, T, aT); #c1(KAT7) c2(NP_001186085) c3(histone acetyltransferase KAT7 isoform 3) c4(77071) c5(77072, 77073, 77074, 77075, 77076, 77077) c6( ) c7(aW, T, aT); #c1(KAT7) c2(NP_001186086) c3(histone acetyltransferase KAT7 isoform 4) c4(77078) c5(77079, 77080, 77081, 77082, 77083, 77084) c6( ) c7(aW, T, aT); #c1(KAT7) c2(NP_001186087) c3(histone acetyltransferase KAT7 isoform 5) c4(77085) c5(77086, 77087, 77088, 77089, 77090, 77091) c6( ) c7(aW, T, aT); #c1(KAT7) c2(NP_008998) c3(histone acetyltransferase KAT7 isoform 1) c4(170141, 170142) c5(170143, 170144, 170145, 170146, 170147, 170148, 170149, 170150, 170151, 170152, 170153, 170154, 170155) c6( ) c7(aW, T, aT); #c1(KAT8) c2(NP_115564) c3(histone acetyltransferase KAT8 isoform 1) c4(223201) c5(223202, 223203, 223204, 223205, 223206, 223207) c6( ) c7(jf, es, eM, aW, Rr, aA, aF, fr, C, bz, q); #c1(KAT8) c2(NP_892003) c3(histone acetyltransferase KAT8 isoform 2) c4(257443) c5(257444, 257445, 257446, 257447, 257448, 257449) c6( ) c7(jf, es, eM, aW, Rr, aA, aF, fr, C, bz, q); #c1(KATNA1) c2(NP_001191005) c3(katanin P60 ATPase-containing subunit A1 isoform 2) c4(80504) c5(80505, 80506, 80507, 80508, 80509, 80510) c6( ) c7(aT); #c1(KATNA1) c2(XP_005266862) c3(katanin p60 ATPase-containing subunit A1 isoform X2) c4( ) c5(280364, 280365, 280366, 280367, 280368, 280369) c6( ) c7(aT); #c1(KATNA1) c2(XP_011533699) c3(katanin p60 ATPase-containing subunit A1 isoform X1) c4(329749, 329750, 329751) c5(329752, 329753, 329754, 329755, 329756, 329757, 329758, 329759, 329760, 329761, 329762, 329763, 329764, 329765, 329766, 329767) c6( ) c7(aT); #c1(KATNAL2) c2(XP_005258414) c3(katanin p60 ATPase-containing subunit A-like 2 isoform X1) c4(275655, 275656) c5(275657) c6( ) c7(beA, bN); #c1(KATNAL2) c2(XP_006722617) c3(katanin p60 ATPase-containing subunit A-like 2 isoform X3) c4( ) c5(294768, 294769, 294770, 294771, 294772, 294773, 294774, 294775, 294776, 294777, 294778) c6( ) c7(beA, bN); #c1(KATNAL2) c2(XP_011524522) c3(katanin p60 ATPase-containing subunit A-like 2 isoform X5) c4(319091) c5(319092, 319093, 319094, 319095, 319096, 319097) c6( ) c7(beA, bN); #c1(KATNB1) c2(NP_005877) c3(katanin p80 WD40 repeat-containing subunit B1) c4(160074) c5(160075, 160076, 160077, 160078, 160079, 160080) c6( ) c7(qt, Db, T, aT); #c1(KAZALD1) c2(XP_005270251) c3(kazal-type serine protease inhibitor domain-containing protein 1 isoform X2) c4( ) c5(283291, 283292, 283293, 283294, 283295, 283296, 283297, 283298) c6(283299, 283300) c7(arY, bjI, nO); #c1(KAZALD1) c2(XP_011538525) c3(kazal-type serine protease inhibitor domain-containing protein 1 isoform X1) c4(336272, 336273) c5(336274, 336275, 336276, 336277, 336278, 336279, 336280, 336281) c6(336282, 336283) c7(arY, bjI, nO); #c1(KAZN) c2(XP_011539377) c3(kazrin isoform X2) c4(337485) c5( ) c6( ) c7(oe, j); #c1(KAZN) c2(XP_011539382) c3(kazrin isoform X7) c4(337486) c5(337487, 337488, 337489, 337490, 337491, 337492) c6( ) c7(oe, j); #c1(KBTBD11) c2(NP_055682) c3(kelch repeat and BTB domain-containing protein 11) c4(182754) c5(182755, 182756, 182757, 182758, 182759, 182760) c6( ) c7(an); #c1(KBTBD13) c2(NP_001094832) c3(kelch repeat and BTB domain-containing protein 13) c4(40772) c5(40773, 40774, 40775, 40776, 40777, 40778) c6( ) c7(Am, bUt); #c1(KBTBD8) c2(NP_115894) c3(kelch repeat and BTB domain-containing protein 8) c4(224549, 224550) c5(224551, 224552, 224553, 224554, 224555, 224556, 224557, 224558, 224559, 224560, 224561, 224562) c6( ) c7(aw); #c1(KCMF1) c2(NP_064507) c3(E3 ubiquitin-protein ligase KCMF1) c4(202687) c5(202688, 202689, 202690, 202691, 202692, 202693) c6( ) c7(T, aF, aE, aA); #c1(KCNA1) c2(NP_000208) c3(potassium voltage-gated channel subfamily A member 1) c4(4599) c5(4600, 4601, 4602, 4603, 4604, 4605, 4606, 4607, 4608, 4609) c6( ) c7(T, wY, aVR, ha, lr, akg, eA, aR, aym, lu, ayk, aT, K, akr, bUu, jf, Ng, aQp, aW, KE, kB, Gp); #c1(KCNA4) c2(NP_002224) c3(potassium voltage-gated channel subfamily A member 4) c4(126751) c5(126752, 126753, 126754, 126755, 126756, 126757) c6( ) c7(bv, T, hM, cV, vc, K, EZ, pd, HO, mu); #c1(KCNA5) c2(NP_002225) c3(potassium voltage-gated channel subfamily A member 5) c4(126758) c5(126759, 126760, 126761, 126762, 126763, 126764) c6( ) c7(HQ, bM, T, lD, mr, wL, al, eX, cV, fZ, aA, cz, aj, jh, j, Fc, eA, tO, ad, J, BY, ga, aT, eV, vc, K, bq, ae, HO, mu, wC, ly, d, dH, aW, aF, EZ, as, pb, lx, bUv, eM, IC); #c1(KCNA6) c2(XP_011519257) c3(potassium voltage-gated channel subfamily A member 6 isoform X1) c4(313903) c5(313904, 313905, 313906, 313907, 313908, 313909, 313910, 313911, 313912, 313913) c6( ) c7(aQp); #c1(KCNA7) c2(NP_114092) c3(potassium voltage-gated channel subfamily A member 7) c4(222135) c5(222136, 222137, 222138, 222139, 222140, 222141) c6( ) c7(bL, bUw); #c1(KCNAB1) c2(NP_003462) c3(voltage-gated potassium channel subunit beta-1 isoform 2) c4(138533) c5(138534, 138535, 138536, 138537, 138538, 138539) c6( ) c7(Hx, nX, ha); #c1(KCNAB1) c2(NP_751891) c3(voltage-gated potassium channel subunit beta-1 isoform 3) c4(248224) c5(248225, 248226, 248227, 248228, 248229, 248230) c6( ) c7(Hx, nX, ha); #c1(KCNAB1) c2(NP_751892) c3(voltage-gated potassium channel subunit beta-1 isoform 1) c4(248231) c5(248232, 248233, 248234, 248235, 248236, 248237) c6( ) c7(Hx, nX, ha); #c1(KCNAB2) c2(XP_011540622) c3(voltage-gated potassium channel subunit beta-2 isoform X2) c4(339153) c5( ) c6( ) c7(ha, bO, bS, ct, Z, bln, cC); #c1(KCNAB2) c2(XP_011540626) c3(voltage-gated potassium channel subunit beta-2 isoform X5) c4( ) c5(339154, 339155, 339156, 339157, 339158, 339159, 339160, 339161, 339162, 339163, 339164, 339165, 339166, 339167, 339168, 339169, 339170, 339171) c6( ) c7(ha, bO, bS, et, Z, bln, cC); #c1(KCNAB3) c2(NP_004723) c3(voltage-gated potassium channel subunit beta-3) c4(149082) c5(149083, 149084, 149085, 149086, 149087, 149088) c6( ) c7(uu); #c1(KCNB1) c2(XP_011527101) c3(potassium voltage-gated channel subfamily B member 1 isoform X1) c4(321590, 321591) c5(321592, 321593, 321594, 321595, 321596, 321597, 321598, 321599, 321600, 321601, 321602, 321603) c6( ) c7(bL, jf, ac, wk, hL, cz, Im, K, fu, cl, cd, mu); #c1(KCNB2) c2(NP_004761) c3(potassium voltage-gated channel subfamily B member 2) c4(149386) c5(149387, 149388, 149389, 149390, 149391, 149392) c6( ) c7(vo); #c1(KCNC1) c2(NP_001106212) c3(potassium voltage-gated channel subfamily C member 1 isoform 1) c4(42405) c5(42406, 42407, 42408, 42409, 42410, 42411) c6( ) c7(yU, yZ); #c1(KCNC1) c2(NP_004967) c3(potassium voltage-gated channel subfamily C member 1 isoform 2) c4(151535) c5(151536, 151537, 151538, 151539, 151540, 151541) c6( ) c7(yU, yZ); #c1(KCNC2) c2(NP_001247427) c3(potassium voltage-gated channel subfamily C member 2 isoform KV3.2d) c4(93570) c5(93571, 93572, 93573, 93574, 93575, 93576, 93577, 93578, 93579, 93580) c6( ) c7(T); #c1(KCNC2) c2(NP_631874) c3(potassium voltage-gated channel subfamily C member 2 isoform KV3.2a) c4(238173) c5(238174, 238175, 238176, 238177, 238178, 238179, 238180, 238181, 238182, 238183) c6( ) c7(T); #c1(KCNC2) c2(NP_631875) c3(potassium voltage-gated channel subfamily C member 2 isoform KV3.2b) c4(238184) c5(238185, 238186, 238187, 238188, 238189, 238190) c6( ) c7(T); #c1(KCNC2) c2(NP_715624) c3(potassium voltage-gated channel subfamily C member 2 isoform KV3.2c) c4(246677) c5(246678, 246679, 246680, 246681, 246682, 246683) c6( ) c7(T); #c1(KCNC3) c2(XP_006723266) c3(potassium voltage-gated channel subfamily C member 3 isoform X1) c4(295065) c5(295066, 295067, 295068, 295069, 295070, 295071) c6( ) c7(alN, Ks, ky, kB, U, dr, nA, bUx, aR, wT); #c1(KCNC3) c2(XP_011525227) c3(potassium voltage-gated channel subfamily C member 3 isoform X2) c4( ) c5(319689) c6( ) c7(alN, Ks, ky, kB, U, dr, nA, bUx, aR, wT); #c1(KCNC3) c2(XP_011525230) c3(potassium voltage-gated channel subfamily C member 3 isoform X3) c4(319690, 319691) c5(319692, 319693, 319694, 319695, 319696, 319697, 319698, 319699, 319700, 319701, 319702, 319703) c6( ) c7(alN, Ks, ky, kB, U, dr, nA, bUx, aR, wT); #c1(KCND2) c2(NP_036413) c3(potassium voltage-gated channel subfamily D member 2 precursor) c4(173651) c5(173652, 173653, 173654, 173655, 173656, 173657) c6( ) c7(ha, cz, ajM, Kw, il, bN, mu); #c1(KCNE1) c2(NP_001257334) c3(potassium voltage-gated channel subfamily E member 1) c4(95188) c5(95189, 95190, 95191, 95192, 95193, 95194, 95195, 95196, 95197, 95198, 95199, 95200, 95201, 95202, 95203, 95204, 95205, 95206, 95207, 95208) c6( ) c7(bL, T, bzy, Fj, mr, wL, e, ha, hx, cV, EQ, aw, rf, ajM, atN, il, cd, cc, h, adm, K, HO, mu, A, vj, bUy, bUz, EZ, Fh, gZ); #c1(KCNE2) c2(NP_751951) c3(potassium voltage-gated channel subfamily E member 2) c4(248611) c5(248612, 248613, 248614, 248615, 248616, 248617, 248618) c6( ) c7(bL, mr, aD, wL, hx, aw, cV, aA, ajM, afv, j, atN, Mk, tO, cc, oW, bg, bUB, bUA, HO, mu, s, aF, EZ, vo, bUC, IM, gT); #c1(KCNE3) c2(NP_005463) c3(potassium voltage-gated channel subfamily E member 3) c4(156383, 156384) c5(156385, 156386, 156387, 156388, 156389, 156390, 156391, 156392, 156393, 156394, 156395, 156396, 156397, 156398, 156399, 156400, 156401, 156402, 156403, 156404, 156405, 156406, 156407, 156408, 156409, 156410, 156411) c6( ) c7(bUD, IJ, ayl, Ig, Fh, ayB, wL, ayH, VU, aPm, blp, tO, HT, mu); #c1(KCNE3) c2(XP_011543015) c3(potassium voltage-gated channel subfamily E member 3 isoform X1) c4(341706, 341707, 341708) c5(341709, 341710, 341711, 341712, 341713, 341714, 341715) c6( ) c7(bUD, IJ, ayl, Ig, Fh, ayB, wL, ayH, VU, aPm, blp, tO, HT, mu); #c1(KCNE4) c2(NP_542402) c3(potassium voltage-gated channel subfamily E member 4) c4(232366) c5(232367, 232368, 232369, 232370, 232371, 232372) c6( ) c7(wL, oe, hn, fg); #c1(KCNE5) c2(NP_036414) c3(potassium voltage-gated channel subfamily E member 1-like protein) c4(173658) c5(173659, 173660, 173661, 173662, 173663, 173664) c6( ) c7(arD, mu, ajM, wL, mr); #c1(KCNG3) c2(NP_579875) c3(potassium voltage-gated channel subfamily G member 3 isoform 1) c4(234676) c5(234677, 234678, 234679, 234680, 234681, 234682) c6( ) c7(T, ff, en); #c1(KCNG3) c2(NP_758847) c3(potassium voltage-gated channel subfamily G member 3 isoform 2) c4(249272) c5(249273, 249274, 249275, 249276, 249277, 249278) c6( ) c7(T, ff, en); #c1(KCNG4) c2(NP_758857) c3(potassium voltage-gated channel subfamily G member 4) c4(249279) c5(249280, 249281, 249282, 249283, 249284, 249285) c6( ) c7(ff, uu, en); #c1(KCNH1) c2(NP_002229) c3(potassium voltage-gated channel subfamily H member 1 isoform 2) c4(126765) c5(126766, 126767, 126768, 126769, 126770, 126771) c6( ) c7(T, if, ha, aA, qN, eA, aT, Dz, mu, d, s, qt, aW, Y, ff, eH, bUE, hf, en, eF, fq, ac, cj, gZ, im, bt); #c1(KCNH1) c2(NP_758872) c3(potassium voltage-gated channel subfamily H member 1 isoform 1) c4(249349) c5(249350, 249351, 249352, 249353, 249354, 249355) c6( ) c7(T, if, ha, aA, qN, eA, aT, Dz, mu, d, s, qt, aW, Y, ff, eH, bUE, hf, en, eF, fq, ac, cj, gZ, im, bt); #c1(KCNH2) c2(NP_000229) c3(potassium voltage-gated channel subfamily H member 2 isoform a) c4(5258) c5(5259, 5260, 5261, 5262, 5263, 5264, 5265) c6( ) c7(SJ, T, atj, e, EQ, bB, ci, x, bv, SV, Ou, K, hm, bnQ, g, as, cm, QA, iT, wK, mx, bjY, QF, nw, m, k, cZ, cV, n, cd, Sw, afR, ft, cc, hw, bUF, Zs, gq, h, hn, bl, dd, bnO, db, HO, pl, dx, ajV, YI, AT, RT, AQ, W, hL, bUG, bL, bzy, mr, wL, nx, hx, rf, aA, cz, ajM, j, Mk, q, adm, avt, Fg, ae, jf, iF, s, oV, r, gm, en, cl, t, nC, f, iK, ck, aJt, bnR, bUH, np, OL, bt, rA, an, Dd, ha, bnS, bhL, Fb, Gn, atN, hF, ad, vJ, Sr, iY, mu, d, IR, qt, ff, bgh, gl, aF, EZ, Tp, Z, bz, ayj, dr, qa, bgg, EW, bnP, bE, gZ, X); #c1(KCNH2) c2(NP_001191727) c3(potassium voltage-gated channel subfamily H member 2 isoform d) c4( ) c5(81620, 81621, 81622, 81623, 81624, 81625, 81626) c6( ) c7(SJ, T, atj, e, EQ, bB, ci, x, bv, SV, Ou, K, hm, bnQ, g, as, cm, QA, iT, wK, mx, bjY, QF, nw, m, k, cZ, cV, n, cd, Sw, afR, ft, cc, hw, bUf, Zs, gq, h, hn, bl, dd, bnO, db, HO, pl, dx, ajV, YI, AT, RT, AQ, W, hL, bUG, bL, bzy, mr, wL, nx, hx, rf, aA, cz, ajM, j, Mk, q, adm, avt, Fg, ae, jf, if, s, oV, r, gm, en, cl, t, nC, f, iK, ck, aJt, bnR, bUH, np, OL, bt, rA, ao, Dd, ha, bnS, bhL, Fb, Gn, atN, hF, ad, vJ, Sr, iY, mu, d, IR, qt, ff, bgh, gl, aF, EZ, Tp, Z, bz, ayj, dr, qa, bgg, EW, bnP, bE, gZ, X); #c1(KCNH2) c2(NP_742053) c3(potassium voltage-gated channel subfamily H member 2 isoform b) c4(247893) c5(247894, 247895, 247896, 247897, 247898, 247899, 247900, 247901) c6( ) c7(SJ, T, atj, e, EQ, bB, ci, x, bv, SV, Ou, K, hm, bnQ, g, as, cm, QA, iT, wK, mx, bjY, QF, nw, m, k, cZ, cV, n, cd, Sw, afR, ft, cc, hw, bUE, Zs, gq, h, hn, bl, dd, bnO, db, HO, pl, dx, ajV, YI, AT, RT, AQ, W, hL, bUG, bL, bzy, mr, wL, nx, hx, rf, aA, cz, ajM, j, Mk, q, adm, avt, Fg, ae, jf, if, s, oV, r, gm, en, c1, t, nC, f, iK, ck, aJt, bnR, bUH, np, OL, bt, rA, an, Dd, ha, bnS, bhL, Fb, Gn, atN, hF, ad, vJ, Sr, iY, mu, d, IR, qt, ff, bgh, gl, aF, EZ, Tp, Z, bz, ayj, dr, ga, bgg, EW, bnP, bE, gZ, X); #c1(KCNH2) c2(NP_742054) c3(potassium voltage-gated channel subfamily H member 2 isoform c) c4(247902, 247903) c5(247904, 247905, 247906, 247907, 247908, 247909, 247910) c6( ) c7(SJ, T, atj, e, EQ, bB, ci, x, bv, SV, Ou, K, hm, bnQ, g, as, cm, QA, iT, wK, mx, bjY, QF, nw, m, k, cZ, cV, n, cd, Sw, afR, ft, cc, hw, bUF, Zs, gq, h, hn, bl, dd, bnO, db, HO, pl, dx, ajV, YI, AT, RT, AQ, W, hL, bUG, bL, bzy, mr, wL, nx, hx, rf, aA, cz, ajM, j, Mk, q, adm, avt, Fg, ae, jf, if, s, oV, r, gm, en, cl, t, nC, f, iK, ck, aJt, bnR, bUH, np, OL, bt, rA, ao, Dd, ha, bnS, bhL, Fb, Gn, atN, hF, ad, vJ, Sr, iY, mu, d, IR, qt, ff, bgh, gl, aF, EZ, Tp, Z, bz, ayj, dr, ga, bgg, EW, bnP, bE, gZ, X); #c1(KCNH2) c2(XP_011514487) c3(potassium voltage-gated channel subfamily H member 2 isoform X1) c4(307189) c5(307190, 307191, 307192, 307193, 307194, 307195) c6( ) c7(SJ, T, atj, e, EQ, bB, ci, x, bv, SV, Ou, K, hm, bnQ, g, as, cm, QA, iT, wK, mx, bjY, QF, nw, m, k, cZ, cV, n, cd, Sw, afR, ft, cc, hw, bUF, Zs, gq, h, hn, bl, dd, bnO, db, HO, pl, dx, ajV, YI, AT, RT, AQ, W, hL, bUG, bL, bzy, mr, wL, nx, hx, rf, aA, cz, ajM, j, Mk, q, adm, avt, Fg, ae, jf, iF, s, oV, r, gm, en, cl, t, nC, f, iK, ck, aJt, bnR, bUH, np, OL, bt, rA, an, Dd, ha, bnS, bhL, Fb, Gn, atN, hF, ad, vJ, Sr, iY, mu, d, IR, qt, ff, bgh, gl, aF, EZ, Tp, Z, bz, ayj, dr, qa, bgg, EW, bnP, bE, gZ, X); #c1(KCNH3) c2(NP_036416) c3(potassium voltage-gated channel subfamily H member 3) c4(173665) c5(173666, 173667, 173668, 173669, 173670, 173671) c6( ) c7(ck, ha); #c1(KCNH4) c2(NP_036417) c3(potassium voltage-gated channel subfamily H member 4) c4(173672) c5(173673, 173674, 173675, 173676, 173677, 173678) c6( ) c7(lD, dD, id, yS, ea, aA, n, eq, iJ, q, ad, mj, nd, aqk, kf, aT, K, ae, ly, ak, eG, d, aW, Y, eZ, r, nf, hN, g, aaO, cm, Ld, lx, U, yA, bt, B); #c1(KCNH5) c2(NP_647479) c3(potassium voltage-gated channel subfamily H member 5 isoform 1) c4(238670, 238671, 238672, 238673) c5(238674, 238675, 238676, 238677, 238678, 238679, 238680, 238681, 238682, 238683, 238684, 238685) c6( ) c7(jf, bN, ac, dY, Y, ff, ha, lm, en, g, aR, bA); #c1(KCNH5) c2(NP_758963) c3(potassium voltage-gated channel subfamily H member 5 isoform 3) c4( ) c5(249414, 249415, 249416, 249417, 249418, 249419, 249420, 249421, 249422, 249423, 249424, 249425) c6( ) c7(jf, bN, ac, dY, Y, ff, ha, lm, en, g, aR, bA); #c1(KCNH6) c2(NP_110406) c3(potassium voltage-gated channel subfamily H member 6 isoform 1) c4(220109) c5(220110, 220111, 220112, 220113, 220114, 220115, 220116, 220117, 220118, 220119) c6( ) c7(AM, cn, s, apx); #c1(KCNH6) c2(NP_775115) c3(potassium voltage-gated channel subfamily H member 6 isoform 2) c4(249639) c5(249640, 249641, 249642, 249643, 249644, 249645, 249646, 249647, 249648, 249649) c6( ) c7(AM, cn, s, apx); #c1(KCNH7) c2(NP_150375) c3(potassium voltage-gated channel subfamily H member 7 isoform 1) c4(228089) c5(228090, 228091, 228092, 228093, 228094, 228095) c6( ) c7(s, aw, fq, cr, bBp, V, ae, ad); #c1(KCNH7) c2(NP_775185) c3(potassium voltage-gated channel subfamily H member 7 isoform 2) c4(249657) c5(249658, 249659, 249660, 249661, 249662, 249663) c6( ) c7(s, aw, fq, cr, bBp, V, ae, ad); #c1(KCNH8) c2(NP_653234) c3(potassium voltage-gated channel subfamily H member 8) c4(239265) c5(239266, 239267, 239268, 239269, 239270, 239271, 239272) c6( ) c7(lD, T, dD, aC, id, yS, ea, jh, aA, eq, iJ, q, ad, mj, nd, aqk, kf, aT, K, ae, ly, ak, eG, d, aW, eZ, r, nf, hN, g, aaO, cm, Ld, lx, eM, U, yA, bt, B); #c1(KCNH8) c2(XP_011531646) c3(potassium voltage-gated channel subfamily H member 8 isoform X2) c4(327786) c5( ) c6( ) c7(lD, T, dD, aC, id, yS, ea, jh, aA, eq, iJ, q, ad, mj, nd, aqk, kf, aT, K, ae, ly, ak, eG, d, aW, eZ, r, nf, hN, g, aaO, cm, Ld, lx, eM, U, yA, bt, B); #c1(KCNH8) c2(XP_011531648) c3(potassium voltage-gated channel subfamily H member 8 isoform X4) c4( ) c5(327787, 327788, 327789, 327790, 327791) c6( ) c7(lD, T, dD, aC, id, yS, ea, jh, aA, eq, iJ, q, ad, mj, nd, aqk, kf, aT, K, ae, ly, ak, eG, d, aW, eZ, r, nf, hN, g, aaO, cm, Ld, lx, eM, U, yA, bt, B); #c1(KCNIP1) c2(NP_001030009) c3(Kv channel-interacting protein 1 isoform 1) c4(30837) c5(30838, 30839, 30840, 30841, 30842, 30843, 30844, 30845, 30846) c6(30847, 30848) c7(V, afu); #c1(KCNIP1) c2(NP_001030010) c3(Kv channel-interacting protein 1 isoform 3) c4(30849) c5(30850, 30851, 30852, 30853, 30854, 30855, 30856, 30857) c6(30858, 30859) c7(V, afu); #c1(KCNIP1) c2(NP_001265268) c3(Kv channel-interacting protein 1 isoform 5) c4(98069) c5(98070, 98071, 98072, 98073, 98074, 98075, 98076, 98077) c6(98078, 98079) c7(V, afu); #c1(KCNIP1) c2(NP_001265269) c3(Kv channel-interacting protein 1 isoform 4) c4( ) c5(98080, 98081, 98082, 98083, 98084, 98085, 98086) c6(98087, 98088) c7(V, afu); #c1(KCNIP1) c2(NP_055407) c3(Kv channel-interacting protein 1 isoform 2) c4(180881) c5(180882, 180883, 180884, 180885, 180886, 180887, 180888, 180889, 180890, 180891, 180892, 180893, 180894, 180895, 180896) c6(180897, 180898, 180899, 180900) c7(V, afu); #c1(KCNIP1) c2(XP_006714924) c3(Kv channel-interacting protein 1 isoform X2) c4(288308) c5( ) c6( ) c7(V, afu); #c1(KCNIP2) c2(NP_055406) c3(Kv channel-interacting protein 2 isoform 1) c4(180868) c5(180869, 180870, 180871, 180872, 180873, 180874, 180875, 180876, 180877, 180878) c6(180879, 180880) c7(cd); #c1(KCNIP2) c2(NP_775283) c3(Kv channel-interacting protein 2 isoform 2) c4(249753) c5(249754, 249755, 249756, 249757, 249758, 249759, 249760, 249761) c6(249762, 249763) c7(cd); #c1(KCNIP2) c2(NP_775284) c3(Kv channel-interacting protein 2 isoform 3) c4(249764, 249765) c5(249766, 249767, 249768, 249769, 249770, 249771, 249772, 249773, 249774, 249775, 249776, 249777, 249778, 249779, 249780, 249781) c6(249782, 249783, 249784, 249785) c7(cd); #c1(KCNIP2) c2(NP_775285) c3(Kv channel-interacting protein 2 isoform 4) c4(249786, 249787) c5(249788, 249789, 249790, 249791, 249792, 249793, 249794, 249795, 249796, 249797, 249798, 249799, 249800, 249801, 249802) c6(249803, 249804, 249805, 249806) c7(cd); #c1(KCNIP2) c2(NP_775286) c3(Kv channel-interacting protein 2 isoform 5) c4(249807) c5(249808, 249809, 249810, 249811, 249812, 249813, 249814, 249815) c6(249816, 249817) c7(cd); #c1(KCNIP2) c2(NP_775287) c3(Kv channel-interacting protein 2 isoform 6) c4(249818, 249819) c5(249820, 249821, 249822, 249823, 249824, 249825, 249826, 249827, 249828, 249829, 249830, 249831, 249832, 249833, 249834, 249835) c6(249836, 249837, 249838, 249839) c7(cd); #c1(KCNIP2) c2(NP_775289) c3(Kv channel-interacting protein 2 isoform 7) c4(249840) c5(249841, 249842, 249843, 249844, 249845, 249846, 249847, 249848) c6(249849, 249850) c7(cd); #c1(KCNIP3) c2(NP_001030086) c3(calsenilin isoform 2 precursor) c4(30911) c5(30912, 30913, 30914, 30915, 30916, 30917) c6( ) c7(ck, aW, ha, aT, cm, fb, af); #c1(KCNIP3) c2(NP_038462) c3(calsenilin isoform 1) c4(176518, 176519) c5(176520, 176521, 176522, 176523, 176524, 176525, 176526, 176527, 176528, 176529, 176530, 176531, 176532) c6( ) c7(ck, aW, ha, aT, cm, fb, af); #c1(KCNIP4) c2(NP_001030175) c3(Kv channel-interacting protein 4 isoform 5) c4(30965) c5(30966, 30967, 30968, 30969, 30970, 30971, 30972) c6( ) c7(bAO, bM, ac, c, hb, fr, k, fq, eu); #c1(KCNIP4) c2(NP_079497) c3(Kv channel-interacting protein 4 isoform 1) c4(218400, 218401) c5(218402, 218403, 218404, 218405, 218406, 218407, 218408, 218409) c6( ) c7(bAO, bM, ac, c, hb, fr, k, fq, eu); #c1(KCNIP4) c2(NP_671710) c3(Kv channel-interacting protein 4 isoform 2) c4(242109) c5(242110, 242111, 242112, 242113, 242114, 242115) c6( ) c7(bAO, bM, ac, c, hb, fr, k, fq, eu); #c1(KCNIP4) c2(NP_671711) c3(Kv channel-interacting protein 4 isoform 3) c4( ) c5(242116, 242117, 242118, 242119, 242120, 242121, 242122, 242123, 242124, 242125, 242126) c6( ) c7(bAO, bM, ac, c, hb, fr, k, fq, eu); #c1(KCNIP4) c2(NP_671712) c3(Kv channel-interacting protein 4 isoform 4) c4(242127) c5(242128, 242129, 242130, 242131, 242132, 242133) c6( ) c7(bAO, bM, ac, c, hb, fr, k, fq, eu); #c1(KCNIP4) c2(XP_005248247) c3(Kv channel-interacting protein 4 isoform X4) c4( ) c5(268279) c6( ) c7(bAO, bM, ac, c, hb, fr, k, fq, eu); #c1(KCNJ1) c2(NP_000211) c3(ATP-sensitive inward rectifier potassium channel 1 isoform a) c4(4620, 4621) c5(4622, 4623, 4624, 4625, 4626, 4627) c6( ) c7(bUI, Hd, bL, mj, ahS, TI, s, pN, XD, eR, vj, oe, uO, cz, bKs, aj, afV, Xy, ah, nA, J); #c1(KCNJ1) c2(NP_722449) c3(ATP-sensitive inward rectifier potassium channel 1 isoform c) c4( ) c5(246713, 246714, 246715, 246716) c6( ) c7(bUI, Hd, bL, mj, ahS, TI, s, pN, XD, eR, vj, oe, uO, cz, bKs, aj, afV, Xy, ah, nA, J); #c1(KCNJ1) c2(NP_722450) c3(ATP-sensitive inward rectifier potassium channel 1 isoform b) c4( ) c5(246717, 246718, 246719, 246720, 246721, 246722, 246723, 246724, 246725, 246726, 246727, 246728, 246729, 246730) c6( ) c7(bUI, Hd, bL, mj, ahS, TI, s, pN, XD, eR, vj, oe, uO, cz, bKs, aj, afV, Xy, ah, nA, J); #c1(KCNJ10) c2(NP_002232) c3(ATP-sensitive inward rectifier potassium channel 10) c4(126791) c5(126792, 126793, 126794, 126795, 126796, 126797) c6( ) c7(bL, cZ, ha, cV, aj, ur, nA, il, V, qW, aR, J, bUJ, XD, aMT, afV, dd, bUK, rz, adx, cB, d, bwF, vs, aPz, ale, yX, Hw, c, mG, vy, nw, Bh); #c1(KCNJ11) c2(NP_000516) c3(ATP-sensitive inward rectifier potassium channel 11 isoform 1) c4(10889) c5(10890, 10891, 10892, 10893, 10894, 10895, 10896) c6( ) c7(bL, dD, eR, aVR, aZ, Hm, e, ha, My, aw, cz, n, aj, dG, j, v, eq, cd, q, J, me, mh, h, cy, jy, K, hg, bq, af, hm, mu, cC, kl, A, IW, zR, r, Mz, hp, mb, dr, hq, mi, bo, bUM, mg, gZ, bUL, mf, IS, ei); #c1(KCNJ11) c2(XP_006718289) c3(ATP-sensitive inward rectifier potassium channel 11 isoform X1) c4(291693) c5(291694, 291695, 291696, 291697, 291698) c6( ) c7(bL, dD, eR, aVR, aZ, Hm, e, ha, My, aw, cz, n, aj, dG, j, v, eq, cd, q, J, me, mh, h, cy, jy, K, hg, bq, af, hm, mu, cC, kl, A, IW, zR, r, Mz, hp, mb, dr, hq, mi, bo, bUM, mg, gZ, bUL, mf, IS, ei); #c1(KCNJ12) c2(NP_066292) c3(ATP-sensitive inward rectifier potassium channel 12) c4(207103) c5(207104, 207105, 207106, 207107, 207108, 207109, 207110, 207111, 207112, 207113) c6( ) c7(T, aQi, bAe, np, K, atN, mu); #c1(KCNJ13) c2(NP_001165887) c3(inward rectifier potassium channel 13 isoform 2) c4(67930) c5(67931, 67932, 67933, 67934, 67935) c6( ) c7(ac, bkx, Hq, bUN, bUP, pT, bUO); #c1(KCNJ13) c2(NP_001165888) c3(inward rectifier potassium channel 13 isoform 3) c4( ) c5(67936) c6( ) c7(ac, bkx, Hq, bUN, bUP, pT, bUO); #c1(KCNJ13) c2(NP_002233) c3(inward rectifier potassium channel 13 isoform 1) c4(126798) c5(126799, 126800, 126801, 126802, 126803, 126804, 126805, 126806, 126807, 126808) c6( ) c7(ac, bkx, Hq, bUN, bUP, pT, bUO); #c1(KCNJ14) c2(NP_037480) c3(ATP-sensitive inward rectifier potassium channel 14) c4(175745) c5(175746, 175747, 175748, 175749, 175750, 175751, 175752, 175753, 175754, 175755) c6( ) c7(FE); #c1(KCNJ15) c2(XP_011527863) c3(ATP-sensitive inward rectifier potassium channel 15 isoform X1) c4(322816, 322817, 322818, 322819, 322820, 322821, 322822, 322823, 322824) c5(322825, 322826, 322827, 322828, 322829, 322830, 322831, 322832, 322833, 322834, 322835, 322836, 322837, 322838, 322839, 322840, 322841, 322842, 322843, 322844, 322845, 322846, 322847, 322848, 322849, 322850, 322851, 322852, 322853, 322854, 322855, 322856, 322857, 322858, 322859, 322860, 322861, 322862, 322863, 322864, 322865, 322866, 322867, 322868, 322869, 322870, 322871, 322872, 322873, 322874, 322875, 322876, 322877, 322878, 322879, 322880, 322881, 322882, 322883, 322884, 322885, 322886, 322887, 322888, 322889, 322890, 322891, 322892, 322893, 322894, 322895, 322896, 322897, 322898, 322899, 322900, 322901, 322902, 322903, 322904, 322905, 322906, 322907, 322908, 322909, 322910, 322911, 322912, 322913, 322914, 322915, 322916, 322917) c6( ) c7(bL, f, mj, jy); #c1(KCNJ16) c2(NP_001278551) c3(inward rectifier potassium channel 16 isoform a) c4(109816) c5(109817, 109818, 109819, 109820) c6( ) c7(bUJ); #c1(KCNJ16) c2(XP_011523083) c3(inward rectifier potassium channel 16 isoform X1) c4( ) c5(317569, 317570, 317571, 317572, 317573, 317574, 317575, 317576, 317577, 317578, 317579, 317580, 317581, 317582) c6( ) c7(bUJ); #c1(KCNJ18) c2(NP_001181887) c3(inward rectifier potassium channel 18) c4(74387) c5(74388, 74389, 74390, 74391, 74392) c6( ) c7(Ig, bUQ, IJ, HT); #c1(KCNJ18) c2(XP_005276976) c3(inward rectifier potassium channel 18 isoform X1) c4( ) c5(285747) c6( ) c7(Ig, bUQ, IJ, HT); #c1(KCNJ2) c2(XP_011523081) c3(inward rectifier potassium channel 2 isoform X1) c4(317557) c5(317558, 317559, 317560, 317561, 317562, 317563, 317564, 317565, 317566, 317567, 317568) c6( ) c7(mr, wL, aw, bUR, cV, rf, amj, bAe, j, atN, ft, ayH, oj, K, IQ, Gc, HO, mu, Gf, dg, EZ, bQ, ac, ayl, bUS, aBB, Iq, BP, HB, bD, Pk); #c1(KCNJ3) c2(NP_001247437) c3(G protein-activated inward rectifier potassium channel 1 isoform 2) c4( ) c5(93623, 93624, 93625, 93626, 93627, 93628) c6( ) c7(bL, av, T, mj, d, eM, aW, ha, cV, aT, bAe, ci, g, bHm, cm, eA); #c1(KCNJ3) c2(NP_002230) c3(G protein-activated inward rectifier potassium channel 1 isoform 1) c4(126772, 126773) c5(126774, 126775, 126776, 126777, 126778, 126779) c6( ) c7(bL, av, T, mj, d, eM, aW, ha, cV, aT, bAe, ci, g, bHm, cm, eA); #c1(KCNJ4) c2(NP_690607) c3(inward rectifier potassium channel 4) c4(244910) c5(244911, 244912, 244913, 244914, 244915, 244916) c6( ) c7(bL, vj, HC, Mz, an, qO); #c1(KCNJ5) c2(XP_011541112) c3(G protein-activated inward rectifier potassium channel 4 isoform X1) c4(339621) c5(339622, 339623, 339624, 339625, 339626, 339627, 339628, 339629, 339630, 339631, 339632, 339633, 339634, 339635) c6( ) c7(Fj, mr, wL, bUU, e, cV, cz, bUV, aj, v, ajM, atN, J, av, mj, ajv, iv, bUW, bHm, Fg, HO, mu, avH, s, yL, bbe, Hu, cm, ga, bLF, bUT, HB, ei); #c1(KCNJ6) c2(NP_002231) c3(G protein-activated inward rectifier potassium channel 2) c4(126780) c5(126781, 126782, 126783, 126784, 126785, 126786, 126787, 126788, 126789, 126790) c6( ) c7(bL, av, mj, Z, vj, Gs, HG, bD, bAe, bS, bK, K, nA, et, PK, f); #c1(KCNJ8) c2(XP_005253415) c3(ATP-sensitive inward rectifier potassium channel 8 isoform X1) c4(272478, 272479) c5(272480, 272481, 272482, 272483, 272484, 272485, 272486, 272487, 272488, 272489, 272490, 272491, 272492, 272493, 272494, 272495) c6( ) c7(mr, ms, Bc, ha, mx, cz, mm, lG, gZ, vc, j, EZ, C, ajM); #c1(KCNJ9) c2(XP_006711368) c3(G protein-activated inward rectifier potassium channel 3 isoform X2) c4(285971) c5( ) c6( ) c7(bL, av, bUX, ha, aj, ur, J); #c1(KCNJ9) c2(XP_011507822) c3(G protein-activated inward rectifier potassium channel 3 isoform X1) c4( ) c5(297962, 297963, 297964, 297965, 297966, 297967) c6( ) c7(bL, av, bUX, ha, aj, ur, J); #c1(KCNK1) c2(NP_002236) c3(potassium channel subfamily K member 1) c4(126809, 126810, 126811) c5(126812, 126813, 126814, 126815, 126816, 126817, 126818, 126819, 126820, 126821, 126822, 126823) c6( ) c7(dD, ajM, eq, m, t, eA); #c1(KCNK1) c2(XP_011542486) c3(potassium channel subfamily K member 1 isoform X1) c4( ) c5(340974, 340975, 340976, 340977, 340978, 340979) c6( ) c7(dD, ajM, eq, m, t, eA); #c1(KCNK10) c2(NP_066984) c3(potassium channel subfamily K member 10 isoform 1 precursor) c4(208018) c5(208019, 208020, 208021, 208022, 208023, 208024) c6( ) c7(cm, T, aaw, eu); #c1(KCNK10) c2(NP_612190) c3(potassium channel subfamily K member 10 isoform 2) c4(236135) c5(236136, 236137, 236138, 236139, 236140, 236141) c6( ) c7(cm, T, aaw, eu); #c1(KCNK10) c2(NP_612191) c3(potassium channel subfamily K member 10 isoform 3) c4(236142) c5(236143, 236144, 236145, 236146, 236147, 236148) c6( ) c7(cm, T, aaw, eu); #c1(KCNK12) c2(NP_071338) c3(potassium channel subfamily K member 12) c4(211093) c5(211094, 211095, 211096, 211097, 211098, 211099, 211100) c6( ) c7(vo, af, qj); #c1(KCNK16) c2(NP_001128577) c3(potassium channel subfamily K member 16 isoform 1) c4(50306) c5(50307, 50308, 50309, 50310, 50311, 50312) c6( ) c7(bL, T); #c1(KCNK16) c2(NP_001128578) c3(potassium channel subfamily K member 16 isoform 3) c4(50313) c5(50314, 50315, 50316, 50317, 50318, 50319) c6( ) c7(bL, T); #c1(KCNK16) c2(NP_001128579) c3(potassium channel subfamily K member 16 isoform 4) c4(50320, 50321) c5(50322, 50323, 50324, 50325, 50326, 50327, 50328) c6( ) c7(bL, T); #c1(KCNK16) c2(NP_115491) c3(potassium channel subfamily K member 16 isoform 2) c4(222894) c5(222895, 222896, 222897, 222898, 222899, 222900) c6( ) c7(bL, T); #c1(KCNK16) c2(XP_011513237) c3(potassium channel subfamily K member 16 isoform X2) c4( ) c5(305467, 305468, 305469, 305470, 305471) c6( ) c7(bL, T); #c1(KCNK17) c2(NP_001128583) c3(potassium channel subfamily K member 17 isoform 2) c4(50343) c5(50344, 50345, 50346, 50347, 50348, 50349) c6( ) c7(bL, eu, ac, M); #c1(KCNK17) c2(NP_113648) c3(potassium channel subfamily K member 17 isoform 1) c4(221918) c5(221919, 221920, 221921, 221922, 221923, 221924) c6( ) c7(bL, eu, ac, M); #c1(KCNK18) c2(NP_862823) c3(potassium channel subfamily K member 18) c4(255765) c5(255766, 255767, 255768, 255769, 255770, 255771) c6( ) c7(cZ, T, xi, ayp, ur, uu, dd, bUY); #c1(KCNK2) c2(NP_001017424) c3(potassium channel subfamily K member 2 isoform a) c4(26486, 26487, 26488) c5(26489, 26490, 26491, 26492, 26493, 26494, 26495, 26496, 26497, 26498, 26499, 26500, 26501, 26502, 26503, 26504, 26505, 26506, 26507, 26508) c6( ) c7(il, T, dD, c, wO, eu, ha, bO, cy, gf, bS, et, eq, Z, vo, ae, ad, cB); #c1(KCNK2) c2(NP_001017425) c3(potassium channel subfamily K member 2 isoform c) c4(26509, 26510) c5(26511, 26512, 26513, 26514, 26515, 26516, 26517, 26518, 26519, 26520, 26521) c6( ) c7(il, T, dD, c, wO, eu, ha, bO, cy, gf, bS, et, eq, Z, vo, ae, ad, cB); #c1(KCNK2) c2(NP_055032) c3(potassium channel subfamily K member 2 isoform b) c4(178403) c5(178404, 178405, 178406, 178407, 178408, 178409) c6( ) c7(il, T, dD, c, wO, eu, ha, bO, cy, gf, bS, et, eq, Z, vo, ae, ad, cB); #c1(KCNK2) c2(XP_011507826) c3(potassium channel subfamily K member 2 isoform X2) c4( ) c5(297968, 297969, 297970) c6( ) c7(il, T, dD, c, wO, eu, ha, bO, cy, gf, bS, et, eg, Z, vo, ae, ad, cB); #c1(KCNK3) c2(NP_002237) c3(potassium channel subfamily K member 3) c4(126824, 126825) c5(126826, 126827, 126828, 126829, 126830, 126831, 126832) c6( ) c7(lD, ly, T, mr, iX, ha, cV, cz, vc, K, MA, eK, bUZ, EZ, cB, HO, lx, mu); #c1(KCNK3) c2(XP_005264350) c3(potassium channel subfamily K member 3 isoform X1) c4( ) c5(278824, 278825, 278826, 278827, 278828) c6( ) c7(lD, ly, T, mr, iX, ha, cV, cz, vc, K, MA, eK, bUZ, EZ, cB, HO, lx, mu); #c1(KCNK5) c2(NP_003731) c3(potassium channel subfamily K member 5) c4(140497) c5(140498, 140499, 140500, 140501, 140502, 140503) c6( ) c7(T, s, iU, aW, Fg, aT, V, cB); #c1(KCNK6) c2(NP_004814) c3(potassium channel subfamily K member 6) c4(150002) c5(150003, 150004, 150005, 150006, 150007, 150008) c6( ) c7(qb); #c1(KCNK9) c2(XP_011515404) c3(potassium channel subfamily K member 9 isoform X1) c4(308220) c5(308221, 308222, 308223, 308224, 308225, 308226, 308227, 308228, 308229, 308230, 308231, 308232, 308233, 308234) c6( ) c7(T, d, Mr, aW, Y, HN, aT, bVa, nA, Fg); #c1(KCNMA1) c2(NP_001154824) c3(calcium-activated potassium channel subunit alpha-1 isoform c) c4(61149, 61150) c5(61151, 61152, 61153, 61154, 61155, 61156, 61157, 61158, 61159, 61160, 61161, 61162) c6( ) c7(T, oe, ha, aw, cz, aj, v, fr, eA, ad, cF, aT, cy, HR, bVb, hg, qM, Fg, Df, ae, ajT, aW, Y, vj, eH, agF, cl, eF, xw, qa, bN, zV, ac, c, bnP, wk, U, hL, el, bzm, cB); #c1(KCNMA1) c2(NP_001154825) c3(calcium-activated potassium channel subunit alpha-1 isoform d) c4(61163) c5(61164, 61165, 61166, 61167, 61168, 61169) c6( ) c7(T, oe, ha, aw, cz, aj, v, fr, eA, ad, cF, aT, cy, HR, bVb, hg, qM, Fg, Df, ae, ajT, aW, Y, vj, eH, agF, cl, eF, xw, qa, bN, zV, ac, c, bnP, wk, U, hL, el, bzm, cB); #c1(KCNMA1) c2(NP_001258448) c3(calcium-activated potassium channel subunit alpha-1 isoform f) c4(96081) c5( ) c6( ) c7(T, oe, ha, aw, cz, aj, v, fr, eA, ad, cF, aT, cy, HR, bVb, hg, qM, Fg, Df, ae, ajT, aW, Y, vj, eH, agF, cl, eF, xw, qa, bN, zV, ac, c, bnP, wk, U, hL, el, bzm, cB); #c1(KCNMA1) c2(NP_002238) c3(calcium-activated potassium channel subunit alpha-1 isoform b) c4(126833) c5(126834, 126835, 126836, 126837, 126838, 126839) c6( ) c7(T, oe, ha, aw, cz, aj, v, fr, eA, ad, cF, aT, cy, HR, bVb, hg, qM, Fg, Df, ae, ajT, aW, Y, vj, eH, agF, cl, eF, xw, qa, bN, zV, ac, c, bnP, wk, U, hL, el, bzm, cB); #c1(KCNMA1) c2(XP_005269833) c3(calcium-activated potassium channel subunit alpha-1 isoform X21) c4(282898) c5( ) c6( ) c7(T, oe, ha, aw, cz, aj, v, fr, eA, ad, cF, aT, cy, HR, bVb, hg, qM, Fg, Df, ae, ajT, aW, Y, vj, eH, agF, cl, eF, xw, qa, bN, zV, ac, c, bnP, wk, U, hL, el, bzm, cB); #c1(KCNMA1) c2(XP_005269835) c3(calcium-activated potassium channel subunit alpha-1 isoform X9) c4(282899) c5( ) c6( ) c7(T, oe, ha, aw, cz, aj, v, fr, eA, ad, cF, aT, cy, HR, bVb, hg, qM, Fg, Df, ae, ajT, aW, Y, vj, eH, agF, cl, eF, xw, qa, bN, zV, ac, c, bnP, wk, U, hL, el, bzm, cB); #c1(KCNMA1) c2(XP_005269838) c3(calcium-activated potassium channel subunit alpha-1 isoform X10) c4(282900, 282901) c5(282902, 282903, 282904, 282905, 282906, 282907, 282908, 282909, 282910, 282911, 282912, 282913, 282914, 282915, 282916, 282917, 282918, 282919) c6( ) c7(T, oe, ha, aw, cz, aj, v, fr, eA, ad, cF, aT, cy, HR, bVb, hg, qM, Fg, Df, ae, ajT, aW, Y, vj, eH, agF, cl, eF, xw, qa, bN, zV, ac, c, bnP, wk, U, hL, el, bzm, cB); #c1(KCNMA1) c2(XP_005269844) c3(calcium-activated potassium channel subunit alpha-1 isoform X22) c4(282920, 282921) c5(282922, 282923, 282924, 282925, 282926, 282927, 282928, 282929, 282930, 282931, 282932, 282933) c6( ) c7(T, oe, ha, aw, cz, aj, v, fr, eA, ad, cF, aT, cy, HR, bVb, hg, qM, Fg, Df, ae, ajT, aW, Y, vj, eH, agF, cl, eF, xw, qa, bN, zV, ac, c, bnP, wk, U, hL, el, bzm, cB); #c1(KCNMA1) c2(XP_005269846) c3(calcium-activated potassium channel subunit alpha-1 isoform X14) c4( ) c5(282934, 282935, 282936, 282937, 282938, 282939) c6( ) c7(T, oe, ha, aw, cz, aj, v, fr, eA, ad, cF, aT, cy, HR, bVb, hg, qM, Fg, Df, ae, ajT, aW, Y, vj, eH, agF, cl, eF, xw, qa, bN, zV, ac, c, bnP, wk, U, hL, el, bzm, cB); #c1(KCNMA1) c2(XP_005269853) c3(calcium-activated potassium channel subunit alpha-1 isoform X17) c4(282940) c5(282941, 282942, 282943, 282944, 282945, 282946) c6( ) c7(T, oe, ha, aw, cz, aj, v, fr, eA, ad, cF, aT, cy, HR, bVb, hg, qM, Fg, Df, ae, ajT, aW, Y, vj, eH, agF, cl, eF, xw, qa, bN, zV, ac, c, bnP, wk, U, hL, el, bzm, cB); #c1(KCNMA1) c2(XP_005269854) c3(calcium-activated potassium channel subunit alpha-1 isoform X18) c4(282947) c5(282948, 282949, 282950, 282951, 282952, 282953) c6( ) c7(T, oe, ha, aw, cz, aj, v, fr, eA, ad, cF, aT, cy, HR, bVb, hg, qM, Fg, Df, ae, ajT, aW, Y, vj, eH, agF, cl, eF, xw, qa, bN, zV, ac, c, bnP, wk, U, hL, el, bzm, cB); #c1(KCNMA1) c2(XP_011538081) c3(calcium-activated potassium channel subunit alpha-1 isoform X7) c4(335634, 335635) c5(335636, 335637, 335638, 335639, 335640, 335641, 335642, 335643, 335644, 335645, 335646, 335647) c6( ) c7(T, oe, ha, aw, cz, aj, v, fr, eA, ad, cF, aT, cy, HR, bVb, hg, qM, Fg, Df, ae, ajT, aW, Y, vj, eH, agF, cl, eF, xw, qa, bN, zV, ac, c, bnP, wk, U, hL, el, bzm, cB); #c1(KCNMA1) c2(XP_011538085) c3(calcium-activated potassium channel subunit alpha-1 isoform X13) c4(335648) c5(335649, 335650, 335651, 335652, 335653, 335654) c6( ) c7(T, oe, ha, aw, cz, aj, v, fr, eA, ad, cF, aT, cy, HR, bVb, hg, qM, Fg, Df, ae, ajT, aW, Y, vj, eH, agF, cl, eF, xw, qa, bN, zV, ac, c, bnP, wk, U, hL, el, bzm, cB); #c1(KCNMA1) c2(XP_011538086) c3(calcium-activated potassium channel subunit alpha-1 isoform X19) c4(335655) c5(335656, 335657, 335658, 335659, 335660, 335661) c6( ) c7(T, oe, ha, aw, cz, aj, v, fr, eA, ad, cF, aT, cy, HR, bVb, hg, qM, Fg, Df, ae, ajT, aW, Y, vj, eH, agF, cl, eF, xw, qa, bN, zV, ac, c, bnP, wk, U, hL, el, bzm, cB); #c1(KCNMA1) c2(XP_011538087) c3(calcium-activated potassium channel subunit alpha-1 isoform X23) c4( ) c5(335662, 335663, 335664, 335665, 335666, 335667) c6( ) c7(T, oe, ha, aw, cz, aj, v, fr, eA, ad, cF, aT, cy, HR, bVb, hg, qM, Fg, Df, ae, ajT, aW, Y, vj, eH, agF, cl, eF, xw, qa, bN, zV, ac, c, bnP, wk, U, hL, el, bzm, cB); #c1(KCNMB1) c2(NP_004128) c3(calcium-activated potassium channel subunit beta-1) c4(143805, 143806) c5(143807, 143808, 143809, 143810, 143811, 143812, 143813, 143814, 143815, 143816, 143817, 143818) c6( ) c7(fU, bM, ac, uW, vj, aw, cz, arD, bVc, dy, j, aY, eA); #c1(KCNMB2) c2(NP_001265840) c3(calcium-activated potassium channel subunit beta-2) c4(99301, 99302, 99303, 99304) c5(99305, 99306, 99307, 99308, 99309, 99310, 99311, 99312, 99313, 99314, 99315, 99316, 99317, 99318, 99319, 99320, 99321, 99322, 99323, 99324, 99325, 99326, 99327, 99328, 99329, 99330, 99331, 99332, 99333, 99334, 99335, 99336, 99337, 99338, 99339, 99340) c6( ) c7(hn, cd, bVd); #c1(KCNMB3) c2(NP_001157149) c3(calcium-activated potassium channel subunit beta-3 isoform e) c4(62076) c5(62077, 62078, 62079, 62080, 62081, 62082) c6( ) c7(yr, Cq, arI, ff, ha, HN, hg, en); #c1(KCNMB3) c2(NP_055222) c3(calcium-activated potassium channel subunit beta-3 isoform d) c4(179919) c5(179920, 179921, 179922, 179923, 179924, 179925) c6( ) c7(yr, Cq, arI, ff, ha, HN, hg, en); #c1(KCNMB3) c2(NP_741979) c3(calcium-activated potassium channel subunit beta-3 isoform a) c4(247492) c5(247493, 247494, 247495, 247496, 247497, 247498) c6( ) c7(yr, Cg, arI, ff, ha, HN, hg, en); #c1(KCNMB3) c2(NP_741980) c3(calcium-activated potassium channel subunit beta-3 isoform b) c4(247499) c5(247500, 247501, 247502, 247503, 247504, 247505, 247506, 247507, 247508, 247509) c6( ) c7(yr, Cq, arI, ff, ha, HN, hg, en); #c1(KCNMB3) c2(NP_741981) c3(calcium-activated potassium channel subunit beta-3 isoform c) c4(247510) c5(247511, 247512, 247513, 247514, 247515, 247516) cG( ) c7(yr, Cq, arI, ff, ha, HN, hg, en); #c1(KCNMB4) c2(NP_055320) c3(calcium-activated potassium channel subunit beta-4) c4(180455) c5(180456, 180457, 180458, 180459, 180460, 180461) cG( ) c7(nX, oe, ha); #c1(KCNN1) c2(NP_002239) c3(small conductance calcium-activated potassium channel protein 1) c4( ) c5(126840, 126841, 126842, 126843, 126844) c6( ) c7(iV); #c1(KCNN1) c2(XP_005259963) c3(small conductance calcium-activated potassium channel protein 1 isoform X2) c4(276323, 276324) c5(276325, 276326, 276327, 276328, 276329, 276330) c6( ) c7(iV); #c1(KCNN1) c2(XP_005259964) c3(small conductance calcium-activated potassium channel protein 1 isoform X4) c4( ) c5(276331) c6( ) c7(iV); #c1(KCNN2) c2(NP_067627) c3(small conductance calcium-activated potassium channel protein 2 isoform a) c4(209077, 209078) c5(209079, 209080, 209081, 209082, 209083, 209084, 209085, 209086, 209087, 209088, 209089) c6( ) c7(od, hb, e, aS, Xu, If); #c1(KCNN2) c2(NP_740721) c3(small conductance calcium-activated potassium channel protein 2 isoform b) c4(247431) c5(247432, 247433, 247434, 247435, 247436) c6( ) c7(od, hb, e, aS, Xu, If); #c1(KCNN2) c2(XP_011541691) c3(small conductance calcium-activated potassium channel protein 2 isoform X1) c4( ) c5(340218, 340219) c6( ) c7(od, hb, e, aS, Xu, If); #c1(KCNN3) c2(NP_002240) c3(small conductance calcium-activated potassium channel protein 3 isoform a) c4(126845, 126846, 126847) c5(126848, 126849, 126850, 126851, 126852, 126853, 126854, 126855, 126856, 126857, 126858, 126859) c6( ) c7(T, iH, mr, wL, mS, afv, j, ur, uu, tO, mW, iX, aT, bK, mY, mV, on, mU, aW, Y, ahl, vo, mZ, dR, mX, mT); #c1(KCNN3) c2(NP_740752) c3(small conductance calcium-activated potassium channel protein 3 isoform b) c4(247455) c5(247456, 247457, 247458, 247459, 247460, 247461, 247462, 247463, 247464, 247465, 247466, 247467) c6( ) c7(T, iH, mr, wL, mS, afv, j, ur, uu, tO, mW, iX, aT, bK, mY, mV, on, mU, aW, Y, ahl, vo, mZ, dR, mX, mT); #c1(KCNN4) c2(NP_002241) c3(intermediate conductance calcium-activated potassium channel protein 4) c4(126860, 126861) c5(126862, 126863, 126864, 126865, 126866, 126867) c6( ) c7(bM, dD, ea, aw, cz, cR, bB, aj, eq, eA, J, El, ad, x, K, ae, HI, cl, eK, LB, ck, bE, z, hL, hO, Hb); #c1(KCNN4) c2(XP_005258939) c3(intermediate conductance calcium-activated potassium channel protein 4 isoform X1) c4( ) c5(275902, 275903, 275904, 275905, 275906, 275907) c6( ) c7(bM, dD, ea, aw, cz, cR, bB, aj, eq, eA, J, El, ad, x, K, ae, HI, cl, eK, LB, ck, bE, z, hL, hO, Hb); #c1(KCNQ1) c2(NP_000209) c3(potassium voltage-gated channel subfamily KQT member 1 isoform 1) c4(4610) c5(4611, 4612, 4613, 4614, 4615, 4616, 4617, 4618, 4619) c6( ) c7(bL, T, bzy, bVe, mr, wL, Or, e, ha, hx, EQ, cV, cz, bB, aj, v, j, bD, ml, atN, ajM, q, J, Mk, tO, er, iu, aw, cc, oW, h, jy, vc, adm, K, on, HO, mu, Qe, aa, bVg, vj, r, EZ, g, Z, HI, bz, dr, eM, bVf, bUC, mG, ali, gX, mg, gZ, mx, avl, bo, dy, QF, IM, gg, rf); #c1(KCNQ1) c2(NP_861463) c3(potassium voltage-gated channel subfamily KQT member 1 isoform 2 precursor) c4(255609) c5(255610, 255611, 255612, 255613, 255614, 255615) c6( ) c7(bL, T, bzy, bVe, mr, wL, Or, e, ha, hx, EQ, cV, cz, bB, aj, v, j, bD, ml, atN, ajM, q, J, Mk, tO, er, iu, aw, cc, oW, h, jy, vc, adm, K, on, HO, mu, Qe, aa, bVg, vj, r, EZ, g, Z, HI, bz, dr, eM, bVf, bUC, mG, ali, gX, mg, gZ, mx, avl, bo, dy, QF, IM, gg, rf); #c1(KCNQ2) c2(NP_004509) c3(potassium voltage-gated channel subfamily KQT member 2 isoform c) c4(147019) c5(147020, 147021, 147022, 147023, 147024, 147025, 147026, 147027, 147028, 147029, 147030, 147031, 147032) c6( ) c7(bVk, ha, cV, mS, iD, nA, FR, aR, bVi, hb, mW, nX, Im, bK, hg, mY, mV, mu, mU, Kp, akf, mZ, akq, mX, bVh, Cq, bVj, aOc, avl, agT, mT); #c1(KCNQ2) c2(NP_742104) c3(potassium voltage-gated channel subfamily KQT member 2 isoform b) c4(248122, 248123) c5(248124, 248125, 248126, 248127, 248128, 248129, 248130) c6( ) c7(bVk, ha, cV, mS, iD, nA, FR, aR, bVi, hb, mW, nX, Im, bK, hg, mY, mV, mu, mU, Kp, akf, mZ, akq, mX, bVh, Cq, bVj, aOc, avl, agT, mT); #c1(KCNQ2) c2(NP_742105) c3(potassium voltage-gated channel subfamily KQT member 2 isoform a) c4(248131, 248132) c5(248133, 248134, 248135, 248136, 248137, 248138, 248139, 248140, 248141, 248142, 248143, 248144, 248145) c6( ) c7(bVk, ha, cV, mS, iD, nA, FR, aR, bVi, hb, mW, nX, Im, bK, hg, mY, mV, mu, mU, Kp, akf, mZ, akq, mX, bVh, Cq, bVj, aOc, avl, agT, mT); #c1(KCNQ2) c2(NP_742106) c3(potassium voltage-gated channel subfamily KQT member 2 isoform d) c4(248146) c5(248147, 248148, 248149, 248150, 248151, 248152, 248153, 248154, 248155, 248156, 248157, 248158) c6( ) c7(bVk, ha, cV, mS, iD, nA, FR, aR, bVi, hb, mW, nX, Im, bK, hg, mY, mV, mu, mU, Kp, akf, mZ, akq, mX, bVh, Cq, bVj, aOc, avl, agT, mT); #c1(KCNQ2) c2(NP_742107) c3(potassium voltage-gated channel subfamily KQT member 2 isoform e) c4(248159) c5(248160, 248161, 248162, 248163, 248164, 248165, 248166) c6( ) c7(bVk, ha, cV, mS, iD, nA, FR, aR, bVi, hb, mW, nX, Im, bK, hg, mY, mV, mu, mU, Kp, akf, mZ, akq, mX, bVh, Cq, bVj, aOc, avl, agT, mT); #c1(KCNQ2) c2(XP_006723850) c3(potassium voltage-gated channel subfamily KQT member 2 isoform X5) c4(295408) c5(295409, 295410, 295411, 295412, 295413, 295414) cG( ) c7(bVk, ha, cV, mS, iD, nA, FR, aR, bVi, hb, mW, nX, Im, bK, hg, mY, mV, mu, mU, Kp, akf, mZ, akq, mX, bVh, Cq, bVj, aOc, avl, agT, mT); #c1(KCNQ2) c2(XP_011527111) c3(potassium voltage-gated channel subfamily KQT member 2 isoform X3) c4(321604) c5( ) c6( ) c7(bVk, ha, cV, mS, iD, nA, FR, aR, bVi, hb, mW, nX, Im, bK, hg, mY, mV, mu, mU, Kp, akf, mZ, akq, mX, bVh, Cq, bVj, aOc, avl, agT, mT); #c1(KCNQ2) c2(XP_011527113) c3(potassium voltage-gated channel subfamily KQT member 2 isoform XG) c4(321605, 321606, 321607) c5(321608, 321609, 321610, 321611, 321612, 321613, 321614, 321615, 321616, 321617, 321618, 321619, 321620, 321621, 321622, 321623, 321624, 321625) c6( ) c7(bVk, ha, cV, mS, iD, nA, FR, aR, bVi, hb, mW, nX, Im, bK, hg, mY, mV, mu, mU, Kp, akf, mZ, akq, mX, bVh, Cq, bVj, aOc, avl, agT, mT); #c1(KCNQ3) c2(NP_001191753) c3(potassium voltage-gated channel subfamily KQT member 3 isoform 2 precursor) c4(81656, 81657) c5(81658, 81659, 81660, 81661, 81662, 81663, 81664, 81665, 81666, 81667, 81668, 81669) c6( ) c7(bVk, Cq, ac, ha, HN, akf, iD, avl, hg, nA, il, vo, agT, cd, akq); #c1(KCNQ3) c2(NP_004510) c3(potassium voltage-gated channel subfamily KQT member 3 isoform 1) c4(147033, 147034) c5(147035, 147036, 147037, 147038, 147039, 147040, 147041, 147042, 147043, 147044, 147045, 147046) c6( ) c7(bVk, Cq, ac, ha, HN, akf, iD, avl, hg, nA, il, vo, agT, cd, akq); #c1(KCNQ5) c2(NP_001153602) c3(potassium voltage-gated channel subfamily KQT member 5 isoform 2) c4(60714) c5(60715, 60716, 60717, 60718, 60719, 60720) c6( ) c7(atL, T, ha, Be); #c1(KCNQ5) c2(NP_001153604) c3(potassium voltage-gated channel subfamily KQT member 5 isoform 3) c4(60721) c5(60722, 60723, 60724, 60725, 60726, 60727) c6( ) c7(atL, T, ha, Be); #c1(KCNQ5) c2(NP_001153605) c3(potassium voltage-gated channel subfamily KQT member 5 isoform 4) c4(60728, 60729, 60730) c5(60731, 60732, 60733, 60734, 60735, 60736, 60737, 60738, 60739, 60740, 60741, 60742) c6( ) c7(atL, T, ha, Be); #c1(KCNQ5) c2(NP_001153606) c3(potassium voltage-gated channel subfamily KQT member 5 isoform 5) c4(60743) c5(60744, 60745, 60746, 60747, 60748, 60749, 60750, 60751, 60752, 60753, 60754, 60755) c6( ) c7(atL, T, ha, Be); #c1(KCNQ5) c2(NP_062816) c3(potassium voltage-gated channel subfamily KQT member 5 isoform 1) c4(202103, 202104, 202105) c5(202106, 202107, 202108, 202109, 202110, 202111, 202112, 202113, 202114, 202115, 202116, 202117, 202118, 202119, 202120, 202121, 202122, 202123) c6( ) c7(atL, T, ha, Be); #c1(KCNR6) c2(NP_775876) c3(potassium channel regulatory protein isoform 1) c4(250542) c5(250543, 250544, 250545, 250546, 250547, 250548) c6( ) c7(fd, B, ad, jh, cj); #c1(KCNR6) c2(NP_955751) c3(potassium channel regulatory protein isoform 2) c4(261939) c5(261940, 261941, 261942, 261943, 261944, 261945) c6( ) c7(fd, B, ad, jh, cj); #c1(KCNS1) c2(XP_005260466) c3(potassium voltage-gated channel subfamily S member 1 isoform X1) c4(276555) c5(276556, 276557, 276558, 276559, 276560, 276561, 276562, 276563, 276564, 276565) c6( ) c7(Pt, gf, h, hq); #c1(KCNS3) c2(XP_011531127) c3(potassium voltage-gated channel subfamily S member 3 isoform X1) c4(327092, 327093) c5(327094, 327095, 327096, 327097, 327098, 327099, 327100, 327101, 327102, 327103, 327104, 327105, 327106, 327107, 327108, 327109) c6( ) c7(vo, fq, bK, ac, c); #c1(KCNT1) c2(NP_065873) c3(potassium channel subfamily T member 1 isoform 1) c4(206002, 206003) c5(206004, 206005, 206006, 206007, 206008, 206009, 206010, 206011, 206012, 206013, 206014, 206015) c6( ) c7(bVm, bVl, ha, lr, aNX, hg, fg, aNW); #c1(KCNT1) c2(XP_011517182) c3(potassium channel subfamily T member 1 isoform X4) c4(310773) c5(310774, 310775, 310776, 310777, 310778, 310779) c6( ) c7(bVm, bVl, ha, lr, aNX, hg, fg, aNW); #c1(KCNT2) c2(NP_001274748) c3(potassium channel subfamily T member 2 isoform 2) c4(106750, 106751) c5(106752, 106753, 106754, 106755, 106756, 106757) c6( ) c7(W); #c1(KCNT2) c2(NP_001274749) c3(potassium channel subfamily T member 2 isoform 3) c4(106758) c5(106759, 106760, 106761, 106762, 106763, 106764) c6( ) c7(W); #c1(KCNT2) c2(NP_940905) c3(potassium channel subfamily T member 2 isoform 1) c4(260076) c5(260077, 260078, 260079, 260080, 260081, 260082, 260083, 260084, 260085, 260086, 260087, 260088, 260089) c6( ) c7(W); #c1(KCNT2) c2(XP_006711357) c3(potassium channel subfamily T member 2 isoform X1) c4( ) c5(285936, 285937) c6( ) c7(W); #c1(KCNT2) c2(XP_006711358) c3(potassium channel subfamily T member 2 isoform X2) c4(285938) c5( ) c6( ) c7(W); #c1(KCNT2) c2(XP_011507785) c3(potassium channel subfamily T member 2 isoform X4) c4( ) c5(297851, 297852, 297853, 297854, 297855) c6( ) c7(W); #c1(KCNU1) c2(NP_001027006) c3(potassium channel subfamily U member 1) c4(30062) c5(30063, 30064, 30065, 30066, 30067, 30068) c6( ) c7(cd); #c1(KCNV1) c2(NP_055194) c3(potassium voltage-gated channel subfamily V member 1) c4(179682, 179683) c5(179684, 179685, 179686, 179687, 179688, 179689, 179690, 179691, 179692, 179693, 179694, 179695, 179696, 179697, 179698, 179699) c6( ) c7(oe); #c1(KCNV2) c2(NP_598004) c3(potassium voltage-gated channel subfamily V member 2) c4(235268, 235269) c5(235270, 235271, 235272, 235273, 235274, 235275, 235276, 235277, 235278, 235279, 235280, 235281) c6( ) c7(IR, nx, bVn, rf, OL, oQ, HO, mu); #c1(KCTD1) c2(NP_001136202) c3(BTB/POZ domain-containing protein KCTD1 isoform b) c4(54513, 54514) c5(54515, 54516, 54517, 54518, 54519, 54520) c6( ) c7(bVp, Xt, cj, bVo); #c1(KCTD1) c2(NP_001245150) c3(BTB/POZ domain-containing protein KCTD1 isoform a) c4( ) c5(92619, 92620, 92621, 92622, 92623, 92624, 92625, 92626, 92627, 92628, 92629) c6( ) c7(bVp, Xt, cj, bVo); #c1(KCTD1) c2(NP_001245151) c3(BTB/POZ domain-containing protein KCTD1 isoform c) c4( ) c5(92630, 92631, 92632) c6( ) c7(bVp, Xt, cj, bVo); #c1(KCTD10) c2(NP_114160) c3(BTB/POZ domain-containing adapter for CUL3-mediated RhoA degradation protein 3) c4(222441, 222442, 222443) c5(222444, 222445, 222446, 222447, 222448, 222449, 222450, 222451, 222452, 222453, 222454, 222455, 222456, 222457, 222458, 222459, 222460, 222461, 222462, 222463, 222464, 222465, 222466, 222467) c6( ) c7(dQ, cm, fb); #c1(KCTD11) c2(NP_001002914) c3(BTB/POZ domain-containing protein KCTD11) c4(19763) c5(19764, 19765, 19766, 19767, 19768, 19769) c6( ) c7(jf, T, ft, ib, nO, oW, cz, iv, hS); #c1(KCTD12) c2(NP_612453) c3(BTB/POZ domain-containing protein KCTD12) c4(236523) c5(236524, 236525, 236526, 236527, 236528, 236529, 236530, 236531, 236532, 236533, 236534) c6( ) c7(bL, fb, j); #c1(KCTD13) c2(NP_849194) c3(BTB/POZ domain-containing adapter for CUL3-mediated RhoA degradation protein 1) c4(254489) c5(254490, 254491, 254492, 254493, 254494, 254495, 254496, 254497, 254498, 254499) c6( ) c7(QK, bN); #c1(KCTD15) c2(NP_076981) c3(BTB/POZ domain-containing protein KCTD15 isoform 1) c4(214571) c5(214572, 214573, 214574, 214575, 214576, 214577) c6( ) c7(bL, dD, ea, e, r, v, eq, fq, q); #c1(KCTD15) c2(XP_011525598) c3(BTB/POZ domain-containing protein KCTD15 isoform X2) c4(319989) c5(319990, 319991, 319992, 319993, 319994, 319995, 319996, 319997, 319998, 319999, 320000) c6( ) c7(bL, dD, ea, e, r, v, eq, fq, q); #c1(KCTD15) c2(XP_011525600) c3(BTB/POZ domain-containing protein KCTD15 isoform X1) c4(320001, 320002) c5(320003, 320004, 320005, 320006, 320007, 320008, 320009, 320010, 320011, 320012, 320013, 320014, 320015) c6( ) c7(bL, dD, ea, e, r, v, eq, fq, q); #c1(KCTD16) c2(XP_005268550) c3(BTB/POZ domain-containing protein KCTD16 isoform X1) c4(281883) c5(281884, 281885, 281886, 281887, 281888, 281889, 281890, 281891, 281892, 281893) c6( ) c7(j); #c1(KCTD2) c2(NP_056168) c3(BTB/POZ domain-containing protein KCTD2) c4(186081, 186082) c5(186083, 186084, 186085, 186086, 186087, 186088, 186089, 186090, 186091, 186092, 186093, 186094) c6( ) c7(aaw); #c1(KCTD21) c2(XP_005273982) c3(BTB/POZ domain-containing protein KCTD21 isoform X2) c4(284900, 284901, 284902) c5(284903, 284904) c6( ) c7(jf); #c1(KCTD21) c2(XP_006718579) c3(BTB/POZ domain-containing protein KCTD21 isoform X3) c4( ) c5(291905, 291906, 291907, 291908) c6( ) c7(jf); #c1(KCTD21) c2(XP_006718581) c3(BTB/POZ domain-containing protein KCTD21 isoform X1) c4(291909, 291910, 291911) c5(291912, 291913, 291914, 291915, 291916, 291917, 291918, 291919, 291920, 291921, 291922, 291923, 291924, 291925, 291926, 291927, 291928, 291929, 291930, 291931, 291932, 291933, 291934, 291935, 291936, 291937, 291938, 291939, 291940, 291941) c6( ) c7(jf); #c1(KCTD3) c2(NP_057205) c3(BTB/POZ domain-containing protein KCTD3) c4(189470, 189471) c5(189472, 189473, 189474, 189475, 189476, 189477) c6( ) c7(rz, ey); #c1(KCTD3) c2(XP_005273213) c3(BTB/POZ domain-containing protein KCTD3 isoform X1) c4(284337) c5(284338, 284339, 284340, 284341, 284342, 284343, 284344, 284345, 284346, 284347, 284348, 284349, 284350) c6( ) c7(rz, ey); #c1(KCTD3) c2(XP_005273215) c3(BTB/POZ domain-containing protein KCTD3 isoform X2) c4(284351, 284352) c5(284353, 284354, 284355, 284356, 284357, 284358, 284359, 284360, 284361, 284362, 284363) c6( ) c7(rz, ey); #c1(KCTD6) c2(NP_699162) c3(BTB/POZ domain-containing protein KCTD6) c4(245760) c5(245761, 245762, 245763, 245764, 245765, 245766, 245767, 245768, 245769, 245770, 245771, 245772, 245773, 245774, 245775, 245776, 245777, 245778) c6( ) c7(jf); #c1(KCTD7) c2(NP_001161433) c3(BTB/POZ domain-containing protein KCTD7 isoform 2) c4(65784) c5(65785, 65786, 65787, 65788, 65789, 65790) c6( ) c7(bEQ, bVq, yZ, bVr, yU, agT, rY); #c1(KCTD7) c2(NP_694578) c3(BTB/POZ domain-containing protein KCTD7 isoform 1) c4(245309) c5(245310, 245311, 245312, 245313, 245314, 245315) c6( ) c7(bEQ, bVg, yZ, bVr, yU, agT, rY); #c1(KCTD9) c2(NP_060104) c3(BTB/POZ domain-containing protein KCTD9) c4(194175) c5(194176, 194177, 194178, 194179, 194180, 194181) c6( ) c7(aGj, jE, vi); #c1(KDELC1) c2(NP_076994) c3(KDEL motif-containing protein 1 precursor) c4(214666) c5(214667, 214668, 214669, 214670, 214671, 214672) c6( ) c7(ac); #c1(KDELR1) c2(NP_006792) c3(ER lumen protein-retaining receptor 1) c4(168100) c5(168101, 168102, 168103, 168104, 168105, 168106) c6( ) c7(ad); #c1(KDM2A) c2(NP_001243334) c3(lysine-specific demethylase 2A isoform b) c4(90416, 90417) c5(90418, 90419, 90420, 90421, 90422, 90423, 90424, 90425, 90426, 90427, 90428, 90429, 90430) c6( ) c7(T, bz, ci, eM); #c1(KDM2A) c2(NP_036440) c3(lysine-specific demethylase 2A isoform a) c4(173885, 173886) c5(173887, 173888, 173889, 173890, 173891, 173892, 173893, 173894, 173895, 173896, 173897, 173898) c6( ) c7(T, bz, ci, eM); #c1(KDM2A) c2(XP_011543162) c3(lysine-specific demethylase 2A isoform X2) c4(341995) c5( ) c6( ) c7(T, bz, ci, eM); #c1(KDM2A) c2(XP_011543164) c3(lysine-specific demethylase 2A isoform X5) c4( ) c5(341996, 341997, 341998, 341999, 342000) c6( ) c7(T, bz, ci, eM); #c1(KDM2B) c2(NP_001005366) c3(lysine-specific demethylase 2B isoform b) c4(21497) c5(21498, 21499, 21500, 21501, 21502, 21503, 21504, 21505, 21506) c6( ) c7(ck, T, kP, aE, aW, aT, kp, anN, avQ); #c1(KDM2B) c2(NP_115979) c3(lysine-specific demethylase 2B isoform a) c4(225050, 225051) c5(225052, 225053, 225054, 225055, 225056, 225057, 225058, 225059, 225060, 225061, 225062, 225063) c6( ) c7(ck, T, kP, aE, aW, aT, kp, anN, avQ); #c1(KDM2B) c2(XP_005254013) c3(lysine-specific demethylase 2B isoform X12) c4(272867) c5( ) c6( ) c7(ck, T, kP, aE, aW, aT, kp, anN, avQ); #c1(KDM2B) c2(XP_011537170) c3(lysine-specific demethylase 2B isoform X9) c4(334926, 334927) c5( ) c6( ) c7(ck, T, kP, aE, aW, aT, kp, anN, avQ); #c1(KDM2B) c2(XP_011537171) c3(lysine-specific demethylase 2B isoform X10) c4( ) c5(334928, 334929, 334930, 334931, 334932, 334933, 334934, 334935, 334936, 334937, 334938, 334939) c6( ) c7(ck, T, kP, aE, aW, aT, kp, anN, avQ); #c1(KDM2B) c2(XP_011537172) c3(lysine-specific demethylase 2B isoform X13) c4( ) c5(334940, 334941, 334942, 334943, 334944, 334945) c6( ) c7(ck, T, kP, aE, aW, aT, kp, anN, avQ); #c1(KDM2B) c2(XP_011537177) c3(lysine-specific demethylase 2B isoform X18) c4(334946) c5(334947, 334948, 334949, 334950, 334951, 334952) c6( ) c7(ck, T, kP, aE, aW, aT, kp, anN, avQ); #c1(KDM3A) c2(NP_060903) c3(lysine-specific demethylase 3A) c4(198517, 198518, 198519, 198520) c5(198521, 198522, 198523, 198524, 198525, 198526, 198527, 198528, 198529, 198530, 198531, 198532, 198533, 198534, 198535, 198536, 198537, 198538, 198539, 198540, 198541, 198542, 198543, 198544, 198545, 198546, 198547, 198548, 198549, 198550, 198551, 198552, 198553, 198554, 198555, 198556, 198557, 198558, 198559, 198560, 198561, 198562, 198563, 198564, 198565) c6( ) c7(T, wu, bB, n, v, ci, q, ad, PI, vH, dL, wm, ae, eL, ND, r, cm, bz, es, iA, bE, eD, B); #c1(KDM3A) c2(XP_011531287) c3(lysine-specific demethylase 3A isoform X1) c4(327262, 327263) c5(327264) c6( ) c7(T, wu, bB, n, v, ci, g, ad, PI, vH, dL, wm, ae, eL, ND, r, cm, bz, es, iA, bE, eD, B); #c1(KDM3B) c2(NP_057688) c3(lysine-specific demethylase 38) c4(192340, 192341, 192342, 192343) c5(192344, 192345, 192346, 192347, 192348, 192349, 192350, 192351, 192352, 192353, 192354, 192355, 192356, 192357, 192358, 192359, 192360, 192361, 192362) c6( ) c7(ck, x, iT, aW, r, aT, n, k, bdj, bt, q, hq); #c1(KDM3B) c2(XP_011541791) c3(lysine-specific demethylase 38 isoform X2) c4( ) c5(340383, 340384, 340385, 340386, 340387, 340388) c6( ) c7(ck, x, iT, aW, r, aT, n, k, bdj, bt, q, hq); #c1(KDM4B) c2(NP_055830) c3(lysine-specific demethylase 48) c4(183759, 183760) c5(183761, 183762, 183763, 183764, 183765, 183766, 183767, 183768) c6(183769, 183770) c7(jf, ae, T, bE, aW, r, aT, aA, bB, dL, aF, g, bz, q, ad, bA); #c1(KDM4B) c2(XP_005259578) c3(lysine-specific demethylase 48 isoform X1) c4(276144) c5(276145, 276146, 276147, 276148, 276149, 276150) c6( ) c7(jf, ae, T, bE, aW, r, aT, aA, bB, dL, aF, g, bz, q, ad, bA); #c1(KDM4B) c2(XP_011526117) c3(lysine-specific demethylase 4B isoform X3) c4( ) c5(320394) c6( ) c7(jf, ae, T, bE, aW, r, aT, aA, bB, dL, aF, g, bz, q, ad, bA); #c1(KDM4B) c2(XP_011526120) c3(lysine-specific demethylase 4B isoform X7) c4( ) c5(320395, 320396, 320397, 320398, 320399, 320400) c6( ) c7(jf, ae, T, bE, aW, r, aT, aA, bB, dL, aF, g, bz, q, ad, bA); #c1(KDM4C) c2(NP_001140167) c3(lysine-specific demethylase 4C isoform 3) c4( ) c5(60025, 60026, 60027, 60028, 60029) c6( ) c7(Gl, T, oe, ht, aw, eX, jh, hy, fr, cd, ad, aT, eV, Gw, ae, jf, ff, en, FX, fq, bN, Gu, it); #c1(KDM4C) c2(NP_001140168) c3(lysine-specific demethylase 4C isoform 4) c4(60030, 60031) c5(60032, 60033, 60034, 60035, 60036, 60037, 60038) c6( ) c7(Gl, T, oe, ht, aw, eX, jh, hy, fr, cd, ad, aT, eV, Gw, ae, jf, ff, en, FX, fq, bN, Gu, it); #c1(KDM4C) c2(NP_001291269) c3(lysine-specific demethylase 4C isoform 6) c4(115626) c5(115627, 115628, 115629, 115630, 115631, 115632) c6( ) c7(Gl, T, oe, ht, aw, eX, jh, hy, fr, cd, ad, aT, eV, Gw, ae, jf, ff, en, FX, fq, bN, Gu, it); #c1(KDM4C) c2(NP_055876) c3(lysine-specific demethylase 4C isoform 1) c4(184092, 184093, 184094) c5(184095, 184096, 184097, 184098, 184099, 184100, 184101, 184102, 184103, 184104, 184105, 184106, 184107, 184108, 184109, 184110, 184111, 184112, 184113) c6( ) c7(Gl, T, oe, ht, aw, eX, jh, hy, fr, cd, ad, aT, eV, Gw, ae, jf, ff, en, FX, fq, bN, Gu, it); #c1(KDM4C) c2(XP_011516111) c3(lysine-specific demethylase 4C isoform X3) c4( ) c5(309333) c6( ) c7(Gl, T, oe, ht, aw, eX, jh, hy, fr, cd, ad, aT, eV, Gw, ae, jf, ff, en, FX, fq, bN, Gu, it); #c1(KDM4C) c2(XP_011516113) c3(lysine-specific demethylase 4C isoform X4) c4(309334) c5(309335, 309336, 309337, 309338, 309339) c6( ) c7(Gl, T, oe, ht, aw, eX, jh, hy, fr, cd, ad, aT, eV, Gw, ae, jf, ff, en, FX, fq, bN, Gu, it); #c1(KDM4C) c2(XP_011516118) c3(lysine-specific demethylase 4C isoform X8) c4(309340) c5(309341, 309342, 309343, 309344, 309345, 309346) c6( ) c7(Gl, T, oe, ht, aw, eX, jh, hy, fr, cd, ad, aT, eV, Gw, ae, jf, ff, en, FX, fq, bN, Gu, it); #c1(KDM5A) c2(NP_001036068) c3(lysine-specific demethylase 5A) c4(33920, 33921, 33922, 33923) c5(33924, 33925, 33926, 33927, 33928, 33929, 33930, 33931, 33932, 33933, 33934, 33935, 33936, 33937, 33938, 33939, 33940, 33941, 33942, 33943, 33944, 33945, 33946, 33947, 33948) c6( ) c7(ck, yi, mR, Dy, eM, bP, aW, aT, aA, n, Hn, aF, nA, hF, ht, bz, B); #c1(KDM5B) c2(NP_006609) c3(lysine-specific demethylase 5B) c4(166602) c5(166603, 166604, 166605, 166606, 166607, 166608, 166609, 166610, 166611, 166612, 166613, 166614, 166615, 166616, 166617, 166618, 166619, 166620, 166621, 166622) c6( ) c7(gx, T, kP, aW, Y, oV, yk, eL, r, aT, cd, cz, dL, Hn, bu, bz, q, ad); #c1(KDM5B) c2(XP_011507391) c3(lysine-specific demethylase 5B isoform X3) c4(297250) c5( ) c6( ) c7(gx, T, kP, aW, Y, oV, yk, eL, r, aT, cd, cz, dL, Hn, bu, bz, q, ad); #c1(KDM5B) c2(XP_011507393) c3(lysine-specific demethylase 5B isoform X4) c4( ) c5(297251, 297252, 297253) c6( ) c7(gx, T, kP, aW, Y, oV, yk, eL, r, aT, cd, cz, dL, Hn, bu, bz, q, ad); #c1(KDM5B) c2(XP_011507394) c3(lysine-specific demethylase 5B isoform X5) c4(297254, 297255) c5(297256, 297257, 297258, 297259, 297260) c6( ) c7(gx, T, kP, aW, Y, oV, yk, eL, r, aT, cd, cz, dL, Hn, bu, bz, q, ad); #c1(KDM5C) c2(NP_001140174) c3(lysine-specific demethylase 5C isoform 2) c4(60039) c5(60040, 60041, 60042, 60043, 60044, 60045, 60046) c6( ) c7(py, Rq, bVs, ha, nf, fr, nA, lu, bN); #c1(KDM5C) c2(NP_001269551) c3(lysine-specific demethylase 5C isoform 3) c4(101901) c5(101902, 101903, 101904, 101905, 101906, 101907) c6( ) c7(py, Rq, bVs, ha, nf, fr, nA, lu, bN); #c1(KDM5C) c2(NP_004178) c3(lysine-specific demethylase 5C isoform 1) c4(144111) c5(144112, 144113, 144114, 144115, 144118, 144117, 144118) c6( ) c7(py, Rq, bVs, ha, nf, fr, nA, lu, bN); #c1(KDM5C) c2(XP_005262092) c3(lysine-specific demethylase 5C isoform X1) c4(277744) c5(277745, 277746, 277747, 277748, 277749, 277750) c6( ) c7(py, Rq, bVs, ha, nf, fr, nA, lu, bN); #c1(KDM5C) c2(XP_011529128) c3(lysine-specific demethylase 5C isoform X4) c4(324451) c5(324452, 324453, 324454, 324455, 324456, 324457) c6( ) c7(py, Rq, bVs, ha, nf, fr, nA, lu, bN); #c1(KDM5D) c2(NP_001140177) c3(lysine-specific demethylase 5D isoform 1) c4(60047) c5(60048, 60049, 60050, 60051, 60052, 60053) c6( ) c7(AV, aF, fr, aEE, aA); #c1(KDM5D) c2(NP_001140178) c3(lysine-specific demethylase 5D isoform 3) c4(60054) c5(60055, 60056, 60057, 60058, 60059, 60060) c6( ) c7(AV, aF, fr, aEE, aA); #c1(KDM5D) c2(NP_004644) c3(lysine-specific demethylase 5D isoform 2) c4(148473, 148474) c5(148475, 148476, 148477, 148478, 148479, 148480, 148481, 148482, 148483, 148484, 148485, 148486, 148487) c6( ) c7(AV, aF, fr, aEE, aA); #c1(KDM5D) c2(XP_005262617) c3(lysine-specific demethylase 5D isoform X2) c4(278013) c5(278014, 278015, 278016, 278017, 278018, 278019) c6( ) c7(AV, aF, fr, aEE, aA); #c1(KDM5D) c2(XP_005262619) c3(lysine-specific demethylase 5D isoform X4) c4(278020) c5(278021, 278022, 278023, 278024, 278025, 278026) c6( ) c7(AV, aF, fr, aEE, aA); #c1(KDM5D) c2(XP_011529770) c3(lysine-specific demethylase 5D isoform X1) c4(325434) c5(325435, 325436, 325437, 325438, 325439, 325440) c6( ) c7(AV, aF, fr, aEE, aA); #c1(KDM6A) c2(NP_001278344) c3(lysine-specific demethylase 6A isoform 1) c4(109557, 109558) c5(109559) c6( ) c7(T, id, fd, n, fr, nA, lu, XW, py, bVt, qK, aT, hD, dL, jj, eL, jf, aW, bUh, bw, ck, it); #c1(KDM6A) c2(NP_001278345) c3(lysine-specific demethylase 6A isoform 2) c4(109560) c5(109561, 109562, 109563, 109564, 109565, 109566) c6( ) c7(T, id, fd, n, fr, nA, lu, XW, py, bVt, qK, aT, hD, dL, jj, eL, jf, aW, bUh, bw, ck, it); #c1(KDM6A) c2(NP_001278346) c3(lysine-specific demethylase 6A isoform 4) c4(109567, 109568) c5(109569, 109570, 109571, 109572, 109573, 109574) c6( ) c7(T, id, fd, n, fr, nA, lu, XW, py, bVt, qK, aT, hD, dL, jj, eL, jf, aW, bUh, bw, ck, it); #c1(KDM6A) c2(NP_001278347) c3(lysine-specific demethylase 6A isoform 5) c4(109575) c5(109576, 109577, 109578, 109579, 109580, 109581, 109582) c6( ) c7(T, id, fd, n, fr, nA, lu, XW, py, bVt, qK, aT, hD, dL, jj, eL, jf, aW, bUh, bw, ck, it); #c1(KDM6A) c2(NP_001278350) c3(lysine-specific demethylase 6A isoform 6) c4( ) c5(109590) c6( ) c7(T, id, fd, n, fr, nA, lu, XW, py, bVt, qK, aT, hD, dL, jj, eL, jf, aW, bUh, bw, ck, it); #c1(KDM6A) c2(NP_066963) c3(lysine-specific demethylase 6A isoform 3) c4(207840) c5(207841, 207842, 207843, 207844, 207845, 207846) c6( ) c7(T, id, fd, n, fr, nA, lu, XW, py, bVt, qK, aT, hD, dL, jj, eL, jf, aW, bUh, bw, ck, it); #c1(KDM6A) c2(XP_005272716) c3(lysine-specific demethylase 6A isoform X19) c4(284161) c5(284162, 284163, 284164, 284165, 284166, 284167) c6( ) c7(T, id, fd, n, fr, nA, lu, XW, py, bVt, qK, aT, hD, dL, jj, eL, jf, aW, bUh, bw, ck, it); #c1(KDM6A) c2(XP_011542262) c3(lysine-specific demethylase 6A isoform X4) c4( ) c5(340845, 340846, 340847, 340848, 340849, 340850, 340851, 340852, 340853, 340854, 340855) c6( ) c7(T, id, fd, n, fr, nA, lu, XW, py, bVt, qK, aT, hD, dL, jj, eL, jf, aW, bUh, bw, ck, it); #c1(KDM6A) c2(XP_011542275) c3(lysine-specific demethylase 6A isoform X18) c4( ) c5(340856, 340857, 340858, 340859, 340860, 340861) c6( ) c7(T, id, fd, n, fr, nA, lu, XW, py, bVt, qK, aT, hD, dL, jj, eL, jf, aW, bUh, bw, ck, it); #c1(KDM6A) c2(XP_011542276) c3(lysine-specific demethylase 6A isoform X20) c4(340862, 340863) c5(340864, 340865, 340866, 340867, 340868, 340869, 340870, 340871, 340872, 340873) c6( ) c7(T, id, fd, n, fr, nA, lu, XW, py, bVt, qK, aT, hD, dL, jj, eL, jf, aW, bUh, bw, ck, it); #c1(KDM6A) c2(XP_011542277) c3(lysine-specific demethylase 6A isoform X21) c4(340874) c5(340875, 340876, 340877, 340878, 340879, 340880) c6( ) c7(T, id, fd, n, fr, nA, lu, XW, py, bVt, qK, aT, hD, dL, jj, eL, jf, aW, bUh, bw, ck, it); #c1(KDM6B) c2(NP_001073893) c3(lysine-specific demethylase 6B) c4(36337) c5(36338, 36339, 36340, 36341, 36342, 36343) c6( ) c7(T, B, bE, qK, eZ, bB, aq, fr, br, nA, bw, ae, X, ad, bA); #c1(KDM6B) c2(XP_005256611) c3(lysine-specific demethylase 6B isoform X2) c4(274224) c5(274225, 274226, 274227, 274228, 274229, 274230) c6( ) c7(T, B, bE, qK, eZ, bB, aq, fr, br, nA, bw, ae, X, ad, bA); #c1(KDM6B) c2(XP_011522056) c3(lysine-specific demethylase 6B isoform X4) c4( ) c5(316716) c6( ) c7(T, B, bE, qK, eZ, bB, aq, fr, br, nA, bw, ae, X, ad, bA); #c1(KDR) c2(NP_002244) c3(vascular endothelial growth factor receptor 2 precursor) c4(126868) c5(126869, 126870, 126871, 126872, 126873, 126874) c6( ) c7(bM, T, aC, UH, pf, bVx, ea, if, al, bO, eb, bB, fd, gf, ci, Hr, x, Vp, bv, aGm, aE, il, fm, rw, M, dV, Vv, K, cp, li, aW, fc, hl, nY, g, as, cm, gJ, y, eM, nB, iT, mx, vy, cj, uJ, k, m, Xu, Vj, dD, sw, ht, NT, n, BH, aj, fr, ct, bd, rP, zP, eh, ai, biS, b, ft, jz, i, h, IG, Jn, Um, dx, cY, hl, bkN, mR, MD, aJ, hQ, aq, cM, fs, W, bP, dB, Vy, hL, auh, bVv, hR, at, aAl, B, bL, fM, dA, eR, jp, aA, cz, WD, zN, hy, j, wo, il, q, J, eA, eJ, nv, BJ, MP, aT, cy, Tj, bq, rv, ae, af, dl, eu, jf, iF, PK, iU, vT, nO, oV, Y, r, en, bu, cl, t, Vi, acp, aoy, pb, ck, ov, beH, beJ, kP, c, ac, nM, wO, nG, JL, dy, EY, bt, hS, gx, id, ow, qz, iW, oA, jh, dG, ah, eq, hF, gb, ad, afb, Jm, fU, dP, F, ard, ib, py, yt, oz, Hk, ji, fb, nJ, uQ, d, ue, cH, cW, ff, cr, eZ, aF, iV, bVw, bz, Hv, eK, Hp, es, nb, bE, bVu, ajw, aS, oQ, GF, lf, vt, jr); #c1(KDSR) c2(NP_002026) c3(3-ketodihydrosphingosine reductase precursor) c4(123413) c5(123414, 123415, 123416, 123417, 123418, 123419, 123420, 123421, 123422, 123423, 123424, 123425, 123426, 123427, 123428, 123429) c6(123430, 123431, 123432, 123433) c7(kf, T, fM, j); #c1(KDSR) c2(XP_006722496) c3(3-ketodihydrosphingosine reductase isoform X1) c4(294720) c5( ) c6( ) c7(kf, T, fM, j); #c1(KEAPI) c2(NP_036421) c3(kelch-like ECH-associated protein 1) c4(173686) c5(173687, 173688, 173689, 173690, 173691, 173692, 173693, 173694, 173695, 173696, 173697) c6( ) c7(T, eR, e, aWG, bB, aj, fr, ci, C, aY, q, J, er, fU, av, cc, aE, aT, io, IG, K, hB, an, af, Zm, aa, s, aW, ff, r, Qq, nY, en, g, t, iK, bz, nM, c, eM, bE, Qu, dh, U, at, aS, m, IC, bt, it, B); #c1(KEL) c2(NP_000411) c3(kell blood group glycoprotein) c4(8654) c5(8655, 8656, 8657, 8658, 8659, 8660) c6( ) c7(bL, bM, ZM, aw, qd, eB, dV, ZU, lf, bgl); #c1(KEL) c2(XP_005277046) c3(kell blood group glycoprotein isoform X2) c4( ) c5(285749) c6( ) c7(bL, bM, ZM, aw, qd, eB, dV, ZU, lf, bgl); #c1(KERA) c2(XP_011536083) c3(keratocan isoform X1) c4(333419) c5(333420, 333421, 333422, 333423, 333424, 333425) c6( ) c7(dD, pN, bmV, ea, bVy, ah, eq, bVz); #c1(KHDC3L) c2(NP_001017361) c3(KHDC3-like protein) c4(26252) c5(26253, 26254, 26255, 26256, 26257, 26258) c6( ) c7(CN, jv, ZH); #c1(KHDRBS2) c2(NP_689901) c3(KH domain-containing, RNA-binding, signal transduction-associated protein 2) c4(244325) c5(244326, 244327, 244328, 244329, 244330, 244331) c6( ) c7(Y, iu, K); #c1(KHDRBS2) c2(XP_006715417) c3(KH domain-containing, RNA-binding, signal transduction-associated protein 2 isoform X1) c4(289524) c5(289525, 289526, 289527, 289528, 289529, 289530) c6( ) c7(Y, iu, K); #c1(KHDRBS3) c2(NP_006549) c3(KH domain-containing, RNA-binding, signal transduction-associated protein 3) c4(166163) c5(166164, 166165, 166166, 166167, 166168, 166169) c6( ) c7(jf, aW, ha, aT, n, K, bVA, X); #c1(KHK) c2(NP_000212) c3(ketohexokinase isoform a) c4(4628) c5(4629, 4630, 4631, 4632, 4633, 4634) c6( ) c7(es, T, bVB, go, bVC, fr, bq); #c1(KHK) c2(NP_006479) c3(ketohexokinase isoform b) c4(165576) c5(165577, 165578, 165579, 165580, 165581, 165582) c6( ) c7(es, T, bVB, go, bVC, fr, bq); #c1(KHSRP) c2(NP_003676) c3(far upstream element-binding protein 2) c4(140116, 140117) c5( ) c6( ) c7(bO, aA, aj, hF, eA, aR, amW, ft, ec, aCJ, aql, aT, kf, dz, K, hS, zy, H, WZ, jf, eG, LG, Y, Ls, aF, hf, eE, cm, Qi, c, iT, Fi, bt, it, B, L); #c1(KHSRP) c2(XP_011526697) c3(far upstream element-binding protein 2 isoform X2) c4(320996) c5(320997, 320998, 320999, 321000, 321001, 321002, 321003, 321004, 321005, 321006, 321007, 321008, 321009, 321010, 321011, 321012, 321013, 321014) c6( ) c7(bO, aA, aj, hF, eA, aR, amW, ft, ec, aCJ, aql, aT, kf, dz, K, hS, zy, H, WZ, jf, eG, LG, Y, Ls, aF, hf, eE, cm, Qi, c, iT, Fi, bt, it, B, L); #c1(KIAA0020) c2(NP_055693) c3(pumilio domain-containing protein KIAA0020) c4(182804) c5(182805, 182806, 182807, 182808, 182809, 182810) c6( ) c7(hp); #c1(KIAA0040) c2(NP_055471) c3(uncharacterized protein KIAA0040) c4(181339) c5(181340, 181341, 181342, 181343, 181344, 181345, 181346, 181347) c6( ) c7(cd); #c1(KIAA0040) c2(XP_011508485) c3(uncharacterized protein KIAA0040 isoform X2) c4(299201) c5(299202, 299203, 299204, 299205, 299206, 299207, 299208, 299209, 299210) c6( ) c7(cd); #c1(KIAA0100) c2(NP_055495) c3(UPF0378 protein KIAA0100 precursor) c4(181505, 181506, 181507, 181508) c5(181509, 181510, 181511, 181512, 181513, 181514, 181515, 181516, 181517, 181518, 181519, 181520, 181521, 181522, 181523, 181524, 181525, 181526, 181527, 181528, 181529, 181530, 181531, 181532, 181533, 181534, 181535, 181536, 181537, 181538, 181539, 181540) c6( ) c7(aW, ci, kP, AO, aT); #c1(KIAA0100) c2(XP_006722261) c3(UPF0378 protein KIAA0100 isoform X2) c4( ) c5(294671, 294672, 294673) c6( ) c7(aW, ci, kP, AO, aT); #c1(KIAA0101) c2(NP_001025160) c3(PCNA-associated factor isoform 2) c4(29367) c5(29368, 29369, 29370, 29371, 29372, 29373) c6( ) c7(gx, T, dD, ea, ht, aA, bB, j, ci, eq, py, aE, aT, iv, ey, K, IQ, hu, ae, qt, aW, Y, iw, cr, aq, aF, Hu, g, iR, LV, cm, bz, DF, es, atU, eM, nB, bE, iA, JM, Th, B); #c1(KIAA0101) c2(NP_055551) c3(PCNA-associated factor isoform 1) c4(181896) c5(181897, 181898, 181899, 181900, 181901, 181902) c6( ) c7(gx, T, dD, ea, ht, aA, bB, j, ci, eq, py, aE, aT, iv, ey, K, IQ, hu, ae, qt, aW, Y, iw, cr, aq, aF, Hu, g, iR, LV, cm, bz, DF, es, atU, eM, nB, bE, iA, JM, Th, B); #c1(KIAA0196) c2(NP_055661) c3(WASH complex subunit strumpellin) c4(182591) c5(182592, 182593, 182594, 182595, 182596, 182597) c6( ) c7(bb, aV, oj, ajb, cz, bVD, ci, bi, cm, bVE, ae, ad); #c1(KIAA0226) c2(NP_001139114) c3(run domain Beclin-1 interacting and cysteine-rich containing protein isoform 1) c4(58699) c5(58700, 58701, 58702, 58703, 58704) c6( ) c7(bVF); #c1(KIAA0226) c2(NP_055502) c3(run domain Beclin-1 interacting and cysteine-rich containing protein isoform 2) c4(181589) c5(181590, 181591, 181592, 181593, 181594, 181595) c6( ) c7(bVF); #c1(KIAA0226) c2(XP_005269431) c3(run domain Beclin-1 interacting and cysteine-rich containing protein isoform X3) c4( ) c5(282564) c6( ) c7(bVF); #c1(KIAA0226) c2(XP_006713891) c3(run domain Beclin-1 interacting and cysteine-rich containing protein isoform X2) c4(287414) c5(287415, 287416, 287417, 287418, 287419, 287420) c6( ) c7(bVF); #c1(KIAA0226L) c2(NP_001273691) c3(uncharacterized protein KIAA0226-like isoform b) c4(105623) c5(105624, 105625, 105626, 105627, 105628, 105629, 105630, 105631, 105632, 105633, 105634, 105635, 105636, 105637, 105638, 105639, 105640, 105641, 105642, 105643, 105644) c6( ) c7(c, if, ff, ht, ey, en, qN); #c1(KIAA0226L) c2(NP_001273692) c3(uncharacterized protein KIAA0226-like isoform c) c4(105645) c5(105646, 105647, 105648, 105649, 105650, 105651) c6( ) c7(c, if, ff, ht, ey, en, qN); #c1(KIAA0226L) c2(NP_001273693) c3(uncharacterized protein KIAA0226-like isoform d) c4( ) c5(105652, 105653, 105654, 105655, 105656) c6( ) c7(c, if, ff, ht, ey, en, qN); #c1(KIAA0226L) c2(NP_001273694) c3(uncharacterized protein KIAA0226-like isoform e) c4(105657) c5(105658, 105659, 105660, 105661, 105662, 105663) c6( ) c7(c, if, ff, ht, ey, en, qN); #c1(KIAA0226L) c2(NP_079389) c3(uncharacterized protein KIAA0226-like isoform a) c4(217869, 217870, 217871, 217872) c5(217873, 217874, 217875, 217876, 217877, 217878, 217879, 217880, 217881, 217882, 217883, 217884) c6( ) c7(c, if, ff, ht, ey, en, qN); #c1(KIAA0232) c2(NP_001094060) c3(uncharacterized protein KIAA0232) c4(40560) c5(40561, 40562, 40563, 40564, 40565, 40566, 40567, 40568, 40569, 40570) c6( ) c7(j); #c1(KIAA0232) c2(XP_006713998) c3(uncharacterized protein KIAA0232 isoform X2) c4( ) c5(287489, 287490, 287491, 287492, 287493, 287494) c6( ) c7(j); #c1(KIAA0232) c2(XP_011511899) c3(uncharacterized protein KIAA0232 isoform X1) c4(302604) c5(302605) c6( ) c7(j); #c1(KIAA0319) c2(NP_001161846) c3(dyslexia-associated protein KIAA0319 isoform b) c4(66150) c5(66151, 66152, 66153, 66154, 66155, 66156) c6( ) c7(T, hl, qx, ha, VT, zN, ti, fu, nA, alP, afz, aR, xt, ad, yn, Ae, aT, bK, mL, bU, he, afx, bVH, Wq, ae, bVG, al, bVl, Lg, bdG, ago, PK, afy, bPl, aW, ED, ql, dq, lo, Fy, Ku, cm, bVJ, dr, bVK, kn, bN, bdT, alC, WO, afZ, FB, U, bdU, yA, bC, UF, Wl, xg, lf); #c1(KIAA0319) c2(NP_001161849) c3(dyslexia-associated protein KIAA0319 isoform d precursor) c4(66157) c5(66158, 66159, 66160, 66161, 66162, 66163) c6( ) c7(T, hl, qx, ha, VT, zN, ti, fu, nA, alP, afz, aR, xt, ad, yn, Ae, aT, bK, mL, bU, he, afx, bVH, Wq, ae, bVG, al, bVl, Lg, bdG, ago, PK, afy, bPI, aW, FD, gl, dq, Io, Fy, Ku, cm, bVJ, dr, bVK, kn, bN, bdT, alC, WO, afZ, FB, U, bdU, yA, bC, UF, Wl, xg, lf); #c1(KIAA0319) c2(NP_055624) c3(dyslexia-associated protein KIAA0319 isoform a precursor) c4(182330) c5(182331, 182332, 182333, 182334, 182335, 182336, 182337, 182338, 182339, 182340, 182341, 182342, 182343, 182344, 182345) c6( ) c7(T, hl, qx, ha, VT, zN, ti, fu, nA, alP, afz, aR, xt, ad, yn, Ae, aT, bK, mL, bU, he, afx, bVH, Wq, ae, bVG, al, bVI, Lg, bdG, ago, PK, afy, bPI, aW, FD, gl, dq, Io, Ey, Ku, cm, bVJ, dr, bVK, kn, bN, bdT, alC, WO, afZ, FB, U, bdU, yA, bC, UF, Wl, xg, lf); #c1(KIAA0319) c2(XP_011513326) c3(dyslexia-associated protein KIAA0319 isoform X3) c4(305588) c5(305589, 305590) c6( ) c7(T, hl, qx, ha, VT, zN, ti, fu, nA, alP, afz, aR, xt, ad, yn, Ae, aT, bK, mL, bU, he, afx, bVH, Wq, ae, bVG, al, bVI, Lg, bdG, ago, PK, afy, bPI, aW, FD, gl, dq, Io, Fy, Ku, cm, bVJ, dr, bVK, kn, bN, bdT, alC, WO, afZ, FB, U, bdU, yA, bC, UF, Wl, xg, lf); #c1(KIAA0319L) c2(XP_011540484) c3(dyslexia-associated protein KIAA0319-like protein isoform X3) c4(338958, 338959, 338960, 338961) c5(338962, 338963, 338964, 338965, 338966, 338967, 338968, 338969, 338970, 338971, 338972, 338973, 338974, 338975, 338976, 338977, 338978, 338979) c6( ) c7(eR, pb, yA, eZ); #c1(KIAA0355) c2(NP_055501) c3(uncharacterized protein KIAA0355) c4(181574, 181575) c5(181576, 181577, 181578, 181579, 181580, 181581, 181582, 181583, 181584, 181585, 181586, 181587, 181588) c6( ) c7(bK); #c1(KIAA0391) c2(NP_001243607) c3(mitochondrial ribonuclease P protein 3 isoform 2) c4(91175, 91176, 91177, 91178) c5(91179, 91180, 91181, 91182, 91183, 91184, 91185, 91186, 91187, 91188, 91189, 91190, 91191) c6( ) c7(cL, aw, j, cr); #c1(KIAA0391) c2(NP_001243608) c3(mitochondrial ribonuclease P protein 3 isoform 3) c4( ) c5(91192, 91193, 91194, 91195, 91196, 91197, 91198, 91199, 91200) c6( ) c7(cL, aw, j, cr); #c1(KIAA0391) c2(NP_001243610) c3(mitochondrial ribonuclease P protein 3 isoform 4) c4( ) c5(91201, 91202, 91203, 91204, 91205) c6( ) c7(cL, aw, j, cr); #c1(KIAA0391) c2(NP_055487) c3(mitochondrial ribonuclease P protein 3 isoform 1 precursor) c4(181441, 181442, 181443) c5(181444, 181445, 181446, 181447, 181448, 181449, 181450, 181451, 181452, 181453, 181454, 181455, 181456, 181457, 181458, 181459, 181460, 181461, 181462, 181463, 181464, 181465, 181466, 181467, 181468, 181469, 181470) c6( ) c7(cL, aw, j, cr); #c1(KIAA0586) c2(NP_001231118) c3(protein TALPID3 isoform 1) c4(87205) c5(87206, 87207, 87208, 87209, 87210, 87211) c6( ) c7(zG, Az, c); #c1(KIAA0586) c2(NP_001231119) c3(protein TALPID3 isoform 2) c4(87212) c5(87213, 87214, 87215, 87216, 87217, 87218, 87219, 87220, 87221, 87222, 87223) c6( ) c7(zG, Az, c); #c1(KIAA0586) c2(NP_001231120) c3(protein TALPID3 isoform 3) c4(87224) c5( ) c6( ) c7(zG, Az, c); #c1(KIAA0586) c2(NP_001231121) c3(protein TALPID3 isoform 4) c4(87225) c5(87226, 87227, 87228, 87229, 87230, 87231, 87232) c6( ) c7(zG, Az, c); #c1(KIAA0586) c2(NP_001231122) c3(protein TALPID3 isoform 6) c4( ) c5(87233) c6( ) c7(zG, Az, c); #c1(KIAA0586) c2(NP_055564) c3(protein TALPID3 isoform 5) c4(181954) c5(181955, 181956, 181957, 181958, 181959, 181960) c6( ) c7(zG, Az, c); #c1(KIAA0825) c2(NP_001139150) c3(uncharacterized protein KIAA0825 isoform 1) c4(58860) c5(58861, 58862, 58863, 58864, 58865, 58866, 58867, 58868, 58869, 58870) c6( ) c7(j, hB); #c1(KIAA0825) c2(NP_775936) c3(uncharacterized protein KIAA0825 isoform 2) c4( ) c5(250756, 250757, 250758, 250759, 250760, 250761) c6( ) c7(j, hB); #c1(KIAA0825) c2(XP_011541633) c3(uncharacterized protein KIAA0825 isoform X4) c4(340178, 340179) c5( ) c6( ) c7(j, hB); #c1(KIAA0825) c2(XP_011541636) c3(uncharacterized protein KIAA0825 isoform X7) c4( ) c5(340180, 340181, 340182, 340183, 340184, 340185) c6( ) c7(j, hB); #c1(KIAA0907) c2(NP_055764) c3(UPF0469 protein KIAA0907) c4(183343, 183344, 183345) c5(183346, 183347, 183348, 183349, 183350, 183351, 183352, 183353, 183354, 183355, 183356, 183357, 183358, 183359, 183360, 183361, 183362, 183363, 183364) c6( ) c7(bz); #c1(KIAA0922) c2(NP_001124479) c3(transmembrane protein 131-like isoform 1 precursor) c4(49132) c5(49133, 49134, 49135, 49136, 49137, 49138) c6( ) c7(aw); #c1(KIAA0922) c2(NP_056011) c3(transmembrane protein 131-like isoform 2 precursor) c4(185119) c5(185120, 185121, 185122, 185123, 185124, 185125) c6( ) c7(aw); #c1(KIAA0922) c2(XP_011530085) c3(transmembrane protein 131-like isoform X4) c4(325913) c5(325914, 325915, 325916, 325917, 325918, 325919) c6( ) c7(aw); #c1(KIAA1024) c2(NP_056021) c3(UPF0258 protein KIAA1024) c4(185200) c5(185201, 185202, 185203, 185204, 185205, 185206) c6( ) c7(oe); #c1(KIAA1033) c2(NP_056090) c3(WASH complex subunit 7 isoform 2) c4(185642) c5(185643, 185644, 185645, 185646, 185647, 185648) c6( ) c7(bK, nA); #c1(KIAA1109) c2(XP_005263344) c3(uncharacterized protein KIAA1109 isoform X1) c4(278444) c5(278445, 278446, 278447, 278448, 278449, 278450, 278451, 278452, 278453, 278454) c6( ) c7(Ki, A, Kk, ge, nf, hp, Ku, iV, y); #c1(KIAA1109) c2(XP_006714406) c3(uncharacterized protein KIAA1109 isoform X14) c4(287830) c5(287831, 287832, 287833, 287834, 287835, 287836) c6( ) c7(Ki, A, Kk, ge, nf, hp, Ku, iV, y); #c1(KIAA1109) c2(XP_006714407) c3(uncharacterized protein KIAA1109 isoform X15) c4( ) c5(287837, 287838, 287839, 287840, 287841, 287842) c6( ) c7(Ki, A, Kk, ge, nf, hp, Ku, iV, y); #c1(KIAA1109) c2(XP_011530632) c3(uncharacterized protein KIAA1109 isoform X12) c4(326727) c5( ) c6( ) c7(Ki, A, Kk, ge, nf, hp, Ku, iV, y); #c1(KIAA1147) c2(NP_001073861) c3(protein LCHN) c4(36153) c5(36154, 36155, 36156, 36157, 36158, 36159, 36160) c6( ) c7(cy, vs, eK); #c1(KIAA1161) c2(NP_065753) c3(uncharacterized family 31 glucosidase KIAA1161) c4(205190, 205191) c5(205192, 205193, 205194, 205195, 205196, 205197, 205198, 205199, 205200, 205201, 205202, 205203) c6( ) c7(af); #c1(KIAA1211) c2(NP_065773) c3(uncharacterized protein KIAA1211) c4(205309) c5(205310, 205311, 205312, 205313, 205314, 205315, 205316, 205317, 205318, 205319, 205320, 205321, 205322, 205323, 205324, 205325, 205326, 205327) c6( ) c7(ad); #c1(KIAA1211) c2(XP_005265813) c3(uncharacterized protein KIAA1211 isoform X7) c4(279740) c5( ) c6( ) c7(ad); #c1(KIAA1211) c2(XP_006714108) c3(uncharacterized protein KIAA1211 isoform X8) c4( ) c5(287572, 287573) c6( ) c7(ad); #c1(KIAA1211) c2(XP_011532700) c3(uncharacterized protein KIAA1211 isoform X4) c4(328732) c5( ) c6( ) c7(ad); #c1(KIAA1211L) c2(XP_005263981) c3(uncharacterized protein KIAA1211-like isoform X2) c4(278637) c5(278638, 278639, 278640, 278641, 278642, 278643) c6( ) c7(bK); #c1(KIAA1217) c2(NP_001091970) c3(sickle tail protein homolog isoform 2) c4(39089) c5(39090, 39091, 39092, 39093, 39094) c6( ) c7(aC, iM, je, rl, cd, Ek); #c1(KIAA1217) c2(NP_001269696) c3(sickle tail protein homolog isoform 4) c4(102581) c5(102582, 102583, 102584, 102585, 102586, 102587, 102588, 102589, 102590, 102591, 102592, 102593) c6( ) c7(aC, iM, je, rl, cd, Ek); #c1(KIAA1217) c2(NP_001269697) c3(sickle tail protein homolog isoform 5) c4(102594) c5(102595, 102596, 102597, 102598, 102599, 102600, 102601) c6( ) c7(aC, iM, je, rl, cd, Ek); #c1(KIAA1217) c2(NP_062536) c3(sickle tail protein homolog isoform 1) c4(201832) c5(201833, 201834, 201835, 201836, 201837, 201838) c6( ) c7(aC, iM, je, rl, cd, Ek); #c1(KIAA1217) c2(XP_005252564) c3(sickle tail protein homolog isoform X15) c4( ) c5(271878) c6( ) c7(aC, iM, je, rl, cd, Ek); #c1(KIAA1217) c2(XP_005252573) c3(sickle tail protein homolog isoform X21) c4( ) c5(271879, 271880, 271881, 271882, 271883, 271884, 271885, 271886, 271887, 271888) c6( ) c7(aC, iM, je, rl, cd, Ek); #c1(KIAA1217) c2(XP_011517859) c3(sickle tail protein homolog isoform X11) c4(311785, 311786) c5( ) c6( ) c7(aC, iM, je, rl, cd, Ek); #c1(KIAA1217) c2(XP_011517861) c3(sickle tail protein homolog isoform X14) c4(311787) c5(311788) c6( ) c7(aC, iM, je, rl, cd, Ek); #c1(KIAA1279) c2(NP_056449) c3(KIF1-binding protein) c4(187595) c5(187596, 187597, 187598, 187599, 187600, 187601) c6( ) c7(mO, ahl, nA, an, QK, ahE, bVL); #c1(KIAA1324) c2(XP_011540127) c3(UPF0577 protein KIAA1324 isoform X1) c4(338475, 338476) c5( ) c6( ) c7(auY, zY, zX, hL, Qm, m, bX, cl, bbr); #c1(KIAA1324) c2(XP_011540128) c3(UPF0577 protein KIAA1324 isoform X2) c4(338477) c5( ) c6( ) c7(auY, zY, zX, hL, Qm, m, bX, cl, bbr); #c1(KIAA1324) c2(XP_011540129) c3(UPF0577 protein KIAA1324 isoform X3) c4(338478) c5(338479, 338480, 338481, 338482, 338483, 338484) c6( ) c7(auY, zY, zX, hL, Qm, m, bX, cl, bbr); #c1(KIAA1324L) c2(NP_001136221) c3(UPF0577 protein KIAA1324-like isoform 1 precursor) c4(54521) c5(54522, 54523, 54524, 54525, 54526, 54527) c6( ) c7(fq); #c1(KIAA1324L) c2(NP_001278920) c3(UPF0577 protein KIAA1324-like isoform 4) c4(110991) c5(110992, 110993, 110994, 110995, 110996, 110997) c6( ) c7(fq); #c1(KIAA1324L) c2(NP_689961) c3(UPF0577 protein KIAA1324-like isoform 2) c4(244588) c5(244589, 244590, 244591, 244592, 244593, 244594) c6( ) c7(fq); #c1(KIAA1324L) c2(XP_006715958) c3(UPF0577 protein KIAA1324-like isoform X1) c4(289952) c5(289953, 289954, 289955, 289956, 289957) c6( ) c7(fq); #c1(KIAA1324L) c2(XP_011514220) c3(UPF0577 protein KIAA1324-like isoform X2) c4( ) c5(306823) c6( ) c7(fq); #c1(KIAA1377) c2(NP_065853) c3(uncharacterized protein KIAA1377) c4(205912, 205913) c5(205914, 205915, 205916, 205917, 205918, 205919, 205920, 205921, 205922, 205923, 205924, 205925) c6( ) c7(axl); #c1(KIAA1456) c2(XP_005273641) c3(probable tRNA methyltransferase 9-like protein isoform X3) c4(284749, 284750, 284751) c5(284752, 284753) c6( ) c7(j, q, r); #c1(KIAA1456) c2(XP_005273643) c3(probable tRNA methyltransferase 9-like protein isoform X1) c4( ) c5(284754, 284755, 284756, 284757, 284758, 284759, 284760, 284761, 284762, 284763, 284764) c6( ) c7(j, q, r); #c1(KIAA1456) c2(XP_011542899) c3(probable tRNA methyltransferase 9-like protein isoform X2) c4(341495) c5(341496, 341497, 341498, 341499, 341500) c6( ) c7(j, q, r); #c1(KIAA1456) c2(XP_011542903) c3(probable tRNA methyltransferase 9-like protein isoform X4) c4( ) c5(341501) c6( ) c7(j, q, r); #c1(KIAA1456) c2(XP_011542904) c3(probable tRNA methyltransferase 9-like protein isoform X7) c4( ) c5(341502, 341503, 341504, 341505, 341506) c6( ) c7(j, q, r); #c1(KIAA1462) c2(XP_011517910) c3(junctional protein associated with coronary artery disease isoform X1) c4(311853) c5(311854, 311855, 311856, 311857, 311858, 311859, 311860) c6( ) c7(fK, e, j, qM, af); #c1(KIAA1462) c2(XP_011517912) c3(junctional protein associated with coronary artery disease isoform X2) c4( ) c5(311861) c6( ) c7(fK, e, j, qM, af); #c1(KIAA1468) c2(NP_065905) c3(lisH domain and HEAT repeat-containing protein KIAA1468) c4(206150) c5(206151, 206152, 206153, 206154, 206155, 206156) c6( ) c7(cd); #c1(KIAA1468) c2(XP_005266787) c3(lisH domain and HEAT repeat-containing protein KIAA1468 isoform X3) c4(280324) c5(280325, 280326, 280327, 280328, 280329, 280330) c6( ) c7(cd); #c1(KIAA1524) c2(NP_065941) c3(protein CIP2A) c4(206351, 206352) c5(206353, 206354, 206355, 206356, 206357, 206358, 206359) c6( ) c7(T, dD, hl, QO, ea, if, aA, bB, n, aj, pl, eq, ci, qN, fr, q, av, iu, ds, aT, iU, NE, Jl, aW, Y, eH, r, aF, cl, eF, t, cm, bz, iK, ck, kP, Dy, asl, bE, eM, nw, m, nz, bt, B, y, de); #c1(KIAA1524) c2(XP_011511358) c3(protein CIP2A isoform X2) c4( ) c5(301927, 301928, 301929, 301930, 301931) c6( ) c7(T, dD, hl, QO, ea, if, aA, bB, n, aj, pl, eq, ci, qN, fr, q, av, iu, ds, aT, iU, NE, Jl, aW, Y, eH, r, aF, cl, eF, t, cm, bz, iK, ck, kP, Dy, asl, bE, eM, nw, m, nz, bt, B, y, de); #c1(KIAA1549) c2(NP_001158137) c3(UPF0606 protein KIAA1549 isoform 2) c4(63176) c5(63177, 63178, 63179, 63180, 63181, 63182) c6( ) c7(auJ, Ew, ac, EQ, aun, Vl, as, Fc, anu, eA, Hp); #c1(KIAA1549) c2(NP_065961) c3(UPF0606 protein KIAA1549 isoform 1) c4(206492, 206493) c5(206494, 206495, 206496, 206497, 206498, 206499, 206500, 206501, 206502, 206503, 206504, 206505) c6( ) c7(auJ, Ew, ac, EQ, aun, Vl, as, Fc, anu, eA, Hp); #c1(KIAA1551) c2(XP_005253462) c3(uncharacterized protein KIAA1551 isoform X1) c4(272503, 272504, 272505) c5(272506, 272507, 272508, 272509, 272510, 272511, 272512, 272513, 272514, 272515, 272516) c6( ) c7(Y); #c1(KIAA1551) c2(XP_006719162) c3(uncharacterized protein KIAA1551 isoform X2) c4( ) c5(292231, 292232, 292233, 292234, 292235, 292236, 292237) c6( ) c7(Y); #c1(KIAA1598) c2(NP_001120683) c3(shootin-1 isoform a) c4(44540, 44541) c5(44542, 44543, 44544, 44545, 44546, 44547, 44548, 44549, 44550, 44551, 44552, 44553) c6( ) c7(cd, Nc, bvU); #c1(KIAA1598) c2(NP_001245228) c3(shootin-1 isoform d) c4( ) c5(92758) c6( ) c7(cd, Nc, bvU); #c1(KIAA1598) c2(NP_001245229) c3(shootin-1 isoform e) c4(92759) c5(92760, 92761, 92762, 92763, 92764) c6( ) c7(cd, Nc, bvU); #c1(KIAA1598) c2(NP_060800) c3(shootin-1 isoform b) c4(197898) c5(197899, 197900, 197901, 197902, 197903, 197904, 197905) c6( ) c7(cd, Nc, bvU); #c1(KIAA1715) c2(NP_001291937) c3(protein lunapark isoform 1 precursor) c4( ) c5(116535) c6( ) c7(aMb, an); #c1(KIAA1715) c2(NP_001291938) c3(protein lunapark isoform 2) c4(116536, 116537) c5(116538, 116539, 116540, 116541, 116542, 116543) c6( ) c7(aMb, an); #c1(KIAA1715) c2(NP_001291939) c3(protein lunapark isoform 3 precursor) c4(116544) c5(116545, 116546, 116547, 116548, 116549, 116550) c6( ) c7(aMb, an); #c1(KIAA1715) c2(NP_001291940) c3(protein lunapark isoform 5) c4( ) c5(116551, 116552, 116553, 116554, 116555) c6( ) c7(aMb, an); #c1(KIAA1715) c2(NP_085153) c3(protein lunapark isoform 4) c4(219488, 219489) c5(219490, 219491, 219492, 219493, 219494, 219495, 219496) c6( ) c7(aMb, an); #c1(KIAA1715) c2(XP_005246935) c3(protein lunapark isoform X2) c4( ) c5(267522, 267523, 267524, 267525, 267526) c6( ) c7(aMb, an); #c1(KIAA1715) c2(XP_005246936) c3(protein lunapark isoform X3) c4(267527) c5(267528, 267529, 267530, 267531, 267532, 267533) c6( ) c7(aMb, an); #c1(KIAA1804) c2(NP_115811) c3(mitogen-activated protein kinase kinase kinase MLK4) c4(224034, 224035, 224036) c5(224037, 224038, 224039, 224040, 224041, 224042, 224043, 224044, 224045, 224046, 224047, 224048) c6( ) c7(ac, r); #c1(KIAA1804) c2(XP_011542607) c3(mitogen-activated protein kinase kinase kinase MLK4 isoform X1) c4( ) c5(341174, 341175, 341176, 341177, 341178, 341179) c6( ) c7(ac, r); #c1(KIAA1841) c2(XP_005264663) c3(uncharacterized protein KIAA1841 isoform X1) c4(279153) c5(279154, 279155, 279156, 279157, 279158, 279159) c6( ) c7(hp); #c1(KIAA1841) c2(XP_011531429) c3(uncharacterized protein KIAA1841 isoform X2) c4(327564) c5(327565, 327566, 327567, 327568, 327569, 327570, 327571, 327572, 327573, 327574, 327575, 327576, 327577, 327578) c6( ) c7(hp); #c1(KIAA1919) c2(NP_699200) c3(sodium-dependent glucose transporter 1) c4(245891) c5(245892, 245893, 245894, 245895, 245896, 245897) c6( ) c7(A); #c1(KIAA2022) c2(NP_001008537) c3(protein KIAA2022) c4(23305, 23306) c5(23307, 23308, 23309, 23310, 23311, 23312, 23313, 23314, 23315, 23316, 23317, 23318, 23319, 23320, 23321, 23322, 23323, 23324) c6( ) c7(pH, bVM, Kr, bO, nf, abl, nA, Wl, rz); #c1(KIDINS220) c2(NP_065789) c3(kinase D-interacting substrate of 220 kDa) c4(205441, 205442, 205443, 205444, 205445) c5(205446, 205447, 205448, 205449, 205450, 205451, 205452, 205453, 205454, 205455, 205456, 205457, 205458, 205459, 205460, 205461, 205462, 205463, 205464, 205465, 205466, 205467, 205468, 205469, 205470, 205471, 205472, 205473, 205474, 205475, 205476, 205477, 205478, 205479) c6( ) c7(bM, T, jx, SW, hX, bv, ec, h, dL, K, eL, af, ajU, cp, Qr, oV, Y, ih, eZ, cm, nC, bz, eK, eM, U, pw, Xu, y); #c1(KIF11) c2(NP_004514) c3(kinesin-like protein KIF11) c4(147092) c5(147093, 147094, 147095, 147096, 147097, 147098) c6( ) c7(bL, ov, T, bVO, d, af, bVN, dB, aT, Vv, ey, PN, nA, QK, fK); #c1(KIF13A) c2(NP_001099036) c3(kinesin-like protein KIF13A isoform b) c4(41736, 41737) c5(41738, 41739, 41740, 41741, 41742, 41743, 41744, 41745, 41746, 41747, 41748, 41749) c6( ) c7(bK, ad); #c1(KIF13A) c2(NP_001099037) c3(kinesin-like protein KIF13A isoform c) c4(41750) c5(41751, 41752, 41753, 41754, 41755, 41756) c6( ) c7(bK, ad); #c1(KIF13A) c2(NP_001099038) c3(kinesin-like protein KIF13A isoform d) c4(41757) c5(41758, 41759, 41760, 41761, 41762, 41763) c6( ) c7(bK, ad); #c1(KIF13A) c2(NP_001230352) c3(kinesin-like protein KIF13A isoform e) c4(86244) c5(86245, 86246, 86247, 86248, 86249, 86250) c6( ) c7(bK, ad); #c1(KIF13A) c2(NP_071396) c3(kinesin-like protein KIF13A isoform a) c4(211422) c5(211423, 211424, 211425, 211426, 211427, 211428) c6( ) c7(bK, ad); #c1(KIF14) c2(NP_055690) c3(kinesin-like protein KIF14) c4(182790) c5(182791, 182792, 182793, 182794, 182795, 182796) c6( ) c7(T, aC, n, qN, AO, eA, av, aE, aT, ey, jf, B, aW, ff, en, g, t, bz, kP, eM, bP, m, iu); #c1(KIF15) c2(NP_064627) c3(kinesin-like protein KIF15) c4(203361, 203362) c5(203363, 203364, 203365, 203366, 203367, 203368, 203369, 203370, 203371, 203372, 203373, 203374) c6( ) c7(ey, qy); #c1(KIF16B) c2(NP_001186795) c3(kinesin-like protein KIF16B isoform 1) c4(78599) c5(78600, 78601, 78602, 78603, 78604, 78605, 78606, 78607, 78608, 78609, 78610, 78611) c6( ) c7(bVP, bxw); #c1(KIF16B) c2(NP_078980) c3(kinesin-like protein KIF16B isoform 2) c4(216388, 216389) c5(216390, 216391, 216392, 216393, 216394, 216395) c6( ) c7(bVP, bxw); #c1(KIF16B) c2(XP_005260807) c3(kinesin-like protein KIF16B isoform X1) c4(276884) c5(276885, 276886, 276887, 276888, 276889, 276890, 276891, 276892, 276893, 276894, 276895, 276896, 276897, 276898, 276899, 276900) c6( ) c7(bVP, bxw); #c1(KIF16B) c2(XP_005260809) c3(kinesin-like protein KIF16B isoform X3) c4( ) c5(276901, 276902) c6( ) c7(bVP, bxw); #c1(KIF16B) c2(XP_005260811) c3(kinesin-like protein KIF16B isoform X6) c4(276903) c5(276904, 276905, 276906, 276907, 276908, 276909) c6( ) c7(bVP, bxw); #c1(KIF16B) c2(XP_006723651) c3(kinesin-like protein KIF16B isoform X7) c4(295268) c5(295269, 295270, 295271, 295272, 295273, 295274) c6( ) c7(bVP, bxw); #c1(KIF17) c2(XP_011540143) c3(kinesin-like protein KIF17 isoform X5) c4( ) c5(338501, 338502, 338503, 338504) c6( ) c7(vH, ND); #c1(KIF18A) c2(NP_112494) c3(kinesin-like protein KIF18A) c4(221158) c5(221159, 221160, 221161, 221162, 221163, 221164) c6( ) c7(T, aW, r, aT, ey, q); #c1(KIF1A) c2(NP_001230937) c3(kinesin-like protein KIF1A isoform 1) c4(87198) c5(87199, 87200, 87201, 87202, 87203, 87204) c6( ) c7(T, hl, aFa, bVQ, bVS, aj, bqQ, fu, bVR, cm, iK, akS, ad); #c1(KIF1A) c2(XP_005247080) c3(kinesin-like protein KIF1A isoform X3) c4(267637) c5(267638, 267639, 267640, 267641, 267642, 267643) c6( ) c7(T, hl, aFa, bVQ, bVS, aj, bqQ, fu, bVR, cm, iK, akS, ad); #c1(KIF1A) c2(XP_005247085) c3(kinesin-like protein KIF1A isoform X1) c4(267644) c5(267645, 267646, 267647, 267648, 267649, 267650, 267651) c6( ) c7(T, hl, aFa, bVQ, bVS, aj, bqQ, fu, bVR, cm, iK, akS, ad); #c1(KIF1A) c2(XP_011509666) c3(kinesin-like protein KIF1A isoform X2) c4(300245) c5(300246, 300247, 300248, 300249, 300250) c6( ) c7(T, hl, aFa, bVQ, bVS, aj, bqQ, fu, bVR, cm, iK, akS, ad); #c1(KIF1C) c2(NP_006603) c3(kinesin-like protein KIF1C) c4(166552, 166553) c5(166554, 166555, 166556, 166557, 166558, 166559, 166560, 166561, 166562, 166563, 166564, 166565, 166566) c6( ) c7(DS, Ng, no, ky, lu, bVT, Wl); #c1(KIF20A) c2(NP_005724) c3(kinesin-like protein KIF20A) c4(158861, 158862, 158863, 158864) c5(158865, 158866, 158867, 158868, 158869, 158870, 158871, 158872, 158873, 158874, 158875, 158876, 158877, 158878, 158879, 158880, 158881, 158882, 158883, 158884, 158885, 158886, 158887, 158888) c6( ) c7(T, aC, aE, Y, aA, n, kp, ey, aF); #c1(KIF20B) c2(NP_001271188) c3(kinesin-like protein KIF20B isoform 1) c4(103524, 103525, 103526) c5(103527, 103528, 103529, 103530, 103531, 103532, 103533, 103534, 103535, 103536, 103537, 103538, 103539, 103540, 103541, 103542, 103543, 103544) c6( ) c7(aW, aT, dL, Kw, bu, zy, eL); #c1(KIF20B) c2(NP_057279) c3(kinesin-like protein KIF20B isoform 2) c4(189825, 189826, 189827) c5(189828, 189829, 189830, 189831, 189832, 189833, 189834, 189835, 189836, 189837, 189838, 189839, 189840, 189841, 189842, 189843, 189844, 189845) c6( ) c7(aW, aT, dL, Kw, bu, zy, eL); #c1(KIF21A) c2(NP_001166934) c3(kinesin-like protein KIF21A isoform 3) c4(68657) c5(68658, 68659, 68660, 68661, 68662, 68663) c6( ) c7(Na, aUl, bVV, ft, tT, arH, oj, bVP, aNy, xv, bxw, bVU, zW, Al); #c1(KIF21A) c2(NP_001166935) c3(kinesin-like protein KIF21A isoform 1) c4(68664) c5(68665, 68666, 68667, 68668, 68669, 68670) c6( ) c7(Na, aUl, bVV, ft, tT, arH, oj, bVP, aNy, xv, bxw, bVU, zW, Al); #c1(KIF21A) c2(NP_001166936) c3(kinesin-like protein KIF21A isoform 4) c4(68671) c5(68672, 68673, 68674, 68675, 68676, 68677, 68678) c6( ) c7(Na, aUl, bVV, ft, tT, arH, oj, bVP, aNy, xv, bxw, bVU, zW, Al); #c1(KIF21A) c2(NP_060111) c3(kinesin-like protein KIF21A isoform 2) c4(194234) c5(194235, 194236, 194237, 194238, 194239, 194240) c6( ) c7(Na, aUl, bVV, ft, tT, arH, oj, bVP, aNy, xv, bxw, bVU, zW, Al); #c1(KIF21A) c2(XP_005269064) c3(kinesin-like protein KIF21A isoform X1) c4(282270) c5(282271, 282272, 282273, 282274, 282275, 282276) c6( ) c7(Na, aUl, bVV, ft, tT, arH, oj, bVP, aNy, xv, bxw, bVU, zW, Al); #c1(KIF21A) c2(XP_005269070) c3(kinesin-like protein KIF21A isoform X10) c4(282277) c5(282278, 282279, 282280, 282281, 282282, 282283) c6( ) c7(Na, aUl, bVV, ft, tT, arH, oj, bVP, aNy, xv, bxw, bVU, zW, Al); #c1(KIF21A) c2(XP_005269071) c3(kinesin-like protein KIF21A isoform X11) c4(282284) c5(282285, 282286, 282287, 282288, 282289, 282290, 282291) c6( ) c7(Na, aUl, bVV, ft, tT, arH, oj, bVP, aNy, xv, bxw, bVU, zW, Al); #c1(KIF21B) c2(NP_001239029) c3(kinesin-like protein KIF21B isoform 1) c4(88191, 88192) c5(88193, 88194, 88195, 88196, 88197, 88198, 88199, 88200, 88201, 88202, 88203, 88204) c6( ) c7(fe, V, mR, W, iV); #c1(KIF21B) c2(NP_001239031) c3(kinesin-like protein KIF21B isoform 3) c4(88205) c5(88206, 88207, 88208, 88209, 88210, 88211) c6( ) c7(fe, V, mR, W, iV); #c1(KIF21B) c2(NP_001239032) c3(kinesin-like protein KIF21B isoform 4) c4(88212) c5(88213, 88214, 88215, 88216, 88217, 88218) c6( ) c7(fe, V, mR, W, iV); #c1(KIF21B) c2(NP_060066) c3(kinesin-like protein KIF21B isoform 2) c4(194020) c5(194021, 194022, 194023, 194024, 194025, 194026) c6( ) c7(fe, V, mR, W, iV); #c1(KIF22) c2(NP_001243199) c3(kinesin-like protein KIF22 isoform 2) c4(90122) c5(90123, 90124, 90125, 90126, 90127, 90128, 90129, 90130, 90131, 90132, 90133, 90134, 90135) c6( ) c7(T, aA, bB, fr, adS, q, ad, av, aT, rE, ae, B, aW, oV, PX, r, lo, aF, t, iK, bz, bVW, bVX, eM, bE, m, X, qc); #c1(KIF22) c2(NP_015556) c3(kinesin-like protein KIF22 isoform 1) c4(171847, 171848) c5(171849, 171850, 171851171852, 171853, 171854, 171855, 171856, 171857, 171858, 171859) c6( ) c7(T, aA, bB, fr, adS, q, ad, av, aT, rE, ae, B, aW, oV, PX, r, lo, aF, t, iK, bz, bVW, bVX, eM, bE, m, X, qc); #c1(KIF23) c2(NP_004847) c3(kinesin-like protein KIF23 isoform 2) c4(150285) c5(150286, 150287, 150288, 150289, 150290, 150291) c6( ) c7(aW, Y, ey, eA, aT); #c1(KIF23) c2(NP_612565) c3(kinesin-like protein KIF23 isoform 1) c4(236691) c5(236692, 236693, 236694, 236695, 236696, 236697, 236698, 236699, 236700, 236701, 236702, 236703) c6( ) c7(aW, Y, ey, eA, aT); #c1(KIF23) c2(XP_005254856) c3(kinesin-like protein KIF23 isoform X4) c4(273343) c5(273344, 273345, 273346, 273347, 273348, 273349, 273350, 273351, 273352, 273353) c6( ) c7(aW, Y, ey, eA, aT); #c1(KIF23) c2(XP_011520541) c3(kinesin-like protein KIF23 isoform X6) c4(315468) c5( ) c6( ) c7(aW, Y, ey, eA, aT); #c1(KIF24) c2(NP_919289) c3(kinesin-like protein KIF24) c4( ) c5(258460, 258461, 258462, 258463, 258464, 258465, 258466, 258467, 258468, 258469, 258470, 258471, 258472, 258473, 258474, 258475, 258476, 258477, 258478) c6( ) c7(WY); #c1(KIF24) c2(XP_005251508) c3(kinesin-like protein KIF24 isoform X4) c4(270974) c5( ) c6( ) c7(WY); #c1(KIF24) c2(XP_011516164) c3(kinesin-like protein KIF24 isoform X2) c4(309408, 309409) c5(309410, 309411, 309412) c6( ) c7(WY); #c1(KIF25) c2(NP_005346) c3(kinesin-like protein KIF25 isoform 2) c4(155282) c5(155283, 155284, 155285, 155286, 155287, 155288) c6( ) c7(Ea); #c1(KIF25) c2(NP_085118) c3(kinesin-like protein KIF25 isoform 1) c4(219299) c5(219300, 219301, 219302, 219303, 219304, 219305, 219306, 219307, 219308, 219309) c6( ) c7(Ea); #c1(KIF26A) c2(NP_056471) c3(kinesin-like protein KIF26A) c4(187655) c5(187656, 187657, 187658, 187659, 187660, 187661) c6( ) c7(aC, ac); #c1(KIF26B) c2(NP_060482) c3(kinesin-like protein KIF26B) c4(196188) c5(196189, 196190, 196191, 196192, 196193, 196194) c6( ) c7(aW, j, ac, aT); #c1(KIF26B) c2(XP_011542520) c3(kinesin-like protein KIF26B isoform X3) c4(341060, 341061) c5(341062, 341063, 341064, 341065, 341066, 341067, 341068, 341069, 341070, 341071, 341072, 341073) c6( ) c7(aW, j, ac, aT); #c1(KIF2A) c2(NP_001091981) c3(kinesin-like protein KIF2A isoform 2) c4(39128) c5(39129, 39130, 39131, 39132, 39133, 39134) c6( ) c7(HQ, PK, dH, aW, aT, zN, aj, ey, QK, ae, bVY, J, ad); #c1(KIF2A) c2(NP_001230881) c3(kinesin-like protein KIF2A isoform 3) c4(86908) c5(86909, 86910, 86911, 86912, 86913, 86914, 86915, 86916, 86917, 86918, 86919, 86920) c6( ) c7(HQ, PK, dH, aW, aT, zN, aj, ey, QK, ae, bVY, J, ad); #c1(KIF2A) c2(NP_001230882) c3(kinesin-like protein KIF2A isoform 4) c4(86921, 86922) c5(86923, 86924, 86925, 86926, 86927, 86928) c6( ) c7(HQ, PK, dH, aW, aT, zN, aj, ey, QK, ae, bVY, J, ad); #c1(KIF2A) c2(NP_004511) c3(kinesin-like protein KIF2A isoform 1) c4(147047) c5(147048, 147049, 147050, 147051, 147052, 147053) c6( ) c7(HQ, PK, dH, aW, aT, zN, aj, ey, QK, ae, bVY, J, ad); #c1(KIF2B) c2(NP_115948) c3(kinesin-like protein KIF2B) c4(224881, 224882) c5(224883, 224884, 224885, 224886, 224887, 224888, 224889, 224890, 224891, 224892, 224893, 224894) c6( ) c7(tT, v); #c1(KIF2C) c2(NP_001284584) c3(kinesin-like protein KIF2C isoform 2) c4(112078, 112079, 112080) c5(112081, 112082, 112083, 112084, 112085, 112086, 112087, 112088, 112089, 112090, 112091, 112092) c6( ) c7(T, bE, aW, aw, aT, r, aA, aj, bB, j, ci, aF, bu, q, J); #c1(KIF2C) c2(NP_001284585) c3(kinesin-like protein KIF2C isoform 3) c4(112093) c5(112094, 112095, 112096, 112097, 112098, 112099) c6( ) c7(T, bE, aW, aw, aT, r, aA, aj, bB, j, ci, aF, bu, q, J); #c1(KIF2C) c2(XP_011538843) c3(kinesin-like protein KIF2C isoform X1) c4( ) c5(336903, 336904, 336905, 336906, 336907, 336908, 336909, 336910, 336911, 336912, 336913) c6( ) c7(T, bE, aW, aw, aT, r, aA, aj, bB, j, ci, aF, bu, q, J); #c1(KIF3A) c2(NP_001287720) c3(kinesin-like protein KIF3A isoform 1) c4(112656) c5(112657, 112658, 112659, 112660, 112661, 112662) c6( ) c7(bM, T, sS, tk, arS, Az, wB, h, zG, K, bVZ, pM, eE, aY, ae, ad); #c1(KIF3A) c2(NP_001287721) c3(kinesin-like protein KIF3A isoform 2) c4(112663) c5(112664, 112665, 112666, 112667, 112668, 112669) c6( ) c7(bM, T, sS, tk, arS, Az, wB, h, zG, K, bVZ, PM, eE, aY, ae, ad); #c1(KIF3A) c2(NP_008985) c3(kinesin-like protein KIF3A isoform 3) c4(170057, 170058) c5(170059, 170060, 170061, 170062, 170063, 170064, 170065, 170066, 170067, 170068, 170069, 170070) c6( ) c7(bM, T, sS, tk, arS, Az, wB, h, zG, K, bVZ, pM, eE, aY, ae, ad); #c1(KIF3B) c2(NP_004789) c3(kinesin-like protein KIF3B) c4(149871, 149872) c5(149873, 149874, 149875, 149876, 149877, 149878, 149879, 149880, 149881, 149882, 149883, 149884) c6( ) c7(B); #c1(KIF3C) c2(NP_002245) c3(kinesin-like protein KIF3C) c4(126875, 126876) c5(126877, 126878, 126879, 126880, 126881, 126882, 126883, 126884, 126885, 126886, 126887, 126888, 126889, 126890, 126891, 126892) c6( ) c7(cm, PJ); #c1(KIF4A) c2(XP_011529195) c3(chromosome-associated kinesin KIF4A isoform X1) c4(324602, 324603, 324604) c5(324605, 324606, 324607, 324608, 324609, 324610, 324611, 324612, 324613, 324614, 324615, 324616, 324617, 324618, 324619, 324620, 324621, 324622) c6( ) c7(T, eM, qt, ha, ey, nA, bz); #c1(KIF4B) c2(NP_001092763) c3(chromosome-associated kinesin KIF4B) c4(39629) c5(39630, 39631, 39632, 39633, 39634, 39635) c6( ) c7(fq, ac, cz); #c1(KIF5A) c2(NP_004975) c3(kinesin heavy chain isoform 5A) c4(151542, 151543) c5(151544, 151545, 151546, 151547, 151548, 151549, 151550, 151551, 151552, 151553, 151554, 151555) c6( ) c7(aiZ, bdn, bWa, A, aV, aW, bT, tT, ajb, aT, cL, bk, fu, bU, y, V, o, wD); #c1(KIF5B) c2(NP_004512) c3(kinesin-1 heavy chain) c4(147054) c5(147055, 147056, 147057, 147058, 147059, 147060) c6( ) c7(iu, eG, bWa, d, eW, aV, eM, Qu, iE, Y, PX, ff, r, dz, aj, eA, en, g, cm, bz, q); #c1(KIF5C) c2(NP_004513) c3(kinesin heavy chain isoform 5C) c4(147061, 147062, 147063, 147064) c5(147065, 147066, 147067, 147068, 147069, 147070, 147071, 147072, 147073, 147074, 147075, 147076, 147077, 147078, 147079, 147080, 147081, 147082, 147083, 147084, 147085, 147086, 147087, 147088, 147089, 147090, 147091) c6( ) c7(PK, bWb, FD, zN, nA, QK); #c1(KIF5C) c2(XP_011509459) c3(kinesin heavy chain isoform 5C isoform X1) c4(300039) c5(300040, 300041, 300042, 300043, 300044, 300045) c6( ) c7(PK, bWb, FD, zN, nA, QK); #c1(KIF6) c2(NP_001275949) c3(kinesin-like protein KIF6 isoform 2) c4(107500) c5(107501, 107502, 107503, 107504, 107505, 107506) c6( ) c7(bL, dD, ac, sO, ea, e, aw, j, aS, eq, cM, eu); #c1(KIF6) c2(NP_001275950) c3(kinesin-like protein KIF6 isoform 3) c4(107507) c5(107508, 107509, 107510, 107511, 107512, 107513) c6( ) c7(bL, dD, ac, sO, ea, e, aw, j, aS, eq, cM, eu); #c1(KIF6) c2(NP_001275953) c3(kinesin-like protein KIF6 isoform 4) c4( ) c5(107514, 107515, 107516, 107517, 107518, 107519, 107520, 107521, 107522, 107523, 107524, 107525, 107526, 107527, 107528, 107529, 107530, 107531) c6( ) c7(bL, dD, ac, sO, ea, e, aw, j, aS, eq, cM, eu); #c1(KIF6) c2(NP_659464) c3(kinesin-like protein KIF6 isoform 1) c4(240076, 240077, 240078) c5(240079, 240080, 240081, 240082, 240083, 240084, 240085, 240086, 240087, 240088, 240089, 240090) c6( ) c7(bL, dD, ac, sO, ea, e, aw, j, aS, eq, cM, eu); #c1(KIF6) c2(XP_011512659) c3(kinesin-like protein KIF6 isoform X2) c4(303649) c5( ) c6( ) c7(bL, dD, ac, sO, ea, e, aw, j, aS, eq, cM, eu); #c1(KIF6) c2(XP_011512661) c3(kinesin-like protein KIF6 isoform X4) c4(303650, 303651, 303652) c5(303653, 303654, 303655, 303656, 303657, 303658, 303659, 303660, 303661, 303662, 303663, 303664, 303665) c6( ) c7(bL, dD, ac, sO, ea, e, aw, j, aS, eq, cM, eu); #c1(KIF6) c2(XP_011512662) c3(kinesin-like protein KIF6 isoform X5) c4(303666, 303667, 303668) c5(303669, 303670, 303671, 303672, 303673, 303674) c6( ) c7(bL, dD, ac, sO, ea, e, aw, j, aS, eq, cM, eu); #c1(KIF6) c2(XP_011512663) c3(kinesin-like protein KIF6 isoform X6) c4( ) c5(303675, 303676, 303677, 303678, 303679, 303680, 303681, 303682, 303683, 303684, 303685, 303686) c6( ) c7(bL, dD, ac, sO, ea, e, aw, j, aS, eq, cM, eu); #c1(KIF7) c2(XP_005254959) c3(kinesin-like protein KIF7 isoform X1) c4(273417) c5(273418, 273419, 273420, 273421, 273422) c6( ) c7(Na, ben, Y, ry, bWc, cz, nA, Tp, Ll, bWd, bwD); #c1(KIF7) c2(XP_011519833) c3(kinesin-like protein KIF7 isoform X2) c4( ) c5(314575, 314576) c6( ) c7(Na, ben, Y, ry, bWc, cz, nA, Tp, Ll, bWd, bwD); #c1(KIF9) c2(NP_001128350) c3(kinesin-like protein KIF9 isoform 2) c4(49951) c5(49952, 49953, 49954, 49955, 49956, 49957, 49958, 49959, 49960, 49961, 49962) c6( ) c7(j); #c1(KIF9) c2(NP_071737) c3(kinesin-like protein KIF9 isoform 1) c4(211865, 211866) c5(211867, 211868, 211869, 211870, 211871, 211872, 211873, 211874, 211875, 211876, 211877, 211878, 211879, 211880, 211881, 211882) c6( ) c7(j); #c1(KIF9) c2(XP_005265445) c3(kinesin-like protein KIF9 isoform X2) c4( ) c5(279552, 279553, 279554) c6( ) c7(j); #c1(KIF9) c2(XP_005265446) c3(kinesin-like protein KIF9 isoform X4) c4( ) c5(279555, 279556) c6( ) c7(j); #c1(KIF9) c2(XP_011532305) c3(kinesin-like protein KIF9 isoform X3) c4(328473) c5( ) c6( ) c7(j); #c1(KIFAP3) c2(NP_001191443) c3(kinesin-associated protein 3 isoform 2) c4(81538, 81539) c5(81540, 81541, 81542, 81543, 81544, 81545) c6( ) c7(bA, Vd, ad, c); #c1(KIFAP3) c2(NP_001191445) c3(kinesin-associated protein 3 isoform 3) c4(81546) c5(81547, 81548, 81549, 81550, 81551, 81552) c6( ) c7(bA, Vd, ad, c); #c1(KIFAP3) c2(NP_001191446) c3(kinesin-associated protein 3 isoform 4) c4( ) c5(81553, 81554, 81555, 81556, 81557, 81558, 81559, 81560, 81561, 81562, 81563) c6( ) c7(bA, Vd, ad, c); #c1(KIFAP3) c2(NP_055785) c3(kinesin-associated protein 3 isoform 1) c4(183477, 183478) c5(183479, 183480, 183481, 183482, 183483, 183484, 183485) c6( ) c7(bA, Vd, ad, c); #c1(KIFC1) c2(NP_002254) c3(kinesin-like protein KIFC1) c4(126969) c5(126970, 126971, 126972, 126973, 126974, 126975, 126976, 126977, 126978, 126979, 126980, 126981, 126982) c6( ) c7(eZ, qy); #c1(KIFC1) c2(XP_011512889) c3(kinesin-like protein KIFC1 isoform X6) c4(304261, 304262) c5(304263, 304264, 304265, 304266, 304267, 304268, 304269, 304270, 304271, 304272, 304273, 304274, 304275, 304276, 304277) c6( ) c7(eZ, qy); #c1(KIFC3) c2(NP_001123572) c3(kinesin-like protein KIFC3 isoform 2) c4( ) c5(47614, 47615, 47616, 47617, 47618, 47619, 47620, 47621, 47622, 47623, 47624, 47625, 47626, 47627, 47628) c6( ) c7(nw, Tp); #c1(KIFC3) c2(NP_005541) c3(kinesin-like protein KIFC3 isoform 1) c4(157248) c5(157249, 157250, 157251, 157252, 157253, 157254) c6( ) c7(nw, Tp); #c1(KIFC3) c2(XP_005255994) c3(kinesin-like protein KIFC3 isoform X5) c4( ) c5(273910) c6( ) c7(nw, Tp); #c1(KIN) c2(NP_036443) c3(DNA/RNA-binding protein KIN17) c4(173921) c5(173922, 173923, 173924, 173925, 173926, 173927) c6( ) c7(aW, aT); #c1(KIN) c2(XP_006717497) c3(DNA/RNA-binding protein KIN17 isoform X1) c4( ) c5(291154) c6( ) c7(aW, aT); #c1(KIN) c2(XP_006717498) c3(DNA/RNA-binding protein KIN17 isoform X3) c4(291155) c5(291156, 291157, 291158, 291159, 291160) c6( ) c7(aW, aT); #c1(KIN) c2(XP_011517729) c3(DNA/RNA-binding protein KIN17 isoform X2) c4(311521) c5(311522, 311523, 311524, 311525, 311526, 311527) c6( ) c7(aW, aT); #c1(KIR2DL1) c2(NP_055033) c3(killer cell immunoglobulin-like receptor 2DL1 precursor) c4(178410) c5(178411, 178412, 178413, 178414, 178415, 178416, 178417, 178418) c6( ) c7(bL, fR, aD, iW, aw, al, jx, fN, jE, qN, V, wD, dP, x, AW, ga, F, ds, hD, rN, h, rB, hH, A, B, mR, iU, aAT, HA, ih, cr, eZ, aq, vs, hp, ve, uC, cM, bPK, cm, iP, ck, eU, sn, ac, iT, blS, bbD, k, aCD, y, bt, ne, hv, avY); #c1(KIR2DL2) c2(NP_055034) c3(killer cell immunoglobulin-like receptor 2DL2 precursor) c4(178419, 178420) c5(178421, 178422, 178423, 178424, 178425, 178426, 178427, 178428, 178429, 178430, 178431, 178432) c6( ) c7(aD, iW, aw, al, jx, fN, aj, lR, jE, qN, fr, V, eW, J, wD, bBq, AW, ga, F, hD, rN, h, JK, rB, hH, A, B, mR, iU, Y, aAT, HA, ih, cr, eZ, aq, lo, vs, hp, iV, cm, cM, bPK, uC, pb, iP, ck, eU, sn, ac, iT, bJa, aED, eo, k, aCD, gg, y, bt, ne, hv, vi); #c1(KIR2DL3) c2(NP_056952) c3(killer cell immunoglobulin-like receptor 2DL3 precursor) c4(188182) c5(188183, 188184, 188185, 188186, 188187, 188188, 188189) c6( ) c7(bL, Kd, T, aD, iW, aw, al, jx, fN, fd, jh, aj, lR, jE, qN, aFV, fr, V, eh, eA, amW, J, hX, dP, bBq, AW, ga, F, wD, dV, hD, rN, h, JK, rB, DY, hH, A, B, mR, iU, Y, aAT, HA, ih, cr, eZ, aq, vs, hp, iV, ve, cM, bPK, uC, pb, cm, ck, eU, sn, ac, zr, iT, bJa, aED, bt, k, aCD, y, lB, ne, hv, vi); #c1(KIR2DL4) c2(NP_001074239) c3(killer cell immunoglobulin-like receptor 2DL4 isoform c precursor) c4(37015, 37016, 37017, 37018) c5(37019, 37020, 37021, 37022, 37023, 37024, 37025, 37026, 37027, 37028, 37029, 37030, 37031, 37032, 37033, 37034, 37035, 37036, 37037, 37038, 37039, 37040, 37041, 37042, 37043) c6( ) c7(T, aD, al, jx, jh, eh, jE, qN, V, mC, wD, hX, AW, ga, F, rN, h, rB, hH, A, B, mR, s, aAT, HA, ih, cr, eZ, aq, hp, uC, cM, iP, ck, sn, iT, fL, aCD, y, bt, ne, VB); #c1(KIR2DL4) c2(NP_001074241) c3(killer cell immunoglobulin-like receptor 2DL4 isoform b precursor) c4( ) c5(37044, 37045, 37046, 37047, 37048) c6( ) c7(T, aD, al, jx, jh, eb, jE, qN, V, mC, wD, hX, AW, ga, F, rN, h, rB, hH, A, B, mR, s, aAT, HA, ih, cr, eZ, aq, hp, uC, cM, iP, ck, sn, iT, fL, aCD, y, bt, ne, VB); #c1(KIR2DL4) c2(NP_002246) c3(killer cell immunoglobulin-like receptor 2DL4 isoform a precursor) c4(126893, 126894, 126895, 126896, 126897, 126898, 126899) c5(126900, 126901, 126902, 126903, 126904, 126905, 126906, 126907, 126908, 126909, 126910, 126911, 126912, 126913, 126914, 126915, 126916, 126917, 126918, 126919, 126920, 126921, 126922, 126923, 126924, 126925, 126926, 126927, 126928, 126929, 126930, 126931, 126932) c6( ) c7(T, aD, al, jx, jh, eh, jE, qN, V, mC, wD, hX, AW, ga, F, rN, h, rB, hH, A, B, mR, s, aAT, HA, ih, cr, eZ, aq, hp, uC, cM, iP, ck, sn, iT, fL, aCD, y, bt, ne, VB); #c1(KIR2DL5A) c2(NP_065396) c3(killer cell immunoglobulin-like receptor 2DL5A precursor) c4(204727, 204728) c5(204729, 204730, 204731, 204732, 204733, 204734, 204735, 204736, 204737, 204738, 204739, 204740, 204741) c6( ) c7(bL, T, aD, iW, axd, al, jx, jh, v, jE, oL, V, amW, wD, aMp, dP, hX, AW, ga, F, x, gd, dV, hD, rN, h, rB, hH, A, B, mR, iU, aAT, HA, ih, cr, eZ, aq, lo, hp, pL, cM, pb, aYt, Cv, ck, sn, W, Jr, aWZ, ig, iT, dW, k, aCD, y, bt, ne); #c1(KIR2DL5B) c2(NP_001018091) c3(killer cell immunoglobulin-like receptor 2DL5B precursor) c4(27310) c5(27311) c6( ) c7(ck, A, mR, Jr, aAT, eZ, rN, h, lo, hp, bt); #c1(KIR2DS1) c2(NP_055327) c3(killer cell immunoglobulin-like receptor 2DS1 precursor) c4(180520) c5( ) c6( ) c7(bL, T, aD, iW, axd, al, aw, fN, jh, v, jE, qN, oL, V, amW, wD, aMp, dP, hX, AW, ga, F, x, gd, dV, hD, rN, h, rB, hH, A, B, mR, iU, aAT, aFE, HA, ih, cr, eZ, aq, lo, vs, hp, pL, cm, cM, uC, pb, aYt, Cv, ck, sn, W, Jr, aWZ, ac, ig, iT, dW, k, aCD, y, bt, ne, hv, avY); #c1(KIR2DS2) c2(NP_001278624) c3(killer cell immunoglobulin-like receptor 2DS2 isoform b precursor) c4( ) c5(109903, 109904, 109905, 109906) c6( ) c7(Kd, T, aD, iW, aw, al, jx, jh, avY, fd, aj, lR, jE, fr, aFV, V, eh, eA, amW, J, hX, dP, bBq, AW, wD, F, dV, hD, rN, h, JK, rB, DY, hH, A, B, mR, iU, aAT, HA, ih, cr, eZ, aq, vs, cm, cM, pb, Cv, ck, sn, ac, zr, iT, bJa, k, aCD, y, bt, ne, hv, vi); #c1(KIR2DS2) c2(NP_001278625) c3(killer cell immunoglobulin-like receptor 2DS2 isoform c precursor) c4( ) c5(109907) c6( ) c7(Kd, T, aD, iW, aw, al, jx, jh, avY, fd, aj, lR, jE, fr, aFV, V, eh, eA, amW, J, hX, dP, bBq, AW, wD, F, dV, hD, rN, h, JK, rB, DY, hH, A, B, mR, iU, aAT, HA, ih, cr, eZ, aq, vs, cm, cM, pb, Cv, ck, sn, ac, zr, iT, bJa, k, aCD, y, bt, ne, hv, vi); #c1(KIR2DS2) c2(XP_006725842) c3(killer cell immunoglobulin-like receptor 2DS2 isoform X8) c4(297005) c5(297006, 297007, 297008, 297009, 297010, 297011, 297012, 297013) c6( ) c7(Kd, T, aD, iW, aw, al, jx, jh, avY, fd, aj, lR, jE, fr, aFV, V, eh, eA, amW, J, hX, dP, bBq, AW, wD, F, dV, hD, rN, h, JK, rB, DY, hH, A, B, mR, iU, aAT, HA, ih, cr, eZ, aq, vs, cm, cM, pb, Cv, ck, sn, ac, zr, iT, bJa, k, aCD, y, bt, ne, hv, vi); #c1(KIR2DS3) c2(NP_036445) c3(killer cell immunoglobulin-like receptor 2DS3 precursor) c4(173928) c5(173929) c6( ) c7(Kd, aD, iW, al, jx, fN, jE, qN, V, amW, wD, hX, AW, ga, F, hD, rN, h, rB, hH, A, B, mR, iU, aAT, aFE, HA, ih, cr, eZ, aq, hp, cm, uC, cM, aYt, Cv, ck, sn, iT, blS, dc, k, aCD, y, bt, ne, avY); #c1(KIR2DS4) c2(NP_036446) c3(killer cell immunoglobulin-like receptor 2DS4 isoform 1 precursor) c4(173930) c5( ) c6( ) c7(bL, aD, iW, axd, al, jx, fN, jh, jE, qN, oL, aY, V, wD, hX, AW, ga, F, ajk, bFU, dV, hD, rN, h, rB, hH, A, B, mR, iU, Y, aAT, HA, ih, cr, eZ, aq, hp, pL, cm, uC, cM, ck, sn, iT, Jr, aED, k, aCD, y, bt, ne, avY); #c1(KIR3DL1) c2(NP_037421) c3(killer cell immunoglobulin-like receptor 3DL1 precursor) c4(175412, 175413, 175414, 175415, 175416, 175417, 175418) c5(175419, 175420, 175421, 175422, 175423, 175424, 175425, 175426, 175427, 175428, 175429, 175430, 175431, 175432, 175433, 175434, 175435, 175436, 175437, 175438, 175439, 175440, 175441, 175442, 175443, 175444, 175445, 175446, 175447, 175448, 175449, 175450, 175451, 175452, 175453, 175454, 175455, 175456, 175457, 175458, 175459, 175460, 175461, 175462, 175463, 175464, 175465, 175466, 175467, 175468, 175469) c6(175470, 175471, 175472, 175473) c7(T, fR, al, fd, aeu, lR, amW, x, AW, dV, rB, hH, aW, aAT, HA, ih, hN, cm, ve, uC, bw, iP, iT, Jr, aWZ, dW, k, pw, avY, fN, n, aj, fr, qN, qW, aMp, bBq, gd, h, A, mR, aq, cM, W, eo, fL, aCD, B, bL, jv, jx, v, V, J, ga, akU, ld, aT, iU, Y, WQ, lo, pb, bN, Cv, ck, sn, ig, oX, yH, bt, vi, aD, iW, axd, jh, jE, mC, wD, hX, dP, F, hD, rN, lQ, aFE, cr, eZ, hp, bPK, dr, aYt, gk, zr, blS, y, fh); #c1(KIR3DL2) c2(NP_001229796) c3(killer cell immunoglobulin-like receptor 3DL2 isoform 2 precursor) c4(85256) c5(85257) c6( ) c7(aD, al, jE, qN, V, ai, wD, AW, ga, F, il, rN, h, rB, hH, A, B, mR, aAT, HA, ih, cr, eZ, aq, hp, ve, uC, cM, ck, eU, sn, iT, aCD, y, bt, ne); #c1(KIR3DL2) c2(NP_006728) c3(killer cell immunoglobulin-like receptor 3DL2 isoform 1 precursor) c4(167484) c5(167485, 167486, 167487, 167488, 167489, 167490, 167491) c6( ) c7(aD, al, jE, qN, V, ai, wD, AW, ga, F, il, rN, h, rB, hH, A, B, mR, aAT, HA, ih, cr, eZ, aq, hp, ve, uC, cM, ck, eU, sn, iT, aCD, y, bt, ne); #c1(KIR3DL2) c2(XP_011545872) c3(killer cell immunoglobulin-like receptor 3DL2 isoform X2) c4(344775) c5( ) c6( ) c7(aD, al, jE, qN, V, ai, wD, AW, ga, F, il, rN, h, rB, hH, A, B, mR, aAT, HA, ih, cr, eZ, aq, hp, ve, uC, cM, ck, eU, sn, iT, aCD, y, bt, ne); #c1(KIR3DL2) c2(XP_011545882) c3(killer cell immunoglobulin-like receptor 3DL2 isoform X1) c4(344776) c5(344777, 344778, 344779, 344780, 344781, 344782, 344783) c6( ) c7(aD, al, jE, qN, V, ai, wD, AW, ga, F, il, rN, h, rB, hH, A, B, mR, aAT, HA, ih, cr, eZ, aq, hp, ve, uC, cM, ck, eU, sn, iT, aCD, y, bt, ne); #c1(KIR3DL2) c2(XP_011545883) c3(killer cell immunoglobulin-like receptor 3DL2 isoform X2) c4( ) c5(344784, 344785, 344786, 344787, 344788, 344789) c6( ) c7(aD, al, jE, qN, V, ai, wD, AW, ga, F, il, rN, h, rB, hH, A, B, mR, aAT, HA, ih, cr, eZ, aq, hp, ve, uC, cM, ck, eU, sn, iT, aCD, y, bt, ne); #c1(KIR3DL3) c2(NP_703144) c3(killer cell immunoglobulin-like receptor 3DL3 precursor) c4(245976, 245977) c5(245978, 245979, 245980, 245981, 245982, 245983, 245984, 245985, 245986, 245987, 245988, 245989, 245990) c6( ) c7(Kd, T, aD, al, jx, jh, fd, aj, lR, jE, qN, aFV, fr, V, eh, eA, amW, J, hX, dP, bBq, AW, ga, F, wD, dV, rN, h, JK, rB, DY, hH, A, B, mR, iU, aAT, HA, ih, cr, eZ, aq, hp, uC, cM, pb, ck, sn, zr, iT, bJa, aCD, y, bt, ne, hv, vi); #c1(KIRREL) c2(NP_001273278) c3(kin of IRRE-like protein 1 isoform 2 precursor) c4(104580, 104581) c5(104582, 104583, 104584, 104585, 104586, 104587, 104588, 104589, 104590, 104591, 104592, 104593, 104594, 104595, 104596, 104597, 104598, 104599) c6( ) c7(sk, A, ah, eR); #c1(KIRREL) c2(NP_060710) c3(kin of IRRE-like protein 1 isoform 1 precursor) c4(197327, 197328) c5(197329, 197330, 197331, 197332, 197333, 197334) c6( ) c7(sk, A, ah, eR); #c1(KIRREL) c2(XP_005245362) c3(kin of IRRE-like protein 1 isoform X1) c4(266483) c5(266484, 266485, 266486, 266487, 266488, 266489) c6( ) c7(sk, A, ah, eR); #c1(KIRREL2) c2(NP_115499) c3(kin of IRRE-like protein 2 isoform a precursor) c4(222946) c5(222947, 222948, 222949, 222950, 222951, 222952) c6( ) c7(asp); #c1(KIRREL2) c2(NP_954648) c3(kin of IRRE-like protein 2 isoform b precursor) c4(261155) c5(261156, 261157, 261158, 261159, 261160, 261161) c6( ) c7(asp); #c1(KIRREL2) c2(NP_954649) c3(kin of IRRE-like protein 2 isoform c precursor) c4(261162, 261163) c5(261164, 261165, 261166, 261167, 261168, 261169, 261170, 261171, 261172, 261173, 261174, 261175) c6( ) c7(asp); #c1(KIRREL2) c2(XP_011525666) c3(kin of IRRE-like protein 2 isoform X2) c4(320081) c5(320082, 320083, 320084, 320085, 320086, 320087) c6( ) c7(asp); #c1(KIRREL3) c2(NP_001155179) c3(kin of IRRE-like protein 3 isoform 2 precursor) c4(61505) c5(61506, 61507, 61508, 61509, 61510, 61511, 61512, 61513) c6( ) c7(ac, alv, nA, Wl, he, cd, bWe); #c1(KIRREL3) c2(NP_115920) c3(kin of IRRE-like protein 3 isoform 1 precursor) c4(224694) c5(224695, 224696, 224697, 224698, 224699, 224700, 224701, 224702) c6( ) c7(ac, alv, nA, WL he, cd, bWe); #c1(KIRREL3) c2(XP_011541335) c3(kin of IRRE-like protein 3 isoform X2) c4(339925) c5(339926, 339927, 339928, 339929, 339930, 339931, 339932, 339933, 339934) c6( ) c7(ac, alv, nA, Wl, he, cd, bWe); #c1(KIRREL3) c2(XP_011541336) c3(kin of IRRE-like protein 3 isoform X7) c4(339935) c5(339936, 339937, 339938, 339939, 339940, 339941, 339942) c6( ) c7(ac, alv, nA, Wl, he, cd, bWe); #c1(KISS1) c2(XP_011507827) c3(metastasis-suppressor KiSS-1 isoform X1) c4(297971) c5(297972, 297973, 297974, 297975, 297976, 297977, 297978, 297979) c6( ) c7(T, dD, id, sw, ea, aA, cz, n, bB, v, j, ci, eq, fr, AO, q, ad, eJ, UE, yn, cc, aE, il, Hk, aT, dL, K, nJ, ae, eL, cp, yo, kl, CN, s, qt, aW, Y, ff, r, aF, en, cl, g, t, iK, bWf, eM, bE, AV, hL, hR, m, UF, B); #c1(KISS1R) c2(NP_115940) c3(kiSS-1 receptor) c4(224808) c5(224809, 224810, 224811, 224812, 224813, 224814) c6( ) c7(T, dD, id, dA, ea, bWg, aA, eq, ci, fr, yn, UE, aT, K, nJ, yo, CN, aW, Y, ff, bWh, yq, en, cl, aMP, eM, nB, hL, hR, UF, B); #c1(KIT) c2(NP_000213) c3(mast/stem cell growth factor receptor Kit isoform 1 precursor) c4(4635) c5(4636, 4637, 4638, 4639, 4640, 4641) c6( ) c7(Fv, bM, T, aC, aJV, fd, bB, qj, ci, asr, x, bv, bWj, bW, pX, aeO, bbu, cp, Qe, aa, auQ, yo, aeR, aAu, aW, wp, Ls, CT, Qm, g, as, eF, cm, bWs, QA, Qt, arZ, iP, bw, eM, nB, iA, iT, go, oy, vA, dW, k, m, bsS, aHk, Th, Le, ik, gU, Uc, aEj, wu, iB, WA, NT, qy, n, awr, fr, zP, JW, br, ft, pe, Tf, Xe, Nn, bkP, KN, ic, UD, apG, dU, aDC, Dz, Xh, aBl, dx, Nr, kj, Tc, AQ, Lh, ahJ, aq, po, bWt, pm, ban, XT, op, yR, Ld, Qf, bP, dB, hk, bWq, eD, bo, Vy, mg, hj, pg, bOQ, ph, aPG, aAE, fM, jx, aA, hz, afK, v, j, pd, q, er, eA, Zp, aRM, lg, hW, qK, bWn, aT, vH, dz, rO, bK, Tj, jj, aPF, ae, ne, bA, jf, iF, hM, s, ND, vT, iU, Y, Lf, apK, r, en, aom, hf, t, KQ, bu, f, cl, aEp, zJ, ck, cT, Ta, nM, Dy, kP, hA, bWk, QG, hc, nG, gX, aws, bWI, zu, bt, On, kh, rQ, bWi, jN, bs, jh, bWp, hF, iJ, ad, hX, iC, av, bkq, fX, ib, py, Db, vJ, bWr, oW, Ti, hP, wm, fb, iL, bWo, aeQ, d, et, ff, eH, aeV, aF, aiz, aTa, adj, bz, aTb, dr, Hp, Nq, es, bF, baa, Ew, bE, asq, X, aKC, apv, Lb, aeH, bWm, jr, pC); #c1(KIT) c2(NP_001087241) c3(mast/stem cell growth factor receptor Kit isoform 2 precursor) c4(38303, 38304) c5(38305, 38306, 38307, 38308, 38309, 38310, 38311, 38312, 38313, 38314, 38315, 38316) c6( ) c7(Fv, bM, T, aC, aJV, fd, bB, qj, ci, asr, x, bv, bWj, bW, pX, aeO, bbu, cp, Qe, aa, auQ, yo, aeR, aAu, aW, wp, Ls, CT, Qm, g, as, eF, cm, bWs, QA, Qt, arZ, iP, bw, eM, nB, iA, iT, go, oy, vA, dW, k, m, bsS, aHk, Th, Le, ik, gU, Uc, aEj, wu, iB, WA, NT, qy, n, awr, fr, zP, JW, br, ft, pe, Tf, Xe, Nn, bkP, KN, ic, UD, apG, dU, aDC, Dz, Xh, aBI, dx, Nr, kj, Tc, AQ, Lh, ahJ, aq, po, bWt, pm, ban, XT, op, yR, Ld, Qf, bP, dB, hk, bWq, eD, bo, Vy, mg, hj, pg, bOQ, ph, aPG, aAE, fM, jx, aA, hz, afK, v, j, pd, q, er, eA, Zp, aRM, Ig, hW, qK, bWn, aT, vH, dz, rO, bK, Tj, jj, aPF, ae, ne, bA, jf, iF, hM, s, ND, vT, iU, Y, Lf, apK, r, en, aom, hf, t, KQ, bu, f, cl, aEp, zJ, ck, cT, Ta, nM, Dy, kP, hA, bWk, QG, hc, nG, gX, aws, bWl, zu, bt, On, kh, rQ, bWi, jN, bs, jh, bWp, hF, iJ, ad, hX, iC, av, bkq, fX, ib, py, Db, vJ, bWr, oW, Ti, hP, wm, fb, iL, bWo, aeQ, d, et, ff, eH, aeV, aF, aiz, aTa, adj, bz, aTb, dr, Hp, Nq, es, bF, baa, Ew, bE, asq, X, aKG, apv, Lb, aeH, bWm, jr, pC); #c1(KITLG) c2(NP_000890) c3(kit ligand isoform b precursor) c4(16860, 16861) c5(16862, 16863, 16864, 16865, 16866, 16867, 16868, 16869, 16870, 16871, 16872, 16873, 16874, 16875, 16876, 16877, 16878, 16879, 16880, 16881, 16882, 16883, 16884, 16885, 16886, 16887, 16888, 16889, 16890, 16891, 16892, 16893, 16894, 16895, 16896, 16897, 16898, 16899, 16900, 16901, 16902, 16903, 16904, 16905, 16906, 16907, 16908, 16909, 16910, 16911, 16912, 16913, 16914, 16915, 16916, 16917, 16918, 16919, 16920, 16921, 16922, 16923, 16924, 16925, 16926, 16927, 16928, 16929, 16930, 16931, 16932, 16933, 16934, 16935, 16936, 16937, 16938, 16939, 16940, 16941, 16942, 16943, 16944, 16945, 16946, 16947, 16948, 16949, 16950, 16951, 16952, 16953, 16954) c6(16955) c7(Fv, bM, T, os, Js, fV, if, fd, qj, ci, Qp, x, bv, aE, il, K, cp, eG, zQ, aW, eE, eF, cm, bw, eM, nB, Kv, iA, U, k, m, gU, Uc, wu, fr, zP, ai, hr, apG, dU, bl, HY, aq, zZ, Ld, ok, aPG, B, Jo, dA, oe, afK, j, q, aT, vH, rO, dz, aPF, kl, bWu, ND, vT, iU, Y, Lf, r, en, bu, cl, t, ck, Ta, c, hc, bt, On, bs, oZ, iJ, ad, dP, av, hd, CJ, ib, wm, fb, ff, xs, eH, avG, iR, bz, Ew, zr, Lb, y, pC); #c1(KITLG) c2(NP_003985) c3(kit ligand isoform a precursor) c4(142645) c5(142646, 142647, 142648, 142649, 142650, 142651, 142652, 142653, 142654) c6( ) c7(Fv, bM, T, os, Js, fV, if, fd, qj, ci, Qp, x, bv, aE, il, K, cp, eG, zQ, aW, eE, eF, cm, bw, eM, nB, Kv, iA, U, k, m, gU, Uc, wu, fr, zP, ai, hr, apG, dU, hl, HY, aq, zZ, Ld, ok, aPG, B, Jo, dA, oe, afK, j, q, aT, vH, rO, dz, aPF, kl, bWu, ND, vT, iU, Y, Lf, r, en, bu, cl, t, ck, Ta, c, hc, bt, On, bs, oZ, iJ, ad, dP, av, hd, CJ, ib, wm, fb, ff, xs, eH, avG, iR, bz, Ew, zr, Lb, y, pC); #c1(KL) c2(NP_004786) c3(klotho precursor) c4(149629) c5(149630, 149631, 149632, 149633, 149634, 149635, 149636, 149637, 149638, 149639, 149640, 149641, 149642, 149643, 149644, 149645, 149646, 149647, 149648, 149649, 149650, 149651, 149652, 149653, 149654, 149655, 149656, 149657, 149658, 149659, 149660, 149661, 149662, 149663, 149664, 149665, 149666, 149667, 149668, 149669, 149670, 149671, 149672, 149673, 149674, 149675, 149676, 149677, 149678, 149679, 149680, 149681, 149682, 149683, 149684, 149685, 149686, 149687, 149688, 149689, 149690, 149691, 149692, 149693, 149694, 149695, 149696, 149697, 149698, 149699, 149700, 149701, 149702, 149703, 149704, 149705, 149706, 149707, 149708, 149709, 149710, 149711, 149712, 149713, 149714, 149715, 149716, 149717, 149718, 149719, 149720, 149721, 149722, 149723, 149724, 149725, 149726, 149727, 149728, 149729, 149730, 149731, 149732, 149733, 149734, 149735, 149736, 149737, 149738, 149739, 149740, 149741, 149742, 149743, 149744, 149745, 149746, 149747, 149748, 149749, 149750, 149751, 149752, 149753, 149754, 149755, 149756, 149757, 149758, 149759, 149760, 149761, 149762, 149763, 149764, 149765, 149766, 149767, 149768, 149769, 149770, 149771, 149772, 149773, 149774, 149775, 149776, 149777, 149778, 149779, 149780, 149781, 149782, 149783, 149784, 149785, 149786, 149787, 149788, 149789, 149790, 149791, 149792, 149793, 149794, 149795, 149796, 149797, 149798, 149799, 149800, 149801, 149802, 149803, 149804, 149805, 149806, 149807, 149808, 149809, 149810, 149811, 149812, 149813, 149814, 149815, 149816, 149817, 149818, 149819, 149820, 149821, 149822, 149823, 149824, 149825, 149826, 149827, 149828, 149829, 149830, 149831, 149832, 149833, 149834, 149835, 149836, 149837, 149838, 149839, 149840, 149841, 149842, 149843, 149844, 149845, 149846, 149847, 149848, 149849, 149850, 149851, 149852, 149853, 149854, 149855, 149856, 149857, 149858, 149859, 149860) c6(149861) c7(Fv, T, fR, ea, if, e, al, bB, aY, sD, aE, M, K, dQ, eN, azh, HI, aW, bsZ, zC, rq, bTq, iS, uo, Hb, m, IS, uL, dD, sQ, aj, fr, qN, JW, ft, cc, zw, acm, jy, eV, bta, hi, Dg, aq, wU, afc, ut, B, bL, AB, eR, oe, eX, cz, cR, v, j, amC, V, q, J, eJ, MR, aT, cy, ae, bA, s, Y, r, rs, t, AA, asw, aOx, rR, ac, dh, fP, dy, qb, eq, ad, fU, Dj, ji, bsR, IQ, yh, vj, dq, HI, bz, dr, qa, adA, OG, bE, bon, ei, y, bsV, aAN); #c1(KL) c2(XP_006719958) c3(klotho isoform X1) c4(293100) c5(293101, 293102, 293103, 293104, 293105, 293106, 293107) c6( ) c7(Fv, T, fR, ea, if, e, al, bB, aY, sD, aE, M, K, dQ, eN, azh, HI, aW, bsZ, zC, rq, bTq, iS, uo, Hb, m, IS, uL, dD, sQ, aj, fr, qN, JW, ft, cc, zw, acm, jy, eV, bta, hi, Dg, aq, wU, afc, ut, B, bL, AB, eR, oe, eX, cz, cR, v, j, amC, V, q, J, eJ, MR, aT, cy, ae, bA, s, Y, r, rs, t, AA, asw, aOx, rR, ac, dh, fP, dy, qb, eq, ad, fU, Dj, ji, bsR, IQ, yh, vj, dq, HI, bz, dr, qa, adA, OG, bE, bon, ei, y, bsV, aAN); #c1(KLB) c2(NP_783864) c3(beta-klotho) c4(251778) c5(251779, 251780, 251781, 251782, 251783, 251784, 251785, 251786, 251787, 251788, 251789, 251790, 251791, 251792, 251793, 251794, 251795, 251796, 251797, 251798, 251799, 251800, 251801, 251802, 251803, 251804, 251805, 251806, 251807, 251808, 251809, 251810, 251811, 251812, 251813, 251814, 251815, 251816, 251817, 251818, 251819, 251820, 251821, 251822, 251823, 251824, 251825, 251826, 251827, 251828, 251829, 251830, 251831, 251832, 251833, 251834, 251835, 251836, 251837, 251838, 251839, 251840, 251841, 251842, 251843, 251844, 251845, 251846, 251847, 251848, 251849, 251850, 251851, 251852, 251853, 251854, 251855, 251856, 251857, 251858, 251859, 251860, 251861, 251862, 251863, 251864, 251865, 251866, 251867, 251868, 251869, 251870) c6( ) c7(T, aZ, cz, h, KO, aq, v, bWv, ae, B, ad); #c1(KLC1) c2(NP_001123579) c3(kinesin light chain 1 isoform 3) c4(47737, 47738, 47739, 47740, 47741, 47742, 47743, 47744) c5(47745, 47746, 47747, 47748, 47749, 47750, 47751, 47752, 47753, 47754, 47755, 47756, 47757, 47758, 47759, 47760, 47761, 47762, 47763, 47764, 47765, 47766, 47767, 47768, 47769, 47770, 47771, 47772, 47773, 47774) c6( ) c7(ac, hk, Y, aWG, sW, cz, Da, V, af, Hv); #c1(KLC1) c2(NP_005543) c3(kinesin light chain 1 isoform 1) c4(157263, 157264, 157265, 157266) c5(157267, 157268, 157269, 157270, 157271, 157272, 157273, 157274, 157275, 157276, 157277, 157278, 157279, 157280, 157281, 157282, 157283, 157284, 157285, 157286, 157287, 157288, 157289, 157290, 157291, 157292, 157293, 157294, 157295, 157296, 157297, 157298, 157299, 157300) c6( ) c7(ac, hk, Y, aWG, sW, cz, Da, V, af, Hv); #c1(KLC1) c2(NP_891553) c3(kinesin light chain 1 isoform 2) c4(257298) c5(257299, 257300, 257301, 257302, 257303, 257304, 257305, 257306, 257307, 257308, 257309, 257310, 257311, 257312, 257313, 257314, 257315, 257316) c6( ) c7(ac, hk, Y, aWG, sW, cz, Da, V, af, Hv); #c1(KLF1) c2(NP_006554) c3(Krueppel-like factor 1) c4(166194) c5(166195, 166196, 166197, 166198, 166199, 166200) c6( ) c7(bL, ck, BU, VJ, avS, qb, Fm, bWw, adw, oW, oY, aot, bfX, S, pw, avG, bt, bWx); #c1(KLF10) c2(NP_001027453) c3(Krueppel-like factor 10 isoform b) c4(30181) c5(30182, 30183, 30184, 30185, 30186, 30187) c6( ) c7(bL, ck, BI, T, am, aE, cc, qb, aW, al, aT, hR, cy, ci, pw, aot, t, bkB, g, eJ); #c1(KLF10) c2(NP_005646) c3(Krueppel-like factor 10 isoform a) c4(158243) c5(158244, 158245, 158246, 158247, 158248, 158249, 158250) c6( ) c7(bL, ck, BI, T, am, aE, cc, qb, aW, al, aT, hR, cy, ci, pw, aot, t, bkB, g, eJ); #c1(KLF11) c2(NP_003588) c3(Krueppel-like factor 11 isoform a) c4(139382, 139383) c5(139384, 139385, 139386, 139387, 139388, 139389, 139390, 139391, 139392) c6( ) c7(bL, dP, T, mh, aE, bWy, op, vA, fc, dq, aj, J); #c1(KLF11) c2(XP_005246236) c3(Krueppel-like factor 11 isoform X1) c4( ) c5(266975, 266976, 266977, 266978, 266979, 266980, 266981, 266982) c6( ) c7(bL, dP, T, mh, aE, bWy, op, vA, fc, dq, aj, J); #c1(KLF12) c2(XP_011533211) c3(Krueppel-like factor 12 isoform X1) c4(329338, 329339) c5(329340, 329341, 329342, 329343, 329344, 329345, 329346, 329347, 329348, 329349, 329350, 329351, 329352, 329353, 329354, 329355, 329356) c6( ) c7(bL, T, W, ajP, aA, aF, oQ, y, IB, ae, ad); #c1(KLF13) c2(NP_057079) c3(Krueppel-like factor 13 isoform 1) c4(188847) c5(188848, 188849, 188850, 188851, 188852, 188853, 188854) c6( ) c7(bL, eZ, dP); #c1(KLF14) c2(NP_619638) c3(Krueppel-like factor 14) c4(236951) c5(236952, 236953, 236954, 236955, 236956, 236957, 236958, 236959) c6( ) c7(bL, sS, hk, Y, afQ, ff, dq, j, en); #c1(KLF15) c2(NP_054798) c3(Krueppel-like factor 15) c4( ) c5(177999, 178000, 178001, 178002, 178003, 178004) c6( ) c7(bL, dD, bf, tQ, hX, ea, dh, fc, h, rx, v, aS, K, eq, cd, us, ad, vQ); #c1(KLF15) c2(XP_011511045) c3(Krueppel-like factor 15 isoform X2) c4(301468) c5(301469, 301470) c6( ) c7(bL, dD, bf, tQ, hX, ea, dh, fc, h, rx, v, aS, K, eq, cd, us, ad, vQ); #c1(KLF16) c2(NP_114124) c3(Krueppel-like factor 16) c4(222258) c5(222259, 222260, 222261, 222262, 222263, 222264, 222265, 222266, 222267, 222268, 222269, 222270) c6( ) c7(bL); #c1(KLF2) c2(NP_057354) c3(Krueppel-like factor 2) c4(190305) c5(190306, 190307, 190308, 190309, 190310, 190311, 190312) c6( ) c7(bL, T, DM, dD, ea, e, al, cR, aj, j, eq, C, J, M, aT, h, rO, K, aa, sj, oV, DF, gk, ac, eM, at, aS, fD, ao); #c1(KLF3) c2(NP_057615) c3(Krueppel-like factor 3) c4(191782) c5(191783, 191784, 191785, 191786, 191787, 191788, 191789) c6( ) c7(bL, aC, c, e, bt, vQ); #c1(KLF4) c2(NP_004226) c3(Krueppel-like factor 4) c4(144431, 144432, 144433, 144434) c5(144435, 144436, 144437, 144438, 144439, 144440, 144441, 144442, 144443, 144444, 144445, 144446, 144447, 144448, 144449, 144450, 144451, 144452, 144453, 144454, 144455) c6(144456) c7(T, aC, tQ, ea, if, EQ, fd, bB, ci, x, aE, K, hu, pk, eL, Qe, JI, aW, OZ, as, cm, ou, iA, U, dD, QO, wu, aw, ht, n, fr, qN, kH, eV, dL, bwj, bAF, kp, pm, bm, bD, aAE, B, bL, fM, dA, yk, eX, aA, cz, v, j, AO, q, eA, aT, rO, ae, bf, s, ev, r, en, iK, ck, sS, iM, kP, gX, Da, bt, Dd, jh, eq, ad, py, wm, d, je, ff, aF, bz, bF, es, bE, aS, adg, IC, X, BA); #c1(KLF5) c2(NP_001273747) c3(Krueppel-like factor 5 isoform 2) c4( ) c5(105755, 105756, 105757, 105758, 105759) c6( ) c7(bL, T, aD, e, ht, cz, bB, n, Gn, ci, q, ad, av, aE, rA, aT, dL, jj, ae, af, eL, s, aW, ff, r, en, t, bz, sE, W, eM, iT, bE, aS, m, GF, bt, Mj); #c1(KLF5) c2(NP_001721) c3(Krueppel-like factor 5 isoform 1) c4(120496, 120497, 120498) c5(120499, 120500, 120501, 120502, 120503, 120504, 120505, 120506, 120507, 120508, 120509, 120510, 120511, 120512) c6( ) c7(bL, T, aD, e, ht, cz, bB, n, Gn, ci, q, ad, av, aE, rA, aT, dL, jj, ae, af, eL, s, aW, ff, r, en, t, bz, sE, W, eM, iT, bE, aS, m, GF, bt, Mj); #c1(KLF6) c2(NP_001153597) c3(Krueppel-like factor 6 isoform C) c4(60693, 60694, 60695) c5(60696, 60697, 60698, 60699, 60700, 60701, 60702, 60703, 60704, 60705, 60706, 60707, 60708, 60709, 60710, 60711, 60712, 60713) c6( ) c7(bL, T, ul, al, jx, aA, fd, axk, aj, j, ci, uu, Fb, hF, AO, Fc, q, mC, J, ad, hX, eA, av, iu, ds, pX, aT, ah, bK, K, jj, he, ae, cp, Qe, d, BO, Ub, aW, Y, eH, fc, r, fe, aq, Io, kp, aF, g, as, eF, t, cM, fq, bz, cm, bE, gk, ac, eM, bP, dB, eD, Ei, hR, m, cP, gn, pK, bt, B); #c1(KLF7) c2(NP_001257871) c3(Krueppel-like factor 7 isoform 2) c4(95695, 95696) c5(95697, 95698, 95699, 95700, 95701, 95702, 95703, 95704, 95705, 95706, 95707, 95708) c6( ) c7(bL, aur, v); #c1(KLF7) c2(NP_001257872) c3(Krueppel-like factor 7 isoform 3) c4(95709) c5(95710, 95711, 95712, 95713, 95714, 95715, 95716, 95717, 95718, 95719, 95720, 95721) c6( ) c7(bL, aur, v); #c1(KLF7) c2(NP_001257873) c3(Krueppel-like factor 7 isoform 4) c4(95722) c5(95723, 95724, 95725, 95726, 95727, 95728) c6( ) c7(bL, aur, v); #c1(KLF7) c2(NP_003700) c3(Krueppel-like factor 7 isoform 1) c4(140257, 140258) c5(140259, 140260, 140261, 140262, 140263, 140264, 140265) c6( ) c7(bL, aur, v); #c1(KLF8) c2(XP_005262036) c3(Krueppel-like factor 8 isoform X1) c4(277720) c5(277721, 277722, 277723, 277724, 277725, 277726, 277727) c6( ) c7(bL, T, d, py, iA, aW, aT, aA, n, aF, fr, gn, m, nA, eA, t, B); #c1(KLF8) c2(XP_006724638) c3(Krueppel-like factor 8 isoform X2) c4(296154) c5(296155, 296156, 296157, 296158, 296159, 296160) c6( ) c7(bL, T, d, py, iA, aW, aT, aA, n, aF, fr, gn, m, nA, eA, t, B); #c1(KLF9) c2(NP_001197) c3(Krueppel-like factor 9) c4(83513) c5(83514, 83515, 83516, 83517, 83518, 83519) c6( ) c7(dP, T, am, d, AV, al, hL, hz, c1, PU, ae, B, ad); #c1(KLHDC1) c2(NP_751943) c3(kelch domain-containing protein 1) c4(248559) c5(248560, 248561, 248562, 248563, 248564, 248565) c6( ) c7(bL, y, A, j, cz); #c1(KLHDC2) c2(NP_055130) c3(kelch domain-containing protein 2) c4(179166) c5(179167, 179168, 179169, 179170, 179171, 179172) c6( ) c7(eM); #c1(KLHDC8A) c2(XP_006711492) c3(kelch domain-containing protein 8A isoform X1) c4(286018, 286019) c5(286020, 286021, 286022, 286023, 286024, 286025, 286026, 286027, 286028, 286029, 286030, 286031, 286032, 286033, 286034, 286035, 286036, 286037, 286038, 286039) c6( ) c7(bX); #c1(KLHDC88) c2(NP_775817) c3(kelch domain-containing protein 88) c4(250396) c5(250397, 250398, 250399, 250400, 250401, 250402, 250403) c6( ) c7(h, eV, eX, zL); #c1(KLHDC88) c2(XP_005264995) c3(kelch domain-containing protein 8B isoform X3) c4(279324) c5( ) c6( ) c7(h, eV, eX, zL); #c1(KLHDC88) c2(XP_005264997) c3(kelch domain-containing protein 8B isoform X5) c4( ) c5(279325, 279326, 279327, 279328, 279329) c6( ) c7(h, eV, eX, zL); #c1(KLHL1) c2(NP_001273654) c3(kelch-like protein 1 isoform 2) c4(105556) c5(105557, 105558, 105559, 105560, 105561, 105562) c6( ) c7(T, ha, jx, fr, ci, lu, q, ft, F, ib, aE, jL, aT, be, Is, aW, Y, kK, hC, ff, Io, aF, en, hf, hJ, g, bz, eM, kB, m, hE, bt, B, hS); #c1(KLHL1) c2(NP_065917) c3(kelch-like protein 1 isoform 1) c4(206243) c5(206244, 206245, 206246, 206247, 206248, 206249, 206250) c6( ) c7(T, ha, jx, fr, ci, lu, q, ft, F, ib, aE, jL, aT, be, Is, aW, Y, kK, hC, ff, Io, aF, en, hf, hJ, g, bz, eM, kB, m, hE, bt, B, hS); #c1(KLHL10) c2(NP_689680) c3(kelch-like protein 10) c4(243553, 243554) c5(243555, 243556, 243557, 243558, 243559, 243560, 243561, 243562, 243563, 243564, 243565, 243566) c6( ) c7(vH, ND, gU, ZE, bWz); #c1(KLHL12) c2(NP_001289980) c3(kelch-like protein 12 isoform 1) c4(114919, 114920) c5(114921, 114922, 114923, 114924, 114925, 114926, 114927, 114928, 114929, 114930, 114931, 114932) c6( ) c7(cz); #c1(KLHL12) c2(NP_067646) c3(kelch-like protein 12 isoform 2) c4(209210) c5(209211, 209212, 209213, 209214, 209215) c6( ) c7(cz); #c1(KLHL12) c2(XP_011508137) c3(kelch-like protein 12 isoform X1) c4( ) c5(298624, 298625) c6( ) c7(cz); #c1(KLHL12) c2(XP_011508138) c3(kelch-like protein 12 isoform X2) c4(298626) c5(298627, 298628, 298629, 298630, 298631, 298632) c6( ) c7(cz); #c1(KLHL2) c2(NP_001154993) c3(kelch-like protein 2 isoform 2) c4(61248) c5(61249, 61250, 61251, 61252, 61253, 61254) c6( ) c7(bWA, xX, d, eM, dB, atC, WP, Ws, Am, r, cz, K, aVg, IC, q, er); #c1(KLHL2) c2(NP_009177) c3(kelch-like protein 2 isoform 1) c4(171317, 171318) c5(171319, 171320, 171321, 171322, 171323, 171324, 171325, 171326, 171327, 171328, 171329, 171330) c6( ) c7(bWA, xX, d, eM, dB, atC, WP, Ws, Am, r, cz, K, aVg, IC, q, er); #c1(KLHL2) c2(XP_011529878) c3(kelch-like protein 2 isoform X4) c4( ) c5(325648) c6( ) c7(bWA, xX, d, eM, dB, atC, WP, Ws, Am, r, cz, K, aVg, IC, q, er); #c1(KLHL20) c2(NP_055273) c3(kelch-like protein 20) c4(180198, 180199) c5(180200, 180201, 180202, 180203, 180204, 180205, 180206, 180207, 180208, 180209, 180210, 180211) c6( ) c7(W); #c1(KLHL25) c2(NP_071925) c3(kelch-like protein 25) c4(212343, 212344) c5(212345, 212346, 212347, 212348, 212349, 212350, 212351, 212352, 212353, 212354, 212355, 212356, 212357, 212358, 212359, 212360) c6( ) c7(bA, Ea); #c1(KLHL26) c2(NP_060786) c3(kelch-like protein 26) c4(197802, 197803) c5(197804, 197805, 197806, 197807, 197808, 197809, 197810, 197811, 197812, 197813, 197814, 197815) c6( ) c7(Nc); #c1(KLHL29) c2(NP_443152) c3(kelch-like protein 29) c4(229663) c5(229664, 229665, 229666, 229667, 229668, 229669) c6( ) c7(fq, j); #c1(KLHL3) c2(NP_001244123) c3(kelch-like protein 3 isoform 2) c4( ) c5(91942, 91943, 91944, 91945, 91946, 91947) c6( ) c7(bWB, ahS, iT, cz); #c1(KLHL3) c2(NP_001244124) c3(kelch-like protein 3 isoform 3) c4( ) c5(91948, 91949, 91950, 91951, 91952, 91953, 91954, 91955, 91956, 91957) c6( ) c7(bWB, ahS, iT, cz); #c1(KLHL3) c2(NP_059111) c3(kelch-like protein 3 isoform 1) c4(193072, 193073, 193074, 193075, 193076) c5(193077, 193078, 193079, 193080, 193081, 193082, 193083, 193084, 193085, 193086, 193087, 193088, 193089, 193090) c6( ) c7(bWB, ahS, iT, cz); #c1(KLHL31) c2(NP_001003760) c3(kelch-like protein 31) c4(20075) c5(20076, 20077, 20078, 20079, 20080, 20081, 20082, 20083, 20084, 20085) c6( ) c7(cz); #c1(KLHL35) c2(NP_001034637) c3(kelch-like protein 35) c4( ) c5(31946, 31947, 31948, 31949, 31950, 31951, 31952, 31953, 31954, 31955, 31956, 31957) c6( ) c7(fr, B); #c1(KLHL35) c2(XP_011543256) c3(kelch-like protein 35 isoform X1) c4(342057, 342058) c5( ) c6( ) c7(fr, B); #c1(KLHL40) c2(NP_689606) c3(kelch-like protein 40) c4(243245, 243246) c5(243247, 243248, 243249, 243250, 243251, 243252, 243253, 243254, 243255, 243256, 243257, 243258, 243259) c6( ) c7(Ag, Am, oj, bWC); #c1(KLHL41) c2(NP_006054) c3(kelch-like protein 41) c4(161513) c5(161514, 161515, 161516, 161517, 161518, 161519, 161520) c6( ) c7(bWD, Am); #c1(KLHL42) c2(NP_065833) c3(kelch-like protein 42) c4(205745) c5(205746, 205747, 205748, 205749, 205750, 205751) c6( ) c7(bL, eU); #c1(KLHL5) c2(NP_001007076) c3(kelch-like protein 5 isoform 3) c4(22464) c5(22465, 22466, 22467, 22468, 22469, 22470, 22471, 22472, 22473, 22474, 22475) c6( ) c7(cu); #c1(KLHL5) c2(NP_001165125) c3(kelch-like protein 5 isoform 4) c4(67504) c5(67505, 67506, 67507, 67508, 67509, 67510) c6( ) c7(cu); #c1(KLHL5) c2(NP_057074) c3(kelch-like protein 5 isoform 1) c4(188806, 188807, 188808) c5(188809, 188810, 188811, 188812, 188813, 188814, 188815, 188816, 188817, 188818, 188819, 188820, 188821) c6( ) c7(cu); #c1(KLHL5) c2(NP_950240) c3(kelch-like protein 5 isoform 2) c4(260913) c5(260914, 260915, 260916, 260917, 260918, 260919) c6( ) c7(cu); #c1(KLHL5) c2(XP_005262712) c3(kelch-like protein 5 isoform X2) c4(278048) c5(278049, 278050, 278051, 278052, 278053, 278054, 278055) c6( ) c7(cu); #c1(KLHL5) c2(XP_011512001) c3(kelch-like protein 5 isoform X1) c4(302672, 302673) c5(302674, 302675, 302676, 302677, 302678, 302679, 302680, 302681, 302682, 302683, 302684, 302685) c6( ) c7(cu); #c1(KLHL6) c2(NP_569713) c3(kelch-like protein 6) c4(233820) c5(233821, 233822, 233823, 233824, 233825, 233826, 233827) c6( ) c7(cj); #c1(KLHL7) c2(NP_001026880) c3(kelch-like protein 7 isoform 1) c4(29792, 29793, 29794, 29795, 29796) c5(29797, 29798, 29799, 29800, 29801, 29802, 29803, 29804, 29805, 29806, 29807, 29808, 29809, 29810, 29811, 29812, 29813, 29814, 29815, 29816, 29817, 29818, 29819, 29820) c6( ) c7(cj, bWE, xX, IR, nw); #c1(KLHL7) c2(NP_001165899) c3(kelch-like protein 7 isoform 3) c4(67967) c5(67968, 67969, 67970, 67971, 67972, 67973) c6( ) c7(cj, bWE, xX, IR, nw); #c1(KLHL7) c2(NP_061334) c3(kelch-like protein 7 isoform 2) c4( ) c5(200109, 200110, 200111, 200112, 200113, 200114, 200115, 200116, 200117, 200118, 200119) c6( ) c7(cj, bWE, xX, IR, nw); #c1(KLHL7) c2(XP_006715816) c3(kelch-like protein 7 isoform X1) c4(289799) c5( ) c6( ) c7(cj, bWE, xX, IR, nw); #c1(KLHL7) c2(XP_006715818) c3(kelch-like protein 7 isoform X2) c4(289800, 289801) c5(289802, 289803, 289804, 289805, 289806, 289807, 289808, 289809, 289810, 289811, 289812, 289813, 289814, 289815, 289816, 289817) c6( ) c7(cj, bWE, xX, IR, nw); #c1(KLHL7) c2(XP_006715819) c3(kelch-like protein 7 isoform X3) c4( ) c5(289818) c6( ) c7(cj, bWE, xX, IR, nw); #c1(KLHL9) c2(NP_061335) c3(kelch-like protein 9) c4(200120, 200121) c5(200122, 200123, 200124, 200125, 200126, 200127, 200128, 200129, 200130, 200131, 200132, 200133) c6( ) c7(hk, Y); #c1(KLK1) c2(NP_002248) c3(kallikrein-1 preproprotein) c4(126933) c5(126934, 126935, 126936, 126937, 126938, 126939, 126940) c6( ) c7(bL, gx, T, bM, rG, eR, IT, e, uv, aw, cz, bB, aj, v, j, ci, fr, sl, il, aY, q, J, ad, ip, fU, cc, wG, sN, M, aT, cU, IG, cy, jy, K, bq, ae, dl, bWE, hm, vP, d, bf, LG, aW, cr, r, eZ, fe, kp, aB, aF, g, iV, eE, bUw, t, uC, pb, qa, eK, bLL, dR, ar, TA, tY, ac, bE, wO, go, X, bm, iS, hR, E, bWG, dy, m, y, gD, us); #c1(KLK1) c2(XP_011525244) c3(kallikrein-1 isoform X1) c4(319712) c5(319713, 319714, 319715, 319716, 319717) c6( ) c7(bL, gx, T, bM, rG, eR, IT, e, uv, aw, cz, bB, aj, v, j, ci, fr, si, il, aY, q, J, ad, ip, fU, cc, wG, sN, M, aT, cU, IG, cy, jy, K, bq, ae, dl, bWE, hm, vP, d, bf, LG, aW, cr, r, eZ, fe, kp, aB, aF, g, iV, eE, bUw, t, uC, pb, qa, eK, bLL, dR, ar, TA, tY, ac, bE, wO, go, X, bm, iS, hR, E, bWG, dy, m, y, gD, us); #c1(KLK10) c2(NP_002767) c3(kallikrein-10 preproprotein) c4(131832) c5(131833, 131834, 131835, 131836, 131837, 131838, 131839, 131840, 131841, 131842, 131843, 131844, 131845, 131846, 131847) c6( ) c7(T, al, aA, ci, q, ad, hX, Db, aT, Dz, ae, qt, hT, aW, ff, cr, r, kp, aF, en, g, t, ML, gk, eM, wB, gX, m, B); #c1(KLK11) c2(NP_001129504) c3(kallikrein-11 isoform 1 precursor) c4( ) c5(51758, 51759, 51760, 51761, 51762, 51763, 51764, 51765) c6( ) c7(G, T, ib, s, eM, aW, cr, aT, aA, aF, fr, ci, m, t, ae, ad); #c1(KLK11) c2(NP_001161077) c3(kallikrein-11 isoform 3 precursor) c4( ) c5(65272, 65273, 65274, 65275, 65276) c6( ) c7(G, T, ib, s, eM, aW, cr, aT, aA, aF, fr, ci, m, t, ae, ad); #c1(KLK11) c2(NP_659196) c3(kallikrein-11 isoform 2) c4(239716, 239717) c5(239718, 239719, 239720, 239721, 239722, 239723, 239724, 239725, 239726, 239727, 239728, 239729) c6( ) c7(G, T, ib, s, eM, aW, cr, aT, aA, aF, fr, ci, m, t, ae, ad); #c1(KLK11) c2(XP_011524671) c3(kallikrein-11 isoform X2) c4(319177) c5(319178) c6( ) c7(G, T, ib, s, eM, aW, cr, aT, aA, aF, fr, ci, m, t, ae, ad); #c1(KLK12) c2(NP_062544) c3(kallikrein-12 isoform 1 precursor) c4(201901) c5(201902, 201903, 201904, 201905, 201906, 201907) c6( ) c7(T, aW, aA, aT, aF, g, ae, pb, ad); #c1(KLK12) c2(NP_665901) c3(kallikrein-12 isoform 2 precursor) c4(241945) c5(241946, 241947, 241948, 241949, 241950, 241951, 241952, 241953, 241954, 241955, 241956) c6( ) c7(T, aW, aA, aT, aF, g, ae, pb, ad); #c1(KLK12) c2(NP_665902) c3(kallikrein-12 isoform 3 precursor) c4(241957) c5(241958, 241959, 241960, 241961, 241962) c6( ) c7(T, aW, aA, aT, aF, g, ae, pb, ad); #c1(KLK12) c2(XP_005259007) c3(kallikrein-12 isoform X2) c4(275916) c5(275917, 275918, 275919, 275920, 275921, 275922, 275923) c6( ) c7(T, aW, aA, aT, aF, g, ae, pb, ad); #c1(KLK13) c2(NP_056411) c3(kallikrein-13 precursor) c4(187462, 187463, 187464) c5(187465, 187466, 187467, 187468, 187469, 187470, 187471, 187472, 187473, 187474, 187475, 187476, 187477, 187478, 187479, 187480, 187481, 187482, 187483, 187484, 187485, 187486, 187487, 187488, 187489, 187490) c6( ) c7(av, T, eM, aW, Lf, cr, aT, aA, n, aF, ci, m, bu, g, t, ae, ad); #c1(KLK14) c2(NP_071329) c3(kallikrein-14 preproprotein) c4(211008) c5(211009, 211010, 211011, 211012, 211013, 211014, 211015, 211016, 211017, 211018, 211019, 211020, 211021, 211022, 211023, 211024, 211025, 211026, 211027, 211028) c6( ) c7(T, xE, s, eM, bE, aW, ev, cr, aT, bB, Fb, m, g, bu, t, ae, ad); #c1(KLK15) c2(NP_001264010) c3(kallikrein-15 isoform 5 preproprotein) c4( ) c5(97439, 97440) c6( ) c7(T, aW, aT, n, Fb, PQ, m, g, t, ae, ad); #c1(KLK15) c2(NP_059979) c3(kallikrein-15 isoform 4 preproprotein) c4(193452) c5(193453, 193454, 193455, 193456, 193457, 193458, 193459, 193460, 193461, 193462) c6( ) c7(T, aW, aT, n, Fb, PQ, m, g, t, ae, ad); #c1(KLK15) c2(XP_011525389) c3(kallikrein-15 isoform X4) c4(319826) c5(319827, 319828, 319829, 319830, 319831, 319832) c6( ) c7(T, aW, aT, n, Fb, PQ, m, g, t, ae, ad); #c1(KLK15) c2(XP_011525390) c3(kallikrein-15 isoform X5) c4(319833, 319834) c5(319835, 319836, 319837, 319838, 319839, 319840, 319841, 319842, 319843, 319844) c6( ) c7(T, aW, aT, n, Fb, PQ, m, g, t, ae, ad); #c1(KLK2) c2(NP_001002231) c3(kallikrein-2 isoform 2 preproprotein) c4(19434) c5(19435, 19436, 19437, 19438, 19439, 19440) c6( ) c7(HQ, ae, T, dH, aW, aT, cz, n, aj, g, bz, ne, J, ad); #c1(KLK2) c2(NP_001243009) c3(kallikrein-2 isoform 3) c4(89535) c5(89536, 89537, 89538, 89539, 89540) c6( ) c7(HQ, ae, T, dH, aW, aT, cz, n, aj, g, bz, ne, J, ad); #c1(KLK2) c2(NP_005542) c3(kallikrein-2 isoform 1 preproprotein) c4(157255) c5(157256, 157257, 157258, 157259, 157260, 157261, 157262) c6( ) c7(HQ, ae, T, dH, aW, aT, cz, n, aj, g, bz, ne, J, ad); #c1(KLK3) c2(NP_001025218) c3(prostate-specific antigen isoform 3 preproprotein) c4(29503) c5(29504, 29505, 29506, 29507, 29508, 29509) c6( ) c7(gh, G, T, bWH, ci, aY, asr, gH, il, K, aeN, aa, li, UL, aW, dg, g, cm, Jr, cX, DD, m, Uw, WA, sw, ez, n, fr, eW, b, no, aow, is, cY, RT, AQ, hq, GU, dB, hk, dA, eR, aA, fF, ze, q, er, azn, aT, ae, af, ne, kl, zH, oV, Y, OS, r, eS, en, apx, t, UF, LS, bWI, id, rQ, Dd, iW, jN, Fb, ad, av, ji, Ub, ff, cr, eZ, aF, bF, pu, asq, ag, dX, i, iu, jr); #c1(KLK3) c2(NP_001025219) c3(prostate-specific antigen isoform 4 preproprotein) c4(29510, 29511) c5(29512, 29513, 29514, 29515, 29516, 29517, 29518, 29519, 29520, 29521, 29522, 29523, 29524, 29525, 29526, 29527) c6( ) c7(gh, G, T, bWH, ci, aY, asr, gH, il, K, aeN, aa, li, UL, aW, dg, g, cm, Jr, cX, DD, m, Uw, WA, sw, ez, n, fr, eW, b, no, aow, is, cY, RT, AQ, hq, GU, dB, hk, dA, eR, aA, fF, ze, q, er, azn, aT, ae, af, ne, kl, zH, oV, Y, OS, r, eS, en, apx, t, UF, LS, bWI, id, rQ, Dd, iW, jN, Fb, ad, av, ji, Ub, ff, cr, eZ, aF, bF, pu, asq, ag, dX, i, iu, jr); #c1(KLK3) c2(NP_001639) c3(prostate-specific antigen isoform 1 preproprotein) c4(119547, 119548) c5(119549, 119550, 119551, 119552, 119553, 119554, 119555, 119556, 119557, 119558, 119559, 119560) c6( ) c7(gh, G, T, bWH, ci, aY, asr, gH, il, K, aeN, aa, li, UL, aW, dg, g, cm, Jr, cX, OD, m, Uw, WA, sw, ez, n, fr, eW, b, no, aow, is, cY, RT, AQ, hq, GU, dB, hk, dA, eR, aA, fF, ze, q, er, azn, aT, ae, af, ne, kl, zH, oV, Y, OS, r, eS, en, apx, t, UF, LS, bWI, id, rQ, Dd, iW, jN, Fb, ad, av, ji, Ub, ff, cr, eZ, aF, bF, pu, asq, ag, dX, i, iu, jr); #c1(KLK4) c2(NP_004908) c3(kallikrein-4 isoform 1 preproprotein) c4(150704) c5(150705, 150706, 150707, 150708, 150709, 150710) c6( ) c7(T, eR, aw, cz, j, ci, uE, cd, q, mC, ad, BJ, aT, h, cy, K, ae, RT, s, aW, eZ, r, g, cl, wA, t, Ud, eK, uP, bWJ, ac, wO, hL, dy, m, fL, us); #c1(KLK4) c2(XP_011525848) c3(kallikrein-4 isoform X3) c4( ) c5(320264, 320265, 320266, 320267, 320268, 320269, 320270) c6( ) c7(T, eR, aw, cz, j, ci, uE, cd, q, mC, ad, BJ, aT, h, cy, K, ae, RT, s, aW, eZ, r, g, cl, wA, t, Ud, eK, uP, bWJ, ac, wO, hL, dy, m, fL, us); #c1(KLK4) c2(XP_011525849) c3(kallikrein-4 isoform X4) c4(320271) c5( ) c6( ) c7(T, eR, aw, cz, j, ci, uE, cd, q, mC, ad, BJ, aT, h, cy, K, ae, RT, s, aW, eZ, r, g, cI, wA, t, Ud, eK, uP, bWJ, ac, wO, hL, dy, m, fL, us); #c1(KLK5) c2(NP_036559) c3(kallikrein-5 preproprotein) c4(174385, 174386) c5(174387, 174388, 174389, 174390, 174391, 174392, 174393, 174394, 174395, 174396, 174397, 174398, 174399, 174400) c6( ) c7(gh, cT, T, aW, eL, ff, cr, aT, aEW, dL, m, en, eE, t, ae, LS, ad); #c1(KLK6) c2(NP_001012982) c3(kallikrein-6 isoform A preproprotein) c4(25384, 25385, 25386) c5(25387, 25388, 25389, 25390, 25391, 25392, 25393, 25394, 25395, 25396, 25397, 25398, 25399, 25400, 25401, 25402, 25403, 25404, 25405) c6( ) c7(T, Uc, dA, bWK, aA, n, bB, fr, ci, mF, V, q, ad, ip, ke, Db, aT, ae, af, d, s, aW, cr, r, aEW, kp, aF, g, cl, eE, t, wA, bE, go, iS, m); #c1(KLK6) c2(NP_001012983) c3(kallikrein-6 isoform B) c4( ) c5(25406, 25407, 25408, 25409, 25410, 25411, 25412, 25413, 25414) c6( ) c7(T, Uc, dA, bWK, aA, n, bB, fr, ci, mF, V, q, ad, ip, ke, Db, aT, ae, af, d, s, aW, cr, r, aEW, kp, aF, g, c1, eE, t, wA, bE, go, iS, m); #c1(KLK7) c2(NP_001193982) c3(kallikrein-7 isoform 2) c4( ) c5(83419, 83420, 83421, 83422, 83423, 83424, 83425) c6(83426, 83427) c7(T, aC, Uc, bB, fr, ci, q, ad, aE, apJ, aT, IQ, ae, s, aW, cr, r, dN, aEW, bSc, g, eE, t, bE, go, m); #c1(KLK7) c2(NP_001230055) c3(kallikrein-7 isoform 3) c4( ) c5(85860) c6( ) c7(T, aC, Uc, bB, fr, ci, q, ad, aE, apJ, aT, IQ, ae, s, aW, cr, r, dN, aEW, bSc, g, eE, t, bE, go, m); #c1(KLK7) c2(NP_005037) c3(kallikrein-7 isoform 1 preproprotein) c4(152354, 152355) c5(152356, 152357, 152358, 152359, 152360, 152361, 152362, 152363, 152364, 152365, 152366, 152367, 152368, 152369) c6(152370, 152371, 152372, 152373) c7(T, aC, Uc, bB, fr, ci, q, ad, aE, apJ, aT, IQ, ae, s, aW, cr, r, dN, aEW, bSc, g, eE, t, bE, go, m); #c1(KLK8) c2(NP_009127) c3(kallikrein-8 isoform 1 preproprotein) c4(170941) c5(170942, 170943, 170944, 170945, 170946, 170947, 170948, 170949, 170950, 170951) c6( ) c7(av, T, Ew, eM, aW, if, VB, aT, dN, n, he, bK, K, m, qN, g, t, iK, bz, ad); #c1(KLK8) c2(NP_653088) c3(kallikrein-8 isoform 2 precursor) c4(238851) c5(238852, 238853, 238854, 238855, 238856, 238857) c6( ) c7(av, T, Ew, eM, aW, if, VB, aT, dN, n, he, bK, K, m, qN, g, t, iK, bz, ad); #c1(KLK8) c2(NP_653089) c3(kallikrein-8 isoform 3 precursor) c4(238858) c5(238859, 238860, 238861, 238862, 238863, 238864, 238865) c6( ) c7(av, T, Ew, eM, aW, if, VB, aT, dN, n, he, bK, K, m, qN, g, t, iK, bz, ad); #c1(KLK8) c2(NP_653090) c3(kallikrein-8 isoform 4) c4(238866) c5(238867, 238868, 238869, 238870, 238871) c6( ) c7(av, T, Ew, eM, aW, if, VB, aT, dN, n, he, bK, K, m, qN, g, t, iK, bz, ad); #c1(KLK9) c2(NP_036447) c3(kallikrein-9 precursor) c4(173931) c5(173932, 173933, 173934, 173935, 173936, 173937, 173938, 173939, 173940, 173941, 173942, 173943, 173944, 173945) c6( ) c7(T, aW, aT, m, t, ad); #c1(KLK81) c2(NP_000883) c3(plasma kallikrein preproprotein) c4(16799, 16800) c5(16801, 16802, 16803, 16804, 16805, 16806, 16807, 16808, 16809, 16810, 1681116812) c6( ) c7(P, bM, T, eR, al, by, aA, cz, C, aY, bCx, ad, bnC, aT, ae, Zm, aW, fO, eZ, fe, aF, Ci, qa, RJ, bvc, arO); #c1(KLLN) c2(NP_001119521) c3(killin) c4(44054) c5(44055, 44056, 44057, 44058, 44059, 44060) c6( ) c7(es, T, hd, nM, qw, iA, nB, aW, go, aT, bWM, bj, fr, ci, ae, ad, bWL); #c1(KLRB1) c2(NP_002249) c3(killer cell lectin-like receptor subfamily B member 1) c4(126941) c5(126942, 126943, 126944, 126945, 126946, 126947) c6( ) c7(wj, dA, ds, Y, jx, eh, h, Io, wV, ci, yH, hE, V, bWN, y, aDH, hX); #c1(KLRC1) c2(NP_998822) c3(NKG2-A/NKG2-B type II integral membrane protein isoform NKG2-B) c4(266035) c5(266036, 266037, 266038, 266039, 266040, 266041, 266042, 266043, 266044, 266045) c6( ) c7(T, fR, jx, jh, qj, jE, hX, qC, dP, F, ds, h, rB, hH, Y, eZ, cl, ck, hL, fL, y, PC); #c1(KLRC1) c2(NP_998823) c3(NKG2-A/NKG2-B type II integral membrane protein isoform NKG2-A) c4(266046) c5(266047, 266048, 266049, 266050, 266051, 266052, 266053, 266054, 266055, 266056) c6( ) c7(T, fR, jx, jh, qj, jE, hX, qC, dP, F, ds, h, rB, hH, Y, eZ, cl, ck, hL, fL, y, pC); #c1(KLRC2) c2(NP_002251) c3(NKG2-C type II integral membrane protein) c4(126948, 126949, 126950) c5(126951, 126952, 126953, 126954, 126955, 126956, 126957, 126958, 126959, 126960, 126961, 126962, 126963, 126964, 126965, 126966, 126967, 126968) c6( ) c7(T, hl, dc, cr, eZ, h, aSu, fL, hH, V, bWN, y); #c1(KLRC4) c2(NP_038459) c3(NKG2-F type II integral membrane protein) c4(176490, 176491) c5(176492, 176493, 176494, 176495, 176496, 176497, 176498, 176499, 176500, 176501, 176502) c6( ) c7(hH, T, jE, cj); #c1(KLRC4-KLRK1) c2(NP_001186734) c3(NKG2-D type II integral membrane protein) c4(78449, 78450) c5(78451, 78452, 78453, 78454, 78455, 78456, 78457, 78458, 78459, 78460, 78461, 78462, 78463, 78464, 78465, 78466, 78467) c6( ) c7(oO, uB, T, dD, eR, ea, if, iW, eX, oA, aA, bB, n, aj, dG, eq, ci, qN, wV, fd, aY, V, hF, q, a mW, J, ad, hX, eA, wD, jz, bIC, fh, oz, ds, h, eV, hn, K, dQ, ae, cY, buh, d, oV, Y, ff, eH, hl, eZ, r, dq, Io, gE, hN, aF, en, jh, eF, t, cm, bz, iK, bw, LB, ck, bF, eU, iT, nB, aWZ, bE, ig, atM, cj, at, dW, dy, m, y, bt, Pr, B); #c1(KLRD1) c2(NP_001107868) c3(natural killer cells antigen CD94 isoform 1) c4(43061) c5(43062, 43063, 43064, 43065, 43066, 43067, 43068, 43069, 43070, 43071, 43072, 43073, 43074, 43075, 43076, 43077) c6( ) c7(dP, T, y, F, A, fR, jx, eZ, jh, h, fL, jE, hH, VB, iP); #c1(KLRD1) c2(NP_031360) c3(natural killer cells antigen CD94 isoform 2) c4(171938) c5(171939, 171940, 171941, 171942, 171943, 171944, 171945, 171946, 171947, 171948, 171949, 171950) c6( ) c7(dP, T, y, F, A, fR, jx, eZ, jh, h, fL, jE, hH, VB, iP); #c1(KLRD1) c2(XP_006719129) c3(natural killer cells antigen CD94 isoform X5) c4(292212) c5( ) c6( ) c7(dP, T, y, F, A, fR, jx, eZ, jh, h, fL, jE, hH, VB, iP); #c1(KLRD1) c2(XP_006719130) c3(natural killer cells antigen CD94 isoform X7) c4(292213) c5(292214, 292215, 292216, 292217, 292218, 292219) c6( ) c7(dP, T, y, F, A, fR, jx, eZ, jh, h, fL, jE, hH, VB, iP); #c1(KLRD1) c2(XP_011518949) c3(natural killer cells antigen CD94 isoform X1) c4(313391) c5( ) c6( ) c7(dP, T, y, F, A, fR, jx, eZ, jh, h, fL, jE, hH, VB, iP); #c1(KLRG1) c2(NP_005801) c3(killer cell lectin-like receptor subfamily G member 1) c4(159574, 159575) c5(159576, 159577, 159578, 159579, 159580, 159581, 159582, 159583, 159584, 159585, 159586, 159587) c6( ) c7(bL, A, fR, ds, jx, eZ, cj, Io, dG, aj, ci, jM, J, yF, hX); #c1(KLRG2) c2(NP_940910) c3(killer cell lectin-like receptor subfamily G member 2) c4(260103) c5(260104, 260105, 260106, 260107, 260108, 260109) c6( ) c7(ae, ad); #c1(KLRG2) c2(XP_005250368) c3(killer cell lectin-like receptor subfamily G member 2 isoform X3) c4( ) c5(270275, 270276, 270277, 270278, 270279, 270280, 270281, 270282) c6( ) c7(ae, ad); #c1(KLRG2) c2(XP_011514443) c3(killer cell lectin-like receptor subfamily G member 2 isoform X2) c4(307133) c5( ) c6( ) c7(ae, ad); #c1(KM0) c2(NP_003670) c3(kynurenine 3-monooxygenase) c4(140081, 140082) c5(140083, 140084, 140085, 140086, 140087) c6( ) c7(x, ou, ft, rR, fJ, bO, bK, k, V); #c1(KM0) c2(XP_005273394) c3(kynurenine 3-monooxygenase isoform X1) c4(284556, 284557) c5(284558, 284559, 284560, 284561, 284562, 284563, 284564, 284565, 284566, 284567, 284568, 284569, 284570) c6( ) c7(x, ou, ft, rR, fJ, bO, bK, k, V); #c1(KM0) c2(XP_005273395) c3(kynurenine 3-monooxygenase isoform X2) c4( ) c5(284571, 284572, 284573, 284574, 284575, 284576) c6( ) c7(x, ou, ft, rR, fJ, bO, bK, k, V); #c1(KMT2A) c2(NP_001184033) c3(histone-lysine N-methyltransferase 2A isoform 1 precursor) c4(75285) c5(75286, 75287, 75288, 75289, 75290, 75291) c6( ) c7(T, ea, if, e, qx, fd, bB, ip, x, oB, pp, aEX, K, pk, eG, aW, g, Fu, aKj, cm, bw, ou, eM, iT, cj, k, ajJ, dD, aw, bWO, n, oY, fr, br, b, cq, ft, Bj, kH, h, hn, dL, bWP, B, fM, aA, hy, V, q, er, eA, aT, cy, dz, jj, ae, eu, iU, iZ, oV, Y, r, gm, hf, bu, f, ck, wR, dy, oX, bt, yv, id, oA, bs, jh, eq, hF, ad, hX, fX, iY, IQ, pq, iL, gj, BN, gK, dq, gE, bzD, aF, eB, aNL, i, y, kS, ne, jr); #c1(KMT2A) c2(NP_005924) c3(histone-lysine N-methyltransferase 2A isoform 2 precursor) c4(160454, 160455, 160456) c5(160457, 160458, 160459, 160460, 160461, 160462, 160463, 160464, 160465, 160466, 160467, 160468, 160469, 160470, 160471, 160472, 160473, 160474, 160475, 160476, 160477) c6( ) c7(T, ea, if, e, qx, fd, bB, ip, x, oB, pp, aEX, K, pk, eG, aW, g, Fu, aKj, cm, bw, ou, eM, iT, cj, k, aj J, dD, aw, bWO, n, oY, fr, br, b, cq, ft, Bj, kH, h, hn, dL, bWP, B, fM, aA, hy, V, q, er, eA, aT, cy, dz, jj, ae, eu, iU, iZ, oV, Y, r, gm, hf, bu, f, ck, wR, dy, oX, bt, yv, id, oA, bs, jh, eq, hF, ad, hX, fX, iY, IQ, pq, iL, gj, BN, gK, dq, gE, bzD, aF, eB, aNL, i, y, kS, ne, jr); #c1(KMT2A) c2(XP_006718902) c3(histone-lysine N-methyltransferase 2A isoform X6) c4( ) c5(292045, 292046, 292047, 292048, 292049, 292050) c6( ) c7(T, ea, if, e, qx, fd, bB, ip, x, oB, pp, aEX, K, pk, eG, aW, g, Fu, aKj, cm, bw, ou, eM, iT, cj, k, ajJ, dD, aw, bWO, n, oY, fr, br, b, cq, ft, Bj, kH, h, hn, dL, bWP, B, fM, aA, hy, V, q, er, eA, aT, cy, dz, jj, ae, eu, iU, iZ, oV, Y, r, gm, hf, bu, f, ck, wR, dy, oX, bt, yv, id, oA, bs, jh, eq, hF, ad, hX, fX, iY, IQ, pq, iL, gj, BN, gK, dq, gE, bzD, aF, eB, aNL, i, y, kS, ne, jr); #c1(KMT2A) c2(XP_011541131) c3(histone-lysine N-methyltransferase 2A isoform X1) c4(339655) c5(339656, 339657, 339658, 339659, 339660, 339661) c6( ) c7(T, ea, if, e, qx, fd, bB, ip, x, oB, pp, aEX, K, pk, eG, aW, g, Fu, aKj, cm, bw, ou, eM, iT, cj, k, ajJ, dD, aw, bWO, n, oY, fr, br, b, cq, ft, Bj, kH, h, hn, dL, bWP, B, fM, aA, hy, V, q, er, eA, aT, cy, dz, jj, ae, eu, iU, iZ, oV, Y, r, gm, hf, bu, f, ck, wR, dy, oX, bt, yv, id, oA, bs, jh, eq, hF, ad, hX, fX, iY, IQ, pq, iL, gj, BN, gK, dq, gE, bzD, aF, eB, aNL, i, y, kS, ne, jr); #c1(KMT2A) c2(XP_011541132) c3(histone-lysine N-methyltransferase 2A isoform X2) c4(339662) c5( ) c6( ) c7(T, ea, if, e, qx, fd, bB, ip, x, oB, pp, aEX, K, pk, eG, aW, g, Fu, aKj, cm, bw, ou, eM, iT, cj, k, ajJ, dD, aw, bWO, n, oY, fr, br, b, cq, ft, Bj, kH, h, hn, dL, bWP, B, fM, aA, hy, V, q, er, eA, aT, cy, dz, jj, ae, eu, iU, iZ, oV, Y, r, gm, hf, bu, f, ck, wR, dy, oX, bt, yv, id, oA, bs, jh, eq, hF, ad, hX, fX, iY, IQ, pq, iL, gj, BN, gK, dq, gE, bzD, aF, eB, aNL, i, y, kS, ne, jr); #c1(KMT2A) c2(XP_011541133) c3(histone-lysine N-methyltransferase 2A isoform X3) c4( ) c5(339663, 339664, 339665, 339666, 339667, 339668) c6( ) c7(T, ea, if, e, qx, fd, bB, ip, x, oB, pp, aEX, K, pk, eG, aW, g, Fu, aKj, cm, bw, ou, eM, iT, cj, k, ajJ, dD, aw, bWO, n, oY, fr, br, b, cq, ft, Bj, kH, h, hn, dL, bWP, B, fM, aA, hy, V, q, er, eA, aT, cy, dz, jj, ae, eu, iU, iZ, oV, Y, r, gm, hf, bu, f, ck, wR, dy, oX, bt, yv, id, oA, bs, jh, eq, hF, ad, hX, fX, iY, IQ, pq, iL, gj, BN, gK, dq, gE, bzD, aF, eB, aNL, i, y, kS, ne, jr); #c1(KMT2A) c2(XP_011541135) c3(histone-lysine N-methyltransferase 2A isoform X5) c4(339669) c5( ) c6( ) c7(T, ea, if, e, qx, fd, bB, ip, x, oB, pp, aEX, K, pk, eG, aW, g, Fu, aKj, cm, bw, ou, eM, iT, cj, k, ajJ, dD, aw, bWO, n, oY, fr, br, b, cq, ft, Bj, kH, h, hn, dL, bWP, B, fM, aA, hy, V, q, er, eA, aT, cy, dz, jj, ae, eu, iU, iZ, oV, Y, r, gm, hf, bu, f, ck, wR, dy, oX, bt, yv, id, oA, bs, jh, eq, hF, ad, hX, fX, iY, IQ, pq, iL, gj, BN, gK, dq, gE, bzD, aF, eB, aNL, i, y, kS, ne, jr); #c1(KMT2B) c2(NP_055542) c3(histone-lysine N-methyltransferase 2B) c4(181847) c5(181848) c6( ) c7(T, fM, d, aE, py, aW, ff, jh, aT, aq, dy, K, nA, hX, en, bUh, B, ad, hX); #c1(KMT2B) c2(XP_011525863) c3(histone-lysine N-methyltransferase 2B isoform X1) c4( ) c5(320288, 320289, 320290, 320291, 320292, 320293, 320294, 320295, 320296, 320297) c6( ) c7(T, fM, d, aE, py, aW, ff, jh, aT, aq, dy, K, nA, hX, en, bUh, B, ad, hX); #c1(KMT2B) c2(XP_011525864) c3(histone-lysine N-methyltransferase 2B isoform X2) c4( ) c5(320298) c6( ) c7(T, fM, d, aE, py, aW, ff, jh, aT, aq, dy, K, nA, bX, en, bUh, B, ad, hX); #c1(KMT2B) c2(XP_011525865) c3(histone-lysine N-methyltransferase 2B isoform X3) c4(320299) c5(320300, 320301, 320302, 320303, 320304, 320305, 320306, 320307) c6( ) c7(T, fM, d, aE, py, aW, ff, jh, aT, aq, dy, K, nA, bX, en, bUh, B, ad, hX); #c1(KMT2C) c2(NP_733751) c3(histone-lysine N-methyltransferase 2C) c4(246941) c5(246942, 246943, 246944, 246945, 246946, 246947) c6( ) c7(T, id, aA, q, jz, qK, aT, hn, dL, he, aW, ff, r, aq, aF, en, g, hJ, ck, bcd, bt, it, B); #c1(KMT2C) c2(XP_005250082) c3(histone-lysine N-methyltransferase 2C isoform X1) c4( ) c5(270101, 270102, 270103, 270104, 270105) c6( ) c7(T, id, aA, q, jz, qK, aT, hn, dL, he, aW, ff, r, aq, aF, en, g, hJ, ck, bcd, bt, it, B); #c1(KMT2C) c2(XP_005250085) c3(histone-lysine N-methyltransferase 2C isoform X5) c4( ) c5(270106) c6( ) c7(T, id, aA, q, jz, qK, aT, hn, dL, he, aW, ff, r, aq, aF, en, g, hJ, ck, bcd, bt, it, B); #c1(KMT2C) c2(XP_006716140) c3(histone-lysine N-methyltransferase 2C isoform X4) c4( ) c5(290091) c6( ) c7(T, id, aA, q, jz, qK, aT, hn, dL, he, aW, ff, r, aq, aF, en, g, hJ, ck, bcd, bt, it, B); #c1(KMT2C) c2(XP_006716141) c3(histone-lysine N-methyltransferase 2C isoform X7) c4(290092) c5(290093, 290094, 290095, 290096, 290097, 290098) c6( ) c7(T, id, aA, q, jz, qK, aT, hn, dL, he, aW, ff, r, aq, aF, en, g, hJ, ck, bcd, bt, it, B); #c1(KMT2C) c2(XP_011514752) c3(histone-lysine N-methyltransferase 2C isoform X6) c4(307396) c5(307397, 307398, 307399, 307400, 307401, 307402) c6( ) c7(T, id, aA, q, jz, qK, aT, hn, dL, he, aW, ff, r, aq, aF, en, g, hJ, ck, bcd, bt, it, B); #c1(KMT2C) c2(XP_011514757) c3(histone-lysine N-methyltransferase 2C isoform X14) c4( ) c5(307403) c6( ) c7(T, id, aA, q, jz, qK, aT, hn, dL, he, aW, ff, r, aq, aF, en, g, hJ, ck, bed, bt, it, B); #c1(KMT2C) c2(XP_011514758) c3(histone-lysine N-methyltransferase 2C isoform X15) c4(307404) c5( ) c6( ) c7(T, id, aA, q, jz, qK, aT, hn, dL, he, aW, ff, r, aq, aF, en, g, hJ, ck, bcd, bt, it, B); #c1(KMT2D) c2(XP_005269219) c3(histone-lysine N-methyltransferase 2D isoform X1) c4(282486) c5(282487, 282488, 282489, 282490, 282491, 282492) c6( ) c7(T, gU, fM, IP, jh, fd, aj, nA, bX, J, ad, hX, x, jz, py, aE, aT, K, jf, A, d, aW, oV, ff, aq, en, bUh, KM, ky, bE, mG, vy, dy, k, it, B); #c1(KMT2D) c2(XP_006719679) c3(histone-lysine N-methyltransferase 2D isoform X10) c4(292881) c5( ) c6( ) c7(T, gU, fM, IP, jh, fd, aj, nA, bX, J, ad, hX, x, jz, py, aE, aT, K, jf, A, d, aW, oV, ff, aq, en, bUh, KM, ky, bE, mG, vy, dy, k, it, B); #c1(KMT2D) c2(XP_011537072) c3(histone-lysine N-methyltransferase 2D isoform X2) c4( ) c5(334852, 334853, 334854, 334855, 334856, 334857) c6( ) c7(T, gU, fM, IP, jh, fd, aj, nA, bX, J, ad, hX, x, jz, py, aE, aT, K, jf, A, d, aW, oV, ff, aq, en, bUh, KM, ky, bE, mG, vy, dy, k, it, B); #c1(KMT2D) c2(XP_011537078) c3(histone-lysine N-methyltransferase 2D isoform X9) c4( ) c5(334858, 334859, 334860) c6( ) c7(T, gU, fM, IP, jh, fd, aj, nA, bX, J, ad, hX, x, jz, py, aE, aT, K, jf, A, d, aW, oV, ff, aq, en, bUh, KM, ky, bE, mG, vy, dy, k, it, B); #c1(KMT2E) c2(NP_061152) c3(histone-lysine N-methyltransferase 2E) c4(199561, 199562, 199563, 199564, 199565) c5(199566, 199567, 199568, 199569, 199570, 199571, 199572, 199573, 199574, 199575, 199576, 199577, 199578, 199579, 199580, 199581, 199582, 199583, 199584, 199585, 199586, 199587, 199588, 199589, 199590, 199591, 199592, 199593, 199594, 199595, 199596, 199597, 199598, 199599) c6( ) c7(ck, T, dD, iT, ea, if, eq, bt, fq); #c1(KMT2E) c2(XP_006716112) c3(histone-lysine N-methyltransferase 2E isoform X2) c4(290050, 290051, 290052, 290053, 290054) c5(290055, 290056, 290057, 290058, 290059, 290060, 290061, 290062, 290063, 290064, 290065, 290066, 290067, 290068, 290069, 290070, 290071, 290072, 290073, 290074, 290075, 290076, 290077, 290078, 290079, 290080, 290081, 290082, 290083, 290084, 290085) c6( ) c7(ck, T, dD, iT, ea, if, eq, bt, fq); #c1(KNG1) c2(NP_000884) c3(kininogen-1 isoform 2 precursor) c4(16813, 16814) c5(16815, 16816, 16817, 16818, 16819, 16820, 16821, 16822, 16823, 16824, 16825, 16826) c6( ) c7(bL, bM, T, dD, aoT, Wh, eR, ea, e, bWQ, aw, cz, aj, v, j, eq, C, pM, aY, cd, J, ad, eA, hd, F, cc, vh, Be, cU, dL, K, Fg, eL, af, UO, zQ, bpL, bWS, fO, mQ, eZ, fQ, fe, zC, mo, iV, t, bWR, bz, cm, qa, iK, uP, ua, dB, RJ, at, E, dy, m, hE, gq); #c1(KNG1) c2(NP_001095886) c3(kininogen-1 isoform 1 precursor) c4(40892) c5(40893, 40894, 40895, 40896, 40897, 40898) c6( ) c7(bL, bM, T, dD, aoT, Wh, eR, ea, e, bWQ, aw, cz, aj, v, j, eq, C, pM, aY, cd, J, ad, eA, hd, F, cc, vh, Be, cU, dL, K, Fg, eL, af, UO, zQ, bpL, bWS, fO, mQ, eZ, fQ, fe, zC, mo, iV, t, bWR, bz, cm, qa, iK, uP, ua, dB, RJ, at, E, dy, m, hE, gq); #c1(KNG1) c2(NP_001159923) c3(kininogen-1 isoform 3 precursor) c4(64986) c5(64987, 64988, 64989, 64990, 64991, 64992) c6( ) c7(bL, bM, T, dD, aoT, Wh, eR, ea, e, bWQ, aw, cz, aj, v, j, eq, C, pM, aY, cd, J, ad, eA, hd, F, cc, vh, Be, cU, dL, K, Fg, eL, af, UO, zQ, bpL, bWS, fO, mQ, eZ, fQ, fe, zC, mo, iV, t, bWR, bz, cm, qa, iK, uP, ua, dB, RJ, at, E, dy, m, hE, gq); #c1(KNSTRN) c2(NP_001136233) c3(small kinetochore-associated protein isoform b) c4(54528) c5(54529, 54530, 54531, 54532, 54533, 54534) c6( ) c7(T, bLI, eR, ff, cz, en, adg, aOo); #c1(KNSTRN) c2(NP_001136234) c3(small kinetochore-associated protein isoform c) c4(54535) c5(54536, 54537, 54538, 54539, 54540, 54541) c6( ) c7(T, bLI, eR, ff, cz, en, adg, aOo); #c1(KNSTRN) c2(NP_150628) c3(small kinetochore-associated protein isoform a) c4(228143) c5(228144, 228145, 228146, 228147, 228148, 228149) c6( ) c7(T, bLI, eR, ff, cz, en, adg, aOo); #c1(KNTC1) c2(NP_055523) c3(kinetochore-associated protein 1) c4(181746, 181747) c5(181748, 181749, 181750, 181751, 181752, 181753, 181754) c6( ) c7(h, TH, cF, QC, hj); #c1(KNTC1) c2(XP_011537330) c3(kinetochore-associated protein 1 isoform X3) c4( ) c5(335039, 335040, 335041, 335042, 335043) c6( ) c7(h, TH, cF, QC, hj); #c1(KPNA1) c2(NP_002255) c3(importin subunit alpha-5) c4(126983, 126984, 126985, 126986) c5(126987, 126988, 126989, 126990, 126991, 126992, 126993, 126994, 126995, 126996, 126997, 126998, 126999, 127000, 127001, 127002, 127003, 127004, 127005, 127006, 127007, 127008, 127009, 127010) c6( ) c7(y, ds, rR); #c1(KPNA2) c2(XP_011523085) c3(importin subunit alpha-1 isoform X1) c4(317583, 317584) c5(317585, 317586, 317587, 317588, 317589, 317590, 317591, 317592, 317593, 317594, 317595, 317596, 317597, 317598, 317599, 317600, 317601, 317602, 317603) c6( ) c7(T, fR, aA, n, ci, ad, aT, h, dL, ey, ae, eL, d, aW, Lh, aq, aF, as, iR, t, bz, ov, bP, eM, AH, m, KY, B); #c1(KPNA3) c2(NP_002258) c3(importin subunit alpha-4) c4(127022) c5(127023, 127024, 127025, 127026, 127027, 127028) c6( ) c7(ds, gv); #c1(KPNA4) c2(NP_002259) c3(importin subunit alpha-3) c4(127029) c5(127030, 127031, 127032, 127033, 127034, 127035) c6( ) c7(ds, ka, ki); #c1(KPNA6) c2(XP_011539462) c3(importin subunit alpha-7 isoform X2) c4( ) c5(337656, 337657, 337658, 337659, 337660, 337661, 337662, 337663, 337664, 337665, 337666, 337667, 337668, 337669, 337670, 337671) c6( ) c7(T, aE, cC); #c1(KPNA7) c2(NP_001139187) c3(importin subunit alpha-8) c4( ) c5(58885, 58886, 58887, 58888, 58889) c6( ) c7(T, aE, cC); #c1(KPNA7) c2(XP_011514519) c3(importin subunit alpha-8 isoform X4) c4(307212) c5(307213) c6( ) c7(T, aE, cC); #c1(KPNB1) c2(NP_001263382) c3(importin subunit beta-1 isoform 2) c4( ) c5(97213, 97214, 97215, 97216, 97217, 97218, 97219, 97220, 97221, 97222, 97223, 97224, 97225, 97226) c6( ) c7(h, hP, AH, fR, aT); #c1(KPNB1) c2(NP_002256) c3(importin subunit beta-1 isoform 1) c4(127011, 127012, 127013) c5(127014, 127015, 127016, 127017, 127018, 127019, 127020, 127021) c6( ) c7(h, hP, AH, fR, aT); #c1(KPRP) c2(NP_001020402) c3(keratinocyte proline-rich protein) c4(28717, 28718, 28719) c5(28720, 28721, 28722, 28723, 28724, 28725, 28726, 28727, 28728, 28729, 28730, 28731) c6( ) c7(Xk); #c1(KPTN) c2(NP_001278225) c3(kaptin isoform 2) c4( ) c5(109517, 109518, 109519, 109520, 109521) c6( ) c7(bWT); #c1(KPTN) c2(NP_008990) c3(kaptin isoform 1) c4(170111, 170112) c5(170113, 170114, 170115, 170116, 170117, 170118, 170119) c6( ) c7(bWT); #c1(KPTN) c2(XP_011524703) c3(kaptin isoform X3) c4( ) c5(319192) c6( ) c7(bWT); #c1(KRAS) c2(NP_004976) c3(GTPase KRas isoform b) c4(151556) c5(151557, 151558, 151559, 151560, 151561, 151562) c6( ) c7(atT, T, aC, aEn, bkx, pf, yS, anl, if, al, fd, bB, abD, aub, ci, bWV, aJM, ip, bv, x, aE, il, pX, aeO, Qk, auB, iv, auF, K, hu, MO, eL, cp, YL, LQ, xQ, iE, aW, bWY, Ls, hl, QB, nY, Qq, Qv, Qm, kt, NR, g, hJ, as, ahv, cm, Qt, zV, mK, Fu, qJ, bw, eM, nB, AM, iT, vA, PV, k, m, YK, iu, wu, sw, zX, ht, NT, n, awr, kv, bWU, fr, qN, bao, br, atW, BI, jz, hw, Tf, gd, h, aul, yT, hn, dL, auS, bWX, hB, bXd, aEL, YI, bXa, auM, PX, aJL, bIP, ge, fe, ag, agF, kp, po, YF, zZ, cM, Yr, Zj, op, ar, iO, Qy, bP, dB, Qu, Vy, ayS, Tk, hL, bcd, gw, at, nL, qF, bkE, bD, Te, Qz, it, B, zl, aJJ, dA, eR, jp, WT, jx, aA, bWZ, hy, v, bWW, hz, yO, AO, pd, auG, q, er, eA, eJ, av, hW, nX, BJ, qK, aT, bXb, Tj, atZ, ae, ne, s, vT, NE, oV, Y, ev, Qr, BA, iU, r, aMA, aJI, Io, en, bu, cl, LV, t, apx, iK, OC, ck, ov, nM, kP, Dy, auz, AH, gX, WU, anD, bsT, aws, zu, bt, vi, gV, hl, Mb, id, iW, aEh, atS, bXc, jh, auq, Fb, fu, ad, afb, bkO, qC, Jm, dP, hd, F, ib, Rq, Db, yt, vJ, NS, Yo, io, Ti, vc, hP, wm, YQ, fb, pq, Yj, auY, BN, BO, d, hG, qt, bXe, ff, eZ, Kf, aF, iV, bz, Hp, bF, es, gk, eU, RV, pc, Ew, bE, afd, gZ, gy, Lb, auK, bC, MG, i, X, jr, auy); #c1(KRAS) c2(NP_203524) c3(GTPase KRas isoform a) c4(228402) c5(228403, 228404, 228405, 228406, 228407, 228408) c6( ) c7(atT, T, aC, aEn, bkx, pf, yS, anl, if, al, fd, bB, abD, aub, ci, bWV, aJM, ip, bv, x, aE, il, pX, aeO, Qk, auB, iv, auF, K, hu, MO, eL, cp, YL, LQ, xQ, iE, aW, bWY, Ls, hl, QB, nY, Qq, Qv, Qm, kt, NR, g, hJ, as, ahv, cm, Qt, zV, mK, Fu, qJ, bw, eM, nB, AM, iT, vA, PV, k, m, YK, iu, wu, sw, zX, ht, NT, n, awr, kv, bWU, fr, qN, bao, hr, atW, BI, jz, hw, Tf, gd, h, aul, yT, hn, dL, auS, bWX, hB, bXd, aEL, YI, bXa, auM, PX, aJL, bIP, ge, fe, aq, agF, kp, po, YF, zZ, cM, Yr, Zj, op, ar, iO, Qy, bP, dB, Qu, Vy, ayS, Tk, hL, bed, gw, at, nL, qF, bkE, bD, Te, Qz, it, B, zl, aJJ, dA, eR, jp, WT, jx, aA, bWZ, hy, v, bWW, hz, yO, AO, pd, auG, q, er, eA, eJ, av, hW, nX, BJ, qK, aT, bXb, Tj, atZ, ae, ne, s, vT, NE, oV, Y, ev, Qr, BA, iU, r, aMA, aJI, Io, en, bu, cl, LV, t, apx, iK, OC, ck, ov, nM, kP, Dy, auz, AH, gX, WU, anD, bsT, aws, zu, bt, vi, gV, hl, Mb, id, iW, aEh, atS, bXc, jh, auq, Fb, fu, ad, afb, bkO, qC, Jm, dP, hd, F, ib, Rq, Db, yt, vJ, NS, Yo, io, Ti, vc, hP, wm, YQ, fb, pq, Yj, auY, BN, BO, d, hG, qt, bXe, ff, eZ, Kf, aF, iV, bz, Hp, bF, es, gk, eU, RV, pc, Ew, bE, afd, gZ, gy, Lb, auK, bC, MG, i, X, jr, auy); #c1(KRBOX4) c2(NP_001123370) c3(KRAB domain-containing protein 4 isoform 1) c4(47068, 47069) c5(47070, 47071, 47072, 47073, 47074, 47075, 47076, 47077, 47078, 47079) c6( ) c7(jj); #c1(KRBOX4) c2(NP_001123371) c3(KRAB domain-containing protein 4 isoform 3) c4(47080) c5(47081, 47082, 47083, 47084, 47085, 47086, 47087, 47088, 47089, 47090, 47091, 47092) c6( ) c7(jj); #c1(KRBOX4) c2(NP_060246) c3(KRAB domain-containing protein 4 isoform 2) c4(194991) c5(194992, 194993, 194994, 194995, 194996) c6( ) c7(jj); #c1(KREMEN1) c2(NP_001034659) c3(kremen protein 1 isoform 3 precursor) c4(32004) c5(32005, 32006, 32007, 32008, 32009, 32010) c6( ) c7(i0, fd); #c1(KREMEN1) c2(NP_114434) c3(kremen protein 1 isoform 2 precursor) c4(222767) c5(222768, 222769, 222770, 222771, 222772, 222773) c6( ) c7(i0, fd); #c1(KREMEN1) c2(XP_011528731) c3(kremen protein 1 isoform X1) c4(324038, 324039) c5(324040, 324041, 324042, 324043, 324044, 324045, 324046, 324047, 324048, 324049, 324050, 324051) c6( ) c7(i0, fd); #c1(KRIT1) c2(NP_001013424) c3(krev interaction trapped protein 1 isoform 2) c4(25539, 25540, 25541, 25542) c5(25543, 25544, 25545, 25546, 25547, 25548, 25549, 25550, 25551, 25552, 25553, 25554, 25555, 25556, 25557, 25558, 25559, 25560, 25561, 25562, 25563, 25564, 25565, 25566, 25567, 25568, 25569, 25570, 25571, 25572, 25573, 25574, 25575, 25576, 25577, 25578, 25579, 25580, 25581, 25582, 25583, 25584, 25585, 25586, 25587, 25588, 25589, 25590, 25591, 25592, 25593, 25594, 25595, 25596, 25597, 25598, 25599) c6( ) c7(bM, T, qb, bXg, fd, jh, bXh, bS, v, ct, bXj, ci, pK, fr, Cb, rc, ad, bXi, eA, Jm, ip, Mo, ft, ib, Yc, Ot, IC, aT, io, h, dL, K, hB, ae, eL, cp, d, s, iU, aW, Y, ff, CQ, en, Z, t, cm, op, es, bXk, ac, iA, bXf, vA, m, azr, xh, gT, B); #c1(KRIT1) c2(XP_011514963) c3(krev interaction trapped protein 1 isoform X1) c4(307716, 307717, 307718, 307719, 307720, 307721, 307722, 307723, 307724, 307725, 307726) c5(307727, 307728, 307729, 307730, 307731, 307732, 307733, 307734, 307735, 307736, 307737, 307738, 307739, 307740, 307741, 307742, 307743, 307744, 307745, 307746, 307747, 307748, 307749, 307750, 307751, 307752, 307753, 307754, 307755, 307756, 307757, 307758, 307759, 307760, 307761, 307762, 307763, 307764, 307765, 307766, 307767, 307768, 307769, 307770, 307771, 307772) c6( ) c7(bM, T, qb, bXg, fd, jh, bXh, bS, v, ct, bXj, ci, pK, fr, Cb, rc, ad, bXi, eA, Jm, ip, Mo, ft, ib, Yc, Ot, IC, aT, io, h, dL, K, hB, ae, eL, cp, d, s, iU, aW, Y, ff, CQ, en, Z, t, cm, op, es, bXk, ac, iA, bXf, vA, m, azr, xh, gT, B); #c1(KRT1) c2(NP_006112) c3(keratin, type II cytoskeletal 1) c4(162123) c5(162124, 162125, 162126, 162127, 162128, 162129) c6( ) c7(bnC, bXI, Ig, bik, hk, bAH, bXo, ff, bXp, by, bXm, baP, bvc, K, IQ, ci, en, bXn, bXq, dr, arO); #c1(KRT10) c2(NP_000412) c3(keratin, type I cytoskeletal 10) c4(8661) c5(8662, 8663, 8664, 8665, 8666, 8667) c6( ) c7(bXr, bnC, hk, ff, ht, Pg, ew, bXs, bXm, by, rO, baP, K, IQ, hu, en, Pk, bkE, B, bXt, arO); #c1(KRT12) c2(NP_000214) c3(keratin, type I cytoskeletal 12) c4(4642) c5(4643, 4644, 4645, 4646, 4647, 4648) c6( ) c7(aOu, PK, bXv, Ia, zN, bXu); #c1(KRT13) c2(NP_002265) c3(keratin, type I cytoskeletal 13 isoform b) c4(127097, 127098) c5(127099, 127100, 127101, 127102, 127103, 127104, 127105, 127106, 127107, 127108, 127109, 127110, 127111, 127112) c6( ) c7(aEj, pf, aW, ff, aT, bXw, en, g, it); #c1(KRT13) c2(NP_705694) c3(keratin, type I cytoskeletal 13 isoform a) c4(246268) c5(246269, 246270, 246271, 246272, 246273, 246274) c6( ) c7(aEj, pf, aW, ff, aT, bXw, en, g, it); #c1(KRT14) c2(NP_000517) c3(keratin, type I cytoskeletal 14) c4(10897) c5(10898, 10899, 10900, 10901, 10902, 10903, 10904, 10905) c6(10906, 10907) c7(T, arM, biF, if, ht, jx, it, ci, bXA, gN, XM, ad, hX, bnC, Bl, Ig, aT, K, IQ, asT, arO, bPf, bTH, aW, ff, cr, bXB, me, bXx, bXy, en, g, dr, Ta, kP, eM, bXz, YH, bXC, cn, Tc); #c1(KRT15) c2(NP_002266) c3(keratin, type I cytoskeletal 15) c4(127113, 127114) c5( ) c6( ) c7(T, bPf, Ig, aW, tT, hk, afQ, qK, aT, dL, oH, ci, Dz, bAf, Pr, bXD, acG); #c1(KRT15) c2(XP_005257402) c3(keratin, type I cytoskeletal 15 isoform X1) c4(275075, 275076) c5(275077, 275078, 275079, 275080, 275081, 275082, 275083, 275084, 275085, 275086, 275087, 275088, 275089, 275090, 275091, 275092, 275093, 275094, 275095, 275096, 275097, 275098, 275099, 275100, 275101, 275102, 275103, 275104) c6( ) c7(T, bPf, Ig, aW, tT, hk, afQ, qK, aT, dL, oH, ci, Dz, bAf, Pr, bXD, acG); #c1(KRT16) c2(NP_005548) c3(keratin, type I cytoskeletal 16) c4(157355) c5(157356, 157357, 157358, 157359, 157360, 157361) c6( ) c7(bL, T, bXE, bis, aw, ht, cr, bXF, baP, aj, dL, v, hu, ei, bCv, adg, y, bvc, asS, J, akE); #c1(KRT17) c2(NP_000413) c3(keratin, type I cytoskeletal 17) c4(8668, 8669, 8670, 8671) c5(8672, 8673, 8674, 8675, 8676, 8677, 8678, 8679, 8680, 8681, 8682, 8683, 8684, 8685, 8686, 8687, 8688, 8689, 8690, 8691, 8692, 8693, 8694, 8695) c6( ) c7(Dw, T, by, ZA, jE, aml, ad, hX, aE, Db, afQ, aT, cU, ae, dx, arO, qw, aW, ff, cr, en, g, t, iK, bz, eM, wE, Nl, bvc, m, adg, gT, it); #c1(KRT18) c2(NP_000215) c3(keratin, type I cytoskeletal 18) c4(4649) c5(4650, 4651, 4652, 4653, 4654, 4655, 4656, 4657, 4658, 4659) c6( ) c7(T, gU, aI, aA, v, ci, bh, pz, aY, XM, AO, fU, b, F, ft, aE, jz, aT, rO, Tj, ae, be, eL, bXG, aW, ff, fc, hI, fQ, aq, fe, en, g, t, KM, eM, bE, wR, m, cP, i, hE, B, vi); #c1(KRT19) c2(NP_002267) c3(keratin, type I cytoskeletal 19) c4(127115, 127116) c5(127117, 127118, 127119, 127120, 127121, 127122, 127123, 127124, 127125, 127126, 127127, 127128) c6( ) c7(bM, T, id, jz, aSP, bXJ, yk, if, al, jh, aA, sM, n, ajp, oY, fr, ci, qN, pd, g, ad, hX, av, mj, hd, fX, aE, iu, Db, yt, Iv, nv, pX, afQ, py, gd, aT, K, Dz, ae, be, ave, li, IU, bXH, s, aW, ff, r, ahJ, aq, nY, kp, aF, en, g, cm, cM, bz, Qx, iK, ck, qJ, gk, iO, nM, bXI, eM, nB, hk, wE, it, B, kG, vi); #c1(KRT2) c2(NP_000414) c3(keratin, type II cytoskeletal 2 epidermal) c4(8696) c5(8697, 8698, 8699, 8700, 8701, 8702) c6( ) c7(bnC, bAH, ra); #c1(KRT20) c2(NP_061883) c3(keratin, type I cytoskeletal 20) c4(200932) c5(200933, 200934, 200935, 200936, 200937, 200938, 200939, 200940) c6( ) c7(bM, T, aC, vf, if, fd, bB, ci, NF, x, aE, auB, DY, pk, eL, aW, axu, LZ, g, mK, iT, nB, aep, cj, k, gn, fy, aov, wu, yG, zj, n, aj, qN, aHj, ai, ft, jz, hw, bXL, gd, h, eV, dL, ey, bxg, OV, mR, A, bAF, bub, Og, bXK, yq, xe, alj, Wt, dB, ajd, hL, fL, gc, fM, dA, jx, eX, aA, V, q, J, eJ, zn, XX, Ig, nv, LY, aT, rE, af, aol, sb, s, NE, iU, xR, Y, IC, r, IH, en, cl, pb, OC, IY, ck, rR, iM, kP, Zg, nG, gX, bt, Ze, ao, id, Ke, ob, aD, iW, aEh, bXN, jh, bS, mC, bkO, dP, hd, fX, CJ, qh, oW, wm, amY, fb, aHp, gj, je, ff, Of, eZ, aF, iV, LB, bF, bXM, bE, y, X); #c1(KRT23) c2(NP_056330) c3(keratin, type I cytoskeletal 23 isoform 1) c4(187128) c5(187129, 187130, 187131, 187132, 187133, 187134, 187135, 187136) c6( ) c7(aE, bE, r, bB, uz, at, dL, cP, g, q); #c1(KRT23) c2(XP_005257257) c3(keratin, type I cytoskeletal 23 isoform X1) c4(275008) c5(275009, 275010, 275011, 275012, 275013) c6( ) c7(aE, bE, r, bB, uz, at, dL, cP, g, q); #c1(KRT3) c2(NP_476429) c3(keratin, type II cytoskeletal 3) c4(230562, 230563) c5(230564, 230565, 230566, 230567, 230568, 230569, 230570, 230571, 230572, 230573, 230574, 230575) c6( ) c7(ab, kl, aOu, bXv, bXO); #c1(KRT31) c2(NP_002268) c3(keratin, type I cuticular Ha1) c4(127129) c5(127130, 127131, 127132, 127133, 127134, 127135) c6( ) c7(bL, T, ZH, CN, iT, ds, bXP, h, aNp, Pd, bt, jr); #c1(KRT32) c2(NP_002269) c3(keratin, type I cuticular Ha2) c4(127136) c5(127137, 127138, 127139, 127140, 127141, 127142) c6( ) c7(fr); #c1(KRT34) c2(NP_066293) c3(keratin, type I cuticular Ha4) c4(207114) c5(207115, 207116, 207117, 207118, 207119, 207120, 207121) c6( ) c7(ci); #c1(KRT34) c2(XP_011523095) c3(keratin, type I cuticular Ha4 isoform X1) c4(317604) c5(317605, 317606, 317607, 317608, 317609) c6( ) c7(ci); #c1(KRT35) c2(NP_002271) c3(keratin, type I cuticular Ha5) c4(127143, 127144) c5(127145, 127146, 127147, 127148, 127149, 127150, 127151, 127152, 127153, 127154, 127155, 127156) c6( ) c7(vi); #c1(KRT4) c2(NP_002263) c3(keratin, type II cytoskeletal 4) c4(127053, 127054, 127055) c5(127056, 127057, 127058, 127059, 127060, 127061, 127062, 127063, 127064, 127065, 127066, 127067, 127068, 127069, 127070, 127071, 127072) c6( ) c7(T, it, bXw); #c1(KRT5) c2(NP_000415) c3(keratin, type II cytoskeletal 5) c4(8703, 8704, 8705) c5(8706, 8707, 8708, 8709, 8710, 8711, 8712, 8713, 8714, 8715, 8716, 8717, 8718, 8719, 8720, 8721, 8722, 8723) c6( ) c7(T, arM, bXI, biF, e, aw, by, j, ci, zP, XM, bXq, ib, aew, Ig, afQ, qK, aT, iv, dL, IQ, Tj, zy, eL, eu, zQ, bTH, aW, Y, oV, aEI, iw, cr, ff, aq, arK, bXB, bXQ, bXx, pL, en, bz, g, dr, iK, sS, ac, eM, hk, DW, rF, in, arO, B, Dc); #c1(KRT6A) c2(NP_005545) c3(keratin, type II cytoskeletal 6A) c4(157306, 157307) c5(157308, 157309, 157310, 157311, 157312, 157313, 157314, 157315, 157316, 157317, 157318, 157319) c6( ) c7(aW, bXF, bXR, aT, aA, dL, aF, IQ, bvc, bCv, gT, aue); #c1(KRT6B) c2(NP_005546) c3(keratin, type II cytoskeletal 68) c4(157320, 157321) c5(157322, 157323, 157324, 157325, 157326, 157327, 157328, 157329, 157330, 157331, 157332, 157333) c6( ) c7(eM, bXS, ff, bvc, ci, en); #c1(KRT6C) c2(NP_775109) c3(keratin, type II cytoskeletal 6C) c4(249585, 249586) c5(249587, 249588, 249589, 249590, 249591, 249592, 249593, 249594, 249595, 249596, 249597, 249598) c6( ) c7(bvc, bXT, bCv); #c1(KRT7) c2(NP_005547) c3(keratin, type II cytoskeletal 7) c4(157334, 157335, 157336) c5(157337, 157338, 157339, 157340, 157341, 157342, 157343, 157344, 157345, 157346, 157347, 157348, 157349, 157350, 157351, 157352, 157353, 157354) c6( ) c7(bdo, T, fM, dA, Uc, pf, iW, ht, oA, KY, bXU, bcE, bS, gf, ct, ci, v, fr, zP, hF, rP, aQF, wD, x, PW, RU, hw, yt, Iv, Tf, qh, aql, kH, aT, hn, dL, K, zg, hu, Tj, bXV, eL, bc, iL, zl, Yj, je, s, aW, Y, ff, apK, kp, en, Eg, Z, t, g, bz, pb, Qx, iV, hq, ck, rR, iM, iT, pg, dW, zv, k, adg, y, bt, B); #c1(KRT71) c2(NP_258259) c3(keratin, type II cytoskeletal 71) c4(228683) c5(228684, 228685, 228686, 228687, 228688, 228689) c6( ) c7(zP, alu, zQ, ci, afB); #c1(KRT72) c2(NP_001139698) c3(keratin, type II cytoskeletal 72 isoform 2) c4(59753) c5(59754, 59755, 59756, 59757, 59758, 59759) c6( ) c7(adg); #c1(KRT72) c2(NP_542785) c3(keratin, type II cytoskeletal 72 isoform 1) c4(233082) c5(233083, 233084, 233085, 233086, 233087, 233088, 233089, 233090, 233091, 233092) c6( ) c7(adg); #c1(KRT72) c2(XP_011536245) c3(keratin, type II cytoskeletal 72 isoform X3) c4( ) c5(333587) c6( ) c7(adg); #c1(KRT72) c2(XP_011536246) c3(keratin, type II cytoskeletal 72 isoform X4) c4(333588) c5(333589, 333590, 333591, 333592, 333593) c6( ) c7(adg); #c1(KRT74) c2(XP_011536204) c3(keratin, type II cytoskeletal 74 isoform X1) c4(333498) c5(333499, 333500, 333501, 333502, 333503, 333504) c6( ) c7(bXW, bXY, ac, alu, bXX, e, aw, afB, j, bKO, cd, eu); #c1(KRT75) c2(NP_004684) c3(keratin, type II cytoskeletal 75) c4(148822) c5(148823, 148824, 148825, 148826, 148827, 148828) c6( ) c7(bEY, afB, bXZ); #c1(KRT76) c2(NP_056932) c3(keratin, type II cytoskeletal 2 oral) c4(188143) c5(188144, 188145, 188146, 188147, 188148, 188149, 188150) c6( ) c7(T, Ea, aHZ); #c1(KRT78) c2(NP_001287743) c3(keratin, type II cytoskeletal 78 isoform 2) c4(112760, 112761) c5(112762, 112763, 112764, 112765, 112766, 112767, 112768, 112769, 112770, 112771, 112772, 112773, 112774, 112775, 112776, 112777) c6( ) c7(ad); #c1(KRT78) c2(NP_775487) c3(keratin, type II cytoskeletal 78 isoform 1) c4(250062) c5(250063, 250064, 250065, 250066, 250067, 250068, 250069) c6( ) c7(ad); #c1(KRT8) c2(NP_001243211) c3(keratin, type II cytoskeletal 8 isoform 1) c4(90175, 90176) c5(90177, 90178, 90179, 90180, 90181, 90182, 90183, 90184, 90185, 90186, 90187, 90188, 90189, 90190, 90191, 90192, 90193) c6( ) c7(T, aC, id, fG, Or, aI, aA, bB, fr, ci, bh, asF, iG, AO, ad, hX, av, bkq, b, F, ft, aE, aT, ji, K, aSX, ae, bYa, af, bc, eL, bXG, aW, ff, hI, fQ, aq, fe, aF, en, g, iV, f, cm, bz, KM, LB, ar, gk, bP, eM, bE, hk, zl, aS, i, ra, B, ao); #c1(KRT8) c2(NP_002264) c3(keratin, type II cytoskeletal 8 isoform 2) c4(127073, 127074, 127075) c5(127076, 127077, 127078, 127079, 127080, 127081, 127082, 127083, 127084, 127085, 127086, 127087, 127088, 127089, 127090, 127091, 127092, 127093, 127094, 127095, 127096) c6( ) c7(T, aC, id, fG, Or, aI, aA, bB, fr, ci, bh, asF, iG, AO, ad, hX, av, bkq, b, F, ft, aE, aT, ji, K, aSX, ae, bYa, af, be, eL, bXG, aW, ff, hI, fQ, aq, fe, aF, en, g, iV, f, cm, bz, KM, LB, ar, gk, bP, eM, bE, hk, zl, aS, i, ra, B, ao); #c1(KRT80) c2(NP_001074961) c3(keratin, type II cytoskeletal 80 isoform K80.1) c4(37153) c5(37154, 37155, 37156, 37157, 37158, 37159, 37160) c6( ) c7(bnC, bis, afB, by, bvc, ra, arO); #c1(KRT80) c2(NP_872313) c3(keratin, type II cytoskeletal 80 isoform K80) c4(256101) c5(256102, 256103, 256104, 256105, 256106, 256107) c6( ) c7(bnC, bis, afB, by, bvc, ra, arO); #c1(KRT81) c2(XP_011536636) c3(keratin, type II cuticular Hb1 isoform X1) c4(334115, 334116) c5(334117, 334118, 334119, 334120, 334121, 334122, 334123, 334124, 334125, 334126, 334127, 334128) c6( ) c7(eM, bis, Qu, ff, n, ci, en, g); #c1(KRT82) c2(NP_149022) c3(keratin, type II cuticular Hb2) c4(226784) c5(226785, 226786, 226787, 226788, 226789, 226790) c6( ) c7(ac); #c1(KRT83) c2(NP_002273) c3(keratin, type II cuticular Hb3) c4(127157) c5(127158, 127159, 127160, 127161, 127162, 127163) c6( ) c7(ac, bis); #c1(KRT85) c2(NP_001287739) c3(keratin, type II cuticular Hb5 isoform 2) c4(112746) c5(112747, 112748, 112749, 112750, 112751, 112752) c6( ) c7(bKO, ac); #c1(KRT85) c2(NP_002274) c3(keratin, type II cuticular Hb5 isoform 1) c4(127164) c5(127165, 127166, 127167, 127168, 127169, 127170) c6( ) c7(bKO, ac); #c1(KRT86) c2(XP_005268923) c3(keratin, type II cuticular Hb6 isoform X2) c4(282190, 282191, 282192, 282193) c5(282194, 282195, 282196) c6( ) c7(aOu, bis, afB, iV, bYb, dr); #c1(KRT86) c2(XP_011536640) c3(keratin, type II cuticular Hb6 isoform X1) c4( ) c5(334129, 334130, 334131, 334132, 334133, 334134, 334135, 334136, 334137, 334138, 334139, 334140, 334141, 334142) c6( ) c7(aOu, bis, afB, iV, bYb, dr); #c1(KRT9) c2(NP_000217) c3(keratin, type I cytoskeletal 9) c4(4660) c5(4661, 4662, 4663, 4664, 4665, 4666) c6( ) c7(bnC, ff, buZ, mx, by, bvc, bYd, IQ, m, en, t, bYc, arO); #c1(KRTAP11-1) c2(NP_787054) c3(keratin-associated protein 11-1) c4(252026) c5(252027, 252028, 252029, 252030, 252031, 252032) c6( ) c7(dY); #c1(KRTAP5-1) c2(NP_001005922) c3(keratin-associated protein 5-1) c4(22178) c5(22179) c6( ) c7(bnC); #c1(KRTAP5-9) c2(NP_005544) c3(keratin-associated protein 5-9) c4(157301) c5(157302, 157303, 157304, 157305) c6( ) c7(y, ai); #c1(KSR1) c2(XP_006722214) c3(kinase suppressor of Ras 1 isoform X2) c4(294635, 294636) c5(294637, 294638, 294639, 294640, 294641, 294642, 294643, 294644, 294645, 294646, 294647, 294648) c6( ) c7(ck, T, aC, aE, gT, aW, aT, ci, m, t, aQy); #c1(KSR1) c2(XP_011523731) c3(kinase suppressor of Ras 1 isoform X3) c4(318185, 318186) c5(318187, 318188, 318189, 318190, 318191, 318192, 318193, 318194, 318195, 318196, 318197, 318198) c6( ) c7(ck, T, aC, aE, gT, aW, aT, ci, m, t, aQy); #c1(KSR1) c2(XP_011523732) c3(kinase suppressor of Ras 1 isoform X5) c4(318199) c5(318200, 318201, 318202, 318203, 318204, 318205) c6( ) c7(ck, T, aC, aE, gT, aW, aT, ci, m, t, aQy); #c1(KSR1) c2(XP_011523735) c3(kinase suppressor of Ras 1 isoform X9) c4(318206) c5(318207, 318208, 318209, 318210, 318211) c6( ) c7(ck, T, aC, aE, gT, aW, aT, ci, m, t, aQy); #c1(KSR2) c2(NP_775869) c3(kinase suppressor of Ras 2) c4(250517, 250518) c5(250519, 250520, 250521, 250522, 250523) c6( ) c7(bL, hH, bt, v); #c1(KSR2) c2(XP_011536526) c3(kinase suppressor of Ras 2 isoform X1) c4( ) c5(333892, 333893, 333894, 333895, 333896, 333897, 333898) c6( ) c7(bL, hH, bt, v); #c1(KSR2) c2(XP_011536528) c3(kinase suppressor of Ras 2 isoform X3) c4(333899) c5(333900, 333901, 333902, 333903, 333904, 333905) c6( ) c7(bL, hH, bt, v); #c1(KSR2) c2(XP_011536530) c3(kinase suppressor of Ras 2 isoform X5) c4(333906) c5(333907, 333908, 333909, 333910, 333911, 333912) c6( ) c7(bL, hH, bt, v); #c1(KSR2) c2(XP_011536532) c3(kinase suppressor of Ras 2 isoform X7) c4( ) c5(333913) c6( ) c7(bL, hH, bt, v); #c1(KTN1) c2(NP_001072989) c3(kinectin isoform a) c4(35481, 35482) c5(35483, 35484, 35485, 35486, 35487, 35488, 35489, 35490, 35491, 35492, 35493, 35494, 35495, 35496, 35497, 35498, 35499, 35500) c6( ) c7(dW, km); #c1(KTN1) c2(NP_001072990) c3(kinectin isoform b) c4(35501) c5(35502, 35503, 35504, 35505, 35506, 35507, 35508, 35509, 35510, 35511, 35512, 35513, 35514, 35515) c6( ) c7(dW, km); #c1(KTN1) c2(NP_001257943) c3(kinectin isoform d) c4(95842) c5( ) c6( ) c7(dW, km); #c1(KTN1) c2(NP_004977) c3(kinectin isoform c) c4(151563) c5(151564, 151565, 151566, 151567, 151568, 151569) c6( ) c7(dW, km); #c1(KTN1) c2(XP_006720204) c3(kinectin isoform X6) c4( ) c5(293310, 293311, 293312, 293313, 293314, 293315, 293316, 293317, 293318, 293319, 293320, 293321) c6( ) c7(dW, km); #c1(KYNU) c2(NP_001028170) c3(kynureninase isoform b) c4(30323) c5(30324, 30325, 30326, 30327, 30328, 30329) c6( ) c7(bYe, ey, qa, U, cz); #c1(KYNU) c2(NP_001186170) c3(kynureninase isoform a) c4(77224) c5(77225, 77226, 77227, 77228, 77229, 77230, 77231, 77232, 77233, 77234, 77235, 77236, 77237, 77238, 77239, 77240, 77241, 77242, 77243, 77244, 77245, 77246, 77247, 77248, 77249, 77250, 77251, 77252, 77253, 77254, 77255, 77256, 77257, 77258, 77259, 77260, 77261, 77262, 77263, 77264, 77265, 77266, 77267, 77268, 77269, 77270, 77271, 77272, 77273, 77274, 77275, 77276, 77277, 77278, 77279, 77280, 77281, 77282, 77283, 77284, 77285, 77286, 77287, 77288, 77289, 77290, 77291, 77292, 77293, 77294, 77295, 77296, 77297, 77298, 77299, 77300, 77301, 77302, 77303, 77304, 77305, 77306, 77307, 77308, 77309, 77310, 77311, 77312, 77313, 77314, 77315, 77316, 77317, 77318, 77319, 77320) c6( ) c7(bYe, ey, qa, U, cz); #c1(KYNU) c2(XP_011510407) c3(kynureninase isoform X2) c4( ) c5(300977) c6( ) c7(bYe, ey, qa, U, cz); #c1(L1CAM) c2(NP_000416) c3(neural cell adhesion molecule L1 isoform 1 precursor) c4(8724, 8725, 8726, 8727) c5(8728, 8729, 8730, 8731, 8732, 8733, 8734, 8735, 8736, 8737, 8738, 8739, 8740, 8741, 8742, 8743, 8744, 8745, 8746, 8747, 8748, 8749, 8750, 8751, 8752, 8753, 8754, 8755, 8756) c6( ) c7(bYi, T, ul, AB, Mb, aio, Ay, aA, n, bB, bmf, ct, ci, nA, fr, bYh, MT, q, aR, eA, eJ, dP, ft, no, hd, aV, aE, Eo, aT, adB, bYj, fb, yj, ahE, bYf, af, d, bYg, aW, Y, ff, r, nf, fe, kp, aF, ahl, en, bu, cl, t, g, bz, cm, bJ, hq, ov, es, eM, nB, dB, bE, iA, m, bee, X); #c1(L1CAM) c2(NP_001137435) c3(neural cell adhesion molecule L1 isoform 3 precursor) c4(55697) c5(55698, 55699, 55700, 55701, 55702, 55703, 55704, 55705, 55706, 55707, 55708, 55709, 55710, 55711) c6( ) c7(bYi, T, ul, AB, Mb, aio, Ay, aA, n, bB, bmf, ct, ci, nA, fr, bYh, MT, q, aR, eA, eJ, dP, ft, no, hd, aV, aE, Eo, aT, adB, bYj, fb, yj, ahE, bYf, af, d, bYg, aW, Y, ff, r, nf, fe, kp, aF, ahl, en, bu, cl, t, g, bz, cm, bJ, hq, ov, es, eM, nB, dB, bE, iA, m, bee, X); #c1(L1CAM) c2(NP_076493) c3(neural cell adhesion molecule L1 isoform 2 precursor) c4(214164, 214165, 214166) c5(214167, 214168, 214169, 214170, 214171, 214172, 214173, 214174, 214175, 214176, 214177, 214178, 214179, 214180, 214181, 214182, 214183, 214184, 214185) c6( ) c7(bYi, T, ul, AB, Mb, aio, Ay, aA, n, bB, bmf, ct, ci, nA, fr, bYh, MT, q, aR, eA, eJ, dP, ft, no, hd, aV, aE, Eo, aT, adB, bYj, fb, yj, ahE, bYf, af, d, bYg, aW, Y, ff, r, nf, fe, kp, aF, ahl, en, bu, cl, t, g, bz, cm, bJ, hq, ov, es, eM, nB, dB, bE, iA, m, bee, X); #c1(L2HGDH) c2(XP_005268132) c3(L-2-hydroxyglutarate dehydrogenase, mitochondrial isoform X1) c4(281612, 281613) c5(281614, 281615, 281616, 281617, 281618, 281619, 281620, 281621, 281622, 281623, 281624, 281625, 281626, 281627, 281628, 281629) c6( ) c7(d, dB, ha, nA, bcV, bYk); #c1(L3MBTL1) c2(NP_056293) c3(lethal(3)malignant brain tumor-like protein 1 isoform I) c4(186958, 186959, 186960, 186961, 186962) c5(186963, 186964, 186965, 186966, 186967, 186968, 186969, 186970, 186971, 186972, 186973, 186974, 186975, 186976, 186977, 186978, 186979, 186980, 186981, 186982, 186983, 186984, 186985, 186986, 186987, 186988, 186989, 186990, 186991, 186992, 186993, 186994, 186995, 186996, 186997) c6( ) c7(ck, T, iT, dB, dz, pm, hf, bw, bt); #c1(L3MBTL1) c2(NP_115479) c3(lethal(3)malignant brain tumor-like protein 1 isoform II) c4(222841, 222842, 222843, 222844) c5(222845, 222846, 222847, 222848, 222849, 222850, 222851, 222852, 222853, 222854, 222855, 222856, 222857, 222858, 222859, 222860, 222861, 222862, 222863, 222864, 222865, 222866, 222867) c6( ) c7(ck, T, iT, dB, dz, pm, hf, bw, bt); #c1(L3MBTL2) c2(NP_113676) c3(lethal(3)malignant brain tumor-like protein 2) c4(222056) c5(222057, 222058, 222059, 222060, 222061, 222062) c6( ) c7(dB, bt, jf, pm); #c1(L3MBTL2) c2(XP_011528722) c3(lethal(3)malignant brain tumor-like protein 2 isoform X1) c4(324010) c5(324011, 324012, 324013, 324014, 324015, 324016) c6( ) c7(dB, bt, jf, pm); #c1(L3MBTL3) c2(NP_001007103) c3(lethal(3)malignant brain tumor-like protein 3 isoform b) c4(22491) c5(22492, 22493, 22494, 22495, 22496, 22497, 22498, 22499, 22500, 22501, 22502, 22503, 22504, 22505) c6( ) c7(bL, jf); #c1(L3MBTL3) c2(NP_115814) c3(lethal(3)malignant brain tumor-like protein 3 isoform a) c4(224049, 224050) c5(224051, 224052, 224053, 224054, 224055, 224056, 224057, 224058, 224059, 224060, 224061, 224062, 224063, 224064, 224065, 224066, 224067, 224068, 224069, 224070, 224071) c6( ) c7(bL, jf); #c1(L3MBTL4) c2(NP_775735) c3(lethal(3)malignant brain tumor-like protein 4) c4(250107) c5(250108, 250109, 250110, 250111, 250112, 250113, 250114, 250115, 250116, 250117) c6( ) c7(aC, ac); #c1(L3MBTL4) c2(XP_005258223) c3(lethal(3)malignant brain tumor-like protein 4 isoform X4) c4(275586) c5(275587, 275588, 275589, 275590, 275591, 275592) c6( ) c7(aC, ac); #c1(LACC1) c2(XP_006719829) c3(laccase domain-containing protein 1 isoform X1) c4(293008) c5(293009, 293010, 293011, 293012, 293013, 293014, 293015, 293016, 293017, 293018) c6( ) c7(AW, acC, fe, iV, hH, acD, cd); #c1(LACC1) c2(XP_011533237) c3(laccase domain-containing protein 1 isoform X3) c4(329357) c5(329358, 329359, 329360, 329361, 329362, 329363) c6( ) c7(AW, acC, fe, iV, hH, acD, cd); #c1(LACE1) c2(NP_660358) c3(lactation elevated protein 1) c4(241089) c5(241090, 241091, 241092, 241093, 241094, 241095) c6( ) c7(bK); #c1(LACRT) c2(NP_150593) c3(extracellular glycoprotein lacritin precursor) c4(228117) c5(228118, 228119, 228120, 228121, 228122, 228123) c6( ) c7(bYI, aT); #c1(LACTB) c2(NP_116246) c3(serine beta-lactamase-like protein LACTB, mitochondrial isoform a precursor) c4(225941, 225942) c5(225943, 225944, 225945, 225946, 225947, 225948) c6( ) c7(v, fS); #c1(LACTB) c2(NP_741982) c3(serine beta-lactamase-like protein LACTB, mitochondrial isoform b precursor) c4( ) c5(247517, 247518, 247519, 247520, 247521, 247522) c6( ) c7(v, fS); #c1(LAD1) c2(NP_005549) c3(ladinin-1) c4(157362, 157363) c5(157364, 157365, 157366, 157367, 157368, 157369, 157370, 157371, 157372, 157373, 157374, 157375, 157376, 157377, 157378, 157379) c6(157380, 157381, 157382, 157383) c7(bL, yG, bfM, n, aj, nA, bfO, XM, J, aRG, aRM, dv, A, arl, Cw, oV, awv, arJ, dr, aRH, ck, uz, Km, XN); #c1(LAG3) c2(NP_002277) c3(lymphocyte activation gene 3 protein precursor) c4(127222) c5(127223, 127224, 127225, 127226, 127227, 127228) c6( ) c7(ck, T, A, anR, qt, jx, eX, fd, h, eV, eo, mo, AO, V, asE, auO); #c1(LAIR1) c2(NP_001275955) c3(leukocyte-associated immunoglobulin-like receptor 1 isoform f) c4(107532) c5( ) c6( ) c7(ey, eZ, iT, cj); #c1(LAIR1) c2(NP_002278) c3(leukocyte-associated immunoglobulin-like receptor 1 isoform a precursor) c4(127229) c5(127230, 127231, 127232, 127233, 127234, 127235) c6( ) c7(ey, eZ, iT, cj); #c1(LAIR1) c2(NP_068352) c3(leukocyte-associated immunoglobulin-like receptor 1 isoform b precursor) c4(209318) c5(209319, 209320, 209321, 209322, 209323, 209324) c6( ) c7(ey, eZ, iT, cj); #c1(LAIR1) c2(XP_005258977) c3(leukocyte-associated immunoglobulin-like receptor 1 isoform X7) c4( ) c5(275908, 275909, 275910, 275911, 275912, 275913) c6( ) c7(ey, eZ, iT, cj); #c1(LAIR1) c2(XP_005258981) c3(leukocyte-associated immunoglobulin-like receptor 1 isoform X8) c4( ) c5(275914) c6( ) c7(ey, eZ, iT, cj); #c1(LAIR1) c2(XP_011545830) c3(leukocyte-associated immunoglobulin-like receptor 1 isoform X2) c4( ) c5(344761) c6( ) c7(ey, eZ, iT, cj); #c1(LAIR2) c2(NP_002279) c3(leukocyte-associated immunoglobulin-like receptor 2 isoform a precursor) c4(127236) c5(127237, 127238, 127239, 127240, 127241, 127242, 127243) c6(127244, 127245) c7(mR, bX); #c1(LAIR2) c2(NP_067154) c3(leukocyte-associated immunoglobulin-like receptor 2 isoform b precursor) c4(208971) c5(208972, 208973, 208974, 208975, 208976, 208977, 208978) c6(208979, 208980) c7(mR, bX); #c1(LALBA) c2(XP_011536644) c3(alpha-lactalbumin isoform X2) c4(334143) c5(334144) c6( ) c7(aW, boH, aHE, aT, mo); #c1(LALBA) c2(XP_011536645) c3(alpha-lactalbumin isoform X1) c4( ) c5(334145, 334146, 334147, 334148, 334149) c6( ) c7(aW, boH, aHE, aT, mo); #c1(LAMA1) c2(NP_005550) c3(laminin subunit alpha-1 precursor) c4(157384) c5(157385, 157386, 157387, 157388, 157389, 157390) c6( ) c7(bL, iu, gU, ac, IR, iU, bE, nx, eZ, bB, v, nA, hF, af); #c1(LAMA1) c2(XP_011523957) c3(laminin subunit alpha-1 isoform X1) c4( ) c5(318513, 318514, 318515, 318516, 318517) c6( ) c7(bL, iu, gU, ac, IR, iU, bE, nx, eZ, bB, v, nA, hF, af); #c1(LAMA1) c2(XP_011523958) c3(laminin subunit alpha-1 isoform X2) c4(318518, 318519) c5(318520) c6( ) c7(bL, iu, gU, ac, IR, iU, bE, nx, eZ, bB, v, nA, hF, af); #c1(LAMA1) c2(XP_011523959) c3(laminin subunit alpha-1 isoform X3) c4( ) c5(318521) c6( ) c7(bL, iu, gU, ac, IR, iU, bE, nx, eZ, bB, v, nA, hF, af); #c1(LAMA2) c2(NP_000417) c3(laminin subunit alpha-2 isoform a precursor) c4(8757, 8758, 8759) c5(8760, 8761, 8762, 8763, 8764, 8765, 8766, 8767, 8768, 8769, 8770, 8771, 8772, 8773, 8774, 8775, 8776, 8777) c6( ) c7(cZ, dA, arw, fu, nA, bX, q, AW, aLs, bYm, no, Ae, fm, oj, Ak, bgr, Jn, dd, Wq, vP, VC, Y, xs, lb, r, uY, fq, c, nB, km, Be, iu, lf); #c1(LAMA2) c2(XP_011534122) c3(laminin subunit alpha-2 isoform X2) c4(330356) c5(330357, 330358, 330359, 330360, 330361, 330362) c6( ) c7(cZ, dA, arw, fu, nA, bX, q, AW, aLs, bYm, no, Ae, fm, oj, Ak, bgr, Jn, dd, Wq, vP, VC, Y, xs, lb, r, uY, fq, c, nB, km, Be, iu, lf); #c1(LAMA3) c2(NP_000218) c3(laminin subunit alpha-3 isoform 2 precursor) c4(4667) c5(4668, 4669, 4670, 4671, 4672, 4673) c6( ) c7(D, dt, T, d, s, ac, eR, byn, aw, XJ, aT, aA, aF, Zh, dy, g, bYn, aRE, arL, XN, ad); #c1(LAMA3) c2(NP_001121189) c3(laminin subunit alpha-3 isoform 3 precursor) c4(45733, 45734) c5(45735, 45736, 45737, 45738, 45739, 45740, 45741, 45742, 45743, 45744, 45745, 45746, 45747, 45748, 45749, 45750, 45751) c6( ) c7(D, dt, T, d, s, ac, eR, byn, aw, XJ, aT, aA, aF, Zh, dy, g, bYn, aRE, arL, XN, ad); #c1(LAMA3) c2(NP_001121190) c3(laminin subunit alpha-3 isoform 4 precursor) c4(45752) c5(45753, 45754, 45755, 45756, 45757, 45758) c6( ) c7(D, dt, T, d, s, ac, eR, byn, aw, XJ, aT, aA, aF, Zh, dy, g, bYn, aRE, arL, XN, ad); #c1(LAMA3) c2(NP_937762) c3(laminin subunit alpha-3 isoform 1 precursor) c4(259068) c5(259069, 259070, 259071, 259072, 259073, 259074, 259075) c6( ) c7(D, dt, T, d, s, ac, eR, byn, aw, XJ, aT, aA, aF, Zh, dy, g, bYn, aRE, arL, XN, ad); #c1(LAMA3) c2(XP_011524280) c3(laminin subunit alpha-3 isoform X1) c4(318773) c5( ) c6( ) c7(D, dt, T, d, s, ac, eR, byn, aw, XJ, aT, aA, aF, Zh, dy, g, bYn, aRE, arL, XN, ad); #c1(LAMA4) c2(NP_001098676) c3(laminin subunit alpha-4 isoform 1 precursor) c4(41413, 41414, 41415) c5(41416, 41417, 41418, 41419, 41420, 41421, 41422, 41423, 41424, 41425, 41426, 41427, 41428, 41429, 41430, 41431, 41432, 41433, 41434, 41435, 41436, 41437, 41438, 41439, 41440, 41441, 41442, 41443, 41444, 41445, 41446, 41447, 41448, 41449, 41450, 41451, 41452, 41453, 41454, 41455, 41456) c6(41457, 41458, 41459, 41460) c7(T, dt, dD, s, iU, dB, aw, mx, aT, aA, aF, bYo, ci, eq, g, eA, XN, B, ad); #c1(LAMA4) c2(NP_001098679) c3(laminin subunit alpha-4 isoform 3 precursor) c4(41461) c5(41462, 41463, 41464, 41465, 41466, 41467, 41468, 41469, 41470, 41471, 41472, 41473, 41474, 41475, 41476, 41477, 41478, 41479, 41480, 41481, 41482, 41483, 41484) c6( ) c7(T, dt, dD, s, iU, dB, aw, mx, aT, aA, aF, bYo, ci, eq, g, eA, XN, B, ad); #c1(LAMA4) c2(NP_002281) c3(laminin subunit alpha-4 isoform 2 precursor) c4(127246, 127247, 127248, 127249, 127250) c5(127251, 127252, 127253, 127254, 127255, 127256, 127257, 127258, 127259, 127260, 127261, 127262, 127263, 127264, 127265, 127266, 127267, 127268, 127269, 127270) c6( ) c7(T, dt, dD, s, iU, dB, aw, mx, aT, aA, aF, bYo, ci, eq, g, eA, XN, B, ad); #c1(LAMA4) c2(XP_011534123) c3(laminin subunit alpha-4 isoform X2) c4(330363, 330364, 330365, 330366) c5(330367, 330368, 330369, 330370, 330371, 330372, 330373, 330374, 330375, 330376, 330377, 330378, 330379, 330380, 330381, 330382, 330383, 330384, 330385, 330386, 330387, 330388, 330389, 330390, 330391, 330392, 330393, 330394, 330395, 330396, 330397, 330398, 330399, 330400, 330401, 330402, 330403, 330404, 330405, 330406, 330407, 330408, 330409) c6( ) c7(T, dt, dD, s, iU, dB, aw, mx, aT, aA, aF, bYo, ci, eq, g, eA, XN, B, ad); #c1(LAMA5) c2(NP_005551) c3(laminin subunit alpha-5 precursor) c4(157391) c5(157392, 157393, 157394, 157395, 157396, 157397, 157398, 157399, 157400, 157401, 157402, 157403, 157404, 157405, 157406, 157407, 157408, 157409) c6( ) c7(bM, fR, aW, r, aT, q, eA, XN, pm, aY, BB, B, ad); #c1(LAMA5) c2(XP_006723861) c3(laminin subunit alpha-5 isoform X4) c4( ) c5(295415) c6( ) c7(bM, fR, aW, r, aT, q, eA, XN, pm, aY, BB, B, ad); #c1(LAMA5) c2(XP_011527121) c3(laminin subunit alpha-5 isoform X3) c4(321626, 321627) c5( ) c6( ) c7(bM, fR, aW, r, aT, g, eA, XN, pm, aY, BB, B, ad); #c1(LAMB1) c2(NP_002282) c3(laminin subunit beta-1 precursor) c4(127271, 127272, 127273) c5(127274, 127275, 127276, 127277, 127278, 127279, 127280, 127281, 127282, 127283, 127284, 127285, 127286, 127287, 127288, 127289, 127290, 127291, 127292, 127293, 127294, 127295) c6(127296) c7(dP, kn, T, dB, aW, op, FB, ha, vA, oj, aT, bYp, ci, iV, ad, bN); #c1(LAMB1) c2(XP_011514505) c3(laminin subunit beta-1 isoform X1) c4( ) c5(307210, 307211) c6( ) c7(dP, kn, T, dB, aW, op, FB, ha, vA, oj, aT, bYp, ci, iV, ad, bN); #c1(LAMB2) c2(NP_002283) c3(laminin subunit beta-2 precursor) c4(127297, 127298) c5(127299, 127300, 127301, 127302, 127303, 127304, 127305, 127306, 127307, 127308, 127309, 127310, 127311, 127312, 127313, 127314) c6( ) c7(KI, eR, aA, ah, nA, BB, eA, ad, F, vw, wt, ayT, IR, Y, bYq, An, aF, aSO, xA, KE, vW, dB, va, dy, oQ); #c1(LAMB3) c2(NP_001121113) c3(laminin subunit beta-3 precursor) c4(45183, 45184, 45185) c5(45186, 45187, 45188, 45189, 45190, 45191, 45192, 45193, 45194, 45195, 45196, 45197, 45198, 45199, 45200, 45201, 45202, 45203, 45204, 45205, 45206, 45207, 45208, 45209, 45210, 45211, 45212) c6( ) c7(ck, li, D, T, if, ff, aA, XM, n, it, aF, XO, IQ, en, qN, aRE, arL, Ud, XN, ad); #c1(LAMB4) c2(NP_031382) c3(laminin subunit beta-4 precursor) c4(172107) c5(172108, 172109, 172110, 172111, 172112, 172113, 172114, 172115, 172116, 172117, 172118, 172119, 172120, 172121) c6(172122, 172123) c7(bN); #c1(LAMB4) c2(XP_011514277) c3(laminin subunit beta-4 isoform X2) c4(306859) c5( ) c6( ) c7(bN); #c1(LAMB4) c2(XP_011514280) c3(laminin subunit beta-4 isoform X5) c4(306860) c5(306861, 306862, 306863, 306864, 306865, 306866, 306867, 306868) c6(306869, 306870) c7(bN); #c1(LAMC1) c2(NP_002284) c3(laminin subunit gamma-1 precursor) c4(127315) c5(127316, 127317, 127318, 127319, 127320, 127321) c6( ) c7(KI, eR, RX, aA, ah, IK, BB, ad, il, le, vw, ae, af, d, IR, eZ, An, aF, aSO, zZ, t, bfP, xA, KE, vW, c, dB, dy, B); #c1(LAMC2) c2(NP_005553) c3(laminin subunit gamma-2 isoform a precursor) c4(157417, 157418) c5(157419, 157420, 157421, 157422, 157423, 157424) c6( ) c7(T, uK, Js, I, fd, ci, mF, aR, ip, IE, aXn, Fo, Qk, aU, aXg, K, rB, H, arL, eL, aXp, amN, aiV, aW, Oj, aXh, dg, g, cm, akw, bw, bb, jV, iT, aiM, cj, U, Zn, dW, m, R, act, hh, aWX, XL, aFG, OI, aFc, aXo, n, ct, aWT, eh, eW, ke, Mo, Hx, h, SH, dL, aWY, aDC, pi, alY, cC, nP, Nr, aXf, po, CQ, ajz, fs, RB, bo, JM, aXv, ahC, pg, aEG, bk, eo, XN, it, B, Jo, abW, L, qc, ek, ul, dA, Nt, XJ, ti, afK, aA, cz, aWU, C, j, aRE, V, q, eA, eJ, cF, aaF, Cc, WY, hb, aql, aT, rO, an, rz, af, Ir, jf, ak, oV, Y, aM, WQ, Pg, RF, aaE, en, cl, wA, t, xw, UZ, aXi, rY, dS, Cv, ck, Qi, bN, tj, aXm, c, auo, aXe, ac, agc, mG, AH, Uq, HK, ig, yW, JH, fD, ij, bt, Ze, gV, hl, qX, jh, bS, fu, aNH, XM, vN, ad, iC, sO, akJ, abg, oW, IQ, cb, rL, iM, cs, d, IR, hG, qZ, je, ff, aGS, eZ, dq, aF, xH, Fq, Z, aXs, bz, Nq, bF, D, Bv, agM, aHL, bE, aXq, y, aXu, kS, GW, Ex); #c1(LAMC2) c2(NP_061486) c3(laminin subunit gamma-2 isoform b precursor) c4(200350) c5(200351, 200352, 200353, 200354, 200355, 200356, 200357, 200358, 200359, 200360, 200361, 200362) c6( ) c7(T, uK, Js, I, fd, ci, mF, aR, ip, IE, aXn, Fo, Qk, aU, aXg, K, rB, H, arL, eL, aXp, amN, aiV, aW, Oj, aXh, dg, g, cm, akw, bw, bb, jV, iT, aiM, cj, U, Zn, dW, m, R, act, hh, aWX, XL, aFG, OI, aFc, aXo, n, ct, aWT, eh, eW, ke, Mo, Hx, h, SH, dL, aWY, aDC, pi, alY, cC, nP, Nr, aXf, po, CQ, ajz, fs, RB, bo, JM, aXv, ahC, pg, aEG, bk, eo, XN, it, B, Jo, abW, L, qc, ek, ul, dA, Nt, XJ, ti, afK, aA, cz, aWU, C, j, aRE, V, q, eA, eJ, cF, aaF, Cc, WY, hb, aql, aT, rO, an, rz, af, Ir, jf, ak, oV, Y, aM, WQ, Pg, RF, aaE, en, cl, wA, t, xw, UZ, aXi, rY, dS, Cv, ck, Qi, bN, tj, aXm, c, auo, aXe, ac, agc, mG, AH, Uq, HK, ig, yW, JH, fD, ij, bt, Ze, gV, hl, gX, jh, bS, fu, aNH, XM, vN, ad, iC, sO, akJ, abg, oW, IQ, cb, rL, iM, cs, d, IR, hG, qZ, je, ff, aGS, eZ, dg, aF, xH, Fq, Z, aXs, bz, Nq, bF, D, Bv, aqM, aHL, bE, aXq, y, aXu, kS, CW, Ex); #c1(LAMC3) c2(NP_006050) c3(laminin subunit gamma-3 precursor) c4(161455) c5(161456, 161457, 161458, 161459, 161460, 161461, 161462, 161463, 161464, 161465, 161466, 161467) c6( ) c7(bYr, hb, cd, VX); #c1(LAMC3) c2(XP_011516423) c3(laminin subunit gamma-3 isoform X1) c4(309649) c5( ) c6( ) c7(bYr, hb, cd, VX); #c1(LAMP1) c2(NP_005552) c3(lysosome-associated membrane glycoprotein 1 precursor) c4(157410) c5(157411, 157412, 157413, 157414, 157415, 157416) c6( ) c7(T, jh, C, pz, q, eW, aJO, ds, dv, h, an, bc, ak, Y, r, as, t, ck, vU, W, eM, cj, wR, Lq, m); #c1(LAMP1) c2(XP_011535797) c3(lysosome-associated membrane glycoprotein 1 isoform X2) c4(333013) c5(333014, 333015, 333016, 333017, 333018, 333019) c6( ) c7(T, jh, C, pz, q, eW, aJO, ds, dv, h, an, bc, ak, Y, r, as, t, ck, vU, W, eM, cj, wR, Lq, m); #c1(LAMP2) c2(NP_001116078) c3(lysosome-associated membrane glycoprotein 2 isoform C precursor) c4(43383, 43384) c5(43385, 43386, 43387, 43388, 43389, 43390, 43391, 43392, 43393, 43394, 43395, 43396) c6( ) c7(T, iG, aKs, nA, q, cc, adl, dv, oj, aT, aiW, vc, aWs, mL, ak, IR, aW, Bw, r, ar, bnP, mx, oh, adh, cB, hv); #c1(LAMP2) c2(NP_002285) c3(lysosome-associated membrane glycoprotein 2 isoform A precursor) c4(127322) c5(127323, 127324, 127325, 127326, 127327, 127328) c6( ) c7(T, iG, aKs, nA, q, cc, adl, dv, oj, aT, aiW, vc, aWs, mL, ak, IR, aW, Bw, r, ar, bnP, mx, oh, adh, cB, hv); #c1(LAMP2) c2(NP_054701) c3(lysosome-associated membrane glycoprotein 2 isoform B precursor) c4(177293, 177294) c5(177295, 177296, 177297, 177298, 177299, 177300, 177301, 177302, 177303, 177304, 177305, 177306) c6( ) c7(T, iG, aKs, nA, q, cc, adl, dv, oj, aT, aiW, vc, aWs, mL, ak, IR, aW, Bw, r, ar, bnP, mx, oh, adh, cB, hv); #c1(LAMP3) c2(NP_055213) c3(lysosome-associated membrane glycoprotein 3 precursor) c4(179868, 179869) c5(179870, 179871, 179872, 179873, 179874, 179875) c6( ) c7(T, if, aA, n, qN, ds, aT, cU, h, bK, K, ey, an, XZ, s, aW, Y, apn, r, Ni, lo, aF, g, awi, alm, aDX, ig, awx, AH, y, iu); #c1(LAMP3) c2(XP_011510990) c3(lysosome-associated membrane glycoprotein 3 isoform X3) c4( ) c5(301452, 301453, 301454, 301455, 301456, 301457) c6( ) c7(T, if, aA, n, qN, ds, aT, cU, h, bK, K, ey, an, XZ, s, aW, Y, apn, r, Ni, lo, aF, g, awi, alm, aDX, ig, awx, AH, y, iu); #c1(LAMTOR1) c2(NP_060377) c3(ragulator complex protein LAMTOR1) c4(195695) c5(195696, 195697, 195698, 195699, 195700, 195701) c6( ) c7(ck, T, eG, eM, Y, iS, fd, bw, v, K, hF, vt, B, ip); #c1(LAMTOR2) c2(NP_001138736) c3(ragulator complex protein LAMTOR2 isoform 2) c4(57495) c5(57496, 57497, 57498, 57499, 57500, 57501) c6( ) c7(sc, T, aEj, jh, n, fr, ci, q, ad, ft, aT, dL, K, jf, aW, Y, r, aF, g, bYs, cj, EY, zA, B); #c1(LAMTOR2) c2(NP_054736) c3(ragulator complex protein LAMTOR2 isoform 1) c4(177479, 177480) c5(177481, 177482, 177483, 177484, 177485, 177486, 177487, 177488, 177489, 177490, 177491, 177492) c6( ) c7(sc, T, aEj, jh, n, fr, ci, q, ad, ft, aT, dL, K, jf, aW, Y, r, aF, g, bYs, cj, EY, zA, B); #c1(LAMTOR3) c2(NP_068805) c3(ragulator complex protein LAMTOR3 isoform 1) c4(210643) c5(210644, 210645, 210646, 210647, 210648, 210649) c6( ) c7(aW, aE, aT); #c1(LANCL1) c2(NP_001130047) c3(lanC-like protein 1) c4(52486) c5(52487, 52488, 52489, 52490, 52491, 52492, 52493, 52494, 52495, 52496, 52497, 52498, 52499, 52500, 52501, 52502, 52503, 52504, 52505, 52506, 52507, 52508) c6( ) c7(bM, A, Jr, z, Y, eE, afS, dV, r, cU, Hn, h, cr, eo, eZ, fe, afT, y, V, q); #c1(LANCL1) c2(XP_005246300) c3(lanC-like protein 1 isoform X1) c4(267029) c5(267030, 267031, 267032, 267033, 267034, 267035) c6( ) c7(bM, A, Jr, z, Y, eE, afS, dV, r, cU, Hn, h, cr, eo, eZ, fe, afT, y, V, q); #c1(LANCL2) c2(NP_061167) c3(lanC-like protein 2) c4(199700) c5(199701, 199702, 199703, 199704, 199705, 199706) c6( ) c7(mj, ds, d, fe); #c1(LAP3) c2(NP_056991) c3(cytosol aminopeptidase) c4(188362) c5(188363, 188364, 188365, 188366, 188367, 188368) c6( ) c7(ck, pc, dA, cj, aT, ji, cm, bt); #c1(LAPTM4B) c2(NP_060877) c3(lysosomal-associated transmembrane protein 48) c4(198260, 198261, 198262) c5(198263, 198264, 198265, 198266, 198267, 198268, 198269, 198270, 198271, 198272, 198273, 198274, 198275, 198276, 198277, 198278, 198279, 198280) c6( ) c7(T, if, ht, aA, bB, n, ci, qN, hX, jz, NS, aT, io, K, hu, B, aW, aq, aF, bz, bE, it, X); #c1(LARGE) c2(XP_005261889) c3(glycosyltransferase-like protein LARGE1 isoform X1) c4(277653, 277654, 277655, 277656, 277657) c5(277658, 277659, 277660, 277661, 277662, 277663, 277664, 277665, 277666, 277667, 277668, 277669, 277670, 277671, 277672, 277673, 277674, 277675, 277676, 277677, 277678, 277679, 277680, 277681, 277682, 277683) c6( ) c7(oe, xs, aw, km, aT, cd, aq, ci, bYu, bxu, xa, bYt, dR); #c1(LARGE) c2(XP_011528813) c3(glycosyltransferase-like protein LARGE1 isoform X2) c4(324169, 324170, 324171) c5( ) c6( ) c7(oe, xs, aw, km, aT, cd, aq, ci, bYu, bxu, xa, bYt, dR); #c1(LARGE) c2(XP_011528814) c3(glycosyltransferase-like protein LARGE1 isoform X3) c4(324172) c5(324173, 324174, 324175, 324176, 324177, 324178) c6( ) c7(oe, xs, aw, km, aT, cd, aq, ci, bYu, bxu, xa, bYt, dR); #c1(LARGE) c2(XP_011528816) c3(glycosyltransferase-like protein LARGE1 isoform X5) c4( ) c5(324179, 324180, 324181, 324182, 324183, 324184, 324185, 324186, 324187, 324188, 324189, 324190, 324191, 324192, 324193, 324194, 324195, 324196, 324197, 324198, 324199, 324200, 324201, 324202, 324203, 324204, 324205, 324206, 324207, 324208) c6( ) c7(oe, xs, aw, km, aT, cd, aq, ci, bYu, bxu, xa, bYt, dR); #c1(LARP1) c2(NP_056130) c3(la-related protein 1) c4(185815) c5(185816, 185817, 185818, 185819, 185820, 185821, 185822, 185823, 185824, 185825, 185826, 185827) c6( ) c7(T); #c1(LARP1) c2(XP_005268461) c3(la-related protein 1 isoform X1) c4(281835) c5(281836, 281837, 281838, 281839, 281840, 281841) c6( ) c7(T); #c1(LARP1) c2(XP_006714838) c3(la-related protein 1 isoform X7) c4( ) c5(288256) c6( ) c7(T); #c1(LARP1) c2(XP_011535918) c3(la-related protein 1 isoform X5) c4(333177) c5( ) c6( ) c7(T); #c1(LARP1) c2(XP_011535920) c3(la-related protein 1 isoform X8) c4(333178) c5(333179, 333180, 333181, 333182, 333183) c6( ) c7(T); #c1(LARP4) c2(NP_001164274) c3(la-related protein 4 isoform d) c4( ) c5(66894) c6( ) c7(kl); #c1(LARP4) c2(NP_001164275) c3(la-related protein 4 isoform e) c4( ) c5(66895, 66896, 66897, 66898, 66899, 66900, 66901, 66902, 66903, 66904, 66905, 66906) c6( ) c7(kl); #c1(LARP4) c2(NP_001164279) c3(la-related protein 4 isoform f) c4(66914) c5(66915, 66916, 66917, 66918, 66919, 66920) c6( ) c7(kl); #c1(LARP4) c2(NP_443111) c3(la-related protein 4 isoform a) c4(229460, 229461, 229462) c5(229463, 229464, 229465, 229466, 229467, 229468) c6( ) c7(kl); #c1(LARP4) c2(NP_954658) c3(la-related protein 4 isoform b) c4(261183) c5(261184, 261185, 261186, 261187, 261188, 261189) c6( ) c7(kl); #c1(LARP4) c2(NP_954660) c3(la-related protein 4 isoform c) c4(261190) c5(261191, 261192, 261193, 261194, 261195, 261196) c6( ) c7(kl); #c1(LARP4) c2(XP_011536132) c3(la-related protein 4 isoform X3) c4(333441) c5(333442, 333443, 333444, 333445, 333446, 333447) c6( ) c7(kl); #c1(LARP4) c2(XP_011536144) c3(la-related protein 4 isoform X10) c4(333448) c5( ) c6( ) c7(kl); #c1(LARP4) c2(XP_011536147) c3(la-related protein 4 isoform X13) c4( ) c5(333449, 333450, 333451, 333452, 333453) c6( ) c7(kl); #c1(LARP6) c2(NP_060827) c3(la-related protein 6 isoform 1) c4(198020) c5(198021, 198022, 198023, 198024, 198025, 198026) c6( ) c7(bL, es, py, iA, aW, Y, oV, aT, dL, v, fr, eL, eA); #c1(LARP6) c2(NP_932062) c3(la-related protein 6 isoform 2) c4(258733, 258734) c5(258735, 258736, 258737, 258738, 258739, 258740, 258741, 258742, 258743, 258744, 258745, 258746) c6( ) c7(bL, es, py, iA, aW, Y, oV, aT, dL, v, fr, eL, eA); #c1(LARP7) c2(NP_001253968) c3(la-related protein 7 isoform 2) c4(94296, 94297) c5(94298, 94299, 94300, 94301, 94302, 94303, 94304, 94305, 94306, 94307, 94308, 94309, 94310, 94311, 94312, 94313, 94314, 94315) c6( ) c7(bYv, aF, avx, nA, aA); #c1(LARP7) c2(NP_057732) c3(la-related protein 7 isoform 1) c4(192560, 192561, 192562) c5(192563, 192564, 192565, 192566, 192567, 192568, 192569, 192570, 192571, 192572, 192573, 192574, 192575, 192576, 192577, 192578) c6( ) c7(bYv, aF, avx, nA, aA); #c1(LARS) c2(NP_064502) c3(leucine-tRNA ligase, cytoplasmic) c4(202647, 202648, 202649) c5(202650, 202651, 202652, 202653, 202654, 202655, 202656) c6( ) c7(bL, av, ac, SE, hl, bYw, Ex, aj, bK, K, px, J, aQe); #c1(LARS) c2(XP_011535959) c3(leucine tRNA ligase, cytoplasmic isoform X3) c4( ) c5(333234, 333235, 333236, 333237, 333238, 333239, 333240) c6( ) c7(bL, av, ac, SE, hl, bYw, Ex, aj, bK, K, px, J, aQe); #c1(LARS2) c2(NP_056155) c3(probable leucine-tRNA ligase, mitochondrial) c4(186003, 186004, 186005) c5(186006, 186007, 186008, 186009, 186010, 186011, 186012, 186013, 186014, 186015, 186016, 186017, 186018, 186019, 186020, 186021) c6( ) c7(bL, ac, bYx, SE, Ex, aj, bK, px, J, aQe); #c1(LARS2) c2(XP_011531856) c3(probable leucine-tRNA ligase, mitochondrial isoform X2) c4( ) c5(327918, 327919, 327920, 327921327922, 327923) c6( ) c7(bL, ac, bYx, SE, Ex, aj, bK, px, J, aQe); #c1(LAS1L) c2(NP_001164120) c3(ribosomal biogenesis protein LAS1L isoform 2) c4(66636) c5(66637, 66638, 66639, 66640, 66641, 66642) c6( ) c7(bej); #c1(LAS1L) c2(NP_001164121) c3(ribosomal biogenesis protein LAS1L isoform 3) c4(66643) c5(66644, 66645, 66646, 66647, 66648, 66649) c6( ) c7(bej); #c1(LAS1L) c2(NP_112483) c3(ribosomal biogenesis protein LAS1L isoform 1) c4(221136) c5(221137, 221138, 221139, 221140, 221141221142, 221143) c6( ) c7(bej); #c1(LAS1L) c2(XP_005262358) c3(ribosomal biogenesis protein LAS1L isoform X1) c4(277854) c5( ) c6( ) c7(bej); #c1(LAS1L) c2(XP_005262361) c3(ribosomal biogenesis protein LAS1L isoform X3) c4( ) c5(277855) c6( ) c7(bej); #c1(LAS1L) c2(XP_005262363) c3(ribosomal biogenesis protein LAS1L isoform X6) c4( ) c5(277856, 277857, 277858, 277859, 277860) c6( ) c7(bej); #c1(LASP1) c2(NP_001258537) c3(LIM and SH3 domain protein 1 isoform b) c4(96119) c5(96120, 96121, 96122, 96123, 96124, 96125) c6( ) c7(T, id, ci, q, ad, hX, aT, dL, K, Dz, eL, ae, jf, aW, r, eS, t, bN, kP, iT, cX, m, it, B); #c1(LASP1) c2(NP_006139) c3(LIM and SH3 domain protein 1 isoform a) c4(162329, 162330, 162331) c5(162332, 162333, 162334, 162335, 162336, 162337, 162338, 162339, 162340, 162341, 162342, 162343, 162344, 162345, 162346, 162347, 162348, 162349, 162350, 162351, 162352, 162353) c6( ) c7(T, id, ci, q, ad, hX, aT, dL, K, Dz, eL, ae, jf, aW, r, eS, t, bN, kP, iT, cX, m, it, B); #c1(LAT) c2(NP_001014987) c3(linkerfor activation of T-cells family member 1 isoform b) c4( ) c5(26107, 26108, 26109, 26110, 26111) c6( ) c7(bM, T, id, acU, fr, PJ, eA, ad, eW, jz, py, aaU, h, aXd, ae, beo, d, Y, ff, hl, eZ, en, iK, dr, iq, eM, z, go, iu); #c1(LAT) c2(NP_001014988) c3(linker for activation of T-cells family member 1 isoform c) c4(26112) c5(26113, 26114, 26115, 26116, 26117) c6( ) c7(bM, 1 id, acU, fr, PJ, eA, ad, eW, jz, py, aaU, h, aXd, ae, beo, d, Y, ff, hl, eZ, en, iK, dr, iq, eM, z, go, iu); #c1(LAT) c2(NP_001014989) c3(linker for activation of T-cells family member 1 isoform d) c4(26118, 26119) c5(26120, 26121, 26122, 26123, 26124, 26125, 26126, 26127) c6( ) c7(bM, T, id, acU, fr, PJ, eA, ad, eW, jz, py, aaU, h, aXd, ae, beo, d, Y, ff, hl, eZ, en, iK, dr, iq, eM, z, go, iu); #c1(LAT) c2(NP_055202) c3(linker for activation of T-cells family member 1 isoform a) c4(179760, 179761) c5(179762, 179763, 179764, 179765, 179766, 179767, 179768, 179769, 179770, 179771, 179772, 179773) c6( ) c7(bM, T, id, acU, fr, PJ, eA, ad, eW, jz, py, aaU, h, aXd, ae, beo, d, Y, ff, hl, eZ, en, iK, dr, iq, eM, z, go, iu); #c1(LAT2) c2(NP_115852) c3(linker for activation of T-cells family member 2 precursor) c4(224266, 224267, 224268, 224269) c5(224270, 224271, 224272, 224273, 224274, 224275, 224276, 224277, 224278, 224279, 224280, 224281, 224282, 224283, 224284, 224285, 224286, 224287, 224288, 224289, 224290, 224291, 224292, 224293, 224294, 224295, 224296, 224297, 224298, 224299, 224300, 224301, 224302, 224303, 224304, 224305, 224306, 224307, 224308, 224309, 224310, 224311, 224312, 224313, 224314) c6( ) c7(T, py, iT, aiL, ey, bt, B, hq); #c1(LATS1) c2(NP_001257448) c3(serine/threonine-protein kinase LATS1 isoform 2) c4(95421) c5(95422, 95423, 95424, 95425, 95426, 95427) c6( ) c7(T, eM, aW, aT, K, m, as, ex, t, ahv, aLI); #c1(LATS1) c2(XP_011534552) c3(serine/threonine-protein kinase LATS1 isoform X1) c4(331092) c5(331093, 331094, 331095, 331096, 331097, 331098, 331099, 331100, 331101, 331102) c6( ) c7(T, eM, aW, aT, K, m, as, ex, t, ahv, aLI); #c1(LATS2) c2(XP_005266399) c3(serine/threonine-protein kinase LATS2 isoform X1) c4(279980) c5(279981, 279982, 279983, 279984, 279985, 279986, 279987, 279988, 279989, 279990) c6( ) c7(ck, ae, T, av, eM, ht, r, cj, aT, it, K, as, hu, bz, q, ad, hS); #c1(LAX1) c2(NP_001129662) c3(lymphocyte transmembrane adapter 1 isoform b) c4(52108) c5(52109, 52110, 5211152112, 52113, 52114) c6( ) c7(cz); #c1(LAX1) c2(NP_060243) c3(lymphocyte transmembrane adapter 1 isoform a) c4(194953) c5(194954, 194955, 194956, 194957, 194958, 194959) c6( ) c7(cz); #c1(LAYN) c2(NP_001245319) c3(layilin isoform 1 precursor) c4(93109) c5(93110, 93111, 93112, 93113, 93114, 93115) c6( ) c7(g); #c1(LAYN) c2(NP_001245320) c3(layilin isoform 3) c4(93116) c5(93117, 93118, 93119, 93120, 93121, 93122) c6( ) c7(g); #c1(LAYN) c2(NP_849156) c3(layilin isoform 2 precursor) c4(254300, 254301, 254302) c5(254303, 254304, 254305, 254306, 254307, 254308, 254309, 254310, 254311, 254312, 254313, 254314, 254315, 254316, 254317, 254318, 254319) c6( ) c7(g); #c1(LBH) c2(NP_112177) c3(protein LBH) c4(220632) c5(220633, 220634, 220635, 220636, 220637, 220638) c6( ) c7(gZ, bM); #c1(LBP) c2(NP_004130) c3(lipopolysaccharide-binding protein precursor) c4(143819, 143820) c5(143821, 143822, 143823, 143824, 143825, 143826, 143827, 143828, 143829, 143830, 143831, 143832) c6( ) c7(gV, DM, Ik, fR, aw, al, jx, fF, v, ci, C, jL, h, nm, aFi, ji, jo, ZN, dF, af, wC, B, fQ, brW, aq, aFr, aFd, aNn, bE, uz, Zn, cP, aDE, pK, ei, X, ao); #c1(LBR) c2(XP_005273182) c3(lamin-B receptor isoform X3) c4( ) c5(284327, 284328, 284329, 284330, 284331, 284332) c6( ) c7(bM, T, dA, fN, ew, bB, jh, EA, Jx, V, zn, btD, aE, kH, aT, h, K, bYy, ex, jj, hH, A, nO, aW, Y, bYA, CT, eZ, ks, lo, CQ, g, kk, eE, bYz, aoO, Wt, ck, asE, ou, dB, bE, bjx, cj, bC, bt, iu); #c1(LBR) c2(XP_011542487) c3(lamin-B receptor isoform X1) c4(340980, 340981, 340982) c5(340983, 340984, 340985, 340986, 340987, 340988, 340989, 340990, 340991, 340992) c6( ) c7(bM, T, dA, fN, ew, bB, jh, EA, Jx, V, zn, btD, aE, kH, aT, h, K, bYy, ox, jj, hH, A, nO, aW, Y, bYA, CT, eZ, ks, lo, CQ, g, kk, eE, bYz, aoO, Wt, ck, asE, ou, dB, bE, bjx, cj, bC, bt, iu); #c1(LBR) c2(XP_011542488) c3(lamin-B receptor isoform X2) c4(340993) c5(340994, 340995, 340996, 340997, 340998, 340999) c6( ) c7(bM, T, dA, fN, ew, bB, jh, EA, Jx, V, zn, btD, aE, kH, aT, h, K, bYy, ox, jj, hH, A, nO, aW, Y, bYA, CT, eZ, ks, lo, CQ, g, kk, eE, bYz, aoO, Wt, ck, asE, ou, dB, bE, bjx, cj, bC, bt, iu); #c1(LBR) c2(XP_011542489) c3(lamin-B receptor isoform X4) c4(341000) c5(341001, 341002, 341003, 341004, 341005, 341006, 341007, 341008, 341009, 341010, 341011, 341012) c6( ) c7(bM, T, dA, fN, ew, bB, jh, EA, Jx, V, zn, btD, aE, kH, aT, h, K, bYy, ox, jj, hH, A, nO, aW, Y, bYA, CT, eZ, ks, lo, CQ, g, kk, eE, bYz, aoO, Wt, ck, asE, ou, dB, bE, bjx, cj, bC, bt, iu); #c1(LBX1) c2(XP_005269500) c3(transcription factor LBX1 isoform X1) c4(282597) c5(282598, 282599, 282600, 282601, 282602, 282603, 282604) c6( ) c7(T, if, bB, ci, aR, x, Na, aE, arA, asY, rJ, pX, bki, K, pr, aW, lh, bYC, g, cm, ou, iT, bpY, cj, k, m, gU, FG, aj, TZ, nA, qN, axC, jz, aOu, RN, acA, eV, hn, yi, avP, kj, CN, kp, bSZ, kn, kT, YE, Vy, eD, hR, rx, it, B, qc, bL, eX, fZ, aA, v, q, J, boJ, bKE, er, anA, aT, bK, anz, kU, ae, af, bDf, s, vT, NE, iU, ev, yL, Lf, r, gm, en, hf, bu, t, xw, cl, bN, amF, ck, iM, c, agw, bt, jh, hF, ad, dP, hd, vJ, ab, nJ, yr, je, qt, ff, nf, gl, aeV, aF, si, bz, dr, bE, bYB, oQ, VK, X); #c1(LBX2) c2(NP_001009812) c3(transcription factor LBX2 isoform 2) c4(23694) c5(23695, 23696, 23697, 23698, 23699, 23700) c6( ) c7(Tq); #c1(LBX2) c2(NP_001269359) c3(transcription factor LBX2 isoform 1) c4(101275) c5(101276, 101277, 101278, 101279, 101280, 101281) c6( ) c7(Tq); #c1(LCA5) c2(NP_001116241) c3(Lebercilin) c4(43700) c5(43701, 43702, 43703, 43704, 43705, 43706, 43707, 43708, 43709, 43710) c6( ) c7(alF, nx, bYD, nw, nk, nC, qc); #c1(LCAT) c2(NP_000220) c3(phosphatidylcholine-sterol acyltransferase precursor) c4(4674, 4675, 4676) c5(4677, 4678, 4679, 4680, 4681, 4682, 4683, 4684, 4685, 4686, 4687, 4688, 4689, 4690, 4691, 4692, 4693, 4694, 4695, 4696, 4697, 4698, 4699, 4700, 4701, 4702, 4703, 4704, 4705, 4706, 4707, 4708, 4709, 4710, 4711, 4712, 4713, 4714, 4715, 4716, 4717, 4718, 4719, 4720, 4721, 4722, 4723, 4724, 4725, 4726, 4727, 4728, 4729, 4730, 4731, 4732, 4733, 4734, 4735, 4736, 4737, 4738, 4739, 4740, 4741, 4742, 4743, 4744, 4745, 4746, 4747, 4748, 4749, 4750, 4751, 4752, 4753, 4754, 4755, 4756, 4757, 4758, 4759, 4760, 4761, 4762, 4763, 4764, 4765, 4766, 4767, 4768, 4769, 4770) c6(4771) c7(bL, dD, ef, eR, ea, e, aw, vG, v, j, eq, aY, Zu, nX, dL, dQ, af, hl, Zt, cJ, dr, eK, bYE, mO, dC, cO, at, dy); #c1(LCE1C) c2(NP_001263260) c3(late cornified envelope protein 1C isoform 2) c4( ) c5(97109) c6( ) c7(v, wD, cz); #c1(LCE1C) c2(NP_848128) c3(late cornified envelope protein 1C isoform 1) c4(253745) c5( ) c6( ) c7(v, wD, cz); #c1(LCE3A) c2(NP_848518) c3(late cornified envelope protein 3A) c4(253759) c5( ) c6( ) c7(eE, cr); #c1(LCE3B) c2(NP_848520) c3(late cornified envelope protein 3B) c4(253767) c5( ) c6( ) c7(wD, fJ, cr, eZ, eE, y, bIT); #c1(LCE3C) c2(NP_848521) c3(late cornified envelope protein 3C) c4(253768) c5(253769, 253770, 253771, 253772, 253773, 253774) c6( ) c7(pH, wD, fJ, cr, eZ, eE, y, bIT); #c1(LCE3D) c2(NP_115952) c3(late cornified envelope protein 3D) c4(224902) c5( ) c6( ) c7(cr, Jr); #c1(LCE3E) c2(NP_848522) c3(late cornified envelope protein 3E) c4(253775) c5( ) c6( ) c7(FO, FP, cr); #c1(LCE5A) c2(NP_848525) c3(late cornified envelope protein 5A) c4(253776) c5(253777) c6( ) c7(eE); #c1(LCK) c2(XP_011539756) c3(tyrosine-protein kinase Lck isoform X1) c4(337970) c5(337971, 337972, 337973, 337974, 337975, 337976) c6( ) c7(T, aCA, dA, bYE, jx, jh, bB, aj, oH, pd, q, J, x, oW, kH, aT, h, hn, aa, A, je, eZ, r, cm, iK, bz, ck, iM, bE, Qu, cj, gZ, k, B); #c1(LCLAT1) c2(NP_001291374) c3(lysocardiolipin acyltransferase 1 isoform 2) c4( ) c5(115783, 115784, 115785, 115786, 115787, 115788, 115789, 115790, 115791, 115792, 115793, 115794, 115795, 115796, 115797) c6( ) c7(LB, fG, cd, fD); #c1(LCLAT1) c2(NP_872357) c3(lysocardiolipin acyltransferase 1 isoform 1) c4(256201, 256202, 256203, 256204, 256205) c5(256206, 256207, 256208, 256209, 256210, 256211, 256212, 256213, 256214, 256215, 256216, 256217, 256218, 256219, 256220, 256221, 256222) c6( ) c7(LB, fG, cd, fD); #c1(LCLAT1) c2(XP_011531047) c3(lysocardiolipin acyltransferase 1 isoform X4) c4( ) c5(327004, 327005, 327006, 327007, 327008, 327009) c6( ) c7(LB, fG, cd, fD); #c1(LCMT1) c2(NP_001027563) c3(leucine carboxyl methyltransferase 1 isoform b) c4(30270) c5(30271, 30272, 30273, 30274, 30275, 30276) c6( ) c7(cm, af, JT); #c1(LCMT1) c2(NP_057393) c3(leucine carboxyl methyltransferase 1 isoform a) c4(190539) c5(190540, 190541, 190542, 190543, 190544, 190545) c6( ) c7(cm, af, JT); #c1(LCMT1) c2(XP_011544166) c3(leucine carboxyl methyltransferase 1 isoform X4) c4(343334) c5(343335, 343336, 343337, 343338, 343339, 343340) c6( ) c7(cm, af, JT); #c1(LCN1) c2(NP_001239546) c3(lipocalin-1 isoform 1 precursor) c4(88508, 88509) c5(88510, 88511, 88512, 88513, 88514, 88515, 88516, 88517, 88518) c6( ) c7(T, b, id, fN, Hn, wR, K, i, af); #c1(LCN1) c2(NP_001239548) c3(lipocalin-1 isoform 3 precursor) c4(88519) c5( ) c6( ) c7(T, b, id, fN, Hn, wR, K, i, af); #c1(LCN1) c2(XP_011516977) c3(lipocalin-1 isoform X1) c4( ) c5(310478) c6( ) c7(T, b, id, fN, Hn, wR, K, i, af); #c1(LCN2) c2(NP_005555) c3(neutrophil gelatinase-associated lipocalin precursor) c4(157425, 157426, 157427, 157428) c5(157429, 157430, 157431, 157432, 157433, 157434, 157435, 157436, 157437, 157438, 157439, 157440, 157441, 157442, 157443, 157444, 157445, 157446, 157447, 157448, 157449, 157450, 157451, 157452, 157453, 157454, 157455, 157456) c6( ) c7(T, aC, aiR, ea, if, al, ci, aY, PB, aR, bmL, aE, K, qM, hu, hm, aa, up, aW, fc, zC, g, zE, axp, nB, wB, U, tV, aUS, m, pw, IS, amz, gD, dD, aw, NT, n, aj, fr, kD, qN, cd, aDF, Hx, jz, h, IG, ey, A, fQ, aq, fe, kp, pm, ar, Qf, hk, hL, bm, E, B, bL, Ob, dA, eR, cz, cR, v, V, q, eA, eJ, aT, cy, bq, ae, af, aGP, s, iU, r, gm, en, cl, LV, t, Ym, ck, sS, kP, c, ac, dh, dy, fD, bt, aZ, wV, eq, atK, ad, fU, hd, afm, sO, oW, Os, ji, IQ, nJ, d, ff, aFt, cr, eZ, iV, bz, bF, D, gk, pc, aS, y, X, BA); #c1(LCOR) c2(NP_001164237) c3(ligand-dependent corepressor isoform 2) c4(66849) c5(66850, 66851, 66852, 66853, 66854) c6( ) c7(v, ae, fc, ad, cP); #c1(LCOR) c2(NP_115816) c3(ligand-dependent corepressor isoform 1) c4(224072) c5(224073, 224074, 224075, 224076, 224077, 224078, 224079, 224080, 224081, 224082, 224083) c6( ) c7(v, ae, fc, ad, cP); #c1(LCOR) c2(XP_006718096) c3(ligand-dependent corepressor isoform X2) c4( ) c5(291504, 291505, 291506, 291507) c6( ) c7(v, ae, fc, ad, cP); #c1(LCP1) c2(XP_005266431) c3(plastin-2 isoform X1) c4(280038, 280039, 280040, 280041) c5(280042, 280043, 280044, 280045, 280046, 280047, 280048, 280049, 280050, 280051, 280052, 280053, 280054, 280055, 280056, 280057, 280058, 280059, 280060, 280061, 280062, 280063, 280064, 280065, 280066, 280067, 280068, 280069) c6( ) c7(bL, T, dD, fM, Zz, ea, e, aw, cz, bB, vG, aj, v, j, ci, eq, q, J, ad, ft, baE, QJ, M, aT, dL, ey, qM, dQ, ae, eL, hm, B, cH, Y, r, fe, iV, t, ck, ar, W, ac, eM, bE, Fi, bP, cj, m, ei, X); #c1(LCP2) c2(NP_005556) c3(lymphocyte cytosolic protein 2) c4(157457) c5(157458, 157459, 157460, 157461, 157462, 157463, 157464, 157465) c6( ) c7(Vv, cy, Cb, zC, Cd); #c1(LCT) c2(NP_002290) c3(lactase-phlorizin hydrolase preproprotein) c4(127353, 127354) c5(127355, 127356, 127357, 127358, 127359, 127360, 127361, 127362, 127363, 127364, 127365, 127366) c6( ) c7(bL, T, dD, e, sM, aiC, aj, v, eq, q, ad, aMb, aT, bCX, bYH, ji, bq, rE, ae, af, bA, aRR, A, r, iV, cm, fq, aMa, aAS, yE, wE, bYG, ei, ra, qc); #c1(LDB1) c2(NP_001106878) c3(LIM domain-binding protein 1 isoform 1) c4(42669) c5(42670, 42671, 42672, 42673, 42674, 42675, 42676, 42677) c6( ) c7(hF, ff, ci, en, pn, aY); #c1(LDB1) c2(NP_003884) c3(LIM domain-binding protein 1 isoform 3) c4(141800) c5(141801, 141802, 141803, 141804, 141805) c6( ) c7(hF, ff, ci, en, pn, aY); #c1(LDB2) c2(NP_001124306) c3(LIM domain-binding protein 2 isoform b) c4(48530) c5(48531, 48532, 48533, 48534, 48535, 48536) c6( ) c7(pn, dD, ac, ea, hF, aw, ff, j, ci, bK, en, eq, aY, fq); #c1(LDB2) c2(NP_001281) c3(LIM domain-binding protein 2 isoform a) c4(111719) c5( ) c6( ) c7(pn, dD, ac, ea, hF, aw, ff, j, ci, bK, en, eq, aY, fq); #c1(LDB2) c2(NP_001291363) c3(LIM domain-binding protein 2 isoform c) c4(115716, 115717) c5(115718, 115719, 115720, 115721, 115722, 115723) c6( ) c7(pn, dD, ac, ea, hF, aw, ff, j, ci, bK, en, eq, aY, fq); #c1(LDB2) c2(NP_001291364) c3(LIM domain-binding protein 2 isoform d) c4(115724, 115725, 115726) c5(115727, 115728, 115729, 115730, 115731, 115732, 115733, 115734, 115735, 115736, 115737, 115738, 115739, 115740, 115741, 115742, 115743, 115744, 115745, 115746, 115747, 115748, 115749, 115750, 115751, 115752, 115753, 115754, 115755) c6( ) c7(pn, dD, ac, ea, hF, aw, ff, j, ci, bK, en, eq, aY, fq); #c1(LDB2) c2(XP_006714045) c3(LIM domain-binding protein 2 isoform X8) c4(287517) c5( ) c6( ) c7(pn, dD, ac, ea, hF, aw, ff, j, ci, bK, en, eq, aY, fq); #c1(LDB3) c2(NP_001073583) c3(LIM domain-binding protein 3 isoform 2) c4(36005) c5(36006, 36007, 36008, 36009, 36010, 36011, 36012, 36013, 36014, 36015, 36016, 36017, 36018, 36019, 36020, 36021, 36022, 36023, 36024, 36025, 36026, 36027) c6( ) c7(cc, bfW, Ws, mx, aWn, oj, bt, km, vc, aOB, K, bp, bqW, bYI, bYJ); #c1(LDB3) c2(NP_001073584) c3(LIM domain-binding protein 3 isoform 3) c4(36028) c5(36029, 36030, 36031, 36032, 36033, 36034, 36035, 36036, 36037, 36038, 36039) c6( ) c7(cc, bfW, Ws, mx, aWn, oj, bt, km, vc, aOB, K, bp, bqW, bYI, bYJ); #c1(LDB3) c2(NP_001073585) c3(LIM domain-binding protein 3 isoform 4) c4(36040) c5(36041, 36042, 36043, 36044, 36045, 36046) c6( ) c7(cc, bfW, Ws, mx, aWn, oj, bt, km, vc, aOB, K, bp, bqW, bYI, bYJ); #c1(LDB3) c2(NP_001165081) c3(LIM domain-binding protein 3 isoform 5) c4(67269) c5(67270, 67271, 67272, 67273, 67274, 67275) c6( ) c7(cc, bfW, Ws, mx, aWn, oj, bt, km, vc, aOB, K, bp, bqW, bYI, bYJ); #c1(LDB3) c2(NP_001165082) c3(LIM domain-binding protein 3 isoform 6) c4(67276, 67277) c5(67278, 67279, 67280, 67281, 67282, 67283, 67284) c6( ) c7(cc, bfW, Ws, mx, aWn, oj, bt, km, vc, aOB, K, bp, bqW, bYI, bYJ); #c1(LDB3) c2(NP_009009) c3(LIM domain-binding protein 3 isoform 1) c4(170222) c5( ) c6( ) c7(cc, bfW, Ws, mx, aWn, oj, bt, km, vc, aOB, K, bp, bqW, bYI, bYJ); #c1(LDB3) c2(XP_005269523) c3(LIM domain-binding protein 3 isoform X10) c4(282613) c5(282614, 282615, 282616, 282617, 282618, 282619) c6( ) c7(cc, bfW, Ws, mx, aWn, oj, bt, km, vc, aOB, K, bp, bqW, bYI, bYJ); #c1(LDB3) c2(XP_011537488) c3(LIM domain-binding protein 3 isoform X5) c4(335112) c5( ) c6( ) c7(cc, bfW, Ws, mx, aWn, oj, bt, km, vc, aOB, K, bp, bqW, bYI, bYJ); #c1(LDHA) c2(NP_001128711) c3(L-lactate dehydrogenase A chain isoform 2) c4(50554) c5(50555, 50556, 50557, 50558, 50559, 50560) c6( ) c7(bL, T, kh, aC, aw, jh, aA, bB, n, eb, dG, j, ci, ww, fd, eA, ad, bv, av, cF, py, aE, cc, oj, aT, K, ae, cY, tb, aW, aF, bYK, aB, g, t, cm, iK, ov, es, pc, iA, bP, bE, mx, uS, pg, m, it, B); #c1(LDHA) c2(NP_001158886) c3(L-lactate dehydrogenase A chain isoform 3) c4(63756, 63757) c5(63758, 63759, 63760, 63761, 63762, 63763, 63764, 63765, 63766, 63767, 63768, 63769, 63770, 63771, 63772) c6( ) c7(bL, T, kh, aC, aw, jh, aA, bB, n, eb, dG, j, ci, ww, fd, eA, ad, bv, av, cF, py, aE, cc, oj, aT, K, ae, cY, tb, aW, aF, bYK, aB, g, t, cm, iK, ov, es, pc, iA, bP, bE, mx, uS, pg, m, it, B); #c1(LDHA) c2(NP_001158887) c3(L-lactate dehydrogenase A chain isoform 4) c4(63773, 63774, 63775) c5(63776, 63777, 63778, 63779, 63780, 63781) c6( ) c7(bL, T, kh, aC, aw, jh, aA, bB, n, eb, dG, j, ci, ww, fd, eA, ad, bv, av, cF, py, aE, cc, oj, aT, K, ae, cY, tb, aW, aF, bYK, aB, g, t, cm, iK, ov, es, pc, iA, bP, bE, mx, uS, pg, m, it, B); #c1(LDHA) c2(NP_001158888) c3(L-lactate dehydrogenase A chain isoform 5) c4(63782) c5(63783, 63784, 63785, 63786, 63787, 63788, 63789, 63790, 63791, 63792, 63793, 63794, 63795, 63796, 63797, 63798, 63799, 63800, 63801, 63802, 63803, 63804, 63805, 63806, 63807) c6( ) c7(bL, T, kh, aC, aw, jh, aA, bB, n, eb, dG, j, ci, ww, fd, eA, ad, bv, av, cF, py, aE, cc, oj, aT, K, ae, cY, tb, aW, aF, bYK, aB, g, t, cm, iK, ov, es, pc, iA, bP, bE, mx, uS, pg, m, it, B); #c1(LDHA) c2(NP_005557) c3(L-lactate dehydrogenase A chain isoform 1) c4(157466, 157467, 157468, 157469) c5(157470, 157471, 157472, 157473, 157474, 157475, 157476, 157477, 157478, 157479, 157480, 157481, 157482, 157483, 157484, 157485) c6( ) c7(bL, T, kh, aC, aw, jh, aA, bB, n, eb, dG, j, ci, ww, fd, eA, ad, bv, av, cF, py, aE, cc, oj, aT, K, ae, cY, tb, aW, aF, bYK, aB, g, t, cm, iK, ov, es, pc, iA, bP, bE, mx, uS, pg, m, it, B); #c1(LDHAL6B) c2(NP_149972) c3(L-lactate dehydrogenase A-like 68) c4(227674) c5(227675, 227676, 227677, 227678, 227679, 227680) c6( ) c7(aT); #c1(LDHB) c2(NP_002291) c3(L-lactate dehydrogenase B chain) c4( ) c5(127367, 127368, 127369, 127370, 127371, 127372, 127373, 127374, 127375, 127376, 127377, 127378, 127379, 127380, 127381, 127382, 127383, 127384, 127385, 127386, 127387, 127388, 127389, 127390, 127391, 127392) c6( ) c7(bxC, T, eb, bB, n, ww, fr, ad, av, yt, aT, ae, jf, B, tb, aW, aq, g, bz, mO, kP, bE, pg, it, iu); #c1(LDHB) c2(XP_006719137) c3(L-lactate dehydrogenase B chain isoform X1) c4(292220, 292221) c5( ) c6( ) c7(bxC, T, eb, bB, n, ww, fr, ad, av, yt, aT, ae, jf, B, tb, aW, aq, g, bz, mO, kP, bE, pg, it, iu); #c1(LDHC) c2(NP_059144) c3(L-lactate dehydrogenase C chain) c4(193277) c5(193278, 193279, 193280, 193281, 193282, 193283, 193284, 193285, 193286, 193287) c6( ) c7(T, gU, pc, eM, ND, aa); #c1(LDHD) c2(NP_705690) c3(probable D-lactate dehydrogenase, mitochondrial isoform 1 precursor) c4(246182) c5(246183, 246184, 246185, 246186, 246187, 246188) c6( ) c7(bF, T, pa, eG, dA, baE, eM, bE, ev, X, gd, r, bB, dq, ci, bz, q, adn); #c1(LDHD) c2(NP_919417) c3(probable D-lactate dehydrogenase, mitochondrial isoform 2 precursor) c4(258561) c5(258562, 258563, 258564, 258565, 258566, 258567) c6( ) c7(bF, T, pa, eG, dA, baE, eM, bE, ev, X, gd, r, bB, dq, ci, bz, q, adn); #c1(LDLR) c2(NP_000518) c3(low-density lipoprotein receptor isoform 1 precursor) c4(10908, 10909, 10910, 10911, 10912, 10913, 10914, 10915, 10916, 10917, 10918, 10919, 10920, 10921, 10922, 10923, 10924, 10925, 10926, 10927, 10928) c5(10929, 10930, 10931, 10932, 10933, 10934, 10935, 10936, 10937, 10938, 10939, 10940, 10941, 10942, 10943, 10944, 10945, 10946, 10947, 10948, 10949, 10950, 10951, 10952, 10953, 10954, 10955, 10956, 10957, 10958, 10959, 10960, 10961, 10962, 10963, 10964, 10965, 10966, 10967, 10968, 10969, 10970, 10971, 10972, 10973, 10974, 10975, 10976, 10977, 10978, 10979, 10980, 10981, 10982, 10983, 10984, 10985, 10986, 10987, 10988, 10989, 10990, 10991, 10992, 10993, 10994, 10995, 10996, 10997, 10998, 10999, 11000, 11001, 11002, 11003, 11004, 11005, 11006, 11007, 11008, 11009, 11010, 11011, 11012, 11013, 11014, 11015, 11016, 11017, 11018, 11019, 11020, 11021, 11022, 11023, 11024, 11025, 11026, 11027, 11028, 11029, 11030, 11031, 11032, 11033, 11034, 11035, 11036, 11037, 11038, 11039, 11040, 11041, 11042, 11043, 11044, 11045, 11046, 11047, 11048, 11049, 11050, 11051, 11052, 11053, 11054, 11055, 11056, 11057, 11058, 11059, 11060, 11061, 11062, 11063, 11064, 11065, 11066, 11067, 11068, 11069, 11070, 11071, 11072, 11073, 11074, 11075, 11076, 11077, 11078, 11079, 11080, 11081, 11082, 11083, 11084, 11085, 11086, 11087, 11088, 11089, 11090, 11091, 11092, 11093, 11094, 11095, 11096, 11097, 11098, 11099, 11100, 11101, 11102, 11103, 11104, 11105, 11106, 11107, 11108, 11109, 11110, 11111, 11112, 11113, 11114, 11115, 11116, 11117, 11118, 11119, 11120, 11121, 11122, 11123, 11124, 11125, 11126, 11127, 11128, 11129, 11130, 11131, 11132, 11133, 11134, 11135, 11136, 11137, 11138, 11139, 11140, 11141, 11142, 11143, 11144, 11145, 11146, 11147, 11148, 11149, 11150, 11151, 11152, 11153, 11154, 11155, 11156, 11157, 11158, 11159, 11160, 11161, 11162, 11163, 11164, 11165, 11166, 11167, 11168, 11169, 11170, 11171, 11172, 11173, 11174, 11175, 11176, 11177, 11178, 11179, 11180, 11181, 11182, 11183, 11184, 11185, 11186, 11187, 11188, 11189, 11190, 11191, 11192, 11193, 11194, 11195, 11196, 11197, 11198, 11199, 11200, 11201, 11202, 11203, 11204, 11205, 11206, 11207, 11208, 11209, 11210, 11211, 11212, 11213, 11214, 11215, 11216, 11217, 11218, 11219, 11220, 11221, 11222, 11223, 11224, 11225, 11226, 11227, 11228, 11229, 11230, 11231, 11232, 11233, 11234, 11235, 11236, 11237, 11238, 11239, 11240, 11241, 11242, 11243, 11244, 11245, 11246, 11247, 11248, 11249, 11250, 11251, 11252, 11253, 11254, 11255, 11256, 11257, 11258, 11259, 11260, 11261, 11262, 11263, 11264, 11265, 11266, 11267, 11268, 11269, 11270, 11271, 11272, 11273, 11274, 11275, 11276, 11277, 11278, 11279, 11280, 11281, 11282, 11283, 11284, 11285, 11286, 11287, 11288, 11289, 11290, 11291, 11292, 11293, 11294, 11295, 11296, 11297, 11298, 11299, 11300, 11301, 11302, 11303, 11304, 11305, 11306, 11307, 11308, 11309, 11310, 11311, 11312, 11313, 11314, 11315, 11318, 11317, 11318, 11319, 11320, 11321, 11322, 11323, 11324, 11325, 11326, 11327, 11328, 11329, 11330, 11331, 11332, 11333, 11334, 11335, 11336, 11337, 11338, 11339, 11340, 11341, 11342, 11343, 11344, 11345, 11346, 11347, 11348, 11349, 11350, 11351, 11352, 11353, 11354, 11355, 11356, 11357, 11358, 11359, 11360, 11381, 11362, 11363, 11364, 11365, 11366, 11367, 11368, 11369, 11370, 11371, 11372, 11373, 11374, 11375, 11376, 11377, 11378, 11379, 11380, 11381, 11382, 11383, 11384, 11385, 11386, 11387, 11388, 11389, 11390, 11391, 11392, 11393, 11394, 11395, 11396, 11397, 11398, 11399, 11400, 11401, 11402, 11403, 11404, 11405, 11406, 11407, 11408, 11409, 11410, 11411, 11412, 11413, 11414, 11415, 11416, 11417, 11418, 11419, 11420, 11421, 11422, 11423, 11424, 11425, 11426, 11427, 11428, 11429, 11430, 11431, 11432, 11433, 11434, 11435, 11436, 11437, 11438, 11439, 11440, 11441, 11442, 11443, 11444, 11445, 11446, 11447, 11448, 11449, 11450, 11451, 11452, 11453, 11454, 11455, 11456, 11457, 11458, 11459, 11460, 11461, 11462, 11463, 11464, 11465, 11466, 11467, 11468, 11469, 11470, 11471, 11472, 11473, 11474, 11475, 11476, 11477, 11478, 11479, 11480, 11481, 11482, 11483, 11484, 11485, 11486, 11487, 11488, 11489, 11490, 11491, 11492, 11493, 11494, 11495, 11496, 11497, 11498, 11499, 11500, 11501, 11502, 11503, 11504, 11505, 11506, 11507, 11508, 11509, 11518, 11511, 11512, 11513, 11514, 11515, 11516, 11517, 11518, 11519, 11520, 11521, 11522, 11523, 11524, 11525, 11526, 11527, 11528, 11529, 11530, 11531, 11532, 11533, 11534, 11535, 11536, 11537, 11538, 11539, 11540, 11541, 11542, 11543, 11544, 11545, 11546, 11547, 11548, 11549, 11550, 11551, 11552, 11553, 11554, 11555, 11556, 11557, 11558, 11559) c6(11560, 11561, 11562, 11563, 11564, 11565, 11566) c7(bM, T, qo, fR, Zz, ea, e, bB, ur, aY, bsH, AW, dY, u, iX, ari, M, dV, K, qM, dQ, H, bYL, eG, dH, aW, fc, bYP, nY, FU, cm, bw, zV, y, dc, Gs, U, IS, vF, Vj, GV, dD, Ly, wh, aw, aj, PJ, aLc, nV, ec, It, bYO, h, IG, jy, dL, Go, A, mR, aq, bYR, vo, cM, bbT, aPt, kT, dC, NL, Fi, at, el, oh, fL, B, ek, L, bL, ZV, rG, eR, jx, cz, wo, v, j, bX, so, q, J, eA, Id, aT, bYN, bq, af, bA, bf, iU, r, Io, sK, ck, cl, ac, c, au, dh, hr, fP, cS, gT, bt, Kd, nZ, qb, dM, HM, vG, auq, uu, eq, bNM, XM, sg, mC, ad, I, F, ds, bYM, aak, bYQ, d, azS, cH, cW, eZ, dq, dr, qa, eK, bE, bbY, ZD, nT, aS, cP, ei, hE, jr); #c1(LDLR) c2(NP_001182727) c3(low-density lipoprotein receptor isoform 2 precursor) c4(75172) c5(75173, 75174, 75175, 75176, 75177, 75178, 75179) c6( ) c7(bM, T, qo, fR, Zz, ea, e, bB, ur, aY, bsH, AW, dY, u, iX, ari, M, dV, K, qM, dQ, H, bYL, eG, dH, aW, fc, bYP, nY, FU, cm, bw, zV, y, dc, Gs, U, IS, vF, Vj, GV, dD, Ly, wh, aw, aj, PJ, aLc, nV, ec, It, bYO, h, IG, jy, dL, Go, A, mR, aq, bYR, vo, cM, bbT, aPt, kT, dC, NL, Fi, at, el, oh, fL, B, ek, L, bL, ZV, rG, eR, jx, cz, wo, v, j, bX, so, q, J, eA, Id, aT, bYN, bq, af, bA, bf, iU, r, Io, sK, ck, cl, ac, c, au, dh, hr, fP, cS, gT, bt, Kd, nZ, qb, dM, HM, vG, auq, uu, eq, bNM, XM, sg, mC, ad, I, F, ds, bYM, aak, bYQ, d, azS, cH, cW, eZ, dq, dr, qa, eK, bE, bbY, ZD, nT, aS, cP, ei, hE, jr); #c1(LDLR) c2(NP_001182728) c3(low-density lipoprotein receptor isoform 3 precursor) c4(75180, 75181) c5(75182, 75183, 75184, 75185, 75186, 75187, 75188, 75189, 75190, 75191, 75192, 75193, 75194, 75195) c6( ) c7(bM, T, qo, fR, Zz, ea, e, bB, ur, aY, bsH, AW, dY, u, iX, ari, M, dV, K, qM, dQ, H, bYL, eG, dH, aW, fc, bYP, nY, FU, cm, bw, zV, y, dc, Gs, U, IS, vF, Vj, GV, dD, Ly, wh, aw, aj, PJ, aLc, nV, ec, It, bYO, h, IG, jy, dL, Go, A, mR, aq, bYR, vo, cM, bbT, aPt, kT, dC, NL, Fi, at, el, oh, fL, B, ek, L, bL, ZV, rG, eR, jx, cz, wo, v, j, bX, so, q, J, eA, Id, aT, bYN, bq, af, bA, bf, iU, r, lo, sK, ck, cl, ac, c, au, dh, hr, fP, cS, gT, bt, Kd, nZ, qb, dM, HM, vG, auq, uu, eq, bNM, XM, sg, mC, ad, I, F, ds, bYM, aak, bYQ, d, azS, cH, cW, eZ, dq, dr, qa, eK, bE, bbY, ZD, nT, aS, cP, ei, hE, jr); #c1(LDLR) c2(NP_001182729) c3(low-density lipoprotein receptor isoform 4 precursor) c4(75196, 75197, 75198, 75199, 75200, 75201) c5(75202, 75203, 75204, 75205, 75206, 75207, 75208) c6( ) c7(bM, T, qo, fR, Zz, ea, e, bB, ur, aY, bsH, AW, dY, u, iX, ari, M, dV, K, qM, dQ, H, bYL, eG, dH, aW, fc, bYP, nY, FU, cm, bw, zV, y, dc, Gs, U, IS, vF, Vj, GV, dD, Ly, wh, aw, aj, PJ, aLc, nV, ec, lt, bYO, h, IG, jy, dL, Go, A, mR, aq, bYR, vo, cM, bbT, aPt, kT, dC, NL, Fi, at, el, oh, fL, B, ek, L, bL, ZV, rG, eR, jx, cz, wo, v, j, bX, so, g, J, eA, Id, aT, bYN, bq, af, bA, bf, iU, r, lo, sK, ck, cl, ac, c, au, dh, hr, fP, cS, gT, bt, Kd, nZ, gb, dM, HM, vG, auq, uu, eq, bNM, XM, sg, mC, ad, I, F, ds, bYM, aak, bYQ, d, azS, cH, cW, eZ, dq, dr, qa, eK, bE, bbY, ZD, nT, aS, cP, ei, hE, jr); #c1(LDLR) c2(NP_001182732) c3(low-density lipoprotein receptor isoform 6 precursor) c4(75209) c5(75210, 75211, 75212, 75213, 75214, 75215, 75216) c6( ) c7(bM, T, qo, fR, Zz, ea, e, bB, ur, aY, bsH, AW, dY, u, iX, ari, M, dV, K, qM, dQ, H, bYL, eG, dH, aW, fc, bYP, nY, FU, cm, bw, zV, y, dc, Gs, U, IS, vF, Vj, GV, dD, Ly, wh, aw, aj, PJ, aLc, nV, ec, lt, bYO, h, IG, jy, dL, Go, A, mR, aq, bYR, vo, cM, bbT, aPt, kT, dC, NL, Fi, at, el, oh, fL, B, ek, L, bL, ZV, rG, eR, jx, cz, wo, v, j, bX, so, q, J, eA, ld, aT, bYN, bq, af, bA, bf, iU, r, lo, sK, ck, cl, ac, c, au, dh, hr, fP, cS, gT, bt, Kd, nZ, qb, dM, HM, vG, auq, uu, eq, bNM, XM, sg, mC, ad, I, F, ds, bYM, aak, bYQ, d, azS, cH, cW, eZ, dq, dr, qa, eK, bE, bbY, ZD, nT, aS, cP, ei, hE, jr); #c1(LDLR) c2(XP_011526313) c3(low-density lipoprotein receptor isoform X2) c4(320605) c5( ) c6( ) c7(bM, T, qo, fR, Zz, ea, e, bB, ur, aY, bsH, AW, dY, u, iX, ari, M, dV, K, qM, dQ, H, bYL, eG, dH, aW, fc, bYP, nY, FU, cm, bw, zV, y, dc, Gs, U, IS, vF, Vj, GV, dD, Ly, wh, aw, aj, PJ, aLc, nV, ec, It, bYO, h, IG, jy, dL, Go, A, mR, aq, bYR, vo, cM, bbT, aPt, kT, dC, NL, Fi, at, el, oh, fL, B, ek, L, bL, ZV, rG, eR, jx, cz, wo, v, j, bX, so, q, J, eA, Id, aT, bYN, bq, af, bA, bf, iU, r, lo, sK, ck, cl, ac, c, au, dh, hr, fP, cS, gT, bt, Kd, nZ, qb, dM, HM, vG, auq, uu, eq, bNM, XM, sg, mC, ad, I, F, ds, bYM, aak, bYQ, d, azS, cH, cW, eZ, dq, dr, qa, eK, bE, bbY, ZD, nT, aS, cP, ei, hE, jr); #c1(LDLRAD3) c2(NP_777562) c3(low-density lipoprotein receptor class A domain-containing protein 3 precursor) c4(251136, 251137) c5(251138, 251139, 251140, 251141, 251142, 251143, 251144, 251145, 251146, 251147, 251148, 251149) c6( ) c7(IB, bN); #c1(LDLRAD4) c2(NP_001003674) c3(low-density lipoprotein receptor class A domain-containing protein 4 isoform gamma 1) c4(19852, 19853) c5(19854, 19855, 19856, 19857, 19858, 19859, 19860, 19861, 19862, 19863) c6( ) c7(fq, an, Ea, cz); #c1(LDLRAD4) c2(NP_001003675) c3(low-density lipoprotein receptor class A domain-containing protein 4 isoform gamma 2) c4(19864, 19865) c5(19866, 19867, 19868, 19869, 19870, 19871, 19872, 19873, 19874, 19875, 19876, 19877) c6( ) c7(fq, an, Ea, cz); #c1(LDLRAD4) c2(NP_852147) c3(low-density lipoprotein receptor class A domain-containing protein 4 isoform alpha 2) c4(254924) c5(254925, 254926, 254927, 254928, 254929, 254930) c6( ) c7(fq, an, Ea, cz); #c1(LDLRAD4) c2(XP_006722416) c3(low-density lipoprotein receptor class A domain-containing protein 4 isoform X2) c4(294704) c5(294705, 294706, 294707, 294708, 294709, 294710) c6( ) c7(fq, an, Ea, cz); #c1(LDLRAD4) c2(XP_011524039) c3(low-density lipoprotein receptor class A domain-containing protein 4 isoform X3) c4( ) c5(318636, 318637, 318638, 318639, 318640, 318641) c6( ) c7(fq, an, Ea, cz); #c1(LDOC1) c2(NP_036449) c3(protein LDOC1) c4(173946) c5(173947, 173948, 173949, 173950, 173951, 173952, 173953) c6( ) c7(T, aC, aE, ff, cz, cj, en); #c1(LDOC1L) c2(NP_115663) c3(protein LDOC1L) c4(223491) c5(223492, 223493, 223494, 223495, 223496, 223497) c6( ) c7(IB); #c1(LEAP2) c2(NP_443203) c3(liver-expressed antimicrobial peptide 2 precursor) c4(229892, 229893, 229894, 229895, 229896, 229897, 229898, 229899, 229900, 229901, 229902, 229903, 229904, 229905) c5(229906, 229907, 229908, 229909, 229910, 229911, 229912) c6(229913) c7(oO, h); #c1(LECT1) c2(NP_001011705) c3(leukocyte cell-derived chemotaxin 1 isoform 2 precursor) c4(24759) c5(24760, 24761, 24762, 24763, 24764) c6( ) c7(T, kh, y, up, Qg, n, m, t, dx); #c1(LECT1) c2(NP_008946) c3(leukocyte cell-derived chemotaxin 1 isoform 1 precursor) c4(169711) c5(169712, 169713, 169714, 169715, 169716) c6( ) c7(T, kh, y, up, Qg, n, m, t, dx); #c1(LECT1) c2(XP_006719824) c3(leukocyte cell-derived chemotaxin 1 isoform X5) c4(292994, 292995) c5(292996, 292997, 292998, 292999, 293000, 293001, 293002, 293003, 293004, 293005, 293006, 293007) c6( ) c7(T, kh, y, up, Qg, n, m, t, dx); #c1(LECT1) c2(XP_D11533199) c3(leukocyte cell-derived chemotaxin 1 isoform X1) c4( ) c5(329336) c6( ) c7(T, kh, y, up, Qg, n, m, t, dx); #c1(LECT1) c2(XP_D11533200) c3(leukocyte cell-derived chemotaxin 1 isoform X2) c4( ) c5(329337) c6( ) c7(T, kh, y, up, Qg, n, m, t, dx); #c1(LECT2) c2(NP_002293) c3(leukocyte cell-derived chemotaxin-2 precursor) c4(127393) c5(127394, 127395, 127396, 127397, 127398, 127399) c6( ) c7(fU, D, iO, jy, aq, v, R, y, B, adz); #c1(LEF1) c2(NP_001124185) c3(lymphoid enhancer-binding factor 1 isoform 2) c4(48454) c5(48455, 48456, 48457, 48458, 48459, 48460) c6( ) c7(gh, gV, T, oE, oD, aA, bB, jh, afK, ci, bYS, il, hF, q, ad, hX, x, jz, aE, bjA, oC, aT, oF, hn, K, jj, aEL, ae, Qe, hG, aW, Y, oV, eZ, r, gm, aF, hf, Z, cl, bw, bz, LB, Cv, ck, apM, bF, bE, X, hL, cj, pg, k, bD, hE, bt, B); #c1(LEF1) c2(NP_001124186) c3(lymphoid enhancer-binding factor 1 isoform 3) c4(48461) c5(48462, 48463, 48464, 48465, 48466, 48467) c6( ) c7(gh, gV, T, oE, oD, aA, bB, jh, afK, ci, bYS, il, hF, q, ad, hX, x, jz, aE, bjA, oC, aT, oF, hn, K, jj, aEL, ae, Qe, hG, aW, Y, oV, eZ, r, gm, aF, hf, Z, cl, bw, bz, LB, Cv, ck, apM, bF, bE, X, hL, cj, pg, k, bD, hE, bt, B); #c1(LEF1) c2(NP_001159591) c3(lymphoid enhancer-binding factor 1 isoform 4) c4(64426) c5(64427, 64428, 64429, 64430, 64431, 64432) c6( ) c7(gh, gV, T, oE, oD, aA, bB, jh, afK, ci, bYS, il, hE, q, ad, hX, x, jz, aE, bjA, oC, aT, oF, hn, K, jj, aEL, ae, Qe, hG, aW, Y, oV, eZ, r, gm, aF, hf, Z, cl, bw, bz, LB, Cv, ck, apM, bF, bE, X, hL, cj, pg, k, bD, hE, bt, B); #c1(LEF1) c2(NP_057353) c3(lymphoid enhancer-binding factor 1 isoform 1) c4(190297) c5(190298, 190299, 190300, 190301, 190302, 190303, 190304) c6( ) c7(gh, gV, T, oE, oD, aA, bB, jh, afK, ci, bYS, il, hE, q, ad, hX, x, jz, aE, bjA, oC, aT, oF, hn, K, jj, aEL, ae, Qe, hG, aW, Y, oV, eZ, r, gm, aF, hf, Z, cl, bw, bz, LB, Cv, ck, apM, bF, bE, X, hL, cj, pg, k, bD, hE, bt, B); #c1(LEFTY1) c2(NP_066277) c3(left-right determination factor 1 preproprotein) c4(206931) c5(206932, 206933, 206934, 206935, 206936, 206937) c6( ) c7(T, aT); #c1(LEFTY2) c2(NP_001165896) c3(left-right determination factor 2 isoform 2 preproprotein) c4(67959) c5(67960, 67961, 67962, 67963, 67964, 67965, 67966) c6( ) c7(dP, BS, eD, atS, Au, g); #c1(LEFTY2) c2(NP_003231) c3(left-right determination factor 2 isoform 1 preproprotein) c4(136631) c5(136632, 136633, 136634, 136635, 136636, 136637) c6( ) c7(dP, BS, eD, atS, Au, g); #c1(LEKR1) c2(NP_001004316) c3(leucine-, glutamate- and lysine-rich protein 1 isoform 1) c4(20553) c5(20554, 20555, 20556, 20557, 20558) c6( ) c7(V, an); #c1(LEKR1) c2(NP_001180212) c3(leucine-, glutamate- and lysine-rich protein 1 isoform 2) c4( ) c5(73425, 73426, 73427, 73428, 73429) c6( ) c7(V, an); #c1(LEKR1) c2(XP_006713694) c3(leucine-, glutamate- and lysine-rich protein 1 isoform X3) c4( ) c5(287308) c6( ) c7(V, an); #c1(LEKR1) c2(XP_011511107) c3(leucine-, glutamate- and lysine-rich protein 1 isoform X6) c4(301516) c5( ) c6( ) c7(V, an); #c1(LEKR1) c2(XP_011511116) c3(leucine-, glutamate- and lysine-rich protein 1 isoform X12) c4( ) c5(301517, 301518, 301519, 301520, 301521, 301522) c6( ) c7(V, an); #c1(LEKR1) c2(XP_011511118) c3(leucine-, glutamate- and lysine-rich protein 1 isoform X14) c4(301523) c5(301524) c6( ) c7(V, an); #c1(LEMD2) c2(NP_001137416) c3(LEM domain-containing protein 2 isoform 2) c4( ) c5(55655, 55656, 55657, 55658, 55659, 55660, 55661, 55662, 55663, 55664) c6( ) c7(eZ); #c1(LEMD2) c2(NP_851853) c3(LEM domain-containing protein 2 isoform 1) c4(254690, 254691, 254692) c5(254693, 254694, 254695, 254696, 254697, 254698, 254699, 254700) c6( ) c7(eZ); #c1(LEMD3) c2(NP_055134) c3(inner nuclear membrane protein Manl isoform 1) c4(179195) c5(179196, 179197, 179198, 179199, 179200, 179201) c6( ) c7(bYT, zw, bIF, In, bYU, bIO, IQ, MY, aSG); #c1(LEO1) c2(NP_001273359) c3(RNA polymerase-associated protein LEO1 isoform 2) c4(104755) c5(104756, 104757, 104758, 104759, 104760, 104761) c6( ) c7(bt); #c1(LEO1) c2(NP_620147) c3(RNA polymerase-associated protein LEO1 isoform 1) c4(237353, 237354) c5(237355, 237356, 237357, 237358, 237359, 237360, 237361, 237362, 237363, 237364, 237365, 237366) c6( ) c7(bt); #c1(LEP) c2(NP_000221) c3(leptin precursor) c4(4772) c5(4773, 4774, 4775, 4776, 4777, 4778, 4779, 4780) c6( ) c7(gh, T, bM, UH, bQI, fR, tQ, pf, ea, e, al, eb, bB, fd, gf, aoj, ci, bh, Lw, aY, GK, x, Bc, Fo, iX, K, qM, wt, dQ, H, blc, hH, be, DY, yo, zQ, ZH, aW, az, hl, fc, kt, vs, g, ve, uC, DL, aiv, GR, cm, eM, iA, vA, ZT, Gs, iS, azg, k, m, Uw, GV, dD, tp, lo, n, aj, afE, ct, ml, bjI, fr, zP, aje, cd, ai, rc, hw, h, IG, jy, dL, wo, eV, uc, is, he, alY, ajV, Dg, mR, CN, A, Rj, fQ, aq, fe, zZ, iN, bJ, hq, kT, ok, bP, dB, xO, anZ, Fi, afc, mg, hj, bYW, hL, hR, at, bm, jd, B, L, bL, jv, fM, dA, AL, eR, jx, qQ, eX, Nt, bBX, aA, cz, v, j, bYV, C, sl, hz, nS, V, AO, q, J, btx, UE, eA, mj, aHu, bQG, cF, mP, rS, MP, aql, HC, aT, aHs, cy, bK, bq, bau, ae, af, dl, bA, qw, bSI, kl, bf, s, aGP, iU, oV, Y, fO, bSm, r, iy, en, hf, cl, t, f, bQ, Dm, bN, ck, Qi, rR, nM, tW, c, ac, au, gX, hr, mf, cS, dy, Da, UF, gT, bt, yv, gx, sY, tS, aZ, aD, iW, jN, jh, bS, dG, ah, eq, hF, ad, afb, qC, Jm, dP, av, LL, F, QJ, ds, oW, aZW, Dj, nJ, sj, d, cH, baT, xs, ff, zR, cr, eZ, gl, dq, aF, Tp, iV, Z, FX, iR, bz, dr, qa, dR, bF, es, D, OG, bE, pE, gZ, aS, cP, ei, pK, hE, X, y); #c1(LEPROTL1) c2(NP_001121680) c3(leptin receptor overlapping transcript-like 1 isoform 2) c4(46034) c5(46035, 46036, 46037, 46038, 46039, 46040) c6( ) c7(v, ey); #c1(LEPROTL1) c2(NP_056159) c3(leptin receptor overlapping transcript-like 1 isoform 1) c4(186022) c5(186023, 186024, 186025, 186026, 186027, 186028) c6( ) c7(v, ey); #c1(LETM1) c2(NP_036450) c3(LETM1 and EF-hand domain-containing protein 1, mitochondrial precursor) c4(173954, 173955) c5(173956, 173957, 173958, 173959, 173960, 173961, 173962) c6( ) c7(av, yf, eM, ha, Az, amj, Ko, nA, bz, B, axC); #c1(LETM1) c2(XP_006713947) c3(LETM1 and EF-hand domain-containing protein 1, mitochondrial isoform X1) c4( ) c5(287429, 287430, 287431, 287432, 287433) c6( ) c7(av, yf, eM, ha, Az, amj, Ko, nA, bz, B, axC); #c1(LETMD1) c2(NP_001230618) c3(LETM1 domain-containing protein 1 isoform 3) c4(86401) c5(86402, 86403, 86404, 86405, 86406, 86407) c6( ) c7(ck, T, aW, if, r, aT, ci, qN, eA, q); #c1(LETMD1) c2(NP_001287694) c3(LETM1 domain-containing protein 1 isoform 7) c4(112569) c5(112570, 112571, 112572, 112573, 112574) c6( ) c7(ck, T, aW, if, r, aT, ci, qN, eA, q); #c1(LETMD1) c2(NP_056231) c3(LETM1 domain-containing protein 1 isoform 1) c4(186608, 186609) c5(186610, 186611, 186612, 186613, 186614, 186615, 186616, 186617, 186618, 186619, 186620, 186621) c6( ) c7(ck, T, aW, if, r, aT, ci, qN, eA, q); #c1(LETMD1) c2(XP_006719398) c3(LETM1 domain-containing protein 1 isoform X5) c4(292458) c5(292459, 292460, 292461, 292462, 292463, 292464, 292465) c6( ) c7(ck, T, aW, if, r, aT, ci, qN, eA, q); #c1(LEUTX) c2(NP_001137304) c3(leucine-twenty homeobox) c4(55416, 55417) c5(55418, 55419, 55420, 55421, 55422, 55423, 55424, 55425, 55426, 55427, 55428, 55429) c6( ) c7(bt); #c1(LFNG) c2(NP_001035257) c3(beta-1,3-N-acetylglucosaminyltransferase lunatic fringe isoform a preproprotein) c4(32687) c5(32688, 32689, 32690, 32691, 32692, 32693) c6( ) c7(bYX, Al, aT); #c1(LFNG) c2(NP_001035258) c3(beta-1,3-N-acetylglucosaminyltransferase lunatic fringe isoform b preproprotein) c4(32694) c5(32695, 32696, 32697, 32698, 32699, 32700) c6( ) c7(bYX, Al, aT); #c1(LFNG) c2(NP_001159827) c3(beta-1,3-N-acetylglucosaminyltransferase lunatic fringe isoform c) c4(64801) c5(64802, 64803, 64804, 64805, 64806, 64807, 64808, 64809, 64810) c6( ) c7(bYX, Al, aT); #c1(LFNG) c2(NP_002295) c3(beta-1,3-N-acetylglucosaminyltransferase lunatic fringe isoform d) c4(127400) c5(127401, 127402, 127403, 127404, 127405, 127406, 127407, 127408, 127409, 127410) c6( ) c7(bYX, AL aT); #c1(LGALS1) c2(NP_002296) c3(galectin-1) c4(127411) c5(127412, 127413, 127414, 127415, 127416, 127417) c6( ) c7(bM, T, if, eb, bB, fd, ci, xE, aE, il, fm, rJ, DO, K, pk, eL, DA, aW, hJ, cm, uC, eM, Hb, m, uL, n, aj, uE, qN, ai, eW, jz, h, eV, dL, Ha, kp, jT, cM, auC, ok, dB, mg, B, fM, fG, Ju, eX, aA, hz, C, q, eA, aT, ae, hM, arl, xR, oV, Y, r, lo, en, t, iK, ck, nM, c, id, iW, jh, Fc, ad, hd, py, Ps, nJ, d, ff, cr, aF, Vl, bz, bE, Hs, hE, iu, y); #c1(LGALS12) c2(NP_001136007) c3(galectin-12 isoform 1) c4(53986) c5(53987, 53988, 53989, 53990, 53991, 53992) c6( ) c7(T, eM); #c1(LGALS12) c2(NP_001136008) c3(galectin-12 isoform 3) c4(53993) c5(53994, 53995, 53996, 53997, 53998, 53999, 54000) c6( ) c7(T, eM); #c1(LGALS12) c2(NP_001136009) c3(galectin-12 isoform 4) c4( ) c5(54001, 54002, 54003, 54004, 54005) c6( ) c7(T, eM); #c1(LGALS12) c2(NP_001136010) c3(galectin-12 isoform 5) c4(54006) c5(54007, 54008, 54009, 54010, 54011) c6( ) c7(T, eM); #c1(LGALS12) c2(NP_149092) c3(galectin-12 isoform 2) c4(227094, 227095) c5(227096, 227097, 227098, 227099, 227100, 227101, 227102) c6( ) c7(T, eM); #c1(LGALS13) c2(NP_037400) c3(galactoside-binding soluble lectin 13) c4(175295) c5(175296, 175297, 175298, 175299, 175300, 175301) c6( ) c7(nJ, gx, T, hd, B, Tb, AL, Tg, bE, jz, bB, aq, uC, ae, cd, ad); #c1(LGALS14) c2(NP_064514) c3(placental protein 13-like isoform 1) c4(202824) c5(202825, 202826, 202827, 202828, 202829, 202830) c6( ) c7(Cq, aPn, ac, e, Ji, aw, aCs, ao, j, hg, ji, iV, cb, eu, eA, aR); #c1(LGALS14) c2(NP_982297) c3(placental protein 13-like isoform 2) c4(263308) c5(263309, 263310, 263311, 263312, 263313, 263314) c6( ) c7(Cq, aPn, ac, e, Ji, aw, aCs, ao, j, hg, ji, iV, cb, eu, eA, aR); #c1(LGALS16) c2(NP_001177370) c3(galectin-16) c4(72709) c5(72710, 72711, 72712, 72713, 72714, 72715) c6( ) c7(Tg, T, hd, B, Tb, jz, aq, cd); #c1(LGALS2) c2(NP_006489) c3(galectin-2) c4(165637, 165638) c5(165639, 165640, 165641, 165642, 165643, 165644, 165645, 165646, 165647, 165648, 165649, 165650) c6( ) c7(cT, ac, eR, e, eh, aw, M, aA, cz, dV, wz, aF, j, ci, ei, fe, ji, y, aDi, eu, eK); #c1(LGALS3) c2(NP_001170859) c3(galectin-3 isoform 2) c4(69566) c5(69567) c6( ) c7(bM, T, aC, Tb, fR, ea, if, e, al, bB, ci, ip, AW, xE, aE, M, K, hu, eL, cp, yo, aW, bvD, Du, hl, g, as, cm, qJ, eM, nB, cj, m, dD, IT, aw, ht, yG, n, aj, fr, uE, qN, cd, eW, ft, jz, cc, gd, dL, A, PX, AQ, fQ, aq, fe, ajz, dB, hk, hR, E, B, AN, vQ, fM, AS, fG, IH, yk, fZ, aA, cz, hz, v, j, q, J, eA, qK, aT, cy, Ex, jj, bq, ae, eu, Uf, s, NE, iU, Y, ev, fO, r, iK, pb, ck, bnc, cT, sS, nM, ac, c, iM, aJQ, bt, Mj, id, arh, KD, eq, ad, hX, av, Tg, hd, ib, Db, oj, bYY, d, je, eZ, aF, iV, bz, Hp, LB, bE, IF, hE, X, y); #c1(LGALS3) c2(XP_011535061) c3(galectin-3 isoform X1) c4(331726, 331727) c5(331728, 331729, 331730, 331731, 331732, 331733, 331734, 331735, 331736, 331737, 331738, 331739, 331740, 331741, 331742, 331743, 331744, 331745, 331746, 331747, 331748, 331749, 331750, 331751, 331752, 331753, 331754, 331755, 331756, 331757, 331758, 331759, 331760, 331761, 331762, 331763, 331764, 331765, 331766, 331767, 331768, 331769, 331770, 331771, 331772, 331773, 331774, 331775, 331776, 331777, 331778, 331779, 331780, 331781, 331782, 331783, 331784, 331785, 331786, 331787, 331788, 331789, 331790, 331791, 331792, 331793, 331794, 331795, 331796, 331797, 331798, 331799, 331800, 331801, 331802, 331803, 331804, 331805, 331806, 331807, 331808, 331809, 331810, 331811, 331812, 331813, 331814, 331815, 331816, 331817, 331818, 331819, 331820) c6(331821) c7(bM, T, aC, Tb, fR, ea, if, e, al, bB, ci, ip, AW, xE, aE, M, K, hu, eL, cp, yo, aW, bvD, Du, hl, g, as, cm, qJ, eM, nB, cj, m, dD, IT, aw, ht, yG, n, aj, fr, uE, qN, cd, eW, ft, jz, cc, gd, dL, A, PX, AQ, fQ, aq, fe, ajz, dB, hk, hR, E, B, AN, vQ, fM, AS, fG, IH, yk, fZ, aA, cz, hz, v, j, q, J, eA, qK, aT, cy, Ex, jj, bq, ae, eu, Uf, s, NE, iU, Y, ev, fO, r, iK, pb, ck, bnc, cT, sS, nM, ac, c, iM, aJQ, bt, Mj, id, arh, KD, eq, ad, hX, av, Tg, hd, ib, Db, oj, bYY, d, je, eZ, aF, iV, bz, Hp, LB, bE, IF, hE, X, y); #c1(LGALS3BP) c2(NP_005558) c3(galectin-3-binding protein precursor) c4(157486, 157487) c5(157488, 157489, 157490, 157491, 157492, 157493, 157494, 157495, 157496, 157497, 157498, 157499) c6( ) c7(T, wu, jx, aA, bB, q, ad, av, aT, h, ZQ, wm, ae, aW, ff, r, Ph, aF, en, cm, t, bz, bE, y, X); #c1(LGALS4) c2(NP_006140) c3(galectin-4) c4(162354) c5(162355, 162356, 162357, 162358, 162359, 162360) c6( ) c7(T, jx, n, ci, q, ad, hX, dP, Yn, ds, aT, ae, s, aW, ev, r, g, t, bz, c, m, bt, B); #c1(LGALS7B) c2(NP_001035972) c3(galectin-7) c4(33590) c5(33591, 33592, 33593, 33594, 33595, 33596, 33597, 33598, 33599, 33600, 33601, 33602) c6(33603, 33604) c7(T, b, ajm, bE, sw, Y, aW, if, ff, jh, aT, aA, dL, aF, ci, en, qN, i, cm, eL); #c1(LGALS8) c2(NP_006490) c3(galectin-8 isoform a) c4(165651, 165652, 165653, 165654) c5(165655, 165656, 165657, 165658, 165659, 165660, 165661, 165662, 165663, 165664, 165665, 165666, 165667, 165668, 165669, 165670, 165671, 165672, 165673, 165674, 165675, 165676, 165677, 165678) c6( ) c7(ae, T, Ub, gH, Qu, ci, bz, ad); #c1(LGALS8) c2(NP_963838) c3(galectin-8 isoform b) c4(262379, 262380) c5(262381, 262382, 262383, 262384, 262385, 262386, 262387, 262388, 262389, 262390, 262391, 262392, 262393, 262394, 262395, 262396, 262397, 262398, 262399, 262400, 262401, 262402, 262403, 262404, 262405, 262406, 262407, 262408, 262409, 262410, 262411, 262412, 262413, 262414, 262415, 262416, 262417, 262418) c6( ) c7(ae, T, Ub, gH, Qu, ci, bz, ad); #c1(LGALS8) c2(XP_011542490) c3(galectin-8 isoform X1) c4(341013, 341014) c5(341015, 341016, 341017, 341018, 341019, 341020) c6( ) c7(ae, T, Ub, gH, Qu, ci, bz, ad); #c1(LGALS9) c2(NP_002299) c3(galectin-9 isoform short) c4(127418) c5(127419, 127420, 127421, 127422, 127423, 127424) c6( ) c7(gx, Kd, T, eX, aA, bB, fd, jE, ci, uE, bh, lu, zo, q, ai, hX, xE, aT, h, eV, ji, pk, Nr, je, iU, aW, Y, ff, bg, dN, po, aF, en, iV, ajz, Nq, ba, iM, Jr, bE, aCI, dW, fD, y, B); #c1(LGALS9) c2(NP_033665) c3(galectin-9 isoform long) c4(172303) c5(172304, 172305, 172306, 172307, 172308, 172309) c6( ) c7(gx, Kd, T, eX, aA, bB, fd, jE, ci, uE, bh, lu, zo, q, ai, hX, xE, aT, h, eV, ji, pk, Nr, je, iU, aW, Y, ff, bg, dN, po, aF, en, iV, ajz, Nq, ba, iM, Jr, bE, aCI, dW, fD, y, B); #c1(LGALS9) c2(XP_006721955) c3(galectin-9 isoform X1) c4(294471) c5(294472, 294473, 294474, 294475, 294476, 294477) c6( ) c7(gx, Kd, T, eX, aA, bB, fd, jE, ci, uE, bh, lu, zo, q, ai, hX, xE, aT, h, eV, ji, pk, Nr, je, iU, aW, Y, ff, bg, dN, po, aF, en, iV, ajz, Nq, ba, iM, Jr, bE, aCI, dW, fD, y, B); #c1(LGALS9) c2(XP_006721956) c3(galectin-9 isoform X2) c4(294478) c5(294479, 294480, 294481, 294482, 294483, 294484) c6( ) c7(gx, Kd, T, eX, aA, bB, fd, jE, ci, uE, bh, lu, zo, q, ai, hX, xE, aT, h, eV, ji, pk, Nr, je, iU, aW, Y, ff, bg, dN, po, aF, en, iV, ajz, Nq, ba, iM, Jr, bE, aCI, dW, fD, y, B); #c1(LGALS9) c2(XP_006721957) c3(galectin-9 isoform X3) c4(294485) c5(294486, 294487, 294488, 294489, 294490, 294491) c6( ) c7(gx, Kd, T, eX, aA, bB, fd, jE, ci, uE, bh, lu, zo, q, ai, hX, xE, aT, h, eV, ji, pk, Nr, je, iU, aW, Y, ff, bg, dN, po, aF, en, iV, ajz, Nq, ba, iM, Jr, bE, aCI, dW, fD, y, B); #c1(LGALS9) c2(XP_006721958) c3(galectin-9 isoform X4) c4(294492) c5( ) c6( ) c7(gx, Kd, T, eX, aA, bB, fd, jE, ci, uE, bh, lu, zo, q, ai, hX, xE, aT, h, eV, ji, pk, Nr, je, iU, aW, Y, ff, bg, dN, po, aF, en, iV, ajz, Nq, ba, iM, Jr, bE, aCI, dW, fD, y, B); #c1(LGALS9) c2(XP_011523098) c3(galectin-9 isoform X5) c4( ) c5(317610, 317611, 317612, 317613, 317614, 317615) c6( ) c7(gx, Kd, T, eX, aA, bB, fd, jE, ci, uE, bh, lu, zo, q, ai, hX, xE, aT, h, eV, ji, pk, Nr, je, iU, aW, Y, ff, bg, dN, po, aF, en, iV, ajz, Nq, ba, iM, Jr, bE, aCI, dW, fD, y, B); #c1(LGALSL) c2(NP_054900) c3(galectin-related protein) c4(178259) c5(178260, 178261, 178262, 178263, 178264, 178265) c6( ) c7(T, aA, fr, eA, ad, av, ft, zw, aE, pX, aT, K, ae, gj, aW, aF, g, cm, t, bz, iK, es, eM, iA, va, m, y); #c1(LGI1) c2(NP_005088) c3(leucine-rich glioma-inactivated protein 1 precursor) c4(152791) c5(152792, 152793, 152794, 152795, 152796, 152797) c6( ) c7(wY, bZd, oe, ha, Ir, bS, gf, et, bZa, ci, il, eA, aR, yt, hb, bZb, K, hg, bYZ, d, ahJ, as, Z, cm, dr, Hp, Cq, dB, bZc, FJ, avl, it); #c1(LGI2) c2(NP_060646) c3(leucine-rich repeat LGI family member 2 precursor) c4(196966, 196967) c5(196968, 196969, 196970, 196971, 196972, 196973, 196974, 196975, 196976, 196977, 196978, 196979) c6( ) c7(ha, j, Ir); #c1(LGI4) c2(NP_644813) c3(leucine-rich repeat LGI family member 4 precursor) c4(238581, 238582, 238583) c5(238584, 238585, 238586, 238587, 238588, 238589, 238590, 238591, 238592, 238593, 238594, 238595, 238596, 238597, 238598, 238599, 238600, 238601) c6( ) c7(HN, Cq, ha, akq); #c1(LGMN) c2(NP_005597) c3(legumain preproprotein) c4(157793, 157794, 157795) c5(157796, 157797, 157798, 157799, 157800, 157801, 157802, 157803, 157804, 157805, 157806, 157807, 157808, 157809, 157810, 157811157812, 157813, 157814, 157815, 157816, 157817, 157818, 157819, 157820, 157821, 157822) c6( ) c7(T, dD, ea, aA, n, eq, V, q, ad, ke, Ma, Ot, rJ, cy, K, ae, azh, asp, r, aF, t, FV, FJ, m, ajJ, B); #c1(LGMN) c2(XP_005267919) c3(legumain isoform X2) c4(281289) c5(281290, 281291, 281292, 281293, 281294, 281295) c6( ) c7(T, dD, ea, aA, n, eq, V, q, ad, ke, Ma, Ot, rJ, cy, K, ae, azh, asp, r, aF, t, FV, FJ, m, ajJ, B); #c1(LGMN) c2(XP_005267920) c3(legumain isoform X3) c4(281296, 281297) c5(281298, 281299, 281300, 281301, 281302, 281303, 281304, 281305, 281306, 281307, 281308, 281309, 281310, 281311, 281312, 281313, 281314, 281315, 281316, 281317, 281318, 281319, 281320, 281321, 281322, 281323, 281324, 281325, 281326) c6( ) c7(T, dD, ea, aA, n, eq, V, q, ad, ke, Ma, Ot, rJ, cy, K, ae, azh, asp, r, aF, t, FV, FJ, m, ajJ, B); #c1(LGMN) c2(XP_011535272) c3(legumain isoform X1) c4(332173, 332174, 332175) c5( ) c6( ) c7(T, dD, ea, aA, n, eq, V, q, ad, ke, Ma, Ot, rJ, cy, K, ae, azh, asp, r, aF, t, FV, FJ, m, ajJ, B); #c1(LGR4) c2(NP_060960) c3(leucine-rich repeat-containing G-protein coupled receptor 4 precursor) c4(198888) c5(198889, 198890, 198891, 198892, 198893, 198894) c6( ) c7(T, aA, r, aqK, ko, aF, ci, nA, q); #c1(LGR5) c2(NP_001264155) c3(leucine-rich repeat-containing G-protein coupled receptor 5 isoform 2 precursor) c4(97594) c5(97595, 97596, 97597, 97598, 97599, 97600) c6( ) c7(bL, T, aD, oe, ht, NT, aA, bB, n, aj, v, j, ci, bZe, q, eA, afQ, h, hu, KV, d, B, s, r, hQ, aF, g, dB, bE, gX, X); #c1(LGR5) c2(NP_001264156) c3(leucine-rich repeat-containing G-protein coupled receptor 5 isoform 3 precursor) c4(97601) c5(97602, 97603, 97604, 97605, 97606, 97607) c6( ) c7(bL, T, aD, oe, ht, NT, aA, bB, n, aj, v, j, ci, bZe, q, eA, afQ, h, hu, KV, d, B, s, r, hQ, aF, g, dB, bE, gX, X); #c1(LGR5) c2(NP_003658) c3(leucine-rich repeat-containing G-protein coupled receptor 5 isoform 1 precursor) c4(140020, 140021) c5(140022, 140023, 140024, 140025, 140026, 140027, 140028, 140029, 140030, 140031, 140032, 140033) c6( ) c7(bL, T, aD, oe, ht, NT, aA, bB, n, aj, v, j, ci, bZe, q, eA, afQ, h, hu, KV, d, B, s, r, hQ, aF, g, dB, bE, gX, X); #c1(LGR6) c2(NP_001017403) c3(leucine-rich repeat-containing G-protein coupled receptor 6 isoform 1 precursor) c4(26419, 26420) c5(26421, 26422, 26423, 26424, 26425, 26426, 26427, 26428, 26429, 26430, 26431, 26432) c6( ) c7(bL, bM, gU, bZf, Ja, v, ci, aE, pX, aT, h, he, Fg, avg, d, aW, Y, ff, aeS, baZ, en, cl, bfw, dX, cE); #c1(LGR6) c2(NP_001017404) c3(leucine-rich repeat-containing G-protein coupled receptor 6 isoform 3) c4(26433) c5(26434, 26435, 26436, 26437, 26438, 26439) c6( ) c7(bL, bM, gU, bZf, Ja, v, ci, aE, pX, aT, h, he, Fg, avg, d, aW, Y, ff, aeS, baZ, en, cl, bfw, dX, cE); #c1(LGR6) c2(NP_067649) c3(leucine-rich repeat-containing G-protein coupled receptor 6 isoform 2) c4(209232) c5(209233, 209234, 209235, 209236, 209237, 209238, 209239) c6( ) c7(bL, bM, gU, bZf, Ja, v, ci, aE, pX, aT, h, he, Fg, avg, d, aW, Y, ff, aeS, baZ, en, cl, bfw, dX, cE); #c1(LGR6) c2(XP_011508140) c3(leucine-rich repeat-containing G-protein coupled receptor 6 isoform X2) c4(298633) c5(298634, 298635, 298636, 298637, 298638) c6( ) c7(bL, bM, gU, bZf, Ja, v, ci, aE, pX, aT, h, he, Fg, avg, d, aW, Y, ff, aeS, baZ, en, cl, bfw, dX, cE); #c1(LGSN) c2(NP_001137412) c3(lengsin isoform b) c4(55648) c5(55649, 55650, 55651, 55652, 55653, 55654) c6( ) c7(T, TY, aEX, aw, asM, bz, B); #c1(LGSN) c2(NP_057655) c3(lengsin isoform a) c4(192120) c5(192121, 192122, 192123, 192124, 192125, 192126) c6( ) c7(T, TY, aEX, aw, asM, bz, B); #c1(LHB) c2(NP_000885) c3(lutropin subunit beta precursor) c4(16827) c5(16828, 16829, 16830, 16831, 16832, 16833, 16834, 16835, 16836) c6( ) c7(dP, kl, gU, zZ, il, aec, bZg, aW, aT, cz, UE, avO, UF, pt, af, ad, bN, biN); #c1(LHB) c2(XP_011525277) c3(lutropin subunit beta isoform X1) c4(319718) c5(319719, 319720, 319721, 319722, 319723, 319724, 319725, 319726) c6(319727, 319728) c7(dP, kl, gU, zZ, il, aec, bZg, aW, aT, cz, UE, avO, UF, pt, af, ad, bN, biN); #c1(LHCGR) c2(NP_000224) c3(lutropin-choriogonadotropic hormone receptor precursor) c4(4789, 4790, 4791, 4792) c5(4793, 4794, 4795, 4796, 4797, 4798, 4799, 4800, 4801, 4802, 4803, 4804, 4805, 4806, 4807, 4808, 4809, 4810, 4811, 4812, 4813, 4814, 4815) c6( ) c7(T, UH, gU, eR, wu, aec, zX, aZ, vf, jN, eb, adW, bZf, v, ci, zP, ad, UE, bSU, il, BJ, aT, Ps, bZk, iv, wm, uV, Fg, ae, af, iL, alL, aeQ, yi, kl, UL, s, aW, vj, Lf, aeU, aeS, bZj, bbs, Pp, baZ, Hu, bu, cl, t, bN, bZh, bZi, sn, ac, AV, anZ, m); #c1(LHCGR) c2(XP_005264366) c3(lutropin-choriogenadotropic hormone receptor isoform X6) c4( ) c5(278829) c6( ) c7(T, UH, gU, eR, wu, aec, zX, aZ, vf, jN, eb, adW, bZf, v, ci, zP, ad, UE, bSU, il, BJ, aT, Ps, bZk, iv, wm, uV, Fg, ae, af, iL, aIL, aeQ, yi, kI, UL, s, aW, vj, Lf, aeU, aeS, bZj, bbs, Pp, baZ, Hu, hu, cl, t, bN, bZh, bZi, sn, ac, AV, anZ, m); #c1(LHCGR) c2(XP_011531131) c3(lutropin-choriogonadotropic hormone receptor isoform X2) c4(327110) c5(327111, 327112, 327113, 327114, 327115, 327116) c6( ) c7(T, UH, gU, eR, wu, aec, zX, aZ, vf, jN, eb, adW, bZf, v, ci, zP, ad, UE, bSU, il, BJ, aT, Ps, bZk, iv, wm, uV, Fg, ae, af, iL, aIL, aeQ, yi, kl, UL, s, aW, vj, Lf, aeU, aeS, bZj, bbs, Pp, baZ, Hu, bu, cl, t, bN, bZh, bZi, sn, ac, AV, anZ, m); #c1(LHFP) c2(XP_011533163) c3(lipoma HMGIC fusion partner isoform X1) c4(329302) c5(329303, 329304, 329305, 329306, 329307, 329308, 329309) c6( ) c7(T, Qf, cr, hj, cz, aHs, vr, j, Xk, eA, On); #c1(LHFPL1) c2(XP_011529245) c3(lipoma HMGIC fusion partner-like 1 protein isoform X2) c4( ) c5(324686) c6( ) c7(vr); #c1(LHFPL1) c2(XP_011529246) c3(lipoma HMGIC fusion partner-like 1 protein isoform X1) c4(324687) c5(324688, 324689, 324690, 324691, 324692) c6( ) c7(vr); #c1(LHFPL1) c2(XP_011529248) c3(lipnma HMGIC fusion partner-like 1 protein isoform X4) c4(324693) c5(324694, 324695, 324696, 324697, 324698, 324699) c6( ) c7(vr); #c1(LHFPL2) c2(NP_005770) c3(lipnma HMGIC fusion partner-like 2 protein) c4(159214) c5(159215, 159216, 159217, 159218, 159219, 159220, 159221, 159222, 159223, 159224) c6( ) c7(ey); #c1(LHFPL3) c2(NP_945351) c3(lipnma HMGIC fusion partner-like 3 protein) c4(260865, 260866) c5(260867, 260868, 260869, 260870, 260871, 260872, 260873, 260874, 260875, 260876, 260877, 260878) c6( ) c7(T, d, ac, if, cz, v, qN, bN); #c1(LHFPL3) c2(XP_005250384) c3(lipnma HMGIC fusion partner-like 3 protein isoform X1) c4(270284) c5(270285, 270286, 270287, 270288, 270289, 270290) c6( ) c7(T, d, ac, if, cz, v, qN, bN); #c1(LHFPL4) c2(XP_011531995) c3(lipnma HMGIC fusion partner-like 4 protein isoform X1) c4(328036) c5(328037, 328038, 328039, 328040, 328041, 328042) c6( ) c7(T, if, qN); #c1(LHFPL5) c2(NP_872354) c3(tetraspan membrane protein of hair cell sterencilia) c4(256190) c5(256191, 256192, 256193, 256194, 256195, 256196, 256197, 256198, 256199, 256200) c6( ) c7(bxn, Bh, bZI); #c1(LHPP) c2(NP_001161352) c3(phospholysine phosphohistidine inorganic pyrophosphate phosphatase isoform 2) c4(65624) c5(65625, 65626, 65627, 65628, 65629, 65630) c6( ) c7(b0); #c1(LHPP) c2(NP_071409) c3(phospholysine phosphohistidine inorganic pyrophosphate phosphatase isoform 1) c4(211504) c5(211505, 211506, 211507, 211508, 211509, 211510) c6( ) c7(b0); #c1(LHX1) c2(XP_011545112) c3(LIM/homeobox protein Lhx1 isoform X1) c4(343970) c5(343971, 343972, 343973, 343974, 343975, 343976, 343977) c6( ) c7(bfP, T, bxG, Ur, fr); #c1(LHX2) c2(NP_004780) c3(LIM/homeobox protein Lhx2) c4(149568) c5(149569, 149570, 149571, 149572, 149573, 149574, 149575) c6( ) c7(gk, T, mj, kj, iU, aW, al, oW, aT, y, biN); #c1(LHX3) c2(NP_055379) c3(LIM/homeobox protein Lhx3 isoform b) c4(180672, 180673) c5(180674, 180675, 180676, 180677, 180678, 180679, 180680, 180681, 180682, 180683, 180684, 180685, 180686) c6( ) c7(bBJ, acz, ajX, mG, v, bZm, bHF); #c1(LHX3) c2(NP_835258) c3(LIM/homeobox protein Lhx3 isoform a) c4(253436) c5(253437, 253438, 253439, 253440, 253441, 253442) c6( ) c7(bBJ, acz, ajX, mG, v, bZm, bHF); #c1(LHX4) c2(NP_203129) c3(LIM/homeobox protein Lhx4) c4(228348) c5(228349, 228350, 228351, 228352, 228353, 228354, 228355) c6( ) c7(x, bZn, iU, acz, tT, k, bHF, biN); #c1(LHX5) c2(NP_071758) c3(LIM/homeobox protein Lhx5) c4(211971) c5(211972, 211973, 211974, 211975, 211976, 211977, 211978) c6( ) c7(aj); #c1(LHX6) c2(NP_001229262) c3(LIM/homeobox protein Lhx6 isoform 3) c4(84045) c5(84046, 84047, 84048, 84049, 84050, 84051) c6( ) c7(yL, T, bz); #c1(LHX6) c2(NP_001229263) c3(LIM/homeobox protein Lhx6 isoform 4) c4(84052, 84053) c5(84054, 84055, 84056, 84057, 84058, 84059) c6( ) c7(yL, T, bz); #c1(LHX6) c2(NP_001229264) c3(LIM/homeobox protein Lhx6 isoform 5) c4( ) c5(84060, 84061, 84062, 84063, 84064) c6( ) c7(yL, T, bz); #c1(LHX6) c2(NP_055183) c3(LIM/homeobox protein Lhx6 isoform 1) c4(179637) c5(179638, 179639, 179640, 179641, 179642, 179643, 179644, 179645) c6( ) c7(yL, T, bz); #c1(LHX6) c2(NP_954629) c3(LIM/homeobox protein Lhx6 isoform 2) c4(261086) c5(261087, 261088, 261089, 261090, 261091, 261092) c6( ) c7(yL, T, bz); #c1(LHX6) c2(XP_005251973) c3(LIM/homeobox protein Lhx6 isoform X4) c4( ) c5(271380, 271381, 271382, 271383, 271384, 271385, 271386, 271387, 271388, 271389, 271390, 271391) c6( ) c7(yL, T, bz); #c1(LHX6) c2(XP_011516824) c3(LIM/homeobox protein Lhx6 isoform X2) c4(310263, 310264) c5( ) c6( ) c7(yL, T, bz); #c1(LHX9) c2(NP_001014434) c3(LIM/homeobox protein Lhx9 isoform 2) c4(25872) c5(25873, 25874, 25875, 25876, 25877, 25878, 25879) c6( ) c7(eA, as); #c1(LHX9) c2(NP_064589) c3(LIM/homeobox protein Lhx9 isoform 1) c4(203141) c5(203142, 203143, 203144, 203145, 203146, 203147) c6( ) c7(eA, as); #c1(LIAS) c2(NP_006850) c3(lipnyl synthase, mitochondrial isoform 1 precursor) c4(168616) c5(168617, 168618, 168619, 168620, 168621, 168622) c6( ) c7(bL, ajU, ha, aj, abj, dL, K, bZp, MC, bZo, eL, UZ, J, hq); #c1(LIAS) c2(NP_919433) c3(lipnyl synthase, mitochondrial isoform 2 precursor) c4(258628) c5(258629, 258630, 258631, 258632, 258633, 258634) c6( ) c7(bL, ajU, ha, aj, abj, dL, K, bZp, MG, bZo, eL, UZ, J, hq); #c1(LIF) c2(XP_011528474) c3(leukemia inhibitory factor isoform X1) c4(323582) c5(323583, 323584, 323585, 323586, 323587, 323588, 323589) c6( ) c7(bM, T, ya, ea, ci, Qp, Hr, RL, amR, bv, aE, il, M, JT, Ou, K, aVT, azh, Ur, aW, eF, cm, bw, iA, iT, vA, m, dD, IT, aj, fr, PJ, cd, ai, Vs, kH, ey, dx, Lg, mR, aq, op, dB, eD, hR, eo, B, bL, bX, V, eA, J, nv, aT, dz, eu, jf, hM, kl, s, vT, Y, tu, en, wA, t, ck, iM, ac, c, bt, gx, aZ, jh, eq, dP, nJ, d, je, ff, eH, tv, gu, bz, bE, y); #c1(LIFR) c2(XP_011512344) c3(leukemia inhibitory factor receptor isoform X1) c4(302997, 302998, 302999) c5(303000, 303001, 303002, 303003, 303004, 303005, 303006, 303007, 303008, 303009, 303010, 303011, 303012, 303013, 303014, 303015, 303016, 303017, 303018, 303019, 303020, 303021, 303022) c6( ) c7(bM, T, IT, bB, ci, ai, cd, q, ad, eW, bv, Vs, aT, h, K, aVT, bZq, jf, kl, aW, r, aq, ck, bE, mx, m, B); #c1(LIG1) c2(NP_001275992) c3(DNA ligase 1 isoform 2) c4(107677) c5(107678, 107679, 107680, 107681, 107682, 107683) c6( ) c7(av, T, aE, dB, oV, iW, Qk, ew, aT, at, hy, dL, fr, m, bz, eA, ip); #c1(LIG1) c2(NP_001275993) c3(DNA ligase 1 isoform 3) c4(107684) c5(107685, 107686, 107687, 107688, 107689, 107690) c6( ) c7(av, T, aE, dB, oV, iW, Qk, ew, aT, at, hy, dL, fr, m, bz, eA, ip); #c1(LIG1) c2(XP_006723278) c3(DNA ligase 1 isoform X2) c4(295072, 295073) c5(295074, 295075, 295076, 295077, 295078, 295079, 295080, 295081, 295082, 295083, 295084, 295085) c6( ) c7(av, T, aE, dB, oV, iW, Qk, ew, aT, at, hy, dL, fr, m, bz, eA, ip); #c1(LIG1) c2(XP_006723279) c3(DNA ligase 1 isoform X1) c4(295086) c5(295087, 295088, 295089, 295090, 295091, 295092) c6( ) c7(av, T, aE, dB, oV, iW, Qk, ew, aT, at, hy, dL, fr, m, bz, eA, ip); #c1(LIG3) c2(XP_005258027) c3(DNA ligase 3 isoform X3) c4(275457) c5(275458, 275459, 275460, 275461, 275462, 275463) c6( ) c7(Gl, aC, aE, aW, iW, ht, EQ, r, aT, IG, hy, dL, at, m, bC, it, Gu, Gw, V, eL); #c1(LIG3) c2(XP_006721959) c3(DNA ligase 3 isoform X5) c4(294493) c5(294494, 294495, 294496, 294497, 294498, 294499) c6( ) c7(Gl, aC, aE, aW, iW, ht, EQ, r, aT, IG, hy, dL, at, m, bC, it, Gu, Gw, V, eL); #c1(LIG3) c2(XP_011523099) c3(DNA ligase 3 isoform X1) c4( ) c5(317616) c6( ) c7(Gl, aC, aE, aW, iW, ht, EQ, r, aT, IG, hy, dL, at, m, bC, it, Gu, Gw, V, eL); #c1(LIG4) c2(XP_005254115) c3(DNA ligase 4 isoform X1) c4(272967) c5(272968, 272969, 272970, 272971, 272972, 272973, 272974, 272975, 272976, 272977, 272978, 272979, 272980, 272981, 272982) c6( ) c7(bM, T, hl, aC, dA, ajm, Zl, id, if, WL, al, iW, jh, fd, bB, aj, bS, hy, Qo, V, q, J, ad, eA, ip, dY, aE, Db, bTr, Qk, gd, aT, dL, K, CB, jf, gw, d, wr, s, aW, Y, oV, ff, CT, r, CF, Kf, en, g, bZs, t, QK, bz, iK, dr, ck, gk, c, nB, dB, bE, eM, bZr, cj, oX, m, k, fD, hh, y, bt, B); #c1(LILRA1) c2(NP_006854) c3(leukocyte immunoglobulin-like receptor subfamily A member 1 isoform 1 precursor) c4(168664) c5( ) c6( ) c7(y, dy, jx, aYt, eZ); #c1(LILRA1) c2(XP_011545378) c3(leukocyte immunoglobulin-like receptor subfamily A member 1 isoform X1) c4( ) c5(344132, 344133, 344134, 344135, 344136, 344137) c6( ) c7(y, dy, jx, aYt, eZ); #c1(LILRA2) c2(NP_006857) c3(leukocyte immunoglobulin-like receptor subfamily A member 2 isoform b precursor) c4(168665) c5(168666, 168667, 168668, 168669, 168670, 168671) c6( ) c7(jx, eZ, Kw, y, hv, aYt); #c1(LILRA2) c2(XP_011545392) c3(leukocyte immunoglobulin-like receptor subfamily A member 2 isoform X2) c4(344138, 344139) c5(344140, 344141, 344142, 344143, 344144, 344145, 344146, 344147, 344148, 344149, 344150, 344151, 344152, 344153, 344154, 344155) c6( ) c7(jx, eZ, Kw, y, hv, aYt); #c1(LILRA3) c2(NP_001166125) c3(leukocyte immunoglobulin-like receptor subfamily A member 3 isoform 2 precursor) c4(68248) c5(68249, 68250, 68251, 68252, 68253, 68254) c6( ) c7(y, V, eo, jx, fN); #c1(LILRA3) c2(XP_011545807) c3(leukocyte immunoglobulin-like receptor subfamily A member 3 isoform X8) c4( ) c5(344663) c6( ) c7(y, V, eo, jx, fN); #c1(LILRA3) c2(XP_011545809) c3(leukocyte immunoglobulin-like receptor subfamily A member 3 isoform X10) c4(344664, 344665) c5(344666, 344667, 344668, 344669, 344670, 344671, 344672, 344673, 344674, 344675, 344676, 344677, 344678, 344679, 344680) c6( ) c7(y, V, eo, jx, fN); #c1(LILRA4) c2(NP_036408) c3(leukocyte immunoglobulin-like receptor subfamily A member 4 precursor) c4(173636) c5(173637, 173638, 173639, 173640, 173641, 173642) c6( ) c7(vi, cj); #c1(LILRA5) c2(NP_067073) c3(leukocyte immunoglobulin-like receptor subfamily A member 5 isoform 1 precursor) c4(208818) c5(208819, 208820, 208821, 208822, 208823, 208824, 208825, 208826) c6(208827, 208828) c7(BU, jx, xR); #c1(LILRA5) c2(NP_870994) c3(leukocyte immunoglobulin-like receptor subfamily A member 5 isoform 3) c4(255913) c5(255914, 255915, 255916, 255917, 255918, 255919, 255920, 255921) c6(255922, 255923) c7(BU, jx, xR); #c1(LILRA5) c2(NP_871714) c3(leukocyte immunoglobulin-like receptor subfamily A member 5 isoform 2) c4(255954) c5(255955, 255956, 255957, 255958, 255959, 255960, 255961, 255962) c6(255963, 255964) c7(BU, jx, xR); #c1(LILRA5) c2(NP_871715) c3(leukocyte immunoglobulin-like receptor subfamily A member 5 isoform 4) c4(255965) c5(255966, 255967, 255968, 255969, 255970, 255971, 255972, 255973) c6(255974, 255975) c7(BU, jx, xR); #c1(LILRB1) c2(NP_001075107) c3(leukocyte immunoglobulin-like receptor subfamily B member 1 isoform 3 precursor) c4(37237) c5( ) c6( ) c7(bL, T, fR, aD, if, aA, bB, aj, v, ci, bX, qN, bWN, q, J, ad, eA, aE, Dq, ds, aT, h, ae, d, aW, Ls, eZ, r, fe, aF, t, bz, Bv, BU, eU, eM, bE, gX, aSu, m, fL, y, bt, B); #c1(LILRB1) c2(NP_001075108) c3(leukocyte immunoglobulin-like receptor subfamily B member 1 isoform 4 precursor) c4(37238) c5( ) c6( ) c7(bL, T, fR, aD, if, aA, bB, aj, v, ci, bX, qN, bWN, q, J, ad, eA, aE, Dq, ds, aT, h, ae, d, aW, Ls, eZ, r, fe, aF, t, bz, Bv, BU, eU, eM, bE, gX, aSu, m, fL, y, bt, B); #c1(LILRB1) c2(NP_001265327) c3(leukocyte immunoglobulin-like receptor subfamily B member 1 isoform 5 precursor) c4(98274) c5(98275, 98276, 98277, 98278, 98279, 98280) c6( ) c7(bL, T, fR, aD, if, aA, bB, aj, v, ci, bX, qN, bWN, q, J, ad, eA, aE, Dq, ds, aT, h, ae, d, aW, Ls, eZ, r, fe, aF, t, bz, Bv, BU, eU, eM, bE, gX, aSu, m, fL, y, bt, B); #c1(LILRB1) c2(NP_006660) c3(leukocyte immunoglobulin-like receptor subfamily B member 1 isoform 1 precursor) c4(166986) c5(166987, 166988, 166989, 166990, 166991, 166992, 166993, 166994, 166995, 166996, 166997, 166998) c6( ) c7(bL, T, fR, aD, if, aA, bB, aj, v, ci, bX, qN, bWN, q, J, ad, eA, aE, Dq, ds, aT, h, ae, d, aW, Ls, eZ, r, fe, aF, t, bz, Bv, BU, eU, eM, bE, gX, aSu, m, fL, y, bt, B); #c1(LILRB1) c2(XP_011546945) c3(leukocyte immunoglobulin-like receptor subfamily B member 1 isoform X9) c4(345772) c5(345773, 345774, 345775, 345776, 345777, 345778, 345779, 345780, 345781, 345782, 345783, 345784, 345785, 345786, 345787, 345788, 345789, 345790, 345791, 345792) c6( ) c7(bL, T, fR, aD, if, aA, bB, aj, v, ci, bX, qN, bWN, q, J, ad, eA, aE, Dq, ds, aT, h, ae, d, aW, Ls, eZ, r, fe, aF, t, bz, Bv, BU, eU, eM, bE, gX, aSu, m, fL, y, bt, B); #c1(LILRB1) c2(XP_011546950) c3(leukocyte immunoglobulin-like receptor subfamily B member 1 isoform X13) c4(345793) c5(345794, 345795, 345796, 345797, 345798, 345799) c6( ) c7(bL, T, fR, aD, if, aA, bB, aj, v, ci, bX, qN, bWN, q, J, ad, eA, aE, Dq, ds, aT, h, ae, d, aW, Ls, eZ, r, fe, aF, t, bz, Bv, BU, eU, eM, bE, gX, aSu, m, fL, y, bt, B); #c1(LILRB2) c2(NP_001265333) c3(leukocyte immunoglobulin-like receptor subfamily B member 2 isoform 3) c4(98281) c5( ) c6( ) c7(T, eM, s, eZ, h, ey, y, bt); #c1(LILRB2) c2(XP_011546934) c3(leukocyte immunoglobulin-like receptor subfamily B member 2 isoform X18) c4(345752) c5(345753, 345754, 345755, 345756, 345757, 345758, 345759, 345760, 345761, 345762, 345763, 345764) c6( ) c7(T, eM, s, eZ, h, ey, y, bt); #c1(LILRB2) c2(XP_011546935) c3(leukocyte immunoglobulin-like receptor subfamily B member 2 isoform X19) c4(345765) c5(345766, 345767, 345768, 345769, 345770, 345771) c6( ) c7(T, eM, s, eZ, h, ey, y, bt); #c1(LILRB3) c2(XP_006726238) c3(leukocyte immunoglobulin-like receptor subfamily B member 3 isoform X10) c4(297126) c5(297127, 297128, 297129, 297130, 297131, 297132) c6( ) c7(LB, aa); #c1(LILRB3) c2(XP_006726239) c3(leukocyte immunoglobulin-like receptor subfamily B member 3 isoform X11) c4(297133) c5(297134, 297135, 297136, 297137, 297138, 297139) c6( ) c7(LB, aa); #c1(LILRB3) c2(XP_011546969) c3(leukocyte immunoglobulin-like receptor subfamily B member 3 isoform X5) c4(345822, 345823) c5( ) c6( ) c7(LB, aa); #c1(LILRB3) c2(XP_011546970) c3(leukocyte immunoglobulin-like receptor subfamily B member 3 isoform X6) c4(345824) c5(345825, 345826, 345827, 345828, 345829, 345830) c6( ) c7(LB, aa); #c1(LILRB3) c2(XP_011546974) c3(leukocyte immunoglobulin-like receptor subfamily B member 3 isoform X12) c4( ) c5(345831, 345832, 345833, 345834, 345835, 345836, 345837, 345838, 345839, 345840, 345841) c6( ) c7(LB, aa); #c1(LILRB4) c2(XP_011546956) c3(leukocyte immunnglnbulin-like receptor subfamily B member 4 isoform X2) c4(345800) c5( ) c6( ) c7(T, aC, dA, eZ, fe, fL, bX, iV, mC); #c1(LILRB4) c2(XP_011546957) c3(leukocyte immunnglnbulin-like receptor subfamily B member 4 isoform X3) c4(345801) c5(345802, 345803, 345804, 345805, 345806, 345807, 345808, 345809, 345810, 345811, 345812) c6( ) c7(T, aC, dA, eZ, fe, fL, bX, iV, mC); #c1(LILRB4) c2(XP_011546958) c3(leukocyte immunnglnbulin-like receptor subfamily B member 4 isoform X4) c4(345813, 345814) c5( ) c6( ) c7(T, aC, dA, eZ, fe, fL, bX, iV, mC); #c1(LILRB4) c2(XP_011546960) c3(leukocyte immunnglnbulin-like receptor subfamily B member 4 isoform XB) c4(345815) c5(345816, 345817, 345818, 345819, 345820, 345821) c6( ) c7(T, aC, dA, eZ, fe, fL, bX, iV, mC); #c1(LILRB5) c2(NP_001074911) c3(leukocyte immunnglnbulin-like receptor subfamily B member 5 isoform 1 precursor) c4(37120) c5(37121, 37122, 37123, 37124, 37125, 37126) c6( ) c7(ey); #c1(LILRB5) c2(NP_001074912) c3(leukocyte immunnglnbulin-like receptor subfamily B member 5 isoform 3 precursor) c4(37127) c5(37128, 37129, 37130, 37131, 37132, 37133) c6( ) c7(ey); #c1(LILRB5) c2(NP_001291386) c3(leukocyte immunnglnbulin-like receptor subfamily B member 5 isoform 4 precursor) c4(115833) c5(115834, 115835, 115836, 115837, 115838, 115839) c6( ) c7(ey); #c1(LILRB5) c2(NP_006831) c3(leukocyte immunnglnbulin-like receptor subfamily B member 5 isoform 2 precursor) c4(168511) c5(168512, 168513, 168514, 168515, 168516, 168517) c6( ) c7(ey); #c1(LIM2) c2(NP_001155220) c3(lens fiber membrane intrinsic protein isoform 2) c4(61535) c5(61536, 61537, 61538, 61539, 61540, 61541) c6( ) c7(ck, bZt); #c1(LIM2) c2(NP_085915) c3(lens fiber membrane intrinsic protein isoform 1) c4(219632) c5(219633, 219634, 219635, 219636, 219637, 219638) c6( ) c7(ck, bZt); #c1(LIMA1) c2(NP_001230704) c3(LIM domain and actin-binding protein 1 isoform 4) c4( ) c5(86607, 86608, 86609, 86610, 86611, 86612, 86613, 86614, 86615, 86616, 86617) c6( ) c7(T, aW, aT, n, K, ae, ad); #c1(LIMA1) c2(NP_057441) c3(LIM domain and actin-binding protein 1 isoform 2) c4(190862, 190863, 190864, 190865, 190866, 190867, 190868) c5(190869, 190870, 190871, 190872, 190873, 190874, 190875, 190876, 190877, 190878, 190879, 190880, 190881, 190882, 190883, 190884, 190885, 190886, 190887, 190888, 190889, 190890, 190891, 190892, 190893, 190894, 190895, 190896, 190897, 190898, 190899) c6( ) c7(T, aW, aT, n, K, ae, ad); #c1(LIMA1) c2(XP_011536757) c3(LIM domain and actin-binding protein 1 isoform X1) c4(334435, 334436) c5(334437, 334438, 334439, 334440, 334441, 334442, 334443, 334444, 334445, 334446, 334447, 334448) c6( ) c7(T, aW, aT, n, K, ae, ad); #c1(LIMCH1) c2(NP_001106188) c3(LIM and calponin homology domains-cnntaining protein 1 isoform b) c4(42347) c5(42348, 42349, 42350, 42351, 42352, 42353) c6( ) c7(IB); #c1(LIMCH1) c2(NP_001106189) c3(LIM and calponin homology domains-cnntaining protein 1 isoform c) c4(42354) c5(42355, 42356, 42357, 42358, 42359, 42360, 42361, 42362, 42363, 42364, 42365, 42366) c6( ) c7(IB); #c1(LIMCH1) c2(NP_001106190) c3(LIM and calponin homology domains-cnntaining protein 1 isoform d) c4(42367, 42368) c5(42369, 42370, 42371, 42372, 42373, 42374) c6( ) c7(IB); #c1(LIMCH1) c2(NP_001106191) c3(LIM and calponin homology domains-cnntaining protein 1 isoform e) c4(42375, 42376) c5(42377, 42378, 42379, 42380, 42381, 42382) c6( ) c7(IB); #c1(LIMCH1) c2(NP_001276051) c3(LIM and calponin homology domains-cnntaining protein 1 isoform f) c4(107836) c5(107837, 107838, 107839, 107840, 107841, 107842) c6( ) c7(IB); #c1(LIMCH1) c2(NP_055803) c3(LIM and calponin homology domains-cnntaining protein 1 isoform a) c4(183591) c5(183592, 183593, 183594, 183595, 183596, 183597) c6( ) c7(IB); #c1(LIMCH1) c2(XP_005248117) c3(LIM and calponin homology domains-cnntaining protein 1 isoform X7) c4( ) c5(268241) c6( ) c7(IB); #c1(LIMCH1) c2(XP_005248124) c3(LIM and calponin homology domains-cnntaining protein 1 isoform X14) c4(268242, 268243) c5(268244, 268245, 268246, 268247, 268248, 268249, 268250, 268251, 268252, 268253, 268254) c6( ) c7(IB); #c1(LIMCH1) c2(XP_011511960) c3(LIM and calponin homology domains-cnntaining protein 1 isoform X24) c4( ) c5(302606, 302607, 302608, 302609, 302610, 302611) c6( ) c7(IB); #c1(LIMD1) c2(NP_055055) c3(LIM domain-containing protein 1) c4(178630) c5(178631, 178632, 178633, 178634, 178635, 178636, 178637) c6( ) c7(av, T, ff, aT, hy, en, iK, bz); #c1(LIMD2) c2(NP_085053) c3(LIM domain-containing protein 2) c4(219221) c5(219222, 219223, 219224, 219225, 219226, 219227) c6( ) c7(aW, n, bE, bB, aT); #c1(LIMK1) c2(NP_001191355) c3(LIM domain kinase 1 isoform 2) c4(81473) c5(81474, 81475, 81476, 81477, 81478, 81479) c6( ) c7(lD, T, ci, ad, BY, Qk, aT, h, hP, lQ, ae, eu, aW, eH, eF, eK, aIC, ac, eM, ei, xg, us); #c1(LIMK1) c2(NP_002305) c3(LIM domain kinase 1 isoform 1) c4(127441) c5(127442, 127443, 127444, 127445, 127446, 127447, 127448, 127449, 127450, 127451, 127452, 127453, 127454) c6( ) c7(lD, T, ci, ad, BY, Qk, aT, h, hP, lQ, ae, eu, aW, eH, eF, eK, aIC, ac, eM, ei, xg, us); #c1(LIMK2) c2(NP_001026971) c3(LIM domain kinase 2 isoform 1) c4(30005) c5(30006, 30007, 30008, 30009, 30010, 30011) c6( ) c7(T, gU, eR, ND, r, vH, cm, ji, K, aY, q); #c1(LIMK2) c2(NP_005560) c3(LIM domain kinase 2 isoform 2a) c4(157500) c5(157501, 157502, 157503, 157504, 157505, 157506, 157507) c6( ) c7(T, gU, eR, ND, r, vH, cm, ji, K, aY, q); #c1(LIMK2) c2(NP_057952) c3(LIM domain kinase 2 isoform 2b) c4(192614, 192615, 192616) c5(192617, 192618, 192619, 192620, 192621, 192622, 192623, 192624, 192625, 192626, 192627, 192628, 192629, 192630, 192631, 192632, 192633, 192634) c6( ) c7(T, gU, eR, ND, r, vH, cm, ji, K, aY, q); #c1(LIMS1) c2(NP_001180411) c3(LIM and senescent cell antigen-like-containing domain protein 1 isoform c) c4(73972) c5(73973, 73974, 73975, 73976, 73977, 73978, 73979) c6( ) c7(T, ff, dy, Hb, en, lu, bt, eA); #c1(LIMS1) c2(NP_001180412) c3(LIM and senescent cell antigen-like-containing domain protein 1 isoform d) c4(73980) c5(73981, 73982, 73983, 73984, 73985, 73986) c6( ) c7(T, ff, dy, Hb, en, lu, bt, eA); #c1(LIMS1) c2(NP_001180413) c3(LIM and senescent cell antigen-like-containing domain protein 1 isoform e) c4(73987, 73988) c5(73989, 73990, 73991, 73992, 73993, 73994, 73995) c6( ) c7(T, ff, dy, Hb, en, lu, bt, eA); #c1(LIMS1) c2(NP_001180414) c3(LIM and senescent cell antigen-like-containing domain protein 1 isoform a) c4(73996, 73997) c5(73998, 73999, 74000, 74001, 74002, 74003, 74004) c6( ) c7(T, ff, dy, Hb, en, lu, bt, eA); #c1(LIMS1) c2(NP_001180417) c3(LIM and senescent cell antigen-like-containing domain protein 1 isoform b) c4( ) c5(74012, 74013, 74014, 74015, 74016, 74017, 74018, 74019, 74020, 74021, 74022, 74023, 74024, 74025, 74026, 74027, 74028, 74029, 74030) c6( ) c7(T, ff, dy, Hb, en, lu, bt, eA); #c1(LIMS2) c2(NP_001129509) c3(LIM and senescent cell antigen-like-containing domain protein 2 isoform 1) c4(51771) c5(51772, 51773, 51774, 51775, 51776, 51777, 51778, 51779, 51780, 51781, 51782, 51783, 51784, 51785) c6( ) c7(aA); #c1(LIMS2) c2(NP_001154875) c3(LIM and senescent cell antigen-like-containing domain protein 2 isoform 3) c4(61185) c5(61186, 61187, 61188, 61189, 61190, 61191, 61192) c6( ) c7(aA); #c1(LIMS2) c2(NP_001154876) c3(LIM and senescent cell antigen-like-containing domain protein 2 isoform 5) c4( ) c5(61193, 61194, 61195, 61196, 61197, 61198, 61199, 61200, 61201, 61202, 61203, 61204, 61205, 61206) c6( ) c7(aA); #c1(LIMS2) c2(NP_001243471) c3(LIM and senescent cell antigen-like-containing domain protein 2 isoform 4) c4(90901) c5(90902, 90903, 90904, 90905, 90906, 90907, 90908, 90909, 90910, 90911, 90912, 90913, 90914, 90915, 90916, 90917, 90918) c6( ) c7(aA); #c1(LIMS2) c2(NP_060450) c3(LIM and senescent cell antigen-like-containing domain protein 2 isoform 2) c4(195993, 195994) c5(195995, 195996, 195997, 195998, 195999, 196000) c6( ) c7(aA); #c1(LIMS2) c2(XP_006712690) c3(LIM and senescent cell antigen-like-containing domain protein 2 isoform X4) c4(286798) c5(286799, 286800, 286801, 286802, 286803, 286804, 286805, 286806, 286807, 286808, 286809) c6( ) c7(aA); #c1(LIMS2) c2(XP_011509755) c3(LIM and senescent cell antigen-like-containing domain protein 2 isoform X2) c4(300312) c5(300313, 300314, 300315, 300316, 300317) c6( ) c7(aA); #c1(LIN288) c2(NP_001004317) c3(protein lin-28 homolog 8) c4(20559) c5(20560, 20561, 20562, 20563, 20564, 20565) c6( ) c7(T, ZI, bB, bBX, n, aj, v, q, er, J, Vs, aT, K, jf, aW, ff, r, aq, en, t, cm, eM, bE, m, fD, xb, B); #c1(LIN52) c2(NP_001019845) c3(protein lin-52 homolog) c4(27965) c5(27966, 27967, 27968, 27969, 27970, 27971) c6( ) c7(j); #c1(LIN52) c2(XP_011535622) c3(protein lin-52 homolog isoform X1) c4( ) c5(332882, 332883, 332884, 332885, 332886, 332887, 332888) c6( ) c7(j); #c1(LIN52) c2(XP_011535623) c3(protein lin-52 homolog isoform X2) c4(332889) c5(332890, 332891, 332892, 332893, 332894, 332895) c6( ) c7(j); #c1(LIN7A) c2(NP_004655) c3(protein lin-7 homolog A) c4(148548) c5(148549, 148550, 148551, 148552, 148553, 148554) c6( ) c7(zQ, afy, ci, nA, zP, aqD); #c1(LIN7B) c2(NP_071448) c3(protein lin-7 homolog B) c4(211732) c5(211733, 211734, 211735, 211736, 211737, 211738) c6( ) c7(rz); #c1(LIN7C) c2(NP_060832) c3(protein lin-7 homolog C) c4(198038) c5(198039, 198040, 198041, 198042, 198043, 198044) c6( ) c7(bL, en, v, ff, cA); #c1(LIN9) c2(NP_001257338) c3(protein lin-9 homolog isoform 2) c4(95223) c5(95224, 95225, 95226, 95227, 95228, 95229) c6( ) c7(bP, aW, atC, aT, gZ, B); #c1(LIN9) c2(NP_775106) c3(protein lin-9 homolog isoform 1) c4(249536) c5(249537, 249538, 249539, 249540, 249541, 249542) c6( ) c7(bP, aW, atC, aT, gZ, B); #c1(LIN9) c2(XP_005273159) c3(protein lin-9 homolog isoform X3) c4(284305) c5(284306, 284307, 284308, 284309, 284310, 284311) c6( ) c7(bP, aW, atC, aT, gZ, B); #c1(LIN9) c2(XP_011542475) c3(protein lin-9 homolog isoform X4) c4(340966) c5(340967, 340968, 340969, 340970, 340971, 340972) c6( ) c7(bP, aW, atC, aT, gZ, B); #c1(LING01) c2(NP_001288126) c3(leucine-rich repeat and immunoglobulin-like domain-containing nogo receptor-interacting protein 1 isoform b precursor) c4(113568) c5(113569, 113570, 113571, 113572, 113573, 113574, 113575, 113576, 113577, 113578) c6( ) c7(dw, V, Gt, wF, an); #c1(LING01) c2(NP_116197) c3(leucine-rich repeat and immunoglobulin-like domain-containing nogo receptor-interacting protein 1 isoform a precursor) c4(225706, 225707) c5(225708, 225709, 225710, 225711, 225712, 225713, 225714, 225715) c6( ) c7(dw, V, Gt, wF, an); #c1(LING02) c2(XP_011516032) c3(leucine-rich repeat and immunoglobulin-like domain-containing nogo receptor-interacting protein 2 isoform X1) c4(309227) c5(309228, 309229, 309230, 309231, 309232, 309233, 309234, 309235, 309236, 309237) c6( ) c7(Gt, ac, aw, EQ, aq, v, an, fq, xa); #c1(LING04) c2(NP_001004432) c3(leucine-rich repeat and immunoglobulin-like domain-containing nogo receptor-interacting protein 4 precursor) c4(20683) c5(20684, 20685, 20686, 20687, 20688, 20689) c6( ) c7(Gt, byQ); #c1(LINS) c2(NP_001035706) c3(protein Lines homolog) c4(32975) c5( ) c6( ) c7(QK, bZu, nA); #c1(LINS) c2(XP_005254998) c3(protein Lines homolog isoform X1) c4(273483) c5(273484, 273485, 273486, 273487, 273488, 273489) c6( ) c7(QK, bZu, nA); #c1(LINS) c2(XP_005255000) c3(protein Lines homolog isoform X2) c4(273490, 273491, 273492, 273493) c5(273494, 273495, 273496, 273497, 273498, 273499, 273500, 273501, 273502, 273503, 273504, 273505, 273506, 273507, 273508, 273509, 273510, 273511, 273512, 273513, 273514, 273515, 273516, 273517, 273518, 273519, 273520, 273521, 273522, 273523) c6( ) c7(QK, bZu, nA); #c1(LIPA) c2(NP_000226) c3(lysosomal acid lipase/cholesteryl ester hydrolase isoform 1 precursor) c4(4816, 4817, 4818, 4819, 4820, 4821, 4822, 4823) c5(4824, 4825, 4826, 4827, 4828, 4829, 4830, 4831, 4832, 4833, 4834, 4835, 4836, 4837, 4838, 4839, 4840, 4841, 4842, 4843, 4844, 4845, 4846, 4847, 4848, 4849, 4850, 4851, 4852, 4853, 4854, 4855, 4856, 4857, 4858, 4859, 4860, 4861, 4862, 4863, 4864, 4865, 4866, 4867, 4868, 4869, 4870, 4871, 4872, 4873, 4874, 4875, 4876, 4877, 4878, 4879, 4880, 4881, 4882, 4883, 4884, 4885, 4886, 4887, 4888, 4889, 4890, 4891, 4892, 4893, 4894, 4895, 4896, 4897, 4898, 4899, 4900, 4901, 4902, 4903, 4904, 4905, 4906, 4907, 4908, 4909, 4910, 4911, 4912, 4913, 4914, 4915, 4916, 4917, 4918, 4919, 4920, 4921, 4922, 4923, 4924, 4925, 4926, 4927, 4928, 4929, 4930, 4931, 4932, 4933, 4934, 4935, 4936, 4937, 4938, 4939, 4940, 4941, 4942, 4943, 4944, 4945, 4946, 4947, 4948, 4949, 4950, 4951, 4952, 4953, 4954, 4955, 4956, 4957, 4958, 4959, 4960, 4961, 4962, 4963, 4964, 4965, 4966, 4967, 4968, 4969, 4970, 4971, 4972, 4973, 4974, 4975, 4976, 4977, 4978, 4979, 4980, 4981, 4982, 4983, 4984, 4985, 4986, 4987, 4988, 4989, 4990, 4991, 4992, 4993, 4994, 4995, 4996, 4997, 4998, 4999, 5000, 5001, 5002, 5003, 5004, 5005, 5006, 5007, 5008, 5009, 5010, 5011, 5012, 5013, 5014, 5015, 5016, 5017, 5018, 5019, 5020, 5021, 5022, 5023, 5024, 5025, 5026, 5027, 5028, 5029, 5030, 5031, 5032, 5033, 5034, 5035, 5036, 5037, 5038, 5039, 5040, 5041, 5042, 5043, 5044, 5045, 5046, 5047, 5048, 5049, 5050, 5051, 5052, 5053, 5054, 5055, 5056, 5057, 5058, 5059, 5060, 5061, 5062, 5063, 5064, 5065, 5066, 5067, 5068, 5069, 5070, 5071, 5072, 5073, 5074, 5075, 5076) c6(5077, 5078, 5079, 5080, 5081, 5082, 5083, 5084, 5085, 5086, 5087, 5088, 5089, 5090, 5091, 5092, 5093, 5094, 5095, 5096, 5097) c7(dD, ea, e, aw, cR, v, j, eq, hX, x, h, ey, dQ, af, bZv, cH, ff, g, en, ej, nT, Lq, k, aEN, aKB, ek); #c1(LIPA) c2(NP_001275908) c3(lysosomal acid lipase/cholesteryl ester hydrolase isoform 2) c4( ) c5(107361, 107362, 107363, 107364, 107365, 107366, 107367) c6(107368) c7(dD, ea, e, aw, cR, v, j, eq, hX, x, h, ey, dQ, af, bZv, cH, ff, g, en, ej, nT, Lq, k, aEN, aKB, ek); #c1(LIPC) c2(XP_005254429) c3(hepatic triacylglycerol lipase isoform X1) c4(273208) c5(273209, 273210, 273211, 273212, 273213, 273214, 273215, 273216, 273217, 273218) c6( ) c7(bL, sY, dD, eR, Zz, bZw, ea, iW, oe, e, aw, cz, vr, Zv, aj, j, ah, C, v, eq, q, J, awq, TB, Zu, dY, ec, YX, vw, xV, cy, dL, jy, h, bq, dQ, db, af, A, nU, cH, cW, fc, r, bZx, Au, cM, uC, Uk, eK, bJ, kT, W, c, ac, cO, alu, Fi, ZD, eM, gZ, at, mf, cS, aS, dy, ei, GF, gT); #c1(LIPE) c2(NP_005348) c3(hormone-sensitive lipase) c4(155289) c5(155290, 155291, 155292, 155293, 155294, 155295) c6( ) c7(bL, T, dD, gU, aZ, ea, dG, j, v, eq, q, td, QJ, vH, jy, qM, kI, ND, r, aq, uC, GR, bJ, Fi, hr, gZ, aoJ, ei, gT, B, ao); #c1(LIPE) c2(XP_005258998) c3(hormone-sensitive lipase isoform X4) c4( ) c5(275915) c6( ) c7(bL, T, dD, gU, aZ, ea, dG, j, v, eq, q, td, QJ, vH, jy, qM, kI, ND, r, aq, uC, GR, bJ, Fi, hr, gZ, aoJ, ei, gT, B, ao); #c1(LIPF) c2(NP_001185757) c3(gastric triacylglycerol lipase isoform 3 precursor) c4( ) c5(76214, 76215, 76216, 76217, 76218, 76219, 76220) c6(76221, 76222) c7(ej, aW, aKB, aT); #c1(LIPF) c2(NP_001185758) c3(gastric triacylglycerol lipase isoform 1 precursor) c4(76223, 76224) c5(76225, 76226, 76227, 76228, 76229, 76230, 76231, 76232, 76233) c6(76234, 76235) c7(ej, aW, aKB, aT); #c1(LIPF) c2(NP_001185759) c3(gastric triacylglycerol lipase isoform 4 precursor) c4(76236) c5(76237) c6( ) c7(ej, aW, aKB, aT); #c1(LIPF) c2(XP_011538613) c3(gastric triacylglycerol lipase isoform X1) c4( ) c5(336335, 336336, 336337, 336338, 336339, 336340, 336341) c6(336342, 336343) c7(ej, aW, aKB, aT); #c1(LIPG) c2(NP_006024) c3(endothelial lipase precursor) c4(161246) c5(161247, 161248, 161249, 161250, 161251, 161252) c6( ) c7(P, bL, dD, eR, ea, oe, e, aw, cz, v, j, eq, Zu, ql, h, hm, vT, cH, cW, iP, cO, mg, aS, ei); #c1(LIPH) c2(NP_640341) c3(lipase member H precursor) c4(238465) c5(238466, 238467, 238468, 238469, 238470, 238471) c6( ) c7(bZy, YX, xV, bZx, bZz, bZA); #c1(LIPI) c2(NP_001289927) c3(lipase member 1 isoform 1 precursor) c4(114695) c5(114696, 114697, 114698, 114699, 114700, 114701) c6( ) c7(T, bZB, SV); #c1(LIPI) c2(NP_001289928) c3(lipase member 1 isoform 2) c4(114702, 114703) c5(114704, 114705, 114706, 114707, 114708, 114709, 114710, 114711, 114712, 114713, 114714) c6( ) c7(T, bZB, SV); #c1(LIPI) c2(NP_945347) c3(lipase member 1 isoform 5) c4(260857) c5(260858, 260859, 260860, 260861, 260862, 260863, 260864) c6( ) c7(T, bZB, SV); #c1(LIPN) c2(NP_001095939) c3(lipase member N precursor) c4(40945) c5(40946, 40947, 40948, 40949, 40950, 40951) c6( ) c7(aC); #c1(LIPT1) c2(NP_057013) c3(lipoyltransferase 1, mitochondrial precursor) c4(188464, 188465, 188466, 188467, 188468) c5(188469, 188470, 188471, 188472, 188473, 188474, 188475, 188476, 188477, 188478, 188479, 188480, 188481, 188482, 188483, 188484, 188485, 188486, 188487, 188488, 188489, 188490, 188491, 188492, 188493, 188494, 188495, 188496, 188497, 188498, 188499, 188500, 188501, 188502, 188503, 188504, 188505, 188506, 188507, 188508, 188509, 188510, 188511, 188512, 188513, 188514) c6( ) c7(ajU, C); #c1(LIPT2) c2(NP_001138341) c3(putative lipoyltransferase 2, mitochondrial precursor) c4(56185) c5(56186, 56187, 56188, 56189, 56190, 56191) c6( ) c7(fq); #c1(LITAF) c2(NP_001129945) c3(lipopolysaccharide-induced turner necrosis factor-alpha factor isoform 2) c4(52321, 52322) c5(52323, 52324, 52325, 52326, 52327, 52328, 52329, 52330, 52331, 52332, 52333) c6( ) c7(tJ, T, fM, id, Pt, xF, agU, EQ, cz, aj, aNG, j, ci, bX, MA, hF, q, zn, wv, Mm, ec, aT, h, dL, ey, bU, XZ, eL, A, Fn, aW, r, bZC, yy, pD, eF, t, dr, dR, ck, bF, pH, kB, vL, aeg, NO, at, m); #c1(LITAF) c2(XP_006721046) c3(lipopolysaccharide-induced turner necrosis factor-alpha factor isoform X1) c4( ) c5(293822, 293823, 293824, 293825, 293826, 293827, 293828, 293829) c6( ) c7(tJ, T, fM, id, Pt, xF, agU, EQ, cz, aj, aNG, j, ci, bX, MA, hF, q, zn, wv, Mm, ec, aT, h, dL, ey, bU, XZ, eL, A, Fn, aW, r, bZC, yy, pD, eF, t, dr, dR, ck, bF, pH, kB, vL, aeg, NO, at, m); #c1(LITAF) c2(XP_011521056) c3(lipopolysaccharide-induced turner necrosis factor-alpha factor isoform X2) c4(316027) c5(316028, 316029, 316030, 316031) c6( ) c7(tJ, T, fM, id, Pt, xF, agU, EQ, cz, aj, aNG, j, ci, bX, MA, hF, q, zn, wv, Mm, ec, aT, h, dL, ey, bU, XZ, eL, A, Fn, aW, r, bZC, yy, pD, eF, t, dr, dR, ck, bF, pH, kB, vL, aeg, NO, at, m); #c1(LIX1) c2(NP_694966) c3(protein limb expression 1 homolog) c4(245499) c5(245500, 245501, 245502, 245503, 245504, 245505) c6( ) c7(kf); #c1(LLGL1) c2(NP_004131) c3(lethal(2) giant larvae protein homolog 1) c4(143833) c5(143834, 143835, 143836, 143837, 143838, 143839) c6( ) c7(ck, T, aIC, s, Y, XY, hL, aT, r, aFx, bfR, ci, q, oQ, bt, B, hq); #c1(LLGL2) c2(NP_001015002) c3(lethal(2) giant larvae protein homolog 2 isoform b) c4(26128) c5(26129, 26130, 26131, 26132, 26133, 26134) c6( ) c7(T, ac, aW, M, aT, eu); #c1(LLGL2) c2(NP_001026973) c3(lethal(2) giant larvae protein homolog 2 isoform c) c4(30012) c5(30013, 30014, 30015, 30016, 30017, 30018) c6( ) c7(T, ac, aW, M, aT, eu); #c1(LLGL2) c2(NP_004515) c3(lethal(2) giant larvae protein homolog 2 isoform a) c4(147099, 147100) c5(147101, 147102, 147103, 147104, 147105, 147106, 147107, 147108, 147109, 147110, 147111, 147112, 147113, 147114) c6(147115, 147116) c7(T, ac, aW, M, aT, eu); #c1(LMAN1) c2(NP_005561) c3(protein ERGIC-53 precursor) c4(157508) c5(157509, 157510, 157511, 157512, 157513, 157514) c6( ) c7(NU, aUK, fR, e, oY, j, ci, bqA, C, hX, qh, dV, acb, ey, bU, bpU, s, mQ, eZ, fe, aUC, gZ, dX); #c1(LMAN1L) c2(NP_068591) c3(protein ERGIC-53-like precursor) c4(209729, 209730, 209731) c5(209732, 209733, 209734, 209735, 209736, 209737, 209738, 209739, 209740, 209741, 209742, 209743, 209744, 209745, 209746, 209747, 209748, 209749) c6( ) c7(pH); #c1(LMAN2L) c2(NP_001135764) c3(VIP36-like protein isoform 1 precursor) c4(53156) c5(53157, 53158, 53159, 53160, 53161, 53162, 53163, 53164) c6( ) c7(fr, bK); #c1(LMAN2L) c2(NP_110432) c3(VIP36-like protein isoform 2 precursor) c4(220333, 220334) c5(220335, 220336, 220337, 220338, 220339, 220340, 220341, 220342, 220343, 220344, 220345, 220346) c6( ) c7(fr, bK); #c1(LMAN2L) c2(XP_011510250) c3(VIP36-like protein isoform X2) c4(300845, 300846) c5(300847, 300848, 300849, 300850, 300851, 300852, 300853, 300854, 300855, 300856) c6( ) c7(fr, bK); #c1(LMBR1) c2(NP_071903) c3(limb region 1 protein homolog) c4(212171, 212172, 212173) c5(212174, 212175, 212176, 212177, 212178, 212179, 212180, 212181212182, 212183, 212184, 212185, 212186, 212187, 212188, 212189, 212190, 212191) c6( ) c7(aow, are, bZG, zG, bDk, bZE, bZD, zU, bZF, atb); #c1(LMBR1) c2(XP_005249612) c3(limb region 1 protein homolog isoform X1) c4(269729, 269730, 269731) c5(269732, 269733, 269734, 269735, 269736, 269737, 269738, 269739, 269740, 269741, 269742, 269743, 269744, 269745, 269746, 269747, 269748, 269749) c6( ) c7(aow, are, bZG, zG, bDk, bZE, bZD, zU, bZF, atb); #c1(LMBR1) c2(XP_005249615) c3(limb region 1 protein homolog isoform X4) c4(269750) c5(269751, 269752, 269753, 269754, 269755, 269756) c6( ) c7(aow, are, bZG, zG, bDk, bZE, bZD, zU, bZF, atb); #c1(LMBRD1) c2(NP_060838) c3(probable lysosomal cobalamin transporter) c4(198069, 198070) c5(198071, 198072, 198073, 198074, 198075, 198076, 198077) c6( ) c7(bZH); #c1(LMBRD1) c2(XP_011534243) c3(probable lysosomal cobalamin transporter isoform X1) c4( ) c5(330597, 330598, 330599, 330600, 330601) c6( ) c7(bZH); #c1(LMBRD2) c2(NP_001007528) c3(LMBR1 domain-containing protein 2) c4(22760, 22761) c5(22762, 22763, 22764, 22765, 22766, 22767, 22768, 22769, 22770, 22771, 22772, 22773) c6( ) c7(k); #c1(LMCD1) c2(NP_001265162) c3(LIM and cysteine-rich domains protein 1 isoform 2) c4( ) c5(97886, 97887, 97888, 97889, 97890) c6( ) c7(By, B, K); #c1(LMCD1) c2(NP_001265163) c3(LIM and cysteine-rich domains protein 1 isoform 3) c4(97891) c5(97892, 97893, 97894, 97895, 97896, 97897) c6( ) c7(By, B, K); #c1(LMCD1) c2(NP_001265164) c3(LIM and cysteine-rich domains protein 1 isoform 4) c4(97898) c5(97899, 97900, 97901, 97902, 97903, 97904) c6( ) c7(By, B, K); #c1(LMCD1) c2(NP_055398) c3(LIM and cysteine-rich domains protein 1 isoform 1) c4(180779, 180780) c5(180781, 180782, 180783, 180784, 180785, 180786, 180787, 180788, 180789) c6( ) c7(By, B, K); #c1(LMF1) c2(NP_073610) c3(lipase maturation factor 1) c4(213124, 213125) c5(213126, 213127, 213128, 213129, 213130, 213131, 213132, 213133, 213134, 213135, 213136, 213137, 213138) c6( ) c7(ar, vG, bZI, bX, GR, Zx); #c1(LMF1) c2(XP_006720989) c3(lipase maturation factor 1 isoform X2) c4(293802, 293803, 293804) c5( ) c6( ) c7(ar, vG, bZI, bX, GR, Zx); #c1(LMF1) c2(XP_011520916) c3(lipase maturation factor 1 isoform X1) c4(315911, 315912) c5( ) c6( ) c7(ar, vG, bZI, bX, GR, Zx); #c1(LMF1) c2(XP_011520917) c3(lipase maturation factor 1 isoform X5) c4( ) c5(315913, 315914) c6( ) c7(ar, vG, bZI, bX, GR, Zx); #c1(LMF1) c2(XP_011520919) c3(lipase maturation factor 1 isoform X7) c4( ) c5(315915, 315916, 315917, 315918, 315919, 315920, 315921, 315922, 315923, 315924, 315925, 315926, 315927, 315928, 315929, 315930, 315931) c6( ) c7(ar, vG, bZI, bX, GR, Zx); #c1(LMF1) c2(XP_011520920) c3(lipase maturation factor 1 isoform X8) c4( ) c5(315932, 315933, 315934, 315935, 315936, 315937, 315938, 315939, 315940, 315941, 315942) c6( ) c7(ar, vG, bZI, bX, GR, Zx); #c1(LMLN) c2(NP_001129521) c3(leishmanolysin-like peptidase isoform 1) c4(51825, 51826) c5(51827, 51828, 51829, 51830, 51831, 51832, 51833, 51834, 51835, 51836, 51837, 51838) c6( ) c7(T, qo, Uc, Ol, if, e, aA, it, fr, ci, qN, PJ, asr, q, ad, rc, dP, ft, aE, Ig, acu, aCX, jZ, pX, dV, aT, aDt, bOu, NM, ae, VF, d, aW, Y, cr, r, Io, aF, xH, bSZ, Fq, q, kk, iK, bz, op, ck, qe, c, eM, aDs, dc, asq, vA, agI, DC, NI, uz, ER, eg, bt, Pr, B); #c1(LMLN) c2(NP_149018) c3(leishmanolysin-like peptidase isoform 2) c4(226769) c5(226770, 226771, 226772, 226773, 226774, 226775) c6( ) c7(T, qo, Uc, Ol, if, e, aA, it, fr, ci, qN, PJ, asr, q, ad, rc, dP, ft, aE, Ig, acu, aCX, jZ, pX, dV, aT, aDt, bOu, NM, ae, VF, d, aW, Y, cr, r, Io, aF, xH, bSZ, Fq, g, kk, iK, bz, op, ck, qe, c, eM, aDs, dc, asq, vA, agI, DC, NI, uz, ER, eq, bt, Pr, B); #c1(LMNA) c2(NP_001244303) c3(lamin isoform D) c4(92108) c5(92109, 92110, 92111, 92112, 92113, 92114) c6( ) c7(T, rV, ea, qj, ci, x, rw, Eo, K, bU, bc, bZR, azu, aCg, aW, Az, La, g, cm, GR, ly, wK, mx, aep, U, beI, cX, bZO, k, in, iu, dD, bAB, aWG, n, arl, aj, fr, cd, eW, md, jz, no, cc, rC, Ak, h, jy, bl, Dz, uc, pj, asp, aiB, lb, mo, bxJ, bfW, GG, bP, afc, mg, rx, YH, ZY, bD, Pr, bL, bZJ, fM, eR, mr, wL, fG, rf, cz, cR, aTI, v, j, bX, nS, V, AD, bZP, J, q, QI, MR, nv, nX, aT, kf, adm, aWs, jj, avt, aOV, ae, bZN, af, VC, avg, kl, wr, iU, NE, bIV, r, eS, bZM, aHG, ck, bLr, ac, bNJ, mG, km, JL, mf, Gg, aan, bAQ, id, atk, aZ, jh, eq, fu, tO, ad, kL, hX, fU, LL, Db, Dq, QJ, oj, vc, anq, anR, bZL, qt, KS, xs, eZ, bZQ, dq, aF, Bu, bz, dr, gZ, Km, aS, Fw, ei, QV, aed, bZK, gq, jr, pC); #c1(LMNA) c2(NP_001269553) c3(lamin isoform E) c4(101908) c5(101909, 101910, 101911, 101912, 101913, 101914, 101915, 101916, 101917, 101918) c6( ) c7(T, rV, ea, qj, ci, x, rw, Eo, K, bU, bc, bZR, azu, aCg, aW, Az, La, g, cm, GR, ly, wK, mx, aep, U, bel, cX, bZO, k, in, iu, dD, bAB, aWG, n, arl, aj, fr, cd, eW, md, jz, no, cc, rC, Ak, h, jy, bl, Dz, uc, pj, asp, aiB, lb, mo, bxJ, bfW, GG, bP, afc, mg, rx, YH, ZY, bD, Pr, bL, bZJ, fM, eR, mr, wL, fG, rf, cz, cR, aTI, v, j, bX, nS, V, AO, bZP, J, q, QI, MR, nv, nX, aT, kf, adm, aWs, jj, avt, aOV, ae, bZN, af, VC, avg, kl, wr, iU, NE, bIV, r, eS, bZM, aHG, ck, bLr, ac, bNJ, mG, km, JL, mf, Gg, aan, bAQ, id, atk, aZ, jh, eq, fu, tO, ad, kL, hX, fU, LL, Db, Dq, QJ, oj, vc, anq, anR, bZL, qt, KS, xs, eZ, bZQ, dq, aF, Bu, bz, dr, gZ, Km, aS, Fw, ei, QV, aed, bZK, gq, jr, pC); #c1(LMNA) c2(NP_001269554) c3(lamin isoform C) c4(101919) c5(101920, 101921, 101922, 101923, 101924, 101925, 101926, 101927, 101928, 101929, 101930, 101931, 101932, 101933, 101934, 101935, 101936, 101937, 101938, 101939, 101940, 101941, 101942) c6( ) c7(T, rV, ea, qj, ci, x, rw, Eo, K, bU, be, bZR, azu, aCg, aW, Az, La, g, cm, GR, ly, wK, mx, aep, U, bel, cX, bZO, k, in, iu, dD, bAB, aWG, n, arl, aj, fr, cd, eW, md, jz, no, cc, rC, Ak, h, jy, bl, Dz, uc, pj, asp, aiB, lb, mo, bxJ, bfW, GG, bP, afc, mg, rx, YH, ZY, bD, Pr, bL, bZJ, fM, eR, mr, wL, fG, rf, cz, cR, aTI, v, j, bX, nS, V, AO, bZP, J, q, QI, MR, nv, nX, aT, kf, adm, aWs, jj, avt, aOV, ae, bZN, af, VC, avg, kl, wr, iU, NE, bIV, r, eS, bZM, aHG, ck, bLr, ac, bNJ, mG, km, JL, mf, Gg, aan, bAQ, id, atk, aZ, jh, eq, fu, tO, ad, kL, hX, fU, LL, Db, Dq, QJ, oj, vc, anq, anR, bZL, qt, KS, xs, eZ, bZQ, dq, aF, Bu, bz, dr, gZ, Km, aS, Fw, ei, QV, aed, bZK, gq, jr, pC); #c1(LMNA) c2(NP_001269555) c3(lamin isoform A-delta50) c4(101943, 101944) c5(101945, 101946, 101947, 101948, 101949, 101950, 101951, 101952) c6( ) c7(T, rV, ea, qj, ci, x, rw, Eo, K, bU, bc, bZR, azu, aCg, aW, Az, La, g, cm, GR, ly, wK, mx, aep, U, bel, cX, bZO, k, in, iu, dD, bAB, aWG, n, arl, aj, fr, cd, eW, md, jz, no, cc, rC, Ak, h, jy, bl, Dz, uc, pj, asp, aiB, lb, mo, bxJ, bfW, GG, bP, afc, mg, rx, YH, ZY, bD, Pr, bL, bZJ, fM, eR, mr, wL, fG, rf, cz, cR, aTI, v, j, bX, nS, V, AO, bZP, J, q, QI, MR, nv, nX, aT, kf, adm, aWs, jj, avt, aOV, ae, bZN, af, VC, avg, kl, wr, iU, NE, bIV, r, eS, bZM, aHG, ck, bLr, ac, bNJ, mG, km, JL, mf, Gg, aan, bAQ, id, atk, aZ, jh, eg, fu, tO, ad, kL, hX, fU, LL, Db, Dg, QJ, oj, vc, anq, anR, bZL, qt, KS, xs, eZ, bZQ, dq, aF, Bu, bz, dr, gZ, Km, aS, Fw, ei, QV, aed, bZK, gq, jr, pC); #c1(LMNA) c2(NP_733821) c3(lamin isoform A) c4(247166) c5(247167, 247168, 247169, 247170, 247171, 247172, 247173, 247174, 247175) c6( ) c7(T, rV, ea, qj, ci, x, rw, Eo, K, bU, bc, bZR, azu, aCg, aW, Az, La, g, cm, GR, ly, wK, mx, aep, U, bel, cX, bZO, k, in, iu, dD, bAB, aWG, n, arl, aj, fr, cd, eW, md, jz, no, cc, rC, Ak, h, jy, bl, Dz, uc, pj, asp, aiB, lb, mo, bxJ, bfW, GG, bP, afc, mg, rx, YH, ZY, bD, Pr, bL, bZJ, fM, eR, mr, wL, fG, rf, cz, cR, aTI, v, j, bX, nS, V, AO, bZP, J, q, QI, MR, nv, nX, aT, kf, adm, aWs, jj, avt, aOV, ae, bZN, af, VC, avg, kl, wr, iU, NE, bIV, r, eS, bZM, aHG, ck, bLr, ac, bNJ, mG, km, JL, mf, Gg, aan, bAQ, id, atk, aZ, jh, eq, fu, tO, ad, kL, hX, fU, LL, Db, Dq, QJ, oj, vc, anq, anR, bZL, qt, KS, xs, eZ, bZQ, dq, aF, Bu, bz, dr, gZ, Km, aS, Fw, ei, QV, aed, bZK, gq, jr, pC); #c1(LMNA) c2(NP_733822) c3(lamin isoform A-delta10) c4(247176, 247177) c5(247178, 247179, 247180, 247181, 247182, 247183, 247184) c6( ) c7(T, rV, ea, qj, ci, x, rw, Eo, K, bU, be, bZR, azu, aCg, aW, Az, La, g, cm, GR, ly, wK, mx, aep, U, bel, cX, bZO, k, in, iu, dD, bAB, aWG, n, arl, aj, fr, cd, eW, md, jz, no, cc, rC, Ak, h, jy, bl, Dz, uc, pj, asp, aiB, lb, mo, bxJ, bfW, GG, bP, afc, mg, rx, YH, ZY, bD, Pr, bL, bZJ, fM, eR, mr, wL, fG, rf, cz, cR, aTI, v, j, bX, nS, V, AO, bZP, J, q, QI, MR, nv, nX, aT, kf, adm, aWs, jj, avt, aOV, ae, bZN, af, VC, avg, kl, wr, iU, NE, bIV, r, eS, bZM, aHG, ck, bLr, ac, bNJ, mG, km, JL, mf, Gg, aan, bAQ, id, atk, aZ, jh, eq, fu, tO, ad, kL, hX, fU, LL, Db, Dq, QJ, oj, vc, anq, anR, bZL, qt, KS, xs, eZ, bZQ, dq, aF, Bu, bz, dr, gZ, Km, aS, Fw, ei, QV, aed, bZK, gq, jr, pC); #c1(LMNB1) c2(NP_005564) c3(lamin-B1 isoform 1) c4(157515) c5(157516, 157517, 157518, 157519, 157520, 157521) c6( ) c7(T, dD, ea, HM, eq, mF, V, eW, aE, QJ, rC, ey, K, cb, bZT, aq, iR, c, kB, U, bZS, cS, bee, B); #c1(LMNB2) c2(NP_116126) c3(lamin-B2) c4(225436) c5(225437, 225438, 225439, 225440, 225441, 225442, 225443, 225444, 225445, 225446) c6( ) c7(KI, KE, LL, IR, vW, xA, eR, aA, vw, An, aF, dy, ah, aSO, Fw, jj, BB, GR); #c1(LMNTD1) c2(NP_001139199) c3(lamin tail domain-containing protein 1 isoform 3) c4(58948) c5(58949, 58950, 58951, 58952, 58953, 58954, 58955) c6( ) c7(AW, fq, cd); #c1(LMNTD1) c2(NP_001243195) c3(lamin tail domain-containing protein 1 isoform 5) c4( ) c5(90094, 90095, 90096, 90097, 90098) c6( ) c7(AW, fq, cd); #c1(LMNTD1) c2(NP_689803) c3(lamin tail domain-containing protein 1 isoform 2) c4(244009) c5(244010, 244011, 244012, 244013, 244014, 244015) c6( ) c7(AW, fq, cd); #c1(LMNTD1) c2(XP_011518880) c3(lamin tail domain-containing protein 1 isoform X2) c4(313219, 313220, 313221) c5( ) c6( ) c7(AW, fq, cd); #c1(LMNTD1) c2(XP_011518881) c3(lamin tail domain-containing protein 1 isoform X3) c4( ) c5(313222, 313223, 313224, 313225, 313226, 313227) c6( ) c7(AW, fq, cd); #c1(LMNTD1) c2(XP_011518882) c3(lamin tail domain-containing protein 1 isoform XI) c4(313228, 313229) c5(313230, 313231, 313232, 313233, 313234, 313235) c6( ) c7(AW, fq, cd); #c1(LMNTD1) c2(XP_011518890) c3(lamin tail domain-containing protein 1 isoform X6) c4( ) c5(313236, 313237, 313238, 313239, 313240, 313241, 313242, 313243, 313244, 313245, 313246, 313247) c6( ) c7(AW, fq, cd); #c1(LM01) c2(NP_001257357) c3(rhombotin-1 isoform b) c4(95254) c5(95255, 95256, 95257, 95258, 95259, 95260) c6( ) c7(ck, x, T, iM, je, aW, oe, apK, aT, kH, cj, r, aj, cm, k, hF, q, eK); #c1(LM01) c2(NP_002306) c3(rhombotin-1 isoform a) c4(127455) c5(127456, 127457, 127458, 127459, 127460, 127461, 127462) c6( ) c7(ck, x, T, iM, je, aW, oe, apK, aT, kH, cj, r, aj, cm, k, hF, q, eK); #c1(LM02) c2(NP_001135787) c3(rhombotin-2 isoform 2) c4( ) c5(53282, 53283, 53284, 53285, 53286) c6( ) c7(T, fM, dA, eX, jh, Hn, hF, pd, ad, x, av, aE, aT, kH, eV, dL, ae, je, qt, aW, jg, cm, LV, ck, iM, bP, iT, at, k, bt); #c1(LM02) c2(NP_005565) c3(rhombotin-2 isoform 1) c4(157522, 157523) c5(157524, 157525, 157526, 157527, 157528, 157529, 157530, 157531, 157532) c6( ) c7(T, fM, dA, eX, jh, Hn, hF, pd, ad, x, av, aE, aT, kH, eV, dL, ae, je, qt, aW, jg, cm, LV, ck, iM, bP, iT, at, k, bt); #c1(LM03) c2(NP_001001395) c3(LIM domain only protein 3 isoform 1) c4( ) c5(18254, 18255, 18256, 18257, 18258, 18259, 18260, 18261, 18262, 18263, 18264, 18265, 18266, 18267, 18268, 18269, 18270, 18271, 18272, 18273, 18274, 18275, 18276, 18277, 18278, 18279, 18280, 18281, 18282, 18283, 18284, 18285, 18286, 18287, 18288, 18289, 18290, 18291, 18292, 18293, 18294, 18295, 18296, 18297, 18298, 18299, 18300, 18301, 18302, 18303, 18304, 18305, 18306, 18307, 18308, 18309, 18310, 18311, 18312, 18313, 18314, 18315, 18316, 18317, 18318, 18319, 18320, 18321, 18322, 18323) c6( ) c7(T, aUk, v, Jd, Ea, bZV, VV, iX, Sb, bZU, gI, K, bK, he, bME, aqa, aWm, aog, yL, bds, g, Eg, FX, cm, bz, eM, Qu, amu, Gp, iu); #c1(LM03) c2(NP_001230540) c3(LIM domain only protein 3 isoform 2) c4(86324) c5(86325, 86326, 86327, 86328, 86329, 86330, 86331, 86332, 86333, 86334, 86335, 86336, 86337, 86338, 86339, 86340, 86341, 86342, 86343, 86344, 86345, 86346, 86347) c6( ) c7(T, aUk, v, Jd, Ea, bZV, VV, iX, Sb, bZU, gI, K, bK, he, bME, aqa, aWm, aog, yL, bds, g, Eg, FX, cm, bz, eM, Qu, amu, Gp, iu); #c1(LM03) c2(NP_001230541) c3(LIM domain only protein 3 isoform 3) c4(86348, 86349, 86350, 86351, 86352, 86353, 86354, 86355, 86356) c5(86357, 86358, 86359, 86360, 86361, 86362, 86363, 86364) c6( ) c7(T, aUk, v, Jd, Ea, bZV, VV, iX, Sb, bZU, gI, K, bK, he, bME, aqa, aWm, aog, yL, bds, g, Eg, FX, cm, bz, eM, Qu, amu, Gp, iu); #c1(LM07) c2(NP_005349) c3(LIM domain only protein 7 isoform 1) c4(155296) c5(155297, 155298, 155299, 155300, 155301, 155302, 155303) c6( ) c7(A, T, oe, ad, oj); #c1(LM07) c2(NP_056667) c3(LIM domain only protein 7 isoform 2) c4(188113) c5(188114, 188115, 188116, 188117, 188118) c6( ) c7(A, T, oe, ad, oj); #c1(LM0D1) c2(NP_036266) c3(leiomodin-1) c4(172706, 172707, 172708, 172709) c5(172710, 172711, 172712, 172713, 172714, 172715, 172716, 172717, 172718, 172719, 172720, 172721, 172722, 172723, 172724, 172725, 172726, 172727) c6( ) c7(dP, A, aaG, hr, hD, at, dL, act, an); #c1(LM0D3) c2(NP_001291347) c3(leiomodin-3) c4(115668) c5(115669, 115670, 115671, 115672, 115673, 115674, 115675, 115676, 115677, 115678, 115679, 115680, 115681, 115682) c6( ) c7(Am); #c1(LMTK2) c2(NP_055731) c3(serine/threonine-protein kinase LMTK2 precursor) c4(183167) c5(183168, 183169, 183170, 183171, 183172, 183173) c6( ) c7(g, ae, iu, ad, Ea); #c1(LMTK3) c2(NP_001073903) c3(serine/threonine-protein kinase LMTK3) c4(36419) c5(36420, 36421, 36422, 36423, 36424, 36425) c6( ) c7(aW, aF, aA, aT); #c1(LMX1A) c2(NP_001167540) c3(LIM homeobox transcription factor 1-alpha) c4(69042) c5(69043, 69044, 69045, 69046, 69047, 69048, 69049, 69050, 69051, 69052, 69053, 69054, 69055, 69056) c6( ) c7(bL, if, aA, cz, n, dL, aF, m, Ea, an, qN, t, eL, bA); #c1(LMX1A) c2(XP_011507841) c3(LIM homeobox transcription factor 1-alpha isoform X2) c4( ) c5(297981) c6( ) c7(bL, if, aA, cz, n, dL, aF, m, Ea, an, qN, t, eL, bA); #c1(LMX1B) c2(NP_001167617) c3(LIM homeobox transcription factor 1-beta isoform 3) c4(69414) c5(69415, 69416, 69417, 69418, 69419, 69420) c6( ) c7(T, bO, bZW, pn, er, Na, XW, MS, Nc, an, dQ, he, wt, Cr, dH, byn, ih, wE, bZX, dw, t, fq, bUq, bN, zV, bbE, pZ, dy, m, sH); #c1(LMX1B) c2(NP_001167618) c3(LIM homeobox transcription factor 1-beta isoform 2) c4(69421) c5(69422, 69423, 69424, 69425, 69426, 69427) c6( ) c7(T, bO, bZW, pn, er, Na, XW, MS, Nc, an, dQ, he, wt, Cr, dH, byn, ih, wE, bZX, dw, t, fq, bUq, bN, zV, bbE, pZ, dy, m, sH); #c1(LMX1B) c2(NP_002307) c3(LIM homeobox transcription factor 1-beta isoform 1) c4(127463, 127464) c5(127465, 127466, 127467, 127468, 127469, 127470, 127471, 127472, 127473, 127474, 127475, 127476, 127477) c6( ) c7(T, bO, bZW, pn, er, Na, XW, MS, Nc, an, dQ, he, wt, Cr, dH, byn, ih, wE, bZX, dw, t, fq, bUq, bN, zV, bbE, pZ, dy, m, sH); #c1(LNPEP) c2(NP_005566) c3(leucyl-cystinyl aminopeptidase isoform 1) c4(157533) c5(157534, 157535, 157536, 157537, 157538, 157539, 157540, 157541, 157542, 157543, 157544, 157545) c6( ) c7(bL, bM, T, jv, Ke, wu, e, jx, cz, bB, n, aj, v, fr, lu, zP, q, J, eW, F, ot, di, afn, aT, h, wm, MO, nJ, avR, aW, cr, r, tv, aq, tu, g, cl, t, uC, avT, es, cT, rR, avS, bE, AM, dJ, m, y, 8); #c1(LNPEP) c2(NP_787116) c3(leucyl-cystinyl aminopeptidase isoform 2) c4(252127) c5( ) c6( ) c7(bL, bM, T, jv, Ke, wu, e, jx, cz, bB, n, aj, v, fr, lu, zP, q, J, eW, F, et, di, afn, aT, h, wm, MO, nJ, avR, aW, cr, r, tv, aq, tu, g, cl, t, uC, avT, es, cT, rR, avS, bE, AM, dJ, m, y, B); #c1(LNX1) c2(NP_116011) c3(E3 ubiquitin-protein ligase LNX isoform b precursor) c4(225198) c5(225199, 225200, 225201, 225202, 225203, 225204) c6( ) c7(wQ, aap, d, lR, oe, lf, ah, bZY, Ea, FX, eA); #c1(LNX1) c2(XP_005265843) c3(E3 ubiquitin-protein ligase LNX isoform X1) c4(279741, 279742, 279743, 279744, 279745, 279746) c5(279747, 279748, 279749, 279750, 279751, 279752, 279753, 279754, 279755, 279756, 279757, 279758, 279759, 279760, 279761, 279762, 279763, 279764, 279765, 279766, 279767, 279768, 279769, 279770, 279771, 279772, 279773, 279774, 279775, 279776, 279777, 279778, 279779, 279780, 279781, 279782) c6( ) c7(wQ, aap, d, IR, oe, lf, ah, bZY, Ea, FX, eA); #c1(LNX2) c2(NP_699202) c3(ligand of Numb protein X 2) c4(245898) c5(245899, 245900, 245901, 245902, 245903, 245904) c6( ) c7(aw, q, jh, r); #c1(L0C100288966) c2(NP_001244291) c3(uncharacterized protein L0C100288966) c4(92101) c5(92102, 92103, 92104, 92105, 92106, 92107) c6( ) c7(T, aW, aT, m, bu, t, ae, ad); #c1(L0C101060321) c2(NP_001278391) c3(TBC1 domain family member-like) c4(109611, 109612, 109613, 109614, 109615, 109616) c5(109617, 109618, 109619, 109620, 109621, 109622, 109623, 109624, 109625, 109626, 109627, 109628, 109629, 109630, 109631, 109632, 109633, 109634, 109635, 109636, 109637, 109638, 109639, 109640, 109641, 109642, 109643, 109644, 109645, 109646, 109647, 109648, 109649, 109650, 109651, 109652, 109653, 109654, 109655, 109656, 109657, 109658, 109659, 109660, 109661, 109662, 109663, 109664, 109665, 109666) c6( ) c7(ae, ad); #c1(L0C101060321) c2(XP_006725438) c3(TBC1 domain family member-like isoform X1) c4( ) c5(296806, 296807) c6( ) c7(ae, ad); #c1(L0C102723475) c2(XP_006724009) c3(potassium voltage-gated channel subfamily E member 1 isoform X1) c4( ) c5(295589, 295590, 295591, 295592, 295593, 295594, 295595, 295596, 295597, 295598) c6( ) c7(bUz); #c1(L0C102723996) c2(XP_006723962) c3(ICOS ligand isoform X1) c4( ) c5(295579, 295580) c6( ) c7(Ng, Kd, ck, Nr, OW, Bv, bM, A, Dg, Y, aA, po, wV, aF, iV, aaO, y, bt, eA, Wt); #c1(L0C102723996) c2(XP_006723963) c3(ICOS ligand isoform X4) c4(295581) c5(295582, 295583, 295584, 295585, 295586, 295587, 295588) c6( ) c7(Nq, Kd, ck, Nr, OW, Bv, bM, A, Dq, Y, aA, po, wV, aF, iV, aaO, y, bt, eA, Wt); #c1(L0C102724127) c2(XP_011544335) c3(TP53-target gene 3 protein) c4(343460) c5(343461, 343462, 343463, 343464, 343465, 343466, 343467, 343468, 343469, 343470, 343471, 343472) c6( ) c7(T); #c1(L0C102724560) c2(XP_011544402) c3(cystathionine beta-synthase isoform X2) c4(343473, 343474, 343475, 343476) c5(343477, 343478, 343479, 343480, 343481, 343482, 343483, 343484, 343485, 343486, 343487, 343488, 343489, 343490, 343491, 343492, 343493, 343494, 343495, 343496, 343497, 343498, 343499, 343500, 343501, 343502, 343503, 343504, 343505, 343506, 343507, 343508, 343509, 343510, 343511, 343512) c6( ) c7(ng, T, dD, ea, iW, e, al, fd, aA, sM, cR, aj, v, j, ci, C, nA, bB, aY, eq, q, J, ad, ip, av, M, aT, iY, dL, aBR, K, ux, is, aBQ, ae, dF, af, eL, MX, aW, oV, PX, Zf, fc, r, dN, aq, fe, aF, t, f, bz, dr, bN, eK, ck, bF, mO, rR, lU, ac, lp, bE, aq, aBO, ayS, Nb, gX, fP, uo, wE, wR, aS, m, cP, bt, B, us); #c1(L0C102724770) c2(XP_006724997) c3(protein DGCR6) c4(296508) c5(296509, 296510, 296511, 296512, 296513, 296514) c6( ) c7(RX, agd, bN, hq); #c1(L0C102725016) c2(XP_006725712) c3(serine/threonine-protein phosphatase 2A regulatory subunit B″ subunit beta isoform X1) c4(296963) c5(296964) c6( ) c7(vi); #c1(L0C102725016) c2(XP_011545804) c3(serine/threonine-protein phosphatase 2A regulatory subunit B″ subunit beta isoform X2) c4( ) c5(344662) c6( ) c7(vi); #c1(L0C102725035) c2(XP_006726376) c3(leukocyte immunoglobulin-like receptor subfamily B member 3 isoform X6) c4(297147, 297148, 297149) c5(297150, 297151, 297152, 297153, 297154, 297155, 297156, 297157, 297158, 297159, 297160, 297161, 297162, 297163, 297164, 297165, 297166, 297167) c6( ) c7(LB); #c1(L0C102725035) c2(XP_006726377) c3(leukocyte immunoglobulin-like receptor subfamily B member 3 isoform X7) c4(297168, 297169) c5(297170, 297171, 297172, 297173, 297174, 297175, 297176, 297177, 297178, 297179, 297180, 297181, 297182, 297183, 297184, 297185, 297186, 297187, 297188, 297189, 297190, 297191, 297192) c6( ) c7(LB); #c1(L0C102725035) c2(XP_011546877) c3(leukocyte immunoglobulin-like receptor subfamily B member 3 isoform X2) c4(345731, 345732) c5(345733, 345734, 345735, 345736, 345737, 345738) c6( ) c7(LB); #c1(L0C400499) c2(XP_006721060) c3(putative uncharacterized protein L0C400499 isoform X2) c4(293831) c5(293832, 293833, 293834, 293835, 293836, 293837, 293838) c6( ) c7(j); #c1(L0C400927-CSNKIE) c2(NP_001276841) c3(casein kinase 1 isoform epsilon) c4(108465, 108466, 108467, 108468) c5(108469, 108470, 108471, 108472, 108473, 108474, 108475, 108476, 108477, 108478, 108479, 108480, 108481, 108482, 108483, 108484, 108485, 108486, 108487, 108488, 108489, 108490, 108491, 108492, 108493, 108494, 108495, 108496, 108497, 108498, 108499, 108500, 108501, 108502, 108503, 108504, 108505, 108506, 108507, 108508) c6( ) c7(T, aWm, aW, aIR, aT, Nt, gI, aqm, bK, ae, ad); #c1(L0C645177) c2(XP_011519208) c3(lymphoid-restricted membrane protein-like) c4( ) c5(313790) c6( ) c7(aw); #c1(LONP1) c2(NP_001263408) c3(Ion protease homolog, mitochondrial isoform 2) c4( ) c5(97277) c6( ) c7(lD, T, am, fM, eX, jh, aA, fd, aj, Gn, ci, sl, cd, J, ad, cc, aE, bQV, rA, kH, aT, cy, h, eV, K, ae, N, eu, ly, xX, d, bZZ, aW, ff, hl, kp, aF, uF, en, hf, iK, bz, GR, LS, lx, Cv, ck, eM, bE, cj, bt, it, jr); #c1(LONP1) c2(NP_001263409) c3(Ion protease homolog, mitochondrial isoform 3) c4(97278) c5(97279, 97280, 97281, 97282, 97283) c6( ) c7(lD, T, am, fM, eX, jh, aA, fd, aj, Gn, ci, sl, cd, J, ad, cc, aE, bQV, rA, kH, aT, cy, h, eV, K, ae, N, eu, ly, xX, d, bZZ, aW, ff, hl, kp, aF, uF, en, hf, iK, bz, GR, LS, lx, Cv, ck, eM, bE, cj, bt, it, jr); #c1(LONP1) c2(NP_004784) c3(Ion protease homolog, mitochondrial isoform 1 precursor) c4(149615, 149616) c5(149617, 149618, 149619, 149620, 149621, 149622, 149623, 149624, 149625, 149626, 149627, 149628) c6( ) c7(lD, T, am, fM, eX, jh, aA, fd, aj, Gn, ci, sl, cd, J, ad, cc, aE, bQV, rA, kH, aT, cy, h, eV, K, ae, N, eu, ly, xX, d, bZZ, aW, ff, hl, kp, aF, uF, en, hf, iK, bz, GR, LS, lx, Cv, ck, eM, bE, cj, bt, it, jr); #c1(LONRF1) c2(NP_689484) c3(LON peptidase N-terminal domain and RING finger protein 1) c4(242841) c5(242842, 242843, 242844, 242845, 242846, 242847) c6( ) c7(oe, q); #c1(LOR) c2(NP_000418) c3(loricrin) c4(8778, 8779) c5(8780, 8781) c6( ) c7(T, bCq, iM, lU, bnY, je, bVu, arE, hk, ff, cr, by, fn, lQ, Xk, en, eE, bc); #c1(LOR) c2(XP_011507843) c3(loricrin isoform X1) c4( ) c5(297982, 297983, 297984, 297985, 297986, 297987, 297988, 297989, 297990, 297991, 297992) c6( ) c7(T, bCq, iM, lU, bnY, je, bVu, arE, hk, ff, cr, by, fn, lQ, Xk, en, eE, bc); #c1(LOX) c2(NP_002308) c3(protein-lysine 6-oxidase isoform 1 preproprotein) c4(127478, 127479, 127480) c5(127481, 127482, 127483, 127484, 127485, 127486, 127487, 127488, 127489, 127490, 127491, 127492, 127493, 127494, 127495, 127496, 127497, 127498) c6( ) c7(T, aC, lP, ea, e, fd, bB, fn, ci, cab, aE, ws, K, eL, be, cp, iE, aW, eE, iP, eY, xd, eM, U, uo, uJ, m, Vj, dD, cd, aOu, ep, h, dL, vx, dx, pl, MX, zq, aq, vD, bm, pg, alo, it, B, fl, fG, jx, aA, cR, tc, cz, j, Eh, q, eA, aT, ae, bA, eV, Y, la, r, iy, en, t, amF, c, dh, aZ, eq, ad, hX, av, le, ab, fn, lU, aln, alk, d, lU, cH, qt, ff, eH, dq, aF, si, iR, bz, bE, caa, akQ, Uj, bE, gZ, aS, X, us); #c1(LOXHD1) c2(NP_001138944) c3(lipoxygenase homology domain-containing protein 1 isoform 2) c4(58447) c5(58448, 58449, 58450, 58451, 58452, 58453, 58454, 58455, 58456, 58457, 58458) c6( ) c7(cac, Lu, bCJ); #c1(LOXHD1) c2(NP_001138945) c3(lipoxygenase homology domain-containing protein 1 isoform 3) c4( ) c5(58459, 58460, 58461, 58462, 58463) c6( ) c7(cac, Lu, bCJ); #c1(LOXHD1) c2(NP_001166600) c3(lipoxygenase homology domain-containing protein 1 isoform 4) c4( ) c5(68569, 68570, 68571, 68572, 68573) c6( ) c7(cac, Lu, bCJ); #c1(LOXHD1) c2(NP_653213) c3(lipoxygenase homology domain-containing protein 1 isoform 1) c4(239094, 239095, 239096) c5(239097, 239098, 239099, 239100, 239101, 239102, 239103, 239104, 239105, 239106, 239107, 239108, 239109, 239110, 239111, 239112, 239113, 239114) c6( ) c7(cac, Lu, bCJ); #c1(LOXHD1) c2(XP_006722454) c3(lipoxygenase homology domain-containing protein 1 isoform X7) c4(294713) c5(294714, 294715, 294716, 294717, 294718, 294719) c6( ) c7(cac, Lu, bCJ); #c1(LOXHD1) c2(XP_011524105) c3(lipoxygenase homology domain-containing protein 1 isoform X2) c4(318674, 318675) c5( ) c6( ) c7(cac, Lu, bCJ); #c1(LOXHD1) c2(XP_011524106) c3(lipoxygenase homology domain-containing protein 1 isoform X3) c4(318676, 318677) c5(318678, 318679, 318680, 318681, 318682, 318683, 318684) c6( ) c7(cac, Lu, bCJ); #c1(LOXL1) c2(NP_005567) c3(lysyl oxidase homolog 1 preproprotein) c4(157546, 157547) c5(157548, 157549, 157550, 157551, 157552, 157553, 157554, 157555, 157556, 157557, 157558, 157559) c6( ) c7(HQ, T, lP, fG, e, lJ, bER, aT, brC, dL, K, eL, dH, aW, dw, cad, xd, W, pZ, vD, Uj, uJ, sa, us); #c1(LOXL2) c2(NP_002309) c3(lysyl oxidase homolog 2 precursor) c4(127499, 127500, 127501, 127502) c5(127503, 127504, 127505, 127506, 127507, 127508, 127509, 127510, 127511, 127512, 127513, 127514, 127515, 127516, 127517, 127518, 127519, 127520, 127521, 127522, 127523, 127524, 127525, 127526) c6( ) c7(T, fG, ht, jx, aA, n, ci, q, hX, jz, Tf, Ot, aT, hu, be, mu, wr, aW, ff, r, aF, en, q, eY, Qu, uJ, it, X, us); #c1(LOXL3) c2(NP_001276093) c3(lysyl oxidase homolog 3 isoform 2 precursor) c4(107995) c5(107996, 107997, 107998, 107999, 108000, 108001) c6( ) c7(us, aW, Ot, ci, aT); #c1(LOXL3) c2(NP_115992) c3(lysyl oxidase homolog 3 isoform 1 precursor) c4(225133, 225134, 225135) c5(225136, 225137, 225138, 225139, 225140, 225141, 225142, 225143, 225144, 225145, 225146, 225147, 225148, 225149, 225150, 225151, 225152, 225153) c6( ) c7(us, aW, Ot, ci, aT); #c1(LOXL4) c2(NP_115587) c3(lysyl oxidase homolog 4 precursor) c4(223288) c5(223289, 223290, 223291, 223292, 223293, 223294) c6( ) c7(dP, lD, T, aW, ff, aT, dL, ci, en, iK, eL, us, BY); #c1(LPA) c2(NP_005568) c3(apolipoprotein(a) precursor) c4(157560) c5(157561, 157562, 157563, 157564, 157565, 157566, 157567, 157568, 157569, 157570) c6( ) c7(bL, bM, sY, T, dD, ed, eR, ea, e, aw, aA, cz, bB, aj, v, j, ci, ah, vr, eq, aY, V, ss, fK, q, ad, acs, Zu, dY, ec, M, aT, h, wx, dL, mL, jj, dQ, ae, af, eu, hm, eL, A, IR, cH, cW, aW, bvD, mQ, eH, r, aq, vt, aF, eF, t, cM, uC, wA, ga, bm, LB, kT, y, ac, c, bE, X, gX, cj, vy, nT, MJ, dX, cS, m, np, R, aS, dy, fD, cae, B, us); #c1(LPAR1) c2(XP_005251839) c3(lysophosphatidic acid receptor 1 isoform X1) c4(271202, 271203, 271204, 271205, 271206) c5(271207, 271208, 271209, 271210, 271211271212, 271213, 271214, 271215, 271216, 271217, 271218, 271219, 271220, 271221, 271222, 271223, 271224, 271225, 271226, 271227, 271228, 271229, 271230, 271231, 271232, 271233, 271234, 271235, 271236, 271237, 271238, 271239, 271240, 271241, 271242, 271243, 271244) c6( ) c7(bL, cZ, T, aC, fG, aA, bB, bS, j, et, fr, q, ad, eA, aE, aT, lG, K, bU, dd, ae, EN, B, s, aW, bvD, eH, Az, eZ, r, vt, aF, Z, t, eF, bz, hq, LB, bE, m, fD, y, bt, xb, X); #c1(LPAR2) c2(XP_011526723) c3(lysophosphatidic acid receptor 2 isoform X1) c4(321028) c5(321029, 321030, 321031, 321032, 321033, 321034, 321035, 321036, 321037, 321038) c6( ) c7(bL, bM, T, iH, dA, fG, yk, ha, hU, if, cz, bB, fd, v, ci, qN, yp, ye, xY, q, cd, ad, eA, Vp, yn, av, aE, xW, aT, h, xV, bK, K, yb, yh, yj, ae, yi, xX, d, xU, qt, aW, Y, r, yc, yq, cl, t, nC, bz, iK, qa, iP, dR, jq, ok, yf, bP, yl, xZ, bE, z, hL, cj, tl, m, fD, y, X); #c1(LPAR3) c2(XP_011539451) c3(lysophosphatidic acid receptor 3 isoform X1) c4(337617) c5(337618, 337619, 337620, 337621, 337622, 337623, 337624, 337625, 337626, 337627) c6( ) c7(bL, bM, T, dA, if, bB, Ja, j, v, qN, q, ad, dP, aE, pX, aT, h, he, Fg, ae, A, d, aW, Y, ff, r, aq, en, t, bE, dX, m, y, cE, B); #c1(LPAR6) c2(NP_001155970) c3(lysophosphatidic acid receptor 6) c4(61655) c5(61656, 61657, 61658, 61659, 61660, 61661, 61662, 61663, 61664, 61665) c6( ) c7(T, caf, alu, YX, afB, xV, bZx, cag, dL, iV, eL); #c1(LPCAT1) c2(NP_079106) c3(lysophosphatidylcholine acyltransferase 1) c4(217043) c5(217044, 217045, 217046, 217047, 217048, 217049, 217050, 217051, 217052, 217053) c6( ) c7(aq, aw, B); #c1(LPCAT2) c2(NP_060309) c3(lysophosphatidylcholine acyltransferase 2) c4(195309) c5(195310, 195311, 195312, 195313, 195314, 195315) c6( ) c7(T, kl, q, r); #c1(LPCAT3) c2(NP_005759) c3(lysophospholipid acyltransferase 5) c4(159128) c5(159129, 159130, 159131, 159132, 159133, 159134) c6( ) c7(B, qa, cz); #c1(LPCAT4) c2(NP_705841) c3(lysophospholipid acyltransferase LPCAT4) c4(246337) c5(246338, 246339, 246340, 246341, 246342, 246343) c6( ) c7(q, r); #c1(LPGAT1) c2(NP_055688) c3(acyl-CoA:lysophosphatidylglycerol acyltransferase 1) c4( ) c5(182782, 182783, 182784, 182785, 182786, 182787, 182788, 182789) c6( ) c7(v, ey, bO); #c1(LPGAT1) c2(XP_005273419) c3(acyl-CoA:lysophosphatidylglycerol acyltransferase 1 isoform X2) c4(284580) c5(284581, 284582) c6( ) c7(v, ey, bO); #c1(LPIN1) c2(NP_001248356) c3(phosphatidate phosphatase LPIN1 isoform 2) c4(93763, 93764) c5(93765, 93766, 93767, 93768, 93769, 93770, 93771, 93772, 93773, 93774, 93775) c6( ) c7(bL, T, eR, if, e, cz, v, fu, qN, bTg, b, aoA, jy, bK, K, bq, kl, xX, cah, fc, dq, GR, iO, GG, cP, ei, i); #c1(LPIN1) c2(NP_001248357) c3(phosphatidate phosphatase LPIN1 isoform 3) c4(93776, 93777, 93778) c5(93779, 93780, 93781, 93782, 93783, 93784, 93785, 93786, 93787, 93788, 93789, 93790, 93791, 93792, 93793, 93794, 93795) c6( ) c7(bL, T, eR, if, e, cz, v, fu, qN, bTg, b, aoA, jy, bK, K, bq, kl, xX, cah, fc, dq, GR, iO, GG, cP, ei, i); #c1(LPIN1) c2(NP_001248358) c3(phosphatidate phosphatase LPIN1 isoform 4) c4(93796) c5(93797, 93798, 93799, 93800, 93801, 93802, 93803, 93804, 93805, 93806, 93807, 93808) c6( ) c7(bL, T, eR, if, e, cz, v, fu, qN, bTg, b, aoA, jy, bK, K, bq, kl, xX, cah, fc, dg, GR, iO, GG, cP, ei, i); #c1(LPIN1) c2(NP_663731) c3(phosphatidate phosphatase LPIN1 isoform 1) c4(241463) c5(241464, 241465, 241466, 241467, 241468, 241469) c6( ) c7(bL, T, eR, if, e, cz, v, fu, qN, bTg, b, aoA, jy, bK, K, bq, kl, xX, cah, fc, dq, GR, iO, GG, cP, ei, i); #c1(LPIN1) c2(XP_006711932) c3(phosphatidate phosphatase LPIN1 isoform X2) c4( ) c5(286306) c6( ) c7(bL, T, eR, if, e, cz, v, fu, qN, bTg, b, aoA, jy, bK, K, bq, kl, xX, cah, fc, dq, GR, iO, GG, cP, ei, i); #c1(LPIN1) c2(XP_011508636) c3(phosphatidate phosphatase LPIN1 isoform X3) c4(299250, 299251) c5(299252, 299253, 299254, 299255, 299256, 299257) c6( ) c7(bL, T, eR, if, e, cz, v, fu, qN, bTg, b, aoA, jy, bK, K, bq, kl, xX, cah, fc, dq, GR, iO, GG, cP, ei, i); #c1(LPIN1) c2(XP_011508640) c3(phosphatidate phosphatase LPIN1 isoform X6) c4( ) c5(299258) c6( ) c7(bL, T, eR, if, e, cz, v, fu, qN, bTg, b, aoA, jy, bK, K, bq, kl, xX, cah, fc, dq, GR, iO, GG, cP, ei, i); #c1(LPIN2) c2(NP_055461) c3(phosphatidate phosphatase LPIN2) c4(181317, 181318) c5(181319, 181320, 181321, 181322, 181323, 181324, 181325, 181326, 181327, 181328) c6( ) c7(bL, cai, bvG, aC, adw, oW, dq, v); #c1(LPIN2) c2(XP_005258234) c3(phosphatidate phosphatase LPIN2 isoform X2) c4( ) c5(275593, 275594) c6( ) c7(bL, cai, bvG, aC, adw, oW, dq, v); #c1(LPL) c2(NP_000228) c3(lipoprotein lipase precursor) c4(5098, 5099, 5100, 5101, 5102, 5103, 5104, 5105) c5(5106, 5107, 5108, 5109, 5110, 5111, 5112, 5113, 5114, 5115, 5116, 5117, 5118, 5119, 5120, 5121, 5122, 5123, 5124, 5125, 5126, 5127, 5128, 5129, 5130, 5131, 5132, 5133, 5134, 5135, 5136, 5137, 5138, 5139, 5140, 5141, 5142, 5143, 5144, 5145, 5146, 5147, 5148, 5149, 5150, 5151, 5152, 5153, 5154, 5155, 5156, 5157, 5158, 5159, 5160, 5161, 5162, 5163, 5164, 5165, 5166, 5167, 5168, 5169, 5170, 5171, 5172, 5173, 5174, 5175, 5176, 5177, 5178, 5179, 5180, 5181, 5182, 5183, 5184, 5185, 5186, 5187, 5188, 5189, 5190, 5191, 5192, 5193, 5194, 5195, 5196, 5197, 5198, 5199, 5200, 5201, 5202, 5203, 5204, 5205, 5206, 5207, 5208, 5209, 5210, 5211, 5212, 5213, 5214, 5215, 5216, 5217, 5218, 5219, 5220, 5221, 5222, 5223, 5224, 5225, 5226, 5227, 5228, 5229, 5230, 5231, 5232, 5233, 5234, 5235, 5236, 5237, 5238, 5239, 5240, 5241, 5242, 5243, 5244) c6(5245, 5246, 5247, 5248, 5249, 5250, 5251, 5252, 5253, 5254, 5255, 5256, 5257) c7(G, T, fR, Zz, ea, e, eb, aeu, ci, GK, dY, u, M, iv, GO, qM, dQ, H, aab, ex, eN, Zx, hm, zQ, fc, bYP, hl, vs, g, eF, uC, eM, dc, mx, U, cj, IS, aGv, cam, dD, wu, aw, fq, cQ, Zv, aj, zP, JW, TB, ft, Zu, cc, ec, cU, jy, h, dL, wb, RE, A, Rj, ge, aae, aq, fe, caj, cM, ar, kT, W, UY, dC, cO, Ei, mg, tl, at, GN, B, L, bL, jv, eR, aaa, oe, jx, aA, cz, v, j, avO, so, nS, J, ga, baE, aT, cy, bZI, bq, ae, af, eu, aai, vT, Y, bg, r, iy, wg, ac, c, cak, bpB, mf, aoJ, dy, sY, wi, iW, vr, vG, dG, ah, eq, iG, tK, ad, dZ, av, QJ, ts, oj, vw, wm, sj, uX, nU, cH, cW, Zy, eH, cal, eZ, dq, bHV, Ed, iV, dr, qa, eK, pE, gZ, aS, cP, ei, Zw, X); #c1(LP0) c2(NP_001153574) c3(lactoperoxidase isoform 3 preproprotein) c4(60665) c5(60666, 60667, 60668, 60669, 60670, 60671) c6( ) c7(dB, aW, ki, aT, an, rk); #c1(LP0) c2(NP_006142) c3(lactoperoxidase isoform 1 preproprotein) c4(162361, 162362, 162363) c5(162364, 162365, 162366, 162367, 162368, 162369, 162370, 162371, 162372, 162373, 162374, 162375) c6( ) c7(dB, aW, ki, aT, an, rk); #c1(LP0) c2(XP_011523111) c3(lactoperoxidase isoform X2) c4( ) c5(317617, 317618, 317619, 317620, 317621, 317622) c6( ) c7(dB, aW, ki, aT, an, rk); #c1(LPP) c2(NP_001161143) c3(lipoma-preferred partner isoform a) c4(65359) c5(65360, 65361, 65362, 65363, 65364, 65365, 65366, 65367) c6( ) c7(bM, T, aZ, cz, cL, qj, hF, q, o, ad, oB, oj, aT, aHs, K, ae, kl, A, aW, Y, ff, r, hp, en, cl, fq, buo, au, hj, bt); #c1(LPP) c2(NP_001161144) c3(lipoma-preferred partner isoform b) c4(65368, 65369, 65370, 65371, 65372, 65373, 65374, 65375) c5( ) c6( ) c7(bM, T, aZ, cz, cL, qj, hF, q, o, ad, oB, oj, aT, aHs, K, ae, kl, A, aW, Y, ff, r, hp, en, cl, fq, buo, au, hj, bt); #c1(LPP) c2(XP_011511125) c3(lipoma-preferred partner isoform X2) c4(301525) c5(301526, 301527, 301528, 301529, 301530, 301531, 301532, 301533, 301534, 301535) c6( ) c7(bM, T, aZ, cz, cL, qj, hF, q, o, ad, oB, oj, aT, aHs, K, ae, kl, A, aW, Y, ff, r, hp, en, cl, fq, buo, au, hj, bt); #c1(LPP) c2(XP_011511137) c3(lipoma-preferred partner isoform X4) c4( ) c5(301536, 301537, 301538, 301539, 301540, 301541, 301542, 301543, 301544, 301545, 301546, 301547, 301548, 301549, 301550, 301551, 301552, 301553, 301554, 301555, 301556, 301557, 301558, 301559, 301560, 301561, 301562, 301563, 301564, 301565, 301566, 301567, 301568, 301569, 301570, 301571, 301572, 301573, 301574, 301575, 301576, 301577, 301578, 301579, 301580, 301581) c6( ) c7(bM, T, aZ, cz, cL, qj, hF, q, o, ad, oB, oj, aT, aHs, K, ae, kl, A, aW, Y, ff, r, hp, en, cl, fq, buo, au, hj, bt); #c1(LPPR2) c2(NP_001164106) c3(lipid phosphate phosphatase-related protein type 2 isoform 2) c4(66621) c5(66622, 66623, 66624, 66625, 66626, 66627, 66628) c6( ) c7(bjt, can, aBm, agS, bjs); #c1(LPPR2) c2(NP_073574) c3(lipid phosphate phosphatase-related protein type 2 isoform 1) c4(212917) c5(212918, 212919, 212920, 212921, 212922, 212923) c6( ) c7(bjt, can, aBm, agS, bjs); #c1(LPPR4) c2(XP_011540800) c3(lipid phosphate phosphatase-related protein type 4 isoform X1) c4(339359) c5( ) c6( ) c7(T, aE, aW, TG, aT, K); #c1(LPXN) c2(NP_001137467) c3(leupaxin isoform 1) c4(55891) c5(55892, 55893, 55894, 55895, 55896, 55897) c6( ) c7(dE, jh, g, bt, ae, ad); #c1(LPXN) c2(NP_004802) c3(leupaxin isoform 2) c4(149966) c5(149967, 149968, 149969, 149970, 149971, 149972) c6( ) c7(dE, jh, q, bt, ae, ad); #c1(LRAT) c2(NP_001288574) c3(lecithin retinol acyltransferase precursor) c4(113756, 113757) c5(113758, 113759, 113760, 113761113762, 113763, 113764, 113765, 113766, 113767, 113768, 113769, 113770, 113771, 113772, 113773) c6( ) c7(T, oQ, IR, Dy, af, Y, nx, aSW, cao, nw, dL, eQ, nC, nk, Nh, caq, OK, ae, cap, ad); #c1(LRBA) c2(NP_006717) c3(lipopolysaccharide-responsive and beige-like anchor protein isoform 2) c4(167385) c5(167386, 167387, 167388, 167389, 167390, 167391) c6( ) c7(n, T, fq, car); #c1(LRBA) c2(XP_005263432) c3(lipopolysaccharide-responsive and beige-like anchor protein isoform X4) c4(278470) c5(278471, 278472, 278473, 278474, 278475, 278476) c6( ) c7(n, T, fq, car); #c1(LRCH1) c2(NP_001157683) c3(leucine-rich repeat and calponin homology domain-containing protein 1 isoform 1) c4(62402) c5(62403, 62404, 62405, 62406, 62407, 62408) c6( ) c7(kh, q, ci, s, r); #c1(LRCH1) c2(NP_001157685) c3(leucine-rich repeat and calponin homology domain-containing protein 1 isoform 3) c4(62409) c5(62410, 62411, 62412, 62413, 62414, 62415) c6( ) c7(kh, q, ci, s, r); #c1(LRCH1) c2(NP_055931) c3(leucine-rich repeat and calponin homology domain-containing protein 1 isoform 2) c4(184505) c5(184506, 184507, 184508, 184509, 184510, 184511) c6( ) c7(kh, q, ci, s, r); #c1(LRCH1) c2(XP_011533315) c3(leucine-rich repeat and calponin homology domain-containing protein 1 isoform X1) c4( ) c5(329463) c6( ) c7(kh, q, ci, s, r); #c1(LRCH4) c2(NP_002310) c3(leucine-rich repeat and calponin homology domain-containing protein 4 isoform 1) c4(127527, 127528) c5(127529, 127530, 127531, 127532, 127533, 127534, 127535, 127536, 127537, 127538, 127539, 127540) c6( ) c7(T, ib); #c1(LRFN2) c2(NP_065788) c3(leucine-rich repeat and fibronectin type-III domain-containing protein 2 precursor) c4(205435) c5(205436, 205437, 205438, 205439, 205440) c6( ) c7(ht, PN); #c1(LRFN2) c2(XP_011513062) c3(leucine-rich repeat and fibronectin type-III domain-containing protein 2 isoform X2) c4( ) c5(304745) c6( ) c7(ht, pN); #c1(LRFN5) c2(NP_689660) c3(leucine-rich repeat and fibronectin type-III domain-containing protein 5 precursor) c4(243508) c5(243509, 243510, 243511, 243512, 243513, 243514) c6( ) c7(dt); #c1(LRG1) c2(NP_443204) c3(leucine-rich alpha-2-glycoprotein precursor) c4(229914, 229915) c5(229916, 229917, 229918, 229919, 229920, 229921, 229922, 229923, 229924, 229925, 229926, 229927, 229928, 229929, 229930, 229931) c6(229932, 229933, 229934, 229935) c7(T, iV, sw, hL, ji, cl, cm, y); #c1(LRGUK) c2(NP_653249) c3(leucine-rich repeat and guanylate kinase domain-containing protein) c4(239336) c5(239337, 239338, 239339, 239340, 239341, 239342) c6( ) c7(bL, oe, dY); #c1(LRIF1) c2(XP_011540070) c3(ligand-dependent nuclear receptor-interacting factor 1 isoform X2) c4(338368) c5( ) c6( ) c7(eG); #c1(LRIG1) c2(NP_056356) c3(leucine-rich repeats and immunoglobulin-like domains protein 1 precursor) c4(187240, 187241, 187242) c5(187243, 187244, 187245, 187246, 187247, 187248, 187249, 187250, 187251, 187252, 187253, 187254, 187255, 187256, 187257, 187258, 187259, 187260) c6( ) c7(T, j, fr, eA, q, ad, aT, dL, ae, eL, d, s, aW, ff, r, en, cl, as, t, bz, Qt, hL, cj, m); #c1(LRIG3) c2(NP_001129523) c3(leucine-rich repeats and immunoglobulin-like domains protein 3 isoform 1 precursor) c4(51839) c5(51840, 51841, 51842, 51843, 51844, 51845) c6( ) c7(T, d, aE, dB, aW, awP, aT, hR, it, dL, eA, bC, eL, cd); #c1(LRIG3) c2(NP_700356) c3(leucine-rich repeats and immunoglobulin-like domains protein 3 isoform 2 precursor) c4(245912) c5(245913, 245914, 245915, 245916, 245917, 245918) c6( ) c7(T, d, aE, dB, aW, awP, aT, hR, it, dL, eA, bC, eL, cd); #c1(LRIT1) c2(NP_056428) c3(leucine-rich repeat, immunoglobulin-like domain and transmembrane domain-containing protein 1 precursor) c4(187552) c5(187553, 187554, 187555, 187556, 187557, 187558) c6( ) c7(Jm, aGm, mR, aZy, Y, aZw, ym, Fg); #c1(LRIT3) c2(NP_940908) c3(leucine-rich repeat, immunoglobulin-like domain and transmembrane domain-containing protein 3 precursor) c4(260090) c5(260091, 260092, 260093, 260094, 260095, 260096) c6( ) c7(cas, oe); #c1(LRIT3) c2(XP_005263036) c3(leucine-rich repeat, immunoglobulin-like domain and transmembrane domain-containing protein 3 isoform X1) c4(278223) c5(278224, 278225, 278226, 278227, 278228, 278229, 278230, 278231, 278232, 278233) c6( ) c7(cas, oe); #c1(LRMP) c2(NP_006143) c3(lymphoid-restricted membrane protein) c4(162376, 162377) c5(162378, 162379, 162380, 162381, 162382, 162383, 162384, 162385, 162386, 162387, 162388, 162389, 162390, 162391, 162392, 162393, 162394, 162395, 162396, 162397) c6( ) c7(aw, av, bz, iu, g); #c1(LRP1) c2(NP_002323) c3(prolow-density lipoprotein receptor-related protein 1 precursor) c4(127541) c5(127542, 127543, 127544, 127545, 127546, 127547) c6( ) c7(bL, T, dD, vl, ea, axd, aw, I, cz, bO, fd, v, cat, j, ci, ur, uu, hF, eq, eA, ad, x, av, iu, ft, xc, kH, aT, cy, h, K, dQ, ae, af, dx, bA, d, bf, je, cW, aW, Y, Ff, aq, yq, g, cl, t, acD, bz, vo, cm, QA, ck, iM, iQ, eM, nB, bE, dJ, U, Be, bm, aS, k, m, y, bt, B, L); #c1(LRP10) c2(NP_054764) c3(low-density lipoprotein receptor-related protein 10 precursor) c4(177639, 177640) c5(177641, 177642, 177643, 177644, 177645, 177646, 177647, 177648, 177649, 177650, 177651, 177652) c6( ) c7(cm, af); #c1(LRP12) c2(NP_001129175) c3(low-density lipoprotein receptor-related protein 12 isoform b precursor) c4(51101) c5(51102, 51103, 51104, 51105, 51106, 51107) c6( ) c7(T, bE, aW, F0, aw, FP, aT, r, bB, q, hu, dw, B); #c1(LRP12) c2(NP_038465) c3(low-density lipoprotein receptor-related protein 12 isoform a precursor) c4(176556) c5(176557, 176558, 176559, 176560, 176561, 176562) c6( ) c7(T, bE, aW, F0, aw, FP, aT, r, bB, q, hu, dw, B); #c1(LRP1B) c2(NP_061027) c3(low-density lipoprotein receptor-related protein IB precursor) c4(199043, 199044) c5(199045, 199046, 199047, 199048, 199049, 199050, 199051, 199052, 199053, 199054, 199055, 199056, 199057, 199058, 199059, 199060, 199061, 199062, 199063) c6( ) c7(T, Y, oe, ff, fq, it, vd, fr, en, cm, cau, bA); #c1(LRP1B) c2(XP_011509654) c3(low-density lipoprotein receptor-related protein IB isoform X1) c4(300228) c5(300229, 300230) c6( ) c7(T, Y, oe, ff, fq, it, vd, fr, en, cm, cau, bA); #c1(LRP2) c2(NP_004516) c3(low-density lipoprotein receptor-related protein 2 precursor) c4(147117) c5(147118, 147119, 147120, 147121, 147122, 147123, 147124, 147125, 147126, 147127, 147128, 147129, 147130, 147131, 147132, 147133, 147134, 147135) c6( ) c7(T, eR, dK, cz, n, hz, nZ, fr, bNM, ad, amB, b, zw, Tl, aE, iX, awd, aT, aU, h, Wm, bq, dQ, H, ae, af, Ir, sj, cH, aW, eH, Az, aZi, cav, cm, bKy, es, mO, aPt, aNJ, mG, wk, iS, aSW, va, dy, i, y, ZW, ars, L); #c1(LRP2) c2(XP_011509486) c3(low-density lipoprotein receptor-related protein 2 isoform X2) c4(300065) c5( ) c6( ) c7(T, eR, dK, cz, n, hz, oZ, fr, bNM, ad, amB, b, zw, Tl, aE, iX, awd, aT, aU, h, Wm, bq, dQ, H, ae, af, lr, sj, cH, aW, eH, Az, aZi, cav, cm, bKy, es, mO, aPt, aNJ, mG, wk, iS, aSW, va, dy, i, y, ZW, ars, L); #c1(LRP2) c2(XP_011509487) c3(low-density lipoprotein receptor-related protein 2 isoform X3) c4(300066) c5( ) c6( ) c7(T, eR, dK, cz, n, hz, oZ, fr, bNM, ad, amB, b, zw, Tl, aE, iX, awd, aT, aU, h, Wm, bq, dQ, H, ae, af, Ir, sj, cH, aW, eH, Az, aZi, cav, cm, bKy, es, mO, aPt, aNJ, mG, wk, iS, aSW, va, dy, i, y, ZW, ars, L); #c1(LRP2BP) c2(NP_060879) c3(LRP2-binding protein) c4(198281, 198282, 198283) c5(198284, 198285, 198286, 198287, 198288, 198289, 198290, 198291, 198292, 198293, 198294, 198295, 198296, 198297, 198298, 198299, 198300, 198301, 198302, 198303, 198304, 198305) c6( ) c7(rx); #c1(LRP4) c2(NP_002325) c3(low-density lipoprotein receptor-related protein 4 precursor) c4(127548) c5(127549, 127550, 127551, 127552, 127553, 127554) c6( ) c7(D, hM, xA, zw, nX, xj, aDT, jh, cj, aUt, zU, aUs, cm, af, aUv, bA); #c1(LRP4) c2(XP_011518404) c3(low-density lipoprotein receptor-related protein 4 isoform X1) c4( ) c5(312384) c6( ) c7(D, hM, xA, zw, nX, xj, aDT, jh, cj, aUt, zU, aUs, cm, af, aUv, bA); #c1(LRP4) c2(XP_011518406) c3(low-density lipoprotein receptor-related protein 4 isoform X3) c4( ) c5(312385) c6( ) c7(D, hM, xA, zw, nX, xj, aDT, jh, cj, aUt, zu, aUs, cm, af, aUv, bA); #c1(LRP5) c2(NP_002326) c3(low-density lipoprotein receptor-related protein 5 isoform 1 precursor) c4(127555) c5(127556, 127557, 127558, 127559, 127560, 127561) c6( ) c7(DS, T, dD, dA, ea, zs, aw, aoE, jh, cz, fd, aj, cax, j, v, bX, eq, azk, cay, sg, J, ad, bsH, zw, no, A, bfJ, ari, caw, dL, bYN, K, caz, ae, af, bA, aRR, hi, kl, mR, IR, byj, caB, cH, bf, are, Tc, eH, r, bHg, byl, anW, akb, eF, Hl, iV, aSb, dr, zV, bF, Ta, arB, W, nb, ac, yE, YE, bbY, bm, iS, at, Hs, k, ei, y, vt, aAO, caA); #c1(LRP5) c2(XP_011543333) c3(low-density lipoprotein receptor-related protein 5 isoform X4) c4( ) c5(342127) c6( ) c7(DS, T, dD, dA, ea, zs, aw, aoE, jh, cz, fd, aj, cax, j, v, bX, eq, azk, cay, sg, J, ad, bsH, zw, no, A, bfJ, ari, caw, dL, bYN, K, caz, ae, af, bA, aRR, hi, kl, mR, IR, byj, caB, cH, bf, are, Tc, eH, r, bHg, byl, anW, akb, eF, Hl, iV, aSb, dr, zV, bF, Ta, arB, W, nb, ac, yE, YE, bbY, bm, iS, at, Hs, k, ei, y, vt, aAO, caA); #c1(LRP6) c2(NP_002327) c3(low-density lipoprotein receptor-related protein 6 precursor) c4(127562, 127563) c5(127564, 127565, 127566, 127567, 127568, 127569, 127570, 127571, 127572, 127573, 127574, 127575) c6( ) c7(DS, T, j, azk, aT, dL, af, bA, aRR, eG, A, kj, aW, caD, are, r, iV, caC, arB, kP, W, aAS, yE, dO, vy, at, ei, it, B); #c1(LRPAP1) c2(NP_002328) c3(alpha-2-macroglobulin receptor-associated protein precursor) c4(127576) c5(127577, 127578, 127579, 127580, 127581, 127582) c6( ) c7(bL, T, dK, aw, caE, aA, fr, ci, ad, afb, Vp, I, py, u, BR, dL, ae, af, qk, bA, bFd, aK, nY, t, bz, pb, Uk, ac, nB, caE, U, Be, m, gT, B, y); #c1(LRPPRC) c2(NP_573566) c3(leucine-rich PPR motif-containing protein, mitochondrial precursor) c4(234539) c5(234540, 234541, 234542, 234543, 234544, 234545, 234546, 234547, 234548, 234549, 234550, 234551) c6( ) c7(bL, T, IT, aD, aw, aA, fd, caG, v, bX, qN, hF, cd, ai, x, jz, aE, rw, Yo, aT, h, ji, K, an, ae, af, ajU, jf, yo, aW, Y, aGS, hl, fe, aq, lo, aF, yq, g, t, bmj, dr, ck, pc, dB, mx, U, acJ, m, k, fD, y, bt, B); #c1(LRPPRC) c2(XP_011530775) c3(leucine-rich PPR motif-containing protein, mitochondrial isoform X1) c4(326810) c5( ) c6( ) c7(bL, T, IT, aD, aw, aA, fd, caG, v, bX, qN, hF, cd, ai, x, jz, aE, rw, Yo, aT, h, ji, K, an, ae, af, ajU, jf, yo, aW, Y, aGS, hl, fe, aq, lo, aF, yq, g, t, bmj, dr, ck, pc, dB, mx, U, acJ, m, k, fD, y, bt, B); #c1(LRR1) c2(NP_689542) c3(leucine-rich repeat protein 1 isoform 1) c4(243048, 243049) c5(243050, 243051, 243052, 243053, 243054, 243055, 243056, 243057, 243058, 243059, 243060, 243061) c6( ) c7(yl, qi, pC); #c1(LRR1) c2(NP_982292) c3(leucine-rich repeat protein 1 isoform 3) c4(263293) c5(263294, 263295, 263296, 263297, 263298, 263299, 263300) c6( ) c7(yl, qj, pC); #c1(LRRC1) c2(NP_060684) c3(leucine-rich repeat-containing protein 1) c4(197151, 197152) c5(197153, 197154, 197155, 197156, 197157, 197158, 197159, 197160, 197161, 197162, 197163, 197164) c6( ) c7(cz); #c1(LRRC15) c2(NP_001128529) c3(leucine-rich repeat-containing protein 15 isoform a precursor) c4(50200, 50201) c5(50202, 50203, 50204, 50205, 50206, 50207, 50208, 50209, 50210, 50211, 50212, 50213, 50214, 50215, 50216, 50217) c6( ) c7(T, Yn, fR, qt, aW, aT, AO, af); #c1(LRRC15) c2(NP_570843) c3(leucine-rich repeat-containing protein 15 isoform b precursor) c4( ) c5(234295) c6( ) c7(T, Yn, fR, qt, aW, aT, AO, af); #c1(LRRC16A) c2(NP_001167448) c3(leucine-rich repeat-containing protein 16A isoform 2) c4(68920) c5(68921, 68922, 68923, 68924, 68925, 68926) c6( ) c7(nD); #c1(LRRC16A) c2(NP_060110) c3(leucine-rich repeat-containing protein 16A isoform 1) c4(194227) c5(194228, 194229, 194230, 194231, 194232, 194233) c6( ) c7(nD); #c1(LRRC16A) c2(XP_011513035) c3(leucine-rich repeat-containing protein 16A isoform X3) c4(304636) c5( ) c6( ) c7(nD); #c1(LRRC16A) c2(XP_011513039) c3(leucine-rich repeat-containing protein 16A isoform X7) c4( ) c5(304637, 304638, 304639, 304640, 304641, 304642) c6( ) c7(nD); #c1(LRRC16B) c2(NP_612369) c3(leucine-rich repeat-containing protein 16B) c4(236284, 236285) c5(236286, 236287, 236288, 236289, 236290, 236291, 236292, 236293, 236294, 236295, 236296, 236297) c6( ) c7(kl); #c1(LRRC16B) c2(XP_011535602) c3(leucine-rich repeat-containing protein 16B isoform X1) c4( ) c5(332857, 332858) c6( ) c7(kl); #c1(LRRC17) c2(NP_005815) c3(leucine-rich repeat-containing protein 17 isoform 2 precursor) c4(159640) c5(159641, 159642, 159643, 159644, 159645, 159646, 159647, 159648, 159649, 159650, 159651, 159652, 159653, 159654, 159655) c6(159656, 159657, 159658, 159659) c7(ck); #c1(LRRC17) c2(XP_005250165) c3(leucine-rich repeat-containing protein 17 isoform X1) c4(270137, 270138) c5(270139, 270140, 270141, 270142, 270143, 270144, 270145, 270146, 270147) c6(270148, 270149) c7(ck); #c1(LRRC18) c2(XP_011538131) c3(leucine-rich repeat-containing protein 18 isoform X1) c4(335699, 335700) c5(335701, 335702, 335703, 335704, 335705, 335706, 335707, 335708, 335709, 335710, 335711, 335712) c6( ) c7(fq, eZ); #c1(LRRC20) c2(NP_001265141) c3(leucine-rich repeat-containing protein 20 isoform 1) c4(97855, 97856) c5(97857, 97858, 97859, 97860, 97861, 97862, 97863, 97864, 97865, 97866, 97867, 97868, 97869, 97870, 97871, 97872) c6( ) c7(j, eZ); #c1(LRRC20) c2(NP_060675) c3(leucine-rich repeat-containing protein 20 isoform 3) c4(197088) c5(197089, 197090, 197091, 197092, 197093, 197094, 197095, 197096, 197097, 197098) c6( ) c7(j, eZ); #c1(LRRC20) c2(NP_060709) c3(leucine-rich repeat-containing protein 20 isoform 2) c4(197316) c5(197317, 197318, 197319, 197320, 197321, 197322, 197323, 197324, 197325, 197326) c6( ) c7(j, eZ); #c1(LRRC26) c2(NP_001013675) c3(leucine-rich repeat-containing protein 26 precursor) c4(25702) c5(25703, 25704, 25705, 25706, 25707, 25708) c6( ) c7(aW, T, ae, ad, aT); #c1(LRRC30) c2(NP_001099051) c3(leucine-rich repeat-containing protein 30) c4(41789) c5(41790, 41791, 41792, 41793, 41794, 41795) c6( ) c7(cm); #c1(LRRC32) c2(XP_005273959) c3(leucine-rich repeat-containing protein 32 isoform X1) c4(284878, 284879) c5(284880, 284881, 284882, 284883, 284884, 284885, 284886, 284887, 284888, 284889, 284890, 284891, 284892, 284893, 284894, 284895, 284896, 284897, 284898, 284899) c6( ) c7(Xk, aDR, alx, aDQ, oc); #c1(LRRC37A) c2(NP_055649) c3(leucine-rich repeat-containing protein 37A precursor) c4(182528) c5(182529, 182530, 182531, 182532, 182533, 182534, 182535, 182536, 182537, 182538) c6( ) c7(nA); #c1(LRRC37A) c2(XP_005257936) c3(leucine-rich repeat-containing protein 37A isoform X5) c4( ) c5(275434) c6( ) c7(nA); #c1(LRRC37A) c2(XP_006725343) c3(leucine-rich repeat-containing protein 37A isoform X8) c4(296769, 296770, 296771, 296772, 296773) c5(296774, 296775, 296776, 296777, 296778, 296779, 296780, 296781, 296782, 296783, 296784, 296785, 296786, 296787, 296788, 296789, 296790, 296791, 296792, 296793, 296794, 296795, 296796, 296797, 296798, 296799, 296800, 296801, 296802, 296803) c6( ) c7(nA); #c1(LRRC37A) c2(XP_011544667) c3(leucine-rich repeat-containing protein 37A isoform X7) c4(343762) c5( ) c6( ) c7(nA); #c1(LRRC378) c2(NP_443120) c3(leucine-rich repeat-containing protein 378 precursor) c4(229520, 229521) c5(229522, 229523, 229524, 229525, 229526, 229527, 229528, 229529, 229530, 229531, 229532, 229533, 229534, 229535, 229536, 229537, 229538, 229539) c6( ) c7(nX, xb, Az, xt); #c1(LRRC378) c2(XP_011522563) c3(leucine-rich repeat-containing protein 378 isoform X1) c4(317159) c5(317160, 317161, 317162, 317163, 317164, 317165) c6( ) c7(nX, xb, Az, xt); #c1(LRRC378) c2(XP_011522570) c3(leucine-rich repeat-containing protein 378 isoform X6) c4(317166) c5( ) c6( ) c7(nX, xb, Az, xt); #c1(LRRC39) c2(XP_011538980) c3(leucine-rich repeat-containing protein 39 isoform X1) c4(337021) c5(337022, 337023, 337024, 337025, 337026, 337027, 337028, 337029, 337030, 337031) c6( ) c7(cc, af, K); #c1(LRRC4) c2(XP_011514763) c3(leucine-rich repeat-containing protein 4 isoform X1) c4(307417, 307418, 307419) c5(307420, 307421, 307422, 307423, 307424, 307425, 307426, 307427, 307428, 307429, 307430, 307431, 307432, 307433, 307434, 307435, 307436, 307437) c6( ) c7(es, d, c, iA, dB, aW, aT, ae, eA, LS, ad, Qt); #c1(LRRC49) c2(NP_060161) c3(leucine-rich repeat-containing protein 49 isoform 2) c4(194532) c5(194533, 194534, 194535, 194536, 194537, 194538) c6( ) c7(aW, aT); #c1(LRRC49) c2(XP_011520018) c3(leucine-rich repeat-containing protein 49 isoform X1) c4(314899) c5(314900, 314901, 314902, 314903, 314904, 314905) c6( ) c7(aW, aT); #c1(LRRC4B) c2(XP_011525822) c3(leucine-rich repeat-containing protein 48 isoform X1) c4(320221, 320222) c5(320223, 320224, 320225, 320226, 320227, 320228, 320229, 320230, 320231, 320232, 320233, 320234) c6( ) c7(fq); #c1(LRRC4C) c2(NP_001245348) c3(leucine-rich repeat-containing protein 4C precursor) c4(93183, 93184) c5(93185, 93186, 93187, 93188, 93189, 93190, 93191, 93192, 93193, 93194, 93195, 93196, 93197, 93198, 93199, 93200, 93201, 93202, 93203, 93204, 93205, 93206, 93207, 93208) c6( ) c7(bM, sj); #c1(LRRC52) c2(NP_001005214) c3(leucine-rich repeat-containing protein 52 precursor) c4(21155) c5(21156, 21157, 21158, 21159, 21160, 21161) c6( ) c7(bA, cz); #c1(LRRC59) c2(NP_060979) c3(leucine-rich repeat-containing protein 59) c4(198895) c5(198896, 198897, 198898, 198899, 198900, 198901) c6( ) c7(bF, bE, bB, ey, bC, bD, bz); #c1(LRRC6) c2(NP_036604) c3(protein tilB homolog) c4(174762, 174763) c5(174764, 174765, 174766, 174767, 174768, 174769, 174770, 174771, 174772, 174773, 174774, 174775, 174776, 174777, 174778, 174779) c6( ) c7(caH, BV, Pf, MG); #c1(LRRCG1) c2(XP_011514822) c3(leucine-rich repeat-containing protein 61 isoform X1) c4(307490) c5(307491, 307492, 307493, 307494, 307495, 307496, 307497, 307498, 307499, 307500, 307501, 307502, 307503, 307504) c6( ) c7(fe); #c1(LRRC63) c2(NP_001269389) c3(leucine-rich repeat-containing protein 63) c4(101554) c5(101555, 101556, 101557, 101558, 101559, 101560) c6( ) c7(wL); #c1(LRRC69) c2(NP_001123362) c3(leucine-rich repeat-containing protein 69) c4(47040, 47041, 47042) c5(47043, 47044, 47045, 47046, 47047, 47048, 47049, 47050, 47051, 47052, 47053, 47054, 47055, 47056, 47057, 47058, 47059, 47060) c6( ) c7(cm, cd); #c1(LRRC7) c2(XP_011540138) c3(leucine-rich repeat-containing protein 7 isoform X1) c4(338485, 338486) c5(338487, 338488, 338489, 338490, 338491, 338492, 338493, 338494, 338495, 338496, 338497, 338498, 338499, 338500) c6( ) c7(A, xs, cz, aU, cu, eW); #c1(LRRC74A) c2(NP_919263) c3(leucine-rich repeat-containing protein 74A) c4(258355, 258356) c5(258357, 258358, 258359, 258360, 258361, 258362, 258363, 258364, 258365, 258366, 258367) c6( ) c7(j); #c1(LRRC74A) c2(XP_011534782) c3(leucine-rich repeat-containing protein 74A isoform X5) c4(331225) c5(331226, 331227, 331228, 331229, 331230, 331231) c6( ) c7(j); #c1(LRRC74A) c2(XP_011534789) c3(leucine-rich repeat-containing protein 74A isoform X12) c4( ) c5(331232) c6( ) c7(j); #c1(LRRC8A) c2(NP_062540) c3(volume-regulated anine channel subunit LRRC8A) c4(201874) c5(201875, 201876, 201877, 201878, 201879, 201880, 201881, 201882, 201883, 201884, 201885, 201886, 201887, 201888) c6( ) c7(Ze, cal); #c1(LRRC8C) c2(XP_011540584) c3(volume-regulated anion channel subunit LRRC8C isoform X1) c4( ) c5(339094, 339095, 339096, 339097, 339098) c6( ) c7(bK); #c1(LRRCC1) c2(NP_208325) c3(leucine-rich repeat and coiled-coil domain-containing protein 1) c4(228526, 228527) c5(228528, 228529, 228530, 228531, 228532, 228533, 228534, 228535, 228536, 228537, 228538, 228539) c6( ) c7(wR, Zf, Za, C); #c1(LRRCC1) c2(XP_005251375) c3(leucine-rich repeat and coiled-coil domain-containing protein 1 isoform X2) c4(270928) c5(270929, 270930, 270931, 270932, 270933) c6( ) c7(wR, Zf, Za, C); #c1(LRRCC1) c2(XP_005251379) c3(leucine-rich repeat and coiled-coil domain-containing protein 1 isoform X5) c4( ) c5(270934) c6( ) c7(wR, Zf, Za, C); #c1(LRRFIP1) c2(NP_001131022) c3(leucine-rich repeat flightless-interacting protein 1 isoform 1) c4(52510, 52511) c5(52512, 52513, 52514, 52515, 52516, 52517, 52518, 52519, 52520, 52521, 52522, 52523) c6( ) c7(d, ac, dO, aw, r, ci, q); #c1(LRRFIP1) c2(NP_001131024) c3(leucine-rich repeat flightless-interacting protein 1 isoform 3) c4(52524) c5(52525, 52526, 52527, 52528, 52529, 52530) c6( ) c7(d, ac, dO, aw, r, ci, q); #c1(LRRFIP1) c2(NP_001131025) c3(leucine-rich repeat flightless-interacting protein 1 isoform 5) c4(52531) c5(52532, 52533, 52534, 52535, 52536, 52537) c6( ) c7(d, ac, dO, aw, r, ci, q); #c1(LRRFIP1) c2(NP_004726) c3(leucine-rich repeat flightless-interacting protein 1 isoform 4) c4(149109) c5(149110, 148111, 149112, 149113, 149114, 149115) c6( ) c7(d, ac, dO, aw, r, ci, q); #c1(LRRFIP1) c2(XP_011510466) c3(leucine-rich repeat flightless-interacting protein 1 isoform X41) c4(300978) c5( ) c6( ) c7(d, ac, dO, aw, r, ci, q); #c1(LRRFIP1) c2(XP_011510467) c3(leucine-rich repeat flightless-interacting protein 1 isoform X42) c4( ) c5(300979, 300980, 300981, 300982, 300983) c6( ) c7(d, ac, dO, aw, r, ci, q); #c1(LRRFIP2) c2(NP_001127841) c3(leucine-rich repeat flightless-interacting protein 2 isoform 3) c4(49360) c5(49361, 49362, 49363, 49364, 49365, 49366) c6( ) c7(T, 80); #c1(LRRFIP2) c2(NP_006300) c3(leucine-rich repeat flightless-interacting protein 2 isoform 1) c4(163818) c5(163819, 163820, 163821, 163822, 163823, 163824, 163825, 163826, 163827, 163828) c6( ) c7(T, BO); #c1(LRRFIP2) c2(NP_060194) c3(leucine-rich repeat flightless-interacting protein 2 isoform 2) c4(194718) c5(194719, 194720, 194721, 194722, 194723, 194724, 194725, 194726, 194727, 194728, 194729, 194730, 194731, 194732, 194733, 194734, 194735, 194736, 194737, 194738) c6( ) c7(T, BO); #c1(LRRFIP2) c2(XP_006713466) c3(leucine-rich repeat flightless-interacting protein 2 isoform X28) c4(287166) c5( ) c6( ) c7(T, BO); #c1(LRRK1) c2(XP_011520315) c3(leucine-rich repeat serine/threonine-protein kinase 1 isoform X1) c4(315157, 315158) c5(315159, 315160, 315161, 315162, 315163, 315164, 315165, 315166, 315167, 315168, 315169, 315170, 315171, 315172, 315173, 315174, 315175, 315176) c6( ) c7(alS, an); #c1(LRRK1) c2(XP_011520317) c3(leucine-rich repeat serine/threonine-protein kinase 1 isoform X3) c4(315177) c5( ) c6( ) c7(alS, an); #c1(LRRK1) c2(XP_011520320) c3(leucine-rich repeat serine/threonine-protein kinase 1 isoform X5) c4(315178) c5(315179, 315180, 315181, 315182, 315183, 315184, 315185, 315186, 315187, 315188, 315189) c6( ) c7(alS, an); #c1(LRRK1) c2(XP_011520321) c3(leucine-rich repeat serine/threonine-protein kinase 1 isoform X6) c4(315190) c5(315191) c6( ) c7(alS, an); #c1(LRRK2) c2(NP_940980) c3(leucine-rich repeat serine/threonine-protein kinase 2) c4(260248) c5(260249, 260250, 260251, 260252, 260253, 260254, 260255, 260256, 260257, 260258, 260259) c6( ) c7(T, caJ, Ol, yk, Nt, GC, fr, alS, xg, dP, AW, Hx, Gt, WY, HC, bU, Wk, aT, aU, ji, K, an, he, af, hm, ak, asp, caK, aW, WQ, fe, aaE, dg, cm, acD, xw, GB, aeb, bb, acC, c, Ji, U, nw, act, abd, aen, NN); #c1(LRRN1) c2(NP_065924) c3(leucine-rich repeat neuronal protein 1 precursor) c4(206286) c5(206287, 206288, 206289, 206290, 206291, 206292) c6( ) c7(cm, T, oe, gv); #c1(LRRN2) c2(NP_006329) c3(leucine-rich repeat neuronal protein 2 precursor) c4(164055) c5(164056, 164057, 164058, 164059, 164060, 164061, 164062, 164063, 164064, 164065, 164066, 164067, 164068, 164069) c6( ) c7(bM, fw, d, eA, qy); #c1(LRRN3) c2(NP_001093128) c3(leucine-rich repeat neuronal protein 3 precursor) c4(39801) c5(39802, 39803, 39804, 39805, 39806, 39807, 39808, 39809, 39810, 39811, 39812, 39813, 39814, 39815) c6( ) c7(cm, T, oe, VX); #c1(LRRN4) c2(NP_689824) c3(leucine-rich repeat neuronal protein 4 precursor) c4(244044) c5(244045, 244046, 244047, 244048, 244049, 244050) c6( ) c7(T, gv, ib); #c1(LRRTM1) c2(NP_849161) c3(leucine-rich repeat transmembrane neuronal protein 1 precursor) c4(254337, 254338, 254339, 254340) c5(254341, 254342, 254343, 254344, 254345, 254346, 254347, 254348, 254349, 254350, 254351, 254352, 254353, 254354, 254355, 254356, 254357, 254358, 254359, 254360, 254361, 254362, 254363, 254364, 254365, 254366, 254367, 254368, 254369, 254370, 254371, 254372, 254373, 254374, 254375, 254376, 254377) c6( ) c7(bM, Fn, c, aA, sv, gv, yA, jb); #c1(LRRTM2) c2(NP_056379) c3(leucine-rich repeat transmembrane neuronal protein 2 precursor) c4(187349) c5(187350, 187351, 187352, 187353, 187354, 187355) c6( ) c7(bw); #c1(LRRTM3) c2(NP_821079) c3(leucine-rich repeat transmembrane neuronal protein 3 precursor) c4(253214) c5(253215, 253216, 253217, 253218, 253219, 253220, 253221, 253222, 253223, 253224) c6( ) c7(fK, VX, af); #c1(LRRTM4) c2(NP_001128217) c3(leucine-rich repeat transmembrane neuronal protein 4 isoform a precursor) c4(49726) c5(49727, 49728, 49729, 49730, 49731, 49732, 49733, 49734, 49735, 49736) c6( ) c7(fq); #c1(LRRTM4) c2(NP_079269) c3(leucine-rich repeat transmembrane neuronal protein 4 isoform b precursor) c4(217642) c5(217643, 217644, 217645, 217646, 217647, 217648, 217649) c6( ) c7(fq); #c1(LRRTM4) c2(XP_011531417) c3(leucine-rich repeat transmembrane neuronal protein 4 isoform X1) c4( ) c5(327507, 327508, 327509, 327510, 327511, 327512) c6( ) c7(fq); #c1(LRRTM4) c2(XP_011531419) c3(leucine-rich repeat transmembrane neuronal protein 4 isoform X3) c4(327513) c5(327514, 327515, 327516, 327517, 327518, 327519) c6( ) c7(fq); #c1(LRSAM1) c2(NP_001177652) c3(E3 ubiquitin-protein ligase LRSAM1 isoform 2) c4(72823) c5(72824, 72825, 72826, 72827, 72828, 72829) c6( ) c7(eR, qb, caL, kH, Io, bU, dr); #c1(LRSAM1) c2(NP_612370) c3(E3 ubiquitin-protein ligase LRSAM1 isoform 1) c4(236298) c5(236299, 236300, 236301, 236302, 236303, 236304, 236305, 236306, 236307, 236308, 236309, 236310, 236311, 236312) c6( ) c7(eR, qb, caL, kH, Io, bU, dr); #c1(LRTM1) c2(NP_001291318) c3(leucine-rich repeat and transmembrane domain-containing protein 1 isoform 2) c4(115662) c5(115663, 115664, 115665, 115666, 115667) c6( ) c7(bL, aw, j); #c1(LRTM1) c2(NP_065729) c3(leucine-rich repeat and transmembrane domain-containing protein 1 isoform 1 precursor) c4(205107) c5(205108, 205109, 205110, 205111, 205112, 205113, 205114) c6( ) c7(bL, aw, j); #c1(LRTOMT) c2(NP_001138779) c3(leucine-rich repeat-containing protein 51 isoform LRTOMT1b) c4(57662) c5(57663, 57664, 57665, 57666, 57667, 57668, 57669, 57670, 57671, 57672) c6( ) c7(aW, caM, Bh, aT); #c1(LRTOMT) c2(NP_001138781) c3(transmembrane O-methyltransferase isoform LRTOMT2a) c4(57673) c5(57674, 57675, 57676, 57677, 57678, 57679, 57680, 57681, 57682, 57683) c6( ) c7(aW, caM, Bh, aT); #c1(LRTOMT) c2(NP_001138782) c3(transmembrane O-methyltransferase isoform LRTOMT2b) c4(57684) c5(57685, 57686, 57687, 57688, 57689, 57690) c6( ) c7(aW, caM, Bh, aT); #c1(LRTOMT) c2(NP_001192067) c3(leucine-rich repeat-containing protein 51 isoform LRTOMT1c) c4(81910) c5(81911, 81912, 81913, 81914, 81915, 81916) c6( ) c7(aW, caM, Bh, aT); #c1(LRTOMT) c2(NP_001258400) c3(leucine-rich repeat-containing protein 51 isoform LRTOMT1d) c4( ) c5(96057, 96058, 96059, 96060, 96061, 96062, 96063, 96064, 96065, 96066, 96067, 96068, 96069, 96070, 96071, 96072, 96073, 96074) c6( ) c7(aW, caM, Bh, aT); #c1(LRTOMT) c2(NP_660352) c3(leucine-rich repeat-containing protein 51 isoform LRTOMT1a) c4(241054, 241055, 241056, 241057) c5(241058, 241059, 241060, 241061, 241062, 241063, 241064, 241065, 241066, 241067) c6( ) c7(aW, caM, Bh, aT); #c1(LSAMP) c2(NP_002329) c3(limbic system-associated membrane protein preproprotein) c4(127583) c5(127584, 127585, 127586, 127587, 127588, 127589) c6( ) c7(T, dD, bO, aA, bS, j, eq, fr, ww, py, ds, cU, h, XZ, d, tb, s, eH, apn, r, Ni, Io, aF, eF, awi, hq, alm, aDX, ig, awx, AH, iu); #c1(LSAMP) c2(XP_005247511) c3(limbic system-associated membrane protein isoform X1) c4(267856) c5(267857, 267858, 267859, 267860, 267861, 267862) c6( ) c7(T, dD, bO, aA, bS, j, eq, fr, ww, py, ds, cU, h, XZ, d, tb, s, eH, apn, r, Ni, Io, aF, eF, awi, hq, alm, aDX, ig, awx, AH, iu); #c1(LSM1) c2(NP_055277) c3(U6 snRNA-associated Sm-like protein LSm1) c4(180230) c5(180231, 180232, 180233, 180234, 180235, 180236) c6( ) c7(ae, aC, ib, aE, aW, aT, bX, bz, ad); #c1(LSM11) c2(NP_775762) c3(07 snRNA-associated Sm-like protein LSm11) c4(250210) c5(250211, 250212, 250213, 250214, 250215, 250216) c6( ) c7(aw); #c1(LSM2) c2(NP_067000) c3(U6 snRNA-associated Sm-like protein LSm2) c4(208217) c5(208218, 208219, 208220, 208221, 208222, 208223, 208224, 208225, 208226, 208227, 208228, 208229, 208230, 208231, 208232, 208233, 208234, 208235, 208236, 208237, 208238) c6( ) c7(zT, T, eW, eZ, aT, kf, uo, h, mK, yZ, aGX, aVK, yU, f, nC, caN, Ro); #c1(LSM3) c2(NP_055278) c3(U6 snRNA-associated Sm-like protein LSm3) c4(180237) c5(180238, 180239, 180240, 180241, 180242, 180243) c6( ) c7(Ea); #c1(LSM4) c2(NP_036453) c3(U6 snRNA-associated Sm-like protein LSm4 isoform 1) c4(174000) c5(174001, 174002, 174003, 174004, 174005, 174006, 174007, 174008, 174009, 174010) c6( ) c7(T, aA, fr, eA, ad, av, ft, zw, aE, pX, aT, K, ae, gj, aW, aF, g, cm, t, bz, iK, es, eM, iA, m, y); #c1(LSM5) c2(NP_036454) c3(U6 snRNA-associated Sm-like protein LSm5 isoform a) c4(174011) c5(174012, 174013, 174014, 174015, 174016, 174017) c6( ) c7(kl); #c1(LSM6) c2(NP_009011) c3(U6 snRNA-associated Sm-like protein LSm6) c4(170223) c5(170224, 170225, 170226, 170227, 170228, 170229, 170230, 170231, 170232, 170233, 170234, 170235, 170236, 170237, 170238, 170239, 170240, 170241) c6( ) c7(UF); #c1(LSM7) c2(NP_057283) c3(U6 snRNA-associated Sm-like protein LSm7) c4(189846) c5(189847, 189848, 189849, 189850, 189851, 189852) c6( ) c7(T); #c1(LSP1) c2(NP_001013273) c3(lymphocyte-specific protein 1 isoform 2) c4(25465, 25466, 25467, 25468, 25469) c5(25470, 25471, 25472, 25473, 25474, 25475, 25476, 25477, 25478, 25479, 25480, 25481, 25482, 25483, 25484, 25485, 25486, 25487, 25488, 25489, 25490, 25491, 25492, 25493, 25494, 25495, 25496, 25497, 25498, 25499, 25500) c6( ) c7(T, aE, up, PE, Y, aW, iW, aT, IS, as, iV, bz, eJ); #c1(LSP1) c2(NP_001229861) c3(lymphocyte-specific protein 1 isoform 3) c4(85476) c5(85477, 85478, 85479, 85480, 85481, 85482, 85483, 85484) c6( ) c7(T, aE, up, PE, Y, aW, iW, aT, lS, as, iV, bz, eJ); #c1(LSP1) c2(NP_002330) c3(lymphocyte-specific protein 1 isoform 1) c4(127590) c5(127591, 127592, 127593, 127594, 127595, 127596, 127597, 127598, 127599, 127600, 127601) c6( ) c7(T, aE, up, PE, Y, aW, iW, aT, IS, as, iV, bz, eJ); #c1(LSR) c2(NP_001247418) c3(lipolysis-stimulated lipoprotein receptor isoform 4) c4(93496) c5(93497, 93498, 93499, 93500, 93501, 93502, 93503, 93504) c6(93505, 93506) c7(T, zQ, AO, bE, aW, aT, bB, tv, tu, ci, zP, X); #c1(LSR) c2(NP_001247419) c3(lipolysis-stimulated lipoprotein receptor isoform 5) c4(93507) c5(93508, 93509, 93510, 93511, 93512, 93513, 93514, 93515) c6(93516, 93517) c7(T, zQ, AO, bE, aW, aT, bB, tv, tu, ci, zP, X); #c1(LSR) c2(NP_057009) c3(lipolysis-stimulated lipoprotein receptor isoform 1) c4(188452) c5(188453, 188454, 188455, 188456, 188457, 188458, 188459, 188460, 188461) c6(188462, 188463) c7(T, zQ, AO, bE, aW, aT, bB, tv, tu, ci, zP, X); #c1(LSR) c2(NP_991403) c3(lipolysis-stimulated lipoprotein receptor isoform 2) c4(263458) c5(263459, 263460, 263461, 263462, 263463, 263464, 263465, 263466) c6(263467, 263468) c7(T, zQ, AO, bE, aW, aT, bB, tv, tu, ci, zP, X); #c1(LSR) c2(NP_991404) c3(lipolysis-stimulated lipoprotein receptor isoform 3) c4(263469) c5(263470, 263471, 263472, 263473, 263474, 263475, 263476, 263477) c6(263478, 263479) c7(T, zQ, AO, bE, aW, aT, bB, tv, tu, ci, zP, X); #c1(LSR) c2(XP_005259037) c3(lipolysis-stimulated lipoprotein receptor isoform X1) c4(275925) c5(275926, 275927, 275928, 275929, 275930, 275931, 275932, 275933) c6(275934, 275935) c7(T, zQ, AO, bE, aW, aT, bB, tv, tu, ci, zP, X); #c1(LSS) c2(NP_001001438) c3(lanosterol synthase isoform 1) c4(18491) c5(18492, 18493, 18494, 18495, 18496, 18497, 18498, 18499, 18500, 18501, 18502, 18503, 18504, 18505, 18506, 18507) c6( ) c7(hT, ff, agF, en, du, ZW); #c1(LSS) c2(NP_001138908) c3(lanosterol synthase isoform 2) c4(58130) c5(58131, 58132, 58133, 58134, 58135, 58136) c6( ) c7(hT, ff, agF, en, du, ZW); #c1(LSS) c2(NP_001138909) c3(lanosterol synthase isoform 3) c4(58137) c5( ) c6( ) c7(hT, ff, agF, en, du, ZW); #c1(LST1) c2(NP_995309) c3(leukocyte-specific transcript 1 protein isoform 2) c4(263480, 263481) c5(263482, 263483, 263484, 263485, 263486, 263487, 263488, 263489, 263490, 263491, 263492, 263493, 263494, 263495, 263496, 263497, 263498, 263499, 263500, 263501, 263502, 263503, 263504, 263505, 263506, 263507, 263508, 263509, 263510, 263511, 263512, 263513, 263514, 263515, 263516, 263517, 263518, 263519, 263520, 263521, 263522, 263523, 263524, 263525, 263526, 263527, 263528, 263529, 263530, 263531, 263532, 263533, 263534, 263535, 263536, 263537, 263538, 263539, 263540, 263541, 263542, 263543, 263544, 263545, 263546, 263547, 263548, 263549, 263550, 263551, 263552, 263553, 263554, 263555, 263556, 263557) c6( ) c7(A, fR, sQ, dV, cr, uo, eZ, ut, Hs, pD, lQ, C, aiJ, vk); #c1(LST1) c2(NP_995310) c3(leukocyte-specific transcript 1 protein isoform 3) c4(263558, 263559) c5(263560, 263561, 263562, 263563, 263564, 263565, 263566, 263567, 263568, 263569, 263570, 263571, 263572, 263573, 263574, 263575, 263576, 263577, 263578, 263579, 263580, 263581, 263582, 263583, 263584, 263585, 263586, 263587, 263588, 263589, 263590, 263591, 263592, 263593, 263594, 263595, 263596, 263597, 263598, 263599, 263600, 263601, 263602, 263603, 263604, 263605, 263606, 263607, 263608, 263609, 263610, 263611, 263612, 263613, 263614, 263615, 263616, 263617, 263618, 263619, 263620, 263621, 263622, 263623, 263624, 263625, 263626, 263627, 263628, 263629, 263630, 263631, 263632, 263633, 263634, 263635, 263636, 263637, 263638, 263639, 263640, 263641, 263642, 263643, 263644, 263645, 263646, 263647, 263648, 263649, 263650, 263651, 263652, 263653, 263654, 263655, 263656, 263657, 263658, 263659, 263660, 263661, 263662, 263663, 263664, 263665, 263666, 263667, 263668, 263669, 263670, 263671, 263672, 263673, 263674, 263675, 263676, 263677, 263678, 263679, 263680, 263681, 263682, 263683, 263684, 263685, 263686, 263687, 263688, 263689, 263690, 263691, 263692, 263693) c6( ) c7(A, fR, sQ, dV, cr, uo, eZ, ut, Hs, pD, lQ, C, aiJ, vk); #c1(LST1) c2(NP_995311) c3(leukocyte-specific transcript 1 protein isoform 4) c4(263694, 263695, 263696, 263697, 263698) c5(263699, 263700, 263701, 263702, 263703, 263704, 263705, 263706, 263707, 263708, 263709, 263710, 263711, 263712, 263713, 263714, 263715, 263716, 263717, 263718, 263719, 263720, 263721, 263722, 263723, 263724, 263725, 263726, 263727, 263728, 263729, 263730, 263731, 263732, 263733, 263734, 263735, 263736, 263737, 263738, 263739, 263740, 263741, 263742, 263743, 263744, 263745, 263746, 263747, 263748, 263749, 263750, 263751, 263752, 263753, 263754, 263755, 263756, 263757, 263758, 263759, 263760, 263761, 263762, 263763, 263764, 263765, 263766, 263767, 263768, 263769, 263770, 263771, 263772, 263773, 263774, 263775, 263776, 263777, 263778, 263779, 263780, 263781, 263782, 263783, 263784, 263785, 263786, 263787, 263788) c6( ) c7(A, fR, sQ, dV, cr, uo, eZ, ut, Hs, pD, lQ, C, aiJ, vk); #c1(LST1) c2(XP_006715272) c3(leukocyte-specific transcript 1 protein isoform X2) c4(289195, 289196) c5(289197, 289198, 289199, 289200, 289201, 289202, 289203, 289204, 289205, 289206, 289207, 289208, 289209, 289210, 289211, 289212, 289213, 289214, 289215, 289216, 289217, 289218, 289219, 289220, 289221, 289222, 289223, 289224, 289225, 289226, 289227, 289228, 289229, 289230, 289231, 289232, 289233, 289234, 289235, 289236, 289237, 289238, 289239, 289240, 289241, 289242, 289243, 289244, 289245, 289246, 289247, 289248, 289249, 289250, 289251, 289252, 289253, 289254, 289255, 289256, 289257, 289258, 289259, 289260, 289261, 289262, 289263, 289264, 289265, 289266, 289267) c6( ) c7(A, fR, sQ, dV, cr, uo, eZ, ut, Hs, pD, lQ, C, aiJ, vk); #c1(LST1) c2(XP_006715273) c3(leukocyte-specific transcript 1 protein isoform X3) c4(289268, 289269, 289270, 289271) c5(289272, 289273, 289274, 289275, 289276, 289277, 289278, 289279, 289280, 289281, 289282, 289283, 289284, 289285, 289286, 289287, 289288, 289289, 289290, 289291, 289292, 289293, 289294, 289295, 289296, 289297, 289298, 289299, 289300, 289301, 289302, 289303, 289304, 289305, 289306, 289307, 289308, 289309, 289310, 289311, 289312, 289313, 289314, 289315, 289316, 289317, 289318, 289319, 289320, 289321, 289322, 289323, 289324, 289325, 289326, 289327, 289328, 289329, 289330, 289331, 289332, 289333, 289334, 289335, 289336, 289337, 289338, 289339, 289340, 289341, 289342, 289343, 289344, 289345, 289346, 289347, 289348, 289349, 289350, 289351, 289352, 289353, 289354, 289355, 289356, 289357, 289358, 289359, 289360, 289361, 289362, 289363, 289364, 289365, 289366, 289367, 289368, 289369, 289370, 289371, 289372, 289373, 289374, 289375, 289376, 289377, 289378, 289379, 289380, 289381, 289382, 289383, 289384, 289385, 289386, 289387, 289388, 289389, 289390, 289391, 289392, 289393, 289394, 289395, 289396, 289397, 289398, 289399, 289400, 289401, 289402, 289403, 289404, 289405, 289406, 289407, 289408, 289409, 289410, 289411, 289412, 289413, 289414, 289415, 289416, 289417, 289418, 289419, 289420, 289421, 289422, 289423, 289424, 289425, 289426, 289427, 289428, 289429, 289430, 289431, 289432, 289433, 289434, 289435, 289436, 289437, 289438, 289439, 289440, 289441) c6( ) c7(A, fR, sQ, dV, cr, uo, eZ, ut, Hs, pD, lQ, C, aiJ, vk); #c1(LST1) c2(XP_011513216) c3(leukocyte-specific transcript 1 protein isoform X1) c4(305437) c5(305438, 305439, 305440, 305441, 305442, 305443, 305444, 305445, 305446, 305447, 305448, 305449, 305450, 305451, 305452, 305453, 305454, 305455, 305456, 305457, 305458, 305459, 305460, 305461, 305462, 305463, 305464, 305465, 305466) c6( ) c7(A, fR, sQ, dV, cr, uo, eZ, ut, Hs, pD, lQ, C, aiJ, vk); #c1(LTA) c2(XP_011512920) c3(lymphotoxin-alpha isoform X1) c4(304285, 304286) c5(304287, 304288, 304289, 304290, 304291, 304292, 304293, 304294, 304295, 304296, 304297, 304298, 304299, 304300, 304301, 304302, 304303, 304304, 304305, 304306, 304307, 304308, 304309, 304310, 304311, 304312, 304313, 304314, 304315, 304316, 304317, 304318, 304319, 304320) c6( ) c7(bM, T, os, fR, ea, if, e, eb, fd, cL, ur, qj, aMB, bHS, AW, aE, lu, bW, fS, M, dV, Ds, dQ, hH, DY, eN, aiJ, hm, bzH, aa, bn, aW, axu, hl, kt, pD, g, eE, bw, uC, y, fT, aDs, mx, vy, cj, k, eg, qR, dD, sw, aw, ht, n, aj, BE, aBl, uE, qN, qW, cd, ai, eh, eW, aPb, Mo, aMj, cU, Ne, jy, dL, aaA, wb, h, eV, aDp, bEg, A, sp, ge, fe, yq, CQ, vo, cM, Wt, ar, kT, hk, mg, bcd, hL, uz, at, eo, fL, gg, bL, Dw, jv, fM, eR, AL, jx, eX, aA, cz, tc, fF, v, j, C, bX, wy, V, pd, q, J, o, zn, ga, mP, hb, nX, jZ, ld, qp, aT, vH, qG, aDt, rz, ae, caR, af, dl, bA, eu, aFS, hM, s, iU, Y, apK, r, iy, aPf, en, bu, cl, pb, vk, OC, iM, sn, c, ac, ig, AH, caP, aYx, EY, fD, byK, gT, bt, ao, sY, aD, em, iW, jh, oR, oZ, dG, uu, jE, eq, mC, ad, caO, dZ, dP, hX, bPu, av, F, wD, oW, Os, hD, JK, vB, WW, uQ, asn, lU, je, cW, ff, cr, eZ, dq, aF, caQ, hp, iV, Z, bz, Hv, qa, eK, LB, gk, axs, yE, z, dO, sG, gZ, Hs, aS, ei, lf, iu, hv, pC); #c1(LTA) c2(XP_011545552) c3(lymphotoxin-alpha isoform X1) c4(344305, 344306) c5(344307, 344308, 344309, 344310, 344311, 344312, 344313, 344314, 344315, 344316, 344317, 344318, 344319, 344320, 344321, 344322) c6( ) c7(bM, T, os, fR, ea, if, e, eh, fd, cL, ur, qj, aMB, bHS, AW, aE, lu, bW, fS, M, dV, Ds, dQ, hH, DY, eN, aiJ, hm, bzH, aa, bn, aW, axu, hl, kt, pD, g, eE, bw, uC, y, fT, aDs, mx, vy, cj, k, eg, qR, dD, sw, aw, ht, n, aj, BF, aBl, uE, qN, qW, cd, ai, eh, eW, aPb, Mo, aMj, cU, Ne, jy, dL, aaA, wb, h, eV, aDp, bEg, A, sp, ge, fe, yq, CQ, vo, cM, Wt, ar, kT, hk, mg, bcd, hL, uz, at, eo, fL, gg, bL, Dw, jv, fM, eR, AL, jx, eX, aA, cz, tc, fF, v, j, C, bX, wy, V, pd, q, J, o, zn, ga, mP, hb, nX, jZ, ld, qp, aT, vH, qG, aDt, rz, ae, caR, af, dl, bA, eu, aFS, hM, s, iU, Y, apK, r, iy, aPf, en, bu, cl, pb, vk, OC, iM, sn, c, ac, ig, AH, caP, aYx, EY, fD, byK, gT, bt, ao, sY, aD, em, iW, jh, oR, oZ, dG, uu, jE, eq, mC, ad, caO, dZ, dP, hX, bPu, av, F, wD, oW, Os, hD, JK, vB, WW, uQ, asn, lU, je, cW, ff, cr, eZ, dq, aF, caQ, hp, iV, Z, bz, Hv, qa, eK, LB, gk, axs, yE, z, dO, sG, gZ, Hs, aS, ei, lf, iu, hv, pC); #c1(LTA) c2(XP_011546545) c3(lymphotoxin-alpha isoform X1) c4(345348, 345349) c5(345350, 345351, 345352, 345353, 345354, 345355, 345356, 345357, 345358, 345359, 345360, 345361, 345362, 345363, 345364, 345365, 345366, 345367, 345368, 345369, 345370, 345371, 345372, 345373, 345374, 345375, 345376, 345377, 345378, 345379, 345380, 345381, 345382, 345383) c6( ) c7(bM, T, os, fR, ea, if, e, eb, fd, cL, ur, qj, aMB, bHS, AW, aE, lu, bW, fS, M, dV, Ds, dQ, hH, DY, eN, aiJ, hm, bzH, aa, bn, aW, axu, hl, kt, pD, g, eE, bw, uC, y, fT, aDs, mx, vy, cj, k, eg, qR, dD, sw, aw, ht, n, aj, BF, aBl, uE, qN, qW, cd, ai, eh, eW, aPb, Mo, aMj, cU, Ne, jy, dL, aaA, wb, h, eV, aDp, bEg, A, sp, ge, fe, yg, CQ, vo, cM, Wt, ar, kT, hk, mg, bcd, hL, uz, at, en, fL, gg, bL, Dw, jv, fM, eR, AL, jx, eX, aA, cz, tc, fF, v, j, C, bX, wy, V, pd, q, J, o, zn, ga, mP, hb, nX, jZ, ld, qp, aT, vH, qG, aDt, rz, ae, caR, af, dl, bA, eu, aFS, hM, s, iU, Y, apK, r, iy, aPf, en, bu, cl, pb, vk, OC, iM, sn, c, ac, ig, AH, caP, aYx, EY, fD, byK, gT, bt, ao, sY, aD, em, iW, jh, oR, nZ, dG, uu, jE, eq, mC, ad, caO, dZ, dP, hX, bPu, av, F, wD, oW, Os, hD, JK, vB, WW, uQ, asn, lU, je, cW, ff, cr, eZ, dq, aF, caQ, hp, iV, Z, bz, Hv, qa, eK, LB, gk, axs, yE, z, dO, sG, gZ, Hs, aS, ei, lf, iu, hv, pC); #c1(LTA4H) c2(NP_000886) c3(leukotriene A-4 hydrolase isoform 1) c4(16837) c5(16838, 16839, 16840, 16841, 16842, 16843) c6( ) c7(bM, dD, ea, e, aw, bS, j, ct, ah, caS, pM, eq, ad, Hr, AW, dY, aE, M, ae, eu, iU, ff, mQ, caU, en, g, Z, sK, ou, cT, acC, ac, ig, ei, caT); #c1(LTA4H) c2(NP_001243572) c3(leukotriene A-4 hydrolase isoform 2) c4(91072) c5(91073, 91074, 91075, 91076, 91077, 91078) c6( ) c7(bM, dD, ea, e, aw, bS, j, ct, ah, caS, pM, eq, ad, Hr, AW, dY, aE, M, ae, eu, iU, ff, mQ, caU, en, g, Z, sK, ou, cT, acC, ac, ig, ei, caT); #c1(LTA4H) c2(NP_001243573) c3(leukotriene A-4 hydrolase isoform 3) c4(91079) c5(91080, 91081, 91082, 91083, 91084, 91085) c6( ) c7(bM, dD, ea, e, aw, bS, j, ct, ah, caS, pM, eq, ad, Hr, AW, dY, aE, M, ae, eu, iU, ff, mQ, caU, en, g, Z, sK, ou, cT, acC, ac, ig, ei, caT); #c1(LTB) c2(NP_002332) c3(lymphotoxin-beta isoform a) c4(127602) c5(127603, 127604, 127605, 127606, 127607, 127608, 127609, 127610, 127611, 127612, 127613, 127614, 127615, 127616, 127617, 127618, 127619, 127620, 127621, 127622, 127623, 127624, 127625, 127626, 127627, 127628, 127629, 127630) c6( ) c7(bM, T, dD, aw, eX, jh, j, BF, eq, ai, dZ, x, aE, dV, h, eV, K, eu, iU, caU, eZ, aq, KM, DF, ck, TA, rR, acC, gt, ac, cj, at, k, fD, eg, y, bt, B, hv); #c1(LTB) c2(NP_033666) c3(lymphotoxin-beta isoform b) c4(172310) c5(172311, 172312, 172313, 172314, 172315) c6( ) c7(bM, T, dD, aw, eX, jh, j, BF, eq, ai, dZ, x, aE, dV, h, eV, K, eu, iU, caU, eZ, aq, KM, DF, ck, TA, rR, acC, gt, ac, cj, at, k, fD, eg, y, bt, B, hv); #c1(LTB4R) c2(NP_001137391) c3(leukotriene B4 receptor 1) c4(55613, 55614) c5(55615, 55616, 55617, 55618, 55619, 55620, 55621, 55622, 55623, 55624, 55625, 55626, 55627, 55628, 55629, 55630, 55631, 55632, 55633, 55634) c6( ) c7(bM, aC, dD, id, Ke, ea, fG, eq, C, ai, wa, dY, aE, h, alO, dL, af, eu, bf, hl, t, ac, bm, aS, m, fD, y); #c1(LTB4R2) c2(NP_062813) c3(leukotriene B4 receptor 2) c4(202056, 202057, 202058, 202059) c5(202060, 202061, 202062, 202063, 202064, 202065, 202066, 202067, 202068, 202069, 202070, 202071, 202072, 202073, 202074, 202075, 202076, 202077, 202078, 202079, 202080, 202081, 202082, 202083, 202084, 202085, 202086, 202087, 202088) c6( ) c7(bM, T, dD, id, ea, eq, eJ, ai, ad, dY, aE, aT, dL, eL, ae, Nr, aW, Xm, t, DF, Nq, ac, z, y); #c1(LTBP1) c2(NP_000618) c3(latent-transforming growth factor beta-binding protein 1 isoform LTBP-1S precursor) c4(13972, 13973) c5(13974, 13975, 13976, 13977, 13978, 13979, 13980, 13981, 13982, 13983, 13984, 13985) c6( ) c7(Gl, T, ht, al, lj, hy, j, F, aT, Gw, an, r, t, op, LB, ac, vA, bm, tV, m, Gu, hS); #c1(LTBP1) c2(NP_001159736) c3(latent-transforming growth factor beta-binding protein 1 isoform 4 precursor) c4(64649) c5(64650, 64651, 64652, 64653, 64654, 64655) c6( ) c7(Gl, T, ht, al, lj, hy, j, F, aT, Gw, an, r, t, op, LB, ac, vA, bm, tV, m, Gu, hS); #c1(LTBP1) c2(NP_001159737) c3(latent-transforming growth factor beta-binding protein 1 isoform 3 precursor) c4(64656) c5(64657, 64658, 64659, 64660, 64661, 64662) c6( ) c7(Gl, T, ht, al, lj, hy, j, F, aT, Gw, an, r, t, op, LB, ac, vA, bm, tV, m, Gu, hS); #c1(LTBP1) c2(NP_996826) c3(latent-transforming growth factor beta-binding protein 1 isoform LTBP-1L precursor) c4(264665) c5(264666, 264667, 264668, 264669, 264670, 264671) c6( ) c7(Gl, T, ht, al, lj, hy, j, F, aT, Gw, an, r, t, op, LB, ac, vA, bm, tV, m, Gu, hS); #c1(LTBP1) c2(XP_005264375) c3(latent-transforming growth factor beta-binding protein 1 isoform X11) c4( ) c5(278830, 278831, 278832, 278833, 278834, 278835) c6( ) c7(Gl, T, ht, al, lj, hy, j, F, aT, Gw, an, r, t, op, LB, ac, vA, bm, tV, m, Gu, hS); #c1(LTBP1) c2(XP_011531155) c3(latent-transforming growth factor beta-binding protein 1 isoform X1) c4(327117) c5(327118, 327119, 327120, 327121, 327122, 327123) c6( ) c7(Gl, T, ht, al, lj, hy, j, F, aT, Gw, an, r, t, op, LB, ac, vA, bm, tV, m, Gu, hS); #c1(LTBP1) c2(XP_011531159) c3(latent-transforming growth factor beta-binding protein 1 isoform X5) c4(327124) c5( ) c6( ) c7(Gl, T, ht, al, lj, hy, j, F, aT, Gw, an, r, t, op, LB, ac, vA, bm, tV, m, Gu, hS); #c1(LTBP2) c2(NP_000419) c3(latent-transforming growth factor beta-binding protein 2 precursor) c4(8782) c5(8783, 8784, 8785, 8786, 8787, 8788) c6( ) c7(vl, al, jx, fd, lj, cd, q, F, Eh, ib, Er, caX, aNM, dH, Y, vj, caW, dw, op, cad, ac, pZ, vD, vA, DC, caV, DE, JJ, adU, it, B, hS); #c1(LTBP3) c2(NP_001123616) c3(latent-transforming growth factor beta-binding protein 3 isoform 1 precursor) c4(47830, 47831, 47832) c5(47833, 47834, 47835, 47836, 47837, 47838, 47839, 47840, 47841, 47842, 47843, 47844, 47845, 47846, 47847, 47848, 47849, 47850, 47851, 47852, 47853, 47854, 47855, 47856, 47857, 47858, 47859, 47860, 47861, 47862, 47863, 47864, 47865, 47866, 47867, 47868, 47869, 47870, 47871, 47872) c6( ) c7(vl, al, fd, lj, cd, q, F, Eb, ib, Er, caX, aNM, dH, Y, Hz, Az, dw, cad, caY, bm, DE, adU, it, hS); #c1(LTBP3) c2(NP_001157738) c3(latent-transforming growth factor beta-binding protein 3 isoform 3) c4( ) c5(62470, 62471, 62472, 62473, 62474, 62475, 62476, 62477) c6( ) c7(vl, al, fd, lj, cd, q, F, Eb, ib, Er, caX, aNM, dH, Y, Hz, Az, dw, cad, caY, bm, DE, adU, it, hS); #c1(LTBP3) c2(NP_066548) c3(latent-transforming growth factor beta-binding protein 3 isoform 2 precursor) c4(207344) c5(207345, 207346, 207347, 207348, 207349, 207350, 207351, 207352) c6( ) c7(vl, al, fd, lj, cd, q, F, Eb, ib, Er, caX, aNM, dH, Y, Hz, Az, dw, cad, caY, bm, DE, adU, it, hS); #c1(LTBP3) c2(XP_011543334) c3(latent-transforming growth factor beta-binding protein 3 isoform X1) c4(342128, 342129) c5( ) c6( ) c7(vl, al, fd, lj, cd, q, F, Eh, ib, Er, caX, aNM, dH, Y, Hz, Az, dw, cad, caY, bm, DE, adU, it, hS); #c1(LTBP3) c2(XP_011543335) c3(latent-transforming growth factor beta-binding protein 3 isoform X2) c4(342130) c5(342131) c6( ) c7(vl, al, fd, lj, cd, q, F, Eh, ib, Er, caX, aNM, dH, Y, Hz, Az, dw, cad, caY, bm, DE, adU, it, hS); #c1(LTBP4) c2(NP_001036009) c3(latent-transforming growth factor beta-binding protein 4 isoform a precursor) c4(33685) c5(33686, 33687, 33688, 33689, 33690, 33691) c6( ) c7(ht, al, ci, q, F, oj, aT, hu, bf, Y, vj, xs, ff, r, uY, en, g, caZ, bm, at, aS, cba, us); #c1(LTBP4) c2(NP_001036010) c3(latent-transforming growth factor beta-binding protein 4 isoform c precursor) c4(33692) c5(33693, 33694, 33695, 33696, 33697, 33698, 33699) c6( ) c7(ht, al, ci, q, F, oj, aT, hu, bf, Y, vj, xs, ff, r, uY, en, g, caZ, bm, at, aS, cba, us); #c1(LTBP4) c2(NP_003564) c3(latent-transforming growth factor beta-binding protein 4 isoform b) c4(139202, 139203) c5( ) c6( ) c7(ht, al, ci, q, F, oj, aT, hu, bf, Y, vj, xs, ff, r, uY, en, g, caZ, bm, at, aS, cba, us); #c1(LTBP4) c2(XP_011525679) c3(latent-transforming growth factor beta-binding protein 4 isoform X2) c4( ) c5(320088, 320089, 320090, 320091, 320092, 320093) c6( ) c7(ht, al, ci, q, F, oj, aT, hu, bf, Y, vj, xs, ff, r, uY, en, g, caZ, bm, at, aS, cba, us); #c1(LTBP4) c2(XP_011525683) c3(latent-transforming growth factor beta-binding protein 4 isoform X6) c4(320094) c5(320095, 320096, 320097, 320098, 320099, 320100) c6( ) c7(ht, al, ci, q, F, oj, aT, hu, bf, Y, vj, xs, ff, r, uY, en, g, caZ, bm, at, aS, cba, us); #c1(LTBP4) c2(XP_011525687) c3(latent-transforming growth factor beta-binding protein 4 isoform X10) c4(320101) c5(320102, 320103, 320104, 320105, 320106) c6( ) c7(ht, al, ci, q, F, oj, aT, hu, bf, Y, vj, xs, ff, r, uY, en, g, caZ, bm, at, aS, cba, us); #c1(LTBP4) c2(XP_011525688) c3(latent-transforming growth factor beta-binding protein 4 isoform X11) c4(320107) c5(320108, 320109, 320110, 320111, 320112, 320113) c6( ) c7(ht, al, ci, q, F, oj, aT, hu, bf, Y, vj, xs, ff, r, uY, en, g, caZ, bm, at, aS, cba, us); #c1(LTBP4) c2(XP_011525689) c3(latent-transforming growth factor beta-binding protein 4 isoform X12) c4( ) c5(320114, 320115, 320116, 320117, 320118, 320119, 320120) c6( ) c7(ht, al, ci, q, F, oj, aT, hu, bf, Y, vj, xs, ff, r, uY, en, g, caZ, bm, at, aS, cba, us); #c1(LTBR) c2(NP_001257916) c3(tumor necrosis factor receptor superfamily member 3 isoform 2) c4(95797) c5(95798, 95799, 95800, 95801, 95802) c6( ) c7(oO, bM, T, dD, aC, aYZ, ea, dM, df, e, fG, jh, fF, fd, aj, v, eq, ci, C, aFV, bfO, aoj, ai, J, ad, zn, Tz, aE, pe, fh, tT, ju, dV, aMj, aT, cy, hD, lQ, ae, Nr, mR, aCg, iU, agT, A, aW, Y, oV, cr, awv, dN, po, pL, t, f, arJ, dr, aYt, OC, Nq, ck, kT, adz, iQ, ac, c, Jr, iT, cj, wR, m, y, bt, zA, AN, hv, aHl); #c1(LTBR) c2(NP_002333) c3(tumor necrosis factor receptor superfamily member 3 isoform 1 precursor) c4(127631) c5(127632, 127633, 127634, 127635, 127636, 127637, 127638) c6( ) c7(oO, bM, T, dD, aC, aYZ, ea, dM, df, e, fG, jh, fF, fd, aj, v, eq, ci, C, aFV, bfO, aoj, ai, J, ad, zn, Tz, aE, pe, fh, tT, ju, dV, aMj, aT, cy, hD, lQ, ae, Nr, mR, aCg, iU, agT, A, aW, Y, oV, cr, awv, dN, po, pL, t, f, arJ, dr, aYt, OC, Ng, ck, kT, adz, iQ, ac, c, Jr, iT, cj, wR, m, y, bt, zA, AN, hv, aHl); #c1(LTBR) c2(XP_006719046) c3(tumor necrosis factor receptor superfamily member 3 isoform X2) c4( ) c5(292202) c6( ) c7(oO, bM, T, dD, aC, aYZ, ea, dM, df, e, fG, jh, fF, fd, aj, v, eq, ci, C, aFV, bfO, aoj, ai, J, ad, zn, Tz, aE, pe, fh, tT, ju, dV, aMj, aT, cy, hD, lQ, ae, Nr, mR, aCg, iU, agT, A, aW, Y, oV, cr, awv, dN, po, pL, t, f, arJ, dr, aYt, OC, Ng, ck, kT, adz, iQ, ac, c, Jr, iT, cj, wR, m, y, bt, zA, AN, hv, aHl); #c1(LTC4S) c2(NP_665874) c3(leukotriene C4 synthase) c4(241897) c5(241898, 241899, 241900, 241901, 241902, 241903) c6( ) c7(bL, bM, bjX, e, aw, eX, rf, j, bX, dY, fS, M, Tx, cy, eV, JK, cbb, af, eu, iU, sp, ap, vs, cM, tk, ac, z, hc, JM, at, Tu); #c1(LTF) c2(NP_001186078) c3(lactotransferrin isoform 2) c4(77050) c5(77051, 77052, 77053, 77054, 77055, 77056) c6( ) c7(bM, sY, ka, T, dA, fR, Dw, aPJ, aKm, n, afK, v, ci, hF, Tz, ad, eW, dP, av, ft, aaU, rw, oW, aT, Ds, ey, ae, bA, le, iU, aW, Y, oV, Zf, aq, cl, bBu, iV, uC, bz, aBs, D, eM, ki, wz, Br, uz, mf, X); #c1(LTF) c2(NP_002334) c3(lactotransferrin isoform 1 precursor) c4(127639, 127640, 127641) c5(127642, 127643, 127644, 127645, 127646, 127647, 127648, 127649, 127650, 127651, 127652, 127653) c6( ) c7(bM, sY, ka, T, dA, fR, Dw, aPJ, aKm, n, afK, v, ci, hF, Tz, ad, eW, dP, av, ft, aaU, rw, oW, aT, Ds, ey, ae, bA, le, iU, aW, Y, oV, Zf, aq, cl, bBu, iV, uC, bz, aBs, D, eM, ki, wz, Br, uz, mf, X); #c1(LTK) c2(NP_001129157) c3(leukocyte tyrosine kinase receptor isoform 3 precursor) c4(50938) c5(50939, 50940, 50941, 50942, 50943, 50944) c6( ) c7(ck, T, kl, eZ, bX); #c1(LTK) c2(NP_002335) c3(leukocyte tyrosine kinase receptor isoform 1 precursor) c4(127654) c5(127655, 127656, 127657, 127658, 127659, 127660) c6( ) c7(ck, T, kl, eZ, bX); #c1(LTK) c2(NP_996844) c3(leukocyte tyrosine kinase receptor isoform 2 precursor) c4(264748) c5(264749, 264750, 264751, 264752, 264753, 264754) c6( ) c7(ck, T, kl, eZ, bX); #c1(LTK) c2(XP_011519858) c3(leukocyte tyrosine kinase receptor isoform X1) c4(314598) c5(314599, 314600, 314601, 314602, 314603, 314604) c6( ) c7(ck, T, kl, eZ, bX); #c1(LUC7L) c2(NP_060502) c3(putative RNA-binding protein Luc7-like 1 isoform a) c4(196262) c5(196263, 196264, 196265, 196266, 196267, 196268, 196269, 196270, 196271, 196272, 196273, 196274, 196275, 196276, 196277, 196278, 196279, 196280) c6( ) c7(oW, qe, ER); #c1(LUC7L) c2(NP_958815) c3(putative RNA-binding protein Luc7-like 1 isoform b) c4(262215, 262216) c5(262217) c6( ) c7(oW, qe, ER); #c1(LUC7L) c2(XP_005255486) c3(putative RNA-binding protein Luc7-like 1 isoform X4) c4(273673, 273674) c5(273675, 273676, 273677, 273678, 273679, 273680, 273681, 273682, 273683, 273684, 273685) c6( ) c7(oW, qe, ER); #c1(LUC7L) c2(XP_011520863) c3(putative RNA-binding protein Luc7-like 1 isoform X2) c4( ) c5(315873) c6( ) c7(oW, qe, ER); #c1(LUC7L) c2(XP_011520865) c3(putative RNA-binding protein Luc7-like 1 isoform X3) c4(315874, 315875) c5(315876, 315877, 315878, 315879, 315880, 315881, 315882, 315883, 315884, 315885) c6( ) c7(oW, qe, ER); #c1(LUC7L3) c2(NP_057508) c3(luc7-like protein 3) c4(191192) c5( ) c6( ) c7(bv, T, cF, r, q, iK, cd); #c1(LUC7L3) c2(XP_005257506) c3(luc7-like protein 3 isoform X2) c4(275153, 275154) c5( ) c6( ) c7(bv, T, cF, r, q, iK, cd); #c1(LUC7L3) c2(XP_005257512) c3(luc7-like protein 3 isoform X7) c4( ) c5(275155, 275156, 275157, 275158, 275159, 275160, 275161, 275162, 275163, 275164, 275165, 275166, 275167, 275168, 275169, 275170, 275171, 275172, 275173, 275174, 275175, 275176, 275177, 275178, 275179, 275180, 275181, 275182, 275183, 275184) c6( ) c7(bv, T, cF, r, q, iK, cd); #c1(LUC7L3) c2(XP_006722006) c3(luc7-like protein 3 isoform X6) c4(294539) c5( ) c6( ) c7(bv, T, cF, r, q, iK, cd); #c1(LUM) c2(NP_002336) c3(lumican precursor) c4(127661) c5(127662, 127663, 127664, 127665, 127666, 127667) c6( ) c7(T, asg, aC, eR, zt, if, jx, lL, bB, j, cd, q, eA, eJ, afb, cc, aE, Db, Bc, le, aT, Yi, cp, cW, aW, Y, ev, eH, hl, eZ, r, ff, lo, kp, en, g, eF, bz, D, bE, nG, mg, Be, rx, iu); #c1(LURAP1L) c2(NP_981948) c3(leucine rich adaptor protein 1-like) c4(263184) c5(263185, 263186, 263187, 263188, 263189, 263190) c6( ) c7(j); #c1(LUZP4) c2(NP_057467) c3(leucine zipper protein 4) c4(191116, 191117) c5(191118, 191119, 191120, 191121, 191122, 191123, 191124, 191125, 191126, 191127, 191128) c6( ) c7(WB, fd, bu); #c1(LUZP4) c2(XP_005268400) c3(leucine zipper protein 4 isoform X1) c4(281797) c5(281798, 281799, 281800, 281801, 281802, 281803) c6( ) c7(WB, fd, bu); #c1(LUZP6) c2(NP_001122091) c3(leucine zipper protein 6) c4( ) c5(46441) c6( ) c7(ae, ad); #c1(LVRN) c2(NP_776161) c3(aminopeptidase Q) c4(250902, 250903) c5(250904, 250905, 250906, 250907, 250908, 250909, 250910, 250911, 250912, 250913, 250914, 250915) c6( ) c7(y, Y, jv, uC, cz); #c1(LVRN) c2(XP_011541565) c3(aminopeptidase Q isoform X3) c4(340104) c5(340105, 340106, 340107, 340108, 340109, 340110) c6( ) c7(y, Y, jv, uC, cz); #c1(LXN) c2(NP_064554) c3(latexin) c4(202976) c5(202977, 202978, 202979, 202980, 202981, 202982) c6( ) c7(lD, T, jh, aA, bS, ci, aQF, ad, vN, BY, eA, aow, aT, K, dQ, H, ae, aW, Y, aF, hf, cl, t, op, bN, hq, ck, pH, vA, aiM, hL, dW, m, lC, y); #c1(LYGD) c2(NP_003686) c3(lymphocyte antigen 60 precursor) c4(140185) c5(140186, 140187, 140188, 140189, 140190, 140191) c6( ) c7(iK, g); #c1(LY6E) c2(NP_001120685) c3(lymphocyte antigen 6E precursor) c4(44554, 44555) c5(44556, 44557, 44558, 44559, 44560, 44561, 44562, 44563, 44564, 44565, 44566, 44567, 44568, 44569, 44570, 44571, 44572, 44573, 44574, 44575, 44576, 44577, 44578, 44579, 44580, 44581, 44582, 44583, 44584, 44585, 44586, 44587, 44588, 44589, 44590, 44591) c6( ) c7(T, aC, alW, Ol, yY, rf, Nt, lb, GC, Kh, alS, bX, V, Kx, ad, Gt, KB, aV, ds, aU, yZ, alU, aPF, bV, ae, af, alL, cC, rU, eZ, akL, EH, adE, aBs, alT, ac, ky, kB, c, Kv, X, U, nw, Kj, alV, B); #c1(LYGG5B) c2(NP_067044) c3(lymphocyte antigen 6 complex locus protein G5b precursor) c4(208595, 208596, 208597, 208598, 208599) c5(208600, 208601, 208602, 208603, 208604, 208605, 208606, 208607, 208608, 208609, 208610, 208611, 208612, 208613, 208614, 208615, 208616, 208617, 208618, 208619, 208620, 208621, 208622, 208623, 208624, 208625, 208626, 208627, 208628, 208629, 208630, 208631, 208632, 208633, 208634, 208635, 208636, 208637, 208638, 208639, 208640, 208641, 208642, 208643, 208644, 208645, 208646, 208647, 208648, 208649, 208650, 208651, 208652, 208653, 208654, 208655, 208656, 208657, 208658, 208659, 208660, 208661, 208662, 208663, 208664, 208665, 208666, 208667, 208668, 208669, 208670, 208671, 208672, 208673, 208674, 208675, 208676, 208677, 208678, 208679, 208680, 208681, 208682) c6(208683, 208684, 208685, 208686, 208687, 208688, 208689, 208690, 208691, 208692, 208693, 208694, 208695, 208696, 208697, 208698) c7(A, ac, aw, e, eZ, j, eu); #c1(LY6G5C) c2(NP_079538) c3(lymphocyte antigen 6 complex locus protein G5c precursor) c4(218941, 218942, 218943, 218944) c5(218945, 218946, 218947, 218948, 218949, 218950, 218951, 218952, 218953, 218954, 218955, 218956, 218957, 218958, 218959, 218960, 218961, 218962, 218963, 218964, 218965, 218966, 218967, 218968, 218969, 218970, 218971, 218972, 218973, 218974, 218975, 218976, 218977, 218978, 218979, 218980, 218981, 218982, 218983, 218984, 218985, 218986, 218987, 218988, 218989, 218990, 218991, 218992, 218993, 218994, 218995, 218996, 218997, 218998, 218999, 219000, 219001, 219002, 219003, 219004, 219005, 219006, 219007, 219008, 219009, 219010, 219011, 219012, 219013, 219014, 219015, 219016, 219017, 219018, 219019, 219020, 219021, 219022, 219023, 219024, 219025, 219026, 219027, 219028, 219029, 219030, 219031, 219032, 219033, 219034, 219035, 219036, 219037, 219038, 219039, 219040, 219041, 219042, 219043, 219044, 219045, 219046, 219047, 219048, 219049, 219050, 219051, 219052, 219053, 219054, 219055, 219056, 219057, 219058, 219059, 219060, 219061, 219062, 219063, 219064, 219065, 219066) c6(219067, 219068, 219069, 219070, 219071, 219072, 219073, 219074, 219075, 219076, 219077, 219078, 219079, 219080, 219081, 219082, 219083, 219084, 219085, 219086, 219087, 219088, 219089, 219090, 219091, 219092, 219093, 219094, 219095, 219096, 219097, 219098, 219099, 219100, 219101, 219102, 219103, 219104, 219105, 219106, 219107, 219108) c7(y, W, eZ); #c1(LY6G6C) c2(NP_079537) c3(lymphocyte antigen 6 complex locus protein G6c precursor) c4(218906) c5(218907, 218908, 218909, 218910, 218911, 218912, 218913, 218914, 218915, 218916, 218917, 218918, 218919, 218920, 218921, 218922, 218923, 218924, 218925, 218926, 218927, 218928, 218929, 218930, 218931, 218932, 218933, 218934, 218935, 218936, 218937, 218938, 218939, 218940) c6( ) c7(y, ah, eZ, fd); #c1(LY6G6C) c2(XP_011546609) c3(lymphocyte antigen 6 complex locus protein G6c isoform X1) c4(345434) c5( ) c6( ) c7(y, ah, eZ, fd); #c1(LY6G6F) c2(NP_001003693) c3(lymphocyte antigen 6 complex locus protein G6f precursor) c4(19904, 19905, 19906, 19907, 19908) c5(19909, 19910, 19911, 19912, 19913, 19914, 19915, 19916, 19917, 19918, 19919, 19920, 19921, 19922, 19923, 19924, 19925, 19926, 19927, 19928, 19929, 19930, 19931, 19932, 19933, 19934, 19935, 19936, 19937, 19938, 19939, 19940, 19941, 19942, 19943, 19944, 19945, 19946, 19947, 19948, 19949, 19950, 19951, 19952, 19953, 19954, 19955, 19956, 19957, 19958, 19959, 19960, 19961, 19962, 19963) c6( ) c7(WY, W, eZ); #c1(LY6K) c2(NP_059997) c3(lymphocyte antigen 6K isoform 1 precursor) c4(193575, 193576) c5(193577, 193578, 193579, 193580, 193581, 193582, 193583, 193584, 193585, 193586, 193587, 193588, 193589, 193590, 193591, 193592, 193593, 193594, 193595) c6(193596, 193597, 193598, 193599) c7(T, eM, aW, ff, ht, bu, aA, aT, dL, v, ci, en, hu, aF, iK, eL); #c1(LY75) c2(NP_002340) c3(lymphocyte antigen 75 precursor) c4(127675) c5(127676, 127677, 127678, 127679, 127680, 127681) c6( ) c7(Y, eX, mx, gZ, h, eV, m, t, pd, cd); #c1(LY75-CD302) c2(NP_001185688) c3(LY75-CD302 fusion protein isoform 1 precursor) c4(76037) c5(76038, 76039, 76040, 76041, 76042, 76043, 76044, 76045, 76046, 76047) c6( ) c7(Y, mx, gZ, h, m, t, cd); #c1(LY75-CD302) c2(NP_001185689) c3(LY75-CD302 fusion protein isoform 2 precursor) c4(76048) c5(76049, 76050, 76051, 76052, 76053, 76054, 76055, 76056, 76057, 76058) c6( ) c7(Y, mx, gZ, h, m, t, cd); #c1(LY86) c2(NP_004262) c3(lymphocyte antigen 86 precursor) c4(144680) c5(144681, 144682, 144683, 144684, 144685, 144686, 144687, 144688, 144689, 144690, 144691, 144692, 144693, 144694) c6(144695, 144696) c7(bM, j, lS, up, pN); #c1(LY9) c2(NP_001028839) c3(T-lymphncyte surface antigen Ly-9 isoform b) c4(30679) c5(30680, 30681, 30682, 30683, 30684, 30685) c6( ) c7(B, eZ, fd); #c1(LY9) c2(NP_001248385) c3(T-lymphocyte surface antigen Ly-9 isoform c) c4( ) c5(93919, 93920) c6( ) c7(B, eZ, fd); #c1(LY9) c2(NP_001248386) c3(T-lymphocyte surface antigen Ly-9 isoform d precursor) c4(93921, 93922) c5(93923, 93924, 93925, 93926, 93927, 93928, 93929, 93930, 93931, 93932, 93933, 93934, 93935) c6( ) c7(B, eZ, fd); #c1(LY9) c2(NP_002339) c3(T-lymphocyte surface antigen Ly-9 isoform a precursor) c4(127668) c5(127669, 127670, 127671, 127672, 127673, 127674) c6( ) c7(B, eZ, fd); #c1(LY9) c2(XP_011507853) c3(T-lymphocyte surface antigen Ly-9 isoform X4) c4(298000) c5(298001, 298002, 298003, 298004, 298005) c6( ) c7(B, eZ, fd); #c1(LY9) c2(XP_011507854) c3(T-lymphocyte surface antigen Ly-9 isoform X5) c4(298006) c5(298007, 298008, 298009, 298010, 298011, 298012, 298013, 298014, 298015) c6( ) c7(B, eZ, fd); #c1(LY9) c2(XP_011507856) c3(T-lymphocyte surface antigen Ly-9 isoform X7) c4(298016) c5(298017, 298018, 298019, 298020, 298021, 298022) c6( ) c7(B, eZ, fd); #c1(LY9) c2(XP_011507857) c3(T-lymphocyte surface antigen Ly-9 isoform X8) c4(298023) c5(298024, 298025, 298026, 298027, 298028) c6( ) c7(B, eZ, fd); #c1(LY96) c2(NP_001182726) c3(lymphocyte antigen 96 isoform 2 precursor) c4(75161) c5(75162, 75163, 75164, 75165, 75166, 75167, 75168, 75169) c6(75170, 75171) c7(oO, bL, d, fR, uR, mQ, aA, fF, aFr, fe, ci, aDE, C, q); #c1(LY96) c2(NP_056179) c3(lymphocyte antigen 96 isoform 1 precursor) c4(186158) c5(186159, 186160, 186161, 186162, 186163, 186164, 186165, 186166) c6(186167, 186168) c7(oO, bL, d, fR, uR, mQ, aA, fF, aFr, fe, ci, aDE, C, q); #c1(LYLI) c2(XP_006722815) c3(protein lyl-1 isoform X2) c4(294890) c5(294891) c6( ) c7(ck, ou, T, fM, oA, jh, bw, hn, gn, hF, bt, br); #c1(LYLI) c2(XP_011526318) c3(protein lyl-1 isoform X1) c4( ) c5(320606, 320607, 320608, 320609, 320610) c6( ) c7(ck, ou, T, fM, oA, jh, bw, hn, gn, hF, bt, br); #c1(LYN) c2(NP_001104567) c3(tyrosine-protein kinase Lyn isoform B) c4(42179) c5(42180, 42181, 42182, 42183, 42184, 42185) c6( ) c7(T, fM, bkF, jh, eA, q, dP, ib, aT, kH, h, blY, hn, ox, d, iU, aW, eZ, r, iV, ck, bt); #c1(LYN) c2(XP_011515833) c3(tyrosine-protein kinase Lyn isoform X1) c4(308794, 308795) c5(308796, 308797, 308798, 308799, 308800, 308801, 308802, 308803, 308804, 308805, 308806, 308807) c6( ) c7(T, fM, bkF, jh, eA, q, dP, ib, aT, kH, h, blY, hn, ox, d, iU, aW, eZ, r, iV, ck, bt); #c1(LYNX1) c2(NP_803253) c3(ly-6/neurotoxin-like protein 1 isoform b precursor) c4(252593) c5(252594, 252595, 252596, 252597, 252598, 252599) c6( ) c7(ci, aT, cr, Jr); #c1(LYNX1) c2(NP_803429) c3(ly-6/neurotoxin-like protein 1 isoform c precursor) c4(252600, 252601, 252602) c5(252603, 252604, 252605, 252606, 252607, 252608, 252609, 252610, 252611, 252612, 252613, 252614, 252615, 252616, 252617, 252618, 252619, 252620, 252621, 252622, 252623, 252624, 252625, 252626, 252627, 252628) c6( ) c7(ci, aT, cr, Jr); #c1(LYNX1) c2(XP_011515540) c3(ly-6/neurotoxin-like protein 1 isoform X1) c4(308367) c5(308368, 308369, 308370, 308371, 308372, 308373) c6( ) c7(ci, aT, cr, Jr); #c1(LYPD1) c2(NP_653187) c3(ly6/PLAUR domain-containing protein 1 isoform a precursor) c4(238978, 238979) c5(238980, 238981, 238982, 238983, 238984, 238985) c6( ) c7(rz); #c1(LYPD1) c2(XP_005263640) c3(ly6/PLAUR domain-containing protein 1 isoform X3) c4(278498) c5(278499, 278500, 278501, 278502, 278503, 278504) c6( ) c7(rz); #c1(LYPD1) c2(XP_005263641) c3(ly6/PLAUR domain-containing protein 1 isoform X1) c4( ) c5(278505, 278506, 278507, 278508, 278509) c6( ) c7(rz); #c1(LYPD2) c2(NP_991108) c3(ly6/PLAUR domain-containing protein 2 precursor) c4(263424) c5(263425, 263426, 263427, 263428, 263429, 263430) c6( ) c7(Ea); #c1(LYPD3) c2(NP_055215) c3(ly6/PLAUR domain-containing protein 3 precursor) c4(179883, 179884) c5(179885, 179886, 179887, 179888, 179889, 179890, 179891, 179892, 179893, 179894, 179895, 179896) c6( ) c7(av, T, Y, ff, r, aT, n, en, g, it, q); #c1(LYPD4) c2(NP_001278348) c3(ly6/PLAUR domain-containing protein 4 precursor) c4(109583) c5(109584, 109585, 109586, 109587, 109588, 109589) c6( ) c7(T, if, cbc, bB, j, qN, ad, aE, aT, dL, ae, eL, mu, aW, bw, t, bz, bP, bE, MW, wx, m); #c1(LYPD4) c2(NP_775777) c3(ly6/PLAUR domain-containing protein 4 precursor) c4(250259) c5(250260, 250261, 250262, 250263, 250264, 250265) c6( ) c7(T, if, cbc, bB, j, qN, ad, aE, aT, dL, ae, eL, mu, aW, bw, t, bz, bP, bE, MW, wx, m); #c1(LYPD5) c2(NP_001026919) c3(ly6/PLAUR domain-containing protein 5 isoform A precursor) c4(29989, 29990) c5(29991, 29992, 29993, 29994, 29995, 29996, 29997) c6( ) c7(T, fM, aE, eM, aW, Y, r, aT, aA, aF, ci, g, ae, q, ad, hX); #c1(LYPD5) c2(NP_872379) c3(ly6/PLAUR domain-containing protein 5 isoform B) c4( ) c5(256284, 256285, 256286, 256287, 256288) c6( ) c7(T, fM, aE, eM, aW, Y, r, aT, aA, aF, ci, g, ae, q, ad, hX); #c1(LYPD6) c2(NP_001182614) c3(ly6/PLAUR domain-containing protein 6 precursor) c4(75115, 75116) c5(75117, 75118, 75119, 75120, 75121, 75122, 75123, 75124, 75125, 75126, 75127, 75128, 75129, 75130, 75131, 75132) c6( ) c7(cbd); #c1(LYPD8) c2(NP_001078943) c3(ly6/PLAUR domain-containing protein 8 preproprotein) c4(38148) c5(38149, 38150, 38151, 38152, 38153, 38154) c6( ) c7(ai, jj); #c1(LYPLA1) c2(NP_001266286) c3(acyl-protein thioesterase 1 isoform 3) c4(99573) c5(99574, 99575, 99576, 99577, 99578, 99579) c6( ) c7(dD, ea, aj, eq, ey, mK, J); #c1(LYPLA1) c2(NP_006321) c3(acyl-protein thioesterase 1 isoform 1) c4(164019) c5(164020, 164021, 164022, 164023, 164024, 164025) c6( ) c7(dD, ea, aj, eq, ey, mK, J); #c1(LYPLAL1) c2(NP_001287699) c3(lysophospholipase-like protein 1 isoform c) c4(112575) c5(112576, 112577, 112578, 112579, 112580, 112581) c6( ) c7(aj, v, fc, cP, Be); #c1(LYPLAL1) c2(NP_620149) c3(lysophespholipase-like protein 1 isoform a) c4(237367) c5(237368, 237369, 237370, 237371, 237372, 237373) c6( ) c7(aj, v, fc, cP, Be); #c1(LYRM1) c2(NP_001289765) c3(LYR motif-containing protein 1) c4(114598) c5(114599, 114600, 114601, 114602, 114603, 114604, 114605, 114606, 114607, 114608, 114609, 114610, 114611, 114612, 114613, 114614, 114615, 114616) c6( ) c7(v); #c1(LYRM1) c2(XP_011544201) c3(LYR motif-containing protein 1 isoform X2) c4( ) c5(343341, 343342) c6( ) c7(v); #c1(LYRM4) c2(NP_001158312) c3(LYR motif-containing protein 4 isoform 2) c4(63599) c5(63600, 63601, 63602, 63603, 63604, 63605, 63606, 63607) c6( ) c7(oe, fe, K, cbe, iV, cm); #c1(LYRM4) c2(NP_001158313) c3(LYR motif-containing protein 4 isoform 3) c4(63608) c5(63609, 63610, 63611, 63612, 63613, 63614) c6( ) c7(oe, fe, K, cbe, iV, cm); #c1(LYRM4) c2(NP_065141) c3(LYR motif-containing protein 4 isoform 1) c4(204248) c5(204249, 204250, 204251, 204252, 204253, 204254) c6( ) c7(oe, fe, K, cbe, iV, cm); #c1(LYRM7) c2(NP_859056) c3(complex III assembly factor LYRM7 isoform 1) c4(255427) c5(255428, 255429, 255430, 255431, 255432, 255433) c6( ) c7(hb); #c1(LYRM9) c2(NP_001070148) c3(LYR motif-containing protein 9) c4(34594) c5(34595, 34596, 34597, 34598, 34599, 34600, 34601, 34602, 34603) c6( ) c7(bM, ft); #c1(LYRM9) c2(XP_011522794) c3(LYR motif-containing protein 9 isoform X2) c4( ) c5(317303) c6( ) c7(bM, ft); #c1(LYST) c2(NP_001288294) c3(lysosomal-trafficking regulator) c4(113720) c5(113721, 113722, 113723, 113724, 113725, 113726, 113727, 113728, 113729, 113730, 113731113732, 113733, 113734, 113735, 113736) c6( ) c7(Nq, cT, Nr, IE, vD, rT, XC, U, IF, po, yH, pz, ebb, cd); #c1(LYST) c2(XP_011542339) c3(lysosomal-trafficking regulator isoform X5) c4(340913) c5( ) c6( ) c7(Nq, cT, Nr, IE, vD, rT, XC, U, IF, po, yH, pz, cbb, cd); #c1(LYVE1) c2(NP_006682) c3(lymphatic vessel endothelial hyaluronic acid receptor 1 precursor) c4(167121) c5(167122, 167123, 167124, 167125, 167126, 167127) c6( ) c7(T, iW, al, ci, q, ad, eA, Jm, bll, aT, Vv, PD, brC, JK, K, ae, aW, Y, hl, r, aq, iR, iK, bPK, gk, dB, B, vi); #c1(LYZ) c2(NP_000230) c3(lysozyme C precursor) c4(5266, 5267, 5268, 5269) c5(5270, 5271, 5272, 5273, 5274, 5275) c6( ) c7(kV, Kd, sY, dD, aXW, qb, ea, fN, aA, cz, jh, aj, BF, eq, ai, J, eA, alZ, h, bRd, cbf, K, dQ, H, fb, amO, af, Yl, ajV, s, ih, hl, fe, aq, aF, hp, g, iV, YZ, uC, zV, bF, ig, WP, dh, aQG, wR, has, dy, R, y, bt, B); #c1(LYZL1) c2(NP_115906) c3(lysozyme-like protein 1) c4(224602) c5(224603, 224604, 224605, 224606, 224607, 224608, 224609, 224610) c6(224611, 224612) c7(aj, J); #c1(LYZL2) c2(NP_898881) c3(lysozyme-like protein 2) c4(257814, 257815) c5(257816, 257817, 257818, 257819, 257820, 257821) c6( ) c7(ki, W); #c1(LYZL6) c2(NP_001186880) c3(lysozyme-like protein 6 precursor) c4(78742) c5(78743, 78744, 78745, 78746, 78747, 78748, 78749, 78750, 78751, 78752, 78753, 78754, 78755, 78756) c6( ) c7(aw); #c1(LZTFL1) c2(NP_001263307) c3(leucine zipper transcription factor-like protein 1 isoform 2) c4(97147) c5(97148, 97149, 97150, 97151, 97152) c6( ) c7(T, aA, aF, zG, Tp, hH); #c1(LZTFL1) c2(NP_001263308) c3(leucine zipper transcription factor-like protein 1 isoform 3) c4(97153) c5(97154, 97155, 97156, 97157, 97158, 97159) c6( ) c7(T, aA, aF, zG, Tp, hH); #c1(LZTFL1) c2(NP_065080) c3(leucine zipper transcription factor-like protein 1 isoform 1) c4(203735) c5(203736, 203737, 203738, 203739, 203740, 203741, 203742) c6( ) c7(T, aA, aF, zG, Tp, hH); #c1(LZTR1) c2(NP_006758) c3(leucine-zipper-like transcriptional regulator 1) c4(167777, 167778, 167779) c5(167780, 167781, 167782, 167783, 167784, 167785, 167786, 167787, 167788, 167789, 167790, 167791, 167792, 167793, 167794, 167795, 167796, 167797) c6( ) c7(d, ac, cbg, Ls, oe, ayg); #c1(LZTS1) c2(XP_011542689) c3(leucine zipper putative turner suppressor 1 isoform X1) c4(341227, 341228, 341229, 341230) c5(341231, 341232, 341233, 341234, 341235, 341236, 341237, 341238, 341239, 341240, 341241, 341242, 341243, 341244, 341245, 341246, 341247, 341248, 341249, 341250, 341251, 341252, 341253, 341254, 341255, 341256, 341257, 341258) c6( ) c7(GI, T, id, oe, ht, aA, aj, hy, j, ci, ad, aT, Gw, dL, bK, ae, eL, aW, Y, AQ, ff, gl, aF, en, Tp, g, t, bz, iP, ac, m, Gu); #c1(M6PR) c2(NP_001193953) c3(cation-dependent mannose-6-phosphate receptor isoform 2 precursor) c4( ) c5(83317, 83318, 83319, 83320, 83321, 83322, 83323, 83324, 83325, 83326, 83327, 83328) c6( ) c7(fR, cz, aA, fr, af, ad); #c1(M6PR) c2(XP_011518974) c3(cation-dependent mannose-6-phosphate receptor isoform X1) c4(313428, 313429, 313430) c5(313431, 313432, 313433, 313434, 313435, 313436, 313437, 313438) c6( ) c7(fR, cz, aA, fr, af, ad); #c1(MAATS1) c2(NP_203528) c3(protein MAATS1) c4(228424, 228425, 228426) c5(228427, 228428, 228429, 228430, 228431, 228432) c6( ) c7(fR); #c1(MAATS1) c2(XP_011511579) c3(protein MAATS1 isoform X3) c4( ) c5(302309) c6( ) c7(fR); #c1(MAATS1) c2(XP_011511580) c3(protein MAATS1 isoform X4) c4( ) c5(302310, 302311, 302312, 302313, 302314, 302315, 302316, 302317, 302318, 302319, 302320) c6( ) c7(fR); #c1(MAB21L1) c2(NP_005575) c3(protein mab-21-like 1) c4(157585) c5(157586, 157587, 157588, 157589, 157590, 157591) c6( ) c7(aR); #c1(MAB21L2) c2(NP_006430) c3(protein mab-21-like 2) c4(165148) c5(165149, 165150, 165151, 165152, 165153, 165154) c6( ) c7(y, bA); #c1(MAB21L3) c2(XP_011538928) c3(protein mab-21-like 3 isoform X1) c4(336996) c5(336997, 336998, 336999, 337000, 337001, 337002) c6( ) c7(aw); #c1(MACC1) c2(NP_877439) c3(metastasis-associated in colon cancer protein 1) c4(256834) c5(256835, 256836, 256837, 256838, 256839, 256840, 256841, 256842, 256843, 256844) c6( ) c7(T, Dd, if, al, aA, bB, n, j, ci, qN, q, eA, iu, aT, io, hB, aW, eH, r, aF, Vl, g, as, eF, t, gk, bE, m, B); #c1(MACROD1) c2(NP_054786) c3(0-acetyl-ADP-ribose deacetylase MACROD1) c4(177833) c5(177834, 177835, 177836, 177837, 177838, 177839) c6( ) c7(ck, aW, cl, hL, aT); #c1(MACR0D2) c2(NP_001028259) c3(0-acetyl-ADP-ribose deacetylase MACR0D2 isoform 2) c4(30430) c5(30431, 30432, 30433, 30434, 30435, 30436, 30437, 30438, 30439) c6( ) c7(c, pN, oe, aw, aA, bS, j, v, aF, an, bUh, lB, bN); #c1(MACR0D2) c2(NP_542407) c3(0-acetyl-ADP-ribose deacetylase MACR0D2 isoform 1) c4(232386, 232387) c5(232388, 232389, 232390, 232391, 232392, 232393, 232394, 232395, 232396, 232397, 232398, 232399, 232400) c6( ) c7(c, pN, oe, aw, aA, bS, j, v, aF, an, bUh, lB, bN); #c1(MADIL1) c2(NP_001291452) c3(mitotic spindle assembly checkpoint protein MAD1 isoform a) c4(116080) c5(116081, 116082, 116083, 116084, 116085, 116086, 116087, 116088, 116089, 116090, 116091, 116092, 116093, 116094) c6( ) c7(T, aw, jh, bB, fr, ci, hF, q, br, ad, cF, ft, aT, bK, he, pi, jf, d, B, s, aW, Y, oV, r, aq, aF, iR, t, cm, bz, Ld, bw, bE, m, bt, ne); #c1(MADIL1) c2(NP_001291453) c3(mitotic spindle assembly checkpoint protein MAD1 isoform b precursor) c4(116095) c5(116096, 116097, 116098, 116099, 116100, 116101) c6( ) c7(T, aw, jh, bB, fr, ci, hF, q, br, ad, cF, ft, aT, bK, he, pi, jf, d, B, s, aW, Y, oV, r, aq, aF, iR, t, cm, bz, Ld, bw, bE, m, bt, ne); #c1(MADIL1) c2(XP_011513869) c3(mitotic spindle assembly checkpoint protein MAD1 isoform X1) c4(306281) c5( ) c6( ) c7(T, aw, jh, bB, fr, ci, hF, q, br, ad, cF, ft, aT, bK, he, pi, jf, d, B, s, aW, Y, oV, r, aq, aF, iR, t, cm, bz, Ld, bw, bE, m, bt, ne); #c1(MADIL1) c2(XP_011513872) c3(mitotic spindle assembly checkpoint protein MAD1 isoform X5) c4(306282) c5(306283, 306284, 306285, 306286, 306287, 306288) c6( ) c7(T, aw, jh, bB, fr, ci, hF, q, br, ad, cF, ft, aT, bK, he, pi, jf, d, B, s, aW, Y, oV, r, aq, aF, iR, t, cm, bz, Ld, bw, bE, m, bt, ne); #c1(MADIL1) c2(XP_011513873) c3(mitotic spindle assembly checkpoint protein MAD1 isoform X4) c4( ) c5(306289, 306290, 306291, 306292, 306293, 306294) c6( ) c7(T, aw, jh, bB, fr, ci, hF, q, br, ad, cF, ft, aT, bK, he, pi, jf, d, B, s, aW, Y, oV, r, aq, aF, iR, t, cm, bz, Ld, bw, bE, m, bt, ne); #c1(MAD2L1) c2(NP_002349) c3(mitotic spindle assembly checkpoint protein MAD2A) c4(127713) c5(127714, 127715, 127716, 127717, 127718, 127719) c6( ) c7(T, id, EQ, aA, n, ci, q, av, no, py, Db, aT, dL, ey, eL, kl, aiB, qt, aW, ff, eH, LZ, r, aq, aF, en, g, eF, t, iV, bz, es, bP, eM, nB, bE, iA, m, it, B); #c1(MAD2L1BP) c2(NP_001003690) c3(MAD2L1-binding protein isoform 1) c4(19897) c5(19898, 19899, 19900, 19901, 19902, 19903) c6( ) c7(xF, bkY, n, fu, bX, UX, cbh, no, aV, QJ, kf, bMf, bU, aCg, bYA, bT, xz, bhi, bMj, dr, ql, bk, afO, B); #c1(MAD2L1BP) c2(NP_055443) c3(MAD2L1-binding protein isoform 2) c4(181166) c5(181167, 181168, 181169, 181170, 181171, 181172) c6( ) c7(xF, bkY, n, fu, bX, UX, cbh, no, aV, QJ, kf, bMf, bU, aCg, bYA, bT, xz, bhi, bMj, dr, ql, bk, afO, B); #c1(MAD2L2) c2(XP_011538809) c3(mitotic spindle assembly checkpoint protein MAD2B isoform X1) c4(336545, 336546, 336547, 336548, 336549, 336550) c5(336551, 336552, 336553, 336554, 336555, 336556, 336557, 336558, 336559, 336560, 336561, 336562, 336563, 336564, 336565, 336566, 336567, 336568, 336569, 336570, 336571, 336572, 336573, 336574, 336575, 336576, 336577, 336578, 336579, 336580, 336581, 336582, 336583, 336584, 336585, 336586, 336587, 336588, 336589, 336590, 336591, 336592, 336593, 336594, 336595, 336596, 336597, 336598) c6( ) c7(T, bE, aW, r, aT, bB, BF, m, fr, lu, f, q); #c1(MADCAM1) c2(NP_570116) c3(mucosal addressin cell adhesion molecule 1 isoform a precursor) c4(233941, 233942, 233943, 233944) c5(233945, 233946, 233947, 233948, 233949, 233950, 233951, 233952, 233953, 233954, 233955, 233956) c6( ) c7(A, iM, je, aD, kH, hN, cbi, ji, iV, Xl); #c1(MADCAM1) c2(NP_570118) c3(mucosal addressin cell adhesion molecule 1 isoform b precursor) c4(233957, 233958) c5(233959, 233960, 233961, 233962, 233963, 233964, 233965, 233966, 233967, 233968, 233969, 233970, 233971, 233972, 233973, 233974, 233975, 233976, 233977, 233978, 233979, 233980, 233981, 233982) c6( ) c7(A, iM, je, aD, kH, hN, cbi, ji, iV, Xl); #c1(MADD) c2(NP_569831) c3(MAP kinase-activating death domain protein isoform g) c4(233927) c5(233928, 233929, 233930, 233931, 233932, 233933) c6( ) c7(bL, qJ, T, hd, nB, cj, wl, By, aj, hp, j, vs, cm, af, J); #c1(MADD) c2(NP_569832) c3(MAP kinase-activating death domain protein isoform h) c4(233934) c5(233935, 233936, 233937, 233938, 233939, 233940) c6( ) c7(bL, qJ, T, hd, nB, cj, wl, By, aj, hp, j, vs, cm, af, J); #c1(MADD) c2(XP_005253246) c3(MAP kinase-activating death domain protein isoform X6) c4(272296) c5(272297, 272298, 272299, 272300, 272301, 272302) c6( ) c7(bL, qJ, T, hd, nB, cj, wl, By, aj, hp, j, vs, cm, af, J); #c1(MADD) c2(XP_005253253) c3(MAP kinase-activating death domain protein isoform X4) c4(272303) c5(272304, 272305, 272306, 272307, 272308, 272309) c6( ) c7(bL, qJ, T, hd, nB, cj, wl, By, aj, hp, j, vs, cm, af, J); #c1(MADD) c2(XP_005253256) c3(MAP kinase-activating death domain protein isoform X1) c4(272310) c5(272311, 272312, 272313, 272314, 272315, 272316) c6( ) c7(bL, qJ, T, hd, nB, cj, wl, By, aj, hp, j, vs, cm, af, J); #c1(MADD) c2(XP_005253258) c3(MAP kinase-activating death domain protein isoform X2) c4(272317) c5(272318, 272319, 272320, 272321, 272322, 272323) c6( ) c7(bL, qJ, T, hd, nB, cj, wl, By, aj, hp, j, vs, cm, af, J); #c1(MADD) c2(XP_005253260) c3(MAP kinase-activating death domain protein isoform X3) c4(272324) c5(272325, 272326, 272327, 272328, 272329, 272330) c6( ) c7(bL, qJ, T, hd, nB, cj, wl, By, aj, hp, j, vs, cm, af, J); #c1(MADD) c2(XP_005253261) c3(MAP kinase-activating death domain protein isoform X7) c4(272331) c5(272332, 272333, 272334, 272335, 272336, 272337) c6( ) c7(bL, qJ, T, hd, nB, cj, wl, By, aj, hp, j, vs, cm, af, J); #c1(MADD) c2(XP_005253262) c3(MAP kinase-activating death domain protein isoform X5) c4(272338, 272339) c5(272340, 272341, 272342, 272343, 272344, 272345, 272346, 272347, 272348, 272349, 272350, 272351) c6( ) c7(bL, qJ, T, hd, nB, cj, wl, By, aj, hp, j, vs, cm, af, J); #c1(MAEA) c2(NP_001017405) c3(macrophage erythroblast attacher isoform 1) c4(26440, 26441, 26442, 26443) c5(26444, 26445, 26446, 26447, 26448, 26449, 26450, 26451, 26452, 26453, 26454, 26455, 26456, 26457, 26458, 26459, 26460, 26461) c6( ) c7(bL, ea, dD, eq); #c1(MAEA) c2(NP_001284359) c3(macrophage erythroblast attacher isoform 3) c4(111771) c5(111772, 111773, 111774, 111775, 111776, 111777) c6( ) c7(bL, ea, dD, eq); #c1(MAEA) c2(NP_001284360) c3(macrophage erythroblast attacher isoform 4) c4(111778, 111779) c5(111780, 111781, 111782, 111783, 111784, 111785, 111786, 111787, 111788, 111789, 111790, 111791) c6( ) c7(bL, ea, dD, eq); #c1(MAEA) c2(NP_001284361) c3(macrophage erythroblast attacher isoform 5) c4(111792) c5(111793, 111794, 111795, 111796, 111797, 111798, 111799) c6( ) c7(bL, ea, dD, eq); #c1(MAEA) c2(NP_001284362) c3(macrophage erythroblast attacher isoform 6) c4( ) c5(111800, 111801, 111802, 111803, 111804) c6( ) c7(bL, ea, dD, eq); #c1(MAEA) c2(NP_005873) c3(macrophage erythroblast attacher isoform 2) c4(160060) c5(160061, 160062, 160063, 160064, 160065, 160066) c6( ) c7(bL, ea, dD, eq); #c1(MAEL) c2(NP_001273306) c3(protein maelstrom homolog isoform 2) c4(104649, 104650) c5(104651, 104652, 104653, 104654, 104655, 104656, 104657, 104658, 104659, 104660, 104661, 104662) c6( ) c7(cz, r, m, t, q, bA); #c1(MAEL) c2(NP_116247) c3(protein maelstrom homolog isoform 1) c4(225949) c5(225950, 225951, 225952, 225953, 225954, 225955) c6( ) c7(cz, r, m, t, q, bA); #c1(MAEL) c2(XP_006711646) c3(protein maelstrom homolog isoform X3) c4(286184) c5( ) c6( ) c7(cz, r, m, t, q, bA); #c1(MAEL) c2(XP_011508370) c3(protein maelstrom homolog isoform X4) c4( ) c5(299063, 299064, 299065, 299066, 299067, 299068) c6( ) c7(cz, r, m, t, q, bA); #c1(MAF) c2(NP_001026974) c3(transcription factor Maf isoform b) c4( ) c5(30019, 30020, 30021, 30022, 30023, 30024) c6( ) c7(bL, T, dD, ea, aw, bO, fd, v, j, ah, eq, aSL, jw, Vp, XY, hP, qM, bVH, bN, kn, cbj, amS, W, aor); #c1(MAF) c2(NP_005351) c3(transcription factor Maf isoform a) c4(155331) c5(155332, 155333, 155334, 155335, 155336, 155337, 155338) c6( ) c7(bL, T, dD, ea, aw, bO, fd, v, j, ah, eq, aSL, jw, Vp, XY, hP, qM, bVH, bN, kn, cbj, amS, W, aor); #c1(MAF) c2(XP_011521386) c3(transcription factor Maf isoform X1) c4(316195) c5( ) c6( ) c7(bL, T, dD, ea, aw, bO, fd, v, j, ah, eq, aSL, jw, Vp, XY, hP, qM, bVH, bN, kn, cbj, amS, W, aor); #c1(MAF1) c2(NP_115648) c3(repressor of RNA polymerase III transcription MAF1 homolog) c4(223429, 223430) c5(223431, 223432, 223433, 223434, 223435, 223436, 223437, 223438, 223439, 223440, 223441, 223442, 223443, 223444, 223445, 223446) c6( ) c7(d, K); #c1(MAFA) c2(NP_963883) c3(transcription factor MafA) c4(262488) c5(262489, 262490, 262491, 262492, 262493, 262494, 262495) c6( ) c7(bL, A, aj, dG, J, yF); #c1(MAFB) c2(NP_005452) c3(transcription factor MafB) c4(156299) c5(156300, 156301, 156302, 156303, 156304, 156305, 156306, 156307, 156308, 156309, 156310) c6( ) c7(bL, Na, aC, cbk, amS, nX, jh, fd, Nc, y, fq); #c1(MAFF) c2(NP_001155045) c3(transcription factor MafF isoform a) c4(61324, 61325, 61326, 61327) c5(61328, 61329, 61330, 61331, 61332, 61333, 61334, 61335, 61336, 61337, 61338, 61339, 61340, 61341, 61342, 61343, 61344, 61345, 61346, 61347, 61348, 61349, 61350, 61351, 61352, 61353, 61354) c6( ) c7(Y); #c1(MAFF) c2(NP_001155046) c3(transcription factor MafF isoform b) c4( ) c5(61355, 61356, 61357, 61358, 61359, 61360, 61361, 61362, 61363, 61364) c6( ) c7(Y); #c1(MAFG) c2(XP_011521881) c3(transcription factor MafG isoform X1) c4(316480) c5(316481, 316482, 316483, 316484, 316485, 316486, 316487, 316488, 316489, 316490, 316491) c6( ) c7(bz, jw, r); #c1(MAFK) c2(XP_006715836) c3(transcription factor MafK isoform X1) c4(289867) c5(289868, 289869, 289870, 289871, 289872, 289873, 289874, 289875, 289876, 289877, 289878, 289879, 289880, 289881) c6( ) c7(ck, eM, Y, iS, fd, bw, v, K, hF, vt, B, ip); #c1(MAG) c2(NP_001186145) c3(myelin-associated glycoprotein isoform c) c4(77218) c5(77219, 77220, 77221, 77222, 77223) c6( ) c7(ak, aC, wi, akQ, ac, ob, fm, cbl, My, an, fu, R, bU, cb, cbm, V, bz, eA, dr); #c1(MAG) c2(NP_002352) c3(myelin-associated glycoprotein isoform a precursor) c4(127720, 127721) c5(127722, 127723, 127724, 127725, 127726, 127727, 127728, 127729, 127730, 127731, 127732, 127733, 127734, 127735) c6( ) c7(ak, aC, wi, akQ, ac, ob, fm, cbl, My, an, fu, R, bU, cb, cbm, V, bz, eA, dr); #c1(MAG) c2(NP_542167) c3(myelin-associated glycoprotein isoform b precursor) c4(232158) c5(232159, 232160, 232161, 232162, 232163) c6( ) c7(ak, aC, wi, akQ, ac, ob, fm, cbl, My, an, fu, R, bU, cb, cbm, V, bz, eA, dr); #c1(MAGEA1) c2(NP_004979) c3(melanoma-associated antigen 1) c4(151570) c5(151571, 151572, 151573, 151574, 151575, 151576) c6( ) c7(nZ, G, T, id, wu, aoE, aA, fd, n, ci, ad, av, avA, Nn, kH, aT, wm, xQ, d, aW, Y, ff, aF, en, bu, t, cm, iK, ck, Dy, eM, cj, m, B); #c1(MAGEA10) c2(NP_001011543) c3(melanoma-associated antigen 10) c4(24516, 24517, 24518) c5(24519, 24520, 24521, 24522, 24523, 24524, 24525, 24526, 24527, 24528, 24529, 24530, 24531, 24532, 24533, 24534, 24535, 24536, 24537, 24538, 24539, 24540) c6( ) c7(Y); #c1(MAGEA11) c2(NP_001011544) c3(melanoma-associated antigen 11 isoform b) c4(24541) c5(24542, 24543, 24544, 24545, 24546, 24547, 24548, 24549, 24550) c6( ) c7(T, ae, ad); #c1(MAGEA11) c2(NP_005357) c3(melanoma-associated antigen 11 isoform a) c4(155418) c5(155419, 155420, 155421, 155422, 155423, 155424) c6( ) c7(T, ae, ad); #c1(MAGEA11) c2(XP_011529466) c3(melanoma-associated antigen 11 isoform X2) c4( ) c5(324890) c6( ) c7(T, ae, ad); #c1(MAGEA12) c2(NP_001159858) c3(melanoma-associated antigen 12) c4(64848) c5(64849, 64850, 64851, 64852, 64853, 64854, 64855, 64856, 64857, 64858, 64859, 64860, 64861, 64862) c6( ) c7(Y, ff, en); #c1(MAGEA2B) c2(NP_705692) c3(melanoma-associated antigen 2) c4(246203, 246204, 246205, 246206, 246207, 246208) c5(246209, 246210, 246211, 246212, 246213, 246214, 246215, 246216, 246217, 246218, 246219, 246220, 246221, 246222, 246223, 246224, 246225, 246226, 246227, 246228, 246229, 246230, 246231, 246232, 246233, 246234, 246235, 246236, 246237, 246238, 246239, 246240, 246241, 246242, 246243, 246244, 246245, 246246, 246247, 246248, 246249, 246250, 246251, 246252, 246253, 246254, 246255, 246256, 246257, 246258, 246259, 246260, 246261, 246262, 246263, 246264, 246265, 246266, 246267) c6( ) c7(Dy, Y, AJ, bX, bu, bz, eA, iP); #c1(MAGEA3) c2(NP_005353) c3(melanoma-associated antigen 3) c4(155339, 155340) c5(155341, 155342, 155343, 155344, 155345, 155346, 155347, 155348, 155349, 155350, 155351, 155352, 155353, 155354, 155355, 155356) c6( ) c7(nZ, G, T, aC, wu, ht, aA, n, ci, aHy, ad, hX, av, ft, aE, aT, dL, wm, hu, ae, eL, cp, xQ, aW, Y, ff, hl, lo, kp, aF, en, bu, t, aoG, bz, cm, iK, ck, gX, m, B, ao); #c1(MAGEA4) c2(NP_001011549) c3(melanoma-associated antigen 4) c4(24551, 24552, 24553, 24554, 24555) c5(24556, 24557, 24558, 24559, 24560, 24561, 24562, 24563, 24564, 24565, 24566, 24567, 24568, 24569, 24570, 24571, 24572, 24573, 24574, 24575, 24576, 24577, 24578, 24579, 24580, 24581, 24582, 24583, 24584, 24585, 24586, 24587, 24588, 24589, 24590, 24591, 24592, 24593, 24594, 24595, 24596, 24597, 24598, 24599, 24600, 24601, 24602, 24603, 24604, 24605, 24606, 24607, 24608, 24609, 24610) c6( ) c7(av, G, id, eM, Y, ff, Qm, ci, en, bu, g, bz, B, ad); #c1(MAGEA4) c2(XP_005274734) c3(melanoma-associated antigen 4 isoform X2) c4( ) c5(285352, 285353, 285354, 285355, 285356, 285357, 285358, 285359, 285360, 285361, 285362) c6( ) c7(av, G, id, eM, Y, ff, Qm, ci, en, bu, g, bz, B, ad); #c1(MAGEA6) c2(NP_005354) c3(melanoma-associated antigen 6) c4(155357, 155358, 155359, 155360) c5(155361, 155362, 155363, 155364, 155365, 155366, 155367, 155368, 155369, 155370, 155371, 155372, 155373, 155374, 155375, 155376, 155377, 155378) c6( ) c7(ds, ff, fr, Y, en); #c1(MAGEA9) c2(NP_005356) c3(melanoma-associated antigen 9) c4(155379, 155380, 155381, 155382, 155383) c5(155384, 155385, 155386, 155387, 155388, 155389, 155390, 155391, 155392, 155393, 155394, 155395, 155396, 155397, 155398, 155399, 155400, 155401, 155402, 155403, 155404, 155405, 155406, 155407, 155408, 155409, 155410, 155411, 155412, 155413, 155414, 155415, 155416, 155417) c6( ) c7(dL, fr); #c1(MAGEB1) c2(NP_803134) c3(melanoma-associated antigen B1) c4(252502) c5(252503, 252504, 252505, 252506, 252507, 252508, 252509, 252510, 252511, 252512, 252513, 252514, 252515, 252516) c6( ) c7(Y); #c1(MAGEB17) c2(NP_001264236) c3(melanoma-associated antigen B17) c4(97622, 97623) c5(97624, 97625, 97626, 97627, 97628, 97629, 97630, 97631, 97632, 97633, 97634, 97635, 97636, 97637, 97638, 97639) c6( ) c7(Hr); #c1(MAGEB2) c2(NP_002355) c3(melanoma-associated antigen B2) c4(127736) c5(127737, 127738, 127739, 127740, 127741, 127742) c6( ) c7(Y, fr, iK, eZ); #c1(MAGEB6) c2(NP_775794) c3(melanoma-associated antigen B6) c4(250334) c5(250335, 250336, 250337, 250338, 250339, 250340) c6( ) c7(pf, ff, NT, aA, aF, en); #c1(MAGEC1) c2(NP_005453) c3(melanoma-associated antigen C1) c4(156311, 156312, 156313, 156314) c5(156315, 156316, 156317, 156318, 156319, 156320, 156321, 156322, 156323, 156324, 156325, 156326, 156327, 156328, 156329, 156330, 156331, 156332, 156333, 156334, 156335, 156336, 156337, 156338) c6( ) c7(ae, T, baa, eM, Y, ff, aT, fd, en, bu, bz, ad, cp); #c1(MAGEC2) c2(NP_057333) c3(melanoma-associated antigen C2) c4(190171) c5(190172, 190173, 190174, 190175, 190176, 190177) c6( ) c7(T, iV, wu, aW, Y, oe, e, ff, aT, r, ci, q, bu, en, g, wm, bz, B, Hr, cp); #c1(MAGEC3) c2(NP_619647) c3(melanoma-associated antigen C3 isoform 1) c4(237007, 237008) c5(237009, 237010, 237011, 237012, 237013, 237014, 237015, 237016, 237017, 237018, 237019, 237020) c6( ) c7(Ej, 1 zs); #c1(MAGEC3) c2(XP_011529569) c3(melanoma-associated antigen C3 isoform X1) c4(325122, 325123) c5(325124, 325125, 325126, 325127, 325128, 325129, 325130, 325131, 325132, 325133, 325134, 325135, 325136, 325137, 325138, 325139, 325140) c6( ) c7(Ej, 1 zs); #c1(MAGED1) c2(NP_001005332) c3(melanoma-associated antigen D1 isoform b) c4(21352, 21353) c5(21354, 21355, 21356, 21357, 21358, 21359, 21360, 21361, 21362, 21363, 21364, 21365, 21366, 21367, 21368, 21369, 21370, 21371, 21372, 21373, 21374, 21375, 21376, 21377, 21378, 21379) c6( ) c7(T, hq, aC, aE, dB, Y, bS, v, ci, et, eA, Z, rc, ad, bN, bdO); #c1(MAGED1) c2(NP_001005333) c3(melanoma-associated antigen D1 isoform a) c4(21380) c5(21381, 21382, 21383, 21384, 21385, 21386, 21387) c6( ) c7(T, hq, aC, aE, dB, Y, bS, v, ci, ct, eA, Z, rc, ad, bN, bdO); #c1(MAGED2) c2(NP_055414) c3(melanoma-associated antigen D2) c4(180926, 180927, 180928, 180929) c5(180930, 180931, 180932, 180933, 180934, 180935, 180936, 180937, 180938, 180939, 180940, 180941, 180942, 180943, 180944, 180945, 180946, 180947, 180948, 180949, 180950, 180951, 180952, 180953, 180954, 180955, 180956, 180957, 180958, 180959, 180960, 180961, 180962, 180963, 180964, 180965, 180966, 180967, 180968, 180969, 180970, 180971, 180972, 180973) c6( ) c7(cbn, aW, Y, aT, aA, ci, m, t); #c1(MAGED4) c2(NP_001092270) c3(melanoma-associated antigen D4 isoform 2) c4(39514) c5( ) c6( ) c7(nZ, T, id, aoE, fd, n, fr, ci, eA, av, avA, Nn, kH, aT, xQ, d, aW, Y, aF, bu, t, cm, iK, ck, Dy, eM, cj, m, B); #c1(MAGED4) c2(NP_001258990) c3(melanoma-associated antigen D4 isoform 3) c4(96901) c5(96902, 96903, 96904, 96905, 96906, 96907, 96908, 96909, 96910, 96911, 96912, 96913) c6( ) c7(nZ, T, id, aoE, fd, n, fr, ci, eA, av, avA, Nn, kH, aT, xQ, d, aW, Y, aF, bu, t, cm, iK, ck, Dy, eM, cj, m, B); #c1(MAGED4B) c2(NP_110428) c3(melanoma-associated antigen D4 isoform 1) c4(220298) c5(220299, 220300, 220301, 220302, 220303, 220304, 220305, 220306, 220307, 220308, 220309, 220310, 220311, 220312, 220313, 220314, 220315, 220316, 220317, 220318, 220319, 220320, 220321, 220322, 220323, 220324, 220325) c6( ) c7(nZ, T, id, aoE, fd, n, fr, ci, eA, av, avA, Nn, kH, aT, xQ, d, aW, Y, aF, bu, t, cm, iK, ck, Dy, eM, cj, m, B); #c1(MAGEE1) c2(NP_065983) c3(melanoma-associated antigen E1) c4(206598) c5(206599, 206600, 206601, 206602, 206603, 206604) c6( ) c7(ng, bL, 1 dD, ea, zs, e, aA, cz, j, eq, aE, aT, cy, dL, K, eL, hm, A, d, aW, Y, aF, dw, ac, zr, aBr, mx, pP, y); #c1(MAGEH1) c2(NP_054780) c3(melanoma-associated antigen H1) c4(177783) c5(177784, 177785, 177786, 177787, 177788, 177789) c6( ) c7(aE, Y, eX, h, eV, K); #c1(MAGEL2) c2(NP_061939) c3(MAGE-like protein 2) c4(201223) c5(201224, 201225, 201226, 201227, 201228, 201229, 201230, 201231) c6( ) c7(cA, rz, Y, amj, v, cbo, Tp, he, rc, bN); #c1(MAG11) c2(NP_001028229) c3(membrane-associated guanylate kinase, WW and PDZ domain-containing protein 1 isoform c) c4(30407) c5(30408, 30409, 30410, 30411, 30412, 30413) c6( ) c7(T, dA, n, fr, anu, ip, jz, ib, py, gK, Nn, aT, Ne, bK, K, anw, je, anv, nO, aW, Y, t, bw, bz, iP, sk, es, iM, Dy, iA, Ew, hk, m, anx, B, VB, hS); #c1(MAG11) c2(NP_004733) c3(membrane-associated guanylate kinase, WW and PDZ domain-containing protein 1 isoform b) c4(149165) c5(149166, 149167, 149168, 149169, 149170, 149171) c6( ) c7(T, dA, n, fr, anu, ip, jz, ib, py, qK, Nn, aT, Ne, bK, K, anw, je, anv, nO, aW, Y, t, bw, bz, iP, sk, es, iM, Dy, iA, Ew, hk, m, anx, B, VB, hS); #c1(MAG11) c2(NP_056335) c3(membrane-associated guanylate kinase, WW and PDZ domain-containing protein 1 isoform a) c4(187137, 187138) c5(187139, 187140, 187141, 187142, 187143, 187144, 187145, 187146, 187147, 187148, 187149, 187150) c6( ) c7(T, dA, n, fr, anu, ip, jz, ib, py, qK, Nn, aT, Ne, bK, K, anw, je, anv, nO, aW, Y, t, bw, bz, iP, sk, es, iM, Dy, iA, Ew, hk, m, anx, B, VB, hS); #c1(MAG12) c2(NP_001288057) c3(membrane-associated guanylate kinase, WW and PDZ domain-containing protein 2 isoform 2) c4(113450, 113451) c5(113452, 113453, 113454, 113455, 113456, 113457) c6( ) c7(ea, Y, ha, qK, h, fe, nw, hp, wb, iV, f, bz, iu, cC); #c1(MAG12) c2(NP_036433) c3(membrane-associated guanylate kinase, WW and PDZ domain-containing protein 2 isoform 1) c4(173822, 173823) c5(173824, 173825, 173826, 173827, 173828, 173829, 173830, 173831, 173832, 173833, 173834, 173835, 173836, 173837, 173838, 173839, 173840, 173841) c6( ) c7(ea, Y, ha, qK, h, fe, nw, hp, wb, iV, f, bz, iu, cC); #c1(MAG12) c2(XP_011515020) c3(membrane-associated guanylate kinase, WW and PDZ domain-containing protein 2 isoform X1) c4(307800) c5(307801) c6( ) c7(ea, Y, ha, qK, h, fe, nw, hp, wb, iV, f, bz, iu, cC); #c1(MAG12) c2(XP_011515027) c3(membrane-associated guanylate kinase, WW and PDZ domain-containing protein 2 isoform X6) c4( ) c5(307802, 307803, 307804, 307805, 307806, 307807) c6( ) c7(ea, Y, ha, qK, h, fe, nw, hp, wb, iV, f, bz, iu, cC); #c1(MAG13) c2(XP_011539510) c3(membrane-associated guanylate kinase, WW and PDZ domain-containing protein 3 isoform X2) c4(337714) c5(337715, 337716, 337717, 337718, 337719, 337720, 337721) c6( ) c7(bE, hr, bB, hD, g, gT, X); #c1(MAGT1) c2(NP_115497) c3(magnesium transporter protein 1) c4(222916, 222917) c5(222918, 222919, 222920, 222921, 222922, 222923, 222924, 222925, 222926, 222927, 222928, 222929) c6( ) c7(T, if, eX, jh, fd, alH, ci, nA, PJ, qN, ai, ad, cbq, aE, dv, aT, kf, vH, eV, K, cbp, ae, cp, d, MO, nO, aW, Y, hl, aq, iR, bw, bz, LB, ck, kP, iT, bE, HN, bt, zA, B); #c1(MAK) c2(NP_005897) c3(serine/threonine-protein kinase MAK isoform 1) c4(160195, 160196, 160197) c5(160198, 160199, 160200, 160201, 160202, 160203, 160204, 160205, 160206, 160207, 160208) c6( ) c7(lR, cbr, nw, nC, ae, ad, de); #c1(MAK) c2(XP_011512924) c3(serine/threonine-protein kinase MAK isoform X1) c4( ) c5(304321, 304322, 304323, 304324, 304325, 304326, 304327, 304328, 304329, 304330, 304331) c6( ) c7(lR, cbr, nw, nC, ae, ad, de); #c1(MAK16) c2(NP_115898) c3(protein MAK16 homolog) c4(224571) c5(224572, 224573, 224574, 224575, 224576, 224577) c6( ) c7(bM, T, aC, ha, jh, aA, bB, tc, TM, Vd, ci, nA, lR, fr, hF, eA, aR, ad, hX, eW, ft, aE, WY, ds, SV, aT, kf, Ak, dV, h, K, an, brV, fb, ae, af, dx, iL, d, vT, aW, Y, ff, eZ, nf, aq, aaE, aF, Ku, en, iR, bz, pb, QA, bN, dR, ck, rR, kP, c, eM, bE, Qu, dh, mx, U, aEs, rx, xh, arg, B); #c1(MAL) c2(NP_002362) c3(myelin and lymphocyte protein isoform a) c4(127743) c5(127744, 127745, 127746, 127747, 127748, 127749) c6( ) c7(T, aHV, if, ht, eX, aA, hy, v, ci, qN, ad, aE, akU, dV, aT, h, eV, iY, hu, lZ, s, aW, ff, aq, aF, en, f, t, iK, ck, gX, m, y, bt, B); #c1(MAL) c2(NP_071883) c3(myelin and lymphocyte protein isoform b) c4(212063) c5(212064, 212065, 212066, 212067, 212068, 212069) c6( ) c7(T, aHV, if, ht, eX, aA, hy, v, ci, qN, ad, aE, akU, dV, aT, h, eV, iY, hu, lZ, s, aW, ff, aq, aF, en, f, t, iK, ck, gX, m, y, bt, B); #c1(MAL) c2(NP_071884) c3(myelin and lymphocyte protein isoform c) c4(212070) c5(212071, 212072, 212073, 212074, 212075, 212076) c6( ) c7(T, aHV, if, ht, eX, aA, hy, v, ci, qN, ad, aE, akU, dV, aT, h, eV, iY, hu, lZ, s, aW, ff, aq, aF, en, f, t, iK, ck, gX, m, y, bt, B); #c1(MAL) c2(NP_071885) c3(myelin and lymphocyte protein isoform d) c4(212077) c5(212078, 212079, 212080, 212081, 212082, 212083) c6( ) c7(T, aHV, if, ht, eX, aA, hy, v, ci, qN, ad, aE, akU, dV, aT, h, eV, iY, hu, lZ, s, aW, ff, aq, aF, en, f, t, iK, ck, gX, m, y, bt, B); #c1(MALL) c2(NP_005425) c3(MAL-like protein) c4(156002) c5(156003, 156004, 156005, 156006, 156007, 156008) c6( ) c7(bB, bE, s); #c1(MALRD1) c2(NP_001135780) c3(MAM and LDL-receptor class A domain-containing protein 1 precursor) c4(53246, 53247, 53248) c5( ) c6( ) c7(Kc, mR, af, cz, aj, v, cd, sj); #c1(MALRD1) c2(XP_011517756) c3(MAM and LDL-receptor class A domain-containing protein 1 isoform X2) c4(311598, 311599) c5( ) c6( ) c7(Kc, mR, af, cz, aj, v, cd, sj); #c1(MALRD1) c2(XP_011517757) c3(MAM and LDL-receptor class A domain-containing protein 1 isoform X3) c4( ) c5(311600, 311601, 311602, 311603, 311604, 311605, 311606, 311607, 311608, 311609, 311610, 311611, 311612, 311613, 311614, 311615, 311616, 311617, 311618, 311619, 311620, 311621, 311622, 311623, 311624, 311625, 311626, 311627, 311628, 311629) c6( ) c7(Kc, mR, af, cz, aj, v, cd, sj); #c1(MALT1) c2(NP_006776) c3(mucosa-associated lymphoid tissue lymphoma translocation protein 1 isoform a) c4(167972) c5(167973, 167974, 167975, 167976, 167977, 167978) c6( ) c7(T, fM, aD, jh, asa, aA, fd, ci, V, cbs, apS, aJA, Df, uQ, oS, az, Of, aq, Og, arZ, asc, fT, SZ, ij); #c1(MALT1) c2(NP_776216) c3(mucosa-associated lymphoid tissue lymphoma translocation protein 1 isoform b) c4(251016) c5(251017, 251018, 251019, 251020, 251021, 251022) c6( ) c7(T, fM, aD, jh, asa, aA, fd, ci, V, cbs, apS, aJA, Df, uQ, oS, az, Of, aq, Og, arZ, asc, fT, SZ, ij); #c1(MAML1) c2(NP_055572) c3(mastermind-like protein 1) c4(182008, 182009) c5(182010, 182011, 182012, 182013, 182014, 182015, 182016, 182017, 182018, 182019, 182020, 182021, 182022) c6( ) c7(es, py, iA, if, fr, qN, it); #c1(MAML2) c2(NP_115803) c3(mastermind-like protein 2) c4(223961) c5(223962, 223963, 223964, 223965, 223966, 223967, 223968, 223969, 223970) c6( ) c7(T, aWj, ahG, cbt, iB, aWi, cbu, aw, aeX, ff, cj, jh, n, k, en, Tj, bw, bt, br, afb); #c1(MAML2) c2(XP_011541327) c3(mastermind-like protein 2 isoform X3) c4( ) c5(339923, 339924) c6( ) c7(T, aWj, ahG, cbt, iB, aWi, cbu, aw, aeX, ff, cj, jh, n, k, en, Tj, bw, bt, br, afb); #c1(MAML3) c2(NP_061187) c3(mastermind-like protein 3) c4(199851, 199852, 199853, 199854, 199855) c5(199856, 199857, 199858, 199859, 199860, 199861, 199862, 199863, 199864, 199865, 199866, 199867, 199868, 199869, 199870, 199871, 199872, 199873, 199874, 199875, 199876, 199877, 199878, 199879, 199880, 199881, 199882, 199883, 199884) c6( ) c7(bD, gK); #c1(MAMLD1) c2(NP_001170936) c3(mastermind-like domain-containing protein 1 isoform 1) c4(69598) c5(69599, 69600, 69601, 69602, 69603, 69604, 69605) c6( ) c7(cbv, adY, xz, cbw, adW, Pp, Ns, UX); #c1(MAMLD1) c2(NP_001170937) c3(mastermind-like domain-containing protein 1 isoform 3) c4(69606) c5(69607, 69608, 69609, 69610, 69611, 69612, 69613) c6( ) c7(cbv, adY, xz, cbw, adW, Pp, Ns, UX); #c1(MAMLD1) c2(NP_005482) c3(mastermind-like domain-containing protein 1 isoform 2) c4(156588, 156589) c5(156590, 156591, 156592, 156593, 156594, 156595, 156596, 156597, 156598, 156599, 156600, 156601, 156602, 156603, 156604, 156605, 156606) c6( ) c7(cbv, adY, xz, cbw, adW, Pp, Ns, UX); #c1(MAMLD1) c2(XP_011529395) c3(mastermind-like domain-containing protein 1 isoform X4) c4(324771) c5( ) c6( ) c7(cbv, adY, xz, cbw, adW, Pp, Ns, UX); #c1(MAMLD1) c2(XP_011529397) c3(mastermind-like domain-containing protein 1 isoform X5) c4( ) c5(324772, 324773, 324774, 324775, 324776, 324777) c6( ) c7(cbv, adY, xz, cbw, adW, Pp, Ns, UX); #c1(MAMLD1) c2(XP_011529398) c3(mastermind-like domain-containing protein 1 isoform X6) c4(324778) c5(324779, 324780, 324781, 324782, 324783, 324784) c6( ) c7(cbv, adY, xz, cbw, adW, Pp, Ns, UX); #c1(MAN1A1) c2(NP_005898) c3(mannosyl-oligosaccharide 1,2-alpha-mannosidase 1A) c4(160209) c5( ) c6( ) c7(bL, ey, dv, h); #c1(MAN1A1) c2(XP_005267043) c3(mannosyl-oligosaccharide 1,2-alpha-mannosidase 1A isoform X1) c4( ) c5(280632, 280633, 280634, 280635, 280636, 280637) c6( ) c7(bL, ey, dv, h); #c1(MAN1A1) c2(XP_011534136) c3(mannosyl-oligosaccharide 1,2-alpha-mannosidase 1A isoform X3) c4(330410) c5(330411, 330412, 330413, 330414, 330415, 330416) c6( ) c7(bL, ey, dv, h); #c1(MAN1B1) c2(NP_057303) c3(endoplasmic reticulum mannosyl-oligosaccharide 1,2-alpha-mannosidase) c4(190003, 190004) c5(190005, 190006, 190007, 190008, 190009, 190010, 190011, 190012, 190013, 190014, 190015, 190016) c6( ) c7(T, am, SP, aq, K, nA, cbx, B, aDj); #c1(MAN1B1) c2(XP_006717008) c3(endoplasmic reticulum mannosyl-oligosaccharide 1,2-alpha-mannosidase isoform X1) c4(290650) c5(290651, 290652, 290653, 290654, 290655, 290656) c6( ) c7(T, am, SP, aq, K, nA, cbx, B, aDj); #c1(MAN2A1) c2(NP_002363) c3(alpha-mannosidase 2) c4(127750) c5(127751, 127752, 127753, 127754, 127755, 127756) c6( ) c7(bL, NU, bM, EQ, eZ, k, nJ); #c1(MAN2A2) c2(NP_006113) c3(alpha-mannosidase 2×) c4(162130, 162131, 162132) c5(162133, 162134, 162135, 162136, 162137, 162138, 162139, 162140, 162141, 162142, 162143, 162144) c6( ) c7(eA); #c1(MAN2A2) c2(XP_005254967) c3(alpha-mannosidase 2× isoform X1) c4(273423, 273424) c5(273425, 273426, 273427, 273428, 273429) c6( ) c7(eA); #c1(MAN2A2) c2(XP_011519866) c3(alpha-mannosidase 2× isoform X2) c4(314614) c5(314615, 314616, 314617, 314618, 314619, 314620, 314621, 314622, 314623, 314624, 314625, 314626, 314627, 314628, 314629, 314630, 314631, 314632, 314633) c6( ) c7(eA); #c1(MAN2A2) c2(XP_011519868) c3(alpha-mannosidase 2× isoform X4) c4(314634, 314635) c5(314636, 314637, 314638, 314639, 314640, 314641, 314642, 314643, 314644, 314645, 314646, 314647, 314648) c6( ) c7(eA); #c1(MAN2B1) c2(NP_000519) c3(lysosomal alpha-mannosidase isoform 1 precursor) c4(11567, 11568) c5(11569, 11570, 11571, 11572, 11573, 11574, 11575, 11576, 11577, 11578, 11579, 11580, 11581, 11582, 11583, 11584, 11585, 11586, 11587, 11588, 11589, 11590, 11591, 11592, 11593, 11594, 11595, 11596, 11597, 11598, 11599, 11600, 11601, 11602, 11603, 11604, 11605, 11606, 11607, 11608, 11609, 11610, 11611, 11612, 11613, 11614, 11615, 11616, 11617, 11618, 11619, 11620, 11621, 11622, 11623, 11624, 11625, 11626, 11627, 11628, 11629, 11630, 11631, 11632, 11633, 11634, 11635, 11636, 11637, 11638, 11639, 11640, 11641, 11642, 11643, 11644, 11645, 11646, 11647, 11648, 11649, 11650, 11651, 11652, 11653, 11654, 11655, 11656, 11657, 11658, 11659, 11660, 11661, 11662, 11663, 11664, 11665, 11666, 11667, 11668) c6(11669) c7(Lq, ey, cby); #c1(MAN2B1) c2(NP_001166969) c3(lysosomal alpha-mannosidase isoform 2 precursor) c4(68743) c5(68744, 68745, 68746, 68747, 68748, 68749) c6( ) c7(Lq, ey, cby); #c1(MAN2B1) c2(XP_005259970) c3(lysosomal alpha-mannosidase isoform X1) c4(276332) c5( ) c6( ) c7(Lq, ey, cby); #c1(MAN2B1) c2(XP_011526319) c3(lysosomal alpha-mannosidase isoform X2) c4(320611, 320612) c5(320613, 320614, 320615, 320616, 320617, 320618, 320619) c6( ) c7(Lq, ey, cby); #c1(MAN2C1) c2(NP_001243423) c3(alpha-mannosidase 2C1 isoform 2) c4(90736) c5(90737, 90738, 90739, 90740, 90741, 90742) c6( ) c7(By, ae, ci, ad, hu); #c1(MAN2C1) c2(NP_001243424) c3(alpha-mannosidase 2C1 isoform 3) c4(90743, 90744) c5(90745, 90746, 90747, 90748, 90749, 90750) c6( ) c7(By, ae, ci, ad, hu); #c1(MAN2C1) c2(NP_001243425) c3(alpha-mannosidase 2C1 isoform 4) c4(90751) c5(90752, 90753, 90754, 90755, 90756, 90757, 90758, 90759, 90760, 90761, 90762) c6( ) c7(By, ae, ci, ad, hu); #c1(MAN2C1) c2(NP_006706) c3(alpha-mannosidase 2C1 isoform 1) c4(167305) c5(167306, 167307, 167308, 167309, 167310, 167311) c6( ) c7(By, ae, ci, ad, hu); #c1(MAN2C1) c2(XP_011519870) c3(alpha-mannosidase 2C1 isoform X3) c4( ) c5(314649) c6( ) c7(By, ae, ci, ad, hu); #c1(MANBA) c2(NP_005899) c3(beta-mannosidase precursor) c4(160210) c5(160211, 160212, 160213, 160214, 160215, 160216) c6( ) c7(T, cbz, r, aj, Lq, cbA, V, fq, q); #c1(MANEA) c2(NP_078917) c3(glycoprotein endo-alpha-1,2-mannosidase) c4(216095, 216096, 216097) c5(216098, 216099, 216100, 216101, 216102, 216103, 216104, 216105, 216106, 216107, 216108, 216109, 216110, 216111, 216112, 216113, 216114, 216115, 216116) c6( ) c7(lB, cu, kl, VR, EQ); #c1(MANF) c2(NP_006001) c3(mesencephalic astrocyte-derived neurotrophic factor precursor) c4(161091) c5(161092, 161093, 161094, 161095, 161096, 161097, 161098, 161099) c6(161100, 161101) c7(T, aC, aE, ha, lG, j, K, fr, an, cm, cd, ad); #c1(MANSC1) c2(NP_060520) c3(MANSC domain-containing protein 1 precursor) c4(196335, 196336) c5(196337, 196338, 196339, 196340, 196341, 196342, 196343, 196344, 196345, 196346, 196347, 196348) c6( ) c7(ae, ad); #c1(MAOA) c2(NP_000231) c3(amine oxidase [flavin-containing] A isoform 1) c4(5276, 5277) c5(5278, 5279, 5280, 5281, 5282, 5283, 5284) c6( ) c7(tJ, T, uK, ahc, cbF, ea, aqo, e, yY, bO, eh, gf, ur, HH, Gp, VV, x, iX, alX, K, byj, da, uY, cm, ml, aqr, bb, abS, Gs, sv, uJ, nD, FW, dD, To, aj, ww, ct, nA, aUf, KL, FY, Mo, jz, aqJ, XY, Nn, jy, dL, mY, mV, he, mU, abf, cbC, vo, mX, hg, amt, ok, cA, yP, bhU, vL, lB, jd, B, mT, qc, bL, jv, Nt, cR, mS, Kn, v, j, wy, il, aqN, buD, Si, cF, ga, aas, HJ, bK, an, rE, ae, af, cbB, yL, iy, aPf, HL, f, FT, bN, pH, ac, cbE, aTU, OL, Fl, gx, qX, ha, bS, uu, eq, bxb, aVy, qi, ad, dP, HE, nH, wv, mW, oj, cbD, na, Jc, tb, nf, gl, aTR, EZ, Z, Rm, aS, ei, pK, aqw, gq); #c1(MADA) c2(NP_001257387) c3(amine oxidase [flavin-containing] A isoform 2) c4( ) c5(95302, 95303, 95304, 95305, 95306) c6( ) c7(tJ, T, uK, ahc, cbF, ea, aqo, e, yY, bO, eb, gf, ur, HH, Gp, VV, x, iX, alX, K, byj, da, uY, cm, mZ, aqr, bb, abS, Gs, sv, uJ, nD, FW, dD, To, aj, ww, ct, nA, aUf, KL, FY, Mo, jz, aqJ, XY, Nn, jy, dL, mY, mV, he, mU, abf, cbC, vo, mX, hq, amt, ok, cA, yP, bhU, vL, lB, jd, B, mT, qc, bL, jv, Nt, cR, mS, Kn, v, j, wy, il, aqN, buD, Si, cF, ga, aas, H J, bK, an, rE, ae, af, cbB, yL, iy, aPf, HL, f, FT, bN, pH, ac, cbE, aTU, OL, Fl, gx, qX, ha, bS, uu, eq, bxb, aVy, qi, ad, dP, HE, nH, wv, mW, oj, cbD, na, Jc, tb, nf, gl, aTR, EZ, Z, Rm, aS, ei, pK, aqw, gq); #c1(MADB) c2(NP_000889) c3(amine oxidase [flavin-containing] B) c4(16851, 16852) c5(16853, 16854, 16855, 16856, 16857, 16858, 16859) c6( ) c7(bL, uK, qX, yY, bO, cR, bS, uu, ct, nA, wy, HH, qi, dP, HF, bK, K, an, he, rz, af, na, ak, abf, d, hl, aPf, HL, Z, hJ, eE, cm, bN, UP, cA, U, bhU, aS, X); #c1(MADB) c2(XP_005272664) c3(amine oxidase [flavin-containing] B isoform X1) c4(284110) c5(284111, 284112, 284113, 284114, 284115, 284116, 284117, 284118, 284119, 284120, 284121) c6( ) c7(bL, uK, qX, yY, bO, cR, bS, uu, ct, nA, wy, HH, qi, dP, HF, bK, K, an, he, rz, af, na, ak, abf, d, hl, aPf, HL, Z, hJ, eE, cm, bN, UP, cA, U, bhU, aS, X); #c1(MAP10) c2(NP_061963) c3(microtubule-associated protein ID) c4(201333) c5(201334, 201335, 201336, 201337, 201338, 201339) c6( ) c7(cd); #c1(MAP1A) c2(NP_002364) c3(microtubule-associated protein IA) c4(127757, 127758, 127759, 127760) c5(127761, 127762, 127763, 127764, 127765, 127766, 127767, 127768, 127769, 127770, 127771, 127772, 127773, 127774, 127775, 127776, 127777, 127778, 127779, 127780, 12778L127782, 127783, 127784, 127785, 127786, 127787) c6( ) c7(cbG); #c1(MAP1B) c2(NP_005900) c3(microtubule-associated protein 1B) c4(160217) c5(160218, 160219, 160220, 160221, 160222, 160223) c6( ) c7(kf, gT, c, cm, bxw); #c1(MAP1B) c2(XP_005248564) c3(microtubule-associated protein 1B isoform X1) c4( ) c5(268473) c6( ) c7(kf, gT, c, cm, bxw); #c1(MAP1LC3A) c2(NP_115903) c3(microtubule-associated proteins 1A/1B light chain 3A isoform a) c4( ) c5(224587, 224588, 224589, 224590, 224591, 224592, 224593, 224594) c6( ) c7(iu, kP, fR, aW, Dq, gX, aT, j, ci, B); #c1(MAP1LC3A) c2(NP_852610) c3(microtubule-associated proteins 1A/1B light chain 3A isoform b) c4(255073) c5(255074, 255075, 255076, 255077, 255078, 255079) c6( ) c7(iu, kP, fR, aW, Dq, gX, aT, j, ci, B); #c1(MAP1LC3A) c2(XP_011527386) c3(microtubule-associated proteins 1A/1B light chain 3A isoform X1) c4(322087) c5(322088) c6( ) c7(iu, kP, fR, aW, Dq, gX, aT, j, ci, B); #c1(MAP1LC3A) c2(XP_011527387) c3(microtubule-associated proteins 1A/1B light chain 3A isoform X2) c4( ) c5(322089, 322090) c6( ) c7(iu, kP, fR, aW, Dq, gX, aT, j, ci, B); #c1(MAP1LC3B) c2(NP_073729) c3(microtubule-associated proteins 1A/1B light chain 38) c4(213291, 213292) c5(213293, 213294, 213295, 213296, 213297, 213298, 213299, 213300, 213301, 213302, 213303, 213304) c6( ) c7(T, py, kP, eM, nv, aW, eH, aT, fe, nw, j, K, nA, C, eF, rz, ra); #c1(MAP1LC3B2) c2(NP_001078950) c3(microtubule-associated proteins 1A/1B light chain 3 beta 2 precursor) c4(38155) c5(38156, 38157, 38158, 38159, 38160, 38161, 38162, 38163) c6( ) c7(hn); #c1(MAP1LC3B2) c2(XP_011536954) c3(microtubule-associated proteins 1A/1B light chain 3 beta 2 isoform X1) c4( ) c5(334641, 334642, 334643) c6( ) c7(hn); #c1(MAP1S) c2(NP_060644) c3(microtubule-associated protein 1S) c4(196959) c5(196960, 196961, 196962, 196963, 196964, 196965) c6( ) c7(aW, aT, hD, h, jj, an, bt); #c1(MAP2) c2(NP_001034627) c3(microtubule-associated protein 2 isoform 5) c4(31939) c5(31940, 31941, 31942, 31943, 31944, 31945) c6( ) c7(aNA, kh, My, bO, GC, il, V, eA, iC, Hx, cbH, pX, Hk, dV, aT, h, lG, bK, on, af, eu, cp, jf, asp, aW, Y, AQ, ff, en, as, cm, Hv, bN, eK, Qi, W, Dy, cA, wO, nG, hR, adR, ea, L); #c1(MAP2) c2(NP_002365) c3(microtubule-associated protein 2 isoform 1) c4(127788) c5(127789, 127790, 127791, 127792, 127793, 127794) c6( ) c7(aNA, kh, My, bO, GC, il, V, eA, iC, Hx, cbH, pX, Hk, dV, aT, h, lG, bK, on, af, eu, cp, jf, asp, aW, Y, AQ, ff, en, as, cm, Hv, bN, eK, Qi, W, Dy, cA, wO, nG, hR, adR, ea, L); #c1(MAP2) c2(NP_114033) c3(microtubule-associated protein 2 isoform 2) c4(222085) c5(222086, 222087, 222088, 222089, 222090, 222091, 222092, 222093, 222094, 222095, 222096, 222097, 222098, 222099, 222100, 222101) c6( ) c7(aNA, kh, My, bO, GC, il, V, eA, iC, Hx, cbH, pX, Hk, dV, aT, h, lG, bK, on, af, eu, cp, jf, asp, aW, Y, AQ, ff, en, as, cm, Hv, bN, eK, Qi, W, Dy, cA, wO, nG, hR, adR, ea, L); #c1(MAP2) c2(XP_011509492) c3(microtubule-associated protein 2 isoform X6) c4(300067) c5( ) c6( ) c7(aNA, kh, My, bO, GC, il, V, eA, iC, Hx, cbH, pX, Hk, dV, aT, h, lG, bK, on, aT, eu, cp, jf, asp, aW, Y, AQ, ff, en, as, cm, Hv, bN, eK, Qi, W, Dy, cA, wO, nG, hR, adR, ea, L); #c1(MAP2) c2(XP_011509500) c3(microtubule-associated protein 2 isoform X15) c4(300068) c5(300069, 300070, 300071, 300072, 300073, 300074) c6( ) c7(aNA, kh, My, bO, GC, il, V, eA, iC, Hx, cbH, pX, Hk, dV, aT, h, lG, bK, on, af, eu, cp, jf, asp, aW, Y, AQ, ff, en, as, cm, Hv, bN, eK, Qi, W, Dy, cA, wO, nG, hR, adR, ea, L); #c1(MAP2K1) c2(NP_002746) c3(dual specificity mitogen-activated protein kinase kinase 1) c4(131653) c5(131654, 131655, 131656, 131657, 131658, 131659) c6( ) c7(DS, T, yS, bB, ci, Qp, x, aE, ws, ja, K, eL, cp, Qe, eG, aW, wf, aEq, FS, g, as, eM, nB, iA, iT, cj, m, k, ajJ, cE, NT, qy, kv, fr, nA, jz, dL, cY, aq, W, fL, bD, B, jp, aA, yO, lu, q, eA, zn, nX, aT, cy, jj, ae, af, eu, jf, iU, Y, r, en, t, ck, aZT, bt, atS, mC, ad, dP, av, hd, ib, cbl, vc, fb, d, ff, eZ, iR, bz, es, bE, y, iu, jr); #c1(MAP2K2) c2(NP_109587) c3(dual specificity mitogen-activated protein kinase kinase 2) c4(219646) c5(219647, 219648, 219649, 219650, 219651, 219652) c6( ) c7(T, yS, atS, bB, amj, kv, j, yO, nA, q, eA, av, jz, aE, nX, cE, qK, af, Qe, jf, Y, cbJ, r, g, iV, t, bz, Qt, aZT, bE, gX, m, bD, xg, B, jr); #c1(MAP2K3) c2(NP_002747) c3(dual specificity mitogen-activated protein kinase kinase 3 isoform A) c4( ) c5(131660, 131661, 131662, 131663, 131664) c6( ) c7(ai, av, lR, eM, aW, aT, cd, v, j, K, eA, bq, y, NM, B); #c1(MAP2K3) c2(NP_659731) c3(dual specificity mitogen-activated protein kinase kinase 3 isoform B) c4(240295, 240296, 240297) c5(240298, 240299, 240300, 240301, 240302, 240303, 240304, 240305, 240306, 240307, 240308, 240309, 240310) c6( ) c7(ai, av, lR, eM, aW, aT, cd, v, j, K, eA, bq, y, NM, B); #c1(MAP2K4) c2(NP_001268364) c3(dual specificity mitogen-activated protein kinase kinase 4 isoform 2) c4(99788, 99789) c5(99790, 99791, 99792, 99793, 99794, 99795) c6( ) c7(T, aC, zX, aA, v, j, ci, q, ad, eA, bv, av, iu, aE, aT, cy, K, ae, Jl, aW, Y, eH, r, agF, vs, aF, g, sz, cl, t, eF, bz, fq, cm, ac, eM, hL, m, MC, y, bt, X); #c1(MAP2K4) c2(NP_003001) c3(dual specificity mitogen-activated protein kinase kinase 4 isoform 1) c4(134325, 134326) c5(134327, 134328, 134329, 134330, 134331, 134332, 134333, 134334, 134335, 134336, 134337, 134338) c6( ) c7(T, aC, zX, aA, v, j, ci, g, ad, eA, bv, av, iu, aE, aT, cy, K, ae, Jl, aW, Y, eH, r, agF, vs, aF, g, sz, cl, t, eF, bz, fq, cm, ac, eM, hL, m, MC, y, bt, X); #c1(MAP2K4) c2(XP_005256810) c3(dual specificity mitogen-activated protein kinase kinase 4 isoform X2) c4( ) c5(274517, 274518, 274519, 274520, 274521, 274522) c6( ) c7(T, aC, zX, aA, v, j, ci, q, ad, eA, bv, av, iu, aE, aT, cy, K, ae, Jl, aW, Y, eH, r, agF, vs, aF, g, sz, cl, t, eF, bz, fq, cm, ac, eM, hL, m, MC, y, bt, X); #c1(MAP2K5) c2(NP_001193733) c3(dual specificity mitogen-activated protein kinase kinase 5 isoform C) c4(82536) c5(82537, 82538, 82539, 82540, 82541, 82542) c6( ) c7(gh, T, eR, yY, n, bS, Jd, et, ci, v, aY, ad, aT, ae, xa, jf, aW, yL, Z, fq, hq, mx, aS, awm); #c1(MAP2K5) c2(NP_002748) c3(dual specificity mitogen-activated protein kinase kinase 5 isoform B) c4(131665, 131666) c5(131667, 131668, 131669, 131670, 131671131672, 131673, 131674, 131675, 131676, 131677, 131678) c6( ) c7(gh, T, eR, yY, n, bS, Jd, et, ci, v, aY, ad, aT, ae, xa, jf, aW, yL, Z, fq, hq, mx, aS, awm); #c1(MAP2K5) c2(NP_660143) c3(dual specificity mitogen-activated protein kinase kinase 5 isoform A) c4(240388) c5(240389, 240390, 240391, 240392, 240393, 240394) c6( ) c7(gh, T, eR, yY, n, bS, Jd, et, ci, v, aY, ad, aT, ae, xa, jf, aW, yL, Z, fq, hq, mx, aS, awm); #c1(MAP2K6) c2(NP_002749) c3(dual specificity mitogen-activated protein kinase kinase 6) c4(131679) c5(131680, 131681, 131682, 131683, 131684, 131685, 131686, 131687, 131688, 131689) c6( ) c7(ai, rR, cc, eM, bE, fm, ds, aw, bB, cy, K, m, bq, t, bz, X, y); #c1(MAP2K7) c2(NP_001284484) c3(dual specificity mitogen-activated protein kinase kinase 7 isoform 1) c4(111888) c5(111889, 111890, 111891, 111892, 111893, 111894) c6( ) c7(bM, T, aC, yS, bO, fd, bB, lR, ci, bv, aE, pX, aeO, ja, K, eL, cp, eG, yo, aeR, aW, az, NR, g, as, cm, Qt, iP, eM, nB, Qw, cj, m, Ro, kv, zP, cd, eW, auO, jz, auj, gd, dL, oo, aq, NL, it, B, aA, q, eA, zn, nv, dn, aT, dz, jj, ae, jf, Qr, iU, Y, Pg, r, t, iK, pb, FT, ck, sS, nM, kP, Dy, np, bt, id, BD, hF, ad, abZ, dP, av, hd, ds, NS, hP, pq, d, et, aF, iV, bz, Hp, es, Ew, bE, X, y, iu); #c1(MAP2K7) c2(NP_660186) c3(dual specificity mitogen-activated protein kinase kinase 7 isoform 3) c4(240475, 240476) c5(240477, 240478, 240479, 240480, 240481, 240482, 240483, 240484, 240485, 240486, 240487, 240488) c6( ) c7(bM, T, aC, yS, bO, fd, bB, lR, ci, bv, aE, pX, aeO, ja, K, eL, cp, eG, yo, aeR, aW, az, NR, g, as, cm, Qt, iP, eM, nB, Qw, cj, m, Ra, kv, zP, cd, eW, auO, jz, auj, gd, dL, oo, aq, NL, it, B, aA, q, eA, zn, nv, dn, aT, dz, jj, ae, jf, Qr, iU, Y, Pg, r, t, iK, pb, FT, ck, sS, nM, kP, Dy, np, bt, id, BD, hF, ad, abZ, dP, av, hd, ds, NS, hP, pq, d, et, aF, iV, bz, Hp, es, Ew, bE, X, y, iu); #c1(MAP3K1) c2(NP_005912) c3(mitogen-activated protein kinase kinase kinase 1) c4(160320) c5(160321, 160322, 160323, 160324, 160325, 160326) c6( ) c7(gx, T, aC, cbK, sw, aA, adW, eJ, ad, av, aE, vJ, aT, UD, K, ae, avg, A, zQ, xX, aW, Y, aF, cl, iV, t, bz, hL, m, y, B); #c1(MAP3K1) c2(XP_011541708) c3(mitogen-activated protein kinase kinase kinase 1 isoform X1) c4( ) c5(340269, 340270) c6( ) c7(gx, T, aC, cbK, sw, aA, adW, eJ, ad, av, aE, vJ, aT, UD, K, ae, avg, A, zQ, xX, aW, Y, aF, cl, iV, t, bz, hL, m, y, B); #c1(MAP3K10) c2(NP_002437) c3(mitogen-activated protein kinase kinase kinase 10) c4(128461) c5(128462, 128463, 128464, 128465, 128466, 128467) c6( ) c7(x, aE, eM, bE, aW, NT, aT, bB, kp, k, pd, hq); #c1(MAP3K10) c2(XP_011525285) c3(mitogen-activated protein kinase kinase kinase 10 isoform X3) c4( ) c5(319744) c6( ) c7(x, aE, eM, bE, aW, NT, aT, bB, kp, k, pd, hq); #c1(MAP3K11) c2(NP_002410) c3(mitogen-activated protein kinase kinase kinase 11) c4(128186, 128187) c5(128188, 128189, 128190, 128191, 128192, 128193, 128194, 128195, 128196, 128197, 128198, 128199) c6( ) c7(T, jx, NT, bB, ci, q, ad, aT, h, cy, K, ae, eu, aW, r, t, eK, ac, bE, gX, U, m); #c1(MAP3K12) c2(NP_006292) c3(mitogen-activated protein kinase kinase kinase 12 isoform 2) c4(163732) c5(163733, 163734, 163735, 163736, 163737, 163738) c6( ) c7(x, iO, fM, Tb, iU, aW, r, aT, bw, k, cm, cd); #c1(MAP3K13) c2(NP_001229246) c3(mitogen-activated protein kinase kinase kinase 13 isoform 2) c4(84024) c5(84025, 84026, 84027, 84028, 84029, 84030) c6( ) c7(bL, aW, cd, r, aT); #c1(MAP3K13) c2(XP_011511612) c3(mitogen-activated protein kinase kinase kinase 13 isoform X1) c4(302345, 302346, 302347, 302348) c5(302349, 302350, 302351, 302352, 302353, 302354, 302355, 302356, 302357, 302358, 302359, 302360, 302361, 302362, 302363, 302364, 302365, 302366, 302367, 302368, 302369, 302370, 302371, 302372, 302373, 302374, 302375, 302376) c6( ) c7(bL, aW, cd, r, aT); #c1(MAP3K14) c2(XP_011523743) c3(mitogen-activated protein kinase kinase kinase 14 isoform X1) c4(318244, 318245) c5(318246, 318247, 318248, 318249, 318250, 318251, 318252, 318253, 318254, 318255, 318256, 318257) c6( ) c7(T, fN, fd, jh, aj, eW, J, ad, aE, aT, K, bc, aW, Y, aq, alJ, f, bz, bb, nM, eM, MC, y, B, hS); #c1(MAP3K19) c2(NP_001018054) c3(mitogen-activated protein kinase kinase kinase 19 isoform 3) c4(26958) c5(26959, 26960, 26961, 26962, 26963, 26964) c6( ) c7(ab, hF, fM, W); #c1(MAP3K19) c2(NP_001018056) c3(mitogen-activated protein kinase kinase kinase 19 isoform 2) c4(26965) c5(26966, 26967, 26968, 26969, 26970, 26971) c6( ) c7(ab, hF, fM, W); #c1(MAP3K19) c2(NP_001018057) c3(mitogen-activated protein kinase kinase kinase 19 isoform 4) c4(26972) c5(26973, 26974, 26975, 26976, 26977, 26978) c6( ) c7(ab, hF, fM, W); #c1(MAP3K19) c2(NP_001269812) c3(mitogen-activated protein kinase kinase kinase 19 isoform 5) c4(102894) c5(102895, 102896, 102897, 102898, 102899, 102900, 102901, 102902, 102903, 102904, 102905) c6( ) c7(ab, hF, fM, W); #c1(MAP3K19) c2(XP_011510196) c3(mitogen-activated protein kinase kinase kinase 19 isoform X3) c4(300767) c5( ) c6( ) c7(ab, hF, fM, W); #c1(MAP3K19) c2(XP_011510201) c3(mitogen-activated protein kinase kinase kinase 19 isoform X1) c4(300768, 300769) c5(300770, 300771, 300772, 300773, 300774, 300775, 300776, 300777, 300778, 300779, 300780, 300781) c6( ) c7(ab, hF, fM, W); #c1(MAP3K19) c2(XP_011510203) c3(mitogen-activated protein kinase kinase kinase 19 isoform X8) c4( ) c5(300782) c6( ) c7(ab, hF, fM, W); #c1(MAP3K2) c2(NP_006600) c3(mitogen-activated protein kinase kinase kinase 2) c4(166535, 166536) c5(166537, 166538, 166539, 166540, 166541, 166542, 166543, 166544, 166545, 166546, 166547, 166548, 166549, 166550, 166551) c6( ) c7(y, T, ci); #c1(MAP3K3) c2(NP_002392) c3(mitogen-activated protein kinase kinase kinase 3 isoform 2) c4(128083) c5(128084, 128085, 128086, 128087, 128088, 128089) c6( ) c7(T, aW, ht, aT, K, m, t); #c1(MAP3K3) c2(NP_976226) c3(mitogen-activated protein kinase kinase kinase 3 isoform 1) c4(263000) c5(263001, 263002, 263003, 263004, 263005, 263006) c6( ) c7(T, aW, ht, aT, K, m, t); #c1(MAP3K4) c2(NP_005913) c3(mitogen-activated protein kinase kinase kinase 4 isoform a) c4(160327, 160328) c5(160329, 160330, 160331, 160332, 160333, 160334) c6( ) c7(afz, hL); #c1(MAP3K4) c2(NP_006715) c3(mitogen-activated protein kinase kinase kinase 4 isoform b) c4(167364, 167365) c5(167366, 167367, 167368, 167369, 167370, 167371, 167372, 167373, 167374, 167375, 167376, 167377) c6( ) c7(afz, hL); #c1(MAP3K4) c2(XP_005267046) c3(mitogen-activated protein kinase kinase kinase 4 isoform X1) c4( ) c5(280638, 280639, 280640, 280641, 280642, 280643) c6( ) c7(afz, hL); #c1(MAP3K5) c2(NP_005914) c3(mitogen-activated protein kinase kinase kinase 5) c4(160335, 160336, 160337) c5(160338, 160339, 160340, 160341, 160342, 160343, 160344, 160345, 160346, 160347, 160348, 160349, 160350, 160351, 160352, 160353, 160354, 160355) c6( ) c7(bL, T, dD, aC, hV, ea, iW, e, aA, bB, fd, aj, dG, v, eq, mF, V, ai, J, ad, eA, cc, xE, aE, aT, cy, dL, ji, K, bq, an, ae, eL, cp, eG, aW, Y, ff, xs, eH, aMA, aq, aF, en, eF, t, cm, iK, Hv, eK, ck, ac, c, iT, bE, au, U, wz, m, pw, y, bt, B); #c1(MAP3K6) c2(NP_001284538) c3(mitogen-activated protein kinase kinase kinase 6 isoform 2) c4(111995) c5(111996, 111997, 111998, 111999, 112000, 112001) c6( ) c7(rR); #c1(MAP3K6) c2(XP_011540708) c3(mitogen-activated protein kinase kinase kinase 6 isoform X1) c4(339274, 339275) c5(339276, 339277, 339278, 339279, 339280, 339281, 339282, 339283, 339284, 339285, 339286, 339287) c6( ) c7(rR); #c1(MAP3K7) c2(NP_003179) c3(mitogen-activated protein kinase kinase kinase 7 isoform A) c4(135980, 135981) c5(135982, 135983, 135984, 135985, 135986, 135987, 135988, 135989, 135990, 135991, 135992, 135993) c6( ) c7(T, bsy, lH, aw, eX, jh, fd, bB, ci, Lw, hF, ad, er, Na, cF, aE, bjA, hb, aT, eV, dL, ey, ji, ae, eL, B, aW, Y, ff, fe, aq, si, hp, en, CQ, t, Zb, fq, bz, ck, wR, cbL, m, bt, it, bsw, vQ); #c1(MAP3K7) c2(NP_663304) c3(mitogen-activated protein kinase kinase kinase 7 isoform B) c4(241164) c5(241165, 241166, 241167, 241168, 241169, 241170) c6( ) c7(T, bsy, lH, aw, eX, jh, fd, bB, ci, Lw, hF, ad, er, Na, cF, aE, bjA, hb, aT, eV, dL, ey, ji, ae, eL, B, aW, Y, ff, fe, aq, si, hp, en, CQ, t, Zb, fq, bz, ck, wR, cbL, m, bt, it, bsw, vQ); #c1(MAP3K7) c2(NP_663305) c3(mitogen-activated protein kinase kinase kinase 7 isoform C) c4(241171) c5(241172, 241173, 241174, 241175, 241176, 241177) c6( ) c7(T, bsy, lH, aw, eX, jh, fd, bB, ci, Lw, hF, ad, er, Na, cF, aE, bjA, hb, aT, eV, dL, ey, ji, ae, eL, B, aW, Y, ff, fe, aq, si, hp, en, CQ, t, Zb, fq, bz, ck, wR, cbL, m, bt, it, bsw, vQ); #c1(MAP3K7) c2(NP_663306) c3(mitogen-activated protein kinase kinase kinase 7 isoform D) c4(241178, 241179) c5(241180, 241181, 241182, 241183, 241184, 241185, 241186, 241187, 241188, 241189, 241190, 241191) c6( ) c7(T, bsy, lH, aw, eX, jh, fd, bB, ci, Lw, hF, ad, er, Na, cF, aE, bjA, hb, aT, eV, dL, ey, ji, ae, eL, B, aW, Y, ff, fe, aq, si, hp, en, CQ, t, Zb, fq, bz, ck, wR, cbL, m, bt, it, bsw, vQ); #c1(MAP3K7CL) c2(NP_001273546) c3(MAP3K7 C-terminal-like protein isoform 2) c4(105167, 105168) c5(105169, 105170, 105171, 105172, 105173, 105174, 105175, 105176, 105177, 105178, 105179, 105180, 105181, 105182, 105183, 105184, 105185, 105186, 105187, 105188, 105189, 105190, 105191, 105192, 105193, 105194, 105195, 105196, 105197, 105198, 105199) c6( ) c7(aW, aT); #c1(MAP3K7CL) c2(NP_001273551) c3(MAP3K7 C-terminal-like protein isoform 3) c4(105200) c5(105201, 105202, 105203, 105204, 105205) c6( ) c7(aW, aT); #c1(MAP3K7CL) c2(NP_001273552) c3(MAP3K7 C- terminal-like protein isoform 4) c4( ) c5(105206, 105207, 105208, 105209, 105210, 105211, 105212, 105213, 105214, 105215, 105216) c6( ) c7(aW, aT); #c1(MAP3K7CL) c2(NP_001273563) c3(MAP3K7 C-terminal-like protein isoform 1) c4(105278, 105279, 105280) c5(105281, 105282, 105283, 105284, 105285, 105286, 105287, 105288, 105289, 105290, 105291, 105292, 105293) c6( ) c7(aW, aT); #c1(MAP3K8) c2(XP_005252421) c3(mitogen-activated protein kinase kinase kinase 8 isoform X1) c4(271741, 271742, 271743, 271744) c5(271745, 271746, 271747, 271748, 271749, 271750, 271751, 271752, 271753, 271754, 271755, 271756, 271757, 271758, 271759, 271760, 271761, 271762, 271763, 271764, 271765, 271766, 271767, 271768, 271769, 271770, 271771, 271772, 271773, 271774, 271775, 271776, 271777, 271778, 271779, 271780) c6( ) c7(DS, T, RX, fd, aA, bB, n, bZ, v, j, ci, nA, Fb, fr, Fc, pd, q, ad, eA, av, iu, hd, py, jz, pN, aT, lG, rO, bK, K, ji, ae, al, lR, TY, dH, Jl, aW, Y, r, aq, aF, bu, zM, t, iK, bz, c, dB, bE, go, hL, cj, hR, m, bgi, Bh, B); #c1(MAP3K8) c2(XP_011517610) c3(mitogen-activated protein kinase kinase kinase 8 isoform X2) c4(311398) c5(311399, 311400, 311401, 311402, 311403, 311404, 311405) c6( ) c7(DS, T, RX, fd, aA, bB, n, bZ, v, j, ci, nA, Fb, fr, Fc, pd, q, ad, eA, av, iu, hd, py, jz, pN, aT, lG, rO, bK, K, ji, ae, al, lR, TY, dH, Jl, aW, Y, r, aq, aF, bu, zM, t, iK, bz, c, dB, bE, go, hL, cj, hR, m, bgi, Bh, B); #c1(MAP3K8) c2(XP_011517611) c3(mitogen-activated protein kinase kinase kinase 8 isoform X3) c4( ) c5(311406, 311407, 311408) c6( ) c7(DS, T, RX, fd, aA, bB, n, bZ, v, j, ci, nA, Fb, fr, Fc, pd, q, ad, eA, av, iu, hd, py, jz, pN, aT, lG, rO, bK, K, ji, ae, al, lR, TY, dH, Jl, aW, Y, r, aq, aF, bu, zM, t, iK, bz, c, dB, bE, go, hL, cj, hR, m, bgi, Bh, B); #c1(MAP3K9) c2(NP_001271159) c3(mitogen-activated protein kinase kinase kinase 9 isoform 2) c4(103496) c5(103497, 103498, 103499, 103500, 103501, 103502) c6( ) c7(bE, Y, ht, bB, K, hu, cp); #c1(MAP3K9) c2(NP_149132) c3(mitogen-activated protein kinase kinase kinase 9 isoform 1) c4(227392) c5(227393, 227394, 227395, 227396, 227397, 227398, 227399, 227400) c6( ) c7(bE, Y, ht, bB, K, hu, cp); #c1(MAP3K9) c2(XP_011535093) c3(mitogen-activated protein kinase kinase kinase 9 isoform X4) c4(331822) c5(331823, 331824, 331825, 331826, 331827, 331828) c6( ) c7(bE, Y, ht, bB, K, hu, cp); #c1(MAP4) c2(NP_001127836) c3(microtubule-associated protein 4 isoform 4) c4(49301) c5(49302, 49303, 49304, 49305, 49306, 49307) c6( ) c7(e, eL, oe, fM, dL); #c1(MAP4) c2(NP_002366) c3(microtubule-associated protein 4 isoform 1) c4(127795, 127796) c5(127797, 127798, 127799, 127800, 127801, 127802) c6( ) c7(e, eL, oe, fM, dL); #c1(MAP4) c2(NP_112147) c3(microtubule-associated protein 4 isoform 3) c4( ) c5(220502, 220503, 220504, 220505, 220506, 220507) c6( ) c7(e, eL, oe, fM, dL); #c1(MAP4) c2(XP_011532007) c3(microtubule-associated protein 4 isoform X3) c4(328043, 328044) c5(328045, 328046, 328047, 328048, 328049, 328050, 328051, 328052, 328053, 328054, 328055, 328056) c6( ) c7(e, eL, oe, fM, dL); #c1(MAP4) c2(XP_011532010) c3(microtubule-associated protein 4 isoform X6) c4(328057) c5(328058, 328059, 328060, 328061, 328062, 328063) c6( ) c7(e, eL, oe, fM, dL); #c1(MAP4) c2(XP_011532015) c3(microtubule-associated protein 4 isoform X12) c4(328064) c5( ) c6( ) c7(e, eL, oe, fM, dL); #c1(MAP4) c2(XP_011532020) c3(microtubule-associated protein 4 isoform X18) c4(328065) c5(328066, 328067, 328068, 328069, 328070, 328071) c6( ) c7(e, eL, oe, fM, dL); #c1(MAP4) c2(XP_011532023) c3(microtubule-associated protein 4 isoform X26) c4(328072, 328073) c5(328074, 328075, 328076, 328077, 328078, 328079, 328080, 328081, 328082, 328083, 328084, 328085, 328086, 328087, 328088, 328089, 328090, 328091) c6( ) c7(e, eL, oe, fM, dL); #c1(MAP4K1) c2(NP_001036065) c3(mitogen-activated protein kinase kinase kinase kinase 1 isoform 1) c4(33907) c5(33908, 33909, 33910, 33911, 33912, 33913, 33914, 33915, 33916, 33917, 33918, 33919) c6( ) c7(jf, aC, W, aE, bE, eZ, vs, ci, K); #c1(MAP4K1) c2(NP_009112) c3(mitogen-activated protein kinase kinase kinase kinase 1 isoform 2) c4(170772, 170773) c5(170774, 170775, 170776, 170777, 170778, 170779, 170780, 170781, 170782, 170783) c6( ) c7(jf, aC, W, aE, bE, eZ, vs, ci, K); #c1(MAP4K2) c2(NP_004570) c3(mitogen-activated protein kinase kinase kinase kinase 2) c4(147822) c5(147823, 147824, 147825, 147826, 147827, 147828) c6( ) c7(md, bL, AW, nD, mh, aC, A, bza, bAg, mg, cz, cy, aj, dG, jy, K, ei, J); #c1(MAP4K3) c2(NP_001257354) c3(mitogen-activated protein kinase kinase kinase kinase 3 isoform 2) c4(95237) c5(95238, 95239, 95240, 95241, 95242, 95243, 95244, 95245, 95246, 95247, 95248, 95249, 95250, 95251, 95252, 95253) c6( ) c7(xE, c, mi, eZ, gv, fL, mb, mC, y); #c1(MAP4K3) c2(NP_003609) c3(mitogen-activated protein kinase kinase kinase kinase 3 isoform 1) c4(139566, 139567, 139568) c5(139569, 139570, 139571, 139572, 139573, 139574, 139575, 139576) c6( ) c7(xE, c, mi, eZ, gv, fL, mb, mC, y); #c1(MAP4K4) c2(NP_001229488) c3(mitogen-activated protein kinase kinase kinase kinase 4 isoform 4) c4(84569) c5(84570, 84571, 84572, 84573, 84574, 84575, 84576, 84577, 84578, 84579, 84580, 84581) c6( ) c7(bL, T, bb, aE, eM, nM, hX, aW, Y, jh, aT, fd, aq, aj, mf, ci, bz, B, J, hS); #c1(MAP4K4) c2(NP_004825) c3(mitogen-activated protein kinase kinase kinase kinase 4 isoform 1) c4(150094) c5(150095, 150096, 150097, 150098, 150099, 150100) c6( ) c7(bL, T, bb, aE, eM, nM, hX, aW, Y, jh, aT, fd, aq, aj, mf, ci, bz, B, J, hS); #c1(MAP4K4) c2(NP_663719) c3(mitogen-activated protein kinase kinase kinase kinase 4 isoform 2) c4(241438) c5(241439, 241440, 241441, 241442, 241443, 241444) c6( ) c7(bL, T, bb, aE, eM, nM, hX, aW, Y, jh, aT, fd, aq, aj, mf, ci, bz, B, J, hS); #c1(MAP4K4) c2(XP_005264106) c3(mitogen-activated protein kinase kinase kinase kinase 4 isoform X7) c4( ) c5(278668) c6( ) c7(bL, T, bb, aE, eM, nM, hX, aW, Y, jh, aT, fd, aq, aj, mf, ci, bz, B, J, hS); #c1(MAP4K4) c2(XP_005264112) c3(mitogen-activated protein kinase kinase kinase kinase 4 isoform X14) c4(278669) c5(278670, 278671, 278672, 278673, 278674, 278675) c6( ) c7(bL, T, bb, aE, eM, nM, hX, aW, Y, jh, aT, fd, aq, aj, mf, ci, bz, B, J, hS); #c1(MAP4K4) c2(XP_005264126) c3(mitogen-activated protein kinase kinase kinase kinase 4 isoform X29) c4(278676) c5( ) c6( ) c7(bL, T, bb, aE, eM, nM, hX, aW, Y, jh, aT, fd, aq, aj, mf, ci, bz, B, J, hS); #c1(MAP4K4) c2(XP_006712932) c3(mitogen-activated protein kinase kinase kinase kinase 4 isoform X34) c4(286903) c5(286904, 286905, 286906, 286907, 286908, 286909) c6( ) c7(bL, T, bb, aE, eM, nM, hX, aW, Y, jh, aT, fd, aq, aj, mf, ci, bz, B, J, hS); #c1(MAP4K4) c2(XP_011510506) c3(mitogen-activated protein kinase kinase kinase kinase 4 isoform X19) c4(301030) c5(301031, 301032, 301033, 301034, 301035, 301036) c6( ) c7(bL, T, bb, aE, eM, nM, hX, aW, Y, jh, aT, fd, aq, aj, mf, ci, bz, B, J, hS); #c1(MAP4K4) c2(XP_011510507) c3(mitogen-activated protein kinase kinase kinase kinase 4 isoform X31) c4(301037) c5(301038, 301039, 301040, 301041, 301042, 301043) c6( ) c7(bL, T, bb, aE, eM, nM, hX, aW, Y, jh, aT, fd, aq, aj, mf, ci, bz, B, J, hS); #c1(MAP4K5) c2(XP_006720076) c3(mitogen-activated protein kinase kinase kinase kinase 5 isoform X1) c4(293204) c5(293205, 293206, 293207, 293208, 293209, 293210, 293211, 293212) c6( ) c7(bL, iM, eR, je, fc, aj, dG, j, v, ei, aY, cd, J); #c1(MAP6) c2(NP_149052) c3(microtubule-associated protein 6 isoform 1) c4(226918, 226919, 226920) c5(226921, 226922, 226923, 226924, 226925, 226926, 226927, 226928, 226929, 226930, 226931, 226932) c6( ) c7(bL, iU, aj, mf, m, fD, jg, t, Fl, q, J); #c1(MAP6) c2(NP_997460) c3(microtubule-associated protein 6 isoform 2) c4( ) c5(265536, 265537, 265538, 265539, 265540, 265541) c6( ) c7(bL, iU, aj, mf, m, fD, jg, t, Fl, q, J); #c1(MAP7) c2(NP_001185540) c3(ensconsin isoform 4) c4(75791) c5(75792, 75793, 75794, 75795, 75796, 75797) c6( ) c7(T, X, B); #c1(MAP7) c2(NP_001185543) c3(ensconsin isoform 1) c4(75798) c5(75799, 75800, 75801, 75802, 75803, 75804) c6( ) c7(T, X, B); #c1(MAP7) c2(NP_001185544) c3(ensconsin isoform 5) c4(75805) c5(75806, 75807, 75808, 75809, 75810, 75811) c6( ) c7(T, X, B); #c1(MAP7) c2(NP_001185546) c3(ensconsin isoform 7) c4(75812) c5(75813, 75814, 75815, 75816, 75817, 75818) c6( ) c7(T, X, B); #c1(MAP7) c2(NP_001185547) c3(ensconsin isoform 8) c4(75819) c5(75820, 75821, 75822, 75823, 75824) c6( ) c7(T, X, B); #c1(MAP7) c2(NP_003971) c3(ensconsin isoform 3) c4(142548) c5(142549, 142550, 142551, 142552, 142553, 142554, 142555) c6( ) c7(T, X, B); #c1(MAP9) c2(NP_001034669) c3(microtubule-associated protein 9) c4(32011, 32012, 32013, 32014) c5(32015, 32016, 32017, 32018, 32019, 32020, 32021, 32022, 32023, 32024, 32025, 32026, 32027, 32028, 32029, 32030, 32031, 32032, 32033, 32034, 32035, 32036, 32037) c6( ) c7(h); #c1(MAP9) c2(XP_006714369) c3(microtubule-associated protein 9 isoform X2) c4(287811) c5(287812, 287813, 287814, 287815, 287816, 287817, 287818) c6( ) c7(h); #c1(MAP9) c2(XP_011530557) c3(microtubule-associated protein 9 isoform X3) c4( ) c5(326482) c6( ) c7(h); #c1(MAPK1) c2(NP_620407) c3(mitogen-activated protein kinase 1) c4(237550, 237551, 237552) c5(237553, 237554, 237555, 237556, 237557, 237558, 237559, 237560, 237561, 237562, 237563, 237564, 237565, 237566, 237567, 237568, 237569, 237570, 237571, 237572, 237573, 237574) c6( ) c7(DS, gh, T, os, bM, lD, fR, aC, yS, ea, if, pf, bO, fd, bB, gf, lR, ci, Lw, x, bv, xy, xE, aE, Bc, rw, pX, aeO, M, dV, iv, K, hu, eL, cp, ly, xQ, yo, aeR, iE, aW, aEl, az, zC, g, as, eE, eF, axp, cm, Qt, bw, iP, eM, Jr, nB, iA, vA, cbM, mx, cj, NO, Qw, k, Hb, m, Xu, ik, NN, iu, Ra, NK, dD, iB, RX, ht, NT, qy, aw, NJ, aj, BF, ct, qN, fr, kv, cd, asS, ai, Hx, ft, no, jz, cc, gd, cU, h, dL, ey, ox, Bz, he, A, PX, fJ, ks, fe, aq, kp, pm, op, lx, NL, w, hL, hR, uz, eo, fL, Xa, it, B, bL, Dw, NQ, fM, dA, yk, lH, jx, aA, cR, cz, hy, v, j, C, bX, V, q, eA, eJ, zn, cF, yw, nv, qK, HC, aT, aAn, kf, cy, rD, bK, jj, bq, ae, af, eu, bA, jf, hM, wr, s, NE, Qr, iU, Y, ev, afS, Pg, r, iy, cu, lo, en, hf, cl, t, iK, pb, FT, bN, ck, bvL, pa, nM, Dy, hc, cbO, gX, auN, im, bt, bFC, ao, hl, kh, MH, btY, iW, ha, jh, Hn, aZ, bS, dG, eq, hF, iJ, mC, ad, hX, dP, av, hd, F, agd, CJ, ib, yt, ds, hP, lQ, ji, cbN, fb, pq, NM, NP, d, ff, eH, cr, eZ, aoF, aF, iV, iR, bz, dr, Hp, es, D, bE, bEs, z, afT, y, WX, X, jr); #c1(MAPK10) c2(NP_002744) c3(mitogen-activated protein kinase 10 isoform 1) c4(131599, 131600, 131601) c5(131602, 131603, 131604, 131605, 131606, 131607, 131608, 131609, 131610, 131611, 131612, 131613, 131614, 131615, 131616, 131617) c6( ) c7(bM, hb, dB, cbP, h, lm, ci, K, m, nA, t, iK); #c1(MAPK10) c2(NP_620446) c3(mitogen-activated protein kinase 10 isoform 3) c4(237646, 237647, 237648, 237649) c5(237650, 237651, 237652, 237653, 237654, 237655, 237656, 237657) c6( ) c7(bM, hb, dB, cbP, h, lm, ci, K, m, nA, t, iK); #c1(MAPK10) c2(XP_005263193) c3(mitogen-activated protein kinase 10 isoform X8) c4( ) c5(278341, 278342, 278343, 278344, 278345) c6( ) c7(bM, hb, dB, cbP, h, lm, ci, K, m, nA, t, iK); #c1(MAPK10) c2(XP_006714332) c3(mitogen-activated protein kinase 10 isoform X6) c4(287690) c5(287691, 287692, 287693, 287694, 287695, 287696) c6( ) c7(bM, hb, dB, cbP, h, lm, ci, K, m, nA, t, iK); #c1(MAPK10) c2(XP_006714335) c3(mitogen-activated protein kinase 10 isoform X10) c4(287697) c5(287698, 287699, 287700, 287701, 287702, 287703, 287704, 287705, 287706, 287707, 287708, 287709, 287710, 287711, 287712, 287713, 287714, 287715, 287716, 287717, 287718, 287719, 287720, 287721, 287722, 287723, 287724, 287725, 287726, 287727, 287728, 287729, 287730, 287731, 287732, 287733, 287734, 287735, 287736, 287737, 287738, 287739, 287740, 287741, 287742, 287743, 287744, 287745, 287746, 287747, 287748, 287749, 287750, 287751, 287752, 287753, 287754, 287755, 287756, 287757) c6( ) c7(bM, hb, dB, cbP, h, lm, ci, K, m, nA, t, iK); #c1(MAPK10) c2(XP_011530421) c3(mitogen-activated protein kinase 10 isoform X5) c4(326266, 326267, 326268, 326269, 326270, 326271) c5( ) c6( ) c7(bM, hb, dB, cbP, h, lm, ci, K, m, nA, t, iK); #c1(MAPK11) c2(NP_002742) c3(mitogen-activated protein kinase 11) c4(131579, 131580) c5(131581, 131582, 131583, 131584, 131585, 131586, 131587, 131588, 131589, 131590, 131591) c6( ) c7(ck, cc, d, eM, h, K, y, B); #c1(MAPK11) c2(XP_011529008) c3(mitogen-activated protein kinase 11 isoform X1) c4( ) c5(324369, 324370, 324371, 324372, 324373) c6( ) c7(ck, cc, d, eM, h, K, y, B); #c1(MAPK12) c2(NP_001290181) c3(mitogen-activated protein kinase 12 isoform 2) c4(115100) c5(115101, 115102, 115103, 115104, 115105, 115106) c6( ) c7(T, bE, aW, Y, ff, aT, bB, ci, en, bz); #c1(MAPK12) c2(NP_002960) c3(mitogen-activated protein kinase 12 isoform 1) c4(133938) c5(133939, 133940, 133941, 133942, 133943, 133944) c6( ) c7(T, bE, aW, Y, ff, aT, bB, ci, en, bz); #c1(MAPK13) c2(NP_002745) c3(mitogen-activated protein kinase 13) c4(131618, 131619, 131620, 131621, 131622) c5(131623, 131624, 131625, 131626, 131627, 131628, 131629, 131630, 131631, 131632, 131633, 131634, 131635, 131636, 131637, 131638, 131639, 131640, 131641, 131642, 131643, 131644, 131645, 131646, 131647, 131648, 131649, 131650, 131651, 131652) c6( ) c7(jz, nO, h, K, bjl, hJ, y, rY); #c1(MAPK14) c2(NP_001306) c3(mitogen-activated protein kinase 14 isoform 1) c4(116556) c5(116557, 116558, 116559, 116560, 116561, 116562) c6( ) c7(bM, T, aC, fR, ea, if, fd, bB, gf, lR, ci, Lw, bv, xE, aE, rw, dV, K, hu, H, pk, eL, YL, aW, az, zC, g, as, hJ, eF, cm, bw, eM, nB, iT, cj, NO, Hb, m, NN, iu, NK, dD, ht, RC, NJ, aj, BF, ct, qN, asF, fr, cd, ai, Hx, jz, cc, cU, lG, jy, dL, h, fe, aq, NL, hk, w, hR, at, B, L, bL, Dw, NQ, fM, yk, lH, jx, aA, cR, cz, v, j, C, V, q, J, eA, eJ, cF, yw, uT, aT, kf, cy, ae, af, hM, wr, iU, Y, DN, Pg, r, lo, en, t, iK, pb, ck, c, mf, im, bt, ao, kh, jh, bS, dG, eq, iJ, ad, hX, dP, av, CJ, F, ib, ds, Aa, lQ, jo, ji, fb, NM, NP, d, ff, eH, cr, aF, Z, jh, bz, xZ, bE, aDB, ME, y, X); #c1(MAPK14) c2(NP_620581) c3(mitogen-activated protein kinase 14 isoform 2) c4(237783) c5(237784, 237785, 237786, 237787, 237788, 237789, 237790) c6( ) c7(bM, T, aC, fR, ea, if, fd, bB, gf, lR, ci, Lw, bv, xE, aE, rw, dV, K, hu, H, pk, eL, YL, aW, az, zC, g, as, hJ, eF, cm, bw, eM, nB, iT, cj, NO, Hb, m, NN, iu, NK, dD, ht, RC, NJ, aj, BF, ct, qN, asF, fr, cd, ai, Hx, jz, cc, cU, lG, jy, dL, h, fe, aq, NL, hk, w, hR, at, B, L, bL, Dw, NQ, fM, yk, lH, jx, aA, cR, cz, v, j, C, V, q, J, eA, eJ, cF, yw, uT, aT, kf, cy, ae, af, hM, wr, iU, Y, ON, Pg, r, lo, en, t, iK, pb, ck, c, mf, im, bt, ao, kh, jh, bS, dG, eq, iJ, ad, hX, dP, av, CJ, F, ib, ds, Aa, lQ, ja, ji, fb, NM, NP, d, ff, eH, cr, aF, Z, jb, bz, xZ, bE, aDB, ME, y, X); #c1(MAPK14) c2(NP_620583) c3(mitogen-activated protein kinase 14 isoform 4) c4(237791) c5(237792, 237793, 237794, 237795, 237796, 237797) c6( ) c7(bM, T, aC, fR, ea, if, fd, bB, gf, lR, ci, Lw, bv, xE, aE, rw, dV, K, hu, H, pk, eL, YL, aW, az, zC, g, as, hJ, eF, cm, bw, eM, nB, iT, cj, NO, Hb, m, NN, iu, NK, dD, ht, RC, NJ, aj, BF, ct, qN, asF, fr, cd, ai, Hx, jz, cc, cU, lG, jy, dL, h, fe, aq, NL, hk, w, hR, at, B, L, bL, Dw, NQ, fM, yk, lH, jx, aA, cR, cz, v, j, C, V, q, J, eA, eJ, cF, yw, uT, aT, kf, cy, ae, af, hM, wr, iU, Y, DN, Pg, r, lo, en, t, iK, pb, ck, c, mf, im, bt, ao, kh, jh, bS, dG, eq, iJ, ad, hX, dP, av, CJ, F, ib, ds, Aa, lQ, jo, ji, fb, NM, NP, d, ff, eH, cr, aF, Z, jb, bz, xZ, bE, aDB, ME, y, X); #c1(MAPK14) c2(XP_006715061) c3(mitogen-activated protein kinase 14 isoform X3) c4( ) c5(288562, 288563, 288564, 288565, 288566) c6( ) c7(bM, T, aC, fR, ea, if, fd, bB, gf, lR, ci, Lw, bv, xE, aE, rw, dV, K, hu, H, pk, eL, YL, aW, az, zC, g, as, hJ, eF, cm, bw, eM, nB, iT, cj, NO, Hb, m, NN, iu, NK, dD, ht, RC, NJ, aj, BF, ct, qN, asF, fr, cd, ai, Hx, jz, cc, cU, lG, jy, dL, h, fe, aq, NL, hk, w, hR, at, B, L, bL, Dw, NQ, fM, yk, lH, jx, aA, cR, cz, v, j, C, V, q, J, eA, eJ, cF, yw, uT, aT, kf, cy, ae, af, hM, wr, iU, Y, DN, Pg, r, lo, en, t, iK, pb, ck, c, mf, im, bt, an, kh, jh, bS, dG, eq, iJ, ad, hX, dP, av, CJ, F, ib, ds, Aa, lQ, jo, ji, fb, NM, NP, d, ff, eH, cr, aF, Z, jb, bz, xZ, bE, aDB, ME, y, X); #c1(MAPK14) c2(XP_011512612) c3(mitogen-activated protein kinase 14 isoform X1) c4(303577) c5( ) c6( ) c7(bM, T, aC, fR, ea, if, fd, bB, gf, lR, ci, Lw, bv, xE, aE, rw, dV, K, hu, H, pk, eL, YL, aW, az, zC, g, as, hJ, eF, cm, bw, eM, nB, iT, cj, NO, Hb, m, NN, iu, NK, dD, ht, RC, NJ, aj, BE, ct, qN, asF, fr, cd, ai, Hx, jz, cc, cU, lG, jy, dL, h, fe, aq, NL, hk, w, hR, at, B, L, bL, Dw, NQ, fM, yk, lH, jx, aA, cR, cz, v, j, C, V, q, J, eA, eJ, cF, yw, uT, aT, kf, cy, ae, af, hM, wr, iU, Y, DN, Pg, r, lo, en, t, iK, pb, ck, c, mf, im, bt, ao, kh, jh, bS, dG, eq, iJ, ad, hX, dP, av, CJ, F, ib, ds, Aa, lQ, jo, ji, fb, NM, NP, d, ff, eH, cr, aF, Z, jb, bz, xZ, bE, aDB, ME, y, X); #c1(MAPK15) c2(NP_620590) c3(mitogen-activated protein kinase 15) c4(237825, 237826, 237827) c5(237828, 237829, 237830, 237831, 237832, 237833, 237834, 237835, 237836, 237837, 237838, 237839, 237840, 237841, 237842, 237843, 237844, 237845, 237846, 237847, 237848, 237849, 237850, 237851) c6(237852, 237853, 237854, 237855, 237856, 237857) c7(aW, aT); #c1(MAPK3) c2(NP_001035145) c3(mitogen-activated protein kinase 3 isoform 2) c4(32510) c5(32511, 32512, 32513, 32514, 32515, 32516) c6( ) c7(lD, gh, T, bM, aC, fR, yS, ea, fd, bB, ci, Lw, ip, aE, ws, K, hH, ass, eL, Qe, aa, ly, aW, aEl, Ls, fc, g, as, pL, eF, axp, cm, bw, iP, qJ, eM, mx, vy, cj, m, dD, iB, aw, ht, NT, fg, n, ct, asS, ft, jz, cc, h, eV, dL, ks, aq, kp, dw, jT, lx, bm, amb, bD, B, fM, dA, eX, aA, hy, j, yO, C, g, eA, XX, BJ, qK, HC, aCV, aT, bZk, rD, bK, jj, ae, af, eu, bA, jf, hM, bf, s, iU, Y, r, cu, en, cl, t, iK, pb, bN, ck, nM, Dy, mf, bt, hS, BD, ob, MH, df, jh, wV, bS, eq, OH, iJ, ad, dP, av, ib, py, yt, sN, bnM, Os, hP, NM, Yi, d, ff, eH, cr, dN, aF, Z, bz, bF, es, D, yE, bE, cP, ei, lG, X, y); #c1(MAPK3) c2(NP_001103361) c3(mitogen-activated protein kinase 3 isoform 3) c4(41896) c5(41897, 41898, 41899, 41900, 41901, 41902, 41903, 41904, 41905, 41906) c6( ) c7(lD, gh, T, bM, aC, fR, yS, ea, fd, bB, ci, Lw, ip, aE, ws, K, hH, ass, eL, Qe, aa, ly, aW, aEl, Ls, fc, g, as, pL, eF, axp, cm, bw, iP, qJ, eM, mx, vy, cj, m, dD, iB, aw, ht, NT, fg, n, et, asS, ft, jz, cc, h, eV, dL, ks, aq, kp, dw, jT, lx, bm, amb, bD, B, fM, dA, eX, aA, hy, j, yO, C, q, eA, XX, BJ, qK, HC, aCV, aT, bZk, rD, bK, jj, ae, af, eu, bA, jf, hM, bf, s, iU, Y, r, cu, en, cl, t, iK, pb, bN, ck, nM, Dy, mf, bt, hS, BD, ob, MH, df, jh, wV, bS, eq, OH, iJ, ad, dP, av, ib, py, yt, sN, bnM, Os, hP, NM, Yi, d, ff, eH, cr, dN, aF, Z, bz, bF, es, D, yE, bE, cP, ei, lG, X, y); #c1(MAPK3) c2(NP_002737) c3(mitogen-activated protein kinase 3 isoform 1) c4(131535, 131536, 131537) c5(131538, 131539, 131540, 131541, 131542, 131543, 131544, 131545, 131546, 131547, 131548, 131549, 131550, 131551, 131552, 131553, 131554, 131555) c6( ) c7(lD, gh, T, bM, aC, fR, yS, ea, fd, bB, ci, Lw, ip, aE, ws, K, hH, ass, eL, Qe, aa, ly, aW, aEl, Ls, fc, g, as, pL, eF, axp, cm, bw, iP, qJ, eM, mx, vy, cj, m, dD, iB, aw, ht, NT, fg, n, ct, asS, ft, jz, cc, h, eV, dL, ks, aq, kp, dw, jT, lx, bm, amb, bD, B, fM, dA, eX, aA, hy, j, yO, C, q, eA, XX, BJ, qK, HC, aCV, aT, bZk, rD, bK, jj, ae, af, eu, bA, jf, hM, bf, s, iU, Y, r, cu, en, cl, t, iK, pb, bN, ck, nM, Dy, mf, bt, hS, BD, ob, MH, df, jh, wV, bS, eq, OH, iJ, ad, dP, av, ib, py, yt, sN, bnM, Os, hP, NM, Yi, d, ff, eH, cr, dN, aF, Z, bz, bF, es, D, yE, bE, cP, ei, lC, X, y); #c1(MAPK6) c2(XP_005254596) c3(mitogen-activated protein kinase 6 isoform X1) c4(273272) c5(273273, 273274, 273275, 273276, 273277, 273278) c6( ) c7(T, Y, ff, ci, en, bz); #c1(MAPK7) c2(NP_002740) c3(mitogen-activated protein kinase 7 isoform 1) c4(131556, 131557, 131558) c5(131559, 131560, 131561, 131562, 131563, 131564, 131565, 131566, 131567, 131568, 131569, 131570, 131571, 131572, 131573, 131574, 131575, 131576, 131577, 131578) c6( ) c7(T, dD, aZ, fG, e, ea, eX, fd, cR, bB, aj, bS, eq, ci, J, ad, av, ib, py, aT, eV, dL, K, ae, eL, Qe, jf, aW, ff, eH, en, eF, bz, bN, ck, iT, bE, gX, aS, B, hS); #c1(MAPK7) c2(XP_006721622) c3(mitogen-activated protein kinase 7 isoform X2) c4( ) c5(294119) c6( ) c7(T, dD, aZ, fG, e, ea, eX, fd, cR, bB, aj, bS, eq, ci, J, ad, av, ib, py, aT, eV, dL, K, ae, eL, Qe, jf, aW, ff, eH, en, eF, bz, bN, ck, iT, bE, gX, aS, B, hS); #c1(MAPK7) c2(XP_011522259) c3(mitogen-activated protein kinase 7 isoform X1) c4( ) c5(316909, 316910, 316911, 316912, 316913) c6( ) c7(T, dD, aZ, fG, e, ea, eX, fd, cR, bB, aj, bS, eq, ci, J, ad, av, ib, py, aT, eV, dL, K, ae, eL, Qe, jf, aW, ff, eH, en, eF, bz, bN, ck, iT, bE, gX, aS, B, hS); #c1(MAPK8) c2(NP_001265477) c3(mitogen-activated protein kinase 8 isoform 5) c4(98635, 98636, 98637, 98638) c5(98639, 98640, 98641, 98642, 98643, 98644, 98645, 98646, 98647, 98648, 98649, 98650, 98651, 98652, 98653, 98654, 98655, 98656, 98657, 98658, 98659, 98660, 98661, 98662, 98663, 98664, 98665, 98666) c6( ) c7(bM, T, os, fd, bB, ci, fw, bv, aE, Be, rw, JT, K, aa, cbQ, eG, aW, fc, hl, CT, La, as, eE, eF, cm, bw, eM, iA, iT, U, cj, Hb, m, Xu, aCS, NT, aj, cd, br, ai, aGR, Hx, ft, zw, h, lG, jy, bl, dx, ia, A, fe, aq, mo, Zb, bP, dB, NL, bo, bm, hR, GN, eo, Pr, B, arO, bL, fM, Dh, lH, aA, cz, v, j, C, AO, V, q, J, eA, bke, aT, cy, an, ae, af, eu, jf, bf, iU, Y, r, en, t, bN, ck, ac, c, gX, EY, fD, bt, kh, qb, iW, jh, aZ, dG, jE, iJ, ad, hX, av, ib, ds, bj, ji, d, qt, ff, xs, eH, dq, aF, iR, KM, bz, es, bE, aRB, wz, ME, cP, ei, hE, X, y); #c1(MAPK8) c2(XP_011538257) c3(mitogen-activated protein kinase 8 isoform X4) c4(335863) c5(335864, 335865, 335866, 335867, 335868, 335869) c6( ) c7(bM, T, os, fd, bB, ci, fw, bv, aE, Bc, rw, JT, K, aa, cbQ, eG, aW, fc, hl, CT, La, as, eE, eF, cm, bw, eM, iA, iT, U, cj, Hb, m, Xu, aCS, NT, aj, cd, br, ai, aGR, Hx, ft, zw, h, lG, jy, bl, dx, ia, A, fe, aq, mo, Zb, bP, dB, NL, bo, bm, hR, GN, eo, Pr, B, arO, bL, fM, Dh, lH, aA, cz, v, j, C, AO, V, q, J, eA, bke, aT, cy, an, ae, af, eu, jf, bf, iU, Y, r, en, t, bN, ck, ac, c, gX, EY, fD, bt, kh, qb, iW, jh, al, dG, jE, iJ, ad, hX, av, ib, ds, bj, ji, d, qt, ff, xs, eH, dq, aF, iR, KM, bz, es, bE, aRB, wz, ME, cP, ei, hE, X, y); #c1(MAPK8) c2(XP_011538258) c3(mitogen-activated protein kinase 8 isoform X3) c4(335870) c5(335871, 335872, 335873, 335874, 335875, 335876, 335877, 335878, 335879, 335880) c6( ) c7(bM, T, os, fd, bB, ci, fw, bv, aE, Bc, rw, JT, K, aa, cbQ, eG, aW, fc, hl, CT, La, as, eE, eF, cm, bw, eM, iA, iT, U, cj, Hb, m, Xu, aCS, NT, aj, cd, br, ai, aGR, Hx, ft, zw, h, lG, jy, bl, dx, ia, A, fe, aq, mo, Zb, bP, dB, NL, bo, bm, hR, GN, eo, Pr, B, arO, bL, fM, Dh, lH, aA, cz, v, j, C, AO, V, q, J, eA, bke, aT, cy, an, ae, af, eu, jf, bf, iU, Y, r, en, t, bN, ck, ac, c, gX, EY, fD, bt, kh, qb, iW, jh, oZ, dG, jE, iJ, ad, hX, av, ib, ds, bj, ji, d, qt, ff, xs, eH, dq, aF, iR, KM, bz, es, bE, aRB, wz, ME, cP, ei, hE, X, y); #c1(MAPK8) c2(XP_011538259) c3(mitogen-activated protein kinase 8 isoform X2) c4(335881) c5(335882, 335883, 335884, 335885, 335886, 335887) c6( ) c7(bM, T, os, fd, bB, ci, fw, bv, aE, Bc, rw, JT, K, aa, cbQ, eG, aW, fc, hl, CT, La, as, eE, eF, cm, bw, eM, iA, iT, U, cj, Hb, m, Xu, aCS, NT, aj, cd, br, ai, aGR, Hx, ft, zw, h, lG, jy, bl, dx, ia, A, fe, aq, mo, Zb, bP, dB, NL, bo, bm, hR, GN, eo, Pr, B, arO, bL, fM, Dh, lH, aA, cz, v, j, C, AO, V, q, J, eA, bke, aT, cy, an, ae, af, eu, jf, bf, iU, Y, r, en, t, bN, ck, ac, c, gX, EY, fD, bt, kh, qb, iW, jh, oZ, dG, jE, iJ, ad, hX, av, ib, ds, bj, ji, d, qt, ff, xs, eH, dq, aF, iR, KM, bz, es, bE, aRB, wz, ME, cP, ei, hE, X, y); #c1(MAPK8) c2(XP_011538260) c3(mitogen-activated protein kinase 8 isoform X1) c4(335888) c5(335889, 335890, 335891, 335892, 335893, 335894) c6( ) c7(bM, T, os, fd, bB, ci, fw, bv, aE, Bc, rw, JT, K, aa, cbQ, eG, aW, fc, hl, CT, La, as, eE, eF, cm, bw, eM, iA, iT, U, cj, Hb, m, Xu, aCS, NT, aj, cd, br, ai, aGR, Hx, ft, zw, h, lG, jy, hl, dx, ia, A, fe, aq, mo, Zb, bP, dB, NL, bo, bm, hR, GN, eo, Pr, B, arO, bL, fM, Dh, lH, aA, cz, v, j, C, AO, V, q, J, eA, bke, aT, cy, an, ae, af, eu, jf, bf, iU, Y, r, en, t, bN, ck, ac, c, gX, EY, fD, bt, kh, qb, iW, jh, oZ, dG, jE, iJ, ad, hX, av, ib, ds, bj, ji, d, qt, ff, xs, eH, dq, aF, iR, KM, bz, es, bE, aRB, wz, ME, cP, ei, hE, X, y); #c1(MAPK81P1) c2(NP_005447) c3(C-Jun-amino-terminal kinase-interacting protein 1) c4(156276, 156277) c5(156278, 156279, 156280, 156281, 156282, 156283) c6( ) c7(bL, mj, eH, aj, bu, eF, er, af, J, ad); #c1(MAPK81P1) c2(XP_005253283) c3(C-Jun-amino-terminal kinase-interacting protein 1 isoform X1) c4( ) c5(272368, 272369, 272370, 272371, 272372, 272373, 272374, 272375, 272376, 272377, 272378, 272379) c6( ) c7(bL, mj, eH, aj, bu, eF, er, af, J, ad); #c1(MAPK81P2) c2(NP_036456) c3(C-Jun-amino-terminal kinase-interacting protein 2) c4(174018, 174019) c5(174020, 174021, 174022, 174023, 174024, 174025) c6( ) c7(qN, if, xg, fb, bN); #c1(MAPK81P2) c2(XP_011528982) c3(C-Jun-amino-terminal kinase-interacting protein 2 isoform X2) c4(324323, 324324, 324325) c5( ) c6( ) c7(qN, if, xg, fb, bN); #c1(MAPK81P2) c2(XP_011528983) c3(C-Jun-amino-terminal kinase-interacting protein 2 isoform X3) c4( ) c5(324326, 324327, 324328, 324329, 324330, 324331, 324332, 324333, 324334, 324335, 324336, 324337, 324338, 324339, 324340, 324341, 324342, 324343, 324344, 324345, 324346, 324347, 324348, 324349, 324350, 324351, 324352, 324353, 324354, 324355) c6( ) c7(qN, if, xg, fb, bN); #c1(MAPK81P3) c2(NP_001035529) c3(C-Jun-amino-terminal kinase-interacting protein 3 isoform 2) c4(32860) c5(32861, 32862, 32863, 32864, 32865, 32866) c6( ) c7(dB, lG, T, kl, bK); #c1(MAPK81P3) c2(NP_055948) c3(C-Jun-amine-terminal kinase-interacting protein 3 isoform 1) c4(184609) c5(184610, 184611, 184612, 184613, 184614, 184615) c6( ) c7(dB, lG, T, kl, bK); #c1(MAPK9) c2(NP_001128516) c3(mitogen-activated protein kinase 9 isoform JNK2 gamma) c4(50145) c5(50146, 50147, 50148, 50149, 50150, 50151, 50152) c6( ) c7(T, fd, bB, v, ci, cd, aR, ad, eA, ft, Bc, JT, aT, lG, cy, jy, h, K, ae, d, B, iU, aW, ff, en, as, cm, bz, ck, c, iT, bE, hk, U, m, y, X); #c1(MAPK9) c2(NP_002743) c3(mitogen-activated protein kinase 9 isoform alpha2) c4(131592) c5(131593, 131594, 131595, 131596, 131597, 131598) c6( ) c7(T, fd, bB, v, ci, cd, aR, ad, eA, ft, Bc, JT, aT, lG, cy, jy, h, K, ae, d, B, iU, aW, ff, en, as, cm, bz, ck, c, iT, bE, hk, U, m, y, X); #c1(MAPK9) c2(NP_620707) c3(mitogen-activated protein kinase 9 isoform alpha1) c4(238066) c5(238067, 238068, 238069, 238070, 238071, 238072, 238073) c6( ) c7(T, fd, bB, v, ci, cd, aR, ad, eA, ft, Bc, JT, aT, lG, cy, jy, h, K, ae, d, B, iU, aW, ff, en, as, cm, bz, ck, c, iT, bE, hk, U, m, y, X); #c1(MAPK9) c2(NP_620708) c3(mitogen-activated protein kinase 9 isoform beta1) c4(238074, 238075) c5(238076, 238077, 238078, 238079, 238080, 238081) c6( ) c7(T, fd, bB, v, ci, cd, aR, ad, eA, ft, Bc, JT, aT, lG, cy, jy, h, K, ae, d, B, iU, aW, ff, en, as, cm, bz, ck, c, iT, bE, hk, U, m, y, X); #c1(MAPK9) c2(NP_620709) c3(mitogen-activated protein kinase 9 isoform beta2) c4(238082, 238083) c5(238084, 238085, 238086, 238087, 238088, 238089) c6( ) c7(T, fd, bB, v, ci, cd, aR, ad, eA, ft, Bc, JT, aT, lG, cy, jy, h, K, ae, d, B, iU, aW, ff, en, as, cm, bz, ck, c, iT, bE, hk, U, m, y, X); #c1(MAPKAP1) c2(NP_001006618) c3(target of rapamycin complex 2 subunit MAPKAP1 isoform 1) c4(22217, 22218) c5(22219, 22220, 22221, 22222, 22223, 22224, 22225, 22226, 22227, 22228, 22229, 22230) c6( ) c7(ck, Na, T, zw, ac, awN, Qu, fd, h, lo, Nc, fr, K, eA, kC, B, alK); #c1(MAPKAP1) c2(NP_001006619) c3(target of rapamycin complex 2 subunit MAPKAP1 isoform 5) c4(22231) c5(22232, 22233, 22234, 22235, 22236, 22237, 22238, 22239, 22240, 22241, 22242, 22243, 22244, 22245, 22246, 22247, 22248, 22249) c6( ) c7(ck, Na, T, zw, ac, awN, Qu, fd, h, lo, Nc, fr, K, eA, kC, B, alK); #c1(MAPKAP1) c2(NP_001006620) c3(target of rapamycin complex 2 subunit MAPKAP1 isoform 3) c4(22250) c5(22251, 22252, 22253, 22254, 22255, 22256) c6( ) c7(ck, Na, T, zw, ac, awN, Qu, fd, h, lo, Nc, fr, K, eA, kC, B, alK); #c1(MAPKAP1) c2(NP_077022) c3(target of rapamycin complex 2 subunit MAPKAP1 isoform 2) c4(214775, 214776) c5(214777, 214778, 214779, 214780, 214781, 214782, 214783, 214784, 214785, 214786, 214787, 214788) c6( ) c7(ck, Na, T, zw, ac, awN, Qu, fd, h, lo, Nc, fr, K, eA, kC, B, alK); #c1(MAPKAP1) c2(XP_011517307) c3(target of rapamycin complex 2 subunit MAPKAP1 isoform X2) c4(310973) c5(310974) c6( ) c7(ck, Na, T, zw, ac, awN, Qu, fd, h, lo, Nc, fr, K, eA, kC, B, alK); #c1(MAPKAP1) c2(XP_011517308) c3(target of rapamycin complex 2 subunit MAPKAP1 isoform X3) c4(310975, 310976) c5( ) c6( ) c7(ck, Na, T, zw, ac, awN, Qu, fd, h, lo, Nc, fr, K, eA, kC, B, alK); #c1(MAPKAP1) c2(XP_011517311) c3(target of rapamycin complex 2 subunit MAPKAP1 isoform X6) c4( ) c5(310977, 310978, 310979, 310980, 310981) c6( ) c7(ck, Na, T, zw, ac, awN, Qu, fd, h, lo, Nc, fr, K, eA, kC, B, alK); #c1(MAPKAP1) c2(XP_011517312) c3(target of rapamycin complex 2 subunit MAPKAP1 isoform X1) c4(310982) c5(310983, 310984, 310985, 310986, 310987, 310988, 310989, 310990, 310991, 310992, 310993, 310994, 310995, 310996) c6( ) c7(ck, Na, T, zw, ac, awN, Qu, fd, h, lo, Nc, fr, K, eA, kC, B, alK); #c1(MAPKAPK2) c2(NP_004750) c3(MAP kinase-activated protein kinase 2 isoform 1) c4(149255) c5(149256, 149257, 149258, 149259, 149260, 148261, 149262) c6( ) c7(ae, T, fb, aE, eM, eL, cr, aT, fd, tv, dL, tu, K, kp, y, bz, af, ad); #c1(MAPKAPK2) c2(NP_116584) c3(MAP kinase-activated protein kinase 2 isoform 2) c4(226294) c5(226295, 226296, 226297, 226298, 226299, 226300) c6( ) c7(ae, T, fb, aE, eM, eL, cr, aT, fd, tv, dL, tu, K, kp, y, bz, af, ad); #c1(MAPKAPK3) c2(NP_001230855) c3(MAP kinase-activated protein kinase 3) c4(86841, 86842, 86843, 86844) c5(86845, 86846, 86847, 86848, 86849, 86850, 86851, 86852, 86853, 86854, 86855, 86856, 86857, 86858, 86859, 86860, 86861, 86862, 86863, 86864, 86865, 86866) c6( ) c7(F, K, vi); #c1(MAPKBP1) c2(NP_001122080) c3(mitogen-activated protein kinase-binding protein 1 isoform b) c4(46395) c5(46396, 46397, 46398, 46399, 46400, 46401) c6( ) c7(bX); #c1(MAPKBP1) c2(NP_001252540) c3(mitogen-activated protein kinase-binding protein 1 isoform c) c4(94219) c5(94220, 94221, 94222, 94223, 94224, 94225) c6( ) c7(bX); #c1(MAPKBP1) c2(NP_055809) c3(mitogen-activated protein kinase-binding protein 1 isoform a) c4(183642) c5(183643, 183644, 183645, 183646, 183647, 183648, 183649, 183650, 183651, 183652, 183653, 183654) c6( ) c7(bX); #c1(MAPKBP1) c2(XP_006720501) c3(mitogen-activated protein kinase-binding protein 1 isoform X3) c4(293534, 293535) c5(293536, 293537, 293538, 293539, 293540, 293541) c6( ) c7(bX); #c1(MAPKBP1) c2(XP_011519685) c3(mitogen-activated protein kinase-binding protein 1 isoform X2) c4(314360) c5( ) c6( ) c7(bX); #c1(MAPKBP1) c2(XP_011519686) c3(mitogen-activated protein kinase-binding protein 1 isoform X4) c4( ) c5(314361, 314362) c6( ) c7(bX); #c1(MAPKBP1) c2(XP_011519687) c3(mitogen-activated protein kinase-binding protein 1 isoform X5) c4( ) c5(314363, 314364, 314365, 314366, 314367, 314368) c6( ) c7(bX); #c1(MAPRE1) c2(NP_036457) c3(microtubule-associated protein RP/EB family member 1) c4(174026) c5(174027, 174028, 174029, 174030, 174031, 174032) c6( ) c7(bF, ou, T, eM, aW, r, aT, n, j, bz, B); #c1(MAPRE2) c2(NP_001137298) c3(microtubule-associated protein RP/EB family member 2 isoform 2) c4(55367) c5(55368, 55369, 55370, 55371, 55372) c6( ) c7(ck, bF, au, T, xX, lR, aE, eM, ff, an, r, n, nw, q, en, nk, Kw, nC, B, bA); #c1(MAPRE2) c2(NP_001137299) c3(microtubule-associated protein RP/EB family member 2 isoform 3) c4(55373) c5(55374, 55375, 55376, 55377, 55378, 55379) c6( ) c7(ck, bF, ou, T, xX, lR, aE, eM, ff, an, r, n, nw, q, en, nk, Kw, nC, B, bA); #c1(MAPRE2) c2(NP_001243349) c3(microtubule-associated protein RP/EB family member 2 isoform 4) c4(90464) c5(90465, 90466, 90467, 90468, 90469, 90470) c6( ) c7(ck, bF, ou, T, xX, lR, aE, eM, ff, an, r, n, nw, q, en, nk, Kw, nC, B, bA); #c1(MAPRE2) c2(NP_055083) c3(microtubule-associated protein RP/EB family member 2 isoform 1) c4(178860) c5(178861, 178862, 178863, 178864, 178865, 178866) c6( ) c7(ck, bF, ou, T, xX, lR, aE, eM, ff, an, r, n, nw, q, en, nk, Kw, nC, B, bA); #c1(MAPRE2) c2(XP_006722438) c3(microtubule-associated protein RP/EB family member 2 isoform X2) c4( ) c5(294711) c6( ) c7(ck, bF, ou, T, xX, lR, aE, eM, ff, an, r, n, nw, q, en, nk, Kw, nC, B, bA); #c1(MAPRE3) c2(NP_001289979) c3(microtubule-associated protein RP/EB family member 3) c4(114905, 114906) c5(114907, 114908, 114909, 114910, 114811, 114912, 114913, 114914, 114915, 114916, 114917, 114918) c6( ) c7(jf, afR, T, kl, dB, yg, aA, Be, aE, HU, ayj, nC); #c1(MAPRE3) c2(XP_011531002) c3(microtubule-associated protein RP/EB family member 3 isoform X1) c4(326954) c5(326955, 326956, 326957, 326958, 326959, 326960, 326961, 326962, 326963, 326964) c6( ) c7(jf, afR, T, kl, dB, yg, aA, Be, aE, HU, ayj, nC); #c1(MAPT) c2(NP_001116538) c3(microtubule-associated protein tau isoform 6) c4(43908, 43909) c5(43910, 43911, 43912, 43913, 43914, 43915, 43916, 43917, 43918, 43919, 43920, 43921, 43922, 43923, 43924, 43925) c6( ) c7(T, fR, bUk, e, Vd, aPl, aR, x, Gt, Fo, aU, K, H, li, aW, dg, cm, bb, jV, cbT, U, k, R, m, act, bmE, cZ, dt, dD, Dl, aw, nA, PJ, Ma, Hx, no, bl, cbU, dd, acM, aWO, dB, cbS, abd, ek, L, cbW, aA, buK, GC, cbV, V, Kx, di, hb, WY, nX, aT, aaw, bK, an, cbX, af, eu, ak, aaE, aaO, t, xw, f, wA, dS, ck, axS, c, xB, AC, aen, ha, vr, eq, fu, xt, ot, cbH, sO, Dq, abg, abP, oj, Sb, cx, nJ, lx, gl, bOW, aF, Z, dr, GB, dR, bF, aqM, dJ, aaG, cbR, Kj, Gp, xg); #c1(MAPT) c2(NP_001116539) c3(microtubule-associated protein tau isoform 5) c4(43926) c5(43927, 43928, 43929, 43930, 43931, 43932, 43933, 43934, 43935, 43936, 43937, 43938, 43939, 43940) c6( ) c7(T, fR, bUk, e, Vd, aPl, aR, x, Gt, Fo, aU, K, H, li, aW, dg, cm, bb, jV, cbT, U, k, R, m, act, bmE, cZ, dt, dD, Ol, aw, nA, PJ, Mo, Hx, no, bl, cbU, dd, acM, aWO, dB, cbS, abd, ek, L, cbW, aA, buK, GC, cbV, V, Kx, di, hb, WY, nX, aT, aaw, bK, an, cbX, af, eu, ak, aaE, aaO, t, xw, f, wA, dS, ck, axS, c, xB, AC, aen, ha, vr, eq, fu, xt, ot, cbH, sO, Dq, abg, abP, oj, Sb, cx, nJ, lx, gl, bOW, aF, Z, dr, GB, dR, bF, aqM, dJ, aaG, cbR, Kj, Gp, xg); #c1(MAPT) c2(NP_001190180) c3(microtubule-associated protein tau isoform 7) c4(80312, 80313) c5(80314, 80315, 80316, 80317, 80318, 80319, 80320) c6( ) c7(T, fR, bUk, e, Vd, aPl, aR, x, Gt, Fo, aU, K, H, li, aW, dg, cm, bb, jV, cbT, U, k, R, m, act, bmE, cZ, dt, dD, Ol, aw, nA, PJ, Mo, Hx, no, bl, cbU, dd, acM, aWO, dB, cbS, abd, ek, L, cbW, aA, buK, GC, cbV, V, Kx, di, hb, WY, nX, aT, aaw, bK, an, cbX, af, eu, ak, aaE, aaO, t, xw, f, wA, dS, ck, axS, c, xB, AC, aen, ha, vr, eq, fu, xt, ot, cbH, sO, Dq, abg, abP, oj, Sb, cx, nJ, lx, gl, bOW, aF, Z, dr, GB, dR, bF, aqM, dJ, aaG, cbR, Kj, Gp, xg); #c1(MAPT) c2(NP_001190181) c3(microtubule-associated protein tau isoform 8) c4(80321, 80322) c5(80323, 80324, 80325, 80326, 80327, 80328, 80329, 80330, 80331, 80332) c6( ) c7(T, fR, bUk, e, Vd, aPl, aR, x, Gt, Fo, aU, K, H, li, aW, dg, cm, bb, jV, cbT, U, k, R, m, act, bmE, cZ, dt, dD, Ol, aw, nA, PJ, Mo, Hx, no, bl, cbU, dd, acM, aWO, dB, cbS, abd, ek, L, cbW, aA, buK, GC, cbV, V, Kx, di, hb, WY, nX, aT, aaw, bK, an, cbX, af, eu, ak, aaE, aaO, t, xw, f, wA, dS, ck, axS, c, xB, AC, aen, ha, vr, eq, fu, xt, et, cbH, sO, Dq, abg, abP, oj, Sb, cx, nJ, lx, gl, bOW, aF, Z, dr, GB, dR, bF, aqM, dJ, aaG, cbR, Kj, Gp, xg); #c1(MAPT) c2(NP_005901) c3(microtubule-associated protein tau isoform 2) c4(160224) c5(160225, 160226, 160227, 160228, 160229, 160230, 160231, 160232, 160233, 160234) c6( ) c7(T, fR, bUk, e, Vd, aPl, aR, x, Gt, Fo, aU, K, H, li, aW, dg, cm, bb, jV, cbT, U, k, R, m, act, bmE, cZ, dt, dD, Ol, aw, nA, PJ, Mo, Hx, no, bl, cbU, dd, acM, aWO, dB, cbS, abd, ek, L, cbW, aA, buK, GC, cbV, V, Kx, di, hb, WY, nX, aT, aaw, bK, an, cbX, af, eu, ak, aaE, aaO, t, xw, f, wA, dS, ck, axS, c, xB, AC, aen, ha, vr, eq, fu, xt, ot, cbH, sO, Dq, abq, abP, oj, Sb, cx, nJ, lx, gl, bOW, aF, Z, dr, GB, dR, bF, aqM, dJ, aaG, cbR, Kj, Gp, xg); #c1(MAPT) c2(NP_058518) c3(microtubule-associated protein tau isoform 3) c4(192750) c5(192751, 192752, 192753, 192754, 192755, 192756, 192757, 192758, 192759, 192760, 192761, 192762, 192763, 192764) c6( ) c7(T, fR, bUk, e, Vd, aPl, aR, x, Gt, Fo, aU, K, H, li, aW, dg, cm, bb, jV, cbT, U, k, R, m, act, bmE, cZ, dt, dD, Ol, aw, nA, PJ, Mo, Hx, no, bl, cbU, dd, acM, aWO, dB, cbS, abd, ek, L, cbW, aA, buK, GC, cbV, V, Kx, di, hb, WY, nX, aT, aaw, bK, an, cbX, af, eu, ak, aaE, aaO, t, xw, f, wA, dS, ck, axS, c, xB, AC, aen, ha, vr, eq, fu, xt, et, cbH, sO, Dq, abg, abP, oj, Sb, cx, nJ, lx, gl, bOW, aF, Z, dr, GB, dR, bF, aqM, dJ, aaG, cbR, Kj, Gp, xg); #c1(MAPT) c2(NP_058519) c3(microtubule-associated protein tau isoform 1) c4(192765, 192766) c5(192767, 192768, 192769, 192770, 192771, 192772, 192773, 192774, 192775, 192776, 192777, 192778) c6( ) c7(T, fR, bUk, e, Vd, aPl, aR, x, Gt, Fo, aU, K, H, li, aW, dg, cm, bb, jV, cbT, U, k, R, m, act, bmE, cZ, dt, dD, Ol, aw, nA, PJ, Mo, Hx, no, bl, cbU, dd, acM, aWO, dB, cbS, abd, ek, L, cbW, aA, buK, GC, cbV, V, Kx, di, hb, WY, nX, aT, aaw, bK, an, cbX, af, eu, ak, aaE, aaO, t, xw, f, wA, dS, ck, axS, c, xB, AC, aen, ha, vr, eq, fu, xt, ot, cbH, sO, Dq, abg, abP, oj, Sb, cx, nJ, lx, gl, bOW, aF, Z, dr, GB, dR, bF, aqM, dJ, aaG, cbR, Kj, Gp, xg); #c1(MAPT) c2(NP_058525) c3(microtubule-associated protein tau isoform 4) c4(192786) c5(192787, 192788, 192789, 192790, 192791, 192792, 192793, 192794, 192795, 192796, 192797, 192798, 192799, 192800, 192801, 192802, 192803, 192804, 192805, 192806, 192807, 192808, 192809, 192810, 192811, 192812, 192813, 192814, 192815, 192816, 192817) c6( ) c7(T, fR, bUk, e, Vd, aPl, aR, x, Gt, Fo, aU, K, H, li, aW, dg, cm, bb, jV, cbT, U, k, R, m, act, bmE, cZ, dt, dD, Ol, aw, nA, PJ, Mo, Hx, no, bl, cbU, dd, acM, aWO, dB, cbS, abd, ek, L, cbW, aA, buK, GC, cbV, V, Kx, di, hb, WY, nX, aT, aaw, bK, an, cbX, af, eu, ak, aaE, aaO, t, xw, f, wA, dS, ck, axS, c, xB, AC, aen, ha, vr, eq, fu, xt, ot, cbH, sO, Dq, abg, abP, oj, Sb, cx, nJ, lx, gl, bOW, aF, Z, dr, GB, dR, bF, aqM, dJ, aaG, cbR, Kj, Gp, xg); #c1(MAPT) c2(XP_005257422) c3(microtubule-associated protein tau isoform X5) c4(2751D5) c5( ) c6( ) c7(T, fR, bUk, e, Vd, aPl, aR, x, Gt, Fo, aU, K, H, li, aW, dg, cm, bb, jV, cbT, U, k, R, m, act, bmE, cZ, dt, dD, Ol, aw, nA, PJ, Mo, Hx, no, bl, cbU, dd, acM, aWO, dB, cbS, abd, ek, L, cbW, aA, buK, GC, cbV, V, Kx, di, hb, WY, nX, aT, aaw, bK, an, cbX, af, eu, ak, aaE, aaO, t, xw, f, wA, dS, ck, axS, c, xB, AC, aen, ha, vr, eq, fu, xt, et, cbH, sO, Dq, abg, abP, oj, Sb, cx, nJ, lx, gl, bOW, aF, Z, dr, GB, dR, bF, aqM, dJ, aaG, cbR, Kj, Gp, xg); #c1(MARC1) c2(NP_073583) c3(mitochondrial amidoxime-reducing component 1 precursor) c4(212973) c5(212974, 212975, 212976, 212977, 212978, 212979) c6( ) c7(qb, cd, xa); #c1(MARC2) c2(XP_011507986) c3(mitochondrial amidoxime reducing component 2 isoform X3) c4( ) c5(298423, 298424, 298425, 298426, 298427, 298428) c6( ) c7(ant, xa, abV, la); #c1(MARCH1) c2(NP_001159845) c3(E3 ubiquitin-protein ligase MARCH1 isoform 1) c4(64830, 64831) c5(64832, 64833, 64834, 64835, 64836, 64837, 64838, 64839, 64840, 64841, 64842, 64843, 64844, 64845, 64846, 64847) c6( ) c7(bL, ac, avm, aw, fe, m, t); #c1(MARCH1) c2(NP_060393) c3(E3 ubiquitin-protein ligase MARCH1 isoform 2) c4(195798) c5(195799, 195800, 195801, 195802, 195803, 195804) c6( ) c7(bL, ac, avm, aw, fe, m, t); #c1(MARCH2) c2(NP_001005415) c3(E3 ubiquitin-protein ligase MARCH2 isoform 1) c4(21667) c5(21668, 21669, 21670, 21671, 21672, 21673, 21674, 21675, 21676, 21677) c6( ) c7(T); #c1(MARCH2) c2(NP_001005416) c3(E3 ubiquitin-protein ligase MARCH2 isoform 2) c4(21678) c5(21679, 21680, 21681, 21682, 21683, 21684) c6( ) c7(T); #c1(MARCH5) c2(NP_060294) c3(E3 ubiquitin-protein ligase MARCH5) c4(195238) c5(195239, 195240, 195241, 195242, 195243, 195244) c6( ) c7(T, fq, bK); #c1(MARCH6) c2(NP_005876) c3(E3 ubiquitin-protein ligase MARCH6 isoform 1) c4(160067) c5(160068, 160069, 160070, 160071, 160072, 160073) c6( ) c7(aF, fq, ei, aA); #c1(MARCH7) c2(NP_001269735) c3(E3 ubiquitin-protein ligase MARCH7 isoform b) c4(102734) c5(102735, 102736, 102737, 102738, 102739, 102740, 102741, 102742, 102743, 102744, 102745, 102746) c6( ) c7(ck, ey); #c1(MARCH7) c2(NP_073737) c3(E3 ubiquitin-protein ligase MARCH7 isoform a) c4(213331, 213332) c5(213333, 213334, 213335, 213336, 213337, 213338, 213339, 213340, 213341, 213342) c6( ) c7(ck, ey); #c1(MARCH8) c2(NP_001002266) c3(E3 ubiquitin-protein ligase MARCH8 isoform a) c4(19512, 19513) c5(19514, 19515, 19516, 19517, 19518, 19519, 19520, 19521, 19522, 19523, 19524, 19525, 19526, 19527, 19528, 19529, 19530, 19531, 19532, 19533, 19534, 19535, 19536) c6( ) c7(bL, x, T, aE, bE, ql, ht, hL, cj, bB, fr, k, cl, iK, B); #c1(MARCH8) c2(NP_001269795) c3(E3 ubiquitin-protein ligase MARCH8 isoform b) c4(102858) c5(102859, 102860, 102861, 102862, 102863, 102864) c6( ) c7(bL, x, T, aE, bE, ql, ht, hL, cj, bB, fr, k, cl, iK, B); #c1(MARCKS) c2(NP_002347) c3(myristoylated alanine-rich C-kinase substrate) c4(127697, 127698) c5(127699, 127700, 127701, 127702, 127703, 127704) c6( ) c7(bM, T, al, bS, et, ci, q, eA, jz, qK, aT, h, ey, K, nJ, d, aW, Y, r, nY, aq, g, Z, cm, iR, bz, bw, lU, gk, bE, ei, hE, B, ao, vi); #c1(MARC0) c2(NP_006761) c3(macrophage receptor MARC0) c4(167812, 167813) c5(167814, 167815, 167816, 167817, 167818, 167819, 167820) c6( ) c7(oO, ac, ig, ld, cr, azm, eE, y); #c1(MARC0) c2(XP_011510385) c3(macrophage receptor MARC0 isoform X2) c4( ) c5(300913, 300914, 300915, 300916, 300917, 300918) c6( ) c7(oO, ac, ig, ld, cr, azm, eE, y); #c1(MARK1) c2(NP_001273055) c3(serine/threonine-protein kinase MARK1 isoform 3) c4(104267) c5(104268, 104269, 104270, 104271, 104272, 104273) c6( ) c7(T, nM, aA, azm, MC, fq, bN); #c1(MARK1) c2(NP_001273057) c3(serine/threonine-protein kinase MARK1 isoform 4) c4(104274) c5(104275, 104276, 104277, 104278, 104279, 104280) c6( ) c7(T, nM, aA, azm, MC, fq, bN); #c1(MARK1) c2(NP_061120) c3(serine/threonine-protein kinase MARK1 isoform 2) c4(199225) c5(199226, 199227, 199228, 199229, 199230, 199231) c6( ) c7(T, nM, aA, azm, MC, fq, bN); #c1(MARK2) c2(NP_001034558) c3(serine/threonine-protein kinase MARK2 isoform d) c4(31767, 31768) c5(31769, 31770, 31771, 31772, 31773, 31774, 31775, 31776, 31777, 31778, 31779, 31780, 31781, 31782, 31783, 31784, 31785, 31786, 31787, 31788, 31789, 31790, 31791, 31792, 31793, 31794, 31795, 31796, 31797) c6( ) c7(bM, T, aC, yS, if, fd, bB, ci, bv, aE, K, cp, aa, aW, bWB, g, Qt, eM, iT, m, vl, fr, nA, ai, Hx, jz, kH, h, OV, tl, at, fL, B, bL, fG, jx, aA, j, q, anj, hb, qK, bUn, aT, cy, an, ae, af, Y, r, lo, en, t, f, iK, ck, Qi, kP, fD, bt, ao, Kd, nZ, ha, jh, wV, hF, mC, ad, F, nd, d, ff, eZ, aF, bz, dr, qa, dR, LB, eK, bE, uR, ei, MC, y, X); #c1(MARK2) c2(NP_001156768) c3(serine/threonine-protein kinase MARK2 isoform e) c4(61931) c5(61932, 61933, 61934, 61935, 61936, 61937) c6( ) c7(bM, T, aC, yS, if, fd, bB, ci, bv, aE, K, cp, aa, aW, bWB, g, Qt, eM, iT, m, vl, fr, nA, ai, Hx, jz, kH, h, DV, tl, at, fL, B, bL, fG, jx, aA, j, q, anj, hb, qK, bUn, aT, cy, an, ae, af, Y, r, lo, en, t, f, iK, ck, Qi, kP, fD, bt, ao, Kd, nZ, ha, jh, wV, hF, mC, ad, F, nd, d, ff, eZ, aF, bz, dr, qa, dR, LB, eK, bE, uR, ei, MC, y, X); #c1(MARK2) c2(NP_001156769) c3(serine/threonine-protein kinase MARK2 isoform f) c4(61938, 61939) c5(61940, 61941, 61942, 61943, 61944, 61945, 61946, 61947, 61948, 61949, 61950, 61951, 61952, 61953, 61954, 61955, 61956, 61957, 61958, 61959, 61960, 61961, 61962, 61963, 61964, 61965, 61966, 61967, 61968) c6( ) c7(bM, T, aC, yS, if, fd, bB, ci, bv, aE, K, cp, aa, aW, bWB, g, Qt, eM, iT, m, vl, fr, nA, ai, Hx, jz, kH, h, OV, tl, at, fL, B, bL, fG, jx, aA, j, q, anj, hb, qK, bUn, aT, cy, an, ae, af, Y, r, lo, en, t, f, iK, ck, Qi, kP, fD, bt, ao, Kd, nZ, ha, jh, wV, hF, mC, ad, F, nd, d, ff, eZ, aF, bz, dr, qa, dR, LB, eK, bE, uR, ei, MC, y, X); #c1(MARK2) c2(NP_004945) c3(serine/threonine-protein kinase MARK2 isoform c) c4(151382, 151383, 151384) c5(151385, 151386, 151387, 151388, 151389, 151390, 151391, 151392, 151393, 151394, 151395, 151396, 151397) c6( ) c7(bM, T, aC, yS, if, fd, bB, ci, bv, aE, K, cp, aa, aW, bWB, g, Qt, eM, iT, m, vl, fr, nA, ai, Hx, jz, kH, h, OV, tl, at, fL, B, bL, fG, jx, aA, j, q, anj, hb, qK, bUn, aT, cy, an, ae, af, Y, r, lo, en, t, f, iK, ck, Qi, kP, fD, bt, ao, Kd, nZ, ha, jh, wV, hF, mC, ad, F, ad, d, ff, eZ, aF, bz, dr, qa, dR, LB, eK, bE, uR, ei, MC, y, X); #c1(MARK2) c2(XP_011543091) c3(serine/threonine-protein kinase MARK2 isoform X1) c4( ) c5(341927) c6( ) c7(bM, T, aC, yS, if, fd, bB, ci, bv, aE, K, cp, aa, aW, bWB, g, Qt, eM, iT, m, vl, fr, nA, ai, Hx, jz, kH, h, OV, tl, at, fL, B, bL, fG, jx, aA, j, q, anj, hb, qK, bUn, aT, cy, an, ae, af, Y, r, lo, en, t, f, iK, ck, Qi, kP, fD, bt, ao, Kd, nZ, ha, jh, wV, hF, mC, ad, F, nd, d, ff, eZ, aF, bz, dr, qa, dR, LB, eK, bE, uR, ei, MC, y, X); #c1(MARK2) c2(XP_011543092) c3(serine/threonine-protein kinase MARK2 isoform X2) c4(341928) c5( ) c6( ) c7(bM, T, aC, yS, if, fd, bB, ci, bv, aE, K, cp, aa, aW, bWB, g, Qt, eM, iT, m, vl, fr, nA, ai, Hx, jz, kH, h, OV, tl, at, fL, B, bL, fG, jx, aA, j, g, anj, hb, qK, bUn, aT, cy, an, ae, af, Y, r, lo, en, t, f, iK, ck, Qi, kP, fD, bt, ao, Kd, nZ, ha, jh, wV, hF, mC, ad, F, nd, d, ff, eZ, aF, bz, dr, qa, dR, LB, eK, bE, uR, ei, MC, y, X); #c1(MARK2) c2(XP_011543093) c3(serine/threonine-protein kinase MARK2 isoform X3) c4(341929) c5(341930, 341931, 341932, 341933, 341934, 341935) c6( ) c7(bM, T, aC, yS, if, fd, bB, ci, bv, aE, K, cp, aa, aW, bWB, g, Qt, eM, iT, m, vl, fr, nA, ai, Hx, jz, kH, h, OV, tl, at, fL, B, bL, fG, jx, aA, j, g, anj, hb, qK, bUn, aT, cy, an, ae, af, Y, r, lo, en, t, f, iK, ck, Qi, kP, fD, bt, ao, Kd, nZ, ha, jh, wV, hF, mC, ad, F, nd, d, ff, eZ, aF, bz, dr, qa, dR, LB, eK, bE, uR, ei, MC, y, X); #c1(MARK2) c2(XP_011543094) c3(serine/threonine-protein kinase MARK2 isoform X4) c4(341936) c5( ) c6( ) c7(bM, T, aC, yS, if, fd, bB, ci, bv, aE, K, cp, aa, aW, bWB, g, Qt, eM, iT, m, vl, fr, nA, ai, Hx, jz, kH, h, OV, tl, at, fL, B, bL, fG, jx, aA, j, q, anj, hb, qK, bUn, aT, cy, an, ae, af, Y, r, lo, en, t, f, iK, ck, Qi, kP, fD, bt, ao, Kd, nZ, ha, jh, wV, hF, mC, ad, F, nd, d, ff, eZ, aF, bz, dr, qa, dR, LB, eK, bE, uR, ei, MC, y, X); #c1(MARK2) c2(XP_011543095) c3(serine/threonine-protein kinase MARK2 isoform X5) c4(341937) c5( ) c6( ) c7(bM, T, aC, yS, if, fd, bB, ci, bv, aE, K, cp, aa, aW, bWB, g, Qt, eM, iT, m, vl, fr, nA, ai, Hx, jz, kH, h, OV, tl, at, fL, B, bL, fG, jx, aA, j, q, anj, hb, qK, bUn, aT, cy, an, ae, af, Y, r, lo, en, t, f, iK, ck, Qi, kP, fD, bt, ao, Kd, nZ, ha, jh, wV, hF, mC, ad, F, nd, d, ff, eZ, aF, bz, dr, qa, dR, LB, eK, bE, uR, ei, MC, y, X); #c1(MARK2) c2(XP_011543098) c3(serine/threonine-protein kinase MARK2 isoform X8) c4(341938) c5(341939, 341940, 341941, 341942, 341943, 341944, 341945, 341946, 341947) c6( ) c7(bM, T, aC, yS, if, fd, bB, ci, bv, aE, K, cp, aa, aW, bWB, g, Qt, eM, iT, m, vl, fr, nA, ai, Hx, jz, kH, h, OV, tl, at, fL, B, bL, fG, jx, aA, j, q, anj, hb, qK, bUn, aT, cy, an, ae, af, Y, r, lo, en, t, f, iK, ck, Qi, kP, fD, bt, ao, Kd, nZ, ha, jh, wV, hF, mC, ad, F, nd, d, ff, eZ, aF, bz, dr, qa, dR, LB, eK, bE, uR, ei, MC, y, X); #c1(MARK2) c2(XP_011543099) c3(serine/threonine-protein kinase MARK2 isoform X9) c4(341948, 341949) c5( ) c6( ) c7(bM, T, aC, yS, if, fd, bB, ci, bv, aE, K, cp, aa, aW, bWB, g, Qt, eM, iT, m, vl, fr, nA, ai, Hx, jz, kH, h, OV, tl, at, fL, B, bL, fG, jx, aA, j, q, anj, hb, qK, bUn, aT, cy, an, ae, af, Y, r, lo, en, t, f, iK, ck, Qi, kP, fD, bt, ao, Kd, nZ, ha, jh, wV, hF, mC, ad, F, nd, d, ff, eZ, aF, bz, dr, qa, dR, LB, eK, bE, uR, ei, MG, y, X); #c1(MARK2) c2(XP_011543100) c3(serine/threonine-protein kinase MARK2 isoform X10) c4( ) c5(341950, 341951, 341952, 341953, 341954, 341955) c6( ) c7(bM, T, aC, yS, if, fd, bB, ci, bv, aE, K, cp, aa, aW, bWB, g, Qt, eM, iT, m, vl, fr, nA, ai, Hx, jz, kH, h, OV, tl, at, fL, B, bL, fG, jx, aA, j, q, anj, hb, qK, bUn, aT, cy, an, ae, af, Y, r, lo, en, t, f, iK, ck, Qi, kP, fD, bt, ao, Kd, nZ, ha, jh, wV, hF, mC, ad, F, nd, d, ff, eZ, aF, bz, dr, qa, dR, LB, eK, bE, uR, ei, MG, y, X); #c1(MARK3) c2(NP_001122390) c3(MAP/microtubule affinity-regulating kinase 3 isoform a) c4(46608) c5(46609, 46610, 46611, 46612, 46613, 46614) c6( ) c7(kD, D, v, bA); #c1(MARK3) c2(NP_001122391) c3(MAP/microtubule affinity-regulating kinase 3 isoform b) c4(46615, 46616) c5(46617, 46618, 46619, 46620, 46621, 46622, 46623, 46624, 46625, 46626, 46627, 46628) c6( ) c7(kD, D, v, bA); #c1(MARK3) c2(NP_001122392) c3(MAP/microtubule affinity-regulating kinase 3 isoform d) c4(46629) c5(46630, 46631, 46632, 46633, 46634, 46635) c6( ) c7(kD, D, v, bA); #c1(MARK3) c2(NP_001122393) c3(MAP/microtubule affinity-regulating kinase 3 isoform e) c4(46636) c5(46637, 46638, 46639, 46640, 46641, 46642) c6( ) c7(kD, D, v, bA); #c1(MARK3) c2(NP_002367) c3(MAP/microtubule affinity-regulating kinase 3 isoform c) c4(127803, 127804) c5(127805, 127806, 127807, 127808, 127809, 127810, 127811, 127812, 127813, 127814, 127815, 127816) c6( ) c7(kD, D, v, bA); #c1(MARK3) c2(XP_005267699) c3(MAP/microtubule affinity-regulating kinase 3 isoform X3) c4(281222) c5(281223, 281224, 281225, 281226, 281227, 281228) c6( ) c7(kD, D, v, bA); #c1(MARK4) c2(NP_001186796) c3(MAP/microtubule affinity-regulating kinase 4 isoform 1) c4(78612) c5(78613, 78614, 78615, 78616, 78617, 78618) c6( ) c7(d, eA, af, MC); #c1(MARK4) c2(NP_113605) c3(MAP/microtubule affinity-regulating kinase 4 isoform 2) c4(221674, 221675) c5(221676, 221677, 221678, 221679, 221680, 221681, 221682, 221683, 221684, 221685, 221686, 221687, 221688) c6( ) c7(d, eA, af, MC); #c1(MARK4) c2(XP_006723370) c3(MAP/microtubule affinity-regulating kinase 4 isoform X1) c4(295179) c5(295180, 295181, 295182, 295183, 295184, 295185) c6( ) c7(d, eA, af, MC); #c1(MARS) c2(NP_004981) c3(methionine-tRNA ligase, cytoplasmic) c4(151577, 151578, 151579) c5(151580, 151581, 151582, 151583, 151584, 151585, 151586, 151587, 151588, 151589, 151590, 151591) c6( ) c7(cbY, aS, ad); #c1(MARS) c2(XP_011536655) c3(methionine-tRNA ligase, cytoplasmic isoform X2) c4( ) c5(334150, 334151, 334152, 334153, 334154, 334155) c6( ) c7(cbY, aS, ad); #c1(MARS2) c2(NP_612404) c3(methionine-tRNA ligase, mitochondrial precursor) c4(236399, 236400) c5(236401, 236402, 236403, 236404, 236405, 236406, 236407, 236408, 236409, 236410, 236411, 236412, 236413) c6( ) c7(cbZ); #c1(MARVELD1) c2(NP_113672) c3(MARVEL domain-containing protein 1) c4(222049) c5(222050, 222051, 222052, 222053, 222054, 222055) c6( ) c7(aW, KO, B, aT); #c1(MARVELD2) c2(NP_001231663) c3(MARVEL domain-containing protein 2 isoform 2) c4(87415) c5(87416, 87417, 87418, 87419, 87420, 87421, 87422, 87423, 87424, 87425, 87426, 87427, 87428, 87429, 87430, 87431, 87432, 87433) c6( ) c7(Bh, cca, Tp); #c1(MARVELD2) c2(XP_005248503) c3(MARVEL domain-containing protein 2 isoform X1) c4(268436, 268437, 268438, 268439, 268440) c5(268441, 268442, 268443, 268444, 268445, 268446, 268447, 268448, 268449, 268450, 268451, 268452, 268453, 268454, 268455, 268456, 268457, 268458) c6( ) c7(Bh, cca, Tp); #c1(MARVELD2) c2(XP_005276817) c3(MARVEL domain-containing protein 2 isoform X2) c4( ) c5(285735) c6( ) c7(Bh, cca, Tp); #c1(MARVELD3) c2(NP_001017967) c3(MARVEL domain-containing protein 3 isoform 1) c4(26684) c5(26685, 26686, 26687, 26688, 26689, 26690) c6( ) c7(T, aE, g); #c1(MARVELD3) c2(NP_001258258) c3(MARVEL domain-containing protein 3 isoform 3) c4( ) c5(96010) c6( ) c7(T, aE, g); #c1(MARVELD3) c2(NP_443090) c3(MARVEL domain-containing protein 3 isoform 2) c4(229342) c5(229343, 229344, 229345, 229346, 229347, 229348) c6( ) c7(T, aE, g); #c1(MAS1) c2(NP_002368) c3(proto-oncogene Mas) c4(127817) c5(127818, 127819, 127820, 127821, 127822, 127823) c6( ) c7(bL, bM, T, bcb, e, cz, v, C, cd, eA, ws, dL, vd, bq, aWf, eL, bc, A, je, xs, fQ, si, Ku, as, dw, eE, wU, cT, iM, mx, HB, aS, pw, dy, bC, us, vQ); #c1(MAS1L) c2(NP_443199) c3(mas-related G-protein coupled receptor MRG) c4(229829) c5(229830, 229831, 229832, 229833, 229834, 229835, 229836, 229837, 229838, 229839, 229840, 229841, 229842, 229843, 229844, 229845, 229846, 229847, 229848, 229849, 229850, 229851, 229852, 229853, 229854, 229855, 229856) c6( ) c7(aj, J, eZ); #c1(MASP1) c2(NP_001027019) c3(mannan-binding lectin serine protease 1 isoform 3 precursor) c4(30089) c5(30090, 30091, 30092, 30093, 30094, 30095, 30096, 30097) c6( ) c7(T, jx, aTH, aTJ, aj, V, ai, q, J, ad, dL, ae, af, aTI, ff, Az, hl, r, en, W, Qu, WP, at); #c1(MASP1) c2(NP_001870) c3(mannan-binding lectin serine protease 1 isoform 1 precursor) c4(121850) c5(121851, 121852, 121853, 121854, 121855, 121856, 121857, 121858) c6( ) c7(T, jx, aTH, aTJ, aj, V, ai, q, J, ad, dL, ae, af, aTI, ff, Az, hl, r, en, W, Qu, WP, at); #c1(MASP1) c2(NP_624302) c3(mannan-binding lectin serine protease 1 isoform 2 precursor) c4(238143) c5(238144, 238145, 238146, 238147, 238148, 238149, 238150, 238151, 238152) c6( ) c7(T, jx, aTH, aTJ, aj, V, ai, q, J, ad, dL, ae, af, aTI, ff, Az, hl, r, en, W, Qu, WP, at); #c1(MASP1) c2(XP_006713763) c3(mannan-binding lectin serine protease 1 isoform X3) c4( ) c5(287314, 287315, 287316, 287317, 287318, 287319, 287320, 287321, 287322, 287323, 287324, 287325, 287326, 287327, 287328, 287329, 287330, 287331, 287332, 287333, 287334, 287335) c6(287336) c7(T, jx, aTH, aTJ, aj, V, ai, q, J, ad, dL, ae, af, aTI, ff, Az, hl, r, en, W, Qu, WP, at); #c1(MASP1) c2(XP_011511291) c3(mannan-binding lectin serine protease 1 isoform X1) c4(301800, 301801, 301802) c5( ) c6( ) c7(T, jx, aTH, aTJ, aj, V, ai, q, J, ad, dL, ae, af, aTI, ff, Az, hl, r, en, W, Qu, WP, at); #c1(MAST2) c2(XP_011539364) c3(microtubule-associated serine/threonine-protein kinase 2 isoform X4) c4(337460) c5(337461, 337462, 337463, 337464, 337465, 337466) c6( ) c7(aW, d, aT); #c1(MAST2) c2(XP_011539370) c3(microtubule-associated serine/threonine-protein kinase 2 isoform X16) c4( ) c5(337467, 337468, 337469, 337470, 337471, 337472, 337473, 337474, 337475, 337476, 337477, 337478) c6( ) c7(aW, d, aT); #c1(MAST2) c2(XP_011539371) c3(microtubule-associated serine/threonine-protein kinase 2 isoform X17) c4( ) c5(337479, 337480, 337481, 337482, 337483, 337484) c6( ) c7(aW, d, aT); #c1(MAST4) c2(NP_001158136) c3(microtubule-associated serine/threonine-protein kinase 4 isoform c) c4(63162, 63163) c5(63164, 63165, 63166, 63167, 63168, 63169, 63170, 63171, 63172, 63173, 63174, 63175) c6( ) c7(bL); #c1(MAST4) c2(NP_001277155) c3(microtubule-associated serine/threonine-protein kinase 4 isoform d) c4(109179, 109180) c5(109181, 109182, 109183, 109184, 109185, 109186, 109187, 109188, 109189, 109190, 109191, 109192) c6( ) c7(bL); #c1(MAST4) c2(NP_001277156) c3(microtubule-associated serine/threonine-protein kinase 4 isoform e) c4(109193) c5(109194, 109195, 109196, 109197, 109198, 109199, 109200) c6( ) c7(bL); #c1(MAST4) c2(NP_055998) c3(microtubule-associated serine/threonine-protein kinase 4 isoform a) c4(185034) c5(185035, 185036, 185037, 185038, 185039, 185040) c6( ) c7(bL); #c1(MAST4) c2(NP_942123) c3(microtubule-associated serine/threonine-protein kinase 4 isoform b) c4(260473) c5(260474, 260475, 260476, 260477, 260478, 260479) c6( ) c7(bL); #c1(MAST4) c2(XP_006714669) c3(microtubule-associated serine/threonine-protein kinase 4 isoform X2) c4(287982, 287983) c5(287984, 287985, 287986, 287987, 287988, 287989, 287990, 287991, 287992, 287993, 287994, 287995) c6( ) c7(bL); #c1(MASTL) c2(NP_001165774) c3(serine/threonine-protein kinase greatwall isoform 1) c4(67892) c5(67893, 67894, 67895, 67896, 67897, 67898) c6( ) c7(DU, Wa); #c1(MASTL) c2(NP_001165775) c3(serine/threonine-protein kinase greatwall isoform 3) c4(67899) c5(67900, 67901, 67902, 67903, 67904, 67905) c6( ) c7(DU, Wa); #c1(MASTL) c2(NP_116233) c3(serine/threonine-protein kinase greatwall isoform 2) c4(225878) c5(225879, 225880, 225881, 225882, 225883, 225884) c6( ) c7(DU, Wa); #c1(MAT1A) c2(XP_005269899) c3(S-adenosylmethionine synthase isoform type-1 isoform X1) c4(282978) c5(282979, 282980, 282981, 282982, 282983, 282984, 282985, 282986, 282987, 282988) c6( ) c7(bL, T, e, al, cz, ci, mF, ad, Na, aE, hb, rJ, aT, rN, rO, Nc, K, ZN, ae, rL, KG, MX, aW, fc, dq, aq, bFG, bFF, cm, iR, gk, mO, ac, Ip, aBO, rH, cP, B); #c1(MAT1A) c2(XP_005269900) c3(S-adenosylmethionine synthase isoform type-1 isoform X2) c4(282989) c5(282990, 282991, 282992, 282993, 282994, 282995) c6( ) c7(bL, T, e, al, cz, ci, mF, ad, Na, aE, hb, rJ, aT, rN, rO, Nc, K, ZN, ae, rL, KG, MX, aW, fc, dq, aq, bFG, bFF, cm, iR, gk, mO, ac, Ip, aBO, rH, cP, B); #c1(MAT2A) c2(NP_005902) c3(S-adenosylmethionine synthase isoform type-2) c4(160235, 160236) c5(160237, 160238, 160239, 160240, 160241, 160242, 160243, 160244, 160245, 160246, 160247, 160248) c6( ) c7(Na, T, B, Ip, bE, r, aT, bB, aq, Nc, ey, ci, fr, iR, cm, X, hX); #c1(MAT2B) c2(NP_037415) c3(methionine adenosyltransferase 2 subunit beta isoform 1) c4(175387, 175388, 175389) c5(175390, 175391, 175392, 175393, 175394, 175395, 175396, 175397, 175398, 175399, 175400, 175401) c6( ) c7(Na, uH, W, pN, Ip, e, aw, cz, gZ, cy, cd, aj, aq, Nc, sl, cm, B, J); #c1(MAT2B) c2(NP_877725) c3(methionine adenosyltransferase 2 subunit beta isoform 2) c4(256949) c5(256950, 256951, 256952, 256953, 256954, 256955, 256956, 256957, 256958, 256959, 256960, 256961) c6( ) c7(Na, uH, W, pN, Ip, e, aw, cz, gZ, cy, cd, aj, aq, Nc, sl, cm, B, J); #c1(MATK) c2(NP_002369) c3(megakaryocyte-associated tyrosine-protein kinase isoform b) c4(127824) c5(127825, 127826, 127827, 127828, 127829, 127830) c6( ) c7(ck, T, d, aE, dB, aW, jh, aT, v, K, as, cm, bz, X); #c1(MATK) c2(NP_647611) c3(megakaryocyte-associated tyrosine-protein kinase isoform c) c4(238804) c5( ) c6( ) c7(ck, T, d, aE, dB, aW, jh, aT, v, K, as, cm, bz, X); #c1(MATK) c2(XP_011526320) c3(megakaryocyte-associated tyrosine-protein kinase isoform X1) c4(320620) c5(320621, 320622, 320623, 320624, 320625, 320626, 320627, 320628, 320629, 320630, 320631, 320632) c6( ) c7(ck, T, d, aE, dB, aW, jh, aT, v, K, as, cm, bz, X); #c1(MATN2) c2(NP_002371) c3(matrilin-2 isoform a precursor) c4(127831, 127832, 127833, 127834) c5(127835, 127836, 127837, 127838, 127839, 127840, 127841, 127842, 127843, 127844, 127845, 127846, 127847, 127848, 127849, 127850, 127851, 127852) c6( ) c7(Ew, B, as, Hp); #c1(MATN2) c2(NP_085072) c3(matrilin-2 isoform b precursor) c4(219256) c5(219257, 219258, 219259, 219260, 219261, 219262) c6( ) c7(Ew, B, as, Hp); #c1(MATN2) c2(XP_005250977) c3(matrilin-2 isoform X2) c4( ) c5(270717, 270718, 270719, 270720, 270721, 270722) c6( ) c7(Ew, B, as, Hp); #c1(MATN3) c2(NP_002372) c3(matrilin-3 precursor) c4(127853, 127854) c5(127855, 127856, 127857, 127858, 127859, 127860, 127861, 127862, 127863, 127864, 127865, 127866) c6( ) c7(Dg, kh, zw, rq, ccb, ru, ry, In, rs, Dj, K, rv, ccc); #c1(MATR3) c2(NP_001181883) c3(matrin-3 isoform a) c4(74308, 74309, 74310, 74311, 74312, 74313, 74314, 74315) c5(74316, 74317, 74318, 74319, 74320, 74321, 74322, 74323, 74324, 74325, 74326, 74327, 74328, 74329, 74330, 74331, 74332, 74333, 74334, 74335, 74336, 74337, 74338, 74339, 74340, 74341, 74342, 74343, 74344, 74345, 74346, 74347, 74348, 74349, 74350, 74351, 74352, 74353, 74354, 74355, 74356, 74357, 74358, 74359, 74360, 74361, 74362, 74363, 74364, 74365, 74366, 74367, 74368, 74369, 74370, 74371, 74372, 74373, 74374, 74375, 74376) c6( ) c7(ccd, no, Ws, xs, iw, oj, at, iv, h, dL, bw, f, cce); #c1(MATR3) c2(NP_001181885) c3(matrin-3 isoform b) c4(74377, 74378) c5(74379, 74380, 74381, 74382, 74383, 74384, 74385, 74386) c6( ) c7(ccd, no, Ws, xs, iw, oj, at, iv, h, dL, bw, f, cce); #c1(MATR3) c2(NP_001269207) c3(matrin-3 isoform c) c4(100764) c5(100765, 100766, 100767, 100768, 100769, 100770, 100771, 100772, 100773, 100774, 100775, 100776, 100777, 100778) c6( ) c7(ccd, no, Ws, xs, iw, oj, at, iv, h, dL, bw, f, cce); #c1(MAU2) c2(NP_056144) c3(MAU2 chromatid cohesion factor homolog) c4(185938, 185939) c5(185940, 185941, 185942, 185943, 185944, 185945, 185946, 185947, 185948, 185949, 185950, 185951) c6( ) c7(T, Y, ff, aNL, en, qN, nz, iK, bz); #c1(MAU2) c2(XP_011526146) c3(MAU2 chromatid cohesion factor homolog isoform X5) c4( ) c5(320407, 320408, 320409, 320410, 320411, 320412) c6( ) c7(T, Y, ff, aNL, en, qN, nz, iK, bz); #c1(MAVS) c2(NP_001193420) c3(mitochondrial antiviral-signaling protein isoform 2) c4(82180) c5(82181, 82182, 82183, 82184, 82185, 82186) c6( ) c7(gV, T, bM, cch, Dw, fR, jx, aFc, V, mC, F, ccg, ds, ccf, cU, aT, DU, aW, Y, eZ, aiT, Io, CQ, pm, t, m, fL); #c1(MAVS) c2(NP_065797) c3(mitochondrial antiviral-signaling protein isoform 1) c4(205494, 205495, 205496) c5(205497, 205498, 205499, 205500, 205501, 205502, 205503, 205504, 205505, 205506, 205507, 205508, 205509, 205510, 205511, 205512, 205513, 205514) c6( ) c7(gV, T, bM, cch, Dw, fR, jx, aFc, V, mC, F, ccg, ds, ccf, cU, aT, DU, aW, Y, eZ, aiT, Io, CQ, pm, t, m, fL); #c1(MAX) c2(NP_002373) c3(protein max isoform a) c4(127867, 127868) c5(127869, 127870, 127871, 127872, 127873, 127874, 127875, 127876, 127877, 127878, 127879, 127880, 127881, 127882, 127883, 127884, 127885, 127886, 127887, 127888, 127889, 127890, 127891, 127892, 127893, 127894, 127895, 127896, 127897, 127898, 127899, 127900, 127901, 127902, 127903, 127904, 127905, 127906, 127907, 127908, 127909, 127910, 127911, 127912, 127913, 127914, 127915, 127916, 127917, 127918, 127919, 127920, 127921, 127922, 127923, 127924, 127925, 127926, 127927, 127928, 127929, 127930) c6( ) c7(jf, av, T, ft, pf, dO, anx, EQ, r, tv, tu, ei, g, cm, q); #c1(MAX) c2(NP_660087) c3(protein max isoform b) c4(240311) c5(240312, 240313, 240314, 240315, 240316, 240317) c6( ) c7(jf, av, T, ft, pf, dO, anx, EQ, r, tv, tu, ei, g, cm, q); #c1(MAX) c2(NP_660088) c3(protein max isoform c) c4(240318, 240319, 240320) c5(240321, 240322, 240323, 240324, 240325, 240326, 240327, 240328, 240329, 240330, 240331, 240332, 240333, 240334, 240335, 240336, 240337, 240338, 240339, 240340, 240341) c6( ) c7(jf, av, T, ft, pf, dO, anx, EQ, r, tv, tu, ei, g, cm, q); #c1(MAX) c2(NP_660089) c3(protein max isoform d) c4(240342) c5(240343, 240344, 240345, 240346, 240347, 240348) c6( ) c7(jf, av, T, ft, pf, dO, anx, EQ, r, tv, tu, ei, g, cm, q); #c1(MAX) c2(NP_932061) c3(protein max isoform f) c4(258726) c5(258727, 258728, 258729, 258730, 258731, 258732) c6( ) c7(jf, av, T, ft, pf, dO, anx, EQ, r, tv, tu, ei, g, cm, q); #c1(MAZ) c2(NP_001036004) c3(myc-associated zinc finger protein isoform 2) c4(33664) c5(33665, 33666, 33667, 33668, 33669, 33670) c6( ) c7(bxy, Ng, dD, d, jz, aW, ea, Pg, VB, aT, h, aj, eq, R, Lz, bt, ai, J, bN); #c1(MAZ) c2(NP_001263204) c3(myc-associated zinc finger protein isoform 3) c4(97027, 97028) c5(97029, 97030, 97031, 97032, 97033, 97034, 97035, 97036, 97037, 97038, 97039, 97040) c6( ) c7(bxy, Ng, dD, d, jz, aW, ea, Pg, VB, aT, h, aj, eq, R, Lz, bt, ai, J, bN); #c1(MAZ) c2(NP_001263205) c3(myc-associated zinc finger protein isoform 4) c4( ) c5(97041) c6( ) c7(bxy, Ng, dD, d, jz, aW, ea, Pg, VB, aT, h, aj, eq, R, Lz, bt, ai, J, bN); #c1(MAZ) c2(NP_002374) c3(myc-associated zinc finger protein isoform 1) c4(127931) c5(127932, 127933, 127934, 127935, 127936, 127937) c6( ) c7(bxy, Ng, dD, d, jz, aW, ea, Pg, VB, aT, h, aj, eq, R, Lz, bt, ai, J, bN); #c1(MB) c2(XP_005261662) c3(myoglobin isoform X1) c4(277525, 277526, 277527, 277528, 277529) c5(277530, 277531, 277532, 277533, 277534, 277535, 277536, 277537, 277538, 277539, 277540, 277541, 277542, 277543, 277544, 277545, 277546, 277547, 277548, 277549, 277550, 277551, 277552, 277553, 277554, 277555, 277556, 277557, 277558, 277559, 277560, 277561, 277562, 277563, 277564, 277565, 277566, 277567, 277568, 277569, 277570, 277571, 277572, 277573, 277574, 277575) c6( ) c7(T, Or, aw, j, ci, fr, pd, iJ, ip, bv, no, py, Bc, ry, oj, aT, K, aW, xs, uY, g, cm, Bu, bz, kC, eM, iA, aNJ, E, cci); #c1(MB21D1) c2(NP_612450) c3(cyclic GMP-AMP synthase) c4(236516) c5(236517, 236518, 236519, 236520, 236521, 236522) c6( ) c7(oo, gl); #c1(MB21D1) c2(XP_006715390) c3(cyclic GMP-AMP synthase isoform X1) c4(289498) c5(289499, 289500, 289501, 289502, 289503, 289504, 289505, 289506, 289507, 289508) c6( ) c7(oo, gl); #c1(MB21D2) c2(NP_848591) c3(protein MB21D2) c4(253909) c5(253910, 253911, 253912, 253913, 253914, 253915, 253916) c6( ) c7(fq); #c1(MBD1) c2(NP_001191065) c3(methyl-CPG-binding domain protein 1 isoform 6) c4(80901) c5(80902, 80903, 80904, 80905, 80906, 80907, 80908, 80909) c6( ) c7(T, aC, hy, qj, ci, hF, ad, av, aE, ae, BN, vs, Fq, Tp, g, bz, bN, Qi, ou, rR, nM, nB, bE, cj, m, ne, pC); #c1(MBD1) c2(NP_001191070) c3(methyl-CpG-binding domain protein 1 isoform 10) c4(80910) c5(80911, 80912, 80913, 80914, 80915, 80916) c6( ) c7(T, aC, hy, qj, ci, hF, ad, av, aE, ae, BN, vs, Fq, Tp, g, bz, bN, Qi, ou, rR, nM, nB, bE, cj, m, ne, pC); #c1(MBD1) c2(NP_001191071) c3(methyl-CpG-binding domain protein 1 isoform II) c4(80917) c5(80918, 80919, 80920, 80921, 80922, 80923) c6( ) c7(T, aC, hy, qj, ci, hF, ad, av, aE, ae, BN, vs, Fq, Tp, g, bz, bN, Qi, ou, rR, nM, nB, bE, cj, m, ne, pC); #c1(MBD1) c2(NP_001191080) c3(methyl-CpG-binding domain protein 1 isoform 13) c4(80973) c5(80974, 80975, 80976, 80977, 80978) c6( ) c7(T, aC, hy, qj, ci, hF, ad, av, aE, ae, BN, vs, Fq, Tp, g, bz, bN, Qi, ou, rR, nM, nB, bE, cj, m, ne, pC); #c1(MBD1) c2(NP_002375) c3(methyl-CPG-binding domain protein 1 isoform 4) c4(127938) c5(127939, 127940, 127941, 127942, 127943, 127944, 127945, 127946, 127947, 127948) c6( ) c7(T, aC, hy, qj, ci, hF, ad, av, aE, ae, BN, vs, Fq, Tp, g, bz, bN, Qi, ou, rR, nM, nB, bE, cj, m, ne, pC); #c1(MBD1) c2(NP_056669) c3(methyl-CPG-binding domain protein 1 isoform 3) c4(188119) c5(188120, 188121, 188122, 188123, 188124, 188125, 188126, 188127, 188128) c6( ) c7(T, aC, hy, qj, ci, hF, ad, av, aE, ae, BN, vs, Fq, Tp, g, bz, bN, Qi, ou, rR, nM, nB, bE, cj, m, ne, pC); #c1(MBD1) c2(NP_056670) c3(methyl-CPG-binding domain protein 1 isoform 2) c4(188129) c5(188130, 188131, 188132, 188133, 188134, 188135, 188136) c6( ) c7(T, aC, hy, qj, ci, hF, ad, av, aE, ae, BN, vs, Fq, Tp, g, bz, bN, Qi, ou, rR, nM, nB, bE, cj, m, ne, pC); #c1(MBD1) c2(NP_056723) c3(methyl-CPG-binding domain protein 1 isoform 5) c4(188137) c5(188138, 188139, 188140, 188141, 188142) c6( ) c7(T, aC, hy, qj, ci, hF, ad, av, aE, ae, BN, vs, Fq, Tp, g, bz, bN, Qi, ou, rR, nM, nB, bE, cj, m, ne, pC); #c1(MBD1) c2(XP_005258328) c3(methyl-CpG-binding domain protein 1 isoform X1) c4(275627) c5(275628, 275629, 275630, 275631, 275632, 275633, 275634, 275635, 275636, 275637, 275638, 275639) c6( ) c7(T, aC, hy, qj, ci, hF, ad, av, aE, ae, BN, vs, Fq, Tp, g, bz, bN, Qi, ou, rR, nM, nB, bE, cj, m, ne, pC); #c1(MBD1) c2(XP_011524289) c3(methyl-CpG-binding domain protein 1 isoform X4) c4( ) c5(318781) c6( ) c7(T, aC, hy, qj, ci, hF, ad, av, aE, ae, BN, vs, Fq, Tp, g, bz, bN, Qi, ou, rR, nM, nB, bE, cj, m, ne, pC); #c1(MBD1) c2(XP_011524297) c3(methyl-CpG-binding domain protein 1 isoform X2) c4(318782, 318783) c5(318784, 318785, 318786, 318787, 318788, 318789, 318790, 318791, 318792, 318793, 318794) c6( ) c7(T, aC, hy, qj, ci, hF, ad, av, aE, ae, BN, vs, Fq, Tp, g, bz, bN, Qi, ou, rR, nM, nB, bE, cj, m, ne, pC); #c1(MBD1) c2(XP_011524300) c3(methyl-CpG-binding domain protein 1 isoform X12) c4( ) c5(318795) c6( ) c7(T, aC, hy, qj, ci, hF, ad, av, aE, ae, BN, vs, Fq, Tp, g, bz, bN, Qi, ou, rR, nM, nB, bE, cj, m, ne, pC); #c1(MBD1) c2(XP_011524303) c3(methyl-CpG-binding domain protein 1 isoform X15) c4( ) c5(318796, 318797) c6( ) c7(T, aC, hy, qj, ci, hF, ad, av, aE, ae, BN, vs, Fq, Tp, g, bz, bN, Qi, ou, rR, nM, nB, bE, cj, m, ne, pC); #c1(MBD1) c2(XP_011524308) c3(methyl-CPG-binding domain protein 1 isoform X3) c4(318798) c5(318799, 318800, 318801, 318802, 318803, 318804) c6( ) c7(T, aC, hy, qj, ci, hF, ad, av, aE, ae, BN, vs, Fq, Tp, g, bz, bN, Qi, ou, rR, nM, nB, bE, cj, m, ne, pC); #c1(MBD2) c2(NP_003918) c3(methyl-CpG-binding domain protein 2 isoform 1) c4(142154) c5(142155, 142156, 142157, 142158, 142159, 142160) c6( ) c7(T, kh, id, iW, arQ, oA, aA, cz, bB, jh, dG, ci, hF, AO, iJ, q, ccj, mC, ad, hX, eA, bv, biS, aT, dL, jj, ae, eL, avQ, aa, d, s, aNI, aW, eH, eZ, la, nf, r, aq, vs, kp, aF, g, eF, t, cm, bz, bcN, Hv, pb, iR, ck, bw, Bv, eM, dB, bE, eD, Qu, at, np, m, fL, bt, it, B); #c1(MBD2) c2(NP_056647) c3(methyl-CpG-binding domain protein 2 testis-specific isoform) c4(188088) c5(188089, 188090, 188091, 188092, 188093, 188094, 188095, 188096, 188097, 188098) c6( ) c7(T, kh, id, iW, arQ, oA, aA, cz, bB, jh, dG, ci, hF, AO, iJ, q, ccj, mC, ad, hX, eA, bv, biS, aT, dL, jj, ae, eL, avQ, aa, d, s, aNI, aW, eH, eZ, la, nf, r, aq, vs, kp, aF, g, eF, t, cm, bz, bcN, Hv, pb, iR, ck, bw, Bv, eM, dB, bE, eD, Qu, at, np, m, fL, bt, it, B); #c1(MBD3) c2(NP_001268382) c3(methyl-CPG-binding domain protein 3 isoform 1) c4(99810) c5(99811, 99812, 99813, 99814, 99815, 99816, 99817, 99818) c6( ) c7(T, eM, aD, vs, qj, jj, bz, bN, pC); #c1(MBD3) c2(NP_001268383) c3(methyl-CpG-binding domain protein 3 isoform 2) c4(99819) c5(99820, 99821, 99822, 99823, 99824, 99825) c6( ) c7(T, eM, aD, vs, qj, jj, bz, bN, pC); #c1(MBD3L2) c2(NP_653215) c3(methyl-CPG-binding domain protein 3-like 2) c4(239115, 239116, 239117) c5(239118, 239119, 239120, 239121, 239122, 239123, 239124, 239125, 239126, 239127, 239128, 239129, 239130, 239131, 239132, 239133, 239134, 239135) c6( ) c7(aA); #c1(MBD4) c2(NP_001263199) c3(methyl-CPG-binding domain protein 4 isoform 2) c4(97013) c5(97014, 97015, 97016, 97017, 97018, 97019) c6( ) c7(T, aA, bB, V, q, ad, eA, av, aE, aT, dL, DY, ae, dx, jf, iF, s, aW, Y, eZ, r, aF, Fq, g, t, bz, pb, bN, eM, bE, gX, at, m, y, it, X); #c1(MBD4) c2(NP_001263202) c3(methyl-CpG-binding domain protein 4 isoform 5) c4(97020) c5(97021, 97022, 97023, 97024, 97025, 97026) c6( ) c7(T, aA, bB, V, q, ad, eA, av, aE, aT, dL, DY, ae, dx, jf, iF, s, aW, Y, eZ, r, aF, Fq, g, t, bz, pb, bN, eM, bE, gX, at, m, y, it, X); #c1(MBD4) c2(NP_003916) c3(methyl-CpG-binding domain protein 4 isoform 1) c4(142146) c5(142147, 142148, 142149, 142150, 142151, 142152, 142153) c6( ) c7(T, aA, bB, V, q, ad, eA, av, aE, aT, dL, DY, ae, dx, jf, iF, s, aW, Y, eZ, r, aF, Fq, g, t, bz, pb, bN, eM, bE, gX, at, m, y, it, X); #c1(MBD5) c2(NP_060798) c3(methyl-CpG-binding domain protein 5) c4(197891) c5(197892, 197893, 197894, 197895, 197896, 197897) c6( ) c7(cck, agd, ac, ha, amj, bK, nA, rz, B, bN, hq); #c1(MBD6) c2(NP_443129) c3(methyl-CPG-binding domain protein 6) c4(229565, 229566, 229567, 229568, 229569, 229570) c5( ) c6( ) c7(bN, bX); #c1(MBD6) c2(XP_005268677) c3(methyl-CPG-binding domain protein 6 isoform X2) c4( ) c5(282014, 282015, 282016, 282017, 282018, 282019, 282020, 282021, 282022, 282023, 282024, 282025, 282026, 282027, 282028, 282029, 282030, 282031, 282032, 282033, 282034, 282035, 282036, 282037, 282038, 282039, 282040, 282041, 282042, 282043, 282044, 282045) c6( ) c7(bN, bX); #c1(MBD6) c2(XP_011536153) c3(methyl-CPG-binding domain protein 6 isoform X1) c4( ) c5(333461, 333462, 333463, 333464, 333465, 333466, 333467, 333468, 333469, 333470, 333471, 333472, 333473) c6( ) c7(bN, bX); #c1(MBIP) c2(NP_001138363) c3(MAP3K12-binding inhibitor protein 1 isoform 2) c4(56376) c5(56377, 56378, 56379, 56380, 56381, 56382) c6( ) c7(aW, aT); #c1(MBIP) c2(NP_057670) c3(MAP3K12-binding inhibitor protein 1 isoform 1) c4(192270) c5(192271, 192272, 192273, 192274, 192275, 192276) c6( ) c7(aW, aT); #c1(MBL2) c2(XP_011538118) c3(mannose-binding protein C isoform X1) c4(335692) c5(335693, 335694, 335695, 335696, 335697, 335698) c6( ) c7(bol, oO, T, bM, fR, ccm, ea, if, e, al, eb, bvq, bB, cL, gA, qj, aoj, fd, fw, aR, aEI, wa, NF, bPE, AW, xy, x, ws, JM, dV, Ds, K, aaW, cco, zy, hH, bc, hm, aa, aW, az, sP, hl, mQ, kt, pD, pL, ve, akw, axp, uC, ccs, eE, y, fT, yl, anT, aFO, nB, dc, ki, bPC, eM, bTe, cj, uo, Zn, uJ, QF, k, m, R, aNn, eg, aFf, bsh, sr, ajy, dD, JZ, sQ, aw, fN, ez, xM, n, aj, aCZ, pM, qN, eh, zo, ai, eW, aDF, ke, aBy, b, no, afn, cU, IG, Ne, dL, DU, wb, ey, h, aDp, Nr, OV, mR, A, Cw, ge, fe, aCE, aq, po, ajz, cM, sE, xe, Zj, acD, Wt, adz, bMc, kT, ar, bkn, W, apO, NL, aZL, RJ, mg, axj, hs, uz, ut, aOL, eo, fL, aDE, at, bni, Pr, B, it, bL, Dw, ka, jv, pF, ach, AL, eR, oe, ccr, DV, jx, aA, cz, fF, hz, v, j, OY, C, bX, aBo, V, rd, q, J, o, eA, ccn, ga, aEE, aZX, aOj, bNQ, aWc, jZ, sl, qp, aWJ, aT, rS, cy, bsi, aAD, yb, an, af, eu, uA, blm, hM, oV, bsb, DN, IC, r, cct, afq, Io, aDm, afs, t, aMf, el, IY, ck, iQ, sn, ac, aQd, hA, ig, AH, hr, auT, aYx, wR, CZ, cS, dy, JH, fD, gT, bt, ao, yv, gx, sY, Ve, Kd, aFe, gV, gb, aD, aPJ, Hc, uG, axd, iW, jh, vr, oR, wV, eq, jE, atK, Fc, mC, Uy, ad, hX, bnZ, hd, F, od, afm, ccq, ccu, ccv, ds, acu, oW, Os, hD, ccl, JK, IQ, bOu, vO, yF, sj, uQ, uX, aVZ, aFP, d, hG, cW, aZK, xs, wc, bHX, eZ, Mz, aFr, aF, hp, avG, aFd, ccp, iV, bz, eK, Nq, D, gk, Bv, zr, atM, bE, z, anY, aFb, aED, wz, sG, aS, Lz, i, lf, ra, ne, hv, pC); #c1(MBNL1) c2(NP_066368) c3(muscleblind-like protein 1 isoform a) c4(207265) c5(207266, 207267, 207268, 207269, 207270, 207271) c6( ) c7(l, OV, u, oj, ey, bzq, dR); #c1(MBNL1) c2(NP_997175) c3(muscleblind-like protein 1 isoform b) c4(265075) c5(265076, 265077, 265078, 265079, 265080, 265081) c6( ) c7(l, OV, u, oj, ey, bzq, dR); #c1(MBNL1) c2(NP_997176) c3(muscleblind-like protein 1 isoform c) c4(265082) c5(265083, 265084, 265085, 265086, 265087, 265088, 265089, 265090, 265091, 265092) c6( ) c7(l, OV, u, oj, ey, bzq, dR); #c1(MBNL1) c2(NP_997177) c3(muscleblind-like protein 1 isoform d) c4(265093) c5(265094, 265095, 265096, 265097, 265098, 265099, 265100, 265101, 265102, 265103) c6( ) c7(l, OV, u, oj, ey, bzq, dR); #c1(MBNL1) c2(NP_997178) c3(muscleblind-like protein 1 isoform e) c4(265104) c5(265105, 265106, 265107, 265108, 265109, 265110) c6( ) c7(l, OV, u, oj, ey, bzq, dR); #c1(MBNL1) c2(NP_997179) c3(muscleblind-like protein 1 isoform f) c4(265111) c5(265112, 265113, 265114, 265115, 265116, 265117, 265118, 265119, 265120, 265121) c6( ) c7(l, OV, u, oj, ey, bzq, dR); #c1(MBNL1) c2(NP_997180) c3(muscleblind-like protein 1 isoform g) c4(265122) c5(265123, 265124, 265125, 265126, 265127, 265128, 265129, 265130, 265131, 265132) c6( ) c7(l, OV, u, oj, ey, bzq, dR); #c1(MBNL1) c2(XP_005247534) c3(muscleblind-like protein 1 isoform X19) c4( ) c5(267863) c6( ) c7(l, OV, u, oj, ey, bzq, dR); #c1(MBNL2) c2(NP_659002) c3(muscleblind-like protein 2 isoform 1) c4(239675) c5(239676, 239677, 239678, 239679, 239680, 239681) c6( ) c7(aj, 10, oj, dR); #c1(MBNL2) c2(NP_997187) c3(muscleblind-like protein 2 isoform 3) c4(265141) c5(265142, 265143, 265144, 265145, 265146, 265147, 265148, 265149, 265150, 265151, 265152, 265153, 265154, 265155, 265156, 265157) c6( ) c7(aj, IU, oj, dR); #c1(MBNL2) c2(XP_005254076) c3(muscleblind-like protein 2 isoform X3) c4(272868) c5( ) c6( ) c7(aj, IU, oj, dR); #c1(MBNL2) c2(XP_005254078) c3(muscleblind-like protein 2 isoform X4) c4(272869) c5(272870, 272871, 272872, 272873, 272874, 272875) c6( ) c7(aj, IU, oj, dR); #c1(MBNL2) c2(XP_011519347) c3(muscleblind-like protein 2 isoform X1) c4( ) c5(314007) c6( ) c7(aj, IU, oj, dR); #c1(MBOAT1) c2(NP_001073949) c3(lysophospholipid acyltransferase 1) c4(36693) c5(36694, 36695, 36696, 36697, 36698, 36699) c6( ) c7(fq); #c1(MBOAT1) c2(XP_006715062) c3(lysophospholipid acyltransferase 1 isoform X1) c4(288567) c5(288568, 288569, 288570, 288571, 288572, 288573) c6( ) c7(fq); #c1(MBOAT1) c2(XP_011512615) c3(lysophospholipid acyltransferase 1 isoform X3) c4(303578) c5(303579, 303580, 303581, 303582, 303583, 303584) c6( ) c7(fq); #c1(MBOAT2) c2(NP_620154) c3(lysophospholipid acyltransferase 2) c4(237374) c5(237375, 237376, 237377, 237378, 237379, 237380) c6( ) c7(q, r); #c1(MBOAT4) c2(XP_011542911) c3(ghrelin O-acyltransferase isoform X1) c4(341513) c5(341514, 341515, 341516, 341517, 341518, 341519) c6( ) c7(bL, aW, iX, az, aT, dq, v, K); #c1(MBP) c2(NP_001020252) c3(myelin basic protein isoform 1) c4(28366) c5(28367, 28368, 28369, 28370, 28371, 28372) c6( ) c7(bM, cZ, hl, bmQ, JZ, aiR, qz, iW, oe, aw, jN, I, ccx, aA, GC, jE, mF, il, V, Fc, eA, ad, hX, ccw, NF, Mo, aBy, uT, ds, ccy, aT, h, abW, ey, dd, bq, H, bU, dF, af, pi, mH, nP, hM, d, dH, aaC, Cw, Ls, IC, eZ, aq, aHU, vs, aF, as, kk, eE, Hv, bN, IY, ck, rR, bkn, ac, iQ, ig, Om, dc, U, uo, Da, eo, k, bee, aiS, hh, y, bt, B, L); #c1(MBP) c2(NP_001020261) c3(myelin basic protein isoform 3) c4( ) c5(28394, 28395, 28396, 28397, 28398) c6( ) c7(bM, cZ, hl, bmQ, JZ, aiR, Qz, iW, oe, aw, jN, I, ccx, aA, GC, jE, mF, il, V, Fc, eA, ad, hX, ccw, NF, Mo, aBy, uT, ds, ccy, aT, h, abW, ey, dd, bq, H, bU, dF, af, pi, mH, nP, hM, d, dH, aaC, Cw, Ls, IC, eZ, aq, aHU, vs, aF, as, kk, eE, Hv, bN, IY, ck, rR, bkn, ac, iQ, ig, Om, dc, U, uo, Da, eo, k, bee, aiS, hh, y, bt, B, L); #c1(MBP) c2(NP_001020263) c3(myelin basic protein isoform 4) c4( ) c5(28481, 28482, 28483, 28484, 28485, 28486, 28487, 28488, 28489, 28490) c6( ) c7(bM, cZ, hl, bmQ, JZ, aiR, qz, iW, oe, aw, jN, I, ccx, aA, GC, jE, mF, il, V, Fc, eA, ad, hX, ccw, NF, Mo, aBy, uT, ds, ccy, aT, h, abW, ey, dd, bq, H, bU, dF, af, pi, mH, nP, hM, d, dH, aaC, Cw, Ls, IC, eZ, aq, aHU, vs, aF, as, kk, eE, Hv, bN, IY, ck, rR, bkn, ac, iQ, ig, Om, dc, U, uo, Da, eo, k, bee, aiS, hh, y, bt, B, L); #c1(MBP) c2(NP_001020271) c3(Golli-MBP isoform 2) c4(28491) c5(28492, 28493, 28494, 28495, 28496, 28497, 28498, 28499, 28500, 28501) c6( ) c7(bM, cZ, hl, bmQ, JZ, aiR, qz, iW, oe, aw, jN, I, ccx, aA, GC, jE, mF, il, V, Fc, eA, ad, hX, ccw, NF, Mo, aBy, uT, ds, ccy, aT, h, abW, ey, dd, bq, H, bU, dF, af, pi, mH, nP, hM, d, dH, aaC, Cw, Ls, IC, eZ, aq, aHU, vs, aF, as, kk, eE, Hv, bN, IY, ck, rR, bkn, ac, iQ, ig, Om, dc, U, uo, Da, eo, k, bee, aiS, hh, y, bt, B, L); #c1(MBP) c2(NP_001020272) c3(Golli-MBP isoform 1) c4(28502, 28503) c5(28504, 28505, 28506, 28507, 28508, 28509, 28510) c6( ) c7(bM, cZ, hl, bmQ, JZ, aiR, qz, iW, oe, aw, jN, I, ccx, aA, GC, jE, mF, il, V, Fc, eA, ad, hX, ccw, NF, Mo, aBy, uT, ds, ccy, aT, h, abW, ey, dd, bq, H, bU, dF, af, pi, mH, nP, hM, d, dH, aaC, Cw, Ls, IC, eZ, aq, aHU, vs, aF, as, kk, eE, Hv, bN, IY, ck, rR, bkn, ac, iQ, ig, Om, dc, U, uo, Da, eo, k, bee, aiS, hh, y, bt, B, L); #c1(MBP) c2(NP_002376) c3(myelin basic protein isoform 2) c4(127949) c5(127950, 127951, 127952, 127953, 127954, 127955) c6( ) c7(bM, cZ, hl, bmQ, JZ, aiR, qz, iW, oe, aw, jN, I, ccx, aA, GC, jE, mF, il, V, Fc, eA, ad, hX, ccw, NF, Mo, aBy, uT, ds, ccy, aT, h, abW, ey, dd, bq, H, bU, dF, af, pi, mH, nP, hM, d, dH, aaC, Cw, Ls, IC, eZ, aq, aHU, vs, aF, as, kk, eE, Hv, bN, IY, ck, rR, bkn, ac, iQ, ig, Om, dc, U, uo, Da, eo, k, bee, aiS, hh, y, bt, B, L); #c1(MBP) c2(XP_011524312) c3(Golli-MBP isoform X1) c4(318805) c5( ) c6( ) c7(bM, cZ, hl, bmQ, JZ, aiR, qz, iW, oe, aw, jN, I, ccx, aA, GC, jE, mF, il, V, Fc, eA, ad, hX, ccw, NF, Mo, aBy, uT, ds, ccy, aT, h, abW, ey, dd, bq, H, bU, dF, af, pi, mH, nP, hM, d, dH, aaC, Cw, Ls, IC, eZ, aq, aHU, vs, aF, as, kk, eE, Hv, bN, IY, ck, rR, bkn, ac, iQ, ig, Om, dc, U, uo, Da, eo, k, bee, aiS, hh, y, bt, B, L); #c1(MBP) c2(XP_011524313) c3(Golli-MBP isoform X2) c4(318806) c5(318807, 318808) c6( ) c7(bM, cZ, hl, bmQ, JZ, aiR, qz, iW, oe, aw, jN, I, ccx, aA, GC, jE, mF, il, V, Fc, eA, ad, hX, ccw, NF, Mo, aBy, uT, ds, ccy, aT, h, abW, ey, dd, bq, H, bU, dF, af, pi, mH, nP, hM, d, dH, aaC, Cw, Ls, IC, eZ, aq, aHU, vs, aF, as, kk, eE, Hv, bN, IY, ck, rR, bkn, ac, iQ, ig, Om, dc, U, uo, Da, eo, k, bee, aiS, hh, y, bt, B, L); #c1(MBTD1) c2(XP_005257525) c3(MBT domain-containing protein 1 isoform X7) c4(275199) c5(275200, 275201, 275202, 275203, 275204, 275205, 275206, 275207, 275208, 275209, 275210, 275211, 275212) c6( ) c7(dB, Th); #c1(MBTD1) c2(XP_011523237) c3(MBT domain-containing protein 1 isoform X11) c4(317757) c5(317758) c6( ) c7(dB, Th); #c1(MBTD1) c2(XP_011523238) c3(MBT domain-containing protein 1 isoform X12) c4( ) c5(317759, 317760, 317761, 317762, 317763) c6( ) c7(dB, Th); #c1(MBTPS1) c2(NP_003782) c3(membrane-bound transcription factor site-1 protease preproprotein) c4(140769, 140770) c5(140771, 140772, 140773, 140774, 140775, 140776, 140777, 140778, 140779, 140780, 140781, 140782) c6( ) c7(ccz, T, dD, ea, fG, eq, V, ad, iu, hd, ds, aT, ji, K, dF, ae, blm, d, aW, Y, oV, fc, Az, fe, aq, Io, nB, au, cj, Da, dy, eo, cP, B); #c1(MBTPS2) c2(NP_056968) c3(membrane-bound transcription factor site-2 protease) c4(188234, 188235) c5(188236, 188237, 188238, 188239, 188240, 188241, 188242, 188243, 188244, 188245, 188246, 188247) c6( ) c7(ccD, ccG, aOu, MS, acG, ccG, ccA, ccH, bgm, ccE, dr, by, K, IQ, ccF, aTi, B, ccB, bXD, alK); #c1(MC1R) c2(NP_002377) c3(melanocyte-stimulating hormone receptor) c4(127956) c5(127957, 127958, 127959, 127960, 127961, 127962) c6( ) c7(bol, sc, atT, Ve, T, yk, iW, eX, v, qj, Qo, V, cd, ad, aJO, hd, ccJ, ib, Db, afQ, Nn, aT, eV, IQ, an, bsn, ahU, ae, aW, Y, ccK, ff, cr, gu, en, bHy, ahV, ccM, hq, qJ, iP, sS, atU, Dy, nB, hk, ccl, agl, ccL, adg, ale, aPG, pC); #c1(MC2R) c2(NP_001278840) c3(adrenocorticotropic hormone receptor) c4(110702) c5(110703, 110704, 110705, 110706, 110707, 110708, 110709, 110710, 110711, 110712) c6( ) c7(bL, T, Ve, aaT, aG, vf, cz, Ja, ci, OH, ad, qC, axy, aVM, aT, iv, bK, K, qM, hK, cC, bgp, aK, li, yo, avH, aWm, s, iw, Hu, es, OW, iA, OD, MN); #c1(MC3R) c2(NP_063941) c3(melanocortin receptor 3) c4(202352) c5(202353, 202354, 202355, 202356, 202357, 202358) c6( ) c7(bL, bVk, Ve, ccN, e, ha, qQ, cz, aj, v, J, aPW, GL, iX, aT, jy, qM, aW, aCK, akq, ig, mf, ei); #c1(MC4R) c2(NP_005903) c3(melanocortin receptor 4) c4(160249) c5(160250, 160251, 160252, 160253, 160254, 160255) c6( ) c7(bL, bM, T, Ve, dD, ea, oe, My, qQ, jh, cz, wo, aj, v, afE, eq, q, J, aPW, GL, iX, aoh, aT, jy, K, jo, EL, uV, bSo, bYL, qM, cC, kl, aW, Y, fc, r, dq, cl, fq, bz, bJ, EJ, ck, hq, pO, W, ZT, gX, hL, mf, ei, X); #c1(MC5R) c2(NP_005904) c3(melanocortin receptor 5) c4(160256) c5(160257, 160258, 160259, 160260, 160261, 160262) c6( ) c7(bL, Ve, ccO, v, bK, qM, yA, qW); #c1(MCAM) c2(NP_006491) c3(cell surface glycoprotein MUC18 precursor) c4(165679, 165680, 165681) c5(165682, 165683, 165684, 165685, 165686, 165687, 165688, 165689, 165690, 165691, 165692, 165693, 165694, 165695, 165696, 165697, 165698, 165699) c6( ) c7(oO, bM, T, dA, eR, ci, V, sD, ad, ccP, ib, rw, Nn, aT, GT, dz, UN, K, IQ, zy, hS, ae, cp, aa, UW, et, LC, aEH, Y, aW, g, cl, t, iP, es, Dy, pc, iA, hL, at, nL, pg, m, fD, y, DB); #c1(MCAT) c2(NP_055322) c3(malonyl-CoA-acyl carrier protein transacylase, mitochondrial isoform b precursor) c4(180476) c5(180477, 180478, 180479, 180480, 180481, 180482) c6( ) c7(bL, T, dD, ea, e, jh, bB, vr, aj, eq, jE, fr, eA, J, ad, aT, bOk, h, K, fb, ae, d, nO, qt, aW, hq, cm, iO, W, nB, bE, U, B); #c1(MCAT) c2(NP_775738) c3(malonyl-CoA-acyl carrier protein transacylase, mitochondrial isoform a precursor) c4(250126) c5(250127, 250128, 250129, 250130, 250131, 250132) c6( ) c7(bL, T, dD, ea, e, jh, bB, vr, aj, eq, jE, fr, eA, J, ad, aT, bOk, h, K, fb, ae, d, nO, qt, aW, hl, cm, iO, W, nB, bE, U, B); #c1(MCC) c2(NP_001078846) c3(colorectal mutant cancer protein isoform 1) c4(37929) c5(37930, 37931, 37932, 37933, 37934, 37935) c6( ) c7(bM, T, qb, al, aA, fr, ci, nA, q, ad, hX, av, ft, aE, Yc, NS, aT, ni, ae, YT, Qe, BO, s, aW, oV, ff, LZ, r, dN, aF, en, g, bz, bN, bE, gk, ac, eM, bE, z, B); #c1(MCC) c2(NP_002378) c3(colorectal mutant cancer protein isoform 2) c4(127963) c5(127964, 127965, 127966, 127967, 127968, 127969) c6( ) c7(bM, T, gb, al, aA, fr, ci, nA, q, ad, hX, av, ft, aE, Yc, NS, aT, ni, ae, YT, Qe, BO, s, aW, oV, ff, LZ, r, dN, aF, en, g, bz, bN, bE, gk, ac, eM, bE, z, B); #c1(MCCC1) c2(NP_064551) c3(methylcrotonoyl-CoA carboxylase subunit alpha, mitochondrial isoform 1 precursor) c4(202958, 202959, 202960, 202961) c5(202962, 202963, 202964, 202965, 202966, 202967, 202968) c6( ) c7(an, dV, eg); #c1(MCCC1) c2(XP_006713765) c3(methylcrotonoyl-CoA carboxylase subunit alpha, mitochondrial isoform X2) c4( ) c5(287337, 287338, 287339, 287340, 287341, 287342, 287343, 287344, 287345, 287346, 287347) c6( ) c7(an, dV, eg); #c1(MCCC1) c2(XP_011511294) c3(methylcrotonoyl-CoA carboxylase subunit alpha, mitochondrial isoform X1) c4(301803) c5(301804) c6( ) c7(an, dV, eg); #c1(MCCC1) c2(XP_011511295) c3(methylcrotonoyl-CoA carboxylase subunit alpha, mitochondrial isoform X3) c4( ) c5(301805, 301806, 301807, 301808, 301809, 301810, 301811, 301812, 301813, 301814, 301815) c6( ) c7(an, dV, eg); #c1(MCCC2) c2(NP_071415) c3(methylcrotonoyl-CoA carboxylase beta chain, mitochondrial) c4(211551) c5(211552, 211553, 211554, 211555, 211556, 211557) c6( ) c7(ccR, ccQ, ka, ac, ki); #c1(MCCC2) c2(XP_005248624) c3(methylcrotonoyl-CoA carboxylase beta chain, mitochondrial isoform X1) c4(268474) c5(268475, 268476, 268477, 268478, 268479, 268480) c6( ) c7(ccR, ccQ, ka, ac, ki); #c1(MCCD1) c2(NP_001011700) c3(mitochondrial coiled-coil domain protein 1 precursor) c4(24709, 24710, 24711) c5(24712, 24713, 24714, 24715, 24716, 24717, 24718, 24719, 24720, 24721, 24722, 24723, 24724, 24725, 24726, 24727, 24728, 24729, 24730, 24731, 24732, 24733, 24734, 24735, 24736, 24737, 24738, 24739, 24740, 24741, 24742, 24743, 24744, 24745, 24746) c6( ) c7(hH, V, aiJ, cr, eZ); #c1(MCEE) c2(NP_115990) c3(methylmalonyl-CoA epimerase, mitochondrial precursor) c4(225126) c5(225127, 225128, 225129, 225130, 225131, 225132) c6( ) c7(ccS, GE); #c1(MCF2) c2(NP_001093325) c3(proto-oncogene DBL isoform a) c4(40232) c5(40233, 40234, 40235, 40236, 40237, 40238, 40239, 40240, 40241, 40242, 40243, 40244, 40245, 40246) c6( ) c7(ya, vT, aW, oe, EQ, dV, bgK, uJ, Ou); #c1(MCF2) c2(NP_001165348) c3(proto-oncogene DBL isoform d) c4(67611) c5(67612, 67613, 67614, 67615, 67616, 67617) c6( ) c7(ya, vT, aW, oe, EQ, dV, bgK, uJ, Ou); #c1(MCF2) c2(NP_001165349) c3(proto-oncogene DBL isoform e) c4(67618) c5(67619, 67620, 67621, 67622, 67623, 67624) c6( ) c7(ya, vT, aW, oe, EQ, dV, bgK, uJ, Ou); #c1(MCF2) c2(NP_001165350) c3(proto-oncogene DBL isoform f) c4(67625) c5(67626, 67627, 67628, 67629, 67630, 67631) c6( ) c7(ya, vT, aW, oe, EQ, dV, bgK, uJ, Ou); #c1(MCF2) c2(NP_005360) c3(proto-oncogene DBL isoform b) c4(155425, 155426) c5(155427, 155428, 155429, 155430, 155431, 155432) c6( ) c7(ya, vT, aW, oe, EQ, dV, bgK, uJ, Ou); #c1(MCF2) c2(XP_005262470) c3(proto-oncogene DBL isoform X2) c4(277964, 277965, 277966) c5(277967, 277968, 277969, 277970, 277971, 277972, 277973, 277974, 277975) c6( ) c7(ya, vT, aW, oe, EQ, dV, bgK, uJ, Ou); #c1(MCF2) c2(XP_006724820) c3(proto-oncogene DBL isoform X5) c4( ) c5(296439, 296440, 296441, 296442, 296443, 296444) c6( ) c7(ya, vT, aW, oe, EQ, dV, bgK, uJ, Ou); #c1(MCF2) c2(XP_011529641) c3(proto-oncogene DBL isoform X1) c4( ) c5(325293, 325294, 325295, 325296, 325297) c6( ) c7(ya, vT, aW, oe, EQ, dV, bgK, uJ, Ou); #c1(MCF2L) c2(NP_001106203) c3(guanine nucleotide exchange factor DBS isoform a) c4(42390, 42391, 42392) c5(42393, 42394, 42395, 42396, 42397, 42398, 42399, 42400, 42401, 42402, 42403, 42404) c6( ) c7(T, b, mO, aE, aW, aNJ, e, aT, aU, h, fr, Wm, i, hX); #c1(MCF2L) c2(NP_079255) c3(guanine nucleotide exchange factor DBS isoform b precursor) c4(217593, 217594) c5(217595, 217596, 217597, 217598, 217599, 217600, 217601, 217602, 217603, 217604, 217605, 217606, 217607, 217608, 217609, 217610, 217611, 217612, 217613, 217614, 217615, 217616, 217617, 217618, 217619, 217620, 217621, 217622, 217623, 217624, 217625, 217626) c6( ) c7(T, b, mO, aE, aW, aNJ, e, aT, aU, h, fr, Wm, i, hX); #c1(MCF2L) c2(XP_005268366) c3(guanine nucleotide exchange factor DBS isoform X4) c4(281750) c5(281751, 281752, 281753, 281754, 281755, 281756) c6( ) c7(T, b, mO, aE, aW, aNJ, e, aT, aU, h, fr, Wm, i, hX); #c1(MCF2L) c2(XP_005268373) c3(guanine nucleotide exchange factor DBS isoform X13) c4(281757) c5(281758, 281759, 281760, 281761, 281762, 281763, 281764, 281765, 281766, 281767, 281768) c6( ) c7(T, b, mO, aE, aW, aNJ, e, aT, aU, h, fr, Wm, i, hX); #c1(MCF2L) c2(XP_011535786) c3(guanine nucleotide exchange factor DBS isoform X2) c4(332993) c5( ) c6( ) c7(T, b, mO, aE, aW, aNJ, e, aT, aU, h, fr, Wm, i, hX); #c1(MCF2L) c2(XP_011535787) c3(guanine nucleotide exchange factor DBS isoform X3) c4(332994) c5( ) c6( ) c7(T, b, mO, aE, aW, aNJ, e, aT, aU, h, fr, Wm, i, hX); #c1(MCF2L) c2(XP_011535791) c3(guanine nucleotide exchange factor DBS isoform X8) c4(332995) c5(332996, 332997, 332998, 332999, 333000, 333001, 333002, 333003, 333004, 333005) c6( ) c7(T, b, mO, aE, aW, aNJ, e, aT, aU, h, fr, Wm, i, hX); #c1(MCF2L) c2(XP_011535795) c3(guanine nucleotide exchange factor DBS isoform X14) c4(333006, 333007) c5(333008, 333009, 333010, 333011, 333012) c6( ) c7(T, b, mO, aE, aW, aNJ, e, aT, aU, h, fr, Wm, i, hX); #c1(MCF2L2) c2(NP_055893) c3(probable guanine nucleotide exchange factor MCF2L2) c4(184247, 184248, 184249, 184250, 184251) c5(184252, 184253, 184254, 184255, 184256, 184257, 184258, 184259, 184260, 184261, 184262, 184263, 184264, 184265, 184266, 184267, 184268, 184269, 184270, 184271, 184272, 184273, 184274, 184275, 184276) c6( ) c7(bL, ccT, cZ, kl, A, eR, xZ, dd, hH); #c1(MCF2L2) c2(XP_011510889) c3(probable guanine nucleotide exchange factor MCF2L2 isoform X2) c4( ) c5(301352, 301353, 301354, 301355, 301356) c6( ) c7(bL, ccT, cZ, kl, A, eR, xZ, dd, hH); #c1(MCFD2) c2(NP_001164979) c3(multiple coagulation factor deficiency protein 2 isoform A precursor) c4(67182, 67183) c5(67184, 67185, 67186, 67187, 67188, 67189, 67190, 67191, 67192, 67193, 67194, 67195, 67196, 67197, 67198, 67199, 67200, 67201, 67202, 67203, 67204, 67205, 67206, 67207, 67208, 67209, 67210, 67211, 67212, 67213, 67214, 67215, 67216, 67217, 67218, 67219, 67220, 67221, 67222, 67223, 67224, 67225, 67226, 67227, 67228) c6(67229) c7(NU, aUK, wu, qh, acb, oY, dX, wm, bqA, ccU, aUC, bpU); #c1(MCFD2) c2(NP_001164981) c3(multiple coagulation factor deficiency protein 2 isoform B) c4( ) c5(67230, 67231, 67232, 67233, 67234, 67235, 67236, 67237, 67238, 67239, 67240, 67241, 67242, 67243) c6(67244, 67245, 67246) c7(NU, aUK, wu, qh, acb, oY, dX, wm, bqA, ccU, aUC, bpU); #c1(MCFD2) c2(NP_001164982) c3(multiple coagulation factor deficiency protein 2 isoform C) c4(67247, 67248) c5(67249, 67250, 67251, 67252, 67253, 67254, 67255, 67256, 67257, 67258, 67259) c6( ) c7(NU, aUK, wu, qh, acb, oY, dX, wm, bqA, ccU, aUC, bpU); #c1(MCHR1) c2(NP_005288) c3(melanin-concentrating hormone receptor 1) c4(154704, 154705) c5(154706, 154707, 154708, 154709, 154710, 154711, 154712, 154713, 154714, 154715, 154716, 154717, 154718) c6( ) c7(bL, mS, bS, v, ct, qj, mW, bK, K, mY, mV, mU, s, Y, cr, Z, cm, mZ, mX, cA, uJ, mT, pC); #c1(MCHR2) c2(NP_001035269) c3(melanin-concentrating hormone receptor 2) c4(32733) c5(32734, 32735, 32736, 32737, 32738, 32739, 32740, 32741, 32742, 32743, 32744, 32745, 32746, 32747) c6( ) c7(e, qQ, EQ, mS, v, afE, abb, aE, mW, ql, BJ, bK, qM, mY, he, kU, mV, cY, mU, s, Ih, Eg, mZ, mX, Bv, aLA, pJ, mT); #c1(MCIDAS) c2(NP_001177716) c3(multicilin) c4(72894) c5(72895, 72896, 72897, 72898, 72899, 72900) c6( ) c7(ak, sO, yy, aaw, PG, K, af, eu); #c1(MCM10) c2(NP_060988) c3(protein MCM10 homolog isoform 2) c4(198902, 198903) c5(198904, 198905, 198906, 198907, 198908, 198909, 198910, 198911, 198912, 198913, 198914, 198915, 198916) c6( ) c7(bL, T, ac, pN, if, e, aw, j, qN, it, eu); #c1(MCM10) c2(NP_877428) c3(protein MCM10 homolog isoform 1) c4(256802) c5(256803, 256804, 256805, 256806, 256807, 256808, 256809, 256810, 256811, 256812) c6( ) c7(bL, T, ac, pN, if, e, aw, j, qN, it, eu); #c1(MCM2) c2(NP_004517) c3(DNA replication licensing factor MCM2) c4(147136, 147137, 147138) c5(147139, 147140, 147141147142, 147143, 147144, 147145, 147146, 147147, 147148, 147149, 147150, 147151, 147152, 147153, 147154, 147155, 147156) c6( ) c7(bL, T, aGn, id, Uc, if, al, jh, fd, bB, n, fr, ci, qN, aql, hF, q, ad, er, ip, XX, aT, h, dL, K, pk, ae, jf, ayT, kl, B, s, hG, aW, Y, aJD, r, g, t, iK, bw, es, gk, bP, eM, bE, bkv, cj, k, m, bt, X); #c1(MCM3) c2(NP_001257401) c3(DNA replication licensing factor MCM3 isoform 2) c4(95344) c5(95345, 95346, 95347, 95348, 95349, 95350, 95351, 95352, 95353, 95354, 95355, 95356, 95357, 95358, 95359, 95360, 95361) c6( ) c7(ck, jf, NK, T, Dy, dB, Y, aT, h, ci, B, ip); #c1(MCM3) c2(NP_002379) c3(DNA replication licensing factor MCM3 isoform 1) c4(127970, 127971, 127972, 127973) c5(127974, 127975, 127976, 127977, 127978, 127979, 127980, 127981, 127982, 127983, 127984, 127985, 127986) c6( ) c7(ck, jf, NK, T, Dy, dB, Y, aT, h, ci, B, ip); #c1(MCM3AP) c2(XP_006724127) c3(germinal-center associated nuclear protein isoform X1) c4(295772, 295773, 295774) c5(295775, 295776, 295777, 295778, 295779, 295780, 295781, 295782, 295783, 295784, 295785, 295786, 295787, 295788, 295789, 295790, 295791, 295792, 295793, 295794, 295795, 295796) c6( ) c7(T, Y, eX, jh, eV, bU, eA); #c1(MCM4) c2(NP_877423) c3(DNA replication licensing factor MCM4) c4(256790, 256791) c5(256792, 256793, 256794, 256795, 256796, 256797, 256798, 256799, 256800, 256801) c6( ) c7(ck, jf, T, Dy, eM, bP, aX, if, oW, aT, cj, KN, fd, qN, g, ccV, ip); #c1(MCM4) c2(XP_005251291) c3(DNA replication licensing factor MCM4 isoform X1) c4( ) c5(270865, 270866, 270867, 270868, 270869, 270870) c6( ) c7(ck, jf, T, Dy, eM, bP, aX, if, oW, aT, cj, KN, fd, qN, g, ccV, ip); #c1(MCM5) c2(NP_006730) c3(DNA replication licensing factor MCM5) c4(167526, 167527) c5(167528, 167529, 167530, 167531, 167532, 167533, 167534, 167535, 167536, 167537, 167538, 167539) c6( ) c7(T, hd, akd, eL, aoA, cn, cj, aT, n, fd, dL, IQ, qN, hu, g, ae, X, ad, ip); #c1(MCM5) c2(XP_006724305) c3(DNA replication licensing factor MCM5 isoform X1) c4(295904, 295905) c5(295906, 295907, 295908, 295909, 295910, 295911, 295912, 295913, 295914, 295915, 295916, 295917, 295918) c6( ) c7(T, hd, akd, eL, aoA, cn, cj, aT, n, fd, dL, IQ, qN, hu, g, ae, X, ad, ip); #c1(MCM6) c2(NP_005906) c3(DNA replication licensing factor MCM6) c4(160263) c5(160264, 160265, 160266, 160267, 160268, 160269) c6( ) c7(es, aMa, aAS, aMb, jh, aT, fr, ci, t, ip); #c1(MCM7) c2(NP_005907) c3(DNA replication licensing factor MCM7 isoform 1) c4(160270, 160271, 160272, 160273, 160274) c5(160275, 160276, 160277, 160278, 160279, 160280, 160281, 160282, 160283, 160284, 160285, 160286, 160287, 160288, 160289, 160290, 160291, 160292, 160293, 160294) c6( ) c7(aJJ, T, id, Uc, if, al, jh, aA, bB, n, fd, fr, ci, qN, hF, iJ, q, ad, er, ip, XX, hd, aE, aT, h, dL, K, pk, ae, eL, jf, ayT, kl, s, hG, aW, ff, aJD, r, aF, en, cl, g, cm, bw, pb, bN, es, gk, Dy, eM, bP, bE, bkv, hr, cj, hL, YK, k, m, bt, B); #c1(MCM7) c2(XP_005250405) c3(DNA replication licensing factor MCM7 isoform X1) c4( ) c5(270291, 270292, 270293, 270294, 270295, 270296, 270297, 270298, 270299, 270300) c6( ) c7(aJJ, T, id, Uc, if, al, jh, aA, bB, n, fd, fr, ci, qN, hF, iJ, q, ad, er, ip, XX, hd, aE, aT, h, dL, K, pk, ae, eL, jf, ayT, kl, s, hG, aW, ff, aJD, r, aF, en, cl, g, cm, bw, pb, bN, es, gk, Dy, eM, bP, bE, bkv, hr, cj, hL, YK, k, m, bt, B); #c1(MCM8) c2(NP_001268449) c3(DNA helicase MCM8 isoform 1) c4(99944) c5(99945, 99946, 99947, 99948, 99949, 99950) c6( ) c7(nJ, y, Y, gv, ev); #c1(MCM8) c2(NP_001268450) c3(DNA helicase MCM8 isoform 3) c4(99951) c5(99952, 99953, 99954, 99955, 99956, 99957) c6( ) c7(nJ, y, Y, gv, ev); #c1(MCM8) c2(NP_001268451) c3(DNA helicase MCM8 isoform 4) c4(99958, 99959) c5(99960, 99961, 99962, 99963, 99964, 99965) c6( ) c7(nJ, y, Y, gv, ev); #c1(MCM8) c2(NP_877954) c3(DNA helicase MCM8 isoform 2) c4(257035) c5(257036, 257037, 257038, 257039, 257040, 257041) c6( ) c7(nJ, y, Y, gv, ev); #c1(MCM8) c2(XP_011527689) c3(DNA helicase MCM8 isoform X1) c4( ) c5(322611, 322612, 322613, 322614, 322615, 322616) c6( ) c7(nJ, y, Y, gv, ev); #c1(MCM9) c2(NP_060166) c3(DNA helicase MCM9 isoform 1) c4(194583, 194584, 194585, 194586) c5(194587, 194588, 194589, 194590, 194591, 194592, 194593, 194594, 194595, 194596, 194597, 194598) c6( ) c7(B); #c1(MCM9) c2(NP_694987) c3(DNA helicase MCM9 isoform 2) c4(245588) c5(245589, 245590, 245591, 245592, 245593, 245594, 245595, 245596, 245597, 245598, 245599, 245600, 245601, 245602, 245603, 245604, 245605, 245606) c6( ) c7(B); #c1(MCMBP) c2(NP_001243307) c3(mini-chromosome maintenance complex-binding protein isoform 2) c4(90402) c5(90403, 90404, 90405, 90406, 90407, 90408) c6( ) c7(oe); #c1(MCMBP) c2(NP_079110) c3(mini-chromosome maintenance complex-binding protein isoform 1) c4(217070) c5(217071, 217072, 217073, 217074, 217075, 217076) c6( ) c7(oe); #c1(MCOLN1) c2(NP_065394) c3(mucolipin-1) c4(204713, 204714) c5(204715, 204716, 204717, 204718, 204719, 204720, 204721, 204722, 204723, 204724, 204725, 204726) c6( ) c7(asp, Am, xs, cV, U, h, sH, Lq, beZ, aR); #c1(MCOLN3) c2(XP_011540041) c3(mucolipin-3 isoform X2) c4(338340, 338341) c5(338342, 338343) c6( ) c7(aQi); #c1(MCOLN3) c2(XP_011540042) c3(mucolipin-3 isoform X3) c4(338344) c5(338345, 338346, 338347, 338348, 338349, 338350, 338351, 338352, 338353, 338354) c6( ) c7(aQi); #c1(MCOLN3) c2(XP_011540043) c3(mucolipin-3 isoform X4) c4( ) c5(338355, 338356, 338357, 338358, 338359, 338360) c6( ) c7(aQi); #c1(MCPH1) c2(NP_001166045) c3(microcephalin isoform 2) c4(68129) c5( ) c6( ) c7(gV, T, dD, aC, ea, GC, j, oH, alQ, ci, nA, eg, AO, zo, eA, aE, ccW, aT, rz, fb, aij, aii, d, hG, qt, aW, WE, nO, g, QK, t, cm, bN, m); #c1(MCPH1) c2(NP_001166046) c3(microcephalin isoform 3) c4(68130) c5(68131, 68132, 68133, 68134, 68135, 68136) c6( ) c7(gV, T, dD, aC, ea, GC, j, oH, alQ, ci, nA, eq, AO, zo, eA, aE, ccW, aT, rz, fb, aij, aii, d, hG, qt, aW, WE, nO, g, QK, t, cm, bN, m); #c1(MCPH1) c2(NP_078872) c3(microcephalin isoform 1) c4(215854) c5(215855, 215856, 215857, 215858, 215859, 215860) c6( ) c7(gV, T, dD, aC, ea, GC, j, oH, alQ, ci, nA, eq, AO, zo, eA, aE, ccW, aT, rz, fb, aij, aii, d, hG, qt, aW, WE, nO, g, QK, t, cm, bN, m); #c1(MCPH1) c2(XP_011533061) c3(microcephalin isoform X5) c4( ) c5(329269, 329270, 329271, 329272, 329273, 329274) c6( ) c7(gV, T, dD, aC, ea, GC, j, oH, alQ, ci, nA, eq, AO, zo, eA, aE, ccW, aT, rz, fb, aij, aii, d, hG, qt, aW, WE, nO, g, QK, t, cm, bN, m); #c1(MCRS1) c2(NP_001012300) c3(microspherule protein 1 isoform 2) c4(24846, 24847) c5(24848, 24849, 24850, 24851, 24852, 24853) c6( ) c7(T, d, OW, eM, r, K, eA, f, bz, q); #c1(MCRS1) c2(NP_001265270) c3(microspherule protein 1 isoform 3) c4( ) c5(98089, 98090, 98091, 98092, 98093) c6( ) c7(T, d, OW, eM, r, K, eA, f, bz, q); #c1(MCRS1) c2(XP_005268629) c3(microspherule protein 1 isoform X1) c4(281970, 281971, 281972, 281973) c5(281974, 281975, 281976, 281977, 281978, 281979, 281980, 281981, 281982, 281983, 281984, 281985, 281986, 281987, 281988, 281989, 281990, 281991, 281992, 281993, 281994, 281995, 281996, 281997, 281998, 281999, 282000, 282001, 282002) c6( ) c7(T, d, OW, eM, r, K, eA, f, bz, q); #c1(MCTP1) c2(NP_001002796) c3(multiple C2 and transmembrane domain-containing protein 1 isoform S) c4(19601, 19602) c5(19603, 19604, 19605, 19606, 19607, 19608, 19609, 19610, 19611, 19612, 19613, 19614) c6( ) c7(aw, fq, bK); #c1(MCTP1) c2(NP_001284706) c3(multiple C2 and transmembrane domain-containing protein 1 isoform 3) c4(112358, 112359) c5(112360, 112361, 112362, 112363, 112364, 112365, 112366, 112367, 112368, 112369, 112370, 112371, 112372, 112373, 112374, 112375, 112376, 112377) c6( ) c7(aw, fq, bK); #c1(MCTP1) c2(NP_078993) c3(multiple C2 and transmembrane domain-containing protein 1 isoform L) c4(216459, 216460) c5(216461, 216462, 216463, 216464, 216465, 216466, 216467, 216468, 216469, 216470, 216471, 216472) c6( ) c7(aw, fq, bK); #c1(MCTP1) c2(XP_005272147) c3(multiple C2 and transmembrane domain-containing protein 1 isoform X11) c4(283730) c5( ) c6( ) c7(aw, fq, bK); #c1(MCTP2) c2(NP_001153115) c3(multiple C2 and transmembrane domain-containing protein 2 isoform 2) c4(60436) c5(60437, 60438, 60439, 60440, 60441, 60442) c6( ) c7(Kc, eR, Gp, aw, bO, v, j, Z, aY, fq, hH); #c1(MCTP2) c2(NP_001153116) c3(multiple C2 and transmembrane domain-containing protein 2 isoform 3) c4( ) c5(60443, 60444, 60445, 60446, 60447, 60448, 60449, 60450, 60451) c6( ) c7(Kc, eR, Gp, aw, bO, v, j, Z, aY, fq, hH); #c1(MCTP2) c2(NP_060819) c3(multiple C2 and transmembrane domain-containing protein 2 isoform 1) c4(197979) c5(197980, 197981, 197982, 197983, 197984, 197985) c6( ) c7(Kc, eR, Gp, aw, bO, v, j, Z, aY, fq, hH); #c1(MCTP2) c2(XP_011520072) c3(multiple C2 and transmembrane domain-containing protein 2 isoform X2) c4(314970) c5( ) c6( ) c7(Kc, eR, Gp, aw, bO, v, j, Z, aY, fq, hH); #c1(MCTP2) c2(XP_011520075) c3(multiple C2 and transmembrane domain-containing protein 2 isoform X3) c4(314971) c5(314972) c6( ) c7(Kc, eR, Gp, aw, bO, v, j, Z, aY, fq, hH); #c1(MCTP2) c2(XP_011520076) c3(multiple C2 and transmembrane domain-containing protein 2 isoform X4) c4( ) c5(314973, 314974, 314975, 314976, 314977, 314978) c6( ) c7(Kc, eR, Gp, aw, bO, v, j, Z, aY, fq, hH); #c1(MCTS1) c2(NP_001131026) c3(malignant T-cell-amplified sequence 1 isoform 2) c4(52538) c5(52539, 52540, 52541, 52542, 52543, 52544) c6( ) c7(T, fM, jh, fd, ci, eA, ad, mj, aT, DO, jy, K, hg, fb, ae, d, aW, eH, fe, eF, cm, bz, bo); #c1(MCTS1) c2(NP_054779) c3(malignant T-cell-amplified sequence 1 isoform 1) c4(177776) c5(177777, 177778, 177779, 177780, 177781, 177782) c6( ) c7(T, fM, jh, fd, ci, eA, ad, mj, aT, DO, jy, K, hg, fb, ae, d, aW, eH, fe, eF, cm, bz, bo); #c1(MCU) c2(NP_001257608) c3(calcium uniporter protein, mitochondrial isoform 2 precursor) c4(95510) c5(95511, 95512, 95513, 95514, 95515, 95516) c6( ) c7(T, ccX); #c1(MCU) c2(NP_001257609) c3(calcium uniporter protein, mitochondrial isoform 3) c4(95517) c5(95518, 95519, 95520, 95521, 95522, 95523) c6( ) c7(T, ccX); #c1(MCU) c2(NP_612366) c3(calcium uniporter protein, mitochondrial isoform 1 precursor) c4(236277) c5(236278, 236279, 236280, 236281, 236282, 236283) c6( ) c7(T, ccX); #c1(MCUR1) c2(NP_001026883) c3(mitochondrial calcium uniporter regulator 1) c4(29828) c5(29829, 29830, 29831, 29832, 29833, 29834) c6( ) c7(ey); #c1(MCUR1) c2(XP_011513104) c3(mitochondrial calcium uniporter regulator 1 isoform X1) c4(304826) c5(304827, 304828, 304829, 304830, 304831, 304832) c6( ) c7(ey); #c1(MDC1) c2(NP_055456) c3(mediator of DNA damage checkpoint protein 1) c4(181279, 181280) c5(181281, 181282, 181283, 181284, 181285, 181286, 181287, 181288, 181289, 181290, 181291, 181292, 181293, 181294, 181295, 181296, 181297, 181298, 181299, 181300, 181301, 181302, 181303, 181304) c6( ) c7(T, aC, eZ, cj, g, hH, ad); #c1(MDC1) c2(XP_005249549) c3(mediator of DNA damage checkpoint protein 1 isoform X4) c4( ) c5(269570, 269571, 269572, 269573, 269574, 269575, 269576, 269577, 269578, 269579, 269580, 269581, 269582, 269583, 269584, 269585, 269586, 269587, 269588, 269589, 269590, 269591, 269592, 269593, 269594, 269595, 269596, 269597, 269598, 269599, 269600, 269601, 269602, 269603, 269604, 269605, 269606, 269607, 269608, 269609, 269610, 269611, 269612, 269613, 269614, 269615, 269616, 269617, 269618, 269619, 269620, 269621, 269622, 269623, 269624, 269625, 269626, 269627, 269628, 269629, 269630, 269631, 269632, 269633, 269634, 269635, 269636, 269637, 269638, 269639, 269640, 269641, 269642, 269643, 269644, 269645, 269646, 269647, 269648, 269649, 269650, 269651, 269652, 269653, 269654, 269655, 269656) c6( ) c7(T, aC, eZ, cj, g, hH, ad); #c1(MDC1) c2(XP_005249555) c3(mediator of DNA damage checkpoint protein 1 isoform X9) c4(269657) c5(269658, 269659, 269660, 269661, 269662, 269663, 269664, 269665, 269666, 269667, 269668, 269669, 269670, 269671, 269672, 269673, 269674, 269675, 269676, 269677, 269678, 269679, 269680, 269681, 269682, 269683, 269684, 269685, 269686, 269687, 269688, 269689, 269690, 269691, 269692, 269693, 269694, 269695, 269696, 269697, 269698, 269699, 269700, 269701, 269702, 269703, 269704) c6( ) c7(T, aC, eZ, cj, g, hH, ad); #c1(MDC1) c2(XP_005275549) c3(mediator of DNA damage checkpoint protein 1 isoform X4) c4( ) c5(285613, 285614) c6( ) c7(T, aC, eZ, cj, g, hH, ad); #c1(MDC1) c2(XP_005275555) c3(mediator of DNA damage checkpoint protein 1 isoform X9) c4(285615) c5(285616, 285617, 285618, 285619, 285620, 285621, 285622, 285623, 285624, 285625, 285626, 285627) c6( ) c7(T, aC, eZ, cj, g, hH, ad); #c1(MDC1) c2(XP_005275686) c3(mediator of DNA damage checkpoint protein 1 isoform X4) c4(285689) c5(285690, 285691, 285692, 285693, 285694, 285695) c6( ) c7(T, aC, eZ, cj, g, hH, ad); #c1(MDC1) c2(XP_005275692) c3(mediator of DNA damage checkpoint protein 1 isoform X9) c4(285696) c5(285697, 285698, 285699, 285700, 285701, 285702, 285703) c6( ) c7(T, aC, eZ, cj, g, hH, ad); #c1(MDC1) c2(XP_011546255) c3(mediator of DNA damage checkpoint protein 1 isoform X3) c4(344937, 344938, 344939, 344940, 344941, 344942, 344943, 344944, 344945, 344946, 344947) c5(344948, 344949, 344950, 344951, 344952, 344953, 344954, 344955, 344956, 344957, 344958, 344959, 344960, 344961, 344962, 344963, 344964, 344965, 344966, 344967, 344968, 344969, 344970, 344971, 344972, 344973, 344974, 344975, 344976, 344977, 344978, 344979, 344980, 344981, 344982, 344983, 344984, 344985, 344986, 344987, 344988, 344989, 344990, 344991, 344992, 344993, 344994, 344995, 344996, 344997, 344998, 344999, 345000, 345001, 345002, 345003, 345004, 345005, 345006, 345007, 345008, 345009, 345010, 345011, 345012, 345013, 345014, 345015, 345016, 345017, 345018, 345019, 345020, 345021, 345022, 345023, 345024, 345025, 345026, 345027, 345028, 345029, 345030, 345031, 345032, 345033, 345034, 345035, 345036, 345037, 345038, 345039, 345040, 345041, 345042, 345043, 345044, 345045, 345046, 345047, 345048, 345049, 345050, 345051, 345052) c6( ) c7(T, aC, eZ, cj, g, hH, ad); #c1(MDC1) c2(XP_011546622) c3(mediator of DNA damage checkpoint protein 1 isoform X6) c4(345442, 345443) c5(345444, 345445, 345446, 345447, 345448, 345449, 345450, 345451, 345452, 345453) c6( ) c7(T, aC, eZ, cj, g, hH, ad); #c1(MDC1) c2(XP_011546808) c3(mediator of DNA damage checkpoint protein 1 isoform X6) c4(345700) c5(345701, 345702, 345703, 345704, 345705, 345706, 345707, 345708, 345709, 345710, 345711, 345712, 345713, 345714, 345715, 345716, 345717, 345718, 345719, 345720, 345721, 345722, 345723, 345724, 345725, 345726, 345727, 345728, 345729, 345730) c6( ) c7(T, aC, eZ, cj, g, hH, ad); #c1(MDFI) c2(NP_001287733) c3(myoD family inhibitor isoform 1) c4(112703, 112704, 112705, 112706, 112707) c5(112708, 112709, 112710, 112711, 112712, 112713, 112714, 112715, 112716, 112717, 112718, 112719, 112720, 112721, 112722, 112723, 112724, 112725, 112726, 112727, 112728, 112729, 112730, 112731, 112732, 112733, 112734, 112735, 112736, 112737, 112738, 112739, 112740, 112741, 112742, 112743, 112744, 112745) c6( ) c7(e); #c1(MDFIC) c2(NP_001159817) c3(myoD family inhibitor domain-containing protein isoform P32) c4(64792) c5(64793, 64794, 64795, 64796, 64797) c6( ) c7(abX); #c1(MDFIC) c2(NP_001159818) c3(myoD family inhibitor domain-containing protein isoform c) c4( ) c5(64798, 64799, 64800) c6( ) c7(abX); #c1(MDFIC) c2(NP_951038) c3(myoD family inhibitor domain-containing protein isoform P40) c4(261008, 261009) c5(261010, 261011, 261012, 261013, 261014, 261015) c6( ) c7(abX); #c1(MDGA1) c2(NP_705691) c3(MAM domain-containing glycosylphosphatidylinositol anchor protein 1 precursor) c4(246189, 246190) c5(246191, 246192, 246193, 246194, 246195, 246196, 246197, 246198, 246199, 246200, 246201, 246202) c6( ) c7(bK, bO); #c1(MDGA1) c2(XP_006715119) c3(MAM domain-containing glycosylphosphatidylinositol anchor protein 1 isoform X1) c4(288745) c5(288746, 288747, 288748, 288749, 288750, 288751) c6( ) c7(bK, bO); #c1(MDGA2) c2(NP_001106970) c3(MAM domain-containing glycosylphosphatidylinositol anchor protein 2 isoform 1 precursor) c4(42724, 42725) c5(42726, 42727, 42728, 42729, 42730, 42731, 42732, 42733, 42734, 42735, 42736, 42737) c6( ) c7(oe, eZ, akf, agJ, y, bN, Ef); #c1(MDGA2) c2(NP_878250) c3(MAM domain-containing glycosylphosphatidylinositol anchor protein 2 isoform 2) c4(257063) c5( ) c6( ) c7(oe, eZ, akf, agJ, y, bN, Ef); #c1(MDGA2) c2(XP_011534821) c3(MAM domain-containing glycosylphosphatidylinositol anchor protein 2 isoform X1) c4(331312) c5(331313, 331314, 331315, 331316, 331317, 331318, 331319, 331320, 331321, 331322) c6( ) c7(oe, eZ, akf, agJ, y, bN, Ef); #c1(MDGA2) c2(XP_011534825) c3(MAM domain-containing glycosylphosphatidylinositol anchor protein 2 isoform X5) c4( ) c5(331323) c6( ) c7(oe, eZ, akf, agJ, y, bN, Ef); #c1(MDGA2) c2(XP_011534827) c3(MAM domain-containing glycosylphosphatidylinositol anchor protein 2 isoform X7) c4( ) c5(331324, 331325, 331326, 331327, 331328, 331329) c6( ) c7(oe, eZ, akf, agJ, y, bN, Ef); #c1(MDH1) c2(NP_001186040) c3(malate dehydrogenase, cytoplasmic isoform 1) c4(76923) c5(76924, 76925, 76926, 76927, 76928, 76929) c6( ) c7(d, c, cz); #c1(MDH1) c2(NP_001186041) c3(malate dehydrogenase, cytoplasmic isoform 3) c4( ) c5(76930, 76931, 76932, 76933, 76934) c6( ) c7(d, c, cz); #c1(MDH1) c2(NP_005908) c3(malate dehydrogenase, cytoplasmic isoform 2) c4(160295, 160296) c5(160297, 160298, 160299, 160300, 160301, 160302, 160303, 160304) c6( ) c7(d, c, cz); #c1(MDH2) c2(NP_005909) c3(malate dehydrogenase, mitochondrial isoform 1 precursor) c4(160305) c5(160306, 160307, 160308, 160309, 160310, 160311) c6( ) c7(T, zQ, iE, xZ, aD, eu, aw, h, ci, zP, ae, cd, ad, FT); #c1(MDK) c2(NP_001257481) c3(midkine isoform b precursor) c4(95489) c5(95490, 95491, 95492, 95493, 95494, 95495, 95496, 95497) c6( ) c7(eW, cZ, T, if, aw, ht, aA, ajp, n, bB, ci, qN, q, ad, aDI, ai, dP, er, eA, b, ip, ot, aE, Db, SU, mj, iu, aeO, aT, h, cy, x, YB, dL, K, hP, dd, ae, af, eu, pl, eL, eN, jf, yo, d, aeR, s, vT, aW, ff, eH, r, kp, aF, aiz, en, as, eF, t, cm, bz, aZz, eK, hq, sS, wg, nM, eM, Ew, dB, bE, eD, X, hL, cj, Zn, m, k, i, y, B, ao, hS); #c1(MDK) c2(XP_011518418) c3(midkine isoform X1) c4(312396, 312397, 312398) c5(312399, 312400, 312401, 312402, 312403, 312404, 312405, 312406, 312407, 312408, 312409, 312410, 312411, 312412, 312413, 312414, 312415, 312416, 312417, 312418, 312419, 312420, 312421, 312422, 312423, 312424, 312425, 312426, 312427, 312428, 312429, 312430, 312431, 312432, 312433, 312434, 312435, 312436) c6( ) c7(eW, cZ, T, if, aw, ht, aA, ajp, n, bB, ci, qN, q, ad, aDI, ai, dP, er, eA, b, ip, ot, aE, Db, SU, mj, iu, aeO, aT, h, cy, x, YB, dL, K, hP, dd, ae, af, eu, pl, eL, eN, jf, yo, d, aeR, s, vT, aW, ff, eH, r, kp, aF, aiz, en, as, eF, t, cm, bz, aZz, eK, hq, sS, wg, nM, eM, Ew, dB, bE, eD, X, hL, cj, Zn, m, k, i, y, B, ao, hS); #c1(MDM1) c2(NP_001191957) c3(nuclear protein MDM1 isoform 4) c4(81894) c5(81895, 81896, 81897, 81898, 81899, 81900) c6( ) c7(aj, nw, bK, W, j); #c1(MDM1) c2(NP_001191958) c3(nuclear protein MDM1 isoform 3) c4(81901) c5(81902, 81903, 81904, 81905, 81906) c6( ) c7(aj, nw, bK, W, j); #c1(MDM1) c2(NP_059136) c3(nuclear protein MDM1 isoform 1) c4(193223) c5(193224, 193225, 193226, 193227, 193228, 193229) c6( ) c7(aj, nw, bK, W, j); #c1(MDM1) c2(NP_064513) c3(nuclear protein MDM1 isoform 2) c4(202816) c5(202817, 202818, 202819, 202820, 202821, 202822, 202823) c6( ) c7(aj, nw, bK, W, j); #c1(MDM2) c2(NP_001138809) c3(E3 ubiquitin-protein ligase Mdm2 isoform g) c4(57775, 57776) c5(57777, 57778, 57779, 57780, 57781, 57782, 57783, 57784, 57785, 57786, 57787, 57788) c6( ) c7(T, aC, aiH, jW, fR, pf, hV, ea, if, al, cdf, bB, fd, qj, ci, aJa, ip, x, bv, bHS, gJ, aE, Bc, aeO, Qk, ajv, ja, cda, bnt, K, hu, pk, eL, cp, eG, zQ, aW, aEI, Ls, az, hl, QB, CT, kt, Qm, g, as, eF, ve, cm, bw, ccZ, iP, y, fT, eM, nB, AM, iA, iT, vA, cj, PV, k, m, cE, iu, aIM, dD, gU, Qj, wu, sw, iB, ht, qy, n, fr, ct, Qh, qN, cde, co, Bl, jz, apS, Bj, aeX, bUP, h, eV, dL, Gw, Ha, dx, pl, cY, awV, FZ, TH, hQ, GA, aq, kp, yq, pm, mo, iN, Zj, op, oU, afb, ar, kT, iO, YE, bP, bbz, dB, hk, eD, PI, Qu, Vy, hL, hj, at, MW, azr, Qz, WL, Pr, B, it, fM, dA, yk, eX, aA, hy, C, bX, Qo, il, lu, q, eA, eJ, ccY, amg, Ig, hW, nv, qK, yg, aT, aHs, ae, ne, jf, Qr, vT, NE, nO, Y, Lf, iU, r, Io, en, bu, cl, t, iK, vk, ck, sS, cdd, kP, Dy, nM, iM, QG, au, im, zu, cdb, bt, rA, hS, On, gx, gV, kh, GI, id, Mb, atY, iW, jh, KO, bS, Gn, jE, eq, Fc, iJ, ad, kL, hX, qC, av, Tg, hd, F, ib, cdc, bjn, Db, iC, IC, hP, bwV, wm, fb, nJ, WW, d, BN, BO, hG, qt, je, ff, eH, yy, aeV, Ej, aF, iV, Z, iR, bz, es, gk, eU, RV, pc, zr, Ew, bE, amS, sG, Hs, QC, bC, Gu, aeH, X, rk, BA, pC); #c1(MDM2) c2(NP_001138811) c3(E3 ubiquitin-protein ligase Mdm2 isoform h) c4(57853, 57854) c5(57855, 57856, 57857, 57858, 57859, 57860, 57861, 57862, 57863, 57864, 57865, 57866) c6( ) c7(T, aC, aiH, jW, fR, pf, hV, ea, if, al, cdf, bB, fd, qj, ci, aJa, ip, x, bv, bHS, gJ, aE, Bc, aeO, Qk, ajv, ja, cda, bnt, K, hu, pk, eL, cp, eG, zQ, aW, aEI, Ls, az, hl, QB, CT, kt, Qm, g, as, eF, ve, cm, bw, ccZ, iP, y, fT, eM, nB, AM, iA, iT, vA, cj, PV, k, m, cE, iu, aIM, dD, gU, Qj, wu, sw, iB, ht, qy, n, fr, ct, Qh, qN, cdc, co, Bl, jz, apS, Bj, aeX, bUP, h, eV, dL, Gw, Ha, dx, pl, cY, awV, FZ, TH, hQ, GA, aq, kp, yq, pm, mo, iN, Zj, op, oU, afb, ar, kT, iO, YE, bP, bbz, dB, hk, eD, PI, Qu, Vy, hL, hj, at, MW, azr, Qz, WL, Pr, B, it, fM, dA, yk, eX, aA, hy, C, bX, Qo, il, lu, q, eA, eJ, ccY, amg, Ig, hW, nv, qK, yg, aT, aHs, ae, ne, jf, Qr, vT, NE, nO, Y, Lf, iU, r, Io, en, bu, cl, t, iK, vk, ck, sS, cdd, kP, Dy, nM, iM, QG, au, im, zu, cdb, bt, rA, hS, On, gx, gV, kh, GI, id, Mb, atY, iW, jh, KO, bS, Gn, jE, eq, Fc, iJ, ad, kL, hX, qC, av, Tg, hd, F, ib, cdc, bjn, Db, iC, IC, hP, bwV, wm, fb, nJ, WW, d, BN, BO, hG, qt, je, ff, eH, yy, aeV, Ej, aF, iV, Z, iR, bz, es, gk, eU, RV, pc, zr, Ew, bE, amS, sG, Hs, QC, bC, Gu, aeH, X, rk, BA, pC); #c1(MDM2) c2(NP_001138812) c3(E3 ubiquitin-protein ligase Mdm2 isoform i) c4(57867, 57868, 57869) c5(57870, 57871, 57872, 57873, 57874, 57875, 57876, 57877, 57878, 57879, 57880, 57881, 57882, 57883, 57884, 57885, 57886, 57887, 57888, 57889, 57890, 57891, 57892, 57893, 57894, 57895, 57896, 57897, 57898, 57899, 57900, 57901, 57902, 57903) c6( ) c7(T, aC, aiH, jW, fR, pf, hV, ea, if, al, cdf, bB, fd, qj, ci, aJa, ip, x, bv, bHS, gJ, aE, Bc, aeO, Qk, ajv, ja, cda, bnt, K, hu, pk, eL, cp, eG, zQ, aW, aEI, Ls, az, hl, QB, CT, kt, Qm, g, as, eF, ve, cm, bw, ccZ, iP, y, fT, eM, nB, AM, iA, iT, vA, cj, PV, k, m, cE, iu, aIM, dD, gU, Qj, wu, sw, iB, ht, qy, n, fr, ct, Qh, qN, cdc, co, Bl, jz, apS, Bj, aeX, bUP, h, eV, dL, Gw, Ha, dx, pl, cY, awV, FZ, TH, hQ, GA, aq, kp, yq, pm, mo, iN, Zj, op, oU, afb, ar, kT, iO, YE, bP, bbz, dB, hk, eD, PI, Qu, Vy, hL, hj, at, MW, azr, Qz, WL, Pr, B, it, fM, dA, yk, eX, aA, hy, C, bX, Qo, il, lu, q, eA, eJ, ccY, amg, Ig, hW, nv, qK, yg, aT, aHs, ae, ne, jf, Qr, vT, NE, nO, Y, Lf, iU, r, Io, en, bu, cl, t, iK, vk, ck, sS, cdd, kP, Dy, nM, iM, QG, au, im, zu, cdb, bt, rA, hS, On, gx, gV, kh, GI, id, Mb, atY, iW, jh, KO, bS, Gn, jE, eq, Fc, iJ, ad, kL, hX, qC, av, Tg, hd, F, ib, cdc, bjn, Db, iC, IC, hP, bwV, wm, fb, nJ, WW, d, BN, BO, hG, qt, je, ff, eH, yy, aeV, Ej, aF, iV, Z, iR, bz, es, gk, eU, RV, pc, zr, Ew, bE, amS, sG, Hs, QC, bC, Gu, aeH, X, rk, BA, pC); #c1(MDM2) c2(NP_001265391) c3(E3 ubiquitin-protein ligase Mdm2 isoform 1) c4(98455, 98456, 98457) c5(98458, 98459, 98460, 98461, 98462, 98463, 98464, 98465, 98466, 98467, 98468, 98469, 98470, 98471, 98472, 98473, 98474, 98475, 98476, 98477, 98478, 98479, 98480, 98481, 98482, 98483) c6( ) c7(T, aC, aiH, jW, fR, pf, hV, ea, if, al, cdf, bB, fd, qj, ci, aJa, ip, x, bv, bHS, gJ, aE, Bc, aeO, Qk, ajv, ja, cda, bnt, K, hu, pk, eL, cp, eG, zQ, aW, aEI, Ls, az, hl, QB, CT, kt, Qm, g, as, eF, ve, cm, bw, ccZ, iP, y, fT, eM, nB, AM, iA, iT, vA, cj, PV, k, m, cE, iu, aIM, dD, gU, Qj, wu, sw, iB, ht, qy, n, fr, ct, Qh, qN, cdc, co, Bl, jz, apS, Bj, aeX, bUP, h, eV, dL, Gw, Ha, dx, pl, cY, awV, FZ, TH, hQ, GA, aq, kp, yq, pm, mo, iN, Zj, op, oU, afb, ar, kT, iO, YE, bP, bbz, dB, hk, eD, PI, Qu, Vy, hL, hj, at, MW, azr, Qz, WL, Pr, B, it, fM, dA, yk, eX, aA, hy, C, bX, Qo, il, lu, q, eA, eJ, ccY, amg, Ig, hW, nv, qK, yg, aT, aHs, ae, ne, jf, Qr, vT, NE, nO, Y, Lf, iU, r, Io, en, bu, cl, t, iK, vk, ck, sS, cdd, kP, Dy, nM, iM, QG, au, im, zu, cdb, bt, rA, hS, On, gx, gV, kh, GI, id, Mb, atY, iW, jh, KO, bS, Gn, jE, eq, Fc, iJ, ad, kL, hX, qC, av, Tg, hd, F, ib, cdc, bjn, Db, iC, IC, hP, bwV, wm, fb, nJ, WW, d, BN, BO, hG, qt, je, ff, eH, yy, aeV, Ej, aF, iV, Z, iR, bz, es, gk, eU, RV, pc, zr, Ew, bE, amS, sG, Hs, QC, bC, Gu, aeH, X, rk, BA, pC); #c1(MDM2) c2(NP_002383) c3(E3 ubiquitin-protein ligase Mdm2 isoform a) c4(128001, 128002, 128003, 128004, 128005) c5(128006, 128007, 128008, 128009, 128010, 128011, 128012, 128013, 128014, 128015, 128016, 128017, 128018, 128019) c6( ) c7(T, aC, aiH, jW, fR, pf, hV, ea, if, al, cdf, bB, fd, qj, ci, aJa, ip, x, bv, bHS, gJ, aE, Bc, aeO, Qk, ajv, ja, cda, bnt, K, hu, pk, eL, cp, eG, zQ, aW, aEI, Ls, az, hl, QB, CT, kt, Qm, g, as, eF, ve, cm, bw, ccZ, iP, y, fT, eM, nB, AM, iA, iT, vA, cj, PV, k, m, cE, iu, aIM, dD, gU, Qj, wu, sw, iB, ht, qy, n, fr, ct, Qh, qN, cdc, co, Bl, jz, apS, Bj, aeX, bUP, h, eV, dL, Gw, Ha, dx, pl, cY, awV, FZ, TH, hQ, GA, aq, kp, yq, pm, mo, iN, Zj, op, oU, afb, ar, kT, iO, YE, bP, bbz, dB, hk, eD, PI, Qu, Vy, hL, hj, at, MW, azr, Qz, WL, Pr, B, it, fM, dA, yk, eX, aA, hy, C, bX, Qo, il, lu, q, eA, eJ, ccY, amg, Ig, hW, nv, qK, yg, aT, aHs, ae, ne, jf, Qr, vT, NE, nO, Y, Lf, iU, r, Io, en, bu, cl, t, iK, vk, ck, sS, cdd, kP, Dy, nM, iM, QG, au, im, zu, cdb, bt, rA, hS, On, gx, gV, kh, GI, id, Mb, atY, iW, jh, KO, bS, Gn, jE, eq, Fc, iJ, ad, kL, hX, qC, av, Tg, hd, F, ib, cdc, bjn, Db, iC, IC, hP, bwV, wm, fb, nJ, WW, d, BN, BO, hG, qt, je, ff, eH, yy, aeV, Ej, aF, iV, Z, iR, bz, es, gk, eU, RV, pc, zr, Ew, bE, amS, sG, Hs, QC, bC, Gu, aeH, X, rk, BA, pC); #c1(MDM2) c2(XP_005268929) c3(E3 ubiquitin-protein ligase Mdm2 isoform X1) c4( ) c5(282197, 282198, 282199, 282200, 282201, 282202, 282203, 282204, 282205, 282206, 282207, 282208, 282209, 282210, 282211, 282212) c6( ) c7(T, aC, aiH, jW, fR, pf, hV, ea, if, al, cdf, bB, fd, qj, ci, aJa, ip, x, bv, bHS, gJ, aE, Bc, aeO, Qk, ajv, ja, cda, bnt, K, hu, pk, eL, cp, eG, zQ, aW, aEI, Ls, az, hl, QB, CT, kt, Qm, g, as, eF, ve, cm, bw, ccZ, iP, y, fT, eM, nB, AM, iA, iT, vA, cj, PV, k, m, cE, iu, aIM, dD, gU, Qj, wu, sw, iB, ht, qy, n, fr, ct, Qh, qN, cdc, co, Bl, jz, apS, Bj, aeX, bUP, h, eV, dL, Gw, Ha, dx, pl, cY, awV, FZ, TH, hQ, GA, aq, kp, yq, pm, mo, iN, Zj, op, oU, afb, ar, kT, iO, YE, bP, bbz, dB, hk, eD, PI, Qu, Vy, hL, hj, at, MW, azr, Qz, WL, Pr, B, it, fM, dA, yk, eX, aA, hy, C, bX, Qo, il, lu, q, eA, eJ, ccY, amg, Ig, hW, nv, qK, yg, aT, aHs, ae, ne, jf, Qr, vT, NE, nO, Y, Lf, iU, r, Io, en, bu, cl, t, iK, vk, ck, sS, cdd, kP, Dy, nM, iM, QG, au, im, zu, cdb, bt, rA, hS, On, gx, gV, kh, GI, id, Mb, atY, iW, jh, KO, bS, Gn, jE, eq, Fc, iJ, ad, kL, hX, qC, av, Tg, hd, F, ib, cdc, bjn, Db, iC, IC, hP, bwV, wm, fb, nJ, WW, d, BN, BO, hG, qt, je, ff, eH, yy, aeV, Ej, aF, iV, Z, iR, bz, es, gk, eU, RV, pc, zr, Ew, bE, amS, sG, Hs, QC, bC, Gu, aeH, X, rk, BA, pC); #c1(MDM2) c2(XP_006719462) c3(E3 ubiquitin-protein ligase Mdm2 isoform X2) c4(292492) c5( ) c6( ) c7(T, aC, aiH, jW, fR, pf, hV, ea, if, al, cdf, bB, fd, qj, ci, aJa, ip, x, bv, bHS, gJ, aE, Bc, aeO, Qk, ajv, ja, cda, bnt, K, hu, pk, eL, cp, eG, zQ, aW, aEI, Ls, az, hl, QB, CT, kt, Qm, g, as, eF, ve, cm, bw, ccZ, iP, y, fT, eM, nB, AM, iA, iT, vA, cj, PV, k, m, cE, iu, aIM, dD, gU, Qj, wu, sw, iB, ht, qy, n, fr, ct, Qh, qN, cdc, co, Bl, jz, apS, Bj, aeX, bUP, h, eV, dL, Gw, Ha, dx, pl, cY, awV, FZ, TH, hQ, GA, aq, kp, yq, pm, mo, iN, Zj, op, oU, afb, ar, kT, iO, YE, bP, bbz, dB, hk, eD, PI, Qu, Vy, hL, hj, at, MW, azr, Qz, WL, Pr, B, it, fM, dA, yk, eX, aA, hy, C, bX, Qo, il, lu, q, eA, eJ, ccY, amg, Ig, hW, nv, qK, yg, aT, aHs, ae, ne, jf, Qr, vT, NE, nO, Y, Lf, iU, r, Io, en, bu, cl, t, iK, vk, ck, sS, cdd, kP, Dy, nM, iM, QG, au, im, zu, cdb, bt, rA, hS, On, gx, gV, kh, GI, id, Mb, atY, iW, jh, KO, bS, Gn, jE, eq, Fc, iJ, ad, kL, hX, qC, av, Tg, hd, F, ib, cdc, bjn, Db, iC, IC, hP, bwV, wm, fb, nJ, WW, d, BN, BO, hG, qt, je, ff, eH, yy, aeV, Ej, aF, iV, Z, iR, bz, es, gk, eU, RV, pc, zr, Ew, bE, amS, sG, Hs, QC, bC, Gu, aeH, X, rk, BA, pC); #c1(MDM2) c2(XP_006719463) c3(E3 ubiquitin-protein ligase Mdm2 isoform X3) c4(292493) c5( ) c6( ) c7(T, aC, aiH, jW, fR, pf, hV, ea, if, al, cdf, bB, fd, qj, ci, aJa, ip, x, bv, bHS, gJ, aE, Bc, aeO, Qk, ajv, ja, cda, bnt, K, hu, pk, eL, cp, eG, zQ, aW, aEI, Ls, az, hl, QB, CT, kt, Qm, g, as, eF, ve, cm, bw, ccZ, iP, y, fT, eM, nB, AM, iA, iT, vA, cj, PV, k, m, cE, iu, aIM, dD, gU, Qj, wu, sw, iB, ht, qy, n, fr, ct, Qh, qN, cdc, co, Bl, jz, apS, Bj, aeX, bUP, h, eV, dL, Gw, Ha, dx, pl, cY, awV, FZ, TH, hQ, GA, aq, kp, yq, pm, mo, iN, Zj, op, oU, afb, ar, kT, iO, YE, bP, bbz, dB, hk, eD, PI, Qu, Vy, hL, hj, at, MW, azr, Qz, WL, Pr, B, it, fM, dA, yk, eX, aA, hy, C, bX, Qo, il, lu, q, eA, eJ, ccY, amg, Ig, hW, nv, qK, yg, aT, aHs, ae, ne, jf, Qr, vT, NE, nO, Y, Lf, iU, r, Io, en, bu, cl, t, iK, vk, ck, sS, cdd, kP, Dy, nM, iM, QG, au, im, zu, cdb, bt, rA, hS, On, gx, gV, kh, GI, id, Mb, atY, iW, jh, KO, bS, Gn, jE, eg, Fc, iJ, ad, kL, hX, qC, av, Tg, hd, F, ib, cdc, bjn, Db, iC, IC, hP, bwV, wm, fb, nJ, WW, d, BN, BO, hG, qt, je, ff, eH, yy, aeV, Ej, aF, iV, Z, iR, bz, es, gk, eU, RV, pc, zr, Ew, bE, amS, sG, Hs, QC, bC, Gu, aeH, X, rk, BA, PC); #c1(MDM4) c2(NP_001191100) c3(protein Mdm4 isoform 2) c4(80980, 80981) c5(80982, 80983, 80984, 80985, 80986, 80987, 80988, 80989, 80990, 80991, 80992, 80993) c6( ) c7(T, bO, fd, bB, ci, x, bv, aE, K, pk, bc, cp, aW, g, as, eF, kJ, ir, cm, eM, nB, cj, m, k, gn, ik, iB, n, fr, ft, kl, kH, h, dL, ia, hQ, GA, aq, bP, dB, hR, MW, it, B, aA, hy, j, q, er, eA, cF, aT, ae, iU, Y, ev, r, en, t, iK, hY, ck, iM, kP, Dy, ac, au, bt, ao, kG, hS, ha, jh, hF, iJ, ad, hd, ib, d, BN, je, ff, eH, kD, aF, bz, bE, ne); #c1(MDM4) c2(NP_001191101) c3(protein Mdm4 isoform 3) c4(80994) c5(80995, 80996, 80997, 80998, 80999, 81000) c6( ) c7(T, bO, fd, bB, ci, x, bv, aE, K, pk, bc, cp, aW, g, as, eF, kJ, ir, cm, eM, nB, cj, m, k, gn, ik, iB, n, fr, ft, kl, kH, h, dL, ia, hQ, GA, aq, bP, dB, hR, MW, it, B, aA, hy, j, q, er, eA, cF, aT, ae, iU, Y, ev, r, en, t, iK, hY, ck, iM, kP, Dy, ac, au, bt, ao, kG, hS, ha, jh, hF, iJ, ad, hd, ib, d, BN, je, ff, eH, kD, aF, bz, bE, ne); #c1(MDM4) c2(NP_001265446) c3(protein Mdm4 isoform 5) c4( ) c5(98601, 98602, 98603, 98604, 98605, 98606) c6( ) c7(T, bO, fd, bB, ci, x, bv, aE, K, pk, bc, cp, aW, g, as, eF, kJ, ir, cm, eM, nB, cj, m, k, gn, ik, iB, n, fr, ft, kl, kH, h, dL, ia, hQ, GA, aq, bP, dB, hR, MW, it, B, aA, hy, j, q, er, eA, cF, aT, ae, iU, Y, ev, r, en, t, iK, hY, ck, iM, kP, Dy, ac, au, bt, ao, kG, hS, ha, jh, hF, iJ, ad, hd, ib, d, BN, je, ff, eH, kD, aF, bz, bE, ne); #c1(MDM4) c2(NP_002384) c3(protein Mdm4 isoform 1) c4(128020, 128021) c5(128022, 128023, 128024, 128025, 128026, 128027, 128028, 128029) c6( ) c7(T, bO, fd, bB, ci, x, bv, aE, K, pk, bc, cp, aW, g, as, eF, kJ, ir, cm, eM, nB, cj, m, k, gn, ik, iB, n, fr, ft, kl, kH, h, dL, ia, hQ, GA, aq, bP, dB, hR, MW, it, B, aA, hy, j, q, er, eA, cF, aT, ae, iU, Y, ev, r, en, t, iK, hY, ck, iM, kP, Dy, ac, au, bt, ao, kG, hS, ha, jh, hF, iJ, ad, hd, ib, d, BN, je, ff, eH, kD, aF, bz, bE, ne); #c1(MDM4) c2(XP_011507867) c3(protein Mdm4 isoform X3) c4(298043) c5( ) c6( ) c7(T, bO, fd, bB, ci, x, bv, aE, K, pk, bc, cp, aW, g, as, eF, kJ, ir, cm, eM, nB, cj, m, k, gn, ik, iB, n, fr, ft, kl, kH, h, dL, ia, hQ, GA, aq, bP, dB, hR, MW, it, B, aA, hy, j, q, er, eA, cF, aT, ae, iU, Y, ev, r, en, t, iK, hY, ck, iM, kP, Dy, ac, au, bt, ao, kG, hS, ha, jh, hF, iJ, ad, hd, ib, d, BN, je, ff, eH, kD, aF, bz, bE, ne); #c1(MDM4) c2(XP_011507868) c3(protein Mdm4 isoform X4) c4(298044) c5(298045, 298046, 298047, 298048, 298049, 298050, 298051, 298052, 298053, 298054, 298055) c6( ) c7(T, bO, fd, bB, ci, x, bv, aE, K, pk, bc, cp, aW, g, as, eF, kJ, ir, cm, eM, nB, cj, m, k, gn, ik, iB, n, fr, ft, kl, kH, h, dL, ia, hQ, GA, aq, bP, dB, hR, MW, it, B, aA, hy, j, q, er, eA, cF, aT, ae, iU, Y, ev, r, en, t, iK, hY, ck, iM, kP, Dy, ac, au, bt, ao, kG, hS, ha, jh, hF, iJ, ad, hd, ib, d, BN, je, ff, eH, kD, aF, bz, bE, ne); #c1(MDM4) c2(XP_011507869) c3(protein Mdm4 isoform X5) c4(298056) c5(298057, 298058, 298059, 298060, 298061, 298062) c6( ) c7(T, bO, fd, bB, ci, x, bv, aE, K, pk, bc, cp, aW, g, as, eF, kJ, ir, cm, eM, nB, cj, m, k, gn, ik, iB, n, fr, ft, kl, kH, h, dL, ia, hQ, GA, aq, bP, dB, hR, MW, it, B, aA, hy, j, q, er, eA, cF, aT, ae, iU, Y, ev, r, en, t, iK, hY, ck, iM, kP, Dy, ac, au, bt, ao, kG, hS, ha, jh, hF, iJ, ad, hd, ib, d, BN, je, ff, eH, kD, aF, bz, bE, ne); #c1(MDM4) c2(XP_011507870) c3(protein Mdm4 isoform X1) c4(298063) c5(298064, 298065, 298066, 298067, 298068) c6( ) c7(T, bO, fd, bB, ci, x, bv, aE, K, pk, bc, cp, aW, g, as, eF, kJ, ir, cm, eM, nB, cj, m, k, gn, ik, iB, n, fr, ft, kl, kH, h, dL, ia, hQ, GA, aq, bP, dB, hR, MW, it, B, aA, hy, j, q, er, eA, cF, aT, ae, iU, Y, ev, r, en, t, iK, hY, ck, iM, kP, Dy, ac, au, bt, ao, kG, hS, ha, jh, hF, iJ, ad, hd, ib, d, BN, je, ff, eH, kD, aF, bz, bE, ne); #c1(ME1) c2(NP_002386) c3(NADP-dependent malic enzyme) c4(128037, 128038) c5(128039, 128040, 128041, 128042, 128043, 128044, 128045) c6( ) c7(bL, ae, ix, d, eM, Qu, aW, Y, ff, aT, fe, aiL, v, eA, en, as, bz, B, ad); #c1(ME1) c2(XP_011534138) c3(NADP-dependent malic enzyme isoform X1) c4(330417, 330418) c5(330419, 330420, 330421, 330422, 330423, 330424, 330425, 330426, 330427, 330428, 330429, 330430, 330431, 330432, 330433, 330434, 330435) c6( ) c7(bL, ae, ix, d, eM, Qu, aW, Y, ff, aT, fe, aiL, v, eA, en, as, bz, B, ad); #c1(ME2) c2(NP_001161807) c3(NAD-dependent malic enzyme, mitochondrial isoform 2 precursor) c4(66043) c5(66044, 66045, 66046, 66047, 66048, 66049) c6( ) c7(ck, Cq, VR, Y, fe, gl, iD, bK, hg, ey, as, ae, ad); #c1(ME2) c2(NP_002387) c3(NAD-dependent malic enzyme, mitochondrial isoform 1 precursor) c4(128046) c5(128047, 128048, 128049, 128050, 128051, 128052) c6( ) c7(ck, Cq, VR, Y, fe, gl, iD, bK, hg, ey, as, ae, ad); #c1(ME3) c2(NP_001155058) c3(NADP-dependent malic enzyme, mitochondrial) c4(61398, 61399, 61400, 61401, 61402, 61403, 61404, 61405) c5(61406, 61407, 61408, 61409, 61410, 61411, 61412, 61413, 61414, 61415, 61416, 61417, 61418, 61419, 61420, 61421, 61422, 61423, 61424, 61425) c6( ) c7(fe, Y, ae, ad, as); #c1(ME3) c2(XP_011543037) c3(NADP-dependent malic enzyme, mitochondrial isoform X2) c4(341783) c5(341784, 341785, 341786, 341787, 341788, 341789) c6( ) c7(fe, Y, ae, ad, as); #c1(ME3) c2(XP_011543038) c3(NADP-dependent malic enzyme, mitochondrial isoform X3) c4( ) c5(341790, 341791, 341792, 341793, 341794, 341795, 341796, 341797, 341798, 341799, 341800, 341801, 341802, 341803, 341804, 341805, 341806, 341807, 341808, 341809, 341810, 341811, 341812, 341813, 341814, 341815, 341816, 341817, 341818, 341819, 341820, 341821, 341822, 341823, 341824, 341825) c6( ) c7(fe, Y, ae, ad, as); #c1(MEA1) c2(NP_055438) c3(male-enhanced antigen 1) c4(181133) c5(181134, 181135, 181136, 181137, 181138, 181139) c6( ) c7(nv, T); #c1(MECOM) c2(NP_001098547) c3(MDS1 and EVI1 complex locus protein EVI1 isoform a) c4(41358) c5(41359, 41360, 41361, 41362, 41363, 41364, 41365, 41366, 41367, 41368, 41369, 41370, 41371, 41372, 41373) c6( ) c7(T, os, gp, oe, oA, bs, bB, it, oZ, hF, pd, q, br, cd, eA, iC, x, pN, aEX, oW, aT, h, dz, hn, K, jj, pq, iU, et, iZ, aW, ff, gK, r, kp, en, cl, pm, t, bw, ck, ou, bP, c, eM, bE, iT, eB, cj, wR, dW, oX, m, k, bt, kS, X); #c1(MECOM) c2(NP_001157471) c3(MDS1 and EVI1 complex locus protein EVI1 isoform d) c4(62230, 62231) c5( ) c6( ) c7(T, os, gp, oe, oA, bs, bB, it, oZ, hF, pd, q, br, cd, eA, iC, x, pN, aEX, oW, aT, h, dz, hn, K, jj, pq, iU, et, iZ, aW, ff, gK, r, kp, en, cl, pm, t, bw, ck, ou, bP, c, eM, bE, iT, eB, cj, wR, dW, oX, m, k, bt, kS, X); #c1(MECOM) c2(NP_001157472) c3(MDS1 and EVI1 complex locus protein EVI1 isoform e) c4(62232, 62233, 62234, 62235) c5(62236, 62237, 62238, 62239, 62240, 62241, 62242, 62243, 62244, 62245) c6( ) c7(T, os, gp, oe, oA, bs, bB, it, oZ, hF, pd, q, br, cd, eA, iC, x, pN, aEX, oW, aT, h, dz, hn, K, jj, pq, iU, et, iZ, aW, ff, gK, r, kp, en, cl, pm, t, bw, ck, ou, bP, c, eM, bE, iT, eB, cj, wR, dW, oX, m, k, bt, kS, X); #c1(MECOM) c2(NP_001192123) c3(MDS1 and EVI1 complex locus protein EVI1 isoform b) c4(81924) c5(81925, 81926, 81927, 81928, 81929, 81930, 81931, 81932) c6( ) c7(T, os, gp, oe, oA, bs, bB, it, oZ, hF, pd, q, br, cd, eA, iC, x, pN, aEX, oW, aT, h, dz, hn, K, jj, pq, iU, et, iZ, aW, ff, gK, r, kp, en, cl, pm, t, bw, ck, ou, bP, c, eM, bE, iT, eB, cj, wR, dW, oX, m, k, bt, kS, X); #c1(MECOM) c2(NP_004982) c3(MDS1 and EVI1 complex locus protein EVI1 isoform c) c4(151592) c5(151593, 151594, 151595) c6( ) c7(T, os, gp, oe, oA, bs, bB, it, oZ, hF, pd, q, br, cd, eA, iC, x, pN, aEX, oW, aT, h, dz, hn, K, jj, pq, iU, et, iZ, aW, ff, gK, r, kp, en, cl, pm, t, bw, ck, ou, bP, c, eM, bE, iT, eB, cj, wR, dW, oX, m, k, bt, kS, X); #c1(MECOM) c2(XP_005247270) c3(MDS1 and EVI1 complex locus protein EVI1 isoform X3) c4( ) c5(267698, 267699, 267700, 267701, 267702, 267703, 267704, 267705, 267706, 267707, 267708, 267709) c6( ) c7(T, os, gp, oe, oA, bs, bB, it, oZ, hF, pd, q, br, cd, eA, iC, x, pN, aEX, oW, aT, h, dz, hn, K, jj, pq, iU, et, iZ, aW, ff, gK, r, kp, en, cl, pm, t, bw, ck, ou, bP, c, eM, bE, iT, eB, cj, wR, dW, oX, m, k, bt, kS, X); #c1(MECOM) c2(XP_005247272) c3(MDS1 and EVI1 complex locus protein EVI1 isoform X5) c4(267710) c5(267711, 267712, 267713, 267714, 267715, 267716, 267717, 267718) c6( ) c7(T, os, gp, oe, oA, bs, bB, it, oZ, hF, pd, q, br, cd, eA, iC, x, pN, aEX, oW, aT, h, dz, hn, K, jj, pq, iU, et, iZ, aW, ff, gK, r, kp, en, cl, pm, t, bw, ck, ou, bP, c, eM, bE, iT, eB, cj, wR, dW, oX, m, k, bt, kS, X); #c1(MECOM) c2(XP_005247283) c3(MDS1 and EVI1 complex locus protein EVI1 isoform X10) c4( ) c5(267719, 267720, 267721, 267722, 267723, 267724, 267725, 267726, 267727, 267728, 267729, 267730, 267731, 267732, 267733, 267734, 267735, 267736, 267737, 267738, 267739, 267740, 267741, 267742, 267743, 267744) c6( ) c7(T, os, gp, oe, oA, bs, bB, it, oZ, hF, pd, q, br, cd, eA, iC, x, pN, aEX, oW, aT, h, dz, hn, K, jj, pq, iU, et, iZ, aW, ff, gK, r, kp, en, cl, pm, t, bw, ck, ou, bP, c, eM, bE, iT, eB, cj, wR, dW, oX, m, k, bt, kS, X); #c1(MECOM) c2(XP_011510848) c3(MDS1 and EVI1 complex locus protein EVI1 isoform X6) c4(301303) c5(301304) c6( ) c7(T, os, gp, oe, oA, bs, bB, it, oZ, hF, pd, q, br, cd, eA, iC, x, pN, aEX, oW, aT, h, dz, hn, K, jj, pq, iU, et, iZ, aW, ff, gK, r, kp, en, cl, pm, t, bw, ck, ou, bP, c, eM, bE, iT, eB, cj, wR, dW, oX, m, k, bt, kS, X); #c1(MECP2) c2(NP_001104262) c3(methyl-CPG-binding protein 2 isoform 2) c4(42083) c5(42084, 42085, 42086, 42087, 42088) c6( ) c7(T, ahc, fd, amj, aR, dE, aVA, dV, aU, amA, aVB, aW, Az, apn, vs, Ku, cm, eM, cdi, Iq, cdm, cdn, Kk, n, ct, nA, rc, bdO, ask, he, on, cC, Fn, Cw, QK, hq, cdg, bvv, agl, fL, Pr, B, fG, Nt, aA, il, q, eJ, MR, hb, jZ, aT, rz, ae, afy, NE, oV, r, cu, bu, bQ, f, xw, pb, bN, Qi, cdk, wR, Fl, id, ha, cdh, cdj, bS, mC, xt, ad, hX, av, I, afm, nd, Im, cx, aeQ, aqa, alW, VX, eZ, nf, aF, ys, Z, Kp, bz, dr, all, LB, Bv, agX, pK, y, cdl, jr); #c1(MECP2) c2(NP_004983) c3(methyl-CPG-binding protein 2 isoform 1) c4(151596, 151597, 151598, 151599) c5(151600, 151601, 151602, 151603, 151604, 151605, 151606, 151607, 151608, 151609, 151610, 151611, 151612, 151613, 151614, 151615, 151616, 151617, 151618, 151619, 151620, 151621, 151622, 151623, 151624, 151625) c6( ) c7(T, ahc, fd, amj, aR, dE, aVA, dV, aU, amA, aVB, aW, Az, apn, vs, Ku, cm, eM, cdi, Iq, cdm, cdn, Kk, n, ct, nA, rc, bdO, ask, he, on, cC, Fn, Gw, QK, hq, cdg, bw, agl, fL, Pr, B, fG, Nt, aA, il, q, eJ, MR, hb, jZ, aT, rz, ae, afy, NE, oV, r, cu, bu, bQ, f, xw, pb, bN, Qi, cdk, wR, Fl, id, ha, cdh, cdj, bS, mC, xt, ad, hX, av, I, afm, nd, Im, cx, aeQ, aqa, alW, VX, eZ, nf, aF, ys, Z, Kp, bz, dr, all, LB, Bv, agX, pK, y, cdl, jr); #c1(MED1) c2(NP_004765) c3(mediator of RNA polymerase II transcription subunit 1) c4(149408, 149409) c5(149410, 149411, 149412, 149413, 149414, 149415, 149416) c6( ) c7(T, ha, aA, bB, iJ, q, ad, aDF, dP, iu, aE, ds, aT, ae, dx, jf, iF, aW, Y, r, aF, g, t, axp, eM, mg, m, bt, B); #c1(MED1) c2(XP_006722020) c3(mediator of RNA polymerase II transcription subunit 1 isoform X2) c4( ) c5(294553, 294554, 294555, 294556, 294557, 294558) c6( ) c7(T, ha, aA, bB, iJ, q, ad, aDF, dP, iu, aE, ds, aT, ae, dx, jf, iF, aW, Y, r, aF, g, t, axp, eM, mg, m, bt, B); #c1(MED12) c2(NP_005111) c3(mediator of RNA polymerase II transcription subunit 12) c4(152972) c5(152973, 152974, 152975, 152976, 152977, 152978, 152979, 152980, 152981, 152982, 152983, 152984, 152985) c6( ) c7(HQ, cZ, T, bO, cz, Bm, bD, aNG, bS, fr, ct, nA, bgR, q, aR, cd, ad, Zp, IS, alD, cdt, amg, aV, H J, hW, oj, aT, iv, Th, bK, K, vd, bU, dd, he, cdp, ae, af, awL, aAe, Dz, nP, cdr, dH, mA, ff, cdq, nf, gl, cds, r, en, dw, Z, kC, op, bN, bUr, cdo, QG, ac, c, eM, bE, aps, mG, vA, U, awK, acJ, eQ, IM, gT, B, AI); #c1(MED12) c2(XP_005262374) c3(mediator of RNA polymerase II transcription subunit 12 isoform X1) c4(277867, 277868, 277869, 277870) c5(277871, 277872, 277873, 277874, 277875, 277876, 277877, 277878, 277879, 277880, 277881, 277882, 277883, 277884, 277885, 277886, 277887, 277888) c6( ) c7(HQ, cZ, T, bO, cz, Bm, bD, aNG, bS, fr, ct, nA, bgR, q, aR, cd, ad, Zp, IS, alD, cdt, amg, aV, HJ, hW, oj, aT, iv, Th, bK, K, vd, bU, dd, he, cdp, ae, af, awL, aAe, Dz, nP, cdr, dH, mA, ff, cdq, nf, gl, cds, r, en, dw, Z, kC, op, bN, bUr, cdo, QG, ac, c, eM, bE, aps, mG, vA, U, awK, acJ, eQ, IM, gT, B, AI); #c1(MED12) c2(XP_005262376) c3(mediator of RNA polymerase II transcription subunit 12 isoform X2) c4(277889, 277890, 277891) c5(277892, 277893, 277894, 277895, 277896, 277897, 277898, 277899, 277900, 277901, 277902, 277903, 277904, 277905, 277906, 277907, 277908, 277909) c6( ) c7(HQ, cZ, T, bO, cz, Bm, bD, aNG, bS, fr, ct, nA, bgR, q, aR, cd, ad, Zp, IS, alD, cdt, amg, aV, HJ, hW, oj, aT, iv, Th, bK, K, vd, bU, dd, he, cdp, ae, af, awL, aAe, Dz, nP, cdr, dH, mA, ff, cdq, nf, gl, cds, r, en, dw, Z, kC, op, bN, bUr, cdo, QG, ac, c, eM, bE, aps, mG, vA, U, awK, acJ, eQ, IM, gT, B, AI); #c1(MED12L) c2(NP_443728) c3(mediator of RNA polymerase II transcription subunit 12-like protein) c4(230035) c5(230036, 230037, 230038, 230039, 230040, 230041, 230042, 230043, 230044, 230045, 230046, 230047) c6( ) c7(cm, oe, oc, cz); #c1(MED12L) c2(XP_006713550) c3(mediator of RNA polymerase II transcription subunit 12-like protein isoform X4) c4(287230) c5( ) c6( ) c7(cm, oe, oc, cz); #c1(MED12L) c2(XP_011510691) c3(mediator of RNA polymerase II transcription subunit 12-like protein isoform X6) c4(301135) c5( ) c6( ) c7(cm, oe, oc, cz); #c1(MED12L) c2(XP_011510701) c3(mediator of RNA polymerase II transcription subunit 12-like protein isoform X15) c4( ) c5(301136, 301137, 301138, 301139, 301140, 301141) c6( ) c7(cm, oe, oc, cz); #c1(MED13) c2(NP_005112) c3(mediator of RNA polymerase II transcription subunit 13) c4(152986, 152987) c5(152988, 152989, 152990, 152991, 152992, 152993, 152994, 152995, 152996, 152997, 152998, 152999) c6( ) c7(om, vA, dq, v, K, bD, op); #c1(MED13L) c2(NP_056150) c3(mediator of RNA polymerase II transcription subunit 13-like) c4(185969) c5(185970, 185971, 185972, 185973, 185974, 185975) c6( ) c7(bD, aLo, nA, acl); #c1(MED14) c2(NP_004220) c3(mediator of RNA polymerase II transcription subunit 14) c4(144399) c5(144400, 144401, 144402, 144403, 144404, 144405) c6( ) c7(dP, aW, eZ, h, aT); #c1(MED14) c2(XP_011542302) c3(mediator of RNA polymerase II transcription subunit 14 isoform X1) c4(340895, 340896) c5(340897, 340898, 340899, 340900, 340901, 340902, 340903, 340904, 340905, 340906, 340907, 340908) c6( ) c7(dP, aW, eZ, h, aT); #c1(MED15) c2(NP_001003891) c3(mediator of RNA polymerase II transcription subunit 15 isoform a) c4(20241) c5(20242) c6( ) c7(ck, bF, T, agd, jz, IU, MD, bE, RX, cr, it, bB, ci, cl, Ik, ae, B, ad); #c1(MED15) c2(NP_001280165) c3(mediator of RNA polymerase II transcription subunit 15 isoform e) c4(111464, 111465, 111466) c5( ) c6( ) c7(ck, bF, T, agd, jz, IU, MD, bE, RX, cr, it, bB, ci, cl, Ik, ae, B, ad); #c1(MED15) c2(NP_056973) c3(mediator of RNA polymerase II transcription subunit 15 isoform b) c4(188281, 188282) c5( ) c6( ) c7(ck, bF, T, agd, jz, IU, MD, bE, RX, cr, it, bB, ci, cl, Ik, ae, B, ad); #c1(MED15) c2(XP_006724326) c3(mediator of RNA polymerase II transcription subunit 15 isoform X3) c4(295944) c5( ) c6( ) c7(ck, bF, T, agd, jz, IU, MD, bE, RX, cr, it, bB, ci, cl, Ik, ae, B, ad); #c1(MED15) c2(XP_011528518) c3(mediator of RNA polymerase II transcription subunit 15 isoform X4) c4( ) c5(323617, 323618, 323619, 323620, 323621, 323622) c6( ) c7(ck, bF, T, agd, jz, IU, MD, bE, RX, cr, it, bB, ci, cl, Ik, ae, B, ad); #c1(MED15) c2(XP_011528522) c3(mediator of RNA polymerase II transcription subunit 15 isoform X7) c4( ) c5(323623, 323624, 323625, 323626, 323627, 323628, 323629, 323630) c6( ) c7(ck, bF, T, agd, jz, IU, MD, bE, RX, cr, it, bB, ci, cl, Ik, ae, B, ad); #c1(MED15) c2(XP_011528523) c3(mediator of RNA polymerase II transcription subunit 15 isoform X8) c4( ) c5(323631, 323632, 323633, 323634, 323635, 323636, 323637, 323638, 323639, 323640, 323641, 323642, 323643, 323644, 323645, 323646, 323647, 323648, 323649, 323650, 323651, 323652, 323653, 323654, 323655, 323656, 323657, 323658, 323659, 323660, 323661, 323662, 323663, 323664) c6( ) c7(ck, bF, T, agd, jz, IU, MD, bE, RX, cr, it, bB, ci, cl, Ik, ae, B, ad); #c1(MED16) c2(NP_005472) c3(mediator of RNA polymerase II transcription subunit 16) c4(156442, 156443, 156444, 156445, 156446, 156447, 156448, 156449, 156450) c5(156451, 156452, 156453, 156454, 156455, 156456, 156457, 156458, 156459, 156460, 156461, 156462, 156463, 156464, 156465, 156466, 156467, 156468, 156469, 156470, 156471, 156472, 156473, 156474, 156475, 156476, 156477, 156478, 156479, 156480, 156481, 156482, 156483, 156484, 156485, 156486, 156487, 156488, 156489, 156490, 156491, 156492, 156493, 156494, 156495, 156496, 156497, 156498, 156499, 156500, 156501, 156502, 156503, 156504, 156505) c6( ) c7(dP); #c1(MED16) c2(XP_011525906) c3(mediator of RNA polymerase II transcription subunit 16 isoform X1) c4(320308) c5(320309, 320310, 320311, 320312, 320313, 320314) c6( ) c7(dP); #c1(MED17) c2(NP_004259) c3(mediator of RNA polymerase II transcription subunit 17) c4(144660, 144661) c5(144662, 144663, 144664, 144665, 144666, 144667, 144668, 144669, 144670, 144671, 144672, 144673, 144674, 144675, 144676, 144677, 144678, 144679) c6( ) c7(dP, cdu, ae, ad); #c1(MED17) c2(XP_011541370) c3(mediator of RNA polymerase II transcription subunit 17 isoform X1) c4(339982) c5( ) c6( ) c7(dP, cdu, ae, ad); #c1(MED19) c2(NP_703151) c3(mediator of RNA polymerase II transcription subunit 19) c4( ) c5(246045, 246046, 246047, 246048, 246049, 246050) c6( ) c7(ae, T, eM, aW, eL, eH, aT, dL, eF, bz, iu, ad); #c1(MED22) c2(NP_598395) c3(mediator of RNA polymerase II transcription subunit 22 isoform b) c4(235482, 235483, 235484, 235485) c5(235486, 235487, 235488, 235489, 235490, 235491, 235492, 235493, 235494, 235495) c6( ) c7(bM); #c1(MED22) c2(NP_852468) c3(mediator of RNA polymerase II transcription subunit 22 isoform c) c4(254958, 254959) c5(254960, 254961, 254962, 254963, 254964, 254965, 254966, 254967, 254968, 254969, 254970, 254971, 254972, 254973, 254974, 254975, 254976, 254977, 254978, 254979, 254980, 254981, 254982, 254983, 254984, 254985, 254986, 254987, 254988, 254989, 254990, 254991, 254992, 254993, 254994, 254995, 254996, 254997) c6( ) c7(bM); #c1(MED23) c2(NP_001257451) c3(mediator of RNA polymerase II transcription subunit 23 isoform d) c4(95429) c5(95430, 95431, 95432, 95433, 95434, 95435) c6( ) c7(eW, T, cdv, Y, cz, mw, mt, nA, it, cd, cp); #c1(MED23) c2(NP_004821) c3(mediator of RNA polymerase II transcription subunit 23 isoform a) c4(150054, 150055) c5(150056, 150057, 150058, 150059, 150060, 150061, 150062, 150063, 150064, 150065, 150066, 150067) c6( ) c7(eW, T, cdv, Y, cz, mw, mt, nA, it, cd, cp); #c1(MED23) c2(NP_057063) c3(mediator of RNA polymerase II transcription subunit 23 isoform b) c4(188687, 188688, 188689, 188690) c5(188691, 188692, 188693, 188694, 188695, 188696, 188697, 188698, 188699, 188700, 188701, 188702, 188703, 188704, 188705, 188706, 188707, 188708, 188709) c6( ) c7(eW, T, cdv, Y, cz, mw, mt, nA, it, cd, cp); #c1(MED23) c2(XP_005267280) c3(mediator of RNA polymerase II transcription subunit 23 isoform X1) c4(280849, 280850, 280851, 280852) c5(280853, 280854, 280855, 280856, 280857, 280858, 280859, 280860, 280861, 280862, 280863, 280864, 280865, 280866, 280867, 280868, 280869, 280870, 280871, 280872, 280873, 280874) c6( ) c7(eW, T, cdv, Y, cz, mw, mt, nA, it, cd, cp); #c1(MED23) c2(XP_006715675) c3(mediator of RNA polymerase II transcription subunit 23 isoform X3) c4( ) c5(289702, 289703, 289704, 289705, 289706, 289707, 289708, 289709, 289710, 289711, 289712, 289713) c6( ) c7(eW, T, cdv, Y, cz, mw, mt, nA, it, cd, cp); #c1(MED23) c2(XP_011534559) c3(mediator of RNA polymerase II transcription subunit 23 isoform X2) c4(331103) c5(331104) c6( ) c7(eW, T, cdv, Y, cz, mw, mt, nA, it, cd, cp); #c1(MED24) c2(NP_001072986) c3(mediator of RNA polymerase II transcription subunit 24 isoform 2) c4(35446) c5(35447, 35448, 35449, 35450, 35451, 35452, 35453, 35454, 35455, 35456, 35457, 35458, 35459, 35460) c6( ) c7(bM); #c1(MED24) c2(NP_055630) c3(mediator of RNA polymerase II transcription subunit 24 isoform 1) c4(182366, 182367, 182368) c5(182369, 182370, 182371, 182372, 182373, 182374, 182375, 182376, 182377, 182378, 182379, 182380, 182381, 182382, 182383, 182384, 182385, 182386, 182387, 182388, 182389, 182390, 182391, 182392, 182393, 182394, 182395, 182396, 182397, 182398, 182399, 182400) c6( ) c7(bM); #c1(MED24) c2(XP_005257931) c3(mediator of RNA polymerase II transcription subunit 24 isoform X10) c4(275424, 275425, 275426) c5(275427, 275428, 275429, 275430, 275431, 275432, 275433) c6( ) c7(bM); #c1(MED24) c2(XP_011523831) c3(mediator of RNA polymerase II transcription subunit 24 isoform X1) c4( ) c5(318407) c6( ) c7(bM); #c1(MED24) c2(XP_011523833) c3(mediator of RNA polymerase II transcription subunit 24 isoform X4) c4(318408) c5( ) c6( ) c7(bM); #c1(MED24) c2(XP_011523837) c3(mediator of RNA polymerase II transcription subunit 24 isoform X7) c4(318409) c5( ) c6( ) c7(bM); #c1(MED24) c2(XP_011523838) c3(mediator of RNA polymerase II transcription subunit 24 isoform X9) c4(318410, 318411) c5( ) c6( ) c7(bM); #c1(MED24) c2(XP_011523839) c3(mediator of RNA polymerase II transcription subunit 24 isoform X11) c4( ) c5(318412, 318413, 318414, 318415, 318416, 318417, 318418, 318419, 318420, 318421, 318422, 318423, 318424, 318425, 318426) c6( ) c7(bM); #c1(MED24) c2(XP_011523840) c3(mediator of RNA polymerase II transcription subunit 24 isoform X12) c4( ) c5(318427, 318428, 318429, 318430, 318431, 318432) c6( ) c7(bM); #c1(MED25) c2(NP_112235) c3(mediator of RNA polymerase II transcription subunit 25) c4(220998, 220999, 221000, 221001) c5(221002, 221003, 221004, 221005, 221006, 221007, 221008, 221009, 221010, 221011, 221012, 221013, 221014, 221015, 221016, 221017, 221018, 221019, 221020, 221021, 221022, 221023, 221024, 221025, 221026, 221027, 221028, 221029, 221030, 221031, 221032, 221033, 221034, 221035, 221036, 221037, 221038, 221039, 221040, 221041, 221042, 221043, 221044, 221045, 221046, 221047, 221048, 221049, 221050, 221051, 221052, 221053, 221054, 221055, 221056) c6( ) c7(bAQ, OW, aTT, aW, cdw, aT, uu, fu, bX, bU, f, bNM, B); #c1(MED25) c2(XP_011525655) c3(mediator of RNA polymerase II transcription subunit 25 isoform X1) c4(320055, 320056, 320057, 320058, 320059, 320060) c5(320061, 320062, 320063, 320064, 320065, 320066) c6( ) c7(bAQ, OW, aTT, aW, cdw, aT, uu, fu, bX, bU, f, bNM, B); #c1(MED28) c2(NP_079481) c3(mediator of RNA polymerase II transcription subunit 28) c4(218277) c5(218278, 218279, 218280, 218281, 218282, 218283) c6( ) c7(aW, ae, ad, aT); #c1(MED29) c2(NP_060062) c3(mediator of RNA polymerase II transcription subunit 29) c4(193948, 193949) c5(193950, 193951, 193952, 193953, 193954, 193955, 193956, 193957, 193958, 193959, 193960, 193961) c6( ) c7(aE); #c1(MED30) c2(NP_542382) c3(mediator of RNA polymerase II transcription subunit 30 isoform 1) c4(232316) c5(232317, 232318, 232319, 232320, 232321, 232322) c6( ) c7(lf); #c1(MED4) c2(NP_001257558) c3(mediator of RNA polymerase II transcription subunit 4 isoform 2) c4( ) c5(95505, 95506, 95507, 95508, 95509) c6( ) c7(dP, bP); #c1(MED4) c2(NP_054885) c3(mediator of RNA polymerase II transcription subunit 4 isoform 1) c4(178190, 178191, 178192, 178193) c5(178194, 178195, 178196, 178197, 178198, 178199, 178200, 178201, 178202, 178203, 178204, 178205, 178206, 178207, 178208, 178209, 178210, 178211, 178212) c6( ) c7(dP, bP); #c1(MED6) c2(NP_001271138) c3(mediator of RNA polymerase II transcription subunit 6 isoform 1) c4(103453) c5(103454, 103455, 103456, 103457, 103458, 103459) c6( ) c7(dY); #c1(MED6) c2(NP_001271139) c3(mediator of RNA polymerase II transcription subunit 6 isoform 3) c4(103460) c5(103461, 103462, 103463, 103464, 103465, 103466) c6( ) c7(dY); #c1(MED6) c2(NP_005457) c3(mediator of RNA polymerase II transcription subunit 6 isoform 2) c4(156339, 156340) c5(156341, 156342, 156343, 156344, 156345, 156346, 156347, 156348, 156349, 156350, 156351, 156352, 156353) c6( ) c7(dY); #c1(MED9) c2(NP_060489) c3(mediator of RNA polymerase II transcription subunit 9) c4(196224) c5(196225, 196226, 196227, 196228, 196229, 196230) c6( ) c7(yu, bX); #c1(MEF2A) c2(NP_005578) c3(myocyte-specific enhancer factor 2A isoform 1) c4(157607) c5(157608, 157609, 157610, 157611, 157612, 157613, 157614) c6( ) c7(bL, aZ, oe, ha, e, aw, cz, aj, j, cd, aR, J, cc, cdx, aT, vc, K, bq, af, jf, kl, anR, IR, Qr, aW, bN, dR, wk, mx, gZ, nw, B); #c1(MEF2A) c2(XP_005254972) c3(myocyte-specific enhancer factor 2A isoform X3) c4(273430) c5(273431, 273432, 273433, 273434, 273435, 273436, 273437, 273438, 273439, 273440) c6( ) c7(bL, aZ, oe, ha, e, aw, cz, aj, j, cd, aR, J, cc, cdx, aT, vc, K, bq, af, jf, kl, anR, IR, Qr, aW, bN, dR, wk, mx, gZ, nw, B); #c1(MEF2A) c2(XP_005254973) c3(myocyte-specific enhancer factor 2A isoform X12) c4( ) c5(273441, 273442, 273443, 273444, 273445, 273446, 273447, 273448, 273449, 273450, 273451, 273452, 273453, 273454, 273455, 273456, 273457, 273458, 273459, 273460, 273461, 273462, 273463, 273464, 273465, 273466, 273467, 273468, 273469) c6( ) c7(bL, aZ, oe, ha, e, aw, cz, aj, j, cd, aR, J, cc, cdx, aT, vc, K, bq, af, jf, kl, anR, IR, Qr, aW, bN, dR, wk, mx, gZ, nw, B); #c1(MEF2A) c2(XP_011519886) c3(myocyte-specific enhancer factor 2A isoform X6) c4(314650, 314651) c5(314652, 314653, 314654, 314655, 314656, 314657, 314658, 314659, 314660, 314661, 314662, 314663) c6( ) c7(bL, aZ, oe, ha, e, aw, cz, aj, j, cd, aR, J, cc, cdx, aT, vc, K, bq, af, jf, kl, anR, IR, Qr, aW, bN, dR, wk, mx, gZ, nw, B); #c1(MEF2A) c2(XP_011519888) c3(myocyte-specific enhancer factor 2A isoform X1) c4(314664) c5(314665, 314666, 314667, 314668, 314669, 314670) c6( ) c7(bL, aZ, oe, ha, e, aw, cz, aj, j, cd, aR, J, cc, cdx, aT, vc, K, bq, af, jf, kl, anR, IR, Qr, aW, bN, dR, wk, mx, gZ, nw, B); #c1(MEF2A) c2(XP_011519889) c3(myocyte-specific enhancer factor 2A isoform X2) c4(314671) c5(314672, 314673, 314674, 314675, 314676, 314677) c6( ) c7(bL, aZ, oe, ha, e, aw, cz, aj, j, cd, aR, J, cc, cdx, aT, vc, K, bq, af, jf, kl, anR, IR, Qr, aW, bN, dR, wk, mx, gZ, nw, B); #c1(MEF2A) c2(XP_011519892) c3(myocyte-specific enhancer factor 2A isoform X11) c4(314678, 314679) c5( ) c6( ) c7(bL, aZ, oe, ha, e, aw, cz, aj, j, cd, aR, J, cc, cdx, aT, vc, K, bq, af, jf, kl, anR, IR, Qr, aW, bN, dR, wk, mx, gZ, nw, B); #c1(MEF2B) c2(NP_001139257) c3(myocyte-specific enhancer factor 28) c4(59016, 59017) c5(59018, 59019, 59020, 59021, 59022, 59023, 59024, 59025, 59026, 59027, 59028, 59029, 59030, 59031, 59032, 59033, 59034, 59035) c6( ) c7(V); #c1(MEF2BNB-MEF2B) c2(NP_005910) c3(myocyte enhancer factor 28 isoform b) c4(160312) c5(160313, 160314, 160315, 160316, 160317, 160318, 160319) c6( ) c7(V); #c1(MEF2C) c2(NP_001124477) c3(myocyte-specific enhancer factor 2C isoform 2) c4(49122, 49123, 49124) c5(49125, 49126, 49127, 49128, 49129, 49130, 49131) c6( ) c7(bL, gh, cdy, oe, ha, e, aw, amj, bS, nA, cd, aR, cc, a EX, nX, aT, h, K, bq, aqa, alW, VX, IR, eZ, f, bN, ck, iT, wK, agl, nw, Wl, bt, cB, B); #c1(MEF2C) c2(NP_001180276) c3(myocyte-specific enhancer factor 2C isoform 3) c4(73674) c5(73675, 73676, 73677, 73678, 73679, 73680, 73681) c6( ) c7(bL, gh, cdy, oe, ha, e, aw, amj, bS, nA, cd, aR, cc, aEX, nX, aT, h, K, bq, aqa, alW, VX, IR, eZ, f, bN, ck, iT, wK, agl, nw, Wl, bt, cB, B); #c1(MEF2C) c2(NP_001180277) c3(myocyte-specific enhancer factor 2C isoform 4) c4(73682) c5(73683, 73684, 73685, 73686, 73687, 73688, 73689, 73690) c6( ) c7(bL, gh, cdy, oe, ha, e, aw, amj, bS, nA, cd, aR, cc, aEX, nX, aT, h, K, bq, aqa, alW, VX, IR, eZ, f, bN, ck, iT, wK, agl, nw, WL bt, cB, B); #c1(MEF2C) c2(NP_001180278) c3(myocyte-specific enhancer factor 2C isoform 5) c4( ) c5(73691) c6( ) c7(bL, gh, cdy, oe, ha, e, aw, amj, bS, nA, cd, aR, cc, aEX, nX, aT, h, K, bq, aqa, alW, VX, IR, eZ, f, bN, ck, iT, wK, agl, nw, Wl, bt, cB, B); #c1(MEF2C) c2(NP_001180279) c3(myocyte-specific enhancer factor 2C isoform 1) c4(73692, 73693, 73694, 73695) c5(73696, 73697, 73698, 73699, 73700, 73701, 73702, 73703, 73704, 73705, 73706, 73707, 73708, 73709, 73710, 73711, 73712, 73713, 73714) c6( ) c7(bL, gh, cdy, oe, ha, e, aw, amj, bS, nA, cd, aR, cc, aEX, nX, aT, h, K, bq, aqa, alW, VX, IR, eZ, f, bN, ck, iT, wK, agl, nw, Wl, bt, cB, B); #c1(MEF2C) c2(XP_011541699) c3(myocyte-specific enhancer factor 2C isoform X6) c4(340221, 340222) c5( ) c6( ) c7(bL, gh, cdy, oe, ha, e, aw, amj, bS, nA, cd, aR, cc, aEX, nX, aT, h, K, bq, aqa, alW, VX, IR, eZ, f, bN, ck, iT, wK, agl, nw, WL bt, cB, B); #c1(MEF2C) c2(XP_011541702) c3(myocyte-specific enhancer factor 2C isoform X8) c4(340223) c5(340224, 340225, 340226, 340227, 340228, 340229) c6( ) c7(bL, gh, cdy, oe, ha, e, aw, amj, bS, nA, cd, aR, cc, aEX, nX, aT, h, K, bq, aqa, alW, VX, IR, eZ, f, bN, ck, iT, wK, agl, nw, Wl, bt, cB, B); #c1(MEF2C) c2(XP_011541703) c3(myocyte-specific enhancer factor 2C isoform X9) c4(340230, 340231) c5(340232, 340233, 340234, 340235, 340236, 340237, 340238, 340239, 340240, 340241, 340242, 340243, 340244, 340245, 340246, 340247, 340248, 340249) c6( ) c7(bL, gh, cdy, oe, ha, e, aw, amj, bS, nA, cd, aR, cc, aEX, nX, aT, h, K, bq, aqa, alW, VX, IR, eZ, f, bN, ck, iT, wK, agl, nw, Wl, bt, cB, B); #c1(MEF2C) c2(XP_011541704) c3(myocyte-specific enhancer factor 2C isoform X10) c4(340250) c5(340251, 340252, 340253, 340254, 340255, 340256, 340257, 340258, 340259, 340260, 340261, 340262, 340263, 340264, 340265, 340266, 340267, 340268) c6( ) c7(bL, gh, cdy, oe, ha, e, aw, amj, bS, nA, cd, aR, cc, aEX, nX, aT, h, K, bq, aqa, alW, VX, IR, eZ, f, bN, ck, iT, wK, agl, nw, Wl, bt, cB, B); #c1(MEF2D) c2(XP_005245226) c3(myocyte-specific enhancer factor 2D isoform X1) c4(266357) c5(266358, 266359, 266360, 266361, 266362, 266363, 266364) c6( ) c7(bL, ck, T, bv, fM, ac, x, an, aj, ur, K, k, uu, vo, B); #c1(MEF2D) c2(XP_006711395) c3(myocyte-specific enhancer factor 2D isoform X3) c4(285972, 285973) c5(285974, 285975, 285976, 285977, 285978, 285979, 285980, 285981, 285982, 285983, 285984, 285985, 285986) c6( ) c7(bL, ck, T, bv, fM, ac, x, an, aj, ur, K, k, uu, vo, B); #c1(MEF2D) c2(XP_006711396) c3(myocyte-specific enhancer factor 2D isoform X2) c4(285987, 285988) c5(285989, 285990, 285991, 285992, 285993, 285994, 285995, 285996, 285997, 285998) c6( ) c7(bL, ck, T, bv, fM, ac, x, an, aj, ur, K, k, uu, vo, B); #c1(MEF2D) c2(XP_006711397) c3(myocyte-specific enhancer factor 2D isoform X4) c4(285999) c5(286000, 286001, 286002, 286003, 286004, 286005, 286006) c6( ) c7(bL, ck, T, bv, fM, ac, x, an, aj, ur, K, k, uu, vo, B); #c1(MEF2D) c2(XP_011507872) c3(myocyte-specific enhancer factor 2D isoform X5) c4( ) c5(298069, 298070, 298071, 298072, 298073, 298074) c6( ) c7(bL, ck, T, bv, fM, ac, x, an, aj, ur, K, k, uu, vo, B); #c1(MEFV) c2(NP_000234) c3(pyrin isoform 1) c4(5285, 5286, 5287, 5288) c5(5289, 5290, 5291, 5292, 5293, 5294, 5295, 5296, 5297, 5298, 5299, 5300, 5301, 5302, 5303, 5304, 5305, 5306, 5307, 5308, 5309, 5310, 5311, 5312, 5313, 5314) c6( ) c7(bM, T, ea, fd, cL, cdA, yM, Vp, K, aWf, hH, hm, eG, cdz, aW, asD, ih, bw, iT, qr, m, R, dD, gU, aw, pn, aPb, ai, br, bKk, rC, h, By, wb, ey, NX, mR, qY, lb, fe, pm, bQL, Zb, cM, hs, B, bL, eR, j, C, V, eA, o, cF, cdC, nX, Id, aT, DX, af, iU, cdB, aLJ, t, iK, dS, hc, hO, wR, Da, fD, bt, ao, qX, CS, dM, jh, edD, eq, ad, wD, fU, NY, ji, sj, d, eZ, anW, iV, YZ, agn, dr, aRk, sG, Lz, y, ra, hv); #c1(MEFV) c2(NP_001185465) c3(pyrin isoform 2) c4(75654, 75655, 75656) c5(75657, 75658, 75659, 75660, 75661, 75662, 75663, 75664, 75665, 75666, 75667, 75668, 75669, 75670, 75671, 75672, 75673) c6( ) c7(bM, T, ea, fd, cL, cdA, yM, Vp, K, aWf, hH, hm, eG, cdz, aW, asD, ih, bw, iT, qr, m, R, dD, gU, aw, pn, aPb, ai, br, bKk, rC, h, By, wb, ey, NX, mR, qY, lb, fe, pm, bQL, Zb, cM, hs, B, bL, eR, j, C, V, eA, o, cF, cdC, nX, Id, aT, DX, af, iU, cdB, aLJ, t, iK, dS, hc, hO, wR, Da, fD, bt, ao, gX, CS, dM, jh, cdD, eq, ad, wD, fU, NY, ji, sj, d, eZ, anW, iV, YZ, agn, dr, aRk, sG, Lz, y, ra, hv); #c1(MEGF10) c2(NP_115822) c3(multiple epidermal growth factor-like domains protein 10 precursor) c4(224122, 224123) c5(224124, 224125, 224126, 224127, 224128, 224129, 224130, 224131, 224132, 224133) c6( ) c7(dP, cdE, oj, Ad, pN); #c1(MEGF11) c2(NP_115821) c3(multiple epidermal growth factor-like domains protein 11 precursor) c4(224091, 224092, 224093) c5(224094, 224095, 224096, 224097, 224098, 224099, 224100, 224101, 224102, 224103, 224104, 224105, 224106, 224107, 224108, 224109, 224110, 224111, 224112, 224113, 224114, 224115, 224116, 224117, 224118, 224119, 224120, 224121) c6( ) c7(aw, fq, j, ac, Ea); #c1(MEGF11) c2(XP_011520411) c3(multiple epidermal growth factor-like domains protein 11 isoform X1) c4(315292) c5(315293, 315294, 315295, 315296, 315297) c6( ) c7(aw, fq, j, ac, Ea); #c1(MEGF8) c2(NP_001258867) c3(multiple epidermal growth factor-like domains protein 8 isoform 1 precursor) c4(96612) c5(96613, 96614, 96615, 96616, 96617, 96618, 96619) c6( ) c7(T, pf, bE, bDi, aW, cdF, axc, OS, n, aT, bDI, r, K, q, aA, bB, bD, g, aF, B); #c1(MEGF8) c2(NP_001401) c3(multiple epidermal growth factor-like domains protein 8 isoform 2 precursor) c4(117593, 117594) c5(117595, 117596, 117597, 117598, 117599, 117600, 117601, 117602, 117603, 117604, 117605, 117606, 117607) c6( ) c7(T, pf, bE, bDi, aW, cdF, axc, OS, n, aT, bDI, r, K, q, aA, bB, bD, g, aF, B); #c1(MEGF9) c2(NP_001073966) c3(multiple epidermal growth factor-like domains protein 9 precursor) c4(36734, 36735) c5(36736, 36737, 36738, 36739, 36740, 36741, 36742, 36743, 36744, 36745, 36746, 36747) c6( ) c7(aW, aT); #c1(MEI1) c2(NP_689726) c3(meiosis inhibitor protein 1) c4(243679, 243680) c5(243681, 243682, 243683, 243684, 243685, 243686) c6( ) c7(vH); #c1(MEI1) c2(XP_011528242) c3(meiosis inhibitor protein 1 isoform X6) c4(323308) c5(323309, 323310, 323311, 323312, 323313, 323314, 323315) c6( ) c7(vH); #c1(MEI1) c2(XP_011528243) c3(meiosis inhibitor protein 1 isoform X7) c4(323316) c5(323317, 323318, 323319, 323320, 323321, 323322) c6( ) c7(vH); #c1(MEI1) c2(XP_011528253) c3(meiosis inhibitor protein 1 isoform X17) c4(323323) c5(323324, 323325, 323326, 323327, 323328) c6( ) c7(vH); #c1(MEI1) c2(XP_011528256) c3(meiosis inhibitor protein 1 isoform X20) c4( ) c5(323329, 323330, 323331, 323332, 323333, 323334) c6( ) c7(vH); #c1(MEI1) c2(XP_011528257) c3(meiosis inhibitor protein 1 isoform X21) c4(323335) c5(323336, 323337, 323338, 323339, 323340, 323341) c6( ) c7(vH); #c1(MEIS1) c2(NP_002389) c3(homeobox protein Meis1) c4(128053) c5(128054, 128055, 128056, 128057, 128058, 128059, 128060, 128061, 128062, 128063, 128064, 128065, 128066, 128067, 128068, 128069, 128070) c6( ) c7(T, eR, yY, EQ, ci, hF, aY, q, br, ad, x, hb, aT, dz, jj, ae, aW, yL, r, cm, bw, fq, ck, iT, k, bD, bt, kS, X, awm); #c1(MEIS1) c2(XP_005264378) c3(homeobox protein Meis1 isoform X1) c4(278836) c5( ) c6( ) c7(T, eR, yY, EQ, ci, hF, aY, q, br, ad, x, hb, aT, dz, jj, ae, aW, yL, r, cm, bw, fq, ck, iT, k, bD, bt, kS, X, awm); #c1(MEIS1) c2(XP_005264379) c3(homeobox protein Meis1 isoform X2) c4(278837, 278838) c5(278839, 278840, 278841, 278842, 278843, 278844, 278845, 278846, 278847, 278848, 278849, 278850, 278851, 278852) c6( ) c7(T, eR, yY, EQ, ci, hF, aY, q, br, ad, x, hb, aT, dz, jj, ae, aW, yL, r, cm, bw, fq, ck, iT, k, bD, bt, kS, X, awm); #c1(MEIS1) c2(XP_005264380) c3(homeobox protein Meis1 isoform X3) c4(278853, 278854) c5( ) c6( ) c7(T, eR, yY, EQ, ci, hF, aY, q, br, ad, x, hb, aT, dz, jj, ae, aW, yL, r, cm, bw, fq, ck, iT, k, bD, bt, kS, X, awm); #c1(MEIS1) c2(XP_005264381) c3(homeobox protein Meis1 isoform X4) c4( ) c5(278855, 278856) c6( ) c7(T, eR, yY, EQ, ci, hF, aY, q, br, ad, x, hb, aT, dz, jj, ae, aW, yL, r, cm, bw, fq, ck, iT, k, bD, bt, kS, X, awm); #c1(MEIS1) c2(XP_005264382) c3(homeobox protein Meis1 isoform X5) c4(278857, 278858, 278859) c5(278860, 278861, 278862, 278863, 278864, 278865, 278866, 278867, 278868, 278869, 278870, 278871, 278872, 278873, 278874, 278875, 278876, 278877, 278878, 278879, 278880, 278881) c6( ) c7(T, eR, yY, EQ, ci, hF, aY, q, br, ad, x, hb, aT, dz, jj, ae, aW, yL, r, cm, bw, fq, ck, iT, k, bD, bt, kS, X, awm); #c1(MEIS2) c2(NP_002390) c3(homeobox protein Meis2 isoform f) c4(128071, 128072) c5(128073, 128074, 128075, 128076, 128077, 128078, 128079, 128080, 128081, 128082) c6( ) c7(e, fq, rE, cm, ae, ad, qc); #c1(MEIS2) c2(NP_733774) c3(homeobox protein Meis2 isoform b) c4(247026) c5(247027, 247028, 247029, 247030, 247031, 247032, 247033, 247034, 247035) c6( ) c7(e, fq, rE, cm, ae, ad, qc); #c1(MEIS2) c2(NP_733776) c3(homeobox protein Meis2 isoform d) c4(247036) c5(247037, 247038, 247039, 247040, 247041, 247042, 247043, 247044, 247045, 247046, 247047, 247048, 247049, 247050, 247051) c6( ) c7(e, fq, rE, cm, ae, ad, qc); #c1(MEIS2) c2(NP_733777) c3(homeobox protein Meis2 isoform a) c4(247052, 247053) c5(247054, 247055, 247056, 247057, 247058) c6( ) c7(e, fq, rE, cm, ae, ad, qc); #c1(MEIS2) c2(NP_758526) c3(homeobox protein Meis2 isoform g) c4( ) c5(249253, 249254, 249255, 249256, 249257) c6( ) c7(e, fq, rE, cm, ae, ad, qc); #c1(MEIS2) c2(NP_758527) c3(homeobox protein Meis2 isoform h) c4(249258) c5(249259, 249260, 249261, 249262, 249263, 249264, 249265, 249266, 249267, 249268, 249269, 249270, 249271) c6( ) c7(e, fq, rE, cm, ae, ad, qc); #c1(MEIS2) c2(XP_006720585) c3(homeobox protein Meis2 isoform X1) c4(293558) c5(293559, 293560, 293561, 293562, 293563, 293564, 293565, 293566, 293567, 293568, 293569, 293570) c6( ) c7(e, fq, rE, cm, ae, ad, qc); #c1(MEIS2) c2(XP_006720588) c3(homeobox protein Meis2 isoform X4) c4(293571) c5(293572) c6( ) c7(e, fq, rE, cm, ae, ad, qc); #c1(MEIS2) c2(XP_006720589) c3(homeobox protein Meis2 isoform X5) c4( ) c5(293573) c6( ) c7(e, fq, rE, cm, ae, ad, qc); #c1(MEIS2) c2(XP_006720592) c3(homeobox protein Meis2 isoform X7) c4(293574) c5(293575, 293576, 293577, 293578, 293579) c6( ) c7(e, fq, rE, cm, ae, ad, qc); #c1(MELK) c2(NP_001243614) c3(maternal embryonic leucine zipper kinase isoform 2) c4(91206) c5(91207, 91208, 91209, 91210, 91211, 91212) c6( ) c7(T, d, dB, aW, qy, aT, aA, KO, aF, ey, K, as, eA, ae, B, ad); #c1(MELK) c2(NP_001243616) c3(maternal embryonic leucine zipper kinase isoform 3) c4(91213, 91214) c5(91215, 91216, 91217, 91218, 91219, 91220) c6( ) c7(T, d, dB, aW, qy, aT, aA, KO, aF, ey, K, as, eA, ae, B, ad); #c1(MELK) c2(NP_001243617) c3(maternal embryonic leucine zipper kinase isoform 4) c4(91221) c5(91222, 91223, 91224, 91225, 91226, 91227) c6( ) c7(T, d, dB, aW, qy, aT, aA, KO, aF, ey, K, as, eA, ae, B, ad); #c1(MELK) c2(NP_001243619) c3(maternal embryonic leucine zipper kinase isoform 6) c4(91228) c5(91229, 91230, 91231, 91232, 91233, 91234) c6( ) c7(T, d, dB, aW, qy, aT, aA, KO, aF, ey, K, as, eA, ae, B, ad); #c1(MELK) c2(NP_001243620) c3(maternal embryonic leucine zipper kinase isoform 7) c4( ) c5(91235) c6( ) c7(T, d, dB, aW, qy, aT, aA, KO, aF, ey, K, as, eA, ae, B, ad); #c1(MELK) c2(NP_001243621) c3(maternal embryonic leucine zipper kinase isoform 8) c4( ) c5(91236, 91237, 91238, 91239, 91240) c6( ) c7(T, d, dB, aW, qy, aT, aA, KO, aF, ey, K, as, eA, ae, B, ad); #c1(MELK) c2(NP_055606) c3(maternal embryonic leucine zipper kinase isoform 1) c4(182206, 182207) c5(182208, 182209, 182210, 182211, 182212, 182213, 182214, 182215, 182216, 182217, 182218) c6( ) c7(T, d, dB, aW, qy, aT, aA, KO, aF, ey, K, as, eA, ae, B, ad); #c1(MELK) c2(XP_011516386) c3(maternal embryonic leucine zipper kinase isoform X1) c4(309611) c5(309612, 309613, 309614, 309615, 309616, 309617, 309618) c6( ) c7(T, d, dB, aW, qy, aT, aA, KO, aF, ey, K, as, eA, ae, B, ad); #c1(MEMO1) c2(NP_001131074) c3(protein MEMO1 isoform 2) c4(52571, 52572) c5(52573, 52574, 52575, 52576, 52577, 52578) c6( ) c7(cm); #c1(MEMO1) c2(NP_001288762) c3(protein MEMO1 isoform 1) c4(113994, 113995) c5(113996, 113997, 113998, 113999, 114000, 114001, 114002, 114003, 114004, 114005, 114006, 114007, 114008, 114009, 114010, 114011) c6( ) c7(cm); #c1(MEMO1) c2(XP_011531199) c3(protein MEMO1 isoform X4) c4( ) c5(327153, 327154, 327155, 327156, 327157, 327158) c6( ) c7(cm); #c1(MEN1) c2(NP_570711) c3(menin isoform 2) c4(234146) c5(234147, 234148, 234149, 234150, 234151, 234152, 234153, 234154, 234155, 234156, 234157, 234158, 234159, 234160, 234161, 234162, 234163, 234164, 234165, 234166, 234167, 234168, 234169, 234170, 234171, 234172, 234173, 234174, 234175, 234176, 234177, 234178, 234179, 234180, 234181, 234182, 234183, 234184, 234185, 234186, 234187, 234188, 234189, 234190, 234191, 234192, 234193, 234194, 234195, 234196, 234197, 234198, 234199, 234200) c6( ) c7(T, aC, Fj, vf, if, e, abD, ci, aY, ip, AW, aE, pX, vg, iv, K, eL, azh, li, yo, avH, aW, kt, aB, g, eF, cm, aoS, qJ, eM, nB, TG, vA, iS, bel, QF, azg, OD, iu, IT, n, aj, aKt, OA, ml, qN, JW, zw, Do, KN, kH, jy, h, dL, Xh, Oz, aAH, aeU, ahJ, Hu, hq, bzv, aKA, YE, hk, bo, hj, hR, bUG, HB, anx, B, bL, eR, boq, fZ, cz, wo, j, q, J, eJ, UE, Zp, mj, nv, cdG, aT, aHs, blg, ae, jf, Uf, blD, s, Y, aNi, hf, t, ck, nM, iM, nG, hr, aJQ, VB, aAO, bNx, hl, pY, Oy, aD, jh, OE, KO, hF, ad, iC, av, bkq, Rq, yh, bYY, Yi, aAL, je, vj, eH, hp, HI, bz, aTb, dr, bF, Ew, AR, cdH, X); #c1(MEN1) c2(NP_570713) c3(menin isoform 1) c4(234201) c5(234202, 234203, 234204, 234205, 234206, 234207, 234208, 234209, 234210, 234211, 234212, 234213, 234214, 234215, 234216, 234217, 234218, 234219, 234220, 234221, 234222, 234223) c6( ) c7(T, aC, Fj, vf, if, e, abD, ci, aY, ip, AW, aE, pX, vg, iv, K, eL, azh, li, yo, avH, aW, kt, aB, g, eF, cm, aoS, qJ, eM, nB, TG, vA, iS, bel, QF, azg, OD, iu, IT, n, aj, aKt, OA, ml, qN, JW, zw, Do, KN, kH, jy, h, dL, Xh, Oz, aAH, aeO, ahJ, Hu, hq, bzv, aKA, YE, hk, bo, hj, hR, bUG, HB, anx, B, bL, eR, boq, fZ, cz, wo, j, q, J, eJ, UE, Zp, mj, nv, cdG, aT, aHs, blg, ae, jf, Uf, blD, s, Y, aNi, hf, t, ck, nM, iM, nG, hr, aJQ, VB, aAO, bNx, hl, pY, Oy, aD, jh, OE, KO, hF, ad, iC, av, bkq, Rq, yh, bYY, Yi, aAL, je, vj, eH, hp, HI, bz, aTb, dr, bF, Ew, AR, cdH, X); #c1(MEN1) c2(XP_005274058) c3(menin isoform X1) c4(284912, 284913, 284914, 284915, 284916, 284917) c5( ) c6( ) c7(T, aC, Fj, vf, if, e, abD, ci, aY, ip, AW, aE, pX, vg, iv, K, eL, azh, li, yo, avH, aW, kt, aB, g, eF, cm, aoS, qJ, eM, nB, TG, vA, iS, bel, QF, azg, OD, iu, IT, n, aj, aKt, OA, ml, qN, JW, zw, Do, KN, kH, jy, h, dL, Xh, Oz, aAH, aeO, ahJ, Hu, hq, bzv, aKA, YE, hk, bo, hj, hR, bUG, HB, anx, B, bL, eR, boq, fZ, cz, wo, j, q, J, eJ, UE, Zp, mj, nv, cdG, aT, aHs, blg, ae, jf, Uf, blD, s, Y, aNi, hf, t, ck, nM, iM, nG, hr, aJQ, VB, aAO, bNx, hl, pY, Oy, aD, jh, OE, KO, hF, ad, iC, av, bkq, Rq, yh, bYY, Yi, aAL, je, vj, eH, hp, HI, bz, aTb, dr, bF, Ew, AR, cdH, X); #c1(MEOX1) c2(NP_001035091) c3(homeobox protein MOX-1 isoform 3) c4( ) c5(32491, 32492, 32493, 32494, 32495) c6( ) c7(t, bAV, cdl, m, f J); #c1(MEOX1) c2(NP_004518) c3(homeobox protein MOX-1 isoform 1) c4(147157, 147158) c5(147159, 147160, 147161, 147162, 147163, 147164, 147165, 147166) c6( ) c7(t, bAV, cdl, m, fJ); #c1(MEOX1) c2(NP_054705) c3(homeobox protein MOX-1 isoform 2) c4(177321) c5(177322, 177323, 177324, 177325, 177326, 177327) c6( ) c7(t, bAV, cdl, m, fJ); #c1(MEOX2) c2(NP_005915) c3(homeobox protein MOX-2) c4(160356) c5(160357, 160358, 160359, 160360, 160361, 160362, 160363) c6( ) c7(B, j, af); #c1(MEP1A) c2(NP_005579) c3(meprin A subunit alpha precursor) c4(157615) c5(157616, 157617, 157618, 157619, 157620, 157621) c6( ) c7(fe, uu, X, iV); #c1(MEPE) c2(NP_001171623) c3(matrix extracellular phosphoglycoprotein isoform a precursor) c4(70989, 70990, 70991) c5(70992, 70993, 70994, 70995, 70996, 70997, 70998, 70999, 71000, 71001, 71002, 71003, 71004, 71005, 71006, 71007) c6( ) c7(bfh, ID, T, ea, if, e, al, bO, bLf, bB, cL, ci, aY, x, Gt, aE, awe, wM, Ag, il, iX, M, iv, gs, azm, Bi, bU, eL, hm, cdN, xQ, aW, hl, CT, YG, bxx, Ku, g, hJ, as, eF, cm, bw, ajj, bfw, eM, nB, dc, vA, mx, aep, cj, bXz, wx, k, m, NN, abh, dD, Ol, aw, NT, Bm, n, aj, fr, nA, qN, cd, br, rc, afR, BI, ft, amB, cc, h, hn, dL, ux, ais, Lg, pl, beo, mR, A, aq, kp, Hu, YF, zZ, acD, op, lx, IJ, ky, dB, kz, hL, pg, oh, azr, ER, anx, it, B, bL, AB, AS, eR, jx, rf, aA, cz, cdP, j, aDO, wy, AO, V, biO, q, J, o, er, aOY, eA, mj, bIC, hW, cdJ, Id, aWJ, aT, dz, bK, jj, ae, af, bA, jf, qw, arl, s, iU, xR, Y, afS, aeS, r, An, en, cl, t, iK, bN, avz, ck, dS, pH, BU, tY, kP, ac, rT, rR, iM, au, of, cdK, np, rK, fD, UF, cdM, gT, bt, ij, hS, hl, kh, id, qb, cdO, uO, bs, jN, jh, eq, fu, hF, cdL, aGW, ad, BY, Jm, hX, afb, hd, F, afm, vJ, bfZ, hD, bsR, auE, fb, vO, iL, d, azS, BO, je, cH, qt, ff, xs, eH, eZ, afi, Ej, gE, hp, aF, Fq, anW, bfH, bz, qa, Hp, axl, es, gk, eU, Ew, qe, pc, bF, bE, xT, ag, aS, bC, hE, X, y); #c1(MEPE) c2(NP_001171626) c3(matrix extracellular phosphoglycoprotein isoform b) c4( ) c5(71008, 71009, 71010, 71011, 71012, 71013, 71014, 71015, 71016) c6( ) c7(bfh, ID, T, ea, if, e, al, bO, bLf, bB, cL, ci, aY, x, Gt, aE, awe, wM, Ag, il, iX, M, iv, gs, azm, Bi, bU, eL, hm, cdN, xQ, aW, hl, CT, YG, bxx, Ku, g, hJ, as, eF, cm, bw, ajj, bfw, eM, nB, dc, vA, mx, aep, cj, bXz, wx, k, m, NN, abh, dD, Ol, aw, NT, Bm, n, aj, fr, nA, qN, cd, br, rc, afR, BI, ft, amB, cc, h, hn, dL, ux, ais, Lg, pl, beo, mR, A, aq, kp, Hu, YF, zZ, acD, op, lx, IJ, ky, dB, kz, hL, pg, oh, azr, ER, anx, it, B, bL, AB, AS, eR, jx, rf, aA, cz, cdP, j, aDO, wy, AO, V, biO, q, J, o, er, aOY, eA, mj, bIC, hW, cdJ, Id, aWJ, aT, dz, bK, jj, ae, af, bA, jf, qw, arl, s, iU, xR, Y, afS, aeS, r, An, en, cl, t, iK, bN, avz, ck, dS, pH, BU, tY, kP, ac, rT, rR, iM, au, of, cdK, np, rK, fD, UF, cdM, gT, bt, ij, hS, hI, kh, id, qb, cdO, uO, bs, jN, jh, eq, fu, hF, cdL, aGW, ad, BY, Jm, hX, afb, hd, F, afm, vJ, bfZ, hD, bsR, auE, fb, vO, iL, d, azS, BO, je, cH, qt, ff, xs, eH, eZ, afi, Ej, gE, hp, aF, Fq, anW, bfH, bz, qa, Hp, axl, es, gk, eU, Ew, qe, pc, bF, bE, xT, ag, aS, bC, hE, X, y); #c1(MEPE) c2(NP_001278112) c3(matrix extracellular phosphoglycoprotein isoform c precursor) c4( ) c5(109482, 109483) c6( ) c7(bfh, ID, T, ea, if, e, aI, bO, bLf, bB, cL, ci, aY, x, Gt, aE, awe, wM, Ag, iI, iX, M, iv, gs, azm, Bi, bU, eL, hm, cdN, xQ, aW, hI, CT, YG, bxx, Ku, g, hJ, as, eF, cm, bw, ajj, bfw, eM, nB, dc, vA, mx, aep, cj, bXz, wx, k, m, NN, abh, dD, Ol, aw, NT, Bm, n, aj, fr, nA, qN, cd, br, rc, afR, BI, ft, amB, cc, h, hn, dL, ux, ais, Lg, pI, beo, mR, A, aq, kp, Hu, YE, zZ, acD, op, Ix, IJ, ky, dB, kz, hL, pg, oh, azr, ER, anx, it, B, bL, AB, AS, eR, jx, rf, aA, cz, cdP, j, aDO, wy, AO, V, biO, q, J, o, er, aOY, eA, mj, bIC, hW, cdJ, Id, aWJ, aT, dz, bK, jj, ae, af, bA, jf, qw, arl, s, iU, xR, Y, afS, aeS, r, An, en, cl, t, iK, bN, avz, ck, dS, pH, BU, tY, kP, ac, rT, rR, iM, au, of, cdK, np, rK, fD, UF, cdM, gT, bt, ij, hS, hI, kh, id, qb, cdO, uO, bs, jN, jh, eq, fu, hF, cdL, aGW, ad, BY, Jm, hX, afb, hd, F, afm, vJ, bfZ, hD, bsR, auE, fb, vO, iL, d, azS, BO, je, cH, qt, ff, xs, eH, eZ, afi, Ej, gE, hp, aF, Fq, anW, bfH, bz, qa, Hp, axl, es, gk, eU, Ew, qe, pc, bF, bE, xT, ag, aS, bC, hE, X, y); #c1(MERTK) c2(NP_006334) c3(tyrosine-protein kinase Mer precursor) c4(164102, 164103) c5(164104, 164105, 164106, 164107, 164108, 164109, 164110, 164111, 164112, 164113, 164114, 164115, 164116, 164117, 164118, 164119, 164120) c6( ) c7(T, dD, ea, nx, jh, oY, eq, ci, bX, V, mC, Nh, x, bv, cdQ, aT, hn, ey, d, IR, hG, aW, CM, wc, eZ, nk, jT, nC, ck, dB, nw, cS, k, np, fL, wx, bt); #c1(MERTK) c2(XP_011508792) c3(tyrosine-protein kinase Mer isoform X2) c4(299388) c5( ) c6( ) c7(T, dD, ea, nx, jh, oY, eq, ci, bX, V, mC, Nh, x, bv, cdQ, aT, hn, ey, d, IR, hG, aW, CM, wc, eZ, nk, jT, nC, ck, dB, nw, cS, k, np, fL, wx, bt); #c1(MERTK) c2(XP_011508793) c3(tyrosine-protein kinase Mer isoform X4) c4( ) c5(299389, 299390, 299391, 299392, 299393) c6( ) c7(T, dD, ea, nx, jh, oY, eq, ci, bX, V, mC, Nh, x, bv, cdQ, aT, hn, ey, d, IR, hG, aW, CM, wc, eZ, nk, jT, nC, ck, dB, nw, cS, k, np, fL, wx, bt); #c1(MESDC1) c2(NP_072088) c3(mesoderm development candidate 1) c4(212645) c5(212646, 212647, 212648, 212649, 212650, 212651) c6( ) c7(eL, oe, aw, dL); #c1(MESDC2) c2(NP_055969) c3(LDLR chaperone MESD precursor) c4(184789) c5(184790, 184791, 184792, 184793, 184794, 184795, 184796, 184797, 184798, 184799) c6( ) c7(rO); #c1(MESP2) c2(NP_001035047) c3(mesoderm posterior protein 2) c4(32475) c5(32476, 32477, 32478, 32479, 32480, 32481, 32482, 32483) c6( ) c7(cdR, bfU, bga); #c1(MEST) c2(NP_001240831) c3(mesoderm-specific transcript homolog protein isoform d precursor) c4(88881) c5(88882, 88883, 88884, 88885, 88886, 88887, 88888, 88889, 88890, 88891, 88892, 88893, 88894, 88895, 88896, 88897, 88898, 88899, 88900, 88901, 88902, 88903, 88904, 88905, 88906, 88907, 88908, 88909, 88910, 88911, 88912, 88913, 88914, 88915, 88916, 88917, 88918, 88919, 88920, 88921, 88922, 88923) c6( ) c7(iu, T, gU, ND, bE, aW, LO, ml, mg, aT, bB, at, dL, v, ci, m, qM, g, t, bp, B); #c1(MEST) c2(NP_002393) c3(mesoderm-specific transcript homolog protein isoform a) c4(128090) c5(128091) c6( ) c7(iu, T, gU, ND, bE, aW, LO, ml, mg, aT, bB, at, dL, v, ci, m, qM, g, t, bp, B); #c1(MEST) c2(NP_803491) c3(mesoderm-specific transcript homolog protein isoform b precursor) c4(252636) c5(252637, 252638, 252639, 252640, 252641, 252642, 252643, 252644, 252645, 252646, 252647, 252648, 252649, 252650, 252651, 252652, 252653, 252654, 252655, 252656, 252657) c6( ) c7(iu, T, gU, ND, bE, aW, LO, ml, mg, aT, bB, at, dL, v, ci, m, qM, g, t, bp, B); #c1(MEST) c2(XP_011514524) c3(mesoderm-specific transcript homolog protein isoform X1) c4(307214, 307215, 307216, 307217, 307218) c5(307219, 307220, 307221, 307222) c6( ) c7(iu, T, gU, ND, bE, aW, LO, ml, mg, aT, bB, at, dL, v, ci, m, qM, g, t, bp, B); #c1(MET) c2(NP_000236) c3(hepatocyte growth factor receptor isoform b precursor) c4(5315) c5(5316, 5317, 5318, 5319, 5320) c6( ) c7(T, aC, aCh, pf, bll, aI, bO, fd, bB, ci, aY, sD, IS, bv, aE, Xc, pX, Qk, ja, Vv, Ou, HR, K, hu, pk, eL, KC, eG, iE, JI, aW, fc, CT, g, as, eF, ir, cm, QA, Qt, bw, iP, eM, nB, iA, aep, aUS, k, Hb, m, Xu, ik, iu, aw, ht, n, fr, uE, rP, ft, jz, gd, kH, lG, eV, dL, kj, fQ, aq, kp, pm, cdT, ar, Sc, Qy, SE, dB, ayS, Be, auh, hL, E, uz, at, JM, it, B, dA, eR, jp, jx, eX, aA, aNG, Iu, V, q, eA, nv, yg, aT, Fx, bq, rz, DX, bau, ae, dl, jf, Sh, s, nO, oV, Y, yL, r, aNi, en, aom, aDY, t, cl, btO, pb, Vi, bN, iK, ck, Qi, nM, iM, c, np, Bd, bt, zu, VB, ao, hS, kh, id, LX, bXc, jh, KO, Sv, cdS, Fc, iJ, aue, ad, hX, dP, av, hd, ib, MS, py, Db, yt, hP, d, bug, je, PE, vj, ff, eH, gI, aF, iV, iR, adj, jb, bz, bF, es, gk, RV, bE, AR, adg, If, X, y); #c1(MET) c2(NP_001120972) c3(hepatocyte growth factor receptor isoform a precursor) c4(45017) c5(45018, 45019, 45020, 45021, 45022, 45023, 45024, 45025, 45026, 45027, 45028, 45029) c6( ) c7(T, aC, aCh, pf, bll, aI, bO, fd, bB, ci, aY, sD, IS, bv, aE, Xc, pX, Qk, ja, Vv, Ou, HR, K, hu, pk, eL, KC, eG, iE, JI, aW, fc, CT, g, as, eF, ir, cm, QA, Qt, bw, iP, eM, nB, iA, aep, aUS, k, Hb, m, Xu, ik, iu, aw, ht, n, fr, uE, rP, ft, jz, gd, kH, lG, eV, dL, kj, fQ, aq, kp, pm, cdT, ar, Sc, Qy, SE, dB, ayS, Be, auh, hL, E, uz, at, JM, it, B, dA, eR, jp, jx, eX, aA, aNG, Iu, V, q, eA, nv, yg, aT, Fx, bq, rz, DX, bau, ae, dl, jf, Sh, s, nO, oV, Y, yL, r, aNi, en, aom, aDY, t, cl, btO, pb, Vi, bN, iK, ck, Qi, nM, iM, c, np, Bd, bt, zu, VB, ao, hS, kh, id, LX, bXc, jh, KO, Sv, cdS, Fc, iJ, aue, ad, hX, dP, av, hd, ib, MS, py, Db, yt, hP, d, bug, je, PE, vj, ff, eH, gI, aF, iV, iR, adj, jb, bz, bF, es, gk, RV, bE, AR, adg, If, X, y); #c1(MET) c2(XP_006716053) c3(hepatocyte growth factor receptor isoform X2) c4( ) c5(290011, 290012, 290013, 290014, 290015, 290016) c6( ) c7(T, aC, aCh, pf, bll, aI, bO, fd, bB, ci, aY, sD, IS, bv, aE, Xc, pX, Qk, ja, Vv, Ou, HR, K, hu, pk, eL, KC, eG, iE, JI, aW, fc, CT, g, as, eF, ir, cm, QA, Qt, bw, iP, eM, nB, iA, aep, aUS, k, Hb, m, Xu, ik, iu, aw, ht, n, fr, uE, rP, ft, jz, gd, kH, IG, eV, dL, kj, fQ, aq, kp, pm, cdT, ar, Sc, Qy, SE, dB, ayS, Be, auh, hL, E, uz, at, JM, it, B, dA, eR, jp, jx, eX, aA, aNG, Iu, V, g, eA, nv, yg, aT, Fx, bq, rz, DX, bau, ae, dl, jf, Sh, s, nO, oV, Y, yL, r, aNi, en, aom, aDY, t, cl, btO, pb, Vi, bN, iK, ck, Qi, nM, iM, c, np, Bd, bt, zu, VB, ao, hS, kh, id, LX, bXc, jh, KO, Sv, cdS, Fc, iJ, aue, ad, hX, dP, av, hd, ib, MS, py, Db, yt, hP, d, bug, je, PE, vj, ff, eH, gI, aF, iV, iR, adj, jb, bz, bF, es, gk, RV, bE, AR, adg, If, X, y); #c1(MET) c2(XP_011514525) c3(hepatocyte growth factor receptor isoform X1) c4(307223, 307224) c5(307225) c6( ) c7(T, aC, aCh, pf, bll, al, bO, fd, bB, ci, aY, sD, IS, bv, aE, Xc, pX, Qk, ja, Vv, Ou, HR, K, hu, pk, eL, KC, eG, iE, JI, aW, fc, CT, g, as, eF, ir, cm, QA, Qt, bw, iP, eM, nB, iA, aep, aUS, k, Hb, m, Xu, ik, iu, aw, ht, n, fr, uE, rP, ft, jz, gd, kH, lG, eV, dL, kj, fQ, aq, kp, pm, cdT, ar, Sc, Qy, SE, dB, ayS, Be, auh, hL, E, uz, at, JM, it, B, dA, eR, jp, jx, eX, aA, aNG, Iu, V, q, eA, nv, yg, aT, Fx, bq, rz, DX, bau, ae, dl, jf, Sh, s, nO, oV, Y, yL, r, aNi, en, aom, aDY, t, cl, btO, pb, Vi, bN, iK, ck, Qi, nM, iM, c, np, Bd, bt, zu, VB, ao, hS, kh, id, LX, bXc, jh, KO, Sv, cdS, Fc, iJ, aue, ad, hX, dP, av, hd, ib, MS, py, Db, yt, hP, d, bug, je, PE, vj, ff, eH, gI, aF, iV, iR, adj, jb, bz, bF, es, gk, RV, bE, AR, adg, If, X, y); #c1(METAP1) c2(NP_055958) c3(methionine aminopeptidase 1) c4(184693) c5(184694, 184695, 184696, 184697, 184698, 184699) c6( ) c7(WP, J, aj); #c1(METAP1) c2(XP_005262925) c3(methionine aminopeptidase 1 isoform X4) c4(278166) c5(278167, 278168, 278169, 278170, 278171, 278172) c6( ) c7(WP, J, aj); #c1(METAP1D) c2(NP_954697) c3(methionine aminopeptidase ID, mitochondrial precursor) c4(261275) c5(261276, 261277, 261278, 261279, 261280, 261281) c6( ) c7(bB, bE, X); #c1(METAP2) c2(NP_006829) c3(methionine aminopeptidase 2) c4(168497) c5(168498, 168499, 168500, 168501, 168502, 168503) c6( ) c7(ID, fM, fG, GC, V, eA, ib, dV, aT, h, ey, K, on, af, cp, aa, jf, ly, d, aW, Y, g, cm, lx, bN, LB, Qi, Ew, dc, wO, adR, eo, X, L); #c1(METRN) c2(NP_076947) c3(meteorin precursor) c4(214345) c5(214346, 214347, 214348, 214349, 214350, 214351, 214352, 214353, 214354, 214355, 214356, 214357, 214358, 214359, 214360, 214361, 214362, 214363, 214364, 214365, 214366, 214367, 214368, 214369, 214370, 214371, 214372, 214373, 214374, 214375, 214376, 214377, 214378, 214379, 214380, 214381, 214382, 214383, 214384, 214385, 214386, 214387, 214388, 214389, 214390, 214391, 214392, 214393, 214394, 214395, 214396, 214397, 214398, 214399, 214400, 214401, 214402, 214403, 214404, 214405, 214406, 214407, 214408, 214409, 214410, 214411, 214412, 214413, 214414, 214415, 214416, 214417, 214418, 214419, 214420, 214421, 214422, 214423, 214424, 214425, 214426, 214427, 214428, 214429, 214430, 214431, 214432, 214433, 214434, 214435, 214436, 214437, 214438, 214439, 214440, 214441, 214442) c6( ) c7(aR, U); #c1(METTL1) c2(NP_005362) c3(tRNA (guanine-N(7)-)-methyltransferase isoform a) c4(155440) c5(155441, 155442, 155443, 155444, 155445, 155446) c6( ) c7(Xw, V, dL); #c1(METTL1) c2(NP_075422) c3(tRNA (guanine-N(7)-)-methyltransferase isoform c) c4(213859) c5(213860, 213861, 213862, 213863, 213864, 213865) c6( ) c7(Xw, V, dL); #c1(METTL13) c2(NP_001007240) c3(methyltransferase-like protein 13 isoform 3) c4(22594) c5(22595, 22596, 22597, 22598, 22599, 22600) c6( ) c7(iR, aq, T, B, jh); #c1(METTL13) c2(NP_057019) c3(methyltransferase-like protein 13 isoform 1) c4(188540, 188541, 188542) c5(188543, 188544, 188545, 188546, 188547, 188548, 188549, 188550, 188551, 188552, 188553, 188554, 188555, 188556, 188557, 188558, 188559, 188560) c6( ) c7(iR, aq, T, B, jh); #c1(METTL13) c2(XP_011507917) c3(methyltransferase-like protein 13 isoform X1) c4(298226) c5(298227, 298228, 298229, 298230, 298231, 298232) c6( ) c7(iR, aq, T, B, jh); #c1(METTL16) c2(NP_076991) c3(methyltransferase-like protein 16) c4(214649, 214650, 214651, 214652) c5(214653, 214654, 214655, 214656, 214657, 214658, 214659, 214660, 214661, 214662, 214663, 214664, 214665) c6( ) c7(ac, W); #c1(METTL16) c2(XP_011522311) c3(methyltransferase-like protein 16 isoform X1) c4( ) c5(316998, 316999, 317000, 317001, 317002, 317003, 317004, 317005, 317006, 317007, 317008) c6( ) c7(ac, W); #c1(METTL17) c2(NP_001025162) c3(methyltransferase-like protein 17, mitochondrial isoform 1 precursor) c4(29374, 29375) c5(29376, 29377, 29378, 29379, 29380, 29381, 29382) c6( ) c7(kC); #c1(METTL17) c2(NP_073571) c3(methyltransferase-like protein 17, mitochondrial isoform 2 precursor) c4(212883) c5(212884, 212885, 212886, 212887, 212888, 212889, 212890, 212891, 212892, 212893, 212894, 212895) c6( ) c7(kC); #c1(METTL18) c2(XP_011508450) c3(histidine protein methyltransferase 1 homolog isoform X1) c4(299170, 299171) c5(299172, 299173, 299174, 299175, 299176, 299177, 299178, 299179, 299180, 299181, 299182, 299183, 299184, 299185, 299186, 299187) c6( ) c7(bA, ey, M, cz); #c1(METTL21A) c2(NP_660323) c3(protein N-lysine methyltransferase METTL21A) c4(240913, 240914) c5(240915, 240916, 240917, 240918, 240919, 240920, 240921, 240922, 240923, 240924, 240925, 240926, 240927, 240928, 240929, 240930, 240931, 240932, 240933) c6( ) c7(fq); #c1(METTL21A) c2(XP_011509027) c3(protein N-lysine methyltransferase METTL21A isoform X3) c4( ) c5(299634, 299635, 299636) c6( ) c7(fq); #c1(METTL21A) c2(XP_011509033) c3(protein N-lysine methyltransferase METTL21A isoform X8) c4( ) c5(299637) c6( ) c7(fq); #c1(METTL21A) c2(XP_011509034) c3(protein N-lysine methyltransferase METTL21A isoform X9) c4( ) c5(299638, 299639, 299640, 299641, 299642, 299643, 299644, 299645, 299646) c6( ) c7(fq); #c1(METTL21B) c2(NP_056248) c3(protein-lysine methyltransferase METTL21B isoform a) c4(186713) c5(186714, 186715, 186716, 186717, 186718, 186719) c6( ) c7(V); #c1(METTL21B) c2(NP_996797) c3(protein-lysine methyltransferase METTL21B isoform b) c4(264560) c5(264561, 264562, 264563, 264564, 264565, 264566) c6( ) c7(V); #c1(METTL21C) c2(NP_001010977) c3(protein-lysine methyltransferase METTL21C) c4(24388) c5(24389, 24390, 24391, 24392, 24393, 24394) c6( ) c7(bA); #c1(METTL24) c2(NP_001116836) c3(methyltransferase-like protein 24 precursor) c4(43956) c5(43957, 43958, 43959, 43960, 43961, 43962, 43963, 43964) c6(43965, 43966) c7(aw); #c1(METTL6) c2(XP_005264927) c3(methyltransferase-like protein 6 isoform X2) c4( ) c5(279287, 279288, 279289, 279290, 279291, 279292, 279293, 279294, 279295, 279296, 279297, 279298, 279299, 279300, 279301, 279302, 279303, 279304, 279305, 279306, 279307, 279308, 279309) c6( ) c7(bz, aT); #c1(METTL6) c2(XP_006713032) c3(methyltransferase-like protein 6 isoform X1) c4(286974) c5(286975, 286976, 286977, 286978, 286979, 286980, 286981, 286982, 286983, 286984) c6( ) c7(bz, aT); #c1(METTL7A) c2(NP_054752) c3(methyltransferase-like protein 7A precursor) c4(177586, 177587, 177588) c5(177589, 177590, 177591, 177592, 177593, 177594, 177595, 177596, 177597, 177598, 177599, 177600, 177601, 177602, 177603, 177604, 177605, 177606, 177607, 177608, 177609, 177610, 177611, 177612, 177613, 177614, 177615, 177616, 177617, 177618) c6( ) c7(dP); #c1(METTL9) c2(NP_001070648) c3(methyltransferase-like protein 9 isoform 2 precursor) c4(34644) c5(34645, 34646, 34647, 34648, 34649, 34650) c6( ) c7(T, b, xX, if, aoA, qN, i, GR); #c1(METTL9) c2(NP_057109) c3(methyltransferase-like protein 9 isoform 1 precursor) c4(188952, 188953) c5(188954, 188955, 188956, 188957, 188958, 188959, 188960, 188961, 188962, 188963, 188964, 188965) c6( ) c7(T, b, xX, if, aoA, qN, i, GR); #c1(MEX3B) c2(NP_115622) c3(RNA-binding protein MEX3B) c4(223387) c5(223388, 223389, 223390, 223391, 223392, 223393) c6( ) c7(fq); #c1(MEX3C) c2(NP_057710) c3(RNA-binding E3 ubiquitin-protein ligase MEX3C) c4(192487) c5(192488, 192489, 192490, 192491, 192492, 192493) c6( ) c7(aw, cz, q, qa, r); #c1(MEX3D) c2(NP_001167589) c3(RNA-binding protein MEX3D isoform 2) c4(69344, 69345) c5(69346, 69347, 69348, 69349, 69350, 69351, 69352) c6( ) c7(ae, ad); #c1(MEX3D) c2(NP_976049) c3(RNA-binding protein MEX3D isoform 1) c4(262887) c5(262888, 262889, 262890, 262891, 262892, 262893, 262894, 262895, 262896, 262897, 262898) c6( ) c7(ae, ad); #c1(MFAP3) c2(NP_001128509) c3(microfibril-associated glycoprotein 3 isoform 2) c4( ) c5(50123, 50124, 50125, 50126, 50127) c6( ) c7(fq); #c1(MFAP3) c2(NP_001229265) c3(microfibril-associated glycoprotein 3 isoform 1 precursor) c4(84065, 84066, 84067, 84068, 84069) c5(84070, 84071, 84072, 84073, 84074, 84075, 84076, 84077, 84078, 84079, 84080, 84081, 84082, 84083, 84084, 84085, 84086, 84087, 84088, 84089, 84090, 84091, 84092, 84093, 84094, 84095, 84096, 84097, 84098) c6( ) c7(fq); #c1(MFAP4) c2(NP_001185624) c3(microfibril-associated glycoprotein 4 isoform 1 precursor) c4(75990) c5(75991, 75992, 75993, 75994, 75995, 75996) c6( ) c7(t, e); #c1(MFAP4) c2(NP_002395) c3(microfibril-associated glycoprotein 4 isoform 2 precursor) c4(128092) c5(128093, 128094, 128095, 128096, 128097, 128098) c6( ) c7(t, e); #c1(MFAP5) c2(NP_001284638) c3(microfibrillar-associated protein 5 isoform b precursor) c4(112212) c5(112213, 112214, 112215, 112216, 112217, 112218, 112219, 112220, 112221, 112222, 112223, 112224, 112225, 112226) c6( ) c7(t, m); #c1(MFAP5) c2(NP_001284640) c3(microfibrillar-associated protein 5 isoform d precursor) c4(112227) c5(112228, 112229, 112230, 112231, 112232, 112233, 112234, 112235) c6( ) c7(t, m); #c1(MFAP5) c2(NP_003471) c3(microfibrillar-associated protein 5 isoform a precursor) c4(138600, 138601) c5(138602, 138603, 138604, 138605, 138606, 138607, 138608, 138609, 138610, 138611, 138612, 138613, 138614, 138615, 138616) c6(138617) c7(t, m); #c1(MFGE8) c2(NP_001108086) c3(lactadherin isoform b precursor) c4(43092) c5(43093, 43094, 43095, 43096, 43097, 43098) c6( ) c7(bdo, T, dD, jp, qb, ea, bS, eq, C, mC, eA, aT, cy, dL, bK, bq, eL, aiB, aW, Y, ff, eZ, en, bN, aFb, Ei, U, uz, fL); #c1(MFGE8) c2(NP_005919) c3(lactadherin isoform a preproprotein) c4(160364) c5(160365, 160366, 160367, 160368, 160369, 160370) c6( ) c7(bdo, T, dD, jp, qb, ea, bS, eq, C, mC, eA, aT, cy, dL, bK, bq, eL, aiB, aW, Y, ff, eZ, en, bN, aFb, Ei, U, uz, fL); #c1(MFHAS1) c2(NP_004216) c3(malignant fibrous histiocytoma-amplified sequence 1) c4(144360) c5(144361, 144362, 144363, 144364, 144365, 144366) c6( ) c7(Gp, cdU, dt, fM, bX); #c1(MFI2) c2(NP_005920) c3(melanotransferrin isoform 1 precursor) c4(160371) c5(160372, 160373, 160374, 160375, 160376, 160377) c6( ) c7(Mo, T, cdV, ac, nM, ya, Y, Ou, ci, be, Xh, af, cp, L); #c1(MFI2) c2(NP_201573) c3(melanotransferrin isoform 2 precursor) c4(228279) c5(228280, 228281, 228282, 228283, 228284, 228285) c6( ) c7(Mo, T, cdV, ac, nM, ya, Y, Ou, ci, be, Xh, af, cp, L); #c1(MFN1) c2(XP_005247653) c3(mitofusin-1 isoform X1) c4(267893, 267894, 267895, 267896) c5(267897, 267898, 267899, 267900, 267901, 267902, 267903, 267904, 267905, 267906, 267907, 267908, 267909, 267910, 267911, 267912, 267913, 267914, 267915, 267916, 267917, 267918, 267919, 267920, 267921, 267922, 267923, 267924) c6( ) c7(T, bux, pZ, c, ae, ad); #c1(MFRP) c2(NP_113621) c3(membrane frizzled-related protein) c4(221774) c5(221775, 221776, 221777, 221778, 221779, 221780, 221781, 221782, 221783, 221784) c6( ) c7(nk, oQ, cdY, IR, nb, W, cdW, kj, bnP, sa, Be, cdZ, aqV, nw, v, OL, cdX, ei, nC, IJ); #c1(MFSD1) c2(NP_073573) c3(major facilitator superfamily domain-containing protein 1 isoform 1) c4(212903, 212904) c5(212905, 212906, 212907, 212908, 212909, 212910, 212911, 212912, 212913, 212914, 212915, 212916) c6( ) c7(ey); #c1(MFSD1) c2(XP_006713793) c3(major facilitator superfamily domain-containing protein 1 isoform X1) c4(287372, 287373) c5(287374, 287375, 287376, 287377, 287378, 287379, 287380, 287381, 287382, 287383, 287384, 287385) c6( ) c7(ey); #c1(MFSD11) c2(NP_001229466) c3(UNC93-like protein MFSD11 isoform 2) c4(84557) c5(84558, 84559, 84560, 84561, 84562, 84563) c6( ) c7(ey); #c1(MFSD11) c2(NP_077287) c3(UNC93-like protein MFSD11 isoform 1) c4(214948) c5(214949, 214950, 214851, 214952, 214953, 214954) c6( ) c7(ey); #c1(MFSD12) c2(NP_778148) c3(major facilitator superfamily domain-containing protein 12 isoform c) c4(251368) c5(251369, 251370, 251371, 251372, 251373, 251374) c6( ) c7(cm, T); #c1(MFSD12) c2(XP_006722710) c3(major facilitator superfamily domain-containing protein 12 isoform X1) c4(294847) c5(294848, 294849, 294850, 294851, 294852, 294853) c6( ) c7(cm, T); #c1(MFSD12) c2(XP_011525986) c3(major facilitator superfamily domain-containing protein 12 isoform X3) c4(320356) c5(320357, 320358, 320359, 320360, 320361, 320362) c6( ) c7(cm, T); #c1(MFSD6) c2(NP_060164) c3(major facilitator superfamily domain-containing protein 6) c4(194553, 194554, 194555) c5(194556, 194557, 194558, 194559, 194560, 194561, 194562, 194563, 194564, 194565, 194566, 194567, 194568, 194569, 194570, 194571, 194572, 194573, 194574, 194575, 194576, 194577, 194578, 194579, 194580, 194581, 194582) c6( ) c7(bN, bX); #c1(MFSD6) c2(XP_005246713) c3(major facilitator superfamily domain-containing protein 6 isoform X2) c4(267374, 267375, 267376) c5(267377, 267378, 267379, 267380, 267381, 267382, 267383, 267384, 267385, 267386, 267387, 267388, 267389) c6( ) c7(bN, bX); #c1(MFSD7) c2(NP_001281270) c3(major facilitator superfamily domain-containing protein 7 isoform 1) c4(111648) c5(111649, 111650, 111651, 111652, 111653, 111654) c6( ) c7(ci); #c1(MFSD7) c2(NP_001281271) c3(major facilitator superfamily domain-containing protein 7 isoform 3) c4(111655) c5(111656, 111657, 111658, 111659, 111660, 111661) c6( ) c7(ci); #c1(MFSD7) c2(NP_115595) c3(major facilitator superfamily domain-containing protein 7 isoform 2) c4(223311) c5(223312, 223313, 223314, 223315, 223316, 223317) c6( ) c7(ci); #c1(MFSD7) c2(XP_011511877) c3(major facilitator superfamily domain-containing protein 7 isoform X8) c4( ) c5(302601, 302602) c6( ) c7(ci); #c1(MFSD8) c2(NP_689991) c3(major facilitator superfamily domain-containing protein 8) c4(244666) c5(244667, 244668, 244669, 244670, 244671, 244672) c6( ) c7(U, Lq, rY, cea); #c1(MFSD8) c2(XP_005262957) c3(major facilitator superfamily domain-containing protein 8 isoform X8) c4(278175) c5(278176, 278177, 278178, 278179, 278180, 278181) c6( ) c7(U, Lq, rY, cea); #c1(MFSD8) c2(XP_011530132) c3(major facilitator superfamily domain-containing protein 8 isoform X2) c4( ) c5(326030) c6( ) c7(U, Lq, rY, cea); #c1(MFSD8) c2(XP_011530134) c3(major facilitator superfamily domain-containing protein 8 isoform X7) c4(326031) c5(326032, 326033, 326034, 326035, 326036) c6( ) c7(U, Lq, rY, cea); #c1(MGA) c2(NP_001074010) c3(MAX gene-associated protein isoform 2) c4(36937) c5(36938, 36939, 36940, 36941, 36942, 36943) c6( ) c7(ou, ft, aW, qK, cj, aT); #c1(MGA) c2(NP_001157745) c3(MAX gene-associated protein isoform 1) c4(62510, 62511) c5(62512, 62513, 62514, 62515, 62516, 62517, 62518, 62519, 62520, 62521, 62522, 62523, 62524) c6( ) c7(ou, ft, aW, qK, cj, aT); #c1(MGA) c2(XP_011519702) c3(MAX gene-associated protein isoform X11) c4( ) c5(314376) c6( ) c7(ou, ft, aW, qK, cj, aT); #c1(MGAM) c2(NP_004659) c3(maltase-glucoamylase, intestinal) c4(148589, 148590) c5(148591, 148592, 148593, 148594, 148595, 148596) c6( ) c7(T, ft, aW, ff, cj, aT, en); #c1(MGAM) c2(XP_011514975) c3(maltase-glucoamylase, intestinal isoform X1) c4(307774) c5(307775, 307776, 307777, 307778, 307779, 307780, 307781, 307782, 307783, 307784, 307785, 307786) c6( ) c7(T, ft, aW, ff, cj, aT, en); #c1(MGARP) c2(NP_116012) c3(protein MGARP) c4(225205) c5(225206, 225207, 225208, 225209, 225210, 225211, 225212) c6( ) c7(y); #c1(MGAT1) c2(XP_011532865) c3(alpha-1,3-mannosyl-glycoprotein 2-beta-N-acetylglucosaminyltransferase isoform X1) c4(328968, 328969, 328970, 328971, 328972, 328973, 328974, 328975, 328976, 328977, 328978) c5(328979, 328980, 328981, 328982, 328983, 328984, 328985, 328986, 328987, 328988, 328989, 328990, 328991, 328992, 328993, 328994, 328995, 328996, 328997, 328998, 328999, 329000, 329001, 329002, 329003, 329004, 329005, 329006, 329007, 329008, 329009, 329010, 329011, 329012, 329013, 329014, 329015, 329016, 329017, 329018, 329019, 329020, 329021, 329022, 329023, 329024, 329025, 329026, 329027, 329028, 329029, 329030, 329031, 329032, 329033, 329034, 329035, 329036, 329037, 329038, 329039, 329040, 329041, 329042, 329043, 329044, 329045, 329046, 329047, 329048, 329049, 329050, 329051, 329052, 329053, 329054, 329055, 329056, 329057, 329058, 329059, 329060) c6( ) c7(ke, T, A, aW, aT, gl, aj, aqm, v, Eg, V, ae, J, ad); #c1(MGAT2) c2(NP_002399) c3(alpha-1,6-mannosyl-glycoprotein 2-beta-N-acetylglucosaminyltransferase) c4(128106, 128107) c5(128108, 128109, 128110, 128111, 128112, 128113, 128114, 128115, 128116, 128117, 128118, 128119) c6( ) c7(dq, v, dv, ceb); #c1(MGAT3) c2(NP_001091740) c3(beta-1,4-mannosyl-glycoprotein 4-beta-N-acetylglucosaminyltransferase) c4(38722) c5(38723, 38724, 38725, 38726, 38727, 38728, 38729, 38730, 38731, 38732, 38733) c6( ) c7(aW, Y, aT, aq, v, nJ, B, hX); #c1(MGAT3) c2(XP_005261665) c3(beta-1,4-mannosyl-glycoprotein 4-beta-N-acetylglucosaminyltransferase isoform X2) c4(277576) c5(277577) c6( ) c7(aW, Y, aT, aq, v, nJ, B, hX); #c1(MGAT3) c2(XP_006724315) c3(beta-1,4-mannosyl-glycoprotein 4-beta-N-acetylglucosaminyltransferase isoform X3) c4(295937) c5(295938, 295939, 295940, 295941, 295942, 295943) c6( ) c7(aW, Y, aT, aq, v, nJ, B, hX); #c1(MGAT4A) c2(NP_001153626) c3(alpha-1,3-mannosyl-glycoprotein 4-beta-N-acetylglucosaminyltransferase A isoform 2) c4(60785) c5(60786, 60787, 60788, 60789, 60790, 60791) c6( ) c7(T, aC, dq, v, bK, nJ); #c1(MGAT4A) c2(NP_036346) c3(alpha-1,3-mannosyl-glycoprotein 4-beta-N- acetylglucosaminyltransferase A isoform 1) c4(173111) c5(173112, 173113, 173114, 173115, 173116, 173117, 173118, 173119, 173120, 173121, 173122, 173123, 173124, 173125) c6( ) c7(T, aC, dq, v, bK, nJ); #c1(MGAT4B) c2(NP_055090) c3(alpha-1,3-mannosyl-glycoprotein 4-beta-N- acetylglucosaminyltransferase B isoform 1 precursor) c4(178880) c5(178881, 178882, 178883, 178884, 178885, 178886) c6( ) c7(nJ, T, aC); #c1(MGAT4B) c2(NP_463459) c3(alpha-1,3-mannosyl-glycoprotein 4-beta-N-acetylglucosaminyltransferase B isoform 2) c4(230382) c5(230383, 230384, 230385, 230386, 230387, 230388) c6( ) c7(nJ, T, aC); #c1(MGAT4C) c2(NP_037376) c3(alpha-1,3-mannosyl-glycoprotein 4-beta-N-acetylglucosaminyltransferase C) c4( ) c5(175113, 175114, 175115, 175116, 175117, 175118, 175119, 175120, 175121, 175122, 175123, 175124, 175125, 175126, 175127, 175128, 175129, 175130, 175131, 175132, 175133, 175134, 175135, 175136, 175137, 175138, 175139, 175140, 175141175142, 175143, 175144) c6( ) c7(aj); #c1(MGAT4C) c2(XP_005268833) c3(alpha-1,3-mannosyl-glycoprotein 4-beta-N- acetylglucosaminyltransferase C isoform X4) c4(282111) c5(282112, 282113, 282114, 282115, 282116, 282117, 282118, 282119, 282120, 282121) c6( ) c7(aj); #c1(MGAT4C) c2(XP_011536451) c3(alpha-1,3-mannosyl-glycoprotein 4-beta-N-acetylglucosaminyltransferase C isoform X2) c4(333815) c5( ) c6( ) c7(aj); #c1(MGAT4C) c2(XP_011536453) c3(alpha-1,3-mannosyl-glycoprotein 4-beta-N- acetylglucosaminyltransferase C isoform X3) c4(333816, 333817) c5(333818) c6( ) c7(aj); #c1(MGAT4C) c2(XP_011536457) c3(alpha-1,3-mannosyl-glycoprotein 4-beta-N-acetylglucosaminyltransferase C isoform X5) c4( ) c5(333819) c6( ) c7(aj); #c1(MGAT5) c2(XP_011509505) c3(alpha-1,6-mannosylglycoprotein 6-beta-N-acetylglucosaminyltransferase A isoform X1) c4(300075) c5(300076, 300077, 300078, 300079, 300080, 300081, 300082, 300083, 300084, 300085) c6( ) c7(T, dA, aA, bB, gf, ci, V, abC, ad, av, aYy, aT, dL, an, eu, B, s, JI, aW, Y, fQ, alw, aF, iV, cm, fq, ac, bE, y, X); #c1(MGAT5B) c2(NP_001186101) c3(alpha-1,6-mannosylglycoprotein 6-beta-N-acetylglucosaminyltransferase B isoform 3) c4(77123) c5(77124, 77125, 77126, 77127, 77128, 77129) c6( ) c7(yt, T, kI, aF, aA); #c1(MGAT5B) c2(NP_653278) c3(alpha-1,6-mannosylglycoprotein 6-beta-N-acetylglucosaminyltransferase B isoform 1) c4(239483) c5(239484, 239485, 239486, 239487, 239488, 239489) c6( ) c7(yt, T, kI, aF, aA); #c1(MGAT5B) c2(NP_945193) c3(alpha-1,6-mannosylglycoprotein 6-beta-N-acetylglucosaminyltransferase B isoform 2) c4(260760) c5(260761, 260762, 260763, 260764, 260765, 260766) c6( ) c7(yt, T, kI, aF, aA); #c1(MGAT5B) c2(XP_011522655) c3(alpha-1,6-mannosylglycoprotein 6-beta-N-acetylglucosaminyltransferase B isoform X5) c4(317215) c5(317216, 317217, 317218, 317219, 317220, 317221) c6( ) c7(yt, T, kI, aF, aA); #c1(MGEA5) c2(NP_001135906) c3(protein O-GlcNAcase isoform b) c4(53531, 53532) c5(53533, 53534, 53535, 53536, 53537, 53538, 53539, 53540, 53541, 53542, 53543, 53544) c6( ) c7(bL, dD, bHJ, Ol, ea, bDa, aw, cz, cQ, aj, v, vQ, eq, ww, q, J, cd, bHN, ad, bCZ, ip, bDz, gd, aT, IG, ae, cec, d, tb, aW, r, zC, Vk, vU, aDA, kg, bHI, tV, U, akH, awM, Lq, dy, mf, hh, bCS); #c1(MGEA5) c2(NP_036347) c3(protein O-GlcNAcase isoform a) c4(173126) c5(173127, 173128, 173129, 173130, 173131, 173132, 173133, 173134, 173135, 173136, 173137, 173138) c6( ) c7(bL, dD, bHJ, Ol, ea, bDa, aw, cz, cQ, aj, v, vQ, eq, ww, q, J, cd, bHN, ad, bCZ, ip, bDz, gd, aT, IG, ae, cec, d, tb, aW, r, zC, Vk, vU, aDA, kg, bHI, tV, U, akH, awM, Lq, dy, mf, hh, bCS); #c1(MGEA5) c2(XP_011537482) c3(protein O-GlcNAcase isoform X1) c4(335097) c5( ) c6( ) c7(bL, dD, bHJ, Ol, ea, bDa, aw, cz, cQ, aj, v, vQ, eq, ww, q, J, cd, bHN, ad, bCZ, ip, bDz, gd, aT, IG, ae, cec, d, tb, aW, r, zC, Vk, vU, aDA, kg, bHI, tV, U, akH, awM, Lq, dy, mf, hh, bCS); #c1(MGEA5) c2(XP_011537484) c3(protein O-GlcNAcase isoform X3) c4(335098, 335099) c5(335100, 335101, 335102, 335103, 335104, 335105, 335106, 335107, 335108, 335109, 335110, 335111) c6( ) c7(bL, dD, bHJ, Ol, ea, bDa, aw, cz, cQ, aj, v, vQ, eq, ww, q, J, cd, bHN, ad, bCZ, ip, bDz, gd, aT, IG, ae, cec, d, tb, aW, r, zC, Vk, vU, aDA, kg, bHI, tV, U, akH, awM, Lq, dy, mf, hh, bCS); #c1(MGLL) c2(NP_001003794) c3(monoglyceride lipase isoform 2) c4(20131, 20132) c5(20133, 20134, 20135, 20136, 20137, 20138, 20139, 20140, 20141, 20142, 20143, 20144, 20145, 20146, 20147) c6( ) c7(T, aiB, s, bE, aW, r, aT, bB, v, PQ, eA, jb, ae, q, ad, bA); #c1(MGLL) c2(NP_001243514) c3(monoglyceride lipase isoform 3) c4(90987) c5(90988, 90989, 90990, 90991, 90992, 90993, 90994, 90995, 90996, 90997, 90998, 90999) c6( ) c7(T, aiB, s, bE, aW, r, aT, bB, v, PQ, eA, jb, ae, q, ad, bA); #c1(MGLL) c2(NP_009214) c3(monoglyceride lipase isoform 1) c4(171546, 171547) c5(171548, 171549, 171550, 171551, 171552, 171553, 171554) c6( ) c7(T, aiB, s, bE, aW, r, aT, bB, v, PQ, eA, jb, ae, q, ad, bA); #c1(MGME1) c2(NP_443097) c3(mitochondrial genome maintenance exonuclease 1) c4(229402) c5(229403, 229404, 229405, 229406, 229407, 229408) c6( ) c7(AI, ced, kC); #c1(MGME1) c2(XP_011527697) c3(mitochondrial genome maintenance exonuclease 1 isoform X2) c4(322629) c5(322630, 322631, 322632, 322633, 322634, 322635) c6( ) c7(AI, ced, kC); #c1(MGMT) c2(NP_002403) c3(methylated-DNA-protein-cysteine methyltransferase) c4(128128) c5(128129, 128130, 128131, 128132, 128133, 128134) c6( ) c7(T, os, aC, fR, pf, if, al, fd, bB, amM, ci, ip, aE, Qk, K, hu, eL, cp, yo, aW, aEI, aoo, hI, LZ, nY, g, as, eF, bw, iP, eM, nB, Ip, iT, m, ik, QS, bGC, cE, sc, IT, ht, NT, qy, n, awr, qN, BI, ft, gd, bUP, Gw, dL, hB, oS, auM, GA, cM, fs, Ld, Zj, Wt, bJ, bP, asI, dB, hk, hL, hR, at, it, B, bL, fM, dA, aA, hy, bX, pd, q, eA, XX, Ig, aT, jj, ae, bkI, jf, avg, s, nO, Y, Lf, r, qL, en, bu, cl, t, iK, ck, kP, Dy, oX, ij, aws, bt, On, vi, GI, id, iW, YM, jh, OE, oZ, hF, Fc, ad, afb, hX, iC, av, hd, io, hP, ji, fb, d, BO, ff, eH, aF, VI, iV, bz, bF, gk, amS, Ew, bE, Ny, auH, Gu, hE, X); #c1(MGP) c2(NP_000891) c3(matrix Gla protein isoform 2 precursor) c4(16956) c5(16957, 16958, 16959, 16960, 16961, 16962, 16963) c6( ) c7(sY, T, dD, eR, ea, e, aw, eX, wo, aj, fo, j, ci, eq, fr, zP, q, J, Hr, fU, kI, aT, acb, eV, K, bA, zQ, d, cee, cW, Y, aW, ceg, r, rs, g, dw, uC, wU, cef, rR, rq, hO, aS, dy, IS, aAN); #c1(MGP) c2(NP_001177768) c3(matrix Gla protein isoform 1 precursor) c4(72998) c5(72999, 73000, 73001, 73002, 73003, 73004, 73005) c6( ) c7(sY, T, dD, eR, ea, e, aw, eX, wo, aj, fo, j, ci, eq, fr, zP, q, J, Hr, fU, kI, aT, acb, eV, K, bA, zQ, d, cee, cW, Y, aW, ceg, r, rs, g, dw, uC, wU, cef, rR, rq, hO, aS, dy, IS, aAN); #c1(MGRN1) c2(NP_001135761) c3(E3 ubiquitin-protein ligase MGRN1 isoform 2) c4( ) c5(53137) c6( ) c7(hk, Y, dt); #c1(MGRN1) c2(NP_001135762) c3(E3 ubiquitin-protein ligase MGRN1 isoform 3) c4(53138) c5(53139, 53140, 53141, 53142, 53143, 53144) c6( ) c7(hk, Y, dt); #c1(MGRN1) c2(NP_001135763) c3(E3 ubiquitin-protein ligase MGRN1 isoform 4) c4( ) c5(53145, 53146, 53147, 53148, 53149, 53150, 53151, 53152, 53153, 53154, 53155) c6( ) c7(hk, Y, dt); #c1(MGRN1) c2(NP_056061) c3(E3 ubiquitin-protein ligase MGRN1 isoform 1) c4(185466, 185467) c5(185468, 185469, 185470, 185471, 185472, 185473) c6( ) c7(hk, Y, dt); #c1(MGRN1) c2(XP_005255276) c3(E3 ubiquitin-protein ligase MGRN1 isoform X5) c4(273579) c5( ) c6( ) c7(hk, Y, dt); #c1(MGST1) c2(NP_001247440) c3(microsomal glutathione S-transferase 1 isoform a) c4(93629, 93630, 93631) c5(93632, 93633, 93634, 93635, 93636, 93637, 93638, 93639, 93640, 93641, 93642, 93643, 93644, 93645, 93646, 93647, 93648, 93649, 93650, 93651, 93652, 93653, 93654, 93655, 93656, 93657, 93658, 93659, 93660, 93661, 93662, 93663) c6( ) c7(GI, av, W, ff, U, r, K, en, cm, iK, bz, dx); #c1(MGST1) c2(NP_001254527) c3(microsomal glutathione S-transferase 1 isoform c) c4(94593) c5(94594, 94595, 94596, 94597, 94598, 94599, 94600, 94601, 94602, 94603, 94604, 94605) c6( ) c7(GI, av, W, ff, U, r, K, en, cm, iK, bz, dx); #c1(MGST1) c2(XP_011518975) c3(microsomal glutathione S-transferase 1 isoform X2) c4(313439) c5( ) c6( ) c7(GI, av, W, ff, U, r, K, en, cm, iK, bz, dx); #c1(MGST2) c2(NP_001191295) c3(microsomal glutathione S-transferase 2 isoform 1 precursor) c4(81333) c5(81334, 81335, 81336, 81337, 81338, 81339, 81340, 81341, 81342, 81343) c6( ) c7(aC, cr, iU, Jr); #c1(MGST2) c2(NP_001191297) c3(microsomal glutathione S-transferase 2 isoform 3 precursor) c4(81344) c5(81345, 81346, 81347, 81348, 81349, 81350) c6( ) c7(aC, cr, iU, Jr); #c1(MGST3) c2(NP_004519) c3(microsomal glutathione S-transferase 3) c4(147167, 147168) c5(147169, 147170, 147171, 147172, 147173, 147174, 147175, 147176, 147177, 147178, 147179, 147180, 147181, 147182, 147183, 147184, 147185, 147186, 147187, 147188, 147189, 147190, 147191, 147192, 147193, 147194, 147195, 147196) c6( ) c7(bL, af, bA, cz); #c1(MIA) c2(NP_001189482) c3(melanoma-derived growth regulatory protein precursor) c4(80217, 80218) c5(80219, 80220, 80221, 80222, 80223, 80224, 80225, 80226, 80227, 80228, 80229, 80230, 80231, 80232, 80233, 80234) c6( ) c7(T, kh, aC, aw, aA, j, ci, ale, qN, eA, eJ, iu, jz, aE, azh, cp, atX, d, Y, ff, kp, aF, en, g, bz, ck, bE, at, lf, B, y); #c1(MIA2) c2(NP_473365) c3(melanoma inhibitory activity protein 2 precursor) c4(230410, 230411) c5(230412, 230413, 230414, 230415, 230416, 230417, 230418, 230419, 230420, 230421, 230422, 230423, 230424, 230425, 230426, 230427) c6(230428, 230429, 230430, 230431) c7(F, ff, hl, aq, en, B); #c1(MIA3) c2(NP_001287796) c3(melanoma inhibitory activity protein 3 isoform 2) c4(112897, 112898, 112899) c5(112900, 112901, 112902, 112903, 112904, 112905, 112906, 112907, 112908, 112909, 112910, 112911, 112912, 112913, 112914, 112915, 112916) c6( ) c7(bL, dP, yo, A, Y, aw, mg, cj, mf, j, pz, B, lc); #c1(MIA3) c2(NP_940953) c3(melanoma inhibitory activity protein 3 isoform 1 precursor) c4(260181, 260182) c5(260183, 260184, 260185, 260186, 260187, 260188, 260189, 260190, 260191, 260192, 260193, 260194) c6( ) c7(bL, dP, yo, A, Y, aw, mg, cj, mf, j, pz, B, lc); #c1(MIA3) c2(XP_005273178) c3(melanoma inhibitory activity protein 3 isoform X1) c4(284326) c5( ) c6( ) c7(bL, dP, yo, A, Y, aw, mg, cj, mf, j, pz, B, lc); #c1(MIA3) c2(XP_006711367) c3(melanoma inhibitory activity protein 3 isoform X2) c4(285957, 285958) c5(285959, 285960, 285961, 285962, 285963, 285964, 285965, 285966, 285967, 285968, 285969, 285970) c6( ) c7(bL, dP, yo, A, Y, aw, mg, cj, mf, j, pz, B, lc); #c1(MIA3) c2(XP_011507815) c3(melanoma inhibitory activity protein 3 isoform X3) c4(297955) c5(297956, 297957, 297958, 297959, 297960, 297961) c6( ) c7(bL, dP, yo, A, Y, aw, mg, cj, mf, j, pz, B, lc); #c1(MIB1) c2(NP_065825) c3(E3 ubiquitin-protein ligase MIB1) c4(205699) c5(205700, 205701, 205702, 205703, 205704, 205705) c6( ) c7(T, apr, hV, fd, ci, ip, bv, gJ, MO, pk, eL, eG, akV, bPf, yo, aW, Ls, az, g, as, eF, avZ, vA, m, IT, Or, NT, cek, qy, n, fr, cc, dL, YI, aiB, ge, aJG, YE, bfW, op, bP, dB, eD, KT, ceh, WL, B, aGn, fM, avm, aA, acn, cej, q, er, eA, RI, cei, nv, qK, aT, rz, ae, s, Y, qL, en, cl, t, KQ, QG, Dy, au, RW, aHB, zu, bt, VB, ava, kh, id, Dd, YM, bkL, jh, Fb, aFJ, Fc, iJ, ad, iC, bjn, Db, fb, apw, d, Hq, ff, eH, cr, Hp, bF, aoR, Ew, bhz, y); #c1(MIB2) c2(XP_011539035) c3(E3 ubiquitin-protein ligase MIB2 isoform X3) c4( ) c5(337121) c6( ) c7(Y, hd, fd, s, kH); #c1(MIB2) c2(XP_011539044) c3(E3 ubiquitin-protein ligase MIB2 isoform X12) c4( ) c5(337122, 337123, 337124) c6( ) c7(Y, hd, fd, s, kH); #c1(MICA) c2(NP_000238) c3(MHC class I polypeptide-related sequence A isoform 1 (MICA*001) precursor) c4(5336, 5337, 5338, 5339, 5340) c5(5341, 5342, 5343, 5344, 5345, 5346, 5347, 5348, 5349, 5350, 5351, 5352, 5353, 5354, 5355, 5356, 5357, 5358, 5359, 5360, 5361, 5362, 5363, 5364, 5365, 5366, 5367, 5368, 5369, 5370, 5371, 5372, 5373, 5374) c6( ) c7(T, if, cL, ci, aGX, amW, AW, aE, bFU, K, hH, avq, aW, asD, mQ, ih, hN, g, eF, cm, y, eM, Jr, nB, PV, m, P, bxC, aw, yG, n, aj, fr, qN, jz, lt, ju, bsg, h, eV, ajV, A, mR, oo, ge, fe, aq, acD, Zj, mg, Pr, B, bL, yk, jx, eX, aA, Qo, V, q, J, eA, blC, aT, vH, Tj, hK, ae, oV, Y, r, afq, lo, en, iK, ck, sS, aYx, aaT, jE, ad, wD, hX, I, hd, od, hD, buh, d, IU, ff, eH, cr, eZ, aF, hp, iV, iR, bz, LB, bF, eU, hE, hv); #c1(MICA) c2(NP_001170990) c3(MHC class I polypeptide-related sequence A isoform 2 (MICA*00801) precursor) c4(69726, 69727, 69728, 69729) c5(69730, 69731, 69732, 69733, 69734, 69735, 69736, 69737, 69738, 69739, 69740, 69741, 69742, 69743, 69744, 69745, 69746, 69747, 69748, 69749, 69750, 69751, 69752, 69753, 69754, 69755, 69756, 69757, 69758, 69759, 69760, 69761, 69762, 69763, 69764, 69765, 69766, 69767, 69768, 69769, 69770, 69771, 69772) c6( ) c7(T, if, cL, ci, aGX, amW, AW, aE, bFU, K, hH, avq, aW, asD, mQ, ih, hN, g, eF, cm, y, eM, Jr, nB, PV, m, P, bxC, aw, yG, n, aj, fr, qN, jz, lt, ju, bsg, h, eV, ajV, A, mR, oo, ge, fe, aq, acD, Zj, mg, Pr, B, bL, yk, jx, eX, aA, Qo, V, q, J, eA, blC, aT, vH, Tj, hK, ae, oV, Y, r, afq, lo, en, iK, ck, sS, aYx, aaT, jE, ad, wD, hX, I, hd, od, hD, buh, d, IU, ff, eH, cr, eZ, aF, hp, iV, iR, bz, LB, bF, eU, hE, hv); #c1(MICA) c2(NP_001276083) c3(MHC class I polypeptide-related sequence A isoform 4 (MICA*00801)) c4(107890) c5(107891, 107892, 107893, 107894, 107895, 107896, 107897, 107898, 107899, 107900, 107901, 107902, 107903) c6( ) c7(T, if, cL, ci, aGX, amW, AW, aE, bFU, K, hH, avq, aW, asD, mQ, ih, hN, g, eF, cm, y, eM, Jr, nB, PV, m, P, bxC, aw, yG, n, aj, fr, qN, jz, lt, ju, bsg, h, eV, ajV, A, mR, oo, ge, fe, aq, acD, Zj, mg, Pr, B, bL, yk, jx, eX, aA, Qo, V, q, J, eA, blC, aT, vH, Tj, hK, ae, oV, Y, r, afq, lo, en, iK, ck, sS, aYx, aaT, jE, ad, wD, hX, l, hd, od, hD, huh, d, IU, ff, eH, cr, eZ, aF, hp, iV, iR, bz, LB, bF, eU, hE, hv); #c1(MICAL2) c2(NP_001269592) c3(protein-methionine sulfoxide oxidase MICAL2 isoform a) c4(102108) c5(102109, 102110, 102111, 102112, 102113, 102114) c6( ) c7(bM, T, ac, aw, ae, ad); #c1(MICAL2) c2(NP_001269594) c3(protein-methionine sulfoxide oxidase MICAL2 isoform c) c4(102115) c5(102116, 102117, 102118, 102119, 102120, 102121) c6( ) c7(bM, T, ac, aw, ae, ad); #c1(MICAL2) c2(NP_001269595) c3(protein-methionine sulfoxide oxidase MICAL2 isoform d) c4(102122, 102123) c5(102124, 102125, 102126, 102127, 102128, 102129, 102130, 102131, 102132, 102133, 102134, 102135) c6( ) c7(bM, T, ac, aw, ae, ad); #c1(MICAL2) c2(NP_001269597) c3(protein-methionine sulfoxide oxidase MICAL2 isoform f) c4( ) c5(102136, 102137, 102138, 102139, 102140, 102141, 102142, 102143, 102144, 102145, 102146, 102147, 102148, 102149, 102150, 102151, 102152, 102153, 102154, 102155, 102156, 102157, 102158, 102159, 102160, 102161, 102162, 102163, 102164, 102165, 102166, 102167, 102168, 102169) c6( ) c7(bM, T, ac, aw, ae, ad); #c1(MICAL2) c2(XP_005253306) c3(protein-methionine sulfoxide oxidase MICAL2 isoform X1) c4(272423) c5(272424, 272425, 272426, 272427, 272428, 272429) c6( ) c7(bM, T, ac, aw, ae, ad); #c1(MICAL2) c2(XP_011518792) c3(protein-methionine sulfoxide oxidase MICAL2 isoform X2) c4(313195, 313196) c5(313197) c6( ) c7(bM, T, ac, aw, ae, ad); #c1(MICAL2) c2(XP_011518793) c3(protein-methionine sulfoxide oxidase MICAL2 isoform X3) c4(313198, 313199, 313200) c5( ) c6( ) c7(bM, T, ac, aw, ae, ad); #c1(MICALCL) c2(NP_116256) c3(MICAL C-terminal-like protein) c4(226005, 226006) c5(226007, 226008, 226009, 226010, 226011, 226012) c6( ) c7(EQ); #c1(MICB) c2(NP_001276090) c3(MHC class I polypeptide-related sequence B isoform 3 precursor) c4(107923, 107924, 107925, 107926, 107927, 107928, 107929, 107930) c5(107931, 107932, 107933, 107934, 107935, 107936, 107937, 107938, 107939, 107940, 107941, 107942, 107943, 107944, 107945, 107946, 107947, 107948, 107949, 107950, 107951, 107952, 107953, 107954, 107955, 107956, 107957, 107958, 107959, 107960, 107961, 107962, 107963, 107964, 107965, 107966, 107967, 107968, 107969, 107970, 107971, 107972, 107973, 107974, 107975, 107976, 107977, 107978, 107979, 107980, 107981, 107982, 107983, 107984, 107985, 107986, 107987, 107988, 107989, 107990, 107991, 107992, 107993, 107994) c6( ) c7(bM, T, fR, if, jx, fd, gA, qN, V, q, wD, AW, cc, dV, aT, ja, K, hH, af, buh, atJ, A, aW, eH, cr, r, eZ, hN, aDm, hp, iV, eF, acD, eU, iQ, AH, gZ, fL, y, B); #c1(MICB) c2(NP_005922) c3(MHC class I polypeptide-related sequence B isoform 1 precursor) c4(160393, 160394, 160395, 160396, 160397, 160398, 160399) c5(160400, 160401, 160402, 160403, 160404, 160405, 160406, 160407, 160408, 160409, 160410, 160411, 160412, 160413, 160414, 160415, 160416, 160417, 160418, 160419, 160420, 160421, 160422, 160423, 160424, 160425, 160426, 160427, 160428, 160429, 160430, 160431, 160432, 160433, 160434, 160435, 160436, 160437, 160438, 160439, 160440, 160441, 160442, 160443, 160444, 160445, 160446) c6( ) c7(bM, T, fR, if, jx, fd, gA, qN, V, q, wD, AW, cc, dV, aT, ja, K, hH, af, buh, atJ, A, aW, eH, cr, r, eZ, hN, aDm, hp, iV, eF, acD, eU, iQ, AH, gZ, fL, y, B); #c1(MICB) c2(XP_011512933) c3(MHC class I polypeptide-related sequence B isoform X1) c4( ) c5(304332, 304333, 304334, 304335, 304336, 304337, 304338, 304339) c6( ) c7(bM, T, fR, if, jx, fd, gA, qN, V, q, wD, AW, cc, dV, aT, ja, K, hH, af, buh, atJ, A, aW, eH, cr, r, eZ, hN, aDm, hp, iV, eF, acD, eU, iQ, AH, gZ, fL, y, B); #c1(MICB) c2(XP_011545554) c3(MHC class I polypeptide-related sequence B isoform X1) c4(344323) c5(344324, 344325, 344326, 344327, 344328) c6( ) c7(bM, T, fR, if, jx, fd, gA, qN, V, q, wD, AW, cc, dV, aT, ja, K, hH, af, buh, atJ, A, aW, eH, cr, r, eZ, hN, aDm, hp, iV, eF, acD, eU, iQ, AH, gZ, fL, y, B); #c1(MICB) c2(XP_011545958) c3(MHC class I polypeptide-related sequence B isoform X1) c4(344802) c5(344803, 344804, 344805, 344806, 344807) c6( ) c7(bM, T, fR, if, jx, fd, gA, qN, V, q, wD, AW, cc, dV, aT, ja, K, hH, af, buh, atJ, A, aW, eH, cr, r, eZ, hN, aDm, hp, iV, eF, acD, eU, iQ, AH, gZ, fL, y, B); #c1(MICB) c2(XP_011546355) c3(MHC class I polypeptide-related sequence B isoform X1) c4(345070) c5(345071, 345072, 345073, 345074, 345075) c6( ) c7(bM, T, fR, if, jx, fd, gA, qN, V, q, wD, AW, cc, dV, aT, ja, K, hH, af, buh, atJ, A, aW, eH, cr, r, eZ, hN, aDm, hp, iV, eF, acD, eU, iQ, AH, gZ, fL, y, B); #c1(MICU1) c2(NP_001182447) c3(calcium uptake protein 1, mitochondrial isoform 2) c4(74920, 74921) c5(74922, 74923, 74924, 74925, 74926, 74927, 74928, 74929, 74930, 74931, 74932, 74933, 74934) c6( ) c7(T, nv, bht, xs, oj, bcD, cel, xw, xt); #c1(MICU1) c2(NP_001182448) c3(calcium uptake protein 1, mitochondrial isoform 3) c4(74935, 74936) c5(74937, 74938, 74939, 74940, 74941, 74942, 74943, 74944, 74945, 74946, 74947) c6( ) c7(T, nv, bht, xs, oj, bcD, cel, xw, xt); #c1(MICU1) c2(NP_006068) c3(calcium uptake protein 1, mitochondrial isoform 1) c4(161642) c5(161643, 161644, 161645, 161646, 161647, 161648) c6( ) c7(T, nv, bht, xs, oj, bcD, cel, xw, xt); #c1(MICU3) c2(NP_859074) c3(calcium uptake protein 3, mitochondrial) c4(255508) c5(255509, 255510, 255511, 255512, 255513, 255514) c6( ) c7(cm, sj); #c1(MICU3) c2(XP_006716391) c3(calcium uptake protein 3, mitochondrial isoform X3) c4( ) c5(290274) c6( ) c7(cm, sj); #c1(MID1) c2(NP_001180206) c3(E3 ubiquitin-protein ligase Midline-1 isoform 1) c4(73377, 73378, 73379) c5(73380, 73381, 73382, 73383, 73384, 73385, 73386, 73387, 73388, 73389, 73390, 73391, 73392, 73393, 73394, 73395, 73396, 73397, 73398, 73399, 73400, 73401, 73402, 73403, 73404, 73405, 73406, 73407, 73408, 73409, 73410, 73411, 73412, 73413, 73414, 73415, 73416, 73417, 73418) c6( ) c7(Na, 1 aml, nX, eH, cem, aRk, Nc, Pp, ci, K, eF, ae, ad); #c1(MID1) c2(NP_001180208) c3(E3 ubiquitin-protein ligase Midline-1 isoform 4) c4( ) c5(73419, 73420, 73421, 73422, 73423, 73424) c6( ) c7(Na, T, aml, nX, eH, cem, aRk, Nc, Pp, ci, K, eF, ae, ad); #c1(MID1) c2(NP_150631) c3(E3 ubiquitin-protein ligase Midline-1 isoform 2) c4(228150) c5(228151, 228152, 228153, 228154, 228155, 228156) c6( ) c7(Na, T, aml, nX, eH, cem, aRk, Nc, Pp, ci, K, eF, ae, ad); #c1(MID1) c2(XP_005274595) c3(E3 ubiquitin-protein ligase Midline-1 isoform X1) c4(285173) c5( ) c6( ) c7(Na, T, aml, nX, eH, cem, aRk, Nc, Pp, ci, K, eF, ae, ad); #c1(MID2) c2(NP_036348) c3(probable E3 ubiquitin-protein ligase MID2 isoform 1) c4(173139, 173140) c5(173141, 173142, 173143, 173144, 173145, 173146, 173147) c6( ) c7(aml, m, aRk); #c1(MID2) c2(NP_438112) c3(probable E3 ubiquitin-protein ligase MID2 isoform 2) c4(229105) c5(229106, 229107, 229108, 229109, 229110, 229111, 229112, 229113, 229114, 229115, 229116, 229117) c6( ) c7(aml, m, aRk); #c1(MIEN1) c2(NP_115715) c3(migration and invasion enhancer 1) c4(223687) c5(223688, 223689, 223690, 223691, 223692, 223693) c6( ) c7(T, aW, aA, aT, AO, in, ae, ad); #c1(MIER2) c2(NP_060020) c3(mesoderm induction early response protein 2) c4(193711) c5(193712, 193713, 193714, 193715, 193716, 193717) c6( ) c7(qK); #c1(MIER3) c2(NP_001284528) c3(mesoderm induction early response protein 3 isoform 2) c4(111973) c5(111974, 111975, 111976, 111977, 111978, 111979) c6( ) c7(aW, T, aT); #c1(MIER3) c2(NP_689835) c3(mesoderm induction early response protein 3 isoform 3) c4(244100) c5(244101, 244102, 244103, 244104, 244105, 244106) c6( ) c7(aW, T, aT); #c1(MIF) c2(NP_002406) c3(macrophage migration inhibitor factor) c4(128143) c5(128144, 128145, 128146, 128147, 128148, 128149) c6( ) c7(bM, T, xS, fR, ea, e, bB, cL, lR, ci, bh, ip, rJ, bAy, dV, K, hH, eL, bc, Us, hm, aa, UC, yo, zQ, aAg, aW, az, HA, ih, fc, kt, pD, aB, g, eE, cm, uC, Qn, fT, eM, Jr, aiM, cj, U, uJ, k, m, Uz, eg, aFf, qR, aZt, dD, aw, aj, ct, zP, bPL, ai, cc, SH, dL, wb, ey, A, ape, EU, lb, ge, fQ, fe, bRD, hq, ar, dB, afc, bm, at, my, fL, eo, Pr, B, bL, pF, eR, aA, cz, fF, v, j, C, Qo, V, eA, J, o, jZ, qp, qK, aT, cy, ae, kl, s, Y, fO, brW, lo, t, iK, pb, bN, OW, ua, c, ac, ig, hc, AH, dy, EY, fD, ao, sY, kh, akd, aD, dM, ha, jh, wV, ah, jE, eq, mC, Uy, ad, hX, dP, av, ot, ds, oW, hD, ji, IQ, jo, uQ, d, cH, KS, cr, eZ, dN, brp, aF, hp, Fq, iV, D, bE, wz, aEs, mz, XO, ME, lf, iu, y); #c1(MILR1) c2(XP_011522929) c3(allergin-1 isoform X1) c4(317428) c5(317429, 317430, 317431, 317432, 317433, 317434) c6( ) c7(Vk); #c1(MINA) c2(NP_116167) c3(bifunctional lysine-specific demethylase and histidyl-hydroxylase MINA isoform b) c4(225516, 225517) c5(225518, 225519, 225520, 225521, 225522, 225523, 225524, 225525, 225526, 225527, 225528, 225529, 225530, 225531, 225532, 225533, 225534, 225535) c6( ) c7(jf, av, T, s, bE, aW, Qu, ff, jh, aT, bB, aF, fr, ci, en, g, bz, X); #c1(MINA) c2(NP_694822) c3(bifunctional lysine-specific demethylase and histidyl-hydroxylase MINA isoform a) c4(245378, 245379) c5(245380, 245381, 245382, 245383, 245384, 245385, 245386, 245387, 245388, 245389) c6( ) c7(jf, av, T, s, bE, aW, Qu, ff, jh, aT, bB, aF, fr, ci, en, g, bz, X); #c1(MINA) c2(XP_011511546) c3(bifunctional lysine-specific demethylase and histidyl-hydroxylase MINA isoform X2) c4(302250) c5(302251, 302252, 302253, 302254, 302255, 302256) c6( ) c7(jf, av, T, s, bE, aW, Qu, ff, jh, aT, bB, aF, fr, ci, en, g, bz, X); #c1(MINK1) c2(NP_001020108) c3(misshapen-like kinase 1 isoform 4) c4(28172) c5(28173, 28174, 28175, 28176, 28177, 28178) c6( ) c7(T, eG, mr, wL, Y, gZ, h, alJ, K, act, MC, eW, mu); #c1(MINK1) c2(NP_056531) c3(misshapen-like kinase 1 isoform 1) c4( ) c5(187970) c6( ) c7(T, eG, mr, wL, Y, gZ, h, alJ, K, act, MC, eW, mu); #c1(MINK1) c2(NP_722549) c3(misshapen-like kinase 1 isoform 3) c4(246829) c5(246830, 246831, 246832, 246833, 246834, 246835) c6( ) c7(T, eG, mr, wL, Y, gZ, h, alJ, K, act, MC, eW, mu); #c1(MINK1) c2(NP_733763) c3(misshapen-like kinase 1 isoform 2) c4(246990) c5(246991, 246992, 246993, 246994, 246995, 246996) c6( ) c7(T, eG, mr, wL, Y, gZ, h, alJ, K, act, MC, eW, mu); #c1(MINK1) c2(XP_005256721) c3(misshapen-like kinase 1 isoform X1) c4( ) c5(274304) c6( ) c7(T, eG, mr, wL, Y, gZ, h, alJ, K, act, MC, eW, mu); #c1(MINK1) c2(XP_006721593) c3(misshapen-like kinase 1 isoform X2) c4(294109) c5( ) c6( ) c7(T, eG, mr, wL, Y, gZ, h, alJ, K, act, MC, eW, mu); #c1(MINK1) c2(XP_006721598) c3(misshapen-like kinase 1 isoform X9) c4(294110) c5( ) c6( ) c7(T, eG, mr, wL, Y, gZ, h, alJ, K, act, MC, eW, mu); #c1(MINK1) c2(XP_011522210) c3(misshapen-like kinase 1 isoform X14) c4( ) c5(316826, 316827, 316828, 316829, 316830, 316831, 316832, 316833, 316834, 316835, 316836) c6( ) c7(T, eG, mr, wL, Y, gZ, h, alJ, K, act, MC, eW, mu); #c1(MINK1) c2(XP_011522211) c3(misshapen-like kinase 1 isoform X15) c4(316837) c5(316838, 316839, 316840, 316841) c6( ) c7(T, eG, mr, wL, Y, gZ, h, alJ, K, act, MC, eW, mu); #c1(MINPP1) c2(NP_001171588) c3(multiple inositol polyphosphate phosphatase 1 isoform 2 precursor) c4(70663) c5(70664, 70665, 70666, 70667, 70668, 70669) c6( ) c7(qJ, nB, fd, ey, ci, IQ, Pk, aMl); #c1(MINPP1) c2(NP_004888) c3(multiple inositol polyphosphate phosphatase 1 isoform 1 precursor) c4(150564, 150565) c5(150566, 150567, 150568, 150569, 150570, 150571, 150572, 150573, 150574, 150575, 150576, 150577) c6( ) c7(qJ, nB, fd, ey, ci, IQ, Pk, aMl); #c1(MINPP1) c2(XP_011538681) c3(multiple inositol polyphosphate phosphatase 1 isoform X1) c4(336423) c5(336424, 336425, 336426, 336427, 336428, 336429) c6( ) c7(qJ, nB, fd, ey, ci, IQ, Pk, aMl); #c1(MIOX) c2(NP_060054) c3(inositol oxygenase) c4(193894, 193895, 193896) c5(193897, 193898, 193899, 193900, 193901, 193902, 193903, 193904, 193905, 193906, 193907, 193908, 193909, 193910, 193911, 193912, 193913, 193914, 193915) c6( ) c7(aj, A); #c1(MIOX) c2(XP_011529007) c3(inositol oxygenase isoform X2) c4(324363) c5(324364, 324365, 324366, 324367, 324368) c6( ) c7(aj, A); #c1(MIP) c2(NP_036196) c3(lens fiber major intrinsic protein) c4(172337) c5(172338, 172339, 172340, 172341, 172342, 172343) c6( ) c7(bM, T, Dw, dA, aD, fG, lH, bLS, jh, fd, aj, j, Zh, ci, UX, fr, pz, q, J, cd, aoH, aXl, eW, zw, aXC, xE, aWc, arm, M, kH, cU, aT, dV, h, mJ, azh, cen, ceo, nP, je, caK, bf, aW, xz, r, fe, aq, iV, Bu, QA, pb, aBs, LB, ck, pa, iM, aDA, bE, wO, hc, aS, fD, bwg, y, bt, B); #c1(MIPEP) c2(NP_005923) c3(mitochondrial intermediate peptidase) c4(160447) c5(160448, 160449, 160450, 160451, 160452, 160453) c6( ) c7(bM, T, Dw, dA, aD, fG, lH, bLS, jh, fd, aj, j, ci, UX, fr, pz, q, J, cd, aXl, aoH, eW, zw, aXC, xE, aWc, M, kH, cU, aT, dV, h, mJ, azh, ceo, je, caK, bf, aW, xz, r, fe, aq, iV, Bu, bz, pb, QA, aBs, LB, ck, pa, iM, aDA, bE, wO, hc, Be, aS, fD, bwg, y, bt, B); #c1(MIPOL1) c2(NP_620059) c3(mirror-image polydactyly gene 1 protein) c4(237203, 237204, 237205) c5(237206, 237207, 237208, 237209, 237210, 237211, 237212, 237213, 237214, 237215, 237216, 237217, 237218, 237219, 237220, 237221, 237222, 237223, 237224, 237225) c6( ) c7(zG, bGy); #c1(MIPOL1) c2(XP_011534766) c3(mirror-image polydactyly gene 1 protein isoform X3) c4(331203, 331204) c5( ) c6( ) c7(zG, bGy); #c1(MIPOL1) c2(XP_011534767) c3(mirror-image polydactyly gene 1 protein isoform X4) c4( ) c5(331205, 331206, 331207, 331208, 331209, 331210) c6( ) c7(zG, bGy); #c1(MIPOL1) c2(XP_011534769) c3(mirror-image polydactyly gene 1 protein isoform X7) c4( ) c5(331211, 331212, 331213, 331214, 331215, 331216, 331217, 331218, 331219, 331220, 331221, 331222) c6( ) c7(zG, bGy); #c1(MIR1-IHG) c2(NP_848558) c3(uncharacterized protein MIR1-IHG) c4(253842, 253843) c5(253844, 253845, 253846, 253847, 253848, 253849, 253850, 253851, 253852, 253853, 253854, 253855, 253856, 253857, 253858, 253859) c6( ) c7(cz); #c1(MIS18BP1) c2(XP_005267890) c3(mis18-binding protein 1 isoform X1) c4(281266, 281267) c5(281268, 281269, 281270, 281271, 281272, 281273, 281274, 281275, 281276, 281277, 281278, 281279, 281280) c6( ) c7(EW, j, aj); #c1(MITF) c2(NP_000239) c3(microphthalmia-associated transcription factor isoform 4) c4(5375) c5(5376, 5377, 5378, 5379, 5380, 5381, 5382) c6( ) c7(T, iW, cet, cep, amj, qj, ci, bjN, fr, pC, eA, aR, aJe, aJO, aJf, aE, K, Xh, ahE, cp, lR, kj, oV, Y, Tc, ahl, aTa, adj, dr, yR, ces, arv, es, Ta, iP, Dy, iA, hk, mG, cer, y, ceq); #c1(MITF) c2(NP_001171896) c3(microphthalmia-associated transcription factor isoform 7) c4( ) c5(71979, 71980, 71981, 71982, 71983, 71984, 71985, 71986, 71987, 71988, 71989, 71990) c6( ) c7(T, iW, cet, cep, amj, qj, ci, bjN, fr, pC, eA, aR, aJe, aJO, aJf, aE, K, Xh, ahE, cp, lR, kj, oV, Y, Tc, ahl, aTa, adj, dr, yR, ces, arv, es, Ta, iP, Dy, iA, hk, mG, cer, y, ceq); #c1(MITF) c2(NP_006713) c3(microphthalmia-associated transcription factor isoform 3) c4(167349, 167350, 167351) c5(167352, 167353, 167354, 167355, 167356, 167357, 167358, 167359, 167360, 167361, 167362, 167363) c6( ) c7(T, iW, cet, cep, amj, qj, ci, bjN, fr, pC, eA, aR, aJe, aJO, aJf, aE, K, Xh, ahE, cp, lR, kj, oV, Y, Tc, ahl, aTa, adj, dr, yR, ces, arv, es, Ta, iP, Dy, iA, hk, mG, cer, y, ceq); #c1(MITF) c2(NP_937801) c3(microphthalmia-associated transcription factor isoform 5) c4(259139) c5(259140, 259141, 259142, 259143, 259144, 259145) c6( ) c7(T, iW, cet, cep, amj, qj, ci, bjN, fr, pC, eA, aR, aJe, aJO, aJf, aE, K, Xh, ahE, cp, lR, kj, oV, Y, Tc, ahl, aTa, adj, dr, yR, ces, arv, es, Ta, iP, Dy, iA, hk, mG, cer, y, ceq); #c1(MITF) c2(NP_937802) c3(microphthalmia-associated transcription factor isoform 1) c4(259146, 259147) c5(259148, 259149, 259150, 259151, 259152, 259153) c6( ) c7(T, iW, cet, cep, amj, qj, ci, bjN, fr, pC, eA, aR, aJe, aJO, aJf, aE, K, Xh, ahE, cp, lR, kj, oV, Y, Tc, ahl, aTa, adj, dr, yR, ces, arv, es, Ta, iP, Dy, iA, hk, mG, cer, y, ceq); #c1(MITF) c2(NP_937820) c3(microphthalmia-associated transcription factor isoform 2) c4(259178) c5(259179, 259180, 259181, 259182, 259183, 259184) c6( ) c7(T, iW, cet, cep, amj, qj, ci, bjN, fr, pC, eA, aR, aJe, aJO, aJf, aE, K, Xh, ahE, cp, lR, kj, oV, Y, Tc, ahl, aTa, adj, dr, yR, ces, arv, es, Ta, iP, Dy, iA, hk, mG, cer, y, ceq); #c1(MITF) c2(NP_937821) c3(microphthalmia-associated transcription factor isoform 6) c4(259185) c5(259186, 259187, 259188, 259189, 259190, 259191) c6( ) c7(T, iW, cet, cep, amj, qj, ci, bjN, fr, pC, eA, aR, aJe, aJO, aJf, aE, K, Xh, ahE, cp, lR, kj, oV, Y, Tc, ahl, aTa, adj, dr, yR, ces, arv, es, Ta, iP, Dy, iA, hk, mG, cer, y, ceq); #c1(MITF) c2(XP_005264811) c3(microphthalmia-associated transcription factor isoform X1) c4(279255) c5(279256, 279257, 279258, 279259, 279260, 279261) c6( ) c7(T, iW, cet, cep, amj, qj, ci, bjN, fr, pC, eA, aR, aJe, aJO, aJf, aE, K, Xh, ahE, cp, IR, kj, oV, Y, Tc, ahl, aTa, adj, dr, yR, ces, arv, es, Ta, iP, Dy, iA, hk, mG, cer, y, ceq); #c1(MITF) c2(XP_005264812) c3(microphthalmia-associated transcription factor isoform X3) c4(279262) c5(279263, 279264, 279265, 279266, 279267, 279268) c6( ) c7(T, iW, cet, cep, amj, qj, ci, bjN, fr, pC, eA, aR, aJe, aJO, aJf, aE, K, Xh, ahE, cp, lR, kj, oV, Y, Tc, ahl, aTa, adj, dr, yR, ces, arv, es, Ta, iP, Dy, iA, hk, mG, cer, y, ceq); #c1(MIXL1) c2(NP_001269331) c3(homeobox protein MIXL1 isoform 1) c4(101148) c5(101149, 101150, 101151, 101152, 101153, 101154) c6( ) c7(iW, eX, jN, jh, eV, uJ, hf, eE, pk); #c1(MIXL1) c2(NP_114150) c3(homeobox protein MIXL1 isoform 2) c4(222353) c5(222354, 222355, 222356, 222357, 222358, 222359, 222360) c6( ) c7(iW, eX, jN, jh, eV, uJ, hf, eE, pk); #c1(MK167) c2(NP_001139438) c3(antigen KI-67 isoform 2) c4(59358, 59359) c5(59360, 59361, 59362, 59363, 59364, 59365, 59366, 59367, 59368, 59369, 59370, 59371) c6( ) c7(T, apr, hV, e, ci, ip, bv, gJ, Bc, K, MO, pk, eL, eG, akV, bPf, yo, aW, Ls, az, LZ, Qm, g, as, eE, bkD, eM, nB, vA, cj, apy, m, ik, IT, zX, Or, aw, ht, NT, cek, qy, n, fr, ft, dL, ey, Yl, aiB, ge, aJG, yq, mo, YF, op, bP, dB, eD, KT, B, bL, aGn, fM, avm, jx, aA, hy, j, acn, bX, q, eA, Rl, cei, qK, aT, rz, ae, eu, s, Y, qL, en, cl, t, KQ, QG, Dy, ac, au, RW, aHB, aJQ, dy, zu, bt, VB, kh, id, Dd, YM, bkL, jh, Fb, aFJ, Fc, iJ, ad, iC, av, ib, bjn, Db, NS, fb, apw, d, qt, ff, eH, cr, Hp, bF, es, aoR, Ew, bhz, y, X); #c1(MKI67) c2(NP_002408) c3(antigen KI-67 isoform 1) c4(128157, 128158, 128159) c5(128160, 128161, 128162, 128163, 128164, 128165, 128166, 128167, 128168, 128169, 128170, 128171, 128172, 128173, 128174, 128175, 128176) c6( ) c7(T, apr, hV, e, ci, ip, bv, gJ, Bc, K, MO, pk, eL, eG, akV, bPf, yo, aW, Ls, az, LZ, Qm, g, as, eE, bkD, eM, nB, vA, cj, apy, m, ik, lT, zX, Or, aw, ht, NT, cek, qy, n, fr, ft, dL, ey, Yl, aiB, ge, aJG, yq, mo, YF, op, bP, dB, eD, KT, B, bL, aGn, fM, avm, jx, aA, hy, j, acn, bX, q, eA, Rl, cei, qK, aT, rz, ae, eu, s, Y, qL, en, cl, t, KQ, QG, Dy, ac, au, RW, aHB, aJQ, dy, zu, bt, VB, kh, id, Dd, YM, bkL, jh, Fb, aFJ, Fc, iJ, ad, iC, av, ib, bjn, Db, NS, fb, apw, d, qt, ff, eH, cr, Hp, bF, es, aoR, Ew, bhz, y, X); #c1(MKI67) c2(XP_006717927) c3(antigen KI-67 isoform X2) c4( ) c5(291393) c6( ) c7(T, apr, hV, e, ci, ip, bv, gJ, Bc, K, MO, pk, eL, eG, akV, bPf, yo, aW, Ls, az, LZ, Qm, g, as, eF, bkD, eM, nB, vA, cj, apy, m, ik, lT, zX, Or, aw, ht, NT, cek, qy, n, fr, ft, dL, ey, Yl, aiB, ge, aJG, yq, mo, YF, op, bP, dB, eD, KT, B, bL, aGn, fM, avm, jx, aA, hy, j, acn, bX, q, eA, Rl, cei, qK, aT, rz, ae, eu, s, Y, qL, en, cl, t, KQ, QG, Dy, ac, au, RW, aHB, aJQ, dy, zu, bt, VB, kh, id, Dd, YM, bkL, jh, Fb, aFJ, Fc, iJ, ad, iC, av, ib, bjn, Db, NS, fb, apw, d, qt, ff, eH, cr, Hp, bF, es, aoR, Ew, bhz, y, X); #c1(MKKS) c2(NP_061336) c3(McKusick-Kaufman/Bardet-Biedl syndromes putative chaperonin) c4(200134) c5(200135, 200136, 200137, 200138, 200139, 200140, 200141, 200142, 200143, 200144) c6( ) c7(IP, gQ, cev, cz, fd, aj, v, vm, nA, J, anl, qM, Nj, ago, lR, oV, ceu, Tp, bUh, bE, ei, bD, B); #c1(MKL1) c2(NP_001269589) c3(MKL/myocardin-like protein 1 isoform 1) c4( ) c5(102087, 102088, 102089, 102090, 102091, 102092, 102093, 102094) c6( ) c7(T, aHV, fG, if, ht, eX, aA, v, j, ci, hF, akU, dV, aT, h, eV, iY, hu, lZ, aW, aq, aF, t, f, iK, LB, ck, bP, gX, aS, m, bt, B); #c1(MKL1) c2(NP_001269590) c3(MKL/myocardin-like protein 1 isoform 2) c4(102095) c5(102096, 102097, 102098, 102099, 102100) c6( ) c7(T, aHV, fG, if, ht, eX, aA, v, j, ci, hF, akU, dV, aT, h, eV, iY, hu, lZ, aW, aq, aF, t, f, iK, LB, ck, bP, gX, aS, m, bt, B); #c1(MKL1) c2(NP_001269591) c3(MKL/myocardin-like protein 1 isoform 3) c4(102101) c5(102102, 102103, 102104, 102105, 102106, 102107) c6( ) c7(T, aHV, fG, if, ht, eX, aA, v, j, ci, hF, akU, dV, aT, h, eV, iY, hu, lZ, aW, aq, aF, t, f, iK, LB, ck, bP, gX, aS, m, bt, B); #c1(MKL1) c2(XP_005261749) c3(MKL/myocardin-like protein 1 isoform X3) c4(277595) c5(277596) c6( ) c7(T, aHV, fG, if, ht, eX, aA, v, j, ci, hF, akU, dV, aT, h, eV, iY, hu, lZ, aW, aq, aF, t, f, iK, LB, ck, bP, gX, aS, m, bt, B); #c1(MKL1) c2(XP_011528586) c3(MKL/myocardin-like protein 1 isoform X4) c4( ) c5(323806) c6( ) c7(T, aHV, fG, if, ht, eX, aA, v, j, ci, hF, akU, dV, aT, h, eV, iY, hu, lZ, aW, aq, aF, t, f, iK, LB, ck, bP, gX, aS, m, bt, B); #c1(MKL1) c2(XP_011528589) c3(MKL/myocardin-like protein 1 isoform X6) c4( ) c5(323807, 323808, 323809, 323810, 323811, 323812) c6( ) c7(T, aHV, fG, if, ht, eX, aA, v, j, ci, hF, akU, dV, aT, h, eV, iY, hu, lZ, aW, aq, aF, t, f, iK, LB, ck, bP, gX, aS, m, bt, B); #c1(MKL2) c2(NP_054767) c3(MKL/myocardin-like protein 2) c4(177704) c5(177705, 177706, 177707, 177708, 177709, 177710) c6( ) c7(awO, VX, hj, v, aS, QK, bN); #c1(MKL2) c2(XP_005255512) c3(MKL/myocardin-like protein 2 isoform X3) c4(273686, 273687) c5(273688, 273689, 273690, 273691, 273692, 273693, 273694, 273695, 273696, 273697, 273698, 273699) c6( ) c7(awO, VX, hj, v, aS, QK, bN); #c1(MKLN1) c2(NP_037387) c3(muskelin isoform 2) c4(175187) c5(175188, 175189, 175190, 175191, 175192, 175193, 175194) c6( ) c7(Ea); #c1(MKLN1) c2(XP_005250413) c3(muskelin isoform X2) c4(270301) c5(270302, 270303, 270304, 270305, 270306) c6( ) c7(Ea); #c1(MKNK1) c2(XP_011540651) c3(MAP kinase-interacting serine/threonine-protein kinase 1 isoform X7) c4(339199) c5(339200, 339201, 339202, 339203, 339204, 339205) c6( ) c7(eW, T, d, II, aW, ep, aT, fd, lN, y, lB, eA); #c1(MKNK2) c2(NP_060042) c3(MAP kinase-interacting serine/threonine-protein kinase 2 isoform 1) c4(193847) c5(193848, 193849, 193850, 193851, 193852, 193853) c6( ) c7(kp); #c1(MKNK2) c2(NP_951009) c3(MAP kinase-interacting serine/threonine-protein kinase 2 isoform 2) c4(260965, 260966, 260967) c5(260968, 260969, 260970, 260971, 260972, 260973, 260974, 260975, 260976, 260977, 260978, 260979, 260980, 260981, 260982, 260983, 260984, 260985) c6( ) c7(kp); #c1(MKRN1) c2(NP_001138597) c3(E3 ubiquitin-protein ligase makorin-1 isoform 2) c4(57155) c5(57156, 57157, 57158, 57159, 57160, 57161) c6( ) c7(aF, aA); #c1(MKRN1) c2(NP_038474) c3(E3 ubiquitin-protein ligase makorin-1 isoform 1) c4(176648) c5(176649, 176650, 176651, 176652, 176653, 176654, 176655) c6( ) c7(aF, aA); #c1(MKRN1) c2(XP_011514298) c3(E3 ubiquitin-protein ligase makorin-1 isoform X1) c4(306981) c5( ) c6( ) c7(aF, aA); #c1(MKRN1) c2(XP_011514300) c3(E3 ubiquitin-protein ligase makorin-1 isoform X2) c4(306982) c5(306983, 306984, 306985, 306986, 306987, 306988, 306989, 306990, 306991, 306992, 306993) c6( ) c7(aF, aA); #c1(MKRN3) c2(NP_005655) c3(probable E3 ubiquitin-protein ligase makorin-3) c4(158314) c5(158315, 158316, 158317, 158318, 158319, 158320) c6( ) c7(rc, cex, agl, rK, cew); #c1(MKS1) c2(NP_001159399) c3(Meckel syndrome type 1 protein isoform 2) c4(63955, 63956) c5(63957, 63958, 63959, 63960, 63961, 63962) c6( ) c7(ago, d, eM, Qu, aW, nX, ff, atS, aT, cey, aiL, vm, zG, Xr, en, Tp, Nj, bz, eA, ix); #c1(MKS1) c2(NP_060247) c3(Meckel syndrome type 1 protein isoform 1) c4(194997, 194998, 194999) c5(195000, 195001, 195002, 195003, 195004, 195005, 195006) c6( ) c7(ago, d, eM, Qu, aW, nX, ff, atS, aT, cey, aiL, vm, zG, Xr, en, Tp, Nj, bz, eA, ix); #c1(MKS1) c2(XP_005257540) c3(Meckel syndrome type 1 protein isoform X3) c4( ) c5(275232, 275233, 275234, 275235, 275236, 275237, 275238, 275239, 275240, 275241, 275242, 275243) c6( ) c7(ago, d, eM, Qu, aW, nX, ff, atS, aT, cey, aiL, vm, zG, Xr, en, Tp, Nj, bz, eA, ix); #c1(MKS1) c2(XP_005257543) c3(Meckel syndrome type 1 protein isoform X8) c4( ) c5(275244, 275245, 275246, 275247, 275248) c6( ) c7(ago, d, eM, Qu, aW, nX, ff, atS, aT, cey, aiL, vm, zG, Xr, en, Tp, Nj, bz, eA, ix); #c1(MKS1) c2(XP_011523261) c3(Meckel syndrome type 1 protein isoform X4) c4(317778) c5(317779, 317780, 317781, 317782, 317783, 317784) c6( ) c7(age, d, eM, Qu, aW, nX, ff, atS, aT, cey, aiL, vm, zG, Xr, en, Tp, Nj, bz, eA, ix); #c1(MLANA) c2(NP_005502) c3(melanoma antigen recognized by T-cells 1) c4(156858) c5(156859, 156860, 156861, 156862, 156863, 156864, 156865, 156866, 156867, 156868, 156869, 156870, 156871, 156872) c6( ) c7(T, dA, Sv, ci, EA, qj, qN, fr, V, bNX, ds, Xh, cp, aFS, eG, kj, asf, Y, HA, ks, lo, bu, kk, cm, iP, hk, pC); #c1(MLC1) c2(NP_631941) c3(membrane protein MLC1) c4(238370, 238371, 238372, 238373, 238374) c5(238375, 238376, 238377, 238378, 238379, 238380, 238381, 238382, 238383, 238384, 238385, 238386, 238387, 238388, 238389, 238390, 238391, 238392, 238393, 238394, 238395, 238396, 238397, 238398, 238399, 238400, 238401, 238402, 238403, 238404, 238405, 238406, 238407, 238408) c6( ) c7(bkZ, gh, aPn, aW, qK, aT, aNN, cy, dz, cz, bK, ci, as, mk, cb, hF, bt, B, dr, vQ); #c1(MLC1) c2(XP_011528980) c3(membrane protein MLC1 isoform X1) c4(324316) c5(324317, 324318, 324319, 324320, 324321, 324322) c6( ) c7(bkZ, gh, aPn, aW, gK, aT, aNN, cy, dz, cz, bK, ci, as, mk, cb, hF, bt, B, dr, vQ); #c1(MLEC) c2(NP_055545) c3(malectin isoform1 precursor) c4(181882) c5(181883, 181884, 181885, 181886, 181887, 181888) c6( ) c7(cd); #c1(MLF1) c2(NP_001123629) c3(myeloid leukemia factor 1 isoform 2) c4(47881) c5(47882, 47883, 47884, 47885, 47886, 47887, 47888, 47889, 47890, 47891, 47892) c6( ) c7(ck, T, ac, iT, e, aw, bs, aA, aF, j, K, jj, bw, bt, eu, br); #c1(MLF1) c2(NP_001182361) c3(myeloid leukemia factor 1 isoform 3) c4(74859, 74860) c5(74861, 74862, 74863, 74864, 74865, 74866, 74867) c6( ) c7(ck, T, ac, iT, e, aw, bs, aA, aF, j, K, jj, bw, bt, eu, hr); #c1(MLF1) c2(NP_001182362) c3(myeloid leukemia factor 1 isoform 4) c4(74868) c5(74869, 74870, 74871, 74872, 74873) c6( ) c7(ck, T, ac, iT, e, aw, bs, aA, aF, j, K, jj, bw, bt, eu, hr); #c1(MLF1) c2(NP_071888) c3(myeloid leukemia factor 1 isoform 1) c4(212102) c5(212103, 212104, 212105, 212106, 212107, 212108, 212109, 212110, 212111, 212112) c6( ) c7(ck, T, ac, iT, e, aw, bs, aA, aF, j, K, jj, bw, bt, eu, hr); #c1(MLF1) c2(XP_005247536) c3(myeloid leukemia factor 1 isoform X3) c4( ) c5(267864) c6( ) c7(ck, T, ac, iT, e, aw, bs, aA, aF, j, K, jj, bw, bt, eu, hr); #c1(MLF1) c2(XP_011511154) c3(myeloid leukemia factor 1 isoform X2) c4( ) c5(301582, 301583, 301584, 301585, 301586, 301587, 301588, 301589) c6( ) c7(ck, T, ac, iT, e, aw, bs, aA, aF, j, K, jj, bw, bt, eu, br); #c1(MLF2) c2(NP_005430) c3(myeloid leukemia factor 2) c4(156110) c5(156111, 156112, 156113, 156114, 156115, 156116, 156117, 156118, 156119, 156120, 156121, 156122, 156123, 156124, 156125, 156126, 156127, 156128) c6( ) c7(aW, hF, ad, aT); #c1(MLH1) c2(NP_000240) c3(DNA mismatch repair protein Mlh1 isoform 1) c4(5383, 5384, 5385) c5(5386, 5387, 5388, 5389, 5390, 5391, 5392, 5393, 5394) c6( ) c7(T, os, aC, fR, if, fd, bB, ci, x, afr, aE, K, hu, eL, cp, Qe, aW, LZ, nY, Qq, kt, NR, Ku, g, as, ir, fT, eM, nB, iA, cj, ceA, m, iu, wu, sw, zX, ht, NT, n, fr, qN, eW, Bl, ft, hw, Do, pe, kH, h, eV, auS, hn, dL, aDC, hB, KV, aDW, dx, pl, OV, AQ, ge, hQ, aq, fe, kp, cM, Ld, Zj, bP, dB, hk, Qu, hL, at, it, B, fM, cez, eX, ew, aA, hy, lu, q, er, eA, mj, BJ, eO, aT, vH, ae, ne, qw, avg, s, ND, vT, NE, Y, ev, aEk, iU, xR, r, eS, en, bu, cl, t, Px, Vi, iK, zJ, ck, sS, nM, Dy, aDA, iM, au, gX, anD, bt, rA, Mb, id, aD, aJF, jh, KO, oZ, Gn, iJ, ad, dP, av, avp, hd, Db, NS, Yo, io, ji, IQ, wm, YQ, fb, iL, Yj, d, BN, BO, Ub, qt, je, ff, aeV, Ej, aF, hp, iV, iR, adj, bz, dr, dR, bF, es, baa, aoR, Ew, amS, bE, afd, IO, be, adg, hE, ra, X, jr); #c1(MLH1) c2(NP_001161089) c3(DNA mismatch repair protein Mlh1 isoform 2) c4(65306) c5(65307, 65308, 65309, 65310, 65311, 65312, 65313) c6( ) c7(T, os, aC, fR, if, fd, bB, ci, x, afr, aE, K, hu, eL, cp, Qe, aW, LZ, nY, Qq, kt, NR, Ku, g, as, ir, fT, eM, nB, iA, cj, ceA, m, iu, wu, sw, zX, ht, NT, n, fr, qN, eW, Bl, ft, hw, Do, pe, kH, h, eV, auS, hn, dL, aDC, hB, KV, aDW, dx, pl, OV, AQ, ge, hQ, aq, fe, kp, cM, Ld, Zj, bP, dB, hk, Qu, hL, at, it, B, fM, cez, eX, ew, aA, hy, Iu, q, er, eA, mj, BJ, eO, aT, vH, ae, ne, qw, avg, s, ND, vT, NE, Y, ev, aEk, iU, xR, r, eS, en, bu, cl, t, Px, Vi, iK, zJ, ck, sS, nM, Dy, aDA, iM, au, gX, anD, bt, rA, Mb, id, aD, aJF, jh, KO, oZ, Gn, iJ, ad, dP, av, avp, hd, Db, NS, Yo, io, ji, IQ, wm, YQ, fb, iL, Yj, d, BN, BO, Ub, qt, je, ff, aeV, Ej, aF, hp, iV, iR, adj, bz, dr, dR, bF, es, baa, aoR, Ew, amS, bE, afd, IO, be, adg, hE, ra, X, jr); #c1(MLH1) c2(NP_001245200) c3(DNA mismatch repair protein Mlh1 isoform 4) c4(92643, 92644, 92645, 92646, 92647, 92648) c5(92649, 92650, 92651, 92652, 92653, 92654, 92655, 92656, 92657, 92658, 92659, 92660, 92661, 92662, 92663, 92664, 92665, 92666, 92667, 92668, 92669, 92670, 92671, 92672, 92673, 92674, 92675, 92676, 92677, 92678) c6( ) c7(T, os, aC, fR, if, fd, bB, ci, x, afr, aE, K, hu, eL, cp, Qe, aW, LZ, nY, Qq, kt, NR, Ku, g, as, ir, fT, eM, nB, iA, cj, ceA, m, iu, wu, sw, zX, ht, NT, n, fr, qN, eW, Bl, ft, hw, Do, pe, kH, h, eV, auS, hn, dL, aDC, hB, KV, aDW, dx, pl, OV, AQ, ge, hQ, aq, fe, kp, cM, Ld, Zj, bP, dB, hk, Qu, hL, at, it, B, fM, cez, eX, ew, aA, hy, lu, q, er, eA, mj, BJ, eO, aT, vH, ae, ne, qw, avg, s, ND, vT, NE, Y, ev, aEk, iU, xR, r, eS, en, bu, cl, t, Px, Vi, iK, zJ, ck, sS, nM, Dy, aDA, iM, au, gX, anD, bt, rA, Mb, id, aD, aJF, jh, KO, oZ, Gn, iJ, ad, dP, av, avp, hd, Db, NS, Yo, io, ji, IQ, wm, YQ, fb, iL, Yj, d, BN, BO, Ub, qt, je, ff, aeV, Ej, aF, hp, iV, iR, adj, bz, dr, dR, bF, es, baa, aoR, Ew, amS, bE, afd, IO, be, adg, hE, ra, X, jr); #c1(MLH1) c2(NP_001245202) c3(DNA mismatch repair protein Mlh1 isoform 3) c4( ) c5(92679, 92680, 92681, 92682, 92683, 92684, 92685, 92686, 92687, 92688, 92689, 92690, 92691, 92692, 92693, 92694) c6( ) c7(T, os, aC, fR, if, fd, bB, ci, x, afr, aE, K, hu, eL, cp, Qe, aW, LZ, nY, Qq, kt, NR, Ku, g, as, ir, fT, eM, nB, iA, cj, ceA, m, iu, wu, sw, zX, ht, NT, n, fr, qN, eW, Bl, ft, hw, Do, pe, kH, h, eV, auS, hn, dL, aDC, hB, KV, aDW, dx, pl, OV, AQ, ge, hQ, aq, fe, kp, cM, Ld, Zj, bP, dB, hk, Qu, hL, at, it, B, fM, cez, eX, ew, aA, hy, lu, q, er, eA, mj, BJ, eO, aT, vH, ae, ne, qw, avg, s, ND, vT, NE, Y, ev, aEk, iU, xR, r, eS, en, bu, cl, t, Px, Vi, iK, zJ, ck, sS, nM, Dy, aDA, iM, au, gX, anD, bt, rA, Mb, id, aD, aJF, jh, KO, oZ, Gn, iJ, ad, dP, av, avp, hd, Db, NS, Yo, io, ji, IQ, wm, YQ, fb, iL, Yj, d, BN, BO, Ub, qt, je, ff, aeV, Ej, aF, hp, iV, iR, adj, bz, dr, dR, bF, es, baa, aoR, Ew, amS, bE, afd, IO, be, adg, hE, ra, X, jr); #c1(MLH1) c2(XP_005265218) c3(DNA mismatch repair protein Mlh1 isoform X2) c4( ) c5(279449) c6( ) c7(T, os, aC, fR, if, fd, bB, ci, x, afr, aE, K, hu, eL, cp, Qe, aW, LZ, nY, Qq, kt, NR, Ku, g, as, ir, fT, eM, nB, iA, cj, ceA, m, iu, wu, sw, zX, ht, NT, n, fr, qN, eW, Bl, ft, hw, Do, pe, kH, h, eV, auS, hn, dL, aDC, hB, KV, aDW, dx, pl, OV, AQ, ge, hQ, aq, fe, kp, cM, Ld, Zj, bP, dB, hk, Qu, hL, at, it, B, fM, cez, eX, ew, aA, hy, Iu, q, er, eA, mj, BJ, eO, aT, vH, ae, ne, qw, avg, s, ND, vT, NE, Y, ev, aEk, iU, xR, r, eS, en, bu, cl, t, Px, Vi, iK, zJ, ck, sS, nM, Dy, aDA, iM, au, gX, anD, bt, rA, Mb, id, aD, aJF, jh, KO, oZ, Gn, iJ, ad, dP, av, avp, hd, Db, NS, Yo, io, ji, IQ, wm, YQ, fb, iL, Yj, d, BN, BO, Ub, qt, je, ff, aeV, Ej, aF, hp, iV, iR, adj, bz, dr, dR, bF, es, baa, aoR, Ew, amS, bE, afd, IO, be, adg, hE, ra, X, jr); #c1(MLH1) c2(XP_011532029) c3(DNA mismatch repair protein Mlh1 isoform X4) c4( ) c5(328092, 328093, 328094, 328095, 328096) c6( ) c7(T, os, aC, fR, if, fd, bB, ci, x, afr, aE, K, hu, eL, cp, Qe, aW, LZ, nY, Qq, kt, NR, Ku, g, as, ir, fT, eM, nB, iA, cj, ceA, m, iu, wu, sw, zX, ht, NT, n, fr, qN, eW, Bl, ft, hw, Do, pe, kH, h, eV, auS, hn, dL, aDC, hB, KV, aDW, dx, pl, OV, AQ, ge, hQ, aq, fe, kp, cM, Ld, Zj, bP, dB, hk, Qu, hL, at, it, B, fM, cez, eX, ew, aA, hy, lu, q, er, eA, mj, BJ, eO, aT, vH, ae, ne, qw, avg, s, ND, vT, NE, Y, ev, aEk, iU, xR, r, eS, en, bu, cl, t, Px, Vi, iK, zJ, ck, sS, nM, Dy, aDA, iM, au, gX, anD, bt, rA, Mb, id, aD, aJF, jh, KO, oZ, Gn, iJ, ad, dP, av, avp, hd, Db, NS, Yo, io, ji, IQ, wm, YQ, fb, iL, Yj, d, BN, BO, Ub, qt, je, ff, aeV, Ej, aF, hp, iV, iR, adj, bz, dr, dR, bF, es, baa, aoR, Ew, amS, bE, afd, IO, be, adg, hE, ra, X, jr); #c1(MLH3) c2(NP_055196) c3(DNA mismatch repair protein Mlh3 isoform 2) c4(179711) c5(179712, 179713, 179714, 179715, 179716, 179717) c6( ) c7(T, gU, BO, ND, bE, aW, ht, gX, aT, r, bB, hL, dL, vH, m, ceB, cl, t, g); #c1(MLH3) c2(XP_005267588) c3(DNA mismatch repair protein Mlh3 isoform X1) c4(281055, 281056, 281057) c5(281058, 281059, 281060, 28106L 281062, 281063, 281064, 281065, 281066, 281067, 281068, 281069, 281070, 281071, 281072, 281073) c6( ) c7(T, gU, BO, ND, bE, aW, ht, gX, aT, r, bB, hL, dL, vH, m, ceB, cl, t, g); #c1(MLH3) c2(XP_005267589) c3(DNA mismatch repair protein Mlh3 isoform X2) c4(281074) c5(281075, 281076, 281077, 281078, 281079, 281080) c6( ) c7(T, gU, BO, ND, bE, aW, ht, gX, aT, r, bB, hL, dL, vH, m, ceB, cl, t, g); #c1(MLH3) c2(XP_011534949) c3(DNA mismatch repair protein Mlh3 isoform X5) c4(331512) c5( ) c6( ) c7(T, gU, BO, ND, bE, aW, ht, gX, aT, r, bB, hL, dL, vH, m, ceB, cl, t, g); #c1(MLH3) c2(XP_011534950) c3(DNA mismatch repair protein Mlh3 isoform X7) c4( ) c5(331513, 331514, 331515, 331516, 331517, 331518, 331519, 331520, 331521, 331522, 331523, 331524, 331525) c6( ) c7(T, gU, BO, ND, bE, aW, ht, gX, aT, r, bB, hL, dL, vH, m, ceB, cl, t, g); #c1(MLKL) c2(NP_001135969) c3(mixed lineage kinase domain-like protein isoform 2) c4(53767) c5(53768, 53769, 53770, 53771, 53772, 53773) c6( ) c7(fe, ceC); #c1(MLKL) c2(NP_689862) c3(mixed lineage kinase domain-like protein isoform 1) c4(244195) c5(244196, 244197, 244198, 244199, 244200, 244201) c6( ) c7(fe, ceC); #c1(MLLT1) c2(NP_005925) c3(protein ENL) c4(160478) c5(160479, 160480, 160481, 160482, 160483, 160484, 160485) c6( ) c7(ck, x, eG, iT, Bj, k, jj, hF, bt, kS, abh); #c1(MLLT10) c2(NP_001182555) c3(protein AF-10 isoform c) c4(75039) c5(75040, 75041, 75042, 75043, 75044, 75045) c6( ) c7(ck, x, T, iT, iZ, Y, hE, r, fd, dz, iY, fr, k, Fu, hf, ajA, bt, iJ, g, ip); #c1(MLLT10) c2(NP_001182556) c3(protein AF-10 isoform d) c4(75046) c5(75047, 75048, 75049, 75050, 75051, 75052, 75053, 75054, 75055, 75056, 75057, 75058) c6( ) c7(ck, x, T, iT, iZ, Y, hE, r, fd, dz, iY, fr, k, Fu, hf, ajA, bt, iJ, g, ip); #c1(MLLT10) c2(NP_001182557) c3(protein AF-10 isoform e) c4(75059) c5(75060, 75061, 75062, 75063, 75064, 75065) c6( ) c7(ck, x, T, iT, iZ, Y, hE, r, fd, dz, iY, fr, k, Fu, hf, ajA, bt, iJ, g, ip); #c1(MLLT10) c2(NP_004632) c3(protein AF-IO isoform a) c4(148351, 148352, 148353) c5(148354, 148355, 148356, 148357, 148358, 148359, 148360, 148361, 148362, 148363, 148364, 148365, 148366, 148367, 148368, 148369, 148370, 148371, 148372, 148373, 148374, 148375, 148376, 148377, 148378, 148379, 148380, 148381) c6( ) c7(ck, x, T, iT, iZ, Y, hF, r, fd, dz, iY, fr, k, Fu, hf, ajA, bt, iJ, q, ip); #c1(MLLT10) c2(XP_005252662) c3(protein AF-IO isoform X4) c4(271976, 271977) c5(271978) c6( ) c7(ck, x, T, iT, iZ, Y, hF, r, fd, dz, iY, fr, k, Fu, hf, ajA, bt, iJ, q, ip); #c1(MLLT10) c2(XP_005252666) c3(protein AF-10 isoform X7) c4(271979, 271980) c5(271981, 271982, 271983, 271984, 271985, 271986, 271987, 271988, 271989, 271990, 271991, 271992) c6( ) c7(ck, x, T, iT, iZ, Y, hF, r, fd, dz, iY, fr, k, Fu, hf, ajA, bt, iJ, q, ip); #c1(MLLT3) c2(NP_001273620) c3(protein AF-9 isoform b) c4(105459, 105460) c5(105461, 105462, 105463, 105464, 105465, 105466, 105467, 105468, 105469, 105470, 105471, 105472, 105473, 105474, 105475, 105476, 105477, 105478, 105479, 105480, 105481, 105482, 105483, 105484, 105485, 105486, 105487) c6( ) c7(ck, x, ceD, T, iZ, ha, bK, k, bt, af); #c1(MLLT3) c2(NP_004520) c3(protein AF-9 isoform a) c4(147197, 147198, 147199) c5(147200, 147201, 147202, 147203, 147204, 147205, 147206, 147207) c6( ) c7(ck, x, ceD, T, iZ, ha, bK, k, bt, af); #c1(MLLT4) c2(NP_001035089) c3(afadin isoform 2) c4(32484) c5(32485, 32486, 32487, 32488, 32489, 32490) c6( ) c7(T, aW, aT, m, bt, eW); #c1(MLLT4) c2(NP_001193937) c3(afadin isoform 1) c4(83243) c5(83244, 83245, 83246, 83247, 83248, 83249) c6( ) c7(T, aW, aT, m, bt, eW); #c1(MLLT4) c2(XP_005267053) c3(afadin isoform X1) c4(280644, 280645, 280646, 280647) c5(280648, 280649, 280650, 280651, 280652, 280653, 280654, 280655, 280656, 280657, 280658, 280659, 280660) c6( ) c7(T, aW, aT, m, bt, eW); #c1(MLLT4) c2(XP_006715555) c3(afadin isoform X9) c4( ) c5(289604, 289605, 289606, 289607, 289608, 289609, 289610, 289611, 289612, 289613, 289614) c6( ) c7(T, aW, aT, m, bt, eW); #c1(MLLT4) c2(XP_006715557) c3(afadin isoform X8) c4( ) c5(289615) c6( ) c7(T, aW, aT, m, bt, eW); #c1(MLLT6) c2(NP_005928) c3(protein AF-17) c4(160494) c5( ) c6( ) c7(ck, hF, on, k, bt); #c1(MLLT6) c2(XP_005257436) c3(protein AF-17 isoform X5) c4( ) c5(275113) c6( ) c7(ck, hF, on, k, bt); #c1(MLLT6) c2(XP_006721974) c3(protein AF-17 isoform X2) c4(294511) c5(294512, 294513, 294514, 294515, 294516, 294517) c6( ) c7(ck, hF, on, k, bt); #c1(MLLT6) c2(XP_011523121) c3(protein AF-17 isoform X6) c4( ) c5(317630, 317631, 317632, 317633, 317634, 317635, 317636) c6( ) c7(ck, hF, on, k, bt); #c1(MLN) c2(NP_001035198) c3(promotilin isoform 2 preproprotein) c4(32589) c5(32590, 32591, 32592, 32593, 32594, 32595, 32596, 32597) c6( ) c7(xS, aaT, Pf, aW, fS, aZL, eZ, aT, hD, fd, Ja, hp, K, v, iV, aeP, af, MG); #c1(MLN) c2(NP_001171627) c3(promotilin isoform 3 preproprotein) c4(71017) c5(71018, 71019, 71020, 71021, 71022, 71023, 71024, 71025) c6( ) c7(xS, aaT, Pf, aW, fS, aZL, eZ, aT, hD, fd, Ja, hp, K, v, iV, aeP, af, MG); #c1(MLN) c2(NP_002409) c3(promotilin isoform 1 preproprotein) c4(128177) c5(128178, 128179, 128180, 128181128182, 128183, 128184, 128185) c6( ) c7(xS, aaT, Pf, aW, fS, aZL, eZ, aT, hD, fd, Ja, hp, K, v, iV, aeP, af, MG); #c1(MLNR) c2(NP_001498) c3(motilin receptor) c4(118200, 118201) c5(118202, 118203, 118204, 118205, 118206, 118207, 118208, 118209, 118210, 118211, 118212, 118213) c6( ) c7(FE, QK); #c1(MLPH) c2(NP_001035932) c3(melanophilin isoform 2) c4(33463, 33464) c5(33465, 33466, 33467, 33468, 33469, 33470) c6( ) c7(ceE, ad, bN, ip); #c1(MLPH) c2(NP_001268403) c3(melanophilin isoform 4) c4( ) c5(99840, 99841, 99842, 99843, 99844, 99845, 99846, 99847, 99848, 99849, 99850) c6( ) c7(ceE, ad, bN, ip); #c1(MLPH) c2(NP_077006) c3(melanophilin isoform 1) c4(214701, 214702) c5(214703, 214704, 214705, 214706, 214707, 214708, 214709, 214710, 214711, 214712, 214713, 214714) c6( ) c7(ceE, ad, bN, ip); #c1(MLPH) c2(XP_006712803) c3(melanophilin isoform X4) c4(286843) c5( ) c6( ) c7(ceE, ad, bN, ip); #c1(MLST8) c2(NP_001186102) c3(target of rapamycin complex subunit LST8 isoform a) c4(77130, 77131) c5(77132, 77133, 77134, 77135, 77136, 77137, 77138, 77139, 77140, 77141, 77142, 77143, 77144, 77145, 77146, 77147, 77148, 77149, 77150) c6( ) c7(it, T, aF, adz, aA); #c1(MLST8) c2(XP_005255532) c3(target of rapamycin complex subunit LST8 isoform X1) c4(273719) c5(273720, 273721, 273722, 273723, 273724, 273725, 273726, 273727, 273728, 273729, 273730) c6( ) c7(it, T, aF, adz, aA); #c1(MLX) c2(NP_733752) c3(max-like protein X isoform gamma) c4(246948) c5(246949, 246950, 246951, 246952, 246953, 246954) c6( ) c7(v, af); #c1(MLX) c2(NP_937847) c3(max-like protein X isoform beta) c4(259279) c5(259280, 259281, 259282, 259283, 259284, 259285, 259286) c6( ) c7(v, af); #c1(MLX) c2(NP_937848) c3(max-like protein X isoform alpha) c4(259287) c5(259288, 259289, 259290, 259291, 259292, 259293) c6( ) c7(v, af); #c1(MLXIP) c2(NP_055753) c3(MLX-interacting protein) c4(183292, 183293, 183294) c5(183295, 183296, 183297, 183298, 183299, 183300, 183301, 183302, 183303, 183304, 183305, 183306, 183307) c6( ) c7(bL, x, T, aE, bE, Y, cj, bB, fr, k, iK, B); #c1(MLXIP) c2(XP_006719357) c3(MLX-interacting protein isoform X5) c4( ) c5(292433, 292434, 292435, 292436, 292437, 292438) c6( ) c7(bL, x, T, aE, bE, Y, cj, bB, fr, k, iK, B); #c1(MLXIPL) c2(NP_116569) c3(carbohydrate-responsive element-binding protein isoform alpha) c4(226229, 226230) c5(226231, 226232, 226233, 226234, 226235, 226236, 226237, 226238, 226239, 226240, 226241, 226242) c6( ) c7(bL, T, eR, e, aj, dG, j, v, q, J, aT, ae, af, eu, qt, aW, Bw, fc, r, Mz, as, alC, ac, cO, mf, cP, ei, B); #c1(MLXIPL) c2(NP_116570) c3(carbohydrate-responsive element-binding protein isoform beta) c4(226243) c5(226244, 226245, 226246, 226247, 226248, 226249) c6( ) c7(bL, T, eR, e, aj, dG, j, v, q, J, aT, ae, af, eu, qt, aW, Bw, fc, r, Mz, as, alC, ac, cO, mf, cP, ei, B); #c1(MLXIPL) c2(NP_116571) c3(carbohydrate-responsive element-binding protein isoform gamma) c4(226250) c5(226251, 226252, 226253, 226254, 226255, 226256) c6( ) c7(bL, T, eR, e, aj, dG, j, v, q, J, aT, ae, af, eu, qt, aW, Bw, fc, r, Mz, as, alC, ac, cO, mf, cP, ei, B); #c1(MLXIPL) c2(NP_116572) c3(carbohydrate-responsive element-binding protein isoform delta) c4(226257) c5(226258, 226259, 226260, 226261, 226262, 226263) c6( ) c7(bL, T, eR, e, aj, dG, j, v, q, J, aT, ae, af, eu, qt, aW, Bw, fc, r, Mz, as, alC, ac, cO, mf, cP, ei, B); #c1(MLYCD) c2(NP_036345) c3(malonyl-CoA decarboxylase, mitochondrial) c4(173104) c5(173105, 173106, 173107, 173108, 173109, 173110) c6( ) c7(mO, cc, vN, uL, oV, ha, IC, bKw, zN, zO, vm, dy, uW, afx, af); #c1(MMAA) c2(NP_758454) c3(methylmalonic aciduria type A protein, mitochondrial precursor) c4(249208, 249209, 249210) c5(249211, 249212, 249213, 249214, 249215, 249216, 249217, 249218, 249219, 249220, 249221, 249222, 249223) c6( ) c7(ceF, ceH, ceI, an, ceG); #c1(MMAA) c2(XP_011529988) c3(methylmalonic aciduria type A protein, mitochondrial isoform X2) c4( ) c5(325800, 325801, 325802, 325803, 325804) c6( ) c7(ceF, ceH, ceI, an, ceG); #c1(MMAB) c2(NP_443077) c3(cob(I)yrinic acid a,c-diamide adenosyltransferase, mitochondrial precursor) c4(229284) c5(229285, 229286, 229287, 229288, 229289, 229290) c6( ) c7(bL, aHg, T, os, dD, aC, id, ea, WL, aw, ew, aA, jh, aj, oZ, j, ct, nA, eq, WC, V, J, x, ceG, hb, aT, h, ey, K, dQ, WF, uQ, sb, A, d, kj, wr, aW, WE, Y, ff, nf, kp, aF, en, t, cm, dr, WH, qe, cO, cj, Km, k, m, ER, Wl, bC, eo); #c1(MMAB) c2(XP_011536570) c3(cob(I)yrinic acid a,c-diamide adenosyltransferase, mitochondrial isoform X2) c4(334078) c5(334079, 334080, 334081, 334082, 334083, 334084) c6( ) c7(bL, aHg, T, os, dD, aC, id, ea, WL, aw, ew, aA, jh, aj, oZ, j, ct, nA, eq, WC, V, J, x, ceG, hb, aT, h, ey, K, dQ, WF, uQ, sb, A, d, kj, wr, aW, WE, Y, ff, nf, kp, aF, en, t, cm, dr, WH, qe, cO, cj, Km, k, m, ER, Wl, bC, en); #c1(MMADHC) c2(NP_056517) c3(methylmalonic aciduria and homocystinuria type D protein, mitochondrial) c4(187899) c5(187900, 187901, 187902, 187903, 187904, 187905, 187906, 187907, 187908, 187909) c6( ) c7(MX, ceL, ceK, gv, ad, ceJ); #c1(MMD) c2(NP_036461) c3(monocyte to macrophage differentiation factor) c4(174040) c5(174041, 174042, 174043, 174044, 174045, 174046) c6( ) c7(T, id, ac, eM, Qu, aJ, xs, EQ, cz, j, aS, Ea, bd, ey, fq); #c1(MMD2) c2(NP_001094070) c3(monocyte to macrophage differentiation factor 2 isoform 1) c4(40610) c5(40611, 40612, 40613, 40614, 40615, 40616) c6( ) c7(ceM); #c1(MMD2) c2(NP_001257304) c3(monocyte to macrophage differentiation factor 2 isoform 3) c4(95108) c5(95109, 95110, 95111, 95112, 95113) c6( ) c7(ceM); #c1(MMD2) c2(NP_940685) c3(monocyte to macrophage differentiation factor 2 isoform 2) c4(259850) c5(259851, 259852, 259853, 259854, 259855, 259856, 259857) c6( ) c7(ceM); #c1(MME) c2(XP_011511160) c3(neprilysin isoform X1) c4(301590, 301591, 301592, 301593, 301594, 301595) c5(301596, 301597, 301598, 301599, 301600, 301601, 301602, 301603, 301604, 301605, 301606, 301607, 301608, 301609, 301610, 301611, 301612, 301613, 301614, 301615, 301616, 301617, 301618, 301619, 301620, 301621, 301622, 301623, 301624, 301625, 301626, 301627, 301628, 301629, 301630, 301631, 301632, 301633, 301634, 301635, 301636, 301637, 301638, 301639, 301640, 301641, 301642, 301643, 301644, 301645, 301646) c6( ) c7(gh, T, aC, e, l, fd, bB, aeu, ci, ceN, x, aE, oG, aoL, K, H, pk, aW, Qm, g, hJ, cm, bw, ou, bXl, eM, iA, acw, vA, mx, vy, cj, k, R, ajJ, Th, dD, n, fr, cd, ke, b, jz, Bj, h, hn, dL, ox, db, A, kj, Ni, fQ, kp, bXK, ceO, alj, op, hq, hL, it, B, vQ, bL, L, fM, dA, Lx, cz, v, j, q, eA, Rl, uT, aT, ae, af, qw, s, iU, Y, aEk, Io, cl, t, iK, Cv, ck, tj, fP, bt, ao, iW, jh, eq, hF, ad, fX, Ae, iL, BN, si, aEm, bz, es, bE, ei, i, xg, Ex); #c1(MMEL1) c2(XP_011540425) c3(membrane metallo-endopeptidase-like 1 isoform X1) c4( ) c5(338919, 338920, 338921) c6( ) c7(T, di, agT, sO, dJ, cL, aj, hp, bc, y, V, ae, af, J, ad); #c1(MMEL1) c2(XP_011544704) c3(membrane metallo-endopeptidase-like 1 isoform X6) c4(343763) c5( ) c6( ) c7(T, di, agT, sO, dJ, cL, aj, hp, bc, y, V, ae, af, J, ad); #c1(MMEL1) c2(XP_011544709) c3(membrane metallo-endopeptidase-like 1 isoform X10) c4(343764) c5(343765, 343766, 343767, 343768, 343769, 343770, 343771, 343772, 343773, 343774, 343775, 343776, 343777, 343778, 343779, 343780) c6(343781, 343782, 343783, 343784) c7(T, di, agT, sO, dJ, cL, aj, hp, bc, y, V, ae, af, J, ad); #c1(MMEL1) c2(XP_011544712) c3(membrane metallo-endopeptidase-like 1 isoform X13) c4(343785, 343786) c5(343787, 343788, 343789, 343790, 343791, 343792, 343793, 343794, 343795, 343796, 343797, 343798, 343799, 343800, 343801, 343802) c6(343803, 343804, 343805, 343806) c7(T, di, agT, sO, dJ, cL, aj, hp, bc, y, V, ae, af, J, ad); #c1(MMP1) c2(NP_002412) c3(interstitial collagenase isoform 1 preproprotein) c4(128225) c5(128226, 128227, 128228, 128229, 128230, 128231) c6( ) c7(bM, T, fR, lP, pf, ea, if, e, aRm, aI, eb, bB, aTy, fd, lR, ci, bh, fw, sD, Tz, Hr, dY, aE, Bc, ja, K, bah, hu, ass, eL, cp, aa, hm, eG, yo, aTq, dH, Jl, aW, aEl, az, hl, wf, CT, hN, vs, g, as, pL, eF, uC, aAW, ha, qJ, eM, iA, dc, ceR, vA, Gs, mx, bhI, uo, m, in, ik, iu, cE, Vj, dD, pG, sQ, wJ, sw, zt, aw, ht, n, aj, fr, qN, aBP, cd, ai, eh, jz, no, cc, ec, zw, h, aNj, dL, ey, pj, dx, bzr, Nr, asL, ks, fQ, aq, po, kp, fe, dw, sE, fq, op, kT, GG, W, ky, vD, dB, anC, Pl, lf, Be, wk, at, uz, ut, bm, qF, it, B, AN, bL, AS, dA, eR, fG, oe, yk, jx, aA, Ij, ceP, cz, hy, j, v, C, bcE, bgR, V, q, J, eA, eJ, bke, Rl, Ig, tL, ceS, aT, Fx, bq, an, IM, ae, af, dl, bA, kl, aGP, bf, s, oV, Y, ev, fO, Pg, bg, r, aYp, afg, en, cl, bQ, t, Px, iK, pb, asw, Dy, c, ac, ig, IV, gX, uS, cS, np, fD, VB, avi, vi, ao, sY, kh, am, aFe, id, aZ, iW, jh, vr, ah, eq, XM, ad, wD, hX, dP, ceQ, av, hd, F, od, py, yt, Dq, Ie, bgr, IQ, WZ, uX, TC, d, IU, BO, ff, xs, eH, Ej, bpA, aF, hp, iV, px, bz, DF, Nq, LB, gk, Bv, es, bMX, TA, bE, aka, aFb, aef, aS, Hg, Lz, ei, IC, ne, y); #c1(MMP10) c2(NP_002416) c3(stromelysin-2 preproprotein) c4(128253) c5(128254, 128255, 128256, 128257, 128258, 128259) c6( ) c7(bM, sY, T, yk, aw, al, jh, aA, n, j, ci, tK, ai, av, afr, F, rw, M, dL, ji, ZN, hm, oS, A, lR, bf, ff, xs, hl, ks, Ej, kp, aF, en, iV, t, uC, bz, ac, ky, eM, hk, vy, bm, dy, m, y, iu); #c1(MMP11) c2(NP_005931) c3(stromelysin-3 preproprotein) c4(160503) c5(160504, 160505, 160506, 160507, 160508, 160509) c6( ) c7(sY, T, dD, AS, ea, al, NT, aA, n, Gn, aei, ci, eq, AO, mC, q, ip, Bl, F, aE, ZZ, aT, aaj, dL, AN, apj, Dz, in, pj, eL, dx, pl, aa, yi, iU, Jl, aW, qt, ff, eZ, r, Pp, kp, aF, en, YF, cl, uC, aYt, aoO, sS, bP, eM, nB, aGo, hk, hc, Be, aJQ, fL, lf, rA, it, B, hv); #c1(MMP12) c2(NP_002417) c3(macrophage metalloelastase preproprotein) c4(128260) c5(128261, 128262, 128263, 128264, 128265, 128266) c6( ) c7(bM, T, lP, pf, ea, e, al, fo, ci, Qp, aE, IQ, eL, Zm, aiJ, dH, aW, vs, g, hJ, eF, ahv, uC, y, eM, avZ, dD, aw, ht, n, aBP, cd, ai, nm, dL, ey, apc, A, fe, aq, bld, bxB, hq, bm, at, uz, B, fl, eR, fG, oe, yk, aA, cz, j, V, q, eA, yg, aT, qk, qw, bf, r, en, t, pb, ajl, ac, c, ig, lV, np, sY, kh, am, eq, ad, hX, dP, av, F, od, aMn, vB, hP, IQ, uQ, d, lR, Di, TY, ff, aF, bz, TA, aS, ME, ei, lf, X, Ex); #c1(MMP13) c2(NP_002418) c3(collagenase 3 preproprotein) c4(128267, 128268, 128269) c5(128270, 128271, 128272, 128273, 128274, 128275, 128276, 128277, 128278, 128279, 128280, 128281, 128282, 128283, 128284, 128285, 128286, 128287, 128288, 128289, 128290, 128291, 128292, 128293) c6(128294, 128295, 128296, 128297, 128298, 128299) c7(T, ea, al, fd, bB, aTy, zh, ci, Na, afr, bPx, rw, aeO, K, hu, eL, bc, cp, eG, aeR, aW, Az, hl, g, pL, eF, ahv, uC, nB, m, ceV, dD, zt, aw, ceU, n, fr, bd, cd, ai, pe, amJ, rl, dL, Dz, fQ, aq, fe, mo, W, hL, bm, at, pg, it, B, dA, fG, aA, j, C, q, eA, XX, aT, Nc, rE, ae, eu, bA, aGP, bf, oV, Y, fO, Pg, bg, r, en, t, sS, ru, ceT, JH, hS, sY, kh, id, aFe, eq, ad, hX, dP, F, od, hP, ji, ff, eH, aF, bz, LB, zr, bE, aFb, aS, lf, X, y); #c1(MMP14) c2(NP_004986) c3(matrix metalloproteinase-14 preproprotein) c4(151710) c5(151711, 151712, 151713, 151714, 151715, 151716) c6( ) c7(DS, T, aC, lP, pf, ea, if, al, Xi, eb, bB, aTy, ci, aE, rw, K, hu, dQ, H, eL, xQ, eG, aW, g, as, pL, eF, uC, cm, bw, bSA, eM, nB, ki, mx, U, tV, cj, m, uL, iu, dD, sw, aw, ht, n, aj, fr, qN, cd, ai, cc, adL, By, dL, aaA, ey, vx, Gc, pl, A, kp, yq, W, dB, hk, hL, bm, at, pg, it, B, AN, ceW, bL, L, ka, vQ, AS, dA, eR, yk, lH, jx, aA, v, j, V, q, J, eA, aT, cy, ceX, ae, eu, bf, iU, nO, iZ, Y, r, en, t, btO, iK, pb, tR, sk, ac, c, np, dy, im, bt, rA, VB, yv, hS, sY, kh, id, KO, eq, ceY, ad, wD, hX, dP, av, hd, F, ib, py, vw, aQ, nJ, d, ff, eH, aP, aF, bz, gk, bE, lI, aS, ME, hE, X, y); #c1(MMP15) c2(NP_002419) c3(matrix metalloproteinase-15 preproprotein) c4(128300) c5(128301, 128302, 128303, 128304, 128305, 128306) c6( ) c7(gx, sY, T, if, al, KO, v, ci, qN, cd, q, eA, wD, iu, F, aE, qK, lG, K, jf, d, r, as, uC, btO, eM, y, bt, B); #c1(MMP16) c2(NP_005932) c3(matrix metalloproteinase-16 precursor) c4(160510) c5(160511, 160512, 160513, 160514, 160515, 160516) c6( ) c7(sY, al, aA, fr, ci, C, qN, Iu, eA, ad, Yn, F, sl, ae, af, d, aF, PQ, aXL, as, uC, fq, vK, uJ, y, B); #c1(MMP17) c2(NP_057239) c3(matrix metalloproteinase-17 preproprotein) c4(189655, 189656) c5(189657, 189658, 189659, 189660, 189661, 189662, 189663, 189664, 189665, 189666, 189667, 189668, 189669) c6( ) c7(sY, T, F, aW, aI, aT, ci, g, im, y, uC, ai); #c1(MMP17) c2(XP_011536659) c3(matrix metalloproteinase-17 isoform X1) c4(334156) c5(334157, 334158, 334159, 334160, 334161) c6( ) c7(sY, T, F, aW, aI, aT, ci, g, im, y, uC, ai); #c1(MMP19) c2(NP_001259030) c3(matrix metalloproteinase-19 isoform 3 preproprotein) c4(96958) c5(96959, 96960, 96961, 96962, 96963, 96964, 96965, 96966) c6(96967, 96968) c7(LB, bM, sY, T, afr, hk, fG, yk, bsO, ff, cr, ci, K, en, g, y, uC, af); #c1(MMP19) c2(NP_002420) c3(matrix metalloproteinase-19 isoform 1 preproprotein) c4(128307, 128308) c5(128309, 128310, 128311, 128312, 128313, 128314, 128315, 128316) c6(128317, 128318) c7(LB, bM, sY, T, afr, hk, fG, yk, bsO, ff, cr, ci, K, en, g, y, uC, af); #c1(MMP19) c2(XP_006719464) c3(matrix metalloproteinase-19 isoform X3) c4( ) c5(292494, 292495, 292496, 292497, 292498, 292499, 292500, 292501) c6(292502, 292503) c7(LB, bM, sY, T, afr, hk, fG, yk, bsO, ff, cr, ci, K, en, g, y, uC, af); #c1(MMP2) c2(NP_001121363) c3(72 kDa type IV collagenase isoform 2) c4( ) c5(45766, 45767) c6( ) c7(T, ea, fd, fo, aoj, ci, aAo, aY, Hr, bv, aE, fm, rw, hu, cp, yo, Az, uY, vs, ba, fT, iA, nB, wE, k, lS, vF, aFG, aO, ht, aj, cd, Ak, aEL, EU, fQ, fe, ajz, dB, bOj, Be, ZR, apE, jv, jp, DD, aA, cz, AO, q, blN, qK, cy, dl, eu, bA, aGP, bf, bg, uU, cl, cfa, pb, cT, rR, iQ, ac, bt, ao, cfe, gV, iW, jh, aHv, fu, ceY, ad, wD, hX, yt, Ie, IQ, WZ, ff, aeV, iV, bz, lf, lC, iu, bM, xS, if, e, bB, Tz, ip, Na, vV, ja, bc, eG, dH, Jl, hl, as, eF, cm, qJ, Kv, ki, vA, vy, wx, in, Vj, rt, dD, n, md, brY, jz, zw, ec, WB, eV, aYF, hi, hQ, yq, sE, YE, abV, Pl, hL, at, ut, B, vQ, AS, mr, wL, eX, v, V, hW, nQ, ae, jf, iZ, De, Qr, t, Px, ck, bLr, kP, au, gX, JH, zu, avi, vi, hl, ob, Dd, wV, eq, hd, py, ab, vc, nJ, d, hG, NH, dN, dr, aef, y, hv, aC, fR, azf, IP, al, Vp, u, Bc, K, eL, adT, mQ, wf, hN, g, pL, bwe, uC, aAW, aDs, Gs, uo, Hb, m, QO, cfg, sQ, aw, NT, qy, zP, ft, Lv, By, jl, CN, bMq, ks, cM, Ld, W, JM, Pr, it, fl, L, ceW, fM, fG, j, eA, J, XX, amg, cfd, yg, Nc, bq, kl, xR, Ue, Y, r, en, wA, iK, brZ, hc, dh, dy, Mj, gx, sY, kh, id, hF, iJ, dP, oj, io, hP, adx, WW, uX, IU, IR, xs, eH, cr, Fq, iR, cff, Bv, sG, ei, hE, tQ, pf, wH, zh, dY, cfc, H, hm, DA, aW, hJ, eM, nw, Xu, vl, Mi, fr, bd, qN, kO, ai, ke, Bl, cc, rl, h, dL, aUm, hB, vx, wC, bgf, aq, kp, op, Qy, Qf, hk, bm, hR, uz, te, ceZ, bL, ka, eR, uv, tc, C, uT, aT, af, s, iU, oV, aYp, ajl, nM, pZ, yW, AH, fP, dT, aDj, hS, vr, jE, kL, av, I, F, ib, vw, jo, fb, cfb, qt, yy, Ej, aF, LB, es, bE, aS, be, X, us); #c1(MMP2) c2(NP_001289437) c3(72 kDa type IV collagenase isoform 3) c4( ) c5(114212, 114213, 114214, 114215, 114216) c6( ) c7(T, ea, fd, fo, aoj, ci, aAo, aY, Hr, bv, aE, fm, rw, hu, cp, yo, Az, uY, vs, ba, fT, iA, nB, wE, k, lS, vF, aFG, aO, ht, aj, cd, Ak, aEL, EU, fQ, fe, ajz, dB, bOj, Be, ZR, apE, jv, jp, DD, aA, cz, AO, q, blN, qK, cy, dl, eu, bA, aGP, bf, bg, uU, cl, cfa, pb, cT, rR, iQ, ac, bt, ao, cfe, gV, iW, jh, aHv, fu, ceY, ad, wD, hX, yt, Ie, lQ, WZ, ff, aeV, iV, bz, lf, lC, iu, bM, xS, if, e, bB, Tz, ip, Na, vV, ja, bc, eG, dH, Jl, hl, as, eF, cm, qJ, Kv, ki, vA, vy, wx, in, Vj, rt, dD, n, md, brY, jz, zw, ec, WB, eV, aYF, hi, hQ, yq, sE, YE, abV, Pl, hL, at, ut, B, vQ, AS, mr, wL, eX, v, V, hW, nQ, ae, jf, iZ, De, Qr, t, Px, ck, bLr, kP, au, gX, JH, zu, avi, vi, hl, ob, Dd, wV, eq, hd, py, ab, vc, nJ, d, hG, NH, dN, dr, aef, y, hv, aC, fR, azf, lP, aI, Vp, u, Bc, K, eL, adT, mQ, wF, hN, g, pL, bwe, uC, aAW, aDs, Gs, uo, Hb, m, QO, cfg, sQ, aw, NT, qy, zP, ft, Lv, By, jl, CN, bMq, ks, cM, Ld, W, JM, Pr, it, fl, L, ceW, fM, fG, j, eA, J, XX, amg, cfd, yg, Nc, bq, kl, xR, Ue, Y, r, en, wA, iK, brZ, hc, dh, dy, Mj, gx, sY, kh, id, hF, iJ, dP, oj, io, hP, adx, WW, uX, IU, IR, xs, eH, cr, Fq, iR, cff, Bv, sG, ei, hE, tQ, pf, wH, zh, dY, cfc, H, hm, DA, aW, hJ, eM, nw, Xu, vl, Mi, fr, bd, qN, kO, ai, ke, Bl, cc, rl, h, dL, aUm, hB, vx, wC, bgf, aq, kp, op, Qy, Qf, hk, bm, hR, uz, te, ceZ, bL, ka, eR, uv, tc, C, uT, aT, af, s, iU, oV, aYp, ajI, nM, pZ, yW, AH, fP, dT, aDj, hS, vr, jE, kL, av, I, F, ib, vw, jo, fb, cfb, qt, yy, Ej, aF, LB, es, bE, aS, be, X, us); #c1(MMP2) c2(NP_004521) c3(72 kDa type IV collagenase isoform 1 preproprotein) c4(147208, 147209, 147210) c5(147211, 147212, 147213, 147214, 147215, 147216) c6( ) c7(T, ea, fd, fo, aoj, ci, aAo, aY, Hr, bv, aE, fm, rw, hu, cp, yo, Az, uY, vs, ha, fT, iA, nB, wE, k, lS, vF, aFG, aO, ht, aj, cd, Ak, aEL, EU, fQ, fe, ajz, dB, bOj, Be, ZR, apE, jv, jp, DD, aA, cz, AO, q, blN, qK, cy, dl, eu, bA, aGP, bf, bg, uU, cl, cfa, pb, cT, rR, iQ, ac, bt, ao, cfe, gV, iW, jh, aHv, fu, ceY, ad, wD, hX, yt, le, IQ, WZ, ff, aeV, iV, bz, lf, lC, iu, bM, xS, if, e, bB, Tz, ip, Na, vV, ja, bc, eG, dH, Jl, hl, as, eF, cm, qj, Kv, ki, vA, vy, wx, in, Vj, rt, dD, n, md, brY, jz, zw, ec, WB, eV, aYF, hi, hQ, yq, sE, YE, abV, Pl, hL, at, ut, B, vQ, AS, mr, wL, eX, v, V, hW, nQ, ae, jf, iZ, De, Qr, t, Px, ck, bLr, kP, au, gX, JH, zu, avi, vi, hl, ob, Dd, wV, eq, hd, py, ah, vc, nJ, d, hG, NH, dN, dr, aef, y, hv, aC, fR, azf, lP, al, Vp, u, Bc, K, eL, adT, mQ, wF, hN, g, pL, bwe, uC, aAW, aDs, Gs, uo, Hb, m, QO, cfg, sQ, aw, NT, qy, zP, ft, Lv, By, jl, CN, bMq, ks, cM, Ld, W, JM, Pr, it, fl, L, ceW, fM, fG, j, eA, J, XX, amg, cfd, yg, Nc, bq, kl, xR, Ue, Y, r, en, wA, iK, brZ, hc, dh, dy, Mj, gx, sY, kh, id, hF, iJ, dP, oj, io, hP, adx, WW, uX, IU, IR, xs, eH, cr, Fq, iR, cff, Bv, sG, ei, hE, tQ, pf, wH, zh, dY, cfc, H, hm, DA, aW, hJ, eM, nw, Xu, vl, Mi, fr, bd, qN, kO, ai, ke, Bl, cc, rl, h, dL, aUm, hB, vx, wC, bgf, aq, kp, op, Qy, Qf, hk, bm, hR, uz, te, ceZ, bL, ka, eR, uv, tc, C, uT, aT, af, s, iU, oV, aYp, ajl, nM, pZ, yW, AH, fP, dT, aDj, hS, vr, jE, kL, av, I, F, ib, vw, jo, fb, cfb, qt, yy, Ej, aF, LB, es, bE, aS, be, X, us); #c1(MMP20) c2(NP_004762) c3(matrix metalloproteinase-20 preproprotein) c4(149393) c5(149394, 149395, 149396, 149397, 149398, 149399, 149400) c6( ) c7(bWJ, ka, ki, ci, y, Ud, cfh); #c1(MMP21) c2(XP_011537559) c3(matrix metalloproteinase-21 isoform X1) c4(335145) c5(335146, 335147, 335148, 335149, 335150, 335151) c6( ) c7(T, aGn, aGo, bB, ci, IQ, B); #c1(MMP24) c2(NP_006681) c3(matrix metalloproteinase-24 preproprotein) c4(167103, 167104) c5(167105, 167106, 167107, 167108, 167109, 167110, 167111, 167112, 167113, 167114, 167115, 167116, 167117, 167118) c6(167119, 167120) c7(d, F, eR, al, aj, en, ci, aY, V, J); #c1(MMP25) c2(NP_071913) c3(matrix metalloproteinase-25 preproprotein) c4(212282, 212283) c5(212284, 212285, 212286, 212287, 212288, 212289) c6( ) c7(ka, T, al, qy, bB, ci, V, ip, Na, F, aT, Nc, eG, d, aW, Ud, dB, bE, ki, eo, y, X); #c1(MMP25) c2(XP_011520905) c3(matrix metalloproteinase-25 isoform X3) c4( ) c5(315905, 315906, 315907, 315908, 315909, 315910) c6( ) c7(ka, T, al, qy, bB, ci, V, ip, Na, F, aT, Nc, eG, d, aW, Ud, dB, bE, ki, eo, y, X); #c1(MMP26) c2(NP_068573) c3(matrix metalloproteinase-26 preproprotein) c4(209448) c5(209449, 209450, 209451, 209452, 209453, 209454, 209455, 209456, 209457, 209458) c6( ) c7(bL, T, aC, aZ, n, j, ci, ad, aT, IQ, ae, kl, zH, aW, aEl, ff, en, cl, t, bz, hL, lf, it); #c1(MMP28) c2(NP_001027449) c3(matrix metalloproteinase-28 isoform 3 precursor) c4(30123) c5(30124, 30125, 30126, 30127, 30128, 30129, 30130, 30131) c6(30132, 30133) c7(bE, aA, bB, fe, aF, en, ci, V); #c1(MMP28) c2(NP_077278) c3(matrix metalloproteinase-28 isoform 1 preproprotein) c4(214888) c5(214889, 214890, 214891, 214892, 214893, 214894, 214895, 214896, 214897) c6(214898, 214899) c7(bE, aA, bB, fe, aF, eo, ci, V); #c1(MMP28) c2(NP_116568) c3(matrix metalloproteinase-28 isoform 2 preproprotein) c4(226217, 226218) c5(226219, 226220, 226221, 226222, 226223, 226224, 226225, 226226) c6(226227, 226228) c7(bE, aA, bB, fe, aF, eo, ci, V); #c1(MMP28) c2(XP_011523534) c3(matrix metalloproteinase-28 isoform X5) c4( ) c5(318045, 318046, 318047, 318048, 318049, 318050, 318051) c6(318052, 318053) c7(bE, aA, bB, fe, aF, en, ci, V); #c1(MMP3) c2(NP_002413) c3(stromelysin-1 preproprotein) c4(128232) c5(128233, 128234, 128235, 128236, 128237, 128238) c6( ) c7(oO, T, fR, tQ, IP, ea, if, e, al, pf, fd, aTy, cL, zh, ci, IR, Tz, Hr, Na, dY, vV, aE, rn, M, K, dQ, eL, bc, eN, cp, hm, eG, aW, hl, hN, g, as, pL, uC, aAW, ba, qJ, fT, eM, lq, vA, mx, vy, uo, m, R, cE, Vj, rt, aNm, dD, pG, Ly, sQ, FG, sw, wJ, aw, ht, n, aj, fr, kD, uE, bd, aCQ, zP, aBP, cd, ai, jz, zw, ec, amJ, rl, kl, sW, IG, dL, ux, he, aqi, wC, A, mR, aJ, fJ, ks, fQ, aq, fe, cfk, dw, cM, sE, op, kT, W, ky, bP, dB, hk, vb, Be, hL, at, uz, ut, bm, YH, anx, bni, it, B, rp, bL, Dw, vQ, eR, fG, oe, jx, aA, Ij, ceP, cz, cfl, j, hy, bX, v, V, q, J, eA, aRo, Mg, Rl, tL, hb, nX, qp, afQ, ceS, rS, aT, Nc, bK, an, rE, ae, af, dl, eu, bf, s, Y, fO, bg, r, iy, cfm, en, cl, wA, t, iK, bQ, pb, sS, wg, ac, c, yW, IV, hc, gX, uS, ro, cS, np, JH, Bd, rA, VB, vi, sY, kh, am, aFe, aD, iW, jh, vr, oR, mw, Fb, uu, jE, Gn, bKZ, eq, aHv, ad, dZ, hX, dP, bRP, nH, av, F, od, wD, yt, LA, Aa, IQ, jo, WZ, uX, gj, d, IU, cfj, cW, ff, eZ, dN, yy, aF, hp, iV, bz, Hv, eK, LB, uP, gk, es, TA, aFb, bQS, lI, X, gZ, aef, wz, aS, bC, be, ei, lf, efi, gq, y); #c1(MMP7) c2(NP_002414) c3(matrilysin preproprotein) c4(128239) c5(128240, 12824L128242, 128243, 128244, 128245) c6( ) c7(bM, T, os, aC, pf, ea, if, al, eh, bB, fd, ci, Hr, wa, aE, HR, K, hu, eL, cp, akl, Qe, aa, Jl, aW, az, aB, g, as, eF, uC, aoS, aAW, qJ, fT, eM, Hb, m, fy, iu, dD, gU, wu, sw, ht, NT, n, BH, fr, qN, jz, dL, RT, alw, aq, fe, kp, ar, Qy, W, dB, hL, it, B, bL, AS, dA, fG, lH, uv, aA, cz, cfl, j, cfn, V, q, eA, eJ, qp, qK, aT, Oi, rO, bau, ae, dl, s, NE, nO, oV, Y, ev, r, iy, en, cl, t, kP, yW, nG, gX, cS, dy, KY, ao, gx, sY, id, aD, jh, oZ, Fb, eq, ad, dP, av, F, MS, od, sN, NS, ji, wm, WZ, ff, xs, eH, aF, Fq, iV, bz, LB, bF, D, gk, Bv, bE, adg, lf, X, y); #c1(MMP8) c2(NP_002415) c3(neutrophil collagenase isoform 1 preproprotein) c4(128246) c5(128247, 128248, 128249, 128250, 128251, 128252) c6( ) c7(bM, sY, T, dD, fR, sQ, ea, yk, e, al, bO, fd, aj, j, eq, C, uE, V, cd, J, Tz, wa, eA, av, F, bPx, tL, rl, afQ, aT, dL, IQ, aa, IU, bf, iU, cW, aW, Y, ff, bg, fQ, aFr, afq, aoD, en, pL, g, uC, bz, aZz, op, bm, uP, ba, D, gk, hk, vA, Be, cj, uo, uz, ut, dX, cS, aS, fD, ei, pg, nz, B, y); #c1(MMP8) c2(XP_011541136) c3(neutrophil collagenase isoform X2) c4( ) c5(339670) c6( ) c7(bM, sY, T, dD, fR, sQ, ea, yk, e, al, bO, fd, aj, j, eq, C, uE, V, cd, J, Tz, wa, eA, av, F, bPx, tL, rl, afQ, aT, dL, IQ, aa, IU, bf, iU, cW, aW, Y, ff, bg, fQ, aFr, afq, aoD, en, pL, g, uC, bz, aZz, op, bm, uP, ba, D, gk, hk, vA, Be, cj, uo, uz, ut, dX, cS, aS, fD, ei, pg, nz, B, y); #c1(MMP8) c2(XP_011541137) c3(neutrophil collagenase isoform X1) c4(339671) c5(339672, 339673, 339674, 339675, 339676) c6( ) c7(bM, sY, T, dD, fR, sQ, ea, yk, e, al, bO, fd, aj, j, eq, C, uE, V, cd, J, Tz, wa, eA, av, F, bPx, tL, rl, afQ, aT, dL, IQ, aa, IU, bf, iU, cW, aW, Y, ff, bg, fQ, aFr, afq, aoD, en, pL, g, uC, bz, aZz, op, bm, uP, ha, D, gk, hk, vA, Be, cj, uo, uz, ut, dX, cS, aS, fD, ei, pg, nz, B, y); #c1(MMP8) c2(XP_011541138) c3(neutrophil collagenase isoform X3) c4(339677) c5(339678, 339679, 339680, 339681, 339682, 339683) c6( ) c7(bM, sY, T, dD, fR, sQ, ea, yk, e, al, bO, fd, aj, j, eq, C, uE, V, cd, J, Tz, wa, eA, av, F, bPx, tL, rl, afQ, aT, dL, IQ, aa, IU, bf, iU, cW, aW, Y, ff, bg, fQ, aFr, afq, aoD, en, pL, g, uC, bz, aZz, op, bm, uP, ba, D, gk, hk, vA, Be, cj, uo, uz, ut, dX, cS, aS, fD, ei, pg, nz, B, y); #c1(MMP9) c2(NP_004985) c3(matrix metalloproteinase-9 preproprotein) c4(151696, 151697) c5(151698, 151699, 151700, 151701, 151702, 151703, 151704, 151705, 151706, 151707, 151708, 151709) c6( ) c7(gh, T, ea, lr, fd, fo, aoj, ci, aY, Hr, GK, bv, aE, rw, zy, aFk, hH, cp, aa, ly, ye, az, uY, vs, zE, cfp, fT, nB, cfs, wE, ceR, cj, Zn, k, lS, vF, eg, nD, aFG, vE, aO, ht, ceU, aj, aBP, cd, br, sW, Ak, lG, aNj, ey, pl, fQ, Vt, fe, ajz, dB, bOj, Be, qF, aZy, jp, aA, cz, bX, q, qK, Di, cy, DX, dl, eu, bf, nO, fO, lo, uU, cl, cfa, pb, rR, iM, ac, iQ, ig, bt, rA, ao, On, wi, iW, jh, dG, Gn, fu, ad, afb, hX, yt, Dq, Ot, le, tT, cfr, Aa, IQ, WZ, qZ, cfj, cW, ff, aZw, iV, bz, Ek, aka, If, IC, aed, iu, oO, bM, ID, xS, aiH, if, e, bB, IK, sD, Tz, ip, Na, bPx, cfq, vV, ja, bc, eG, aiV, aCg, dH, Jl, Du, hl, as, eF, cm, bw, qJ, AV, vA, mx, aiM, tV, vy, cfo, wx, in, Vj, ajy, dD, pG, zt, n, jz, no, zw, zY, ec, gd, eV, cY, oS, A, fJ, lb, hQ, sE, abV, bP, Pl, hL, at, ut, eo, sa, cB, B, arO, vQ, AS, dA, mr, wL, lH, eX, fF, v, V, yw, nQ, ae, jf, kX, afq, acB, t, FT, asw, ck, kP, gX, JH, yH, zu, vi, pY, df, wV, eq, hd, py, od, ds, nJ, mu, d, je, NH, rM, dN, anW, bF, gk, bQS, gZ, aef, MJ, Hg, y, hv, aC, fR, IP, al, bEy, wa, afr, bkA, u, M, rB, K, eL, adT, mH, axu, wF, hN, Ku, g, pL, uC, aAW, aik, Gs, uo, m, Ro, P, sQ, sw, aw, NT, fN, qy, pM, zP, biS, ft, aMD, kH, Lv, cU, By, jl, ZN, KV, bkS, cM, kT, W, Pr, it, fI, L, fM, fG, jx, qQ, j, iI, eA, J, XX, Mg, amg, MR, cfd, ceS, yg, qG, Nc, bq, avg, kl, xR, Ue, Y, Pg, r, aHU, en, wA, iK, Dm, Dy, c, ru, hc, Da, cS, dy, fD, Mj, bFR, gx, sY, kh, id, bs, iJ, dP, fU, sN, oj, io, ji, uX, IU, IR, aCt, xs, eH, cr, si, iR, cff, qa, TA, Bv, sG, bC, ei, hE, tQ, pf, eb, ajp, zh, bWN, dY, H, hm, aW, OZ, eM, uJ, mk, R, vl, ajm, tp, Mi, fr, bd, qN, kO, ai, eW, Bl, rl, h, dL, aUm, ux, hB, wC, aq, kp, mo, op, lx, Qf, NL, hk, vb, Vy, bm, hR, uz, cn, bL, Dw, eR, yk, dK, uv, sM, cR, aBo, OY, C, uT, qp, afQ, aT, bK, af, s, iU, amF, ajl, sS, nM, yW, wq, im, Bd, IJ, aDj, hS, aD, vr, Fb, jE, av, I, F, ib, vw, TC, cfb, afe, qt, eZ, aFr, Ej, aF, uF, eK, LB, es, RV, bE, z, HN, aS, XO, be, X, us); #c1(MMRN1) c2(NP_031377) c3(multimerin-1 precursor) c4(172070, 172071) c5(172072, 172073, 172074, 172075, 172076, 172077, 172078, 172079, 172080, 172081, 172082, 172083, 172084, 172085, 172086, 172087, 172088, 172089, 172090, 172091, 172092, 172093) c6(172094, 172095, 172096, 172097, 172098, 172099) c7(T, dD, xu, ea, aw, aj, j, eq, J, dY, M, an, bpU, hm, IR, r, kD, cft, iV, kT, ac, vy, dX, aS, act, gq); #c1(MMRN2) c2(NP_079032) c3(multimerin-2 precursor) c4(216672) c5(216673, 216674, 216675, 216676, 216677, 216678, 216679, 216680, 216681, 216682, 216683, 216684, 216685, 216686, 216687, 216688) c6(216689, 216690, 216691, 216692) c7(T); #c1(MMRN2) c2(XP_005270210) c3(multimerin-2 isoform X1) c4(283288) c5( ) c6( ) c7(T); #c1(MMS19) c2(NP_001276332) c3(MMS19 nucleotide excision repair protein homolog isoform 2) c4(108094, 108095, 108096) c5(108097, 108098, 108099, 108100, 108101, 108102, 108103, 108104, 108105, 108106, 108107, 108108) c6( ) c7(aC, aE, eM, hG, eH, m, g, eF, V); #c1(MMS19) c2(NP_001276334) c3(MMS19 nucleotide excision repair protein homolog isoform 1) c4(108109, 108110) c5(108111, 108112, 108113, 108114, 108115, 108116, 108117, 108118, 108119, 108120, 108121, 108122, 108123, 108124, 108125, 108126, 108127, 108128) c6( ) c7(aC, aE, eM, hG, eH, m, g, eF, V); #c1(MMS19) c2(XP_006718008) c3(MMS19 nucleotide excision repair protein homolog isoform X4) c4( ) c5(291440, 291441, 291442, 291443, 291444, 291445, 291446, 291447) c6( ) c7(aC, aE, eM, hG, eH, m, g, eF, V); #c1(MMS19) c2(XP_011538365) c3(MMS19 nucleotide excision repair protein homolog isoform X5) c4(336056) c5(336057, 336058, 336059, 336060, 336061) c6( ) c7(aC, aE, eM, hG, eH, m, g, eF, V); #c1(MMS22L) c2(NP_940870) c3(protein MMS22-like) c4(260009) c5(260010, 260011, 260012, 260013, 260014, 260015) c6( ) c7(T, K); #c1(MN1) c2(NP_002421) c3(probable turner suppressor protein MN1) c4(128319) c5(128320, 128321, 128322, 128323, 128324, 128325, 128326) c6( ) c7(boY, iT, gm, bX, cfu, bt); #c1(MNAT1) c2(NP_001171434) c3(CDK-activating kinase assembly factor MAT1 isoform 2) c4(70080) c5(70081, 70082, 70083, 70084, 70085, 70086) c6( ) c7(T, hl, aj, V, mC, aR, J, hX, av, AW, hb, dV, aT, af, pi, uQ, A, aW, Y, eH, Pg, eZ, as, eF, cm, bz, fq, kT, WO, ac, dB, WP, U, Xa, fL, WX, xg, B, ek); #c1(MNAT1) c2(NP_002422) c3(CDK-activating kinase assembly factor MAT1 isoform 1) c4(128327, 128328) c5(128329, 128330, 128331, 128332, 128333, 128334, 128335) c6( ) c7(T, hl, aj, V, mC, aR, J, hX, av, AW, hb, dV, aT, af, pi, uQ, A, aW, Y, eH, Pg, eZ, as, eF, cm, bz, fq, kT, WO, ac, dB, WP, U, Xa, fL, WX, xg, B, ek); #c1(MNAT1) c2(XP_011535097) c3(CDK-activating kinase assembly factor MAT1 isoform X3) c4( ) c5(331829, 331830, 331831, 331832, 331833, 331834) c6( ) c7(T, hl, aj, V, mC, aR, J, hX, av, AW, hb, dV, aT, af, pi, uQ, A, aW, Y, eH, Pg, eZ, as, eF, cm, bz, fq, kT, WO, ac, dB, WP, U, Xa, fL, WX, xg, B, ek); #c1(MNDA) c2(NP_002423) c3(myeloid cell nuclear differentiation antigen) c4(128336, 128337) c5(128338, 128339, 128340, 128341, 128342, 128343, 128344, 128345, 128346, 128347, 128348, 128349, 128350) c6( ) c7(dD, fM, A, bm, cj, eZ, jh, eq, fu, ey, bw, bt, br); #c1(MNS1) c2(NP_060835) c3(meiosis-specific nuclear structural protein 1) c4(198045) c5(198046, 198047, 198048, 198049, 198050, 198051) c6( ) c7(oe); #c1(MNT) c2(NP_064706) c3(max-binding protein MNT) c4(203502) c5(203503, 203504, 203505, 203506, 203507, 203508, 203509, 203510, 203511, 203512, 203513) c6( ) c7(Na, jf, T, aW, Y, Az, ja, aT, K, bdS, B); #c1(MNX1) c2(NP_001158727) c3(motor neuron and pancreas homeobox protein 1 isoform 2) c4(63729) c5(63730, 63731, 63732, 63733, 63734, 63735) c6( ) c7(eX, aj, j, ci, J, mj, mh, bxn, Bj, eV, iY, Gc, ck, c, iT, bYB, bt, agw, cj, mg, cfv, BV, ZW, B, cfw); #c1(MNX1) c2(NP_005506) c3(motor neuron and pancreas homeobox protein 1 isoform 1) c4(156912, 156913) c5(156914, 156915, 156916, 156917, 156918, 156919, 156920, 156921, 156922, 156923, 156924, 156925, 156926) c6( ) c7(eX, aj, j, ci, J, mj, mh, bxn, Bj, eV, iY, Gc, ck, c, iT, bYB, bt, agw, cj, mg, cfv, BV, ZW, B, cfw); #c1(MOAP1) c2(NP_071434) c3(modulator of apoptosis 1) c4(211648) c5(211649, 211650, 211651, 211652, 211653, 211654, 211655, 211656, 211657, 211658) c6( ) c7(T, WP, aj, ae, af, J, ad); #c1(MOB1A) c2(NP_060691) c3(MOB kinase activator IA) c4(197183, 197184) c5(197185, 197186, 197187, 197188, 197189, 197190) c6( ) c7(av, T, eM, r, bB, v, bz, q); #c1(MOB1B) c2(NP_775739) c3(MOB kinase activator 1B isoform 2) c4(250133) c5(250134, 250135, 250136, 250137, 250138, 250139) c6( ) c7(T); #c1(MOB2) c2(NP_001165694) c3(MOB kinase activator 2 isoform 1) c4(67878) c5(67879, 67880, 67881, 67882, 67883, 67884) c6( ) c7(iR, aq, B); #c1(MOB3B) c2(NP_079037) c3(MOB kinase activator 38) c4(216709) c5(216710, 216711, 216712, 216713, 216714, 216715, 216716) c6( ) c7(y, T, c); #c1(MOB4) c2(NP_001094289) c3(MOB-like protein phocein isoform 3) c4(40673) c5(40674, 40675, 40676, 40677, 40678, 40679) c6( ) c7(av, T, eM, r, v, bz); #c1(MOB4) c2(NP_001191023) c3(MOB-like protein phocein isoform 2) c4( ) c5(80556, 80557, 80558, 80559, 80560, 80561, 80562, 80563, 80564, 80565, 80566, 80567, 80568, 80569) c6( ) c7(av, T, eM, r, v, bz); #c1(MOB4) c2(NP_056202) c3(MOB-like protein phocein isoform 1) c4(186302) c5(186303, 186304, 186305, 186306, 186307, 186308, 186309, 186310) c6( ) c7(av, T, eM, r, v, bz); #c1(MOBP) c2(NP_001265251) c3(myelin-associated oligodendrocyte basic protein isoform a) c4( ) c5(98064) c6( ) c7(act); #c1(MOBP) c2(NP_001265252) c3(myelin-associated oligodendrocyte basic protein isoform b) c4(98065, 98066) c5(98067, 98068) c6( ) c7(act); #c1(MOBP) c2(NP_891980) c3(myelin-associated oligodendrocyte basic protein isoform c) c4(257346) c5(257347, 257348, 257349, 257350, 257351, 257352, 257353, 257354, 257355, 257356, 257357, 257358, 257359, 257360, 257361, 257362, 257363, 257364, 257365, 257366, 257367, 257368, 257369, 257370, 257371, 257372, 257373, 257374, 257375, 257376, 257377, 257378, 257379, 257380, 257381, 257382, 257383, 257384, 257385, 257386, 257387, 257388, 257389, 257390, 257391) c6( ) c7(act); #c1(MOCOS) c2(NP_060417) c3(molybdenum cofactor sulfurase) c4(195851) c5(195852, 195853, 195854, 195855, 195856, 195857) c6( ) c7(x, cc, fM, nB, nv, aW, bE, hl, Xn, aT, aA, h, fe, aF, m, k, t, Bu, afb, mu); #c1(MOCS1) c2(NP_001068566) c3(molybdenum cofactor biosynthesis protein 1 isoform 4) c4(34574) c5(34575, 34576, 34577, 34578, 34579) c6( ) c7(cfx); #c1(MOCS1) c2(NP_005934) c3(molybdenum cofactor biosynthesis protein 1 isoform 1) c4(160517, 160518) c5(160519, 160520, 160521, 160522, 160523, 160524, 160525, 160526, 160527, 160528, 160529, 160530, 160531, 160532) c6( ) c7(cfx); #c1(MOCS1) c2(XP_011512934) c3(molybdenum cofactor biosynthesis protein 1 isoform X1) c4(304340, 304341) c5(304342, 304343, 304344, 304345, 304346, 304347, 304348, 304349, 304350, 304351, 304352, 304353, 304354, 304355, 304356) c6( ) c7(cfx); #c1(MOCS1) c2(XP_011512935) c3(molybdenum cofactor biosynthesis protein 1 isoform X2) c4(304357, 304358) c5(304359, 304360, 304361, 304362, 304363, 304364, 304365, 304366, 304367, 304368, 304369, 304370) c6( ) c7(cfx); #c1(MOCS1) c2(XP_011512936) c3(molybdenum cofactor biosynthesis protein 1 isoform X3) c4(304371) c5( ) c6( ) c7(cfx); #c1(MOCS1) c2(XP_011512937) c3(molybdenum cofactor biosynthesis protein 1 isoform X4) c4( ) c5(304372, 304373, 304374, 304375, 304376, 304377) c6( ) c7(cfx); #c1(MOCS2) c2(NP_004522) c3(molybdopterin synthase catalytic subunit large subunit MOCS2B) c4(147217, 147218) c5(147219, 147220, 147221, 147222, 147223, 147224, 147225, 147226, 147227, 147228, 147229, 147230, 147231, 147232, 147233) c6( ) c7(cfy, iu); #c1(MOCS2) c2(NP_789776) c3(molybdopterin synthase sulfur carrier subunit small subunit MOCS2A) c4(252250) c5(252251, 252252, 252253, 252254, 252255, 252256, 252257, 252258, 252259, 252260, 252261, 252262, 252263, 252264, 252265) c6( ) c7(cfy, iu); #c1(MOG) c2(NP_001008229) c3(myelin-oligodendrocyte glycoprotein isoform alpha3 precursor) c4(22937, 22938, 22939) c5(22940, 22941, 22942, 22943, 22944, 22945, 22946, 22947, 22948, 22949, 22950, 22951, 22952, 22953, 22954, 22955, 22956, 22957, 22958, 22959, 22960, 22961, 22962, 22963, 22964, 22965, 22966, 22967, 22968, 22969, 22970, 22971, 22972, 22973, 22974, 22975, 22976, 22977, 22978, 22979, 22980, 22981, 22982, 22983, 22984, 22985, 22986, 22987, 22988, 22989, 22990, 22991, 22992, 22993, 22994, 22995, 22996, 22997, 22998, 22999, 23000, 23001, 23002, 23003, 23004, 23005, 23006, 23007, 23008, 23009, 23010, 23011, 23012, 23013) c6( ) c7(bJq, aiR, adK, mF, V, ai, hX, ke, cF, oz, akJ, rE, hH, dF, alY, nP, A, eZ, cfz, bN, U, eo, y, abW, qc); #c1(MOG) c2(NP_001008230) c3(myelin-oligodendrocyte glycoprotein isoform beta2 precursor) c4(23014, 23015, 23016, 23017, 23018) c5(23019, 23020, 23021, 23022, 23023, 23024, 23025, 23026, 23027, 23028, 23029, 23030, 23031, 23032, 23033, 23034, 23035, 23036, 23037, 23038, 23039, 23040, 23041, 23042, 23043, 23044, 23045, 23046, 23047, 23048, 23049, 23050, 23051, 23052, 23053, 23054, 23055, 23056, 23057, 23058, 23059, 23060, 23061, 23062, 23063, 23064, 23065, 23066, 23067, 23068, 23069, 23070, 23071, 23072, 23073, 23074, 23075, 23076, 23077, 23078, 23079, 23080, 23081, 23082, 23083, 23084, 23085, 23086, 23087, 23088, 23089, 23090, 23091, 23092, 23093, 23094, 23095, 23096, 23097, 23098, 23099, 23100, 23101, 23102, 23103, 23104, 23105, 23106, 23107, 23108, 23109, 23110, 23111, 23112, 23113, 23114, 23115, 23116, 23117, 23118, 23119, 23120, 23121, 23122, 23123) c6( ) c7(bJq, aiR, adK, mF, V, ai, hX, ke, cF, nz, akJ, rE, hH, dF, alY, nP, A, eZ, cfz, bN, U, eo, y, abW, qc); #c1(MOG) c2(NP_001163889) c3(myelin-oligodendrocyte glycoprotein isoform alpha6 precursor) c4(66482) c5(66483, 66484, 66485, 66486, 66487, 66488) c6( ) c7(bJq, aiR, adK, mF, V, ai, hX, ke, cF, oz, akJ, rE, hH, dF, alY, nP, A, eZ, cfz, bN, U, eo, y, abW, qc); #c1(MOG) c2(NP_002424) c3(myelin-oligodendrocyte glycoprotein isoform beta1 precursor) c4(128351, 128352, 128353) c5( ) c6( ) c7(bJq, aiR, adK, mF, V, ai, hX, ke, cF, oz, akJ, rE, hH, dF, alY, nP, A, eZ, cfz, bN, U, eo, y, abW, qc); #c1(MOG) c2(NP_996532) c3(myelin-oligodendrocyte glycoprotein isoform alpha1 precursor) c4(264059, 264060, 264061, 264062, 264063) c5(264064, 264065, 264066, 264067, 264068, 264069, 264070, 264071, 264072, 264073, 264074, 264075, 264076, 264077, 264078, 264079, 264080, 264081, 264082, 264083, 264084, 264085, 264086, 264087, 264088, 264089, 264090, 264091, 264092, 264093, 264094, 264095, 264096, 264097, 264098, 264099, 264100, 264101, 264102, 264103, 264104, 264105, 264106, 264107, 264108, 264109, 264110, 264111, 264112, 264113, 264114, 264115, 264116, 264117, 264118, 264119, 264120, 264121, 264122, 264123, 264124, 264125, 264126, 264127, 264128, 264129, 264130, 264131, 264132, 264133, 264134, 264135, 264136, 264137, 264138, 264139, 264140, 264141, 264142, 264143, 264144, 264145, 264146, 264147, 264148, 264149, 264150, 264151, 264152, 264153, 264154, 264155, 264156, 264157, 264158, 264159, 264160, 264161, 264162, 264163, 264164, 264165, 264166, 264167, 264168, 264169, 264170, 264171) c6( ) c7(bJq, aiR, adK, mF, V, ai, hX, ke, cF, oz, akJ, rE, hH, dF, alY, nP, A, eZ, cfz, bN, U, eo, y, abW, qc); #c1(MOG) c2(NP_996533) c3(myelin-oligodendrocyte glycoprotein isoform beta5 precursor) c4(264172, 264173, 264174) c5( ) c6( ) c7(bJq, aiR, adK, mF, V, ai, hX, ke, cF, oz, akJ, rE, hH, dF, alY, nP, A, eZ, cfz, bN, U, eo, y, abW, qc); #c1(MOG) c2(NP_996534) c3(myelin-oligodendrocyte glycoprotein isoform beta3 precursor) c4(264175, 264176, 264177) c5( ) c6( ) c7(bJq, aiR, adK, mF, V, ai, hX, ke, cF, oz, akJ, rE, hH, dF, alY, nP, A, eZ, cfz, bN, U, eo, y, abW, qc); #c1(MOG) c2(NP_996535) c3(myelin-oligodendrocyte glycoprotein isoform alpha2 precursor) c4(264178, 264179, 264180, 264181) c5(264182, 264183, 264184, 264185, 264186, 264187, 264188, 264189, 264190, 264191, 264192, 264193, 264194, 264195, 264196, 264197, 264198, 264199, 264200, 264201, 264202, 264203, 264204, 264205, 264206, 264207, 264208, 264209, 264210, 264211, 264212, 264213, 264214, 264215, 264216, 264217, 264218, 264219, 264220, 264221, 264222, 264223, 264224, 264225, 264226, 264227, 264228, 264229, 264230, 264231, 264232, 264233, 264234, 264235, 264236, 264237, 264238, 264239, 264240, 264241, 264242, 264243) c6( ) c7(bJq, aiR, adK, mF, V, ai, hX, ke, cF, oz, akJ, rE, hH, dF, alY, nP, A, eZ, cfz, bN, U, eo, y, abW, qc); #c1(MOG) c2(NP_996537) c3(myelin-oligodendrocyte glycoprotein isoform alpha5 precursor) c4(264244, 264245, 264246) c5(264247, 264248, 264249, 264250, 264251, 264252, 264253, 264254, 264255, 264256, 264257, 264258, 264259, 264260, 264261, 264262, 264263, 264264, 264265, 264266, 264267, 264268, 264269, 264270, 264271, 264272, 264273, 264274, 264275, 264276, 264277, 264278, 264279, 264280, 264281, 264282, 264283) c6( ) c7(bJq, aiR, adK, mF, V, ai, hX, ke, cF, oz, akJ, rE, hH, dF, alY, nP, A, eZ, cfz, bN, U, eo, y, abW, qc); #c1(MOG) c2(XP_005249188) c3(myelin-oligodendrocyte glycoprotein isoform X1) c4( ) c5(269056, 269057, 269058, 269059, 269060, 269061) c6( ) c7(bJq, aiR, adK, mF, V, ai, hX, ke, cF, oz, akJ, rE, hH, dF, alY, nP, A, eZ, cfz, bN, U, eo, y, abW, qc); #c1(MOG) c2(XP_005249196) c3(myelin-oligodendrocyte glycoprotein isoform X2) c4(269062) c5(269063, 269064, 269065, 269066, 269067, 269068, 269069, 269070, 269071, 269072, 269073, 269074, 269075, 269076, 269077, 269078, 269079, 269080, 269081, 269082, 269083, 269084, 269085, 269086, 269087, 269088, 269089, 269090, 269091, 269092) c6( ) c7(bJq, aiR, adK, mF, V, ai, hX, ke, cF, oz, akJ, rE, hH, dF, alY, nP, A, eZ, cfz, bN, U, eo, y, abW, qc); #c1(MOG) c2(XP_005272877) c3(myelin-oligodendrocyte glycoprotein isoform X1) c4(284207) c5(284208, 284209, 284210, 284211, 284212, 284213, 284214, 284215, 284216, 284217, 284218, 284219, 284220, 284221, 284222, 284223, 284224, 284225, 284226, 284227, 284228, 284229, 284230, 284231, 284232) c6( ) c7(bJq, aiR, adK, mF, V, ai, hX, ke, cF, oz, akJ, rE, hH, dF, alY, nP, A, eZ, cfz, bN, U, eo, y, abW, qc); #c1(MOG) c2(XP_005275309) c3(myelin-oligodendrocyte glycoprotein isoform X1) c4(285609) c5( ) c6( ) c7(bJq, aiR, adK, mF, V, ai, hX, ke, cF, oz, akJ, rE, hH, dF, alY, nP, A, eZ, cfz, bN, U, eo, y, abW, qc); #c1(MOGAT1) c2(NP_477513) c3(2-acylglycerol O-acyltransferase 1) c4(230793) c5(230794, 230795, 230796, 230797, 230798, 230799) c6( ) c7(T, A, aj, v, V, ae, J, ad); #c1(MOGAT2) c2(NP_079374) c3(2-acylglycerol O-acyltransferase 2) c4(217827, 217828, 217829) c5(217830, 217831, 217832, 217833, 217834, 217835, 217836, 217837, 217838, 217839, 217840, 217841, 217842, 217843, 217844, 217845, 217846, 217847) c6( ) c7(dv, fc, dq, v, mf, cP); #c1(MOGAT3) c2(NP_001274076) c3(2-acylglycerol O-acyltransferase 3 isoform b) c4(106015) c5(106016, 106017, 106018, 106019, 106020, 106021) c6( ) c7(aW, v, aq, aT); #c1(MOGAT3) c2(NP_835470) c3(2-acylglycerol O-acyltransferase 3 isoform a) c4(253547) c5(253548, 253549, 253550, 253551, 253552, 253553) c6( ) c7(aW, v, aq, aT); #c1(MOGAT3) c2(XP_005250366) c3(2-acylglycerol O-acyltransferase 3 isoform X1) c4(270268) c5(270269, 270270, 270271, 270272, 270273, 270274) c6( ) c7(aW, v, aq, aT); #c1(MOGS) c2(NP_001139630) c3(mannosyl-oligosaccharide glucosidase isoform 2) c4( ) c5(59578) c6( ) c7(Nq, ck, adj, Nr, x, BV, dV, pg, cfA, wR, Xm, Km, k, ZW, cm, bt, bz, bEa, ao); #c1(MOGS) c2(NP_006293) c3(mannosyl-oligosaccharide glucosidase isoform 1) c4(163739, 163740, 163741) c5(163742, 163743, 163744, 163745, 163746, 163747, 163748, 163749, 163750, 163751, 163752, 163753, 163754, 163755, 163756, 163757, 163758) c6( ) c7(Nq, ck, adj, Nr, x, BV, dV, pg, cfA, wR, Xm, Km, k, ZW, cm, bt, bz, bEa, ao); #c1(MOK) c2(NP_055041) c3(MAPK/MAK/MRK overlapping kinase isoform 1) c4(178500) c5(178501, 178502, 178503, 178504, 178505, 178506) c6( ) c7(bL, T, dD, eR, ea, e, aw, eX, fd, aA, cR, KO, cz, dG, j, aj, v, eq, fr, wy, V, J, ad, fU, av, ns, M, aT, cy, eV, wo, K, wt, H, ae, af, sj, aa, uX, A, lR, s, bf, cW, aW, iU, cr, iy, aF, g, bu, bz, bN, kT, rR, eM, eD, X, vy, at, uz, aS, dy, m, Lz, fD, y, KY, B); #c1(MOK) c2(XP_006720289) c3(MAPK/MAK/MRK overlapping kinase isoform X3) c4( ) c5(293344) c6( ) c7(bL, T, dD, eR, ea, e, aw, eX, fd, aA, cR, KO, cz, dG, j, aj, v, eq, fr, wy, V, J, ad, fU, av, ns, M, aT, cy, eV, wo, K, wt, H, ae, af, sj, aa, uX, A, lR, s, bf, cW, aW, iU, cr, iy, aF, g, bu, bz, bN, kT, rR, eM, eD, X, vy, at, uz, aS, dy, m, Lz, fD, y, KY, B); #c1(MOK) c2(XP_011535355) c3(MAPK/MAK/MRK overlapping kinase isoform X4) c4(332403) c5(332404, 332405, 332406, 332407, 332408) c6( ) c7(bL, T, dD, eR, ea, e, aw, eX, fd, aA, cR, KO, cz, dG, j, aj, v, eq, fr, wy, V, J, ad, fU, av, ns, M, aT, cy, eV, wo, K, wt, H, ae, af, sj, aa, uX, A, lR, s, bf, cW, aW, iU, cr, iy, aF, g, bu, bz, bN, kT, rR, eM, eD, X, vy, at, uz, aS, dy, m, Lz, fD, y, KY, B); #c1(MON1A) c2(NP_001135973) c3(vacuolar fusion protein MON1 homolog A isoform b) c4(53872) c5(53873, 53874, 53875, 53876, 53877, 53878) c6( ) c7(aUW); #c1(MON1A) c2(NP_115731) c3(vacuolar fusion protein MON1 homolog A isoform a) c4(223731) c5(223732, 223733, 223734, 223735, 223736, 223737) c6( ) c7(aUW); #c1(MON1B) c2(NP_001273568) c3(vacuolar fusion protein MON1 homolog B isoform 2) c4(105309) c5(105310, 105311, 105312, 105313, 105314, 105315) c6( ) c7(eW, ac); #c1(MON1B) c2(NP_001273569) c3(vacuolar fusion protein MON1 homolog B isoform 3) c4(105316) c5(105317, 105318, 105319, 105320, 105321, 105322) c6( ) c7(eW, ac); #c1(MON1B) c2(NP_055755) c3(vacuolar fusion protein MON1 homolog B isoform 1) c4(183308, 183309) c5(183310, 183311, 183312, 183313, 183314, 183315, 183316, 183317, 183318, 183319, 183320, 183321) c6( ) c7(eW, ac); #c1(MON2) c2(NP_001265398) c3(protein MON2 homolog isoform 2) c4(98512, 98513, 98514) c5(98515, 98516, 98517, 98518, 98519, 98520, 98521, 98522, 98523, 98524, 98525, 98526) c6( ) c7(adz, aDs); #c1(MON2) c2(NP_001265399) c3(protein MON2 homolog isoform 3) c4( ) c5(98527, 98528, 98529, 98530, 98531, 98532) c6( ) c7(adz, aDs); #c1(MON2) c2(NP_055841) c3(protein MON2 homolog isoform 1) c4(183833, 183834) c5(183835, 183836, 183837, 183838, 183839, 183840, 183841, 183842, 183843, 183844, 183845, 183846, 183847) c6( ) c7(adz, aDs); #c1(MORC3) c2(NP_056173) c3(MORC family CW-type zinc finger protein 3) c4(186123) c5(186124, 186125, 186126, 186127, 186128, 186129) c6( ) c7(cm, Bv); #c1(MORF4L1) c2(NP_001252534) c3(mortality factor 4-like protein 1 isoform 3) c4( ) c5(94203, 94204, 94205, 94206, 94207, 94208, 94209, 94210, 94211) c6( ) c7(aW, T, qK, K, aT); #c1(MORF4L1) c2(NP_006782) c3(mortality factor 4-like protein 1 isoform 1) c4(168021, 168022) c5(168023, 168024, 168025, 168026, 168027, 168028, 168029, 168030, 168031, 168032, 168033, 168034, 168035, 168036, 168037) c6( ) c7(aW, T, qK, K, aT); #c1(MORF4L1) c2(NP_996670) c3(mortality factor 4-like protein 1 isoform 2) c4(264359, 264360) c5(264361, 264362, 264363, 264364, 264365, 264366) c6( ) c7(aW, T, qK, K, aT); #c1(MORN1) c2(NP_001287989) c3(MORN repeat-containing protein 1 isoform 2) c4(113304) c5(113305, 113306, 113307, 113308, 113309, 113310) c6( ) c7(kl); #c1(MORN1) c2(XP_011540474) c3(MORN repeat-containing protein 1 isoform X5) c4( ) c5(338940, 338941, 338942, 338943, 338944, 338945) c6( ) c7(kl); #c1(MORN1) c2(XP_011540479) c3(MORN repeat-containing protein 1 isoform X10) c4( ) c5(338946, 338947, 338948, 338949, 338950, 338951, 338952, 338953, 338954, 338955, 338956, 338957) c6( ) c7(kl); #c1(MORN2) c2(NP_001138922) c3(MORN repeat-containing protein 2) c4(58207) c5(58208, 58209, 58210, 58211, 58212, 58213, 58214, 58215, 58216, 58217, 58218, 58219, 58220, 58221) c6( ) c7(c); #c1(MORN5) c2(NP_940871) c3(MORN repeat-containing protein 5 isoform a) c4(260016) c5(260017, 260018, 260019, 260020, 260021, 260022) c6( ) c7(Na, Nc); #c1(MORN5) c2(XP_005251934) c3(MORN repeat-containing protein 5 isoform X2) c4(271307, 271308) c5(271309, 271310, 271311, 271312, 271313, 271314) c6( ) c7(Na, Nc); #c1(MORN5) c2(XP_005251935) c3(MORN repeat-containing protein 5 isoform X4) c4( ) c5(271315) c6( ) c7(Na, Nc); #c1(MORN5) c2(XP_011516760) c3(MORN repeat-containing protein 5 isoform X5) c4( ) c5(310219, 310220, 310221, 310222, 310223) c6( ) c7(Na, Nc); #c1(MOS) c2(NP_005363) c3(proto-oncogene serine/threonine-protein kinase mos) c4(155447) c5(155448, 155449, 155450, 155451, 155452, 155453) c6( ) c7(T, fM, wu, jh, bs, aA, fr, ci, qN, hF, hr, afb, x, nv, aT, h, wm, iU, aW, hl, aF, cm, bw, bz, ck, eM, nB, iA, iT, eD, m, k, auK, bt); #c1(MOV10L1) c2(NP_001157576) c3(putative helicase Mov10l1 isoform 2) c4(62267) c5(62268, 62269, 62270, 62271, 62272, 62273) c6( ) c7(Kg); #c1(MOV10L1) c2(NP_001157577) c3(putative helicase Mov10l1 isoform 3) c4(62274, 62275, 62276) c5(62277, 62278, 62279, 62280, 62281, 62282, 62283, 62284, 62285, 62286, 62287, 62288) c6( ) c7(Kg); #c1(MOV10L1) c2(NP_001157578) c3(putative helicase Mov10l1 isoform 4) c4( ) c5(62289, 62290, 62291, 62292, 62293, 62294, 62295, 62296, 62297, 62298, 62299, 62300, 62301, 62302, 62303) c6( ) c7(Kg); #c1(MOV10L1) c2(NP_061868) c3(putative helicase Mov10l1 isoform 1) c4(200854, 200855) c5(200856, 200857, 200858, 200859, 200860, 200861, 200862, 200863, 200864, 200865, 200866) c6( ) c7(Kg); #c1(MPC1) c2(NP_001257808) c3(mitochondrial pyruvate carrier 1 isoform 2) c4( ) c5(95646, 95647, 95648, 95649, 95650) c6( ) c7(cfB, lB); #c1(MPC1) c2(NP_057182) c3(mitochondrial pyruvate carrier 1 isoform 1) c4(189333, 189334, 189335) c5(189336, 189337, 189338, 189339, 189340, 189341, 189342, 189343, 189344, 189345, 189346, 189347, 189348) c6( ) c7(cfB, lB); #c1(MPC2) c2(NP_001137146) c3(mitochondrial pyruvate carrier 2) c4(54973, 54974) c5(54975, 54976, 54977, 54978, 54979, 54980, 54981, 54982, 54983, 54984, 54985, 54986, 54987, 54988, 54989, 54990) c6( ) c7(bA, cz); #c1(MPDU1) c2(NP_004861) c3(mannose-P-dolichol utilization defect 1 protein) c4(150385, 150386, 150387) c5(150388, 150389, 150390, 150391, 150392, 150393, 150394, 150395, 150396, 150397, 150398) c6( ) c7(SQ, cfC, dv, at, dL, ey, Km); #c1(MPDU1) c2(XP_006721660) c3(mannose-P-dolichol utilization defect 1 protein isoform X1) c4(294195, 294196) c5(294197, 294198, 294199, 294200, 294201, 294202, 294203, 294204, 294205, 294206, 294207, 294208, 294209) c6( ) c7(SQ, cfC, dv, at, dL, ey, Km); #c1(MPDU1) c2(XP_006721662) c3(mannose-P-dolichol utilization defect 1 protein isoform X3) c4( ) c5(294210, 294211, 294212, 294213, 294214, 294215) c6( ) c7(SQ, cfC, dv, at, dL, ey, Km); #c1(MPDZ) c2(NP_001248335) c3(multiple PDZ domain protein isoform 2) c4(93700) c5(93701, 93702, 93703, 93704, 93705, 93706, 93707) c6( ) c7(wQ, aap, IR, bZY, cfD, FX, Hr); #c1(MPDZ) c2(NP_001248336) c3(multiple PDZ domain protein isoform 3) c4(93708) c5(93709, 93710, 93711, 93712, 93713, 93714) c6( ) c7(wQ, aap, IR, bZY, cfD, FX, Hr); #c1(MPDZ) c2(NP_003820) c3(multiple PDZ domain protein isoform 1) c4(141148) c5(141149, 141150, 141151, 141152, 141153, 141154, 141155, 141156, 141157, 141158) c6( ) c7(wQ, aap, IR, bZY, cfD, FX, Hr); #c1(MPDZ) c2(XP_005251680) c3(multiple PDZ domain protein isoform X6) c4(271029, 271030) c5(271031, 271032, 271033, 271034, 271035, 271036, 271037, 271038, 271039, 271040, 271041, 271042) c6( ) c7(wQ, aap, IR, bZY, cfD, FX, Hr); #c1(MPDZ) c2(XP_006716950) c3(multiple PDZ domain protein isoform X4) c4(290598) c5(290599, 290600, 290601, 290602, 290603, 290604, 290605, 290606, 290607, 290608) c6( ) c7(wQ, aap, IR, bZY, cfD, FX, Hr); #c1(MPEG1) c2(NP_001034485) c3(macrophage-expressed gene 1 protein precursor) c4(31753, 31754) c5(31755, 31756, 31757, 31758, 31759, 31760, 31761, 31762, 31763, 31764, 31765, 31766) c6( ) c7(oO, T, lE, d, af, jp, kg, aaH, hb, Y, aT, aA, dq, bNj, Lq, ati, kp, aF, iK, wS, aLl); #c1(MPG) c2(NP_001015052) c3(DNA-3-methyladenine glycosylase isoform b) c4(26164) c5(26165, 26166, 26167, 26168, 26169, 26170) c6( ) c7(bM, T, os, dD, am, ea, jh, aA, bB, fd, oZ, rf, eq, ci, V, q, ad, er, eA, Kx, iu, hd, aE, aT, h, dL, K, ox, ae, N, jf, d, bf, s, iU, aW, aml, Y, Lf, ff, r, aq, Pp, aF, en, bu, iV, t, bz, iP, ck, es, Ta, ZL, byx, eM, iA, bE, iT, aRk, cj, U, dX, m, Kj, ER, pw, be, bt, B, y, Tc); #c1(MPG) c2(NP_001015054) c3(DNA-3-methyladenine glycosylase isoform c) c4( ) c5(26171, 26172, 26173, 26174, 26175, 26176, 26177, 26178, 26179, 26180, 26181, 26182, 26183) c6( ) c7(bM, T, os, dD, am, ea, jh, aA, bB, fd, oZ, rf, eq, ci, V, q, ad, er, eA, Kx, iu, hd, aE, aT, h, dL, K, ox, ae, N, jf, d, bf, s, iU, aW, aml, Y, Lf, ff, r, aq, Pp, aF, en, bu, iV, t, bz, iP, ck, es, Ta, ZL, byx, eM, iA, bE, iT, aRk, cj, U, dX, m, Kj, ER, pw, be, bt, B, y, Tc); #c1(MPG) c2(NP_002425) c3(DNA-3-methyladenine glycosylase isoform a) c4(128354, 128355, 128356) c5(128357, 128358, 128359, 128360, 128361, 128362, 128363, 128364) c6( ) c7(bM, T, os, dD, am, ea, jh, aA, bB, fd, oZ, rf, eq, ci, V, q, ad, er, eA, Kx, iu, hd, aE, aT, h, dL, K, ox, ae, N, jf, d, bf, s, iU, aW, aml, Y, Lf, ff, r, aq, Pp, aF, en, bu, iV, t, bz, iP, ck, es, Ta, ZL, byx, eM, iA, bE, iT, aRk, cj, U, dX, m, Kj, ER, pw, be, bt, B, y, Tc); #c1(MPHOSPH10) c2(NP_005782) c3(U3 small nucleolar ribonucleoprotein protein MPP10) c4(159300) c5(159301, 159302, 159303, 159304, 159305, 159306) c6( ) c7(aW, aT); #c1(MPHOSPH6) c2(NP_005783) c3(M-phase phosphoprotein 6) c4(159307) c5(159308, 159309, 159310, 159311, 159312, 159313) c6( ) c7(T, sS, Hx, FO, FP, cz, K, an, cm, fq, af); #c1(MPHOSPH8) c2(NP_059990) c3(M-phase phosphoprotein 8) c4(193525) c5(193526, 193527, 193528, 193529, 193530, 193531, 193532, 193533, 193534, 193535, 193536, 193537) c6( ) c7(ci); #c1(MPHOSPH8) c2(XP_005266493) c3(M-phase phosphoprotein 8 isoform X2) c4(280192) c5( ) c6( ) c7(ci); #c1(MPHOSPH8) c2(XP_011533426) c3(M-phase phosphoprotein 8 isoform X1) c4(329538, 329539) c5(329540, 329541, 329542, 329543, 329544, 329545, 329546, 329547, 329548, 329549, 329550, 329551) c6( ) c7(ci); #c1(MPHOSPH9) c2(NP_073619) c3(M-phase phosphoprotein 9) c4(213166) c5(213167, 213168, 213169, 213170, 213171, 213172) c6( ) c7(cm, V); #c1(MPHOSPH9) c2(XP_011536041) c3(M-phase phosphoprotein 9 isoform X2) c4(333345) c5(333346, 333347, 333348, 333349, 333350, 333351) c6( ) c7(cm, V); #c1(MP1) c2(NP_001276084) c3(mannose-6-phosphate isomerase isoform 2) c4(107904) c5(107905, 107906, 107907, 107908, 107909, 107910) c6( ) c7(bL, cfF, cfE, aiV, bo, aoE, dv, hl, brC, dX, xH, Km, abQ, t, cfG, ccM); #c1(MP1) c2(NP_001276085) c3(mannose-6-phosphate isomerase isoform 3) c4( ) c5(107911, 107912, 107913, 107914, 107915) c6( ) c7(bL, cfF, cfE, aiV, bo, aoE, dv, hl, brC, dX, xH, Km, abQ, t, cfG, ccM); #c1(MP1) c2(NP_001276086) c3(mannose-6-phosphate isomerase isoform 4) c4(107916) c5(107917, 107918, 107919, 107920, 107921, 107922) c6( ) c7(bL, cfF, cfE, aiV, bo, aoE, dv, hl, brC, dX, xH, Km, abQ, t, cfG, ccM); #c1(MP1) c2(NP_002426) c3(mannose-6-phosphate isomerase isoform 1) c4(128365) c5(128366, 128367, 128368, 128369, 128370, 128371) c6( ) c7(bL, cfF, cfE, aiV, bo, aoE, dv, hl, brC, dX, xH, Km, abQ, t, cfG, ccM); #c1(MP1) c2(XP_011519895) c3(mannose-6-phosphate isomerase isoform X2) c4(314680) c5(314681) c6( ) c7(bL, cfF, cfE, aiV, bo, aoE, dv, hl, brC, dX, xH, Km, abQ, t, cfG, ccM); #c1(MPLKIP) c2(NP_619646) c3(M-phase-specific PLK1-interacting protein) c4(237000) c5(237001, 237002, 237003, 237004, 237005, 237006) c6( ) c7(aBq, nl, nh, bnA); #c1(MP0) c2(NP_000241) c3(myeloperoxidase precursor) c4(5395, 5396) c5(5397, 5398, 5399, 5400, 5401, 5402, 5403, 5404, 5405, 5406, 5407, 5408) c6( ) c7(oO, bM, T, aC, fR, ea, e, al, bO, fd, bB, aoj, qj, ci, aY, fw, sD, ye, Tz, x, gJ, dY, aE, pp, K, hu, hH, eL, Zm, aa, aW, az, hl, mQ, nY, kt, aB, g, Fu, aBa, ve, bw, cfl, ba, ou, fT, eM, iT, U, cj, k, m, iu, dD, aKm, lo, ht, NT, aw, n, aj, oY, BF, uE, qN, cd, hr, b, ft, hw, ec, lG, Gw, hn, dL, wb, OV, anP, fe, aq, op, ar, iO, dB, Qu, at, E, fL, qF, lB, Pr, B, L, bL, bmT, fM, eR, yk, jx, rf, aA, cR, cz, hy, v, j, GC, C, azF, uW, V, q, aZZ, eJ, cF, qp, dn, aT, bOk, yu, cy, jj, bq, lM, ae, af, eu, s, iU, oV, fO, bg, r, lo, en, t, ck, wg, ac, hA, hc, hO, dy, cS, EY, fD, cfH, bt, rA, aDj, ao, Kd, Gl, am, qb, aD, iW, df, oA, jh, Gn, eq, hF, mC, ad, kL, dP, av, F, sN, Ot, ds, iY, ji, vP, iL, uX, NP, bJV, ff, eZ, yy, hv, anQ, aF, Sm, iR, iV, bz, aYt, eK, TA, D, gk, atM, bE, uR, eB, lI, aS, Gu, oQ, i, y, kS, ne, rk); #c1(MPP1) c2(NP_001159933) c3(55 kDa erythrocyte membrane protein isoform 3) c4(64993) c5(64994, 64995, 64996, 64997, 64998, 64999) c6( ) c7(av, A, F, xE, dV, h, g, zy, y, bt, amW, uQ); #c1(MPP1) c2(NP_001159934) c3(55 kDa erythrocyte membrane protein isoform 4) c4(65000) c5(65001, 65002, 65003, 65004, 65005, 65006) c6( ) c7(av, A, F, xE, dV, h, g, zy, y, bt, amW, uQ); #c1(MPP1) c2(NP_002427) c3(55 kDa erythrocyte membrane protein isoform 1) c4(128372) c5(128373, 128374, 128375, 128376, 128377, 128378) c6( ) c7(av, A, F, xE, dV, h, g, zy, y, bt, amW, uQ); #c1(MPP2) c2(NP_001265299) c3(MAGUK P55 subfamily member 2 isoform 1) c4(98222, 98223, 98224) c5(98225, 98226, 98227, 98228, 98229) c6( ) c7(WA, es, qw, lg, aT); #c1(MPP2) c2(NP_001265301) c3(MAGUK P55 subfamily member 2 isoform 4) c4(98230, 98231) c5(98232, 98233, 98234, 98235, 98236, 98237) c6( ) c7(WA, es, qw, lg, aT); #c1(MPP2) c2(NP_001265305) c3(MAGUK P55 subfamily member 2 isoform 8) c4(98238) c5(98239) c6( ) c7(WA, es, qw, lg, aT); #c1(MPP2) c2(NP_005365) c3(MAGUK P55 subfamily member 2 isoform 3) c4(155454, 155455) c5(155456, 155457, 155458, 155459, 155460, 155461, 155462, 155463, 155464, 155465) c6( ) c7(WA, es, qw, lg, aT); #c1(MPP2) c2(XP_011523127) c3(MAGUK p55 subfamily member 2 isoform X3) c4( ) c5(317637, 317638, 317639, 317640, 317641, 317642, 317643, 317644, 317645, 317646, 317647, 317648, 317649, 317650, 317651, 317652, 317653, 317654, 317655, 317656, 317657, 317658, 317659, 317660, 317661, 317662) c6( ) c7(WA, es, qw, lg, aT); #c1(MPP3) c2(NP_001923) c3(MAGUK P55 subfamily member 3) c4(122233) c5(122234, 122235, 122236, 122237, 122238) c6( ) c7(d, qy, nf, nA, aR, bN); #c1(MPP3) c2(XP_011523130) c3(MAGUK P55 subfamily member 3 isoform X2) c4(317663, 317664) c5(317665, 317666, 317667, 317668, 317669, 317670, 317671, 317672, 317673, 317674, 317675, 317676, 317677) c6( ) c7(d, qy, nf, nA, aR, bN); #c1(MPP5) c2(NP_001243479) c3(MAGUK P55 subfamily member 5 isoform 2) c4( ) c5(90919, 90920, 90921, 90922, 90923, 90924, 90925, 90926, 90927, 90928) c6( ) c7(nw, alF); #c1(MPP5) c2(NP_071919) c3(MAGUK P55 subfamily member 5 isoform 1) c4(212298, 212299, 212300) c5(212301, 212302, 212303, 212304, 212305, 212306, 212307, 212308) c6( ) c7(nw, alF); #c1(MPP7) c2(XP_005252425) c3(MAGUK P55 subfamily member 7 isoform X2) c4(271781) c5(271782, 271783, 271784, 271785, 271786, 271787) c6( ) c7(bM, e, EQ, IB, fq, af); #c1(MPP7) c2(XP_011517640) c3(MAGUK P55 subfamily member 7 isoform X3) c4(311477) c5(311478, 311479, 311480, 311481, 311482, 311483) c6( ) c7(bM, e, EQ, IB, fq, af); #c1(MPPE1) c2(NP_001229833) c3(metallophosphoesterase 1 isoform 2) c4(85389) c5(85390, 85391, 85392, 85393, 85394, 85395) c6( ) c7(uJ, bK); #c1(MPPE1) c2(NP_075563) c3(metallophosphoesterase 1 isoform 1) c4(213959, 213960) c5(213961, 213962, 213963, 213964, 213965, 213966, 213967, 213968, 213969, 213970, 213971) c6( ) c7(uJ, bK); #c1(MPPE1) c2(XP_006722408) c3(metallophosphoesterase 1 isoform X3) c4(294697) c5(294698, 294699, 294700, 294701, 294702, 294703) c6( ) c7(uJ, bK); #c1(MPPE1) c2(XP_011524034) c3(metallophosphoesterase 1 isoform X5) c4(318554) c5(318555, 318556, 318557, 318558, 318559, 318560, 318561, 318562, 318563, 318564, 318565) c6( ) c7(uJ, bK); #c1(MPPED2) c2(NP_001138871) c3(metallophosphoesterase MPPED2 isoform 2) c4(57989, 57990) c5(57991, 57992, 57993, 57994, 57995, 57996) c6( ) c7(T, eR, ki, aw, fe, aqK, cm, cd); #c1(MPPED2) c2(XP_005253169) c3(metallophosphoesterase MPPED2 isoform X1) c4(272233) c5(272234, 272235, 272236, 272237, 272238, 272239) c6( ) c7(T, eR, ki, aw, fe, aqK, cm, cd); #c1(MPPED2) c2(XP_005253171) c3(metallophosphoesterase MPPED2 isoform X3) c4( ) c5(272240, 272241, 272242, 272243, 272244, 272245) c6( ) c7(T, eR, ki, aw, fe, aqK, cm, cd); #c1(MPRIP) c2(NP_055949) c3(myosin phosphatase Rho-interacting protein isoform 1) c4(184616) c5(184617, 184618, 184619, 184620, 184621, 184622, 184623) c6( ) c7(dD, d, aAF, ea, ceC, cj, fe, nw, eq, wb, Hp); #c1(MPRIP) c2(NP_958431) c3(myosin phosphatase Rho-interacting protein isoform 2) c4(262060) c5(262061, 262062, 262063, 262064, 262065, 262066, 262067, 262068, 262069) c6( ) c7(dD, d, aAF, ea, ceC, cj, fe, nw, eq, wb, Hp); #c1(MPRIP) c2(XP_005256620) c3(myosin phosphatase Rho-interacting protein isoform X6) c4(274232) c5(274233, 274234, 274235, 274236, 274237, 274238, 274239, 274240, 274241, 274242, 274243, 274244, 274245, 274246) c6( ) c7(dD, d, aAF, ea, ceC, cj, fe, nw, eq, wb, Hp); #c1(MPRIP) c2(XP_005256621) c3(myosin phosphatase Rho-interacting protein isoform X9) c4(274247, 274248) c5(274249, 274250, 274251, 274252, 274253, 274254, 274255, 274256, 274257, 274258, 274259, 274260) c6( ) c7(dD, d, aAF, ea, ceC, cj, fe, nw, eq, wb, Hp); #c1(MPRIP) c2(XP_011522063) c3(myosin phosphatase Rho-interacting protein isoform X1) c4(316718) c5(316719, 316720, 316721, 316722, 316723, 316724) c6( ) c7(dD, d, aAF, ea, ceC, cj, fe, nw, eq, wb, Hp); #c1(MPRIP) c2(XP_011522064) c3(myosin phosphatase Rho-interacting protein isoform X2) c4(316725) c5(316726, 316727, 316728, 316729, 316730) c6( ) c7(dD, d, aAF, ea, ceC, cj, fe, nw, eq, wb, Hp); #c1(MPRIP) c2(XP_011522065) c3(myosin phosphatase Rho-interacting protein isoform X3) c4(316731) c5( ) c6( ) c7(dD, d, aAF, ea, ceC, cj, fe, nw, eq, wb, Hp); #c1(MPRIP) c2(XP_011522066) c3(myosin phosphatase Rho-interacting protein isoform X4) c4(316732) c5(316733, 316734, 316735, 316736, 316737, 316738) c6( ) c7(dD, d, aAF, ea, ceC, cj, fe, nw, eq, wb, Hp); #c1(MPST) c2(NP_001123989) c3(3-mercaptopyruvate sulfurtransferase isoform 2) c4( ) c5(48148, 48149, 48150, 48151, 48152, 48153, 48154, 48155, 48156, 48157, 48158, 48159, 48160, 48161, 48162, 48163, 48164, 48165, 48166, 48167, 48168, 48169, 48170) c6( ) c7(bL, x, eM, cfJ, aW, aT, k, C, pd, B, hq); #c1(MPST) c2(NP_066949) c3(3-mercaptopyruvate sulfurtransferase isoform 1) c4(207644, 207645, 207646) c5(207647, 207648, 207649, 207650, 207651, 207652, 207653, 207654, 207655, 207656, 207657) c6( ) c7(bL, x, eM, cfJ, aW, aT, k, C, pd, B, hq); #c1(MPV17) c2(XP_005264383) c3(protein Mpv17 isoform X1) c4(278882, 278883, 278884, 278885) c5(278886, 278887, 278888, 278889, 278890, 278891, 278892, 278893, 278894, 278895, 278896, 278897, 278898, 278899, 278900, 278901, 278902, 278903, 278904, 278905, 278906, 278907, 278908, 278909, 278910, 278911, 278912, 278913) c6( ) c7(atx, dD, cfK, ob, eR, ea, qx, cz, aNG, ah, eq, aY, aoz, hb, btl, vw, K, wt, cb, afJ, apn, beV, hJ, cm, kC, bw, mG, dy, cfL, aSQ, awl, VK); #c1(MPV17) c2(XP_005264384) c3(protein Mpv17 isoform X3) c4( ) c5(278914, 278915, 278916, 278917, 278918, 278919, 278920, 278921, 278922, 278923, 278924, 278925) c6( ) c7(atx, dD, cfK, ob, eR, ea, qx, cz, aNG, ah, eq, aY, aoz, hb, btl, vw, K, wt, cb, afJ, apn, beV, hJ, cm, kC, bw, mG, dy, cfL, aSQ, awl, VK); #c1(MPV17) c2(XP_006712084) c3(protein Mpv17 isoform X2) c4(286385, 286386, 286387, 286388) c5(286389, 286390, 286391, 286392, 286393, 286394, 286395, 286396, 286397, 286398, 286399, 286400) c6( ) c7(atx, dD, cfK, ob, eR, ea, qx, cz, aNG, ah, eq, aY, aoz, hb, btl, vw, K, wt, cb, afJ, apn, beV, hJ, cm, kC, bw, mG, dy, cfL, aSQ, awl, VK); #c1(MPV17L2) c2(NP_116072) c3(mpv17-like protein 2 precursor) c4(225325) c5(225326, 225327, 225328, 225329, 225330, 225331) c6( ) c7(V); #c1(MPZ) c2(NP_000521) c3(myelin protein P0 precursor) c4( ) c5(11670, 11671, 11672, 11673, 11674, 11675, 11676, 11677, 11678, 11679, 11680, 11681, 11682, 11683, 11684, 11685, 11686, 11687, 11688) c6( ) c7(T, ob, aiK, Pt, cfN, xF, bkY, amp, bbn, My, yk, agU, n, fu, bX, mF, V, q, aR, Hx, oQ, no, uT, vJ, cfQ, HC, UD, cfP, ji, K, bUo, bU, bV, an, UF, AT, aCM, bT, WQ, aFT, r, aDm, cfM, iV, cbm, cm, bMj, pb, cfO, dr, sk, sS, Ew, ql, bkW, bgy, c, yW, AH, bk, R, cfR, bCG, afO); #c1(MPZL1) c2(NP_001139663) c3(myelin protein zero-like protein 1 isoform c precursor) c4(59653) c5(59654, 59655, 59656, 59657, 59658, 59659) c6( ) c7(zQ, c, yS, cz, ci, zP, B, bA); #c1(MPZL1) c2(NP_003944) c3(myelin protein zero-like protein 1 isoform a precursor) c4(142370) c5(142371, 142372, 142373, 142374, 142375, 142376) c6( ) c7(zQ, c, yS, cz, ci, zP, B, bA); #c1(MPZL1) c2(NP_078845) c3(myelin protein zero-like protein 1 isoform b precursor) c4(215675) c5(215676, 215677, 215678, 215679, 215680, 215681) c6( ) c7(zQ, c, yS, cz, ci, zP, B, bA); #c1(MPZL2) c2(NP_658911) c3(myelin protein zero-like protein 2 precursor) c4(239602) c5(239603, 239604, 239605, 239606, 239607, 239608, 239609, 239610, 239611, 239612) c6( ) c7(wg, aW, aMT, aT, j, ale, dr); #c1(MPZL3) c2(NP_001273081) c3(myelin protein zero-like protein 3 isoform b precursor) c4(104306) c5(104307, 104308, 104309, 104310, 104311, 104312) c6( ) c7(dr); #c1(MPZL3) c2(NP_938016) c3(myelin protein zero-like protein 3 isoform a precursor) c4(259519) c5(259520, 259521, 259522, 259523, 259524, 259525) c6( ) c7(dr); #c1(MR1) c2(NP_001181928) c3(major histocompatibility complex class I-related gene protein isoform 2 precursor) c4(74429) c5(74430, 74431, 74432, 74433, 74434, 74435, 74436) c6( ) c7(ahR, hd, aE, nB, K, iV, aR); #c1(MR1) c2(NP_001181929) c3(major histocompatibility complex class I-related gene protein isoform 3 precursor) c4(74437) c5(74438, 74439, 74440, 74441, 74442, 74443, 74444) c6( ) c7(ahR, hd, aE, nB, K, iV, aR); #c1(MR1) c2(NP_001181964) c3(major histocompatibility complex class I-related gene protein isoform 4 precursor) c4(74445) c5(74446, 74447, 74448, 74449, 74450, 74451, 74452) c6( ) c7(ahR, hd, aE, nB, K, iV, aR); #c1(MR1) c2(NP_001522) c3(major histocompatibility complex class I-related gene protein isoform 1 precursor) c4(118593) c5(118594, 118595, 118596, 118597, 118598, 118599, 118600) c6( ) c7(ahR, hd, aE, nB, K, iV, aR); #c1(MRAP) c2(NP_848932) c3(melanocortin-2 receptor accessory protein isoform alpha) c4(254237) c5(254238, 254239, 254240, 254241, 254242, 254243, 254244, 254245, 254246, 254247) c6( ) c7(aK, mR, ld, fe, ahr, Ph, ai, cfS); #c1(MRAP) c2(NP_996781) c3(melanocortin-2 receptor accessory protein isoform beta) c4(264516) c5(264517, 264518, 264519, 264520, 264521, 264522, 264523, 264524, 264525, 264526) c6( ) c7(aK, mR, ld, fe, ahr, Ph, ai, cfS); #c1(MRAP2) c2(XP_011533703) c3(melanocortin-2 receptor accessory protein 2 isoform X1) c4(329796) c5(329797, 329798, 329799, 329800, 329801, 329802) c6( ) c7(iv, v, j, sj); #c1(MRAS) c2(NP_001239019) c3(ras-related protein M-Ras isoform 1 precursor) c4(88168, 88169, 88170) c5(88171, 88172, 88173, 88174, 88175, 88176, 88177, 88178, 88179, 88180, 88181, 88182, 88183, 88184, 88185) c6( ) c7(dY, aw, r, j, an, q); #c1(MRAS) c2(NP_001239022) c3(ras-related protein M-Ras isoform 2 precursor) c4( ) c5(88186, 88187, 88188, 88189, 88190) c6( ) c7(dY, aw, r, j, an, q); #c1(MRAS) c2(XP_005247286) c3(ras-related protein M-Ras isoform X2) c4( ) c5(267745, 267746, 267747, 267748, 267749, 267750) c6( ) c7(dY, aw, r, j, an, q); #c1(MRC1) c2(NP_002429) c3(macrophage mannose receptor 1 precursor) c4(128379, 128380, 128381) c5(128382, 128383, 128384, 128385, 128386, 128387, 128388, 128389, 128390, 128391, 128392, 128393, 128394, 128395, 128396, 128397, 128398, 128399) c6( ) c7(lD, bM, T, os, aC, fd, ajp, bB, ci, aub, AW, afr, aE, pX, K, DY, eL, ly, aW, dg, g, as, eE, eM, m, gU, NT, n, aGU, fr, qN, ai, hw, gd, KN, kH, auS, dL, pl, ajV, OV, oS, f J, asK, fe, CQ, zZ, acD, Ld, lx, RB, acC, hk, hL, at, oh, it, B, EM, fG, yk, aA, Qn, q, eA, eJ, XX, mj, aT, ae, qw, Uf, s, NE, Y, Lf, RF, r, en, bu, cl, t, iK, bN, ck, sS, iM, ig, id, jh, KD, oZ, pl, ad, hX, dP, avp, YQ, Yi, uQ, d, Gy, BO, je, ff, cr, aF, adj, bz, dr, bF, Ew, bE, y, X); #c1(MRC2) c2(NP_006030) c3(C-type mannose receptor 2 precursor) c4(161282, 161283, 161284) c5(161285, 161286, 161287, 161288, 161289, 161290, 161291, 161292, 161293, 161294, 161295, 161296) c6( ) c7(zQ, qt, ff, aT, ci, en, zP, eA); #c1(MRE11A) c2(NP_005581) c3(double-strand break repair protein MRE11A isoform 2) c4(157629) c5(157630, 157631, 157632, 157633, 157634, 157635, 157636, 157637, 157638, 157639, 157640, 157641, 157642, 157643, 157644, 157645, 157646, 157647, 157648, 157649, 157650, 157651, 157652, 157653) c6( ) c7(T, os, aC, fR, WL, iW, jh, aA, bB, fd, oZ, Gn, bRy, ci, bX, V, q, ad, eA, iu, cc, Bj, rA, aT, dL, K, KU, eL, af, B, BO, aix, s, aW, qt, r, aF, g, cl, t, QK, bz, dr, adq, ck, ky, dB, bE, m, bC, y, bt, X); #c1(MRE11A) c2(NP_005582) c3(double-strand break repair protein MRE11A isoform 1) c4(157654, 157655, 157656, 157657) c5(157658, 157659, 157660, 157661, 157662, 157663, 157664, 157665, 157666, 157667, 157668, 157669) c6( ) c7(T, os, aC, fR, WL, iW, jh, aA, bB, fd, oZ, Gn, bRy, ci, bX, V, q, ad, eA, iu, cc, Bj, rA, aT, dL, K, KU, eL, aT, B, BO, aix, s, aW, qt, r, aF, g, cl, t, QK, bz, dr, adq, ck, ky, dB, bE, m, bC, y, bt, X); #c1(MRE11A) c2(XP_006718905) c3(double-strand break repair protein MRE11A isoform X2) c4(292051, 292052) c5(292053, 292054, 292055, 292056, 292057, 292058, 292059) c6( ) c7(T, os, aC, fR, WL, iW, jh, aA, bB, fd, oZ, Gn, bRy, ci, bX, V, q, ad, eA, iu, cc, Bj, rA, aT, dL, K, KU, eL, af, B, BO, aix, s, aW, qt, r, aF, g, cl, t, QK, bz, dr, adq, ck, ky, dB, bE, m, bC, y, bt, X); #c1(MREG) c2(NP_060470) c3(melanoregulin) c4(196087, 196088) c5(196089, 196090, 196091, 196092, 196093, 196094, 196095, 196096, 196097, 196098, 196099, 196100, 196101, 196102, 196103, 196104) c6( ) c7(at, sj); #c1(MRFAP1) c2(NP_150638) c3(MORF4 family-associated protein 1 isoform a) c4(228210) c5(228211, 228212, 228213, 228214, 228215, 228216, 228217, 228218, 228219, 228220, 228221, 228222, 228223, 228224) c6( ) c7(zb, g, hS); #c1(MRGBP) c2(NP_060740) c3(MRG/MORF4L-binding protein) c4(197562) c5(197563, 197564, 197565, 197566, 197567, 197568) c6( ) c7(T, s, r, ci, adg, q); #c1(MRGPRF) c2(NP_659452) c3(mas-related G-protein coupled receptor member F) c4(239993, 239994) c5(239995, 239996, 239997, 239998, 239999, 240000, 240001, 240002, 240003, 240004, 240005, 240006, 240007, 240008, 240009, 240010) c6( ) c7(ck, fU, Tl, ajT, eR, NL, zs, h, aq, lo, yq, nA, iR, bt); #c1(MRGPRX1) c2(NP_671732) c3(mas-related G-protein coupled receptor member X1) c4(242181) c5(242182, 242183, 242184, 242185, 242186, 242187) c6( ) c7(bL, bM, d, aE, Y, PX, ff, h, Ja, v, dX, en, he, Fg, cE); #c1(MRGPRX3) c2(NP_473372) c3(mas-related G-protein coupled receptor member X3) c4(230473, 230474) c5(230475, 230476, 230477, 230478, 230479, 230480, 230481, 230482, 230483, 230484, 230485, 230486) c6( ) c7(bL, bM, d, aE, Y, pX, ff, h, Ja, v, dX, en, he, Fg, cE); #c1(MRGPRX4) c2(NP_473373) c3(mas-related G-protein coupled receptor member X4) c4(230487) c5(230488, 230489, 230490, 230491, 230492, 230493) c6( ) c7(bL, bM, d, aE, Y, pX, ff, h, Ja, v, dX, en, he, Fg, cE); #c1(MRI1) c2(NP_001026897) c3(methylthioribose-1-phosphate isomerase isoform 1) c4(29933) c5(29934, 29935, 29936, 29937, 29938, 29939, 29940, 29941) c6(29942, 29943) c7(By); #c1(MRI1) c2(NP_115661) c3(methylthioribose-1-phosphate isomerase isoform 2) c4(223484) c5(223485, 223486, 223487, 223488, 223489, 223490) c6( ) c7(By); #c1(MRM1) c2(NP_079140) c3(rRNA methyltransferase 1, mitochondrial precursor) c4(217208) c5(217209, 217210, 217211, 217212, 217213, 217214) c6( ) c7(Na); #c1(MR0) c2(NP_001120647) c3(protein maestro isoform c) c4(44351) c5(44352, 44353, 44354, 44355, 44356, 44357) c6( ) c7(qJ, T, no, AS, Db, cj, Fx, ci, hf, AN); #c1(MR0) c2(NP_001120648) c3(protein maestro isoform d) c4(44358) c5(44359, 44360, 44361, 44362, 44363, 44364) c6( ) c7(qJ, T, no, AS, Db, cj, Fx, ci, hf, AN); #c1(MR0) c2(XP_005258424) c3(protein maestro isoform X1) c4(275658) c5(275659, 275660, 275661, 275662, 275663, 275664, 275665, 275666, 275667, 275668) c6( ) c7(qJ, T, no, AS, Db, cj, Ex, ci, hf, AN); #c1(MR0) c2(XP_011524528) c3(protein maestro isoform X2) c4(319099) c5(319100, 319101, 319102, 319103, 319104, 319105, 319106, 319107, 319108, 319109) c6( ) c7(qJ, T, no, AS, Db, cj, Fx, ci, hf, AN); #c1(MROH2B) c2(NP_775760) c3(maestro heat-like repeat-containing protein family member 28) c4(250189, 250190) c5(250191, 250192, 250193, 250194, 250195, 250196, 250197, 250198, 250199, 250200, 250201, 250202) c6( ) c7(V); #c1(MRPL1) c2(NP_064621) c3(39S ribosomal protein L1, mitochondrial precursor) c4(203332, 203333) c5(203334, 203335, 203336, 203337, 203338, 203339, 203340) c6( ) c7(fq, Ea, cz); #c1(MRPL1) c2(XP_011530502) c3(39S ribosomal protein L1, mitochondrial isoform X2) c4( ) c5(326400, 326401, 326402, 326403, 326404) c6( ) c7(fq, Ea, cz); #c1(MRPL10) c2(NP_660298) c3(39S ribosomal protein L10, mitochondrial isoform a precursor) c4(240792) c5(240793, 240794, 240795, 240796, 240797, 240798) c6( ) c7(dD, eq); #c1(MRPL10) c2(NP_683685) c3(39S ribosomal protein L10, mitochondrial isoform b) c4(242369) c5(242370, 242371, 242372, 242373, 242374, 242375, 242376, 242377, 242378, 242379) c6( ) c7(dD, eq); #c1(MRPL11) c2(NP_057134) c3(39S ribosomal protein L11, mitochondrial isoform a) c4(189074) c5(189075, 189076, 189077, 189078, 189079, 189080) c6( ) c7(af); #c1(MRPL11) c2(NP_733934) c3(39S ribosomal protein L11, mitochondrial isoform b) c4(247271) c5(247272, 247273, 247274, 247275, 247276, 247277) c6( ) c7(af); #c1(MRPL11) c2(NP_733935) c3(39S ribosomal protein L11, mitochondrial isoform c) c4(247278) c5(247279, 247280, 247281, 247282, 247283, 247284) c6( ) c7(af); #c1(MRPL13) c2(NP_054797) c3(39S ribosomal protein L13, mitochondrial) c4(177992) c5(177993, 177994, 177995, 177996, 177997, 177998) c6( ) c7(aA, ff, j, en, aT); #c1(MRPL15) c2(NP_054894) c3(39S ribosomal protein L15, mitochondrial) c4(178234) c5(178235, 178236, 178237, 178238, 178239, 178240) c6( ) c7(aj); #c1(MRPL17) c2(NP_071344) c3(39S ribosomal protein L17, mitochondrial) c4(211107) c5(211108, 211109, 211110, 211111, 211112, 211113) c6( ) c7(y); #c1(MRPL19) c2(NP_055578) c3(39S ribosomal protein L19, mitochondrial) c4(182045, 182046) c5(182047, 182048, 182049, 182050, 182051, 182052, 182053, 182054, 182055, 182056, 182057, 182058, 182059, 182060, 182061, 182062) c6( ) c7(yA, aT); #c1(MRPL23) c2(NP_066957) c3(39S ribosomal protein L23, mitochondrial) c4(207742) c5(207743, 207744, 207745, 207746, 207747, 207748, 207749, 207750, 207751, 207752) c6( ) c7(t, aF, m, aA); #c1(MRPL28) c2(XP_011520653) c3(39S ribosomal protein L28, mitochondrial isoform X1) c4(315554, 315555, 315556, 315557, 315558) c5(315559, 315560, 315561, 315562, 315563, 315564, 315565, 315566, 315567, 315568, 315569, 315570, 315571, 315572, 315573, 315574, 315575, 315576, 315577, 315578, 315579, 315580, 315581, 315582, 315583, 315584, 315585, 315586, 315587, 315588, 315589, 315590, 315591, 315592, 315593, 315594, 315595, 315596) c6( ) c7(T, aC, fM, id, ht, jx, jh, aA, fd, j, ci, hF, Fc, q, ad, eA, ip, x, av, iu, fX, ib, nv, kH, aT, h, hn, dL, jj, XZ, hu, hS, pq, ae, eL, Zm, d, je, s, aix, iU, aW, Y, ff, r, aF, en, cl, as, t, iK, bw, iP, ck, qJ, iM, bP, eM, aJm, dB, iT, cj, pg, k, bt, B, vi); #c1(MRPL3) c2(NP_009139) c3(39S ribosomal protein L3, mitochondrial) c4(171034, 171035, 171036) c5(171037, 171038, 171039, 171040, 171041, 171042, 171043, 171044, 171045, 171046, 171047, 171048, 171049, 171050, 171051, 171052, 171053, 171054) c6( ) c7(bE, cfT, vc, jh, p); #c1(MRPL33) c2(NP_004882) c3(39S ribosomal protein L33, mitochondrial isoform a) c4(150530, 150531) c5(150532, 150533, 150534, 150535, 150536, 150537) c6( ) c7(v); #c1(MRPL33) c2(NP_663303) c3(39S ribosomal protein L33, mitochondrial isoform b) c4(241157) c5(241158, 241159, 241160, 241161, 241162, 241163) c6( ) c7(v); #c1(MRPL36) c2(NP_115868) c3(39S ribosomal protein L36, mitochondrial) c4( ) c5(224397, 224398, 224399, 224400, 224401, 224402, 224403, 224404, 224405, 224406, 224407, 224408, 224409, 224410) c6( ) c7(os, aW, if, aT, oZ, K, m, ci, qN, t, aed, ae, awe, ad); #c1(MRPL36) c2(XP_011512381) c3(39S ribosomal protein L36, mitochondrial isoform X1) c4(303087) c5( ) c6( ) c7(os, aW, if, aT, oZ, K, m, ci, qN, t, aed, ae, awe, ad); #c1(MRPL36) c2(XP_011512382) c3(39S ribosomal protein L36, mitochondrial isoform X2) c4( ) c5(303088, 303089, 303090, 303091) c6( ) c7(os, aW, if, aT, al, K, m, ci, qN, t, aed, ae, awe, ad); #c1(MRPL40) c2(NP_003767) c3(39S ribosomal protein L40, mitochondrial) c4(140678) c5(140679, 140680, 140681, 140682, 140683, 140684) c6( ) c7(agd); #c1(MRPL41) c2(NP_115866) c3(39S ribosomal protein L41, mitochondrial) c4(224390) c5(224391, 224392, 224393, 224394, 224395, 224396) c6( ) c7(T, aW, aT, ci, K, iK, ae, ad); #c1(MRPL44) c2(NP_075066) c3(39S ribosomal protein L44, mitochondrial) c4(213648) c5(213649, 213650, 213651, 213652, 213653, 213654) c6( ) c7(acJ, cfU, ca); #c1(MRPL49) c2(NP_004918) c3(39S ribosomal protein L49, mitochondrial) c4(150775) c5(150776, 150777, 150778, 150779, 150780, 150781, 150782, 150783, 150784, 150785) c6( ) c7(Y); #c1(MRPL52) c2(NP_848026) c3(39S ribosomal protein L52, mitochondrial isoform a) c4(253706) c5(253707, 253708, 253709, 253710, 253711, 253712, 253713, 253714, 253715) c6( ) c7(fq); #c1(MRPL52) c2(NP_851313) c3(39S ribosomal protein L52, mitochondrial isoform c) c4(254534) c5(254535, 254536, 254537, 254538, 254539, 254540) c6( ) c7(fq); #c1(MRPL52) c2(NP_851824) c3(39S ribosomal protein L52, mitochondrial isoform e) c4(254608) c5(254609, 254610, 254611, 254612, 254613, 254614) c6( ) c7(fq); #c1(MRPL52) c2(XP_005267385) c3(39S ribosomal protein L52, mitochondrial isoform X1) c4(280929) c5(280930, 280931, 280932, 280933, 280934, 280935, 280936, 280937, 280938, 280939, 280940, 280941, 280942, 280943, 280944, 280945, 280946) c6( ) c7(fq); #c1(MRPL9) c2(NP_001287662) c3(39S ribosomal protein L9, mitochondrial isoform 2) c4(112477) c5(112478, 112479, 112480, 112481, 112482, 112483, 112484) c6( ) c7(v, aT); #c1(MRPL9) c2(NP_113608) c3(39S ribosomal protein L9, mitochondrial isoform 1) c4(221717) c5(221718, 221719, 221720, 221721, 221722, 221723) c6( ) c7(v, aT); #c1(MRPS11) c2(NP_073750) c3(28S ribosomal protein S11, mitochondrial isoform a) c4(213459) c5(213460, 213461, 213462, 213463, 213464, 213465) c6( ) c7(B, aA); #c1(MRPS11) c2(NP_789775) c3(28S ribosomal protein S11, mitochondrial isoform b) c4(252243) c5(252244, 252245, 252246, 252247, 252248, 252249) c6( ) c7(B, aA); #c1(MRPS12) c2(NP_203527) c3(28S ribosomal protein S12, mitochondrial precursor) c4(228409) c5(228410, 228411, 228412, 228413, 228414, 228415, 228416, 228417, 228418, 228419, 228420, 228421, 228422, 228423) c6( ) c7(aF, aA); #c1(MRPS16) c2(NP_057149) c3(28S ribosomal protein S16, mitochondrial) c4(189121, 189122, 189123, 189124, 189125, 189126, 189127, 189128, 189129, 189130, 189131, 189132, 189133, 189134, 189135, 189136, 189137, 189138, 189139, 189140) c5(189141, 189142, 189143, 189144, 189145, 189146, 189147, 189148, 189149, 189150, 189151, 189152, 189153, 189154, 189155, 189156, 189157, 189158) c6( ) c7(cfV); #c1(MRPS18B) c2(NP_054765) c3(28S ribosomal protein S18b, mitochondrial) c4(177653, 177654) c5(177655, 177656, 177657, 177658, 177659, 177660, 177661, 177662, 177663, 177664, 177665, 177666, 177667, 177668, 177669, 177670, 177671, 177672, 177673, 177674, 177675, 177676, 177677, 177678, 177679, 177680, 177681, 177682, 177683, 177684, 177685, 177686, 177687, 177688, 177689, 177690, 177691, 177692, 177693, 177694, 177695, 177696, 177697, 177698, 177699, 177700, 177701, 177702, 177703) c6( ) c7(eZ, aA); #c1(MRPS18B) c2(XP_005249087) c3(28S ribosomal protein S18b, mitochondrial isoform X1) c4(268956) c5(268957, 268958, 268959, 268960, 268961, 268962, 268963, 268964, 268965, 268966, 268967, 268968, 268969, 268970, 268971, 268972, 268973, 268974, 268975, 268976, 268977, 268978, 268979) c6( ) c7(eZ, aA); #c1(MRPS22) c2(NP_064576) c3(28S ribosomal protein S22, mitochondrial) c4(203048) c5(203049, 203050, 203051, 203052, 203053, 203054, 203055, 203056, 203057, 203058) c6( ) c7(cfW, kC, vc, aT); #c1(MRPS22) c2(XP_005247697) c3(28S ribosomal protein S22, mitochondrial isoform X1) c4(267932, 267933) c5(267934, 267935, 267936, 267937, 267938, 267939, 267940, 267941, 267942, 267943, 267944, 267945) c6( ) c7(cfW, kC, vc, aT); #c1(MRPS22) c2(XP_011511297) c3(28S ribosomal protein S22, mitochondrial isoform X3) c4(301816) c5(301817, 301818, 301819, 301820, 301821, 301822) c6( ) c7(cfW, kC, vc, aT); #c1(MRPS23) c2(NP_057154) c3(28S ribosomal protein S23, mitochondrial) c4(189180) c5(189181, 189182, 189183, 189184, 189185, 189186) c6( ) c7(aT); #c1(MRPS28) c2(NP_054737) c3(28S ribosomal protein S28, mitochondrial) c4(177493) c5(177494, 177495, 177496, 177497, 177498, 177499) c6( ) c7(aT); #c1(MRPS30) c2(NP_057724) c3(28S ribosomal protein S30, mitochondrial) c4(192519) c5(192520, 192521, 192522, 192523, 192524, 192525) c6( ) c7(ck, ant, d, dA, aW, iW, aT, r, la, aj, v, zG, uF, dT, wq, zl, cd, ao); #c1(MRPS31) c2(NP_005821) c3(28S ribosomal protein S31, mitochondrial) c4(159699) c5(159700, 159701, 159702, 159703, 159704, 159705) c6( ) c7(aj, J); #c1(MRPS33) c2(NP_444263) c3(28S ribosomal protein S33, mitochondrial) c4(230175, 230176) c5(230177, 230178, 230179, 230180, 230181, 230182, 230183, 230184, 230185, 230186, 230187, 230188, 230189, 230190, 230191, 230192, 230193, 230194, 230195, 230196, 230197, 230198, 230199, 230200) c6( ) c7(bL); #c1(MRPS6) c2(NP_115865) c3(28S ribosomal protein S6, mitochondrial) c4(224383) c5(224384, 224385, 224386, 224387, 224388, 224389) c6( ) c7(aw, j); #c1(MRPS7) c2(NP_057055) c3(28S ribosomal protein S7, mitochondrial) c4(188655) c5(188656, 188657, 188658, 188659, 188660, 188661) c6( ) c7(aT); #c1(MRPS9) c2(NP_872578) c3(28S ribosomal protein S9, mitochondrial) c4(256404) c5(256405, 256406, 256407, 256408, 256409, 256410) c6( ) c7(bL, aC); #c1(MRRF) c2(NP_001166983) c3(ribosome-recycling factor, mitochondrial isoform 3 precursor) c4(68750) c5(68751, 68752, 68753, 68754, 68755, 68756) c6( ) c7(acJ); #c1(MRRF) c2(XP_011517485) c3(ribosome-recycling factor, mitochondrial isoform X3) c4( ) c5(311233, 311234) c6( ) c7(acJ); #c1(MRRF) c2(XP_011517486) c3(ribosome-recycling factor, mitochondrial isoform X1) c4(311235, 311236, 311237, 311238, 311239, 311240, 311241, 311242) c5(311243, 311244, 311245, 311246, 311247, 311248, 311249, 311250, 311251, 311252, 311253, 311254, 311255, 311256, 311257, 311258) c6( ) c7(acJ); #c1(MRRF) c2(XP_011517487) c3(ribosome-recycling factor, mitochondrial isoform X4) c4( ) c5(311259, 311260, 311261, 311262, 311263, 311264, 311265) c6( ) c7(acJ); #c1(MRRF) c2(XP_011517488) c3(ribosome-recycling factor, mitochondrial isoform X2) c4(311266) c5(311267, 311268, 311269, 311270, 311271, 311272, 311273, 311274, 311275, 311276, 311277, 311278, 311279, 311280, 311281, 311282, 311283, 311284, 311285, 311286, 311287, 311288, 311289, 311290, 311291, 311292, 311293, 311294, 311295, 311296, 311297, 311298, 311299, 311300, 311301, 311302, 311303) c6( ) c7(acJ); #c1(MRS2) c2(NP_001273193) c3(magnesium transporter MRS2 homolog, mitochondrial isoform a) c4(104531, 104532, 104533, 104534) c5(104535, 104536, 104537, 104538, 104539, 104540) c6( ) c7(zw, YE, eR, pY, Do, TG, vj, aaG, aA, cz, wo, v, azg, azh, aF, pL, aY, Hl, aAO, aAL); #c1(MRS2) c2(NP_001273194) c3(magnesium transporter MRS2 homolog, mitochondrial isoform c) c4(104541) c5(104542, 104543, 104544, 104545, 104546, 104547) c6( ) c7(zw, YE, eR, pY, Do, TG, vj, aaG, aA, cz, wo, v, azg, azh, aF, pL, aY, Hl, aAO, aAL); #c1(MRS2) c2(NP_001273195) c3(magnesium transporter MRS2 homolog, mitochondrial isoform d) c4(104548) c5(104549, 104550, 104551, 104552, 104553, 104554, 104555, 104556, 104557, 104558, 104559, 104560, 104561, 104562, 104563, 104564, 104565, 104566) c6( ) c7(zw, YE, eR, pY, Do, TG, vj, aaG, aA, cz, wo, v, azg, azh, aF, pL, aY, HI, aAO, aAL); #c1(MRS2) c2(NP_065713) c3(magnesium transporter MRS2 homolog, mitochondrial isoform b precursor) c4(205041) c5(205042, 205043, 205044, 205045, 205046, 205047, 205048) c6( ) c7(zw, YE, eR, pY, Do, TG, vj, aaG, aA, cz, wo, v, azg, azh, aF, pL, aY, HI, aAO, aAL); #c1(MRS2) c2(XP_005249299) c3(magnesium transporter MRS2 homolog, mitochondrial isoform X1) c4( ) c5(269153, 269154, 269155, 269156, 269157) c6( ) c7(zw, YE, eR, pY, Do, TG, vj, aaG, aA, cz, wo, v, azg, azh, aF, pL, aY, HI, aAO, aAL); #c1(MRVI1) c2(NP_001092049) c3(protein MRVI1 isoform a) c4(39268, 39269, 39270) c5(39271, 39272, 39273, 39274, 39275, 39276, 39277, 39278, 39279, 39280, 39281, 39282, 39283, 39284, 39285, 39286, 39287, 39288, 39289, 39290, 39291, 39292, 39293, 39294, 39295) c6( ) c7(he, ad); #c1(MRVI1) c2(NP_001093633) c3(protein MRVI1 isoform b) c4(40346, 40347) c5(40348, 40349, 40350, 40351, 40352, 40353, 40354, 40355, 40356, 40357, 40358, 40359, 40360, 40361, 40362, 40363) c6( ) c7(he, ad); #c1(MRVI1) c2(NP_001193809) c3(protein MRVI1 isoform e) c4(82633) c5(82634, 82635, 82636, 82637, 82638, 82639) c6( ) c7(he, ad); #c1(MRVI1) c2(NP_569056) c3(protein MRVI1 isoform d) c4(233603, 233604, 233605) c5(233606, 233607, 233608, 233609, 233610, 233611, 233612, 233613, 233614, 233615, 233616, 233617, 233618, 233619, 233620, 233621, 233622) c6( ) c7(he, ad); #c1(MS4A1) c2(NP_068769) c3(B-lymphocyte antigen CD20) c4(210286, 210287) c5(210288, 210289, 210290, 210291, 210292, 210293, 210294, 210295, 210296, 210297, 210298, 210299, 210300, 210301, 210302, 210303, 210304, 210305, 210306, 210307) c6( ) c7(bM, T, fd, x, DY, pk, aW, axu, mQ, mK, iT, aep, cj, k, gn, fy, aov, aw, yG, zj, aj, aHj, ai, ft, bXL, h, eV, ey, ox, bxg, OV, mR, A, Og, bXK, yq, CQ, xe, Wt, kT, ajd, fL, fM, dA, jx, eX, V, q, J, zn, aT, aol, sb, iU, xR, Y, IC, r, pb, OC, lY, ck, cT, wg, kP, iM, Zg, hc, bt, Ze, Ke, ob, iW, cfX, bXN, jh, bS, mC, dP, CJ, fX, qh, amY, aHp, gj, je, Of, eZ, LB, bXM, y, ne); #c1(MS4A12) c2(NP_001157942) c3(membrane-spanning 4-domains subfamily A member 12 isoform 2) c4(62922) c5(62923, 62924, 62925, 62926, 62927, 62928) c6( ) c7(bB, bE); #c1(MS4A12) c2(NP_060186) c3(membrane-spanning 4-domains subfamily A member 12 isoform 1) c4(194652, 194653) c5(194654, 194655, 194656, 194657, 194658, 194659, 194660, 194661, 194662, 194663, 194664, 194665, 194666, 194667) c6( ) c7(bB, bE); #c1(MS4A2) c2(NP_001243845) c3(high affinity immunoglobulin epsilon receptor subunit beta isoform 3) c4( ) c5(91816, 91817, 91818, 91819, 91820) c6( ) c7(bL, bM, Dw, dD, eX, j, eq, pM, Jx, q, fS, eV, Ds, JK, bGD, eu, sp, r, Xm, eE, ve, cT, ac, z, uz, Tu, k, fD); #c1(MS4A2) c2(XP_005273903) c3(high affinity immunoglobulin epsilon receptor subunit beta isoform X2) c4(284874, 284875) c5(284876, 284877) c6( ) c7(bL, bM, Dw, dD, eX, j, eq, pM, Jx, q, fS, eV, Ds, JK, bGD, eu, sp, r, Xm, eE, ve, cT, ac, z, uz, Tu, k, fD); #c1(MS4A2) c2(XP_011543152) c3(high affinity immunoglobulin epsilon receptor subunit beta isoform X1) c4( ) c5(341978, 341979, 341980, 341981, 341982) c6( ) c7(bL, bM, Dw, dD, eX, j, eq, pM, Jx, q, fS, eV, Ds, JK, bGD, eu, sp, r, Xm, eE, ve, cT, ac, z, uz, Tu, k, fD); #c1(MS4A3) c2(NP_001026836) c3(membrane-spanning 4-domains subfamily A member 3 isoform c) c4( ) c5(29640, 29641, 29642, 29643, 29644) c6( ) c7(bM, T, cF, Qu, g, fq); #c1(MS4A3) c2(NP_001026979) c3(membrane-spanning 4-domains subfamily A member 3 isoform b) c4(30033) c5(30034, 30035, 30036, 30037, 30038, 30039, 30040, 30041, 30042, 30043) c6( ) c7(bM, T, cF, Qu, g, fq); #c1(MS4A3) c2(NP_006129) c3(membrane-spanning 4-domains subfamily A member 3 isoform a) c4(162281, 162282) c5(162283, 162284, 162285, 162286, 162287, 162288) c6( ) c7(bM, T, cF, Qu, g, fq); #c1(MS4A3) c2(XP_011543665) c3(membrane-spanning 4-domains subfamily A member 3 isoform X1) c4( ) c5(342771) c6( ) c7(bM, T, cF, Qu, g, fq); #c1(MS4A4A) c2(NP_001230195) c3(membrane-spanning 4-domains subfamily A member 4A isoform 3) c4(86083) c5(86084, 86085, 86086, 86087, 86088, 86089, 86090, 86091, 86092, 86093, 86094) c6( ) c7(ey, fK, af); #c1(MS4A4A) c2(NP_076926) c3(membrane-spanning 4-domains subfamily A member 4A isoform 2) c4( ) c5(214279, 214280, 214281, 214282, 214283, 214284, 214285, 214286) c6( ) c7(ey, fK, af); #c1(MS4A4A) c2(NP_683876) c3(membrane-spanning 4-domains subfamily A member 4A isoform 1) c4(242598, 242599, 242600) c5(242601, 242602, 242603, 242604, 242605, 242606, 242607, 242608) c6( ) c7(ey, fK, af); #c1(MS4A6A) c2(NP_001234928) c3(membrane-spanning 4-domains subfamily A member 6A isoform 4) c4(87802, 87803) c5(87804, 87805, 87806, 87807, 87808, 87809, 87810) c6( ) c7(sO, ey, fK, af); #c1(MS4A6A) c2(NP_071744) c3(membrane-spanning 4-domains subfamily A member 6A isoform 2) c4( ) c5(211909, 211910, 211911, 211912, 211913) c6( ) c7(sO, ey, fK, af); #c1(MS4A6A) c2(NP_690590) c3(membrane-spanning 4-domains subfamily A member 6A isoform 3) c4(244856) c5(244857, 244858, 244859, 244860, 244861, 244862) c6( ) c7(sO, ey, fK, af); #c1(MS4A6A) c2(NP_690591) c3(membrane-spanning 4-domains subfamily A member 6A isoform 1) c4( ) c5(244863, 244864, 244865, 244866, 244867, 244868, 244869, 244870) c6( ) c7(sO, ey, fK, af); #c1(MS4A6A) c2(XP_005274235) c3(membrane-spanning 4-domains subfamily A member 6A isoform X3) c4(284996, 284997) c5(284998, 284999, 285000, 285001, 285002, 285003, 285004, 285005) c6( ) c7(sO, ey, fK, af); #c1(MS4A6A) c2(XP_006718723) c3(membrane-spanning 4-domains subfamily A member 6A isoform X4) c4(291994) c5( ) c6( ) c7(sO, ey, fK, af); #c1(MS4A6A) c2(XP_006718724) c3(membrane-spanning 4-domains subfamily A member 6A isoform X5) c4(291995) c5(291996) c6( ) c7(sO, ey, fK, af); #c1(MS4A6A) c2(XP_006718726) c3(membrane-spanning 4-domains subfamily A member 6A isoform X7) c4( ) c5(291997, 291998, 291999, 292000, 292001) c6( ) c7(sO, ey, fK, af); #c1(MS4A6A) c2(XP_011543511) c3(membrane-spanning 4-domains subfamily A member GA isoform X8) c4( ) c5(342385, 342386, 342387, 342388, 342389, 342390) c6( ) c7(sO, ey, fK, af); #c1(MS4A8) c2(NP_113645) c3(membrane-spanning 4-domains subfamily A member 8) c4(221911) c5(221912, 221913, 221914, 221915, 221916, 221917) c6( ) c7(bE, T, ae, ad, g); #c1(MSANTD3-TMEFF1) c2(NP_001185741) c3(MSANTD3-TMEFF1 fusion protein) c4(76160, 76161, 76162) c5(76163, 76164, 76165, 76166, 76167, 76168, 76169, 76170, 76171, 76172, 76173, 76174) c6( ) c7(dB, T); #c1(MSC) c2(NP_005089) c3(musculin) c4(152798) c5(152799, 152800, 152801, 152802, 152803, 152804) c6( ) c7(ID, T, am, fM, dA, eR, hV, fG, aw, eX, fN, aA, bB, n, aj, bS, v, wV, fd, PJ, aY, V, q, amW, J, eA, ip, x, eW, py, aE, fm, M, ZQ, aT, cy, eV, bl, K, zp, ji, pk, bPQ, N, bA, ly, A, d, aW, Y, oV, xs, hl, r, fe, aF, zC, nr, t, lx, eK, ck, es, lt, ac, c, wg, dB, wO, bE, iA, cj, uJ, m, k, fD, IC, aNl, B); #c1(MSGN1) c2(NP_001099039) c3(mesogenin-1) c4(41764) c5(41765, 41766, 41767, 41768, 41769, 41770) c6( ) c7(fr); #c1(MSH2) c2(NP_000242) c3(DNA mismatch repair protein Msh2 isoform 1) c4(5409, 5410, 5411, 5412, 5413, 5414, 5415) c5(5416, 5417, 5418, 5419, 5420, 5421, 5422) c6( ) c7(ID, T, os, aC, hV, if, al, ajp, bB, ci, oJ, aY, ip, x, afr, aE, Qk, K, hu, eL, cp, Qe, eG, aW, LZ, nY, kt, Ku, g, as, zE, bw, wT, ix, fT, eM, nB, iA, cj, k, m, iu, wu, sw, ht, NT, n, oY, fr, qN, eW, hr, Bl, jz, hw, kH, auS, dL, hB, dx, hQ, ax, aq, Hu, YF, cM, Ld, iN, bP, dB, hk, Qu, hL, at, HB, oh, MW, it, B, fM, yk, bmz, cez, ew, aA, hy, acn, Qo, lu, q, eA, nv, eO, aT, cy, ae, ne, qw, avg, Uf, s, NE, Y, ev, r, lo, en, bu, cl, t, Px, Vi, iK, cfZ, ck, QG, iM, Dy, ac, au, gX, fP, anD, ij, bt, Mb, id, aD, Dd, iW, jh, bs, KO, bhL, oZ, hF, ad, BY, av, avp, py, Rq, NS, io, YB, ji, wm, Yi, Yj, d, BN, BO, je, gt, ff, gK, aF, iV, adj, bz, dr, dR, bF, es, cfY, aoR, Ew, bE, afd, IO, adg, y, X, jr); #c1(MSH2) c2(NP_001245210) c3(DNA mismatch repair protein Msh2 isoform 2) c4(92710, 92711) c5(92712, 92713, 92714, 92715, 92716, 92717, 92718, 92719, 92720, 92721, 92722, 92723, 92724, 92725, 92726, 92727, 92728, 92729, 92730) c6( ) c7(ID, T, os, aC, hV, if, al, ajp, bB, ci, oJ, aY, ip, x, afr, aE, Qk, K, hu, eL, cp, Qe, eG, aW, LZ, nY, kt, Ku, g, as, zE, bw, wT, ix, fT, eM, nB, iA, cj, k, m, iu, wu, sw, ht, NT, n, oY, fr, qN, eW, br, Bl, jz, hw, kH, auS, dL, hB, dx, hQ, ax, aq, Hu, YF, cM, Ld, iN, bP, dB, hk, Qu, hL, at, HB, oh, MW, it, B, fM, yk, bmz, cez, ew, aA, hy, acn, Qo, lu, q, eA, nv, eO, aT, cy, ae, ne, qw, avg, Uf, s, NE, Y, ev, r, lo, en, bu, cl, t, Px, Vi, iK, cfZ, ck, QG, iM, Dy, ac, au, gX, fP, anD, ij, bt, Mb, id, aD, Dd, iW, jh, bs, KO, bhL, oZ, hF, ad, BY, av, avp, py, Rq, NS, io, YB, ji, wm, Yi, Yj, d, BN, BO, je, qt, ff, gK, aF, iV, adj, bz, dr, dR, bF, es, cfY, aoR, Ew, bE, afd, IO, adg, y, X, jr); #c1(MSH2) c2(XP_005264389) c3(DNA mismatch repair protein Msh2 isoform X1) c4(278926) c5(278927, 278928, 278929, 278930, 278931, 278932) c6( ) c7(ID, T, os, aC, hV, if, al, ajp, bB, ci, oJ, aY, ip, x, afr, aE, Qk, K, hu, eL, cp, Qe, eG, aW, LZ, nY, kt, Ku, g, as, zE, bw, wT, ix, fT, eM, nB, iA, cj, k, m, iu, wu, sw, ht, NT, n, oY, fr, qN, eW, hr, Bl, jz, hw, kH, auS, dL, hB, dx, hQ, ax, aq, Hu, YE, cM, Ld, iN, bP, dB, hk, Qu, hL, at, HB, oh, MW, it, B, fM, yk, bmz, cez, ew, aA, hy, acn, Qo, lu, q, eA, nv, eO, aT, cy, ae, ne, qw, avg, Uf, s, NE, Y, ev, r, lo, en, bu, cl, t, Px, Vi, iK, cfZ, ck, QG, iM, Dy, ac, au, gX, fP, anD, ij, bt, Mb, id, aD, Dd, iW, jh, bs, KO, bhL, oZ, hF, ad, BY, av, avp, py, Rq, NS, io, YB, ji, wm, Yi, Yj, d, BN, BO, je, qt, ff, gK, aF, iV, adj, bz, dr, dR, bF, es, cfY, aoR, Ew, bE, afd, IO, adg, y, X, jr); #c1(MSH2) c2(XP_011531169) c3(DNA mismatch repair protein Msh2 isoform X2) c4( ) c5(327125, 327126, 327127, 327128, 327129, 327130, 327131, 327132, 327133, 327134, 327135, 327136, 327137, 327138, 327139, 327140, 327141, 327142, 327143, 327144, 327145, 327146, 327147, 327148, 327149, 327150, 327151, 327152) c6( ) c7(ID, T, os, aC, hV, if, al, ajp, bB, ci, oJ, aY, ip, x, afr, aE, Qk, K, hu, eL, cp, Qe, eG, aW, LZ, nY, kt, Ku, g, as, zE, bw, wT, ix, fT, eM, nB, iA, cj, k, m, iu, wu, sw, ht, NT, n, oY, fr, qN, eW, hr, Bl, jz, hw, kH, auS, dL, hB, dx, hQ, ax, aq, Hu, YE, cM, Ld, iN, bP, dB, hk, Qu, hL, at, HB, oh, MW, it, B, fM, yk, bmz, cez, ew, aA, hy, acn, Qo, lu, q, eA, nv, eO, aT, cy, ae, ne, gw, avg, Uf, s, NE, Y, ev, r, lo, en, bu, cl, t, Px, Vi, iK, cfZ, ck, QG, iM, Dy, ac, au, gX, fP, anD, ij, bt, Mb, id, aD, Dd, iW, jh, bs, KO, bhL, oZ, hF, ad, BY, av, avp, py, Rq, NS, io, YB, ji, wm, Yi, Yj, d, BN, BO, je, qt, ff, gK, aF, iV, adj, bz, dr, dR, bF, es, cfY, aoR, Ew, bE, afd, IO, adg, y, X, jr); #c1(MSH3) c2(NP_002430) c3(DNA mismatch repair protein Msh3) c4(128400, 128401) c5(128402, 128403, 128404, 128405, 128406, 128407, 128408, 128409, 128410, 128411, 128412, 128413) c6( ) c7(T, os, aC, bO, fd, bB, ci, x, aE, K, hu, eL, bc, Qe, aW, Qq, g, as, eF, kJ, ir, cm, bw, eM, nB, m, k, gn, ik, dD, iB, aw, ht, n, fr, ft, kl, kH, h, dL, ia, aq, dB, hL, at, B, aA, q, er, XX, afQ, aT, ae, qw, s, iU, Y, ev, r, cl, t, iK, hY, ck, iM, gX, bt, ao, kG, hS, ha, jh, oZ, eq, hF, iJ, ad, ib, d, je, BO, eH, kD, aF, bz, bE, y, iu); #c1(MSH5) c2(NP_079535) c3(mutS protein homolog 5 isoform a) c4(218794, 218795, 218796, 218797, 218798, 218799, 218800, 218801) c5(218802, 218803, 218804, 218805, 218806, 218807, 218808, 218809, 218810, 218811, 218812, 218813, 218814, 218815, 218816, 218817, 218818, 218819, 218820, 218821, 218822, 218823, 218824, 218825, 218826, 218827, 218828, 218829, 218830, 218831, 218832, 218833, 218834, 218835, 218836, 218837, 218838, 218839, 218840, 218841, 218842, 218843, 218844, 218845, 218846, 218847, 218848, 218849, 218850, 218851, 218852, 218853, 218854, 218855, 218856, 218857, 218858, 218859, 218860, 218861, 218862, 218863, 218864, 218865, 218866, 218867, 218868, 218869, 218870, 218871, 218872, 218873, 218874) c6( ) c7(T, A, gU, W, ND, il, iW, IC, eZ, vH, lY, y, Wt); #c1(MSH5) c2(NP_751897) c3(mutS protein homolog 5 isoform b) c4(248238, 248239, 248240, 248241, 248242, 248243, 248244, 248245) c5(248246, 248247, 248248, 248249, 248250, 248251, 248252, 248253, 248254, 248255, 248256, 248257, 248258, 248259, 248260, 248261, 248262, 248263, 248264, 248265, 248266, 248267, 248268, 248269, 248270, 248271, 248272, 248273) c6( ) c7(T, A, gU, W, ND, il, iW, IC, eZ, vH, lY, y, Wt); #c1(MSH5) c2(NP_751898) c3(mutS protein homolog 5 isoform c) c4(248274, 248275, 248276, 248277, 248278, 248279, 248280, 248281, 248282, 248283, 248284, 248285, 248286, 248287) c5(248288, 248289, 248290, 248291, 248292, 248293, 248294, 248295, 248296, 248297, 248298, 248299, 248300, 248301, 248302, 248303, 248304, 248305, 248306, 248307, 248308, 248309, 248310, 248311, 248312, 248313, 248314, 248315, 248316, 248317, 248318, 248319, 248320, 248321, 248322, 248323, 248324, 248325, 248326, 248327, 248328, 248329, 248330, 248331, 248332, 248333, 248334, 248335, 248336, 248337, 248338, 248339, 248340, 248341, 248342, 248343, 248344, 248345, 248346, 248347, 248348, 248349, 248350, 248351, 248352, 248353, 248354, 248355, 248356, 248357, 248358, 248359, 248360, 248361, 248362, 248363, 248364, 248365, 248366, 248367, 248368, 248369, 248370, 248371, 248372, 248373, 248374, 248375, 248376, 248377, 248378, 248379, 248380, 248381, 248382, 248383, 248384, 248385, 248386, 248387, 248388, 248389, 248390, 248391, 248392, 248393, 248394, 248395, 248396, 248397, 248398, 248399, 248400, 248401, 248402, 248403, 248404, 248405, 248406, 248407, 248408, 248409, 248410, 248411, 248412, 248413, 248414, 248415, 248416, 248417, 248418, 248419, 248420, 248421, 248422, 248423, 248424, 248425, 248426, 248427, 248428, 248429, 248430, 248431, 248432, 248433, 248434, 248435, 248436, 248437, 248438, 248439, 248440, 248441, 248442, 248443, 248444, 248445, 248446, 248447, 248448, 248449, 248450, 248451, 248452, 248453, 248454, 248455, 248456, 248457, 248458, 248459, 248460, 248461, 248462, 248463, 248464, 248465, 248466, 248467, 248468, 248469, 248470, 248471, 248472, 248473, 248474, 248475, 248476, 248477, 248478, 248479, 248480, 248481, 248482, 248483, 248484, 248485, 248486, 248487, 248488, 248489, 248490, 248491, 248492, 248493, 248494, 248495, 248496, 248497, 248498, 248499, 248500, 248501, 248502, 248503, 248504, 248505, 248506, 248507) c6( ) c7(T, A, gU, W, ND, il, iW, IC, eZ, vH, lY, y, Wt); #c1(MSH6) c2(NP_000170) c3(DNA mismatch repair protein Msh6 isoform 1) c4(3767, 3768, 3769) c5(3770, 3771, 3772, 3773, 3774, 3775, 3776, 3777, 3778, 3779, 3780, 3781, 3782, 3783, 3784, 3785, 3786, 3787, 3788) c6( ) c7(gV, T, os, aC, id, lT, iW, NT, jh, aA, bB, n, oZ, OE, oH, ci, bX, fr, q, ad, eA, dP, av, afr, b, iu, XX, eO, kH, aT, auS, dL, ey, ae, eL, dx, cp, Qe, jf, gj, yo, d, je, BO, s, hG, aW, Y, PL, vT, ev, NE, r, Kf, aF, g, cl, as, t, adj, aHd, bF, iM, Ew, dB, bE, gX, hL, at, SZ, m, MC, i, y, X, cga); #c1(MSH6) c2(NP_001268421) c3(DNA mismatch repair protein Msh6 isoform 2) c4(99879, 99880, 99881) c5(99882, 99883, 99884, 99885, 99886, 99887, 99888, 99889, 99890, 99891, 99892, 99893) c6( ) c7(gV, T, os, aC, id, IT, iW, NT, jh, aA, bB, n, oZ, OE, oH, ci, bX, fr, q, ad, eA, dP, av, afr, b, iu, XX, eO, kH, aT, auS, dL, ey, ae, eL, dx, cp, Qe, jf, gj, yo, d, je, BO, s, hG, aW, Y, PL, vT, ev, NE, r, Kf, aF, g, cl, as, t, adj, aHd, bF, iM, Ew, dB, bE, gX, hL, at, SZ, m, MG, i, y, X, cga); #c1(MSH6) c2(NP_001268423) c3(DNA mismatch repair protein Msh6 isoform 3) c4( ) c5(99894, 99895, 99896, 99897, 99898) c6( ) c7(gV, T, os, aC, id, IT, iW, NT, jh, aA, bB, n, oZ, OE, oH, ci, bX, fr, q, ad, eA, dP, av, afr, b, iu, XX, eO, kH, aT, auS, dL, ey, ae, eL, dx, cp, Qe, jf, gj, ye, d, je, BO, s, hG, aW, Y, PL, vT, ev, NE, r, Kf, aF, g, cl, as, t, adj, aHd, bF, iM, Ew, dB, bE, gX, hL, at, SZ, m, MG, i, y, X, cga); #c1(MSI1) c2(NP_002433) c3(RNA-binding protein Musashi homolog 1) c4(128414) c5(128415, 128416, 128417, 128418, 128419, 128420) c6( ) c7(T, fR, aA, bB, ci, qN, q, eA, eW, dP, gd, aT, dL, K, eL, af, eu, jf, d, s, aW, ev, ff, r, ag, aF, en, cl, g, bz, bb, kP, wg, ig, dB, bE, hL, at, B); #c1(MSI2) c2(NP_620412) c3(RNA-binding protein Musashi homolog 2 isoform a) c4(237593, 237594) c5(237595, 237596, 237597, 237598, 237599, 237600, 237601, 237602, 237603, 237604, 237605, 237606) c6( ) c7(ck, x, iT, iU, bK, k, bw, bt, bz, B); #c1(MSI2) c2(NP_733839) c3(RNA-binding protein Musashi homolog 2 isoform b) c4(247226) c5(247227, 247228, 247229, 247230, 247231, 247232) c6( ) c7(ck, x, iT, iU, bK, k, bw, bt, bz, B); #c1(MSI2) c2(XP_005257071) c3(RNA-binding protein Musashi homolog 2 isoform X1) c4(274654) c5(274655, 274656, 274657, 274658, 274659, 274660) c6( ) c7(ck, x, iT, iU, bK, k, bw, bt, bz, B); #c1(MSLN) c2(XP_005255091) c3(mesothelin isoform X4) c4(273536) c5(273537, 273538, 273539, 273540, 273541, 273542, 273543, 273544, 273545, 273546, 273547, 273548) c6( ) c7(T, aC, id, sw, YM, aA, bB, n, ci, eJ, ip, x, jz, ib, aE, lt, aT, fb, xQ, nO, Jl, aW, ff, nY, agF, kp, en, cl, g, t, bz, kP, bE, m, k, bt, iu, BA, hS); #c1(MSLN) c2(XP_006720900) c3(mesothelin isoform X1) c4(293763, 293764) c5(293765, 293766, 293767, 293768, 293769, 293770, 293771, 293772, 293773, 293774, 293775, 293776, 293777, 293778) c6( ) c7(T, aC, id, sw, YM, aA, bB, n, ci, eJ, ip, x, jz, ib, aE, lt, aT, fb, xQ, nO, Jl, aW, ff, nY, agF, kp, en, cl, g, t, bz, kP, bE, m, k, bt, iu, BA, hS); #c1(MSLN) c2(XP_011520652) c3(mesothelin isoform X2) c4(315543) c5(315544, 315545, 315546, 315547, 315548, 315549, 315550, 315551, 315552, 315553) c6( ) c7(T, aC, id, sw, YM, aA, bB, n, ci, eJ, ip, x, jz, ib, aE, lt, aT, fb, xQ, nO, Jl, aW, ff, nY, agF, kp, en, cl, g, t, bz, kP, bE, m, k, bt, iu, BA, hS); #c1(MSMB) c2(NP_002434) c3(beta-microseminoprotein isoform a precursor) c4(128421) c5(128422, 128423, 128424, 128425, 128426, 128427) c6( ) c7(T, qo, Uc, Ol, if, iW, aA, it, n, fr, ci, qN, PJ, q, ad, rc, dP, ft, aE, lg, acu, jZ, pX, dV, aT, bOu, NM, ae, VF, cgb, d, Ub, aW, Y, r, lo, kp, xH, aF, g, cl, kk, iK, bz, op, ar, pu, qe, c, eM, dc, vA, agl, DC, hL, uz, wR, act, ER, eg, Pr, B); #c1(MSMB) c2(NP_619540) c3(beta-microseminoprotein isoform b precursor) c4(236874) c5(236875, 236876, 236877, 236878, 236879, 236880) c6( ) c7(T, qo, Uc, Ol, if, iW, aA, it, n, fr, ci, qN, PJ, q, ad, rc, dP, ft, aE, lg, acu, jZ, pX, dV, aT, bOu, NM, ae, VF, cgb, d, Ub, aW, Y, r, lo, kp, xH, aF, g, cl, kk, iK, bz, op, ar, pu, qe, c, eM, dc, vA, agl, DC, hL, uz, wR, act, ER, eg, Pr, B); #c1(MSMO1) c2(NP_001017369) c3(methylsterol monooxygenase 1 isoform 2) c4( ) c5(26341, 26342, 26343, 26344, 26345) c6( ) c7(bL, T, cgc); #c1(MSMO1) c2(NP_006736) c3(methylsterol monooxygenase 1 isoform 1) c4(167591, 167592, 167593, 167594) c5(167595, 167596, 167597, 167598, 167599, 167600, 167601, 167602, 167603, 167604, 167605, 167606, 167607, 167608, 167609, 167610, 167611, 167612, 167613) c6( ) c7(bL, T, cgc); #c1(MSMP) c2(NP_001037729) c3(prostate-associated microseminoprotein precursor) c4(34117) c5(34118, 34119, 34120, 34121, 34122, 34123, 34124, 34125) c6(34126, 34127) c7(ae, ac, ad); #c1(MSN) c2(NP_002435) c3(moesin) c4(128428) c5(128429, 128430, 128431, 128432, 128433, 128434) c6( ) c7(T, aC, fR, fG, if, bB, j, BF, qN, PB, eA, ad, ip, aE, bW, aT, h, By, Ex, ae, d, iE, aW, Y, Ls, ff, lo, en, cl, g, t, iK, rR, Ew, W, bE, AM, hL, dW, oX, gn, m, iu); #c1(MSR1) c2(NP_002436) c3(macrophage scavenger receptor types I and II isoform type 2) c4(128435, 128436) c5(128437, 128438, 128439, 128440, 128441, 128442, 128443, 128444, 128445, 128446, 128447, 128448, 128449, 128450, 128451, 128452, 128453, 128454, 128455, 128456, 128457, 128458, 128459) c6(128460) c7(bL, T, EM, dD, eR, pf, ea, fG, e, n, j, eq, eA, ad, x, aT, dL, ey, XZ, ae, af, RT, cgd, Ub, iU, aW, iZ, LZ, aq, t, bz, LB, ck, at, mf, m, k, it, X); #c1(MSR1) c2(NP_619729) c3(macrophage scavenger receptor types I and II isoform type 1) c4(237071, 237072, 237073) c5(237074, 237075, 237076, 237077, 237078, 237079, 237080, 237081, 237082, 237083, 237084, 237085, 237086, 237087, 237088, 237089) c6( ) c7(bL, T, EM, dD, eR, pf, ea, fG, e, n, j, eq, eA, ad, x, aT, dL, ey, XZ, ae, af, RT, cgd, Ub, iU, aW, iZ, LZ, ag, t, bz, LB, ck, at, mf, m, k, it, X); #c1(MSR1) c2(NP_619730) c3(macrophage scavenger receptor types I and II isoform type 3) c4(237090) c5(237091, 237092, 237093, 237094, 237095, 237096, 237097, 237098, 237099, 237100, 237101, 237102, 237103, 237104) c6( ) c7(bL, T, EM, dD, eR, pf, ea, fG, e, n, j, eq, eA, ad, x, aT, dL, ey, XZ, ae, af, RT, cgd, Ub, iU, aW, iZ, LZ, aq, t, bz, LB, ck, at, mf, m, k, it, X); #c1(MSRA) c2(NP_001129142) c3(mitochondrial peptide methionine sulfoxide reductase isoform b) c4(50895) c5(50896, 50897, 50898, 50899, 50900, 50901) c6( ) c7(y, ac, hX, e, aw, gQ, U, cz, v, j, K, qj, yC, cm, IB, B, ao, pC); #c1(MSRA) c2(NP_001129143) c3(mitochondrial peptide methionine sulfoxide reductase isoform c) c4(50902) c5(50903, 50904, 50905, 50906, 50907, 50908, 50909) c6( ) c7(y, ac, hX, e, aw, qQ, U, cz, v, j, K, qj, yC, cm, IB, B, ao, pC); #c1(MSRA) c2(NP_001186658) c3(mitochondrial peptide methionine sulfoxide reductase isoform d) c4( ) c5(78303, 78304, 78305, 78306, 78307) c6( ) c7(y, ac, hX, e, aw, qQ, U, cz, v, j, K, qj, yC, cm, IB, B, ao, pC); #c1(MSRA) c2(NP_036463) c3(mitochondrial peptide methionine sulfoxide reductase isoform a precursor) c4(174047, 174048) c5(174049, 174050, 174051, 174052, 174053, 174054) c6( ) c7(y, ac, hX, e, aw, gQ, U, cz, v, j, K, qj, yC, cm, IB, B, ao, pC); #c1(MSRB2) c2(NP_036360) c3(methionine-R-sulfoxide reductase B2, mitochondrial precursor) c4(173219) c5(173220, 173221, 173222, 173223, 173224, 173225, 173226) c6( ) c7(qj); #c1(MSRB3) c2(NP_001180390) c3(methionine-R-sulfoxide reductase B3 isoform 2 precursor) c4(73914, 73915, 73916) c5(73917, 73918, 73919, 73920, 73921, 73922, 73923, 73924, 73925, 73926, 73927, 73928, 73929, 73930, 73931, 73932, 73933, 73934, 73935, 73936, 73937, 73938) c6( ) c7(bK, aHs, cgf, cge, EQ); #c1(MSRB3) c2(NP_932346) c3(methionine-R-sulfoxide reductase B3 isoform 1 precursor) c4(258966) c5(258967, 258968, 258969, 258970, 258971, 258972) c6( ) c7(bK, aHs, cgf, cge, EQ); #c1(MST1) c2(NP_066278) c3(hepatocyte growth factor-like protein precursor) c4(206938, 206939, 206940) c5(206941, 206942, 206943, 206944, 206945, 206946, 206947, 206948, 206949, 206950, 206951, 206952, 206953) c6( ) c7(T, qo, Uc, ra, Ol, bgQ, fG, if, aw, aA, bB, it, fr, ci, qN, PJ, V, q, ad, rc, eA, dP, av, ft, hd, aE, lg, jz, acu, cc, bW, jZ, pX, dV, aT, K, Tj, bOu, NM, ae, VF, uQ, d, aW, Y, ff, r, Pr, hN, lo, aF, xH, fe, en, cl, kk, jT, g, bz, iK, op, iV, LB, nM, qe, c, nB, bE, dc, eM, vA, agl, DC, mx, hL, apv, uz, eo, ER, eg, zA, B); #c1(MST1) c2(XP_011532038) c3(hepatocyte growth factor-like protein isoform X8) c4(328097) c5( ) c6( ) c7(T, qo, Uc, ra, Ol, bgQ, fG, if, aw, aA, bB, it, fr, ci, qN, PJ, V, q, ad, rc, eA, dP, av, ft, hd, aE, lg, jz, acu, cc, bW, jZ, pX, dV, aT, K, Tj, bOu, NM, ae, VF, uQ, d, aW, Y, ff, r, Pr, hN, lo, aF, xH, fe, en, cl, kk, jT, g, bz, iK, op, iV, LB, nM, qe, c, nB, bE, dc, eM, vA, agl, DC, mx, hL, apv, uz, eo, ER, eg, zA, B); #c1(MST1) c2(XP_011532040) c3(hepatocyte growth factor-like protein isoform X11) c4( ) c5(328098, 328099, 328100, 328101, 328102, 328103, 328104, 328105, 328106, 328107, 328108) c6( ) c7(T, qo, Uc, ra, Ol, bgQ, fG, if, aw, aA, bB, it, fr, ci, qN, PJ, V, q, ad, rc, eA, dP, av, ft, hd, aE, lg, jz, acu, cc, bW, jZ, pX, dV, aT, K, Tj, bOu, NM, ae, VF, uQ, d, aW, Y, ff, r, Pr, hN, lo, aF, xH, fe, en, cl, kk, jT, g, bz, iK, op, iV, LB, nM, qe, c, nB, bE, dc, eM, vA, agl, DC, mx, hL, apv, uz, eo, ER, eg, zA, B); #c1(MST1R) c2(NP_001231866) c3(macrophage-stimulating protein receptor isoform 2 precursor) c4(87578) c5(87579, 87580, 87581, 87582, 87583, 87584) c6( ) c7(T, WA, rQ, jh, aA, bB, BH, fr, ci, V, q, aR, ad, eA, dP, av, ft, hd, aE, lg, pX, akJ, aT, h, dL, pk, ae, eL, B, s, aW, ff, r, fe, lo, aF, en, aDY, g, LV, t, bz, eF, iV, ck, eM, nB, bE, m, X); #c1(MST1R) c2(NP_002438) c3(macrophage-stimulating protein receptor isoform 1 preproprotein) c4(128468) c5(128469, 128470, 128471, 128472, 128473, 128474) c6( ) c7(T, WA, rQ, jh, aA, bB, BH, fr, ci, V, q, aR, ad, eA, dP, av, ft, hd, aE, lg, pX, akJ, aT, h, dL, pk, ae, eL, B, s, aW, ff, r, fe, lo, aF, en, aDY, g, LV, t, bz, eF, iV, ck, eM, nB, bE, m, X); #c1(MSTN) c2(NP_005250) c3(growth/differentiation factor 8 precursor) c4(154394) c5(154395, 154396, 154397, 154398, 154399, 154400) c6( ) c7(bL, T, EM, ea, egg, e, vX, wo, tc, bS, v, et, Eh, q, cd, bv, Yc, oz, Ae, oj, kf, h, bgr, bl, K, nJ, DA, xs, fc, r, TQ, dq, uY, aaO, Z, fq, op, c, bQI, vA, U, gZ, at, cP, gT); #c1(MSTO1) c2(NP_001243462) c3(protein misato homolog 1 isoform c) c4( ) c5(90874, 90875, 90876, 90877, 90878) c6( ) c7(x, W, eM, aW, aT, k, pd, hq); #c1(MSTO1) c2(NP_060586) c3(protein misato homolog 1 isoform a) c4(196683, 196684) c5(196685, 196686, 196687, 196688, 196689, 196690, 196691) c6( ) c7(x, W, eM, aW, aT, k, pd, hq); #c1(MSTO1) c2(XP_011507998) c3(protein misato homolog 1 isoform X2) c4(298436) c5(298437, 298438, 298439, 298440, 298441, 298442) c6( ) c7(x, W, eM, aW, aT, k, pd, hq); #c1(MSTO1) c2(XP_011508004) c3(protein misato homolog 1 isoform X8) c4(298443) c5( ) c6( ) c7(x, W, eM, aW, aT, k, pd, hq); #c1(MSTO1) c2(XP_011508011) c3(protein misato homolog 1 isoform X13) c4( ) c5(298444) c6( ) c7(x, W, eM, aW, aT, k, pd, hq); #c1(MSTO1) c2(XP_011508012) c3(protein misato homolog 1 isoform X14) c4( ) c5(298445, 298446, 298447, 298448, 298449, 298450, 298451, 298452, 298453, 298454) c6( ) c7(x, W, eM, aW, aT, k, pd, hq); #c1(MSX1) c2(NP_002439) c3(homeobox protein MSX-1) c4(128475) c5(128476, 128477, 128478, 128479, 128480, 128481) c6( ) c7(Tb, if, bjB, eX, aA, GC, fd, cgk, aml, qN, cgj, boJ, amH, cgl, Na, axC, amJ, aT, eV, rD, Nc, an, rz, cgi, yi, aoa, bjy, aW, Az, cm, apM, rR, cgh, bpv, aen); #c1(MSX2) c2(NP_002440) c3(homeobox protein MSX-2) c4(128482) c5(128483, 128484, 128485, 128486, 128487, 128488, 128489) c6( ) c7(T, aC, aw, al, cz, n, TZ, aml, C, Na, aE, aT, cy, Nc, apw, Ur, aOX, cgi, uX, mR, TY, aW, Y, Az, akB, kp, cgm, agj, t, cgo, zV, gk, apM, cgn, c, cgp, anD, m, art); #c1(MT1A) c2(NP_005937) c3(metallothienein-1A) c4(160540) c5(160541, 160542, 160543, 160544, 160545, 160546, 160547, 160548, 160549, 160550, 160551, 160552) c6( ) c7(bL, G, T, fR, FG, sw, iW, e, aA, n, aj, Vd, ci, uE, PJ, ml, fr, J, ad, Vp, hd, lg, oz, nv, Qg, aT, dL, yh, ae, B, s, dH, aW, ff, eZ, fQ, aF, en, dr, dS, nM, eM, nB, QF, Km, Pk, X); #c1(MT1B) c2(NP_005938) c3(metallothionein-1B) c4(160553) c5(160554, 160555, 160556, 160557, 160558, 160559, 160560) c6( ) c7(bL, T, ZV, FG, iW, e, aj, j, PJ, J, ec, aT, ZU, jy, K, B, dH, aW, g, fi, dS, eM, Km, ei, gT, X); #c1(MT1E) c2(NP_783316) c3(metallothionein-1E) c4(251609) c5(251610, 251611, 251612, 251613, 251614, 251615, 251616, 251617, 251618, 251619, 251620) c6( ) c7(bL, T, FG, iW, ha, bS, Vd, fr, PJ, eA, aT, dL, eL, aa, B, dH, qt, aW, cl, dS, aQn, ig, eM, hL, Km, X); #c1(MT1E) c2(XP_005256013) c3(metallothionein-1E isoform X1) c4(273911, 273912) c5(273913, 273914, 273915, 273916, 273917, 273918) c6( ) c7(bL, T, FG, iW, ha, bS, Vd, fr, PJ, eA, aT, dL, eL, aa, B, dH, qt, aW, cl, dS, aQn, ig, eM, hL, Km, X); #c1(MT1F) c2(NP_005940) c3(metallothienein-1F isoform 1) c4(160561) c5(160562, 160563, 160564, 160565, 160566, 160567) c6( ) c7(bL, iO, T, Ve, no, eM, dH, FG, aW, qt, iW, X, an, aT, ag, Km, dy, PJ, B, dS); #c1(MT1G) c2(NP_001288196) c3(metallothionein-1G isoform 2) c4(113694, 113695) c5(113696, 113697, 113698, 113699, 113700, 113701, 113702, 113703, 113704, 113705, 113706, 113707) c6( ) c7(bL, FG, iW, ht, fr, PJ, q, ad, hd, aT, K, ae, bA, B, dH, r, dS, iO, nM, eM, nB, Km, bt, X); #c1(MT1G) c2(NP_005941) c3(metallothionein-1G isoform 1) c4(160568) c5(160569, 160570, 160571, 160572, 160573, 160574) c6( ) c7(bL, FG, iW, ht, fr, PJ, q, ad, hd, aT, K, ae, bA, B, dH, r, dS, iO, nM, eM, nB, Km, bt, X); #c1(MT1H) c2(NP_005942) c3(metallothionein-1H) c4(160575) c5( ) c6( ) c7(bL, T, eM, dH, FG, aW, iW, X, aT, ag, dL, Km, K, fr, PJ, iR, eL, B, dS); #c1(MT1M) c2(NP_789846) c3(metallothionein-1M) c4(252401) c5(252402, 252403, 252404, 252405, 252406, 252407) c6( ) c7(bL, eM, dH, FG, iW, X, aT, Km, K, PJ, B, dS); #c1(MT1X) c2(NP_005943) c3(metallothionein-1X) c4(160576) c5(160577, 160578, 160579, 160580, 160581, 160582) c6( ) c7(bL, eY, B, eM, dH, FG, eL, iW, ff, aT, dL, Km, en, PJ, ae, X, ad, dS); #c1(MT2A) c2(NP_005944) c3(metallothionein-2) c4(160583, 160584) c5(160585, 160586, 160587, 160588, 160589, 160590, 160591, 160592, 160593, 160594, 160595, 160596) c6( ) c7(bL, G, Ve, T, dD, FG, ea, bmk, ht, jh, aA, bB, vr, bS, dG, et, uE, Gn, v, eq, ad, no, yt, aT, dL, ji, K, jo, rz, ae, eL, aiB, aMG, aW, eH, eZ, aF, Z, t, nC, eF, ac, bE, gZ, QF, dy, m, rA, B); #c1(MT3) c2(NP_005945) c3(metallothionein-3) c4(160597) c5(160598, 160599, 160600, 160601, 160602, 160603) c6( ) c7(G, T, wi, Ol, bS, et, ci, ad, Bl, aT, Lv, SH, dL, H, eL, s, EV, ff, vs, aF, en, g, Z, hg, ck, dS, eM, mz, my, gT, bt, L); #c1(MT4) c2(NP_116324) c3(metallothionein-4) c4(226158) c5(226159, 226160, 226161, 226162, 226163, 226164) c6( ) c7(eM); #c1(MTA1) c2(NP_001190187) c3(metastasis-associated protein MTA1 isoform MTA1s) c4(80333) c5(80334, 80335, 80336, 80337, 80338) c6( ) c7(T, fM, zX, jh, aA, lD, n, ci, pd, q, ad, hX, dP, aE, rJ, pX, aT, K, hu, fb, ae, Yi, asp, qt, aW, Y, anx, ff, aft, r, aq, en, cl, g, t, cM, bz, iR, W, eM, AM, m, im, it, B); #c1(MTA1) c2(NP_004680) c3(metastasis-associated protein MTA1 isoform MTA1) c4(148799) c5(148800, 148801, 148802, 148803, 148804, 148805) c6( ) c7(T, fM, zX, jh, aA, ID, n, ci, pd, q, ad, hX, dP, aE, rJ, pX, aT, K, hu, fb, ae, Yi, asp, qt, aW, Y, anx, ff, aft, r, aq, en, cl, g, t, cM, bz, iR, W, eM, AM, m, im, it, B); #c1(MTA1) c2(XP_011535613) c3(metastasis-associated protein MTA1 isoform X11) c4( ) c5(332859, 332860) c6( ) c7(T, fM, zX, jh, aA, lD, n, ci, pd, q, ad, hX, dP, aE, rJ, pX, aT, K, hu, fb, ae, Yi, asp, qt, aW, Y, anx, ff, aft, r, aq, en, cl, g, t, cM, bz, iR, W, eM, AM, m, im, it, B); #c1(MTA1) c2(XP_011535614) c3(metastasis-associated protein MTA1 isoform X12) c4(332861, 332862) c5( ) c6( ) c7(T, fM, zX, jh, aA, lD, n, ci, pd, q, ad, hX, dP, aE, rJ, pX, aT, K, hu, fb, ae, Yi, asp, qt, aW, Y, anx, ff, aft, r, aq, en, cl, g, t, cM, bz, iR, W, eM, AM, m, im, it, B); #c1(MTA1) c2(XP_011535615) c3(metastasis-associated protein MTA1 isoform X13) c4( ) c5(332863, 332864, 332865, 332866, 332867, 332868, 332869, 332870, 332871, 332872, 332873) c6( ) c7(T, fM, zX, jh, aA, lD, n, ci, pd, q, ad, hX, dP, aE, rJ, pX, aT, K, hu, fb, ae, Yi, asp, qt, aW, Y, anx, ff, aft, r, aq, en, cl, g, t, cM, bz, iR, W, eM, AM, m, im, it, B); #c1(MTA1) c2(XP_011535617) c3(metastasis-associated protein MTA1 isoform X15) c4( ) c5(332874) c6( ) c7(T, fM, zX, jh, aA, lD, n, ci, pd, q, ad, hX, dP, aE, rJ, pX, aT, K, hu, fb, ae, Yi, asp, qt, aW, Y, anx, ff, aft, r, aq, en, cl, g, t, cM, bz, iR, W, eM, AM, m, im, it, B); #c1(MTA2) c2(NP_004730) c3(metastasis-associated protein MTA2) c4(149130, 149131) c5(149132, 149133, 149134, 149135, 149136, 149137, 149138, 149139, 149140, 149141, 149142, 149143, 149144, 149145, 149146, 149147) c6( ) c7(T, dA, aA, bB, n, Vs, dP, aT, dL, K, eL, aW, cgq, eZ, aFr, kp, aF, BG, bz, eM, bE, eB, zA); #c1(MTA3) c2(NP_065795) c3(metastasis-associated protein MTA3 isoform b) c4(205480) c5(205481, 205482, 205483, 205484, 205485, 205486) c6( ) c7(T, fM, eM, aW, jh, aT, aj, m, g, t, bz); #c1(MTA3) c2(XP_005264513) c3(metastasis-associated protein MTA3 isoform X1) c4(278976, 278977) c5(278978, 278979, 278980, 278981, 278982, 278983, 278984, 278985, 278986, 278987, 278988, 278989) c6( ) c7(T, fM, eM, aW, jh, aT, aj, m, g, t, bz); #c1(MTAP) c2(NP_002442) c3(S-methyl-5′-thioadenosine phaspharylase) c4(128490) c5(128491, 128492, 128493, 128494, 128495, 128496) c6( ) c7(bL, sc, T, kh, cgs, aC, anl, pf, aw, jh, aA, cz, aj, ci, eA, ad, eJ, x, ib, aE, pX, rA, kH, aT, K, dQ, fb, ae, Zm, eu, je, s, anv, Jl, aW, Y, MQ, eH, nO, ff, nY, Ej, aF, en, g, eF, bz, ck, iM, Dy, eM, bP, bE, hk, azT, cgr, k, bt, ik, B); #c1(MTBP) c2(NP_071328) c3(mdm2-binding protein) c4(211001) c5(211002, 211003, 211004, 211005, 211006, 211007) c6( ) c7(T, fM, aW, eH, aT, j, eF); #c1(MTCH1) c2(NP_001258570) c3(mitochondrial carrier homolog 1 PSAP-LL) c4(96146, 96147) c5(96148, 96149, 96150, 96151, 96152, 96153, 96154, 96155, 96156, 96157, 96158, 96159) c6( ) c7(AK, vU, T, eG, afu, vi); #c1(MTCH1) c2(NP_055156) c3(mitochondrial carrier homolog 1 PSAP-LS) c4(179491, 179492, 179493) c5(179494, 179495, 179496, 179497, 179498, 179499, 179500, 179501, 179502, 179503, 179504, 179505, 179506, 179507, 179508, 179509, 179510, 179511, 179512) c6( ) c7(AK, vU, T, eG, afu, vi); #c1(MTCH1) c2(XP_005249036) c3(mitochondrial carrier homolog 1 isoform X2) c4(268872, 268873) c5(268874, 268875, 268876, 268877, 268878, 268879, 268880) c6( ) c7(AK, vU, T, eG, afu, vi); #c1(MTCH1) c2(XP_011512752) c3(mitochondrial carrier homolog 1 isoform X3) c4(303770) c5(303771, 303772, 303773, 303774, 303775, 303776, 303777, 303778, 303779, 303780) c6( ) c7(AK, vU, T, eG, afu, vi); #c1(MTCH2) c2(NP_055157) c3(mitochondrial carrier homolog 2) c4(179513) c5(179514, 179515, 179516, 179517, 179518) c6( ) c7(bL, bM, T, e, aq, v, fq); #c1(MTCL1) c2(NP_056025) c3(microtubule cross-linking factor 1) c4(185215) c5(185216, 185217, 185218, 185219, 185220) c6( ) c7(ht, ff, cd, ac, en); #c1(MTCL1) c2(XP_005258155) c3(microtubule cross-linking factor 1 isoform X2) c4( ) c5(275527) c6( ) c7(ht, ff, cd, ac, en); #c1(MTCL1) c2(XP_005258156) c3(microtubule cross-linking factor 1 isoform X4) c4(275528) c5(275529, 275530, 275531, 275532, 275533, 275534) c6( ) c7(ht, ff, cd, ac, en); #c1(MTCL1) c2(XP_011523942) c3(microtubule cross-linking factor 1 isoform X1) c4(318484) c5(318485, 318486, 318487, 318488, 318489, 318490) c6( ) c7(ht, ff, cd, ac, en); #c1(MTCL1) c2(XP_011523943) c3(microtubule cross-linking factor 1 isoform X3) c4( ) c5(318491) c6( ) c7(ht, ff, cd, ac, en); #c1(MTCP1) c2(NP_001018025) c3(protein P13 MTCP-1) c4(26887) c5(26888, 26889, 26890, 26891, 26892, 26893, 26894, 26895, 26896, 26897, 26898, 26899, 26900) c6( ) c7(ck, fM, Kk, qh, kH, atf, aKO, ho, ad); #c1(MTDH) c2(NP_848927) c3(protein LYRIC) c4(254223) c5(254224, 254225, 254226, 254227, 254228, 254229) c6( ) c7(G, T, if, ht, jx, NT, aA, bB, n, uu, ci, qN, q, aR, ad, hX, eA, ke, aT, h, DO, K, hu, ae, d, aW, Y, ff, eH, r, aq, Ej, aF, agF, en, cl, eF, t, apx, cm, iK, iR, kP, eM, dB, bE, U, hL, m, qF, bt, it, B); #c1(MTERF1) c2(XP_006716189) c3(transcription termination factor 1, mitochondrial isoform X1) c4(290151, 290152) c5(290153, 290154, 290155, 290156, 290157, 290158, 290159, 290160, 290161, 290162, 290163, 290164) c6( ) c7(awN, kC, m); #c1(MTF1) c2(XP_011539794) c3(metal regulatory transcription factor 1 isoform X1) c4(338002, 338003) c5(338004, 338005, 338006, 338007, 338008, 338009, 338010) c6( ) c7(nM, Db, nB, gT, B, bN); #c1(MTF1) c2(XP_011539795) c3(metal regulatory transcription factor 1 isoform X2) c4( ) c5(338011, 338012, 338013, 338014, 338015, 338016) c6( ) c7(nM, Db, nB, gT, B, bN); #c1(MTFMT) c2(NP_640335) c3(methionyl-tRNA formyltransferase, mitochondrial) c4(238425) c5(238426, 238427, 238428, 238429, 238430, 238431, 238432, 238433, 238434, 238435) c6( ) c7(T, ajU, cgt, bxl, bZ, ae, ad); #c1(MTFP1) c2(NP_001003704) c3(mitochondrial fission process protein 1 isoform b) c4(20001) c5(20002, 20003, 20004, 20005, 20006, 20007) c6( ) c7(eR); #c1(MTFP1) c2(NP_057582) c3(mitochondrial fission process protein 1 isoform a) c4(191470) c5(191471, 191472, 191473, 191474, 191475, 191476) c6( ) c7(eR); #c1(MTG1) c2(NP_612393) c3(mitochondrial ribosome-associated GTPase 1) c4(236342, 236343, 236344) c5(236345, 236346, 236347, 236348, 236349, 236350, 236351, 236352, 236353, 236354, 236355, 236356, 236357, 236358, 236359, 236360, 236361, 236362) c6( ) c7(T, jv, lV, ha, bAp, bO, cz, cR, n, aj, dG, zh, bB, qN, qy, kv, q, J, cbh, ad, ai, eA, av, b, aji, xE, ft, hd, aWc, sO, aE, aeO, aT, aU, DO, jy, iY, K, ae, yo, B, aeR, wr, Wi, Y, aW, Ls, ff, eZ, r, Mz, gl, aq, Hu, en, Tp, cm, boD, bz, dr, qa, EJ, bF, es, byl, Ew, jx, cA, iA, bE, bP, bo, cj, mf, i, bt, bAs, cgu, ao); #c1(MTHFD1) c2(NP_005947) c3(C-1-tetrahydrofolate synthase, cytoplasmic) c4(160604, 160605) c5(160606, 160607, 160608, 160609, 160610, 160611, 160612, 160613, 160614, 160615, 160616, 160617) c6( ) c7(ng, T, jv, dD, fR, sQ, arQ, aA, bB, v, uu, eq, q, ad, x, av, Na, ft, fS, MP, aT, Nc, bK, IQ, an, ae, af, eu, bf, hG, aW, caD, r, Ll, Lk, g, Z, t, uC, bz, f, bN, ck, sn, ac, eM, lp, bE, ag, wE, bm, uo, at, ut, k, m, bD, y); #c1(MTHFD1L) c2(NP_001229696) c3(monofunctional C1-tetrahydrofolate synthase, mitochondrial isoform 1 precursor) c4(84826) c5( ) c6( ) c7(A, ac, af, aw, j, f, fg, fK, Gc); #c1(MTHFD1L) c2(NP_001229697) c3(monofunctional C1-tetrahydrofolate synthase, mitochondrial isoform 3) c4(84827) c5( ) c6( ) c7(A, ac, af, aw, j, f, fq, fK, Gc); #c1(MTHFD1L) c2(NP_001229698) c3(monofunctional C1-tetrahydrofolate synthase, mitochondrial isoform 4 precursor) c4(84828, 84829, 84830) c5(84831, 84832, 84833, 84834, 84835, 84836, 84837, 84838, 84839, 84840, 84841, 84842, 84843, 84844, 84845, 84846, 84847, 84848, 84849, 84850, 84851, 84852, 84853, 84854) c6( ) c7(A, ac, af, aw, j, f, fq, fK, Gc); #c1(MTHFD1L) c2(NP_056255) c3(monofunctional C1-tetrahydrofolate synthase, mitochondrial isoform 2 precursor) c4(186764, 186765) c5(186766, 186767, 186768, 186769, 186770, 186771) c6( ) c7(A, ac, af, aw, j, f, fq, fK, Gc); #c1(MTHFD1L) c2(XP_005266967) c3(monofunctional C1-tetrahydrofolate synthase, mitochondrial isoform X1) c4( ) c5(280547, 280548, 280549, 280550, 280551) c6( ) c7(A, ac, af, aw, j, f, fq, fK, Gc); #c1(MTHFD1L) c2(XP_005266968) c3(monofunctional C1-tetrahydrofolate synthase, mitochondrial isoform X12) c4( ) c5(280552, 280553, 280554, 280555, 280556, 280557, 280558, 280559, 280560, 280561, 280562, 280563, 280564, 280565, 280566, 280567, 280568, 280569, 280570) c6( ) c7(A, ac, af, aw, j, f, fq, fK, Gc); #c1(MTHFD1L) c2(XP_011534033) c3(monofunctional C1-tetrahydrofolate synthase, mitochondrial isoform X5) c4(330207, 330208) c5( ) c6( ) c7(A, ac, af, aw, j, f, fq, fK, Gc); #c1(MTHFD1L) c2(XP_011534036) c3(monofunctional C1-tetrahydrofolate synthase, mitochondrial isoform X7) c4(330209, 330210) c5(330211, 330212, 330213, 330214, 330215, 330216) c6( ) c7(A, ac, af, aw, j, f, fq, fK, Gc); #c1(MTHFD2) c2(NP_006627) c3(bifunctional methylenetetrahydrofolate dehydrogenase/cyclohydrolase, mitochondrial precursor) c4(166713, 166714, 166715) c5(166716, 166717, 166718, 166719, 166720, 166721, 166722) c6( ) c7(Na, T, lp, aW, aT, at, Nc, dL, bD, B); #c1(MTHFD2) c2(XP_006711987) c3(bifunctional methylenetetrahydrofolate dehydrogenase/cyclohydrolase, mitochondrial isoform X1) c4( ) c5(286313, 286314, 286315, 286316, 286317, 286318, 286319, 286320, 286321, 286322, 286323) c6( ) c7(Na, T, lp, aW, aT, at, Nc, dL, bD, B); #c1(MTHFR) c2(XP_011539797) c3(methylenetetrahydrofolate reductase isoform X3) c4(338017) c5( ) c6( ) c7(T, ahf, ea, bO, cgC, fd, ci, aY, bpl, Gt, aE, dV, JT, hu, hH, az, nY, YG, vs, aUG, cgz, fT, Jr, nB, lp, wE, Ji, cj, cX, k, eg, bzN, aaJ, ht, cQ, aj, aBP, sW, Gw, aaL, mR, sp, vu, ge, fe, aMJ, zZ, hq, vU, bbz, dB, se, vL, aoB, E, bFV, jv, aA, cz, bX, Eh, q, oT, akU, cy, rz, bqe, eu, bA, arl, bf, iy, eS, cl, pt, pb, cT, rR, iM, tW, ua, ac, bpv, mG, Nb, hr, tz, bt, gV, iW, Jy, jh, dG, uu, fu, ad, wD, hX, vJ, abq, oW, qV, IQ, BO, cH, cW, ff, aLI, dq, bpA, Lk, iV, bz, iq, DT, qe, ag, dX, Pk, IC, ne, bM, qo, aSz, if, e, bB, cL, ame, ur, ss, ye, ip, x, Na, vV, vh, fS, Gr, azm, dH, Jl, fc, hl, cgv, kt, Au, NR, Eg, eE, eF, AV, vy, wx, dD, gU, n, oY, nA, aSv, awq, md, Mo, jz, ec, amJ, Bj, acA, gd, eV, hn, DU, aBR, hi, cgB, MX, A, PX, AQ, atf, cgF, ajo, vo, bpx, aap, bP, cA, Pl, agl, hL, at, ut, fL, ER, sa, B, vQ, aCw, wL, arQ, eX, fF, vv, v, Qo, V, Mp, aqt, sl, aDr, ae, afs, t, sK, el, ck, UP, gX, yv, vi, HQ, dM, oR, acU, eq, adg, hd, py, qh, LA, hD, sj, d, je, hG, gW, Z, jb, Hv, dr, bLL, bF, gk, yE, gZ, Tw, y, cgD, pC, ng, aC, UH, fR, al, cgG, lj, gf, qj, M, K, wt, dF, eL, mH, aAX, bpR, caD, qS, mQ, wF, g, ve, uC, aaS, ou, aBO, U, uo, vn, m, P, FW, xu, sQ, sw, aw, NT, fN, BH, pM, abQ, KL, ft, vC, wb, Vb, ny, bsK, cgH, sg, Ff, blP, ack, wd, aUP, cM, Zj, ar, kT, W, afc, aiS, Qz, Pr, it, ach, fM, wj, AL, fG, oe, jx, aSA, wo, j, aqf, uW, eA, J, o, er, lg, hb, nX, yg, Nc, hq, aRR, kl, Y, r, cfm, en, wA, iK, bN, cgy, sn, c, cS, rK, dy, fD, lw, gT, gx, sY, kh, Gl, id, aZ, Gd, bS, ah, hF, gb, fU, tt, cx, adx, vl, WW, uX, BN, IR, Vx, cr, hp, Pd, iR, qa, cgE, cgA, X, cP, ei, hE, st, pf, fV, eh, aiC, Jx, mF, aR, aEQ, XW, dY, il, ZX, qM, dQ, pk, eN, Bp, hm, zQ, LC, aW, da, lm, aVc, eM, iT, sU, sv, bqh, pw, cgw, bpH, vl, bzb, ez, mN, fr, et, qN, ai, qg, gl, h, dL, aDC, ux, he, Df, Gc, wC, qY, aq, Ll, dw, bJ, vD, bpC, gY, hk, bm, gw, uz, eQ, bD, arg, bL, eR, dK, yk, rf, sM, cR, hy, C, bpW, ga, uT, aoA, aT, HG, vH, dz, bK, an, qk, af, bkl, qw, Uf, s, ND, iU, f, sS, wg, pZ, fP, aJY, mf, ij, cgx, uq, Zl, qb, ha, vr, tK, mC, kL, av, nH, F, ib, sO, NS, ts, dm, vw, fb, iL, eZ, yy, gl, aFr, aF, S, eK, es, apM, aAS, bE, pE, aS, GF, gq, us); #c1(MTHFR) c2(XP_011539798) c3(methylenetetrahydrofolate reductase isoform X4) c4( ) c5(338018, 338019, 338020, 338021, 338022, 338023, 338024, 338025) c6( ) c7(T, ahf, ea, bO, cgC, fd, ci, aY, bpl, Gt, aE, dV, JT, hu, hH, az, nY, YG, vs, aUG, cgz, fT, Jr, nB, lp, wE, Ji, cj, cX, k, eg, bzN, aaJ, ht, cQ, aj, aBP, sW, Gw, aaL, mR, sp, vu, ge, fe, aMJ, zZ, hq, vU, bbz, dB, se, vL, aoB, E, bFV, jv, aA, cz, bX, Eh, q, oT, akU, cy, rz, bqe, eu, bA, arl, bf, iy, eS, cl, pt, pb, cT, rR, iM, tW, ua, ac, bpv, mG, Nb, hr, tz, bt, gV, iW, Jy, jh, dG, uu, fu, ad, wD, hX, vJ, abq, oW, qV, IQ, BO, cH, cW, ff, aLl, dq, bpA, Lk, iV, bz, iq, DT, qe, ag, dX, Pk, lC, ne, bM, qo, aSz, if, e, bB, cL, ame, ur, ss, ye, ip, x, Na, vV, vh, fS, Gr, azm, dH, Jl, fc, hl, cgv, kt, Au, NR, Eg, eE, eF, AV, vy, wx, dD, gU, n, oY, nA, aSv, awq, md, Mo, jz, ec, amJ, Bj, acA, gd, eV, hn, DU, aBR, hi, cgB, MX, A, PX, AQ, atf, cgF, ajo, vo, bpx, aap, bP, cA, Pl, agl, hL, at, ut, fL, ER, sa, B, vQ, aCw, wL, arQ, eX, fF, vv, v, Qo, V, Mp, aqt, sl, aDr, ae, afs, t, sK, el, ck, UP, gX, yv, vi, HQ, dM, oR, acU, eq, adg, hd, py, qh, LA, hD, sj, d, je, hG, gW, Z, jb, Hv, dr, bLL, bF, gk, yE, gZ, Tw, y, cgD, pC, ng, aC, UH, fR, al, cgG, lj, gf, qj, M, K, wt, dF, eL, mH, aAX, bpR, caD, qS, mQ, wF, g, ve, uC, aaS, ou, aBO, U, uo, vn, m, P, FW, xu, sQ, sw, aw, NT, fN, BH, pM, abQ, KL, ft, vC, wb, Vb, ny, bsK, cgH, sq, Ff, blP, ack, wd, aUP, cM, Zj, ar, kT, W, afc, aiS, Qz, Pr, it, ach, fM, wj, AL, fG, oe, jx, aSA, wo, j, aqf, uW, eA, J, o, er, lg, hb, nX, yg, Nc, bq, aRR, kl, Y, r, cfm, en, wA, iK, bN, cgy, sn, c, cS, rK, dy, fD, lw, gT, gx, sY, kh, Gl, id, aZ, Gd, bS, ah, hF, gb, fU, tt, cx, adx, vl, WW, uX, BN, IR, Vx, cr, hp, Pd, iR, qa, cgE, cgA, X, cP, ei, hE, st, pf, fV, eh, aiC, Jx, mF, aR, aEQ, XW, dY, il, ZX, qM, dQ, pk, eN, Bp, hm, zQ, LG, aW, da, lm, aVc, eM, iT, sU, sv, bqh, pw, cgw, bpH, vl, bzb, ez, mN, fr, et, qN, ai, qg, ql, h, dL, aDC, ux, he, Df, Gc, wC, qY, aq, Ll, dw, bJ, vD, bpC, gY, hk, bm, gw, uz, eQ, bD, arg, bL, eR, dK, yk, rf, sM, cR, hy, C, bpW, ga, uT, aoA, aT, HG, vH, dz, bK, an, qk, af, bkl, qw, Uf, s, ND, iU, f, sS, wg, pZ, fP, aJY, mf, ij, cgx, uq, Zl, qb, ha, vr, tK, mC, kL, av, nH, F, ib, sO, NS, ts, dm, vw, fb, iL, eZ, yy, gl, aFr, aF, S, eK, es, apM, aAS, bE, pE, aS, GF, gq, us); #c1(MTHFS) c2(NP_006432) c3(5-formyltetrahydrofolate cyclo-ligase isoform a) c4(165196) c5(165197, 165198, 165199, 165200, 165201, 165202) c6( ) c7(Na, fM, eR, lp, iW, e, r, Nc, t); #c1(MTIF2) c2(NP_001005369) c3(translation initiation factor IF-2, mitochondrial precursor) c4(21526, 21527, 21528, 21529, 21530, 21531) c5(21532, 21533, 21534, 21535, 21536, 21537, 21538, 21539, 21540, 21541, 21542, 21543, 21544, 21545, 21546, 21547, 21548, 21549, 21550, 21551, 21552, 21553, 21554, 21555, 21556, 21557, 21558, 21559, 21560, 21561, 21562, 21563, 21564, 21565, 21566, 21567, 21568, 21569, 21570, 21571, 21572, 21573, 21574, 21575, 21576, 21577, 21578) c6( ) c7(bL); #c1(MTIF3) c2(XP_011533265) c3(translation initiation factor IF-3, mitochondrial isoform X1) c4(329442) c5(329443, 329444, 329445, 329446, 329447, 329448, 329449, 329450, 329451, 329452, 329453, 329454, 329455, 329456, 329457, 329458, 329459, 329460) c6( ) c7(bL, cm, fq, v, an); #c1(MTL5) c2(NP_001034745) c3(tesmin isoform b) c4(32192) c5(32193, 32194, 32195, 32196, 32197, 32198, 32199, 32200, 32201, 32202, 32203, 32204) c6( ) c7(aw); #c1(MTL5) c2(NP_004914) c3(tesmin isoform a) c4(150722) c5(150723, 150724, 150725, 150726, 150727, 150728) c6( ) c7(aw); #c1(MTL5) c2(XP_011543705) c3(tesmin isoform X1) c4(342784) c5( ) c6( ) c7(aw); #c1(MTM1) c2(XP_011529475) c3(myotubularin isoform X1) c4(324891, 324892, 324893, 324894) c5(324895, 324896, 324897, 324898, 324899, 324900, 324801, 324902, 324903, 324904, 324905, 324906, 324907, 324908, 324909, 324910, 324911, 324912, 324913, 324914, 324915, 324916, 324917, 324918, 324919, 324920, 324921, 324922, 324923) c6( ) c7(T, cgK, cgJ, KW, aA, fu, cgl, bX, UX, no, oj, Ak, bl, K, bU, li, xz, Ad, dr, dR, mx, aWn, CD, ei); #c1(MTMR1) c2(NP_003819) c3(myotubularin-related protein 1) c4(141126, 141127, 141128) c5(141129, 141130, 141131, 141132, 141133, 141134, 141135, 141136, 141137, 141138, 141139, 141140, 141141, 141142, 141143, 141144, 141145, 141146, 141147) c6( ) c7(xz, dR); #c1(MTMR1) c2(XP_011529510) c3(myotubularin-related protein 1 isoform X7) c4(325042) c5( ) c6( ) c7(xz, dR); #c1(MTMR1) c2(XP_011529512) c3(myotubularin-related protein 1 isoform X9) c4(325043) c5(325044, 325045, 325046) c6( ) c7(xz, dR); #c1(MTMR11) c2(XP_011507401) c3(myotubularin-related protein 11 isoform X4) c4(297267) c5(297268, 297269, 297270, 297271, 297272) c6( ) c7(ha, T, q, bv, r); #c1(MTMR11) c2(XP_011507402) c3(myotubularin-related protein 11 isoform X5) c4(297273, 297274) c5(297275, 297276, 297277, 297278, 297279, 297280, 297281, 297282, 297283, 297284, 297285) c6( ) c7(ha, T, q, bv, r); #c1(MTMR12) c2(NP_001035536) c3(myotubularin-related protein 12 isoform 1) c4(32887) c5(32888, 32889, 32890, 32891, 32892, 32893) c6( ) c7(xz, UX); #c1(MTMR12) c2(NP_001281272) c3(myotubularin-related protein 12 isoform 1) c4(111662) c5(111663, 111664, 111665, 111666, 111667, 111668) c6( ) c7(xz, UX); #c1(MTMR12) c2(NP_001281273) c3(myotubularin-related protein 12 isoform 3) c4(111669) c5(111670, 111671, 111672, 111673, 111674, 111675) c6( ) c7(xz, UX); #c1(MTMR14) c2(NP_001070993) c3(myotubularin-related protein 14 isoform 2) c4(35241) c5(35242, 35243, 35244, 35245, 35246, 35247, 35248) c6( ) c7(xz, bhe, Km, oj, UX); #c1(MTMR14) c2(NP_001070994) c3(myotubularin-related protein 14 isoform 1) c4(35249, 35250) c5(35251, 35252, 35253, 35254, 35255, 35256) c6( ) c7(xz, bhe, Km, oj, UX); #c1(MTMR14) c2(NP_071930) c3(myotubularin-related protein 14 isoform 3) c4(212368) c5(212369, 212370, 212371, 212372, 212373, 212374, 212375, 212376, 212377, 212378, 212379) c6( ) c7(xz, bhe, Km, oj, UX); #c1(MTMR2) c2(NP_057240) c3(myotubularin-related protein 2 isoform 1) c4(189670, 189671, 189672) c5(189673, 189674, 189675, 189676, 189677, 189678, 189679, 189680, 189681, 189682, 189683, 189684, 189685, 189686, 189687) c6( ) c7(ql, Pt, agU, xz, U, bbH, bk, fu, cgl, bU, dw, bX, UX); #c1(MTMR2) c2(NP_958438) c3(myotubularin-related protein 2 isoform 2) c4( ) c5(262099, 262100, 262101, 262102, 262103, 262104, 262105, 262106, 262107, 262108, 262109) c6( ) c7(ql, Pt, agU, xz, U, bbH, bk, fu, cgl, bU, dw, bX, UX); #c1(MTMR2) c2(XP_011541361) c3(myotubularin-related protein 2 isoform X2) c4(339950) c5( ) c6( ) c7(ql, Pt, agU, xz, U, bbH, bk, fu, cgl, bU, dw, bX, UX); #c1(MTMR3) c2(NP_066576) c3(myotubularin-related protein 3 isoform c) c4(207450) c5(207451, 207452, 207453, 207454, 207455, 207456) c6( ) c7(av, T, aA, aF, ey, K, bz); #c1(MTMR3) c2(NP_694690) c3(myotubularin-related protein 3 isoform a) c4(245353) c5(245354, 245355, 245356, 245357, 245358, 245359, 245360, 245361, 245362, 245363) c6( ) c7(av, T, aA, aF, ey, K, bz); #c1(MTMR3) c2(NP_694691) c3(myotubularin-related protein 3 isoform b) c4(245364, 245365) c5(245366, 245367, 245368, 245369, 245370, 245371, 245372, 245373, 245374, 245375, 245376, 245377) c6( ) c7(av, T, aA, aF, ey, K, bz); #c1(MTMR3) c2(XP_005261866) c3(myotubularin-related protein 3 isoform X6) c4( ) c5(277646) c6( ) c7(av, T, aA, aF, ey, K, bz); #c1(MTMR4) c2(XP_006722231) c3(myotubularin-related protein 4 isoform X1) c4( ) c5(294655, 294656, 294657, 294658, 294659, 294660) c6( ) c7(ki, bl); #c1(MTMR4) c2(XP_011523762) c3(myotubularin-related protein 4 isoform X3) c4(318258) c5( ) c6( ) c7(ki, bl); #c1(MTMR6) c2(NP_004676) c3(myotubularin-related protein 6) c4(148745, 148746, 148747) c5(148748, 148749, 148750, 148751, 148752, 148753, 148754, 148755, 148756, 148757, 148758, 148759, 148760, 148761, 148762, 148763, 148764, 148765, 148766, 148767, 148768, 148769, 148770) c6( ) c7(T); #c1(MTMR6) c2(XP_011533608) c3(myotubularin-related protein 6 isoform X1) c4(329719) c5( ) c6( ) c7(T); #c1(MTMR6) c2(XP_011533609) c3(myotubularin-related protein 6 isoform X2) c4( ) c5(329720) c6( ) c7(T); #c1(MTMR7) c2(NP_004677) c3(myotubularin-related protein 7) c4(148771, 148772) c5(148773, 148774, 148775, 148776, 148777, 148778, 148779, 148780, 148781, 148782, 148783, 148784) c6( ) c7(fq, dS); #c1(MTMR7) c2(XP_011542995) c3(myotubularin-related protein 7 isoform X3) c4(341686) c5(341687, 341688, 341689, 341690, 341691, 341692) c6( ) c7(fq, dS); #c1(MTMR8) c2(NP_060147) c3(myotubularin-related protein 8) c4(194459, 194460, 194461, 194462) c5(194463, 194464, 194465, 194466, 194467, 194468, 194469, 194470, 194471, 194472, 194473, 194474, 194475, 194476, 194477, 194478, 194479, 194480, 194481, 194482, 194483, 194484, 194485, 194486) c6( ) c7(W); #c1(MTMR9) c2(NP_056273) c3(myotubularin-related protein 9) c4(186849) c5(186850, 186851, 186852, 186853, 186854, 186855) c6( ) c7(v, cz); #c1(MTNR1A) c2(NP_005949) c3(melatonin receptor type 1A) c4(160618) c5(160619, 160620, 160621, 160622, 160623, 160624) c6( ) c7(bL, FG, iW, PJ, HE, aT, rz, af, B, VX, lR, dH, aW, ff, HL, en, bQ, eF, bN, dS, eM, Km, y, X); #c1(MTNR1B) c2(NP_005950) c3(melatonin receptor type 1B) c4(160625) c5(160626, 160627, 160628, 160629, 160630, 160631) c6( ) c7(bL, dD, EG, aZ, Nt, GP, aj, bS, dG, et, v, eq, J, HE, no, aT, h, dL, wb, ji, rz, eL, kl, VX, aMG, aW, Y, Mz, HL, bQ, Z, bN, iP, mG, mg, mf, ei, y); #c1(MTO1) c2(NP_001116698) c3(protein MTO1 homolog, mitochondrial isoform c) c4(43941) c5(43942, 43943, 43944, 43945, 43946, 43947) c6( ) c7(bL, T, cc, SE, aW, cgL, mG, aT, bZ, vc); #c1(MTO1) c2(NP_036255) c3(protein MTO1 homolog, mitochondrial isoform a) c4(172662) c5(172663, 172664, 172665, 172666, 172667, 172668) c6( ) c7(bL, T, cc, SE, aW, cgL, mG, aT, bZ, vc); #c1(MTO1) c2(NP_598400) c3(protein MTO1 homolog, mitochondrial isoform b) c4(235503, 235504) c5(235505, 235506, 235507, 235508, 235509, 235510, 235511, 235512, 235513, 235514, 235515, 235516) c6( ) c7(bL, T, cc, SE, aW, cgL, mG, aT, bZ, vc); #c1(MTO1) c2(XP_006715508) c3(protein MTO1 homolog, mitochondrial isoform X1) c4(289603) c5( ) c6( ) c7(bL, T, cc, SE, aW, cgL, mG, aT, bZ, vc); #c1(MTO1) c2(XP_011534027) c3(protein MTO1 homolog, mitochondrial isoform X3) c4( ) c5(330201, 330202, 330203, 330204, 330205, 330206) c6( ) c7(bL, T, cc, SE, aW, cgL, mG, aT, bZ, vc); #c1(MTPAP) c2(NP_060579) c3(poly(A) RNA polymerase, mitochondrial precursor) c4(196638, 196639, 196640, 196641) c5(196642, 196643, 196644, 196645, 196646, 196647, 196648, 196649, 196650, 196651, 196652, 196653, 196654, 196655, 196656, 196657, 196658, 196659, 196660, 196661, 196662, 196663, 196664, 196665) c6( ) c7(ck, A, d, dA, af, Y, iW, r, wq, dT, awK, aj, zG, uF, v, zl, cgM, cd, ao); #c1(MTPN) c2(NP_665807) c3(myotrophin) c4(241709) c5(241710, 241711, 241712, 241713, 241714, 241715) c6( ) c7(cd, cz); #c1(MTR) c2(NP_000245) c3(methionine synthase isoform 1) c4(5590) c5(5591, 5592, 5593, 5594, 5595, 5596) c6( ) c7(ng, T, aC, pf, fV, if, e, al, fd, bB, ur, ci, mF, aR, ip, x, Na, aE, iX, fS, M, dV, K, hu, dQ, dF, eL, eN, aW, caD, cgv, da, g, eF, uC, cgz, eM, lp, dc, wE, sv, k, P, dt, gU, dD, aw, ht, oY, mN, et, qN, abQ, md, bJf, Mo, ft, amJ, Bj, dL, ey, MX, fe, bJ, W, bP, gY, dB, bm, at, my, bD, Qz, it, B, cn, bL, fM, eR, mr, aA, sM, cz, hy, v, j, bX, V, q, eA, XX, MP, yg, aT, HG, vH, Nc, gz, bK, bq, an, avl, ae, bkl, af, eu, Uf, kl, s, ND, r, en, f, iK, bN, ck, ahN, rR, ac, bpv, mG, gX, dy, ij, bt, gV, id, iW, ha, jh, acU, bS, uu, eq, ad, av, abq, iL, d, BN, aAA, hG, ff, eZ, dq, bpA, aF, aDd, iV, Z, jb, bz, qa, bE, aS, Tw, GF, y, ne, us); #c1(MTR) c2(NP_001278868) c3(methionine synthase isoform 2) c4(110743) c5(110744, 110745, 110746, 110747, 110748, 110749) c6( ) c7(ng, T, aC, pf, fV, if, e, al, fd, bB, ur, ci, mF, aR, ip, x, Na, aE, iX, fS, M, dV, K, hu, dQ, dF, eL, eN, aW, caD, cgv, da, g, eF, uC, cgz, eM, lp, dc, wE, sv, k, P, dt, gU, dD, aw, ht, oY, mN, et, qN, abQ, md, bJf, Mo, ft, amJ, Bj, dL, ey, MX, fe, bJ, W, bP, gY, dB, bm, at, my, bD, Qz, it, B, cn, bL, fM, eR, mr, aA, sM, cz, hy, v, j, bX, V, q, eA, XX, MP, yg, aT, HG, vH, Nc, gz, bK, bq, an, avl, ae, bkl, af, eu, Uf, kl, s, ND, r, en, f, iK, bN, ck, ahN, rR, ac, bpv, mG, gX, dy, ij, bt, gV, id, iW, ha, jh, acU, bS, uu, eq, ad, av, abq, iL, d, BN, aAA, hG, ff, eZ, dq, bpA, aF, aDd, iV, Z, jb, bz, qa, bE, aS, Tw, GF, y, ne, us); #c1(MTR) c2(XP_005273198) c3(methionine synthase isoform X1) c4(284333, 284334) c5( ) c6( ) c7(ng, T, aC, pf, fV, if, e, al, fd, bB, ur, ci, mF, aR, ip, x, Na, aE, iX, fS, M, dV, K, hu, dQ, dF, eL, eN, aW, caD, cgv, da, g, eF, uC, cgz, eM, lp, dc, wE, sv, k, P, dt, gU, dD, aw, ht, oY, mN, et, qN, abQ, md, bJf, Mo, ft, amJ, Bj, dL, ey, MX, fe, bJ, W, bP, gY, dB, bm, at, my, bD, Qz, it, B, cn, bL, fM, eR, mr, aA, sM, cz, hy, v, j, bX, V, q, eA, XX, MP, yg, aT, HG, vH, Nc, gz, bK, bq, an, avl, ae, bkl, af, eu, Uf, kl, s, ND, r, en, f, iK, bN, ck, ahN, rR, ac, bpv, mG, gX, dy, ij, bt, gV, id, iW, ha, jh, acU, bS, uu, eq, ad, av, abq, iL, d, BN, aAA, hG, ff, eZ, dq, bpA, aF, aDd, iV, Z, jb, bz, qa, bE, aS, Tw, GF, y, ne, us); #c1(MTR) c2(XP_011542496) c3(methionine synthase isoform X5) c4(341021) c5(341022, 341023, 341024, 341025, 341026, 341027, 341028, 341029, 341030, 341031, 341032, 341033, 341034, 341035, 341036, 341037, 341038, 341039) c6( ) c7(ng, T, aC, pf, fV, if, e, al, fd, bB, ur, ci, mF, aR, ip, x, Na, aE, iX, fS, M, dV, K, hu, dQ, dF, eL, eN, aW, caD, cgv, da, g, eF, uC, cgz, eM, lp, dc, wE, sv, k, P, dt, gU, dD, aw, ht, oY, mN, et, qN, abQ, md, bJf, Mo, ft, amJ, Bj, dL, ey, MX, fe, bJ, W, bP, gY, dB, bm, at, my, bD, Qz, it, B, cn, bL, fM, eR, mr, aA, sM, cz, hy, v, j, bX, V, q, eA, XX, MP, yg, aT, HG, vH, Nc, gz, bK, bq, an, avl, ae, bkl, af, eu, Uf, kl, s, ND, r, en, f, iK, bN, ck, ahN, rR, ac, bpv, mG, gX, dy, ij, bt, gV, id, iW, ha, jh, acU, bS, uu, eq, ad, av, abq, iL, d, BN, aAA, hG, ff, eZ, dq, bpA, aF, aDd, iV, Z, jb, bz, qa, bE, aS, Tw, GF, y, ne, us); #c1(MTRF1) c2(XP_006719963) c3(peptide chain release factor 1, mitochondrial isoform X1) c4( ) c5(293108, 293109, 293110, 293111, 293112, 293113, 293114, 293115) c6( ) c7(aY, eR); #c1(MTRF1) c2(XP_011533617) c3(peptide chain release factor 1, mitochondrial isoform X2) c4(329723) c5(329724) c6( ) c7(aY, eR); #c1(MTRF1) c2(XP_011533618) c3(peptide chain release factor 1, mitochondrial isoform X3) c4(329725, 329726) c5(329727, 329728, 329729, 329730, 329731, 329732) c6( ) c7(aY, eR); #c1(MTRF1) c2(XP_011533619) c3(peptide chain release factor 1, mitochondrial isoform X4) c4( ) c5(329733) c6( ) c7(aY, eR); #c1(MTRF1) c2(XP_011533629) c3(peptide chain release factor 1, mitochondrial isoform X6) c4( ) c5(329734, 329735, 329736, 329737, 329738, 329739) c6( ) c7(aY, eR); #c1(MTRNR2L7) c2(NP_001177418) c3(humanin-like 7) c4(72792) c5(72793, 72794, 72795, 72796, 72797, 72798) c6( ) c7(v); #c1(MTRR) c2(NP_002445) c3(methionine synthase reductase isoform 1) c4( ) c5(128497, 128498, 128499, 128500, 128501) c6( ) c7(ng, T, aC, fV, ea, e, if, fd, bB, ur, mF, aR, ip, x, Na, aE, fS, M, K, dF, eL, aW, caD, da, g, uC, cgz, eM, cgN, lp, wE, cj, sv, k, P, dD, gU, aw, n, et, qN, cd, md, Bl, b, ft, i, Bj, hn, dL, ey, MX, A, fe, aq, Ll, bbz, W, gY, dB, bm, at, bD, Pr, B, it, aA, sM, cz, hy, v, j, V, q, eA, MP, aT, HG, vH, Nc, bK, an, ae, af, eu, bf, s, ND, Y, r, en, f, iK, bN, ck, rR, ac, UP, mG, dy, bt, iW, ha, acU, bS, eq, uu, ad, hX, av, fb, iL, ff, eZ, dq, Lk, aF, iV, Z, jb, bz, dr, bE, pE, aS, Tw, GF, y, BA); #c1(MTRR) c2(NP_076915) c3(methionine synthase reductase isoform 2) c4(214204, 214205) c5(214206, 214207, 214208, 214209, 214210, 214211, 214212) c6( ) c7(ng, T, aC, fV, ea, e, if, fd, bB, ur, mF, aR, ip, x, Na, aE, fS, M, K, dF, eL, aW, caD, da, g, uC, cgz, eM, cgN, lp, wE, cj, sv, k, P, dD, gU, aw, n, et, qN, cd, md, Bl, b, ft, i, Bj, hn, dL, ey, MX, A, fe, aq, Ll, bbz, W, gY, dB, bm, at, bD, Pr, B, it, aA, sM, cz, hy, v, j, V, q, eA, MP, aT, HG, vH, Nc, bK, an, ae, af, eu, bf, s, ND, Y, r, en, f, iK, bN, ck, rR, ac, UP, mG, dy, bt, iW, ha, acU, bS, eq, uu, ad, hX, av, fb, iL, ff, eZ, dq, Lk, aF, iV, Z, jb, bz, dr, bE, pE, aS, Tw, GF, y, BA); #c1(MTRR) c2(XP_006714537) c3(methionine synthase reductase isoform X3) c4( ) c5(287900) c6( ) c7(ng, T, aC, fV, ea, e, if, fd, bB, ur, mF, aR, ip, x, Na, aE, fS, M, K, dF, eL, aW, caD, da, g, uC, cgz, eM, cgN, lp, wE, cj, sv, k, P, dD, gU, aw, n, et, qN, cd, md, Bl, b, ft, i, Bj, hn, dL, ey, MX, A, fe, aq, Ll, bbz, W, gY, dB, bm, at, bD, Pr, B, it, aA, sM, cz, hy, v, j, V, q, eA, MP, aT, HG, vH, Nc, bK, an, ae, af, eu, bf, s, ND, Y, r, en, f, iK, bN, ck, rR, ac, UP, mG, dy, bt, iW, ha, acU, bS, eq, uu, ad, hX, av, fb, iL, ff, eZ, dq, Lk, aF, iV, Z, jb, bz, dr, bE, pE, aS, Tw, GF, y, BA); #c1(MTRR) c2(XP_011512347) c3(methionine synthase reductase isoform X4) c4(303023, 303024, 303025, 303026) c5(303027, 303028, 303029, 303030, 303031, 303032, 303033, 303034, 303035, 303036, 303037, 303038, 303039, 303040, 303041, 303042, 303043, 303044, 303045, 303046, 303047, 303048, 303049) c6( ) c7(ng, T, aC, fV, ea, e, if, fd, bB, ur, mF, aR, ip, x, Na, aE, fS, M, K, dF, eL, aW, caD, da, g, uC, cgz, eM, cgN, lp, wE, cj, sv, k, P, dD, gU, aw, n, et, qN, cd, md, Bl, b, ft, i, Bj, hn, dL, ey, MX, A, fe, aq, Ll, bbz, W, gY, dB, bm, at, bD, Pr, B, it, aA, sM, cz, hy, v, j, V, q, eA, MP, aT, HG, vH, Nc, bK, an, ae, af, eu, bf, s, ND, Y, r, en, f, iK, bN, ck, rR, ac, UP, mG, dy, bt, iW, ha, acU, bS, eq, uu, ad, hX, av, fb, iL, ff, eZ, dg, Lk, aF, iV, Z, jb, bz, dr, bE, pE, aS, Tw, GF, y, BA); #c1(MTSS1) c2(NP_001269903) c3(metastasis suppressor protein 1 isoform 3) c4(103117) c5(103118, 103119, 103120, 103121, 103122, 103123) c6( ) c7(jf, T, B, aW, Y, eL, iW, ff, r, aT, aA, dL, aF, ci, en, ae, q, ad); #c1(MTSS1) c2(NP_055566) c3(metastasis suppressor protein 1 isoform 2) c4(181961, 181962) c5(181963, 181964, 181965, 181966, 181967, 181968, 181969, 181970, 181971, 181972, 181973, 181974) c6( ) c7(jf, T, B, aW, Y, eL, iW, ff, r, aT, aA, dL, aF, ci, en, ae, q, ad); #c1(MTSS1) c2(XP_006716769) c3(metastasis suppressor protein 1 isoform X12) c4(290447) c5(290448) c6( ) c7(jf, T, B, aW, Y, eL, iW, ff, r, aT, aA, dL, aF, ci, en, ae, q, ad); #c1(MTSS1) c2(XP_011515710) c3(metastasis suppressor protein 1 isoform X16) c4( ) c5(308547, 308548, 308549, 308550, 308551) c6( ) c7(jf, T, B, aW, Y, eL, iW, ff, r, aT, aA, dL, aF, ci, en, ae, q, ad); #c1(MTTP) c2(NP_000244) c3(microsomal triglyceride transfer protein large subunit isoform 1 precursor) c4(5423, 5424, 5425, 5426) c5(5427, 5428, 5429, 5430, 5431, 5432, 5433, 5434, 5435, 5436, 5437, 5438, 5439, 5440, 5441, 5442, 5443, 5444, 5445, 5446, 5447, 5448, 5449, 5450, 5451, 5452, 5453, 5454, 5455, 5456, 5457, 5458, 5459, 5460, 5461, 5462, 5463, 5464, 5465, 5466, 5467, 5468, 5469, 5470, 5471, 5472, 5473, 5474, 5475, 5476, 5477, 5478, 5479, 5480, 5481, 5482, 5483, 5484, 5485, 5486, 5487, 5488, 5489, 5490, 5491, 5492, 5493, 5494, 5495, 5496, 5497, 5498, 5499, 5500, 5501, 5502, 5503, 5504, 5505, 5506, 5507, 5508, 5509, 5510, 5511, 5512, 5513, 5514, 5515, 5516, 5517, 5518, 5519, 5520, 5521, 5522, 5523, 5524, 5525, 5526, 5527, 5528, 5529, 5530, 5531, 5532, 5533, 5534, 5535, 5536, 5537, 5538, 5539, 5540, 5541, 5542, 5543, 5544, 5545, 5546, 5547, 5548, 5549, 5550, 5551, 5552, 5553, 5554, 5555, 5556, 5557, 5558, 5559, 5560, 5561, 5562, 5563, 5564, 5565, 5566, 5567, 5568, 5569, 5570, 5571, 5572, 5573, 5574, 5575, 5576, 5577, 5578, 5579, 5580, 5581, 5582, 5583, 5584, 5585, 5586, 5587, 5588) c6(5589) c7(T, ea, e, al, fd, GK, x, oB, pp, K, hu, dQ, pk, aW, fc, hl, bw, gn, k, dD, gp, aw, ht, n, aj, oY, et, pn, pe, ec, h, jy, ox, ZN, on, cgO, aq, bJ, oU, W, bP, Fi, ZG, B, bL, ZV, dA, oe, jx, cz, ol, v, j, C, nS, q, J, er, aT, dz, iU, oV, r, lo, hf, fi, ck, iM, mf, gT, bt, hl, ow, jh, oR, bS, eq, jE, fu, hF, hX, F, fX, ZU, fb, iL, d, je, et, dq, Z, dr, gZ, cP, ei); #c1(MTURN) c2(NP_690006) c3(maturin) c4(244718, 244719) c5(244720, 244721, 244722, 244723, 244724, 244725, 244726, 244727, 244728, 244729, 244730, 244731, 244732, 244733, 244734, 244735, 244736, 244737, 244738, 244739, 244740) c6( ) c7(aw); #c1(MTUS1) c2(NP_001001931) c3(microtubule-associated tumor suppressor 1 isoform 4) c4(19170) c5(19171, 19172, 19173, 19174, 19175, 19176, 19177) c6( ) c7(T, aW, eL, aw, bzi, aT, dL, ci, m, g, ae, B, ad); #c1(MTUS1) c2(NP_001159865) c3(microtubule-associated tumor suppressor 1 isoform 6) c4( ) c5(64863, 64864, 64865, 64866, 64867, 64868, 64869, 64870, 64871, 64872, 64873) c6( ) c7(T, aW, eL, aw, bzi, aT, dL, ci, m, g, ae, B, ad); #c1(MTUS1) c2(NP_065800) c3(microtubule-associated tumor suppressor 1 isoform 5) c4(205554) c5(205555, 205556, 205557, 205558, 205559, 205560) c6( ) c7(T, aW, eL, aw, bzi, aT, dL, ci, m, g, ae, B, ad); #c1(MTUS1) c2(XP_005273636) c3(microtubule-associated tumor suppressor 1 isoform X2) c4(284722, 284723, 284724, 284725) c5(284726, 284727, 284728, 284729, 284730, 284731) c6( ) c7(T, aW, eL, aw, bzi, aT, dL, ci, m, g, ae, B, ad); #c1(MTUS1) c2(XP_005273639) c3(microtubule-associated tumor suppressor 1 isoform X1) c4(284732) c5(284733, 284734, 284735, 284736, 284737, 284738, 284739, 284740, 284741, 284742) c6( ) c7(T, aW, eL, aw, bzi, aT, dL, ci, m, g, ae, B, ad); #c1(MTUS1) c2(XP_005273640) c3(microtubule-associated tumor suppressor 1 isoform X6) c4( ) c5(284743, 284744, 284745, 284746, 284747, 284748) c6( ) c7(T, aW, eL, aw, bzi, aT, dL, ci, m, g, ae, B, ad); #c1(MTUS2) c2(NP_001028774) c3(microtubule-associated tumor suppressor candidate 2 isoform a) c4(30649, 30650) c5(30651, 30652, 30653, 30654, 30655, 30656) c6( ) c7(bM, oe, cd); #c1(MTUS2) c2(NP_056048) c3(microtubule-associated tumor suppressor candidate 2 isoform b) c4(185282) c5(185283, 185284, 185285, 185286, 185287, 185288, 185289, 185290, 185291, 185292, 185293, 185294, 185295, 185296, 185297, 185298, 185299, 185300) c6( ) c7(bM, oe, cd); #c1(MTUS2) c2(XP_011533323) c3(microtubule-associated tumor suppressor candidate 2 isoform X3) c4(329464) c5( ) c6( ) c7(bM, oe, cd); #c1(MTX1) c2(NP_002446) c3(metaxin-1 isoform 1) c4(128502, 128503) c5(128504, 128505, 128506, 128507, 128508, 128509, 128510, 128511, 128512, 128513, 128514, 128515) c6( ) c7(ck, vU, x, ac, zr, bE, aW, Y, wE, cr, aT, sM, bB, jh, k, ij, y, aen); #c1(MTX1) c2(NP_942584) c3(metaxin-1 isoform 2) c4(260558) c5(260559, 260560, 260561, 260562, 260563, 260564) c6( ) c7(ck, vU, x, ac, zr, bE, aW, Y, wE, cr, aT, sM, bB, jh, k, ij, y, aen); #c1(MTX2) c2(NP_006545) c3(metaxin-2) c4(166128, 166129) c5(166130, 166131, 166132, 166133, 166134, 166135, 166136, 166137, 166138, 166139, 166140, 166141) c6( ) c7(bK); #c1(MUC1) c2(NP_001018016) c3(mucin-1 isoform 2 precursor) c4(26845, 26846) c5(26847, 26848, 26849, 26850, 26851, 26852, 26853, 26854, 26855, 26856, 26857, 26858) c6( ) c7(o0, bM, T, aC, fR, pf, if, bKw, bB, fd, ci, aY, fw, wa, aE, u, rJ, aEJ, pX, bW, Ds, K, hu, eL, cp, YL, ZH, iE, Jl, aW, bKt, aoo, az, fc, kt, g, as, cm, Qx, fT, eM, nB, iA, m, uL, in, iu, cE, sw, iB, ht, fN, n, aj, fr, ct, qN, zo, ai, eW, Vs, Bl, ft, jz, aoc, ju, cU, bKs, lG, dL, h, cgQ, bzs, mR, CN, aoX, MD, fe, kp, oU, at, it, B, Dw, bev, fM, dA, eR, fG, arQ, DV, aA, fF, zN, v, ze, uW, AO, q, ccP, aKc, eJ, RU, lg, hb, afQ, aT, ae, jf, kl, s, NE, nD, oV, cgR, Y, ev, iU, r, aZg, en, avb, cl, LV, t, Px, iK, ck, nM, iM, gX, fP, dy, EY, cgP, bt, KY, rA, ao, hS, nZ, Mb, Pt, aD, ha, rl, jh, vm, bS, oH, Gn, iJ, vN, ad, dP, nH, l, F, hd, ib, Db, ds, io, ji, uD, vl, uQ, je, BO, gt, ff, rM, So, aF, iV, Z, bz, LB, es, mO, bE, bE, y, X, BA); #c1(MUC1) c2(NP_001018017) c3(mucin-1 isoform 3 precursor) c4(26859) c5(26860, 26861, 26862, 26863, 26864, 26865) c6( ) c7(o0, bM, T, aC, fR, pf, if, bKw, bB, fd, ci, aY, fw, wa, aE, u, rJ, aEJ, PX, bW, Ds, K, hu, eL, cp, YL, ZH, iE, Jl, aW, bKt, aoo, az, fc, kt, g, as, cm, Qx, fT, eM, nB, iA, m, uL, in, iu, cE, sw, iB, ht, fN, n, aj, fr, et, qN, zo, ai, eW, Vs, Bl, ft, jz, aoc, ju, cU, bKs, lG, dL, h, cgQ, bzs, mR, CN, aoX, MD, fe, kp, oU, at, it, B, Dw, bev, fM, dA, eR, fG, arQ, DV, aA, fF, zN, v, ze, uW, AO, q, ccP, aKc, eJ, RU, lg, hb, afQ, aT, ae, jf, kl, s, NE, nO, oV, cgR, Y, ev, iU, r, aZg, en, avb, cl, LV, t, Px, iK, ck, nM, iM, gX, fP, dy, EY, cgP, bt, KY, rA, ao, hS, nZ, Mb, Pt, aD, ha, rl, jh, vm, bS, oH, Gn, iJ, vN, ad, dP, nH, l, F, hd, ib, Db, ds, io, ji, uD, vl, uQ, je, BO, gt, ff, rM, So, aF, iV, Z, bz, LB, es, mO, bE, bE, y, X, BA); #c1(MUC1) c2(NP_001037855) c3(mucin-1 isoform 5 precursor) c4(34157) c5(34158, 34159, 34160, 34161, 34162, 34163) c6( ) c7(o0, bM, T, aC, fR, pf, if, bKw, bB, fd, ci, aY, fw, wa, aE, u, rJ, aEJ, pX, bW, Ds, K, hu, eL, cp, YL, ZH, iE, Jl, aW, bKt, aoo, az, fc, kt, g, as, cm, Qx, fT, eM, nB, iA, m, uL, in, iu, cE, sw, iB, ht, fN, n, aj, fr, et, qN, zo, ai, eW, Vs, Bl, ft, jz, aoc, ju, cU, bKs, lG, dL, h, cgQ, bzs, mR, CN, aoX, MD, fe, kp, oU, at, it, B, Dw, bev, fM, dA, eR, fG, arQ, DV, aA, fF, zN, v, ze, uW, AO, q, ccP, aKc, eJ, RU, lg, hb, afQ, aT, ae, jf, kl, s, NE, nO, oV, cgR, Y, ev, iU, r, aZg, en, avb, cl, LV, t, Px, iK, ck, nM, iM, gX, fP, dy, EY, cgP, bt, KY, rA, ao, hS, nZ, Mb, Pt, aD, ha, rl, jh, vm, bS, oH, Gn, iJ, vN, ad, dP, nH, l, F, hd, ib, Db, ds, in, ji, uD, vl, uQ, je, BO, qt, ff, rM, So, aF, iV, Z, bz, LB, es, mO, bF, bE, y, X, BA); #c1(MUC1) c2(NP_001037857) c3(mucin-1 isoform 7 precursor) c4(34164) c5(34165, 34166, 34167, 34168, 34169, 34170) c6( ) c7(o0, bM, T, aC, fR, pf, if, bKw, bB, fd, ci, aY, fw, wa, aE, u, rJ, aEJ, pX, bW, Ds, K, hu, eL, cp, YL, ZH, iE, Jl, aW, bKt, aoo, az, fc, kt, g, as, cm, Qx, fT, eM, nB, iA, m, uL, in, iu, cE, sw, iB, ht, fN, n, aj, fr, et, qN, zo, ai, eW, Vs, Bl, ft, jz, aoc, ju, cU, bKs, lG, dL, h, cgQ, bzs, mR, CN, aoX, MD, fe, kp, oU, at, it, B, Dw, bev, fM, dA, eR, fG, arQ, DV, aA, fF, zN, v, ze, uW, AO, q, ccP, aKc, eJ, RU, lg, hb, afQ, aT, ae, jf, kl, s, NE, nO, oV, cgR, Y, ev, iU, r, aZg, en, avb, cl, LV, t, Px, iK, ck, nM, iM, gX, fP, dy, EY, cgP, bt, KY, rA, ao, hS, nZ, Mb, Pt, aD, ha, rl, jh, vm, bS, oH, Gn, iJ, vN, ad, dP, nH, l, F, hd, ib, Db, ds, io, ji, uD, vl, uQ, je, BO, qt, ff, rM, So, aF, iV, Z, bz, LB, es, mO, bF, bE, y, X, BA); #c1(MUC1) c2(NP_001191214) c3(mucin-1 isoform 9 precursor) c4(81114, 81115) c5(81116, 81117, 81118, 81119, 81120, 81121, 81122, 81123, 81124, 81125, 81126, 81127) c6( ) c7(o0, bM, T, aC, fR, pf, if, bKw, bB, fd, ci, aY, fw, wa, aE, u, rJ, aEJ, pX, bW, Ds, K, hu, eL, cp, YL, ZH, iE, Jl, aW, bKt, aoo, az, fc, kt, g, as, cm, Qx, fT, eM, nB, iA, m, uL, in, iu, cE, sw, iB, ht, fN, n, aj, fr, et, qN, zo, ai, eW, Vs, Bl, ft, jz, aoc, ju, cU, bKs, lG, dL, h, cgQ, bzs, mR, CN, aoX, MD, fe, kp, oU, at, it, B, Dw, bev, fM, dA, eR, fG, arQ, DV, aA, fF, zN, v, ze, uW, AO, q, ccP, aKc, eJ, RU, lg, hb, afQ, aT, ae, jf, kl, s, NE, nO, oV, cgR, Y, ev, iU, r, aZg, en, avb, cl, LV, t, Px, iK, ck, nM, iM, gX, fP, dy, EY, cgP, bt, KY, rA, ao, hS, nZ, Mb, Pt, aD, ha, rl, jh, vm, bS, oH, Gn, iJ, vN, ad, dP, nH, l, F, hd, ib, Db, ds, io, ji, uD, vl, uQ, je, BO, qt, ff, rM, So, aF, iV, Z, bz, LB, es, mO, bF, bE, y, X, BA); #c1(MUC1) c2(NP_001191218) c3(mucin-1 isoform 13 precursor) c4(81128, 81129) c5(81130, 81131, 81132, 81133, 81134, 81135, 81136, 81137, 81138, 81139, 81140, 81141) c6( ) c7(o0, bM, T, aC, fR, pf, if, bKw, bB, fd, ci, aY, fw, wa, aE, u, rJ, aEJ, pX, bW, Ds, K, hu, eL, cp, YL, ZH, iE, Jl, aW, bKt, aoo, az, fc, kt, g, as, cm, Qx, fT, eM, nB, iA, m, uL, in, iu, cE, sw, iB, ht, fN, n, aj, fr, et, qN, zo, ai, eW, Vs, Bl, ft, jz, aoc, ju, cU, bKs, lG, dL, h, cgQ, bzs, mR, CN, aoX, MD, fe, kp, oU, at, it, B, Dw, bev, fM, dA, eR, fG, arQ, DV, aA, fF, zN, v, ze, uW, AO, q, ccP, aKc, eJ, RU, lg, hb, afQ, aT, ae, jf, kl, s, NE, nO, oV, cgR, Y, ev, iU, r, aZg, en, avb, cl, LV, t, Px, iK, ck, nM, iM, gX, fP, dy, EY, cgP, bt, KY, rA, ao, hS, nZ, Mb, Pt, aD, ha, rl, jh, vm, bS, oH, Gn, iJ, vN, ad, dP, nH, l, F, hd, ib, Db, ds, io, ji, uD, vl, uQ, je, BO, qt, ff, rM, So, aF, iV, Z, bz, LB, es, mO, bF, bE, y, X, BA); #c1(MUC1) c2(NP_001191222) c3(mucin-1 isoform 17 precursor) c4(81142) c5(81143, 81144, 81145, 81146, 81147, 81148) c6( ) c7(o0, bM, T, aC, fR, pf, if, bKw, bB, fd, ci, aY, fw, wa, aE, u, rJ, aEJ, PX, bW, Ds, K, hu, eL, cp, YL, ZH, iE, Jl, aW, bKt, aoo, az, fc, kt, g, as, cm, Qx, fT, eM, nB, iA, m, uL, in, iu, cE, sw, iB, ht, fN, n, aj, fr, et, qN, zo, ai, eW, Vs, Bl, ft, jz, aoc, ju, cU, bKs, lG, dL, h, cgQ, bzs, mR, CN, aoX, MD, fe, kp, oU, at, it, B, Dw, bev, fM, dA, eR, fG, arQ, DV, aA, fF, zN, v, ze, uW, AO, q, ccP, aKc, eJ, RU, lg, hb, afQ, aT, ae, jf, kl, s, NE, nO, oV, cgR, Y, ev, iU, r, aZg, en, avb, cl, LV, t, Px, iK, ck, nM, iM, gX, fP, dy, EY, cgP, bt, KY, rA, ao, hS, nZ, Mb, Pt, aD, ha, rl, jh, vm, bS, oH, Gn, iJ, vN, ad, dP, nH, l, F, hd, ib, Db, ds, io, ji, uD, vl, uQ, je, BO, qt, ff, rM, So, aF, iV, Z, bz, LB, es, mO, bF, bE, y, X, BA); #c1(MUC1) c2(NP_001191223) c3(mucin-1 isoform 18 precursor) c4(81149) c5(81150, 81151, 81152, 81153, 81154, 81155) c6( ) c7(o0, bM, T, aC, fR, pf, if, bKw, bB, fd, ci, aY, fw, wa, aE, u, rJ, aEJ, pX, bW, Ds, K, hu, eL, cp, YL, ZH, iE, Jl, aW, bKt, aoo, az, fc, kt, g, as, cm, Qx, fT, eM, nB, iA, m, uL, in, iu, cE, sw, iB, ht, fN, n, aj, fr, et, qN, zo, ai, eW, Vs, Bl, ft, jz, aoc, ju, cU, bKs, lG, dL, h, cgQ, bzs, mR, CN, aoX, MD, fe, kp, oU, at, it, B, Dw, bev, fM, dA, eR, fG, arQ, DV, aA, fF, zN, v, ze, uW, AO, q, ccP, aKc, eJ, RU, lg, hb, afQ, aT, ae, jf, kl, s, NE, nO, oV, cgR, Y, ev, iU, r, aZg, en, avb, cl, LV, t, Px, iK, ck, nM, iM, gX, fP, dy, EY, cgP, bt, KY, rA, ao, hS, nZ, Mb, Pt, aD, ha, rl, jh, vm, bS, oH, Gn, iJ, vN, ad, dP, nH, l, F, hd, ib, Db, ds, io, ji, uD, vl, uQ, je, BO, qt, ff, rM, So, aF, iV, Z, bz, LB, es, mO, bF, bE, y, X, BA); #c1(MUC1) c2(NP_001191224) c3(mucin-1 isoform 19 precursor) c4(81156) c5(81157, 81158, 81159, 81160, 81161, 81162) c6( ) c7(o0, bM, T, aC, fR, pf, if, bKw, bB, fd, ci, aY, fw, wa, aE, u, rJ, aEJ, pX, bW, Ds, K, hu, eL, cp, YL, ZH, iE, Jl, aW, bKt, aoo, az, fc, kt, g, as, cm, Qx, fT, eM, nB, iA, m, uL, in, iu, cE, sw, iB, ht, fN, n, aj, fr, et, qN, zo, ai, eW, Vs, BI, ft, jz, aoc, ju, cU, bKs, IG, dL, h, cgQ, bzs, mR, CN, aoX, MD, fe, kp, nD, at, it, B, Dw, bev, fM, dA, eR, fG, arQ, DV, aA, fF, zN, v, ze, uW, AD, q, ccP, aKc, eJ, RU, Ig, hb, afQ, aT, ae, jf, kl, s, NE, nO, oV, cgR, Y, ev, iU, r, aZg, en, avb, cl, LV, t, Px, iK, ck, nM, iM, gX, fP, dy, EY, cgP, bt, KY, rA, ao, hS, nZ, Mb, Pt, aD, ha, rl, jh, vm, bS, oH, Gn, iJ, vN, ad, dP, nH, I, F, hd, ib, Db, ds, io, ji, uD, vI, uQ, je, BO, qt, ff, rM, So, aF, iV, Z, bz, LB, es, mD, bF, bE, y, X, BA); #c1(MOCI) c2(NP_001191226) c3(mucin-1 isoform 21 precursor) c4(81163) c5(81164, 81165, 81166, 81167, 81168, 81169) c6( ) c7(oO, bM, T, aC, fR, pf, if, bKw, bB, fd, ci, aY, fw, wa, aE, u, rJ, aEJ, pX, bW, Ds, K, hu, eL, cp, YL, ZH, iE, Jl, aW, bKt, aoo, az, fc, kt, g, as, cm, Qx, fT, eM, nB, iA, m, uL, in, iu, cE, sw, iB, ht, fN, n, aj, fr, et, gN, zo, ai, eW, Vs, BL ft, jz, aoc, ju, cU, bKs, IG, dL, h, cgQ, bzs, mR, CN, aoX, MD, fe, kp, oU, at, it, B, Dw, bev, fM, dA, eR, fG, arQ, DV, aA, fF, zN, v, ze, uW, AD, g, ccP, aKc, eJ, RU, Ig, hb, afQ, aT, ae, jf, kl, s, NE, oU, oV, cgR, Y, ev, iU, r, aZg, en, avb, cI, LV, t, Px, iK, ck, nM, iM, gX, fP, dy, EY, cgP, bt, KY, rA, ao, hS, nZ, Mb, Pt, aD, ha, rl, jh, vm, bS, oH, Gn, iJ, vN, ad, dP, nH, I, F, hd, ib, Db, ds, io, ji, uD, vI, uQ, je, BO, qt, ff, rM, So, aF, iV, Z, bz, LB, es, mO, bF, bE, y, X, BA); #c1(MOCI) c2(NP_002447) c3(mucin-1 isoform 1 precursor) c4(128516) c5(128517, 128518, 128519, 128520, 128521, 128522) c6( ) c7(oO, bM, T, aC, fR, pf, if, bKw, bB, fd, ci, aY, fw, wa, aE, u, rJ, aEJ, PX, bW, Ds, K, hu, eL, cp, YL, ZH, iE, Jl, aW, bKt, aoo, az, fc, kt, g, as, cm, Qx, fT, eM, nB, iA, m, uL, in, iu, cE, sw, iB, ht, fN, n, aj, fr, et, gN, zo, ai, eW, Vs, BI, ft, jz, aoc, ju, cU, bKs, IG, dL, h, cgQ, bzs, mR, CN, aoX, MD, fe, kp, oU, at, it, B, Dw, bev, fM, dA, eR, fG, arQ, DV, aA, fF, zN, v, ze, uW, AO, q, ccP, aKc, eJ, RU, Ig, hb, afQ, aT, ae, jf, kl, s, NE, nO, oV, cgR, Y, ev, iU, r, aZg, en, avb, cI, LV, t, Px, iK, ck, nM, iM, gX, fP, dy, EY, cgP, bt, KY, rA, ao, hS, nZ, Mb, Pt, aD, ha, rI, jh, vm, bS, oH, Gn, iJ, vN, ad, dP, nH, I, F, hd, ib, Db, ds, io, ji, uD, vI, uQ, je, BO, qt, ff, rM, So, aF, iV, Z, bz, LB, es, mO, bF, bE, y, X, BA); #c1(MUC12) c2(NP_001157934) c3(mucin-12 precursor) c4(62882, 62883) c5(62884, 62885, 62886, 62887, 62888, 62889, 62890, 62891, 62892, 62893, 62894, 62895, 62896) c6( ) c7(iV, T, q, ccP, r); #c1(MUC13) c2(NP_149038) c3(mucin-13 precursor) c4(226882) c5(226883, 226884, 226885, 226886, 226887, 226888) c6( ) c7(T, aA, bB, cy, fe, aF, m, iV, t, ccP); #c1(MUC15) c2(NP_001128563) c3(mucin-15 isoform a) c4( ) c5(50218, 50219, 50220, 50221, 50222, 50223, 50224, 50225, 50226, 50227, 50228, 50229, 50230) c6(50231, 50232, 50233, 50234) c7(bB, bE, ccP); #c1(MUC15) c2(NP_001128564) c3(mucin-15 isoform c) c4( ) c5(50235, 50236, 50237, 50238, 50239, 50240, 50241, 50242, 50243, 50244, 50245, 50246) c6(50247, 50248, 50249, 50250) c7(bB, bE, ccP); #c1(MUC15) c2(NP_663625) c3(mucin-15 isoform b precursor) c4( ) c5(241352, 241353, 241354, 241355, 241356, 241357, 241358) c6(241359, 241360) c7(bB, bE, ccP); #c1(MUC15) c2(XP_011518210) c3(mucin-15 isoform X1) c4(312246, 312247) c5(312248, 312249) c6( ) c7(bB, bE, ccP); #c1(MUC15) c2(XP_011518211) c3(mucin-15 isoform X2) c4(312250) c5(312251, 312252) c6( ) c7(bB, bE, ccP); #c1(MUC16) c2(NP_078966) c3(mucin-16) c4(216303, 216304) c5(216305, 216306, 216307, 216308, 216309, 216310, 216311, 216312, 216313, 216314, 216315, 216316, 216317, 216318) c6( ) c7(T, kh, dA, zX, iW, rl, jh, n, aj, oH, ci, ah, fr, cd, ccP, eJ, avu, dP, av, avp, gJ, ib, aE, Db, avs, aEJ, aT, vc, hS, wt, cgQ, BO, aW, ff, cr, rM, Qm, kp, en, bjl, cI, t, cM, g, apx, ar, Qy, amS, AM, hL, m, avr, iu, vQ); #c1(MUC17) c2(NP_001035194) c3(mucin-17 precursor) c4(32575) c5(32576, 32577, 32578, 32579, 32580, 32581, 32582, 32583, 32584, 32585, 32586, 32587) c6(32588) c7(bF, ai, T, aC, y, aE, s, iE, bE, aW, r, aT, bB, kp, ji, m, iV, t, q, ccP, Qe); #c1(MUC19) c2(NP_775871) c3(mucin-19 precursor) c4(250524) c5(250525, 250526, 250527, 250528, 250529, 250530, 250531, 250532, 250533, 250534) c6( ) c7(fe, ccP, iV); #c1(MUC2) c2(NP_002448) c3(mucin-2 precursor) c4(128523, 128524, 128525, 128526) c5(128527, 128528, 128529, 128530, 128531, 128532, 128533, 128534, 128535, 128536, 128537, 128538, 128539, 128540, 128541, 128542, 128543, 128544, 128545, 128546, 128547, 128548, 128549, 128550, 128551, 128552, 128553, 128554, 128555, 128556, 128557, 128558, 128559) c6( ) c7(cgT, bM, T, aC, pf, aI, bB, ci, fw, aE, u, Os, K, MO, eL, Qe, YL, iE, aW, az, hi, LZ, kt, g, eM, dc, mx, m, in, sw, NT, cd, zo, jz, cc, ju, ep, hB, YO, PX, fe, aq, kp, pm, cM, Dw, aA, tc, q, ccP, aT, cy, ae, Is, s, NE, ev, Pg, r, Qx, en, cI, t, aKe, gX, EY, fD, rA, ao, arh, Gn, jE, cgS, ad, I, ib, NS, io, vc, ji, jo, bby, WW, mu, qt, ff, rM, aF, iV, bz, bF, bE, II, wz, y, X, BA); #c1(MUC20) c2(NP_001269435) c3(mucin-20 isoform a precursor) c4(101646, 101647) c5(101648, 101649, 101650, 101651, 101652, 101653, 101654, 101655, 101656, 101657, 101658, 101659, 101660, 101661, 101662, 101663) c6(101664, 101665, 101666, 101667) c7(ey, ccP, hL, c1); #c1(MUC20) c2(NP_065841) c3(mucin-20 isoform d precursor) c4(205801) c5(205802, 205803, 205804, 205805, 205806, 205807, 205808, 205809) c6(205810, 205811) c7(ey, ccP, hL, c1); #c1(MUC20) c2(NP_689886) c3(mucin-20 isoform b precursor) c4(244260) c5(244261, 244262, 244263, 244264, 244265, 244266, 244267, 244268) c6(244269, 244270) c7(ey, ccP, hL, c1); #c1(MUC21) c2(NP_001010909) c3(mucin-2l precursor) c4(24086, 24087, 24088) c5(24089, 24090, 24091, 24092, 24093, 24094, 24095, 24096, 24097, 24098, 24099, 24100, 24101, 24102, 24103, 24104, 24105, 24106, 24107, 24108, 24109, 24110, 24111, 24112, 24113, 24114, 24115, 24116, 24117, 24118, 24119, 24120, 24121, 24122, 24123, 24124, 24125, 24126, 24127, 24128, 24129, 24130, 24131, 24132, 24133, 24134, 24135, 24136, 24137, 24138, 24139, 24140, 24141, 24142, 24143, 24144, 24145, 24146, 24147, 24148, 24149, 24150, 24151, 24152, 24153, 24154, 24155, 24156, 24157, 24158, 24159) c6( ) c7(xS, ff, cr, eZ, hD, ci, en, gT, hH); #c1(MUC21) c2(XP_005275180) c3(mucin-2l isoform X1) c4(285606, 285607, 285608) c5( ) c6( ) c7(xS, ff, cr, eZ, hD, ci, en, gT, hH); #c1(MUC21) c2(XP_005275463) c3(mucin-2l isoform X1) c4(285610, 285611, 285612) c5( ) c6( ) c7(xS, ff, cr, eZ, hD, ci, en, gT, hH); #c1(MUC22) c2(NP_001185744) c3(mucin-22 precursor) c4(76175) c5(76176, 76177, 76178, 76179, 76180, 76181, 76182) c6( ) c7(aZL); #c1(MUC22) c2(XP_011545884) c3(mucin-22 isoform X1) c4( ) c5(344790) c6( ) c7(aZL); #c1(MUC3A) c2(NP_005951) c3(mucin-3A precursor) c4(160632) c5(160633, 160634, 160635, 160636, 160637, 160638, 160639, 160640, 160641, 160642, 160643, 160644) c6( ) c7(bF, ai, T, aC, y, s, iE, bE, aW, aT, r, bB, ci, m, iV, t, q, ccP, Qe); #c1(MUC3A) c2(XP_011514548) c3(mucin-3A isoform X1) c4(307245) c5( ) c6( ) c7(bF, ai, T, aC, y, s, iE, bE, aW, aT, r, bB, ci, m, iV, t, q, ccP, Qe); #c1(MUC3A) c2(XP_011514551) c3(mucin-3A isoform X4) c4(307246) c5( ) c6( ) c7(bF, ai, T, aC, y, s, iE, bE, aW, aT, r, bB, ci, m, iV, t, q, ccP, Qe); #c1(MUC3A) c2(XP_011514553) c3(mucin-3A isoform X6) c4( ) c5(307247, 307248, 307249, 307250, 307251, 307252, 307253) c6( ) c7(bF, ai, T, aC, y, s, iE, bE, aW, aT, r, bB, ci, m, iV, t, q, ccP, Qe); #c1(MUC4) c2(NP_004523) c3(mucin-4 isoform d precursor) c4( ) c5(147234, 147235, 147236, 147237, 147238, 147239) c6( ) c7(bM, T, Dw, aC, sw, iB, fN, aA, bB, n, oH, ci, fr, iJ, zo, ad, EL ccP, dP, aKc, eJ, iu, jz, aE, akU, rJ, pX, aT, Ds, bj, hu, ae, Qe, s, NE, JI, aW, Y, ff, eH, nY, Ox, aq, fe, kp, aF, en, g, eF, t, LV, bz, iV, aBs, bF, bIC, QG, eM, bE, m, cE, B, ao); #c1(MUC4) c2(NP_060876) c3(mucin-4 isoform a precursor) c4(198237, 198238, 198239, 198240, 198241) c5(198242, 198243, 198244, 198245, 198246, 198247, 198248, 198249, 198250, 198251, 198252, 198253, 198254, 198255, 198256, 198257, 198258, 198259) c6( ) c7(bM, T, Dw, aC, sw, iB, fN, aA, bB, n, oH, ci, fr, iJ, zo, ad, EL ccP, dP, aKc, eJ, iu, jz, aE, akU, rJ, pX, aT, Ds, bj, hu, ae, Qe, s, NE, JI, aW, Y, ff, eH, nY, Ox, aq, fe, kp, aF, en, g, eF, t, LV, bz, iV, aBs, bF, bIC, QG, eM, bE, m, cE, B, an); #c1(MUC4) c2(NP_612154) c3(mucin-4 isoform e precursor) c4( ) c5(236107, 236108, 236109, 236110, 236111, 236112) c6( ) c7(bM, T, Dw, aC, sw, iB, fN, aA, bB, n, oH, ci, fr, iJ, zo, ad, EL ccP, dP, aKc, eJ, iu, jz, aE, akU, rJ, pX, aT, Ds, bj, hu, ae, Qe, s, NE, JI, aW, Y, ff, eH, nY, Ox, aq, fe, kp, aF, en, g, eF, t, LV, bz, iV, aBs, bF, bIC, QG, eM, bE, m, cE, B, an); #c1(MUC5AC) c2(NP_001291288) c3(mucin-5AC precursor) c4(115645, 115646) c5(115647, 115648, 115649, 115650, 115651, 115652, 115653, 115654, 115655, 115656, 115657, 115658, 115659, 115660, 115661) c6( ) c7(bM, T, aC, pf, bB, ci, fw, aE, aEJ, Ds, K, aa, iE, az, LZ, nY, g, eM, m, in, cE, aZN, sw, fN, n, BF, zo, ai, BI, cU, cgQ, YO, fe, kp, mo, cM, JM, at, ZZ, Dw, fG, aA, g, ccP, aOY, aT, cgQ, yb, dl, Is, kl, s, NE, cgR, ev, r, Io, Ph, en, cI, LV, t, aKe, EY, fD, ao, Mb, aZ, aD, rl, ad, Os, bby, qt, ff, rM, aF, Sm, bz, DF, TA, bF, bE, dO, uR, X, y, iu, BA); #c1(MUC5B) c2(NP_002449) c3(mucin-5B precursor) c4(128560, 128561, 128562, 128563, 128564, 128565, 128566, 128567, 128568) c5(128569, 128570, 128571, 128572, 128573, 128574, 128575, 128576, 128577, 128578, 128579, 128580, 128581, 128582, 128583, 128584, 128585, 128586, 128587, 128588, 128589, 128590, 128591, 128592, 128593, 128594, 128595, 128596, 128597, 128598, 128599, 128600, 128601, 128602, 128603, 128604, 128605, 128606, 128607, 128608, 128609, 128610, 128611, 128612, 128613, 128614, 128615, 128616, 128617, 128618, 128619, 128620, 128621, 128622, 128623) c6( ) c7(bM, T, Dw, fG, fN, aA, bB, btu, ci, zo, ccP, ad, aE, bW, aT, h, Ds, dL, K, ae, uQ, aa, Is, aW, ev, az, hQ, kt, fe, aF, g, cM, pb, zV, DF, LB, bF, eM, bE, aZL, uR, at, iu, an); #c1(MUC6) c2(NP_005952) c3(mucin-G precursor) c4(160645) c5(160646, 160647, 160648, 160649, 160650, 160651) c6( ) c7(T, fR, sw, aA, ci, q, ccP, ad, BI, ZZ, aE, qp, aT, ae, dl, be, Is, s, iE, Jl, aW, qt, az, r, kt, fe, aF, g, bF, gX, iu, an); #c1(MUC7) c2(NP_001138479) c3(mucin-7 precursor) c4(56852, 56853, 56854, 56855, 56856, 56857, 56858, 56859, 56860) c5(56861, 56862, 56863, 56864, 56865, 56866, 56867, 56868, 56869, 56870, 56871, 56872, 56873, 56874, 56875, 56876, 56877, 56878, 56879, 56880, 56881) c6( ) c7(bM, BI, Dw, qt, sp, ff, rM, Ds, dL, en, g, eL, eJ, ccP); #c1(MOCL1) c2(XP_011536170) c3(mucin-like protein 1 isoform X1) c4(333477) c5(333478, 333479, 333480, 333481, 333482, 333483, 333484) c6(333485) c7(T, pf, aW, aT, AO, it); #c1(MUM1) c2(NP_116242) c3(PWWP domain-containing protein MUM1) c4(225911, 225912) c5(225913, 225914, 225915, 225916, 225917, 225918) c6( ) c7(aPQ, fM, jh, fd, Io, pk); #c1(MUM1) c2(XP_011526684) c3(PWWP domain-containing protein MUM1 isoform X3) c4(320962) c5(320963, 320964, 320965, 320966, 320967, 320968) c6( ) c7(aPQ, fM, jh, fd, Io, pk); #c1(MUM1) c2(XP_011526686) c3(PWWP domain-containing protein MUM1 isoform X5) c4( ) c5(320969, 320970, 320971, 320972, 320973, 320974) c6( ) c7(aPQ, fM, jh, fd, Io, pk); #c1(MUM1) c2(XP_011526687) c3(PWWP domain-containing protein MUM1 isoform X6) c4(320975, 320976) c5(320977, 320978, 320979, 320980, 320981, 320982, 320983, 320984, 320985, 320986, 320987, 320988) c6( ) c7(aPQ, fM, jh, fd, Io, pk); #c1(MORC) c2(NP_001018126) c3(muscle-related coiled-coil protein) c4(27445) c5(27446, 27447, 27448, 27449, 27450, 27451) c6( ) c7(Hr); #c1(MUS81) c2(XP_011543572) c3(crossover junction endonuclease MUS81 isoform X1) c4(342486) c5(342487, 342488, 342489, 342490, 342481, 342492, 342493, 342494, 342495, 342496) c6( ) c7(GI, T, os, vI, eM, dB, sw, aW, bE, ff, aT, bB, oZ, K, en, eA, V, B); #c1(MUSK) c2(NP_001159752) c3(muscle, skeletal receptor tyrosine-protein kinase isoform 2) c4(64713, 64714, 64715) c5(64716, 64717, 64718, 64719, 64720, 64721, 64722, 64723, 64724, 64725, 64726, 64727, 64728) c6( ) c7(xA, aOf, hM, aw, ha, cgV, bI, xe); #c1(MUSK) c2(NP_001159753) c3(muscle, skeletal receptor tyrosine-protein kinase isoform 3) c4( ) c5(64729, 64730, 64731, 64732, 64733, 64734, 64735, 64736, 64737, 64738) c6( ) c7(xA, aOf, hM, aw, ha, cgV, bI, xe); #c1(MUSK) c2(NP_005583) c3(muscle, skeletal receptor tyrosine-protein kinase isoform 1) c4(157670, 157671, 157672) c5(157673, 157674, 157675, 157676, 157677, 157678, 157679, 157680, 157681, 157682, 157683, 157684, 157685, 157686, 157687, 157688, 157689, 157690) c6( ) c7(xA, aOf, hM, aw, ha, cgV, bI, xe); #c1(MUSK) c2(XP_005252053) c3(muscle, skeletal receptor tyrosine-protein kinase isoform X4) c4(271504) c5(271505, 271506, 271507, 271508, 271509, 271510) c6( ) c7(xA, aOf, hM, aw, ha, cgV, bI, xe); #c1(MUSK) c2(XP_011517009) c3(muscle, skeletal receptor tyrosine-protein kinase isoform X1) c4(310499) c5( ) c6( ) c7(xA, aOf, hM, aw, ha, cgV, bI, xe); #c1(MUSK) c2(XP_011517010) c3(muscle, skeletal receptor tyrosine-protein kinase isoform X5) c4( ) c5(310500, 310501, 310502, 310503, 310504, 310505, 310506, 310507, 310508) c6( ) c7(xA, aOf, hM, aw, ha, cgV, bI, xe); #c1(MUSK) c2(NP_000246) c3(methylmalonyl-CoA mutase, mitochondrial precursor) c4(5597, 5598, 5599, 5600) c5(5601, 5602, 5603, 5604, 5605, 5606, 5607, 5608, 5609, 5610, 5611, 5612, 5613, 5614, 5615, 5616, 5617, 5618, 5619, 5620, 5621, 5622, 5623, 5624, 5625, 5626, 5627, 5628, 5629, 5630, 5631, 5632, 5633, 5634, 5635, 5636, 5637, 5638, 5639, 5640, 5641, 5642, 5643, 5644, 5645, 5646, 5647, 5648, 5649, 5650, 5651, 5652, 5653, 5654, 5655, 5656, 5657, 5658, 5659, 5660, 5661, 5662, 5663, 5664, 5665, 5666, 5667, 5668, 5669, 5670, 5671, 5672, 5673, 5674, 5675, 5676, 5677, 5678, 5679, 5680, 5681, 5682, 5683, 5684, 5685, 5686, 5687, 5688, 5689, 5690, 5691, 5692, 5693, 5694, 5695, 5696, 5697, 5698, 5699, 5700, 5701, 5702, 5703, 5704) c6(5705, 5706, 5707, 5708, 5709) c7(aHq, T, if, aip, bZ, v, j, qN, q, ad, ip, cgY, hd, cc, M, aT, h, rL, r, dq, cgW, pb, dr, mO, bP, eM, nB, cgX); #c1(MUTYH) c2(NP_001280119) c3(A/G-specific adenine DNA glycosylase isoform 6) c4(111333) c5(111334, 111335, 111336, 111337, 111338, 111339, 111340) c6( ) c7(bL, T, eR, eX, NT, aA, bB, aj, ci, bX, aY, V, q, J, ad, eA, ip, jz, aE, Qk, aT, eV, auS, YB, dL, K, ae, Qe, B, BO, s, dH, aW, Y, Yd, ff, r, ag, Kf, aF, en, cI, g, bz, bF, cgZ, rR, W, dB, bE, gX, hL, aMy, k, YS, X, rk); #c1(MUTYH) c2(NP_001280120) c3(A/G-specific adenine DNA glycosylase isoform 7) c4(111341) c5(111342, 111343, 111344, 111345, 111346, 111347, 111348, 111349, 111350, 111351, 111352, 111353, 111354) c6( ) c7(bL, T, eR, eX, NT, aA, bB, aj, ci, bX, aY, V, q, J, ad, eA, ip, jz, aE, Qk, aT, eV, auS, YB, dL, K, ae, Qe, B, BO, s, dH, aW, Y, Yd, ff, r, ag, Kf, aF, en, cI, g, bz, bF, cgZ, rR, W, dB, bE, gX, hL, aMy, k, YS, X, rk); #c1(MUTYH) c2(XP_011539799) c3(A/G-specific adenine DNA glycosylase isoform X2) c4(338026) c5( ) c6( ) c7(bL, T, eR, eX, NT, aA, bB, aj, ci, bX, aY, V, q, J, ad, eA, ip, jz, aE, Qk, aT, eV, auS, YB, dL, K, ae, Qe, B, BO, s, dH, aW, Y, Yd, ff, r, ag, Kf, aT, en, cI, g, bz, bF, cgZ, rR, W, dB, bE, gX, hL, aMy, k, YS, X, rk); #c1(MUTYH) c2(XP_011539809) c3(A/G-specific adenine DNA glycosylase isoform X6) c4( ) c5(338027, 338028, 338029, 338030, 338031, 338032) c6( ) c7(bL, T, eR, eX, NT, aA, bB, aj, ci, bX, aY, V, q, J, ad, eA, ip, jz, aE, Qk, aT, eV, auS, YB, dL, K, ae, Qe, B, BO, s, dH, aW, Y, Yd, ff, r, ag, Kf, aF, en, cI, g, bz, bF, cgZ, rR, W, dB, bE, gX, hL, aMy, k, YS, X, rk); #c1(MUTYH) c2(XP_011539810) c3(A/G-specific adenine DNA glycosylase isoform X7) c4( ) c5(338033, 338034, 338035, 338036, 338037, 338038) c6( ) c7(bL, T, eR, eX, NT, aA, bB, aj, ci, bX, aY, V, q, J, ad, eA, ip, jz, aT, Ok, aT, eV, auS, YB, dL, K, ae, Qe, B, BO, s, dH, aW, Y, Yd, ff, r, ag, Kf, aF, en, cI, g, bz, bF, cgZ, rR, W, dB, bE, gX, hL, aMy, k, YS, X, rk); #c1(MVB12B) c2(NP_001011703) c3(multivesicular body subunit 12B isoform 2) c4( ) c5(24747, 24748, 24749, 24750, 24751, 24752, 24753, 24754, 24755, 24756, 24757, 24758) c6( ) c7(dw, Na, Nc); #c1(MVB12B) c2(NP_258257) c3(multivesicular body subunit 12B isoform 1) c4(228676) c5(228677, 228678, 228679, 228680, 228681, 228682) c6( ) c7(dw, Na, Nc); #c1(MVB12B) c2(XP_005252354) c3(multivesicular body subunit 12B isoform X5) c4(271668, 271669, 271670) c5(271671, 271672, 271673, 271674, 271675, 271676, 271677, 271678, 271679, 271680, 271681, 271682) c6( ) c7(dw, Na, Nc); #c1(MVB12B) c2(XP_011517479) c3(multivesicular body subunit 12B isoform X3) c4(311218) c5( ) c6( ) c7(dw, Na, Nc); #c1(MVD) c2(NP_002452) c3(diphosphomevalonate decarboxylase) c4(128633, 128634) c5(128635, 128636, 128637, 128638, 128639, 128640, 128641) c6( ) c7(T, qb, yS, bgQ, qx, n, aj, j, aqf, eA, J, oT, hd, py, jZ, dV, aT, dz, hP, pq, pI, aeR, iU, et, aW, Ls, ff, kD, en, pm, t, bw, yR, ck, pc, nB, pq, m, bt, B); #c1(MVD) c2(XP_011521391) c3(diphosphomevalonate decarboxylase isoform X4) c4( ) c5(316207, 316208, 316209, 316210, 316211) c6( ) c7(T, qb, yS, bgQ, qx, n, aj, j, aqf, eA, J, oT, hd, py, jZ, dV, aT, dz, hP, pq, pI, aeR, iU, et, aW, Ls, ff, kD, en, pm, t, bw, yR, ck, pc, nB, pq, m, bt, B); #c1(MVK) c2(NP_001288111) c3(mevalonate kinase isoform b) c4(113538, 113539) c5(113540, 113541, 113542, 113543, 113544, 113545, 113546, 113547, 113548, 113549, 113550, 113551113552, 113553, 113554, 113555) c6( ) c7(bL, T, bzE, amj, agH, nA, aPb, g, hX, cF, NY, aT, dQ, hH, NX, ih, aLJ, r, ag, bQL, cm, nC, dr, mO, ky, cU, cha, R, i, bt, ra, B); #c1(MVK) c2(XP_011536674) c3(mevalonate kinase isoform X1) c4(334162, 334163, 334164) c5(334165, 334166, 334167, 334168, 334169, 334170, 334171, 334172, 334173, 334174, 334175, 334176, 334177, 334178, 334179, 334180, 334181, 334182) c6( ) c7(bL, T, bzE, amj, agH, nA, aPb, g, hX, cF, NY, aT, dQ, hH, NX, ih, aLJ, r, ag, bQL, cm, nC, dr, mO, ky, cU, cha, R, i, bt, ra, B); #c1(MVP) c2(NP_001280133) c3(major vault protein isoform 2) c4( ) c5(111367) c6( ) c7(T, wJ, if, aw, ha, jx, jh, fd, bB, j, ci, qN, fr, hF, eA, er, x, ft, xc, kH, aT, cy, h, K, dQ, af, Lg, d, B, je, aW, eH, nK, ag, Io, kp, as, cI, eF, t, cm, bz, QA, iK, bw, ck, iM, eM, dB, bE, m, k, bt, gD, kG); #c1(MVP) c2(NP_001280134) c3(major vault protein isoform 3) c4( ) c5(111368, 111369) c6( ) c7(T, wJ, if, aw, ha, jx, jh, fd, bB, j, ci, qN, fr, hF, eA, er, x, ft, xc, kH, aT, cy, h, K, dQ, af, Lg, d, B, je, aW, eH, nK, aq, Io, kp, as, cI, eF, t, cm, bz, QA, iK, bw, ck, iM, eM, dB, bE, m, k, bt, gD, kG); #c1(MVP) c2(NP_059447) c3(major vault protein isoform 1) c4(193312) c5(193313, 193314, 193315, 193316, 193317, 193318, 193319, 193320, 193321, 193322) c6( ) c7(T, wJ, if, aw, ha, jx, jh, fd, bB, j, ci, qN, fr, hF, eA, er, x, ft, xc, kH, aT, cy, h, K, dQ, af, Lg, d, B, je, aW, eH, nK, ag, Io, kp, as, cI, eF, t, cm, bz, QA, iK, bw, ck, iM, eM, dB, bE, m, k, bt, gD, kG); #c1(MX1) c2(XP_005261039) c3(interferon-induced GTP-binding protein Mx1 isoform X1) c4(277104, 277105, 277106, 277107, 277108) c5(277109, 277110, 277111, 277112, 277113, 277114, 277115, 277116, 277117, 277118, 277119, 277120, 277121, 277122, 277123, 277124, 277125, 277126, 277127, 277128, 277129, 277130, 277131, 277132) c6( ) c7(fR, aI, jx, aA, oZ, j, jE, V, eW, aFu, hX, F, ds, h, dL, kU, af, afu, qZ, Ih, wc, sP, eZ, tx, aHU, Io, CQ, Fq, t, f, bNw, pb, atM, aiM, at, eo, bt, Pr, B, chb, L); #c1(MX1) c2(XP_011527871) c3(interferon-induced GTP-binding protein Mx1 isoform X2) c4(322918) c5( ) c6( ) c7(fR, aI, jx, aA, oZ, j, jE, V, eW, aFu, hX, F, ds, h, dL, kU, af, afu, qZ, Ih, wc, sP, eZ, tx, aHU, Io, CQ, Fq, t, f, bNw, pb, atM, aiM, at, eo, bt, Pr, B, chb, L); #c1(MX1) c2(XP_011527872) c3(interferon-induced GTP-binding protein Mx1 isoform X3) c4(322919) c5(322920, 322921, 322922, 322923, 322924, 322925, 322926, 322927, 322928, 322929, 322930, 322931, 322932, 322933, 322934, 322935, 322936, 322937, 322938, 322939, 322940, 322941, 322942, 322943, 322944, 322945, 322946, 322947) c6( ) c7(fR, aI, jx, aA, oZ, j, jE, V, eW, aFu, hX, F, ds, h, dL, kU, af, afu, qZ, Ih, wc, sP, eZ, tx, aHU, Io, CQ, Fq, t, f, bNw, pb, atM, aiM, at, eo, bt, Pr, B, chb, L); #c1(MX2) c2(XP_011527874) c3(interferon-induced GTP-binding protein Mx2 isoform X1) c4(322948) c5(322949, 322950, 322951, 322952, 322953, 322954, 322955, 322956, 322957, 322958) c6( ) c7(cF, ds, Y, jx, h, iu); #c1(MX2) c2(XP_011527875) c3(interferon-induced GTP-binding protein Mx2 isoform X2) c4(322959, 322960, 322961, 322962, 322963) c5(322964, 322965, 322966, 322967, 322968, 322969, 322970, 322971, 322972, 322973, 322974, 322975, 322976, 322977, 322978, 322979, 322980, 322981, 322982, 322983, 322984, 322985, 322986, 322987, 322988) c6( ) c7(cF, ds, Y, jx, h, iu); #c1(MXD1) c2(NP_001189443) c3(max dimerization protein 1 isoform 3) c4(79387) c5(79388, 79389, 79390, 79391, 79392, 79393) c6( ) c7(T, pf, jx, eX, bB, fr, ci, hF, q, br, ad, eA, cc, F, aT, ta, eV, ae, pI, jf, d, s, aW, Y, oV, fJ, r, aq, aF, g, as, iR, cm, bw, bz, bE, cj, m, bt, B); #c1(MXD1) c2(NP_002348) c3(max dimerization protein 1 isoform 1) c4(127705) c5(127706, 127707, 127708, 127709, 127710, 127711, 127712) c6( ) c7(T, pf, jx, eX, bB, fr, ci, hF, q, br, ad, eA, cc, F, aT, ta, eV, ae, pI, jf, d, s, aW, Y, oV, fJ, r, aq, aF, g, as, iR, cm, bw, bz, bE, cj, m, bt, B); #c1(MXD3) c2(NP_001136407) c3(max dimerization protein 3 isoform b) c4(54926) c5(54927, 54928, 54929, 54930, 54931, 54932, 54933, 54934, 54935, 54936, 54937, 54938) c6( ) c7(dB, T, jf); #c1(MXD3) c2(NP_112590) c3(max dimerization protein 3 isoform a) c4(221498, 221499, 221500) c5(221501, 221502, 221503, 221504, 221505, 221506, 221507, 221508, 221509, 221510, 221511, 221512, 221513, 221514, 221515, 221516, 221517) c6( ) c7(dB, T, jf); #c1(MXD4) c2(NP_006445) c3(max dimerization protein 4) c4(165278, 165279) c5(165280, 165281, 165282, 165283, 165284, 165285, 165286, 165287, 165288, 165289, 165290, 165291, 165292) c6( ) c7(iC, d, dB, h, Nf, as, Fc, pi); #c1(MX11) c2(NP_001008541) c3(max-interacting protein 1 isoform c) c4(23332) c5(23333, 23334, 23335, 23336, 23337) c6( ) c7(G, T, id, atY, ht, aA, n, ci, pz, hF, V, q, ad, eA, eJ, av, no, py, arV, aT, dL, ae, eL, jf, d, Ub, aW, Y, eH, aq, aF, g, as, eF, t, cm, bz, iV, es, byl, bP, eM, iA, dB, bE, iT, wB, cj, dy, m, Hb, B); #c1(MX11) c2(NP_005953) c3(max-interacting protein 1 isoform a) c4(160652, 160653, 160654) c5(160655, 160656, 160657, 160658, 160659, 160660, 160661, 160662, 160663, 160664, 160665, 160666, 160667, 160668, 160669, 160670, 160671, 160672, 160673, 160674, 160675, 160676, 160677, 160678, 160679, 160680, 160681, 160682, 160683, 160684, 160685, 160686, 160687, 160688, 160689, 160690, 160691, 160692) c6( ) c7(G, T, id, atY, ht, aA, n, ci, pz, hF, V, q, ad, eA, eJ, av, no, py, arV, aT, dL, ae, eL, jf, d, Ub, aW, Y, eH, aq, aF, g, as, eF, t, cm, bz, iV, es, byl, bP, eM, iA, dB, bE, iT, wB, cj, dy, m, Hb, B); #c1(MX11) c2(NP_569157) c3(max-interacting protein 1 isoform b) c4(233705, 233706, 233707) c5(233708, 233709, 233710, 233711, 233712, 233713, 233714, 233715, 233716, 233717, 233718, 233719) c6( ) c7(G, T, id, atY, ht, aA, n, ci, pz, hF, V, q, ad, eA, eJ, av, no, py, arV, aT, dL, ae, eL, jf, d, Ub, aW, Y, eH, aq, aF, g, as, eF, t, cm, bz, iV, es, byl, bP, eM, iA, dB, bE, iT, wB, cj, dy, m, Hb, B); #c1(MXRA5) c2(NP_056234) c3(matrix-remodeling-associated protein 5 precursor) c4(186622) c5(186623, 186624, 186625, 186626, 186627, 186628, 186629, 186630, 186631, 186632, 186633, 186634) c6(186635, 186636, 186637, 186638) c7(T, bz, eM); #c1(MXRA5) c2(XP_005274542) c3(matrix-remodeling-associated protein 5 isoform X1) c4( ) c5(285150, 285151) c6( ) c7(T, bz, eM); #c1(MYADM) c2(NP_001277119) c3(myeloid-associated differentiation marker) c4(109049, 109050, 109051, 109052, 109053, 109054) c5(109055, 109056, 109057, 109058, 109059, 109060, 109061, 109062, 109063, 109064, 109065, 109066, 109067, 109068, 109069, 109070, 109071, 109072, 109073, 109074, 109075, 109076, 109077, 109078, 109079, 109080, 109081, 109082, 109083, 109084, 109085, 109086, 109087, 109088, 109089, 109090, 109091, 109092, 109093, 109094, 109095, 109096, 109097, 109098, 109099, 109100, 109101, 109102, 109103, 109104, 109105, 109106) c6( ) c7(B); #c1(MYB) c2(NP_001123644) c3(transcriptional activator Myb isoform 3) c4(47939) c5(47940, 47941, 47942, 47943, 47944, 47945) c6( ) c7(bM, T, qb, atC, aw, chc, jh, cz, bB, rf, v, j, ci, PM, hF, AO, q, hr, eA, x, pN, kI, qK, dV, kH, aT, dz, hn, K, in, qw, ye, Nr, d, je, iU, et, aW, Y, r, po, bow, as, hf, cm, bw, pb, Hp, Nq, ck, BU, iM, Dy, awC, qe, bE, eM, iT, z, mg, pg, k, pw, bt, X); #c1(MYB) c2(NP_001123645) c3(transcriptional activator Myb isoform 1) c4(47946, 47947, 47948) c5(47949, 47950, 47951, 47952, 47953, 47954) c6( ) c7(bM, T, qb, atC, aw, chc, jh, cz, bB, rf, v, j, ci, PM, hF, AO, q, hr, eA, x, pN, kI, qK, dV, kH, aT, dz, hn, K, in, qw, yo, Nr, d, je, iU, et, aW, Y, r, po, bow, as, hf, cm, bw, pb, Hp, Nq, ck, BU, iM, Dy, awC, qe, bE, eM, iT, z, mg, pg, k, pw, bt, X); #c1(MYB) c2(NP_001155129) c3(transcriptional activator Myb isoform 5) c4( ) c5(61447, 61448, 61449, 61450, 61451, 61452, 61453, 61454, 61455, 61456) c6( ) c7(bM, T, qb, atC, aw, chc, jh, cz, bB, rf, v, j, ci, pM, hF, AO, q, hr, eA, x, pN, kI, qK, dV, kH, aT, dz, hn, K, in, qw, ye, Nr, d, je, iU, et, aW, Y, r, po, bow, as, hf, cm, bw, pb, Hp, Nq, ck, BU, iM, Dy, awC, qe, bE, eM, iT, z, mg, pg, k, pw, bt, X); #c1(MYB) c2(NP_001155132) c3(transcriptional activator Myb isoform 8) c4(61457) c5(61458, 61459, 61460, 61461, 61462, 61463) c6( ) c7(bM, T, qb, atC, aw, chc, jh, cz, bB, rf, v, j, ci, pM, hF, AO, q, hr, eA, x, pN, kI, qK, dV, kH, aT, dz, hn, K, in, qw, ye, Nr, d, je, iU, et, aW, Y, r, po, bow, as, hf, cm, bw, pb, Hp, Nq, ck, BU, iM, Dy, awC, qe, bE, eM, iT, z, mg, pg, k, pw, bt, X); #c1(MYB) c2(NP_005366) c3(transcriptional activator Myb isoform 2) c4(155466, 155467, 155468) c5(155469, 155470, 155471, 155472, 155473, 155474, 155475, 155476, 155477, 155478, 155479, 155480, 155481, 155482, 155483, 155484, 155485, 155486, 155487, 155488, 155489) c6( ) c7(bM, T, qb, atC, aw, chc, jh, cz, bB, rf, v, j, ci, pM, hF, AO, q, hr, eA, x, pN, kI, qK, dV, kH, aT, dz, hn, K, in, qw, ye, Nr, d, je, iU, et, aW, Y, r, po, bow, as, hf, cm, bw, pb, Hp, Nq, ck, BU, iM, Dy, awC, qe, bE, eM, iT, z, mg, pg, k, pw, bt, X); #c1(MYBBPIA) c2(NP_001099008) c3(myb-binding protein IA isoform 1) c4(41616, 41617) c5(41618, 41619, 41620, 41621, 41622, 41623, 41624, 41625, 41626, 41627, 41628, 41629) c6( ) c7(gj, T, ig, aW, aT, ae, ad); #c1(MYBBPIA) c2(NP_055335) c3(myb-binding protein IA isoform 2) c4(180579) c5(180580, 180581, 180582, 180583, 180584, 180585, 180586) c6( ) c7(gj, T, ig, aW, aT, ae, ad); #c1(MYBL1) c2(NP_001073885) c3(myb-related protein A isoform 1) c4(36295) c5(36296, 36297, 36298, 36299, 36300, 36301, 36302, 36303, 36304, 36305, 36306, 36307, 36308) c6( ) c7(jh, kl, eA, qK); #c1(MYBL1) c2(NP_001138227) c3(myb-related protein A isoform 2) c4(56055) c5(56056, 56057, 56058, 56059, 56060, 56061) c6( ) c7(jh, kl, eA, qK); #c1(MYBL1) c2(XP_011515835) c3(myb-related protein A isoform X1) c4(308808) c5( ) c6( ) c7(jh, kl, eA, qK); #c1(MYBL2) c2(NP_001265539) c3(myb-related protein 8 isoform 2) c4(98772) c5(98773, 98774, 98775, 98776, 98777, 98778) c6( ) c7(T, bP, aW, atC, if, cj, aT, at, fd, dL, IR, K, qN, pb, bw, cm, bt, B); #c1(MYBL2) c2(NP_002457) c3(myb-related protein 8 isoform 1) c4(128649) c5(128650, 128651, 128652, 128653, 128654, 128655, 128656) c6( ) c7(T, bP, aW, atC, if, cj, aT, at, fd, dL, IR, K, qN, pb, bw, cm, bt, B); #c1(MYBPC1) c2(NP_001241647) c3(myosin-binding protein C, slew-type isoform 5) c4(88945) c5(88946, 88947, 88948, 88949, 88950, 88951) c6( ) c7(chd, vc, mx, oj, che); #c1(MYBPC1) c2(NP_001241648) c3(myosin-binding protein C, slew-type isoform 6) c4(88952) c5(88953, 88954, 88955, 88956, 88957, 88958) c6( ) c7(chd, vc, mx, oj, che); #c1(MYBPC1) c2(NP_001241650) c3(myosin-binding protein C, slew-type isoform 8) c4(88959) c5(88960, 88961, 88962, 88963, 88964, 88965) c6( ) c7(chd, vc, mx, oj, che); #c1(MYBPC1) c2(NP_001241651) c3(myosin-binding protein C, slew-type isoform 9) c4(88966) c5(88967, 88968, 88969, 88970, 88971, 88972) c6( ) c7(chd, vc, mx, oj, che); #c1(MYBPC1) c2(NP_001241652) c3(myosin-binding protein C, slew-type isoform ID) c4(88973) c5(88974, 88975, 88976, 88977, 88978, 88979) c6( ) c7(chd, vc, mx, oj, che); #c1(MYBPC1) c2(NP_002456) c3(myosin-binding protein C, slew-type isoform 1) c4(128642) c5(128643, 128644, 128645, 128646, 128647, 128648) c6( ) c7(chd, vc, mx, oj, che); #c1(MYBPC1) c2(NP_996555) c3(myosin-binding protein C, slew-type isoform 2) c4(264284) c5(264285, 264286, 264287, 264288, 264289, 264290) c6( ) c7(chd, vc, mx, oj, che); #c1(MYBPC1) c2(NP_996556) c3(myosin-binding protein C, slew-type isoform 3) c4(264291) c5(264292, 264293, 264294, 264295, 264296, 264297, 264298, 264299, 264300, 264301) c6( ) c7(chd, vc, mx, oj, che); #c1(MYBPC1) c2(NP_996557) c3(myosin-binding protein C, slew-type isoform 4) c4(264302) c5(264303, 264304, 264305, 264306, 264307, 264308) c6( ) c7(chd, vc, mx, oj, che); #c1(MYBPC1) c2(XP_006719473) c3(myosin-binding protein C, slew-type isoform X6) c4(292504) c5(292505, 292506, 292507, 292508, 292509, 292510) c6( ) c7(chd, vc, mx, oj, che); #c1(MYBPC1) c2(XP_006719474) c3(myosin-binding protein C, slew-type isoform X8) c4(292511) c5(292512, 292513, 292514, 292515, 292516, 292517) c6( ) c7(chd, vc, mx, oj, che); #c1(MYBPC2) c2(NP_004524) c3(myosin-binding protein C, fast-type) c4(147240) c5(147241, 147242, 147243, 147244, 147245, 147246) c6( ) c7(vc, cc, mx); #c1(MYBPC3) c2(NP_000247) c3(myosin-binding protein C, cardiac-type) c4(5710, 5711, 5712) c5(5713, 5714, 5715, 5716, 5717, 5718, 5719, 5720, 5721, 5722, 5723, 5724, 5725, 5726, 5727, 5728, 5729, 5730) c6( ) c7(cc, cl, mR, ec, mr, chf, chh, chi, oj, Id, gZ, cd, vc, mx, j, wl, mo, aYo, rz, chg, gq); #c1(MYBPH) c2(NP_004988) c3(myosin-binding protein H) c4(151765) c5(151766, 151767, 151768, 151769, 151770, 151771) c6( ) c7(LB, T, iM, gZ, je, UZ, cz, yu, Pp, CQ, g, iu); #c1(MYC) c2(NP_002458) c3(myc proto-oncogene protein) c4(128657, 128658, 128659, 128660, 128661, 128662, 128663, 128664, 128665) c5(128666, 128667, 128668, 128669, 128670, 128671, 128672, 128673, 128674, 128675, 128676, 128677, 128678, 128679, 128680, 128681, 128682, 128683, 128684, 128685, 128686, 128687, 128688, 128689, 128690, 128691, 128692, 128693, 128694, 128695, 128696, 128697, 128698, 128699, 128700, 12870L128702, 128703, 128704, 128705, 128706, 128707, 128708, 128709, 128710, 128711, 128712, 128713, 128714, 128715, 128716, 128717, 128718, 128719, 128720, 128721, 128722, 128723, 128724, 128725, 128726, 128727, 128728, 128729, 128730, 128731, 128732, 128733, 128734, 128735, 128736, 128737, 128738, 128739, 128740, 128741, 128742, 128743, 128744, 128745, 128746, 128747, 128748, 128749, 128750, 128751, 128752, 128753, 128754, 128755, 128756, 128757, 128758, 128759, 128760, 128761, 128762, 128763, 128764, 128765, 128766, 128767, 128768, 128769, 128770, 128771, 128772, 128773, 128774, 128775, 128776, 128777, 128778, 128779, 128780, 128781, 128782, 128783, 128784, 128785, 128786, 128787, 128788, 128789, 128790, 128791, 128792, 128793, 128794, 128795, 128796, 128797, 128798, 128799, 128800, 12880L128802, 128803, 128804, 128805, 128806, 128807, 128808, 128809, 128810, 128811, 128812, 128813, 128814, 128815, 128816, 128817, 128818, 128819, 128820, 128821, 128822, 128823, 128824, 128825, 128826, 128827, 128828, 128829, 128830, 128831, 128832, 128833, 128834, 128835, 128836, 128837, 128838, 128839, 128840, 12884L128842, 128843, 128844, 128845, 128846, 128847, 128848, 128849, 128850, 12885L128852, 128853, 128854, 128855, 128856, 128857, 128858, 128859, 128860, 128861, 128862, 128863, 128864, 128865, 128866, 128867, 128868, 128869, 128870, 128871, 128872, 128873, 128874, 128875, 128876, 128877, 128878, 128879, 128880, 128881, 128882, 128883, 128884, 128885, 128886, 128887, 128888, 128889, 128890, 128891, 128892, 128893, 128894, 128895, 128896, 128897, 128898, 128899, 128900, 128901, 128902, 128903, 128904, 128905, 128906, 128907, 128908, 128909, 128910, 128911, 128912, 128913, 128914, 128915, 128916, 128917, 128918, 128919, 128920, 128921, 128922, 128923, 128924, 128925, 128926, 128927, 128928, 128929, 128930, 128931, 128932, 128933, 128934, 128935, 128936, 128937, 128938, 128939, 128940, 128941, 128942, 128943, 128944, 128945, 128946, 128947, 128948, 128949, 128950, 128951, 128952, 128953, 128954, 128955, 128956, 128957, 128958, 128959, 128960, 128961, 128962, 128963, 128964, 128965, 128966, 128967, 128968, 128969, 128970, 128971, 128972, 128973, 128974, 128975, 128976, 128977, 128978, 128979, 128980, 128981, 128982, 128983, 128984, 128985, 128986, 128987, 128988, 128989, 128990, 128991, 128992, 128993, 128994, 128995, 128996, 128997, 128998, 128999, 129000, 129001, 129002, 129003, 129004, 129005, 129006, 129007, 129008, 129009, 129010, 129011, 129012, 129013) c6(129014, 129015) c7(uB, G, T, aC, fR, ya, pf, ea, if, al, WV, fd, bB, aeu, IR, ci, ip, chj, oB, bv, x, Na, aE, SV, Vv, Ou, K, hu, pk, eL, aid, cp, Qe, yo, Jl, aW, az, XV, LZ, fc, CT, Qm, g, as, eF, zE, cm, bw, ou, y, eM, nB, iA, iT, wB, cj, cX, k, m, gn, ym, Xu, cho, avU, iu, dD, ajm, IT, zt, ht, aDT, n, aj, fr, qN, rP, JW, asS, hr, bao, BI, ft, jz, pe, TK, Nn, zf, kH, h, eV, hn, dL, Dz, hB, on, KV, Df, dx, pI, bsK, OV, A, aoX, MD, ks, aq, apk, kp, Hu, aMJ, yq, mo, iN, op, apa, kT, iO, YE, bP, asl, dB, Qu, Vy, chl, hL, at, SZ, qF, gg, WL, it, B, ZZ, fM, jp, jx, eX, fZ, aA, el, hz, v, j, il, AO, pd, g, J, qH, eA, cdV, mP, Ig, nv, hW, aT, rO, dz, Nc, jj, bq, avt, ae, af, bA, jf, iF, qw, wr, s, vT, NE, oV, Y, ev, nO, iU, xR, r, eS, en, aom, hf, t, ho, cI, pb, iK, Cv, zJ, ck, nM, kP, Dy, iM, iQ, au, aor, Da, np, ij, bt, rA, vi, kh, id, LX, iW, jh, bs, KO, eq, chm, hF, ad, hX, av, hd, anp, py, nz, Ot, zK, IC, io, hD, vc, nJ, Yi, mu, azH, d, bug, chk, Ub, et, qt, je, ff, eH, chn, aeV, Xj, aF, iR, adj, KM, bz, dr, bF, es, eU, amS, pc, bE, aNL, Lb, bC, adg, hE, aed, kS, X, EB); #c1(MYCBP2) c2(NP_055872) c3(E3 ubiquitin-protein ligase MYCBP2) c4(184054, 184055) c5(184056, 184057, 184058, 184059, 184060, 184061, 184062, 184063, 184064, 184065, 184066, 184067, 184068, 184069, 184070) c6( ) c7(ck, bv, av, eM, dB, aW, aT, n, dG, v, g, cm, bjQ, bz, eA, uQ); #c1(MYCBP2) c2(XP_006719846) c3(E3 ubiquitin-protein ligase MYCBP2 isoform X5) c4(293030) c5(293031, 293032, 293033, 293034, 293035, 293036) c6( ) c7(ck, bv, av, eM, dB, aW, aT, n, dG, v, g, cm, bjQ, bz, eA, uQ); #c1(MYCBP2) c2(XP_011533307) c3(E3 ubiquitin-protein ligase MYCBP2 isoform X14) c4( ) c5(329461, 329462) c6( ) c7(ck, bv, av, eM, dB, aW, aT, n, dG, v, g, cm, bjQ, bz, eA, uQ); #c1(MYCBPAP) c2(NP_115509) c3(MYCBP-associated protein) c4(222983, 222984) c5(222985, 222986, 222987, 222988, 222989, 222990, 222991, 222992, 222993, 222994, 222995, 222996) c6( ) c7(aW, T, iK, aT); #c1(MYCN) c2(NP_005369) c3(N-myc proto-oncogene protein isoform 1) c4(155490, 155491) c5(155492, 155493, 155494, 155495, 155496, 155497, 155498, 155499, 155500, 155501, 155502, 155503, 155504) c6( ) c7(T, Tb, ya, aAx, bB, ci, bNe, aJa, ip, bv, Fo, PX, SV, MU, Ou, K, aJu, eL, Jl, aW, g, eF, cm, eM, nB, cj, m, Xu, chp, qy, n, gN, b, ft, TK, hn, dL, nn, dx, pI, awV, PX, ag, chg, Hu, QK, chs, Ld, bP, asl, dB, en, B, fM, dA, ne, aA, V, q, er, qH, eA, aAF, nv, afQ, qK, ahL, aT, ae, jf, if, Uf, Qr, Y, r, bu, t, ck, chr, nG, azK, bt, jh, oH, iJ, ad, iC, Tg, hd, iY, hP, iL, d, aF, bz, es, bkh, i, hE, y); #c1(MYCT1) c2(NP_079383) c3(myc target protein 1) c4(217855, 217856) c5(217857, 217858, 217859, 217860, 217861, 217862, 217863, 217864, 217865, 217866, 217867, 217868) c6( ) c7(Ej, T, ci, aA); #c1(MYD88) c2(NP_001166037) c3(myeloid differentiation primary response protein MyD88 isoform 5) c4(68096) c5(68097, 68098, 68099, 68100, 68101, 68102) c6( ) c7(oO, bM, T, fR, ea, fd, bB, ci, xE, vV, YX, Be, dV, be, hm, LG, aW, bNq, az, mQ, awv, zC, bw, dc, ki, cj, Zn, m, aNn, dD, n, aj, BF, uE, JX, cU, h, ey, Og, CQ, Ca, YF, adz, hq, ar, dG, eD, fL, B, Dw, fM, Ik, jx, v, j, C, pd, q, J, mP, Cc, WY, jZ, rS, aT, cy, le, r, lo, t, Cv, zJ, baw, ig, hc, cht, wR, EY, fD, zA, bTc, aDj, azW, jh, eq, atK, mC, hX, yt, ds, LA, ji, NM, cH, Of, eZ, dN, aoF, gE, hp, uF, iV, aDH, bE, gZ, ei, y); #c1(MYD88) c2(NP_001166038) c3(myeloid differentiation primary response protein MyD88 isoform 1) c4(68103) c5(68104, 68105, 68106, 68107, 68108, 68109) c6( ) c7(oO, bM, T, fR, ea, fd, bB, ci, xE, vV, YX, Be, dV, be, hm, LG, aW, bNq, az, mQ, awv, zC, bw, dc, ki, cj, Zn, m, aNn, dD, n, aj, BF, uE, JX, cU, h, ey, Og, CQ, Ca, YF, adz, hq, ar, dC, eD, fL, B, Dw, fM, Ik, jx, v, j, C, pd, q, J, mP, Cc, WY, jZ, rS, aT, cy, le, r, lo, t, Cv, zJ, baw, ig, hc, cht, wR, EY, fD, zA, bTc, aDj, azW, jh, eq, atK, mC, hX, yt, ds, LA, ji, NM, cH, Of, eZ, dN, aoF, gE, hp, uF, iV, aDH, bE, gZ, ei, y); #c1(MYD88) c2(NP_001166039) c3(myeloid differentiation primary response protein MyD88 isoform 3) c4(68110) c5(68111, 68112, 68113, 68114, 68115, 68116) c6( ) c7(oO, bM, T, fR, ea, fd, bB, ci, xE, vV, YX, Be, dV, be, hm, LG, aW, bNq, az, mQ, awv, zC, bw, dc, ki, cj, Zn, m, aNn, dD, n, aj, BF, uE, JX, cU, h, ey, Og, CQ, Ca, YF, adz, hq, ar, dC, eD, fL, B, Dw, fM, Ik, jx, v, j, C, pd, q, J, mP, Cc, WY, jZ, rS, aT, cy, le, r, lo, t, Cv, zJ, baw, ig, hc, cht, wR, EY, fD, zA, bTc, aDj, azW, jh, eq, atK, mC, hX, yt, ds, LA, ji, NM, cH, Of, eZ, dN, aoF, gE, hp, uF, iV, aDH, bE, gZ, ei, y); #c1(MYD88) c2(NP_001166040) c3(myeloid differentiation primary response protein MyD88 isoform 4) c4(68117) c5(68118, 68119, 68120, 68121, 68122, 68123, 68124, 68125, 68126, 68127, 68128) c6( ) c7(oO, bM, T, fR, ea, fd, bB, ci, xE, vV, YX, Be, dV, be, hm, LG, aW, bNq, az, mQ, awv, zC, bw, dc, ki, cj, Zn, m, aNn, dD, n, aj, BF, uE, JX, cU, h, ey, Og, CQ, Ca, YF, adz, hq, ar, dC, eD, fL, B, Dw, fM, Ik, jx, v, j, C, pd, q, J, mP, Cc, WY, jZ, rS, aT, cy, le, r, Io, t, Cv, zJ, baw, ig, hc, cht, wR, EY, fD, zA, bTc, aDj, azW, jh, eq, atK, mC, hX, yt, ds, LA, ji, NM, cH, Of, eZ, dN, aoF, gE, hp, uF, iV, aDH, bE, gZ, ei, y); #c1(MYD88) c2(NP_002459) c3(myeloid differentiation primary response protein MyD88 isoform 2) c4(129016, 129017, 129018) c5(129019, 129020, 129021, 129022, 129023, 129024, 129025, 129026, 129027, 129028, 129029, 129030, 129031) c6( ) c7(oO, bM, T, fR, ea, fd, bB, ci, xE, vV, YX, Be, dV, be, hm, LG, aW, bNq, az, mQ, awv, zC, bw, dc, ki, cj, Zn, m, aNn, dD, n, aj, BF, uE, JX, cU, h, ey, Og, CQ, Ca, YF, adz, hq, ar, dC, eD, fL, B, Dw, fM, Ik, jx, v, j, C, pd, q, J, mP, Cc, WY, jZ, rS, aT, cy, le, r, lo, t, Cv, zJ, baw, ig, hc, cht, wR, EY, fD, zA, bTc, aDj, azW, jh, eq, atK, mC, hX, yt, ds, LA, ji, NM, cH, Of, eZ, dN, aoF, gE, hp, uF, iV, aDH, bE, gZ, ei, y); #c1(MYDGF) c2(NP_061980) c3(UPF0556 protein C19orf10 precursor) c4(201602) c5(201603, 201604, 201605, 201606, 201607, 201608) c6( ) c7(oO, bM, cZ, T, dD, JZ, ea, ht, al, jh, fF, aj, v, j, jE, C, eq, aoj, V, qW, ai, J, ad, aDF, hX, rw, ds, Os, aT, bQd, K, ji, dd, hu, ae, DA, Nr, A, cW, aW, Y, oV, fO, cr, fe, po, lo, iV, eE, axp, bz, DF, Nq, ck, aDu, W, eM, ig, aCT, bE, z, at, dW, eo, m, fD, y, bt, Pr, B); #c1(MYEF2) c2(NP_001288139) c3(myelin expression factor 2 isoform b) c4(113601, 113602, 113603) c5(113604, 113605, 113606, 113607, 113608, 113609, 113610) c6( ) c7(aw, anR); #c1(MYEF2) c2(NP_057216) c3(myelin expression factor 2 isoform a) c4(189530) c5(189531, 189532, 189533, 189534, 189535, 189536) c6( ) c7(aw, anR); #c1(MYEF2) c2(XP_005254481) c3(myelin expression factor 2 isoform X2) c4( ) c5(273226, 273227, 273228, 273229, 273230) c6( ) c7(aw, anR); #c1(MYEF2) c2(XP_011519959) c3(myelin expression factor 2 isoform X5) c4( ) c5(314780, 314781, 314782, 314783, 314784, 314785) c6( ) c7(aw, anR); #c1(MYEOV) c2(NP_001280220) c3(myeloma-overexpressed gene protein isoform 1) c4(111485) c5(111486, 111487, 111488, 111489, 111490, 111491, 111492, 111493, 111494, 111495) c6( ) c7(T, JI, aW, bE, ff, r, cj, aT, bB, fd, en, g, cm, it, g); #c1(MYF5) c2(NP_005584) c3(myogenic factor 5) c4(157691) c5(157692, 157693, 157694, 157695, 157696, 157697, 157698) c6( ) c7(bv, ac, Qr, v, gk, cd); #c1(MYF6) c2(NP_002460) c3(myogenic factor 6) c4(129032) c5(129033, 129034, 129035, 129036, 129037, 129038, 129039) c6( ) c7(bv, chu, oj, uY, Xu, Wq, bhe); #c1(MYH1) c2(NP_005954) c3(myosin-1) c4(160693, 160694) c5(160695, 160696, 160697, 160698, 160699, 160700, 160701, 160702, 160703, 160704, 160705, 160706) c6( ) c7(bF, XW, jz, It, aW, nX, aA, r, aT, hN, aq, aF, g, rk); #c1(MYH10) c2(NP_001242941) c3(myosin-10 isoform 1) c4(89330) c5(89331, 89332, 89333, 89334, 89335) c6( ) c7(cF, xu, aW, aT, vw, bt); #c1(MYH10) c2(NP_005955) c3(myosin-10 isoform 2) c4(160707, 160708) c5(160709, 160710, 160711, 160712, 160713, 160714, 160715, 160716, 160717, 160718) c6( ) c7(cF, xu, aW, aT, vw, bt); #c1(MYH10) c2(XP_011522177) c3(myosin-10 isoform X2) c4( ) c5(316775) c6( ) c7(cF, xu, aW, aT, vw, bt); #c1(MYH10) c2(XP_011522179) c3(myosin-10 isoform X4) c4(316776) c5(316777, 316778, 316779, 316780, 316781, 316782) c6( ) c7(cF, xu, aW, aT, vw, bt); #c1(MYH10) c2(XP_011522180) c3(myosin-10 isoform X5) c4(316783) c5(316784, 316785, 316786, 316787, 316788, 316789) c6( ) c7(cF, xu, aW, aT, vw, bt); #c1(MYH10) c2(XP_011522182) c3(myosin-10 isoform X7) c4( ) c5(316790, 316791) c6( ) c7(cF, xu, aW, aT, vw, bt); #c1(MYH11) c2(NP_001035202) c3(myosin-11 isoform SM2B) c4(32598, 32599) c5(32600, 32601, 32602, 32603, 32604, 32605, 32606, 32607, 32608, 32609, 32610) c6( ) c7(chv, bM, T, Ap, fo, hF, q, ad, fX, chw, gd, aT, iY, K, jj, chx, ae, aBI, Nr, bf, BO, s, iU, aW, r, po, Au, Fu, bw, yR, Nq, ck, iT, be, MG, aRD, bt, fl); #c1(MYH11) c2(NP_001035203) c3(myosin-11 isoform SMIB) c4(32611) c5(32612, 32613, 32614, 32615, 32616, 32617, 32618) c6( ) c7(chv, bM, T, Ap, fo, hF, q, ad, fX, chw, gd, aT, iY, K, jj, chx, ae, aBI, Nr, bf, BO, s, iU, aW, r, po, Au, Fu, bw, yR, Nq, ck, iT, be, MG, aRD, bt, fl); #c1(MYH11) c2(NP_002465) c3(myosin-11 isoform SM1A) c4(129102) c5(129103, 129104, 129105, 129106, 129107, 129108, 129109) c6( ) c7(chv, bM, T, Ap, fo, hF, q, ad, fX, chw, gd, aT, iY, K, jj, chx, ae, aBI, Nr, bf, BO, s, iU, aW, r, po, Au, Fu, bw, yR, Nq, ck, iT, be, MG, aRD, bt, fl); #c1(MYH11) c2(NP_074035) c3(myosin-11 isoform SM2A) c4(213491) c5(213492, 213493, 213494, 213495, 213496) c6( ) c7(chv, bM, T, Ap, fo, hF, q, ad, fX, chw, gd, aT, iY, K, jj, chx, ae, aBI, Nr, bf, BO, s, iU, aW, r, po, Au, Fu, bw, yR, Nq, ck, iT, be, MG, aRD, bt, fl); #c1(MYH13) c2(NP_003793) c3(myosin-13) c4(140894, 140895) c5(140896, 140897, 140898, 140899, 140900, 140901, 140902, 140903, 140904, 140905, 140906, 140907, 140908, 140909, 140910, 140911) c6( ) c7(af); #c1(MYH14) c2(NP_001139281) c3(myosin-14 isoform 3) c4(59087, 59088, 59089) c5(59090, 59091, 59092, 59093, 59094, 59095, 59096, 59097, 59098, 59099, 59100, 59101, 59102, 59103, 59104, 59105, 59106, 59107, 59108, 59109, 59110, 59111) c6( ) c7(chz, Na, aKf, T, cc, eR, chA, mx, jh, vc, chy, aS, Nc, bX, Tp, Bh, ad); #c1(MYH14) c2(NP_079005) c3(myosin-14 isoform 2) c4(216530) c5( ) c6( ) c7(chz, Na, aKf, T, cc, eR, chA, mx, jh, vc, chy, aS, Nc, bX, Tp, Bh, ad); #c1(MYH14) c2(XP_011525622) c3(myosin-14 isoform X2) c4( ) c5(320028) c6( ) c7(chz, Na, aKf, T, cc, eR, chA, mx, jh, vc, chy, aS, Nc, bX, Tp, Bh, ad); #c1(MYH14) c2(XP_011525623) c3(myosin-14 isoform X3) c4(320029) c5(320030, 320031, 320032, 320033, 320034, 320035, 320036, 320037, 320038, 320039, 320040, 320041) c6( ) c7(chz, Na, aKf, T, cc, eR, chA, mx, jh, vc, chy, aS, Nc, bX, Tp, Bh, ad); #c1(MYH14) c2(XP_011525625) c3(myosin-14 isoform X1) c4(320042) c5(320043, 320044, 320045, 320046, 320047) c6( ) c7(chz, Na, aKf, T, cc, eR, chA, mx, jh, vc, chy, aS, Nc, bX, Tp, Bh, ad); #c1(MYH15) c2(NP_055796) c3(myosin-15 precursor) c4(183563) c5(183564, 183565, 183566, 183567, 183568, 183569) c6( ) c7(dD, ac, ea, e, aw, j, eq, aHP, aHQ, eu); #c1(MYH2) c2(NP_001093582) c3(myosin-2) c4(40279, 40280, 40281, 40282) c5(40283, 40284, 40285, 40286, 40287, 40288, 40289, 40290, 40291, 40292, 40293, 40294, 40295, 40296, 40297, 40298, 40299, 40300, 40301, 40302, 40303, 40304, 40305, 40306, 40307, 40308, 40309, 40310) c6( ) c7(ul, aZA, buA, eA, chC, XW, cc, Ae, oj, Ak, By, vc, ji, K, chD, yi, Y, XV, Ad, aaO, chB, cI, Ew, cj, bt, AI); #c1(MYH3) c2(XP_011522173) c3(myosin-3 isoform X1) c4(316762) c5(316763, 316764, 316765, 316766, 316767, 316768, 316769, 316770, 316771, 316772) c6( ) c7(chE, XW, chF, ff, ht, oj, dV, buA, bBU, K, en, chG); #c1(MYH3) c2(XP_011522174) c3(myosin-3 isoform X2) c4( ) c5(316773, 316774) c6( ) c7(chE, XW, chF, ff, ht, oj, dV, buA, bBU, K, en, chG); #c1(MYH4) c2(NP_060003) c3(myosin-4) c4(193607) c5(193608, 193609, 193610, 193611, 193612, 193613) c6( ) c7(oe, My); #c1(MYH6) c2(NP_002462) c3(myosin-6) c4(129040) c5(129041, 129042, 129043, 129044, 129045, 129046, 129047, 129048, 129049, 129050) c6( ) c7(T, AY, chH, wV, j, cd, ad, chK, cc, fm, chl, oj, vc, hn, bHm, rz, ae, alj, mG, mx, bD, chJ); #c1(MYH7) c2(NP_000248) c3(myosin-7) c4(5731, 5732) c5(5733, 5734, 5735, 5736, 5737, 5738, 5739, 5740, 5741, 5742, 5743, 5744) c6( ) c7(chM, AY, bAB, mr, acl, aw, cz, chL, n, aNG, cd, boz, NW, cc, Ws, boB, oj, kf, yu, vc, atw, aWs, chN, eN, mu, aTm, yi, anR, Ad, akB, chy, app, mo, aYo, bji, bfW, Bt, cI, mx uS, bD, gq, vQ); #c1(MYH7B) c2(NP_065935) c3(myosin-7B) c4(206322, 206323) c5(206324, 206325, 206326, 206327, 206328, 206329, 206330) c6( ) c7(chz, cc, Dy, hk, Y, aT, dL, bX); #c1(MYH7B) c2(XP_011527244) c3(myosin-7B isoform X2) c4( ) c5(321823, 321824, 321825, 321826, 321827) c6( ) c7(chz, cc, Dy, hk, Y, aT, dL, bX); #c1(MYH7B) c2(XP_011527251) c3(myosin-7B isoform X8) c4(321828, 321829, 321830, 321831) c5(321832, 321833, 321834, 321835, 321836, 321837, 321838, 321839, 321840, 321841, 321842, 321843, 321844, 321845, 321846, 321847, 321848, 321849, 321850, 321851, 321852, 321853, 321854, 321855) c6( ) c7(chz, cc, Dy, hk, Y, aT, dL, bX); #c1(MYH7B) c2(XP_011527252) c3(myosin-7B isoform X9) c4( ) c5(321856) c6( ) c7(chz, cc, Dy, hk, Y, aT, dL, bX); #c1(MYH8) c2(NP_002463) c3(myosin-8) c4(129051) c5(129052, 129053, 129054, 129055, 129056, 129057, 129058, 129059, 129060, 129061, 129062, 129063, 129064, 129065, 129066) c6( ) c7(bBU, chO, chG, XW, chP); #c1(MYH9) c2(NP_002464) c3(myosin-9) c4(129067, 129068, 129069, 129070, 129071) c5(129072, 129073, 129074, 129075, 129076, 129077, 129078, 129079, 129080, 129081, 129082, 129083, 129084, 129085, 129086, 129087, 129088, 129089, 129090, 129091, 129092, 129093, 129094, 129095, 129096, 129097, 129098, 129099, 129100, 129101) c6( ) c7(bL, eq, T, dD, chR, aZA, chV, xu, qb, ea, eR, uv, chU, aA, cz, chQ, aj, ah, HS, uE, Wa, mL aY, uW, ye, hF, J, eW, aXI, chG, fU, Na, amJ, bpp, aT, vw, h, chX, Nc, chW, DU, ey, DY, sj, uM, Nr, acF, aW, ajP, eZ, Xm, aF, bz, bLL, Nq, sk, pa, apM, BU, ac, Pa, chA, hc, mG, MM, dy, oQ, bt, chl, chS); #c1(MYL1) c2(NP_524144) c3(myosin light chain 1/3, skeletal muscle isoform isoform 1f) c4(231132) c5(231133, 231134, 231135, 231136, 231137, 231138) c6( ) c7(bv); #c1(MYL1) c2(NP_524146) c3(myosin light chain 1/3, skeletal muscle isoform isoform 3f) c4(231139) c5(231140, 231141, 231142, 231143, 231144, 231145) c6( ) c7(bv); #c1(MYL12A) c2(NP_001289977) c3(myosin regulatory light chain 12A isoform 1) c4( ) c5(114894, 114895, 114896, 114897, 114898, 114899, 114900, 114901, 114902, 114903) c6( ) c7(vc, bz, cI, cc, py); #c1(MYL12A) c2(NP_001289978) c3(myosin regulatory light chain 12A isoform 2) c4(114904) c5( ) c6( ) c7(vc, bz, cl, cc, py); #c1(MYL12B) c2(NP_001138416) c3(myosin regulatory light chain 128) c4(56623) c5(56624, 56625, 56626, 56627, 56628, 56629, 56630, 56631, 56632, 56633, 56634, 56635, 56636, 56637, 56638, 56639, 56640, 56641, 56642, 56643, 56644) c6( ) c7(aj, chY); #c1(MYL2) c2(NP_000423) c3(myosin regulatory light chain 2, ventricular/cardiac muscle isoform) c4(8810) c5(8811, 8812, 8813, 8814, 8815, 8816) c6( ) c7(bL, cc, chZ, mx, cz, vc, fr, K, me, eA, cfe); #c1(MYL3) c2(NP_000249) c3(myosin light chain 3) c4(5745, 5746) c5(5747, 5748, 5749, 5750, 5751, 5752, 5753, 5754, 5755, 5756, 5757, 5758, 5759, 5760) c6( ) c7(yu, vc, cc, mx, cia); #c1(MYL4) c2(NP_001002841) c3(myosin light chain 4) c4(19624, 19625) c5(19626, 19627, 19628, 19629, 19630, 19631, 19632, 19633, 19634, 19635, 19636, 19637, 19638, 19639, 19640, 19641) c6( ) c7(bkZ, aPn, bwE, aNN, vc, bK, mk, as, cb, dr); #c1(MYL6) c2(NP_066299) c3(myosin light polypeptide 6 isoform 1) c4(207130) c5(207131, 207132, 207133, 207134, 207135, 207136, 207137, 207138, 207139, 207140) c6( ) c7(K); #c1(MYL6) c2(NP_524147) c3(myosin light polypeptide 6 isoform 2) c4(231146) c5(231147, 231148, 231149, 231150, 231151, 231152) c6( ) c7(K); #c1(MYL7) c2(NP_067046) c3(myosin regulatory light chain 2, atrial isoform) c4(208699, 208700) c5(208701, 208702, 208703, 208704, 208705, 208706, 208707, 208708, 208709, 208710, 208711, 208712) c6( ) c7(cc, aPn, vc, j, K, cb, f, cd, vQ); #c1(MYL9) c2(NP_006088) c3(myosin regulatory light polypeptide 9 isoform a) c4(161809) c5(161810, 161811, 161812, 161813, 161814, 161815, 161816) c6( ) c7(cc, cl, vc, fr, aS, K, mk, bt); #c1(MYL9) c2(NP_852667) c3(myosin regulatory light polypeptide 9 isoform b) c4(255111) c5(255112, 255113, 255114, 255115, 255116, 255117) c6( ) c7(cc, cl, vc, fr, aS, K, mk, bt); #c1(MYL1P) c2(NP_037394) c3(E3 ubiquitin-protein ligase MYL1P) c4(175234, 175235) c5(175236, 175237, 175238, 175239, 175240, 175241, 175242, 175243) c6( ) c7(bL, dP, T, x, aE, c, bE, cj, kH, bB, v, j, k, eq, fr, iK, B); #c1(MYL1P) c2(XP_005249090) c3(E3 ubiquitin-protein ligase MYL1P isoform X2) c4( ) c5(268980, 268981, 268982, 268983, 268984) c6( ) c7(bL, dP, T, x, aE, c, bE, cj, kH, bB, v, j, k, eq, fr, iK, B); #c1(MYLK) c2(NP_444253) c3(myosin light chain kinase, smooth muscle isoform 1) c4(230118) c5(230119, 230120, 230121, 230122, 230123, 230124, 230125, 230126, 230127, 230128) c6( ) c7(bM, T, Lx, cz, Bm, n, BH, fF, j, C, cd, ad, aJr, eA, eW, no, yt, si, aT, jy, K, ae, aa, cH, cib, aW, mQ, fe, dw, Bu, bz, qa, dR, es, U, eM, iA, bm, sG, mf, aS, mk, fD, bD); #c1(MYLK) c2(NP_444254) c3(myosin light chain kinase, smooth muscle isoform 2) c4(230129, 230130, 230131) c5(230132, 230133, 230134, 230135, 230136, 230137, 230138, 230139, 230140, 230141, 230142, 230143) c6( ) c7(bM, T, Lx, cz, Bm, n, BH, fF, j, C, cd, ad, aJr, eA, eW, no, yt, si, aT, jy, K, ae, aa, cH, cib, aW, mQ, fe, dw, Bu, bz, qa, dR, es, D, eM, iA, bm, sG, mf, aS, mk, fD, bD); #c1(MYLK) c2(NP_444255) c3(myosin light chain kinase, smooth muscle isoform 3A) c4(230144) c5(230145, 230146, 230147, 230148, 230149, 230150, 230151, 230152, 230153, 230154) c6( ) c7(bM, T, Lx, cz, Bm, n, BH, fF, j, C, cd, ad, aJr, eA, eW, no, yt, si, aT, jy, K, ae, aa, cH, cib, aW, mQ, fe, dw, Bu, bz, qa, dR, es, D, eM, iA, bm, sG, mf, aS, mk, fD, bD); #c1(MYLK) c2(NP_444256) c3(myosin light chain kinase, smooth muscle isoform 38) c4( ) c5(230155, 230156, 230157, 230158, 230159, 230160) c6( ) c7(bM, T, Lx, cz, Bm, n, BH, fF, j, C, cd, ad, aJr, eA, eW, no, yt, si, aT, jy, K, ae, aa, cH, cib, aW, mQ, fe, dw, Bu, bz, qa, dR, es, D, eM, iA, bm, sG, mf, aS, mk, fD, bD); #c1(MYLK) c2(NP_444260) c3(myosin light chain kinase, smooth muscle isoform 8) c4(230161) c5(230162, 230163, 230164, 230165, 230166, 230167) c6( ) c7(bM, T, Lx, cz, Bm, n, BH, fF, j, C, cd, ad, aJr, eA, eW, no, yt, si, aT, jy, K, ae, aa, cH, cib, aW, mQ, fe, dw, Bu, bz, qa, dR, es, D, eM, iA, bm, sG, mf, aS, mk, fD, bD); #c1(MYLK2) c2(NP_149109) c3(myosin light chain kinase 2, skeletal/cardiac muscle) c4(227192) c5(227193, 227194, 227195, 227196, 227197, 227198, 227199, 227200, 227201, 227202) c6( ) c7(yt, Bu, AY, no, cc); #c1(MYLK3) c2(NP_872299) c3(myosin light chain kinase 3) c4(256044, 256045) c5(256046, 256047, 256048, 256049, 256050, 256051, 256052) c6( ) c7(Bu, no); #c1(MYLPF) c2(NP_037424) c3(myosin regulatory light chain 2, skeletal muscle isoform) c4(175488) c5(175489, 175490, 175431, 175492, 175493, 175494) c6( ) c7(eA, j, cfe); #c1(MYNN) c2(NP_001172048) c3(myoneurin isoform B) c4(72355) c5(72356, 72357, 72358, 72359, 72360, 72361, 72362) c6( ) c7(at, V, dL, hp); #c1(MYNN) c2(XP_011511290) c3(myoneurin isoform X1) c4(301781, 301782) c5(301783, 301784, 301785, 301786, 301787, 301788, 301789, 301790, 301791, 301792, 301793, 301794, 301795, 301796, 301797, 301798, 301799) c6( ) c7(at, V, dL, hp); #c1(MY010) c2(NP_036466) c3(unconventional myosin-X) c4(174055) c5(174056, 174057, 174058, 174059, 174060, 174061, 174062, 174063, 174064, 174065, 174066, 174067, 174068, 174069, 174070, 174071, 174072, 174073, 174074, 174075, 174076, 174077, 174078, 174079, 174080) c6( ) c7(aW, nm, cz, af, aT); #c1(MY010) c2(XP_005248363) c3(unconventional myosin-X isoform X2) c4(268370) c5( ) c6( ) c7(aW, nm, cz, af, aT); #c1(MY010) c2(XP_005248364) c3(unconventional myosin-X isoform X3) c4(268371) c5( ) c6( ) c7(aW, nm, cz, af, aT); #c1(MY015A) c2(NP_057323) c3(unconventional myosin-XV) c4(190114, 190115, 190116, 190117, 190118) c5(190119, 190120, 190121, 190122, 190123, 190124, 190125, 190126, 190127, 190128, 190129, 190130, 190131, 190132, 190133, 190134, 190135, 190136, 190137, 190138, 190139, 190140, 190141) c6( ) c7(bCd, cic, alA, aQi, bU, Bh, bCJ); #c1(MY015A) c2(XP_011522223) c3(unconventional myosin-XV isoform X5) c4( ) c5(316843, 316844, 316845, 316846, 316847, 316848, 316849) c6( ) c7(bCd, cic, alA, aQi, bU, Bh, bCJ); #c1(MY016) c2(NP_001185879) c3(unconventional myosin-XVI isoform 1) c4( ) c5(76625, 76626, 76627, 76628) c6( ) c7(W, ac, aj, dy, j, rz, cd, J); #c1(MY016) c2(NP_055826) c3(unconventional myosin-XVI isoform 2) c4(183724, 183725, 183726, 183727, 183728) c5(183729, 183730, 183731, 183732, 183733, 183734, 183735, 183736, 183737, 183738, 183739, 183740, 183741, 183742, 183743, 183744, 183745, 183746, 183747, 183748, 183749, 183750, 183751, 183752, 183753, 183754, 183755, 183756, 183757, 183758) c6( ) c7(W, ac, aj, dy, j, rz, cd, J); #c1(MY018B) c2(NP_115997) c3(unconventional myosin-XVIIIb) c4(225172) c5(225173, 225174, 225175, 225176, 225177, 225178, 225179, 225180, 225181, 225182) c6( ) c7(av, ft, ib, W, r, he, m, t, bz, g); #c1(MY01A) c2(NP_005370) c3(unconventional myosin-Ia) c4(155505, 155506, 155507) c5(155508, 155509, 155510, 155511, 155512, 155513, 155514, 155515, 155516, 155517, 155518, 155519, 155520, 155521, 155522, 155523) c6( ) c7(nO, mG, cid, aA, aq, aF, B, Qe); #c1(MY01A) c2(XP_011536675) c3(unconventional myosin-Ia isoform X1) c4( ) c5(334183, 334184, 334185, 334186, 334187, 334188) c6( ) c7(nO, mG, cid, aA, aq, aF, B, Qe); #c1(MY01B) c2(NP_036355) c3(unconventional myosin-Ib isoform 2) c4(173164, 173165) c5(173166, 173167, 173168, 173169, 173170, 173171, 173172, 173173, 173174, 173175, 173176, 173177, 173178, 173179, 173180, 173181, 173182, 173183, 173184, 173185, 173186, 173187, 173188, 173189, 173190, 173191, 173192, 173193, 173194, 173195, 173196) c6( ) c7(fq, A); #c1(MY01B) c2(XP_011509515) c3(unconventional myosin-Ib isoform X1) c4(300086, 300087, 300088, 300089) c5(300090, 300091, 300092, 300093, 300094, 300095, 300096, 300097, 300098, 300099, 300100, 300101, 300102, 300103, 300104) c6( ) c7(fq, A); #c1(MY01B) c2(XP_011509516) c3(unconventional myosin-Ib isoform X2) c4(300105, 300106) c5(300107, 300108, 300109, 300110, 300111, 300112, 300113, 300114, 300115, 300116, 300117, 300118) c6( ) c7(fq, A); #c1(MY01B) c2(XP_011509517) c3(unconventional myosin-Ib isoform X3) c4(300119) c5( ) c6( ) c7(fq, A); #c1(MY01C) c2(NP_001074248) c3(unconventional myosin-Ic isoform a) c4(37049, 37050) c5(37051, 37052, 37053, 37054, 37055, 37056, 37057, 37058, 37059, 37060, 37061, 37062, 37063, 37064, 37065, 37066, 37067, 37068, 37069, 37070, 37071, 37072, 37073, 37074) c6( ) c7(T, mG, n, dL, m, t, eL); #c1(MY01C) c2(NP_001074419) c3(unconventional myosin-Ic isoform b) c4(37097, 37098, 37099, 37100) c5(37101, 37102, 37103, 37104, 37105, 37106, 37107, 37108, 37109, 37110, 37111, 37112) c6( ) c7(T, mG, n, dL, m, t, eL); #c1(MY01D) c2(NP_056009) c3(unconventional myosin-Id isoform 1) c4(185105, 185106) c5(185107, 185108, 185109, 185110, 185111, 185112, 185113, 185114, 185115, 185116, 185117, 185118) c6( ) c7(at, aC, bN, cz); #c1(MY01E) c2(NP_004989) c3(unconventional myosin-Ie) c4(151772) c5(151773, 151774, 151775, 151776, 151777, 151778) c6( ) c7(ne, gi, mG, vw, ah, cie); #c1(MY01F) c2(NP_036467) c3(unconventional myosin-1f) c4(174081, 174082) c5(174083, 174084, 174085, 174086, 174087, 174088, 174089, 174090, 174091, 174092, 174093, 174094) c6( ) c7(mG, ey, iZ); #c1(MY01F) c2(XP_011526330) c3(unconventional myosin-If isoform X5) c4( ) c5(320633, 320634) c6( ) c7(mG, ey, iZ); #c1(MY03A) c2(XP_011517803) c3(myosin-IIIa isoform X1) c4(311725, 311726) c5(311727, 311728, 311729, 311730, 311731, 311732) c6( ) c7(cif, r, bX, Z, y, q); #c1(MY03A) c2(XP_011517806) c3(myosin-IIIa isoform X4) c4(311733) c5( ) c6( ) c7(cif, r, bX, Z, y, q); #c1(MY03A) c2(XP_011517807) c3(myosin-IIIa isoform X5) c4(311734) c5( ) c6( ) c7(cif, r, bX, Z, y, q); #c1(MY03A) c2(XP_011517813) c3(myosin-IIIa isoform X11) c4( ) c5(311735, 311736, 311737, 311738, 311739, 311740, 311741, 311742, 311743, 311744, 311745, 311746, 311747, 311748, 311749, 311750, 311751, 311752) c6( ) c7(cif, r, bX, Z, y, q); #c1(MY038) c2(NP_001077084) c3(myosin-IIIb isoform 1) c4(37708) c5(37709, 37710, 37711, 37712, 37713, 37714) c6( ) c7(Tp); #c1(MY038) c2(NP_620482) c3(myosin-IIIb isoform 2) c4(237701) c5(237702, 237703, 237704, 237705, 237706, 237707, 237708) c6( ) c7(Tp); #c1(MY038) c2(XP_006712362) c3(myosin-IIIb isoform X2) c4(286603, 286604) c5(286605, 286606, 286607, 286608, 286609, 286610, 286611, 286612, 286613, 286614, 286615) c6( ) c7(Tp); #c1(MY05A) c2(NP_000250) c3(unconventional myosin-Va isoform 1) c4(5761) c5(5762, 5763, 5764, 5765, 5766, 5767, 5768, 5769, 5770, 5771, 5772, 5773) c6( ) c7(cig, ceE, T, hk, Y, cih, gd, at, dL, ey, bX); #c1(MY05A) c2(NP_001135967) c3(unconventional myosin-Va isoform 2) c4(53747, 53748) c5(53749, 53750, 53751, 53752, 53753, 53754, 53755, 53756, 53757, 53758, 53759, 53760, 53761, 53762, 53763, 53764, 53765, 53766) c6( ) c7(cig, ceE, T, hk, Y, cih, gd, at, dL, ey, bX); #c1(MY05A) c2(XP_005254454) c3(unconventional myosin-Va isoform X3) c4(273219) c5(273220, 273221, 273222, 273223, 273224, 273225) c6( ) c7(cig, ceE, T, hk, Y, cih, gd, at, dL, ey, bX); #c1(MY05A) c2(XP_011519911) c3(unconventional myosin-Va isoform XB) c4(314697) c5(314698, 314699, 314700, 314701, 314702, 314703) c6( ) c7(cig, ceE, T, hk, Y, cih, gd, at, dL, ey, bX); #c1(MY05A) c2(XP_011519912) c3(unconventional myosin-Va isoform X7) c4(314704) c5( ) c6( ) c7(cig, ceE, T, hk, Y, cih, gd, at, dL, ey, bX); #c1(MY05A) c2(XP_011519913) c3(unconventional myosin-Va isoform XB) c4(314705) c5( ) c6( ) c7(cig, ceE, T, hk, Y, cih, gd, at, dL, ey, bX); #c1(MY058) c2(NP_001073936) c3(unconventional myosin-Vb) c4(36596, 36597, 36598) c5(36599, 36600, 36601, 36602, 36603, 36604, 36605, 36606, 36607, 36608, 36609, 36610, 36611, 36612, 36613, 36614, 36615, 36616) c6( ) c7(mO, cii, cA, bpj, lz, ju, hi, awd, aA, n, aj, ag, Km, bK, aF, nc, hJ, xa); #c1(MY05C) c2(NP_061198) c3(unconventional myosin-Vc) c4(199924, 199925) c5(199926, 199927, 199928, 199929, 199930, 199931, 199932, 199933, 199934, 199935, 199936, 199937, 199938, 199939) c6( ) c7(IB); #c1(MY05C) c2(XP_011520083) c3(unconventional myosin-Vc isoform X1) c4(314979, 314980, 314981) c5(314982, 314983, 314984, 314985, 314986, 314987, 314988, 314989, 314990, 314991, 314992, 314993, 314994, 314995, 314996, 314997) c6( ) c7(IB); #c1(MY06) c2(NP_001287828) c3(unconventional myosin-V1 isoform 2) c4(112943) c5( ) c6( ) c7(cik, ae, T, mG, cz, aQV, cij, cil, hn, ci, IB, Bh, ad); #c1(MY06) c2(NP_004990) c3(unconventional myosin-VI isoform 1) c4(151779) c5(151780, 151781, 151782, 151783, 151784, 151785, 151786, 151787, 151788, 151789, 151790, 151791, 151792, 151793, 151794, 151795, 151796, 151797, 151798, 151799, 151800, 151801, 151802, 151803, 151804, 151805, 151806, 151807, 151808, 151809) c6( ) c7(cik, ae, T, mG, cz, aQV, cij, cil, hn, ci, IB, Bh, ad); #c1(MY06) c2(XP_005248776) c3(unconventional myosin-V1 isoform X1) c4(268574) c5( ) c6( ) c7(cik, ae, T, mG, cz, aQV, cij, cil, hn, ci, IB, Bh, ad); #c1(MY06) c2(XP_005248777) c3(unconventional myosin-V1 isoform X2) c4(268575) c5( ) c6( ) c7(cik, ae, T, mG, cz, aQV, cij, cil, hn, ci, IB, Bh, ad); #c1(MY06) c2(XP_005248778) c3(unconventional myosin-VI isoform X3) c4(268576) c5(268577, 268578, 268579, 268580, 268581, 268582) c6( ) c7(cik, ae, T, mG, cz, aQV, cij, cil, hn, ci, IB, Bh, ad); #c1(MY06) c2(XP_005248783) c3(unconventional myosin-V1 isoform X6) c4(268583) c5( ) c6( ) c7(cik, ae, T, mG, cz, aQV, cij, cil, hn, ci, IB, Bh, ad); #c1(MY07A) c2(NP_000251) c3(unconventional myosin-VIIa isoform 1) c4(5774, 5775, 5776) c5(5777, 5778, 5779, 5780, 5781, 5782, 5783, 5784, 5785, 5786, 5787, 5788, 5789, 5790, 5791, 5792, 5793, 5794) c6( ) c7(dD, nx, n, eq, nc, Nh, Fs, alx, cim, IR, Y, cds, Xz, Tp, nC, cin, cin, W, hk, mG, nw, Bh); #c1(MY07A) c2(NP_001120651) c3(unconventional myosin-VIIa isoform 3) c4(44374, 44375) c5(44376, 44377, 44378, 44379, 44380, 44381, 44382, 44383, 44384, 44385, 44386, 44387) c6( ) c7(dD, nx, n, eq, nc, Nh, Fs, alx, cim, IR, Y, cds, Xz, Tp, nC, cin, cin, W, hk, mG, nw, Bh); #c1(MY07A) c2(NP_001120652) c3(unconventional myosin-VIIa isoform 2) c4(44388) c5(44389, 44390, 44391, 44392, 44393, 44394) c6( ) c7(dD, nx, n, eq, nc, Nh, Fs, alx, cim, IR, Y, cds, Xz, Tp, nC, cin, cin, W, hk, mG, nw, Bh); #c1(MY07A) c2(XP_006718624) c3(unconventional myosin-VIIa isoform X14) c4(291942) c5(291943, 291944, 291945, 291946, 291947, 291948) c6( ) c7(dD, nx, n, eq, nc, Nh, Fs, alx, cim, IR, Y, cds, Xz, Tp, nC, cin, cin, W, hk, mG, nw, Bh); #c1(MY07A) c2(XP_011543351) c3(unconventional myosin-VIIa isoform X10) c4(342132) c5(342133, 342134, 342135, 342136, 342137, 342138) c6( ) c7(dD, nx, n, eq, nc, Nh, Fs, alx, cim, IR, Y, cds, Xz, Tp, nC, cin, cin, W, hk, mG, nw, Bh); #c1(MY07A) c2(XP_011543352) c3(unconventional myosin-VIIa isoform X11) c4(342139) c5(342140, 342141, 342142, 342143, 342144, 342145) c6( ) c7(dD, nx, n, eq, nc, Nh, Fs, alx, cim, IR, Y, cds, Xz, Tp, nC, cin, cin, W, hk, mG, nw, Bh); #c1(MY07A) c2(XP_011543354) c3(unconventional myosin-VIIa isoform X13) c4( ) c5(342146) c6( ) c7(dD, nx, n, eq, nc, Nh, Fs, alx, cim, IR, Y, cds, Xz, Tp, nC, cin, cin, W, hk, mG, nw, Bh); #c1(MY078) c2(NP_001073996) c3(unconventional myosin-VIIb) c4(36854, 36855, 36856) c5(36857, 36858, 36859, 36860, 36861, 36862, 36863, 36864, 36865, 36866, 36867, 36868, 36869, 36870, 36871, 36872, 36873, 36874, 36875, 36876, 36877, 36878) c6( ) c7(dy, ac); #c1(MY09A) c2(NP_008832) c3(unconventional myosin-IXa) c4(168911, 168912) c5(168913, 168914, 168915, 168916, 168917, 168918, 168919, 168920, 168921, 168922, 168923, 168924) c6( ) c7(Tp); #c1(MY09A) c2(XP_006720602) c3(unconventional myosin-IXa isoform X4) c4(293580) c5(293581, 293582, 293583, 293584, 293585, 293586) c6( ) c7(Tp); #c1(MY09A) c2(XP_011519922) c3(unconventional myosin-IXa isoform X6) c4(314706) c5(314707, 314708, 314709, 314710, 314711, 314712) c6( ) c7(Tp); #c1(MY09A) c2(XP_011519923) c3(unconventional myosin-IXa isoform X7) c4(314713) c5( ) c6( ) c7(Tp); #c1(MY09A) c2(XP_011519924) c3(unconventional myosin-IXa isoform X8) c4( ) c5(314714, 314715, 314716, 314717, 314718, 314719) c6( ) c7(Tp); #c1(MY098) c2(NP_001123537) c3(unconventional myosin-IXb isoform 2) c4(47449) c5(47450, 47451, 47452, 47453, 47454, 47455, 47456, 47457) c6( ) c7(b, It, cip, A, IV, eZ, fe, gy, hp, BE, wb, iV, i, f, V, y); #c1(MY098) c2(NP_004136) c3(unconventional myosin-IXb isoform 1) c4( ) c5(143840, 143841, 143842) c6( ) c7(b, It, cip, A, IV, eZ, fe, gy, hp, BE, wb, iV, i, f, V, y); #c1(MY098) c2(XP_011526332) c3(unconventional myosin-IXb isoform X2) c4(320635) c5( ) c6( ) c7(b, It, cip, A, IV, eZ, fe, gy, hp, BE, wb, iV, i, f, V, y); #c1(MY098) c2(XP_011526336) c3(unconventional myosin-IXb isoform X6) c4( ) c5(320636, 320637, 320638, 320639, 320640) c6( ) c7(b, It, cip, A, IV, eZ, fe, gy, hp, BE, wb, iV, i, f, V, y); #c1(MY0C) c2(NP_000252) c3(myocilin precursor) c4(5795, 5796, 5797, 5798) c5(5799, 5800, 5801, 5802, 5803, 5804, 5805, 5806, 5807, 5808, 5809, 5810, 5811, 5812, 5813, 5814, 5815, 5816, 5817, 5818, 5819, 5820, 5821, 5822, 5823, 5824) c6( ) c7(HQ, cZ, DD, bbH, ec, vd, K, an, dd, bbG, IR, dH, wF, Pg, dw, bbE, vD, pZ, DW, cig, Be, bbF, JJ, IJ, cir); #c1(MY0CD) c2(NP_001139784) c3(myocardin isoform 1) c4(59915, 59916) c5(59917, 59918, 59919, 59920, 59921, 59922) c6( ) c7(T, cc, VR, hW, aW, au, aT, Bm, cz, vc, Au, aS, K, aRD, hZ); #c1(MY0CD) c2(NP_705832) c3(myocardin isoform 2) c4(246296) c5(246297, 246298, 246299, 246300, 246301, 246302) c6( ) c7(T, cc, VR, hW, aW, au, aT, Bm, cz, vc, Au, aS, K, aRD, hZ); #c1(MY0CD) c2(XP_005256920) c3(myocardin isoform X1) c4(274582, 274583) c5(274584, 274585, 274586, 274587, 274588, 274589, 274590, 274591, 274592, 274593, 274594, 274595) c6( ) c7(T, cc, VR, hW, aW, au, aT, Bm, cz, vc, Au, aS, K, aRD, hZ); #c1(MY0CD) c2(XP_005256921) c3(myocardin isoform X2) c4( ) c5(274596, 274597, 274598, 274599, 274600, 274601) c6( ) c7(T, cc, VR, hW, aW, au, aT, Bm, cz, vc, Au, aS, K, aRD, hZ); #c1(MY0D1) c2(NP_002469) c3(myoblast determination protein 1) c4(129110) c5(129111, 129112, 129113, 129114, 129115, 129116, 129117) c6( ) c7(T, FW, if, Or, eX, mL iW, cz, v, ci, qN, cd, g, bv, dY, vJ, oj, aT, eV, hn, bwV, MD, Qr, aW, xs, fO, r, g, iV, t, Vi, ck, bP, wk, oh, m, Xu); #c1(MY0F) c2(NP_038479) c3(myoferlin isoform a) c4(176695, 176696, 176697) c5(176698, 176699, 176700, 176701, 176702, 176703, 176704, 176705, 176706, 176707, 176708, 176709) c6( ) c7(adu, T, cc, aW, xs, aT); #c1(MY0F) c2(NP_579899) c3(myoferlin isoform b) c4(234707) c5(234708, 234709, 234710, 234711, 234712, 234713, 234714, 234715, 234716, 234717, 234718, 234719) c6( ) c7(adu, T, cc, aW, xs, aT); #c1(MY0F) c2(XP_005269750) c3(myoferlin isoform X1) c4(282753, 282754) c5(282755, 282756, 282757, 282758, 282759, 282760, 282761, 282762, 282763, 282764, 282765, 282766) c6( ) c7(adu, T, cc, aW, xs, aT); #c1(MY0G) c2(NP_002470) c3(myogenin) c4(129118) c5(129119, 129120, 129121, 129122, 129123, 129124, 129125) c6( ) c7(bv, hM, cdV, anR, LL, Or, pd, fO, Ad, kf, v, hi, Xu, Vi, cm, xe, Wg, dR); #c1(MY0M1) c2(NP_003794) c3(myomesin-1 isoform a) c4(140912, 140913) c5(140914, 140915, 140916, 140917, 140918, 140919, 140920, 140921, 140922, 140923, 140924, 140925) c6( ) c7(aPm); #c1(MY0M1) c2(NP_062830) c3(myomesin-1 isoform b) c4(202179) c5(202180, 202181, 202182, 202183, 202184, 202185) c6( ) c7(aPm); #c1(MY0M2) c2(NP_003961) c3(myomesin-2) c4(142479) c5(142480, 142481, 142482, 142483, 142484, 142485) c6( ) c7(T, Ke, fd, bS, et, sD, ad, hX, cit, ke, zw, pe, pN, gd, aT, ey, kU, vO, tw, afu, qZ, aQk, up, aW, Y, Ih, wc, cr, r, Io, CQ, Z, zJ, cis, W, ac, RB, bPc, gr, AH, gZ, bzm, azy, hE, bH, aMk); #c1(MY0T) c2(NP_001129412) c3(myotilin isoform b) c4( ) c5(51462, 51463, 51464, 51465, 51466) c6( ) c7(md, cc, no, ciu, Ws, Am, xs, aWn, oj, bt, km, akB, civ, K, bSc, bX, hi, alj, bgM, aTm); #c1(MY0T) c2(NP_001287840) c3(myotilin isoform c) c4( ) c5(112993) c6( ) c7(md, cc, no, ciu, Ws, Am, xs, aWn, oj, bt, km, akB, civ, K, bSc, bX, hi, alj, bgM, aTm); #c1(MY0T) c2(NP_006781) c3(myotilin isoform a) c4(168013, 168014) c5(168015, 168016, 168017, 168018, 168019, 168020) c6( ) c7(md, cc, no, ciu, Ws, Am, xs, aWn, oj, bt, km, akB, civ, K, bSc, bX, hi, alj, bgM, aTm); #c1(MY0Z1) c2(NP_067068) c3(myozenin-1) c4(208804) c5(208805, 208806, 208807, 208808, 208809, 208810) c6( ) c7(mx, km, mo); #c1(MY0Z2) c2(NP_057683) c3(mynzenin-2) c4(192326) c5(192327, 192328, 192329, 192330, 192331, 192332) c6( ) c7(cc, Am, mx, km, oj, uY, vc, ciw, fy); #c1(MY0Z3) c2(XP_011536006) c3(mynzenin-3 isoform X1) c4(333266) c5(333267, 333268, 333269, 333270, 333271, 333272, 333273, 333274, 333275, 333276) c6( ) c7(km); #c1(MYPN) c2(NP_001243196) c3(myopalladin isoform a) c4(90099, 90100, 90101) c5(90102, 90103, 90104, 90105, 90106, 90107, 90108, 90109, 90110, 90111, 90112, 90113, 90114, 90115, 90116, 90117, 90118, 90119) c6( ) c7(AX, cc, mx, vc, cix, K, vd, mo, cau); #c1(MYPN) c2(NP_001243197) c3(myopalladin isoform b) c4(90120, 90121) c5( ) c6( ) c7(AX, cc, mx, vc, cix, K, vd, mo, cau); #c1(MYPN) c2(XP_006718106) c3(myopalladin isoform X2) c4( ) c5(291508, 291509, 291510, 291511, 291512, 291513, 291514, 291515, 291516, 291517, 291518, 291519) c6( ) c7(AX, cc, mx, vc, cix, K, vd, mo, cau); #c1(MYRF) c2(NP_001120864) c3(myelin regulatory factor isoform 2 precursor) c4(44865) c5(44866, 44867, 44868, 44869, 44870, 44871) c6( ) c7(v); #c1(MYRF) c2(NP_037411) c3(myelin regulatory factor isoform 1) c4(175367) c5(175368, 175369, 175370, 175371, 175372, 175373) c6( ) c7(v); #c1(MYRF) c2(XP_011543536) c3(myelin regulatory factor isoform X8) c4(342457) c5(342458, 342459, 342460, 342461, 342462, 342463) c6( ) c7(v); #c1(MYRFL) c2(XP_011537358) c3(myelin regulatory factor-like protein isoform X9) c4(335044) c5(335045, 335046, 335047, 335048, 335049, 335050) c6( ) c7(cd, alv, hH); #c1(MYRIP) c2(NP_001271352) c3(rab effector MyRIP isoform a) c4(103928) c5(103929, 103930, 103931, 103932, 103933, 103934, 103935, 103936, 103937, 103938, 103939, 103940, 103941, 103942, 103943, 103944) c6( ) c7(ciy, aaw, d, W, fq); #c1(MYRIP) c2(NP_001271354) c3(rab effector MyRIP isoform c) c4(103945, 103946) c5(103947, 103948, 103949, 103950, 103951, 103952) c6( ) c7(ciy, aaw, d, W, fq); #c1(MYT1) c2(NP_004526) c3(myelin transcription factor 1) c4(147247, 147248, 147249) c5(147250, 147251, 147252, 147253, 147254, 147255, 147256, 147257, 147258, 147259, 147260, 147261, 147262, 147263, 147264, 147265, 147266, 147267, 147268) c6( ) c7(bmQ, nM, aT, eo, ci, nA, V); #c1(MYT1L) c2(NP_001289981) c3(myelin transcription factor 1-like protein isoform 1) c4(114933) c5(114934, 114935, 114936, 114937, 114938, 114939, 114940) c6( ) c7(bO, aA, aF, v, Z, Fc); #c1(MYT1L) c2(NP_055840) c3(myelin transcription factor 1-like protein isoform 2) c4(183819, 183820) c5(183821, 183822, 183823, 183824, 183825, 183826, 183827, 183828, 183829, 183830, 183831, 183832) c6( ) c7(bO, aA, aF, v, Z, Fc); #c1(MYT1L) c2(XP_011508628) c3(myelin transcription factor 1-like protein isoform X4) c4(299243) c5( ) c6( ) c7(bO, aA, aF, v, Z, Fc); #c1(MYT1L) c2(XP_011508631) c3(myelin transcription factor 1-like protein isoform X7) c4( ) c5(299244, 299245, 299246, 299247, 299248, 299249) c6( ) c7(bO, aA, aF, v, Z, Fc); #c1(MYZAP) c2(NP_001018110) c3(myocardial zonula adherens protein isoform 1 precursor) c4(27341, 27342, 27343) c5(27344, 27345, 27346, 27347, 27348, 27349, 27350, 27351, 27352, 27353, 27354, 27355, 27356, 27357, 27358, 27359, 27360, 27361, 27362, 27363, 27364, 27365, 27366, 27367, 27368, 27369, 27370) c6( ) c7(ae, K, ad); #c1(MYZAP) c2(NP_689664) c3(myocardial zonula adherens protein isoform 2) c4(243515, 243516) c5(243517, 243518, 243519, 243520, 243521, 243522, 243523, 243524, 243525, 243526, 243527, 243528, 243529, 243530, 243531, 243532) c6( ) c7(ae, K, ad); #c1(MZB1) c2(NP_057543) c3(marginal zone B- and B1-cell-specific protein precursor) c4(191328, 191329, 191330) c5(191331, 191332, 191333, 191334, 191335, 191336, 191337, 191338, 191339, 191340, 191341, 191342, 191343, 191344, 191345, 191346, 191347, 191348) c6( ) c7(gh, T, aA, fd, KD, aj, v, uu, aY, V, J, ad, aE, bK, K, he, ae, hM, EX, ag, yg, cm, bz, hg, bP, Ei, cj, ei, bt, B); #c1(MZF1) c2(NP_001253962) c3(myeloid zinc finger 1 isoform 2) c4(94245) c5(94246, 94247, 94248, 94249, 94250) c6( ) c7(aq, T, if, B, gN); #c1(MZF1) c2(XP_006723422) c3(myeloid zinc finger 1 isoform X1) c4(295199) c5(295200, 295201, 295202, 295203, 295204, 295205, 295206, 295207) c6( ) c7(aq, T, if, B, gN); #c1(MZF1) c2(XP_011525566) c3(myeloid zinc finger 1 isoform X3) c4( ) c5(319977, 319978, 319979) c6( ) c7(aq, T, if, B, gN); #c1(MZF1) c2(XP_011525568) c3(myeloid zinc finger 1 isoform X4) c4( ) c5(319980) c6( ) c7(aq, T, if, B, gN); #c1(N4BP1) c2(NP_694574) c3(NEDD4-binding protein 1) c4(245302) c5(245303, 245304, 245305, 245306, 245307, 245308) c6( ) c7(y, cj); #c1(N4BP2L1) c2(NP_001073159) c3(NEDD4-binding protein 2-like 1 isoform 2) c4(35654) c5(35655, 35656, 35657, 35658, 35659, 35660) c6( ) c7(dL); #c1(N4BP2L1) c2(NP_001273388) c3(NEDD4-binding protein 2-like 1 isoform 1) c4(104825) c5(104826, 104827, 104828, 104829, 104830, 104831) c6( ) c7(dL); #c1(N4BP2L1) c2(XP_011533604) c3(NEDD4-binding protein 2-like 1 isoform X3) c4(329712) c5( ) c6( ) c7(dL); #c1(N4BP2L1) c2(XP_011533606) c3(NEDD4-binding protein 2-like 1 isoform X5) c4( ) c5(329713) c6( ) c7(dL); #c1(N4BP2L1) c2(XP_011533607) c3(NEDD4-binding protein 2-like 1 isoform XG) c4( ) c5(329714, 329715, 329716, 329717, 329718) c6( ) c7(dL); #c1(N4BP2L2) c2(NP_001265361) c3(NEDD4-binding protein 2-like 2 isoform 3) c4(98377) c5( ) c6( ) c7(gV, hG, r, IQ, Pk, B); #c1(N4BP2L2) c2(NP_055702) c3(NEDD4-binding protein 2-like 2 isoform 2) c4(182886) c5(182887, 182888, 182889, 182890, 182891, 182892) c6( ) c7(gV, hG, r, IQ, Pk, B); #c1(N4BP2L2) c2(NP_149102) c3(NEDD4-binding protein 2-like 2 isoform 1) c4(227165) c5(227166, 227167, 227168, 227169, 227170, 227171, 227172, 227173, 227174, 227175, 227176, 227177) c6( ) c7(gV, hG, r, IQ, Pk, B); #c1(NAA10) c2(NP_001243048) c3(N-alpha-acetyltransferase 1D isoform 2) c4(89667, 89668) c5(89669, 89670, 89671, 89672, 89673, 89674, 89675, 89676, 89677, 89678, 89679, 89680, 89681, 89682) c6( ) c7(ciz, T, kj, Db, aW, apW, aT, Bm, r, adB, ji, apx, q, bJ); #c1(NAA10) c2(NP_003482) c3(N-alpha-acetyltransferase 1D isoform 1) c4(138695) c5(138696, 138697, 138698, 138699, 138700, 138701, 138702, 138703, 138704, 138705) c6( ) c7(ciz, T, kj, Db, aW, apW, aT, Bm, r, adB, ji, apx, q, bJ); #c1(NAA15) c2(NP_476516) c3(N-alpha-acetyltransferase 15, NatA auxiliary subunit) c4(230722, 230723) c5(230724, 230725, 230726, 230727, 230728, 230729, 230730, 230731, 230732, 230733, 230734, 230735) c6( ) c7(T, hd, Db, ci, pk, vt); #c1(NAA15) c2(XP_005263293) c3(N-alpha-acetyltransferase 15, NatA auxiliary subunit isoform X1) c4(278387) c5(278388, 278389, 278390, 278391, 278392, 278393) c6( ) c7(T, hd, Db, ci, pk, vt); #c1(NAA16) c2(NP_001104268) c3(N-alpha-acetyltransferase 16, NatA auxiliary subunit isoform 3) c4(42089) c5(42090, 42091, 42092, 42093, 42094, 42095) c6( ) c7(azs, T, bM, bB, x, gs, eL, aW, NR, g, ba, eM, nB, cX, bcI, k, m, NT, n, cQ, aj, fr, amJ, h, dL, hB, aOX, fe, Qy, at, it, B, bL, blI, aA, cz, q, J, eA, XX, nv, aT, sX, ae, bkI, avV, s, nO, bg, r, eS, en, cT, iQ, ig, ciA, bt, hlu, hS, qx, iW, ha, jh, ad, kL, hX, dP, I, hd, NS, oW, io, BO, ff, eZ, Ej, aF, bz, bF, apM, bE, X, pP, i, hE, iu, y); #c1(NAA16) c2(NP_078837) c3(N-alpha-acetyltransferase 16, NatA auxiliary subunit isoform 1) c4(215661) c5(215662, 215663, 215664, 215665, 215666, 215667) c6( ) c7(azs, T, bM, bB, x, gs, eL, aW, NR, g, ba, eM, nB, cX, bcI, k, m, NT, n, cQ, aj, fr, amJ, h, dL, hB, aOX, fe, Qy, at, it, B, bL, blI, aA, cz, q, J, eA, XX, nv, aT, sX, ae, bkI, avV, s, nO, bg, r, eS, en, cT, iQ, ig, ciA, bt, hlu, hS, qx, iW, ha, jh, ad, kL, hX, dP, I, hd, NS, oW, io, BO, ff, eZ, Ej, aF, bz, bF, apM, bE, X, pP, i, hE, iu, y); #c1(NAA16) c2(XP_011533530) c3(N-alpha-acetyltransferase 16, NatA auxiliary subunit isoform X4) c4(329652) c5(329653, 329654, 329655, 329656, 329657, 329658) c6( ) c7(azs, T, bM, bB, x, gs, eL, aW, NR, g, ba, eM, nB, cX, bcI, k, m, NT, n, cQ, aj, fr, amJ, h, dL, hB, aOX, fe, Qy, at, it, B, bL, blI, aA, cz, q, J, eA, XX, nv, aT, sX, ae, bkI, avV, s, nO, bg, r, eS, en, cT, iQ, ig, ciA, bt, hlu, hS, qx, iW, ha, jh, ad, kL, hX, dP, I, hd, NS, oW, io, BO, ff, eZ, Ej, aF, bz, bF, apM, bE, X, pP, i, hE, iu, y); #c1(NAA20) c2(NP_057184) c3(N-alpha-acetyltransferase 20 isoform a) c4(189349) c5(189350, 189351, 189352, 189353, 189354, 189355) c6( ) c7(K); #c1(NAA20) c2(NP_852668) c3(N-alpha-acetyltransferase 20 isoform b) c4(255118) c5(255119, 255120, 255121, 255122, 255123, 255124) c6( ) c7(K); #c1(NAA20) c2(NP_852669) c3(N-alpha-acetyltransferase 20 isoform c) c4(255125) c5(255126, 255127, 255128, 255129, 255130, 255131) c6( ) c7(K); #c1(NAA25) c2(NP_079229) c3(N-alpha-acetyltransferase 25, NatB auxiliary subunit) c4(217548) c5(217549, 217550, 217551, 217552, 217553, 217554) c6( ) c7(bL, T, cz, n, cL, hy, j, ci, C, AO, ai, eA, o, aE, aT, zy, af, A, qt, aW, cr, r, eZ, tv, tu, iK, y, amL); #c1(NAA30) c2(NP_001011713) c3(N-alpha-acetyltransferase 30) c4(24775, 24776) c5(24777, 24778, 24779, 24780, 24781, 24782, 24783, 24784, 24785, 24786, 24787, 24788) c6( ) c7(W); #c1(NAA35) c2(NP_078911) c3(N-alpha-acetyltransferase 35, NatC auxiliary subunit) c4(216067, 216068, 216069) c5(216070, 216071, 216072, 216073, 216074, 216075, 216076, 216077, 216078, 216079, 216080, 216081, 216082, 216083, 216084, 216085, 216086, 216087) c6( ) c7(T, it); #c1(NAA40) c2(NP_001287729) c3(N-alpha-acetyltransferase 40 isoform 2) c4( ) c5(112678, 112679, 112680, 112681, 112682, 112683, 112684, 112685, 112686, 112687, 112688, 112689) c6( ) c7(aq, B); #c1(NAA40) c2(NP_079047) c3(N-alpha-acetyltransferase 40 isoform 1) c4(216744, 216745) c5( ) c6( ) c7(aq, B); #c1(NAA50) c2(NP_079422) c3(N-alpha-acetyltransferase 50) c4(218050, 218051) c5(218052, 218053, 218054, 218055, 218056, 218057) c6( ) c7(cF, xU, Z, nb, aFa, bhl, aql, bS, et, AG, aDC, fu); #c1(NAA60) c2(NP_001077069) c3(N-alpha-acetyltransferase 60) c4(37640) c5(37641, 37642, 37643, 37644, 37645, 37646, 37647, 37648, 37649, 37650, 37651) c6( ) c7(oe); #c1(NAAA) c2(NP_001035861) c3(N-acylethanolamine-hydrolyzing acid amidase isoform 2 precursor) c4( ) c5(33284, 33285, 33286, 33287, 33288, 33289, 33290, 33291, 33292, 33293, 33294, 33295, 33296, 33297, 33298, 33299) c6( ) c7(T, arI, aW, e, qr, aT, af, Gc, ad); #c1(NAAA) c2(XP_005262977) c3(N-acylethanolamine-hydrolyzing acid amidase isoform X1) c4(278182, 278183, 278184) c5(278185, 278186, 278187, 278188, 278189, 278190) c6( ) c7(T, arI, aW, e, gr, aT, af, Gc, ad); #c1(NAALAD2) c2(XP_011540854) c3(N-acetylated-alpha-linked acidic dipeptidase 2 isoform X3) c4(339360) c5(339361, 339362, 339363, 339364, 339365, 339366, 339367) c6( ) c7(e); #c1(NAALAD2) c2(XP_011540856) c3(N-acetylated-alpha-linked acidic dipeptidase 2 isoform X6) c4(339368) c5(339369, 339370, 339371, 339372, 339373) c6( ) c7(e); #c1(NAALADL1) c2(NP_005459) c3(N-acetylated-alpha-linked acidic dipeptidase-like protein) c4(156354, 156355, 156356) c5(156357, 156358, 156359, 156360, 156361, 156362, 156363, 156364, 156365, 156366, 156367, 156368) c6( ) c7(cm, vA); #c1(NAALADL1) c2(XP_011543008) c3(N-acetylated-alpha-linked acidic dipeptidase-like protein isoform X1) c4( ) c5(341693, 341694, 341695, 341696, 341697, 341698) c6( ) c7(cm, vA); #c1(NAALADL1) c2(XP_011543012) c3(N-acetylated-alpha-linked acidic dipeptidase-like protein isoform X5) c4(341699) c5(341700, 341701, 341702, 341703, 341704, 341705) c6( ) c7(cm, vA); #c1(NAALADL2) c2(NP_996898) c3(inactive N-acetylated-alpha-linked acidic dipeptidase-like protein 2) c4(264864) c5(264865, 264866, 264867, 264868, 264869, 264870) c6( ) c7(aNL, lf); #c1(NAALADL2) c2(XP_011510918) c3(inactive N-acetylated-alpha-linked acidic dipeptidase-like protein 2 isoform X5) c4(301391) c5(301392) c6( ) c7(aNL, lf); #c1(NAALADL2) c2(XP_011510919) c3(inactive N- acetylated-alpha-linked acidic dipeptidase-like protein 2 isoform X6) c4( ) c5(301393, 301394, 301395, 301396, 301397) c6( ) c7(aNL, lf); #c1(NAB1) c2(NP_005957) c3(NGFI-A-binding protein 1) c4(160719, 160720, 160721, 160722) c5(160723, 160724, 160725, 160726, 160727, 160728, 160729, 160730, 160731, 160732, 160733) c6( ) c7(ne, be, bkW); #c1(NAB1) c2(XP_005246643) c3(NGFI-A-binding protein 1 isoform X2) c4(267251, 267252) c5(267253, 267254, 267255, 267256, 267257, 267258) c6( ) c7(oe, be, bkW); #c1(NAB1) c2(XP_005246644) c3(NGFI-A-binding protein 1 isoform X5) c4(267259, 267260, 267261) c5(267262, 267263, 267264, 267265, 267266, 267267, 267268, 267269, 267270, 267271, 267272, 267273, 267274, 267275, 267276, 267277, 267278, 267279, 267280, 267281, 267282, 267283, 267284, 267285, 267286, 267287, 267288, 267289, 267290, 267291, 267292, 267293, 267294, 267295, 267296, 267297, 267298, 267299, 267300, 267301, 267302) c6( ) c7(oe, be, bkW); #c1(NAB2) c2(NP_005958) c3(NGFI-A-binding protein 2) c4(160734) c5(160735, 160736, 160737, 160738, 160739, 160740, 160741, 160742) c6( ) c7(ae, bkW, aW, au, ff, aT, en, pk, bz, ad); #c1(NAB2) c2(XP_005268951) c3(NGFI-A-binding protein 2 isoform X1) c4(282213, 282214) c5(282215, 282216, 282217, 282218, 282219, 282220, 282221, 282222, 282223, 282224, 282225) c6( ) c7(ae, bkW, aW, au, ff, aT, en, pk, bz, ad); #c1(NABP1) c2(NP_001026886) c3(SOSS complex subunit 82 isoform 1) c4(29844, 29845) c5(29846, 29847, 29848, 29849, 29850, 29851, 29852, 29853) c6( ) c7(it); #c1(NABP1) c2(NP_001241665) c3(SOSS complex subunit 82 isoform 2) c4( ) c5(89028, 89029, 89030, 89031, 89032, 89033, 89034, 89035) c6( ) c7(it); #c1(NABP2) c2(NP_076973) c3(SOSS complex subunit B1) c4( ) c5(214529, 214530, 214531, 214532, 214533, 214534, 214535, 214536, 214537, 214538, 214539, 214540, 214541, 214542, 214543, 214544, 214545, 214546, 214547, 214548, 214549) c6( ) c7(T, aKO, B, K); #c1(NABP2) c2(XP_005269203) c3(SOSS complex subunit B1 isoform X2) c4(282476, 282477, 282478) c5(282479, 282480, 282481, 282482) c6( ) c7(T, aKO, B, K); #c1(NABP2) c2(XP_005269204) c3(SOSS complex subunit B1 isoform X3) c4( ) c5(282483) c6( ) c7(T, aKO, B, K); #c1(NACA) c2(NP_001106674) c3(nascent polypeptide-associated complex subunit alpha isoform a) c4(42574) c5(42575, 42576, 42577, 42578, 42579, 42580) c6( ) c7(f, pq, af); #c1(NACA) c2(XP_006719476) c3(nascent polypeptide-associated complex subunit alpha isoform X2) c4( ) c5(292518, 292519, 292520, 292521) c6( ) c7(f, pq, af); #c1(NACA) c2(XP_006719484) c3(nascent polypeptide-associated complex subunit alpha isoform X1) c4(292522, 292523, 292524) c5(292525, 292526, 292527, 292528, 292529, 292530, 292531, 292532, 292533, 292534, 292535, 292536, 292537, 292538, 292539, 292540, 292541, 292542, 292543, 292544, 292545, 292546, 292547, 292548, 292549, 292550, 292551, 292552, 292553, 292554) c6( ) c7(f, pq, af); #c1(NACA) c2(XP_011536691) c3(nascent polypeptide-associated complex subunit alpha isoform X3) c4(334225) c5(334226, 334227, 334228, 334229, 334230, 334231, 334232, 334233, 334234, 334235, 334236, 334237, 334238, 334239) c6( ) c7(f, pq, af); #c1(NACC1) c2(XP_005259778) c3(nucleus accumbens-associated protein 1 isoform X1) c4(276298) c5(276299, 276300, 276301, 276302, 276303, 276304, 276305) c6( ) c7(T, auY, Y, if, ff, cm, n, agF, np, ci, m, en, qN, t, g, Tj); #c1(NACC2) c2(XP_011516523) c3(nucleus accumbens-associated protein 2 isoform X1) c4(309934) c5(309935, 309936, 309937, 309938, 309939, 309940, 309941, 309942, 309943, 309944, 309945) c6( ) c7(ac, Ea); #c1(NADSYN1) c2(NP_060631) c3(glutamine-dependent NAOH synthetase) c4(196912, 196913) c5(196914, 196915, 196916, 196917, 196918, 196919, 196920, 196921, 196922, 196923, 196924, 196925) c6( ) c7(A, ac, e, r, dy, j, y, q); #c1(NAE1) c2(NP_001018169) c3(NEDD8-activating enzyme E1 regulatory subunit isoform b) c4(27507, 27508) c5(27509, 27510, 27511, 27512, 27513, 27514) c6( ) c7(T, s, pf, aA, r, aF, g, g, YQ, f, X); #c1(NAE1) c2(NP_001273429) c3(NEDD8-activating enzyme E1 regulatory subunit isoform d) c4( ) c5(104880) c6( ) c7(T, s, pf, aA, r, aF, g, g, YQ, f, X); #c1(NAE1) c2(NP_003896) c3(NEDD8-activating enzyme E1 regulatory subunit isoform a) c4(141940) c5(141941, 141942, 141943, 141944, 141945, 141946) c6( ) c7(T, s, pf, aA, r, aF, g, g, YQ, f, X); #c1(NAE1) c2(XP_011521724) c3(NEDD8-activating enzyme E1 regulatory subunit isoform X1) c4( ) c5(316445, 316446, 316447, 316448, 316449) c6( ) c7(T, s, pf, aA, r, aF, g, g, YQ, f, X); #c1(NAF1) c2(NP_001122403) c3(H/ACA ribonucleoprotein complex non-core subunit NAF1 isoform b) c4(46789) c5(46790, 46791, 46792, 46793, 46794, 46795) c6( ) c7(sb, y, hi, aWF); #c1(NAF1) c2(NP_612395) c3(H/ACA ribonucleoprotein complex non-core subunit NAF1 isoform a) c4(236363) c5(236364, 236365, 236366, 236367, 236368, 236369) c6( ) c7(sb, y, hi, aWF); #c1(NAGA) c2(XP_005261673) c3(alpha-N-acetylgalactosaminidase isoform X1) c4(277578) c5(277579, 277580, 277581, 277582, 277583, 277584, 277585, 277586, 277587, 277588, 277589, 277590, 277591, 277592) c6( ) c7(aR, cc, ciD, ciC, ds, hO, ciB, dr, aya); #c1(NAGK) c2(NP_060037) c3(N-acetyl-D-glucosamine kinase) c4(193817, 193818) c5(193819, 193820, 193821, 193822, 193823, 193824, 193825, 193826, 193827, 193828, 193829, 193830) c6( ) c7(ad); #c1(NAGLU) c2(NP_000254) c3(alpha-N-acetylglucosaminidase precursor) c4(5825) c5(5826, 5827, 5828, 5829, 5830, 5831) c6( ) c7(jf, if, IE, arl, Yc, tb, aBU, kg, aAh, awd, KW, jN, bw, Io, Lq, ww, nA, R, cm, dx, ad); #c1(NAGLU) c2(XP_011523142) c3(alpha-N-acetylglucosaminidase isoform X2) c4(317681) c5(317682, 317683, 317684, 317685, 317686, 317687) c6( ) c7(jf, if, IE, arl, Yc, tb, aBU, kg, aAh, awd, KW, jN, bw, Io, Lq, ww, nA, R, cm, dx, ad); #c1(NAGPA) c2(NP_057340) c3(N-acetylglucosamine-1-phosphodiester alpha-N-acetylglucosaminidase precursor) c4(190185, 190186) c5(190187, 190188, 190189, 190190, 190191, 190192, 190193, 190194, 190195, 190196, 190197, 190198, 190199) c6( ) c7(aQQ); #c1(NAGS) c2(NP_694551) c3(N-acetylglutamate synthase, mitochondrial) c4(245129, 245130) c5(245131, 245132, 245133, 245134, 245135, 245136, 245137, 245138, 245139, 245140, 245141, 245142, 245143, 245144, 245145, 245146, 245147, 245148, 245149, 245150, 245151, 245152, 245153, 245154, 245155, 245156, 245157, 245158, 245159, 245160, 245161, 245162, 245163, 245164, 245165, 245166, 245167, 245168, 245169, 245170, 245171, 245172, 245173, 245174, 245175, 245176, 245177, 245178, 245179, 245180, 245181, 245182, 245183, 245184, 245185, 245186, 245187, 245188, 245189, 245190, 245191, 245192, 245193, 245194, 245195, 245196, 245197, 245198, 245199, 245200, 245201, 245202, 245203, 245204, 245205, 245206, 245207, 245208, 245209, 245210, 245211, 245212, 245213, 245214, 245215, 245216, 245217, 245218, 245219, 245220, 245221, 245222, 245223, 245224, 245225, 245226, 245227, 245228, 245229, 245230, 245231, 245232, 245233, 245234, 245235, 245236, 245237, 245238, 245239, 245240, 245241, 245242, 245243, 245244, 245245, 245246, 245247, 245248, 245249, 245250, 245251, 245252, 245253, 245254, 245255, 245256, 245257, 245258, 245259, 245260, 245261, 245262, 245263, 245264, 245265, 245266, 245267, 245268, 245269, 245270, 245271, 245272, 245273, 245274, 245275) c6(245276) c7(ciE, aip); #c1(NAGS) c2(XP_011522741) c3(N-acetylglutamate synthase, mitochondrial isoform X2) c4(317268) c5(317269, 317270, 317271, 317272, 317273) c6( ) c7(ciE, aip); #c1(NAIP) c2(NP_004527) c3(baculnviral IAP repeat-containing protein 1 isoform 1) c4(147269) c5(147270, 147271, 147272, 147273, 147274, 147275, 147276, 147277, 147278, 147279) c6( ) c7(oO, ck, T, d, apg, c, apl, arX, aT, kf, cy, hO, bw, hi, g, rz, V, ae, ad); #c1(NAIP) c2(NP_075043) c3(baculnviral IAP repeat-containing protein 1 isoform 2) c4(213532) c5(213533, 213534, 213535, 213536, 213537, 213538, 213539, 213540, 213541, 213542) c6( ) c7(oO, ck, T, d, apg, c, apl, arX, aT, kf, cy, hO, bw, hi, g, rz, V, ae, ad); #c1(NALCN) c2(XP_011519369) c3(sodium leak channel nnn-selective protein isoform X2) c4(314017, 314018) c5(314019, 314020) c6( ) c7(cd, he, bK, ciF); #c1(NALCN) c2(XP_011519370) c3(sndium leak channel nnn-selective protein isoform X1) c4( ) c5(314021, 314022, 314023, 314024, 314025) c6( ) c7(cd, he, bK, ciF); #c1(NALCN) c2(XP_011519371) c3(sndium leak channel nnn-selective protein isoform X3) c4(314026, 314027) c5( ) c6( ) c7(cd, he, bK, ciF); #c1(NALCN) c2(XP_011519372) c3(sndium leak channel nnn-selective protein isoform X4) c4( ) c5(314028, 314029, 314030, 314031, 314032, 314033, 314034, 314035, 314036, 314037, 314038, 314039, 314040, 314041, 314042, 314043, 314044, 314045) c6( ) c7(cd, he, bK, ciF); #c1(NAMPT) c2(XP_005250157) c3(nicotinamide phosphoribnsyltransferase isoform X1) c4(270107, 270108, 270109, 270110, 270111, 270112) c5(270113, 270114, 270115, 270116, 270117, 270118, 270119, 270120, 270121, 270122, 270123, 270124, 270125, 270126, 270127, 270128, 270129, 270130, 270131, 270132, 270133, 270134, 270135, 270136) c6( ) c7(bL, T, dD, fR, aZ, ea, al, EQ, fF, fd, fg, afK, dG, j, aj, C, v, eg, JW, ai, J, eA, GK, eJ, xE, aE, M, aT, cy, dL, ey, K, uV, bg, dQ, gM, ji, eL, d, aW, fJ, fO, fc, fe, iV, fg, eK, ck, eM, iT, mg, mf, aS, dy, fD, ei, y, bt); #c1(NAMPT) c2(XP_011514009) c3(nicotinamide phosphoribnsyltransferase isoform X2) c4( ) c5(306414, 306415, 306416, 306417, 306418, 306419, 306420, 306421, 306422, 306423, 306424, 306425) c6( ) c7(bL, T, dD, fR, aZ, ea, al, EQ, fF, fd, fg, afK, dG, j, aj, C, v, eg, JW, ai, J, eA, GK, eJ, xE, aE, M, aT, cy, dL, ey, K, uV, bg, dO, gM, ji, eL, d, aW, f J, fO, fc, fe, iV, fg, eK, ck, eM, iT, mg, mf, aS, dy, fD, ei, y, bt); #c1(NANOG) c2(NP_001284627) c3(homeobox protein NANOG isoform 2) c4(112159, 112160) c5(112161, 112162, 112163, 112164, 112165, 112166, 112167, 112168, 112169, 112170, 112171, 112172) c6( ) c7(T, wu, if, ne, jh, fZ, bB, Hn, ci, qN, g, ad, eA, BI, anc, aT, rO, aAE, wm, nJ, ae, d, ZH, gP, B, vT, aW, CN, Lf, ff, r, ag, en, bu, as, t, iR, ck, bE, eD, Lb, m, KY, X); #c1(NANOG) c2(NP_079141) c3(homeobox protein NANOG isoform 1) c4(217215) c5(217216, 217217, 217218, 217219, 217220, 217221, 217222, 217223, 217224, 217225, 217226, 217227, 217228) c6( ) c7(T, wu, if, ne, jh, fZ, bB, Hn, ci, qN, g, ad, eA, BI, anc, aT, rO, aAE, wm, nJ, ae, d, ZH, gP, B, vT, aW, CN, Lf, ff, r, ag, en, bu, as, t, iR, ck, bE, eD, Lb, m, KY, X); #c1(NANOG) c2(XP_011519154) c3(homeobox protein NANOG isoform X3) c4( ) c5(313755) c6( ) c7(T, wu, if, ne, jh, fZ, bB, Hn, ci, qN, g, ad, eA, BI, anc, aT, rO, aAE, wm, nJ, ae, d, ZH, gP, B, vT, aW, CN, Lf, ff, r, ag, en, bu, as, t, iR, ck, bE, eD, Lb, m, KY, X); #c1(NANOS1) c2(NP_955631) c3(nanos homolog 1) c4(261911, 261912) c5(261913, 261914, 261915, 261916, 261917, 261918, 261919, 261920, 261921, 261922, 261923, 261924) c6( ) c7(tJ, bM, eR, qb, iW, age, uG, yY, cz, bS, gf, et, fr, bzg, Jt, V, aY, cd, ciG, eA, ip, HE, aE, aT, K, he, gD, rz, aW, Y, ff, HL, Ku, en, Z, es, pH, cT, ac, eM, bjL, fy, xg, an); #c1(NANOS2) c2(NP_001025032) c3(nanos homolog 2) c4(29239) c5(29240, 29241, 29242, 29243, 29244, 29245) c6( ) c7(ID, bM, T, ciH, gU, dD, ea, jx, bB, n, tc, auq, eq, C, eq, eh, g, aR, ad, ai, F, oW, aT, dV, io, dL, vd, K, hB, H, ae, af, ao, VF, eL, ly, A, zH, dH, aW, wf, hi, cr, r, eZ, ag, Io, bz, pb, lx, bF, pu, ac, c, nM, bE, cj, aAl, amb, y, aen, B, hv); #c1(NANOS3) c2(NP_001092092) c3(nanns homolog 3) c4(39310, 39311) c5(39312, 39313, 39314, 39315, 39316, 39317, 39318, 39319, 39320, 39321, 39322, 39323) c6( ) c7(P, bL, bM, dD, gO, pG, ID, ZI, qb, aZ, ea, e, pf, aw, bO, cz, sM, cR, bS, j, et, gf, ci, ur, uu, aY, v, cd, ad, ip, x, aif, vJ, il, M, axe, aT, eg, rO, dL, bK, K, dO, ae, bPQ, eL, hm, uX, ly, A, dH, cW, asP, aW, aeS, eR, dw, Z, zZ, vo, pb, ga, lx, adA, ayt, ac, cA, nM, wE, mG, mx, U, vy, wR, re, aS, k, dy, fD, ei, 1C, sZ, y); #c1(NANS) c2(NP_061819) c3(sialic acid synthase) c4(200490) c5(200491, 200492, 200493, 200494, 200495, 200496) c6( ) c7(T, sw, ha, aA, bS, et, iJ, yg, h, cU, d, ff, eH, aF, en, eF, cm, Z, iK, QG, au, QC, AG, cil, nz, bt); #c1(NANS) c2(XP_011517089) c3(sialic acid synthase isoform X1) c4(310623, 310624) c5( ) c6( ) c7(T, sw, ha, aA, bS, et, iJ, yg, h, cU, d, ff, eH, aF, en, eF, cm, Z, iK, QG, au, QC, AG, cil, nz, bt); #c1(NANS) c2(XP_011517090) c3(sialic acid synthase isoform X2) c4( ) c5(310625, 310626, 310627, 310628, 310629, 310630, 310631, 310632, 310633, 310634, 310635, 310636) c6( ) c7(T, sw, ha, aA, bS, et, iJ, yg, h, cU, d, ff, eH, aF, en, eF, cm, Z, iK, QG, au, QC, AG, cil, nz, bt); #c1(NAP1L1) c2(NP_004528) c3(nucleosome assembly protein 1-like 1) c4(147280, 147281, 147282) c5(147283, 147284, 147285, 147286, 147287, 147288, 147289, 147290, 147291, 147292, 147293, 147294, 147295, 147296, 147297, 147298, 147299, 147300, 147301, 147302, 147303, 147304, 147305, 147306, 147307, 147308) c6( ) c7(T, d, af, dB, aW, eL, cr, aT, n, aTI, tv, tu, K, C, EY, dL, cm, ae, g, ad, amL); #c1(NAP1L1) c2(XP_006719488) c3(nucleosome assembly protein 1-like 1 isoform X7) c4(292555) c5(292556, 292557, 292558, 292559, 292560, 292561, 292562, 292563, 292564, 292565, 292566, 292567) c6( ) c7(T, d, af, dB, aW, eL, cr, aT, n, aTI, tv, tu, K, C, EY, dL, cm, ae, g, ad, amL); #c1(NAP1L1) c2(XP_011536692) c3(nucleosome assembly protein 1-like 1 isoform X2) c4(334240, 334241, 334242) c5(334243, 334244, 334245, 334246) c6( ) c7(T, d, af, dB, aW, eL, cr, aT, n, aTI, tv, tu, K, C, EY, dL, cm, ae, g, ad, amL); #c1(NAP1L3) c2(NP_004529) c3(nucleosome assembly protein 1-like 3) c4(147309, 147310) c5(147311, 147312, 147313, 147314, 147315, 147316, 147317, 147318, 147319, 147320, 147321, 147322) c6( ) c7(ae, ad); #c1(NAP1L4) c2(NP_005960) c3(nucleosome assembly protein 1-like 4) c4(160756, 160757, 160758, 160759, 160760, 160761, 160762, 160763, 160764) c5(160765, 160766, 160767, 160768, 160769, 160770, 160771, 160772, 160773, 160774, 160775, 160776, 160777, 160778, 160779, 160780, 160781, 160782, 160783, 160784, 160785, 160786, 160787, 160788, 160789, 160790, 160791, 160792, 160793, 160794, 160795, 160796, 160797, 160798, 160799, 160800, 160801, 160802, 160803, 160804, 160805, 160806, 160807, 160808, 160809, 160810, 160811, 160812, 160813, 160814, 160815, 160816, 160817, 160818) c6( ) c7(n, er, K); #c1(NAP1L5) c2(NP_715638) c3(nucleosome assembly protein 1-like 5) c4(246684, 246685) c5(246686, 246687, 246688, 246689, 246690, 246691, 246692, 246693, 246694, 246695, 246696, 246697) c6( ) c7(v); #c1(NAPA) c2(NP_003818) c3(alpha-soluble NSF attachment protein) c4(141119) c5(141120, 141121, 141122, 141123, 141124, 141125) c6( ) c7(ul, K, Gx); #c1(NAPEPLD) c2(XP_006725119) c3(N-acyl-phosphatidylethanolamine-hydrolyzing phospholipase D isoform X1) c4(296573, 296574, 296575) c5(296576, 296577, 296578, 296579, 296580, 296581, 296582, 296583, 296584, 296585, 296586, 296587, 296588, 296589, 296590, 296591, 296592, 296593, 296594, 296595, 296596, 296597, 296598, 296599, 296600, 296601, 296602, 296603, 296604, 296605, 296606, 296607, 296608, 296609, 296610, 296611, 296612) c6( ) c7(hp, W); #c1(NAPG) c2(NP_003817) c3(gamma-soluble NSF attachment protein) c4(141111) c5(141112, 141113, 141114, 141115, 141116, 141117, 141118) c6( ) c7(vr, ciJ, bK); #c1(NAPG) c2(XP_011524057) c3(gamma-soluble NSF attachment protein isoform X2) c4(318648) c5( ) c6( ) c7(vr, ciJ, bK); #c1(NAPG) c2(XP_011524058) c3(gamma-soluble NSF attachment protein isoform X3) c4( ) c5(318649, 318650, 318651, 318652, 318653) c6( ) c7(vr, ciJ, bK); #c1(NAPRT) c2(NP_001273758) c3(nicotinate phosphoribosyltransferase isoform 2) c4(105781) c5(105782, 105783, 105784, 105785, 105786, 105787) c6( ) c7(T, d); #c1(NAPRT) c2(NP_660202) c3(nicotinate phosphoribosyltransferase isoform 1) c4(240510, 240511, 240512) c5(240513, 240514, 240515, 240516, 240517, 240518, 240519, 240520, 240521, 240522, 240523, 240524, 240525, 240526, 240527, 240528, 240529, 240530) c6( ) c7(T, d); #c1(NAPSA) c2(XP_011525842) c3(napsin-A isoform X1) c4(320247) c5(320248, 320249, 320250, 320251, 320252, 320253, 320254, 320255) c6(320256, 320257) c7(T, n, ci, C, lu, VV, eJ, K, af, d, ff, cr, tv, tu, en, g, as, t, bz, m, iu, amL); #c1(NARFL) c2(NP_001291728) c3(cytosolic Fe-S cluster assembly factor NARFL isoform 2) c4( ) c5(116428, 116429, 116430, 116431, 116432, 116433) c6( ) c7(uJ, ac); #c1(NARFL) c2(NP_071938) c3(cytosolic Fe-S cluster assembly factor NARFL isoform 1) c4(212408, 212409, 212410) c5(212411, 212412, 212413, 212414, 212415, 212416, 212417, 212418, 212419, 212420, 212421, 212422) c6( ) c7(uJ, ac); #c1(NARR) c2(NP_001243210) c3(ras-related protein Rab-34, isoform NARR) c4( ) c5(90174) c6( ) c7(aW, aT); #c1(NARS) c2(NP_004530) c3(asparagine-tRNA ligase, cytoplasmic) c4(147323, 147324, 147325, 147326) c5(147327, 147328, 147329, 147330, 147331, 147332, 147333, 147334, 147335, 147336, 147337) c6( ) c7(g, r); #c1(NARS) c2(XP_005266757) c3(asparagine-tRNA ligase, cytoplasmic isoform X1) c4( ) c5(280305, 280306, 280307, 280308, 280309, 280310, 280311, 280312, 280313, 280314, 280315, 280316, 280317) c6( ) c7(g, r); #c1(NAT1) c2(NP_001153646) c3(arylamine N-acetyltransferase 1 isoform a) c4( ) c5(60825, 60826, 60827, 60828, 60829, 60830, 60831, 60832, 60833, 60834, 60835, 60836, 60837, 60838, 60839, 60840, 60841, 60842, 60843, 60844, 60845, 60846, 60847) c6( ) c7(gx, azs, T, GI, bM, fR, sQ, aC, fV, Ol, id, jx, aCw, iW, aA, bB, fd, hy, jE, bX, fw, g, ad, hX, Na, XW, av, jz, ib, aE, amJ, NS, aT, Nc, dL, IQ, Od, jj, ae, af, bkI, eL, aAX, ny, avV, BN, B, s, BA, aW, AO, mO, ff, Sn, ge, r, ag, cr, aF, eZ, en, g, iV, cm, iK, bz, bJ, ck, cT, apM, Ip, bE, dJ, X, cj, uo, aSp, ut, oQ, bt, ne, blu); #c1(NAT1) c2(NP_001278891) c3(arylamine N-acetyltransferase 1 isoform b) c4(110819, 110820, 110821) c5(110822, 110823, 110824, 110825, 110826, 110827, 110828, 110829, 110830, 110831, 110832, 110833, 110834) c6( ) c7(gx, azs, T, GI, bM, fR, sQ, aC, fV, OL id, jx, aCw, iW, aA, bB, fd, hy, jE, bX, fw, g, ad, hX, Na, XW, av, jz, ib, aE, amJ, NS, aT, Nc, dL, IQ, Od, jj, ae, af, bkI, eL, aAX, ny, avV, BN, B, s, BA, aW, AO, mO, ff, Sn, ge, r, ag, cr, aF, eZ, en, g, iV, cm, iK, bz, bJ, ck, cT, apM, Ip, bE, dJ, X, cj, uo, aSp, ut, oQ, bt, ne, blu); #c1(NAT10) c2(XP_011518499) c3(N-acetyltransferase 1D isoform X1) c4(312569, 312570) c5(312571, 312572, 312573, 312574, 312575, 312576, 312577, 312578, 312579, 312580, 312581, 312582) c6( ) c7(Zu, T1, vT, HY, TH, TG, ZB, TJ, bE, eH, au, bB, ag, rx, h, fd, eF, y, nJ, B, be); #c1(NAT14) c2(NP_065111) c3(N-acetyltransferase 14) c4(203973) c5(203974, 203975, 203976, 203977, 203978, 203979, 203980, 203981, 203982, 203983) c6( ) c7(Rg); #c1(NAT2) c2(XP_011542660) c3(arylamine N-acetyltransferase 2 isoform X1) c4(341215) c5(341216, 341217, 341218, 341219, 341220, 341221) c6( ) c7(azs, atT, T, bM, aC, fR, fV, ciK, aI, fd, bB, Ij, ci, ip, x, XW, Na, il, fS, ja, gs, hH, eL, aAX, aW, hi, NR, g, as, eE, uC, ha, y, eM, nB, Ip, iT, U, cj, uo, cX, bcI, k, m, iu, dD, sQ, sw, OL ht, NT, n, cQ, aj, fr, qN, jz, cc, amJ, h, Gw, dL, hB, aOX, ny, A, sp, fJ, AO, ge, fe, ag, bJ, Qy, W, dB, at, uz, ut, it, B, bL, aCw, blI, dK, aA, cz, hy, aNG, j, g, J, eA, XX, nv, aT, Nc, an, sX, ae, bkI, af, ne, avV, s, nO, bg, r, eS, en, t, ck, cT, iO, ig, mG, ciA, bt, blu, vi, hS, qx, GI, id, iW, ha, jh, Gn, jE, asl, eg, ad, kL, hX, dP, av, I, hd, ib, Db, NS, oW, io, IQ, XL 80, hG, cH, ff, Sn, cr, eZ, Ej, aF, iV, qW, ciL, bz, bE, es, apM, atM, bE, dO, pP, aSp, dX, Gu, i, hE, X, rk, BA); #c1(NAT6) c2(NP_001186947) c3(N-acetyltransferase 6 isoform 2) c4( ) c5(78836, 78837, 78838, 78839, 78840, 78841, 78842, 78843, 78844, 78845, 78846, 78847, 78848, 78849, 78850, 78851, 78852, 78853, 78854, 78855, 78856, 78857, 78858, 78859, 78860, 78861, 78862) c6( ) c7(ja); #c1(NAT6) c2(NP_036323) c3(N-acetyltransferase 6 isoform 1) c4(173009, 173010, 173011, 173012) c5(173013, 173014, 173015, 173016, 173017, 173018, 173019, 173020, 173021, 173022, 173023, 173024) c6( ) c7(ja); #c1(NAT8) c2(NP_003951) c3(N-acetyltransferase 8) c4(142414) c5(142415, 142416, 142417, 142418, 142419, 142420) c6( ) c7(T, eR, uv, ht, cz, aj, fo, g, ad, kL, Na, fO, b, hd, M, aT, dL, hu, ae, af, eL, avV, aW, ff, hi, cr, r, eZ, Ej, fe, aF, en, dw, iK, bz, ck, ac, iT, nB, hO, bcI, dy, i, hE, it, B, y); #c1(NAT8B) c2(NP_057431) c3(putative N-acetyltransferase 88) c4(190772) c5( ) c6( ) c7(cT, T, af, bE, aW, eL, aT, fO, cy, r, dL, bB, iV, ae, q, ad); #c1(NAT8L) c2(NP_848652) c3(N-acetylaspartate synthetase) c4(254074, 254075) c5(254076, 254077, 254078, 254079, 254080, 254081, 254082, 254083, 254084, 254085, 254086, 254087) c6( ) c7(ciM); #c1(NAV1) c2(NP_001161210) c3(neuron navigator 1 isoform 2) c4(65496) c5(65497, 65498, 65499, 65500, 65501, 65502, 65503) c6( ) c7(aW, oe, aT); #c1(NAV1) c2(NP_065176) c3(neuron navigator 1 isoform 1) c4(204462) c5(204463, 204464, 204465, 204466, 204467, 204468) c6( ) c7(aW, oe, aT); #c1(NAV1) c2(XP_006711673) c3(neuron navigator 1 isoform X9) c4( ) c5(286209, 286210, 286211, 286212, 286213) c6( ) c7(aW, oe, aT); #c1(NAV1) c2(XP_006711674) c3(neuron navigator 1 isoform X10) c4( ) c5(286214, 286215, 286216, 286217, 286218) c6( ) c7(aW, oe, aT); #c1(NAV1) c2(XP_011508399) c3(neuron navigator 1 isoform X1) c4(299110, 299111) c5(299112, 299113, 299114, 299115, 299116, 299117) c6( ) c7(aW, oe, aT); #c1(NAV1) c2(XP_011508400) c3(neuron navigator 1 isoform X2) c4(299118) c5(299119, 299120, 299121, 299122, 299123, 299124) c6( ) c7(aW, oe, aT); #c1(NAV1) c2(XP_011508401) c3(neuron navigator 1 isoform X3) c4(299125) c5(299126) c6( ) c7(aW, oe, aT); #c1(NAV1) c2(XP_011508402) c3(neuron navigator 1 isoform X4) c4(299127) c5(299128, 299129, 299130, 299131, 299132, 299133) c6( ) c7(aW, oe, aT); #c1(NAV2) c2(NP_001104488) c3(neuron navigator 2 isoform 3) c4(42096) c5(42097, 42098, 42099, 42100, 42101, 42102) c6( ) c7(bB, cm, q); #c1(NAV2) c2(NP_001104489) c3(neuron navigator 2 isoform 4) c4(42103) c5(42104, 42105, 42106, 42107, 42108, 42109, 42110, 42111, 42112, 42113) c6( ) c7(bB, cm, q); #c1(NAV2) c2(NP_001231892) c3(neuron navigator 2 isoform 5) c4(87671) c5(87672, 87673, 87674, 87675, 87676, 87677) c6( ) c7(bB, cm, q); #c1(NAV2) c2(NP_660093) c3(neuron navigator 2 isoform 2) c4(240349) c5(240350, 240351, 240352, 240353, 240354, 240355) c6( ) c7(bB, cm, q); #c1(NAV2) c2(NP_892009) c3(neuron navigator 2 isoform 1) c4(257570) c5(257571, 257572, 257573, 257574, 257575, 257576) c6( ) c7(bB, cm, q); #c1(NAV2) c2(XP_005253271) c3(neuron navigator 2 isoform X15) c4(272359) c5(272360, 272361, 272362, 272363, 272364, 272365) c6( ) c7(bB, cm, q); #c1(NAV2) c2(XP_006718429) c3(neuron navigator 2 isoform X12) c4(291854) c5(291855, 291856, 291857, 291858, 291859, 291860) c6( ) c7(bB, cm, q); #c1(NAV2) c2(XP_011518750) c3(neuron navigator 2 isoform X9) c4(313146) c5( ) c6( ) c7(bB, cm, q); #c1(NAV2) c2(XP_011518753) c3(neuron navigator 2 isoform X13) c4( ) c5(313147, 313148, 313149, 313150, 313151, 313152) c6( ) c7(bB, cm, q); #c1(NAV3) c2(NP_001019554) c3(neuron navigator 3 isoform 1) c4(27790) c5(27791, 27792, 27793, 27794, 27795, 27796) c6( ) c7(bM, T, eO, d, VR, s, af, aE, xR, aw, r, fr, ci, cm, q); #c1(NAV3) c2(NP_055718) c3(neuron navigator 3 isoform 2) c4(183023, 183024) c5(183025, 183026, 183027, 183028, 183029, 183030, 183031, 183032, 183033, 183034, 183035, 183036) c6( ) c7(bM, T, e0, d, VR, s, af, aE, xR, aw, r, fr, ci, cm, q); #c1(NAV3) c2(XP_006719740) c3(neuron navigator 3 isoform X9) c4( ) c5(292952, 292953, 292954, 292955, 292956, 292957) c6( ) c7(bM, T, e0, d, VR, s, af, aE, xR, aw, r, fr, ci, cm, q); #c1(NAV3) c2(XP_011537243) c3(neuron navigator 3 isoform X3) c4(334974) c5(334975, 334976, 334977, 334978, 334979, 334980) c6( ) c7(bM, T, e0, d, VR, s, af, aE, xR, aw, r, fr, ci, cm, q); #c1(NAV3) c2(XP_011537246) c3(neuron navigator 3 isoform X7) c4(334981) c5(334982, 334983, 334984, 334985, 334986, 334987) c6( ) c7(bM, T, eO, d, VR, s, af, aE, xR, aw, r, fr, ci, cm, q); #c1(NAV3) c2(XP_011537247) c3(neuron navigator 3 isoform X8) c4(334988) c5( ) c6( ) c7(bM, T, eO, d, VR, s, af, aE, xR, aw, r, fr, ci, cm, q); #c1(NBAS) c2(NP_056993) c3(neuroblastoma-amplified sequence) c4(188369) c5(188370, 188371, 188372, 188373, 188374, 188375) c6( ) c7(jf, if, ciN, cZ, IE, tb, Yc, bYA, aAh, awd, KW, aA, jN, bw, awK, ww, dd, Gp, cm, dx); #c1(NBAS) c2(XP_011508663) c3(neuroblastoma-amplified sequence isoform X5) c4(299278) c5(299279, 299280, 299281, 299282, 299283, 299284) c6( ) c7(jf, if, ciN, cZ, IE, tb, Yc, bYA, aAh, awd, KW, aA, jN, bw, awK, ww, dd, Gp, cm, dx); #c1(NBEA) c2(NP_001191126) c3(neurobeachin isoform 2) c4( ) c5(81061, 81062, 81063, 81064, 81065) c6( ) c7(T, ac, fd, v, rz, bN); #c1(NBEA) c2(NP_056493) c3(neurobeachin isoform 1) c4(187755, 187756, 187757) c5(187758, 187759, 187760, 187761, 187762, 187763, 187764, 187765, 187766, 187767, 187768, 187769, 187770, 187771, 187772, 187773, 187774) c6( ) c7(T, ac, fd, v, rz, bN); #c1(NBEA) c2(XP_005266404) c3(neurobeachin isoform X1) c4( ) c5(Z79991, 279992) c6( ) c7(T, ac, fd, v, rz, bN); #c1(NBEA) c2(XP_005266407) c3(neurobeachin isoform X5) c4(279993) c5( ) c6( ) c7(T, ac, fd, v, rz, bN); #c1(NBEA) c2(XP_006719869) c3(neurobeachin isoform X10) c4(293037, 293038) c5(293039, 293040, 293041, 293042, 293043, 293044, 293045, 293046, 293047, 293048, 293049, 293050, 293051, 293052, 293053, 293054, 293055, 293056) c6( ) c7(T, ac, fd, v, rz, bN); #c1(NBEA) c2(XP_011533347) c3(neurobeachin isoform X6) c4(329470) c5( ) c6( ) c7(T, ac, fd, v, rz, bN); #c1(NBEA) c2(XP_011533348) c3(neurobeachin isoform X7) c4(329471) c5(329472, 329473, 329474, 329475, 329476, 329477, 329478, 329479, 329480) c6( ) c7(T, ac, fd, v, rz, bN); #c1(NBEAL1) c2(NP_001107604) c3(neurobeachin-like protein 1) c4(42889, 42890) c5(42891, 42892, 42893, 42894, 42895, 42896, 42897, 42898, 42899, 42900, 42901, 42902) c6( ) c7(eA); #c1(NBEAL2) c2(NP_055990) c3(neurobeachin-like protein 2) c4(184968) c5(184969, 184970, 184971, 184972, 184973, 184974, 184975, 184976, 184977, 184978, 184979, 184980, 184981, 184982, 184983, 184984, 184985, 184986) c6( ) c7(T, xu, r, pq, dX, q); #c1(NBEAL2) c2(XP_005265049) c3(neurobeachin-like protein 2 isoform X4) c4(279411) c5(279412, 279413, 279414, 279415, 279416, 279417) c6( ) c7(T, xu, r, pq, dX, g); #c1(NBEAL2) c2(XP_011531835) c3(neurobeachin-like protein 2 isoform X3) c4(327902) c5(327903, 327904, 327905, 327906, 327907, 327908) c6( ) c7(T, xu, r, pq, dX, g); #c1(NBEAL2) c2(XP_011531836) c3(neurobeachin-like protein 2 isoform X5) c4(327909, 327910) c5( ) c6( ) c7(T, xu, r, pq, dX, g); #c1(NBN) c2(NP_002476) c3(nibrin) c4(129158, 129159) c5(129160, 129161, 129162, 129163, 129164, 129165, 129166, 129167, 129168, 129169, 129170) c6( ) c7(atT, T, aC, if, ci, ip, x, il, Qk, K, eL, zQ, Cn, aW, g, as, iP, eM, nB, iT, aBO, cj, cX, dW, k, m, aBx, n, fr, nA, gg, Bj, h, eV, hn, dL, Gw, CM, QK, dB, at, WL, eX, aA, v, On, V, g, eA, aT, gv, an, ae, jf, gw, kl, wr, Y, r, Io, eS, en, t, iK, ck, sS, Dy, ig, rA, bt, an, GI, iW, jh, oZ, Gn, bRy, hF, ad, av, avp, d, BN, ff, eZ, aJW, bz, dr, adg, ag, bC, kS, sH, ahZ); #c1(NBN) c2(XP_011515348) c3(nibrin isoform X3) c4( ) c5(308194) c6( ) c7(atT, T, aC, if, ci, ip, x, il, Qk, K, eL, zQ, Cn, aW, g, as, iP, eM, nB, iT, aBO, cj, cX, dW, k, m, aBx, n, fr, nA, gg, Bj, h, eV, hn, dL, Gw, CM, QK, dB, at, WL, eX, aA, v, On, V, g, eA, aT, gv, an, ae, jf, gw, kl, wr, Y, r, Io, eS, en, t, iK, ck, sS, Dy, ig, rA, bt, ao, GI, iW, jh, oZ, Gn, bRy, hF, ad, av, avp, d, BN, ff, eZ, aJW, bz, dr, adg, ag, bC, kS, sH, ahZ); #c1(NBPF3) c2(XP_011540583) c3(neuroblastoma breakpoint family member 3 isoform X3) c4(339086, 339087, 339088) c5(339089, 339090, 339091, 339092, 339093) c6( ) c7(hl); #c1(NBR1) c2(NP_001278500) c3(next to BRCA1 gene 1 protein isoform b) c4(ID9767) c5(109768, 109769, 109770, 109771, 109772, 109773) c6( ) c7(bM, T, kh, zX, n, aj, oH, ci, fr, avu, dP, avp, gJ, ib, aE, Db, avs, aT, BO, aW, ff, Qm, en, bjl, cI, t, g, apx, AM, hL, m, avr, iu, hS); #c1(NBR1) c2(NP_001278501) c3(next to BRCA1 gene 1 protein isoform c) c4(109774) c5(109775, 109776, 109777, 109778, 109779, 109780) c6( ) c7(bM, T, kh, zX, n, aj, oH, ci, fr, avu, dP, avp, gJ, ib, aE, Db, avs, aT, BO, aW, ff, Qm, en, bjl, cI, t, g, apx, AM, hL, m, avr, iu, hS); #c1(NBR1) c2(NP_114068) c3(next to BRCA1 gene 1 protein isoform a) c4(222109, 222110, 222111) c5(222112, 222113, 222114, 222115, 222116, 222117, 222118, 222119, 222120, 222121, 222122, 222123, 222124, 222125, 222126, 222127) c6( ) c7(bM, T, kh, zX, n, aj, oH, ci, fr, avu, dP, avp, gJ, ib, aE, Db, avs, aT, BO, aW, ff, Qm, en, bjl, cI, t, g, apx, AM, hL, m, avr, iu, hS); #c1(NBR1) c2(XP_006721966) c3(next to BRCA1 gene 1 protein isoform X2) c4( ) c5(294500, 294501, 294502, 294503, 294504, 294505) c6( ) c7(bM, T, kh, zX, n, aj, oH, ci, fr, avu, dP, avp, gJ, ib, aE, Db, avs, aT, 80, aW, ff, Qm, en, bjl, cI, t, g, apx, AM, hL, m, avr, iu, hS); #c1(NCALD) c2(XP_011515637) c3(neurocalcin-delta isoform X1) c4(308484) c5(308485, 308486, 308487, 308488, 308489, 308490, 308491, 308492, 308493, 308494, 308495, 308496, 308497, 308498, 308499, 308500, 308501, 308502, 308503, 308504, 308505, 308506, 308507) c6( ) c7(bL, uT); #c1(NCAM1) c2(NP_000606) c3(neural cell adhesion molecule 1 isoform 1 precursor) c4(13687) c5(13688, 13689, 13690, 13691, 13692, 13693) c6( ) c7(T, aC, Tb, aAx, fd, bB, ci, a mW, x, bv, aE, pX, K, ajA, ye, g, Fu, cm, bw, mZ, eM, nB, iT, mx, zv, k, Xu, fy, ajm, aiK, IT, aw, T1, cd, ke, ft, no, pe, cc, Xe, ju, gd, kH, h, hn, mY, mV, he, aBI, dx, mO, bZT, AO, mo, Ca, alj, mX, hg, ej, W, cA, bP, dB, hk, hR, IB, B, mL fM, Ik, dA, jx, DV, mS, ti, j, V, q, er, eA, gK, aT, cy, rO, bK, jj, af, jf, iF, hM, s, iO, Y, Io, gm, en, aom, hf, aER, zM, f, Vg, iK, FT, bN, Cv, zJ, ck, nM, iM, nG, km, ciO, bGB, gT, bt, aKB, vi, qx, iW, jh, Hn, wV, pz, hF, dP, av, Tg, hd, F, alp, Db, yt, mW, Dg, oj, oW, vc, vB, iL, MG, uQ, d, je, ue, Gv, ff, eZ, Eg, bz, alm, amS, bE, II, bC, hE, iu, y); #c1(NCAM1) c2(NP_001070150) c3(neural cell adhesion molecule 1 isoform 3 precursor) c4(34604) c5(34605, 34606, 34607, 34608, 34609, 34610) c6( ) c7(T, aC, Tb, aAx, fd, bB, ci, a mW, x, bv, aE, pX, K, ajA, ye, g, Fu, cm, bw, mZ, eM, nB, iT, mx, zv, k, Xu, fy, ajm, aiK, IT, aw, TL cd, ke, ft, no, pe, cc, Xe, ju, gd, kH, h, hn, mY, mV, he, aBI, dx, mO, bZT, AO, mo, Ca, alj, mX, hg, ej, W, cA, bP, dB, hk, hR, IB, B, mL fM, Ik, dA, jx, DV, mS, ti, j, V, q, er, eA, gK, aT, cy, rO, bK, jj, af, jf, iF, hM, s, iO, Y, Io, gm, en, aom, hf, aER, zM, f, Vg, iK, FT, bN, Cv, zJ, ck, nM, iM, nG, km, ciO, bGB, gT, bt, aKB, vi, qx, iW, jh, Hn, wV, pz, hF, dP, av, Tg, hd, F, alp, Db, yt, mW, Dg, oj, oW, vc, vB, iL, MG, uQ, d, je, ue, Gv, ff, eZ, Eg, bz, alm, amS, bE, II, bC, hE, iu, y); #c1(NCAM1) c2(NP_001229537) c3(neural cell adhesion molecule 1 isoform 4 precursor) c4(84617) c5(84618, 84619, 84620, 84621, 84622, 84623) c6( ) c7(T, aC, Tb, aAx, fd, bB, ci, amW, x, bv, aE, pX, K, ajA, ye, g, Fu, cm, bw, mZ, eM, nB, iT, mx, zv, k, Xu, fy, ajm, aiK, IT, aw, TL cd, ke, ft, no, pe, cc, Xe, ju, gd, kH, h, hn, mY, mV, he, aBI, dx, mO, bZT, AO, mo, Ca, alj, mX, hg, ej, W, cA, bP, dB, hk, hR, IB, B, mL fM, Ik, dA, jx, DV, mS, ti, j, V, q, er, eA, gK, aT, cy, rO, bK, jj, af, jf, iF, hM, s, iO, Y, Io, gm, en, aom, hf, aER, zM, f, Vg, iK, FT, bN, Cv, zJ, ck, nM, iM, nG, km, ciO, bGB, gT, bt, aKB, vi, qx, iW, jh, Hn, wV, pz, hE, dP, av, Tg, hd, F, alp, Db, yt, mW, Dg, oj, oW, vc, vB, iL, MG, uQ, d, je, ue, Gv, ff, eZ, Eg, bz, alm, amS, bE, II, bC, hE, iu, y); #c1(NCAM1) c2(NP_851996) c3(neural cell adhesion molecule 1 isoform 2 precursor) c4(254735, 254736, 254737) c5(254738, 254739, 254740, 254741, 254742, 254743, 254744, 254745, 254746, 254747, 254748, 254749, 254750, 254751, 254752, 254753, 254754, 254755) c6( ) c7(T, aC, Tb, aAx, fd, bB, ci, amW, x, bv, aE, pX, K, ajA, ye, g, Fu, cm, bw, mZ, eM, nB, iT, mx, zv, k, Xu, fy, ajm, aiK, IT, aw, TL cd, ke, ft, no, pe, cc, Xe, ju, gd, kH, h, hn, mY, mV, he, aBI, dx, mO, bZT, AO, mo, Ca, alj, mX, hg, ej, W, cA, bP, dB, hk, hR, IB, B, mL fM, Ik, dA, jx, DV, mS, ti, j, V, q, er, eA, gK, aT, cy, rO, bK, jj, af, jf, iF, hM, s, iO, Y, Io, gm, en, aom, hf, aER, zM, f, Vg, iK, FT, bN, Cv, zJ, ck, nM, iM, nG, km, ciO, bGB, gT, bt, aKB, vi, qx, iW, jh, Hn, wV, pz, hE, dP, av, Tg, hd, F, alp, Db, yt, mW, Dg, oj, oW, vc, vB, iL, MG, uQ, d, je, ue, Gv, ff, eZ, Eg, bz, alm, amS, bE, II, bC, hE, iu, y); #c1(NCAM2) c2(NP_004531) c3(neural cell adhesion molecule 2 precursor) c4(147338, 147339) c5(147340, 147341, 147342, 147343, 147344, 147345) c6( ) c7(T, W, c, aW, aT, v, f, af); #c1(NCAM2) c2(XP_011527880) c3(neural cell adhesion molecule 2 isoform X2) c4( ) c5(322989, 322990, 322991, 322992, 322993, 322994) c6( ) c7(T, W, c, aW, aT, v, f, af); #c1(NCAM2) c2(XP_011527883) c3(neural cell adhesion molecule 2 isoform X5) c4(322995) c5( ) c6( ) c7(T, W, c, aW, aT, v, f, af); #c1(NCAM2) c2(XP_011527884) c3(neural cell adhesion molecule 2 isoform XG) c4( ) c5(322996, 322997, 322998, 322999, 323000, 323001) c6( ) c7(T, W, c, aW, aT, v, f, af); #c1(NCAN) c2(NP_004377) c3(neurocan core protein precursor) c4(145910, 145911, 145912) c5(145913, 145914, 145915, 145916, 145917, 145918, 145919, 145920, 145921, 145922, 145923, 145924, 145925, 145926, 145927, 145928, 145929) c6( ) c7(bK, cP, fc); #c1(NCAPD2) c2(NP_055680) c3(condensin complex subunit 1) c4(182733, 182734, 182735) c5(182736, 182737, 182738, 182739, 182740, 182741, 182742, 182743, 182744, 182745, 182746, 182747, 182748, 182749, 182750, 182751, 182752, 182753) c6( ) c7(af, aT); #c1(NCAPD3) c2(NP_056076) c3(condensin-2 complex subunit 03) c4(185540, 185541, 185542) c5(185543, 185544, 185545, 185546, 185547, 185548, 185549, 185550, 185551, 185552, 185553, 185554, 185555, 185556, 185557, 185558, 185559) c6( ) c7(ae, ad); #c1(NCAP6) c2(NP_071741) c3(condensin complex subunit 3) c4(211895) c5(211896, 211897, 211898, 211899, 211900, 211901) c6( ) c7(T, cH, aW, Y, aT, ey, g); #c1(NCAPG2) c2(NP_001268861) c3(condensin-2 complex subunit G2 isoform a) c4(100237, 100238) c5(100239, 100240, 100241, 100242, 100243, 100244, 100245, 100246, 100247, 100248, 100249, 100250, 100251, 100252, 100253) c6( ) c7(aEV, bNu, bcb, ig, h, bDI, ciP); #c1(NCAPG2) c2(NP_001268862) c3(condensin-2 complex subunit G2 isoform b) c4(100254) c5(100255, 100256, 100257, 100258, 100259, 100260, 100261, 100262, 100263, 100264, 100265) c6( ) c7(aEV, bNu, bcb, ig, h, bDI, ciP); #c1(NCAPG2) c2(XP_005249604) c3(condensin-2 complex subunit G2 isoform X2) c4(269713, 269714, 269715) c5(269716, 269717, 269718, 269719, 269720, 269721, 269722, 269723, 269724, 269725, 269726, 269727, 269728) c6( ) c7(aEV, bNu, bcb, ig, h, bDI, ciP); #c1(NCAPG2) c2(XP_011514664) c3(condensin-2 complex subunit G2 isoform X5) c4( ) c5(307316, 307317, 307318, 307319, 307320) c6( ) c7(aEV, bNu, bcb, ig, h, bDI, ciP); #c1(NCBP2) c2(NP_001036005) c3(nuclear cap-binding protein subunit 2 isoform 2) c4(33671) c5(33672, 33673, 33674, 33675, 33676, 33677) c6( ) c7(aW, aT); #c1(NCBP2) c2(NP_031388) c3(nuclear cap-binding protein subunit 2 isoform 1) c4(172173, 172174) c5(172175, 172176, 172177, 172178, 172179, 172180, 172181, 172182, 172183, 172184, 172185, 172186) c6( ) c7(aW, aT); #c1(NCEH1) c2(NP_001139748) c3(neutral cholesterol ester hydrolase 1 isoform a) c4(59830) c5(59831, 59832, 59833, 59834, 59835, 59836, 59837) c6( ) c7(ea, dD, eq, ac); #c1(NCEH1) c2(NP_001139750) c3(neutral cholesterol ester hydrolase 1 isoform c) c4(59838) c5(59839, 59840, 59841, 59842, 59843) c6( ) c7(ea, dD, eq, ac); #c1(NCEH1) c2(NP_065843) c3(neutral cholesterol ester hydrolase 1 isoform b) c4(205812, 205813) c5(205814, 205815, 205816, 205817, 205818, 205819, 205820, 205821, 205822, 205823, 205824, 205825) c6( ) c7(ea, dD, eq, ac); #c1(NCF1) c2(NP_000256) c3(neutrophil cytosol factor 1) c4(5847) c5(5848, 5849, 5850, 5851, 5852, 5853) c6( ) c7(T, dA, eR, qb, e, Ju, ew, cz, jh, aj, v, C, V, cd, J, ad, ai, xE, akJ, dV, dz, ji, baJ, K, bq, asC, ae, af, et, cH, oV, Cu, zb, az, fe, iV, ciQ, eK, alC, ac, AH, uR, eB, bm, wR, eq, y, ra, us); #c1(NCF1) c2(XP_011514800) c3(neutrophil cytosol factor 1 isoform X1) c4(307469) c5( ) c6( ) c7(T, dA, eR, qb, e, Ju, ew, cz, jh, aj, v, C, V, cd, J, ad, ai, xE, akJ, dV, dz, ji, baJ, K, bq, asC, ae, af, et, cH, oV, Cu, zb, az, fe, iV, ciQ, eK, alC, ac, AH, uR, eB, bm, wR, eq, y, ra, us); #c1(NCF1) c2(XP_011514802) c3(neutrophil cytosol factor 1 isoform X5) c4( ) c5(307470, 307471, 307472, 307473, 307474, 307475, 307476) c6( ) c7(T, dA, eR, qb, e, Ju, ew, cz, jh, aj, v, C, V, cd, J, ad, ai, xE, akJ, dV, dz, ji, baJ, K, bq, asC, ae, af, et, cH, oV, Cu, zb, az, fe, iV, ciQ, eK, alC, ac, AH, uR, eB, bm, wR, eq, y, ra, us); #c1(NCF1) c2(XP_011514803) c3(neutrophil cytosol factor 1 isoform X6) c4(307477) c5(307478, 307479, 307480, 307481, 307482) c6( ) c7(T, dA, eR, qb, e, Ju, ew, cz, jh, aj, v, C, V, cd, J, ad, ai, xE, akJ, dV, dz, ji, baJ, K, bq, asC, ae, af, et, cH, oV, Cu, zb, az, fe, iV, ciQ, eK, alC, ac, AH, uR, eB, bm, wR, eq, y, ra, us); #c1(NCF2) c2(NP_001177718) c3(neutrophil cytosol factor 2 isoform 3) c4(72901) c5(72902, 72903, 72904, 72905, 72906, 72907, 72908, 72909, 72910, 72911, 72912, 72913, 72914, 72915, 72916, 72917, 72918, 72919, 72920) c6( ) c7(bM, Dw, dD, ea, iW, cz, n, v, j, eq, eA, py, aT, h, Ds, dL, ey, bq, asC, d, ciR, ciS, Cu, az, Rr, eZ, fe, dB, eB, at, y, ra, rk, cn); #c1(NCF2) c2(NP_001177723) c3(neutrophil cytosol factor 2 isoform 2) c4(72921) c5(72922, 72923, 72924, 72925, 72926, 72927) c6( ) c7(bM, Dw, dD, ea, iW, cz, n, v, j, eq, eA, py, aT, h, Ds, dL, ey, bq, asC, d, ciR, ciS, Cu, az, Rr, eZ, fe, dB, eB, at, y, ra, rk, cn); #c1(NCF2) c2(XP_005245264) c3(neutrophil cytosol factor 2 isoform X2) c4(266365, 266366) c5( ) c6( ) c7(bM, Dw, dD, ea, iW, cz, n, v, j, eq, eA, py, aT, h, Ds, dL, ey, bq, asC, d, ciR, ciS, Cu, az, Rr, eZ, fe, dB, eB, at, y, ra, rk, cn); #c1(NCF2) c2(XP_011507883) c3(neutrophil cytosol factor 2 isoform X1) c4(298095, 298096) c5(298097, 298098, 298099, 298100, 298101, 298102, 298103, 298104, 298105, 298106, 298107, 298108, 298109, 298110, 298111, 298112) c6( ) c7(bM, Dw, dD, ea, iW, cz, n, v, j, eq, eA, py, aT, h, Ds, dL, ey, bq, asC, d, ciR, ciS, Cu, az, Rr, eZ, fe, dB, eB, at, y, ra, rk, cn); #c1(NCF4) c2(NP_000622) c3(neutrophil cytosol factor 4 isoform 1) c4(14021) c5(14022, 14023, 14024, 14025, 14026, 14027) c6( ) c7(ciT, xN, dB, iW, eB, aT, gZ, r, h, fe, iV, eE, y, q, rk); #c1(NCF4) c2(NP_038202) c3(neutrophil cytosol factor 4 isoform 2) c4(176258, 176259) c5(176260, 176261, 176262, 176263, 176264, 176265, 176266, 176267, 176268, 176269, 176270, 176271, 176272) c6( ) c7(ciT, xN, dB, iW, eB, aT, gZ, r, h, fe, iV, eE, y, q, rk); #c1(NCK1) c2(NP_001177725) c3(cytoplasmic protein NCK1 isoform 2) c4(72928) c5(72929, 72930, 72931, 72932, 72933, 72934) c6( ) c7(T, dG, dy, K, ah, v, wt, BG, B, cp, sj); #c1(NCK1) c2(NP_001278928) c3(cytoplasmic protein NCK1 isoform 1) c4(111019, 111020, 111021, 111022) c5(111023, 111024, 111025, 111026, 111027, 111028, 111029, 111030, 111031, 111032, 111033, 111034, 111035, 111036, 111037, 111038, 111039, 111040, 111041, 111042, 111043, 111044, 111045, 111046, 111047, 111048, 111049, 111050) c6( ) c7(T, dG, dy, K, ah, v, wt, BG, B, cp, sj); #c1(NCK2) c2(NP_001004722) c3(cytoplasmic protein NCK2 isoform B) c4(20964) c5(20965, 20966, 20967, 20968, 20969, 20970, 20971, 20972) c6( ) c7(HQ, cZ, T, Y, ah, K, wt, dd, dw, cp, Sj); #c1(NCK2) c2(NP_003572) c3(cytoplasmic protein NCK2 isoform A) c4(139249, 139250, 139251) c5(139252, 139253, 139254, 139255, 139256, 139257, 139258, 139259, 139260, 139261, 139262, 139263, 139264, 139265, 139266, 139267, 139268, 139269, 139270, 139271, 139272, 139273) c6( ) c7(HQ, cZ, T, Y, ah, K, wt, dd, dw, cp, sj); #c1(NCK2) c2(XP_011510294) c3(cytoplasmic protein NCK2 isoform X2) c4( ) c5(300877, 300878) c6( ) c7(HQ, cZ, T, Y, ah, K, wt, dd, dw, cp, sj); #c1(NCKAP1) c2(NP_038464) c3(nck-associated protein 1 isoform 1) c4(176549) c5(176550, 176551, 176552, 176553, 176554, 176555) c6( ) c7(cr, n, tv, tu, C, af, amL); #c1(NCKAP1) c2(NP_995314) c3(nck-associated protein 1 isoform 2) c4(263789) c5(263790, 263791, 263792, 263793, 263794, 263795) c6( ) c7(cr, n, tv, tu, C, af, amL); #c1(NCKAPIL) c2(NP_001171905) c3(nck-associated protein 1-like isoform 2) c4( ) c5(72007, 72008, 72009, 72010, 72011) c6( ) c7(ey, cj); #c1(NCKAPIL) c2(NP_005328) c3(nck-associated protein 1-like isoform 1) c4(155027, 155028) c5(155029, 155030, 155031, 155032, 155033, 155034, 155035) c6( ) c7(ey, cj); #c1(NCKAP5) c2(NP_997246) c3(nck-associated protein 5 isoform 1) c4(265300) c5(265301, 265302, 265303, 265304, 265305, 265306, 265307, 265308, 265309, 265310) c6( ) c7(pZ, oe, cz, gf, bK, he, V); #c1(NCKAP5) c2(NP_997364) c3(nck-associated protein 5 isoform 2) c4(265443, 265444) c5(265445, 265446, 265447, 265448, 265449, 265450, 265451, 265452, 265453, 265454, 265455, 265456, 265457, 265458, 265459, 265460, 265461, 265462, 265463, 265464, 265465, 265466, 265467, 265468, 265469, 265470, 265471, 265472) c6( ) c7(pZ, oe, cz, gf, bK, he, V); #c1(NCKAP5) c2(XP_005263717) c3(nck-associated protein 5 isoform X1) c4(278510, 278511) c5( ) c6( ) c7(pZ, oe, cz, gf, bK, he, V); #c1(NCK1PSD) c2(NP_057537) c3(NCK-interacting protein with SH3 domain isoform 1) c4(191300, 191301) c5(191302, 191303, 191304, 191305, 191306, 191307, 191308, 191309, 191310, 191311, 191312, 191313) c6( ) c7(dA, hE, Hn, er, Ne, h, By, Nf, K, eG, je, byn, Y, Ni, PR, rs, ck, iM, rg, Nk, y, jr); #c1(NCK1PSD) c2(NP_909119) c3(NCK-interacting protein with SH3 domain isoform 2) c4(258212) c5(258213, 258214, 258215, 258216, 258217, 258218) c6( ) c7(dA, hE, Hn, er, Ne, h, By, Nf, K, eG, je, byn, Y, Ni, PR, rs, ck, iM, rq, Nk, y, jr); #c1(NCL) c2(NP_005372) c3(nucleolin) c4(155524, 155525) c5(155526, 155527, 155528, 155529, 155530, 155531, 155532, 155533, 155534, 155535, 155536, 155537, 155538, 155539, 155540, 155541, 155542, 155543) c6( ) c7(Dw, T, fM, aPR, if, aA, j, ci, nA, qN, fr, AD, mC, aR, eA, eW, iC, b, py, aPQ, Be, aT, cU, h, K, cY, aDX, adt, d, aW, Y, ff, az, eZ, aF, en, g, as, bz, rY, ck, apM, nM, eM, hE, AH, aPS, cj, U, np, aPT, fL, i, rA, B); #c1(NC0A1) c2(XP_005264682) c3(nuclear receptor coactivator 1 isoform X1) c4(279160) c5(279161, 279162, 279163, 279164, 279165, 279166, 279167, 279168, 279169, 279170) c6( ) c7(T, n, v, ci, zP, ad, afb, dP, bv, aT, ae, Qr, aW, Y, ff, aq, en, as, cj, m, gT, B); #c1(NC0A1) c2(XP_005264683) c3(nuclear receptor coactivator 1 isoform X2) c4(279171) c5(279172, 279173, 279174, 279175, 279176, 279177, 279178, 279179, 279180) c6( ) c7(T, n, v, ci, zP, ad, afb, dP, bv, aT, ae, Qr, aW, Y, ff, aq, en, as, cj, m, gT, B); #c1(NC0A1) c2(XP_005264685) c3(nuclear receptor coactivator 1 isoform X3) c4(279181) c5(279182, 279183, 279184, 279185, 279186, 279187, 279188, 279189, 279190, 279191, 279192) c6( ) c7(T, n, v, ci, zP, ad, afb, dP, bv, aT, ae, Qr, aW, Y, ff, aq, en, as, cj, m, gT, B); #c1(NC0A2) c2(XP_005251188) c3(nuclear receptor coactivator 2 isoform X1) c4(270845) c5(270846, 270847, 270848, 270849, 270850, 270851, 270852, 270853, 270854, 270855, 270856) c6( ) c7(gx, T, jv, kh, oA, vr, n, ci, hF, ad, aEQ, bv, Bj, aT, PD, bwV, ae, hi, gj, Qr, aW, gE, cl, ck, eM, hL, apy, Xu, gT, bt, B); #c1(NC0A2) c2(XP_005251190) c3(nuclear receptor coactivator 2 isoform X2) c4(270857, 270858) c5(270859, 270860, 270861, 270862, 270863, 270864) c6( ) c7(gx, T, jv, kh, oA, vr, n, ci, hF, ad, aEQ, bv, Bj, aT, PD, bwV, ae, hi, gj, Qr, aW, gE, cl, ck, eM, hL, apy, Xu, gT, bt, B); #c1(NC0A2) c2(XP_011515743) c3(nuclear receptor coactivator 2 isoform X4) c4( ) c5(308552) c6( ) c7(gx, T, jv, kh, oA, vr, n, ci, hF, ad, aEQ, bv, Bj, aT, PD, bwV, ae, hi, gj, Qr, aW, gE, cl, ck, eM, hL, apy, Xu, gT, bt, B); #c1(NC0A3) c2(NP_001167559) c3(nuclear receptor coactivator 3 isoform d) c4(69230, 69231) c5(69232, 69233, 69234, 69235, 69236, 69237, 69238, 69239, 69240, 69241, 69242, 69243, 69244) c6( ) c7(T, aC, iW, bGr, aA, bB, n, v, oH, ci, AD, iJ, q, ad, eJ, iu, aE, Ma, aT, dL, K, ae, eL, uQ, s, iU, PE, Y, aW, eH, fc, ff, r, aF, en, cl, g, LV, t, bz, as, eF, ck, ar, Dy, eM, bE, hL, at, np, m, k, cP, ei, gT, B); #c1(NC0A3) c2(NP_006525) c3(nuclear receptor coactivator 3 isoform b) c4(165992) c5(165993, 165994, 165995, 165996, 165997, 165998, 165999, 166000, 166001, 166002, 166003, 166004, 166005, 166006, 166007, 166008) c6( ) c7(T, aC, iW, bGr, aA, bB, n, v, oH, ci, AD, iJ, g, ad, eJ, iu, aE, Ma, aT, dL, K, ae, eL, uQ, s, iU, PE, Y, aW, eH, fc, ff, r, aF, en, cl, g, LV, t, bz, as, eF, ck, ar, Dy, eM, bE, hL, at, np, m, k, cP, ei, gT, B); #c1(NC0A3) c2(NP_858045) c3(nuclear receptor coactivator 3 isoform a) c4(255304, 255305) c5(255306, 255307, 255308, 255309, 255310, 255311) c6( ) c7(T, aC, iW, bGr, aA, bB, n, v, oH, ci, AD, iJ, q, ad, eJ, iu, aE, Ma, aT, dL, K, ae, eL, uQ, s, iU, PE, Y, aW, eH, fc, ff, r, aF, en, cl, g, LV, t, bz, as, eF, ck, ar, Dy, eM, bE, hL, at, np, m, k, cP, ei, gT, B); #c1(NC0A4) c2(NP_001138732) c3(nuclear receptor coactivator 4 isoform 1) c4(57470) c5(57471, 57472, 57473, 57474, 57475, 57476) c6( ) c7(BI, T, hd, xy, nM, nB, auz, aW, qt, Db, AS, al hz, ciU, Ex, ci, m, me, t, ae, ad); #c1(NC0A4) c2(NP_001138733) c3(nuclear receptor coactivator 4 isoform 2) c4(57477, 57478, 57479, 57480, 57481, 57482, 57483) c5(57484, 57485, 57486, 57487, 57488, 57489, 57490, 57491, 57492, 57493, 57494) c6( ) c7(BI, T, hd, xy, nM, nB, auz, aW, qt, Db, AS, aT, hz, ciU, Ex, ci, m, me, t, ae, ad); #c1(NC0A4) c2(NP_005428) c3(nuclear receptor coactivator 4 isoform 3) c4( ) c5(156047, 156048, 156049, 156050, 156051, 156052, 156053, 156054, 156055, 156056, 156057, 156058, 156059, 156060, 156061, 156062, 156063, 156064, 156065, 156066, 156067, 156068, 156069, 156070, 156071, 156072, 156073, 156074, 156075, 156076, 156077, 156078, 156079, 156080, 156081, 156082, 156083, 156084, 156085, 156086, 156087, 156088, 156089, 156090, 156091, 156092, 156093, 156094) c6( ) c7(BI, T, hd, xy, nM, nB, auz, aW, qt, Db, AS, aT, hz, ciU, Ex, ci, m, me, t, ae, ad); #c1(NC0A5) c2(NP_066018) c3(nuclear receptor coactivator 5) c4(206751) c5( ) c6( ) c7(zw, xE, hA, y, fb, ai); #c1(NC0A5) c2(XP_005260531) c3(nuclear receptor coactivator 5 isoform X1) c4(276600) c5(276601, 276602, 276603, 276604, 276605, 276606) c6( ) c7(zw, xE, hA, y, fb, ai); #c1(NC0A5) c2(XP_011527253) c3(nuclear receptor coactivator 5 isoform X2) c4( ) c5(321857, 321858, 321859, 321860, 321861, 321862) c6( ) c7(zw, xE, hA, y, fb, ai); #c1(NC0A6) c2(NP_001229468) c3(nuclear receptor coactivator 6 isoform 2) c4( ) c5(84564, 84565, 84566, 84567, 84568) c6( ) c7(bL, 1 al, aj, fr, nA, Eh, er, ad, dP, ft, aet, aT, h, K, he, af, aW, Y, ciV, aq, as, gk, kq, B); #c1(NC0A6) c2(NP_054790) c3(nuclear receptor coactivator 6 isoform 1) c4(177975) c5(177976, 177977, 177978, 177979, 177980, 177981, 177982, 177983, 177984, 177985) c6( ) c7(bL, 1 al, aj, fr, nA, Eh, er, ad, dP, ft, aet, aT, h, K, he, af, aW, Y, ciV, aq, as, gk, kq, B); #c1(NC0A6) c2(XP_011527031) c3(nuclear receptor coactivator 6 isoform X7) c4(321357) c5(321358) c6( ) c7(bL, T, al, aj, fr, nA, Eh, er, ad, dP, ft, aet, aT, h, K, he, af, aW, Y, ciV, aq, as, gk, kq, B); #c1(NC0A7) c2(NP_001116314) c3(nuclear receptor coactivator 7 isoform 2) c4(43760, 43761, 43762, 43763, 43764, 43765) c5(43766, 43767, 43768, 43769, 43770, 43771, 43772, 43773, 43774, 43775, 43776, 43777, 43778, 43779, 43780, 43781, 43782, 43783, 43784, 43785, 43786, 43787, 43788, 43789, 43790, 43791) c6( ) c7(cm, aW, cd, aT); #c1(NC0A7) c2(NP_001186550) c3(nuclear receptor coactivator 7 isoform 3) c4( ) c5(77776, 77777, 77778, 77779, 77780, 77781, 77782, 77783, 77784, 77785, 77786, 77787, 77788, 77789, 77790, 77791, 77792, 77793, 77794, 77795, 77796) c6( ) c7(cm, aW, cd, aT); #c1(NC0A7) c2(NP_001186551) c3(nuclear receptor coactivator 7 isoform 4) c4(77797, 77798, 77799) c5(77800, 77801, 77802, 77803, 77804, 77805, 77806, 77807, 77808, 77809, 77810, 77811, 77812, 77813, 77814, 77815, 77816, 77817) c6( ) c7(cm, aW, cd, aT); #c1(NC0A7) c2(XP_011533757) c3(nuclear receptor coactivator 7 isoform X1) c4(329906) c5(329907, 329908, 329909, 329910, 329911, 329912, 329913, 329914, 329915, 329916, 329917) c6( ) c7(cm, aW, cd, aT); #c1(NC0R1) c2(NP_001177367) c3(nuclear receptor corepressor 1 isoform 2) c4(72695) c5(72696, 72697, 72698, 72699, 72700, 72701) c6( ) c7(T, id, aZ, aTS, hF, AD, q, ad, afb, dP, x, Bj, aeX, aT, dL, K, uV, jj, ae, eL, pi, kl, d, aW, r, op, ck, vA, m, gT, kS); #c1(NC0R1) c2(NP_001177369) c3(nuclear receptor corepressor 1 isoform 3) c4(72702) c5(72703, 72704, 72705, 72706, 72707, 72708) c6( ) c7(T, id, aZ, aTS, hF, AD, q, ad, afb, dP, x, Bj, aeX, aT, dL, K, uV, jj, ae, eL, pi, kl, d, aW, r, op, ck, vA, m, gT, kS); #c1(NC0R1) c2(NP_006302) c3(nuclear receptor corepressor 1 isoform 1) c4(163834, 163835) c5(163836, 163837, 163838, 163839, 163840, 163841) c6( ) c7(T, id, aZ, aTS, hF, AD, q, ad, afb, dP, x, Bj, aeX, aT, dL, K, uV, jj, ae, eL, pi, kl, d, aW, r, op, ck, vA, m, gT, kS); #c1(NC0R1) c2(XP_005256928) c3(nuclear receptor corepressor 1 isoform X5) c4(274602) c5(274603, 274604, 274605, 274606, 274607, 274608) c6( ) c7(T, id, aZ, aTS, hF, AD, q, ad, afb, dP, x, Bj, aeX, aT, dL, K, uV, jj, ae, eL, pi, kl, d, aW, r, op, ck, vA, m, gT, kS); #c1(NC0R1) c2(XP_005256931) c3(nuclear receptor corepressor 1 isoform X9) c4( ) c5(274609) c6( ) c7(T, id, aZ, aTS, hF, AO, q, ad, afb, dP, x, Bj, aeX, aT, dL, K, uV, jj, ae, eL, pi, kl, d, aW, r, op, ck, vA, m, gT, kS); #c1(NC0R1) c2(XP_005256932) c3(nuclear receptor corepressor 1 isoform X11) c4(274610, 274611) c5( ) c6( ) c7(T, id, aZ, aTS, hF, AD, q, ad, afb, dP, x, Bj, aeX, aT, dL, K, uV, jj, ae, eL, pi, kl, d, aW, r, op, ck, vA, m, gT, kS); #c1(NC0R1) c2(XP_006721665) c3(nuclear receptor corepressor 1 isoform X3) c4(294216, 294217) c5(294218, 294219, 294220, 294221, 294222, 294223, 294224, 294225, 294226, 294227, 294228) c6( ) c7(T, id, aZ, aTS, hF, AD, q, ad, afb, dP, x, Bj, aeX, aT, dL, K, uV, jj, ae, eL, pi, kl, d, aW, r, op, ck, vA, m, gT, kS); #c1(NC0R1) c2(XP_006721667) c3(nuclear receptor corepressor 1 isoform X10) c4(294229) c5(294230, 294231, 294232, 294233, 294234, 294235, 294236, 294237, 294238, 294239, 294240, 294241) c6( ) c7(T, id, aZ, aTS, hF, AD, q, ad, afb, dP, x, Bj, aeX, aT, dL, K, uV, jj, ae, eL, pi, kl, d, aW, r, op, ck, vA, m, gT, kS); #c1(NC0R1) c2(XP_011522385) c3(nuclear receptor corepressor 1 isoform X2) c4( ) c5(317070, 317071, 317072, 317073, 317074, 317075, 317076, 317077, 317078, 317079, 317080, 317081) c6( ) c7(T, id, aZ, aTS, hF, AD, q, ad, afb, dP, x, Bj, aeX, aT, dL, K, uV, jj, ae, eL, pi, kl, d, aW, r, op, ck, vA, m, gT, kS); #c1(NC0R2) c2(NP_001070729) c3(nuclear receptor corepressor 2 isoform 2) c4(34801, 34802) c5(34803, 34804, 34805, 34806, 34807, 34808, 34809, 34810, 34811, 34812, 34813, 34814) c6( ) c7(bM, 1 fM, aA, bB, fd, v, ad, aT, h, Dj, bK, qM, jj, ae, Dg, aW, aF, cm, op, Qi, ac, bE, vA, pg, bC, gT, kS); #c1(NC0R2) c2(NP_001193583) c3(nuclear receptor corepressor 2 isoform 3) c4(82282, 82283, 82284) c5(82285, 82286, 82287, 82288, 82289, 82290, 82291, 82292, 82293, 82294, 82295, 82296, 82297, 82298, 82299, 82300, 82301, 82302, 82303, 82304, 82305, 82306, 82307, 82308) c6( ) c7(bM, 1 fM, aA, bB, fd, v, ad, aT, h, Dj, bK, qM, jj, ae, Dg, aW, aF, cm, op, Qi, ac, bE, vA, pg, bC, gT, kS); #c1(NC0R2) c2(NP_006303) c3(nuclear receptor corepressor 2 isoform 1) c4(163842, 163843, 163844) c5(163845, 163846, 163847, 163848, 163849, 163850, 163851, 163852, 163853, 163854, 163855, 163856) c6( ) c7(bM, 1 fM, aA, bB, fd, v, ad, aT, h, Dj, bK, qM, jj, ae, Dg, aW, aF, cm, op, Qi, ac, bE, vA, pg, bC, gT, kS); #c1(NCR1) c2(NP_001138929) c3(natural cytotoxicity triggering receptor 1 isoform b precursor) c4(58244) c5(58245, 58246, 58247, 58248, 58249, 58250, 58251, 58252, 58253, 58254, 58255, 58256, 58257, 58258, 58259, 58260, 58261, 58262, 58263, 58264, 58265, 58266, 58267, 58268, 58269, 58270, 58271, 58272, 58273, 58274) c6( ) c7(ck, eW, A, d, JZ, iU, Y, ds, jx, iK, bt, fd, h, uz, eo, K, as, zM, V, eA); #c1(NCR1) c2(NP_001138930) c3(natural cytotoxicity triggering receptor 1 isoform c precursor) c4(58275) c5(58276, 58277, 58278, 58279, 58280, 58281) c6( ) c7(ck, eW, A, d, JZ, iU, Y, ds, jx, iK, bt, fd, h, uz, eo, K, as, zM, V, eA); #c1(NCR1) c2(NP_001229285) c3(natural cytotoxicity triggering receptor 1 isoform d precursor) c4(84151, 84152) c5(84153, 84154, 84155, 84156, 84157, 84158, 84159, 84160, 84161, 84162, 84163, 84164) c6( ) c7(ck, eW, A, d, JZ, iU, Y, ds, jx, iK, bt, fd, h, uz, eo, K, as, zM, V, eA); #c1(NCR1) c2(NP_004820) c3(natural cytotoxicity triggering receptor 1 isoform a precursor) c4(150047) c5(150048, 150049, 150050, 150051, 150052, 150053) c6( ) c7(ck, eW, A, d, JZ, iU, Y, ds, jx, iK, bt, fd, h, uz, eo, K, as, zM, V, eA); #c1(NCR2) c2(NP_001186438) c3(natural cytotoxicity triggering receptor 2 isoform 2 precursor) c4(77640) c5(77641, 77642, 77643, 77644, 77645, 77646) c6( ) c7(ck, mR, ac, Y, ds, eZ, fd, uz, azm, j, ci, bt, af); #c1(NCR2) c2(NP_001186439) c3(natural cytotoxicity triggering receptor 2 isoform 3 precursor) c4(77647) c5(77648, 77649, 77650, 77651, 77652, 77653) c6( ) c7(ck, mR, ac, Y, ds, eZ, fd, uz, azm, j, ci, bt, af); #c1(NCR2) c2(NP_004819) c3(natural cytotoxicity triggering receptor 2 isoform 1 precursor) c4(150040) c5(150041, 150042, 150043, 150044, 150045, 150046) c6( ) c7(ck, mR, ac, Y, ds, eZ, fd, uz, azm, j, ci, bt, af); #c1(NCR3) c2(NP_001138938) c3(natural cytotoxicity triggering receptor 3 isoform b precursor) c4(58349) c5(58350, 58351, 58352, 58353, 58354, 58355, 58356, 58357, 58358, 58359, 58360, 58361, 58362, 58363, 58364, 58365, 58366, 58367, 58368, 58369, 58370, 58371, 58372, 58373, 58374, 58375, 58376, 58377) c6( ) c7(ciW, zJ, T, ck, d, A, iU, dV, eZ, h, fd, Hs, v, jh, eq, hH, bt, fb, vk); #c1(NCR3) c2(NP_001138939) c3(natural cytotoxicity triggering receptor 3 isoform c precursor) c4(58378, 58379) c5(58380, 58381, 58382, 58383, 58384, 58385, 58386, 58387, 58388, 58389, 58390, 58391, 58392, 58393, 58394, 58395, 58396, 58397, 58398, 58399, 58400, 58401, 58402, 58403, 58404, 58405, 58406, 58407, 58408, 58409, 58410, 58411, 58412, 58413, 58414, 58415, 58416, 58417, 58418, 58419, 58420, 58421, 58422, 58423, 58424, 58425, 58426, 58427, 58428, 58429, 58430, 58431, 58432, 58433, 58434, 58435) c6( ) c7(ciW, zJ, T, ck, d, A, iU, dV, eZ, h, fd, Hs, v, jh, eq, hH, bt, fb, vk); #c1(NCR3) c2(XP_006715112) c3(natural cytotoxicity triggering receptor 3 isoform X8) c4(288705) c5(288706, 288707, 288708, 288709, 288710, 288711, 288712, 288713, 288714, 288715, 288716, 288717, 288718, 288719, 288720, 288721, 288722, 288723, 288724, 288725, 288726, 288727, 288728, 288729, 288730, 288731, 288732, 288733) c6( ) c7(ciW, zJ, T, ck, d, A, iU, dV, eZ, h, fd, Hs, v, jh, eq, hH, bt, fb, vk); #c1(NCR3LG1) c2(NP_001189368) c3(natural cytotoxicity triggering receptor 3 ligand 1 precursor) c4(79294) c5(79295, 79296, 79297, 79298, 79299, 79300, 79301, 79302, 79303, 79304) c6( ) c7(T, jh, Y, C); #c1(NCS1) c2(NP_001122298) c3(neuronal calcium sensor 1 isoform 2) c4(46458) c5(46459, 46460, 46461, 46462, 46463, 46464) c6( ) c7(nf, aNU, bK, cm, cd, bN); #c1(NCS1) c2(NP_055101) c3(neuronal calcium sensor 1 isoform 1) c4(178948) c5(178949, 178950, 178951, 178952, 178953, 178954, 178955) c6( ) c7(nf, aNU, bK, cm, cd, bN); #c1(NCSTN) c2(NP_001277113) c3(nicastrin isoform 2) c4(109023, 109024) c5(109025, 109026, 109027, 109028, 109029, 109030, 109031, 109032, 109033, 109034) c6( ) c7(ciX, T, af, bbx, aaH, aW, aT, cm, fK, L); #c1(NCSTN) c2(NP_001277115) c3(nicastrin isoform 3 precursor) c4(109035, 109036) c5(109037, 109038, 109039, 109040, 109041, 109042, 109043, 109044, 109045, 109046, 109047, 109048) c6( ) c7(ciX, T, af, bbx, aaH, aW, aT, cm, fK, L); #c1(NCSTN) c2(NP_056146) c3(nicastrin isoform 1 precursor) c4(185952, 185953, 185954) c5(185955, 185956, 185957, 185958, 185959, 185960, 185961) c6( ) c7(ciX, 1 af, bbx, aaH, aW, aT, cm, fK, L); #c1(NCSTN) c2(XP_005245110) c3(nicastrin isoform X3) c4( ) c5(266289, 266290, 266291, 266292, 266293, 266294, 266295, 266296, 266297, 266298, 266299, 266300) c6( ) c7(ciX, 1 af, bbx, aaH, aW, aT, cm, fK, L); #c1(NCSTN) c2(XP_011507665) c3(nicastrin isoform XI) c4(297621, 297622, 297623) c5( ) c6( ) c7(ciX, 1 af, bbx, aaH, aW, aT, cm, fK, L); #c1(NCSTN) c2(XP_011507666) c3(nicastrin isoform X2) c4(297624) c5(297625, 297626, 297627, 297628, 297629, 297630, 297631, 297632, 297633, 297634, 297635, 297636, 297637, 297638, 297639, 297640, 297641, 297642, 297643, 297644, 297645, 297646, 297647, 297648, 297649, 297650, 297651, 297652, 297653) c6( ) c7(ciX, T, af, bbx, aaH, aW, aT, cm, fK, L); #c1(NDC80) c2(NP_006092) c3(kinetochore protein NDC80 homolog) c4(161831, 161832) c5(161833, 161834, 161835, 161836, 161837, 161838, 161839, 161840, 161841, 161842, 161843, 161844) c6( ) c7(bF, T, eM, NE, AM, aW, zX, nD, hL, aT, aA, apx, h, aF, ey, m, bu, bz, eW, cl); #c1(NDE1) c2(NP_060138) c3(nuclear distribution protein nudE homolog 1) c4(194355) c5(194356, 194357, 194358, 194359, 194360, 194361, 194362, 194363, 194364, 194365, 194366, 194367) c6( ) c7(ciZ, FB, ED, r, gl, cja, q, m, QK, ciY, gD, aR); #c1(NDE1) c2(XP_006720961) c3(nuclear distribution protein nudE homolog 1 isoform X2) c4(293793) c5(293794, 293795, 293796, 293797, 293798, 293799, 293800, 293801) c6( ) c7(ciZ, FB, ED, r, gl, cja, q, m, QK, ciY, gD, aR); #c1(NDE1) c2(XP_011520855) c3(nuclear distribution protein nudE homolog 1 isoform X7) c4( ) c5(315838) c6( ) c7(ciZ, FB, ED, r, gl, cja, q, m, QK, ciY, gD, aR); #c1(NDEL1) c2(NP_001020750) c3(nuclear distribution protein nudE-like 1 isoform A) c4(28976) c5(28977, 28978, 28979, 28980, 28981, 28982, 28983, 28984, 28985, 28986, 28987, 28988) c6( ) c7(bJL, qx, cL, oQ, cm, ai, o, bN); #c1(NDEL1) c2(NP_110435) c3(nuclear distribution protein nudE-like 1 isoform B) c4(220354, 220355) c5(220356, 220357, 220358, 220359, 220360, 220361, 220362, 220363, 220364, 220365, 220366, 220367) c6( ) c7(bJL, qx, cL, oQ, cm, ai, o, bN); #c1(NDEL1) c2(XP_006721643) c3(nuclear distribution protein nudE-like 1 isoform X2) c4(294139) c5( ) c6( ) c7(bJL, qx, cL, oQ, cm, ai, o, bN); #c1(NDFIP1) c2(NP_085048) c3(NEDD4 family-interacting protein 1) c4(219207, 219208) c5(219209, 219210, 219211, 219212, 219213, 219214, 219215, 219216, 219217, 219218, 219219, 219220) c6( ) c7(bM, V, ac, bu); #c1(NDFIP2) c2(NP_061953) c3(NEDD4 family-interacting protein 2 isoform 1) c4(201286) c5(201287, 201288, 201289, 201290, 201291, 201292) c6( ) c7(bL, aC, Nc); #c1(NDN) c2(NP_002478) c3(necdin) c4(129171) c5(129172, 129173, 129174, 129175, 129176, 129177) c6( ) c7(T, id, oe, amj, v, ci, rc, yn, hb, aT, K, he, zQ, d, aW, Y, Tp, t, cm, pb, bN, Qi, eD, agl, m, UF); #c1(NDNF) c2(NP_078850) c3(protein NONE precursor) c4(215719, 215720, 215721) c5(215722, 215723, 215724, 215725, 215726, 215727, 215728, 215729, 215730, 215731, 215732, 215733, 215734, 215735, 215736, 215737, 215738, 215739, 215740, 215741, 215742, 215743, 215744, 215745) c6(215746, 215747, 215748, 215749, 215750, 215751) c7(dP, cy, aS); #c1(NDP) c2(NP_000257) c3(norrin precursor) c4(5854) c5(5855, 5856, 5857, 5858, 5859, 5860) c6( ) c7(Ck, IR, byj, af, aW, ajw, aT, cjb, vt, B, cC); #c1(NDRG1) c2(NP_001128714) c3(protein NDRG1 isoform 1) c4(50579, 50580, 50581) c5(50582, 50583, 50584, 50585, 50586, 50587, 50588, 50589, 50590, 50591, 50592, 50593, 50594, 50595, 50596, 50597, 50598, 50599, 50600, 50601, 50602, 50603, 50604, 50605, 50606, 50607, 50608, 50609, 50610, 50611, 50612, 50613, 50614) c6( ) c7(T, aC, if, agU, aA, bB, n, fr, ci, bX, qN, mF, V, q, ad, eA, Zp, av, ft, cjc, Rl, aE, aT, yu, dL, K, jj, bU, hu, ae, d, B, s, aW, Y, PX, ff, r, aq, kp, aF, en, cl, g, t, as, bz, cm, es, ok, ql, eM, iA, dB, bE, hL, Rm, np, m, bt, it, X, BA); #c1(NDRG1) c2(NP_001245361) c3(protein NDRG1 isoform 2) c4( ) c5(93252) c6( ) c7(T, aC, if, agU, aA, bB, n, fr, ci, bX, qN, mF, V, q, ad, eA, Zp, av, ft, cjc, RL aE, aT, yu, dL, K, jj, bU, hu, ae, d, B, s, aW, Y, PX, ff, r, aq, kp, aF, en, cl, g, t, as, bz, cm, es, ok, ql, eM, iA, dB, bE, hL, Rm, np, m, bt, it, X, BA); #c1(NDRG1) c2(NP_001245362) c3(protein NDRG1 isoform 3) c4(93253, 93254, 93255) c5(93256, 93257, 93258, 93259, 93260, 93261, 93262, 93263, 93264, 93265, 93266, 93267, 93268, 93269, 93270, 93271, 93272) c6( ) c7(T, aC, if, agU, aA, bB, n, fr, ci, bX, qN, mF, V, q, ad, eA, Zp, av, ft, cjc, RL aE, aT, yu, dL, K, jj, bU, hu, ae, d, B, s, aW, Y, PX, ff, r, aq, kp, aF, en, cl, g, t, as, bz, cm, es, ok, ql, eM, iA, dB, bE, hL, Rm, np, m, bt, it, X, BA); #c1(NDRG1) c2(XP_011515093) c3(protein NDRG1 isoform X1) c4(307953, 307954, 307955) c5(307956, 307957, 307958, 307959) c6( ) c7(T, aC, if, agU, aA, bB, n, fr, ci, bX, qN, mF, V, q, ad, eA, Zp, av, ft, cjc, RL aE, aT, yu, dL, K, jj, bU, hu, ae, d, B, s, aW, Y, PX, ff, r, aq, kp, aF, en, cl, g, t, as, bz, cm, es, ok, ql, eM, iA, dB, bE, hL, Rm, np, m, bt, it, X, BA); #c1(NDRG1) c2(XP_011515094) c3(protein NDRG1 isoform X2) c4( ) c5(307960, 307961, 307962, 307963, 307964, 307965) c6( ) c7(T, aC, if, agU, aA, bB, n, fr, ci, bX, qN, mF, V, q, ad, eA, Zp, av, ft, cjc, Rl, aE, aT, yu, dL, K, jj, bU, hu, ae, d, B, s, aW, Y, PX, ff, r, aq, kp, aF, en, cl, g, t, as, bz, cm, es, ok, ql, eM, iA, dB, bE, hL, Rm, np, m, bt, it, X, BA); #c1(NDRG2) c2(NP_001269140) c3(protein NDRG2 isoform c) c4(100548, 100549, 100550, 100551, 100552, 100553, 100554, 100555, 100556, 100557, 100558, 100559, 100560, 100561, 100562, 100563, 100564, 100565) c5(100566, 100567, 100568, 100569, 100570, 100571, 100572, 100573, 100574, 100575, 100576, 100577, 100578, 100579, 100580, 100581, 100582, 100583, 100584, 100585, 100586, 100587, 100588, 100589, 100590, 100591, 100592, 100593, 100594, 100595) c6( ) c7(T, aC, if, oe, lH, qy, aA, bB, n, fr, ci, qN, q, ad, eA, ip, hd, py, aE, aT, dL, AN, K, ae, af, eL, d, B, s, je, aW, ev, r, aq, vs, aF, as, iR, iM, iA, nB, bE, go, it, X, L); #c1(NDRG2) c2(NP_001269141) c3(protein NDRG2 isoform d) c4(100596) c5(100597, 100598, 100615, 100616, 100617, 100618, 100619, 100620, 100621, 100622, 100623, 100624, 100625, 100626, 100627, 100628, 100629, 100630, 100631, 100632, 100633, 100634, 100635, 100636, 100637, 100638, 100639, 100640, 100641, 100642, 100643, 100644, 100645, 100646, 100647, 100648, 100649, 100650, 100651, 100652, 100653, 100654, 100655, 100656, 100657, 100658, 100659, 100660, 100661, 100662, 100663, 100664, 100665, 100666, 100667, 100668, 100669, 100670, 100671, 100672, 100673, 100674, 100675, 100676, 100677, 100678, 100679, 100680, 100681, 100682, 100683, 100684, 100685, 100686, 100687, 100688, 100689) c6( ) c7(T, aC, if, oe, lH, qy, aA, bB, n, fr, ci, qN, q, ad, eA, ip, hd, py, aE, aT, dL, AN, K, ae, af, eL, d, B, s, je, aW, ev, r, aq, vs, aF, as, iR, iM, iA, nB, bE, go, it, X, L); #c1(NDRG2) c2(NP_001269144) c3(protein NDRG2 isoform e) c4(100690, 100691, 100692, 100693, 100694, 100695, 100696, 100697, 100698, 100699, 100700, 100701) c5(100702, 100703, 100704, 100705, 100706, 100707) c6( ) c7(T, aC, if, oe, lH, qy, aA, bB, n, fr, ci, qN, q, ad, eA, ip, hd, py, aE, aT, dL, AN, K, ae, af, eL, d, B, s, je, aW, ev, r, aq, vs, aF, as, iR, iM, iA, nB, bE, go, it, X, L); #c1(NDRG2) c2(NP_963294) c3(protein NDRG2 isoform b) c4(262353) c5(262354, 262355, 262356, 262357, 262358, 262359, 262360, 262361, 262362, 262363, 262364, 262365, 262366, 262367, 262368, 262369, 262370, 262371, 262372, 262373, 262374, 262375, 262376, 262377, 262378) c6( ) c7(T, aC, if, oe, lH, qy, aA, bB, n, fr, ci, qN, q, ad, eA, ip, hd, py, aE, aT, dL, AN, K, ae, af, eL, d, B, s, je, aW, ev, r, aq, vs, aF, as, iR, iM, iA, nB, bE, go, it, X, L); #c1(NDRG2) c2(XP_005267968) c3(protein NDRG2 isoform X3) c4( ) c5(281334, 281335, 281336, 281337, 281338, 281339, 281340, 281341, 281342, 281343, 281344, 281345, 281346, 281347, 281348, 281349, 281350, 281351, 281352, 281353, 281354, 281355, 281356, 281357, 281358, 281359, 281360, 281361, 281362, 281363, 281364, 281365, 281366, 281367, 281368, 281369, 281370, 281371, 281372, 281373, 281374, 281375, 281376, 281377, 281378, 281379, 281380, 281381, 281382, 281383, 281384, 281385, 281386, 281387, 281388, 281389, 281390, 281391, 281392, 281393, 281394, 281395, 281396, 281397, 281398, 281399, 281400, 281401, 281402, 281403, 281404, 281405) c6( ) c7(T, aC, if, oe, lH, qy, aA, bB, n, fr, ci, qN, q, ad, eA, ip, hd, py, aE, aT, dL, AN, K, ae, af, eL, d, B, s, je, aW, ev, r, aq, vs, aF, as, iR, iM, iA, nB, bE, go, it, X, L); #c1(NDRG2) c2(XP_011535300) c3(protein NDRG2 isoform X1) c4(332311, 332312) c5(332313, 332314, 332315, 332316, 332317, 332318, 332319, 332320, 332321, 332322, 332323, 332324, 332325, 332326, 332327, 332328, 332329, 332330, 332331, 332332, 332333, 332334) c6( ) c7(T, aC, if, oe, lH, qy, aA, bB, n, fr, ci, qN, q, ad, eA, ip, hd, py, aE, aT, dL, AN, K, ae, af, eL, d, B, s, je, aW, ev, r, aq, vs, aF, as, iR, iM, iA, nB, bE, go, it, X, L); #c1(NDRG3) c2(NP_071922) c3(protein NDRG3 isoform b) c4(212328, 212329) c5(212330, 212331, 212332, 212333, 212334, 212335) c6( ) c7(T, ae, ad); #c1(NDRG3) c2(NP_114402) c3(protein NDRG3 isoform a) c4(222545) c5(222546, 222547, 222548, 222549, 222550, 222551) c6( ) c7(T, ae, ad); #c1(NDRG3) c2(XP_011527228) c3(protein NDRG3 isoform X2) c4( ) c5(321779, 321780, 321781, 321782, 321783, 321784) c6( ) c7(T, ae, ad); #c1(NDRG3) c2(XP_011527230) c3(protein NDRG3 isoform X6) c4(321785) c5(321786, 321787, 321788, 321789, 321790, 321791) c6( ) c7(T, ae, ad); #c1(NDRG4) c2(NP_001123959) c3(protein NDRG4 isoform 2) c4(48139) c5(48140, 48141, 48142, 48143, 48144, 48145, 48146, 48147) c6( ) c7(q, K, eK, r); #c1(NDRG4) c2(NP_001229762) c3(protein NDRG4 isoform 4) c4(85196) c5(85197, 85198, 85199, 85200, 85201, 85202) c6( ) c7(q, K, eK, r); #c1(NDRG4) c2(NP_001229764) c3(protein NDRG4 isoform 6) c4(85203) c5(85204, 85205, 85206, 85207, 85208, 85209, 85210, 85211, 85212, 85213, 85214) c6( ) c7(q, K, eK, r); #c1(NDRG4) c2(NP_001229765) c3(protein NDRG4 isoform 3) c4(85215) c5(85216, 85217, 85218, 85219, 85220, 85221) c6( ) c7(q, K, eK, r); #c1(NDRG4) c2(NP_075061) c3(protein NDRG4 isoform 1) c4(213614) c5(213615, 213616, 213617, 213618, 213619, 213620, 213621, 213622) c6( ) c7(q, K, eK, r); #c1(NDRG4) c2(XP_006721322) c3(protein NDRG4 isoform X9) c4(293939) c5( ) c6( ) c7(q, K, eK, r); #c1(NDRG4) c2(XP_006721324) c3(protein NDRG4 isoform X10) c4( ) c5(293940) c6( ) c7(q, K, eK, r); #c1(NDST1) c2(XP_005268491) c3(bifunctional heparan sulfate N-deacetylase/N- sulfotransferase 1 isoform X3) c4(281855) c5(281856, 281857, 281858, 281859, 281860) c6( ) c7(T, ac, RX, Az, Xg, aT, va, dy, j, nA, bms); #c1(NDST1) c2(XP_005268495) c3(bifunctional heparan sulfate N-deacetylase/N-sulfotransferase 1 isoform X4) c4(281861) c5( ) c6( ) c7(T, ac, RX, Az, Xg, aT, va, dy, j, nA, bms); #c1(NDST1) c2(XP_005268496) c3(bifunctional heparan sulfate N-deacetylase/N- sulfotransferase 1 isoform X2) c4(281862) c5( ) c6( ) c7(T, ac, RX, Az, Xg, aT, va, dy, j, nA, bms); #c1(NDST1) c2(XP_005268498) c3(bifunctional heparan sulfate N-deacetylase/N-sulfotransferase 1 isoform X6) c4( ) c5(281863, 281864, 281865, 281866, 281867, 281868, 281869, 281870, 281871, 281872, 281873, 281874, 281875) c6( ) c7(T, ac, RX, Az, Xg, aT, va, dy, j, nA, bms); #c1(NDST1) c2(XP_006714846) c3(bifunctional heparan sulfate N-deacetylase/N-sulfotransferase 1 isoform X1) c4(288257) c5(288258, 288259, 288260, 288261, 288262, 288263) c6( ) c7(T, ac, RX, Az, Xg, aT, va, dy, j, nA, bms); #c1(NDST2) c2(XP_005270312) c3(bifunctional heparan sulfate N-deacetylase/N-sulfotransferase 2 isoform X3) c4( ) c5(283333) c6( ) c7(q, r); #c1(NDST2) c2(XP_005270313) c3(bifunctional heparan sulfate N-deacetylase/N-sulfotransferase 2 isoform X4) c4( ) c5(283334, 283335, 283336, 283337, 283338, 283339) c6( ) c7(q, r); #c1(NDST2) c2(XP_006718109) c3(bifunctional heparan sulfate N-deacetylase/N-sulfotransferase 2 isoform X2) c4(291520) c5( ) c6( ) c7(q, r); #c1(NDST2) c2(XP_011538612) c3(bifunctional heparan sulfate N-deacetylase/N-sulfotransferase 2 isoform X1) c4(336321, 336322) c5(336323, 336324, 336325, 336326, 336327, 336328, 336329, 336330, 336331, 336332, 336333, 336334) c6( ) c7(q, r); #c1(NDST3) c2(NP_004775) c3(bifunctional heparan sulfate N-deacetylase/N-sulfotransferase 3) c4(149519) c5(149520, 149521, 149522, 149523, 149524, 149525) c6( ) c7(bL, A, cz, j, bK, y); #c1(NDST3) c2(XP_011530717) c3(bifunctional heparan sulfate N-deacetylase/N-sulfotransferase 3 isoform X3) c4(326803) c5( ) c6( ) c7(bL, A, cz, j, bK, y); #c1(NDST3) c2(XP_011530718) c3 (bifunctional heparan sulfate N-deacetylase/N-sulfotransferase 3 isoform X4) c4( ) c5(326804, 326805, 326806, 326807, 326808, 326809) c6( ) c7(bL, A, cz, j, bK, y); #c1(NDST4) c2(NP_072091) c3(bifunctional heparan sulfate N-deacetylase/N-sulfotransferase 4) c4(212663) c5(212664, 212665, 212666, 212667, 212668, 212669) c6( ) c7(T, q, j, VT, r); #c1(NDUFA1) c2(NP_004532) c3(NADH dehydrogenase [ubiguinone] 1 alpha subcomplex subunit 1) c4(147346) c5(147347, 147348, 147349, 147350, 147351, 147352) c6( ) c7(yr, sS, bBz, awN, cjd, aM, afQ, U, bxk, aNG, vd, eQ, an, px, kC, ajU); #c1(NDUFA10) c2(NP_004535) c3(NADH dehydrogenase [ubiguinone] 1 alpha subcomplex subunit 1D, mitochondrial precursor) c4(147369, 147370) c5(147371, 147372, 147373, 147374, 147375, 147376, 147377, 147378, 147379, 147380, 147381, 147382) c6( ) c7(aM, bxl, ad, ajU); #c1(NDUFA11) c2(NP_001180304) c3(NADH dehydrogenase [ubiguinone] 1 alpha subcomplex subunit 11 isoform 2) c4(73783) c5(73784, 73785, 73786, 73787, 73788, 73789) c6( ) c7(bxk, aM); #c1(NDUFA11) c2(NP_783313) c3(NADH dehydrogenase [ubiguinone] 1 alpha subcomplex subunit 11 isoform 1) c4(251602) c5(251603, 251604, 251605, 251606, 251607, 251608) c6( ) c7(bxk, aM); #c1(NDUFA12) c2(NP_001245267) c3(NADH dehydrogenase [ubiguinone] 1 alpha subcomplex subunit 12 isoform b) c4(92964) c5(92965, 92966, 92967, 92968, 92969) c6( ) c7(aM, bxl, ajU); #c1(NDUFA12) c2(NP_061326) c3(NADH dehydrogenase [ubiquinone] 1 alpha subcomplex subunit 12 isoform a) c4(200028) c5(200029, 200030, 200031, 200032, 200033, 200034, 200035) c6( ) c7(aM, bxl, ajU); #c1(NDUFA13) c2(NP_057049) c3(NADH dehydrogenase [ubiguinone] 1 alpha subcomplex subunit 13) c4(188620, 188621) c5(188622, 188623, 188624, 188625, 188626, 188627, 188628, 188629, 188630, 188631, 188632, 188633) c6( ) c7(T, if, aA, fr, ci, eA, ad, Db, cje, aT, h, ae, eu, d, B, aW, aF, es, iA, nB, X, iu); #c1(NDUFA2) c2(NP_001171941) c3(NADH dehydrogenase [ubiguinone] 1 alpha subcomplex subunit 2 isoform 2) c4(72060) c5(72061, 72062, 72063, 72064, 72065, 72066) c6( ) c7(oD, bM, T, JN, Js, aFg, ea, hV, e, qx, al, fd, cL, Vd, Jx, Qp, fw, aDI, Tz, AW, xE, aE, n/v, Gb, dV, K, dQ, aFk, dF, eL, hm, ye, aAg, aW, az, hI, hJ, tU, eE, bw, ha, eM, JA, dc, ki, cj, aFp, Dt, eq, Le, Wx, dD, zt, aw, n, fr, jG, pM, aCQ, Tl, zo, ai, eW, ec, aFg, cU, h, dL, aFi, wb, ey, aDp, A, mR, sp, fe, nN, jT, aFj, Wt, asE, ar, kT, aBs, uz, aEG, eo, fL, B, Jo, bL, fM, dA, jx, aA, tc, ol, v, j, C, aFn, V, aFv, q, o, er, rS, Id, aT, yu, jj, aFm, Cy, ae, ajU, aFs, s, iU, bq, Pg, r, aFn, Io, pb, ck, cT, ac, c, ig, wD, gX, tM, mf, cS, JH, fD, Da, zu, bt, ao, Kd, aD, iW, jh, Jz, jE, ah, eq, ad, kL, hX, Jm, aFu, F, ib, aFI, aFh, Dq, Ds, hD, LA, vB, NM, uQ, d, cW, qt, aFt, eZ, bxl, gE, hp, Eq, aF, aFd, iV, eK, gk, pc, zr, yE, z, aka, eB, wz, aS, ei, lf, fh, y); #c1(NDUFA2) c2(NP_002479) c3(NADH dehydrogenase [ubiguinone] 1 alpha subcomplex subunit 2 isoform 1) c4(129178) c5(129179, 129180, 129181, 129182, 129183, 129184) c6( ) c7(oD, bM, T, JN, Js, aFg, ea, hV, e, qx, al, fd, cL, Vd, Jx, Qp, fw, aDI, Tz, AW, xE, aE, rw, Gb, dV, K, dQ, aFk, dF, eL, hm, ye, aAg, aW, az, hI, hJ, tU, eE, bw, ha, eM, JA, dc, ki, cj, aFp, Dt, eq, Le, Wx, dD, zt, aw, n, fr, jG, pM, aCQ, TL zo, ai, eW, ec, aFq, cU, h, dL, aFi, wb, ey, aDp, A, mR, sp, fe, nN, jT, aFj, Wt, asE, ar, kT, aBs, uz, aEG, eo, fL, B, Jo, bL, fM, dA, jx, aA, tc, el, v, j, C, aFn, V, aFv, q, o, er, rS, Id, aT, yu, jj, aFm, Cy, ae, ajU, aFs, s, iU, bq, Pg, r, aFn, Io, pb, ck, cT, ac, c, ig, wD, gX, tM, mf, cS, JH, fD, Da, zu, bt, aD, Kd, aD, iW, jh, Jz, jE, ah, eq, ad, kL, hX, Jm, aFu, F, ib, aFI, aFh, Dg, Ds, hD, LA, vB, NM, uQ, d, cW, qt, aFt, eZ, bxl, gE, hp, Fq, aF, aFd, iV, eK, gk, pc, zr, yE, z, aka, eB, wz, aS, ei, If, fh, y); #c1(NDUFA5) c2(NP_001269349) c3(NADH dehydrogenase [ubiguinone] 1 alpha subcomplex subunit 5 isoform 3) c4(101236) c5(101237, 101238, 101239, 101240, 101241, 101242) c6( ) c7(EV, cc, ad, bN, SE); #c1(NDUFA5) c2(NP_001269351) c3(NADH dehydrogenase [ubiguinone] 1 alpha subcomplex subunit 5 isoform 5) c4( ) c5(101243, 101244, 101245, 101246, 101247, 101248) c6( ) c7(EV, cc, ad, bN, SE); #c1(NDUFA5) c2(NP_004991) c3(NADH dehydrogenase [ubiguinone] 1 alpha subcomplex subunit 5 isoform 1) c4(151810, 151811) c5(151812, 151813, 151814, 151815, 151816, 151817) c6( ) c7(EV, cc, ad, bN, SE); #c1(NDUFA6) c2(NP_002481) c3(NADH dehydrogenase [ubiguinone] 1 alpha subcomplex subunit 6) c4(129185) c5(129186, 129187, 129188, 129189, 129190, 129191) c6( ) c7(h, hy, ne, BN); #c1(NDUFA9) c2(NP_004993) c3(NADH dehydrogenase [ubiguinone] 1 alpha subcomplex subunit 9, mitochondrial precursor) c4(151818) c5(151819, 151820, 151821, 151822, 151823, 151824, 151825) c6( ) c7(bxl, ad); #c1(NDUFAB1) c2(NP_004994) c3(acyl carrier protein, mitochondrial precursor) c4(151826) c5(151827, 151828, 151829, 151830, 151831, 151832, 151833, 151834) c6( ) c7(BO, cz, hR, aj, aUP, bK, j, aKr, y, zn); #c1(NDUFAF1) c2(NP_057097) c3(complex 1 intermediate-associated protein 30, mitochondrial precursor) c4(188890, 188891) c5(188892, 188893, 188894, 188895, 188896, 188897) c6( ) c7(bxk, cc, kC, aM, vc); #c1(NDUFAF1) c2(XP_011519961) c3(complex 1 intermediate-associated protein 30, mitochondrial isoform X2) c4(314786) c5(314787, 314788, 314789, 314790, 314791, 314792, 314793, 314794, 314795, 314796, 314797, 314798) c6( ) c7(bxk, cc, kC, aM, vc); #c1(NDUFAF2) c2(NP_777549) c3(mimitin, mitochondrial) c4(251122) c5(251123, 251124, 251125, 251126, 251127, 251128) c6( ) c7(hb, aM, bwo, ajU, ff, bxk, bxl, K, en, IM, kC, it, ad); #c1(NDUFAF3) c2(NP_951032) c3(NADH dehydrogenase [ubiguinone] 1 alpha subcomplex assembly factor 3 isoform a precursor) c4(260986, 260987) c5(260988, 260989, 260990, 260991, 260992, 260993, 260994, 260995, 260996) c6( ) c7(bxk, aW, kC, aM, aT); #c1(NDUFAF3) c2(NP_951033) c3(NADH dehydrogenase [ubiguinone] 1 alpha subcomplex assembly factor 3 isoform b) c4( ) c5(260997, 260998, 260999, 261000, 261001, 261002, 261003, 261004, 261005, 261006, 261007) c6( ) c7(bxk, aW, kC, aM, aT); #c1(NDUFAF4) c2(NP_054884) c3(NADH dehydrogenase [ubiquinone] 1 alpha subcomplex assembly factor 4) c4(178183) c5(178184, 178185, 178186, 178187, 178188, 178189) c6( ) c7(aW, aM, jh, aT, bxk, px, kC); #c1(NDUFAF5) c2(NP_001034464) c3(NADH dehydrogenase [ubiguinone] 1 alpha subcomplex assembly factor 5 isoform 2) c4(31746) c5(31747, 31748, 31749, 31750, 31751, 31752) c6( ) c7(bxk, kC, ajU); #c1(NDUFAF5) c2(NP_077025) c3(NADH dehydrogenase [ubiguinone] 1 alpha subcomplex assembly factor 5 isoform 1) c4(214805) c5(214806, 214807, 214808, 214809, 214810, 214811, 214812) c6( ) c7(bxk, kC, ajU); #c1(NDUFAF5) c2(XP_011527643) c3(NADH dehydrogenase [ubiguinone] 1 alpha subcomplex assembly factor 5 isoform X1) c4(322560) c5( ) c6( ) c7(bxk, kC, ajU); #c1(NDUFAF5) c2(XP_011527645) c3(NADH dehydrogenase [ubiguinone] 1 alpha subcomplex assembly factor 5 isoform X3) c4( ) c5(322561, 322562, 322563, 322564, 322565) c6( ) c7(bxk, kC, ajU); #c1(NDUFAF6) c2(NP_689629) c3(NADH dehydrogenase (ubiguinone) complex 1, assembly factor 6 precursor) c4(243346) c5(243347, 243348, 243349, 243350, 243351, 243352, 243353) c6( ) c7(bxk, aM, bxl, ajU); #c1(NDUFAF6) c2(XP_005250850) c3(NADH dehydrogenase (ubiguinone) complex 1, assembly factor 6 isoform X4) c4( ) c5(270606, 270607, 270608, 270609, 270610) c6( ) c7(bxk, aM, bxl, ajU); #c1(NDUFAF6) c2(XP_011515144) c3(NADH dehydrogenase (ubiguinone) complex 1, assembly factor 6 isoform X1) c4(307987, 307988) c5(307989, 307990, 307991, 307992, 307993, 307994) c6( ) c7(bxk, aM, bxl, ajU); #c1(NDUFAF6) c2(XP_011515146) c3(NADH dehydrogenase (ubiguinone) complex 1, assembly factor 6 isoform X3) c4( ) c5(307995) c6( ) c7(bxk, aM, bxl, ajU); #c1(NDUFB10) c2(NP_004539) c3(NADH dehydrogenase [ubiguinone] 1 beta subcomplex subunit 10) c4(147419, 147420) c5(147421, 147422, 147423, 147424, 147425, 147426, 147427, 147428, 147429, 147430, 147431, 147432) c6( ) c7(cd); #c1(NDUFB11) c2(NP_001129470) c3(NADH dehydrogenase [ubiguinone] 1 beta subcomplex subunit 11, mitochondrial isoform 2) c4(51526, 51527) c5(51528, 51529, 51530, 51531, 51532, 51533, 51534, 51535, 51536, 51537, 51538, 51539) c6( ) c7(px); #c1(NDUFB11) c2(NP_061929) c3(NADH dehydrogenase [ubiguinone] 1 beta subcomplex subunit 11, mitochondrial isoform 1) c4(201194) c5(201195, 201196, 201197, 201198, 201199, 201200, 201201) c6( ) c7(px); #c1(NDUFB2) c2(NP_004537) c3(NADH dehydrogenase [ubiguinone] 1 beta subcomplex subunit 2, mitochondrial precursor) c4(147383, 147384, 147385) c5(147386, 147387, 147388, 147389, 147390, 147391, 147392, 147393, 147394, 147395, 147396, 147397, 147398, 147399, 147400, 147401, 147402, 147403, 147404, 147405, 147406, 147407, 147408, 147409, 147410, 147411) c6( ) c7(JQ, hD, IG, cy, ae, B, ad, vi); #c1(NDUFB3) c2(NP_001244031) c3(NADH dehydrogenase [ubiguinone] 1 beta subcomplex subunit 3) c4(91822, 91823) c5(91824, 91825, 91826, 91827, 91828, 91829, 91830, 91831, 91832, 91833, 91834, 91835, 91836, 91837, 91838, 91839, 91840, 91841, 91842, 91843) c6( ) c7(bxk, aW, my, aT); #c1(NDUFB4) c2(NP_001161803) c3(NADH dehydrogenase [ubiguinone] 1 beta subcomplex subunit 4 isoform 2) c4(66036) c5(66037, 66038, 66039, 66040, 66041, 66042) c6( ) c7(ao); #c1(NDUFB4) c2(NP_004538) c3(NADH dehydrogenase [ubiguinone] 1 beta subcomplex subunit 4 isoform 1) c4(147412) c5(147413, 147414, 147415, 147416, 147417, 147418) c6( ) c7(ao); #c1(NDUFB5) c2(NP_001186886) c3(NADH dehydrogenase [ubiguinone] 1 beta subcomplex subunit 5, mitochondrial isoform 2) c4(78757) c5(78758, 78759, 78760, 78761, 78762, 78763) c6( ) c7(ad); #c1(NDUFB5) c2(NP_001186887) c3(NADH dehydrogenase [ubiguinone] 1 beta subcomplex subunit 5, mitochondrial isoform 3 precursor) c4(78764) c5(78765, 78766, 78767, 78768, 78769) c6( ) c7(ad); #c1(NDUFB5) c2(NP_002483) c3(NADH dehydrogenase [ubiguinone] 1 beta subcomplex subunit 5, mitochondrial isoform 1 precursor) c4(129192) c5(129193, 129194, 129195, 129196, 129197, 129198, 129199) c6( ) c7(ad); #c1(NDUFB6) c2(NP_002484) c3(NADH dehydrogenase [ubiguinone] 1 beta subcomplex subunit 6 isoform 1) c4(129200) c5(129201, 129202, 129203, 129204, 129205, 129206) c6( ) c7(bL, ae, aM, ac, ad); #c1(NDUFB6) c2(NP_877416) c3(NADH dehydrogenase [ubiguinone] 1 beta subcomplex subunit 6 isoform 2) c4(256758) c5(256759, 256760, 256761, 256762, 256763, 256764) c6( ) c7(bL, ae, aM, ac, ad); #c1(NDUFB8) c2(NP_001271296) c3(NADH dehydrogenase [ubiquinone] 1 beta subcomplex subunit 8, mitochondrial isoform 2) c4(103867) c5(103868, 103869, 103870, 103871, 103872, 103873, 103874, 103875, 103876, 103877) c6( ) c7(Pk, IQ, ad); #c1(NDUFB8) c2(NP_001271297) c3(NADH dehydrogenase [ubiguinone] 1 beta subcomplex subunit 8, mitochondrial isoform 3) c4( ) c5(103878, 103879, 103880, 103881, 103882) c6( ) c7(Pk, IQ, ad); #c1(NDUFB8) c2(NP_004995) c3(NADH dehydrogenase [ubiguinone] 1 beta subcomplex subunit 8, mitochondrial isoform 1 precursor) c4(151835, 151836) c5(151837, 151838, 151839, 151840, 151841, 151842, 151843) c6( ) c7(Pk, IQ, ad); #c1(NDUFB9) c2(NP_004996) c3(NADH dehydrogenase [ubiguinone] 1 beta subcomplex subunit 9 isoform 1) c4(151844) c5(151845, 151846, 151847, 151848, 151849, 151850) c6( ) c7(bxk, aM, ad); #c1(NDUFC2) c2(NP_001190983) c3(NADH dehydrogenase [ubiguinone] 1 subunit C2 isoform 2) c4(80380) c5(80381, 80382, 80383, 80384, 80385, 80386, 80387, 80388, 80389, 80390, 80391) c6( ) c7(bz, ad); #c1(NDUFC2) c2(NP_001190984) c3(NADH dehydrogenase [ubiguinone] 1 subunit C2 isoform 3) c4(80392) c5(80393, 80394, 80395, 80396, 80397, 80398, 80399) c6( ) c7(bz, ad); #c1(NDUFC2) c2(NP_004540) c3(NADH dehydrogenase [ubiguinone] 1 subunit C2 isoform 1) c4(147433, 147434) c5(147435, 147436, 147437, 147438, 147439, 147440) c6( ) c7(bz, ad); #c1(NDUFS1) c2(NP_001186910) c3(NADH-ubiguinone oxidoreductase 75 kDa subunit, mitochondrial isoform 2 precursor) c4(78770, 78771) c5(78772, 78773, 78774, 78775, 78776, 78777) c6( ) c7(cjf, aM, aXb, ajU, aA, bxk, abn, vc, K, rz, ad, bN); #c1(NDUFS1) c2(NP_001186911) c3(NADH-ubiguinone oxidoreductase 75 kDa subunit, mitochondrial isoform 3) c4(78778) c5(78779, 78780, 78781, 78782, 78783, 78784) c6( ) c7(cjf, aM, aXb, ajU, aA, bxk, abn, vc, K, rz, ad, bN); #c1(NDUFS1) c2(NP_001186913) c3(NADH-ubiguinone oxidoreductase 75 kDa subunit, mitochondrial isoform 5) c4(78785, 78786, 78787, 78788) c5(78789, 78790, 78791, 78792, 78793, 78794, 78795, 78796, 78797, 78798, 78799, 78800, 78801, 78802, 78803, 78804, 78805, 78806, 78807, 78808, 78809, 78810, 78811, 78812, 78813, 78814, 78815, 78816, 78817) c6( ) c7(cjf, aM, aXb, ajU, aA, bxk, abn, vc, K, rz, ad, bN); #c1(NDUFS1) c2(NP_004997) c3(NADH-ubiquinone oxidoreductase 75 kDa subunit, mitochondrial isoform 1 precursor) c4( ) c5(151851, 151852, 151853, 151854, 151855) c6( ) c7(cjf, aM, aXb, ajU, aA, bxk, abn, vc, K, rz, ad, bN); #c1(NDUFS2) c2(NP_001159631) c3(NADH dehydrogenase [ubiguinone] iron-sulfur protein 2, mitochondrial isoform 2 precursor) c4(64483, 64484) c5(64485, 64486, 64487, 64488, 64489, 64490, 64491) c6( ) c7(T, cc, dc, aM, jZ, ajU, bxk, bq, px, V, ad, ip); #c1(NDUFS2) c2(NP_004541) c3(NADH dehydrogenase [ubiguinone] iron-sulfur protein 2, mitochondrial isoform 1 precursor) c4(147441) c5(147442, 147443, 147444, 147445, 147446, 147447, 147448) c6( ) c7(T, cc, dc, aM, jZ, ajU, bxk, bq, px, V, ad, ip); #c1(NDUFS2) c2(XP_005245266) c3(NADH dehydrogenase [ubiguinone] iron-sulfur protein 2, mitochondrial isoform X2) c4(266367) c5(266368, 266369, 266370, 266371, 266372, 266373, 266374, 266375, 266376, 266377) c6( ) c7(T, cc, dc, aM, jZ, ajU, bxk, bq, px, V, ad, ip); #c1(NDUFS3) c2(NP_004542) c3(NADH dehydrogenase [ubiguinone] iron-sulfur protein 3, mitochondrial precursor) c4(147449) c5(147450, 147451, 147452, 147453, 147454, 147455) c6( ) c7(es, cc, eM, sO, aM, aT, awK, bxl, bq, f, ajU); #c1(NDUFS4) c2(NP_002486) c3(NADH dehydrogenase [ubiguinone] iron-sulfur protein 4, mitochondrial precursor) c4(129207) c5(129208, 129209, 129210, 129211, 129212, 129213) c6( ) c7(y, W, eR, hb, aM, ajU, hL, r, bxk, aDa, cl, bxl, eZ, an, px, q, aR, ad, cjg); #c1(NDUFS6) c2(NP_004544) c3(NADH dehydrogenase [ubiguinone] iron-sulfur protein 6, mitochondrial precursor) c4(147456) c5(147457, 147458, 147459, 147460, 147461, 147462) c6( ) c7(bxk, if, aM, ad, qN); #c1(NDUFS7) c2(NP_077718) c3(NADH dehydrogenase [ubiguinone] iron-sulfur protein 7, mitochondrial) c4(215248, 215249, 215250) c5(215251, 215252, 215253, 215254, 215255, 215256, 215257, 215258, 215259, 215260, 215261, 215262, 215263, 215264, 215265, 215266, 215267, 215268, 215269, 215270, 215271, 215272, 215273) c6( ) c7(ac, Y, aM, ajU, bxk, aj, bxl, J); #c1(NDUFS7) c2(XP_005259613) c3(NADH dehydrogenase [ubiquinone] iron-sulfur protein 7, mitochondrial isoform X1) c4(276200) c5(276201, 276202, 276203, 276204, 276205, 276206) c6( ) c7(ac, Y, aM, ajU, bxk, aj, bxl, J); #c1(NDUFS8) c2(NP_002487) c3(NADH dehydrogenase [ubiguinone] iron-sulfur protein 8, mitochondrial precursor) c4(129214, 129215, 129216, 129217, 129218) c5(129219, 129220, 129221, 129222, 129223, 129224, 129225, 129226, 129227, 129228, 129229, 129230, 129231, 129232, 129233, 129234, 129235, 129236, 129237, 129238, 129239, 129240, 129241, 129242) c6( ) c7(bxk, aM, bxl, ajU); #c1(NDUFS8) c2(XP_005274072) c3(NADH dehydrogenase [ubiguinone] iron-sulfur protein 8, mitochondrial isoform X2) c4( ) c5(284928, 284929, 284930, 284931, 284932, 284933) c6( ) c7(bxk, aM, bxl, ajU); #c1(NDUFV1) c2(NP_001159574) c3(NADH dehydrogenase [ubiguinone] flavoprotein 1, mitochondrial isoform 2 precursor) c4(64283) c5(64284, 64285, 64286, 64287, 64288, 64289, 64290, 64291, 64292, 64293, 64294, 64295, 64296, 64297, 64298, 64299, 64300, 64301) c6( ) c7(EG, aM, ajU, aA, bxk, asF, cb, kC, aR); #c1(NDUFV1) c2(NP_009034) c3(NADH dehydrogenase [ubiguinone] flavoprotein 1, mitochondrial isoform 1 precursor) c4(170326, 170327, 170328, 170329) c5(170330, 170331, 170332, 170333, 170334, 170335, 170336, 170337, 170338, 170339, 170340, 170341) c6( ) c7(EG, aM, ajU, aA, bxk, asF, cb, kC, aR); #c1(NDUFV2) c2(NP_066552) c3(NADH dehydrogenase [ubiguinone] flavoprotein 2, mitochondrial precursor) c4(207381) c5(207382, 207383, 207384, 207385, 207386, 207387) c6( ) c7(cc, hb, aM, ajU, bxk, vc, bK, an, oi, px, ad, GB); #c1(NDUFV3) c2(NP_001001503) c3(NADH dehydrogenase [ubiguinone] flavoprotein 3, mitochondrial isoform b precursor) c4(18553) c5(18554, 18555, 18556, 18557, 18558, 18559, 18560, 18561, 18562, 18563, 18564, 18565) c6( ) c7(f, ad); #c1(NDUFV3) c2(NP_066553) c3(NADH dehydrogenase [ubiguinone] flavoprotein 3, mitochondrial isoform a precursor) c4(207388) c5(207389, 207390, 207391, 207392, 207393, 207394) c6( ) c7(f, ad); #c1(NDUFV3) c2(XP_011527888) c3(NADH dehydrogenase [ubiguinone] flavoprotein 3, mitochondrial isoform X1) c4(323002) c5( ) c6( ) c7(f, ad); #c1(NEB) c2(NP_001157979) c3(nebulin isoform 1) c4(62981) c5(62982, 62983, 62984, 62985, 62986, 62987, 62988) c6( ) c7(cc, no, Ag, Ws, Am, xs, lb, oj, Ad, Ak, uY, bl); #c1(NEB) c2(NP_001157980) c3(nebulin isoform 2) c4(62989) c5(62990, 62991, 62992, 62993, 62994, 62995, 62996) c6( ) c7(cc, no, Ag, Ws, Am, xs, lb, oj, Ad, Ak, uY, bl); #c1(NEB) c2(NP_001258137) c3(nebulin isoform 4) c4( ) c5(95979, 95980, 95981, 95982, 95983, 95984, 95985, 95986, 95987, 95988, 95989, 95990) c6( ) c7(cc, no, Ag, Ws, Am, xs, lb, oj, Ad, Ak, uY, bl); #c1(NEB) c2(NP_004534) c3(nebulin isoform 3) c4(147353, 147354) c5(147355, 147356, 147357, 147358, 147359, 147360, 147361, 147362, 147363, 147364, 147365, 147366, 147367, 147368) c6( ) c7(cc, no, Ag, Ws, Am, xs, lb, oj, Ad, Ak, uY, bl); #c1(NEB) c2(XP_005246653) c3(nebulin isoform X8) c4(267303) c5(267304, 267305, 267306, 267307, 267308, 267309) c6( ) c7(cc, no, Ag, Ws, Am, xs, lb, oj, Ad, Ak, uY, bl); #c1(NEB) c2(XP_005246663) c3(nebulin isoform X17) c4(267310) c5( ) c6( ) c7(cc, no, Ag, Ws, Am, xs, lb, oj, Ad, Ak, uY, bl); #c1(NEB) c2(XP_005246667) c3(nebulin isoform X21) c4(267311) c5(267312, 267313, 267314, 267315, 267316, 267317) c6( ) c7(cc, no, Ag, Ws, Am, xs, lb, oj, Ad, Ak, uY, bl); #c1(NEB) c2(XP_005246670) c3(nebulin isoform X24) c4(267318) c5( ) c6( ) c7(cc, no, Ag, Ws, Am, xs, lb, oj, Ad, Ak, uY, bl); #c1(NEB) c2(XP_005246672) c3(nebulin isoform X26) c4(267319) c5(267320, 267321, 267322, 267323, 267324, 267325) c6( ) c7(cc, no, Ag, Ws, Am, xs, lb, oj, Ad, Ak, uY, bl); #c1(NEBL) c2(NP_006384) c3(nebulette isoform 1) c4(164553) c5(164554, 164555, 164556, 164557, 164558, 164559) c6( ) c7(vc, acC, mx, Bt); #c1(NEBL) c2(NP_998734) c3(nebulette isoform 2) c4(265804, 265805) c5(265806, 265807, 265808, 265809, 265810, 265811, 265812, 265813, 265814, 265815, 265816, 265817) c6( ) c7(vc, acC, mx, Bt); #c1(NEBL) c2(XP_005252400) c3(nebulette isoform X3) c4(271714) c5( ) c6( ) c7(vc, acC, mx, Bt); #c1(NEBL) c2(XP_005252401) c3(nebulette isoform X4) c4( ) c5(271715, 271716, 271717, 271718, 271719, 271720) c6( ) c7(vc, acC, mx, Bt); #c1(NEBL) c2(XP_011517593) c3(nebulette isoform X1) c4(311348) c5(311349, 311350, 311351, 311352, 311353, 311354) c6( ) c7(vc, acC, mx, Bt); #c1(NECAB1) c2(NP_071746) c3(N-terminal EF-hand calcium-binding protein 1) c4(211914, 211915) c5(211916, 211917, 211918, 211919, 211920, 211921, 211922, 211923, 211924, 211925, 211926, 211927, 211928, 211929, 211930, 211931) c6( ) c7(U); #c1(NECAB3) c2(NP_112508) c3(N-terminal EF-hand calcium-binding protein 3 isoform 1) c4(221316) c5(221317, 221318, 221319, 221320, 221321, 221322) c6( ) c7(aW, aT); #c1(NECAB3) c2(NP_112509) c3(N-terminal EF-hand calcium-binding protein 3 isoform 2) c4(221323) c5(221324, 221325, 221326, 221327, 221328, 221329) c6( ) c7(aW, aT); #c1(NECAB3) c2(XP_005260567) c3(N-terminal EF-hand calcium-binding protein 3 isoform X1) c4(276633) c5(276634, 276635, 276636, 276637, 276638, 276639) c6( ) c7(aW, aT); #c1(NECAB3) c2(XP_011527294) c3(N-terminal EF-hand calcium-binding protein 3 isoform X4) c4( ) c5(321918) c6( ) c7(aW, aT); #c1(NECAP1) c2(NP_056324) c3(adaptin ear-binding coat-associated protein 1) c4(187068, 187069) c5(187070, 187071, 187072, 187073, 187074, 187075, 187076, 187077, 187078, 187079, 187080, 187081, 187082, 187083, 187084, 187085) c6( ) c7(lm); #c1(NEDD1) c2(NP_001128648) c3(protein NEDD1 isoform b) c4(50441, 50442) c5(50443, 50444, 50445, 50446, 50447, 50448, 50449, 50450, 50451, 50452, 50453) c6( ) c7(aF, aA, pN); #c1(NEDD1) c2(XP_005268701) c3(protein NEDD1 isoform X1) c4(282054, 282055, 282056) c5(282057, 282058, 282059, 282060, 282061, 282062, 282063, 282064, 282065, 282066, 282067, 282068, 282069, 282070, 282071, 282072, 282073, 282074, 282075, 282076, 282077, 282078, 282079, 282080, 282081, 282082) c6( ) c7(aF, aA, pN); #c1(NEDD1) c2(XP_011536205) c3(protein NEDD1 isoform X2) c4(333505, 333506) c5(333507, 333508, 333509, 333510, 333511, 333512, 333513, 333514, 333515, 333516, 333517, 333518, 333519) c6( ) c7(aF, aA, pN); #c1(NEDD4) c2(NP_001271267) c3(E3 ubiquitin-protein ligase NEDD4 isoform 3) c4(103785) c5(103786, 103787, 103788, 103789, 103790, 103791) c6( ) c7(T, aA, j, cd, eA, q, ad, hX, aT, h, bK, K, bl, bU, ae, aW, r, bZC, bz, eM, U, cj); #c1(NEDD4) c2(NP_001271268) c3(E3 ubiquitin-protein ligase NEDD4 isoform 4) c4(103792) c5(103793, 103794, 103795, 103796, 103797, 103798) c6( ) c7(T, aA, j, cd, eA, q, ad, hX, aT, h, bK, K, bl, bU, ae, aW, r, bZC, bz, eM, U, cj); #c1(NEDD4) c2(NP_006145) c3(E3 ubiquitin-protein ligase NEDD4 isoform 1) c4(162398) c5(162399, 162400, 162401, 162402, 162403, 162404) c6( ) c7(T, aA, j, cd, eA, q, ad, hX, aT, h, bK, K, bl, bU, ae, aW, r, bZC, bz, eM, U, cj); #c1(NEDD4) c2(NP_940682) c3(E3 ubiquitin-protein ligase NEDD4 isoform 2) c4(259836) c5(259837, 259838, 259839, 259840, 259841, 259842) c6( ) c7(T, aA, j, cd, eA, q, ad, hX, al h, bK, K, bl, bU, ae, aW, r, bZC, bz, eM, U, cj); #c1(NEDD4L) c2(NP_001138439) c3(E3 ubiquitin-protein ligase NEDD4-like isoform 1) c4(56768, 56769) c5(56770, 56771, 56772, 56773, 56774, 56775) c6( ) c7(cjh, qa, T, dP, bM, ac, eU, e, ha, nl, nh, cz, MF, cji, v, hg, yA, ae, ad); #c1(NEDD4L) c2(NP_001138440) c3(E3 ubiquitin-protein ligase NEDD4-like isoform 4) c4(56776) c5(56777, 56778, 56779, 56780, 56781, 56782, 56783, 56784) c6( ) c7(cjh, qa, T, dP, bM, ac, eU, e, ha, nl, nh, cz, MF, cji, v, hg, yA, ae, ad); #c1(NEDD4L) c2(NP_001138441) c3(E3 ubiquitin-protein ligase NEDD4-like isoform 5) c4( ) c5(56785) c6( ) c7(cjh, qa, T, dP, bM, ac, eU, e, ha, nl, nh, cz, MF, cji, v, hg, yA, ae, ad); #c1(NEDD4L) c2(NP_001138442) c3(E3 ubiquitin-protein ligase NEDD4-like isoform 6) c4( ) c5(56786, 56787, 56788, 56789, 56790, 56791, 56792, 56793, 56794, 56795, 56796, 56797, 56798) c6( ) c7(cjh, qa, T, dP, bM, ac, eU, e, ha, nl, nh, cz, MF, cji, v, hg, yA, ae, ad); #c1(NEDD4L) c2(NP_001230889) c3(E3 ubiquitin-protein ligase NEDD4-like isoform 7) c4(86929, 86930) c5(86931, 86932, 86933, 86934, 86935, 86936, 86937, 86938, 86939, 86940, 86941, 86942) c6( ) c7(cjh, qa, T, dP, bM, ac, eU, e, ha, nl, nh, cz, MF, cji, v, hg, yA, ae, ad); #c1(NEDD4L) c2(NP_056092) c3(E3 ubiquitin-protein ligase NEDD4-like isoform 3) c4(185670, 185671) c5(185672, 185673, 185674, 185675, 185676, 185677, 185678) c6( ) c7(cjh, qa, T, dP, bM, ac, eU, e, ha, nl, nh, cz, MF, cji, v, hg, yA, ae, ad); #c1(NEDD4L) c2(XP_005266717) c3(E3 ubiquitin-protein ligase NEDD4-like isoform X2) c4( ) c5(280280, 280281, 280282, 280283, 280284, 280285, 280286, 280287) c6( ) c7(cjh, qa, T, dP, bM, ac, eU, e, ha, nl, nh, cz, MF, cji, v, hg, yA, ae, ad); #c1(NEDD4L) c2(XP_005266720) c3(E3 ubiquitin-protein ligase NEDD4-like isoform X4) c4(280288) c5( ) c6( ) c7(cjh, qa, T, dP, bM, ac, eU, e, ha, nl, nh, cz, MF, cji, v, hg, yA, ae, ad); #c1(NEDD4L) c2(XP_011524189) c3(E3 ubiquitin-protein ligase NEDD4-like isoform X8) c4( ) c5(318734) c6( ) c7(cjh, qa, T, dP, bM, ac, eU, e, ha, nl, nh, cz, MF, cji, v, hg, yA, ae, ad); #c1(NEDD8) c2(NP_006147) c3(NEDD8 precursor) c4(162405) c5(162406, 162407, 162408, 162409, 162410, 162411) c6( ) c7(T, 66, aW, ff, cr, aT, h, fd, K, m, anW, en, t, bt, GR); #c1(NEDD9) c2(NP_001135865) c3(enhancer of filamentation 1 isoform 3) c4(53427, 53428) c5(53429, 53430, 53431, 53432, 53433, 53434, 53435, 53436, 53437, 53438, 53439, 53440) c6( ) c7(T, iW, aw, jh, aA, bB, n, fr, ci, qN, alq, q, ai, eA, x, av, Bl, aE, anV, aT, h, hn, an, fb, af, d, s, aW, Y, ff, r, kp, aF, en, iV, t, lk, bz, cm, iK, ck, kP, eM, bP, bE, iT, adR, np, m, k, aps, bt, B, y); #c1(NEDD9) c2(NP_006394) c3(enhancer of filamentation 1 isoform 1) c4(164663) c5(164664, 164665, 164666, 164667, 164668, 164669) c6( ) c7(T, iW, aw, jh, aA, bB, n, fr, ci, qN, alq, q, ai, eA, x, av, Bl, aE, anV, aT, h, hn, an, fb, af, d, s, aW, Y, ff, r, kp, aF, en, iV, t, lk, bz, cm, iK, ck, kP, eM, bP, bE, iT, adR, np, m, k, aps, bt, B, y); #c1(NEDD9) c2(NP_892011) c3(enhancer of filamentation 1 isoform 2) c4(257590) c5(257591, 257592, 257593, 257594, 257595, 257596) c6( ) c7(T, iW, aw, jh, aA, bB, n, fr, ci, qN, alq, q, ai, eA, x, av, Bl, aE, anV, aT, h, hn, an, fb, af, d, s, aW, Y, ff, r, kp, aF, en, iV, t, lk, bz, cm, iK, ck, kP, eM, bP, bE, iT, adR, np, m, k, aps, bt, B, y); #c1(NEFH) c2(NP_066554) c3(neurofilament heavy polypeptide) c4(207395, 207396) c5( ) c6( ) c7(qa, aQy, T, bb, Ew, c, Dl, My, U, cz, acU, K, m, bq, PJ, t, bX, it, aT, aR, f); #c1(NEFH) c2(XP_011528502) c3(neurofilament heavy polypeptide isoform X1) c4( ) c5(323597, 323598, 323599, 323600, 323601, 323602, 323603, 323604, 323605, 323606, 323607, 323608) c6( ) c7(qa, aQy, T, bb, Ew, c, Dl, My, U, cz, acU, K, m, bq, PJ, t, bX, it, aT, aR, f); #c1(NEFM) c2(NP_001099011) c3(neurofilament medium polypeptide isoform 2) c4(41648) c5(41649, 41650, 41651, 41652, 41653, 41654) c6( ) c7(dP, bb, c, Dl, an, KP, alQ, La, bq, aQy); #c1(NEFM) c2(NP_005373) c3(neurofilament medium polypeptide isoform 1) c4(155544, 155545) c5(155546, 155547, 155548, 155549, 155550, 155551, 155552, 155553, 155554, 155555, 155556, 155557) c6( ) c7(dP, bb, c, Dl, an, KP, alQ, La, bq, aQy); #c1(NEIL1) c2(NP_001243481) c3(endonuclease 8-like 1 isoform 1) c4( ) c5(90929) c6( ) c7(T, os, sw, aoE, aA, oZ, v, fr, V, jz, It, aT, h, jy, K, dQ, ff, fc, hl, hN, aF, en, iK, bE, es, eM, mf, ei); #c1(NEIL1) c2(NP_078884) c3(endonuclease 8-like 1 isoform 2) c4( ) c5(215894, 215895, 215896, 215897, 215898, 215899, 215900, 215901, 215902, 215903, 215904, 215905, 215906, 215907) c6( ) c7(T, os, sw, aoE, aA, oZ, v, fr, V, jz, It, aT, h, jy, K, dQ, ff, fc, hl, hN, aF, en, iK, bE, es, eM, mf, ei); #c1(NEIL1) c2(XP_006720740) c3(endonuclease 8-like 1 isoform X2) c4(293660) c5( ) c6( ) c7(T, os, sw, aoE, aA, oZ, v, fr, V, jz, It, aT, h, jy, K, dQ, ff, fc, hl, hN, aF, en, iK, bE, es, eM, mf, ei); #c1(NEIL1) c2(XP_006720742) c3(endonuclease 8-like 1 isoform X4) c4(293661) c5(293662) c6( ) c7(T, os, sw, aoE, aA, oZ, v, fr, V, jz, It, al h, jy, K, dQ, ff, fc, hl, hN, aF, en, iK, bE, es, eM, mf, ei); #c1(NEIL2) c2(NP_001129219) c3(endonuclease 8-like 2 isoform b) c4( ) c5(51238, 51239, 51240, 51241, 51242) c6( ) c7(bF, T, BN, sw, aW, ff, aoE, aT, r, n, hy, GA, m, q, en, t, V, bz, ne); #c1(NEIL2) c2(NP_001129220) c3(endonuclease 8-like 2 isoform c) c4(51243) c5(51244, 51245, 51246, 51247, 51248, 51249) c6( ) c7(bF, T, BN, sw, aW, ff, aoE, aT, r, n, hy, GA, m, q, en, t, V, bz, ne); #c1(NEIL2) c2(NP_659480) c3(endonuclease 8-like 2 isoform a) c4(240113, 240114, 240115) c5(240116, 240117, 240118, 240119, 240120, 240121, 240122, 240123, 240124, 240125, 240126, 240127, 240128, 240129, 240130, 240131, 240132, 240133, 240134, 240135, 240136) c6( ) c7(bF, T, BN, sw, aW, ff, aoE, aT, r, n, hy, GA, m, q, en, t, V, bz, ne); #c1(NEIL3) c2(NP_060718) c3(endonuclease 8-like 3) c4(197454) c5(197455, 197456, 197457, 197458, 197459, 197460) c6( ) c7(bF, ey, bX); #c1(NEK1) c2(NP_001186326) c3(serine/threonine-protein kinase Nek1 isoform 1) c4(77472) c5(77473, 77474, 77475, 77476, 77477, 77478) c6( ) c7(T, wB, aT, aA, aF, bWB, ci, zG, ade, rv, cjj); #c1(NEK1) c2(NP_001186327) c3(serine/threonine-protein kinase Nek1 isoform 3) c4(77479) c5(77480, 77481, 77482, 77483, 77484, 77485) c6( ) c7(T, wB, aT, aA, aF, bWB, ci, zG, ade, rv, cjj); #c1(NEK1) c2(NP_001186328) c3(serine/threonine-protein kinase Nek1 isoform 4) c4(77486) c5(77487, 77488, 77489, 77490, 77491, 77492) c6( ) c7(T, wB, aT, aA, aF, bWB, ci, zG, ade, rv, cjj); #c1(NEK1) c2(NP_001186329) c3(serine/threonine-protein kinase Nek1 isoform 5) c4(77493) c5(77494, 77495, 77496, 77497, 77498, 77499) c6( ) c7(T, wB, aT, aA, aF, bWB, ci, zG, ade, rv, cjj); #c1(NEK1) c2(NP_036356) c3(serine/threonine-protein kinase Nek1 isoform 2) c4(173197) c5(173198, 173199, 173200, 173201, 173202, 173203) c6( ) c7(T, wB, aT, aA, aF, bWB, ci, zG, ade, rv, cjj); #c1(NEK10) c2(NP_001026911) c3(serine/threonine-protein kinase Nek10 isoform 1) c4(29976) c5(29977, 29978, 29979, 29980, 29981, 29982, 29983, 29984, 29985, 29986, 29987, 29988) c6( ) c7(aT); #c1(NEK10) c2(NP_955379) c3(serine/threonine-protein kinase Nek10 isoform 3) c4(261616, 261617) c5(261618, 261619, 261620, 261621, 261622, 261623, 261624, 261625, 261626, 261627, 261628, 261629) c6( ) c7(aT); #c1(NEK10) c2(XP_006713064) c3(serine/threonine-protein kinase Nek10 isoform X9) c4(287008) c5( ) c6( ) c7(aT); #c1(NEK10) c2(XP_011531712) c3(serine/threonine-protein kinase Nek10 isoform X6) c4(327794) c5(327795, 327796, 327797, 327798, 327799, 327800) c6( ) c7(aT); #c1(NEK10) c2(XP_011531714) c3(serine/threonine-protein kinase Nek10 isoform X8) c4(327801, 327802) c5( ) c6( ) c7(aT); #c1(NEK10) c2(XP_011531717) c3(serine/threonine-protein kinase Nek10 isoform X13) c4( ) c5(327803, 327804, 327805, 327806, 327807, 327808, 327809, 327810, 327811, 327812, 327813, 327814) c6( ) c7(aT); #c1(NEK11) c2(NP_001139475) c3(serine/threonine-protein kinase Nek11 isoform 3) c4(59393) c5(59394, 59395, 59396, 59397, 59398, 59399) c6( ) c7(t, T, m); #c1(NEK11) c2(NP_079076) c3(serine/threonine-protein kinase Nek11 isoform 1) c4(216907) c5(216908, 216909, 216910, 216911, 216912, 216913, 216914, 216915, 216916, 216917, 216918, 216919, 216920, 216921) c6( ) c7(t, T, m); #c1(NEK11) c2(NP_665917) c3(serine/threonine-protein kinase Nek11 isoform 2) c4(241991) c5(241992, 241993, 241994, 241995, 241996, 241997) c6( ) c7(t, T, m); #c1(NEK11) c2(XP_011511472) c3(serine/threonine-protein kinase Nek11 isoform X3) c4(302150) c5(302151) c6( ) c7(t, T, m); #c1(NEK11) c2(XP_011511481) c3(serine/threonine-protein kinase Nek11 isoform X8) c4(302152) c5(302153, 302154, 302155, 302156, 302157, 302158, 302159, 302160, 302161, 302162) c6( ) c7(t, T, m); #c1(NEK11) c2(XP_011511484) c3(serine/threonine-protein kinase Nek11 isoform X11) c4( ) c5(302163, 302164, 302165, 302166, 302167) c6( ) c7(t, T, m); #c1(NEK2) c2(NP_001191112) c3(serine/threonine-protein kinase Nek2 isoform 2) c4(81041) c5(81042, 81043, 81044, 81045, 81046, 81047) c6( ) c7(T, wu, fd, n, ci, AD, q, jz, cjk, aE, aT, h, wm, aEL, B, qt, aW, r, nY, mo, t, kP, eM, m, iu); #c1(NEK2) c2(NP_002488) c3(serine/threonine-protein kinase Nek2 isoform 1) c4(129243, 129244) c5(129245, 129246, 129247, 129248, 129249, 129250, 129251, 129252, 129253, 129254, 129255, 129256) c6( ) c7(T, w fd, n, ci, AD, q, jz, cjk, aE, aT, h, wm, aEL, B, qt, aW, r, nY, mo, t, kP, eM, m, iu); #c1(NEK3) c2(NP_002489) c3(serine/threonine-protein kinase Nek3 isoform a) c4(129257, 129258) c5(129259, 129260, 129261, 129262, 129263, 129264, 129265, 129266, 129267, 129268) c6( ) c7(aW, aT); #c1(NEK4) c2(NP_001180462) c3(serine/threonine-protein kinase Nek4 isoform 2) c4(74131, 74132, 74133) c5(74134, 74135, 74136, 74137, 74138, 74139) c6( ) c7(eM, ey, bz, bK, bX); #c1(NEK4) c2(NP_003148) c3(serine/threonine-protein kinase Nek4 isoform 1) c4(135717, 135718) c5(135719, 135720, 135721, 135722, 135723, 135724) c6( ) c7(eM, ey, bz, bK, bX); #c1(NEK4) c2(XP_011532342) c3(serine/threonine-protein kinase Nek4 isoform X3) c4( ) c5(328494, 328495, 328496, 328497, 328498) c6( ) c7(eM, ey, bz, bK, bX); #c1(NEK6) c2(NP_001138473) c3(serine/threonine-protein kinase Nek6 isoform 1) c4(56834, 56835) c5(56836, 56837, 56838, 56839, 56840, 56841, 56842, 56843, 56844, 56845, 56846, 56847, 56848, 56849, 56850, 56851) c6( ) c7(T, cF, aj, dL, MG, eL, B, dR); #c1(NEK6) c2(NP_001159639) c3(serine/threonine-protein kinase NekG isoform 3) c4(64516, 64517) c5(64518, 64519, 64520, 64521, 64522, 64523, 64524, 64525) c6( ) c7(T, cF, aj, dL, MG, eL, B, dR); #c1(NEK6) c2(NP_001159641) c3(serine/threonine-protein kinase NekG isoform 4) c4(64526, 64527, 64528, 64529, 64530, 64531) c5(64532, 64533, 64534, 64535, 64536, 64537, 64538, 64539, 64540, 64541, 64542, 64543) c6( ) c7(T, cF, aj, dL, MG, eL, B, dR); #c1(NEK6) c2(XP_006716999) c3(serine/threonine-protein kinase NekG isoform X1) c4( ) c5(290610, 290611, 290612, 290613, 290614, 290615, 290616, 290617, 290618, 290619, 290620, 290621, 290622, 290623, 290624, 290625, 290626, 290627, 290628, 290629, 290630) c6( ) c7(T, cF, aj, dL, MG, eL, B, dR); #c1(NEK6) c2(XP_011516457) c3(serine/threonine-protein kinase NekG isoform X2) c4(309769, 309770) c5(309771, 309772, 309773, 309774, 309775, 309776, 309777, 309778, 309779, 309780, 309781, 309782, 309783, 309784, 309785, 309786, 309787, 309788, 309789, 309790, 309791, 309792, 309793, 309794, 309795, 309796, 309797, 309798, 309799, 309800, 309801) c6( ) c7(T, cF, aj, dL, MG, eL, B, dR); #c1(NEK7) c2(NP_598001) c3(serine/threonine-protein kinase Nek7) c4(235257) c5(235258, 235259, 235260, 235261, 235262, 235263, 235264, 235265, 235266, 235267) c6( ) c7(aT); #c1(NEK7) c2(XP_011507510) c3(serine/threonine-protein kinase Nek7 isoform X1) c4(297440, 297441, 297442) c5( ) c6( ) c7(aT); #c1(NEK7) c2(XP_011507511) c3(serine/threonine-protein kinase Nek7 isoform X2) c4( ) c5(297443, 297444, 297445, 297446, 297447, 297448, 297449, 297450, 297451, 297452, 297453, 297454, 297455, 297456, 297457, 297458, 297459, 297460) c6( ) c7(aT); #c1(NEK8) c2(NP_835464) c3(serine/threonine-protein kinase Nek8) c4(253525) c5(253526, 253527, 253528, 253529, 253530, 253531) c6( ) c7(d, aE, bE, aW, wB, aT, vm, dy, cjm, K, Nj, aBZ, cjl, vN); #c1(NEK8) c2(XP_011522947) c3(serine/threonine-protein kinase Nek8 isoform X6) c4(317442) c5(317443, 317444, 317445, 317446, 317447, 317448) c6( ) c7(d, aE, bE, aW, wB, aT, vm, dy, cjm, K, Nj, aBZ, cjl, vN); #c1(NEK9) c2(NP_149107) c3(serine/threonine-protein kinase Nek9) c4(227185) c5(227186, 227187, 227188, 227189, 227190, 227191) c6( ) c7(wB, al vm, aBZ, Nj, K, vN); #c1(NEK9) c2(XP_005268265) c3(serine/threonine-protein kinase Nek9 isoform X1) c4(281653) c5(281654, 281655, 281656, 281657, 281658, 281659) c6( ) c7(wB, aT, vm, aBZ, Nj, K, vN); #c1(NELFA) c2(NP_005654) c3(negative elongation factor A) c4(158294, 158295) c5(158296, 158297, 158298, 158299, 158300, 158301, 158302, 158303, 158304, 158305, 158306, 158307, 158308, 158309, 158310, 158311, 158312, 158313) c6( ) c7(axC); #c1(NELFA) c2(XP_006713979) c3(negative elongation factor A isoform X2) c4(287488) c5( ) c6( ) c7(axC); #c1(NELFB) c2(NP_056271) c3(negative elongation factor B) c4(186842) c5(186843, 186844, 186845, 186846, 186847, 186848) c6( ) c7(T, aW, aA, aT, aE, ci, g); #c1(NELFCD) c2(NP_945327) c3(negative elongation factor C/D) c4(260818) c5(260819, 260820, 260821, 260822, 260823, 260824, 260825, 260826, 260827, 260828) c6( ) c7(A, Ig, Pg, aGd, BG, y); #c1(NELFE) c2(NP_002895) c3(negative elongation factor E) c4(133295, 133296, 133297, 133298) c5(133299, 133300, 133301, 133302, 133303, 133304, 133305, 133306, 133307, 133308, 133309, 133310, 133311, 133312, 133313, 133314, 133315, 133316, 133317, 133318, 133319, 133320, 133321, 133322, 133323, 133324, 133325, 133326, 133327, 133328, 133329, 133330, 133331, 133332, 133333, 133334, 133335, 133336, 133337, 133338, 133339, 133340, 133341, 133342, 133343, 133344, 133345, 133346, 133347, 133348, 133349, 133350, 133351, 133352, 133353, 133354, 133355, 133356, 133357, 133358, 133359, 133360, 133361, 133362, 133363, 133364, 133365, 133366, 133367, 133368, 133369, 133370, 133371, 133372, 133373, 133374, 133375, 133376, 133377, 133378, 133379, 133380, 133381, 133382, 133383) c6( ) c7(T, os, aC, bB, gA, ci, x, aU, K, hu, H, eL, be, aW, La, as, eE, cm, akw, aAW, eM, nB, iT, vA, U, dW, nw, k, m, avU, NK, gU, Dl, ht, NT, n, aj, nA, qN, eW, hw, Ak, h, aYf, dL, acd, Um, cC, oS, A, kj, aq, op, W, bP, mg, hR, bfX, fL, it, B, L, bL, fM, dA, cjn, ew, DN, C, V, q, J, qH, er, Kx, MR, WY, aT, jj, ae, bUd, wr, iU, Y, r, aaE, lo, bu, aaO, t, ck, rR, alC, iQ, c, gX, bt, kh, pY, jh, oZ, dG, hF, mC, ad, Ae, oj, bj, ji, lQ, fb, nJ, uX, aCt, xs, eZ, app, akh, KM, bz, nb, bE, afd, Kj, bC, lC, kS, iu, y); #c1(NELFE) c2(XP_006715268) c3(negative elongation factor E isoform X1) c4(289147, 289148, 289149) c5(289150, 289151, 289152, 289153, 289154, 289155, 289156, 289157, 289158, 289159, 289160, 289161, 289162, 289163, 289164, 289165, 289166, 289167, 289168, 289169, 289170, 289171, 289172, 289173, 289174, 289175, 289176, 289177, 289178, 289179, 289180, 289181, 289182, 289183, 289184, 289185, 289186, 289187, 289188, 289189, 289190, 289191, 289192, 289193, 289194) c6( ) c7(T, os, aC, bB, gA, ci, x, aU, K, hu, H, eL, be, aW, La, as, eE, cm, akw, aAW, eM, nB, iT, vA, U, dW, nw, k, m, avU, NK, gU, Dl, ht, NT, n, aj, nA, qN, eW, hw, Ak, h, aYf, dL, acd, Um, cC, oS, A, kj, aq, np, W, bP, mg, hR, bfX, fL, it, B, L, bL, fM, dA, cjn, ew, ON, C, V, q, J, qH, er, Kx, MR, WY, aT, jj, ae, bUd, wr, iU, Y, r, aaE, Io, bu, aaO, t, ck, rR, alC, iQ, c, gX, bt, kh, pY, jh, al, dG, hF, mC, ad, Ae, oj, bj, ji, ID, fb, nJ, uX, aCt, xs, al, app, akh, KM, bz, nb, bE, afd, Kj, bC, lC, kS, iu, y); #c1(NELL1) c2(NP_001275643) c3(protein kinase C-binding protein NELL1 isoform 4 precursor) c4(106863) c5(106864, 106865, 106866, 106867, 106868, 106869) c6( ) c7(bM, T, pf, acl, bO, bS, et, ak yn, x, Mg, aE, gd, dL, K, an, rz, eL, A, Y, ev, ff, fe, agj, en, iV, Z, t, cm, fq, zV, bF, c, eM, ayS, m, k, UF, bt, ra); #c1(NELL1) c2(NP_006148) c3(protein kinase C-binding protein NELL1 isoform 1 precursor) c4(162412) c5(162413, 162414, 162415, 162416, 162417, 162418) c6( ) c7(bM, T, pf, acl, bO, bS, et, eA, yn, x, Mg, aE, gd, dL, K, an, rz, eL, A, Y, ev, ff, fe, agj, en, iV, Z, t, cm, fq, zV, bF, c, eM, ayS, m, k, UF, bt, ra); #c1(NELL1) c2(NP_963845) c3(protein kinase C-binding protein NELL1 isoform 2 precursor) c4(262426) c5(262427, 262428, 262429, 262430, 262431, 262432) c6( ) c7(bM, T, pf, acl, bO, bS, et, eA, yn, x, Mg, aE, gd, dL, K, an, rz, eL, A, Y, ev, ff, fe, agj, en, iV, Z, t, cm, fq, zV, bF, c, eM, ayS, m, k, UF, bt, ra); #c1(NELL2) c2(NP_001138579) c3(protein kinase C-binding protein NELL2 isoform a) c4(57042) c5(57043, 57044, 57045, 57046, 57047, 57048, 57049, 57050, 57051, 57052, 57053, 57054, 57055, 57056, 57057, 57058, 57059, 57060, 57061, 57062, 57063, 57064, 57065, 57066) c6(57067) c7(T, iT, eL, Y, eE, gX, apG, dL, EY, ci, K, m, bt, bz, q, yn, yR, UF); #c1(NELL2) c2(NP_001138580) c3(protein kinase C-binding protein NELL2 isoform b precursor) c4(57068) c5(57069, 57070, 57071, 57072, 57073, 57074, 57075, 57076, 57077, 57078, 57079, 57080, 57081, 57082, 57083, 57084, 57085, 57086, 57087) c6( ) c7(T, iT, eL, Y, eE, gX, apG, dL, EY, ci, K, m, bt, bz, q, yn, yR, UF); #c1(NELL2) c2(NP_001138581) c3(protein kinase C-binding protein NELL2 isoform c precursor) c4(57088, 57089, 57090) c5(57091, 57092, 57093, 57094, 57095, 57096, 57097, 57098, 57099, 57100, 57101, 57102, 57103, 57104, 57105, 57106, 57107, 57108, 57109, 57110, 57111, 57112, 57113, 57114, 57115, 57116, 57117, 57118, 57119, 57120) c6( ) c7(T, iT, eL, Y, eE, gX, apG, dL, EY, ci, K, m, bt, bz, q, yn, yR, UF); #c1(NELL2) c2(NP_001138582) c3(protein kinase C-binding protein NELL2 isoform d) c4(57121, 57122, 57123) c5(57124, 57125) c6( ) c7(T, iT, eL, Y, eE, gX, apG, dL, EY, ci, K, m, bt, bz, q, yn, yR, UF); #c1(NEMF) c2(NP_001288661) c3(nuclear expert mediator factor NEMF isoform 2) c4(113913) c5(113914, 113915, 113916, 113917, 113918, 113919) c6( ) c7(bB, bE, bz, eM); #c1(NEMF) c2(NP_004704) c3(nuclear expert mediator factor NEMF isoform 1) c4(148947, 148948) c5(148949, 148950, 148951, 148952, 148953, 148954, 148955, 148956, 148957, 148958, 148959, 148960) c6( ) c7(bB, bE, bz, eM); #c1(NEMF) c2(XP_005268258) c3(nuclear expert mediator factor NEMF isoform X2) c4(281636) c5(281637, 281638, 281639, 281640, 281641, 281642, 281643, 281644, 281645, 281646, 281647, 281648) c6( ) c7(bB, bE, bz, eM); #c1(NEMF) c2(XP_011535618) c3(nuclear expert mediator factor NEMF isoform X1) c4(332875) c5( ) c6( ) c7(bB, bE, bz, eM); #c1(NEO1) c2(NP_001166094) c3(neogenin isoform 2 precursor) c4(68137) c5(68138, 68139, 68140, 68141, 68142, 68143) c6( ) c7(T, d, aE, iL, n, fD, Ea, t, it, eA); #c1(NEO1) c2(NP_001166095) c3(nengenin isoform 3 precursor) c4(68144) c5(68145, 68146, 68147, 68148, 68149, 68150) c6( ) c7(T, d, aE, iL, n, fD, Ea, t, it, eA); #c1(NEO1) c2(NP_002490) c3(nengenin isoform 1 precursor) c4(129269) c5(129270, 129271, 129272, 129273, 129274, 129275, 129276, 129277, 129278, 129279) c6( ) c7(T, d, aE, iL, n, fD, Ea, t, it, eA); #c1(NEO1) c2(XP_011519930) c3(nengenin isoform X1) c4( ) c5(314720) c6( ) c7(T, d, aE, iL, n, fD, Ea, t, it, ak); #c1(NEO1) c2(XP_011519933) c3(nengenin isoform X4) c4(314721) c5(314722, 314723, 314724, 314725, 314726, 314727) c6( ) c7(T, d, aE, iL, n, fD, Ea, t, it, eA); #c1(NES) c2(NP_006608) c3(nestin) c4(166588, 166589) c5(166590, 166591, 166592, 166593, 166594, 166595, 166596, 166597, 166598, 166599, 166600, 166601) c6( ) c7(Fv, T, aC, ea, if, fd, bv, aE, aeO, K, hm, eG, yo, aeR, aW, Ls, g, as, eE, cm, yX, eM, vA, fy, dD, aw, n, qN, cd, eW, b, ft, h, IG, SD, cY, A, aq, kp, Rl, QK, op, dB, hR, va, fM, fZ, j, Cb, eA, Rl, aT, cy, eu, jf, Uf, s, oV, Y, qL, en, cl, LV, dS, sk, wg, ac, iQ, aGi, dy, kG, hl, dG, uu, eq, iJ, ad, hP, fb, d, ff, eH, iR, bz, bF, amS, i, iu); #c1(NET1) c2(NP_001040625) c3(neuroepithelial cell-transforming gene 1 protein isoform 1) c4(34208, 34209) c5(34210, 34211, 34212, 34213, 34214, 34215, 34216) c6( ) c7(T, dB, aW, Jl, awa, AH, awb, aT, aA, aF, ci, K, g, B); #c1(NET1) c2(NP_005854) c3(neuroepithelial cell-transforming gene 1 protein isoform 2) c4(159916, 159917) c5(159918, 159919, 159920, 159921, 159922, 159923, 159924, 159925, 159926, 159927, 159928, 159929, 159930, 159931, 159932, 159933, 159934, 159935, 159936, 159937, 159938) c6( ) c7(T, dB, aW, JL awa, AH, awb, aT, aA, aF, ci, K, g, B); #c1(NETO1) c2(NP_620552) c3(neuropilin and tolloid-like protein 1 isoform 1 precursor) c4(237709) c5(237710, 237711, 237712, 237713, 237714, 237715) c6( ) c7(T); #c1(NETO1) c2(XP_005266831) c3(neuropilin and tolloid-like protein 1 isoform X1) c4(280338, 280339) c5(280340, 280341, 280342, 280343, 280344, 280345, 280346, 280347, 280348, 280349, 280350, 280351, 280352, 280353, 280354, 280355) c6( ) c7(T); #c1(NET02) c2(NP_060562) c3(neuropilin and tolloid-like protein 2 isoform 1 precursor) c4(196565) c5(196566, 196567, 196568, 196569, 196570, 196571, 196572, 196573, 196574, 196575) c6( ) c7(qK); #c1(NEO1) c2(NP_000425) c3(sialidase-1 precursor) c4(8817) c5(8818, 8819, 8820, 8821, 8822, 8823, 8824, 8825, 8826, 8827, 8828, 8829, 8830, 8831, 8832, 8833, 8834, 8835, 8836, 8837, 8838, 8839, 8840, 8841, 8842, 8843, 8844, 8845, 8846) c6( ) c7(T, id, aYP, n, dG, beZ, ci, fr, yU, AO, q, ad, eA, XX, Db, bzk, aT, yZ, ey, H, ae, eL, xQ, d, qt, aW, Ls, eH, eZ, aYR, aF, g, ys, cl, t, as, bz, eF, ir, kP, eM, aYa, aYb, aYQ, Lp, Zn, Lq, m, cjo, bnl, L); #c1(NEU3) c2(NP_006647) c3(sialidase-3) c4(166855, 166856, 166857) c5(166858, 166859, 166860, 166861, 166862, 166863, 166864, 166865, 166866, 166867, 166868, 166869, 166870, 166871, 166872, 166873, 166874, 166875, 166876, 166877, 166878, 166879) c6( ) c7(x, gh, T, aYa, bE, Y, bzk, bB, fr, ci, k, ae, X, ad); #c1(NEURL1) c2(NP_004201) c3(E3 ubiquitin-protein ligase NEURL1) c4(144303) c5(144304, 144305, 144306, 144307, 144308, 144309) c6( ) c7(T, id, n, fr, ci, AD, q, ad, eA, XX, Db, aT, ae, eL, jf, xQ, d, qt, aW, Ls, eH, aF, g, cl, as, t, eF, bz, ir, kP, eM, Zn, m, bnl); #c1(NEURL1) c2(XP_005270326) c3(E3 ubiquitin-protein ligase NEURL1 isoform X3) c4(283340, 283341, 283342) c5(283343, 283344, 283345, 283346, 283347, 283348, 283349, 283350, 283351, 283352, 283353, 283354) c6( ) c7(T, id, n, fr, ci, AD, q, ad, eA, XX, Db, aT, ae, eL, jf, xQ, d, qt, aW, Ls, eH, aF, g, cl, as, t, eF, bz, ir, kP, eM, Zn, m, bnl); #c1(NEURL1) c2(XP_011538637) c3(E3 ubiquitin-protein ligase NEURL1 isoform X6) c4( ) c5(336379, 336380, 336381, 336382, 336383, 336384) c6( ) c7(T, id, n, fr, ci, AO, q, ad, eA, XX, Db, aT, ae, eL, jf, xQ, d, qt, aW, Ls, eH, aF, g, cl, as, t, eF, bz, ir, kP, eM, Zn, m, bnl); #c1(NEURL2) c2(NP_542787) c3(neutralized-like protein 2 isoform 1) c4(233093) c5(233094, 233095, 233096, 233097, 233098, 233099) c6( ) c7(km); #c1(NEUROD1) c2(NP_002491) c3(neurogenic differentiation factor 1) c4(129280) c5(129281, 129282, 129283, 129284, 129285, 129286, 129287) c6( ) c7(bM, T, byb, e, ame, ci, aQK, aR, x, aE, pX, vg, qM, Ds, hm, ye, aW, hl, g, cm, qJ, y, bhB, eM, iA, Gs, mx, vy, cj, uJ, OD, m, pw, zv, iu, cZ, dt, cV, aj, fr, cd, ai, xC, Mo, ft, mh, i, BR, aoh, cjp, cU, dd, A, Gw, sp, ahJ, agF, aPP, CQ, jT, mg, hR, ER, art, aNX, B, aNW, bL, Dw, Rt, cz, tc, QZ, v, V, q, J, eA, oT, Ig, aT, bK, jj, bq, Cy, ae, jf, arl, s, xR, oV, Y, cjp, r, Io, t, arJ, pb, ck, cT, BU, ac, IV, mG, nG, wR, mf, dy, bt, hS, pY, iW, jh, dG, aNH, hF, ad, av, tT, oW, hD, agm, IQ, sj, mu, d, Ix, Gv, xs, cr, dN, S, bz, qa, blZ, bF, es, eU, qe, bE, z, aq, dX, pK, If, gq, hv); #c1(NEUROD2) c2(XP_005257466) c3(neurogenic differentiation factor 2 isoform X2) c4( ) c5(275136, 275137) c6( ) c7(jf, A, pz); #c1(NEUROD2) c2(XP_011523153) c3(neurogenic differentiation factor 2 isoform X1) c4(317688) c5(317689, 317690, 317691, 317692, 317693) c6( ) c7(jf, A, pz); #c1(NEUROD4) c2(NP_067014) c3(neurogenic differentiation factor 4) c4(208358) c5(208359, 208360, 208361, 208362, 208363, 208364, 208365) c6( ) c7(bL, aj, J); #c1(NEUROD6) c2(NP_073565) c3(neurogenic differentiation factor 6) c4(212867) c5(212868, 212869, 212870, 212871, 212872, 212873, 212874) c6( ) c7(aXL); #c1(NEUROG1) c2(NP_006152) c3(neurogenin-1) c4(162419) c5(162420, 162421, 162422, 162423, 162424, 162425, 162426) c6( ) c7(jf, Mb, T, ye, jz, bP, c, s, iH, ajN, iL, r, n, ci, q, bN); #c1(NEUROG2) c2(NP_076924) c3(neurogenin-2) c4(214268) c5(214269, 214270, 214271, 214272, 214273, 214274, 214275, 214276, 214277, 214278) c6( ) c7(yo, s, an); #c1(NEUROG3) c2(NP_066279) c3(neurogenin-3) c4(206954) c5(206955, 206956, 206957, 206958, 206959, 206960, 206961, 206962) c6( ) c7(bL, ye, A, mh, pY, cjr, Hm, UG, ahJ, aj, mf, j, J); #c1(NF1) c2(NP_000258) c3(neurofibromin isoform 2) c4(5861) c5(5862, 5863, 5864, 5865, 5866, 5867) c6( ) c7(T, aC, yS, e, bB, amj, ci, ip, bv, cjw, aeO, Qk, ajv, Ev, Ou, K, aBK, eG, aeR, aW, Ls, Az, uY, as, cm, bw, iP, Iq, QF, m, adk, n, nA, Cd, b, ft, bkm, TK, Dz, dx, cC, aVf, iw, blP, atf, Hu, cjt, iN, byl, bkn, dB, anx, bD, agx, yO, eA, XX, nX, aT, dz, jf, qw, iU, Y, en, bQ, f, bN, ck, QG, acW, Dy, au, dh, aeM, cjv, bt, xb, VB, jh, agz, hF, xt, iC, ib, cjx, hD, bma, hP, fb, pq, cjs, iL, d, ff, cr, kD, aiz, Vl, bz, dr, dR, aHY, Hp, cju, Ew, bE, gZ, aS, i, xg, jr); #c1(NF1) c2(NP_001035957) c3(neurofibromin isoform 1) c4(33538) c5(33539, 33540, 33541, 33542, 33543, 33544) c6( ) c7(T, aC, yS, e, bB, amj, ci, ip, bv, cjw, aeO, Qk, ajv, Ev, Ou, K, aBK, eG, aeR, aW, Ls, Az, uY, as, cm, bw, iP, Iq, QF, m, adk, n, nA, Cd, b, ft, bkm, TK, Dz, dx, cC, aVf, iw, blP, atf, Hu, cjt, iN, byl, bkn, dB, anx, bD, agx, yO, eA, XX, nX, aT, dz, jf, qw, iU, Y, en, bQ, f, bN, ck, QG, acW, Dy, au, dh, aeM, cjv, bt, xb, VB, jh, agz, hF, xt, iC, ib, cjx, hD, bma, hP, fb, pq, cjs, iL, d, ff, cr, kD, aiz, VI, bz, dr, dR, aHY, Hp, cju, Ew, bE, gZ, aS, i, xg, jr); #c1(NF1) c2(NP_001121619) c3(neurofibromin isoform 3) c4(45878) c5(45879, 45880, 45881, 45882, 45883, 45884) c6( ) c7(T, aC, yS, e, bB, amj, ci, ip, bv, cjw, aeO, Qk, ajv, Ev, Ou, K, aBK, eG, aeR, aW, Ls, Az, uY, as, cm, bw, iP, Iq, QF, m, adk, n, nA, Cd, b, ft, bkm, TK, Dz, dx, cC, aVf, iw, blP, atf, Hu, cjt, iN, byl, bkn, dB, anx, bD, agx, yO, eA, XX, nX, aT, dz, jf, qw, iU, Y, en, bQ, f, bN, ck, QG, acW, Dy, au, dh, aeM, cjv, bt, xb, VB, jh, agz, hF, xt, iC, ib, cjx, hD, bma, hP, fb, pq, cjs, iL, d, ff, cr, kD, aiz, VI, bz, dr, dR, aHY, Hp, cju, Ew, bE, gZ, aS, i, xg, jr); #c1(NF1) c2(XP_005258040) c3(neurofibromin isoform X3) c4(275464) c5( ) c6( ) c7(T, aC, yS, e, bB, amj, ci, ip, bv, cjw, aeO, Qk, ajv, Ev, Ou, K, aBK, eG, aeR, aW, Ls, Az, uY, as, cm, bw, iP, Iq, QF, m, adk, n, nA, Cd, b, ft, bkm, TK, Dz, dx, cC, aVf, iw, blP, atf, Hu, cjt, iN, byl, bkn, dB, anx, bD, agx, yO, eA, XX, nX, aT, dz, jf, qw, iU, Y, en, bQ, f, bN, ck, QG, acW, Dy, au, dh, aeM, cjv, bt, xb, VB, jh, agz, hF, xt, iC, ib, cjx, hD, bma, hP, fb, pq, cjs, iL, d, ff, cr, kD, aiz, VI, bz, dr, dR, aHY, Hp, cju, Ew, bE, gZ, aS, i, xg, jr); #c1(NF1) c2(XP_005258041) c3(neurofibromin isoform X7) c4(275465) c5(275466, 275467, 275468, 275469, 275470, 275471) c6( ) c7(T, aC, yS, e, bB, amj, ci, ip, bv, cjw, aeO, Qk, ajv, Ev, Ou, K, aBK, eG, aeR, aW, Ls, Az, uY, as, cm, bw, iP, Iq, OF, m, adk, n, nA, Cd, b, ft, bkm, TK, Dz, dx, cC, aVf, iw, blP, atf, Hu, cjt, iN, byl, bkn, dB, anx, bD, agx, yO, eA, XX, nX, aT, dz, jf, qw, iU, Y, en, bQ, f, bN, ck, QG, acW, Dy, au, dh, aeM, cjv, bt, xb, VB, jh, agz, hF, xt, iC, ib, cjx, hD, bma, hP, fb, pq, cjs, iL, d, ff, cr, kD, aiz, VI, bz, dr, dR, aHY, Hp, cju, Ew, bE, gZ, aS, i, xg, jr); #c1(NF1) c2(XP_006721985) c3(neurofibromin isoform X1) c4( ) c5(294518, 294519, 294520, 294521, 294522) c6( ) c7(T, aC, yS, e, bB, amj, ci, ip, bv, cjw, aeO, Qk, ajv, Ev, Ou, K, aBK, eG, aeR, aW, Ls, Az, uY, as, cm, bw, iP, Iq, QF, m, adk, n, nA, Cd, b, ft, bkm, TK, Dz, dx, cC, aVf, iw, blP, atf, Hu, cjt, iN, byl, bkn, dB, anx, bD, agx, yO, eA, XX, nX, aT, dz, jf, qw, iU, Y, en, bQ, f, bN, ck, QG, acW, Dy, au, dh, aeM, cjv, bt, xb, VB, jh, agz, hF, xt, iC, ib, cjx, hD, bma, hP, fb, pq, cjs, iL, d, ff, cr, kD, aiz, VI, bz, dr, dR, aHY, Hp, cju, Ew, bE, gZ, aS, i, xg, jr); #c1(NF1) c2(XP_006721987) c3(neurofibromin isoform X5) c4(294523) c5(294524, 294525, 294526, 294527, 294528, 294529) c6( ) c7(T, aC, yS, e, bB, amj, ci, ip, bv, cjw, aeO, Qk, ajv, Ev, Ou, K, aBK, eG, aeR, aW, Ls, Az, uY, as, cm, bw, iP, Iq, QF, m, adk, n, nA, Cd, b, ft, bkm, TK, Dz, dx, cC, aVf, iw, blP, atf, Hu, cjt, iN, byl, bkn, dB, anx, bD, agx, yO, eA, XX, nX, aT, dz, jf, qw, iU, Y, en, bQ, f, bN, ck, QG, acW, Dy, au, dh, aeM, cjv, bt, xb, VB, jh, agz, hF, xt, iC, ib, cjx, hD, bma, hP, fb, pq, cjs, iL, d, ff, cr, kD, aiz, VI, bz, dr, dR, aHY, Hp, cju, Ew, bE, gZ, aS, i, xg, jr); #c1(NF1) c2(XP_011523159) c3(neurofibromin isoform XB) c4( ) c5(317694) c6( ) c7(T, aC, yS, e, bB, amj, ci, ip, bv, cjw, aeO, Qk, ajv, Ev, Ou, K, aBK, eG, aeR, aW, Ls, Az, uY, as, cm, bw, iP, Iq, QF, m, adk, n, nA, Cd, b, ft, bkm, TK, Dz, dx, cC, aVf, iw, blP, atf, Hu, cjt, iN, byl, bkn, dB, anx, bD, agx, yO, eA, XX, nX, aT, dz, jf, qw, iU, Y, en, bQ, f, bN, ck, QG, acW, Dy, au, dh, aeM, cjv, bt, xb, VB, jh, agz, hF, xt, iC, ib, cjx, hD, bma, hP, fb, pq, cjs, iL, d, ff, cr, kD, aiz, VI, bz, dr, dR, aHY, Hp, cju, Ew, bE, gZ, aS, i, xg, jr); #c1(NF2) c2(NP_000259) c3(merlin isoform 1) c4(5868, 5869) c5(5870, 5871, 5872, 5873, 5874, 5875) c6( ) c7(agx, cZ, T, aC, ob, ha, jx, aA, n, KD, Zh, fr, agz, hF, anu, q, ad, qH, cjy, eA, ip, iC, ib, avs, aeO, Qk, aT, hD, h, By, bkw, dL, dd, cfu, fb, eL, dx, Fp, Uf, d, aeR, aW, Y, oV, Ls, r, gl, uY, aq, aF, as, eF, cjz, kJ, bz, ayg, cm, ck, pH, Ew, eM, aBU, dB, hk, aJQ, avr, azr, bt, B, hS); #c1(NF2) c2(NP_861546) c3(merlin isoform 2) c4(255671, 255672) c5(255673, 255674, 255675, 255676, 255677, 255678, 255679, 255680, 255681, 255682, 255683, 255684, 255685, 255686, 255687, 255688, 255689, 255690, 255691, 255692, 255693, 255694, 255695, 255696, 255697, 255698) c6( ) c7(agx, cZ, T, aC, ob, ha, jx, aA, n, KD, Zh, fr, agz, hF, anu, q, ad, qH, cjy, eA, ip, iC, ib, avs, aeO, Qk, aT, hD, h, By, bkw, dL, dd, cfu, fb, eL, dx, Fp, Uf, d, aeR, aW, Y, oV, Ls, r, gl, uY, aq, aF, as, eF, cjz, kJ, bz, ayg, cm, ck, pH, Ew, eM, aBU, dB, hk, aJQ, avr, azr, bt, B, hS); #c1(NF2) c2(NP_861966) c3(merlin isoform 5) c4(255699, 255700) c5(255701, 255702, 255703, 255704, 255705, 255706) c6( ) c7(agx, cZ, T, aC, ob, ha, jx, aA, n, KD, Zh, fr, agz, hF, anu, q, ad, qH, cjy, eA, ip, iC, ib, avs, aeO, Qk, aT, hD, h, By, bkw, dL, dd, cfu, fb, eL, dx, Fp, Uf, d, aeR, aW, Y, oV, Ls, r, gl, uY, aq, aF, as, eF, cjz, kJ, bz, ayg, cm, ck, pH, Ew, eM, aBU, dB, hk, aJQ, avr, azr, bt, B, hS); #c1(NF2) c2(NP_861967) c3(merlin isoform 6) c4(255707) c5(255708, 255709, 255710, 255711, 255712, 255713) c6( ) c7(agx, cZ, T, aC, ob, ha, jx, aA, n, KD, Zh, fr, agz, hF, anu, q, ad, qH, cjy, eA, ip, iC, ib, avs, aeO, Qk, aT, hD, h, By, bkw, dL, dd, cfu, fb, eL, dx, Fp, Uf, d, aeR, aW, Y, oV, Ls, r, gl, uY, aq, aF, as, eF, cjz, kJ, bz, ayg, cm, ck, pH, Ew, eM, aBU, dB, hk, aJQ, avr, azr, bt, B, hS); #c1(NF2) c2(NP_861969) c3(merlin isoform 7) c4(255714) c5(255715, 255716, 255717, 255718, 255719, 255720, 255721, 255722, 255723, 255724, 255725, 255726, 255727, 255728, 255729, 255730, 255731, 255732, 255733, 255734) c6( ) c7(agx cZ, T, aC, ob, ha, jx, aA, n, KD, Zh, fr, agz, hF, anu, q, ad, qH, cjy, eA, ip, iC, ib, avs, aeO, Qk, aT, hD, h, By, bkw, dL, dd, cfu, fb, eL, dx, Fp, Uf, d, aeR, aW, Y, oV, Ls, r, gl, uY, aq, aF, as, eF, cjz, kJ, bz, ayg, cm, ck, pH, Ew, eM, aBU, dB, hk, aJQ, avr, azr, bt, B, hS); #c1(NF2) c2(NP_861971) c3(merlin isoform 8) c4(255735) c5(255736, 255737, 255738, 255739, 255740, 255741) c6( ) c7(agx, cZ, T, aC, ob, ha, jx, aA, n, KD, Zh, fr, agz, hF, anu, q, ad, qH, cjy, eA, ip, iC, ib, avs, aeO, Qk, aT, hD, h, By, bkw, dL, dd, cfu, fb, eL, dx, Fp, Uf, d, aeR, aW, Y, oV, Ls, r, gl, uY, aq, aF, as, eF, cjz, kJ, bz, ayg, cm, ck, pH, Ew, eM, aBU, dB, hk, aJQ, avr, azr, bt, B, hS); #c1(NFAM1) c2(NP_666017) c3(NFAT activation molecule 1 precursor) c4(241998) c5( ) c6( ) c7(fR); #c1(NFAM1) c2(XP_011528259) c3(NFAT activation molecule 1 isoform X1) c4( ) c5(323342, 323343, 323344, 323345, 323346, 323347) c6( ) c7(fR); #c1(NFASC) c2(NP_001005388) c3(neurofascin isoform 1 precursor) c4(21613) c5(21614, 21615, 21616, 21617, 21618, 21619, 21620, 21621, 21622, 21623) c6( ) c7(ans, mF, V, yW); #c1(NFASC) c2(NP_001005389) c3(neurofascin isoform 5 precursor) c4(21624) c5(21625, 21626, 21627, 21628, 21629, 21630, 21631, 21632, 21633, 21634, 21635, 21636, 21637, 21638, 21639) c6( ) c7(ans, mF, V, yW); #c1(NFASC) c2(NP_055905) c3(neurofascin isoform 4 precursor) c4( ) c5(184381, 184382, 184383, 184384, 184385, 184386, 184387, 184388) c6( ) c7(ans, mF, V, yW); #c1(NFASC) c2(XP_005245046) c3(neurofascin isoform X16) c4(266227, 266228) c5(266229, 266230, 266231, 266232, 266233, 266234, 266235, 266236, 266237, 266238, 266239, 266240, 266241) c6( ) c7(ans, mF, V, yW); #c1(NFASC) c2(XP_005245048) c3(neurofascin isoform X17) c4(266242) c5(266243, 266244, 266245, 266246, 266247, 266248, 266249, 266250, 266251, 266252) c6( ) c7(ans, mF, V, yW); #c1(NFASC) c2(XP_005245049) c3(neurofascin isoform X18) c4(266253) c5(266254, 266255) c6( ) c7(ans, mF, V, yW); #c1(NFASC) c2(XP_005245054) c3(neurofascin isoform X22) c4( ) c5(266256, 266257) c6( ) c7(ans, mF, V, yW); #c1(NFASC) c2(XP_011507617) c3(neurofascin isoform X5) c4(297524) c5(297525, 297526, 297527, 297528, 297529) c6( ) c7(ans, mF, V, yW); #c1(NFASC) c2(XP_011507621) c3(neurofascin isoform X9) c4(297530, 297531, 297532) c5(297533, 297534, 297535, 297536, 297537) c6( ) c7(ans, mF, V, yW); #c1(NFASC) c2(XP_011507622) c3(neurofascin isoform X10) c4( ) c5(297538, 297539, 297540) c6( ) c7(ans, mF, V, yW); #c1(NFASC) c2(XP_011507623) c3(neurofascin isoform X11) c4(297541, 297542) c5(297543, 297544, 297545, 297546, 297547, 297548, 297549, 297550, 297551, 297552, 297553) c6( ) c7(ans, mF, V, yW); #c1(NFASC) c2(XP_011507624) c3(neurofascin isoform X12) c4(297554) c5(297555, 297556, 297557, 297558, 297559, 297560) c6( ) c7(ans, mF, V, yW); #c1(NFASC) c2(XP_011507630) c3(neurofascin isoform X23) c4(297561) c5(297562, 297563, 297564, 297565, 297566, 297567) c6( ) c7(ans, mF, V, yW); #c1(NFAT5) c2(NP_001106649) c3(nuclear factor of activated T-cells 5 isoform d) c4(42451) c5(42452, 42453, 42454, 42455, 42456, 42457, 42458, 42459, 42460, 42461) c6( ) c7(ck, T, cF, op, aW, vA, vy, aT, cz, cy, hR, dG, h, K, y, ai, Pm); #c1(NFAT5) c2(NP_006590) c3(nuclear factor of activated T-cells 5 isoform c) c4(166489, 166490) c5(166491, 166492, 166493, 166494, 166495, 166496, 166497) c6( ) c7(ck, T, cF, op, aW, vA, vy, aT, cz, cy, hR, dG, h, K, y, ai, Pm); #c1(NFAT5) c2(NP_619727) c3(nuclear factor of activated T-cells 5 isoform b) c4(237050) c5(237051, 237052, 237053, 237054, 237055, 237056) c6( ) c7(ck, T, cF, op, aW, vA, vy, al cz, cy, hR, dG, h, K, y, ai, Pm); #c1(NFAT5) c2(NP_619728) c3(nuclear factor of activated T-cells 5 isoform a) c4( ) c5(237057, 237058, 237059, 237060, 237061, 237062, 237063, 237064, 237065, 237066, 237067, 237068, 237069, 237070) c6( ) c7(ck, T, cF, op, aW, vA, vy, aT, cz, cy, hR, dG, h, K, y, ai, Pm); #c1(NFATC1) c2(NP_001265598) c3(nuclear factor of activated T-cells, cytoplasmic 1 isoform F) c4(98930, 98931, 98932) c5(98933, 98934, 98935, 98936, 98937, 98938, 98939, 98940, 98941, 98942, 98943, 98944, 98945, 98946, 98947, 98948, 98949, 98950, 98951, 98952, 98953, 98954, 98955, 98956, 98957) c6( ) c7(T, aC, acl, oe, jh, cjA, j, ci, Ea, ai, aE, aT, h, pi, cp, 1C, cr, akB, BG, iV, f, t, IY, pa, aLw, bE, cj, gZ, y, kS); #c1(NFATC1) c2(NP_001265599) c3(nuclear factor of activated T-cells, cytoplasmic 1 isoform G) c4(98958) c5(98959, 98960, 98961, 98962, 98963, 98964) c6( ) c7(T, aC, acl, oe, jh, cjA, j, ci, Ea, ai, aE, aT, h, pi, cp, 1C, cr, akB, BG, iV, f, t, IY, pa, aLw, bE, cj, gZ, y, kS); #c1(NFATC1) c2(NP_001265602) c3(nuclear factor of activated T-cells, cytoplasmic 1 isoform J) c4( ) c5(98965, 98966, 98967, 98968, 98969, 98970, 98971, 98972) c6( ) c7(T, aC, acl, oe, jh, cjA, j, ci, Ea, ai, aE, aT, h, pi, cp, lC, cr, akB, BG, iV, f, t, IY, pa, aLw, bE, cj, gZ, y, kS); #c1(NFATC1) c2(NP_006153) c3(nuclear factor of activated T-cells, cytoplasmic 1 isoform B) c4(162427, 162428) c5( ) c6( ) c7(T, aC, acl, oe, jh, cjA, j, ci, Ea, ai, aE, aT, h, pi, cp, 1C, cr, akB, BG, iV, f, t, IY, pa, aLw, bE, cj, gZ, y, kS); #c1(NFATC1) c2(NP_765975) c3(nuclear factor of activated T-cells, cytoplasmic 1 isoform C) c4(249440, 249441) c5(249442, 249443, 249444, 249445, 249446, 249447, 249448, 249449, 249450, 249451, 249452, 249453) c6( ) c7(T, aC, acl, oe, jh, cjA, j, ci, Ea, ai, aE, aT, h, pi, cp, 1C, cr, akB, BG, iV, f, t, IY, pa, aLw, bE, cj, gZ, y, kS); #c1(NFATC1) c2(NP_765976) c3(nuclear factor of activated T-cells, cytoplasmic 1 isoform D) c4( ) c5(249454, 249455, 249456, 249457, 249458) c6( ) c7(T, aC, acl, oe, jh, cjA, j, ci, Ea, ai, aE, aT, h, pi, cp, 1C, cr, akB, BG, iV, f, t, IY, pa, aLw, bE, cj, gZ, y, kS); #c1(NFATC1) c2(NP_765977) c3(nuclear factor of activated T-cells, cytoplasmic 1 isoform E) c4( ) c5(249459) c6( ) c7(T, aC, acl, oe, jh, cjA, j, ci, Ea, ai, aE, aT, h, pi, cp, 1C, cr, akB, BG, iV, f, t, IY, pa, aLw, bE, cj, gZ, y, kS); #c1(NFATC1) c2(NP_765978) c3(nuclear factor of activated T-cells, cytoplasmic 1 isoform A) c4(249460) c5(249461, 249462, 249463, 249464, 249465, 249466) c6( ) c7(T, aC, acl, oe, jh, cjA, j, ci, Ea, ai, aE, aT, h, pi, cp, 1C, cr, akB, BG, iV, f, t, IY, pa, aLw, bE, cj, gZ, y, kS); #c1(NFATC2) c2(NP_001129493) c3(nuclear factor of activated T-cells, cytoplasmic 2 isoform D) c4(51638) c5(51639, 51640, 51641, 51642, 51643, 51644, 51645) c6( ) c7(bL, ID, 1 kh, jh, bB, aj, v, ci, g, aR, J, cd, eA, av, cF, aE, sO, abq, cjB, aT, h, ji, pk, dx, cp, uQ, Iy, Nr, aW, Y, po, BG, iV, Z, LV, f, Ix, Nq, ck, pc, bE, oy, aKC, dW, fD, lC, ra, B); #c1(NFATC2) c2(NP_001245225) c3(nuclear factor of activated T-cells, cytoplasmic 2 isoform F) c4( ) c5(92751, 92752, 92753, 92754, 92755, 92756) c6( ) c7(bL, ID, 1 kh, jh, bB, aj, v, ci, g, aR, J, cd, eA, av, cF, aE, sO, abq, cjB, aT, h, ji, pk, dx, cp, uQ, Iy, Nr, aW, Y, po, BG, iV, Z, LV, f, Ix, Nq, ck, pc, bE, oy, aKC, dW, fD, lC, ra, B); #c1(NFATC2) c2(NP_001245226) c3(nuclear factor of activated T-cells, cytoplasmic 2 isoform G) c4(92757) c5( ) c6( ) c7(bL, ID, 1 kh, jh, bB, aj, v, ci, q, aR, J, cd, eA, av, cF, aE, sO, abq, cjB, aT, h, ji, pk, dx, cp, uQ, Iy, Nr, aW, Y, po, BG, iV, Z, LV, f, Ix, Nq, ck, pc, bE, oy, aKC, dW, fD, lC, ra, B); #c1(NFATC2) c2(NP_036472) c3(nuclear factor of activated T-cells, cytoplasmic 2 isoform B) c4(174095) c5(174096, 174097, 174098, 174099, 174100, 174101, 174102) c6( ) c7(bL, ID, T, kh, jh, bB, aj, v, ci, q, aR, J, cd, eA, av, cF, aE, sO, abq, cjB, aT, h, ji, pk, dx, cp, uQ, Iy, Nr, aW, Y, po, BG, iV, Z, LV, f, Ix, Nq, ck, pc, bE, oy, aKC, dW, fD, lC, ra, B); #c1(NFATC2) c2(NP_775114) c3(nuclear factor of activated T-cells, cytoplasmic 2 isoform C) c4(249632) c5(249633, 249634, 249635, 249636, 249637, 249638) c6( ) c7(bL, ID, T, kh, jh, bB, aj, v, ci, q, aR, J, cd, eA, av, cF, aE, sO, abq, cjB, aT, h, ji, pk, dx, cp, uQ, Iy, Nr, aW, Y, po, BG, iV, Z, LV, f, Ix, Nq, ck, pc, bE, oy, aKC, dW, fD, lC, ra, B); #c1(NFATC3) c2(NP_004546) c3(nuclear factor of activated T-cells, cytoplasmic 3 isoform 2) c4(147477, 147478) c5(147479, 147480, 147481, 147482, 147483, 147484, 147485, 147486, 147487, 147488, 147489, 147490, 147491) c6( ) c7(ck, T, fR, aW, gX, aT, lo, aj, lC, J, ad); #c1(NFATC3) c2(NP_775186) c3(nuclear factor of activated T-cells, cytoplasmic 3 isoform 3) c4(249664) c5(249665, 249666, 249667, 249668, 249669, 249670, 249671, 249672) c6( ) c7(ck, T, fR, aW, gX, aT, lo, aj, lC, J, ad); #c1(NFATC3) c2(NP_775188) c3(nuclear factor of activated T-cells, cytoplasmic 3 isoform 1) c4(249673) c5(249674, 249675, 249676, 249677, 249678, 249679) c6( ) c7(ck, T, fR, aW, gX, aT, lo, aj, lC, J, ad); #c1(NFATC4) c2(NP_001129494) c3(nuclear factor of activated T-cells, cytoplasmic 4 isoform 1) c4(51646, 51647, 51648, 51649, 51650, 51651, 51652) c5(51653, 51654, 51655, 51656, 51657, 51658, 51659, 51660, 51661, 51662, 51663, 51664, 51665, 51666, 51667, 51668, 51669, 51670, 51671, 51672, 51673, 51674, 51675, 51676, 51677, 51678, 51679, 51680, 51681, 51682, 51683, 51684) c6( ) c7(cc, af, aW, sO, abq, mx, aT, aj, v, yO, cd, J); #c1(NFATC4) c2(NP_001185894) c3(nuclear factor of activated T-cells, cytoplasmic 4 isoform 3) c4( ) c5(76680, 76681, 76682, 76683, 76684, 76685, 76686, 76687, 76688, 76689) c6( ) c7(cc, af, aW, sO, abq, mx, aT, aj, v, yO, cd, J); #c1(NFATC4) c2(NP_001185895) c3(nuclear factor of activated T-cells, cytoplasmic 4 isoform 4) c4(76690, 76691, 76692) c5(76693, 76694, 76695, 76696, 76697, 76698, 76699, 76700, 76701, 76702, 76703, 76704) c6( ) c7(cc, af, aW, sO, abq, mx, aT, aj, v, yO, cd, J); #c1(NFATC4) c2(NP_001185896) c3(nuclear factor of activated T-cells, cytoplasmic 4 isoform 5) c4(76705, 76706, 76707, 76708, 76709, 76710, 76711, 76712) c5(76713, 76714, 76715, 76716, 76717, 76718, 76719, 76720, 76721, 76722, 76723, 76724, 76725, 76726, 76727, 76728, 76729, 76730, 76731, 76732, 76733, 76734, 76735, 76736, 76737) c6( ) c7(cc, af, aW, sO, abq, mx, aT, aj, v, yO, cd, J); #c1(NFATC4) c2(NP_001275731) c3(nuclear factor of activated T-cells, cytoplasmic 4 isoform 6) c4(107198) c5(107199, 107200, 107201, 107202, 107203, 107204, 107205, 107206, 107207, 107208, 107209, 107210, 107211, 107212, 107213, 107214, 107215, 107216, 107217, 107218, 107219, 107220, 107221, 107222) c6( ) c7(cc, af, aW, sO, abq, mx, aT, aj, v, yO, cd, J); #c1(NFATC4) c2(NP_004545) c3(nuclear factor of activated T-cells, cytoplasmic 4 isoform 2) c4(147463, 147464, 147465) c5(147466, 147467, 147468, 147469, 147470, 147471, 147472, 147473, 147474, 147475, 147476) c6( ) c7(cc, af, aW, sO, abq, mx, aT, aj, v, yO, cd, J); #c1(NFATC4) c2(XP_011535099) c3(nuclear factor of activated T-cells, cytoplasmic 4 isoform X1) c4(331848) c5(331849, 331850, 331851, 331852, 331853, 331854) c6( ) c7(cc, af, aW, sO, abq, mx, aT, aj, v, yO, cd, J); #c1(NFATC4) c2(XP_011535100) c3(nuclear factor of activated T-cells, cytoplasmic 4 isoform X2) c4( ) c5(331855, 331856, 331857, 331858, 331859, 331860, 331861, 331862, 331863, 331864) c6( ) c7(cc, af, aW, sO, abq, mx, aT, aj, v, yO, cd, J); #c1(NFATC4) c2(XP_011535101) c3(nuclear factor of activated T-cells, cytoplasmic 4 isoform X3) c4(331865) c5(331866, 331867, 331868, 331869, 331870, 331871, 331872, 331873, 331874, 331875, 331876, 331877, 331878, 331879, 331880, 331881, 331882, 331883, 331884, 331885, 331886, 331887, 331888, 331889, 331890, 331891) c6( ) c7(cc, af, aW, sO, abq, mx, aT, aj, v, yO, cd, J); #c1(NFATC2) c2(XP_005268963) c3(transcription factor NF-E2 45 kDa subunit isoform X1) c4(282226, 282227) c5(282228, 282229, 282230, 282231, 282232, 282233, 282234, 282235, 282236, 282237, 282238, 282239, 282240, 282241, 282242, 282243, 282244, 282245, 282246, 282247, 282248, 282249, 282250, 282251, 282252) c6( ) c7(T, dD, ea, qj, eq, C, oT, oW, aT, dz, K, zy, et, aW, kD, pm, age, pc, eM, pq, XO, pC); #c1(NFE2L1) c2(NP_003195) c3(nuclear factor erythroid 2-related factor 1) c4(136179, 136180) c5(136181, 136182, 136183, 136184, 136185, 136186, 136187, 136188, 136189, 136190, 136191, 136192) c6( ) c7(bL, ae, kj, aW, aT, cd, aj, aq, bl, m, K, Ku, cm, fq, B, J, ad); #c1(NFE2L1) c2(XP_005257470) c3(nuclear factor erythroid 2-related factor 1 isoform X3) c4(275138) c5(275139, 275140, 275141, 275142, 275143, 275144, 275145, 275146, 275147, 275148, 275149, 275150) c6( ) c7(bL, ae, kj, aW, aT, cd, aj, aq, bl, m, K, Ku, cm, fq, B, J, ad); #c1(NFE2L1) c2(XP_005257472) c3(nuclear factor erythroid 2-related factor 1 isoform X4) c4(275151) c5( ) c6( ) c7(bL, ae, kj, aW, aT, cd, aj, aq, bl, m, K, Ku, cm, fq, B, J, ad); #c1(NFE2L2) c2(NP_001138884) c3(nuclear factor erythroid 2-related factor 2 isoform 2) c4(58055, 58056) c5(58057, 58058, 58059, 58060, 58061, 58062, 58063, 58064, 58065, 58066, 58067, 58068, 58069, 58070, 58071) c6( ) c7(oO, bM, T, aC, fV, ea, e, al, if, bB, gj, aY, fw, sD, aR, bv, aE, dV, K, aDZ, eL, bc, N, Zm, aa, LC, aW, fc, hI, nY, Qq, aB, g, hJ, cm, fT, eM, nB, Kv, U, cj, Nl, vy, tG, wx, Hb, m, bi, iu, FW, gU, dD, JY, aWG, n, BH, aj, asF, uE, PJ, qN, rP, Hx, ft, cc, bud, cU, IG, h, dL, hB, db, Nr, GZ, fJ, fQ, sm, aq, po, cM, adz, Ye, iO, W, dB, hk, Fi, Qu, hL, at, E, en, cB, B, it, bL, eR, fG, hx, yk, aA, cR, fF, v, j, C, iI, V, q, J, er, eA, Wu, aT, cy, jj, an, ae, af, dl, Lu, s, oV, Y, r, lo, en, cl, t, iK, ck, sk, rR, nM, ac, c, kB, dh, dy, fD, bt, kG, ao, am, qb, aD, ha, dG, eq, ad, hX, fU, ceQ, hd, ib, aPn, av, byL, oz, oW, io, ji, IQ, d, IR, ff, eZ, dq, gE, aF, byM, aot, iR, iV, KM, bz, eK, ig, Nq, LB, D, xZ, bE, aS, cP, IG, tP, kS, X, jr, BA, pC); #c1(NFE2L2) c2(NP_001138885) c3(nuclear factor erythroid 2-related factor 2 isoform 3) c4(58072) c5(58073, 58074, 58075, 58076, 58077, 58078) c6( ) c7(oO, bM, T, aC, fV, ea, e, al, if, bB, gj, aY, fw, sD, aR, bv, aE, dV, K, aDZ, eL, bc, N, Zm, aa, LC, aW, fc, hI, nY, Qq, aB, g, hJ, cm, fT, eM, nB, Kv, U, cj, NL vy, tG, wx, Hb, m, bi, iu, FW, gU, dD, JY, aWG, n, BH, aj, asF, uE, PJ, qN, rP, Hx, ft, cc, bud, cU, IG, h, dL, hB, db, Nr, GZ, fJ, fQ, sm, aq, po, cM, adz, Ye, iO, W, dB, hk, Fi, Qu, hL, at, E, en, cB, B, it, bL, eR, fG, hx, yk, aA, cR, fF, v, j, C, iI, V, q, J, er, eA, Wu, aT, cy, jj, an, ae, af, dl, Lu, s, oV, Y, r, Io, en, cl, t, iK, ck, sk, rR, nM, ac, c, kB, dh, dy, fD, bt, kG, an, am, qb, aD, ha, dG, eq, ad, hX, fU, ceQ, hd, ib, aPn, av, byL, oz, oW, io, ji, IQ, d, IR, ff, eZ, dq, gE, aF, byM, aot, iR, iV, KM, bz, eK, ig, Nq, LB, D, xZ, bE, aS, cP, IG, tP, kS, X, jr, BA, pC); #c1(NFE2L2) c2(NP_006155) c3(nuclear factor erythroid 2-related factor 2 isoform 1) c4(162429, 162430) c5(162431, 162432, 162433, 162434, 162435, 162436, 162437, 162438, 162439, 162440) c6( ) c7(oO, bM, T, aC, fV, ea, e, al, if, bB, gj, aY, fw, sD, aR, bv, aE, dV, K, aDZ, eL, bc, N, Zm, aa, LC, aW, fc, hI, nY, Qq, aB, g, hJ, cm, fT, eM, nB, Kv, U, cj, NL vy, tG, wx, Hb, m, bi, iu, FW, gU, dD, JY, aWG, n, BH, aj, asF, uE, PJ, qN, rP, Hx, ft, cc, bud, cU, IG, h, dL, hB, db, Nr, GZ, fJ, fQ, sm, aq, po, cM, adz, Ye, iU, W, dB, hk, Fi, Qu, hL, at, E, en, cB, B, it, bL, eR, fG, hx, yk, aA, cR, fF, v, j, C, iI, V, q, J, er, eA, Wu, aT, cy, jj, an, ae, af, dl, Lu, s, oV, Y, r, lo, en, cl, t, iK, ck, sk, rR, nM, ac, c, kB, dh, dy, fD, bt, kG, ao, am, qb, aD, ha, dG, eq, ad, hX, fU, ceQ, hd, ib, aPn, av, byL, oz, oW, io, ji, IO, d, IR, ff, eZ, dq, gE, aF, byM, aot, iR, iV, KM, bz, eK, ig, Nq, LB, D, xZ, bE, aS, cP, IG, tP, kS, X, jr, BA, pC); #c1(NFE2L3) c2(NP_004280) c3(nuclear factor erythroid 2-related factor 3) c4(144799, 144800) c5(144801, 144802, 144803, 144804, 144805, 144806, 144807, 144808, 144809, 144810, 144811, 144812, 144813, 144814, 144815) c6( ) c7(dP, k, jh, hf); #c1(NF1A) c2(XP_011539817) c3(nuclear factor 1 A-type isoform X4) c4(338039) c5( ) c6( ) c7(ul, ac, afy, bof, aA, cm, aF, hp, f, fq, af); #c1(NF1B) c2(NP_001177666) c3(nuclear factor 1 B-type isoform 1) c4(72879) c5(72880, 72881, 72882, 72883, 72884, 72885) c6( ) c7(T, cjC, fR, bKc, atC, chc, aA, AO, afb, qK, aT, aHs, rz, af, s, aW, aF, bow, pm, cm, f, kP, W, ac, hj, in); #c1(NF1B) c2(NP_001177667) c3(nuclear factor 1 B-type isoform 2) c4(72886, 72887) c5(72888, 72889, 72890, 72891, 72892, 72893) c6( ) c7(T, cjC, fR, bKc, atC, chc, aA, AD, afb, qK, aT, aHs, rz, af, s, aW, aF, bow, pm, cm, f, kP, W, ac, hj, in); #c1(NF1B) c2(NP_001269716) c3(nuclear factor 1 B-type isoform 4) c4( ) c5(102697, 102698, 102699, 102700, 102701) c6( ) c7(T, cjC, fR, bKc, atC, chc, aA, AD, afb, qK, aT, aHs, rz, af, s, aW, aF, bow, pm, cm, f, kP, W, ac, hj, in); #c1(NF1B) c2(NP_005587) c3(nuclear factor 1 B-type isoform 3) c4(157699) c5(157700, 157701, 157702, 157703, 157704, 157705, 157706, 157707, 157708, 157709, 157710, 157711, 157712, 157713, 157714, 157715, 157716, 157717, 157718) c6( ) c7(T, cjC, fR, bKc, atC, chc, aA, AD, afb, qK, aT, aHs, rz, af, s, aW, aF, bow, pm, cm, f, kP, W, ac, hj, in); #c1(NF1B) c2(XP_005251524) c3(nuclear factor 1 B-type isoform X1) c4(270975) c5(270976, 270977, 270978, 270979, 270980, 270981) c6( ) c7(T, cjC, fR, bKc, atC, chc, aA, AD, afb, qK, aT, aHs, rz, af, s, aW, aF, bow, pm, cm, f, kP, W, ac, hj, in); #c1(NF1B) c2(XP_005251526) c3(nuclear factor 1 B-type isoform X4) c4(270982, 270983) c5(270984, 270985, 270986, 270987, 270988, 270989, 270990) c6( ) c7(T, cjC, fR, bKc, atC, chc, aA, AD, afb, qK, aT, aHs, rz, af, s, aW, aF, bow, pm, cm, f, kP, W, ac, hj, in); #c1(NF1B) c2(XP_005251527) c3(nuclear factor 1 B-type isoform X7) c4(270991) c5(270992, 270993, 270994, 270995, 270996, 270997) c6( ) c7(T, cjC, fR, bKc, atC, chc, aA, AD, afb, qK, aT, aHs, rz, af, s, aW, aF, bow, pm, cm, f, kP, W, ac, hj, in); #c1(NF1B) c2(XP_006716837) c3(nuclear factor 1 B-type isoform X5) c4(290520) c5( ) c6( ) c7(T, cjC, fR, bKc, atC, chc, aA, AD, afb, qK, aT, aHs, rz, af, s, aW, aF, bow, pm, cm, f, kP, W, ac, hj, in); #c1(NF1C) c2(NP_001231931) c3(nuclear factor 1 C-type isoform 1) c4(87737) c5(87738, 87739, 87740, 87741, 87742, 87743, 87744) c6( ) c7(T, kl, cjC, ac, Ke, Ew, aA, cm, aF, f, af, ad); #c1(NF1C) c2(NP_001231934) c3(nuclear factor 1 C-type isoform 4) c4(87745, 87746) c5(87747, 87748, 87749, 87750, 87751, 87752, 87753, 87754, 87755, 87756, 87757, 87758) c6( ) c7(T, kl, cjC, ac, Ke, Ew, aA, cm, aF, f, af, ad); #c1(NF1C) c2(NP_005588) c3(nuclear factor 1 C-type isoform 5) c4(157719) c5(157720, 157721, 157722, 157723, 157724, 157725, 157726, 157727, 157728, 157729, 157730) c6( ) c7(T, kl, cjC, ac, Ke, Ew, aA, cm, aF, f, af, ad); #c1(NF1C) c2(NP_995315) c3(nuclear factor 1 C-type isoform 2) c4(263796) c5(263797, 263798, 263799, 263800, 263801, 263802, 263803, 263804, 263805, 263806) c6( ) c7(T, kl, cjC, ac, Ke, Ew, aA, cm, aF, f, af, ad); #c1(NF1C) c2(XP_005259621) c3(nuclear factor 1 C-type isoform X3) c4(276207) c5( ) c6( ) c7(T, kl, cjC, ac, Ke, Ew, aA, cm, aF, f, af, ad); #c1(NFIL3) c2(NP_001276929) c3(nuclear factor interleukin-3-regulated protein) c4(108636) c5(108637, 108638, 108639, 108640, 108641, 108642, 108643, 108644, 108645, 108646, 108647, 108648) c6( ) c7(T, zw, ac, c, xU, eZ, fe, ji, iV, Z, y); #c1(NFIX) c2(NP_001257972) c3(nuclear factor 1 X-type isoform 1) c4( ) c5(95879) c6( ) c7(ul, cjD, cjF, aPH, bof, aA, cm, aF, bK, f, af, cjE); #c1(NFIX) c2(NP_001257973) c3(nuclear factor 1 X-type isoform 3) c4(95880) c5( ) c6( ) c7(ul, cjD, cjF, aPH, bof, aA, cm, aF, bK, f, af, cjE); #c1(NFIX) c2(NP_002492) c3(nuclear factor 1 X-type isoform 2) c4(129288) c5(129289, 129290, 129291, 129292, 129293, 129294) c6( ) c7(ul, cjD, cjF, aPH, bof, aA, cm, aF, bK, f, af, cjE); #c1(NFIX) c2(XP_005259974) c3(nuclear factor 1 X-type isoform X1) c4(276333) c5(276334, 276335, 276336, 276337, 276338, 276339) c6( ) c7(ul, cjD, cjF, aPH, bof, aA, cm, aF, bK, f, af, cjE); #c1(NFIX) c2(XP_005259975) c3(nuclear factor 1 X-type isoform X3) c4(276340) c5(276341, 276342, 276343, 276344, 276345, 276346) c6( ) c7(ul, cjD, cjF, aPH, bof, aA, cm, aF, bK, f, af, cjE); #c1(NFIX) c2(XP_005259979) c3(nuclear factor 1 X-type isoform X8) c4( ) c5(276347, 276348, 276349, 276350, 276351) c6( ) c7(ul, cjD, cjF, aPH, bof, aA, cm, aF, bK, f, af, cjE); #c1(NFIX) c2(XP_006722823) c3(nuclear factor 1 X-type isoform X6) c4(294892) c5(294893, 294894, 294895, 294896, 294897, 294898) c6( ) c7(ul, cjD, cjF, aPH, bof, aA, cm, aF, bK, f, af, cjE); #c1(NFKB1) c2(NP_001158884) c3(nuclear factor NF-kappa-B p105 subunit isoform 2) c4( ) c5(63748, 63749, 63750, 63751, 63752, 63753, 63754, 63755) c6( ) c7(oO, bM, T, os, aC, fR, pf, ea, bkF, e, abM, al, if, fd, bB, ci, aR, ip, x, bv, AW, wD, xE, dY, aE, anV, pX, dV, rB, K, hu, zy, hH, pk, eL, be, cp, aa, DA, eG, ago, HI, aAg, aW, JI, az, hl, aAu, Ls, fc, NR, g, as, eF, lk, uC, cm, bw, eM, Jr, xD, dc, nB, iA, iT, mx, vy, cj, uo, uJ, k, m, Uw, hh, fy, cjG, gD, atO, iu, dt, dD, aEj, sQ, aiK, aw, yG, ht, NT, n, aj, BE, fr, uE, qN, alq, cd, ai, eW, Vs, baA, ft, jz, pe, zw, kH, cU, Ne, h, hn, dL, ox, Jn, bl, eV, he, vx, wC, baj, Nr, bvO, mR, eZ, MD, Gw, A, gi, lb, ks, agb, aq, aga, kp, po, fe, dw, cM, Zb, Wt, afb, kT, bP, dB, w, aOL, hL, at, uz, ut, bm, fL, Pr, B, it, cn, cjJ, bL, ul, cjH, fM, Dw, eR, lH, jx, eX, rf, aA, cz, ti, fF, v, j, C, il, V, q, J, aZZ, eA, eJ, oT, mP, yw, bjA, Vr, apJ, LW, BJ, aT, qU, cy, bK, jj, an, rz, ae, af, eu, bA, jf, le, qw, cjl, s, iU, oV, Y, xR, Pg, r, lo, tu, en, cl, t, iK, pb, ck, nM, kP, c, ac, agc, ig, hc, MB, dh, iM, gX, dy, EY, JH, fD, UF, aps, bt, ao, Kd, sY, hl, id, aD, rQ, df, iW, jh, al, dG, eq, jE, agz, iJ, mC, ad, kL, hX, Jm, dP, av, hd, F, agd, py, iC, bjc, ds, NS, azq, io, hD, ji, IQ, Dn, cr, WZ, uQ, d, je, bja, Gv, ff, xs, wc, cjK, eH, dN, gl, tv, dq, hp, aeV, aF, iV, iR, KM, bz, DF, eK, Nq, LB, D, es, age, eU, zr, atM, yE, bE, Ny, dO, bEs, sG, aS, aGg, bC, ei, y, kS, X, hv); #c1(NFKB1) c2(NP_003989) c3(nuclear factor NF-kappa-B P105 subunit isoform 1) c4(142673, 142674) c5(142675, 142676, 142677, 142678, 142679, 142680) c6( ) c7(oO, bM, T, os, aC, fR, pf, ea, bkF, e, abM, al, if, fd, bB, ci, aR, ip, x, bv, AW, wD, xE, dY, aE, anV, pX, dV, rB, K, hu, zy, hH, pk, eL, be, cp, aa, DA, eG, ago, HI, aAg, aW, JI, az, hl, aAu, Ls, fc, NR, g, as, eF, lk, uC, cm, bw, eM, Jr, xD, dc, nB, iA, iT, mx, vy, cj, uo, uJ, k, m, Uw, hh, fy, cjG, gD, atO, iu, dt, dD, aEj, sQ, aiK, aw, yG, ht, NT, n, aj, BE, fr, uE, qN, alq, cd, ai, eW, Vs, baA, ft, jz, pe, zw, kH, cU, Ne, h, hn, dL, ox, Jn, bl, eV, he, vx, wC, baj, Nr, bvO, mR, eZ, MD, Gw, A, gi, lb, ks, agb, aq, aga, kp, po, fe, dw, cM, Zb, Wt, afb, kT, bP, dB, w, aOL, hL, at, uz, ut, bm, fL, Pr, B, it, cn, cjJ, bL, ul, cjH, fM, Dw, eR, lH, jx, eX, rf, aA, cz, ti, fF, v, j, C, il, V, q, J, all, eA, eJ, oT, mP, yw, bjA, Vr, apJ, LW, BJ, aT, qU, cy, bK, jj, an, rz, ae, af, eu, bA, jf, le, qw, cjI, s, iU, oV, Y, xR, Pg, r, lo, tu, en, cl, t, iK, pb, ck, nM, kP, c, ac, agc, ig, hc, MB, dh, iM, gX, dy, EY, JH, fD, UF, aps, bt, ao, Kd, sY, hl, id, aD, rQ, df, iW, jh, oZ, dG, eq, jE, agz, iJ, mC, ad, kL, hX, Jm, dP, av, hd, F, agd, py, iC, bjc, ds, NS, azq, io, hD, ji, IQ, Dn, cr, WZ, uQ, d, je, bja, Gv, ff, xs, wc, cjK, eH, dN, gl, tv, dq, hp, aeV, aF, iV, iR, KM, bz, DF, eK, Nq, LB, D, es, age, eU, zr, atM, yE, bE, Ny, dO, bEs, sG, aS, aGg, bC, ei, y, kS, X, hv); #c1(NFKB1) c2(XP_011530308) c3(nuclear factor NF-kappa-B p105 subunit isoform X2) c4(326147, 326148) c5(326149, 326150, 326151, 326152, 326153, 326154, 326155, 326156) c6( ) c7(oO, bM, T, os, aC, fR, pf, ea, bkF, e, abM, al, if, fd, bB, ci, aR, ip, x, bv, AW, wD, xE, dY, aE, anV, pX, dV, rB, K, hu, zy, hH, pk, eL, be, cp, aa, DA, eG, ago, HI, aAg, aW, JI, az, hl, aAu, Ls, fc, NR, g, as, eF, lk, uC, cm, bw, eM, Jr, xD, dc, nB, iA, iT, mx, vy, cj, uo, uJ, k, m, Uw, hh, fy, cjG, gD, atO, iu, dt, dD, aEj, sQ, aiK, aw, yG, ht, NT, n, aj, BE, fr, uE, qN, alq, cd, ai, eW, Vs, baA, ft, jz, pe, zw, kH, cU, Ne, h, hn, dL, ox, Jn, bl, eV, he, vx, wC, baj, Nr, bvO, mR, eZ, MD, Gw, A, gi, lb, ks, agb, aq, aga, kp, po, fe, dw, cM, Zb, Wt, afb, kT, bP, dB, w, aOL, hL, at, uz, ut, bm, fL, Pr, B, it, cn, cjJ, bL, ul, cjH, fM, Dw, eR, lH, jx, eX, rf, aA, cz, ti, fF, v, j, C, il, V, q, J, all, eA, eJ, oT, mP, yw, bjA, Vr, apJ, LW, BJ, aT, qU, cy, bK, jj, an, rz, ae, af, eu, bA, jf, le, qw, cjI, s, iU, oV, Y, xR, Pg, r, lo, tu, en, cl, t, iK, pb, ck, nM, kP, c, ac, agc, ig, hc, MB, dh, iM, gX, dy, EY, JH, fD, UF, aps, bt, ao, Kd, sY, hl, id, aD, rQ, df, iW, jh, oZ, dG, eq, jE, agz, iJ, mC, ad, kL, hX, Jm, dP, av, hd, F, agd, py, iC, bjc, ds, NS, azq, io, hD, ji, IQ, Dn, cr, WZ, uQ, d, je, bja, Gv, ff, xs, wc, cjK, eH, dN, gl, tv, dq, hp, aeV, aF, iV, iR, KM, bz, DF, eK, Nq, LB, D, es, age, eU, zr, atM, yE, bE, Ny, dO, bEs, sG, aS, aGg, bC, ei, y, kS, X, hv); #c1(NFKB1) c2(XP_011530310) c3(nuclear factor NF-kappa-B p105 subunit isoform X3) c4( ) c5(326157, 326158, 326159, 326160, 326161, 326162) c6( ) c7(oO, bM, T, os, aC, fR, pf, ea, bkF, e, abM, al, if, fd, bB, ci, aR, ip, x, bv, AW, wD, xE, dY, aE, anV, pX, dV, rB, K, hu, zy, hH, pk, eL, be, cp, aa, DA, eG, ago, Hl, aAg, aW, JI, az, hl, aAu, Ls, fc, NR, g, as, eF, lk, uC, cm, bw, eM, Jr, xD, dc, nB, iA, iT, mx, vy, cj, uo, uJ, k, m, Uw, hh, fy, cjG, gD, atO, iu, dt, dD, aEj, sQ, aiK, aw, yG, ht, NT, n, aj, BE, fr, uE, qN, alq, cd, ai, eW, Vs, baA, ft, jz, pe, zw, kH, cU, Ne, h, hn, dL, ox, Jn, bl, eV, he, vx, wC, baj, Nr, bvO, mR, eZ, MD, Gw, A, gi, lb, ks, agb, aq, aga, kp, po, fe, dw, cM, Zb, Wt, afb, kT, bP, dB, w, aOL, hL, at, uz, ut, bm, fL, Pr, B, it, cn, cjJ, bL, ul, cjH, fM, Dw, eR, lH, jx, eX, rf, aA, cz, ti, fF, v, j, C, il, V, q, J, all, eA, eJ, oT, mP, yw, bjA, Vr, apJ, LW, BJ, aT, qU, cy, bK, jj, an, rz, ae, af, eu, bA, jf, le, qw, cjI, s, iU, oV, Y, xR, Pg, r, lo, tu, en, cl, t, iK, pb, ck, nM, kP, c, ac, agc, ig, hc, MB, dh, iM, gX, dy, EY, JH, fD, UF, aps, bt, ao, Kd, sY, hl, id, aD, rQ, df, iW, jh, oZ, dG, eq, jE, agz, iJ, mC, ad, kL, hX, Jm, dP, av, hd, F, agd, py, iC, bjc, ds, NS, azq, io, hD, ji, IQ, Dn, cr, WZ, uQ, d, je, bja, Gv, ff, xs, wc, cjK, eH, dN, gl, tv, dq, hp, aeV, aF, iV, iR, KM, bz, DF, eK, Nq, LB, D, es, age, eU, zr, atM, yE, bE, Ny, dO, bEs, sG, aS, aGg, bC, ei, y, kS, X, hv); #c1(NFKB2) c2(NP_002493) c3(nuclear factor NF-kappa-B p100 subunit isoform b) c4(129295) c5(129296, 129297, 129298, 129299, 129300, 129301, 129302, 129303, 129304, 129305) c6( ) c7(bM, T, dD, fM, dA, Dw, sQ, aC, ea, iW, al, jh, aA, bB, fd, eq, ci, qN, fr, alq, eA, ad, x, aE, dV, aT, kH, h, Ds, dz, Ze, IQ, hn, bq, ji, pk, ae, wC, je, MD, bNc, ff, aF, en, Ca, g, t, lk, iK, iV, Wt, ck, iM, bP, iT, bE, cjL, ahC, uo, cj, ut, k, aGg, aps, bt, zA, y); #c1(NFKB2) c2(XP_005269918) c3(nuclear factor NF-kappa-B p100 subunit isoform X1) c4(282996) c5(282997, 282998, 282999, 283000, 283001, 283002, 283003, 283004, 283005, 283006) c6( ) c7(bM, T, dD, fM, dA, Dw, sQ, aC, ea, iW, al, jh, aA, bB, fd, eq, ci, qN, fr, alq, eA, ad, x, aE, dV, aT, kH, h, Ds, dz, Ze, IQ, hn, bq, ji, pk, ae, wC, je, MD, bNc, ff, aF, en, Ca, g, t, lk, iK, iV, Wt, ck, iM, bP, iT, bE, cjL, ahC, uo, cj, ut, k, aGg, aps, bt, zA, y); #c1(NFKBIA) c2(NP_065390) c3(NF-kappa-B inhibitor alpha) c4(204683) c5(204684, 204685, 204686, 204687, 204688, 204689) c6( ) c7(oO, bM, T, aC, fR, if, al, fd, bB, dY, aE, Ds, K, hH, pk, aa, aW, g, eE, eF, eM, U, uo, Dt, k, m, hh, dD, sQ, aw, fN, oY, qN, pM, eW, Oe, cU, jy, h, eV, wb, aDp, A, mR, Cw, zb, fe, aq, Og, CQ, cjM, dB, Qu, at, aEG, ut, fL, it, B, Dw, eX, aA, fF, GC, j, C, q, eA, bjA, bjv, aT, cjN, dz, ae, eu, jf, qw, Y, r, lo, en, t, ac, fD, iW, jh, eq, ad, kL, hX, wD, av, hD, vB, ji, lQ, uQ, d, ff, eH, Of, cr, eZ, aF, iV, bz, bE, z, aS, pK, y, ra, X); #c1(NFKBIB) c2(NP_002494) c3(NF-kappa-B inhibitor beta isoform 1) c4(129306, 129307) c5(129308, 129309, 129310, 129311, 129312, 129313, 129314, 129315, 129316, 129317, 129318, 129319, 129320) c6( ) c7(dD, BN, h, sQ, at, iW, jx, uo, cjN, aEG, ut, hp, m, k, lQ, hy, t, eq, ne, y); #c1(NFKBIB) c2(XP_006723289) c3(NF-kappa-B inhibitor beta isoform X2) c4(295093) c5(295094, 295095, 295096, 295097, 295098, 295099) c6( ) c7(dD, BN, h, sQ, at, iW, jx, uo, cjN, aEG, ut, hp, m, k, lQ, hy, t, eq, ne, y); #c1(NFKBIE) c2(NP_004547) c3(NF-kappa-B inhibitor epsilon) c4(147492, 147493) c5(147494, 147495, 147496, 147497, 147498, 147499, 147500, 147501, 147502, 147503, 147504, 147505, 147506, 147507) c6( ) c7(dD, fR, sQ, aT, uo, cjN, ut, dL, eq, lQ, at, h, fd, y); #c1(NFKBIL1) c2(NP_001138433) c3(NF-kappa-B inhibitor-like protein 1 isoform 2) c4(56688, 56689) c5(56690, 56691, 56692, 56693, 56694, 56695, 56696, 56697, 56698, 56699, 56700, 56701, 56702, 56703, 56704, 56705, 56706, 56707, 56708, 56709, 56710, 56711, 56712, 56713, 56714, 56715, 56716, 56717) c6( ) c7(P, bM, iW, aw, fN, C, V, aue, cc, ds, lC, dV, hD, hH, aiJ, A, ue, eZ, pD, iV, uz, y); #c1(NFKBIL1) c2(NP_001138434) c3(NF-kappa-B inhibitor-like protein 1 isoform 3) c4( ) c5(56718, 56719, 56720, 56721, 56722, 56723, 56724, 56725, 56726, 56727, 56728, 56729, 56730, 56731, 56732, 56733, 56734, 56735, 56736, 56737, 56738, 56739, 56740, 56741, 56742, 56743, 56744, 56745, 56746, 56747, 56748, 56749, 56750, 56751, 56752, 56753, 56754, 56755, 56756, 56757, 56758, 56759, 56760, 56761, 56762, 56763, 56764, 56765, 56766, 56767) c6( ) c7(P, bM, iW, aw, fN, C, V, aue, cc, ds, lC, dV, hD, hH, aiJ, A, ue, eZ, pD, iV, uz, y); #c1(NFKBIL1) c2(NP_004998) c3(NF-kappa-B inhibitor-like protein 1 isoform 1) c4(151856, 151857, 151858, 151859, 151860, 151861) c5(151862, 151863, 151864, 151865, 151866, 151867, 151868, 151869, 151870, 151871, 151872, 151873, 151874, 151875, 151876, 151877, 151878, 151879, 151880, 151881, 151882, 151883, 151884, 151885, 151886, 151887, 151888, 151889, 151890, 151891, 151892, 151893, 151894, 151895, 151896) c6( ) c7(P, bM, iW, aw, fN, C, V, aue, cc, ds, lC, dV, hD, hH, aiJ, A, ue, eZ, pD, iV, uz, y); #c1(NFKBIZ) c2(NP_001005474) c3(NF-kappa-B inhibitor zeta isoform b) c4(21703, 21704, 21705) c5(21706, 21707, 21708, 21709, 21710, 21711, 21712, 21713, 21714, 21715, 21716, 21717, 21718, 21719, 21720, 21721, 21722, 21723, 21724, 21725, 21726) c6( ) c7(xS, Dy, dV, eE, cm, V, sj); #c1(NFKBIZ) c2(NP_113607) c3(NF-kappa-B inhibitor zeta isoform a) c4(221698, 221699, 221700) c5(221701, 221702, 221703, 221704, 221705, 221706, 221707, 221708, 221709, 221710, 221711, 221712, 221713, 221714, 221715, 221716) c6( ) c7(xS, Dy, dV, eE, cm, V, sj); #c1(NFRKB) c2(NP_001137307) c3(nuclear factor related to kappa-B-binding protein isoform 1) c4(55430) c5( ) c6( ) c7(af, fd); #c1(NFRKB) c2(XP_011541151) c3(nuclear factor related to kappa-B-binding protein isoform X3) c4( ) c5(339695, 339696, 339697, 339698, 339699, 339700, 339701, 339702, 339703, 339704, 339705, 339706, 339707) c6( ) c7(af, fd); #c1(NFRKB) c2(XP_011541152) c3(nuclear factor related to kappa-B-binding protein isoform X4) c4( ) c5(339708) c6( ) c7(af, fd); #c1(NFRKB) c2(XP_011541154) c3(nuclear factor related to kappa-B-binding protein isoform X1) c4(339709) c5(339710, 339711, 339712, 339713, 339714, 339715, 339716) c6( ) c7(af, fd); #c1(NFS1) c2(NP_001185918) c3(cysteine desulfurase, mitochondrial isoform b precursor) c4(76757, 76758) c5(76759, 76760, 76761, 76762, 76763, 76764, 76765, 76766, 76767, 76768, 76769, 76770, 76771, 76772, 76773, 76774, 76775) c6( ) c7(cm); #c1(NFS1) c2(NP_066923) c3(cysteine desulfurase, mitochondrial isoform a precursor) c4(207485, 207486, 207487) c5(207488, 207489, 207490, 207491, 207492, 207493, 207494, 207495, 207496, 207497, 207498, 207499, 207500) c6( ) c7(cm); #c1(NFU1) c2(NP_001002755) c3(NFU1 iron-sulfur cluster scaffold homolog, mitochondrial isoform 2) c4(19562, 19563, 19564, 19565, 19566) c5(19567, 19568, 19569, 19570, 19571, 19572, 19573) c6( ) c7(hb, cjO, kC, aNG, yT); #c1(NFU1) c2(NP_001002756) c3(NFU1 iron-sulfur cluster scaffold homolog, mitochondrial isoform 3) c4( ) c5(19574, 19575, 19576, 19577, 19578, 19579, 19580, 19581, 19582, 19583, 19584, 19585, 19586, 19587, 19588, 19589, 19590, 19591) c6( ) c7(hb, cjO, kC, aNG, yT); #c1(NFU1) c2(NP_056515) c3(NFU1 iron-sulfur cluster scaffold homolog, mitochondrial isoform 1) c4( ) c5(187883, 187884, 187885, 187886, 187887, 187888, 187889, 187890, 187891) c6( ) c7(hb, cjO, kC, aNG, yT); #c1(NFYA) c2(NP_002496) c3(nuclear transcription factor Y subunit alpha isoform 1) c4(129321) c5( ) c6( ) c7(av, qh, m, K, qM, g, jj, bz, B, qa, bc); #c1(NFYA) c2(NP_068351) c3(nuclear transcription factor Y subunit alpha isoform 2) c4(209304) c5(209305, 209306, 209307, 209308, 209309, 209310, 209311, 209312, 209313, 209314, 209315, 209316, 209317) c6( ) c7(av, qh, m, K, qM, g, jj, bz, B, qa, bc); #c1(NFYB) c2(NP_006157) c3(nuclear transcription factor Y subunit beta) c4(162441) c5(162442, 162443, 162444, 162445, 162446, 162447, 162448, 162449, 162450, 162451, 162452) c6( ) c7(cm, bt, bz, qa); #c1(NFYC) c2(XP_011539819) c3(nuclear transcription factor Y subunit gamma isoform X5) c4(338040) c5( ) c6( ) c7(Qu, es, sZ, fr); #c1(NGB) c2(NP_067080) c3(neuroglobin) c4(208945) c5(208946, 208947, 208948, 208949, 208950, 208951) c6( ) c7(T, dD, d, ac, eM, dB, wO, ff, aAm, cy, eq, K, en, g, eK, cm, bz, af, eu, aeb); #c1(NGDN) c2(NP_001036100) c3(neuroguidin isoform 1) c4(33983) c5( ) c6( ) c7(beR, r, q, ae, X, ad); #c1(NGDN) c2(NP_056329) c3(neuroguidin isoform 2) c4(187115) c5(187116, 187117, 187118, 187119, 187120, 187121, 187122, 187123, 187124, 187125, 187126, 187127) c6( ) c7(beR, r, q, ae, X, ad); #c1(NGEF) c2(NP_001107562) c3(ephexin-1 isoform 2) c4(42843, 42844, 42845) c5(42846, 42847, 42848, 42849, 42850, 42851, 42852, 42853, 42854, 42855, 42856, 42857) c6( ) c7(v); #c1(NGEF) c2(XP_011509225) c3(ephexin-1 isoform X1) c4(299871, 299872) c5(299873, 299874, 299875, 299876, 299877, 299878, 299879, 299880, 299881, 299882, 299883, 299884) c6( ) c7(v); #c1(NGEF) c2(XP_011509227) c3(ephexin-1 isoform X2) c4( ) c5(299885, 299886, 299887, 299888, 299889, 299890) c6( ) c7(v); #c1(NGF) c2(XP_011539820) c3(beta-nerve growth factor isoform X2) c4(338041) c5(338042) c6( ) c7(bM, bB, aR, Ds, HR, H, hH, cjQ, aW, as, eE, cm, yX, wE, U, cZ, fN, aj, ct, ai, RD, biS, jz, cc, aqJ, dd, he, ES, sp, dw, cjP, hq, cA, dB, bOj, JM, jd, cB, B, L, Dw, eR, Lx, cz, j, bX, sI, V, q, J, uT, qK, aqI, HC, aT, aaw, UN, bq, an, ae, af, jf, ak, kl, Y, abi, r, cu, en, nC, bN, ck, bdn, ac, lI, hc, cjR, JH, EY, gT, Pt, aFa, jh, fu, ad, wD, cjg, fU, uD, na, ff, cr, eZ, dr, Ew, xZ, bE, dJ, Ug); #c1(NGFR) c2(NP_002498) c3(tumor necrosis factor receptor superfamily member 16 precursor) c4(129322, 129323) c5(129324, 129325, 129326, 129327, 129328, 129329, 129330, 129331, 129332, 129333, 129334, 129335, 129336, 129337) c6( ) c7(bM, aBD, os, cZ, T, dA, ya, Dw, aC, Pt, IT, bO, aBx, aA, cz, oZ, bS, Fb, ct, ci, fu, bX, hF, aOM, cd, ad, eA, eW, x, aE, uT, h, tT, HC, aT, ab, cy, Ds, dL, hP, K, Ou, bq, dd, rz, jj, ae, af, WZ, jf, kl, aW, Cu, Y, oV, apn, ff, aJW, aF, en, dw, eE, cm, dr, bN, ck, Hw, QG, nM, Ew, aBH, U, cj, dy, m, EY, it, B, ao, hS); #c1(NGFRAP1) c2(NP_001269603) c3(protein BEX3 isoform c) c4(102170, 102171) c5(102172, 102173, 102174, 102175) c6( ) c7(hI); #c1(NGFRAP1) c2(NP_055195) c3(protein BEX3 isoform b) c4( ) c5(179700, 179701, 179702, 179703, 179704, 179705, 179706, 179707, 179708, 179709, 179710) c6( ) c7(hI); #c1(NGFRAP1) c2(NP_996800) c3(protein BEX3 isoform a) c4( ) c5(264567, 264568, 264569, 264570, 264571, 264572, 264573, 264574, 264575) c6( ) c7(hI); #c1(NGLY1) c2(NP_001138765) c3(peptide-N(4)-(N-acetyl-beta-glucosaminyl)asparagine amidase isoform 2) c4(57601, 57602, 57603) c5(57604, 57605, 57606, 57607, 57608, 57609, 57610, 57611, 57612, 57613, 57614, 57615) c6( ) c7(cjS); #c1(NGLY1) c2(NP_001138766) c3(peptide-N(4)-(N-acetyl-beta-glucosaminyl)asparagine amidase isoform 3) c4( ) c5(57616, 57617, 57618, 57619, 57620) c6( ) c7(cjS); #c1(NGLY1) c2(NP_001138767) c3(peptide-N(4)-(N-acetyl-beta-glucosaminyl)asparagine amidase isoform 4) c4(57621) c5(57622, 57623, 57624, 57625, 57626, 57627) c6( ) c7(cjS); #c1(NGLY1) c2(NP_060767) c3(peptide-N(4)-(N-acetyl-beta- glucosaminyl)asparagine amidase isoform 1) c4(197689, 197690) c5(197691, 197692, 197693, 197694, 197695, 197696, 197697) c6( ) c7(cjS); #c1(NGLY1) c2(XP_005265373) c3(peptide-N(4)-(N-acetyl-beta-glucosaminyl)asparagine amidase isoform X1) c4(279472) c5( ) c6( ) c7(cjS); #c1(NGLY1) c2(XP_011532246) c3(peptide-N(4)-(N-acetyl-beta-glucosaminyl)asparagine amidase isoform X2) c4( ) c5(328296, 328297) c6( ) c7(cjS); #c1(NGLY1) c2(XP_011532247) c3(peptide-N(4)-(N-acetyl-beta-glucosaminyl)asparagine amidase isoform X4) c4( ) c5(328298, 328299, 328300, 328301, 328302, 328303, 328304, 328305, 328306, 328307) c6( ) c7(cjS); #c1(NHEJ1) c2(NP_079058) c3(non-homologous end-joining factor 1) c4(216802, 216803, 216804) c5(216805, 216806, 216807, 216808, 216809, 216810, 216811, 216812, 216813, 216814, 216815, 216816, 216817, 216818, 216819, 216820, 216821, 216822) c6( ) c7(WL, bZr, K, bC, QK, V); #c1(NHLH1) c2(NP_005589) c3(helix-loop-helix protein 1) c4(157731) c5(157732, 157733, 157734, 157735, 157736, 157737, 157738) c6( ) c7(Na, T, Qy, Gc, atf, An, g, cm, asX); #c1(NHLRC1) c2(NP_940988) c3(E3 ubiquitin-protein ligase NHLRC1) c4(260267) c5(260268, 260269, 260270, 260271, 260272, 260273) c6( ) c7(yr, ha, cjT, U, jh, yT, yZ, yX, K, yA, yU, xg, xt); #c1(NHLRC3) c2(NP_001012772) c3(NHL repeat-containing protein 3 isoform a precursor) c4(25324) c5(25325, 25326, 25327, 25328, 25329, 25330, 25331, 25332) c6(25333, 25334) c7(Ea); #c1(NHLRC3) c2(NP_001017370) c3(NHL repeat-containing protein 3 isoform b) c4(26346, 26347) c5(26348, 26349, 26350, 26351, 26352, 26353, 26354, 26355, 26356, 26357, 26358, 26359, 26360, 26361, 26362, 26363) c6(26364, 26365, 26366, 26367) c7(Ea); #c1(NHP2) c2(NP_001030005) c3(H/ACA ribonucleoprotein complex subunit 2 isoform b) c4(30817) c5(30818, 30819, 30820, 30821, 30822) c6( ) c7(sb, av, cjW, cjU, cjV); #c1(NHP2) c2(NP_060308) c3(H/ACA ribonucleoprotein complex subunit 2 isoform a) c4(195301) c5(195302, 195303, 195304, 195305, 195306, 195307, 195308) c6( ) c7(sb, av, CjW, CjU, CjV); #c1(NHP2L1) c2(NP_004999) c3(NHP2-like protein 1) c4(151897, 151898) c5(151899, 151900, 151901, 151902, 151903, 151904, 151905, 151906, 151907, 151908, 151909, 151910, 151911, 151912, 151913, 151914, 151915, 151916, 151917, 151918) c6( ) c7(oZ, os); #c1(NHS) c2(NP_001129496) c3(Nance-Horan syndrome protein isoform 2) c4(51685, 51686) c5(51687, 51688, 51689, 51690, 51691, 51692, 51693, 51694, 51695, 51696, 51697, 51698) c6( ) c7(aPV, eW, T, ec, aW, aZ, e, dV, aT, bD, ao, h, j, C, Ku, cjX, alV, q, Gc); #c1(NHS) c2(NP_001278796) c3(Nance-Horan syndrome protein isoform 3) c4( ) c5(110131) c6( ) c7(apV, eW, T, ec, aW, aZ, e, dV, aT, bD, ao, h, j, C, Ku, cjX, alV, q, Gc); #c1(NHS) c2(NP_938011) c3(Nance-Horan syndrome protein isoform 1) c4(259505) c5(259506, 259507, 259508, 259509, 259510, 259511) c6( ) c7(aPV, eW, T, ec, aW, aZ, e, dV, aT, bD, ao, h, j, C, Ku, cjX, alV, q, Gc); #c1(NHSL1) c2(NP_001137532) c3(NHS-like protein 1 isoform 2) c4(56000) c5(56001, 56002, 56003, 56004, 56005, 56006) c6( ) c7(alV, af); #c1(NHSL1) c2(NP_065197) c3(NHS-like protein 1 isoform 1) c4(204554) c5(204555, 204556, 204557, 204558, 204559, 204560) c6( ) c7(alV, af); #c1(NICN1) c2(NP_115692) c3(nicolin-1) c4(223578, 223579) c5(223580, 223581, 223582, 223583, 223584, 223585, 223586, 223587, 223588, 223589, 223590, 223591, 223592, 223593, 223594, 223595) c6( ) c7(dL); #c1(NID1) c2(NP_002499) c3(nidogen-1 precursor) c4(129338) c5(129339, 129340, 129341, 129342, 129343, 129344, 129345, 129346) c6(129347, 129348) c7(T, bE, aW, Y, Nn, gX, aT, aA, bB, vy, ey, XT); #c1(NID1) c2(XP_011542497) c3(nidogen-1 isoform X1) c4(341040) c5(341041, 341042, 341043, 341044, 341045, 341046, 341047, 341048) c6(341049, 341050) c7(T, bE, aW, Y, Nn, gX, aT, aA, bB, vy, ey, XT); #c1(NID2) c2(NP_031387) c3(nidogen-2 precursor) c4(172152, 172153, 172154) c5(172155, 172156, 172157, 172158, 172159, 172160, 172161, 172162, 172163, 172164, 172165, 172166, 172167, 172168, 172169, 172170, 172171, 172172) c6( ) c7(T, aW, hI, gX, aT, aA, dL, j, eL, B); #c1(NID2) c2(XP_005267464) c3(nidogen-2 isoform X3) c4(280983) c5(280984, 280985, 280986, 280987, 280988, 280989) c6( ) c7(T, aW, hI, gX, aT, aA, dL, j, eL, B); #c1(NIF3L1) c2(NP_001129511) c3(putative GTP cyclohydrolase 1 type 2 NIF3L1 isoform 1) c4(51793, 51794, 51795, 51796, 51797) c5(51798, 51799, 51800, 51801, 51802, 51803, 51804, 51805, 51806, 51807, 51808, 51809, 51810, 51811, 51812) c6( ) c7(dD, yf, aji, J, ea, mx, cR, aU, uJ, aj, eq, Wm, cm, aWT, ai, bAI, xw); #c1(NIF3L1) c2(NP_001135827) c3(putative GTP cyclohydrolase 1 type 2 NIF3L1 isoform 2) c4(53377) c5(53378, 53379, 53380, 53381, 53382) c6( ) c7(dD, yf, aji, J, ea, mx, cR, aU, uJ, aj, eq, Wm, cm, aWT, ai, bAI, xw); #c1(NIF3L1) c2(NP_001135828) c3(putative GTP cyclohydrolase 1 type 2 NIF3L1 isoform 3) c4(53383) c5(53384, 53385, 53386, 53387, 53388, 53389, 53390, 53391, 53392, 53393, 53394, 53395, 53396, 53397, 53398, 53399, 53400, 53401, 53402, 53403, 53404, 53405, 53406, 53407, 53408, 53409, 53410, 53411, 53412, 53413) c6( ) c7(dD, yf, aji, J, ea, mx, cR, aU, uJ, aj, eq, Wm, cm, aWT, ai, bAI, xw); #c1(NIM1K) c2(XP_006714513) c3(serine/threonine-protein kinase NIM1 isoform X1) c4(287881) c5(287882, 287883, 287884, 287885, 287886, 287887, 287888, 287889, 287890, 287891) c6( ) c7(Qq, hd, azh); #c1(NIN) c2(NP_057434) c3(ninein isoform 6) c4(190773) c5(190774, 190775, 190776, 190777, 190778, 190779) c6( ) c7(bVW, aE, et, dB, aW, aT, dz, cjY, Ea, QK, avx); #c1(NIN) c2(NP_065972) c3(ninein isoform 2) c4(206537, 206538) c5(206539, 206540, 206541, 206542, 206543, 206544, 206545, 206546, 206547, 206548, 206549, 206550, 206551, 206552, 206553, 206554, 206555, 206556) c6( ) c7(bVW, aE, et, dB, aW, aT, dz, cjY, Ea, QK, avx); #c1(NIN) c2(NP_891989) c3(ninein isoform 1) c4(257416) c5(257417, 257418, 257419, 257420, 257421, 257422) c6( ) c7(bVW, aE, et, dB, aW, aT, dz, cjY, Ea, QK, avx); #c1(NIN) c2(NP_891991) c3(ninein isoform 5) c4(257423) c5(257424, 257425, 257426, 257427, 257428, 257429) c6( ) c7(bVW, aE, et, dB, aW, aT, dz, cjY, Ea, QK, avx); #c1(NIN) c2(XP_005267792) c3(ninein isoform X8) c4(281246) c5( ) c6( ) c7(bVW, aE, et, dB, aW, aT, dz, cjY, Ea, QK, avx); #c1(NIN) c2(XP_006720223) c3(ninein isoform X5) c4(293322) c5(293323, 293324, 293325, 293326, 293327, 293328) c6( ) c7(bVW, aE, et, dB, aW, aT, dz, cjY, Ea, QK, avx); #c1(NIN) c2(XP_011535125) c3(ninein isoform X9) c4(331950) c5(331951, 331952, 331953, 331954, 331955, 331956) c6( ) c7(bVW, aE, et, dB, aW, aT, dz, cjY, Ea, QK, avx); #c1(NIN) c2(XP_011535126) c3(ninein isoform X10) c4(331957) c5(331958, 331959, 331960, 331961, 331962, 331963) c6( ) c7(bVW, aE, et, dB, aW, aT, dz, cjY, Ea, QK, avx); #c1(NINJ1) c2(NP_004139) c3(ninjurin-1) c4(143850) c5(143851, 143852, 143853, 143854, 143855, 143856) c6( ) c7(at, AW, dL, xU, fJ); #c1(NINJ2) c2(NP_001281274) c3(ninjurin-2 isoform 2) c4( ) c5(111676) c6( ) c7(uJ, eu, ac, M); #c1(NINJ2) c2(NP_001281275) c3(ninjurin-2 isoform 3) c4(111677) c5(111678, 111679, 111680, 111681, 111682) c6( ) c7(uJ, eu, ac, M); #c1(NINJ2) c2(NP_057617) c3(ninjurin-2 isoform 1) c4(191804) c5(191805, 191806, 191807, 191808, 191809, 191810) c6( ) c7(uJ, eu, ac, M); #c1(NINL) c2(NP_079452) c3(ninein-like protein) c4(218165) c5(218166, 218167, 218168, 218169, 218170, 218171) c6( ) c7(T, aW, eX, jh, aT, eV, amY, bz); #c1(NIPA1) c2(NP_001135747) c3(magnesium transporter NIPA1 isoform 2) c4( ) c5(53012, 53013, 53014, 53015, 53016, 53017, 53018, 53019, 53020, 53021, 53022, 53023, 53024, 53025) c6( ) c7(cjZ, aiZ, Cq, no, c, aV, Ol, ha, alR, U, ajb, agl, K, he, rc, Qn, bN); #c1(NIPA1) c2(NP_653200) c3(magnesium transporter NIPA1 isoform 1) c4(239032, 239033, 239034) c5(239035, 239036, 239037, 239038, 239039, 239040, 239041, 239042) c6( ) c7(cjZ, aiZ, Eq, no, c, aV, Ol, ha, alR, U, ajb, agl, K, he, rc, Qn, bN); #c1(NIPA2) c2(NP_001008892) c3(magnesium transporter NIPA2 isoform a) c4(23450, 23451) c5(23452, 23453, 23454, 23455, 23456, 23457, 23458, 23459, 23460, 23461, 23462, 23463, 23464, 23465, 23466, 23467, 23468, 23469, 23470, 23471) c6( ) c7(HN, cM, rc, ad); #c1(NIPA2) c2(NP_001171817) c3(magnesium transporter NIPA2 isoform b) c4(71832) c5(71833, 71834, 71835, 71836, 71837, 71838, 71839, 71840, 71841, 71842) c6( ) c7(HN, cM, rc, ad); #c1(NIPAL3) c2(XP_011540110) c3(NIPA-like protein 3 isoform X3) c4( ) c5(338453, 338454, 338455, 338456, 338457, 338458, 338459, 338460, 338461, 338462, 338463) c6(338464, 338465) c7(ad); #c1(NIPAL4) c2(NP_001092757) c3(magnesium transporter NIPA4 isoform 1) c4(39614) c5(39615, 39616, 39617, 39618, 39619, 39620) c6( ) c7(fn, cd, cka); #c1(NIPAL4) c2(NP_001165763) c3(magnesium transporter NIPA4 isoform 2) c4(67885) c5(67886, 67887, 67888, 67889, 67890, 67891) c6( ) c7(fn, cd, cka); #c1(NIPBL) c2(NP_056199) c3(nipped-B-like protein isoform B) c4(186285) c5( ) c6( ) c7(bei, ff, Az, aNL, wR, en, zW, bD, ckb, X); #c1(NIPBL) c2(NP_597677) c3(nipped-B-like protein isoform A) c4(234976) c5(234977, 234978, 234979, 234980, 234981, 234982) c6( ) c7(bei, ff, Az, aNL, wR, en, zW, bD, ckb, X); #c1(NIPBL) c2(XP_005248337) c3(nipped-B-like protein isoform X3) c4( ) c5(268318, 268319, 268320, 268321, 268322, 268323) c6( ) c7(bei, ff, Az, aNL, wR, en, zW, bD, ckb, X); #c1(NIPSNAP1) c2(NP_003625) c3(protein NipSnap homolog 1 isoform 1) c4(139702) c5(139703, 139704, 139705, 139706, 139707, 139708) c6( ) c7(bQC); #c1(NIPSNAP3B) c2(NP_060846) c3(protein NipSnap homolog 3B) c4(198110) c5(198111, 198112, 198113, 198114, 198115, 198116) c6( ) c7(cK, cJ); #c1(NISCH) c2(NP_001263222) c3(nischarin isoform 2) c4(97066) c5(97067, 97068, 97069, 97070, 97071, 97072) c6( ) c7(bL, dD, aW, ea, e, aT, cz, v, eq, cd); #c1(NISCH) c2(NP_009115) c3(nischarin isoform 1) c4(170798, 170799) c5(170800, 170801, 170802, 170803, 170804, 170805, 170806, 170807, 170808, 170809) c6( ) c7(bL, dD, aW, ea, e, aT, cz, v, eq, cd); #c1(NISCH) c2(XP_006713018) c3(nischarin isoform X4) c4( ) c5(286962, 286963, 286964, 286965, 286966, 286967, 286968, 286969, 286970, 286971, 286972, 286973) c6( ) c7(bL, dD, aW, ea, e, aT, cz, v, eq, cd); #c1(NISCH) c2(XP_011531619) c3(nischarin isoform X1) c4(327766) c5( ) c6( ) c7(bL, dD, aW, ea, e, aT, cz, v, eq, cd); #c1(NIT1) c2(NP_001172021) c3(nitrilase homolog 1 isoform 2) c4(72257) c5(72258, 72259, 72260, 72261, 72262, 72263) c6( ) c7(jy, T, mj, K); #c1(NIT1) c2(NP_001172022) c3(nitrilase homolog 1 isoform 3) c4(72264, 72265) c5(72266, 72267, 72268, 72269, 72270, 72271) c6( ) c7(jy, T, mj, K); #c1(NIT1) c2(NP_001172023) c3(nitrilase homolog 1 isoform 4) c4( ) c5(72272, 72273, 72274, 72275, 72276) c6( ) c7(jy, T, mj, K); #c1(NIT1) c2(NP_005591) c3(nitrilase homolog 1 isoform 1) c4( ) c5(157739, 157740, 157741, 157742, 157743) c6( ) c7(jy, T, mj, K); #c1(NIT1) c2(XP_005245271) c3(nitrilase homolog 1 isoform X3) c4(266378) c5(266379) c6( ) c7(jy, T, mj, K); #c1(NIT1) c2(XP_005245272) c3(nitrilase homolog 1 isoform X2) c4( ) c5(266380) c6( ) c7(jy, T, mj, K); #c1(NIT2) c2(NP_064587) c3(omega-amidase NIT2) c4(203127, 203128) c5(203129, 203130, 203131, 203132, 203133, 203134, 203135, 203136, 203137, 203138, 203139, 203140) c6( ) c7(T); #c1(NKAIN2) c2(NP_001035304) c3(sodium/potassium-transporting ATPase subunit beta-1-interacting protein 2 isoform 1) c4(32758, 32759, 32760) c5(32761, 32762, 32763, 32764, 32765, 32766, 32767, 32768, 32769, 32770, 32771, 32772) c6( ) c7(ck, agJ, pH, ac, PN, Cw, cm, fg, cd, Hr); #c1(NKAIN2) c2(NP_001287666) c3(sodium/potassium-transporting ATPase subunit beta-1-interacting protein 2 isoform 3) c4(112492) c5(112493, 112494, 112495, 112496, 112497, 112498) c6( ) c7(ck, agJ, pH, ac, pN, Cw, cm, fq, cd, Hr); #c1(NKAIN2) c2(NP_699186) c3(sodium/potassium-transporting ATPase subunit beta-1-interacting protein 2 isoform 2) c4(245821) c5(245822, 245823, 245824, 245825, 245826, 245827) c6( ) c7(ck, agJ, pH, ac, pN, Cw, cm, fq, cd, Hr); #c1(NKAIN2) c2(XP_005266891) c3(sodium/potassium-transporting ATPase subunit beta-1-interacting protein 2 isoform X3) c4( ) c5(280370, 280371, 280372, 280373, 280374, 280375) c6( ) c7(ck, agJ, pH, ac, pN, Cw, cm, fq, cd, Hr); #c1(NKAIN3) c2(NP_001291462) c3(sodium/potassium-transporting ATPase subunit beta-1-interacting protein 3 precursor) c4(116115, 116116) c5( ) c6( ) c7(cm, ac); #c1(NKAIN3) c2(XP_011515813) c3(sodium/potassium-transporting ATPase subunit beta-1-interacting protein 3 isoform X1) c4( ) c5(308610, 308611, 308612, 308613, 308614, 308615, 308616, 308617, 308618, 308619, 308620, 308621, 308622, 308623, 308624, 308625) c6( ) c7(cm, ac); #c1(NKAP) c2(NP_078804) c3(NF-kappa-B-activating protein) c4(215552) c5(215553, 215554, 215555, 215556, 215557, 215558, 215559) c6( ) c7(y); #c1(NKD1) c2(NP_149110) c3(protein naked cuticle homolog 1) c4(227203) c5(227204, 227205, 227206, 227207, 227208, 227209) c6( ) c7(iO, T, s, eM, aX, r, Io, m, t, bz, q); #c1(NKD2) c2(NP_001258011) c3(protein naked cuticle homolog 2 isoform 2) c4(95894) c5(95895, 95896, 95897, 95898, 95899, 95900, 95901, 95902, 95903, 95904) c6( ) c7(hP, aF, d, aA); #c1(NKD2) c2(NP_149111) c3(protein naked cuticle homolog 2 isoform 1) c4(227210) c5(227211, 227212, 227213, 227214, 227215, 227216, 227217) c6( ) c7(hP, aF, d, aA); #c1(NKG7) c2(NP_005592) c3(protein NKG7) c4(157744) c5(157745, 157746, 157747, 157748, 157749, 157750) c6( ) c7(bt, eU, iU); #c1(NKIRAS1) c2(NP_065078) c3(NF-kappa-B inhibitor-interacting Ras-like protein 1) c4(203698) c5(203699, 203700, 203701, 203702, 203703, 203704, 203705, 203706, 203707, 203708, 203709, 203710, 203711, 203712, 203713, 203714, 203715, 203716, 203717, 203718, 203719, 203720) c6( ) c7(es, fr, y); #c1(NKIRAS2) c2(NP_001138400) c3(NF-kappa-B inhibitor-interacting Ras-like protein 2 isoform b) c4(56554) c5(56555, 56556, 56557, 56558, 56559, 56560) c6( ) c7(y, d); #c1(NKIRAS2) c2(NP_001138401) c3(NF-kappa-B inhibitor-interacting Ras-like protein 2 isoform c) c4(56561) c5(56562, 56563, 56564, 56565, 56566, 56567, 56568, 56569) c6( ) c7(y, d); #c1(NKIRAS2) c2(NP_060065) c3(NF-kappa-B inhibitor-interacting Ras-like protein 2 isoform a) c4(193983, 193984, 193985) c5(193986, 193987, 193988, 193989, 193990, 193991, 193992, 193993, 193994, 193995, 193996, 193997, 193998, 193999, 194000, 194001, 194002, 194003, 194004, 194005, 194006, 194007, 194008, 194009, 194010, 194011, 194012, 194013, 194014, 194015, 194016, 194017, 194018, 194019) c6( ) c7(y, d); #c1(NKIRAS2) c2(XP_011522982) c3(NF-kappa-B inhibitor-interacting Ras-like protein 2 isoform X2) c4( ) c5(317449) c6( ) c7(y, d); #c1(NKRF) c2(NP_001166958) c3(NF-kappa-B-repressing factor isoform 1) c4(68733) c5(68734, 68735, 68736, 68737, 68738, 68739, 68740, 68741, 68742) c6( ) c7(bL, X, aE, c); #c1(NKRF) c2(XP_011529667) c3(NF-kappa-B-repressing factor isoform X1) c4(325305) c5(325306, 325307, 325308, 325309, 325310, 325311, 325312, 325313) c6( ) c7(bL, X, aE, c); #c1(NKTR) c2(NP_005376) c3(NK-tumor recognition protein) c4(155558, 155559) c5(155560, 155561, 155562, 155563, 155564, 155565, 155566) c6( ) c7(h); #c1(NKTR) c2(XP_006713234) c3(NK-tumor recognition protein isoform X2) c4( ) c5(287059, 287060, 287061, 287062, 287063, 287064) c6( ) c7(h); #c1(NKTR) c2(XP_011532052) c3(NK-tumor recognition protein isoform X4) c4( ) c5(328109, 328110) c6( ) c7(h); #c1(NKX1-1) c2(NP_001277008) c3(NK1 transcription factor-related protein 1) c4(108976) c5(108977, 108978, 108979, 108980, 108981, 108982, 108983) c6( ) c7(Ng, no, lu); #c1(NKX1-2) c2(NP_001139812) c3(NK1 transcription factor-related protein 2) c4(59997, 59998) c5(59999, 60000, 60001, 60002, 60003, 60004, 60005, 60006, 60007, 60008, 60009, 60010) c6( ) c7(aHP, aHQ); #c1(NKX2-1) c2(NP_001073136) c3(homeobox protein Nkx-2.1 isoform 1) c4(35592, 35593) c5(35594, 35595, 35596, 35597, 35598, 35599, 35600, 35601, 35602, 35603, 35604, 35605, 35606, 35607) c6( ) c7(Fv, bM, T, ahf, dA, apr, zX, v, ci, fw, eW, er, Vp, fE, ft, hd, av, Db, nv, iI, tT, bW, RN, ayQ, aT, aU, hD, bpf, h, Fx, ckf, biQ, aa, kl, s, aus, ckc, Wi, Y, aW, NE, AQ, afe, ff, kt, ahl, ckd, en, cl, t, xw, bz, g, dr, rR, yf, ac, eM, nB, nM, Qy, wk, cke, nG, hL, at, m, fD, zI, gT, iu); #c1(NKX2-1) c2(NP_003308) c3(homeobox protein Nkx-2.1 isoform 2) c4(137337) c5(137338, 137339, 137340, 137341, 137342, 137343, 137344, 137345, 137346, 137347, 137348, 137349, 137350) c6( ) c7(Fv, bM, T, ahf, dA, apr, zX, v, ci, fw, eW, er, Vp, fE, ft, hd, av, Db, nv, iI, tT, bW, RN, ayQ, aT, aU, hD, bpf, h, Fx, ckf, biQ, aa, kl, s, aus, ckc, Wi, Y, aW, NE, AQ, afe, ff, kt, ahl, ckd, en, cl, t, xw, bz, g, dr, rR, yf, ac, eM, nB, nM, Qy, wk, cke, nG, hL, at, m, fD, zI, gT, iu); #c1(NKX2-2) c2(NP_002500) c3(homeobox protein Nkx-2.2) c4(129349) c5(129350, 129351, 129352, 129353, 129354, 129355) c6( ) c7(bL, T, ft, d, mh, Y, PX, as, mF, cm, Fc, eA, dx); #c1(NKX2-3) c2(NP_660328) c3(homeobox protein Nkx-2.3) c4(240941) c5(240942, 240943, 240944, 240945, 240946, 240947, 240948) c6( ) c7(xN, T, nG, r, aMA, fe, iV, ra, q); #c1(NKX2-5) c2(NP_001159647) c3(homeobox protein Nkx-2.5 isoform 2) c4( ) c5(64544, 64545, 64546, 64547, 64548) c6( ) c7(ckh, ahf, ckk, ckl, mr, atk, wL, ckm, fG, acl, aLn, ckj, j, MC, bzq, ckn, cd, ad, md, Mg, cc, RN, acA, aT, hD, atw, adm, rz, chN, ae, cko, aW, eZ, Vt, ckg, si, aac, atb, dR, amF, acw, gY, gZ, cki, k, Km, aS, bD, y, KY, vQ); #c1(NKX2-5) c2(NP_001159648) c3(homeobox protein Nkx-2.5 isoform 3) c4(64549) c5(64550, 64551, 64552, 64553, 64554, 64555) c6( ) c7(ckh, ahf, ckk, ckl, mr, atk, wL, ckm, fG, acl, aLn, ckj, j, MC, bzq, ckn, cd, ad, md, Mg, cc, RN, acA, aT, hD, atw, adm, rz, chN, ae, cko, aW, eZ, Vt, ckg, si, aac, atb, dR, amF, acw, gY, gZ, cki, k, Km, aS, bD, y, KY, vQ); #c1(NKX2-5) c2(NP_004378) c3(homeobox protein Nkx-2.5 isoform 1) c4(145930, 145931) c5(145932, 145933, 145934, 145935, 145936, 145937, 145938, 145939, 145940, 145941) c6( ) c7(ckh, ahf, ckk, ckl, mr, atk, wL, ckm, fG, acl, aLn, ckj, j, MC, bzq, ckn, cd, ad, md, Mg, cc, RN, acA, aT, hD, atw, adm, rz, chN, ae, cko, aW, eZ, Vt, ckg, si, aac, atb, dR, amF, acw, gY, gZ, cki, k, Km, aS, bD, y, KY, vQ); #c1(NKX2-6) c2(NP_001129743) c3(homeobox protein Nkx-2.6) c4(52307, 52308) c5(52309, 52310, 52311, 52312, 52313, 52314, 52315, 52316, 52317, 52318, 52319, 52320) c6( ) c7(aLi, fg, C); #c1(NKX2-8) c2(NP_055175) c3(homeobox protein Nkx-2.8) c4(179577) c5(179578, 179579, 179580, 179581, 179582, 179583, 179584) c6( ) c7(T, eM, Ip, eL, ht, it, aur, dL, hu, bz); #c1(NKX3-1) c2(NP_001243268) c3(homeobox protein Nkx-3.1 isoform 2) c4(90336) c5(90337, 90338, 90339, 90340, 90341, 90342, 90343, 90344, 90345, 90346, 90347, 90348) c6( ) c7(gh, G, T, wu, Fb, ci, ad, x, Bl, aT, hn, wm, aDZ, ae, Ii, Ub, vT, aW, Lf, ff, en, bu, g, ck, eD, Lb, k, in); #c1(NKX3-1) c2(NP_006158) c3(homeobox protein Nkx-3.1 isoform 1) c4(162453, 162454) c5(162455, 162456, 162457, 162458, 162459, 162460, 162461) c6( ) c7(gh, G, T, w Fb, ci, ad, x, Bl, aT, hn, wm, aDZ, ae, Ii, Ub, vT, aW, Lf, ff, en, bu, g, ck, eD, Lb, k, in); #c1(NKX6-1) c2(XP_006714293) c3(homeobox protein Nkx-6.1 isoform X1) c4(287675) c5(287676, 287677, 287678, 287679, 287680, 287681, 287682) c6( ) c7(bL, beR, bq); #c1(NKX6-2) c2(NP_796374) c3(homeobox protein Nkx-6.2) c4(252476, 252477) c5(252478, 252479, 252480, 252481, 252482, 252483, 252484, 252485, 252486, 252487, 252488, 252489, 252490) c6( ) c7(bL, dB, dG, dL, Fc, eL); #c1(NLE1) c2(NP_001014445) c3(notchless protein homolog 1 isoform b) c4(25927) c5(25928, 25929, 25930, 25931, 25932, 25933, 25934, 25935) c6( ) c7(pJ, T); #c1(NLE1) c2(NP_060566) c3(notchless protein homolog 1 isoform a) c4(196607, 196608) c5(196609, 196610, 196611, 196612, 196613, 196614, 196615, 196616, 196617, 196618, 196619, 196620, 196621, 196622) c6( ) c7(pJ, T); #c1(NLE1) c2(XP_011523215) c3(notchless protein homolog 1 isoform X1) c4(317738) c5(317739, 317740, 317741, 317742, 317743, 317744) c6( ) c7(pJ, T); #c1(NLGN1) c2(NP_055747) c3(neuroligin-1) c4(183251) c5(183252, 183253, 183254, 183255, 183256, 183257, 183258, 183259, 183260, 183261, 183262, 183263, 183264, 183265) c6( ) c7(cF, c, rz, aw, bK, Z, he, bN); #c1(NLGN1) c2(XP_005247290) c3(neuroligin-1 isoform X3) c4(267751) c5( ) c6( ) c7(cF, c, rz, aw, bK, Z, he, bN); #c1(NLGN1) c2(XP_005247293) c3(neuroligin-1 isoform X4) c4( ) c5(267752) c6( ) c7(cF, c, rz, aw, bK, Z, he, bN); #c1(NLGN1) c2(XP_011510854) c3(neuroligin-1 isoform X2) c4(301305) c5(301306, 301307, 301308, 301309, 301310, 301311, 301312, 301313, 301314, 301315, 301316, 301317, 301318, 301319, 301320, 301321) c6( ) c7(cF, c, rz, aw, bK, Z, he, bN); #c1(NLGN2) c2(NP_065846) c3(neuroligin-2 precursor) c4(205826) c5(205827, 205828, 205829, 205830, 205831, 205832) c6( ) c7(bN); #c1(NLGN3) c2(NP_001160132) c3(neuroligin-3 isoform 3 precursor) c4(65091, 65092) c5(65093, 65094, 65095, 65096, 65097, 65098, 65099, 65100, 65101, 65102, 65103, 65104) c6( ) c7(aQy, ckp, hb, ckq, ckr, nA, rz, bN); #c1(NLGN3) c2(NP_061850) c3(neuroligin-3 isoform 2 precursor) c4(200778) c5(200779, 200780, 200781, 200782, 200783, 200784) c6( ) c7(aQy, ckp, hb, ckq, ckr, nA, rz, bN); #c1(NLGN3) c2(NP_851820) c3(neuroligin-3 isoform 1 precursor) c4(254601) c5(254602, 254603, 254604, 254605, 254606, 254607) c6( ) c7(aQy, ckp, hb, ckq, ckr, nA, rz, bN); #c1(NLGN3) c2(XP_006724726) c3(neuroligin-3 isoform X2) c4( ) c5(296277) c6( ) c7(aQy, ckp, hb, ckq, ckr, nA, rz, bN); #c1(NLGN3) c2(XP_011529277) c3(neuroligin-3 isoform X3) c4(324716) c5(324717, 324718, 324719, 324720, 324721) c6( ) c7(aQy, ckp, hb, ckq, ckr, nA, rz, bN); #c1(NLGN4X) c2(NP_001269075) c3(neuroligin-4, X-linked) c4(100370) c5(100371, 100372, 100373, 100374, 100375, 100376, 100377, 100378, 100379, 100380, 100381, 100382, 100383, 100384, 100385, 100386, 100387, 100388) c6( ) c7(bN, VX, rz, hb, ckt, yL, hQ, nf, btu, nA, he, cks, ckr); #c1(NLGN4X) c2(XP_011543850) c3(neuroligin-4, X-linked isoform X1) c4(342987) c5(342988, 342989, 342990, 342991, 342992, 342993) c6( ) c7(bN, VX, rz, hb, ckt, yL, hQ, nf, btu, nA, he, cks, ckr); #c1(NLGN4Y) c2(NP_001193779) c3(neuroligin-4, Y-linked isoform 3) c4(82600) c5(82601, 82602, 82603, 82604, 82605) c6( ) c7(bN, nA); #c1(NLGN4Y) c2(NP_055708) c3(neuroligin-4, Y-linked isoform 1 precursor) c4(182976) c5(182977, 182978, 182979, 182980, 182981, 182982, 182983, 182984, 182985, 182986) c6( ) c7(bN, nA); #c1(NLGN4Y) c2(XP_011529732) c3(neuroligin-4, Y-linked isoform X2) c4(325355, 325356) c5(325357, 325358, 325359, 325360, 325361, 325362, 325363, 325364, 325365, 325366, 325367, 325368, 325369, 325370) c6( ) c7(bN, nA); #c1(NLGN4Y) c2(XP_011529733) c3(neuroligin-4, Y-linked isoform X1) c4(325371, 325372) c5(325373, 325374, 325375, 325376, 325377, 325378, 325379, 325380, 325381, 325382, 325383, 325384) c6( ) c7(bN, nA); #c1(NLK) c2(NP_057315) c3(serine/threonine-protein kinase NLK) c4(190067) c5(190068, 190069, 190070, 190071, 190072, 190073) c6( ) c7(T, B, eM, bE, aW, r, aT, bB, aq, m, iR, t, ae, X, ad); #c1(NLN) c2(NP_065777) c3(neurolysin, mitochondrial) c4(205349, 205350, 205351) c5(205352, 205353, 205354, 205355, 205356, 205357, 205358, 205359, 205360, 205361, 205362, 205363, 205364, 205365, 205366, 205367, 205368, 205369) c6( ) c7(T, os, af, aW, cr, aT, oZ, j, cm, ae, cd, ad, hZ); #c1(NLRC3) c2(NP_849172) c3(protein NLRC3) c4(254399, 254400, 254401, 254402, 254403) c5(254404, 254405, 254406, 254407, 254408, 254409, 254410, 254411, 254412, 254413, 254414, 254415, 254416, 254417, 254418, 254419, 254420, 254421, 254422, 254423, 254424, 254425, 254426, 254427, 254428, 254429, 254430, 254431, 254432, 254433) c6( ) c7(eW); #c1(NLRC4) c2(NP_001186068) c3(NLR family CARD domain-containing protein 4 isoform a) c4(77005) c5(77006, 77007, 77008, 77009, 77010, 77011, 77012, 77013, 77014, 77015, 77016, 77017, 77018, 77019) c6( ) c7(kV, oO, ds, apJ, aLJ, eZ, bsk, nN, ZN, NX); #c1(NLRC4) c2(NP_001289433) c3(NLR family CARD domain-containing protein 4 isoform b) c4(114205) c5(114206, 114207, 114208, 114209, 114210, 114211) c6( ) c7(kV, oO, ds, apJ, aLJ, eZ, bsk, nN, ZN, NX); #c1(NLRC5) c2(XP_005256251) c3(protein NLRC5 isoform X1) c4(274014, 274015) c5(274016, 274017, 274018, 274019, 274020, 274021, 274022, 274023, 274024, 274025, 274026, 274027, 274028, 274029, 274030, 274031, 274032) c6( ) c7(oO, bL, j); #c1(NLRC5) c2(XP_005256252) c3(protein NLRC5 isoform X2) c4( ) c5(274033, 274034, 274035, 274036, 274037) c6( ) c7(oO, bL, j); #c1(NLRC5) c2(XP_005256254) c3(protein NLRC5 isoform X4) c4(274038) c5(274039, 274040, 274041, 274042, 274043, 274044) c6( ) c7(oO, bL, j); #c1(NLRC5) c2(XP_005256258) c3(protein NLRC5 isoform X8) c4(274045, 274046) c5(274047, 274048, 274049, 274050, 274051, 274052) c6( ) c7(oO, bL, j); #c1(NLRC5) c2(XP_006721361) c3(protein NLRC5 isoform X5) c4(293952) c5( ) c6( ) c7(oO, bL, j); #c1(NLRC5) c2(XP_011521677) c3(protein NLRC5 isoform X10) c4( ) c5(316436, 316437) c6( ) c7(oO, bL, j); #c1(NLRP1) c2(NP_001028225) c3(NACHT, LRR and PYD domains-containing protein 1 isoform 5) c4(30378) c5(30379, 30380, 30381, 30382, 30383, 30384, 30385, 30386, 30387, 30388) c6( ) c7(T, mr, fG, aw, aA, cL, qj, fr, C, uE, hF, ai, o, ad, AW, apJ, h, K, hK, NM, ae, af, yF, A, Y, XV, iw, aFt, eZ, fe, aF, hp, as, eE, cm, pb, es, cT, L, yI, ac, rR, iA, iT, cku, ajd, cj, U, y, Tr, iu, abh, pC); #c1(NLRP1) c2(NP_055737) c3(NACHT, LRR and PYD domains-containing protein 1 isoform 2) c4(183188, 183189) c5(183190, 183191, 183192, 183193, 183194, 183195) c6( ) c7(T, mr, fG, aw, aA, cL, qj, fr, C, uE, hF, ai, o, ad, AW, apJ, h, K, hK, NM, ae, af, yF, A, Y, XV, iw, aFt, eZ, fe, aF, hp, as, eE, cm, pb, es, cT, L, yI, ac, rR, iA, iT, cku, ajd, cj, U, y, Tr, iu, abh, pC); #c1(NLRP1) c2(NP_127497) c3(NACHT, LRR and PYD domains-containing protein 1 isoform 1) c4(226538) c5(226539, 226540, 226541, 226542, 226543, 226544, 226545, 226546, 226547, 226548, 226549, 226550, 226551, 226552, 226553, 226554) c6( ) c7(T, mr, fG, aw, aA, cL, qj, fr, C, uE, hF, ai, o, ad, AW, apJ, h, K, hK, NM, ae, af, yF, A, Y, XV, iw, aFt, eZ, fe, aF, hp, as, eE, cm, pb, es, cT, L, yI, ac, rR, iA, iT, cku, ajd, cj, U, y, Tr, iu, abh, pC); #c1(NLRP1) c2(NP_127499) c3(NACHT, LRR and PYD domains-containing protein 1 isoform 3) c4(226555) c5(226556, 226557, 226558, 226559, 226560, 226561) c6( ) c7(T, mr, fG, aw, aA, cL, qj, fr, C, uE, hF, ai, o, ad, AW, apJ, h, K, hK, NM, ae, af, yF, A, Y, XV, iw, aFt, eZ, fe, aF, hp, as, eE, cm, pb, es, cT, L, yI, ac, rR, iA, iT, cku, ajd, cj, U, y, Tr, iu, abh, pC); #c1(NLRP1) c2(NP_127500) c3(NACHT, LRR and PYD domains-containing protein 1 isoform 4) c4(226562) c5(226563, 226564, 226565, 226566, 226567, 226568) c6( ) c7(T, mr, fG, aw, aA, cL, qj, fr, C, uE, hF, ai, o, ad, AW, apJ, h, K, hK, NM, ae, af, yF, A, Y, XV, iw, aFt, eZ, fe, aF, hp, as, eE, cm, pb, es, cT, L, yI, ac, rR, iA, iT, cku, ajd, cj, U, y, Tr, iu, abh, pC); #c1(NLRP10) c2(XP_011518345) c3(NACHT, LRR and PYD domains-containing protein 10 isoform X1) c4(312349, 312350) c5(312351, 312352, 312353, 312354, 312355, 312356, 312357, 312358, 312359, 312360, 312361, 312362) c6( ) c7(aj, J); #c1(NLRP11) c2(NP_659444) c3(NACHT, LRR and PYD domains-containing protein 11 isoform 1) c4(239925, 239926) c5(239927, 239928, 239929, 239930, 239931, 239932, 239933, 239934, 239935, 239936, 239937, 239938) c6( ) c7(V, gv, cj); #c1(NLRP12) c2(NP_001264055) c3(NACHT, LRR and PYD domains-containing protein 12 isoform 3) c4(97448, 97449) c5(97450, 97451, 97452, 97453, 97454, 97455, 97456, 97457, 97458, 97459, 97460, 97461) c6( ) c7(EW, bE, NY, apJ, dV, bB, fr, R, eE, ckv, NM, Wt); #c1(NLRP12) c2(NP_001264058) c3(NACHT, LRR and PYD domains-containing protein 12 isoform 4) c4(97462) c5(97463, 97464, 97465, 97466, 97467, 97468, 97469, 97470, 97471, 97472, 97473, 97474) c6( ) c7(EW, bE, NY, apJ, dV, bB, fr, R, eE, ckv, NM, Wt); #c1(NLRP12) c2(NP_653288) c3(NACHT, LRR and PYD domains-containing protein 12 isoform 2) c4(239504, 239505) c5(239506, 239507, 239508, 239509, 239510, 239511, 239512, 239513, 239514, 239515, 239516, 239517) c6( ) c7(EW, bE, NY, apJ, dV, bB, fr, R, eE, ckv, NM, Wt); #c1(NLRP12) c2(XP_011525782) c3(NACHT, LRR and PYD domains-containing protein 12 isoform X3) c4(320175) c5( ) c6( ) c7(EW, bE, NY, apJ, dV, bB, fr, R, eE, ckv, NM, Wt); #c1(NLRP12) c2(XP_011525784) c3(NACHT, LRR and PYD domains-containing protein 12 isoform X5) c4(320176, 320177, 320178) c5(320179, 320180, 320181, 320182, 320183, 320184, 320185, 320186, 320187, 320188, 320189, 320190, 320191, 320192, 320193, 320194, 320195, 320196) c6( ) c7(EW, bE, NY, apJ, dV, bB, fr, R, eE, ckv, NM, Wt); #c1(NLRP13) c2(NP_789780) c3(NACHT, LRR and PYD domains-containing protein 13) c4(252266) c5(252267, 252268, 252269, 252270, 252271, 252272) c6( ) c7(cj); #c1(NLRP14) c2(NP_789792) c3(NACHT, LRR and PYD domains-containing protein 14) c4(252312) c5(252313, 252314, 252315, 252316, 252317, 252318) c6( ) c7(vH, ND, cj); #c1(NLRP2) c2(NP_001167552) c3(NACHT, LRR and PYD domains-containing protein 2 isoform 1) c4(69071, 69072, 69073) c5(69074, 69075, 69076, 69077, 69078, 69079, 69080, 69081, 69082, 69083, 69084, 69085, 69086, 69087, 69088, 69089, 69090, 69091, 69092, 69093, 69094, 69095, 69096, 69097, 69098, 69099, 69100, 69101, 69102, 69103, 69104, 69105, 69106, 69107, 69108, 69109, 69110, 69111, 69112, 69113, 69114, 69115, 69116, 69117, 69118, 69119, 69120, 69121, 69122, 69123, 69124, 69125, 69126, 69127, 69128, 69129, 69130, 69131, 69132, 69133, 69134, 69135, 69136, 69137, 69138, 69139, 69140, 69141) c6( ) c7(T, aC, WL, iW, eX, mL jh, aBx, n, oZ, Gn, fr, nA, bX, hF, q, ad, eJ, x, aE, Id, aT, qv, gG, eV, ae, jf, gw, d, CN, Gw, aW, Y, CM, bg, eZ, r, aJW, Io, eS, g, QK, cM, bz, iK, dr, iP, adq, ck, ajl, ba, Dy, eM, cj, cX, dW, m, k, bC, bt, kS); #c1(NLRP2) c2(NP_001167553) c3(NACHT, LRR and PYD domains-containing protein 2 isoform 2) c4(69142) c5(69143, 69144, 69145, 69146, 69147, 69148, 69149, 69150, 69151, 69152, 69153, 69154, 69155, 69156, 69157, 69158, 69159, 69160, 69161, 69162, 69163, 69164, 69165, 69166, 69167, 69168, 69169, 69170, 69171, 69172, 69173) c6( ) c7(T, aC, WL, iW, eX, ml, jh, aBx, n, oZ, Gn, fr, nA, bX, hF, q, ad, eJ, x, aE, Id, aT, qv, gG, eV, ae, jf, qw, d, CN, Gw, aW, Y, CM, bg, eZ, r, aJW, Io, eS, g, QK, cM, bz, iK, dr, iP, adq, ck, ajl, ba, Dy, eM, cj, cX, dW, m, k, bC, bt, kS); #c1(NLRP2) c2(NP_001167554) c3(NACHT, LRR and PYD domains-containing protein 2 isoform 3) c4(69174) c5(69175, 69176, 69177, 69178, 69179, 69180) c6( ) c7(T, aC, WL, iW, eX, ml, jh, aBx, n, oZ, Gn, fr, nA, bX, hF, q, ad, eJ, x, aE, Id, aT, qv, qG, eV, ae, jf, qw, d, CN, Gw, aW, Y, CM, bg, eZ, r, aJW, Io, eS, g, QK, cM, bz, iK, dr, iP, adq, ck, ajl, ba, Dy, eM, cj, cX, dW, m, k, bC, bt, kS); #c1(NLRP3) c2(NP_001120933) c3(NACHT, LRR and PYD domains-containing protein 3 isoform c) c4(44963) c5(44964, 44965, 44966, 44967, 44968, 44969, 44970, 44871, 44972, 44973) c6( ) c7(bol, oO, T, fR, ea, bkF, cL, Ja, xE, fS, dV, iv, K, hH, pk, aa, aW, asD, ih, aoD, eE, cm, axp, Uk, ba, lt, qr, aiM, R, hh, fy, abh, nD, dD, aw, n, amk, NJ, aj, nA, aPb, ai, eW, aDF, ke, adN, h, ey, NX, A, mR, adF, fe, aq, mo, ajz, nN, cM, Zb, bQL, hq, iO, W, bm, hs, fL, ckw, bdR, B, adG, bL, Dw, aAf, fG, yk, jx, ew, cz, azF, v, j, C, V, q, J, o, nX, apJ, aT, qG, aAD, Fg, ae, bf, s, Y, RF, bg, aLJ, r, lo, aDm, Rp, ajl, rR, Uq, wR, dy, yH, fD, aPJ, bQH, jh, eq, mC, ad, afb, LH, wD, fU, F, ib, NY, ds, adD, ji, Xl, nh, cr, eZ, dq, hp, iV, iR, YZ, qa, LB, bF, Ny, gZ, ei, Lz, i, y, MN); #c1(NLRP3) c2(XP_011542353) c3(NACHT, LRR and PYD domains-containing protein 3 isoform X3) c4(340914) c5(340915, 340916, 340917, 340918, 340919, 340920, 340921, 340922, 340923, 340924, 340925) c6( ) c7(bol, oO, T, fR, ea, bkF, cL, Ja, xE, fS, dV, iv, K, hH, pk, aa, aW, asD, ih, aoD, eE, cm, axp, Uk, ba, It, qr, aiM, R, hh, fy, abh, nD, dD, aw, n, amk, NJ, aj, nA, aPb, ai, eW, aDF, ke, adN, h, ey, NX, A, mR, adF, fe, aq, mo, ajz, nN, cM, Zb, bQL, hq, iO, W, bm, hs, fL, ckw, bdR, B, adG, bL, Dw, aAf, fG, yk, jx, ew, cz, azF, v, j, C, V, q, J, o, nX, apJ, aT, qG, aAD, Fg, ae, bf, s, Y, RF, bg, aLJ, r, lo, aDm, Rp, ajl, rR, Uq, wR, dy, yH, fD, aPJ, bQH, jh, eq, mC, ad, afb, LH, wD, fU, F, ib, NY, ds, adD, ji, Xl, nh, cr, eZ, dq, hp, iV, iR, YZ, qa, LB, bF, Ny, gZ, ei, Lz, i, y, MN); #c1(NLRP3) c2(XP_011542354) c3(NACHT, LRR and PYD domains-containing protein 3 isoform X2) c4(340926) c5(340927, 340928, 340929, 340930, 340931, 340932) c6( ) c7(bol, oO, T, fR, ea, bkF, cL, Ja, xE, fS, dV, iv, K, hH, pk, aa, aW, asD, ih, aoD, eE, cm, axp, Uk, ba, lt, qr, aiM, R, hh, fy, abh, nD, dD, aw, n, amk, NJ, aj, nA, aPb, ai, eW, aDF, ke, adN, h, ey, NX, A, mR, adF, fe, aq, mo, ajz, nN, cM, Zb, bQL, hq, iO, W, bm, hs, fL, ckw, bdR, B, adG, bL, Dw, aAf, fG, yk, jx, ew, cz, azF, v, j, C, V, q, J, o, nX, apJ, aT, qG, aAD, Fg, ae, bf, s, Y, RF, bg, aLJ, r, lo, aDm, Rp, ajl, rR, Uq, wR, dy, yH, fD, aPJ, bQH, jh, eq, mC, ad, afb, LH, wD, fU, F, ib, NY, ds, adD, ji, Xl, nh, cr, eZ, dq, hp, iV, iR, YZ, qa, LB, bF, Ny, gZ, ei, Lz, i, y, MN); #c1(NLRP3) c2(XP_011542356) c3(NACHT, LRR and PYD domains-containing protein 3 isoform X1) c4(340933) c5(340934, 340935, 340936, 340937, 340938, 340939) c6( ) c7(bol, oO, T, fR, ea, bkF, cL, Ja, xE, fS, dV, iv, K, hH, pk, aa, aW, asD, ih, aoD, eE, cm, axp, Uk, ba, lt, qr, aiM, R, hh, fy, abh, nD, dD, aw, n, amk, NJ, aj, nA, aPb, ai, eW, aDF, ke, adN, h, ey, NX, A, mR, adF, fe, aq, mo, ajz, nN, cM, Zb, bQL, hq, iO, W, bm, hs, fL, ckw, bdR, B, adG, bL, Dw, aAf, fG, yk, jx, ew, cz, azF, v, j, C, V, q, J, o, nX, apJ, aT, qG, aAD, Fg, ae, bf, s, Y, RF, bg, aLJ, r, lo, aDm, Rp, ajl, rR, Uq, wR, dy, yH, fD, aPJ, bQH, jh, eq, mC, ad, afb, LH, wD, fU, F, ib, NY, ds, adD, ji, Xl, nh, cr, eZ, dq, hp, iV, iR, YZ, qa, LB, bF, Ny, gZ, ei, Lz, i, y, MN); #c1(NLRP4) c2(XP_006723105) c3(NACHT, LRR and PYD domains-containing protein 4 isoform X2) c4(295007) c5(295008) c6( ) c7(cd, T, q, r, cj); #c1(NLRP4) c2(XP_011524817) c3(NACHT, LRR and PYD domains-containing protein 4 isoform X1) c4( ) c5(319216, 319217, 319218, 319219, 319220) c6( ) c7(cd, T, q, r, cj); #c1(NLRP4) c2(XP_011524818) c3(NACHT, LRR and PYD domains-containing protein 4 isoform X3) c4(319221) c5(319222, 319223, 319224, 319225, 319226, 319227) c6( ) c7(cd, T, q, r, cj); #c1(NLRP5) c2(NP_703148) c3(NACHT, LRR and PYD domains-containing protein 5) c4(246004) c5(246005, 246006, 246007, 246008, 246009, 246010) c6( ) c7(vJ, afc, OX, il, cj, OM); #c1(NLRP6) c2(NP_001263629) c3(NACHT, LRR and PYD domains-containing protein 6 isoform 2) c4(97316) c5(97317, 97318, 97319, 97320, 97321, 97322) c6( ) c7(bL, aE, qa, cz); #c1(NLRP6) c2(NP_612202) c3(NACHT, LRR and PYD domains-containing protein 6 isoform 1) c4(236196) c5(236197, 236198, 236199, 236200, 236201, 236202) c6( ) c7(bL, aE, qa, cz); #c1(NLRP7) c2(NP_631915) c3(NACHT, LRR and PYD domains-containing protein 7 isoform 1) c4(238304) c5(238305, 238306, 238307, 238308, 238309, 238310, 238311, 238312, 238313, 238314, 238315, 238316, 238317, 238318, 238319, 238320, 238321, 238322, 238323, 238324, 238325, 238326, 238327) c6( ) c7(jv, ZH, CN, vT, aoc, wu, eD, ml, wm, nJ); #c1(NLRP7) c2(XP_006725701) c3(NACHT, LRR and PYD domains-containing protein 7 isoform X2) c4( ) c5(296937, 296938, 296939, 296940, 296941, 296942, 296943, 296944, 296945, 296946, 296947, 296948, 296949, 296950, 296951, 296952, 296953, 296954, 296955, 296956, 296957, 296958, 296959, 296960, 296961, 296962) c6( ) c7(jv, ZH, CN, vT, aoc, wu, eD, ml, wm, nJ); #c1(NLRP7) c2(XP_011545815) c3(NACHT, LRR and PYD domains-containing protein 7 isoform X1) c4(344700, 344701) c5(344702, 344703, 344704, 344705, 344706, 344707, 344708, 344709, 344710, 344711, 344712, 344713, 344714, 344715, 344716, 344717, 344718, 344719, 344720, 344721, 344722, 344723, 344724, 344725, 344726, 344727) c6( ) c7(jv, ZH, CN, vT, aoc, wu, eD, ml, wm, nJ); #c1(NLRP7) c2(XP_011545818) c3(NACHT, LRR and PYD domains-containing protein 7 isoform X3) c4(344728, 344729) c5(344730, 344731, 344732, 344733, 344734, 344735, 344736, 344737, 344738, 344739, 344740, 344741, 344742, 344743, 344744, 344745, 344746, 344747, 344748, 344749, 344750, 344751, 344752, 344753, 344754, 344755, 344756, 344757, 344758, 344759) c6( ) c7(jv, ZH, CN, vT, aoc, wu, eD, ml, wm, nJ); #c1(NLRP8) c2(NP_789781) c3(NACHT, LRR and PYD domains-containing protein 8) c4(252273) c5(252274, 252275, 252276, 252277, 252278, 252279) c6( ) c7(cj); #c1(NLRP9) c2(XP_011525195) c3(NACHT, LRR and PYD domains-containing protein 9 isoform X1) c4(319675, 319676) c5(319677, 319678, 319679, 319680, 319681, 319682, 319683, 319684, 319685, 319686, 319687, 319688) c6( ) c7(cd); #c1(NMB) c2(NP_066563) c3(neuromedin-B isoform 1 preproprotein) c4(207397) c5(207398, 207399, 207400, 207401, 207402) c6( ) c7(eM, anK, v, ci, K, Tp, bz, bJ); #c1(NMB) c2(NP_995580) c3(neuromedin-B isoform 2 preproprotein) c4(263918) c5(263919, 263920, 263921, 263922, 263923, 263924, 263925) c6( ) c7(eM, anK, v, ci, K, Tp, bz, bJ); #c1(NMBR) c2(NP_002502) c3(neuromedin-B receptor) c4(129370) c5(129371, 129372, 129373, 129374, 129375, 129376) c6( ) c7(ft, eM, aW, e, aT, anK, bz); #c1(NME1) c2(NP_000260) c3(nucleoside diphosphate kinase A isoform b) c4( ) c5(5876, 5877, 5878, 5879, 5880) c6( ) c7(T, if, aAx, al, bB, aJN, ci, x, Vp, aE, K, pk, eL, cp, Cn, aW, LZ, g, eF, cm, iP, qJ, eM, nB, iA, iT, aBO, bwr, aep, m, iu, sw, NT, n, aj, kM, fr, qN, BI, h, dL, asT, dx, CN, PX, aq, aoO, bP, Qu, hL, hR, qF, WL, it, B, cn, fM, dA, AS, KR, Dh, aA, hy, AO, q, J, eA, XX, mj, hW, yg, aT, Ex, ckx, jj, ae, af, s, vT, iU, iZ, Y, ev, r, gm, en, cl, apx, t, f, iK, ck, nM, Dy, ig, gX, bt, ao, VB, gx, id, iW, jh, OE, Fb, Gn, iJ, ad, dP, av, hd, Db, yt, vc, IQ, qt, ff, eH, dq, aF, KM, bz, es, bE, bC, y, kS, X); #c1(NME1) c2(NP_937818) c3(nucleoside diphosphate kinase A isoform a) c4(259154, 259155, 259156) c5(259157, 259158, 259159, 259160, 259161, 259162, 259163, 259164, 259165, 259166, 259167, 259168, 259169, 259170, 259171, 259172, 259173, 259174, 259175) c6(259176, 259177) c7(T, if, aAx, al, bB, aJN, ci, x, Vp, aE, K, pk, eL, cp, Cn, aW, LZ, g, eF, cm, iP, gJ, eM, nB, iA, iT, aBO, bwr, aep, m, iu, sw, NT, n, aj, kM, fr, qN, Bl, h, dL, asT, dx, CN, PX, aq, aoO, bP, Qu, hL, hR, qF, WL, it, B, cn, fM, dA, AS, KR, Dh, aA, hy, AO, q, J, eA, XX, mj, hW, yg, aT, Fx, ckx, jj, ae, af, s, vT, iU, iZ, Y, ev, r, gm, en, cl, apx, t, f, iK, ck, nM, Dy, ig, gX, bt, ao, VB, gx, id, iW, jh, OE, Fb, Gn, iJ, ad, dP, av, hd, Db, yt, vc, IQ, qt, ff, eH, dq, aF, KM, bz, es, bE, bC, y, kS, X); #c1(NME1-NME2) c2(NP_001018146) c3(NME1-NME2 protein) c4(27452, 27453, 27454, 27455) c5(27456, 27457, 27458, 27459, 27460, 27461, 27462, 27463, 27464, 27465, 27466, 27467, 27468, 27469, 27470, 27471, 27472, 27473, 27474) c6( ) c7(T, dD, dA, KR, ea, eq, fr, qN, q, aT, IQ, K, dx, yo, iU, vT, aW, Y, ff, gm, en, g, t, cm, bz, eD, m, be, B); #c1(NME2) c2(NP_001018148) c3(nucleoside diphosphate kinase B isoform a) c4( ) c5(27475, 27476, 27477, 27478, 27479, 27480, 27481, 27482, 27483, 27484, 27485, 27486, 27487, 27488, 27489, 27490, 27491, 27492, 27493, 27494, 27495, 27496, 27497, 27498, 27499, 27500, 27501, 27502, 27503, 27504, 27505, 27506) c6( ) c7(T, dD, dA, KR, ea, eq, fr, qN, q, ib, aT, IQ, K, af, dx, yo, iU, vT, aW, Y, ff, gm, en, g, t, f, bz, cm, ck, eD, m, be, B); #c1(NME3) c2(NP_002504) c3(nucleoside diphosphate kinase 3 precursor) c4(129377) c5(129378, 129379, 129380, 129381, 129382, 129383) c6( ) c7(d, s, iU, aW, r, cm, q); #c1(NME4) c2(NP_001273364) c3(nucleoside diphosphate kinase, mitochondrial isoform c) c4(104768) c5(104769, 104770, 104771, 104772, 104773, 104774, 104775) c6( ) c7(ck, aA, h, bw, aF, cm, br); #c1(NME4) c2(NP_001273369) c3(nucleoside diphosphate kinase, mitochondrial isoform d) c4(104776, 104777) c5(104778, 104779, 104780, 104781, 104782, 104783, 104784, 104785, 104786, 104787, 104788, 104789, 104790) c6( ) c7(ck, aA, h, bw, aF, cm, br); #c1(NME4) c2(NP_005000) c3(nucleoside diphosphate kinase, mitochondrial isoform a precursor) c4(151919, 151920, 151921) c5(151922, 151923, 151924, 151925, 151926, 151927, 151928, 151929, 151930, 151931, 151932, 151933, 151934, 151935, 151936, 151937, 151938, 151939, 151940, 151941) c6( ) c7(ck, aA, h, bw, aF, cm, br); #c1(NME5) c2(NP_003542) c3(nucleoside diphosphate kinase homolog 5) c4(138988) c5(138989, 138990, 138991, 138992, 138993, 138994) c6( ) c7(id, aE); #c1(NME5) c2(XP_011541965) c3(nucleoside diphosphate kinase homolog 5 isoform X2) c4(340454) c5(340455, 340456, 340457, 340458, 340459, 340460) c6( ) c7(id, aE); #c1(NME6) c2(NP_005784) c3(nucleoside diphosphate kinase 6) c4(159314, 159315) c5(159316, 159317, 159318, 159319, 159320, 159321, 159322, 159323, 159324) c6( ) c7(bB, bE, aF); #c1(NME6) c2(XP_005264846) c3(nucleoside diphosphate kinase 6 isoform X1) c4( ) c5(279286) c6( ) c7(bB, bE, aF); #c1(NME7) c2(NP_037462) c3(nucleoside diphosphate kinase 7 isoform a) c4(175633, 175634) c5(175635, 175636, 175637, 175638, 175639, 175640, 175641) c6( ) c7(ac, bE, cz, bB, lB, bA); #c1(NME7) c2(NP_932076) c3(nucleoside diphosphate kinase 7 isoform b) c4( ) c5(258815, 258816, 258817, 258818, 258819) c6( ) c7(ac, bE, cz, bB, lB, bA); #c1(NME8) c2(NP_057700) c3(thioredoxin domain-containing protein 3) c4(192437) c5(192438, 192439, 192440, 192441, 192442, 192443, 192444, 192445, 192446, 192447) c6( ) c7(gU, cky, MG); #c1(NME9) c2(NP_835231) c3(thioredoxin domain-containing protein 6) c4(253400) c5(253401, 253402, 253403, 253404, 253405, 253406, 253407, 253408, 253409, 253410, 253411, 253412, 253413) c6( ) c7(bB, bE, T, af); #c1(NME9) c2(XP_005247486) c3(thioredoxin domain-containing protein 6 isoform X1) c4(267852, 267853) c5(267854, 267855) c6( ) c7(bB, bE, T, af); #c1(NME9) c2(XP_006713679) c3(thioredoxin domain-containing protein 6 isoform X7) c4(287279) c5(287280, 287281, 287282, 287283, 287284, 287285, 287286, 287287, 287288, 287289) c6( ) c7(bB, bE, T, af); #c1(NME9) c2(XP_011511073) c3(thioredoxin domain-containing protein 6 isoform X2) c4( ) c5(301493, 301494, 301495, 301496, 301497, 301498, 301499, 301500, 301501, 301502) c6( ) c7(bB, bE, T, af); #c1(NME9) c2(XP_011511076) c3(thioredoxin domain-containing protein 6 isoform X4) c4( ) c5(301503) c6( ) c7(bB, bE, T, af); #c1(NME9) c2(XP_011511079) c3(thioredoxin domain-containing protein 6 isoform X8) c4(301504) c5(301505, 301506, 301507, 301508, 301509, 301510) c6( ) c7(bB, bE, T, af); #c1(NMI) c2(NP_004679) c3(N-myc-interactor) c4(148785, 148786) c5(148787, 148788, 148789, 148790, 148791, 148792, 148793, 148794, 148795, 148796, 148797, 148798) c6( ) c7(T, aW, Y, aT, n, dL, m, t, eL); #c1(NMNAT1) c2(NP_001284707) c3(nicotinamide mononucleotide adenylyltransferase 1 isoform 1) c4(112378) c5(112379, 112380, 112381, 112382, 112383, 112384, 112385, 112386, 112387, 112388) c6( ) c7(alF, bfl, W, ckz, aVu, awK, nw, aR); #c1(NMNAT1) c2(NP_001284708) c3(nicotinamide mononucleotide adenylyltransferase 1 isoform 2) c4(112389) c5(112390, 112391, 112392, 112393, 112394, 112395) c6( ) c7(alF, bfl, W, ckz, aVu, awK, nw, aR); #c1(NMNAT2) c2(NP_055854) c3(nicotinamide mononucleotide adenylyltransferase 2 isoform 1) c4(183927) c5(183928, 183929, 183930, 183931, 183932, 183933) c6( ) c7(cd, Hx, xg, q, r); #c1(NMNAT2) c2(NP_733820) c3(nicotinamide mononucleotide adenylyltransferase 2 isoform 2) c4(247159) c5(247160, 247161, 247162, 247163, 247164, 247165) c6( ) c7(cd, Hx, xg, q, r); #c1(NMNAT3) c2(NP_001186976) c3(nicotinamide mononucleotide adenylyltransferase 3 isoform 2) c4(78908) c5(78909, 78910, 78911, 78912, 78913, 78914) c6( ) c7(hb, kl, EQ); #c1(NMNAT3) c2(NP_835471) c3(nicotinamide mononucleotide adenylyltransferase 3 isoform 1) c4( ) c5(253554, 253555, 253556, 253557, 253558, 253559, 253560, 253561, 253562) c6( ) c7(hb, kl, EQ); #c1(NMNAT3) c2(XP_006713687) c3(nicotinamide mononucleotide adenylyltransferase 3 isoform X2) c4(287290, 287291) c5( ) c6( ) c7(hb, kl, EQ); #c1(NMNAT3) c2(XP_006713692) c3(nicotinamide mononucleotide adenylyltransferase 3 isoform X3) c4(287292, 287293) c5(287294, 287295, 287296, 287297, 287298, 287299, 287300, 287301, 287302, 287303, 287304, 287305, 287306, 287307) c6( ) c7(hb, kl, EQ); #c1(NMNAT3) c2(XP_011511094) c3(nicotinamide mononucleotide adenylyltransferase 3 isoform X4) c4( ) c5(301511, 301512, 301513, 301514, 301515) c6( ) c7(hb, kl, EQ); #c1(NMS) c2(NP_001011717) c3(neuromedin-S precursor) c4(24789) c5(24790, 24791, 24792, 24793, 24794, 24795, 24796, 24797) c6(24798, 24799) c7(T, Ew, kp, hP, bt, fq); #c1(NMT1) c2(NP_066565) c3(glycylpeptide N-tetradecanoyltransferase 1) c4(207410, 207411) c5(207412, 207413, 207414, 207415, 207416, 207417, 207418, 207419, 207420, 207421, 207422, 207423, 207424, 207425, 207426) c6( ) c7(fR, dB, ff, ci, en, X); #c1(NMT1) c2(XP_011523160) c3(glycylpeptide N-tetradecanoyltransferase 1 isoform X1) c4( ) c5(317695) c6( ) c7(fR, dB, ff, ci, en, X); #c1(NMT2) c2(NP_004799) c3(glycylpeptide N-tetradecanoyltransferase 2) c4(149942, 149943, 149944) c5(149945, 149946, 149947, 149948, 149949, 149950, 149951, 149952, 149953, 149954, 149955, 149956, 149957, 149958) c6( ) c7(dB, ci, UE); #c1(NMT2) c2(XP_006717602) c3(glycylpeptide N-tetradecanoyltransferase 2 isoform X3) c4( ) c5(291245, 291246, 291247, 291248, 291249) c6( ) c7(dB, ci, UE); #c1(NMU) c2(NP_006672) c3(neuromedin-U isoform 1 preproprotein) c4(167020, 167021) c5(167022, 167023, 167024, 167025, 167026, 167027, 167028, 167029, 167030, 167031, 167032, 167033, 167034, 167035, 167036, 167037) c6(167038, 167039, 167040, 167041) c7(T, qQ, v, x, av, aE, aT, dL, ey, eL, af, aW, kp, zE, iK, bz, es, pO, iA, iT, k, bt, it); #c1(NMUR1) c2(NP_006047) c3(neurnmedin-U receptor 1) c4(161448) c5(161449, 161450, 161451, 161452, 161453, 161454) c6( ) c7(es, iT, j, iA); #c1(NMUR2) c2(NP_064552) c3(neurnmedin-U receptor 2) c4(202969) c5(202970, 202971, 202972, 202973, 202974, 202975) c6( ) c7(v); #c1(NNAT) c2(NP_005377) c3(neuronatin isoform alpha) c4(155567) c5(155568, 155569, 155570, 155571, 155572, 155573, 155574) c6(155575) c7(Fv, T, aj, v, hF, er, J, ft, yT, hn, K, dx, jf, yo, B, oP, s, ff, en, g, cm, ck, eM, U, iu); #c1(NNAT) c2(NP_859017) c3(neuronatin isoform beta) c4(255373) c5(255374, 255375, 255376, 255377, 255378, 255379, 255380) c6( ) c7(Fv, T, aj, v, hF, er, J, ft, yT, hn, K, dx, jf, yo, B, oP, s, ff, en, g, cm, ck, eM, U, iu); #c1(NNMT) c2(NP_006160) c3(nicotinamide N-methyltransferase) c4(162462) c5(162463, 162464, 162465, 162466, 162467, 162468, 162469, 162470, 162471, 162472) c6( ) c7(bM, T, FW, dA, v, uu, fr, q, x, hd, py, Db, hb, ja, aT, dL, K, ux, an, eL, eu, aW, ff, r, en, cm, qJ, nM, ac, nB, Ip, wE, go, bm, at, k, anx, bD, B); #c1(NNT) c2(XP_006714524) c3(NAD(P) transhydrogenase, mitochondrial isoform X2) c4(287893) c5(287894, 287895, 287896, 287897, 287898, 287899) c6( ) c7(aK, ckA, v, mf, j, jE, ey, vi); #c1(NNT) c2(XP_011512303) c3(NAD(P) transhydrogenase, mitochondrial isoform X1) c4(302834, 302835, 302836) c5(302837, 302838, 302839, 302840, 302841, 302842, 302843, 302844, 302845, 302846, 302847, 302848, 302849, 302850, 302851, 302852, 302853, 302854, 302855, 302856, 302857, 302858) c6( ) c7(aK, ckA, v, mf, j, jE, ey, Vi); #c1(NOA1) c2(NP_115689) c3(nitric oxide-associated protein 1) c4(223557) c5(223558, 223559, 223560, 223561, 223562, 223563) c6( ) c7(W); #c1(NOB1) c2(NP_054781) c3(RNA-binding protein NOB1) c4(177790) c5(177791, 177792, 177793, 177794, 177795, 177796) c6( ) c7(es, T, py, iA, go, fr, fs, eA); #c1(NOBOX) c2(NP_001073882) c3(homeobox protein NOBOX) c4(36280) c5(36281, 36282, 36283, 36284, 36285, 36286) c6( ) c7(ckB, zZ, iI, baZ); #c1(NOBOX) c2(XP_011514093) c3(homeobox protein NOBOX isoform X1) c4(306697) c5(306698, 306699, 306700, 306701, 306702, 306703) c6( ) c7(ckB, zZ, iI, baZ); #c1(NOC3L) c2(NP_071896) c3(nucleolar complex protein 3 homolog) c4(212135, 212136, 212137) c5(212138, 212139, 212140, 212141, 212142, 212143, 212144, 212145, 212146, 212147, 212148, 212149, 212150, 212151, 212152, 212153, 212154, 212155) c6( ) c7(aA, aF, q, ac, r); #c1(NOD1) c2(NP_006083) c3(nucleotide-binding oligomerization domain-containing protein 1) c4(161771) c5(161772, 161773, 161774, 161775, 161776, 161777, 161778, 161779, 161780, 161781, 161782, 161783) c6( ) c7(oO, bL, T, dD, bM, dA, fR, aD, IH, aA, aj, eq, C, V, ai, aR, J, AW, aFI, apJ, qp, aT, gU, h, aaA, uQ, oo, aW, sp, fO, az, r, fe, hN, lo, aF, aB, zC, iV, eE, cT, ac, z, dh, hL, cj, y, X, aDj); #c1(NOD1) c2(XP_011513384) c3(nucleotide-binding oligomerization domain-containing protein 1 isoform X2) c4(305609) c5( ) c6( ) c7(oO, bL, T, dD, bM, dA, fR, aD, IH, aA, aj, eq, C, V, ai, aR, J, AW, aFI, apJ, qp, aT, qU, h, aaA, uQ, oo, aW, sp, fO, az, r, fe, hN, lo, aF, aB, zC, iV, eE, cT, ac, z, dh, hL, cj, y, X, aDj); #c1(NOD1) c2(XP_011513389) c3(nucleotide-binding oligomerization domain-containing protein 1 isoform X7) c4(305610, 305611) c5( ) c6( ) c7(oO, bL, T, dD, bM, dA, fR, aD, IH, aA, aj, eq, C, V, ai, aR, J, AW, aFI, apJ, qp, aT, qU, h, aaA, uQ, oo, aW, sp, fO, az, r, fe, hN, lo, aF, aB, zC, iV, eE, cT, ac, z, dh, hL, cj, y, X, aDj); #c1(NOD1) c2(XP_011513390) c3(nucleotide-binding oligomerization domain-containing protein 1 isoform X8) c4(305612) c5(305613, 305614, 305615, 305616, 305617, 305618, 305619, 305620, 305621, 305622, 305623, 305624, 305625, 305626, 305627, 305628, 305629, 305630, 305631, 305632, 305633, 305634, 305635, 305636, 305637, 305638) c6( ) c7(oO, bL, T, dD, bM, dA, fR, aD, IH, aA, aj, eq, C, V, ai, aR, J, AW, aFI, apJ, qp, aT, qU, h, aaA, uQ, oo, aW, sp, fO, az, r, fe, hN, lo, aF, aB, zC, iV, eE, cT, ac, z, dh, hL, cj, y, X, aDj); #c1(NOD2) c2(NP_071445) c3(nucleotide-binding oligomerization domain-containing protein 2 isoform 1) c4(211716, 211717, 211718) c5(211719, 211720, 211721, 211722, 211723, 211724, 211725, 211726, 211727, 211728, 211729, 211730, 211731) c6( ) c7(oO, bM, T, fR, ea, e, aXb, aI, bB, cL, rm, Tz, wa, AW, vV, rw, bW, Yy, Ds, K, hH, amA, Us, YY, aW, qS, az, Rr, hI, mQ, ih, hN, dg, zC, pL, ve, uC, eE, fT, lt, gt, Jr, aFO, gr, cj, uo, k, ckG, aSs, qR, xN, ajy, dD, Ht, sQ, ckE, n, BH, aj, oY, qW, ai, aPb, KL, i, afn, ju, cU, IG, h, dL, ey, aNj, ux, bEg, NX, OV, mR, A, aiB, sp, bPr, ge, fe, nN, cM, acD, bxB, Wt, aBs, ar, acC, hk, ckD, hL, aum, hs, uz, ut, at, SZ, JM, aDE, B, bL, Dw, cai, AL, wL, fG, YN, aA, cz, baK, j, C, V, q, J, cjf, ga, nX, apJ, Id, aT, gU, yu, cy, XU, an, bA, azU, Y, aZs, r, aMA, lo, ahl, t, Ym, ck, ajl, cT, ig, WP, gX, wR, dy, bt, xb, sY, aCA, aD, iW, axd, dG, Gn, eq, hF, wD, av, biq, I, bNN, oz, Dq, vB, ji, bVZ, IQ, ckG, NM, aAy, uQ, bRb, aFP, ckE, baT, aLI, aFt, cr, dN, aFr, eZ, aF, hp, Sm, iV, bz, dr, blZ, bFf, gk, bE, z, eB, wz, Xs, IM, hE, ra, X, y); #c1(NOD2) c2(XP_011521561) c3(nucleotide-binding oligomerization domain-containing protein 2 isoform X4) c4(316293) c5(316294, 316295, 316296, 316297, 316298, 316299) c6( ) c7(oO, bM, T, fR, ea, e, aXb, aI, bB, cL, rm, Tz, wa, AW, vV, rw, bW, Yy, Ds, K, hH, amA, Us, YY, aW, qS, az, Rr, hl, mQ, ih, hN, dg, zC, pL, ve, uC, eE, fT, It, gt, Jr, aFO, qr, cj, uo, k, ckG, aSs, qR, xN, ajy, dD, Ht, sQ, ckE, n, BH, aj, oY, qW, ai, aPb, KL, i, afn, ju, cU, IG, h, dL, ey, aNj, ux, bEg, NX, OV, mR, A, aiB, sp, bPr, ge, fe, nN, cM, acD, bxB, Wt, aBs, ar, acC, hk, ckD, hL, aum, hs, uz, ut, at, SZ, JM, aDE, B, bL, Dw, cai, AL, wL, fG, YN, aA, cz, baK, j, C, V, q, J, cjf, ga, nX, apJ, Id, aT, qU, yu, cy, XU, an, bA, azU, Y, aZs, r, aMA, lo, ahl, t, Ym, ck, ajl, cT, ig, WP, gX, wR, dy, bt, xb, sY, aCA, aD, iW, axd, dG, Gn, eq, hF, wD, av, biq, l, bNN, oz, Dq, vB, ji, bVZ, IQ, ckG, NM, aAy, uQ, bRb, aFP, ckE, baT, aLI, aFt, cr, dN, aFr, eZ, aF, hp, Sm, iV, bz, dr, blZ, bFf, gk, bE, z, eB, wz, Xs, lM, hE, ra, X, y); #c1(NOD2) c2(XP_011521563) c3(nucleotide-binding oligomerization domain-containing protein 2 isoform X7) c4( ) c5(316300, 316301, 316302, 316303, 316304) c6( ) c7(oO, bM, T, fR, ea, e, aXb, aI, bB, cL, rm, Tz, wa, AW, vV, rw, bW, Yy, Ds, K, hH, amA, Us, YY, aW, qS, az, Rr, hI, mQ, ih, hN, dg, zC, pL, ve, uC, eE, fT, It, gt, Jr, aFO, qr, cj, uo, k, ckG, aSs, qR, xN, ajy, dD, Ht, sQ, ckE, n, BH, aj, oY, qW, ai, aPb, KL, i, afn, ju, cU, lG, h, dL, ey, aNj, ux, bEg, NX, OV, mR, A, aiB, sp, bPr, ge, fe, nN, cM, acD, bxB, Wt, aBs, ar, acC, hk, ckD, hL, aum, hs, uz, ut, at, SZ, JM, aDE, B, bL, Dw, cai, AL, wL, fG, YN, aA, cz, baK, j, C, V, q, J, cjf, ga, nX, apJ, Id, aT, gU, yu, cy, XU, an, bA, azU, Y, aZs, r, aMA, lo, ahl, t, Ym, ck, ajl, cT, ig, WP, gX, wR, dy, bt, xb, sY, aCA, aD, iW, axd, dG, Gn, eg, hF, wD, av, biq, I, bNN, oz, Dq, vB, ji, bVZ, IQ, ckG, NM, aAy, uQ, bRb, aFP, ckE, baT, aLl, aFt, cr, dN, aFr, eZ, aF, hp, Sm, iV, bz, dr, blZ, bFf, gk, bE, z, eB, wz, Xs, IM, hE, ra, X, y); #c1(NODAL) c2(NP_060525) c3(nodal homolog precursor) c4(196370, 196371) c5(196372, 196373, 196374, 196375, 196376, 196377, 196378, 196379, 196380, 196381, 196382, 196383, 196384, 196385, 196386, 196387, 196388) c6( ) c7(T, BN, ne, aW, Y, arR, hy, aDR, j, eA, ZW, ckH, ae, B, ad); #c1(NOG) c2(NP_005441) c3(noggin precursor) c4(156199) c5(156200, 156201, 156202, 156203, 156204, 156205) c6( ) c7(atx, T, dA, rV, ht, cz, cR, v, zU, ad, bv, ckN, il, btI, aT, Ne, h, Nc, K, hu, ZW, ae, bA, je, ckl, aW, Y, ate, apn, nY, ckM, bBd, ckL, agj, ckJ, zZ, ckO, bz, bvU, ckK, zV, cm, atm, iM, BL, NL, w, aVv, pg, aS, dy, bkh, VK, B, atd); #c1(NDL11) c2(NP_001290201) c3(nucleolar protein 11 isoform 2) c4( ) c5(115141, 115142, 115143, 115144, 115145) c6( ) c7(aOE); #c1(NOL11) c2(NP_056277) c3(nucleolar protein 11 isoform 1) c4(186891, 186892) c5(186893, 186894, 186895, 186896, 186897, 186898, 186899) c6( ) c7(aOE); #c1(NOL3) c2(NP_001263236) c3(nucleolar protein 3 isoform MYP) c4(97073) c5(97074, 97075, 97076, 97077, 97078, 97079, 97080, 97081) c6( ) c7(T, fM, id, aw, afk, eX, jh, aA, bB, j, ci, fr, afl, AO, jw, q, aT, h, eV, vc, K, B, aW, Y, r, aF, BG, iV, cm, Ik, kC, xw, ck, es, sS, iA, bE, mx, Ei, ckP, y, bt, X); #c1(N0L3) c2(NP_001263248) c3(nucleolar protein 3 isoform D) c4( ) c5(97087, 97088) c6( ) c7(T, fM, id, aw, afk, eX, jh, aA, bB, j, ci, fr, afl, AO, jw, q, aT, h, eV, vc, K, B, aW, Y, r, aF, BG, iV, cm, Ik, kC, xw, ck, es, sS, iA, bE, mx, Ei, ckP, y, bt, X); #c1(NOL4) c2(NP_001185475) c3(nucleolar protein 4 isoform 2) c4(75705, 75706) c5( ) c6( ) c7(if, T, fq, ac, qN); #c1(NOL4) c2(NP_001185476) c3(nucleolar protein 4 isoform 3) c4(75707) c5(75708, 75709, 75710, 75711, 75712, 75713) c6( ) c7(if, T, fq, ac, qN); #c1(NOL4) c2(NP_001185477) c3(nucleolar protein 4 isoform 4) c4(75714) c5(75715, 75716, 75717, 75718, 75719, 75720) c6( ) c7(if, T, fq, ac, qN); #c1(NOL4) c2(NP_001185478) c3(nucleolar protein 4 isoform 5) c4( ) c5(75721, 75722, 75723, 75724, 75725) c6( ) c7(if, T, fq, ac, qN); #c1(NOL4) c2(NP_001269456) c3(nucleolar protein 4 isoform 6) c4( ) c5(101696, 101697, 101698, 101699, 101700, 101701, 101702, 101703, 101704, 101705, 101706) c6( ) c7(if, T, fq, ac, qN); #c1(NOL4) c2(NP_003778) c3(nucleolar protein 4 isoform 1) c4(140762) c5(140763, 140764, 140765, 140766, 140767, 140768) c6( ) c7(if, T, fq, ac, qN); #c1(NOL4) c2(XP_006722627) c3(nucleolar protein 4 isoform X3) c4( ) c5(294786) c6( ) c7(if, T, fq, ac, qN); #c1(NOL4) c2(XP_006722629) c3(nucleolar protein 4 isoform X5) c4( ) c5(294787) c6( ) c7(if, T, fq, ac, qN); #c1(NOL4) c2(XP_011524542) c3(nucleolar protein 4 isoform X4) c4(319146) c5( ) c6( ) c7(if, T, fq, ac, qN); #c1(NOL6) c2(NP_075068) c3(nucleolar protein 6 alpha isoform) c4(213662, 213663, 213664, 213665, 213666, 213667) c5(213668, 213669, 213670, 213671, 213672, 213673, 213674, 213675, 213676, 213677, 213678, 213679, 213680, 213681, 213682, 213683, 213684, 213685, 213686, 213687, 213688, 213689, 213690, 213691, 213692, 213693, 213694, 213695, 213696, 213697, 213698, 213699, 213700, 213701, 213702, 213703) c6( ) c7(aw); #c1(NOL6) c2(NP_631981) c3(nucleolar protein 6 gamma isoform) c4(238418) c5(238419, 238420, 238421, 238422, 238423, 238424) c6( ) c7(aw); #c1(NOL8) c2(NP_001243323) c3(nucleolar protein 8 isoform b) c4(90409) c5( ) c6( ) c7(T, aF, aA); #c1(NOL8) c2(NP_060418) c3(nucleolar protein 8 isoform a) c4(195858, 195859) c5(195860, 195861, 195862, 195863, 195864, 195865, 195866, 195867, 195868, 195869, 195870, 195871, 195872, 195873, 195874, 195875, 195876, 195877, 195878, 195879, 195880, 195881, 195882) c6( ) c7(T, aF, aA); #c1(NOL8) c2(XP_006717231) c3(nucleolar protein 8 isoform X3) c4(290812, 290813) c5(290814, 290815, 290816, 290817, 290818, 290819) c6( ) c7(T, aF, aA); #c1(NOL8) c2(XP_011517128) c3(nucleolar protein 8 isoform X4) c4(310637, 310638, 310639) c5(310640, 310641, 310642, 310643, 310644, 310645, 310646, 310647, 310648, 310649, 310650, 310651, 310652, 310653, 310654, 310655, 310656, 310657, 310658, 310659, 310660, 310661, 310662) c6( ) c7(T, aF, aA); #c1(NOLC1) c2(NP_001271317) c3(nucleolar and coiled-body phosphoprotein 1 isoform 1) c4(103883) c5(103884, 103885, 103886, 103887, 103888, 103889) c6( ) c7(T, if, jh, aA, ci, qN, q, ad, ft, Ig, aT, K, ae, af, aJE, d, aW, ff, r, aF, en, bP, eD, m, B, L); #c1(NOLC1) c2(NP_004732) c3(nucleolar and coiled-body phosphoprotein 1 isoform 2) c4(149158) c5(149159, 149160, 149161, 149162, 149163, 149164) c6( ) c7(T, if, jh, aA, ci, qN, q, ad, ft, Ig, aT, K, ae, af, aJE, d, aW, ff, r, aF, en, bP, eD, m, B, L); #c1(NOM1) c2(NP_612409) c3(nucleolar MIF4G domain-containing protein 1) c4(236414) c5(236415, 236416, 236417, 236418, 236419, 236420) c6( ) c7(ac); #c1(NOM01) c2(NP_055102) c3(nodal modulator 1 precursor) c4(178956) c5(178957, 178958, 178959, 178960, 178961, 178962) c6( ) c7(bt, dA, kH); #c1(NON0) c2(NP_001138881) c3(nnn-POU domain-containing octamer-binding protein isoform 1) c4(57997, 57998, 57999, 58000, 58001, 58002, 58003) c5(58004, 58005, 58006, 58007, 58008, 58009, 58010, 58011, 58012, 58013, 58014, 58015, 58016, 58017, 58018, 58019, 58020, 58021, 58022, 58023, 58024, 58025, 58026, 58027, 58028, 58029, 58030, 58031, 58032, 58033, 58034, 58035, 58036, 58037, 58038, 58039, 58040, 58041, 58042, 58043) c6( ) c7(Y, ev, r, aT, ci, K, rP, q); #c1(NON0) c2(NP_001138882) c3(non-POU domain-containing octamer-binding protein isoform 2) c4( ) c5(58044, 58045, 58046, 58047, 58048, 58049, 58050, 58051, 58052, 58053, 58054) c6( ) c7(Y, ev, r, aT, ci, K, rP, q); #c1(NOP10) c2(NP_061118) c3(H/ACA ribonucleoprotein complex subunit 3) c4(199200) c5(199201, 199202, 199203, 199204, 199205, 199206) c6( ) c7(sb, cjU, cjV); #c1(NOP14) c2(NP_001278908) c3(nucleolar protein 14 isoform 2) c4(110861) c5(110862, 110863, 110864, 110865, 110866, 110867) c6( ) c7(aE); #c1(NOP14) c2(NP_003694) c3(nucleolar protein 14 isoform 1) c4(140208, 140209) c5(140210, 140211, 140212, 140213, 140214, 140215, 140216, 140217, 140218, 140219, 140220, 140221, 140222, 140223, 140224, 140225) c6( ) c7(aE); #c1(NOP16) c2(NP_001243468) c3(nucleolar protein 16 isoform 1) c4(90887) c5(90888, 90889, 90890, 90891, 90892, 90893) c6( ) c7(aW, aq, aT); #c1(NOP16) c2(NP_001243469) c3(nucleolar protein 16 isoform 2) c4(90894) c5(90895, 90896, 90897, 90898, 90899, 90900) c6( ) c7(aW, aq, aT); #c1(NOP16) c2(NP_001278234) c3(nucleolar protein 16 isoform 4) c4(109522) c5(109523, 109524, 109525, 109526, 109527, 109528) c6( ) c7(aW, aq, aT); #c1(NOP16) c2(NP_057475) c3(nucleolar protein 16 isoform 3) c4(191136) c5(191137, 191138, 191139, 191140, 191141, 191142) c6( ) c7(aW, aq, aT); #c1(NOP2) c2(NP_001028886) c3(probable 28S rRNA (cytosine(4447)-C(5))-methyltransferase isoform 1) c4(30686) c5(30687, 30688, 30689, 30690, 30691, 30692, 30693, 30694, 30695, 30696) c6( ) c7(T, aE, AO, qt, aW, r, aT, ci, nA, zy, hF, eA); #c1(NOP2) c2(NP_001245238) c3(probable 28S rRNA (cytnsine(4447)-C(5))-methyltransferase isoform 3) c4(92765) c5(92766, 92767, 92768, 92769, 92770, 92771) c6( ) c7(T, aE, AO, qt, aW, r, aT, ci, nA, zy, hF, eA); #c1(NOP2) c2(NP_001245239) c3(probable 28S rRNA (cytosine(4447)-C(5))-methyltransferase isoform 4) c4(92772) c5(92773, 92774, 92775, 92776, 92777, 92778) c6( ) c7(T, aE, AO, qt, aW, r, aT, ci, nA, zy, hF, eA); #c1(NOP2) c2(XP_005253748) c3(probable 28S rRNA (cytosine(4447)-C(5))-methyltransferase isoform X1) c4(272630) c5(272631, 272632, 272633, 272634, 272635, 272636, 272637, 272638, 272639, 272640) c6( ) c7(T, aE, AO, qt, aW, r, aT, ci, nA, zy, hF, eA); #c1(NOP56) c2(NP_006383) c3(nucleolar protein 56) c4(164525, 164526, 164527, 164528) c5(164529, 164530, 164531, 164532, 164533, 164534, 164535, 164536, 164537, 164538, 164539, 164540, 164541, 164542, 164543, 164544, 164545, 164546, 164547, 164548, 164549, 164550, 164551, 164552) c6( ) c7(ky, kB, Ol, jh, aA, rf, alQ); #c1(NOP9) c2(NP_777573) c3(nucleolar protein 9 isoform 1) c4(251171) c5(251172, 251173, 251174, 251175, 251176, 251177) c6( ) c7(aT); #c1(NOP9) c2(XP_011534828) c3(nucleolar protein 9 isoform X2) c4(331330) c5(331331, 331332, 331333, 331334, 331335, 331336) c6( ) c7(aT); #c1(NOS1) c2(NP_000611) c3(nitric oxide synthase, brain isoform 1) c4(13743, 13744, 13745, 13746, 13747) c5(13748, 13749, 13750, 13751, 13752, 13753, 13754, 13755, 13756, 13757, 13758, 13759, 13760, 13761, 13762, 13763, 13764, 13765, 13766, 13767, 13768) c6( ) c7(oO, tJ, T, bM, ea, aqo, e, al, yY, gf, ur, ci, HH, Jt, aY, aR, ip, aE, bWj, dV, Ds, K, qD, xa, aW, mQ, vs, Ku, Eg, g, cm, bw, bdc, y, eM, Ip, oy, mx, vy, cj, bjL, sv, pw, act, eg, fy, uL, dD, xJ, aj, fr, ct, eh, cd, ai, cc, h, IG, he, A, sp, EU, bzu, Og, cA, dB, at, cB, bL, Dw, iH, eR, bBr, hx, cz, ckQ, v, j, C, iI, V, eA, J, uT, WY, sy, qK, HC, Ml, aT, cy, bK, ahg, bq, an, rz, ae, bPQ, af, eu, afC, Y, ev, aPf, HL, en, bN, bNB, ck, Qi, pH, cT, iM, ac, c, ciO, bt, ao, bOo, vq, am, akd, MH, qb, iW, uG, ckR, jh, bS, ah, oH, dG, uu, bzq, eq, ad, dP, av, HF, ot, oj, vc, vP, MG, d, je, aCt, ff, Of, eZ, iV, Z, jb, qa, es, gk, aaG, wz, sG, aGg, IC, vt, xg, cbO, rk); #c1(NOS1) c2(NP_001191142) c3(nitric oxide synthase, brain isoform 3) c4( ) c5(81073, 81074, 81075, 81076, 81077, 81078) c6( ) c7(oO, tJ, T, bM, ea, aqo, e, al, yY, gf, ur, ci, HH, Jt, aY, aR, ip, aE, bWj, dV, Ds, K, qD, xa, aW, mQ, vs, Ku, Eg, g, cm, bw, bdc, y, eM, Ip, oy, mx, vy, cj, bjL, sv, pw, act, eg, fy, uL, dD, xJ, aj, fr, ct, eh, cd, ai, cc, h, IG, he, A, sp, EU, bzu, Og, cA, dB, at, cB, bL, Dw, iH, eR, bBr, hx, cz, ckQ, v, j, C, il, V, eA, J, uT, WY, sy, qK, HC, MI, aT, cy, bK, ahg, bq, an, rz, ae, bPQ, af, eu, afC, Y, ev, aPf, HL, en, bN, bNB, ck, Qi, pH, cT, iM, ac, c, ciO, bt, ao, bOo, vq, am, akd, MH, qb, iW, uG, ckR, jh, bS, ah, oH, dG, uu, bzg, eq, ad, dP, av, HF, ot, oj, vc, vP, MG, d, je, aCt, ff, Of, eZ, iV, Z, jh, ga, es, gk, aaG, wz, sG, aGg, IG, vt, xg, cbO, rk); #c1(NOS1) c2(NP_001191147) c3(nitric oxide synthase, brain isoform 2) c4(81079, 81080) c5(81081, 81082, 81083, 81084, 81085, 81086, 81087, 81088, 81089, 81090, 81091, 81092, 81093) c6( ) c7(oO, tJ, T, bM, ea, aqo, e, al, yY, gf, ur, ci, HH, Jt, aY, aR, ip, aE, bWj, dV, Ds, K, qD, xa, aW, mQ, vs, Ku, Eg, g, cm, bw, bdc, y, eM, Ip, oy, mx, vy, cj, bjL, sv, pw, act, eg, fy, uL, dD, xJ, aj, fr, ct, eh, cd, ai, cc, h, IG, he, A, sp, EU, bzu, Og, cA, dB, at, cB, bL, Dw, iH, eR, bBr, hx, cz, ckQ, v, j, C, il, V, eA, J, uT, WY, sy, qK, HC, MI, aT, cy, bK, ahg, bg, an, rz, ae, bPQ, af, eu, afC, Y, ev, aPf, HL, en, bN, bNB, ck, Qi, pH, cT, iM, ac, c, ciO, bt, ao, bOo, vq, am, akd, MH, qb, iW, uG, ckR, jh, bS, ah, oH, dG, uu, bzq, eq, ad, dP, av, HF, ot, oj, vc, vP, MG, d, je, aCt, ff, Of, eZ, iV, Z, jb, qa, es, gk, aaG, wz, sG, aGg, IC, vt, xg, cbO, rk); #c1(NOS1AP) c2(NP_001119532) c3(carboxyl-terminal PDZ ligand of neuronal nitric oxide synthase protein isoform 2) c4(44141) c5(44142, 44143, 44144, 44145, 44146, 44147) c6( ) c7(bL, dD, tS, atB, ea, e, My, aw, EQ, rf, tc, aj, bS, j, et, eq, abQ, cd, J, no, aT, By, bK, K, he, HO, mu, uX, aW, EZ, pL, Z, ckS, Ei, gZ, gq); #c1(NOS1AP) c2(NP_001158229) c3(carboxyl-terminal PDZ ligand of neuronal nitric oxide synthase protein isoform 3) c4(63482) c5(63483, 63484, 63485, 63486, 63487, 63488, 63489, 63490) c6( ) c7(bL, dD, tS, atB, ea, e, My, aw, EQ, rf, tc, aj, bS, j, et, eq, abQ, cd, J, no, aT, By, bK, K, he, HO, mu, uX, aW, EZ, pL, Z, ckS, Ei, gZ, gq); #c1(NOS1AP) c2(NP_055512) c3(carboxyl-terminal PDZ ligand of neuronal nitric oxide synthase protein isoform 1) c4(181621) c5(181622, 181623, 181624, 181625, 181626, 181627) c6( ) c7(bL, dD, tS, atB, ea, e, My, aw, EQ, rf, tc, aj, bS, j, et, eq, abQ, cd, J, no, aT, By, bK, K, he, HO, mu, uX, aW, EZ, pL, Z, ckS, Ei, gZ, gq); #c1(NOS2) c2(NP_000616) c3(nitric oxide synthase, inducible) c4(13941, 13942, 13943) c5(13944, 13945, 13946, 13947, 13948, 13949, 13950, 13951, 13952, 13953, 13954, 13955, 13956, 13957, 13958, 13959, 13960, 13961, 13962) c6( ) c7(oO, bM, G, T, ID, xS, fR, hV, ea, atj, e, al, eb, bB, zh, ci, qj, bh, aY, sD, Tz, aR, ip, Bc, dV, us, Ds, K, GO, bah, zy, H, hH, eL, be, VF, bzH, aa, ly, dH, Jl, aW, bn, aoo, wF, hI, LZ, kt, hN, g, Eg, aFU, hJ, uC, cm, bw, Qn, bdc, y, fT, eM, iA, Ip, aDs, Jp, oy, mx, vy, cj, Gs, aVm, dW, mk, m, pw, eg, hh, aTW, qR, dD, pG, aw, ht, NT, fN, n, BH, xJ, aj, ct, uE, fr, eh, cd, zo, ai, eW, ckT, jz, cc, RN, ju, kH, cU, IG, h, dL, vd, ey, hB, he, aDp, pI, wC, A, mR, sp, EU, bzu, Ff, ge, fQ, QP, aq, fe, Og, aGq, jh, dw, cM, Ix, kT, W, bP, dB, wk, If, JM, bm, at, E, apY, aAl, qF, amb, fL, Pr, B, cB, bL, Dw, eR, jp, uv, Ju, jx, rf, aA, cR, tc, cz, hy, j, v, C, OY, wo, yV, V, wy, q, J, ga, uT, hh, jZ, qp, qK, aT, Oi, qG, bK, ahg, bq, XZ, an, ae, bsd, bPQ, af, CB, dl, ak, eu, afC, zH, Y, ev, fO, r, aPf, lo, en, aaO, t, kC, iK, pb, bN, ck, Qi, akF, wg, Dy, c, ac, Il, ig, nM, iM, hO, re, ciO, dy, Da, gT, bt, aen, ao, bOo, sY, ciH, wi, aD, dM, iW, gN, ckR, aZH, oR, auq, bS, oH, jE, uu, aXD, dG, eq, wV, ad, wD, LH, dP, av, F, yt, ds, IC, oW, Os, vw, io, JK, ji, jo, JS, MG, sj, uQ, NP, uX, je, IR, aZl, ff, Of, cr, eZ, hv, aF, hp, iV, Z, bz, qa, eK, adA, aDN, es, D, gk, pu, TA, axs, bF, bE, Ny, dO, X, uR, wz, aDB, gZ, aS, ME, ei, hE, vt, ne, rk, pC); #c1(NOS3) c2(NP_000594) c3(nitric oxide synthase, endothelial isoform 1) c4(13516, 13517) c5(13518, 13519, 13520, 13521, 13522, 13523, 13524, 13525, 13526, 13527, 13528, 13529, 13530, 13531, 13532, 13533, 13534) c6( ) c7(T, ea, bO, ci, aY, xy, dV, HR, hH, aa, ly, ahP, nY, GR, ba, Ip, wE, k, IS, aNn, uL, aEw, ht, cQ, aj, cd, sW, IG, bxi, aaL, ey, sp, vu, fQ, fe, ayt, dB, E, Dp, aA, cz, nS, q, QI, cy, sR, Cy, dI, eu, bA, bf, bg, aeS, pb, rR, OW, tW, ac, mG, bcs, hr, ao, arS, iW, uG, mw, dG, uu, fu, ad, HF, yt, vJ, Aa, IQ, vP, WZ, ZE, ue, cH, cW, ag, dX, IC, ra, rk, ID, bM, ckX, e, ur, ip, x, Na, aif, bc, dH, hI, fH, as, ckU, mx, vy, bjL, tG, wx, dD, gU, aJr, md, Mo, ec, bmo, aOX, hi, MX, A, aRa, ty, sE, cA, cO, at, ut, fL, sa, sZ, B, mr, wL, fF, v, V, UE, WY, rS, MI, ae, HL, t, sK, acp, wO, hO, kV, HQ, dM, oR, eq, BY, LA, hD, vc, JK, ckW, sj, wc, Z, HI, D, gk, yE, wz, gZ, gB, Tw, y, aax, hv, fR, al, gf, wa, lu, Bc, M, K, wt, eL, wF, g, aBa, uC, Gs, U, uo, fC, m, P, sQ, sw, aw, aCQ, eh, fK, axc, Lv, Ff, wd, cM, kT, wk, mg, gv, gg, Pr, oe, jx, wo, j, eA, J, nX, Nc, bq, bPQ, kl, Y, ckV, r, iK, bmS, sn, c, hc, dh, wR, cS, dy, fD, gT, gx, sY, am, akd, aZ, bS, ah, gb, Jm, fU, dP, ji, uX, IR, cr, qa, adA, cgA, ckY, ei, vt, st, wH, acz, eb, dY, iI, dQ, eN, hm, aAu, LG, aW, aOW, hJ, eM, wB, bWG, nw, qR, aEj, tp, wh, ez, et, cc, h, jy, dL, vx, Gc, wC, aq, mo, dw, Ix, Vy, FV, bm, te, bD, um, bL, eR, dK, uv, sM, cR, C, acj, uT, qp, aT, vH, bK, yb, an, af, ak, qw, ND, aaE, f, bNB, ajl, wg, nM, pZ, mf, IJ, hS, qX, uq, Zl, gb, vr, oH, av, ib, sO, ts, jo, bjP, uQ, eZ, aF, eK, apM, z, uR, aS, tr, tP, us); #c1(NOS3) c2(NP_001153581) c3(nitric oxide synthase, endothelial isoform 2) c4(60686) c5(60687) c6( ) c7(T, ea, bO, ci, aY, xy, dV, HR, hH, aa, ly, ahP, nY, GR, ba, Ip, wE, k, IS, aNn, uL, aEw, ht, cQ, aj, cd, sW, IG, bxi, aaL, ey, sp, vu, fQ, fe, ayt, dB, E, Dp, aA, cz, nS, q, Ql, cy, sR, Cy, dl, eu, bA, bf, bg, aeS, pb, rR, OW, tW, ac, mG, bcs, hr, ao, arS, iW, uG, mw, dG, uu, fu, ad, HF, yt, vJ, Aa, IQ, vP, WZ, ZE, ue, cH, cW, ag, dX, IC, ra, rk, ID, bM, ckX, e, ur, ip, x, Na, aif, bc, dH, hI, fH, as, ckU, mx, vy, bjL, tG, wx, dD, gU, aJr, md, Mo, ec, bmo, aOX, hi, MX, A, aRa, ty, sE, cA, cO, at, ut, fL, sa, sZ, B, mr, wL, fF, v, V, UE, WY, rS, MI, ae, HL, t, sK, acp, wO, hO, kV, HQ, dM, oR, eq, BY, LA, hD, vc, JK, ckW, sj, wc, Z, HI, D, gk, yE, wz, gZ, gB, Tw, y, aax, hv, fR, al, gf, wa, lu, Bc, M, K, wt, eL, wF, g, aBa, uC, Gs, U, uo, fC, m, P, sQ, sw, aw, aCQ, eh, fK, axc, Lv, Ff, wd, cM, kT, wk, mg, gv, gg, Pr, oe, jx, wo, j, eA, J, nX, Nc, bq, bPQ, kl, Y, ckV, r, iK, bmS, sn, c, hc, dh, wR, cS, dy, fD, gT, gx, sY, am, akd, aZ, bS, ah, gb, Jm, fU, dP, ji, uX, IR, cr, ga, adA, cgA, ckY, ei, vt, st, wH, acz, eb, dY, il, dQ, eN, hm, aAu, LG, aW, aOW, hJ, eM, wB, bWG, nw, qR, aEj, tp, wh, ez, ct, cc, h, jy, dL, vx, Gc, wC, aq, mo, dw, lx, Vy, FV, bm, te, bD, urn, bL, eR, dK, uv, sM, cR, C, acj, uT, qp, aT, vH, bK, yb, an, af, ak, qw, ND, aaE, f, bNB, ajl, wg, nM, pZ, mf, IJ, hS, qX, uq, Zl, qb, vr, oH, av, ib, sO, ts, jo, bjP, uQ, eZ, aF, eK, apM, z, uR, aS, tr, tP, us); #c1(NOS3) c2(NP_001153582) c3(nitric oxide synthase, endothelial isoform 3) c4(60688, 60689) c5(60690) c6( ) c7(T, ea, bO, ci, aY, xy, dV, HR, hH, aa, ly, ahP, nY, GR, ba, Ip, wE, k, IS, aNn, uL, aEw, ht, cQ, aj, cd, sW, IG, bxi, aaL, ey, sp, vu, fQ, fe, ayt, dB, E, Dp, aA, cz, nS, q, Ql, cy, sR, Cy, dl, eu, bA, bf, bg, aeS, pb, rR, OW, tW, ac, mG, bcs, hr, ao, arS, iW, uG, mw, dG, uu, fu, ad, HF, yt, vJ, Aa, IQ, vP, WZ, ZE, ue, cH, cW, ag, dX, IC, ra, rk, ID, bM, ckX, e, ur, ip, x, Na, aif, be, dH, hI, fH, as, ckU, mx, vy, bjL, tG, wx, dD, gU, aJr, md, Mo, ec, bmo, aOX, hi, MX, A, aRa, ty, sE, cA, cO, at, ut, fL, sa, sZ, B, mr, wL, fF, v, V, UE, WY, rS, MI, ae, HL, t, sK, acp, wO, hO, kV, HQ, dM, oR, eq, BY, LA, hD, vc, JK, ckW, sj, wc, Z, HI, D, gk, yE, wz, gZ, gB, Tw, y, aax, hv, fR, al, gf, wa, lu, Bc, M, K, wt, eL, wF, g, aBa, uC, Gs, U, uo, fC, m, P, sQ, sw, aw, aCQ, eh, fK, axc, Lv, Ff, wd, cM, kT, wk, mg, gv, gg, Pr, oe, jx, wo, j, eA, J, nX, Nc, bq, bPQ, kl, Y, ckV, r, iK, bmS, sn, c, hc, dh, wR, cS, dy, fD, gT, gx, sY, am, akd, aZ, bS, ah, gb, Jm, fU, dP, ji, uX, IR, cr, qa, adA, cgA, ckY, ei, vt, st, wH, acz, eb, dY, il, dQ, eN, hm, aAu, LG, aW, aOW, hJ, eM, wB, bWG, nw, gR, aEj, tp, wh, ez, et, cc, h, jy, dL, vx, Gc, wC, ag, mo, dw, lx, Vy, FV, bm, te, bD, um, bL, eR, dK, uv, sM, cR, C, acj, uT, qp, aT, vH, bK, yb, an, af, ak, qw, ND, aaE, f, bNB, ajl, wg, nM, pZ, mf, IJ, hS, qX, uq, Zl, gb, vr, oH, av, ib, sO, ts, jo, bjP, uQ, eZ, aF, eK, apM, z, uR, aS, tr, tP, us); #c1(NOS3) c2(NP_001153583) c3(nitric oxide synthase, endothelial isoform 4) c4(60691) c5(60692) c6( ) c7(T, ea, bO, ci, aY, xy, dV, HR, hH, aa, ly, ahP, nY, GR, ba, Ip, wE, k, IS, aNn, uL, aEw, ht, cQ, aj, cd, sW, IG, bxi, aaL, ey, sp, vu, fQ, fe, ayt, dB, E, Dp, aA, cz, nS, q, Ql, cy, sR, Cy, dl, eu, bA, bf, bg, aeS, pb, rR, OW, tW, ac, mG, bcs, hr, ao, arS, iW, uG, mw, dG, uu, fu, ad, HF, yt, vJ, Aa, IQ, vP, WZ, ZE, ue, cH, cW, ag, dX, IC, ra, rk, ID, bM, ckX, e, ur, ip, x, Na, aif, be, dH, hI, fH, as, ckU, mx, vy, bjL, tG, wx, dD, gU, aJr, md, Mo, ec, bmo, aOX, hi, MX, A, aRa, ty, sE, cA, cO, at, ut, fL, sa, sZ, B, mr, wL, fF, v, V, UE, WY, rS, MI, ae, HL, t, sK, acp, wO, hO, kV, HQ, dM, oR, eq, BY, LA, hD, vc, JK, ckW, sj, wc, Z, HI, D, gk, yE, wz, gZ, gB, Tw, y, aax, hv, fR, al, gf, wa, lu, Bc, M, K, wt, eL, wF, g, aBa, uC, Gs, U, uo, fC, m, P, sQ, sw, aw, aCQ, eh, fK, axc, Lv, Ff, wd, cM, kT, wk, mg, gv, gg, Pr, oe, jx, wo, j, eA, J, nX, Nc, bq, bPQ, kl, Y, ckV, r, iK, bmS, sn, c, hc, dh, wR, cS, dy, fD, gT, gx, sY, am, akd, aZ, bS, ah, gb, Jm, fU, dP, ji, uX, IR, cr, qa, adA, cgA, ckY, ei, vt, st, wH, acz, eb, dY, il, dQ, eN, hm, aAu, LG, aW, aOW, hJ, eM, wB, bWG, nw, qR, aEj, tp, wh, ez, et, cc, h, jy, dL, vx, Gc, wC, aq, mo, dw, lx, Vy, FV, bm, te, bD, um, bL, eR, dK, uv, sM, cR, C, acj, uT, qp, aT, vH, bK, yb, an, af, ak, qw, ND, aaE, f, bNB, ajl, wg, nM, pZ, mf, IJ, hS, gX, ug, Zl, gb, vr, oH, av, ib, sO, ts, jo, bjP, uQ, eZ, aF, eK, apM, z, uR, aS, tr, tP, us); #c1(NOSIP) c2(NP_057037) c3(nitric oxide synthase-interacting protein) c4(188577) c5(188578, 188579, 188580, 188581, 188582, 188583, 188584, 188585, 188586, 188587, 188588, 188589, 188590, 188591) c6( ) c7(Ou, ya); #c1(NOSTRIN) c2(NP_001034813) c3(nostrin isoform 2) c4(32349) c5(32350, 32351, 32352, 32353, 32354, 32355, 32356) c6( ) c7(gk, al, ac, bN); #c1(NOSTRIN) c2(NP_001165102) c3(nostrin isoform 4) c4(67479) c5(67480, 67481, 67482, 67483, 67484, 67485, 67486, 67487, 67488, 67489) c6( ) c7(gk, al, ac, bN); #c1(NOSTRIN) c2(NP_443178) c3(nostrin isoform 1) c4(229734) c5(229735, 229736, 229737, 229738, 229739) c6( ) c7(gk, al, ac, bN); #c1(NOTCH1) c2(NP_060087) c3(neurogenic locus notch homolog protein 1 preproprotein) c4(194085) c5(194086, 194087, 194088, 194089, 194090, 194091) c6( ) c7(T, os, aC, tQ, yS, if, fd, bB, ci, Qp, aR, ip, aJM, x, aE, dE, pX, K, hu, eL, Zm, cla, up, Jl, aW, Az, uY, g, as, eE, eF, cm, iP, qJ, ou, eM, nB, acw, Ig, aep, cj, CD, k, m, IS, ym, iu, wu, aDT, n, qN, b, ft, jz, i, kH, eV, hn, Df, Gc, aeJ, Vt, ack, aq, wU, bfW, dB, hk, eD, Vy, hL, pg, eo, qF, anx, bD, nz, ph, it, B, bL, fM, dA, eR, jp, yk, eX, aA, hy, bzl, V, akG, q, eA, Mg, Ig, nv, qK, aT, rO, dz, jj, ae, af, ne, jf, afG, bf, s, vT, iU, oV, Y, apK, r, en, cI, bQ, t, iK, amF, ck, sS, baz, nM, iM, dy, im, bt, rA, uG, jh, oZ, Fb, hF, ad, iC, av, hd, fX, ib, Rq, py, ji, wm, nJ, Yi, d, BN, je, qt, ff, eH, cr, eZ, aF, si, iV, iR, bz, arB, ckZ, bE, X, gZ, aS, be, adg, y, CW, jr, BA); #c1(NOTCH1) c2(XP_011517019) c3(neurogenic locus notch homolog protein 1 isoform X1) c4( ) c5(310509) c6(310510) c7(T, os, aC, tQ, yS, if, fd, bB, ci, Qp, aR, ip, aJM, x, aE, dE, pX, K, hu, eL, Zm, cla, up, Jl, aW, Az, uY, g, as, eE, eF, cm, iP, qJ, ou, eM, nB, acw, Iq, aep, cj, CD, k, m, IS, ym, iu, wu, aDT, n, qN, b, ft, jz, i, kH, eV, hn, Df, Gc, aeJ, Vt, ack, aq, wU, bfW, dB, hk, eD, Vy, hL, pg, eo, qF, anx, bD, nz, ph, it, B, bL, fM, dA, eR, jp, yk, eX, aA, hy, bzl, V, akG, q, eA, Mg, Ig, nv, qK, aT, rO, dz, jj, ae, af, ne, jf, afG, bf, s, vT, iU, oV, Y, apK, r, en, cl, bQ, t, iK, amF, ck, sS, baz, nM, iM, dy, im, bt, rA, uG, jh, oZ, Fb, hF, ad, iC, av, hd, fX, ib, Rq, py, ji, wm, nJ, Yi, d, BN, je, qt, ff, eH, cr, eZ, aF, si, iV, iR, bz, arB, ckZ, bE, X, gZ, aS, be, adg, y, GW, jr, BA); #c1(NOTCH2) c2(XP_011539821) c3(neurogenic locus notch homolog protein 2 isoform X1) c4( ) c5(338043, 338044, 338045, 338046, 338047, 338048) c6( ) c7(bL, gV, T, fM, bga, wu, if, e, qy, aA, jh, aj, v, qN, oc, Fc, q, J, ai, zn, eA, ip, Bl, hd, ib, MS, Rq, av, nv, dE, iu, jz, aT, h, wm, Od, Wr, bA, jf, d, ajT, hG, Jl, aW, cr, r, nY, aF, g, as, hJ, eE, uG, clb, cm, aHY, ck, clc, bLr, bKf, nB, dB, acw, vA, cj, aS, hh, bt, it, B, Ex, hS); #c1(NOTCH2) c2(XP_011539822) c3(neurogenic locus notch homolog protein 2 isoform X2) c4( ) c5(338049, 338050, 338051, 338052, 338053) c6( ) c7(bL, gV, T, fM, bga, wu, if, e, qy, aA, jh, aj, v, qN, oc, Fc, q, J, ai, zn, eA, ip, Bl, hd, ib, MS, Rq, av, nv, dE, iu, jz, aT, h, wm, Od, Wr, bA, jf, d, ajT, hG, Jl, aW, cr, r, nY, aF, g, as, hJ, eE, uG, clb, cm, aHY, ck, clc, bLr, bKf, nB, dB, acw, vA, cj, aS, hh, bt, it, B, Ex, hS); #c1(NOTCH3) c2(NP_000426) c3(neurogenic locus notch homolog protein 3 precursor) c4(8847) c5(8848, 8849, 8850, 8851, 8852, 8853, 8854) c6( ) c7(ID, T, ahf, aC, Tb, if, e, al, I, fd, ur, ci, Hr, x, bv, aif, abH, M, K, hm, ly, aW, vs, g, hJ, cm, eM, U, cj, k, m, vl, aw, n, fr, qN, cld, cd, aJr, Mo, clf, kH, hn, Jn, ey, bl, A, MD, ack, agF, adz, lx, hR, te, it, B, cz, cR, v, j, V, eA, PW, Mp, hb, aT, cy, cle, ae, ak, bf, Y, r, en, wA, t, kC, Vq, ck, baz, ac, c, clg, wg, nM, dy, vi, uq, uu, ad, av, Ae, Ot, oj, d, IR, ff, bz, dr, eK, gk, gZ, aS, tr, IC, Ex, BA); #c1(NOTCH3) c2(XP_005259981) c3(neurogenic locus notch homolog protein 3 isoform X1) c4(276352) c5(276353, 276354, 276355, 276356, 276357, 276358, 276359, 276360, 276361, 276362, 276363, 276364, 276365) c6( ) c7(ID, T, ahf, aC, Tb, if, e, al, I, fd, ur, ci, Hr, x, bv, aif, abH, M, K, hm, ly, aW, vs, g, hJ, cm, eM, U, cj, k, m, vl, aw, n, fr, qN, cld, cd, aJr, Mo, clf, kH, hn, Jn, ey, bl, A, MD, ack, agF, adz, lx, hR, te, it, B, cz, cR, v, j, V, eA, PW, Mp, hb, aT, cy, cle, ae, ak, bf, Y, r, en, wA, t, kC, Vq, ck, baz, ac, c, clg, wg, nM, dy, vi, uq, uu, ad, av, Ae, Ot, oj, d, IR, ff, bz, dr, eK, gk, gZ, aS, tr, IC, Ex, BA); #c1(NOTCH4) c2(NP_004548) c3(neurogenic locus notch homolog protein 4 preproprotein) c4(147508, 147509, 147510, 147511, 147512, 147513, 147514) c5(147515, 147516, 147517, 147518, 147519, 147520, 147521, 147522, 147523, 147524, 147525, 147526, 147527, 147528, 147529, 147530, 147531, 147532, 147533, 147534, 147535, 147536, 147537, 147538, 147539, 147540, 147541, 147542, 147543, 147544, 147545, 147546, 147547, 147548, 147549, 147550, 147551, 147552, 147553, 147554, 147555, 147556, 147557, 147558, 147559, 147560, 147561, 147562, 147563, 147564, 147565, 147566, 147567, 147568, 147569, 147570, 147571, 147572, 147573, 147574, 147575, 147576, 147577, 147578, 147579) c6( ) c7(bM, aC, wu, fG, al, jx, mS, ti, uu, ci, C, mF, hF, V, eA, BI, mW, BJ, qK, aT, hD, bK, ey, wm, mY, mV, af, cp, mU, A, B, aW, Y, cr, eZ, abn, pD, cI, aaO, iV, mZ, ph, mX, ck, gk, OW, kP, W, nB, cA, hL, y, mT, BA, vi); #c1(NOTUM) c2(NP_848588) c3(protein notum homolog precursor) c4(253895, 253896) c5(253897, 253898, 253899, 253900, 253901, 253902, 253903, 253904, 253905, 253906, 253907, 253908) c6( ) c7(B); #c1(NOV) c2(NP_002505) c3(protein NOV homolog precursor) c4(129384) c5(129385, 129386, 129387, 129388, 129389, 129390) c6( ) c7(T, kh, aC, oe, eb, KO, aj, fr, uE, V, eA, ad, J, er, fU, bv, aE, bOL, aT, By, dL, ae, eL, dx, cp, d, iU, aW, Y, eH, iw, as, cI, eF, t, uC, hc, hL, dy, m, Xu, bt); #c1(NOVA1) c2(NP_002506) c3(RNA-binding protein Nova-1 isoform 1) c4(129391, 129392) c5(129393, 129394, 129395, 129396, 129397, 129398, 129399, 129400, 129401, 129402, 129403, 129404) c6( ) c7(akx, clh, oe, e, alv, bK, aen, eA, aR); #c1(NOVA1) c2(NP_006480) c3(RNA-binding protein Nova-1 isoform 2) c4(165583) c5(165584, 165585, 165586, 165587, 165588, 165589) c6( ) c7(akx, clh, oe, e, alv, bK, aen, eA, aR); #c1(NOVA1) c2(NP_006482) c3(RNA-binding protein Nova-1 isoform 3) c4(165590) c5(165591, 165592, 165593, 165594, 165595, 165596) c6( ) c7(akx, clh, oe, e, alv, bK, aen, eA, aR); #c1(NOVA1) c2(XP_011535102) c3(RNA-binding protein Nova-1 isoform X1) c4( ) c5(331892) c6( ) c7(akx, clh, oe, e, alv, bK, aen, eA, aR); #c1(NOVA2) c2(NP_002507) c3(RNA-binding protein Nova-2) c4(129405) c5(129406, 129407, 129408, 129409, 129410, 129411) c6( ) c7(bM, T, Uc, clh, aZ, aD, if, bO, aA, Bm, cz, clj, bS, j, ct, ci, v, qN, fr, Ul, q, aR, tO, eA, x, hd, aOu, nz, aT, K, IQ, he, aDp, eN, af, Jc, OV, d, s, aW, aft, r, fe, aF, g, pm, Z, FX, t, f, cm, qa, op, hq, ck, bN, pH, ac, cli, nB, vA, ayS, qy, at, Rm, aS, m, k, dy, xg); #c1(NOX1) c2(NP_001258744) c3(NADPH oxidase 1 isoform 3) c4(96470) c5(96471, 96472, 96473, 96474, 96475, 96476, 96477, 96478, 96479, 96480, 96481, 96482, 96483, 96484, 96485, 96486, 96487) c6( ) c7(bL, T, dD, Ol, al, cz, bB, eq, ci, C, cd, q, ad, iu, BI, aT, h, ji, K, ae, cp, wC, YL, d, IR, s, cH, Cu, Y, Rr, r, kt, g, uC, ck, D, bE, eB, aS, vt, X); #c1(NOX1) c2(NP_008983) c3(NADPH oxidase 1 isoform 1) c4(170047, 170048, 170049) c5(170050, 170051, 170052, 170053, 170054, 170055, 170056) c6( ) c7(bL, T, dD, Ol, al, cz, bB, eq, ci, C, cd, q, ad, iu, BI, aT, h, ji, K, ae, cp, wC, YL, d, IR, s, cH, Cu, Y, Rr, r, kt, g, uC, ck, D, bE, eB, aS, vt, X); #c1(NOX1) c2(NP_039249) c3(NADPH oxidase 1 isoform 2) c4(176932, 176933) c5(176934, 176935, 176936, 176937, 176938, 176939, 176940, 176941, 176942, 176943, 176944, 176945, 176946, 176947, 176948, 176949, 176950) c6( ) c7(bL, T, dD, Ol, al, cz, bB, eq, ci, C, cd, q, ad, iu, BI, aT, h, ji, K, ae, cp, wC, YL, d, IR, s, cH, Cu, Y, Rr, r, kt, g, uC, ck, D, bE, eB, aS, vt, X); #c1(NOX3) c2(NP_056533) c3(NADPH oxidase 3) c4(187978) c5(187979, 187980, 187981, 187982, 187983, 187984, 187985, 187986) c6( ) c7(bM, aC, mQ, cz, h, fe, k); #c1(NOX4) c2(NP_001137308) c3(NADPH oxidase 4 isoform b) c4(55431) c5(55432, 55433, 55434, 55435, 55436, 55437, 55438, 55439, 55440, 55441, 55442, 55443) c6( ) c7(bL, bM, T, ID, aC, eR, fG, e, al, jx, cz, cR, bB, aj, dG, j, bh, fr, cd, J, eA, BY, eJ, hd, aE, sN, aT, h, IG, cy, K, bq, cp, bA, wC, Lu, A, d, B, bf, cW, aW, Y, ev, aq, kp, as, iR, t, iK, bz, LB, ck, es, ac, c, bE, go, aS, IC, X); #c1(NOX4) c2(NP_001278856) c3(NADPH oxidase 4 isoform e) c4(110726) c5(110727, 110728, 110729, 110730, 110731, 110732, 110733, 110734, 110735, 110736) c6( ) c7(bL, bM, T, ID, aC, eR, fG, e, al, jx, cz, cR, bB, aj, dG, j, bh, fr, cd, J, eA, BY, eJ, hd, aE, sN, aT, h, IG, cy, K, bq, cp, bA, wC, Lu, A, d, B, bf, cW, aW, Y, ev, aq, kp, as, iR, t, iK, bz, LB, ck, es, ac, c, bE, go, aS, IG, X); #c1(NOX4) c2(NP_001278858) c3(NADPH oxidase 4 isoform f) c4(110737) c5( ) c6( ) c7(bL, bM, T, ID, aC, eR, fG, e, al, jx, cz, cR, bB, aj, dG, j, bh, fr, cd, J, eA, BY, eJ, hd, aE, sN, aT, h, IG, cy, K, bq, cp, bA, wC, Lu, A, d, B, bf, cW, aW, Y, ev, aq, kp, as, iR, t, iK, bz, LB, ck, es, ac, c, bE, go, aS, IG, X); #c1(NOX4) c2(NP_058627) c3(NADPH oxidase 4 isoform a) c4(192840, 192841) c5(192842, 192843, 192844, 192845, 192846, 192847, 192848) c6( ) c7(bL, bM, T, ID, aC, eR, fG, e, al, jx, cz, cR, bB, aj, dG, j, bh, fr, cd, J, eA, BY, eJ, hd, aE, sN, aT, h, IG, cy, K, bq, cp, bA, wC, Lu, A, d, B, bf, cW, aW, Y, ev, aq, kp, as, iR, t, iK, bz, LB, ck, es, ac, c, bE, go, aS, IG, X); #c1(NOX4) c2(XP_011541159) c3(NADPH oxidase 4 isoform X1) c4(339717) c5(339718, 339719, 339720, 339721, 339722, 339723, 339724, 339725, 339726, 339727, 339728, 339729, 339730, 339731, 339732, 339733, 339734) c6( ) c7(bL, bM, T, ID, aC, eR, fG, e, al, jx, cz, cR, bB, aj, dG, j, bh, fr, cd, J, eA, BY, eJ, hd, aE, sN, aT, h, IG, cy, K, bq, cp, bA, wC, Lu, A, d, B, bf, cW, aW, Y, ev, aq, kp, as, iR, t, iK, bz, LB, ck, es, ac, c, bE, go, aS, IG, X); #c1(NOX4) c2(XP_011541160) c3(NADPH oxidase 4 isoform X3) c4(339735) c5(339736, 339737, 339738, 339739, 339740, 339741) c6( ) c7(bL, bM, T, ID, aC, eR, fG, e, al, jx, cz, cR, bB, aj, dG, j, bh, fr, cd, J, eA, BY, eJ, hd, aE, sN, aT, h, IG, cy, K, bq, cp, bA, wC, Lu, A, d, B, bf, cW, aW, Y, ev, aq, kp, as, iR, t, iK, bz, LB, ck, es, ac, c, bE, go, aS, IC, X); #c1(NOX4) c2(XP_011541161) c3(NADPH oxidase 4 isoform X2) c4( ) c5(339742, 339743, 339744, 339745, 339746, 339747) c6( ) c7(bL, bM, T, ID, aC, eR, fG, e, al, jx, cz, cR, bB, aj, dG, j, bh, fr, cd, J, eA, BY, eJ, hd, aE, sN, aT, h, IG, cy, K, bq, cp, bA, wC, Lu, A, d, B, bf, cW, aW, Y, ev, aq, kp, as, iR, t, iK, bz, LB, ck, es, ac, c, bE, go, aS, IC, X); #c1(NOX5) c2(NP_001171708) c3(NADPH oxidase 5 isoform 2) c4(71361) c5(71362, 71363, 71364, 71365, 71366, 71367) c6( ) c7(T, dD, pf, ea, acl, aw, cz, aj, j, eq, aY, cd, ad, J, h, K, ae, hm, d, g, bz, eB, II, fP, gZ, dy, cE); #c1(NOX5) c2(NP_001171709) c3(NADPH oxidase 5 isoform 3) c4(71368) c5(71369, 71370, 71371, 71372, 71373, 71374) c6( ) c7(T, dD, pf, ea, acl, aw, cz, aj, j, eq, aY, cd, ad, J, h, K, ae, hm, d, g, bz, eB, II, fP, gZ, dy, cE); #c1(NOX5) c2(NP_078781) c3(NADPH oxidase 5 isoform 1) c4(215448) c5(215449, 215450, 215451, 215452, 215453, 215454) c6( ) c7(T, dD, pf, ea, acl, aw, cz, aj, j, eq, aY, cd, ad, J, h, K, ae, hm, d, g, bz, eB, II, fP, gZ, dy, cE); #c1(NOXA1) c2(NP_001242997) c3(NADPH oxidase activator 1 isoform 3) c4(89506) c5(89507, 89508, 89509, 89510, 89511, 89512) c6( ) c7(T, dD, bE, ea, bB, aS, K, eq, g); #c1(NOXA1) c2(NP_006638) c3(NADPH oxidase activator 1 isoform 1) c4(166827) c5(166828, 166829, 166830, 166831, 166832, 166833) c6( ) c7(T, dD, bE, ea, bB, aS, K, eq, g); #c1(NOXO1) c2(NP_653204) c3(NADPH oxidase organizer 1 isoform a) c4(239057) c5(239058, 239059, 239060, 239061, 239062, 239063) c6( ) c7(YL, aA, bvS, K, g, ZN); #c1(NOXO1) c2(NP_751907) c3(NADPH oxidase organizer 1 isoform b) c4(248508) c5(248509, 248510, 248511, 248512, 248513, 248514) c6( ) c7(YL, aA, bvS, K, g, ZN); #c1(NOXO1) c2(XP_005255156) c3(NADPH oxidase organizer 1 isoform X1) c4(273563) c5(273564, 273565, 273566, 273567, 273568, 273569) c6( ) c7(YL, aA, bvS, K, g, ZN); #c1(NPAP1) c2(NP_061831) c3(nuclear pore-associated protein 1) c4(200673) c5(200674, 200675, 200676, 200677, 200678, 200679, 200680) c6( ) c7(Y, rc, agl); #c1(NPAS2) c2(NP_002509) c3(neuronal PAS domain-containing protein 2) c4(129412) c5(129413, 129414, 129415, 129416, 129417) c6( ) c7(aPY, T, d, iH, aW, iW, jh, aT, ta, bK, ei, Z, oi, ae, ad, bN, dS); #c1(NPAS2) c2(XP_005264010) c3(neuronal PAS domain-containing protein 2 isoform X1) c4(278644) c5(278645, 278646, 278647, 278648, 278649, 278650, 278651) c6( ) c7(aPY, T, d, iH, aW, iW, jh, aT, ta, bK, ei, Z, oi, ae, ad, bN, dS); #c1(NPAS3) c2(NP_001158221) c3(neuronal PAS domain-containing protein 3 isoform 1) c4(63436, 63437) c5(63438, 63439, 63440, 63441, 63442, 63443, 63444, 63445, 63446, 63447, 63448, 63449) c6( ) c7(d, bO, gl, uJ, bK, nA, as, he, ZW, eA, xt, jb); #c1(NPAS3) c2(NP_001159365) c3(neuronal PAS domain-containing protein 3 isoform 4) c4(63869) c5(63870, 63871, 63872, 63873, 63874, 63875) c6( ) c7(d, bO, gl, uJ, bK, nA, as, he, ZW, eA, xt, jb); #c1(NPAS3) c2(NP_071406) c3(neuronal PAS domain-containing protein 3 isoform 2) c4(211473) c5(211474, 211475, 211476, 211477, 211478, 211479, 211480, 211481, 211482, 211483, 211484, 211485) c6( ) c7(d, bO, gl, uJ, bK, nA, as, he, ZW, eA, xt, jb); #c1(NPAS3) c2(NP_775182) c3(neuronal PAS domain-containing protein 3 isoform 3) c4(249650) c5(249651, 249652, 249653, 249654, 249655, 249656) c6( ) c7(d, bO, gl, uJ, bK, nA, as, he, ZW, eA, xt, jb); #c1(NPAS3) c2(XP_005268049) c3(neuronal PAS domain-containing protein 3 isoform X4) c4(281426) c5( ) c6( ) c7(d, bO, gl, uJ, bK, nA, as, he, ZW, eA, xt, jb); #c1(NPAS4) c2(NP_849195) c3(neuronal PAS domain-containing protein 4) c4(254500, 254501) c5(254502, 254503, 254504, 254505, 254506, 254507, 254508, 254509, 254510, 254511, 254512) c6( ) c7(cm, Hx); #c1(NPAS4) c2(XP_011543240) c3(neuronal PAS domain-containing protein 4 isoform X1) c4( ) c5(342027) c6( ) c7(cm, Hx); #c1(NPAT) c2(NP_002510) c3(protein NPAT) c4(129418) c5(129419, 129420, 129421, 129422, 129423, 129424) c6( ) c7(if, eX, VT, cj, eV, dL, bC, qN); #c1(NPB) c2(NP_683694) c3(neuropeptide B preproprotein) c4(242386) c5(242387, 242388, 242389, 242390, 242391, 242392, 242393) c6(242394) c7(kl, clk, ek, cG); #c1(NPBWR1) c2(NP_005276) c3(neuropeptides B/W receptor type 1) c4(154649) c5(154650, 154651, 154652, 154653, 154654, 154655) c6( ) c7(c, n, aj, fu, ae, ad); #c1(NPC1) c2(NP_000262) c3(Niemann-Pick C1 protein precursor) c4(5895, 5896) c5(5897, 5898, 5899, 5900, 5901, 5902, 5903, 5904, 5905, 5906, 5907, 5908, 5909, 5910, 5911, 5912, 5913, 5914, 5915) c6( ) c7(oO, bL, T, dD, iW, e, aoE, al, aA, cz, fd, v, j, ci, qf, aVK, ee, eq, q, aR, bCZ, eA, ke, Hx, MR, WY, rC, oW, h, K, IQ, qM, fb, af, avV, d, clm, clk, xs, hl, fc, r, Io, aF, g, anW, bz, VZ, AH, U, cll, Lp, akH, Lq, act, cP, du, Al, ek); #c1(NPC1) c2(XP_005258335) c3(Niemann-Pick C1 protein isoform X2) c4(275640) c5( ) c6( ) c7(oO, bL, T, dD, iW, e, aoE, al, aA, cz, fd, v, j, ci, qf, aVK, ee, eq, q, aR, bCZ, eA, ke, Hx, MR, WY, rC, oW, h, K, IQ, qM, fb, af, avV, d, clm, clk, xs, hl, fc, r, Io, aF, g, anW, bz, VZ, AH, U, cll, Lp, akH, Lq, act, cP, du, Al, ek); #c1(NPC1L1) c2(NP_001095118) c3(Niemann-Pick C1-like protein 1 isoform 2 precursor) c4(40787, 40788) c5(40789, 40790, 40791, 40792, 40793, 40794, 40795, 40796, 40797, 40798, 40799, 40800) c6( ) c7(jF, cl, ZV, cH, gZ, aj, v, j, bq, dQ, ZG); #c1(NPC1L1) c2(NP_037521) c3(Niemann-Pick C1-like protein 1 isoform 1 precursor) c4(175984) c5(175985, 175986, 175987, 175988, 175989, 175990) c6( ) c7(jF, cl, ZV, cH, gZ, aj, v, j, bq, dQ, ZG); #c1(NPC1L1) c2(XP_011513629) c3(Niemann-Pick C1-like protein 1 isoform X2) c4( ) c5(305942) c6( ) c7(jF, cl, ZV, cH, gZ, aj, v, j, bq, dQ, ZG); #c1(NPC2) c2(NP_006423) c3(epididymal secretory protein E1 precursor) c4(164920, 164921) c5(164922, 164923, 164924, 164925, 164926, 164927, 164928, 164929, 164930, 164931, 164932, 164933, 164934) c6( ) c7(bL, T, iW, al, fr, bX, hd, Db, WY, aT, jy, af, Y, aXY, dq, aq, iR, dr, gk, nM, aDA, nB, U, cll, Lq, act, du, ek); #c1(NPDC1) c2(NP_056207) c3(neural proliferation differentiation and control protein 1 precursor) c4(186318, 186319, 186320) c5(186321, 186322, 186323, 186324, 186325, 186326, 186327, 186328, 186329, 186330, 186331, 186332) c6( ) c7(aT); #c1(NPEPL1) c2(NP_001191801) c3(probable aminopeptidase NPEPL1 isoform 2) c4(81820) c5(81821, 81822, 81823, 81824, 81825, 81826) c6( ) c7(aW, aT); #c1(NPEPL1) c2(NP_001191802) c3(probable aminopeptidase NPEPL1 isoform 3) c4(81827) c5(81828, 81829, 81830, 81831, 81832, 81833) c6( ) c7(aW, aT); #c1(NPEPL1) c2(NP_078939) c3(probable aminopeptidase NPEPL1 isoform 1) c4(216195) c5(216196, 216197, 216198, 216199, 216200, 216201) c6( ) c7(aW, aT); #c1(NPEPPS) c2(NP_006301) c3(purnmycin-sensitive aminopeptidase) c4(163829, 163830, 163831, 163832, 163833) c5( ) c6( ) c7(gh, T, dA, WA, rQ, Hn, n, Fb, ci, eW, ad, aE, aT, ji, ae, Ub, aW, cr, g, t, hq, pu, GU, Jr, m, LS); #c1(NPEPPS) c2(XP_011523798) c3(puromycin-sensitive aminopeptidase isoform X1) c4( ) c5(318298, 318299, 318300, 318301, 318302, 318303, 318304, 318305, 318306, 318307, 318308, 318309, 318310, 318311, 318312, 318313, 318314, 318315, 318316, 318317, 318318, 318319, 318320, 318321, 318322, 318323, 318324, 318325, 318326, 318327) c6( ) c7(gh, T, dA, WA, rQ, Hn, n, Fb, ci, eW, ad, aE, aT, ji, ae, Ub, aW, cr, g, t, hq, pu, GU, Jr, m, LS); #c1(NPFF) c2(NP_003708) c3(pro-FMRFamide-related neuropeptide FF preproprotein) c4(140326) c5(140327, 140328, 140329, 140330, 140331, 140332, 140333, 140334) c6(140335, 140336) c7(cm, gu); #c1(NPFFR2) c2(NP_001138228) c3(neuropeptide FF receptor 2 isoform 3) c4(56062) c5(56063, 56064, 56065, 56066, 56067, 56068, 56069) c6( ) c7(cm, v, j); #c1(NPFFR2) c2(NP_004876) c3(neurnpeptide FF receptor 2 isoform 1) c4(150474, 150475, 150476) c5(150477, 150478, 150479, 150480, 150481, 150482, 150483, 150484, 150485, 150486, 150487) c6( ) c7(cm, v, j); #c1(NPFFR2) c2(NP_444264) c3(neurnpeptide FF receptor 2 isoform 2) c4(230201) c5(230202, 230203, 230204, 230205, 230206, 230207) c6( ) c7(cm, v, j); #c1(NPHP1) c2(NP_000263) c3(nephrncystin-1 isoform 1) c4(5916) c5(5917, 5918, 5919, 5920, 5921, 5922) c6( ) c7(aKZ, blk, W, eR, vj, wB, KA, vw, vm, Sq, nw, dy, nA, uD, GF, Sp, Tp, vN, aY); #c1(NPHP1) c2(NP_001121650) c3(nephrocystin-1 isoform 3) c4(46020) c5(46021, 46022, 46023, 46024, 46025, 46026) c6( ) c7(aKZ, blk, W, eR, vj, wB, KA, vw, vm, Sq, nw, dy, nA, uD, GF, Sp, Tp, vN, aY); #c1(NPHP1) c2(NP_001121651) c3(nephrocystin-1 isoform 4) c4(46027) c5(46028, 46029, 46030, 46031, 46032, 46033) c6( ) c7(aKZ, blk, W, eR, vj, wB, KA, vw, vm, Sq, nw, dy, nA, uD, GF, Sp, Tp, vN, aY); #c1(NPHP1) c2(NP_997064) c3(nephrocystin-1 isoform 2) c4(265012) c5(265013, 265014, 265015, 265016, 265017, 265018) c6( ) c7(aKZ, blk, W, eR, vj, wB, KA, vw, vm, Sq, nw, dy, nA, uD, GF, Sp, Tp, vN, aY); #c1(NPHP3) c2(NP_694972) c3(nephrocystin-3) c4(245513, 245514, 245515, 245516, 245517, 245518) c5(245519, 245520, 245521, 245522, 245523, 245524, 245525, 245526, 245527, 245528, 245529, 245530, 245531, 245532, 245533, 245534, 245535, 245536, 245537, 245538, 245539, 245540, 245541, 245542, 245543, 245544, 245545, 245546, 245547, 245548, 245549, 245550, 245551, 245552, 245553, 245554) c6( ) c7(aKZ, eR, BV, cln, bKt, wB, clo, vm, nw, v, Nj, aBZ, bTa, Sp, nC, vN, aY); #c1(NPHP4) c2(NP_001278522) c3(nephrocystin-4 isoform b) c4( ) c5(109788, 109789, 109790, 109791, 109792) c6( ) c7(aKZ, clq, clp, vm, clr, dy, bD, Sp, nC, Nh); #c1(NPHP4) c2(XP_011539522) c3(nephrocystin-4 isoform X6) c4(337722) c5(337723) c6( ) c7(aKZ, clq, clp, vm, clr, dy, bD, Sp, nC, Nh); #c1(NPHS1) c2(NP_004637) c3(nephrin precursor) c4(148410, 148411) c5(148412, 148413, 148414, 148415, 148416, 148417, 148418, 148419, 148420, 148421, 148422, 148423) c6( ) c7(bL, Kl, eR, dK, cz, zN, n, dG, ah, aY, er, cis, vw, ey, K, Bz, wt, sj, A, PK, vj, gi, aEW, uC, dr, sk, vW, wE, hc, va, dy, fy, uL, jr); #c1(NPHS2) c2(NP_001284504) c3(podocin isoform 2) c4(111937) c5(111938, 111939, 111940, 111941, 111942, 111943) c6( ) c7(dD, eR, ea, dK, cz, zN, n, cQ, ah, aj, uE, j, eq, aY, uW, UI, J, er, fU, vw, vH, h, ey, wt, DX, afJ, sj, A, PK, acF, gi, aEW, agn, dr, sk, aLO, vW, gZ, va, dy, R, oQ, uL); #c1(NPHS2) c2(NP_055440) c3(podocin isoform 1) c4(181151) c5(181152, 181153, 181154, 181155, 181158, 181157) c6( ) c7(dD, eR, ea, dK, cz, zN, n, cQ, ah, aj, uE, j, eq, aY, uW, UI, J, er, fU, vw, vH, h, ey, wt, DX, afJ, sj, A, PK, acF, gi, aEW, agn, dr, sk, aLO, vW, gZ, va, dy, R, oQ, uL); #c1(NPL) c2(NP_001186979) c3(N-acetylneuraminate lyase isoform 2) c4(78915, 78916, 78917) c5(78918, 78919, 78920, 78921, 78922, 78923, 78924, 78925, 78926, 78927, 78928, 78929, 78930, 78931, 78932, 78933, 78934, 78935) c6( ) c7(T, cz, mS, ww, q, ad, mW, iX, bK, ey, mY, mV, ae, mU, A, tb, sp, r, fe, gl, SG, iV, eE, mZ, mX, arz, Kr, uJ, mT); #c1(NPL) c2(NP_001186980) c3(N-acetylneuraminate lyase isoform 4) c4(78936) c5(78937, 78938, 78939, 78940, 78941, 78942, 78943, 78944, 78945, 78946) c6( ) c7(T, cz, mS, ww, q, ad, mW, iX, bK, ey, mY, mV, ae, mU, A, tb, sp, r, fe, gl, SG, iV, eE, mZ, mX, arz, Kr, uJ, mT); #c1(NPL) c2(NP_001186981) c3(N-acetylneuraminate lyase isoform 5) c4( ) c5(78947, 78948, 78949, 78950, 78951, 78952) c6( ) c7(T, cz, mS, ww, q, ad, mW, iX, bK, ey, mY, mV, ae, mU, A, tb, sp, r, fe, gl, SG, iV, eE, mZ, mX, arz, Kr, uJ, mT); #c1(NPL) c2(NP_110396) c3(N-acetylneuraminate lyase isoform 1) c4(220033, 220034) c5(220035, 220036, 220037, 220038, 220039, 220040, 220041, 220042, 220043, 220044) c6( ) c7(T, cz, mS, ww, q, ad, mW, iX, bK, ey, mY, mV, ae, mU, A, tb, sp, r, fe, gl, SG, iV, eE, mZ, mX, arz, Kr, uJ, mT); #c1(NPLOC4) c2(NP_060391) c3(nuclear protein localization protein 4 homolog) c4(195791) c5(195792, 195793, 195794, 195795, 195796, 195797) c6( ) c7(t); #c1(NPLOC4) c2(XP_011523281) c3(nuclear protein localization protein 4 homolog isoform X1) c4(317791, 317792) c5(317793, 317794, 317795, 317796, 317797, 317798, 317799, 317800, 317801, 317802, 317803, 317804) c6( ) c7(t); #c1(NPM1) c2(NP_001032827) c3(nucleophosmin isoform 3) c4(31476) c5(31477, 31478, 31479, 31480, 31481, 31482) c6( ) c7(T, os, al, fd, bB, ci, x, aE, Iv, K, eL, aW, CT, bFG, Fu, eF, cm, bw, Qt, eM, iT, dc, cj, k, Wx, n, fr, Tl, br, b, KN, h, eV, dL, PX, aq, yq, cM, oU, bP, hk, hL, pg, B, fM, dA, eX, aA, ol, q, er, dn, aT, dz, adV, jj, s, iU, xR, oV, iZ, bvJ, r, gm, en, cl, ck, Ta, Uq, bt, iW, jh, bs, oZ, hF, ad, av, fX, ds, bvF, d, et, ff, aF, iR, bz, bE, i, kS, bEt, Tc); #c1(NPM1) c2(NP_002511) c3(nucleophosmin isoform 1) c4(129425) c5(129426, 129427, 129428, 129429, 129430, 129431, 129432, 129433, 129434, 129435) c6( ) c7(T, os, al, fd, bB, ci, x, aE, Iv, K, eL, aW, CT, bFG, Fu, eF, cm, bw, Qt, eM, iT, dc, cj, k, Wx, n, fr, Tl, br, b, KN, h, eV, dL, PX, aq, yq, cM, oU, bP, hk, hL, pg, B, fM, dA, eX, aA, el, q, er, dn, aT, dz, adV, jj, s, iU, xR, oV, iZ, bvJ, r, gm, en, cl, ck, Ta, Uq, bt, iW, jh, bs, oZ, hF, ad, av, fX, ds, bvF, d, et, ff, aF, iR, bz, bE, i, kS, bEt, Tc); #c1(NPM1) c2(NP_954654) c3(nucleophosmin isoform 2) c4(261176) c5(261177, 261178, 261179, 261180, 261181, 261182) c6( ) c7(T, os, al, fd, bB, ci, x, aE, Iv, K, eL, aW, CT, bFG, Fu, eF, cm, bw, Qt, eM, iT, dc, cj, k, Wx, n, fr, Tl, br, b, KN, h, eV, dL, PX, aq, yq, cM, oU, bP, hk, hL, pg, B, fM, dA, eX, aA, ol, q, er, dn, aT, dz, adV, jj, s, iU, xR, oV, iZ, bvJ, r, gm, en, cl, ck, Ta, Uq, bt, iW, jh, bs, oZ, hF, ad, av, fX, ds, bvF, d, et, ff, aF, iR, bz, bE, i, kS, bEt, Tc); #c1(NPM2) c2(NP_001273610) c3(nucleoplasmin-2 isoform 2) c4(105435) c5(105436, 105437, 105438, 105439, 105440, 105441) c6( ) c7(ck, bt, aT); #c1(NPM2) c2(NP_877724) c3(nuclenplasmin-2 isoform 1) c4(256934) c5(256935, 256936, 256937, 256938, 256939, 256940, 256941, 256942, 256943, 256944, 256945, 256946, 256947, 256948) c6( ) c7(ck, bt, aT); #c1(NPM2) c2(XP_011542661) c3(nuclenplasmin-2 isoform X2) c4( ) c5(341222, 341223, 341224, 341225) c6( ) c7(ck, bt, aT); #c1(NPNT) c2(NP_001028219) c3(nephronectin isoform 8 precursor) c4(30367) c5(30368, 30369, 30370, 30371, 30372, 30373, 30374, 30375) c6(30376, 30377) c7(aW, Y, aT, at, Dp, aa); #c1(NPNT) c2(NP_001171619) c3(nephrnnectin isoform A precursor) c4(70934) c5(70935, 70936, 70937, 70938, 70939, 70940, 70941, 70942) c6(70943, 70944) c7(aW, Y, aT, at, Dp, aa); #c1(NPNT) c2(NP_001171620) c3(nephrnnectin isoform C precursor) c4(70945) c5(70946, 70947, 70948, 70949, 70950, 70951, 70952, 70953) c6(70954, 70955) c7(aW, Y, aT, at, Dp, aa); #c1(NPNT) c2(NP_001171621) c3(nephrnnectin isoform D precursor) c4(70956, 70957) c5(70958, 70959, 70960, 70961, 70962, 70963, 70964, 70965, 70966, 70967, 70968, 70969, 70970, 70971, 70972, 70973) c6(70974, 70975, 70976, 70977) c7(aW, Y, aT, at, Dp, aa); #c1(NPNT) c2(NP_001171622) c3(nephrnnectin isoform E precursor) c4(70978) c5(70979, 70980, 70981, 70982, 70983, 70984, 70985, 70986) c6(70987, 70988) c7(aW, Y, aT, at, Dp, aa); #c1(NPPC) c2(NP_077720) c3(C-type natriuretic peptide precursor) c4(215274) c5(215275, 215276, 215277, 215278, 215279, 215280, 215281, 215282, 215283, 215284, 215285, 215286, 215287, 215288) c6(215289, 215290, 215291, 215292) c7(bM, dD, ea, e, aw, cz, aNN, cR, tc, bS, ah, ct, bBb, j, eq, GC, Fc, cd, ad, aRo, ws, Bc, rD, hP, K, he, af, yo, si, as, Z, kT, gZ, dy, xb, vQ); #c1(NPR1) c2(NP_000897) c3(atrial natriuretic peptide receptor 1 precursor) c4(17005) c5(17006, 17007, 17008, 17009, 17010, 17011) c6( ) c7(bL, sY, T, e, aw, gN, cz, vr, v, j, cd, ad, h, ae, Y, uU, t, uC, qa, gZ, dy, m, fy, it); #c1(NPR1) c2(XP_005245275) c3(atrial natriuretic peptide receptor 1 isoform X3) c4(266381) c5(266382, 266383, 266384, 266385, 266386, 266387, 266388, 266389, 266390, 266391, 266392, 266393) c6( ) c7(bL, sY, T, e, aw, gN, cz, vr, v, j, cd, ad, h, ae, Y, uU, t, uC, qa, gZ, dy, m, fy, it); #c1(NPR1) c2(XP_006711405) c3(atrial natriuretic peptide receptor 1 isoform X1) c4(286007) c5( ) c6( ) c7(bL, sY, T, e, aw, gN, cz, vr, v, j, cd, ad, h, ae, Y, uU, t, uC, qa, gZ, dy, m, fy, it); #c1(NPR2) c2(NP_003986) c3(atrial natriuretic peptide receptor 2 precursor) c4(142655) c5(142656, 142657, 142658, 142659, 142660, 142661) c6( ) c7(bL, T, yo, ac, s, e, cz, rD, ade, bBb, mo, pk, rv, cd, qa, eK, bBg); #c1(NPR3) c2(NP_000899) c3(atrial natriuretic peptide receptor 3 isoform 2 precursor) c4(17012) c5(17013, 17014, 17015, 17016, 17017, 17018) c6( ) c7(qa, bM, jf, tW, ac, Bc, e, M, cz, vy, v, j, ji, he, cd, ad); #c1(NPR3) c2(NP_001191304) c3(atrial natriuretic peptide receptor 3 isoform 1 precursor) c4(81351) c5(81352, 81353, 81354, 81355, 81356, 81357) c6( ) c7(qa, bM, jf, tW, ac, Bc, e, M, cz, vy, v, j, ji, he, cd, ad); #c1(NPR3) c2(NP_001191305) c3(atrial natriuretic peptide receptor 3 isoform 3) c4(81358) c5(81359, 81360, 81361, 81362, 81363, 81364) c6( ) c7(qa, bM, jf, tW, ac, Bc, e, M, cz, vy, v, j, ji, he, cd, ad); #c1(NPRL2) c2(NP_006536) c3(nitrogen permease regulator 2-like protein) c4(166082) c5(166083, 166084, 166085, 166086, 166087, 166088) c6( ) c7(av, yo, s, eM, ff, rD, bBb, mo, en, qN, g, bz, cd, bBg); #c1(NPRL3) c2(NP_001034565) c3(nitrogen permease regulator 3-like protein isoform 2) c4( ) c5(31798, 31799, 31800, 31801, 31802) c6( ) c7(jf, BU, ER); #c1(NPRL3) c2(NP_001070818) c3(nitrogen permease regulator 3-like protein isoform 1) c4(34842, 34843) c5(34844, 34845, 34846, 34847, 34848, 34849) c6( ) c7(jf, BU, ER); #c1(NPRL3) c2(NP_001230176) c3(nitrogen permease regulator 3-like protein isoform 3) c4( ) c5(86053) c6( ) c7(jf, BU, ER); #c1(NPRL3) c2(NP_001230178) c3(nitrogen permease regulator 3-like protein isoform 4) c4(86054, 86055) c5(86056, 86057, 86058, 86059, 86060, 86061, 86062, 86063, 86064, 86065, 86066) c6( ) c7(jf, BU, ER); #c1(NPRL3) c2(XP_011520973) c3(nitrogen permease regulator 3-like protein isoform X6) c4( ) c5(315950) c6( ) c7(jf, BU, ER); #c1(NPS) c2(NP_001025184) c3(neurnpeptide S precursor) c4(29464) c5(29465, 29466, 29467, 29468, 29469, 29470) c6( ) c7(ID, bM, T, hq, pn, wM, tb, eM, ju, cu, abj, ww, K, IC, BY); #c1(NPSR1) c2(NP_001287863) c3(neuropeptide S receptor isoform F) c4(113062, 113063) c5(113064, 113065, 113066, 113067, 113068, 113069, 113070, 113071, 113072, 113073, 113074, 113075, 113076, 113077, 113078, 113079, 113080, 113081) c6( ) c7(bM, Dw, aCA, fF, ww, aql, PM, clt, baA, ju, alO, Ds, abj, K, aa, tb, sp, zS, mQ, cr, fe, iV, eE, Jh, hq, cT, z, Jp, JM, uJ, y, qc); #c1(NPSR1) c2(NP_001287864) c3(neuropeptide S receptor isoform G) c4(113082) c5(113083, 113084, 113085, 113086, 113087, 113088, 113089, 113090, 113091, 113092, 113093, 113094) c6( ) c7(bM, Dw, aCA, fF, ww, aql, pM, clt, baA, ju, alO, Ds, abj, K, aa, tb, sp, zS, mQ, cr, fe, iV, eE, Jh, hq, cT, z, Jp, JM, uJ, y, qc); #c1(NPSR1) c2(NP_997055) c3(neuropeptide S receptor isoform A) c4(264982, 264983, 264984, 264985) c5(264986, 264987, 264988, 264989, 264990, 264991, 264992, 264993, 264994, 264995, 264996, 264997) c6( ) c7(bM, Dw, aCA, fF, ww, aql, pM, clt, baA, ju, alO, Ds, abj, K, aa, tb, sp, zS, mQ, cr, fe, iV, eE, Jh, hq, cT, z, Jp, JM, uJ, y, qc); #c1(NPSR1) c2(NP_997056) c3(neuropeptide S receptor isoform B) c4(264998) c5(264999, 265000, 265001, 265002, 265003, 265004) c6( ) c7(bM, Dw, aCA, fF, ww, aql, pM, clt, baA, ju, alO, Ds, abj, K, aa, tb, sp, zS, mQ, cr, fe, iV, eE, Jh, hq, cT, z, Jp, JM, uJ, y, qc); #c1(NPTN) c2(NP_001154835) c3(neuroplastin isoform c precursor) c4(61177, 61178) c5(61179, 61180, 61181, 61182, 61183, 61184) c6( ) c7(bnN, oT, GU, aW, cz, aT, j); #c1(NPTN) c2(NP_036560) c3(neuroplastin isoform b precursor) c4(174401, 174402) c5(174403, 174404, 174405, 174406, 174407, 174408) c6( ) c7(bnN, oT, GU, aW, cz, aT, j); #c1(NPTN) c2(NP_059429) c3(neuroplastin isoform a precursor) c4(193288) c5(193289, 193290, 193291, 193292, 193293, 193294, 193295, 193296, 193297, 193298, 193299, 193300) c6( ) c7(bnN, oT, GU, aW, cz, aT, j); #c1(NPTN) c2(XP_011519754) c3(neuroplastin isoform X1) c4( ) c5(314443, 314444, 314445, 314446, 314447, 314448) c6( ) c7(bnN, oT, GU, aW, cz, aT, j); #c1(NPTX1) c2(NP_002513) c3(neuronal pentraxin-1 precursor) c4(129436, 129437) c5(129438, 129439, 129440, 129441, 129442, 129443, 129444, 129445, 129446, 129447, 129448, 129449) c6( ) c7(if, ft, qN, r); #c1(NPTX2) c2(NP_002514) c3(neuronal pentraxin-2 precursor) c4(129450) c5(129451, 129452, 129453, 129454, 129455, 129456) c6( ) c7(bgL, T, aC, nx, bS, ci, eA, no, aE, bgN, vc, an, awL, ajU, d, adF, nY, kp, kC, nC, bN, ajS, mx, eQ, clu); #c1(NPTXR) c2(NP_055108) c3(neuronal pentraxin receptor) c4(178988) c5(178989, 178990, 178991, 178992, 178993, 178994, 178995) c6( ) c7(T, ft, cd, eu, mo); #c1(NPVF) c2(NP_071433) c3(pro-FMRFamide-related neuropeptide VF precursor) c4(211637) c5(211638, 211639, 211640, 211641, 211642, 211643, 211644, 211645) c6(211646, 211647) c7(aC, fq, cz); #c1(NPW) c2(NP_001092926) c3(neuropeptide W preproprotein) c4(39778) c5(39779, 39780, 39781, 39782, 39783, 39784, 39785) c6( ) c7(bM, auq, clv, fD); #c1(NPY) c2(NP_000896) c3(pro-neuropeptide Y preproprotein) c4(16990) c5(16991, 16992, 16993, 16994, 16995, 16996, 16997, 16998, 16999, 17000, 17001, 17002, 17003, 17004) c6( ) c7(bM, T, vS, ya, ea, e, bO, ci, afl, aY, VV, aE, pX, M, Ou, K, qM, dQ, blc, xa, yo, aW, as, eE, cm, uC, clw, iT, Gs, U, vy, QF, sv, dD, IT, aw, n, To, aj, afE, et, fr, ww, cd, rc, FY, kH, jy, gl, ey, bXV, he, dx, aze, A, cly, fq, bJ, hq, cA, dB, yP, Ei, JM, IB, bL, iH, eR, oe, qQ, cz, v, j, bX, il, clx, eA, J, er, aPW, uT, aT, cy, ae, af, eu, ev, akt, cu, en, FT, ck, pH, rR, ac, cS, VB, sY, iW, ha, vr, bS, dG, eq, hF, Fc, ad, Tg, wv, ot, Sb, d, IR, tb, cH, ff, gC, gl, Tp, Z, FX, jb, qa, eK, TA, es, D, pu, Rm, aS, ei); #c1(NPY1R) c2(NP_000900) c3(neuropeptide Y receptor type 1) c4(17019, 17020, 17021, 17022, 17023) c5(17024, 17025, 17026, 17027, 17028, 17029, 17030, 17031, 17032, 17033, 17034, 17035, 17036, 17037, 17038, 17039, 17040, 17041, 17042, 17043, 17044, 17045, 17046, 17047, 17048, 17049, 17050, 17051, 17052, 17053) c6( ) c7(bL, aWm, ac, Bc, e, ha, hl, cz, cm, cu, sv, v, K, ct, il, FX, xa, ad, vk, hq); #c1(NPY2R) c2(NP_000901) c3(neuropeptide Y receptor type 2) c4(17054) c5(17055, 17056, 17057, 17058, 17059, 17060, 17061, 17062, 17063, 17064) c6( ) c7(bL, oe, ha, qQ, bO, cz, v, il, VV, ip, XY, cy, qM, jo, af, aW, cu, Tp, cm, FX, hq, rR, cA); #c1(NPY5R) c2(XP_011530316) c3(neuropeptide Y receptor type 5 isoform X2) c4( ) c5(326163, 326164, 326165) c6( ) c7(bL, rR, tb, IT, aW, iX, hl, aql, aT, iy, jy, cu, aj, v, ww, ei, FX, J, hq); #c1(NPY5R) c2(XP_011530317) c3(neuropeptide Y receptor type 5 isoform X3) c4(326166) c5( ) c6( ) c7(bL, rR, tb, IT, aW, iX, hi, aql, aT, iy, jy, cu, aj, v, ww, ei, FX, J, hq); #c1(NQ01) c2(NP_000894) c3(NAD(P)H dehydrogenase [quinone] 1 isoform a) c4(16983) c5(16984, 16985, 16986, 16987, 16988, 16989) c6( ) c7(bM, T, aC, pf, ea, if, e, bO, fd, bB, aeu, qj, ci, aJO, x, aE, M, ja, K, hu, pk, eL, In, aa, Jl, aW, az, hl, LZ, nY, fc, g, hJ, cm, bw, fT, eM, nB, ii, iA, iT, Gs, cj, sv, dW, k, m, cE, iu, FW, gU, dD, aw, ht, n, aj, fr, qN, pM, cd, br, eW, b, ft, jz, ql, Bj, eV, Gw, dL, rk, A, sp, QP, aq, cM, Zj, iO, clz, kT, ok, cA, dB, anZ, at, eo, it, B, cn, bL, jv, yk, eX, aA, cz, hy, v, j, C, AO, V, q, J, eA, eJ, Ig, Vr, aT, cy, dz, bq, an, ae, af, ne, s, iU, Y, r, akY, HL, en, t, iK, ck, ov, vK, sS, nM, ac, gX, dy, im, bt, Gl, wi, iW, jh, ID, dG, eq, fu, Fb, hF, iJ, ad, dP, av, HF, akN, ib, Db, ji, d, BN, qt, ff, gK, cr, aF, iV, FX, jb, bz, iq, es, bE, pP, gZ, Gu, i, X, us, pC); #c1(NQ01) c2(NP_001020604) c3(NAD(P)H dehydrogenase [quinone] 1 isoform b) c4(28955) c5(28956, 28957, 28958, 28959, 28960, 28961) c6( ) c7(bM, T, aC, pf, ea, if, e, bO, fd, bB, aeu, qj, ci, aJO, x, aE, M, ja, K, hu, pk, eL, In, aa, Jl, aW, az, hI, LZ, nY, fc, g, hJ, cm, bw, fT, eM, nB, ii, iA, iT, Gs, cj, sv, dW, k, m, cE, iu, FW, gU, dD, aw, ht, n, aj, fr, qN, pM, cd, br, eW, b, ft, jz, ql, Bj, eV, Gw, dL, rk, A, sp, QP, aq, cM, Zj, iO, clz, kT, ok, cA, dB, anZ, at, eo, it, B, cn, bL, jv, yk, eX, aA, cz, hy, v, j, C, AO, V, q, J, eA, eJ, Ig, Vr, aT, cy, dz, bq, an, ae, af, ne, s, iU, Y, r, akY, HL, en, t, iK, ck, ov, vK, sS, nM, ac, gX, dy, im, bt, Gl, wi, iW, jh, ID, dG, eq, fu, Fb, hF, iJ, ad, dP, av, HF, akN, ib, Db, ji, d, BN, qt, ff, gK, cr, aF, iV, FX, jb, bz, iq, es, bE, pP, gZ, Gu, i, X, us, pC); #c1(NQ01) c2(NP_001020605) c3(NAD(P)H dehydrogenase [quinone] 1 isoform c) c4(28962) c5(28963, 28964, 28965, 28966, 28967, 28968) c6( ) c7(bM, T, aC, pf, ea, if, e, bO, fd, bB, aeu, qj, ci, aJO, x, aE, M, ja, K, hu, pk, eL, In, aa, Jl, aW, az, hI, LZ, nY, fc, g, hJ, cm, bw, fT, eM, nB, ii, iA, iT, Gs, cj, sv, dW, k, m, cE, iu, FW, gU, dD, aw, ht, n, aj, fr, qN, pM, cd, br, eW, b, ft, jz, ql, Bj, eV, Gw, dL, rk, A, sp, QP, aq, cM, Zj, iO, clz, kT, ok, cA, dB, anZ, at, eo, it, B, cn, bL, jv, yk, eX, aA, cz, hy, v, j, C, AO, V, q, J, eA, eJ, Ig, Vr, aT, cy, dz, bq, an, ae, af, ne, s, iU, Y, r, akY, HL, en, t, iK, ck, ov, vK, sS, nM, ac, gX, dy, im, bt, Gl, wi, iW, jh, ID, dG, eq, fu, Fb, hF, iJ, ad, dP, av, HF, akN, ib, Db, ji, d, BN, qt, ff, gK, cr, aF, iV, FX, jb, bz, iq, es, bE, pP, gZ, Gu, i, X, us, pC); #c1(NQ01) c2(NP_001273066) c3(NAD(P)H dehydrogenase [quinone] 1 isoform d) c4(104281) c5(104282, 104283, 104284, 104285, 104286, 104287) c6( ) c7(bM, T, aC, pf, ea, if, e, bO, fd, bB, aeu, qj, ci, aJO, x, aE, M, ja, K, hu, pk, eL, In, aa, Jl, aW, az, hI, LZ, nY, fc, g, hJ, cm, bw, fT, eM, nB, ii, iA, iT, Gs, cj, sv, dW, k, m, cE, iu, FW, gU, dD, aw, ht, n, aj, fr, qN, pM, cd, br, eW, b, ft, jz, ql, Bj, eV, Gw, dL, rk, A, sp, QP, aq, cM, Zj, iO, clz, kT, ok, cA, dB, anZ, at, eo, it, B, cn, bL, jv, yk, eX, aA, cz, hy, v, j, C, AO, V, q, J, eA, eJ, Ig, Vr, aT, cy, dz, bq, an, ae, af, ne, s, iU, Y, r, akY, HL, en, t, iK, ck, ov, vK, sS, nM, ac, gX, dy, im, bt, Gl, wi, iW, jh, ID, dG, eq, fu, Fb, hF, iJ, ad, dP, av, HF, akN, ib, Db, ji, d, BN, qt, ff, gK, cr, aF, iV, FX, jb, bz, iq, es, bE, pP, gZ, Gu, i, X, us, pC); #c1(NQ02) c2(NP_001277151) c3(ribosyldihydronicotinamide dehydrogenase [quinone] isoform 2) c4(109155, 109156) c5(109157, 109158, 109159, 109160, 109161, 109162, 109163, 109164, 109165, 109166, 109167, 109168, 109169, 109170, 109171, 109172) c6( ) c7(T, ht, iG, aR, ad, ot, aE, aT, dz, dL, K, hu, an, ae, PT, aW, Y, gl, aq, iR, t, FX, cm, hq, ck, iO, ok, bP, hA, dJ, Gs, aiS, m); #c1(NQ02) c2(XP_005249208) c3(ribosyldihydronicotinamide dehydrogenase [quinone] isoform X1) c4(269093, 269094) c5(269095, 269096, 269097, 269098, 269099, 269100, 269101, 269102, 269103, 269104, 269105, 269106, 269107, 269108) c6( ) c7(T, ht, iG, aR, ad, ot, aE, aT, dz, dL, K, hu, an, ae, PT, aW, Y, gl, aq, iR, t, FX, cm, hq, ck, iO, ok, bP, hA, dJ, Gs, aiS, m); #c1(NQ02) c2(XP_011512944) c3(ribosyldihydronicotinamide dehydrogenase [quinone] isoform X2) c4(304378) c5(304379, 304380, 304381, 304382, 304383, 304384, 304385, 304386, 304387, 304388, 304389, 304390, 304391, 304392, 304393, 304394) c6( ) c7(T, ht, iG, aR, ad, ot, aE, aT, dz, dL, K, hu, an, ae, PT, aW, Y, gl, aq, iR, t, FX, cm, hq, ck, iO, ok, bP, hA, dJ, Gs, aiS, m); #c1(NROB1) c2(NP_000466) c3(nuclear receptor subfamily 0 group B member 1) c4(9265, 9266, 9267) c5(9268, 9269, 9270, 9271, 9272, 9273, 9274, 9275, 9276, 9277, 9278, 9279, 9280, 9281, 9282, 9283, 9284, 9285) c6( ) c7(bL, T, dD, aiK, aec, bbn, e, ht, ea, yk, cz, bB, bgj, n, v, eq, ci, nA, UI, OH, q, ad, er, UE, yn, iu, BI, eW, vJ, aX, BJ, bgm, aT, vH, UD, iv, ji, jj, bUo, clD, hu, H, hK, ae, dx, cp, bgp, aeT, clA, yo, UL, IR, s, Qr, CN, aW, oV, fc, bCO, iw, r, cr, uY, aDm, baZ, g, iV, pt, GR, pb, bE, PI, AH, au, hL, clB, hR, at, nw, Xu, UF, IC, kS, clC, L); #c1(NR1D1) c2(NP_068370) c3(nuclear receptor subfamily 1 group D member 1) c4(209353) c5(209354, 209355, 209356, 209357, 209358, 209359) c6( ) c7(bM, T, dD, mS, eq, hd, mW, bfJ, aT, ta, bK, jj, mY, mV, mU, IR, qt, aW, Z, t, mZ, mX, aPY, cA, nB, nw, m, mT); #c1(NR1D2) c2(NP_005117) c3(nuclear receptor subfamily 1 group D member 2 isoform 1) c4(153032, 153033) c5(153034, 153035, 153036, 153037, 153038, 153039, 153040, 153041, 153042, 153043, 153044, 153045) c6( ) c7(dP, gk, T, F, aI, vi); #c1(NR1D2) c2(XP_006713514) c3(nuclear receptor subfamily 1 group D member 2 isoform X1) c4( ) c5(287183, 287184, 287185, 287186, 287187) c6( ) c7(dP, gk, T, F, aI, vi); #c1(NR1H2) c2(NP_001243576) c3(oxysterols receptor LXR-beta isoform 2) c4(91086, 91087) c5(91088, 91089, 91090, 91091, 91092, 91093, 91094, 91095, 91096, 91097, 91098, 91099) c6( ) c7(bL, T, dD, pf, yk, iW, ha, ht, bB, n, v, Gn, ci, j, eq, Qo, fr, q, ad, Vr, rA, aT, aYf, dL, KP, K, hu, ae, af, eL, aW, Y, aBq, ff, CT, r, La, en, cl, hJ, t, bw, bz, yX, ck, eM, bE, U, hL, m, bnB, B); #c1(NR1H2) c2(NP_009052) c3(oxysterols receptor LXR-beta isoform 1) c4(170454, 170455) c5(170456, 170457, 170458, 170459, 170460, 170461, 170462, 170463, 170464, 170465, 170466, 170467, 170468) c6( ) c7(bL, T, dD, pf, yk, iW, ha, ht, bB, n, v, Gn, ci, j, eq, Qo, fr, q, ad, Vr, rA, aT, aYf, dL, KP, K, hu, ae, af, eL, aW, Y, aBq, ff, CT, r, La, en, cl, hJ, t, bw, bz, yX, ck, eM, bE, U, hL, m, bnB, B); #c1(NR1H3) c2(NP_001123573) c3(oxysterols receptor LXR-alpha isoform 2) c4(47629) c5(47630, 47631, 47632, 47633, 47634, 47635, 47636, 47637, 47638, 47639, 47640, 47641, 47642, 47643, 47644, 47645, 47646, 47647, 47648, 47649, 47650, 47651, 47652, 47653, 47654, 47655, 47656, 47657) c6( ) c7(bL, UH, dD, ea, iW, cz, v, j, eq, ad, I, u, h, K, ae, cH, cW, Bw, eH, cr, r, fc, dq, hJ, eF, aS, cP, ei, bt); #c1(NR1H3) c2(NP_001123574) c3(oxysterols receptor LXR-alpha isoform 3) c4(47658) c5(47659, 47660, 47661, 47662, 47663) c6( ) c7(bL, UH, dD, ea, iW, cz, v, j, eq, ad, I, u, h, K, ae, cH, cW, Bw, eH, cr, r, fc, dq, hJ, eF, aS, cP, ei, bt); #c1(NR1H3) c2(NP_005684) c3(oxysterols receptor LXR-alpha isoform 1) c4(158534, 158535, 158536, 158537) c5(158538, 158539, 158540, 158541, 158542, 158543, 158544, 158545, 158546, 158547, 158548, 158549) c6( ) c7(bL, UH, dD, ea, iW, cz, v, j, eq, ad, I, u, h, K, ae, cH, cW, Bw, eH, cr, r, fc, dq, hJ, eF, aS, cP, ei, bt); #c1(NR1H3) c2(XP_005252772) c3(oxysterols receptor LXR-alpha isoform X6) c4(272053, 272054) c5(272055, 272056, 272057, 272058, 272059, 272060, 272061, 272062, 272063, 272064, 272065, 272066) c6( ) c7(bL, UH, dD, ea, iW, cz, v, j, eq, ad, I, u, h, K, ae, cH, cW, Bw, eH, cr, r, fc, dq, hJ, eF, aS, cP, ei, bt); #c1(NR1H4) c2(NP_001193907) c3(bile acid receptor isoform 5) c4(83129) c5(83130, 83131, 83132, 83133, 83134, 83135) c6( ) c7(bL, T, jv, dD, fR, pf, aI, NT, cz, v, j, eq, AO, jw, hX, jF, I, aE, u, JD, M, aT, h, dL, ji, K, qM, bq, dQ, af, Qe, wC, UO, Is, ff, fc, hI, LZ, fe, dq, Io, akY, aq, Ku, en, hJ, g, iV, Jh, bbT, jq, ac, U, cj, uS, at, eo, B); #c1(NR1H4) c2(NP_001193908) c3(bile acid receptor isoform 1) c4(83136) c5(83137, 83138, 83139, 83140, 83141, 83142) c6( ) c7(bL, T, jv, dD, fR, pf, aI, NT, cz, v, j, eq, AO, jw, hX, jF, I, aE, u, JD, M, aT, h, dL, ji, K, qM, bq, dQ, af, Qe, wC, UO, Is, ff, fc, hI, LZ, fe, dq, Io, akY, aq, Ku, en, hJ, g, iV, Jh, bbT, jq, ac, U, cj, uS, at, eo, B); #c1(NR1H4) c2(NP_001193921) c3(bile acid receptor isoform 4) c4(83156) c5(83157, 83158, 83159, 83160, 83161, 83162) c6( ) c7(bL, T, jv, dD, fR, pf, aI, NT, cz, v, j, eq, AO, jw, hX, jF, I, aE, u, JD, M, aT, h, dL, ji, K, qM, bq, dQ, af, Qe, wC, UO, Is, ff, fc, hI, LZ, fe, dq, Io, akY, aq, Ku, en, hJ, g, iV, Jh, bbT, jq, ac, U, cj, uS, at, eo, B); #c1(NR1H4) c2(NP_001193922) c3(bile acid receptor isoform 3) c4(83163) c5(83164, 83165, 83166, 83167, 83168, 83169) c6( ) c7(bL, T, jv, dD, fR, pf, aI, NT, cz, v, j, eq, AO, jw, hX, jF, I, aE, u, JD, M, aT, h, dL, ji, K, qM, bq, dQ, af, Qe, wC, UO, Is, ff, fc, hI, LZ, fe, dq, Io, akY, aq, Ku, en, hJ, g, iV, Jh, bbT, jq, ac, U, cj, uS, at, eo, B); #c1(NR1H4) c2(NP_005114) c3(bile acid receptor isoform 2) c4(153009) c5(153010, 153011153012, 153013, 153014, 153015, 153016) c6( ) c7(bL, T, jv, dD, fR, pf, aI, NT, cz, v, j, eq, AO, jw, hX, jF, I, aE, u, JD, M, aT, h, dL, ji, K, qM, bq, dQ, af, Qe, wC, UO, Is, ff, fc, hI, LZ, fe, dq, Io, akY, aq, Ku, en, hJ, g, iV, Jh, bbT, jq, ac, U, cj, uS, at, eo, B); #c1(NR112) c2(NP_071285) c3(nuclear receptor subfamily 1 group 1 member 2 isoform 2) c4(210880, 210881) c5(210882, 210883, 210884, 210885, 210886, 210887, 210888, 210889, 210890, 210891, 210892, 210893, 210894, 210895) c6( ) c7(ID, gh, T, bM, aC, ea, e, aI, fd, bB, ci, bv, aE, eL, bc, cp, aa, mH, aW, az, hI, LZ, fc, hN, alb, g, hJ, eE, aaD, eF, cm, zV, iA, bpY, acS, cj, cX, m, cE, aZN, NK, dD, aw, ht, ez, n, aj, fr, qN, jw, cd, ai, rc, ke, amB, jz, h, dL, bbN, wC, OV, auM, fe, aq, jq, kT, Pa, hk, hL, at, aiS, fL, agy, zB, it, B, bL, jv, dA, fG, aA, cR, hy, v, j, qf, C, si, V, q, J, eA, ady, aT, cy, ae, af, ne, bA, nO, Y, ev, r, Io, eS, en, cl, t, iK, ck, wR, CZ, Tu, fD, gT, bt, ao, gV, Mb, ha, Jy, jh, wV, MC, oH, eq, mC, ad, BY, dP, hX, av, F, py, sN, vJ, ds, ji, IQ, d, BN, hG, ff, eH, cr, eZ, gl, dq, aF, iV, bz, bdu, LB, es, EW, yE, xZ, bE, uR, cP, ei, IC, ra, X, y); #c1(NR112) c2(NP_148934) c3(nuclear receptor subfamily 1 group 1 member 2 isoform 3) c4(226621) c5(226622, 226623, 226624, 226625, 226626, 226627, 226628) c6( ) c7(ID, gh, T, bM, aC, ea, e, aI, fd, bB, ci, bv, aE, eL, bc, cp, aa, mH, aW, az, hI, LZ, fc, hN, alb, g, hJ, eE, aaD, eF, cm, zV, iA, bpY, acS, cj, cX, m, cE, aZN, NK, dD, aw, ht, ez, n, aj, fr, qN, jw, cd, ai, rc, ke, amB, jz, h, dL, bbN, wC, OV, auM, fe, aq, jq, kT, Pa, hk, hL, at, aiS, fL, agy, zB, it, B, bL, jv, dA, fG, aA, cR, hy, v, j, qf, C, si, V, q, J, eA, ady, aT, cy, ae, af, ne, bA, nO, Y, ev, r, Io, eS, en, cl, t, iK, ck, wR, CZ, Tu, fD, gT, bt, an, gV, Mb, ha, Jy, jh, wV, MC, oH, eq, mC, ad, BY, dP, hX, av, F, py, sN, vJ, ds, ji, IQ, d, BN, hG, ff, eH, cr, eZ, gl, dq, aF, iV, bz, bdu, LB, es, EW, yE, xZ, bE, uR, cP, ei, IC, ra, X, y); #c1(NR113) c2(NP_001070937) c3(nuclear receptor subfamily 1 group 1 member 3 isoform 6) c4(34924) c5(34925, 34926, 34927, 34928, 34929, 34930) c6( ) c7(bL, gV, T, dA, jp, qb, NT, jh, fd, bB, aj, v, ci, C, jw, q, ad, eA, eW, aT, h, jy, dL, ae, af, eL, PP, s, hC, aW, Y, OX, oV, hC, r, aq, Io, as, hJ, t, cm, ck, kT, bE, mx, cj, mE, iS, MJ, m, ei, gT, bt, B, y); #c1(NR113) c2(NP_001070938) c3(nuclear receptor subfamily 1 group 1 member 3 isoform 11) c4(34931) c5(34932, 34933, 34934, 34935, 34936, 34937, 34938, 34939) c6( ) c7(bL, gV, T, dA, jp, qb, NT, jh, fd, bB, aj, v, ci, C, jw, q, ad, eA, eW, aT, h, jy, dL, ae, af, eL, PP, s, hG, aW, Y, OX, oV, hC, r, aq, Io, as, hJ, t, cm, ck, kT, bE, mx, cj, mE, iS, MJ, m, ei, gT, bt, B, y); #c1(NR113) c2(NP_001070939) c3(nuclear receptor subfamily 1 group 1 member 3 isoform 5) c4(34940) c5(34941, 34942, 34943, 34944, 34945, 34946) c6( ) c7(bL, gV, T, dA, jp, qb, NT, jh, fd, bB, aj, v, ci, C, jw, q, ad, eA, eW, aT, h, jy, dL, ae, af, eL, PP, s, hG, aW, Y, OX, oV, hC, r, aq, Io, as, hJ, t, cm, ck, kT, bE, mx, cj, mE, iS, MJ, m, ei, gT, bt, B, y); #c1(NR113) c2(NP_001070940) c3(nuclear receptor subfamily 1 group 1 member 3 isoform 9) c4(34947) c5(34948, 34949, 34950, 34951, 34952) c6( ) c7(bL, gV, T, dA, jp, qb, NT, jh, fd, bB, aj, v, ci, C, jw, q, ad, eA, eW, aT, h, jy, dL, ae, af, eL, PP, s, hG, aW, Y, OX, oV, hC, r, aq, Io, as, hJ, t, cm, ck, kT, bE, mx, cj, mE, iS, MJ, m, ei, gT, bt, B, y); #c1(NR113) c2(NP_001070941) c3(nuclear receptor subfamily 1 group 1 member 3 isoform 12) c4(34953, 34954) c5(34955, 34956, 34957, 34958, 34959, 34960, 34961, 34962, 34963, 34964, 34965) c6( ) c7(bL, gV, T, dA, jp, qb, NT, jh, fd, bB, aj, v, ci, C, jw, q, ad, eA, eW, aT, h, jy, dL, ae, af, eL, PP, s, hG, aW, Y, OX, oV, hC, r, aq, Io, as, hJ, t, cm, ck, kT, bE, mx, cj, mE, iS, MJ, m, ei, gT, bt, B, y); #c1(NR113) c2(NP_001070942) c3(nuclear receptor subfamily 1 group 1 member 3 isoform 8) c4(34966) c5(34967, 34968, 34969, 34970, 34871, 34972, 34973, 34974, 34975, 34976, 34977, 34978, 34979, 34980, 34981, 34982, 34983, 34984, 34985, 34986, 34987, 34988, 34989, 34990) c6( ) c7(bL, gV, T, dA, jp, qb, NT, jh, fd, bB, aj, v, ci, C, jw, q, ad, eA, eW, aT, h, jy, dL, ae, af, eL, PP, s, hG, aW, Y, OX, oV, hC, r, aq, Io, as, hJ, t, cm, ck, kT, bE, mx, cj, mE, iS, MJ, m, ei, gT, bt, B, y); #c1(NR113) c2(NP_001070943) c3(nuclear receptor subfamily 1 group 1 member 3 isoform 15) c4(34991) c5(34992, 34993, 34994, 34995, 34996, 34997, 34998, 34999, 35000, 35001, 35002, 35003, 35004, 35005, 35006, 35007, 35008, 35009, 35010, 35011, 35012, 35013, 35014, 35015, 35016, 35017, 35018, 35019) c6( ) c7(bL, gV, T, dA, jp, qb, NT, jh, fd, bB, aj, v, ci, C, jw, q, ad, eA, eW, aT, h, jy, dL, ae, af, eL, PP, s, hG, aW, Y, OX, oV, hC, r, aq, Io, as, hJ, t, cm, ck, kT, bE, mx, cj, mE, iS, MJ, m, ei, gT, bt, B, y); #c1(NR113) c2(NP_001070944) c3(nuclear receptor subfamily 1 group 1 member 3 isoform 13) c4(35020) c5(35021, 35022, 35023, 35024, 35025, 35026) c6( ) c7(bL, gV, T, dA, jp, qb, NT, jh, fd, bB, aj, v, ci, C, jw, q, ad, eA, eW, aT, h, jy, dL, ae, af, eL, PP, s, hG, aW, Y, OX, oV, hC, r, aq, Io, as, hJ, t, cm, ck, kT, bE, mx, cj, mE, iS, MJ, m, ei, gT, bt, B, y); #c1(NR113) c2(NP_001070945) c3(nuclear receptor subfamily 1 group 1 member 3 isoform 14) c4(35027) c5(35028, 35029, 35030, 35031, 35032, 35033) c6( ) c7(bL, gV, T, dA, jp, qb, NT, jh, fd, bB, aj, v, ci, C, jw, q, ad, eA, eW, aT, h, jy, dL, ae, af, eL, PP, s, hG, aW, Y, OX, oV, hC, r, aq, Io, as, hJ, t, cm, ck, kT, bE, mx, cj, mE, iS, MJ, m, ei, gT, bt, B, y); #c1(NR113) c2(NP_001070946) c3(nuclear receptor subfamily 1 group 1 member 3 isoform 7) c4(35034) c5(35035, 35036, 35037, 35038, 35039, 35040) c6( ) c7(bL, gV, T, dA, jp, qb, NT, jh, fd, bB, aj, v, ci, C, jw, q, ad, eA, eW, aT, h, jy, dL, ae, af, eL, PP, s, hG, aW, Y, OX, oV, hC, r, aq, Io, as, hJ, t, cm, ck, kT, bE, mx, cj, mE, iS, MJ, m, ei, gT, bt, B, y); #c1(NR113) c2(NP_001070947) c3(nuclear receptor subfamily 1 group 1 member 3 isoform 1D) c4(35041, 35042, 35043) c5(35044, 35045, 35046, 35047, 35048, 35049) c6( ) c7(bL, gV, T, dA, jp, qb, NT, jh, fd, bB, aj, v, ci, C, jw, q, ad, eA, eW, aT, h, jy, dL, ae, af, eL, PP, s, hG, aW, Y, OX, oV, hC, r, aq, Io, as, hJ, t, cm, ck, kT, bE, mx, cj, mE, iS, MJ, m, ei, gT, bt, B, y); #c1(NR113) c2(NP_001070948) c3(nuclear receptor subfamily 1 group 1 member 3 isoform 2) c4(35050) c5(35051, 35052, 35053, 35054, 35055, 35056) c6( ) c7(bL, gV, T, dA, jp, qb, NT, jh, fd, bB, aj, v, ci, C, jw, q, ad, eA, eW, aT, h, jy, dL, ae, af, eL, PP, s, hG, aW, Y, OX, oV, hC, r, aq, Io, as, hJ, t, cm, ck, kT, bE, mx, cj, mE, iS, MJ, m, ei, gT, bt, B, y); #c1(NR113) c2(NP_001070949) c3(nuclear receptor subfamily 1 group 1 member 3 isoform 4) c4(35057) c5(35058, 35059, 35060, 35061, 35062, 35063, 35064) c6( ) c7(bL, gV, T, dA, jp, qb, NT, jh, fd, bB, aj, v, ci, C, jw, q, ad, eA, eW, aT, h, jy, dL, ae, af, eL, PP, s, hG, aW, Y, OX, oV, hC, r, aq, Io, as, hJ, t, cm, ck, kT, bE, mx, cj, mE, iS, MJ, m, ei, gT, bt, B, y); #c1(NR113) c2(NP_001070950) c3(nuclear receptor subfamily 1 group 1 member 3 isoform 1) c4(35065, 35066) c5(35067, 35068, 35069, 35070, 35071, 35072, 35073, 35074, 35075, 35076) c6( ) c7(bL, gV, T, dA, jp, qb, NT, jh, fd, bB, aj, v, ci, C, jw, q, ad, eA, eW, aT, h, jy, dL, ae, af, eL, PP, s, hG, aW, Y, OX, oV, hC, r, aq, Io, as, hJ, t, cm, ck, kT, bE, mx, cj, mE, iS, MJ, m, ei, gT, bt, B, y); #c1(NR113) c2(NP_005113) c3(nuclear receptor subfamily 1 group 1 member 3 isoform 3) c4(153000, 153001) c5(153002, 153003, 153004, 153005, 153006, 153007, 153008) c6( ) c7(bL, gV, T, dA, jp, qb, NT, jh, fd, bB, aj, v, ci, C, jw, q, ad, eA, eW, aT, h, jy, dL, ae, af, eL, PP, s, hG, aW, Y, OX, oV, hC, r, aq, Io, as, hJ, t, cm, ck, kT, bE, mx, cj, mE, iS, MJ, m, ei, gT, bt, B, y); #c1(NR113) c2(XP_005245750) c3(nuclear receptor subfamily 1 group 1 member 3 isoform X1) c4( ) c5(266934, 266935) c6( ) c7(bL, gV, T, dA, jp, qb, NT, jh, fd, bB, aj, v, ci, C, jw, q, ad, eA, eW, aT, h, jy, dL, ae, af, eL, PP, s, hG, aW, Y, OX, oV, hC, r, aq, Io, as, hJ, t, cm, ck, kT, bE, mx, cj, mE, iS, MJ, m, ei, gT, bt, B, y); #c1(NR113) c2(XP_005245751) c3(nuclear receptor subfamily 1 group 1 member 3 isoform X2) c4( ) c5(266936) c6( ) c7(bL, gV, T, dA, jp, qb, NT, jh, fd, bB, aj, v, ci, C, jw, q, ad, eA, eW, aT, h, jy, dL, ae, af, eL, PP, s, hG, aW, Y, OX, oV, hC, r, aq, Io, as, hJ, t, cm, ck, kT, bE, mx, cj, mE, iS, MJ, m, ei, gT, bt, B, y); #c1(NR113) c2(XP_005245754) c3(nuclear receptor subfamily 1 group 1 member 3 isoform X4) c4(266937) c5( ) c6( ) c7(bL, gV, T, dA, jp, qb, NT, jh, fd, bB, aj, v, ci, C, jw, q, ad, eA, eW, aT, h, jy, dL, ae, af, eL, PP, s, hG, aW, Y, OX, oV, hC, r, aq, Io, as, hJ, t, cm, ck, kT, bE, mx, cj, mE, iS, MJ, m, ei, gT, bt, B, y); #c1(NR113) c2(XP_011508539) c3(nuclear receptor subfamily 1 group 1 member 3 isoform X3) c4( ) c5(299235, 299236) c6( ) c7(bL, gV, T, dA, jp, qb, NT, jh, fd, bB, aj, v, ci, C, jw, q, ad, eA, eW, aT, h, jy, dL, ae, af, eL, PP, s, hG, aW, Y, OX, oV, hC, r, aq, Io, as, hJ, t, cm, ck, kT, bE, mx, cj, mE, iS, MJ, m, ei, gT, bt, B, y); #c1(NR2C1) c2(NP_001027458) c3(nuclear receptor subfamily 2 group C member 1 isoform b) c4(30208) c5(30209, 30210, 30211, 30212, 30213, 30214) c6( ) c7(dP, ae, ad); #c1(NR2C1) c2(NP_001120834) c3(nuclear receptor subfamily 2 group C member 1 isoform c) c4(44811) c5(44812, 44813, 44814, 44815, 44816, 44817) c6( ) c7(dP, ae, ad); #c1(NR2C1) c2(NP_003288) c3(nuclear receptor subfamily 2 group C member 1 isoform a) c4(137160) c5(137161, 137162, 137163, 137164, 137165, 137166, 137167) c6( ) c7(dP, ae, ad); #c1(NR2C1) c2(XP_006719649) c3(nuclear receptor subfamily 2 group C member 1 isoform X6) c4(292867) c5( ) c6( ) c7(dP, ae, ad); #c1(NR2C2) c2(NP_001278623) c3(nuclear receptor subfamily 2 group C member 2 isoform 2) c4( ) c5(109891, 109892, 109893, 109894, 109895, 109896, 109897, 109898, 109899, 109900, 109901, 109902) c6( ) c7(T, bsy, IH, bB, aNG, ci, Lw, ad, er, dP, Na, aE, bjA, aT, dL, ji, ae, eL, B, aW, Y, aq, si, t, bz, ck, cbL, m, bt, bsw, vQ); #c1(NR2C2) c2(NP_003289) c3(nuclear receptor subfamily 2 group C member 2 isoform 1) c4(137168) c5(137169, 137170, 137171, 137172, 137173, 137174, 137175, 137176, 137177, 137178) c6( ) c7(T, bsy, IH, bB, aNG, ci, Lw, ad, er, dP, Na, aE, bjA, aT, dL, ji, ae, eL, B, aW, Y, aq, si, t, bz, ck, cbL, m, bt, bsw, vQ); #c1(NR2C2) c2(XP_011532363) c3(nuclear receptor subfamily 2 group C member 2 isoform X2) c4(328537, 328538) c5(328539, 328540, 328541, 328542, 328543, 328544, 328545) c6( ) c7(T, bsy, IH, bB, aNG, ci, Lw, ad, er, dP, Na, aE, bjA, aT, dL, ji, ae, eL, B, aW, Y, aq, si, t, bz, ck, cbL, m, bt, bsw, vQ); #c1(NR2C2) c2(XP_011532364) c3(nuclear receptor subfamily 2 group C member 2 isoform X3) c4( ) c5(328546, 328547) c6( ) c7(T, bsy, IH, bB, aNG, ci, Lw, ad, er, dP, Na, aE, bjA, aT, dL, ji, ae, eL, B, aW, Y, aq, si, t, bz, ck, cbL, m, bt, bsw, vQ); #c1(NR2C2) c2(XP_011532365) c3(nuclear receptor subfamily 2 group C member 2 isoform X4) c4(328548) c5(328549, 328550) c6( ) c7(T, bsy, IH, bB, aNG, ci, Lw, ad, er, dP, Na, aE, bjA, aT, dL, ji, ae, eL, B, aW, Y, aq, si, t, bz, ck, cbL, m, bt, bsw, vQ); #c1(NR2E1) c2(NP_001273031) c3(nuclear receptor subfamily 2 group E member 1 isoform a) c4(104193) c5(104194, 104195, 104196, 104197, 104198, 104199, 104200) c6( ) c7(QK, dB, ff, dy, bK, en, he, FI); #c1(NR2E1) c2(NP_003260) c3(nuclear receptor subfamily 2 group E member 1 isoform b) c4(136902) c5(136903, 136904, 136905, 136906, 136907, 136908, 136909) c6( ) c7(QK, dB, ff, dy, bK, en, he, FI); #c1(NR2E1) c2(XP_011534396) c3(nuclear receptor subfamily 2 group E member 1 isoform X1) c4(330778) c5(330779, 330780, 330781, 330782, 330783) c6( ) c7(QK, dB, ff, dy, bK, en, he, FI); #c1(NR2E3) c2(NP_055064) c3(photoreceptor-specific nuclear receptor isoform b) c4(178689, 178690) c5(178691) c6( ) c7(clH, clF, T, xX, IR, W, bFo, clE, nx, aW, cll, aT, n, nw, nk, clG, nC, ayj, de); #c1(NR2E3) c2(NP_057430) c3(photoreceptor-specific nuclear receptor isoform a) c4( ) c5(190766, 190767, 190768, 190769, 190770, 190771) c6( ) c7(clH, clF, T, xX, IR, W, bFo, clE, nx, aW, cll, aT, n, nw, nk, clG, nC, ayj, de); #c1(NR2E3) c2(XP_011519448) c3(photoreceptor-specific nuclear receptor isoform X1) c4( ) c5(314119, 314120, 314121, 314122, 314123) c6( ) c7(clH, clF, T, xX, IR, W, bFo, clE, nx, aW, cll, aT, n, nw, nk, clG, nC, ayj, de); #c1(NR2F1) c2(NP_005645) c3(COUP transcription factor 1) c4(158235) c5(158236, 158237, 158238, 158239, 158240, 158241, 158242) c6( ) c7(T, jv, cz, ci, nA, V, q, ad, aT, ae, clJ, s, aW, r, t, uC, op, vA, awK, m, bD, vi); #c1(NR2F2) c2(NP_001138627) c3(COUP transcription factor 2 isoform b) c4(57261) c5(57262, 57263, 57264, 57265, 57266, 57267, 57268, 57269) c6( ) c7(bL, T, dD, BC, BD, aC, ea, cz, bB, n, fd, bKx, j, ci, nA, eq, hF, V, AO, q, ad, er, eJ, dP, aE, aT, h, aAG, ae, A, aW, oV, aNb, ev, r, aq, t, bz, op, ck, bE, vA, wk, awK, m, bD, y, B); #c1(NR2F2) c2(NP_001138629) c3(CDOP transcription factor 2 isoform c) c4(57270) c5(57271, 57272, 57273, 57274, 57275, 57276, 57277, 57278) c6( ) c7(bL, T, dD, BC, BD, aC, ea, cz, bB, n, fd, bKx, j, ci, nA, eq, hF, V, AO, q, ad, er, eJ, dP, aE, aT, h, aAG, ae, A, aW, oV, aNb, ev, r, aq, t, bz, op, ck, bE, vA, wk, awK, m, bD, y, B); #c1(NR2F2) c2(NP_066285) c3(COUP transcription factor 2 isoform a) c4(206990) c5(206991, 206992, 206993, 206994, 206995, 206996, 206997) c6( ) c7(bL, T, dD, BC, BD, aC, ea, cz, bB, n, fd, bKx, j, ci, nA, eq, hF, V, AO, q, ad, er, eJ, dP, aE, aT, h, aAG, ae, A, aW, oV, aNb, ev, r, aq, t, bz, op, ck, bE, vA, wk, awK, m, bD, y, B); #c1(NR2F6) c2(NP_005225) c3(nuclear receptor subfamily 2 group F member 6) c4(154208, 154209) c5(154210, 154211, 154212, 154213, 154214, 154215, 154216, 154217, 154218, 154219, 154220, 154221) c6( ) c7(dP, T, bE, r, bB, aT, q); #c1(NR3C1) c2(NP_001018085) c3(glucocorticoid receptor isoform alpha) c4(27169, 27170, 27171, 27172) c5(27173, 27174, 27175, 27176, 27177, 27178, 27179, 27180, 27181, 27182, 27183, 27184, 27185, 27186, 27187, 27188, 27189, 27190, 27191, 27192, 27193) c6( ) c7(gh, T, bM, fR, vf, e, Ir, bO, bB, fd, gf, ci, ip, GK, x, tg, xE, oG, axy, vg, Ds, K, qM, hu, wt, DY, eL, aa, bo, eG, yo, amy, aW, wf, Fa, uY, g, ir, hJ, eF, cm, mZ, ou, eM, Gs, cj, uo, uJ, OD, k, m, xh, dD, Uc, sQ, aVR, aw, ht, n, aj, afE, ct, fr, bLU, qW, cd, eW, ft, ec, Bj, adX, cU, jy, h, hn, dL, hl, aAG, uV, mV, mY, he, aDp, clK, cC, hi, mU, Rj, lb, ap, ge, Xg, aq, fe, Hu, yq, ajo, gG, dw, pm, mX, bJ, hq, ok, cA, adZ, JQ, yP, Ei, mg, Uv, vL, hR, ut, at, pg, fL, B, mT, aOo, bL, Dw, pF, eR, AL, DD, oe, aA, cz, mS, fF, v, j, OY, C, aql, Qo, il, V, wy, eA, J, clN, oT, bkJ, mP, clO, aVM, aql, aT, wP, bK, hK, ae, bZN, bA, eu, qw, hM, kl, s, aeS, r, cu, Io, cfm, en, t, ck, vK, sn, kP, ac, clL, pZ, mf, fD, Iw, xb, LS, VB, ao, qX, id, aZ, rQ, iW, oA, Jy, jh, bS, ah, jE, eq, adg, OH, clM, ad, qC, dP, av, py, vJ, mW, Ot, Dq, IQ, jo, uQ, gj, IR, cH, cW, bPq, ff, eH, Ce, eZ, gl, dq, aeV, hp, aF, iV, Z, bz, dr, qa, eK, TA, pc, yE, bE, ei, pK, y); #c1(NR3C1) c2(NP_001018661) c3(glucocorticoid receptor isoform beta) c4(27529, 27530, 27531) c5(27532, 27533, 27534, 27535, 27536, 27537) c6( ) c7(gh, T, bM, fR, vf, e, lr, bO, bB, fd, gf, ci, ip, GK, x, tg, xE, oG, axy, vg, Ds, K, qM, hu, wt, DY, eL, aa, bo, eG, yo, amy, aW, wF, Fa, uY, g, ir, hJ, eF, cm, mZ, ou, eM, Gs, cj, uo, uJ, OD, k, m, xh, dD, Uc, sQ, aVR, aw, ht, n, aj, afE, ct, fr, bLU, qW, cd, eW, ft, ec, Bj, adX, cU, jy, h, hn, dL, bl, aAG, uV, mV, mY, he, aDp, clK, cC, hi, mU, Rj, lb, ap, ge, Xg, aq, fe, Hu, yg, ajo, gG, dw, pm, mX, bJ, hq, ok, cA, adZ, JQ, yP, Ei, mg, Uv, vL, hR, ut, at, pg, fL, B, mT, aOo, bL, Dw, pF, eR, AL, DD, oe, aA, cz, mS, fF, v, j, OY, C, aql, Qo, il, V, wy, eA, J, clN, oT, bkJ, mP, clO, aVM, aql, aT, wP, bK, hK, ae, bZN, bA, eu, qw, hM, kl, s, aeS, r, cu, Io, cfm, en, t, ck, vK, sn, kP, ac, clL, pZ, mf, fD, Iw, xb, LS, VB, ao, qX, id, aZ, rQ, iW, oA, Jy, jh, bS, ah, jE, eq, adg, OH, clM, ad, qC, dP, av, py, vJ, mW, Ot, Dq, IQ, jo, uQ, gj, IR, cH, cW, bPq, ff, eH, Ce, eZ, gl, dq, aeV, hp, aF, iV, Z, bz, dr, qa, eK, TA, pc, yE, bE, ei, pK, y); #c1(NR3C1) c2(NP_001019265) c3(glucocorticoid receptor isoform gamma) c4(27733) c5(27734, 27735, 27736, 27737, 27738, 27739, 27740, 27741, 27742, 27743, 27744, 27745, 27746, 27747) c6( ) c7(gh, T, bM, fR, vf, e, Ir, bO, bB, fd, gf, ci, ip, GK, x, tg, xE, oG, axy, vg, Ds, K, qM, hu, wt, DY, eL, aa, bo, eG, yo, amy, aW, wF, Fa, uY, g, ir, hJ, eF, cm, mZ, ou, eM, Gs, cj, uo, uJ, OD, k, m, xh, dD, Uc, sQ, aVR, aw, ht, n, aj, afE, ct, fr, bLU, qW, cd, eW, ft, ec, Bj, adX, cU, jy, h, hn, dL, bl, aAG, uV, mV, mY, he, aDp, clK, cC, hi, mU, Rj, lb, ap, ge, Xg, aq, fe, Hu, yg, ajo, gG, dw, pm, mX, bJ, hq, ok, cA, adZ, JQ, yP, Ei, mg, Uv, vL, hR, ut, at, pg, fL, B, mT, aOo, bL, Dw, pF, eR, AL, DD, oe, aA, cz, mS, fF, v, j, OY, C, aql, Qo, il, V, wy, eA, J, clN, oT, bkJ, mP, clO, aVM, aql, aT, wP, bK, hK, ae, bZN, bA, eu, qw, hM, kl, s, aeS, r, cu, Io, cfm, en, t, ck, vK, sn, kP, ac, clL, pZ, mf, fD, Iw, xb, LS, VB, ao, qX, id, aZ, rQ, iW, oA, Jy, jh, bS, ah, jE, eq, adg, OH, clM, ad, qC, dP, av, py, vJ, mW, Ot, Dq, IQ, jo, uQ, gj, IR, cH, cW, bPq, ff, eH, Ce, eZ, gl, dq, aeV, hp, aF, iV, Z, bz, dr, qa, eK, TA, pc, yE, bE, ei, pK, y); #c1(NR3C1) c2(NP_001191194) c3(glucocorticoid receptor isoform GR-P) c4( ) c5(81101, 81102, 81103, 81104, 81105, 81106) c6( ) c7(gh, T, bM, fR, vf, e, Ir, bO, bB, fd, gf, ci, ip, GK, x, tg, xE, oG, axy, vg, Ds, K, qM, hu, wt, DY, eL, aa, bo, eG, yo, amy, aW, wF, Fa, uY, g, ir, hJ, eF, cm, mZ, ou, eM, Gs, cj, uo, uJ, OD, k, m, xh, dD, Uc, sQ, aVR, aw, ht, n, aj, afE, ct, fr, bLU, qW, cd, eW, ft, ec, Bj, adX, cU, jy, h, hn, dL, bl, aAG, uV, mV, mY, he, aDp, clK, cC, hi, mU, Rj, lb, ap, ge, Xg, aq, fe, Hu, yq, ajo, gG, dw, pm, mX, bJ, hq, ok, cA, adZ, JQ, yP, Ei, mg, Uv, vL, hR, ut, at, pg, fL, B, mT, aOo, bL, Dw, pF, eR, AL, DD, oe, aA, cz, mS, fF, v, j, OY, C, aql, Qo, il, V, wy, eA, J, clN, oT, bkJ, mP, clO, aVM, aql, aT, wP, bK, hK, ae, bZN, bA, eu, qw, hM, kl, s, aeS, r, cu, Io, cfm, en, t, ck, vK, sn, kP, ac, clL, pZ, mf, fD, Iw, xb, LS, VB, ao, qX, id, aZ, rQ, iW, oA, Jy, jh, bS, ah, jE, eq, adg, OH, clM, ad, qC, dP, av, py, vJ, mW, Ot, Dq, IQ, jo, uQ, gj, IR, cH, cW, bPq, ff, eH, Ce, eZ, gl, dq, aeV, hp, aF, iV, Z, bz, dr, qa, eK, TA, pc, yE, bE, ei, pK, y); #c1(NR3C1) c2(XP_011535938) c3(glucocorticoid receptor isoform X2) c4( ) c5(333198, 333199, 333200, 333201, 333202, 333203, 333204, 333205, 333206, 333207, 333208, 333209, 333210, 333211, 333212, 333213, 333214, 333215, 333216, 333217, 333218, 333219, 333220, 333221) c6( ) c7(gh, T, bM, fR, vf, e, Ir, bO, bB, fd, gf, ci, ip, GK, x, tg, xE, oG, axy, vg, Ds, K, qM, hu, wt, DY, eL, aa, bo, eG, yo, amy, aW, wF, Fa, uY, g, ir, hJ, eF, cm, mZ, ou, eM, Gs, cj, uo, uJ, OD, k, m, xh, dD, Uc, sQ, aVR, aw, ht, n, aj, afE, ct, fr, bLU, qW, cd, eW, ft, ec, Bj, adX, cU, jy, h, hn, dL, bl, aAG, uV, mV, mY, he, aDp, clK, cC, hi, mU, Rj, lb, ap, ge, Xg, aq, fe, Hu, yq, ajo, gG, dw, pm, mX, bJ, hq, nk, cA, adZ, JQ, yP, Ei, mg, Uv, vL, hR, ut, at, pg, fL, B, mT, aOo, bL, Dw, pF, eR, AL, DD, oe, aA, cz, mS, fF, v, j, OY, C, aql, Qn, il, V, wy, eA, J, clN, oT, bkJ, mP, clO, aVM, aql, aT, wP, bK, hK, ae, bZN, bA, eu, qw, hM, kl, s, aeS, r, cu, Io, cfm, en, t, ck, vK, sn, kP, ac, clL, pZ, mf, fD, Iw, xb, LS, VB, ao, qX, id, aZ, rQ, iW, oA, Jy, jh, bS, ah, jE, eq, adg, OH, clM, ad, qC, dP, av, py, vJ, mW, Ot, Dq, IQ, jo, uQ, gj, IR, cH, cW, bPq, ff, eH, Ce, eZ, gl, dq, aeV, hp, aF, iV, Z, bz, dr, qa, eK, TA, pc, yE, bE, ei, PK, y); #c1(NR3C1) c2(XP_011535939) c3(glucocorticoid receptor isoform X3) c4( ) c5(333222, 333223, 333224, 333225, 333226, 333227) c6( ) c7(gh, T, bM, fR, vf, e, Ir, bO, bB, fd, gf, ci, ip, GK, x, tg, xE, oG, axy, vg, Ds, K, qM, hu, wt, DY, eL, aa, bo, eG, yo, amy, aW, wF, Fa, uY, g, ir, hJ, eF, cm, mZ, ou, eM, Gs, cj, uo, uJ, OD, k, m, xh, dD, Uc, sQ, aVR, aw, ht, n, aj, afE, ct, fr, bLU, qW, cd, eW, ft, ec, Bj, adX, cU, jy, h, hn, dL, bl, aAG, uV, mV, mY, he, aDp, clK, cC, hi, mU, Rj, lb, ap, ge, Xg, aq, fe, Hu, yg, ajo, gG, dw, pm, mX, bJ, hq, ok, cA, adZ, JQ, yP, Ei, mg, Uv, vL, hR, ut, at, pg, fL, B, mT, aOo, bL, Dw, pF, eR, AL, DD, oe, aA, cz, mS, fF, v, j, OY, C, aql, Qn, il, V, wy, eA, J, clN, oT, bkJ, mP, clO, aVM, aql, aT, wP, bK, hK, ae, bZN, bA, eu, qw, hM, kl, s, aeS, r, cu, Io, cfm, en, t, ck, vK, sn, kP, ac, clL, pZ, mf, fD, Iw, xb, LS, VB, ao, qX, id, aZ, rQ, iW, oA, Jy, jh, bS, ah, jE, eq, adg, OH, clM, ad, qC, dP, av, py, vJ, mW, Ot, Dg, IQ, jo, uQ, gj, IR, cH, cW, bPq, ff, eH, Ce, eZ, gl, dq, aeV, hp, aF, iV, Z, bz, dr, qa, eK, TA, pc, yE, bE, ei, pK, y); #c1(NR3C2) c2(NP_000892) c3(mineralocorticoid receptor isoform 1) c4(16964, 16965) c5(16966, 16967, 16968, 16969, 16970, 16971, 16972, 16973, 16974, 16975, 16976, 16977, 16978, 16979, 16980, 16981, 16982) c6( ) c7(T, ahS, ea, e, aI, Ir, eh, bB, bO, gf, ci, aY, clR, M, K, wt, eL, Fe, Fa, uC, mx, cj, IS, dD, bLI, aw, kM, n, fr, ct, qW, fK, cd, cc, dL, he, Gh, fq, hq, cA, bo, clS, MM, jd, aOo, mr, DD, rf, cz, cR, v, aql, V, q, aT, cy, bK, Fg, iU, r, uU, pH, ac, wO, dh, fP, mf, dy, clP, clQ, bS, eq, hF, dP, fU, sN, gj, Z, dr, qa, eK, bF, bE, gZ, aS, ei, hE, gq); #c1(NR3C2) c2(NP_001159576) c3(mineralocorticoid receptor isoform 2) c4(64309, 64310) c5(64311, 64312, 64313, 64314, 64315, 64316, 64317, 64318, 64319, 64320, 64321, 64322) c6( ) c7(T, ahS, ea, e, aI, Ir, eh, bB, bO, gf, ci, aY, clR, M, K, wt, eL, Fe, Fa, uC, mx, cj, IS, dD, bLI, aw, kM, n, fr, ct, W, fK, cd, cc, dL, he, Gh, fq, hq, cA, bo, clS, MM, jd, aOo, mr, DD, rf, cz, cR, v, aql, V, q, aT, cy, bK, Fg, iU, r, uU, pH, ac, wO, dh, fP, mf, dy, clP, clQ, bS, eq, hF, dP, fU, sN, gj, Z, dr, qa, eK, bF, bE, gZ, aS, ei, hE, gq); #c1(NR3C2) c2(XP_011530279) c3(mineralocorticoid receptor isoform X1) c4(326136) c5(326137, 326138, 326139, 326140, 326141, 326142, 326143, 326144, 326145, 326146) c6( ) c7(T, ahS, ea, e, aI, Ir, eh, bB, bO, gf, ci, aY, clR, M, K, wt, eL, Fe, Fa, uC, mx, cj, IS, dD, bLI, aw, kM, n, fr, ct, qW, fK, cd, cc, dL, he, Gh, fq, hq, cA, bo, clS, MM, jd, aOo, mr, DD, rf, cz, cR, v, aql, V, q aT, cy, bK, Fg, iO, r, uU, pH, ac, wO, dh, fP, mf, dy, clP, clQ, bS, eq, hF, dP, fU, sN, gj, Z, dr, qa, eK, bF, bE, gZ, aS, ei, hE, gq); #c1(NR4A1) c2(NP_001189162) c3(nuclear receptor subfamily 4 group A member 1 isoform 2) c4(79242) c5(79243, 79244, 79245, 79246, 79247, 79248, 79249, 79250, 79251, 79252, 79253, 79254, 79255, 79256, 79257, 79258, 79259, 79260, 79261, 79262, 79263, 79264, 79265) c6( ) c7(bL, T, dD, fM, dA, ajm, aC, ahS, ea, jh, aA, bB, v, j, ci, eq, fr, hF, V, q, ad, hX, dP, av, cF, hd, aE, aT, bK, K, ae, B, aW, Y, ff, r, aDe, dq, aq, aF, HL, en, iR, bz, op, ck, qJ, kT, dB, bE, vA, cj, aS, y, bt, X); #c1(NR4A1) c2(NP_001189163) c3(nuclear receptor subfamily 4 group A member 1 isoform 3) c4(79266, 79267) c5(79268, 79269, 79270, 79271, 79272, 79273, 79274, 79275) c6( ) c7(bL, T, dD, fM, dA, ajm, aC, ahS, ea, jh, aA, bB, v, j, ci, eq, fr, hF, V, q, ad, hX, dP, av, cF, hd, aE, aT, bK, K, ae, B, aW, Y, ff, r, aDe, dq, aq, aF, HL, en, iR, bz, op, ck, qJ, kT, dB, bE, vA, cj, aS, y, bt, X); #c1(NR4A1) c2(XP_011536553) c3(nuclear receptor subfamily 4 group A member 1 isoform X3) c4(334032) c5(334033, 334034, 334035, 334036, 334037, 334038) c6( ) c7(bL, T, dD, fM, dA, ajm, aC, ahS, ea, jh, aA, bB, v, j, ci, eq, fr, hF, V, q, ad, hX, dP, av, cF, hd, aE, aT, bK, K, ae, B, aW, Y, ff, r, aDe, dq, aq, aF, HL, en, iR, bz, op, ck, qJ, kT, dB, bE, vA, cj, aS, y, bt, X); #c1(NR4A2) c2(NP_006177) c3(nuclear receptor subfamily 4 group A member 2) c4(162588, 162589, 162590) c5(162591, 162592, 162593, 162594, 162595, 162596, 162597, 162598, 162599, 162600, 162601, 162602, 162603, 162604, 162605, 162606, 162607) c6( ) c7(T, iB, e, bO, aA, bB, v, V, q, Pm, ai, wD, Hx, aqk, aT, iv, dL, bK, K, IQ, an, Tj, hZ, ak, aWm, Di, s, Jl, aW, Y, fO, cr, r, aF, g, Eg, cm, bz, op, GB, kT, bE, vA, agl, eo, IS, act, Pk, B, y); #c1(NR4A2) c2(XP_005246678) c3(nuclear receptor subfamily 4 group A member 2 isoform X1) c4(267326, 267327) c5(267328, 267329, 267330, 267331, 267332, 267333) c6( ) c7(T, iB, e, bO, aA, bB, v, V, q, Pm, ai, wD, Hx, agk, aT, iv, dL, bK, K, IQ, an, Tj, hZ, ak, aWm, Di, s, Jl, aW, Y, fO, cr, r, aF, g, Eg, cm, bz, op, GB, kT, bE, vA, agl, eo, IS, act, Pk, B, y); #c1(NR4A2) c2(XP_005246680) c3(nuclear receptor subfamily 4 group A member 2 isoform X4) c4( ) c5(267334, 267335, 267336, 267337, 267338, 267339, 267340, 267341) c6( ) c7(T, iB, e, bO, aA, bB, v, V, q, Pm, ai, wD, Hx, aqk, aT, iv, dL, bK, K, IQ, an, Tj, hZ, ak, aWm, Di, s, Jl, aW, Y, fO, cr, r, aF, g, Eg, cm, bz, op, GB, kT, bE, vA, agl, eo, IS, act, Pk, B, y); #c1(NR4A2) c2(XP_011509548) c3(nuclear receptor subfamily 4 group A member 2 isoform X3) c4( ) c5(300127, 300128, 300129, 300130, 300131, 300132, 300133, 300134) c6( ) c7(T, iB, e, bO, aA, bB, v, V, q, Pm, ai, wD, Hx, aqk, aT, iv, dL, bK, K, IQ, an, Tj, hZ, ak, aWm, Di, s, JL aW, Y, fO, cr, r, aF, g, Eg, cm, bz, op, GB, kT, bE, vA, agl, eo, IS, act, Pk, B, y); #c1(NR4A3) c2(NP_008912) c3(nuclear receptor subfamily 4 group A member 3 isoform a) c4(169554) c5( ) c6( ) c7(bL, bM, T, kh, dD, xu, ID, aNA, ea, aHA, yG, ha, cz, aj, v, eq, ci, fr, atN, aY, pd, br, J, ad, Na, ec, M, aT, FQ, Nc, bK, K, yh, ae, azh, ly, hM, A, xU, cH, aW, Y, vj, Zf, Gv, Mz, aDP, cm, bw, KM, qa, lx, op, LB, ck, QG, Qf, eM, iT, Nk, vA, aiM, ajd, cj, clT, CZ, y, bt, ZW, B); #c1(NR4A3) c2(NP_775291) c3(nuclear receptor subfamily 4 group A member 3 isoform c) c4(249851, 249852) c5(249853, 249854, 249855, 249856, 249857, 249858, 249859, 249860, 248861, 249862, 249863, 249864) c6( ) c7(bL, bM, T, kh, dD, xu, ID, aNA, ea, aHA, yG, ha, cz, aj, v, eq, ci, fr, atN, aY, pd, br, J, ad, Na, ec, M, aT, FQ, Nc, bK, K, yh, ae, azh, ly, hM, A, xU, cH, aW, Y, vj, Zf, Gv, Mz, aDP, cm, bw, KM, qa, lx, op, LB, ck, QG, Qf, eM, iT, Nk, vA, aiM, ajd, cj, clT, CZ, y, bt, ZW, B); #c1(NR4A3) c2(NP_775292) c3(nuclear receptor subfamily 4 group A member 3 isoform b) c4(249865) c5(249866, 249867, 249868, 249869, 249870, 249871, 249872, 249873, 249874, 249875, 249876, 249877, 249878) c6( ) c7(bL, bM, T, kh, dD, xu, ID, aNA, ea, aHA, yG, ha, cz, aj, v, eq, ci, fr, atN, aY, pd, br, J, ad, Na, ec, M, aT, FQ, Nc, bK, K, yh, ae, azh, ly, hM, A, xU, cH, aW, Y, vj, Zf, Gv, Mz, aDP, cm, bw, KM, qa, lx, op, LB, ck, QG, Qf, eM, iT, Nk, vA, aiM, ajd, cj, clT, CZ, y, bt, ZW, B); #c1(NR4A3) c2(XP_005252294) c3(nuclear receptor subfamily 4 group A member 3 isoform X2) c4( ) c5(271653) c6( ) c7(bL, bM, T, kh, dD, xu, ID, aNA, ea, aHA, yG, ha, cz, aj, v, eq, ci, fr, atN, aY, pd, br, J, ad, Na, ec, M, aT, FQ, Nc, bK, K, yh, ae, azh, ly, hM, A, xU, cH, aW, Y, vj, Zf, Gv, Mz, aDP, cm, bw, KM, qa, lx, op, LB, ck, QG, Qf, eM, iT, Nk, vA, aiM, ajd, cj, clT, CZ, y, bt, ZW, B); #c1(NR5A1) c2(NP_004950) c3(steroidogenic factor 1) c4(151409, 151410) c5(151411, 151412, 151413, 151414, 151415, 151416, 151417) c6( ) c7(bL, T, gU, bbn, adW, n, aj, bS, v, ct, Ns, ci, eA, J, er, dP, PW, clU, aX, vJ, il, PD, vH, UD, iv, bUo, hK, Fg, bgp, aeT, yo, yi, UL, s, ND, bfg, asP, vT, asQ, iw, bbs, dq, Pp, Lc, Hu, Z, t, clV, zZ, hq, ck, hL, KZ, m, Ux, UF, Po); #c1(NR5A1) c2(XP_005251929) c3(steroidogenic factor 1 isoform X2) c4(271300) c5(271301, 271302, 271303, 271304, 271305, 271306) c6( ) c7(bL, T, gU, bbn, adW, n, aj, bS, v, ct, Ns, ci, eA, J, er, dP, PW, clU, aX, vJ, il, PD, vH, UD, iv, bUo, hK, Fg, bgp, aeT, yo, yi, UL, s, ND, bfg, asP, vT, asQ, iw, bbs, dq, Pp, Lc, Hu, Z, t, clV, zZ, hq, ck, hL, KZ, m, Ux, UF, Po); #c1(NR5A1) c2(XP_011516758) c3(steroidogenic factor 1 isoform X3) c4( ) c5(310213, 310214, 310215, 310216, 310217, 310218) c6( ) c7(bL, T, gU, bbn, adW, n, aj, bS, v, ct, Ns, ci, eA, J, er, dP, PW, clU, aX, vJ, il, PD, vH, UD, iv, bUo, hK, Fg, bgp, aeT, yo, yi, UL, s, ND, bfg, asP, vT, asQ, iw, bbs, dq, Pp, Lc, Hu, Z, t, clV, zZ, hq, ck, hL, KZ, m, Ux, UF, Po); #c1(NR5A2) c2(NP_001263393) c3(nuclear receptor subfamily 5 group A member 2 isoform 3) c4( ) c5(97234, 97235, 97236, 97237, 97238, 97239, 97240, 97241, 97242, 97243, 97244, 97245) c6( ) c7(T, aC, aA, bB, hX, aE, UG, aT, K, KV, bA, Qe, xQ, aiB, iU, qt, aW, fe, iV, cm, ck, iT, bE, eD, hL, im); #c1(NR5A2) c2(NP_003813) c3(nuclear receptor subfamily 5 group A member 2 isoform 2) c4(141068, 141069, 141070, 141071) c5(141072, 141073, 141074, 141075, 141076, 141077, 141078, 141079) c6( ) c7(T, aC, aA, bB, hX, aE, UG, aT, K, KV, bA, Qe, xQ, aiB, iU, qt, aW, fe, iV, cm, ck, iT, bE, eD, hL, im); #c1(NR5A2) c2(NP_995582) c3(nuclear receptor subfamily 5 group A member 2 isoform 1) c4(263926, 263927, 263928) c5(263929, 263930, 263931, 263932, 263933, 263934, 263935, 263936, 263937, 263938, 263939, 263940, 263941, 263942, 263943, 263944, 263945, 263946, 263947, 263948, 263949, 263950, 263951, 263952, 263953, 263954, 263955, 263956, 263957) c6( ) c7(T, aC, aA, bB, hX, aE, UG, aT, K, KV, bA, Qe, xQ, aiB, iU, qt, aW, fe, iV, cm, ck, iT, bE, eD, hL, im); #c1(NR5A2) c2(XP_011507686) c3(nuclear receptor subfamily 5 group A member 2 isoform X2) c4(297697) c5( ) c6( ) c7(T, aC, aA, bB, hX, aE, UG, aT, K, KV, bA, Qe, xQ, aiB, iU, qt, aW, fe, iV, cm, ck, iT, bE, eD, hL, im); #c1(NRGA1) c2(NP_001265475) c3(nuclear receptor subfamily 6 group A member 1 isoform 4) c4(98628) c5(98629, 98630, 98631, 98632, 98633, 98634) c6( ) c7(Na, T, wu, aW, eD, ff, aT, ks, rO, Nc, wm, en, nJ, ae, ad); #c1(NR6A1) c2(NP_001480) c3(nuclear receptor subfamily 6 group A member 1 isoform 2) c4(118048) c5(118049, 118050, 118051, 118052, 118053, 118054, 118055) c6( ) c7(Na, T, wu, aW, eD, ff, aT, ks, rO, Nc, wm, en, nJ, ae, ad); #c1(NR6A1) c2(NP_201591) c3(nuclear receptor subfamily 6 group A member 1 isoform 1) c4(228308) c5(228309, 228310, 228311, 228312, 228313, 228314) c6( ) c7(Na, T, wu, aW, eD, ff, aT, ks, rO, Nc, wm, en, nJ, ae, ad); #c1(NRAP) c2(NP_006166) c3(nebulin-related-anchoring protein isoform 1) c4(162473, 162474) c5(162475, 162476, 162477, 162478, 162479, 162480, 162481, 162482, 162483, 162484, 162485, 162486) c6( ) c7(vc, cc, abV); #c1(NRAP) c2(NP_932326) c3(nebulin-related-anchoring protein isoform 2) c4(258945, 258946) c5(258947, 258948, 258949, 258950, 258951, 258952, 258953, 258954, 258955, 258956, 258957, 258958) c6( ) c7(vc, cc, abV); #c1(NRAP) c2(XP_005269922) c3(nebulin-related-anchoring protein isoform X3) c4(283007) c5( ) c6( ) c7(vc, cc, abV); #c1(NRAP) c2(XP_011538134) c3(nebulin-related-anchoring protein isoform X4) c4( ) c5(335713, 335714, 335715, 335716, 335717, 335718) c6( ) c7(vc, cc, abV); #c1(NRARP) c2(NP_001004354) c3(notch-regulated ankyrin repeat-containing protein) c4(20612) c5(20613, 20614, 20615, 20616, 20617, 20618) c6( ) c7(dB); #c1(NRBP1) c2(XP_005264331) c3(nuclear receptor-binding protein isoform X1) c4(278804, 278805, 278806, 278807) c5(278808, 278809, 278810, 278811, 278812, 278813, 278814, 278815, 278816, 278817, 278818, 278819, 278820, 278821, 278822, 278823) c6( ) c7(T, ae, ad, iT); #c1(NRBP1) c2(XP_006712062) c3(nuclear receptor-binding protein isoform X2) c4( ) c5(286373, 286374, 286375, 286376, 286377, 286378, 286379, 286380, 286381, 286382, 286383, 286384) c6( ) c7(T, ae, ad, iT); #c1(NRBP2) c2(NP_848659) c3(nuclear receptor-binding protein 2) c4(254111, 254112) c5(254113, 254114, 254115, 254116, 254117, 254118, 254119, 254120, 254121, 254122, 254123, 254124) c6( ) c7(asl); #c1(NRCAM) c2(NP_001032209) c3(neuronal cell adhesion molecule isoform A precursor) c4(31093) c5(31094, 31095, 31096, 31097, 31098, 31099, 31100, 31101, 31102, 31103) c6( ) c7(bN, ul, aRp, aQE, s, nB, Iv, aW, Y, bE, X, aT, r, bB, bS, eA, nA, he, IB, q, FT); #c1(NRCAM) c2(NP_001180511) c3(neuronal cell adhesion molecule isoform D precursor) c4(74193) c5(74194, 74195, 74196, 74197, 74198, 74199) c6( ) c7(bN, ul, aRp, aQE, s, nB, Iv, aW, Y, bE, X, aT, r, bB, bS, eA, nA, he, IB, q, FT); #c1(NRCAM) c2(NP_001180512) c3(neuronal cell adhesion molecule isoform E precursor) c4(74200) c5(74201, 74202, 74203, 74204, 74205, 74206) c6( ) c7(bN, ul, aRp, aQE, s, nB, Iv, aW, Y, bE, X, aT, r, bB, bS, eA, nA, he, IB, q, FT); #c1(NRCAM) c2(NP_001180513) c3(neuronal cell adhesion molecule isoform F precursor) c4(74207, 74208) c5(74209, 74210, 74211, 74212, 74213, 74214, 74215, 74216, 74217, 74218, 74219) c6( ) c7(bN, ul, aRp, aQE, s, nB, Iv, aW, Y, bE, X, aT, r, bB, bS, eA, nA, he, IB, q, FT); #c1(NRCAM) c2(NP_005001) c3(neuronal cell adhesion molecule isoform B precursor) c4(151942) c5(151943, 151944, 151945, 151946, 151947, 151948, 151949, 151950, 151951, 151952, 151953, 151954, 151955, 151956, 151957, 151958, 151959, 151960, 151961, 151962, 151963, 151964) c6( ) c7(bN, ul, aRp, aQE, s, nB, Iv, aW, Y, bE, X, aT, r, bB, bS, eA, nA, he, IB, q, FT); #c1(NRCAM) c2(XP_005250437) c3(neuronal cell adhesion molecule isoform X14) c4( ) c5(270307) c6( ) c7(bN, ul, aRp, aQE, s, nB, Iv, aW, Y, bE, X, aT, r, bB, bS, eA, nA, he, IB, q, FT); #c1(NRCAM) c2(XP_006716066) c3(neuronal cell adhesion molecule isoform X3) c4(290017, 290018) c5(290019, 290020, 290021, 290022, 290023, 290024) c6( ) c7(bN, ul, aRp, aQE, s, nB, Iv, aW, Y, bE, X, aT, r, bB, bS, eA, nA, he, IB, q, FT); #c1(NRCAM) c2(XP_011514561) c3(neuronal cell adhesion molecule isoform X6) c4(307254, 307255) c5( ) c6( ) c7(bN, ul, aRp, aQE, s, nB, Iv, aW, Y, bE, X, aT, r, bB, bS, eA, nA, he, IB, q, FT); #c1(NRCAM) c2(XP_011514563) c3(neuronal cell adhesion molecule isoform X9) c4(307256, 307257) c5( ) c6( ) c7(bN, ul, aRp, aQE, s, nB, Iv, aW, Y, bE, X, aT, r, bB, bS, eA, nA, he, IB, q, FT); #c1(NRCAM) c2(XP_011514567) c3(neuronal cell adhesion molecule isoform X15) c4( ) c5(307258, 307259, 307260, 307261, 307262, 307263) c6( ) c7(bN, ul, aRp, aQE, s, nB, Iv, aW, Y, bE, X, aT, r, bB, bS, eA, nA, he, IB, q, FT); #c1(NRCAM) c2(XP_011514573) c3(neuronal cell adhesion molecule isoform X25) c4(307264) c5(307265, 307266, 307267, 307268, 307269, 307270) c6( ) c7(bN, ul, aRp, aQE, s, nB, Iv, aW, Y, bE, X, aT, r, bB, bS, eA, nA, he, IB, q, FT); #c1(NRCAM) c2(XP_011514574) c3(neuronal cell adhesion molecule isoform X26) c4( ) c5(307271, 307272, 307273, 307274, 307275, 307276, 307277, 307278, 307279, 307280, 307281, 307282) c6( ) c7(bN, ul, aRp, aQE, s, nB, Iv, aW, Y, bE, X, aT, r, bB, bS, eA, nA, he, IB, q, FT); #c1(NRD1) c2(XP_011539823) c3(nardilysin isoform X1) c4(338054, 338055) c5( ) c6( ) c7(aW, ht, aT, cm, ci, hu, AO, it, af, ad, L); #c1(NRD1) c2(XP_011539824) c3(nardilysin isoform X2) c4(338056) c5( ) c6( ) c7(aW, ht, aT, cm, ci, hu, AO, it, af, ad, L); #c1(NRD1) c2(XP_011539826) c3(nardilysin isoform X4) c4( ) c5(338057, 338058, 338059, 338060, 338061) c6( ) c7(aW, ht, aT, cm, ci, hu, AO, it, af, ad, L); #c1(NRDE2) c2(NP_060440) c3(protein NRDE2 homolog) c4(195947, 195948) c5(195949, 195950, 195951, 195952, 195953, 195954, 195955, 195956, 195957, 195958, 195959, 195960) c6( ) c7(n, Y, bM); #c1(NREP) c2(NP_001135947) c3(neuronal regeneration-related protein isoform c) c4(53684, 53685) c5(53686, 53687, 53688, 53689, 53690, 53691) c6( ) c7(dE, eA, y, cz); #c1(NREP) c2(NP_001135955) c3(neuronal regeneration-related protein isoform a) c4(53692, 53693) c5(53694, 53695, 53696, 53697, 53698, 53699, 53700, 53701, 53702, 53703, 53704, 53705, 53706, 53707, 53708, 53709, 53710, 53711, 53712, 53713, 53714, 53715, 53716, 53717, 53718, 53719, 53720, 53721, 53722, 53723, 53724, 53725, 53726, 53727, 53728, 53729, 53730, 53731, 53732, 53733, 53734, 53735, 53736, 53737, 53738, 53739, 53740, 53741, 53742, 53743, 53744, 53745, 53746) c6( ) c7(dE, eA, y, cz); #c1(NREP) c2(XP_006714795) c3(neuronal regeneration-related protein isoform X1) c4( ) c5(288175) c6( ) c7(dE, eA, y, cz); #c1(NREP) c2(XP_006714796) c3(neuronal regeneration-related protein isoform X2) c4( ) c5(288176) c6( ) c7(dE, eA, y, cz); #c1(NRF1) c2(NP_001280092) c3(nuclear respirator factor 1 isoform 2) c4(111279, 111280) c5(111281, 111282, 111283, 111284, 111285, 111286, 111287, 111288, 111289, 111290) c6( ) c7(bL, T, af, aW, eu, aT, Mz, aq, aj, hl, m, K, Ku, cm, ae, cd, J, ad, hX); #c1(NRF1) c2(NP_001280093) c3(nuclear respiratory factor 1 isoform 3) c4( ) c5(111291, 111292, 111293, 111294, 111295) c6( ) c7(bL, T, af, aW, eu, aT, Mz, aq, aj, hl, m, K, Ku, cm, ae, cd, J, ad, hX); #c1(NRF1) c2(NP_005002) c3(nuclear respirator factor 1 isoform 1) c4(151965, 151966, 151967) c5(151968, 151969, 151970, 151971, 151972, 151973, 151974, 151975, 151976, 151977, 151978, 151979, 151980, 151981, 151982, 151983, 151984, 151985, 151986, 151987, 151988, 151989, 151990, 151991, 151992, 151993, 151994) c6( ) c7(bL, T, af, aW, eu, aT, Mz, aq, aj, hl, m, K, Ku, cm, ae, cd, J, ad, hX); #c1(NRG1) c2(NP_001153467) c3(pro-neuregulin-1, membrane-bound isoform isoform HRG-beta1c) c4(60568) c5(60569) c6( ) c7(bL, bM, T, dD, aC, ya, IT, hU, aw, ha, EQ, fZ, bO, oR, gf, j, ci, eq, V, cd, eA, amR, av, aE, pN, yt, fm, aeO, Qk, M, aT, cy, dL, bK, K, hP, an, oi, he, rz, ahE, xa, dx, af, dl, bA, eL, kl, aeR, aW, Y, Ls, AQ, ff, gl, ahl, en, Eg, Z, t, xw, bz, g, Qt, adj, jb, pH, Ew, ac, c, nB, agc, wO, eM, uR, U, tV, vL, sv, clW, uJ, m, bFC, iu); #c1(NRG1) c2(NP_001153468) c3(pro-neuregulin-1, membrane-bound isoform isoform ndf43c) c4(60570) c5(60571) c6( ) c7(bL, bM, T, dD, aC, ya, IT, hU, aw, ha, EQ, fZ, bO, oR, gf, j, ci, eq, V, cd, eA, amR, av, aE, pN, yt, fm, aeO, Qk, M, aT, cy, dL, bK, K, hP, an, oi, he, rz, ahE, xa, dx, af, dl, bA, eL, kl, aeR, aW, Y, Ls, AQ, ff, gl, ahl, en, Eg, Z, t, xw, bz, g, Qt, adj, jb, pH, Ew, ac, c, nB, agc, wO, eM, uR, U, tV, vL, sv, clW, uJ, m, bFC, iu); #c1(NRG1) c2(NP_001153471) c3(pro-neuregulin-1, membrane-bound isoform isoform HRG-beta1b) c4(60572) c5(60573) c6( ) c7(bL, bM, T, dD, aC, ya, IT, hU, aw, ha, EQ, fZ, bO, oR, gf, j, ci, eq, V, cd, eA, amR, av, aE, pN, yt, fm, aeO, Qk, M, aT, cy, dL, bK, K, hP, an, oi, he, rz, ahE, xa, dx, af, dl, bA, eL, kl, aeR, aW, Y, Ls, AQ, ff, gl, ahl, en, Eg, Z, t, xw, bz, g, Qt, adj, jb, pH, Ew, ac, c, nB, agc, wO, eM, uR, U, tV, vL, sv, clW, uJ, m, bFC, iu); #c1(NRG1) c2(NP_001153473) c3(pro-neuregulin-1, membrane-bound isoform isoform HRG-beta1d) c4(60574, 60575) c5(60576, 60577, 60578, 60579, 60580, 60581, 60582, 60583, 60584, 60585, 60586, 60587, 60588) c6( ) c7(bL, bM, T, dD, aC, ya, IT, hU, aw, ha, EQ, fZ, bO, oR, gf, j, ci, eq, V, cd, eA, amR, av, aE, pN, yt, fm, aeO, Qk, M, aT, cy, dL, bK, K, hP, an, oi, he, rz, ahE, xa, dx, af, dl, bA, eL, kl, aeR, aW, Y, Ls, AQ, ff, gl, ahl, en, Eg, Z, t, xw, bz, g, Qt, adj, jb, pH, Ew, ac, c, nB, agc, wO, eM, uR, U, tV, vL, sv, clW, uJ, m, bFC, iu); #c1(NRG1) c2(NP_001153474) c3(pro-neuregulin-1, membrane-bound isoform isoform HRG-gamma2) c4(60589) c5(60590) c6( ) c7(bL, bM, T, dD, aC, ya, IT, hU, aw, ha, EQ, fZ, bO, oR, gf, j, ci, eq, V, cd, eA, amR, av, aE, pN, yt, fm, aeO, Qk, M, aT, cy, dL, bK, K, hP, an, oi, he, rz, ahE, xa, dx, af, dl, bA, eL, kl, aeR, aW, Y, Ls, AQ, ff, gl, ahl, en, Eg, Z, t, xw, bz, g, Qt, adj, jb, pH, Ew, ac, c, nB, agc, wO, eM, uR, U, tV, vL, sv, clW, uJ, m, bFC, iu); #c1(NRG1) c2(NP_001153476) c3(pro-neuregulin-1, membrane-bound isoform isoform ndf43b) c4(60591) c5(60592, 60593, 60594) c6( ) c7(bL, bM, T, dD, aC, ya, IT, hU, aw, ha, EQ, fZ, bO, oR, gf, j, ci, eq, V, cd, eA, amR, av, aE, pN, yt, fm, aeO, Qk, M, aT, cy, dL, bK, K, hP, an, oi, he, rz, ahE, xa, dx, af, dl, bA, eL, kl, aeR, aW, Y, Ls, AQ, ff, gl, ahl, en, Eg, Z, t, xw, bz, g, Qt, adj, jb, pH, Ew, ac, c, nB, agc, wO, eM, uR, U, tV, vL, sv, clW, uJ, m, bFC, iu); #c1(NRG1) c2(NP_001153477) c3(pro-neuregulin-1, membrane-bound isoform isoform HRG-beta3b) c4(60595) c5(60596) c6( ) c7(bL, bM, T, dD, aC, ya, IT, hU, aw, ha, EQ, fZ, bO, oR, gf, j, ci, eq, V, cd, eA, amR, av, aE, pN, yt, fm, aeO, Qk, M, aT, cy, dL, bK, K, hP, an, oi, he, rz, ahE, xa, dx, af, dl, bA, eL, kl, aeR, aW, Y, Ls, AQ, ff, gl, ahl, en, Eg, Z, t, xw, bz, g, Qt, adj, jb, pH, Ew, ac, c, nB, agc, wO, eM, uR, U, tV, vL, sv, clW, uJ, m, bFC, iu); #c1(NRG1) c2(NP_001153479) c3(pro-neuregulin-1, membrane-bound isoform isoform HRG-gamma3) c4(60597) c5(60598) c6( ) c7(bL, bM, T, dD, aC, ya, IT, hU, aw, ha, EQ, fZ, bO, oR, gf, j, ci, eq, V, cd, eA, amR, av, aE, pN, yt, fm, aeO, Qk, M, aT, cy, dL, bK, K, hP, an, oi, he, rz, ahE, xa, dx, af, dl, bA, eL, kl, aeR, aW, Y, Ls, AQ, ff, gl, ahl, en, Eg, Z, t, xw, bz, g, Qt, adj, jb, pH, Ew, ac, c, nB, agc, wO, eM, uR, U, tV, vL, sv, clW, uJ, m, bFC, iu); #c1(NRG1) c2(NP_001153480) c3(pro-neuregulin-1, membrane-bound isoform isoform HRG-beta2b) c4( ) c5(60599, 60600, 60601, 60602, 60603) c6( ) c7(bL, bM, T, dD, aC, ya, IT, hU, aw, ha, EQ, fZ, bO, oR, gf, j, ci, eq, V, cd, eA, amR, av, aE, pN, yt, fm, aeO, Qk, M, aT, cy, dL, bK, K, hP, an, oi, he, rz, ahE, xa, dx, af, dl, bA, eL, kl, aeR, aW, Y, Ls, AQ, ff, gl, ahl, en, Eg, Z, t, xw, bz, g, Qt, adj, jb, pH, Ew, ac, c, nB, agc, wO, eM, uR, U, tV, vL, sv, clW, uJ, m, bFC, iu); #c1(NRG1) c2(NP_004486) c3(pro-neuregulin-1, membrane-bound isoform isoform HRG-gamma) c4( ) c5(146838) c6( ) c7(bL, bM, T, dD, aC, ya, IT, hU, aw, ha, EQ, fZ, bO, oR, gf, j, ci, eq, V, cd, eA, amR, av, aE, pN, yt, fm, aeO, Qk, M, aT, cy, dL, bK, K, hP, an, oi, he, rz, ahE, xa, dx, af, dl, bA, eL, kl, aeR, aW, Y, Ls, AQ, ff, gl, ahl, en, Eg, Z, t, xw, bz, g, Qt, adj, jb, pH, Ew, ac, c, nB, agc, wO, eM, uR, U, tV, vL, sv, clW, uJ, m, bFC, iu); #c1(NRG1) c2(NP_039250) c3(pro-neuregulin-1, membrane-bound isoform isoform HRG-beta1) c4(176951) c5(176952, 176953, 176954, 176955, 176956, 176957, 176958) c6( ) c7(bL, bM, T, dD, aC, ya, IT, hU, aw, ha, EQ, fZ, bO, oR, gf, j, ci, eq, V, cd, eA, amR, av, aE, pN, yt, fm, aeO, Qk, M, aT, cy, dL, bK, K, hP, an, oi, he, rz, ahE, xa, dx, af, dl, bA, eL, kl, aeR, aW, Y, Ls, AQ, ff, gl, ahl, en, Eg, Z, t, xw, bz, g, Qt, adj, jb, pH, Ew, ac, c, nB, agc, wO, eM, uR, U, tV, vL, sv, clW, uJ, m, bFC, iu); #c1(NRG1) c2(NP_039251) c3(pro-neuregulin-1, membrane-bound isoform isoform HRG-beta2) c4(176959, 176960, 176961, 176962) c5(176963, 176964, 176965, 176966, 176967, 176968, 176969, 176970, 176971, 176972, 176973, 176974, 176975, 176976, 176977, 176978, 176979, 176980, 176981, 176982, 176983, 176984, 176985, 176986, 176987, 176988, 176989, 176990, 176991, 176992, 176993, 176994, 176995, 176996, 176997, 176998, 176999, 177000, 177001, 177002, 177003, 177004, 177005, 177006, 177007, 177008, 177009, 177010, 177011, 177012, 177013, 177014, 177015, 177016, 177017, 177018, 177019, 177020, 177021, 177022, 177023, 177024, 177025, 177026, 177027, 177028, 177029, 177030, 177031, 177032, 177033, 177034, 177035, 177036, 177037, 177038, 177039, 177040, 177041, 177042, 177043, 177044, 177045, 177046, 177047, 177048, 177049, 177050, 177051, 177052, 177053, 177054, 177055, 177056, 177057, 177058, 177059, 177060, 177061, 177062, 177063, 177064) c6(177065) c7(bL, bM, T, dD, aC, ya, IT, hU, aw, ha, EQ, fZ, bO, oR, gf, j, ci, eq, V, cd, eA, amR, av, aE, pN, yt, fm, aeO, Qk, M, aT, cy, dL, bK, K, hP, an, oi, he, rz, ahE, xa, dx, af, dl, bA, eL, kl, aeR, aW, Y, Ls, AQ, ff, gl, ahl, en, Eg, Z, t, xw, bz, g, Qt, adj, jb, pH, Ew, ac, c, nB, agc, wO, eM, uR, U, tV, vL, sv, clW, uJ, m, bFC, iu); #c1(NRG1) c2(NP_039252) c3(pro-neuregulin-1, membrane-bound isoform isoform HRG-beta3) c4(177066) c5(177067) c6( ) c7(bL, bM, T, dD, aC, ya, IT, hU, aw, ha, EQ, fZ, bO, oR, gf, j, ci, eq, V, cd, eA, amR, av, aE, pN, yt, fm, aeO, Qk, M, aT, cy, dL, bK, K, hP, an, oi, he, rz, ahE, xa, dx, af, dl, bA, eL, kl, aeR, aW, Y, Ls, AQ, ff, gl, ahl, en, Eg, Z, t, xw, bz, g, Qt, adj, jb, pH, Ew, ac, c, nB, agc, wO, eM, uR, U, tV, vL, sv, clW, uJ, m, bFC, iu); #c1(NRG1) c2(NP_039253) c3(pro-neuregulin-1, membrane-bound isoform isoform SMDF) c4(177068) c5(177069, 177070, 177071, 177072, 177073, 177074, 177075) c6( ) c7(bL, bM, T, dD, aC, ya, IT, hU, aw, ha, EQ, fZ, bO, oR, gf, j, ci, eq, V, cd, eA, amR, av, aE, pN, yt, fm, aeO, Qk, M, aT, cy, dL, bK, K, hP, an, oi, he, rz, ahE, xa, dx, af, dl, bA, eL, kl, aeR, aW, Y, Ls, AQ, ff, gl, ahl, en, Eg, Z, t, xw, bz, g, Qt, adj, jb, pH, Ew, ac, c, nB, agc, wO, eM, uR, U, tV, vL, sv, clW, uJ, m, bFC, iu); #c1(NRG1) c2(NP_039254) c3(pro-neuregulin-1, membrane-bound isoform isoform ndf43) c4(177076) c5(177077, 177078, 177079, 177080, 177081, 177082, 177083, 177084, 177085, 177086, 177087, 177088) c6( ) c7(bL, bM, T, dD, aC, ya, IT, hU, aw, ha, EQ, fZ, bO, oR, gf, j, ci, eq, V, cd, eA, amR, av, aE, pN, yt, fm, aeO, Qk, M, aT, cy, dL, bK, K, hP, an, oi, he, rz, ahE, xa, dx, af, dl, bA, eL, kl, aeR, aW, Y, Ls, AQ, ff, gl, ahl, en, Eg, Z, t, xw, bz, g, Qt, adj, jb, pH, Ew, ac, c, nB, agc, wO, eM, uR, U, tV, vL, sv, clW, uJ, m, bFC, iu); #c1(NRG1) c2(NP_039256) c3(pro-neuregulin-1, membrane-bound isoform isoform GGF2 precursor) c4(177089) c5(177090, 177091, 177092, 177093, 177094, 177095, 177096, 177097, 177098, 177099, 177100, 177101, 177102, 177103, 177104, 177105, 177106, 177107, 177108, 177109, 177110, 177111, 177112, 177113, 177114, 177115, 177116, 177117, 177118, 177119, 177120, 177121, 177122, 177123, 177124, 177125, 177126, 177127, 177128, 177129, 177130, 177131, 177132, 177133, 177134, 177135, 177136, 177137, 177138, 177139, 177140, 177141, 177142, 177143, 177144, 177145, 177146, 177147, 177148, 177149, 177150, 177151, 177152, 177153, 177154, 177155, 177156, 177157, 177158, 177159, 177160, 177161, 177162, 177163, 177164, 177165, 177166, 177167, 177168, 177169, 177170, 177171, 177172, 177173, 177174, 177175, 177176, 177177, 177178, 177179, 177180, 177181, 177182) c6( ) c7(bL, bM, T, dD, aC, ya, IT, hU, aw, ha, EQ, fZ, bO, oR, gf, j, ci, eq, V, cd, eA, amR, av, aE, pN, yt, fm, aeO, Qk, M, aT, cy, dL, bK, K, hP, an, oi, he, rz, ahE, xa, dx, af, dl, bA, eL, kl, aeR, aW, Y, Ls, AQ, ff, gl, ahl, en, Eg, Z, t, xw, bz, g, Qt, adj, jb, pH, Ew, ac, c, nB, agc, wO, eM, uR, U, tV, vL, sv, clW, uJ, m, bFC, iu); #c1(NRG1) c2(NP_039258) c3(pro-neuregulin-1, membrane-bound isoform isoform HRG-alpha) c4(177183, 177184, 177185) c5(177186, 177187, 177188, 177189, 177190, 177191, 177192, 177193, 177194, 177195, 177196, 177197, 177198, 177199, 177200, 177201, 177202) c6( ) c7(bL, bM, T, dD, aC, ya, IT, hU, aw, ha, EQ, fZ, bO, oR, gf, j, ci, eq, V, cd, eA, amR, av, aE, pN, yt, fm, aeO, Qk, M, aT, cy, dL, bK, K, hP, an, oi, he, rz, ahE, xa, dx, af, dl, bA, eL, kl, aeR, aW, Y, Ls, AQ, ff, gl, ahl, en, Eg, Z, t, xw, bz, g, Qt, adj, jb, pH, Ew, ac, c, nB, agc, wO, eM, uR, U, tV, vL, sv, clW, uJ, m, bFC, iu); #c1(NRG2) c2(NP_001171864) c3(pro-neuregulin-2, membrane-bound isoform isoform 7) c4(71951) c5(71952, 71953, 71954, 71955, 71956, 71957) c6( ) c7(aW, ac, aT, pZ, bU); #c1(NRG2) c2(NP_004874) c3(pro-neuregulin-2, membrane-bound isoform isoform 1) c4(150459) c5(150460, 150461, 150462, 150463, 150464, 150465) c6( ) c7(aW, ac, aT, pZ, bU); #c1(NRG2) c2(NP_053584) c3(pro-neuregulin-2, membrane-bound isoform isoform 2) c4(177237) c5(177238, 177239, 177240, 177241, 177242, 177243) c6( ) c7(aW, ac, aT, pZ, bU); #c1(NRG2) c2(NP_053585) c3(pro-neuregulin-2, membrane-bound isoform isoform 3) c4(177244, 177245) c5(177246, 177247, 177248, 177249, 177250, 177251, 177252, 177253, 177254, 177255, 177256, 177257) c6( ) c7(aW, ac, aT, pZ, bU); #c1(NRG2) c2(NP_053586) c3(pro-neuregulin-2, membrane-bound isoform isoform 4) c4(177258) c5(177259, 177260, 177261, 177262, 177263, 177264) c6( ) c7(aW, ac, aT, pZ, bU); #c1(NRG2) c2(XP_006714873) c3(pro-neuregulin-2, membrane-bound isoform isoform X7) c4(288288, 288289) c5(288290, 288291, 288292, 288293, 288294, 288295, 288296, 288297, 288298, 288299, 288300, 288301) c6( ) c7(aW, ac, aT, pZ, bU); #c1(NRG3) c2(NP_001010848) c3(pro-neuregulin-3, membrane-bound isoform isoform 1) c4(23831) c5(23832, 23833, 23834, 23835, 23836, 23837) c6( ) c7(bM, aC, af, rz, yW, aW, Fo, oe, aw, aT, cz, xg, akY, bK, ahl, Eg, he, ahE, cd); #c1(NRG3) c2(NP_001159444) c3(pro-neuregulin-3, membrane-bound isoform isoform 2) c4(64068, 64069) c5(64070, 64071, 64072, 64073, 64074, 64075, 64076) c6( ) c7(bM, aC, af, rz, yW, aW, Fo, oe, aw, aT, cz, xg, akY, bK, ahl, Eg, he, ahE, cd); #c1(NRG3) c2(NP_001159445) c3(pro-neuregulin-3, membrane-bound isoform isoform 3) c4(64077) c5(64078, 64079, 64080, 64081, 64082, 64083) c6( ) c7(bM, aC, af, rz, yW, aW, Fo, oe, aw, aT, cz, xg, akY, bK, ahl, Eg, he, ahE, cd); #c1(NRG3) c2(XP_005269501) c3(pro-neuregulin-3, membrane-bound isoform isoform X2) c4(282605) c5(282606, 282607, 282608, 282609, 282610, 282611) c6( ) c7(bM, aC, af, rz, yW, aW, Fo, oe, aw, aT, cz, xg, akY, bK, ahl, Eg, he, ahE, cd); #c1(NRG3) c2(XP_011537479) c3(pro-neuregulin-3, membrane-bound isoform isoform X7) c4( ) c5(335087, 335088, 335089, 335090, 335091, 335092, 335093, 335094, 335095, 335096) c6( ) c7(bM, aC, af, rz, yW, aW, Fo, oe, aw, aT, cz, xg, akY, bK, ahl, Eg, he, ahE, cd); #c1(NRG4) c2(NP_612640) c3(pro-neuregulin-4, membrane-bound isoform) c4(236737, 236738, 236739) c5(236740, 236741, 236742, 236743, 236744, 236745, 236746, 236747, 236748, 236749, 236750, 236751, 236752, 236753, 236754, 236755, 236756, 236757) c6( ) c7(bL, RT, IR, fc, agV, fe, nw, dL, v, cP, ji, nC, ae, ad); #c1(NRGN) c2(NP_001119653) c3(neurogranin) c4(44282) c5(44283, 44284, 44285, 44286, 44287, 44288, 44289, 44290, 44291, 44292, 44293, 44294, 44295, 44296) c6( ) c7(gl, bK, K, bC, yA, cm, ae, eA, ad); #c1(NRIP1) c2(XP_005261122) c3(nuclear receptor-interacting protein 1 isoform X1) c4(277220, 277221) c5(277222, 277223, 277224, 277225, 277226, 277227, 277228, 277229, 277230, 277231, 277232, 277233, 277234, 277235, 277236, 277237, 277238, 277239, 277240, 277241) c6( ) c7(T, gU, aw, bB, uu, cd, dP, aT, bA, JU, vT, aW, fc, dq, g, iV, t, fq, yE, bE, eD, gZ, m, cP, y); #c1(NRIP2) c2(NP_113662) c3(nuclear receptor-interacting protein 2) c4(221996, 221997) c5(221998, 221999, 222000, 222001, 222002, 222003, 222004, 222005, 222006, 222007, 222008, 222009) c6( ) c7(j); #c1(NRK) c2(NP_940867) c3(nik-related protein kinase) c4(259991) c5(259992, 259993, 259994, 259995, 259996, 259997, 259998, 259999, 260000, 260001, 260002, 260003, 260004, 260005, 260006, 260007, 260008) c6( ) c7(ck, je, iM, kH); #c1(NRK) c2(XP_006724695) c3(nik-related protein kinase isoform X1) c4(296261, 296262, 296263) c5( ) c6( ) c7(ck, je, iM, kH); #c1(NRK) c2(XP_006724697) c3(nik-related protein kinase isoform X4) c4( ) c5(296264, 296265, 296266, 296267, 296268, 296269) c6( ) c7(ck, je, iM, kH); #c1(NRK) c2(XP_011529189) c3(nik-related protein kinase isoform X3) c4( ) c5(324592) c6( ) c7(ck, je, iM, kH); #c1(NRL) c2(XP_011535103) c3(neural retina-specific leucine zipper protein isoform X2) c4(331893, 331894, 331895) c5(331896, 331897, 331898, 331899) c6( ) c7(clX, clZ, xX, IR, alF, bFo, nx, clY, nw, nk, Bd, nC, ayj); #c1(NRL) c2(XP_011535107) c3(neural retina-specific leucine zipper protein isoform X1) c4( ) c5(331900, 331901, 331902, 331903, 331904, 331905, 331906, 331907, 331908, 331909, 331910, 331911, 331912, 331913, 331914, 331915) c6( ) c7(clX, clZ, xX, IR, alF, bFo, nx, clY, nw, nk, Bd, nC, ayj); #c1(NRL) c2(XP_011535108) c3(neural retina-specific leucine zipper protein isoform X3) c4( ) c5(331916, 331917, 331918, 331919, 331920, 331921, 331922, 331923, 331924, 331925) c6( ) c7(clX, clZ, xX, IR, alF, bFo, nx, clY, nw, nk, Bd, nC, ayj); #c1(NRM) c2(NP_001257638) c3(nurim isoform 4) c4(95524) c5(95525, 95526, 95527, 95528, 95529, 95530, 95531, 95532, 95533, 95534, 95535, 95536, 95537, 95538, 95539, 95540, 95541, 95542, 95543, 95544, 95545, 95546, 95547, 95548) c6( ) c7(y, eZ, cj); #c1(NRM) c2(NP_009174) c3(nurim isoform 1) c4(171256, 171257) c5(171258, 171259, 171260, 171261, 171262, 171263, 171264, 171265, 171266, 171267, 171268, 171269, 171270, 171271, 171272, 171273, 171274, 171275, 171276, 171277, 171278, 171279, 171280, 171281, 171282, 171283, 171284, 171285, 171286, 171287, 171288, 171289, 171290, 171291, 171292, 171293, 171294, 171295, 171296, 171297, 171298, 171299, 171300, 171301, 171302, 171303, 171304, 171305, 171306, 171307, 171308, 171309) c6( ) c7(y, eZ, cj); #c1(NRN1) c2(NP_001265639) c3(neuritin isoform 1 precursor) c4(99076) c5(99077, 99078, 99079, 99080, 99081, 99082) c6( ) c7(KC, ke, T, xg, eK); #c1(NRP1) c2(NP_001019799) c3(neuropilin-1 isoform b precursor) c4(27841, 27842, 27843) c5(27844, 27845, 27846, 27847, 27848, 27849, 27850, 27851, 27852, 27853, 27854, 27855, 27856, 27857, 27858, 27859, 27860, 27861) c6( ) c7(T, aC, bVx, ea, bO, bB, ci, x, aE, pX, K, eL, aiJ, ago, aW, Ls, hl, g, as, cm, eM, iT, acw, vy, cj, k, m, asW, dD, sw, aw, ht, NT, fr, ct, qN, Vs, yn, ft, gd, Ne, h, hn, dL, vx, aze, hi, A, ack, aq, dB, ayS, YH, aPG, B, aA, bX, q, eA, eJ, bza, aT, cy, aPF, ae, Y, ev, r, en, t, ck, Ta, sS, iM, dy, EY, UF, bt, ao, hS, HQ, jh, bS, aFR, eq, hF, gb, ad, dP, av, hd, fX, Cj, yt, fb, d, je, ff, aF, Z, bz, eK, VO, bE, oQ, y, vt, ne, Tc); #c1(NRP1) c2(NP_001019800) c3(neuropilin-1 isoform c precursor) c4(27862) c5(27863, 27864, 27865, 27866, 27867, 27868, 27869, 27870, 27871, 27872, 27873, 27874, 27875, 27876, 27877, 27878, 27879, 27880, 27881, 27882, 27883, 27884, 27885) c6( ) c7(T, aC, bVx, ea, bO, bB, ci, x, aE, PX, K, eL, aiJ, ago, aW, Ls, hl, g, as, cm, eM, iT, acw, vy, cj, k, m, asW, dD, sw, aw, ht, NT, fr, ct, qN, Vs, yn, ft, gd, Ne, h, hn, dL, vx, aze, hi, A, ack, aq, dB, ayS, YH, aPG, B, aA, bX, q, eA, eJ, bza, aT, cy, aPF, ae, Y, ev, r, en, t, ck, Ta, sS, iM, dy, EY, UF, bt, ao, hS, HQ, jh, bS, aFR, eq, hF, gb, ad, dP, av, hd, fX, Cj, yt, fb, d, je, ff, aF, Z, bz, eK, VO, bE, oQ, y, vt, ne, Tc); #c1(NRP1) c2(NP_001231901) c3(neuropilin-1 isoform d precursor) c4(87678) c5( ) c6( ) c7(T, aC, bVx, ea, bO, bB, ci, x, aE, pX, K, eL, aiJ, ago, aW, Ls, hl, g, as, cm, eM, iT, acw, vy, cj, k, m, asW, dD, sw, aw, ht, NT, fr, ct, qN, Vs, yn, ft, gd, Ne, h, hn, dL, vx, aze, hi, A, ack, aq, dB, ayS, YH, aPG, B, aA, bX, q, eA, eJ, bza, aT, cy, aPF, ae, Y, ev, r, en, t, ck, Ta, sS, iM, dy, EY, UF, bt, ao, hS, HQ, jh, bS, aFR, eq, hF, gb, ad, dP, av, hd, fX, Cj, yt, fb, d, je, ff, aF, Z, bz, eK, VO, bE, oQ, y, vt, ne, Tc); #c1(NRP1) c2(NP_001231902) c3(neuropilin-1 isoform e precursor) c4(87679, 87680) c5(87681, 87682, 87683, 87684, 87685, 87686) c6( ) c7(T, aC, bVx, ea, bO, bB, ci, x, aE, pX, K, eL, aiJ, ago, aW, Ls, hl, g, as, cm, eM, iT, acw, vy, cj, k, m, asW, dD, sw, aw, ht, NT, fr, ct, qN, Vs, yn, ft, gd, Ne, h, hn, dL, vx, aze, hi, A, ack, aq, dB, ayS, YH, aPG, B, aA, bX, q, eA, eJ, bza, aT, cy, aPF, ae, Y, ev, r, en, t, ck, Ta, sS, iM, dy, EY, UF, bt, ao, hS, HQ, jh, bS, aFR, eq, hF, gb, ad, dP, av, hd, fX, Cj, yt, fb, d, je, ff, aF, Z, bz, eK, VO, bE, oQ, y, vt, ne, Tc); #c1(NRP1) c2(NP_003864) c3(neuropilin-1 isoform a precursor) c4(141603) c5(141604, 141605, 141606, 141607, 141608, 141609, 141610, 111611, 141612, 141613) c6( ) c7(T, aC, bVx, ea, bO, bB, ci, x, aE, pX, K, eL, aiJ, ago, aW, Ls, hl, g, as, cm, eM, iT, acw, vy, cj, k, m, asW, dD, sw, aw, ht, NT, fr, ct, qN, Vs, yn, ft, gd, Ne, h, hn, dL, vx, aze, hi, A, ack, aq, dB, ayS, YH, aPG, B, aA, bX, q, eA, eJ, bza, aT, cy, aPF, ae, Y, ev, r, en, t, ck, Ta, sS, iM, dy, EY, UF, bt, ao, hS, HQ, jh, bS, aFR, eq, hF, gb, ad, dP, av, hd, fX, Cj, yt, fb, d, je, ff, aF, Z, bz, eK, VO, bE, oQ, y, vt, ne, Tc); #c1(NRP1) c2(XP_006717584) c3(neuropilin-1 isoform X1) c4(291181) c5( ) c6( ) c7(T, aC, bVx, ea, bO, bB, ci, x, aE, pX, K, eL, aiJ, ago, aW, Ls, hl, g, as, cm, eM, iT, acw, vy, cj, k, m, asW, dD, sw, aw, ht, NT, fr, ct, qN, Vs, yn, ft, gd, Ne, h, hn, dL, vx, aze, hi, A, ack, aq, dB, ayS, YH, aPG, B, aA, bX, q, eA, eJ, bza, aT, cy, aPF, ae, Y, ev, r, en, t, ck, Ta, sS, iM, dy, EY, UF, bt, ao, hS, HQ, jh, bS, aFR, eq, hF, gb, ad, dP, av, hd, fX, Cj, yt, fb, d, je, ff, aF, Z, bz, eK, VO, bE, oQ, y, vt, ne, Tc); #c1(NRP1) c2(XP_006717586) c3(neuropilin-1 isoform X3) c4(291182, 291183) c5(291184, 291185, 291186, 291187, 291188, 291189, 291190, 291191, 291192, 291193, 291194, 291195) c6( ) c7(T, aC, bVx, ea, bO, bB, ci, x, aE, pX, K, eL, aiJ, ago, aW, Ls, hl, g, as, cm, eM, iT, acw, vy, cj, k, m, asW, dD, sw, aw, ht, NT, fr, ct, qN, Vs, yn, ft, gd, Ne, h, hn, dL, vx, aze, hi, A, ack, aq, dB, ayS, YH, aPG, B, aA, bX, q, eA, eJ, bza, aT, cy, aPF, ae, Y, ev, r, en, t, ck, Ta, sS, iM, dy, EY, UF, bt, ao, hS, HQ, jh, bS, aFR, eq, hF, gb, ad, dP, av, hd, fX, Cj, yt, fb, d, je, ff, aF, Z, bz, eK, VO, bE, oQ, y, vt, ne, Tc); #c1(NRP1) c2(XP_006717587) c3(neuropilin-1 isoform X4) c4(291196) c5( ) c6( ) c7(T, aC, bVx, ea, bO, bB, ci, x, aE, pX, K, eL, aiJ, ago, aW, Ls, hl, g, as, cm, eM, iT, acw, vy, cj, k, m, asW, dD, sw, aw, ht, NT, fr, ct, qN, Vs, yn, ft, gd, Ne, h, hn, dL, vx, aze, hi, A, ack, aq, dB, ayS, YH, aPG, B, aA, bX, q, eA, eJ, bza, aT, cy, aPF, ae, Y, ev, r, en, t, ck, Ta, sS, iM, dy, EY, UF, bt, ao, hS, HQ, jh, bS, aFR, eq, hF, gb, ad, dP, av, hd, fX, Cj, yt, fb, d, je, ff, aF, Z, bz, eK, VO, bE, oQ, y, vt, ne, Tc); #c1(NRP1) c2(XP_006717589) c3(neuropilin-1 isoform XG) c4(291197, 291198) c5(291199, 291200, 291201, 291202, 291203, 291204, 291205, 291206, 291207, 291208, 291209, 291210, 291211, 291212, 291213, 291214, 291215, 291216) c6( ) c7(T, aC, bVx, ea, bO, bB, ci, x, aE, pX, K, eL, aiJ, ago, aW, Ls, hl, g, as, cm, eM, iT, acw, vy, cj, k, m, asW, dD, sw, aw, ht, NT, fr, ct, qN, Vs, yn, ft, gd, Ne, h, hn, dL, vx, aze, hi, A, ack, aq, dB, ayS, YH, aPG, B, aA, bX, q, eA, eJ, bza, aT, cy, aPF, ae, Y, ev, r, en, t, ck, Ta, sS, iM, dy, EY, UF, bt, ao, hS, HQ, jh, bS, aFR, eq, hF, gb, ad, dP, av, hd, fX, Cj, yt, fb, d, je, ff, aF, Z, bz, eK, VO, bE, oQ, y, vt, ne, Tc); #c1(NRP1) c2(XP_011518057) c3(neuropilin-1 isoform X7) c4(312098) c5( ) c6( ) c7(T, aC, bVx, ea, bO, bB, ci, x, aE, pX, K, eL, aiJ, ago, aW, Ls, hl, g, as, cm, eM, iT, acw, vy, cj, k, m, asW, dD, sw, aw, ht, NT, fr, ct, qN, Vs, yn, ft, gd, Ne, h, hn, dL, vx, aze, hi, A, ack, aq, dB, ayS, YH, aPG, B, aA, bX, q, eA, eJ, bza, aT, cy, aPF, ae, Y, ev, r, en, t, ck, Ta, sS, iM, dy, EY, UF, bt, ao, hS, HQ, jh, bS, aFR, eq, hF, gb, ad, dP, av, hd, fX, Cj, yt, fb, d, je, ff, aF, Z, bz, eK, VO, bE, oQ, y, vt, ne, Tc); #c1(NRP1) c2(XP_011518058) c3(neuropilin-1 isoform X8) c4( ) c5(312099, 312100, 312101, 312102, 312103, 312104, 312105) c6( ) c7(T, aC, bVx, ea, bO, bB, ci, x, aE, pX, K, eL, aiJ, ago, aW, Ls, hl, g, as, cm, eM, iT, acw, vy, cj, k, m, asW, dD, sw, aw, ht, NT, fr, ct, qN, Vs, yn, ft, gd, Ne, h, hn, dL, vx, aze, hi, A, ack, aq, dB, ayS, YH, aPG, B, aA, bX, q, eA, eJ, bza, aT, cy, aPF, ae, Y, ev, r, en, t, ck, Ta, sS, iM, dy, EY, UF, bt, ao, hS, HQ, jh, bS, aFR, eq, hF, gb, ad, dP, av, hd, fX, Cj, yt, fb, d, je, ff, aF, Z, bz, eK, VO, bE, oQ, y, vt, ne, Tc); #c1(NRP2) c2(NP_003863) c3(neuropilin-2 isoform 2 precursor) c4(141589, 141590) c5(141591, 141592, 141593, 141594, 141595, 141596, 141597, 141598, 141599, 141600, 141601, 141602) c6( ) c7(T, aC, ha, bB, v, fr, ci, Gd, Gb, buj, q, ad, eA, Jm, eJ, yn, av, py, yt, apG, aT, Vv, vw, dL, K, KV, ae, eL, jf, d, adF, aW, Y, r, vt, g, bz, bN, yR, kP, uL, iT, bE, gX, dy, EY, m, UF, bt, hS); #c1(NRP2) c2(NP_061004) c3(neuropilin-2 isoform 4 precursor) c4(198917, 198918, 198919) c5(198920, 198921, 198922, 198923, 198924, 198925) c6( ) c7(T, aC, ha, bB, v, fr, ci, Gd, Gb, buj, q, ad, eA, Jm, eJ, yn, av, py, yt, apG, aT, Vv, vw, dL, K, KV, ae, eL, jf, d, adF, aW, Y, r, vt, g, bz, bN, yR, kP, uL, iT, bE, gX, dy, EY, m, UF, bt, hS); #c1(NRP2) c2(NP_957716) c3(neurepilin-2 isoform 6 precursor) c4(262023) c5(262024, 262025, 262026, 262027, 262028, 262029, 262030, 262031, 262032, 262033, 262034, 262035, 262036, 262037, 262038, 262039, 262040, 262041, 262042, 262043, 262044, 262045) c6( ) c7(T, aC, ha, bB, v, fr, ci, Gd, Gb, buj, q, ad, eA, Jm, eJ, yn, av, py, yt, apG, aT, Vv, vw, dL, K, KV, ae, eL, jf, d, adF, aW, Y, r, vt, g, bz, bN, yR, kP, uL, iT, bE, gX, dy, EY, m, UF, bt, hS); #c1(NRP2) c2(NP_957718) c3(neuropilin-2 isoform 1 precursor) c4(262046) c5(262047, 262048, 262049, 262050, 262051, 262052) c6( ) c7(T, aC, ha, bB, v, fr, ci, Gd, Gb, buj, q, ad, eA, Jm, eJ, yn, av, py, yt, apG, aT, Vv, vw, dL, K, KV, ae, eL, jf, d, adF, aW, Y, r, vt, g, bz, bN, yR, kP, uL, iT, bE, gX, dy, EY, m, UF, bt, hS); #c1(NRP2) c2(NP_957719) c3(neuropilin-2 isoform 5 precursor) c4(262053) c5(262054, 262055, 262056, 262057, 262058, 262059) c6( ) c7(T, aC, ha, bB, v, fr, ci, Gd, Gb, buj, q, ad, eA, Jm, eJ, yn, av, py, yt, apG, aT, Vv, vw, dL, K, KV, ae, eL, jf, d, adF, aW, Y, r, vt, g, bz, bN, yR, kP, uL, iT, bE, gX, dy, EY, m, UF, bt, hS); #c1(NRP2) c2(NP_958436) c3(neuropilin-2 isoform 3 precursor) c4(262077, 262078) c5(262079, 262080, 262081, 262082, 262083, 262084, 262085, 262086, 262087, 262088, 262089, 262090) c6( ) c7(T, aC, ha, bB, v, fr, ci, Gd, Gb, buj, q, ad, eA, Jm, eJ, yn, av, py, yt, apG, aT, Vv, vw, dL, K, KV, ae, eL, jf, d, adF, aW, Y, r, vt, g, bz, bN, yR, kP, uL, iT, bE, gX, dy, EY, m, UF, bt, hS); #c1(NRSN1) c2(NP_542454) c3(neurensin-1) c4(232997, 232998, 232999) c5(233000, 233001, 233002, 233003, 233004, 233005, 233006, 233007, 233008, 233009, 233010, 233011, 233012, 233013, 233014, 233015, 233016, 233017, 233018, 233019, 233020, 233021) c6( ) c7(if, iW, qN, hX, ds, jZ, dV, kH, h, SH, he, GB, je, aHW, Pg, Io, kk, cm, ck, iM, iQ, cA, bE, NL, aEG, zv, yA, aEN, EB); #c1(NRSN2) c2(NP_079234) c3(neurensin-2) c4(217562) c5(217563, 217564, 217565, 217566, 217567, 217568, 217569, 217570, 217571, 217572) c6( ) c7(aaw); #c1(NRTN) c2(XP_011526343) c3(neurturin isoform X1) c4(320641) c5(320642, 320643, 320644, 320645, 320646, 320647) c6( ) c7(cma, aJf, aE, fm, Qk, Ji, an, U, bK, fu, qF, ahl, ahE, aJe); #c1(NRXN1) c2(NP_001129131) c3(neurexin-1-beta isoform alpha2 precursor) c4(50866, 50867) c5(50868, 50869, 50870, 50871, 50872, 50873, 50874, 50875, 50876, 50877, 50878, 50879) c6( ) c7(ahc, oe, ha, atS, amj, bS, ct, nA, aQK, hb, XY, cmb, IG, Ko, aQM, bK, he, rz, A, VX, yL, Az, aha, Z, bN, Cq, Kr, cmc, Wl, y); #c1(NRXN1) c2(NP_004792) c3(neurexin-1-beta isoform alpha1 precursor) c4(149892, 149893) c5(149894, 149895, 149896, 149897, 149898, 149899, 149900, 149901, 149902, 149903, 149904, 149905) c6( ) c7(ahc, oe, ha, atS, amj, bS, ct, nA, aQK, hb, XY, cmb, IG, Ko, aQM, bK, he, rz, A, VX, yL, Az, aha, Z, bN, Cq, Kr, cmc, Wl, y); #c1(NRXN1) c2(NP_620072) c3(neurexin-1-beta isoform beta precursor) c4(237255, 237256) c5(237257, 237258, 237259, 237260, 237261, 237262, 237263, 237264, 237265, 237266, 237267, 237268) c6( ) c7(ahc, oe, ha, atS, amj, bS, ct, nA, aQK, hb, XY, cmb, IG, Ko, aQM, bK, he, rz, A, VX, yL, Az, aha, Z, bN, Cq, Kr, cmc, Wl, y); #c1(NRXN1) c2(XP_011531473) c3(neurexin-1-beta isoform XG) c4(327596) c5(327597, 327598, 327599, 327600, 327601, 327602) c6( ) c7(ahc, oe, ha, atS, amj, bS, ct, nA, aQK, hb, XY, cmb, IG, Ko, aQM, bK, he, rz, A, VX, yL, Az, aha, Z, bN, Cq, Kr, cmc, Wl, y); #c1(NRXN1) c2(XP_011531476) c3(neurexin-1-beta isoform X9) c4(327603) c5(327604, 327605, 327606, 327607, 327608, 327609) c6( ) c7(ahc, oe, ha, atS, amj, bS, ct, nA, aQK, hb, XY, cmb, IG, Ko, aQM, bK, he, rz, A, VX, yL, Az, aha, Z, bN, Cq, Kr, cmc, WL y); #c1(NRXN1) c2(XP_011531479) c3(neurexin-1-beta isoform X13) c4(327610) c5( ) c6( ) c7(ahc, oe, ha, atS, amj, bS, ct, nA, aQK, hb, XY, cmb, IG, Ko, aQM, bK, he, rz, A, VX, yL, Az, aha, Z, bN, Cq, Kr, cmc, Wl, y); #c1(NRXN1) c2(XP_011531481) c3(neurexin-1-beta isoform X1G) c4( ) c5(327611, 327612, 327613, 327614, 327615, 327616) c6( ) c7(ahc, oe, ha, atS, amj, bS, ct, nA, aQK, hb, XY, cmb, IG, Ko, aQM, bK, he, rz, A, VX, yL, Az, aha, Z, bN, Cq, Kr, cmc, Wl, y); #c1(NRXN2) c2(NP_055895) c3(neurexin-2-beta isoform alpha-1 precursor) c4(184277) c5(184278, 184279, 184280, 184281, 184282, 184283, 184284, 184285, 184286, 184287) c6( ) c7(rz, Kr, VX, bfM, aT); #c1(NRXN2) c2(NP_620060) c3(neurexin-2-beta isoform alpha-2 precursor) c4(237226, 237227) c5(237228, 237229, 237230, 237231, 237232, 237233, 237234, 237235, 237236, 237237, 237238, 237239) c6( ) c7(rz, Kr, VX, bfM, aT); #c1(NRXN2) c2(NP_620063) c3(neurexin-2-beta isoform beta precursor) c4(237248) c5(237249, 237250, 237251, 237252, 237253, 237254) c6( ) c7(rz, Kr, VX, bfM, aT); #c1(NRXN2) c2(XP_005274457) c3(neurexin-2-beta isoform X11) c4(285083) c5(285084, 285085, 285086, 285087, 285088, 285089) c6( ) c7(rz, Kr, VX, bfM, aT); #c1(NRXN3) c2(NP_001098720) c3(neurexin 3 isoform 3 precursor) c4(41562) c5(41563, 41564, 41565, 41566, 41567, 41568) c6( ) c7(Na, bN, s, rz, hb, XY, cz, hD, Nc, v, j, nA, g, oi, he, IB, fq, eA, FT, hZ); #c1(NRXN3) c2(NP_001258949) c3(neurexin 3 isoform 4 precursor) c4(96814) c5(96815, 96816, 96817, 96818, 96819, 96820) c6( ) c7(Na, bN, s, rz, hb, XY, cz, hD, Nc, v, j, nA, g, oi, he, IB, fq, eA, FT, hZ); #c1(NRXN3) c2(NP_004787) c3(neurexin 3 isoform 1) c4(149862) c5(149863, 149864, 149865, 149866, 149867, 149868, 149869, 149870) c6( ) c7(Na, bN, s, rz, hb, XY, cz, hD, Nc, v, j, nA, g, oi, he, IB, fq, eA, FT, hZ); #c1(NRXN3) c2(NP_620426) c3(neurexin 3 isoform 2 precursor) c4(237618) c5(237619, 237620, 237621, 237622, 237623, 237624) c6( ) c7(Na, bN, s, rz, hb, XY, cz, hD, Nc, v, j, nA, g, oi, he, IB, fq, eA, FT, hZ); #c1(NRXN3) c2(XP_011535669) c3(neurexin 3 isoform X5) c4(332903) c5(332904, 332905, 332906, 332907, 332908, 332909) c6( ) c7(Na, bN, s, rz, hb, XY, cz, hD, Nc, v, j, nA, g, oi, he, IB, fq, eA, FT, hZ); #c1(NRXN3) c2(XP_011535675) c3(neurexin 3 isoform X12) c4( ) c5(332910, 332911) c6( ) c7(Na, bN, s, rz, hb, XY, cz, hD, Nc, v, j, nA, g, oi, he, IB, fq, eA, FT, hZ); #c1(NRXN3) c2(XP_011535676) c3(neurexin 3 isoform X13) c4(332912) c5(332913, 332914, 332915, 332916, 332917, 332918) c6( ) c7(Na, bN, s, rz, hb, XY, cz, hD, Nc, v, j, nA, g, oi, he, IB, fq, eA, FT, hZ); #c1(NRXN3) c2(XP_011535678) c3(neurexin 3 isoform X15) c4(332919) c5( ) c6( ) c7(Na, bN, s, rz, hb, XY, cz, hD, Nc, v, j, nA, g, oi, he, IB, fq, eA, FT, hZ); #c1(NSA2) c2(NP_055701) c3(ribosome biogenesis protein NSA2 homolog isoform 1) c4(182880) c5(182881, 182882, 182883, 182884, 182885) c6( ) c7(bL, aj, dG, dy, be, J); #c1(NSA2) c2(XP_011541400) c3(ribosome biogenesis protein NSA2 homolog isoform X1) c4( ) c5(340009) c6( ) c7(bL, aj, dG, dy, be, J); #c1(NSD1) c2(XP_005266018) c3(histone-lysine N-methyltransferase, H3 lysine-36 and H4 lysine-20 specific isoform X2) c4(279857, 279858, 279859, 279860) c5(279861, 279862, 279863, 279864, 279865, 279866, 279867, 279868, 279869, 279870, 279871, 279872, 279873, 279874, 279875, 279876, 279877, 279878, 279879, 279880, 279881, 279882, 279883, 279884, 279885, 279886, 279887, 279888) c6( ) c7(bN, T, aRp, qe, bbM, nX, btY, ha, atS, qK, ml, bw, ci, nA, ER, bz, MV, bt, xb, st, bA); #c1(NSD1) c2(XP_005266019) c3(histone-lysine N-methyltransferase, H3 lysine-36 and H4 lysine-20 specific isoform X9) c4( ) c5(279889) c6( ) c7(bN, T, aRp, qe, bbM, nX, btY, ha, atS, qK, ml, bw, ci, nA, ER, bz, MV, bt, xb, st, bA); #c1(NSD1) c2(XP_011532913) c3(histone-lysine N-methyltransferase, H3 lysine-36 and H4 lysine-20 specific isoform X1) c4(329076) c5(329077, 329078, 329079, 329080, 329081, 329082) c6( ) c7(bN, T, aRp, qe, bbM, nX, btY, ha, atS, qK, ml, bw, ci, nA, ER, bz, MV, bt, xb, st, bA); #c1(NSD1) c2(XP_011532915) c3(histone-lysine N-methyltransferase, H3 lysine-36 and H4 lysine-20 specific isoform X4) c4(329083) c5(329084, 329085, 329086, 329087, 329088, 329089) c6( ) c7(bN, T, aRp, qe, bbM, nX, btY, ha, atS, qK, ml, bw, ci, nA, ER, bz, MV, bt, xb, st, bA); #c1(NSDHL) c2(XP_011529480) c3(sterol-4-alpha-carboxylate 3-dehydrogenase, decarboxylating isoform X1) c4(324926, 324927) c5(324928, 324929, 324930, 324931, 324932, 324933, 324934, 324935, 324936, 324937, 324938, 324939, 324940, 324841, 324942, 324943, 324944, 324945, 324946, 324947, 324948, 324949) c6( ) c7(beX, bjq, cgc, cmd, nA, dr); #c1(NSF) c2(NP_006169) c3(vesicle-fusing ATPase) c4(162487) c5(162488, 162489, 162490, 162491, 162492, 162493, 162494, 162495, 162496, 162497, 162498, 162499) c6( ) c7(il, Or, jh, cm, act, bdq, an, bdr, he, VV, iJ); #c1(NSF) c2(XP_011523165) c3(vesicle-fusing ATPase isoform X2) c4(317696) c5( ) c6( ) c7(il, Or, jh, cm, act, bdq, an, bdr, he, VV, iJ); #c1(NSFL1C) c2(NP_001193665) c3(NSFL1 cofactor p47 isoform d) c4(82430, 82431) c5(82432, 82433, 82434, 82435, 82436, 82437, 82438, 82439, 82440, 82441, 82442, 82443) c6( ) c7(fe, bM, T, ra, iV); #c1(NSFL1C) c2(NP_057227) c3(NSFL1 cofactor p47 isoform a) c4(189592) c5(189593, 189594, 189595, 189596, 189597, 189598) c6( ) c7(fe, bM, T, ra, iV); #c1(NSFL1C) c2(NP_061327) c3(NSFL1 cofactor p47 isoform b) c4(200036) c5(200037, 200038, 200039, 200040, 200041, 200042) c6( ) c7(fe, bM, T, ra, iV); #c1(NSFL1C) c2(XP_006723657) c3(NSFL1 cofactor p47 isoform XB) c4(295275) c5(295276, 295277, 295278, 295279, 295280, 295281) c6( ) c7(fe, bM, T, ra, iV); #c1(NSG1) c2(NP_001274692) c3(neuron-specific protein family member 1 isoform a) c4(106675, 106676) c5(106677, 106678, 106679, 106680, 106681, 106682, 106683, 106684, 106685, 106686, 106687, 106688, 106689, 106690, 106691, 106692, 106693, 106694, 106695, 106696, 106697, 106698, 106699, 106700, 106701, 106702, 106703, 106704, 106705, 106706, 106707, 106708, 106709, 106710, 106711, 106712) c6( ) c7(hd, hL); #c1(NSMAF) c2(NP_001138244) c3(protein FAN isoform 2) c4(56128) c5(56129, 56130, 56131, 56132, 56133, 56134) c6( ) c7(T, cd, Y); #c1(NSMAF) c2(NP_003571) c3(protein FAN isoform 1) c4(139240) c5(139241, 139242, 139243, 139244, 139245, 139246, 139247, 139248) c6( ) c7(T, cd, Y); #c1(NSMCE2) c2(NP_775956) c3(E3 SUMO-protein ligase NSE2) c4(250792, 250793, 250794, 250795) c5(250796, 250797, 250798, 250799, 250800, 250801, 250802, 250803, 250804, 250805, 250806, 250807, 250808, 250809, 250810, 250811, 250812, 250813, 250814, 250815, 250816, 250817, 250818, 250819, 250820, 250821, 250822, 250823) c6( ) c7(ac, kS, K, hH, avx, ad); #c1(NSMF) c2(NP_001124441) c3(NMDA receptor synaptonuclear signaling and neuronal migration factor isoform a) c4(48913, 48914, 48915) c5(48916, 48917, 48918, 48919, 48920, 48921) c6( ) c7(aMP, zQ, cme, ci, UF, zP, yn, UE); #c1(NSMF) c2(NP_001124442) c3(NMDA receptor synaptonuclear signaling and neuronal migration factor isoform c) c4(48922, 48923) c5(48924, 48925, 48926, 48927, 48928, 48929, 48930, 48931, 48932, 48933, 48934, 48935) c6( ) c7(aMP, zQ, cme, ci, UF, zP, yn, UE); #c1(NSMF) c2(NP_001124443) c3(NMDA receptor synaptonuclear signaling and neuronal migration factor isoform d) c4(48936) c5(48937, 48938, 48939, 48940, 48941, 48942, 48943, 48944, 48945, 48946, 48947, 48948) c6( ) c7(aMP, zQ, cme, ci, UF, zP, yn, UE); #c1(NSMF) c2(NP_001171535) c3(NMDA receptor synaptonuclear signaling and neuronal migration factor isoform e) c4(70540) c5(70541, 70542, 70543, 70544, 70545, 70546) c6( ) c7(aMP, zQ, cme, ci, UF, zP, yn, UE); #c1(NSMF) c2(NP_056352) c3(NMDA receptor synaptonuclear signaling and neuronal migration factor isoform b) c4(187213, 187214, 187215) c5(187216, 187217, 187218, 187219, 187220, 187221, 187222, 187223, 187224, 187225, 187226, 187227, 187228, 187229, 187230, 187231, 187232) c6( ) c7(aMP, zQ, cme, ci, UF, zP, yn, UE); #c1(NSMF) c2(XP_011516799) c3(NMDA receptor synaptonuclear signaling and neuronal migration factor isoform X4) c4( ) c5(310243, 310244, 310245, 310246, 310247, 310248, 310249, 310250, 310251, 310252, 310253) c6( ) c7(aMP, zQ, cme, ci, UF, zP, yn, UE); #c1(NSRP1) c2(NP_001248396) c3(nuclear speckle splicing regulatory protein 1 isoform 2) c4( ) c5(93964, 93965, 93966, 93967, 93968, 93969, 93970, 93971, 93972, 93973, 93974) c6( ) c7(hF, fr, es); #c1(NSRP1) c2(NP_115517) c3(nuclear speckle splicing regulatory protein 1 isoform 1) c4(223028) c5(223029, 223030, 223031, 223032, 223033, 223034) c6( ) c7(hF, fr, es); #c1(NSRP1) c2(XP_011523647) c3(nuclear speckle splicing regulatory protein 1 isoform X1) c4(318141, 318142) c5(318143) c6( ) c7(hF, fr, es); #c1(NSUN2) c2(NP_001180384) c3(tRNA (cytosine(34)-C(5))-methyltransferase isoform 2) c4(73900, 73901) c5(73902, 73903, 73904, 73905, 73906, 73907, 73908, 73909, 73910, 73911, 73912, 73913) c6( ) c7(cmf, aW, aT, yu, K, Ea, nA, bZs, QK); #c1(NSUN2) c2(NP_060225) c3(tRNA (cytosine(34)-C(5))-methyltransferase isoform 1) c4(194854) c5(194855, 194856, 194857, 194858, 194859, 194860) c6( ) c7(cmf, aW, aT, yu, K, Ea, nA, bZs, QK); #c1(NSUN3) c2(NP_071355) c3(putative methyltransferase NSUN3) c4(211180) c5(211181, 211182, 211183, 211184, 211185, 211186) c6( ) c7(iu); #c1(NSUN5) c2(NP_001161819) c3(probable 28S rRNA (cytosine-C(5))-methyltransferase isoform 3) c4(66091, 66092) c5(66093, 66094, 66095, 66096, 66097, 66098, 66099, 66100) c6( ) c7(T, alC, aE, AO, qt, aW, r, aT, ci, zy, hF, eA); #c1(NSUN5) c2(NP_001161820) c3(probable 28S rRNA (cytosine-C(5))-methyltransferase isoform 4) c4(66101) c5(66102, 66103, 66104, 66105, 66106) c6( ) c7(T, alC, aE, AO, qt, aW, r, aT, ci, zy, hF, eA); #c1(NSUN5) c2(NP_060514) c3(probable 28S rRNA (cytosine-C(5))-methyltransferase isoform 2) c4( ) c5(196316, 196317, 196318, 196319, 196320) c6( ) c7(T, alC, aE, AO, qt, aW, r, aT, ci, zy, hF, eA); #c1(NSUN5) c2(NP_683759) c3(probable 28S rRNA (cytosine-C(5))-methyltransferase isoform 1) c4(242546) c5(242547, 242548, 242549, 242550, 242551, 242552) c6( ) c7(T, alC, aE, AO, qt, aW, r, aT, ci, zy, hF, eA); #c1(NSUN7) c2(NP_078953) c3(putative methyltransferase NSUN7) c4(216242) c5(216243, 216244, 216245, 216246, 216247, 216248) c6( ) c7(gU); #c1(NT5C) c2(NP_001239306) c3(5′(3′)-deoxyribonucleotidase, cytosolic type isoform 2) c4(88405) c5(88406, 88407, 88408, 88409, 88410, 88411) c6( ) c7(bt); #c1(NT5C) c2(NP_055410) c3(5′(3′)-deoxyribonucleotidase, cytosolic type isoform 1) c4(180908) c5(180909, 180910, 180911, 180912, 180913, 180914) c6( ) c7(bt); #c1(NT5C1B) c2(NP_001002006) c3(cytosolic 5′-nucleotidase IB isoform 1) c4(19334) c5(19335, 19336, 19337, 19338, 19339, 19340) c6( ) c7(e, iX, Cr, ac); #c1(NT5C1B) c2(NP_001186016) c3(cytosolic 5′-nucleotidase IB isoform 4) c4(76869) c5(76870, 76871, 76872, 76873, 76874, 76875) c6( ) c7(e, iX, Cr, ac); #c1(NT5C1B) c2(NP_150278) c3(cytosolic 5′-nucleotidase IB isoform 2) c4(228015) c5(228016, 228017, 228018, 228019, 228020, 228021) c6( ) c7(e, iX, Cr, ac); #c1(NT5C1B-RDH14) c2(NP_001186032) c3(NT5C1B-RDH14 protein isoform 1) c4(76902) c5(76903, 76904, 76905, 76906, 76907, 76908) c6( ) c7(iX); #c1(NT5C1B-RDH14) c2(NP_001186033) c3(NT5C1B-RDH14 protein isoform 2) c4(76909) c5(76910, 76911, 76912, 76913, 76914, 76915) c6( ) c7(iX); #c1(NT5C2) c2(NP_036361) c3(cytosolic purine 5′- nucleotidase) c4(173227) c5(173228, 173229, 173230, 173231, 173232, 173233, 173234, 173235, 173236, 173237) c6( ) c7(bL, Kd, T, nD, ID, oe, cz, bB, wV, v, aje, eW, x, av, aT, cmg, ly, d, aW, Y, oV, tv, tu, as, cM, nC, adA, lx, ck, Dy, eM, nw, k, lC, bt); #c1(NT5C2) c2(XP_005269696) c3(cytosolic purine 5′-nucleotidase isoform X7) c4(282720) c5(282721, 282722, 282723, 282724, 282725, 282726) c6( ) c7(bL, Kd, T, nD, ID, oe, cz, bB, wV, v, aje, eW, x, av, aT, cmg, ly, d, aW, Y, oV, tv, tu, as, cM, nC, adA, lx, ck, Dy, eM, nw, k, lC, bt); #c1(NT5C2) c2(XP_006717787) c3(cytosolic purine 5′-nucleotidase isoform X9) c4( ) c5(291362, 291363, 291364, 291365, 291366, 291367) c6( ) c7(bL, Kd, T, nD, ID, oe, cz, bB, wV, v, aje, eW, x, av, aT, cmg, ly, d, aW, Y, oV, tv, tu, as, cM, nC, adA, lx, ck, Dy, eM, nw, k, lC, bt); #c1(NT5C2) c2(XP_011537836) c3(cytosolic purine 5′-nucleotidase isoform X2) c4(335330, 335331) c5( ) c6( ) c7(bL, Kd, T, nD, ID, oe, cz, bB, wV, v, aje, eW, x, av, aT, cmg, ly, d, aW, Y, oV, tv, tu, as, cM, nC, adA, lx, ck, Dy, eM, nw, k, lC, bt); #c1(NT5C2) c2(XP_011537839) c3(cytosolic purine 5′-nucleotidase isoform X8) c4(335332, 335333) c5(335334, 335335, 335336, 335337, 335338, 335339, 335340, 335341, 335342, 335343, 335344, 335345, 335346, 335347, 335348, 335349, 335350, 335351) c6( ) c7(bL, Kd, T, nD, ID, oe, cz, bB, wV, v, aje, eW, x, av, aT, cmg, ly, d, aW, Y, oV, tv, tu, as, cM, nC, adA, lx, ck, Dy, eM, nw, k, IC, bt); #c1(NT5C3A) c2(NP_001002010) c3(cytosolic 5′-nucleotidase 3A isoform 1) c4(19341, 19342) c5(19343, 19344, 19345, 19346, 19347, 19348) c6( ) c7(bL, T, aj, mC, J, eW, AW, aE, dV, aT, IQ, cmh, pi, uQ, aW, eZ, S, cm, zz, aHG, dB, WP, byG, NI, Xa, fL, Cl, ei, bt, WX, B); #c1(NT5C3A) c2(NP_001159590) c3(cytosolic 5′-nucleotidase 3A isoform 3) c4(64410) c5(64411, 64412, 64413, 64414, 64415, 64416, 64417, 64418, 64419, 64420, 64421, 64422, 64423, 64424, 64425) c6( ) c7(bL, T, aj, mC, J, eW, AW, aE, dV, aT, IQ, cmh, pi, uQ, aW, eZ, S, cm, zz, aHG, dB, WP, byG, NL Xa, fL, C1, ei, bt, WX, B); #c1(NT5C3A) c2(NP_057573) c3(cytosolic 5′-nucleotidase 3A isoform 2) c4(191396) c5(191397, 191398, 191399, 191400, 191401, 191402, 191403, 191404, 191405, 191406, 191407, 191408) c6( ) c7(bL, T, aj, mC, J, eW, AW, aE, dV, aT, IQ, cmh, pi, uQ, aW, eZ, S, cm, zz, aHG, dB, WP, byG, NL Xa, fL, Cl, ei, bt, WX, B); #c1(NT5DC1) c2(NP_689942) c3(5′-nucleotidase domain-containing protein 1) c4(244426, 244427, 244428) c5(244429, 244430, 244431, 244432, 244433, 244434) c6( ) c7(Y); #c1(NT5DC1) c2(XP_006715441) c3(5′-nucleotidase domain-containing protein 1 isoform X2) c4( ) c5(289566, 289567, 289568, 289569, 289570, 289571, 289572, 289573, 289574, 289575, 289576, 289577, 289578, 289579, 289580, 289581) c6( ) c7(Y); #c1(NT5DC3) c2(NP_001026871) c3(5′-nucleotidase domain-containing protein 3) c4(29736) c5(29737, 29738, 29739, 29740, 29741, 29742) c6( ) c7(bt, aC, jh); #c1(NT5E) c2(NP_001191742) c3(5′-nucleotidase isoform 2 preproprotein) c4(81635, 81636, 81637) c5(81638, 81639, 81640, 81641, 81642, 81643, 81644, 81645, 81646, 81647, 81648, 81649, 81650, 81651, 81652, 81653, 81654, 81655) c6( ) c7(T, dA, aD, e, aA, cz, n, bB, fo, zx, BE, V, ai, eA, Co, aT, in, h, ji, bq, aOh, zy, hB, Cr, cB, jf, aW, Y, jP, fQ, hp, zC, S, iV, nr, t, bw, zz, LB, ck, bE, IV, mG, cj, at, nL, rH, IS, y, bt, zA, fl); #c1(NT5E) c2(NP_002517) c3(5′-nuclentidase isoform 1 preproprotein) c4(129457, 129458, 129459) c5(129460, 129461, 129462, 129463, 129464, 129465, 129466, 129467, 129468, 129469, 129470, 129471, 129472, 129473, 129474, 129475, 129476, 129477) c6( ) c7(T, dA, aD, e, aA, cz, n, bB, fo, zx, BE, V, ai, eA, Co, aT, in, h, ji, bq, aOh, zy, hB, Cr, cB, jf, aW, Y, jP, fQ, hp, zC, S, iV, nr, t, bw, zz, LB, ck, bE, IV, mG, cj, at, nL, rH, IS, y, bt, zA, fl); #c1(NT5M) c2(NP_064586) c3(5′(3′)-deoxyribonucleotidase, mitochondrial precursor) c4(203119) c5(203120, 203121, 203122, 203123, 203124, 203125, 203126) c6( ) c7(dr, fd); #c1(NT5M) c2(XP_005256788) c3(5′(3′)-deoxyribonucleotidase, mitochondrial isoform X1) c4(274511) c5( ) c6( ) c7(dr, fd); #c1(NT5M) c2(XP_005256790) c3(5′(3′)-deoxyribonucleotidase, mitochondrial isoform X4) c4( ) c5(274512, 274513, 274514, 274515, 274516) c6( ) c7(dr, fd); #c1(NT5M) c2(XP_011522267) c3(5′(3′)-deoxyribonucleotidase, mitochondrial isoform X7) c4( ) c5(316945, 316946) c6( ) c7(dr, fd); #c1(NTAN1) c2(NP_775745) c3(protein N-terminal asparagine amidohydrolase isoform 1) c4(250147, 250148) c5(250149, 250150, 250151, 250152, 250153, 250154, 250155, 250156, 250157, 250158, 250159, 250160) c6( ) c7(k, cz); #c1(NTF3) c2(NP_001096124) c3(neurotrophin-3 isoform 1 preproprotein) c4(41077, 41078) c5(41079, 41080, 41081, 41082, 41083, 41084, 41085, 41086, 41087) c6( ) c7(bM, cZ, T, ul, hl, Ol, fG, bO, ti, aj, bS, Vd, ct, fu, PJ, cmi, aR, J, ad, dP, eA, Mg, aE, uT, sO, fm, bW, Fo, HC, M, bK, K, bU, dd, he, rE, ahE, dF, af, cB, jf, aW, Y, gl, ahl, as, iV, dw, Z, kk, f, cm, yX, bN, hq, eK, bE, ac, c, cA, dB, asl, eM, aHB, U, at, fD, bt, aqD, qc); #c1(NTF3) c2(NP_002518) c3(neurotrophin-3 isoform 2 preproprotein) c4( ) c5(129478, 129479, 129480, 129481, 129482, 129483, 129484) c6( ) c7(bM, cZ, T, ul, hl, Ol, fG, bO, ti, aj, bS, Vd, ct, fu, PJ, cmi, aR, J, ad, dP, eA, Mg, aE, uT, sO, fm, bW, Fo, HC, M, bK, K, bU, dd, he, rE, ahE, dF, af, cB, jf, aW, Y, gl, ahl, as, iV, dw, Z, kk, f, cm, yX, bN, hq, eK, bE, ac, c, cA, dB, asl, eM, aHB, U, at, fD, bt, aqD, qc); #c1(NTF4) c2(XP_011525310) c3(neurotrophin-4 isoform X2) c4(319770) c5( ) c6( ) c7(dP, bM, hl, c, pZ, dH, fm, Y, aW, sa, HC, aT, cm, bK, nA, eE, px, IJ, cmj, ad, bN); #c1(NTF4) c2(XP_011525312) c3(neurotrophin-4 isoform X1) c4( ) c5(319771, 319772, 319773, 319774, 319775, 319776, 319777) c6( ) c7(dP, bM, hl, c, pZ, dH, fm, Y, aW, sa, HC, aT, cm, bK, nA, eE, px, IJ, cmj, ad, bN); #c1(NTHL1) c2(NP_002519) c3(endonuclease III-like protein 1) c4(129485) c5(129486, 129487, 129488, 129489, 129490, 129491) c6( ) c7(bF, qw, T, rJ, r, aA, aF, V, q, Qe); #c1(NTM) c2(NP_001041674) c3(neurotrimin isoform 2 precursor) c4(34272) c5(34273, 34274, 34275, 34276, 34277, 34278) c6( ) c7(ac, dH, ig, bO, fK, Wb, ahg, be, he, cd); #c1(NTM) c2(NP_001137530) c3(neurotrimin isoform 3 precursor) c4(55986) c5(55987, 55988, 55989, 55990, 55991, 55992) c6( ) c7(ac, dH, ig, 50, fK, Wb, ahg, be, he, cd); #c1(NTM) c2(NP_001137531) c3(neurotrimin isoform 4 precursor) c4(55993) c5(55994, 55995, 55996, 55997, 55998, 55999) c6( ) c7(ac, dH, ig, bO, fK, Wb, ahg, be, he, cd); #c1(NTM) c2(NP_057606) c3(neurotrimin isoform 1 precursor) c4(191714) c5(191715, 191716, 191717, 191718, 191719, 191720) c6( ) c7(ac, dH, ig, bO, fK, Wb, ahg, be, he, cd); #c1(NTM) c2(XP_005271639) c3(neurotrimin isoform X4) c4(283508) c5(283509, 283510, 283511, 283512, 283513, 283514) c6( ) c7(ac, dH, ig, bO, fK, Wb, ahg, be, he, cd); #c1(NTM) c2(XP_006718918) c3(neurotrimin isoform X6) c4(292081) c5(292082, 292083, 292084, 292085, 292086, 292087) c6( ) c7(ac, dH, ig, bO, fK, Wb, ahg, be, he, cd); #c1(NTNI) c2(XP_006721658) c3(netrin-1 isoform X1) c4(294157, 294158) c5(294159, 294160, 294161, 294162, 294163, 294164, 294165, 294166, 294167, 294168, 294169, 294170, 294171, 294172, 294173, 294174, 294175, 294176, 294177, 294178, 294179, 294180, 294181, 294182, 294183, 294184, 294185, 294186) c6(294187, 294188, 294189, 294190, 294191, 294192, 294193, 294194) c7(T, dD, ea, e, bB, j, eq, C, fr, q, av, aT, cy, K, ae, Qe, jf, d, B, aW, Y, r, zC, cl, t, cm, bz, eM, asl, bE, iA, hL, m, y, X); #c1(NTN4) c2(NP_067052) c3(netrin-4 precursor) c4(208752, 208753, 208754) c5(208755, 208756, 208757, 208758, 208759, 208760, 208761, 208762, 208763, 208764, 208765, 208766, 208767, 208768, 208769, 208770, 208771, 208772, 208773) c6( ) c7(T, d, hb, e, aT, ad, cY); #c1(NTNG1) c2(XP_011539324) c3(netrin-G1 isoform X4) c4(337406) c5(337407, 337408, 337409, 337410, 337411, 337412) c6( ) c7(Qi, iX, r, bK, fL, nA, an, fq, q, bN); #c1(NTNG1) c2(XP_011539326) c3(netrin-G1 isoform X6) c4(337413, 337414) c5(337415, 337416, 337417, 337418, 337419, 337420, 337421, 337422, 337423, 337424, 337425, 337426) c6( ) c7(Qi, iX, r, bK, fL, nA, an, fq, q, bN); #c1(NTNG1) c2(XP_011539327) c3(netrin-GI isoform X8) c4( ) c5(337427, 337428, 337429, 337430, 337431, 337432, 337433, 337434, 337435, 337436) c6( ) c7(Qi, iX, r, bK, fL, nA, an, fq, q, bN); #c1(NTNG2) c2(NP_115925) c3(netrin-G2 precursor) c4(224711, 224712, 224713) c5(224714, 224715, 224716, 224717, 224718, 224719, 224720, 224721, 224722, 224723, 224724, 224725, 224726, 224727, 224728, 224729, 224730, 224731) c6( ) c7(Qi, eZ, dL, bK, nA, eL, bN); #c1(NTNG2) c2(XP_011517412) c3(netrin-G2 isoform X7) c4(311123) c5(311124, 311125, 311126, 311127, 311128, 311129) c6( ) c7(Qi, eZ, dL, bK, nA, eL, bN); #c1(NTPCR) c2(NP_115700) c3(cancer-related nucleoside-triphosphatase) c4(223632, 223633) c5(223634, 223635, 223636, 223637, 223638, 223639, 223640, 223641, 223642, 223643, 223644, 223645) c6( ) c7(vi); #c1(NTRK1) c2(NP_001007793) c3(high affinity nerve growth factor receptor isoform 3) c4(22855) c5(22856, 22857, 22858, 22859, 22860, 22861) c6( ) c7(ID, bM, T, aC, Tb, fR, if, ci, YD, Vp, bv, aE, pX, Ou, K, hH, eL, oP, aW, g, as, eE, eF, cm, Qt, zV, bDr, nB, eM, iA, iT, cj, OF, m, aHk, ik, cZ, gU, IT, wu, yG, n, aj, fr, ct, nA, ml, KL, ft, TK, gd, cU, dL, dd, dx, cml, fe, kp, yq, dw, yR, cjP, bP, dB, hk, bjx, uz, B, bL, Dw, Lx, hz, bX, bDq, V, q, J, eA, asG, uT, Ig, nv, Qg, qK, aT, dz, bK, bq, ahE, ae, af, aeY, jf, ak, hM, iF, s, vT, iU, Y, aLJ, r, ahl, en, t, iK, cmk, vk, bN, tR, ck, Ta, nM, hc, cjR, JL, PN, bt, VB, ao, Pt, aFa, iW, Me, jh, bS, oH, ad, BY, dP, Tg, hd, Db, ji, wm, yh, ahK, aKo, nJ, fb, TC, d, IR, et, vj, ff, cr, eZ, aeV, aF, Z, bz, Hv, dr, Hw, eU, pc, xZ, bE, Tc); #c1(NTRK1) c2(NP_001012331) c3(high affinity nerve growth factor receptor isoform 1 precursor) c4(24882) c5(24883, 24884, 24885, 24886, 24887, 24888) c6( ) c7(ID, bM, T, aC, Tb, fR, if, ci, YD, Vp, bv, aE, PX, Ou, K, hH, eL, oP, aW, g, as, eE, eF, cm, Qt, zV, bDr, nB, eM, iA, iT, cj, QF, m, aHk, ik, cZ, gU, IT, wu, yG, n, aj, fr, ct, nA, ml, KL, ft, TK, gd, cU, dL, dd, dx, cml, fe, kp, yR, dw, yR, cjP, bP, dB, hk, bjx, uz, B, bL, Dw, Lx, hz, bX, bDq, V, q, J, eA, asG, uT, Ig, nv, Qg, qK, aT, dz, bK, bq, ahE, ae, af, aeY, jf, ak, hM, if, s, vT, iU, Y, aLJ, r, ahl, en, t, iK, cmk, vk, bN, tR, ck, Ta, nM, hc, cjR, JL, PN, bt, VB, ao, Pt, aFa, iW, Me, jh, bS, oH, ad, BY, dP, Tg, hd, Db, ji, wm, yh, ahK, aKo, nJ, fb, TC, d, IR, et, vj, ff, cr, eZ, aeV, aF, Z, bz, Hv, dr, Hw, eU, pc, xZ, bE, Tc); #c1(NTRK1) c2(NP_002520) c3(high affinity nerve growth factor receptor isoform 2 precursor) c4(129492) c5(129493, 129494, 129495, 129496, 129497, 129498) c6( ) c7(ID, bM, T, aC, Tb, fR, if, ci, YD, Vp, bv, aE, pX, Ou, K, hH, eL, oP, aW, g, as, eE, eF, cm, Qt, zV, bDr, nB, eM, iA, iT, cj, OF, m, aHk, ik, cZ, gU, IT, wu, yG, n, aj, fr, ct, nA, ml, KL, ft, TK, gd, cU, dL, dd, dx, cml, fe, kp, yq, dw, yR, cjP, bP, dB, hk, bjx, uz, B, bL, Dw, Lx, hz, bX, bDq, V, q, J, eA, asG, uT, Ig, nv, Qg, qK, aT, dz, bK, bq, ahE, ae, af, aeY, jf, ak, hM, iF, s, vT, iU, Y, aLJ, r, ahl, en, t, iK, cmk, vk, bN, tR, ck, Ta, nM, hc, cjR, JL, PN, bt, VB, ao, Pt, aFa, iW, Me, jh, bS, oH, ad, BY, dP, Tg, hd, Db, ji, wm, yh, ahK, aKo, nJ, fb, TC, d, IR, et, vj, ff, cr, eZ, aeV, aF, Z, bz, Hv, dr, Hw, eU, pc, xZ, bE, Tc); #c1(NTRK2) c2(NP_001018075) c3(BDNF/NT-3 growth factors receptor isoform d precursor) c4(27093) c5(27094, 27095, 27096, 27097, 27098, 27099) c6( ) c7(Fv, T, uK, id, Tb, lr, bO, bB, bS, v, ct, il, qi, q, eA, dP, iu, Tg, ft, aE, yt, aqJ, iX, pX, qK, aql, cy, bK, K, ji, oi, he, ahK, cmm, af, rE, ak, A, Gv, Y, r, cmn, cu, g, cl, dw, ajz, t, bz, Z, as, bN, hq, amt, cm, Hw, aqr, Hp, auo, cA, bE, aqM, ZT, nG, Ei, m, cB, B, qc); #c1(NTRK2) c2(NP_001018076) c3(BDNF/NT-3 growth factors receptor isoform e precursor) c4(27100) c5(27101, 27102, 27103, 27104, 27105, 27106) c6( ) c7(Fv, T, uK, id, Tb, lr, bO, bB, bS, v, ct, il, qi, q, eA, dP, iu, Tg, ft, aE, yt, aqJ, iX, pX, qK, aql, cy, bK, K, ji, oi, he, ahK, cmm, af, rE, ak, A, Gv, Y, r, cmn, cu, g, cl, dw, ajz, t, bz, Z, as, bN, hq, amt, cm, Hw, aqr, Hp, auo, cA, bE, aqM, ZT, nG, Ei, m, cB, B, qc); #c1(NTRK2) c2(XP_005252061) c3(BDNF/NT-3 growth factors receptor isoform X3) c4(271511) c5(271512, 271513, 271514, 271515, 271516, 271517, 271518, 271519, 271520, 271521) c6( ) c7(Fv, T, uK, id, Tb, lr, bO, bB, bS, v, ct, il, qi, q, eA, dP, iu, Tg, ft, aE, yt, aqJ, iX, pX, qK, aql, cy, bK, K, ji, oi, he, ahK, cmm, af, rE, ak, A, Gv, Y, r, cmn, cu, g, cl, dw, ajz, t, bz, Z, as, bN, hq, amt, cm, Hw, aqr, Hp, auo, cA, bE, aqM, ZT, nG, Ei, m, cB, B, qc); #c1(NTRK2) c2(XP_005252064) c3(BDNF/NT-3 growth factors receptor isoform X4) c4(271522, 271523) c5(271524, 271525, 271526, 271527, 271528, 271529, 271530, 271531, 271532, 271533, 271534, 271535, 271536, 271537, 271538, 271539) c6( ) c7(Fv, T, uK, id, Tb, lr, bO, bB, bS, v, ct, il, qi, q, eA, dP, iu, Tg, ft, aE, yt, aqJ, iX, pX, qK, aql, cy, bK, K, ji, oi, he, ahK, cmm, af, rE, ak, A, Gv, Y, r, cmn, cu, g, cl, dw, ajz, t, bz, Z, as, bN, hq, amt, cm, Hw, aqr, Hp, auo, cA, bE, aqM, ZT, nG, Ei, m, cB, B, qc); #c1(NTRK2) c2(XP_011517021) c3(BDNF/NT-3 growth factors receptor isoform X5) c4(310511) c5(310512, 310513, 310514, 310515, 310516, 310517, 310518, 310519, 310520, 310521) c6( ) c7(Fv, T, uK, id, Tb, lr, bO, bB, bS, v, ct, il, qi, q, eA, dP, iu, Tg, ft, aE, yt, aqJ, iX, pX, qK, aql, cy, bK, K, ji, oi, he, ahK, cmm, af, rE, ak, A, Gv, Y, r, cmn, cu, g, cl, dw, ajz, t, bz, Z, as, bN, hq, amt, cm, Hw, aqr, Hp, auo, cA, bE, aqM, ZT, nG, Ei, m, cB, B, qc); #c1(NTRK3) c2(NP_001007157) c3(NT-3 growth factor receptor isoform c precursor) c4(22514) c5(22515, 22516, 22517, 22518, 22519, 22520, 22521, 22522, 22523, 22524) c6( ) c7(T, aC, aHx, bO, cz, ww, ci, AO, avD, q, ad, eA, afb, dP, hd, iX, qK, aql, aT, in, bq, rE, ae, ahE, dx, Yl, jf, tb, s, aW, Y, boG, r, ahl, g, Z, cm, bN, hq, vU, es, cA, nB, aHB, nG, Kg, bt, cB, qc); #c1(NTRK3) c2(NP_001012338) c3(NT-3 growth factor receptor isoform a precursor) c4(24889, 24890) c5(24891, 24892, 24893, 24894, 24895, 24896, 24897, 24898, 24899, 24900, 24901, 24902, 24903) c6( ) c7(T, aC, aHx, bO, cz, ww, ci, AO, avD, q, ad, eA, afb, dP, hd, iX, qK, aql, aT, in, bq, rE, ae, ahE, dx, Yl, jf, tb, s, aW, Y, boG, r, ahl, g, Z, cm, bN, hq, vU, es, cA, nB, aHB, nG, Kg, bt, cB, qc); #c1(NTRK3) c2(NP_002521) c3(NT-3 growth factor receptor isoform b precursor) c4(129499) c5(129500, 129501, 129502, 129503, 129504, 129505, 129506, 129507, 129508, 129509) c6( ) c7(T, aC, aHx, bO, cz, ww, ci, AO, avD, q, ad, eA, afb, dP, hd, iX, qK, aql, aT, in, bq, rE, ae, ahE, dx, Yl, jf, tb, s, aW, Y, boG, r, ahl, g, Z, cm, bN, hq, vU, es, cA, nB, aHB, nG, Kg, bt, cB, qc); #c1(NTRK3) c2(XP_006720608) c3(NT-3 growth factor receptor isoform X5) c4(293587) c5(293588) c6( ) c7(T, aC, aHx, bO, cz, ww, ci, AO, avD, q, ad, eA, afb, dP, hd, iX, qK, aql, aT, in, bq, rE, ae, ahE, dx, Yl, jf, tb, s, aW, Y, boG, r, ahl, g, Z, cm, bN, hq, vU, es, cA, nB, aHB, nG, Kg, bt, cB, qc); #c1(NTRK3) c2(XP_011519938) c3(NT-3 growth factor receptor isoform X6) c4(314728) c5(314729, 314730, 314731, 314732, 314733, 314734, 314735, 314736, 314737, 314738) c6( ) c7(T, aC, aHx, bO, cz, ww, ci, AO, avD, q, ad, eA, afb, dP, hd, iX, qK, aql, aT, in, bq, rE, ae, ahE, dx, Yl, jf, tb, s, aW, Y, boG, r, ahl, g, Z, cm, bN, hq, vU, es, cA, nB, aHB, nG, Kg, bt, cB, qc); #c1(NTS) c2(NP_006174) c3(neurotensin/neuromedin N preproprotein) c4(162500, 162501, 162502) c5(162503, 162504, 162505, 162506, 162507, 162508, 162509, 162510, 162511, 162512, 162513, 162514, 162515, 162516, 162517, 162518, 162519, 162520, 162521, 162522, 162523, 162524, 162525) cG(162526) c7(T, tp, yY, cmo, cz, ti, bB, Fb, ci, C, q, ad, eJ, ft, ib, aE, Iv, aT, bK, K, ji, an, fb, ae, af, Yi, tN, yo, s, nO, ev, yL, ff, cr, r, fe, gl, tv, aq, tu, gu, en, g, eE, t, bz, Dm, op, bN, YR, Ta, ok, kP, eM, bE, hc, vA, zl, xg, B, hS); #c1(NTSR1) c2(NP_002522) c3(neurotensin receptor type 1) c4(129510) c5(129511, 129512, 129513, 129514, 129515, 129516) c6( ) c7(T, bO, cz, bB, bS, uu, ci, q, ad, eW, av, ib, aE, sO, he, fb, tN, VX, s, vj, ff, cr, r, fe, en, g, eE, bz, Ta, cA, eM, bE, hE); #c1(NTSR2) c2(NP_036476) c3(neurotensin receptor type 2) c4(174140) c5(174141, 174142, 174143, 174144, 174145, 174146) c6( ) c7(yo); #c1(NUAK1) c2(NP_055655) c3(NUAK family SNF1-like kinase 1) c4(182553, 182554) c5(182555, 182556, 182557, 182558, 182559, 182560, 182561, 182562, 182563, 182564, 182565, 182566) c6( ) c7(T, pe, aW, Y, jh, r, aT, fd, q, B, cp); #c1(NUAK2) c2(NP_112214) c3(NUAK family SNF1-like kinase 2) c4(220855) c5(220856, 220857, 220858, 220859, 220860, 220861) c6( ) c7(T, Y, m, t, kG, vi); #c1(NUB1) c2(NP_001230280) c3(NEDD8 ultimate buster 1 isoform 1) c4(86184) c5(86185, 86186, 86187, 86188, 86189, 86190, 86191) c6( ) c7(T, fr); #c1(NUB1) c2(NP_057202) c3(NEDD8 ultimate buster 1 isoform 2) c4(189456) c5(189457, 189458, 189459, 189460, 189461, 189462, 189463, 189464, 189465, 189466, 189467, 189468, 189469) c6( ) c7(T, fr); #c1(NUB1) c2(XP_005250068) c3(NEDD8 ultimate buster 1 isoform X4) c4(270061, 270062, 270063, 270064) c5(270065, 270066, 270067, 270068, 270069, 270070, 270071, 270072, 270073, 270074, 270075, 270076, 270077, 270078, 270079, 270080, 270081, 270082, 270083, 270084) c6( ) c7(T, fr); #c1(NUBP1) c2(NP_001265435) c3(cytosolic Fe-S cluster assembly factor NUBP1 isoform 2) c4(98594) c5(98595, 98596, 98597, 98598, 98599, 98600) c6( ) c7(at, cm, xg, K, zU); #c1(NUBP1) c2(NP_002475) c3(cytosolic Fe-S cluster assembly factor NUBP1 isoform 1) c4(129151) c5(129152, 129153, 129154, 129155, 129156, 129157) c6( ) c7(at, cm, xg, K, zU); #c1(NUBP2) c2(NP_036357) c3(cytosolic Fe-S cluster assembly factor NUBP2 isoform 1) c4(173204, 173205) c5(173206, 173207, 173208, 173209, 173210, 173211) c6( ) c7(at, btE, dL, btK, zU); #c1(NUBP2) c2(XP_005255087) c3(cytosolic Fe-S cluster assembly factor NUBP2 isoform X3) c4( ) c5(273531, 273532, 273533, 273534, 273535) c6( ) c7(at, btE, dL, btK, zU); #c1(NUBP2) c2(XP_011520640) c3(cytosolic Fe-S cluster assembly factor NUBP2 isoform X2) c4( ) c5(315542) c6( ) c7(at, btE, dL, btK, zU); #c1(NUBPL) c2(NP_001188502) c3(iron-sulfur protein NUBPL isoform 2) c4( ) c5(79225, 79226, 79227, 79228, 79229, 79230) c6( ) c7(aM, cz, bxk, he, kC, V); #c1(NUBPL) c2(NP_079428) c3(iron-sulfur protein NUBPL isoform 1 precursor) c4(218078, 218079) c5(218080, 218081, 218082, 218083, 218084, 218085) c6( ) c7(aM, cz, bxk, he, kC, V); #c1(NUCB1) c2(NP_006175) c3(nucleobindin-1 precursor) c4(162527, 162528, 162529) c5(162530, 162531, 162532, 162533, 162534, 162535, 162536, 162537, 162538, 162539, 162540, 162541, 162542, 162543, 162544, 162545, 162546, 162547, 162548, 162549, 162550, 162551, 162552, 162553, 162554, 162555, 162556) c6( ) c7(vi); #c1(NUCB2) c2(NP_005004) c3(nucleobindin-2 precursor) c4( ) c5(151995, 151996, 151997, 151998, 151999, 152000) c6( ) c7(bL, T, e, aw, aA, n, aj, bS, afE, ci, dG, v, nS, ad, aT, h, jy, K, qM, he, ae, aW, aF, ac, ei); #c1(NUCB2) c2(XP_011518423) c3(nucleobindin-2 isoform X1) c4(312437, 312438) c5( ) c6( ) c7(bL, T, e, aw, aA, n, aj, bS, afE, ci, dG, v, nS, ad, aT, h, jy, K, qM, he, ae, aW, aF, ac, ei); #c1(NUCB2) c2(XP_011518432) c3(nucleobindin-2 isoform X2) c4( ) c5(312439, 312440, 312441, 312442, 312443, 312444) c6( ) c7(bL, T, e, aw, aA, n, aj, bS, afE, ci, dG, v, nS, ad, aT, h, jy, K, qM, he, ae, aW, aF, ac, ei); #c1(NUCB2) c2(XP_011518433) c3(nucleobindin-2 isoform X3) c4(312445, 312446) c5( ) c6( ) c7(bL, T, e, aw, aA, n, aj, bS, afE, ci, dG, v, nS, ad, aT, h, jy, K, qM, he, ae, aW, aF, ac, ei); #c1(NUCB2) c2(XP_011518434) c3(nucleobindin-2 isoform X4) c4(312447) c5( ) c6( ) c7(bL, T, e, aw, aA, n, aj, bS, afE, ci, dG, v, nS, ad, aT, h, jy, K, qM, he, ae, aW, aF, ac, ei); #c1(NUCB2) c2(XP_011518435) c3(nucleobindin-2 isoform X5) c4(312448, 312449, 312450, 312451) c5(312452, 312453, 312454, 312455, 312456, 312457, 312458, 312459, 312460, 312461, 312462, 312463, 312464, 312465, 312466, 312467, 312468, 312469, 312470, 312471, 312472, 312473, 312474, 312475, 312476, 312477, 312478, 312479, 312480, 312481, 312482, 312483, 312484, 312485, 312486, 312487, 312488, 312489, 312490, 312491, 312492, 312493, 312494, 312495, 312496, 312497, 312498, 312499, 312500, 312501) c6( ) c7(bL, T, e, aw, aA, n, aj, bS, afE, ci, dG, v, nS, ad, aT, h, jy, K, qM, he, ae, aW, aF, ac, ei); #c1(NUCKS1) c2(NP_073568) c3(nuclear ubiquitous casein and cyclin-dependent kinase substrate 1) c4(212875, 212876) c5(212877, 212878, 212879, 212880, 212881, 212882) c6( ) c7(n, T, q, an, r); #c1(NUCKS1) c2(XP_005245510) c3(nuclear ubiquitous casein and cyclin-dependent kinase substrate 1 isoform X1) c4( ) c5(266670, 266671, 266672, 266673, 266674, 266675) c6( ) c7(n, T, q, an, r); #c1(NUDC) c2(XP_011538831) c3(nuclear migration protein nudC isoform X1) c4(336806, 336807) c5(336808, 336809, 336810, 336811, 336812, 336813) c6( ) c7(ck, bt, k, ad, x); #c1(NUDC) c2(XP_011538832) c3(nuclear migration protein nudC isoform X2) c4( ) c5(336814, 336815, 336816, 336817, 336818) c6( ) c7(ck, bt, k, ad, x); #c1(NUDCD1) c2(NP_001121683) c3(nudC domain-containing protein 1 isoform 2) c4(46048, 46049) c5(46050, 46051, 46052, 46053, 46054, 46055, 46056) c6( ) c7(ck, ae, T, ac, iU, m, qN, t, bt, bz, ad); #c1(NUDCD1) c2(NP_116258) c3(nudC domain-containing protein 1 isoform 1) c4(226013) c5(226014, 226015, 226016, 226017, 226018, 226019) c6( ) c7(ck, ae, T, ac, iU, m, qN, t, bt, bz, ad); #c1(NUDCD3) c2(NP_056147) c3(nudC domain-containing protein 3) c4(185962) c5(185963, 185964, 185965, 185966, 185967, 185968) c6( ) c7(aq); #c1(NUDT1) c2(NP_945191) c3(7,8-dihydro-8-oxoguanine triphosphatase isoform p18) c4(260729) c5(260730, 260731, 260732, 260733, 260734, 260735, 260736, 260737, 260738, 260739, 260740) c6( ) c7(bF, T, ft, jz, A, aiB, eM, Gs, an, U, aT, r, ci, K, anW, q, rk, ad); #c1(NUDT1) c2(NP_945192) c3(7,8-dihydro-8-oxoguanine triphosphatase isoform p22) c4(260741, 260742) c5(260743, 260744, 260745, 260746, 260747, 260748, 260749, 260750, 260751, 260752, 260753, 260754, 260755, 260756, 260757, 260758, 260759) c6( ) c7(bF, T, ft, jz, A, aiB, eM, Gs, an, U, aT, r, ci, K, anW, q, rk, ad); #c1(NUDT10) c2(NP_001291892) c3(diphosphoinositol polyphosphate phosphohydrolase 3-alpha) c4(116491) c5(116492, 116493, 116494, 116495, 116496, 116497, 116498, 116499, 116500, 116501, 116502, 116503, 116504) c6( ) c7(IF, OV, xy, A, ON, bxf, qj, OM, OU, ad, yF, PC); #c1(NUDT11) c2(NP_060629) c3(diphosphoinositol polyphosphate phosphohydrolase 3-beta) c4(196905) c5(196906, 196907, 196908, 196909, 196910, 196911) c6( ) c7(OV, Pa, vJ, il, OX, OS, CZ, FS, ON, ml, DM, pd, dr, ad, L); #c1(NUDT15) c2(NP_060753) c3(probable 8-oxo-dGTP diphosphatase NUDT15 isoform 1) c4(197602) c5(197603, 197604, 197605, 197606, 197607, 197608) c6( ) c7(hG); #c1(NUDT19) c2(NP_001099040) c3(nucleoside diphosphate-linked moiety X motif 19, mitochondrial precursor) c4(41771) c5(41772, 41773, 41774, 41775, 41776, 41777) c6( ) c7(afR, xX, Be, nw, eQ, HU, ayj, nC); #c1(NUDT2) c2(NP_671702) c3(bis(5′-nucleosyl)-tetraphosphatase [asymmetrical]) c4(242058) c5(242059, 242060, 242061, 242062, 242063, 242064, 242065, 242066, 242067, 242068, 242069, 242070, 242071, 242072, 242073, 242074, 242075, 242076, 242077, 242078, 242079, 242080) c6( ) c7(qt, aW, aT, mo); #c1(NUDT21) c2(NP_008937) c3(cleavage and polyadenylation specificity factor subunit 5) c4(169662, 169663) c5(169664, 169665, 169666, 169667, 169668, 169669, 169670, 169671, 169672, 169673, 169674, 169675) c6( ) c7(d); #c1(NUDT3) c2(NP_006694) c3(diphosphoinositol polyphosphate phosphohydrolase 1) c4(167196) c5(167197, 167198, 167199, 167200, 167201, 167202) c6( ) c7(Jd, fq, v); #c1(NUDT6) c2(NP_009014) c3(nucleoside diphosphate-linked moiety X motif 6 isoform a) c4(170242, 170243) c5(170244, 170245, 170246, 170247, 170248, 170249, 170250, 170251) c6( ) c7(dP, jf, ft, pf, Y, ht, r, dL, j, qj, g, fy, eL, q, wa); #c1(NUDT6) c2(NP_932158) c3(nucleoside diphosphate-linked moiety X motif 6 isoform b) c4( ) c5(258826, 258827, 258828, 258829, 258830, 258831, 258832, 258833) c6( ) c7(dP, jf, ft, pf, Y, ht, r, dL, j, qj, g, fy, eL, q, wa); #c1(NUDT7) c2(NP_001099133) c3(peroxisomal coenzyme A diphosphatase NUDT7 isoform 1) c4(41796) c5(41797, 41798, 41799, 41800, 41801, 41802, 41803) c6( ) c7(aq); #c1(NUDT7) c2(NP_001230586) c3(peroxisomal coenzyme A diphosphatase NUDT7 isoform 3) c4(86365) c5(86366, 86367, 86368, 86369, 86370) c6( ) c7(aq); #c1(NUDT7) c2(NP_001230590) c3(peroxisomal coenzyme A diphosphatase NUDT7 isoform 2) c4(86394) c5(86395, 86396, 86397, 86398, 86399, 86400) c6( ) c7(aq); #c1(NUF2) c2(NP_663735) c3(kinetochore protein Nuf2) c4(241477, 241478, 241479, 241480, 241481, 241482) c5(241483, 241484, 241485, 241486, 241487, 241488, 241489, 241490, 241491, 241492, 241493, 241494, 241495, 241496, 241497, 241498, 241499, 241500, 241501, 241502, 241503, 241504, 241505, 241506, 241507, 241508, 241509, 241510, 241511, 241512, 241513, 241514, 241515, 241516, 241517, 241518, 241519, 241520, 241521, 241522) c6( ) c7(T, ac, eM, aw, r, aT, n, aA, cz, aF, fr, be, bu, g, bz); #c1(NUFIP1) c2(NP_036477) c3(nuclear fragile X mental retardation-interacting protein 1) c4(174147) c5(174148, 174149, 174150, 174151, 174152, 174153) c6( ) c7(QK, v); #c1(NUFIP2) c2(NP_065823) c3(nuclear fragile X mental retardation-interacting protein 2) c4(205692) c5(205693, 205694, 205695, 205696, 205697, 205698) c6( ) c7(bM, rz, z, bxn, Fo, ha, h, K, nA, xg, f, he, Ku, Kl, bvX, bN); #c1(NUGGC) c2(NP_001010906) c3(nuclear GTPase SLIP-GC) c4(24050, 24051) c5(24052, 24053, 24054, 24055, 24056, 24057, 24058, 24059, 24060, 24061, 24062, 24063) c6( ) c7(bAO); #c1(NUMA1) c2(NP_001273490) c3(nuclear mitotic apparatus protein 1 isoform 2) c4(105004, 105005, 105006, 105007, 105008, 105009) c5(105010, 105011, 105012, 105013, 105014, 105015, 105016, 105017, 105018, 105019, 105020, 105021, 105022, 105023, 105024, 105025, 105026, 105027, 105028, 105029, 105030, 105031, 105032, 105033, 105034, 105035, 105036, 105037, 105038, 105039, 105040, 105041, 105042, 105043, 105044, 105045, 105046) c6( ) c7(ck, T, yi, id, aW, f J, aT, dL, eL); #c1(NUMA1) c2(NP_006176) c3(nuclear mitotic apparatus protein 1 isoform 1) c4(162557, 162558, 162559, 162560, 162561, 162562, 162563, 162564, 162565, 162566, 162567, 162568, 162569) c5(162570, 162571, 162572, 162573, 162574, 162575, 162576, 162577, 162578, 162579, 162580, 162581, 162582, 162583, 162584, 162585, 162586, 162587) c6( ) c7(ck, T, yi, id, aW, fJ, aT, dL, eL); #c1(NUMA1) c2(XP_011543366) c3(nuclear mitotic apparatus protein 1 isoform X3) c4( ) c5(342147, 342148, 342149, 342150, 342151, 342152, 342153, 342154, 342155, 342156, 342157, 342158, 342159, 342160, 342161, 342162, 342163, 342164, 342165, 342166, 342167, 342168, 342169, 342170, 342171, 342172, 342173, 342174, 342175, 342176, 342177, 342178, 342179, 342180, 342181, 342182, 342183, 342184, 342185, 342186, 342187, 342188, 342189, 342190, 342191, 342192, 342193, 342194, 342195, 342196, 342197, 342198, 342199, 342200, 342201, 342202, 342203, 342204, 342205, 342206, 342207, 342208, 342209) c6( ) c7(ck, T, yi, id, aW, fJ, aT, dL, eL); #c1(NUMA1) c2(XP_011543367) c3(nuclear mitotic apparatus protein 1 isoform X4) c4(342210) c5(342211, 342212, 342213, 342214, 342215, 342216) c6( ) c7(ck, T, yi, id, aW, fJ, aT, dL, eL); #c1(NUMB) c2(NP_001005745) c3(protein numb homolog isoform 4) c4(22011) c5(22012, 22013, 22014, 22015, 22016, 22017, 22018, 22019, 22020, 22021, 22022) c6( ) c7(T, dD, d, af, iU, aW, al, aT, eq, ci, lS, eA, bw, bt, bz, X); #c1(NUMB) c2(XP_011535557) c3(protein numb homolog isoform X2) c4(332646, 332647) c5(332648, 332649, 332650, 332651, 332652, 332653, 332654, 332655, 332656, 332657) c6( ) c7(T, dD, d, af, iU, aW, al, aT, eq, ci, lS, eA, bw, bt, bz, X); #c1(NUMB) c2(XP_011535560) c3(protein numb homolog isoform X1) c4(332658, 332659, 332660) c5(332661, 332662, 332663, 332664, 332665, 332666, 332667, 332668, 332669, 332670, 332671, 332672, 332673, 332674, 332675) c6( ) c7(T, dD, d, af, iU, aW, al, aT, eq, ci, IS, eA, bw, bt, bz, X); #c1(NUMB) c2(XP_011535562) c3(protein numb homolog isoform X3) c4(332676) c5(332677, 332678, 332679, 332680, 332681, 332682, 332683, 332684, 332685, 332686, 332687, 332688, 332689, 332690, 332691, 332692, 332693, 332694, 332695, 332696) c6( ) c7(T, dD, d, af, iU, aW, al, aT, eq, ci, lS, eA, bw, bt, bz, X); #c1(NUMB) c2(XP_011535565) c3(protein numb homolog isoform X8) c4(332697, 332698) c5(332699, 332700, 332701, 332702, 332703, 332704, 332705, 332706, 332707, 332708, 332709, 332710) c6( ) c7(T, dD, d, af, iU, aW, al, aT, eq, ci, lS, eA, bw, bt, bz, X); #c1(NUMB) c2(XP_011535566) c3(protein numb homolog isoform X9) c4( ) c5(332711, 332712, 332713, 332714, 332715, 332716) c6( ) c7(T, dD, d, af, iU, aW, al, aT, eq, ci, lS, eA, bw, bt, bz, X); #c1(NUMBL) c2(NP_001276909) c3(numb-like protein isoform b) c4(108604) c5(108605, 108606, 108607, 108608, 108609) c6( ) c7(cm, T, eA); #c1(NUMBL) c2(NP_004747) c3(numb-like protein isoform a) c4(149239) c5(149240, 149241, 149242, 149243, 149244, 149245, 149246) c6( ) c7(cm, T, eA); #c1(NUMBL) c2(XP_011525791) c3(numb-like protein isoform X2) c4( ) c5(320197) c6( ) c7(cm, T, eA); #c1(NUP153) c2(NP_001265138) c3(nuclear pore complex protein Nup153 isoform 1) c4(97841) c5(97842, 97843, 97844, 97845, 97846, 97847) c6( ) c7(bP, aE, fR, h, Io, gn); #c1(NUP153) c2(NP_001265139) c3(nuclear pore complex protein Nup153 isoform 3) c4(97848) c5(97849, 97850, 97851, 97852, 97853, 97854) c6( ) c7(bP, aE, fR, h, Io, gn); #c1(NUP153) c2(NP_005115) c3(nuclear pore complex protein Nup153 isoform 2) c4(153017) c5(153018, 153019, 153020, 153021, 153022, 153023) c6( ) c7(bP, aE, fR, h, Io, gn); #c1(NUP155) c2(NP_001265241) c3(nuclear pore complex protein Nup155 isoform 3) c4(98032) c5(98033, 98034, 98035, 98036, 98037, 98038) c6( ) c7(h, wL, e, 80, mr); #c1(NUP155) c2(NP_004289) c3(nuclear pore complex protein Nup155 isoform 2) c4( ) c5(144882, 144883, 144884, 144885, 144886) c6( ) c7(h, wL, e, BD, mr); #c1(NUP155) c2(NP_705618) c3(nuclear pore complex protein Nup155 isoform 1) c4(246166, 246167, 246168) c5(246169, 246170, 246171, 246172, 246173, 246174, 246175, 246176, 246177, 246178, 246179, 246180, 246181) c6( ) c7(h, wL, e, BD, mr); #c1(NUP205) c2(NP_055950) c3(nuclear pore complex protein Nup205) c4(184624, 184625) c5(184626, 184627, 184628, 184629, 184630, 184631, 184632, 184633, 184634, 184635, 184636, 184637) c6( ) c7(bz, bi, bdM); #c1(NUP210) c2(NP_079199) c3(nuclear pore membrane glycoprotein 210 precursor) c4(217459) c5(217460, 217461, 217462, 217463, 217464, 217465) c6( ) c7(q, ac, bc, r); #c1(NUP214) c2(NP_005076) c3(nuclear pore complex protein Nup214) c4(152653) c5(152654, 152655, 152656, 152657, 152658, 152659, 152660, 152661, 152662, 152663, 152664, 152665) c6( ) c7(bM, T, Dw, Va, if, jx, jh, aA, Bm, mS, bB, fd, ci, nA, qN, hF, q, eA, hX, cc, mW, ds, cmp, dV, aT, cU, h, bK, K, jj, H, mV, mY, pk, de, bF, mU, B, iU, aW, Fm, Y, yx, apn, ff, r, kD, Io, Kf, aE, beP, en, YZ, t, bz, mZ, f, eK, mX, ck, dR, cm, y, bb, VJ, c, eM, bE, Om, bP, iT, AH, aiM, cj, m, YH, ph, bgi, bt, kS, mT, ao, L); #c1(NUP214) c2(XP_005272273) c3(nuclear pore complex protein Nup214 isoform X1) c4(283970, 283971) c5(283972, 283973, 283974, 283975, 283976, 283977, 283978, 283979, 283980, 283981, 283982, 283983) c6( ) c7(bM, T, Dw, Va, if, jx, jh, aA, Bm, mS, bB, fd, ci, nA, qN, hF, g, eA, hX, cc, mW, ds, cmp, dV, aT, cU, h, bK, K, jj, H, mV, mY, pk, de, bF, mU, B, iU, aW, Fm, Y, yx, apn, ff, r, kD, Io, Kf, aE, beP, en, YZ, t, bz, mZ, f, eK, mX, ck, dR, cm, y, bb, VJ, c, eM, bE, Dm, bP, iT, AH, aiM, cj, m, YH, ph, bgi, bt, kS, mT, ao, L); #c1(NUP214) c2(XP_005272275) c3(nuclear pore complex protein Nup214 isoform X5) c4(283984) c5( ) c6( ) c7(bM, T, Dw, Va, if, jx, jh, aA, Bm, mS, bB, fd, ci, nA, qN, hF, q, eA, hX, cc, mW, ds, cmp, dV, aT, cU, h, bK, K, jj, H, mV, mY, pk, de, bF, mU, B, iU, aW, Fm, Y, yx, apn, ff, r, kD, Io, Kf, aE, beP, en, YZ, t, bz, mZ, f, eK, mX, ck, dR, cm, y, bb, VJ, c, eM, bE, Dm, bP, iT, AH, aiM, cj, m, YH, ph, bgi, bt, kS, mT, ao, L); #c1(NUP214) c2(XP_005272276) c3(nuclear pore complex protein Nup214 isoform X6) c4(283985) c5( ) c6( ) c7(bM, T, Dw, Va, if, jx, jh, aA, Bm, mS, bB, fd, ci, nA, qN, hF, q, eA, hX, cc, mW, ds, cmp, dV, aT, cU, h, bK, K, jj, H, mV, mY, pk, de, bF, mU, B, iU, aW, Fm, Y, yx, apn, ff, r, kD, Io, Kf, aE, beP, en, YZ, t, bz, mZ, f, eK, mX, ck, dR, cm, y, bb, VJ, c, eM, bE, Dm, bP, iT, AH, aiM, cj, m, YH, ph, bgi, bt, kS, mT, ao, L); #c1(NUP214) c2(XP_006717355) c3(nuclear pore complex protein Nup214 isoform X3) c4(290966) c5(290967, 290968, 290969, 290970, 290971, 290972) c6( ) c7(bM, T, Dw, Va, if, jx, jh, aA, Bm, mS, bB, fd, ci, nA, qN, hF, q, eA, hX, cc, mW, ds, cmp, dV, aT, cU, h, bK, K, jj, H, mV, mY, pk, de, bF, mU, B, iU, aW, Fm, Y, yx, apn, ff, r, kD, Io, Kf, aE, beP, en, YZ, t, bz, mZ, f, eK, mX, ck, dR, cm, y, bb, VJ, c, eM, bE, Om, bP, iT, AH, aiM, cj, m, YH, ph, bgi, bt, kS, mT, ao, L); #c1(NUP214) c2(XP_011517355) c3(nuclear pore complex protein Nup214 isoform X4) c4( ) c5(311089) c6( ) c7(bM, T, Dw, Va, if, jx, jh, aA, Bm, mS, bB, fd, ci, nA, qN, hF, q, eA, hX, cc, mW, ds, cmp, dV, aT, cU, h, bK, K, jj, H, mV, mY, pk, de, bF, mU, B, iU, aW, Fm, Y, yx, apn, ff, r, kD, Io, Kf, aF, beP, en, YZ, t, bz, mZ, f, eK, mX, ck, dR, cm, y, bb, VJ, c, eM, bE, Om, bP, iT, AH, aiM, cj, m, YH, ph, bgi, bt, kS, mT, ao, L); #c1(NUP35) c2(NP_001274513) c3(nucleoporin NUP53 isoform b) c4(106591) c5(106592, 106593, 106594, 106595, 106596) c6( ) c7(aw); #c1(NUP35) c2(NP_001274514) c3(nucleoporin NUP53 isoform c) c4( ) c5(106597, 106598, 106599, 106600, 106601) c6( ) c7(aw); #c1(NUP35) c2(NP_612142) c3(nucleoporin NUP53 isoform a) c4(236047, 236048) c5(236049, 236050, 236051, 236052, 236053, 236054, 236055, 236056) c6( ) c7(aw); #c1(NUP37) c2(NP_076962) c3(nucleoporin Nup37) c4(214478, 214479) c5(214480, 214481, 214482, 214483, 214484, 214485, 214486, 214487, 214488, 214489, 214490, 214491, 214492, 214493, 214494, 214495) c6( ) c7(Pg); #c1(NUP43) c2(NP_942590) c3(nucleoporin Nup43) c4(260565) c5(260566, 260567, 260568, 260569, 260570, 260571, 260572, 260573, 260574, 260575) c6( ) c7(h, T, yw, kB); #c1(NUP43) c2(XP_005267019) c3(nucleoporin Nup43 isoform X4) c4( ) c5(280626, 280627, 280628, 280629, 280630, 280631) c6( ) c7(h, T, yw, kB); #c1(NUP43) c2(XP_011534100) c3(nucleoporin Nup43 isoform X1) c4(330354) c5( ) c6( ) c7(h, T, yw, kB); #c1(NUP50) c2(XP_005261370) c3(nuclear pore complex protein Nup50 isoform X2) c4( ) c5(277303, 277304, 277305, 277306, 277307, 277308, 277309, 277310, 277311, 277312, 277313, 277314, 277315, 277316) c6( ) c7(j); #c1(NUP50) c2(XP_011528135) c3(nuclear pore complex protein Nup50 isoform X1) c4(323219, 323220, 323221, 323222, 323223, 323224) c5(323225, 323226, 323227, 323228, 323229, 323230, 323231, 323232, 323233, 323234, 323235, 323236, 323237, 323238, 323239, 323240, 323241, 323242, 323243, 323244, 323245, 323246, 323247, 323248, 323249, 323250, 323251, 323252, 323253, 323254, 323255, 323256) c6( ) c7(j); #c1(NUP62) c2(NP_001180286) c3(nuclear pore glycoprotein p62) c4(73715, 73716, 73717) c5(73718, 73719, 73720, 73721, 73722, 73723, 73724, 73725, 73726, 73727, 73728, 73729, 73730, 73731, 73732, 73733, 73734, 73735, 73736, 73737, 73738, 73739, 73740, 73741, 73742, 73743) c6( ) c7(bM, T, fR, if, GC, To, v, BF, ci, q, ad, Kx, jz, zw, WY, aT, h, K, Wr, ae, af, d, aW, ff, az, alR, r, aq, aaE, kp, en, g, cmq, bb, kP, c, eM, U, Kj, bdR, bi, xg, B); #c1(NUP85) c2(NP_001290205) c3(nuclear pore complex protein Nup85 isoform 2) c4(115172) c5(115173, 115174, 115175, 115176, 115177) c6( ) c7(By, cd); #c1(NUP85) c2(NP_079120) c3(nuclear pore complex protein Nup85 isoform 1) c4(217175, 217176) c5(217177, 217178, 217179, 217180, 217181, 217182, 217183, 217184) c6( ) c7(By, cd); #c1(NUP85) c2(XP_005257749) c3(nuclear pore complex protein Nup85 isoform X5) c4( ) c5(275359, 275360, 275361, 275362, 275363, 275364) c6( ) c7(By, cd); #c1(NUP85) c2(XP_011523569) c3(nuclear pore complex protein Nup85 isoform X2) c4(318065) c5(318066, 318067, 318068, 318069, 318070) c6( ) c7(By, cd); #c1(NUP85) c2(XP_011523570) c3(nuclear pore complex protein Nup85 isoform X4) c4(318071) c5(318072, 318073, 318074, 318075, 318076, 318077) c6( ) c7(By, cd); #c1(NUP88) c2(NP_002523) c3(nuclear pore complex protein Nup88) c4(129517) c5(129518, 129519, 129520, 129521, 129522, 129523, 129524, 129525, 129526, 129527) c6( ) c7(T, aW, r, h, aT, q); #c1(NUP88) c2(XP_005256716) c3(nuclear pore complex protein Nup88 isoform X1) c4( ) c5(274303) c6( ) c7(T, aW, r, h, aT, q); #c1(NUP88) c2(XP_011522195) c3(nuclear pore complex protein Nup88 isoform X2) c4(316819) c5(316820, 316821, 316822, 316823, 316824) c6( ) c7(T, aW, r, h, aT, q); #c1(NUP93) c2(XP_005256320) c3(nuclear pore complex protein Nup93 isoform X1) c4(274096, 274097) c5(274098, 274099, 274100, 274101, 274102, 274103, 274104, 274105, 274106, 274107, 274108, 274109, 274110, 274111, 274112, 274113) c6( ) c7(fq); #c1(NUP98) c2(NP_005378) c3(nuclear pore complex protein Nup98-Nup96 isoform 3) c4( ) c5(155576, 155577, 155578, 155579, 155580, 155581) c6( ) c7(T, dA, gp, al, bO, n, ci, hF, hr, x, fX, pp, dE, h, dz, hn, bK, he, pg, d, iU, et, gK, eZ, aq, as, hf, bw, bz, ck, c, cA, eM, iT, bt, B, EB); #c1(NUP98) c2(NP_057404) c3(nuclear pore complex protein Nup98-Nup96 isoform 1) c4(190567, 190568) c5(190569, 190570, 190571, 190572, 190573, 190574) c6( ) c7(T, dA, gp, al, bO, n, ci, hF, hr, x, fX, pp, dE, h, dz, hn, bK, he, pq, d, iU, et, gK, eZ, aq, as, hf, bw, bz, ck, c, cA, eM, iT, bt, B, EB); #c1(NUP98) c2(NP_624357) c3(nuclear pore complex protein Nup98-Nup96 isoform 2) c4( ) c5(238153, 238154, 238155, 238156, 238157, 238158) c6( ) c7(T, dA, gp, al, bO, n, ci, hF, hr, x, fX, pp, dE, h, dz, hn, bK, he, pg, d, iU, et, gK, eZ, aq, as, hf, bw, bz, ck, c, cA, eM, iT, bt, B, EB); #c1(NUP98) c2(NP_624358) c3(nuclear pore complex protein Nup98-Nup96 isoform 4) c4(238159, 238160) c5(238161, 238162, 238163, 238164, 238165, 238166, 238167, 238168, 238169, 238170, 238171, 238172) c6( ) c7(T, dA, gp, al, bO, n, ci, hF, hr, x, fX, pp, dE, h, dz, hn, bK, he, pq, d, iU, et, gK, eZ, aq, as, hf, bw, bz, ck, c, cA, eM, iT, bt, B, EB); #c1(NUP98) c2(XP_011518437) c3(nuclear pore complex protein Nup98-Nup96 isoform X1) c4(312502) c5( ) c6( ) c7(T, dA, gp, al, bO, n, ci, hF, hr, x, fX, pp, dE, h, dz, hn, bK, he, pg, d, iU, et, gK, eZ, aq, as, hf, bw, bz, ck, c, cA, eM, iT, bt, B, EB); #c1(NUPL2) c2(NP_031368) c3(nucleoporin-like protein 2) c4(171966) c5(171967, 171968, 171969, 171970, 171971, 171972) c6( ) c7(yy); #c1(NUPR1) c2(NP_001035948) c3(nuclear protein 1 isoform a) c4(33515) c5(33516, 33517, 33518, 33519, 33520, 33521) c6( ) c7(bL, T, aC, v, ci, iJ, q, ad, aE, Db, aT, dL, Fx, K, ae, eL, s, aW, r, aKh, kp, qJ, ar, aQd, nB, mf, du); #c1(NUPR1) c2(NP_036517) c3(nuclear protein 1 isoform b) c4(174213) c5(174214, 174215, 174216, 174217, 174218, 174219) c6( ) c7(bL, T, aC, v, ci, iJ, q, ad, aE, Db, aT, dL, Fx, K, ae, eL, s, aW, r, aKh, kp, qJ, ar, aQd, nB, mf, du); #c1(NUS1) c2(NP_612468) c3(nogo-B receptor) c4(236607) c5(236608, 236609, 236610, 236611, 236612, 236613) c6( ) c7(T, Y); #c1(NUSAP1) c2(NP_001230071) c3(nucleolar and spindle-associated protein 1 isoform 4) c4(85868) c5(85869, 85870, 85871, 85872, 85873, 85874) c6( ) c7(qt, aMb, n, ey, ae, ad); #c1(NUSAP1) c2(NP_001230072) c3(nucleolar and spindle-associated protein 1 isoform 5) c4(85875) c5(85876, 85877, 85878, 85879, 85880, 85881) c6( ) c7(qt, aMb, n, ey, ae, ad); #c1(NUSAP1) c2(NP_001288065) c3(nucleolar and spindle-associated protein 1 isoform 7) c4(113477) c5(113478, 113479, 113480, 113481, 113482, 113483) c6( ) c7(qt, aMb, n, ey, ae, ad); #c1(NUSAP1) c2(NP_057443) c3(nucleolar and spindle-associated protein 1 isoform 1) c4(190916) c5(190917, 190918, 190919, 190920, 190921, 190922) c6( ) c7(qt, aMb, n, ey, ae, ad); #c1(NUSAP1) c2(NP_060924) c3(nucleolar and spindle-associated protein 1 isoform 2) c4(198700) c5(198701, 198702, 198703, 198704, 198705, 198706) c6( ) c7(qt, aMb, n, ey, ae, ad); #c1(NUSAP1) c2(XP_006720626) c3(nucleolar and spindle-associated protein 1 isoform X8) c4(293589) c5(293590, 293591, 293592, 293593, 293594, 293595) c6( ) c7(qt, aMb, n, ey, ae, ad); #c1(NUTF2) c2(XP_005255828) c3(nuclear transport factor 2 isoform X1) c4(273879) c5(273880, 273881, 273882, 273883, 273884, 273885) c6( ) c7(h); #c1(NUTM1) c2(NP_001271221) c3(NUT family member 1 isoform 1) c4(103650) c5(103651, 103652, 103653, 103654, 103655, 103656, 103657, 103658) c6( ) c7(aJP, T, Jg, vT, ff, awr, ci, en, aws, Le, pd, avU); #c1(NUTM1) c2(NP_786883) c3(NUT family member 1 isoform 3) c4(251908) c5( ) c6( ) c7(aJP, T, Jg, vT, ff, awr, ci, en, aws, Le, pd, avU); #c1(NUTM1) c2(XP_011519731) c3(NUT family member 1 isoform X1) c4(314395) c5(314396, 314397, 314398, 314399, 314400, 314401, 314402, 314403, 314404, 314405) c6( ) c7(aJP, T, Jg, vT, ff, awr, ci, en, aws, Le, pd, avU); #c1(NUTM2A) c2(XP_011538424) c3(NUT family member 2A isoform X1) c4(336107, 336108, 336109, 336110, 336111, 336112, 336113, 336114) c5(336115, 336116, 336117, 336118, 336119, 336120, 336121, 336122, 336123, 336124, 336125, 336126, 336127, 336128, 336129, 336130, 336131, 336132, 336133, 336134, 336135, 336136, 336137, 336138, 336139, 336140, 336141, 336142, 336143, 336144, 336145, 336146, 336147, 336148, 336149, 336150, 336151, 336152, 336153, 336154, 336155, 336156, 336157, 336158, 336159, 336160, 336161, 336162) c6( ) c7(Th); #c1(NUTM2A) c2(XP_011538425) c3(NUT family member 2A isoform X2) c4(336163, 336164, 336165, 336166) c5(336167, 336168, 336169, 336170, 336171, 336172, 336173, 336174, 336175, 336176, 336177, 336178, 336179, 336180, 336181, 336182, 336183, 336184, 336185, 336186, 336187, 336188, 336189, 336190) c6( ) c7(Th); #c1(NUTM2B) c2(XP_005270192) c3(NUT family member 28 isoform X1) c4(283222, 283223, 283224) c5(283225, 283226, 283227, 283228, 283229, 283230, 283231, 283232, 283233, 283234, 283235, 283236, 283237, 283238, 283239, 283240, 283241, 283242) c6( ) c7(Th); #c1(NVL) c2(NP_001230075) c3(nuclear valosin-containing protein-like isoform 3) c4( ) c5(85882, 85883, 85884, 85885, 85886, 85887) c6( ) c7(cd, ac); #c1(NVL) c2(NP_001230076) c3(nuclear valosin-containing protein-like isoform 4) c4(85888) c5(85889, 85890, 85891, 85892, 85893, 85894) c6( ) c7(cd, ac); #c1(NVL) c2(NP_002524) c3(nuclear valosin-containing protein-like isoform 1) c4(129528, 129529, 129530) c5(129531, 129532, 129533, 129534, 129535, 129536, 129537, 129538, 129539, 129540, 129541, 129542, 129543, 129544, 129545, 129546, 129547, 129548) c6( ) c7(cd, ac); #c1(NVL) c2(XP_011542498) c3(nuclear valosin-containing protein-like isoform X1) c4(341051) c5( ) c6( ) c7(cd, ac); #c1(NWD1) c2(NP_001007526) c3(NACHT and WD repeat domain-containing protein 1 isoform 1) c4(22749) c5(22750, 22751, 22752, 22753, 22754, 22755, 22756, 22757, 22758, 22759) c6( ) c7(ae, ad); #c1(NWD1) c2(NP_001277284) c3(NACHT and WD repeat domain-containing protein 1 isoform 2) c4(109323, 109324) c5(109325, 109326, 109327, 109328, 109329, 109330, 109331, 109332, 109333, 109334, 109335, 109336, 109337, 109338, 109339) c6( ) c7(ae, ad); #c1(NWD1) c2(XP_011526233) c3(NACHT and WD repeat domain-containing protein 1 isoform X2) c4( ) c5(320492) c6( ) c7(ae, ad); #c1(NXF1) c2(NP_001074960) c3(nuclear RNA expert factor 1 isoform 2) c4(37142) c5(37143, 37144, 37145, 37146, 37147, 37148, 37149, 37150, 37151, 37152) c6( ) c7(oO, T, bvt, if, jx, aA, eb, n, cL, fr, bvx, ci, qN, V, eW, o, hX, jF, av, F, h, K, hu, hH, aa, uQ, A, mR, dH, Y, KS, cr, eZ, afq, lo, aF, xH, hp, iV, eE, iK, bz, ig, bvy, IF, y, qR, hv); #c1(NXF1) c2(NP_006353) c3(nuclear RNA expert factor 1 isoform 1) c4(164277) c5(164278, 164279, 164280, 164281, 164282, 164283, 164284, 164285, 164286, 164287) c6( ) c7(oO, T, bvt, if, jx, aA, eb, n, cL, fr, bvx, ci, qN, V, eW, o, hX, jF, av, F, h, K, hu, hH, aa, uQ, A, mR, dH, Y, KS, cr, eZ, afq, lo, aF, xH, hp, iV, eE, iK, bz, ig, bvy, IF, y, qR, hv); #c1(NXF2B) c2(NP_001093156) c3(nuclear RNA expert factor 2) c4(39841, 39842) c5(39843, 39844, 39845, 39846, 39847, 39848, 39849, 39850, 39851, 39852, 39853, 39854, 39855, 39856, 39857, 39858, 39859, 39860, 39861, 39862, 39863, 39864, 39865, 39866, 39867, 39868, 39869, 39870, 39871, 39872, 39873, 39874, 39875, 39876, 39877, 39878, 39879, 39880, 39881, 39882, 39883, 39884, 39885, 39886, 39887, 39888, 39889, 39890, 39891, 39892, 39893, 39894, 39895, 39896) c6( ) c7(wu, pt, wm, cj); #c1(NXF3) c2(NP_071335) c3(nuclear RNA expert factor 3) c4(211065, 211066, 211067, 211068) c5(211069, 211070, 211071, 211072, 211073, 211074, 211075, 211076, 211077, 211078, 211079, 211080, 211081, 211082, 211083, 211084, 211085, 211086, 211087, 211088, 211089, 211090, 211091, 211092) c6( ) c7(Na); #c1(NXF5) c2(NP_116564) c3(nuclear RNA expert factor 5) c4(226192) c5(226193, 226194, 226195, 226196, 226197, 226198, 226199, 226200, 226201, 226202, 226203, 226204, 226205, 226206, 226207, 226208, 226209) c6( ) c7(nf, iI, nA); #c1(NXF5) c2(XP_011529294) c3(nuclear RNA expert factor 5 isoform X3) c4(324726) c5( ) c6( ) c7(nf, iI, nA); #c1(NXN) c2(NP_001192248) c3(nucleoredoxin isoform 2) c4(82149) c5(82150, 82151, 82152, 82153, 82154, 82155, 82156, 82157, 82158, 82159) c6( ) c7(bK); #c1(NXN) c2(NP_071908) c3(nucleoredoxin isoform 1) c4(212224) c5(212225, 212226, 212227, 212228, 212229, 212230) c6( ) c7(bK); #c1(NXN) c2(XP_005256813) c3(nucleoredoxin isoform X1) c4(274523) c5(274524, 274525, 274526, 274527, 274528, 274529) c6( ) c7(bK); #c1(NXNL1) c2(NP_612463) c3(nucleoredoxin-like protein 1) c4(236571) c5(236572, 236573, 236574, 236575, 236576, 236577) c6( ) c7(IR, nC, K, Tp); #c1(NXNL2) c2(NP_001155097) c3(nucleoredoxin-like protein 2 isoform 1) c4(61440) c5(61441, 61442, 61443, 61444, 61445, 61446) c6( ) c7(cd); #c1(NXNL2) c2(NP_660326) c3(nucleoredoxin-like protein 2 isoform 2) c4(240934) c5(240935, 240936, 240937, 240938, 240939, 240940) c6( ) c7(cd); #c1(NXPE1) c2(NP_689528) c3(NXPE family member 1) c4( ) c5(242992, 242993, 242994, 242995, 242996, 242997, 242998) c6(242999, 243000) c7(aw, iV); #c1(NXPE1) c2(XP_011540901) c3(NXPE family member 1 isoform X1) c4(339438, 339439) c5(339440, 339441, 339442, 339443, 339444, 339445, 339446, 339447, 339448) c6(339449, 339450) c7(aw, iV); #c1(NXPE2) c2(NP_872301) c3(NXPE family member 2) c4(256053, 256054) c5(256055, 256056, 256057, 256058, 256059, 256060, 256061, 256062, 256063, 256064, 256065, 256066) c6( ) c7(oe, sj); #c1(NXPE4) c2(NP_001071107) c3(NXPE family member 4 isoform 1 precursor) c4(35281, 35282) c5(35283, 35284, 35285, 35286, 35287, 35288, 35289, 35290, 35291) c6(35292, 35293) c7(aw); #c1(NXPE4) c2(NP_060148) c3(NXPE family member 4 isoform 2) c4( ) c5(194487, 194488, 194489, 194490, 194491, 194492, 194493) c6(194494, 194495) c7(aw); #c1(NXPH1) c2(NP_689958) c3(neurexophilin-1 precursor) c4(244545, 244546, 244547, 244548) c5(244549, 244550, 244551, 244552, 244553, 244554, 244555, 244556, 244557, 244558, 244559, 244560, 244561, 244562, 244563, 244564, 244565, 244566, 244567, 244568, 244569, 244570, 244571, 244572, 244573, 244574, 244575, 244576, 244577, 244578, 244579) c6(244580, 244581, 244582, 244583, 244584, 244585, 244586, 244587) c7(blk, pH, bM, aC, agJ, eR, oe, cm, aj, vm, dy, nA, aY, vN, ad); #c1(NXPH1) c2(XP_011513634) c3(neurexophilin-1 isoform X1) c4( ) c5(305944) c6( ) c7(blk, pH, bM, aC, agJ, eR, oe, cm, aj, vm, dy, nA, aY, vN, ad); #c1(NXPH2) c2(NP_009157) c3(neurexophilin-2 precursor) c4(171188) c5(171189, 171190, 171191, 171192, 171193, 171194, 171195, 171196) c6(171197, 171198) c7(gU, EQ, cm, m, t, cd); #c1(NXT1) c2(XP_011527532) c3(NTF2-related export protein 1 isoform X1) c4(322340) c5(322341, 322342, 322343, 322344, 322345, 322346) c6( ) c7(T, aC, fM, id, ht, jx, jh, aA, fd, j, ci, hF, Fc, q, ad, eA, ip, x, av, iu, fX, ib, nv, kH, aT, h, hn, dL, jj, XZ, hu, hS, pg, ae, eL, Zm, d, je, s, aix, iU, aW, Y, ff, r, aF, en, cl, as, t, iK, bw, iP, ck, qJ, iM, bP, eM, aJm, dB, iT, cj, pg, k, bt, B, vi); #c1(NXT2) c2(NP_001229546) c3(NTF2-related export protein 2 isoform 2) c4( ) c5(84624, 84625, 84626, 84627, 84628) c6( ) c7(aYJ, atf, ey, nA, OK, axC); #c1(NXT2) c2(NP_001229547) c3(NTF2-related export protein 2 isoform 3) c4( ) c5(84629, 84630, 84631, 84632, 84633, 84634, 84635, 84636) c6( ) c7(aYJ, atf, ey, nA, UK, axC); #c1(NXT2) c2(NP_061168) c3(NTF2-related export protein 2 isoform 1) c4(199707, 199708, 199709) c5(199710, 199711, 199712, 199713, 199714, 199715, 199716, 199717) c6( ) c7(aYJ, atf, ey, nA, UK, axC); #c1(NXT2) c2(XP_011529291) c3(NTF2-related export protein 2 isoform X1) c4( ) c5(324725) c6( ) c7(aYJ, atf, ey, nA, UK, axC); #c1(NYAP2) c2(NP_065915) c3(neuronal tyrosine-phosphorylated phosphoinositide-3-kinase adapter 2) c4(206215, 206216) c5(206217, 206218, 206219, 206220, 206221, 206222, 206223, 206224, 206225, 206226, 206227, 206228) c6( ) c7(bL, ayB, v, j, an); #c1(NYX) c2(NP_072089) c3(nyctalopin precursor) c4(212652) c5(212653, 212654, 212655, 212656, 212657, 212658, 212659, 212660, 212661, 212662) c6( ) c7(ck, cZ, IR, Be, ayA, cmr, OL, dd, HU, ayj, nC); #c1(OARD1) c2(NP_659500) c3(O-acetyl-ADP-ribose deacetylase 1) c4(240221, 240222, 240223) c5(240224, 240225, 240226, 240227, 240228, 240229, 240230, 240231, 240232, 240233, 240234, 240235, 240236, 240237, 240238, 240239, 240240, 240241, 240242, 240243, 240244, 240245, 240246, 240247, 240248, 240249, 240250, 240251, 240252, 240253) c6( ) c7(U); #c1(OAS1) c2(NP_001027581) c3(2′-5′-oligoadenylate synthase 1 isoform 3) c4(30308) c5(30309, 30310, 30311, 30312, 30313, 30314) c6( ) c7(bL, fR, al, jx, jE, V, ad, hX, F, ds, oW, h, cfr, ae, A, Y, wc, eZ, Io, t, AH, aiM, aEU); #c1(OAS1) c2(NP_002525) c3(2′-5′-oligoadenylate synthase 1 isoform 2) c4(129549) c5(129550, 129551, 129552, 129553, 129554, 129555) c6( ) c7(bL, fR, al, jx, jE, V, ad, hX, F, ds, oW, h, cfr, ae, A, Y, wc, eZ, Io, t, AH, aiM, aEU); #c1(OAS1) c2(NP_058132) c3(2′-5′-oligoadenylate synthase 1 isoform 1) c4(192653) c5(192654, 192655, 192656, 192657, 192658, 192659) c6( ) c7(bL, fR, al, jx, jE, V, ad, hX, F, ds, oW, h, cfr, ae, A, Y, wc, eZ, Io, t, AH, aiM, aEU); #c1(OAS1) c2(XP_011536716) c3(2′-5′-oligoadenylate synthase 1 isoform X3) c4(334310) c5(334311, 334312, 334313, 334314, 334315, 334316) c6( ) c7(bL, fR, al, jx, jE, V, ad, hX, F, ds, oW, h, cfr, ae, A, Y, wc, eZ, Io, t, AH, aiM, aEU); #c1(OAS2) c2(NP_001027903) c3(2′-5′-oligoadenylate synthase 2 isoform 3) c4(30315) c5(30316, 30317, 30318, 30319, 30320, 30321) c6( ) c7(ke, A, ds, AH, jE, CQ, ae, ad, hX); #c1(OAS2) c2(NP_002526) c3(2′-5′-oligoadenylate synthase 2 isoform 2) c4(129556) c5(129557, 129558, 129559, 129560, 129561, 129562) c6( ) c7(ke, A, ds, AH, jE, CQ, ae, ad, hX); #c1(OAS2) c2(NP_058197) c3(2′-5′-oligoadenylate synthase 2 isoform 1) c4(192660) c5(192661, 192662, 192663, 192664, 192665, 192666) c6( ) c7(ke, A, ds, AH, jE, CQ, ae, ad, hX); #c1(OAS3) c2(NP_006178) c3(2′-5′-oligoadenylate synthase 3) c4(162608, 162609) c5(162610, 162611, 162612, 162613, 162614, 162615, 162616, 162617, 162618, 162619, 162620, 162621) c6( ) c7(ke, A, iM, je, ds, AH, jh, kH, ahC, Zn, cz, bB, Da, jE, qN, fd, t, ae, ad, hX); #c1(OASL) c2(NP_003724) c3(2′-5′-oligoadenylate synthase-like protein isoform a) c4(140458) c5(140459, 140460, 140461, 140462, 140463, 140464) c6( ) c7(bL, F, ds, aiM, eZ, jE); #c1(OASL) c2(NP_937856) c3(2′-5′-oligoadenylate synthase-like protein isoform b) c4(259308) c5(259309, 259310, 259311, 259312, 259313, 259314) c6( ) c7(bL, F, ds, aiM, eZ, jE); #c1(OAT) c2(NP_001165285) c3(ornithine aminotransferase, mitochondrial isoform 2) c4( ) c5(67586, 67587, 67588, 67589, 67590) c6( ) c7(cms, emu, emt, bS, v, bpT, iJ, afR, aah, vH, aXd, rL, A, zC, dr, bDw, bP, U, wz, nw, be, oQ); #c1(OAT) c2(XP_011538136) c3(ornithine aminotransferase, mitochondrial isoform X1) c4(335719, 335720) c5(335721, 335722, 335723, 335724, 335725, 335726, 335727) c6( ) c7(cms, emu, emt, bS, v, bpT, iJ, afR, aah, vH, aXd, rL, A, zC, dr, bDw, bP, U, wz, nw, be, oQ); #c1(OAZ1) c2(NP_001287949) c3(ornithine decarboxylase antizyme 1 isoform 2) c4(113264) c5(113265) c6( ) c7(T, y, dY, eM, e, eZ, cm, iy, bS, j, fL, m, t, ae, ad); #c1(OAZ1) c2(NP_004143) c3(ornithine decarboxylase antizyme 1 isoform 1) c4( ) c5(143857, 143858, 143859, 143860, 143861, 143862) c6( ) c7(T, y, dY, eM, e, eZ, cm, iy, bS, j, fL, m, t, ae, ad); #c1(OAZ2) c2(NP_002528) c3(ornithine decarboxylase antizyme 2 isoform 1) c4(129591) c5(129592, 129593, 129594, 129595, 129596, 129597) c6( ) c7(cm); #c1(OBFC1) c2(XP_006718039) c3(CST complex subunit STN1 isoform X1) c4(291465) c5(291466, 291467, 291468, 291469, 291470, 291471, 291472, 291473, 291474, 291475) c6( ) c7(LB, BO, e, r, q, op); #c1(OBP2A) c2(NP_001280118) c3(odorant-binding protein 2a isoform gamma precursor) c4(111325) c5(111326, 111327, 111328, 111329, 111330, 111331, 111332) c6( ) c7(ae, T, av, eM, bE, oV, PX, X, r, aA, bB, Io, aF, fr, m, q, t, iK, bz, B, ad); #c1(OBP2A) c2(NP_001280122) c3(odorant-binding protein 2a isoform delta precursor) c4(111355, 111356) c5(111357, 111358, 111359, 111360, 111361, 111362, 111363, 111364, 111365, 111366) c6( ) c7(ae, T, av, eM, bE, oV, PX, X, r, aA, bB, Io, aF, fr, m, q, t, iK, bz, B, ad); #c1(OBP2A) c2(NP_055397) c3(odorant-binding protein 2a isoform alpha precursor) c4(180768) c5(180769, 180770, 180771, 180772, 180773, 180774, 180775, 180776, 180777, 180778) c6( ) c7(ae, T, av, eM, bE, oV, PX, X, r, aA, bB, Io, aF, fr, m, q, t, iK, bz, B, ad); #c1(OBSCN) c2(NP_001092093) c3(obscurin isoform b) c4(39324) c5(39325, 39326, 39327, 39328, 39329, 39330) c6( ) c7(T, W, hW, mx, r, vc, fb); #c1(OBSCN) c2(NP_001258152) c3(obscurin isoform IC) c4(95991) c5( ) c6( ) c7(T, W, hW, mx, r, vc, fb); #c1(OBSCN) c2(NP_443075) c3(obscurin isoform a) c4(229263) c5(229264, 229265, 229266, 229267, 229268, 229269, 229270, 229271, 229272, 229273, 229274, 229275) c6( ) c7(T, W, hW, mx, r, vc, fb); #c1(OBSCN) c2(XP_005273344) c3(obscurin isoform X1) c4( ) c5(284480, 284481, 284482, 284483, 284484, 284485) c6( ) c7(T, W, hW, mx, r, vc, fb); #c1(OBSCN) c2(XP_005273345) c3(obscurin isoform X2) c4( ) c5(284486, 284487, 284488, 284489, 284490, 284491) c6( ) c7(T, W, hW, mx, r, vc, fb); #c1(OBSCN) c2(XP_005273348) c3(obscurin isoform X5) c4( ) c5(284492) c6( ) c7(T, W, hW, mx, r, vc, fb); #c1(OBSCN) c2(XP_006711886) c3(obscurin isoform X23) c4(286279) c5(286280, 286281, 286282, 286283, 286284) c6( ) c7(T, W, hW, mx, r, vc, fb); #c1(OBSCN) c2(XP_006711890) c3(obscurin isoform X38) c4(286285) c5( ) c6( ) c7(T, W, hW, mx, r, vc, fb); #c1(OBSCN) c2(XP_006711891) c3(obscurin isoform X40) c4(286286) c5(286287, 286288, 286289, 286290, 286291, 286292, 286293) c6( ) c7(T, W, hW, mx, r, vc, fb); #c1(OBSCN) c2(XP_011542599) c3(obscurin isoform X33) c4( ) c5(341166, 341167, 341168, 341169, 341170, 341171) c6( ) c7(T, W, hW, mx, r, vc, fb); #c1(OBSCN) c2(XP_011542600) c3(obscurin isoform X39) c4(341172, 341173) c5( ) c6( ) c7(T, W, hW, mx, r, vc, fb); #c1(OBSL1) c2(NP_001166879) c3(obscurin-like protein 1 isoform 3 precursor) c4(68576) c5(68577, 68578, 68579, 68580, 68581, 68582) c6( ) c7(aCo, aCm, oj, km, cmv); #c1(OBSL1) c2(NP_056126) c3(obscurin-like protein 1 isoform 1 precursor) c4(185801) c5(185802, 185803, 185804, 185805, 185806, 185807) c6( ) c7(aCo, aCm, oj, km, cmv); #c1(OBSL1) c2(XP_005246481) c3(obscurin-like protein 1 isoform X8) c4( ) c5(267224, 267225, 267226, 267227, 267228, 267229) c6( ) c7(aCo, aCm, oj, km, cmv); #c1(OBSL1) c2(XP_011509161) c3(obscurin-like protein 1 isoform X6) c4(299792) c5( ) c6( ) c7(aCo, aCm, oj, km, cmv); #c1(OBSL1) c2(XP_011509168) c3(obscurin-like protein 1 isoform X13) c4(299793) c5(299794, 299795, 299796, 299797, 299798, 299799) c6( ) c7(aCo, aCm, oj, km, cmv); #c1(OC90) c2(NP_001073868) c3(otoconin-90 precursor) c4(36182, 36183, 36184) c5(36185, 36186, 36187, 36188, 36189, 36190, 36191, 36192, 36193, 36194, 36195, 36196, 36197, 36198, 36199, 36200, 36201, 36202, 36203, 36204) c6(36205, 36206) c7(Hn, aRa); #c1(OCA2) c2(NP_000266) c3(P protein isoform 1) c4(5939) c5( ) c6( ) c7(bL, sc, T, yk, iW, fr, bHA, q, rc, hX, cmw, av, hd, afQ, aT, SH, cmx, dL, afu, d, IR, aW, Y, ff, ih, apn, XC, eZ, Io, CQ, en, bHy, t, cm, UZ, dr, sS, RB, Dy, eM, nB, hk, agI, IF, cj, gZ, at, m, aPG, aMk); #c1(OCA2) c2(NP_001287913) c3(P protein isoform 2) c4(113198) c5( ) c6( ) c7(bL, sc, T, yk, iW, fr, bHA, q, rc, hX, cmw, av, hd, afQ, aT, SH, cmx, dL, afu, d, IR, aW, Y, ff, ih, apn, XC, eZ, Io, CQ, en, bHy, t, cm, UZ, dr, sS, RB, Dy, eM, nB, hk, agI, IF, cj, gZ, at, m, aPG, aMk); #c1(OCA2) c2(XP_011519942) c3(P protein isoform X3) c4(314739, 314740) c5( ) c6( ) c7(bL, sc, T, yk, iW, fr, bHA, q, rc, hX, cmw, av, hd, afQ, aT, SH, cmx, dL, afu, d, IR, aW, Y, ff, ih, apn, XC, eZ, Io, CQ, en, bHy, t, cm, UZ, dr, sS, RB, Dy, eM, nB, hk, agI, IF, cj, gZ, at, m, aPG, aMk); #c1(OCA2) c2(XP_011519943) c3(P protein isoform X3) c4( ) c5(314741, 314742, 314743, 314744, 314745, 314746) c6( ) c7(bL, sc, T, yk, iW, fr, bHA, q, rc, hX, cmw, av, hd, afQ, aT, SH, cmx, dL, afu, d, IR, aW, Y, ff, ih, apn, XC, eZ, Io, CQ, en, bHy, t, cm, UZ, dr, sS, RB, Dy, eM, nB, hk, agI, IF, cj, gZ, at, m, aPG, aMk); #c1(OCA2) c2(XP_011519945) c3(P protein isoform X5) c4( ) c5(314747, 314748, 314749, 314750, 314751, 314752) c6( ) c7(bL, sc, T, yk, iW, fr, bHA, q, rc, hX, cmw, av, hd, afQ, aT, SH, cmx, dL, afu, d, IR, aW, Y, ff, ih, apn, XC, eZ, Io, CQ, en, bHy, t, cm, UZ, dr, sS, RB, Dy, eM, nB, hk, agI, IF, cj, gZ, at, m, aPG, aMk); #c1(OCA2) c2(XP_011519948) c3(P protein isoform X8) c4(314753) c5(314754, 314755, 314756, 314757, 314758, 314759) c6( ) c7(bL, sc, T, yk, iW, fr, bHA, q, rc, hX, cmw, av, hd, afQ, aT, SH, cmx, dL, afu, d, IR, aW, Y, ff, ih, apn, XC, eZ, Io, CQ, en, bHy, t, cm, UZ, dr, sS, RB, Dy, eM, nB, hk, agI, IF, cj, gZ, at, m, aPG, aMk); #c1(OCA2) c2(XP_011519949) c3(P protein isoform X9) c4( ) c5(314760, 314761, 314762, 314763, 314764, 314765, 314766, 314767, 314768, 314769, 314770, 314771) c6( ) c7(bL, sc, T, yk, iW, fr, bHA, q, rc, hX, cmw, av, hd, afQ, aT, SH, cmx, dL, afu, d, IR, aW, Y, ff, ih, apn, XC, eZ, Io, CQ, en, bHy, t, cm, UZ, dr, sS, RB, Dy, eM, nB, hk, agI, IF, cj, gZ, at, m, aPG, aMk); #c1(OCIAD1) c2(NP_001073308) c3(OCIA domain-containing protein 1 isoform 1) c4(35775, 35776, 35777, 35778, 35779, 35780) c5(35781, 35782, 35783, 35784, 35785, 35786, 35787, 35788, 35789, 35790, 35791, 35792, 35793, 35794, 35795, 35796, 35797, 35798, 35799) c6( ) c7(t); #c1(OCIAD1) c2(NP_001073310) c3(OCIA domain-containing protein 1 isoform 3) c4(35800) c5(35801, 35802, 35803, 35804, 35805, 35806, 35807, 35808, 35809, 35810, 35811, 35812, 35813, 35814, 35815, 35816, 35817, 35818, 35819, 35820, 35821, 35822, 35823, 35824, 35825, 35826, 35827, 35828, 35829, 35830, 35831, 35832, 35833, 35834) c6( ) c7(t); #c1(OCIAD1) c2(NP_001073311) c3(OCIA domain-containing protein 1 isoform 2) c4(35835, 35836) c5(35837, 35838, 35839, 35840, 35841, 35842, 35843) c6( ) c7(t); #c1(OCIAD1) c2(NP_001161726) c3(OCIA domain-containing protein 1 isoform 4) c4( ) c5(65885, 65886, 65887, 65888, 65889, 65890, 65891, 65892, 65893, 65894) c6( ) c7(t); #c1(OCIAD2) c2(NP_001014446) c3(OCIA domain-containing protein 2 isoform 1) c4(25936) c5(25937, 25938, 25939, 25940, 25941, 25942) c6( ) c7(af, g, iE); #c1(OCIAD2) c2(NP_001273702) c3(OCIA domain-containing protein 2 isoform 2) c4(105664, 105665) c5(105666, 105667, 105668, 105669, 105670, 105671, 105672, 105673, 105674, 105675, 105676, 105677) c6( ) c7(af, g, iE); #c1(OCLM) c2(NP_071770) c3(oculomedin) c4(212029) c5(212030, 212031, 212032, 212033, 212034, 212035) c6( ) c7(dw, dH); #c1(OCLN) c2(NP_001192183) c3(occludin isoform a) c4(82005, 82006, 82007) c5(82008, 82009, 82010, 82011, 82012, 82013, 82014, 82015, 82016, 82017, 82018, 82019, 82020, 82021, 82022, 82023) c6( ) c7(Dw, T, jx, aWU, ci, fu, hF, V, fU, aE, zf, aT, K, aPB, IR, aW, fe, aq, g, bz, ac, c, wz, E, aS, mk, adg, ra, B); #c1(OCLN) c2(NP_001192184) c3(occludin isoform b precursor) c4(82024) c5(82025, 82026, 82027, 82028, 82029, 82030, 82031, 82032, 82033, 82034, 82035, 82036) c6( ) c7(Dw, T, jx, aWU, ci, fu, hF, V, fU, aE, zf, aT, K, aPB, IR, aW, fe, aq, g, bz, ac, c, wz, E, aS, mk, adg, ra, B); #c1(OCM) c2(XP_011513787) c3(oncomodulin-1 isoform X1) c4(306245) c5(306246, 306247, 306248, 306249, 306250, 306251, 306252, 306253, 306254, 306255) c6( ) c7(Y, cbM, aq, auN, B, iP); #c1(OCM2) c2(NP_006179) c3(putative oncomodulin-2) c4(162622) c5(162623, 162624, 162625, 162626, 162627, 162628) c6( ) c7(Y, iP); #c1(OCRL) c2(NP_000267) c3(inositol polyphosphate 5-phosphatase OCRL-1 isoform a) c4(5940) c5(5941, 5942, 5943, 5944, 5945, 5946) c6( ) c7(aPt, azU, TI, KW, dw, nf, nA, IM, aY, jr); #c1(OCRL) c2(NP_001578) c3(inositol polyphosphate 5-phosphatase OCRL-1 isoform b) c4(118996) c5(118997, 118998, 118999, 119000, 119001, 119002) c6( ) c7(aPt, azU, TI, KW, dw, nf, nA, IM, aY, jr); #c1(ODAM) c2(NP_060325) c3(odontogenic ameloblast-associated protein precursor) c4( ) c5(195403, 195404, 195405, 195406, 195407, 195408, 195409) c6(195410, 195411) c7(T, aW, Y, aT, ci, ahv); #c1(ODAM) c2(XP_005265755) c3(odontogenic ameloblast-associated protein isoform X1) c4(279706) c5(279707) c6( ) c7(T, aW, Y, aT, ci, ahv); #c1(ODC1) c2(NP_001274117) c3(ornithine decarboxylase isoform 2) c4( ) c5(106029, 106030, 106031, 106032, 106033) c6( ) c7(T, aC, iV, bbW, eR, aD, e, ha, ht, ff, aA, bB, n, gA, bS, j, ct, ci, fd, q, ad, eJ, ip, bv, dY, Ig, aE, hb, dE, pX, aT, h, cy, dz, hn, K, jj, XZ, hu, ae, B, s, et, iU, aW, Y, aoo, az, baT, eH, r, bod, aMA, aq, aF, iy, kt, en, Sm, Z, g, eF, bz, cm, iR, eK, dR, ck, hF, ac, eM, bE, wO, hk, PI, X, jh, gX, cj, qF, MC, y, kS, ne, ao); #c1(ODC1) c2(NP_001274119) c3(ornithine decarboxylase isoform 1) c4(106034, 106035, 106036) c5(106037, 106038, 106039, 106040, 106041, 106042, 106043, 106044, 106045, 106046, 106047, 106048, 106049, 106050, 106051, 106052, 106053) c6( ) c7(T, aC, iV, bbW, eR, aD, e, ha, ht, ff, aA, bB, n, gA, bS, j, ct, ci, fd, q, ad, eJ, ip, bv, dY, Ig, aE, hb, dE, pX, aT, h, cy, dz, hn, K, jj, XZ, hu, ae, B, s, et, iU, aW, Y, aoo, az, baT, eH, r, bod, aMA, aq, aF, iy, kt, en, Sm, Z, g, eF, bz, cm, iR, eK, dR, ck, bF, ac, eM, bE, wO, hk, PI, X, jh, gX, cj, qF, MC, y, kS, ne, ao); #c1(ODF1) c2(NP_077721) c3(outer dense fiber protein 1) c4(215293) c5(215294, 215295, 215296, 215297, 215298, 215299) c6( ) c7(zt, aj, pL, y, fq, J); #c1(ODF3B) c2(NP_001014440) c3(outer dense fiber protein 3B) c4(25910) c5(25911, 25912, 25913, 25914, 25915, 25916, 25917, 25918, 25919, 25920, 25921) c6( ) c7(V, kl); #c1(ODF4) c2(NP_694552) c3(outer dense fiber protein 4) c4(245277) c5(245278, 245279, 245280, 245281, 245282, 245283) c6( ) c7(sS); #c1(OFCC1) c2(XP_011513347) c3(orofacial cleft 1 candidate gene 1 protein) c4(305591) c5(305592, 305593, 305594, 305595, 305596, 305597) c6( ) c7(abZ, azs, he); #c1(OFD1) c2(NP_003602) c3(oral-facial-digital syndrome 1 protein) c4(139502, 139503) c5(139504, 139505, 139506, 139507, 139508, 139509, 139510, 139511, 139512, 139513, 139514, 139515) c6( ) c7(afR, FB, arV, dO, wB, cmz, anL, bsi, Nj, nA, ahD, cmy); #c1(OFD1) c2(XP_005274661) c3(oral-facial-digital syndrome 1 protein isoform X5) c4(285294, 285295) c5(285296, 285297, 285298, 285299, 285300, 285301, 285302, 285303, 285304, 285305, 285306, 285307) c6( ) c7(afR, FB, arV, dO, wB, cmz, anL, bsi, Nj, nA, ahD, cmy); #c1(OFD1) c2(XP_005274664) c3(oral-facial-digital syndrome 1 protein isoform X10) c4(285308) c5(285309, 285310, 285311, 285312, 285313) c6( ) c7(afR, FB, arV, dO, wB, cmz, anL, bsi, Nj, nA, ahD, cmy); #c1(OFD1) c2(XP_011543897) c3(oral-facial-digital syndrome 1 protein isoform X9) c4( ) c5(343076) c6( ) c7(afR, FB, arV, dO, wB, cmz, anL, bsi, Nj, nA, ahD, cmy); #c1(OGDH) c2(NP_001003941) c3(2-oxoglutarate dehydrogenase, mitochondrial isoform 2 precursor) c4(20310, 20311) c5(20312, 20313, 20314, 20315, 20316, 20317, 20318, 20319, 20320, 20321, 20322, 20323) c6( ) c7(ajU, U, cmA, j, K, af, aR, be); #c1(OGDH) c2(NP_001158508) c3(2-oxoglutarate dehydrogenase, mitochondrial isoform 3 precursor) c4(63692) c5(63693, 63694, 63695, 63696, 63697, 63698) c6( ) c7(ajU, U, cmA, j, K, af, aR, be); #c1(OGDH) c2(NP_002532) c3(2-oxoglutarate dehydrogenase, mitochondrial isoform 1 precursor) c4(129598) c5(129599, 129600, 129601, 129602, 129603, 129604) c6( ) c7(ajU, U, cmA, j, K, af, aR, be); #c1(OGDH) c2(XP_005249818) c3(2-oxoglutarate dehydrogenase, mitochondrial isoform X2) c4(269888) c5(269889, 269890, 269891, 269892, 269893, 269894) c6( ) c7(ajU, U, cmA, j, K, af, aR, be); #c1(OGDHL) c2(NP_001137468) c3(2-oxoglutarate dehydrogenase-like, mitochondrial isoform b) c4(55898, 55899) c5(55900, 55901, 55902, 55903, 55904, 55905) c6( ) c7(T, if, dy, ac, qN); #c1(OGDHL) c2(NP_060715) c3(2-oxoglutarate dehydrogenase-like, mitochondrial isoform a) c4(197417, 197418) c5(197419, 197420, 197421, 197422, 197423, 197424, 197425, 197426, 197427, 197428, 197429, 197430) c6( ) c7(T, if, dy, ac, qN); #c1(OGFOD1) c2(NP_060703) c3(prolyl 3-hydroxylase OGFOD1) c4(197300, 197301) c5(197302, 197303, 197304, 197305, 197306, 197307, 197308, 197309, 197310, 197311, 197312) c6( ) c7(cy, aw, j, cj); #c1(OGFOD1) c2(XP_011521500) c3(prolyl 3-hydroxylase OGFOD1 isoform X1) c4( ) c5(316246, 316247, 316248, 316249, 316250) c6( ) c7(cy, aw, j, cj); #c1(OGFR) c2(NP_031372) c3(opioid growth factor receptor) c4(171988, 171989, 171990, 171991, 171992, 171993) c5(171994, 171995, 171996, 171997, 171998, 171999, 172000, 172001, 172002, 172003, 172004, 172005, 172006, 172007, 172008, 172009, 172010, 172011, 172012, 172013, 172014, 172015, 172016, 172017, 172018, 172019, 172020, 172021, 172022, 172023, 172024, 172025, 172026, 172027, 172028, 172029, 172030) c6( ) c7(qJ, T, hd, aC, aE, nM, nB, m, t, iK, X); #c1(OGG1) c2(NP_002533) c3(N-glycosylase/DNA lyase isoform 1a) c4(129605) c5(129606, 129607, 129608, 129609, 129610, 129611) c6( ) c7(oO, T, aC, fR, atj, if, bB, ci, aY, ip, aE, u, Qk, K, hu, eL, Zm, dH, aW, CT, LZ, nY, kt, vs, g, bw, lk, qJ, xd, fT, eM, vA, Gs, U, Zn, k, m, Vj, iu, FW, gU, sw, aWG, ht, Pi, NT, n, aj, fr, ct, qN, jz, hw, h, eV, Gw, dL, hB, Xh, dx, ny, FZ, fQ, aq, op, Sc, W, dB, hk, Qu, hL, at, nL, cB, B, it, bL, eR, yk, eX, aA, cz, hy, v, j, V, q, J, eA, hb, aT, HG, bq, ae, af, ne, jf, iF, qw, Sh, s, Y, r, en, cl, t, kC, iK, ck, sS, rR, kP, pZ, aJt, gX, JH, bt, rA, ao, Gl, hI, wi, iW, jh, bS, Gn, hF, ad, hX, dP, av, I, ib, py, sN, io, lQ, cmB, BN, BO, Ub, ff, aF, Z, bz, bF, es, bE, gZ, Gu, y, X, rk); #c1(OGG1) c2(NP_058212) c3(N-glycosylase/DNA lyase isoform 1b) c4(192674) c5(192675, 192676, 192677, 192678, 192679) c6( ) c7(oO, T, aC, fR, atj, if, bB, ci, aY, ip, aE, u, Qk, K, hu, eL, Zm, dH, aW, CT, LZ, nY, kt, vs, g, bw, lk, qJ, xd, fT, eM, vA, Gs, U, Zn, k, m, Vj, iu, FW, gU, sw, aWG, ht, Pi, NT, n, aj, fr, ct, qN, jz, hw, h, eV, Gw, dL, hB, Xh, dx, ny, FZ, fQ, aq, op, Sc, W, dB, hk, Qu, hL, at, nL, cB, B, it, bL, eR, yk, eX, aA, cz, hy, v, j, V, q, J, eA, hb, aT, HG, bq, ae, af, ne, jf, if, qw, Sh, s, Y, r, en, cl, t, kC, iK, ck, sS, rR, kP, pZ, aJt, gX, JH, bt, rA, ao, Gl, hl, wi, iW, jh, bS, Gn, hF, ad, hX, dP, av, I, ib, py, sN, io, lQ, cmB, BN, BO, Ub, ff, aF, Z, bz, bF, es, bE, gZ, Gu, y, X, rk); #c1(OGG1) c2(NP_058213) c3(N-glycosylase/DNA lyase isoform 1c) c4(192680) c5(192681, 192682, 192683, 192684, 192685, 192686) c6( ) c7(oO, T, aC, fR, atj, if, bB, ci, aY, ip, aE, u, Qk, K, hu, eL, Zm, dH, aW, CT, LZ, nY, kt, vs, g, bw, lk, qJ, xd, fT, eM, vA, Gs, U, Zn, k, m, Vj, iu, FW, gU, sw, aWG, ht, Pi, NT, n, aj, fr, ct, qN, jz, hw, h, eV, Gw, dL, hB, Xh, dx, ny, FZ, fQ, aq, op, Sc, W, dB, hk, Qu, hL, at, nL, cB, B, it, bL, eR, yk, eX, aA, cz, hy, v, j, V, q, J, eA, hb, aT, HG, bq, ae, af, ne, jf, iF, qw, Sh, s, Y, r, en, cl, t, kC, iK, ck, sS, rR, kP, pZ, aJt, gX, JH, bt, rA, an, Gl, hl, wi, iW, jh, bS, Gn, hF, ad, hX, dP, av, I, ib, py, sN, io, lQ, cmB, BN, BO, Ub, ff, aF, Z, bz, bF, es, bE, gZ, Gu, y, X, rk); #c1(OGG1) c2(NP_058214) c3(N-glycosylase/DNA lyase isoform 2a) c4(192687) c5(192688, 192689, 192690, 192691, 192692, 192693, 192694) c6( ) c7(oO, T, aC, fR, atj, if, bB, ci, aY, ip, aE, u, Qk, K, hu, eL, Zm, dH, aW, CT, LZ, nY, kt, vs, g, bw, lk, qJ, xd, fT, eM, vA, Gs, U, Zn, k, m, Vj, iu, FW, gU, sw, aWG, ht, Pi, NT, n, aj, fr, ct, qN, jz, hw, h, eV, Gw, dL, hB, Xh, dx, ny, FZ, fQ, aq, op, Sc, W, dB, hk, Qu, hL, at, nL, cB, B, it, bL, eR, yk, eX, aA, cz, hy, v, j, V, q, J, eA, hb, aT, HG, bq, ae, af, ne, jf, iF, qw, Sh, s, Y, r, en, cl, t, kC, iK, ck, sS, rR, kP, pZ, aJt, gX, JH, bt, rA, ao, Gl, hl, wi, iW, jh, bS, Gn, hF, ad, hX, dP, av, I, ib, py, sN, io, lQ, cmB, BN, BO, Ub, ff, aF, Z, bz, bF, es, bE, gZ, Gu, y, X, rk); #c1(OGG1) c2(NP_058434) c3(N-glycosylase/DNA lyase isoform 2b) c4(192709, 192710) c5(192711, 192712, 192713, 192714, 192715, 192716, 192717, 192718, 192719, 192720, 192721, 192722) c6( ) c7(oO, T, aC, fR, atj, if, bB, ci, aY, ip, aE, u, Qk, K, hu, eL, Zm, dH, aW, CT, LZ, nY, kt, vs, g, bw, lk, qJ, xd, fT, eM, vA, Gs, U, Zn, k, m, Vj, iu, FW, gU, sw, aWG, ht, Pi, NT, n, aj, fr, ct, qN, jz, hw, h, eV, Gw, dL, hB, Xh, dx, ny, FZ, fQ, aq, op, Sc, W, dB, hk, Qu, hL, at, nL, cB, B, it, bL, eR, yk, eX, aA, cz, hy, v, j, V, q, J, eA, hb, aT, HG, bq, ae, af, ne, jf, iF, qw, Sh, s, Y, r, en, cl, t, kC, iK, ck, sS, rR, kP, pZ, aJt, gX, JH, bt, rA, ao, Gl, hI, wi, iW, jh, bS, Gn, hF, ad, hX, dP, av, I, ib, py, sN, io, lQ, cmB, BN, BO, Ub, ff, aF, Z, bz, bF, es, bE, gZ, Gu, y, X, rk); #c1(OGG1) c2(NP_058436) c3(N-glycosylase/DNA lyase isoform 2c) c4(192723) c5(192724, 192725, 192726, 192727, 192728, 192729) c6( ) c7(oO, T, aC, fR, atj, if, bB, ci, aY, ip, aE, u, Qk, K, hu, eL, Zm, dH, aW, CT, LZ, nY, kt, vs, g, bw, lk, qJ, xd, fT, eM, vA, Gs, U, Zn, k, m, Vj, iu, FW, gU, sw, aWG, ht, Pi, NT, n, aj, fr, ct, qN, jz, hw, h, eV, Gw, dL, hB, Xh, dx, ny, FZ, fQ, aq, op, Sc, W, dB, hk, Qu, hL, at, nL, cB, B, it, bL, eR, yk, eX, aA, cz, hy, v, j, V, q, J, eA, hb, aT, HG, bq, ae, af, ne, jf, iF, qw, Sh, s, Y, r, en, cl, t, kC, iK, ck, sS, rR, kP, pZ, aJt, gX, JH, bt, rA, ao, Gl, hl, wi, iW, jh, bS, Gn, hF, ad, hX, dP, av, I, ib, py, sN, io, lQ, cmB, BN, BO, Ub, ff, aF, Z, bz, bF, es, bE, gZ, Gu, y, X, rk); #c1(OGG1) c2(NP_058437) c3(N-glycosylase/DNA lyase isoform 2d) c4(192730) c5(192731, 192732, 192733, 192734, 192735, 192736) c6( ) c7(oO, T, aC, fR, atj, if, bB, ci, aY, ip, aE, u, Qk, K, hu, eL, Zm, dH, aW, CT, LZ, nY, kt, vs, g, bw, lk, qJ, xd, fT, eM, vA, Gs, U, Zn, k, m, Vj, iu, FW, gU, sw, aWG, ht, Pi, NT, n, aj, fr, ct, qN, jz, hw, h, eV, Gw, dL, hB, Xh, dx, ny, FZ, fQ, aq, op, Sc, W, dB, hk, Qu, hL, at, nL, cB, B, it, bL, eR, yk, eX, aA, cz, hy, v, j, V, q, J, eA, hb, aT, HG, bq, ae, af, ne, jf, iF, qw, Sh, s, Y, r, en, cl, t, kC, iK, ck, sS, rR, kP, pZ, aJt, gX, JH, bt, rA, ao, Gl, hl, wi, iW, jh, bS, Gn, hF, ad, hX, dP, av, I, ib, py, sN, io, lQ, cmB, BN, BO, Ub, ff, aF, Z, bz, bF, es, bE, gZ, Gu, y, X, rk); #c1(OGG1) c2(NP_058438) c3(N-glycosylase/DNA lyase isoform 2e) c4(192737) c5(192738, 192739, 192740, 192741, 192742, 192743) c6( ) c7(oO, T, aC, fR, atj, if, bB, ci, aY, ip, aE, u, Qk, K, hu, eL, Zm, dH, aW, CT, LZ, nY, kt, vs, g, bw, lk, qJ, xd, fT, eM, vA, Gs, U, Zn, k, m, Vj, iu, FW, gU, sw, aWG, ht, Pi, NT, n, aj, fr, ct, qN, jz, hw, h, eV, Gw, dL, hB, Xh, dx, ny, FZ, fQ, aq, op, Sc, W, dB, hk, Qu, hL, at, nL, cB, B, it, bL, eR, yk, eX, aA, cz, hy, v, j, V, q, J, eA, hb, aT, HG, bq, ae, af, ne, jf, iF, qw, Sh, s, Y, r, en, cl, t, kC, iK, ck, sS, rR, kP, pZ, aJt, gX, JH, bt, rA, ao, Gl, hl, wi, iW, jh, bS, Gn, hF, ad, hX, dP, av, I, ib, py, sN, io, lQ, cmB, BN, BO, Ub, ff, aF, Z, bz, bF, es, bE, gZ, Gu, y, X, rk); #c1(OGG1) c2(XP_011532063) c3(N-glycosylase/DNA lyase isoform X2) c4( ) c5(328132) c6( ) c7(oO, T, aC, fR, atj, if, bB, ci, aY, ip, aE, u, Qk, K, hu, eL, Zm, dH, aW, CT, LZ, nY, kt, vs, g, bw, lk, qJ, xd, fT, eM, vA, Gs, U, Zn, k, m, Vj, iu, FW, gU, sw, aWG, ht, Pi, NT, n, aj, fr, ct, qN, jz, hw, h, eV, Gw, dL, hB, Xh, dx, ny, FZ, fQ, aq, op, Sc, W, dB, hk, Qu, hL, at, nL, cB, B, it, bL, eR, yk, eX, aA, cz, hy, v, j, V, q, J, eA, hb, aT, HG, bq, ae, af, ne, jf, iF, qw, Sh, s, Y, r, en, cl, t, kC, iK, ck, sS, rR, kP, pZ, aJt, gX, JH, bt, rA, ao, Gl, hl, wi, iW, jh, bS, Gn, hF, ad, hX, dP, av, I, ib, py, sN, io, lQ, cmB, BN, BO, Ub, ff, aF, Z, bz, bF, es, bE, gZ, Gu, y, X, rk); #c1(OGN) c2(NP_054776) c3(mimecan preproprotein) c4(177732, 177733) c5(177734, 177735, 177736, 177737, 177738, 177739, 177740, 177741, 177742, 177743, 177744, 177745, 177746, 177747, 177748, 177749) c6( ) c7(hR, s); #c1(OGT) c2(NP_858058) c3(UDP-N-acetylglucosamine-peptide N-acetylglucosaminyltransferase 110 kDa subunit isoform 1) c4(255326) c5(255327, 255328, 255329, 255330, 255331, 255332) c6( ) c7(bL, T, Hx, aC, aE, AO, BA, aW, aT, aU, n, aj, K, C, bq, t, ae, cd, J, ad, vQ); #c1(OGT) c2(NP_858059) c3(UDP-N-acetylglucosamine-peptide N-acetylglucosaminyltransferase 110 kDa subunit isoform 2) c4(255333) c5(255334, 255335, 255336, 255337, 255338, 255339) c6( ) c7(bL, T, Hx, aC, aE, AO, BA, aW, aT, aU, n, aj, K, C, bq, t, ae, cd, J, ad, vQ); #c1(OIP5) c2(NP_009211) c3(protein Mis18-beta) c4(171539) c5(171540, 171541, 171542, 171543, 171544, 171545) c6( ) c7(T, ff, ht, aA, v, ey, aF, en, hu); #c1(OIT3) c2(NP_689848) c3(oncoprotein-induced transcript 3 protein precursor) c4(244142, 244143) c5(244144, 244145, 244146, 244147, 244148, 244149, 244150, 244151, 244152, 244153, 244154, 244155) c6( ) c7(nH, B); #c1(OLA1) c2(NP_001011708) c3(obg-like ATPase 1 isoform 2) c4( ) c5(24765, 24766, 24767, 24768, 24769, 24770, 24771, 24772, 24773, 24774) c6( ) c7(aW, aT); #c1(OLA1) c2(NP_037473) c3(obg-like ATPase 1 isoform 1) c4(175692, 175693, 175694, 175695, 175696, 175697) c5(175698, 175699, 175700, 175701, 175702, 175703, 175704, 175705, 175706, 175707, 175708, 175709, 175710, 175711, 175712, 175713, 175714, 175715, 175716, 175717, 175718, 175719, 175720, 175721, 175722, 175723) c6( ) c7(aW, aT); #c1(OLFM1) c2(NP_001269540) c3(noelin isoform 4 precursor) c4(101842, 101843) c5(101844, 101845, 101846, 101847, 101848, 101849, 101850, 101851, 101852, 101853, 101854, 101855, 101856, 101857, 101858, 101859) c6( ) c7(F, af, aq, va, f, H, iJ, B, ad, L); #c1(OLFM1) c2(NP_001269541) c3(noelin isoform 5) c4(101860) c5(101861, 101862, 101863, 101864, 101865, 101866, 101867, 101868) c6( ) c7(F, af, aq, va, f, H, iJ, B, ad, L); #c1(OLFM1) c2(NP_006325) c3(noelin isoform 2 precursor) c4( ) c5(164040, 164041, 164042, 164043, 164044, 164045, 164046, 164047) c6( ) c7(F, af, aq, va, f, H, iJ, B, ad, L); #c1(OLFM1) c2(NP_055094) c3(noelin isoform 1 precursor) c4(178888, 178889) c5(178890, 178891, 178892, 178893, 178894, 178895, 178896, 178897) c6( ) c7(F, af, aq, va, f, H, iJ, B, ad, L); #c1(OLFM2) c2(NP_477512) c3(noelin-2 isoform 2 precursor) c4(230782) c5(230783, 230784, 230785, 230786, 230787, 230788, 230789, 230790) c6(230791, 230792) c7(pZ); #c1(OLFM4) c2(NP_006409) c3(olfactomedin-4 precursor) c4(164781) c5(164782, 164783, 164784, 164785, 164786, 164787) c6( ) c7(T, aA, bB, v, j, ci, q, ad, dP, aE, ae, ev, r, aF, cl, fq, ac, c, iT, bE, gX, hL, gZ, bt); c1(OLFML2B) c2(NP_056256) c3(olfactomedin-like protein 2B isoform 2 precursor) c4(186772) c5(186773, 186774, 186775, 186776, 186777, 186778, 186779, 186780) c6(186781, 186782) c7(dD, eq, EQ); #c1(OLFML2B) c2(XP_005245132) c3(olfactomedin-like protein 2B isoform X1) c4(266315) c5( ) c6( ) c7(dD, eq, EQ); #c1(OLFML2B) c2(XP_011507700) c3(olfactomedin-like protein 2B isoform X2) c4( ) c5(297699, 297700, 297701, 297702, 297703, 297704, 297705, 297706) c6(297707, 297708) c7(dD, eq, EQ); #c1(OLIG1) c2(NP_620450) c3(oligodendrocyte transcription factor 1) c4(237658, 237659, 237660) c5(237661, 237662, 237663, 237664, 237665, 237666, 237667, 237668, 237669, 237670, 237671, 237672, 237673, 237674, 237675, 237676, 237677, 237678, 237679) c6( ) c7(byp, av, Fc, d, eM, dB, yL, qy, rE, as, cb, sj, V, eA, f, qc); #c1(OLIG2) c2(XP_005260965) c3(oligodendrocyte transcription factor 2 isoform X1) c4(277030, 277031) c5(277032, 277033, 277034, 277035, 277036, 277037, 277038, 277039, 277040, 277041, 277042, 277043, 277044, 277045, 277046, 277047, 277048, 277049) c6( ) c7(T, Tb, cfg, qy, ci, bNe, Fc, eA, iC, iX, aT, By, Ou, K, cb, he, rE, af, dx, jf, if, Uf, d, aW, Y, yL, apK, as, f, Hp, ck, chr, c, dB, bt, qc); #c1(OLIG3) c2(NP_786923) c3(oligodendrocyte transcription factor 3) c4(251909) c5(251910, 251911, 251912, 251913, 251914, 251915) c6( ) c7(bL, A, oe, cr, cz, gZ, j, hp, iV, y, V, fq); #c1(OLR1) c2(NP_001166103) c3(oxidized low-density lipoprotein receptor 1 isoform 2) c4(68159) c5(68160, 68161, 68162, 68163, 68164, 68165) c6( ) c7(bL, T, dD, eR, ea, e, aw, I, cz, cR, aj, v, j, eq, cd, J, cc, adL, Bc, Ot, M, aT, ey, K, dQ, eN, af, hm, cH, cW, aW, hI, uC, qa, kT, ac, mf, aS, ei, y, L); #c1(OLR1) c2(NP_001166104) c3(oxidized low-density lipoprotein receptor 1 isoform 3) c4(68166) c5(68167, 68168, 68169, 68170, 68171, 68172) c6( ) c7(bL, T, dD, eR, ea, e, aw, I, cz, cR, aj, v, j, eq, cd, J, cc, adL, Bc, Ot, M, aT, ey, K, dQ, eN, af, hm, cH, cW, aW, hI, uC, qa, kT, ac, mf, aS, ei, y, L); #c1(OLR1) c2(XP_011518984) c3(oxidized low-density lipoprotein receptor 1 isoform X1) c4(313458) c5(313459, 313460, 313461, 313462, 313463, 313464) c6( ) c7(bL, T, dD, eR, ea, e, aw, I, cz, cR, aj, v, j, eq, cd, J, cc, adL, Bc, Ot, M, aT, ey, K, dQ, eN, af, hm, cH, cW, aW, hI, uC, qa, kT, ac, mf, aS, ei, y, L); #c1(OMD) c2(NP_005005) c3(osteomodulin precursor) c4(152001) c5(152002, 152003, 152004, 152005, 152006, 152007, 152008, 152009, 152010, 152011) c6(152012, 152013) c7(rE, T, qc); #c1(OMG) c2(NP_002535) c3(oligodendrocyte-myelin glycoprotein precursor) c4(129612) c5(129613, 129614, 129615, 129616, 129617, 129618, 129619, 129620) c6( ) c7(ahN, Ew, ac, fm, aiz, hP, nA, V, bN); #c1(OMP) c2(NP_006180) c3(olfactory marker protein) c4(162629) c5(162630, 162631, 162632, 162633, 162634, 162635, 162636) c6( ) c7(at, alx, VF, oc); #c1(ONECUT1) c2(NP_004489) c3(hepatocyte nuclear factor 6) c4(146861) c5(146862, 146863, 146864, 146865, 146866, 146867, 146868) c6( ) c7(bL, T, aC, aE, bE, qt, ff, EN, aq, aj, kp, bz, en, fq, B); #c1(ONECUT2) c2(NP_004843) c3(one cut domain family member 2) c4(150209, 150210) c5(150211, 150212, 150213, 150214, 150215, 150216, 150217, 150218, 150219, 150220, 150221, 150222, 150223, 150224) c6( ) c7(dB, T, fM, EQ); #c1(OPA1) c2(NP_056375) c3(dynamin-like 120 kDa protein, mitochondrial isoform 1) c4(187342) c5(187343, 187344, 187345, 187346, 187347, 187348) c6( ) c7(cmC, HQ, cZ, T, cz, bD, aNG, cmD, ci, bgR, q, aR, cd, alD, cmE, aV, oj, vd, K, bU, dd, awL, nP, cdr, dH, mA, ff, wF, cdq, cds, en, g, dw, px, kC, vU, ac, c, pZ, mG, U, awK, gv, acJ, eQ, IM, B, AI); #c1(OPA1) c2(NP_570844) c3(dynamin-like 120 kDa protein, mitochondrial isoform 2) c4( ) c5(234296, 234297, 234298, 234299, 234300, 234301) c6( ) c7(cmC, HQ, cZ, T, cz, bD, aNG, cmD, ci, bgR, q, aR, cd, alD, cmE, aV, oj, vd, K, bU, dd, awL, nP, cdr, dH, mA, ff, wF, cdq, cds, en, g, dw, px, kC, vU, ac, c, pZ, mG, U, awK, gv, acJ, eQ, IM, B, AI); #c1(OPA1) c2(NP_570846) c3(dynamin-like 120 kDa protein, mitochondrial isoform 4) c4(234302, 234303) c5(234304, 234305, 234306, 234307, 234308, 234309) c6( ) c7(cmC, HQ, cZ, T, cz, bD, aNG, cmD, ci, bgR, q, aR, cd, alD, cmE, aV, oj, vd, K, bU, dd, awL, nP, cdr, dH, mA, ff, wF, cdq, cds, en, g, dw, px, kC, vU, ac, c, pZ, mG, U, awK, gv, acJ, eQ, IM, B, AI); #c1(OPA1) c2(NP_570847) c3(dynamin-like 120 kDa protein, mitochondrial isoform 5) c4(234310, 234311) c5(234312, 234313, 234314, 234315, 234316, 234317, 234318, 234319, 234320, 234321, 234322, 234323) c6( ) c7(cmC, HQ, cZ, T, cz, bD, aNG, cmD, ci, bgR, q, aR, cd, alD, cmE, aV, oj, vd, K, bU, dd, awL, nP, cdr, dH, mA, ff, wF, cdq, cds, en, g, dw, px, kC, vU, ac, c, pZ, mG, U, awK, gv, acJ, eQ, IM, B, AI); #c1(OPA1) c2(NP_570848) c3(dynamin-like 120 kDa protein, mitochondrial isoform 6) c4(234324) c5(234325, 234326, 234327, 234328, 234329, 234330) c6( ) c7(cmC, HQ, cZ, T, cz, bD, aNG, cmD, ci, bgR, q, aR, cd, alD, cmE, aV, oj, vd, K, bU, dd, awL, nP, cdr, dH, mA, ff, wF, cdq, cds, en, g, dw, px, kC, vU, ac, c, pZ, mG, U, awK, gv, acJ, eQ, IM, B, AI); #c1(OPA1) c2(NP_570849) c3(dynamin-like 120 kDa protein, mitochondrial isoform 7) c4(234331) c5(234332, 234333, 234334, 234335, 234336, 234337) c6( ) c7(cmC, HQ, cZ, T, cz, bD, aNG, cmD, ci, bgR, q, aR, cd, alD, cmE, aV, oj, vd, K, bU, dd, awL, nP, cdr, dH, mA, ff, wF, cdq, cds, en, g, dw, px, kC, vU, ac, c, pZ, mG, U, awK, gv, acJ, eQ, IM, B, AI); #c1(OPA1) c2(NP_570850) c3(dynamin-like 120 kDa protein, mitochondrial isoform 8) c4(234338) c5(234339, 234340, 234341, 234342, 234343, 234344) c6( ) c7(cmC, HQ, cZ, T, cz, bD, aNG, cmD, ci, bgR, q, aR, cd, alD, cmE, aV, oj, vd, K, bU, dd, awL, nP, cdr, dH, mA, ff, wF, cdq, cds, en, g, dw, px, kC, vU, ac, c, pZ, mG, U, awK, gv, acJ, eQ, IM, B, AI); #c1(OPA3) c2(NP_001017989) c3(optic atrophy 3 protein isoform a) c4(26732) c5(26733, 26734, 26735, 26736, 26737, 26738) c6( ) c7(alD, IR, cmH, cmG, awK, emf, vd, eQ, IJ); #c1(OPA3) c2(NP_079412) c3(optic atrophy 3 protein isoform b) c4(218012, 218013) c5(218014, 218015, 218016, 218017, 218018, 218019, 218020) c6( ) c7(alD, IR, cmH, cmG, awK, emf, vd, eQ, IJ); #c1(OPA3) c2(XP_005259335) c3(optic atrophy 3 protein isoform X2) c4( ) c5(276062, 276063, 276064, 276065, 276066) c6( ) c7(alD, IR, cmH, cmG, awK, cmF, vd, eQ, IJ); #c1(OPCML) c2(NP_001012393) c3(opioid-binding protein/cell adhesion molecule isoform b preproprotein) c4(24911, 24912) c5(24913, 24914, 24915, 24916, 24917, 24918, 24919, 24920, 24921, 24922, 24923, 24924) c6( ) c7(T, oe, e, eX, jh, aA, aj, ci, eA, XX, jz, eV, dL, K, eL, jf, B, PL, g, t, fq, dB, gv, m, iu); #c1(OPCML) c2(NP_002536) c3(opioid-binding protein/cell adhesion molecule isoform a preproprotein) c4(129621, 129622) c5(129623, 129624, 129625, 129626, 129627, 129628, 129629, 129630, 129631, 129632, 129633, 129634) c6( ) c7(T, oe, e, eX, jh, aA, aj, ci, eA, XX, jz, eV, dL, K, eL, jf, B, PL, g, t, fq, dB, gv, m, iu); #c1(OPHN1) c2(XP_005262327) c3(oligophrenin-1 isoform X3) c4(277834) c5(277835, 277836, 277837, 277838, 277839, 277840, 277841, 277842, 277843, 277844, 277845) c6( ) c7(nd, nf, bS, cmI, ct, nA, Z); #c1(OPHN1) c2(XP_011529263) c3(oligophrenin-1 isoform X1) c4(324707, 324708) c5(324709, 324710, 324711, 324712, 324713, 324714, 324715) c6( ) c7(nd, nf, bS, cmI, et, nA, Z); #c1(OPN1LW) c2(NP_064445) c3(long-wave-sensitive opsin 1) c4(202490, 202491) c5(202492, 202493, 202494, 202495, 202496, 202497, 202498, 202499, 202500, 202501, 202502, 202503) c6( ) c7(T, cmJ, jh, it, bB, oY, fd, Kh, ci, C, nA, hF, AO, q, ad, aCi, eA, av, aT, h, ask, ae, pi, uQ, cmK, avP, je, IR, kS, aW, t, bz, all, ck, Qi, cmL, nM, iM, eM, kB, bE, cj, CZ, m, bt, xg, L); #c1(OPN1MW2) c2(NP_001041646) c3(medium-wave-sensitive opsin 1) c4(34236) c5(34237, 34238, 34239, 34240, 34241, 34242, 34243, 34244, 34245, 34246) c6( ) c7(jf, Hx, T, adB, Fw, cd); #c1(OPN1SW) c2(NP_001699) c3(short-wave-sensitive opsin 1) c4(120120) c5(120121, 120122, 120123, 120124, 120125, 120126) c6( ) c7(T, fM, dA, al, jh, n, jE, qN, hX, x, iu, fX, pp, hn, cmM, nJ, iL, d, IR, iU, mA, hI, bnQ, yq, eF, aGj, f, bz, Uk, hq, ck, bF, ou, gk, W, dc, k, hE, bt, B, jr); #c1(OPN3) c2(NP_055137) c3(opsin-3) c4(179220, 179221) c5(179222, 179223, 179224, 179225, 179226, 179227, 179228, 179229, 179230, 179231, 179232, 179233) c6( ) c7(bM, ft, dY, z, V, B); #c1(OPN4) c2(NP_001025186) c3(melanopsin isoform 2) c4(29471, 29472) c5(29473, 29474, 29475, 29476, 29477, 29478, 29479, 29480, 29481, 29482, 29483, 29484) c6( ) c7(T, os, aW, cr, aT, Nt, ta, oZ, j, ei, cm, ae, cd, ad, hZ); #c1(OPN4) c2(NP_150598) c3(melanopsin isoform 1) c4(228136) c5(228137, 228138, 228139, 228140, 228141, 228142) c6( ) c7(T, os, aW, cr, aT, Nt, ta, oZ, j, ei, cm, ae, cd, ad, hZ); #c1(OPN5) c2(NP_859528) c3(opsin-5) c4(255536) c5(255537, 255538, 255539, 255540, 255541, 255542) c6( ) c7(aW, he, B, bK, aT); #c1(OPRK1) c2(NP_000903) c3(kappa-type opioid receptor isoform 1) c4( ) c5(17065, 17066, 17067, 17068, 17069, 17070, 17071, 17072, 17073, 17074, 17075, 17076, 17077) c6( ) c7(jd, bO, jh, bS, gf, ct, VV, eA, hr, x, FY, aqt, gM, Jb, rJ, pX, aqk, h, gI, K, ox, he, hZ, iU, cmN, cu, gu, Z, bw, FT, ck, ok, cA, eM, Gs, Ei, bt, cj, Rm, k, IB); #c1(OPRL1) c2(NP_001186948) c3(nociceptin receptor) c4( ) c5(78863, 78864, 78865, 78866, 78867, 78868, 78869, 78870, 78871, 78872, 78873) c6( ) c7(eY, T, VR, aCt, Ei, gu, cm, IB, FT, hZ); #c1(OPRL1) c2(XP_011527130) c3(nociceptin receptor isoform X1) c4(321634) c5(321635, 321636, 321637) c6( ) c7(eY, T, VR, aCt, Ei, gu, cm, IB, FT, hZ); #c1(OPRM1) c2(NP_000905) c3(mu-type opioid receptor isoform MOR-1) c4( ) c5(17078, 17079, 17080, 17081, 17082) c6( ) c7(oO, T, os, bO, gf, ur, VV, Gb, K, xa, bc, gr, iE, aW, hI, hJ, cm, eM, Gs, cj, sv, abI, aCS, gL, ct, cd, ai, FY, h, IG, aNU, dL, gI, hg, aTX, he, PT, fe, aFx, cM, Jh, hq, ok, at, aqm, IB, jd, cmP, bL, jc, jx, bAp, v, j, eA, Si, aT, cmO, bq, avI, ae, eu, cmN, Y, aPf, cu, en, xw, FT, bN, iQ, qX, VR, cmQ, Dd, ha, jh, Gd, oZ, bS, uu, ad, dP, F, aqk, Jc, hZ, Gv, vj, aCt, ff, gC, cr, gl, gu, aTR, Z, jb, bz, Ek, es, Cq, eU, xZ, HN, Rm, be, pK, hE); #c1(OPRM1) c2(NP_001008503) c3(mu-type opioid receptor isoform MOR-10) c4(23273) c5(23274, 23275, 23276, 23277, 23278, 23279, 23280) c6( ) c7(oO, T, os, bO, gf, ur, VV, Gb, K, xa, bc, gr, iE, aW, hI, hJ, cm, eM, Gs, cj, sv, abI, aCS, gL, ct, cd, ai, FY, h, IG, aNU, dL, gl, hg, aTX, he, PT, fe, aFx, cM, Jh, hq, ok, at, aqm, IB, jd, cmP, bL, jc, jx, bAp, v, j, eA, Si, aT, cmO, bq, avI, ae, eu, cmN, Y, aPf, cu, en, xw, FT, bN, iQ, qX, VR, cmQ, Dd, ha, jh, Gd, oZ, bS, uu, ad, dP, F, aqk, Jc, hZ, Gv, vj, aCt, ff, gC, cr, gl, gu, aTR, Z, jb, bz, Ek, es, Cq, eU, xZ, HN, Rm, be, pK, hE); #c1(OPRM1) c2(NP_001008504) c3(mu-type opioid receptor isoform MOR-1A) c4(23281) c5(23282, 23283, 23284, 23285, 23286, 23287, 23288, 23289, 23290, 23291, 23292, 23293, 23294, 23295, 23296, 23297) c6( ) c7(oO, T, os, bO, gf, ur, VV, Gb, K, xa, bc, gr, iE, aW, hI, hJ, cm, eM, Gs, cj, sv, abI, aCS, gL, ct, cd, ai, FY, h, IG, aNU, dL, gl, hg, aTX, he, PT, fe, aFx, cM, Jh, hg, ok, at, aqm, IB, jd, cmP, bL, jc, jx, bAp, v, j, eA, Si, aT, cmO, bq, avI, ae, eu, cmN, Y, aPf, cu, en, xw, FT, bN, iQ, qX, VR, cmQ, Dd, ha, jh, Gd, oZ, bS, uu, ad, dP, F, aqk, Jc, hZ, Gv, vj, aCt, ff, gC, cr, gl, gu, aTR, Z, jb, bz, Ek, es, Cq, eU, xZ, HN, Rm, be, pK, hE); #c1(OPRM1) c2(NP_001008505) c3(mu-type opioid receptor isoform MOR-1X) c4(23298) c5(23299, 23300, 23301, 23302, 23303, 23304) c6( ) c7(oO, T, os, bO, gf, ur, VV, Gb, K, xa, be, gr, iE, aW, hI, hJ, cm, eM, Gs, cj, sv, abI, aCS, gL, ct, cd, ai, FY, h, IG, aNU, dL, gl, hg, aTX, he, PT, fe, aFx, cM, Jh, hq, ok, at, aqm, IB, jd, cmP, bL, jc, jx, bAp, v, j, eA, Si, aT, cmO, bq, avI, ae, eu, cmN, Y, aPf, cu, en, xw, FT, bN, iQ, qX, VR, cmQ, Dd, ha, jh, Gd, oZ, bS, uu, ad, dP, F, aqk, Jc, hZ, Gv, vj, aCt, ff, gC, cr, gl, gu, aTR, Z, jb, bz, Ek, es, Cq, eU, xZ, HN, Rm, be, pK, hE); #c1(OPRM1) c2(NP_001138752) c3(mu-type opioid receptor isoform MOR-1G1) c4( ) c5(57527, 57528, 57529, 57530, 57531, 57532, 57533, 57534, 57535, 57536, 57537) c6( ) c7(oO, T, os, bO, gf, ur, VV, Gb, K, xa, bc, gr, iE, aW, hI, hJ, cm, eM, Gs, cj, sv, abI, aCS, gL, ct, cd, ai, FY, h, IG, aNU, dL, gl, hg, aTX, he, PT, fe, aFx, cM, Jh, hg, ok, at, aqm, IB, jd, cmP, bL, jc, jx, bAp, v, j, eA, Si, aT, cmO, bq, avI, ae, eu, cmN, Y, aPf, cu, en, xw, FT, bN, iQ, qX, VR, cmQ, Dd, ha, jh, Gd, oZ, bS, uu, ad, dP, F, aqk, Jc, hZ, Gv, vj, aCt, ff, gC, cr, gl, gu, aTR, Z, jb, bz, Ek, es, Cq, eU, xZ, HN, Rm, be, pK, hE); #c1(OPRM1) c2(NP_001138753) c3(mu-type opioid receptor isoform MOR-1G2) c4(57538, 57539) c5(57540, 57541, 57542, 57543, 57544, 57545, 57546, 57547, 57548) c6( ) c7(oO, T, os, bO, gf, ur, VV, Gb, K, xa, bc, gr, iE, aW, hI, hJ, cm, eM, Gs, cj, sv, abI, aCS, gL, ct, cd, ai, FY, h, IG, aNU, dL, gl, hg, aTX, he, PT, fe, aFx, cM, Jh, hq, ok, at, aqm, IB, jd, cmP, bL, jc, jx, bAp, v, j, eA, Si, aT, cmO, bq, avI, ae, eu, cmN, Y, aPf, cu, en, xw, FT, bN, iQ, qX, VR, cmQ, Dd, ha, jh, Gd, oZ, bS, uu, ad, dP, F, aqk, Jc, hZ, Gv, vj, aCt, ff, gC, cr, gl, gu, aTR, Z, jb, bz, Ek, es, Cq, eU, xZ, HN, Rm, be, pK, hE); #c1(OPRM1) c2(NP_001138754) c3(mu-type opioid receptor isoform MOR-1B1) c4(57549) c5(57550, 57551, 57552, 57553, 57554) c6( ) c7(oO, T, os, bO, gf, ur, VV, Gb, K, xa, bc, gr, iE, aW, hI, hJ, cm, eM, Gs, cj, sv, abI, aCS, gL, ct, cd, ai, FY, h, IG, aNU, dL, gl, hg, aTX, he, PT, fe, aFx, cM, Jh, hq, ok, at, aqm, IB, jd, cmP, bL, jc, jx, bAp, v, j, eA, Si, aT, cmO, bq, avI, ae, eu, cmN, Y, aPf, cu, en, xw, FT, bN, iQ, qX, VR, cmQ, Dd, ha, jh, Gd, oZ, bS, uu, ad, dP, F, aqk, Jc, hZ, Gv, vj, aCt, ff, gC, cr, gl, gu, aTR, Z, jb, bz, Ek, es, Cq, eU, xZ, HN, Rm, be, pK, hE); #c1(OPRM1) c2(NP_001138755) c3(mu-type opioid receptor isoform MOR-1B2) c4(57555) c5(57556, 57557, 57558, 57559, 57560) c6( ) c7(oO, T, os, bO, gf, ur, VV, Gb, K, xa, bc, gr, iE, aW, hI, hJ, cm, eM, Gs, cj, sv, abI, aCS, gL, ct, cd, ai, FY, h, IG, aNU, dL, gl, hg, aTX, he, PT, fe, aFx, cM, Jh, hq, ok, at, aqm, IB, jd, cmP, bL, jc, jx, bAp, v, j, eA, Si, aT, cmO, bq, avI, ae, eu, cmN, Y, aPf, cu, en, xw, FT, bN, iQ, qX, VR, cmQ, Dd, ha, jh, Gd, oZ, bS, uu, ad, dP, F, aqk, Jc, hZ, Gv, vj, aCt, ff, gC, cr, gl, gu, aTR, Z, jb, bz, Ek, es, Cq, eU, xZ, HN, Rm, be, pK, hE); #c1(OPRM1) c2(NP_001138756) c3(mu-type opioid receptor isoform MOR-1B3) c4(57561) c5(57562, 57563, 57564, 57565, 57566, 57567) c6( ) c7(oO, T, os, bO, gf, ur, VV, Gb, K, xa, bc, gr, iE, aW, hI, hJ, cm, eM, Gs, cj, sv, abI, aCS, gL, ct, cd, ai, FY, h, IG, aNU, dL, gl, hg, aTX, he, PT, fe, aFx, cM, Jh, hq, ok, at, aqm, IB, jd, cmP, bL, jc, jx, bAp, v, j, eA, Si, aT, cmO, bq, avI, ae, eu, cmN, Y, aPf, cu, en, xw, FT, bN, iQ, gX, VR, cmQ, Dd, ha, jh, Gd, oZ, bS, uu, ad, dP, F, aqk, Jc, hZ, Gv, vj, aCt, ff, gC, cr, gl, gu, aTR, Z, jb, bz, Ek, es, Cq, eU, xZ, HN, Rm, be, pK, hE); #c1(OPRM1) c2(NP_001138757) c3(mu-type opioid receptor isoform MOR-1B4) c4( ) c5(57568, 57569, 57570, 57571, 57572) c6( ) c7(oO, T, os, bO, gf, ur, VV, Gb, K, xa, bc, gr, iE, aW, hI, hJ, cm, eM, Gs, cj, sv, abI, aCS, gL, ct, cd, ai, FY, h, IG, aNU, dL, gl, hg, aTX, he, PT, fe, aFx, cM, Jh, hq, ok, at, aqm, IB, jd, cmP, bL, jc, jx, bAp, v, j, eA, Si, aT, cmO, bq, avI, ae, eu, cmN, Y, aPf, cu, en, xw, FT, bN, iQ, qX, VR, cmQ, Dd, ha, jh, Gd, oZ, bS, uu, ad, dP, F, aqk, Jc, hZ, Gv, vj, aCt, ff, gC, cr, gl, gu, aTR, Z, jb, bz, Ek, es, Cq, eU, xZ, HN, Rm, be, pK, hE); #c1(OPRM1) c2(NP_001138758) c3(mu-type opioid receptor isoform MOR-1B5) c4(57573) c5(57574, 57575, 57576, 57577, 57578, 57579) c6( ) c7(oO, T, os, bO, gf, ur, VV, Gb, K, xa, bc, gr, iE, aW, hI, hJ, cm, eM, Gs, cj, sv, abI, aCS, gL, ct, cd, ai, FY, h, IG, aNU, dL, gl, hg, aTX, he, PT, fe, aFx, cM, Jh, hq, ok, at, aqm, IB, jd, cmP, bL, jc, jx, bAp, v, j, eA, Si, aT, cmO, bq, avI, ae, eu, cmN, Y, aPf, cu, en, xw, FT, bN, iQ, qX, VR, cmQ, Dd, ha, jh, Gd, oZ, bS, uu, ad, dP, F, aqk, Jc, hZ, Gv, vj, aCt, ff, gC, cr, gl, gu, aTR, Z, jb, bz, Ek, es, Cq, eU, xZ, HN, Rm, be, pK, hE); #c1(OPRM1) c2(NP_001272451) c3(mu-type opioid receptor isoform MOR-1S) c4( ) c5(104062, 104063, 104064, 104065, 104066) c6( ) c7(oO, T, os, bO, gf, ur, VV, Gb, K, xa, bc, gr, iE, aW, hI, hJ, cm, eM, Gs, cj, sv, abI, aCS, gL, ct, cd, ai, FY, h, IG, aNU, dL, gl, hg, aTX, he, PT, fe, aFx, cM, Jh, hg, ok, at, aqm, IB, jd, cmP, bL, jc, jx, bAp, v, j, eA, Si, aT, cmO, bq, avI, ae, eu, cmN, Y, aPf, cu, en, xw, FT, bN, iQ, qX, VR, cmQ, Dd, ha, jh, Gd, oZ, bS, uu, ad, dP, F, aqk, Jc, hZ, Gv, vj, aCt, ff, gC, cr, gl, gu, aTR, Z, jb, bz, Ek, es, Cq, eU, xZ, HN, Rm, be, pK, hE); #c1(OPRM1) c2(NP_001272453) c3(mu-type opioid receptor isoform MOR-1S) c4(104067, 104068, 104069, 104070, 104071, 104072) c5(104073, 104074, 104075, 104076, 104077, 104078, 104079, 104080, 104081, 104082, 104083, 104084, 104085, 104086, 104087, 104088, 104089, 104090, 104091, 104092) c6( ) c7(oO, T, os, bO, gf, ur, VV, Gb, K, xa, bc, gr, iE, aW, hI, hJ, cm, eM, Gs, cj, sv, abI, aCS, gL, ct, cd, ai, FY, h, IG, aNU, dL, gl, hg, aTX, he, PT, fe, aFx, cM, Jh, hq, ok, at, aqm, IB, jd, cmP, bL, jc, jx, bAp, v, j, eA, Si, aT, cmO, bq, avI, ae, eu, cmN, Y, aPf, cu, en, xw, FT, bN, iQ, qX, VR, cmQ, Dd, ha, jh, Gd, oZ, bS, uu, ad, dP, F, aqk, Jc, hZ, Gv, vj, aCt, ff, gC, cr, gl, gu, aTR, Z, jb, bz, Ek, es, Cq, eU, xZ, HN, Rm, be, pK, hE); #c1(OPTC) c2(XP_011507708) c3(opticin isoform X1) c4(297717, 297718) c5(297719, 297720, 297721, 297722, 297723, 297724, 297725, 297726, 297727, 297728, 297729, 297730, 297731, 297732, 297733, 297734) c6(297735, 297736, 297737, 297738) c7(HQ, Ew, W, pZ, dH, Be, cz); #c1(OPTN) c2(NP_001008214) c3(optineurin) c4(22869) c5(22870, 22871, 22872, 22873, 22874, 22875, 22876, 22877, 22878, 22879, 22880, 22881, 22882, 22883, 22884, 22885, 22886, 22887, 22888, 22889) c6( ) c7(cmC, HQ, cZ, T, zt, bbH, Vd, PJ, ad, zw, WY, cmS, aT, bdM, dL, vd, K, HR, dd, ae, eL, d, IR, dH, aW, wF, aiT, dw, cm, D, c, pZ, dB, Kv, U, EY, bi, oQ, IJ, cmR); #c1(OPTN) c2(XP_005252394) c3(optineurin isoform X1) c4(271690) c5(271691, 271692, 271693, 271694, 271695, 271696, 271697, 271698, 271699, 271700) c6( ) c7(cmC, HQ, cZ, T, zt, bbH, Vd, PJ, ad, zw, WY, cmS, aT, bdM, dL, vd, K, HR, dd, ae, eL, d, IR, dH, aW, wF, aiT, dw, cm, D, c, pZ, dB, Kv, U, EY, bi, oQ, IJ, cmR); #c1(OPTN) c2(XP_005252395) c3(optineurin isoform X2) c4(271701, 271702) c5(271703, 271704, 271705, 271706, 271707, 271708, 271709, 271710, 271711, 271712, 271713) c6( ) c7(cmC, HQ, cZ, T, zt, bbH, Vd, PJ, ad, zw, WY, cmS, aT, bdM, dL, vd, K, HR, dd, ae, eL, d, IR, dH, aW, wF, aiT, dw, cm, D, c, pZ, dB, Kv, U, EY, bi, oQ, IJ, cmR); #c1(OR1OA2) c2(NP_001004460) c3(olfactory receptor 1OA2) c4(20745) c5(20746, 20747, 20748, 20749, 20750, 20751) c6( ) c7(cmT); #c1(OR1OA4) c2(NP_997069) c3(olfactory receptor 1OA4) c4(265019) c5(265020, 265021, 265022, 265023, 265024, 265025) c6( ) c7(bL, T, dD, eR, ea, e, aw, bO, aA, cz, n, cQ, aj, j, v, eq, aY, J, aE, ds, M, aT, oW, yu, dV, JK, bK, K, wb, h, uX, Nr, A, cW, aW, az, po, aF, hp, iV, qa, Nq, BU, mg, agf, cS, dy, If); #c1(OR1OC1) c2(NP_039229) c3(olfactory receptor 1OC1) c4(176836, 176837, 176838, 176839, 176840, 176841, 176842) c5(176843, 176844, 176845, 176846, 176847, 176848, 176849, 176850, 176851, 176852, 176853, 176854, 176855, 176856, 176857, 176858, 176859, 176860, 176861, 176862, 176863, 176864, 176865, 176866, 176867, 176868, 176869, 176870, 176871, 176872, 176873, 176874, 176875, 176876, 176877, 176878, 176879, 176880, 176881, 176882, 176883, 176884, 176885, 176886, 176887, 176888, 176889, 176890, 176891, 176892, 176893, 176894, 176895, 176896, 176897, 176898, 176899, 176900, 176901, 176902, 176903, 176904, 176905, 176906, 176907, 176908) c6( ) c7(v, qQ, mg, cz); #c1(OR1OJ1) c2(NP_036483) c3(olfactory receptor 1OJ1) c4(174162) c5(174163, 174164, 174165, 174166, 174167, 174168) c6( ) c7(e, pN); #c1(OR1OJ3) c2(NP_001004467) c3(olfactory receptor 1OJ3) c4(20752) c5(20753, 20754, 20755, 20756, 20757, 20758) c6( ) c7(bL, T, A, aW, if, e, eZ, aT, eb, aj, v, qN, J); #c1(OR1OJ5) c2(NP_001004469) c3(olfactory receptor 1OJ5) c4(20759) c5(20760, 20761, 20762, 20763, 20764, 20765) c6( ) c7(bL, aZ, bO, Nt, cz, aj, ai, q, wD, J, ad, ad, aIX, ae, aW, eZ, r, iV, wA, bAd, mg, ei, y); #c1(OR1OK1) c2(NP_001004473) c3(olfactory receptor 1OK1) c4(20783) c5(20784, 20785, 20786, 20787, 20788, 20789) c6( ) c7(bL, bM, T, dD, pf, ea, if, aw, aA, cz, bB, aj, j, eq, qN, ase, q, J, ad, dP, cF, I, bae, bNN, u, dV, aT, h, ae, s, aW, ff, eH, eZ, r, fe, aF, en, g, eF, bz, bE, cmU, bTe, mg, adg, y); #c1(OR1OK2) c2(NP_001004476) c3(olfactory receptor 1OK2) c4(20804) c5(20805, 20806, 20807, 20808, 20809, 20810) c6( ) c7(cT, mR, IX, aJt, WY, aW, aq, hB, atj, bJL, aT, cz, eb, io, aw, cr, jh, aFV, eE); #c1(OR1OR2) c2(NP_001004472) c3(olfactory receptor 1OR2) c4(20776) c5(20777, 20778, 20779, 20780, 20781, 20782) c6( ) c7(bM, T, mr, aw, jh, cz, aj, cmV, Uy, J, hX, aT, vO, aW, Y, az, eZ, iV, eE, bz, Dy, ac, wx, R, y, ra, B); #c1(OR1OT2) c2(NP_001004475) c3(olfactory receptor 1OT2) c4(20790, 20791) c5(20792, 20793, 20794, 20795, 20796, 20797, 20798, 20799, 20800, 20801, 20802, 20803) c6( ) c7(T, ajy, cF, A, cA, bE, aW, awN, NT, eZ, aT, bB, fe, j, fu, R, iV, eE, aYs, bA); #c1(OR1OX1) c2(NP_001004477) c3(olfactory receptor 1OX1) c4(20811) c5(20812, 20813, 20814, 20815, 20816, 20817, 20818, 20819, 20820, 20821, 20822) c6( ) c7(bL, bM, ahf, e, aw, cz, aj, fK, J, aE, aT, aOh, je, aW, Y, cr, eZ, fe, t, bz, pb, iM, ac, Jr, vy, m, y); #c1(OR1OZ1) c2(NP_001004478) c3(olfactory receptor 1OZ1) c4(20823) c5(20824, 20825, 20826, 20827, 20828, 20829) c6( ) c7(bL, T, iV, no, cF, ig, aW, Y, aT, fe, dG, dL, v, uE, ei, y, iK, eL, pb); #c1(OR11A1) c2(NP_039225) c3(olfactory receptor 11A1) c4(176748, 176749) c5(176750, 176751, 176752, 176753, 176754, 176755, 176756, 176757, 176758, 176759, 176760, 176761, 176762, 176763, 176764, 176765, 176766, 176767, 176768, 176769, 176770, 176771, 176772, 176773, 176774, 176775, 176776, 176777, 176778, 176779, 176780, 176781, 176782, 176783, 176784, 176785, 176786, 176787, 176788, 176789, 176790, 176791, 176792, 176793, 176794, 176795, 176796, 176797, 176798, 176799, 176800, 176801, 176802, 176803, 176804, 176805, 176806, 176807, 176808, 176809, 176810, 176811, 176812, 176813, 176814, 176815, 176816, 176817, 176818, 176819, 176820, 176821, 176822, 176823, 176824, 176825, 176826, 176827, 176828, 176829, 176830, 176831, 176832, 176833, 176834, 176835) c6( ) c7(eZ); #c1(OR12D2) c2(NP_039224) c3(olfactory receptor 12D2) c4(176714, 176715, 176716, 176717) c5(176718, 176719, 176720, 176721, 176722, 176723, 176724, 176725, 176726, 176727, 176728, 176729, 176730, 176731, 176732, 176733, 176734, 176735, 176736, 176737, 176738, 176739, 176740, 176741, 176742, 176743, 176744, 176745, 176746, 176747) c6( ) c7(eZ); #c1(OR12D3) c2(NP_112221) c3(olfactory receptor 12D3) c4(220897, 220898) c5(220899, 220900, 220901, 220902, 220903, 220904, 220905, 220906, 220907, 220908, 220909, 220910, 220911, 220912, 220913, 220914, 220915, 220916, 220917, 220918, 220919, 220920, 220921, 220922, 220923, 220924, 220925, 220926, 220927, 220928, 220929, 220930, 220931, 220932, 220933, 220934, 220935, 220936, 220937, 220938, 220939, 220940, 220941, 220942, 220943, 220944, 220945, 220946, 220947, 220948, 220949) c6( ) c7(h, V, eZ); #c1(OR13C3) c2(NP_001001961) c3(olfactory receptor 13C3) c4(19216) c5(19217, 19218, 19219, 19220, 19221, 19222) c6( ) c7(aw, lb); #c1(OR13C4) c2(NP_001001919) c3(olfactory receptor 13C4) c4(19156, 19157) c5(19158, 19159, 19160, 19161, 19162, 19163, 19164, 19165, 19166, 19167, 19168, 19169) c6( ) c7(aC); #c1(OR13F1) c2(NP_001004485) c3(olfactory receptor 13F1) c4(20830) c5(20831, 20832, 20833, 20834, 20835, 20836) c6( ) c7(pu); #c1(OR13G1) c2(NP_001005487) c3(olfactory receptor 13G1) c4(21748) c5(21749, 21750, 21751, 21752, 21753, 21754) c6( ) c7(ID, bM, if, e, aw, NT, aA, uu, j, qN, ec, aT, eu, ly, mR, IR, aW, aF, pb, lx, ac, Ji, ei, ra); #c1(OR13J1) c2(NP_001004487) c3(olfactory receptor 13J1) c4(20837) c5(20838, 20839, 20840, 20841, 20842, 20843) c6( ) c7(BU); #c1(OR14J1) c2(NP_112208) c3(olfactory receptor 14J1) c4(220818, 220819) c5(220820, 220821, 220822, 220823, 220824, 220825, 220826, 220827, 220828, 220829, 220830, 220831, 220832, 220833, 220834, 220835, 220836, 220837, 220838, 220839, 220840, 220841, 220842, 220843, 220844, 220845, 220846, 220847) c6( ) c7(A, eZ); #c1(OR1A1) c2(NP_055380) c3(olfactory receptor 1A1) c4(180687) c5(180688, 180689, 180690, 180691, 180692, 180693) c6( ) c7(aue); #c1(OR1C1) c2(NP_036485) c3(olfactory receptor 1G1) c4(174169) c5(174170, 174171, 174172, 174173, 174174, 174175) c6( ) c7(aE, ig, aW, WY, Y, aw, NT, eZ, aT, uu, ei, y, ae, B, ad); #c1(OR1D2) c2(NP_002539) c3(olfactory receptor 1D2) c4(129642) c5(129643, 129644, 129645, 129646, 129647, 129648) c6( ) c7(ci); #c1(OR1E1) c2(NP_003544) c3(olfactory receptor 1E1) c4(138995) c5(138996, 138997, 138998, 138999, 139000, 139001) c6( ) c7(Kw); #c1(OR1E2) c2(NP_003545) c3(olfactory receptor 1E2) c4(139002, 139003) c5(139004, 139005, 139006, 139007, 139008, 139009, 139010, 139011, 139012, 139013, 139014, 139015) c6( ) c7(oe); #c1(OR1J2) c2(NP_473448) c3(olfactory receptor 1J2) c4(230525, 230526) c5(230527, 230528, 230529, 230530, 230531, 230532, 230533, 230534, 230535, 230536, 230537, 230538) c6( ) c7(cmW); #c1(OR1K1) c2(NP_543135) c3(olfactory receptor 1K1) c4(233341) c5(233342, 233343, 233344, 233345, 233346, 233347) c6( ) c7(Na, Nc); #c1(OR1L8) c2(NP_001004454) c3(olfactory receptor 1L8) c4(20717) c5(20718, 20719, 20720, 20721, 20722, 20723) c6( ) c7(ac); #c1(OR1M1) c2(NP_001004456) c3(olfactory receptor 1M1) c4(20724, 20725) c5(20726, 20727, 20728, 20729, 20730, 20731, 20732, 20733, 20734, 20735, 20736, 20737) c6( ) c7(y); #c1(OR1N1) c2(NP_036495) c3(olfactory receptor 1N1) c4(174176) c5(174177, 174178, 174179, 174180, 174181, 174182) c6( ) c7(bL, T, aW, e, aw, ff, vy, aT, cz, eZ, aj, mf, en, iV, f, B, J, hm); #c1(OR1N2) c2(NP_001004457) c3(olfactory receptor 1N2) c4(20738) c5(20739, 20740, 20741, 20742, 20743, 20744) c6( ) c7(Na, Nc); #c1(OR2A25) c2(NP_001004488) c3(olfactory receptor 2A25) c4(20844) c5(20845, 20846, 20847, 20848, 20849, 20850) c6( ) c7(aw, eu, e, j, ac); #c1(OR2AG1) c2(NP_001004489) c3(olfactory receptor 2AG1) c4(20851) c5(20852, 20853, 20854, 20855, 20856, 20857) c6( ) c7(bL, T, if, bS, ct, qN, ai, aR, Ig, iX, XY, aqI, rE, he, bA, hZ, xi, Y, azP, cr, eZ, Z, FT, hq, ua, QT, y, ra, qc); #c1(OR2AK2) c2(NP_001004491) c3(olfactory receptor 2AK2) c4(20858) c5(20859, 20860, 20861, 20862, 20863, 20864) c6( ) c7(bL, bM, ID, eR, al, cz, aj, j, aY, J, M, cmX, ly, s, dH, eZ, Mz, pb, lx, gk, ac, vy, dy, y, B); #c1(OR2AT4) c2(NP_001005285) c3(olfactory receptor 2AT4) c4(21308) c5(21309, 21310, 21311, 21312, 21313, 21314) c6( ) c7(fe); #c1(OR2B2) c2(NP_149046) c3(olfactory receptor 2B2) c4(226911) c5(226912, 226913, 226914, 226915, 226916, 226917) c6( ) c7(wA, iM, avP, wG, je, acz, tT, cr, aFr, v, PL, ai); #c1(OR2B3) c2(NP_001005226) c3(putative olfactory receptor 2B3) c4(21208) c5(21209, 21210, 21211, 21212, 21213, 21214, 21215, 21216, 21217, 21218, 21219, 21220, 21221, 21222, 21223, 21224, 21225, 21226, 21227, 21228, 21229, 21230, 21231, 21232, 21233, 21234, 21235, 21236) c6( ) c7(aj, eZ, cr); #c1(OR2BG) c2(NP_036499) c3(olfactory receptor 2B6) c4(174183) c5(174184, 174185, 174186, 174187, 174188, 174189) c6( ) c7(v, mg, qQ, C, cz); #c1(OR2C1) c2(NP_036500) c3(olfactory receptor 2C1) c4(174190) c5(174191, 174192, 174193, 174194, 174195, 174196) c6( ) c7(oe); #c1(OR2F2) c2(NP_001004685) c3(olfactory receptor 2F2) c4(20865) c5(20866, 20867, 20868, 20869, 20870, 20871) c6( ) c7(fe, abW, j, SV, iV); #c1(OR2G2) c2(NP_001001915) c3(olfactory receptor 2G2) c4(19149) c5(19150, 19151, 19152, 19153, 19154, 19155) c6( ) c7(bL, T, Bv, B, bf, iV, hl, NT, r, sM, dL, j, pb, bt, eL, q, hq); #c1(OR2G3) c2(NP_001001914) c3(olfactory receptor 2G3) c4(19142) c5(19143, 19144, 19145, 19146, 19147, 19148) c6( ) c7(bM, e, al, aj, gf, j, ase, ai, J, ad, wD, WY, aT, ae, RT, ND, aW, Y, pb, hq, gk, Jr, y, B); #c1(OR2H2) c2(NP_009091) c3(olfactory receptor 2H2) c4(170625, 170626, 170627) c5(170628, 170629, 170630, 170631, 170632, 170633, 170634, 170635, 170636, 170637, 170638, 170639, 170640, 170641, 170642, 170643, 170644, 170645, 170646, 170647, 170648, 170649, 170650, 170651, 170652, 170653, 170654, 170655, 170656, 170657) c6( ) c7(jy, V, eZ); #c1(OR2J2) c2(NP_112167) c3(olfactory receptor 2J2) c4(220551, 220552, 220553, 220554, 220555) c5(220556, 220557, 220558, 220559, 220560, 220561, 220562, 220563, 220564, 220565, 220566, 220567, 220568, 220569, 220570, 220571, 220572, 220573, 220574, 220575, 220576, 220577, 220578, 220579, 220580, 220581, 220582, 220583, 220584, 220585, 220586, 220587, 220588, 220589, 220590, 220591, 220592, 220593, 220594, 220595, 220596, 220597, 220598, 220599, 220600, 220601) c6( ) c7(T, wA, eZ, j, ci, PL, eA, hm); #c1(OR2J3) c2(NP_001005216) c3(olfactory receptor 2J3) c4(21162, 21163, 21164) c5(21165, 21166, 21167, 21168, 21169, 21170, 21171, 21172, 21173, 21174, 21175, 21176, 21177, 21178, 21179, 21180, 21181, 21182, 21183, 21184, 21185, 21186, 21187, 21188, 21189, 21190, 21191, 21192, 21193, 21194, 21195, 21196, 21197) c6( ) c7(aW, cmY, eZ, aT); #c1(OR2L2) c2(NP_001004686) c3(olfactory receptor 2L2) c4(20872, 20873) c5(20874, 20875, 20876, 20877, 20878, 20879) c6( ) c7(bL, OW, eR, aW, M, aT, mg, fe, aj, j, qj, iV, aY, J, pC); #c1(OR2M3) c2(NP_001004689) c3(olfactory receptor 2M3) c4(20880) c5(20881, 20882, 20883, 20884, 20885, 20886) c6( ) c7(mR, az, aA, cmZ, aF, hp, iV, y, Pr, fK); #c1(OR2M4) c2(NP_059974) c3(olfactory receptor 2M4) c4(193423) c5(193424, 193425, 193426, 193427, 193428, 193429) c6( ) c7(T, ac, dH, Y, aw, mg, cz, fe, mf, PT); #c1(OR2M7) c2(NP_001004691) c3(olfactory receptor 2M7) c4(20887) c5(20888, 20889, 20890, 20891, 20892, 20893) c6( ) c7(kT, aW, aLJ, aT, v, i); #c1(OR2S2) c2(NP_063950) c3(olfactory receptor 2S2) c4(202408) c5(202409, 202410, 202411, 202412, 202413, 202414) c6( ) c7(cF); #c1(OR2T1) c2(NP_112166) c3(olfactory receptor 2T1) c4(220544) c5(220545, 220546, 220547, 220548, 220549, 220550) c6( ) c7(bL, T, aW, eZ, aT, eb, aj, J); #c1(OR2T10) c2(NP_001004693) c3(olfactory receptor 2T10) c4(20901) c5(20902, 20903, 20904, 20905, 20906, 20907) c6( ) c7(bL, 1 Bv, wD, cC, mx, Ir, eZ, mf, j, aF, nA, uE, ZN, bz, pb, aoO); #c1(OR2T12) c2(NP_001004692) c3(olfactory receptor 2T12) c4(20894) c5(20895, 20896, 20897, 20898, 20899, 20900) c6( ) c7(dP, x, s, aW, bW, eZ, r, aT, aA, cz, aF, j, k, ei, Qo, ZN, q, y); #c1(OR2T2) c2(NP_001004136) c3(olfactory receptor 2T2) c4( ) c5(20472, 20473, 20474, 20475, 20476) c6( ) c7(bL, bM, ac, eR, iW, eX, eZ, aA, Nt, aIX, cz, aF, j, eV, aY, pb, qa); #c1(OR2T2) c2(XP_011545643) c3(olfactory receptor 2T2 isoform X1) c4(344582) c5(344583) c6( ) c7(bL, bM, ac, eR, iW, eX, eZ, aA, Nt, aIX, cz, aF, j, eV, aY, pb, qa); #c1(OR2T33) c2(NP_001004695) c3(olfactory receptor 2T33) c4(20908) c5(20909, 20910, 20911, 20912, 20913, 20914) c6( ) c7(bL, bM, ac, aiK, ig, aZ, if, iR, cr, aA, eZ, aq, fo, aF, fe, ei, qN, pL, y, B); #c1(OR2T4) c2(NP_001004696) c3(olfactory receptor 2T4) c4(20915) c5(20916, 20917, 20918, 20919, 20920, 20921) c6( ) c7(bL, aDs, bE, NT, eZ, bB, dy); #c1(OR2T5) c2(NP_001004697) c3(olfactory receptor 2T5) c4(20922) c5(20923, 20924, 20925, 20926, 20927, 20928) c6( ) c7(aw, ha, eZ, aA, bS, aF, ct, Z, he, y); #c1(OR2W1) c2(NP_112165) c3(olfactory receptor 2W1) c4(220516) c5(220517, 220518, 220519, 220520, 220521, 220522, 220523, 220524, 220525, 220526, 220527, 220528, 220529, 220530, 220531, 220532, 220533, 220534, 220535, 220536, 220537, 220538, 220539, 220540, 220541, 220542, 220543) c6( ) c7(eZ); #c1(OR2Y1) c2(NP_001001657) c3(olfactory receptor 2Y1) c4(18926) c5(18927, 18928, 18929, 18930, 18931, 18932) c6( ) c7(Gb, oW, aFr, m, ra, t, Pr); #c1(OR2Z1) c2(NP_001004699) c3(olfactory receptor 2Z1) c4(20929) c5(20930, 20931, 20932, 20933, 20934, 20935) c6( ) c7(gk, al); #c1(OR3A1) c2(NP_002541) c3(olfactory receptor 3A1) c4( ) c5(129649, 129650, 129651, 129652, 129653, 129654) c6( ) c7(al, cz, sM, ci, q, aR, aOu, sO, aT, cy, dF, A, s, cH, aW, hI, r, aUP, t, gk, wE, vL, m, y, cE); #c1(OR3A1) c2(XP_011522196) c3(olfactory receptor 3A1 isoform X1) c4(316825) c5( ) c6( ) c7(al, cz, sM, ci, q, aR, aOu, sO, aT, cy, dF, A, s, cH, aW, hI, r, aUP, t, gk, wE, vL, m, y, cE); #c1(OR4A15) c2(NP_001005275) c3(olfactory receptor 4A15) c4(21273) c5(21274, 21275, 21276, 21277, 21278, 21279) c6( ) c7(eZ); #c1(OR4C12) c2(NP_001005270) c3(olfactory receptor 4C12) c4(21252) c5(21253, 21254, 21255, 21256, 21257, 21258) c6( ) c7(MU); #c1(OR4C13) c2(NP_001001955) c3(olfactory receptor 4C13) c4(19209) c5(19210, 19211, 19212, 19213, 19214, 19215) c6( ) c7(fr); #c1(OR4C6) c2(NP_001004704) c3(olfactory receptor 4C6) c4(20936, 20937) c5(20938, 20939, 20940, 20941, 20942, 20943, 20944, 20945, 20946, 20947, 20948, 20949) c6( ) c7(v); #c1(OR4D10) c2(NP_001004705) c3(olfactory receptor 4D10) c4(20950) c5(20951, 20952, 20953, 20954, 20955, 20956) c6( ) c7(bA); #c1(OR4K13) c2(NP_001004714) c3(olfactory receptor 4K13) c4(20957) c5(20958, 20959, 20960, 20961, 20962, 20963) c6( ) c7(bM); #c1(OR4P4) c2(NP_001004124) c3(olfactory receptor 4P4) c4(20434) c5(20435, 20436, 20437, 20438, 20439, 20440) c6( ) c7(v); #c1(OR4S2) c2(NP_001004059) c3(olfactory receptor 4S2) c4(20408) c5(20409, 20410, 20411, 20412, 20413, 20414) c6( ) c7(v); #c1(OR51A2) c2(NP_001004748) c3(olfactory receptor 51A2) c4(20987) c5(20988, 20989, 20990, 20991, 20992, 20993) c6( ) c7(fq); #c1(OR51A7) c2(NP_001004749) c3(olfactory receptor 51A7) c4(20994, 20995, 20996) c5(20997, 20998, 20999, 21000, 21001, 21002, 21003, 21004, 21005, 21006, 21007, 21008, 21009, 21010, 21011, 21012, 21013, 21014) c6( ) c7(j); #c1(OR51E1) c2(NP_689643) c3(olfactory receptor 51E1) c4(243404) c5(243405, 243406, 243407, 243408, 243409, 243410) c6( ) c7(ae, IB, oe, nG, ad); #c1(OR51E2) c2(NP_110401) c3(olfactory receptor 51E2) c4(220052, 220053) c5(220054, 220055, 220056, 220057, 220058, 220059, 220060, 220061, 220062, 220063, 220064, 220065) c6( ) c7(ae, ad); #c1(OR51F2) c2(NP_001004753) c3(olfactory receptor 51F2) c4(21015, 21016, 21017) c5(21018, 21019, 21020, 21021, 21022, 21023, 21024, 21025, 21026, 21027, 21028, 21029, 21030, 21031, 21032, 21033, 21034, 21035) c6( ) c7(Ea); #c1(OR51V1) c2(NP_001004760) c3(olfactory receptor 51V1) c4(21036) c5(21037, 21038, 21039, 21040, 21041, 21042) c6( ) c7(dV); #c1(OR52B2) c2(NP_001004052) c3(olfactory receptor 52B2) c4(20380, 20381) c5(20382, 20383, 20384, 20385, 20386, 20387, 20388, 20389, 20390, 20391, 20392, 20393) c6( ) c7(aC); #c1(OR52B4) c2(NP_001005161) c3(olfactory receptor 52B4) c4(21043) c5(21044, 21045, 21046, 21047, 21048, 21049) c6( ) c7(cF); #c1(OR52D1) c2(NP_001005163) c3(olfactory receptor 52D1) c4(21050) c5(21051, 21052, 21053, 21054, 21055, 21056) c6( ) c7(cF); #c1(OR52E6) c2(NP_001005167) c3(olfactory receptor 52E6) c4(21057, 21058) c5(21059, 21060, 21061, 21062, 21063, 21064, 21065, 21066, 21067, 21068, 21069, 21070) c6( ) c7(cF); #c1(OR5211) c2(NP_001005169) c3(olfactory receptor 5211) c4(21071, 21072) c5(21073, 21074, 21075, 21076, 21077, 21078, 21079, 21080, 21081, 21082, 21083, 21084) c6( ) c7(bL); #c1(OR5212) c2(NP_001005170) c3(olfactory receptor 5212) c4(21085) c5(21086, 21087, 21088, 21089, 21090, 21091) c6( ) c7(bvS, aF, dl, aA); #c1(OR52K1) c2(NP_001005171) c3(olfactory receptor 52K1) c4(21092) c5(21093, 21094, 21095, 21096, 21097, 21098) c6( ) c7(gV, j, eZ, azW, hG); #c1(OR52K2) c2(NP_001005172) c3(olfactory receptor 52K2) c4(21099) c5(21100, 21101, 21102, 21103, 21104, 21105) c6( ) c7(y, cL, qW, o); #c1(OR52M1) c2(NP_001004137) c3(olfactory receptor 52M1) c4(20477) c5(20478, 20479, 20480, 20481, 20482, 20483) c6( ) c7(s); #c1(OR5D18) c2(NP_001001952) c3(olfactory receptor 5D18) c4(19200) c5(19201, 19202, 19203, 19204, 19205, 19206, 19207, 19208) c6( ) c7(aw); #c1(OR5H2) c2(NP_001005482) c3(olfactory receptor 5H2) c4(21741) c5(21742, 21743, 21744, 21745, 21746, 21747) c6( ) c7(bc); #c1(OR5H6) c2(NP_001005479) c3(olfactory receptor 5H6) c4(21734) c5(21735, 21736, 21737, 21738, 21739, 21740) c6( ) c7(aW, ds, LZ, aT, v, ra); #c1(OR5K1) c2(NP_001004736) c3(olfactory receptor 5K1) c4(20973) c5(20974, 20975, 20976, 20977, 20978, 20979) c6( ) c7(T, pu, AL, dN, cL, cna, dy, kU, o); #c1(OR5K2) c2(NP_001004737) c3(olfactory receptor 5K2) c4(20980) c5(20981, 20982, 20983, 20984, 20985, 20986) c6( ) c7(bM, xN, Bv, cT, IX, Ih, cz, v, tr, kU, y, wD); #c1(OR5V1) c2(NP_110503) c3(olfactory receptor 5V1) c4(220453) c5(220454, 220455, 220456, 220457, 220458, 220459, 220460, 220461, 220462, 220463, 220464, 220465, 220466, 220467, 220468, 220469, 220470, 220471, 220472, 220473, 220474, 220475, 220476, 220477, 220478, 220479, 220480, 220481, 220482, 220483, 220484, 220485, 220486, 220487, 220488, 220489, 220490, 220491) c6( ) c7(h, eZ); #c1(OR5V1) c2(XP_011546413) c3(olfactory receptor 5V1 isoform X1) c4(345170) c5(345171, 345172, 345173, 345174, 345175, 345176, 345177, 345178, 345179, 345180) c6( ) c7(h, eZ); #c1(OR5V1) c2(XP_011546799) c3(olfactory receptor 5V1 isoform X1) c4(345685) c5(345686, 345687, 345688, 345689, 345690, 345691, 345692, 345693, 345694, 345695, 345696, 345697, 345698, 345699) c6( ) c7(h, eZ); #c1(OR6B1) c2(NP_001005281) c3(olfactory receptor 6B1) c4(21294) c5(21295, 21296, 21297, 21298, 21299, 21300) c6( ) c7(oO, I, A, u, pf, al, fd, bS, ct, IS, Z, cnb); #c1(OR6B2) c2(NP_001005853) c3(olfactory receptor 682) c4(22123) c5(22124, 22125, 22126, 22127, 22128) c6( ) c7(bM, T, ahf, mr, if, ht, al, aj, qN, q, J, dV, aT, hu, kU, db, aa, s, amy, aW, Ih, ff, r, fe, Is, vs, en, g, eE, wA, bz, gk, ac, lp, aq, cmU, Be, ra, B); #c1(OR6B2) c2(XP_005247061) c3(olfactory receptor 682 isoform X1) c4( ) c5(267636) c6( ) c7(bM, T, ahf, mr, if, ht, al, aj, qN, g, J, dV, aT, hu, kU, db, aa, s, amy, aW, Ih, ff, r, fe, Is, vs, en, g, eE, wA, bz, gk, ac, Ip, aq, cmU, Be, ra, B); #c1(OR6C1) c2(NP_001005182) c3(olfactory receptor 6C1) c4(21113) c5(21114, 21115, 21116, 21117, 21118, 21119) c6( ) c7(cF); #c1(OR6F1) c2(NP_001005286) c3(olfactory receptor 6F1) c4(21315) c5(21316, 21317, 21318, 21319, 21320, 21321) c6( ) c7(bL, ID, xN, aZ, if, eh, bB, aj, j, qj, qN, aY, q, J, aT, ly, mR, s, aW, r, iV, pb, lx, bE, dy, ei, y, bLi, pC); #c1(OR6K2) c2(NP_001005279) c3(olfactory receptor 6K2) c4(21287) c5(21288, 21289, 21290, 21291, 21292, 21293) c6( ) c7(bL, T, ac, s, aW, wE, aw, aT, sM, hD, vs, aS, j, y, bz); #c1(OR6K3) c2(NP_001005327) c3(olfactory receptor 6K3) c4(21338, 21339) c5(21340, 21341, 21342, 21343, 21344, 21345, 21346, 21347, 21348, 21349, 21350, 21351) c6( ) c7(iV, ahf, ac, aW, if, M, r, aT, fK, cz, mg, aj, hD, qN, pb, fe, y, bz, q, J, wD); #c1(OR6K6) c2(NP_001005184) c3(olfactory receptor 6K6) c4(21120) c5(21121, 21122, 21123, 21124, 21125, 21126) c6( ) c7(kT, T, wv, wD, HJ, ig, QU, aoO, eZ, fe, aj, v, aF, iV, y, bz, J, hm); #c1(OR6N1) c2(NP_001005185) c3(olfactory receptor 6N1) c4(21127) c5(21128, 21129, 21130, 21131, 21132, 21133) c6( ) c7(bL, c, aW, aT, aj, v, ei, y, J, us); #c1(OR6N2) c2(NP_001005278) c3(olfactory receptor 6N2) c4(21280) c5(21281, 21282, 21283, 21284, 21285, 21286) c6( ) c7(bL, aW, ag, ajd, aT, gf, y, pb, hq); #c1(OR6X1) c2(NP_001005188) c3(olfactory receptor 6X1) c4(21134) c5(21135, 21136, 21137, 21138, 21139, 21140) c6( ) c7(ac); #c1(OR6Y1) c2(NP_001005189) c3(olfactory receptor 6Y1) c4(21141) c5(21142, 21143, 21144, 21145, 21146, 21147) c6( ) c7(bL, kT, y, aW, aT, aj, bS, bK, m, ct, j, Z, t, pb, J); #c1(OR7C1) c2(NP_945182) c3(olfactory receptor 7C1) c4( ) c5(260699, 260700, 260701, 260702, 260703) c6( ) c7(y); #c1(OR7C1) c2(XP_011526217) c3(olfactory receptor 7C1 isoform X2) c4(320478) c5(320479) c6( ) c7(y); #c1(OR7D2) c2(NP_787079) c3(olfactory receptor 7D2) c4(252083) c5(252084, 252085, 252086, 252087, 252088, 252089) c6( ) c7(gk, al); #c1(OR7E24) c2(NP_001073404) c3(olfactory receptor 7E24) c4(35998) c5(35999, 36000, 36001, 36002, 36003, 36004) c6( ) c7(cd, cz); #c1(OR8S1) c2(NP_001005203) c3(olfactory receptor 8S1) c4(21148) c5(21149, 21150, 21151, 21152, 21153, 21154) c6( ) c7(cF); #c1(OR9K2) c2(NP_001005243) c3(olfactory receptor 9K2) c4(21245) c5(21246, 21247, 21248, 21249, 21250, 21251) c6( ) c7(bM, cT, s); #c1(OR9Q2) c2(NP_001005283) c3(olfactory receptor 9Q2) c4(21301) c5(21302, 21303, 21304, 21305, 21306, 21307) c6( ) c7(EQ); #c1(ORA11) c2(NP_116179) c3(calcium release-activated calcium channel protein 1) c4(225621) c5(225622, 225623, 225624, 225625, 225626, 225627) c6( ) c7(T, hl, dA, cz, n, ad, bjv, aT, h, ae, d, mR, aW, Y, oV, xs, Io, cnc, eE, aVc, cnd, im, If); #c1(ORA13) c2(NP_689501) c3(protein orai-3) c4(242947, 242948) c5(242949, 242950, 242951, 242952, 242953, 242954, 242955, 242956, 242957, 242958, 242959, 242960) c6( ) c7(T, eM, aW, aT, ae, iu, ad); #c1(ORAOV1) c2(NP_703152) c3(oral cancer-overexpressed protein 1) c4(246051, 246052) c5(246053, 246054, 246055, 246056, 246057, 246058, 246059, 246060, 246061, 246062, 246063, 246064, 246065, 246066, 246067, 246068) c6( ) c7(T, if, ff, K, qN, en); #c1(ORAOV1) c2(XP_011543148) c3(oral cancer-overexpressed protein 1 isoform X3) c4(341971) c5(341972, 341973, 341974, 341975, 341976, 341977) c6( ) c7(T, if, ff, K, qN, en); #c1(ORC2) c2(NP_006181) c3(origin recognition complex subunit 2) c4(162637, 162638) c5(162639, 162640, 162641, 162642, 162643, 162644, 162645, 162646, 162647, 162648, 162649, 162650, 162651, 162652, 162653, 162654, 162655, 162656) c6( ) c7(py); #c1(ORC2) c2(XP_011509556) c3(origin recognition complex subunit 2 isoform X2) c4(300135) c5( ) c6( ) c7(py); #c1(ORC3) c2(NP_001184188) c3(origin recognition complex subunit 3 isoform 3) c4( ) c5(75552, 75553, 75554, 75555, 75556) c6( ) c7(d, aaU, z, cj, h, ae, eW, ad); #c1(ORC3) c2(NP_036513) c3(origin recognition complex subunit 3 isoform 2) c4(174197, 174198) c5(174199, 174200, 174201, 174202, 174203, 174204, 174205) c6( ) c7(d, aaU, z, cj, h, ae, eW, ad); #c1(ORC3) c2(NP_862820) c3(origin recognition complex subunit 3 isoform 1) c4(255749) c5(255750, 255751, 255752, 255753, 255754, 255755, 255756) c6( ) c7(d, aaU, z, cj, h, ae, eW, ad); #c1(ORC3) c2(XP_005248763) c3(origin recognition complex subunit 3 isoform X3) c4(268561) c5( ) c6( ) c7(d, aaU, z, cj, h, ae, eW, ad); #c1(ORC3) c2(XP_011533954) c3(origin recognition complex subunit 3 isoform X4) c4( ) c5(330154, 330155, 330156, 330157, 330158) c6( ) c7(d, aaU, z, cj, h, ae, eW, ad); #c1(ORC4) c2(NP_001177810) c3(origin recognition complex subunit 4 isoform 2) c4( ) c5(73058, 73059, 73060, 73061, 73062, 73063, 73064, 73065, 73066, 73067, 73068) c6( ) c7(cne, ali, cj); #c1(ORC4) c2(NP_001177811) c3(origin recognition complex subunit 4 isoform 3) c4( ) c5(73069, 73070, 73071, 73072, 73073, 73074) c6( ) c7(cne, ali, cj); #c1(ORC4) c2(NP_002543) c3(origin recognition complex subunit 4 isoform 1) c4(129655, 129656, 129657, 129658, 129659, 129660, 129661) c5(129662, 129663, 129664, 129665, 129666, 129667, 129668, 129669, 129670, 129671, 129672, 129673, 129674, 129675, 129676, 129677, 129678, 129679, 129680, 129681, 129682, 129683, 129684, 129685, 129686, 129687, 129688, 129689, 129690, 129691, 129692, 129693, 129694, 129695, 129696, 129697, 129698) c6( ) c7(cne, ali, cj); #c1(ORC5) c2(NP_002544) c3(origin recognition complex subunit 5 isoform 1) c4(129699, 129700) c5(129701, 129702, 129703, 129704, 129705, 129706, 129707, 129708, 129709, 129710, 129711, 129712) c6( ) c7(T, cF, iT, vA, bw, bt, op); #c1(ORC5) c2(NP_859531) c3(origin recognition complex subunit 5 isoform 2) c4(255550) c5(255551, 255552, 255553, 255554, 255555, 255556) c6( ) c7(T, cF, iT, vA, bw, bt, op); #c1(ORC6) c2(NP_055136) c3(origin recognition complex subunit 6) c4(179213) c5(179214, 179215, 179216, 179217, 179218, 179219) c6( ) c7(T, bE, r, bB, ali, q, X, cnf); #c1(ORM1) c2(NP_000598) c3(alpha-1-acid glycoprotein 1 precursor) c4(13634) c5(13635, 13636, 13637, 13638, 13639, 13640, 13641, 13642, 13643, 13644, 13645, 13646, 13647, 13648, 13649, 13650, 13651) c6( ) c7(bM, T, A, cA, iU, fO, bS, v, ct, ci, pM, Z, fb, aaD, uQ); #c1(ORM2) c2(NP_000599) c3(alpha-1-acid glycoprotein 2 precursor) c4(13652, 13653, 13654) c5(13655, 13656, 13657, 13658, 13659, 13660, 13661) c6( ) c7(Ob, aaD, iU, r); #c1(ORMDL3) c2(XP_005257884) c3(ORM1-like protein 3 isoform X1) c4(275399) c5(275400, 275401, 275402, 275403, 275404, 275405, 275406, 275407, 275408, 275409) c6( ) c7(bM, iV, A, mR, z, LX, sp, JM, at, v, K, PM, y, eA, JB); #c1(OS9) c2(NP_001017956) c3(protein OS-9 isoform 2 precursor) c4(26630) c5(26631, 26632, 26633, 26634, 26635, 26636) c6( ) c7(bL, A, Y, cz, j, y); #c1(OS9) c2(NP_001017957) c3(protein OS-9 isoform 3 precursor) c4(26637) c5(26638, 26639, 26640, 26641, 26642, 26643) c6( ) c7(bL, A, Y, cz, j, y); #c1(OS9) c2(NP_001017958) c3(protein OS-9 isoform 4 precursor) c4(26644) c5(26645, 26646, 26647, 26648, 26649, 26650) c6( ) c7(bL, A, Y, cz, j, y); #c1(OS9) c2(NP_001248349) c3(protein OS-9 isoform 5 precursor) c4(93742) c5(93743, 93744, 93745, 93746, 93747, 93748) c6( ) c7(bL, A, Y, cz, j, y); #c1(OS9) c2(NP_001248350) c3(protein OS-9 isoform 6 precursor) c4(93749) c5(93750, 93751, 93752, 93753, 93754, 93755) c6( ) c7(bL, A, Y, cz, j, y); #c1(OS9) c2(NP_001248351) c3(protein OS-9 isoform 7 precursor) c4(93756) c5(93757, 93758, 93759, 93760, 93761, 93762) c6( ) c7(bL, A, Y, cz, j, y); #c1(OS9) c2(NP_006803) c3(protein OS-9 isoform 1 precursor) c4(168238) c5(168239, 168240, 168241, 168242, 168243, 168244) c6( ) c7(bL, A, Y, cz, j, y); #c1(OSBP) c2(NP_002547) c3(oxysterol-binding protein 1) c4(129713, 129714) c5(129715, 129716, 129717, 129718, 129719, 129720, 129721, 129722, 129723, 129724, 129725, 129726) c6( ) c7(Fi, T, OV, aE, ei); #c1(OSBP2) c2(NP_001269667) c3(oxysterol-binding protein 2 isoform c) c4(102474) c5(102475, 102476, 102477, 102478, 102479, 102480, 102481, 102482, 102483, 102484, 102485, 102486) c6( ) c7(W, iU); #c1(OSBP2) c2(NP_001269668) c3(oxysterol-binding protein 2 isoform d) c4(102487) c5( ) c6( ) c7(W, iU); #c1(OSBP2) c2(NP_001269670) c3(oxysterol-binding protein 2 isoform f) c4(102488) c5(102489, 102490, 102491, 102492, 102493, 102494) c6( ) c7(W, iU); #c1(OSBP2) c2(NP_110385) c3(oxysterol-binding protein 2 isoform a) c4(219850) c5(219851, 219852, 219853, 219854, 219855, 219856) c6( ) c7(W, iU); #c1(OSBP2) c2(XP_005261522) c3(oxysterol-binding protein 2 isoform X3) c4(277467) c5(277468, 277469, 277470, 277471, 277472, 277473) c6( ) c7(W, iU); #c1(OSBPL10) c2(NP_001167531) c3(oxysterol-binding protein-related protein 10 isoform 2) c4(69001) c5(69002, 69003, 69004, 69005, 69006, 69007) c6( ) c7(af, Fi, aq, aS, ei, dQ, B); #c1(OSBPL10) c2(NP_060254) c3(oxysterol-binding protein-related protein 10 isoform 1) c4(195041) c5(195042, 195043, 195044, 195045, 195046, 195047) c6( ) c7(af, Fi, aq, aS, ei, dQ, B); #c1(OSBPL11) c2(NP_073613) c3(oxysterol-binding protein-related protein 11) c4(213139) c5(213140, 213141, 213142, 213143, 213144, 213145) c6( ) c7(e, aj, v, ey, ei, J); #c1(OSBPL1A) c2(NP_060500) c3(oxysterol-binding protein-related protein 1 isoform 1) c4( ) c5(196257, 196258, 196259, 196260, 196261) c6( ) c7(cm, v, bA); #c1(OSBPL1A) c2(NP_542164) c3(oxysterol-binding protein-related protein 1 isoform 2) c4(231484, 231485, 231486) c5(231487, 231488, 231489, 231490, 231491, 231492, 231493, 231494, 231495, 231496, 231497, 231498, 231499) c6( ) c7(cm, v, bA); #c1(OSBPL1A) c2(XP_006722444) c3(oxysterol-binding protein-related protein 1 isoform X2) c4(294712) c5( ) c6( ) c7(cm, v, bA); #c1(OSBPL1A) c2(XP_011524102) c3(oxysterol-binding protein-related protein 1 isoform X5) c4( ) c5(318668, 318669, 318670, 318671, 318672, 318673) c6( ) c7(cm, v, bA); #c1(OSBPL2) c2(NP_001265578) c3(oxysterol-binding protein-related protein 2 isoform 3) c4(98875) c5(98876, 98877, 98878, 98879, 98880, 98881, 98882, 98883, 98884, 98885, 98886, 98887, 98888, 98889, 98890, 98891, 98892) c6( ) c7(bqJ); #c1(OSBPL2) c2(NP_055650) c3(oxysterol-binding protein-related protein 2 isoform 1) c4(182539) c5(182540, 182541, 182542, 182543, 182544, 182545) c6( ) c7(bqJ); #c1(OSBPL2) c2(NP_653081) c3(oxysterol-binding protein-related protein 2 isoform 2) c4(238831, 238832) c5(238833, 238834, 238835, 238836, 238837, 238838, 238839) c6( ) c7(bqJ); #c1(OSBPL2) c2(XP_011527420) c3(oxysterol-binding protein-related protein 2 isoform X1) c4(322156) c5( ) c6( ) c7(bqJ); #c1(OSBPL3) c2(NP_056365) c3(oxysterol-binding protein-related protein 3 isoform a) c4(187320) c5(187321, 187322, 187323, 187324, 187325, 187326) c6( ) c7(ey, Hr); #c1(OSBPL3) c2(NP_663160) c3(oxysterol-binding protein-related protein 3 isoform b) c4(241103, 241104, 241105, 241106) c5(241107, 241108, 241109, 241110, 241111, 241112, 241113, 241114, 241115, 241116) c6( ) c7(ey, Hr); #c1(OSBPL3) c2(NP_663161) c3(oxysterol-binding protein-related protein 3 isoform c) c4(241117) c5(241118, 241119, 241120, 241121, 241122, 241123, 241124, 241125, 241126, 241127) c6( ) c7(ey, Hr); #c1(OSBPL3) c2(NP_663162) c3(oxysterol-binding protein-related protein 3 isoform d) c4(241128) c5(241129, 241130, 241131, 241132, 241133, 241134, 241135, 241136, 241137, 241138, 241139, 241140, 241141, 241142, 241143, 241144, 241145, 241146, 241147, 241148, 241149, 241150, 241151, 241152, 241153, 241154, 241155, 241156) c6( ) c7(ey, Hr); #c1(OSBPL5) c2(NP_065947) c3(oxysterol-binding protein-related protein 5 isoform a) c4(206400, 206401, 206402) c5(206403, 206404, 206405, 206406, 206407, 206408, 206409, 206410, 206411, 206412, 206413, 206414, 206415, 206416, 206417, 206418, 206419, 206420, 206421) c6( ) c7(T, aC, aE); #c1(OSBPL5) c2(NP_663613) c3(oxysterol-binding protein-related protein 5 isoform b) c4(241265, 241266, 241267, 241268, 241269, 241270, 241271) c5(241272, 241273, 241274, 241275, 241276, 241277, 241278, 241279, 241280, 241281, 241282, 241283, 241284, 241285, 241286, 241287, 241288, 241289, 241290, 241291, 241292, 241293, 241294, 241295, 241296, 241297, 241298, 241299, 241300, 241301, 241302, 241303, 241304, 241305, 241306, 241307, 241308, 241309, 241310, 241311, 241312, 241313, 241314, 241315, 241316) c6( ) c7(T, aC, aE); #c1(OSBPL6) c2(NP_001188409) c3(oxysterol-binding protein-related protein 6 isoform c) c4(79153) c5(79154, 79155, 79156, 79157, 79158, 79159) c6( ) c7(bN, bX); #c1(OSBPL6) c2(NP_001188410) c3(oxysterol-binding protein-related protein 6 isoform d) c4(79160) c5(79161, 79162, 79163, 79164, 79165, 79166) c6( ) c7(bN, bX); #c1(OSBPL6) c2(NP_001188411) c3(oxysterol-binding protein-related protein 6 isoform e) c4(79167) c5(79168, 79169, 79170, 79171, 79172, 79173, 79174, 79175, 79176, 79177, 79178, 79179) c6( ) c7(bN, bX); #c1(OSBPL6) c2(NP_115912) c3(oxysterol-binding protein-related protein 6 isoform a) c4(224643, 224644) c5(224645, 224646, 224647, 224648, 224649, 224650) c6( ) c7(bN, bX); #c1(OSBPL6) c2(NP_665682) c3(oxysterol-binding protein-related protein 6 isoform b) c4(241645) c5(241646, 241647, 241648, 241649, 241650, 241651) c6( ) c7(bN, bX); #c1(OSBPL8) c2(NP_001003712) c3(oxysterol-binding protein-related protein 8 isoform b) c4(20008) c5(20009, 20010, 20011, 20012, 20013, 20014, 20015, 20016, 20017, 20018, 20019, 20020, 20021, 20022, 20023, 20024, 20025, 20026) c6( ) c7(dD, eq); #c1(OSBPL8) c2(NP_065892) c3(oxysterol-binding protein-related protein 8 isoform a) c4(206086, 206087, 206088, 206089) c5(206090, 206091, 206092, 206093, 206094, 206095, 206096, 206097, 206098, 206099, 206100, 206101, 206102, 206103, 206104, 206105, 206106, 206107, 206108, 206109, 206110, 206111, 206112, 206113, 206114, 206115, 206116) c6( ) c7(dD, eq); #c1(OSBPL8) c2(XP_005268679) c3(oxysterol-binding protein-related protein 8 isoform X5) c4(282046) c5(282047, 282048, 282049, 282050, 282051, 282052) c6( ) c7(dD, eq); #c1(OSBPL8) c2(XP_011536159) c3(oxysterol-binding protein-related protein 8 isoform X4) c4(333474) c5( ) c6( ) c7(dD, eq); #c1(OSBPL8) c2(XP_011536160) c3(oxysterol-binding protein-related protein 8 isoform X6) c4(333475) c5(333476) c6( ) c7(dD, eq); #c1(OSBPL9) c2(XP_011538901) c3(oxysterol-binding protein-related protein 9 isoform X2) c4( ) c5(336968, 336969, 336970, 336971, 336972) c6( ) c7(fq, bqJ); #c1(OSBPL9) c2(XP_011538904) c3(oxysterol-binding protein-related protein 9 isoform X6) c4(336973) c5( ) c6( ) c7(fq, bqJ); #c1(OSBPL9) c2(XP_011538907) c3(oxysterol-binding protein-related protein 9 isoform X10) c4( ) c5(336974) c6( ) c7(fq, bqJ); #c1(OSCAR) c2(NP_001269278) c3(osteoclast-associated immunoglobulin-like receptor isoform 6 precursor) c4(101026) c5(101027, 101028, 101029, 101030, 101031, 101032, 101033) c6( ) c7(ea, aj, dD, ai, eq); #c1(OSCAR) c2(NP_573398) c3(osteoclast-associated immunoglobulin-like receptor isoform 5 precursor) c4(234467) c5(234468, 234469, 234470, 234471, 234472, 234473, 234474) c6( ) c7(ea, aj, dD, ai, eq); #c1(OSCAR) c2(NP_573399) c3(osteoclast-associated immunoglobulin-like receptor isoform 4 precursor) c4(234475) c5(234476, 234477, 234478, 234479, 234480, 234481, 234482) c6( ) c7(ea, aj, dD, ai, eq); #c1(OSCAR) c2(XP_011545812) c3(osteoclast-associated immunoglobulin-like receptor isoform X3) c4(344681) c5(344682, 344683, 344684, 344685, 344686, 344687, 344688) c6( ) c7(ea, aj, dD, ai, eq); #c1(OSCAR) c2(XP_011545813) c3(osteoclast-associated immunoglobulin-like receptor isoform X4) c4(344689) c5(344690, 344691, 344692, 344693, 344694, 344695, 344696, 344697, 344698, 344699) c6( ) c7(ea, aj, dD, ai, eq); #c1(OSER1) c2(XP_011527155) c3(oxidative stress-responsive serine-rich protein 1 isoform X1) c4(321663) c5(321664, 321665, 321666, 321667, 321668, 321669, 321670, 321671, 321672, 321673) c6( ) c7(ff, cz, aA, jy, aOM, aF, K, en, er, qa, ad); #c1(OSGEP) c2(NP_060277) c3(probable tRNA N6-adenosine threonylcarbamoyltransferase) c4(195174) c5(195175, 195176, 195177, 195178, 195179, 195180) c6( ) c7(alf, qs, dy, bX, cz); #c1(OSGIN1) c2(NP_892026) c3(oxidative stress-induced growth inhibitor 1) c4(257642, 257643) c5(257644, 257645, 257646, 257647, 257648, 257649, 257650, 257651, 257652, 257653, 257654, 257655, 257656, 257657, 257658, 257659) c6( ) c7(es, T, ac, iA, aW, aT, aq, K, iR, B); #c1(OSM) c2(NP_065391) c3(oncostatin-M preproprotein) c4(204690, 204691) c5(204692, 204693, 204694, 204695, 204696, 204697, 204698, 204699, 204700) c6( ) c7(oO, bL, T, Ob, fR, IT, aw, al, aDT, jh, fd, bB, cL, v, ci, V, cd, o, ad, aDI, ai, eA, Mo, iu, hb, rw, aT, ji, K, dQ, ae, cp, hm, hM, yo, d, Di, s, qt, aW, Y, nO, cr, fQ, dq, aq, fe, as, pL, eE, cm, yR, ck, uP, gk, dB, bE, mx, cj, NI, uz, aS, Hb, m, fD, y, B, cn); #c1(OSM) c2(XP_011528504) c3(oncostatin-M isoform X1) c4( ) c5(323609, 323610, 323611, 323612, 323613, 323614, 323615) c6( ) c7(oO, bL, T, Ob, fR, IT, aw, al, aDT, jh, fd, bB, cL, v, ci, V, cd, o, ad, aDI, ai, eA, Mo, iu, hb, rw, aT, ji, K, dQ, ae, cp, hm, hM, yo, d, Di, s, qt, aW, Y, nO, cr, fQ, dq, aq, fe, as, pL, eE, cm, yR, ck, uP, gk, dB, bE, mx, cj, NI, uz, aS, Hb, m, fD, y, B, cn); #c1(OSMR) c2(NP_001161827) c3(oncostatin-M-specific receptor subunit beta isoform 2 precursor) c4(66107) c5(66108, 66109, 66110, 66111, 66112, 66113) c6( ) c7(T, cng, eM, bE, aW, vj, cn, aT, bB, n, h, eZ, ey, m, ci, aay, g, t, it, y, cp); #c1(OSMR) c2(NP_003990) c3(oncostatin-M-specific receptor subunit beta isoform 1 precursor) c4(142681) c5(142682, 142683, 142684, 142685, 142686, 142687) c6( ) c7(T, cng, eM, bE, aW, vj, cn, aT, bB, n, h, eZ, ey, m, ci, aay, g, t, it, y, cp); #c1(OSR1) c2(XP_006712005) c3(protein odd-skipped-related 1 isoform X1) c4(286324) c5(286325, 286326, 286327, 286328, 286329, 286330, 286331, 286332, 286333, 286334, 286335) c6( ) c7(qa, ac, ff, aA, cz, jy, aOM, Jd, aF, K, en, avG, er, fq, ad); #c1(OSR2) c2(NP_001135934) c3(protein odd-skipped-related 2 isoform a) c4( ) c5(53604, 53605, 53606, 53607, 53608, 53609, 53610, 53611) c6( ) c7(dP, Na); #c1(OSR2) c2(NP_001273770) c3(protein odd-skipped-related 2 isoform c) c4(105857, 105858) c5(105859, 105860, 105861, 105862, 105863, 105864) c6( ) c7(dP, Na); #c1(OSR2) c2(NP_443727) c3(protein odd-skipped-related 2 isoform b) c4(230024) c5(230025, 230026, 230027, 230028, 230029, 230030, 230031, 230032, 230033, 230034) c6( ) c7(dP, Na); #c1(OSR2) c2(XP_005250835) c3(protein odd-skipped-related 2 isoform X2) c4(270603) c5(270604, 270605) c6( ) c7(dP, Na); #c1(OSR2) c2(XP_011515127) c3(protein odd-skipped-related 2 isoform X3) c4( ) c5(307985) c6( ) c7(dP, Na); #c1(OSR2) c2(XP_011515128) c3(protein odd-skipped-related 2 isoform X4) c4( ) c5(307986) c6( ) c7(dP, Na); #c1(OSTF1) c2(NP_036515) c3(osteoclast-stimulating factor 1) c4(174206) c5(174207, 174208, 174209, 174210, 174211, 174212) c6( ) c7(FE, V, fq, j, af); #c1(OSTM1) c2(NP_054747) c3(osteopetrosis-associated transmembrane protein 1) c4(177559, 177560) c5(177561, 177562, 177563, 177564, 177565, 177566, 177567, 177568, 177569, 177570, 177571, 177572) c6( ) c7(zs, cnh, Lq, ajW, cni); #c1(OTC) c2(NP_000522) c3(ornithine carbamoyltransferase, mitochondrial precursor) c4(11689, 11690, 11691, 11692, 11693, 11694, 11695) c5(11696, 11697, 11698, 11699, 11700, 11701, 11702, 11703, 11704, 11705, 11706, 11707, 11708, 11709, 11710, 11711, 11712, 11713, 11714, 11715, 11716, 11717, 11718, 11719, 11720, 11721, 11722, 11723, 11724, 11725, 11726, 11727, 11728, 11729, 11730, 11731, 11732, 11733, 11734, 11735, 11736, 11737, 11738, 11739, 11740, 11741, 11742, 11743, 11744, 11745, 11746, 11747, 11748, 11749, 11750, 11751, 11752, 11753, 11754, 11755, 11756, 11757, 11758, 11759, 11760, 11761, 11762, 11763, 11764, 11765, 11766, 11767, 11768, 11769, 11770, 11771, 11772, 11773, 11774, 11775, 11776, 11777, 11778, 11779, 11780, 11781, 11782, 11783, 11784, 11785, 11786, 11787, 11788, 11789, 11790, 11791, 11792) c6(11793, 11794, 11795) c7(gx, ahW, e, aip, Ri, n, cz, cnk, v, jA, C, afD, HU, bfD, afR, hb, IG, ayA, jo, bq, ais, af, UF, cnl, bqy, xs, fc, fQ, dq, uY, BG, Ku, Pd, hJ, nC, KM, ayj, dr, ar, mO, iO, cnj, eB, Be, aUS, Uw, B, jr); #c1(OTOA) c2(NP_001155155) c3(otoancorin isoform 3) c4(61485) c5(61486, 61487, 61488, 61489, 61490, 61491) c6( ) c7(c, alA, cnm); #c1(OTOA) c2(NP_733764) c3(otoancorin isoform 2) c4(246997) c5(246998, 246999, 247000, 247001, 247002, 247003) c6( ) c7(c, alA, cnm); #c1(OTOA) c2(XP_011544049) c3(otoancorin isoform X1) c4(343222, 343223, 343224) c5(343225, 343226, 343227, 343228, 343229, 343230, 343231, 343232, 343233, 343234, 343235, 343236) c6( ) c7(c, alA, cnm); #c1(OTOA) c2(XP_011544050) c3(otoancorin isoform X2) c4( ) c5(343237, 343238, 343239, 343240, 343241, 343242) c6( ) c7(c, alA, cnm); #c1(OTOF) c2(NP_004793) c3(otoferlin isoform b) c4(149906) c5(149907, 149908, 149909, 149910, 149911) c6( ) c7(beO, mG, alA, cnn, oc, gT, Bh); #c1(OTOF) c2(NP_919224) c3(otoferlin isoform a) c4(258247) c5(258248, 258249, 258250, 258251, 258252, 258253) c6( ) c7(beO, mG, alA, cnn, oc, gT, Bh); #c1(OTOF) c2(NP_919303) c3(otoferlin isoform c) c4(258507) c5(258508, 258509, 258510, 258511, 258512, 258513, 258514) c6( ) c7(beO, mG, alA, cnn, oc, gT, Bh); #c1(OTOF) c2(NP_919304) c3(otoferlin isoform d) c4(258515) c5(258516, 258517, 258518, 258519, 258520, 258521) c6( ) c7(beO, mG, alA, cnn, oc, gT, Bh); #c1(OTOF) c2(XP_005264701) c3(otoferlin isoform X2) c4( ) c5(279214, 279215, 279216, 279217, 279218, 279219) c6( ) c7(beO, mG, alA, cnn, oc, gT, Bh); #c1(OTOF) c2(XP_011531487) c3(otoferlin isoform X1) c4(327617, 327618) c5(327619, 327620, 327621, 327622, 327623, 327624) c6( ) c7(beO, mG, alA, cnn, oc, gT, Bh); #c1(OTOG) c2(NP_001264198) c3(otogelin isoform a precursor) c4(97615) c5(97616, 97617, 97618, 97619, 97620, 97621) c6( ) c7(cno, an, ac, PJ); #c1(OTOG) c2(NP_001278992) c3(otogelin isoform b precursor) c4(111177) c5(111178, 111179, 111180, 111181, 111182, 111183, 111184) c6( ) c7(cno, an, ac, PJ); #c1(OTOGL) c2(NP_775862) c3(otogelin-like protein precursor) c4( ) c5(250505, 250506, 250507, 250508, 250509) c6( ) c7(cnp); #c1(OTOGL) c2(XP_011536493) c3(otogelin-like protein isoform X2) c4(333857) c5(333858) c6( ) c7(cnp); #c1(OTOL1) c2(NP_001073909) c3(otolin-1 precursor) c4(36491) c5(36492, 36493, 36494, 36495, 36496, 36497) c6( ) c7(aur); #c1(OTOP1) c2(NP_819056) c3(otopetrin-1) c4(253147) c5(253148, 253149, 253150, 253151, 253152, 253153, 253154, 253155) c6(253156, 253157) c7(aRa, aQX); #c1(OTOR) c2(NP_064542) c3(otoraplin precursor) c4(202899) c5(202900, 202901, 202902, 202903, 202904, 202905) c6( ) c7(cnq); #c1(OTP) c2(NP_115485) c3(homeobox protein orthopedia) c4(222886) c5(222887, 222888, 222889, 222890, 222891, 222892, 222893) c6( ) c7(Yi); #c1(OTUB1) c2(NP_060140) c3(ubiquitin thioesterase OTUB1) c4(194368, 194369, 194370) c5(194371, 194372, 194373, 194374, 194375, 194376, 194377, 194378, 194379, 194380, 194381, 194382, 194383, 194384, 194385, 194386, 194387, 194388, 194389, 194390, 194391) c6( ) c7(t, hc, uE); #c1(OTUD1) c2(NP_001138845) c3(OTU domain-containing protein 1) c4(57931) c5(57932, 57933, 57934, 57935, 57936, 57937) c6( ) c7(uQ); #c1(OTUD4) c2(NP_001096123) c3(OTU domain-containing protein 4 isoform 3) c4(41071) c5(41072, 41073, 41074, 41075, 41076) c6( ) c7(ck, bv, T, ft, kP, s, eM, bP, aW, ds, Xc, ff, jh, aT, ci, en, g, cm, bt, ad); #c1(OTUD4) c2(NP_059963) c3(OTU domain-containing protein 4 isoform 2) c4( ) c5(193396, 193397, 193398, 193399, 193400, 193401, 193402, 193403, 193404, 193405, 193406, 193407, 193408, 193409) c6( ) c7(ck, bv, T, ft, kP, s, eM, bP, aW, ds, Xc, ff, jh, aT, ci, en, g, cm, bt, ad); #c1(OTUD4) c2(XP_005263136) c3(OTU domain-containing protein 4 isoform X4) c4(278327, 278328, 278329) c5(278330, 278331, 278332, 278333, 278334, 278335, 278336, 278337, 278338) c6( ) c7(ck, bv, T, ft, kP, s, eM, bP, aW, ds, Xc, ff, jh, aT, ci, en, g, cm, bt, ad); #c1(OTUD7A) c2(NP_570971) c3(OTU domain-containing protein 7A) c4(234440, 234441) c5(234442, 234443, 234444, 234445, 234446, 234447, 234448, 234449, 234450, 234451, 234452) c6( ) c7(cd, aNO, T, B); #c1(OTUD7A) c2(XP_011519589) c3(OTU domain-containing protein 7A isoform X1) c4(314255) c5(314256, 314257, 314258, 314259, 314260, 314261, 314262) c6( ) c7(cd, aNO, T, B); #c1(OTUD7B) c2(XP_011508087) c3(OTU domain-containing protein 7B isoform X1) c4(298576) c5( ) c6( ) c7(T, B); #c1(OTUD7B) c2(XP_011508090) c3(OTU domain-containing protein 7B isoform X2) c4( ) c5(298577) c6( ) c7(T, B); #c1(OTULIN) c2(NP_612357) c3(ubiquitin thioesterase otulin) c4(236230) c5(236231, 236232, 236233, 236234, 236235, 236236) c6( ) c7(T); #c1(OTX1) c2(NP_055377) c3(homeobox protein OTX1) c4(180660) c5(180661, 180662, 180663, 180664, 180665, 180666, 180667, 180668, 180669, 180670, 180671) c6( ) c7(jf, aW, ff, ha, aT, en, rz, ad, bN); #c1(OTX2) c2(NP_001257453) c3(homeobox protein OTX2 isoform b) c4(95436, 95437) c5(95438, 95439, 95440, 95441, 95442, 95443, 95444, 95445, 95446, 95447, 95448, 95449, 95450, 95451, 95452, 95453) c6( ) c7(aMU, LX, ko, cnv, Nh, biN, aMS, HC, aT, bK, an, cnu, cnt, jf, avP, cns, bDf, kj, aW, ff, Rj, chn, en, cnr, nC, kn, ac, bP, dB, eD, cnw, aSp, bgd, oQ); #c1(OTX2) c2(NP_001257454) c3(homeobox protein OTX2 isoform a) c4(95454, 95455) c5(95456, 95457, 95458, 95459, 95460, 95461, 95462, 95463, 95464, 95465, 95466, 95467, 95468) c6( ) c7(aMU, LX, ko, cnv, Nh, biN, aMS, HC, aT, bK, an, cnu, cnt, jf, avP, cns, bDf, kj, aW, ff, Rj, chn, en, cnr, nC, kn, ac, bP, dB, eD, cnw, aSp, bgd, oQ); #c1(OVCA2) c2(NP_543012) c3(ovarian cancer-associated gene 2 protein) c4(233244) c5(233245, 233246, 233247, 233248, 233249, 233250) c6( ) c7(jf, dA, m, bz, jj, t, kS); #c1(OVOL1) c2(NP_004552) c3(putative transcription factor Ovo-like 1) c4(147587) c5(147588, 147589, 147590, 147591, 147592, 147593, 147594) c6( ) c7(eE, cm, T); #c1(OVOL2) c2(NP_067043) c3(transcription factor Ovo-like 2 isoform 1) c4(208587) c5(208588, 208589, 208590, 208591, 208592, 208593, 208594) c6( ) c7(T); #c1(OXA1L) c2(NP_005006) c3(mitochondrial inner membrane protein OXA1L) c4(152014, 152015) c5(152016, 152017, 152018, 152019, 152020, 152021, 152022, 152023, 152024, 152025, 152026, 152027) c6( ) c7(bL, bM, T, if, e, ht, n, j, ci, qN, q, eA, x, cF, py, aE, M, aT, kf, nm, dL, K, hu, pk, db, eL, azh, aii, vT, aW, Y, ff, eH, alB, r, nY, yq, en, g, eF, t, f, bz, cm, iK, dR, eM, ig, eD, at, m, k, fD, adg, B, Rf); #c1(OXCT1) c2(NP_000427) c3(succinyl-CoA:3-ketoacid coenzyme A transferase 1, mitochondrial precursor) c4(8855, 8856, 8857, 8858) c5(8859, 8860, 8861, 8862, 8863, 8864, 8865, 8866, 8867, 8868, 8869, 8870, 8871, 8872, 8873, 8874, 8875, 8876, 8877, 8878, 8879, 8880, 8881, 8882, 8883, 8884, 8885, 8886) c6( ) c7(bL, aq, v, eA, bq, B, bA, cnx); #c1(OXER1) c2(NP_683765) c3(oxoeicosanoid receptor 1) c4(242572) c5(242573, 242574, 242575, 242576, 242577, 242578) c6( ) c7(bL, bM, d, aE, Y, pX, ff, h, Ja, v, dX, en, he, Fg, cE, ad); #c1(OXGR1) c2(XP_005254103) c3(2-oxoglutarate receptor 1 isoform X1) c4(272942, 272943, 272944) c5(272945, 272946, 272947, 272948, 272949, 272950, 272951, 272952, 272953, 272954, 272955, 272956, 272957, 272958, 272959, 272960, 272961, 272962, 272963, 272964, 272965, 272966) c6( ) c7(B); #c1(OXR1) c2(NP_001185461) c3(oxidation resistance protein 1 isoform 3) c4(75626) c5(75627, 75628, 75629, 75630, 75631, 75632) c6( ) c7(U, fq, K, c); #c1(OXR1) c2(NP_001185462) c3(oxidation resistance protein 1 isoform 4) c4(75633) c5(75634, 75635, 75636, 75637, 75638, 75639) c6( ) c7(U, fq, K, c); #c1(OXR1) c2(NP_001185463) c3(oxidation resistance protein 1 isoform 5) c4(75640) c5(75641, 75642, 75643, 75644, 75645, 75646) c6( ) c7(U, fq, K, c); #c1(OXR1) c2(NP_001185464) c3(oxidation resistance protein 1 isoform 6) c4(75647) c5(75648, 75649, 75650, 75651, 75652, 75653) c6( ) c7(U, fg, K, c); #c1(OXR1) c2(NP_060472) c3(oxidation resistance protein 1 isoform 1) c4(196105) c5(196106, 196107, 196108, 196109, 196110, 196111, 196112, 196113, 196114, 196115, 196116) c6( ) c7(U, fq, K, c); #c1(OXR1) c2(NP_851999) c3(oxidation resistance protein 1 isoform 2) c4(254776) c5(254777, 254778, 254779, 254780, 254781, 254782, 254783, 254784, 254785, 254786, 254787) c6( ) c7(U, fq, K, c); #c1(OXR1) c2(XP_005251052) c3(oxidation resistance protein 1 isoform X7) c4(270730) c5(270731, 270732, 270733, 270734, 270735, 270736) c6( ) c7(U, fq, K, c); #c1(OXR1) c2(XP_006716658) c3(oxidation resistance protein 1 isoform X5) c4(290422) c5( ) c6( ) c7(U, fq, K, c); #c1(OXSR1) c2(NP_005100) c3(serine/threonine-protein kinase OSR1) c4(152874) c5(152875, 152876, 152877, 152878, 152879, 152880) c6( ) c7(ff, cz, aA, jy, aOM, aF, ey, K, en, er, qa, ad); #c1(OXT) c2(XP_011527540) c3(oxytocin-neurophysin 1 isoform X1) c4(322354) c5(322355, 322356, 322357, 322358, 322359, 322360) c6( ) c7(gh, uK, DV, bO, cz, To, bS, v, ct, ci, zP, ad, aqN, ft, Bc, iX, pX, QU, aT, IG, cy, K, IQ, qM, he, yj, ae, dl, rz, nJ, agK, CN, aW, ff, eH, en, Eg, brk, JI, Z, bz, f, eE, bN, hq, eF, cm, yX, pu, bb, cA, X, cbE, m, ra, ZW, sC, agZ); #c1(OXTR) c2(NP_000907) c3(oxytocin receptor) c4(17083, 17084, 17085) c5(17086, 17087, 17088, 17089, 17090, 17091, 17092, 17093, 17094, 17095, 17096, 17097, 17098, 17099, 17100, 17101, 17102) c6( ) c7(bM, sY, T, uK, aQc, bO, cz, bS, j, ct, gf, ci, v, aqN, av, b, ft, iX, pX, aT, adB, K, ahg, he, rz, agC, dl, VX, aW, eH, aeS, Eg, JI, Z, uC, bz, eF, op, bN, avK, jq, hq, eM, vA, Uv, m, amu, i, ra, aqZ, ckr); #c1(P2RX1) c2(NP_002549) c3(P2X purinoceptor 1) c4(129727) c5(129728, 129729, 129730, 129731, 129732, 129733) c6( ) c7(cA, c, ig, iT, yx, aT, cny, bK, K, iq); #c1(P2RX2) c2(NP_001269093) c3(P2X purinoceptor 2 isoform J) c4(100424) c5(100425, 100426, 100427, 100428, 100429, 100430) c6( ) c7(cA, c, ig, iT, yx, ha, aT, bK, cnz); #c1(P2RX2) c2(NP_036358) c3(P2X purinoceptor 2 isoform 1) c4(173212) c5(173213, 173214, 173215, 173216, 173217, 173218) c6( ) c7(cA, c, ig, iT, yx, ha, aT, bK, cnz); #c1(P2RX2) c2(NP_057402) c3(P2X purinoceptor 2 isoform C) c4(190560) c5(190561, 190562, 190563, 190564, 190565, 190566) c6( ) c7(cA, c, ig, iT, yx, ha, aT, bK, cnz); #c1(P2RX2) c2(NP_733782) c3(P2X purinoceptor 2 isoform A) c4(247075) c5(247076, 247077, 247078, 247079, 247080, 247081) c6( ) c7(cA, c, ig, iT, yx, ha, aT, bK, cnz); #c1(P2RX2) c2(NP_733783) c3(P2X purinoceptor 2 isoform D) c4(247082) c5(247083, 247084, 247085, 247086, 247087, 247088) c6( ) c7(cA, c, ig, iT, yx, ha, aT, bK, cnz); #c1(P2RX2) c2(NP_777361) c3(P2X purinoceptor 2 isoform H) c4(251094) c5(251095, 251096, 251097, 251098, 251099, 251100) c6( ) c7(cA, c, ig, iT, yx, ha, aT, bK, cnz); #c1(P2RX2) c2(NP_777362) c3(P2X purinoceptor 2 isoform B) c4(251101) c5(251102, 251103, 251104, 251105, 251106, 251107) c6( ) c7(cA, c, ig, iT, yx, ha, aT, bK, cnz); #c1(P2RX3) c2(XP_011543372) c3(P2X purinoceptor 3 isoform X1) c4(342217, 342218) c5(342219, 342220, 342221, 342222, 342223, 342224, 342225, 342226, 342227, 342228, 342229, 342230) c6( ) c7(aUh, dP, T, c, cA, xZ, ig, iT, yx, eH, aT, bK, ajC); #c1(P2RX4) c2(NP_001243725) c3(P2X purinoceptor 4 isoform 1) c4(91591) c5(91592, 91593, 91594, 91595, 91596, 91597) c6( ) c7(W, c, cA, ig, iT, yx, ha, aT, cz, bK, il, cd, hq); #c1(P2RX4) c2(NP_001248326) c3(P2X purinoceptor 4 isoform 3) c4(93679, 93680) c5(93681, 93682, 93683, 93684, 93685, 93686, 93687) c6( ) c7(W, c, cA, ig, iT, yx, ha, aT, cz, bK, il, cd, hq); #c1(P2RX4) c2(NP_001248327) c3(P2X purinoceptor 4 isoform 4) c4( ) c5(93688, 93689, 93690, 93691, 93692) c6( ) c7(W, c, cA, ig, iT, yx, ha, aT, cz, bK, il, cd, hq); #c1(P2RX4) c2(NP_002551) c3(P2X purinoceptor 4 isoform 2) c4(129734, 129735) c5(129736, 129737, 129738, 129739, 129740, 129741, 129742, 129743, 129744, 129745, 129746, 129747) c6( ) c7(W, c, cA, ig, iT, yx, ha, aT, cz, bK, il, cd, hq); #c1(P2RX5) c2(NP_001191448) c3(P2X purinoceptor 5 isoform D) c4(81564) c5(81565, 81566, 81567, 81568, 81569, 81570) c6( ) c7(ck, xQ, T, cF, c, cA, ig, aW, hk, yx, qt, iT, iU, aT, fe, bK, im, bt, bpx); #c1(P2RX5) c2(NP_001191449) c3(P2X purinoceptor 5 isoform E) c4(81571, 81572) c5(81573, 81574, 81575, 81576, 81577, 81578, 81579, 81580, 81581, 81582, 81583, 81584) c6( ) c7(ck, xQ, T, cF, c, cA, ig, aW, hk, yx, qt, iT, iU, aT, fe, bK, im, bt, bpx); #c1(P2RX5) c2(NP_002552) c3(P2X purinoceptor 5 isoform A) c4(129748, 129749) c5(129750, 129751, 129752, 129753, 129754, 129755, 129756, 129757, 129758, 129759, 129760, 129761) c6( ) c7(ck, xQ, T, cF, c, cA, ig, aW, hk, yx, qt, iT, iU, aT, fe, bK, im, bt, bpx); #c1(P2RX5) c2(NP_778255) c3(P2X purinoceptor 5 isoform B) c4(251523) c5(251524, 251525, 251526, 251527, 251528, 251529) c6( ) c7(ck, xQ, T, cF, c, cA, ig, aW, hk, yx, qt, iT, iU, aT, fe, bK, im, bt, bpx); #c1(P2RX6) c2(NP_001153026) c3(P2X purinoceptor 6 isoform 2) c4(60335, 60336) c5(60337, 60338, 60339, 60340, 60341, 60342, 60343, 60344, 60345, 60346, 60347, 60348, 60349, 60350, 60351, 60352, 60353, 60354, 60355, 60356, 60357, 60358, 60359, 60360) c6( ) c7(T, QG, ac, c, cA, ig, iT, Or, e, yx, aw, aT, cz, bK, j, eu); #c1(P2RX6) c2(NP_005437) c3(P2X purinoceptor 6 isoform 1) c4(156169, 156170, 156171) c5(156172, 156173, 156174, 156175, 156176, 156177, 156178, 156179, 156180, 156181, 156182, 156183) c6( ) c7(T, QG, ac, c, cA, ig, iT, Or, e, yx, aw, aT, cz, bK, j, eu); #c1(P2RX6) c2(XP_011528802) c3(P2X purinoceptor 6 isoform X3) c4(324167) c5( ) c6( ) c7(T, QG, ac, c, cA, ig, iT, Or, e, yx, aw, aT, cz, bK, j, eu); #c1(P2RX6) c2(XP_011528804) c3(P2X purinoceptor 6 isoform X6) c4( ) c5(324168) c6( ) c7(T, QG, ac, c, cA, ig, iT, Or, e, yx, aw, aT, cz, bK, j, eu); #c1(P2RX7) c2(NP_002553) c3(P2X purinoceptor 7) c4(129762, 129763, 129764) c5(129765, 129766, 129767, 129768, 129769, 129770, 123771, 129772, 129773, 129774, 129775, 129776, 129777) c6( ) c7(bL, bM, T, bO, cz, fd, mS, aj, bS, gf, et, j, pz, il, V, cd, J, ad, fU, abk, wv, aE, Ob, mW, M, aT, cy, iT, hn, bK, dL, wb, ji, oi, mY, mV, ae, bA, mU, aus, aW, Y, vj, Tr, yx, eZ, zD, ig, Qv, fe, g, hf, Z, cm, jb, bw, mZ, mX, ck, hq, pH, nM, W, c, nB, xZ, hk, anY, hc, cA, Ei, U, cj, vL, at, sv, nw, dy, wB, qF, ei, y, bt, mT, avY); #c1(P2RX7) c2(XP_011536720) c3(P2X purinoceptor 7 isoform X1) c4(334317, 334318) c5(334319, 334320, 334321, 334322, 334323, 334324, 334325, 334326, 334327, 334328, 334329, 334330, 334331, 334332, 334333) c6( ) c7(bL, bM, T, bO, cz, fd, mS, aj, bS, gf, et, j, pz, il, V, cd, J, ad, fU, abk, wv, aE, Db, mW, M, aT, cy, iT, hn, bK, dL, wb, ji, oi, mY, mV, ae, bA, mU, aus, aW, Y, vj, Tr, yx, eZ, zD, ig, Qv, fe, g, hf, Z, cm, jb, bw, mZ, mX, ck, hq, pH, nM, W, c, nB, xZ, hk, anY, hc, cA, Ei, U, cj, vL, at, sv, nw, dy, wB, qF, ei, y, bt, mT, avY); #c1(P2RX7) c2(XP_011536721) c3(P2X purinoceptor 7 isoform X2) c4( ) c5(334334, 334335, 334336, 334337, 334338, 334339) c6( ) c7(bL, bM, T, bO, cz, fd, mS, aj, bS, gf, et, j, pz, il, V, cd, J, ad, fU, abk, wv, aE, Db, mW, M, aT, cy, iT, hn, bK, dL, wb, ji, oi, mY, mV, ae, bA, mU, aus, aW, Y, vj, Tr, yx, eZ, zD, ig, Qv, fe, g, hf, Z, cm, jb, bw, mZ, mX, ck, hq, pH, nM, W, c, nB, xZ, hk, anY, hc, cA, Ei, U, cj, vL, at, sv, nw, dy, wB, qF, ei, y, bt, mT, avY); #c1(P2RX7) c2(XP_011536722) c3(P2X purinoceptor 7 isoform X3) c4(334340) c5(334341, 334342, 334343, 334344, 334345) c6( ) c7(bL, bM, T, bO, cz, fd, mS, aj, bS, gf, et, j, pz, il, V, cd, J, ad, fU, abk, wv, aE, Db, mW, M, aT, cy, iT, hn, bK, dL, wb, ji, oi, mY, mV, ae, bA, mU, aus, aW, Y, vj, Tr, yx, eZ, zD, ig, Qv, fe, g, hf, Z, cm, jb, bw, mZ, mX, ck, hq, pH, nM, W, c, nB, xZ, hk, anY, hc, cA, Ei, U, cj, vL, at, sv, nw, dy, wB, qF, ei, y, bt, mT, avY); #c1(P2RY1) c2(NP_002554) c3(P2Y purinoceptor 1) c4(129778) c5(129779, 129780, 129781, 129782, 129783, 129784) c6( ) c7(dD, j, eq, eA, ad, aT, h, bK, K, ae, yx, eZ, kD, EZ, as, c, cA, ig, hk, iT, cj, sU, dX); #c1(P2RY11) c2(NP_002557) c3(P2Y purinoceptor 11) c4( ) c5(129792, 129793, 129794, 129795, 129796, 129797) c6( ) c7(T, aw, cF, ao, hm); #c1(P2RY12) c2(NP_795345) c3(P2Y purinoceptor 12) c4(252423, 252424) c5(252425, 252426, 252427, 252428, 252429, 252430, 252431, 252432, 252433, 252434, 252435, 252436) c6( ) c7(P, T, dD, eR, e, aw, cz, BH, aj, j, eq, J, fU, M, K, GO, af, hm, fO, eZ, kD, iy, vs, aZf, cm, kT, ac, bm, cny, aS, dX, ei, wx); #c1(P2RY13) c2(NP_795713) c3(P2Y purinoceptor 13) c4(252462) c5(252463, 252464, 252465, 252466, 252467, 252468) c6( ) c7(ea, dD, eq, iV); #c1(P2RY14) c2(NP_055694) c3(P2Y purinoceptor 14) c4(182811, 182812) c5(182813, 182814, 182815, 182816, 182817, 182818, 182819, 182820, 182821, 182822, 182823, 182824, 182825, 182826, 182827, 182828) c6( ) c7(iV); #c1(P2RY2) c2(NP_788085) c3(P2Y purinoceptor 2) c4( ) c5(252173) c6( ) c7(oO, T, dD, ea, zt, aw, cz, eq, ad, av, aE, aT, h, bK, ae, af, aW, yx, eH, cI, eF, cm, wU, qa, eK, ac, c, cA, ig, hk, iT, U, hL, B, ao); #c1(P2RY2) c2(XP_011543376) c3(P2Y purinoceptor 2 isoform X1) c4(342231) c5(342232, 342233, 342234, 342235, 342236, 342237, 342238, 342239, 342240, 342241, 342242, 342243, 342244, 342245) c6( ) c7(oO, T, dD, ea, zt, aw, cz, eq, ad, av, aE, aT, h, bK, ae, af, aW, yx, eH, cI, eF, cm, wU, qa, eK, ac, c, cA, ig, hk, iT, U, hL, B, ao); #c1(P2RY4) c2(NP_002556) c3(P2Y purinoceptor 4) c4(129785) c5(129786, 129787, 129788, 129789, 129790, 129791) c6( ) c7(cm); #c1(P2RY6) c2(NP_001264134) c3(P2Y purinoceptor 6 isoform 1) c4(97543) c5(97544, 97545, 97546, 97547, 97548, 97549, 97550, 97551, 97552, 97553, 97554, 97555, 97556, 97557, 97558, 97559, 97560, 97561, 97562, 97563, 97564, 97565, 97566, 97567, 97568, 97569, 97570, 97571, 97572, 97573, 97574, 97575, 97576, 97577, 97578, 97579) c6( ) c7(av, aE, dh, tv, tu, as, cm); #c1(P2RY6) c2(NP_001264137) c3(P2Y purinoceptor 6 isoform 2) c4( ) c5(97580, 97581) c6( ) c7(av, aE, dh, tv, tu, as, cm); #c1(P2RY6) c2(XP_011543378) c3(P2Y purinoceptor 6 isoform X3) c4(342246, 342247) c5(342248, 342249, 342250, 342251, 342252, 342253, 342254, 342255) c6( ) c7(av, aE, dh, tv, tu, as, cm); #c1(P2RY8) c2(XP_005274835) c3(P2Y purinoceptor 8 isoform X2) c4(285485) c5(285486, 285487, 285488, 285489, 285490) c6( ) c7(ck, x, k, nA, ajo, f, hF); #c1(P2RY8) c2(XP_006724927) c3(P2Y purinoceptor 8 isoform X1) c4( ) c5(296493) c6( ) c7(ck, x, k, nA, ajo, f, hF); #c1(P3H2) c2(NP_001127890) c3(prolyl 3-hydroxylase 2 isoform b) c4(49432) c5( ) c6( ) c7(T, dB, aW, Y, aT, cnA, af); #c1(P3H2) c2(NP_060662) c3(prolyl 3-hydroxylase 2 isoform a precursor) c4(197035) c5(197036, 197037, 197038, 197039, 197040, 197041, 197042, 197043, 197044, 197045, 197046, 197047, 197048, 197049, 197050, 197051) c6( ) c7(T, dB, aW, Y, aT, cnA, af); #c1(P3H3) c2(NP_055077) c3(prolyl 3-hydroxylase 3 precursor) c4(178793, 178794, 178795) c5(178796, 178797, 178798, 178799, 178800, 178801, 178802, 178803, 178804, 178805, 178806, 178807, 178808, 178809, 178810, 178811, 178812, 178813, 178814, 178815, 178816) c6( ) c7(AK, ai, T, d, c, sO, ds, aWL, aWM, aW, asD, aT, Pg, Ol, Vd, ci, bU, bwg, af); #c1(P3H4) c2(NP_006446) c3(synaptonemal complex protein SC65 precursor) c4(165293, 165294) c5(165295, 165296, 165297, 165298, 165299, 165300, 165301, 165302, 165303, 165304, 165305, 165306, 165307, 165308) c6( ) c7(IN, II); #c1(P3H4) c2(XP_006721703) c3(synaptonemal complex protein SC65 isoform X1) c4( ) c5(294243, 294244) c6( ) c7(IN, II); #c1(P4HA1) c2(NP_000908) c3(prolyl 4-hydroxylase subunit alpha-1 isoform 1 precursor) c4(17103) c5(17104, 17105, 17106, 17107, 17108, 17109, 17110, 17111, 17112, 17113) c6( ) c7(aW, aT); #c1(P4HA1) c2(NP_001136067) c3(prolyl 4-hydroxylase subunit alpha-1 isoform 2 precursor) c4(54231) c5(54232, 54233, 54234, 54235, 54236, 54237, 54238, 54239, 54240, 54241, 54242, 54243, 54244, 54245) c6( ) c7(aW, aT); #c1(P4HA1) c2(NP_001136068) c3(prolyl 4-hydroxylase subunit alpha-1 isoform 3 precursor) c4(54246) c5(54247, 54248, 54249, 54250, 54251, 54252) c6( ) c7(aW, aT); #c1(P4HA2) c2(XP_005272177) c3(prolyl 4-hydroxylase subunit alpha-2 isoform X1) c4(283733, 283734) c5(283735, 283736, 283737, 283738, 283739, 283740, 283741, 283742, 283743, 283744, 283745, 283746, 283747, 283748, 283749, 283750) c6( ) c7(Dw, dA, aW, oe, aT, cm, Ds, t); #c1(P4HA2) c2(XP_006714793) c3(prolyl 4-hydroxylase subunit alpha-2 isoform X2) c4(288160) c5(288161, 288162, 288163, 288164, 288165, 288166, 288167, 288168, 288169, 288170, 288171, 288172, 288173, 288174) c6( ) c7(Dw, dA, aW, oe, aT, cm, Ds, t); #c1(P4HA2) c2(XP_011542007) c3(prolyl 4-hydroxylase subunit alpha-2 isoform X3) c4(340505, 340506, 340507, 340508, 340509, 340510, 340511) c5(340512, 340513, 340514, 340515, 340516, 340517, 340518, 340519, 340520, 340521, 340522, 340523, 340524, 340525, 340526, 340527, 340528, 340529, 340530, 340531, 340532, 340533, 340534, 340535, 340536, 340537, 340538, 340539, 340540, 340541, 340542, 340543, 340544, 340545, 340546, 340547, 340548, 340549, 340550, 340551, 340552, 340553, 340554, 340555, 340556, 340557, 340558, 340559) c6( ) c7(Dw, dA, aW, oe, aT, cm, Ds, t); #c1(P4HB) c2(NP_000909) c3(protein disulfide-isomerase precursor) c4(17114, 17115, 17116) c5(17117, 17118, 17119, 17120, 17121, 17122, 17123, 17124, 17125, 17126, 17127, 17128, 17129, 17130, 17131, 17132, 17133, 17134) c6( ) c7(bL, T, dt, aw, aA, aj, j, PJ, cd, amW, J, ad, eA, akN, F, xE, dV, aT, h, cy, ZU, K, eu, bA, uQ, A, qt, aW, Io, aYR, aE, cm, ac, c, kg, dh, AH, II, U, y, bt, B); #c1(P4HTM) c2(NP_808807) c3(transmembrane prolyl 4-hydroxylase isoform c) c4(252937) c5(252938, 252939, 252940, 252941, 252942, 252943) c6( ) c7(eF, beH, beJ, eH); #c1(P4HTM) c2(NP_808808) c3(transmembrane prolyl 4-hydroxylase isoform a) c4(252944) c5(252945, 252946, 252947, 252948, 252949, 252950) c6( ) c7(eF, beH, beJ, eH); #c1(PA2G4) c2(NP_006182) c3(proliferation-associated protein 2G4) c4(162657, 162658) c5(162659, 162660, 162661, 162662, 162663, 162664, 162665, 162666, 162667, 162668, 162669, 162670) c6( ) c7(T, dB, aW, qK, aT, aA, ci, g, ae, LS, ad); #c1(PABPC1) c2(XP_005250918) c3(polyadenylate-binding protein 1 isoform X1) c4(270641, 270642, 270643, 270644, 270645, 270646, 270647, 270648, 270649, 270650, 270651) c5(270652, 270653, 270654, 270655, 270656, 270657, 270658, 270659, 270660, 270661, 270662, 270663, 270664, 270665, 270666, 270667, 270668, 270669, 270670, 270671, 270672, 270673, 270674, 270675, 270676, 270677, 270678, 270679, 270680, 270681, 270682, 270683, 270684, 270685, 270686, 270687, 270688, 270689, 270690, 270691, 270692, 270693, 270694, 270695, 270696, 270697, 270698, 270699, 270700, 270701, 270702, 270703, 270704, 270705, 270706, 270707, 270708, 270709, 270710, 270711, 270712, 270713, 270714, 270715, 270716) c6( ) c7(ae, aoU, aW, Dl, Dq, ht, aT, h, Io, app, K, bz, ad); #c1(PABPC3) c2(NP_112241) c3(polyadenylate-binding protein 3) c4(221072) c5(221073, 221074, 221075, 221076, 221077, 221078, 221079) c6( ) c7(fq); #c1(PABPC4L) c2(NP_001108206) c3(polyadenylate-binding protein 4-like) c4(43140, 43141, 43142) c5(43143, 43144, 43145, 43146, 43147, 43148, 43149, 43150, 43151, 43152, 43153) c6( ) c7(j, PN); #c1(PABPN1) c2(NP_004634) c3(polyadenylate-binding protein 2) c4(148389, 148390) c5(148391, 148392, 148393, 148394, 148395, 148396, 148397, 148398, 148399, 148400, 148401, 148402) c6( ) c7(no, af, eM, Ae, aKu, bAj, ds, xs, cnB, Ak, oj, app, zW, bZP, dr); #c1(PACRG) c2(NP_001073848) c3(parkin coregulated gene protein isoform 2) c4(36116) c5(36117, 36118, 36119, 36120, 36121, 36122, 36123, 36124, 36125, 36126) c6( ) c7(ck, x, AW, gU, py, iU, PN, aWe, ahD, vm, k, an, aMB); #c1(PACRG) c2(NP_689623) c3(parkin coregulated gene protein isoform 1) c4(243324) c5(243325, 243326, 243327, 243328, 243329, 243330) c6( ) c7(ck, x, AW, gU, py, iU, pN, aWe, ahD, vm, k, an, aMB); #c1(PACS1) c2(NP_060496) c3(phosphofurin acidic cluster sorting protein 1) c4(196239, 196240) c5(196241, 196242, 196243, 196244, 196245, 196246) c6( ) c7(cnC, h, v, qM, nA, IB); #c1(PACS1) c2(XP_011543465) c3(phosphofurin acidic cluster sorting protein 1 isoform X2) c4(342357) c5( ) c6( ) c7(cnC, h, v, qM, nA, IB); #c1(PACS1) c2(XP_011543466) c3(phosphofurin acidic cluster sorting protein 1 isoform X3) c4( ) c5(342358, 342359, 342360, 342361, 342362, 342363, 342364, 342365, 342366, 342367, 342368, 342369) c6( ) c7(cnC, h, v, qM, nA, IB); #c1(PACS2) c2(NP_001094383) c3(phosphofurin acidic cluster sorting protein 2 isoform 1) c4(40698) c5(40699, 40700, 40701, 40702, 40703, 40704) c6( ) c7(ac); #c1(PACS2) c2(NP_056012) c3(phosphofurin acidic cluster sorting protein 2 isoform 2) c4(185126) c5(185127, 185128, 185129, 185130, 185131, 185132) c6( ) c7(ac); #c1(PACS2) c2(XP_006720154) c3(phosphofurin acidic cluster sorting protein 2 isoform X9) c4(293301) c5(293302, 293303, 293304, 293305, 293306, 293307) c6( ) c7(ac); #c1(PACSIN1) c2(XP_011512843) c3(protein kinase C and casein kinase substrate in neurons protein 1 isoform X1) c4(303903, 303904) c5(303905, 303906, 303907, 303908, 303909, 303910, 303911, 303912, 303913, 303914, 303915, 303916, 303917, 303918, 303919, 303920) c6( ) c7(rR, ff, ht, eX, eV, en, on, Hr); #c1(PACSIN2) c2(NP_001171899) c3(protein kinase C and casein kinase substrate in neurons protein 2 isoform A) c4(71991, 71992) c5(71993, 71994, 71995, 71996, 71997, 71998, 71999, 72000, 72001, 72002, 72003, 72004, 72005, 72006) c6( ) c7(ck, ad); #c1(PACSIN2) c2(XP_005261376) c3(protein kinase C and casein kinase substrate in neurons protein 2 isoform X1) c4(277317, 277318) c5(277319, 277320, 277321, 277322, 277323, 277324, 277325, 277326, 277327, 277328, 277329, 277330, 277331, 277332, 277333, 277334, 277335, 277336, 277337, 277338, 277339, 277340, 277341, 277342, 277343, 277344, 277345) c6( ) c7(ck, ad); #c1(PACSIN2) c2(XP_011528153) c3(protein kinase C and casein kinase substrate in neurons protein 2 isoform X2) c4(323270) c5(323271, 323272, 323273, 323274, 323275) c6( ) c7(ck, ad); #c1(PADI4) c2(XP_011539452) c3(protein-arginine deiminase type-4 isoform X1) c4(337628, 337629) c5( ) c6( ) c7(T, Qs, rV, pf, e, bB, aj, j, ci, zP, V, Uy, J, ai, yM, ds, afQ, BJ, auB, M, aT, cy, K, bby, hu, A, zQ, bf, vT, aW, Y, ff, Lh, ge, fe, hp, en, g, pL, t, ir, cm, iV, ck, kT, bE, hk, nF, U, Le, KY, y); #c1(PADI4) c2(XP_011539458) c3(protein-arginine deiminase type-4 isoform X6) c4( ) c5(337630, 337631, 337632, 337633, 337634, 337635, 337636, 337637, 337638, 337639, 337640, 337641) c6( ) c7(T, Qs, rV, pf, e, bB, aj, j, ci, zP, V, Uy, J, ai, yM, ds, afQ, BJ, auB, M, aT, cy, K, bby, hu, A, zQ, bf, vT, aW, Y, ff, Lh, ge, fe, hp, en, g, pL, t, ir, cm, iV, ck, kT, bE, hk, nF, U, Le, KY, y); #c1(PAEP) c2(NP_001018059) c3(glycodelin precursor) c4(26979, 26980, 26981, 26982, 26983) c5(26984, 26985, 26986, 26987, 26988, 26989, 26990, 26991, 26992, 26993, 26994, 26995, 26996, 26997, 26998, 26999, 27000, 27001, 27002, 27003, 27004, 27005, 27006, 27007, 27008, 27009) c6( ) c7(T, al, bB, gf, ci, aE, Co, K, cp, aW, fc, hl, g, cm, bwQ, y, AM, vA, cj, m, Cx, atx, xN, n, aj, et, qN, eW, aZv, h, Df, A, mR, aiB, aq, aGd, pm, op, dB, hL, pg, B, dA, jx, aA, cz, q, J, eA, aT, ae, kl, oV, Y, aeS, r, lo, cl, t, ho, blC, aDv, ac, c, im, gT, vi, gx, Kd, uG, arh, cnD, jh, bS, jE, iJ, ad, hX, dP, F, oW, nJ, d, qt, dN, kD, cnE, hv, hp, aF, Z, bz, gk, pc, bE, CO, rH, cP, hE, EB, Cp); #c1(PAEP) c2(XP_011517049) c3(glycodelin isoform X2) c4(310522) c5( ) c6( ) c7(T, al, bB, gf, ci, aE, Co, K, cp, aW, fc, hl, g, cm, bwQ, y, AM, vA, cj, m, Cx, atx, xN, n, aj, et, qN, eW, aZv, h, Df, A, mR, aiB, aq, aGd, pm, op, dB, hL, pg, B, dA, jx, aA, cz, q, J, eA, aT, ae, kl, oV, Y, aeS, r, Io, cl, t, ho, blC, aDv, ac, c, im, gT, vi, gx, Kd, uG, arh, cnD, jh, bS, jE, iJ, ad, hX, dP, F, oW, nJ, d, qt, dN, kD, cnE, hv, hp, aF, Z, bz, gk, pc, bE, CO, rH, cP, hE, EB, Cp); #c1(PAEP) c2(XP_011517050) c3(glycodelin isoform X3) c4(310523, 310524) c5(310525, 310526, 310527, 310528, 310529, 310530, 310531, 310532, 310533, 310534, 310535, 310536) c6( ) c7(T, al, bB, gf, ci, aE, Co, K, cp, aW, fc, hl, g, cm, bwQ, y, AM, vA, cj, m, Cx, atx, xN, n, aj, et, qN, eW, aZv, h, Df, A, mR, aiB, aq, aGd, pm, op, dB, hL, pg, B, dA, jx, aA, cz, g, J, eA, aT, ae, kl, oV, Y, aeS, r, Io, cl, t, ho, blC, aDv, ac, c, im, gT, vi, gx, Kd, uG, arh, cnD, jh, bS, jE, iJ, ad, hX, dP, F, oW, nJ, d, gt, dN, kD, cnE, hv, hp, aF, Z, bz, gk, pc, bE, CO, rH, cP, hE, EB, Cp); #c1(PAEP) c2(XP_011517054) c3(glycodelin isoform X6) c4( ) c5(310537, 310538, 310539, 310540, 310541) c6( ) c7(T, al, bB, gf, ci, aE, Co, K, cp, aW, fc, hl, g, cm, bwQ, y, AM, vA, cj, m, Cx, atx, xN, n, aj, et, qN, eW, aZv, h, Df, A, mR, aiB, ag, aGd, pm, op, dB, hL, pg, B, dA, jx, aA, cz, g, J, eA, aT, ae, kl, oV, Y, aeS, r, Io, cl, t, ho, blC, aDv, ac, c, im, gT, vi, gx, Kd, uG, arh, cnD, jh, bS, jE, iJ, ad, hX, dP, F, oW, nJ, d, qt, dN, kD, cnE, hv, hp, aF, Z, bz, gk, pc, bE, CO, rH, cP, hE, EB, Cp); #c1(PAF1) c2(NP_001243755) c3(RNA polymerase II-associated factor 1 homolog isoform 2) c4(91654, 91655) c5(91656, 91657, 91658, 91659, 91660, 91661, 91662, 91663, 91664, 91665, 91666, 91667, 91668, 91669, 91670, 91671, 91672, 91673) c6( ) c7(T, aE, ajx, mE, aq, mL, B); #c1(PAF1) c2(NP_061961) c3(RNA polymerase II-associated factor 1 homolog isoform 1) c4(201325, 201326) c5(201327, 201328, 201329, 201330, 201331, 201332) c6( ) c7(T, aE, ajx, mE, aq, mL, B); #c1(PAFAH1B1) c2(NP_000421) c3(platelet-activating factor acetylhydrolase IB subunit alpha) c4(8789, 8790, 8791) c5(8792, 8793, 8794, 8795, 8796, 8797, 8798, 8799, 8800, 8801, 8802, 8803, 8804, 8805, 8806, 8807, 8808, 8809) c6( ) c7(bM, T, fR, Js, e, qx, fd, aeu, afz, Tz, aR, x, oB, aU, oP, pr, aW, FD, bw, uG, aiv, yd, WO, eM, iT, cj, uo, dW, k, dD, sQ, qy, n, oY, nA, abQ, hr, cc, h, By, cC, Nr, aix, po, pm, QK, UY, kz, EB, pg, ut, Jo, fZ, ol, j, aT, dz, jj, af, jf, iU, cnF, Y, bN, ck, afZ, bdU, bt, sY, aZ, ha, jh, eq, hF, oW, vw, IQ, bdS, pq, hG, et, gK, Mz, gl, kD, bz, eK, Nq, EW, pc, lf, iu); #c1(PAFAH1B2) c2(NP_001171675) c3(platelet-activating factor acetylhydrolase IB subunit beta isoform b) c4(71275, 71276) c5(71277, 71278, 71279, 71280, 71281, 71282) c6( ) c7(ame, fR); #c1(PAFAH1B2) c2(NP_001171676) c3(platelet-activating factor acetylhydrolase IB subunit beta isoform c) c4(71283) c5(71284, 71285, 71286, 71287, 71288, 71289) c6( ) c7(ame, fR); #c1(PAFAH1B2) c2(NP_001171677) c3(platelet-activating factor acetylhydrolase IB subunit beta isoform d) c4( ) c5(71290, 71291, 71292, 71293, 71294, 71295) c6( ) c7(ame, fR); #c1(PAFAH1B2) c2(NP_002563) c3(platelet-activating factor acetylhydrolase IB subunit beta isoform a) c4(129819) c5(129820, 129821, 129822, 129823, 129824, 129825) c6( ) c7(ame, fR); #c1(PAFAH2) c2(XP_011539830) c3(platelet-activating factor acetylhydrolase 2, cytoplasmic isoform X2) c4(338067, 338068, 338069) c5(338070, 338071, 338072, 338073) c6( ) c7(j); #c1(PAG1) c2(XP_011515867) c3(phosphoprotein associated with glycosphingolipid-enriched microdomains 1 isoform X1) c4(308840) c5(308841, 308842, 308843, 308844, 308845, 308846) c6( ) c7(T, ha, al, jh, it, bB, oY, fd, Kh, ci, C, nA, iI, hE, AO, q, ad, aCi, eA, av, aT, ask, ae, pi, avP, je, kS, aW, az, t, bz, all, ck, Qi, gk, nM, iM, eM, kB, bE, CZ, m, k, bt, xg, gD, L); #c1(PAGE1) c2(NP_003776) c3(P antigen family member 1) c4(140741) c5(140742, 140743, 140744, 140745, 140746, 140747) c6( ) c7(T, vT, Y, bX, ae, ad); #c1(PAGE4) c2(NP_008934) c3(P antigen family member 4) c4(169640) c5(169641, 169642, 169643, 169644, 169645, 169646, 169647, 169648, 169649, 169650, 169651, 169652, 169653) c6( ) c7(T, vT, Y, r, aA, n, ae, q, ad); #c1(PAGE5) c2(NP_001013453) c3(P antigen family member 5 isoform 2) c4( ) c5(25600, 25601, 25602, 25603, 25604, 25605, 25606, 25607, 25608, 25609) c6( ) c7(T, Y, bu); #c1(PAGE5) c2(NP_569734) c3(P antigen family member 5 isoform 1) c4(233907, 233908, 233909) c5(233910, 233911, 233912, 233913, 233914, 233915, 233916, 233917) c6( ) c7(T, Y, bu); #c1(PAGR1) c2(NP_078792) c3(PAXIP1-associated glutamate-rich protein 1) c4(215484) c5(215485, 215486, 215487, 215488, 215489, 215490) c6( ) c7(Bl, W, aW, qr, afs, aT, cj, Zn, bzm, aA, aF, K, m, C, h, t, bjQ, vO, azy, bH, bA); #c1(PAH) c2(NP_000268) c3(phenylalanine-4-hydroxylase) c4(5947, 5948) c5(5949, 5950, 5951, 5952, 5953, 5954, 5955, 5956, 5957, 5958, 5959, 5960, 5961, 5962, 5963, 5964, 5965, 5966, 5967, 5968, 5969, 5970, 5971, 5972, 5973, 5974, 5975, 5976, 5977, 5978, 5979, 5980, 5981, 5982, 5983, 5984, 5985, 5986, 5987, 5988, 5989, 5990, 5991, 5992, 5993, 5994, 5995, 5996, 5997, 5998, 5999, 6000, 6001, 6002, 6003, 6004, 6005, 6006, 6007, 6008, 6009, 6010, 6011, 6012, 6013, 6014, 6015, 6016, 6017, 6018, 6019, 6020, 6021, 6022, 6023, 6024, 6025, 6026, 6027, 6028, 6029, 6030, 6031, 6032, 6033, 6034, 6035, 6036, 6037, 6038, 6039, 6040, 6041, 6042, 6043, 6044) c6(6045, 6046, 6047) c7(ID, bM, T, hl, AL, ht, bB, acU, qj, nA, pM, cnH, ad, BY, HE, b, aji, aT, Ps, jy, dL, K, hu, he, eL, rL, ao, ly, aW, oV, zS, dq, aq, HL, zZ, bz, dr, lx, bN, mO, cnI, eM, Kv, bE, pP, cnG, ei, i, it, B, jr, pC); #c1(PAH) c2(XP_011536724) c3(phenylalanine-4-hydroxylase isoform X1) c4(334346) c5(334347, 334348, 334349, 334350, 334351, 334352, 334353, 334354, 334355, 334356, 334357, 334358, 334359, 334360, 334361, 334362, 334363, 334364) c6(334365, 334366, 334367, 334368) c7(lD, bM, T, hI, AL, ht, bB, acU, qj, nA, pM, cnH, ad, BY, HF, b, aji, aT, Ps, jy, dL, K, hu, he, eL, rL, ao, ly, aW, oV, zS, dq, aq, HL, zZ, bz, dr, lx, bN, mO, cnI, eM, Kv, bE, pP, cnG, ei, i, it, B, jr, pC); #c1(PAICS) c2(NP_001072992) c3(multifunctional protein ADE2 isoform 2) c4(35516) c5(35517, 35518, 35519, 35520, 35521, 35522, 35523, 35524, 35525, 35526) c6( ) c7(adW, T, K, ad, PD); #c1(PAICS) c2(NP_001072993) c3(multifunctional protein ADE2 isoform 1) c4(35527) c5(35528, 35529, 35530, 35531, 35532, 35533) c6( ) c7(adW, T, K, ad, PD); #c1(PAIP1) c2(NP_006442) c3(polyadenylate-binding protein-interacting protein 1 isoform 1) c4(165258, 165259) c5(165260, 165261, 165262, 165263, 165264, 165265, 165266) c6( ) c7(j); #c1(PAIP1) c2(NP_877590) c3(polyadenylate-binding protein-interacting protein 1 isoform 2) c4(256917, 256918, 256919) c5(256920, 256921, 256922, 256923, 256924, 256925, 256926, 256927, 256928, 256929, 256930, 256931, 256932, 256933) c6( ) c7(j); #c1(PAIP1) c2(NP_899152) c3(polyadenylate-binding protein-interacting protein 1 isoform 3) c4( ) c5(257961, 257962, 257963, 257964, 257965, 257966, 257967, 257968, 257969, 257970, 257971, 257972, 257973, 257974, 257975, 257976, 257977, 257978, 257979, 257980) c6( ) c7(j); #c1(PAIP1) c2(XP_011512240) c3(polyadenylate-binding protein-interacting protein 1 isoform X2) c4(302814, 302815, 302816) c5(302817) c6( ) c7(j); #c1(PAIP2) c2(XP_011541730) c3(polyadenylate-binding protein-interacting protein 2 isoform X1) c4(340315, 340316) c5(340317, 340318, 340319, 340320, 340321, 340322, 340323, 340324, 340325, 340326, 340327, 340328, 340329, 340330, 340331, 340332, 340333, 340334, 340335, 340336) c6( ) c7(bw, lo, ci, K); #c1(PAK1) c2(NP_002567) c3(serine/threonine-protein kinase PAK 1 isoform 2) c4(129826, 129827, 129828) c5(129829, 129830, 129831, 129832, 129833, 129834, 129835, 129836, 129837, 129838, 129839, 129840, 129841, 129842, 129843, 129844, 129845, 129846, 129847, 129848, 129849, 129850, 129851, 129852, 129853, 129854, 129855, 129856, 129857, 129858, 129859, 129860, 129861, 129862, 129863, 129864, 129865) c6( ) c7(T, afa, dA, fR, yk, jh, aA, bB, n, fr, ci, nA, q, ad, hX, dP, bv, hd, aoc, Ot, aT, h, cy, By, hP, K, an, wt, nJ, ae, af, eu, WZ, d, ZH, s, CN, aW, Y, ff, r, aq, aF, en, g, t, f, bz, es, kT, cT, Ew, eM, nB, bE, iA, dO, U, aSp, mf, m, bnI, B, y); #c1(PAK1) c2(XP_011543386) c3(serine/threonine-protein kinase PAK 1 isoform X1) c4(342256, 342257, 342258, 342259, 342260) c5(342261, 342262, 342263, 342264, 342265, 342266, 342267, 342268, 342269, 342270, 342271) c6( ) c7(T, afa, dA, fR, yk, jh, aA, bB, n, fr, ci, nA, q, ad, hX, dP, bv, hd, aoc, Ot, aT, h, cy, By, hP, K, an, wt, nJ, ae, af, eu, WZ, d, ZH, s, CN, aW, Y, ff, r, aq, aF, en, g, t, f, bz, es, kT, cT, Ew, eM, nB, bE, iA, dO, U, aSp, mf, m, bnl, B, y); #c1(PAK1IP1) c2(NP_060376) c3(p21-activated protein kinase-interacting protein 1) c4(195688) c5(195689, 195690, 195691, 195692, 195693, 195694) c6( ) c7(K); #c1(PAK2) c2(NP_002568) c3(serine/threonine-protein kinase PAK 2) c4(129866) c5(129867, 129868, 129869, 129870, 129871, 129872) c6( ) c7(iQ, ZH, CN, aoc, qt, aW, hl, aT, aA, h, Io, K, m, wt, t, Pr, af, ad); #c1(PAK3) c2(NP_001121639) c3(serine/threonine-protein kinase PAK 3 isoform a) c4(45954) c5(45955, 45956, 45957, 45958, 45959, 45960, 45961, 45962, 45963, 45964, 45965, 45966, 45967, 45968) c6( ) c7(T, dD, fM, ea, aw, Kk, aoE, ha, aA, eq, nA, g, ad, cnJ, x, pX, nd, aT, h, By, dL, hl, K, jj, ae, Lu, je, kS, Jl, aW, Y, ff, eZ, r, nf, gl, Ej, en, cl, cm, bz, op, Hp, LB, iM, hP, eM, afZ, vA, U, cj, at, k, xg); #c1(PAK3) c2(NP_001121640) c3(serine/threonine-protein kinase PAK 3 isoform b) c4(45969, 45970) c5(45971, 45972, 45973, 45974, 45975, 45976, 45977, 45978, 45979, 45980, 45981, 45982, 45983, 45984, 45985, 45986) c6( ) c7(T, dD, fM, ea, aw, Kk, aoE, ha, aA, eq, nA, g, ad, cnJ, x, pX, nd, aT, h, By, dL, bl, K, jj, ae, Lu, je, kS, Jl, aW, Y, ff, eZ, r, nf, gl, Ej, en, cl, cm, bz, op, Hp, LB, iM, bP, eM, afZ, vA, U, cj, at, k, xg); #c1(PAK3) c2(NP_001121644) c3(serine/threonine-protein kinase PAK 3 isoform c) c4(45987) c5(45988, 45989, 45990, 45991, 45992, 45993, 45994, 45995, 45996, 45997) c6( ) c7(T, dD, fM, ea, aw, Kk, aoE, ha, aA, eq, nA, q, ad, cnJ, x, pX, nd, aT, h, By, dL, bI, K, jj, ae, Lu, je, kS, Jl, aW, Y, ff, eZ, r, nf, gl, Ej, en, cl, cm, bz, op, Hp, LB, iM, bP, eM, afZ, vA, U, cj, at, k, xg); #c1(PAK3) c2(NP_001121645) c3(serine/threonine-protein kinase PAK 3 isoform d) c4(45998) c5(45999, 46000, 46001, 46002, 46003, 46004, 46005, 46006, 46007, 46008) c6( ) c7(T, dD, fM, ea, aw, Kk, aoE, ha, aA, eg, nA, q, ad, cnJ, x, pX, nd, aT, h, By, dL, bI, K, jj, ae, Lu, je, kS, Jl, aW, Y, ff, eZ, r, nf, gl, Ej, en, cl, cm, bz, op, Hp, LB, iM, bP, eM, afZ, vA, U, cj, at, k, xg); #c1(PAK4) c2(NP_001014832) c3(serine/threonine-protein kinase PAK 4 isoform 1) c4(26007, 26008, 26009) c5(26010, 26011, 26012, 26013, 26014, 26015, 26016, 26017, 26018, 26019, 26020, 26021, 26022, 26023, 26024, 26025, 26026, 26027, 26028, 26029, 26030, 26031, 26032, 26033) c6( ) c7(T, aC, ZH, CN, aoc, bE, ff, rA, aA, bB, aF, ci, K, an, en, eA, nJ, ae, B, ad); #c1(PAK4) c2(NP_001014834) c3(serine/threonine-protein kinase PAK 4 isoform 2) c4(26034) c5(26035, 26036, 26037, 26038, 26039, 26040, 26041, 26042, 26043, 26044, 26045, 26046, 26047, 26048, 26049, 26050) c6( ) c7(T, aC, ZH, CN, aoc, bE, ff, rA, aA, bB, aF, ci, K, an, en, eA, nJ, ae, B, ad); #c1(PAK6) c2(NP_001263646) c3(serine/threonine-protein kinase PAK 6 isoform 1) c4(97323) c5(97324, 97325, 97326, 97327, 97328, 97329, 97330, 97331, 97332, 97333, 97334, 97335, 97336, 97337, 97338, 97339, 97340, 97341) c6( ) c7(T, aW, aT, at, dL, K, ae, ad); #c1(PAK6) c2(NP_001263647) c3(serine/threonine-protein kinase PAK 6 isoform 2) c4(97342, 97343, 97344, 97345, 97346, 97347) c5(97348, 97349, 97350, 97351, 97352, 97353, 97354, 97355, 97356, 97357, 97358, 97359, 97360, 97361, 97362, 97363, 97364, 97365, 97366, 97367, 97368, 97369, 97370, 97371, 97372, 97373, 97374, 97375, 97376, 97377, 97378, 97379, 97380, 97381, 97382, 97383) c6( ) c7(T, aW, aT, at, dL, K, ae, ad); #c1(PAK7) c2(NP_065074) c3(serine/threonine-protein kinase PAK 7) c4(203647, 203648) c5(203649, 203650, 203651, 203652, 203653, 203654, 203655, 203656, 203657, 203658, 203659, 203660, 203661, 203662, 203663, 203664, 203665, 203666, 203667, 203668) c6( ) c7(T, W, aW, aT, aA, gI, aF, fu, an, dw, q); #c1(PALB2) c2(NP_078951) c3(partner and localizer of BRCA2) c4(216235) c5(216236, 216237, 216238, 216239, 216240, 216241) c6( ) c7(T, os, aC, cz, aj, oZ, j, ad, er, aE, oW, aT, qv, bK, adV, ae, qw, Ub, aW, Y, g, zE, t, ajj, es, kP, cnL, afd, cnK, m, MG, y, aed); #c1(PALD1) c2(NP_055246) c3(paladin) c4(180018, 180019, 180020) c5(180021, 180022, 180023, 180024, 180025, 180026, 180027, 180028, 180029, 180030, 180031, 180032, 180033, 180034, 180035, 180036, 180037, 180038) c6( ) c7(T, dD, aC, eJ, aE, bE, aW, ea, oe, aT, bB, v, eq, kp, g, X); #c1(PALLD) c2(NP_001159580) c3(palladin isoform 1) c4(64340) c5(64341, 64342, 64343, 64344, 64345) c6( ) c7(T, dD, aC, ea, e, aw, bB, j, eq, eJ, aE, PN, aT, K, cnM, eu, aW, kp, g, ac, bE, pw, ei, X); #c1(PALLD) c2(NP_001159581) c3(palladin isoform 3) c4(64346) c5( ) c6( ) c7(T, dD, aC, ea, e, aw, bB, j, eq, eJ, aE, pN, aT, K, cnM, eu, aW, kp, g, ac, bE, pw, ei, X); #c1(PALLD) c2(NP_001159582) c3(palladin isoform 4) c4(64347) c5(64348, 64349, 64350, 64351, 64352, 64353, 64354, 64355, 64356, 64357, 64358, 64359) c6( ) c7(T, dD, aC, ea, e, aw, bB, j, eq, eJ, aE, pN, aT, K, cnM, eu, aW, kp, g, ac, bE, pw, ei, X); #c1(PALLD) c2(NP_057165) c3(palladin isoform 2) c4(189261, 189262) c5(189263, 189264, 189265, 189266, 189267, 189268, 189269, 189270, 189271, 189272) c6( ) c7(T, dD, aC, ea, e, aw, bB, j, eq, eJ, aE, pN, aT, K, cnM, eu, aW, kp, g, ac, bE, pw, ei, X); #c1(PALLD) c2(XP_011530070) c3(palladin isoform X1) c4( ) c5(325882, 325883, 325884, 325885, 325886) c6( ) c7(T, dD, aC, ea, e, aw, bB, j, eq, eJ, aE, pN, aT, K, cnM, eu, aW, kp, g, ac, bE, pw, ei, X); #c1(PALLD) c2(XP_011530071) c3(palladin isoform X2) c4(325887) c5(325888, 325889, 325890, 325891, 325892, 325893, 325894) c6( ) c7(T, dD, aC, ea, e, aw, bB, j, eq, eJ, aE, pN, aT, K, cnM, eu, aW, kp, g, ac, bE, pw, ei, X); #c1(PALLD) c2(XP_011530072) c3(palladin isoform X3) c4(325895) c5( ) c6( ) c7(T, dD, aC, ea, e, aw, bB, j, eq, eJ, aE, pN, aT, K, cnM, eu, aW, kp, g, ac, bE, pw, ei, X); #c1(PALLD) c2(XP_011530074) c3(palladin isoform X6) c4(325896) c5( ) c6( ) c7(T, dD, aC, ea, e, aw, bB, j, eq, eJ, aE, pN, aT, K, cnM, eu, aW, kp, g, ac, bE, pw, ei, X); #c1(PALLD) c2(XP_011530075) c3(palladin isoform X7) c4(325897) c5(325898) c6( ) c7(T, dD, aC, ea, e, aw, bB, j, eq, eJ, aE, pN, aT, K, cnM, eu, aW, kp, g, ac, bE, pw, ei, X); #c1(PALLD) c2(XP_011530076) c3(palladin isoform X8) c4( ) c5(325899, 325900, 325901, 325902, 325903, 325904, 325905, 325906, 325907, 325908, 325909, 325910, 325911, 325912) c6( ) c7(T, dD, aC, ea, e, aw, bB, j, eq, eJ, aE, pN, aT, K, cnM, eu, aW, kp, g, ac, bE, pw, ei, X); #c1(PALM2-AKAP2) c2(NP_009134) c3(PALM2-AKAP2 protein isoform 1) c4(171008) c5(171009, 171010, 171011, 171012, 171013, 171014, 171015, 171016, 171017, 171018) c6( ) c7(yn); #c1(PALM2-AKAP2) c2(NP_671492) c3(PALM2-AKAP2 protein isoform 2) c4(242021, 242022) c5(242023, 242024, 242025, 242026, 242027, 242028, 242029, 242030, 242031, 242032, 242033, 242034, 242035, 242036, 242037, 242038) c6( ) c7(yn); #c1(PAM) c2(NP_620177) c3(peptidyl-glycine alpha-amidating monooxygenase isoform d preproprotein) c4(237485) c5(237486, 237487, 237488, 237489, 237490, 237491) c6( ) c7(bL, aZy, n, dG, v, bjQ, eA, Jm, bv, av, aGm, ep, aT, aln, Eg, ae, bmo, uQ, hM, d, mR, aW, Y, fO, aZw, g, cm, bz, hq, ck, eM, dB, hR, ym, gT); #c1(PAM) c2(XP_006714695) c3(peptidyl-glycine alpha-amidating monooxygenase isoform X1) c4(287997) c5(287998, 287999, 288000, 288001, 288002, 288003) c6( ) c7(bL, aZy, n, dG, v, bjQ, eA, Jm, bv, av, aGm, ep, aT, aln, Fg, ae, bmo, uQ, hM, d, mR, aW, Y, fO, aZw, g, cm, bz, hq, ck, eM, dB, hR, ym, gT); #c1(PAM) c2(XP_006714697) c3(peptidyl-glycine alpha-amidating monooxygenase isoform X4) c4(288004) c5(288005, 288006, 288007, 288008, 288009, 288010) c6( ) c7(bL, aZy, n, dG, v, bjQ, eA, Jm, bv, av, aGm, ep, aT, aln, Fg, ae, bmo, uQ, hM, d, mR, aW, Y, fO, aZw, g, cm, bz, hq, ck, eM, dB, hR, ym, gT); #c1(PAM) c2(XP_006714699) c3(peptidyl-glycine alpha-amidating monooxygenase isoform XIO) c4(288011) c5(288012, 288013, 288014, 288015, 288016, 288017) c6( ) c7(bL, aZy, n, dG, v, bjQ, eA, Jm, bv, av, aGm, ep, aT, aln, Fg, ae, bmo, uQ, hM, d, mR, aW, Y, fO, aZw, g, cm, bz, hq, ck, eM, dB, hR, ym, gT); #c1(PAM) c2(XP_006714701) c3(peptidyl-glycine alpha-amidating monooxygenase isoform X2) c4(288018, 288019) c5(288020, 288021, 288022, 288023, 288024, 288025) c6( ) c7(bL, aZy, n, dG, v, bjQ, eA, Jm, bv, av, aGm, ep, aT, aln, Fg, ae, bmo, uQ, hM, d, mR, aW, Y, fO, aZw, g, cm, bz, hq, ck, eM, dB, hR, ym, gT); #c1(PAM) c2(XP_006714703) c3(peptidyl-glycine alpha-amidating monooxygenase isoform X3) c4(288026) c5(288027, 288028, 288029, 288030, 288031, 288032) c6( ) c7(bL, aZy, n, dG, v, bjQ, eA, Jm, bv, av, aGm, ep, aT, aln, Fg, ae, bmo, uQ, hM, d, mR, aW, Y, fO, aZw, g, cm, bz, hq, ck, eM, dB, hR, ym, gT); #c1(PAM) c2(XP_011541721) c3(peptidyl-glycine alpha-amidating monooxygenase isoform X5) c4( ) c5(340278, 340279, 340280, 340281, 340282, 340283, 340284) c6( ) c7(bL, aZy, n, dG, v, bjQ, eA, Jm, bv, av, aGm, ep, aT, aln, Fg, ae, bmo, uQ, hM, d, mR, aW, Y, fO, aZw, g, cm, bz, hq, ck, eM, dB, hR, ym, gT); #c1(PAM) c2(XP_011541723) c3(peptidyl-glycine alpha-amidating monooxygenase isoform X7) c4(340285) c5( ) c6( ) c7(bL, aZy, n, dG, v, bjQ, eA, Jm, bv, av, aGm, ep, aT, aln, Fg, ae, bmo, uQ, hM, d, mR, aW, Y, fO, aZw, g, cm, bz, hq, ck, eM, dB, hR, ym, gT); #c1(PAM) c2(XP_011541725) c3(peptidyl-glycine alpha-amidating monooxygenase isoform X9) c4(340286, 340287) c5(340288, 340289, 340290, 340291, 340292, 340293) c6( ) c7(bL, aZy, n, dG, v, bjQ, eA, Jm, bv, av, aGm, ep, aT, aln, Fg, ae, bmo, uQ, hM, d, mR, aW, Y, fO, aZw, g, cm, bz, hq, ck, eM, dB, hR, ym, gT); #c1(PAM) c2(XP_011541727) c3(peptidyl-glycine alpha-amidating monooxygenase isoform X12) c4(340294, 340295, 340296, 340297) c5( ) c6( ) c7(bL, aZy, n, dG, v, bjQ, eA, Jm, bv, av, aGm, ep, aT, aln, Fg, ae, bmo, uQ, hM, d, mR, aW, Y, fO, aZw, g, cm, bz, hq, ck, eM, dB, hR, ym, gT); #c1(PAM) c2(XP_011541729) c3(peptidyl-glycine alpha-amidating monooxygenase isoform X15) c4( ) c5(340298, 340299, 340300, 340301, 340302, 340303, 340304, 340305, 340306, 340307, 340308, 340309, 340310, 340311, 340312, 340313, 340314) c6( ) c7(bL, aZy, n, dG, v, bjQ, eA, Jm, bv, av, aGm, ep, aT, aln, Fg, ae, bmo, uQ, hM, d, mR, aW, Y, fO, aZw, g, cm, bz, hq, ck, eM, dB, hR, ym, gT); #c1(PAM16) c2(NP_057153) c3(mitochondrial import inner membrane translocase subunit TIM16) c4(189173) c5(189174, 189175, 189176, 189177, 189178, 189179) c6( ) c7(OH, yo, ad); #c1(PAMR1) c2(NP_001001991) c3(inactive serine protease PAMR1 isoform b precursor) c4(19279) c5(19280, 19281, 19282, 19283, 19284, 19285, 19286, 19287) c6(19288, 19289) c7(et, xs, aA, nf, uY, dz, aF); #c1(PAMR1) c2(NP_001269605) c3(inactive serine protease PAMR1 isoform d precursor) c4(102176) c5(102177, 102178, 102179, 102180, 102181, 102182, 102183, 102184) c6(102185, 102186) c7(et, xs, aA, nf, uY, dz, aF); #c1(PAMR1) c2(NP_056245) c3(inactive serine protease PAMR1 isoform a precursor) c4(186694) c5(186695, 186696, 186697, 186698, 186699, 186700, 186701, 186702) c6(186703, 186704) c7(et, xs, aA, nf, uY, dz, aF); #c1(PAN2) c2(NP_001120932) c3(PAB-dependent poly(A)-specific ribonuclease subunit PAN2 isoform 1) c4(44952) c5(44953, 44954, 44955, 44956, 44957, 44958, 44959, 44960, 44961, 44962) c6( ) c7(T, q, r); #c1(PAN2) c2(NP_001159751) c3(PAB-dependent poly(A)-specific ribonuclease subunit PAN2 isoform 2) c4(64706) c5(64707, 64708, 64709, 64710, 64711, 64712) c6( ) c7(T, q, r); #c1(PAN2) c2(NP_055686) c3(PAB-dependent poly(A)-specific ribonuclease subunit PAN2 isoform 3) c4(182768) c5(182769, 182770, 182771, 182772, 182773, 182774) c6( ) c7(T, q, r); #c1(PAN3) c2(NP_787050) c3(PAB-dependent polyspecific ribonuclease subunit PAN3) c4(252012) c5(252013, 252014, 252015, 252016, 252017, 252018) c6( ) c7(aE, ac); #c1(PAN3) c2(XP_005266390) c3(PAB-dependent poly(A)-specific ribonuclease subunit PAN3 isoform X2) c4(279966) c5(279967, 279968, 279969, 279970, 279971, 279972) c6( ) c7(aE, ac); #c1(PAN3) c2(XP_005266391) c3(PAB-dependent poly(A)-specific ribonuclease subunit PAN3 isoform X7) c4(279973) c5(279974, 279975, 279976, 279977, 279978, 279979) c6( ) c7(aE, ac); #c1(PANK1) c2(NP_612189) c3(pantothenate kinase 1 isoform gamma) c4(236128) c5(236129, 236130, 236131, 236132, 236133, 236134) c6( ) c7(Pw, axa, K, U); #c1(PANK1) c2(NP_683878) c3(pantothenate kinase 1 isoform alpha) c4(242616, 242617, 242618) c5(242619, 242620, 242621, 242622, 242623, 242624, 242625, 242626, 242627, 242628, 242629, 242630) c6( ) c7(Pw, axa, K, U); #c1(PANK1) c2(NP_683879) c3(pantothenate kinase 1 isoform beta) c4(242631) c5(242632, 242633, 242634, 242635, 242636, 242637, 242638, 242639, 242640, 242641, 242642, 242643) c6( ) c7(Pw, axa, K, U); #c1(PANK2) c2(NP_705902) c3(pantothenate kinase 2, mitochondrial isoform 1 preproprotein) c4(246410, 246411, 246412) c5(246413, 246414, 246415, 246416, 246417, 246418) c6( ) c7(axa, PW, Pv, Pw, aPR, HG, U, aAm, aU, K, xw, Pu); #c1(PANK2) c2(NP_705904) c3(pantothenate kinase 2, mitochondrial isoform 2) c4( ) c5(246419, 246420, 246421, 246422, 246423) c6( ) c7(axa, PW, Pv, Pw, aPR, HC, U, aAm, aU, K, xw, Pu); #c1(PANK2) c2(XP_005260892) c3(pantothenate kinase 2, mitochondrial isoform X3) c4( ) c5(276960, 276961, 276962, 276963, 276964, 276965, 276966) c6( ) c7(axa, PW, Pv, Pw, aPR, HC, U, aAm, aU, K, xw, Pu); #c1(PANX1) c2(NP_056183) c3(pannexin-1) c4(186178, 186179) c5(186180, 186181, 186182, 186183, 186184, 186185, 186186, 186187, 186188, 186189, 186190, 186191) c6( ) c7(Y, h, fe, ji, iV, t, eA); #c1(PANX2) c2(NP_443071) c3(pannexin-2 isoform 1) c4(229228, 229229) c5(229230, 229231, 229232, 229233, 229234, 229235, 229236, 229237, 229238, 229239, 229240, 229241) c6( ) c7(ac, eA, rH); #c1(PAOX) c2(NP_690875) c3(peroxisomal N(1)-acetyl-spermine/spermidine oxidase isoform 1) c4(245034, 245035, 245036, 245037, 245038) c5(245039, 245040, 245041, 245042, 245043, 245044, 245045, 245046, 245047, 245048, 245049, 245050, 245051, 245052, 245053, 245054, 245055, 245056, 245057, 245058, 245059, 245060) c6( ) c7(ae, ac, aW, aT, ao, g, bz, ad); #c1(PAOX) c2(NP_997010) c3(peroxisomal N(1)-acetyl-spermine/spermidine oxidase isoform 2) c4(264956, 264957) c5(264958, 264959, 264960, 264961, 264962, 264963, 264964, 264965, 264966, 264967, 264968, 264969, 264970, 264871, 264972, 264973, 264974) c6( ) c7(ae, ac, aW, aT, ao, g, bz, ad); #c1(PAOX) c2(NP_997011) c3(peroxisomal N(1)-acetyl-spermine/spermidine oxidase isoform 4) c4(264975) c5(264976, 264977, 264978, 264979, 264980, 264981) c6( ) c7(ae, ac, aW, aT, ao, g, bz, ad); #c1(PAPD7) c2(XP_005248291) c3(non-canonical poly(A) RNA polymerase PAPD7 isoform X2) c4(268292) c5(268293, 268294, 268295, 268296, 268297, 268298, 268299) c6( ) c7(if, Be, r, bK, K, qN, bz, q); #c1(PAPD7) c2(XP_011512249) c3(non-canonical poly(A) RNA polymerase PAPD7 isoform X1) c4(302823) c5(302824, 302825, 302826, 302827, 302828) c6( ) c7(if, Be, r, bK, K, qN, bz, q); #c1(PAPL) c2(NP_001004318) c3(iron/zinc purple acid phosphatase-like protein precursor) c4(20566) c5(20567, 20568, 20569, 20570, 20571, 20572, 20573, 20574) c6(20575, 20576) c7(bL, B, vi); #c1(PAPOLA) c2(NP_001238935) c3(poly(A) polymerase alpha isoform 2) c4(88048) c5(88049, 88050, 88051, 88052, 88053, 88054) c6( ) c7(ck, d, dA, iW, r, wq, dT, aj, v, zG, uF, zI, cd, ao); #c1(PAPOLA) c2(NP_001280556) c3(poly(A) polymerase alpha isoform 4) c4( ) c5(111523, 111524) c6( ) c7(ck, d, dA, iW, r, wq, dT, aj, v, zG, uF, zI, cd, ao); #c1(PAPOLA) c2(NP_116021) c3(poly(A) polymerase alpha isoform 1) c4(225232) c5(225233, 225234, 225235, 225236, 225237, 225238) c6( ) c7(ck, d, dA, iW, r, wq, dT, aj, v, zG, uF, zI, cd, ao); #c1(PAPOLA) c2(XP_005267338) c3(poly(A) polymerase alpha isoform X1) c4(280905) c5(280906, 280907, 280908, 280909, 280910, 280911) c6( ) c7(ck, d, dA, iW, r, wq, dT, aj, v, zG, uF, zI, cd, ao); #c1(PAPOLG) c2(NP_075045) c3(poly(A) polymerase gamma) c4(213550) c5(213551, 213552, 213553, 213554, 213555, 213556) c6( ) c7(uF, eV, T, eX, Y); #c1(PAPOLG) c2(XP_005264557) c3(poly(A) polymerase gamma isoform X1) c4(279047, 279048) c5(279049, 279050, 279051, 279052, 279053, 279054, 279055, 279056, 279057, 279058, 279059, 279060) c6( ) c7(uF, eV, T, eX, Y); #c1(PAPPA) c2(NP_002572) c3(pappalysin-1 preproprotein) c4(129873, 129874, 129875) c5(129876, 129877, 129878, 129879, 129880, 129881, 129882, 129883, 129884, 129885, 129886, 129887, 129888, 129889, 129890, 129891, 129892, 129893) c6( ) c7(gx, T, dD, eR, ea, aw, eh, n, j, eq, aY, cd, dP, aHF, Na, vJ, rS, aT, Nc, hH, Df, hm, cY, nO, aW, ace, eZ, fe, t, f, bz, op, sn, vA, gZ, aNL, cS, m, ER); #c1(PAPPA2) c2(NP_068755) c3(pappalysin-2 isoform 2 precursor) c4(210184) c5(210185, 210186, 210187, 210188, 210189, 210190, 210191, 210192) c6(210193, 210194) c7(T, jv, eb); #c1(PAPPA2) c2(XP_011508160) c3(pappalysin-2 isoform X1) c4(298654) c5(298655, 298656, 298657, 298658, 298659, 298660, 298661, 298662) c6(298663, 298664) c7(T, jv, eb); #c1(PAPPA2) c2(XP_011508161) c3(pappalysin-2 isoform X2) c4( ) c5(298665, 298666) c6( ) c7(T, jv, eb); #c1(PAPSS1) c2(NP_005434) c3(bifunctional 3′-phosphoadenosine 5′-phosphosulfate synthase 1) c4(156144) c5(156145, 156146, 156147, 156148, 156149, 156150) c6( ) c7(gk, T, ac, al, aq, j, B, hX); #c1(PAPSS2) c2(NP_001015880) c3(bifunctional 3′-phosphoadenosine 5′-phosphosulfate synthase 2 isoform b) c4(26214, 26215) c5(26216, 26217, 26218, 26219, 26220, 26221, 26222, 26223, 26224, 26225, 26226, 26227) c6( ) c7(vK, aZ, ln, cnR, cnP, cnN, nA, cnQ, rv, cnO); #c1(PAPSS2) c2(NP_004661) c3(bifunctional 3′-phosphoadenosine 5′-phosphosulfate synthase 2 isoform a) c4(148611, 148612) c5(148613, 148614, 148615, 148616, 148617, 148618, 148619, 148620, 148621, 148622, 148623, 148624) c6( ) c7(vK, aZ, ln, cnR, cnP, cnN, nA, cnQ, rv, cnO); #c1(PAQR3) c2(NP_001035292) c3(progestin and adipoQ receptor family member 3) c4(32748) c5(32749, 32750, 32751, 32752, 32753, 32754, 32755, 32756, 32757) c6( ) c7(bF, yk, Y, fc, r, v, cP, q); #c1(PAQR3) c2(XP_006714169) c3(progestin and adipoQ receptor family member 3 isoform X1) c4(287622) c5(287623, 287624, 287625, 287626, 287627, 287628, 287629) c6( ) c7(bF, yk, Y, fc, r, v, cP, q); #c1(PAQR3) c2(XP_006714170) c3(progestin and adipoQ receptor family member 3 isoform X2) c4(287630) c5(287631, 287632, 287633, 287634, 287635) c6( ) c7(bF, yk, Y, fc, r, v, cP, q); #c1(PAQR5) c2(NP_060175) c3(membrane progestin receptor gamma) c4(194619) c5(194620, 194621, 194622, 194623, 194624, 194625, 194626, 194627, 194628, 194629, 194630, 194631, 194632, 194633) c6( ) c7(he, dY); #c1(PAQR7) c2(XP_011539164) c3(membrane progestin receptor alpha isoform X1) c4(337271) c5(337272, 337273, 337274, 337275, 337276, 337277) c6( ) c7(dD, ea, eq, ae, dr, ad); #c1(PARD3) c2(NP_001171714) c3(partitioning defective 3 homolog isoform 2) c4(71396) c5(71397, 71398, 71399, 71400, 71401, 71402) c6( ) c7(sc, T, fG, yk, iW, fr, ci, ad, bv, aT, hn, wb, ae, d, s, Y, ff, cr, hp, en, iV, f, LB, sS, Dy, vA, hE, it, B); #c1(PARD3) c2(NP_001171715) c3(partitioning defective 3 homolog isoform 3) c4(71403) c5(71404, 71405, 71406, 71407, 71408, 71409) c6( ) c7(sc, T, fG, yk, iW, fr, ci, ad, bv, aT, hn, wb, ae, d, s, Y, ff, cr, hp, en, iV, f, LB, sS, Dy, vA, hE, it, B); #c1(PARD3) c2(NP_001171716) c3(partitioning defective 3 homolog isoform 4) c4(71410) c5(71411, 71412, 71413, 71414, 71415, 71416) c6( ) c7(sc, T, fG, yk, iW, fr, ci, ad, bv, aT, hn, wb, ae, d, s, Y, ff, cr, hp, en, iV, f, LB, sS, Dy, vA, hE, it, B); #c1(PARD3) c2(NP_001171717) c3(partitioning defective 3 homolog isoform 5) c4(71417) c5(71418, 71419, 71420, 71421, 71422, 71423) c6( ) c7(sc, T, fG, yk, iW, fr, ci, ad, bv, aT, hn, wb, ae, d, s, Y, ff, cr, hp, en, iV, f, LB, sS, Dy, vA, hE, it, B); #c1(PARD3) c2(NP_001171719) c3(partitioning defective 3 homolog isoform 7) c4(71424) c5(71425, 71426, 71427, 71428, 71429, 71430) c6( ) c7(sc, T, fG, yk, iW, fr, ci, ad, bv, aT, hn, wb, ae, d, s, Y, ff, cr, hp, en, iV, f, LB, sS, Dy, vA, hE, it, B); #c1(PARD3) c2(NP_001171720) c3(partitioning defective 3 homolog isoform 8) c4(71431) c5(71432, 71433, 71434, 71435, 71436, 71437) c6( ) c7(sc, T, fG, yk, iW, fr, ci, ad, bv, aT, hn, wb, ae, d, s, Y, ff, cr, hp, en, iV, f, LB, sS, Dy, vA, hE, it, B); #c1(PARD3) c2(NP_001171721) c3(partitioning defective 3 homolog isoform 9) c4(71438) c5(71439, 71440, 71441, 71442, 71443, 71444) c6( ) c7(sc, T, fG, yk, iW, fr, ci, ad, bv, aT, hn, wb, ae, d, s, Y, ff, cr, hp, en, iV, f, LB, sS, Dy, vA, hE, it, B); #c1(PARD3) c2(NP_001171723) c3(partitioning defective 3 homolog isoform 11) c4(71445) c5(71446, 71447, 71448, 71449, 71450, 71451) c6( ) c7(sc, T, fG, yk, iW, fr, ci, ad, bv, aT, hn, wb, ae, d, s, Y, ff, cr, hp, en, iV, f, LB, sS, Dy, vA, hE, it, B); #c1(PARD3) c2(NP_062565) c3(partitioning defective 3 homolog isoform 1) c4(201998) c5(201999, 202000, 202001, 202002, 202003, 202004) c6( ) c7(sc, T, fG, yk, iW, fr, ci, ad, bv, aT, hn, wb, ae, d, s, Y, ff, cr, hp, en, iV, f, LB, sS, Dy, vA, hE, it, B); #c1(PARD3) c2(XP_005252588) c3(partitioning defective 3 homolog isoform X9) c4(271889) c5(271890, 271891, 271892, 271893, 271894, 271895) c6( ) c7(sc, T, fG, yk, iW, fr, ci, ad, bv, aT, hn, wb, ae, d, s, Y, ff, cr, hp, en, iV, f, LB, sS, Dy, vA, hE, it, B); #c1(PARD3) c2(XP_005252589) c3(partitioning defective 3 homolog isoform X12) c4(271896) c5(271897, 271898, 271899, 271900, 271901, 271902) c6( ) c7(sc, T, fG, yk, iW, fr, ci, ad, bv, aT, hn, wb, ae, d, s, Y, ff, cr, hp, en, iV, f, LB, sS, Dy, vA, hE, it, B); #c1(PARD3) c2(XP_005252592) c3(partitioning defective 3 homolog isoform X21) c4(271903) c5(271904, 271905, 271906, 271907, 271908, 271909) c6( ) c7(sc, T, fG, yk, iW, fr, ci, ad, bv, aT, hn, wb, ae, d, s, Y, ff, cr, hp, en, iV, f, LB, sS, Dy, vA, hE, it, B); #c1(PARD3) c2(XP_005252593) c3(partitioning defective 3 homolog isoform X23) c4( ) c5(271910, 271911, 271912, 271913, 271914, 271915) c6( ) c7(sc, T, fG, yk, iW, fr, ci, ad, bv, aT, hn, wb, ae, d, s, Y, ff, cr, hp, en, iV, f, LB, sS, Dy, vA, hE, it, B); #c1(PARD3) c2(XP_011517877) c3(partitioning defective 3 homolog isoform X10) c4(311789) c5( ) c6( ) c7(sc, T, fG, yk, iW, fr, ci, ad, bv, aT, hn, wb, ae, d, s, Y, ff, cr, hp, en, iV, f, LB, sS, Dy, vA, hE, it, B); #c1(PARD3B) c2(NP_001289698) c3(partitioning defective 3 homolog B isoform Par3La) c4(114367) c5(114368, 114369, 114370, 114371, 114372, 114373) c6( ) c7(cF, v, k); #c1(PARD3B) c2(NP_476518) c3(partitioning defective 3 homolog B isoform Par3Lc) c4(230736) c5(230737, 230738, 230739, 230740, 230741, 230742) c6( ) c7(cF, v, k); #c1(PARD3B) c2(NP_689739) c3(partitioning defective 3 homolog B isoform Par3Lb) c4(243809) c5(243810, 243811, 243812, 243813, 243814, 243815) c6( ) c7(cF, v, k); #c1(PARD3B) c2(NP_995585) c3(partitioning defective 3 homolog B isoform 4) c4(263964) c5(263965, 263966, 263967, 263968, 263969, 263970) c6( ) c7(cF, v, k); #c1(PARD6A) c2(NP_001032358) c3(partitioning defective 6 homolog alpha isoform 2) c4(31240) c5(31241, 31242, 31243, 31244, 31245, 31246, 31247) c6( ) c7(eM, Mz, y, nJ, bz, af); #c1(PARD6A) c2(NP_058644) c3(partitioning defective 6 homolog alpha isoform 1) c4(192942) c5(192943, 192944, 192945, 192946, 192947, 192948) c6( ) c7(eM, Mz, y, nJ, bz, af); #c1(PARD6B) c2(NP_115910) c3(partitioning defective 6 homolog beta) c4(224636) c5(224637, 224638, 224639, 224640, 224641, 224642) c6( ) c7(bK); #c1(PARG) c2(NP_001290415) c3(poly(ADP-ribose) glycohydrolase isoform b) c4(115389) c5( ) c6( ) c7(eW, T, wg, bE, aW, iW, aT, JT, aq, SH, K, eA); #c1(PARG) c2(NP_001290416) c3(poly(ADP-ribose) glycohydrolase isoform c) c4( ) c5(115390, 115391, 115392, 115393, 115394, 115395) c6( ) c7(eW, T, wg, bE, aW, iW, aT, JT, aq, SH, K, eA); #c1(PARG) c2(NP_003622) c3(poly(ADP-ribose) glycohydrolase isoform a) c4(139694) c5( ) c6( ) c7(eW, T, wg, bE, aW, iW, aT, JT, aq, SH, K, eA); #c1(PARG) c2(XP_011538611) c3(poly(ADP-ribose) glycohydrolase isoform X5) c4( ) c5(336315, 336316, 336317, 336318, 336319, 336320) c6( ) c7(eW, T, wg, bE, aW, iW, aT, JT, aq, SH, K, eA); #c1(PARK2) c2(NP_004553) c3(E3 ubiquitin-protein ligase parkin isoform 1) c4(147595, 147596, 147597) c5(147598, 147599, 147600, 147601, 147602, 147603, 147604) c6( ) c7(T, os, aC, yS, aI, bB, MF, ci, aY, aMB, x, AW, aji, Gt, aE, rw, aU, K, bBp, bU, cnS, Jl, aW, Ls, aiT, bw, jV, eM, iA, iT, U, nw, k, m, act, iu, dt, Ri, aj, BF, fr, nA, eW, Hx, aMV, h, yT, yZ, bl, bLD, pi, QP, aq, fq, hq, agl, art, B, bL, fM, cz, GC, v, j, bAM, C, bX, yU, q, J, eA, oT, bgk, Ig, HC, bUn, aT, jj, an, ae, alL, ak, iU, Y, PL, bTw, r, Io, t, xw, bN, dS, ck, bAn, alC, aWe, bt, bAr, VB, cnT, hI, jh, oZ, xt, ad, hX, av, py, et, pq, d, cr, nf, dq, Tp, iR, bz, GB, bE, es, bE, aS, y, kS, X, jr); #c1(PARK2) c2(NP_054642) c3(E3 ubiquitin-protein ligase parkin isoform 2) c4(177266) c5(177267, 177268, 177269, 177270, 177271, 177272) c6( ) c7(T, os, aC, yS, aI, bB, MF, ci, aY, aMB, x, AW, aji, Gt, aE, rw, aU, K, bBp, bU, cnS, Jl, aW, Ls, aiT, bw, jV, eM, iA, iT, U, nw, k, m, act, iu, dt, Ri, aj, BF, fr, nA, eW, Hx, aMV, h, yT, yZ, bI, bLD, pi, QP, aq, fq, hq, agl, art, B, bL, fM, cz, GC, v, j, bAM, C, bX, yU, q, J, eA, oT, bgk, lg, HC, bUn, aT, jj, an, ae, alL, ak, iU, Y, PL, bTw, r, lo, t, xw, bN, dS, ck, bAn, alC, aWe, bt, bAr, VB, cnT, hl, jh, oZ, xt, ad, hX, av, py, ot, pq, d, cr, nf, dq, Tp, iR, bz, GB, bE, es, bE, aS, y, kS, X, jr); #c1(PARK2) c2(NP_054643) c3(E3 ubiquitin-protein ligase parkin isoform 3) c4(177273) c5(177274, 177275, 177276, 177277, 177278, 177279) c6( ) c7(T, os, aC, yS, aI, bB, MF, ci, aY, aMB, x, AW, aji, Gt, aE, rw, aU, K, bBp, bU, cnS, Jl, aW, Ls, aiT, bw, jV, eM, iA, iT, U, nw, k, m, act, iu, dt, Ri, aj, BF, fr, nA, eW, Hx, aMV, h, yT, yZ, bI, bLD, pi, QP, aq, fq, hq, agl, art, B, bL, fM, cz, GC, v, j, bAM, C, bX, yU, q, J, eA, oT, bgk, Ig, HC, bUn, aT, jj, an, ae, alL, ak, iU, Y, PL, bTw, r, Io, t, xw, bN, dS, ck, bAn, alC, aWe, bt, bAr, VB, cnT, hl, jh, oZ, xt, ad, hX, av, py, ot, pq, d, cr, nf, dg, Tp, iR, bz, GB, bF, es, bE, aS, y, kS, X, jr); #c1(PARK2) c2(XP_011534165) c3(E3 ubiquitin-protein ligase parkin isoform X1) c4(330436) c5(330437, 330438, 330439, 330440, 330441, 330442, 330443, 330444, 330445, 330446, 330447, 330448, 330449, 330450, 330451) c6( ) c7(T, os, aC, yS, aI, bB, MF, ci, aY, aMB, x, AW, aji, Gt, aE, rw, aU, K, bBp, bU, cnS, Jl, aW, Ls, aiT, bw, jV, eM, iA, iT, U, nw, k, m, act, iu, dt, Ri, aj, BF, fr, nA, eW, Hx, aMV, h, yT, yZ, bI, bLD, pi, QP, aq, fq, hq, agl, art, B, bL, fM, cz, GC, v, j, bAM, C, bX, yU, q, J, eA, oT, bgk, Ig, HC, bUn, aT, jj, an, ae, alL, ak, iU, Y, PL, bTw, r, Io, t, xw, bN, dS, ck, bAn, alC, aWe, bt, bAr, VB, cnT, hl, jh, oZ, xt, ad, hX, av, py, ot, pq, d, cr, nf, dq, Tp, iR, bz, GB, bF, es, bE, aS, y, kS, X, jr); #c1(PARK2) c2(XP_011534166) c3(E3 ubiquitin-protein ligase parkin isoform X2) c4(330452, 330453) c5(330454, 330455, 330456, 330457, 330458, 330459) c6( ) c7(T, os, aC, yS, aI, bB, MF, ci, aY, aMB, x, AW, aji, Gt, aE, rw, aU, K, bBp, bU, cnS, Jl, aW, Ls, aiT, bw, jV, eM, iA, iT, U, nw, k, m, act, iu, dt, Ri, aj, BF, fr, nA, eW, Hx, aMV, h, yT, yZ, bI, bLD, pi, QP, aq, fq, hq, agl, art, B, bL, fM, cz, GC, v, j, bAM, C, bX, yU, q, J, eA, oT, bgk, lg, HC, bUn, aT, jj, an, ae, aIL, ak, iU, Y, PL, bTw, r, lo, t, xw, bN, dS, ck, bAn, alC, aWe, bt, bAr, VB, cnT, hl, jh, oZ, xt, ad, hX, av, py, et, pq, d, cr, nf, dg, Tp, iR, bz, GB, bF, es, bE, aS, y, kS, X, jr); #c1(PARK2) c2(XP_011534167) c3(E3 ubiquitin-protein ligase parkin isoform X3) c4( ) c5(330460, 330461, 330462, 330463, 330464, 330465) c6( ) c7(T, os, aC, yS, aI, bB, MF, ci, aY, aMB, x, AW, aji, Gt, aE, rw, aU, K, bBp, bU, cnS, Jl, aW, Ls, aiT, bw, jV, eM, iA, iT, U, nw, k, m, act, iu, dt, Ri, aj, BF, fr, nA, eW, Hx, aMV, h, yT, yZ, bI, bLD, pi, QP, aq, fq, hq, agl, art, B, bL, fM, cz, GC, v, j, bAM, C, bX, yU, q, J, eA, oT, bgk, Ig, HC, bUn, aT, jj, an, ae, alL, ak, iU, Y, PL, bTw, r, Io, t, xw, bN, dS, ck, bAn, alC, aWe, bt, bAr, VB, cnT, hl, jh, oZ, xt, ad, hX, av, py, et, pq, d, cr, nf, dq, Tp, iR, bz, GB, bF, es, bE, aS, y, kS, X, jr); #c1(PARK2) c2(XP_011534169) c3(E3 ubiquitin-protein ligase parkin isoform X5) c4( ) c5(330466, 330467, 330468, 330469, 330470, 330471) c6( ) c7(T, os, aC, yS, aI, bB, MF, ci, aY, aMB, x, AW, aji, Gt, aE, rw, aU, K, bBp, bU, cnS, Jl, aW, Ls, aiT, bw, jV, eM, iA, iT, U, nw, k, m, act, iu, dt, Ri, aj, BF, fr, nA, eW, Hx, aMV, h, yT, yZ, bI, bLD, pi, QP, aq, fq, hq, agl, art, B, bL, fM, cz, GC, v, j, bAM, C, bX, yU, q, J, eA, oT, bgk, Ig, HC, bUn, aT, jj, an, ae, alL, ak, iU, Y, PL, bTw, r, Io, t, xw, bN, dS, ck, bAn, alC, aWe, bt, bAr, VB, cnT, hI, jh, oZ, xt, ad, hX, av, py, et, pq, d, cr, nf, dq, Tp, iR, bz, GB, bF, es, bE, aS, y, kS, X, jr); #c1(PARL) c2(NP_001032728) c3(presenilins-associated rhomboid-like protein, mitochondrial isoform 2 preproprotein) c4(31447) c5(31448, 31449, 31450, 31451, 31452, 31453) c6( ) c7(bL, pZ, j, eQ, ei, K); #c1(PARL) c2(NP_061092) c3(presenilins-associated rhomboid-like protein, mitochondrial isoform 1 preproprotein) c4(199144) c5(199145, 199146, 199147, 199148, 199149, 199150) c6( ) c7(bL, PZ, j, eQ, ei, K); #c1(PARM1) c2(NP_056208) c3(prostate androgen-regulated mucin-like protein 1 precursor) c4(186333) c5(186334, 186335, 186336, 186337, 186338, 186339) c6( ) c7(ae, dt, ad, Jh); #c1(PARN) c2(NP_001127949) c3(poly(A)-specific ribonuclease PARN isoform 2) c4(49539) c5(49540, 49541, 49542, 49543, 49544, 49545, 49546, 49547, 49548, 49549, 49550) c6( ) c7(cm, T, aE); #c1(PARN) c2(NP_001229921) c3(poly(A)-specific ribonuclease PARN isoform 3) c4(85513) c5(85514, 85515, 85516, 85517, 85518, 85519) c6( ) c7(cm, T, aE); #c1(PARN) c2(NP_002573) c3(poly(A)-specific ribonuclease PARN isoform 1) c4(129894, 129895) c5(129896, 129897, 129898, 129899, 129900, 129901, 129902) c6( ) c7(cm, T, aE); #c1(PARN) c2(XP_011520814) c3(poly(A)-specific ribonuclease PARN isoform X3) c4(315810) c5( ) c6( ) c7(cm, T, aE); #c1(PARN) c2(XP_011520816) c3(poly(A)-specific ribonuclease PARN isoform X5) c4( ) c5(315811, 315812, 315813, 315814, 315815, 315816) c6( ) c7(cm, T, aE); #c1(PARP1) c2(NP_001609) c3(poly [ADP-ribose] polymerase 1) c4(119153, 119154, 119155, 119156) c5(119157, 119158, 119159, 119160, 119161, 119162, 119163, 119164, 119165, 119166, 119167, 119168, 119169, 119170, 119171, 119172, 119173, 119174, 119175, 119176, 119177, 119178, 119179, 119180, 119181, 119182, 119183, 119184) c6( ) c7(bM, T, os, fR, pf, if, fd, bB, qj, ci, aR, ip, x, bv, aE, Qk, K, hu, pk, eL, cp, hm, aW, uY, pD, zC, g, cnV, eF, cm, bw, axG, y, fT, eM, nB, Fh, dc, iT, aiM, cj, Zn, nw, k, m, yA, abh, de, cZ, dD, ajm, sw, aw, ht, NT, n, aj, fr, nA, uE, qN, cd, hr, zo, ai, eW, ke, ft, no, pe, cc, h, lG, aYf, hn, dL, apD, dd, asT, hB, dx, pl, Nr, FZ, bux, OV, asp, A, Yd, Tc, hQ, aq, po, kp, cM, op, eU, W, dB, hk, eD, hL, aar, at, fL, WL, it, B, cnW, bL, DM, fM, dA, ew, aA, v, j, C, bX, V, q, J, eA, eJ, uT, hW, afQ, rS, yg, aT, cy, an, ae, af, eu, CB, qw, Uf, wr, s, vT, iU, Y, r, en, cl, t, f, zJ, ck, Ta, iM, kP, c, Dy, ac, hc, aeM, dy, fD, bt, LS, hS, gV, kh, iW, jh, Hn, oZ, bS, dG, eq, mC, ad, hX, fU, av, hd, le, nl, abg, oW, dm, io, PZ, NM, vl, auY, d, je, hG, afF, ff, xs, eH, eZ, dN, aF, bz, eK, Hp, Nq, bF, bE, afd, Lb, bC, hE, cnU, bND, pC); #c1(PARP12) c2(NP_073587) c3(poly [ADP-ribose] polymerase 12) c4(212980, 212981) c5(212982, 212983, 212984, 212985, 212986, 212987, 212988, 212989, 212990, 212991, 212992, 212993) c6( ) c7(ds, Io, K); #c1(PARP14) c2(NP_060024) c3(poly [ADP-ribose] polymerase 14) c4(193744, 193745, 193746, 193747, 193748) c5(193749, 193750, 193751, 193752, 193753, 193754, 193755, 193756, 193757, 193758, 193759, 193760, 193761, 193762, 193763, 193764, 193765, 193766, 193767, 193768, 193769, 193770, 193771, 193772) c6( ) c7(fd); #c1(PARP14) c2(XP_011511231) c3(poly [ADP-ribose] polymerase 14 isoform X2) c4( ) c5(301713, 301714, 301715, 301716, 301717, 301718) c6( ) c7(fd); #c1(PARP15) c2(NP_001106995) c3(poly [ADP-ribose] polymerase 15 isoform 1) c4(427 G4) c5(42765, 42766, 42767, 42768, 42769, 42770) c6( ) c7(aj); #c1(PARP15) c2(NP_689828) c3(poly [ADP-ribose] polymerase 15 isoform 2 precursor) c4(244058) c5(244059, 244060, 244061, 244062, 244063, 244064) c6( ) c7(aj); #c1(PARP15) c2(XP_011510781) c3(poly [ADP-ribose] polymerase 15 isoform X7) c4(301186) c5(301187, 301188, 301189, 301190, 301191, 301192) c6( ) c7(aj); #c1(PARP2) c2(NP_001036083) c3(poly [ADP-ribose] polymerase 2 isoform 2) c4(33956) c5(33957, 33958, 33959, 33960, 33961, 33962) c6( ) c7(T, aW, aT, vH, m, bX, V, GR); #c1(PARP2) c2(NP_005475) c3(poly [ADP-ribose] polymerase 2 isoform 1) c4(156507) c5(156508, 156509, 156510, 156511, 156512, 156513) c6( ) c7(T, aW, aT, vH, m, bX, V, GR); #c1(PARP3) c2(NP_001003931) c3(poly [ADP-ribose] polymerase 3 isoform a) c4(20292, 20293) c5(20294, 20295, 20296, 20297, 20298, 20299, 20300, 20301, 20302) c6( ) c7(b, dD, ea, dL, eq, i, cm, ao); #c1(PARP3) c2(NP_005476) c3(poly [ADP-ribose] polymerase 3 isoform b) c4(156514) c5(156515, 156516, 156517, 156518, 156519, 156520, 156521, 156522, 156523, 156524, 156525, 156526, 156527, 156528) c6( ) c7(b, dD, ea, dL, eq, i, cm, ao); #c1(PARP4) c2(NP_006428) c3(poly [ADP-ribose] polymerase 4) c4(165133) c5(165134, 165135, 165136, 165137, 165138, 165139, 165140) c6( ) c7(ck, T, B, jh, aA, at, cy, aq, dL, j, m, an, f, t, X); #c1(PARP6) c2(NP_064599) c3(poly [ADP-ribose] polymerase 6) c4(203217, 203218, 203219) c5(203220, 203221, 203222, 203223, 203224, 203225, 203226, 203227, 203228, 203229, 203230, 203231, 203232, 203233, 203234, 203235) c6( ) c7(dy, q, r); #c1(PARP6) c2(XP_005254614) c3(poly [ADP-ribose] polymerase 6 isoform X1) c4(273279) c5(273280, 273281, 273282, 273283, 273284, 273285) c6( ) c7(dy, q, r); #c1(PARP6) c2(XP_005254615) c3(poly [ADP-ribose] polymerase 6 isoform X2) c4( ) c5(273286) c6( ) c7(dy, q, r); #c1(PARP6) c2(XP_005254616) c3(poly [ADP-ribose] polymerase 6 isoform X3) c4(273287) c5(273288, 273289, 273290, 273291, 273292, 273293) c6( ) c7(dy, q, r); #c1(PARP6) c2(XP_011520108) c3(poly [ADP-ribose] polymerase 6 isoform X5) c4( ) c5(314998, 314999, 315000, 315001, 315002, 315003) c6( ) c7(dy, q, r); #c1(PARP6) c2(XP_011520109) c3(poly [ADP-ribose] polymerase 6 isoform X6) c4(315004) c5(315005, 315006, 315007, 315008, 315009) c6( ) c7(dy, q, r); #c1(PARP9) c2(NP_001139574) c3(poly [ADP-ribose] polymerase 9 isoform a) c4(59497) c5(59498, 59499, 59500, 59501, 59502, 59503, 59504, 59505, 59506, 59507, 59508, 59509) c6( ) c7(oO, bM, T, fM, fG, df, hF, iX, bW, h, vB, K, zy, MG, qE, uQ, hZ, aKy, aKD, aq, anW, pb, dr, LB, ok, ig, dc, dO, uR, cj, at, Br, dT, fD, B); #c1(PARP9) c2(NP_001139576) c3(poly [ADP-ribose] polymerase 9 isoform b) c4(59510, 59511) c5(59512, 59513, 59514, 59515, 59516, 59517, 59518, 59519, 59520, 59521) c6( ) c7(oO, bM, T, fM, fG, df, hF, iX, bW, h, vB, K, zy, MG, qE, uQ, hZ, aKy, aKD, aq, anW, pb, dr, LB, ok, ig, dc, dO, uR, cj, at, Br, dT, fD, B); #c1(PARP9) c2(NP_001139578) c3(poly [ADP-ribose] polymerase 9 isoform c) c4(59522) c5(59523, 59524, 59525, 59526, 59527, 59528) c6( ) c7(oO, bM, T, fM, fG, df, hF, iX, bW, h, vB, K, zy, MG, qE, uQ, hZ, aKy, aKD, ag, anW, pb, dr, LB, ok, ig, dc, dO, uR, cj, at, Br, dT, fD, B); #c1(PARPBP) c2(XP_011536808) c3(PCNA-interacting partner isoform X1) c4(334487, 334488) c5(334489, 334490, 334491, 334492, 334493, 334494, 334495, 334496) c6( ) c7(aeQ, T, os, gU, yi, aC, aE, bSU, yo, oZ, kp, HR, ey, pt, JD); #c1(PARPBP) c2(XP_011536816) c3(PCNA-interacting partner isoform X5) c4( ) c5(334497, 334498, 334499, 334500, 334501, 334502, 334503, 334504) c6( ) c7(aeQ, T, os, gU, yi, aC, aE, bSU, yo, oZ, kp, HR, ey, pt, JO); #c1(PARPBP) c2(XP_011536820) c3(PCNA-interacting partner isoform X12) c4(334505) c5(334506, 334507, 334508, 334509, 334510, 334511) c6( ) c7(aeQ, T, os, gU, yi, aC, aE, bSU, ye, oZ, kp, HR, ey, pt, JO); #c1(PARS2) c2(XP_011539505) c3(probable proline-tRNA ligase, mitochondrial isoform X1) c4( ) c5(337700, 337701, 337702, 337703, 337704, 337705) c6( ) c7(ac); #c1(PARVA) c2(NP_060692) c3(alpha-parvin) c4(197191, 197192, 197193, 197194) c5(197195, 197196, 197197, 197198, 197199, 197200, 197201, 197202, 197203, 197204, 197205, 197206, 197207, 197208, 197209, 197210, 197211, 197212, 197213) c6( ) c7(IB, T, cd); #c1(PARVA) c2(XP_005253072) c3(alpha-parvin isoform X1) c4( ) c5(272133, 272134, 272135, 272136, 272137, 272138) c6( ) c7(IB, T, cd); #c1(PARVB) c2(NP_001003828) c3(beta-parvin isoform a) c4(20220) c5(20221, 20222, 20223, 20224, 20225, 20226) c6( ) c7(adu, bM, T, aW, aT, iy, j, ci); #c1(PARVB) c2(NP_001230314) c3(beta-parvin isoform c) c4(86223) c5(86224, 86225, 86226, 86227, 86228, 86229) c6( ) c7(adu, bM, T, aW, aT, iy, j, ci); #c1(PARVB) c2(NP_037459) c3(beta-parvin isoform b) c4(175626) c5(175627, 175628, 175629, 175630, 175631, 175632) c6( ) c7(adu, bM, T, aW, aT, iy, j, ci); #c1(PARV6) c2(NP_001131077) c3(gamma-parvin) c4(52586, 52587) c5(52588, 52589, 52590, 52591, 52592, 52593, 52594, 52595, 52596, 52597, 52598) c6( ) c7(T, Fc); #c1(PARV6) c2(XP_011528604) c3(gamma-pan/in isoform X3) c4( ) c5(323856, 323857, 323858) c6( ) c7(T, Fc); #c1(PARV6) c2(XP_011528609) c3(gamma-pan/in isoform X6) c4(323859, 323860) c5(323861, 323862, 323863, 323864, 323865, 323866, 323867, 323868, 323869, 323870, 323871, 323872, 323873, 323874, 323875, 323876, 323877, 323878) c6( ) c7(T, Fc); #c1(PASD1) c2(NP_775764) c3(PAS domain-containing protein 1) c4(250222) c5(250223, 250224, 250225, 250226, 250227, 250228) c6( ) c7(kk, sS, fd, jh, bu); #c1(PASK) c2(NP_001239048) c3(PAS domain-containing serine/threonine-protein kinase isoform 1) c4(88219) c5(88220, 88221, 88222, 88223, 88224) c6( ) c7(bri, aj, K, bX, J, bN); #c1(PASK) c2(NP_001239049) c3(PAS domain-containing serine/threonine-protein kinase isoform 2) c4(88225, 88226) c5(88227, 88228, 88229, 88230, 88231, 88232, 88233, 88234, 88235, 88236, 88237, 88238, 88239, 88240) c6( ) c7(bri, aj, K, bX, J, bN); #c1(PASK) c2(NP_001239053) c3(PAS domain-containing serine/threonine-protein kinase isoform 4) c4(88241) c5(88242, 88243, 88244, 88245, 88246, 88247, 88248, 88249, 88250, 88251, 88252) c6( ) c7(bri, aj, K, bX, J, bN); #c1(PASK) c2(XP_011509128) c3(PAS domain-containing serine/threonine-protein kinase isoform X2) c4( ) c5(299751) c6( ) c7(bri, aj, K, bX, J, bN); #c1(PASK) c2(XP_011509129) c3(PAS domain-containing serine/threonine-protein kinase isoform X3) c4(299752) c5(299753, 299754, 299755) c6( ) c7(bri, aj, K, bX, J, bN); #c1(PASK) c2(XP_011509134) c3(PAS domain-containing serine/threonine-protein kinase isoform X5) c4(299756) c5(299757, 299758, 299759, 299760, 299761, 299762) c6( ) c7(bri, aj, K, bX, J, bN); #c1(PATE1) c2(NP_612151) c3(prostate and testis expressed protein 1 precursor) c4(236071, 236072) c5(236073, 236074, 236075, 236076, 236077, 236078, 236079, 236080, 236081, 236082, 236083, 236084, 236085, 236086, 236087, 236088) c6(236089, 236090, 236091, 236092) c7(ae, ad); #c1(PATZ1) c2(NP_055138) c3(POZ-, AT hook-, and zinc finger-containing protein 1 long C isoform) c4(179234) c5(179235, 179236, 179237, 179238, 179239, 179240, 179241) c6( ) c7(T, dD, wu, ea, jh, vH, eq, wm, bu, aiG); #c1(PATZ1) c2(NP_114439) c3(POZ-, AT hook-, and zinc finger-containing protein 1 long A isoform) c4(222802) c5(222803, 222804, 222805, 222806, 222807, 222808) c6( ) c7(T, dD, wu, ea, jh, vH, eq, wm, bu, aiG); #c1(PATZ1) c2(NP_114440) c3(POZ-, AT hook-, and zinc finger-containing protein 1 short isoform) c4(222809) c5(222810, 222811, 222812, 222813, 222814, 222815) c6( ) c7(T, dD, wu, ea, jh, vH, eq, wm, bu, aiG); #c1(PATZ1) c2(NP_114441) c3(POZ-, AT hook-, and zinc finger-containing protein 1 long B isoform) c4(222816) c5(222817, 222818, 222819, 222820, 222821, 222822) c6( ) c7(T, dD, wu, ea, jh, vH, eq, wm, bu, aiG); #c1(PAWR) c2(XP_006719498) c3(PRKC apoptosis WT1 regulator protein isoform X1) c4(292575, 292576, 292577) c5(292578, 292579, 292580, 292581, 292582, 292583, 292584) c6( ) c7(gh, T, aC, fG, bO, bB, bS, et, ci, eA, ad, av, jz, aT, h, K, an, H, he, ae, xa, af, CB, jf, Uf, B, aW, Y, auM, eH, g, cI, Z, eF, cm, bz, eK, hq, ck, ac, c, bE, wO, acS, apI, yP, U, hL, lF, dX, alv, EY, X, L); #c1(PAWR) c2(XP_006719499) c3(PRKC apoptosis WT1 regulator protein isoform X2) c4( ) c5(292585, 292586, 292587, 292588, 292589, 292590, 292591, 292592, 292593, 292594, 292595, 292596) c6( ) c7(gh, T, aC, fG, bO, bB, bS, et, ci, eA, ad, av, jz, aT, h, K, an, H, he, ae, xa, af, CB, jf, Uf, B, aW, Y, auM, eH, g, cI, Z, eF, cm, bz, eK, hq, ck, ac, c, bE, wO, acS, apI, yP, U, hL, lF, dX, alv, EY, X, L); #c1(PAX1) c2(NP_006183) c3(paired box protein Pax-1 isoform 1) c4(162671) c5(162672, 162673, 162674, 162675, 162676, 162677) c6( ) c7(bcX, azs, bAV, cnX, Ln, bAZ, lq, lp, if, ff, bQ, en, qN, bfU, Ex); #c1(PAX2) c2(NP_000269) c3(paired box protein Pax-2 isoform b) c4( ) c5(6048, 6049, 6050, 6051, 6052) c6( ) c7(gh, T, uI, Uc, eR, cnZ, zX, aMq, bB, fr, HS, aoM, ci, aY, cnY, iJ, pn, ad, er, dP, py, MS, yQ, wG, tL, tT, aT, IG, dL, Nj, ae, af, eL, Ur, xQ, auY, s, aW, Y, agF, yq, Lc, zC, g, cl, t, dr, ck, sk, aug, uP, kn, es, vW, iA, bE, AM, FB, wB, hL, fP, dy, VB); #c1(PAX2) c2(NP_001291498) c3(paired box protein Pax-2 isoform f) c4(116295) c5(116296, 116297) c6( ) c7(gh, T, uI, Uc, eR, cnZ, zX, aMq, bB, fr, HS, aoM, ci, aY, cnY, iJ, pn, ad, er, dP, py, MS, yQ, wG, tL, tT, aT, IG, dL, Nj, ae, af, eL, Ur, xQ, auY, s, aW, Y, agF, yq, Lc, zC, g, cl, t, dr, ck, sk, aug, uP, kn, es, vW, iA, bE, AM, FB, wB, hL, fP, dy, VB); #c1(PAX2) c2(NP_003978) c3(paired box protein Pax-2 isoform a) c4(142602, 142603) c5(142604, 142605, 142606, 142607, 142608, 142609, 142610, 142611, 142612, 142613, 142614, 142615) c6( ) c7(gh, T, uI, Uc, eR, cnZ, zX, aMq, bB, fr, HS, aoM, ci, aY, cnY, iJ, pn, ad, er, dP, py, MS, yQ, wG, tL, tT, aT, IG, dL, Nj, ae, af, eL, Ur, xQ, auY, s, aW, Y, agF, yq, Lc, zC, g, cl, t, dr, ck, sk, aug, uP, kn, es, vW, iA, bE, AM, FB, wB, hL, fP, dy, VB); #c1(PAX2) c2(NP_003979) c3(paired box protein Pax-2 isoform c) c4(142616, 142617) c5(142618, 142619, 142620, 142621, 142622, 142623, 142624, 142625, 142626, 142627, 142628, 142629) c6( ) c7(gh, T, ul, Uc, eR, cnZ, zX, aMq, bB, fr, HS, aoM, ci, aY, cnY, iJ, pn, ad, er, dP, py, MS, yQ, wG, tL, tT, aT, lG, dL, Nj, ae, af, eL, Ur, xQ, auY, s, aW, Y, agF, yq, Lc, zC, g, cl, t, dr, ck, sk, aug, uP, kn, es, vW, iA, bE, AM, FB, wB, hL, fP, dy, VB); #c1(PAX2) c2(NP_003981) c3(paired box protein Pax-2 isoform e) c4(142630) c5(142631, 142632, 142633, 142634, 142635, 142636) c6( ) c7(gh, T, uI, Uc, eR, cnZ, zX, aMq, bB, fr, HS, aoM, ci, aY, cnY, iJ, pn, ad, er, dP, py, MS, yQ, wG, tL, tT, aT, IG, dL, Nj, ae, af, eL, Ur, xQ, auY, s, aW, Y, agF, yq, Lc, zC, g, cl, t, dr, ck, sk, aug, uP, kn, es, vW, iA, bE, AM, FB, wB, hL, fP, dy, VB); #c1(PAX3) c2(NP_000429) c3(paired box protein Pax-3 isoform PAX3a) c4(8887) c5(8888, 8889, 8890, 8891, 8892, 8893, 8894) c6( ) c7(ng, bM, T, dA, ha, aOH, jh, cob, ko, aLn, bjN, coa, nA, eA, Na, bv, ft, amJ, Eo, Nn, KN, Ou, Nc, bqS, K, fb, ahE, dx, Gc, jf, IR, kj, Qr, are, Y, AQ, Az, ahI, aTa, eF, cm, bz, XT, bN, ck, Dy, Ip, hk, mG, wk, Xu, aps, aPG, ps); #c1(PAX3) c2(NP_001120838) c3(paired box protein Pax-3 isoform PAX3i) c4(44818) c5(44819, 44820, 44821, 44822, 44823, 44824) c6( ) c7(ng, bM, T, dA, ha, aOH, jh, cob, ko, aLn, bjN, coa, nA, eA, Na, bv, ft, amJ, Eo, Nn, KN, Ou, Nc, bqS, K, fb, ahE, dx, Gc, jf, IR, kj, Qr, are, Y, AQ, Az, ahI, aTa, eF, cm, bz, XT, bN, ck, Dy, Ip, hk, mG, wk, Xu, aps, aPG, ps); #c1(PAX3) c2(NP_039230) c3(paired box protein Pax-3 isoform PAX3b) c4(176909) c5(176910, 176911, 176912, 176913, 176914, 176915) c6( ) c7(ng, bM, T, dA, ha, aOH, jh, cob, ko, aLn, bjN, coa, nA, eA, Na, bv, ft, amJ, Eo, Nn, KN, Ou, Nc, bqS, K, fb, ahE, dx, Gc, jf, IR, kj, Qr, are, Y, AQ, Az, ahI, aTa, eF, cm, bz, XT, bN, ck, Dy, Ip, hk, mG, wk, Xu, aps, aPG, ps); #c1(PAX3) c2(NP_852122) c3(paired box protein Pax-3 isoform PAX3) c4(254866) c5(254867, 254868, 254869, 254870, 254871, 254872) c6( ) c7(ng, bM, T, dA, ha, aOH, jh, cob, ko, aLn, bjN, coa, nA, eA, Na, bv, ft, amJ, Eo, Nn, KN, Ou, Nc, bqS, K, fb, ahE, dx, Gc, jf, IR, kj, Qr, are, Y, AQ, Az, ahI, aTa, eF, cm, bz, XT, bN, ck, Dy, Ip, hk, mG, wk, Xu, aps, aPG, ps); #c1(PAX3) c2(NP_852123) c3(paired box protein Pax-3 isoform PAX3d) c4(254873) c5( ) c6( ) c7(ng, bM, T, dA, ha, aOH, jh, cob, ko, aLn, bjN, coa, nA, eA, Na, bv, ft, amJ, Eo, Nn, KN, Ou, Nc, bqS, K, fb, ahE, dx, Gc, jf, IR, kj, Qr, are, Y, AQ, Az, ahI, aTa, eF, cm, bz, XT, bN, ck, Dy, Ip, hk, mG, wk, Xu, aps, aPG, ps); #c1(PAX3) c2(NP_852124) c3(paired box protein Pax-3 isoform PAX3e) c4(254874) c5(254875, 254876, 254877, 254878, 254879, 254880, 254881, 254882, 254883, 254884, 254885, 254886) c6( ) c7(ng, bM, T, dA, ha, aOH, jh, cob, ko, aLn, bjN, coa, nA, eA, Na, bv, ft, amJ, Eo, Nn, KN, Ou, Nc, bqS, K, fb, ahE, dx, Gc, jf, IR, kj, Qr, are, Y, AQ, Az, ahI, aTa, eF, cm, bz, XT, bN, ck, Dy, Ip, hk, mG, wk, Xu, aps, aPG, ps); #c1(PAX3) c2(NP_852125) c3(paired box protein Pax-3 isoform PAX3h) c4(254887) c5(254888, 254889, 254890, 254891, 254892, 254893) c6( ) c7(ng, bM, T, dA, ha, aOH, jh, cob, ko, aLn, bjN, coa, nA, eA, Na, bv, ft, amJ, Eo, Nn, KN, Ou, Nc, bqS, K, fb, ahE, dx, Gc, jf, IR, kj, Qr, are, Y, AQ, Az, ahI, aTa, eF, cm, bz, XT, bN, ck, Dy, Ip, hk, mG, wk, Xu, aps, aPG, ps); #c1(PAX3) c2(NP_852126) c3(paired box protein Pax-3 isoform PAX3g) c4(254894) c5(254895, 254896, 254897, 254898, 254899, 254900) c6( ) c7(ng, bM, T, dA, ha, aOH, jh, cob, ko, aLn, bjN, coa, nA, eA, Na, bv, ft, amJ, Eo, Nn, KN, Ou, Nc, bqS, K, fb, ahE, dx, Gc, jf, IR, kj, Qr, are, Y, AQ, Az, ahI, aTa, eF, cm, bz, XT, bN, ck, Dy, Ip, hk, mG, wk, Xu, aps, aPG, ps); #c1(PAX4) c2(NP_006184) c3(paired box protein Pax-4) c4(162678) c5(162679, 162680, 162681, 162682, 162683, 162684) c6( ) c7(bL, A, mh, eR, coc, Y, Nn, TF, aj, dG, k, ei, J); #c1(PAX4) c2(XP_011514578) c3(paired box protein Pax-4 isoform X1) c4(307286, 307287) c5(307288, 307289, 307290, 307291, 307292, 307293, 307294, 307295, 307296, 307297, 307298, 307299, 307300) c6( ) c7(bL, A, mh, eR, coc, Y, Nn, TF, aj, dG, k, ei, J); #c1(PAX5) c2(NP_001267476) c3(paired box protein Pax-5 isoform 2) c4(99599) c5(99600, 99601, 99602, 99603, 99604, 99605) c6( ) c7(oO, bM, T, Fv, aaH, if, al, fd, amj, Jd, IN, ci, Tz, x, Vp, bv, Gt, aE, oG, fm, pX, jk, rB, K, bU, pk, eL, hm, xQ, bPf, kS, aW, hC, Az, Qg, aVu, Ku, g, as, eF, ou, bb, eM, nB, coi, iT, vy, cj, Zn, k, m, Xu, Vj, asW, dt, QO, aEj, aYZ, aw, n, aj, fr, et, qN, eW, b, ft, i, coe, adX, h, eV, hn, dL, aDC, pi, dx, Yl, mR, AQ, fe, aiL, aq, yq, Og, mo, dw, Wt, hq, amt, kT, bP, cA, adZ, dB, Vy, Be, eo, eQ, YH, anx, B, bL, fM, aGt, jx, eX, aA, cz, zN, cog, v, j, ajM, V, avD, q, er, eA, XX, Rl, hW, nv, aWJ, aT, rO, dz, adV, an, ae, af, jf, ak, PK, s, iU, oV, Y, ate, Pg, r, en, hf, cl, t, AA, apx, pb, iK, dS, ck, nM, ac, iM, lI, nG, hO, wq, cdM, bt, ava, id, iW, ha, jh, bS, hF, iJ, ad, afb, wD, Jm, dP, av, hd, iC, Db, acu, zK, ds, qh, oW, bby, fb, Yi, mu, d, je, et, ff, xs, Of, eZ, aFr, aF, hp, iV, Z, bz, qa, cgE, eK, gk, axs, coh, cof, aVv, gZ, awK, bC, ei, pK, y, xg, atd, cod); #c1(PAX5) c2(NP_001267477) c3(paired box protein Pax-5 isoform 3) c4(99606) c5(99607, 99608, 99609, 99610, 99611, 99612) c6( ) c7(oO, bM, T, Fv, aaH, if, al, fd, amj, Jd, IN, ci, Tz, x, Vp, bv, Gt, aE, oG, fm, pX, jk, rB, K, bU, pk, eL, hm, xQ, bPf, kS, aW, hC, Az, Qg, aVu, Ku, g, as, eF, ou, bb, eM, nB, coi, iT, vy, cj, Zn, k, m, Xu, Vj, asW, dt, QO, aEj, aYZ, aw, n, aj, fr, et, QN, eW, b, ft, i, coe, adX, h, eV, hn, dL, aDC, pi, dx, Yl, mR, AQ, fe, aiL, aq, yq, Og, mo, dw, Wt, hq, amt, kT, bP, cA, adZ, dB, Vy, Be, eo, eQ, YH, anx, B, bL, fM, aGt, jx, eX, aA, cz, zN, cog, v, j, ajM, V, avD, q, er, eA, XX, RI, hW, nv, aWJ, aT, rO, dz, adV, an, ae, af, jf, ak, PK, s, iU, oV, Y, ate, Pg, r, en, hf, cl, t, AA, apx, pb, iK, dS, ck, nM, ac, iM, lI, nG, hO, wq, cdM, bt, ava, id, iW, ha, jh, bS, hF, iJ, ad, afb, wD, Jm, dP, av, hd, iC, Db, acu, zK, ds, qh, oW, bby, fb, Yi, mu, d, je, et, ff, xs, Of, eZ, aFr, aF, hp, iV, Z, bz, qa, cgE, eK, gk, axs, coh, cof, aVv, gZ, awK, bC, ei, pK, y, xg, atd, cod); #c1(PAX5) c2(NP_001267478) c3(paired box protein Pax-5 isoform 4) c4( ) c5(99613) c6( ) c7(oO, bM, T, Fv, aaH, if, al, fd, amj, Jd, IN, ci, Tz, x, Vp, bv, Gt, aE, oG, fm, pX, jk, rB, K, bU, pk, eL, hm, xQ, bPf, kS, aW, hC, Az, Qq, aVu, Ku, g, as, eF, ou, bb, eM, nB, coi, iT, vy, cj, Zn, k, m, Xu, Vj, asW, dt, QO, aEj, aYZ, aw, n, aj, fr, et, qN, eW, b, ft, i, coe, adX, h, eV, hn, dL, aDC, pi, dx, Yl, mR, AQ, fe, aiL, aq, yq, Og, mo, dw, Wt, hq, amt, kT, bP, cA, adZ, dB, Vy, Be, eo, eQ, YH, anx, B, bL, fM, aGt, jx, eX, aA, cz, zN, cog, v, j, ajM, V, avD, g, er, eA, XX, RI, hW, nv, aWJ, aT, rO, dz, adV, an, ae, af, jf, ak, PK, s, iU, oV, Y, ate, Pg, r, en, hf, cl, t, AA, apx, pb, iK, dS, ck, nM, ac, iM, lI, nG, hO, wq, cdM, bt, ava, id, iW, ha, jh, bS, hF, iJ, ad, afb, wD, Jm, dP, av, hd, iC, Db, acu, zK, ds, qh, oW, bby, fb, Yi, mu, d, je, et, ff, xs, Of, eZ, aFr, aF, hp, iV, Z, bz, qa, cgE, eK, gk, axs, coh, cof, aVv, gZ, awK, bC, ei, pK, y, xg, atd, cod); #c1(PAX5) c2(NP_001267479) c3(paired box protein Pax-5 isoform 5) c4( ) c5(99614, 99615, 99616, 99617, 99618) c6( ) c7(oO, bM, T, Fv, aaH, if, al, fd, amj, Jd, IN, ci, Tz, x, Vp, bv, Gt, aE, oG, fm, pX, jk, rB, K, bU, pk, eL, hm, xQ, bPf, kS, aW, hC, Az, Qq, aVu, Ku, g, as, eF, ou, bb, eM, nB, coi, iT, vy, cj, Zn, k, m, Xu, Vj, asW, dt, QO, aEj, aYZ, aw, n, aj, fr, et, qN, eW, b, ft, i, coe, adX, h, eV, hn, dL, aDC, pi, dx, Yl, mR, AQ, fe, aiL, aq, yq, Og, mo, dw, Wt, hq, amt, kT, bP, cA, adZ, dB, Vy, Be, eo, eQ, YH, anx, B, bL, fM, aGt, jx, eX, aA, cz, zN, cog, v, j, ajM, V, avD, g, er, eA, XX, RI, hW, nv, aWJ, aT, rO, dz, adV, an, ae, af, jf, ak, PK, s, iU, oV, Y, ate, Pg, r, en, hf, cl, t, AA, apx, pb, iK, dS, ck, nM, ac, iM, lI, nG, hO, wq, cdM, bt, ava, id, iW, ha, jh, bS, hF, iJ, ad, afb, wD, Jm, dP, av, hd, iC, Db, acu, zK, ds, qh, oW, bby, fb, Yi, mu, d, je, et, ff, xs, Of, eZ, aFr, aF, hp, iV, Z, bz, qa, cgE, eK, gk, axs, coh, cof, aVv, gZ, awK, bC, ei, pK, y, xg, atd, cod); #c1(PAX5) c2(NP_001267481) c3(paired box protein Pax-5 isoform 7) c4(99619, 99620) c5(99621, 99622, 99623, 99624, 99625, 99626) c6( ) c7(oO, bM, T, Fv, aaH, if, al, fd, amj, Jd, IN, ci, Tz, x, Vp, bv, Gt, aE, oG, fm, pX, jk, rB, K, bU, pk, eL, hm, xQ, bPf, kS, aW, hC, Az, Qq, aVu, Ku, g, as, eF, nu, bb, eM, nB, coi, iT, vy, cj, Zn, k, m, Xu, Vj, asW, dt, QO, aEj, aYZ, aw, n, aj, fr, et, qN, eW, b, ft, i, coe, adX, h, eV, hn, dL, aDC, pi, dx, Yl, mR, AQ, fe, aiL, aq, yq, Og, me, dw, Wt, hq, amt, kT, bP, cA, adZ, dB, Vy, Be, eo, eQ, YH, anx, B, bL, fM, aGt, jx, eX, aA, cz, zN, cog, v, j, ajM, V, avD, q, er, eA, XX, RI, hW, nv, aWJ, aT, rO, dz, adV, an, ae, af, jf, ak, PK, s, iU, oV, Y, ate, Pg, r, en, hf, cl, t, AA, apx, pb, iK, dS, ck, nM, ac, iM, lI, nG, hO, wg, cdM, bt, ava, id, iW, ha, jh, bS, hF, iJ, ad, afb, wD, Jm, dP, av, hd, iC, Db, acu, zK, ds, gh, oW, bby, fb, Yi, mu, d, je, et, ff, xs, Of, eZ, aFr, aF, hp, iV, Z, bz, qa, cgE, eK, gk, axs, coh, cof, aVv, gZ, awK, bC, ei, pK, y, xg, atd, cod); #c1(PAX5) c2(NP_001267482) c3(paired hex protein Pax-5 isoform 8) c4(99627) c5(99628, 99629, 99630, 99631, 99632, 99633) c6( ) c7(oO, bM, T, Fv, aaH, if, al, fd, amj, Jd, lN, ci, Tz, x, Vp, bv, Gt, aE, oG, fm, pX, jk, rB, K, bU, pk, eL, hm, xQ, bPf, kS, aW, hC, Az, Qq, aVu, Ku, g, as, eF, ou, bb, eM, nB, coi, iT, vy, cj, Zn, k, m, Xu, Vj, asW, dt, QO, aEj, aYZ, aw, n, aj, fr, et, qN, eW, b, ft, i, coe, adX, h, eV, hn, dL, aDC, pi, dx, Yl, mR, AQ, fe, aiL, aq, yq, Og, me, dw, Wt, hq, amt, kT, bP, cA, adZ, dB, Vy, Be, eo, eQ, YH, anx, B, bL, fM, aGt, jx, eX, aA, cz, zN, cog, v, j, ajM, V, avD, q, er, eA, XX, RI, hW, nv, aWJ, aT, rO, dz, adV, an, ae, af, jf, ak, PK, s, iU, oV, Y, ate, Pg, r, en, hf, cl, t, AA, apx, pb, iK, dS, ck, nM, ac, iM, lI, nG, hO, wq, cdM, bt, ava, id, iW, ha, jh, bS, hF, iJ, ad, afb, wD, Jm, dP, av, hd, iC, Db, acu, zK, ds, qh, oW, bby, fb, Yi, mu, d, je, et, ff, xs, Of, eZ, aFr, aF, hp, iV, Z, bz, qa, cgE, eK, gk, axs, coh, cof, aVv, gZ, awK, bC, ei, pK, y, xg, atd, cod); #c1(PAX5) c2(NP_001267483) c3(paired hex protein Pax-5 isoform 9) c4(99634) c5(99635, 99636, 99637, 99638, 99639, 99640) c6( ) c7(oO, bM, T, Fv, aaH, if, al, fd, amj, Jd, IN, ci, Tz, x, Vp, bv, Gt, aE, oG, fm, pX, jk, rB, K, bU, pk, eL, hm, xQ, bPf, kS, aW, hC, Az, Qq, aVu, Ku, g, as, eF, ou, bb, eM, nB, coi, iT, vy, cj, Zn, k, m, Xu, Vj, asW, dt, QO, aEj, aYZ, aw, n, aj, fr, et, qN, eW, b, ft, i, coe, adX, h, eV, hn, dL, aDC, pi, dx, Yl, mR, AQ, fe, aiL, aq, yq, Og, mo, dw, Wt, hq, amt, kT, bP, cA, adZ, dB, Vy, Be, eo, eQ, YH, anx, B, bL, fM, aGt, jx, eX, aA, cz, zN, cog, v, j, ajM, V, avD, q, er, eA, XX, RI, hW, nv, aWJ, aT, rO, dz, adV, an, ae, af, jf, ak, PK, s, iU, oV, Y, ate, Pg, r, en, hf, cl, t, AA, apx, pb, iK, dS, ck, nM, ac, iM, lI, nG, hO, wq, cdM, bt, ava, id, iW, ha, jh, bS, hF, iJ, ad, afb, wD, Jm, dP, av, hd, iC, Db, acu, zK, ds, qh, oW, bby, fb, Yi, mu, d, je, et, ff, xs, Of, eZ, aFr, aF, hp, iV, Z, bz, qa, cgE, eK, gk, axs, coh, cof, aVv, gZ, awK, bC, ei, pK, y, xg, atd, cod); #c1(PAX5) c2(NP_001267484) c3(paired hex protein Pax-5 isoform 10) c4(99641) c5(99642, 99643, 99644, 99645, 99646, 99647) c6( ) c7(oO, bM, T, Fv, aaH, if, al, fd, amj, Jd, IN, ci, Tz, x, Vp, bv, Gt, aE, oG, fm, pX, jk, rB, K, bU, pk, eL, hm, xQ, bPf, kS, aW, hC, Az, Qq, aVu, Ku, g, as, eF, ou, bb, eM, nB, coi, iT, vy, cj, Zn, k, m, Xu, Vj, asW, dt, QO, aEj, aYZ, aw, n, aj, fr, et, qN, eW, b, ft, i, coe, adX, h, eV, hn, dL, aDC, pi, dx, YI, mR, AQ, fe, aiL, aq, yq, Og, me, dw, Wt, hq, amt, kT, bP, cA, adZ, dB, Vy, Be, eo, eQ, YH, anx, B, bL, fM, aGt, jx, eX, aA, cz, zN, cog, v, j, ajM, V, avD, q, er, eA, XX, RI, hW, nv, aWJ, aT, rO, dz, adV, an, ae, af, jf, ak, PK, s, iU, oV, Y, ate, Pg, r, en, hf, cl, t, AA, apx, pb, iK, dS, ck, nM, ac, iM, lI, nG, hD, wq, cdM, bt, ava, id, iW, ha, jh, bS, hF, iJ, ad, afb, wD, Jm, dP, av, hd, iC, Db, acu, zK, ds, qh, oW, bby, fb, Yi, mu, d, je, et, ff, xs, Of, eZ, aFr, aF, hp, iV, Z, bz, qa, cgE, eK, gk, axs, coh, cof, aVv, gZ, awK, bC, ei, pK, y, xg, atd, cod); #c1(PAX5) c2(NP_001267485) c3(paired hex protein Pax-5 isoform 11) c4( ) c5(99648, 99649, 99650, 99651, 99652) c6( ) c7(oO, bM, T, Fv, aaH, if, al, fd, amj, Jd, IN, ci, Tz, x, Vp, bv, Gt, aE, oG, fm, pX, jk, rB, K, bU, pk, eL, hm, xQ, bPf, kS, aW, hC, Az, Qq, aVu, Ku, g, as, eF, ou, bb, eM, nB, coi, iT, vy, cj, Zn, k, m, Xu, Vj, asW, dt, QO, aEj, aYZ, aw, n, aj, fr, et, qN, eW, b, ft, i, coe, adX, h, eV, hn, dL, aDC, pi, dx, YI, mR, AQ, fe, aiL, aq, yq, Og, mo, dw, Wt, hq, amt, kT, bP, cA, adZ, dB, Vy, Be, eo, eQ, YH, anx, B, bL, fM, aGt, jx, eX, aA, cz, zN, cog, v, j, ajM, V, avD, q, er, eA, XX, RI, hW, nv, aWJ, aT, rO, dz, adV, an, ae, af, jf, ak, PK, s, iU, oV, Y, ate, Pg, r, en, hf, cl, t, AA, apx, pb, iK, dS, ck, nM, ac, iM, lI, nG, hO, wq, cdM, bt, ava, id, iW, ha, jh, bS, hF, iJ, ad, afb, wD, Jm, dP, av, hd, iC, Db, acu, zK, ds, qh, oW, bby, fb, Yi, mu, d, je, et, ff, xs, Of, eZ, aFr, aF, hp, iV, Z, bz, qa, cgE, eK, gk, axs, coh, cof, aVv, gZ, awK, bC, ei, pK, y, xg, atd, cod); #c1(PAX5) c2(NP_057953) c3(paired hex protein Pax-5 isoform 1) c4(192635, 192636) c5(192637, 192638, 192639, 192640, 192641, 192642, 192643, 192644, 192645) c6( ) c7(oO, bM, T, Fv, aaH, if, al, fd, amj, Jd, IN, ci, Tz, x, Vp, bv, Gt, aE, oG, fm, pX, jk, rB, K, bU, pk, eL, hm, xQ, bPf, kS, aW, hC, Az, Qq, aVu, Ku, g, as, eF, ou, bb, eM, nB, coi, iT, vy, cj, Zn, k, m, Xu, Vj, asW, dt, QO, aEj, aYZ, aw, n, aj, fr, et, qN, eW, b, ft, i, coe, adX, h, eV, hn, dL, aDC, pi, dx, YI, mR, AQ, fe, aiL, aq, yq, Og, mo, dw, Wt, hq, amt, kT, bP, cA, adZ, dB, Vy, Be, eo, eQ, YH, anx, B, bL, fM, aGt, jx, eX, aA, cz, zN, cog, v, j, ajM, V, avD, q, er, eA, XX, RI, hW, nv, aWJ, aT, rO, dz, adV, an, ae, af, jf, ak, PK, s, iU, oV, Y, ate, Pg, r, en, hf, cl, t, AA, apx, pb, iK, dS, ck, nM, ac, iM, lI, nG, hO, wq, cdM, bt, ava, id, iW, ha, jh, bS, hF, iJ, ad, afb, wD, Jm, dP, av, hd, iC, Db, acu, zK, ds, qh, oW, bby, fb, Yi, mu, d, je, et, ff, xs, Of, eZ, aFr, aF, hp, iV, Z, bz, qa, cgE, eK, gk, axs, coh, cof, aVv, gZ, awK, bC, ei, pK, y, xg, atd, cod); #c1(PAX5) c2(XP_005251538) c3(paired box protein Pax-5 isoform X3) c4( ) c5(270998) c6( ) c7(oO, bM, T, Fv, aaH, if, al, fd, amj, Jd, IN, ci, Tz, x, Vp, bv, Gt, aE, oG, fm, pX, jk, rB, K, bU, pk, eL, hm, xQ, bPf, kS, aW, hC, Az, Qq, aVu, Ku, g, as, eF, ou, bb, eM, nB, coi, iT, vy, cj, Zn, k, m, Xu, Vj, asW, dt, QO, aEj, aYZ, aw, n, aj, fr, et, qN, eW, b, ft, i, coe, adX, h, eV, hn, dL, aDC, pi, dx, YI, mR, AQ, fe, aiL, aq, yq, Og, mo, dw, Wt, hq, amt, kT, bP, cA, adZ, dB, Vy, Be, eo, eQ, YH, anx, B, bL, fM, aGt, jx, eX, aA, cz, zN, cog, v, j, ajM, V, avD, q, er, eA, XX, RI, hW, nv, aWJ, aT, rO, dz, adV, an, ae, af, jf, ak, PK, s, iU, oV, Y, ate, Pg, r, en, hf, cl, t, AA, apx, pb, iK, dS, ck, nM, ac, iM, lI, nG, hO, wg, cdM, bt, ava, id, iW, ha, jh, bS, hF, iJ, ad, afb, wD, Jm, dP, av, hd, iC, Db, acu, zK, ds, qh, oW, bby, fb, Yi, mu, d, je, et, ff, xs, Of, eZ, aFr, aF, hp, iV, Z, bz, qa, cgE, eK, gk, axs, coh, cof, aVv, gZ, awK, bC, ei, pK, y, xg, atd, cod); #c1(PAX5) c2(XP_011516198) c3(paired box protein Pax-5 isoform X1) c4(309422, 309423) c5(309424, 309425, 309426, 309427, 309428, 309429, 309430) c6( ) c7(oO, bM, T, Fv, aaH, if, al, fd, amj, Jd, IN, ci, Tz, x, Vp, bv, Gt, aE, oG, fm, pX, jk, rB, K, bU, pk, eL, hm, xQ, bPf, kS, aW, hC, Az, Qq, aVu, Ku, g, as, eF, ou, bb, eM, nB, coi, iT, vy, cj, Zn, k, m, Xu, Vj, asW, dt, QO, aEj, aYZ, aw, n, aj, fr, et, qN, eW, b, ft, i, coe, adX, h, eV, hn, dL, aDC, pi, dx, YI, mR, AQ, fe, aiL, aq, yq, Og, mo, dw, Wt, hq, amt, kT, bP, cA, adZ, dB, Vy, Be, eo, eQ, YH, anx, B, bL, fM, aGt, jx, eX, aA, cz, zN, cog, v, j, ajM, V, avD, q, er, eA, XX, RI, hW, nv, aWJ, aT, rO, dz, adV, an, ae, af, jf, ak, PK, s, iU, oV, Y, ate, Pg, r, en, hf, cl, t, AA, apx, pb, iK, dS, ck, nM, ac, iM, lI, nG, hO, wq, cdM, bt, ava, id, iW, ha, jh, bS, hF, iJ, ad, afb, wD, Jm, dP, av, hd, iC, Db, acu, zK, ds, qh, oW, bby, fb, Yi, mu, d, je, et, ff, xs, Of, eZ, aFr, aF, hp, iV, Z, bz, qa, cgE, eK, gk, axs, coh, cof, aVv, gZ, awK, bC, ei, pK, y, xg, atd, cod); #c1(PAX5) c2(XP_011516199) c3(paired box protein Pax-5 isoform X2) c4( ) c5(309431, 309432, 309433, 309434, 309435) c6( ) c7(oO, bM, T, Fv, aaH, if, al, fd, amj, Jd, IN, ci, Tz, x, Vp, bv, Gt, aE, oG, fm, pX, jk, rB, K, bU, pk, eL, hm, xQ, bPf, kS, aW, hC, Az, Qq, aVu, Ku, g, as, eF, ou, bb, eM, nB, coi, iT, vy, cj, Zn, k, m, Xu, Vj, asW, dt, QO, aEj, aYZ, aw, n, aj, fr, et, qN, eW, b, ft, i, coe, adX, h, eV, hn, dL, aDC, pi, dx, YI, mR, AQ, fe, aiL, aq, yq, Og, mo, dw, Wt, hq, amt, kT, bP, cA, adZ, dB, Vy, Be, eo, eQ, YH, anx, B, bL, fM, aGt, jx, eX, aA, cz, zN, cog, v, j, ajM, V, avD, q, er, eA, XX, RI, hW, nv, aWJ, aT, rO, dz, adV, an, ae, af, jf, ak, PK, s, iU, oV, Y, ate, Pg, r, en, hf, cl, t, AA, apx, pb, iK, dS, ck, nM, ac, iM, lI, nG, hO, wq, cdM, bt, ava, id, iW, ha, jh, bS, hF, iJ, ad, afb, wD, Jm, dP, av, hd, iC, Db, acu, zK, ds, qh, oW, bby, fb, Yi, mu, d, je, et, ff, xs, Of, eZ, aFr, aF, hp, iV, Z, bz, qa, cgE, eK, gk, axs, coh, cof, aVv, gZ, awK, bC, ei, pK, y, xg, atd, cod); #c1(PAX6) c2(NP_001245391) c3(paired box protein Pax-6 isoform b) c4(93443, 93444) c5(93445, 93446, 93447, 93448, 93449, 93450, 93451, 93452, 93453, 93454, 93455, 93456, 93457, 93458, 93459, 93460, 93461, 93462) c6( ) c7(T, os, asg, acz, cop, zh, ci, Na, cfq, aE, arm, aEJ, bki, K, eL, aGb, col, aW, Az, OZ, vs, as, eM, cok, coo, nw, coq, asW, dD, cnZ, fN, n, aj, ko, nA, Dr, aqK, dL, vd, he, bbG, kj, bFc, mo, QK, fq, kn, KE, bP, cA, Be, eI, JJ, bL, nx, aA, cz, v, q, J, er, eA, anA, aT, Nc, NG, anz, bq, cot, aQu, ae, jf, le, oV, Y, la, r, kC, bN, bMZ, mf, Bd, com, ha, ml, rl, cor, oZ, eq, cos, qi, tK, ad, coj, con, d, IR, rM, aF, aTa, bz, dr, bF, Hw, Ew, ajw, ei, oQ); #c1(PAX6) c2(NP_001245394) c3(paired box protein Pax-6 isoform a) c4(93463, 93464, 93465) c5(93466, 93467, 93468, 93469, 93470, 93471, 93472, 93473, 93474, 93475, 93476, 93477, 93478, 93479, 93480, 93481, 93482, 93483, 93484, 93485, 93486, 93487, 93488, 93489, 93490, 93491, 93492, 93493, 93494) c6( ) c7(T, os, asg, acz, cop, zh, ci, Na, cfq, aE, arm, aEJ, bki, K, eL, aGb, col, aW, Az, OZ, vs, as, eM, cok, coo, nw, coq, asW, dD, cnZ, fN, n, aj, ko, nA, Dr, aqK, dL, vd, he, bbG, kj, bFc, mo, QK, fq, kn, KE, bP, cA, Be, el, JJ, bL, nx, aA, cz, v, q, J, er, eA, anA, aT, Nc, NG, anz, bq, cot, aOu, ae, jf, le, oV, Y, la, r, kC, bN, bMZ, mf, Bd, com, ha, ml, rl, cor, oZ, eq, cos, qi, tK, ad, coj, con, d, IR, rM, aF, aTa, bz, dr, bF, Hw, Ew, ajw, ei, oQ); #c1(PAX6) c2(XP_006718309) c3(paired box protein Pax-6 isoform X8) c4( ) c5(291699, 291700, 291701, 291702, 291703, 291704) c6( ) c7(T, os, asg, acz, cop, zh, ci, Na, cfq, aE, arm, aEJ, bki, K, eL, aGb, col, aW, Az, OZ, vs, as, eM, cok, coo, nw, coq, asW, dD, cnZ, fN, n, aj, ko, nA, Dr, aqK, dL, vd, he, bbG, kj, bFc, mo, QK, fq, kn, KE, bP, cA, Be, eI, JJ, bL, nx, aA, cz, v, q, J, er, eA, anA, aT, Nc, NG, anz, bq, cot, aQu, ae, jf, le, oV, Y, la, r, kC, bN, bMZ, mf, Bd, com, ha, ml, rl, cor, oZ, eq, cos, qi, tK, ad, coj, con, d, IR, rM, aF, aTa, bz, dr, bF, Hw, Ew, ajw, ei, oQ); #c1(PAX6) c2(XP_011518454) c3(paired box protein Pax-6 isoform X7) c4(312511, 312512) c5(312513, 312514, 312515, 312516, 312517, 312518, 312519, 312520, 312521, 312522, 312523, 312524) c6( ) c7(T, os, asg, acz, cop, zh, ci, Na, cfq, aE, arm, aEJ, bki, K, eL, aGb, col, aW, Az, OZ, vs, as, eM, cok, coo, nw, coq, asW, dD, cnZ, fN, n, aj, ko, nA, Dr, aqK, dL, vd, he, bbG, kj, bFc, mo, QK, fq, kn, KE, bP, cA, Be, el, JJ, bL, nx, aA, cz, v, q, J, er, eA, anA, aT, Nc, NG, anz, bq, cot, aQu, ae, jf, le, oV, Y, la, r, kC, bN, bMZ, mf, Bd, com, ha, ml, rl, cor, oZ, eq, cos, qi, tK, ad, coj, con, d, IR, rM, aF, aTa, bz, dr, bF, Hw, Ew, ajw, ei, oQ); #c1(PAX8) c2(NP_003457) c3(paired box protein Pax-8 isoform PAX8A) c4(138457) c5(138458, 138459, 138460, 138461, 138462) c6( ) c7(T, AS, n, hz, fr, ci, ml, aon, aYs, iJ, er, cou, dP, Vp, hd, Db, RN, pX, hD, Ex, AN, Xh, nJ, s, ff, agF, en, cl, g, zE, t, f, ck, sk, qJ, Qy, nM, eM, nB, hr, hL, m, gT, aMI, bwz); #c1(PAX8) c2(NP_039246) c3(paired box protein Pax-8 isoform PAX8C) c4(176916) c5(176917, 176918, 176919, 176920, 176921, 176922, 176923, 176924, 176925) c6( ) c7(T, AS, n, hz, fr, ci, ml, aon, aYs, iJ, er, cou, dP, Vp, hd, Db, RN, PX, hD, Ex, AN, Xh, nJ, s, ff, agF, en, cl, g, zE, t, f, ck, sk, gJ, Qy, nM, eM, nB, hr, hL, m, gT, aMI, bwz); #c1(PAX8) c2(NP_039247) c3(paired box protein Pax-8 isoform PAX8D) c4(176926) c5(176927, 176928, 176929, 176930, 176931) c6( ) c7(T, AS, n, hz, fr, ci, ml, aon, aYs, iJ, er, cou, dP, Vp, hd, Db, RN, pX, hD, Ex, AN, Xh, nJ, s, ff, agF, en, cl, g, zE, t, f, ck, sk, qJ, Qy, nM, eM, nB, hr, hL, m, gT, aMI, bwz); #c1(PAX8) c2(NP_054698) c3(paired box protein Pax-8 isoform PAX8E) c4(177280) c5(177281, 177282, 177283, 177284, 177285) c6( ) c7(T, AS, n, hz, fr, ci, ml, aon, aYs, iJ, er, cou, dP, Vp, hd, Db, RN, pX, hD, Ex, AN, Xh, nJ, s, ff, agF, en, cl, g, zE, t, f, ck, sk, qJ, Qy, nM, eM, nB, hr, hL, m, gT, aMI, bwz); #c1(PAX8) c2(XP_011510092) c3(paired box protein Pax-8 isoform X1) c4( ) c5(300698, 300699) c6( ) c7(T, AS, n, hz, fr, ci, ml, aon, aYs, iJ, er, cou, dP, Vp, hd, Db, RN, pX, hD, Ex, AN, Xh, nJ, s, ff, agF, en, cl, g, zE, t, f, ck, sk, qJ, Qy, nM, eM, nB, hr, hL, m, gT, aMI, bwz); #c1(PAX8) c2(XP_011510094) c3(paired box protein Pax-8 isoform X3) c4( ) c5(300700) c6( ) c7(T, AS, n, hz, fr, ci, ml, aon, aYs, iJ, er, cou, dP, Vp, hd, Db, RN, pX, hD, Ex, AN, Xh, nJ, s, ff, agF, en, cl, g, zE, t, f, ck, sk, qJ, Qy, nM, eM, nB, hr, hL, m, gT, aMI, bwz); #c1(PAX8) c2(XP_011510095) c3(paired box protein Pax-8 isoform X4) c4( ) c5(300701, 300702) c6( ) c7(T, AS, n, hz, fr, ci, ml, aon, aYs, iJ, er, cou, dP, Vp, hd, Db, RN, pX, hD, Ex, AN, Xh, nJ, s, ff, agF, en, cl, g, zE, t, f, ck, sk, qJ, Qy, nM, eM, nB, hr, hL, m, gT, aMI, bwz); #c1(PAX9) c2(NP_006185) c3(paired box protein Pax-9) c4(162685, 162686) c5(162687, 162688, 162689, 162690, 162691, 162692, 162693, 162694, 162695, 162696, 162697, 162698, 162699, 162700, 162701, 162702, 162703) c6( ) c7(Na, bv, apM, bjy, nv, Y, bjB, Az, Nn, Nc, cov, aml, ckd, zo, amH); #c1(PAXIP1) c2(NP_031375) c3(PAX-interacting protein 1) c4(172046) c5( ) c6( ) c7(af); #c1(PAXIP1) c2(XP_005249596) c3(PAX-interacting protein 1 isoform X2) c4(269711) c5( ) c6( ) c7(af); #c1(PAXIP1) c2(XP_011514284) c3(PAX-interacting protein 1 isoform X1) c4(306871) c5( ) c6( ) c7(af); #c1(PAXIP1) c2(XP_011514286) c3(PAX-interacting protein 1 isoform X4) c4( ) c5(306872, 306873, 306874, 306875, 306876, 306877, 306878, 306879, 306880, 306881, 306882, 306883, 306884, 306885, 306886, 306887, 306888, 306889, 306890, 306891, 306892, 306893, 306894, 306895) c6( ) c7(af); #c1(PBK) c2(XP_006716431) c3(lymphokine-activated killer T-cell-originated protein kinase isoform X1) c4(290301) c5(290302, 290303, 290304, 290305, 290306, 290307) c6( ) c7(T, jh, bB, q, eW, bag, XX, av, jz, aT, kH, dL, ey, K, pk, eL, dx, kl, aW, Y, r, dN, alJ, bu, bz, bE, MG, B); #c1(PBLD) c2(NP_001028255) c3(phenazine biosynthesis-like domain-containing protein isoform b) c4(30423) c5(30424, 30425, 30426, 30427, 30428, 30429) c6( ) c7(xS); #c1(PBLD) c2(NP_071412) c3(phenazine biosynthesis-like domain-containing protein isoform a) c4(211511, 211512, 211513) c5(211514, 211515, 211516, 211517, 211518, 211519, 211520, 211521, 211522, 211523, 211524, 211525, 211526, 211527, 211528, 211529) c6( ) c7(xS); #c1(PBLD) c2(XP_011538362) c3(phenazine biosynthesis-like domain-containing protein isoform X4) c4( ) c5(336050, 336051, 336052, 336053, 336054, 336055) c6( ) c7(xS); #c1(PBOV1) c2(NP_067648) c3(prostate and breast cancer overexpressed gene 1 protein) c4(209225) c5(209226, 209227, 209228, 209229, 209230, 209231) c6( ) c7(G, T, aW, eL, aT, dL, np, ae, eA, ad); #c1(PBRM1) c2(NP_060783) c3(protein polybromo-1) c4(197768, 197769, 197770, 197771) c5(197772, 197773, 197774, 197775, 197776, 197777, 197778, 197779, 197780, 197781, 197782, 197783, 197784, 197785, 197786, 197787) c6( ) c7(Mb, T, mS, n, fr, ci, pd, av, jz, py, aE, mW, ds, aT, bK, mY, mV, mU, aW, gI, bz, mZ, mX, es, cA, iA, go, RW, mT, VB, hS); #c1(PBRM1) c2(XP_005265332) c3(protein polybromo-1 isoform X4) c4( ) c5(279463, 279464) c6( ) c7(Mb, T, mS, n, fr, ci, pd, av, jz, py, aE, mW, ds, aT, bK, mY, mV, mU, aW, gI, bz, mZ, mX, es, cA, iA, go, RW, mT, VB, hS); #c1(PBRM1) c2(XP_011532205) c3(protein polybromo-1 isoform X1) c4( ) c5(328233, 328234, 328235, 328236, 328237, 328238, 328239, 328240, 328241, 328242, 328243, 328244, 328245, 328246, 328247, 328248, 328249, 328250, 328251, 328252, 328253, 328254, 328255, 328256) c6( ) c7(Mb, T, mS, n, fr, ci, pd, av, jz, py, aE, mW, ds, aT, bK, mY, mV, mU, aW, gI, bz, mZ, mX, es, cA, iA, go, RW, mT, VB, hS); #c1(PBRM1) c2(XP_011532208) c3(protein polybromo-1 isoform X5) c4(328257) c5(328258, 328259, 328260, 328261, 328262, 328263) c6( ) c7(Mb, T, mS, n, fr, ci, pd, av, jz, py, aE, mW, ds, aT, bK, mY, mV, mU, aW, gI, bz, mZ, mX, es, cA, iA, go, RW, mT, VB, hS); #c1(PBRM1) c2(XP_011532213) c3(protein polybromo-1 isoform X9) c4(328264) c5( ) c6( ) c7(Mb, T, mS, n, fr, ci, pd, av, jz, py, aE, mW, ds, aT, bK, mY, mV, mU, aW, gI, bz, mZ, mX, es, cA, iA, go, RW, mT, VB, hS); #c1(PBRM1) c2(XP_011532216) c3(protein polybromo-1 isoform X12) c4(328265) c5(328266, 328267, 328268, 328269, 328270, 328271) c6( ) c7(Mb, T, mS, n, fr, ci, pd, av, jz, py, aE, mW, ds, aT, bK, mY, mV, mU, aW, gI, bz, mZ, mX, es, cA, iA, go, RW, mT, VB, hS); #c1(PBRM1) c2(XP_011532219) c3(protein polybromo-1 isoform X15) c4(328272, 328273) c5(328274, 328275, 328276, 328277, 328278, 328279) c6( ) c7(Mb, T, mS, n, fr, ci, pd, av, jz, py, aE, mW, ds, aT, bK, mY, mV, mU, aW, gI, bz, mZ, mX, es, cA, iA, go, RW, mT, VB, hS); #c1(PBRM1) c2(XP_011532221) c3(protein polybromo-1 isoform X17) c4(328280, 328281) c5(328282, 328283, 328284, 328285, 328286, 328287, 328288, 328289, 328290, 328291) c6( ) c7(Mb, T, mS, n, fr, ci, pd, av, jz, py, aE, mW, ds, aT, bK, mY, mV, mU, aW, gI, bz, mZ, mX, es, cA, iA, go, RW, mT, VB, hS); #c1(PBX1) c2(NP_001191890) c3(pre-B-cell leukemia transcription factor 1 isoform 2) c4(81855, 81856) c5(81857, 81858, 81859, 81860, 81861, 81862, 81863, 81864, 81865, 81866, 81867, 81868, 81869, 81870, 81871, 81872, 81873, 81874, 81875, 81876, 81877, 81878) c6( ) c7(gh, T, aiH, ci, Hr, x, oG, iI, anV, K, qM, pk, yo, aW, ou, eM, iT, vA, cj, k, m, gn, Uc, IT, oY, aj, b, kH, h, hn, avP, aq, ajo, cox, zZ, op, bo, hL, hR, fL, zI, lB, Po, B, qc, bL, uI, dA, DD, cz, v, avO, cow, er, Mg, mj, aT, jj, hK, rz, rE, ae, bA, apL, s, Y, en, cl, t, ck, ov, bt, jh, hF, mC, ad, yh, iL, ff, bBO, eZ, OG, oQ, i, y, vt, kS); #c1(PBX1) c2(NP_001191892) c3(pre-B-cell leukemia transcription factor 1 isoform 3) c4(81879) c5(81880, 81881, 81882, 81883, 81884, 81885) c6( ) c7(gh, T, aiH, ci, Hr, x, oG, iI, anV, K, qM, pk, yo, aW, ou, eM, iT, vA, cj, k, m, gn, Uc, IT, oY, aj, b, kH, h, hn, avP, aq, ajo, cox, zZ, op, bo, hL, hR, fL, zl, IB, Po, B, qc, bL, uI, dA, DD, cz, v, avO, cow, er, Mg, mj, aT, jj, hK, rz, rE, ae, bA, apL, s, Y, en, cl, t, ck, ov, bt, jh, hF, mC, ad, yh, iL, ff, bBO, eZ, OG, oQ, i, y, vt, kS); #c1(PBX1) c2(XP_005245285) c3(pre-B-cell leukemia transcription factor 1 isoform X2) c4( ) c5(266394) c6( ) c7(gh, T, aiH, ci, Hr, x, oG, iI, anV, K, qM, pk, yo, aW, ou, eM, iT, vA, cj, k, m, gn, Uc, IT, oY, aj, b, kH, h, hn, avP, aq, ajo, cox, zZ, op, bo, hL, hR, fL, zI, lB, Po, B, qc, bL, uI, dA, DD, cz, v, avO, cow, er, Mg, mj, aT, jj, hK, rz, rE, ae, bA, apL, s, Y, en, cl, t, ck, ov, bt, jh, hF, mC, ad, yh, iL, ff, bBO, eZ, OG, oQ, i, y, vt, kS); #c1(PBX1) c2(XP_005245286) c3(pre-B-cell leukemia transcription factor 1 isoform X1) c4(266395, 266396) c5(266397, 266398, 266399, 266400, 266401, 266402, 266403) c6( ) c7(gh, T, aiH, ci, Hr, x, oG, iI, anV, K, qM, pk, yo, aW, ou, eM, iT, vA, cj, k, m, gn, Uc, IT, oY, aj, b, kH, h, hn, avP, aq, ajo, cox, zZ, op, bo, hL, hR, fL, zI, lB, Po, B, qc, bL, uI, dA, DD, cz, v, avO, cow, er, Mg, mj, aT, jj, hK, rz, rE, ae, bA, apL, s, Y, en, cl, t, ck, ov, bt, jh, hF, mC, ad, yh, iL, ff, bBO, eZ, OG, oQ, i, y, vt, kS); #c1(PBX1) c2(XP_005245287) c3(pre-B-cell leukemia transcription factor 1 isoform X7) c4(266404) c5(266405, 266406, 266407, 266408, 266409, 266410, 266411, 266412, 266413, 266414, 266415) c6( ) c7(gh, T, aiH, ci, Hr, x, oG, iI, anV, K, qM, pk, yo, aW, ou, eM, iT, vA, cj, k, m, gn, Uc, IT, oY, aj, b, kH, h, hn, avP, aq, ajo, cox, zZ, op, bo, hL, hR, fL, zI, lB, Po, B, qc, bL, uI, dA, DD, cz, v, avO, cow, er, Mg, mj, aT, jj, hK, rz, rE, ae, bA, apL, s, Y, en, cl, t, ck, ov, bt, jh, hF, mC, ad, yh, iL, ff, bBO, eZ, OG, oQ, i, y, vt, kS); #c1(PBX1) c2(XP_006711410) c3(pre-B-cell leukemia transcription factor 1 isoform X6) c4( ) c5(286008, 286009) c6( ) c7(gh, T, aiH, ci, Hr, x, oG, iI, anV, K, qM, pk, yo, aW, ou, eM, iT, vA, cj, k, m, gn, Uc, IT, oY, aj, b, kH, h, hn, avP, aq, ajo, cox, zZ, op, bo, hL, hR, fL, zI, lB, Po, B, qc, bL, uI, dA, DD, cz, v, avO, cow, er, Mg, mj, aT, jj, hK, rz, rE, ae, bA, apL, s, Y, en, cl, t, ck, ov, bt, jh, hF, mC, ad, yh, iL, ff, bBO, eZ, OG, oQ, i, y, vt, kS); #c1(PBX1) c2(XP_011507892) c3(pre-B-cell leukemia transcription factor 1 isoform X3) c4(298156) c5(298157, 298158, 298159, 298160, 298161, 298162) c6( ) c7(gh, T, aiH, ci, Hr, x, oG, iI, anV, K, qM, pk, yo, aW, ou, eM, iT, vA, cj, k, m, gn, Uc, IT, oY, aj, b, kH, h, hn, avP, aq, ajo, cox, zZ, op, bo, hL, hR, fL, zl, IB, Po, B, qc, bL, uI, dA, DD, cz, v, avO, cow, er, Mg, mj, aT, jj, hK, rz, rE, ae, bA, apL, s, Y, en, cl, t, ck, ov, bt, jh, hF, mC, ad, yh, iL, ff, bBO, eZ, OG, oQ, i, y, vt, kS); #c1(PBX1) c2(XP_011507895) c3(pre-B-cell leukemia transcription factor 1 isoform X5) c4(298163) c5(298164, 298165, 298166, 298167, 298168, 298169) c6( ) c7(gh, T, aiH, ci, Hr, x, oG, iI, anV, K, qM, pk, yo, aW, ou, eM, iT, vA, cj, k, m, gn, Uc, IT, oY, aj, b, kH, h, hn, avP, aq, ajo, cox, zZ, op, bo, hL, hR, fL, zI, lB, Po, B, qc, bL, uI, dA, DD, cz, v, avO, cow, er, Mg, mj, aT, jj, hK, rz, rE, ae, bA, apL, s, Y, en, cl, t, ck, ov, bt, jh, hF, mC, ad, yh, iL, ff, bBO, eZ, OG, oQ, i, y, vt, kS); #c1(PBX2) c2(NP_002577) c3(pre-B-cell leukemia transcription factor 2) c4(129903, 129904, 129905, 129906, 129907) c5(129908, 129909, 129910, 129911, 129912, 129913, 129914, 129915, 129916, 129917, 129918, 129919, 129920, 129921, 129922, 129923, 129924, 129925, 129926, 129927, 129928, 129929, 129930, 129931, 129932, 129933, 129934, 129935, 129936, 129937, 129938, 129939, 129940, 129941, 129942, 129943, 129944, 129945, 129946, 129947, 129948, 129949, 129950, 129951, 129952, 129953, 129954, 129955, 129956, 129957, 129958, 129959, 129960, 129961, 129962, 129963, 129964, 129965, 129966, 129967, 129968, 129969, 129970, 129971, 129972, 129973, 129974, 129975, 129976, 129977, 129978, 129979, 129980, 129981, 129982, 129983, 129984, 129985, 129986, 129987, 129988, 129989, 129990, 129991, 129992, 129993, 129994, 129995, 129996, 129997, 129998, 129999, 130000, 130001, 130002, 130003, 130004) c6( ) c7(bL, bM, Mg, eM, Y, cr, eZ, Hn, iV, bt); #c1(PBX3) c2(NP_001128250) c3(pre-B-cell leukemia transcription factor 3 isoform 2) c4(49786, 49787) c5(49788, 49789, 49790, 49791, 49792, 49793, 49794, 49795, 49796, 49797, 49798) c6( ) c7(ck, Na, aw, Nc, gm, hp, bt, ae, ad, Hp); #c1(PBX3) c2(NP_006186) c3(pre-B-cell leukemia transcription factor 3 isoform 1) c4(162704) c5(162705, 162706, 162707, 162708, 162709, 162710, 162711) c6( ) c7(ck, Na, aw, Nc, gm, hp, bt, ae, ad, Hp); #c1(PBX3) c2(XP_006717193) c3(pre-B-cell leukemia transcription factor 3 isoform X1) c4(290792) c5(290793, 290794, 290795, 290796, 290797, 290798) c6( ) c7(ck, Na, aw, Nc, gm, hp, bt, ae, ad, Hp); #c1(PBX3) c2(XP_006717195) c3(pre-B-cell leukemia transcription factor 3 isoform X6) c4(290799) c5(290800, 290801, 290802, 290803, 290804, 290805) c6( ) c7(ck, Na, aw, Nc, gm, hp, bt, ae, ad, Hp); #c1(PBX3) c2(XP_011517060) c3(pre-B-cell leukemia transcription factor 3 isoform X8) c4(310549) c5(310550, 310551, 310552, 310553, 310554, 310555) c6( ) c7(ck, Na, aw, Nc, gm, hp, bt, ae, ad, Hp); #c1(PBX4) c2(NP_079521) c3(pre-B-cell leukemia transcription factor 4) c4(218569) c5(218570, 218571, 218572, 218573, 218574, 218575) c6( ) c7(x, Az, k); #c1(PC) c2(XP_011543388) c3(pyruvate carboxylase, mitochondrial isoform X1) c4(342272, 342273) c5(342274, 342275, 342276, 342277, 342278, 342279, 342280, 342281, 342282, 342283, 342284, 342285, 342286, 342287, 342288, 342289, 342290, 342291, 342292, 342293) c6( ) c7(bM, T, eg, cR, nA, pM, rc, dP, aT, K, bq, aOh, pk, is, iZ, aW, fQ, eS, bz, awp, SE, hr, cX, uJ, avB); #c1(PCBD1) c2(NP_000272) c3(pterin-4-alpha-carbinnlamine dehydratase isoform 1) c4(6053) c5(6054, 6055, 6056, 6057, 6058, 6059) c6( ) c7(bL, uI, jx, fd, acU, aj, v, ame, J, ahD, coy, aU, bgF, MG, Pf, Vq, bN, DF, mf, dy, zG, LS); #c1(PCBD2) c2(NP_115527) c3(pterin-4-alpha-carbinnlamine dehydratase 2) c4(223076) c5(223077, 223078, 223079, 223080, 223081, 223082, 223083, 223084, 223085, 223086) c6( ) c7(bL, bE, Id, bB, azm, BF, X); #c1(PCBP1) c2(NP_006187) c3(poly(rC)-binding protein 1) c4(162712) c5(162713, 162714, 162715, 162716, 162717, 162718) c6( ) c7(ng, T, cc, e, aT, h, aq, B); #c1(PCBP2) c2(NP_001092090) c3(poly(rC)-binding protein 2 isoform c) c4(39303) c5(39304, 39305, 39306, 39307, 39308, 39309) c6( ) c7(T, ff, jx, apn, en, ad); #c1(PCBP2) c2(NP_001122383) c3(poly(rC)-binding protein 2 isoform d) c4(46552) c5(46553, 46554, 46555, 46556, 46557, 46558) c6( ) c7(T, ff, jx, apn, en, ad); #c1(PCBP2) c2(NP_001122384) c3(poly(rC)-binding protein 2 isoform e) c4(46559) c5(46560, 46561, 46562, 46563, 46564, 46565, 46566, 46567, 46568, 46569, 46570, 46571) c6( ) c7(T, ff, jx, apn, en, ad); #c1(PCBP2) c2(NP_001122385) c3(poly(rC)-binding protein 2 isoform f) c4(46572) c5(46573, 46574, 46575, 46576, 46577, 46578) c6( ) c7(T, ff, jx, apn, en, ad); #c1(PCBP2) c2(NP_001122386) c3(poly(rC)-binding protein 2 isoform g) c4(46579) c5(46580, 46581, 46582, 46583, 46584, 46585) c6( ) c7(T, ff, jx, apn, en, ad); #c1(PCBP2) c2(NP_005007) c3(poly(rC)-binding protein 2 isoform a) c4(152028) c5(152029, 152030, 152031, 152032, 152033, 152034) c6( ) c7(T, ff, jx, apn, en, ad); #c1(PCBP2) c2(NP_114366) c3(poly(rC)-binding protein 2 isoform b) c4(222496, 222497) c5(222498, 222499, 222500, 222501, 222502, 222503) c6( ) c7(T, ff, jx, apn, en, ad); #c1(PCBP3) c2(NP_001123613) c3(poly(rC)-binding protein 3 isoform 2) c4(47815, 47816) c5(47817, 47818, 47819, 47820, 47821, 47822, 47823, 47824, 47825, 47826, 47827, 47828, 47829) c6( ) c7(bK); #c1(PCBP3) c2(NP_065389) c3(poly(rC)-binding protein 3 isoform 1) c4(204651, 204652, 204653, 204654) c5(204655, 204656, 204657, 204658, 204659, 204660, 204661, 204662, 204663, 204664, 204665, 204666, 204667, 204668, 204669, 204670, 204671, 204672, 204673, 204674, 204675, 204676, 204677, 204678, 204679, 204680, 204681, 204682) c6( ) c7(bK); #c1(PCBP4) c2(XP_005265387) c3(poly(rC)-binding protein 4 isoform X3) c4(279484, 279485, 279486, 279487, 279488, 279489, 279490) c5(279491, 279492, 279493, 279494) c6( ) c7(T, jh, it, bB, oY, fd, Kh, ci, C, nA, xg, hF, AO, aCi, q, ad, eA, av, aT, ask, ae, pi, avP, je, aW, t, bz, all, ck, Qi, nM, iM, eM, kB, bE, CZ, m, bt, kS, L); #c1(PCBP4) c2(XP_005265388) c3(poly(rC)-binding protein 4 isoform X1) c4( ) c5(279495, 279496, 279497, 279498, 279499, 279500, 279501, 279502, 279503, 279504, 279505, 279506, 279507, 279508, 279509, 279510, 279511, 279512, 279513, 279514, 279515, 279516) c6( ) c7(T, jh, it, bB, oY, fd, Kh, ci, C, nA, xg, hF, AO, aCi, q, ad, eA, av, aT, ask, ae, pi, avP, je, aW, t, bz, all, ck, Qi, nM, iM, eM, kB, bE, CZ, m, bt, kS, L); #c1(PCBP4) c2(XP_005265389) c3(poly(rC)-binding protein 4 isoform X4) c4(279517, 279518, 279519, 279520, 279521) c5(279522, 279523, 279524) c6( ) c7(T, jh, it, bB, oY, fd, Kh, ci, C, nA, xg, hF, AO, aCi, q, ad, eA, av, aT, ask, ae, pi, avP, je, aW, t, bz, all, ck, Qi, nM, iM, eM, kB, bE, CZ, m, bt, kS, L); #c1(PCBP4) c2(XP_006713333) c3(poly(rC)-binding protein 4 isoform X2) c4( ) c5(287086, 287087, 287088, 287089, 287090, 287091, 287092, 287093, 287094, 287095, 287096, 287097, 287098) c6( ) c7(T, jh, it, bB, oY, fd, Kh, ci, C, nA, xg, hF, AO, aCi, q, ad, eA, av, aT, ask, ae, pi, avP, je, aW, t, bz, all, ck, Qi, nM, iM, eM, kB, bE, CZ, m, bt, kS, L); #c1(PCBP4) c2(XP_006713334) c3(poly(rC)-binding protein 4 isoform X5) c4( ) c5(287099, 287100, 287101, 287102, 287103, 287104, 287105, 287106, 287107, 287108, 287109, 287110, 287111, 287112, 287113, 287114, 287115, 287116, 287117, 287118, 287119, 287120, 287121, 287122, 287123, 287124, 287125, 287126, 287127, 287128, 287129, 287130, 287131, 287132, 287133, 287134, 287135, 287136, 287137, 287138, 287139, 287140) c6( ) c7(T, jh, it, bB, oY, fd, Kh, ci, C, nA, xg, hF, AO, aCi, q, ad, eA, av, aT, ask, ae, pi, avP, je, aW, t, bz, all, ck, Qi, nM, iM, eM, kB, bE, CZ, m, bt, kS, L); #c1(PCCA) c2(NP_000273) c3(propionyl-CoA carboxylase alpha chain, mitochondrial isoform a precursor) c4(6060) c5(6061, 6062, 6063, 6064, 6065, 6066, 6067, 6068, 6069, 6070) c6( ) c7(coz, ac, r, dq, j, g, XL); #c1(PCCA) c2(NP_001121164) c3(propionyl-CoA carboxylase alpha chain, mitochondrial isoform b) c4(45268, 45269, 45270, 45271, 45272) c5(45273, 45274, 45275, 45276, 45277, 45278, 45279, 45280, 45281, 45282, 45283, 45284, 45285, 45286, 45287, 45288, 45289, 45290, 45291, 45292, 45293, 45294, 45295, 45296) c6( ) c7(coz, ac, r, dq, j, g, XL); #c1(PCCA) c2(NP_001171475) c3(propionyl-CoA carboxylase alpha chain, mitochondrial isoform c precursor) c4(70246, 70247) c5(70248, 70249, 70250, 70251, 70252, 70253, 70254, 70255, 70256, 70257, 70258, 70259, 70260, 70261, 70262, 70263) c6( ) c7(coz, ac, r, dq, j, g, XL); #c1(PCCA) c2(XP_005254116) c3(propionyl-CoA carboxylase alpha chain, mitochondrial isoform X2) c4(272983) c5(272984, 272985, 272986, 272987, 272988, 272989, 272990, 272991, 272992, 272993, 272994, 272995, 272996, 272997, 272998, 272999, 273000, 273001, 273002, 273003) c6(273004) c7(coz, ac, r, dq, j, g, XL); #c1(PCCA) c2(XP_011519395) c3(propionyl-CoA carboxylase alpha chain, mitochondrial isoform X1) c4( ) c5(314049) c6( ) c7(coz, ac, r, dq, j, g, XL); #c1(PCCB) c2(NP_000523) c3(propionyl-CoA carboxylase beta chain, mitochondrial isoform 1 precursor) c4(11796, 11797) c5(11798, 11799, 11800, 11801, 11802, 11803, 11804, 11805, 11806, 11807, 11808, 11809) c6( ) c7(coz, dq, g, XL, r); #c1(PCCB) c2(NP_001171485) c3(propionyl-CoA carboxylase beta chain, mitochondrial isoform 2 precursor) c4(70286) c5(70287, 70288, 70289, 70290, 70291, 70292) c6( ) c7(coz, dq, g, XL, r); #c1(PCDH1) c2(NP_001265542) c3(protocadherin-1 isoform 3) c4( ) c5(98786, 98787, 98788, 98789, 98790, 98791) c6( ) c7(bM, cT, z, sp, pM, eE); #c1(PCDH1) c2(NP_002578) c3(protocadherin-1 isoform 1 precursor) c4(130005, 130006, 130007) c5(130008, 130009, 130010, 130011, 130012, 130013, 130014, 130015, 130016, 130017, 130018, 130019) c6( ) c7(bM, cT, z, sp, pM, eE); #c1(PCDH1) c2(NP_115796) c3(protocadherin-1 isoform 2 precursor) c4(223929) c5(223930, 223931, 223932, 223933, 223934, 223935) c6( ) c7(bM, cT, z, sp, pM, eE); #c1(PCDH10) c2(NP_116586) c3(protocadherin-10 isoform 1 precursor) c4(226301, 226302) c5(226303, 226304, 226305, 226306, 226307, 226308, 226309, 226310, 226311, 226312, 226313, 226314) c6( ) c7(T, fM, dA, if, ha, jh, aA, fd, n, j, ci, nA, qN, yU, FR, q, hX, x, Bl, hb, yZ, lm, rz, pl, iU, r, dg, aF, cl, bN, Ye, ck, iT, Kr, bMt, k, UF, B); #c1(PCDH11X) c2(NP_001161832) c3(protocadherin-11 X-linked isoform e precursor) c4(66121) c5( ) c6( ) c7(Kc, iH, vJ, iI, gI, aQM, af); #c1(PCDH11X) c2(NP_001161833) c3(protocadherin-11 X-linked isoform f precursor) c4(66122) c5(66123, 66124, 66125, 66126, 66127, 66128) c6( ) c7(Kc, iH, vJ, iI, gI, aQM, af); #c1(PCDH11X) c2(NP_001161834) c3(protocadherin-11 X-linked isoform g precursor) c4(66129, 66130) c5(66131, 66132, 66133, 66134, 66135, 66136, 66137, 66138, 66139, 66140, 66141, 66142) c6( ) c7(Kc, iH, vJ, iI, gI, aQM, af); #c1(PCDH11X) c2(NP_116751) c3(protocadherin-11 X-linked isoform d precursor) c4(226363) c5(226364, 226365, 226366, 226367, 226368) c6( ) c7(Kc, iH, vJ, iI, gI, aQ, af); #c1(PCDH11X) c2(XP_011529213) c3(protocadherin-11 X-linked isoform X2) c4(324630) c5(324631, 324632) c6( ) c7(Kc, iH, vJ, iI, gI, aQM, af); #c1(PCDH11X) c2(XP_011529214) c3(protocadherin-11 X-linked isoform X3) c4( ) c5(324633, 324634, 324635, 324636, 324637, 324638) c6( ) c7(Kc, iH, vJ, iI, gI, aQM, af); #c1(PCDH11X) c2(XP_011529215) c3(protocadherin-11 X-linked isoform X4) c4(324639) c5(324640, 324641, 324642, 324643, 324644, 324645) c6( ) c7(Kc, iH, vJ, iI, gI, aQM, af); #c1(PCDH11X) c2(XP_011529216) c3(protocadherin-11 X-linked isoform X1) c4(324646, 324647) c5(324648, 324649, 324650, 324651, 324652, 324653, 324654, 324655, 324656, 324657, 324658) c6( ) c7(Kc, iH, vJ, iI, gI, aQM, af); #c1(PCDH11X) c2(XP_011529218) c3(protocadherin-11 X-linked isoform X5) c4(324659) c5(324660, 324661, 324662, 324663, 324664, 324665, 324666, 324667, 324668, 324669, 324670, 324671) c6( ) c7(Kc, iH, vJ, iI, gI, aQM, af); #c1(PCDH11Y) c2(NP_116753) c3(protocadherin-11 Y-linked isoform a) c4(226369) c5(226370, 226371, 226372, 226373, 226374, 226375) c6( ) c7(gI, he, iH, ad, bN); #c1(PCDH11Y) c2(NP_116754) c3(protocadherin-11 Y-linked isoform b precursor) c4(226376) c5(226377, 226378, 226379, 226380, 226381, 226382) c6( ) c7(gI, he, iH, ad, bN); #c1(PCDH11Y) c2(NP_116755) c3(protocadherin-11 Y-linked isoform c precursor) c4(226383, 226384) c5(226385, 226386, 226387, 226388, 226389, 226390, 226391, 226392, 226393, 226394, 226395, 226396) c6( ) c7(gI, he, iH, ad, bN); #c1(PCDH15) c2(NP_001136235) c3(protocadherin-15 isoform CD1-1 precursor) c4(54542) c5(54543, 54544, 54545, 54546, 54547, 54548) c6( ) c7(aQU, bM, alx, alz, coC, IR, af, Fi, nx, aw, aly, oc, cfL, coA, coB, y, IB, Bh, cd, nC); #c1(PCDH15) c2(NP_001136236) c3(protocadherin-15 isoform CD1-2 precursor) c4(54549, 54550, 54551) c5(54552, 54553, 54554, 54555, 54556, 54557, 54558, 54559, 54560, 54561, 54562, 54563) c6( ) c7(aQU, bM, alx, alz, coC, IR, af, Fi, nx, aw, aly, oc, cfL, coA, coB, y, lB, Bh, cd, nC); #c1(PCDH15) c2(NP_001136237) c3(protocadherin-15 isoform CD1-6 precursor) c4(54564, 54565, 54566) c5(54567, 54568, 54569, 54570, 54571, 54572, 54573) c6( ) c7(aQU, bM, alx, alz, coC, IR, af, Fi, nx, aw, aly, oc, cfL, coA, coB, y, IB, Bh, cd, nC); #c1(PCDH15) c2(NP_001136238) c3(protocadherin-15 isoform CD1-7 precursor) c4(54574, 54575) c5(54576, 54577, 54578, 54579, 54580, 54581) c6( ) c7(aQU, bM, alx, alz, coC, IR, af, Fi, nx, aw, aly, oc, cfL, coA, coB, y, lB, Bh, cd, nC); #c1(PCDH15) c2(NP_001136239) c3(protocadherin-15 isoform CD1-8 precursor) c4(54582) c5(54583, 54584, 54585, 54586, 54587, 54588) c6( ) c7(aQU, bM, alx, alz, coC, IR, af, Fi, nx, aw, aly, oc, cfL, coA, coB, y, lB, Bh, cd, nC); #c1(PCDH15) c2(NP_001136240) c3(protocadherin-15 isoform CD1-9 precursor) c4(54589) c5(54590, 54591, 54592, 54593, 54594, 54595) c6( ) c7(aQU, bM, alx, alz, coC, IR, af, Fi, nx, aw, aly, oc, cfL, coA, coB, y, lB, Bh, cd, nC); #c1(PCDH15) c2(NP_001136241) c3(protocadherin-15 isoform CD2-1 precursor) c4(54596) c5(54597, 54598, 54599, 54600, 54601, 54602) c6( ) c7(aQU, bM, alx, alz, coC, IR, af, Fi, nx, aw, aly, oc, cfL, coA, coB, y, lB, Bh, cd, nC); #c1(PCDH15) c2(NP_001136242) c3(protocadherin-15 isoform CD2-2 precursor) c4(54603, 54604) c5(54605, 54606, 54607, 54608, 54609, 54610, 54611, 54612, 54613, 54614, 54615, 54616, 54617, 54618, 54619, 54620, 54621, 54622, 54623, 54624, 54625, 54626, 54627, 54628, 54629, 54630, 54631, 54632, 54633, 54634, 54635) c6( ) c7(aQU, bM, alx, alz, coC, IR, af, Fi, nx, aw, aly, oc, cfL, coA, coB, y, lB, Bh, cd, nC); #c1(PCDH15) c2(NP_001136243) c3(protocadherin-15 isoform CD3-1 precursor) c4(54636) c5(54637, 54638, 54639, 54640, 54641, 54642) c6( ) c7(aQU, bM, alx, alz, coC, IR, af, Fi, nx, aw, aly, oc, cfL, coA, coB, y, lB, Bh, cd, nC); #c1(PCDH15) c2(NP_001136244) c3(protocadherin-15 isoform CD3-2 precursor) c4(54643, 54644, 54645) c5(54646, 54647, 54648, 54649, 54650, 54651, 54652, 54653, 54654, 54655, 54656, 54657, 54658, 54659, 54660, 54661, 54662, 54663, 54664, 54665, 54666, 54667, 54668, 54669, 54670, 54671, 54672, 54673, 54674) c6( ) c7(aQU, bM, alx, alz, coC, IR, af, Fi, nx, aw, aly, oc, cfL, coA, coB, y, lB, Bh, cd, nC); #c1(PCDH15) c2(NP_001136245) c3(protocadherin-15 isoform CD1-10 precursor) c4(54675) c5(54676, 54677, 54678, 54679, 54680, 54681) c6( ) c7(aQU, bM, alx, alz, coC, IR, af, Fi, nx, aw, aly, oc, cfL, coA, coB, y, lB, Bh, cd, nC); #c1(PCDH15) c2(NP_149045) c3(protocadherin-15 isoform CD1-4 precursor) c4(226903, 226904) c5(226905, 226906, 226907, 226908, 226909, 226910) c6( ) c7(aQU, bM, alx, alz, coC, IR, af, Fi, nx, aw, aly, oc, cfL, coA, coB, y, lB, Bh, cd, nC); #c1(PCDH17) c2(XP_005266414) c3(protocadherin-17 isoform X1) c4(279994) c5(279995, 279996, 279997, 279998, 279999, 280000) c6( ) c7(Ej, T, dL, eL, it); #c1(PCDH18) c2(NP_001287757) c3(protocadherin-18 isoform 2 precursor) c4(112809) c5(112810, 112811, 112812, 112813, 112814, 112815) c6( ) c7(cm, eZ, bA, an); #c1(PCDH18) c2(NP_061908) c3(protocadherin-18 isoform 1 precursor) c4(201154) c5(201155, 201156, 201157, 201158, 201159, 201160) c6( ) c7(cm, eZ, bA, an); #c1(PCDH19) c2(NP_001098713) c3(protocadherin-19 isoform a precursor) c4(41517) c5(41518, 41519, 41520, 41521, 41522, 41523) c6( ) c7(yr, ac, rz, hb, Kr, ha, bMt, nf, n, yZ, dg, lm, nA, coD, yU, FR, bN); #c1(PCDH19) c2(NP_001171809) c3(protocadherin-19 isoform c precursor) c4(71798) c5(71799, 71800, 71801, 71802, 71803, 71804) c6( ) c7(yr, ac, rz, hb, Kr, ha, bMt, nf, n, yZ, dg, lm, nA, coD, yU, FR, bN); #c1(PCDH19) c2(NP_065817) c3(protocadherin-19 isoform b precursor) c4(205678) c5(205679, 205680, 205681, 205682, 205683, 205684) c6( ) c7(yr, ac, rz, hb, Kr, ha, bMt, nf, n, yZ, dg, Im, nA, coD, yU, FR, bN); #c1(PCDH20) c2(NP_073754) c3(protocadherin-20 precursor) c4(213473, 213474) c5(213475, 213476, 213477, 213478, 213479, 213480, 213481, 213482, 213483, 213484, 213485, 213486, 213487, 213488, 213489, 213490) c6( ) c7(eM, aj, EQ); #c1(PCDH7) c2(NP_001166994) c3(protocadherin-7 isoform d precursor) c4(68776) c5(68777, 68778, 68779, 68780, 68781, 68782) c6( ) c7(Qi, ac, wL, ha, aj, dL, j, cm, fq); #c1(PCDH7) c2(NP_002580) c3(protocadherin-7 isoform a precursor) c4(130027) c5(130028, 130029, 130030, 130031, 130032, 130033) c6( ) c7(Qi, ac, wL, ha, aj, dL, j, cm, fq); #c1(PCDH7) c2(NP_115833) c3(protocadherin-7 isoform c precursor) c4(224213) c5(224214, 224215, 224216, 224217, 224218, 224219) c6( ) c7(Qi, ac, wL, ha, aj, dL, j, cm, fq); #c1(PCDH8) c2(NP_002581) c3(protocadherin-8 isoform 1 precursor) c4(130034, 130035, 130036) c5(130037, 130038, 130039, 130040, 130041, 130042, 130043, 130044, 130045, 130046, 130047, 130048, 130049, 130050, 130051, 130052, 130053, 130054) c6( ) c7(T, dD, aW, ea, aT, j, eq, fr, QK, ad); #c1(PCDH8) c2(NP_116567) c3(protocadherin-8 isoform 2 precursor) c4(226210) c5(226211, 226212, 226213, 226214, 226215, 226216) c6( ) c7(T, dD, aW, ea, aT, j, eq, fr, QK, ad); #c1(PCDH9) c2(NP_065136) c3(protocadherin-9 isoform 2 precursor) c4(204135) c5(204136, 204137, 204138, 204139, 204140, 204141, 204142, 204143, 204144, 204145) c6( ) c7(T, d, VX, dY, v, rz, eA, bN); #c1(PCDH9) c2(NP_982354) c3(protocadherin-9 isoform 1 precursor) c4(263369) c5(263370, 263371, 263372, 263373, 263374, 263375, 263376, 263377, 263378, 263379) c6( ) c7(T, d, VX, dY, v, rz, eA, bN); #c1(PCDHA1) c2(NP_061723) c3(protocadherin alpha-1 isoform 1 precursor) c4(200391) c5(200392, 200393, 200394, 200395, 200396, 200397) c6( ) c7(T, bK); #c1(PCDHA1) c2(NP_113598) c3(protocadherin alpha-1 isoform 2 precursor) c4(221619) c5(221620, 221621, 221622, 221623, 221624, 221625) c6( ) c7(T, bK); #c1(PCDHA1) c2(NP_113599) c3(protocadherin alpha-1 isoform 3 precursor) c4(221626) c5(221627, 221628, 221629, 221630, 221631, 221632) c6( ) c7(T, bK); #c1(PCDHA4) c2(NP_061730) c3(protocadherin alpha-4 isoform 1 precursor) c4(200398, 200399) c5(200400, 200401, 200402, 200403, 200404, 200405, 200406, 200407, 200408, 200409, 200410, 200411) c6( ) c7(bL, bO, coE, aj, bS, gf, et, v, V, VV, Vs, J, aQE, iX, Sb, bK, K, he, Gv, gC, dq, iV, Z, FX, jb, FT, pH, aap, ok, ac, cA, vK, Ei, ei, Xu, jd, ra, abW); #c1(PCDHA4) c2(NP_113688) c3(protocadherin alpha-4 isoform 2 precursor) c4(222063) c5(222064, 222065, 222066, 222067, 222068, 222069) c6( ) c7(bL, bO, coE, aj, bS, gf, et, v, V, VV, Vs, J, aQE, iX, Sb, bK, K, he, Gv, gC, dq, iV, Z, FX, jb, FT, pH, aap, ok, ac, cA, vK, Ei, ei, Xu, jd, ra, abW); #c1(PCDHA6) c2(NP_061732) c3(protocadherin alpha-6 isoform 1 precursor) c4(200412) c5(200413, 200414, 200415, 200416, 200417, 200418) c6( ) c7(yE, jT, af, bL, bA); #c1(PCDHA6) c2(NP_114037) c3(protocadherin alpha-6 isoform 3 precursor) c4(222102) c5(222103, 222104, 222105, 222106, 222107, 222108) c6( ) c7(yE, jT, af, bL, bA); #c1(PCDHB1) c2(NP_037472) c3(protocadherin beta-1 precursor) c4(175685) c5(175686, 175687, 175688, 175689, 175690, 175691) c6( ) c7(cm, Qi); #c1(PCDHB2) c2(NP_061759) c3(protocadherin beta-2 precursor) c4(200440) c5(200441, 200442, 200443, 200444, 200445, 200446) c6( ) c7(fq); #c1(PCDHB3) c2(NP_061760) c3(protocadherin beta-3 precursor) c4(200447) c5(200448, 200449, 200450, 200451, 200452, 200453) c6( ) c7(fq); #c1(PCDHB8) c2(NP_061993) c3(protocadherin beta-8 precursor) c4(201788) c5(201789, 201790, 201791, 201792, 201793, 201794) c6( ) c7(Y); #c1(PCDHGA11) c2(NP_061737) c3(protocadherin gamma-A11 isoform 1 precursor) c4(200419) c5(200420, 200421, 200422, 200423, 200424, 200425) c6( ) c7(eA, as); #c1(PCDHGA11) c2(NP_114481) c3(protocadherin gamma-A11 isoform 3 precursor) c4(222823) c5(222824, 222825, 222826, 222827, 222828, 222829) c6( ) c7(eA, as); #c1(PCDHGA3) c2(NP_061739) c3(protocadherin gamma-A3 isoform 1 precursor) c4(200426) c5(200427, 200428, 200429, 200430, 200431, 200432) c6( ) c7(MU); #c1(PCDHGB4) c2(NP_003727) c3(protocadherin gamma-B4 isoform 1 precursor) c4(140472) c5(140473, 140474, 140475, 140476, 140477, 140478) c6( ) c7(g, s); #c1(PCDHGB6) c2(NP_061749) c3(protocadherin gamma-B6 isoform 1 precursor) c4(200433) c5(200434, 200435, 200436, 200437, 200438, 200439) c6( ) c7(aT); #c1(PCDHGC3) c2(NP_002579) c3(protocadherin gamma-C3 isoform 1 precursor) c4(130020) c5(130021, 130022, 130023, 130024, 130025, 130026) c6( ) c7(q, ci, s, r); #c1(PCEDI8) c2(NP_001268358) c3(PC-esterase domain-containing protein 1B) c4(99749, 99750, 99751, 99752, 99753) c5(99754, 99755, 99756, 99757, 99758, 99759, 99760, 99761, 99762, 99763, 99764, 99765, 99766, 99767, 99768, 99769, 99770, 99771, 99772, 99773, 99774, 99775, 99776, 99777, 99778, 99779, 99780, 99781, 99782, 99783, 99784, 99785, 99786, 99787) c6( ) c7(oe, af); #c1(PCF11) c2(NP_056969) c3(pre-mRNA cleavage complex 2 protein Pcf11) c4(188248, 188249) c5(188250, 188251, 188252, 188253, 188254, 188255, 188256, 188257, 188258, 188259, 188260, 188261) c6( ) c7(h); #c1(PCGF1) c2(NP_116062) c3(polycomb group RING finger protein 1) c4(225311) c5(225312, 225313, 225314, 225315, 225316, 225317) c6( ) c7(y); #c1(PCGF2) c2(XP_005257698) c3(polycomb group RING finger protein 2 isoform X1) c4(275351) c5(275352, 275353, 275354, 275355, 275356, 275357, 275358) c6( ) c7(jf, T, aW, aT, aA, n, aF, ci, ae, ad); #c1(PCGF3) c2(XP_006713915) c3(polycomb group RING finger protein 3 isoform X3) c4(287421) c5(287422, 287423, 287424, 287425, 287426, 287427) c6( ) c7(aHP, aHQ, fq); #c1(PCGF3) c2(XP_011511684) c3(polycomb group RING finger protein 3 isoform X4) c4(302397) c5( ) c6( ) c7(aHP, aHQ, fq); #c1(PCGF3) c2(XP_011511686) c3(polycomb group RING finger protein 3 isoform X6) c4(302398, 302399) c5( ) c6( ) c7(aHP, aHQ, fq); #c1(PCGF3) c2(XP_011511687) c3(polycomb group RING finger protein 3 isoform X7) c4( ) c5(302400, 302401, 302402, 302403, 302404, 302405, 302406, 302407, 302408, 302409, 302410, 302411, 302412, 302413, 302414, 302415, 302416, 302417) c6( ) c7(aHP, aHQ, fq); #c1(PCGF6) c2(NP_001011663) c3(polycomb group RING finger protein 6 isoform a) c4(24668) c5(24669, 24670, 24671, 24672, 24673, 24674) c6( ) c7(fM); #c1(PCGF6) c2(NP_115530) c3(polycomb group RING finger protein 6 isoform b) c4(223101) c5(223102, 223103, 223104, 223105, 223106, 223107) c6( ) c7(fM); #c1(PCID2) c2(NP_001120675) c3(PCI domain-containing protein 2 isoform 1) c4(44475, 44476) c5(44477, 44478, 44479, 44480, 44481, 44482, 44483, 44484, 44485, 44486, 44487, 44488, 44489, 44490, 44491, 44492, 44493, 44494, 44495, 44496) c6( ) c7(dX, bpm, eA, aUF); #c1(PCID2) c2(NP_001245141) c3(PCI domain-containing protein 2 isoform 2) c4(92598) c5(92599, 92600, 92601, 92602, 92603, 92604) c6( ) c7(dX, bpm, eA, aUF); #c1(PCID2) c2(NP_001245142) c3(PCI domain-containing protein 2 isoform 3) c4(92605, 92606) c5(92607, 92608, 92609, 92610, 92611, 92612, 92613, 92614, 92615, 92616, 92617, 92618) c6( ) c7(dX, bpm, eA, aUF); #c1(PCK1) c2(NP_002582) c3(phosphoenolpyruvate carboxykinase, cytosolic [GTP]) c4(130055, 130056, 130057) c5(130058, 130059, 130060, 130061, 130062, 130063) c6( ) c7(bL, dD, eR, af, qQ, fQ, aj, v, eq, ei, bq, B, J); #c1(PCK1) c2(XP_011527141) c3(phosphoenolpyruvate carboxykinase, cytosolic [GTP] isoform X1) c4(321638) c5(321639, 321640, 321641, 321642, 321643, 321644, 321645, 321646, 321647, 321648, 321649, 321650, 321651, 321652, 321653, 321654, 321655, 321656, 321657) c6( ) c7(bL, dD, eR, af, qQ, fQ, aj, v, eq, ei, bq, B, J); #c1(PCK2) c2(NP_001018083) c3(phosphoenolpyruvate carboxykinase [GTP], mitochondrial, isoform 2 precursor) c4(27162) c5(27163, 27164, 27165, 27166, 27167, 27168) c6( ) c7(bL, T, Yn, wK, fc, NT, coF, aq, aj, mf, dG, K, cP, ei, B, J); #c1(PCK2) c2(NP_004554) c3(phosphoenolpyruvate carboxykinase [GTP], mitochondrial, isoform 1 precursor) c4(147605, 147606) c5(147607, 147608, 147609, 147610, 147611, 147612, 147613, 147614) c6( ) c7(bL, T, Yn, wK, fc, NT, coF, aq, aj, mf, dG, K, cP, ei, B, J); #c1(PCL0) c2(NP_055325) c3(protein piccolo isoform 2) c4(180490, 180491, 180492, 180493, 180494) c5(180495, 180496, 180497, 180498, 180499, 180500, 180501, 180502, 180503, 180504, 180505, 180506, 180507, 180508, 180509, 180510, 180511, 180512, 180513, 180514, 180515, 180516, 180517) c6(180518, 180519) c7(bL, cF, alC, bO, bS, bK, ct, nA, Z, bmd, bN); #c1(PCL0) c2(NP_149015) c3(protein piccolo isoform 1) c4(226720, 226721) c5(226722, 226723, 226724, 226725, 226726, 226727, 226728) c6( ) c7(bL, cF, alC, bO, bS, bK, ct, nA, Z, bmd, bN); #c1(PCM1) c2(NP_006188) c3(pericentriolar material, 1 protein) c4(162719) c5(162720, 162721, 162722, 162723, 162724, 162725) c6( ) c7(ou, ul, rR, nM, nB, ci, m, Tp, coG, hF); #c1(PCM1) c2(XP_006716403) c3(pericentriolar material, 1 protein isoform X6) c4(290275) c5(290276, 290277, 290278, 290279, 290280, 290281, 290282, 290283, 290284, 290285, 290286) c6( ) c7(ou, ul, rR, nM, nB, ci, m, Tp, coG, hF); #c1(PCM1) c2(XP_011542835) c3(pericentriolar material, 1 protein isoform X3) c4(341450) c5( ) c6( ) c7(ou, ul, rR, nM, nB, ci, m, Tp, coG, hF); #c1(PCM1) c2(XP_011542842) c3(pericentriolar material, 1 protein isoform X14) c4(341451) c5(341452, 341453, 341454, 341455, 341456, 341457) c6( ) c7(ou, ul, rR, nM, nB, ci, m, Tp, coG, hF); #c1(PCM1) c2(XP_011542844) c3(pericentriolar material, 1 protein isoform X18) c4(341458) c5( ) c6( ) c7(ou, ul, rR, nM, nB, ci, m, Tp, coG, hF); #c1(PCMT1) c2(NP_001238978) c3(protein-L-isoaspartate(D-aspartate) O-methyltransferase isoform 2) c4(88115) c5(88116, 88117, 88118, 88119, 88120, 88121) c6( ) c7(A, lp, il, aj, zZ, J); #c1(PCMT1) c2(NP_001238980) c3(protein-L-isoaspartate(D-aspartate) O-methyltransferase isoform 4) c4(88122) c5(88123, 88124, 88125, 88126, 88127, 88128) c6( ) c7(A, lp, il, aj, zZ, J); #c1(PCMT1) c2(NP_001238982) c3(protein-L-isoaspartate(D-aspartate)O-methyltransferase isoform 1) c4(88129, 88130) c5(88131, 88132, 88133, 88134, 88135, 88136, 88137, 88138, 88139, 88140, 88141, 88142, 88143, 88144, 88145, 88146) c6( ) c7(A, lp, il, aj, zZ, J); #c1(PCMTD1) c2(NP_001273711) c3(protein-L-isoaspartate O-methyltransferase domain-containing protein 1 isoform 2) c4(105702) c5(105703, 105704, 105705, 105706, 105707, 105708) c6( ) c7(IJ, fq, aw, sa); #c1(PCMTD1) c2(NP_443169) c3(protein-L-isoaspartate O-methyltransferase domain-containing protein 1 isoform 1) c4(229705) c5(229706, 229707, 229708, 229709, 229710, 229711, 229712, 229713, 229714, 229715) c6( ) c7(IJ0, fq, aw, sa); #c1(PCNA) c2(NP_872590) c3(proliferating cell nuclear antigen) c4(256457) c5(256458, 256459, 256460, 256461, 256462, 256463, 256464, 256465, 256466, 256467) c6( ) c7(uB, gh, T, os, bM, jW, fR, aC, pf, if, e, aI, fd, bB, ci, aR, ip, x, bv, afr, aE, dE, pX, Qk, ajv, K, hu, pk, dF, bc, eL, cp, DA, akV, yo, bn, aW, col, NR, g, as, zE, eF, ir, cm, bw, iP, eM, nB, AM, dc, nF, vA, U, cj, PV, iS, uJ, k, m, hh, aJi, Vj, iu, aEj, IT, wu, zt, Or, ht, Bm, n, aj, oY, fr, Qh, uE, qN, asS, br, eW, Ma, b, BI, ft, Hx pe, jz, kH, h, eV, Gw, dL, ey, Ha, YT, dx, pi, kj, PX, Lh, ks, ahJ, aq, kp, yq, op, iO, kT, bP, dB, hk, eD, Pl, bo, KT, hL, hR, at, MW, SZ, fL, YH, it, B, AN, cn, bL, fM, dA, AS, mr, jx, eX, aA, GC, hy, v, j, aEb, AO, V, Iu, q, J, er, eA, XX, nv, hb, akU, BJ, MP, gK, aT, cy, rg, zg, aJA, aPa, jj, ae, af, eu, qw, s, vT, iU, Y, ev, ayU, LO, aEk, r, Lf, aYp, lo, en, hf, bu, t, cl, apx, iK, aHG, ck, ov, Qi, aIC, Dy, nM, iM, dh, aJQ, im, bt, rA, coH, GI, hI, id, MH, iW, ml, jh, aHv, oZ, Fb, jE, OH, hF, Fc, mC, ad, afb, hX, qC, Jm, dP, hd, av, NS, hD, vw, wm, fb, DI, d, lx, je, qt, ff, eH, cr, eZ, Ej, aF, VI, anW, iR, bz, LB, bF, gk, bE, Hs, aDJ, bC, Gu, i, hE, kS, X, y, BA); #c1(PCNT) c2(NP_006022) c3(pericentrin) c4(161232, 161233) c5(161234, 161235, 161236, 161237, 161238, 161239, 161240, 161241, 161242, 161243, 161244, 161245) c6( ) c7(T, bO, fd, aHv, aj, J, av, aT, bK, he, ae, af, aii, aW, WE, QK, f, avx, coL, coJ, yA, coK); #c1(PCNXL2) c2(NP_055616) c3(pecanex-like protein 2) c4(182300, 182301) c5(182302, 182303, 182304, 182305, 182306, 182307) c6( ) c7(bL, HN, q, ac, j); #c1(PCNXL2) c2(XP_005273329) c3(pecanex-like protein 2 isoform X1) c4(284479) c5( ) c6( ) c7(bL, HN, q, ac, j); #c1(PCNXL2) c2(XP_006711879) c3(pecanex-like protein 2 isoform X3) c4( ) c5(286270, 286271, 286272, 286273, 286274, 286275) c6( ) c7(bL, HN, q, ac, j); #c1(PCNXL2) c2(XP_011542581) c3(pecanex-like protein 2 isoform X4) c4( ) c5(341137, 341138, 341139, 341140, 341141, 341142) c6( ) c7(bL, HN, q, ac, j); #c1(PCNXL4) c2(NP_071940) c3(pecanex-like protein 4) c4(212423) c5(212424, 212425, 212426, 212427, 212428) c6( ) c7(Qi); #c1(PCNXL4) c2(XP_005268066) c3(pecanex-like protein 4 isoform X1) c4(281461, 281462, 281463) c5(281464, 281465, 281466, 281467, 281468, 281469, 281470, 281471, 281472, 281473, 281474, 281475, 281476, 281477, 281478, 281479, 281480, 281481, 281482, 281483, 281484, 281485) c6( ) c7(Qi); #c1(PCOLCE) c2(NP_002584) c3(procollagen C-endopeptidase enhancer 1 precursor) c4(130064) c5(130065, 130066, 130067, 130068, 130069, 130070) c6( ) c7(dw); #c1(PCOLCE2) c2(NP_037495) c3(procollagen C-endopeptidase enhancer 2 precursor) c4(175838) c5(175839, 175840, 175841, 175842, 175843, 175844) c6( ) c7(xa, dH); #c1(PCP2) c2(NP_777555) c3(Purkinje cell protein 2 homolog isoform 1) c4(251129) c5(251130, 251131, 251132, 251133, 251134, 251135) c6( ) c7(eJ, rU); #c1(PCP4) c2(NP_006189) c3(Purkinje cell protein 4) c4(162726) c5(162727, 162728, 162729, 162730, 162731, 162732) c6( ) c7(s, hW, vA, f, Fg, X, op); #c1(PCSK1) c2(NP_000430) c3(neurnenoncrine convertase 1 isoform 1 preproprotein) c4(8895, 8896) c5(8897, 8898, 8899, 8900, 8901, 8902, 8903, 8904, 8905, 8906, 8907, 8908) c6( ) c7(bL, aec, aw, qQ, hE, cz, jh, aj, dG, j, v, OH, J, mj, il, nX, dL, bK, qM, jo, bq, coN, af, kl, A, coM, adF, DL, fq, ag, hr, ei, bD, gT, adG, y); #c1(PCSK1) c2(NP_001171346) c3(neurnenoncrine convertase 1 isoform 2) c4(70048) c5(70049, 70050, 70051, 70052, 70053, 70054) c6( ) c7(bL, aec, aw, qQ, hE, cz, jh, aj, dG, j, v, OH, J, mj, il, nX, dL, bK, qM, jo, bq, coN, af, kl, A, coM, adF, DL, fq, ag, hr, ei, bD, gT, adG, y); #c1(PCSKIN) c2(NP_037403) c3(proSAAS preproprotein) c4(175327) c5(175328, 175329, 175330, 175331, 175332, 175333) c6( ) c7(bb, v, af, qK); #c1(PCSK2) c2(NP_001188457) c3(neurnenoncrine convertase 2 isoform 3) c4( ) c5(79191, 79192, 79193, 79194, 79195, 79196) c6( ) c7(bL, fU, yo, qJ, ac, c, s, nB, dY, aw, jh, IG, v, dy, jo, bq, OH, af); #c1(PCSK2) c2(NP_001188458) c3(neurnenoncrine convertase 2 isoform 2 preproprotein) c4(79197) c5(79198, 79199, 79200, 79201, 79202, 79203) c6( ) c7(bL, fU, yo, qJ, ac, c, s, nB, dY, aw, jh, IG, v, dy, jo, bq, OH, af); #c1(PCSK2) c2(NP_002585) c3(neuroendocrine convertase 2 isoform 1 preproprotein) c4(130071, 130072) c5(130073, 130074, 130075, 130076, 130077, 130078, 130079) c6( ) c7(bL, fU, yo, qJ, ac, c, s, nB, dY, aw, jh, IG, v, dy, jo, bq, OH, af); #c1(PCSK4) c2(NP_060043) c3(proprotein convertase subtilisin/kexin type 4 preproprotein) c4(193854) c5(193855, 193856, 193857, 193858, 193859, 193860) c6( ) c7(ci, eM); #c1(PCSK4) c2(XP_011526389) c3(proprotein convertase subtilisin/kexin type 4 isoform X3) c4( ) c5(320664) c6( ) c7(ci, eM); #c1(PCSK4) c2(XP_011526395) c3(proprotein convertase subtilisin/kexin type 4 isoform X9) c4(320665) c5(320666, 320667, 320668, 320669, 320670) c6( ) c7(ci, eM); #c1(PCSK4) c2(XP_011526397) c3(proprotein convertase subtilisin/kexin type 4 isoform X11) c4( ) c5(320671, 320672) c6( ) c7(ci, eM); #c1(PCSK5) c2(NP_001177411) c3(proprotein convertase subtilisin/kexin type 5 isoform PC6B preproprotein) c4(72773, 72774, 72775) c5(72776, 72777, 72778, 72779, 72780, 72781) c6( ) c7(gx, dD, bDg, coO, bKP, gY, ea, bjd, acl, agw, Ll, aSp, wR, dy, him, eq, Lk, V, aa, bOA); #c1(PCSK5) c2(NP_006191) c3(proprotein convertase subtilisin/kexin type 5 isoform PC6A preproprotein) c4(162733, 162734) c5(162735, 162736, 162737, 162738, 162739, 162740, 162741, 162742, 162743, 162744, 162745, 162746) c6( ) c7(gx, dD, bDg, coO, bKP, gY, ea, bjd, acl, agw, Ll, aSp, wR, dy, him, eq, Lk, V, aa, bOA); #c1(PCSK5) c2(XP_005252096) c3(proprotein convertase subtilisin/kexin type 5 isoform X1) c4(271540, 271541) c5(271542, 271543, 271544, 271545, 271546, 271547, 271548, 271549, 271550, 271551, 271552, 271553) c6( ) c7(gx, dD, bDg, coO, bKP, gY, ea, bjd, acl, agw, Ll, aSp, wR, dy, him, eq, Lk, V, aa, bOA); #c1(PCSK5) c2(XP_011517071) c3(proprotein convertase subtilisin/kexin type 5 isoform X2) c4( ) c5(310581, 310582, 310583, 310584, 310585, 310586, 310587, 310588, 310589, 310590, 310591, 310592) c6( ) c7(gx, dD, bDg, coO, bKP, gY, ea, bjd, acl, agw, Ll, aSp, wR, dy, him, eq, Lk, V, aa, bOA); #c1(PCSK6) c2(NP_002561) c3(proprotein convertase subtilisin/kexin type 6 isoform PACE4-AI preproprotein) c4(129812) c5(129813, 129814, 129815, 129816, 129817, 129818) c6( ) c7(T, dD, Fn, d, aW, hk, oe, ea, aT, cm, cS, m, coP, eq, adg, t, yA, ae, eA, ad); #c1(PCSK6) c2(NP_612192) c3(proprotein convertase subtilisin/kexin type 6 isoform PACE4-AII preproprotein) c4(236149) c5(236150, 236151, 236152, 236153, 236154, 236155) c6( ) c7(T, dD, Fn, d, aW, hk, oe, ea, aT, cm, cS, m, coP, eq, adg, t, yA, ae, eA, ad); #c1(PCSK6) c2(NP_612196) c3(proprotein convertase subtilisin/kexin type 6 isoform PACE4CS preproprotein) c4(236156) c5(236157, 236158, 236159, 236160, 236161, 236162) c6( ) c7(T, dD, Fn, d, aW, hk, oe, ea, aT, cm, cS, m, coP, eq, adg, t, yA, ae, eA, ad); #c1(PCSK6) c2(NP_612197) c3(proprotein convertase subtilisin/kexin type 6 isoform PACE4C preproprotein) c4(236163) c5(236164, 236165, 236166, 236167, 236168, 236169) c6( ) c7(T, dD, Fn, d, aW, hk, oe, ea, aT, cm, cS, m, coP, eq, adg, t, yA, ae, eA, ad); #c1(PCSK6) c2(NP_612198) c3(proprotein convertase subtilisin/kexin type 6 isoform f preproprotein) c4(236170) c5(236171, 236172, 236173, 236174, 236175, 236176, 236177, 236178, 236179, 236180, 236181) c6( ) c7(T, dD, Fn, d, aW, hk, oe, ea, aT, cm, cS, m, coP, eq, adg, t, yA, ae, eA, ad); #c1(PCSK7) c2(NP_004707) c3(proprotein convertase subtilisin/kexin type 7 preproprotein) c4(148974, 148975) c5(148976, 148977, 148978, 148979, 148980, 148981, 148982, 148983, 148984, 148985, 148986, 148987, 148988) c6( ) c7(gk, aW, aI, aT, yu, fr, bt, dF); #c1(PCSK7) c2(XP_006719002) c3(proprotein convertase subtilisin/kexin type 7 isoform X1) c4(292150, 292151, 292152) c5( ) c6( ) c7(gk, aW, aI, aT, yu, fr, bt, dF); #c1(PCSK7) c2(XP_006719003) c3(proprotein convertase subtilisin/kexin type 7 isoform X4) c4( ) c5(292153, 292154, 292155, 292156, 292157) c6( ) c7(gk, aW, aI, aT, yu, fr, bt, dF); #c1(PCSK7) c2(XP_011541364) c3(proprotein convertase subtilisin/kexin type 7 isoform X3) c4( ) c5(339951, 339952, 339953, 339954, 339955, 339956, 339957, 339958, 339959, 339960, 339961, 339962, 339963, 339964, 339965, 339966) c6( ) c7(gk, aW, aI, aT, yu, fr, bt, dF); #c1(PCTP) c2(NP_001095872) c3(phosphatidylcholine transfer protein isoform 2) c4( ) c5(40870, 40871, 40872, 40873, 40874) c6( ) c7(hJ, jb, dL, at); #c1(PCTP) c2(NP_067036) c3(phosphatidylcholine transfer protein isoform 1) c4(208550, 208551, 208552) c5(208553, 208554, 208555, 208556, 208557, 208558, 208559, 208560, 208561, 208562, 208563, 208564, 208565) c6( ) c7(hJ, jb, dL, at); #c1(PCYTIA) c2(NP_005008) c3(choline-phosphate cytidylyltransferase A) c4(152035, 152036, 152037, 152038, 152039) c5(152040, 152041, 152042, 152043, 152044, 152045, 152046, 152047, 152048, 152049, 152050, 152051, 152052, 152053, 152054, 152055, 152056, 152057, 152058, 152059, 152060, 152061, 152062, 152063, 152064, 152065, 152066, 152067, 152068, 152069, 152070, 152071, 152072, 152073) c6( ) c7(Mb, T, coQ, qX, wu, aO, ht, l, fd, rf, j, eA, ad, Na, aT, Nc, wm, an, hu, ae, af, bf, iU, vT, aW, Y, bu, KQ, ky, kB, lp, iT, y, bt, B); #c1(PCYT1B) c2(NP_001156736) c3(choline-phosphate cytidylyltransferase B isoform 2) c4(61865) c5(61866, 61867, 61868, 61869, 61870, 61871) c6( ) c7(jN); #c1(PCYT1B) c2(NP_001156737) c3(choline-phosphate cytidylyltransferase B isoform 3) c4(61872) c5(61873, 61874, 61875, 61876, 61877, 61878) c6( ) c7(jN); #c1(PCYT1B) c2(NP_004836) c3(choline-phosphate cytidylyltransferase B isoform 1) c4(150174) c5(150175, 150176, 150177, 150178, 150179, 150180) c6( ) c7(jN); #c1(PDAP1) c2(NP_055706) c3(28 kDa heat- and acid-stable phosphoprotein) c4(182952) c5(182953, 182954, 182955, 182956, 182957, 182958) c6( ) c7(T, dA, if, iW, aj, v, qN, cd, b, aoA, zl, d, xX, r, uF, GR, ck, wg, dT, zG, i, ao); #c1(PDC) c2(NP_072098) c3(phosducin isoform b) c4( ) c5(212702, 212703, 212704, 212705, 212706, 212707, 212708, 212709) c6( ) c7(btY, cV, cz, fd, v, fr, bh, oc, bkU, cd, ahR, Hx, hd, oW, aT, dV, ji, K, bc, IR, JI, nf, kt, t, nC, xw, ck, c, vA, m, bt, L); #c1(PDC) c2(XP_011507905) c3(phosducin isoform X1) c4(298193, 298194) c5(298195, 298196, 298197, 298198, 298199, 298200, 298201, 298202, 298203, 298204, 298205, 298206) c6( ) c7(btY, cV, cz, fd, v, fr, bh, oc, bkU, cd, ahR, Hx, hd, oW, aT, dV, ji, K, bc, IR, JI, nf, kt, t, nC, xw, ck, c, vA, m, bt, L); #c1(PDCD1) c2(NP_005009) c3(programmed cell death protein 1 precursor) c4(152074, 152075) c5(152076, 152077, 152078, 152079, 152080, 152081, 152082, 152083, 152084, 152085, 152086, 152087) c6( ) c7(Ob, Kd, T, fR, lo, jx, coR, fN, aw, eX, jE, ci, uE, qN, V, mC, ai, ip, hX, ga, kH, aT, alO, hD, h, eV, hH, nJ, bc, hM, A, mR, CN, iU, xR, qZ, aW, Y, je, HA, hl, cr, eZ, fe, Io, hp, iV, ve, iM, mx, uo, aYx, dW, dy, fL, eo, ME, y, hv); #c1(PDCD10) c2(NP_665859) c3(programmed cell death protein 10) c4(241790, 241791, 241792, 241793, 241794, 241795) c5(241796, 241797, 241798, 241799, 241800, 241801, 241802, 241803, 241804, 241805, 241806, 241807, 241808, 241809, 241810, 241811, 241812, 241813, 241814, 241815, 241816, 241817, 241818, 241819, 241820, 241821, 241822, 241823, 241824, 241825, 241826, 241827, 241828, 241829, 241830, 241831, 241832, 241833, 241834, 241835, 241836, 241837, 241838, 241839, 241840, 241841, 241842, 241843, 241844, 241845, 241846, 241847) c6( ) c7(T, cF, hb, dB, Ot, K, coS); #c1(PDCDILG2) c2(NP_079515) c3(programmed cell death 1 ligand 2 precursor) c4(218510, 218511) c5(218512, 218513, 218514, 218515, 218516, 218517, 218518, 218519, 218520, 218521, 218522, 218523, 218524, 218525, 218526, 218527) c6(218528, 218529, 218530, 218531) c7(fR, ht, aI, eX, aA, bh, V, h, hD, eV, hu, hH, bc, A, mR, qZ, Y, ff, hl, eZ, r, aF, eo, bw, DF, cj, eo, y, bt); #c1(PDCD2) c2(NP_001186391) c3(programmed cell death protein 2 isoform 4) c4(77604, 77605) c5(77606, 77607, 77608, 77609, 77610, 77611) c6( ) c7(ck, T, A, fM, eM, jh, ci, g, hF, bz, iu); #c1(PDCD2) c2(NP_001186392) c3(programmed cell death protein 2 isoform 5) c4(77612) c5(77613, 77614, 77615, 77616, 77617, 77618) c6( ) c7(ck, T, A, fM, eM, jh, ci, g, hF, bz, iu); #c1(PDCD2) c2(NP_001186393) c3(programmed cell death protein 2 isoform 6) c4( ) c5(77619, 77620, 77621, 77622, 77623, 77624) c6( ) c7(ck, T, A, fM, eM, jh, ci, g, hF, bz, iu); #c1(PDCD2) c2(NP_002589) c3(programmed cell death protein 2 isoform 1) c4(130093) c5(130094, 130095, 130096, 130097, 130098, 130099) c6( ) c7(ck, T, A, fM, eM, jh, ci, g, hF, bz, iu); #c1(PDCD2) c2(NP_659005) c3(programmed cell death protein 2 isoform 2) c4(239709) c5(239710, 239711, 239712, 239713, 239714, 239715) c6( ) c7(ck, T, A, fM, eM, jh, ci, g, hF, bz, iu); #c1(PDCD2) c2(XP_011534180) c3(programmed cell death protein 2 isoform X1) c4( ) c5(330484) c6( ) c7(ck, T, A, fM, eM, jh, ci, g, hF, bz, iu); #c1(PDCD4) c2(NP_001186421) c3(programmed cell death protein 4 isoform 3) c4(77630) c5(77631, 77632, 77633, 77634, 77635, 77636) c6( ) c7(bM, T, fM, AS, aA, bB, ci, PM, atK, mC, q, ad, eA, av, Bl, jz, Do, hW, yt, nv, Db, aT, hP, K, ji, hu, jj, ae, amw, jf, xQ, d, B, s, aeR, mR, aW, ev, ff, eZ, r, aq, agF, kp, aF, en, mo, pL, t, g, bz, iR, op, es, iA, nB, dB, bE, vA, cj, m, fL, IC, bt, it, X); #c1(PDCD4) c2(NP_055271) c3(programmed cell death protein 4 isoform 1) c4(180190) c5(180191, 180192, 180193, 180194, 180195, 180196, 180197) c6( ) c7(bM, T, fM, AS, aA, bB, ci, pM, atK, mC, q, ad, eA, av, Bl, jz, Do, hW, yt, nv, Db, aT, hP, K, ji, hu, jj, ae, amw, jf, xQ, d, B, s, aeR, mR, aW, ev, ff, eZ, r, aq, agF, kp, aF, en, mo, pL, t, g, bz, iR, op, es, iA, nB, dB, bE, vA, cj, m, fL, IC, bt, it, X); #c1(PDCD4) c2(NP_663314) c3(programmed cell death protein 4 isoform 2) c4(241192) c5(241193, 241194, 241195, 241196, 241197) c6( ) c7(bM, T, fM, AS, aA, bB, ci, pM, atK, mC, q, ad, eA, av, Bl, jz, Do, hW, yt, nv, Db, aT, hP, K, ji, hu, jj, ae, amw, jf, xQ, d, B, s, aeR, mR, aW, ev, ff, eZ, r, aq, agF, kp, aF, en, mo, pL, t, g, bz, iR, op, es, iA, nB, dB, bE, vA, cj, m, fL, IC, bt, it, X); #c1(PDCD5) c2(NP_004699) c3(programmed cell death protein 5) c4(148906, 148907) c5(148908, 148909, 148910, 148911, 148912, 148913, 148914, 148915, 148916, 148917, 148918, 148919, 148920, 148921, 148922, 148923) c6( ) c7(ck, ai, T, kh, iu, iU, eH, r, aA, aF, q, as, eA, eF, y, bt, bz, B, hX); #c1(PDCD5) c2(XP_005259449) c3(programmed cell death protein 5 isoform X1) c4(276104) c5(276105, 276106, 276107, 276108, 276109, 276110) c6( ) c7(ck, ai, T, kh, iu, iU, eH, r, aA, aF, q, as, eA, eF, y, bt, bz, B, hX); #c1(PDCD6) c2(NP_001254485) c3(programmed cell death protein 6 isoform 2) c4(94456) c5(94457, 94458, 94459, 94460, 94461, 94462) c6( ) c7(av, T, xA, bE, eL, Y, aA, bB, n, dL, aF, m, t, bz, iP); #c1(PDCD6) c2(NP_001254486) c3(programmed cell death protein 6 isoform 3) c4(94463) c5( ) c6( ) c7(av, T, xA, bE, eL, Y, aA, bB, n, dL, aF, m, t, bz, iP); #c1(PDCD6) c2(NP_001254488) c3(programmed cell death protein 6 isoform 5) c4(94464, 94465) c5(94466, 94467, 94468, 94469, 94470, 94471, 94472, 94473, 94474, 94475, 94476, 94477, 94478, 94479, 94480, 94481, 94482, 94483) c6( ) c7(av, T, xA, bE, eL, Y, aA, bB, n, dL, aF, m, t, bz, iP); #c1(PDCD6) c2(NP_037364) c3(programmed cell death protein 6 isoform 1) c4(175030) c5(175031, 175032, 175033, 175034, 175035, 175036) c6( ) c7(av, T, xA, bE, eL, Y, aA, bB, n, dL, aF, m, t, bz, iP); #c1(PDCD6IP) c2(NP_001155901) c3(programmed cell death 6-interacting protein isoform 2) c4(61641) c5(61642, 61643, 61644, 61645, 61646, 61647) c6( ) c7(bL, T, ac, eM, ea, Y, h, ey, Ea, bz, cC); #c1(PDCD6IP) c2(NP_037506) c3(programmed cell death 6-interacting protein isoform 1) c4(175903) c5(175904, 175905, 175906, 175907, 175908, 175909) c6( ) c7(bL, T, ac, eM, ea, Y, h, ey, Ea, bz, cC); #c1(PDCD7) c2(NP_005698) c3(programmed cell death protein 7) c4(158612, 158613, 158614) c5(158615, 158616, 158617, 158618, 158619, 158620, 158621, 158622, 158623, 158624, 158625, 158626, 158627, 158628, 158629, 158630, 158631, 158632) c6( ) c7(bt); #c1(PDCD7) c2(XP_005254165) c3(programmed cell death protein 7 isoform X1) c4( ) c5(273042) c6( ) c7(bt); #c1(PDCL2) c2(NP_689614) c3(phosducin-like protein 2) c4(243267) c5(243268, 243269, 243270, 243271, 243272, 243273) c6( ) c7(aF, aA); #c1(PDCL3) c2(NP_076970) c3(phosducin-like protein 3) c4(214522) c5(214523, 214524, 214525, 214526, 214527, 214528) c6( ) c7(dS); #c1(PDE10A) c2(NP_001124162) c3(cAMP and cAMP-inhibited cGMP 3′,5′-cyclic phosphodiesterase 10A) c4(48347, 48348) c5(48349, 48350, 48351, 48352, 48353, 48354, 48355, 48356, 48357, 48358, 48359) c6( ) c7(c, aw, IC, bjf, U, HK, gI, uJ, v, bK, j, hz, qj, Gp, gT, aen, aR, hq); #c1(PDE11A) c2(NP_001070664) c3(dual, 3′,5′-cyclic-AMP and -GMP phosphodiesterase 11A isoform 1) c4( ) c5(34660, 34661, 34662, 34663, 34664, 34665) c6( ) c7(bM, T, gU, vf, bO, Ja, JW, ad, aeZ, iv, avH, s, vT, coT, mQ, iw, bbe, Hu, bu, Z, Ld, bLF, hR, HB, Lb); #c1(PDE11A) c2(NP_001070665) c3(dual, 3′,5′-cyclic-AMP and -GMP phosphodiesterase 11A isoform 3) c4(34666, 34667) c5(34668, 34669, 34670, 34671, 34672, 34673, 34674, 34675, 34676, 34677, 34678, 34679, 34680, 34681, 34682, 34683, 34684, 34685, 34686, 34687, 34688, 34689, 34690, 34691, 34692, 34693, 34694, 34695) c6( ) c7(bM, T, gU, vf, bO, Ja, JW, ad, aeZ, iv, avH, s, vT, coT, mQ, iw, bbe, Hu, bu, Z, Ld, bLF, hR, HB, Lb); #c1(PDE11A) c2(NP_001070826) c3(dual, 3′,5′-cyclic-AMP and -GMP phosphodiesterase 11A isoform 2) c4(34850, 34851, 34852) c5( ) c6( ) c7(bM, T, gU, vf, bO, Ja, JW, ad, aeZ, iv, avH, s, vT, coT, mQ, iw, bbe, Hu, bu, Z, Ld, bLF, hR, HB, Lb); #c1(PDE11A) c2(NP_058649) c3(dual, 3′,5′-cyclic-AMP and -GMP phosphodiesterase 11A isoform 4) c4(193013) c5(193014, 193015, 193016, 193017, 193018, 193019) c6( ) c7(bM, T, gU, vf, bO, Ja, JW, ad, aeZ, iv, avH, s, vT, coT, mQ, iw, bbe, Hu, bu, Z, Ld, bLF, hR, HB, Lb); #c1(PDE12) c2(NP_808881) c3(2′,5′-phosphodiesterase 12) c4(252995) c5(252996, 252997, 252998, 252999, 253000, 253001) c6( ) c7(d); #c1(PDE12) c2(XP_011531777) c3(2′,5′-phosphodiesterase 12 isoform X1) c4(327860) c5(327861, 327862, 327863, 327864, 327865, 327866) c6( ) c7(d); #c1(PDE1A) c2(NP_001003683) c3(calcium/calmodulin-dependent 3′,5′-cyclic nucleotide phosphodiesterase 1A isoform 2) c4(19886) c5(19887, 19888, 19889, 19890, 19891, 19892, 19893, 19894, 19895, 19896) c6( ) c7(x, dD, yP, eq, k, Z); #c1(PDE1A) c2(NP_001245241) c3(calcium/calmodulin-dependent 3′,5′-cyclic nucleotide phosphodiesterase 1A isoform 3) c4(92793, 92794, 92795, 92796) c5(92797) c6( ) c7(x, dD, yP, eq, k, Z); #c1(PDE1A) c2(NP_001245242) c3(calcium/calmodulin-dependent 3′,5′-cyclic nucleotide phosphodiesterase 1A isoform 4) c4(92798) c5(92799, 92800, 92801, 92802, 92803, 92804) c6( ) c7(x, dD, yP, eq, k, Z); #c1(PDE1A) c2(NP_001245243) c3(calcium/calmodulin-dependent 3′,5′-cyclic nucleotide phosphodiesterase 1A isoform 5) c4(92805) c5(92806, 92807, 92808, 92809) c6( ) c7(x, dD, yP, eq, k, Z); #c1(PDE1A) c2(NP_005010) c3(calcium/calmodulin-dependent 3′,5′-cyclic nucleotide phosphodiesterase 1A isoform 1) c4( ) c5(152088, 152089, 152090, 152091, 152092, 152093, 152094, 152095, 152096, 152097, 152098, 152099, 152100, 152101, 152102, 152103, 152104, 152105, 152106, 152107, 152108, 152109, 152110, 152111, 152112, 152113, 152114) c6( ) c7(x, dD, yP, eq, k, Z); #c1(PDE1A) c2(XP_011509628) c3(calcium/calmodulin-dependent 3′,5′-cyclic nucleotide phosphodiesterase 1A isoform X4) c4( ) c5(300205, 300206, 300207, 300208, 300209, 300210) c6( ) c7(x, dD, yP, eq, k, Z); #c1(PDE1B) c2(NP_000915) c3(calcium/calmodulin-dependent 3′,5′-cyclic nucleotide phosphodiesterase 1B isoform 1) c4(17156) c5(17157, 17158, 17159, 17160, 17161, 17162) c6( ) c7(aen, xt, cj); #c1(PDE1B) c2(NP_001159447) c3(calcium/calmodulin-dependent 3′,5′-cyclic nucleotide phosphodiesterase 1B isoform 2) c4(64091) c5(64092, 64093, 64094, 64095, 64096, 64097, 64098) c6( ) c7(aen, xt, cj); #c1(PDE1B) c2(NP_001275698) c3(calcium/calmodulin-dependent 3′,5′-cyclic nucleotide phosphodiesterase 1B isoform 4) c4(107116) c5(107117, 107118, 107119, 107120, 107121) c6( ) c7(aen, xt, cj); #c1(PDE1C) c2(NP_001177986) c3(calcium/calmodulin-dependent 3′,5′-cyclic nucleotide phosphodiesterase IC isoform 2) c4(73262) c5(73263, 73264, 73265, 73266, 73267, 73268, 73269, 73270, 73271, 73272) c6( ) c7(IB, lx); #c1(PDE1C) c2(NP_001177987) c3(calcium/calmodulin-dependent 3′,5′-cyclic nucleotide phosphodiesterase IC isoform 3) c4(73273) c5(73274, 73275, 73276, 73277, 73278, 73279) c6( ) c7(IB, lx); #c1(PDE1C) c2(NP_005011) c3(calcium/calmodulin-dependent 3′,5′-cyclic nucleotide phosphodiesterase IC isoform 1) c4(152115, 152116) c5(152117, 152118, 152119, 152120, 152121, 152122, 152123, 152124, 152125, 152126, 152127, 152128, 152129, 152130, 152131, 152132) c6( ) c7(IB, lx); #c1(PDE2A) c2(NP_001137311) c3(cGMP-dependent 3′,5′-cyclic phosphodiesterase isoform PDE2A2 precursor) c4(55455, 55456) c5(55457, 55458, 55459, 55460, 55461, 55462, 55463, 55464, 55465, 55466, 55467, 55468) c6( ) c7(r, q, y, C, aT); #c1(PDE2A) c2(NP_001139681) c3(cGMP-dependent 3′,5′-cyclic phosphodiesterase isoform PDE2A4) c4(59695, 59696) c5(59697, 59698, 59699, 59700, 59701, 59702) c6( ) c7(r, q, y, C, aT); #c1(PDE2A) c2(NP_002590) c3(cGMP-dependent 3′,5′-cyclic phosphodiesterase isoform PDE2A3) c4(130100) c5(130101, 130102, 130103, 130104, 130105, 130106, 130107, 130108, 130109, 130110, 130111, 130112) c6( ) c7(r, q, y, C, aT); #c1(PDE3A) c2(NP_000912) c3(cGMP-inhibited 3′,5′-cyclic phosphodiesterase A isoform 1) c4(17135) c5(17136, 17137, 17138, 17139, 17140, 17141) c6( ) c7(gU, ND, e, aw, cz, vH, bq, IC, cd, y); #c1(PDE3B) c2(NP_000913) c3(cGMP-inhibited 3′,5′-cyclic phosphodiesterase B) c4(17142, 17143) c5(17144, 17145, 17146, 17147, 17148, 17149, 17150, 17151, 17152, 17153, 17154, 17155) c6( ) c7(bL, ID, x, kl, IC, eZ, cj, h, k, as, eE, gT, Fc, vN, JR, BY); #c1(PDE4A) c2(NP_001104777) c3(cAMP-specific 3′,5′-cyclic phosphodiesterase 4A isoform 1) c4(42282) c5(42283, 42284, 42285, 42286, 42287, 42288) c6( ) c7(bM, T, Dw, e, bO, jh, adk, bS, j, ct, q, ad, HE, adD, ae, aa, je, sp, Y, asD, r, HL, Z, bN, iM, dB, z, U, cj, at, fD); #c1(PDE4A) c2(NP_001104778) c3(cAMP-specific 3′,5′-cyclic phosphodiesterase 4A isoform 2) c4(42289) c5(42290, 42291, 42292, 42293, 42294, 42295) c6( ) c7(bM, T, Dw, e, bO, jh, adk, bS, j, ct, q, ad, HE, adD, ae, aa, je, sp, Y, asD, r, HL, Z, bN, iM, dB, z, U, cj, at, fD); #c1(PDE4A) c2(NP_001104779) c3(cAMP-specific 3′,5′-cyclic phosphodiesterase 4A isoform 3) c4(42296, 42297) c5(42298, 42299, 42300, 42301, 42302, 42303) c6( ) c7(bM, T, Dw, e, bO, jh, adk, bS, j, ct, q, ad, HE, adD, ae, aa, je, sp, Y, asD, r, HL, Z, bN, iM, dB, z, U, cj, at, fD); #c1(PDE4A) c2(NP_001230050) c3(cAMP-specific 3′,5′-cyclic phosphodiesterase 4A isoform 5) c4(85852) c5(85853, 85854, 85855, 85856, 85857, 85858, 85859) c6( ) c7(bM, T, Dw, e, bO, jh, adk, bS, j, ct, q, ad, HE, adD, ae, aa, je, sp, Y, asD, r, HL, Z, bN, iM, dB, z, U, cj, at, fD); #c1(PDE4A) c2(NP_006193) c3(cAMP-specific 3′,5′-cyclic phosphodiesterase 4A isoform 4) c4(162772) c5(162773, 162774, 162775, 162776, 162777, 162778) c6( ) c7(bM, T, Dw, e, bO, jh, adk, bS, j, ct, q, ad, HE, adD, ae, aa, je, sp, Y, asD, r, HL, Z, bN, iM, dB, z, U, cj, at, fD); #c1(PDE4A) c2(XP_005259990) c3(cAMP-specific 3′,5′-cyclic phosphodiesterase 4A isoform X3) c4( ) c5(276366, 276367, 276368, 276369, 276370) c6( ) c7(bM, T, Dw, e, bO, jh, adk, bS, j, ct, q, ad, HE, adD, ae, aa, je, sp, Y, asD, r, HL, Z, bN, iM, dB, z, U, cj, at, fD); #c1(PDE4A) c2(XP_011526357) c3(cAMP-specific 3′,5′-cyclic phosphodiesterase 4A isoform X2) c4(320650) c5(320651, 320652, 320653, 320654, 320655, 320656, 320657) c6( ) c7(bM, T, Dw, e, bO, jh, adk, bS, j, ct, q, ad, HE, adD, ae, aa, je, sp, Y, asD, r, HL, Z, bN, iM, dB, z, U, cj, at, fD); #c1(PDE4D) c2(NP_001098101) c3(cAMP-specific 3′,5′-cyclic phosphodiesterase 4D isoform PDE4D4) c4(41336) c5(41337, 41338, 41339, 41340, 41341, 41342) c6( ) c7(bM, dD, eR, ea, aw, ht, cz, oR, aj, v, j, ct, nA, hz, eq, agJ, ad, dZ, bri, rS, M, EL, coV, eN, xa, eu, d, vs, pT, Kp, eK, EJ, pH, wg, ac, yl, xZ, cj, at, cS, aS, ei, coU); #c1(PDE4D) c2(NP_001159371) c3(cAMP-specific 3′,5′-cyclic phosphodiesterase 4D isoform PDE4D7) c4(63887, 63888, 63889) c5(63890, 63891, 63892, 63893, 63894, 63895, 63896, 63897, 63898, 63899, 63900, 63901, 63902, 63903, 63904, 63905, 63906, 63907, 63908, 63909, 63910, 63911, 63912) c6( ) c7(bM, dD, eR, ea, aw, ht, cz, oR, aj, v, j, ct, nA, hz, eq, agJ, ad, dZ, bri, rS, M, EL, coV, eN, xa, eu, d, vs, pT, Kp, eK, EJ, pH, wg, ac, yl, xZ, cj, at, cS, aS, ei, coU); #c1(PDE4D) c2(NP_001184147) c3(cAMP-specific 3′,5′-cyclic phosphodiesterase 4D isoform PDE4D5) c4(75384, 75385) c5(75386, 75387, 75388, 75389, 75390, 75391, 75392, 75393, 75394, 75395, 75396, 75397) c6( ) c7(bM, dD, eR, ea, aw, ht, cz, oR, aj, v, j, ct, nA, hz, eq, agJ, ad, dZ, bri, rS, M, EL, coV, eN, xa, eu, d, vs, pT, Kp, eK, EJ, pH, wg, ac, yl, xZ, cj, at, cS, aS, ei, coU); #c1(PDE4D) c2(NP_001184148) c3(cAMP-specific 3′,5′-cyclic phosphodiesterase 4D isoform PDE4D8) c4(75398) c5(75399, 75400, 75401, 75402, 75403, 75404) c6( ) c7(bM, dD, eR, ea, aw, ht, cz, oR, aj, v, j, ct, nA, hz, eq, agJ, ad, dZ, bri, rS, M, EL, coV, eN, xa, eu, d, vs, pT, Kp, eK, EJ, pH, wg, ac, yl, xZ, cj, at, cS, aS, ei, coU); #c1(PDE4D) c2(NP_001184149) c3(cAMP-specific 3′,5′-cyclic phosphodiesterase 4D isoform PDE4D9) c4(75405) c5(75406, 75407, 75408, 75409, 75410, 75411) c6( ) c7(bM, dD, eR, ea, aw, ht, cz, oR, aj, v, j, ct, nA, hz, eq, agJ, ad, dZ, bri, rS, M, EL, coV, eN, xa, eu, d, vs, pT, Kp, eK, EJ, pH, wg, ac, yl, xZ, cj, at, cS, aS, ei, coU); #c1(PDE4D) c2(NP_001184150) c3(cAMP-specific 3′,5′-cyclic phosphodiesterase 4D isoform PDE4D2) c4( ) c5(75412, 75413, 75414, 75415, 75416, 75417, 75418, 75419, 75420, 75421) c6( ) c7(bM, dD, eR, ea, aw, ht, cz, oR, aj, v, j, ct, nA, hz, eq, agJ, ad, dZ, bri, rS, M, EL, coV, eN, xa, eu, d, vs, pT, Kp, eK, EJ, pH, wg, ac, yl, xZ, cj, at, cS, aS, ei, coU); #c1(PDE4D) c2(NP_001184151) c3(cAMP-specific 3′,5′-cyclic phosphodiesterase 4D isoform PDE4D1) c4( ) c5(75422) c6( ) c7(bM, dD, eR, ea, aw, ht, cz, oR, aj, v, j, ct, nA, hz, eq, agJ, ad, dZ, bri, rS, M, EL, coV, eN, xa, eu, d, vs, pT, Kp, eK, EJ, pH, wg, ac, yl, xZ, cj, at, cS, aS, ei, coU); #c1(PDE4D) c2(NP_001184152) c3(cAMP-specific 3′,5′-cyclic phosphodiesterase 4D isoform PDE4D6) c4(75423) c5(75424, 75425, 75426, 75427, 75428, 75429) c6( ) c7(bM, dD, eR, ea, aw, ht, cz, oR, aj, v, j, ct, nA, hz, eq, agJ, ad, dZ, bri, rS, M, EL, coV, eN, xa, eu, d, vs, pT, Kp, eK, EJ, pH, wg, ac, yl, xZ, cj, at, cS, aS, ei, coU); #c1(PDE4D) c2(NP_006194) c3(cAMP-specific 3′,5′-cyclic phosphodiesterase 4D isoform PDE4D3) c4(162779) c5(162780, 162781, 162782, 162783, 162784, 162785, 162786, 162787, 162788, 162789, 162790, 162791) c6( ) c7(bM, dD, eR, ea, aw, ht, cz, oR, aj, v, j, ct, nA, hz, eq, agJ, ad, dZ, bri, rS, M, EL, coV, eN, xa, eu, d, vs, pT, Kp, eK, EJ, pH, wg, ac, yl, xZ, cj, at, cS, aS, ei, coU); #c1(PDE4D) c2(XP_011541772) c3(cAMP-specific 3′,5′-cyclic phosphodiesterase 4D isoform X3) c4(340379) c5( ) c6( ) c7(bM, dD, eR, ea, aw, ht, cz, oR, aj, v, j, ct, nA, hz, eq, agJ, ad, dZ, bri, rS, M, EL, coV, eN, xa, eu, d, vs, pT, Kp, eK, EJ, pH, wg, ac, yl, xZ, cj, at, cS, aS, ei, coU); #c1(PDE4D) c2(XP_011541779) c3(cAMP-specific 3′,5′-cyclic phosphodiesterase 4D isoform X8) c4(340380) c5( ) c6( ) c7(bM, dD, eR, ea, aw, ht, cz, oR, aj, v, j, ct, nA, hz, eq, agJ, ad, dZ, bri, rS, M, EL, coV, eN, xa, eu, d, vs, pT, Kp, eK, EJ, pH, wg, ac, yl, xZ, cj, at, cS, aS, ei, coU); #c1(PDE4D) c2(XP_011541781) c3(cAMP-specific 3′,5′-cyclic phosphodiesterase 4D isoform X9) c4(340381) c5( ) c6( ) c7(bM, dD, eR, ea, aw, ht, cz, oR, aj, v, j, ct, nA, hz, eq, agJ, ad, dZ, bri, rS, M, EL, coV, eN, xa, eu, d, vs, pT, Kp, eK, EJ, pH, wg, ac, yl, xZ, cj, at, cS, aS, ei, coU); #c1(PDE5A) c2(NP_001074) c3(cGMP-specific 3′,5′-cyclic phosphodiesterase isoform 1) c4(37161) c5( ) c6( ) c7(ID, wH, qb, e, aI, aw, eX, sM, cR, aj, ah, ci, q, J, cd, BY, cc, aT, h, IG, cy, eV, ey, K, bq, wt, bc, wC, ly, Vx, aW, Y, r, uC, adA, lx, Kc, ac, wE, hc, II, gZ, IC, X, ao, vQ); #c1(PDE5A) c2(NP_236914) c3(cGMP-specific 3′,5′-cyclic phosphodiesterase isoform 2) c4(228660) c5(228661, 228662, 228663, 228664, 228665, 228666, 228667) c6( ) c7(ID, wH, qb, e, aI, aw, eX, sM, cR, aj, ah, ci, q, J, cd, BY, cc, aT, h, IG, cy, eV, ey, K, bq, wt, bc, wC, ly, Vx, aW, Y, r, uC, adA, lx, Kc, ac, wE, hc, II, gZ, IC, X, ao, vQ); #c1(PDE5A) c2(NP_246273) c3(cGMP-specific 3′,5′-cyclic phosphodiesterase isoform 3) c4(228668) c5( ) c6( ) c7(ID, wH, qb, e, aI, aw, eX, sM, cR, aj, ah, ci, q, J, cd, BY, cc, aT, h, IG, cy, eV, ey, K, bq, wt, bc, wC, ly, Vx, aW, Y, r, uC, adA, lx, Kc, ac, wE, hc, II, gZ, IC, X, ao, vQ); #c1(PDE6A) c2(NP_000431) c3(rod cGMP-specific 3′,5′-cyclic phosphodiesterase subunit alpha) c4(8909) c5(8910, 8911, 8912, 8913, 8914, 8915) c6( ) c7(coW, IR, nC); #c1(PDE6B) c2(NP_000274) c3(rod cGMP-specific 3′,5′-cyclic phosphodiesterase subunit beta isoform 1) c4(6071) c5( ) c6( ) c7(xX, IR, ig, aCk, coX, coY, nw, nk, nC, ayj, de); #c1(PDE6B) c2(NP_001138763) c3(rod cGMP-specific 3′,5′-cyclic phosphodiesterase subunit beta isoform 2) c4(57595) c5(57596, 57597, 57598, 57599, 57600) c6( ) c7(xX, IR, ig, aCk, coX, coY, nw, nk, nC, ayj, de); #c1(PDE6B) c2(XP_011511776) c3(rod cGMP-specific 3′,5′-cyclic phosphodiesterase subunit beta isoform X2) c4(302471) c5(302472, 302473, 302474, 302475, 302476, 302477, 302478, 302479, 302480, 302481, 302482, 302483, 302484) c6( ) c7(xX, IR, ig, aCk, coX, coY, nw, nk, nC, ayj, de); #c1(PDE6C) c2(NP_006195) c3(cone cGMP-specific 3′,5′-cyclic phosphodiesterase subunit alpha′) c4(162792) c5(162793, 162794, 162795, 162796, 162797, 162798) c6( ) c7(cpa, aQs, coZ, IR, nw, OL, nk, aQu, xa); #c1(PDE6D) c2(NP_002592) c3(retinal rod rhodopsin-sensitive cGMP 3′,5′-cyclic phosphodiesterase subunit delta isoform 1) c4(130113) c5(130114, 130115, 130116, 130117, 130118, 130119) c6( ) c7(LB, cpb, h); #c1(PDE6G) c2(NP_002593) c3(retinal rod rhodopsin-sensitive cGMP 3′,5′-cyclic phosphodiesterase subunit gamma) c4( ) c5(130120, 130121, 130122, 130123, 130124, 130125) c6( ) c7(LB, cpc, xX, nC); #c1(PDE6G) c2(XP_006722005) c3(retinal rod rhodopsin-sensitive cGMP 3′,5′-cyclic phosphodiesterase subunit gamma isoform X1) c4(294530, 294531) c5(294532, 294533, 294534, 294535, 294536, 294537, 294538) c6( ) c7(LB, cpc, xX, nC); #c1(PDE6H) c2(NP_006196) c3(retinal cone rhodopsin-sensitive cGMP 3′,5′-cyclic phosphodiesterase subunit gamma) c4(162799) c5(162800, 162801, 162802, 162803, 162804, 162805) c6( ) c7(cpd, cpe, OL); #c1(PDE7A) c2(NP_001229247) c3(high affinity cAMP-specific 3′,5′-cyclic phosphodiesterase 7A isoform c) c4(84031, 84032) c5(84033, 84034, 84035, 84036, 84037, 84038, 84039, 84040, 84041, 84042, 84043, 84044) c6( ) c7(yw, cj, at, fD, IC, ao); #c1(PDE7A) c2(XP_011515842) c3(high affinity cAMP-specific 3′,5′-cyclic phosphodiesterase 7A isoform X1) c4(308809) c5(308810, 308811, 308812, 308813, 308814, 308815) c6( ) c7(yw, cj, at, fD, IC, ao); #c1(PDE7B) c2(NP_061818) c3(cAMP-specific 3′,5′-cyclic phosphodiesterase 7B) c4(200477) c5(200478, 200479, 200480, 200481, 200482, 200483, 200484, 200485, 200486, 200487, 200488, 200489) c6( ) c7(cj); #c1(PDE7B) c2(XP_005266988) c3(cAMP-specific 3′,5′-cyclic phosphodiesterase 7B isoform X1) c4(280596) c5(280597, 280598, 280599, 280600, 280601, 280602) c6( ) c7(cj); #c1(PDE7B) c2(XP_011534057) c3(cAMP-specific 3′,5′-cyclic phosphodiesterase 7B isoform X2) c4(330244) c5( ) c6( ) c7(cj); #c1(PDE8A) c2(NP_002596) c3(high affinity cAMP-specific and IBMX-insensitive 3′,5′-cyclic phosphodiesterase 8A isoform 1) c4(130126, 130127) c5(130128, 130129, 130130, 130131, 130132, 130133, 130134, 130135, 130136, 130137, 130138, 130139, 130140, 130141, 130142, 130143) c6( ) c7(h, aZ, kl, aw); #c1(PDE8A) c2(NP_775656) c3(high affinity cAMP-specific and IBMX-insensitive 3′,5′-cyclic phosphodiesterase 8A isoform 2) c4(250100) c5(250101, 250102, 250103, 250104, 250105, 250106) c6( ) c7(h, aZ, kl, aw); #c1(PDE8B) c2(NP_001025022) c3(high affinity cAMP-specific and IBMX-insensitive 3′,5′-cyclic phosphodiesterase 8B isoform 3) c4(29204) c5(29205, 29206, 29207, 29208, 29209, 29210) c6( ) c7(cpg, avH, s, gT, vf, aw, qQ, U, bcD, iw, hz, v, Hu, cph, xw, biO, af, cpf); #c1(PDE8B) c2(NP_001025023) c3(high affinity cAMP-specific and IBMX-insensitive 3′,5′-cyclic phosphodiesterase 8B isoform 5) c4(29211) c5(29212, 29213, 29214, 29215, 29216, 29217) c6( ) c7(cpg, avH, s, gT, vf, aw, qQ, U, bcD, iw, hz, v, Hu, cph, xw, biO, af, cpf); #c1(PDE8B) c2(NP_001025024) c3(high affinity cAMP-specific and IBMX-insensitive 3′,5′-cyclic phosphodiesterase 8B isoform 4) c4(29218) c5(29219, 29220, 29221, 29222, 29223, 29224) c6( ) c7(cpg, avH, s, gT, vf, aw, qQ, U, bcD, iw, hz, v, Hu, cph, xw, biO, af, cpf); #c1(PDE8B) c2(NP_001025025) c3(high affinity cAMP-specific and IBMX-insensitive 3′,5′-cyclic phosphodiesterase 8B isoform 2) c4(29225) c5(29226, 29227, 29228, 29229, 29230, 29231) c6( ) c7(cpg, avH, s, gT, vf, aw, qQ, U, bcD, iw, hz, v, Hu, cph, xw, biO, af, cpf); #c1(PDE8B) c2(NP_003710) c3(high affinity cAMP-specific and IBMX-insensitive 3′,5′-cyclic phosphodiesterase 8B isoform 1) c4(140344) c5(140345, 140346, 140347, 140348, 140349, 140350) c6( ) c7(cpg, avH, s, gT, vf, aw, qQ, U, bcD, iw, hz, v, Hu, cph, xw, biO, af, cpf); #c1(PDE8B) c2(XP_006714789) c3(high affinity cAMP-specific and IBMX-insensitive 3′,5′-cyclic phosphodiesterase 8B isoform X2) c4( ) c5(288159) c6( ) c7(cpg, avH, s, gT, vf, aw, qQ, U, bcD, iw, hz, v, Hu, cph, xw, biO, af, cpf); #c1(PDE8B) c2(XP_011542002) c3(high affinity cAMP-specific and IBMX-insensitive 3′,5′-cyclic phosphodiesterase 8B isoform X5) c4(340498) c5( ) c6( ) c7(cpg, avH, s, gT, vf, aw, qQ, U, bcD, iw, hz, v, Hu, cph, xw, biO, af, cpf); #c1(PDE8B) c2(XP_011542006) c3(high affinity cAMP-specific and IBMX-insensitive 3′,5′-cyclic phosphodiesterase 8B isoform X11) c4( ) c5(340499, 340500, 340501, 340502, 340503, 340504) c6( ) c7(cpg, avH, s, gT, vf, aw, qQ, U, bcD, iw, hz, v, Hu, cph, xw, biO, af, cpf); #c1(PDE9A) c2(NP_001001567) c3(high affinity cGMP-specific 3′,5′-cyclic phosphodiesterase 9A isoform b) c4(18799, 18800) c5(18801, 18802, 18803, 18804, 18805, 18806, 18807, 18808, 18809, 18810, 18811, 18812) c6( ) c7(Z, bM, f, U, bO); #c1(PDE9A) c2(NP_001001568) c3(high affinity cGMP-specific 3′,5′-cyclic phosphodiesterase 9A isoform c) c4(18813) c5(18814, 18815, 18816, 18817, 18818, 18819) c6( ) c7(Z, bM, f, U, bO); #c1(PDE9A) c2(NP_001001569) c3(high affinity cGMP-specific 3′,5′-cyclic phosphodiesterase 9A isoform d) c4(18820) c5(18821, 18822, 18823, 18824, 18825, 18826) c6( ) c7(Z, bM, f, U, bO); #c1(PDE9A) c2(NP_001001570) c3(high affinity cGMP-specific 3′,5′-cyclic phosphodiesterase 9A isoform e) c4(18827) c5(18828, 18829, 18830, 18831, 18832, 18833) c6( ) c7(Z, bM, f, U, bO); #c1(PDE9A) c2(NP_001001571) c3(high affinity cGMP-specific 3′,5′-cyclic phosphodiesterase 9A isoform f) c4(18834) c5(18835, 18836, 18837, 18838, 18839, 18840) c6( ) c7(Z, bM, f, U, bO); #c1(PDE9A) c2(NP_001001574) c3(high affinity cGMP-specific 3′,5′-cyclic phosphodiesterase 9A isoform h) c4(18841) c5(18842, 18843, 18844, 18845, 18846, 18847) c6( ) c7(Z, bM, f, U, bO); #c1(PDE9A) c2(NP_001001575) c3(high affinity cGMP-specific 3′,5′-cyclic phosphodiesterase 9A isoform 1) c4(18848) c5(18849, 18850, 18851, 18852, 18853, 18854) c6( ) c7(Z, bM, f, U, bO); #c1(PDE9A) c2(NP_001001577) c3(high affinity cGMP-specific 3′,5′-cyclic phosphodiesterase 9A isoform k) c4(18855) c5(18856, 18857, 18858, 18859, 18860, 18861) c6( ) c7(Z, bM, f, U, bO); #c1(PDE9A) c2(NP_001001578) c3(high affinity cGMP-specific 3′,5′-cyclic phosphodiesterase 9A isoform f) c4(18862) c5(18863, 18864, 18865, 18866, 18867, 18868) c6( ) c7(Z, bM, f, U, bO); #c1(PDE9A) c2(NP_001001581) c3(high affinity cGMP-specific 3′,5′-cyclic phosphodiesterase 9A isoform m) c4(18869) c5(18870, 18871, 18872, 18873, 18874, 18875) c6( ) c7(Z, bM, f, U, bO); #c1(PDE9A) c2(NP_001001582) c3(high affinity cGMP-specific 3′,5′-cyclic phosphodiesterase 9A isoform n) c4(18876) c5(18877, 18878, 18879, 18880, 18881, 18882) c6( ) c7(Z, bM, f, U, bO); #c1(PDE9A) c2(NP_001001583) c3(high affinity cGMP-specific 3′,5′-cyclic phosphodiesterase 9A isoform o) c4(18883) c5(18884, 18885, 18886, 18887, 18888, 18889) c6( ) c7(Z, bM, f, U, bO); #c1(PDE9A) c2(NP_002597) c3(high affinity cGMP-specific 3′,5′-cyclic phosphodiesterase 9A isoform a) c4(130144) c5(130145, 130146, 130147, 130148, 130149, 130150) c6( ) c7(Z, bM, f, U, bO); #c1(PDF) c2(NP_071736) c3(peptide deformylase, mitochondrial precursor) c4(211858) c5(211859, 211860, 211861, 211862, 211863, 211864) c6( ) c7(ad); #c1(PDGFA) c2(NP_002598) c3(platelet-derived growth factor subunit A isoform 1 preproprotein) c4( ) c5(130151, 130152, 130153, 130154, 130155, 130156, 130157) c6(130158, 130159) c7(ID, bM, cZ, T, dD, aC, On, ea, fG, aw, jh, n, j, ci, eq, PJ, IR, zP, Fc, fr, eA, er, cpi, BY, dP, ip, afb, hd, ib, aHu, jz, Ru, bW, aeO, rC, M, aT, hP, zg, aDC, dd, ey, nJ, vP, dl, Yi, aa, uQ, yo, zQ, d, aeR, Y, ff, aF, yq, en, g, as, eF, hz, pb, LB, ar, D, sS, bF, pc, bQU, m, IC, hS); #c1(PDGFA) c2(NP_148983) c3(platelet-derived growth factor subunit A isoform 2 preproprotein) c4( ) c5(226704, 226705, 226706, 226707, 226708, 226709, 226710, 226711, 226712, 226713, 226714, 226715, 226716) c6(226717, 226718, 226719) c7(ID, bM, cZ, T, dD, aC, On, ea, fG, aw, jh, n, j, ci, eq, PJ, IR, zP, Fc, fr, eA, er, cpi, BY, dP, ip, afb, hd, ib, aHu, jz, Ru, bW, aeO, rC, M, aT, hP, zg, aDC, dd, ey, nJ, vP, dl, Yi, aa, uQ, yi, zQ, d, aeR, Y, ff, aF, yq, en, g, as, eF, hz, pb, LB, ar, D, sS, bF, pc, bQU, m, IC, hS); #c1(PDGFA) c2(XP_011513718) c3(platelet-derived growth factor subunit A isoform X2) c4(306003, 306004) c5(306005, 306006) c6( ) c7(ID, bM, cZ, T, dD, aC, On, ea, fG, aw, jh, n, j, ci, eq, PJ, IR, zP, Fc, fr, eA, er, cpi, BY, dP, ip, afb, hd, ib, aHu, jz, Ru, bW, aeO, rC, M, aT, hP, zg, aDC, dd, ey, nJ, vP, dl, Yi, aa, uQ, yo, zQ, d, aeR, Y, ff, aF, yq, en, g, as, eF, hz, pb, LB, ar, D, sS, bF, pc, bQU, m, IC, hS); #c1(PDGFA) c2(XP_011513720) c3(platelet-derived growth factor subunit A isoform X4) c4(306007) c5(306008, 306009, 306010) c6( ) c7(ID, bM, cZ, T, dD, aC, On, ea, fG, aw, jh, n, j, ci, eq, PJ, IR, zP, Fc, fr, eA, er, cpi, BY, dP, ip, afb, hd, ib, aHu, jz, Ru, bW, aeO, rC, M, aT, hP, zg, aDC, dd, ey, nJ, vP, dl, Yi, aa, uQ, yo, zQ, d, aeR, Y, ff, aF, yq, en, g, as, eF, bz, pb, LB, ar, D, sS, bF, pc, bQU, m, IC, hS); #c1(PDGFB) c2(NP_002599) c3(platelet-derived growth factor subunit B isoform 1 preproprotein) c4(130160) c5(130161, 130162, 130163, 130164, 130165, 130166, 130167, 130168, 130169, 130170, 130171) c6(130172, 130173) c7(bM, sY, T, dD, aC, fR, hV, ea, fG, aI, bXc, aYc, cpk, kv, eq, ci, uE, yV, eA, ip, bOV, av, ib, aEX, oW, aT, cpj, aaj, h, iY, ey, bq, bc, jf, eG, d, IR, iU, aW, Y, eH, as, eF, t, uC, bz, kJ, pb, LB, ck, D, ar, bF, pc, c, nB, dB, hk, hc, cpl, aGo, If, bQU, iT, pg, aRU, hh, IC, bt, B, hS); #c1(PDGFB) c2(NP_148937) c3(platelet-derived growth factor subunit B isoform 2 preproprotein) c4(226636, 226637, 226638) c5(226639, 226640, 226641, 226642, 226643, 226644, 226645, 226646, 226647, 226648, 226649, 226650, 226651, 226652, 226653, 226654, 226655, 226656, 226657, 226658, 226659, 226660, 226661) c6(226662, 226663, 226664, 226665, 226666, 226667) c7(bM, sY, T, dD, aC, fR, hV, ea, fG, aI, bXc, aYc, cpk, kv, eq, ci, uE, yV, eA, ip, bOV, av, ib, aEX, oW, aT, cpj, aaj, h, iY, ey, bq, bc, jf, eG, d, IR, iU, aW, Y, eH, as, eF, t, uC, bz, kJ, pb, LB, ck, D, ar, bF, pc, c, nB, dB, hk, hc, cpl, aGo, If, bQU, iT, pg, aRU, hh, IC, bt, B, hS); #c1(PDGFC) c2(NP_057289) c3(platelet-derived growth factor C precursor) c4(189884, 189885, 189886, 189887, 189888, 189889) c5(189890, 189891, 189892, 189893, 189894, 189895, 189896, 189897, 189898, 189899, 189900, 189901, 189902, 189903, 189904, 189905, 189906) c6(189907, 189908, 189909, 189910) c7(sY, aoU, T, dD, dK, hy, eq, fr, Na, bv, av, hd, ib, Db, aT, Nc, ey, Xh, bYL, bxg, jf, B, BN, aW, Y, oV, uC, apM, bE, hc, ne); #c1(PDGFC) c2(XP_011530426) c3(platelet-derived growth factor C isoform X1) c4(326272) c5( ) c6( ) c7(sY, aeU, T, dD, dK, hy, eq, fr, Na, bv, av, hd, ib, Db, aT, Nc, ey, Xh, bYL, bxg, jf, B, BN, aW, Y, oV, uC, apM, bE, hc, ne); #c1(PDGFC) c2(XP_011530427) c3(platelet-derived growth factor C isoform X2) c4( ) c5(326273, 326274, 326275, 326276, 326277, 326278, 326279, 326280, 326281, 326282, 326283, 326284, 326285, 326286, 326287, 326288) c6(326289, 326290, 326291, 326292) c7(sY, aoU, T, dD, dK, hy, eq, fr, Na, bv, av, hd, ib, Db, aT, Nc, ey, Xh, bYL, bxg, jf, B, BN, aW, Y, oV, uC, apM, bE, hc, ne); #c1(PDGFD) c2(NP_079484) c3(platelet-derived growth factor D isoform 1 precursor) c4(218305) c5(218306, 218307, 218308, 218309, 218310, 218311, 218312, 218313, 218314) c6(218315, 218316) c7(T, dD, aC, dA, ea, Lx, cz, aj, j, ci, eq, fr, ad, av, jz, ib, sN, yg, aT, vw, K, ae, eu, jf, aW, oV, ac, hc, dy, sH, hS); #c1(PDGFD) c2(NP_149126) c3(platelet-derived growth factor D isoform 2 precursor) c4(227330) c5(227331, 227332, 227333, 227334, 227335, 227336, 227337, 227338, 227339) c6(227340, 227341) c7(T, dD, aC, dA, ea, Lx, cz, aj, j, ci, eq, fr, ad, av, jz, ib, sN, yg, aT, vw, K, ae, eu, jf, aW, oV, ac, hc, dy, sH, hS); #c1(PDGFRA) c2(XP_006714102) c3(platelet-derived growth factor receptor alpha isoform X2) c4( ) c5(287547) c6( ) c7(Fv, bM, T, aC, fR, if, qj, ci, Qp, ip, x, bv, Na, aE, pX, aeO, eL, cp, cpm, Qe, cpn, aa, aeR, cpp, aW, Az, hl, uY, Qm, g, as, eF, Eu, Qt, zV, ix, eM, iT, lp, vA, ey, cj, apy, uJ, k, m, Xu, Th, aiu, dD, sw, qy, n, oY, ft, jz, hw, Lv, eV, hn, dL, bkN, Nr, Tc, bFc, AO, aq, po, op, yR, Qf, dB, eD, wk, bQU, apY, B, aeU, dA, eX, fZ, aA, j, q, eA, aT, dz, bK, Tj, ae, af, dl, jf, iU, Y, ayB, r, hf, t, iK, pb, ck, Ta, nM, ac, gX, bt, On, bkL, jh, eq, hF, Fc, ad, afb, dP, av, iC, cpq, cpo, hP, fb, d, Ix, et, vj, eH, aeV, aF, aiz, iR, aTb, IU, Nq, Ew, a KG, y, ne, jr, pC); #c1(PDGFRA) c2(XP_006714104) c3(platelet-derived growth factor receptor alpha isoform X3) c4( ) c5(287548, 287549, 287550, 287551, 287552, 287553, 287554, 287555, 287556, 287557, 287558, 287559, 287560, 287561, 287562, 287563, 287564, 287565, 287566, 287567, 287568, 287569, 287570, 287571) c6( ) c7(Fv, bM, T, aC, fR, if, qj, ci, Qp, ip, x, bv, Na, aE, pX, aeO, eL, cp, cpm, Qe, cpn, aa, aeR, cpp, aW, Az, hl, uY, Qm, g, as, eF, Eu, Qt, zV, ix, eM, iT, lp, vA, ey, cj, apy, uJ, k, m, Xu, Th, aiu, dD, sw, qy, n, oY, ft, jz, hw, Lv, eV, hn, dL, bkN, Nr, Tc, bFc, AQ, aq, po, op, yR, Qf, dB, eD, wk, bQU, apY, B, aeU, dA, eX, fZ, aA, j, q, eA, aT, dz, bK, Tj, ae, af, dl, jf, iU, Y, ayB, r, hf, t, iK, pb, ck, Ta, nM, ac, gX, bt, On, bkL, jh, eq, hF, Fc, ad, afb, dP, av, iC, cpq, cpo, hP, fb, d, Ix, et, vj, eH, aeV, aF, aiz, iR, aTb, IU, Nq, Ew, aKC, y, ne, jr, pC); #c1(PDGFRA) c2(XP_011532688) c3(platelet-derived growth factor receptor alpha isoform X1) c4(328722, 328723, 328724, 328725, 328726) c5(328727, 328728, 328729, 328730, 328731) c6( ) c7(Fv, bM, T, aC, fR, if, qj, ci, Qp, ip, x, bv, Na, aE, pX, aeO, eL, cp, cpm, Qe, cpn, aa, aeR, cpp, aW, Az, hl, uY, Qm, g, as, eF, Fu, Qt, zV, ix, eM, iT, Ip, vA, oy, cj, apy, uJ, k, m, Xu, Th, aiu, dD, sw, qy, n, oY, ft, jz, hw, Lv, eV, hn, dL, bkN, Nr, Tc, bFc, AQ, aq, po, op, yR, Qf, dB, eD, wk, bQU, apY, B, aeU, dA, eX, fZ, aA, j, q, eA, aT, dz, bK, Tj, ae, af, dl, jf, iU, Y, ayB, r, hf, t, iK, pb, ck, Ta, nM, ac, gX, bt, On, bkL, jh, eq, hF, Fc, ad, afb, dP, av, iC, cpq, cpo, hP, fb, d, Ix, et, vj, eH, aeV, aF, aiz, iR, aTb, II, Nq, Ew, aKC, y, ne, jr, pC); #c1(PDGFRB) c2(NP_002600) c3(platelet-derived growth factor receptor beta precursor) c4(130174, 130175) c5(130176, 130177, 130178, 130179, 130180, 130181, 130182, 130183, 130184, 130185, 130186, 130187) c6( ) c7(bM, T, pf, yS, cps, qj, ci, IR, ip, bv, aE, aeO, cda, K, eL, eG, oP, aeR, pr, aW, Ls, as, eF, cm, Qt, eM, iT, oy, cj, uJ, m, Th, ik, aiu, cpr, sw, NT, qy, fr, bd, cld, cpt, Xe, Lv, aaj, dL, cY, Nr, aJ, fQ, aq, po, pm, bkn, asl, dB, bQU, B, iH, cz, q, er, eA, aT, dz, bq, ae, af, dl, aZF, jf, VC, iU, vT, nO, Y, aBN, r, bu, t, pb, ck, nM, kP, bKf, hc, bt, hi, jh, iJ, ad, bkg, NS, hP, fb, nJ, pg, d, et, vj, eH, kD, aF, iV, iR, adj, bz, Nq, LB, D, es, aKC, IC, jr, pC); #c1(PDGFRB) c2(XP_011535962) c3(platelet-derived growth factor receptor beta isoform X2) c4(333241) c5(333242, 333243, 333244, 333245, 333246, 333247) c6( ) c7(bM, T, pf, yS, cps, qj, ci, IR, ip, bv, aE, aeO, cda, K, eL, eG, oP, aeR, pr, aW, Ls, as, eF, cm, Qt, eM, iT, oy, cj, uJ, m, Th, ik, aiu, cpr, sw, NT, qy, fr, bd, cld, cpt, Xe, Lv, aaj, dL, cY, Nr, aJ, fQ, aq, po, pm, bkn, asl, dB, bQU, B, iH, cz, q, er, eA, aT, dz, bq, ae, af, dl, aZF, jf, VC, iU, vT, nO, Y, aBN, r, bu, t, pb, ck, nM, kP, bKf, hc, bt, hl, jh, iJ, ad, bkg, NS, hP, fb, nJ, pg, d, et, vj, eH, kD, aF, iV, iR, adj, bz, Nq, LB, D, es, aKC, IC, jr, pC); #c1(PDGFRL) c2(XP_011542860) c3(platelet-derived growth factor receptor-like protein isoform X1) c4(341459) c5(341460, 341461, 341462, 341463, 341464, 341465, 341466, 341467, 341468, 341469, 341470, 341471, 341472, 341473) c6( ) c7(bE, ff, r, hP, ci, en, g, hH, fq, B); #c1(PDHA1) c2(NP_000275) c3(pyruvate dehydrogenase E1 component subunit alpha, somatic form, mitochondrial, isoform 1 precursor) c4(6072, 6073) c5(6074, 6075, 6076, 6077, 6078, 6079, 6080, 6081, 6082, 6083, 6084, 6085) c6( ) c7(SE, ajU, aA, aU, n, cpu, j, aNH, ad, aIK); #c1(PDHA1) c2(NP_001166925) c3(pyruvate dehydrogenase E1 component subunit alpha, somatic form, mitochondrial, isoform 2 precursor) c4(68597, 68598) c5(68599, 68600, 68601, 68602, 68603, 68604, 68605, 68606, 68607, 68608, 68609, 68610, 68611) c6( ) c7(SE, ajU, aA, aU, n, cpu, j, aNH, ad, aIK); #c1(PDHA1) c2(NP_001166926) c3(pyruvate dehydrogenase E1 component subunit alpha, somatic form, mitochondrial, isoform 3 precursor) c4(68612, 68613, 68614) c5(68615, 68616, 68617, 68618, 68619, 68620, 68621, 68622, 68623, 68624, 68625, 68626) c6( ) c7(SE, ajU, aA, aU, n, cpu, j, aNH, ad, aIK); #c1(PDHA1) c2(NP_001166927) c3(pyruvate dehydrogenase E1 component subunit alpha, somatic form, mitochondrial, isoform 4 precursor) c4(68627) c5(68628, 68629, 68630, 68631, 68632, 68633, 68634, 68635, 68636, 68637, 68638, 68639, 68640, 68641, 68642) c6( ) c7(SE, ajU, aA, aU, n, cpu, j, aNH, ad, aIK); #c1(PDHA1) c2(XP_011543833) c3(pyruvate dehydrogenase E1 component subunit alpha, somatic form, mitochondrial, isoform X1) c4(342970) c5( ) c6( ) c7(SE, ajU, aA, aU, n, cpu, j, aNH, ad, aIK); #c1(PDHA1) c2(XP_011543834) c3(pyruvate dehydrogenase E1 component subunit alpha, somatic form, mitochondrial isoform X2) c4( ) c5(342971, 342972, 342973, 342974, 342975, 342976, 342977, 342978, 342979) c6( ) c7(SE, ajI, aA, aI, n, cpu, j, aNH, ad, aIK); #c1(PDHB) c2(NP_000916) c3(pyruvate dehydrogenase E1 component subunit beta, mitochondrial, isoform 1 precursor) c4(17163) c5(17164, 17165, 17166, 17167, 17168, 17169) c6( ) c7(fr, cpv, aNH); #c1(PDHB) c2(NP_001166939) c3(pyruvate dehydrogenase E1 component subunit beta, mitochondrial, isoform 2 precursor) c4(68686) c5(68687, 68688, 68689, 68690, 68691, 68692) c6( ) c7(fr, cpv, aNH); #c1(PDHX) c2(NP_001128496) c3(pyruvate dehydrogenase protein X component, mitochondrial, isoform 2) c4(50100) c5(50101, 50102, 50103, 50104, 50105, 50106) c6( ) c7(bL, T, aw, aA, aj, dG, ci, nA, aNH, eJ, J, mj, mh, aE, hb, ey, K, aKG, bc, pI, eG, A, cpw, eZ, kp, aF, LV, aam, mf, m, ei); #c1(PDHX) c2(NP_001159630) c3(pyruvate dehydrogenase protein X component, mitochondrial, isoform 3 precursor) c4(64476) c5(64477, 64478, 64479, 64480, 64481, 64482) c6( ) c7(bL, T, aw, aA, aj, dG, ci, nA, aNH, eJ, J, mj, mh, aE, hb, ey, K, aKG, bc, pI, eG, A, cpw, eZ, kp, aF, LV, aam, mf, m, ei); #c1(PDHX) c2(NP_003468) c3(pyruvate dehydrogenase protein X component, mitochondrial, isoform 1 precursor) c4(138582) c5(138583, 138584, 138585, 138586, 138587, 138588) c6( ) c7(bL, T, aw, aA, aj, dG, ci, nA, aNH, eJ, J, mj, mh, aE, hb, ey, K, aKG, bc, pI, eG, A, cpw, eZ, kp, aF, LV, aam, mf, m, ei); #c1(PDIA2) c2(NP_006840) c3(protein disulfide-isomerase A2 precursor) c4(168552, 168553, 168554) c5(168555, 168556, 168557, 168558, 168559, 168560, 168561, 168562, 168563, 168564, 168565, 168566, 168567, 168568, 168569, 168570, 168571, 168572) c6( ) c7(amF, bL, aW, aT, aj, si, bD, cm, B, J); #c1(PDIA3) c2(NP_005304) c3(protein disulfide-isomerase A3 precursor) c4(154807, 154808, 154809, 154810) c5(154811, 154812, 154813, 154814, 154815, 154816, 154817, 154818, 154819, 154820, 154821, 154822, 154823, 154824, 154825, 154826, 154827, 154828, 154829, 154830, 154831, 154832, 154833, 154834) c6( ) c7(T, dt, gU, if, aI, bO, aA, ajp, n, qN, ad, dP, fU, akN, aT, K, ae, aW, Y, ff, kD, en, g, t, bw, DF, gk, cA, Hb, m, bt, B, vi); #c1(PDIA4) c2(NP_004902) c3(protein disulfide-isomerase A4 precursor) c4(150656) c5(150657, 150658, 150659, 150660, 150661, 150662) c6( ) c7(fe); #c1(PDIA5) c2(NP_006801) c3(protein disulfide-isomerase A5 precursor) c4(168199) c5(168200, 168201, 168202, 168203, 168204, 168205) c6( ) c7(dH); #c1(PDIA6) c2(NP_001269633) c3(protein disulfide-isomerase A6 isoform a) c4( ) c5(102314, 102315, 102316, 102317, 102318) c6( ) c7(T, aW, eX, aT, eV, B, bA); #c1(PDIA6) c2(NP_001269634) c3(protein disulfide-isomerase A6 isoform b) c4(102319) c5(102320) c6( ) c7(T, aW, eX, aT, eV, B, bA); #c1(PDIA6) c2(NP_001269635) c3(protein disulfide-isomerase A6 isoform c) c4( ) c5(102321, 102322, 102323, 102324, 102325) c6( ) c7(T, aW, eX, aT, eV, B, bA); #c1(PDIA6) c2(NP_001269636) c3(protein disulfide-isomerase A6 isoform e precursor) c4(102326) c5(102327, 102328, 102329, 102330, 102331, 102332, 102333) c6( ) c7(T, aW, eX, aT, eV, B, bA); #c1(PDIA6) c2(NP_005733) c3(protein disulfide-isomerase A6 isoform d precursor) c4(158947) c5(158948, 158949, 158950, 158951, 158952) c6( ) c7(T, aW, eX, aT, eV, B, bA); #c1(PDK1) c2(NP_001265478) c3([Pyruvate dehydrogenase (acetyl-transferring)] kinase isozyme 1, mitochondrial, isoform 1 precursor) c4(98667) c5(98668, 98669, 98670, 98671, 98672, 98673) c6( ) c7(bL, T, ht, NT, aA, fd, bS, v, ci, Fb, fr, cd, q, ad, hd, bpj, NS, aT, h, hu, ask, sR, ae, aW, Y, r, aF, bz, ck, Qi, ac, nB, mx, bt, X); #c1(PDK1) c2(NP_002601) c3([Pyruvate dehydrogenase (acetyl-transferring)] kinase isozyme 1, mitochondrial, isoform 2 precursor) c4(130188, 130189, 130190) c5(130191, 130192, 130193, 130194, 130195, 130196, 130197, 130198, 130199, 130200, 130201) c6( ) c7(bL, T, ht, NT, aA, fd, bS, v, ci, Fb, fr, cd, q, ad, hd, bpj, NS, aT, h, hu, ask, sR, ae, aW, Y, r, aF, bz, ck, Qi, ac, nB, mx, bt, X); #c1(PDK1) c2(XP_011509647) c3(pyruvate dehydrogenase (acetyl-transferring) kinase isozyme 1, mitochondrial, isoform X2) c4( ) c5(300217, 300218, 300219, 300220, 300221, 300222, 300223, 300224, 300225, 300226, 300227) c6( ) c7(bL, T, ht, NT, aA, fd, bS, v, ci, Fb, fr, cd, q, ad, hd, bpj, NS, aT, h, hu, ask, sR, ae, aW, Y, r, aF, bz, ck, Qi, ac, nB, mx, bt, X); #c1(PDK2) c2(NP_001186828) c3(pyruvate dehydrogenase kinase, isozyme 2 isoform 2) c4( ) c5(78693, 78694, 78695, 78696, 78697, 78698, 78699) c6(78700, 78701) c7(bL, T, v, cc); #c1(PDK2) c2(NP_002602) c3(pyruvate dehydrogenase kinase, isozyme 2 isoform 1 precursor) c4(130202, 130203) c5(130204, 130205, 130206, 130207, 130208, 130209, 130210) c6( ) c7(bL, T, v, cc); #c1(PDK3) c2(NP_001135858) c3(pyruvate dehydrogenase kinase, isozyme 3 isoform 1 precursor) c4(53420) c5(53421, 53422, 53423, 53424, 53425, 53426) c6( ) c7(bX, cpx, cp, bU); #c1(PDK3) c2(NP_005382) c3(pyruvate dehydrogenase kinase, isozyme 3 isoform 2 precursor) c4(155582) c5(155583, 155584, 155585, 155586, 155587, 155588) c6( ) c7(bX, cpx, cp, bU); #c1(PDK4) c2(NP_002603) c3(pyruvate dehydrogenase kinase, isozyme 4) c4(130211, 130212) c5(130213, 130214, 130215, 130216, 130217, 130218, 130219, 130220, 130221, 130222, 130223, 130224, 130225, 130226) c6( ) c7(bL, cc, B, aq, V, j, K, ei, bq, cd, be); #c1(PDLIM1) c2(NP_066272) c3(PDZ and LIM domain protein 1) c4(206884) c5(206885, 206886, 206887, 206888, 206889, 206890) c6( ) c7(aIC, oh, af, K, azj); #c1(PDLIM2) c2(NP_067643) c3(PDZ and LIM domain protein 2 isoform 2) c4(209176, 209177) c5(209178, 209179, 209180, 209181, 209182, 209183, 209184, 209185, 209186, 209187, 209188, 209189, 209190, 209191, 209192, 209193, 209194, 209195, 209196, 209197, 209198, 209199, 209200, 209201) c6( ) c7(T, iM, je, dK, r, vw, K, q); #c1(PDLIM2) c2(NP_789847) c3(PDZ and LIM domain protein 2 isoform 1) c4(252408) c5(252409, 252410, 252411, 252412, 252413, 252414, 252415) c6( ) c7(T, iM, je, dK, r, vw, K, q); #c1(PDLIM2) c2(NP_932159) c3(PDZ and LIM domain protein 2 isoform 3) c4(258834, 258835) c5(258836, 258837, 258838, 258839, 258840, 258841, 258842, 258843, 258844, 258845, 258846, 258847, 258848) c6( ) c7(T, iM, je, dK, r, vw, K, q); #c1(PDLIM3) c2(NP_001107579) c3(PDZ and LIM domain protein 3 isoform b) c4(42882) c5(42883, 42884, 42885, 42886, 42887, 42888) c6( ) c7(fd, bB, TI, h, nJ, bc, vT, HY, TH, eH, aq, mo, eF, TJ, bE, TG, au, mx, gZ, rx, y, B); #c1(PDLIM3) c2(NP_055291) c3(PDZ and LIM domain protein 3 isoform a) c4(180321) c5(180322, 180323, 180324, 180325, 180326, 180327, 180328) c6( ) c7(fd, bB, TL h, nJ, bc, vT, HY, TH, eH, aq, mo, eF, TJ, bE, TG, au, mx, gZ, rx, y, B); #c1(PDLIM3) c2(XP_011530176) c3(PDZ and LIM domain protein 3 isoform X1) c4(326051) c5(326052, 326053, 326054, 326055, 326056) c6( ) c7(fd, bB, TI, h, nJ, bc, vT, HY, TH, eH, aq, mo, eF, TJ, bE, TG, au, mx, gZ, rx, y, B); #c1(PDLIM4) c2(NP_001124499) c3(PDZ and LIM domain protein 4 isoform 2) c4(49178) c5(49179, 49180, 49181, 49182, 49183, 49184, 49185) c6( ) c7(Dw, T, kI, kP, bE, aW, aT, bB, n, Ds, aq, it, K, bw, bt, ae, B, ad, bA); #c1(PDLIM4) c2(NP_003678) c3(PDZ and LIM domain protein 4 isoform 1) c4(140126) c5(140127, 140128, 140129, 140130, 140131, 140132) c6( ) c7(Dw, T, kI, kP, bE, aW, aT, bB, n, Ds, aq, it, K, bw, bt, ae, B, ad, bA); #c1(PDLIM5) c2(NP_001011513) c3(PDZ and LIM domain protein 5 isoform b) c4(24481) c5(24482, 24483, 24484, 24485, 24486, 24487) c6( ) c7(bL, T, JZ, He, bO, bB, ti, v, j, aY, hF, pn, q, ad, hX, x, Tg, aE, Ig, hb, oj, kH, aT, oW, vc, h, bK, K, oi, he, ae, je, iU, aW, yL, r, Io, aXL, Z, cm, bw, ck, ou, aLw, bb, aIC, iM, yW, bE, Ew, mx, hj, vL, hE, bt, B, us); #c1(PDLIM5) c2(NP_001011515) c3(PDZ and LIM domain protein 5 isoform d) c4(24488, 24489) c5(24490, 24491, 24492, 24493, 24494, 24495, 24496, 24497, 24498, 24499, 24500, 24501) c6( ) c7(bL, T, JZ, He, bO, bB, ti, v, j, aY, hF, pn, q, ad, hX, x, Tg, aE, Ig, hb, oj, kH, aT, oW, vc, h, bK, K, oi, he, ae, je, iU, aW, yL, r, Io, aXL, Z, cm, bw, ck, ou, aLw, bb, aIC, iM, yW, bE, Ew, mx, hj, vL, hE, bt, B, us); #c1(PDLIM5) c2(NP_001011516) c3(PDZ and LIM domain protein 5 isoform e) c4(24502, 24503) c5(24504, 24505, 24506, 24507, 24508, 24509, 24510, 24511, 24512, 24513, 24514, 24515) c6( ) c7(bL, T, JZ, He, bO, bB, ti, v, j, aY, hF, pn, q, ad, hX, x, Tg, aE, Ig, hb, oj, kH, aT, oW, vc, h, bK, K, oi, he, ae, je, iU, aW, yL, r, Io, aXL, Z, cm, bw, ck, ou, aLw, bb, aIC, iM, yW, bE, Ew, mx, hj, vL, hE, bt, B, us); #c1(PDLIM5) c2(NP_001243357) c3(PDZ and LIM domain protein 5 isoform h) c4( ) c5(90489, 90490, 90481, 90492, 90493) c6( ) c7(bL, T, JZ, He, bO, bB, ti, v, j, aY, hF, pn, q, ad, hX, x, Tg, aE, Ig, hb, oj, kH, aT, oW, vc, h, bK, K, oi, he, ae, je, iU, aW, yL, r, Io, aXL, Z, cm, bw, ck, ou, aLw, bb, aIC, iM, yW, bE, Ew, mx, hj, vL, hE, bt, B, us); #c1(PDLIM5) c2(NP_001243358) c3(PDZ and LIM domain protein 5 isoform 1) c4(90494, 90495, 90496, 90497, 90498, 90499) c5(90500, 90501, 90502, 90503, 90504, 90505, 90506, 90507, 90508, 90509, 90510, 90511, 90512, 90513, 90514, 90515, 90516, 90517, 90518, 90519, 90520, 90521, 90522, 90523, 90524, 90525, 90526, 90527, 90528, 90529, 90530, 90531, 90532, 90533, 90534, 90535, 90536, 90537, 90538, 90539, 90540, 90541, 90542, 90543, 90544, 90545, 90546, 90547, 90548, 90549, 90550, 90551, 90552, 90553, 90554, 90555, 90556, 90557, 90558, 90559, 90560, 90561, 90562, 90563, 90564, 90565, 90566, 90567, 90568, 90569, 90570, 90571, 90572, 90573, 90574, 90575, 90576, 90577, 90578, 90579) c6( ) c7(bL, T, JZ, He, bO, bB, ti, v, j, aY, hF, pn, q, ad, hX, x, Tg, aE, Ig, hb, oj, kH, aT, oW, vc, h, bK, K, oi, he, ae, je, iU, aW, yL, r, Io, aXL, Z, cm, bw, ck, ou, aLw, bb, aIC, iM, yW, bE, Ew, mx, hj, vL, hE, bt, B, us); #c1(PDLIM5) c2(NP_006448) c3(PDZ and LIM domain protein 5 isoform a) c4(165316, 165317) c5(165318, 165319, 165320, 165321, 165322, 165323, 165324, 165325) c6( ) c7(bL, T, JZ, He, bO, bB, ti, v, j, aY, hF, pn, q, ad, hX, x, Tg, aE, Ig, hb, oj, kH, aT, oW, vc, h, bK, K, oi, he, ae, je, iU, aW, yL, r, Io, aXL, Z, cm, bw, ck, ou, aLw, bb, aIC, iM, yW, bE, Ew, mx, hj, vL, hE, bt, B, us); #c1(PDLIM7) c2(NP_005442) c3(PDZ and LIM domain protein 7 isoform 1) c4(156206, 156207) c5(156208, 156209, 156210, 156211, 156212, 156213) c6( ) c7(Mb, T, aEd, fM, Ke, dA, iW, eX, jh, aA, bB, n, ci, pz, ad, bkO, aJO, Ig, aVq, ja, aT, h, eV, K, zg, amY, pk, ae, cpy, jr, hM, aW, oV, ff, Pg, kt, aq, Io, aF, aoD, anW, en, g, Ik, bz, XT, aJT, Cv, ck, aZx, iQ, Zg, bE, dc, cj, aEG, ciO, zv, bC, ij, it, B, kG); #c1(PDLIM7) c2(NP_976227) c3(PDZ and LIM domain protein 7 isoform 2) c4(263007) c5(263008, 263009, 263010, 263011, 263012, 263013) c6( ) c7(Mb, T, aEd, fM, Ke, dA, iW, eX, jh, aA, bB, n, ci, pz, ad, bkO, aJO, Ig, aVq, ja, aT, h, eV, K, zg, amY, pk, ae, cpy, jr, hM, aW, oV, ff, Pg, kt, aq, Io, aF, aoD, anW, en, g, Ik, bz, XT, aJT, Cv, ck, aZx, iQ, Zg, bE, dc, cj, aEG, ciO, zv, bC, ij, it, B, kG); #c1(PDLIM7) c2(NP_998801) c3(PDZ and LIM domain protein 7 isoform 4) c4(265995, 265996) c5(265997, 265998, 265999, 266000, 266001, 266002, 266003, 266004, 266005, 266006, 266007, 266008, 266009, 266010, 266011, 266012, 266013, 266014, 266015, 266016, 266017, 266018, 266019) c6( ) c7(Mb, T, aEd, fM, Ke, dA, iW, eX, jh, aA, bB, n, ci, pz, ad, bkO, aJO, Ig, aVq, ja, aT, h, eV, K, zg, amY, pk, ae, cpy, jr, hM, aW, oV, ff, Pg, kt, aq, Io, aF, aoD, anW, en, g, Ik, bz, XT, aJT, Cv, ck, aZx, iQ, Zg, bE, dc, cj, aEG, ciO, zv, bC, ij, it, B, kG); #c1(PDLIM7) c2(XP_011532999) c3(PDZ and LIM domain protein 7 isoform X2) c4(329237) c5( ) c6( ) c7(Mb, T, aEd, fM, Ke, dA, iW, eX, jh, aA, bB, n, ci, pz, ad, bkO, aJO, Ig, aVq, ja, aT, h, eV, K, zg, amY, pk, ae, cpy, jr, hM, aW, oV, ff, Pg, kt, aq, Io, aF, aoD, anW, en, g, Ik, bz, XT, aJT, Cv, ck, aZx, iQ, Zg, bE, dc, cj, aEG, ciO, zv, bC, ij, it, B, kG); #c1(PDLIM7) c2(XP_011533001) c3(PDZ and LIM domain protein 7 isoform X4) c4( ) c5(329238) c6( ) c7(Mb, T, aEd, fM, Ke, dA, iW, eX, jh, aA, bB, n, ci, pz, ad, bkO, aJO, Ig, aVq, ja, aT, h, eV, K, zg, amY, pk, ae, cpy, jr, hM, aW, oV, ff, Pg, kt, aq, Io, aF, aoD, anW, en, g, Ik, bz, XT, aJT, Cv, ck, aZx, iQ, Zg, bE, dc, cj, aEG, ciO, zv, bC, ij, it, B, kG); #c1(PDP1) c2(NP_001155251) c3(pyruvate dehyrogenase phosphatase catalytic subunit 1 isoform 2) c4(61555) c5(61556, 61557, 61558, 61559, 61560, 61561, 61562, 61563, 61564, 61565, 61566, 61567, 61568) c6( ) c7(ck, T, baE, SE, hb, Ni, h, bfN, aNH, cpz, ajU); #c1(PDP1) c2(XP_011515437) c3(pyruvate dehyrogenase phosphatase catalytic subunit 1 isoform X2) c4(308250, 308251, 308252) c5(308253) c6( ) c7(ck, T, baE, SE, hb, Ni, h, bfN, aNH, cpz, ajU); #c1(PDP1) c2(XP_011515439) c3(pyruvate dehyrogenase phosphatase catalytic subunit 1 isoform X1) c4(308254, 308255, 308256) c5(308257, 308258, 308259, 308260, 308261, 308262, 308263, 308264, 308265, 308266, 308267, 308268, 308269, 308270, 308271, 308272, 308273, 308274, 308275, 308276, 308277, 308278, 308279, 308280, 308281, 308282, 308283, 308284, 308285, 308286, 308287, 308288, 308289, 308290, 308291, 308292) c6( ) c7(ck, T, baE, SE, hb, Ni, h, bfN, aNH, cpz, ajU); #c1(PDP2) c2(NP_065837) c3([Pyruvate dehydrogenase [acetyl-transferring]]-phosphatase 2, mitochondrial, precursor) c4(205794) c5(205795, 205796, 205797, 205798, 205799, 205800) c6( ) c7(Y, wK); #c1(PDPK1) c2(NP_001248745) c3(3-phosphoinositide-dependent protein kinase 1 isoform 3) c4(93975, 93976) c5(93977, 93978, 93979, 93980, 93981, 93982, 93983, 93984, 93985, 93986, 93987, 93988) c6( ) c7(T, ht, NT, aA, bB, fd, bS, v, ci, Fb, fr, cd, q, ad, bv, hd, bpj, aT, h, hu, ask, ae, aW, amI, Y, r, Qg, kp, aF, g, bz, ck, Qi, nM, eM, nB, bE, mx, bt, B); #c1(PDPK1) c2(NP_002604) c3(3-phosphoinositide-dependent protein kinase 1 isoform 1) c4(130227, 130228) c5(130229, 130230, 130231, 130232, 130233, 130234, 130235, 130236, 130237, 130238, 130239, 130240) c6( ) c7(T, ht, NT, aA, bB, fd, bS, v, ci, Fb, fr, cd, q, ad, bv, hd, bpj, aT, h, hu, ask, ae, aW, amI, Y, r, Qg, kp, aF, g, bz, ck, Qi, nM, eM, nB, bE, mx, bt, B); #c1(PDPK1) c2(NP_112558) c3(3-phosphoinositide-dependent protein kinase 1 isoform 2) c4(221389) c5(221390, 221391, 221392, 221393, 221394, 221395) c6( ) c7(T, ht, NT, aA, bB, fd, bS, v, ci, Fb, fr, cd, q, ad, bv, hd, bpj, aT, h, hu, ask, ae, aW, amI, Y, r, Qg, kp, aF, g, bz, ck, Qi, nM, eM, nB, bE, mx, bt, B); #c1(PDPR) c2(NP_060460) c3(pyruvate dehydrogenase phosphatase regulatory subunit, mitochondrial, precursor) c4(196050, 196051) c5(196052, 196053, 196054, 196055, 196056, 196057, 196058, 196059, 196060, 196061, 196062, 196063, 196064) c6( ) c7(abV); #c1(PDPR) c2(XP_005256076) c3(pyruvate dehydrogenase phosphatase regulatory subunit, mitochondrial, isoform X6) c4( ) c5(273937, 273938, 273939, 273940, 273941, 273942) c6( ) c7(abV); #c1(PDPR) c2(XP_006721287) c3(pyruvate dehydrogenase phosphatase regulatory subunit, mitochondrial, isoform X2) c4(293910) c5(293911, 293912, 293913, 293914, 293915, 293916) c6( ) c7(abV); #c1(PDPR) c2(XP_006721288) c3(pyruvate dehydrogenase phosphatase regulatory subunit, mitochondrial, isoform X3) c4(293917) c5( ) c6( ) c7(abV); #c1(PDPR) c2(XP_011521492) c3(pyruvate dehydrogenase phosphatase regulatory subunit, mitochondrial isoform X4) c4(316240) c5(316241, 316242, 316243, 316244, 316245) c6( ) c7(abV); #c1(PDRG1) c2(NP_110442) c3(P53 and DNA damage-regulated protein 1) c4(220383) c5(220384, 220385, 220386, 220387, 220388, 220389) c6( ) c7(bB, bE, T, aq, K); #c1(PDS5A) c2(NP_001093869) c3(sister chromatid cohesion protein PDS5 homolog A isoform 1) c4(40461) c5(40462, 40463, 40464, 40465, 40466, 40467) c6( ) c7(aNL, T, cd, ac, ey); #c1(PDS5A) c2(NP_001093870) c3(sister chromatid cohesion protein PDS5 homolog A isoform 3) c4(40468) c5(40469, 40470, 40471, 40472, 40473, 40474) c6( ) c7(aNL, T, cd, ac, ey); #c1(PDS5B) c2(NP_055847) c3(sister chromatid cohesion protein PDS5 homolog B) c4(183893) c5(183894, 183895, 183896, 183897, 183898, 183899, 183900, 183901, 183902, 183903, 183904, 183905) c6( ) c7(T, aW, r, aT, aNL, it, K, cm, ae, af, ad); #c1(PDS5B) c2(XP_005266355) c3(sister chromatid cohesion protein PDS5 homolog B isoform X3) c4(279965) c5( ) c6( ) c7(T, aW, r, aT, aNL, it, K, cm, ae, af, ad); #c1(PDSS1) c2(NP_055132) c3(decaprenyl-diphosphate synthase subunit 1) c4(179173, 179174, 179175) c5(179176, 179177, 179178, 179179, 179180, 179181, 179182, 179183, 179184, 179185, 179186, 179187, 179188, 179189, 179190, 179191, 179192, 179193, 179194) c6( ) c7(EG, b, iW, aM, h, EE, gl, i, cpA); #c1(PDSS2) c2(NP_065114) c3(decaprenyl-diphosphate synthase subunit 2) c4(203984) c5(203985, 203986, 203987, 203988, 203989, 203990, 203991) c6( ) c7(EG, sk, eR, eM, cpB, Y, vw, EE, dy, ah, bz, NN, ajU); #c1(PDSS2) c2(XP_011534263) c3(decaprenyl-diphosphate synthase subunit 2 isoform X6) c4(330620) c5(330621, 330622, 330623, 330624, 330625, 330626) c6( ) c7(EG, sk, eR, eM, cpB, Y, vw, EE, dy, ah, bz, NN, ajU); #c1(PDSS2) c2(XP_011534264) c3(decaprenyl-diphosphate synthase subunit 2 isoform X7) c4(330627, 330628) c5(330629, 330630, 330631, 330632, 330633, 330634, 330635, 330636, 330637, 330638, 330639) c6( ) c7(EG, sk, eR, eM, cpB, Y, vw, EE, dy, ah, bz, NN, ajU); #c1(PDSS2) c2(XP_011534265) c3(decaprenyl-diphosphate synthase subunit 2 isoform X8) c4(330640) c5(330641, 330642, 330643, 330644, 330645, 330646) c6( ) c7(EG, sk, eR, eM, cpB, Y, vw, EE, dy, ah, bz, NN, ajU); #c1(PDX1) c2(NP_000200) c3(pancreas/duodenum homeobox protein 1) c4(4457) c5(4458, 4459, 4460, 4461, 4462, 4463, 4464, 4465) c6( ) c7(bL, T, aC, eR, pY, aD, aw, aA, aj, dG, v, ci, aNH, eJ, ad, J, mj, jz, mh, aE, pX, MP, cpD, cpC, jy, K, bxf, bq, aKG, pI, eG, A, cH, cpw, EU, kp, aF, LV, cM, mi, Vy, mg, mf, ei); #c1(PDXDC1) c2(NP_001272374) c3(pyridoxal-dependent decarboxylase domain-containing protein 1 isoform 3) c4(104013) c5(104014, 104015, 104016, 104017, 104018, 104019) c6( ) c7(fr, ey); #c1(PDXDC1) c2(NP_001272376) c3(pyridoxal-dependent decarboxylase domain-containing protein 1 isoform 4) c4( ) c5(104020, 104021, 104022, 104023, 104024) c6( ) c7(fr, ey); #c1(PDXDC1) c2(NP_001272377) c3(pyridoxal-dependent decarboxylase domain-containing protein 1 isoform 5) c4(104025) c5(104026, 104027, 104028, 104029, 104030, 104031) c6( ) c7(fr, ey); #c1(PDXDC1) c2(NP_001272378) c3(pyridoxal-dependent decarboxylase domain-containing protein 1 isoform 6) c4(104032, 104033) c5(104034, 104035, 104036, 104037, 104038, 104039, 104040, 104041, 104042, 104043, 104044, 104045, 104046) c6( ) c7(fr, ey); #c1(PDXDC1) c2(NP_001272379) c3(pyridoxal-dependent decarboxylase domain-containing protein 1 isoform 7) c4(104047) c5(104048, 104049, 104050, 104051, 104052, 104053) c6( ) c7(fr, ey); #c1(PDXDC1) c2(NP_055842) c3(pyridoxal-dependent decarboxylase domain-containing protein 1 isoform 1) c4(183848, 183849) c5(183850, 183851, 183852, 183853, 183854, 183855) c6( ) c7(fr, ey); #c1(PDXK) c2(NP_003672) c3(pyridoxal kinase) c4(140088, 140089) c5(140090, 140091, 140092, 140093, 140094, 140095, 140096, 140097, 140098, 140099, 140100, 140101) c6( ) c7(T, eM, fQ, an, f, cB); #c1(PDXP) c2(NP_064711) c3(pyridoxal phosphate phosphatase) c4(203528, 203529) c5(203530, 203531, 203532, 203533, 203534, 203535, 203536, 203537, 203538, 203539, 203540, 203541) c6( ) c7(T, eR, aEj, QO, dM, if, cz, sM, n, bB, GC, ci, qN, mF, aFJ, q, aR, ke, fm, akU, yg, aT, K, YQ, cb, akV, aW, ff, eH, r, en, g, eF, bz, dr, asE, cpE, KE, aJH, TJ, wE, Da, m, bee, cn); #c1(PDYN) c2(XP_011527552) c3(proenkephalin-B isoform X1) c4(322361) c5(322362, 322363, 322364, 322365, 322366, 322367, 322368, 322369, 322370, 322371, 322372, 322373, 322374, 322375) c6( ) c7(aoU, T, dD, IB, jd, ha, bO, cz, Ib, To, rf, bS, j, ct, Kh, gf, Ge, aqQ, eq, il, VV, aR, FY, aqt, gM, cF, ot, KB, cpF, cpH, Gb, h, yZ, bK, K, an, he, aTO, xa, aIL, af, hZ, Ng, aIM, cpG, ff, rU, gC, cpl, cu, aFx, en, Z, hJ, cM, xw, eE, cm, FT, cv, ok, ky, kB, cA, Kv, aYb, dJ, Gs, U, abl, agm, nw, aax, L); #c1(PDZD2) c2(NP_835260) c3(PDZ domain-containing protein 2) c4(253443, 253444) c5(253445, 253446, 253447, 253448, 253449, 253450, 253451, 253452, 253453, 253454, 253455, 253456, 253457, 253458, 253459, 253460) c6( ) c7(gh, T, bM, AS, O1, fG, if, cpJ, jh, n, fr, ci, fu, qN, cd, ad, eA, hX, Hx, py, MR, WY, sO, aT, h, K, jj, an, ae, af, bc, qw, d, aW, oV, vj, fc, Du, ff, akB, hN, aaE, en, cm, iK, bz, ck, es, ar, c, nB, eM, iA, U, mf, jM, cP, fD, y, bt, it, B); #c1(PDZD2) c2(XP_006714523) c3(PDZ domain-containing protein 2 isoform X7) c4( ) c5(287892) c6( ) c7(gh, T, bM, AS, Ol, fG, if, cpJ, jh, n, fr, ci, fu, qN, cd, ad, eA, hX, Hx, py, MR, WY, sO, aT, h, K, jj, an, ae, af, bc, qw, d, aW, oV, vj, fc, Du, ff, akB, hN, aaE, en, cm, iK, bz, ck, es, ar, c, nB, eM, iA, U, mf, jM, cP, fD, y, bt, it, B); #c1(PDZD2) c2(XP_011512295) c3(PDZ domain-containing protein 2 isoform X2) c4( ) c5(302829, 302830, 302831, 302832) c6( ) c7(gh, T, bM, AS, Ol, fG, if, cpJ, jh, n, fr, ci, fu, qN, cd, ad, eA, hX, Hx, py, MR, WY, sO, aT, h, K, jj, an, ae, af, bc, qw, d, aW, oV, vj, fc, Du, ff, akB, hN, aaE, en, cm, iK, bz, ck, es, ar, c, nB, eM, iA, U, mf, jM, cP, fD, y, bt, it, B); #c1(PDZD2) c2(XP_011512296) c3(PDZ domain-containing protein 2 isoform X3) c4(302833) c5( ) c6( ) c7(gh, T, bM, AS, Ol, fG, if, cpJ, jh, n, fr, ci, fu, qN, cd, ad, eA, hX, Hx, py, MR, WY, sO, aT, h, K, jj, an, ae, af, bc, qw, d, aW, oV, vj, fc, Du, ff, akB, hN, aaE, en, cm, iK, bz, ck, es, ar, c, nB, eM, iA, U, mf, jM, cP, fD, y, bt, it, B); #c1(PDZD4) c2(NP_001290441) c3(PDZ domain-containing protein 4 isoform 1) c4(115457) c5(115458, 115459, 115460, 115461, 115462, 115463) c6( ) c7(iJ, fN); #c1(PDZD4) c2(NP_001290442) c3(PDZ domain-containing protein 4 isoform 3) c4(115464) c5(115465, 115466, 115467, 115468, 115469, 115470) c6( ) c7(iJ, fN); #c1(PDZD4) c2(NP_001290443) c3(PDZ domain-containing protein 4 isoform 4) c4(115471) c5(115472, 115473, 115474, 115475, 115476, 115477, 115478) c6( ) c7(iJ, fN); #c1(PDZD4) c2(NP_115901) c3(PDZ domain-containing protein 4 isoform 2) c4(224578) c5(224579, 224580, 224581, 224582, 224583, 224584, 224585, 224586) c6( ) c7(iJ, fN); #c1(PDZD7) c2(NP_001182192) c3(PDZ domain-containing protein 7 isoform 1) c4(74679, 74680) c5(74681, 74682, 74683, 74684, 74685, 74686) c6( ) c7(IR, aIA, FQ, oc, FM, cpK); #c1(PDZD7) c2(NP_079171) c3(PDZ domain-containing protein 7 isoform 2) c4(217291) c5(217292, 217293, 217294, 217295, 217296, 217297) c6( ) c7(IR, aIA, FQ, oc, FM, cpK); #c1(PDZD7) c2(XP_005270222) c3(PDZ domain-containing protein 7 isoform X4) c4( ) c5(283289) c6( ) c7(IR, aIA, FO, oc, FM, cpK); #c1(PDZD7) c2(XP_011538481) c3(PDZ domain-containing protein 7 isoform X3) c4( ) c5(336236, 336237, 336238, 336239, 336240, 336241) c6( ) c7(IR, aIA, FQ, oc, FM, cpK); #c1(PDZD8) c2(NP_776152) c3(PDZ domain-containing protein 8) c4(250863) c5(250864, 250865, 250866, 250867, 250868, 250869) c6( ) c7(h, gn); #c1(PDZK1) c2(XP_011507918) c3(Na(+)/H(+) exchange regulatory cofactor NHE-RF3 isoform X1) c4(298233) c5( ) c6( ) c7(nD, T, dD, nn, aW, ea, e, jx, qK, aT, fd, hN, aq, fe, j, ci, ei, eq, B, ad); #c1(PDZK1) c2(XP_011507921) c3(Na(+)/H(+) exchange regulatory cofactor NHE-RF3 isoform X3) c4( ) c5(298234, 298235, 298236, 298237, 298238, 298239) c6( ) c7(nD, T, dD, nn, aW, ea, e, jx, qK, aT, fd, hN, aq, fe, j, ci, ei, eq, B, ad); #c1(PDZRN3) c2(NP_001290070) c3(E3 ubiquitin-protein ligase PDZRN3 isoform 4) c4(114968) c5(114969, 114970, 114971, 114972, 114973, 114974) c6( ) c7(bL, aw, m); #c1(PDZRN3) c2(NP_001290071) c3(E3 ubiquitin-protein ligase PDZRN3 isoform 5) c4(114975) c5(114976, 114977, 114978, 114979, 114980, 114981) c6( ) c7(bL, aw, m); #c1(PDZRN3) c2(NP_055824) c3(E3 ubiquitin-protein ligase PDZRN3 isoform 1) c4(183710, 183711) c5(183712, 183713, 183714, 183715, 183716, 183717, 183718, 183719, 183720, 183721, 183722, 183723) c6( ) c7(bL, aw, m); #c1(PDZRN4) c2(NP_001158067) c3(PDZ domain-containing RING finger protein 4 isoform 1) c4(63075) c5(63076, 63077, 63078, 63079, 63080, 63081, 63082) c6( ) c7(V, bK, ac, c, an); #c1(PDZRN4) c2(NP_037509) c3(PDZ domain-containing RING finger protein 4 isoform 2) c4(175926, 175927) c5(175928, 175929, 175930, 175931, 175932, 175933, 175934, 175935, 175936, 175937, 175938, 175939) c6( ) c7(V, bK, ac, c, an); #c1(PEAI5) c2(NP_001284505) c3(astrocytic phosphoprotein PEA-15 isoform a) c4(111944) c5(111945, 111946, 111947, 111948, 111949, 111950, 111951) c6( ) c7(bL, T, aZ, qy, aj, fr, Iu, q, J, eA, av, hd, Ig, aT, af, kl, d, aW, as, t, cm, bz, eM, nB, dB, wO, hk, cj, m); #c1(PEA15) c2(NP_001284506) c3(astrocytic phosphoprotein PEA-15 isoform b) c4(111952) c5(111953, 111954, 111955, 111956, 111957) c6( ) c7(bL, T, aZ, qy, aj, fr, Iu, q, J, eA, av, hd, Ig, aT, af, kl, d, aW, as, t, cm, bz, eM, nB, dB, wO, hk, cj, m); #c1(PEA15) c2(NP_001284507) c3(astrocytic phosphoprotein PEA-15 isoform c) c4(111958) c5(111959, 111960, 111961, 111962, 111963, 111964) c6( ) c7(bL, T, aZ, qy, aj, fr, Iu, q, J, eA, av, hd, Ig, aT, af, kl, d, aW, as, t, cm, bz, eM, nB, dB, wO, hk, cj, m); #c1(PEAK1) c2(NP_079052) c3(pseudopodium-enriched atypical kinase 1) c4(216759) c5(216760, 216761, 216762, 216763, 216764, 216765, 216766, 216767, 216768, 216769) c6( ) c7(LV, T, kp, aE, aT); #c1(PEAR1) c2(NP_001073940) c3(platelet endothelial aggregation receptor 1 precursor) c4(36617, 36618) c5(36619, 36620, 36621, 36622, 36623, 36624, 36625, 36626, 36627, 36628, 36629, 36630, 36631, 36632, 36633, 36634) c6( ) c7(kD, j); #c1(PEAR1) c2(XP_011507811) c3(platelet endothelial aggregation receptor 1 isoform X2) c4( ) c5(297953) c6( ) c7(kD, j); #c1(PEAR1) c2(XP_011507814) c3(platelet endothelial aggregation receptor 1 isoform X4) c4( ) c5(297954) c6( ) c7(kD, j); #c1(PEBP1) c2(NP_002558) c3(phosphatidylethanolamine-binding protein 1 preproprotein) c4(129798, 129799) c5(129800, 129801, 129802, 129803, 129804, 129805, 129806, 129807, 129808, 129809, 129810, 129811) c6( ) c7(T, jv, if, aw, ht, jh, aA, bB, n, fd, j, ci, qN, zP, q, ad, eA, aDF, eJ, biq, b, aE, i, ds, aT, K, hu, fb, ae, af, WW, aol, zQ, iU, aW, Y, ff, az, r, ks, aq, aF, en, g, wA, t, axp, cm, kP, eM, bE, np, m, adg, bt, Pr, B); #c1(PEBP4) c2(NP_659399) c3(phosphatidylethanolamine-binding protein 4 precursor) c4(239756) c5(239757, 239758, 239759, 239760, 239761, 239762) c6( ) c7(T, fM, eM, aW, r, aT, cz, j, t, bz, q); #c1(PECAM1) c2(XP_005276938) c3(platelet endothelial cell adhesion molecule isoform X3) c4(285742) c5( ) c6( ) c7(ID, bM, T, ea, e, fd, ci, Qp, x, xE, aE, Bc, M, dV, Ds, K, eN, Iy, DA, aW, aDn, zC, g, as, cm, uC, eM, nB, iA, vy, cj, k, m, eg, Vj, P, aov, dD, IT, aw, n, BH, fr, Cd, eh, cd, ai, eW, aXI, pe, kl, IG, By, Jn, DU, pI, cY, CM, sm, fe, kp, mo, op, lx, kT, dB, Vy, it, B, Dw, dA, eR, dK, IH, cR, j, AO, Cb, V, eA, nX, aT, cy, jj, bq, IM, ae, af, qk, ak, bf, s, iU, Y, bg, eS, t, Vq, bN, ck, bvL, beH, beJ, ac, dh, vi, sY, MH, ow, eq, atK, ad, afb, Jm, hd, CJ, py, qt, eZ, iV, bz, bF, es, Hw, bE, aS, ei, If, ne, y); #c1(PECAM1) c2(XP_005276939) c3(platelet endothelial cell adhesion molecule isoform X4) c4( ) c5(285743) c6( ) c7(ID, bM, T, ea, e, fd, ci, Qp, x, xE, aE, Bc, M, dV, Ds, K, eN, ly, DA, aW, aDn, zC, g, as, cm, uC, eM, nB, iA, vy, cj, k, m, eg, Vj, P, aov, dD, IT, aw, n, BH, fr, Cd, eh, cd, ai, eW, aXI, pe, kl, IG, By, Jn, DU, pI, cY, CM, sm, fe, kp, mo, op, lx, kT, dB, Vy, it, B, Dw, dA, eR, dK, IH, cR, j, AO, Cb, V, eA, nX, aT, cy, jj, bq, IM, ae, af, qk, ak, bf, s, iU, Y, bg, eS, t, Vq, bN, ck, bvL, beH, beJ, ac, dh, vi, sY, MH, ow, eq, atK, ad, afb, Jm, hd, CJ, py, qt, eZ, iV, bz, bE, es, Hw, bE, aS, ei, If, ne, y); #c1(PECAM1) c2(XP_005276940) c3(platelet endothelial cell adhesion molecule isoform X5) c4( ) c5(285744, 285745, 285746) c6( ) c7(ID, bM, T, ea, e, fd, ci, Qp, x, xE, aE, Bc, M, dV, Ds, K, eN, Iy, DA, aW, aDn, zC, g, as, cm, uC, eM, nB, iA, vy, cj, k, m, eg, Vj, P, aov, dD, IT, aw, n, BH, fr, Cd, eh, cd, ai, eW, aXI, pe, kl, IG, By, Jn, DU, pI, cY, CM, sm, fe, kp, mo, op, lx, kT, dB, Vy, it, B, Dw, dA, eR, dK, IH, cR, j, AO, Cb, V, eA, nX, aT, cy, jj, bq, IM, ae, af, qk, ak, bf, s, iU, Y, bg, eS, t, Vq, bN, ck, bvL, beH, beJ, ac, dh, vi, sY, MH, ow, eq, atK, ad, afb, Jm, hd, CJ, py, qt, eZ, iV, bz, bF, es, Hw, bE, aS, ei, If, ne, y); #c1(PECAM1) c2(XP_011523192) c3(platelet endothelial cell adhesion molecule isoform X1) c4(317717, 317718, 317719) c5(317720, 317721, 317722, 317723, 317724, 317725) c6( ) c7(ID, bM, T, ea, e, fd, ci, Qp, x, xE, aE, Bc, M, dV, Ds, K, eN, ly, DA, aW, aDn, zC, g, as, cm, uC, eM, nB, iA, vy, cj, k, m, eg, Vj, P, aov, dD, IT, aw, n, BH, fr, Cd, eh, cd, ai, eW, aXI, pe, kl, IG, By, Jn, DU, pI, cY, CM, sm, fe, kp, mo, op, Ix, kT, dB, Vy, it, B, Dw, dA, eR, dK, IH, cR, j, AO, Cb, V, eA, nX, aT, cy, jj, bq, IM, ae, af, qk, ak, bf, s, iU, Y, bg, eS, t, Vq, bN, ck, bvL, beH, beJ, ac, dh, vi, sY, MH, ow, eq, atK, ad, afb, Jm, hd, CJ, py, qt, eZ, iV, bz, bF, es, Hw, bE, aS, ei, If, ne, y); #c1(PECR) c2(NP_060911) c3(peroxisomal trans-2-enoyl-CoA reductase) c4(198587) c5(198588, 198589, 198590, 198591, 198592, 198593) c6( ) c7(at, nA); #c1(PEG10) c2(NP_001035242) c3(retrotransposon-derived protein PEG10 isoform 2) c4(32657) c5(32658, 32659, 32660, 32661, 32662, 32663, 32664, 32665) c6( ) c7(T, aE, Qu, aW, Y, hI, cj, aT, aq, ci, iR, AO, B, ad); #c1(PEG10) c2(NP_001165908) c3(retrotransposon-derived protein PEG10 isoform 3) c4( ) c5(67995, 67996) c6( ) c7(T, aE, Qu, aW, Y, hI, cj, aT, aq, ci, iR, AO, B, ad); #c1(PEG3) c2(NP_001139657) c3(paternally-expressed gene 3 protein isoform 2) c4(59589) c5( ) c6( ) c7(T, avp, fM, aE, Ig, CN, jz, aW, Y, if, iT, aT, bcd, cm, GA, m, qN, t, nJ, eA, ad); #c1(PEG3) c2(NP_001139658) c3(paternally-expressed gene 3 protein isoform 1) c4(59590, 59591) c5(59592, 59593, 59594, 59595, 59596, 59597, 59598, 59599, 59600, 59601, 59602, 59603, 59604, 59605, 59606, 59607, 59608, 59609, 59610, 59611, 59612, 59613, 59614, 59615, 59616, 59617, 59618, 59619, 59620, 59621, 59622) c6( ) c7(T, avp, fM, aE, Ig, CN, jz, aW, Y, if, iT, aT, bcd, cm, GA, m, qN, t, nJ, eA, ad); #c1(PEG3) c2(NP_001139659) c3(paternally-expressed gene 3 protein isoform 3) c4(59623) c5(59624, 59625, 59626, 59627, 59628) c6( ) c7(T, avp, fM, aE, Ig, CN, jz, aW, Y, if, iT, aT, bcd, cm, GA, m, qN, t, nJ, eA, ad); #c1(PEL11) c2(XP_011531296) c3(E3 ubiquitin-protein ligase pellino homolog 1 isoform X1) c4(327293) c5(327294, 327295, 327296, 327297, 327298, 327299) c6( ) c7(bL, If, gZ, aj, vc, IQ, Pk, J, mu); #c1(PEL12) c2(NP_067078) c3(E3 ubiquitin-protein ligase pellino homolog 2) c4(208938) c5(208939, 208940, 208941, 208942, 208943, 208944) c6( ) c7(ac); #c1(PELP1) c2(NP_001265170) c3(proline-, glutamic acid- and leucine-rich protein 1 isoform 2) c4(97912, 97913) c5(97914, 97915, 97916, 97917, 97918, 97919) c6( ) c7(ae, gj, T, aE, AO, ws, qt, aW, ajL, hL, aT, r, ci, m, g, t, ajB, bz, q, ad); #c1(PELP1) c2(NP_055204) c3(proline-, glutamic acid- and leucine-rich protein 1 isoform 1) c4(179782, 179783) c5(179784, 179785, 179786, 179787, 179788, 179789, 179790, 179791, 179792, 179793, 179794, 179795, 179796, 179797, 179798, 179799, 179800, 179801, 179802, 179803) c6( ) c7(ae, gj, T, aE, AO, ws, qt, aW, ajL, hL, aT, r, ci, m, g, t, ajB, bz, q, ad); #c1(PEMT) c2(NP_001254480) c3(phosphatidylethanolamine N-methyltransferase isoform 4) c4(94421) c5(94422, 94423) c6( ) c7(ng, T, jp, arQ, cz, aj, v, j, V, J, Na, aT, Nc, dL, bq, eL, vI, af, aW, fc, qa, cP, ei, B); #c1(PEMT) c2(NP_001254481) c3(phosphatidylethanolamine N-methyltransferase isoform 3) c4(94424, 94425) c5(94426, 94427, 94428, 94429, 94430, 94431, 94432, 94433, 94434, 94435, 94436, 94437, 94438, 94439, 94440, 94441, 94442, 94443) c6( ) c7(ng, T, jp, arQ, cz, aj, v, j, V, J, Na, aT, Nc, dL, bq, eL, vI, af, aW, fc, qa, cP, ei, B); #c1(PEMT) c2(NP_009100) c3(phosphatidylethanolamine N-methyltransferase isoform 2) c4( ) c5(170669, 170670, 170671, 170672, 170673, 170674, 170675, 170676) c6( ) c7(ng, T, jp, arQ, cz, aj, v, j, V, J, Na, aT, Nc, dL, bq, eL, vI, af, aW, fc, qa, cP, ei, B); #c1(PEMT) c2(NP_680477) c3(phosphatidylethanolamine N-methyltransferase isoform 1) c4(242298, 242299) c5(242300, 242301, 242302, 242303, 242304, 242305) c6( ) c7(ng, T, jp, arQ, cz, aj, v, j, V, J, Na, aT, Nc, dL, bq, eL, vI, aT, aW, fc, qa, cP, ei, B); #c1(PENK) c2(NP_001129162) c3(proenkephalin-A preproprotein) c4(50945, 50946, 50947, 50948, 50949) c5(50950, 50951, 50952, 50953, 50954, 50955, 50956, 50957, 50958, 50959, 50960, 50961, 50962, 50963, 50964, 50965, 50966, 50967, 50968, 50969, 50970, 50971) c6( ) c7(T, VR, hU, n, PJ, eJ, ad, aR, eW, cF, aE, Jb, SH, dL, bK, an, ae, aTO, eL, hZ, cpL, eH, kp, g, eF, LV, cm, wA, jb, FT, cv, pH, IB, aen); #c1(PEPD) c2(NP_000276) c3(xaa-Pro dipeptidase isoform 1) c4(6086) c5(6087, 6088, 6089, 6090, 6091, 6092) c6( ) c7(bL, T, AY, ac, fR, wL, Y, eZ, aT, CH, j, eo, wZ, fw); #c1(PEPD) c2(NP_001159528) c3(xaa-Pro dipeptidase isoform 2) c4(64244) c5(64245, 64246, 64247, 64248, 64249, 64250) c6( ) c7(bL, T, AY, ac, fR, wL, Y, eZ, aT, CH, j, eo, wZ, fw); #c1(PEPD) c2(NP_001159529) c3(xaa-Pro dipeptidase isoform 3) c4(64251) c5(64252, 64253, 64254, 64255, 64256, 64257) c6( ) c7(bL, T, AY, ac, fR, wL, Y, eZ, aT, CH, j, eo, wZ, fw); #c1(PER1) c2(NP_002607) c3(period circadian protein homolog 1) c4(130248, 130249) c5(130250, 130251, 130252, 130253, 130254, 130255, 130256, 130257, 130258, 130259, 130260, 130261, 130262) c6( ) c7(T, aC, e, aI, Jd, qj, ci, Na, XW, AW, aE, Gb, K, eL, aiV, aW, hI, bxx, bMC, eM, dc, wE, pJ, aw, bzb, aj, ct, nA, h, aNU, dL, he, Gc, Jj, agG, CQ, asE, hR, uz, bD, B, bL, eR, cz, arD, v, j, q, J, eA, aaF, nv, aT, bK, ae, iU, r, cI, f, iK, Ym, bN, ck, iM, dy, gT, jN, vm, bS, dG, aZE, ad, fU, sO, fb, Xb, je, nf, yy, Z, bz, apM, bE, ZD, ei, y, pC); #c1(PER2) c2(NP_073728) c3(period circadian protein homolog 2) c4(213257, 213258, 213259, 213260) c5(213261, 213262, 213263, 213264, 213265, 213266, 213267, 213268, 213269, 213270, 213271, 213272, 213273, 213274, 213275, 213276, 213277, 213278, 213279, 213280, 213281, 213282, 213283, 213284, 213285, 213286, 213287, 213288, 213289, 213290) c6( ) c7(bL, T, aXN, dA, jx, jh, cpO, Nt, cR, Gd, cpM, bS, cQ, ct, j, v, bB, ww, VV, q, ad, eA, aqN, hb, aT, h, cy, aXO, bK, K, he, ae, af, Jj, aqv, tb, iU, LC, aW, r, aPZ, agG, fe, kp, cI, Z, Gi, Ym, cpP, FT, aPY, cpN, qJ, NC, ac, nM, iT, bE, cj, ei, pK, y, bt, B); #c1(PER3) c2(NP_001276790) c3(period circadian protein homolog 3 isoform 2) c4(108373) c5( ) c6( ) c7(oO, T, Nt, bB, aj, v, q, J, ad, x, Na, NS, aqk, aT, ta, h, bK, K, ae, d, B, iU, aW, aaB, r, aPZ, fe, NR, sz, Z, iV, iK, aQb, NC, cA, bE, Ei, bzm, k, jd, X); #c1(PER3) c2(NP_001276791) c3(period circadian protein homolog 3 isoform 1) c4(108374) c5(108375, 108376, 108377, 108378, 108379, 108380) c6( ) c7(oO, T, Nt, bB, aj, v, q, J, ad, x, Na, NS, aqk, aT, ta, h, bK, K, ae, d, B, iU, aW, aaB, r, aPZ, fe, NR, sz, Z, iV, iK, aQb, NC, cA, bE, Ei, bzm, k, jd, X); #c1(PER3) c2(NP_001276792) c3(period circadian protein homolog 3 isoform 3) c4( ) c5(108381, 108382, 108383, 108384, 108385, 108386) c6( ) c7(oO, T, Nt, bB, aj, v, q, J, ad, x, Na, NS, aqk, aT, ta, h, bK, K, ae, d, B, iU, aW, aaB, r, aPZ, fe, NR, sz, Z, iV, iK, aQb, NC, cA, bE, Ei, bzm, k, jd, X); #c1(PERM1) c2(NP_001278296) c3(PGC-1 and ERR-induced regulator in muscle protein 1 isoform 2) c4(109545) c5(ID9546, 109547, 109548, 109549, 109550, 109551, 109552, 109553) c6( ) c7(aNG, hi); #c1(PERP) c2(NP_071404) c3(P53 apoptosis effector related to PMP-22) c4(211452, 211453, 211454) c5(211455, 211456, 211457, 211458, 211459, 211460, 211461, 211462, 211463, 211464, 211465, 211466, 211467, 211468, 211469, 211470, 211471, 211472) c6( ) c7(T, zQ, Y, ff, aT, auN, en, t, bz, iu, iP); #c1(PES1) c2(NP_001230154) c3(pescadillo homolog isoform 2) c4(85993) c5(85994, 85995, 85996, 85997, 85998, 85999) c6( ) c7(bE, aW, aT, bB, m, t); #c1(PES1) c2(NP_001269257) c3(pescadillo homolog isoform 3) c4(100924) c5(100925, 100926, 100927, 100928, 100929, 100930, 100931, 100932) c6( ) c7(bE, aW, aT, bB, m, t); #c1(PES1) c2(NP_055118) c3(pescadillo homolog isoform 1) c4(179064) c5(179065, 179066, 179067, 179068, 179069, 179070, 179071, 179072) c6( ) c7(bE, aW, aT, bB, m, t); #c1(PET100) c2(NP_001164626) c3(protein PET100 homolog, mitochondrial) c4(67074, 67075) c5(67076, 67077, 67078, 67079, 67080, 67081, 67082, 67083, 67084, 67085, 67086, 67087, 67088, 67089, 67090, 67091) c6( ) c7(acJ, ajU); #c1(PET117) c2(NP_001158283) c3(protein PET117 homolog, mitochondrial, precursor) c4(63536) c5(63537, 63538, 63539, 63540, 63541, 63542, 63543) c6( ) c7(aSP); #c1(PEX1) c2(NP_000457) c3(peroxisome biogenesis factor 1 isoform 1) c4(9256) c5(9257, 9258, 9259, 9260, 9261, 9262, 9263, 9264) c6( ) c7(ajx, fc, mE, cpQ, aL, mL, Nh, aI, aR); #c1(PEX1) c2(NP_001269606) c3(peroxisome biogenesis factor 1 isoform 2) c4(102187, 102188) c5(102189, 102190, 102191, 102192, 102193, 102194, 102195, 102196, 102197, 102198, 102199) c6( ) c7(ajx, fc, mE, cpQ, aL, mL, Nh, aI, aR); #c1(PEX1) c2(NP_001269607) c3(peroxisome biogenesis factor 1 isoform 3) c4(102200) c5( ) c6( ) c7(ajx, fc, mE, cpQ, aL, mL, Nh, aI, aR); #c1(PEX1) c2(XP_005250490) c3(peroxisome biogenesis factor 1 isoform X1) c4( ) c5(270355, 270356, 270357, 270358, 270359) c6( ) c7(ajx, fc, mE, cpQ, aL, mL, Nh, aI, aR); #c1(PEX11A) c2(NP_003838) c3(peroxisomal membrane protein 11A isoform 1) c4(141253) c5(141254, 141255, 141256, 141257, 141258, 141259) c6( ) c7(c); #c1(PEX12) c2(NP_000277) c3(peroxisome assembly protein 12) c4(6093, 6094) c5(6095, 6096, 6097, 6098, 6099, 6100, 6101, 6102, 6103, 6104, 6105, 6106) c6( ) c7(cPR, ajx, mE, mL, cPS, bX, aI); #c1(PEX13) c2(NP_002609) c3(peroxisome biogenesis factor 13) c4(130263) c5(130264, 130265, 130266, 130267, 130268, 130269) c6( ) c7(cpU, cpT, cpQ, aL, mL, dF, aI); #c1(PEX14) c2(XP_011539880) c3(peroxisomal membrane protein PEX14 isoform X2) c4( ) c5(338154) c6( ) c7(cpV, aW, ajP, aT, mL, oQ, cm, aI); #c1(PEX16) c2(NP_004804) c3(peroxisomal biogenesis factor 16 isoform 1) c4(149973) c5(149974, 149975, 149976, 149977, 149978, 149979) c6( ) c7(cpX, aI, mL, cpW); #c1(PEX16) c2(NP_476515) c3(peroxisomal biogenesis factor 16 isoform 2) c4(230715) c5(230716, 230717, 230718, 230719, 230720, 230721) c6( ) c7(cpX, aI, mL, cpW); #c1(PEX19) c2(NP_001180573) c3(peroxisomal biogenesis factor 19 isoform c) c4(74268, 74269) c5(74270, 74271, 74272, 74273, 74274, 74275, 74276, 74277, 74278, 74279, 74280) c6( ) c7(cpY, ib, eM, bO, mL, LR, aI); #c1(PEX19) c2(NP_002848) c3(peroxisomal biogenesis factor 19 isoform a) c4(132763, 132764, 132765) c5(132766, 132767, 132768, 132769, 132770, 132771, 132772, 132773, 132774, 132775, 132776, 132777, 132778, 132779, 132780, 132781, 132782, 132783, 132784) c6( ) c7(cPY, ib, eM, bO, mL, LR, aI); #c1(PEX2) c2(NP_001165558) c3(peroxisome biogenesis factor 2) c4(67775, 67776) c5(67777, 67778, 67779, 67780, 67781, 67782, 67783, 67784, 67785, 67786, 67787, 67788, 67789, 67790, 67791, 67792, 67793, 67794, 67795, 67796, 67797, 67798, 67799, 67800, 67801) c6( ) c7(cPZ, ac, LC, cqa, ajx, mE, cy, ao, v, mL, cm, aI, ad); #c1(PEX26) c2(NP_001121121) c3(peroxisome assembly protein 26 isoform a) c4(45249, 45250) c5(45251, 45252, 45253, 45254, 45255, 45256, 45257, 45258, 45259, 45260, 45261, 45262, 45263, 45264, 45265, 45266) c6( ) c7(ajx, cqc, cpQ, cqb, mL, dF, aI); #c1(PEX26) c2(NP_001186248) c3(peroxisome assembly protein 26 isoform b) c4(77444) c5(77445, 77446, 77447, 77448, 77449, 77450) c6( ) c7(ajx, cqc, cpQ, cqb, mL, dF, aI); #c1(PEX3) c2(NP_003621) c3(peroxisomal biogenesis factor 3) c4(139676, 139677) c5(139678, 139679, 139680, 139681, 139682, 139683, 139684, 139685, 139686, 139687, 139688, 139689, 139690, 139691, 139692, 139693) c6( ) c7(mE, aI, mL, abh, cqd); #c1(PEX5) c2(NP_000310) c3(peroxisomal biogenesis factor 5 isoform b) c4(6921, 6922, 6923, 6924) c5(6925, 6926, 6927, 6928, 6929, 6930, 6931, 6932, 6933, 6934) c6( ) c7(dH, ajx, dw, mE, cpQ, aL, mL, cqf, cqe, aI); #c1(PEX5) c2(NP_001124496) c3(peroxisomal biogenesis factor 5 isoform c) c4( ) c5(49163, 49164, 49165, 49166, 49167, 49168, 49169, 49170, 49171, 49172, 49173, 49174, 49175, 49176, 49177) c6( ) c7(dH, ajx, dw, mE, cpQ, aL, mL, cqf, cqe, aI); #c1(PEX5) c2(NP_001287718) c3(peroxisomal biogenesis factor 5 isoform e) c4(112629, 112630) c5(112631, 112632, 112633, 112634, 112635, 112636, 112637, 112638, 112639, 112640) c6( ) c7(dH, ajx, dw, mE, cpQ, aL, mL, cqf, cqe, aI); #c1(PEX5) c2(XP_005253512) c3(peroxisomal biogenesis factor 5 isoform X5) c4(272534) c5(272535, 272536, 272537, 272538, 272539, 272540, 272541, 272542, 272543) c6( ) c7(dH, ajx, dw, mE, cpQ, aL, mL, cqf, cqe, aI); #c1(PEX5) c2(XP_011519096) c3(peroxisomal biogenesis factor 5 isoform X3) c4(313688) c5(313689) c6( ) c7(dH, ajx, dw, mE, cpQ, aL, mL, cqf, cqe, aI); #c1(PEX5) c2(XP_011519098) c3(peroxisomal biogenesis factor 5 isoform XI) c4( ) c5(313690, 313691, 313692, 313693, 313694) c6( ) c7(dH, ajx, dw, mE, cpQ, aL, mL, cqf, cqe, aI); #c1(PEX5) c2(XP_011519102) c3(peroxisomal biogenesis factor 5 isoform X2) c4(313695) c5(313696, 313697, 313698, 313699, 313700, 313701, 313702, 313703) c6( ) c7(dH, ajx, dw, mE, cpQ, aL, mL, cqf, cqe, aI); #c1(PEX5) c2(XP_011519103) c3(peroxisomal biogenesis factor 5 isoform X4) c4(313704) c5(313705, 313706, 313707, 313708, 313709, 313710) c6( ) c7(dH, ajx, dw, mE, cpQ, aL, mL, cqf, cqe, aI); #c1(PEX5L) c2(NP_001243679) c3(PEX5-related protein isoform 2) c4(91355, 91356) c5(91357, 91358, 91359, 91360, 91361, 91362, 91363, 91364, 91365, 91366, 91367, 91368, 91369, 91370, 91371, 91372, 91373) c6( ) c7(bL); #c1(PEX5L) c2(NP_001243680) c3(PEX5-related protein isoform 3) c4(91374) c5(91375, 91376, 91377, 91378, 91379, 91380) c6( ) c7(bL); #c1(PEX5L) c2(NP_001243681) c3(PEX5-related protein isoform 4) c4(91381) c5(91382, 91383, 91384, 91385, 91386, 91387) c6( ) c7(bL); #c1(PEX5L) c2(NP_001243684) c3(PEX5-related protein isoform 7) c4(91388) c5(91389, 91390, 91391, 91392, 91393, 91394) c6( ) c7(bL); #c1(PEX5L) c2(NP_057643) c3(PEX5-related protein isoform 1) c4(192011) c5(192012, 192013, 192014, 192015, 192016, 192017, 192018) c6( ) c7(bL); #c1(PEX5L) c2(XP_005247583) c3(PEX5-related protein isoform X10) c4(267867) c5(267868, 267869, 267870, 267871, 267872, 267873) c6( ) c7(bL); #c1(PEX5L) c2(XP_011511184) c3(PEX5-related protein isoform X3) c4(301658) c5( ) c6( ) c7(bL); #c1(PEX6) c2(NP_000278) c3(peroxisome biogenesis factor 6) c4(6107, 6108) c5(6109, 6110, 6111, 6112, 6113, 6114, 6115, 6116, 6117, 6118, 6119, 6120) c6( ) c7(cqh, cqg, ajx, mE, aL, mL, nA, oc, aI, aR); #c1(PEX7) c2(NP_000279) c3(peroxisomal biogenesis factor 7) c4(6121, 6122) c5(6123, 6124, 6125, 6126, 6127, 6128, 6129, 6130, 6131, 6132, 6133, 6134) c6( ) c7(rR, ob, ajx, ahj, az, yB, cqi, aBn, LR, aI); #c1(PEX7) c2(XP_011534202) c3(peroxisomal biogenesis factor 7 isoform X3) c4(330506) c5(330507, 330508, 330509, 330510, 330511, 330512) c6( ) c7(rR, ob, ajx, ahj, az, yB, cqi, aBn, LR, aI); #c1(PF4) c2(NP_002610) c3(platelet factor 4 precursor) c4(130270, 130271, 130272) c5(130273, 130274, 130275, 130276, 130277, 130278) c6( ) c7(bM, T, dD, xu, dA, Dw, Yu, qb, e, jx, ez, cR, fd, j, eq, eh, ai, qh, aT, Ds, iY, DU, kU, cY, iU, aW, Ih, mQ, hI, t, ck, bqd, gZ, m, fD, bt); #c1(PF4) c2(XP_005265753) c3(platelet factor 4 isoform X1) c4(279705) c5( ) c6( ) c7(bM, T, dD, xu, dA, Dw, Yu, qb, e, jx, ez, cR, fd, j, eq, eh, ai, qh, aT, Ds, iY, DU, kU, cY, iU, aW, Ih, mQ, hI, t, ck, bqd, gZ, m, fD, bt); #c1(PF4V1) c2(NP_002611) c3(platelet factor 4 variant precursor) c4(130279) c5(130280, 130281, 130282, 130283, 130284, 130285) c6( ) c7(gZ, aS, T, j, ao); #c1(PFDN4) c2(NP_002614) c3(prefoldin subunit 4) c4(130305) c5(130306, 130307, 130308, 130309, 130310, 130311) c6( ) c7(bP, aW, oe, EQ, r, aT, q); #c1(PFDN5) c2(NP_002615) c3(prefoldin subunit 5 isoform alpha) c4(130312) c5(130313, 130314, 130315, 130316, 130317, 130318, 130319, 130320, 130321, 130322, 130323) c6( ) c7(ck, nz, aE); #c1(PFDN5) c2(NP_665904) c3(prefoldin subunit 5 isoform gamma) c4(241963) c5(241964, 241965, 241966, 241967, 241968, 241969) c6( ) c7(ck, nz, aE); #c1(PFDN6) c2(NP_001252525) c3(prefoldin subunit 6) c4(94085, 94086) c5(94087, 94088, 94089, 94090, 94091, 94092, 94093, 94094, 94095, 94096, 94097, 94098, 94099, 94100, 94101, 94102, 94103, 94104, 94105, 94106, 94107, 94108, 94109, 94110, 94111, 94112, 94113, 94114, 94115, 94116, 94117, 94118, 94119, 94120, 94121, 94122, 94123, 94124, 94125, 94126, 94127, 94128, 94129, 94130, 94131, 94132, 94133, 94134, 94135, 94136, 94137, 94138, 94139, 94140, 94141, 94142, 94143, 94144, 94145, 94146, 94147, 94148, 94149, 94150, 94151, 94152, 94153, 94154, 94155, 94156, 94157, 94158, 94159, 94160, 94161, 94162, 94163, 94164, 94165, 94166, 94167, 94168, 94169, 94170, 94171, 94172, 94173) c6( ) c7(eZ); #c1(PFKFB1) c2(NP_001258733) c3(6-phosphofructo-2-kinase/fructose-2, 6-bisphosphatase 1 isoform 2) c4(96443) c5( ) c6( ) c7(gO); #c1(PFKFB1) c2(NP_001258734) c3(6-phosphofructo-2-kinase/fructose-2, 6-bisphosphatase 1 isoform 3) c4(96444) c5(96445, 96446, 96447, 96448, 96449, 96450, 96451, 96452, 96453, 96454, 96455, 96456) c6( ) c7(gO); #c1(PFKFB1) c2(NP_002616) c3(6-phosphofructo-2-kinase/fructose-2, 6-bisphosphatase 1 isoform 1) c4(130324) c5(130325, 130326, 130327, 130328, 130329, 130330) c6( ) c7(gO); #c1(PFKFB2) c2(NP_001018063) c3(6-phosphofructo-2-kinase/fructose-2, 6-bisphosphatase 2 isoform b) c4(27010, 27011, 27012) c5(27013, 27014, 27015, 27016, 27017, 27018, 27019, 27020, 27021, 27022, 27023, 27024, 27025, 27026, 27027, 27028, 27029, 27030) c6( ) c7(T, W); #c1(PFKFB2) c2(XP_011507930) c3(6-phosphofructo-2-kinase/fructose-2, 6-bisphosphatase 2 isoform X1) c4(298247, 298248) c5(298249, 298250, 298251, 298252, 298253, 298254, 298255, 298256, 298257, 298258, 298259, 298260) c6( ) c7(T, W); #c1(PFKFB3) c2(NP_001138915) c3(6-phosphofructo-2-kinase/fructose-2, 6-bisphosphatase 3 isoform 2) c4(58173, 58174) c5(58175, 58176, 58177, 58178, 58179, 58180, 58181, 58182, 58183, 58184, 58185, 58186) c6( ) c7(T, hd, d, ac, aC, bE, aW, tT, Y, ev, aT, cy, v, j, K, IQ, qM, as, Pk, y); #c1(PFKFB3) c2(NP_001269559) c3(6-phosphofructo-2-kinase/fructose-2, 6-bisphosphatase 3 isoform 3) c4(101971) c5(101972, 101973, 101974, 101975, 101976, 101977, 101978) c6( ) c7(T, hd, d, ac, aC, bE, aW, tT, Y, ev, aT, cy, v, j, K, IQ, qM, as, Pk, y); #c1(PFKFB3) c2(NP_004557) c3(6-phosphofructo-2-kinase/fructose-2, 6-bisphosphatase 3 isoform 1) c4(147622) c5(147623, 147624, 147625, 147626, 147627, 147628) c6( ) c7(T, hd, d, ac, aC, bE, aW, tT, Y, ev, aT, cy, v, j, K, IQ, qM, as, Pk, y); #c1(PFKFB3) c2(XP_005252521) c3(6-phosphofructo-2-kinase/fructose-2, 6-bisphosphatase 3 isoform X3) c4(271834) c5(271835) c6( ) c7(T, hd, d, ac, aC, bE, aW, tT, Y, ev, aT, cy, v, j, K, IQ, qM, as, Pk, y); #c1(PFKFB3) c2(XP_011517795) c3(6-phosphofructo-2-kinase/fructose-2, 6-bisphosphatase 3 isoform X4) c4(311675, 311676, 311677) c5(311678, 311679, 311680, 311681, 311682, 311683, 311684, 311685, 311686, 311687, 311688, 311689, 311690, 311691, 311692, 311693, 311694, 311695, 311696, 311697, 311698, 311699, 311700) c6( ) c7(T, hd, d, ac, aC, bE, aW, tT, Y, ev, aT, cy, v, j, K, IQ, qM, as, Pk, y); #c1(PFKFB4) c2(NP_004558) c3(6-phosphofructo-2-kinase/fructose-2, 6-bisphosphatase 4) c4(147629) c5(147630, 147631, 147632, 147633, 147634, 147635) c6( ) c7(T, aC, d, ae, eA, ad); #c1(PFKL) c2(NP_002617) c3(ATP-dependent 6-phosphofructokinase, liver type isoform b) c4(130331, 130332) c5(130333, 130334, 130335, 130336, 130337, 130338, 130339) c6( ) c7(Mg, mU, mW, acI, mZ, mS, yU, mY, bK, yZ, f, mV, mT, y, mX); #c1(PFKL) c2(XP_005261194) c3(ATP-dependent 6-phosphofructokinase, liver type isoform X5) c4( ) c5(277265, 277266, 277267, 277268, 277269) c6( ) c7(Mg, mU, mW, acI, ml, mS, yU, mY, bK, yZ, f, mV, mT, y, mX); #c1(PFKL) c2(XP_006724075) c3(ATP-dependent 6-phosphofructokinase, liver type isoform X1) c4(295691, 295692) c5(295693, 295694, 295695, 295696, 295697, 295698, 295699, 295700, 295701, 295702, 295703, 295704) c6( ) c7(Mg, mU, mW, acl, ml, mS, yU, mY, bK, yZ, f, mV, mT, y, mX); #c1(PFKM0) c2(NP_001160158) c3(ATP-dependent 6-phosphofructokinase, muscle type isoform 1) c4(65119) c5(65120, 65121, 65122, 65123, 65124, 65125, 65126, 65127, 65128, 65129, 65130, 65131, 65132, 65133, 65134, 65135, 65136, 65137, 65138, 65139) c6( ) c7(bL, T, ajT, aW, oj, aT, j, ci, bq, add); #c1(PFKM) c2(NP_001160160) c3(ATP-dependent 6-phosphofructokinase, muscle type isoform 2) c4( ) c5(65140, 65141, 65142, 65143, 65144, 65145, 65146, 65147, 65148, 65149, 65150, 65151, 65152, 65153, 65154, 65155, 65156, 65157, 65158, 65159, 65160, 65161, 65162, 65163, 65164, 65165, 65166, 65167, 65168, 65169, 65170) c6( ) c7(bL, T, ajT, aW, oj, aT, j, ci, bq, add); #c1(PFKM) c2(XP_005269033) c3(ATP-dependent 6-phosphofructokinase, muscle type isoform X4) c4(282258, 282259) c5(282260) c6( ) c7(bL, T, ajT, aW, oj, aT, j, ci, bq, add); #c1(PFKM) c2(XP_011536789) c3(ATP-dependent 6-phosphofructokinase, muscle type isoform X3) c4(334467, 334468, 334469, 334470, 334471, 334472) c5(334473, 334474, 334475, 334476, 334477, 334478, 334479, 334480, 334481, 334482, 334483, 334484, 334485, 334486) c6( ) c7(bL, T, ajT, aW, oj, aT, j, ci, bq, add); #c1(PFKP) c2(NP_001229268) c3(ATP-dependent 6-phosphofructokinase, platelet type isoform 2) c4(84099, 84100) c5(84101, 84102, 84103, 84104, 84105, 84106, 84107, 84108, 84109, 84110, 84111, 84112) c6( ) c7(aW, v, ajT, aT); #c1(PFKP) c2(NP_002618) c3(ATP-dependent 6-phosphofructokinase, platelet type isoform 1) c4(130340, 130341, 130342, 130343) c5(130344, 130345, 130346, 130347, 130348, 130349, 130350) c6( ) c7(aW, v, ajT, aT); #c1(PFKP) c2(XP_005252522) c3(ATP-dependent 6-phosphofructokinase, platelet type isoform X1) c4(271836, 271837) c5( ) c6( ) c7(aW, v, ajT, aT); #c1(PFKP) c2(XP_005252523) c3(ATP-dependent 6-phosphofructokinase, platelet type isoform X3) c4(271838) c5(271839, 271840, 271841, 271842, 271843, 271844) c6( ) c7(aW, v, ajT, aT); #c1(PFKP) c2(XP_005252524) c3(ATP-dependent 6-phosphofructokinase, platelet type isoform X4) c4( ) c5(271845, 271846, 271847, 271848, 271849, 271850, 271851, 271852, 271853, 271854, 271855, 271856, 271857, 271858, 271859, 271860, 271861, 271862, 271863, 271864, 271865, 271866, 271867, 271868, 271869, 271870, 271871, 271872, 271873) c6( ) c7(aW, v, ajT, aT); #c1(PFN1) c2(NP_005013) c3(profilin-1) c4(152165) c5(152166, 152167, 152168, 152169, 152170, 152171) c6( ) c7(T, Ol, Vd, ci, fr, PJ, ad, tP, aE, WY, aT, kf, By, K, ae, aW, aq, aaE, g, cqj, bb, kP, c, DW, U, rA, it, B); #c1(PFN2) c2(NP_002619) c3(profilin-2 isoform b) c4(130351) c5(130352, 130353, 130354, 130355, 130356, 130357) c6( ) c7(ds, aF, K, c, aA); #c1(PFN2) c2(NP_444252) c3(profilin-2 isoform a) c4(230111) c5(230112, 230113, 230114, 230115, 230116, 230117) c6( ) c7(ds, aF, K, c, aA); #c1(PGA3) c2(NP_001073275) c3(pepsin A-3 preproprotein) c4(35669, 35670, 35671) c5(35672, 35673, 35674, 35675, 35676, 35677, 35678, 35679, 35680, 35681, 35682, 35683, 35684, 35685, 35686, 35687, 35688, 35689, 35690, 35691, 35692) c6( ) c7(bvS, aF, aLA, aA); #c1(PGA4) c2(NP_001073276) c3(pepsin A-4 preproprotein) c4(35693, 35694) c5(35695, 35696, 35697, 35698, 35699, 35700, 35701, 35702, 35703, 35704, 35705, 35706, 35707) c6( ) c7(aLA); #c1(PGA5) c2(NP_055039) c3(pepsin A-5 preproprotein) c4(178447, 178448, 178449) c5(178450, 178451, 178452, 178453, 178454, 178455, 178456, 178457, 178458, 178459, 178460, 178461, 178462, 178463, 178464, 178465, 178466, 178467, 178468, 178469, 178470, 178471) c6( ) c7(fe, akY, aLA, iV); #c1(PGAM1) c2(NP_002620) c3(phosphoglycerate mutase 1) c4(130358, 130359) c5(130360, 130361, 130362, 130363, 130364, 130365, 130366) c6( ) c7(T, zQ, eM, iR, ff, oW, r, aA, aq, bK, ci, K, q, en, zP, g, eA, B); #c1(PGAM2) c2(NP_000281) c3(phosphoglycerate mutase 2) c4(6135) c5(6136, 6137, 6138, 6139, 6140, 6141) c6( ) c7(Bw, afU, cqk, K, akW, ad); #c1(PGAM4) c2(NP_001025062) c3(phosphoglycerate mutase 4) c4(29292) c5(29293, 29294, 29295, 29296, 29297, 29298) c6( ) c7(q, eA, r); #c1(PGAP1) c2(NP_079265) c3(GPI inositol-deacylase) c4(217627) c5(217628, 217629, 217630, 217631, 217632, 217633, 217634) c6( ) c7(bM, y, bN, an); #c1(PGAP1) c2(XP_011510181) c3(GPI inositol-deacylase isoform X2) c4(300747) c5(300748, 300749, 300750, 300751, 300752) c6( ) c7(bM, y, bN, an); #c1(PGAP1) c2(XP_011510182) c3(GPI inositol-deacylase isoform X3) c4(300753, 300754) c5(300755, 300756, 300757, 300758, 300759, 300760, 300761, 300762, 300763, 300764, 300765, 300766) c6( ) c7(bM, y, bN, an); #c1(PGAP2) c2(NP_001138910) c3(post-GPI attachment to proteins factor 2 isoform 2) c4(58138) c5(58139, 58140, 58141, 58142, 58143, 58144) c6( ) c7(T, cqm, eH, mI, cqn, K, nA, eF, cqI, dr); #c1(PGAP2) c2(NP_001243165) c3(post-GPI attachment to proteins factor 2 isoform 4) c4(90024, 90025) c5(90026, 90027, 90028, 90029, 90030, 90031, 90032, 90033, 90034) c6( ) c7(T, cqm, eH, mI, cqn, K, nA, eF, cql, dr); #c1(PGAP2) c2(NP_001243166) c3(post-GPI attachment to proteins factor 2 isoform 5) c4(90035) c5(90036) c6( ) c7(T, cqm, eH, mI, cqn, K, nA, eF, cql, dr); #c1(PGAP2) c2(NP_001243167) c3(post-GPI attachment to proteins factor 2 isoform 6) c4(90037) c5(90038, 90039, 90040, 90041, 90042, 90043, 90044, 90045, 90046, 90047, 90048) c6( ) c7(T, cqm, eH, mI, cqn, K, nA, eF, cql, dr); #c1(PGAP2) c2(NP_001243169) c3(post-GPI attachment to proteins factor 2 isoform 8) c4(90049) c5(90050, 90051, 90052, 90053, 90054) c6( ) c7(T, cqm, eH, mI, cqn, K, nA, eF, cql, dr); #c1(PGAP2) c2(NP_001269967) c3(post-GPI attachment to proteins factor 2 isoform 9) c4(103302) c5(103303, 103304, 103305, 103306, 103307, 103308, 103309) c6( ) c7(T, cqm, eH, mI, cqn, K, nA, eF, cql, dr); #c1(PGAP2) c2(NP_055304) c3(post-GPI attachment to proteins factor 2 isoform 1) c4( ) c5(180378, 180379, 180380, 180381, 180382, 180383, 180384, 180385) c6( ) c7(T, cqm, eH, mI, cqn, K, nA, eF, cql, dr); #c1(PGAP2) c2(XP_006718246) c3(post-GPI attachment to proteins factor 2 isoform X14) c4( ) c5(291651) c6( ) c7(T, cqm, eH, mI, cqn, K, nA, eF, cql, dr); #c1(PGAP2) c2(XP_006718248) c3(post-GPI attachment to proteins factor 2 isoform X15) c4( ) c5(291652) c6( ) c7(T, cqm, eH, mI, cqn, K, nA, eF, cql, dr); #c1(PGAP2) c2(XP_011518296) c3(post-GPI attachment to proteins factor 2 isoform X8) c4(312324) c5(312325, 312326, 312327, 312328, 312329, 312330) c6( ) c7(T, cqm, eH, mI, cqn, K, nA, eF, cql, dr); #c1(PGAP2) c2(XP_011518310) c3(post-GPI attachment to proteins factor 2 isoform X17) c4(312331) c5(312332, 312333, 312334, 312335, 312336) c6( ) c7(T, cqm, eH, mI, cqn, K, nA, eF, cql, dr); #c1(PGAP3) c2(NP_001278655) c3(post-GPI attachment to proteins factor 3 isoform 2 precursor) c4(109949) c5(109950, 109951, 109952, 109953, 109954, 109955) c6( ) c7(bL, T, eR, e, aI, bzb, jN, aA, arD, cz, aj, bS, Jd, ct, cql, nA, dG, j, v, qj, q, J, aZE, ad, vm, fU, cqo, aaF, AW, XW, aE, Na, nv, sO, aT, h, aNU, bK, K, cqn, he, Xb, ae, fb, Gc, je, aiV, aw, gT, aW, hl, r, nf, agG, yy, bxx, bMC, cl, Z, f, iK, Ym, bz, CQ, bN, asE, ck, apM, iM, eM, bE, dc, wE, ZD, hR, uz, Km, dy, ei, bD, pJ, B, y, pC); #c1(PGAP3) c2(NP_001278657) c3(post-GPI attachment to proteins factor 3 isoform 3 precursor) c4(109956) c5(109957, 109958, 109959, 109960, 109961, 109962) c6( ) c7(bL, T, eR, e, aI, bzb, jN, aA, arD, cz, aj, bS, Jd, ct, cql, nA, dG, j, v, qj, q, J, aZE, ad, vm, fU, cqo, aaF, AW, XW, aE, Na, nv, sO, aT, h, aNU, bK, K, cqn, he, Xb, ae, fb, Gc, je, aiV, aw, gT, aW, hl, r, nf, agG, yy, bxx, bMC, cl, Z, f, iK, Ym, bz, CQ, bN, asE, ck, apM, iM, eM, bE, dc, wE, ZD, hR, uz, Km, dy, ei, bD, pJ, B, y, pC); #c1(PGAP3) c2(NP_219487) c3(post-GPI attachment to proteins factor 3 isoform 1 precursor) c4(228574, 228575) c5(228576, 228577, 228578, 228579, 228580, 228581, 228582, 228583, 228584, 228585, 228586, 228587) c6( ) c7(bL, T, eR, e, aI, bzb, jN, aA, arD, cz, aj, bS, Jd, ct, cql, nA, dG, j, v, qj, q, J, aZE, ad, vm, fU, cqo, aaF, AW, XW, aE, Na, nv, sO, aT, h, aNU, bK, K, cqn, he, Xb, ae, fb, Gc, je, aiV, aw, gT, aW, hl, r, nf, agG, yy, bxx, bMC, cl, Z, f, iK, Ym, bz, CQ, bN, asE, ck, apM, iM, eM, bE, dc, wE, ZD, hR, uz, Km, dy, ei, bD, pJ, B, y, pC); #c1(PGBD1) c2(NP_001171672) c3(piggyBac transposable element-derived protein 1) c4(71264) c5(71265, 71266, 71267, 71268, 71269, 71270, 71271, 71272, 71273, 71274) c6( ) c7(af, eZ); #c1(PGBD5) c2(NP_001245240) c3(piggyBac transposable element-derived protein 5) c4(92779, 92780) c5(92781, 92782, 92783, 92784, 92785, 92786, 92787, 92788, 92789, 92790, 92791, 92792) c6( ) c7(aw, fq, alv); #c1(PGC) c2(NP_001159896) c3(gastricsin isoform 2 preproprotein) c4(64931, 64932) c5(64933, 64934, 64935, 64936, 64937, 64938, 64939, 64940, 64941, 64942, 64943, 64944, 64945, 64946, 64947, 64948, 64949) c6( ) c7(bL, T, cqp, wu, aZ, aA, cz, aj, dG, v, ci, ml, fr, q, J, ad, cc, qp, aT, bK, K, wm, bl, ae, af, dl, A, vT, Jl, aW, Y, az, eH, fc, r, Mz, bEX, aq, aF, aB, kt, bp, Sm, eF, zE, ve, qa, fT, rR, iA, mx, U, gZ, mf, cP, ei, QV, B, aJC, L); #c1(PGC) c2(NP_002621) c3(gastricsin isoform 1 preproprotein) c4(130367, 130368) c5(130369, 130370, 130371, 130372, 130373, 130374, 130375) c6( ) c7(bL, T, cqp, wu, aZ, aA, cz, aj, dG, v, ci, ml, fr, q, J, ad, cc, qp, aT, bK, K, wm, bl, ae, af, dl, A, vT, Jl, aW, Y, az, eH, fc, r, Mz, bEX, aq, aF, aB, kt, bp, Sm, eF, zE, ve, qa, fT, rR, iA, mx, U, gZ, mf, cP, ei, QV, B, aJC, L); #c1(PGD) c2(NP_001291380) c3(6-phosphogluconate dehydrogenase, decarboxylating isoform 2) c4(115815) c5(115816, 115817, 115818, 115819, 115820, 115821) c6( ) c7(Nq, bM, T, Nr, BU, Uu, Ew, dV, vH, aq, Xm, jE, cqq, aTS, f, jT, Ku, eQ, B, dR); #c1(PGD) c2(NP_001291381) c3(6-phosphogluconate dehydrogenase, decarboxylating isoform 3) c4( ) c5(115822, 115823, 115824, 115825, 115826, 115827, 115828, 115829, 115830, 115831, 115832) c6( ) c7(Nq, bM, T, Nr, BU, Uu, Ew, dV, vH, aq, Xm, jE, cqq, aTS, f, jT, Ku, eQ, B, dR); #c1(PGF) c2(NP_001193941) c3(placenta growth factor isoform 2 precursor) c4(83270, 83271) c5(83272, 83273, 83274, 83275, 83276, 83277, 83278, 83279, 83280, 83281, 83282, 83283) c6( ) c7(T, ea, e, al, eb, aY, ip, x, Vp, K, aiJ, hm, DA, yo, Au, g, uC, QA, eM, nB, AM, wE, aBO, vy, dD, aw, aj, cd, ai, ft, gd, aze, fQ, aq, cB, bL, eR, jx, rf, cz, cR, j, q, J, RI, uT, cy, bq, ae, vT, Y, blq, r, en, bu, f, c, dh, fD, rA, bt, ao, hS, sY, Pt, qb, eq, ad, hX, dP, av, hd, py, IC, oW, nJ, azH, d, ff, yy, bz, gk, pc, zr, bE, y); #c1(PGF) c2(NP_002623) c3(placenta growth factor isoform 1 precursor) c4(130376) c5(130377, 130378, 130379, 130380, 130381, 130382) c6( ) c7(T, ea, e, aI, eb, aY, ip, x, Vp, K, aiJ, hm, DA, yo, Au, g, uC, QA, eM, nB, AM, wE, aBO, vy, dD, aw, aj, cd, ai, ft, gd, aze, fQ, aq, cB, bL, eR, jx, rf, cz, cR, j, q, J, RI, uT, cy, bq, ae, vT, Y, blq, r, en, bu, f, c, dh, fD, rA, bt, ao, hS, sY, Pt, qb, eq, ad, hX, dP, av, hd, py, IC, oW, nJ, azH, d, ff, yy, bz, gk, pc, zr, bE, y); #c1(PGGT1B) c2(NP_005014) c3(geranylgeranyl transferase type-1 subunit beta) c4(152172) c5(152173, 152174, 152175, 152176, 152177, 152178) c6( ) c7(zu, ey, Da, pb, aE); #c1(PGGT1B) c2(XP_005272079) c3(geranylgeranyl transferase type-1 subunit beta isoform X5) c4(283667) c5(283668, 283669, 283670, 283671, 283672, 283673) c6( ) c7(zu, ey, Da, pb, aE); #c1(PGK1) c2(NP_000282) c3(phosphoglycerate kinase 1) c4(6142, 6143, 6144, 6145, 6146) c5(6147, 6148, 6149, 6150, 6151, 6152, 6153, 6154, 6155, 6156, 6157, 6158, 6159, 6160, 6161, 6162, 6163, 6164, 6165, 6166, 6167, 6168, 6169, 6170) c6( ) c7(T, bRZ, aA, bB, fr, ci, nA, ad, bjA, ep, oW, aT, aVg, ae, xX, B, bRX, aW, Y, PX, aNq, aq, kp, aF, BG, cm, bw, dr, bRW, yd, eM, bE, X); #c1(PGK2) c2(NP_620061) c3(phosphoglycerate kinase 2) c4(237240, 237241) c5(237242, 237243, 237244, 237245, 237246, 237247) c6( ) c7(S); #c1(PGLS) c2(NP_036220) c3(6-phosphogluconolactonase) c4(172432) c5(172433, 172434, 172435, 172436, 172437, 172438) c6( ) c7(T, bA); #c1(PGLYRP1) c2(NP_005082) c3(peptidoglycan recognition protein 1 precursor) c4(152724, 152725, 152726) c5(152727, 152728, 152729, 152730, 152731, 152732, 152733, 152734) c6(152735, 152736) c7(fr, wR, aFi, Y, cr); #c1(PGLYRP2) c2(NP_443122) c3(N-acetylmurameyl-L-alanine amidase precursor) c4(229554) c5(229555, 229556, 229557, 229558, 229559, 229560, 229561, 229562) c6(229563, 229564) c7(oO, ka, ac, ki, e, ht, aw, ff, j, en, eu); #c1(PGLYRP2) c2(XP_006722696) c3(N-acetylmuramoyl-L-alanine amidase isoform X1) c4(294832) c5(294833, 294834, 294835, 294836, 294837, 294838, 294839, 294840, 294841, 294842) c6(294843, 294844, 294845) c7(oO, ka, ac, ki, e, ht, aw, ff, j, en, eu); #c1(PGLYRP3) c2(XP_011507421) c3(peptidoglycan recognition protein 3 isoform X1) c4(297338) c5(297339, 297340, 297341, 297342, 297343, 297344, 297345, 297346) c6(297347, 297348) c7(eE, cr, Xk, Ni); #c1(PGLYRP4) c2(NP_065126) c3(peptidoglycan recognition protein 4 precursor) c4(204067) c5(204068, 204069, 204070, 204071, 204072, 204073, 204074, 204075) c6(204076, 204077) c7(cr, Xk); #c1(PGLYRP4) c2(XP_011508093) c3(peptidoglycan recognition protein 4 isoform X2) c4(298578) c5(298579, 298580, 298581, 298582, 298583, 298584, 298585, 298586) c6(298587, 298588) c7(cr, Xk); #c1(PGM3) c2(NP_001186848) c3(phosphoacetylglucosamine mutase isoform 4) c4(78702, 78703) c5(78704, 78705, 78706, 78707, 78708, 78709) c6( ) c7(Km); #c1(PGM3) c2(NP_056414) c3(phosphoacetylglucosamine mutase isoform 2) c4(187498) c5(187499, 187500, 187501, 187502, 187503) c6( ) c7(Km); #c1(PGM3) c2(XP_011534205) c3(phosphoacetylglucosamine mutase isoform X1) c4(330513) c5(330514, 330515, 330516, 330517, 330518, 330519, 330520, 330521, 330522, 330523, 330524, 330525, 330526) c6( ) c7(Km); #c1(PGP) c2(NP_001035830) c3(phosphoglycolate phosphatase) c4(33197) c5(33198, 33199, 33200, 33201, 33202, 33203) c6( ) c7(iT, wB, fe, hn, bK, hB, mY, ht); #c1(PGPEP1) c2(NP_060182) c3(pyroglutamyl-peptidase 1 isoform 1) c4(194634, 194635) c5(194636, 194637, 194638, 194639, 194640, 194641, 194642) c6( ) c7(T, iT, lp, dc, hB, dO, asK, aT, ht, gl, h, he, j, Jz, hn, fD, fe, anN, V); #c1(PGPEP1) c2(XP_011526417) c3(pyroglutamyl-peptidase 1 isoform X6) c4( ) c5(320722, 320723, 320724, 320725, 320726) c6( ) c7(T, iT, lp, dc, hB, dO, asK, aT, ht, gl, h, he, j, Jz, hn, fD, fe, anN, V); #c1(PGR) c2(NP_000917) c3(progesterone receptor isoform B) c4(17170, 17171, 17172, 17173) c5(17174, 17175, 17176, 17177, 17178, 17179, 17180) c6( ) c7(T, fR, pf, Xi, ci, ip, lS, aE, iI, pX, aeO, iv, K, bU, wt, xQ, zQ, aeR, aW, g, as, uC, ajj, eM, AM, vA, uo, cX, m, Th, ik, sQ, wu, sw, zX, qy, n, ww, mI, zP, hw, pN, UD, dL, hB, mJ, aiB, MD, mo, PU, cM, auC, op, Ye, dB, hL, bm, at, ut, aEc, ZZ, adG, fM, aA, v, AO, q, er, asG, aHu, aew, BJ, aT, ae, bA, qw, avg, kl, s, ND, NE, Y, LO, r, eS, en, cl, apx, t, Px, ck, sn, kP, Nk, ht, gx, nl, aZ, iW, uu, ad, dP, avp, ib, vJ, aRD, io, lQ, wm, nJ, WZ, auY, d, tb, qt, PE, ff, NH, aF, bz, es, aoR, ag, auZ, y, aed); #c1(PGR) c2(NP_001189403) c3(progesterone receptor isoform A) c4( ) c5(79365) c6( ) c7(T, fR, pf, Xi, ci, ip, lS, aE, iI, pX, aeO, iv, K, bU, wt, xQ, zQ, aeR, aW, g, as, uC, ajj, eM, AM, vA, uo, cX, m, Th, ik, sQ, wu, sw, zX, qy, n, ww, mI, zP, hw, pN, UD, dL, hB, mJ, aiB, MD, mo, PU, cM, auC, op, Ye, dB, hL, bm, at, ut, aEc, ZZ, adG, fM, aA, v, AO, q, er, asG, aHu, aew, BJ, aT, ae, bA, qw, avg, kl, s, ND, NE, Y, LO, r, eS, en, cl, apx, t, Px, ck, sn, kP, Nk, ht, gx, nl, aZ, iW, uu, ad, dP, avp, ib, vJ, aRD, io, lQ, wm, nJ, WZ, auY, d, tb, qt, PE, ff, NH, aF, bz, es, aoR, ag, auZ, y, aed); #c1(PGR) c2(NP_001258090) c3(progesterone receptor isoform C) c4(95945) c5(95946, 95947, 95948, 95949, 95950, 95951) c6( ) c7(T, fR, pf, Xi, ci, ip, lS, aE, iI, pX, aeO, iv, K, bU, wt, xQ, zQ, aeR, aW, g, as, uC, ajj, eM, AM, vA, uo, cX, m, Th, ik, sQ, wu, sw, zX, qy, n, ww, mI, zP, hw, pN, UD, dL, hB, mJ, aiB, MD, mo, PU, cM, auC, op, Ye, dB, hL, bm, at, ut, aEc, ZZ, adG, fM, aA, v, AO, q, er, asG, aHu, aew, BJ, aT, ae, bA, qw, avg, kl, s, ND, NE, Y, LO, r, eS, en, cl, apx, t, Px, ck, sn, kP, Nk, bt, gx, nl, aZ, iW, uu, ad, dP, avp, ib, vJ, aRD, io, lQ, wm, nJ, WZ, auY, d, tb, qt, PE, ff, NH, aF, bz, es, aeR, ag, auZ, y, aed); #c1(PGR) c2(NP_001258091) c3(progesterone receptor isoform D) c4( ) c5(95952, 95953, 95954, 95955, 95956) c6( ) c7(T, fR, pf, Xi, ci, ip, lS, aE, iI, pX, aeO, iv, K, bU, wt, xQ, zQ, aeR, aW, g, as, uC, ajj, eM, AM, vA, uo, cX, m, Th, ik, sQ, wu, sw, zX, qy, n, ww, mI, zP, hw, pN, UD, dL, hB, mJ, aiB, MD, mo, PU, cM, auC, op, Ye, dB, hL, bm, at, ut, aEc, ZZ, adG, fM, aA, v, AO, q, er, asG, aHu, aew, BJ, aT, ae, bA, qw, avg, kl, s, ND, NE, Y, LO, r, eS, en, cl, apx, t, Px, ck, sn, kP, Nk, bt, gx, nl, aZ, iW, uu, ad, dP, avp, ib, vJ, aRD, io, lQ, wm, nJ, WZ, auY, d, tb, qt, PE, ff, NH, aF, bz, es, aoR, ag, auZ, y, aed); #c1(PGR) c2(XP_006718921) c3(progesterone receptor isoform X1) c4( ) c5(292088, 292089, 292090, 292091, 292092, 292093, 292094, 292095, 292096, 292097, 292098, 292099, 292100, 292101, 292102, 292103, 292104, 292105, 292106, 292107, 292108, 292109, 292110, 292111) c6( ) c7(T, fR, pf, Xi, ci, ip, lS, aE, iI, pX, aeO, iv, K, bU, wt, xQ, zQ, aeR, aW, g, as, uC, ajj, eM, AM, vA, uo, cX, m, Th, ik, sQ, wu, sw, zX, qy, n, ww, mI, zP, hw, pN, UD, dL, hB, mJ, aiB, MD, mo, PU, cM, auC, op, Ye, dB, hL, bm, at, ut, aEc, ZZ, adG, fM, aA, v, AO, q, er, asG, aHu, aew, BJ, aT, ae, bA, qw, avg, kl, s, ND, NE, Y, LO, r, eS, en, cl, apx, t, Px, ck, sn, kP, Nk, bt, gx, nl, aZ, iW, uu, ad, dP, avp, ib, vJ, aRD, io, lQ, wm, nJ, WZ, auY, d, tb, qt, PE, ff, NH, aF, bz, es, aoR, ag, auZ, y, aed); #c1(PGR) c2(XP_011541171) c3(progesterone receptor isoform X2) c4(339762, 339763) c5(339764, 339765, 339766, 339767) c6( ) c7(T, fR, pf, Xi, ci, ip, lS, aE, iI, pX, aeO, iv, K, BU, wt, xQ, zQ, aeR, aW, g, as, uC, ajj, eM, AM, vA, uo, cX, m, Th, ik, sQ, wu, sw, zX, qy, n, ww, mI, zP, hw, pN, UD, dL, hB, mJ, aiB, MD, mo, PU, cM, auC, op, Ye, dB, hL, bm, at, ut, aEc, ZZ, adG, fM, aA, v, AO, q, er, asG, aHu, aew, BJ, aT, ae, bA, qw, avg, kl, s, ND, NE, Y, LO, r, eS, en, cl, apx, t, Px, ck, sn, kP, Nk, bt, gx, nl, aZ, iW, uu, ad, dP, avp, ib, vJ, aRD, io, lQ, wm, nJ, WZ, auY, d, tb, qt, PE, ff, NH, aF, bz, es, aoR, ag, auZ, y, aed); #c1(PGRMC1) c2(NP_001269550) c3(membrane-associated progesterone receptor component 1 isoform 2) c4(101894) c5(101895, 101896, 101897, 101898, 101899, 101900) c6( ) c7(T, fR, sQ, if, qN, ad, b, iI, dV, aT, ey, lQ, K, aW, g, zZ, t, bz, Rd, uo, ut, m, i); #c1(PGRMC1) c2(NP_006658) c3(membrane-associated progesterone receptor component 1 isoform 1) c4(166965) c5(166966, 166967, 166968, 166969, 166970, 166971) c6( ) c7(T, fR, sQ, if, qN, ad, b, iI, dV, aT, ey, lQ, K, aW, g, zZ, t, bz, Rd, uo, ut, m, i); #c1(PGRMC2) c2(NP_006311) c3(membrane-associated progesterone receptor component 2) c4(163899, 163900) c5(163901, 163902, 163903, 163904, 163905, 163906, 163907, 163908, 163909, 163910, 163911, 163912, 163913, 163914) c6( ) c7(BN, fR, sQ, cz, uo, ut, hy, lQ, ne); #c1(PGRMC2) c2(XP_011529835) c3(membrane-associated progesterone receptor component 2 isoform X1) c4(325636) c5(325637, 325638, 325639) c6( ) c7(BN, fR, sQ, cz, uo, ut, hy, lQ, ne); #c1(PHACTR1) c2(NP_001229577) c3(phosphatase and actin regulator 1) c4(84676, 84677, 84678, 84679) c5(84680, 84681, 84682, 84683, 84684, 84685, 84686, 84687, 84688, 84689, 84690, 84691, 84692, 84693, 84694, 84695, 84696, 84697, 84698) c6( ) c7(cqr, aW, aw, aT, j, pT, vo, eN); #c1(PHACTR1) c2(XP_005248994) c3(phosphatase and actin regulator 1 isoform X5) c4( ) c5(268816, 268817, 268818, 268819, 268820, 268821, 268822, 268823, 268824, 268825, 268826, 268827, 268828, 268829, 268830, 268831, 268832, 268833, 268834, 268835, 268836, 268837, 268838) c6( ) c7(cqr, aW, aw, aT, j, pT, vo, eN); #c1(PHACTR1) c2(XP_011512692) c3(phosphatase and actin regulator 1 isoform X1) c4(303697, 303698, 303699, 303700, 303701) c5(303702, 303703, 303704, 303705, 303706, 303707, 303708, 303709, 303710, 303711, 303712, 303713) c6( ) c7(cqr, aW, aw, aT, j, pT, vo, eN); #c1(PHACTR1) c2(XP_011512693) c3(phosphatase and actin regulator 1 isoform X2) c4(303714, 303715) c5(303716) c6( ) c7(cqr, aW, aw, aT, j, pT, vo, eN); #c1(PHACTR1) c2(XP_011512694) c3(phosphatase and actin regulator 1 isoform X3) c4( ) c5(303717, 303718, 303719, 303720, 303721, 303722, 303723, 303724, 303725, 303726, 303727) c6( ) c7(cqr, aW, aw, aT, j, pT, vo, eN); #c1(PHACTR2) c2(NP_001093634) c3(phosphatase and actin regulator 2 isoform 1) c4(40364) c5(40365, 40366, 40367, 40368, 40369, 40370) c6( ) c7(ac, pN, aw, an, V, af); #c1(PHACTR2) c2(NP_001093635) c3(phosphatase and actin regulator 2 isoform 2) c4(40371, 40372) c5(40373, 40374, 40375, 40376, 40377, 40378, 40379, 40380, 40381, 40382, 40383) c6( ) c7(ac, pN, aw, an, V, af); #c1(PHACTR2) c2(NP_001093636) c3(phosphatase and actin regulator 2 isoform 4) c4(40384) c5(40385, 40386, 40387, 40388, 40389, 40390, 40391) c6( ) c7(ac, pN, aw, an, V, af); #c1(PHACTR2) c2(NP_055536) c3(phosphatase and actin regulator 2 isoform 3) c4(181819) c5(181820, 181821, 181822, 181823, 181824, 181825) c6( ) c7(ac, pN, aw, an, V, af); #c1(PHACTR3) c2(NP_001186434) c3(phosphatase and actin regulator 3 isoform 4) c4( ) c5(77637, 77638, 77639) c6( ) c7(aw, oe, r, ci, y, q); #c1(PHACTR3) c2(NP_542403) c3(phosphatase and actin regulator 3 isoform 1) c4(232373, 232374) c5(232375, 232376, 232377, 232378, 232379, 232380, 232381, 232382, 232383, 232384, 232385) c6( ) c7(aw, oe, r, ci, y, q); #c1(PHACTR3) c2(NP_899069) c3(phosphatase and actin regulator 3 isoform 3) c4( ) c5(257953, 257954, 257955, 257956, 257957, 257958, 257959, 257960) c6( ) c7(aw, oe, r, ci, y, q); #c1(PHACTR3) c2(XP_011526827) c3(phosphatase and actin regulator 3 isoform X1) c4( ) c5(321175, 321176, 321177, 321178, 321179, 321180, 321181, 321182, 321183, 321184, 321185) c6( ) c7(aw, oe, r, ci, y, q); #c1(PHACTR3) c2(XP_011526828) c3(phosphatase and actin regulator 3 isoform X2) c4(321186, 321187) c5(321188, 321189, 321190) c6( ) c7(aw, oe, r, ci, y, q); #c1(PHB) c2(NP_001268426) c3(prohibitin isoform 2) c4(99910) c5(99911, 99912, 99913, 99914, 99915, 99916, 99917, 99918, 99919, 99920, 99921, 99922) c6( ) c7(T, AS, ht, aA, aj, v, ci, zP, ad, J, hd, Db, ju, aT, dL, bK, K, ji, ae, zQ, aW, fe, aq, aF, g, ir, t, aDQ, qJ, nB, U, at, sv, aDR, m, it, B); #c1(PHB) c2(NP_002625) c3(prohibitin isoform 1) c4(130383, 130384, 130385, 130386, 130387, 130388) c5(130389, 130390, 130391, 130392, 130393, 130394, 130395, 130396, 130397, 130398, 130399, 130400, 130401, 130402, 130403, 130404, 130405, 130406, 130407, 130408, 130409, 130410, 130411, 130412, 130413, 130414, 130415, 130416, 130417, 130418) c6( ) c7(T, AS, ht, aA, aj, v, ci, zP, ad, J, hd, Db, ju, aT, dL, bK, K, ji, ae, zQ, aW, fe, aq, aF, g, ir, t, aDQ, qJ, nB, U, at, sv, aDR, m, it, B); #c1(PHB2) c2(NP_001138303) c3(prohibitin-2 isoform 1) c4(56142, 56143) c5(56144, 56145, 56146, 56147, 56148, 56149, 56150, 56151, 56152, 56153, 56154, 56155, 56156) c6( ) c7(nJ, bv, T, bdQ, aNB, cqs, DK, nv, aW, rz, vT, Pg, aT, aA, n, aF, H, Xb, B, bN, L); #c1(PHB2) c2(NP_001254629) c3(prohibitin-2 isoform 3) c4(94720, 94721) c5(94722, 94723, 94724, 94725, 94726, 94727, 94728, 94729, 94730, 94731, 94732, 94733, 94734, 94735) c6( ) c7(nJ, bv, T, bdQ, aNB, cqs, DK, nv, aW, rz, vT, Pg, aT, aA, n, aF, H, Xb, B, bN, L); #c1(PHC1) c2(NP_004417) c3(polyhomeotic-like protein 1) c4(146218, 146219) c5(146220, 146221, 146222, 146223, 146224, 146225) c6( ) c7(ck, x, Mg, cqt, z, Lb, k, eA, bD, aH, aij); #c1(PHC1) c2(XP_011518901) c3(polyhomeotic-like protein 1 isoform X2) c4(313262) c5( ) c6( ) c7(ck, x, Mg, cqt, z, Lb, k, eA, bD, aH, aij); #c1(PHC1) c2(XP_011518904) c3(polyhomeotic-like protein 1 isoform X6) c4( ) c5(313263, 313264, 313265, 313266, 313267, 313268, 313269, 313270, 313271, 313272, 313273, 313274, 313275, 313276, 313277, 313278, 313279, 313280, 313281, 313282, 313283) c6( ) c7(ck, x, Mg, cqt, z, Lb, k, eA, bD, aH, aij); #c1(PHC2) c2(XP_011539177) c3(polyhomeotic-like protein 2 isoform X3) c4( ) c5(337321, 337322, 337323, 337324, 337325) c6( ) c7(bkT, wS, ad); #c1(PHC3) c2(NP_079223) c3(polyhomeotic-like protein 3) c4(217497, 217498, 217499, 217500) c5(217501, 217502, 217503, 217504, 217505, 217506, 217507, 217508, 217509, 217510, 217511, 217512) c6( ) c7(eF, T, eH, ci); #c1(PHC3) c2(XP_006713819) c3(polyhomeotic-like protein 3 isoform X7) c4(287386, 287387) c5(287388, 287389, 287390, 287391, 287392, 287393) c6( ) c7(eF, T, eH, ci); #c1(PHC3) c2(XP_006713820) c3(polyhomeotic-like protein 3 isoform X11) c4( ) c5(287394, 287395, 287396, 287397, 287398, 287399, 287400, 287401, 287402, 287403, 287404, 287405, 287406, 287407, 287408, 287409, 287410, 287411) c6( ) c7(eF, T, eH, ci); #c1(PHC3) c2(XP_011511489) c3(polyhomeotic-like protein 3 isoform X5) c4(302168) c5(302169, 302170, 302171, 302172, 302173) c6( ) c7(eF, T, eH, ci); #c1(PHEX) c2(NP_000435) c3(phosphate-regulating neutral endopeptidase isoform 1) c4(8957, 8958, 8959) c5(8960, 8961, 8962, 8963, 8964, 8965, 8966, 8967, 8968, 8969, 8970, 8971) c6( ) c7(bL, cqu, bgv, AB, qb, ha, Ay, cz, amC, q, eA, Si, amB, Tl, bgm, hP, mL, ji, af, al, ajx, vj, Rj, Az, eH, awu, eF, bfH, AA, nC, aBU, mE, lO, ajY, aL, azg, bfl, LR, zA, ars); #c1(PHEX) c2(NP_001269683) c3(phosphate-regulating neutral endopeptidase isoform 2) c4(102543) c5(102544, 102545, 102546, 102547, 102548, 102549) c6( ) c7(bL, cqu, bgv, AB, qb, ha, Ay, cz, amC, q, eA, Si, amB, Tl, bgm, hP, mL, ji, af, al, ajx, vj, Rj, Az, eH, awu, eF, bfH, AA, nC, aBU, mE, lO, ajY, aL, azg, bfl, LR, zA, ars); #c1(PHEX) c2(XP_011543836) c3(phosphate-regulating neutral endopeptidase isoform X1) c4( ) c5(342980, 342981, 342982, 342983, 342984, 342985) c6( ) c7(bL, cqu, bgv, AB, qb, ha, Ay, cz, amC, q, eA, Si, amB, Tl, bgm, hP, mL, ji, af, al, ajx, vj, Rj, Az, eH, awu, eF, bfH, AA, nC, aBU, mE, lO, ajY, aL, azg, bfl, LR, zA, ars); #c1(PHF1) c2(NP_002627) c3(PHD finger protein 1 isoform a) c4(130438, 130439) c5(130440, 130441, 130442, 130443, 130444, 130445, 130446, 130447, 130448, 130449, 130450, 130451) c6( ) c7(T, aW, aEm, eZ, aT, cqv, Th, aaO, bmq, af); #c1(PHF1) c2(XP_011512965) c3(PHD finger protein 1 isoform X1) c4( ) c5(304395) c6( ) c7(T, aW, aEm, eZ, aT, cqv, Th, aaO, bmq, af); #c1(PHF1) c2(XP_011512968) c3(PHD finger protein 1 isoform X4) c4( ) c5(304396) c6( ) c7(T, aW, aEm, eZ, aT, cqv, Th, aaO, bmq, af); #c1(PHF1) c2(XP_011512970) c3(PHD finger protein 1 isoform X5) c4(304397, 304398) c5(304399, 304400, 304401, 304402, 304403, 304404, 304405) c6( ) c7(T, aW, aEm, eZ, aT, cqv, Th, aaO, bmq, af); #c1(PHF1) c2(XP_011512972) c3(PHD finger protein 1 isoform X7) c4( ) c5(304406, 304407, 304408, 304409, 304410, 304411, 304412, 304413, 304414, 304415, 304416, 304417, 304418, 304419, 304420, 304421, 304422, 304423) c6( ) c7(T, aW, aEm, eZ, aT, cqv, Th, aaO, bmq, af); #c1(PHF1) c2(XP_011512973) c3(PHD finger protein 1 isoform X8) c4( ) c5(304424, 304425, 304426, 304427, 304428, 304429, 304430, 304431, 304432, 304433) c6( ) c7(T, aW, aEm, eZ, aT, cqv, Th, aaO, bmq, af); #c1(PHF1) c2(XP_011546746) c3(PHD finger protein 1 isoform X2) c4(345662) c5( ) c6( ) c7(T, aW, aEm, eZ, aT, cqv, Th, aaO, bmq, af); #c1(PHF1) c2(XP_011546750) c3(PHD finger protein 1 isoform X5) c4(345663) c5(345664, 345665, 345666, 345667, 345668, 345669) c6( ) c7(T, aW, aEm, eZ, aT, cqv, Th, aaO, bmq, af); #c1(PHF1) c2(XP_011546753) c3(PHD finger protein 1 isoform X8) c4(345670, 345671) c5( ) c6( ) c7(T, aW, aEm, eZ, aT, cqv, Th, aaO, bmq, af); #c1(PHF10) c2(NP_060758) c3(PHD finger protein 10 isoform a) c4(197642) c5(197643, 197644, 197645, 197646, 197647, 197648) c6( ) c7(afz, aF, aA); #c1(PHF10) c2(NP_579866) c3(PHD finger protein 10 isoform b) c4(234669) c5(234670, 234671, 234672, 234673, 234674, 234675) c6( ) c7(afz, aF, aA); #c1(PHF11) c2(NP_001035533) c3(PHD finger protein 11 isoform a) c4(32867, 32868, 32869, 32870, 32871) c5(32872, 32873, 32874, 32875, 32876, 32877, 32878, 32879) c6( ) c7(buV, bM, Dw, z, sp, oe, mQ, eE, da, Ds, alO, k, bGD); #c1(PHF11) c2(XP_006719891) c3(PHD finger protein 11 isoform X2) c4( ) c5(293057, 293058) c6( ) c7(buV, bM, Dw, z, sp, oe, mQ, eE, da, Ds, alO, k, bGD); #c1(PHF11) c2(XP_011533404) c3(PHD finger protein 11 isoform X1) c4( ) c5(329481, 329482, 329483, 329484, 329485, 329486, 329487, 329488, 329489, 329490, 329491, 329492, 329493, 329494, 329495, 329496, 329497, 329498, 329499, 329500, 329501, 329502, 329503, 329504) c6( ) c7(buV, bM, Dw, z, sp, oe, mQ, eE, da, Ds, alO, k, bGD); #c1(PHF12) c2(NP_001028733) c3(PHD finger protein 12 isoform 1) c4(30582) c5(30583, 30584, 30585, 30586, 30587, 30588) c6( ) c7(arD, af); #c1(PHF12) c2(NP_001277060) c3(PHD finger protein 12 isoform 3) c4(108997) c5(108998, 108999, 109000, 109001, 109002, 109003) c6( ) c7(arD, af); #c1(PHF12) c2(NP_065940) c3(PHD finger protein 12 isoform 2) c4(206340) c5(206341, 206342, 206343, 206344, 206345, 206346, 206347, 206348, 206349, 206350) c6( ) c7(arD, af); #c1(PHF19) c2(NP_001009936) c3(PHD finger protein 19 isoform b) c4(23744, 23745) c5(23746, 23747, 23748, 23749, 23750, 23751, 23752, 23753, 23754, 23755, 23756) c6( ) c7(y, Y); #c1(PHF19) c2(NP_001273769) c3(PHD finger protein 19 isoform c) c4(105843, 105844) c5(105845, 105846, 105847, 105848, 105849, 105850, 105851, 105852, 105853, 105854, 105855, 105856) c6( ) c7(y, Y); #c1(PHF19) c2(NP_001273771) c3(PHD finger protein 19 isoform d) c4( ) c5(105865, 105866, 105867, 105868, 105869) c6( ) c7(y, Y); #c1(PHF19) c2(NP_001273772) c3(PHD finger protein 19 isoform e) c4( ) c5(105870, 105871, 105872, 105873, 105874) c6( ) c7(y, Y); #c1(PHF19) c2(NP_056466) c3(PHD finger protein 19 isoform a) c4(187645) c5( ) c6( ) c7(y, Y); #c1(PHF19) c2(XP_006717109) c3(PHD finger protein 19 isoform X6) c4( ) c5(290733) c6( ) c7(y, Y); #c1(PHF19) c2(XP_011516816) c3(PHD finger protein 19 isoform X4) c4(310260) c5( ) c6( ) c7(y, Y); #c1(PHF19) c2(XP_011516818) c3(PHD finger protein 19 isoform X7) c4( ) c5(310261, 310262) c6( ) c7(y, Y); #c1(PHF2) c2(NP_005383) c3(lysine-specific demethylase PHF2) c4(155589) c5(155590, 155591, 155592, 155593, 155594, 155595) c6( ) c7(aW, aT); #c1(PHF2) c2(XP_006717206) c3(lysine-specific demethylase PHF2 isoform X3) c4( ) c5(290806, 290807, 290808, 290809, 290810, 290811) c6( ) c7(aW, aT); #c1(PHF2) c2(XP_011517086) c3(lysine-specific demethylase PHF2 isoform X2) c4(310612) c5( ) c6( ) c7(aW, aT); #c1(PHF20) c2(NP_057520) c3(PHD finger protein 20) c4(191216, 191217, 191218, 191219) c5(191220, 191221, 191222, 191223, 191224, 191225, 191226, 191227, 191228, 191229, 191230, 191231, 191232, 191233, 191234, 191235, 191236, 191237, 191238) c6( ) c7(T, hd, d, s, eM, kH, m, as, t, iK, bz, eA); #c1(PHF20) c2(XP_011527144) c3(PHD finger protein 20 isoform X1) c4( ) c5(321658, 321659, 321660, 321661, 321662) c6( ) c7(T, hd, d, s, eM, kH, m, as, t, iK, bz, eA); #c1(PHF21A) c2(NP_001095272) c3(PHD finger protein 21A isoform a) c4(40854, 40855, 40856) c5(40857, 40858, 40859, 40860, 40861, 40862) c6( ) c7(ac, af, Az, nA); #c1(PHF21A) c2(NP_057705) c3(PHD finger protein 21A isoform b) c4(192455) c5(192456, 192457, 192458, 192459, 192460, 192461) c6( ) c7(ac, af, Az, nA); #c1(PHF21A) c2(XP_005253022) c3(PHD finger protein 21A isoform X5) c4(272107) c5(272108, 272109, 272110, 272111, 272112, 272113) c6( ) c7(ac, af, Az, nA); #c1(PHF21A) c2(XP_011518472) c3(PHD finger protein 21A isoform X2) c4( ) c5(312532, 312533, 312534, 312535, 312536, 312537, 312538) c6( ) c7(ac, af, Az, nA); #c1(PHF21A) c2(XP_011518483) c3(PHD finger protein 21A isoform X12) c4( ) c5(312539, 312540, 312541, 312542, 312543, 312544, 312545, 312546, 312547, 312548, 312549, 312550) c6( ) c7(ac, af, Az, nA); #c1(PHF21A) c2(XP_011518484) c3(PHD finger protein 21A isoform X13) c4(312551) c5(312552) c6( ) c7(ac, af, Az, nA); #c1(PHF23) c2(NP_001271447) c3(PHD finger protein 23 isoform 3) c4(103967) c5(103968, 103969, 103970, 103971, 103972, 103973) c6( ) c7(bt, aw); #c1(PHF23) c2(NP_077273) c3(PHD finger protein 23 isoform 1) c4(214862, 214863) c5(214864, 214865, 214866, 214867, 214868, 214869, 214870, 214871, 214872, 214873, 214874, 214875, 214876, 214877) c6( ) c7(bt, aw); #c1(PHF3) c2(NP_001277189) c3(PHD finger protein 3 isoform 3) c4( ) c5(109209) c6( ) c7(d); #c1(PHF3) c2(NP_055968) c3(PHD finger protein 3 isoform 1) c4(184780) c5(184781, 184782, 184783, 184784, 184785, 184786, 184787, 184788) c6( ) c7(d); #c1(PHF3) c2(XP_011533950) c3(PHD finger protein 3 isoform X3) c4( ) c5(330146, 330147) c6( ) c7(d); #c1(PHF5A) c2(NP_116147) c3(PHD finger-like domain-containing protein 5A) c4(225485) c5(225486, 225487, 225488, 225489, 225490, 225491) c6( ) c7(dB, Or, app, h); #c1(PHF6) c2(NP_115711) c3(PHD finger protein 6 isoform 2) c4(223680) c5(223681, 223682, 223683, 223684, 223685, 223686) c6( ) c7(T, ou, iZ, bsC, oA, fd, nf, nA, agk, bt, B, UE); #c1(PHF6) c2(NP_115834) c3(PHD finger protein 6 isoform 1) c4(224220, 224221, 224222, 224223) c5(224224, 224225, 224226, 224227, 224228, 224229, 224230, 224231, 224232, 224233, 224234, 224235, 224236, 224237, 224238, 224239, 224240, 224241, 224242, 224243, 224244, 224245, 224246, 224247, 224248, 224249, 224250, 224251) c6( ) c7(T, ou, iZ, bsC, oA, fd, nf, nA, agk, bt, B, UE); #c1(PHF8) c2(NP_001171825) c3(histone lysine demethylase PHF8 isoform 1) c4(71868, 71869, 71870, 71871, 71872) c5(71873, 71874, 71875, 71876, 71877, 71878, 71879, 71880, 71881, 71882, 71883, 71884) c6( ) c7(T, amJ, it, nf, amj, Nc, jj, nA, he, ae, ad, bN, bqN); #c1(PHF8) c2(NP_001171826) c3(histone lysine demethylase PHF8 isoform 3) c4(71885) c5(71886, 71887, 71888, 71889, 71890) c6( ) c7(T, amJ, it, nf, amj, Nc, jj, nA, he, ae, ad, bN, bqN); #c1(PHF8) c2(NP_001171827) c3(histone lysine demethylase PHF8 isoform 4) c4(71891) c5(71892, 71893, 71894, 71895, 71896, 71897, 71898, 71899, 71900, 71901, 71902, 71903, 71904, 71905, 71906, 71907, 71908, 71909, 71910, 71911, 71912, 71913, 71914, 71915, 71916, 71917, 71918, 71919, 71920, 71921, 71922) c6( ) c7(T, amJ, it, nf, amj, Nc, jj, nA, he, ae, ad, bN, bqN); #c1(PHF8) c2(NP_055922) c3(histone lysine demethylase PHF8 isoform 2) c4(184482) c5( ) c6( ) c7(T, amJ, it, nf, amj, Nc, jj, nA, he, ae, ad, bN, bqN); #c1(PHF8) c2(XP_005262053) c3(histone lysine demethylase PHF8 isoform X1) c4(277734, 277735) c5( ) c6( ) c7(T, amJ, it, nf, amj, Nc, jj, nA, he, ae, ad, bN, bqN); #c1(PHF8) c2(XP_005262057) c3(histone lysine demethylase PHF8 isoform X3) c4(277736) c5(277737, 277738, 277739, 277740, 277741, 277742, 277743) c6( ) c7(T, amJ, it, nf, amj, Nc, jj, nA, he, ae, ad, bN, bqN); #c1(PHF8) c2(XP_006724648) c3(histone lysine demethylase PHF8 isoform X4) c4( ) c5(296162, 296163, 296164, 296165, 296166, 296167, 296168, 296169, 296170, 296171, 296172, 296173, 296174, 296175, 296176) c6( ) c7(T, amJ, it, nf, amj, Nc, jj, nA, he, ae, ad, bN, bqN); #c1(PHGDH) c2(XP_011539533) c3(D-3-phosphoglycerate dehydrogenase isoform X6) c4( ) c5(337731, 337732, 337733, 337734, 337735, 337736, 337737, 337738, 337739, 337740, 337741) c6( ) c7(bM, T, aTS, mC, ad, eA, eW, aT, vH, K, rz, cqw, Qe, Nr, iU, Jl, aW, Y, eH, eZ, po, lo, cqx, cqq, Ku, eF, t, jT, QK, f, eK, dR, Nq, bF, BU, Ew, Uu, c, dB, dc, m, qF, fL, eQ, WL, ahZ); #c1(PHIP) c2(NP_060404) c3(PH-interacting protein) c4(195821) c5(195822, 195823, 195824, 195825, 195826, 195827, 195828) c6( ) c7(Y, fN, eA, UF, bHF, yn); #c1(PHIP) c2(XP_011534220) c3(PH-interacting protein isoform X3) c4(330571) c5(330572, 330573, 330574, 330575, 330576) c6( ) c7(Y, fN, eA, UF, bHF, yn); #c1(PHKA1) c2(NP_001116142) c3(phosphorylase b kinase regulatory subunit alpha, skeletal muscle isoform isoform 2) c4(43647) c5(43648, 43649, 43650, 43651, 43652, 43653) c6( ) c7(cqy, acY, Bw, bq, gT, on, add); #c1(PHKA1) c2(NP_001165907) c3(phosphorylase b kinase regulatory subunit alpha, skeletal muscle isoform isoform 3) c4(67988) c5(67989, 67990, 67991, 67992, 67993, 67994) c6( ) c7(cqy, acY, Bw, bq, gT, on, add); #c1(PHKA1) c2(NP_002628) c3(phosphorylase b kinase regulatory subunit alpha, skeletal muscle isoform isoform 1) c4(130452, 130453) c5(130454, 130455, 130456, 130457, 130458, 130459, 130460, 130461, 130462, 130463, 130464, 130465) c6( ) c7(cqy, acY, Bw, bq, gT, on, add); #c1(PHKA1) c2(XP_006724724) c3(phosphorylase b kinase regulatory subunit alpha, skeletal muscle isoform isoform X1) c4(296270) c5(296271, 296272, 296273, 296274, 296275, 296276) c6( ) c7(cqy, acY, Bw, bq, gT, on, add); #c1(PHKA2) c2(NP_000283) c3(phosphorylase b kinase regulatory subunit alpha, liver isoform) c4(6171) c5(6172, 6173, 6174, 6175, 6176, 6177, 6178, 6179, 6180, 6181, 6182, 6183, 6184, 6185, 6186, 6187, 6188, 6189, 6190, 6191, 6192, 6193, 6194, 6195, 6196, 6197, 6198, 6199, 6200, 6201, 6202, 6203, 6204, 6205, 6206, 6207, 6208, 6209, 6210, 6211, 6212, 6213, 6214, 6215, 6216, 6217, 6218, 6219, 6220, 6221, 6222, 6223, 6224, 6225, 6226, 6227, 6228, 6229, 6230, 6231, 6232, 6233, 6234, 6235, 6236, 6237, 6238, 6239, 6240, 6241, 6242, 6243, 6244, 6245, 6246, 6247, 6248, 6249, 6250, 6251, 6252, 6253, 6254, 6255, 6256, 6257, 6258, 6259, 6260, 6261, 6262, 6263, 6264) c6(6265) c7(cqz, cqA, acY, Bw, ex, on, add); #c1(PHKB) c2(NP_000284) c3(phosphorylase b kinase regulatory subunit beta isoform a) c4(6266, 6267) c5(6268, 6269, 6270, 6271, 6272, 6273, 6274, 6275, 6276, 6277, 6278, 6279, 6280, 6281, 6282, 6283, 6284, 6285, 6286, 6287, 6288, 6289, 6290, 6291, 6292, 6293, 6294, 6295, 6296, 6297, 6298, 6299, 6300, 6301, 6302, 6303, 6304, 6305, 6306, 6307, 6308, 6309, 6310, 6311, 6312, 6313, 6314, 6315, 6316, 6317, 6318, 6319, 6320, 6321, 6322, 6323, 6324, 6325, 6326, 6327, 6328, 6329, 6330, 6331, 6332, 6333, 6334, 6335, 6336, 6337, 6338, 6339, 6340, 6341, 6342, 6343, 6344, 6345, 6346, 6347, 6348, 6349, 6350, 6351, 6352, 6353, 6354, 6355, 6356, 6357, 6358, 6359, 6360, 6361, 6362, 6363, 6364, 6365, 6366) c6(6367) c7(cqB, acY, Bw); #c1(PHKB) c2(XP_005256041) c3(phosphorylase b kinase regulatory subunit beta isoform X1) c4(273919) c5(273920, 273921, 273922, 273923, 273924, 273925, 273926, 273927, 273928, 273929) c6( ) c7(cqB, acY, Bw); #c1(PHKG1) c2(NP_001245388) c3(phosphorylase b kinase gamma catalytic chain, skeletal muscle/heart isoform isoform 1) c4(93428) c5(93429, 93430, 93431, 93432, 93433, 93434) c6( ) c7(Bw); #c1(PHKG1) c2(NP_001245389) c3(phosphorylase b kinase gamma catalytic chain, skeletal muscle/heart isoform isoform 3) c4(93435) c5( ) c6( ) c7(Bw); #c1(PHKG1) c2(NP_006204) c3(phosphorylase b kinase gamma catalytic chain, skeletal muscle/heart isoform isoform 2) c4(162820) c5(162821, 162822, 162823, 162824, 162825, 162826, 162827) c6( ) c7(Bw); #c1(PHKG1) c2(XP_005271829) c3(phosphorylase b kinase gamma catalytic chain, skeletal muscle/heart isoform isoform X1) c4( ) c5(283605, 283606, 283607, 283608, 283609) c6( ) c7(Bw); #c1(PHKG2) c2(NP_000285) c3(phosphorylase b kinase gamma catalytic chain, liver/testis isoform isoform 1) c4(6368) c5(6369, 6370, 6371, 6372, 6373, 6374, 6375, 6376, 6377, 6378, 6379, 6380, 6381, 6382, 6383, 6384, 6385, 6386, 6387, 6388, 6389, 6390, 6391, 6392, 6393, 6394, 6395, 6396, 6397, 6398, 6399, 6400, 6401, 6402, 6403, 6404, 6405, 6406, 6407, 6408, 6409, 6410, 6411, 6412, 6413, 6414, 6415, 6416, 6417, 6418, 6419, 6420, 6421, 6422, 6423, 6424, 6425, 6426, 6427, 6428, 6429, 6430, 6431, 6432, 6433, 6434, 6435, 6436, 6437, 6438, 6439, 6440, 6441, 6442, 6443, 6444, 6445, 6446, 6447, 6448, 6449, 6450, 6451, 6452, 6453, 6454, 6455, 6456, 6457, 6458, 6459, 6460, 6461, 6462, 6463, 6464, 6465) c6(6466) c7(cqC, gk, acY, al, Bw); #c1(PHKG2) c2(NP_001165903) c3(phosphorylase b kinase gamma catalytic chain, liver/testis isoform isoform 2) c4(67974) c5(67975, 67976, 67977, 67978, 67979, 67980) c6( ) c7(cqC, gk, acY, al, Bw); #c1(PHLDA1) c2(NP_031376) c3(pleckstrin homology-like domain family A member 1) c4(172047, 172048) c5(172049, 172050, 172051, 172052, 172053, 172054, 172055, 172056, 172057, 172058, 172059, 172060, 172061, 172062, 172063, 172064, 172065, 172066, 172067, 172068, 172069) c6( ) c7(T, bE, aW, Y, fJ, ha, aT, bB, ey, er, cp); #c1(PHLDA2) c2(NP_003302) c3(pleckstrin homology-like domain family A member 2) c4(137267) c5(137268, 137269, 137270, 137271, 137272, 137273) c6( ) c7(T, d, eM, dB, eH, eF, cm, er, bN); #c1(PHLDA3) c2(NP_036528) c3(pleckstrin homology-like domain family A member 3) c4(174239) c5(174240, 174241, 174242, 174243, 174244, 174245, 174246, 174247, 174248, 174249) c6( ) c7(aT); #c1(PHLDB1) c2(NP_001138231) c3(pleckstrin homology-like domain family B member 1 isoform b) c4(56081, 56082) c5(56083, 56084, 56085, 56086, 56087, 56088) c6( ) c7(bM, d, dB, mQ, eZ, aJu, eA); #c1(PHLDB1) c2(NP_055972) c3(pleckstrin homology-like domain family B member 1 isoform a) c4(184813) c5(184814, 184815, 184816, 184817, 184818) c6( ) c7(bM, d, dB, mQ, eZ, aJu, eA); #c1(PHLDB1) c2(XP_005271526) c3(pleckstrin homology-like domain family B member 1 isoform X16) c4(283439) c5(283440, 283441, 283442, 283443, 283444, 283445) c6( ) c7(bM, d, dB, mQ, eZ, aJu, eA); #c1(PHLDB1) c2(XP_005271527) c3(pleckstrin homology-like domain family B member 1 isoform X17) c4( ) c5(283446) c6( ) c7(bM, d, dB, mQ, eZ, aJu, eA); #c1(PHLDB1) c2(XP_005271531) c3(pleckstrin homology-like domain family B member 1 isoform X25) c4( ) c5(283447) c6( ) c7(bM, d, dB, mQ, eZ, aJu, eA); #c1(PHLDB1) c2(XP_006718859) c3(pleckstrin homology-like domain family B member 1 isoform X8) c4(292024) c5( ) c6( ) c7(bM, d, dB, mQ, eZ, aJu, eA); #c1(PHLDB1) c2(XP_006718863) c3(pleckstrin homology-like domain family B member 1 isoform X13) c4(292025) c5(292026, 292027, 292028, 292029, 292030, 292031) c6( ) c7(bM, d, dB, mQ, eZ, aJu, eA); #c1(PHLDB1) c2(XP_006718865) c3(pleckstrin homology-like domain family B member 1 isoform X19) c4(292032) c5( ) c6( ) c7(bM, d, dB, mQ, eZ, aJu, eA); #c1(PHLDB1) c2(XP_011541016) c3(pleckstrin homology-like domain family B member 1 isoform X28) c4( ) c5(339540, 339541, 339542, 339543, 339544, 339545, 339546, 339547, 339548, 339549, 339550, 339551) c6( ) c7(bM, d, dB, mQ, eZ, aJu, eA); #c1(PHLDB1) c2(XP_011541017) c3(pleckstrin homology-like domain family B member 1 isoform X29) c4( ) c5(339552, 339553, 339554, 339555, 339556, 339557) c6( ) c7(bM, d, dB, mQ, eZ, aJu, eA); #c1(PHLPP1) c2(NP_919431) c3(PH domain leucine-rich repeat-containing protein phosphatase 1) c4(258607, 258608) c5(258609, 258610, 258611, 258612, 258613, 258614, 258615, 258616, 258617, 258618, 258619, 258620) c6( ) c7(bL, T, jh, rf, bB, v, q, ad, cF, aT, ae, eu, d, B, s, aW, Y, r, aq, g, as, bz, ac, eM, bE, cj, X); #c1(PHLPP2) c2(NP_001275932) c3(PH domain leucine-rich repeat-containing protein phosphatase 2 isoform 2) c4(107441, 107442) c5(107443, 107444, 107445, 107446, 107447, 107448, 107449, 107450, 107451, 107452, 107453, 107454, 107455, 107456, 107457, 107458, 107459) c6( ) c7(T, eM, aW, r, aT, q, eA, aue); #c1(PHLPP2) c2(NP_055835) c3(PH domain leucine-rich repeat-containing protein phosphatase 2 isoform 1) c4(183771, 183772, 183773, 183774) c5(183775, 183776, 183777, 183778, 183779, 183780, 183781, 183782, 183783, 183784, 183785, 183786, 183787, 183788, 183789, 183790, 183791, 183792, 183793, 183794, 183795, 183796, 183797) c6( ) c7(T, eM, aW, r, aT, q, eA, aue); #c1(PHOX2A) c2(NP_005160) c3(paired mesoderm homeobox protein 2A) c4(153520) c5(153521, 153522, 153523, 153524, 153525, 153526, 153527) c6( ) c7(bL, amd, ha, cz, nf, cm, cqD, bxw, zW, f); #c1(PHOX2B) c2(NP_003915) c3(paired mesoderm homeobox protein 2B) c4(142139) c5(142140, 142141, 142142, 142143, 142144, 142145) c6( ) c7(xN, cZ, T, ha, atS, n, fw, aLI, cqH, Tg, fX, nX, dd, an, ahE, cqG, li, A, ahF, fe, ahl, EZ, iV, cm, cqE, bdn, cql, amd, dB, cqF, Ji, xb); #c1(PHPT1) c2(NP_001129333) c3(14 kDa phosphohistidine phosphatase isoform 2) c4(51395) c5(51396, 51397, 51398, 51399, 51400, 51401, 51402, 51403, 51404, 51405) c6( ) c7(h, bz); #c1(PHPT1) c2(NP_054891) c3(14 kDa phosphohistidine phosphatase isoform 3) c4(178227) c5(178228, 178229, 178230, 178231, 178232, 178233) c6( ) c7(h, bz); #c1(PHRF1) c2(NP_001273510) c3(PHD and RING finger domain-containing protein 1 isoform 1) c4(105104) c5(105105, 105106, 105107, 105108, 105109, 105110) c6( ) c7(qw, T, aW, eZ, aT, fL, CQ, y, mC); #c1(PHRF1) c2(NP_065952) c3(PHD and RING finger domain-containing protein 1 isoform 2) c4(206471) c5(206472, 206473, 206474, 206475, 206476, 206477) c6( ) c7(qw, T, aW, eZ, aT, fL, CQ, y, mC); #c1(PHTF1) c2(XP_011538833) c3(putative homeodomain transcription factor 1 isoform X1) c4(336819, 336820, 336821, 336822) c5(336823, 336824, 336825, 336826, 336827, 336828, 336829, 336830, 336831, 336832, 336833, 336834, 336835, 336836, 336837, 336838, 336839, 336840, 336841, 336842) c6( ) c7(A); #c1(PHTF1) c2(XP_011538835) c3(putative homeodomain transcription factor 1 isoform X4) c4(336843, 336844, 336845, 336846) c5(336847, 336848, 336849, 336850, 336851, 336852, 336853, 336854, 336855, 336856, 336857, 336858) c6( ) c7(A); #c1(PHTF2) c2(NP_001120830) c3(putative homeodomain transcription factor 2 isoform 2) c4(44783, 44784) c5(44785, 44786, 44787, 44788, 44789, 44790, 44791, 44792, 44793, 44794, 44795, 44796) c6( ) c7(hH, fq, pN); #c1(PHTF2) c2(NP_001120831) c3(putative homeodomain transcription factor 2 isoform 3) c4(44797) c5(44798, 44799, 44800, 44801, 44802, 44803) c6( ) c7(hH, fq, pN); #c1(PHTF2) c2(NP_001120832) c3(putative homeodomain transcription factor 2 isoform 4) c4(44804) c5(44805, 44806, 44807, 44808, 44809, 44810) c6( ) c7(hH, fq, pN); #c1(PHTF2) c2(XP_005250566) c3(putative homeodomain transcription factor 2 isoform X1) c4(270379, 270380, 270381) c5(270382, 270383, 270384, 270385, 270386, 270387, 270388, 270389, 270390, 270391, 270392, 270393, 270394, 270395, 270396, 270397, 270398, 270399, 270400, 270401, 270402, 270403) c6( ) c7(hH, fq, pN); #c1(PHYH) c2(NP_001032626) c3(phytanoyl-CoA dioxygenase, peroxisomal isoform b) c4( ) c5(31399, 31400, 31401, 31402, 31403) c6( ) c7(aBn, cqJ); #c1(PHYH) c2(NP_006205) c3(phytanoyl-CoA dioxygenase, peroxisomal isoform a precursor) c4(162828, 162829) c5(162830, 162831, 162832, 162833, 162834, 162835, 162836) c6( ) c7(aBn, cqJ); #c1(PHYHIP) c2(NP_001092805) c3(phytanoyl-CoA hydroxylase-interacting protein) c4(39636, 39637) c5(39638, 39639, 39640, 39641, 39642, 39643, 39644, 39645, 39646, 39647, 39648, 39649, 39650, 39651, 39652, 39653) c6( ) c7(f); #c1(PHYKPL) c2(NP_699204) c3(5-phosphohydroxy-L-lysine phospho-lyase isoform 2) c4(245905) c5(245906, 245907, 245908, 245909, 245910, 245911) c6( ) c7(bMR, bMS); #c1(PI15) c2(NP_056970) c3(peptidase inhibitor 15 preproprotein) c4(188262) c5(188263, 188264, 188265, 188266, 188267, 188268, 188269, 188270, 188271, 188272, 188273, 188274, 188275, 188276) c6(188277, 188278, 188279, 188280) c7(cqK); #c1(PI16) c2(NP_001186088) c3(peptidase inhibitor 16 precursor) c4(77092, 77093, 77094) c5(77095, 77096, 77097, 77098, 77099, 77100, 77101, 77102, 77103, 77104, 77105, 77106, 77107, 77108, 77109, 77110) c6(77111, 77112, 77113, 77114) c7(ae, ad); #c1(PI16) c2(XP_005248974) c3(peptidase inhibitor 16 isoform X2) c4(268805) c5(268806, 268807, 268808, 268809, 268810, 268811, 268812, 268813) c6(268814, 268815) c7(ae, ad); #c1(PI3) c2(NP_002629) c3(elafin preproprotein) c4(130466, 130467, 130468, 130469) c5(130470, 130471, 130472, 130473, 130474, 130475) c6( ) c7(afr, sS, d, fR, aw, al, cr, fF, at, Xs, wR, h, xM, K, wC, iV, aEW, eW, ao, aa); #c1(PI4K2A) c2(NP_060895) c3(phosphatidylinositol 4-kinase type 2-alpha) c4(198446, 198447) c5(198448, 198449, 198450, 198451, 198452, 198453, 198454, 198455, 198456, 198457, 198458, 198459) c6( ) c7(B, IF); #c1(PI4K2B) c2(NP_060793) c3(phosphatidylinositol 4-kinase type 2-beta) c4(197859, 197860) c5(197861, 197862, 197863, 197864, 197865, 197866, 197867, 197868, 197869, 197870, 197871, 197872) c6( ) c7(he, bK); #c1(PI4KA) c2(NP_477352) c3(phosphatidylinositol 4-kinase alpha) c4(230759, 230760) c5(230761, 230762, 230763, 230764, 230765, 230766, 230767, 230768, 230769, 230770, 230771, 230772, 230773, 230774, 230775, 230776, 230777, 230778, 230779, 230780, 230781) c6( ) c7(agd, cqL, RX, xa, bK, he, B, vi); #c1(PI4KA) c2(XP_005261691) c3(phosphatidylinositol 4-kinase alpha isoform X1) c4(277593) c5( ) c6( ) c7(agd, cqL, RX, xa, bK, he, B, vi); #c1(PI4KA) c2(XP_011528530) c3(phosphatidylinositol 4-kinase alpha isoform X5) c4( ) c5(323671) c6( ) c7(agd, cqL, RX, xa, bK, he, B, vi); #c1(PI4KB) c2(NP_001185703) c3(phosphatidylinositol 4-kinase beta isoform 2) c4( ) c5(76066, 76067, 76068, 76069, 76070, 76071, 76072) c6( ) c7(af); #c1(PI4KB) c2(NP_001185704) c3(phosphatidylinositol 4-kinase beta isoform 3) c4( ) c5(76073, 76074, 76075, 76076, 76077, 76078, 76079, 76080, 76081, 76082) c6( ) c7(af); #c1(PI4KB) c2(NP_002642) c3(phosphatidylinositol 4-kinase beta isoform 1) c4(130644, 130645, 130646, 130647) c5(130648, 130649, 130650, 130651, 130652, 130653, 130654, 130655, 130656, 130657, 130658, 130659, 130660, 130661, 130662, 130663) c6( ) c7(af); #c1(PI4KB) c2(XP_005245321) c3(phosphatidylinositol 4-kinase beta isoform X4) c4(266451, 266452) c5(266453, 266454, 266455, 266456, 266457, 266458, 266459, 266460, 266461, 266462, 266463, 266464, 266465, 266466, 266467, 266468, 266469) c6( ) c7(af); #c1(PI4KB) c2(XP_011507936) c3(phosphatidylinositol 4-kinase beta isoform X1) c4(298290) c5( ) c6( ) c7(af); #c1(PIAS1) c2(NP_057250) c3(E3 SUMO-protein ligase PIAS1) c4(189715, 189716) c5(189717, 189718, 189719, 189720, 189721, 189722, 189723, 189724, 189725, 189726, 189727, 189728, 189729) c6( ) c7(ck, T, eM, aW, aT, vw, ao, v, np, K, lQ, jj, Pk, V, ae, ad); #c1(PIAS2) c2(NP_004662) c3(E3 SUMO-protein ligase PIAS2 isoform beta) c4(148625, 148626) c5(148627, 148628, 148629, 148630, 148631, 148632, 148633, 148634, 148635, 148636, 148637, 148638, 148639, 148640, 148641, 148642, 148643) c6( ) c7(T, fM, rq, byn, Y, jh, cm, rs, K, m, t); #c1(PIAS2) c2(NP_775298) c3(E3 SUMO-protein ligase PIAS2 isoform alpha) c4(249925) c5(249926, 249927, 249928, 249929, 249930, 248931, 249932, 249933, 249934, 249935, 249936, 249937) c6( ) c7(T, fM, rq, byn, Y, jh, cm, rs, K, m, t); #c1(PIAS2) c2(XP_005258434) c3(E3 SUMO-protein ligase PIAS2 isoform X3) c4(275674) c5(275675, 275676, 275677, 275678, 275679) c6( ) c7(T, fM, rq, byn, Y, jh, cm, rs, K, m, t); #c1(PIAS2) c2(XP_006722636) c3(E3 SUMO-protein ligase PIAS2 isoform X7) c4(294788) c5( ) c6( ) c7(T, fM, rq, byn, Y, jh, cm, rs, K, m, t); #c1(PIAS4) c2(NP_056981) c3(E3 SUMO-protein ligase PIAS4) c4(188326) c5(188327, 188328, 188329, 188330, 188331, 188332, 188333) c6( ) c7(ck, T, aE, iU, bE, VB, cr, aA, bB, bw, aF, iJ, m, bC, t, ae, ad); #c1(PIBF1) c2(NP_006337) c3(progesterone-induced-blocking factor 1) c4(164146, 164147) c5(164148, 164149, 164150, 164151, 164152, 164153) c6( ) c7(aW, cqM, y, bA, aT); #c1(PIBF1) c2(XP_011533183) c3(progesterone-induced-blocking factor 1 isoform X1) c4(329310) c5( ) c6( ) c7(aW, cqM, y, bA, aT); #c1(PIBF1) c2(XP_011533187) c3(progesterone-induced-blocking factor 1 isoform X5) c4( ) c5(329311, 329312, 329313, 329314, 329315, 329316) c6( ) c7(aW, cqM, y, bA, aT); #c1(PIBF1) c2(XP_011533188) c3(progesterone-induced-blocking factor 1 isoform X6) c4( ) c5(329317, 329318, 329319, 329320, 329321, 329322) c6( ) c7(aW, cqM, y, bA, aT); #c1(PICALM) c2(NP_001008660) c3(phosphatidylinositol-binding clathrin assembly protein isoform 2) c4(23345) c5(23346, 23347, 23348, 23349, 23350, 23351) c6( ) c7(ck, T, dA, af, pc, cH, iT, an, cj, aT, rO, iY, gE, v, ji, hf, f, hF, bt, fK); #c1(PICALM) c2(NP_001193875) c3(phosphatidylinositol-binding clathrin assembly protein isoform 3) c4(82897) c5(82898, 82899, 82900, 82901, 82902, 82903) c6( ) c7(ck, T, dA, af, pc, cH, iT, an, cj, aT, rO, iY, gE, v, ji, hf, f, hF, bt, fK); #c1(PICALM) c2(NP_001193876) c3(phosphatidylinositol-binding clathrin assembly protein isoform 4) c4(82904) c5(82905, 82906, 82907, 82908, 82909) c6( ) c7(ck, T, dA, af, pc, cH, iT, an, cj, aT, rO, iY, gE, v, ji, hf, f, hF, bt, fK); #c1(PICALM) c2(NP_009097) c3(phosphatidylinositol-binding clathrin assembly protein isoform 1) c4(170658) c5(170659, 170660, 170661, 170662, 170663, 170664, 170665, 170666, 170667, 170668) c6( ) c7(ck, T, dA, af, pc, cH, iT, an, cj, aT, rO, iY, gE, v, ji, hf, f, hF, bt, fK); #c1(PICALM) c2(XP_005274390) c3(phosphatidylinositol-binding clathrin assembly protein isoform X15) c4( ) c5(285066) c6( ) c7(ck, T, dA, af, pc, cH, iT, an, cj, aT, rO, iY, gE, v, ji, hf, f, hF, bt, fK); #c1(PICK1) c2(NP_001034673) c3(PRKCA-binding protein) c4(32048, 32049, 32050, 32051, 32052) c5(32053, 32054, 32055, 32056, 32057, 32058, 32059, 32060, 32061, 32062, 32063, 32064, 32065, 32066, 32067, 32068) c6( ) c7(gU, Kv, aMv, U, gl, sv, dG, cqN, xa); #c1(PICK1) c2(XP_011528819) c3(PRKCA-binding protein isoform X1) c4( ) c5(324209, 324210, 324211, 324212, 324213, 324214, 324215, 324216, 324217, 324218, 324219, 324220, 324221, 324222, 324223, 324224, 324225, 324226) c6( ) c7(gU, Kv, aMv, U, gl, sv, dG, cqN, xa); #c1(PID1) c2(NP_001094288) c3(PTB-containing, cubilin and LRP1-interacting protein isoform 2) c4(40660) c5(40661, 40662, 40663, 40664, 40665, 40666, 40667, 40668, 40669, 40670, 40671, 40672) c6( ) c7(jf, T, d, ac, dB, v, as, eA, aa); #c1(PID1) c2(NP_060403) c3(PTB-containing, cubilin and LRP1-interacting protein isoform 1) c4(195814) c5(195815, 195816, 195817, 195818, 195819, 195820) c6( ) c7(jf, T, d, ac, dB, v, as, eA, aa); #c1(PID1) c2(XP_011509686) c3(PTB-containing, cubilin and LRP1-interacting protein isoform X1) c4(300251, 300252) c5(300253, 300254, 300255, 300256, 300257, 300258, 300259, 300260, 300261, 300262) c6( ) c7(jf, T, d, ac, dB, v, as, eA, aa); #c1(PIDD1) c2(XP_011518511) c3(p53-induced death domain-containing protein 1 isoform X4) c4( ) c5(312615) c6( ) c7(gV, hG, Y, ff, fr, en); #c1(PIDD1) c2(XP_011518512) c3(p53-induced death domain-containing protein 1 isoform X1) c4(312616) c5(312617, 312618, 312619, 312620, 312621, 312622) c6( ) c7(gV, hG, Y, ff, fr, en); #c1(PIDD1) c2(XP_011518513) c3(p53-induced death domain-containing protein 1 isoform X2) c4(312623) c5(312624, 312625, 312626, 312627, 312628) c6( ) c7(gV, hG, Y, ff, fr, en); #c1(PIEZO1) c2(NP_001136336) c3(piezo-type mechanosensitive ion channel component 1) c4(54820, 54821, 54822) c5(54823, 54824, 54825, 54826, 54827, 54828, 54829, 54830, 54831, 54832, 54833, 54834, 54835, 54836, 54837, 54838, 54839, 54840) c6( ) c7(av, ft, Fd, aq, rz, B, y, L); #c1(PIEZO2) c2(NP_071351) c3(piezo-type mechanosensitive ion channel component 2) c4(211141) c5(211142, 211143, 211144, 211145, 211146, 211147, 211148, 211149, 211150, 211151, 211152, 211153, 211154, 211155, 211156, 211157, 211158, 211159, 211160, 211161, 211162, 211163, 211164, 211165) c6( ) c7(aAf, eM, cqP, aw, zD, cgO, af); #c1(PIEZO2) c2(XP_011524026) c3(piezo-type mechanosensitive ion channel component 2 isoform X2) c4(318544) c5(318545, 318546, 318547, 318548, 318549, 318550) c6( ) c7(aAf, eM, cqP, aw, zD, cgO, af); #c1(PIEZO2) c2(XP_011524028) c3(piezo-type mechanosensitive ion channel component 2 isoform X4) c4(318551, 318552, 318553) c5( ) c6( ) c7(aAf, eM, cqP, aw, zD, cgO, af); #c1(PIF1) c2(NP_001273426) c3(ATP-dependent DNA helicase PIF1 isoform b) c4(104872, 104873) c5(104874, 104875, 104876, 104877, 104878, 104879) c6( ) c7(T, aW, aT, tc, oH, K, ae, ad); #c1(PIF1) c2(XP_011520386) c3(ATP-dependent DNA helicase PIF1 isoform X1) c4(315238) c5(315239, 315240, 315241, 315242, 315243, 315244, 315245, 315246, 315247, 315248, 315249, 315250, 315251, 315252, 315253, 315254) c6( ) c7(T, aW, aT, tc, oH, K, ae, ad); #c1(PIF0) c2(NP_001287760) c3(protein pitchfork isoform 2) c4(112830) c5(112831, 112832, 112833, 112834, 112835, 112836) c6( ) c7(ckH); #c1(PIGA) c2(NP_002632) c3(phosphatidylinositol N-acetylglucosaminyltransferase subunit A isoform 1) c4(130490, 130491) c5(130492, 130493, 130494, 130495, 130496, 130497, 130498, 130499, 130500, 130501, 130502, 130503, 130504, 130505, 130506, 130507, 130508, 130509, 130510, 130511, 130512, 130513, 130514, 130515, 130516, 130517, 130518, 130519, 130520, 130521, 130522, 130523, 130524, 130525, 130526, 130527, 130528, 130529, 130530, 130531, 130532, 130533, 130534, 130535, 130536, 130537, 130538, 130539, 130540, 130541, 130542, 130543, 130544, 130545, 130546, 130547, 130548, 130549, 130550, 130551, 130552, 130553, 130554, 130555, 130556, 130557, 130558, 130559, 130560, 130561, 130562, 130563, 130564, 130565, 130566, 130567, 130568, 130569, 130570, 130571, 130572, 130573, 130574, 130575, 130576, 130577, 130578, 130579, 130580, 130581, 130582, 130583) c6( ) c7(ka, T, ha, fd, oY, nA, pe, aU, h, K, cqQ, pk, amA, aHo, bEj, aom, cqR, bw, dr, ck, aWZ, ki, HN, oh, dW, oX, xG, Wl, bt, fh, aHl); #c1(PIGA) c2(NP_065206) c3(phosphatidylinositol N-acetylglucosaminyltransferase subunit A isoform 3) c4(204582) c5(204583, 204584, 204585, 204586, 204587, 204588, 204589, 204590, 204591, 204592, 204593, 204594) c6( ) c7(ka, T, ha, fd, oY, nA, pe, aU, h, K, cqQ, pk, amA, aHo, bEj, aom, cqR, bw, dr, ck, aWZ, ki, HN, oh, dW, oX, xG, Wl, bt, fh, aHl); #c1(PIGF) c2(NP_002634) c3(phosphatidylinositol-glycan biosynthesis class F protein isoform 1) c4(130584) c5(130585, 130586, 130587, 130588, 130589, 130590, 130591) c6( ) c7(bL, gx, sY, vT, eZ, K, ci, m, C, uC, fh, Vs); #c1(PIGF) c2(NP_775097) c3(phosphatidylinositol-glycan biosynthesis class F protein isoform 2) c4(249495) c5(249496, 249497, 249498, 249499, 249500) c6( ) c7(bL, gx, sY, vT, eZ, K, ci, m, C, uC, fh, Vs); #c1(PIGF) c2(XP_005264426) c3(phosphatidylinositol-glycan biosynthesis class F protein isoform X2) c4(278933) c5(278934, 278935, 278936, 278937, 278938, 278939) c6( ) c7(bL, gx, sY, vT, eZ, K, ci, m, C, uC, fh, Vs); #c1(PIGG) c2(NP_001120650) c3(GPI ethanolamine phosphate transferase 2 isoform 1) c4(44365) c5(44366, 44367, 44368, 44369, 44370, 44371, 44372, 44373) c6( ) c7(dy, ac); #c1(PIGG) c2(NP_001275981) c3(GPI ethanolamine phosphate transferase 2 isoform 4) c4(107636) c5(107637, 107638, 107639, 107640, 107641, 107642) c6( ) c7(dy, ac); #c1(PIGG) c2(NP_001275984) c3(GPI ethanolamine phosphate transferase 2 isoform 6) c4(107643) c5(107644, 107645, 107646, 107647, 107648, 107649) c6( ) c7(dy, ac); #c1(PIGG) c2(NP_001275986) c3(GPI ethanolamine phosphate transferase 2 isoform 7) c4(107650) c5(107651, 107652, 107653, 107654, 107655, 107656, 107657, 107658) c6( ) c7(dy, ac); #c1(PIGG) c2(NP_060203) c3(GPI ethanolamine phosphate transferase 2 isoform 2) c4(194739, 194740) c5(194741, 194742, 194743, 194744, 194745, 194746) c6( ) c7(dy, ac); #c1(PIGG) c2(XP_005272346) c3(GPI ethanolamine phosphate transferase 2 isoform X9) c4( ) c5(284003) c6( ) c7(dy, ac); #c1(PIGG) c2(XP_011511794) c3(GPI ethanolamine phosphate transferase 2 isoform X5) c4( ) c5(302485, 302486, 302487, 302488, 302489) c6( ) c7(dy, ac); #c1(PIGL) c2(NP_004269) c3(N-acetylglucosaminyl-phosphatidylinositol de-N-acetylase precursor) c4(144735, 144736) c5(144737, 144738, 144739, 144740, 144741, 144742) c6( ) c7(pk, oh, fq, cqS); #c1(PIGL) c2(XP_011522382) c3(N-acetylglucosaminyl- phosphatidylinositol de-N-acetylase isoform X1) c4( ) c5(317064, 317065, 317066, 317067, 317068, 317069) c6( ) c7(pk, oh, fq, cqS); #c1(PIGM) c2(NP_660150) c3(GPI mannosyltransferase 1) c4(240409) c5(240410, 240411, 240412, 240413, 240414, 240415, 240416) c6( ) c7(aHo, ha, bEj); #c1(PIGN) c2(NP_789744) c3(GPI ethanolamine phosphate transferase 1) c4(252200) c5(252201, 252202, 252203, 252204, 252205, 252206, 252207, 252208, 252209, 252210) c6( ) c7(cqT, ha, cd, q, r); #c1(PIGO) c2(NP_001188413) c3(GPI ethanolamine phosphate transferase 3 isoform 2) c4(79180) c5(79181, 79182, 79183, 79184, 79185, 79186, 79187, 79188, 79189, 79190) c6( ) c7(Wl, lm, cqU, cql); #c1(PIGO) c2(NP_116023) c3(GPI ethanolamine phosphate transferase 3 isoform 1) c4(225239) c5(225240, 225241, 225242, 225243, 225244, 225245, 225246, 225247, 225248, 225249, 225250) c6( ) c7(Wl, lm, cqU, cql); #c1(PIGP) c2(NP_710148) c3(phosphatidylinositol N-acetylglucosaminyltransferase subunit P isoform 1) c4(246481, 246482, 246483, 246484) c5(246485, 246486, 246487, 246488, 246489, 246490, 246491, 246492, 246493, 246494) c6( ) c7(f, anj); #c1(PIGP) c2(NP_710149) c3(phosphatidylinositol N-acetylglucosaminyltransferase subunit P isoform 2) c4( ) c5(246495, 246496, 246497, 246498, 246499, 246500, 246501, 246502, 246503, 246504, 246505, 246506, 246507, 246508, 246509, 246510, 246511, 246512, 246513, 246514, 246515, 246516) c6( ) c7(f, anj); #c1(PIGQ) c2(NP_004195) c3(phosphatidylinositol N-acetylglucosaminyltransferase subunit Q isoform 2) c4(144241, 144242, 144243, 144244, 144245, 144246, 144247) c5(144248, 144249, 144250, 144251, 144252, 144253, 144254, 144255, 144256, 144257, 144258, 144259, 144260, 144261, 144262, 144263, 144264, 144265, 144266, 144267, 144268, 144269, 144270, 144271, 144272, 144273, 144274, 144275, 144276, 144277, 144278, 144279, 144280, 144281, 144282, 144283, 144284, 144285, 144286, 144287, 144288, 144289, 144290, 144291, 144292, 144293) c6( ) c7(cZ, ac, dd); #c1(PIGQ) c2(NP_683721) c3(phosphatidylinositol N-acetylglucosaminyltransferase subunit Q isoform 1) c4(242516) c5(242517, 242518, 242519, 242520, 242521, 242522, 242523, 242524) c6(242525, 242526) c7(cZ, ac, dd); #c1(PIGR) c2(XP_011507931) c3(polymeric immunoglobulin receptor isoform X1) c4(298261) c5(298262, 298263, 298264, 298265, 298266, 298267) c6( ) c7(oO, T, EM, fM, bB, n, bS, ct, ci, hX, cqV, aE, ja, ey, ji, B, ff, en, cl, Z, g, bz, eM, bE, hL, dy, hE, X); #c1(PIGT) c2(NP_001171657) c3(GPI transamidase component PIG-T isoform 2 precursor) c4(71168) c5(71169, 71170, 71171, 71172, 71173, 71174) c6( ) c7(cqW, hb, TJ, atf, fh, cqX); #c1(PIGT) c2(NP_001171658) c3(GPI transamidase component PIG-T isoform 3 precursor) c4(71175) c5(71176, 71177, 71178, 71179, 71180, 71181) c6( ) c7(cqW, hb, TJ, atf, fh, cqX); #c1(PIGT) c2(NP_001171659) c3(GPI transamidase component PIG-T isoform 4 precursor) c4(71182, 71183, 71184) c5(71185, 71186, 71187, 71188, 71189, 71190, 71191, 71192, 71193, 71194, 71195, 71196, 71197, 71198, 71199, 71200, 71201, 71202) c6( ) c7(cqW, hb, TJ, atf, fh, cqX); #c1(PIGT) c2(NP_057021) c3(GPI transamidase component PIG-T isoform 1 precursor) c4(188561, 188562) c5(188563, 188564, 188565, 188566, 188567, 188568, 188569) c6( ) c7(cqW, hb, TJ, atf, fh, cqX); #c1(PIGT) c2(XP_005260489) c3(GPI transamidase component PIG-T isoform X2) c4( ) c5(276567, 276568, 276569, 276570, 276571) c6( ) c7(cqW, hb, TJ, atf, fh, cqX); #c1(PIGU) c2(NP_536724) c3(phosphatidylinositol glycan anchor biosynthesis class U protein precursor) c4(231295, 231296, 231297, 231298) c5(231299, 231300, 231301, 231302, 231303, 231304, 231305, 231306, 231307, 231308, 231309, 231310, 231311, 231312, 231313, 231314, 231315, 231316) c6( ) c7(kT, T, d, Dy, kl, aW, Y, hk, eL, cj, aT, fd, dL, yO, ci, iK, bz, B, biS); #c1(PIGU) c2(XP_011526844) c3(phosphatidylinositol glycan anchor biosynthesis class U protein isoform X1) c4( ) c5(321192, 321193, 321194, 321195, 321196, 321197) c6( ) c7(kT, T, d, Dy, kl, aW, Y, hk, eL, cj, aT, fd, dL, yO, ci, iK, bz, B, biS); #c1(PIGW) c2(NP_848612) c3(phosphatidylinositol-glycan biosynthesis class W protein) c4(253977, 253978) c5(253979, 253980, 253981, 253982, 253983, 253984, 253985, 253986, 253987, 253988, 253989, 253990, 253991, 253992, 253993) c6( ) c7(x, By, bS, hp, m, k, et, Z, t); #c1(PIGY) c2(NP_001036081) c3(phosphatidylinositol N-acetylglucosaminyltransferase subunit Y) c4(33949) c5(33950, 33951, 33952, 33953, 33954, 33955) c6( ) c7(pk, oh, sj); #c1(PIH1D1) c2(NP_060386) c3(PIH1 domain-containing protein 1) c4(195748) c5(195749, 195750, 195751, 195752, 195753, 195754) c6( ) c7(aW, aT); #c1(PIK3AP1) c2(NP_689522) c3(phosphoinositide 3-kinase adapter protein 1) c4(242984) c5(242985, 242986, 242987, 242988, 242989, 242990, 242991) c6( ) c7(ad); #c1(PIK3AP1) c2(XP_005269555) c3(phosphoinositide 3-kinase adapter protein 1 isoform X3) c4(282634, 282635) c5(282636, 282637, 282638, 282639, 282640, 282641, 282642, 282643, 282644, 282645, 282646) c6( ) c7(ad); #c1(PIK3C2A) c2(NP_002636) c3(phosphatidylinositol 4-phosphate 3-kinase C2 domain-containing subunit alpha) c4(130592, 130593) c5(130594, 130595, 130596, 130597, 130598, 130599, 130600, 130601, 130602, 130603, 130604, 130605, 130606, 130607, 130608, 130609, 130610, 130611, 130612, 130613, 130614, 130615, 130616, 130617) c6( ) c7(bL, no, auy, iT, ff, hL, en, ad, hm); #c1(PIK3C2A) c2(XP_011518488) c3(phosphatidylinositol 4-phosphate 3-kinase C2 domain-containing subunit alpha isoform X2) c4(312553, 312554) c5( ) c6( ) c7(bL, no, auy, iT, ff, hL, en, ad, hm); #c1(PIK3C2A) c2(XP_011518489) c3(phosphatidylinositol 4-phosphate 3-kinase C2 domain-containing subunit alpha isoform X4) c4(312555) c5(312556, 312557, 312558, 312559, 312560, 312561) c6( ) c7(bL, no, auy, iT, ff, hL, en, ad, hm); #c1(PIK3C2B) c2(NP_002637) c3(phosphatidylinositol 4-phosphate 3-kinase C2 domain-containing subunit beta) c4(130618, 130619, 130620) c5(130621, 130622, 130623, 130624, 130625, 130626, 130627, 130628, 130629, 130630, 130631) c6( ) c7(T, ft, cz, pb, cm, eA, ad); #c1(PIK3C2B) c2(XP_005245315) c3(phosphatidylinositol 4-phosphate 3-kinase C2 domain-containing subunit beta isoform X2) c4(266441, 266442, 266443) c5(266444, 266445, 266446, 266447, 266448, 266449, 266450) c6( ) c7(T, ft, cz, pb, cm, eA, ad); #c1(PIK3C2B) c2(XP_011507935) c3(phosphatidylinositol 4-phosphate 3-kinase C2 domain-containing subunit beta isoform X3) c4( ) c5(298268, 298269, 298270, 298271, 298272, 298273, 298274, 298275, 298276, 298277, 298278, 298279, 298280, 298281, 298282, 298283, 298284, 298285, 298286, 298287, 298288, 298289) c6( ) c7(T, ft, cz, pb, cm, eA, ad); #c1(PIK3C2G) c2(NP_001275701) c3(phosphatidylinositol 4-phosphate 3-kinase C2 domain-containing subunit gamma isoform 1) c4(107122) c5(107123, 107124, 107125, 107126, 107127, 107128) c6( ) c7(bL, dQ, aw); #c1(PIK3C2G) c2(NP_004561) c3(phosphatidylinositol 4-phosphate 3-kinase C2 domain-containing subunit gamma isoform 3) c4(147636) c5(147637, 147638, 147639, 147640, 147641, 147642, 147643, 147644, 147645, 147646) c6( ) c7(bL, dQ, aw); #c1(PIK3C3) c2(NP_002638) c3(phosphatidylinositol 3-kinase catalytic subunit type 3) c4(130632) c5(130633, 130634, 130635, 130636, 130637, 130638) c6( ) c7(nD, T, af, aW, oe, ht, aw, eZ, aT, ff, aj, bK, fL, m, en, Kw, fq, mC); #c1(PIK3CA) c2(NP_006209) c3(phosphatidylinositol 4,5-bisphosphate 3-kinase catalytic subunit alpha isoform) c4(162895, 162896, 162897) c5(162898, 162899, 162900, 162901, 162902, 162903, 162904, 162905, 162906, 162907, 162908, 162909, 162910, 162911, 162912, 162913, 162914, 162915) c6( ) c7(gh, aHq, T, bM, aC, fR, pf, YU, ea, if, al, fd, bB, lR, ci, auu, Qp, YD, ip, x, bv, gJ, aE, Xc, ata, Fo, pX, auB, ja, auF, K, hu, MO, pk, eL, Zm, cp, Qe, cre, cqY, xQ, eG, zQ, ye, Jl, aW, Ls, QB, hl, LZ, Qv, Qq, Qm, PQ, crf, Ku, g, as, eF, cm, aoS, GR, Qt, QA, aJg, qJ, iP, bw, eM, nB, iA, aJh, iT, mx, U, cj, Qw, k, m, in, ik, iu, dD, Or, aw, ht, NT, qy, n, aj, aKt, fr, PY, qN, PR, cd, br, eW, biS, BI, ft, jz, hw, cc, TK, Nn, gd, kH, h, jy, By, dL, ey, ox, eV, apG, Gw, aYF, dx, awV, crc, avc, MD, AQ, aJL, ge, aiL, crb, aq, kp, agF, pm, mo, Og, Ld, iN, Ye, iO, aKA, W, cA, auG, dB, hk, Qu, bP, ayS, bo, hL, hj, hR, pg, Vy, qF, art, anx, Qz, it, B, AN, bL, fM, Dh, fG, WT, jx, eX, aA, v, yO, C, crd, Qn, AO, pd, lu, q, J, qH, zn, cgZ, er, eA, eJ, aHy, lg, hW, nv, Qg, BJ, qK, aT, cy, dz, Fx, ch, rz, ae, ne, af, amw, jf, qw, avg, cra, s, NE, oV, Y, PL, Qr, nO, iU, r, aJI, lo, en, cl, LV, t, iK, pb, bN, ck, Ta, sS, nM, kP, Dy, ac, iM, au, WU, adR, mf, im, bt, xb, rA, kG, LS, VB, hS, hI, kh, id, ow, Dd, jh, aHv, bS, dG, eq, zU, brr, hF, Fc, iJ, ad, afb, hX, dP, av, iC, hd, ib, py, Db, yt, ds, NS, hD, bj, bkw, ji, lQ, fb, nJ, NM, Yi, PM, d, je, BO, qt, ff, eH, Of, eZ, btV, aeV, aF, btZ, bow, EZ, anW, iR, bz, dr, eK, Hp, LB, es, gk, crg, Ew, bF, bE, X, gZ, ei, Gu, i, y, aed, CW, jr, auy, Tc); #c1(PIK3CB) c2(NP_006210) c3(phosphatidylinositol 4,5-bisphosphate 3-kinase catalytic subunit beta isoform isoform 1) c4(162916, 162917, 162918, 162919, 162920) c5(162921, 162922, 162923, 162924, 162925, 162926, 162927, 162928, 162929, 162930, 162931, 162932, 162933, 162934, 162935, 162936, 162937, 162938, 162939, 162940, 162941, 162942, 162943, 162944, 162945, 162946, 162947, 162948, 162949, 162950, 162951, 162952, 162953, 162954) c6( ) c7(gh, T, bM, aC, pf, YU, ea, if, al, fd, bB, lR, ci, Qp, ip, x, bv, aE, ata, Fo, pX, ja, K, hu, MO, pk, eL, cp, Qe, cre, xQ, eG, yo, aW, Ls, hl, LZ, PQ, brr, Ku, g, as, eF, cm, aoS, GR, Qt, QA, iP, qJ, bw, eM, nB, iA, iT, mx, U, cj, Qw, k, m, ik, iu, dD, Or, aw, ht, qy, n, aj, aKt, fr, PY, qN, PR, cd, br, eW, biS, ft, jz, hw, TK, gd, kH, h, eV, By, dL, ey, ox, apG, dx, crc, MD, AQ, ge, aiL, crb, aq, kp, Og, pm, Ld, Ye, iO, aKA, W, cA, bP, dB, Vy, bo, hL, hR, pg, qF, art, anx, it, B, bL, fM, Dh, fG, jx, eX, aA, v, yO, C, crd, Qo, lu, pd, q, J, qH, zn, er, eA, eJ, aHy, lg, hW, nv, Qg, BJ, aT, cy, dz, Fx, rz, ae, af, jf, Qr, nO, iU, oV, Y, r, lo, en, cl, LV, t, iK, pb, bN, ck, Ta, sS, nM, kP, ac, iM, au, adR, mf, ht, rA, kG, LS, VB, hS, hl, kh, id, ow, jh, aHv, bS, dG, eq, hF, iJ, ad, dP, av, iC, hd, ib, py, ds, hD, bj, bkw, ji, lQ, fb, nJ, NM, Yi, PM, d, je, ff, eH, Of, eZ, aeV, aF, iR, bz, dr, eK, Hp, LB, es, gk, crg, Ew, bE, X, gZ, ei, y, CW, jr, Tc); #c1(PIK3CB) c2(XP_011511198) c3(phosphatidylinositol 4,5-bisphosphate 3-kinase catalytic subunit beta isoform isoform X2) c4(301666) c5(301667, 301668, 301669, 301670, 301671, 301672) c6( ) c7(gh, T, bM, aC, pf, YU, ea, if, al, fd, bB, lR, ci, Qp, ip, x, bv, aE, ata, Fo, pX, ja, K, hu, MO, pk, eL, cp, Qe, cre, xQ, eG, yo, aW, Ls, hl, LZ, PQ, brr, Ku, g, as, eF, cm, aoS, GR, Qt, QA, iP, qJ, bw, eM, nB, iA, iT, mx, U, cj, Qw, k, m, ik, iu, dD, Or, aw, ht, qy, n, aj, aKt, fr, PY, qN, PR, cd, br, eW, biS, ft, jz, hw, TK, gd, kH, h, eV, By, dL, ey, ox, apG, dx, crc, MD, AQ, ge, aiL, crb, aq, kp, Og, pm, Ld, Ye, iO, aKA, W, cA, bP, dB, Vy, bo, hL, hR, pg, qF, art, anx, it, B, bL, fM, Dh, fG, jx, eX, aA, v, yO, C, crd, Qn, lu, pd, q, J, qH, zn, er, eA, eJ, aHy, lg, hW, nv, Qg, BJ, aT, cy, dz, Fx, rz, ae, af, jf, Qr, nO, iU, oV, Y, r, lo, en, cl, LV, t, iK, pb, bN, ck, Ta, sS, nM, kP, ac, iM, au, adR, mf, bt, rA, kG, LS, VB, hS, hl, kh, id, ow, jh, aHv, bS, dG, eq, hF, iJ, ad, dP, av, iC, hd, ib, py, ds, hD, bj, bkw, ji, lQ, fb, nJ, NM, Yi, PM, d, je, ff, eH, Of, eZ, aeV, aF, iR, bz, dr, eK, Hp, LB, es, gk, crg, Ew, bE, X, gZ, ei, y, CW, jr, Tc); #c1(PIK3CD) c2(XP_011539885) c3(phosphatidylinositol 4,5-bisphosphate 3-kinase catalytic subunit delta isoform isoform X5) c4(338155) c5(338156, 338157, 338158, 338159, 338160, 338161) c6( ) c7(gh, T, bM, aC, YU, ea, if, al, fd, bB, lR, ci, Qp, ip, x, bv, aE, ata, Fo, pX, ja, K, hu, MO, pk, eL, cp, Qe, cre, xQ, eG, yo, aW, Ls, hl, PQ, brr, Ku, g, as, eF, cm, aoS, GR, Qt, QA, iP, qJ, bw, eM, nB, iA, iT, mx, U, cj, Qw, k, m, ik, iu, dD, Or, aw, ht, qy, n, aj, aKt, fr, PY, qN, PR, cd, br, eW, biS, Oe, ft, jz, hw, TK, gd, kH, h, eV, By, dL, ey, ox, apG, dx, crc, MD, zb, AQ, ge, aiL, crb, aq, kp, Og, pm, Ld, Ye, iO, aKA, W, cA, bP, dB, Vy, bo, hL, hR, at, pg, qF, art, anx, it, B, bL, fM, dA, Dh, fG, jx, eX, aA, v, yO, C, crd, Qo, lu, pd, q, J, qH, zn, er, eA, eJ, aHy, lg, hW, nv, Qg, BJ, aT, cy, dz, Fx, rz, ae, af, jf, Qr, nO, iU, oV, Y, r, lo, en, cl, LV, t, iK, pb, bN, ck, cT, sS, Ta, kP, ac, nM, iM, au, adR, mf, bt, rA, kG, LS, VB, hS, hl, kh, id, ow, jh, aHv, dG, eq, hF, iJ, ad, dP, av, iC, hd, ib, py, ds, hD, bj, bkw, ji, lQ, fb, nJ, NM, Yi, PM, d, je, cgq, ff, eH, Of, cr, eZ, dN, aeV, aF, iR, bz, dr, eK, Hp, LB, es, gk, crg, Ew, bE, X, gZ, ei, y, CW, jr, Tc); #c1(PIK3CG) c2(NP_001269355) c3(phosphatidylinositol 4,5-bisphosphate 3-kinase catalytic subunit gamma isoform) c4(101255) c5(101256, 101257, 101258, 101259, 101260, 101261, 101262, 101263, 101264, 101265, 101266, 101267, 101268, 101269) c6( ) c7(oO, gh, T, bM, aC, fR, YU, ea, if, e, al, fd, bB, lR, ci, Qp, ajC, ip, x, bv, xE, aE, ata, Fo, pX, ja, K, qM, hu, MO, pk, eL, cp, Qe, cre, xQ, eG, yo, aW, Ls, hl, PQ, brr, Ku, g, hJ, aKj, as, aoS, GR, eF, Qt, cm, qJ, QA, iP, eM, nB, iA, iT, mx, U, cj, Qw, k, m, ik, iu, dD, Or, aw, ht, qy, n, aj, aKt, fr, PY, qN, PR, cd, br, ai, biS, eW, ft, jz, hw, TK, gd, kH, h, eV, By, dL, ey, ox, apG, dx, crc, MD, AQ, ge, aiL, crb, aq, kp, Og, pm, Ld, Ye, iO, aKA, W, cA, bP, dB, Vy, bo, hL, hR, pg, qF, art, anx, it, B, bL, fM, Dh, fG, jx, eX, aA, cz, v, j, yO, C, crd, bX, Qo, pd, lu, q, J, qH, zn, er, eA, eJ, mj, aHy, lg, hW, nv, Qg, BJ, aT, cy, dz, Fx, rz, ae, af, jf, Qr, nO, iU, oV, Y, r, bw, lo, en, cl, LV, t, iK, pb, bN, ck, Ta, sS, nM, kP, ac, iM, au, adR, mf, afW, fD, bt, rA, kG, LS, VB, hS, Kd, hl, kh, id, ow, jh, aHv, dG, eq, hF, iJ, ad, dP, av, iC, hd, ib, py, ds, hD, bj, bkw, ji, lQ, fb, nJ, NM, Yi, PM, d, je, ff, eH, Of, cr, eZ, dN, aeV, aF, iR, bz, dr, eK, Hp, LB, es, gk, crg, Ew, bE, X, gZ, ei, y, CW, jr, Tc); #c1(PIK3CG) c2(XP_011514619) c3(phosphatidylinositol 4,5-bisphosphate 3-kinase catalytic subunit gamma isoform isoform X3) c4( ) c5(307308) c6( ) c7(oO, gh, T, bM, aC, fR, YU, ea, if, e, al, fd, bB, lR, ci, Qp, ajC, ip, x, bv, xE, aE, ata, Fo, pX, ja, K, qM, hu, MO, pk, eL, cp, Qe, cre, xQ, eG, yo, aW, Ls, hl, PQ, brr, Ku, g, hJ, aKj, as, aoS, GR, eF, Qt, cm, qJ, QA, iP, eM, nB, iA, iT, mx, U, cj, Qw, k, m, ik, iu, dD, Or, aw, ht, qy, n, aj, aKt, fr, PY, qN, PR, cd, br, ai, biS, eW, ft, jz, hw, TK, gd, kH, h, eV, By, dL, ey, ox, apG, dx, crc, MD, AQ, ge, aiL, crb, aq, kp, Og, pm, Ld, Ye, iO, aKA, W, cA, bP, dB, Vy, bo, hL, hR, pg, qF, art, anx, it, B, bL, fM, Dh, fG, jx, eX, aA, cz, v, j, yO, C, crd, bX, Qo, pd, lu, q, J, qH, zn, er, eA, eJ, mj, aHy, lg, hW, nv, Qg, BJ, aT, cy, dz, Fx, rz, ae, af, jf, Qr, nO, iU, oV, Y, r, bw, lo, en, cl, LV, t, iK, pb, bN, ck, Ta, sS, nM, kP, ac, iM, au, adR, mf, afW, fD, bt, rA, kG, LS, VB, hS, Kd, hl, kh, id, ow, jh, aHv, dG, eq, hF, iJ, ad, dP, av, iC, hd, ib, py, ds, hD, bj, bkw, ji, lQ, fb, nJ, NM, Yi, PM, d, je, ff, eH, Of, cr, eZ, dN, aeV, aF, iR, bz, dr, eK, Hp, LB, es, gk, crg, Ew, bE, X, gZ, ei, y, CW, jr, Tc); #c1(PIK3IP1) c2(NP_001129383) c3(phosphoinositide-3-kinase-interacting protein 1 isoform 2 precursor) c4(51406) c5(51407, 51408, 51409, 51410, 51411) c6( ) c7(ft); #c1(PIK3IP1) c2(NP_443112) c3(phosphoinositide-3-kinase-interacting protein 1 isoform 1 precursor) c4(229469, 229470, 229471, 229472) c5(229473, 229474, 229475, 229476, 229477, 229478, 229479, 229480, 229481, 229482, 229483, 229484, 229485, 229486, 229487, 229488, 229489, 229490, 229491, 229492, 229493, 229494, 229495, 229496, 229497) c6( ) c7(ft); #c1(PIK3R1) c2(NP_001229395) c3(phosphatidylinositol 3-kinase regulatory subunit alpha isoform 4) c4( ) c5(84353, 84354, 84355, 84356, 84357, 84358, 84359, 84360, 84361, 84362) c6( ) c7(bL, T, aC, id, eR, aZ, uG, eX, cz, bB, Gd, aj, dG, v, ci, fd, zP, eA, J, ad, oT, anA, LL, ata, aT, h, lG, cy, dL, eV, anz, ji, bq, pk, ae, af, eL, kI, zQ, d, B, Jl, aW, aq, kp, crh, cl, t, bz, GR, fq, asE, Ye, ck, ac, cA, eM, bE, hL, uz, ei, X); #c1(PIK3R1) c2(NP_852556) c3(phosphatidylinositol 3-kinase regulatory subunit alpha isoform 2) c4(255040) c5(255041, 255042, 255043, 255044, 255045, 255046) c6( ) c7(bL, T, aC, id, eR, aZ, uG, eX, cz, bB, Gd, aj, dG, v, ci, fd, zP, eA, J, ad, oT, anA, LL, ata, aT, h, lG, cy, dL, eV, anz, ji, bq, pk, ae, af, eL, kI, zQ, d, B, Jl, aW, aq, kp, crh, cl, t, bz, GR, fq, asE, Ye, ck, ac, cA, eM, bE, hL, uz, ei, X); #c1(PIK3R1) c2(NP_852664) c3(phosphatidylinositol 3-kinase regulatory subunit alpha isoform 1) c4(255080, 255081) c5(255082, 255083, 255084, 255085, 255086, 255087, 255088, 255089, 255090, 255091, 255092, 255093, 255094, 255095, 255096, 255097, 255098, 255099, 255100, 255101) c6( ) c7(bL, T, aC, id, eR, aZ, uG, eX, cz, bB, Gd, aj, dG, v, ci, fd, zP, eA, J, ad, oT, anA, LL, ata, aT, h, lG, cy, dL, eV, anz, ji, bq, pk, ae, af, eL, kI, zQ, d, B, Jl, aW, aq, kp, crh, cl, t, bz, GR, fq, asE, Ye, ck, ac, cA, eM, bE, hL, uz, ei, X); #c1(PIK3R1) c2(NP_852665) c3(phosphatidylinositol 3-kinase regulatory subunit alpha isoform 3) c4(255102) c5(255103, 255104, 255105, 255106, 255107, 255108, 255109, 255110) c6( ) c7(bL, T, aC, id, eR, aZ, uG, eX, cz, bB, Gd, aj, dG, v, ci, fd, zP, eA, J, ad, oT, anA, LL, ata, aT, h, lG, cy, dL, eV, anz, ji, bq, pk, ae, af, eL, kI, zQ, d, B, Jl, aW, aq, kp, crh, cl, t, bz, GR, fq, asE, Ye, ck, ac, cA, eM, bE, hL, uz, ei, X); #c1(PIK3R1) c2(XP_011541795) c3(phosphatidylinositol 3-kinase regulatory subunit alpha isoform X2) c4(340389, 340390) c5( ) c6( ) c7(bL, T, aC, id, eR, aZ, uG, eX, cz, bB, Gd, aj, dG, v, ci, fd, zP, eA, J, ad, oT, anA, LL, ata, aT, h, lG, cy, dL, eV, anz, ji, bq, pk, ae, af, eL, kI, zQ, d, B, Jl, aW, aq, kp, crh, cl, t, bz, GR, fq, asE, Ye, ck, ac, cA, eM, bE, hL, uz, ei, X); #c1(PIK3R2) c2(NP_005018) c3(phosphatidylinositol 3-kinase regulatory subunit beta) c4(152211) c5(152212, 152213, 152214, 152215, 152216, 152217) c6( ) c7(T, PM, oT, cA, eM, bE, aW, aZ, hL, aT, fd, aq, m, ei, cl, eA, t, B); #c1(PIK3R3) c2(NP_001290356) c3(phosphatidylinositol 3-kinase regulatory subunit gamma isoform 2) c4(115285) c5(115286, 115287, 115288, 115289, 115290, 115291) c6( ) c7(ck, T, y, F, xE, bP, A, dV, h, cy, uQ, eK, H, bt, bz, eA, amW, ad, L); #c1(PIK3R3) c2(NP_001290357) c3(phosphatidylinositol 3-kinase regulatory subunit gamma isoform 3) c4( ) c5(115292, 115293, 115294) c6( ) c7(ck, T, y, F, xE, bP, A, dV, h, cy, uQ, eK, H, bt, bz, eA, amW, ad, L); #c1(PIK3R3) c2(NP_001290358) c3(phosphatidylinositol 3-kinase regulatory subunit gamma isoform 4) c4(115295, 115296) c5(115297, 115298, 115299, 115300, 115301, 115302, 115303, 115304, 115305, 115306, 115307, 115308, 115309, 115310, 115311, 115312, 115313, 115314, 115315, 115316, 115317, 115318) c6( ) c7(ck, T, y, F, xE, bP, A, dV, h, cy, uQ, eK, H, bt, bz, eA, amW, ad, L); #c1(PIK3R4) c2(NP_055417) c3(phosphoinositide 3-kinase regulatory subunit 4) c4(181029) c5(181030, 181031, 181032, 181033, 181034, 181035) c6( ) c7(XC, aiW, Lq, pl, m, ps); #c1(PIK3R5) c2(NP_055123) c3(phosphoinositide 3-kinase regulatory subunit 5 isoform 1) c4(179087) c5(179088, 179089, 179090, 179091, 179092, 179093, 179094, 179095, 179096, 179097) c6( ) c7(T, cri, KA, h, ci, KF); #c1(PIKFYVE) c2(NP_001171471) c3(1-phosphatidylinositol 3-phosphate 5-kinase isoform 4) c4( ) c5(70227, 70228, 70229, 70230, 70231, 70232) c6( ) c7(btQ, T, id, W); #c1(PIKFYVE) c2(NP_055855) c3(1-phosphatidylinositol 3-phosphate 5-kinase isoform 2) c4(183934, 183935) c5(183936, 183937, 183938, 183939, 183940, 183941) c6( ) c7(btQ, T, id, W); #c1(PIKFYVE) c2(NP_689884) c3(1-phosphatidylinositol 3-phosphate 5-kinase isoform 3) c4(244246) c5(244247, 244248, 244249, 244250, 244251, 244252) c6( ) c7(btQ, T, id, W); #c1(PIKFYVE) c2(XP_011509086) c3(1-phosphatidylinositol 3-phosphate 5-kinase isoform X6) c4(299678) c5(299679, 299680, 299681, 299682, 299683, 299684) c6( ) c7(btQ, T, id, W); #c1(PILRA) c2(NP_038467) c3(paired immunoglobulin-like type 2 receptor alpha isoform 1 precursor) c4(176570, 176571) c5(176572, 176573, 176574, 176575, 176576, 176577) c6( ) c7(W, fR); #c1(PILRA) c2(NP_840056) c3(paired immunoglobulin-like type 2 receptor alpha isoform 2 precursor) c4(253593, 253594) c5(253595, 253596, 253597, 253598, 253599, 253600, 253601, 253602, 253603, 253604, 253605, 253606) c6( ) c7(W, fR); #c1(PILRA) c2(NP_840057) c3(paired immunoglobulin-like type 2 receptor alpha isoform 3 precursor) c4(253607) c5(253608, 253609, 253610, 253611, 253612, 253613) c6( ) c7(W, fR); #c1(PIM1) c2(NP_001230115) c3(serine/threonine-protein kinase pim-1 isoform 1) c4(85950) c5(85951) c6( ) c7(lD, T, am, fM, eX, jh, aA, fd, n, aj, ci, sl, cd, J, ad, x, av, cc, aE, bQV, kH, aT, cy, h, dL, eV, ae, N, ly, crj, xX, d, bZZ, aW, fJ, ff, hl, kp, aF, uF, en, hf, g, iK, bz, LS, lx, Cv, ck, eM, bE, cj, at, pg, k, bt, it, jr); #c1(PIM1) c2(NP_002639) c3(serine/threonine-protein kinase pim-1 isoform 2) c4( ) c5(130639, 130640, 130641, 130642, 130643) c6( ) c7(lD, T, am, fM, eX, jh, aA, fd, n, aj, ci, sl, cd, J, ad, x, av, cc, aE, bQV, kH, aT, cy, h, dL, eV, ae, N, ly, crj, xX, d, bZZ, aW, fJ, ff, hl, kp, aF, uF, en, hf, g, iK, bz, LS, lx, Cv, ck, eM, bE, cj, at, pg, k, bt, it, jr); #c1(PIM2) c2(NP_006866) c3(serine/threonine-protein kinase pim-2) c4(168724, 168725) c5(168726, 168727, 168728, 168729, 168730, 168731, 168732, 168733, 168734, 168735, 168736, 168737) c6( ) c7(ck, ae, T, gk, fM, al, jh, cj, fd, n, jj, hF, bt, kS, B, ad); #c1(PIM3) c2(NP_001001852) c3(serine/threonine-protein kinase pim-3) c4(19041) c5(19042, 19043, 19044, 19045, 19046, 19047) c6( ) c7(ck, T, aC, d, eJ, s, aE, bE, cj, bB, aq, at, kp, g, mF, bt, B); #c1(PIN1) c2(NP_006212) c3(peptidyl-prolyl cis-trans isomerase NIMA-interacting 1) c4(162955, 162956, 162957) c5(162958, 162959, 162960, 162961, 162962, 162963, 162964, 162965, 162966, 162967, 162968, 162969, 162970, 162971, 162972, 162973, 162974, 162975) c6( ) c7(bM, T, AS, Ol, fG, if, cpJ, jh, n, hy, v, fr, ci, fu, qN, cd, ad, eA, hX, Hx, py, MR, WY, sO, qK, aT, h, dL, K, jj, an, ae, af, qw, d, aW, oV, vj, fc, Du, ff, akB, aaE, en, cm, iK, bz, ck, es, bb, c, nB, eM, iA, U, at, mf, np, cP, fD, y, bt, it, B); #c1(PIN4) c2(NP_001164218) c3(peptidyl-prolyl cis-trans isomerase NIMA-interacting 4 isoform 2) c4(66815) c5(66816, 66817, 66818, 66819, 66820, 66821) c6( ) c7(mf); #c1(PIN4) c2(NP_006214) c3(peptidyl-prolyl cis-trans isomerase NIMA-interacting 4 isoform 1) c4(162976) c5(162977, 162978, 162979, 162980, 162981, 162982) c6( ) c7(mf); #c1(PINX1) c2(NP_001271285) c3(PIN2/TERF1-interacting telomerase inhibitor 1 isoform 2) c4(103834, 103835) c5(103836, 103837, 103838, 103839, 103840, 103841, 103842, 103843, 103844, 103845, 103846, 103847) c6( ) c7(XX, iO, T, jf, id, aW, ff, eH, jh, aA, aT, aq, aF, ci, en, eF, B, hX); #c1(PINX1) c2(NP_060354) c3(PIN2/TERF1-interacting telomerase inhibitor 1 isoform 1) c4(195564) c5(195565, 195566, 195567, 195568, 195569, 195570) c6( ) c7(XX, iO, T, jf, id, aW, ff, eH, jh, aA, aT, aq, aF, ci, en, eF, B, hX); #c1(PIP) c2(NP_002643) c3(prolactin-inducible protein precursor) c4(130664) c5(130665, 130666, 130667, 130668, 130669, 130670) c6( ) c7(T, KW, bB, Fb, zF, ci, nA, fr, atN, ai, ad, aT, rX, DO, K, aDZ, ae, crk, avg, aW, Ue, zD, Pp, g, atM, dB, bE, PI, zB); #c1(PIP4K2A) c2(NP_005019) c3(phosphatidylinositol 5-phosphate 4-kinase type-2 alpha) c4(152218, 152219, 152220, 152221, 152222, 152223) c5(152224, 152225, 152226, 152227, 152228, 152229, 152230, 152231, 152232, 152233, 152234, 152235) c6( ) c7(x, mU, ac, mW, Y, jb, mZ, mS, sv, mY, he, k, bK, mV, mT, ad, mX); #c1(PIP4K2A) c2(XP_011517797) c3(phosphatidylinositol 5-phosphate 4-kinase type-2 alpha isoform X2) c4( ) c5(311701, 311702, 311703, 311704, 311705, 311706, 311707) c6( ) c7(x, mU, ac, mW, Y, jb, mZ, mS, sv, mY, he, k, bK, mV, mT, ad, mX); #c1(PIP4K2A) c2(XP_011517798) c3(phosphatidylinositol 5-phosphate 4-kinase type-2 alpha isoform X4) c4( ) c5(311708, 311709, 311710, 311711, 311712, 311713, 311714, 311715, 311716, 311717, 311718) c6( ) c7(x, mU, ac, mW, Y, jb, mZ, mS, sv, mY, he, k, bK, mV, mT, ad, mX); #c1(PIP4K2A) c2(XP_011517799) c3(phosphatidylinositol 5-phosphate 4-kinase type-2 alpha isoform X5) c4( ) c5(311719, 311720, 311721, 311722, 311723, 311724) c6( ) c7(x, mU, ac, mW, Y, jb, mZ, mS, sv, mY, he, k, bK, mV, mT, ad, mX); #c1(PIP4K2B) c2(NP_003550) c3(phosphatidylinositol 5-phosphate 4-kinase type-2 beta) c4(139023, 139024) c5(139025, 139026, 139027, 139028, 139029, 139030, 139031, 139032, 139033, 139034, 139035, 139036) c6( ) c7(af, aT); #c1(PIP4K2C) c2(NP_001139731) c3(phosphatidylinositol 5-phosphate 4-kinase type-2 gamma isoform b) c4(59775) c5(59776, 59777, 59778, 59779, 59780, 59781) c6( ) c7(y, A); #c1(PIP4K2C) c2(NP_001139732) c3(phosphatidylinositol 5-phosphate 4-kinase type-2 gamma isoform c) c4(59782) c5(59783, 59784, 59785, 59786, 59787, 59788) c6( ) c7(y, A); #c1(PIP4K2C) c2(NP_079055) c3(phosphatidylinositol 5-phosphate 4-kinase type-2 gamma isoform a) c4(216770, 216771) c5(216772, 216773, 216774, 216775, 216776, 216777, 216778, 216779, 216780, 216781, 216782, 216783, 216784, 216785, 216786, 216787) c6( ) c7(y, A); #c1(PIP5K1A) c2(NP_001129108) c3(phosphatidylinositol 4-phosphate 5-kinase type-1 alpha isoform 3) c4(50778) c5(50779, 50780, 50781, 50782, 50783, 50784) c6( ) c7(aW, aT); #c1(PIP5K1A) c2(NP_001129109) c3(phosphatidylinositol 4-phosphate 5-kinase type-1 alpha isoform 4) c4(50785) c5(50786, 50787, 50788, 50789, 50790, 50791) c6( ) c7(aW, aT); #c1(PIP5K1A) c2(NP_001129110) c3(phosphatidylinositol 4-phosphate 5-kinase type-1 alpha isoform 1) c4(50792) c5(50793, 50794, 50795, 50796, 50797, 50798) c6( ) c7(aW, aT); #c1(PIP5K1A) c2(NP_003548) c3(phosphatidylinositol 4-phosphate 5-kinase type-1 alpha isoform 2) c4(139016) c5(139017, 139018, 139019, 139020, 139021, 139022) c6( ) c7(aW, aT); #c1(PIP5K1A) c2(XP_005245588) c3(phosphatidylinositol 4-phosphate 5-kinase type-1 alpha isoform X14) c4(266760) c5(266761, 266762, 266763, 266764, 266765, 266766) c6( ) c7(aW, aT); #c1(PIP5K1A) c2(XP_011508349) c3(phosphatidylinositol 4-phosphate 5-kinase type-1 alpha isoform X17) c4(299038, 299039) c5(299040, 299041, 299042, 299043, 299044, 299045, 299046, 299047, 299048, 299049, 299050, 299051) c6( ) c7(aW, aT); #c1(PIP5K1B) c2(XP_006717364) c3(phosphatidylinositol 4-phosphate 5-kinase type-1 beta isoform X2) c4(290979, 290980) c5(290981, 290982, 290983, 290984, 290985, 290986, 290987, 290988, 290989, 290990, 290991, 290992, 290993, 290994, 290995, 290996, 290997, 290998, 290999, 291000, 291001, 291002, 291003, 291004, 291005, 291006, 291007, 291008, 291009, 291010) c6( ) c7(bM, eR, dy, aE); #c1(PIP5K1B) c2(XP_011517387) c3(phosphatidylinositol 4-phosphate 5-kinase type-1 beta isoform X1) c4(311100, 311101, 311102, 311103) c5(311104, 311105, 311106, 311107, 311108, 311109, 311110, 311111, 311112, 311113) c6( ) c7(bM, eR, dy, aE); #c1(PIP5K1C) c2(NP_001182662) c3(phosphatidylinositol 4-phosphate 5-kinase type-1 gamma isoform 1) c4(75141) c5(75142, 75143, 75144, 75145, 75146) c6( ) c7(crl); #c1(PIP5K1C) c2(NP_036530) c3(phosphatidylinositol 4-phosphate 5-kinase type-1 gamma isoform 2) c4(174264) c5(174265, 174266, 174267, 174268, 174269, 174270) c6( ) c7(crl); #c1(PIP5K1C) c2(XP_011526149) c3(phosphatidylinositol 4-phosphate 5-kinase type-1 gamma isoform X3) c4(320413) c5(320414, 320415, 320416, 320417, 320418, 320419, 320420) c6( ) c7(crl); #c1(PIP5KL1) c2(NP_001128691) c3(phosphatidylinositol 4-phosphate 5-kinase-like protein 1 isoform 1) c4(50545, 50546) c5(50547, 50548, 50549, 50550, 50551, 50552, 50553) c6( ) c7(T); #c1(PIP5KL1) c2(NP_775763) c3(phosphatidylinositol 4-phosphate 5-kinase-like protein 1 isoform 2) c4( ) c5(250217, 250218, 250219, 250220, 250221) c6( ) c7(T); #c1(PIPOX) c2(NP_057602) c3(peroxisomal sarcosine oxidase) c4(191572, 191573) c5(191574, 191575, 191576, 191577, 191578, 191579, 191580, 191581, 191582, 191583, 191584, 191585) c6( ) c7(aW, cr, aT, mE, al, ad); #c1(PIR) c2(NP_003653) c3(pirin) c4(139984) c5(139985, 139986, 139987, 139988, 139989, 139990, 139991, 139992, 139993, 139994) c6( ) c7(LB, aT, fe, ji, jj, y, bt, kS); #c1(PISD) c2(XP_005261512) c3(phosphatidylserine decarboxylase proenzyme isoform X2) c4(277403, 277404) c5(277405, 277406, 277407, 277408, 277409, 277410, 277411, 277412, 277413, 277414, 277415, 277416) c6( ) c7(iQ, rz, bO, Ko, iV, he, bN); #c1(PISD) c2(XP_005261517) c3(phosphatidylserine decarboxylase proenzyme isoform X1) c4(277417, 277418, 277419, 277420, 277421, 277422) c5(277423, 277424, 277425, 277426, 277427, 277428, 277429, 277430, 277431, 277432, 277433, 277434, 277435, 277436, 277437, 277438, 277439, 277440, 277441, 277442, 277443, 277444, 277445, 277446, 277447, 277448, 277449, 277450, 277451, 277452, 277453, 277454, 277455, 277456, 277457, 277458, 277459, 277460, 277461, 277462, 277463, 277464, 277465, 277466) c6( ) c7(iQ, rz, bO, Ko, iV, he, bN); #c1(PITPNA) c2(NP_006215) c3(phosphatidylinositol transfer protein alpha isoform) c4(162983, 162984, 162985) c5(162986, 162987, 162988, 162989, 162990, 162991, 162992, 162993, 162994, 162995, 162996, 162997, 162998) c6( ) c7(fi); #c1(PITPNA) c2(XP_011522242) c3(phosphatidylinositol transfer protein alpha isoform isoform X2) c4( ) c5(316877, 316878, 316879, 316880, 316881) c6( ) c7(fi); #c1(PITPNM1) c2(NP_001124320) c3(membrane-associated phosphatidylinositol transfer protein 1 isoform b) c4(48660) c5(48661, 48662, 48663, 48664, 48665, 48666) c6( ) c7(nw); #c1(PITPNM1) c2(NP_004901) c3(membrane-associated phosphatidylinositol transfer protein 1 isoform a) c4(150645) c5(150646, 150647, 150648, 150649, 150650, 150651, 150652, 150653, 150654, 150655) c6( ) c7(nw); #c1(PITPNM3) c2(NP_001159438) c3(membrane-associated phosphatidylinositol transfer protein 3 isoform 2) c4(64044) c5(64045, 64046, 64047, 64048, 64049, 64050) c6( ) c7(bGe, lR, aW, nx, aT, nw, bfR, nC); #c1(PITPNM3) c2(NP_112497) c3(membrane-associated phosphatidylinositol transfer protein 3 isoform 1) c4(221180) c5(221181, 221182, 221183, 221184, 221185, 221186) c6( ) c7(bGe, lR, aW, nx, aT, nw, bfR, nC); #c1(PITRM1) c2(NP_001229236) c3(presequence protease, mitochondrial isoform 1 precursor) c4(84002) c5(84003, 84004, 84005, 84006, 84007, 84008) c6( ) c7(ac, btY, aoj, dy, alv, fq); #c1(PITRM1) c2(NP_001229238) c3(presequence protease, mitochondrial isoform 3 precursor) c4(84009, 84010, 84011) c5(84012, 84013, 84014, 84015, 84016, 84017, 84018, 84019, 84020, 84021, 84022, 84023) c6( ) c7(ac, btY, aoj, dy, alv, fq); #c1(PITRM1) c2(NP_055704) c3(presequence protease, mitochondrial isoform 2 precursor) c4(182924, 182925, 182926, 182927) c5(182928, 182929, 182930, 182931, 182932, 182933, 182934, 182935, 182936, 182937, 182938, 182939, 182940, 182941, 182942, 182943, 182944, 182945, 182946, 182947, 182948, 182949, 182950, 182951) c6( ) c7(ac, btY, aoj, dy, alv, fq); #c1(PITRM1) c2(XP_006717425) c3(presequence protease, mitochondrial isoform X3) c4(291070) c5(291071, 291072, 291073, 291074, 291075, 291076, 291077, 291078, 291079, 291080, 291081, 291082) c6( ) c7(ac, btY, aoj, dy, alv, fq); #c1(PITX1) c2(NP_002644) c3(pituitary homeobox 1) c4(130671, 130672, 130673) c5(130674, 130675, 130676, 130677, 130678, 130679, 130680, 130681, 130682, 130683, 130684, 130685, 130686, 130687, 130688, 130689, 130690, 130691, 130692, 130693, 130694, 130695, 130696) c6( ) c7(T, hl, pf, jx, crm, aA, fr, eA, ad, XW, ds, aT, hl, brQ, ae, Yi, ye, aKb, s, aW, Xg, g, as, iV, cm, bz, Ym, atb, bN, aDQ, Ld, iQ, crn, hR, rx, aDR, B); #c1(PITX2) c2(NP_000316) c3(pituitary homeobox 2 isoform c) c4(6998) c5(6999, 7000, 7001, 7002, 7003, 7004, 7005) c6( ) c7(T, BC, BD, mr, lT, wL, e, aw, bbH, cz, fd, n, crp, aLn, afv, aml, aSL, hF, q, cd, ad, cro, hd, anA, any, bki, aT, dL, K, anz, an, rz, ae, eL, Lu, yo, s, aW, oV, xs, Az, r, atf, aq, ir, pT, dw, Vk, cM, t, dr, ck, es, bF, OG, ac, eM, nB, iA, PV, np, m, bkE, bD, gT, it, B); #c1(PITX2) c2(NP_700475) c3(pituitary homeobox 2 isoform b) c4(245937, 245938) c5(245939, 245940, 245941, 245942, 245943, 245944, 245945, 245946, 245947, 245948, 245949, 245950, 245951, 245952, 245953, 245954) c6( ) c7(T, BC, BD, mr, lT, wL, e, aw, bbH, cz, fd, n, crp, aLn, afv, aml, aSL, hF, q, cd, ad, cro, hd, anA, any, bki, aT, dL, K, anz, an, rz, ae, eL, Lu, yo, s, aW, oV, xs, Az, r, atf, aq, ir, pT, dw, Vk, cM, t, dr, ck, es, bF, OG, ac, eM, nB, iA, PV, np, m, bkE, bD, gT, it, B); #c1(PITX2) c2(NP_700476) c3(pituitary homeobox 2 isoform a) c4(245955, 245956) c5(245957, 245958, 245959, 245960, 245961, 245962, 245963, 245964, 245965, 245966, 245967, 245968) c6( ) c7(T, BC, BD, mr, IT, wL, e, aw, bbH, cz, fd, n, crp, aLn, afv, aml, aSL, hF, q, cd, ad, cro, hd, anA, any, bki, aT, dL, K, anz, an, rz, ae, eL, Lu, yo, s, aW, oV, xs, Az, r, atf, aq, ir, pT, dw, Vk, cM, t, dr, ck, es, bF, OG, ac, eM, nB, iA, PV, np, m, bkE, bD, gT, it, B); #c1(PITX3) c2(NP_005020) c3(pituitary homeobox 3) c4( ) c5(152236, 152237, 152238, 152239, 152240, 152241, 152242, 152243) c6( ) c7(T, dD, ea, crq, v, eq, aBI, aSL, eA, asY, K, an, rz, af, hm, qE, yo, kj, aQp, aiV, kT, au, at, wR, bas, y, bLi, ao); #c1(PITX3) c2(XP_011538167) c3(pituitary homeobox 3 isoform X1) c4(335799) c5(335800, 335801, 335802) c6( ) c7(T, dD, ea, crq, v, eq, aBI, aSL, eA, asY, K, an, rz, af, hm, qE, yo, kj, aQp, aiV, kT, au, at, wR, bas, y, bLi, ao); #c1(PIWIL1) c2(NP_001177900) c3(piwi-like protein 1 isoform 2) c4(73122, 73123, 73124) c5( ) c6( ) c7(T, gU, wu, aA, fr, ci, eJ, q, hX, aT, vH, wm, B, ND, aW, r, aF, t, bz, es, m, lB, ne); #c1(PIWIL1) c2(XP_005253689) c3(piwi-like protein 1 isoform X2) c4(272623) c5(272624, 272625, 272626, 272627, 272628, 272629) c6( ) c7(T, gU, wu, aA, fr, ci, eJ, q, hX, aT, vH, wm, B, ND, aW, r, aF, t, bz, es, m, lB, ne); #c1(PIWIL1) c2(XP_011544923) c3(piwi-like protein 1 isoform X3) c4(343883) c5(343884, 343885, 343886, 343887, 343888, 343889, 343890, 343891, 343892, 343893, 343894, 343895, 343896, 343897, 343898, 343899, 343900, 343901, 343902, 343903, 343904, 343905, 343906, 343907) c6( ) c7(T, gU, wu, aA, fr, ci, eJ, q, hX, aT, vH, wm, B, ND, aW, r, aF, t, bz, es, m, lB, ne); #c1(PIWIL2) c2(NP_001129193) c3(piwi-like protein 2) c4(51127) c5(51128, 51129, 51130, 51131, 51132, 51133, 51134, 51135, 51136, 51137) c6( ) c7(T, gU, ND, aW, if, hL, aT, vH, hQ, dL, ci, bu, eL, cL); #c1(PIWIL3) c2(NP_001008496) c3(piwi-like protein 3 isoform 1) c4(23266) c5(23267, 23268, 23269, 23270, 23271, 23272) c6( ) c7(vH, ND); #c1(PIWIL4) c2(NP_689644) c3(piwi-like protein 4) c4(243411) c5(243412, 243413, 243414, 243415, 243416, 243417) c6( ) c7(T, ND, wu, if, vH, wm, qN, B); #c1(PJA1) c2(NP_071763) c3(E3 ubiquitin-protein ligase Praja-1 isoform c) c4(211998) c5(211999, 212000, 212001, 212002, 212003, 212004) c6( ) c7(nf, dY, bjz); #c1(PJA1) c2(NP_660095) c3(E3 ubiquitin-protein ligase Praja-1 isoform a) c4(240356, 240357, 240358) c5(240359, 240360, 240361, 240362, 240363, 240364, 240365, 240366, 240367, 240368, 240369, 240370, 240371, 240372, 240373, 240374, 240375, 240376, 240377, 240378, 240379, 240380) c6( ) c7(nf, dY, bjz); #c1(PJA2) c2(NP_055634) c3(E3 ubiquitin-protein ligase Praja-2) c4(182407) c5(182408, 182409, 182410, 182411, 182412, 182413, 182414, 182415, 182416, 182417) c6( ) c7(T, hd, nM, nB); #c1(PKD1) c2(NP_000287) c3(polycystin-1 isoform 2 precursor) c4(6467) c5(6468, 6469, 6470, 6471, 6472, 6473, 6474) c6( ) c7(bL, T, hI, vI, eR, arS, aw, aA, cz, im, aj, v, fo, ci, Vz, fI, aY, cd, J, ad, aDF, aE, Ig, Db, ds, arV, aT, rX, crs, us, K, Nj, aDZ, Xh, on, ae, d, aW, Ls, eH, dq, crr, aF, eF, axp, cru, dr, crv, qe, crt, wB, fP, uo, lO, aS, dy, ER, ei, bD, y, BV, jr); #c1(PKD1) c2(NP_001009944) c3(polycystin-1 isoform 1 precursor) c4(23769) c5(23770, 23771, 23772, 23773, 23774, 23775) c6( ) c7(bL, T, hI, vI, eR, arS, aw, aA, cz, im, aj, v, fo, ci, Vz, fI, aY, cd, J, ad, aDF, aE, Ig, Db, ds, arV, aT, rX, crs, us, K, Nj, aDZ, Xh, on, ae, d, aW, Ls, eH, dq, crr, aF, eF, axp, cru, dr, crv, qe, crt, wB, fP, uo, lQ, aS, dy, ER, ei, bD, y, BV, jr); #c1(PKD1) c2(XP_005255427) c3(polycystin-1 isoform X14) c4( ) c5(273638, 273639, 273640, 273641, 273642, 273643, 273644) c6( ) c7(bL, T, hI, vI, eR, arS, aw, aA, cz, im, aj, v, fo, ci, Vz, fI, aY, cd, J, ad, aDF, aE, Ig, Db, ds, arV, aT, rX, crs, us, K, Nj, aDZ, Xh, on, ae, d, aW, Ls, eH, dq, crr, aF, eF, axp, cru, dr, crv, qe, crt, wB, fP, uo, lQ, aS, dy, ER, ei, bD, y, BV, jr); #c1(PKD1) c2(XP_011520827) c3(polycystin-1 isoform X1) c4( ) c5(315817, 315818, 315819) c6( ) c7(bL, T, hI, vI, eR, arS, aw, aA, cz, im, aj, v, fo, ci, Vz, fI, aY, cd, J, ad, aDF, aE, Ig, Db, ds, arV, aT, rX, crs, us, K, Nj, aDZ, Xh, on, ae, d, aW, Ls, eH, dq, crr, aF, eF, axp, cru, dr, crv, qe, crt, wB, fP, uo, lQ, aS, dy, ER, ei, bD, y, BV, jr); #c1(PKD1) c2(XP_011520828) c3(polycystin-1 isoform X2) c4( ) c5(315820, 315821) c6( ) c7(bL, T, hI, vI, eR, arS, aw, aA, cz, im, aj, v, fo, ci, Vz, fI, aY, cd, J, ad, aDF, aE, Ig, Db, ds, arV, aT, rX, crs, us, K, Nj, aDZ, Xh, on, ae, d, aW, Ls, eH, dq, crr, aF, eF, axp, cru, dr, crv, qe, crt, wB, fP, uo, lQ, aS, dy, ER, ei, bD, y, BV, jr); #c1(PKD1) c2(XP_011520831) c3(polycystin-1 isoform X5) c4( ) c5(315822, 315823, 315824, 315825, 315826, 315827) c6( ) c7(bL, T, hI, vI, eR, arS, aw, aA, cz, im, aj, v, fo, ci, Vz, fI, aY, cd, J, ad, aDF, aE, Ig, Db, ds, arV, aT, rX, crs, us, K, Nj, aDZ, Xh, on, ae, d, aW, Ls, eH, dq, crr, aF, eF, axp, cru, dr, crv, qe, crt, wB, fP, uo, lQ, aS, dy, ER, ei, bD, y, BV, jr); #c1(PKD1) c2(XP_011520839) c3(polycystin-1 isoform X13) c4(315828, 315829, 315830) c5( ) c6( ) c7(bL, T, hI, vI, eR, arS, aw, aA, cz, im, aj, v, fo, ci, Vz, fI, aY, cd, J, ad, aDF, aE, Ig, Db, ds, arV, aT, rX, crs, us, K, Nj, aDZ, Xh, on, ae, d, aW, Ls, eH, dq, crr, aF, eF, axp, cru, dr, crv, qe, crt, wB, fP, uo, lQ, aS, dy, ER, ei, bD, y, BV, jr); #c1(PKD1L1) c2(NP_612152) c3(polycystic kidney disease protein 1-like 1) c4(236093) c5(236094, 236095, 236096, 236097, 236098, 236099) c6( ) c7(on, AW); #c1(PKD1L1) c2(XP_011513465) c3(polycystic kidney disease protein 1-like 1 isoform X1) c4(305724) c5(305725, 305726, 305727, 305728, 305729, 305730) c6( ) c7(on, AW); #c1(PKD1L2) c2(NP_001070248) c3(polycystic kidney disease protein 1-like 2 isoform c precursor) c4(34630, 34631) c5(34632, 34633, 34634, 34635, 34636, 34637, 34638, 34639, 34640, 34641, 34642, 34643) c6( ) c7(bl, alv, wB, Ak); #c1(PKD1L3) c2(NP_853514) c3(polycystic kidney disease protein 1-like 3 precursor) c4( ) c5(255142) c6( ) c7(alv, wB, ahM); #c1(PKD2) c2(NP_000288) c3(polycystin-2) c4(6475) c5(6476, 6477, 6478, 6479, 6480, 6481) c6( ) c7(eR, arS, bSp, uv, cz, bB, aY, cd, ad, eA, aE, arV, pX, rX, adm, K, Nj, brV, ae, d, lR, iU, ff, Az, Lc, en, dr, crv, iT, bE, mx, gX, adl, U, E, wB, nw, aS, Hb, dy, bD, fy, BV, us); #c1(PKD2) c2(XP_011530331) c3(polycystin-2 isoform X2) c4(326179) c5( ) c6( ) c7(eR, arS, bSp, uv, cz, bB, aY, cd, ad, eA, aE, arV, pX, rX, adm, K, Nj, brV, ae, d, lR, iU, ff, Az, Lc, en, dr, crv, iT, bE, mx, gX, adl, U, E, wB, nw, aS, Hb, dy, bD, fy, BV, us); #c1(PKD2) c2(XP_011530332) c3(polycystin-2 isoform X3) c4( ) c5(326180, 326181, 326182, 326183, 326184, 326185, 326186, 326187, 326188, 326189) c6( ) c7(eR, arS, bSp, uv, cz, bB, aY, cd, ad, eA, aE, arV, pX, rX, adm, K, Nj, brV, ae, d, lR, iU, ff, Az, Lc, en, dr, crv, iT, bE, mx, gX, adl, U, E, wB, nw, aS, Hb, dy, bD, fy, BV, us); #c1(PKD2L1) c2(NP_001240766) c3(polycystic kidney disease 2-like 1 protein isoform 2) c4(88770) c5(88771, 88772, 88773, 88774, 88775, 88776) c6( ) c7(uK, aop, bE, aW, Y, wB, ahM, aT, rX, aA, bB, aF, aor, ci, fd, hE, EB, vk, MG); #c1(PKD2L1) c2(NP_057196) c3(polycystic kidney disease 2-like 1 protein isoform 1) c4(189442) c5(189443, 189444, 189445, 189446, 189447, 189448) c6( ) c7(uK, aop, bE, aW, Y, wB, ahM, aT, rX, aA, bB, aF, aor, ci, fd, hE, EB, vk, MG); #c1(PKD2L1) c2(XP_011538623) c3(polycystic kidney disease 2-like 1 protein isoform X1) c4(336365) c5(336366, 336367, 336368, 336369, 336370, 336371) c6( ) c7(uK, aop, bE, aW, Y, wB, ahM, aT, rX, aA, bB, aF, aor, ci, fd, hE, EB, vk, MG); #c1(PKD2L1) c2(XP_011538624) c3(polycystic kidney disease 2-like 1 protein isoform X2) c4(336372) c5(336373, 336374, 336375, 336376, 336377, 336378) c6( ) c7(uK, aop, bE, aW, Y, wB, ahM, aT, rX, aA, bB, aF, aor, ci, fd, hE, EB, vk, MG); #c1(PKDCC) c2(NP_612379) c3(extracellular tyrosine-protein kinase PKDCC precursor) c4(236313) c5(236314, 236315, 236316, 236317, 236318, 236319) c6( ) c7(Hr, an); #c1(PKDREJ) c2(NP_006062) c3(polycystic kidney disease and receptor for egg jelly-related protein precursor) c4(161561) c5(161562, 161563, 161564, 161565, 161566, 161567) c6( ) c7(wB); #c1(PKHD1) c2(NP_733842) c3(fibrocystin isoform 2 precursor) c4(247233) c5(247234, 247235, 247236, 247237, 247238, 247239, 247240, 247241, 247242, 247243, 247244, 247245) c6( ) c7(blk, crw, c, arV, hl, EQ, r, cz, cd, wB, dy, aY, q, ad); #c1(PKHD1) c2(XP_011512982) c3(fibrocystin isoform X1) c4(304441, 304442) c5(304443, 304444, 304445, 304446, 304447, 304448) c6( ) c7(blk, crw, c, arV, hl, EQ, r, cz, cd, wB, dy, aY, q, ad); #c1(PKHD1) c2(XP_011512991) c3(fibrocystin isoform X10) c4( ) c5(304449) c6( ) c7(blk, crw, c, arV, hl, EQ, r, cz, cd, wB, dy, aY, q, ad); #c1(PKIA) c2(NP_006814) c3(cAMP-dependent protein kinase inhibitor alpha) c4(168325) c5(168326, 168327, 168328, 168329, 168330, 168331, 168332, 168333, 168334, 168335, 168336, 168337, 168338, 168339) c6( ) c7(aw, bK); #c1(PKIB) c2(NP_001257323) c3(cAMP-dependent protein kinase inhibitor beta isoform 2) c4(95144, 95145, 95146) c5(95147, 95148, 95149, 95150, 95151, 95152, 95153, 95154, 95155, 95156, 95157, 95158, 95159, 95160, 95161, 95162, 95163) c6( ) c7(aW, ae, ad, aT); #c1(PKIB) c2(NP_115860) c3(cAMP-dependent protein kinase inhibitor beta isoform 1) c4( ) c5(224355, 224356, 224357, 224358, 224359, 224360, 224361, 224362, 224363, 224364, 224365, 224366, 224367, 224368, 224369, 224370, 224371) c6( ) c7(aW, ae, ad, aT); #c1(PKLR) c2(NP_000289) c3(pyruvate kinase PKLR isoform 1) c4(6482, 6483, 6484) c5( ) c6( ) c7(byD, bL, T, os, Dw, eW, jx, jh, aj, dG, oZ, wy, hF, V, mC, aR, J, ad, qC, av, x, aaF, F, aE, rJ, ds, oW, aT, cU, lG, dV, hn, h, K, bq, ae, af, Rw, d, aW, Y, ff, eH, eZ, pR, lo, aq, VE, S, en, CQ, eF, cm, bz, dS, ck, rR, c, eM, crx, wB, U, cj, rK, k, fL, Cl, B, EB, L); #c1(PKLR) c2(NP_870986) c3(pyruvate kinase PKLR isoform 2) c4(255870) c5(255871, 255872, 255873, 255874, 255875, 255876) c6( ) c7(byD, bL, T, os, Dw, eW, jx, jh, aj, dG, oz, wy, hF, V, mC, aR, J, ad, qC, av, x, aaF, F, aE, rJ, ds, oW, aT, cU, lG, dV, hn, h, K, bq, ae, af, Rw, d, aW, Y, ff, eH, eZ, pR, lo, aq, VE, S, en, CQ, eF, cm, bz, dS, ck, rR, c, eM, crx, wB, U, cj, rK, k, fL, Cl, B, EB, L); #c1(PKLR) c2(XP_005245323) c3(pyruvate kinase PKLR isoform X1) c4( ) c5(266470, 266471, 266472, 266473, 266474, 266475, 266476, 266477, 266478, 266479, 266480, 266481, 266482) c6( ) c7(byD, bL, T, os, Dw, eW, jx, jh, aj, dG, oz, wy, hF, V, mC, aR, J, ad, qC, av, x, aaF, F, aE, rJ, ds, oW, aT, cU, lG, dV, hn, h, K, bq, ae, af, Rw, d, aW, Y, ff, eH, eZ, pR, lo, aq, VE, S, en, CQ, eF, cm, bz, dS, ck, rR, c, eM, crx, wB, U, cj, rK, k, fL, Cl, B, EB, L); #c1(PKLR) c2(XP_011545234) c3(pyruvate kinase PKLR isoform X4) c4( ) c5(344028, 344029, 344030, 344031, 344032) c6( ) c7(byD, bL, T, os, Dw, eW, jx, jh, aj, dG, oZ, wy, hF, V, mC, aR, J, ad, qC, av, x, aaF, F, aE, rJ, ds, oW, aT, cU, lG, dV, hn, h, K, bq, ae, af, Rw, d, aW, Y, ff, eH, eZ, pR, lo, aq, VE, S, en, CQ, eF, cm, bz, dS, ck, rR, c, eM, crx, wB, U, cj, rK, k, fL, Cl, B, EB, L); #c1(PKM) c2(NP_001193725) c3(pyruvate kinase PKM isoform c) c4( ) c5(82499, 82500) c6( ) c7(byD, T, ew, aA, bB, ci, zP, q, eA, av, ft, yt, BJ, aT, K, bA, zQ, d, B, aW, yL, ff, r, fe, aq, aF, S, en, g, t, bz, eM, bE, mf, m, qF, X); #c1(PKM) c2(NP_001193726) c3(pyruvate kinase PKM isoform d) c4(82501) c5(82502, 82503, 82504, 82505, 82506, 82507) c6( ) c7(byD, T, ew, aA, bB, ci, zP, q, eA, av, ft, yt, BJ, aT, K, bA, zQ, d, B, aW, yL, ff, r, fe, aq, aF, S, en, g, t, bz, eM, bE, mf, m, qF, X); #c1(PKM) c2(NP_001193727) c3(pyruvate kinase PKM isoform e) c4(82508) c5(82509, 82510, 82511, 82512, 82513, 82514) c6( ) c7(byD, T, ew, aA, bB, ci, zP, q, eA, av, ft, yt, BJ, aT, K, bA, zQ, d, B, aW, yL, ff, r, fe, aq, aF, S, en, g, t, bz, eM, bE, mf, m, qF, X); #c1(PKM) c2(NP_001193728) c3(pyruvate kinase PKM isoform f) c4( ) c5(82515, 82516, 82517, 82518, 82519, 82520, 82521, 82522) c6( ) c7(byD, T, ew, aA, bB, ci, zP, q, eA, av, ft, yt, BJ, aT, K, bA, zQ, d, B, aW, yL, ff, r, fe, aq, aF, S, en, g, t, bz, eM, bE, mf, m, qF, X); #c1(PKM) c2(NP_002645) c3(pyruvate kinase PKM isoform a) c4( ) c5(130697, 130698, 130699, 130700, 130701) c6( ) c7(byD, T, ew, aA, bB, ci, zP, q, eA, av, ft, yt, BJ, aT, K, bA, zQ, d, B, aW, yL, ff, r, fe, aq, aF, S, en, g, t, bz, eM, bE, mf, m, qF, X); #c1(PKM) c2(NP_872270) c3(pyruvate kinase PKM isoform b) c4( ) c5(255983, 255984, 255985, 255986, 255987, 255988) c6( ) c7(byD, T, ew, aA, bB, ci, zP, q, eA, av, ft, yt, BJ, aT, K, bA, zQ, d, B, aW, yL, ff, r, fe, aq, aF, S, en, g, t, bz, eM, bE, mf, m, qF, X); #c1(PKM) c2(XP_005254500) c3(pyruvate kinase PKM isoform X3) c4( ) c5(273231) c6( ) c7(byD, T, ew, aA, bB, ci, zP, q, eA, av, ft, yt, BJ, aT, K, bA, zQ, d, B, aW, yL, ff, r, fe, aq, aF, S, en, g, t, bz, eM, bE, mf, m, qF, X); #c1(PKM) c2(XP_011519972) c3(pyruvate kinase PKM isoform X4) c4(314827) c5( ) c6( ) c7(byD, T, ew, aA, bB, ci, zP, q, eA, av, ft, yt, BJ, aT, K, bA, zQ, d, B, aW, yL, ff, r, fe, aq, aF, S, en, g, t, bz, eM, bE, mf, m, qF, X); #c1(PKM) c2(XP_011519975) c3(pyruvate kinase PKM isoform X7) c4(314828) c5( ) c6( ) c7(byD, T, ew, aA, bB, ci, zP, q, eA, av, ft, yt, BJ, aT, K, bA, zQ, d, B, aW, yL, ff, r, fe, aq, aF, S, en, g, t, bz, eM, bE, mf, m, qF, X); #c1(PKMYT1) c2(NP_001245379) c3(membrane-associated tyrosine- and threonine-specific cdc2-inhibitory kinase isoform 3) c4(93358) c5(93359, 93360, 93361, 93362, 93363, 93364) c6( ) c7(he, atC, py, Y); #c1(PKMYT1) c2(NP_872629) c3(membrane-associated tyrosine- and threonine-specific cdc2-inhibitory kinase isoform 2) c4(256558, 256559) c5(256560, 256561, 256562, 256563, 256564, 256565, 256566, 256567, 256568, 256569, 256570, 256571) c6( ) c7(he, atC, py, Y); #c1(PKMYT1) c2(XP_011521036) c3(membrane-associated tyrosine- and threonine-specific cdc2-inhibitory kinase isoform X1) c4(315984, 315985, 315986, 315987) c5(315988, 315989, 315990, 315991, 315992, 315993, 315994, 315995, 315996, 315997, 315998, 315999, 316000) c6( ) c7(he, atC, py, Y); #c1(PKMYT1) c2(XP_011521038) c3(membrane-associated tyrosine- and threonine-specific cdc2-inhibitory kinase isoform X2) c4( ) c5(316001, 316002, 316003, 316004, 316005, 316006, 316007, 316008, 316009, 316010, 316011) c6( ) c7(he, atC, py, Y); #c1(PKN1) c2(NP_002732) c3(serine/threonine-protein kinase N1 isoform 2) c4(131521) c5(131522, 131523, 131524, 131525, 131526, 131527) c6( ) c7(T, afa, jh, bB, n, fr, ci, q, ad, hX, bv, hd, ib, aoc, Ot, aT, h, cy, By, hP, K, nJ, ae, d, ZH, s, CN, aW, Y, ff, xs, r, aq, agF, en, cl, g, t, kT, cT, Ew, c, nB, bE, eM, iA, dO, U, hL, nw, aS, m, mf, bnl, B, y); #c1(PKN1) c2(NP_998725) c3(serine/threonine-protein kinase N1 isoform 1) c4(265790) c5(265791, 265792, 265793, 265794, 265795, 265796) c6( ) c7(T, afa, jh, bB, n, fr, ci, q, ad, hX, bv, hd, ib, aoc, Ot, aT, h, cy, By, hP, K, nJ, ae, d, ZH, s, CN, aW, Y, ff, xs, r, aq, agF, en, cl, g, t, kT, cT, Ew, c, nB, bE, eM, iA, dO, U, hL, nw, aS, m, mf, bnl, B, y); #c1(PKN2) c2(XP_011540071) c3(serine/threonine-protein kinase N2 isoform X1) c4( ) c5(338369, 338370, 338371, 338372, 338373, 338374) c6( ) c7(bL, ZH, CN, aoc, qt, aW, aT, aA, h, K, m, t, V, Pr); #c1(PKN2) c2(XP_011540073) c3(serine/threonine-protein kinase N2 isoform X4) c4(338375) c5(338376, 338377, 338378, 338379, 338380, 338381) c6( ) c7(bL, ZH, CN, aoc, qt, aW, aT, aA, h, K, m, t, V, Pr); #c1(PKN2) c2(XP_011540074) c3(serine/threonine-protein kinase N2 isoform X5) c4(338382, 338383) c5(338384, 338385, 338386, 338387, 338388, 338389, 338390, 338391, 338392, 338393, 338394, 338395, 338396, 338397, 338398, 338399, 338400, 338401) c6( ) c7(bL, ZH, CN, aoc, qt, aW, aT, aA, h, K, m, t, V, Pr); #c1(PKN3) c2(NP_037487) c3(serine/threonine-protein kinase N3) c4(175817) c5(175818, 175819, 175820, 175821, 175822, 175823) c6( ) c7(T); #c1(PKN0X1) c2(NP_001273187) c3(homeobox protein PKN0X1 isoform 2) c4(104519) c5(104520, 104521, 104522, 104523, 104524, 104525) c6( ) c7(ck, x, jh, Hn, jy, aj, aaw, cm, K, k, h, f, J); #c1(PKN0X1) c2(NP_004562) c3(homeobox protein PKN0X1 isoform 1) c4(147647, 147648) c5(147649, 147650, 147651, 147652, 147653, 147654, 147655, 147656, 147657, 147658, 147659, 147660, 147661) c6( ) c7(ck, x, jh, Hn, jy, aj, aaw, cm, K, k, h, f, J); #c1(PKN0X2) c2(XP_005271700) c3(homeobox protein PKN0X2 isoform X2) c4(283541) c5(283542, 283543, 283544, 283545, 283546, 283547, 283548, 283549, 283550, 283551, 283552, 283553, 283554, 283555, 283556, 283557) c6( ) c7(dS, lB, FT, ben); #c1(PKN0X2) c2(XP_011541247) c3(homeobox protein PKN0X2 isoform X1) c4(339867, 339868, 339869, 339870, 339871, 339872, 339873) c5(339874, 339875, 339876, 339877, 339878, 339879, 339880, 339881, 339882, 339883, 339884, 339885, 339886) c6( ) c7(dS, lB, FT, ben); #c1(PKN0X2) c2(XP_011541248) c3(homeobox protein PKN0X2 isoform X3) c4( ) c5(339887, 339888, 339889, 339890, 339891, 339892, 339893, 339894, 339895, 339896, 339897, 339898, 339899, 339900, 339901, 339902, 339903, 339904, 339905, 339906, 339907, 339908, 339909, 339910) c6( ) c7(dS, lB, FT, ben); #c1(PKP1) c2(NP_000290) c3(plakophilin-1 isoform 1b) c4(6485) c5(6486, 6487, 6488, 6489, 6490, 6491, 6492, 6493, 6494, 6495) c6( ) c7(bM, T, cc, bjA, pf, biw, ff, gZ, ww, lQ, en, aFJ, fq, B); #c1(PKP1) c2(NP_001005337) c3(plakophilin-1 isoform 1a) c4(21396) c5(21397, 21398, 21399, 21400, 21401, 21402) c6( ) c7(bM, T, cc, bjA, pf, biw, ff, gZ, ww, lQ, en, aFJ, fq, B); #c1(PKP2) c2(NP_001005242) c3(plakophilin-2 isoform 2a) c4(21237) c5(21238, 21239, 21240, 21241, 21242, 21243, 21244) c6( ) c7(cry, cc, QG, wK, cV, rg, gZ, ajM, biv, ci, g); #c1(PKP2) c2(NP_004563) c3(plakophilin-2 isoform 2b) c4(147662, 147663, 147664, 147665, 147666, 147667, 147668, 147669) c5(147670, 147671, 147672, 147673, 147674, 147675, 147676, 147677, 147678, 147679, 147680, 147681, 147682, 147683, 147684, 147685, 147686, 147687, 147688, 147689, 147690, 147691, 147692, 147693, 147694, 147695, 147696, 147697, 147698, 147699, 147700) c6( ) c7(cry, cc, QG, wK, cV, rg, gZ, ajM, biv, ci, g); #c1(PKP3) c2(NP_009114) c3(plakophilin-3 isoform PKP3a) c4(170791) c5(170792, 170793, 170794, 170795, 170796, 170797) c6( ) c7(T, eM, gX, ci, bz, iu, ad); #c1(PKP4) c2(NP_001005476) c3(plakophilin-4 isoform b) c4(21727) c5(21728, 21729, 21730, 21731, 21732, 21733) c6( ) c7(en, agd, ht, ff, Ku); #c1(PKP4) c2(NP_001291900) c3(plakophilin-4 isoform e) c4( ) c5(116505, 116506, 116507, 116508, 116509, 116510) c6( ) c7(en, agd, ht, ff, Ku); #c1(PKP4) c2(NP_003619) c3(plakophilin-4 isoform a) c4(139668) c5(139669, 139670, 139671, 139672, 139673, 139674, 139675) c6( ) c7(en, agd, ht, ff, Ku); #c1(PKP4) c2(XP_011510322) c3(plakophilin-4 isoform X4) c4(300886) c5( ) c6( ) c7(en, agd, ht, ff, Ku); #c1(PKP4) c2(XP_011510323) c3(plakophilin-4 isoform X5) c4(300887) c5( ) c6( ) c7(en, agd, ht, ff, Ku); #c1(PKP4) c2(XP_011510328) c3(plakophilin-4 isoform X9) c4( ) c5(300888, 300889, 300890, 300891, 300892) c6( ) c7(en, agd, ht, ff, Ku); #c1(PLA1A) c2(NP_001193889) c3(phospholipase A1 member A isoform 2 precursor) c4(83057) c5(83058, 83059, 83060, 83061, 83062, 83063) c6( ) c7(T, aw, Ak, BZ, zp, K, nA); #c1(PLA1A) c2(NP_001193890) c3(phospholipase A1 member A isoform 3) c4( ) c5(83064, 83065, 83066, 83067, 83068) c6( ) c7(T, aw, Ak, BZ, zp, K, nA); #c1(PLA1A) c2(NP_001280154) c3(phospholipase A1 member A isoform 4) c4(111462) c5(111463) c6( ) c7(T, aw, Ak, BZ, zp, K, nA); #c1(PLA1A) c2(NP_056984) c3(phospholipase A1 member A isoform 1 precursor) c4(188334) c5(188335, 188336, 188337, 188338, 188339, 188340) c6( ) c7(T, aw, Ak, BZ, zp, K, nA); #c1(PLA2G10) c2(NP_003552) c3(group 10 secretory phospholipase A2 precursor) c4(139058) c5(139059, 139060, 139061, 139062, 139063, 139064, 139065, 139066, 139067, 139068) c6( ) c7(DS, gh, T, bL, dD, bM, eR, ea, e, cR, bB, j, ct, eq, aY, q, aR, ad, bUp, av, Yc, aT, bK, K, ae, s, aW, ev, az, cr, r, aq, g, as, bz, zV, bF, eM, iT, boc, at, jM, y, B); #c1(PLA2G12A) c2(NP_110448) c3(group XIIA secretory phospholipase A2 precursor) c4(220433, 220434) c5(220435, 220436, 220437, 220438, 220439, 220440, 220441, 220442, 220443, 220444, 220445, 220446, 220447, 220448, 220449) c6(220450, 220451, 220452) c7(W); #c1(PLA2G12B) c2(NP_115951) c3(group XIIB secretory phospholipase A2-like protein precursor) c4(224895) c5(224896, 224897, 224898, 224899, 224900, 224901) c6( ) c7(B); #c1(PLA2G15) c2(NP_036452) c3(group XV phospholipase A2 precursor) c4(173971) c5(173972, 173973, 173974, 173975, 173976, 173977, 173978, 173979, 173980, 173981, 173982, 173983, 173984, 173985, 173986, 173987, 173988, 173989, 173990, 173991, 173992, 173993, 173994, 173995) c6(173996, 173997, 173998, 173999) c7(T, rS, h, fr, j, hm); #c1(PLA2G15) c2(XP_011521281) c3(group XV phospholipase A2 isoform X1) c4(316175, 316176) c5( ) c6( ) c7(T, rS, h, fr, j, hm); #c1(PLA2G16) c2(NP_009000) c3(HRAS-like suppressor 3) c4(170170) c5(170171, 170172, 170173, 170174, 170175, 170176, 170177, 170178, 170179, 170180) c6( ) c7(t, ci, m); #c1(PLA2G1B) c2(NP_000919) c3(phospholipase A2 precursor) c4(17215, 17216) c5(17217, 17218, 17219, 17220, 17221, 17222) c6( ) c7(DS, gh, T, bM, aCh, ea, e, al, eb, ci, auu, aR, Vp, gJ, K, eN, hm, aa, Jl, aW, hJ, cm, bqd, U, m, Ro, P, NK, dD, Ht, aw, n, aj, ai, Yc, OV, fe, aq, kT, cA, ky, vb, FV, at, Pr, abW, B, bL, eR, dK, cz, fF, v, j, C, V, q, J, jF, axa, bUp, aT, bZk, cy, bK, aAt, ae, af, Pw, arl, ev, Zt, aAm, r, akY, cT, Yq, ac, nM, kB, gX, wR, mf, cS, EY, aan, fD, ha, bLo, dG, eq, ad, hD, ji, cb, eZ, kD, iV, bz, bF, gk, bTF, z, ag, gZ, aS, y, xg, X); #c1(PLA2G3) c2(NP_056530) c3(group 3 secretory phospholipase A2 precursor) c4(187964) c5(187965, 187966, 187967, 187968, 187969) c6( ) c7(dD, ac, bE, r, bB, h, eq, g, q); #c1(PLA2G3) c2(XP_011528505) c3(group 3 secretory phospholipase A2 isoform X1) c4( ) c5(323616) c6( ) c7(dD, ac, bE, r, bB, h, eq, g, q); #c1(PLA2G4A) c2(NP_077734) c3(cytosolic phospholipase A2) c4( ) c5(215322, 215323, 215324, 215325, 215326) c6( ) c7(oO, bL, T, dD, xu, bM, fR, sQ, DD, ea, fG, e, id, aw, fF, bB, dG, j, v, C, aXD, auu, eq, V, lR, q, aR, ad, ai, eA, axa, bUp, jz, ib, wD, lg, qp, aT, h, lG, cy, bK, K, lQ, ae, af, eu, B, xR, dH, iZ, aW, sp, Y, ff, r, fQ, dq, dN, aq, en, g, Z, as, fq, bz, pb, bN, eK, ou, mD, c, eM, bE, z, X, wB, uo, ut, fD, ei, y, bt, gq); #c1(PLA2G4A) c2(XP_011507945) c3(cytosolic phospholipase A2 isoform X1) c4(298291, 298292) c5(298293, 298294, 298295, 298296, 298297, 298298) c6( ) c7(oO, bL, T, dD, xu, bM, fR, sQ, DD, ea, fG, e, id, aw, fF, bB, dG, j, v, C, aXD, auu, eq, V, lR, q, aR, ad, ai, eA, axa, bUp, jz, ib, wD, lg, qp, aT, h, lG, cy, bK, K, lQ, ae, af, eu, B, xR, dH, iZ, aW, sp, Y, ff, r, fQ, dq, dN, aq, en, g, Z, as, fq, bz, pb, bN, eK, ou, mO, c, eM, bE, z, X, wB, uo, ut, fD, ei, y, bt, gq); #c1(PLA2G4B) c2(NP_001108105) c3(cytosolic phospholipase A2 beta) c4(43099) c5(43100, 43101, 43102, 43103, 43104, 43105, 43106, 43107, 43108, 43109, 43110, 43111) c6(43112, 43113) c7(h); #c1(PLA2G4C) c2(NP_001152794) c3(cytosolic phospholipase A2 gamma isoform 2 precursor) c4(60179) c5(60180, 60181, 60182, 60183, 60184, 60185) c6( ) c7(h, t, z, eA); #c1(PLA2G4C) c2(NP_001152795) c3(cytosolic phospholipase A2 gamma isoform 3) c4( ) c5(60186, 60187, 60188, 60189, 60190, 60191) c6( ) c7(h, t, z, eA); #c1(PLA2G4C) c2(NP_003697) c3(cytosolic phospholipase A2 gamma isoform 1 precursor) c4(140234, 140235) c5(140236, 140237, 140238, 140239, 140240, 140241) c6( ) c7(h, t, z, eA); #c1(PLA2G4D) c2(NP_828848) c3(cytosolic phospholipase A2 delta) c4(253361) c5(253362, 253363, 253364, 253365, 253366, 253367) c6( ) c7(eE, ac, xR); #c1(PLA2G5) c2(XP_011539888) c3(calcium-dependent phospholipase A2 isoform X2) c4(338162) c5(338163) c6( ) c7(U, v, hl, crz, fR); #c1(PLA2G6) c2(NP_001186491) c3(85/88 kDa calcium-independent phospholipase A2 isoform b) c4(77703) c5(77704, 77705, 77706, 77707, 77708, 77709, 77710, 77711, 77712, 77713) c6( ) c7(gh, T, bM, aCh, ea, e, al, eb, ci, auu, aR, aU, K, eN, hm, aa, aW, hJ, cm, bqd, U, m, P, sc, dD, aw, aj, ai, crD, no, crB, dL, Ha, crC, OV, A, XT, kT, hk, vb, FV, at, Pr, abW, bL, ciD, dK, j, C, V, q, J, jF, axa, mj, aT, cy, an, ae, af, Pw, arl, Y, r, crA, t, cT, nM, ac, kB, au, wR, cS, EY, aan, bS, bLo, dG, eq, ad, av, aV, hD, cb, lR, eZ, kD, bz, bF, gk, bTF, ag, gZ, Hs, aS, ei, X); #c1(PLA2G6) c2(NP_003551) c3(85/88 kDa calcium-independent phospholipase A2 isoform a) c4(139037, 139038, 139039) c5(139040, 139041, 139042, 139043, 139044, 139045, 139046, 139047, 139048, 139049, 139050, 139051, 139052, 139053, 139054, 139055, 139056, 139057) c6( ) c7(gh, T, bM, aCh, ea, e, al, eb, ci, auu, aR, aU, K, eN, hm, aa, aW, hJ, cm, bqd, U, m, P, sc, dD, aw, aj, ai, crD, no, crB, dL, Ha, crC, OV, A, XT, kT, hk, vb, FV, at, Pr, abW, bL, ciD, dK, j, C, V, q, J, jF, axa, mj, aT, cy, an, ae, af, Pw, arl, Y, r, crA, t, cT, nM, ac, kB, au, wR, cS, EY, aan, bS, bLo, dG, eq, ad, av, aV, hD, cb, lR, eZ, kD, bz, bF, gk, bTF, ag, gZ, Hs, aS, ei, X); #c1(PLA2G6) c2(XP_005261828) c3(85/88 kDa calcium-independent phospholipase A2 isoform X5) c4(277636) c5(277637, 277638, 277639, 277640, 277641, 277642) c6( ) c7(gh, T, bM, aCh, ea, e, al, eb, ci, auu, aR, aU, K, eN, hm, aa, aW, hJ, cm, bqd, U, m, P, sc, dD, aw, aj, ai, crD, no, crB, dL, Ha, crC, OV, A, XT, kT, hk, vb, FV, at, Pr, abW, bL, ciD, dK, j, C, V, q, J, jF, axa, mj, aT, cy, an, ae, af, Pw, arl, Y, r, crA, t, cT, nM, ac, kB, au, wR, cS, EY, aan, bS, bLo, dG, eq, ad, av, aV, hD, cb, lR, eZ, kD, bz, bF, gk, bTF, ag, gZ, Hs, aS, ei, X); #c1(PLA2G6) c2(XP_011528727) c3(85/88 kDa calcium-independent phospholipase A2 isoform X3) c4(324017) c5( ) c6( ) c7(gh, T, bM, aCh, ea, e, al, eb, ci, auu, aR, aU, K, eN, hm, aa, aW, hJ, cm, bqd, U, m, P, sc, dD, aw, aj, ai, crD, no, crB, dL, Ha, crC, OV, A, XT, kT, hk, vb, FV, at, Pr, abW, bL, ciD, dK, j, C, V, q, J, jF, axa, mj, aT, cy, an, ae, af, Pw, arl, Y, r, crA, t, cT, nM, ac, kB, au, wR, cS, EY, aan, bS, bLo, dG, eq, ad, av, aV, hD, cb, lR, eZ, kD, bz, bF, gk, bTF, ag, gZ, Hs, aS, ei, X); #c1(PLA2G6) c2(XP_011528728) c3(85/88 kDa calcium-independent phospholipase A2 isoform X4) c4(324018) c5( ) c6( ) c7(gh, T, bM, aCh, ea, e, al, eb, ci, auu, aR, aU, K, eN, hm, aa, aW, hJ, cm, bqd, U, m, P, sc, dD, aw, aj, ai, crD, no, crB, dL, Ha, crC, OV, A, XT, kT, hk, vb, FV, at, Pr, abW, bL, ciD, dK, j, C, V, q, J, jF, axa, mj, aT, cy, an, ae, af, Pw, arl, Y, r, crA, t, cT, nM, ac, kB, au, wR, cS, EY, aan, bS, bLo, dG, eq, ad, av, aV, hD, cb, lR, eZ, kD, bz, bF, gk, bTF, ag, gZ, Hs, aS, ei, X); #c1(PLA2G6) c2(XP_011528729) c3(85/88 kDa calcium-independent phospholipase A2 isoform XB) c4(324019) c5(324020, 324021, 324022, 324023, 324024, 324025) c6( ) c7(gh, T, bM, aCh, ea, e, al, eb, ci, auu, aR, aU, K, eN, hm, aa, aW, hJ, cm, bqd, U, m, P, sc, dD, aw, aj, ai, crD, no, crB, dL, Ha, crC, OV, A, XT, kT, hk, vb, FV, at, Pr, abW, bL, ciD, dK, j, C, V, q, J, jF, axa, mj, aT, cy, an, ae, af, Pw, arl, Y, r, crA, t, cT, nM, ac, kB, au, wR, cS, EY, aan, bS, bLo, dG, eq, ad, av, aV, hD, cb, lR, eZ, kD, bz, bF, gk, bTF, ag, gZ, Hs, aS, ei, X); #c1(PLA2G6) c2(XP_011528730) c3(85/88 kDa calcium-independent phospholipase A2 isoform X7) c4( ) c5(324026, 324027, 324028, 324029, 324030, 324031, 324032, 324033, 324034, 324035, 324036, 324037) c6( ) c7(gh, T, bM, aCh, ea, e, al, eb, ci, auu, aR, aU, K, eN, hm, aa, aW, hJ, cm, bqd, U, m, P, sc, dD, aw, aj, ai, crD, no, crB, dL, Ha, crC, OV, A, XT, kT, hk, vb, FV, at, Pr, abW, bL, ciD, dK, j, C, V, q, J, jF, axa, mj, aT, cy, an, ae, af, Pw, arl, Y, r, crA, t, cT, nM, ac, kB, au, wR, cS, EY, aan, bS, bLo, dG, eq, ad, av, aV, hD, cb, lR, eZ, kD, bz, bF, gk, bTF, ag, gZ, Hs, aS, ei, X); #c1(PLA2G7) c2(NP_005075) c3(platelet-activating factor acetylhydrolase precursor) c4(152641, 152642) c5(152643, 152644, 152645, 152646, 152647, 152648, 152649, 152650, 152651, 152652) c6( ) c7(bM, T, dD, ef, eR, aZ, aO, e, ea, aw, wL, cz, fF, mw, aj, jh, j, ah, eq, aLc, ad, nH, cc, ec, ql, lC, M, vc, ey, K, jo, bGD, ae, af, kl, anR, bf, A, cH, cW, sp, Yd, iV, wU, crE, eK, bJ, bF, mO, ac, dh, X, mx, lf, bm, cS, aS, ei, pJ, gq); #c1(PLA2G7) c2(XP_005249466) c3(platelet-activating factor acetylhydrolase isoform X2) c4(269432) c5(269433, 269434, 269435, 269436, 269437, 269438, 269439, 269440, 269441, 269442, 269443, 269444) c6( ) c7(bM, T, dD, ef, eR, aZ, aO, e, ea, aw, wL, cz, fF, mw, aj, jh, j, ah, eq, aLc, ad, nH, cc, ec, ql, lC, M, vc, ey, K, jo, bGD, ae, af, kl, anR, bf, A, cH, cW, sp, Yd, iV, wU, crE, eK, hJ, bF, mO, ac, dh, X, mx, lf, bm, cS, aS, ei, pJ, gq); #c1(PLA2R1) c2(NP_001007268) c3(secretory phospholipase A2 receptor isoform 2 precursor) c4(22657) c5(22658, 22659, 22660, 22661, 22662, 22663) c6( ) c7(ck, es, T, ac, iA, dK, bt, bw, fr, hF, lB); #c1(PLA2R1) c2(NP_031392) c3(secretory phospholipase A2 receptor isoform 1 precursor) c4(172195) c5(172196, 172197, 172198, 172199, 172200, 172201) c6( ) c7(ck, es, T, ac, iA, dK, bt, bw, fr, hF, lB); #c1(PLAA) c2(NP_001026859) c3(phospholipase A-2-activating protein) c4(29671) c5(29672, 29673, 29674, 29675, 29676, 29677) c6( ) c7(T, Dy, bE, hk, Y, Qu, wu, bB, h, fe, wm, nJ); #c1(PLAC1) c2(NP_068568) c3(placenta-specific protein 1 precursor) c4(209426, 209427) c5(209428, 209429, 209430, 209431, 209432, 209433, 209434, 209435, 209436, 209437, 209438, 209439) c6( ) c7(av, T, jv, aW, e, aT, eb, bu, uC); #c1(PLAC8) c2(NP_001124187) c3(placenta-specific gene 8 protein) c4(48468) c5(48469, 48470, 48471, 48472, 48473, 48474, 48475, 48476, 48477, 48478, 48479, 48480, 48481, 48482, 48483, 48484, 48485, 48486, 48487, 48488) c6( ) c7(T, bE, bB, ae, cd, ad); #c1(PLAG1) c2(NP_001108106) c3(zinc finger protein PLAG1 isoform a) c4(43114) c5(43115, 43116, 43117, 43118, 43119, 43120, 43121, 43122, 43123, 43124, 43125, 43126) c6( ) c7(gh, T, aiH, dA, WA, bkF, rQ, n, Fb, ci, eW, ad, afb, hW, aeX, aT, aHs, ji, ae, s, Ub, aW, cr, g, t, hq, ck, iO, QG, pu, GU, Jr, cj, hj, m, bt, LS); #c1(PLAG1) c2(NP_001108107) c3(zinc finger protein PLAG1 isoform b) c4(43127) c5(43128, 43129, 43130, 43131, 43132) c6( ) c7(gh, T, aiH, dA, WA, bkF, rQ, n, Fb, ci, eW, ad, afb, hW, aeX, aT, aHs, ji, ae, s, Ub, aW, cr, g, t, hq, ck, iO, QG, pu, GU, Jr, cj, hj, m, bt, LS); #c1(PLAGL1) c2(NP_001275966) c3(zinc finger protein PLAGL1 isoform 1) c4(107575, 107576) c5(107577, 107578, 107579, 107580, 107581, 107582, 107583, 107584, 107585, 107586, 107587, 107588, 107589, 107590, 107591, 107592, 107593, 107594, 107595, 107596, 107597) c6( ) c7(bL, T, kh, aNA, ml, aA, Bm, cz, aj, dG, ci, JW, ahy, mh, Rl, afQ, aT, dQ, yo, ZH, s, CN, aW, lW, LO, ff, hQ, en, g, t, iK, es, sS, crF, hR, m); #c1(PLAGL1) c2(NP_001275974) c3(zinc finger protein PLAGL1 isoform 2) c4(107598, 107599) c5(107600, 107601, 107602, 107603, 107604, 107605, 107606, 107607, 107608, 107609, 107610, 107611, 107612, 107613, 107614, 107615, 107616, 107617, 107618, 107619, 107620, 107621, 107622, 107623, 107624, 107625, 107626, 107627, 107628, 107629, 107630, 107631, 107632, 107633, 107634, 107635) c6( ) c7(bL, T, kh, aNA, ml, aA, Bm, cz, aj, dG, ci, JW, ahy, mh, Rl, afQ, aT, dQ, yo, ZH, s, CN, aW, lW, LO, ff, hQ, en, g, t, iK, es, sS, crF, hR, m); #c1(PLAGL2) c2(NP_002648) c3(zinc finger protein PLAGL2) c4(130702) c5(130703, 130704, 130705, 130706, 130707, 130708, 130709) c6( ) c7(ck, av, iu, h, bt, bz, crG); #c1(PLAT) c2(NP_000921) c3(tissue-type plasminogen activator isoform 1 preproprotein) c4(17223, 17224, 17225, 17226, 17227, 17228, 17229, 17230, 17231) c5(17232, 17233, 17234, 17235, 17236, 17237, 17238, 17239, 17240, 17241, 17242, 17243, 17244, 17245, 17246, 17247, 17248, 17249, 17250, 17251, 17252, 17253, 17254, 17255, 17256, 17257, 17258, 17259, 17260, 17261, 17262, 17263, 17264, 17265, 17266, 17267, 17268, 17269, 17270, 17271, 17272, 17273, 17274, 17275, 17276, 17277, 17278, 17279, 17280, 17281, 17282, 17283, 17284, 17285, 17286, 17287, 17288, 17289, 17290, 17291, 17292, 17293, 17294, 17295, 17296, 17297, 17298, 17299, 17300, 17301, 17302, 17303, 17304, 17305, 17306, 17307, 17308, 17309, 17310, 17311, 17312, 17313, 17314, 17315, 17316, 17317, 17318, 17319, 17320, 17321, 17322, 17323, 17324, 17325, 17326, 17327, 17328, 17329, 17330, 17331, 17332, 17333, 17334, 17335, 17336, 17337, 17338, 17339, 17340, 17341, 17342, 17343, 17344, 17345, 17346, 17347, 17348, 17349, 17350, 17351, 17352, 17353, 17354, 17355, 17356, 17357, 17358, 17359, 17360, 17361, 17362, 17363, 17364, 17365, 17366, 17367, 17368, 17369) c6(17370, 17371, 17372, 17373, 17374, 17375, 17376, 17377, 17378, 17379, 17380) c7(T, aC, fR, ea, e, fd, bB, ci, crK, aR, x, bv, M, DO, K, xa, hm, Ok, eG, Hl, aW, g, as, cm, bwe, uC, cj, uo, wx, mk, k, m, cho, zv, dD, sQ, atC, My, aw, RC, ez, cd, cc, vM, h, lG, hn, ux, fJ, fQ, aq, fe, hk, vb, hL, uz, te, ut, bni, cB, B, bL, jv, eR, atB, yk, ew, aA, cz, crL, j, C, V, eA, acj, uT, lg, HC, aT, cy, dz, jj, ae, af, dl, eu, kl, bf, Qr, iZ, Y, r, lo, crH, en, cl, t, el, ck, ajl, wg, ac, AH, bpB, dy, fD, kZ, crJ, sY, wi, iW, ha, jh, oR, eq, crl, ad, fU, lQ, xX, azS, et, ff, eZ, crM, aF, Hv, qa, eK, iq, bE, MJ, aS, bC, pK, y, kS); #c1(PLAT) c2(NP_127509) c3(tissue-type plasminogen activator isoform 3 preproprotein) c4(226569, 226570) c5(226571, 226572, 226573, 226574, 226575, 226576, 226577, 226578, 226579, 226580, 226581, 226582, 226583, 226584, 226585, 226586, 226587, 226588, 226589, 226590, 226591, 226592, 226593, 226594, 226595, 226596, 226597) c6(226598, 226599, 226600, 226601, 226602, 226603) c7(T, aC, fR, ea, e, fd, bB, ci, crK, aR, x, bv, M, DO, K, xa, hm, Ok, eG, Hl, aW, g, as, cm, bwe, uC, cj, uo, wx, mk, k, m, cho, zv, dD, sQ, atC, My, aw, RC, ez, cd, cc, vM, h, lG, hn, ux, fJ, fQ, aq, fe, hk, vb, hL, uz, te, ut, bni, cB, B, bL, jv, eR, atB, yk, ew, aA, cz, crL, j, C, V, eA, acj, uT, lg, HC, aT, cy, dz, jj, ae, af, dl, eu, kl, bf, Qr, iZ, Y, r, lo, crH, en, cl, t, el, ck, ajl, wg, ac, AH, bpB, dy, fD, kZ, crJ, sY, wi, iW, ha, jh, oR, eq, crl, ad, fU, lQ, xX, azS, et, ff, eZ, crM, aF, Hv, qa, eK, iq, bE, MJ, aS, bC, pK, y, kS); #c1(PLAU) c2(NP_001138503) c3(urokinase-type plasminogen activator isoform 2) c4(56905) c5(56906, 56907, 56908, 56909, 56910, 56911) c6( ) c7(bM, T, aC, fR, ea, e, al, Xi, bB, axk, lR, ci, bRn, aY, ip, bv, dY, aE, K, cp, hm, eG, LC, aW, az, vs, g, as, eE, eF, uC, eM, nB, iA, iT, wx, mk, m, ik, Vj, dD, crN, aiK, sw, wu, My, ht, aw, qy, wJ, n, BH, fr, uE, zP, fK, Lv, lG, h, dL, ey, ux, cY, wC, A, fQ, aq, kp, cM, sE, dB, eD, hL, at, amb, bni, cB, B, it, dA, eR, fG, Lx, jx, aA, fF, j, acn, Vh, V, q, eA, eJ, fh, rS, qK, yg, aT, cy, ae, af, dl, bA, ne, eu, jf, kl, bf, s, nO, oV, Y, ev, bg, r, en, cl, t, pb, ac, lV, nG, bpB, fD, bt, VB, ao, On, sY, kh, id, wi, dM, eq, bCx, ad, kL, dP, hX, bqs, av, afm, yt, sN, wm, aGh, d, ZE, anv, qt, ff, xs, eH, dN, crM, kD, aF, aFd, iR, bz, Hv, eK, LB, Hw, zr, bE, arE, dX, aS, xO, y, we, X); #c1(PLAU) c2(XP_011538168) c3(urokinase-type plasminogen activator isoform X1) c4(335803, 335804) c5(335805, 335806, 335807, 335808, 335809, 335810, 335811, 335812, 335813, 335814, 335815, 335816, 335817, 335818, 335819, 335820) c6( ) c7(bM, T, aC, fR, ea, e, al, Xi, bB, axk, lR, ci, bRn, aY, ip, bv, dY, aE, K, cp, hm, eG, LC, aW, az, vs, g, as, eE, eF, uC, eM, nB, iA, iT, wx, mk, m, ik, Vj, dD, crN, aiK, sw, wu, My, ht, aw, qy, wJ, n, BH, fr, uE, zP, fK, Lv, lG, h, dL, ey, ux, cY, wC, A, fQ, aq, kp, cM, sE, dB, eD, hL, at, amb, bni, cB, B, it, dA, eR, fG, Lx, jx, aA, fF, j, acn, Vh, V, q, eA, eJ, fh, rS, qK, yg, aT, cy, ae, af, dl, bA, ne, eu, jf, kl, bf, s, nO, oV, Y, ev, bg, r, en, cl, t, pb, ac, lV, nG, bpB, fD, bt, VB, ao, On, sY, kh, id, wi, dM, eq, bCx, ad, kL, dP, hX, bqs, av, afm, yt, sN, wm, aGh, d, ZE, anv, qt, ff, xs, eH, dN, crM, kD, aF, aFd, iR, bz, Hv, eK, LB, Hw, zr, bE, arE, dX, aS, xO, y, we, X); #c1(PLAUR) c2(NP_001005376) c3(urokinase plasminogen activator surface receptor isoform 2 precursor) c4(21589) c5(21590, 21591, 21592, 21593, 21594, 21595) c6( ) c7(bM, sY, T, jv, dD, fR, aC, id, fG, aw, aA, bB, n, eq, ci, hX, lR, fr, q, ad, eA, ip, av, ft, aE, yt, aT, h, dL, pm, in, rz, ae, kl, d, B, aW, sp, Y, eH, ff, r, dN, kp, aF, en, mo, g, t, uC, bz, pb, eE, bN, eF, ar, iQ, ac, nB, bE, at, aS, m, dy, bt, cB, X); #c1(PLAUR) c2(NP_001005377) c3(urokinase plasminogen activator surface receptor isoform 3 precursor) c4(21596) c5(21597, 21598, 21599, 21600, 21601, 21602) c6( ) c7(bM, sY, T, jv, dD, fR, aC, id, fG, aw, aA, bB, n, eq, ci, hX, lR, fr, q, ad, eA, ip, av, ft, aE, yt, aT, h, dL, pm, in, rz, ae, kl, d, B, aW, sp, Y, eH, ff, r, dN, kp, aF, en, mo, g, t, uC, bz, pb, eE, bN, eF, ar, iQ, ac, nB, bE, at, aS, m, dy, bt, cB, X); #c1(PLAUR) c2(NP_002650) c3(urokinase plasminogen activator surface receptor isoform 1 precursor) c4(130710) c5(130711, 130712, 130713, 130714, 130715, 130716) c6( ) c7(bM, sY, T, jv, dD, fR, aC, id, fG, aw, aA, bB, n, eq, ci, hX, lR, fr, q, ad, eA, ip, av, ft, aE, yt, aT, h, dL, pm, in, rz, ae, kl, d, B, aW, sp, Y, eH, ff, r, dN, kp, aF, en, mo, g, t, uC, bz, pb, eE, bN, eF, ar, iQ, ac, nB, bE, at, aS, m, dy, bt, cB, X); #c1(PLB1) c2(NP_001164056) c3(phospholipase B1, membrane-associated isoform 2 precursor) c4(66556) c5(66557, 66558, 66559, 66560, 66561, 66562) c6( ) c7(DS, bL, NK, T, dD, bM, eR, DD, Ht, ea, dK, e, al, aw, fF, aj, dG, j, v, C, auu, eq, V, q, J, aR, ad, jF, axa, bUp, gJ, cq, ai, Yc, ib, aT, h, bZk, cy, ji, K, cb, ae, avn, af, Pw, aiV, dH, Jl, aW, ev, Zt, aAm, r, akY, aq, iV, cm, bz, ck, bE, gk, cT, Yq, ky, cA, iT, z, X, eB, U, at, mf, aS, EY, aan, m, CZ, eA, bt, xg, B, y, Ro); #c1(PLB1) c2(NP_694566) c3(phospholipase B1, membrane-associated isoform 1 precursor) c4(245284) c5(245285, 245286, 245287, 245288, 245289, 245290) c6( ) c7(DS, bL, NK, T, dD, bM, eR, DD, Ht, ea, dK, e, al, aw, fF, aj, dG, j, v, C, auu, eq, V, q, J, aR, ad, jF, axa, bUp, gJ, cq, ai, Yc, ib, aT, h, bZk, cy, ji, K, cb, ae, avn, af, Pw, aiV, dH, Jl, aW, ev, Zt, aAm, r, akY, aq, iV, cm, bz, ck, bE, gk, cT, Yq, ky, cA, iT, z, X, eB, U, at, mf, aS, EY, aan, m, CZ, eA, bt, xg, B, y, Ro); #c1(PLB1) c2(XP_011530907) c3(phospholipase B1, membrane-associated isoform X22) c4(326899) c5( ) c6( ) c7(DS, bL, NK, T, dD, bM, eR, DD, Ht, ea, dK, e, al, aw, fF, aj, dG, j, v, C, auu, eq, V, q, J, aR, ad, jF, axa, bUp, gJ, cq, ai, Yc, ib, aT, h, bZk, cy, ji, K, cb, ae, avn, af, Pw, aiV, dH, Jl, aW, ev, Zt, aAm, r, akY, aq, iV, cm, bz, ck, bE, gk, cT, Yq, ky, cA, iT, z, X, eB, U, at, mf, aS, EY, aan, m, CZ, eA, bt, xg, B, y, Ro); #c1(PLB1) c2(XP_011530910) c3(phospholipase B1, membrane-associated isoform X26) c4(326900) c5(326901, 326902, 326903, 326904, 326905, 326906) c6( ) c7(DS, bL, NK, T, dD, bM, eR, DD, Ht, ea, dK, e, al, aw, fF, aj, dG, j, v, C, auu, eq, V, q, J, aR, ad, jF, axa, bUp, gJ, cq, ai, Yc, ib, aT, h, bZk, cy, ji, K, cb, ae, avn, af, Pw, aiV, dH, Jl, aW, ev, Zt, aAm, r, akY, aq, iV, cm, bz, ck, bF, gk, cT, Yq, ky, cA, iT, z, X, eB, U, at, mf, aS, EY, aan, m, CZ, eA, bt, xg, B, y, Ro); #c1(PLB1) c2(XP_011530912) c3(phospholipase B1, membrane-associated isoform X27) c4( ) c5(326907, 326908, 326909, 326910, 326911, 326912) c6( ) c7(DS, bL, NK, T, dD, bM, eR, DD, Ht, ea, dK, e, al, aw, fF, aj, dG, j, v, C, auu, eq, V, q, J, aR, ad, jF, axa, bUp, gJ, cq, ai, Yc, ib, aT, h, bZk, cy, ji, K, cb, ae, avn, af, Pw, aiV, dH, Jl, aW, ev, Zt, aAm, r, akY, aq, iV, cm, bz, ck, bF, gk, cT, Yq, ky, cA, iT, z, X, eB, U, at, mf, aS, EY, aan, m, CZ, eA, bt, xg, B, y, Ro); #c1(PLBD1) c2(NP_079105) c3(phospholipase B-like 1 precursor) c4(217032) c5(217033, 217034, 217035, 217036, 217037, 217038, 217039, 217040) c6(217041, 217042) c7(eM); #c1(PLCB1) c2(NP_056007) c3(1-phosphatidylinositol 4,5-bisphosphate phosphodiesterase beta-1 isoform a) c4(185082, 185083) c5(185084, 185085, 185086, 185087, 185088, 185089, 185090, 185091, 185092, 185093, 185094, 185095, 185096) c6( ) c7(aw, ha, ht, bO, dP, aT, h, lm, bK, af, cC, crO, crP, aW, ff, en, bw, dR, ac, cA, ei, bt, X); #c1(PLCB1) c2(NP_877398) c3(1-phosphatidylinositol 4,5-bisphosphate phosphodiesterase beta-1 isoform b) c4(256740, 256741) c5(256742, 256743, 256744, 256745, 256746, 256747, 256748, 256749, 256750, 256751, 256752, 256753, 256754, 256755, 256756, 256757) c6( ) c7(aw, ha, ht, bO, dP, aT, h, lm, bK, af, cC, crO, crP, aW, ff, en, bw, dR, ac, cA, ei, bt, X); #c1(PLCB1) c2(XP_011527501) c3(1-phosphatidylinositol 4,5-bisphosphate phosphodiesterase beta-1 isoform X1) c4(322285) c5(322286, 322287, 322288, 322289, 322290, 322291) c6( ) c7(aw, ha, ht, bO, dP, aT, h, lm, bK, af, cC, crO, crP, aW, ff, en, bw, dR, ac, cA, ei, bt, X); #c1(PLCB1) c2(XP_011527502) c3(1-phosphatidylinositol 4,5-bisphosphate phosphodiesterase beta-1 isoform X2) c4(322292) c5( ) c6( ) c7(aw, ha, ht, bO, dP, aT, h, lm, bK, af, cC, crO, crP, aW, ff, en, bw, dR, ac, cA, ei, bt, X); #c1(PLCB1) c2(XP_011527504) c3(1-phosphatidylinositol 4,5-bisphosphate phosphodiesterase beta-1 isoform X4) c4( ) c5(322293, 322294, 322295, 322296, 322297, 322298) c6( ) c7(aw, ha, ht, bO, dP, aT, h, lm, bK, af, cC, crO, crP, aW, ff, en, bw, dR, ac, cA, ei, bt, X); #c1(PLCB1) c2(XP_011527505) c3(1-phosphatidylinositol 4,5-bisphosphate phosphodiesterase beta-1 isoform X5) c4(322299, 322300) c5(322301, 322302, 322303, 322304, 322305, 322306, 322307, 322308, 322309, 322310, 322311) c6( ) c7(aw, ha, ht, bO, dP, aT, h, lm, bK, af, cC, crO, crP, aW, ff, en, bw, dR, ac, cA, ei, bt, X); #c1(PLCB2) c2(NP_001271226) c3(1-phosphatidylinositol 4,5-bisphosphate phosphodiesterase beta-2 isoform 2) c4(103659) c5(103660, 103661, 103662, 103663, 103664, 103665) c6( ) c7(T, cF, kP, aW, aT, h, yA); #c1(PLCB2) c2(NP_004564) c3(1-phosphatidylinositol 4,5-bisphosphate phosphodiesterase beta-2 isoform 1) c4(147701) c5(147702, 147703, 147704, 147705, 147706, 147707) c6( ) c7(T, cF, kP, aW, aT, h, yA); #c1(PLCB3) c2(NP_001171812) c3(1-phosphatidylinositol 4,5-bisphosphate phosphodiesterase beta-3 isoform 2) c4(71825) c5(71826, 71827, 71828, 71829, 71830, 71831) c6( ) c7(pY, pX, aw, dN, ahJ, h, azg, ci, bq, eE); #c1(PLCB4) c2(NP_000924) c3(1-phosphatidylinositol 4,5-bisphosphate phosphodiesterase beta-4 isoform a) c4(17381, 17382) c5(17383, 17384, 17385, 17386, 17387, 17388, 17389, 17390, 17391, 17392) c6( ) c7(dP, cA, aW, crQ, Y, bO, aT, h, bw, bgd, ei, an, he, bt, fq); #c1(PLCB4) c2(NP_001166117) c3(1-phosphatidylinositol 4,5-bisphosphate phosphodiesterase beta-4 isoform c) c4(68225, 68226, 68227) c5(68228, 68229, 68230, 68231, 68232, 68233, 68234, 68235, 68236, 68237, 68238, 68239) c6( ) c7(dP, cA, aW, crQ, Y, bO, aT, h, bw, bgd, ei, an, he, bt, fq); #c1(PLCB4) c2(NP_877949) c3(1-phosphatidylinositol 4,5-bisphosphate phosphodiesterase beta-4 isoform b) c4(256962) c5(256963, 256964, 256965, 256966, 256967, 256968, 256969, 256970, 256971, 256972) c6( ) c7(dP, cA, aW, crQ, Y, bO, aT, h, bw, bgd, ei, an, he, bt, fq); #c1(PLCB4) c2(XP_011527553) c3(1-phosphatidylinositol 4,5-bisphosphate phosphodiesterase beta-4 isoform X2) c4( ) c5(322376, 322377, 322378, 322379, 322380, 322381, 322382, 322383, 322384, 322385) c6( ) c7(dP, cA, aW, crQ, Y, bO, aT, h, bw, bgd, ei, an, he, bt, fq); #c1(PLCB4) c2(XP_011527555) c3(1-phosphatidylinositol 4,5-bisphosphate phosphodiesterase beta-4 isoform X3) c4(322386, 322387) c5(322388, 322389, 322390, 322391, 322392, 322393, 322394, 322395, 322396, 322397, 322398, 322399, 322400, 322401) c6( ) c7(dP, cA, aW, crQ, Y, bO, aT, h, bw, bgd, ei, an, he, bt, fq); #c1(PLCD1) c2(NP_001124436) c3(1-phosphatidylinositol 4,5-bisphosphate phosphodiesterase delta-1 isoform 1) c4(48858) c5(48859, 48860, 48861, 48862, 48863, 48864) c6( ) c7(eR, h, lu, crR, Bc, aW, ff, aT, Lv, alw, aA, cz, mw, ci, j, en, aF, he, it, cd); #c1(PLCD1) c2(NP_006216) c3(1-phosphatidylinositol 4,5-bisphosphate phosphodiesterase delta-1 isoform 2) c4(162999) c5(163000, 163001, 163002, 163003, 163004, 163005) c6( ) c7(eR, h, lu, crR, Be, aW, ff, aT, Lv, alw, aA, cz, mw, ci, j, en, aF, he, it, cd); #c1(PLCD3) c2(NP_588614) c3(1-phosphatidylinositol 4,5-bisphosphate phosphodiesterase delta-3) c4(234817) c5(234818, 234819, 234820, 234821, 234822, 234823, 234824) c6( ) c7(dP, oe, h); #c1(PLCD4) c2(NP_116115) c3(1-phosphatidylinositol 4,5-bisphosphate phosphodiesterase delta-4) c4(225367, 225368, 225369) c5(225370, 225371, 225372, 225373, 225374, 225375, 225376, 225377, 225378, 225379, 225380, 225381, 225382, 225383, 225384, 225385, 225386, 225387, 225388, 225389, 225390, 225391) c6( ) c7(h, aW, aT); #c1(PLCD4) c2(XP_005246972) c3(1-phosphatidylinositol 4,5-bisphosphate phosphodiesterase delta-4 isoform X5) c4(267553) c5(267554, 267555, 267556, 267557, 267558, 267559, 267560, 267561, 267562, 267563, 267564, 267565, 267566, 267567, 267568, 267569, 267570) c6( ) c7(h, aW, aT); #c1(PLCD4) c2(XP_011510314) c3(1-phosphatidylinositol 4,5-bisphosphate phosphodiesterase delta-4 isoform X3) c4(300885) c5( ) c6( ) c7(h, aW, aT); #c1(PLCE1) c2(NP_001159451) c3(1-phosphatidylinositol 4,5-bisphosphate phosphodiesterase epsilon-1 isoform 2) c4(64137) c5(64138, 64139, 64140, 64141, 64142, 64143, 64144, 64145, 64146, 64147) c6( ) c7(T, eR, pf, aD, oe, ht, aA, cz, it, bZ, ah, ci, q, atP, cF, io, vw, h, hu, hB, af, WW, li, atJ, Jl, ff, gi, r, alw, kt, aDm, aF, en, g, iK, sk, bbz, ac, AH, gX, at, acJ, Pr); #c1(PLCE1) c2(NP_057425) c3(1-phosphatidylinositol 4,5-bisphosphate phosphodiesterase epsilon-1 isoform 1) c4(190738, 190739) c5(190740, 190741, 190742, 190743, 190744, 190745, 190746, 190747, 190748, 190749, 190750, 190751) c6( ) c7(T, eR, pf, aD, oe, ht, aA, cz, it, bZ, ah, ci, q, atP, cF, io, vw, h, hu, hB, af, WW, li, atJ, Jl, ff, gi, r, alw, kt, aDm, aF, en, g, iK, sk, bbz, ac, AH, gX, at, acJ, Pr); #c1(PLCG1) c2(NP_002651) c3(1-phosphatidylinositol 4,5-bisphosphate phosphodiesterase gamma-1 isoform a) c4(130717) c5(130718, 130719, 130720, 130721, 130722, 130723, 130724, 130725, 130726, 130727) c6( ) c7(bL, T, hB, ci, V, eA, q, ad, aT, h, bK, bq, ae, uQ, aW, ff, r, en, bw, ck, bE, Vy, wB, ei, bt); #c1(PLCG1) c2(NP_877963) c3(1-phosphatidylinositol 4,5-bisphosphate phosphodiesterase gamma-1 isoform b) c4(257042) c5(257043, 257044, 257045, 257046, 257047, 257048) c6( ) c7(bL, T, hB, ci, V, eA, q, ad, aT, h, bK, bq, ae, uQ, aW, ff, r, en, bw, ck, bE, Vy, wB, ei, bt); #c1(PLCG2) c2(NP_002652) c3(1-phosphatidylinositol 4,5-bisphosphate phosphodiesterase gamma-2) c4(130728, 130729, 130730, 130731) c5(130732, 130733, 130734, 130735, 130736, 130737, 130738, 130739, 130740) c6( ) c7(bF, crS, crT, ac, yE, aW, crU, aw, zf, jh, aT, cj, aA, h, bK, er); #c1(PLCH1) c2(NP_001124432) c3(1-phosphatidylinositol 4,5-bisphosphate phosphodiesterase eta-1 isoform a) c4(48844, 48845) c5(48846, 48847, 48848, 48849, 48850, 48851) c6( ) c7(eM, ff, en, g, bz, fq); #c1(PLCH1) c2(NP_001124433) c3(1-phosphatidylinositol 4,5-bisphosphate phosphodiesterase eta-1 isoform c) c4( ) c5(48852, 48853, 48854, 48855, 48856, 48857) c6( ) c7(eM, ff, en, g, bz, fq); #c1(PLCH1) c2(NP_055811) c3(1-phosphatidylinositol 4,5-bisphosphate phosphodiesterase eta-1 isoform b) c4(183655) c5(183656, 183657, 183658, 183659, 183660, 183661, 183662, 183663, 183664, 183665, 183666) c6( ) c7(eM, ff, en, g, bz, fq); #c1(PLCH1) c2(XP_005247296) c3(1-phosphatidylinositol 4,5-bisphosphate phosphodiesterase eta-1 isoform X4) c4(267753) c5(267754, 267755, 267756, 267757, 267758, 267759, 267760) c6( ) c7(eM, ff, en, g, bz, fq); #c1(PLCH1) c2(XP_011510866) c3(1-phosphatidylinositol 4,5-bisphosphate phosphodiesterase eta-1 isoform X2) c4( ) c5(301322, 301323) c6( ) c7(eM, ff, en, g, bz, fq); #c1(PLCL1) c2(NP_006217) c3(inactive phospholipase C-like protein 1) c4(163006, 163007) c5(163008, 163009, 163010, 163011, 163012, 163013, 163014, 163015, 163016, 163017, 163018, 163019) c6( ) c7(bA, eR, eL, ayB, kq, ht, r, akY, dL, ah, q, v, hu, bz, af, us, ad); #c1(PLCL2) c2(NP_001137854) c3(inactive phospholipase C-like protein 2 isoform 1) c4(56028, 56029) c5(56030, 56031, 56032, 56033, 56034, 56035, 56036, 56037) c6( ) c7(y, wD, cd, be); #c1(PLCL2) c2(NP_055999) c3(inactive phospholipase C-like protein 2 isoform 2) c4( ) c5(185041, 185042, 185043, 185044, 185045, 185046, 185047, 185048, 185049, 185050, 185051, 185052, 185053) c6( ) c7(y, wD, cd, be); #c1(PLCL2) c2(XP_006713136) c3(inactive phospholipase C-like protein 2 isoform X1) c4(287048) c5(287049) c6( ) c7(y, wD, cd, be); #c1(PLCXD2) c2(NP_001172035) c3(PI-PLC X domain-containing protein 2 isoform a) c4(72298) c5(72299, 72300, 72301, 72302, 72303, 72304) c6( ) c7(cF, Ea, PN); #c1(PLCXD2) c2(NP_695000) c3(PI-PLC X domain-containing protein 2 isoform b) c4(245637) c5(245638, 245639, 245640, 245641, 245642, 245643) c6( ) c7(cF, Ea, PN); #c1(PLCXD3) c2(NP_001005473) c3(PI-PLC X domain-containing protein 3) c4(21692) c5(21693, 21694, 21695, 21696, 21697, 21698, 21699, 21700, 21701, 21702) c6( ) c7(pN); #c1(PLCZ1) c2(NP_149114) c3(1-phosphatidylinositol 4,5-bisphosphate phosphodiesterase zeta-1) c4(227225, 227226, 227227) c5(227228, 227229, 227230, 227231, 227232, 227233, 227234, 227235, 227236, 227237, 227238, 227239, 227240, 227241, 227242, 227243, 227244) c6( ) c7(gU, ao); #c1(PLCZ1) c2(XP_011519185) c3(1-phosphatidylinositol 4,5-bisphosphate phosphodiesterase zeta-1 isoform X11) c4(313776, 313777) c5(313778, 313779, 313780, 313781, 313782, 313783, 313784, 313785, 313786, 313787, 313788, 313789) c6( ) c7(gU, ao); #c1(PLD1) c2(NP_001123553) c3(phospholipase D1 isoform b) c4(47475) c5(47476, 47477, 47478, 47479, 47480, 47481, 47482, 47483, 47484, 47485, 47486, 47487) c6( ) c7(bL, ai, T, wi, aW, Y, az, aT, r, aA, aF, ci, as, eA, il, fq, q, Pm); #c1(PLD1) c2(NP_002653) c3(phospholipase D1 isoform a) c4(130741) c5(130742, 130743, 130744, 130745, 130746, 130747) c6( ) c7(bL, ai, T, wi, aW, Y, az, aT, r, aA, aF, ci, as, eA, il, fq, q, Pm); #c1(PLD1) c2(XP_011511199) c3(phospholipase D1 isoform X3) c4(301673) c5(301674, 301675, 301676, 301677, 301678, 301679) c6( ) c7(bL, ai, T, wi, aW, Y, az, aT, r, aA, aF, ci, as, eA, il, fq, q, Pm); #c1(PLD1) c2(XP_011511200) c3(phospholipase D1 isoform X4) c4(301680, 301681) c5(301682, 301683, 301684, 301685, 301686, 301687) c6( ) c7(bL, ai, T, wi, aW, Y, az, aT, r, aA, aF, ci, as, eA, il, fq, q, Pm); #c1(PLD2) c2(NP_001230037) c3(phospholipase D2 isoform PLD2B) c4(85839) c5(85840, 85841, 85842, 85843, 85844, 85845) c6( ) c7(T, dA, eR, jh, cz, il, cd, eA, q, Be, aT, lG, hn, af, dx, d, lR, aW, r, as, beH, beJ, nM); #c1(PLD2) c2(NP_002654) c3(phospholipase D2 isoform PLD2A) c4(130748) c5(130749, 130750, 130751, 130752, 130753, 130754) c6( ) c7(T, dA, eR, jh, cz, il, cd, eA, q, Bc, al, lG, hn, af, dx, d, lR, aW, r, as, beH, beJ, nM); #c1(PLD3) c2(NP_001026866) c3(phospholipase D3) c4(29685, 29686, 29687, 29688) c5(29689, 29690, 29691, 29692, 29693, 29694, 29695, 29696, 29697, 29698, 29699, 29700, 29701, 29702, 29703, 29704, 29705, 29706, 29707, 29708, 29709, 29710, 29711, 29712, 29713, 29714, 29715, 29716, 29717, 29718, 29719, 29720, 29721, 29722, 29723, 29724, 29725, 29726, 29727, 29728) c6( ) c7(crW, crV, aT); #c1(PLD4) c2(NP_620145) c3(phospholipase D4) c4(237352) c5( ) c6( ) c7(y, pb); #c1(PLD5) c2(NP_001182740) c3(inactive phospholipase D5 isoform 2) c4(75217, 75218) c5(75219, 75220, 75221, 75222, 75223, 75224, 75225, 75226, 75227, 75228, 75229, 75230) c6( ) c7(V, bN); #c1(PLD5) c2(NP_689879) c3(inactive phospholipase D5 isoform 1) c4(244239) c5(244240, 244241, 244242, 244243, 244244, 244245) c6( ) c7(V, bN); #c1(PLD5) c2(XP_011542420) c3(inactive phospholipase D5 isoform X4) c4(340948) c5(340949, 340950, 340951, 340952, 340953, 340954) c6( ) c7(V, bN); #c1(PLEC) c2(NP_000436) c3(plectin isoform 1c) c4(8972, 8973) c5( ) c6( ) c7(T, arM, fR, biF, XJ, aHv, n, fd, asF, UX, crY, XM, xC, xm, biq, crX, h, K, lQ, aOh, Gc, jf, s, xz, xs, aMH, g, as, iK, dr, xA, XG, XO, arO, B, crZ); #c1(PLEC) c2(NP_958780) c3(plectin isoform 1f) c4(262138) c5( ) c6( ) c7(T, arM, fR, biF, XJ, aHv, n, fd, asF, UX, crY, XM, xC, xm, biq, crX, h, K, lQ, aOh, Gc, jf, s, xz, xs, aMH, g, as, iK, dr, xA, XG, XO, arO, B, crZ); #c1(PLEC) c2(NP_958781) c3(plectin isoform 1e) c4(262139) c5( ) c6( ) c7(T, arM, fR, biF, XJ, aHv, n, fd, asF, UX, crY, XM, xC, xm, biq, crX, h, K, lQ, aOh, Gc, jf, s, xz, xs, aMH, g, as, iK, dr, xA, XG, XO, arO, B, crZ); #c1(PLEC) c2(NP_958782) c3(plectin isoform 1) c4(262140) c5( ) c6( ) c7(T, arM, fR, biF, XJ, aHv, n, fd, asF, UX, crY, XM, xC, xm, biq, crX, h, K, lQ, aOh, Gc, jf, s, xz, xs, aMH, g, as, iK, dr, xA, XG, XO, arO, B, crZ); #c1(PLEC) c2(NP_958783) c3(plectin isoform 1d) c4(262141) c5(262142, 262143, 262144, 262145, 262146, 262147, 262148, 262149, 262150, 262151, 262152, 262153, 262154, 262155, 262156, 262157, 262158, 262159, 262160, 262161, 262162, 262163, 262164, 262165, 262166, 262167, 262168, 262169, 262170, 262171, 262172, 262173, 262174, 262175, 262176, 262177, 262178, 262179, 262180, 262181, 262182, 262183, 262184, 262185, 262186, 262187, 262188, 262189, 262190, 262191, 262192, 262193, 262194, 262195) c6( ) c7(T, arM, fR, biF, XJ, aHv, n, fd, asF, UX, crY, XM, xC, xm, biq, crX, h, K, lQ, aOh, Gc, jf, s, xz, xs, aMH, g, as, iK, dr, xA, XG, XO, arO, B, crZ); #c1(PLEC) c2(NP_958784) c3(plectin isoform 1b) c4(262196) c5( ) c6( ) c7(T, arM, fR, biF, XJ, aHv, n, fd, asF, UX, crY, XM, xC, xm, biq, crX, h, K, lQ, aOh, Gc, jf, s, xz, xs, aMH, g, as, iK, dr, xA, XG, XO, arO, B, crZ); #c1(PLEC) c2(NP_958785) c3(plectin isoform 1g) c4(262197) c5( ) c6( ) c7(T, arM, fR, biF, XJ, aHv, n, fd, asF, UX, crY, XM, xC, xm, biq, crX, h, K, lQ, aOh, Gc, jf, s, xz, xs, aMH, g, as, iK, dr, xA, XG, XO, arO, B, crZ); #c1(PLEC) c2(NP_958786) c3(plectin isoform 1a) c4(262198) c5( ) c6( ) c7(T, arM, fR, biF, XJ, aHv, n, fd, asF, UX, crY, XM, xC, xm, biq, crX, h, K, lQ, aOh, Gc, jf, s, xz, xs, aMH, g, as, iK, dr, xA, XG, XO, arO, B, crZ); #c1(PLEC) c2(XP_005251033) c3(plectin isoform X3) c4( ) c5(270729) c6( ) c7(T, arM, fR, biF, XJ, aHv, n, fd, asF, UX, crY, XM, xC, xm, biq, crX, h, K, lQ, aOh, Gc, jf, s, xz, xs, aMH, g, as, iK, dr, xA, XG, XO, arO, B, crZ); #c1(PLEK) c2(NP_002655) c3(pleckstrin) c4(130755) c5(130756, 130757, 130758, 130759, 130760, 130761, 130762, 130763) c6( ) c7(bL, bM, T, azi, amp, v, UX, V, afU, kH, ey, bU, ahE, Um, bA, d, bT, Y, xz, fe, arK, hp, ahl, cl, iV, t, wA, asE, ck, bF, m, y, ra); #c1(PLEK2) c2(NP_057529) c3(pleckstrin-2) c4(191260) c5(191261, 191262, 191263, 191264, 191265, 191266) c6( ) c7(Y, ad); #c1(PLEKHA1) c2(NP_001001974) c3(pleckstrin homology domain-containing family A member 1 isoform 1) c4(19237, 19238) c5(19239, 19240, 19241, 19242, 19243, 19244, 19245, 19246, 19247, 19248, 19249, 19250, 19251, 19252) c6( ) c7(Um, ZC, dD, eq, W); #c1(PLEKHA1) c2(NP_001182537) c3(pleckstrin homology domain-containing family A member 1 isoform 2) c4(75020) c5(75021, 75022, 75023, 75024, 75025, 75026, 75027, 75028, 75029, 75030, 75031) c6( ) c7(Om, ZC, dD, eq, W); #c1(PLEKHA1) c2(XP_005270077) c3(pleckstrin homology domain-containing family A member 1 isoform X5) c4(283094) c5(283095, 283096, 283097, 283098, 283099, 283100, 283101, 283102, 283103, 283104) c6( ) c7(Om, ZC, dD, eq, W); #c1(PLEKHA1) c2(XP_011538327) c3(pleckstrin homology domain-containing family A member 1 isoform X3) c4( ) c5(336025) c6( ) c7(Om, ZC, dD, eq, W); #c1(PLEKHA2) c2(NP_067636) c3(pleckstrin homology domain-containing family A member 2) c4(209119, 209120, 209121) c5(209122, 209123, 209124, 209125, 209126, 209127, 209128, 209129, 209130, 209131, 209132, 209133) c6( ) c7(jh); #c1(PLEKHA2) c2(XP_011542910) c3(pleckstrin homology domain-containing family A member 2 isoform X2) c4( ) c5(341507, 341508, 341509, 341510, 341511, 341512) c6( ) c7(jh); #c1(PLEKHA5) c2(NP_001137293) c3(pleckstrin homology domain-containing family A member 5 isoform 2) c4(55311, 55312) c5(55313, 55314, 55315, 55316, 55317, 55318, 55319, 55320, 55321, 55322) c6( ) c7(fq); #c1(PLEKHA5) c2(NP_001177789) c3(pleckstrin homology domain-containing family A member 5 isoform 3) c4( ) c5(73052, 73053, 73054, 73055, 73056, 73057) c6( ) c7(fq); #c1(PLEKHA5) c2(NP_001243399) c3(pleckstrin homology domain-containing family A member 5 isoform 4) c4(90686, 90687) c5(90688, 90689, 90690, 90691, 90692, 90693, 90694, 90695, 90696, 90697, 90698, 90699) c6( ) c7(fq); #c1(PLEKHA5) c2(NP_001243716) c3(pleckstrin homology domain-containing family A member 5 isoform 5) c4(91527) c5(91528, 91529, 91530, 91531, 91532) c6( ) c7(fq); #c1(PLEKHA5) c2(NP_061885) c3(pleckstrin homology domain-containing family A member 5 isoform 1) c4(200941, 200942, 200943, 200944) c5(200945, 200946, 200947, 200948, 200949, 200950, 200951, 200952, 200953, 200954, 200955, 200956, 200957, 200958, 200959, 200960, 200961, 200962, 200963, 200964, 200965, 200966, 200967, 200968, 200969, 200970, 200971, 200972, 200973, 200974, 200975, 200976, 200977, 200978, 200979, 200980) c6( ) c7(fq); #c1(PLEKHA5) c2(XP_005253457) c3(pleckstrin homology domain-containing family A member 5 isoform X8) c4(272496) c5(272497, 272498, 272499, 272500, 272501, 272502) c6( ) c7(fq); #c1(PLEKHA5) c2(XP_006719152) c3(pleckstrin homology domain-containing family A member 5 isoform X5) c4(292222) c5(292223, 292224, 292225, 292226, 292227, 292228, 292229) c6( ) c7(fq); #c1(PLEKHA5) c2(XP_006719159) c3(pleckstrin homology domain-containing family A member 5 isoform X2) c4(292230) c5( ) c6( ) c7(fq); #c1(PLEKHA5) c2(XP_011519018) c3(pleckstrin homology domain-containing family A member 5 isoform X6) c4(313465) c5( ) c6( ) c7(fq); #c1(PLEKHA6) c2(NP_055750) c3(pleckstrin homology domain-containing family A member 6) c4(183277) c5(183278, 183279, 183280, 183281, 183282, 183283) c6( ) c7(cz); #c1(PLEKHA6) c2(XP_005245024) c3(pleckstrin homology domain-containing family A member 6 isoform X15) c4(266220) c5(266221, 266222, 266223, 266224, 266225, 266226) c6( ) c7(cz); #c1(PLEKHA6) c2(XP_006711275) c3(pleckstrin homology domain-containing family A member 6 isoform X9) c4(285839) c5( ) c6( ) c7(cz); #c1(PLEKHA6) c2(XP_006711276) c3(pleckstrin homology domain-containing family A member 6 isoform X3) c4(285840, 285841) c5(285842, 285843, 285844, 285845, 285846, 285847, 285848, 285849, 285850, 285851, 285852, 285853) c6( ) c7(cz); #c1(PLEKHA6) c2(XP_006711278) c3(pleckstrin homology domain-containing family A member 6 isoform X7) c4(285854) c5(285855, 285856, 285857, 285858, 285859, 285860) c6( ) c7(cz); #c1(PLEKHA6) c2(XP_006711281) c3(pleckstrin homology domain-containing family A member 6 isoform X11) c4(285861) c5(285862, 285863, 285864, 285865, 285866, 285867) c6( ) c7(cz); #c1(PLEKHA6) c2(XP_011507598) c3(pleckstrin homology domain-containing family A member 6 isoform X6) c4(297511) c5(297512, 297513, 297514, 297515, 297516, 297517) c6( ) c7(cz); #c1(PLEKHA6) c2(XP_011507608) c3(pleckstrin homology domain-containing family A member 6 isoform X19) c4( ) c5(297518, 297519, 297520, 297521, 297522, 297523) c6( ) c7(cz); #c1(PLEKHA7) c2(NP_778228) c3(pleckstrin homology domain-containing family A member 7) c4(251428) c5(251429, 251430, 251431, 251432, 251433, 251434, 251435, 251436, 251437, 251438, 251439, 251440) c6( ) c7(oe, sa, cz, in, dw, AO, IJ, ad); #c1(PLEKHA7) c2(XP_011518216) c3(pleckstrin homology domain-containing family A member 7 isoform X6) c4(312253) c5( ) c6( ) c7(oe, sa, cz, in, dw, AO, IJ, ad); #c1(PLEKHA7) c2(XP_011518218) c3(pleckstrin homology domain-containing family A member 7 isoform X8) c4(312254) c5(312255, 312256, 312257, 312258, 312259, 312260) c6( ) c7(oe, sa, cz, in, dw, AO, IJ, ad); #c1(PLEKHB1) c2(NP_001123505) c3(pleckstrin homology domain-containing family B member 1 isoform c) c4(47210, 47211, 47212, 47213, 47214, 47215) c5(47216, 47217, 47218, 47219, 47220, 47221, 47222, 47223, 47224, 47225, 47226) c6( ) c7(aW, W, d, K, aT); #c1(PLEKHB1) c2(NP_001123506) c3(pleckstrin homology domain-containing family B member 1 isoform b) c4( ) c5(47227, 47228, 47229, 47230, 47231, 47232, 47233, 47234, 47235, 47236) c6( ) c7(aW, W, d, K, aT); #c1(PLEKHB1) c2(NP_001123508) c3(pleckstrin homology domain-containing family B member 1 isoform d) c4( ) c5(47237, 47238, 47239, 47240, 47241, 47242, 47243, 47244, 47245, 47246, 47247, 47248, 47249, 47250, 47251, 47252, 47253, 47254, 47255, 47256, 47257, 47258, 47259) c6( ) c7(aW, W, d, K, aT); #c1(PLEKHB1) c2(NP_067023) c3(pleckstrin homology domain-containing family B member 1 isoform a) c4(208466, 208467, 208468, 208469) c5(208470, 208471, 208472, 208473, 208474, 208475, 208476, 208477) c6( ) c7(aW, W, d, K, aT); #c1(PLEKHB1) c2(XP_011543496) c3(pleckstrin homology domain-containing family B member 1 isoform X3) c4( ) c5(342371, 342372, 342373, 342374, 342375, 342376, 342377, 342378, 342379, 342380, 342381, 342382) c6( ) c7(aW, W, d, K, aT); #c1(PLEKHD1) c2(NP_001154970) c3(pleckstrin homology domain-containing family D member 1) c4(61241) c5(61242, 61243, 61244, 61245, 61246, 61247) c6( ) c7(aw); #c1(PLEKHF1) c2(NP_077286) c3(pleckstrin homology domain-containing family F member 1) c4(214942) c5(214943, 214944, 214945, 214946, 214947) c6( ) c7(T, esc, csb, lo, dL, t, esa); #c1(PLEKHF1) c2(XP_005259313) c3(pleckstrin homology domain-containing family F member 1 isoform X2) c4( ) c5(276060) c6( ) c7(T, esc, csb, lo, dL, t, esa); #c1(PLEKHF2) c2(NP_078889) c3(pleckstrin homology domain-containing family F member 2) c4(215954) c5(215955, 215956, 215957, 215958, 215959, 215960, 215961, 215962, 215963, 215964) c6( ) c7(ey); #c1(PLEKHG1) c2(NP_001025055) c3(pleckstrin homology domain-containing family G member 1) c4( ) c5(29274, 29275, 29276, 29277, 29278, 29279, 29280, 29281, 29282, 29283, 29284, 29285, 29286, 29287, 29288, 29289, 29290, 29291) c6( ) c7(ww, j, bA); #c1(PLEKHG1) c2(XP_011534283) c3(pleckstrin homology domain-containing family G member 1 isoform X2) c4(330653, 330654, 330655) c5(330656, 330657, 330658) c6( ) c7(ww, j, bA); #c1(PLEKHG1) c2(XP_011534284) c3(pleckstrin homology domain-containing family G member 1 isoform X4) c4( ) c5(330659) c6( ) c7(ww, j, bA); #c1(PLEKHG2) c2(NP_073746) c3(pleckstrin homology domain-containing family G member 2) c4(213440, 213441, 213442) c5(213443, 213444, 213445, 213446, 213447, 213448, 213449, 213450, 213451, 213452, 213453, 213454, 213455, 213456, 213457, 213458) c6( ) c7(av, iT, ky); #c1(PLEKHG2) c2(XP_006723397) c3(pleckstrin homology domain-containing family G member 2 isoform X5) c4(295187) c5(295188, 295189, 295190, 295191, 295192, 295193, 295194, 295195, 295196, 295197) c6( ) c7(av, iT, ky); #c1(PLEKHG2) c2(XP_011525536) c3(pleckstrin homology domain-containing family G member 2 isoform X4) c4(319956) c5(319957, 319958, 319959, 319960, 319961, 319962, 319963, 319964, 319965, 319966, 319967, 319968) c6( ) c7(av, iT, ky); #c1(PLEKHG3) c2(XP_011534927) c3(pleckstrin homology domain-containing family G member 3 isoform X2) c4(331507, 331508) c5( ) c6( ) c7(bN); #c1(PLEKHG3) c2(XP_011534929) c3(pleckstrin homology domain-containing family G member 3 isoform X4) c4( ) c5(331509, 331510, 331511) c6( ) c7(bN); #c1(PLEKHG4) c2(NP_001123201) c3(puratrophin-1 isoform 1) c4(46811, 46812) c5(46813, 46814, 46815, 46816, 46817, 46818, 46819, 46820, 46821, 46822, 46823, 46824, 46825, 46826, 46827) c6( ) c7(Ng, KB, ky, kB, Kv, rf, yZ, bX, aqO); #c1(PLEKHG4) c2(NP_001123203) c3(puratrophin-1 isoform 2) c4(46828) c5(46829, 46830, 46831, 46832, 46833, 46834, 46835) c6( ) c7(Ng, KB, ky, kB, Kv, rf, yZ, bX, aqO); #c1(PLEKHG4) c2(XP_011521291) c3(puratrophin-1 isoform X2) c4( ) c5(316183, 316184, 316185, 316186, 316187) c6( ) c7(Ng, KB, ky, kB, Kv, rf, yZ, bX, aqO); #c1(PLEKHG6) c2(NP_001138328) c3(pleckstrin homology domain-containing family G member 6 isoform a) c4(56157) c5(56158, 56159, 56160, 56161, 56162, 56163, 56164, 56165, 56166, 56167, 56168, 56169) c6( ) c7(aW, aT); #c1(PLEKHG6) c2(NP_001138329) c3(pleckstrin homology domain-containing family G member 6 isoform b) c4(56170, 56171) c5(56172, 56173, 56174, 56175, 56176, 56177, 56178, 56179, 56180, 56181, 56182, 56183, 56184) c6( ) c7(aW, aT); #c1(PLEKHH2) c2(NP_742066) c3(pleckstrin homology domain-containing family H member 2) c4(247932) c5(247933, 247934, 247935, 247936, 247937, 247938) c6( ) c7(vw); #c1(PLEKHM1) c2(NP_055613) c3(pleckstrin homology domain-containing family M member 1) c4(182282) c5(182283, 182284, 182285, 182286, 182287, 182288, 182289, 182290, 182291, 182292, 182293) c6( ) c7(zs, Hz, m, csd, an, cse); #c1(PLEKHM1) c2(XP_006722265) c3(pleckstrin homology domain-containing family M member 1 isoform X4) c4( ) c5(294674) c6( ) c7(zs, Hz, m, csd, an, cse); #c1(PLEKHM1) c2(XP_011523827) c3(pleckstrin homology domain-containing family M member 1 isoform X2) c4(318355, 318356, 318357) c5(318358, 318359, 318360, 318361, 318362, 318363, 318364, 318365, 318366, 318367, 318368, 318369, 318370, 318371, 318372, 318373, 318374, 318375, 318376, 318377, 318378, 318379, 318380) c6( ) c7(zs, Hz, m, csd, an, cse); #c1(PLEKHM1) c2(XP_011523828) c3(pleckstrin homology domain-containing family M member 1 isoform X3) c4(318381, 318382, 318383, 318384) c5(318385, 318386, 318387, 318388, 318389, 318390, 318391, 318392, 318393, 318394, 318395, 318396, 318397, 318398, 318399, 318400, 318401, 318402, 318403, 318404, 318405, 318406) c6( ) c7(zs, Hz, m, csd, an, cse); #c1(PLEKHO1) c2(NP_001291653) c3(pleckstrin homology domain-containing family O member 1 isoform c) c4( ) c5(116300, 116301, 116302, 116303, 116304) c6( ) c7(eF, eH); #c1(PLEKHO2) c2(NP_079477) c3(pleckstrin homology domain-containing family O member 2 isoform 1) c4(218237, 218238) c5(218239, 218240, 218241, 218242, 218243, 218244, 218245, 218246, 218247, 218248, 218249, 218250) c6( ) c7(j); #c1(PLG) c2(NP_000292) c3(plasminogen isoform 1 precursor) c4(6496, 6497) c5(6498, 6499, 6500, 6501, 6502, 6503, 6504, 6505, 6506, 6507, 6508, 6509, 6510, 6511, 6512, 6513, 6514, 6515, 6516, 6517, 6518, 6519, 6520, 6521, 6522, 6523, 6524, 6525, 6526, 6527, 6528, 6529, 6530, 6531, 6532, 6533, 6534, 6535, 6536, 6537, 6538, 6539, 6540, 6541, 6542, 6543, 6544, 6545, 6546, 6547, 6548, 6549, 6550, 6551, 6552, 6553, 6554, 6555, 6556, 6557, 6558, 6559, 6560, 6561, 6562, 6563, 6564, 6565, 6566, 6567, 6568, 6569, 6570, 6571, 6572, 6573, 6574, 6575, 6576, 6577, 6578, 6579, 6580, 6581, 6582, 6583, 6584, 6585, 6586, 6587, 6588, 6589, 6590, 6591, 6592, 6593, 6594, 6595, 6596, 6597, 6598, 6599, 6600, 6601, 6602, 6603, 6604, 6605, 6606, 6607, 6608, 6609, 6610, 6611, 6612, 6613, 6614, 6615, 6616, 6617, 6618, 6619, 6620, 6621, 6622, 6623, 6624, 6625, 6626, 6627, 6628, 6629, 6630, 6631, 6632, 6633, 6634, 6635, 6636, 6637, 6638, 6639, 6640, 6641, 6642, 6643, 6644, 6645, 6646, 6647, 6648, 6649) c6(6650) c7(DS, oO, T, bM, lD, aC, azf, xS, ea, if, e, al, Xi, l, eh, bB, aiC, ame, ci, bRn, ss, ip, bv, azY, dY, aE, M, K, hu, blx, dQ, eL, cp, bzH, hm, ly, eG, aW, az, YG, pD, aUG, zC, g, as, eF, axp, aVc, DL, bwe, aUF, qJ, eM, iT, mx, vy, wx, zv, Hb, m, fy, bcO, dD, wu, wJ, aw, ht, NT, ez, n, aj, blz, fr, ct, aBl, qN, cd, ai, El, aDF, ft, ju, rC, cU, nm, jH, dL, Gc, wC, OV, csj, csi, sq, EU, fQ, aq, fe, aZf, lx, kT, ok, W, dB, se, ayS, RJ, mg, hL, qq, uz, at, bm, eo, qF, it, B, bL, jv, dA, mr, Dh, dK, fG, cbc, aA, cz, v, j, C, nS, V, q, J, Yh, eA, eJ, MR, aHb, aT, cy, jj, an, rz, ae, af, aWK, kl, bf, wr, Y, Pg, aLJ, r, en, cl, wA, t, sS, nM, Dy, ac, lV, hc, dh, wR, dy, fD, csf, ao, hl, aCA, id, qb, iW, aET, bS, dG, ah, eq, ad, BY, csg, cit, dP, hd, hX, av, sN, Ot, ds, aQ, wm, jo, aGh, lz, vl, uX, d, lU, ue, cW, csk, ff, eH, aP, cr, eZ, dN, gl, afi, gE, aF, Z, csh, bz, dr, qa, eK, LB, bF, DT, zr, bE, ag, dX, aS, XO, be, ei, y, X, nQ, bpw); #c1(PLG) c2(NP_001161810) c3(plasminogen isoform 2 precursor) c4(66050) c5(66051, 66052, 66053, 66054, 66055, 66056, 66057, 66058, 66059, 66060) c6( ) c7(DS, oO, T, bM, lD, aC, azf, xS, ea, if, e, al, Xi, l, eh, bB, aiC, ame, ci, bRn, ss, ip, bv, azY, dY, aE, M, K, hu, blx, dQ, eL, cp, bzH, hm, ly, eG, aW, az, YG, pD, aUG, zC, g, as, eF, axp, aVc, DL, bwe, aUF, qJ, eM, iT, mx, vy, wx, zv, Hb, m, fy, bcO, dD, wu, wJ, aw, ht, NT, ez, n, aj, biz, fr, et, aBl, qN, cd, ai, EL aDF, ft, ju, rC, cU, nm, jH, dL, Gc, wC, OV, csj, csi, sq, EU, fQ, aq, fe, aZf, lx, kT, ok, W, dB, se, ayS, RJ, mg, hL, qq, uz, at, bm, eo, qF, it, B, bL, jv, dA, mr, Dh, dK, fG, cbc, aA, cz, v, j, C, nS, V, q, J, Yh, eA, eJ, MR, aHb, aT, cy, jj, an, rz, ae, af, aWK, kl, bf, wr, Y, Pg, aLJ, r, en, cl, wA, t, sS, nM, Dy, ac, lV, hc, dh, wR, dy, fD, csf, ao, hl, aCA, id, qb, iW, aET, bS, dG, ah, eq, ad, BY, csg, cit, dP, hd, hX, av, sN, Ot, ds, aQ, wm, jo, aGh, lz, vl, uX, d, lU, ue, cW, csk, ff, eH, aP, cr, eZ, dN, gl, afi, gE, aF, Z, csh, bz, dr, qa, eK, LB, bF, DT, zr, bE, ag, dX, aS, XO, be, ei, y, X, nQ, bpw); #c1(PLGLB2) c2(NP_002656) c3(plasminogen-like protein B precursor) c4(130764) c5(130765, 130766, 130767, 130768, 130769, 130770, 130771, 130772, 130773, 130774, 130775, 130776, 130777, 130778, 130779, 130780, 130781, 130782, 130783, 130784, 130785, 130786, 130787) c6(130788, 130789, 130790, 130791, 130792) c7(j); #c1(PLIN1) c2(XP_005254991) c3(perilipin-1 isoform X1) c4(273470, 273471) c5(273472, 273473, 273474, 273475, 273476, 273477, 273478, 273479, 273480, 273481, 273482) c6( ) c7(bL, kl, LL, ac, wr, aZ, QJ, axd, fc, M, cz, jy, mf, v, ei, csl, eu, Ql); #c1(PLIN2) c2(NP_001113) c3(perilipin-2) c4(43326, 43327, 43328, 43329, 43330) c5(43331, 43332, 43333, 43334, 43335, 43336, 43337, 43338, 43339, 43340, 43341, 43342, 43343, 43344, 43345, 43346, 43347, 43348, 43349, 43350, 43351, 43352, 43353, 43354, 43355, 43356, 43357, 43358, 43359, 43360) c6( ) c7(T, nl, axd, aA, v, zx, ci, fr, avD, py, aew, nJ, xX, iU, fc, mo, nC, amS, W, iA, go, cS, boH); #c1(PLIN3) c2(NP_001157666) c3(perilipin-3 isoform 3) c4(62395) c5(62396, 62397, 62398, 62399, 62400, 62401) c6( ) c7(v, K, vi); #c1(PLIN3) c2(NP_005808) c3(perilipin-3 isoform 1) c4(159617) c5(159618, 159619, 159620, 159621, 159622, 159623) c6( ) c7(v, K, vi); #c1(PLIN4) c2(NP_001073869) c3(perilipin-4) c4(36207) c5(36208, 36209, 36210, 36211, 36212, 36213) c6( ) c7(om, v, bA); #c1(PLIN5) c2(NP_001013728) c3(perilipin-5) c4(25737) c5(25738, 25739, 25740, 25741, 25742, 25743) c6( ) c7(v); #c1(PLK1) c2(NP_005021) c3(serine/threonine-protein kinase PLK1) c4(152244, 152245, 152246) c5(152247, 152248, 152249, 152250, 152251, 152252, 152253, 152254, 152255, 152256, 152257, 152258, 152259, 152260, 152261, 152262, 152263, 152264) c6( ) c7(T, aC, pf, fd, bB, ci, x, bv, aE, ja, K, hu, MO, pk, eL, Jl, aW, g, eF, cm, eM, nB, iA, iT, m, k, Or, ht, NT, n, fr, qN, ft, no, eV, dL, aq, QK, yR, iO, bP, asl, dB, hR, at, it, B, aMk, fM, eX, aA, hy, q, eA, eJ, aT, an, ae, ne, jf, iU, nO, oV, Y, ev, r, en, cl, t, ck, kP, au, bt, hS, id, jh, KD, ad, dP, hd, Db, d, BN, ff, eH, aF, iR, bz, es, bE, adg, X); #c1(PLK2) c2(NP_001239155) c3(serine/threonine-protein kinase PLK2 isoform 2) c4(88349) c5(88350, 88351, 88352, 88353, 88354, 88355) c6( ) c7(T, fV, jh, fd, ci, zP, XX, av, Bl, aE, aT, dL, K, pk, eL, af, ak, zQ, d, ff, eH, aq, en, g, eF, t, iR, m, bt, B); #c1(PLK2) c2(NP_006613) c3(serine/threonine-protein kinase PLK2 isoform 1) c4(166638, 166639) c5(166640, 166641, 166642, 166643, 166644, 166645, 166646, 166647, 166648, 166649, 166650, 166651) c6( ) c7(T, fV, jh, fd, ci, zP, XX, av, Bl, aE, aT, dL, K, pk, eL, af, ak, zQ, d, ff, eH, aq, en, g, eF, t, iR, m, bt, B); #c1(PLK4) c2(NP_001177728) c3(serine/threonine-protein kinase PLK4 isoform 2) c4(72935) c5(72936, 72937, 72938, 72939, 72940, 72941) c6( ) c7(T, yi, B, aT, r, aSW, kv, K, Nj, QK, ae, q, ad); #c1(PLK4) c2(NP_001177730) c3(serine/threonine-protein kinase PLK4 isoform 3) c4( ) c5(72942, 72943, 72944, 72945, 72946) c6( ) c7(T, yi, B, aT, r, aSW, kv, K, Nj, QK, ae, q, ad); #c1(PLK4) c2(NP_055079) c3(serine/threonine-protein kinase PLK4 isoform 1) c4(178837, 178838) c5(178839, 178840, 178841, 178842, 178843, 178844, 178845) c6( ) c7(T, yi, B, aT, r, aSW, kv, K, Nj, QK, ae, q, ad); #c1(PLK5) c2(NP_001230008) c3(inactive serine/threonine-protein kinase PLK5) c4(85773) c5(85774, 85775, 85776, 85777, 85778, 85779) c6( ) c7(dB, d, as); #c1(PLLP) c2(NP_057077) c3(plasmolipin) c4(188822) c5(188823, 188824, 188825, 188826, 188827, 188828) c6( ) c7(agU, af, Tp); #c1(PLN) c2(NP_002658) c3(cardiac phospholamban) c4(130793) c5(130794, 130795, 130796, 130797, 130798, 130799, 130800) c6( ) c7(bL, T, mr, acl, e, aw, cz, akA, sl, cd, csm, cc, cq, Bc, JD, Ml, h, vc, mu, anR, csn, mo, ck, akF, iT, wK, eB, mx, lI, gZ, en, bD, bt); #c1(PLOD2) c2(NP_000926) c3(procollagen-lysine,2-oxoglutarate 5-dioxygenase 2 isoform 2 precursor) c4(17393) c5(17394, 17395, 17396, 17397, 17398, 17399, 17400, 17401) c6( ) c7(iU, aW, aRV, yg, aT, buA, uo, uJ, aq, ey, zp, lR, pb, cso, gT, Eh, B, t); #c1(PLOD2) c2(NP_891988) c3(procollagen-lysine,2-oxoglutarate 5-dioxygenase 2 isoform 1 precursor) c4(257397, 257398, 257399) c5(257400, 257401, 257402, 257403, 257404, 257405, 257406, 257407, 257408, 257409, 257410, 257411, 257412, 257413, 257414, 257415) c6( ) c7(iU, aW, aRV, yg, aT, buA, uo, uJ, aq, ey, zp, lR, pb, cso, gT, Eh, B, t); #c1(PLOD2) c2(XP_005247592) c3(procollagen-lysine,2-oxoglutarate 5-dioxygenase 2 isoform X1) c4( ) c5(267874, 267875, 267876, 267877, 267878, 267879, 267880, 267881) c6( ) c7(iU, aW, aRV, yg, aT, buA, uo, uJ, aq, ey, zp, lR, pb, cso, gT, Eh, B, t); #c1(PLP1) c2(NP_000524) c3(myelin proteolipid protein isoform 1) c4(11810, 11811, 11812, 11813, 11814, 11815) c5(11816, 11817, 11818, 11819, 11820, 11821, 11822, 11823, 11824, 11825, 11826, 11827, 11828, 11829, 11830, 11831, 11832, 11833, 11834, 11835, 11836, 11837, 11838, 11839, 11840, 11841, 11842, 11843, 11844, 11845, 11846, 11847, 11848, 11849, 11850, 11851, 11852, 11853, 11854, 11855) c6( ) c7(ach, eR, dM, agU, sM, oR, GC, csq, fu, bX, mF, V, aR, ke, aV, lu, K, cb, Jj, aHU, as, dr, bN, asE, Qn, cpE, ahN, KE, TJ, wE, aGY, U, oh, Lq, Da, bk, bee, csp); #c1(PLP1) c2(NP_955772) c3(myelin proteolipid protein isoform 2) c4(261946, 261947, 261948) c5(261949, 261950, 261951, 261952, 261953, 261954, 261955, 261956, 261957, 261958, 261959, 261960, 261961, 261962, 261963, 261964, 261965, 261966) c6( ) c7(ach, eR, dM, agU, sM, oR, GC, csq, fu, bX, mF, V, aR, ke, aV, lu, K, cb, Jj, aHU, as, dr, bN, asE, Qn, cpE, ahN, KE, TJ, wE, aGY, U, oh, Lq, Da, bk, bee, csp); #c1(PLP2) c2(NP_002659) c3(proteolipid protein 2) c4(130801, 130802) c5(130803, 130804, 130805, 130806, 130807, 130808, 130809, 130810, 130811, 130812, 130813, 130814) c6( ) c7(nf, B, K); #c1(PLRG1) c2(NP_001188493) c3(pleiotropic regulator 1 isoform 2) c4(79218) c5(79219, 79220, 79221, 79222, 79223, 79224) c6( ) c7(By, T, bz, it); #c1(PLRG1) c2(NP_002660) c3(pleiotropic regulator 1 isoform 1) c4(130815, 130816) c5(130817, 130818, 130819, 130820, 130821, 130822, 130823, 130824, 130825, 130826, 130827, 130828, 130829) c6( ) c7(By, T, bz, it); #c1(PLS1) c2(NP_001138791) c3(plastin-1) c4(57698, 57699, 57700, 57701, 57702, 57703, 57704) c5(57705, 57706, 57707, 57708, 57709, 57710, 57711, 57712, 57713, 57714, 57715, 57716, 57717, 57718, 57719, 57720, 57721, 57722, 57723, 57724, 57725, 57726, 57727, 57728, 57729, 57730, 57731, 57732, 57733, 57734, 57735, 57736, 57737, 57738, 57739, 57740, 57741, 57742, 57743, 57744, 57745, 57746, 57747, 57748, 57749, 57750, 57751, 57752, 57753, 57754) c6( ) c7(bL, iu, Ol, ds, axW, aq, zo); #c1(PLS3) c2(NP_001269266) c3(plastin-3 isoform 3) c4(101001, 101002) c5(101003, 101004, 101005, 101006, 101007, 101008, 101009, 101010, 101011, 101012, 101013, 101014) c6( ) c7(eU, bE, r, kf, n, bB, zp, q, bA); #c1(PLS3) c2(NP_001269267) c3(plastin-3 isoform 4) c4( ) c5(101015, 101016, 101017, 101018, 101019, 101020, 101021, 101022, 101023, 101024, 101025) c6( ) c7(eU, bE, r, kf, n, bB, zp, q, bA); #c1(PLS3) c2(XP_011535836) c3(plastin-3 isoform X1) c4(333047, 333048, 333049) c5(333050, 333051, 333052, 333053, 333054, 333055, 333056, 333057, 333058, 333059, 333060, 333061, 333062, 333063) c6( ) c7(eU, bE, r, kf, n, bB, zp, q, bA); #c1(PLSCR1) c2(NP_066928) c3(phospholipid scramblase 1) c4(207530, 207531, 207532) c5(207533, 207534, 207535, 207536, 207537, 207538, 207539, 207540, 207541, 207542, 207543, 207544) c6( ) c7(ck, iT, ds, bud, ag, eZ, ci, m, jj, t, bt, kS, eK); #c1(PLSCR1) c2(XP_011511209) c3(phospholipid scramblase 1 isoform X3) c4( ) c5(301688, 301689, 301690, 301691, 301692, 301693) c6( ) c7(ck, iT, ds, bud, ag, eZ, ci, m, jj, t, bt, kS, eK); #c1(PLSCR3) c2(NP_065093) c3(phospholipid scramblase 3) c4(203838, 203839) c5(203840, 203841, 203842, 203843, 203844, 203845, 203846, 203847, 203848, 203849, 203850, 203851, 203852, 203853, 203854, 203855, 203856, 203857, 203858, 203859) c6( ) c7(cm, v); #c1(PLSCR4) c2(NP_001121778) c3(phospholipid scramblase 4 isoform b) c4(46129, 46130) c5(46131, 46132, 46133, 46134, 46135, 46136, 46137, 46138, 46139, 46140, 46141, 46142, 46143) c6( ) c7(Bl, ft, eD, jh, rO, bS, cd); #c1(PLSCR4) c2(NP_001170775) c3(phospholipid scramblase 4 isoform c) c4( ) c5(69507, 69508, 69509, 69510, 69511) c6( ) c7(Bl, ft, eD, jh, rO, bS, cd); #c1(PLSCR4) c2(NP_065086) c3(phospholipid scramblase 4 isoform a) c4(203794, 203795, 203796, 203797, 203798) c5(203799, 203800, 203801, 203802, 203803, 203804, 203805, 203806, 203807, 203808, 203809, 203810, 203811, 203812, 203813, 203814, 203815, 203816, 203817, 203818, 203819, 203820, 203821, 203822, 203823, 203824, 203825, 203826, 203827, 203828, 203829, 203830) c6( ) c7(Bl, ft, eD, jh, rO, bS, cd); #c1(PLSCR5) c2(NP_001078889) c3(phospholipid scramblase family member 5) c4(37955) c5(37956, 37957, 37958, 37959, 37960, 37961, 37962, 37963, 37964, 37965) c6( ) c7(cd); #c1(PLTP) c2(NP_001229849) c3(phospholipid transfer protein isoform c precursor) c4(85409) c5(85410, 85411, 85412, 85413, 85414, 85415) c6( ) c7(bL, dD, ea, e, aj, v, j, eq, J, Zu, dY, nX, aT, K, dQ, qO, af, cW, si, ZB, mg, vQ); #c1(PLTP) c2(NP_001229850) c3(phospholipid transfer protein isoform d) c4( ) c5(85416, 85417, 85418, 85419, 85420) c6( ) c7(bL, dD, ea, e, aj, v, j, eq, J, Zu, dY, nX, aT, K, dQ, qO, af, cW, si, ZB, mg, vQ); #c1(PLTP) c2(NP_006218) c3(phospholipid transfer protein isoform a precursor) c4(163020, 163021, 163022) c5(163023, 163024, 163025, 163026, 163027, 163028, 163029, 163030, 163031, 163032, 163033, 163034, 163035, 163036, 163037, 163038) c6( ) c7(bL, dD, ea, e, aj, v, j, eq, J, Zu, dY, nX, aT, K, dQ, qO, af, cW, si, ZB, mg, vQ); #c1(PLTP) c2(NP_872617) c3(phospholipid transfer protein isoform b precursor) c4(256532) c5(256533, 256534, 256535, 256536, 256537, 256538) c6( ) c7(bL, dD, ea, e, aj, v, j, eq, J, Zu, dY, nX, aT, K, dQ, qO, af, cW, si, ZB, mg, vQ); #c1(PLVAP) c2(NP_112600) c3(plasmalemma vesicle-associated protein) c4(221533) c5(221534, 221535, 221536, 221537, 221538, 221539) c6( ) c7(dB, WS, je, iM); #c1(PLXDC1) c2(NP_065138) c3(plexin domain-containing protein 1 precursor) c4(204153, 204154, 204155, 204156, 204157, 204158, 204159, 204160) c5(204161, 204162, 204163, 204164, 204165, 204166, 204167, 204168, 204169, 204170, 204171, 204172, 204173, 204174, 204175, 204176, 204177, 204178, 204179, 204180, 204181, 204182, 204183, 204184, 204185, 204186, 204187, 204188, 204189, 204190, 204191, 204192, 204193, 204194, 204195, 204196, 204197, 204198, 204199, 204200, 204201, 204202, 204203, 204204, 204205, 204206, 204207, 204208, 204209, 204210, 204211, 204212, 204213, 204214, 204215, 204216, 204217, 204218, 204219, 204220, 204221, 204222) c6( ) c7(eF, vx, T, vy); #c1(PLXDC2) c2(NP_001269665) c3(plexin domain-containing protein 2 isoform 2) c4(102467) c5(102468, 102469, 102470, 102471, 102472, 102473) c6( ) c7(pZ, vy, gZ, aj, aS, j, bX, fq, cd, J); #c1(PLXDC2) c2(NP_116201) c3(plexin domain-containing protein 2 isoform 1 precursor) c4(225724, 225725, 225726) c5(225727, 225728, 225729, 225730, 225731, 225732, 225733, 225734, 225735, 225736, 225737, 225738, 225739, 225740, 225741, 225742, 225743, 225744) c6( ) c7(pZ, vy, gZ, aj, aS, j, bX, fq, cd, J); #c1(PLXNA1) c2(NP_115618) c3(plexin-A1 precursor) c4(223375) c5(223376, 223377, 223378, 223379, 223380, 223381, 223382, 223383, 223384, 223385, 223386) c6( ) c7(T, ib, aE, nO, aW, bOL, eL, aT, KO, dL, m, ci, er, ae, eA, ad, hS); #c1(PLXNA1) c2(XP_011511211) c3(plexin-A1 isoform X1) c4(301694) c5( ) c6( ) c7(T, ib, aE, nO, aW, bOL, eL, aT, KO, dL, m, ci, er, ae, eA, ad, hS); #c1(PLXNA2) c2(NP_079455) c3(plexin-A2 precursor) c4(218172) c5(218173, 218174, 218175, 218176, 218177, 218178) c6( ) c7(bGg, bL, fM, cdY, aZ, iW, oe, nx, e, aw, jh, To, cor, jA, ci, nA, csr, Jt, ad, aCJ, bxi, an, he, aQu, db, ae, bA, d, cm, Uk, hq, agS, ck, KE, W, bnP, aQx, vi); #c1(PLXNA2) c2(XP_005273222) c3(plexin-A2 isoform X3) c4( ) c5(284370, 284371) c6( ) c7(bGg, bL, fM, cdY, aZ, iW, oe, nx, e, aw, jh, To, cor, jA, ci, nA, csr, Jt, ad, aC J, bxi, an, he, aQu, db, ae, bA, d, cm, Uk, hq, agS, ck, KE, W, bnP, aQx, vi); #c1(PLXNA3) c2(NP_059984) c3(plexin-A3 precursor) c4(193477) c5(193478, 193479, 193480, 193481, 193482, 193483) c6( ) c7(xS, Fn, cA, ajv, hL, cz, bO, eZ, afE, hq); #c1(PLXNA4) c2(NP_001099013) c3(plexin-A4 isoform 3 precursor) c4(41655) c5(41656, 41657, 41658, 41659, 41660, 41661) c6( ) c7(bM, dY, Y, oe, U, eZ); #c1(PLXNA4) c2(XP_005250743) c3(plexin-A4 isoform X2) c4(270500) c5(270501, 270502, 270503, 270504, 270505, 270506, 270507, 270508, 270509, 270510) c6( ) c7(bM, dY, Y, oe, U, eZ); #c1(PLXNA4) c2(XP_005250744) c3(plexin-A4 isoform X1) c4(270511) c5(270512, 270513, 270514, 270515, 270516, 270517) c6( ) c7(bM, dY, Y, oe, U, eZ); #c1(PLXNB1) c2(NP_001123554) c3(plexin-B1 precursor) c4(47488, 47489, 47490) c5(47491, 47492, 47493, 47494, 47495, 47496, 47497, 47498, 47499, 47500, 47501, 47502, 47503, 47504, 47505, 47506, 47507, 47508, 47509, 47510, 47511, 47512, 47513, 47514, 47515, 47516, 47517, 47518, 47513, 47520, 47521, 47522, 47523, 47524, 47525, 47526) c6(47527, 47528, 47529, 47530, 47531, 47532, 47533, 47534, 47535, 47536) c7(T, sw, Y, aW, if, aT, cj, n, aj, fr, ci, m, qN, g, t, agT, J); #c1(PLXNB3) c2(NP_001156729) c3(plexin-B3 isoform 2) c4(61843, 61844, 61845, 61846) c5(61847, 61848, 61849, 61850, 61851, 61852, 61853, 61854, 61855, 61856, 61857, 61858, 61859, 61860, 61861, 61862, 61863, 61864) c6( ) c7(T, eA); #c1(PLXNB3) c2(NP_005384) c3(plexin-B3 isoform 1 precursor) c4(155596, 155597, 155598, 155599) c5(155600, 155601, 155602, 155603, 155604, 155605, 155606, 155607, 155608, 155609, 155610, 155611, 155612, 155613, 155614, 155615, 155616, 155617, 155618, 155619, 155620, 155621, 155622, 155623, 155624, 155625, 155626, 155627, 155628, 155629) c6( ) c7(T, eA); #c1(PLXNC1) c2(NP_005752) c3(plexin-C1 precursor) c4(159011, 159012, 159013) c5(159014, 159015, 159016, 159017, 159018, 159019, 159020, 159021, 159022, 159023, 159024, 159025) c6( ) c7(dP, T, Y, cp, an); #c1(PLXND1) c2(NP_055918) c3(plexin-D1 precursor) c4(184474, 184475) c5(184476, 184477, 184478, 184479, 184480, 184481) c6( ) c7(T, anB, dB, Y, RX, aA, cY); #c1(PLXND1) c2(XP_011510890) c3(plexin-D1 isoform X1) c4( ) c5(301357, 301358, 301359, 301360, 301361, 301362) c6( ) c7(T, anB, dB, Y, RX, aA, cY); #c1(PM2OD1) c2(NP_689704) c3(probable carboxypeptidase PM2OD1 precursor) c4(243624) c5(243625, 243626, 243627, 243628, 243629, 243630, 243631, 243632) c6(243633, 243634) c7(aiV, wz, aq, afD, an, iR, B); #c1(PMAIP1) c2(NP_066950) c3(phorbol-12-myristate-13-acetate-induced protein 1) c4(207658, 207659) c5(207660, 207661, 207662, 207663, 207664, 207665, 207666, 207667, 207668, 207669, 207670) c6( ) c7(T, aC, fR, Or, fd, n, V, ad, ft, aE, aT, jj, ae, dx, afu, aW, Y, afF, GA, aq, kp, t, iK, bz, eM, cj, apv, m, lB, kS, B); #c1(PMCH) c2(NP_002665) c3(pro-MCH preproprotein) c4(130830) c5(130831, 130832, 130833, 130834, 130835, 130836) c6( ) c7(bM, EQ, fN, To, aj, QZ, bS, ct, v, Tg, yw, oW, K, qD, aDp, bGL, hl, eH, Hu, Z, eF, cm, bJ, BU, byx, qe, baO, Cz, pw, ER); #c1(PMEL) c2(NP_001186982) c3(melanocyte protein PMEL isoform 2 precursor) c4(78953) c5(78954, 78955, 78956, 78957, 78958, 78959, 78960, 78961) c6(78962, 78963) c7(T, if, DV, jh, fd, bB, qj, ci, ze, qN, aYs, ad, x, fX, xy, akU, kH, hD, h, bOZ, Xh, ae, cp, d, kj, je, Y, ff, en, g, kk, aoG, Wv, ck, iM, dc, lF, cj, ahC, k, lC, pC); #c1(PMEL) c2(XP_006719632) c3(melanocyte protein PMEL isoform X2) c4(292727, 292728) c5(292729, 292730, 292731, 292732, 292733, 292734, 292735, 292736, 292737, 292738, 292739, 292740, 292741, 292742, 292743, 292744, 292745, 292746, 292747, 292748) c6(292749, 292750, 292751, 292752, 292753, 292754) c7(T, if, DV, jh, fd, bB, qj, ci, ze, qN, aYs, ad, x, fX, xy, akU, kH, hD, h, bOZ, Xh, ae, cp, d, kj, je, Y, ff, en, g, kk, aoG, Wv, ck, iM, dc, lF, cj, ahC, k, lC, pC); #c1(PMEL) c2(XP_011536987) c3(melanocyte protein PMEL isoform X1) c4(334675, 334676) c5(334677, 334678, 334679, 334680, 334681, 334682, 334683, 334684, 334685, 334686, 334687, 334688, 334689, 334690, 334691, 334692) c6(334693, 334694, 334695, 334696) c7(T, if, DV, jh, fd, bB, qj, ci, ze, qN, aYs, ad, x, fX, xy, akU, kH, hD, h, bOZ, Xh, ae, cp, d, kj, je, Y, ff, en, g, kk, aoG, Wv, ck, iM, dc, lF, cj, ahC, k, lC, pC); #c1(PMEL) c2(XP_011536988) c3(melanocyte protein PMEL isoform X3) c4(334697) c5(334698, 334699, 334700, 334701, 334702, 334703, 334704, 334705) c6(334706, 334707) c7(T, if, DV, jh, fd, bB, qj, ci, ze, qN, aYs, ad, x, fX, xy, akU, kH, hD, h, bOZ, Xh, ae, cp, d, kj, je, Y, ff, en, g, kk, aoG, Wv, ck, iM, dc, lF, cj, ahC, k, lC, pC); #c1(PMEL) c2(XP_011536989) c3(melanocyte protein PMEL isoform X4) c4( ) c5(334708, 334709, 334710, 334711, 334712, 334713, 334714, 334715, 334716) c6(334717, 334718) c7(T, if, DV, jh, fd, bB, qj, ci, ze, qN, aYs, ad, x, fX, xy, akU, kH, hD, h, bOZ, Xh, ae, cp, d, kj, je, Y, ff, en, g, kk, aoG, Wv, ck, iM, dc, lF, cj, ahC, k, lC, pC); #c1(PMEPA1) c2(NP_001242905) c3(protein TMEPAI isoform d) c4(89203) c5(89204, 89205, 89206, 89207, 89208, 89209, 89210) c6( ) c7(bM, T, NT, jh, bB, fr, ci, ad, av, iu, aT, K, an, ae, s, aW, PX, g, t, bz, ck, ac, bE, m, X); #c1(PMEPA1) c2(NP_064567) c3(protein TMEPAI isoform a) c4(203004, 203005, 203006) c5(203007, 203008, 203009, 203010, 203011, 203012, 203013, 203014, 203015, 203016, 203017, 203018) c6( ) c7(bM, T, NT, jh, bB, fr, ci, ad, av, iu, aT, K, an, ae, s, aW, PX, g, t, bz, ck, ac, bE, m, X); #c1(PMEPA1) c2(NP_954638) c3(protein TMEPAI isoform b) c4(261128) c5(261129, 261130, 261131, 261132, 261133, 261134, 261135, 261136) c6( ) c7(bM, T, NT, jh, bB, fr, ci, ad, av, iu, aT, K, an, ae, s, aW, PX, g, t, bz, ck, ac, bE, m, X); #c1(PMEPA1) c2(NP_954639) c3(protein TMEPAI isoform c precursor) c4( ) c5(261137, 261138, 261139, 261140, 261141, 261142, 261143, 261144, 261145, 261146, 261147) c6( ) c7(bM, T, NT, jh, bB, fr, ci, ad, av, iu, aT, K, an, ae, s, aW, PX, g, t, bz, ck, ac, bE, m, X); #c1(PMF1) c2(NP_001186582) c3(polyamine-modulated factor 1 isoform 3) c4(77890) c5(77891, 77892, 77893, 77894, 77895, 77896) c6( ) c7(n, dL, eL); #c1(PMF1) c2(NP_001186583) c3(polyamine-modulated factor 1 isoform 1) c4(77897) c5(77898, 77899, 77900, 77901, 77902, 77903) c6( ) c7(n, dL, eL); #c1(PMF1) c2(NP_009152) c3(polyamine-modulated factor 1 isoform 2) c4(171154) c5(171155, 171156, 171157, 171158, 171159, 171160, 171161) c6( ) c7(n, dL, eL); #c1(PMF1-BGLAP) c2(NP_001186590) c3(PMF1-BGLAP protein isoform 1) c4(77904) c5(77905, 77906, 77907, 77908, 77909, 77910) c6( ) c7(n, dL, eL); #c1(PMF1-BGLAP) c2(NP_001186592) c3(PMF1-BGLAP protein isoform 3) c4(77911) c5(77912, 77913, 77914, 77915, 77916, 77917) c6( ) c7(n, dL, eL); #c1(PML) c2(NP_002666) c3(protein PML isoform 6) c4(130837) c5(130838, 130839, 130840, 130841, 130842, 130843, 130844) c6( ) c7(T, fR, if, bB, ci, mF, x, aXK, iv, K, be, aW, alb, g, eF, cm, eM, iT, cj, k, m, bi, cst, NK, wu, n, qN, eW, no, h, eV, vx, on, pi, aq, cM, avf, Zj, hk, B, jp, DD, eX, fZ, aA, Kh, acn, AO, DK, aT, dz, jj, ae, af, Uf, iU, vT, ev, aPf, lo, en, hf, t, f, ck, ac, au, bt, oA, css, jh, hF, ad, hX, fX, py, bdM, iY, wm, d, BN, ff, eH, rO, aF, hp, iR, bz, baa, bE, dX, bC, hE, kS, y); #c1(PML) c2(NP_150241) c3(protein PML isoform 1) c4(227925, 227926, 227927, 227928) c5(227929, 227930, 227931, 227932, 227933, 227934, 227935, 227936, 227937, 227938, 227939, 227940, 227941, 227942, 227943, 227944, 227945, 227946) c6( ) c7(T, fR, if, bB, ci, mF, x, aXK, iv, K, be, aW, alb, g, eF, cm, eM, iT, cj, k, m, bi, cst, NK, wu, n, qN, eW, no, h, eV, vx, on, pi, aq, cM, avf, Zj, hk, B, jp, DD, eX, fZ, aA, Kh, acn, AO, DK, aT, dz, jj, ae, af, Uf, iU, vT, ev, aPf, lo, en, hf, t, f, ck, ac, au, bt, oA, css, jh, hF, ad, hX, fX, py, bdM, iY, wm, d, BN, ff, eH, rU, aF, hp, iR, bz, baa, bE, dX, bC, hE, kS, y); #c1(PML) c2(NP_150242) c3(protein PML isoform 9) c4(227947) c5(227948, 227949, 227950, 227951, 227952, 227953, 227954, 227955, 227956, 227957, 227958, 227959, 227960, 227961, 227962) c6( ) c7(T, fR, if, bB, ci, mF, x, aXK, iv, K, be, aW, alb, g, eF, cm, eM, iT, cj, k, m, bi, cst, NK, wu, n, qN, eW, no, h, eV, vx, on, pi, aq, cM, avf, Zj, hk, B, jp, DD, eX, fZ, aA, Kh, acn, AO, DK, aT, dz, jj, ae, af, Uf, iU, vT, ev, aPf, lo, en, hf, t, f, ck, ac, au, bt, oA, css, jh, hF, ad, hX, fX, py, bdM, iY, wm, d, BN, ff, eH, rU, aF, hp, iR, bz, baa, bE, dX, bC, hE, kS, y); #c1(PML) c2(NP_150243) c3(protein PML isoform 2) c4(227963) c5(227964, 227965, 227966, 227967, 227968, 227969) c6( ) c7(T, fR, if, bB, ci, mF, x, aXK, iv, K, be, aW, alb, g, eF, cm, eM, iT, cj, k, m, bi, cst, NK, wu, n, qN, eW, no, h, eV, vx, on, pi, aq, cM, avf, Zj, hk, B, jp, DD, eX, fZ, aA, Kh, acn, AO, DK, aT, dz, jj, ae, af, Uf, iU, vT, ev, aPf, lo, en, hf, t, f, ck, ac, au, bt, oA, css, jh, hE, ad, hX, fX, py, bdM, iY, wm, d, BN, ff, eH, rU, aF, hp, iR, bz, baa, bE, dX, bC, hE, kS, y); #c1(PML) c2(NP_150247) c3(protein PML isoform 5) c4(227970) c5(227971, 227972, 227973, 227974, 227975, 227976) c6( ) c7(T, fR, if, bB, ci, mF, x, aXK, iv, K, be, aW, alb, g, eF, cm, eM, iT, cj, k, m, bi, cst, NK, wu, n, qN, eW, no, h, eV, vx, on, pi, aq, cM, avf, Zj, hk, B, jp, DD, eX, fZ, aA, Kh, acn, AO, DK, aT, dz, jj, ae, af, Uf, iU, vT, ev, aPf, lo, en, hf, t, f, ck, ac, au, bt, oA, css, jh, hE, ad, hX, fX, py, bdM, iY, wm, d, BN, ff, eH, rU, aF, hp, iR, bz, baa, bE, dX, bC, hE, kS, y); #c1(PML) c2(NP_150249) c3(protein PML isoform 7) c4( ) c5(227977, 227978, 227979, 227980, 227981, 227982) c6( ) c7(T, fR, if, bB, ci, mF, x, aXK, iv, K, be, aW, alb, g, eF, cm, eM, iT, cj, k, m, bi, cst, NK, wu, n, qN, eW, no, h, eV, vx, on, pi, aq, cM, avf, Zj, hk, B, jp, DD, eX, fZ, aA, Kh, acn, AO, DK, aT, dz, jj, ae, af, Uf, iU, vT, ev, aPf, lo, en, hf, t, f, ck, ac, au, bt, oA, css, jh, hE, ad, hX, fX, py, bdM, iY, wm, d, BN, ff, eH, rU, aF, hp, iR, bz, baa, bE, dX, bC, hE, kS, y); #c1(PML) c2(NP_150250) c3(protein PML isoform 8) c4(227983) c5(227984, 227985, 227986, 227987, 227988, 227989) c6( ) c7(T, fR, if, bB, ci, mF, x, aXK, iv, K, be, aW, alb, g, eF, cm, eM, iT, cj, k, m, bi, cst, NK, wu, n, qN, eW, no, h, eV, vx, on, pi, aq, cM, avf, Zj, hk, B, jp, DD, eX, fZ, aA, Kh, acn, AO, DK, aT, dz, jj, ae, af, Uf, iU, vT, ev, aPf, lo, en, hf, t, f, ck, ac, au, bt, oA, css, jh, hE, ad, hX, fX, py, bdM, iY, wm, d, BN, ff, eH, rU, aF, hp, iR, bz, baa, bE, dX, bC, hE, kS, y); #c1(PML) c2(NP_150252) c3(protein PML isoform 10) c4(227990) c5(227991, 227992, 227993, 227994, 227995, 227996) c6( ) c7(T, fR, if, bB, ci, mF, x, aXK, iv, K, be, aW, alb, g, eF, cm, eM, iT, cj, k, m, bi, cst, NK, wu, n, qN, eW, no, h, eV, vx, on, pi, aq, cM, avf, Zj, hk, B, jp, DD, eX, fZ, aA, Kh, acn, AO, DK, aT, dz, jj, ae, af, Uf, iU, vT, ev, aPf, lo, en, hf, t, f, ck, ac, au, bt, oA, css, jh, hE, ad, hX, fX, py, bdM, iY, wm, d, BN, ff, eH, rU, aF, hp, iR, bz, baa, bE, dX, bC, hE, kS, y); #c1(PML) c2(NP_150253) c3(protein PML isoform 11) c4(227997) c5(227998, 227999, 228000, 228001, 228002, 228003) c6( ) c7(T, fR, if, bB, ci, mF, x, aXK, iv, K, be, aW, alb, g, eF, cm, eM, iT, cj, k, m, bi, cst, NK, wu, n, qN, eW, no, h, eV, vx, on, pi, aq, cM, avf, Zj, hk, B, jp, DD, eX, fZ, aA, Kh, acn, AO, DK, aT, dz, jj, ae, af, Uf, iU, vT, ev, aPf, lo, en, hf, t, f, ck, ac, au, bt, oA, css, jh, hE, ad, hX, fX, py, bdM, iY, wm, d, BN, ff, eH, rU, aF, hp, iR, bz, baa, bE, dX, bC, hE, kS, y); #c1(PMM1) c2(NP_002667) c3(phosphomannomutase 1) c4(130845) c5(130846, 130847, 130848, 130849, 130850, 130851) c6( ) c7(MY, Lo, vi); #c1(PMM2) c2(NP_000294) c3(phosphomannomutase 2) c4(6651, 6652) c5(6653, 6654, 6655, 6656, 6657, 6658, 6659) c6( ) c7(bhy, bL, cfE, dH, il, SQ, dv, SM, akL, dq, CZ, Lo, Km, nA, xH, nC, MY, jr, de); #c1(PMM2) c2(XP_005255431) c3(phosphomannomutase 2 isoform X4) c4(273645) c5(273646, 273647, 273648, 273649, 273650, 273651, 273652, 273653, 273654, 273655, 273656) c6( ) c7(bhy, bL, cfE, dH, il, SQ, dv, SM, akL, dq, CZ, Lo, Km, nA, xH, nC, MY, jr, de); #c1(PMP22) c2(NP_000295) c3(peripheral myelin protein 22) c4(6660, 6661) c5(6662, 6663, 6664, 6665, 6666, 6667, 6668, 6669, 6670, 6671, 6672, 6673, 6674, 6675, 6676, 6677, 6678) c6( ) c7(cw, ach, T, dA, ob, aiK, Pt, xF, bkY, csv, amp, bbn, My, yk, csx, n, aj, bze, ci, fu, bX, mF, arX, q, aR, eA, aLI, LH, ke, csA, no, csC, vJ, aT, UD, cfP, bl, ji, bUo, bU, csy, sX, dF, mJ, yr, apI, csB, mD, csz, bT, aW, xs, bhi, aFT, r, oV, Ls, aDm, eH, agU, g, hf, eF, cbm, iV, pb, dr, dR, bkZ, sk, EW, csu, Hp, ql, bkW, bgy, csw, ig, mG, AH, bee, UF, bCG, afO); #c1(PMP22) c2(XP_011522245) c3(peripheral myelin protein 22 isoform X1) c4(316882) c5(316883, 316884, 316885, 316886, 316887) c6( ) c7(cw, ach, T, dA, ob, aiK, Pt, xF, bkY, csv, amp, bbn, My, yk, csx, n, aj, bze, ci, fu, bX, mF, arX, q, aR, eA, aLI, LH, ke, csA, no, csC, vJ, aT, UD, cfP, bl, ji, bUo, bU, csy, sX, dF, mJ, yr, apI, csB, mD, csz, bT, aW, xs, bhi, aFT, r, oV, Ls, aDm, eH, agU, g, hf, eF, cbm, iV, pb, dr, dR, bkZ, sk, EW, csu, Hp, ql, bkW, bgy, csw, ig, mG, AH, bee, UF, bCG, afO); #c1(PMPCA) c2(NP_001269873) c3(mitochondrial-processing peptidase subunit alpha isoform 2) c4(102996) c5(102997, 102998, 102999, 103000, 103001, 103002) c6( ) c7(bSf, Tp); #c1(PMPCA) c2(NP_055975) c3(mitochondrial-processing peptidase subunit alpha isoform 1 precursor) c4(184826, 184827) c5(184828, 184829, 184830, 184831, 184832, 184833, 184834, 184835, 184836, 184837, 184838, 184839) c6( ) c7(bSf, Tp); #c1(PMPCA) c2(XP_005266116) c3(mitochondrial-processing peptidase subunit alpha isoform X1) c4(279908) c5( ) c6( ) c7(bSf, Tp); #c1(PMPCA) c2(XP_011516719) c3(mitochondrial-processing peptidase subunit alpha isoform X2) c4( ) c5(310173, 310174, 310175, 310176, 310177, 310178) c6( ) c7(bSf, Tp); #c1(PMPCB) c2(NP_004270) c3(mitochondrial-processing peptidase subunit beta precursor) c4(144743) c5(144744, 144745, 144746, 144747, 144748, 144749) c6( ) c7(iU, T, ff, en); #c1(PMPCB) c2(XP_005250774) c3(mitochondrial-processing peptidase subunit beta isoform X1) c4(270534) c5(270535, 270536, 270537, 270538, 270539, 270540) c6( ) c7(iU, T, ff, en); #c1(PMS1) c2(NP_000525) c3(PMS1 protein homolog 1 isoform a) c4(11856, 11857, 11858) c5(11859, 11860, 11861, 11862, 11863, 11864, 11865, 11866, 11867, 11868, 11869, 11870, 11871, 11872) c6( ) c7(T, aC, fM, jh, aA, cz, fr, eA, q, ad, aE, aT, kH, dL, ae, je, BO, Y, r, kp, aF, g, t, bz, Bv, iM, at, dW, m, fh); #c1(PMS1) c2(NP_001121615) c3(PMS1 protein homolog 1 isoform b) c4(45863) c5(45864, 45865, 45866, 45867, 45868, 45869) c6( ) c7(T, aC, fM, jh, aA, cz, fr, eA, q, ad, aE, aT, kH, dL, ae, je, BO, Y, r, kp, aF, g, t, bz, Bv, iM, at, dW, m, fh); #c1(PMS1) c2(NP_001121616) c3(PMS1 protein homolog 1 isoform c) c4(45870, 45871) c5(45872, 45873, 45874, 45875, 45876, 45877) c6( ) c7(T, aC, fM, jh, aA, cz, fr, eA, q, ad, aE, aT, kH, dL, ae, je, BO, Y, r, kp, aF, g, t, bz, Bv, iM, at, dW, m, fh); #c1(PMS1) c2(NP_001276338) c3(PMS1 protein homolog 1 isoform d) c4( ) c5(108129, 108130, 108131, 108132, 108133, 108134, 108135, 108136, 108137, 108138, 108139, 108140, 108141) c6( ) c7(T, aC, fM, jh, aA, cz, fr, eA, q, ad, aE, aT, kH, dL, ae, je, BO, Y, r, kp, aF, g, t, bz, Bv, iM, at, dW, m, fh); #c1(PMS1) c2(XP_005246706) c3(PMS1 protein homolog 1 isoform X3) c4(267373) c5( ) c6( ) c7(T, aC, fM, jh, aA, cz, fr, eA, q, ad, aE, aT, kH, dL, ae, je, BO, Y, r, kp, aF, g, t, bz, Bv, iM, at, dW, m, fh); #c1(PMS1) c2(XP_011509657) c3(PMS1 protein homolog 1 isoform X4) c4(300231) c5( ) c6( ) c7(T, aC, fM, jh, aA, cz, fr, eA, q, ad, aE, aT, kH, dL, ae, je, BO, Y, r, kp, aF, g, t, bz, Bv, iM, at, dW, m, fh); #c1(PMS1) c2(XP_011509659) c3(PMS1 protein homolog 1 isoform X6) c4( ) c5(300232, 300233, 300234, 300235, 300236, 300237, 300238, 300239, 300240, 300241, 300242, 300243, 300244) c6( ) c7(T, aC, fM, jh, aA, cz, fr, eA, q, ad, aE, aT, kH, dL, ae, je, BO, Y, r, kp, aF, g, t, bz, Bv, iM, at, dW, m, fh); #c1(PMS2) c2(NP_000526) c3(mismatch repair endonuclease PMS2 isoform a) c4(11873, 11874, 11875) c5(11876, 11877, 11878, 11879, 11880, 11881, 11882, 11883, 11884, 11885, 11886, 11887, 11888, 11889, 11890, 11891, 11892, 11893) c6( ) c7(T, gU, Fj, jh, bB, n, fr, ci, qN, q, ad, er, bv, b, eO, aT, vH, YB, dL, KV, ae, jf, oS, d, BO, s, ND, aW, Y, NE, YC, r, aJK, Kf, cl, t, bz, bF, sS, alC, csD, dB, bE, gX, hL, at, oh, m, i, X); #c1(PMS2) c2(XP_006715805) c3(mismatch repair endonuclease PMS2 isoform X2) c4(289792) c5(289793, 289794, 289795, 289796, 289797, 289798) c6( ) c7(T, gU, Fj, jh, bB, n, fr, ci, qN, q, ad, er, bv, b, eO, aT, vH, YB, dL, KV, ae, jf, oS, d, BO, s, ND, aW, Y, NE, YC, r, aJK, Kf, cl, t, bz, bF, sS, alC, csD, dB, bE, gX, hL, at, oh, m, i, X); #c1(PMS2) c2(XP_011513732) c3(mismatch repair endonuclease PMS2 isoform X4) c4(306011) c5(306012, 306013, 306014, 306015, 306016, 306017) c6( ) c7(T, gU, Fj, jh, bB, n, fr, ci, qN, q, ad, er, bv, b, eO, aT, vH, YB, dL, KV, ae, jf, oS, d, BO, s, ND, aW, Y, NE, YC, r, aJK, Kf, cl, t, bz, bF, sS, alC, csD, dB, bE, gX, hL, at, oh, m, i, X); #c1(PMVK) c2(NP_006547) c3(phosphemevalenate kinase) c4(166156) c5(166157, 166158, 166159, 166160, 166161, 166162) c6( ) c7(bzi); #c1(PNCK) c2(NP_001034671) c3(calcium/calmodulin-dependent protein kinase type 1B isoform a) c4(32038) c5(32039, 32040, 32041, 32042, 32043, 32044, 32045, 32046, 32047) c6( ) c7(py); #c1(PNCK) c2(NP_001129212) c3(calcium/calmodulin-dependent protein kinase type 1B isoform b) c4(51207) c5(51208, 51209, 51210, 51211, 51212, 51213, 51214, 51215, 51216) c6( ) c7(py); #c1(PNCK) c2(XP_011529409) c3(calcium/calmodulin-dependent protein kinase type 1B isoform X1) c4(324787, 324788, 324789, 324790, 324791, 324792) c5(324793, 324794, 324795) c6( ) c7(py); #c1(PNCK) c2(XP_011529410) c3(calcium/calmodulin-dependent protein kinase type 1B isoform X2) c4( ) c5(324796, 324797, 324798) c6( ) c7(py); #c1(PNCK) c2(XP_011529415) c3(calcium/calmodulin-dependent protein kinase type 1B isoform X3) c4(324799) c5(324800, 324801, 324802, 324803, 324804, 324805, 324806, 324807, 324808, 324809, 324810, 324811, 324812, 324813, 324814, 324815, 324816, 324817, 324818, 324819, 324820, 324821, 324822, 324823, 324824, 324825, 324826, 324827, 324828, 324829, 324830, 324831, 324832, 324833, 324834, 324835, 324836, 324837, 324838, 324839, 324840, 324841, 324842, 324843, 324844, 324845, 324846, 324847, 324848, 324849, 324850, 324851) c6( ) c7(py); #c1(PNKD) c2(NP_001070867) c3(probable hydrolase PNKD isoform 3 precursor) c4(34865) c5(34866, 34867, 34868, 34869, 34870, 34871) c6( ) c7(T, aZ, cV, cz, fr, aR, ahR, Hx, hd, dV, aT, aU, bsE, K, bc, aW, kp, t, xw, c, m, L); #c1(PNKD) c2(NP_056303) c3(probable hydrolase PNKD isoform 1 precursor) c4(187014) c5(187015, 187016, 187017, 187018, 187019, 187020) c6( ) c7(T, aZ, cV, cz, fr, aR, ahR, Hx, hd, dV, aT aU, bsE, K, bc, aW, kp, t, xw, c, m, L); #c1(PNKD) c2(NP_072094) c3(probable hydrolase PNKD isoform 2) c4(212695) c5(212696, 212697, 212698, 212699, 212700, 212701) c6( ) c7(T, aZ, cV, cz, fr, aR, ahR, Hx, hd, dV, aT, aU, bsE, K, be, aW, kp, t, xw, c, m, L); #c1(PNKP) c2(NP_009185) c3(bifunctional polynucleotide phosphatase/kinase) c4(171366) c5(171367, 171368, 171369, 171370, 171371, 171372) c6( ) c7(aR, s, ob, X, csE, U, n, csF, K, QK, V, ne, aij); #c1(PNLDC1) c2(NP_001258791) c3(poly(A)-specific ribonuclease PARN-like domain-containing protein 1 isoform 1) c4( ) c5(96545) c6( ) c7(dy, ac); #c1(PNLDC1) c2(NP_775787) c3(poly(A)-specific ribonuclease PARN-like domain-containing protein 1 isoform 2 precursor) c4(250311) c5(250312, 250313, 250314, 250315, 250316) c6( ) c7(dy, ac); #c1(PNLIP) c2(NP_000927) c3(pancreatic triacylglycerol lipase precursor) c4(17402) c5(17403, 17404, 17405, 17406, 17407, 17408) c6( ) c7(bL, ar, asp, csG, v, ciO, cm); #c1(PNLIPRP2) c2(NP_005387) c3(pancreatic lipase-related protein 2 precursor) c4(155630) c5(155631, 155632, 155633, 155634, 155635, 155636) c6( ) c7(ar, aE); #c1(PNMA1) c2(NP_006020) c3(paraneoplastic antigen Ma1) c4(161218) c5(161219, 161220, 161221, 161222, 161223, 161224) c6( ) c7(ke, csH); #c1(PNMA2) c2(NP_009188) c3(paraneoplastic antigen Ma2) c4(171409) c5(171410, 171411, 171412, 171413, 171414, 171415) c6( ) c7(T, nG, fd); #c1(PNMT) c2(NP_002677) c3(phenylethanolamine N-methyltransferase) c4(130852, 130853) c5(130854, 130855, 130856, 130857, 130858, 130859, 130860) c6( ) c7(bxy, ac, aW, aw, bo, VB, tV, aT, tc, cz, v, K, bq, cm, V, af, qa); #c1(PNMT) c2(XP_011523211) c3(phenylethanolamine N-methyltransferase isoform X1) c4( ) c5(317726, 317727, 317728, 317729, 317730) c6( ) c7(bxy, ac, aW, aw, bo, VB, tV, aT, tc, cz, v, K, bq, cm, V, af, qa); #c1(PNN) c2(NP_002678) c3(pinin) c4(130861) c5(130862, 130863, 130864, 130865, 130866, 130867, 130868) c6( ) c7(x, T, bS, k, et, Z, bt, hq); #c1(PNO1) c2(NP_064528) c3(RNA-binding protein PNO1) c4(202871) c5(202872, 202873, 202874, 202875, 202876, 202877) c6( ) c7(bM, T, aC, ha, jh, aA, bB, tc, TM, Vd, ci, nA, lR, fr, hF, eA, aR, ad, hX, eW, ft, aE, WY, ds, SV, aT, kf, Ak, dV, h, K, an, brV, fb, ae, af, dx, iL, d, vT, aW, Y, ff, eZ, nf, aq, aaE, aF, Ku, en, iR, bz, pb, QA, bN, dR, ck, rR, kP, c, eM, bE, Qu, dh, mx, U, aEs, rx, xh, arg, B); #c1(PNOC) c2(NP_006219) c3(prepronociceptin isoform 1 preproprotein) c4(163039, 163040) c5(163041, 163042, 163043, 163044, 163045, 163046, 163047, 163048, 163049, 163050, 163051, 163052) c6( ) c7(eY, T, VR, ot, csl, Lg, bQC, gu, UN, C, cm, lB, xt, FT); #c1(PNP) c2(NP_000261) c3(purine nucleoside phosphorylase) c4(5881, 5882) c5(5883, 5884, 5885, 5886, 5887, 5888, 5889, 5890, 5891, 5892, 5893, 5894) c6( ) c7(bxC, T, dD, dA, ea, jh, eq, eA, ad, eJ, eW, x, aE, dV, aT, h, dL, ae, af, eL, cp, cY, bA, aW, Y, oV, dq, CQ, beP, t, cm, dr, Cv, bE, U, aiD, cS, k, Pk, B); #c1(PNPLA1) c2(NP_001139188) c3(patatin-like phospholipase domain-containing protein 1 isoform 2) c4(58890) c5(58891, 58892, 58893, 58894, 58895) c6( ) c7(fn, v, csJ, lQ); #c1(PNPLA1) c2(NP_001139189) c3(patatin-like phospholipase domain-containing protein 1 isoform 3) c4(58896, 58897, 58898) c5(58899, 58900, 58901, 58902, 58903, 58904, 58905, 58906, 58907, 58908, 58909, 58910, 58911, 58912) c6( ) c7(fn, v, csJ, lQ); #c1(PNPLA1) c2(NP_775947) c3(patatin-like phospholipase domain-containing protein 1 isoform 1) c4( ) c5(250773, 250774, 250775, 250776, 250777) c6( ) c7(fn, v, csJ, lQ); #c1(PNPLA2) c2(NP_065109) c3(patatin-like phospholipase domain-containing protein 2) c4(203966) c5(203967, 203968, 203969, 203970, 203971, 203972) c6( ) c7(bL, cZ, T, dD, ea, e, el, aj, v, eq, bSh, cd, J, ad, eA, aE, oj, aT, aU, cy, jy, K, zp, dd, ae, Um, DA, kl, lR, bNp, aW, Y, eH, fc, Mz, aq, eF, t, og, dr, iO, Fi, Be, vy, gZ, JL, arf, nw, m, cP, du, ei, Zw, vt, auN, B); #c1(PNPLA3) c2(NP_079501) c3(patatin-like phospholipase domain-containing protein 3) c4(218410) c5(218411, 218412, 218413, 218414, 218415, 218416, 218417) c6( ) c7(bL, T, dD, ea, al, qQ, jx, aj, dG, v, jE, eq, J, kL, GK, hX, I, F, u, h, jy, qM, dF, avl, A, fc, hl, dq, lo, aq, iR, gk, cP, ei, B); #c1(PNPLA4) c2(NP_001166143) c3(patatin-like phospholipase domain-containing protein 4 isoform 2) c4( ) c5(68319, 68320, 68321, 68322, 68323) c6( ) c7(v); #c1(PNPLA4) c2(NP_004641) c3(patatin-like phospholipase domain-containing protein 4 isoform 1 precursor) c4(148439, 148440, 148441) c5(148442, 148443, 148444, 148445, 148446, 148447, 148448, 148449, 148450, 148451, 148452, 148453, 148454, 148455, 148456, 148457, 148458) c6( ) c7(v); #c1(PNPLA5) c2(NP_001171146) c3(patatin-like phospholipase domain-containing protein 5 isoform 2) c4(69931, 69932) c5(69933, 69934, 69935, 69936, 69937, 69938, 69939, 69940, 69941, 69942, 69943, 69944, 69945, 69946, 69947, 69948) c6( ) c7(v, aw); #c1(PNPLA5) c2(NP_620169) c3(patatin-like phospholipase domain-containing protein 5 isoform 1) c4(237452) c5(237453, 237454, 237455, 237456, 237457, 237458) c6( ) c7(v, aw); #c1(PNPLA6) c2(NP_001159583) c3(neuropathy target esterase isoform a) c4(64360) c5(64361, 64362, 64363, 64364, 64365, 64366) c6( ) c7(bEn, c, aV, ob, uT, dM, Ol, csL, U, cm, lo, bl, fu, bX, aEZ, csK, aR); #c1(PNPLA6) c2(NP_001159584) c3(neuropathy target esterase isoform c) c4(64367) c5(64368, 64369, 64370, 64371, 64372, 64373) c6( ) c7(bEn, c, aV, ob, uT, dM, Ol, csL, U, cm, lo, bl, fu, bX, aEZ, csK, aR); #c1(PNPLA6) c2(NP_001159585) c3(neuropathy target esterase isoform b) c4(64374) c5(64375, 64376, 64377, 64378, 64379, 64380, 64381, 64382, 64383, 64384, 64385, 64386, 64387, 64388, 64389, 64390) c6( ) c7(bEn, c, aV, ob, uT, dM, Ol, csL, U, cm, lo, bl, fu, bX, aEZ, csK, aR); #c1(PNPLA6) c2(NP_001159586) c3(neuropathy target esterase isoform d) c4(64391) c5( ) c6( ) c7(bEn, c, aV, ob, uT, dM, Ol, csL, U, cm, lo, bl, fu, bX, aEZ, csK, aR); #c1(PNPLA8) c2(NP_001242937) c3(calcium-independent phospholipase A2-gamma isoform 1) c4(89283) c5(89284, 89285, 89286, 89287, 89288, 89289, 89290, 89291, 89292, 89293, 89294, 89295, 89296) c6( ) c7(q, g, r); #c1(PNPLA8) c2(NP_001242938) c3(calcium-independent phospholipase A2-gamma isoform 2) c4(89297, 89298, 89299, 89300) c5(89301, 89302, 89303, 89304, 89305, 89306, 89307, 89308, 89309, 89310, 89311, 89312, 89313, 89314, 89315, 89316, 89317, 89318, 89319, 89320, 89321, 89322, 89323) c6( ) c7(q, g, r); #c1(PNPLA8) c2(NP_001242939) c3(calcium-independent phospholipase A2-gamma isoform 3) c4(89324) c5(89325, 89326, 89327, 89328, 89329) c6( ) c7(q, g, r); #c1(PNPLA8) c2(XP_011514576) c3(calcium-independent phospholipase A2-gamma isoform X2) c4( ) c5(307283, 307284) c6( ) c7(q, g, r); #c1(PNPLA8) c2(XP_011514577) c3(calcium-independent phospholipase A2-gamma isoform X3) c4( ) c5(307285) c6( ) c7(q, g, r); #c1(PNPO) c2(NP_060599) c3(pyridoxine-5′-phosphate oxidase) c4(196768, 196769, 196770, 196771) c5(196772, 196773, 196774, 196775, 196776, 196777, 196778, 196779, 196780, 196781, 196782, 196783, 196784, 196785, 196786, 196787, 196788, 196789) c6( ) c7(csM, T, Cq, ha, cz, aq, lm, cB, B, cC); #c1(PNPO) c2(XP_005257557) c3(pyridoxine-5′-phosphate oxidase isoform X1) c4( ) c5(275267) c6( ) c7(csM, T, Cq, ha, cz, aq, lm, cB, B, cC); #c1(PNPO) c2(XP_011523270) c3(pyridoxine-5′-phosphate oxidase isoform X2) c4( ) c5(317785, 317786, 317787, 317788, 317789) c6( ) c7(csM, T, Cq, ha, cz, aq, lm, cB, B, cC); #c1(PNPT1) c2(NP_149100) c3(polyribonucleotide nucleotidyltransferase 1, mitochondrial precursor) c4(227143) c5(227144, 227145, 227146, 227147, 227148, 227149, 227150, 227151, 227152, 227153) c6( ) c7(T, aE, c, oz, csO, oe, Y, ev, csN, at, cd, bZ, Fb, cm, V, Bh, B); #c1(PNRC1) c2(NP_006804) c3(proline-rich nuclear receptor coactivator 1) c4(168245, 168246) c5(168247, 168248, 168249, 168250, 168251, 168252, 168253, 168254, 168255, 168256, 168257, 168258, 168259, 168260, 168261, 168262) c6( ) c7(B, vi); #c1(POC1A) c2(NP_001155052) c3(POC1 centriolar protein homolog A isoform 2) c4(61386) c5(61387, 61388, 61389, 61390, 61391, 61392) c6( ) c7(aW, csQ, aT, csP, csR, csS, Df); #c1(POC1A) c2(NP_001155053) c3(POC1 centriolar protein homolog A isoform 3) c4( ) c5(61393, 61394, 61395, 61396, 61397) c6( ) c7(aW, csQ, aT, csP, csR, csS, Df); #c1(POC1A) c2(NP_056241) c3(POC1 centriolar protein homolog A isoform 1) c4(186674, 186675) c5(186676, 186677, 186678, 186679, 186680, 186681, 186682) c6( ) c7(aW, csQ, aT, csP, csR, csS, Df); #c1(POC1B) c2(NP_001186706) c3(POC1 centriolar protein homolog B isoform b) c4(78378) c5(78379, 78380, 78381, 78382, 78383, 78384, 78385, 78386, 78387, 78388, 78389, 78390, 78391, 78392, 78393, 78394, 78395) c6( ) c7(nC, aC); #c1(POC1B) c2(NP_758440) c3(POC1 centriolar protein homolog B isoform a) c4(249150, 249151, 249152) c5(249153, 249154, 249155, 249156, 249157, 249158, 249159) c6( ) c7(nC, aC); #c1(POC5) c2(NP_001092741) c3(centrosomal protein POC5 isoform 1) c4(39598) c5(39599, 39600, 39601, 39602, 39603, 39604) c6( ) c7(fq); #c1(POC5) c2(NP_689621) c3(centrosomal protein POC5 isoform 2) c4(243317) c5(243318, 243319, 243320, 243321, 243322, 243323) c6( ) c7(fq); #c1(POC5) c2(XP_005248493) c3(centrosomal protein POC5 isoform X1) c4(268411) c5( ) c6( ) c7(fq); #c1(POC5) c2(XP_005248494) c3(centrosomal protein POC5 isoform X4) c4( ) c5(268412, 268413, 268414, 268415, 268416, 268417, 268418, 268419, 268420, 268421, 268422, 268423, 268424, 268425, 268426, 268427, 268428, 268429) c6( ) c7(fq); #c1(POC5) c2(XP_011541460) c3(centrosomal protein POC5 isoform X2) c4(340038) c5(340039, 340040, 340041, 340042, 340043, 340044, 340045, 340046, 340047, 340048) c6( ) c7(fq); #c1(POC5) c2(XP_011541462) c3(centrosomal protein POC5 isoform X3) c4(340049, 340050) c5( ) c6( ) c7(fq); #c1(PODXL) c2(NP_001018121) c3(podocalyxin isoform 1 precursor) c4(27378, 27379) c5(27380, 27381, 27382, 27383, 27384, 27385, 27386, 27387, 27388, 27389, 27390, 27391) c6( ) c7(T, n, fr, uE, aY, q, ad, jz, dY, aT, ae, d, B, aW, ff, r, en, bu, g, t, bE, eD, X); #c1(PODXL) c2(NP_005388) c3(podocalyxin isoform 2 precursor) c4(155637, 155638, 155639) c5(155640, 155641, 155642, 155643, 155644, 155645, 155646, 155647, 155648, 155649, 155650, 155651, 155652, 155653, 155654, 155655, 155656, 155657) c6( ) c7(T, n, fr, uE, aY, q, ad, jz, dY, aT, ae, d, B, aW, ff, r, en, bu, g, t, bE, eD, X); #c1(POF1B) c2(NP_079197) c3(protein POF1B) c4(217437, 217438) c5(217439, 217440, 217441, 217442, 217443, 217444, 217445, 217446, 217447, 217448, 217449, 217450) c6( ) c7(c, il, pQ, aeS, csT, lQ, zZ); #c1(POFUT1) c2(NP_056167) c3(GDP-fucose protein O-fucosyltransferase 1 isoform 1 precursor) c4(186067, 186068) c5(186069, 186070, 186071, 186072, 186073, 186074, 186075, 186076, 186077, 186078, 186079, 186080) c6( ) c7(rF, eA, csU); #c1(POFUT1) c2(NP_758436) c3(GDP-fucose protein O-fucosyltransferase 1 isoform 2 precursor) c4(249143) c5(249144, 249145, 249146, 249147, 249148, 249149) c6( ) c7(rF, eA, csU); #c1(POFUT2) c2(NP_056042) c3(GDP-fucose protein O-fucosyltransferase 2 isoform A precursor) c4(185273) c5(185274, 185275, 185276, 185277, 185278, 185279, 185280) c6( ) c7(bL, y, A, j, cz); #c1(POFUT2) c2(NP_598368) c3(GDP-fucose protein O-fucosyltransferase 2 isoform C precursor) c4(235450) c5(235451, 235452, 235453, 235454, 235455, 235456) c6( ) c7(bL, y, A, j, cz); #c1(POGK) c2(NP_060012) c3(pogo transposable element with KRAB domain) c4(193645, 193646, 193647, 193648) c5(193649, 193650, 193651, 193652, 193653, 193654, 193655, 193656, 193657, 193658) c6( ) c7(bA, cz); #c1(POGK) c2(XP_005245428) c3(pogo transposable element with KRAB domain isoform X3) c4( ) c5(266570, 266571, 266572, 266573, 266574, 266575) c6( ) c7(bA, cz); #c1(POGK) c2(XP_011508117) c3(pogo transposable element with KRAB domain isoform X2) c4( ) c5(298596, 298597, 298598, 298599, 298600, 298601) c6( ) c7(bA, cz); #c1(POGLUT1) c2(NP_689518) c3(protein O-glucosyltransferase 1 precursor) c4(242963) c5(242964, 242965, 242966, 242967, 242968, 242969) c6( ) c7(csV, bw, bt, hp, hr); #c1(POLA1) c2(NP_058633) c3(DNA polymerase alpha catalytic subunit) c4(192857) c5(192858, 192859, 192860, 192861, 192862, 192863) c6( ) c7(eF, Wq, eH, nA); #c1(POLA1) c2(XP_005274609) c3(DNA polymerase alpha catalytic subunit isoform X1) c4(285186) c5(285187, 285188, 285189, 285190, 285191, 285192) c6( ) c7(eF, Wq, eH, nA); #c1(POLA2) c2(NP_002680) c3(DNA polymerase alpha subunit B) c4(130896) c5(130897, 130898, 130899, 130900, 130901, 130902) c6( ) c7(dL); #c1(POLA2) c2(XP_011543180) c3(DNA polymerase alpha subunit B isoform X2) c4(342012) c5(342013, 342014, 342015, 342016, 342017, 342018) c6( ) c7(dL); #c1(POLB) c2(NP_002681) c3(DNA polymerase beta) c4(130903, 130904, 130905) c5(130906, 130907, 130908, 130909, 130910, 130911) c6( ) c7(Gl, T, aC, wu, ht, aA, bB, hy, ci, bX, V, q, ad, eA, ip, Qk, aT, h, lG, Gw, dL, K, wm, ae, af, eL, wr, aW, eZ, r, aF, t, f, bz, dr, bF, es, dB, bE, cj, at, m, Gu, it, X); #c1(POLB) c2(XP_005273592) c3(DNA polymerase beta isoform X1) c4(284681) c5(284682, 284683, 284684, 284685, 284686, 284687) c6( ) c7(Gl, T, aC, wu, ht, aA, bB, hy, ci, bX, V, q, ad, eA, ip, Qk, aT, h, lG, Gw, dL, K, wm, ae, af, eL, wr, aW, eZ, r, aF, t, f, bz, dr, bF, es, dB, bE, cj, at, m, Gu, it, X); #c1(POLB) c2(XP_005273594) c3(DNA polymerase beta isoform X3) c4(284688) c5(284689, 284690, 284691, 284692, 284693, 284694) c6( ) c7(Gl, T, aC, wu, ht, aA, bB, hy, ci, bX, V, q, ad, eA, ip, Qk, aT, h, lG, Gw, dL, K, wm, ae, af, eL, wr, aW, eZ, r, aF, t, f, bz, dr, bF, es, dB, bE, cj, at, m, Gu, it, X); #c1(POLB) c2(XP_005273595) c3(DNA polymerase beta isoform X4) c4( ) c5(284695, 284696, 284697, 284698, 284699, 284700, 284701) c6( ) c7(Gl, T, aC, wu, ht, aA, bB, hy, ci, bX, V, q, ad, eA, ip, Qk, aT, h, lG, Gw, dL, K, wm, ae, af, eL, wr, aW, eZ, r, aF, t, f, bz, dr, bF, es, dB, bE, cj, at, m, Gu, it, X); #c1(POLB) c2(XP_005273597) c3(DNA polymerase beta isoform X5) c4( ) c5(284702, 284703, 284704, 284705, 284706) c6( ) c7(Gl, T, aC, wu, ht, aA, bB, hy, ci, bX, V, q, ad, eA, ip, Qk, aT, h, lG, Gw, dL, K, wm, ae, af, eL, wr, aW, eZ, r, aF, t, f, bz, dr, bF, es, dB, bE, cj, at, m, Gu, it, X); #c1(POLD1) c2(NP_001243778) c3(DNA polymerase delta catalytic subunit) c4(91703, 91704, 91705) c5(91706, 91707, 91708, 91709, 91710, 91711, 91712, 91713, 91714, 91715, 91716, 91717) c6( ) c7(csX, T, os, zt, atS, jh, fd, bB, auq, oZ, j, ci, V, fK, q, ad, UE, dP, eA, aT, h, dL, K, jj, ae, af, eL, jf, d, B, aW, Y, r, aq, csW, cl, t, iK, bz, GR, eK, ck, bF, ac, eM, bP, bE, dO, hL, hR, at, aSp, m, bC, lM, bt, kS, X, L); #c1(POLD2) c2(NP_001243808) c3(DNA polymerase delta subunit 2 isoform 1) c4( ) c5(91787, 91788, 91789, 91790, 91791, 91792, 91793, 91794, 91795, 91796, 91797, 91798, 91799, 91800, 91801) c6( ) c7(ci, dL, m); #c1(POLD2) c2(XP_011513733) c3(DNA polymerase delta subunit 2 isoform X1) c4(306018, 306019, 306020, 306021) c5(306022, 306023, 306024, 306025, 306026, 306027, 306028, 306029, 306030, 306031, 306032, 306033, 306034) c6( ) c7(ci, dL, m); #c1(POLD3) c2(NP_006582) c3(DNA polymerase delta subunit 3) c4(166386, 166387, 166388, 166389) c5(166390, 166391, 166392, 166393, 166394, 166395) c6( ) c7(T, bE, aW, ds, Pg, aLJ, aT, r, bB, aq, dL, iw, K, q, eA, h, iK, ae, B, ad); #c1(POLD3) c2(XP_005273773) c3(DNA polymerase delta subunit 3 isoform X2) c4( ) c5(284828, 284829, 284830, 284831, 284832, 284833) c6( ) c7(T, bE, aW, ds, Pg, aLJ, aT, r, bB, aq, dL, iw, K, q, eA, h, iK, ae, B, ad); #c1(POLD3) c2(XP_011543036) c3(DNA polymerase delta subunit 3 isoform X1) c4( ) c5(341771, 341772, 341773, 341774, 341775, 341776, 341777, 341778, 341779, 341780, 341781, 341782) c6( ) c7(T, bE, aW, ds, Pg, aLJ, aT, r, bB, aq, dL, iw, K, q, eA, h, iK, ae, B, ad); #c1(POLD4) c2(NP_001243799) c3(DNA polymerase delta subunit 4 isoform 2) c4(91751) c5(91752, 91753, 91754, 91755, 91756, 91757, 91758, 91759, 91760, 91761, 91762) c6( ) c7(ck, T, ft, iM, lR, je, eH, dV, aT, ew, eA, bX, eF, bt, bz, zo, ao); #c1(POLD4) c2(NP_066996) c3(DNA polymerase delta subunit 4 isoform 1) c4(208072, 208073) c5(208074, 208075, 208076, 208077, 208078, 208079, 208080) c6( ) c7(ck, T, ft, iM, lR, je, eH, dV, aT, ew, eA, bX, eF, bt, bz, zo, ao); #c1(POLDIP3) c2(NP_001265586) c3(polymerase delta-interacting protein 3 isoform 3) c4( ) c5(98910) c6( ) c7(c, vi); #c1(POLDIP3) c2(NP_115687) c3(polymerase delta-interacting protein 3 isoform 1) c4(223548, 223549, 223550) c5(223551, 223552, 223553, 223554, 223555, 223556) c6( ) c7(c, vi); #c1(POLDIP3) c2(NP_835237) c3(polymerase delta-interacting protein 3 isoform 2) c4(253421, 253422) c5(253423, 253424, 253425, 253426, 253427, 253428, 253429, 253430, 253431, 253432, 253433, 253434, 253435) c6( ) c7(c, vi); #c1(POLDIP3) c2(XP_011528759) c3(polymerase delta-interacting protein 3 isoform X1) c4(324060) c5(324061, 324062, 324063, 324064, 324065, 324066, 324067, 324068, 324069, 324070, 324071, 324072, 324073, 324074, 324075, 324076) c6( ) c7(c, vi); #c1(POLE) c2(NP_006222) c3(DNA polymerase epsilon catalytic subunit A) c4(163053, 163054, 163055, 163056, 163057) c5(163058, 163059, 163060, 163061, 163062, 163063, 163064, 163065, 163066, 163067, 163068, 163069, 163070, 163071, 163072, 163073, 163074, 163075, 163076, 163077, 163078, 163079, 163080, 163081, 163082, 163083, 163084, 163085, 163086, 163087) c6( ) c7(av, T, cF, csY, AM, hL, aT, cj, n, r, aA, dL, ci, q, cl, aF, QK, V, it, csZ); #c1(POLE) c2(XP_011533103) c3(DNA polymerase epsilon catalytic subunit A isoform X7) c4( ) c5(329288, 329289, 329290, 329291, 329292, 329293) c6( ) c7(av, T, cF, csY, AM, hL, aT, cj, n, r, aA, dL, ci, q, cl, aF, QK, V, it, csZ); #c1(POLE) c2(XP_011533104) c3(DNA polymerase epsilon catalytic subunit A isoform X8) c4(329294) c5( ) c6( ) c7(av, T, cF, csY, AM, hL, aT, cj, n, r, aA, dL, ci, q, cl, aF, QK, V, it, csZ); #c1(POLE2) c2(NP_001184259) c3(DNA polymerase epsilon subunit 2 isoform 2) c4(75599) c5(75600, 75601, 75602, 75603, 75604, 75605) c6( ) c7(dL); #c1(POLE2) c2(NP_001184260) c3(DNA polymerase epsilon subunit 2 isoform 3) c4(75606) c5(75607, 75608, 75609, 75610, 75611, 75612) c6( ) c7(dL); #c1(POLE2) c2(NP_002683) c3(DNA polymerase epsilon subunit 2 isoform 1) c4(130912) c5(130913, 130914, 130915, 130916, 130917, 130918) c6( ) c7(dL); #c1(POLE3) c2(NP_059139) c3(DNA polymerase epsilon subunit 3) c4(193244) c5(193245, 193246, 193247, 193248, 193249, 193250, 193251, 193252, 193253, 193254) c6( ) c7(Ke, NL, fG, aA, h, ey, aoG); #c1(POLE4) c2(NP_063949) c3(DNA polymerase epsilon subunit 4) c4(202401) c5(202402, 202403, 202404, 202405, 202406, 202407) c6( ) c7(ck, T, iM, lR, je, eH, dV, aT, eA, bX, eF, bt, bz, zo, ao); #c1(POLG) c2(NP_002684) c3(DNA polymerase subunit gamma-1) c4(130919) c5(130920, 130921, 130922, 130923, 130924, 130925, 130926, 130927, 130928, 130929) c6( ) c7(T, zW, aR, il, K, bU, dF, aW, ir, GR, wT, AV, mx, U, ctc, m, hh, gU, n, cc, h, dL, bV, awL, clK, A, KH, Fr, cA, SE, bk, gv, cB, Al, awH, cz, GC, aNG, v, j, bX, bgR, V, MR, hb, aT, bK, bq, an, ae, ajU, Ft, EG, kl, ND, aeS, aPf, bho, cta, cte, kC, bcT, bN, ac, ctb, awN, mG, ob, Pt, ha, ctg, ctf, fu, aoz, ad, cth, oj, lm, iL, yr, EH, KM, ctd, akQ, ag, awK, Lb); #c1(POLG2) c2(NP_009146) c3(DNA polymerase subunit gamma-2, mitochondrial) c4(171140) c5(171141, 171142, 171143, 171144, 171145, 171146) c6( ) c7(aR, y, F, xE, A, eL, oj, cti, bt, cds, dV, dL, h, zW, lM, awL, kC, bz, X, a mW, uQ); #c1(POLH) c2(NP_001278899) c3(DNA polymerase eta isoform 3) c4(110843) c5(110844, 110845, 110846, 110847, 110848, 110849, 110850, 110851, 110852, 110853, 110854, 110855) c6( ) c7(eW, T, BN, Y, yk, CT, aT, hy, dL, adg, ctj, ne, dr); #c1(POLH) c2(NP_006493) c3(DNA polymerase eta isoform 1) c4(165700, 165701, 165702) c5(165703, 165704, 165705, 165706, 165707, 165708, 165709) c6( ) c7(eW, T, BN, Y, yk, CT, aT, hy, dL, adg, ctj, ne, dr); #c1(POLH) c2(XP_005249243) c3(DNA polymerase eta isoform X2) c4( ) c5(269148, 269149, 269150, 269151, 269152) c6( ) c7(eW, T, BN, Y, yk, CT, aT, hy, dL, adg, ctj, ne, dr); #c1(POLH) c2(XP_011513000) c3(DNA polymerase eta isoform X1) c4( ) c5(304450, 304451, 304452) c6( ) c7(eW, T, BN, Y, yk, CT, aT, hy, dL, adg, ctj, ne, dr); #c1(POLI) c2(NP_009126) c3(DNA polymerase iota) c4(170923, 170924) c5(170925, 170926, 170927, 170928, 170929, 170930, 170931, 170932, 170933, 170934, 170935, 170936, 170937, 170938, 170939, 170940) c6( ) c7(bM, T, sO, aW, if, ff, cn, cj, aT, it, uJ, dL, V, ci, en, hu, qN, pk, eL, Zj, ad); #c1(POLK) c2(NP_057302) c3(DNA polymerase kappa) c4(189985, 189986, 189987, 189988, 189989, 189990) c5(189991, 189992, 189993, 189994, 189995, 189996, 189997, 189998, 189999, 190000, 190001, 190002) c6( ) c7(aW, r, aT, dL, K, bz, q); #c1(POLK) c2(XP_006714715) c3(DNA polymerase kappa isoform X5) c4( ) c5(288039, 288040, 288041, 288042, 288043, 288044, 288045, 288046, 288047, 288048) c6( ) c7(aW, r, aT, dL, K, bz, q); #c1(POLK) c2(XP_011541770) c3(DNA polymerase kappa isoform X4) c4(340354) c5(340355, 340356, 340357, 340358, 340359, 340360, 340361, 340362, 340363, 340364, 340365, 340366, 340367, 340368, 340369, 340370, 340371, 340372, 340373, 340374, 340375, 340376, 340377, 340378) c6( ) c7(aW, r, aT, dL, K, bz, q); #c1(POLL) c2(NP_001167555) c3(DNA polymerase lambda isoform a) c4(69181, 69182, 69183, 69184, 69185, 69186, 69187) c5(69188, 69189, 69190, 69191, 69192, 69193, 69194, 69195, 69196, 69197, 69198, 69199, 69200, 69201, 69202, 69203, 69204, 69205, 69206, 69207, 69208, 69209, 69210, 69211, 69212, 69213, 69214, 69215, 69216, 69217, 69218, 69219, 69220, 69221, 69222, 69223, 69224, 69225, 69226, 69227, 69228, 69229) c6( ) c7(ae, T, av, gU, Pf, aW, aT, cj, r, dL, K, q, bz, B, ad, MG); #c1(POLL) c2(XP_006717839) c3(DNA polymerase lambda isoform X10) c4(291379) c5(291380, 291381, 291382, 291383, 291384, 291385) c6( ) c7(ae, T, av, gU, Pf, aW, aT, cj, r, dL, K, q, bz, B, ad, MG); #c1(POLL) c2(XP_011537956) c3(DNA polymerase lambda isoform X4) c4(335472) c5(335473, 335474, 335475, 335476, 335477, 335478) c6( ) c7(ae, T, av, gU, Pf, aW, aT, cj, r, dL, K, q, bz, B, ad, MG); #c1(POLL) c2(XP_011537958) c3(DNA polymerase lambda isoform X5) c4( ) c5(335479, 335480, 335481, 335482, 335483, 335484, 335485) c6( ) c7(ae, T, av, gU, Pf, aW, aT, cj, r, dL, K, q, bz, B, ad, MG); #c1(POLL) c2(XP_011537960) c3(DNA polymerase lambda isoform XG) c4(335486, 335487) c5(335488, 335489, 335490) c6( ) c7(ae, T, av, gU, Pf, aW, aT, cj, r, dL, K, q, bz, B, ad, MG); #c1(POLL) c2(XP_011537962) c3(DNA polymerase lambda isoform X7) c4( ) c5(335491, 335492, 335493, 335494, 335495, 335496, 335497, 335498, 335499, 335500, 335501, 335502, 335503) c6( ) c7(ae, T, av, gU, Pf, aW, aT, cj, r, dL, K, q, bz, B, ad, MG); #c1(POLL) c2(XP_011537969) c3(DNA polymerase lambda isoform X13) c4( ) c5(335504, 335505, 335506, 335507, 335508, 335509) c6( ) c7(ae, T, av, gU, Pf, aW, aT, cj, r, dL, K, q, bz, B, ad, MG); #c1(POLM) c2(NP_001271259) c3(DNA-directed DNA/RNA polymerase mu isoform 2) c4(103758) c5(103759, 103760, 103761, 103762, 103763, 103764) c6( ) c7(av, auM, jh, it, dL, ci, pk, bz, eA); #c1(POLM) c2(NP_001271260) c3(DNA-directed DNA/RNA polymerase mu isoform 3) c4(103765) c5(103766, 103767, 103768, 103769, 103770, 103771) c6( ) c7(av, auM, jh, it, dL, ci, pk, bz, eA); #c1(POLM) c2(NP_037416) c3(DNA-directed DNA/RNA polymerase mu isoform 1) c4(175402, 175403, 175404, 175405) c5(175406, 175407, 175408, 175409, 175410, 175411) c6( ) c7(av, auM, jh, it, dL, ci, pk, bz, eA); #c1(POLM) c2(XP_005249768) c3(DNA-directed DNA/RNA polymerase mu isoform X11) c4( ) c5(269816) c6( ) c7(av, auM, jh, it, dL, ci, pk, bz, eA); #c1(POLM) c2(XP_006715755) c3(DNA-directed DNA/RNA polymerase mu isoform X2) c4( ) c5(289778) c6( ) c7(av, auM, jh, it, dL, ci, pk, bz, eA); #c1(POLM) c2(XP_011513586) c3(DNA-directed DNA/RNA polymerase mu isoform X16) c4( ) c5(305899) c6( ) c7(av, auM, jh, it, dL, ci, pk, bz, eA); #c1(POLM) c2(XP_011513587) c3(DNA-directed DNA/RNA polymerase mu isoform X17) c4( ) c5(305900) c6( ) c7(av, auM, jh, it, dL, ci, pk, bz, eA); #c1(POLM) c2(XP_011513588) c3(DNA-directed DNA/RNA polymerase mu isoform X18) c4( ) c5(305901, 305902, 305903, 305904, 305905) c6( ) c7(av, auM, jh, it, dL, ci, pk, bz, eA); #c1(POLM) c2(XP_011513589) c3(DNA-directed DNA/RNA polymerase mu isoform X19) c4( ) c5(305906, 305907, 305908, 305909, 305910, 305911, 305912, 305913, 305914, 305915, 305916) c6( ) c7(av, auM, jh, it, dL, ci, pk, bz, eA); #c1(POLN) c2(NP_861524) c3(DNA polymerase nu) c4(255639, 255640, 255641) c5(255642, 255643, 255644, 255645, 255646, 255647, 255648, 255649, 255650, 255651, 255652, 255653, 255654, 255655, 255656, 255657, 255658, 255659, 255660, 255661, 255662, 255663) c6( ) c7(Y, af); #c1(POLQ) c2(NP_955452) c3(DNA polymerase theta) c4(261745, 261746, 261747) c5(261748, 261749, 261750, 261751, 261752, 261753, 261754, 261755, 261756, 261757, 261758, 261759, 261760, 261761, 261762, 261763, 261764, 261765) c6( ) c7(T, aW, yk, CT, aT, dL, adg, ctj, eW); #c1(POLQ) c2(XP_011510655) c3(DNA polymerase theta isoform X10) c4( ) c5(301093) c6( ) c7(T, aW, yk, CT, aT, dL, adg, ctj, eW); #c1(POLR1A) c2(NP_056240) c3(DNA-directed RNA polymerase I subunit RPA1) c4(186660, 186661) c5(186662, 186663, 186664, 186665, 186666, 186667, 186668, 186669, 186670, 186671, 186672, 186673) c6( ) c7(j, Kh); #c1(POLR1B) c2(NP_001131076) c3(DNA-directed RNA polymerase I subunit RPA2 isoform 2) c4(52579) c5(52580, 52581, 52582, 52583, 52584, 52585) c6( ) c7(q, K, r); #c1(POLR1B) c2(NP_001269701) c3(DNA-directed RNA polymerase I subunit RPA2 isoform 3) c4(102603, 102604) c5(102605, 102606, 102607, 102608, 102609, 102610, 102611, 102612, 102613) c6( ) c7(q, K, r); #c1(POLR1B) c2(NP_001269703) c3(DNA-directed RNA polymerase I subunit RPA2 isoform 4) c4(102625, 102626) c5(102627, 102628, 102629, 102630, 102631, 102632, 102633, 102634, 102635, 102636) c6( ) c7(q, K, r); #c1(POLR1B) c2(NP_001269705) c3(DNA-directed RNA polymerase I subunit RPA2 isoform 5) c4(102658) c5(102659, 102660, 102661, 102662, 102663, 102664) c6( ) c7(q, K, r); #c1(POLR1B) c2(NP_061887) c3(DNA-directed RNA polymerase I subunit RPA2 isoform 1) c4(200990) c5(200991, 200992, 200993, 200994, 200995, 200996, 200997, 200998, 200999, 201000, 201001) c6( ) c7(q, K, r); #c1(POLR1C) c2(NP_976035) c3(DNA-directed RNA polymerases I and III subunit RPAC1) c4(262837, 262838) c5(262839, 262840, 262841, 262842, 262843, 262844, 262845, 262846, 262847, 262848, 262849, 262850) c6( ) c7(ctk, Xg); #c1(POLR1C) c2(XP_005249548) c3(DNA-directed RNA polymerases I and III subunit RPAC1 isoform X1) c4(269563) c5(269564, 269565, 269566, 269567, 269568, 269569) c6( ) c7(ctk, Xg); #c1(POLR1D) c2(NP_057056) c3(DNA-directed RNA polymerases I and III subunit RPAC2 isoform 1) c4(188662) c5(188663, 188664, 188665, 188666, 188667, 188668, 188669, 188670, 188671, 188672) c6( ) c7(dy, lB, ctl, ac, Xg); #c1(POLR1D) c2(NP_689918) c3(DNA-directed RNA polymerases I and III subunit RPAC2 isoform 2) c4(244364) c5(244365, 244366, 244367, 244368, 244369, 244370) c6( ) c7(dy, lB, ctl, ac, Xg); #c1(POLR2A) c2(NP_000928) c3(DNA-directed RNA polymerase II subunit RPB1) c4(17409) c5(17410, 17411, 17412, 17413, 17414, 17415, 17416) c6( ) c7(T, py, aA, dL, fr, aF); #c1(POLR2B) c2(NP_000929) c3(DNA-directed RNA polymerase II subunit RPB2 isoform 1) c4(17417) c5( ) c6( ) c7(le, dL, W); #c1(POLR2B) c2(NP_001290198) c3(DNA-directed RNA polymerase II subunit RPB2 isoform 3) c4( ) c5(115114, 115115, 115116, 115117, 115118, 115119, 115120, 115121, 115122, 115123) c6( ) c7(le, dL, W); #c1(POLR2C) c2(NP_116558) c3(DNA-directed RNA polymerase II subunit RPB3) c4(226172) c5(226173, 226174, 226175, 226176, 226177, 226178) c6( ) c7(dL, Jr); #c1(POLR2D) c2(NP_004796) c3(DNA-directed RNA polymerase II subunit RPB4) c4(149928) c5(149929, 149930, 149931, 149932, 149933, 149934) c6( ) c7(bL, ctm, aPt, A, F, nx, al, mg, Mz, h, aj, mf, dL, ahl, v, ei, ae, fK, J, ad); #c1(POLR2E) c2(NP_002686) c3(DNA-directed RNA polymerases I, II, and III subunit RPABC1) c4(130930) c5(130931, 130932, 130933, 130934, 130935, 130936) c6( ) c7(cm, dL); #c1(POLR2F) c2(NP_001288058) c3(DNA-directed RNA polymerases I, II, and III subunit RPABC2 isoform 2) c4( ) c5(113458, 113459, 113460, 113461, 113462, 113463) c6( ) c7(dL, ci); #c1(POLR2F) c2(NP_001288059) c3(DNA-directed RNA polymerases I, II, and III subunit RPABC2 isoform 3) c4(113464) c5(113465, 113466, 113467, 113468, 113469, 113470) c6( ) c7(dL, ci); #c1(POLR2F) c2(NP_001288060) c3(DNA-directed RNA polymerases I, II, and III subunit RPABC2 isoform 4) c4( ) c5(113471, 113472, 113473, 113474, 113475, 113476) c6( ) c7(dL, ci); #c1(POLR2F) c2(NP_068809) c3(DNA-directed RNA polymerases I, II, and III subunit RPABC2 isoform 1) c4(210688) c5( ) c6( ) c7(dL, ci); #c1(POLR2F) c2(XP_011528537) c3(DNA-directed RNA polymerases I, II, and III subunit RPABC2 isoform X1) c4(323672) c5( ) c6( ) c7(dL, ci); #c1(POLR2G) c2(NP_002687) c3(DNA-directed RNA polymerase II subunit RPB7) c4(130937) c5(130938, 130939, 130940, 130941, 130942, 130943) c6( ) c7(es, cr, pl, ks); #c1(POLR2H) c2(NP_001265643) c3(DNA-directed RNA polymerases I, II, and III subunit RPABC3 isoform 4) c4( ) c5(99083, 99084, 99085, 99086) c6( ) c7(dL); #c1(POLR2H) c2(NP_006223) c3(DNA-directed RNA polymerases I, II, and III subunit RPABC3 isoform 2) c4(163088, 163089) c5(163090, 163091, 163092, 163093, 163094, 163095, 163096, 163097, 163098, 163099, 163100, 163101, 163102, 163103, 163104, 163105) c6( ) c7(dL); #c1(POLR2J) c2(NP_006225) c3(DNA-directed RNA polymerase II subunit RPB11-a) c4(163106) c5(163107, 163108, 163109, 163110, 163111, 163112) c6( ) c7(dL); #c1(POLR2J) c2(XP_005250509) c3(DNA-directed RNA polymerase II subunit RPB11-a isoform X1) c4(270360) c5(270361, 270362, 270363, 270364, 270365, 270366) c6( ) c7(dL); #c1(POLR2K) c2(NP_005025) c3(DNA-directed RNA polymerases I, II, and III subunit RPABC4) c4(152265) c5(152266, 152267, 152268, 152269, 152270, 152271) c6( ) c7(t, dL); #c1(POLR2M) c2(NP_001018112) c3(protein GRINL1A isoform 2) c4(27371) c5(27372, 27373, 27374, 27375, 27376, 27377) c6( ) c7(ae, K, ad); #c1(POLR2M) c2(NP_056347) c3(protein GRINL1A isoform 1) c4(187200, 187201) c5(187202, 187203, 187204, 187205, 187206, 187207, 187208, 187209, 187210, 187211, 187212) c6( ) c7(ae, K, ad); #c1(POLR3A) c2(NP_008986) c3(DNA-directed RNA polymerase III subunit RPC1) c4(170071, 170072, 170073) c5(170074, 170075, 170076, 170077, 170078, 170079, 170080, 170081, 170082, 170083, 170084, 170085, 170086, 170087, 170088, 170089, 170090, 170091) c6( ) c7(T, ctn, uo, IR, UF, cb, pb); #c1(POLR3B) c2(NP_001154180) c3(DNA-directed RNA polymerase III subunit RPC2 isoform 2) c4( ) c5(61040, 61041, 61042, 61043, 61044) c6( ) c7(cb, cto, aml, nA, UF, agy, EZ); #c1(POLR3B) c2(NP_060552) c3(DNA-directed RNA polymerase III subunit RPC2 isoform 1) c4(196530, 196531) c5(196532, 196533, 196534, 196535, 196536, 196537, 196538) c6( ) c7(cb, cto, aml, nA, UF, agy, EZ); #c1(POLR3E) c2(NP_001244962) c3(DNA-directed RNA polymerase III subunit RPC5 isoform 2) c4(92461) c5(92462, 92463, 92464, 92465, 92466) c6( ) c7(T, bkf, Y, h, CQ, fh); #c1(POLR3E) c2(NP_001244963) c3(DNA-directed RNA polymerase III subunit RPC5 isoform 4) c4(92467) c5(92468, 92469, 92470, 92471, 92472) c6( ) c7(T, bkf, Y, h, CQ, fh); #c1(POLR3E) c2(NP_001244965) c3(DNA-directed RNA polymerase III subunit RPC5 isoform 5) c4(92473) c5(92474, 92475, 92476, 92477, 92478) c6( ) c7(T, bkf, Y, h, CQ, fh); #c1(POLR3E) c2(NP_060589) c3(DNA-directed RNA polymerase III subunit RPC5 isoform 1) c4(196699) c5(196700, 196701, 196702, 196703, 196704) c6( ) c7(T, bkf, Y, h, CQ, fh); #c1(POLR3K) c2(NP_057394) c3(DNA-directed RNA polymerase III subunit RPC10) c4(190546) c5(190547, 190548, 190549, 190550, 190551, 190552) c6( ) c7(aA); #c1(POLRMT) c2(NP_005026) c3(DNA-directed RNA polymerase, mitochondrial precursor) c4(152272, 152273) c5(152274, 152275, 152276, 152277, 152278, 152279) c6( ) c7(awL, dL); #c1(POLRMT) c2(XP_005259637) c3(DNA-directed RNA polymerase, mitochondrial isoform X1) c4( ) c5(276219, 276220) c6( ) c7(awL, dL); #c1(POLRMT) c2(XP_011526373) c3(DNA-directed RNA polymerase, mitochondrial isoform X2) c4( ) c5(320662, 320663) c6( ) c7(awL, dL); #c1(POM121) c2(NP_001244119) c3(nuclear envelope pore membrane protein POM 121 isoform 1) c4(91930) c5(91931, 91932, 91933, 91934, 91935, 91936, 91937, 91938, 91939, 91940, 91941) c6( ) c7(rc, iU); #c1(POM121) c2(NP_742017) c3(nuclear envelope pore membrane protein POM 121 isoform 2) c4(247877) c5(247878, 247879, 247880, 247881, 247882, 247883, 247884, 247885) c6( ) c7(rc, iU); #c1(POM121) c2(XP_005250783) c3(nuclear envelope pore membrane protein POM 121 isoform X2) c4(270541) c5(270542, 270543, 270544, 270545, 270546, 270547, 270548, 270549, 270550, 270551, 270552, 270553, 270554, 270555, 270556, 270557, 270558) c6( ) c7(rc, iU); #c1(POM121) c2(XP_011515032) c3(nuclear envelope pore membrane protein POM 121 isoform X4) c4( ) c5(307808) c6( ) c7(rc, iU); #c1(POMC) c2(XP_011531219) c3(pro-opiomelanocortin isoform X1) c4(327194, 327195, 327196, 327197, 327198, 327199) c5(327200, 327201, 327202, 327203, 327204, 327205, 327206, 327207, 327208, 327209, 327210, 327211, 327212, 327213, 327214, 327215, 327216, 327217, 327218, 327219, 327220, 327221, 327222, 327223, 327224, 327225, 327226, 327227, 327228) c6(327229) c7(T, uK, Fj, fR, azf, acz, vf, yY, bO, Ja, qj, ci, rm, afl, bh, GK, ctq, tg, aex, aE, il, axy, aX, pX, Gb, Fo, iX, vg, iv, K, qM, wt, aVL, dF, cp, li, yo, avH, bn, Fe, fc, bbe, hJ, DL, zV, yX, bbk, Gs, Ji, cj, uo, QF, aVN, OD, IS, xh, hh, nD, Uc, sQ, lT, n, aj, afE, ct, ctr, ml, nE, fr, qW, cd, bbc, ai, biN, rc, ke, co, ft, aMV, cc, ec, aoh, cty, Nn, adX, h, jy, gl, uV, he, cC, aK, avP, ctw, kj, A, Gw, fJ, Rj, iw, AQ, fQ, ctt, Hu, baZ, ctv, ctz, cM, fq, bJ, hq, bLF, ok, adZ, hk, bo, RJ, hR, HB, ut, lB, jd, adG, bbl, bL, eR, DD, aG, yk, jx, qQ, rf, cz, ti, v, j, C, aql, wy, V, eA, J, ga, cts, Tl, nv, aVM, afQ, ctx, aT, ctp, cy, bK, UN, bbd, an, hK, Fg, bZN, bA, hM, kl, s, baY, aMG, nO, Y, apK, cu, en, t, FT, bbK, bN, cT, sS, Ta, Dy, c, alC, hc, dy, EY, fD, uF, lw, bbJ, aaT, ra, pY, aZ, iW, ha, jN, jh, OE, oR, aET, bS, dG, MA, ceY, OH, gb, ad, hX, qC, av, hd, ib, avL, ctu, baX, vc, bj, lQ, bHm, Yi, mu, hZ, gj, yr, mD, vj, ff, bBO, cr, gu, EZ, Z, bz, qa, dR, OG, zr, dJ, Rm, ckY, ei, oQ, y, MN, aUg, X, hv, pC); #c1(POMGNT1) c2(NP_001277059) c3(protein O-linked-mannose beta-1,2-N-acetylglucosaminyltransferase 1 isoform 4) c4( ) c5(108996) c6( ) c7(ctB, ul, ctC, ctA, xs, km, bcZ, nA, Wq, If); #c1(POMGNT1) c2(XP_011540062) c3(protein O-linked-mannose beta-1,2-N-acetylglucosaminyltransferase 1 isoform X2) c4(338361) c5(338362, 338363, 338364, 338365, 338366, 338367) c6( ) c7(ctB, ul, ctC, ctA, xs, km, bcZ, nA, Wq, If); #c1(POMGNT2) c2(NP_116195) c3(protein O-linked-mannose beta-1,4-N-acetylglucosaminyltransferase 2 precursor) c4(225680) c5(225681, 225682, 225683, 225684, 225685, 225686, 225687, 225688, 225689, 225690, 225691, 225692, 225693, 225694) c6(225695, 225696, 225697, 225698) c7(ctE, he, xs, ctD); #c1(POMK) c2(NP_115613) c3(protein O-mannose kinase) c4(223368) c5(223369, 223370, 223371, 223372, 223373, 223374) c6( ) c7(ctF); #c1(POMP) c2(NP_057016) c3(proteasome maturation protein) c4(188533) c5(188534, 188535, 188536, 188537, 188538, 188539) c6( ) c7(bL, ctG, aW, om, aT, lQ, K, Zm, aHG); #c1(POMT1) c2(NP_001070834) c3(protein O-mannosyl-transferase 1 isoform c) c4( ) c5(34853) c6( ) c7(VC, cc, QK, hb, amJ, dB, xs, km, Ak, ctH, nA, ctl, eA, If); #c1(POMT1) c2(NP_001129585) c3(protein O-mannosyl-transferase 1 isoform b) c4(51902, 51903, 51904, 51905) c5(51906, 51907, 51908, 51909, 51910, 51911, 51912, 51913, 51914, 51915, 51916, 51917, 51918, 51919, 51920, 51921, 51922, 51923, 51924, 51925, 51926, 51327, 51928) c6( ) c7(VC, cc, QK, hb, amJ, dB, xs, km, Ak, ctH, nA, ctl, eA, If); #c1(POMT1) c2(NP_001129586) c3(protein O-mannosyl-transferase 1 isoform d) c4(51929, 51930, 51931) c5(51932, 51933, 51934, 51935, 51936, 51937, 51938, 51939, 51940, 51941, 51942, 51943, 51944, 51945, 51946, 51947) c6( ) c7(VC, cc, QK, hb, amJ, dB, xs, km, Ak, ctH, nA, ctl, eA, If); #c1(POMT1) c2(XP_005272213) c3(protein O-mannosyl-transferase 1 isoform X1) c4(283764, 283765, 283766) c5(283767, 283768, 283769, 283770, 283771, 283772, 283773) c6( ) c7(VC, cc, QK, hb, amJ, dB, xs, km, Ak, ctH, nA, ctl, eA, If); #c1(POMT1) c2(XP_005272219) c3(protein O-mannosyl-transferase 1 isoform X12) c4( ) c5(283774) c6( ) c7(VC, cc, QK, hb, amJ, dB, xs, km, Ak, ctH, nA, ctl, eA, If); #c1(POMT1) c2(XP_006716995) c3(protein O-mannosyl-transferase 1 isoform X7) c4(290609) c5( ) c6( ) c7(VC, cc, QK, hb, amJ, dB, xs, km, Ak, ctH, nA, ctl, eA, If); #c1(POMT1) c2(XP_011516443) c3(protein O-mannosyl-transferase 1 isoform X3) c4( ) c5(309692, 309693, 309694, 309695, 309696, 309697) c6( ) c7(VC, cc, QK, hb, amJ, dB, xs, km, Ak, ctH, nA, ctl, eA, If); #c1(POMT1) c2(XP_011516445) c3(protein O-mannosyl-transferase 1 isoform X6) c4(309698) c5(309699) c6( ) c7(VC, cc, QK, hb, amJ, dB, xs, km, Ak, ctH, nA, ctl, eA, If); #c1(POMT1) c2(XP_011516446) c3(protein O-mannosyl-transferase 1 isoform X8) c4( ) c5(309700, 309701, 309702, 309703, 309704, 309705, 309706, 309707, 309708, 309709, 309710, 309711, 309712, 309713, 309714, 309715, 309716, 309717) c6( ) c7(VC, cc, QK, hb, amJ, dB, xs, km, Ak, ctH, nA, ctl, eA, If); #c1(POMT1) c2(XP_011516448) c3(protein O-mannosyl-transferase 1 isoform X10) c4( ) c5(309718, 309719, 309720, 309721, 309722, 309723, 309724, 309725) c6( ) c7(VC, cc, QK, hb, amJ, dB, xs, km, Ak, ctH, nA, ctl, eA, If); #c1(POMT1) c2(XP_011516449) c3(protein O-mannosyl-transferase 1 isoform X11) c4(309726) c5(309727, 309728, 309729, 309730, 309731, 309732) c6( ) c7(VC, cc, QK, hb, amJ, dB, xs, km, Ak, ctH, nA, ctl, eA, If); #c1(POMT2) c2(NP_037514) c3(protein O-mannosyl-transferase 2) c4(175966) c5(175967, 175968, 175969, 175970, 175971, 175972) c6( ) c7(VC, ctL, ctJ, ctK, hb, FB, xs, km, nA, QK, Wq, If); #c1(POMZP3) c2(NP_036362) c3(POM121 and ZP3 fusion protein isoform 1) c4(173238, 173239) c5(173240, 173241, 173242, 173243, 173244, 173245) c6( ) c7(rc); #c1(POMZP3) c2(NP_694537) c3(POM121 and ZP3 fusion protein isoform 2) c4( ) c5(245087, 245088, 245089, 245090, 245091, 245092, 245093, 245094, 245095, 245096) c6( ) c7(rc); #c1(PON1) c2(NP_000437) c3(serum paraoxonase/arylesterase 1 precursor) c4(8974, 8975) c5(8976, 8977, 8978, 8979, 8980, 8981, 8982, 8983, 8984, 8985, 8986, 8987) c6( ) c7(bM, T, fR, ea, xo, e, al, bO, fd, gf, Vd, ip, Na, Gt, dY, Fo, Gb, M, K, oi, qD, dQ, eN, avn, Us, hm, DA, bbC, aW, hl, as, ahv, uC, y, ctO, lp, wE, Ji, U, vy, uo, m, pw, bbv, dD, gU, sQ, tp, Ol, aw, cQ, aj, et, bmA, aLc, TB, ft, no, ec, Bj, gq, h, eV, dL, ey, uV, ZN, wn, Gc, ctN, hi, A, xq, fe, aq, wZ, cM, hq, ar, kT, W, cA, dB, Fi, bm, at, uz, ut, ctP, lB, B, bL, fM, dA, aCw, mr, eR, oe, jx, qQ, eX, cz, sM, cR, hy, v, j, wo, V, J, rS, MP, aT, yu, cy, Nc, bK, an, rz, avl, ne, ae, af, eu, jf, kl, aCs, r, lo, en, wA, t, bN, ck, sk, rR, ac, c, pZ, bbA, hc, DW, hr, fP, hO, mf, cS, dy, ctM, bt, ao, vi, sY, aZ, iW, jh, vr, mw, bS, uu, fu, dG, eq, iG, hF, aue, ad, dZ, dP, fU, nH, av, F, oW, LA, vw, xp, ji, lQ, tt, vl, sj, uQ, uX, BN, IR, Ub, cH, cW, ff, gC, cr, eZ, hp, aot, Z, iV, Hv, eK, iq, gk, nb, aS, ei, Pk, st, rk); #c1(PON2) c2(NP_000296) c3(serum paraoxonase/arylesterase 2 isoform 1) c4(6679, 6680, 6681) c5(6682, 6683, 6684, 6685, 6686, 6687, 6688, 6689, 6690, 6691, 6692, 6693, 6694, 6695, 6696, 6697, 6698, 6699) c6( ) c7(kV, bL, bM, dD, aCw, eR, fR, sQ, ea, df, e, aw, cz, cQ, aj, j, Vd, bX, v, eq, J, dZ, dY, ec, M, cy, K, lQ, af, eu, hm, uX, A, lR, cH, hl, fe, hp, wA, cM, eK, kT, ac, c, wE, vy, bm, uo, gZ, ut, dy, Pk, gq, ao); #c1(PON2) c2(NP_001018171) c3(serum paraoxonase/arylesterase 2 isoform 2) c4(27515) c5(27516, 27517, 27518, 27519, 27520, 27521) c6( ) c7(kV, bL, bM, dD, aCw, eR, fR, sQ, ea, df, e, aw, cz, cQ, aj, j, Vd, bX, v, eq, J, dZ, dY, ec, M, cy, K, lQ, af, eu, hm, uX, A, lR, cH, hl, fe, hp, wA, cM, eK, kT, ac, c, wE, vy, bm, uo, gZ, ut, dy, Pk, gq, ao); #c1(PON3) c2(NP_000931) c3(serum paraoxonase/lactonase 3) c4(17418) c5(17419, 17420, 17421, 17422, 17423, 17424) c6( ) c7(T, dD, ac, c, dY, ea, aw, hl, eZ, h, fe, v, j, K, Vd, hp, eq, af); #c1(POP1) c2(NP_001139332) c3(ribonucleases P/MRP protein subunit POP1) c4(59205) c5(59206, 59207, 59208, 59209, 59210, 59211, 59212, 59213, 59214, 59215) c6( ) c7(awB, dt, uo, adz); #c1(POP1) c2(XP_011515102) c3(ribonucleases P/MRP protein subunit POP1 isoform X1) c4(307966) c5( ) c6( ) c7(awB, dt, uo, adz); #c1(POP1) c2(XP_0115151D3) c3(ribonucleases P/MRP protein subunit POP1 isoform X2) c4( ) c5(307967, 307968, 307969, 307970, 307971, 307972) c6( ) c7(awB, dt, uo, adz); #c1(POP4) c2(NP_006618) c3(ribonuclease P protein subunit p29) c4(166652, 166653) c5(166654, 166655, 166656, 166657, 166658, 166659, 166660, 166661, 166662, 166663, 166664, 166665, 166666, 166667, 166668, 166669) c6( ) c7(fe, t); #c1(POPDC3) c2(NP_071756) c3(popeye domain-containing protein 3) c4(211957, 211958) c5(211959, 211960, 211961, 211962, 211963, 211964, 211965, 211966, 211967, 211968, 211969, 211970) c6( ) c7(V, aF, adz, aA); #c1(POR) c2(NP_000932) c3(NADPH-cytochrome P450 reductase) c4(17425, 17426, 17427, 17428, 17429, 17430, 17431, 17432, 17433, 17434, 17435) c5(17436, 17437, 17438, 17439, 17440, 17441, 17442, 17443, 17444, 17445, 17446, 17447, 17448, 17449, 17450, 17451, 17452, 17453, 17454, 17455, 17456, 17457, 17458, 17459, 17460, 17461, 17462, 17463, 17464, 17465, 17466, 17467, 17468, 17469, 17470, 17471, 17472, 17473, 17474, 17475, 17476, 17477, 17478, 17479, 17480, 17481, 17482, 17483, 17484, 17485, 17486, 17487, 17488, 17489, 17490, 17491, 17492, 17493, 17494, 17495, 17496, 17497, 17498, 17499, 17500, 17501, 17502, 17503, 17504, 17505) c6( ) c7(qC, bN, T, av, zw, s, azf, aW, ctQ, aT, aeS, h, aj, dL, zV, K, avF, bz, J, xt, On); #c1(PORCN) c2(NP_001269096) c3(protein-cysteine N-palmitoyltransferase porcupine isoform F) c4( ) c5(100438, 100439, 100440, 100441, 100442) c6( ) c7(qC, av, T, afH, aW, aT, h, avF, aj, zV, arx, bHi, bz, J); #c1(PORCN) c2(NP_073736) c3(protein-cysteine N-palmitoyltransferase porcupine isoform A) c4(213319, 213320) c5(213321, 213322, 213323, 213324, 213325, 213326, 213327, 213328, 213329, 213330) c6( ) c7(qC, av, T, afH, aW, aT, h, avF, aj, zV, arx, bHi, bz, J); #c1(PORCN) c2(NP_982299) c3(protein-cysteine N-palmitoyltransferase porcupine isoform B) c4(263331, 263332) c5(263333, 263334, 263335, 263336, 263337) c6( ) c7(qC, av, T, afH, aW, aT, h, avF, aj, zV, arx, bHi, bz, J); #c1(PORCN) c2(NP_982300) c3(protein-cysteine N-palmitoyltransferase porcupine isoform C) c4(263338) c5(263339, 263340, 263341, 263342, 263343, 263344, 263345, 263346, 263347, 263348, 263349) c6( ) c7(qC, av, T, afH, aW, aT, h, avF, aj, zV, arx, bHi, bz, J); #c1(PORCN) c2(NP_982301) c3(protein-cysteine N-palmitoyltransferase porcupine isoform D) c4(263350) c5(263351, 263352, 263353, 263354, 263355, 263356, 263357, 263358, 263359, 263360, 263361) c6( ) c7(qC, av, T, afH, aW, aT, h, avF, aj, zV, arx, bHi, bz, J); #c1(PORCN) c2(XP_005272692) c3(protein-cysteine N-palmitoyltransferase porcupine isoform X3) c4( ) c5(284149) c6( ) c7(qC, av, T, afH, aW, aT, h, avF, aj, zV, arx, bHi, bz, J); #c1(PORCN) c2(XP_005272693) c3(protein-cysteine N-palmitoyltransferase porcupine isoform X4) c4( ) c5(284150) c6( ) c7(qC, av, T, afH, aW, aT, h, avF, aj, zV, arx, bHi, bz, J); #c1(PORCN) c2(XP_005272694) c3(protein-cysteine N-palmitoyltransferase porcupine isoform X5) c4( ) c5(284151) c6( ) c7(qC, av, T, afH, aW, aT, h, avF, aj, zV, arx, bHi, bz, J); #c1(PORCN) c2(XP_006724607) c3(protein-cysteine N-palmitoyltransferase porcupine isoform X6) c4( ) c5(296108, 296109, 296110, 296111) c6( ) c7(qC, av, T, afH, aW, aT, h, avF, aj, zV, arx, bHi, bz, J); #c1(PORCN) c2(XP_006724608) c3(protein-cysteine N-palmitoyltransferase porcupine isoform X7) c4( ) c5(296112) c6( ) c7(qC, av, T, afH, aW, aT, h, avF, aj, zV, arx, bHi, bz, J); #c1(POSTN) c2(NP_001129406) c3(periostin isoform 2 precursor) c4(51445) c5(51446, 51447, 51448, 51449, 51450, 51451, 51452) c6( ) c7(T, dD, aC, ea, aw, aA, cL, eq, ci, o, bke, fS, ctR, aT, h, dL, eL, af, hm, aW, Y, uY, bz, es, iA, nB, Tu, X); #c1(POSTN) c2(NP_001129407) c3(periostin isoform 3 precursor) c4(51453) c5(51454, 51455, 51456, 51457, 51458, 51459, 51460) c6( ) c7(T, dD, aC, ea, aw, aA, cL, eq, ci, o, bke, fS, ctR, aT, h, dL, eL, af, hm, aW, Y, uY, bz, es, iA, nB, Tu, X); #c1(POSTN) c2(NP_001129408) c3(periostin isoform 4 precursor) c4( ) c5(51461) c6( ) c7(T, dD, aC, ea, aw, aA, cL, eq, ci, o, bke, fS, ctR, aT, h, dL, eL, af, hm, aW, Y, uY, bz, es, iA, nB, Tu, X); #c1(POSTN) c2(NP_001273594) c3(periostin isoform 5 precursor) c4(105386) c5(105387, 105388, 105389, 105390, 105391, 105392) c6( ) c7(T, dD, aC, ea, aw, aA, cL, eq, ci, o, bke, fS, ctR, aT, h, dL, eL, af, hm, aW, Y, uY, bz, es, iA, nB, Tu, X); #c1(POSTN) c2(NP_001273595) c3(periostin isoform 6 precursor) c4(105393) c5(105394, 105395, 105396, 105397, 105398, 105399) c6( ) c7(T, dD, aC, ea, aw, aA, cL, eq, ci, o, bke, fS, ctR, aT, h, dL, eL, af, hm, aW, Y, uY, bz, es, iA, nB, Tu, X); #c1(POSTN) c2(NP_001273596) c3(periostin isoform 7 precursor) c4( ) c5(105400, 105401, 105402, 105403, 105404) c6( ) c7(T, dD, aC, ea, aw, aA, cL, eq, ci, o, bke, fS, ctR, aT, h, dL, eL, af, hm, aW, Y, uY, bz, es, iA, nB, Tu, X); #c1(POSTN) c2(NP_006466) c3(periostin isoform 1 precursor) c4(165408) c5(165409, 165410, 165411165412, 165413, 165414, 165415, 165416) c6( ) c7(T, dD, aC, ea, aw, aA, cL, eq, ci, o, bke, fS, ctR, aT, h, dL, eL, af, hm, aW, Y, uY, bz, es, iA, nB, Tu, X); #c1(POSTN) c2(XP_005266288) c3(periostin isoform X1) c4(279956) c5(279957, 279958, 279959, 279960, 279961, 279962) c6( ) c7(T, dD, aC, ea, aw, aA, cL, eq, ci, o, bke, fS, ctR, aT, h, dL, eL, af, hm, aW, Y, uY, bz, es, iA, nB, Tu, X); #c1(POSTN) c2(XP_005266289) c3(periostin isoform X2) c4(279963) c5( ) c6( ) c7(T, dD, aC, ea, aw, aA, cL, eq, ci, o, bke, fS, ctR, aT, h, dL, eL, af, hm, aW, Y, uY, bz, es, iA, nB, Tu, X); #c1(POT1) c2(XP_006715980) c3(protection of telomeres protein 1 isoform X2) c4(289958, 289959, 289960, 289961, 289962, 289963, 289964) c5(289965, 289966, 289967, 289968, 289969, 289970, 289971, 289972, 289973, 289974, 289975, 289976, 289977, 289978, 289979, 289980, 289981, 289982, 289983, 289984, 289985, 289986, 289987, 289988, 289989, 289990, 289991, 289992, 289993, 289994, 289995, 289996, 289997, 289998, 289999, 290000, 290001) c6( ) c7(sc, T, yk, e, jh, aA, n, Fc, auf, aT, kH, hn, dL, je, aW, Y, ff, r, aF, en, bz, sS, iM, ac, hk, hL, cj, at, iS, B); #c1(POT1) c2(XP_011514309) c3(protection of telomeres protein 1 isoform X1) c4( ) c5(306994, 306995, 306996, 306997, 306998) c6( ) c7(sc, T, yk, e, jh, aA, n, Fc, auf, aT, kH, hn, dL, je, aW, Y, ff, r, aF, en, bz, sS, iM, ac, hk, hL, cj, at, iS, B); #c1(POTED) c2(NP_778146) c3(POTE ankyrin domain family member D) c4(251361) c5(251362, 251363, 251364, 251365, 251366, 251367) c6( ) c7(T, aW, aT, m, bu, t, ae, ad); #c1(POTEF) c2(NP_001093241) c3(POTE ankyrin domain family member F) c4(40122, 40123, 40124) c5(40125, 40126, 40127, 40128, 40129, 40130, 40131, 40132, 40133, 40134, 40135, 40136, 40137, 40138, 40139, 40140, 40141, 40142, 40143, 40144, 40145, 40146) c6( ) c7(bM, T, pf, al, bB, ci, zW, ip, x, aE, aU, eL, li, AP, aW, g, as, bw, eM, AM, vA, mx, iS, k, wu, nA, eW, tD, co, ft, h, dL, ey, AT, AQ, fe, op, iD, bP, sZ, AN, B, AB, fM, dA, AL, AS, aA, v, j, AE, AU, q, eJ, AK, aT, kf, AJ, bK, ae, kl, s, iU, Y, r, lo, en, f, AA, AH, hr, AU, AG, gT, bt, vi, yv, jh, Ay, ad, dP, AD, ds, qh, ah, ji, wm, AE, ff, aF, bz, dr, bF, gk, bE, AR, gZ, bC, ei, hE, AG); #c1(POTEG) c2(NP_001005356) c3(POTE ankyrin domain family member G) c4(21448) c5(21449, 21450, 21451, 21452, 21453, 21454) c6( ) c7(T); #c1(POTEH) c2(NP_001129685) c3(POTE ankyrin domain family member H) c4(52194, 52195) c5(52196, 52197, 52198, 52199, 52200, 52201, 52202, 52203, 52204, 52205, 52206, 52207) c6( ) c7(T, eA); #c1(POTEM) c2(NP_001138914) c3(putative POTE ankyrin domain family member M) c4(58145, 58146, 58147, 58148) c5(58149, 58150, 58151, 58152, 58153, 58154, 58155, 58156, 58157, 58158, 58159, 58160, 58161, 58162, 58163, 58164, 58165, 58166, 58167, 58168, 58169, 58170, 58171, 58172) c6( ) c7(bL, bM, T, aw, ct, eA, qH, AW, vJ, sO, il, gd, aT, dV, iv, bK, an, af, A, aW, AV, at, eg); #c1(POU1F1) c2(NP_000297) c3(pituitary-specific positive transcription factor 1 isoform alpha) c4(6700) c5(6701, 6702, 6703, 6704, 6705, 6706) c6( ) c7(bBJ, Ly, IT, acz, hz, bBS, ci, nA, AO, ad, biN, fU, ib, oW, aT, aQy, yo, avP, wr, s, aW, CM, bBO, wU, ctS, OG, hR, IS, im, gT, VK, aya); #c1(POU1F1) c2(NP_001116229) c3(pituitary-specific positive transcription factor 1 isoform beta) c4(43692) c5(43693, 43694, 43695, 43696, 43697, 43698) c6( ) c7(bBJ, Ly, IT, acz, hz, bBS, ci, nA, AO, ad, biN, fU, ib, oW, aT, aQy, yo, avP, wr, s, aW, CM, bBO, wU, ctS, OG, hR, IS, im, gT, VK, aya); #c1(POU2AF1) c2(NP_006226) c3(POU domain class 2-associating factor 1) c4(163113) c5(163114, 163115, 163116, 163117, 163118, 163119) c6( ) c7(T, fM, wu, eX, jh, fd, hF, V, cd, pe, h, eV, wm, bc, Of, eZ, r, Og, zL, Wt, cj, bt, Ze); #c1(POU2AF1) c2(XP_006718922) c3(POU domain class 2-associating factor 1 isoform X2) c4( ) c5(292112) c6( ) c7(T, fM, wu, eX, jh, fd, hF, V, cd, pe, h, eV, wm, bc, Of, eZ, r, Og, zL, Wt, cj, bt, Ze); #c1(POU2F1) c2(NP_001185712) c3(POU domain, class 2, transcription factor 1 isoform 2) c4(76096) c5(76097, 76098, 76099, 76100, 76101, 76102, 76103, 76104, 76105, 76106, 76107, 76108, 76109, 76110) c6( ) c7(bL, dD, fM, bkx, ea, if, ht, jh, aA, cz, v, eq, ci, eh, Hr, jz, F, Do, aMb, qp, dV, aT, K, hu, af, bc, bA, d, iU, Of, fe, Og, aF, hJ, eM, eD, hR, y, B); #c1(POU2F1) c2(NP_001185715) c3(POU domain, class 2, transcription factor 1 isoform 3) c4(76111, 76112) c5(76113, 76114, 76115, 76116, 76117, 76118, 76119) c6( ) c7(bL, dD, fM, bkx, ea, if, ht, jh, aA, cz, v, eq, ci, eh, Hr, jz, F, Do, aMb, qp, dV, aT, K, hu, af, bc, bA, d, iU, Of, fe, Og, aF, hJ, eM, eD, hR, y, B); #c1(POU2F1) c2(NP_002688) c3(POU domain, class 2, transcription factor 1 isoform 1) c4(130944, 130945, 130946, 130947) c5( ) c6( ) c7(bL, dD, fM, bkx, ea, if, ht, jh, aA, cz, v, eq, ci, eh, Hr, jz, F, Do, aMb, qp, dV, aT, K, hu, af, bc, bA, d, iU, Of, fe, Og, aF, hJ, eM, eD, hR, y, B); #c1(POU2F1) c2(XP_011507955) c3(POU domain, class 2, transcription factor 1 isoform X1) c4(298315, 298316, 298317) c5( ) c6( ) c7(bL, dD, fM, bkx, ea, if, ht, jh, aA, cz, v, eq, ci, eh, Hr, jz, F, Do, aMb, qp, dV, aT, K, hu, af, bc, bA, d, iU, Of, fe, Og, aF, hJ, eM, eD, hR, y, B); #c1(POU2F1) c2(XP_011507956) c3(POU domain, class 2, transcription factor 1 isoform X2) c4(298318) c5( ) c6( ) c7(bL, dD, fM, bkx, ea, if, ht, jh, aA, cz, v, eq, ci, eh, Hr, jz, F, Do, aMb, qp, dV, aT, K, hu, af, bc, bA, d, iU, Of, fe, Og, aF, hJ, eM, eD, hR, y, B); #c1(POU2F1) c2(XP_011507957) c3(POU domain, class 2, transcription factor 1 isoform X3) c4(298319) c5(298320, 298321, 298322, 298323, 298324, 298325, 298326, 298327, 298328, 298329, 298330, 298331, 298332, 298333, 298334, 298335, 298336, 298337, 298338, 298339, 298340, 298341, 298342, 298343, 298344, 298345, 298346, 298347, 298348, 298349, 298350, 298351, 298352, 298353, 298354, 298355, 298356, 298357, 298358, 298359, 298360, 298361, 298362, 298363, 298364, 298365, 298366, 298367, 298368, 298369, 298370, 298371, 298372, 298373, 298374, 298375, 298376, 298377) c6( ) c7(bL, dD, fM, bkx, ea, if, ht, jh, aA, cz, v, eq, ci, eh, Hr, jz, F, Do, aMb, qp, dV, aT, K, hu, af, bc, bA, d, iU, Of, fe, Og, aF, hJ, eM, eD, hR, y, B); #c1(POU2F2) c2(NP_001193954) c3(POU domain, class 2, transcription factor 2 isoform 1) c4(83329, 83330) c5(83331, 83332, 83333, 83334, 83335, 83336, 83337, 83338, 83339, 83340, 83341, 83342) c6( ) c7(T, fM, if, eX, RC, aA, fd, jh, bX, qN, q, er, bv, aE, aT, kH, eV, hB, pk, nJ, aW, Y, Of, Og, aF, zL, ck, dy, bt, B); #c1(POU2F2) c2(NP_001193955) c3(POU domain, class 2, transcription factor 2 isoform 3) c4(83343) c5(83344, 83345, 83346, 83347, 83348, 83349) c6( ) c7(T, fM, if, eX, RC, aA, fd, jh, bX, qN, q, er, bv, aE, aT, kH, eV, hB, pk, nJ, aW, Y, Of, Og, aF, zL, ck, dy, bt, B); #c1(POU2F2) c2(NP_001234923) c3(POU domain, class 2, transcription factor 2 isoform 4) c4(87774) c5(87775, 87776, 87777, 87778, 87779, 87780, 87781) c6( ) c7(T, fM, if, eX, RC, aA, fd, jh, bX, qN, q, er, bv, aE, aT, kH, eV, hB, pk, nJ, aW, Y, Of, Og, aE, zL, ck, dy, bt, B); #c1(POU2F2) c2(NP_002689) c3(POU domain, class 2, transcription factor 2 isoform 2) c4(130948) c5(130949, 130950, 130951, 130952, 130953, 130954) c6( ) c7(T, fM, if, eX, RC, aA, fd, jh, bX, qN, q, er, bv, aE, aT, kH, eV, hB, pk, nJ, aW, Y, Of, Og, aE, zL, ck, dy, bt, B); #c1(POU2F2) c2(XP_005259067) c3(POU domain, class 2, transcription factor 2 isoform X2) c4(275941) c5(275942, 275943, 275944, 275945, 275946, 275947) c6( ) c7(T, fM, if, eX, RC, aA, fd, jh, bX, qN, q, er, bv, aE, aT, kH, eV, hB, pk, nJ, aW, Y, Of, Og, aE, zL, ck, dy, bt, B); #c1(POU2F2) c2(XP_011525342) c3(POU domain, class 2, transcription factor 2 isoform X1) c4(319805) c5(319806, 319807, 319808, 319809, 319810, 319811) c6( ) c7(T, fM, if, eX, RC, aA, fd, jh, bX, qN, q, er, bv, aE, aT, kH, eV, hB, pk, nJ, aW, Y, Of, Og, aE, zL, ck, dy, bt, B); #c1(POU2F3) c2(NP_001231611) c3(POU domain, class 2, transcription factor 3 isoform 2) c4(87353) c5(87354, 87355, 87356, 87357, 87358, 87359) c6( ) c7(P, bL, dD, ea, if, e, aw, aA, bLo, j, eq, qN, aT, hH, ebb, arl, aW, aE, kT, bTF, ac, te, aS, Pr, abW); #c1(POU2F3) c2(NP_055167) c3(POU domain, class 2, transcription factor 3 isoform 1) c4(179563) c5(179564, 179565, 179566, 179567, 179568, 179569) c6( ) c7(P, bL, dD, ea, if, e, aw, aA, bLo, j, eq, qN, aT, hH, ebb, arl, aW, aE, kT, bTF, ac, te, aS, Pr, abW); #c1(POU3F2) c2(NP_005595) c3(POU domain, class 3, transcription factor 2) c4(157771, 157772) c5(157773, 157774, 157775, 157776, 157777, 157778, 157779, 157780, 157781, 157782, 157783, 157784, 157785) c6( ) c7(av, T, ft, kj, dA, Y, bK, rz); #c1(POU3F3) c2(NP_006227) c3(POU domain, class 3, transcription factor 3) c4(163120) c5(163121, 163122, 163123, 163124, 163125, 163126, 163127, 163128) c6( ) c7(it, nc); #c1(POU3F4) c2(NP_000298) c3(POU domain, class 3, transcription factor 4) c4(6707) c5(6708, 6709, 6710, 6711, 6712, 6713) c6( ) c7(AT, ckN, mG, nd, aMT, ctT, fr, nA, Bh); #c1(POU4F1) c2(NP_006228) c3(POU domain, class 4, transcription factor 1) c4(163129) c5(163130, 163131 163132, 163133, 163134, 163135, 163136) c6( ) c7(cZ, T, ya, if, oH, qN, OH, ad, bv, Ig, akU, pX, K, dd, ae, jf, Y, eZ, cm, ck, ctU, hj, bt, B); #c1(POU4F2) c2(NP_004566) c3(POU domain, class 4, transcription factor 2) c4(147807) c5(147808, 147809, 147810, 147811, 147812, 147813, 147814) c6( ) c7(cZ, T, ctU, Ig, aW, ahL, eZ, aT, n, dd, cm); #c1(POU4F3) c2(NP_002691) c3(POU domain, class 4, transcription factor 3) c4(130955) c5(130956, 130957, 130958, 130959, 130960, 130961) c6( ) c7(mG, EQ, aOH, K, ctV, Bh); #c1(POU5F1) c2(NP_001272915) c3(POU domain, class 5, transcription factor 1 isoform 4) c4( ) c5(104093, 104094, 104095, 104096, 104097, 104098, 104099, 104100) c6( ) c7(ID, xS, T, aiH, if, ci, aE, iI, aWi, PI, K, MO, hH, eL, xa, ly, DA, xQ, UL, ZH, aW, aeC, g, hJ, eF, cm, wT, eM, m, gn, QO, wu, iB, aw, n, ctW, qN, Bl, jz, aoc, TK, dL, CN, AQ, Lh, zZ, Ld, Ix, eD, it, aAE, B, aA, Iu, V, ctX, q, eA, ns, yg, aT, rO, ae, vT, Y, Lf, r, en, bu, t, iK, ck, QG, Da, KY, boK, aD, jh, Hn, ad, BY, dP, vJ, wm, nJ, mu, d, Ix, ff, eH, cr, eZ, aF, bz, Lb, IG, iu); #c1(POU5F1) c2(NP_001272916) c3(POU domain, class 5, transcription factor 1 isoform 3) c4(104101, 104102) c5(104103, 104104, 104105, 104106, 104107, 104108, 104109, 104110, 104111, 104112, 104113, 104114, 104115, 104116, 104117, 104118, 104119, 104120, 104121, 104122, 104123, 104124, 104125, 104126) c6( ) c7(ID, xS, T, aiH, if, ci, aE, il, aWi, PI, K, MO, hH, eL, xa, ly, DA, xQ, UL, ZH, aW, aeC, g, hJ, eF, cm, wT, eM, m, gn, QO, wu, iB, aw, n, ctW, qN, Bl, jz, aoc, TK, dL, CN, AQ, Lh, zZ, Ld, Ix, eD, it, aAE, B, aA, Iu, V, ctX, q, eA, ns, yg, aT, rO, ae, vT, Y, Lf, r, en, bu, t, iK, ck, QG, Da, KY, boK, aD, jh, Hn, ad, BY, dP, vJ, wm, nJ, mu, d, Ix, ff, eH, cr, eZ, aF, bz, Lb, IC, iu); #c1(POU5F1) c2(NP_002692) c3(POU domain, class 5, transcription factor 1 isoform 1) c4(130962, 130963, 130964, 130965) c5(130966, 130967, 130968, 130969, 130970, 130971, 130972, 130973, 130974, 130975, 130976, 130977, 130978, 130979, 130980, 130981, 130982, 130983, 130984, 130985, 130986, 130987, 130988, 130989, 130990, 130991, 130992, 130993, 130994, 130995, 130996, 130997, 130998, 130999, 131000, 131001, 131002, 131003, 131004, 131005, 131006, 131007, 131008, 131009, 131010, 131011, 131012, 131013, 131014, 131015, 131016, 131017, 131018, 131019, 131020, 131021, 131022, 131023, 131024, 131025, 131026, 131027, 131028, 131029, 131030, 131031, 131032, 131033, 131034, 131035, 131036, 131037, 131038, 131039, 131040, 131041, 131042, 131043, 131044, 131045, 131046, 131047, 131048, 131049, 131050, 131051, 131052, 131053, 131054, 131055, 131056, 131057, 131058, 131059, 131060, 131061, 131062, 131063, 131064, 131065, 131066, 131067, 131068, 131069, 131070, 131071, 131072, 131073, 131074, 131075, 131076, 131133, 131134, 131135, 131136, 131137, 131138, 131139, 131140, 131141) c6(131142) c7(ID, xS, T, aiH, if, ci, aE, il, aWi, PI, K, MO, hH, eL, xa, ly, DA, xQ, UL, ZH, aW, aeC, g, hJ, eF, cm, wT, eM, m, gn, QO, wu, iB, aw, n, ctW, qN, Bl, jz, aoc, TK, dL, CN, AQ, Lh, zZ, Ld, Ix, eD, it, aAE, B, aA, Iu, V, ctX, q, eA, ns, yg, aT, rO, ae, vT, Y, Lf, r, en, bu, t, iK, ck, QG, Da, KY, boK, aD, jh, Hn, ad, BY, dP, vJ, wm, nJ, mu, d, Ix, ff, eH, cr, eZ, aF, bz, Lb, IC, iu); #c1(POU5F1B) c2(NP_001153014) c3(putative POU domain, class 5, transcription factor 1B) c4(60317) c5(60318, 60319, 60320, 60321, 60322, 60323, 60324, 60325, 60326, 60327, 60328) c6( ) c7(T, dL, ci, t, ae, ad); #c1(POU6F1) c2(NP_002693) c3(POU domain, class 6, transcription factor 1) c4(131143, 131144) c5(131145, 131146, 131147, 131148, 131149, 131150, 131151, 131152, 131153, 131154, 131155, 131156, 131157, 131158, 131159, 131160, 131161, 131162, 131163, 131164, 131165) c6( ) c7(aqt, aqp, Z, Ei, ctY, gf, bS, K, ct, nA, xh, he, bK, aR); #c1(POU6F2) c2(NP_001159490) c3(POU domain, class 6, transcription factor 2 isoform 2) c4(64162) c5(64163, 64164, 64165, 64166, 64167, 64168, 64169) c6( ) c7(er, an, bN, ctZ); #c1(POU6F2) c2(NP_009183) c3(POU domain, class 6, transcription factor 2 isoform 1) c4(171348) c5( ) c6( ) c7(er, an, bN, ctZ); #c1(POU6F2) c2(XP_011513416) c3(POU domain, class 6, transcription factor 2 isoform X2) c4( ) c5(305653, 305654, 305655, 305656, 305657, 305658) c6( ) c7(er, an, bN, ctZ); #c1(PPA1) c2(NP_066952) c3(inorganic pyrophosphatase) c4(207671, 207672) c5(207673, 207674, 207675, 207676, 207677, 207678, 207679, 207680, 207681, 207682, 207683, 207684) c6( ) c7(WY, aaE, T, cd, g); #c1(PPA2) c2(NP_008834) c3(inorganic pyrophosphatase 2, mitochondrial isoform 2 precursor) c4(168931) c5(168932, 168933, 168934, 168935, 168936, 168937) c6( ) c7(aoz); #c1(PPA2) c2(NP_789842) c3(inorganic pyrophosphatase 2, mitochondrial isoform 3 precursor) c4(252359) c5(252360, 252361, 252362, 252363, 252364, 252365) c6( ) c7(aoz); #c1(PPA2) c2(NP_789843) c3(inorganic pyrophosphatase 2, mitochondrial isoform 4 precursor) c4(252366) c5(252367, 252368, 252369, 252370, 252371, 252372) c6( ) c7(aoz); #c1(PPA2) c2(NP_789845) c3(inorganic pyrophosphatase 2, mitochondrial isoform 1 precursor) c4(252373, 252374, 252375, 252376) c5(252377, 252378, 252379, 252380, 252381, 252382, 252383, 252384, 252385, 252386, 252387, 252388, 252389, 252390, 252391, 252392, 252393, 252394, 252395, 252396, 252397, 252398, 252399, 252400) c6( ) c7(aoz); #c1(PPAP2A) c2(NP_003702) c3(lipid phosphate phosphohydrolase 1 isoform 1) c4(140266) c5(140267, 140268, 140269, 140270, 140271, 140272) c6( ) c7(t, Fb, aA); #c1(PPAP2A) c2(NP_795714) c3(lipid phosphate phosphohydrolase 1 isoform 2) c4(252469) c5(252470, 252471, 252472, 252473, 252474, 252475) c6( ) c7(t, Fb, aA); #c1(PPAP2C) c2(NP_003703) c3(lipid phosphate phosphohydrolase 2 isoform 1) c4(140273) c5(140274, 140275, 140276, 140277, 140278, 140279) c6( ) c7(T, ci); #c1(PPAP2C) c2(NP_803545) c3(lipid phosphate phosphohydrolase 2 isoform 2) c4(252658) c5(252659, 252660, 252661, 252662, 252663) c6( ) c7(T, ci); #c1(PPAP2C) c2(NP_808211) c3(lipid phosphate phosphohydrolase 2 isoform 3) c4(252703) c5(252704, 252705, 252706, 252707, 252708, 252709, 252710) c6( ) c7(T, ci); #c1(PPAPDC1B) c2(NP_001096029) c3(phosphatidate phosphatase PPAPDC1B isoform 1) c4(40968) c5(40969, 40970, 40971, 40972, 40973, 40974) c6( ) c7(av, ft, eJ, aW, aT, n, bz, B); #c1(PPAPDC1B) c2(NP_001096030) c3(phosphatidate phosphatase PPAPDC1B isoform 3) c4(40975) c5(40976, 40977, 40978, 40979, 40980, 40981) c6( ) c7(av, ft, eJ, aW, aT, n, bz, B); #c1(PPAPDC1B) c2(NP_115872) c3(phosphatidate phosphatase PPAPDC1B isoform 2) c4(224418) c5(224419, 224420, 224421, 224422, 224423, 224424) c6( ) c7(av, ft, eJ, aW, aT, n, bz, B); #c1(PPAPDC2) c2(NP_982278) c3(presqualene diphosphate phosphatase) c4(263265, 263266) c5(263267, 263268, 263269, 263270, 263271, 263272, 263273, 263274, 263275, 263276, 263277, 263278) c6( ) c7(ck, T); #c1(PPAPDC3) c2(NP_116117) c3(probable lipid phosphate phosphatase PPAPDC3) c4(225399, 225400) c5(225401, 225402, 225403, 225404, 225405, 225406) c6( ) c7(cd); #c1(PPAPDC3) c2(XP_005272288) c3(probable lipid phosphate phosphatase PPAPDC3 isoform X2) c4( ) c5(283986, 283987, 283988, 283989, 283990, 283991) c6( ) c7(cd); #c1(PPARA) c2(XP_011528545) c3(peroxisome proliferator-activated receptor alpha isoform X1) c4(323673, 323674, 323675, 323676) c5(323677, 323678, 323679, 323680, 323681, 323682, 323683, 323684, 323685, 323686, 323687, 323688, 323689, 323690, 323691, 323692, 323693, 323694, 323695, 323696, 323697, 323698, 323699, 323700, 323701, 323702, 323703, 323704, 323705, 323706, 323707, 323708, 323709, 323710, 323711, 323712, 323713, 323714, 323715, 323716, 323717) c6( ) c7(bM, T, fR, fV, ea, e, al, if, I, bB, ci, ip, GK, bv, Be, M, K, qM, wt, dQ, dF, eN, zQ, aW, fc, hJ, ve, uC, eE, GR, cm, eM, iA, wK, mx, cj, ym, dD, aw, cQ, aj, fr, qN, zP, cd, cc, IG, jy, hn, dL, cgO, wC, fJ, AQ, ks, aq, iO, cO, Fi, bo, mg, at, uz, B, bL, uI, eR, oe, jx, qQ, cz, v, j, so, si, nS, V, q, J, mP, aql, aT, cy, bq, sR, ae, af, eu, bA, kl, Y, r, iy, Io, uU, en, ck, kP, ac, hc, mf, dy, bTg, cue, an, Mb, sY, id, ow, aZ, aET, dG, eq, Fb, ad, hX, dP, cua, av, oz, oj, ji, IQ, d, cH, cW, ff, cr, dN, cub, dq, gu, iV, iR, bz, DF, es, bE, gZ, ME, cP, ei); #c1(PPARA) c2(XP_011528547) c3(peroxisome proliferator-activated receptor alpha isoform X2) c4(323718) c5(323719, 323720, 323721, 323722, 323723, 323724) c6( ) c7(bM, T, fR, fV, ea, e, al, if, I, bB, ci, ip, GK, bv, Be, M, K, qM, wt, dQ, dF, eN, zQ, aW, fc, hJ, ve, uC, eE, GR, cm, eM, iA, wK, mx, cj, ym, dD, aw, cQ, aj, fr, qN, zP, cd, cc, IG, jy, hn, dL, cgO, wC, fJ, AQ, ks, aq, iO, cO, Fi, bo, mg, at, uz, B, bL, uI, eR, oe, jx, qQ, cz, v, j, so, si, nS, V, q, J, mP, aql, aT, cy, bq, sR, ae, af, eu, bA, kl, Y, r, iy, Io, uU, en, ck, kP, ac, hc, mf, dy, bTg, cue, an, Mb, sY, id, ow, aZ, aET, dG, eq, Fb, ad, hX, dP, cua, av, oz, oj, ji, IQ, d, cH, cW, ff, cr, dN, cub, dq, gu, iV, iR, bz, DF, es, bE, gZ, ME, cP, ei); #c1(PPARD) c2(NP_001165290) c3(peroxisome proliferator-activated receptor delta isoform 3) c4(67591) c5(67592, 67593, 67594, 67595, 67596, 67597, 67598, 67599, 67600, 67601, 67602, 67603) c6( ) c7(bL, T, Ve, dD, eR, ea, yk, e, NT, aA, cz, bB, aj, v, j, ci, bX, eq, mF, q, J, cd, ad, av, jz, cc, Be, NS, aeO, M, aT, h, dL, bK, K, IQ, bq, dQ, ae, af, kl, B, aeR, s, JI, aW, ff, az, hI, cr, r, nY, dq, fc, aF, en, g, cm, bz, bJ, bF, bP, eM, nB, bE, hk, AM, mf, m, cP, ei, adg, xb, X); #c1(PPARD) c2(NP_001165291) c3(peroxisome proliferator-activated receptor delta isoform 4) c4(67604) c5(67605, 67606, 67607, 67608, 67609, 67610) c6( ) c7(bL, T, Ve, dD, eR, ea, yk, e, NT, aA, cz, bB, aj, v, j, ci, bX, eq, mF, q, J, cd, ad, av, jz, cc, Be, NS, aeO, M, aT, h, dL, bK, K, IQ, bq, dQ, ae, af, kl, B, aeR, s, JI, aW, ff, az, hI, cr, r, nY, dq, fc, aF, en, g, cm, bz, bJ, bF, bP, eM, nB, bE, hk, AM, mf, m, cP, ei, adg, xb, X); #c1(PPARD) c2(NP_803184) c3(peroxisome proliferator-activated receptor delta isoform 2) c4(252536) c5(252537, 252538, 252539, 252540, 252541, 252542, 252543, 252544, 252545, 252546) c6( ) c7(bL, T, Ve, dD, eR, ea, yk, e, NT, aA, cz, bB, aj, v, j, ci, hX, eq, mF, q, J, cd, ad, av, jz, cc, Be, NS, aeO, M, aT, h, dL, bK, K, IQ, bq, dQ, ae, af, kl, B, aeR, s, JI, aW, ff, az, hI, cr, r, nY, dq, fc, aF, en, g, cm, bz, bJ, bF, bP, eM, nB, bE, hk, AM, mf, m, cP, ei, adg, xb, X); #c1(PPARD) c2(XP_006715186) c3(peroxisome proliferator-activated receptor delta isoform X1) c4(288812, 288813) c5(288814, 288815, 288816, 288817, 288818, 288819, 288820, 288821, 288822, 288823, 288824) c6( ) c7(bL, T, Ve, dD, eR, ea, yk, e, NT, aA, cz, bB, aj, v, j, ci, bX, eq, mF, q, J, cd, ad, av, jz, cc, Be, NS, aeO, M, aT, h, dL, bK, K, ID, bq, dQ, ae, af, kl, B, aeR, s, Jl, aW, ff, az, hI, cr, r, nY, dq, fc, aF, en, g, cm, bz, bJ, bF, bP, eM, nB, bE, hk, AM, mf, m, cP, ei, adg, xb, X); #c1(PPARG) c2(NP_005028) c3(peroxisome proliferator-activated receptor gamma isoform 1) c4(152280, 152281, 152282) c5(152283, 152284, 152285, 152286, 152287, 152288, 152289, 152290, 152291, 152292, 152293, 152294, 152295, 152296) c6( ) c7(ID, gh, T, bM, Ap, aC, fR, pf, YU, ea, if, e, al, fd, bB, ci, aTS, aon, mF, aR, ku, wD, dY, u, aE, il, Fo, M, dV, cpD, K, qM, hu, dQ, H, eL, bc, eN, hm, aa, ly, yo, JI, aW, az, hI, LZ, nY, fc, vs, aB, g, hJ, ve, uC, eE, Vm, GR, eF, cm, qJ, bw, fT, bXI, eM, nB, wK, vA, mx, U, vy, uJ, nw, dW, m, IS, du, hh, jM, ym, OD, iu, FW, dD, vl, IT, wh, aw, ht, NT, n, BH, aj, afE, fr, qN, JW, cd, ai, acy, TB, td, ke, jz, Wy, hw, aoc, oN, Nn, cU, IG, jy, dL, ey, h, aAG, uV, bI, Xh, eV, cue, pi, bXD, wC, hi, A, fJ, iw, ge, fQ, aq, fe, kp, zZ, cM, op, Ix, JP, jq, bJ, kT, JR, GG, ar, Qy, bP, cO, dB, Fi, mg, hj, hL, E, uz, hR, at, bm, aMI, B, AN, L, bL, Dw, jv, fM, dA, AS, eR, fG, oe, eX, aA, cR, GP, cz, v, j, C, nS, V, GS, q, J, eA, Kx, GL, mP, yw, uT, Ig, nX, aNA, MP, HC, aT, cy, Fx, acH, yb, bq, an, jj, ae, af, eu, bA, jf, VC, kl, wr, bf, s, BA, iU, oV, Y, ev, r, iy, en, hf, bSy, t, cl, pb, ck, rR, nM, kP, ua, c, ac, hc, au, dh, gX, hr, dT, JL, mf, cS, dy, fD, bt, xb, ao, kV, vq, sY, kh, bPo, Ke, akd, aZ, aD, df, iW, jh, dG, eq, jE, OH, gb, tK, aue, ad, kL, hX, dP, fU, av, I, LL, hd, ib, Db, oz, py, Ot, ds, NS, IC, oj, QJ, hD, vc, vB, ji, IQ, jo, nJ, sj, uQ, uX, d, nU, cH, PE, ff, eH, zR, cr, Mz, cud, dq, gE, xv, aF, eZ, iV, Z, iR, KM, bz, qa, eK, bF, es, D, NC, mi, yE, bE, ag, z, eB, aam, gZ, aMy, aS, Kj, cP, ei, Zw, kS, X, y, acG); #c1(PPARG) c2(NP_056953) c3(peroxisome proliferator-activated receptor gamma isoform 2) c4(188190, 188191, 188192, 188193) c5(188194, 188195, 188196, 188197, 188198, 188133, 188200, 188201, 188202, 188203, 188204, 188205, 188206, 188207, 188208, 188209, 188210, 188211) c6( ) c7(ID, gh, T, bM, Ap, aC, fR, pf, YU, ea, if, e, al, fd, bB, ci, aTS, aon, mF, aR, ku, wD, dY, u, aE, il, Fo, M, dV, cpD, K, qM, hu, dQ, H, eL, bc, eN, hm, aa, ly, yo, Jl, aW, az, hI, LZ, nY, fc, vs, aB, g, hJ, ve, uC, eE, Vm, GR, eF, cm, qJ, bw, fT, bXI, eM, nB, wK, vA, mx, U, vy, uJ, nw, dW, m, IS, du, hh, jM, ym, OD, iu, FW, dD, vl, IT, wh, aw, ht, NT, n, BH, aj, afE, fr, qN, JW, cd, ai, acy, TB, td, ke, jz, Wy, hw, aoc, oN, Nn, cU, IG, jy, dL, ey, h, aAG, uV, bI, Xh, eV, cue, pi, bXD, wC, hi, A, fJ, iw, ge, fQ, aq, fe, kp, zZ, cM, op, Ix, JP, jq, bJ, kT, JR, GG, ar, Qy, bP, cO, dB, Fi, mg, hj, hL, E, uz, hR, at, bm, aMI, B, AN, L, bL, Dw, jv, fM, dA, AS, eR, fG, oe, eX, aA, cR, GP, cz, v, j, C, nS, V, GS, q, J, eA, Kx, GL, mP, yw, uT, Ig, nX, aNA, MP, HC, aT, cy, Fx, acH, yb, bq, an, jj, ae, af, eu, bA, jf, VC, kl, wr, bf, s, BA, iU, oV, Y, ev, r, iy, en, hf, bSy, t, cl, pb, ck, rR, nM, kP, ua, c, ac, hc, au, dh, gX, hr, dT, JL, mf, cS, dy, fD, bt, xb, ao, kV, vq, sY, kh, bPo, Ke, akd, aZ, aD, df, iW, jh, dG, eq, jE, OH, gb, tK, aue, ad, kL, hX, dP, fU, av, I, LL, hd, ib, Db, oz, py, Ot, ds, NS, IC, oj, QJ, hD, vc, vB, ji, IQ, jo, nJ, sj, uQ, uX, d, nU, cH, PE, ff, eH, zR, cr, Mz, cud, dq, gE, xv, aF, eZ, iV, Z, iR, KM, bz, qa, eK, bF, es, D, NC, mi, yE, bE, ag, z, eB, aam, gZ, aMy, aS, Kj, cP, ei, Zw, kS, X, y, acG); #c1(PPARG) c2(XP_011532144) c3(peroxisome proliferator-activated receptor gamma isoform X2) c4( ) c5(328169) c6( ) c7(ID, gh, T, bM, Ap, aC, fR, pf, YU, ea, if, e, al, fd, bB, ci, aTS, aon, mF, aR, ku, wD, dY, u, aE, il, Fo, M, dV, cpD, K, qM, hu, dQ, H, eL, bc, eN, hm, aa, ly, yo, JI, aW, az, hI, LZ, nY, fc, vs, aB, g, hJ, ve, uC, eE, Vm, GR, eF, cm, qJ, bw, fT, bXI, eM, nB, wK, vA, mx, U, vy, uJ, nw, dW, m, IS, du, hh, jM, ym, OD, iu, FW, dD, vl, IT, wh, aw, ht, NT, n, BH, aj, afE, fr, qN, JW, cd, ai, acy, TB, td, ke, jz, Wy, hw, aoc, oN, Nn, cU, IG, jy, dL, ey, h, aAG, uV, bI, Xh, eV, cue, pi, bXD, wC, hi, A, fJ, iw, ge, fQ, aq, fe, kp, zZ, cM, op, Ix, JP, jq, bJ, kT, JR, GG, ar, Qy, bP, cO, dB, Fi, mg, hj, hL, E, uz, hR, at, bm, aMI, B, AN, L, bL, Dw, jv, fM, dA, AS, eR, fG, oe, eX, aA, cR, GP, cz, v, j, C, nS, V, GS, q, J, eA, Kx, GL, mP, yw, uT, Ig, nX, aNA, MP, HC, aT, cy, Fx, acH, yb, bg, an, jj, ae, af, eu, bA, jf, VC, kl, wr, bf, s, BA, iU, oV, Y, ev, r, iy, en, hf, bSy, t, cl, pb, ck, rR, nM, kP, ua, c, ac, hc, au, dh, gX, hr, dT, JL, mf, cS, dy, fD, bt, xb, ao, kV, vq, sY, kh, bPo, Ke, akd, aZ, aD, df, iW, jh, dG, eq, jE, OH, gb, tK, aue, ad, kL, hX, dP, fU, av, I, LL, hd, ib, Db, oz, py, Ot, ds, NS, IC, oj, QJ, hD, vc, vB, ji, IQ, jo, nJ, sj, uQ, uX, d, nU, cH, PE, ff, eH, zR, cr, Mz, cud, dq, gE, xv, aF, eZ, iV, Z, iR, KM, bz, qa, eK, bF, es, D, NC, mi, yE, bE, ag, z, eB, aam, gZ, aMy, aS, Kj, cP, ei, Zw, kS, X, y, acG); #c1(PPARG) c2(XP_011532145) c3(peroxisome proliferator-activated receptor gamma isoform X3) c4(328170, 328171) c5(328172, 328173, 328174) c6( ) c7(ID, gh, T, bM, Ap, aC, fR, pf, YU, ea, if, e, al, fd, bB, ci, aTS, aon, mF, aR, ku, wD, dY, u, aE, il, Fo, M, dV, cpD, K, qM, hu, dQ, H, eL, bc, eN, hm, aa, ly, yo, Jl, aW, az, hI, LZ, nY, fc, vs, aB, g, hJ, ve, uC, eE, Vm, GR, eF, cm, qJ, bw, fT, bXI, eM, nB, wK, vA, mx, U, vy, uJ, nw, dW, m, IS, du, hh, jM, ym, OD, iu, FW, dD, vl, IT, wh, aw, ht, NT, n, BH, aj, afE, fr, qN, JW, cd, ai, acy, TB, td, ke, jz, Wy, hw, aoc, oN, Nn, cU, IG, jy, dL, ey, h, aAG, uV, bI, Xh, eV, cue, pi, bXD, wC, hi, A, fJ, iw, ge, fQ, aq, fe, kp, zZ, cM, op, Ix, JP, jq, bJ, kT, JR, GG, ar, Qy, bP, cO, dB, Fi, mg, hj, hL, E, uz, hR, at, bm, aMI, B, AN, L, bL, Dw, jv, fM, dA, AS, eR, fG, oe, eX, aA, cR, GP, cz, v, j, C, nS, V, GS, q, J, eA, Kx, GL, mP, yw, uT, Ig, nX, aNA, MP, HC, aT, cy, Fx, acH, yb, bq, an, jj, ae, af, eu, bA, jf, VC, kl, wr, bf, s, BA, iU, oV, Y, ev, r, iy, en, hf, bSy, t, cl, pb, ck, rR, nM, kP, ua, c, ac, hc, au, dh, gX, hr, dT, JL, mf, cS, dy, fD, bt, xb, ao, kV, vq, sY, kh, bPo, Ke, akd, aZ, aD, df, iW, jh, dG, eq, jE, OH, gb, tK, aue, ad, kL, hX, dP, fU, av, I, LL, hd, ib, Db, oz, py, Ot, ds, NS, IC, oj, QJ, hD, vc, vB, ji, IQ, jo, nJ, sj, uQ, uX, d, nU, cH, PE, ff, eH, zR, cr, Mz, cud, dq, gE, xv, aF, eZ, iV, Z, iR, KM, bz, qa, eK, bF, es, D, NC, mi, yE, bE, ag, z, eB, aam, gZ, aMy, aS, Kj, cP, ei, Zw, kS, X, y, acG); #c1(PPARG) c2(XP_011532146) c3(peroxisome proliferator-activated receptor gamma isoform X4) c4( ) c5(328175, 328176, 328177, 328178, 328179, 328180, 328181, 328182, 328183, 328184, 328185, 328186, 328187, 328188, 328189, 328190, 328191, 328192, 328193, 328194, 328195, 328196, 328197, 328198, 328199, 328200, 328201, 328202, 328203, 328204, 328205) c6( ) c7(ID, gh, T, bM, Ap, aC, fR, pf, YU, ea, if, e, al, fd, bB, ci, aTS, aon, mF, aR, ku, wD, dY, u, aE, il, Fo, M, dV, cpD, K, qM, hu, dQ, H, eL, bc, eN, hm, aa, ly, yo, JI, aW, az, hI, LZ, nY, fc, vs, aB, g, hJ, ve, uC, eE, Vm, GR, eF, cm, qJ, bw, fT, bXI, eM, nB, wK, vA, mx, U, vy, uJ, nw, dW, m, IS, du, hh, jM, ym, OD, iu, FW, dD, vl, IT, wh, aw, ht, NT, n, BH, aj, afE, fr, qN, JW, cd, ai, acy, TB, td, ke, jz, Wy, hw, aoc, oN, Nn, cU, IG, jy, dL, ey, h, aAG, uV, bI, Xh, eV, cue, pi, bXD, wC, hi, A, fJ, iw, ge, fQ, aq, fe, kp, zZ, cM, op, Ix, JP, jq, bJ, kT, JR, GG, ar, Qy, bP, cO, dB, Fi, mg, hj, hL, E, uz, hR, at, bm, aMI, B, AN, L, bL, Dw, jv, fM, dA, AS, eR, fG, oe, eX, aA, cR, GP, cz, v, j, C, nS, V, GS, q, J, eA, Kx, GL, mP, yw, uT, Ig, nX, aNA, MP, HC, aT, cy, Fx, acH, yb, bq, an, jj, ae, af, eu, bA, jf, VC, kl, wr, bf, s, BA, iU, oV, Y, ev, r, iy, en, hf, bSy, t, cl, pb, ck, rR, nM, kP, ua, c, ac, hc, au, dh, gX, hr, dT, JL, mf, cS, dy, fD, bt, xb, ao, kV, vq, sY, kh, bPo, Ke, akd, aZ, aD, df, iW, jh, dG, eq, jE, OH, gb, tK, aue, ad, kL, hX, dP, fU, av, I, LL, hd, ib, Db, oz, py, Ot, ds, NS, IC, oj, QJ, hD, vc, vB, ji, IQ, jo, nJ, sj, uQ, uX, d, nU, cH, PE, ff, eH, zR, cr, Mz, cud, dq, gE, xv, aF, eZ, iV, Z, iR, KM, bz, qa, eK, bF, es, D, NC, mi, yE, bE, ag, z, eB, aam, gZ, aMy, aS, Kj, cP, ei, Zw, kS, X, y, acG); #c1(PPARGC1A) c2(NP_037393) c3(peroxisome proliferator-activated receptor gamma coactivator 1-alpha) c4(175227) c5(175228, 175229, 175230, 175231, 175232, 175233) c6( ) c7(ID, T, ea, e, bB, ci, aR, u, K, qM, brQ, bc, hm, ly, aW, fc, g, wT, vy, U, Hb, m, dD, vX, My, aw, aj, ct, cd, td, cc, eV, bl, pi, cgO, bux, bgn, aq, Ix, bJ, W, cO, mg, ut, B, bL, eR, oe, jx, eX, cz, v, j, C, hX, V, J, jF, cF, yw, aT, bq, an, ae, af, kl, Y, r, kC, rY, OC, rR, ac, c, fP, mf, cS, gT, aen, aZ, bS, dG, fu, ah, eq, ad, BY, dP, hX, I, oW, ji, uQ, uX, IR, Mz, dq, Z, es, nb, bE, gZ, ei, oQ, kS); #c1(PPARGC1B) c2(NP_001166169) c3(peroxisome proliferator-activated receptor gamma coactivator 1-beta isoform 2) c4(68399) c5(68400, 68401, 68402, 68403, 68404, 68405) c6( ) c7(bL, bM, T, cz, bB, aj, dG, v, C, cd, J, ad, jF, cF, I, cc, u, aT, bl, K, dQ, brQ, ae, af, mR, aW, Y, g, bE, ut, ei); #c1(PPARGC1B) c2(NP_001166170) c3(peroxisome proliferator-activated receptor gamma coactivator 1-beta isoform 3) c4(68406) c5(68407, 68408, 68409, 68410, 68411, 68412, 68413) c6( ) c7(bL, bM, T, cz, bB, aj, dG, v, C, cd, J, ad, jF, cF, I, cc, u, aT, bl, K, dQ, brQ, ae, af, mR, aW, Y, g, bE, ut, ei); #c1(PPARGC1B) c2(NP_573570) c3(peroxisome proliferator-activated receptor gamma coactivator 1-beta isoform 1) c4(234558, 234559) c5(234560, 234561, 234562, 234563, 234564, 234565) c6( ) c7(bL, bM, T, cz, bB, aj, dG, v, C, cd, J, ad, jF, cF, I, cc, u, aT, bl, K, dQ, brQ, ae, af, mR, aW, Y, g, bE, ut, ei); #c1(PPARGC1B) c2(XP_011535855) c3(peroxisome proliferator-activated receptor gamma coactivator 1-beta isoform X1) c4( ) c5(333137, 333138, 333139, 333140, 333141, 333142) c6( ) c7(bL, bM, T, cz, bB, aj, dG, v, C, cd, J, ad, jF, cF, I, cc, u, aT, bl, K, dQ, brQ, ae, af, mR, aW, Y, g, bE, ut, ei); #c1(PPARGC1B) c2(XP_011535858) c3(peroxisome proliferator-activated receptor gamma coactivator 1-beta isoform X5) c4( ) c5(333143) c6( ) c7(bL, bM, T, cz, bB, aj, dG, v, C, cd, J, ad, jF, cF, I, cc, u, aT, bl, K, dQ, brQ, ae, af, mR, aW, Y, g, bE, ut, ei); #c1(PPAT) c2(NP_002694) c3(amidnphosphoribnsyltransferase proprotein) c4(131166) c5(131167, 131168, 131169, 131170, 131171, 131172) c6( ) c7(es, B, j, jp, bq); #c1(PPBP) c2(NP_002695) c3(platelet basic protein preproprotein) c4(131173, 131174, 131175, 131176, 131177, 131178, 131179, 131180, 131181, 131182, 131183, 131184) c5(131185, 131186, 131187, 131188, 131189, 131190) c6( ) c7(ck, bM, Dw, py, iU, qb, aW, ds, e, if, aT, cz, Ds, mN, j, K, qN, fr, axp, er, aDF); #c1(PPCDC) c2(NP_001288034) c3(phosphopantothenoylcysteine decarboxylase isoform e) c4( ) c5(113438) c6( ) c7(bN); #c1(PPCDC) c2(NP_068595) c3(phosphopantothenoylcysteine decarboxylase isoform a) c4(209761) c5(209762, 209763, 209764, 209765, 209766, 209767) c6( ) c7(bN); #c1(PPEF1) c2(NP_689412) c3(serine/threonine-protein phosphatase with EF-hands 1 isoform 3) c4(242665) c5(242666, 242667, 242668, 242669, 242670, 242671, 242672, 242673, 242674, 242675, 242676, 242677) c6( ) c7(alV, an); #c1(PPEF1) c2(XP_005274610) c3(serine/threonine-protein phosphatase with EF-hands 1 isoform X1) c4(285193, 285194, 285195, 285196) c5(285197, 285198, 285199, 285200, 285201, 285202, 285203, 285204, 285205, 285206, 285207, 285208, 285209, 285210, 285211, 285212, 285213, 285214) c6( ) c7(alV, an); #c1(PPEF2) c2(XP_011530341) c3(serine/threonine-protein phosphatase with EF-hands 2 isoform X1) c4(326190, 326191) c5(326192, 326193, 326194, 326195, 326196, 326197, 326198, 326199, 326200, 326201, 326202, 326203) c6( ) c7(PN); #c1(PPFIA1) c2(NP_003617) c3(liprin-alpha-1 isoform b) c4(139661) c5(139662, 139663, 139664, 139665, 139666, 139667) c6( ) c7(T, aW, ff, aT, ci, en, MG, iK); #c1(PPFIA1) c2(NP_803172) c3(liprin-alpha-1 isoform a) c4(252517) c5(252518, 252519, 252520, 252521, 252522, 252523, 252524, 252525, 252526, 252527, 252528, 252529, 252530, 252531, 252532, 252533, 252534, 252535) c6( ) c7(T, aW, ff, aT, ci, en, MG, iK); #c1(PPFIA1) c2(XP_011543616) c3(liprin-alpha-1 isoform X9) c4(342622, 342623) c5( ) c6( ) c7(T, aW, ff, aT, ci, en, MG, iK); #c1(PPFIA1) c2(XP_011543618) c3(liprin-alpha-1 isoform X11) c4(342624) c5(342625, 342626, 342627, 342628, 342629) c6( ) c7(T, aW, ff, aT, ci, en, MG, iK); #c1(PPFIA1) c2(XP_011543621) c3(liprin-alpha-1 isoform X14) c4( ) c5(342630) c6( ) c7(T, aW, ff, aT, ci, en, MG, iK); #c1(PPFIA2) c2(NP_001207402) c3(liprin-alpha-2 isoform b) c4(83573, 83574) c5(83575, 83576, 83577, 83578, 83579, 83580, 83581, 83582, 83583, 83584, 83585, 83586) c6( ) c7(bM, aj, ad, Be); #c1(PPFIA2) c2(NP_001207403) c3(liprin-alpha-2 isoform c) c4(83587, 83588) c5(83589, 83590, 83591, 83592, 83593, 83594, 83595, 83596, 83597, 83598, 83599, 83600) c6( ) c7(bM, aj, ad, Be); #c1(PPFIA2) c2(NP_001207404) c3(liprin-alpha-2 isoform d) c4(83601) c5(83602, 83603, 83604, 83605, 83606, 83607, 83608, 83609, 83610, 83611, 83612, 83613) c6( ) c7(bM, aj, ad, Be); #c1(PPFIA2) c2(NP_001207405) c3(liprin-alpha-2 isoform e) c4(83614, 83615) c5(83616, 83617, 83618, 83619, 83620, 83621) c6( ) c7(bM, aj, ad, Be); #c1(PPFIA2) c2(NP_001207406) c3(liprin-alpha-2 isoform f) c4(83622) c5(83623, 83624, 83625, 83626, 83627, 83628) c6( ) c7(bM, aj, ad, Be); #c1(PPFIA2) c2(NP_001207407) c3(liprin-alpha-2 isoform g) c4(83629) c5(83630, 83631, 83632, 83633, 83634, 83635) c6( ) c7(bM, aj, ad, Be); #c1(PPFIA2) c2(NP_001207408) c3(liprin-alpha-2 isoform h) c4(83636) c5(83637, 83638, 83639, 83640, 83641) c6( ) c7(bM, aj, ad, Be); #c1(PPFIA2) c2(NP_001207409) c3(liprin-alpha-2 isoform i) c4( ) c5(83642, 83643, 83644, 83645, 83646) c6( ) c7(bM, aj, ad, Be); #c1(PPFIA2) c2(NP_003616) c3(liprin-alpha-2 isoform a) c4(139654) c5(139655, 139656, 139657, 139658, 139659, 139660) c6( ) c7(bM, aj, ad, Be); #c1(PPFIA2) c2(XP_006719728) c3(liprin-alpha-2 isoform X13) c4(292912) c5(292913) c6( ) c7(bM, aj, ad, Be); #c1(PPFIA2) c2(XP_006719731) c3(liprin-alpha-2 isoform X16) c4( ) c5(292914) c6( ) c7(bM, aj, ad, Be); #c1(PPFIA4) c2(NP_001291260) c3(liprin-alpha-4 isoform 1) c4(115610, 115611) c5(115612, 115613, 115614, 115615, 115616, 115617, 115618, 115619, 115620, 115621, 115622, 115623) c6( ) c7(fr, cz); #c1(PPFIA4) c2(NP_001291261) c3(liprin-alpha-4 isoform 2) c4(115624) c5(115625) c6( ) c7(fr, cz); #c1(PPFIA4) c2(XP_006711651) c3(liprin-alpha-4 isoform X5) c4(286185, 286186) c5(286187, 286188, 286189, 286190, 286191, 286192, 286193, 286194, 286195, 286196, 286197, 286198) c6( ) c7(fr, cz); #c1(PPFIA4) c2(XP_006711652) c3(liprin-alpha-4 isoform X6) c4( ) c5(286199, 286200, 286201, 286202, 286203) c6( ) c7(fr, cz); #c1(PPFIA4) c2(XP_006711654) c3(liprin-alpha-4 isoform X9) c4( ) c5(286204, 286205, 286206, 286207) c6(286208) c7(fr, cz); #c1(PPFIBP1) c2(NP_001185844) c3(liprin-beta-1 isoform 3) c4(76580) c5( ) c6( ) c7(hl, akV, kh, Td, Pg, it, ci, aFJ, V, fq); #c1(PPFIBP1) c2(NP_001185845) c3(liprin-beta-1 isoform 4) c4(76581) c5(76582, 76583, 76584, 76585, 76586, 76587, 76588, 76589, 76590, 76591, 76592, 76593) c6( ) c7(hl, akV, kh, Td, Pg, it, ci, aFJ, V, fq); #c1(PPFIBP1) c2(NP_003613) c3(liprin-beta-1 isoform 1) c4(139639) c5(139640, 139641, 139642, 139643, 139644, 139645, 139646) c6( ) c7(hl, akV, kh, Td, Pg, it, ci, aFJ, V, fq); #c1(PPFIBP1) c2(NP_803193) c3(liprin-beta-1 isoform 2) c4(252573) c5(252574, 252575, 252576, 252577, 252578, 252579, 252580, 252581, 252582, 252583, 252584, 252585) c6( ) c7(hl, akV, kh, Td, Pg, it, ci, aFJ, V, fq); #c1(PPFIBP1) c2(XP_005253564) c3(liprin-beta-1 isoform X2) c4(272572) c5( ) c6( ) c7(hl, akV, kh, Td, Pg, it, ci, aFJ, V, fq); #c1(PPFIBP1) c2(XP_005253571) c3(liprin-beta-1 isoform X7) c4(272573) c5( ) c6( ) c7(hl, akV, kh, Td, Pg, it, ci, aFJ, V, fq); #c1(PPFIBP1) c2(XP_006719224) c3(liprin-beta-1 isoform X11) c4(292336) c5(292337, 292338, 292339, 292340, 292341, 292342, 292343, 292344, 292345, 292346, 292347, 292348, 292349, 292350, 292351, 292352, 292353, 292354) c6( ) c7(hl, akV, kh, Td, Pg, it, ci, aFJ, V, fq); #c1(PPFIBP1) c2(XP_011519171) c3(liprin-beta-1 isoform X1) c4(313770) c5(313771, 313772, 313773, 313774, 313775) c6( ) c7(hl, akV, kh, Td, Pg, it, ci, aFJ, V, fq); #c1(PPFIBP2) c2(NP_001243497) c3(liprin-beta-2 isoform 2) c4( ) c5(90949, 90950, 90951, 90952, 90953, 90954, 90955, 90956, 90957, 90958) c6( ) c7(jz, aT); #c1(PPFIBP2) c2(NP_001243498) c3(liprin-beta-2 isoform 3) c4(90959) c5(90960, 90961, 90962, 90963, 90964, 90965, 90966, 90967, 90968, 90969, 90970, 90971) c6( ) c7(jz, aT); #c1(PPFIBP2) c2(NP_003612) c3(liprin-beta-2 isoform 1) c4(139606, 139607, 139608, 139609) c5(139610, 139611, 139612, 139613, 139614, 139615, 139616, 139617, 139618, 139619, 139620, 139621, 139622, 139623, 139624, 139625, 139626, 139627, 139628, 139629, 139630, 139631, 139632, 139633, 139634, 139635, 139636, 139637, 139638) c6( ) c7(jz, aT); #c1(PPFIBP2) c2(XP_006718413) c3(liprin-beta-2 isoform X5) c4(291831, 291832, 291833) c5( ) c6( ) c7(jz, aT); #c1(PPFIBP2) c2(XP_006718415) c3(liprin-beta-2 isoform X8) c4(291834) c5(291835, 291836, 291837, 291838, 291839, 291840, 291841) c6( ) c7(jz, aT); #c1(PPFIBP2) c2(XP_011518718) c3(liprin-beta-2 isoform X4) c4(313128) c5( ) c6( ) c7(jz, aT); #c1(PPIA) c2(NP_001287910) c3(peptidyl-prolyl cis-trans isomerase A isoform 2) c4( ) c5(113179, 113180, 113181, 113182, 113183) c6( ) c7(bL, bM, T, dD, fR, ea, IH, ha, jx, aA, aj, eq, bX, eJ, J, ad, av, ft, jz, aE, ds, aT, h, K, ae, afu, d, bf, aW, ff, wc, Io, kp, en, cl, pL, bz, ck, iQ, c, eM, hL, bm, aS, IC, B, y); #c1(PPIA) c2(NP_066953) c3(peptidyl-prolyl cis-trans isomerase A isoform 1) c4(207685, 207686, 207687) c5(207688, 207689, 207690, 207691, 207692, 207693, 207694, 207695, 207696, 207697, 207698, 207699, 207700) c6( ) c7(bL, bM, T, dD, fR, ea, IH, ha, jx, aA, aj, eq, bX, eJ, J, ad, av, ft, jz, aE, ds, aT, h, K, ae, afu, d, bf, aW, ff, wc, Io, kp, en, cl, pL, bz, ck, iQ, c, eM, hL, bm, aS, IC, B, y); #c1(PPIB) c2(NP_000933) c3(peptidyl-prolyl cis-trans isomerase B precursor) c4(17506) c5(17507, 17508, 17509, 17510, 17511, 17512) c6( ) c7(ck, T, bE, aW, jx, aT, bB, aq, h, K, zp, cuf, B); #c1(PPIC) c2(NP_000934) c3(peptidyl-prolyl cis-trans isomerase C precursor) c4(17513) c5(17514, 17515, 17516, 17517, 17518, 17519) c6( ) c7(aF, aA); #c1(PPID) c2(NP_005029) c3(peptidyl-prolyl cis-trans isomerase D) c4(152297) c5(152298, 152299, 152300, 152301, 152302, 152303) c6( ) c7(T, aE, dH, Ae, aW, dF, e, xs, U, aT, jh, K, ae, af, ad); #c1(PPIF) c2(NP_005720) c3(peptidyl-prolyl cis-trans isomerase F, mitochondrial precursor) c4(158813, 158814) c5(158815, 158816, 158817, 158818, 158819, 158820, 158821) c6( ) c7(T, anR, aE, dH, Ae, aW, e, ju, xs, oj, aT, U, K, dF, af); #c1(PPIF) c2(XP_005269436) c3(peptidyl-prolyl cis-trans isomerase F, mitochondrial isoform X1) c4(282565) c5(282566, 282567, 282568, 282569, 282570, 282571, 282572, 282573, 282574, 282575, 282576) c6( ) c7(T, anR, aE, dH, Ae, aW, e, ju, xs, oj, aT, U, K, dF, af); #c1(PPIG) c2(NP_004783) c3(peptidyl-prolyl cis-trans isomerase G) c4(149593, 149594, 149595, 149596) c5(149597, 149598, 149599, 149600, 149601, 149602, 149603, 149604, 149605, 149606, 149607, 149608, 149609, 148610, 149611, 149612, 149613, 149614) c6( ) c7(bM, T, ea, e, al, fd, bB, IR, ci, bh, XW, bW, dV, iv, K, hu, eL, aAu, aW, hl, mK, eM, vA, bcl, dD, ht, ct, qN, cd, h, eV, aNU, dL, hB, he, Nu, sp, auM, aq, op, B, qc, bL, eX, aA, cR, cz, j, C, q, eA, aT, cy, rE, ae, af, iU, Lf, r, Io, HL, en, bu, pb, ck, ac, c, dh, gT, bt, ha, bS, eq, jE, hF, ad, dP, av, HE, io, IU, ff, eZ, aF, Z, bz, eK, gk, mO, bE); #c1(PPIG) c2(XP_011510494) c3(peptidyl-prolyl cis-trans isomerase G isoform X2) c4( ) c5(301006, 301007, 301008, 301009, 301010, 301011, 301012, 301013, 301014, 301015) c6( ) c7(bM, T, ea, e, al, fd, bB, IR, ci, bh, XW, bW, dV, iv, K, hu, eL, aAu, aW, hl, mK, eM, vA, bcl, dD, ht, ct, qN, cd, h, eV, aNU, dL, hB, he, Nu, sp, auM, aq, op, B, qc, bL, eX, aA, cR, cz, j, C, q, eA, aT, cy, rE, ae, af, iU, Lf, r, Io, HL, en, bu, pb, ck, ac, c, dh, gT, bt, ha, bS, eq, jE, hF, ad, dP, av, HF, io, IU, ff, eZ, aF, Z, bz, eK, gk, mO, bE); #c1(PPIL1) c2(NP_057143) c3(peptidyl-prolyl cis-trans isomerase-like 1) c4(189096) c5(189097, 189098, 189099, 189100, 189101, 189102) c6( ) c7(T, bE, jx, aA, bB, aF); #c1(PPIL2) c2(NP_680480) c3(peptidyl-prolyl cis-trans isomerase-like 2 isoform a) c4(242306) c5(242307, 242308, 242309, 242310, 242311, 242312, 242313, 242314, 242315, 242316, 242317, 242318, 242319, 242320, 242321, 242322, 242323, 242324) c6( ) c7(af); #c1(PPIL2) c2(NP_680481) c3(peptidyl-prolyl cis-trans isomerase-like 2 isoform b) c4(242325) c5(242326, 242327, 242328, 242329, 242330, 242331) c6( ) c7(af); #c1(PPIL2) c2(XP_011528345) c3(peptidyl-prolyl cis-trans isomerase-like 2 isoform X4) c4(323389) c5(323390) c6( ) c7(af); #c1(PPIL2) c2(XP_011528346) c3(peptidyl-prolyl cis-trans isomerase-like 2 isoform X5) c4(323391) c5(323392, 323393, 323394, 323395, 323396) c6( ) c7(af); #c1(PPIL2) c2(XP_011528353) c3(peptidyl-prolyl cis-trans isomerase-like 2 isoform X7) c4( ) c5(323397) c6( ) c7(af); #c1(PPIL3) c2(NP_115861) c3(peptidyl-prolyl cis-trans isomerase-like 3 isoform PPIL3a) c4(224372) c5(224373, 224374, 224375, 224376, 224377, 224378, 224379, 224380, 224381, 224382) c6( ) c7(eA); #c1(PPIL3) c2(NP_570981) c3(peptidyl-prolyl cis-trans isomerase-like 3 isoform PPIL36) c4(234453, 234454) c5(234455, 234456, 234457, 234458, 234459, 234460, 234461, 234462, 234463, 234464, 234465, 234466) c6( ) c7(eA); #c1(PPIP5K1) c2(NP_001124330) c3(inositol hexakisphosphate and diphosphoinositol-pentakisphosphate kinase 1 isoform 5) c4(48689) c5(48690, 48691, 48692, 48693, 48694, 48695, 48696, 48697, 48698, 48699, 48700, 48701, 48702, 48703) c6( ) c7(Y, jx, cU, aiT, Io, pm); #c1(PPIP5K1) c2(NP_001177143) c3(inositol hexakisphosphate and diphosphoinositol-pentakisphosphate kinase 1 isoform 6) c4(72465, 72466, 72467, 72468) c5(72469, 72470, 72471, 72472, 72473, 72474, 72475, 72476, 72477, 72478, 72479, 72480, 72481, 72482, 72483, 72484, 72485, 72486, 72487, 72488, 72489, 72490, 72491) c6( ) c7(Y, jx, cU, aiT, Io, pm); #c1(PPIP5K1) c2(XP_005254861) c3(inositol hexakisphosphate and diphosphoinositol-pentakisphosphate kinase 1 isoform X1) c4(273354) c5(273355, 273356, 273357, 273358, 273359, 273360, 273361, 273362, 273363, 273364, 273365, 273366, 273367, 273368) c6( ) c7(Y, jx, cU, aiT, Io, pm); #c1(PPIP5K1) c2(XP_006720849) c3(inositol hexakisphosphate and diphosphoinositol-pentakisphosphate kinase 1 isoform X7) c4(293725) c5(293726, 293727, 293728, 293729, 293730, 293731, 293732, 293733, 293734, 293735, 293736, 293737, 293738, 293739, 293740) c6( ) c7(Y, jx, cU, aiT, Io, pm); #c1(PPIP5K1) c2(XP_011520556) c3(inositol hexakisphosphate and diphosphoinositol-pentakisphosphate kinase 1 isoform X2) c4(315476) c5(315477, 315478, 315479, 315480, 315481, 315482, 315483, 315484, 315485, 315486, 315487, 315488, 315489) c6( ) c7(Y, jx, cU, ail, Io, pm); #c1(PPIP5K1) c2(XP_011520557) c3(inositol hexakisphosphate and diphosphoinositol-pentakisphosphate kinase 1 isoform X3) c4(315490) c5( ) c6( ) c7(Y, jx, cU, ail, Io, pm); #c1(PPIP5K1) c2(XP_011520560) c3(inositol hexakisphosphate and diphosphoinositol-pentakisphosphate kinase 1 isoform X8) c4( ) c5(315491) c6( ) c7(Y, jx, cU, ail, Io, pm); #c1(PPL) c2(NP_002696) c3(periplakin) c4(131191) c5(131192, 131193, 131194, 131195, 131196, 131197) c6( ) c7(ay, T, hd, ff, ht, yb, hu, en, rz, xt); #c1(PPMIA) c2(NP_066283) c3(protein phosphatase 1A isoform 1) c4( ) c5(206974, 206975, 206976, 206977, 206978, 206979, 206980, 206981) c6( ) c7(T, h, Io, ae, B, ad); #c1(PPMIA) c2(NP_808820) c3(protein phosphatase 1A isoform 2) c4(252951) c5(252952, 252953, 252954, 252955, 252956, 252957, 252958, 252959, 252960, 252961, 252962, 252963, 252964, 252965, 252966, 252967, 252968, 252969, 252970, 252971, 252972) c6( ) c7(T, h, Io, ae, B, ad); #c1(PPMIA) c2(NP_808821) c3(protein phosphatase 1A isoform 3) c4(252973, 252974, 252975, 252976, 252977) c5(252978, 252979, 252980, 252981, 252982, 252983, 252984, 252985, 252986, 252987) c6( ) c7(T, h, Io, ae, B, ad); #c1(PPMIA) c2(XP_011535179) c3(protein phosphatase 1A isoform X3) c4( ) c5(332022) c6( ) c7(T, h, Io, ae, B, ad); #c1(PPM1B) c2(NP_001028729) c3(protein phosphatase 1B isoform 5) c4( ) c5(30535, 30536, 30537, 30538, 30539, 30540, 30541, 30542, 30543, 30544, 30545, 30546, 30547, 30548, 30549, 30550, 30551, 30552) c6( ) c7(azB, azC, j); #c1(PPM1B) c2(NP_002697) c3(protein phosphatase 1B isoform 1) c4(131198, 131199, 131200, 131201) c5(131202, 131203, 131204, 131205, 131206, 131207, 131208) c6( ) c7(azB, azC, j); #c1(PPM1B) c2(NP_808907) c3(protein phosphatase 1B isoform 2) c4(253009) c5(253010, 253011, 253012, 253013, 253014, 253015) c6( ) c7(azB, azC, j); #c1(PPM1B) c2(NP_808908) c3(protein phosphatase 1B isoform 3) c4(253016) c5(253017, 253018, 253019, 253020, 253021) c6( ) c7(azB, azC, j); #c1(PPM1D) c2(NP_003611) c3(protein phosphatase 1D) c4(139585, 139586, 139587) c5(139588, 139589, 139590, 139591, 139592, 139593, 139594, 139595, 139596, 139597, 139598, 139599, 139600, 139601, 139602, 139603, 139604, 139605) c6( ) c7(T, yk, aA, ci, Iu, q, eA, aT, K, jf, B, aW, oV, r, eS, as, cm, t, eM, X, cX, m, cug); #c1(PPM1E) c2(NP_055721) c3(protein phosphatase 1E) c4(183058, 183059) c5(183060, 183061, 183062, 183063, 183064, 183065, 183066, 183067, 183068, 183069, 183070, 183071) c6( ) c7(aW, aT); #c1(PPM1F) c2(NP_055449) c3(protein phosphatase 1F) c4(181220, 181221, 181222, 181223) c5(181224, 181225, 181226, 181227, 181228, 181229, 181230, 181231, 181232, 181233, 181234, 181235, 181236, 181237, 181238, 181239, 181240, 181241, 181242, 181243) c6( ) c7(T, K); #c1(PPM1F) c2(XP_011528858) c3(protein phosphatase 1F isoform X1) c4( ) c5(324241, 324242, 324243, 324244, 324245, 324246, 324247, 324248) c6( ) c7(T, K); #c1(PPM1G) c2(NP_817092) c3(protein phosphatase 1G) c4(253089, 253090, 253091) c5(253092, 253093, 253094, 253095, 253096, 253097, 253098, 253099, 253100, 253101, 253102, 253103, 253104, 253105, 253106, 253107, 253108, 253109, 253110, 253111, 253112, 253113) c6( ) c7(cz); #c1(PPM1H) c2(NP_065751) c3(protein phosphatase 1H) c4(205183) c5(205184, 205185, 205186, 205187, 205188, 205189) c6( ) c7(bE, ev, eZ, bB, g, fq); #c1(PPM1K) c2(NP_689755) c3(protein phosphatase 1K, mitochondrial) c4(243873, 243874) c5(243875, 243876, 243877, 243878, 243879, 243880) c6( ) c7(cuh, ac, c, bP, agm, K, Gp, B); #c1(PPM1K) c2(XP_005262832) c3(protein phosphatase 1K, mitochondrial isoform X3) c4( ) c5(278125, 278126, 278127, 278128, 278129, 278130, 278131, 278132, 278133, 278134) c6( ) c7(cuh, ac, c, bP, agm, K, Gp, B); #c1(PPM1L) c2(NP_640338) c3(protein phosphatase 1L) c4(238458) c5(238459, 238460, 238461, 238462, 238463, 238464) c6( ) c7(bF, If, v); #c1(PPM1L) c2(XP_006713570) c3(protein phosphatase 1L isoform X1) c4(287231) c5(287232, 287233, 287234, 287235, 287236, 287237) c6( ) c7(bF, If, v); #c1(PPM1M) c2(NP_001116342) c3(protein phosphatase 1M isoform b) c4( ) c5(43792, 43793, 43794, 43795, 43796) c6( ) c7(aW, Ld, bK, aT); #c1(PPM1M) c2(NP_653242) c3(protein phosphatase 1M isoform a) c4(239280) c5(239281, 239282, 239283, 239284, 239285, 239286, 239287, 239288) c6( ) c7(aW, Ld, bK, aT); #c1(PPM1M) c2(XP_005264937) c3(protein phosphatase 1M isoform X2) c4( ) c5(279310) c6( ) c7(aW, Ld, bK, aT); #c1(PPM1M) c2(XP_005264938) c3(protein phosphatase 1M isoform X3) c4(279311, 279312, 279313) c5(279314, 279315, 279316, 279317, 279318, 279319, 279320, 279321, 279322, 279323) c6( ) c7(aW, Ld, bK, aT); #c1(PPME1) c2(NP_001258522) c3(protein phosphatase methylesterase 1 isoform b) c4(96096) c5(96097, 96098, 96099, 96100, 96101, 96102) c6( ) c7(T, AM, hL, aA, aF, as, cl, bz, eA); #c1(PPME1) c2(NP_057231) c3(protein phosphatase methylesterase 1 isoform a) c4(189613, 189614) c5(189615, 189616, 189617, 189618, 189619, 189620, 189621, 189622, 189623, 189624, 189625, 189626) c6( ) c7(T, AM, hL, aA, aF, as, cl, bz, eA); #c1(PPOX) c2(NP_001116236) c3(protoporphyrinogen oxidase) c4(43699) c5( ) c6( ) c7(bL, cuj, cui, Ow, aVf, QW, gi, nl, nh, QV, dq, bHQ, bKa, GR, OC); #c1(PPOX) c2(XP_011507967) c3(protoporphyrinogen oxidase isoform X3) c4(298399) c5(298400, 298401, 298402, 298403, 298404, 298405) c6( ) c7(bL, cuj, cui, Ow, aVf, QW, gi, nl, nh, QV, dq, bHQ, bKa, GR, OC); #c1(PPOX) c2(XP_011507973) c3(protoporphyrinogen oxidase isoform X9) c4( ) c5(298406, 298407, 298408, 298409, 298410, 298411, 298412, 298413, 298414, 298415) c6( ) c7(bL, cuj, cui, Ow, aVf, QW, gi, nl, nh, QV, dq, bHQ, bKa, GR, OC); #c1(PPOX) c2(XP_011507974) c3(protoporphyrinogen oxidase isoform X10) c4( ) c5(298416) c6( ) c7(bL, cuj, cui, Ow, aVf, QW, gi, nl, nh, QV, dq, bHQ, bKa, GR, OC); #c1(PPOX) c2(XP_011507977) c3(protoporphyrinogen oxidase isoform X13) c4(298417) c5(298418, 298419, 298420, 298421, 298422) c6( ) c7(bL, cuj, cui, Ow, aVf, QW, gi, nl, nh, QV, dq, bHQ, bKa, GR, OC); #c1(PPP1CA) c2(NP_001008709) c3(serine/threonine-protein phosphatase PP1-alpha catalytic subunit isoform 3) c4(23381) c5(23382, 23383, 23384, 23385, 23386, 23387) c6( ) c7(bxC, T, d, aW, ff, wc, aT, en, B); #c1(PPP1CA) c2(NP_002699) c3(serine/threonine-protein phosphatase PP1-alpha catalytic subunit isoform 1) c4(131209, 131210) c5(131211, 131212, 131213, 131214, 131215, 131216, 131217, 131218, 131219, 131220, 131221, 131222) c6( ) c7(bxC, T, d, aW, ff, wc, aT, en, B); #c1(PPP1CA) c2(NP_996756) c3(serine/threonine-protein phosphatase PP1-alpha catalytic subunit isoform 2) c4(264480) c5(264481, 264482, 264483, 264484, 264485, 264486) c6( ) c7(bxC, T, d, aW, ff, wc, aT, en, B); #c1(PPP1CC) c2(NP_001231903) c3(serine/threonine-protein phosphatase PP1-gamma catalytic subunit isoform 2) c4(87687) c5(87688, 87689, 87690, 87691, 87692, 87693) c6( ) c7(vH, t, T, gU, ND); #c1(PPP1CC) c2(NP_002701) c3(serine/threonine-protein phosphatase PP1-gamma catalytic subunit isoform 1) c4(131223, 131224, 131225) c5(131226, 131227, 131228, 131229, 131230, 131231, 131232, 131233, 131234, 131235, 131236, 131237, 131238, 131239, 131240, 131241, 131242, 131243) c6( ) c7(vH, t, T, gU, ND); #c1(PPP1R10) c2(NP_002705) c3(serine/threonine-protein phosphatase 1 regulatory subunit 10) c4(131262, 131263) c5(131264, 131265, 131266, 131267, 131268, 131269, 131270, 131271, 131272, 131273, 131274, 131275, 131276, 131277, 131278, 131279, 131280, 131281, 131282, 131283, 131284, 131285, 131286, 131287, 131288, 131289, 131290, 131291, 131292, 131293, 131294, 131295, 131296, 131297, 131298, 131299, 131300, 131301, 131302, 131303, 131304, 131305, 131306, 131307, 131308, 131309, 131310, 131311, 131312, 131313) c6( ) c7(T, afF, eZ, io, as, hB, hH, af); #c1(PPP1R11) c2(NP_068778) c3(protein phosphatase 1 regulatory subunit 11) c4(210469, 210470) c5(210471, 210472, 210473, 210474, 210475, 210476, 210477, 210478, 210479, 210480, 210481, 210482, 210483, 210484, 210485, 210486, 210487, 210488, 210489, 210490, 210491, 210492, 210493, 210494, 210495, 210496, 210497, 210498, 210499, 210500, 210501) c6( ) c7(T, aE, W, xl, eZ, nY, cm, V); #c1(PPP1R11) c2(XP_006715237) c3(protein phosphatase 1 regulatory subunit 11 isoform X1) c4( ) c5(288868, 288869, 288870, 288871, 288872, 288873, 288874, 288875, 288876, 288877, 288878, 288879, 288880, 288881, 288882, 288883, 288884, 288885, 288886, 288887, 288888, 288889, 288890, 288891, 288892, 288893, 288894, 288895, 288896, 288897, 288898, 288899, 288900, 288901, 288902, 288903, 288904, 288905, 288906, 288907, 288908, 288909, 288910, 288911, 288912, 288913, 288914, 288915, 288916, 288917, 288918, 288919, 288920, 288921, 288922, 288923, 288924, 288925, 288926, 288927, 288928, 288929, 288930, 288931, 288932, 288933, 288934, 288935, 288936, 288937, 288938, 288939, 288940, 288941, 288942, 288943, 288944, 288945, 288946, 288947, 288948, 288949, 288950, 288951, 288952, 288953, 288954, 288955, 288956, 288957, 288958, 288959, 288960, 288961, 288962, 288963, 288964, 288965, 288966, 288967, 288968, 288969, 288970, 288971, 288972, 288973, 288974, 288975, 288976, 288977, 288978, 288979, 288980, 288981, 288982, 288983, 288984, 288985, 288986, 288987, 288988, 288989, 288990, 288991, 288992, 288993, 288994, 288995, 288996, 288997, 288998, 288999, 289000, 289001, 289002, 289003, 289004, 289005, 289006, 289007, 289008, 289009, 289010) c6( ) c7(T, aE, W, xl, eZ, nY, cm, V); #c1(PPP1R12A) c2(NP_001137357) c3(protein phosphatase 1 regulatory subunit 12A isoform a) c4(55581, 55582) c5(55583, 55584, 55585, 55586, 55587, 55588, 55589, 55590, 55591, 55592, 55593, 55594, 55595, 55596, 55597, 55598, 55599) c6( ) c7(bM, T, ib, bf, aE, hW, fd, akA, afV, m, cd); #c1(PPP1R12A) c2(NP_001137358) c3(protein phosphatase 1 regulatory subunit 12A isoform b) c4(55600) c5(55601, 55602, 55603, 55604, 55605) c6( ) c7(bM, T, ib, bf, aE, hW, fd, akA, afV, m, cd); #c1(PPP1R12A) c2(NP_001231919) c3(protein phosphatase 1 regulatory subunit 12A isoform c) c4(87701, 87702) c5(87703, 87704, 87705, 87706, 87707, 87708, 87709, 87710, 87711, 87712, 87713, 87714) c6( ) c7(bM, T, ib, bf, aE, hW, fd, akA, afV, m, cd); #c1(PPP1R12A) c2(NP_001231921) c3(protein phosphatase 1 regulatory subunit 12A isoform d) c4(87715, 87716) c5(87717, 87718, 87719, 87720, 87721, 87722, 87723, 87724, 87725, 87726, 87727, 87728) c6( ) c7(bM, T, ib, bf, aE, hW, fd, akA, afV, m, cd); #c1(PPP1R12A) c2(XP_011536685) c3(protein phosphatase 1 regulatory subunit 12A isoform X11) c4(334189) c5(334190, 334191, 334192, 334193, 334194, 334195) c6( ) c7(bM, T, ib, bf, aE, hW, fd, akA, afV, m, cd); #c1(PPP1R12B) c2(NP_001161329) c3(protein phosphatase 1 regulatory subunit 12B isoform e) c4(65610) c5(65611, 65612, 65613, 65614, 65615, 65616) c6( ) c7(ac); #c1(PPP1R12B) c2(NP_001161330) c3(protein phosphatase 1 regulatory subunit 12B isoform f) c4(65617) c5(65618, 65619, 65620, 65621, 65622, 65623) c6( ) c7(ac); #c1(PPP1R12B) c2(NP_002472) c3(protein phosphatase 1 regulatory subunit 12B isoform a) c4(129126, 129127, 129128) c5(129129, 129130, 129131, 129132, 129133, 129134, 129135, 129136, 129137, 129138, 129139, 129140, 129141, 129142) c6( ) c7(ac); #c1(PPP1R12B) c2(NP_115286) c3(protein phosphatase 1 regulatory subunit 12B isoform c) c4( ) c5(222830, 222831, 222832, 222833, 222834) c6( ) c7(ac); #c1(PPP1R12B) c2(NP_115287) c3(protein phosphatase 1 regulatory subunit 12B isoform d) c4(222835) c5(222836, 222837, 222838, 222839, 222840) c6( ) c7(ac); #c1(PPP1R12C) c2(NP_060077) c3(protein phosphatase 1 regulatory subunit 12C isoform a) c4(194042, 194043) c5(194044, 194045, 194046, 194047, 194048, 194049, 194050, 194051, 194052, 194053, 194054, 194055) c6( ) c7(T, oT, cA, eM, bE, aW, aZ, aT, fd, aq, eA, ei, B); #c1(PPP1R12C) c2(XP_005259070) c3(protein phosphatase 1 regulatory subunit 12C isoform X1) c4(275948) c5(275949, 275950, 275951, 275952, 275953, 275954, 275955) c6( ) c7(T, oT, cA, eM, bE, aW, aZ, aT, fd, aq, eA, ei, B); #c1(PPP1R13B) c2(NP_056131) c3(apoptosis-stimulating of p53 protein 1) c4(185828, 185829, 185830, 185831) c5(185832, 185833, 185834, 185835, 185836, 185837, 185838, 185839, 185840, 185841, 185842, 185843, 185844, 185845, 185846, 185847, 185848, 185849) c6( ) c7(T, aZ, fd, eA, hX, x, oT, aoc, aT, nJ, ZH, CN, aW, Y, aq, cA, eM, bE, hk, k, ei, B); #c1(PPP1R13B) c2(XP_011534900) c3(apoptosis-stimulating of p53 protein 1 isoform X7) c4( ) c5(331422, 331423, 331424, 331425, 331426) c6( ) c7(T, aZ, fd, eA, hX, x, oT, aoc, aT, nJ, ZH, CN, aW, Y, aq, cA, eM, bE, hk, k, ei, B); #c1(PPP1R13L) c2(NP_001135974) c3(relA-associated inhibitor) c4(53879, 53880) c5(53881, 53882, 53883, 53884, 53885, 53886, 53887, 53888, 53889, 53890, 53891, 53892, 53893, 53894, 53895, 53896, 53897) c6( ) c7(T, NT, fd, n, ci, Iu, hF, ad, zn, hX, x, hd, bnj, aT, dL, ae, d, s, aW, Y, Lf, r, bu, t, bz, ck, sS, eM, nB, cj, m, k, bt, B); #c1(PPP1R14A) c2(NP_001230876) c3(protein phosphatase 1 regulatory subunit 14A isoform 2) c4(86901) c5(86902, 86903, 86904, 86905, 86906, 86907) c6( ) c7(ib, blU, bzS, cuk, HR, B); #c1(PPP1R14A) c2(NP_150281) c3(protein phosphatase 1 regulatory subunit 14A isoform 1) c4(228028) c5(228029, 228030, 228031, 228032, 228033, 228034) c6( ) c7(ib, blU, bzS, cuk, HR, B); #c1(PPP1R14B) c2(NP_619634) c3(protein phosphatase 1 regulatory subunit 148) c4(236899) c5(236900, 236901, 236902, 236903, 236904, 236905) c6( ) c7(h, jZ, Y, aaF); #c1(PPP1R14C) c2(NP_112211) c3(protein phosphatase 1 regulatory subunit 14C) c4(220848) c5(220849, 220850, 220851, 220852, 220853, 220854) c6( ) c7(GC, aW, If, aT); #c1(PPP1R15A) c2(NP_055145) c3(protein phosphatase 1 regulatory subunit 15A) c4(179414, 179415, 179416) c5(179417, 179418, 179419, 179420, 179421, 179422, 179423, 179424, 179425, 179426, 179427, 179428, 179429, 179430, 179431, 179432, 179433, 179434) c6( ) c7(eW, T, hi, eR, nO, Y, ns, rf, fd, cy, j, ci, K, eA); #c1(PPP1R15B) c2(NP_116222) c3(protein phosphatase 1 regulatory subunit 15B) c4(225837, 225838) c5(225839, 225840, 225841, 225842, 225843, 225844, 225845, 225846, 225847, 225848, 225849, 225850) c6( ) c7(aW, aT); #c1(PPP1R17) c2(NP_001138595) c3(protein phosphatase 1 regulatory subunit 17 isoform 2) c4(57148) c5(57149, 57150, 57151, 57152, 57153, 57154) c6( ) c7(cH, cl); #c1(PPP1R17) c2(NP_006649) c3(protein phosphatase 1 regulatory subunit 17 isoform 1) c4(166880) c5(166881, 166882, 166883, 166884, 166885, 166886) c6( ) c7(cH, cl); #c1(PPP1R18) c2(NP_001128342) c3(phostensin) c4(49862, 49863, 49864, 49865, 49866, 49867) c5(49868, 49869, 49870, 48871, 49872, 49873, 49874, 49875, 49876, 49877, 49878, 49879, 49880, 49881, 49882, 49883, 49884, 49885, 49886, 49887, 49888, 49889, 49890, 49891, 49892, 49893, 49894, 49895, 49896, 49897, 49898, 49899, 49900, 49901, 49902, 49903, 49904, 49905, 49906, 49907, 49908, 49909, 49910, 49911, 49912, 49913, 49914, 49915, 49916, 49917, 49918, 49919, 49920, 49921, 49922, 49923, 49924, 49925, 49926, 49927, 49928, 49929, 49930, 49931, 49932, 49933, 49934, 49935, 49936, 49937, 49938, 49939, 49940, 49941, 49942, 49943, 49944, 49945, 49946, 49947, 49948, 49949, 49950) c6( ) c7(eZ); #c1(PPP1R18) c2(XP_003403645) c3(phostensin isoform X1) c4( ) c5(266115, 266116, 266117, 266118, 266119, 266120, 266121, 266122, 266123) c6( ) c7(eZ); #c1(PPP1R1A) c2(NP_006732) c3(protein phosphatase 1 regulatory subunit 1A) c4(167540) c5(167541, 167542, 167543, 167544, 167545, 167546) c6( ) c7(T, aw, eX, fd, aKs, C, ai, cd, cc, aT, eV, hm, d, xR, aW, Y, t, bF, iO, eU, iT, aKp, aS, m, B); #c1(PPP1R1A) c2(XP_006719534) c3(protein phosphatase 1 regulatory subunit 1A isoform X2) c4(292632) c5(292633, 292634, 292635, 292636, 292637, 292638) c6( ) c7(T, aw, eX, fd, aKs, C, ai, cd, cc, aT, eV, hm, d, xR, aW, Y, t, bF, iO, eU, iT, aKp, aS, m, B); #c1(PPP1R1B) c2(NP_115568) c3(protein phosphatase 1 regulatory subunit 1B isoform 1) c4(223215, 223216, 223217) c5(223218, 223219, 223220, 223221, 223222, 223223, 223224, 223225, 223226, 223227, 223228, 223229, 223230, 223231, 223232, 223233, 223234, 223235) c6( ) c7(tJ, T, aA, GC, bS, ct, xr, ci, AO, aT, bK, Jl, aW, Gv, ff, aF, en, g, Z, jb, FT, ok, rR, cA, Kv, sv); #c1(PPP1R1B) c2(NP_852606) c3(protein phosphatase 1 regulatory subunit 1B isoform 2) c4( ) c5(255047, 255048, 255049, 255050, 255051, 255052, 255053, 255054) c6( ) c7(tJ, T, aA, GC, bS, ct, xr, ci, AO, aT, bK, Jl, aW, Gv, ff, aF, en, g, Z, jb, FT, ok, rR, cA, Kv, sv); #c1(PPP1R2) c2(NP_006232) c3(protein phosphatase inhibitor 2 isoform 2) c4(163137) c5(163138, 163139, 163140, 163141, 163142, 163143) c6( ) c7(bL, T, ey, K); #c1(PPP1R3A) c2(NP_002702) c3(protein phosphatase 1 regulatory subunit 3A) c4(131244) c5(131245, 131246, 131247, 131248, 131249, 131250) c6( ) c7(td, bL, T, kl, bKq, eR, Mm, iT, aZ, QJ, jh, r, aj, mf, j, ei, af, J, ad); #c1(PPP1R3B) c2(NP_078883) c3(protein phosphatase 1 regulatory subunit 38) c4(215883) c5(215884, 215885, 215886, 215887, 215888, 215889, 215890, 215891, 215892, 215893) c6( ) c7(ag, fc, yT, aj, v, bK, j, cP, ei, dQ, J); #c1(PPP1R3C) c2(NP_005389) c3(protein phosphatase 1 regulatory subunit 3C) c4(155658, 155659, 155660) c5(155661, 155662, 155663, 155664, 155665, 155666, 155667, 155668, 155669, 155670, 155671, 155672, 155673, 155674, 155675, 155676, 155677, 155678) c6( ) c7(bL, ag, yT, aj, dQ, azp, cd, J); #c1(PPP1R42) c2(NP_001013648) c3(protein phosphatase 1 regulatory subunit 42) c4(25681, 25682, 25683) c5(25684, 25685, 25686, 25687, 25688, 25689, 25690, 25691, 25692, 25693, 25694, 25695, 25696, 25697, 25698, 25699, 25700, 25701) c6( ) c7(aw, g); #c1(PPP1R7) c2(NP_001269338) c3(protein phosphatase 1 regulatory subunit 7 isoform 2) c4(101162) c5(101163, 101164, 101165, 101166, 101167, 101168) c6( ) c7(T, ci, qN); #c1(PPP1R7) c2(NP_001269339) c3(protein phosphatase 1 regulatory subunit 7 isoform 3) c4(101169) c5(101170, 101171, 101172, 101173, 101174, 101175) c6( ) c7(T, ci, qN); #c1(PPP1R7) c2(NP_001269340) c3(protein phosphatase 1 regulatory subunit 7 isoform 4) c4(101176) c5(101177, 101178, 101179, 101180, 101181, 101182) c6( ) c7(T, ci, qN); #c1(PPP1R7) c2(NP_002703) c3(protein phosphatase 1 regulatory subunit 7 isoform 1) c4(131251) c5(131252, 131253, 131254, 131255, 131256, 131257, 131258, 131259, 131260, 131261) c6( ) c7(T, ci, qN); #c1(PPP1R9A) c2(NP_001159632) c3(neurabin-1 isoform 1) c4(64492) c5(64493, 64494, 64495, 64496, 64497, 64498) c6( ) c7(y); #c1(PPP1R9A) c2(NP_001159633) c3(neurabin-1 isoform 2) c4(64499) c5(64500, 64501, 64502, 64503, 64504, 64505) c6( ) c7(y); #c1(PPP1R9A) c2(NP_001159634) c3(neurabin-1 isoform 3) c4(64506) c5(64507, 64508, 64509, 64510, 64511, 64512) c6( ) c7(y); #c1(PPP1R9A) c2(NP_001159635) c3(neurabin-1 isoform 5) c4(64513) c5(64514, 64515) c6( ) c7(y); #c1(PPP1R9A) c2(NP_060120) c3(neurabin-1 isoform 4) c4(194262, 194263) c5(194264, 194265, 194266, 194267, 194268, 194269, 194270, 194271, 194272, 194273) c6( ) c7(y); #c1(PPP1R9A) c2(XP_011514685) c3(neurabin-1 isoform X3) c4( ) c5(307329, 307330, 307331, 307332, 307333, 307334, 307335, 307336, 307337, 307338) c6( ) c7(y); #c1(PPP2CA) c2(NP_002706) c3(serine/threonine-protein phosphatase 2A catalytic subunit alpha isoform) c4(131314) c5(131315, 131316, 131317, 131318, 131319, 131320) c6( ) c7(bL, gh, T, bM, F, cF, jp, aW, zf, eZ, aT, gZ, aq, j, f, B, tw); #c1(PPP2CB) c2(NP_001009552) c3(serine/threonine-protein phosphatase 2A catalytic subunit beta isoform) c4(23585) c5(23586, 23587, 23588, 23589, 23590, 23591, 23592, 23593, 23594, 23595) c6( ) c7(ad, g); #c1(PPP2R1A) c2(NP_055040) c3(serine/threonine-protein phosphatase 2A 65 kDa regulatory subunit A alpha isoform) c4(178472, 178473, 178474, 178475) c5(178476, 178477, 178478, 178479, 178480, 178481, 178482, 178483, 178484, 178485, 178486, 178487, 178488, 178489, 178490, 178491, 178492, 178493, 178494, 178495, 178496, 178497, 178498, 178499) c6( ) c7(T, aA, ci, Iu, cd, er, hw, aT, alj, xQ, auY, NE, aW, Y, oV, Qm, cl, t, bz, hL, m, B, jr); #c1(PPP2R1B) c2(NP_001171033) c3(serine/threonine-protein phosphatase 2A 65 kDa regulatory subunit A beta isoform d) c4(69773) c5(69774, 69775, 69776, 69777, 69778, 69779, 69780) c6( ) c7(av, 1B, bE, aW, if, cj, aT, r, bB, m, qN, t, bz, q); #c1(PPP2R1B) c2(NP_001171034) c3(serine/threonine-protein phosphatase 2A 65 kDa regulatory subunit A beta isoform e) c4(69781, 69782) c5(69783, 69784, 69785, 69786, 69787, 69788, 69789, 69790, 69791, 69792, 69793, 69794, 69795) c6( ) c7(av, T, B, bE, aW, if, cj, aT, r, bB, m, qN, t, bz, q); #c1(PPP2R1B) c2(NP_002707) c3(serine/threonine-protein phosphatase 2A 65 kDa regulatory subunit A beta isoform a) c4(131321, 131322, 131323, 131324) c5(131325, 131326, 131327, 131328, 131329, 131330, 131331 131332, 131333, 131334, 131335, 131336) c6( ) c7(av, T, B, bE, aW, if, cj, aT, r, bB, m, qN, t, bz, q); #c1(PPP2R1B) c2(NP_859050) c3(serine/threonine-protein phosphatase 2A 65 kDa regulatory subunit A beta isoform b) c4(255381) c5(255382, 255383, 255384, 255385, 255386, 255387) c6( ) c7(av, T, B, bE, aW, if, cj, aT, r, bB, m, qN, t, bz, q); #c1(PPP2R1B) c2(NP_859051) c3(serine/threonine-protein phosphatase 2A 65 kDa regulatory subunit A beta isoform c) c4(255388) c5(255389, 255390, 255391, 255392, 255393, 255394) c6( ) c7(av, T, B, bE, aW, if, cj, aT, r, bB, m, qN, t, bz, q); #c1(PPP2R2A) c2(NP_001171062) c3(serine/threonine-protein phosphatase 2A 55 kDa regulatory subunit B alpha isoform 2) c4(69796) c5(69797, 69798, 69799, 69800, 69801, 69802) c6( ) c7(aE, eM, vT, aW, r, aT, cz, v, kp, aNc, sD, q, ad); #c1(PPP2R2A) c2(NP_002708) c3(serine/threonine-protein phosphatase 2A 55 kDa regulatory subunit B alpha isoform 1) c4(131337) c5(131338, 131339, 131340, 131341, 131342, 131343) c6( ) c7(aE, eM, vT, aW, r, aT, cz, v, kp, aNc, sD, q, ad); #c1(PPP2R2B) c2(NP_001258828) c3(serine/threonine-protein phosphatase 2A 55 kDa regulatory subunit B beta isoform g) c4(96570) c5(96571, 96572, 96573, 96574, 96575, 96576) c6( ) c7(EQ, rf, GC, n, j, cum, cd, PW, Gt, aT, yZ, K, akr, he, af, bA, cul, aW, Rl, cm, bz, wT, alT, ky, kB, U); #c1(PPP2R2B) c2(NP_001258829) c3(serine/threonine-protein phosphatase 2A 55 kDa regulatory subunit B beta isoform f) c4(96577) c5(96578, 96579, 96580, 96581, 96582, 96583, 96584) c6( ) c7(EQ, rf, GC, n, j, cum, cd, PW, Gt, aT, yZ, K, akr, he, af, bA, cul, aW, Rl, cm, bz, wT, alT, ky, kB, U); #c1(PPP2R2B) c2(NP_001258877) c3(serine/threonine-protein phosphatase 2A 55 kDa regulatory subunit B beta isoform d) c4(96636) c5(96637, 96638, 96639, 96640, 96641, 96642, 96643, 96644, 96645, 96646) c6( ) c7(EQ, rf, GC, n, j, cum, cd, PW, Gt, aT, yZ, K, akr, he, af, bA, cul, aW, Rl, cm, bz, wT, alT, ky, kB, U); #c1(PPP2R2B) c2(NP_858060) c3(serine/threonine-protein phosphatase 2A 55 kDa regulatory subunit B beta isoform a) c4(255340) c5(255341, 255342, 255343, 255344, 255345, 255346, 255347, 255348, 255349, 255350, 255351, 255352, 255353, 255354, 255355, 255356, 255357, 255358, 255359, 255360, 255361, 255362, 255363) c6( ) c7(EQ, rf, GC, n, j, cum, cd, PW, Gt, aT, yZ, K, akr, he, af, bA, cul, aW, Rl, cm, bz, wT, alT, ky, kB, U); #c1(PPP2R2B) c2(NP_858061) c3(serine/threonine-protein phosphatase 2A 55 kDa regulatory subunit B beta isoform e) c4(255364) c5(255365) c6( ) c7(EQ, rf, GC, n, j, cum, cd, PW, Gt, aT, yZ, K, akr, he, af, bA, cul, aW, Rl, cm, bz, wT, alT, ky, kB, U); #c1(PPP2R2B) c2(NP_858062) c3(serine/threonine-protein phosphatase 2A 55 kDa regulatory subunit B beta isoform isoform b) c4(255366) c5(255367, 255368, 255369, 255370, 255371, 255372) c6( ) c7(EQ, rf, GC, n, j, cum, cd, PW, Gt, aT, yZ, K, akr, he, af, bA, cul, aW, Rl, cm, bz, wT, alT, ky, kB, U); #c1(PPP2R2C) c2(NP_001193924) c3(protein phosphatase 2, regulatory subunit B, gamma isoform c) c4(83170) c5(83171, 83172, 83173, 83174, 83175, 83176, 83177, 83178, 83179, 83180) c6( ) c7(bL, ae, T, dB, Dd, fq, j, bz, sD, eA, ad); #c1(PPP2R2C) c2(NP_001193925) c3(protein phosphatase 2, regulatory subunit B, gamma isoform d) c4(83181) c5(83182, 83183, 83184, 83185, 83186, 83187) c6( ) c7(bL, ae, T, dB, Dd, fq, j, bz, sD, eA, ad); #c1(PPP2R2C) c2(NP_065149) c3(protein phosphatase 2, regulatory subunit B, gamma isoform a) c4(204262) c5(204263, 204264, 204265, 204266, 204267, 204268) c6( ) c7(bL, ae, T, dB, Dd, fq, j, bz, sD, eA, ad); #c1(PPP2R2C) c2(NP_870991) c3(protein phosphatase 2, regulatory subunit B, gamma isoform b) c4(255906) c5(255907, 255908, 255909, 255910, 255911, 255912) c6( ) c7(bL, ae, T, dB, Dd, fq, j, bz, sD, eA, ad); #c1(PPP2R3A) c2(NP_001177376) c3(serine/threonine-protein phosphatase 2A regulatory subunit B″ subunit alpha isoform 3) c4( ) c5(72722, 72723, 72724, 72725, 72726) c6( ) c7(kp); #c1(PPP2R3A) c2(NP_002709) c3(serine/threonine-protein phosphatase 2A regulatory subunit B″ subunit alpha isoform 1) c4(131344, 131345) c5(131346, 131347, 131348, 131349, 131350, 131351, 131352) c6( ) c7(kp); #c1(PPP2R3A) c2(NP_871626) c3(serine/threonine-protein phosphatase 2A regulatory subunit B″ subunit alpha isoform 2) c4(255940) c5(255941, 255942, 255943, 255944, 255945, 255946) c6( ) c7(kp); #c1(PPP2R3A) c2(XP_011511259) c3(serine/threonine-protein phosphatase 2A regulatory subunit B″ subunit alpha isoform X2) c4(301743) c5(301744, 301745, 301746, 301747, 301748, 301749) c6( ) c7(kp); #c1(PPP2R3B) c2(NP_037371) c3(serine/threonine-protein phosphatase 2A regulatory subunit B″ subunit beta) c4( ) c5(175092, 175093, 175094, 175095, 175096) c6( ) c7(vi); #c1(PPP2R4) c2(NP_001180326) c3(serine/threonine-protein phosphatase 2A activator isoform e) c4( ) c5(73833, 73834, 73835, 73836, 73837) c6( ) c7(bL, gh, T, bM, jh, aA, bB, n, dG, Kh, ci, V, q, cd, ad, er, av, Hx, F, aE, zf, aT, h, bK, K, jj, ae, af, cp, afu, xQ, kl, cul, iU, aW, aml, Y, eZ, r, aF, pm, t, cm, bz, iK, bw, LB, ck, bP, c, bE, U, cj, at, m, bt, kS, B); #c1(PPP2R4) c2(NP_001258761) c3(serine/threonine-protein phosphatase 2A activator isoform f) c4( ) c5(96506, 96507, 96508, 96509, 96510) c6( ) c7(bL, gh, T, bM, jh, aA, bB, n, dG, Kh, ci, V, q, cd, ad, er, av, Hx, F, aE, zf, aT, h, bK, K, jj, ae, af, cp, afu, xQ, kl, cul, iU, aW, aml, Y, eZ, r, aF, pm, t, cm, bz, iK, bw, LB, ck, bP, c, bE, U, cj, at, m, bt, kS, B); #c1(PPP2R4) c2(NP_066954) c3(serine/threonine-protein phosphatase 2A activator isoform b) c4(207701, 207702) c5(207703, 207704, 207705, 207706, 207707, 207708, 207709, 207710, 207711, 207712, 207713, 207714, 207715, 207716) c6( ) c7(bL, gh, T, bM, jh, aA, bB, n, dG, Kh, ci, V, q, cd, ad, er, av, Hx, F, aE, zf, aT, h, bK, K, jj, ae, af, cp, afu, xQ, kl, cul, iU, aW, aml, Y, eZ, r, aF, pm, t, cm, bz, iK, bw, LB, ck, bP, c, bE, U, cj, at, m, bt, kS, B); #c1(PPP2R4) c2(NP_821068) c3(serine/threonine-protein phosphatase 2A activator isoform a) c4(253164) c5(253165, 253166, 253167, 253168, 253169, 253170) c6( ) c7(bL, gh, T, bM, jh, aA, bB, n, dG, Kh, ci, V, q, cd, ad, er, av, Hx, F, aE, zf, aT, h, bK, K, jj, ae, af, cp, afu, xQ, kl, cul, iU, aW, aml, Y, eZ, r, aF, pm, t, cm, bz, iK, bw, LB, ck, bP, c, bE, U, cj, at, m, bt, kS, B); #c1(PPP2R4) c2(NP_821070) c3(serine/threonine-protein phosphatase 2A activator isoform d) c4(253171) c5(253172, 253173, 253174, 253175, 253176) c6( ) c7(bL, gh, T, bM, jh, aA, bB, n, dG, Kh, ci, V, q, cd, ad, er, av, Hx, F, aE, zf, aT, h, bK, K, jj, ae, af, cp, afu, xQ, kl, cul, iU, aW, aml, Y, eZ, r, aF, pm, t, cm, bz, iK, bw, LB, ck, bP, c, bE, U, cj, at, m, bt, kS, B); #c1(PPP2R4) c2(XP_011517136) c3(serine/threonine-protein phosphatase 2A activator isoform X1) c4(310669, 310670) c5(310671, 310672, 310673) c6( ) c7(bL, gh, T, bM, jh, aA, bB, n, dG, Kh, ci, V, q, cd, ad, er, av, Hx, F, aE, zf, aT, h, bK, K, jj, ae, af, cp, afu, xQ, kl, cul, iU, aW, aml, Y, eZ, r, aF, pm, t, cm, bz, iK, bw, LB, ck, bP, c, bE, U, cj, at, m, bt, kS, B); #c1(PPP2R4) c2(XP_011517138) c3(serine/threonine-protein phosphatase 2A activator isoform X3) c4( ) c5(310674, 310675, 310676, 310677, 310678, 310679) c6( ) c7(bL, gh, T, bM, jh, aA, bB, n, dG, Kh, ci, V, q, cd, ad, er, av, Hx, F, aE, zf, aT, h, bK, K, jj, ae, af, cp, afu, xQ, kl, cul, iU, aW, aml, Y, eZ, r, aF, pm, t, cm, bz, iK, bw, LB, ck, bP, c, bE, U, cj, at, m, bt, kS, B); #c1(PPP2R4) c2(XP_011517139) c3(serine/threonine-protein phosphatase 2A activator isoform X4) c4(310680) c5(310681, 310682, 310683, 310684, 310685, 310686) c6( ) c7(bL, gh, T, bM, jh, aA, bB, n, dG, Kh, ci, V, q, cd, ad, er, av, Hx, F, aE, zf, aT, h, bK, K, jj, ae, af, cp, afu, xQ, kl, cul, iu, aW, aml, Y, eZ, r, aF, pm, t, cm, bz, iK, bw, LB, ck, bP, c, bE, U, cj, at, m, bt, kS, B); #c1(PPP2R4) c2(XP_011517140) c3(serine/threonine-protein phosphatase 2A activator isoform X5) c4(310687) c5(310688, 310689) c6( ) c7(bL, gh, T, bM, jh, aA, bB, n, dG, Kh, ci, V, q, cd, ad, er, av, Hx, F, aE, zf, aT, h, bK, K, jj, ae, af, cp, afu, xQ, kl, cul, iU, aW, aml, Y, eZ, r, aF, pm, t, cm, bz, iK, bw, LB, ck, bP, c, bE, U, cj, at, m, bt, kS, B); #c1(PPP2R5A) c2(NP_001186685) c3(serine/threonine-protein phosphatase 2A 56 kDa regulatory subunit alpha isoform 2) c4(78346) c5(78347, 78348, 78349, 78350, 78351, 78352) c6( ) c7(sD, kp, cun); #c1(PPP2R5A) c2(NP_006234) c3(serine/threonine-protein phosphatase 2A 56 kDa regulatory subunit alpha isoform 1) c4(163144) c5(163145, 163146, 163147, 163148, 163149, 163150, 163151, 163152, 163153, 163154) c6( ) c7(sD, kp, cun); #c1(PPP2R5B) c2(NP_006235) c3(serine/threonine-protein phosphatase 2A 56 kDa regulatory subunit beta isoform) c4(163155, 163156, 163157) c5(163158, 163159, 163160, 163161, 163162, 163163, 163164, 163165, 163166, 163167, 163168, 163169, 163170, 163171, 163172, 163173, 163174, 163175, 163176, 163177, 163178, 163179, 163180, 163181) c6( ) c7(cuo, cul, aT, Rl); #c1(PPP2R5C) c2(NP_001155197) c3(serine/threonine-protein phosphatase 2A 56 kDa regulatory subunit gamma isoform e) c4(61514, 61515) c5(61516, 61517, 61518, 61519, 61520, 61521, 61522, 61523, 61524, 61525, 61526, 61527) c6( ) c7(ck, T, iT, iU, cj, bt, bN); #c1(PPP2R5C) c2(NP_001155198) c3(serine/threonine-protein phosphatase 2A 56 kDa regulatory subunit gamma isoform f) c4(61528) c5(61529, 61530, 61531, 61532, 61533, 61534) c6( ) c7(ck, T, iT, iU, cj, bt, bN); #c1(PPP2R5C) c2(NP_002710) c3(serine/threonine-protein phosphatase 2A 56 kDa regulatory subunit gamma isoform a) c4(131353, 131354) c5(131355, 131356, 131357, 131358, 131359, 131360, 131361) c6( ) c7(ck, T, iT, iU, cj, bt, bN); #c1(PPP2R5C) c2(NP_848701) c3(serine/threonine-protein phosphatase 2A 56 kDa regulatory subunit gamma isoform b) c4(254198) c5(254199, 254200, 254201, 254202, 254203, 254204) c6( ) c7(ck, T, iT, iU, cj, bt, bN); #c1(PPP2R5C) c2(NP_848702) c3(serine/threonine-protein phosphatase 2A 56 kDa regulatory subunit gamma isoform isoform c) c4(254205) c5(254206, 254207, 254208, 254209, 254210, 254211, 254212, 254213, 254214, 254215, 254216, 254217, 254218, 254219, 254220, 254221, 254222) c6( ) c7(ck, T, iT, iU, cj, bt, bN); #c1(PPP2R5C) c2(XP_005267879) c3(serine/threonine-protein phosphatase 2A 56 kDa regulatory subunit gamma isoform X3) c4(281265) c5( ) c6( ) c7(ck, T, iT, iU, cj, bt, bN); #c1(PPP2R5D) c2(NP_006236) c3(serine/threonine-protein phosphatase 2A 56 kDa regulatory subunit delta isoform 1) c4(163182, 163183, 163184) c5(163185, 163186, 163187, 163188, 163189, 163190, 163191, 163192, 163193, 163194, 163195, 163196, 163197, 163198, 163199, 163200, 163201, 163202) c6( ) c7(t); #c1(PPP2R5D) c2(NP_851307) c3(serine/threonine-protein phosphatase 2A 56 kDa regulatory subunit delta isoform 2) c4(254520) c5(254521, 254522, 254523, 254524, 254525, 254526) c6( ) c7(t); #c1(PPP2R5D) c2(NP_851308) c3(serine/threonine-protein phosphatase 2A 56 kDa regulatory subunit delta isoform 3) c4(254527) c5(254528, 254529, 254530, 254531, 254532, 254533) c6( ) c7(t); #c1(PPP2R5E) c2(NP_001269109) c3(serine/threonine-protein phosphatase 2A 56 kDa regulatory subunit epsilon isoform b) c4(100455) c5(100456, 100457, 100458, 100459, 100460, 100461) c6( ) c7(T, aW, oe, EQ, cj, aT, r, aA, aF, bz, q); #c1(PPP2R5E) c2(NP_001269111) c3(serine/threonine-protein phosphatase 2A 56 kDa regulatory subunit epsilon isoform c) c4( ) c5(100462, 100463, 100464, 100465, 100466) c6( ) c7(T, aW, oe, EQ, cj, aT, r, aA, aF, bz, q); #c1(PPP2R5E) c2(NP_006237) c3(serine/threonine-protein phosphatase 2A 56 kDa regulatory subunit epsilon isoform a) c4(163203, 163204) c5(163205, 163206, 163207, 163208, 163209, 163210, 163211) c6( ) c7(T, aW, oe, EQ, cj, aT, r, aA, aF, bz, q); #c1(PPP3CA) c2(NP_000935) c3(serine/threonine-protein phosphatase 28 catalytic subunit alpha isoform 1) c4(17520, 17521, 17522, 17523, 17524) c5(17525, 17526, 17527, 17528, 17529, 17530, 17531, 17532, 17533, 17534, 17535, 17536, 17537, 17538, 17539, 17540, 17541, 17542, 17543, 17544, 17545, 17546, 17547, 17548) c6( ) c7(gh, T, dD, ea, rf, aA, fd, wV, eq, ci, C, bX, fr, q, cd, ad, er, dP, ip, ft, cc, zw, nv, aT, ah, IG, cy, dL, K, an, brw, vx, aDU, ae, af, cp, IR, iZ, aW, aDV, eH, ff, r, aF, en, g, eF, t, cm, bz, ar, kT, sS, It, eM, iT, go, II, gZ, np, m, y, vt, bVz, B); #c1(PPP3CA) c2(NP_001124163) c3(serine/threonine-protein phosphatase 28 catalytic subunit alpha isoform 2) c4(48360) c5(48361, 48362, 48363, 48364, 48365, 48366) c6( ) c7(gh, T, dD, ea, rf, aA, fd, wV, eq, ci, C, bX, fr, q, cd, ad, er, dP, ip, ft, cc, zw, nv, aT, ah, IG, cy, dL, K, an, brw, vx, aDU, ae, af, cp, IR, iZ, aW, aDV, eH, ff, r, aF, en, g, eF, t, cm, bz, ar, kT, sS, It, eM, iT, go, II, gZ, np, m, y, vt, bVz, B); #c1(PPP3CA) c2(NP_001124164) c3(serine/threonine-protein phosphatase 28 catalytic subunit alpha isoform 3) c4(48367, 48368) c5(48369, 48370, 48371, 48372, 48373, 48374, 48375, 48376, 48377, 48378, 48379, 48380, 48381, 48382, 48383, 48384, 48385, 48386) c6( ) c7(gh, T, dD, ea, rf, aA, fd, wV, eq, ci, C, bX, fr, q, cd, ad, er, dP, ip, ft, cc, zw, nv, aT, ah, IG, cy, dL, K, an, brw, vx, aDU, ae, af, cp, IR, iZ, aW, aDV, eH, ff, r, aF, en, g, eF, t, cm, bz, ar, kT, sS, It, eM, iT, go, II, gZ, np, m, y, vt, bVz, B); #c1(PPP3CB) c2(NP_001135825) c3(serine/threonine-protein phosphatase 28 catalytic subunit beta isoform a) c4(53363) c5(53364, 53365, 53366, 53367, 53368, 53369) c6( ) c7(bVz, si, vQ); #c1(PPP3CB) c2(NP_001135826) c3(serine/threonine-protein phosphatase 28 catalytic subunit beta isoform c) c4(53370) c5(53371, 53372, 53373, 53374, 53375, 53376) c6( ) c7(bVz, si, vQ); #c1(PPP3CB) c2(NP_001276897) c3(serine/threonine-protein phosphatase 28 catalytic subunit beta isoform d) c4(108562, 108563) c5(108564, 108565, 108566, 108567, 108568, 108569, 108570, 108571, 108572, 108573, 108574, 108575, 108576) c6( ) c7(bVz, si, vQ); #c1(PPP3CB) c2(NP_001276898) c3(serine/threonine-protein phosphatase 28 catalytic subunit beta isoform e) c4(108577) c5(108578, 108579, 108580, 108581, 108582) c6( ) c7(bVz, si, vQ); #c1(PPP3CB) c2(NP_066955) c3(serine/threonine-protein phosphatase 28 catalytic subunit beta isoform b) c4(207717, 207718) c5(207719, 207720, 207721, 207722, 207723, 207724, 207725, 207726, 207727, 207728, 207729, 207730) c6( ) c7(bVz, si, vQ); #c1(PPP3CB) c2(XP_011538223) c3(serine/threonine-protein phosphatase 28 catalytic subunit beta isoform X1) c4(335821, 335822) c5(335823, 335824, 335825, 335826, 335827, 335828, 335829, 335830, 335831, 335832, 335833, 335834) c6( ) c7(bVz, si, vQ); #c1(PPP3CC) c2(NP_001230903) c3(serine/threonine-protein phosphatase 28 catalytic subunit gamma isoform 1) c4(87141) c5(87142, 87143, 87144, 87145, 87146, 87147) c6( ) c7(he, sv, xa, ad); #c1(PPP3CC) c2(NP_001230904) c3(serine/threonine-protein phosphatase 28 catalytic subunit gamma isoform 3) c4(87148) c5(87149, 87150, 87151, 87152, 87153, 87154) c6( ) c7(he, sv, xa, ad); #c1(PPP3CC) c2(NP_005596) c3(serine/threonine-protein phosphatase 28 catalytic subunit gamma isoform 2) c4(157786) c5(157787, 157788, 157789, 157790, 157791, 157792) c6( ) c7(he, sv, xa, ad); #c1(PPP3R1) c2(NP_000936) c3(calcineurin subunit B type 1) c4(17549) c5(17550, 17551, 17552, 17553, 17554, 17555) c6( ) c7(cz, tl, j, cm, bVz, af); #c1(PPP3R2) c2(NP_671709) c3(calcineurin subunit B type 2) c4(242095, 242096) c5(242097, 242098, 242099, 242100, 242101, 242102, 242103, 242104, 242105, 242106, 242107, 242108) c6( ) c7(aw, fq, j, ac); #c1(PPP4C) c2(NP_002711) c3(serine/threonine-protein phosphatase 4 catalytic subunit isoform 1) c4(131362) c5(131363, 131364, 131365, 131366, 131367, 131368) c6( ) c7(Th, n, kp, K, bN); #c1(PPP4R1) c2(NP_001035847) c3(serine/threonine-protein phosphatase 4 regulatory subunit 1 isoform a) c4(33263, 33264) c5(33265, 33266, 33267, 33268, 33269, 33270, 33271, 33272, 33273, 33274, 33275, 33276) c6( ) c7(bX); #c1(PPP4R1) c2(NP_005125) c3(serine/threonine-protein phosphatase 4 regulatory subunit 1 isoform b) c4(153071) c5(153072, 153073, 153074, 153075, 153076, 153077) c6( ) c7(bX); #c1(PPP4R1) c2(XP_011524079) c3(serine/threonine-protein phosphatase 4 regulatory subunit 1 isoform X3) c4(318654) c5( ) c6( ) c7(bX); #c1(PPP4R1) c2(XP_011524080) c3(serine/threonine-protein phosphatase 4 regulatory subunit 1 isoform X4) c4( ) c5(318655, 318656, 318657, 318658, 318659, 318660) c6( ) c7(bX); #c1(PPP5C) c2(NP_001191213) c3(serine/threonine-protein phosphatase 5 isoform 2) c4(81107) c5(81108, 81109, 81110, 81111, 81112, 81113) c6( ) c7(xy, bux, aT, Hn, rY, Fb, bK, ae, jr, ad); #c1(PPP5C) c2(NP_006238) c3(serine/threonine-protein phosphatase 5 isoform 1) c4(163212, 163213, 163214) c5(163215, 163216, 163217, 163218, 163219, 163220, 163221, 163222, 163223, 163224, 163225, 163226, 163227, 163228, 163229, 163230, 163231, 163232, 163233, 163234) c6( ) c7(xy, bux, aT, Hn, rY, Fb, bK, ae, jr, ad); #c1(PPP6C) c2(NP_001116827) c3(serine/threonine-protein phosphatase 6 catalytic subunit isoform a) c4(43948) c5(43949, 43950, 43951, 43952, 43953, 43954, 43955) c6( ) c7(T, Y, n, hp, B, cp); #c1(PPP6C) c2(NP_001116841) c3(serine/threonine-protein phosphatase 6 catalytic subunit isoform c) c4(43980) c5(43981, 43982, 43983, 43984, 43985, 43986, 43987, 43988, 43989, 43990, 43991, 43992) c6( ) c7(T, Y, n, hp, B, cp); #c1(PPP6C) c2(NP_002712) c3(serine/threonine-protein phosphatase 6 catalytic subunit isoform b) c4(131369) c5(131370, 131371, 131372, 131373, 131374, 131375) c6( ) c7(T, Y, n, hp, B, cp); #c1(PPP6C) c2(XP_011517149) c3(serine/threonine-protein phosphatase 6 catalytic subunit isoform X1) c4(310701, 310702) c5(310703, 310704, 310705, 310706, 310707) c6( ) c7(T, Y, n, hp, B, cp); #c1(PPP6R2) c2(NP_001229828) c3(serine/threonine-protein phosphatase 6 regulatory subunit 2 isoform 2) c4( ) c5(85377, 85378, 85379, 85380, 85381) c6( ) c7(e, C); #c1(PPP6R2) c2(NP_001229829) c3(serine/threonine-protein phosphatase 6 regulatory subunit 2 isoform 4) c4(85382) c5(85383, 85384, 85385, 85386, 85387, 85388) c6( ) c7(e, C); #c1(PPP6R2) c2(NP_055493) c3(serine/threonine-protein phosphatase 6 regulatory subunit 2 isoform 3) c4( ) c5(181499, 181500, 181501, 181502, 181503) c6( ) c7(e, C); #c1(PPP6R2) c2(XP_006724497) c3(serine/threonine-protein phosphatase 6 regulatory subunit 2 isoform X16) c4( ) c5(295985, 295986, 295987, 295988, 295989) c6( ) c7(e, C); #c1(PPP6R2) c2(XP_011529024) c3(serine/threonine-protein phosphatase 6 regulatory subunit 2 isoform X3) c4(324378) c5(324379) c6( ) c7(e, C); #c1(PPP6R2) c2(XP_011529031) c3(serine/threonine-protein phosphatase 6 regulatory subunit 2 isoform X10) c4(324380) c5(324381) c6( ) c7(e, C); #c1(PPP6R2) c2(XP_011529033) c3(serine/threonine-protein phosphatase 6 regulatory subunit 2 isoform X12) c4(324382) c5(324383) c6( ) c7(e, C); #c1(PPP6R3) c2(NP_001157632) c3(serine/threonine-protein phosphatase 6 regulatory subunit 3 isoform 4) c4(62331, 62332) c5(62333, 62334, 62335, 62336, 62337, 62338, 62339, 62340, 62341, 62342, 62343, 62344) c6( ) c7(PI, aT); #c1(PPP6R3) c2(NP_001157633) c3(serine/threonine-protein phosphatase 6 regulatory subunit 3 isoform 6) c4(62345) c5(62346, 62347, 62348, 62349, 62350, 62351) c6( ) c7(PI, aT); #c1(PPP6R3) c2(NP_001157634) c3(serine/threonine-protein phosphatase 6 regulatory subunit 3 isoform 1) c4(62352) c5(62353, 62354, 62355, 62356, 62357, 62358) c6( ) c7(PI, aT); #c1(PPP6R3) c2(NP_001157635) c3(serine/threonine-protein phosphatase 6 regulatory subunit 3 isoform 2) c4(62359) c5(62360, 62361, 62362, 62363, 62364, 62365) c6( ) c7(PI, aT); #c1(PPP6R3) c2(NP_001157636) c3(serine/threonine-protein phosphatase 6 regulatory subunit 3 isoform 3) c4(62366) c5(62367, 62368, 62369, 62370, 62371, 62372) c6( ) c7(PI, aT); #c1(PPP6R3) c2(NP_060782) c3(serine/threonine-protein phosphatase 6 regulatory subunit 3 isoform 5) c4(197761) c5(197762, 197763, 197764, 197765, 197766, 197767) c6( ) c7(PI, aT); #c1(PPP6R3) c2(XP_006718675) c3(serine/threonine-protein phosphatase 6 regulatory subunit 3 isoform X9) c4(291966) c5( ) c6( ) c7(PI, aT); #c1(PPP6R3) c2(XP_006718691) c3(serine/threonine-protein phosphatase 6 regulatory subunit 3 isoform X21) c4( ) c5(291967, 291968, 291969, 291970, 291971, 291972, 291973, 291974, 291975, 291976, 291977, 291978, 291979, 291980, 291981, 291982, 291983, 291984, 291985) c6( ) c7(PI, aT); #c1(PPP6R3) c2(XP_011543440) c3(serine/threonine-protein phosphatase 6 regulatory subunit 3 isoform X6) c4( ) c5(342337, 342338, 342339, 342340, 342341, 342342, 342343, 342344, 342345) c6( ) c7(PI, aT); #c1(PPP6R3) c2(XP_011543445) c3(serine/threonine-protein phosphatase 6 regulatory subunit 3 isoform X12) c4(342346, 342347) c5( ) c6( ) c7(PI, aT); #c1(PPP6R3) c2(XP_011543449) c3(serine/threonine-protein phosphatase 6 regulatory subunit 3 isoform X17) c4(342348) c5( ) c6( ) c7(PI, aT); #c1(PPRC1) c2(NP_001275656) c3(peroxisome proliferator-activated receptor gamma coactivator-related protein 1 isoform 2) c4(106953) c5(106954, 106955, 106956, 106957, 106958, 106959) c6( ) c7(bL, qJ, T, ib, Uc, s, aD, Y, aA, h, cy, bZ, aF, K, cm, ae, ad); #c1(PPRC1) c2(NP_001275657) c3(peroxisome proliferator-activated receptor gamma coactivator-related protein 1 isoform 3) c4( ) c5(106960) c6( ) c7(bL, qJ, T, ib, Uc, s, aD, Y, aA, h, cy, bZ, aF, K, cm, ae, ad); #c1(PPRC1) c2(NP_055877) c3(peroxisome proliferator-activated receptor gamma coactivator-related protein 1 isoform 1) c4(184114) c5(184115, 184116, 184117, 184118, 184119, 184120) c6( ) c7(bL, qJ, T, ib, Uc, s, aD, Y, aA, h, cy, bZ, aF, K, cm, ae, ad); #c1(PPRC1) c2(XP_006717794) c3(peroxisome proliferator-activated receptor gamma coactivator-related protein 1 isoform X8) c4( ) c5(291368) c6( ) c7(bL, qJ, T, ib, Uc, s, aD, Y, aA, h, cy, bZ, aF, K, cm, ae, ad); #c1(PPT2) c2(NP_001191032) c3(lysosomal thioesterase PPT2 isoform a precursor) c4(80570, 80571, 80572, 80573) c5(80574, 80575, 80576, 80577, 80578, 80579, 80580, 80581, 80582, 80583, 80584, 80585, 80586, 80587, 80588, 80589, 80590, 80591, 80592, 80593, 80594, 80595, 80596, 80597, 80598, 80599, 80600, 80601, 80602, 80603, 80604, 80605, 80606, 80607, 80608, 80609, 80610, 80611, 80612, 80613, 80614, 80615, 80616, 80617, 80618, 80619, 80620, 80621, 80622, 80623, 80624, 80625, 80626, 80627, 80628, 80629, 80630, 80631, 80632, 80633, 80634, 80635, 80636, 80637, 80638, 80639, 80640, 80641, 80642, 80643, 80644, 80645, 80646, 80647, 80648, 80649, 80650, 80651, 80652, 80653, 80654, 80655, 80656, 80657, 80658, 80659, 80660, 80661, 80662, 80663, 80664, 80665, 80666, 80667, 80668, 80669, 80670, 80671, 80672, 80673, 80674, 80675, 80676, 80677, 80678, 80679, 80680, 80681, 80682, 80683, 80684, 80685, 80686, 80687, 80688, 80689, 80690, 80691, 80692, 80693, 80694, 80695, 80696, 80697, 80698, 80699, 80700, 80701, 80702, 80703, 80704, 80705, 80706, 80707, 80708, 80709, 80710, 80711, 80712, 80713, 80714, 80715, 80716, 80717, 80718, 80719, 80720, 80721, 80722, 80723, 80724, 80725, 80726, 80727, 80728, 80729, 80730, 80731, 80732, 80733, 80734, 80735, 80736, 80737, 80738, 80739, 80740, 80741, 80742, 80743, 80744, 80745, 80746, 80747, 80748, 80749, 80750, 80751, 80752, 80753, 80754, 80755, 80756, 80757, 80758, 80759, 80760, 80761, 80762, 80763, 80764, 80765, 80766, 80767, 80768, 80769, 80770, 80771, 80772, 80773, 80774, 80775, 80776, 80777, 80778, 80779, 80780, 80781, 80782, 80783, 80784, 80785, 80786, 80787, 80788, 80789, 80790, 80791, 80792, 80793, 80794, 80795, 80796, 80797, 80798, 80799, 80800, 80801, 80802, 80803, 80804, 80805, 80806, 80807, 80808, 80809, 80810, 80811, 80812, 80813, 80814, 80815, 80816, 80817, 80818, 80819, 80820, 80821, 80822, 80823, 80824, 80825, 80826, 80827, 80828, 80829, 80830, 80831, 80832, 80833, 80834, 80835, 80836, 80837, 80838, 80839, 80840, 80841, 80842, 80843, 80844, 80845, 80846, 80847, 80848, 80849, 80850, 80851, 80852, 80853, 80854, 80855, 80856, 80857, 80858) c6( ) c7(A, U, eZ, at, h, Dp, Lq, cm, y, rY, aa); #c1(PPT2) c2(NP_619731) c3(lysosomal thioesterase PPT2 isoform b precursor) c4(237105, 237106, 237107, 237108, 237109, 237110, 237111, 237112, 237113, 237114, 237115, 237116, 237117, 237118, 237119, 237120, 237121, 237122, 237123, 237124, 237125) c5(237126, 237127, 237128, 237129, 237130, 237131, 237132, 237133, 237134, 237135, 237136, 237137, 237138, 237139, 237140, 237141, 237142, 237143, 237144, 237145, 237146, 237147, 237148, 237149, 237150, 237151, 237152, 237153, 237154, 237155, 237156, 237157, 237158, 237159, 237160, 237161, 237162, 237163, 237164, 237165, 237166, 237167, 237168, 237169, 237170, 237171, 237172, 237173, 237174, 237175, 237176, 237177, 237178, 237179, 237180, 237181, 237182, 237183, 237184, 237185, 237186, 237187, 237188, 237189, 237190, 237191, 237192, 237193, 237194, 237195) c6( ) c7(A, U, eZ, at, h, Dp, Lq, cm, y, rY, aa); #c1(PPY) c2(NP_002713) c3(pancreatic prohormone preproprotein) c4( ) c5(131376, 131377, 131378, 131379, 131380, 131381) c6( ) c7(bL, T, dA, pY, jh, v, btx, ad, sO, pX, qM, ae, af, azh, oV, ahJ, CQ, t, ar, bE, bo, mf, bFb); #c1(PPY) c2(XP_011523280) c3(pancreatic prohormone isoform X1) c4(317790) c5( ) c6( ) c7(bL, T, dA, pY, jh, v, btx, ad, sO, pX, qM, ae, af, azh, oV, ahJ, CQ, t, ar, bE, bo, mf, bFb); #c1(PQBP1) c2(NP_001161464) c3(polyglutamine-binding protein 1 isoform 6) c4( ) c5(65828, 65829, 65830, 65831, 65832, 65833) c6( ) c7(asp, kj, aV, rz, Ol, cup, fc, U, nf, Kh, K, nA, cP, QK, xb, aR, hq); #c1(PQBP1) c2(XP_005272629) c3(polyglutamine-binding protein 1 isoform X1) c4(284089, 284090) c5(284091, 284092, 284093, 284094, 284095, 284096, 284097, 284098, 284099, 284100, 284101, 284102, 284103, 284104, 284105, 284106, 284107, 284108, 284109) c6( ) c7(asp, kj, aV, rz, Ol, cup, fc, U, nf, Kh, K, nA, cP, QK, xb, aR, hq); #c1(PQBP1) c2(XP_011542186) c3(polyglutamine-binding protein 1 isoform X3) c4(340627, 340628, 340629) c5(340630, 340631, 340632, 340633, 340634, 340635, 340636, 340637, 340638, 340639, 340640, 340641, 340642, 340643, 340644, 340645, 340646, 340647, 340648, 340649, 340650, 340651, 340652, 340653, 340654, 340655, 340656, 340657, 340658, 340659, 340660, 340661, 340662) c6( ) c7(asp, kj, aV, rz, Ol, cup, fc, U, nf, Kh, K, nA, cP, QK, xb, aR, hq); #c1(PQLC3) c2(NP_001269639) c3(PQ-loop repeat-containing protein 3 isoform b) c4(102355) c5(102356, 102357, 102358, 102359, 102360, 102361) c6( ) c7(aq); #c1(PQLC3) c2(NP_689604) c3(PQ-loop repeat-containing protein 3 isoform a precursor) c4(243230) c5(243231, 243232, 243233, 243234, 243235, 243236) c6( ) c7(aq); #c1(PRAC1) c2(NP_115767) c3(small nuclear protein PRAC1) c4(223867) c5(223868, 223869, 223870, 223871, 223872, 223873) c6( ) c7(ae, ad, s); #c1(PRAC2) c2(XP_011523050) c3(putative protein PRCA2 isoform X1) c4( ) c5(317542) c6( ) c7(ae, ad); #c1(PRADC1) c2(NP_115695) c3(protease-associated domain-containing protein 1 precursor) c4(223596) c5(223597, 223598, 223599, 223600, 223601, 223602, 223603, 223604) c6(223605, 223606) c7(uF); #c1(PRAF2) c2(NP_009144) c3(PRA1 family protein 2) c4(171124) c5(171125, 171126, 171127, 171128, 171129, 171130) c6( ) c7(cm, T, eA); #c1(PRAM1) c2(NP_115528) c3(PML-RARA-regulated adapter molecule 1) c4(223087, 223088) c5(223089, 223090, 223091, 223092, 223093, 223094, 223095, 223096, 223097, 223098, 223099, 223100) c6( ) c7(ck, T, pc, iT, fd, n, jj, hF, bt, kS, pi, y); #c1(PRAME) c2(NP_996837) c3(melanoma antigen preferentially expressed in turners isoform a) c4(264686, 264687, 264688, 264689, 264690, 264691) c5(264692, 264693, 264694, 264695, 264696, 264697, 264698, 264699, 264700, 264701, 264702, 264703, 264704, 264705, 264706, 264707, 264708, 264709, 264710, 264711, 264712, 264713, 264714, 264715, 264716, 264717, 264718, 264719, 264720, 264721, 264722, 264723, 264724, 264725, 264726, 264727, 264728, 264729, 264730, 264731, 264732, 264733, 264734, 264735, 264736, 264737, 264738, 264739, 264740, 264741, 264742, 264743, 264744, 264745, 264746, 264747) c6( ) c7(T, eX, jh, fd, hy, fr, ci, hF, aHy, zn, x, fX, ib, aT, kH, eV, iY, jj, jf, xQ, je, iU, et, pr, aW, Y, eH, g, bu, hf, eF, iK, bw, ck, iM, eM, au, azK, cj, k, bt, hS); #c1(PRAP1) c2(NP_001138673) c3(proline-rich acidic protein 1 isoform 2 precursor) c4(57343, 57344) c5(57345, 57346, 57347, 57348, 57349, 57350, 57351, 57352, 57353, 57354, 57355, 57356) c6( ) c7(T, dD, wu, ea, bB, eq, bRn, eA, ad, ip, sN, aT, wm, ae, hm, cY, d, LC, aW, g, cl, t, zr, bE, hL, y, bt, B); #c1(PRAP1) c2(NP_660203) c3(proline-rich acidic protein 1 isoform 1 precursor) c4(240531, 240532) c5(240533, 240534, 240535, 240536, 240537, 240538, 240539, 240540, 240541, 240542, 240543, 240544) c6( ) c7(T, dD, wu, ea, bB, eq, bRn, eA, ad, ip, sN, aT, wm, ae, hm, cY, d, LC, aW, g, cl, t, zr, bE, hL, y, bt, B); #c1(PRB1) c2(NP_005030) c3(basic salivary proline-rich protein 1 isoform 1 preproprotein) c4( ) c5(152304, 152305, 152306, 152307, 152308, 152309, 152310) c6( ) c7(pH, b, bP, BO, bE, PX, bO, jh, bB, n, pg, h, iY, K, pm, cl, i); #c1(PRB1) c2(NP_955385) c3(basic salivary proline-rich protein 1 isoform 2 preproprotein) c4(261637) c5(261638) c6( ) c7(PH, b, bP, BO, bE, PX, bO, jh, bB, n, pg, h, iY, K, pm, cl, i); #c1(PRB1) c2(NP_955386) c3(basic salivary proline-rich protein 1 isoform 3 preproprotein) c4(261639) c5(261640, 261641, 261642, 261643, 261644, 261645) c6( ) c7(pH, b, bP, BO, bE, PX, bO, jh, bB, n, pg, h, iY, K, pm, cl, i); #c1(PRB2) c2(NP_006239) c3(basic salivary proline-rich protein 2 precursor) c4(163235) c5(163236, 163237, 163238, 163239, 163240, 163241, 163242, 163243, 163244) c6( ) c7(T, aC, xu, n, j, bED, ib, bpp, cuq, aT, aaw, K, cur, DY, gk, bqB, aW, Y, ff, eH, hQ, kD, en, cl, eF, t, cm, bz, Dl, bP, hL, dX, m, jQ, it); #c1(PRB3) c2(NP_006240) c3(basic salivary proline-rich protein 3 precursor) c4(163245, 163246) c5(163247, 163248, 163249, 163250, 163251, 163252, 163253, 163254, 163255, 163256) c6( ) c7(cus); #c1(PRB4) c2(NP_001248328) c3(basic salivary proline-rich protein 4 isoform 2 precursor) c4(93693) c5( ) c6( ) c7(bU); #c1(PRB4) c2(NP_002714) c3(basic salivary proline-rich protein 4 isoform 1 precursor) c4(131382) c5(131383, 131384) c6( ) c7(bU); #c1(PRC1) c2(NP_001254509) c3(protein regulator of cytokinesis 1 isoform 4) c4(94583) c5(94584, 94585, 94586, 94587, 94588, 94589) c6( ) c7(LB, bL, T, sS, fM, ck, bE, aW, eL, aT, cz, bB, dL, ey, m, bz, ai, oU); #c1(PRC1) c2(NP_003972) c3(protein regulator of cytokinesis 1 isoform 1) c4(142556) c5(142557, 142558, 142559, 142560, 142561, 142562) c6( ) c7(LB, bL, T, sS, fM, ck, bE, aW, eL, aT, cz, bB, dL, ey, m, bz, ai, oU); #c1(PRC1) c2(NP_955445) c3(protein regulator of cytokinesis 1 isoform 2) c4(261717) c5(261718, 261719, 261720, 261721, 261722, 261723) c6( ) c7(LB, bL, T, sS, fM, ck, bE, aW, eL, aT, cz, bB, dL, ey, m, bz, ai, oU); #c1(PRC1) c2(XP_005255044) c3(protein regulator of cytokinesis 1 isoform X4) c4(273524) c5(273525, 273526, 273527, 273528, 273529, 273530) c6( ) c7(LB, bL, T, sS, fM, ck, bE, aW, eL, aT, cz, bB, dL, ey, m, bz, ai, oU); #c1(PRCC) c2(NP_005964) c3(proline-rich protein PRCC) c4(160819) c5(160820, 160821, 160822, 160823, 160824, 160825) c6( ) c7(T, go, fr, ci, rP); #c1(PRCC) c2(XP_005245370) c3(proline-rich protein PRCC isoform X1) c4(266490) c5(266491, 266492, 266493, 266494, 266495, 266496) c6( ) c7(T, go, fr, ci, rP); #c1(PRCC) c2(XP_005245371) c3(proline-rich protein PRCC isoform X2) c4(266497) c5(266498, 266499, 266500, 266501, 266502, 266503) c6( ) c7(T, go, fr, ci, rP); #c1(PRCD) c2(NP_001071088) c3(progressive rod-cone degeneration protein precursor) c4(35274) c5(35275, 35276, 35277, 35278, 35279, 35280) c6( ) c7(IR, nw, cut, nC, rY, de); #c1(PRCD) c2(XP_011523486) c3(progressive rod-cone degeneration protein isoform X1) c4( ) c5(318017, 318018) c6( ) c7(IR, nw, cut, nC, rY, de); #c1(PRCP) c2(NP_005031) c3(lysosomal Pro-X carboxypeptidase isoform 1 preproprotein) c4(152311) c5(152312, 152313, 152314, 152315, 152316, 152317, 152318) c6( ) c7(T, uC, Ip, dc, acS, dO, asK, aT, cz, gl, h, v, Jz, j, fD, afs, anN, V, y); #c1(PRCP) c2(NP_955450) c3(lysosomal Pro-X carboxypeptidase isoform 2 preproprotein) c4(261737, 261738) c5(261739, 261740, 261741, 261742, 261743, 261744) c6( ) c7(T, uC, Ip, dc, acS, dO, asK, aT, cz, gl, h, v, Jz, j, fD, afs, anN, V, y); #c1(PRCP) c2(XP_005274150) c3(lysosomal Pro-X carboxypeptidase isoform X1) c4( ) c5(284964, 284965, 284966, 284967, 284968) c6( ) c7(T, uC, Ip, dc, acS, dO, asK, aT, cz, gl, h, v, Jz, j, fD, afs, anN, V, y); #c1(PRDM1) c2(NP_001189) c3(PR domain zinc finger protein 1 isoform 1) c4(80295, 80296, 80297, 80298) c5( ) c6( ) c7(T, fM, wu, eX, fN, fd, jh, mC, BI, pe, aT, h, eV, ji, wm, BN, aW, qY, eZ, fe, aq, Io, iV, bz, ck, bP, cj, fL, ij, y, iu); #c1(PRDM1) c2(NP_878911) c3(PR domain zinc finger protein 1 isoform 2) c4(257145) c5(257146, 257147, 257148, 257149, 257150, 257151) c6( ) c7(T, fM, wu, eX, fN, fd, jh, mC, BI, pe, aT, h, eV, ji, wm, BN, aW, qY, eZ, fe, aq, Io, iV, bz, ck, bP, cj, fL, ij, y, iu); #c1(PRDM1) c2(XP_011534364) c3(PR domain zinc finger protein 1 isoform X1) c4( ) c5(330753, 330754) c6( ) c7(T, fM, wu, eX, fN, fd, jh, mC, BI, pe, aT, h, eV, ji, wm, BN, aW, qY, eZ, fe, aq, Io, iV, bz, ck, bP, cj, fL, ij, y, iu); #c1(PRDM1) c2(XP_011534365) c3(PR domain zinc finger protein 1 isoform X3) c4( ) c5(330755, 330756, 330757, 330758, 330759, 330760, 330761, 330762, 330763, 330764, 330765, 330766, 330767, 330768, 330769) c6( ) c7(T, fM, wu, eX, fN, fd, jh, mC, BI, pe, aT, h, eV, ji, wm, BN, aW, qY, eZ, fe, aq, Io, iV, bz, ck, bP, cj, fL, ij, y, iu); #c1(PRDM10) c2(NP_064613) c3(PR domain zinc finger protein 10 isoform 1) c4(203297, 203298) c5(203299, 203300, 203301, 203302, 203303, 203304, 203305) c6( ) c7(A, j, aT); #c1(PRDM10) c2(NP_955469) c3(PR domain zinc finger protein 10 isoform 2) c4(261814) c5(261815, 261816, 261817, 261818, 261819, 261820) c6( ) c7(A, j, aT); #c1(PRDM10) c2(NP_955470) c3(PR domain zinc finger protein 10 isoform 3) c4(261821) c5(261822, 261823, 261824, 261825, 261826, 261827) c6( ) c7(A, j, aT); #c1(PRDM10) c2(NP_955471) c3(PR domain zinc finger protein 10 isoform 4) c4(261828) c5(261829, 261830, 261831, 261832, 261833, 261834) c6( ) c7(A, j, aT); #c1(PRDM10) c2(XP_011541216) c3(PR domain zinc finger protein 10 isoform X4) c4( ) c5(339854, 339855, 339856, 339857, 339858, 339859) c6( ) c7(A, j, aT); #c1(PRDM11) c2(NP_001243625) c3(PR domain-containing protein 11 isoform 2) c4(91241, 91242) c5(91243, 91244, 91245, 91246, 91247, 91248, 91249, 91250, 91251, 91252, 91253, 91254, 91255, 91256, 91257, 91258) c6( ) c7(T); #c1(PRDM13) c2(NP_067633) c3(PR domain zinc finger protein 13) c4(209103, 209104) c5(209105, 209106, 209107, 209108, 209109, 209110, 209111, 209112, 209113, 209114, 209115, 209116, 209117, 209118) c6( ) c7(an); #c1(PRDM14) c2(NP_078780) c3(PR domain zinc finger protein 14) c4(215433, 215434) c5(215435, 215436, 215437, 215438, 215439, 215440, 215441, 215442, 215443, 215444, 215445, 215446, 215447) c6( ) c7(T, aW, aT, ci, k, Ld); #c1(PRDM4) c2(NP_036538) c3(PR domain zinc finger protein 4) c4(174278, 174279) c5(174280, 174281, 174282, 174283, 174284, 174285, 174286, 174287, 174288, 174289, 174290, 174291, 174292) c6( ) c7(n, aF, aA); #c1(PRDM5) c2(NP_001287752) c3(PR domain zinc finger protein 5 isoform 2) c4(112795) c5(112796, 112797, 112798, 112799, 112800, 112801) c6( ) c7(T, s, bE, Qu, if, gX, aA, cuu, KO, bB, aF, K, ci, qN, bz, B, aOI); #c1(PRDM5) c2(NP_001287753) c3(PR domain zinc finger protein 5 isoform 3) c4(112802) c5(112803, 112804, 112805, 112806, 112807, 112808) c6( ) c7(T, s, bE, Qu, if, gX, aA, cuu, KO, bB, aF, K, ci, qN, bz, B, aOI); #c1(PRDM5) c2(NP_061169) c3(PR domain zinc finger protein 5 isoform 1) c4(199718) c5(199719, 199720, 199721, 199722, 199723, 199724, 199725) c6( ) c7(T, s, bE, Qu, if, gX, aA, cuu, KO, bB, aF, K, ci, qN, bz, B, aOI); #c1(PRDM5) c2(XP_005262765) c3(PR domain zinc finger protein 5 isoform X8) c4( ) c5(278088, 278089, 278090, 278091, 278092, 278093) c6( ) c7(T, s, bE, Qu, if, gX, aA, cuu, KO, bB, aF, K, ci, qN, bz, B, aOI); #c1(PRDM5) c2(XP_011529866) c3(PR domain zinc finger protein 5 isoform X3) c4(325646) c5( ) c6( ) c7(T, s, bE, Qu, if, gX, aA, cuu, KO, bB, aF, K, ci, qN, bz, B, aOI); #c1(PRDM6) c2(NP_001129711) c3(putative histone-lysine N-methyltransferase PRDM6) c4(52227) c5(52228, 52229, 52230, 52231, 52232, 52233, 52234) c6( ) c7(us); #c1(PRDM7) c2(NP_001091643) c3(probable histone-lysine N-methyltransferase PRDM7) c4(38532) c5(38533, 38534, 38535, 38536, 38537, 38538) c6( ) c7(cd); #c1(PRDM7) c2(XP_011521130) c3(probable histone-lysine N-methyltransferase PRDM7 isoform X3) c4( ) c5(316077, 316078, 316079) c6( ) c7(cd); #c1(PRDM7) c2(XP_011521132) c3(probable histone-lysine N-methyltransferase PRDM7 isoform X4) c4(316080) c5(316081, 316082, 316083, 316084, 316085, 316086, 316087, 316088, 316089) c6( ) c7(cd); #c1(PRDM7) c2(XP_011521133) c3(probable histone-lysine N-methyltransferase PRDM7 isoform X5) c4(316090) c5(316091, 316092, 316093, 316094, 316095, 316096, 316097, 316098, 316099, 316100, 316101) c6( ) c7(cd); #c1(PRDM8) c2(NP_064611) c3(PR domain zinc finger protein 8) c4(203265) c5(203266, 203267, 203268, 203269, 203270, 203271, 203272, 203273, 203274, 203275, 203276, 203277, 203278, 203279, 203280, 203281) c6( ) c7(yT, oe, cd); #c1(PRDM8) c2(XP_011530436) c3(PR domain zinc finger protein 8 isoform X3) c4(326302) c5(326303, 326304, 326305, 326306) c6( ) c7(yT, oe, cd); #c1(PRDM8) c2(XP_011530437) c3(PR domain zinc finger protein 8 isoform X4) c4( ) c5(326307) c6( ) c7(yT, oe, cd); #c1(PRDM8) c2(XP_011530444) c3(PR domain zinc finger protein 8 isoform X7) c4( ) c5(326308) c6( ) c7(yT, oe, cd); #c1(PRDM9) c2(NP_064612) c3(histone-lysine N-methyltransferase PRDM9) c4(203282, 203283, 203284) c5(203285, 203286, 203287, 203288, 203289, 203290, 203291, 203292, 203293, 203294, 203295, 203296) c6( ) c7(agd, gU, alC, vr, vH, EP, jr); #c1(PRDX2) c2(NP_005800) c3(peroxiredoxin-2) c4(159560, 159561) c5(159562, 159563, 159564, 159565, 159566, 159567, 159568, 159569, 159570, 159571, 159572, 159573) c6( ) c7(ka, dt, T, kh, NQ, if, IH, ht, ci, jX, PJ, qN, zP, q, ad, eA, jY, hX, wa, x, ady, ku, aE, hb, rJ, ds, aT, dL, K, jj, an, ae, af, eL, Yj, zQ, s, aW, Y, eH, Xg, r, aq, S, kk, t, f, bz, eF, cm, iK, dS, iR, bw, bb, jV, VJ, eM, iT, aDs, ki, kq, Vy, hR, pg, k, m, jQ, pw, ym, bt, Vj, B, y); #c1(PRDX3) c2(NP_006784) c3(thioredoxin-dependent peroxide reductase, mitochondrial isoform a precursor) c4(168038, 168039) c5(168040, 168041, 168042, 168043, 168044, 168045, 168046, 168047, 168048, 168049, 168050, 168051) c6( ) c7(T, QO, JC, Ol, if, v, qN, cd, ad, py, aoA, aT, ey, K, jj, an, ae, af, bA, jf, aW, f, bz, bb, bC, y, B, hS); #c1(PRDX4) c2(NP_006397) c3(peroxiredoxin-4 precursor) c4(164681, 164682, 164683) c5(164684, 164685, 164686, 164687, 164688, 164689, 164690, 164691, 164692, 164693, 164694, 164695, 164696, 164697, 164698, 164699) c6(164700, 164701, 164702, 164703) c7(T, kl, A, eM, iT, fJ, bt, aj, mf, dG, K, g, jj, J, ae, ad); #c1(PRDX4) c2(XP_005274495) c3(peroxiredoxin-4 isoform X1) c4(285090) c5(285091, 285092, 285093, 285094, 285095, 285096, 285097, 285098, 285099, 285100, 285101, 285102, 285103, 285104, 285105, 285106) c6(285107, 285108, 285109, 285110) c7(T, kl, A, eM, iT, fJ, bt, aj, mf, dG, K, g, jj, J, ae, ad); #c1(PRDX5) c2(NP_036226) c3(peroxiredoxin-5, mitochondrial isoform a precursor) c4(172453) c5(172454, 172455, 172456, 172457, 172458, 172459) c6( ) c7(T, eR, dM, aWG, aA, sM, bB, ID, GC, Zh, j, qj, mF, aR, ad, ke, Vp, av, aT, hD, h, K, jj, an, cb, ae, cp, aW, ev, as, dw, t, bz, dr, ahV, asE, Ye, cpE, Hp, KE, OW, iT, TJ, bE, wE, mx, gX, IF, Da, m, bee, y, kS, B, pC); #c1(PRDX5) c2(NP_857634) c3(peroxiredoxin-5, mitochondrial isoform b precursor) c4(255283) c5(255284, 255285, 255286, 255287, 255288, 255289) c6( ) c7(T, eR, dM, aWG, aA, sM, bB, ID, GC, Zh, j, qj, mF, aR, ad, ke, Vp, av, aT, hD, h, K, jj, an, cb, ae, cp, aW, ev, as, dw, t, bz, dr, ahV, asE, Ye, cpE, Hp, KE, OW, iT, TJ, bE, wE, mx, gX, IF, Da, m, bee, y, kS, B, pC); #c1(PRDX5) c2(NP_857635) c3(peroxiredoxin-5, mitochondrial isoform c precursor) c4(255290) c5(255291, 255292, 255293, 255294, 255295, 255296) c6( ) c7(T, eR, dM, aWG, aA, sM, bB, ID, GC, Zh, j, qj, mF, aR, ad, ke, Vp, av, aT, hD, h, K, jj, an, cb, ae, cp, aW, ev, as, dw, t, bz, dr, ahV, asE, Ye, cpE, Hp, KE, OW, iT, TJ, bE, wE, mx, gX, IF, Da, m, bee, y, kS, B, pC); #c1(PRDX6) c2(NP_004896) c3(peroxiredoxin-G) c4(150630) c5(150631, 150632, 150633, 150634, 150635, 150636) c6( ) c7(T, os, dD, qb, aWG, aw, oZ, v, Zh, j, eq, PJ, Fc, q, ad, av, cfq, aT, K, bU, ae, af, aa, DA, brg, aW, hl, r, dw, t, f, bz, Ye, bb, m, cuv, EY, B); #c1(PREB) c2(NP_037520) c3(prolactin regulatory element-binding protein) c4(175973) c5(175974, 175975, 175976, 175977, 175978, 175979, 175980, 175981, 175982, 175983) c6( ) c7(EW, cuw); #c1(PRELP) c2(NP_958505) c3(prolargin precursor) c4(262131) c5(262132, 262133, 262134, 262135, 262136, 262137) c6( ) c7(y, cz, d, ip, cj); #c1(PREP) c2(NP_002717) c3(prolyl endopeptidase) c4(131385) c5(131386, 131387, 131388, 131389, 131390, 131391) c6( ) c7(bL, btY, aA, bS, j, ct, cux, aoj, eA, K, H, A, mR, dN, hp, Z, cm, cuy, ac, dJ, cj, xg, L); #c1(PREP) c2(XP_005267101) c3(prolyl endopeptidase isoform X2) c4(280691, 280692) c5(280693, 280694, 280695, 280696, 280697, 280698, 280699, 280700, 280701, 280702, 280703, 280704) c6( ) c7(bL, btY, aA, bS, j, ct, cux, aoj, eA, K, H, A, mR, dN, hp, Z, cm, cuy, ac, dJ, cj, xg, L); #c1(PREPL) c2(NP_001035844) c3(prolyl endopeptidase-like isoform 2) c4(33242) c5(33243, 33244, 33245, 33246, 33247, 33248) c6( ) c7(xC, xm, xA, beo, azB, Rj, aDx, ci, azC); #c1(PREPL) c2(NP_001035845) c3(prolyl endopeptidase-like isoform 3) c4(33249, 33250) c5(33251, 33252, 33253, 33254, 33255, 33256, 33257, 33258, 33259, 33260, 33261, 33262) c6( ) c7(xC, xm, xA, beo, azB, Rj, aDx, ci, azC); #c1(PREPL) c2(NP_001165084) c3(prolyl endopeptidase-like isoform 4) c4( ) c5(67285, 67286, 67287, 67288, 67289) c6( ) c7(xC, xm, xA, beo, azB, Rj, aDx, ci, azC); #c1(PREPL) c2(XP_011531502) c3(prolyl endopeptidase-like isoform X1) c4(327625, 327626) c5(327627, 327628, 327629, 327630, 327631, 327632, 327633, 327634, 327635, 327636, 327637, 327638, 327639, 327640, 327641, 327642, 327643, 327644, 327645, 327646, 327647, 327648, 327649, 327650, 327651, 327652, 327653) c6( ) c7(xC, xm, xA, beo, azB, Rj, aDx, ci, azC); #c1(PREX1) c2(NP_065871) c3(phosphatidylinositol 3,4,5-trisphosphate-dependent Rac exchanger 1 protein) c4(205975, 205976) c5(205977, 205978, 205979, 205980, 205981, 205982, 205983, 205984, 205985, 205986, 205987, 205988) c6( ) c7(bL, T, aW, Y, oe, aT, ae, Qt, ad); #c1(PREX2) c2(NP_079146) c3(phosphatidylinositol 3,4,5-trisphosphate-dependent Rac exchanger 2 protein isoform a) c4(217236, 217237) c5(217238, 217239, 217240, 217241, 217242, 217243) c6( ) c7(aC, aW, Y, aA, aT, aF); #c1(PREX2) c2(XP_011515914) c3(phosphatidylinositol 3,4,5-trisphosphate-dependent Rac exchanger 2 protein isoform X1) c4( ) c5(309068, 309069, 309070, 309071, 309072, 309073) c6( ) c7(aC, aW, Y, aA, aT, aF); #c1(PRF1) c2(NP_001076585) c3(perforin-1 precursor) c4(37516, 37517, 37518, 37519) c5(37520, 37521, 37522, 37523, 37524, 37525, 37526, 37527, 37528, 37529, 37530, 37531, 37532, 37533) c6( ) c7(oO, bM, T, xS, fR, ea, atj, if, al, cL, gA, Vd, ci, ip, x, Gt, aDk, Ds, bGm, K, hu, or, zy, DY, eL, Zm, cp, aW, ih, hl, g, eF, cm, mK, yd, ly, bb, xK, eM, nB, iT, dc, mx, wB, cj, Zn, dW, k, m, Xu, hh, pJ, cZ, NK, dD, bJs, Ol, ht, NT, aDI, aj, BE, fr, nA, PJ, pM, qN, fK, eW, ft, pe, cuA, Ne, h, jH, dL, ey, bde, dd, dx, A, ape, mR, aHW, Cu, fJ, Ib, CM, hQ, bQc, aq, kp, ajz, i, xO, RJ, bm, at, cuz, aAI, fL, brs, it, B, bL, Dw, fM, jx, aA, fF, bNI, v, j, C, bX, V, q, J, o, er, eA, anA, mP, WY, aT, yu, anz, jj, ae, af, alL, jf, hM, bf, Ue, Y, oV, r, aaE, Io, en, aaO, t, aER, zM, f, bN, ck, alC, ac, c, aJt, hc, DW, wR, aJQ, cS, oX, bt, zA, cuB, an, rA, vi, iW, jh, wV, Jz, jE, fu, Gn, EA, hF, eq, pz, mC, ad, hX, qC, dP, hd, F, ib, ds, hD, cuC, ff, eH, cr, eZ, aFr, bNZ, Ej, aF, hp, iV, bz, dR, gk, Bv, xT, afd, eB, aS, oQ, i, If, kS, X, y); #c1(PRG2) c2(NP_001230174) c3(bone marrow proteoglycan isoform 2 preproprotein) c4(86046) c5(86047, 86048, 86049, 86050, 86051, 86052) c6( ) c7(bM, T, JZ, iW, jE, bdL, Fc, V, ad, hX, NF, aBy, aT, h, apj, pj, ae, d, Cw, aW, xs, Ib, IC, eZ, aq, eE, IY, bkn, ig, pg, eo, B); #c1(PRG2) c2(NP_001289855) c3(bone marrow proteoglycan isoform 1 preproprotein) c4(114680, 114681, 114682, 114683, 114684) c5(114685, 114686, 114687, 114688, 114689, 114690, 114691, 114692, 114693, 114694) c6( ) c7(bM, T, JZ, iW, jE, bdL, Fc, V, ad, hX, NF, aBy, aT, h, apj, pj, ae, d, Cw, aW, xs, Ib, IC, eZ, aq, eE, IY, bkn, ig, pg, en, B); #c1(PRG4) c2(NP_001121180) c3(proteoglycan 4 isoform B preproprotein) c4(45663, 45664) c5( ) c6( ) c7(agS, can, ck, cuD, bjs, bjt, aBm, cst, ai); #c1(PRG4) c2(NP_001121181) c3(proteoglycan 4 isoform C preproprotein) c4(45665) c5( ) c6( ) c7(agS, can, ck, cuD, bjs, bjt, aBm, cst, ai); #c1(PRG4) c2(NP_001121182) c3(proteoglycan 4 isoform D preproprotein) c4( ) c5(45666, 45667, 45668, 45669, 45670, 45671, 45672, 45673, 45674, 45675, 45676, 45677, 45678, 45679, 45680, 45681, 45682, 45683, 45684, 45685, 45686, 45687, 45688, 45689, 45690, 45691, 45692, 45693, 45694, 45695, 45696, 45697) c6( ) c7(agS, can, ck, cuD, bjs, bjt, aBm, cst, ai); #c1(PRG4) c2(NP_001290161) c3(proteoglycan 4 isoform E preproprotein) c4(114993) c5( ) c6( ) c7(agS, can, ck, cuD, bjs, bjt, aBm, cst, ai); #c1(PRG4) c2(NP_005798) c3(proteoglycan 4 isoform A preproprotein) c4(159552) c5( ) c6( ) c7(agS, can, ck, cuD, bjs, bjt, aBm, cst, ai); #c1(PRH1) c2(NP_001278243) c3(proline-rich protein HaeIII subfamily 1 isoform a precursor) c4( ) c5(109529, 109530, 109531, 109532, 109533, 109534, 109535, 109536) c6( ) c7(DS, os, aSz, ea, e, al, bB, aiC, ame, ur, ss, x, bpl, aE, bW, M, Yk, K, bgF, hH, eL, hm, LC, hi, cuE, YG, aUG, bw, aVc, DL, aUF, wE, ki, mx, wx, k, m, P, NK, bpH, dD, Rx, aw, fN, ez, n, Id, cuG, cd, ain, cc, ec, vC, acb, dL, wb, aBR, aWY, is, Df, Gc, Vb, OV, MX, sp, sq, QM, Ib, fe, CQ, se, fL, B, aMk, Ip, ka, DM, AL, aZy, atB, DV, cz, sM, cR, v, j, cuJ, bqA, C, aqf, eA, Yh, aT, cy, dz, bqe, qk, iU, DN, Pg, wl, Io, aDm, t, akF, cl, ac, AH, fD, cuF, gx, bqf, gb, bpk, oZ, pi, eq, mC, cuH, cul, tX, hX, F, ds, gh, qV, oj, vc, bqc, aZw, eZ, dr, eK, cuK, bE, ag, gZ, dX, aS, be, ei, jr); #c1(PRH2) c2(NP_001103683) c3(salivary acidic proline-rich phosphoprotein 1/2 precursor) c4(41908, 41909, 41910) c5(41911, 41912, 41913, 41914, 41915, 41916, 41917, 41918, 41919, 41920, 41921, 41922, 41923, 41924, 41925, 41926, 41927, 41928, 41929, 41930, 41931, 41932, 41933, 41934, 41935, 41936, 41937, 41938, 41939, 41940, 41941, 41942, 41943) c6( ) c7(DS, os, aSz, ea, e, al, bB, aiC, ame, ur, ss, x, bpl, aE, bW, M, Yk, K, bgF, hH, eL, hm, LC, hl, cuE, YG, aUG, bw, aVc, DL, aUF, wE, ki, mx, wx, k, m, P, NK, bpH, dD, Rx, aw, fN, ez, n, Id, cuG, cd, ain, cc, ec, vC, acb, dL, wb, aBR, aWY, is, Df, Gc, Vb, OV, MX, sp, sq, QM, Ib, fe, CQ, se, fL, B, aMk, Ip, ka, DM, AL, aZy, atB, DV, cz, sM, cR, v, j, cuJ, bqA, C, aqf, eA, Yh, aT, cy, dz, bqe, gk, iU, DN, Pg, wl, Io, aDm, t, akF, cl, ac, AH, fD, cuF, gx, bqf, qb, bpk, oZ, pi, eq, mC, cuH, cul, tX, hX, F, ds, gh, qV, oj, vc, bqc, aZw, eZ, dr, eK, cuK, bE, ag, gZ, dX, aS, be, ei); #c1(PRICKLE1) c2(NP_001138354) c3(prickle-like protein 1) c4(56271, 56272, 56273, 56274) c5(56275, 56276, 56277, 56278, 56279, 56280, 56281, 56282, 56283, 56284, 56285, 56286, 56287, 56288, 56289, 56290, 56291, 56292, 56293, 56294, 56295, 56296, 56297, 56298, 56299, 56300, 56301, 56302, 56303, 56304, 56305, 56306, 56307, 56308, 56309, 56310, 56311, 56312, 56313, 56314) c6( ) c7(bL, agd, iR, aAT, ha, aq, yU, yZ, bVr, il, agT, B); #c1(PRICKLE2) c2(NP_942559) c3(prickle-like protein 2) c4(260552) c5(260553, 260554, 260555, 260556, 260557) c6( ) c7(af, pN, fe, aur, aq, cuL, bN); #c1(PRICKLE2) c2(XP_011531737) c3(prickle-like protein 2 isoform X4) c4( ) c5(327825) c6( ) c7(af, pN, fe, aur, aq, cuL, bN); #c1(PRICKLE2) c2(XP_011531741) c3(prickle-like protein 2 isoform X5) c4(327826) c5( ) c6( ) c7(af, pN, fe, aur, aq, cuL, bN); #c1(PRICKLE2) c2(XP_011531742) c3(prickle-like protein 2 isoform X7) c4( ) c5(327827, 327828, 327829, 327830, 327831, 327832) c6( ) c7(af, pN, fe, aur, aq, cuL, bN); #c1(PRICKLE4) c2(NP_037529) c3(prickle-like protein 4) c4(176033, 176034, 176035, 176036, 176037) c5(176038, 176039, 176040, 176041, 176042, 176043, 176044, 176045, 176046, 176047, 176048, 176049, 176050, 176051, 176052, 176053, 176054, 176055, 176056, 176057, 176058, 176059, 176060, 176061, 176062, 176063, 176064, 176065, 176066, 176067) c6( ) c7(aW, aT); #c1(PRIM1) c2(NP_000937) c3(DNA primase small subunit) c4(17556, 17557) c5(17558, 17559, 17560, 17561, 17562, 17563, 17564, 17565, 17566, 17567, 17568, 17569) c6( ) c7(gv); #c1(PRIMA1) c2(XP_011544946) c3(proline-rich membrane anchor 1 isoform X1) c4(343921, 343922) c5(343923, 343924, 343925, 343926, 343927, 343928, 343929, 343930, 343931, 343932, 343933, 343934, 343935, 343936, 343937, 343938) c6( ) c7(T, ft, hd, nB, aW, Y, xs, bO, aT, fd, bK, eA, bt, bz, q, dx); #c1(PRIMPOL) c2(NP_689896) c3(DNA-directed primase/polymerase protein isoform 1) c4(244283) c5(244284, 244285, 244286, 244287, 244288, 244289) c6( ) c7(cuM); #c1(PRKAA1) c2(NP_006242) c3(5′-AMP-activated protein kinase catalytic subunit alpha-1 isoform 1) c4(163257) c5(163258, 163259, 163260, 163261, 163262, 163263) c6( ) c7(bL, T, dD, hI, if, oA, aA, bB, aj, v, j, ci, eq, qN, fr, hF, eJ, J, ad, hX, x, cc, aE, NS, aT, cy, vc, jy, ji, K, ae, af, aiV, iU, aW, Y, ff, fc, dq, aF, app, en, t, bz, ck, cj, gZ, mf, m, k, cP, ei, adh, bt, X); #c1(PRKAA1) c2(NP_996790) c3(5′-AMP-activated protein kinase catalytic subunit alpha-1 isoform 2) c4(264540) c5(264541, 264542, 264543, 264544, 264545, 264546) c6( ) c7(bL, T, dD, hI, if, oA, aA, bB, aj, v, j, ci, eq, qN, fr, hF, eJ, J, ad, hX, x, cc, aE, NS, aT, cy, vc, jy, ji, K, ae, af, aiV, iU, aW, Y, ff, fc, dq, aF, app, en, t, bz, ck, cj, gZ, mf, m, k, cP, ei, adh, bt, X); #c1(PRKAB1) c2(XP_005253966) c3(5′-AMP-activated protein kinase subunit beta-1 isoform X1) c4(272792, 272793) c5(272794, 272795, 272796, 272797, 272798, 272799, 272800, 272801, 272802, 272803, 272804, 272805, 272806, 272807, 272808, 272809) c6( ) c7(bL, T, dD, hI, aA, bB, fd, aj, v, j, ci, eq, fr, eJ, J, ad, x, cc, aE, aT, cy, vc, jy, ji, K, ae, af, aiV, iU, aW, Y, ff, fc, dq, aF, app, en, t, bz, ck, gZ, m, k, cP, ei, adh, bt, X); #c1(PRKACA) c2(NP_002721) c3(cAMP-dependent protein kinase catalytic subunit alpha isoform Calpha1) c4(131407, 131408) c5(131409, 131410, 131411, 131412, 131413, 131414, 131415, 131416, 131417, 131418) c6( ) c7(tg, s, vf, eu, aT, vg, hR, Hu, AN, k, t, ae, af, ad, YR, DB); #c1(PRKACA) c2(NP_997401) c3(cAMP-dependent protein kinase catalytic subunit alpha isoform Calpha2) c4(265507) c5(265508, 265509, 265510, 265511, 265512, 265513, 265514, 265515, 265516, 265517, 265518, 265519, 265520, 265521, 265522, 265523) c6( ) c7(tg, s, vf, eu, aT, vg, hR, Hu, AN, k, t, ae, af, ad, YR, DB; #c1(PRKACB) c2(NP_001287844) c3(cAMP-dependent protein kinase catalytic subunit beta isoform 10) c4(112999) c5(113000, 113001, 113002, 113003, 113004, 113005, 113006, 113007, 113008, 113009, 113010, 113011) c6( ) c7(T, aA, af, eu, ad, DB); #c1(PRKACB) c2(NP_001287846) c3(cAMP-dependent protein kinase catalytic subunit beta isoform 12) c4(113012) c5(113013, 113014, 113015, 113016, 113017, 113018) c6( ) c7(T, aA, af, eu, ad, DB); #c1(PRKACG) c2(NP_002723) c3(cAMP-dependent protein kinase catalytic subunit gamma) c4(131419) c5(131420, 131421, 131422, 131423, 131424, 131425) c6( ) c7(T, xu, kB, Y, alJ, K, MG, eW); #c1(PRKAG1) c2(NP_001193638) c3(5′-AMP-activated protein kinase subunit gamma-1 isoform 3) c4(82412) c5(82413, 82414, 82415, 82416, 82417, 82418) c6( ) c7(bL, aj, dD, eq); #c1(PRKAG1) c2(NP_002724) c3(5′-AMP-activated protein kinase subunit gamma-1 isoform 1) c4(131426, 131427, 131428) c5(131429, 131430, 131431, 131432, 131433, 131434, 131435) c6( ) c7(bL, aj, dD, eq); #c1(PRKAG1) c2(XP_005269076) c3(5′-AMP-activated protein kinase subunit gamma-1 isoform X2) c4( ) c5(282293) c6( ) c7(bL, aj, dD, eq); #c1(PRKAG1) c2(XP_005269077) c3(5′-AMP-activated protein kinase subunit gamma-1 isoform X4) c4( ) c5(282294, 282295, 282296, 282297, 282298) c6( ) c7(bL, aj, dD, eq); #c1(PRKAG1) c2(XP_011536864) c3(5′-AMP-activated protein kinase subunit gamma-1 isoform X1) c4( ) c5(334560, 334561, 334562, 334563, 334564) c6( ) c7(bL, aj, dD, eq); #c1(PRKAG2) c2(NP_001035723) c3(5′-AMP-activated protein kinase subunit gamma-2 isoform c) c4( ) c5(32987, 32988, 32989, 32990, 32991) c6( ) c7(bL, cuO, dD, eR, mr, wL, oe, e, Am, cuP, aj, afv, ada, eq, adb, J, cd, cc, cuN, pN, NS, adl, oj, KN, aT, cy, vc, bK, ca, bQx, fb, aW, Y, aXY, Bw, tv, dq, tu, f, cuQ, dr, acY, X, mx, wR, dy, adh, bD, B); #c1(PRKAG2) c2(NP_001291456) c3(5′-AMP-activated protein kinase subunit gamma-2 isoform d) c4(116102) c5(116103, 116104, 116105, 116106, 116107, 116108) c6( ) c7(bL, cuO, dD, eR, mr, wL, oe, e, Am, cuP, aj, afv, ada, eq, adb, J, cd, cc, cuN, pN, NS, adl, oj, KN, aT, cy, vc, bK, ca, bQx, fb, aW, Y, aXY, Bw, tv, dq, tu, f, cuQ, dr, acY, X, mx, wR, dy, adh, bD, B); #c1(PRKAG2) c2(NP_001291460) c3(5′-AMP-activated protein kinase subunit gamma-2 isoform e) c4( ) c5(116109, 116110, 116111, 116112, 116113, 116114) c6( ) c7(bL, cuO, dD, eR, mr, wL, oe, e, Am, cuP, aj, afv, ada, eq, adb, J, cd, cc, cuN, pN, NS, adl, oj, KN, aT, cy, vc, bK, ca, bQx, fb, aW, Y, aXY, Bw, tv, dq, tu, f, cuQ, dr, acY, X, mx, wR, dy, adh, bD, B); #c1(PRKAG2) c2(NP_057287) c3(5′-AMP-activated protein kinase subunit gamma-2 isoform a) c4(189867, 189868, 189869) c5(189870, 189871, 189872, 189873, 189874, 189875, 189876) c6( ) c7(bL, cuO, dD, eR, mr, wL, oe, e, Am, cuP, aj, afv, ada, eq, adb, J, cd, cc, cuN, pN, NS, adl, oj, KN, aT, cy, vc, bK, ca, bQx, fb, aW, Y, aXY, Bw, tv, dq, tu, f, cuQ, dr, acY, X, mx, wR, dy, adh, bD, B); #c1(PRKAG3) c2(NP_059127) c3(5′-AMP-activated protein kinase subunit gamma-3) c4(193163, 193164, 193165, 193166) c5(193167, 193168, 193169, 193170, 193171, 193172, 193173, 193174, 193175, 193176, 193177, 193178, 193179, 193180, 193181, 193182, 193183, 193184, 193185, 193186, 193187, 193188, 193189, 193190, 193191, 193192, 193193, 193194) c6( ) c7(bL, dD, kl, W, nU, cuR, aZ, aj, eq, af); #c1(PRKAR1A) c2(NP_001263218) c3(cAMP-dependent protein kinase type 1-alpha regulatory subunit isoform a) c4(97043) c5(97044, 97045, 97046, 97047, 97048, 97049, 97050, 97051, 97052, 97053, 97054, 97055, 97056, 97057, 97058, 97059, 97060, 97061, 97062, 97063, 97064, 97065) c6( ) c7(bDV, T, aC, vf, fd, Ja, ci, cuS, tg, aeO, vg, iv, hu, cuU, eL, yo, avH, aeR, PP, aW, Ls, cm, ahV, qJ, nB, mx, cj, iS, DD, m, OF, ht, eW, b, no, jz, dL, YI, coT, OX, iw, aq, Hu, cuT, Wt, kT, hR, HB, AN, B, aOo, dA, aA, v, V, q, eA, Ig, ctx, aT, jj, ae, af, wr, s, oV, Y, r, Io, bu, t, ck, nM, yI, gT, bt, gV, pY, gb, jh, oH, atN, ad, hd, bri, hP, hG, aF, bF, OG, Ew, MJ, MG); #c1(PRKAR1B) c2(NP_002726) c3(cAMP-dependent protein kinase type 1-beta regulatory subunit) c4(131436, 131437, 131438, 131439) c5(131440, 131441131442, 131443, 131444, 131445, 131446, 131447, 131448, 131449, 131450, 131451, 131452, 131453, 131454, 131455, 131456, 131457, 131458, 131459, 131460, 131461) c6( ) c7(HB, bb, U); #c1(PRKAR1B) c2(XP_005249866) c3(cAMP-dependent protein kinase type 1-beta regulatory subunit isoform X3) c4( ) c5(269919, 269920, 269921, 269922, 269923, 269924, 269925, 269926, 269927, 269928, 269929, 269930, 269931, 269932, 269933, 269934, 269935, 269936) c6( ) c7(HB, bb, U); #c1(PRKAR1B) c2(XP_011513749) c3(cAMP-dependent protein kinase type 1-beta regulatory subunit isoform X2) c4(306092) c5(306093, 306094, 306095, 306096, 306097, 306098) c6( ) c7(HB, bb, U); #c1(PRKAR2A) c2(NP_004148) c3(cAMP-dependent protein kinase type II-alpha regulatory subunit) c4(143863) c5(143864, 143865, 143866, 143867, 143868, 143869, 143870, 143871, 143872, 143873) c6( ) c7(yn); #c1(PRKAR2A) c2(XP_005265371) c3(cAMP-dependent protein kinase type II-alpha regulatory subunit isoform X2) c4(279465) c5(279466, 279467, 279468, 279469, 279470, 279471) c6( ) c7(yn); #c1(PRKAR2B) c2(NP_002727) c3(cAMP-dependent protein kinase type II-beta regulatory subunit) c4(131462, 131463) c5(131464, 131465, 131466, 131467, 131468, 131469, 131470, 131471, 131472, 131473, 131474, 131475, 131476, 131477, 131478, 131479) c6( ) c7(v, kl, jz, eZ); #c1(PRKCA) c2(NP_002728) c3(protein kinase C alpha type) c4(131480) c5(131481, 131482, 131483, 131484, 131485, 131486) c6( ) c7(bM, T, fR, vf, dK, yk, al, aA, cz, bB, aj, dG, v, ci, C, fr, V, cd, J, ad, er, eA, av, tg, ft, iu, aE, cc, afQ, oj, aT, vg, IG, By, cy, dL, K, h, bq, he, ae, eL, eu, Qe, wC, yo, d, ape, s, aiV, aW, Y, ev, ff, aFr, aq, aF, Hu, en, cl, t, cm, bz, YR, es, rR, kP, eM, nB, Ip, bE, hL, hR, m, ym, bt, xg, B); #c1(PRKCA) c2(XP_011523291) c3(protein kinase C alpha type isoform X1) c4(317805) c5(317806) c6( ) c7(bM, T, fR, vf, dK, yk, al, aA, cz, bB, aj, dG, v, ci, C, fr, V, cd, J, ad, er, eA, av, tg, ft, iu, aE, cc, afQ, oj, aT, vg, IG, By, cy, dL, K, h, bq, he, ae, eL, eu, Qe, wC, yo, d, apo, s, aiV, aW, Y, ev, ff, aFr, aq, aF, Hu, en, cl, t, cm, bz, YR, es, rR, kP, eM, nB, Ip, bE, hL, hR, m, ym, bt, xg, B); #c1(PRKCA) c2(XP_011523292) c3(protein kinase C alpha type isoform X2) c4( ) c5(317807, 317808, 317809, 317810, 317811) c6( ) c7(bM, T, fR, vf, dK, yk, al, aA, cz, bB, aj, dG, v, ci, C, fr, V, cd, J, ad, er, eA, av, tg, ft, iu, aE, cc, afQ, oj, aT, vg, IG, By, cy, dL, K, h, bq, he, ae, eL, eu, Qe, wC, yo, d, apo, s, aiV, aW, Y, ev, ff, aFr, aq, aF, Hu, en, cl, t, cm, bz, YR, es, rR, kP, eM, nB, Ip, bE, hL, hR, m, ym, bt, xg, B); #c1(PRKCB) c2(NP_002729) c3(protein kinase C beta type isoform 2) c4(131487) c5(131488, 131489, 131490, 131491, 131492, 131493) c6( ) c7(bL, T, dD, fM, aC, eR, ea, dK, aw, al, Ir, aA, cz, bB, aj, dG, v, ci, bO, eq, aY, mC, cd, ft, aE, Be, nX, aT, hn, K, cbN, bq, dx, cp, wC, A, aW, Y, cr, eZ, jh, bz, op, bN, eM, Ip, bE, Ny, vA, dh, X, cj, dy, fL, be, y, bt, cB, B); #c1(PRKCB) c2(NP_997700) c3(protein kinase C beta type isoform 1) c4(265702) c5(265703, 265704, 265705, 265706, 265707, 265708) c6( ) c7(bL, T, dD, fM, aC, eR, ea, dK, aw, al, Ir, aA, cz, bB, aj, dG, v, ci, bO, eq, aY, mC, cd, ft, aE, Be, nX, aT, hn, K, cbN, bq, dx, cp, wC, A, aW, Y, cr, eZ, jh, bz, op, bN, eM, Ip, bE, Ny, vA, dh, X, cj, dy, fL, be, y, bt, cB, B); #c1(PRKCD) c2(NP_997704) c3(protein kinase C delta type) c4(265709, 265710) c5(265711, 265712, 265713, 265714, 265715, 265716, 265717, 265718, 265719, 265720, 265721, 265722, 265723, 265724, 265725, 265726, 265727, 265728, 265729, 265730) c6( ) c7(bL, cZ, T, aC, fG, if, cz, dG, j, ci, v, aGK, qN, AO, bgR, IR, mC, ad, eA, ip, av, ft, ib, aE, uT, Bc, pX, oj, aT, cU, cy, jy, h, K, pj, bq, dd, an, rE, cuV, ae, eu, jj, Qe, aa, d, aAl, qt, aW, ff, Of, eZ, Og, aF, en, apx, aYo, kC, pb, iq, ck, ac, nB, bE, hk, vy, cj, fL, bt, X, cn, qc); #c1(PRKCD) c2(XP_006713320) c3(protein kinase C delta type isoform X2) c4(287083) c5(287084, 287085) c6( ) c7(bL, cZ, T, aC, fG, if, cz, dG, j, ci, v, aGK, qN, AO, bgR, IR, mC, ad, eA, ip, av, ft, ib, aE, uT, Bc, pX, oj, aT, cU, cy, jy, h, K, pj, bq, dd, an, rE, cuV, ae, eu, jj, Qe, aa, d, aAl, qt, aW, ff, Of, eZ, Og, aF, en, apx, aYo, kC, pb, iq, ck, ac, nB, bE, hk, vy, cj, fL, bt, X, cn, qc); #c1(PRKCDBP) c2(NP_659477) c3(protein kinase C delta-binding protein) c4(240105) c5(240106, 240107, 240108, 240109, 240110, 240111, 240112) c6( ) c7(x, av, T, ac, aW, r, aT, aA, vr, cm, aF, m, k, iV, fe, t, bz, q); #c1(PRKCE) c2(XP_005264485) c3(protein kinase C epsilon type isoform X1) c4(278962) c5(278963, 278964, 278965, 278966, 278967, 278968) c6( ) c7(bM, cZ, T, fR, aw, cz, Fb, j, ci, bX, eA, ad, av, cF, cc, PN, aT, dd, bq, ae, eN, hm, aW, Y, aq, cm, bz, hq, nM, Dy, eM, nB, dB, IB, iu, ao); #c1(PRKCE) c2(XP_005264488) c3(protein kinase C epsilon type isoform X8) c4(278969) c5(278970, 278971, 278972, 278973, 278974, 278975) c6( ) c7(bM, cZ, T, fR, aw, cz, Fb, j, ci, bX, eA, ad, av, cF, cc, pN, aT, dd, bq, ae, eN, hm, aW, Y, aq, cm, bz, hq, nM, Dy, eM, nB, dB, IB, iu, ao); #c1(PRKCG) c2(NP_002730) c3(protein kinase C gamma type) c4(131494, 131495, 131496) c5(131497, 131498, 131499, 131500, 131501, 131502, 131503, 131504, 131505, 131506, 131507, 131508, 131509, 131510, 131511, 131512, 131513) c6( ) c7(KE, ape, ky, cuW, kB, al, U, zD, aU, rf, Kh, nA, akr, zB, nC, wC); #c1(PRKCH) c2(NP_006246) c3(protein kinase C eta type) c4(163264) c5(163265, 163266, 163267, 163268, 163269, 163270) c6( ) c7(dD, aA, cz, v, eq, fr, ai, cF, M, oj, eu, d, kt, aF, Z, eK, fT, wg, ac, tr, y, IB, B); #c1(PRKCH) c2(XP_011535258) c3(protein kinase C eta type isoform X3) c4(332162) c5( ) c6( ) c7(dD, aA, cz, v, eq, fr, ai, cF, M, oj, eu, d, kt, aF, Z, eK, fT, wg, ac, tr, y, IB, B); #c1(PRKCH) c2(XP_011535259) c3(protein kinase C eta type isoform X4) c4( ) c5(332163, 332164, 332165, 332166, 332167, 332168, 332169) c6( ) c7(dD, aA, cz, v, eq, fr, ai, cF, M, oj, eu, d, kt, aF, Z, eK, fT, wg, ac, tr, y, IB, B); #c1(PRKCI) c2(NP_002731) c3(protein kinase C iota type) c4(131514) c5(131515, 131516, 131517, 131518, 131519, 131520) c6( ) c7(T, ht, ci, eA, ad, abZ, bv, av, jz, aT, ji, bq, hu, ae, d, Y, ff, en, cm, t, bz, eM, Qu, m, Xu, it); #c1(PRKCQ) c2(NP_001229342) c3(protein kinase C theta type isoform 2) c4(84247) c5(84248, 84249, 84250, 84251, 84252, 84253) c6( ) c7(bL, T, fR, aw, aip, cz, cL, j, C, mC, o, ad, AW, cF, aT, jy, fb, af, A, aW, eZ, hp, ac, aSp, fL, y); #c1(PRKCQ) c2(NP_001269573) c3(protein kinase C theta type isoform 3) c4(102013) c5( ) c6( ) c7(bL, T, fR, aw, aip, cz, cL, j, C, mC, o, ad, AW, cF, aT, jy, fb, af, A, aW, eZ, hp, ac, aSp, fL, y); #c1(PRKCQ) c2(NP_001269574) c3(protein kinase C theta type isoform 4) c4( ) c5(102014, 102015, 102016, 102017, 102018, 102019, 102020, 102021, 102022, 102023, 102024, 102025) c6( ) c7(bL, T, fR, aw, aip, cz, cL, j, C, mC, o, ad, AW, cF, aT, jy, fb, af, A, aW, eZ, hp, ac, aSp, fL, y); #c1(PRKCQ) c2(XP_005252553) c3(protein kinase C theta type isoform X2) c4(271875, 271876) c5(271877) c6( ) c7(bL, T, fR, aw, aip, cz, cL, j, C, mC, o, ad, AW, cF, aT, jy, fb, af, A, aW, eZ, hp, ac, aSp, fL, y); #c1(PRKCQ) c2(XP_006717528) c3(protein kinase C theta type isoform X1) c4( ) c5(291175, 291176, 291177, 291178, 291179) c6( ) c7(bL, T, fR, aw, aip, cz, cL, j, C, mC, o, ad, AW, cF, aT, jy, fb, af, A, aW, eZ, hp, ac, aSp, fL, y); #c1(PRKCSH) c2(XP_011526433) c3(glucosidase 2 subunit beta isoform X1) c4(320737) c5(320738, 320739, 320740, 320741, 320742, 320743) c6( ) c7(T, A, aW, bII, WO, hI, wB, adI, r, aA, aF, Ia, eA, il, BV, q); #c1(PRKCSH) c2(XP_011526434) c3(glucosidase 2 subunit beta isoform X2) c4(320744) c5(320745, 320746, 320747, 320748, 320749, 320750) c6( ) c7(T, A, aW, bII, WQ, hI, wB, adI, r, aA, aF, la, eA, il, BV, q); #c1(PRKCZ) c2(XP_011540075) c3(protein kinase C zeta type isoform X1) c4(338402) c5(338403, 338404, 338405, 338406, 338407, 338408, 338409, 338410, 338411, 338412) c6( ) c7(bL, T, aC, bB, mS, dG, v, fr, ad, av, iu, aE, mW, oj, aT, bK, mT, mY, mV, ae, Qe, mU, d, aW, ff, hl, cr, en, g, t, bz, mZ, mX, ck, es, cA, iA, bE, mf, m, fD, y, X); #c1(PRKCZ) c2(XP_011540076) c3(protein kinase C zeta type isoform X2) c4(338413) c5( ) c6( ) c7(bL, T, aC, bB, mS, dG, v, fr, ad, av, iu, aE, mW, oj, aT, bK, mT, mY, mV, ae, Qe, mU, d, aW, ff, hl, cr, en, g, t, bz, mZ, mX, ck, es, cA, iA, bE, mf, m, fD, y, X); #c1(PRKCZ) c2(XP_011540077) c3(protein kinase C zeta type isoform X3) c4(338414, 338415, 338416, 338417, 338418, 338419) c5(338420, 338421, 338422, 338423, 338424, 338425, 338426, 338427) c6( ) c7(bL, T, aC, bB, mS, dG, v, fr, ad, av, iu, aE, mW, oj, aT, bK, mT, mY, mV, ae, Qe, mU, d, aW, ff, hl, cr, en, g, t, bz, mZ, mX, ck, es, cA, iA, bE, mf, m, fD, y, X); #c1(PRKD1) c2(NP_002733) c3(serine/threonine-protein kinase D1) c4(131528) c5(131529, 131530, 131531, 131532, 131533, 131534) c6( ) c7(bM, T, hl, vl, eR, arS, oe, aA, cz, n, fo, Gn, ci, fl, aY, g, aR, cd, ad, vN, eJ, eW, cF, aE, Ig, Db, BV, arV, ayQ, aT, rX, crs, us, aBZ, K, Nj, aDZ, Xh, ae, cuX, d, iU, aW, Ls, eH, r, dq, err, kp, aF, g, mo, eF, xw, fq, cru, dr, Qi, erv, qe, ert, wB, cuY, fP, uo, IO, aS, dy, ER, im, bD, rA, jr); #c1(PRKD2) c2(NP_001073350) c3(serine/threonine-protein kinase D2 isoform A) c4(35980) c5(35981, 35982, 35983, 35984, 35985, 35986, 35987, 35988, 35989, 35990, 35991) c6( ) c7(T, eR, arS, bSp, aA, cz, n, bB, aY, cd, ad, eA, aE, arV, pX, rX, adm, K, Nj, brV, ae, kl, d, A, iU, ff, Az, Lc, en, dr, Cv, crv, iT, bE, wB, gX, cj, aS, Hb, dy, bD, fy, BV, us); #c1(PRKD2) c2(XP_005258773) c3(serine/threonine-protein kinase D2 isoform X1) c4(275728) c5(275729, 275730, 275731, 275732, 275733) c6( ) c7(T, eR, arS, bSp, aA, cz, n, bB, aY, cd, ad, eA, aE, arV, pX, rX, adm, K, Nj, brV, ae, kl, d, A, iU, ff, Az, Lc, en, dr, Cv, crv, iT, bE, wB, gX, cj, aS, Hb, dy, bD, fy, BV, us); #c1(PRKD3) c2(XP_005264294) c3(serine/threonine-protein kinase D3 isoform X1) c4(278792) c5(278793, 278794, 278795, 278796, 278797, 278798, 278799, 278800, 278801, 278802) c6( ) c7(kP, Y, bK, ey, bX, ae, ad); #c1(PRKD3) c2(XP_011531034) c3(serine/threonine-protein kinase D3 isoform X4) c4( ) c5(326997) c6( ) c7(kP, Y, bK, ey, bX, ae, ad); #c1(PRKDC) c2(NP_001075109) c3(DNA-dependent protein kinase catalytic subunit isoform 2) c4(37239) c5(37240, 37241, 37242, 37243, 37244, 37245) c6( ) c7(T, dA, fR, if, iW, jh, aA, bB, bS, ct, ci, qN, V, q, ad, cuZ, eA, eW, av, Db, qK, oW, aT, h, dL, K, ae, eL, aa, d, iU, aW, Y, CT, r, aPf, alb, aF, as, Z, iK, bz, ck, eM, nB, dB, bE, cva, cj, dy, bC, zA, B); #c1(PRKDC) c2(NP_008835) c3(DNA-dependent protein kinase catalytic subunit isoform 1) c4(168938) c5(168939, 168940, 168941, 168942, 168943, 168944) c6( ) c7(T, dA, fR, if, iW, jh, aA, bB, bS, et, ci, qN, V, q, ad, cuZ, eA, eW, av, Db, qK, oW, aT, h, dL, K, ae, eL, aa, d, iU, aW, Y, CT, r, aPf, alb, aF, as, Z, iK, bz, ck, eM, nB, dB, bE, cva, cj, dy, bC, zA, B); #c1(PRKG1) c2(NP_001091982) c3(cGMP-dependent protein kinase 1 isoform 1) c4(39135, 39136) c5(39137, 39138, 39139, 39140, 39141, 39142, 39143, 39144, 39145, 39146, 39147, 39148, 39149) c6( ) c7(bM, T, oe, e, bRZ, aw, aA, cz, jh, v, j, ci, aHc, eW, br, UE, AK, Ig, Bc, aT, FN, kf, K, bq, cvb, he, xa, af, na, eu, AT, s, aW, zb, aeV, aq, aF, S, pm, BG, bw, bRW, eK, ck, OG, ac, bTX, kg, iS, be, vF, IC, B); #c1(PRKG1) c2(NP_006249) c3(cGMP-dependent protein kinase 1 isoform 2) c4(163271, 163272, 163273) c5(163274, 163275, 163276, 163277, 163278, 163279) c6( ) c7(bM, T, oe, e, bRZ, aw, aA, cz, jh, v, j, ci, aHc, eW, br, UE, AK, Ig, Bc, aT, FN, kf, K, bq, cvb, he, xa, af, na, eu, AT, s, aW, zb, aeV, aq, aF, S, pm, BG, bw, bRW, eK, ck, OG, ac, bTX, kg, iS, be, vF, IC, B); #c1(PRKG1) c2(XP_005270029) c3(cGMP-dependent protein kinase 1 isoform X2) c4( ) c5(283038, 283039, 283040, 283041, 283042, 283043, 283044, 283045, 283046, 283047, 283048) c6( ) c7(bM, T, oe, e, bRZ, aw, aA, cz, jh, v, j, ci, aHc, eW, br, UE, AK, Ig, Bc, aT, FN, kf, K, bq, cvb, he, xa, af, na, eu, AT, s, aW, zb, aeV, aq, aF, S, pm, BG, bw, bRW, eK, ck, OG, ac, bTX, kg, iS, be, vF, IC, B); #c1(PRKG1) c2(XP_011538254) c3(cGMP-dependent protein kinase 1 isoform X1) c4(335856) c5(335857, 335858, 335859, 335860, 335861, 335862) c6( ) c7(bM, T, oe, e, bRZ, aw, aA, cz, jh, v, j, ci, aHc, eW, br, UE, AK, Ig, Bc, aT, FN, kf, K, bq, cvb, he, xa, af, na, eu, AT, s, aW, zb, aeV, aq, aF, S, pm, BG, bw, bRW, eK, ck, OG, ac, bTX, kg, iS, be, vF, IC, B); #c1(PRKG2) c2(NP_001269410) c3(cGMP-dependent protein kinase 2 isoform b) c4( ) c5(101595, 101596, 101597, 101598, 101599) c6( ) c7(nH, nD, dz, Hr, yR); #c1(PRKG2) c2(NP_001269414) c3(cGMP-dependent protein kinase 2 isoform e) c4(101600) c5(101601, 101602, 101603, 101604, 101605, 101606) c6( ) c7(nH, nD, dz, Hr, yR); #c1(PRKG2) c2(NP_006250) c3(cGMP-dependent protein kinase 2 isoform a) c4(163280, 163281) c5(163282, 163283, 163284, 163285, 163286, 163287, 163288, 163289, 163290, 163291, 163292) c6( ) c7(nH, nD, dz, Hr, yR); #c1(PRKRA) c2(NP_001132989) c3(interferon-inducible double-stranded RNA-dependent protein kinase activator A isoform 2) c4(52801) c5(52802, 52803, 52804, 52805, 52806, 52807, 52808) c6( ) c7(vE, aj, nA, V, eW, J, Wk, cvd, aU, K, bq, afu, kj, iE, ff, bYC, Az, bcD, akt, Io, en, g, t, cvc); #c1(PRKRA) c2(NP_001132990) c3(interferon-inducible double-stranded RNA-dependent protein kinase activator A isoform 3) c4( ) c5(52809, 52810, 52811, 52812, 52813) c6( ) c7(vE, aj, nA, V, eW, J, Wk, cvd, aU, K, bq, afu, kj, iE, ff, bYC, Az, bcD, akt, Io, en, g, t, cvc); #c1(PRKRA) c2(NP_003681) c3(interferon-inducible double-stranded RNA-dependent protein kinase activator A isoform 1) c4(140168, 140169, 140170) c5(140171, 140172, 140173, 140174, 140175, 140176, 140177) c6( ) c7(vE, aj, nA, V, eW, J, Wk, cvd, aU, K, bq, afu, kj, iE, ff, bYC, Az, bcD, akt, Io, en, g, t, cvc); #c1(PRKRIR) c2(NP_004696) c3(52 kDa represser of the inhibitor of the protein kinase) c4(148877, 148878) c5(148879, 148880, 148881, 148882, 148883, 148884, 148885, 148886, 148887, 148888, 148889, 148890) c6( ) c7(t, cd); #c1(PRKX) c2(NP_005035) c3(cAMP-dependent protein kinase catalytic subunit PRKX) c4(152319) c5(152320, 152321, 152322, 152323, 152324, 152325) c6( ) c7(Y, fr, iA); #c1(PRKX) c2(XP_005274618) c3(cAMP-dependent protein kinase catalytic subunit PRKX isoform X2) c4(285245) c5(285246, 285247, 285248, 285249, 285250, 285251) c6( ) c7(Y, fr, iA); #c1(PRL) c2(NP_000939) c3(prolactin precursor) c4(17570, 17571, 17572) c5(17573, 17574, 17575, 17576, 17577, 17578, 17579, 17580, 17581, 17582, 17583, 17584) c6( ) c7(G, T, acz, cL, ci, ip, Ef, ku, il, anV, K, qM, pk, blc, ye, zQ, cve, aW, vt, vs, g, cvf, zE, cm, vA, QF, m, hi, dD, Uc, IT, fN, n, bBS, ct, zP, JW, cd, Vs, cc, h, aAG, Dz, avP, aq, cox, zZ, op, hq, avN, cA, PL bo, hL, hR, HB, fL, nz, B, ul, bMD, DD, Dh, jx, cz, v, j, avO, cow, AO, V, q, UE, mj, HJ, nv, sl, aql, aT, aZd, hK, rz, ae, af, bA, apL, s, cvh, oV, aeS, bcD, r, bbs, cu, cl, t, bN, ck, ov, nM, sn, kP, ac, im, gT, bt, gO, pY, Oy, aZ, iW, uG, jh, OE, bS, eq, aVy, mC, ad, dP, cvg, oW, bdM, yh, bYY, vP, aeQ, qt, PE, vj, bBO, cr, eZ, Z, dr, OG, pE, oQ, y, aXu); #c1(PRLH) c2(NP_056977) c3(prolactin-releasing peptide precursor) c4(188301) c5(188302, 188303, 188304, 188305, 188306, 188307, 188308) c6(188309) c7(yo, v, K); #c1(PRLHR) c2(NP_004239) c3(prolactin-releasing peptide receptor) c4(144543) c5(144544, 144545, 144546, 144547, 144548, 144549, 144550, 144551, 144552) c6( ) c7(v, oe); #c1(PRLHR) c2(XP_011538000) c3(prolactin-releasing peptide receptor isoform X1) c4( ) c5(335562) c6( ) c7(v, oe); #c1(PRLR) c2(NP_001191243) c3(prolactin receptor isoform 6 precursor) c4(81188) c5(81189, 81190, 81191, 81192, 81193, 81194, 81195, 81196, 81197, 81198) c6( ) c7(T, IT, iW, oe, al, jh, ci, avO, zP, V, ad, ip, dP, il, jL, aT, rX, Dz, rz, ae, Yl, avg, zQ, aW, sp, aeU, eZ, aq, g, zZ, Hl, t, iK, bN, sn, iS, m, fL, alm, cvi, B); #c1(PRLR) c2(NP_001191244) c3(prolactin receptor isoform 2 precursor) c4(81199, 81200) c5(81201, 81202, 81203, 81204, 81205, 81206) c6( ) c7(T, IT, iW, oe, al, jh, ci, avO, zP, V, ad, ip, dP, il, jL, aT, rX, Dz, rz, ae, Yl, avg, zQ, aW, sp, aeU, eZ, aq, g, zZ, Hl, t, iK, bN, sn, iS, m, fL, alm, cvi, B); #c1(PRLR) c2(NP_001191245) c3(prolactin receptor isoform 3 precursor) c4(81207) c5(81208, 81209, 81210, 81211, 81212, 81213) c6( ) c7(T, IT, iW, oe, al, jh, ci, avO, zP, V, ad, ip, dP, il, jL, aT, rX, Dz, rz, ae, Yl, avg, zQ, aW, sp, aeU, eZ, aq, g, zZ, Hl, t, iK, bN, sn, iS, m, fL, alm, cvi, B); #c1(PRLR) c2(NP_001191246) c3(prolactin receptor isoform 4 precursor) c4( ) c5(81214, 81215, 81216, 81217, 81218, 81219, 81220, 81221, 81222, 81223, 81224, 81225) c6( ) c7(T, IT, iW, oe, al, jh, ci, avO, zP, V, ad, ip, dP, il, jL, aT, rX, Dz, rz, ae, Yl, avg, zQ, aW, sp, aeU, eZ, aq, g, zZ, Hl, t, iK, bN, sn, iS, m, fL, alm, cvi, B); #c1(PRLR) c2(NP_001191247) c3(prolactin receptor isoform 5 precursor) c4(81226, 81227) c5(81228, 81229, 81230, 81231, 81232, 81233, 81234, 81235, 81236, 81237, 81238, 81239, 81240, 81241, 81242, 81243, 81244, 81245, 81246, 81247, 81248, 81249, 81250, 81251, 81252, 81253, 81254, 81255, 81256, 81257, 81258, 81259, 81260, 81261, 81262, 81263, 81264) c6( ) c7(T, IT, iW, oe, al, jh, ci, avO, zP, V, ad, ip, dP, il, jL, aT, rX, Dz, rz, ae, Yl, avg, zQ, aW, sp, aeU, eZ, aq, g, zZ, Hl, t, iK, bN, sn, iS, m, fL, alm, cvi, B); #c1(PRLR) c2(XP_011512371) c3(prolactin receptor isoform X1) c4(303069, 303070, 303071, 303072, 303073, 303074, 303075) c5(303076, 303077, 303078, 303079, 303080, 303081, 303082, 303083, 303084, 303085, 303086) c6( ) c7(T, IT, iW, oe, al, jh, ci, avO, zP, V, ad, ip, dP, il, jL, aT, rX, Dz, rz, ae, Yl, avg, zQ, aW, sp, aeU, eZ, aq, g, zZ, Hl, t, iK, bN, sn, iS, m, fL, alm, cvi, B); #c1(PRM1) c2(NP_002752) c3(sperm protamine P1) c4(131708) c5( ) c6( ) c7(vH, V, hp, gU, ND); #c1(PRM2) c2(NP_001273285) c3(protamine-2 isoform 2) c4(104624) c5(104625, 104626, 104627, 104628, 104629, 104630) c6( ) c7(vH, pt, gU, pm, ND); #c1(PRM2) c2(NP_001273286) c3(protamine-2 isoform 3) c4( ) c5(104631, 104632, 104633, 104634, 104635) c6( ) c7(vH, pt, gU, pm, ND); #c1(PRM2) c2(NP_001273287) c3(protamine-2 isoform 4) c4( ) c5(104636) c6( ) c7(vH, pt, gU, pm, ND); #c1(PRM2) c2(NP_002753) c3(protamine-2 isoform 1) c4(131709) c5( ) c6( ) c7(vH, pt, gU, pm, ND); #c1(PRM3) c2(NP_067070) c3(protamine-3) c4(208811) c5(208812, 208813, 208814, 208815, 208816, 208817) c6( ) c7(A, gU, dA, iU, aW, ht, aT, dq, agm, ci, hu, f); #c1(PRMT1) c2(NP_001527) c3(protein arginine N-methyltransferase 1 isoform 1) c4(118609, 118610, 118611) c5(118612, 118613, 118614, 118615, 118616, 118617) c6( ) c7(bL, ck, T, bM, c, yw, Ip, aW, bE, eM, hL, aT, aU, bB, cl, bt, bz, X, ao); #c1(PRMT1) c2(NP_938074) c3(protein arginine N-methyltransferase 1 isoform 3) c4(259610) c5(259611, 259612, 259613, 259614, 259615, 259616) c6( ) c7(bL, ck, T, bM, c, yw, Ip, aW, bE, eM, hL, aT, aU, bB, cl, bt, bz, X, ao); #c1(PRMT1) c2(XP_005258901) c3(protein arginine N-methyltransferase 1 isoform X2) c4(275872, 275873) c5(275874, 275875, 275876, 275877, 275878, 275879, 275880, 275881, 275882, 275883, 275884, 275885, 275886, 275887, 275888, 275889, 275890, 275891, 275892, 275893, 275894, 275895, 275896, 275897, 275898, 275899, 275900, 275901) c6( ) c7(bL, ck, T, bM, c, yw, Ip, aW, bE, eM, hL, aT, aU, bB, cl, bt, bz, X, ao); #c1(PRMT2) c2(NP_001229793) c3(protein arginine N-methyltransferase 2 isoform 2) c4(85236) c5(85237, 85238, 85239, 85240, 85241, 85242) c6( ) c7(bM, Ip, aW, aT, aU, yA, f, xg); #c1(PRMT2) c2(NP_001229794) c3(protein arginine N-methyltransferase 2 isoform 3) c4(85243) c5(85244, 85245, 85246, 85247, 85248, 85249) c6( ) c7(bM, Ip, aW, aT, aU, yA, f, xg); #c1(PRMT2) c2(NP_001229795) c3(protein arginine N-methyltransferase 2 isoform 4) c4( ) c5(85250, 85251, 85252, 85253, 85254, 85255) c6( ) c7(bM, Ip, aW, aT, aU, yA, f, xg); #c1(PRMT2) c2(NP_001273606) c3(protein arginine N-methyltransferase 2 isoform 6) c4(105427, 105428) c5(105429, 105430, 105431, 105432, 105433, 105434) c6( ) c7(bM, Ip, aW, aT, aU, yA, f, xg); #c1(PRMT2) c2(XP_005261168) c3(protein arginine N-methyltransferase 2 isoform X1) c4(277250) c5(277251, 277252, 277253, 277254, 277255, 277256, 277257, 277258, 277259, 277260, 277261, 277262, 277263, 277264) c6( ) c7(bM, Ip, aW, aT, aU, yA, f, xg); #c1(PRMT2) c2(XP_006724061) c3(protein arginine N-methyltransferase 2 isoform X2) c4(295677) c5(295678, 295679, 295680, 295681, 295682, 295683) c6( ) c7(bM, Ip, aW, aT, aU, yA, f, xg); #c1(PRMT2) c2(XP_006724063) c3(protein arginine N-methyltransferase 2 isoform X3) c4(295684) c5(295685, 295686, 295687, 295688, 295689, 295690) c6( ) c7(bM, Ip, aW, aT, aU, yA, f, xg); #c1(PRMT3) c2(NP_001138638) c3(protein arginine N-methyltransferase 3 isoform 2) c4(57308, 57309) c5(57310, 57311, 57312, 57313, 57314, 57315, 57316, 57317, 57318, 57319, 57320) c6( ) c7(bM, k); #c1(PRMT3) c2(NP_005779) c3(protein arginine N-methyltransferase 3 isoform 1) c4(159267, 159268) c5(159269, 159270, 159271, 159272, 159273, 159274, 159275, 159276, 159277, 159278, 159279, 159280, 159281) c6( ) c7(bM, k); #c1(PRMT5) c2(NP_001034708) c3(protein arginine N-methyltransferase 5 isoform b) c4(32104) c5(32105, 32106, 32107, 32108, 32109, 32110, 32111) c6( ) c7(ck, bM, T, iu, d, bP, zl, wu, iW, jh, cj, aA, rO, aF, eA, g, bu, as, wm, bz, cd); #c1(PRMT5) c2(NP_001269882) c3(protein arginine N-methyltransferase 5 isoform c) c4(103016) c5(103017, 103018, 103019, 103020, 103021, 103022) c6( ) c7(ck, bM, T, iu, d, bP, zl, wu, iW, jh, cj, aA, rO, aF, eA, g, bu, as, wm, bz, cd); #c1(PRMT5) c2(NP_001269883) c3(protein arginine N-methyltransferase 5 isoform d) c4( ) c5(103023, 103024, 103025, 103026, 103027) c6( ) c7(ck, bM, T, iu, d, bP, zl, wu, iW, jh, cj, aA, rO, aF, eA, g, bu, as, wm, bz, cd); #c1(PRMT5) c2(NP_001269885) c3(protein arginine N-methyltransferase 5 isoform f) c4(103028) c5(103029, 103030, 103031, 103032, 103033, 103034) c6( ) c7(ck, bM, T, iu, d, bP, zl, wu, iW, jh, cj, aA, rO, aF, eA, g, bu, as, wm, bz, cd); #c1(PRMT5) c2(NP_006100) c3(protein arginine N-methyltransferase 5 isoform a) c4(161886, 161887) c5(161888, 161889, 161890, 161891, 161892, 161893) c6( ) c7(ck, bM, T, iu, d, bP, zl, wu, iW, jh, cj, aA, rO, aF, eA, g, bu, as, wm, bz, cd); #c1(PRMT8) c2(NP_001243465) c3(protein arginine N-methyltransferase 8 isoform 2) c4(90880) c5(90881, 90882, 90883, 90884, 90885, 90886) c6( ) c7(WY, aaE, j, c); #c1(PRMT8) c2(NP_062828) c3(protein arginine N-methyltransferase 8 isoform 1) c4(202172) c5(202173, 202174, 202175, 202176, 202177, 202178) c6( ) c7(WY, aaE, j, c); #c1(PRND) c2(NP_036541) c3(prion-like protein doppel preproprotein) c4(174300) c5(174301, 174302, 174303, 174304, 174305, 174306) c6( ) c7(dt, jV, hb, eH, as, eF, af, dS); #c1(PRNP) c2(NP_001073592) c3(major prion protein preproprotein) c4(36047, 36048, 36049, 36050) c5(36051, 36052, 36053, 36054, 36055, 36056, 36057, 36058, 36059, 36060, 36061, 36062, 36063, 36064, 36065, 36066, 36067, 36068, 36069, 36070, 36071, 36072, 36073, 36074, 36075, 36076, 36077, 36078, 36079, 36080) c6( ) c7(bM, cao, T, fR, cvm, ea, agU, I, Jd, ci, aR, jY, ku, cvn, aE, K, H, bMI, aW, ih, eF, cm, eY, bb, jV, Kv, ki, U, nw, R, cvj, dt, dD, aiK, jX, aqL, rc, aJr, Sw, Hx, h, yZ, ey, hi, cvk, aPZ, kp, kk, alj, acM, Fr, ky, ql, agl, bom, Lp, at, abd, L, ka, cbW, Nt, bBX, aA, GC, v, alQ, bX, il, yU, V, q, eA, PW, aaF, yw, hb, aT, cy, bK, an, af, eu, Ft, ak, abs, cvs, Y, r, Io, aaO, Mu, nC, f, wA, dS, ov, bdn, axS, rR, ac, c, kB, cvr, AG, jQ, aen, ao, kh, aal, ha, dG, uu, fu, eq, bKZ, vN, ad, hX, Dq, ds, cvl, abg, oj, cvq, ama, acQ, d, eH, rU, gl, EH, aF, EZ, cvp, dr, dR, kq, MJ, fh, GW); #c1(PRNP) c2(NP_001258490) c3(alternative prion protein isoform AltPrp) c4( ) c5(96082) c6( ) c7(bM, cvo, T, fR, cvm, ea, agU, I, Jd, ci, aR, jY, ku, cvn, aE, K, H, bMI, aW, ih, eF, cm, eY, bb, jV, Kv, ki, U, nw, R, cvj, dt, dD, aiK, jX, aqL, rc, aJr, Sw, Hx, h, yZ, ey, bl, cvk, aPZ, kp, kk, alj, acM, Fr, ky, ql, agl, bom, Lp, at, abd, L, ka, cbW, Nt, bBX, aA, GC, v, alQ, bX, il, yU, V, q, eA, PW, aaF, yw, hb, aT, cy, bK, an, af, eu, Ft, ak, abs, cvs, Y, r, Io, aaO, Mu, nC, f, wA, dS, ov, bdn, axS, rR, ac, c, kB, cvr, AG, jQ, aen, ao, kh, aal, ha, dG, uu, fu, eq, bKZ, vN, ad, hX, Dq, ds, cvl, abg, oj, cvg, ama, acQ, d, eH, rU, gl, EH, aF, EZ, cvp, dr, dR, kq, MJ, fh, GW); #c1(PROC) c2(NP_000303) c3(vitamin K-dependent protein C preproprotein) c4( ) c5(6724, 6725, 6726, 6727, 6728, 6729, 6730, 6731, 6732, 6733, 6734, 6735, 6736, 6737, 6738, 6739, 6740, 6741, 6742, 6743, 6744, 6745, 6746, 6747, 6748, 6749, 6750) c6(6751, 6752, 6753, 6754, 6755, 6756) c7(uB, T, aC, Fj, pf, YU, if, e, al, Yb, bB, ame, ci, YD, aE, pX, Yk, iv, gs, K, bgF, hu, eL, cvu, Qe, Ys, YL, yo, aW, LZ, cuE, YG, Yp, NR, g, vt, zE, aaD, uC, eF, bw, iP, y, eM, nB, AM, wE, cj, cvw, iS, YP, m, YK, P, dD, Qj, ht, NT, fN, n, aj, fr, qN, eh, eW, ft, no, jz, Yc, It, By, dL, aWY, is, he, KV, YT, pi, YI, YO, A, MD, sq, iw, ge, fe, aq, cM, Yr, hg, Ye, YI, ar, iU, YE, bP, dB, se, hL, bm, pg, YH, it, B, DV, aA, cR, cz, wo, j, C, AO, q, J, Yh, YA, er, eJ, Yn, aT, yu, ae, jf, Uf, Yw, s, vT, Ya, Y, NE, r, Io, en, cl, t, YW, Yq, Dy, ac, VJ, nM, Li, QG, gX, LS, hS, cvv, Mb, sY, hi, Yu, df, YM, ml, jh, eq, Fc, iJ, ad, hX, av, hd, NS, Yn, qV, IC, ji, YQ, fh, iL, Yi, WW, MG, Yj, BO, qt, Fm, ff, xs, eH, Kf, hp, aF, iV, bz, dr, YR, bF, gk, bE, ag, AR, pP, aGg, MG, hE, X, jr); #c1(PROC) c2(XP_005263772) c3(vitamin K-dependent protein C isoform X1) c4(278520, 278521, 278522) c5(278523, 278524, 278525) c6( ) c7(uB, T, aC, Fj, pf, YU, if, e, al, Yb, bB, ame, ci, YD, aE, pX, Yk, iv, gs, K, bgF, hu, eL, cvu, Qe, Ys, YL, yo, aW, LZ, cuE, YG, Yp, NR, g, cvt, zE, aaD, uC, eF, bw, iP, y, eM, nB, AM, wE, cj, cvw, iS, YP, m, YK, P, dD, Qj, ht, NT, fN, n, aj, fr, qN, eh, eW, ft, no, jz, Yc, It, By, dL, aWY, is, he, KV, YT, pI, YI, YO, A, MD, sq, iw, ge, fe, aq, cM, Yr, hq, Ye, YI, ar, iO, YE, bP, dB, se, hL, bm, pg, YH, it, B, DV, aA, cR, cz, wo, j, C, AO, q, J, Yh, YA, er, eJ, Yn, aT, yu, ae, jf, Uf, Yw, s, vT, Ya, Y, NE, r, Io, en, cl, t, YW, Yq, Dy, ac, VJ, nM, Li, QG, gX, LS, hS, cvv, Mb, sY, hl, Yu, df, YM, ml, jh, eq, Fc, iJ, ad, hX, av, hd, NS, Yo, gV, IC, ji, YQ, fh, iL, Yi, WW, MG, Yj, BO, qt, Fm, ff, xs, eH, Kf, hp, aF, iV, bz, dr, YR, bF, gk, bE, ag, AR, pP, aGg, MC, hE, X, jr); #c1(PROC) c2(XP_005263773) c3(vitamin K-dependent protein C isoform X2) c4(278526, 278527, 278528) c5(278529, 278530, 278531, 278532, 278533, 278534, 278535, 278536, 278537, 278538, 278539, 278540, 278541, 278542, 278543, 278544, 278545, 278546, 278547, 278548, 278549, 278550, 278551, 278552) c6(278553, 278554, 278555, 278556, 278557, 278558) c7(uB, T, aC, Fj, pf, YU, if, e, al, Yb, bB, ame, ci, YD, aE, pX, Yk, iv, gs, K, bgF, hu, eL, cvu, Qe, Ys, YL, yo, aW, LZ, cuE, YG, Yp, NR, g, cvt, zE, aaD, uC, eF, bw, iP, y, eM, nB, AM, wE, cj, cvw, iS, YP, m, YK, P, dD, Qj, ht, NT, fN, n, aj, fr, qN, eh, eW, ft, no, jz, Yc, It, By, dL, aWY, is, he, KV, YT, pi, YI, YO, A, MD, sq, iw, ge, fe, aq, cM, Yr, hq, Ye, YI, ar, iO, YE, bP, dB, se, hL, bm, pg, YH, it, B, DV, aA, cR, cz, wo, j, C, AO, q, J, Yh, YA, er, eJ, Yn, aT, yu, ae, jf, Uf, Yw, s, vT, Ya, Y, NE, r, Io, en, cl, t, YW, Yq, Dy, ac, VJ, nM, Li, QG, gX, LS, hS, cvv, Mb, sY, hl, Yu, df, YM, ml, jh, eq, Fc, iJ, ad, hX, av, hd, NS, Yo, qV, IC, ji, YQ, fh, iL, Yi, WW, MG, Yj, BO, qt, Fm, ff, xs, eH, Kf, hp, aF, iV, bz, dr, YR, bF, gk, bE, ag, AR, pP, aGg, MG, hE, X, jr); #c1(PROCR) c2(NP_006395) c3(endothelial protein C receptor precursor) c4(164670) c5(164671, 164672, 164673, 164674, 164675, 164676, 164677, 164678, 164679, 164680) c6( ) c7(bL, T, jv, sQ, e, aw, oR, v, j, C, uE, eh, mC, q, rc, ib, qh, dV, kH, aT, h, wb, Vb, nO, aW, eZ, r, bpA, t, bz, aHQ, dr, ac, ig, aq, m, fL, pw, aHP, B); #c1(PRODH) c2(XP_011528580) c3(proline dehydrogenase I, mitochondrial isoform X1) c4(323752) c5( ) c6( ) c7(T, iH, ha, aNN, bB, fr, nA, agY, agd, bK, K, he, rL, aQp, eZ, jh, cvx, bN, es, eM, iA, bE, sv, hh); #c1(PRODH) c2(XP_011528581) c3(proline dehydrogenase I, mitochondrial isoform X2) c4( ) c5(323753, 323754, 323755, 323756, 323757, 323758) c6( ) c7(T, iH, ha, aNN, bB, fr, nA, agY, agd, bK, K, he, rL, aQp, eZ, jb, cvx, bN, es, eM, iA, bE, sv, hh); #c1(PROK2) c2(NP_001119600) c3(prokineticin-2 isoform a precursor) c4(44275) c5(44276, 44277, 44278, 44279, 44280, 44281) c6( ) c7(aRN, acz, cvy, bO, aj, cd, yn, UE, Jb, tT, bK, avP, bUf, cvz, fe, aMP, nM, cA, am, aS, UF, ra); #c1(PROK2) c2(NP_068754) c3(prokineticin-2 isoform b precursor) c4(210177) c5(210178, 210179, 210180, 210181, 210182, 210183) c6( ) c7(aRN, acz, cvy, bO, aj, cd, yn, UE, Jb, tT, bK, avP, bUf, cvz, fe, aMP, nM, cA, aqm, aS, UF, ra); #c1(PROKR1) c2(NP_620414) c3(prokineticin receptor 1) c4(237607) c5(237608, 237609, 237610, 237611, 237612, 237613, 237614, 237615, 237616, 237617) c6( ) c7(gx, T, sn); #c1(PROKR2) c2(NP_658986) c3(prokineticin receptor 2) c4(239664) c5(239665, 239666, 239667, 239668, 239669, 239670, 239671, 239672, 239673, 239674) c6( ) c7(gx, T, aRN, acz, bO, Vs, yn, UE, tT, cU, bK, xa, yi, avP, bUf, aVQ, cvB, aeS, sn, cA, cvA, aqm, UF); #c1(PROL1) c2(NP_067048) c3(proline-rich protein 1 isoform 1 precursor) c4(208720) c5(208721, 208722, 208723, 208724, 208725, 208726, 208727, 208728) c6(208729, 208730) c7(T, By, aj, bz, it, J); #c1(PROM1) c2(NP_001139319) c3(prominin-1 isoform 2 precursor) c4(59163, 59164, 59165) c5(59166, 59167, 59168, 59169, 59170, 59171, 59172, 59173, 59174, 59175) c6( ) c7(ID, T, EQ, bO, bB, fd, gf, ci, aR, RL, x, bv, aE, dV, K, cvG, cp, ly, yo, Jl, aW, uY, Qm, g, cvD, eF, cm, bw, Qt, cvG, nB, eM, iA, wB, cj, nw, m, ym, iu, wu, sw, zX, Dr, aw, NT, n, aj, fr, Ea, eh, eW, b, ft, hw, jz, gd, bkP, By, hB, cY, PX, aq, kp, mo, cM, Ix, W, bP, asl, dB, Qu, hL, B, cvE, dA, oe, nx, aA, j, q, er, qH, eA, azn, nv, aT, ae, jf, s, Qr, nO, oV, Y, ev, iU, r, en, cl, t, nC, ck, cT, kP, c, Dy, ac, np, bt, rA, VB, LS, Mb, jN, hF, iJ, ad, hX, Jm, iC, hd, py, Sr, arV, io, wm, fb, d, IR, ue, cW, ff, xs, eH, eZ, aF, iR, bz, cvF, es, bF, nb, bE, X, BA); #c1(PROM1) c2(XP_005248253) c3(prominin-1 isoform X5) c4( ) c5(268280, 268281, 268282, 268283, 268284, 268285, 268286) c6( ) c7(ID, T, EQ, bO, bB, fd, gf, ci, aR, RL, x, bv, aE, dV, K, cvG, cp, ly, yo, Jl, aW, uY, Qm, g, cvD, eF, cm, bw, Qt, cvG, nB, eM, iA, wB, cj, nw, m, ym, iu, wu, sw, zX, Or, aw, NT, n, aj, fr, Ea, eh, eW, b, ft, hw, jz, gd, bkP, By, hB, cY, PX, aq, kp, mo, cM, Ix, W, bP, asl, dB, Qu, hL, B, cvE, dA, oe, nx, aA, j, q, er, qH, eA, azn, nv, aT, ae, jf, s, Qr, nO, oV, Y, ev, iU, r, en, cl, t, nC, ck, cT, kP, c, Dy, ac, np, bt, rA, VB, LS, Mb, jN, hF, iJ, ad, hX, Jm, iC, hd, py, Sr, arV, in, wm, fb, d, IR, ue, cW, ff, xs, eH, eZ, aF, iR, bz, cvF, es, bF, nb, bE, X, BA); #c1(PROM1) c2(XP_011512199) c3(prominin-1 isoform X1) c4(302747) c5(302748, 302749, 302750, 302751, 302752, 302753, 302754, 302755, 302756, 302757, 302758, 302759, 302760, 302761, 302762) c6( ) c7(ID, T, EQ, bO, bB, fd, gf, ci, aR, RL, x, bv, aE, dV, K, cvG, cp, Iy, yn, Jl, aW, uY, Qm, g, cvD, eF, cm, bw, Qt, cvG, nB, eM, iA, wB, cj, nw, m, ym, iu, wu, sw, zX, Or, aw, NT, n, aj, fr, Ea, eh, eW, b, ft, hw, jz, gd, bkP, By, hB, cY, PX, aq, kp, mo, cM, Ix, W, bP, asl, dB, Qu, hL, B, cvE, dA, oe, nx, aA, j, g, er, qH, eA, azn, nv, aT, ae, jf, s, Qr, nO, oV, Y, ev, iU, r, en, cl, t, nC, ck, cT, kP, c, Dy, ac, np, bt, rA, VB, LS, Mb, jN, hF, iJ, ad, hX, Jm, iC, hd, py, Sr, arV, io, wm, fb, d, IR, ue, cW, ff, xs, eH, eZ, aF, iR, bz, cvF, es, bF, nb, bE, X, BA); #c1(PROM1) c2(XP_011512201) c3(prominin-1 isoform X7) c4(302763, 302764) c5(302765, 302766, 302767, 302768, 302769, 302770) c6( ) c7(ID, T, EQ, bO, bB, fd, gf, ci, aR, RL, x, bv, aE, dV, K, cvG, cp, Iy, yo, Jl, aW, uY, Qm, g, cvD, eF, cm, bw, Qt, cvG, nB, eM, iA, wB, cj, nw, m, ym, iu, wu, sw, zX, Or, aw, NT, n, aj, fr, Ea, eh, eW, b, ft, hw, jz, gd, bkP, By, hB, cY, PX, aq, kp, mo, cM, Ix, W, bP, asl, dB, Qu, hL, B, cvE, dA, oe, nx, aA, j, q, er, qH, eA, azn, nv, aT, ae, jf, s, Qr, nO, oV, Y, ev, iU, r, en, cl, t, nC, ck, cT, kP, c, Dy, ac, np, bt, rA, VB, LS, Mb, jN, hF, iJ, ad, hX, Jm, iC, hd, py, Sr, arV, io, wm, fb, d, IR, ue, cW, ff, xs, eH, eZ, aF, iR, bz, cvF, es, bF, nb, bE, X, BA); #c1(PROM1) c2(XP_011512202) c3(prominin-1 isoform X2) c4(302771) c5(302772, 302773, 302774, 302775, 302776, 302777) c6( ) c7(ID, T, EQ, bO, bB, fd, gf, ci, aR, RL, x, bv, aE, dV, K, cvG, cp, Iy, yo, Jl, aW, uY, Qm, g, cvD, eF, cm, bw, Qt, cvG, nB, eM, iA, wB, cj, nw, m, ym, iu, wu, sw, zX, Or, aw, NT, n, aj, fr, Ea, eh, eW, b, ft, hw, jz, gd, bkP, By, hB, cY, PX, aq, kp, mo, cM, Ix, W, bP, asl, dB, Qu, hL, B, cvE, dA, oe, nx, aA, j, q, er, qH, eA, azn, nv, aT, ae, jf, s, Qr, nO, oV, Y, ev, iU, r, en, cl, t, nC, ck, cT, kP, c, Dy, ac, np, bt, rA, VB, LS, Mb, jN, hF, iJ, ad, hX, Jm, iC, hd, py, Sr, arV, in, wm, fb, d, IR, ue, cW, ff, xs, eH, eZ, aF, iR, bz, cvF, es, bF, nb, bE, X, BA); #c1(PROM1) c2(XP_011512204) c3(prominin-1 isoform X3) c4(302778) c5(302779, 302780, 302781, 302782, 302783, 302784) c6( ) c7(ID, T, EQ, bO, bB, fd, gf, ci, aR, RL, x, bv, aE, dV, K, cvG, cp, ly, ye, Jl, aW, uY, Qm, g, cvD, eF, cm, bw, Qt, cvG, nB, eM, iA, wB, cj, nw, m, ym, iu, wu, sw, zX, Or, aw, NT, n, aj, fr, Ea, eh, eW, b, ft, hw, jz, gd, bkP, By, hB, cY, PX, aq, kp, me, cM, Ix, W, bP, asl, dB, Qu, hL, B, cvE, dA, oe, nx, aA, j, q, er, qH, eA, azn, nv, aT, ae, jf, s, Qr, nO, oV, Y, ev, iU, r, en, cl, t, nC, ck, cT, kP, c, Dy, ac, np, bt, rA, VB, LS, Mb, jN, hF, iJ, ad, hX, Jm, iC, hd, py, Sr, arV, io, wm, fb, d, IR, ue, cW, ff, xs, eH, eZ, aF, iR, bz, cvE, es, bF, nb, bE, X, BA); #c1(PROM2) c2(NP_001159449) c3(prominin-2 precursor) c4(64099, 64100) c5(64101, 64102, 64103, 64104, 64105, 64106, 64107, 64108, 64109, 64110, 64111, 64112, 64113, 64114, 64115, 64116, 64117, 64118, 64119, 64120, 64121, 64122, 64123, 64124, 64125, 64126, 64127, 64128) c6(64129, 64130, 64131, 64132, 64133, 64134, 64135, 64136) c7(Uc, ae, fr, aR, ad); #c1(PROP1) c2(NP_006252) c3(homeobox protein prophet of Pit-1) c4(163300) c5(163301, 163302, 163303, 163304, 163305, 163306) c6( ) c7(yo, bB J, s, cvH, Dr, aX, acz, Rj, auC, hR, v, UE, bBS, ml, UF, OH, xb, bHF, yn, biN); #c1(PROS1) c2(NP_000304) c3(vitamin K-dependent protein S preproprotein) c4(6757) c5(6758, 6759, 6760, 6761, 6762, 6763, 6764, 6765) c6( ) c7(P, gh, sY, T, dD, dA, fR, WA, ea, rQ, e, ha, we, vr, n, Fb, j, ci, eq, eW, ad, bqs, afm, cdJ, cvJ, aT, ey, ji, ae, Ub, aW, sq, cr, fQ, YG, g, t, uC, cvl, hq, Cq, pu, sn, GU, Jr, ac, aq, cvw, wx, m, LS); #c1(PROSER1) c2(NP_079414) c3(proline and serine-rich protein 1) c4(218035) c5(218036, 218037, 218038, 218039, 218040, 218041) c6( ) c7(iV); #c1(PROSER1) c2(XP_005266602) c3(proline and serine-rich protein 1 isoform X1) c4(280246) c5(280247, 280248, 280249, 280250, 280251, 280252) c6( ) c7(iV); #c1(PROX1) c2(XP_011508075) c3(prospero homeobox protein 1 isoform X2) c4(298537, 298538) c5( ) c6( ) c7(bL, T, aC, dA, ht, al, it, bB, n, v, ci, pz, q, eA, Bl, jz, aE, acA, aoh, aT, Vv, K, hu, Qe, qw, s, aW, ff, r, aq, yq, en, cm, gk, ac, bE, Vy, ym, bD, cB, B); #c1(PROX1) c2(XP_011508076) c3(prospero homeobox protein 1 isoform X1) c4(298539, 298540) c5(298541, 298542, 298543, 298544, 298545, 298546, 298547, 298548, 298549, 298550, 298551, 298552, 298553, 298554, 298555, 298556, 298557, 298558, 298559, 298560, 298561, 298562, 298563, 298564, 298565, 298566, 298567, 298568, 298569, 298570, 298571, 298572, 298573) c6( ) c7(bL, T, aC, dA, ht, al, it, bB, n, v, ci, pz, q, eA, Bl, jz, aE, acA, aoh, aT, Vv, K, hu, Qe, qw, s, aW, ff, r, aq, yq, en, cm, gk, ac, bE, Vy, ym, bD, cB, B); #c1(PROZ) c2(NP_001243063) c3(vitamin K-dependent protein Z isoform 1 precursor) c4( ) c5(89701, 89702, 89703, 89704, 89705, 89706, 89707) c6( ) c7(jv, sn, ac, uC, eR, aq, e, aw, cy, cvK, dy, uF, hH, aaD, el, eu, eK); #c1(PROZ) c2(NP_003882) c3(vitamin K-dependent protein Z isoform 2 precursor) c4(141791) c5(141792, 141793, 141794, 141795, 141796, 141797, 141798, 141799) c6( ) c7(jv, sn, ac, uC, eR, aq, e, aw, cy, cvK, dy, uF, hH, aaD, el, eu, eK); #c1(PROZ) c2(XP_011535827) c3(vitamin K-dependent protein Z isoform X1) c4(333038) c5(333039) c6( ) c7(jv, sn, ac, uC, eR, aq, e, aw, cy, cvK, dy, uF, hH, aaD, el, eu, eK); #c1(PRPF19) c2(NP_055317) c3(pre-mRNA-processing factor 19) c4(180409) c5(180410, 180411, 180412, 180413, 180414, 180415) c6( ) c7(bM, wr, aW, aA, aT, K); #c1(PRPF3) c2(XP_011508434) c3(U4/06 small nuclear ribonucleoprotein Prp3 isoform X5) c4(299144) c5(299145, 299146, 299147, 299148, 299149) c6( ) c7(xX, IR, cvL, aW, aT, nw, nC); #c1(PRPF31) c2(XP_006726118) c3(U4/U6 small nuclear ribonucleoprotein PrP31 isoform X1) c4(297079, 297080, 297081, 297082, 297083, 297084) c5(297085, 297086, 297087, 297088, 297089, 297090, 297091, 297092, 297093, 297094, 297095, 297096, 297097, 297098, 297099, 297100, 297101, 297102, 297103, 297104, 297105, 297106, 297107, 297108, 297109, 297110, 297111, 297112, 297113, 297114, 297115, 297116, 297117, 297118, 297119, 297120) c6( ) c7(xX, IR, nb, W, alC, aW, ff, n, nw, nC, en, QK, cvM, dr, de); #c1(PRPF388) c2(XP_011539987) c3(pre-mRNA-splicing factor 388 isoform X2) c4( ) c5(338306) c6( ) c7(T, dB, aW, Jl, awa, AH, awb, aT, aA, aF, ci, K, g, B); #c1(PRPF388) c2(XP_011539990) c3(pre-mRNA- splicing factor 388 isoform X4) c4( ) c5(338307, 338308, 338309, 338310, 338311, 338312) c6( ) c7(T, dB, aW, Jl, awa, AH, awb, aT, aA, aF, ci, K, g, B); #c1(PRPF4) c2(NP_001231855) c3(U4/U6 small nuclear ribonucleoprotein Prp4 isoform 2) c4(87571) c5(87572, 87573, 87574, 87575, 87576, 87577) c6( ) c7(T, xX, m, t, IB, B); #c1(PRPF4) c2(NP_004688) c3(U4/U6 small nuclear ribonucleoprotein Prp4 isoform 1) c4(148844) c5(148845, 148846, 148847, 148848, 148849, 148850) c6( ) c7(T, xX, m, t, IB, B); #c1(PRPF40A) c2(NP_060362) c3(pre-mRNA-processing factor 40 homolog A) c4(195579, 195580) c5(195581, 195582, 195583, 195584, 195585, 195586, 195587, 195588, 195589, 195590, 195591) c6( ) c7(Qi, rR, bE, bB, be, aR); #c1(PRPF40A) c2(XP_005246733) c3(pre-mRNA-processing factor 40 homolog A isoform X1) c4(267397) c5(267398) c6( ) c7(Qi, rR, bE, bB, be, aR); #c1(PRPF40A) c2(XP_005246734) c3(pre-mRNA-processing factor 40 homolog A isoform X4) c4(267399) c5(267400, 267401, 267402, 267403, 267404, 267405) c6( ) c7(Qi, rR, bE, bB, be, aR); #c1(PRPF40A) c2(XP_005246735) c3(pre-mRNA-processing factor 40 homolog A isoform X6) c4(267406) c5(267407, 267408, 267409, 267410, 267411, 267412) c6( ) c7(Qi, rR, bE, bB, be, aR); #c1(PRPF40A) c2(XP_011509748) c3(pre-mRNA-processing factor 40 homolog A isoform X2) c4( ) c5(300306, 300307, 300308, 300309, 300310, 300311) c6( ) c7(Qi, rR, bE, bB, be, aR); #c1(PRPF4B) c2(NP_003904) c3(serine/threonine-protein kinase PRP4 homolog) c4(142025, 142026) c5(142027, 142028, 142029, 142030, 142031, 142032, 142033, 142034, 142035, 142036, 142037, 142038, 142039, 142040, 142041, 142042) c6( ) c7(T, aT, aA, aF, bWB, ci, m, t, B); #c1(PRPF6) c2(NP_036601) c3(pre-mRNA-processing factor 6) c4(174723, 174724) c5(174725, 174726, 174727, 174728, 174729, 174730, 174731, 174732, 174733, 174734, 174735, 174736) c6( ) c7(T, jh, bB, mS, bgR, cvN, cc, mW, oj, bK, K, mY, mV, awL, mU, xX, axu, xs, nC, kC, mZ, dr, mX, Qi, akQ, bE, mx, rx, XO, bgW, mT); #c1(PRPF8) c2(NP_006436) c3(pre-mRNA-processing-splicing factor 8) c4(165211, 165212) c5(165213, 165214, 165215, 165216, 165217, 165218, 165219, 165220, 165221, 165222, 165223, 165224) c6( ) c7(xX, IR, h, aVK, nC, ad, cvO); #c1(PRPH) c2(NP_006253) c3(peripherin) c4(163307) c5(163308, 163309, 163310, 163311, 163312, 163313) c6( ) c7(bGg, bjZ, nx, Vd, fu, PJ, Sr, K, aqX, bU, db, xX, IR, nk, cm, nC, amf, W, nb, c, cvP, Be, nw, OL); #c1(PRPH2) c2(NP_000313) c3(peripherin-2) c4(6963) c5(6964, 6965, 6966, 6967, 6968, 6969) c6( ) c7(bGg, bjZ, nx, cvQ, aeu, cap, Nh, Sr, aqX, db, cvR, xX, IR, cvS, nk, nC, Uk, amf, W, nb, bnP, cvP, uJ, nw, OL, GF, de); #c1(PRPS1) c2(NP_002755) c3(ribose-phosphate pyrophosphokinase 1 isoform 1) c4(131710, 131711, 131712, 131713) c5(131714, 131715, 131716, 131717, 131718, 131719, 131720, 131721, 131722, 131723, 131724, 131725, 131726, 131727, 131728, 131729, 131730, 131731, 131732, 131733, 131734, 131735, 131736, 131737, 131738, 131739, 131740, 131741) c6( ) c7(x, axa, cZ, T, d, bU, cvV, cvW, cvT, aqJ, mG, FV, bhi, bCo, vd, k, bX, dd, as, cvU, Bh); #c1(PRPSIL1) c2(NP_787082) c3(ribose-phosphate pyrophosphokinase 3) c4(252090) c5(252091, 252092, 252093, 252094, 252095, 252096) c6( ) c7(bL, cZ, bU, bCo, mG, FV, bhi, EQ, vd, bX, dd, Bh, cd); #c1(PRPS2) c2(NP_001034180) c3(ribose-phosphate pyrophosphokinase 2 isoform 1) c4(31574) c5(31575, 31576, 31577, 31578, 31579, 31580) c6( ) c7(T); #c1(PRPS2) c2(NP_002756) c3(ribose-phosphate pyrophosphokinase 2 isoform 2) c4(131742) c5(131743, 131744, 131745, 131746, 131747, 131748) c6( ) c7(T); #c1(PRPSAP1) c2(NP_002757) c3(phosphoribosyl pyrophosphate synthase-associated protein 1) c4(131749, 131750) c5(131751, 131752, 131753, 131754, 131755, 131756, 131757) c6( ) c7(nH); #c1(PRPSAP1) c2(XP_011523336) c3(phosphoribosyl pyrophosphate synthase-associated protein 1 isoform X1) c4( ) c5(317872, 317873, 317874, 317875, 317876) c6( ) c7(nH); #c1(PRPSAP2) c2(NP_001230865) c3(phosphoribosyl pyrophosphate synthase-associated protein 2 isoform 2) c4(86867, 86868) c5(86869, 86870, 86871, 86872, 86873, 86874, 86875, 86876, 86877, 86878, 86879) c6( ) c7(nH); #c1(PRPSAP2) c2(NP_001230869) c3(phosphoribosyl pyrophosphate synthase-associated protein 2 isoform 3) c4(86880) c5(86881, 86882, 86883, 86884, 86885, 86886, 86887, 86888, 86889, 86890, 86891, 86892, 86893, 86894, 86895, 86896, 86897, 86898, 86899, 86900) c6( ) c7(nH); #c1(PRPSAP2) c2(XP_005256782) c3(phosphoribosyl pyrophosphate synthase-associated protein 2 isoform X1) c4(274487, 274488, 274489, 274490, 274491, 274492, 274493) c5(274494, 274495, 274496, 274497, 274498, 274499, 274500, 274501, 274502, 274503, 274504, 274505) c6( ) c7(nH); #c1(PRPSAP2) c2(XP_005256786) c3(phosphoribosyl pyrophosphate synthase-associated protein 2 isoform X2) c4( ) c5(274506, 274507, 274508, 274509, 274510) c6( ) c7(nH); #c1(PRPSAP2) c2(XP_011522262) c3(phosphoribosyl pyrophosphate synthase-associated protein 2 isoform X3) c4(316914) c5(316915, 316916, 316917, 316918, 316919, 316920, 316921, 316922, 316923, 316924, 316925, 316926, 316927, 316928, 316929, 316930, 316931, 316932, 316933, 316934, 316935, 316936, 316937, 316938, 316939, 316940, 316941, 316942, 316943, 316944) c6( ) c7(nH); #c1(PRR11) c2(NP_060774) c3(proline-rich protein 11) c4(197719) c5(197720, 197721, 197722, 197723, 197724, 197725) c6( ) c7(bz); #c1(PRR13) c2(NP_001005354) c3(proline-rich protein 3 isoform 2) c4(21446, 21447) c5( ) c6( ) c7(eM, iu, g); #c1(PRR13) c2(NP_060927) c3(proline-rich protein 13 isoform 1) c4(198728) c5(198729, 198730, 198731, 198732, 198733, 198734, 198735, 198736, 198737, 198738, 198739, 198740, 198741, 198742, 198743, 198744, 198745, 198746, 198747, 198748) c6( ) c7(eM, iu, g); #c1(PRR15) c2(XP_011513501) c3(proline-rich protein 15 isoform X1) c4(305789, 305790) c5(305791, 305792, 305793, 305794, 305795, 305796, 305797, 305798, 305799, 305800, 305801, 305802) c6( ) c7(aw, gX, r, gZ, q, Qe); #c1(PRR16) c2(NP_001287712) c3(protein Larger isoform 1) c4(112613, 112614) c5(112615, 112616, 112617, 112618, 112619, 112620, 112621, 112622) c6( ) c7(fq); #c1(PRR16) c2(NP_057728) c3(protein Larger isoform 2) c4(192541, 192542) c5(192543, 192544, 192545, 192546, 192547, 192548) c6( ) c7(fq); #c1(PRR16) c2(XP_011541755) c3(protein Larger isoform X1) c4( ) c5(340353) c6( ) c7(fq); #c1(PRR3) c2(NP_001070965) c3(proline-rich protein 3 isoform b) c4(35093) c5(35094, 35095, 35096, 35097, 35098, 35099, 35100, 35101, 35102, 35103, 35104, 35105, 35106, 35107, 35108, 35109, 35110, 35111, 35112, 35113, 35114, 35115, 35116, 35117, 35118) c6( ) c7(hD, mR, eZ, mP); #c1(PRR3) c2(NP_079539) c3(proline-rich protein 3 isoform a) c4(219109, 219110) c5(219111, 219112, 219113, 219114, 219115, 219116, 219117, 219118, 219119, 219120, 219121, 219122, 219123, 219124, 219125, 219126, 219127, 219128, 219129, 219130, 219131, 219132, 219133, 219134, 219135, 219136, 219137, 219138, 219139, 219140, 219141, 219142, 219143, 219144, 219145, 219146, 219147, 219148, 219149, 219150, 219151, 219152, 219153, 219154, 219155, 219156, 219157, 219158, 219159, 219160) c6( ) c7(hD, mR, eZ, mP); #c1(PRR34) c2(NP_060750) c3(proline-rich protein 34) c4(197589) c5(197590, 197591, 197592, 197593, 197594, 197595, 197596, 197597, 197598, 197599, 197600, 197601) c6( ) c7(m); #c1(PRR5) c2(NP_001017528) c3(proline-rich protein 5 isoform 2) c4(26564, 26565, 26566) c5(26567, 26568, 26569, 26570, 26571, 26572, 26573, 26574, 26575, 26576, 26577, 26578, 26579, 26580, 26581, 26582, 26583) c6(26584, 26585) c7(aW, aw, q, aT); #c1(PRR5) c2(NP_001185650) c3(proline-rich protein 5 isoform 4) c4(76030) c5(76031, 76032, 76033, 76034, 76035, 76036) c6( ) c7(aW, aw, q, aT); #c1(PRR5) c2(NP_851850) c3(proline-rich protein 5 isoform 1) c4(254680) c5(254681, 254682, 254683, 254684, 254685, 254686, 254687, 254688, 254689) c6( ) c7(aW, aw, q, aT); #c1(PRR9) c2(XP_011508108) c3(proline-rich protein 9 isoform X2) c4(298589) c5(298590) c6( ) c7(cr); #c1(PRR9) c2(XP_011508109) c3(proline-rich protein 9 isoform X1) c4( ) c5(298591, 298592, 298593, 298594, 298595) c6( ) c7(cr); #c1(PRRC1) c2(NP_001273737) c3(protein PRRC1 isoform 1) c4(105731) c5(105732, 105733, 105734, 105735, 105736, 105737, 105738, 105739, 105740, 105741, 105742, 105743) c6( ) c7(x, ey, j, k, fe); #c1(PRRC1) c2(NP_570721) c3(protein PRRC1 isoform 2) c4(234237, 234238, 234239, 234240, 234241) c5(234242, 234243, 234244, 234245, 234246, 234247, 234248, 234249, 234250, 234251, 234252, 234253, 234254, 234255, 234256, 234257, 234258, 234259, 234260, 234261, 234262, 234263, 234264, 234265, 234266, 234267, 234268, 234269, 234270, 234271, 234272, 234273) c6( ) c7(x, ey, j, k, fe); #c1(PRRC2A) c2(NP_542417) c3(protein PRRC2A) c4(232796, 232797, 232798, 232799, 232800) c5(232801, 232802, 232803, 232804, 232805, 232806, 232807, 232808, 232809, 232810, 232811, 232812, 232813, 232814, 232815, 232816, 232817, 232818, 232819, 232820, 232821, 232822, 232823, 232824, 232825, 232826, 232827, 232828, 232829) c6( ) c7(y, A, iQ, ac, od, z, iW, e, aw, ff, dV, eZ, h, v, j, en, iV, bD, If, aue, eu); #c1(PRRC2A) c2(XP_011513192) c3(protein PRRC2A isoform X9) c4(305210, 305211) c5(305212, 305213, 305214, 305215, 305216, 305217, 305218, 305219, 305220, 305221, 305222, 305223, 305224, 305225, 305226, 305227, 305228, 305229, 305230) c6( ) c7(y, A, iQ, ac, od, z, iW, e, aw, ff, dV, eZ, h, v, j, en, iV, bD, If, aue, eu); #c1(PRRC2A) c2(XP_011545591) c3(protein PRRC2A isoform X1) c4( ) c5(344364, 344365, 344366, 344367, 344368, 344369, 344370, 344371, 344372, 344373, 344374, 344375, 344376, 344377, 344378, 344379, 344380, 344381, 344382, 344383, 344384, 344385, 344386, 344387, 344388, 344389, 344390, 344391, 344392, 344393, 344394, 344395, 344396, 344397, 344398, 344399, 344400, 344401, 344402, 344403, 344404, 344405, 344406, 344407, 344408, 344409, 344410, 344411, 344412, 344413, 344414, 344415, 344416, 344417, 344418, 344419, 344420, 344421, 344422, 344423, 344424, 344425) c6( ) c7(y, A, iQ, ac, od, z, iW, e, aw, ff, dV, eZ, h, v, j, en, iV, bD, If, aue, eu); #c1(PRRC2A) c2(XP_011545592) c3(protein PRRC2A isoform X9) c4(344426, 344427, 344428) c5( ) c6( ) c7(y, A, iU, ac, od, z, iW, e, aw, ff, dV, eZ, h, v, j, en, iV, bD, If, aue, eu); #c1(PRRC2A) c2(XP_011545992) c3(protein PRRC2A isoform X2) c4(344844, 344845, 344846, 344847) c5( ) c6( ) c7(y, A, iQ, ac, od, z, iW, e, aw, ff, dV, eZ, h, v, j, en, iV, bD, If, aue, eu); #c1(PRRC2A) c2(XP_011545994) c3(protein PRRC2A isoform X9) c4(344848) c5( ) c6( ) c7(y, A, iU, ac, od, z, iW, e, aw, ff, dV, eZ, h, v, j, en, iV, bD, If, aue, eu); #c1(PRRC2A) c2(XP_011546211) c3(protein PRRC2A isoform X4) c4(344902, 344903, 344904) c5( ) c6( ) c7(y, A, iU, ac, od, z, iW, e, aw, ff, dV, eZ, h, v, j, en, iV, bD, If, aue, eu); #c1(PRRC2A) c2(XP_011546212) c3(protein PRRC2A isoform X9) c4(344905, 344906) c5( ) c6( ) c7(y, A, iQ, ac, od, z, iW, e, aw, ff, dV, eZ, h, v, j, en, iV, bD, If, aue, eu); #c1(PRRC2A) c2(XP_011546213) c3(protein PRRC2A isoform X5) c4( ) c5(344907, 344908, 344909, 344910, 344911, 344912, 344913, 344914, 344915, 344916, 344917, 344918, 344919, 344920, 344821, 344922, 344923, 344924, 344925, 344926, 344927, 344928, 344929, 344930, 344931, 344932, 344933, 344934, 344935, 344936) c6( ) c7(y, A, iQ, ac, od, z, iW, e, aw, ff, dV, eZ, h, v, j, en, iV, bD, If, aue, eu); #c1(PRRC2A) c2(XP_011546382) c3(protein PRRC2A isoform X6) c4( ) c5(345114, 345115, 345116, 345117, 345118, 345119, 345120, 345121, 345122, 345123, 345124, 345125, 345126, 345127, 345128, 345129, 345130, 345131, 345132, 345133, 345134, 345135, 345136, 345137, 345138, 345139, 345140, 345141, 345142, 345143, 345144, 345145, 345146, 345147, 345148, 345149, 345150, 345151, 345152, 345153, 345154, 345155, 345156, 345157, 345158, 345159, 345160, 345161, 345162, 345163, 345164, 345165, 345166, 345167) c6( ) c7(y, A, iQ, ac, od, z, iW, e, aw, ff, dV, eZ, h, v, j, en, iV, bD, If, aue, eu); #c1(PRRC2C) c2(NP_055987) c3(protein PRRC2C) c4(184920, 184921) c5(184922, 184923, 184924, 184925, 184926, 184927, 184928, 184929, 184930, 184931, 184932, 184933, 184934, 184935, 184936, 184937, 184938, 184939, 184940, 184941, 184942, 184943, 184944, 184945, 184946, 184947, 184948, 184949, 184950, 184951) c6( ) c7(av); #c1(PRRC2C) c2(XP_005245072) c3(protein PRRC2C isoform X1) c4( ) c5(266258, 266259, 266260, 266261, 266262) c6( ) c7(av); #c1(PRRC2C) c2(XP_005245073) c3(protein PRRC2C isoform X2) c4(266263) c5( ) c6( ) c7(av); #c1(PRRC2C) c2(XP_005245074) c3(protein PRRC2C isoform X3) c4(266264) c5( ) c6( ) c7(av); #c1(PRRC2C) c2(XP_005245076) c3(protein PRRC2C isoform X6) c4(266265) c5( ) c6( ) c7(av); #c1(PRRC2C) c2(XP_005245080) c3(protein PRRC2C isoform X9) c4( ) c5(266266) c6( ) c7(av); #c1(PRRC2C) c2(XP_005245087) c3(protein PRRC2C isoform X16) c4( ) c5(266267, 266268, 266269, 266270, 266271, 266272, 266273, 266274) c6( ) c7(av); #c1(PRRC2C) c2(XP_006711301) c3(protein PRRC2C isoform X5) c4(285868, 285869) c5( ) c6( ) c7(av); #c1(PRRG4) c2(NP_076986) c3(transmembrane gamma-carboxyglutamic acid protein 4 precursor) c4(214628) c5(214629, 214630, 214631, 214632, 214633, 214634) c6( ) c7(an); #c1(PRRT1) c2(NP_085154) c3(proline-rich transmembrane protein 1) c4(219497) c5(219498, 219499, 219500, 219501, 219502, 219503, 219504, 219505, 219506, 219507, 219508, 219509, 219510, 219511, 219512, 219513, 219514, 219515, 219516, 219517, 219518, 219519, 219520, 219521, 219522, 219523, 219524) c6( ) c7(y, A, eZ); #c1(PRRT1) c2(XP_011544625) c3(proline-rich transmembrane protein 1 isoform X1) c4(343669, 343670) c5(343671, 343672, 343673, 343674, 343675, 343676, 343677, 343678, 343679, 343680, 343681, 343682, 343683, 343684, 343685, 343686, 343687, 343688, 343689, 343690, 343691, 343692, 343693, 343694, 343695, 343696, 343697, 343698, 343699, 343700, 343701, 343702, 343703, 343704, 343705, 343706, 343707, 343708, 343709, 343710, 343711, 343712, 343713, 343714, 343715, 343716, 343717, 343718, 343719, 343720, 343721, 343722, 343723, 343724, 343725, 343726, 343727, 343728, 343729, 343730, 343731, 343732, 343733, 343734, 343735, 343736, 343737, 343738, 343739, 343740, 343741, 343742, 343743, 343744, 343745, 343746, 343747, 343748, 343749, 343750, 343751, 343752) c6( ) c7(y, A, eZ); #c1(PRRT1) c2(XP_011545623) c3(proline-rich transmembrane protein 1 isoform X3) c4( ) c5(344552) c6( ) c7(y, A, eZ); #c1(PRRT2) c2(NP_001243372) c3(proline-rich transmembrane protein 2 isoform 3) c4(90585) c5(90586, 90587, 90588, 90589, 90590, 90591) c6( ) c7(gh, T, azf, agU, fd, bB, ur, IR, aR, aE, aEX, dV, aU, K, pk, Qe, aW, axu, cm, akf, iP, eM, nB, cvY, vy, cj, m, bVk, nA, eh, cd, ai, cc, ayQ, h, dx, ayn, Ni, aq, vo, cuY, B, bL, fG, aA, bX, FR, V, q, eA, hb, Nw, aT, Wk, bsE, akr, rz, ae, Y, r, en, t, xw, iK, pb, akq, ck, Il, bt, iW, ha, dG, uu, Fb, ad, dP, hd, LA, fb, cuX, d, qt, yx, ff, aF, EZ, bz, DF, dR, cvX, xZ, bE, akm, uR, y, X); #c1(PRRT2) c2(NP_660282) c3(proline-rich transmembrane protein 2 isoform 1) c4(240627) c5(240628, 240629, 240630, 240631, 240632, 240633) c6( ) c7(gh, T, azf, agU, fd, bB, ur, IR, aR, aE, aEX, dV, aU, K, pk, Qe, aW, axu, cm, akf, iP, eM, nB, cvY, vy, cj, m, bVk, nA, eh, cd, ai, cc, ayQ, h, dx, ayn, Ni, aq, vo, cuY, B, bL, fG, aA, bX, FR, V, q, eA, hb, Nw, aT, Wk, bsE, akr, rz, ae, Y, r, en, t, xw, iK, pb, akq, ck, II, bt, iW, ha, dG, uu, Fb, ad, dP, hd, LA, fb, cuX, d, gt, yx, ff, aF, EZ, bz, DF, dR, cvX, xZ, bE, akm, uR, y, X); #c1(PRRX1) c2(NP_008833) c3(paired mesoderm homeobox protein 1 isoform pmx-1a) c4(168925) c5(168926, 168927, 168928, 168929, 168930) c6( ) c7(T, wL, al, n, v, chG, q, ad, aT, K, cwa, af, iU, aW, r, cvZ, cnr, f, bz, ck, eM, iT, cnw, bt); #c1(PRRX1) c2(NP_073207) c3(paired mesoderm homeobox protein 1 isoform pmx-1b) c4(212836) c5(212837, 212838, 212839, 212840, 212841, 212842, 212843, 212844) c6( ) c7(T, wL, al, n, v, chG, q, ad, aT, K, cwa, af, iU, aW, r, cvZ, cnr, f, bz, ck, eM, iT, cnw, bt); #c1(PRRX2) c2(NP_057391) c3(paired mesoderm homeobox protein 2) c4(190531) c5(190532, 190533, 190534, 190535, 190536, 190537, 190538) c6( ) c7(T, eM, Vy, ayB, cvZ, K, ym, PJ, f, ae, af, ad); #c1(PRSS1) c2(NP_002760) c3(trypsin-1 preproprotein) c4( ) c5(131764, 131765, 131766, 131767, 131768, 131769, 131770, 131771, 131772, 131773, 131774, 131775) c6( ) c7(Mb, T, aC, cwb, jx, bB, aj, qj, ci, iG, aMd, alx, ad, J, eJ, aE, oz, nX, aMj, wb, K, aCO, aKG, dQ, dF, A, Y, kp, aF, g, HI, dr, OC, bF, ar, bE, cwc, afd, aMc, m, IS, X, ao, ayZ, pC); #c1(PRSS1) c2(XP_011514713) c3(trypsin-1 isoform X1) c4(307365, 307366, 307367, 307368) c5(307369, 307370, 307371, 307372, 307373, 307374, 307375, 307376, 307377, 307378, 307379, 307380, 307381, 307382, 307383, 307384) c6( ) c7(Mb, T, aC, cwb, jx, bB, aj, qj, ci, iG, aMd, alx, ad, J, eJ, aE, oz, nX, aMj, wb, K, aCO, aKG, dQ, dF, A, Y, kp, aF, g, HI, dr, OC, bE, ar, bE, cwc, afd, aMc, m, IS, X, ao, ayZ, pC); #c1(PRSS12) c2(NP_003610) c3(neurotrypsin precursor) c4(139577) c5(139578, 139579, 139580, 139581, 139582, 139583, 139584) c6( ) c7(ac, nA, cwd); #c1(PRSS16) c2(NP_005856) c3(thymus-specific serine protease) c4(159946, 159947, 159948, 159949) c5(159950, 159951, 159952, 159953, 159954, 159955, 159956, 159957, 159958, 159959, 159960, 159961, 159962, 159963, 159964, 159965, 159966, 159967, 159968, 159969, 159970, 159971, 159972, 159973) c6( ) c7(hM, pd, A); #c1(PRSS2) c2(NP_002761) c3(trypsin-2 isoform 2 preproprotein) c4(131776) c5(131777, 131778, 131779, 131780, 131731, 131782) c6( ) c7(T, aC, eX, iG, ci, ad, jz, eV, wb, EU, ff, r, en, g, ar, zr, ru, zl, m, y, it, X, ayZ); #c1(PRSS21) c2(NP_001257381) c3(testisin isoform 4 preproprotein) c4(95290) c5(95291, 95292, 95293, 95294, 95295) c6( ) c7(bL, dA, sO, IW, h, rO, mf, GR); #c1(PRSS21) c2(NP_006790) c3(testisin isoform 1 preproprotein) c4(168091) c5(168092, 168093, 168094, 168095, 168096, 168097, 168098, 168099) c6( ) c7(bL, dA, sO, IW, h, rO, mf, GR); #c1(PRSS21) c2(NP_659205) c3(testisin isoform 2 preproprotein) c4(239741) c5(239742, 239743, 239744, 239745, 239746, 239747, 239748) c6( ) c7(bL, dA, sO, IW, h, rO, mf, GR); #c1(PRSS21) c2(NP_659206) c3(testisin isoform 3 preproprotein) c4(239749) c5(239750, 239751, 239752, 239753, 239754, 239755) c6( ) c7(bL, dA, sO, IW, h, rO, mf, GR); #c1(PRSS22) c2(NP_071402) c3(brain-specific serine protease 4 precursor) c4(211443) c5(211444, 211445, 211446, 211447, 211448, 211449, 211450, 211451) c6( ) c7(T, bE, bB, aq, m, eA, t, B); #c1(PRSS23) c2(NP_001280107) c3(serine protease 23 isoform b) c4(111296) c5(111297, 111298, 111299, 111300, 111301, 111302, 111303, 111304) c6(111305, 111306) c7(aW, T, v, Y, aT); #c1(PRSS23) c2(NP_001280109) c3(serine protease 23 isoform c precursor) c4( ) c5(111307, 111308, 111309, 111310, 111311, 111312, 111313, 111314, 111315, 111316, 111317, 111318, 111319, 111320) c6(111321, 111322, 111323, 111324) c7(aW, T, v, Y, aT); #c1(PRSS23) c2(NP_009104) c3(serine protease 23 isoform a) c4(170677, 170678) c5(170679, 170680) c6( ) c7(aW, T, v, Y, aT); #c1(PRSS27) c2(NP_114154) c3(serine protease 27 precursor) c4(222390, 222391) c5(222392, 222393, 222394, 222395, 222396, 222397, 222398, 222399, 222400, 222401, 222402, 222403, 222404, 222405, 222406, 222407) c6(222408, 222409, 222410, 222411) c7(ck, pq, aiu, gM, T, oT, pc, iU, aq, bs, kD, n, pg, nC, aqf, pm, bw, bt, hr, yR); #c1(PRSS3) c2(NP_001184026) c3(trypsin-3 isoform 3 preproprotein) c4(75257, 75258) c5(75259, 75260, 75261, 75262, 75263, 75264, 75265, 75266, 75267, 75268, 75269, 75270) c6( ) c7(EB, T, aE, eM, Jl, aW, eL, Ie, eX, aT, it, eV, dL, bK, wb, iG, ra, V, ae, ad, vi); #c1(PRSS3) c2(NP_001184027) c3(trypsin-3 isoform 4 preproprotein) c4(75271) c5(75272, 75273, 75274, 75275, 75276, 75277) c6( ) c7(EB, T, aE, eM, Jl, aW, eL, Ie, eX, aT, it, eV, dL, bK, wb, iG, ra, V, ae, ad, vi); #c1(PRSS3) c2(NP_002762) c3(trypsin-3 isoform 2 preproprotein) c4(131783) c5(131784, 131785, 131786, 131787, 131788, 131789) c6( ) c7(EB, T, aE, eM, JI, aW, eL, Ie, eX, aT, it, eV, dL, bK, wb, iG, ra, V, ae, ad, vi); #c1(PRSS3) c2(NP_031369) c3(trypsin-3 isoform 1 preproprotein) c4(171973) c5(171974, 171975, 171976, 171977, 171978, 171979) c6( ) c7(EB, T, aE, eM, Jl, aW, eL, Ie, eX, aT, it, eV, dL, bK, wb, iG, ra, V, ae, ad, vi); #c1(PRSS33) c2(NP_690851) c3(serine protease 33 precursor) c4(244975) c5(244976, 244977, 244978, 244979, 244980, 244981) c6( ) c7(Qi, bEg); #c1(PRSS35) c2(NP_001163894) c3(inactive serine protease 35 precursor) c4(66489) c5(66490, 66491, 66492, 66493, 66494, 66495, 66496, 66497, 66498, 66499, 66500, 66501, 66502, 66503) c6(66504, 66505, 66506, 66507) c7(Na, amJ, Nc, cz); #c1(PRSS50) c2(NP_037402) c3(probable threonine protease PRSS50 precursor) c4(175309, 175310) c5(175311, 175312, 175313, 175314, 175315, 175316, 175317, 175318, 175319, 175320, 175321, 175322, 175323, 175324, 175325, 175326) c6( ) c7(aW, Lb, np, q, aT); #c1(PRSS53) c2(NP_001034592) c3(serine protease 53 precursor) c4(31889) c5(31890, 31891, 31892, 31893, 31894, 31895, 31896, 31897) c6(31898, 31899) c7(an); #c1(PRSS55) c2(NP_001183949) c3(serine protease 55 isoform 2 precursor) c4(75239) c5(75240, 75241, 75242, 75243, 75244, 75245) c6( ) c7(T, Tb, DD, aZ, if, e, aA, bB, fd, v, IR, ci, qN, fr, cd, ad, ai, eA, DJ, Dg, aT, cy, ae, cp, jf, asp, s, nO, aW, Y, oV, ff, aF, en, cl, dw, aaO, t, bz, pb, cm, DT, eM, iA, bE, hL, agf, mf, m, y, iu); #c1(PRSS55) c2(NP_940866) c3(serine protease 55 isoform 1 precursor) c4(259984) c5(259985, 259986, 259987, 259988, 259989, 259990) c6( ) c7(T, Tb, DD, aZ, if, e, aA, bB, fd, v, IR, ci, qN, fr, cd, ad, ai, eA, DJ, Dg, aT, cy, ae, cp, jf, asp, s, nO, aW, Y, oV, ff, aF, en, cl, dw, aaO, t, bz, pb, cm, DT, eM, iA, bE, hL, agf, mf, m, y, iu); #c1(PRSS57) c2(NP_999875) c3(serine protease 57 precursor) c4(266092) c5(266093, 266094, 266095, 266096, 266097, 266098, 266099, 266100) c6(266101, 266102) c7(BD, ewe, NL, bed, PR, Io, Ph, bOu); #c1(PRSS58) c2(NP_001001317) c3(serine protease 58 precursor) c4(18152) c5(18153, 18154, 18155, 18156, 18157, 18158, 18159, 18160, 18161, 18162, 18163, 18164, 18165, 18166, 18167, 18168, 18169) c6(18170, 18171, 18172, 18173) c7(bF, ar, A, aE, Y, ewe, X, afd, aMj, ao, kp, iG, aCO, aMd, alx, dr, OC); #c1(PRSS8) c2(NP_002764) c3(prostasin preproprotein) c4(131797, 131798) c5(131799, 131800, 131801, 131802, 131803, 131804, 131805, 131806, 131807, 131808, 131809, 131810) c6( ) c7(T, jv, id, Uc, aA, cz, aj, fr, ci, q, J, ad, XX, aT, h, K, IQ, ae, aW, t, xd, fk, CZ, m, ao); #c1(PRTFDC1) c2(NP_001269715) c3(phosphoribosyltransferase domain-containing protein 1 isoform 2) c4(102683, 102684) c5(102685, 102686, 102687, 102688, 102689, 102690, 102691, 102692, 102693, 102694, 102695, 102696) c6( ) c7(t, ff, en); #c1(PRTFDC1) c2(NP_064585) c3(phosphoribosyltransferase domain-containing protein 1 isoform 1) c4(203112) c5(203113, 203114, 203115, 203116, 203117, 203118) c6( ) c7(t, ff, en); #c1(PRTFDC1) c2(XP_011517891) c3(phosphoribosyltransferase domain-containing protein 1 isoform X4) c4(311790) c5(311791, 311792, 311793, 311794, 311795, 311796) c6( ) c7(t, ff, en); #c1(PRTG) c2(NP_776175) c3(protogenin precursor) c4(250939) c5(250940, 250941, 250942, 250943, 250944, 250945) c6( ) c7(yA); #c1(PRTN3) c2(NP_002768) c3(myeloblastin precursor) c4(131848, 131849, 131850) c5(131851, 131852, 131853, 131854, 131855, 131856, 131857, 131858, 131859, 131860, 131861, 131862) c6( ) c7(T, os, pF, am, id, eR, Io, oZ, aoj, aY, er, yM, xE, DK, Ot, aT, hn, dL, ji, eL, N, hm, aa, ao, DA, anP, iU, bJV, brg, aW, eZ, iV, pL, ve, aYt, ck, zr, iT, uz, aS, EY, y, bt, fh, hv); #c1(PRUNE) c2(NP_001290158) c3(protein prune homolog isoform 2) c4(114982) c5(114983, 114984, 114985, 114986, 114987, 114988, 114989, 114990, 114991, 114992) c6( ) c7(hW, hV, aW, au, aA, aT, cm); #c1(PRUNE) c2(NP_001290171) c3(protein prune homolog isoform 3) c4(115021, 115022, 115023, 115024) c5(115025, 115026, 115027, 115028, 115029, 115030, 115031, 115032, 115033, 115034, 115035, 115036, 115037, 115038, 115039, 115040, 115041, 115042, 115043, 115044, 115045, 115046, 115047, 115048, 115049, 115050, 115051, 115052) c6( ) c7(hW, hV, aW, au, aA, aT, cm); #c1(PRUNE2) c2(NP_056040) c3(protein prune homolog 2) c4(185252) c5(185253, 185254, 185255, 185256, 185257, 185258) c6( ) c7(cZ, T, fb, hW, Y, dd, cm, ae, ad); #c1(PRUNE2) c2(XP_005251805) c3(protein prune homolog 2 isoform X8) c4(271196, 271197) c5(271198) c6( ) c7(cZ, T, fb, hW, Y, dd, cm, ae, ad); #c1(PRUNE2) c2(XP_011516625) c3(protein prune homolog 2 isoform X9) c4(310032) c5(310033, 310034, 310035, 310036, 310037, 310038) c6( ) c7(cZ, T, fb, hW, Y, dd, cm, ae, ad); #c1(PRUNE2) c2(XP_011516628) c3(protein prune homolog 2 isoform X13) c4(310039) c5( ) c6( ) c7(cZ, T, fb, hW, Y, dd, cm, ae, ad); #c1(PRUNE2) c2(XP_011516630) c3(protein prune homolog 2 isoform X16) c4( ) c5(310040, 310041, 310042, 310043, 310044, 310045) c6( ) c7(cZ, T, fb, hW, Y, dd, cm, ae, ad); #c1(PRX) c2(NP_066007) c3(periaxin isoform 1) c4(206724) c5(206725, 206726, 206727, 206728, 206729) c6( ) c7(ql, Pt, agU, bkY, cwf, fu, bX, bU, mF, ae, ad, aa); #c1(PRX) c2(XP_011525473) c3(periaxin isoform X1) c4(319872, 319873) c5(319874, 319875, 319876, 319877, 319878, 319879, 319880, 319881, 319882, 319883, 319884, 319885, 319886, 319887) c6( ) c7(ql, Pt, agU, bkY, cwf, fu, bX, bU, mF, ae, ad, aa); #c1(PRY) c2(XP_011529813) c3(PTPN13-like protein, Y-linked isoform X1) c4(325592, 325593) c5(325594, 325595, 325596, 325597, 325598, 325599, 325600, 325601, 325602, 325603, 325604, 325605, 325606, 325607, 325608, 325609, 325610, 325611, 325612, 325613, 325614, 325615, 325616, 325617, 325618, 325619, 325620, 325621, 325622, 325623, 325624, 325625, 325626) c6( ) c7(ae, gU, ad); #c1(PSAP) c2(NP_001035930) c3(prosaposin isoform b preproprotein) c4(33432, 33433, 33434) c5(33435, 33436, 33437, 33438, 33439, 33440, 33441, 33442, 33443, 33444, 33445, 33446) c6( ) c7(T, ww, C, cwi, Za, q, ad, AK, cwh, QU, rS, dV, aT, ey, aAt, ae, pi, ahA, afu, eG, tb, aW, Zf, bez, cwg, cr, r, eE, t, dr, ck, vU, Nk, yP, ahw, ahz, akH, wR, Lq, CZ); #c1(PSAP) c2(NP_001035931) c3(prosaposin isoform c preproprotein) c4(33447, 33448, 33449, 33450) c5(33451, 33452, 33453, 33454, 33455, 33456, 33457, 33458, 33459, 33460, 33461, 33462) c6( ) c7(T, ww, C, cwi, Za, q, ad, AK, cwh, QU, rS, dV, aT, ey, aAt, ae, pi, ahA, afu, eG, tb, aW, Zf, bez, cwg, cr, r, eE, t, dr, ck, vU, Nk, yP, ahw, ahz, akH, wR, Lq, CZ); #c1(PSAP) c2(NP_002769) c3(prosaposin isoform a preproprotein) c4(131863, 131864, 131865) c5(131866, 131867, 131868, 131869, 131870, 131871131872, 131873, 131874, 131875, 131876, 131877, 131878, 131879, 131880, 131881, 131882, 131883) c6( ) c7(T, ww, C, cwi, Za, q, ad, AK, cwh, QU, rS, dV, aT, ey, aAt, ae, pi, ahA, afu, eG, tb, aW, Zf, bez, cwg, cr, r, eE, t, dr, ck, vU, Nk, yP, ahw, ahz, akH, wR, Lq, CZ); #c1(PSAT1) c2(NP_066977) c3(phosphoserine aminotransferase isoform 2) c4(207944) c5(207945, 207946, 207947, 207948, 207949, 207950) c6( ) c7(gh, T, dA, WA, rQ, cz, n, Fb, ci, eW, ad, aT, ji, ae, Ub, aW, cr, Io, g, t, hg, bF, cT, pu, ac, GU, Jr, cwj, m, LS); #c1(PSAT1) c2(NP_478059) c3(phosphoserine aminotransferase isoform 1) c4(230862, 230863) c5(230864, 230865, 230866, 230867, 230868, 230869, 230870, 230871, 230872, 230873, 230874, 230875) c6( ) c7(gh, T, dA, WA, rQ, cz, n, Fb, ci, eW, ad, aT, ji, ae, Ub, aW, cr, Io, g, t, hg, bF, cT, pu, ac, GU, Jr, cwj, m, LS); #c1(PSCA) c2(NP_005663) c3(prostate stem cell antigen preproprotein) c4(158368) c5(158369, 158370, 158371, 158372, 158373, 158374, 158375, 158376, 158377, 158378) c6( ) c7(T, aC, id, ht, aA, ci, jO, eJ, ad, cwk, eW, BI, aE, Db, qp, aT, io, dL, hB, nJ, ae, eL, pI, Qe, YL, ZH, CN, NE, ff, az, kt, aF, en, g, fT, gX, pV, it); #c1(PSD) c2(NP_002770) c3(PH and SEC7 domain-containing protein 1 isoform 1) c4(131884, 131885) c5(131886, 131887, 131888, 131889, 131890, 131891, 131892, 131893, 131894, 131895, 131896, 131897, 131898, 131899, 131900, 131901, 131902, 131903, 131904, 131905, 131906, 131907, 131908) c6( ) c7(d, rz, bO, r, Ko, eA, iV, he, q, bN); #c1(PSD3) c2(NP_056125) c3(PH and SEC7 domain-containing protein 3 isoform a) c4(185787, 185788) c5(185789, 185790, 185791, 185792, 185793, 185794, 185795, 185796, 185797, 185798, 185799, 185800) c6( ) c7(Kc, d, ac, bE, ff, ht, bB, m, en, as, eA, t, xa, ad); #c1(PSD3) c2(NP_996792) c3(PH and SEC7 domain-containing protein 3 isoform b) c4(264547) c5(264548, 264549, 264550, 264551, 264552, 264553, 264554, 264555, 264556, 264557, 264558, 264559) c6( ) c7(Kc, d, ac, bE, ff, ht, bB, m, en, as, eA, t, xa, ad); #c1(PSD3) c2(XP_011542766) c3(PH and SEC7 domain-containing protein 3 isoform X3) c4(341390) c5( ) c6( ) c7(Kc, d, ac, bE, ff, ht, bB, m, en, as, eA, t, xa, ad); #c1(PSD4) c2(NP_036587) c3(PH and SEC7 domain-containing protein 4) c4(174638) c5(174639, 174640, 174641, 174642, 174643, 174644) c6( ) c7(xQ, T, eW, d, aW, Y, eL, aT, cQ, dL, dy, ci, q, eA, agF, cm, bz, B); #c1(PSD4) c2(XP_006712457) c3(PH and SEC7 domain-containing protein 4 isoform X5) c4( ) c5(286666) c6( ) c7(xQ, T, eW, d, aW, Y, eL, aT, cQ, dL, dy, ci, q, eA, agF, cm, bz, B); #c1(PSD4) c2(XP_011509191) c3(PH and SEC7 domain-containing protein 4 isoform XB) c4( ) c5(299808) c6( ) c7(xQ, T, eW, d, aW, Y, eL, aT, cQ, dL, dy, ci, g, eA, agF, cm, bz, B); #c1(PSEN1) c2(XP_011535274) c3(presenilin-1 isoform X2) c4(332176, 332177, 332178, 332179, 332180, 332181, 332182) c5(332183, 332184, 332185, 332186, 332187, 332188, 332189, 332190, 332191, 332192, 332193, 332194, 332195, 332196, 332197, 332198, 332199, 332200, 332201, 332202, 332203, 332204, 332205, 332206, 332207, 332208, 332209, 332210, 332211, 332212, 332213, 332214, 332215, 332216, 332217, 332218, 332219, 332220, 332221, 332222, 332223, 332224) c6( ) c7(T, aaH, I, gf, Fo, ta, K, H, cwp, cws, aW, g, as, ir, cm, bb, abS, mx, U, m, R, Ol, fr, et, fK, cd, Hx, cc, ey, cwr, cwo, tx, avf, acM, hq, W, ky, dB, aXX, Lp, avF, B, L, bL, ul, acL, eR, cwq, v, eA, PW, cF, di, aTZ, WY, HG, aT, cy, aaw, an, af, ak, cwn, aaE, en, aaO, f, t, wA, avz, ciX, cwm, axS, tj, ac, c, cwl, wR, mf, aPT, aan, ha, VT, bS, sO, Hk, abg, ff, dq, Z, KM, dr, eK, dJ, aS, cbR, Gp, xg, GW); #c1(PSEN1) c2(XP_011535276) c3(presenilin-1 isoform X1) c4(332225, 332226, 332227, 332228, 332229, 332230, 332231, 332232, 332233) c5(332234, 332235, 332236, 332237, 332238, 332239, 332240, 332241, 332242, 332243, 332244, 332245, 332246, 332247, 332248, 332249, 332250, 332251, 332252, 332253, 332254, 332255, 332256, 332257, 332258, 332259, 332260, 332261, 332262, 332263, 332264, 332265, 332266, 332267, 332268, 332269, 332270, 332271, 332272, 332273, 332274, 332275, 332276, 332277, 332278, 332279, 332280, 332281, 332282, 332283, 332284, 332285, 332286, 332287, 332288, 332289, 332290, 332291, 332292, 332293, 332294, 332295) c6( ) c7(T, aaH, I, gf, Fo, ta, K, H, cwp, cws, aW, g, as, ir, cm, bb, abS, mx, U, m, R, Ol, fr, et, fK, cd, Hx, cc, ey, cwr, cwo, tx, avf, acM, hq, W, ky, dB, aXX, Lp, avf, B, L, bL, ul, acL, eR, cwq, v, eA, PW, cF, di, aTZ, WY, HC, aT, cy, aaw, an, af, ak, cwn, aaE, en, aaO, f, t, wA, avz, ciX, cwm, axS, tj, ac, c, cwl, wR, mf, aPT, aan, ha, VT, bS, sO, Hk, abg, ff, dq, Z, KM, dr, eK, dJ, aS, cbR, Gp, xg, GW); #c1(PSEN2) c2(NP_036618) c3(presenilin-2 isoform 2) c4(174964) c5(174965, 174966, 174967, 174968, 174969, 174970, 174971, 174972, 174973, 174974, 174975, 174976, 174977, 174978) c6( ) c7(CV, T, acL, cwt, aaH, ha, VT, aA, cz, aj, ci, il, fK, J, q, cd, ad, eA, mj, XX, di, cF, cc, WY, sO, rJ, Fo, Hk, aT, bK, K, hS, MO, H, ae, af, cwr, B, PP, MD, aW, eH, aaE, aF, aB, g, Eg, eE, t, f, eF, cm, acM, ar, tj, W, bb, dB, dJ, mx, U, mf, cbR, m, Gp, GW, L); #c1(PSEN2) c2(XP_005273256) c3(presenilin-2 isoform X1) c4(284385, 284386, 284387, 284388, 284389) c5(284390, 284391, 284392, 284393, 284394, 284395, 284396, 284397, 284398, 284399, 284400, 284401, 284402, 284403, 284404, 284405, 284406, 284407, 284408, 284409, 284410, 284411, 284412, 284413, 284414, 284415, 284416, 284417) c6( ) c7(CV, T, acL, cwt, aaH, ha, VT, aA, cz, aj, ci, il, fK, J, q, cd, ad, eA, mj, XX, di, cF, cc, WY, sO, rJ, Fo, Hk, aT, bK, K, hS, MO, H, ae, af, cwr, B, PP, MO, aW, eH, aaE, aF, aB, g, Eg, eE, t, f, eF, cm, acM, ar, tj, W, bb, dB, dJ, mx, U, mf, cbR, m, Gp, GW, L); #c1(PSENEN) c2(NP_001268461) c3(gamma-secretase subunit PEN-2) c4(99966) c5(99967, 99968, 99969, 99970, 99971, 99972, 99973, 99974, 99975, 99976) c6( ) c7(ciX, cm, cwu, af, L); #c1(PSG1) c2(NP_001171754) c3(pregnancy-specific beta-1-glycoprotein 1 isoform 2 precursor) c4(71499) c5(71500, 71501, 71502, 71503, 71504, 71505) c6( ) c7(ck, bM, T, bv, aE, eM, nO, Y, r, hD, uz, vx, q); #c1(PSG1) c2(NP_001171755) c3(pregnancy-specific beta-1-glycoprotein 1 isoform 3 precursor) c4(71506, 71507) c5(71508, 71509, 71510, 71511, 71512, 71513) c6( ) c7(ck, bM, T, bv, aE, eM, nO, Y, r, hD, uz, vx, q); #c1(PSG1) c2(NP_001284702) c3(pregnancy-specific beta-1-glycoprotein 1 isoform 4 precursor) c4(112350) c5(112351, 112352, 112353, 112354, 112355, 112356, 112357) c6( ) c7(ck, bM, T, bv, aE, eM, nO, Y, r, hD, uz, vx, q); #c1(PSG1) c2(NP_008836) c3(pregnancy-specific beta-1-glycoprotein 1 isoform 1 precursor) c4(168945) c5(168946, 168947, 168948, 168949, 168950, 168951) c6( ) c7(ck, bM, T, bv, aE, eM, nO, Y, r, hD, uz, vx, q); #c1(PSG1) c2(XP_011525427) c3(pregnancy-specific beta-1-glycoprotein 1 isoform X2) c4( ) c5(319851, 319852, 319853, 319854, 319855) c6( ) c7(ck, bM, T, bv, aE, eM, nO, Y, r, hD, uz, vx, q); #c1(PSG2) c2(NP_112536) c3(pregnancy-specific beta-1-glycoprotein 2 precursor) c4(221337) c5(221338, 221339, 221340, 221341, 221342, 221343, 221344, 221345, 221346, 221347, 221348, 221349, 221350, 221351) c6( ) c7(T, dA, if, NT, aA, bB, n, ci, ze, qN, q, eW, x, Vp, bv, av, ib, aE, iu, aoc, nv, Qg, gd, aT, cU, dL, Tj, eL, Qe, B, ZH, BO, s, Jl, aW, CN, ff, r, aF, CO, en, YE, cl, aoG, t, bz, g, cm, bP, eM, bE, dc, gX, m, X); #c1(PSG5) c2(NP_001123486) c3(pregnancy-specific beta-1-glycoprotein 5 precursor) c4(47160) c5(47161, 47162, 47163, 47164, 47165, 47166, 47167, 47168, 47169, 47170, 47171, 47172, 47173, 47174) c6( ) c7(wM, ZH, CN, cz, aq, qN, uC, B, aIY); #c1(PSG6) c2(NP_001027020) c3(pregnancy-specific beta-1-glycoprotein 6 isoform b precursor) c4(30098) c5(30099, 30100, 30101, 30102, 30103, 30104) c6( ) c7(CN, ZH, aoc); #c1(PSG6) c2(NP_002773) c3(pregnancy-specific beta-1-glycoprotein 6 isoform a precursor) c4(131909) c5(131910, 131911, 131912, 131913, 131914, 131915) c6( ) c7(CN, ZH, aoc); #c1(PSG8) c2(NP_001123639) c3(pregnancy-specific beta-1-glycoprotein 8 isoform b precursor) c4(47924) c5(47925, 47926, 47927, 47928, 47929, 47930, 47931) c6( ) c7(CN, ZH, qN); #c1(PSG8) c2(NP_001123640) c3(pregnancy-specific beta-1-glycoprotein 8 isoform c) c4(47932) c5(47933, 47934, 47935, 47936, 47937, 47938) c6( ) c7(CN, ZH, qN); #c1(PSG8) c2(NP_874366) c3(pregnancy-specific beta-1-glycoprotein 8 isoform a precursor) c4(256629) c5(256630, 256631, 256632, 256633, 256634, 256635) c6( ) c7(CN, ZH, qN); #c1(PSG8) c2(XP_011525288) c3(pregnancy-specific beta-1-glycoprotein 8 isoform X1) c4(319745) c5(319746, 319747, 319748, 319749, 319750, 319751) c6( ) c7(CN, ZH, qN); #c1(PSG8) c2(XP_011525289) c3(pregnancy-specific beta-1-glycoprotein 8 isoform X2) c4(319752) c5( ) c6( ) c7(CN, ZH, qN); #c1(PSG8) c2(XP_011525290) c3(pregnancy-specific beta-1-glycoprotein 8 isoform X3) c4( ) c5(319753, 319754, 319755, 319756, 319757) c6( ) c7(CN, ZH, qN); #c1(PSG9) c2(NP_001288636) c3(pregnancy-specific beta-1-glycoprotein 9 isoform 2 precursor) c4(113895) c5(113896, 113897, 113898, 113899, 113900, 113901, 113902, 113903) c6( ) c7(bF); #c1(PSG9) c2(NP_001288638) c3(pregnancy-specific beta-1-glycoprotein 9 isoform 4 precursor) c4(113904) c5(113905, 113906, 113907, 113908, 113909, 113910, 113911, 113912) c6( ) c7(bF); #c1(PSG9) c2(NP_002775) c3(pregnancy-specific beta-1-glycoprotein 9 isoform 1 precursor) c4(131916, 131917) c5(131918, 131919, 131920, 131921, 131922, 131923, 131924, 131925, 131926, 131927, 131928, 131929, 131930, 131931, 131932, 131933) c6( ) c7(bF); #c1(PSG9) c2(XP_005259132) c3(pregnancy-specific beta-1-glycoprotein 9 isoform X1) c4(275958) c5(275959, 275960, 275961, 275962, 275963, 275964, 275965, 275966) c6( ) c7(bF); #c1(PSIP1) c2(NP_001121689) c3(PC4 and SFRS1-interacting protein isoform 2) c4(46057) c5(46058, 46059, 46060, 46061, 46062, 46063, 46064, 46065, 46066, 46067, 46068, 46069) c6( ) c7(bM, T, aC, fR, bO, aA, aj, ci, hF, eA, aR, amW, ad, aE, ec, aCJ, aql, dV, aT, h, dz, K, hS, zy, H, bYl, ae, WZ, jf, eG, LG, Y, aW, Ls, kD, aF, g, eE, t, cm, ck, OW, c, Jr, bE, Fi, eM, iT, m, bt, it, L); #c1(PSIP1) c2(NP_066967) c3(PC4 and SFRS1-interacting protein isoform 1) c4(207873) c5(207874, 207875, 207876, 207877, 207878, 207879, 207880, 207881, 207882, 207883, 207884) c6( ) c7(bM, T, aC, fR, bO, aA, aj, ci, hF, eA, aR, amW, ad, aE, ec, aCJ, aql, dV, aT, h, dz, K, hS, zy, H, bYl, ae, WZ, jf, eG, LG, Y, aW, Ls, kD, aF, g, eE, t, cm, ck, OW, c, Jr, bE, Fi, eM, iT, m, bt, it, L); #c1(PSIP1) c2(XP_011515999) c3(PC4 and SFRS1-interacting protein isoform X2) c4( ) c5(309207) c6( ) c7(bM, T, aC, fR, bO, aA, aj, ci, hF, eA, aR, amW, ad, aE, ec, aCJ, aql, dV, aT, h, dz, K, hS, zy, H, bYl, ae, WZ, jf, eG, LG, Y, aW, Ls, kD, aF, g, eE, t, cm, ck, OW, c, Jr, bE, Fi, eM, iT, m, bt, it, L); #c1(PSKH1) c2(NP_006733) c3(serine/threonine-protein kinase H1) c4(167547) c5(167548, 167549, 167550, 167551, 167552, 167553) c6( ) c7(ae, ad); #c1(PSMA1) c2(NP_001137409) c3(proteasome subunit alpha type-1 isoform 3) c4(55642) c5(55643, 55644, 55645, 55646, 55647) c6( ) c7(T, aW, if, aT, qN, bw, bt); #c1(PSMA1) c2(NP_002777) c3(proteasome subunit alpha type-1 isoform 2) c4(131934) c5(131935, 131936, 131937, 131938, 131939, 131940, 131941, 131942, 131943, 131944, 131945) c6( ) c7(T, aW, if, aT, qN, bw, bt); #c1(PSMA1) c2(NP_683877) c3(proteasome subunit alpha type-1 isoform 1) c4(242609) c5(242610, 242611, 242612, 242613, 242614, 242615) c6( ) c7(T, aW, if, aT, qN, bw, bt); #c1(PSMA2) c2(NP_002778) c3(proteasome subunit alpha type-2) c4(131946, 131947) c5(131948, 131949, 131950, 131951, 131952, 131953, 131954, 131955, 131956, 131957, 131958) c6( ) c7(gZ, bA); #c1(PSMA3) c2(NP_002779) c3(proteasome subunit alpha type-3 isoform 1) c4(131959) c5(131960, 131961, 131962, 131963, 131964, 131965) c6( ) c7(vi); #c1(PSMA3) c2(NP_687033) c3(proteasome subunit alpha type-3 isoform 2) c4(242644) c5(242645, 242646, 242647, 242648, 242649, 242650) c6( ) c7(vi); #c1(PSMA4) c2(NP_001096137) c3(proteasome subunit alpha type-4 isoform 1) c4(41088, 41089, 41090, 41091, 41092, 41093) c5(41094, 41095, 41096, 41097, 41098, 41099, 41100, 41101, 41102, 41103, 41104, 41105, 41106, 41107, 41108, 41109, 41110, 41111, 41112, 41113, 41114, 41115, 41116, 41117, 41118, 41119, 41120, 41121, 41122, 41123, 41124, 41125, 41126, 41127, 41128, 41129, 41130) c6( ) c7(av, T, zQ, ac, at, aq, h, ci, Vi, zP, bz, be, y); #c1(PSMA4) c2(NP_001096138) c3(proteasome subunit alpha type-4 isoform 2) c4( ) c5(41131, 41132, 41133, 41134, 41135) c6( ) c7(av, T, zQ, ac, at, aq, h, ci, Vi, zP, bz, be, y); #c1(PSMA6) c2(NP_001269161) c3(proteasome subunit alpha type-6 isoform b) c4( ) c5(100746, 100747, 100748, 100749, 100750) c6( ) c7(bL, T, dD, ea, aw, jh, cz, fd, cL, aj, j, eq, J, wD, rS, M, hD, h, eN, eu, cW, cr, ac, ei); #c1(PSMA6) c2(NP_001269163) c3(proteasome subunit alpha type-6 isoform c) c4(100751, 100752) c5(100753, 100754, 100755, 100756, 100757, 100758) c6( ) c7(bL, T, dD, ea, aw, jh, cz, fd, cL, aj, j, eq, J, wD, rS, M, hD, h, eN, eu, cW, cr, ac, ei); #c1(PSMA6) c2(NP_002782) c3(proteasome subunit alpha type-6 isoform a) c4(131966, 131967, 131968, 131969, 131970) c5(131971, 131972, 131973, 131974, 131975, 131976, 131977, 131978, 131979, 131980, 131981, 131982, 131983, 131984, 131985, 131986, 131987, 131988, 131989, 131990, 131991, 131992, 131993, 131994, 131995, 131996, 131997, 131998, 131999, 132000, 132001) c6( ) c7(bL, T, dD, ea, aw, jh, cz, fd, cL, aj, j, eq, J, wD, rS, M, hD, h, eN, eu, cW, cr, ac, ei); #c1(PSMA7) c2(NP_002783) c3(proteasome subunit alpha type-7) c4(132002, 132003, 132004, 132005) c5(132006, 132007, 132008, 132009, 132010, 132011, 132012, 132013, 132014, 132015, 132016, 132017, 132018, 132019, 132020, 132021, 132022, 132023, 132024, 132025, 132026, 132027, 132028, 132029) c6( ) c7(h, ol, lo, q, r); #c1(PSMB1) c2(NP_002784) c3(proteasome subunit beta type-1) c4(132030, 132031) c5(132032, 132033, 132034, 132035, 132036, 132037, 132038, 132039, 132040, 132041, 132042, 132043) c6( ) c7(A, bX); #c1(PSMB10) c2(NP_002792) c3(proteasome subunit beta type-10 precursor) c4(132185) c5(132186, 132187, 132188, 132189, 132190, 132191) c6( ) c7(T, aW, Dg, aT, h, fd, X); #c1(PSMB4) c2(NP_002787) c3(proteasome subunit beta type-4) c4(132044) c5(132045, 132046, 132047, 132048, 132049, 132050) c6( ) c7(T, ac, bO, h, Z, eA); #c1(PSMB5) c2(NP_001124197) c3(proteasome subunit beta type-5 isoform 2) c4( ) c5(48510, 48511, 48512, 48513, 48514) c6( ) c7(x, T, amS, pe, j, k, y); #c1(PSMB5) c2(NP_001138404) c3(proteasome subunit beta type-5 isoform 3) c4(56570) c5(56571, 56572, 56573, 56574, 56575) c6( ) c7(x, T, amS, pe, j, k, y); #c1(PSMB5) c2(NP_002788) c3(proteasome subunit beta type-5 isoform 1) c4(132051, 132052) c5(132053, 132054, 132055, 132056, 132057, 132058, 132059, 132060) c6( ) c7(x, T, amS, pe, j, k, y); #c1(PSMB6) c2(NP_002789) c3(proteasome subunit beta type-6 isoform 1 proprotein) c4(132061) c5(132062, 132063, 132064, 132065, 132066, 132067) c6( ) c7(bL, bM, T, bfY, jh, bB, bS, bcK, ci, fu, v, fr, bfU, hF, hX, x, pp, iX, aql, kH, h, hn, RG, iU, xR, Y, bfV, eZ, hp, bw, bz, bfW, hq, ck, qJ, BU, cA, avS, bE, iT, aDs, cj, bfX, k, pw, y, bt, EB); #c1(PSMB7) c2(NP_002790) c3(proteasome subunit beta type-7 proprotein) c4(132068, 132069, 132070) c5(132071, 132072, 132073, 132074, 132075, 132076, 132077, 132078, 132079, 132080, 132081, 132082, 132083, 132084, 132085, 132086, 132087, 132088) c6( ) c7(aW, X, ac, bX, aT); #c1(PSMB8) c2(NP_004150) c3(proteasome subunit beta type-8 isoform E1 proprotein) c4(143881) c5(143882, 143883, 143884, 143885, 143886, 143887, 143888, 143889, 143890, 143891, 143892, 143893, 143894, 143895, 143896, 143897, 143898, 143899, 143900, 143901, 143902, 143903, 143904, 143905, 143906, 143907, 143908, 143909) c6( ) c7(bM, T, Dw, fR, if, jx, fN, sJ, cz, n, cL, bB, qj, fr, qN, V, q, o, eW, hX, wD, auv, bvG, F, Id, cU, hD, Ds, ey, hu, Df, af, uQ, A, mR, asD, hl, cr, eZ, eE, bQk, GR, dr, Zj, ly, ig, bE, dc, aCI, bQm, y, X); #c1(PSMB8) c2(NP_683720) c3(proteasome subunit beta type-8 isoform E2 proprotein) c4(242447, 242448, 242449, 242450) c5(242451, 242452, 242453, 242454, 242455, 242456, 242457, 242458, 242459, 242460, 242461, 242462, 242463, 242464, 242465, 242466, 242467, 242468, 242469, 242470, 242471, 242472, 242473, 242474, 242475, 242476, 242477, 242478, 242479, 242480, 242481, 242482, 242483, 242484, 242485, 242486, 242487, 242488, 242489, 242490, 242491, 242492, 242493, 242494, 242495, 242496, 242497, 242498, 242499, 242500, 242501, 242502, 242503, 242504, 242505, 242506, 242507, 242508, 242509, 242510, 242511, 242512, 242513, 242514, 242515) c6( ) c7(bM, T, Dw, fR, if, jx, fN, sJ, cz, n, cL, bB, qj, fr, qN, V, q, o, eW, hX, wD, auv, bvG, F, Id, cU, hD, Os, ey, hu, Df, af, uQ, A, mR, asD, hI, cr, eZ, eE, bQk, GR, dr, Zj, ly, ig, bE, dc, aCI, bQm, y, X); #c1(PSMB9) c2(NP_002791) c3(proteasome subunit beta type-9 proprotein) c4(132089, 132090, 132091, 132092, 132093, 132094) c5(132095, 132096, 132097, 132098, 132099, 132100, 132101, 132102, 132103, 132104, 132105, 132106, 132107, 132108, 132109, 132110, 132111, 132112, 132113, 132114, 132115, 132116, 132117, 132118, 132119, 132120, 132121, 132122, 132123, 132124, 132125, 132126, 132127, 132128, 132129, 132130, 132131, 132132, 132133, 132134, 132135, 132136, 132137, 132138, 132139, 132140, 132141, 132142, 132143, 132144, 132145, 132146, 132147, 132148, 132149, 132150, 132151, 132152, 132153, 132154, 132155, 132156, 132157, 132158, 132159, 132160, 132161, 132162, 132163, 132164, 132165, 132166, 132167, 132168, 132169, 132170, 132171, 132172, 132173, 132174, 132175, 132176, 132177, 132178, 132179, 132180, 132181, 132182, 132183, 132184) c6( ) c7(T, if, aw, eX, iW, jh, cz, Bm, cL, fr, ci, qN, V, aYs, q, o, ad, ai, qW, hX, wD, amg, rw, Id, dV, aT, cU, hD, eV, ja, ey, ae, af, A, mR, ZH, CN, aW, Y, asD, cr, r, eZ, g, eE, t, Zj, op, ig, Zg, dc, vA, bo, aiM, aCI, oQ, y, X); #c1(PSMB9) c2(XP_011544619) c3(proteasome subunit beta type-9 isoform X1) c4(343607, 343608, 343609) c5(343610, 343611, 343612, 343613, 343614, 343615, 343616, 343617, 343618, 343619, 343620, 343621, 343622, 343623, 343624, 343625, 343626, 343627, 343628, 343629, 343630, 343631, 343632, 343633, 343634, 343635, 343636, 343637, 343638, 343639, 343640, 343641, 343642, 343643, 343644, 343645, 343646, 343647, 343648, 343649, 343650, 343651, 343652, 343653, 343654, 343655, 343656, 343657, 343658, 343659, 343660, 343661, 343662, 343663, 343664, 343665, 343666, 343667, 343668) c6( ) c7(T, if, aw, eX, iW, jh, cz, Bm, cL, fr, ci, qN, V, aYs, q, o, ad, ai, qW, hX, wD, amg, rw, Id, dV, aT, cU, hD, eV, ja, ey, ae, af, A, mR, ZH, CN, aW, Y, asD, cr, r, eZ, g, eE, t, Zj, op, ig, Zg, dc, vA, bo, aiM, aCI, oQ, y, X); #c1(PSMC1) c2(NP_002793) c3(26S protease regulatory subunit 4) c4(132192, 132193) c5(132194, 132195, 132196, 132197, 132198, 132199, 132200, 132201, 132202, 132203, 132204, 132205) c6( ) c7(bC, aCp, U, Be); #c1(PSMC2) c2(NP_001191382) c3(26S protease regulatory subunit 7 isoform 2) c4( ) c5(81480, 81481, 81482, 81483, 81484, 81485, 81486, 81487, 81488, 81489) c6( ) c7(Vi); #c1(PSMC2) c2(NP_002794) c3(26S protease regulatory subunit 7 isoform 1) c4(132206, 132207, 132208) c5(132209, 132210, 132211, 132212, 132213, 132214, 132215, 132216, 132217, 132218, 132219, 132220, 132221, 132222, 132223, 132224, 132225) c6( ) c7(Vi); #c1(PSMC3) c2(NP_002795) c3(26S protease regulatory subunit GA) c4(132226) c5(132227, 132228, 132229, 132230, 132231, 132232) c6( ) c7(h); #c1(PSMC31P) c2(NP_001242943) c3(homologous-pairing protein 2 homolog isoform 3) c4( ) c5(89336, 89337, 89338, 89339, 89340) c6( ) c7(zZ, il, vH, cwv, m, avr, t, ad); #c1(PSMC31P) c2(NP_037422) c3(homologous-pairing protein 2 homolog isoform 1) c4(175474) c5(175475, 175476, 175477, 175478, 175479, 175480) c6( ) c7(zZ, il, vH, cwv, m, avr, t, ad); #c1(PSMC31P) c2(NP_057640) c3(homologous-pairing protein 2 homolog isoform 2) c4(192002, 192003) c5(192004, 192005, 192006, 192007, 192008, 192009, 192010) c6( ) c7(zZ, il, vH, cwv, m, avr, t, ad); #c1(PSMC4) c2(NP_006494) c3(26S protease regulatory subunit 6B isoform 1) c4(165710) c5(165711, 165712, 165713, 165714, 165715, 165716, 165717, 165718) c6( ) c7(hl, aT, fr, K, an, Xh, eW); #c1(PSMC4) c2(NP_694546) c3(26S protease regulatory subunit 6B isoform 2) c4(245111) c5(245112, 245113, 245114, 245115, 245116, 245117) c6( ) c7(hl, aT, fr, K, an, Xh, eW); #c1(PSMC5) c2(NP_001186092) c3(26S protease regulatory subunit 8 isoform 2) c4( ) c5(77115, 77116, 77117, 77118, 77119, 77120, 77121, 77122) c6( ) c7(dD, ea, aT, h, eq, zy, cm); #c1(PSMC5) c2(NP_002796) c3(26S protease regulatory subunit 8 isoform 1) c4(132233) c5(132234, 132235, 132236, 132237, 132238, 132239, 132240, 132241, 132242) c6( ) c7(dD, ea, aT, h, eq, zy, cm); #c1(PSMC5) c2(XP_006722043) c3(26S protease regulatory subunit 8 isoform X1) c4(294559) c5( ) c6( ) c7(dD, ea, aT, h, eq, zy, cm); #c1(PSMC6) c2(NP_002797) c3(26S protease regulatory subunit 10B) c4(132243) c5(132244, 132245, 132246, 132247, 132248, 132249) c6( ) c7(G, T, dA, yw, kB, wu, kf, h, wm, bu, ae, ad, VF); #c1(PSMD1) c2(NP_001177966) c3(26S proteasome non-ATPase regulatory subunit 1 isoform 2) c4(73243) c5(73244, 73245, 73246, 73247, 73248, 73249, 73250, 73251, 73252, 73253) c6( ) c7(T, aW, ff, U, aT, en); #c1(PSMD1) c2(NP_002798) c3(26S proteasome non-ATPase regulatory subunit 1 isoform 1) c4(132250) c5(132251, 132252, 132253, 132254, 132255, 132256) c6( ) c7(T, aW, ff, U, aT, en); #c1(PSMD10) c2(NP_002805) c3(26S proteasome non-ATPase regulatory subunit 10 isoform 1) c4(132348, 132349, 132350) c5(132351, 132352, 132353, 132354, 132355, 132356, 132357, 132358, 132359, 132360, 132361, 132362, 132363, 132364, 132365, 132366, 132367, 132368, 132369) c6( ) c7(Mb, T, fM, aA, aj, ci, q, J, hX, jz, aE, aT, K, hu, je, s, qt, aW, ff, r, aq, en, cl, iR, iM, anT, Be, hL, np, B); #c1(PSMD10) c2(NP_736606) c3(26S proteasome non-ATPase regulatory subunit 10 isoform 2) c4(247317, 247318) c5(247319, 247320, 247321, 247322, 247323, 247324, 247325, 247326, 247327, 247328, 247329) c6( ) c7(Mb, T, fM, aA, aj, ci, g, J, hX, jz, aE, aT, K, hu, je, s, qt, aW, ff, r, aq, en, cl, iR, iM, anT, Be, hL, np, B); #c1(PSMD12) c2(NP_002807) c3(26S proteasome non-ATPase regulatory subunit 12 isoform 1) c4(132370) c5(132371, 132372, 132373, 132374, 132375, 132376) c6( ) c7(A, F, xE, dV, h, y, bt, amW, uQ); #c1(PSMD12) c2(NP_777360) c3(26S proteasome non-ATPase regulatory subunit 12 isoform 2) c4(251087) c5(251088, 251089, 251090, 251091, 251092, 251093) c6( ) c7(A, F, xE, dV, h, y, bt, amW, uQ); #c1(PSMD13) c2(NP_002808) c3(26S proteasome non-ATPase regulatory subunit 13 isoform 1) c4(132377) c5(132378, 132379, 132380, 132381, 132382, 132383, 132384, 132385, 132386, 132387, 132388, 132389) c6( ) c7(h, Io); #c1(PSMD13) c2(NP_787128) c3(26S proteasome non-ATPase regulatory subunit 13 isoform 2) c4(252143, 252144) c5(252145, 252146, 252147, 252148, 252149, 252150) c6( ) c7(h, Io); #c1(PSMD14) c2(NP_005796) c3(26S proteasome non-ATPase regulatory subunit 14) c4(159538, 159539) c5(159540, 159541, 159542, 159543, 159544, 159545, 159546, 159547, 159548, 159549, 159550, 159551) c6( ) c7(y, j); #c1(PSMD2) c2(NP_001265638) c3(26S proteasome non-ATPase regulatory subunit 2 isoform 3) c4(99070) c5(99071, 99072, 99073, 99074, 99075) c6( ) c7(T, if, bs, jE, ci, qN, V, hr, hX, oj, alO, K, af, d, Y, g, bw, bz, ck, bb, c, Kv, U, bt, B); #c1(PSMD2) c2(NP_002799) c3(26S proteasome non-ATPase regulatory subunit 2 isoform 1) c4(132257, 132258) c5(132259, 132260, 132261, 132262, 132263, 132264, 132265, 132266, 132267, 132268, 132269, 132270, 132271) c6( ) c7(T, if, bs, jE, ci, qN, V, hr, hX, oj, alO, K, af, d, Y, g, bw, bz, ck, bb, c, Kv, U, bt, B); #c1(PSMD3) c2(NP_002800) c3(26S proteasome non-ATPase regulatory subunit 3) c4(132272, 132273, 132274, 132275) c5(132276, 132277, 132278, 132279, 132280, 132281, 132282, 132283, 132284, 132285, 132286, 132287, 132288, 132289, 132290, 132291, 132292, 132293, 132294, 132295, 132296, 132297, 132298, 132299) c6( ) c7(h, oZ, os); #c1(PSMD4) c2(NP_002801) c3(26S proteasome non-ATPase regulatory subunit 4) c4(132300) c5(132301, 132302, 132303, 132304, 132305, 132306, 132307, 132308, 132309, 132310, 132311, 132312) c6( ) c7(T, if, qN, V, av, Mo, lg, ds, aT, kf, on, DA, iU, aW, ff, ahk, Ib, Io, en, cm, bN, es, eM, iA); #c1(PSMD4) c2(XP_005245411) c3(26S proteasome non-ATPase regulatory subunit 4 isoform X1) c4(266513, 266514) c5(266515, 266516, 266517, 266518, 266519, 266520) c6( ) c7(T, if, qN, V, av, Mo, lg, ds, aT, kf, on, DA, iU, aW, ff, ahk, Ib, Io, en, cm, bN, es, eM, iA); #c1(PSMD6) c2(NP_001258708) c3(26S proteasome non-ATPase regulatory subunit 6 isoform 1) c4(96397) c5(96398, 96399, 96400, 96401, 96402, 96403) c6( ) c7(bL, ac, Dy, aW, Y, aT, h); #c1(PSMD6) c2(NP_001258709) c3(26S proteasome non-ATPase regulatory subunit 6 isoform 3) c4(96404) c5(96405, 96406, 96407, 96408, 96409, 96410) c6( ) c7(bL, ac, Dy, aW, Y, aT, h); #c1(PSMD6) c2(NP_055629) c3(26S proteasome non-ATPase regulatory subunit 6 isoform 2) c4(182359) c5(182360, 182361, 182362, 182363, 182364, 182365) c6( ) c7(bL, ac, Dy, aW, Y, aT, h); #c1(PSMD7) c2(NP_002802) c3(26S proteasome non-ATPase regulatory subunit 7) c4(132313, 132314) c5(132315, 132316, 132317, 132318, 132319, 132320, 132321, 132322, 132323, 132324, 132325, 132326) c6( ) c7(bM, Hn, V, q, ad, dV, cU, h, ae, A, Y, afS, cr, r, eZ, fe, eE, Jr, z, eo, afT, y); #c1(PSMD8) c2(NP_002803) c3(26S proteasome non-ATPase regulatory subunit 8) c4(132327) c5(132328, 132329, 132330, 132331, 132332, 132333) c6( ) c7(ib, aW, U, aT, h, v, hX); #c1(PSMD9) c2(NP_002804) c3(26S proteasome non-ATPase regulatory subunit 9 isoform 1) c4(132334, 132335) c5(132336, 132337, 132338, 132339, 132340, 132341, 132342, 132343, 132344, 132345, 132346, 132347) c6( ) c7(T, ea, if, fd, bB, ci, aE, il, Qk, K, eL, bc, xQ, yo, aW, as, cm, bw, GR, eM, nB, dc, go, vA, cj, m, dD, NT, n, aj, fr, ct, qN, jz, h, dL, mJ, ge, aq, zZ, hq, iO, kT, bP, yP, hR, it, B, bL, fM, aoE, aA, cz, v, j, q, J, eA, XX, aT, dz, bK, ae, af, jf, s, iU, Y, r, en, cl, t, iK, aEp, ck, nM, iM, dy, bt, On, hS, hi, Ke, pY, jh, bS, eq, ad, hX, hd, ib, fb, d, je, et, cH, ff, apb, aF, Z, bz, bE, aS, EB); #c1(PSME1) c2(NP_006254) c3(proteasome activator complex subunit 1 isoform 1) c4(163314) c5(163315, 163316, 163317, 163318, 163319, 163320) c6( ) c7(zP, zQ, Dq, h, ci, t, it, X); #c1(PSME1) c2(NP_788955) c3(proteasome activator complex subunit 1 isoform 2) c4(252181) c5(252182, 252183, 252184, 252185, 252186, 252187) c6( ) c7(zP, zQ, Dq, h, ci, t, it, X); #c1(PSME2) c2(NP_002809) c3(proteasome activator complex subunit 2) c4(132390) c5(132391, 132392, 132393, 132394, 132395, 132396) c6( ) c7(T, Jl, aA, h, fd, g, it, X); #c1(PSME3) c2(NP_001253974) c3(proteasome activator complex subunit 3 isoform 3) c4( ) c5(94341, 94342) c6( ) c7(T, B, eM, jx, fc, eZ, h, np, fL, cP, bC, ey, mC); #c1(PSME3) c2(NP_005780) c3(proteasome activator complex subunit 3 isoform 1) c4(159282, 159283, 159284) c5(159285, 159286, 159287, 159288, 159289, 159290, 159291, 159292, 159293, 159294, 159295, 159296, 159297, 159298, 159299) c6( ) c7(T, B, eM, jx, fc, eZ, h, np, fL, cP, bC, ey, mC); #c1(PSME3) c2(NP_789839) c3(proteasome activator complex subunit 3 isoform 2) c4(252349) c5(252350, 252351, 252352, 252353, 252354, 252355, 252356, 252357, 252358) c6( ) c7(T, B, eM, jx, fc, eZ, h, np, fL, cP, bC, ey, mC); #c1(PSME3) c2(XP_011522480) c3(proteasome activator complex subunit 3 isoform X1) c4( ) c5(317114, 317115, 317116, 317117, 317118, 317119) c6( ) c7(T, B, eM, jx, fc, eZ, h, np, fL, cP, bC, ey, mC); #c1(PSME4) c2(NP_055429) c3(proteasome activator complex subunit 4) c4(181085) c5(181086, 181087, 181088, 181089, 181090, 181091, 181092, 181093, 181094, 181095, 181096, 181097) c6( ) c7(h); #c1(PSME4) c2(XP_006712032) c3(proteasome activator complex subunit 4 isoform XG) c4(286353) c5( ) c6( ) c7(h); #c1(PSMF1) c2(NP_848693) c3(proteasome inhibitor PI31 subunit) c4(254158, 254159, 254160) c5(254161, 254162, 254163, 254164, 254165, 254166, 254167, 254168, 254169, 254170, 254171, 254172, 254173, 254174, 254175, 254176) c6( ) c7(ac); #c1(PSMF1) c2(XP_005260930) c3(proteasome inhibitor PI31 subunit isoform X3) c4(276984, 276985, 276986, 276987) c5( ) c6( ) c7(ac); #c1(PSMF1) c2(XP_006723727) c3(proteasome inhibitor PI31 subunit isoform X2) c4( ) c5(295330, 295331, 295332, 295333, 295334, 295335, 295336, 295337, 295338, 295339, 295340, 295341, 295342, 295343, 295344, 295345, 295346, 295347, 295348, 295349, 295350, 295351, 295352, 295353, 295354, 295355, 295356, 295357, 295358, 295359) c6( ) c7(ac); #c1(PSMG1) c2(NP_003711) c3(proteasome assembly chaperone 1 isoform a) c4(140351) c5(140352, 140353, 140354, 140355, 140356, 140357) c6( ) c7(ul, fd, Fb, uu, hF, Fc, eA, ad, pX, bK, K, he, ae, fe, kp, iV, cm, bz, bP, Ei, m, pK); #c1(PSMG1) c2(NP_982257) c3(proteasome assembly chaperone 1 isoform b) c4(263227) c5(263228, 263229, 263230, 263231, 263232, 263233) c6( ) c7(ul, fd, Fb, uu, hF, Fc, eA, ad, PX, bK, K, he, ae, fe, kp, iV, cm, bz, bP, Ei, m, pK); #c1(PSMG2) c2(NP_064617) c3(proteasome assembly chaperone 2 isoform 1) c4(203306, 203307) c5(203308, 203309, 203310, 203311, 203312, 203313, 203314, 203315, 203316, 203317, 203318, 203319) c6( ) c7(A, eZ, aq, K, bw, eW); #c1(PSMG3) c2(XP_011513881) c3(proteasome assembly chaperone 3 isoform X1) c4(306295) c5(306296, 306297, 306298, 306299, 306300, 306301, 306302, 306303, 306304, 306305, 306306, 306307, 306308, 306309) c6( ) c7(bji, Ws); #c1(PSORS1G1) c2(NP_054787) c3(psoriasis susceptibility 1 candidate gene 1 protein) c4(177840, 177841, 177842, 177843) c5(177844, 177845, 177846, 177847, 177848, 177849, 177850, 177851, 177852, 177853, 177854, 177855, 177856, 177857, 177858, 177859, 177860, 177861, 177862, 177863, 177864, 177865, 177866, 177867, 177868, 177869, 177870, 177871, 177872, 177873, 177874, 177875, 177876, 177877, 177878, 177879) c6( ) c7(xS, AW, iQ, ua, od, cr, eZ, gA, If, V, pb, wD, hH); #c1(PSORS1C2) c2(NP_054788) c3(psoriasis susceptibility 1 candidate gene 2 protein precursor) c4(177880, 177881) c5(177882, 177883, 177884, 177885, 177886, 177887, 177888, 177889, 177890, 177891, 177892, 177893, 177894, 177895, 177896, 177897, 177898, 177899, 177900, 177901, 177902, 177903, 177904, 177905, 177906, 177907, 177908, 177909, 177910, 177911, 177912, 177913, 177914, 177915, 177916, 177917, 177918, 177919, 177920, 177921, 177922, 177923, 177924, 177925, 177926) c6(177927, 177928) c7(T, Jr, aW, cr, aT, eZ, fd, hH); #c1(PSPC1) c2(XP_006719907) c3(paraspeckle component 1 isoform X1) c4(293068, 293069) c5(293070, 293071, 293072, 293073, 293074, 293075, 293076, 293077, 293078, 293079, 293080, 293081) c6( ) c7(act); #c1(PSPC1) c2(XP_011533442) c3(paraspeckle component 1 isoform X4) c4(329560) c5( ) c6( ) c7(act); #c1(PSPC1) c2(XP_011533445) c3(paraspeckle component 1 isoform X7) c4( ) c5(329561, 329562, 329563, 329564, 329565, 329566) c6( ) c7(act); #c1(PSPH) c2(XP_011513763) c3(phosphoserine phosphatase isoform X1) c4(306132, 306133) c5(306134, 306135, 306136, 306137, 306138, 306139, 306140, 306141, 306142, 306143, 306144, 306145, 306146, 306147, 306148, 306149, 306150, 306151, 306152, 306153, 306154, 306155, 306156, 306157, 306158) c6( ) c7(ar, cww, ctY, kp, act, ae, rL, ad); #c1(PSPH) c2(XP_011513764) c3(phospheserine phosphatase isoform X3) c4(306159) c5(306160, 306161, 306162, 306163, 306164, 306165, 306166, 306167, 306168, 306169) c6( ) c7(ar, cww, ctY, kp, act, ae, rL, ad); #c1(PSPN) c2(NP_004149) c3(persephin precursor) c4(143874) c5(143875, 143876, 143877, 143878, 143879, 143880) c6( ) c7(bxy, ahE, ar, kp, bK, ahl, act, ae, ad, eK); #c1(PSTPIP1) c2(NP_003969) c3(proline-serine-threonine phosphatase-interacting protein 1) c4(142516, 142517) c5(142518, 142519, 142520, 142521, 142522, 142523, 142524, 142525, 142526, 142527, 142528, 142529) c6( ) c7(y, dE, qY, ih, dN, fe, cL, bQL, hH, NX, o, wD); #c1(PSTPIP2) c2(NP_077748) c3(proline-serine-threonine phosphatase-interacting protein 2) c4(215379, 215380) c5(215381, 215382, 215383, 215384, 215385, 215386, 215387, 215388, 215389, 215390, 215391, 215392) c6( ) c7(azi, cai, ey); #c1(PTBP1) c2(NP_002810) c3(polypyrimidine tract-binding protein 1 isoform a) c4(132397) c5(132398, 132399, 132400, 132401, 132402, 132403) c6( ) c7(bM, T, aC, fR, bB, TM, Vd, ci, aGX, IR, aR, aE, SV, dV, K, brV, zQ, aW, Ku, cm, QA, eM, mx, U, QF, m, xh, n, fr, nA, zP, eW, ft, Ak, h, dx, aq, SE, dB, Qu, rx, arg, B, jx, aA, tc, eA, WY, aT, kf, an, ae, af, vT, Y, aaE, en, t, pb, bN, ck, rR, kP, c, ig, dh, ha, jh, hF, ad, hX, ds, oj, fb, iL, d, ff, eZ, nf, aF, iR, bz, dr, dR, bE, anY, aEs, y); #c1(PTBP1) c2(NP_114367) c3(polypyrimidine tract-binding protein 1 isoform b) c4(222504) c5(222505, 222506, 222507, 222508, 222509, 222510) c6( ) c7(bM, T, aC, fR, bB, TM, Vd, ci, aGX, IR, aR, aE, SV, dV, K, brV, zQ, aW, Ku, cm, QA, eM, mx, U, QF, m, xh, n, fr, nA, zP, eW, ft, Ak, h, dx, aq, SE, dB, Qu, rx, arg, B, jx, aA, tc, eA, WY, aT, kf, an, ae, af, vT, Y, aaE, en, t, pb, bN, ck, rR, kP, c, ig, dh, ha, jh, hF, ad, hX, ds, oj, fb, iL, d, ff, eZ, nf, aF, iR, bz, dr, dR, bE, anY, aEs, y); #c1(PTBP1) c2(NP_114368) c3(polypyrimidine tract-binding protein 1 isoform c) c4(222511) c5(222512, 222513, 222514, 222515, 222516, 222517, 222518, 222519, 222520, 222521, 222522, 222523) c6( ) c7(bM, T, aC, fR, bB, TM, Vd, ci, aGX, IR, aR, aE, SV, dV, K, brV, zQ, aW, Ku, cm, QA, eM, mx, U, QF, m, xh, n, fr, nA, zP, eW, ft, Ak, h, dx, aq, SE, dB, Qu, rx, arg, B, jx, aA, tc, eA, WY, aT, kf, an, ae, af, vT, Y, aaE, en, t, pb, bN, ck, rR, kP, c, ig, dh, ha, jh, hF, ad, hX, ds, oj, fb, iL, d, ff, eZ, nf, aF, iR, bz, dr, dR, bE, anY, aEs, y); #c1(PTBP1) c2(XP_005259655) c3(polypyrimidine tract-binding protein 1 isoform X2) c4(276221) c5( ) c6( ) c7(bM, T, aC, fR, bB, TM, Vd, ci, aGX, IR, aR, aE, SV, dV, K, brV, zQ, aW, Ku, cm, QA, eM, mx, U, QF, m, xh, n, fr, nA, zP, eW, ft, Ak, h, dx, aq, SE, dB, Qu, rx, arg, B, jx, aA, tc, eA, WY, aT, kf, an, ae, af, vT, Y, aaE, en, t, pb, bN, ck, rR, kP, c, ig, dh, ha, jh, hF, ad, hX, ds, oj, fb, iL, d, ff, eZ, nf, aF, iR, bz, dr, dR, bE, anY, aEs, y); #c1(PTBP2) c2(NP_001287914) c3(polypyrimidine tract-binding protein 2 isoform 1) c4(113199, 113200, 113201) c5(113202, 113203, 113204, 113205, 113206, 113207) c6( ) c7(bxy, Hx, cwx, pN, aW, anY, ig, jx, aT, cm, n, h, K, m, eA, act, t, af); #c1(PTBP2) c2(NP_001287916) c3(polypyrimidine tract-binding protein 2 isoform 3) c4(113208) c5(113209, 113210, 113211, 113212, 113213, 113214) c6( ) c7(bxy, Hx, cwx, pN, aW, anY, ig, jx, aT, cm, n, h, K, m, eA, act, t, af); #c1(PTBP2) c2(NP_001287917) c3(polypyrimidine tract-binding protein 2 isoform 4) c4(113215) c5(113216, 113217, 113218, 113219, 113220, 113221, 113222, 113223, 113224, 113225, 113226) c6( ) c7(bxy, Hx, cwx, pN, aW, anY, ig, jx, aT, cm, n, h, K, m, eA, act, t, af); #c1(PTBP2) c2(NP_001287918) c3(polypyrimidine tract-binding protein 2 isoform 5) c4(113227) c5(113228, 113229, 113230, 113231, 113232, 113233) c6( ) c7(bxy, Hx, cwx, pN, aW, anY, ig, jx, aT, cm, n, h, K, m, eA, act, t, af); #c1(PTBP2) c2(NP_001287919) c3(polypyrimidine tract-binding protein 2 isoform 7) c4( ) c5(113234, 113235, 113236, 113237, 113238, 113239) c6( ) c7(bxy, Hx, cwx, pN, aW, anY, ig, jx, aT, cm, n, h, K, m, eA, act, t, af); #c1(PTBP2) c2(XP_011540177) c3(polypyrimidine tract-binding protein 2 isoform X2) c4(338554) c5(338555) c6( ) c7(bxy, Hx, cwx, pN, aW, anY, ig, jx, aT, cm, n, h, K, m, eA, act, t, af); #c1(PTBP2) c2(XP_011540178) c3(polypyrimidine tract-binding protein 2 isoform X3) c4( ) c5(338556) c6( ) c7(bxy, Hx, cwx, pN, aW, anY, ig, jx, aT, cm, n, h, K, m, eA, act, t, af); #c1(PTCD1) c2(NP_056360) c3(pentatricopeptide repeat-containing protein 1, mitochondrial) c4(187275, 187276, 187277, 187278, 187279, 187280) c5(187281, 187282, 187283, 187284, 187285, 187286, 187287, 187288, 187289, 187290, 187291, 187292, 187293, 187294, 187295, 187296, 187297, 187298, 187299, 187300, 187301, 187302, 187303, 187304, 187305, 187306, 187307, 187308, 187309, 187310, 187311) c6( ) c7(oe); #c1(PTCH1) c2(NP_000255) c3(protein patched homolog 1 isoform L) c4(5832, 5833, 5834) c5(5835, 5836, 5837, 5838, 5839, 5840, 5841, 5842, 5843, 5844, 5845, 5846) c6( ) c7(T, aC, aCh, rV, cwz, fd, ci, aon, xY, bLg, Na, Vp, bv, xy, aE, iv, K, eL, aa, aCg, aW, Az, CT, cwB, Qm, g, cm, aAW, qJ, bDd, eM, nB, vA, cj, m, asW, aAz, n, fr, Ll, aCi, azj, amJ, Nn, cwC, h, dL, Gc, dx, cC, cml, aua, aq, kp, alf, fq, op, iU, asl, dB, hk, Dp, YH, bkE, B, AN, ek, ZZ, AS, yk, fZ, aA, hz, Qo, AO, q, er, eA, eJ, XX, nv, Qg, afQ, aT, aAn, Nc, Ex, jf, iF, s, Qr, Y, ayU, r, en, t, Px, f, iK, ck, sS, nM, auo, cwA, hS, kh, id, Dd, dG, cwy, ad, dP, hd, Sb, yF, Yj, d, ff, Xj, aF, bF, es, Lj, cwD, adg, ZW, jr, bsJ); #c1(PTCH1) c2(NP_001077071) c3(protein patched homolog 1 isoform M) c4(37652, 37653, 37654) c5(37655, 37656, 37657, 37658, 37659, 37660, 37661, 37662, 37663, 37664, 37665, 37666, 37667, 37668, 37669, 37670) c6( ) c7(T, aC, aCh, rV, cwz, fd, ci, aon, xY, bLg, Na, Vp, bv, xy, aE, iv, K, eL, aa, aCg, aW, Az, CT, cwB, Qm, g, cm, aAW, qJ, bDd, eM, nB, vA, cj, m, asW, aAz, n, fr, Ll, aCi, azj, amJ, Nn, cwC, h, dL, Gc, dx, cC, cml, aua, aq, kp, alf, fq, op, iO, asl, dB, hk, Dp, YH, bkE, B, AN, ek, ZZ, AS, yk, fZ, aA, hz, Qo, AO, q, er, eA, eJ, XX, nv, Qg, afQ, aT, aAn, Nc, Ex jf, iF, s, Qr, Y, ayU, r, en, t, Px, f, iK, ck, sS, nM, auo, cwA, hS, kh, id, Dd, dG, cwy, ad, dP, hd, Db, yF, Yj, d, ff, Xj, aF, bF, es, Lj, cwD, adg, ZW, jr, bsJ); #c1(PTCH1) c2(NP_001077072) c3(protein patched homolog 1 isoform L′) c4(37671) c5(37672, 37673, 37674, 37675, 37676, 37677, 37678, 37679) c6( ) c7(T, aC, aCh, rV, cwz, fd, ci, aon, xY, bLg, Na, Vp, bv, xy, aE, iv, K, eL, aa, aCg, aW, Az, CT, cwB, Qm, g, cm, aAW, qJ, bDd, eM, nB, vA, cj, m, asW, aAz, n, fr, Ll, aCi, azj, amJ, Nn, cwC, h, dL, Gc, dx, cC, cml, aua, aq, kp, alf, fq, op, iO, asl, dB, hk, Dp, YH, bkE, B, AN, ek, ZZ, AS, yk, fZ, aA, hz, Qo, AO, q, er, eA, eJ, XX, nv, Qg, afQ, aT, aAn, Nc, Fx, jf, iF, s, Qr, Y, ayU, r, en, t, Px, f, iK, ck, sS, nM, auo, cwA, hS, kh, id, Dd, dG, cwy, ad, dP, hd, Db, yF, Yj, d, ff, Xj, aF, bF, es, Lj, cwD, adg, ZW, jr, bsJ); #c1(PTCH1) c2(XP_011517170) c3(protein patched homolog 1 isoform X2) c4(310708) c5(310709, 310710, 310711, 310712, 310713, 310714) c6( ) c7(T, aC, aCh, rV, cwz, fd, ci, aon, xY, bLg, Na, Vp, bv, xy, aE, iv, K, eL, aa, aCg, aW, Az, CT, cwB, Qm, g, cm, aAW, qJ, bDd, eM, nB, vA, cj, m, asW, aAz, n, fr, Ll, aCi, azj, amJ, Nn, cwC, h, dL, Gc, dx, cC, cml, aua, aq, kp, alf, fq, op, iO, asl, dB, hk, Dp, YH, bkE, B, AN, ek, ZZ, AS, yk, fZ, aA, hz, Qo, AO, q, er, eA, eJ, XX, nv, Qg, afQ, aT, aAn, Nc, Ex, jf, iF, s, Qr, Y, ayU, r, en, t, Px, f, iK, ck, sS, nM, auo, cwA, hS, kh, id, Dd, dG, cwy, ad, dP, hd, Db, yF, Yj, d, ff, Xj, aF, bF, es, Lj, cwD, adg, ZW, jr, bsJ); #c1(PTCH1) c2(XP_011517174) c3(protein patched homolog 1 isoform X1) c4( ) c5(310715, 310716, 310717, 310718, 310719, 310720, 310721, 310722, 310723, 310724, 310725) c6( ) c7(T, aC, aCh, rV, cwz, fd, ci, aon, xY, bLg, Na, Vp, bv, xy, aE, iv, K, eL, aa, aCg, aW, Az, CT, cwB, Qm, g, cm, aAW, qJ, bDd, eM, nB, vA, cj, m, asW, aAz, n, fr, Ll, aCi, azj, amJ, Nn, cwC, h, dL, Gc, dx, cC, cml, aua, aq, kp, alf, fq, op, iO, asl, dB, hk, Dp, YH, bkE, B, AN, ek, ZZ, AS, yk, fZ, aA, hz, Qo, AO, q, er, eA, eJ, XX, nv, Qg, afQ, aT, aAn, Nc, Fx, jf, iF, s, Qr, Y, ayU, r, en, t, Px, f, iK, ck, sS, nM, auo, cwA, hS, kh, id, Dd, dG, cwy, ad, dP, hd, Db, yF, Yj, d, ff, Xj, aF, bF, es, Lj, cwD, adg, ZW, jr, bsJ); #c1(PTCH1) c2(XP_011517175) c3(protein patched homolog 1 isoform X3) c4( ) c5(310726, 310727, 310728, 310729, 310730, 310731, 310732) c6( ) c7(T, aC, aCh, rV, cwz, fd, ci, aon, xY, bLg, Na, Vp, bv, xy, aE, iv, K, eL, aa, aCg, aW, Az, CT, cwB, Qm, g, cm, aAW, qJ, bDd, eM, nB, vA, cj, m, asW, aAz, n, fr, Ll, aCi, azj, amJ, Nn, cwC, h, dL, Gc, dx, cC, cml, aua, aq, kp, alf, fq, op, iO, asl, dB, hk, Dp, YH, bkE, B, AN, ek, ZZ, AS, yk, fZ, aA, hz, Qo, AO, q, er, eA, eJ, XX, nv, Qg, afQ, aT, aAn, Nc, Ex, jf, iF, s, Qr, Y, ayU, r, en, t, Px, f, iK, ck, sS, nM, auo, cwA, hS, kh, id, Dd, dG, cwy, ad, dP, hd, Db, yF, Yj, d, ff, Xj, aF, bF, es, Lj, cwD, adg, ZW, jr, bsJ); #c1(PTCH1) c2(XP_011517176) c3(protein patched homolog 1 isoform X4) c4(310733, 310734, 310735) c5(310736, 310737, 310738, 310739, 310740, 310741, 310742, 310743, 310744, 310745, 310746, 310747, 310748, 310749, 310750, 310751, 310752, 310753, 310754, 310755, 310756, 310757, 310758, 310759, 310760, 310761, 310762, 310763, 310764, 310765, 310766) c6( ) c7(T, aC, aCh, rV, cwz, fd, ci, aon, xY, bLg, Na, Vp, bv, xy, aE, iv, K, eL, aa, aCg, aW, Az, CT, cwB, Qm, g, cm, aAW, qJ, bDd, eM, nB, vA, cj, m, asW, aAz, n, fr, Ll, aCi, azj, amJ, Nn, cwC, h, dL, Gc, dx, cC, cml, aua, aq, kp, alf, fq, op, iO, asl, dB, hk, Dp, YH, bkE, B, AN, ek, ZZ, AS, yk, fZ, aA, hz, Qo, AO, q, er, eA, eJ, XX, nv, Qg, afQ, aT, aAn, Nc, Ex, jf, iF, s, Qr, Y, ayU, r, en, t, Px, f, iK, ck, sS, nM, auo, cwA, hS, kh, id, Dd, dG, cwy, ad, dP, hd, Db, yF, Yj, d, ff, Xj, aF, bF, es, Lj, cwD, adg, ZW, jr, bsJ); #c1(PTCHD1) c2(NP_775766) c3(patched domain-containing protein 1) c4(250229) c5(250230, 250231, 250232, 250233, 250234, 250235) c6( ) c7(nf, bN, VX, nA, rz); #c1(PTCHD4) c2(NP_001013754) c3(patched domain-containing protein 4 isoform 1) c4(25744) c5(25745, 25746, 25747, 25748, 25749, 25750) c6( ) c7(Ea); #c1(PTCHD4) c2(NP_997382) c3(patched domain-containing protein 4 isoform 2) c4(265486, 265487) c5(265488, 265489, 265490, 265491, 265492, 265493, 265494, 265495, 265496, 265497, 265498, 265499) c6( ) c7(Ea); #c1(PTCRA) c2(NP_001230098) c3(pre T-cell antigen receptor alpha isoform 3 precursor) c4(85900) c5(85901, 85902, 85903, 85904, 85905, 85906) c6( ) c7(kl, A, fR, sQ, apK, kH, uo, ut, dX, IQ, wA, ae); #c1(PTCRA) c2(NP_001230099) c3(pre T-cell antigen receptor alpha isoform 4 precursor) c4(85907) c5(85908, 85909, 85910, 85911, 85912, 85913, 85914, 85915, 85916, 85917, 85918, 85919) c6( ) c7(kl, A, fR, sQ, apK, kH, uo, ut, dX, IQ, wA, ae); #c1(PTCRA) c2(NP_612153) c3(pre T-cell antigen receptor alpha isoform 2 precursor) c4(236100) c5(236101, 236102, 236103, 236104, 236105, 236106) c6( ) c7(kl, A, fR, sQ, apK, kH, uo, ut, dX, IQ, wA, ae); #c1(PTCRA) c2(XP_011512618) c3(pre T-cell antigen receptor alpha isoform X1) c4(303585) c5( ) c6( ) c7(kl, A, fR, sQ, apK, kH, uo, ut, dX, ID, wA, ae); #c1(PTDSS1) c2(NP_001277154) c3(phosphatidylserine synthase 1 isoform 2) c4( ) c5(109173, 109174, 109175, 109176, 109177, 109178) c6( ) c7(cwE, aq, V, B, hD); #c1(PTDSS1) c2(NP_055569) c3(phosphatidylserine synthase 1 isoform 1) c4(181982, 181983) c5(181984, 181985, 181986, 181987, 181988, 181989, 181990) c6( ) c7(cwE, aq, V, B, hD); #c1(PTEN) c2(NP_000305) c3(phosphatidylinositol 3,4,5-trisphosphate 3-phosphatase and dual-specificity protein phosphatase PTEN isoform PTEN) c4( ) c5(6766, 6767, 6768, 6769, 6770) c6( ) c7(gh, T, fd, ci, Ks, bv, aE, awe, ajv, cwN, dV, HR, hu, cp, aa, ZH, iE, wp, Ls, Az, CT, vs, PQ, zE, ahv, iA, nB, cj, cX, k, ht, oE, cwF, aj, auA, PR, cd, cwM, IG, ey, aQM, ox, on, pl, Yl, MD, ahJ, dB, eD, zG, qF, aMI, cwJ, AN, oD, aA, cz, Iu, AO, q, PW, qK, cy, rO, nF, rz, IM, amw, cwK, bf, NE, eS, cl, cwl, iM, RW, bt, On, qz, uG, atS, jh, aHv, KO, aue, ad, afb, hX, iC, ccJ, yt, oW, bj, IQ, wm, BO, Ub, ff, dq, Sm, bz, rZ, amS, aq, i, aed, iu, ne, jr, bM, cwO, bkF, if, bB, aon, ip, x, aeO, aJu, xQ, eG, Jl, fc, hl, fH, Qq, Qm, as, eF, cm, aHd, qJ, bkD, go, vA, mx, Ql, ik, wu, Pi, n, PY, nA, Cd, b, jz, pe, oC, gd, AQ, bP, GU, hL, hj, at, B, ul, AS, dA, cwP, IH, v, Yn, hW, BJ, aHs, ae, jf, Qr, vT, ev, Lf, aZg, aom, bu, t, apx, ck, kP, cwH, gX, anD, oX, hl, aBz, Fc, hd, aop, py, Db, cwG, nJ, mu, d, je, aiz, adj, dr, bF, D, afd, y, aC, hV, xE, Be, Qk, M, K, eL, bWL, Ku, g, iP, AM, QF, m, cwL, Le, zX, aw, NT, qy, ft, kH, KV, CN, cM, ML, XT, Ld, kT, aKA, zl, Qz, IB, it, fM, hz, eA, J, er, XX, Ig, hb, qv, xR, Y, r, en, iK, bN, Dy, auo, np, LS, id, aZ, iJ, Jm, dP, fX, hP, cfu, Yi, Gv, xs, eH, bow, iR, Nq, beC, pu, Ew, cP, ix, cwQ, Tb, ahc, apr, bZe, aR, il, Fo, MO, aAu, aW, eM, iT, gn, aEj, aKt, fr, qN, ai, Bl, hw, kl, h, jy, dL, aDC, he, Xh, OV, asp, aq, kp, me, op, oU, hk, Vy, hR, HB, eh, cn, bL, yk, cR, yO, bBs, mj, cF, aoA, bUn, aT, Ex, Tj, an, qw, s, iU, oV, nM, adR, aJQ, VB, hS, ow, ha, Fb, oH, av, Rq, NS, fb, pq, iL, eZ, Ej, aF, Hp, LB, es, eU, bE, aS, MG, X, bND); #c1(PTEN) c2(NP_001291646) c3(phosphatidylinositol 3,4,5-trisphosphate 3-phosphatase and dual-specificity protein phosphatase PTEN isoform PTEN-L) c4(116298) c5(116299) c6( ) c7(gh, T, fd, ci, Ks, bv, aE, awe, ajv, cwN, dV, HR, hu, cp, aa, ZH, iE, wp, Ls, Az, CT, vs, PQ, zE, ahv, iA, nB, cj, cX, k, ht, oE, cwF, aj, auA, PR, cd, cwM, IG, ey, aQM, ex, on, pl, Yl, MD, ahJ, dB, eD, zG, qF, aMl, cwJ, AN, oD, aA, cz, Iu, AO, q, PW, qK, cy, rO, oF, rz, IM, amw, cwK, bf, NE, eS, cl, cwl, iM, RW, bt, On, qz, uG, atS, jh, aHv, KO, aue, ad, afb, hX, iC, ccJ, yt, oW, bj, IQ, wm, BO, Ub, ff, dq, Sm, bz, rZ, amS, aq, i, aed, iu, ne, jr, bM, cwO, bkF, if, bB, aon, ip, x, aeU, aJu, xQ, eG, Jl, fc, hi, fH, Qq, Qm, as, eF, cm, aHd, qJ, bkD, go, vA, mx, Ql, ik, wu, Pi, n, PY, nA, Cd, b, jz, pe, oC, gd, AQ, bP, GU, hL, hj, at, B, ul, AS, dA, cwP, IH, v, Yn, hW, BJ, aHs, ae, jf, Qr, vT, ev, Lf, aZg, aom, bu, t, apx, ck, kP, cwH, gX, anD, oX, hl, aBz, Fc, hd, aop, py, Db, cwG, nJ, mu, d, je, aiz, adj, dr, bF, D, afd, y, aC, hV, xE, Be, Qk, M, K, eL, bWL, Ku, g, iP, AM, QF, m, cwL, Le, zX, aw, NT, qy, ft, kH, KV, CN, cM, ML, XT, Ld, kT, aKA, zl, Qz, IB, it, fM, hz, eA, J, er, XX, Ig, hb, qv, xR, Y, r, en, iK, bN, Dy, auo, np, LS, id, aZ, iJ, Jm, dP, fX, hP, cfu, Yi, Gv, xs, eH, bow, iR, Nq, beC, pu, Ew, cP, ix, cwQ, Tb, ahc, apr, bZe, aR, il, Fo, MO, aAu, aW, eM, iT, gn, aEj, aKt, fr, qN, ai, Bl, hw, kl, h, jy, dL, aDC, he, Xh, OV, asp, aq, kp, mo, op, oU, hk, Vy, hR, HB, oh, cn, bL, yk, cR, yO, bBs, mj, cF, aoA, bUn, aT, Fx, Tj, an, qw, s, iU, oV, nM, adR, aJQ, VB, hS, ow, ha, Fb, oH, av, Rq, NS, fb, pq, iL, eZ, Ej, aF, Hp, LB, es, eU, bE, aS, MG, X, bND); #c1(PTER) c2(NP_001248766) c3(phosphotriesterase-related protein isoform 2) c4(94017) c5(94018, 94019, 94020, 94021, 94022, 94023) c6( ) c7(bL, eR, Y, dK, hl, r, aq, v, aY, q); #c1(PTER) c2(NP_109589) c3(phosphotriesterase-related protein isoform 1) c4(219661) c5(219662, 219663, 219664, 219665, 219666, 219667, 219668, 219669, 219670, 219671, 219672, 219673, 219674, 219675, 219676, 219677, 219678, 219679) c6( ) c7(bL, eR, Y, dK, hl, r, aq, v, aY, q); #c1(PTF1A) c2(NP_835455) c3(pancreas transcription factor 1 subunit alpha) c4(253505) c5(253506, 253507, 253508, 253509, 253510, 253511, 253512) c6( ) c7(Ng, axl, mh, aE, cwR, cpC, atf, kp, eJ); #c1(PTGDR) c2(XP_005267948) c3(prostaglandin D2 receptor isoform X1) c4(281327) c5(281328, 281329, 281330, 281331, 281332, 281333) c6( ) c7(bF, bM, av, af, z, sp, cwS, ff, jh, wb, m, en, eE, cm, B, eK, L); #c1(PTGDR2) c2(NP_004769) c3(prostaglandin D2 receptor 2) c4(149445) c5(149446, 149447, 149448, 149449, 149450, 149451) c6( ) c7(bM, aDy, aD, jh, n, Jx, q, Xl, tN, Nr, sp, r, po, eE, ve, DF, Nq, cT, z, Hb, Tu, fD); #c1(PTGDS) c2(NP_000945) c3(prostaglandin-H2 D-isomerase precursor) c4(17585, 17586, 17587, 17588, 17589) c5(17590, 17591, 17592, 17593, 17594, 17595, 17596, 17597, 17598, 17599, 17600, 17601, 17602, 17603, 17604, 17605, 17606, 17607, 17608, 17609, 17610, 17611, 17612, 17613, 17614, 17615, 17616, 17617, 17618, 17619, 17620, 17621, 17622, 17623, 17624, 17625, 17626, 17627, 17628, 17629, 17630, 17631, 17632, 17633, 17634, 17635) c6( ) c7(bL, bM, T, dD, akd, eR, aDy, ea, aD, rl, qy, bLf, hz, aj, bB, OY, ci, eq, jh, q, J, ad, ip, Vp, b, hd, oN, aMT, aT, hD, jy, bK, K, ji, ae, af, yF, Oe, jf, OV, d, yi, aW, sp, Y, az, cr, r, rM, cwU, dN, bBH, Vl, Au, as, iV, eE, t, f, ale, zV, Ew, nB, dB, bE, asI, mG, z, cwT, uz, cS, m, Hb, fD, i, Bh, L); #c1(PTGER1) c2(NP_000946) c3(prostaglandin E2 receptor EP1 subtype) c4(17636) c5(17637, 17638, 17639, 17640, 17641, 17642) c6( ) c7(bM, sY, kh, aqo, cz, bB, zP, av, di, af, zQ, qt, ff, en, g, uC, eK, ac, bE, dJ, m, B); #c1(PTGER2) c2(NP_000947) c3(prostaglandin E2 receptor EP2 subtype) c4(17643) c5(17644, 17645, 17646, 17647, 17648, 17649) c6( ) c7(bM, sY, T, fR, sQ, pf, e, aw, NT, aA, j, ci, q, ad, El, eW, dP, av, M, aT, IQ, bau, ae, af, s, cwV, Rr, r, aF, g, t, uC, cm, kT, cwW, c, eM, afc, wB, uo, ut, Tu, y); #c1(PTGER3) c2(XP_011540111) c3(prostaglandin E2 receptor EP3 subtype isoform X1) c4(338466) c5(338467, 338468, 338469, 338470, 338471, 338472) c6( ) c7(bM, sY, T, xS, fR, sQ, aA, bB, ad, fS, K, IQ, aNR, ae, af, DA, kI, aRL, aq, aF, g, as, iR, uC, bE, bE, uo, ut, m); #c1(PTGER3) c2(XP_011540112) c3(prostaglandin E2 receptor EP3 subtype isoform X2) c4(338473) c5(338474) c6( ) c7(bM, sY, T, xS, fR, sQ, aA, bB, ad, fS, K, IQ, aNR, ae, af, DA, kI, aRL, aq, aF, g, as, iR, uC, bE, bE, uo, ut, m); #c1(PTGER4) c2(NP_000949) c3(prostaglandin E2 receptor EP4 subtype) c4(17650) c5(17651, 17652, 17653, 17654, 17655, 17656) c6( ) c7(bL, bM, sY, T, fM, pG, xb, DD, dD, pf, if, NT, jh, aA, cz, bB, j, ci, eq, qN, fr, V, q, ad, eW, dP, av, aE, M, aT, ae, af, tN, A, mR, bf, s, aW, sp, fO, Rr, r, fe, Au, aF, g, iV, cm, aTQ, uC, ck, gt, eM, xZ, bE, AM, NI, EY, aQY, qR, B, y); #c1(PTGES) c2(NP_004869) c3(prostaglandin E synthase) c4(150446) c5(150447, 150448, 150449, 150450, 150451) c6( ) c7(T, fM, dA, fR, sQ, id, pf, atC, atj, ht, aw, uO, aA, cz, bB, awr, jh, ci, q, ad, eA, dP, av, jz, xE, dY, Ig, aT, IG, cy, K, IQ, ae, af, eu, DI, bf, s, JI, aW, ff, fO, LZ, r, fe, hN, aF, en, g, as, t, zE, iK, ac, c, eM, xZ, bE, U, uo, uz, ut, hE, it, B, y); #c1(PTGES) c2(XP_011517512) c3(prostaglandin E synthase isoform X1) c4( ) c5(311306) c6( ) c7(T, fM, dA, fR, sQ, id, pf, atC, atj, ht, aw, uO, aA, cz, bB, awr, jh, ci, q, ad, eA, dP, av, jz, xE, dY, Ig, aT, IG, cy, K, IQ, ae, af, eu, DI, bf, s, JI, aW, ff, fO, LZ, r, fe, hN, aF, en, g, as, t, zE, iK, ac, c, eM, xZ, bE, U, uo, uz, ut, hE, it, B, y); #c1(PTGES2) c2(NP_079348) c3(prostaglandin E synthase 2 isoform 1) c4(217784, 217785) c5(217786, 217787, 217788, 217789, 217790, 217791, 217792, 217793) c6( ) c7(bL, T, af, nB, jx, r, uz, awr, mf, v, m, ei, g, pd, ae, q, ad); #c1(PTGES2) c2(XP_011517353) c3(prostaglandin E synthase 2 isoform X1) c4( ) c5(311084, 311085, 311086, 311087, 311088) c6( ) c7(bL, T, af, nB, jx, r, uz, awr, mf, v, m, ei, g, pd, ae, q, ad); #c1(PTGES3) c2(NP_006592) c3(prostaglandin E synthase 3 isoform a) c4(166498) c5(166499, 166500, 166501, 166502, 166503, 166504) c6( ) c7(bM, T, eG, W, bP, fO, Pg, U, aT, aA, uz, auT, aF, aIQ, K, g, aIR, aIP, ae, ad); #c1(PTGIR) c2(NP_000951) c3(prostacyclin receptor) c4(17657) c5(17658, 17659, 17660, 17661, 17662, 17663) c6( ) c7(P, bM, dD, ea, e, gZ, Au, aS, Tu, eq, af); #c1(PTGIS) c2(NP_000952) c3(prostacyclin synthase precursor) c4(17664) c5(17665, 17666, 17667, 17668, 17669, 17670) c6( ) c7(ID, Dw, dD, eR, ea, e, al, aw, cz, bB, aj, eq, fu, bX, q, J, av, afm, aT, cy, af, eu, wC, ly, mR, ue, s, aW, ff, r, Au, zC, en, g, bz, qa, lx, eK, nM, ac, eM, bE, m, ei, IC); #c1(PTGR1) c2(NP_001139581) c3(prostaglandin reductase 1 isoform 2) c4(59529, 59530) c5(59531, 59532, 59533, 59534, 59535, 59536, 59537, 59538) c6( ) c7(aq, bz, B, g, hS); #c1(PTGR1) c2(NP_036344) c3(prostaglandin reductase 1 isoform 1) c4(173091, 173092) c5(173093, 173094, 173095, 173096, 173097, 173098, 173099, 173100, 173101, 173102, 173103) c6( ) c7(aq, bz, B, g, hS); #c1(PTGR1) c2(XP_011516696) c3(prostaglandin reductase 1 isoform X1) c4(310103) c5(310104, 310105, 310106, 310107, 310108, 310109, 310110, 310111, 310112, 310113, 310114, 310115, 310116, 310117, 310118, 310119, 310120, 310121, 310122) c6( ) c7(aq, bz, B, g, hS); #c1(PTGR1) c2(XP_011516697) c3(prostaglandin reductase 1 isoform X2) c4( ) c5(310123, 310124, 310125, 310126, 310127, 310128, 310129, 310130) c6( ) c7(aq, bz, B, g, hS); #c1(PTGS1) c2(NP_000953) c3(prostaglandin G/H synthase 1 isoform 1 precursor) c4(17671) c5(17672, 17673, 17674, 17675, 17676, 17677, 17678) c6( ) c7(cwY, bM, T, fR, pf, ea, if, e, eb, bB, amj, fd, ci, afr, aE, rw, fS, M, K, dQ, eL, aa, Mq, aW, aoo, az, aNq, aB, g, sz, uC, aWd, fT, jV, eM, iT, wB, uo, sU, m, dD, sQ, aw, ht, NT, n, aj, fr, ct, qN, cd, ai, cqH, Yc, IG, dL, pl, OV, sp, lb, fe, cM, SE, at, ut, acJ, fL, eR, aA, cz, hy, j, bX, q, J, nv, qp, aT, Oi, wP, jj, bq, ae, af, dl, eu, ajU, s, iU, fO, afS, Pg, r, akY, Io, aPf, en, apx, t, iK, dS, ck, sS, tW, ac, gX, fD, ao, On, Kd, sY, BD, akd, MH, aD, iW, bS, eq, mC, ad, wD, av, ds, cwX, IQ, vP, d, ff, eZ, iV, Z, bz, LB, bF, wQ, Bv, zr, bE, ei, MC, IC, X, y); #c1(PTGS1) c2(NP_001258093) c3(prostaglandin G/H synthase 1 isoform 3 precursor) c4(95957) c5(95958, 95959, 95960, 95961, 95962, 95963) c6( ) c7(cwY, bM, T, fR, pf, ea, if, e, eb, bB, amj, fd, ci, afr, aE, rw, fS, M, K, dQ, eL, aa, Mq, aW, aoo, az, aNq, aB, g, sz, uC, aWd, fT, jV, eM, iT, wB, uo, sU, m, dD, sQ, aw, ht, NT, n, aj, fr, ct, qN, cd, ai, cqH, Yc, IG, dL, pl, OV, sp, lb, fe, cM, SE, at, ut, acJ, fL, eR, aA, cz, hy, j, bX, q, J, nv, qp, aT, Oi, wP, jj, bq, ae, af, dl, eu, ajU, s, iU, fO, afS, Pg, r, akY, Io, aPf, en, apx, t, iK, dS, ck, sS, tW, ac, gX, fD, ao, On, Kd, sY, BD, akd, MH, aD, iW, bS, eq, mC, ad, wD, av, ds, cwX, IQ, vP, d, ff, eZ, iV, Z, bz, LB, bF, wQ, Bv, zr, bE, ei, MC, IC, X, y); #c1(PTGS1) c2(NP_001258297) c3(prostaglandin G/H synthase 1 isoform 6) c4(96011) c5(96012, 96013, 96014, 96015, 96016, 96017) c6( ) c7(cwY, bM, T, fR, pf, ea, if, e, eb, bB, amj, fd, ci, afr, aE, rw, fS, M, K, dQ, eL, aa, Mq, aW, aoo, az, aNq, aB, g, sz, uC, aWd, fT, jV, eM, iT, wB, uo, sU, m, dD, sQ, aw, ht, NT, n, aj, fr, ct, qN, cd, ai, cqH, Yc, IG, dL, pI, OV, sp, lb, fe, cM, SE, at, ut, acJ, fL, eR, aA, cz, hy, j, bX, q, J, nv, qp, aT, Oi, wP, jj, bq, ae, af, dl, eu, ajU, s, iU, fO, afS, Pg, r, akY, Io, aPf, en, apx, t, iK, dS, ck, sS, tW, ac, gX, fD, ao, On, Kd, sY, BD, akd, MH, aD, iW, bS, eq, mC, ad, wD, av, ds, cwX, IQ, vP, d, ff, eZ, iV, Z, bz, LB, bF, wQ, Bv, zr, bE, ei, MC, IC, X, y); #c1(PTGS1) c2(NP_542158) c3(prostaglandin G/H synthase 1 isoform 2 precursor) c4(231452) c5(231453, 231454, 231455, 231456, 231457, 231458) c6( ) c7(cwY, bM, T, fR, pf, ea, if, e, eb, bB, amj, fd, ci, afr, aE, rw, fS, M, K, dQ, eL, aa, Mq, aW, aoo, az, aNq, aB, g, sz, uC, aWd, fT, jV, eM, iT, wB, uo, sU, m, dD, sQ, aw, ht, NT, n, aj, fr, ct, qN, cd, ai, cqH, Yc, IG, dL, pl, OV, sp, lb, fe, cM, SE, at, ut, acJ, fL, eR, aA, cz, hy, j, bX, q, J, nv, qp, aT, Oi, wP, jj, bq, ae, af, dl, eu, ajU, s, iU, fO, afS, Pg, r, akY, Io, aPf, en, apx, t, iK, dS, ck, sS, tW, ac, gX, fD, ao, On, Kd, sY, BD, akd, MH, aD, iW, bS, eq, mC, ad, wD, av, ds, cwX, IQ, vP, d, ff, eZ, iV, Z, bz, LB, bF, wQ, Bv, zr, bE, ei, MC, IC, X, y); #c1(PTGS1) c2(XP_011517178) c3(prostaglandin G/H synthase 1 isoform X1) c4(310767) c5(310768, 310769, 310770, 310771, 310772) c6( ) c7(cwY, bM, T, fR, pf, ea, if, e, eb, bB, amj, fd, ci, afr, aE, rw, fS, M, K, dQ, eL, aa, Mq, aW, aoo, az, aNq, aB, g, sz, uC, aWd, fT, jV, eM, iT, wB, uo, sU, m, dD, sQ, aw, ht, NT, n, aj, fr, ct, qN, cd, ai, cqH, Yc, IG, dL, pl, OV, sp, lb, fe, cM, SE, at, ut, acJ, fL, eR, aA, cz, hy, j, bX, q, J, nv, qp, aT, Oi, wP, jj, bq, ae, af, dl, eu, ajU, s, iU, fO, afS, Pg, r, akY, Io, aPf, en, apx, t, iK, dS, ck, sS, tW, ac, gX, fD, ao, On, Kd, sY, BD, akd, MH, aD, iW, bS, eq, mC, ad, wD, av, ds, cwX, IQ, vP, d, ff, eZ, iV, Z, bz, LB, bF, wQ, Bv, zr, bE, ei, MC, IC, X, y); #c1(PTGS2) c2(NP_000954) c3(prostaglandin G/H synthase 2 precursor) c4(17679) c5(17680, 17681, 17682, 17683, 17684, 17685) c6( ) c7(uB, gh, T, ea, bO, fd, ci, bv, aE, rw, dV, Ds, HR, hu, cp, aa, li, az, nY, vs, axp, zV, ba, fT, jV, gt, nB, cj, k, eg, cE, aNm, dt, Uc, ht, RC, aj, cd, IG, dd, pI, MD, fQ, fe, hq, dB, ajd, E, qF, aZD, AN, aJC, DD, fZ, aA, cz, wy, Iu, AO, q, Oi, cy, jj, dl, eu, bf, fO, bg, Io, cl, pb, rR, ac, bt, rA, ao, On, BD, iW, uG, rl, jh, KO, dG, uu, fu, ad, afb, hX, iC, wD, cwX, IQ, vP, WZ, DI, BO, ff, gC, aEW, Sm, iV, bz, DF, DT, xZ, IC, ne, iu, oO, bM, if, e, bB, Tz, ip, Yy, azm, bc, akl, Qe, xQ, dH, JI, Oj, fc, hl, kt, as, ir, eE, eF, cm, Qt, aWd, qJ, vA, vy, hh, in, dD, cwZ, n, jz, gd, eV, hn, A, RT, PX, lb, po, yq, bP, dC, PI, bQU, hL, at, ut, fL, sa, cB, B, AS, IH, eX, v, Qo, V, eJ, cqV, bGn, hW, wN, Id, avt, bau, ae, jf, Yw, zH, ev, Lf, acB, bu, apx, LV, t, ck, wO, gX, Tu, vi, nZ, MH, oR, eq, Fc, hd, Db, ds, Hk, LA, sj, Jc, Yj, d, NH, rM, th, Z, bF, D, gk, Hg, y, pC, aC, UH, fR, hV, atj, al, qj, IR, afr, u, Bc, M, K, GO, wt, eL, avn, qS, aoo, mQ, LZ, hN, aB, g, uC, ou, AM, nF, U, uo, m, sQ, sw, zX, aw, NT, BH, BF, zP, ft, pN, It, cU, wb, KV, ks, agF, jT, cM, ar, afe, Pr, it, L, fM, fG, jx, pQ, hz, j, acn, il, pd, eA, J, er, akE, XX, Ig, yg, bq, xR, Y, aZs, Pg, r, aou, en, iK, bN, Dy, c, dh, dy, EY, fD, GI, sY, kh, id, akd, bkL, uO, aET, bS, ah, aAq, dP, oj, io, vB, ji, NM, WW, IU, BN, IR, vj, eH, iR, cuy, Nq, Bv, Lj, ei, hE, pf, fV, eb, crK, aR, dY, aDk, H, DA, ayT, aAu, aW, eM, iT, wB, aep, uJ, QS, cZ, aEj, aBx, awr, fr, ct, qN, kO, ai, eW, co, BI, cc, hw, Yc, h, aPe, dL, hB, db, Nr, aq, Hu, op, hk, FV, bm, hR, uz, acJ, cir, bL, Dw, Ik, eR, yk, cR, hy, C, aKc, ga, Tl, mP, uT, nv, LY, qp, afQ, aT, UN, zg, an, af, ak, s, iU, oV, akY, f, dS, sS, nM, pZ, aJt, AH, aDj, VB, hS, Kd, aD, bmJ, Fb, oH, jE, mC, av, I, F, ib, oz, NS, Yo, jo, uQ, qt, eZ, asV, Ej, aF, aDd, S, eK, LB, es, aqM, bE, uR, aS, tr, MC, adg, X, Ex); #c1(PTH) c2(NP_000306) c3(parathyroid hormone preproprotein) c4(6771) c5(6772, 6773, 6774, 6775, 6776, 6777, 6778, 6779, 6780, 6781, 6782, 6783) c6(6784, 6785, 6786, 6787) c7(T, rV, ea, e, aI, bBV, ci, aTS, cxa, aY, epi, aJO, acX, bsH, bv, aE, pX, ari, K, EL, dQ, azh, bDT, kF, aW, Np, Lm, eF, Vm, nB, cxd, nF, TG, iS, QF, aYS, k, azg, IS, Ly, aj, nA, mL JW, cd, adf, amB, ft, zw, kH, jy, eV, dL, bta, aAG, OM, he, hi, A, aAI, OX, Hz, arp, aq, aLi, YE, In, FV, hj, tl, at, pg, aAQ, B, vQ, bL, AB, eR, eX, cz, cR, adi, wo, amC, j, avO, pd, J, er, bke, xx, ahy, TI, nv, xW, aT, yu, rD, zg, zp, rz, ae, af, aeY, bA, kl, s, iU, oV, AA, EJ, bRK, Qi, arr, rR, acW, pa, yl, iM, cxh, hr, fP, agf, dy, bt, aAO, ars, cxg, pY, aZ, ha, jN, Ay, cxc, xt, ad, fU, oW, bsR, yh, Yi, aAL, Jg, je, vj, eH, OQ, cxb, nh, cxe, dq, HI, bz, dr, wW, qa, pv, gk, aMa, cxf, yE, bE, bon, X); #c1(PTH1R) c2(NP_000307) c3(parathyroid hormone/parathyroid hormone-related peptide receptor precursor) c4(6788, 6789, 6790) c5(6791, 6792, 6793, 6794, 6795, 6796, 6797, 6798, 6799, 6800, 6801, 6802, 6803, 6804, 6805, 6806, 6807, 6808, 6809, 6810, 6811, 6812, 6813, 6814, 6815, 6816, 6817, 6818, 6819, 6820) c6( ) c7(T, kh, aC, eR, fR, wo, fr, ci, cxa, aY, ahy, xW, aT, af, azh, bA, aa, hi, kF, aW, vj, eH, cxj, eF, dr, nB, cxk, cxi, In, azg, k, qF, cxI, i, X, ars); #c1(PTH2) c2(NP_848544) c3(tuberoinfundibular peptide of 39 residues preproprotein) c4( ) c5(253806, 253807, 253808, 253809, 253810, 253811) c6(253812) c7(ft); #c1(PTH2) c2(XP_011524711) c3(tuberoinfundibular peptide of 39 residues isoform X1) c4(319206) c5(319207) c6( ) c7(ft); #c1(PTH2R) c2(NP_005039) c3(parathyroid hormone 2 receptor precursor) c4(152374) c5(152375, 152376, 152377, 152378, 152379, 152380) c6( ) c7(bA, aDR, ac, aDQ); #c1(PTHLH) c2(NP_945315) c3(parathyroid hormone-related protein isoform 2 preproprotein) c4(260767, 260768, 260769) c5(260770, 260771, 260772, 260773, 260774, 260775, 260776, 260777, 260778, 260779, 260780, 260781, 260782, 260783, 260784, 260785, 260786, 260787, 260788, 260789, 260790, 260791, 260792, 260793, 260794, 260795, 260796, 260797, 260798, 260799) c6( ) c7(T, aC, Tb, fR, ea, eb, bB, fd, zh, ci, cxa, mF, aY, aR, ip, bv, aE, Xc, pX, Eo, cxo, rB, K, EL, azh, aa, kF, aW, Np, cxm, cxn, g, as, eF, cm, cpE, eM, iA, avZ, iT, wE, vA, iS, azg, m, iu, cZ, dD, zt, aj, fr, cd, ke, ft, zw, kH, Ne, yZ, wb, ey, dd, op, asE, ar, KE, YE, Qu, In, tl, pg, qF, bee, B, um, cn, eR, IH, sM, GC, Iu, q, J, eA, eJ, mj, hb, xW, rS, yg, aT, rD, zp, aOV, ae, aeY, bA, s, vT, iU, Y, ev, r, Io, en, t, EJ, bRK, ck, iM, TJ, aHB, cxh, agf, Da, xb, VB, cxg, kh, dM, jN, jh, Hn, Fb, eq, iG, xt, ad, av, Tg, py, cxp, cb, Yi, uQ, je, qt, ff, eH, HI, bz, dr, es, yE, bE, i, hE, X, y); #c1(PTHLH) c2(XP_011519077) c3(parathyroid hormone-related protein isoform X1) c4(313672) c5(313673, 313674, 313675, 313676, 313677, 313678, 313679, 313680, 313681, 313682, 313683, 313684, 313685, 313686) c6( ) c7(T, aC, Tb, fR, ea, eb, bB, fd, zh, ci, cxa, mF, aY, aR, ip, bv, aE, Xc, pX, Eo, cxo, rB, K, EL, azh, aa, kF, aW, Np, cxm, cxn, g, as, eF, cm, cpE, eM, iA, avZ, iT, wE, vA, iS, azg, m, iu, cZ, dD, zt, aj, fr, cd, ke, ft, zw, kH, Ne, yZ, wb, ey, dd, op, asE, ar, KE, YE, Qu, In, tl, pg, qF, bee, B, um, cn, eR, IH, sM, GC, Iu, q, J, eA, eJ, mj, hb, xW, rS, yg, aT, rD, zp, aOV, ae, aeY, bA, s, vT, iU, Y, ev, r, Io, en, t, EJ, bRK, ck, iM, TJ, aHB, cxh, agf, Da, xb, VB, cxg, kh, dM, jN, jh, Hn, Fb, eq, iG, xt, ad, av, Tg, py, cxp, cb, Yi, uQ, je, qt, ff, eH, HI, bz, dr, es, yE, bE, i, hE, X, y); #c1(PTK2) c2(NP_001186578) c3(focal adhesion kinase 1 isoform c) c4(77876, 77877) c5(77878, 77879, 77880, 77881, 77882, 77883, 77884, 77885, 77886, 77887, 77888, 77889) c6( ) c7(T, ht, aA, Bm, n, cz, bB, fr, ci, wo, fd, zP, V, iJ, q, ad, eA, hX, eJ, ip, av, iu, jz, yt, Dr, ds, aT, h, IG, cy, hP, K, NM, ae, dx, hm, aa, d, s, MD, iU, aW, Y, ff, eH, eZ, r, fQ, aq, aF, yq, BG, en, g, as, t, eF, bz, cm, iK, LB, qJ, nB, bE, Qu, dh, X, cj, pg, dy, m, y, B); #c1(PTK2) c2(NP_005598) c3(focal adhesion kinase 1 isoform b) c4(157823, 157824, 157825, 157826, 157827, 157828) c5(157829, 157830, 157831, 157832, 157833, 157834, 157835, 157836, 157837, 157838, 157839, 157840, 157841, 157842, 157843, 157844, 157845, 157846, 157847, 157848, 157849, 157850, 157851, 157852, 157853, 157854, 157855, 157856, 157857, 157858, 157859, 157860, 157861, 157862, 157863, 157864, 157865, 157866) c6( ) c7(T, ht, aA, Bm, n, cz, bB, fr, ci, wo, fd, zP, V, iJ, q, ad, eA, hX, eJ, ip, av, iu, jz, yt, Dr, ds, aT, h, IG, cy, hP, K, NM, ae, dx, hm, aa, d, s, MD, iU, aW, Y, ff, eH, eZ, r, fQ, aq, aF, yq, BG, en, g, as, t, eF, bz, cm, iK, LB, qJ, nB, bE, Qu, dh, X, cj, pg, dy, m, y, B); #c1(PTK2) c2(NP_722560) c3(focal adhesion kinase 1 isoform a) c4(246850, 246851, 246852, 246853) c5(246854, 246855, 246856, 246857, 246858, 246859, 246860, 246861, 246862, 246863, 246864, 246865, 246866, 246867, 246868, 246869, 246870, 246871, 246872, 246873, 246874, 246875, 246876, 246877, 246878, 246879, 246880, 246881, 246882, 246883, 246884, 246885, 246886, 246887) c6( ) c7(T, ht, aA, Bm, n, cz, bB, fr, ci, wo, fd, zP, V, iJ, q, ad, eA, hX, eJ, ip, av, iu, jz, yt, Dr, ds, aT, h, IG, cy, hP, K, NM, ae, dx, hm, aa, d, s, MD, iU, aW, Y, ff, eH, eZ, r, fQ, aq, aF, yq, BG, en, g, as, t, eF, bz, cm, iK, LB, qJ, nB, bE, Qu, dh, X, cj, pg, dy, m, y, B); #c1(PTK2) c2(XP_005251060) c3(focal adhesion kinase 1 isoform X4) c4( ) c5(270737, 270738, 270739, 270740, 270741, 270742, 270743, 270744, 270745, 270746) c6( ) c7(T, ht, aA, Bm, n, cz, bB, fr, ci, wo, fd, zP, V, iJ, q, ad, eA, hX, eJ, ip, av, iu, jz, yt, Dr, ds, aT, h, IG, cy, hP, K, NM, ae, dx, hm, aa, d, s, MD, iU, aW, Y, ff, eH, eZ, r, fQ, aq, aF, yq, BG, en, g, as, t, eF, bz, cm, iK, LB, qJ, nB, bE, Qu, dh, X, cj, pg, dy, m, y, B); #c1(PTK2) c2(XP_006716669) c3(focal adhesion kinase 1 isoform X13) c4(290423) c5(290424, 290425) c6( ) c7(T, ht, aA, Bm, n, cz, bB, fr, ci, wo, fd, zP, V, iJ, q, ad, eA, hX, eJ, ip, av, iu, jz, yt, Dr, ds, aT, h, IG, cy, hP, K, NM, ae, dx, hm, aa, d, s, MD, iU, aW, Y, ff, eH, eZ, r, fQ, aq, aF, yq, BG, en, g, as, t, eF, bz, cm, iK, LB, qJ, nB, bE, Qu, dh, X, cj, pg, dy, m, y, B); #c1(PTK2) c2(XP_011515482) c3(focal adhesion kinase 1 isoform X1) c4( ) c5(308293, 308294, 308295, 308296, 308297, 308298, 308299, 308300, 308301, 308302, 308303) c6( ) c7(T, ht, aA, Bm, n, cz, bB, fr, ci, wo, fd, zP, V, iJ, q, ad, eA, hX, eJ, ip, av, iu, jz, yt, Dr, ds, aT, h, IG, cy, hP, K, NM, ae, dx, hm, aa, d, s, MD, iU, aW, Y, ff, eH, eZ, r, fQ, aq, aF, yq, BG, en, g, as, t, eF, bz, cm, iK, LB, qJ, nB, bE, Qu, dh, X, cj, pg, dy, m, y, B); #c1(PTK2) c2(XP_011515484) c3(focal adhesion kinase 1 isoform X3) c4(308304, 308305) c5(308306, 308307, 308308, 308309, 308310, 308311, 308312, 308313, 308314, 308315, 308316, 308317) c6( ) c7(T, ht, aA, Bm, n, cz, bB, fr, ci, wo, fd, zP, V, iJ, q, ad, eA, hX, eJ, ip, av, iu, jz, yt, Dr, ds, aT, h, IG, cy, hP, K, NM, ae, dx, hm, aa, d, s, MD, iU, aW, Y, ff, eH, eZ, r, fQ, aq, aF, yq, BG, en, g, as, t, eF, bz, cm, iK, LB, qJ, nB, bE, Qu, dh, X, cj, pg, dy, m, y, B); #c1(PTK2) c2(XP_011515488) c3(focal adhesion kinase 1 isoform X8) c4(308318) c5( ) c6( ) c7(T, ht, aA, Bm, n, cz, bB, fr, ci, wo, fd, zP, V, iJ, q, ad, eA, hX, eJ, ip, av, iu, jz, yt, Dr, ds, aT, h, IG, cy, hP, K, NM, ae, dx, hm, aa, d, s, MD, iU, aW, Y, ff, eH, eZ, r, fQ, aq, aF, yq, BG, en, g, as, t, eF, bz, cm, iK, LB, qJ, nB, bE, Qu, dh, X, cj, pg, dy, m, y, B); #c1(PTK2) c2(XP_011515492) c3(focal adhesion kinase 1 isoform X12) c4(308319, 308320, 308321, 308322) c5(308323, 308324, 308325, 308326, 308327, 308328, 308329, 308330, 308331, 308332, 308333) c6( ) c7(T, ht, aA, Bm, n, cz, bB, fr, ci, wo, fd, zP, V, iJ, q, ad, eA, hX, eJ, ip, av, iu, jz, yt, Dr, ds, aT, h, IG, cy, hP, K, NM, ae, dx, hm, aa, d, s, MD, iU, aW, Y, ff, eH, eZ, r, fQ, aq, aF, yq, BG, en, g, as, t, eF, bz, cm, iK, LB, qJ, nB, bE, Qu, dh, X, cj, pg, dy, m, y, B); #c1(PTK2) c2(XP_011515494) c3(focal adhesion kinase 1 isoform X15) c4(308334) c5(308335) c6( ) c7(T, ht, aA, Bm, n, cz, bB, fr, ci, wo, fd, zP, V, iJ, q, ad, eA, hX, eJ, ip, av, iu, jz, yt, Dr, ds, aT, h, IG, cy, hP, K, NM, ae, dx, hm, aa, d, s, MD, iU, aW, Y, ff, eH, eZ, r, fQ, aq, aF, yq, BG, en, g, as, t, eF, bz, cm, iK, LB, qJ, nB, bE, Qu, dh, X, cj, pg, dy, m, y, B); #c1(PTK2) c2(XP_011515500) c3(focal adhesion kinase 1 isoform X16) c4( ) c5(308336, 308337, 308338, 308339, 308340, 308341) c6( ) c7(T, ht, aA, Bm, n, cz, bB, fr, ci, wo, fd, zP, V, iJ, q, ad, eA, hX, eJ, ip, av, iu, jz, yt, Dr, ds, aT, h, IG, cy, hP, K, NM, ae, dx, hm, aa, d, s, MD, iU, aW, Y, ff, eH, eZ, r, fQ, aq, aF, yq, BG, en, g, as, t, eF, bz, cm, iK, LB, qJ, nB, bE, Qu, dh, X, cj, pg, dy, m, y, B); #c1(PTK2B) c2(NP_775267) c3(protein-tyrosine kinase 2-beta isoform b) c4(249709) c5(249710, 249711, 249712, 249713, 249714, 249715, 249716, 249717, 249718, 249719, 249720, 248721, 249722, 249723) c6( ) c7(T, fd, aE, dE, K, eL, aW, Qb, g, cm, eM, n, aj, fr, cd, ai, ft, bud, zf, gd, h, IG, QE, dL, bfR, anP, aq, kp, pm, hk, FV, hR, cB, B, bL, fM, dA, jx, cz, cR, C, bX, Iu, eA, J, qH, ahL, aT, bK, jj, ae, eu, bA, jf, iU, Y, en, iK, aDQ, ck, nM, iM, c, aHB, mf, aDR, dy, bt, id, dG, pz, hF, ad, hX, av, bj, PZ, d, je, asf, ff, bz, qa, yE, aS, ME, y, iu); #c1(PTK2B) c2(XP_005273505) c3(protein-tyrosine kinase 2-beta isoform X2) c4(284632) c5(284633, 284634, 284635, 284636, 284637, 284638) c6( ) c7(T, fd, aE, dE, K, eL, aW, Qb, g, cm, eM, n, aj, fr, cd, ai, ft, bud, zf, gd, h, IG, QE, dL, bfR, anP, aq, kp, pm, hk, FV, hR, cB, B, bL, fM, dA, jx, cz, cR, C, bX, Iu, eA, J, qH, ahL, aT, bK, jj, ae, eu, bA, jf, iU, Y, en, iK, aDQ, ck, nM, iM, c, aHB, mf, aDR, dy, bt, id, dG, pz, hF, ad, hX, av, bj, PZ, d, je, asf, ff, bz, ga, yE, aS, ME, y, iu); #c1(PTK2B) c2(XP_011542743) c3(protein-tyrosine kinase 2-beta isoform X1) c4(341321) c5(341322, 341323, 341324, 341325, 341326, 341327, 341328, 341329, 341330, 341331, 341332, 341333, 341334, 341335) c6( ) c7(T, fd, aE, dE, K, eL, aW, Qb, g, cm, eM, n, aj, fr, cd, ai, ft, bud, zf, gd, h, IG, QE, dL, bfR, anP, aq, kp, pm, hk, FV, hR, cB, B, bL, fM, dA, jx, cz, cR, C, bX, Iu, eA, J, qH, ahL, aT, bK, jj, ae, eu, bA, jf, iU, Y, en, iK, aDQ, ck, nM, iM, c, aHB, mf, aDR, dy, bt, id, dG, pz, hF, ad, hX, av, bj, PZ, d, je, asf, ff, bz, qa, yE, aS, ME, y, iu); #c1(PTK6) c2(NP_001243287) c3(protein-tyrosine kinase 6 isoform 2) c4( ) c5(90382, 90383, 90384, 90385) c6( ) c7(T, auY, aE, bE, aW, qt, ff, jh, aT, bB, it, Fb, ci, m, en, g, t, ae, X, ad); #c1(PTK6) c2(NP_005966) c3(protein-tyrosine kinase 6 isoform 1) c4(160826, 160827) c5(160828, 160829, 160830, 160831, 160832, 160833, 160834, 160835, 160836, 160837, 160838, 160839) c6( ) c7(T, auY, aE, bE, aW, qt, ff, jh, aT, bB, it, Fb, ci, m, en, g, t, ae, X, ad); #c1(PTK7) c2(NP_001257327) c3(inactive tyrosine-protein kinase 7 isoform e) c4( ) c5(95164, 95165, 95166, 95167, 95168, 95169) c6( ) c7(ck, Mb, T, eG, tb, eM, bE, aW, Y, aT, bB, ww, g, bt, bz, iu, Gc, cp, hq); #c1(PTK7) c2(NP_002812) c3(inactive tyrosine-protein kinase 7 isoform a precursor) c4(132404) c5( ) c6( ) c7(ck, Mb, T, eG, tb, eM, bE, aW, Y, aT, bB, ww, g, bt, bz, iu, Gc, cp, hq); #c1(PTK7) c2(NP_690619) c3(inactive tyrosine-protein kinase 7 isoform b precursor) c4(244937, 244938) c5( ) c6( ) c7(ck, Mb, T, eG, tb, eM, bE, aW, Y, aT, bB, ww, g, bt, bz, iu, Gc, cp, hq); #c1(PTK7) c2(NP_690620) c3(inactive tyrosine-protein kinase 7 isoform c precursor) c4(244939) c5(244940, 244941, 244942, 244943, 244944) c6( ) c7(ck, Mb, T, eG, tb, eM, bE, aW, Y, aT, bB, ww, g, bt, bz, iu, Gc, cp, hq); #c1(PTK7) c2(NP_690621) c3(inactive tyrosine-protein kinase 7 isoform d precursor) c4(244945) c5(244946, 244947, 244948, 244949, 244950, 244951, 244952, 244953, 244954, 244955, 244956, 244957, 244958) c6( ) c7(ck, Mb, T, eG, tb, eM, bE, aW, Y, aT, bB, ww, g, bt, bz, iu, Gc, cp, hq); #c1(PTK7) c2(XP_011513067) c3(inactive tyrosine-protein kinase 7 isoform X1) c4( ) c5(304746, 304747, 304748, 304749, 304750, 304751) c6( ) c7(ck, Mb, T, eG, tb, eM, bE, aW, Y, aT, bB, ww, g, bt, bz, iu, Gc, cp, hq); #c1(PTK7) c2(XP_011513068) c3(inactive tyrosine-protein kinase 7 isoform X2) c4(304752, 304753) c5(304754, 304755, 304756, 304757, 304758, 304759, 304760, 304761, 304762, 304763, 304764, 304765) c6( ) c7(ck, Mb, 1 eG, tb, eM, bE, aW, Y, aT, bB, ww, g, bt, bz, iu, Gc, cp, hq); #c1(PTMA) c2(NP_001092755) c3(prothymosin alpha isoform 1) c4(39613) c5( ) c6( ) c7(T, fd, ci, g, ad, bv, av, xE, aT, h, dL, Nj, eL, ae, s, JI, aW, fc, r, g, cm, wB, y); #c1(PTMA) c2(NP_002814) c3(prothymosin alpha isoform 2) c4(132419) c5(132420, 132421, 132422, 132423, 132424, 132425, 132426, 132427, 132428, 132429) c6( ) c7(T, fd, ci, q, ad, bv, av, xE, aT, h, dL, Nj, eL, ae, s, JI, aW, fc, r, g, cm, wB, y); #c1(PTMA) c2(XP_011509821) c3(prothymosin alpha isoform X2) c4(300405) c5( ) c6( ) c7(T, fd, ci, q, ad, bv, av, xE, aT, h, dL, Nj, eL, ae, s, JI, aW, fc, r, g, cm, wB, y); #c1(PTMA) c2(XP_011509823) c3(prothymosin alpha isoform X4) c4( ) c5(300406, 300407, 300408, 300409, 300410) c6( ) c7(T, fd, ci, q, ad, bv, av, xE, aT, h, dL, Nj, eL, ae, s, JI, aW, fc, r, g, cm, wB, y); #c1(PTMA) c2(XP_011509824) c3(prothymosin alpha isoform X5) c4( ) c5(300411, 300412, 300413, 300414) c6( ) c7(T, fd, ci, q, ad, bv, av, xE, aT, h, dL, Nj, eL, ae, s, JI, aW, fc, r, g, cm, wB, y); #c1(PTMS) c2(NP_002815) c3(parathymosin) c4(132430, 132431) c5(132432, 132433, 132434, 132435, 132436, 132437, 132438, 132439, 132440, 132441, 132442, 132443, 132444) c6( ) c7(af); #c1(PTMS) c2(XP_011519289) c3(parathymosin isoform X1) c4(313927) c5(313928, 313929, 313930, 313931, 313932) c6( ) c7(af); #c1(PTN) c2(XP_005250572) c3(pleiotrophin isoform X1) c4(270404) c5( ) c6( ) c7(T, dD, aC, ea, if, al, jh, fd, ajp, j, ci, eq, Lw, qN, zP, cd, Pu, ad, er, dP, eA, av, Pv, ft, PC, aeO, aT, iv, h, bl, zg, nJ, ae, bA, Pw, zQ, d, aeR, aW, Y, eZ, r, g, as, cm, bz, fq, sS, beH, beJ, eM, dB, y); #c1(PTN) c2(XP_005250573) c3(pleiotrophin isoform X2) c4( ) c5(270405, 270406, 270407, 270408, 270409, 270410) c6( ) c7(T, dD, aC, ea, if, al, jh, fd, ajp, j, ci, eq, Lw, qN, zP, cd, Pu, ad, er, dP, eA, av, Pv, ft, PC, aeO, aT, iv, h, bl, zg, nJ, ae, bA, Pw, zQ, d, aeR, aW, Y, eZ, r, g, as, cm, bz, fq, sS, beH, bed, eM, dB, y); #c1(PTOV1) c2(NP_059128) c3(prostate tumor-overexpressed gene 1 protein) c4(193195) c5(193196, 193197, 193198, 193199, 193200, 193201) c6( ) c7(aet, aA, cz, ci, g, Eh, ae, ad); #c1(PTP4A1) c2(XP_011534414) c3(protein tyrosine phosphatase type IVA 1 isoform XI) c4(330903, 330904) c5(330905, 330906, 330907, 330908, 330909, 330910, 330911, 330912, 330913, 330914, 330915, 330916, 330917, 330918, 330919, 330920) c6( ) c7(T, fM, aW, ff, aT, it, By, ey, en, g, t, bz); #c1(PTP4A3) c2(XP_005250824) c3(protein tyrosine phosphatase type IVA 3 isoform X3) c4(270586) c5(270587, 270588, 270589, 270590, 270591, 270592, 270593, 270594, 270595, 270596, 270597, 270598, 270599, 270600, 270601, 270602) c6( ) c7(T, aA, bB, n, fd, oH, ci, q, eA, hX, av, aT, cp, cY, B, iU, aW, Y, ff, r, aF, en, g, t, cm, bz, iP, ck, bE, bt, it, X); #c1(PTP4A3) c2(XP_011544863) c3(protein tyrosine phosphatase type IVA 3 isoform X1) c4(343854, 343855) c5(343856, 343857, 343858, 343859, 343860, 343861, 343862, 343863, 343864, 343865) c6( ) c7(T, aA, bB, n, fd, oH, ci, q, eA, hX, av, aT, cp, cY, B, iU, aW, Y, ff, r, aF, en, g, t, cm, bz, iP, ck, bE, bt, it, X); #c1(PTPMT1) c2(NP_001137456) c3(phosphatidylglycerophosphatase and protein-tyrosine phosphatase 1 isoform 2) c4(55799) c5(55800, 55801, 55802, 55803, 55804, 55805, 55806) c6( ) c7(cm, T); #c1(PTPMT1) c2(NP_783859) c3(phosphatidylglycerophosphatase and protein-tyrosine phosphatase 1 isoform 1) c4(251757) c5(251758, 251759, 251760, 251761, 251762, 251763) c6( ) c7(cm, T); #c1(PTPN1) c2(NP_001265547) c3(tyrosine-protein phosphatase non-receptor type 1 isoform 2) c4( ) c5(98823, 98824, 98825, 98826, 98827) c6( ) c7(bL, T, dD, bKq, fM, eR, yS, ea, iW, eX, jh, aA, cz, n, aj, v, j, bB, eq, IR, iJ, q, J, ad, eA, ady, ku, vJ, nX, bWr, aT, jy, vc, eV, K, qM, ae, af, sj, aa, A, B, iU, aW, oV, bIP, r, dq, aq, aF, t, KM, pb, qa, bJ, fT, sS, bE, vy, at, GN, mf, m, ei, bt, it, X); #c1(PTPN1) c2(NP_002818) c3(tyrosine-protein phosphatase non-receptor type 1 isoform 1) c4(132456, 132457) c5(132458, 132459, 132460, 132461, 132462, 132463, 132464) c6( ) c7(bL, T, dD, bKq, fM, eR, yS, ea, iW, eX, jh, aA, cz, n, aj, v, j, bB, eq, IR, iJ, q, J, ad, eA, ady, ku, vJ, nX, bWr, aT, jy, vc, eV, K, qM, ae, af, sj, aa, A, B, iU, aW, oV, bIP, r, dq, aq, aF, t, KM, pb, qa, bJ, fT, sS, bE, vy, at, GN, mf, m, ei, bt, it, X); #c1(PTPN11) c2(NP_002825) c3(tyrosine-protein phosphatase non-receptor type 11 isoform 1) c4(132512, 132513) c5(132514, 132515, 132516, 132517, 132518, 132519) c6( ) c7(ID, bM, T, aC, fR, apr, yS, azi, if, e, bB, ci, cxu, x, bv, aE, Vv, K, ly, aW, az, Az, hl, aGQ, kt, Au, aB, g, as, cm, bw, fT, eM, dc, aiM, nw, k, Ro, NK, kv, qN, ckn, ai, md, b, cc, Bj, cU, h, eV, hn, Dg, A, bIP, fe, me, lx, iO, kT, aNd, bD, B, Dw, fM, jx, eX, aA, afK, v, yO, cdP, aDO, aNe, AO, eA, akE, Mg, aup, nX, aT, cxs, aut, dz, hK, rz, s, iU, iZ, Y, bEc, Io, en, bQ, boW, ck, kP, auo, mG, AH, Uq, bt, xb, cxr, acl, atS, VT, jh, oH, cxt, hF, cxq, ds, vc, ji, pq, cjs, atJ, d, TY, et, qt, ff, aEW, aF, Sm, iV, bz, Ew, bE, gZ, dX, rH, i, y); #c1(PTPN11) c2(NP_542168) c3(tyrosine-protein phosphatase non-receptor type 11 isoform 2) c4( ) c5(232164, 232165, 232166, 232167, 232168, 232169, 232170, 232171, 232172, 232173, 232174, 232175) c6( ) c7(ID, bM, T, aC, fR, apr, yS, azi, if, e, bB, ci, cxu, x, bv, aE, Vv, K, ly, aW, az, Az, hl, aGQ, kt, Au, aB, g, as, cm, bw, fT, eM, dc, aiM, nw, k, Ro, NK, kv, qN, ckn, ai, md, b, cc, Bj, cU, h, eV, hn, Dg, A, bIP, fe, mo, Ix, iO, kT, aNd, bD, B, Dw, fM, jx, eX, aA, afK, v, yO, cdP, aDO, aNe, AO, eA, akE, Mg, aup, nX, aT, cxs, aut, dz, hK, rz, s, iU, iZ, Y, bEc, Io, en, bQ, boW, ck, kP, auo, mG, AH, Uq, bt, xb, cxr, acl, atS, VT, jh, oH, cxt, hF, cxq, ds, vc, ji, pq, cjs, atJ, d, TY, et, qt, ff, aEW, aF, Sm, iV, bz, Ew, bE, gZ, dX, rH, i, y); #c1(PTPN11) c2(XP_006719589) c3(tyrosine-protein phosphatase non-receptor type 11 isoform X1) c4(292661) c5( ) c6( ) c7(ID, bM, T, aC, fR, apr, yS, azi, if, e, bB, ci, cxu, x, bv, aE, Vv, K, ly, aW, az, Az, hl, aGQ, kt, Au, aB, g, as, cm, bw, fT, eM, dc, aiM, nw, k, Ro, NK, kv, qN, ckn, ai, md, b, cc, Bj, cU, h, eV, hn, Dg, A, bIP, fe, mo, lx, iO, kT, aNd, bD, B, Dw, fM, jx, eX, aA, afK, v, yO, cdP, aDO, aNe, AO, eA, akE, Mg, aup, nX, aT, cxs, aut, dz, hK, rz, s, iU, iZ, Y, bEc, Io, en, bQ, boW, ck, kP, auo, mG, AH, Uq, bt, xb, cxr, acl, atS, VT, jh, oH, cxt, hF, cxq, ds, vc, ji, pq, cjs, atJ, d, TY, et, qt, ff, aEW, aF, Sm, iV, bz, Ew, bE, gZ, dX, rH, i, y); #c1(PTPN12) c2(NP_001124480) c3(tyrosine-protein phosphatase non-receptor type 12 isoform 2) c4( ) c5(49139, 49140, 49141, 49142, 49143, 49144, 49145, 49146, 49147, 49148) c6( ) c7(ck, T, kP, mP, bE, aW, aT, bB, n, hD, K, ci, oQ, it, B, ad); #c1(PTPN12) c2(NP_002826) c3(tyrosine-protein phosphatase non-receptor type 12 isoform 1) c4(132520, 132521, 132522) c5(132523, 132524, 132525, 132526, 132527, 132528, 132529, 132530) c6( ) c7(ck, T, kP, mP, bE, aW, aT, bB, n, hD, K, ci, oQ, it, B, ad); #c1(PTPN12) c2(XP_005250575) c3(tyrosine-protein phosphatase non-receptor type 12 isoform X2) c4( ) c5(270411, 270412, 270413, 270414, 270415) c6( ) c7(ck, T, kP, mP, bE, aW, aT, bB, n, hD, K, ci, oQ, it, B, ad); #c1(PTPN12) c2(XP_006716136) c3(tyrosine-protein phosphatase non-receptor type 12 isoform X1) c4(290089) c5(290090) c6( ) c7(ck, 1 kP, mP, bE, aW, aT, bB, n, hD, K, ci, oQ, it, B, ad); #c1(PTPN13) c2(NP_006255) c3(tyrosine-protein phosphatase non-receptor type 13 isoform 2) c4(163321, 163322) c5( ) c6( ) c7(T, ob, wu, ht, aA, bB, hy, ci, bX, q, ad, aIZ, av, cxw, aE, aT, rO, wm, H, ae, dx, mH, je, aW, ev, ff, eZ, r, en, as, iK, bz, ck, iO, cxv, rR, iM, eM, Kv, bE, Qu, U, aiS, KY, B); #c1(PTPN13) c2(NP_542416) c3(tyrosine-protein phosphatase non-receptor type 13 isoform 4) c4(232795) c5( ) c6( ) c7(T, ob, wu, ht, aA, bB, hy, ci, bX, q, ad, aIZ, av, cxw, aE, aT, rO, wm, H, ae, dx, mH, je, aW, ev, ff, eZ, r, en, as, iK, bz, ck, iO, cxv, rR, iM, eM, Kv, bE, Qu, U, aiS, KY, B); #c1(PTPN13) c2(XP_005263224) c3(tyrosine-protein phosphatase non-receptor type 13 isoform X6) c4(278366) c5(278367, 278368, 278369, 278370, 278371, 278372) c6( ) c7(T, ob, wu, ht, aA, bB, hy, ci, bX, q, ad, aIZ, av, cxw, aE, aT, rO, wm, H, ae, dx, mH, je, aW, ev, ff, eZ, r, en, as, iK, bz, ck, iO, cxv, rR, iM, eM, Kv, bE, Qu, U, aiS, KY, B); #c1(PTPN13) c2(XP_011530465) c3(tyrosine-protein phosphatase non-receptor type 13 isoform X1) c4( ) c5(326334, 326335, 326336, 326337, 326338, 326339) c6( ) c7(T, ob, wu, ht, aA, bB, hy, ci, bX, q, ad, aIZ, av, cxw, aE, aT, rO, wm, H, ae, dx, mH, je, aW, ev, ff, eZ, r, en, as, iK, bz, ck, iO, cxv, rR, iM, eM, Kv, bE, Qu, U, aiS, KY, B); #c1(PTPN13) c2(XP_011530468) c3(tyrosine-protein phosphatase non-receptor type 13 isoform X4) c4( ) c5(326340, 326341, 326342, 326343, 326344, 326345, 326346, 326347, 326348, 326349) c6( ) c7(T, ob, wu, ht, aA, bB, hy, ci, bX, q, ad, aIZ, av, cxw, aE, aT, rO, wm, H, ae, dx, mH, je, aW, ev, ff, eZ, r, en, as, iK, bz, ck, iO, cxv, rR, iM, eM, Kv, bE, Qu, U, aiS, KY, B); #c1(PTPN13) c2(XP_011530470) c3(tyrosine-protein phosphatase non-receptor type 13 isoform X7) c4(326350) c5( ) c6( ) c7(T, ob, wu, ht, aA, bB, hy, ci, bX, q, ad, aIZ, av, cxw, aE, aT, rO, wm, H, ae, dx, mH, je, aW, ev, ff, eZ, r, en, as, iK, bz, ck, iO, cxv, rR, iM, eM, Kv, bE, Qu, U, aiS, KY, B); #c1(PTPN13) c2(XP_011530471) c3(tyrosine-protein phosphatase non-receptor type 13 isoform X8) c4( ) c5(326351, 326352, 326353, 326354, 326355, 326356, 326357, 326358, 326359, 326360, 326361, 326362) c6( ) c7(T, ob, wu, ht, aA, bB, hy, ci, bX, q, ad, aIZ, av, cxw, aE, aT, rO, wm, H, ae, dx, mH, je, aW, ev, ff, eZ, r, en, as, iK, bz, ck, iO, cxv, rR, iM, eM, Kv, bE, Qu, U, aiS, KY, B); #c1(PTPN13) c2(XP_011530474) c3(tyrosine-protein phosphatase non-receptor type 13 isoform X11) c4(326363) c5(326364, 326365, 326366, 326367, 326368, 326369) c6( ) c7(T, ob, wu, ht, aA, bB, hy, ci, bX, q, ad, aIZ, av, cxw, aE, aT, rO, wm, H, ae, dx, mH, je, aW, ev, ff, eZ, r, en, as, iK, bz, ck, iO, cxv, rR, iM, eM, Kv, bE, Qu, U, aiS, KY, B); #c1(PTPN14) c2(NP_005392) c3(tyrosine-protein phosphatase non-receptor type 14) c4(155679, 155680) c5(155681, 155682, 155683, 155684, 155685, 155686, 155687, 155688, 155689, 155690, 155691, 155692) c6( ) c7(T, r, Vv, aA, cxx, cxy, q, B); #c1(PTPN18) c2(NP_001135842) c3(tyrosine-protein phosphatase non-receptor type 18 isoform 2) c4( ) c5(53414, 53415, 53416, 53417, 53418, 53419) c6( ) c7(aW, fb, aT); #c1(PTPN18) c2(NP_055184) c3(tyrosine-protein phosphatase non-receptor type 18 isoform 1) c4(179646) c5(179647, 179648, 179649, 179650, 179651, 179652) c6( ) c7(aW, fb, aT); #c1(PTPN18) c2(XP_006712479) c3(tyrosine-protein phosphatase non-receptor type 18 isoform X1) c4(286683) c5( ) c6( ) c7(aW, fb, aT); #c1(PTPN2) c2(NP_001193942) c3(tyrosine-protein phosphatase non-receptor type 2 isoform 4) c4(83284) c5(83285, 83286, 83287, 83288, 83289, 83290) c6( ) c7(bL, xN, T, Io, jh, cL, aj, ai, o, J, ady, ju, kH, aT, ji, hK, A, d, iU, aW, eZ, aMA, fe, hp, iV, dr, ck, kP, yH, ei, y, ra); #c1(PTPN2) c2(NP_002819) c3(tyrosine-protein phosphatase non-receptor type 2 isoform 1) c4(132465) c5(132466, 132467, 132468, 132469, 132470, 132471) c6( ) c7(bL, xN, T, Io, jh, cL, aj, ai, o, J, ady, ju, kH, aT, ji, hK, A, d, iU, aW, eZ, aMA, fe, hp, iV, dr, ck, kP, yH, ei, y, ra); #c1(PTPN2) c2(NP_536347) c3(tyrosine-protein phosphatase non-receptor type 2 isoform 2) c4(231249) c5(231250, 231251, 231252, 231253, 231254, 231255) c6( ) c7(bL, xN, T, Io, jh, cL, aj, ai, o, J, ady, ju, kH, aT, ji, hK, A, d, iU, aW, eZ, aMA, fe, hp, iV, dr, ck, kP, yH, ei, y, ra); #c1(PTPN2) c2(NP_536348) c3(tyrosine-protein phosphatase non-receptor type 2 isoform 3) c4(231256) c5(231257, 231258, 231259, 231260, 231261, 231262) c6( ) c7(bL, xN, T, Io, jh, cL, aj, ai, o, J, ady, ju, kH, aT, ji, hK, A, d, iU, aW, eZ, aMA, fe, hp, iV, dr, ck, kP, yH, ei, y, ra); #c1(PTPN21) c2(XP_011534669) c3(tyrosine-protein phosphatase non-receptor type 21 isoform X1) c4(331167, 331168) c5(331169, 331170, 331171, 331172, 331173, 331174, 331175, 331176, 331177, 331178, 331179, 331180, 331181, 331182, 331183, 331184) c6( ) c7(hD, T); #c1(PTPN21) c2(XP_011534671) c3(tyrosine-protein phosphatase non-receptor type 21 isoform X3) c4( ) c5(331185) c6( ) c7(hD, T); #c1(PTPN22) c2(XP_011539526) c3(tyrosine-protein phosphatase non-receptor type 22 isoform X5) c4(337724) c5(337725, 337726, 337727, 337728, 337729, 337730) c6( ) c7(oO, T, bzx, fR, ea, e, cL, aoj, qj, yM, bv, AW, xy, vV, dE, K, DY, hH, be, bn, aW, asD, HA, hN, pL, ve, yl, It, Jr, Fh, cj, uo, dW, dD, sQ, Io, yG, fN, aj, ai, h, DU, ey, nP, A, mR, OX, lb, ge, fe, W, Pa, ut, fL, Pr, B, bL, eR, jx, cz, cR, hz, j, V, pd, o, J, ga, mP, aT, hK, DX, af, hM, Y, IC, apK, pb, IY, ans, OW, ac, ig, yW, hr, wR, dy, gT, dM, eq, mC, Uy, ad, wD, dP, vJ, qh, hD, ji, IQ, yF, cr, eZ, dN, Mz, hp, iV, aYt, Bv, zr, axs, Lj, atM, z, agl, oQ, y, hv, pC); #c1(PTPN23) c2(NP_001291411) c3(tyrosine-protein phosphatase non-receptor type 23 isoform 2) c4( ) c5(115958, 115959, 115960, 115961, 115962, 115963) c6( ) c7(h, aW, vT, aT); #c1(PTPN23) c2(NP_056281) c3(tyrosine-protein phosphatase non-receptor type 23 isoform 1) c4(186929) c5(186930, 186931, 186932, 186933, 186934, 186935) c6( ) c7(h, aW, vT, aT); #c1(PTPN23) c2(XP_005265088) c3(tyrosine-protein phosphatase non-receptor type 23 isoform X1) c4(279427) c5(279428, 279429, 279430, 279431, 279432, 279433) c6( ) c7(h, aW, vT, aT); #c1(PTPN3) c2(NP_001138840) c3(tyrosine-protein phosphatase non-receptor type 3 isoform 2) c4(57923) c5( ) c6( ) c7(Mb, T, jz, asW, eM, bE, aW, aT, bB, n, aq, K, YH, cm, B, hX); #c1(PTPN3) c2(NP_001138842) c3(tyrosine-protein phosphatase non-receptor type 3 isoform 4) c4(57924, 57925) c5( ) c6( ) c7(Mb, T, jz, asW, eM, bE, aW, aT, bB, n, aq, K, YH, cm, B, hX); #c1(PTPN3) c2(NP_001138844) c3(tyrosine-protein phosphatase non-receptor type 3 isoform 6) c4( ) c5(57926, 57927, 57928, 57929, 57930) c6( ) c7(Mb, T, jz, asW, eM, bE, aW, aT, bB, n, aq, K, YH, cm, B, hX); #c1(PTPN3) c2(XP_006717260) c3(tyrosine-protein phosphatase non-receptor type 3 isoform X4) c4(290841) c5(290842, 290843) c6( ) c7(Mb, T, jz, asW, eM, bE, aW, aT, bB, n, aq, K, YH, cm, B, hX); #c1(PTPN3) c2(XP_006717264) c3(tyrosine-protein phosphatase non-receptor type 3 isoform X6) c4(290844) c5(290845, 290846, 290847, 290848, 290849, 290850) c6( ) c7(Mb, T, jz, asW, eM, bE, aW, aT, bB, n, aq, K, YH, cm, B, hX); #c1(PTPN3) c2(XP_006717266) c3(tyrosine-protein phosphatase non-receptor type 3 isoform X7) c4( ) c5(290851) c6( ) c7(Mb, T, jz, asW, eM, bE, aW, aT, bB, n, aq, K, YH, cm, B, hX); #c1(PTPN3) c2(XP_006717267) c3(tyrosine-protein phosphatase non-receptor type 3 isoform X2) c4( ) c5(290852, 290853, 290854, 290855, 290856, 290857) c6( ) c7(Mb, T, jz, asW, eM, bE, aW, aT, bB, n, aq, K, YH, cm, B, hX); #c1(PTPN3) c2(XP_011517191) c3(tyrosine-protein phosphatase non-receptor type 3 isoform X1) c4( ) c5(310787, 310788, 310789, 310790, 310791, 310792, 310793, 310794) c6( ) c7(Mb, T, jz, asW, eM, bE, aW, aT, bB, n, aq, K, YH, cm, B, hX); #c1(PTPN3) c2(XP_011517192) c3(tyrosine-protein phosphatase non-receptor type 3 isoform X5) c4( ) c5(310795, 310796, 310797, 310798, 310799, 310800) c6( ) c7(Mb, T, jz, asW, eM, bE, aW, aT, bB, n, aq, K, YH, cm, B, hX); #c1(PTPN4) c2(NP_002821) c3(tyrosine-protein phosphatase non-receptor type 4) c4(132472, 132473) c5(132474, 132475, 132476, 132477, 132478, 132479) c6( ) c7(ck, iU, pg, iY, rz, B); #c1(PTPN4) c2(XP_011509862) c3(tyrosine-protein phosphatase non-receptor type 4 isoform X1) c4(300448) c5(300449, 300450, 300451, 300452, 300453, 300454) c6( ) c7(ck, iU, pg, iY, rz, B); #c1(PTPN4) c2(XP_011509864) c3(tyrosine-protein phosphatase non-receptor type 4 isoform X3) c4(300455) c5(300456, 300457, 300458, 300459, 300460, 300461) c6( ) c7(ck, iU, pg, iY, rz, B); #c1(PTPN4) c2(XP_011509865) c3(tyrosine-protein phosphatase non-receptor type 4 isoform X4) c4( ) c5(300462, 300463, 300464, 300465, 300466, 300467) c6( ) c7(ck, iU, pg, iY, rz, B); #c1(PTPN5) c2(NP_001265165) c3(tyrosine-protein phosphatase non-receptor type 5 isoform b) c4(97905) c5(97906, 97907, 97908, 97909, 97910, 97911) c6( ) c7(HC, bO, cm, h, yq, bK, K, m, t); #c1(PTPN5) c2(NP_008837) c3(tyrosine-protein phosphatase non-receptor type 5 isoform a) c4(168952) c5(168953, 168954, 168955, 168956, 168957, 168958, 168959, 168960, 168961, 168962) c6( ) c7(HC, bO, cm, h, yq, bK, K, m, t); #c1(PTPN6) c2(NP_002822) c3(tyrosine-protein phosphatase non-receptor type 6 isoform 1) c4(132480, 132481) c5(132482, 132483, 132484, 132485, 132486, 132487) c6( ) c7(bM, T, fM, ow, jh, aA, bB, im, afK, aj, v, ci, fd, pz, hF, V, cxz, q, J, ad, eA, x, ady, bvG, oW, aT, Ne, kH, cy, dz, jy, K, IQ, h, zy, pk, pq, ae, af, je, iU, up, et, aW, pr, qY, eH, ff, cr, r, eZ, aF, en, as, eE, t, eF, nN, GR, dr, yR, pm, ck, bw, eU, It, iM, eM, bE, Jp, aOL, cj, eo, m, k, IS, bt, B); #c1(PTPN6) c2(NP_536859) c3(tyrosine-protein phosphatase non-receptor type 6 isoform 3) c4(231382) c5(231383, 231384, 231385, 231386, 231387, 231388) c6( ) c7(bM, T, fM, ow, jh, aA, bB, im, afK, aj, v, ci, fd, pz, hF, V, cxz, q, J, ad, eA, x, ady, bvG, oW, aT, Ne, kH, cy, dz, jy, K, IQ, h, zy, pk, pq, ae, af, je, iU, up, et, aW, pr, qY, eH, ff, cr, r, eZ, aF, en, as, eE, t, eF, nN, GR, dr, yR, pm, ck, bw, eU, It, iM, eM, bE, Jp, aOL, cj, eo, m, k, IS, bt, B); #c1(PTPN6) c2(XP_011519290) c3(tyrosine-protein phosphatase non-receptor type 6 isoform X1) c4(313933) c5(313934, 313935, 313936, 313937, 313938, 313939, 313940, 313941, 313942, 313943, 313944, 313945) c6( ) c7(bM, T, fM, ow, jh, aA, bB, im, afK, aj, v, ci, fd, pz, hF, V, cxz, q, J, ad, eA, x, ady, bvG, oW, aT, Ne, kH, cy, dz, jy, K, IQ, h, zy, pk, pq, ae, af, je, iU, up, et, aW, pr, qY, eH, ff, cr, r, eZ, aF, en, as, eE, t, eF, nN, GR, dr, yR, pm, ck, bw, eU, It, iM, eM, bE, Jp, aOL, cj, eo, m, k, IS, bt, B); #c1(PTPN7) c2(NP_001186726) c3(tyrosine-protein phosphatase non-receptor type 7 isoform 3) c4(78413) c5(78414, 78415, 78416, 78417, 78418, 78419, 78420) c6( ) c7(T, ol, K, hf, ae, ad); #c1(PTPN7) c2(NP_002823) c3(tyrosine-protein phosphatase non-receptor type 7 isoform 1) c4(132488, 132489) c5(132490, 132491, 132492, 132493, 132494, 132495, 132496, 132497) c6( ) c7(T, ol, K, hf, ae, ad); #c1(PTPN7) c2(NP_542155) c3(tyrosine-protein phosphatase non-receptor type 7 isoform 2) c4(231416, 231417, 231418) c5(231419, 231420, 231421, 231422, 231423, 231424, 231425, 231426, 231427, 231428, 231429, 231430, 231431, 231432, 231433, 231434, 231435, 231436, 231437, 231438, 231439, 231440, 231441, 231442, 231443, 231444) c6( ) c7(T, ol, K, hf, ae, ad); #c1(PTPN7) c2(XP_011508125) c3(tyrosine-protein phosphatase non-receptor type 7 isoform X4) c4(298602, 298603) c5(298604, 298605, 298606, 298607, 298608, 298609, 298610, 298611, 298612, 298613, 298614, 298615) c6( ) c7(T, ol, K, hf, ae, ad); #c1(PTPN9) c2(NP_002824) c3(tyrosine-protein phosphatase non-receptor type 9) c4(132498, 132499) c5(132500, 132501, 132502, 132503, 132504, 132505, 132506, 132507, 132508, 132509, 132510, 132511) c6( ) c7(bL, aW, dG, pm, aT); #c1(PTPRA) c2(NP_002827) c3(receptor-type tyrosine-protein phosphatase alpha isoform 1 precursor) c4(132531, 132532, 132533, 132534, 132535, 132536, 132537) c5(132538, 132539, 132540, 132541, 132542, 132543, 132544, 132545, 132546, 132547, 132548, 132549, 132550, 132551, 132552, 132553, 132554, 132555, 132556, 132557, 132558, 132559, 132560, 132561, 132562, 132563, 132564, 132565) c6( ) c7(bL, T, aw, aA, fd, j, ci, hF, V, x, xc, kH, aT, cy, K, dQ, af, je, aW, hf, cl, cm, bz, QA, ck, iM, eM, bE, uz, m, k, bt); #c1(PTPRA) c2(NP_543030) c3(receptor-type tyrosine-protein phosphatase alpha isoform 2 precursor) c4(233301, 233302) c5(233303, 233304, 233305, 233306, 233307, 233308, 233309, 233310, 233311, 233312, 233313, 233314, 233315, 233316, 233317, 233318, 233319, 233320, 233321, 233322, 233323, 233324, 233325, 233326, 233327, 233328, 233329, 233330, 233331, 233332, 233333, 233334, 233335, 233336, 233337, 233338, 233339, 233340) c6( ) c7(bL, T, aw, aA, fd, j, ci, hF, V, x, xc, kH, aT, cy, K, dQ, af, je, aW, hf, cl, cm, bz, QA, ck, iM, eM, bE, uz, m, k, bt); #c1(PTPRB) c2(NP_001103224) c3(receptor-type tyrosine-protein phosphatase beta isoform a) c4(41851) c5(41852, 41853, 41854, 41855, 41856, 41857) c6( ) c7(Vy, IB, FT, aT); #c1(PTPRB) c2(NP_001193900) c3(receptor-type tyrosine-protein phosphatase beta isoform c precursor) c4(83100, 83101) c5(83102, 83103, 83104, 83105, 83106, 83107, 83108, 83109, 83110, 83111, 83112, 83113, 83114) c6( ) c7(Vy, IB, FT, aT); #c1(PTPRB) c2(NP_001193901) c3(receptor-type tyrosine-protein phosphatase beta isoform d precursor) c4(83115) c5(83116, 83117, 83118, 83119, 83120, 83121) c6( ) c7(Vy, IB, FT, aT); #c1(PTPRB) c2(NP_002828) c3(receptor-type tyrosine-protein phosphatase beta isoform b precursor) c4(132566) c5(132567, 132568, 132569, 132570, 132571, 132572) c6( ) c7(Vy, IB, FT, aT); #c1(PTPRB) c2(XP_011536916) c3(receptor-type tyrosine-protein phosphatase beta isoform X2) c4(334586) c5(334587, 334588, 334589, 334590, 334591) c6( ) c7(Vy, IB, FT, aT); #c1(PTPRC) c2(NP_001254727) c3(receptor-type tyrosine-protein phosphatase C isoform 5 precursor) c4( ) c5(94890, 94891, 94892, 94893, 94894, 94895) c6( ) c7(oO, T, fR, pf, aAx, I, fd, ci, bh, ip, aao, x, bv, aE, K, H, pk, aiV, zC, Fu, cm, bw, GR, ou, cj, zv, k, aw, aj, br, Nh, h, hn, ey, bxg, A, CM, fe, Og, kp, yq, Wt, asE, yR, Qf, ajd, fL, B, L, fM, dA, fG, jx, aA, j, V, cxA, q, J, pd, ae, amO, af, hM, bf, nO, oV, Y, r, awu, nC, pb, ck, iM, dy, yH, bt, vi, iW, jh, bs, aGx, wV, uu, pz, ad, hX, Jm, bTr, Dq, LA, hD, ji, acQ, MG, bdd, je, IR, Of, eZ, gl, aF, Z, aDw, TA, LB, aS, y); #c1(PTPRC) c2(NP_002829) c3(receptor-type tyrosine-protein phosphatase C isoform 1 precursor) c4(132573, 132574, 132575) c5(132576, 132577, 132578, 132579, 132580, 132581, 132582, 132583, 132584, 132585, 132586, 132587, 132588, 132589, 132590, 132591, 132592, 132593) c6( ) c7(oO, T, fR, pf, aAx, I, fd, ci, bh, ip, aao, x, bv, aE, K, H, pk, aiV, zC, Fu, cm, bw, GR, ou, cj, zv, k, aw, aj, br, Nh, h, hn, ey, bxg, A, CM, fe, Og, kp, yq, Wt, asE, yR, Qf, ajd, fL, B, L, fM, dA, fG, jx, aA, j, V, cxA, q, J, pd, ae, amO, af, hM, bf, nO, oV, Y, r, awu, nC, pb, ck, iM, dy, yH, bt, vi, iW, jh, bs, aGx, wV, uu, pz, ad, hX, Jm, bTr, Dq, LA, hD, ji, acQ, MG, bdd, je, IR, Of, eZ, gl, aF, Z, aDw, TA, LB, aS, y); #c1(PTPRC) c2(NP_563578) c3(receptor-type tyrosine-protein phosphatase C isoform 2 precursor) c4(233522, 233523) c5(233524, 233525, 233526, 233527, 233528, 233529, 233530, 233531, 233532, 233533, 233534, 233535, 233536, 233537, 233538, 233539) c6( ) c7(oO, T, fR, pf, aAx, I, fd, ci, bh, ip, aao, x, bv, aE, K, H, pk, aiV, zC, Fu, cm, bw, GR, ou, cj, zv, k, aw, aj, br, Nh, h, hn, ey, bxg, A, CM, fe, Og, kp, yq, Wt, asE, yR, Qf, ajd, fL, B, L, fM, dA, fG, jx, aA, j, V, cxA, q, J, pd, ae, amO, af, hM, bf, nO, oV, Y, r, awu, nC, pb, ck, iM, dy, yH, bt, vi, iW, jh, bs, aGx, wV, uu, pz, ad, hX, Jm, bTr, Dq, LA, hD, ji, acQ, MG, bdd, je, IR, Of, eZ, gl, aF, Z, aDw, TA, LB, aS, y); #c1(PTPRC) c2(XP_006711535) c3(receptor-type tyrosine-protein phosphatase C isoform X1) c4(286069, 286070, 286071) c5(286072, 286073, 286074, 286075, 286076, 286077, 286078, 286079, 286080, 286081, 286082, 286083, 286084, 286085, 286086, 286087, 286088, 286089) c6( ) c7(oO, T, fR, pf, aAx, I, fd, ci, bh, ip, aao, x, bv, aE, K, H, pk, aiV, zC, Fu, cm, bw, GR, ou, cj, zv, k, aw, aj, br, Nh, h, hn, ey, bxg, A, CM, fe, Og, kp, yq, Wt, asE, yR, Qf, ajd, fL, B, L, fM, dA, fG, jx, aA, j, V, cxA, q, J, pd, ae, amO, af, hM, bf, nO, oV, Y, r, awu, nC, pb, ck, iM, dy, yH, bt, vi, iW, jh, bs, aGx, wV, uu, pz, ad, hX, Jm, bTr, Dq, LA, hD, ji, acQ, MG, bdd, je, IR, Of, eZ, gl, aF, Z, aDw, TA, LB, aS, y); #c1(PTPRC) c2(XP_006711536) c3(receptor-type tyrosine-protein phosphatase C isoform X2) c4(286090, 286091) c5(286092, 286093, 286094, 286095, 286096, 286097, 286098, 286099, 286100, 286101, 286102, 286103) c6( ) c7(oO, T, fR, pf, aAx, I, fd, ci, bh, ip, aao, x, bv, aE, K, H, pk, aiV, zC, Fu, cm, bw, GR, ou, cj, zv, k, aw, aj, br, Nh, h, hn, ey, bxg, A, CM, fe, Og, kp, yq, Wt, asE, yR, Qf, ajd, fL, B, L, fM, dA, fG, jx, aA, j, V, cxA, q, J, pd, ae, amO, af, hM, bf, nO, oV, Y, r, awu, nC, pb, ck, iM, dy, yH, bt, vi, iW, jh, bs, aGx, wV, uu, pz, ad, hX, Jm, bTr, Dq, LA, hD, ji, acQ, MG, bdd, je, IR, Of, eZ, gl, aF, Z, aDw, TA, LB, aS, y); #c1(PTPRC) c2(XP_006711537) c3(receptor-type tyrosine-protein phosphatase C isoform X3) c4(286104, 286105) c5(286106, 286107, 286108, 286109, 286110, 286111) c6( ) c7(oO, T, fR, pf, aAx, I, fd, ci, bh, ip, aao, x, bv, aE, K, H, pk, aiV, zC, Fu, cm, bw, GR, ou, cj, zv, k, aw, aj, br, Nh, h, hn, ey, bxg, A, CM, fe, Og, kp, yq, Wt, asE, yR, Qf, ajd, fL, B, L, fM, dA, fG, jx, aA, j, V, cxA, q, J, pd, ae, amO, af, hM, bf, nO, oV, Y, r, awu, nC, pb, ck, iM, dy, yH, bt, vi, iW, jh, bs, aGx, wV, uu, pz, ad, hX, Jm, bTr, Dq, LA, hD, ji, acQ, MG, bdd, je, IR, Of, eZ, gl, aF, Z, aDw, TA, LB, aS, y); #c1(PTPRCAP) c2(NP_005599) c3(protein tyrosine phosphatase receptor type C-associated protein precursor) c4(157867) c5(157868, 157869, 157870, 157871, 157872, 157873) c6( ) c7(V, aF, aA); #c1(PTPRD) c2(NP_001035802) c3(receptor-type tyrosine-protein phosphatase delta isoform 5 precursor) c4(33123, 33124) c5(33125, 33126, 33127, 33128, 33129, 33130, 33131, 33132, 33133, 33134, 33135, 33136) c6( ) c7(bL, bM, T, dD, yY, EQ, cz, Ir, aj, v, j, eq, cd, J, cF, pN, hb, aT, jy, d, ff, mQ, Ej, en, cm, bz, fq, abV, ac, cxB, adg); #c1(PTPRD) c2(NP_001164496) c3(receptor-type tyrosine-protein phosphatase delta isoform 6 precursor) c4(66966, 66967) c5(66968, 66969, 66970, 66971, 66972, 66973, 66974, 66975, 66976, 66977, 66978, 66979) c6( ) c7(bL, bM, T, dD, yY, EQ, cz, Ir, aj, v, j, eq, cd, J, cF, pN, hb, aT, jy, d, ff, mQ, Ej, en, cm, bz, fq, abV, ac, cxB, adg); #c1(PTPRD) c2(NP_002830) c3(receptor-type tyrosine-protein phosphatase delta isoform 1 precursor) c4(132594, 132595) c5(132596, 132597, 132598, 132599, 132600, 132601, 132602, 132603, 132604, 132605, 132606, 132607, 132608, 132609, 132610, 132611, 132612, 132613, 132614, 132615) c6( ) c7(bL, bM, T, dD, yY, EQ, cz, Ir, aj, v, j, eq, cd, J, cF, pN, hb, aT, jy, d, ff, mQ, Ej, en, cm, bz, fq, abV, ac, cxB, adg); #c1(PTPRD) c2(NP_569075) c3(receptor-type tyrosine-protein phosphatase delta isoform 2 precursor) c4(233630) c5(233631, 233632, 233633, 233634, 233635, 233636) c6( ) c7(bL, bM, T, dD, yY, EQ, cz, Ir, aj, v, j, eq, cd, J, cF, pN, hb, aT, jy, d, ff, mQ, Ej, en, cm, bz, fq, abV, ac, cxB, adg); #c1(PTPRD) c2(NP_569076) c3(receptor-type tyrosine-protein phosphatase delta isoform 3 precursor) c4(233637) c5(233638, 233639, 233640, 233641, 233642, 233643) c6( ) c7(bL, bM, T, dD, yY, EQ, cz, Ir, aj, v, j, eq, cd, J, cF, pN, hb, aT, jy, d, ff, mQ, Ej, eq, cm, bz, fq, abV, ac, cxB, adg); #c1(PTPRD) c2(NP_569077) c3(receptor-type tyrosine-protein phosphatase delta isoform 4 precursor) c4(233644) c5(233645, 233646, 233647, 233648, 233649, 233650) c6( ) c7(bL, bM, T, dD, yY, EQ, cz, Ir, aj, v, j, eq, cd, J, cF, pN, hb, aT, jy, d, ff, mQ, Ej, en, cm, bz, fq, abV, ac, cxB, adg); #c1(PTPRD) c2(XP_006716902) c3(receptor-type tyrosine-protein phosphatase delta isoform X29) c4( ) c5(290539, 290540, 290541, 290542, 290543, 290544) c6( ) c7(bL, bM, T, dD, yY, EQ, cz, Ir, aj, v, j, eq, cd, J, cF, pN, hb, aT, jy, d, ff, mQ, Ej, en, cm, bz, fq, abV, ac, cxB, adg); #c1(PTPRD) c2(XP_011516296) c3(receptor-type tyrosine-protein phosphatase delta isoform X23) c4(309496, 309497) c5(309498, 309499, 309500, 309501, 309502, 309503) c6( ) c7(bL, bM, T, dD, yY, EQ, cz, Ir, aj, v, j, eq, cd, J, cF, pN, hb, aT, jy, d, ff, mQ, Ej, en, cm, bz, fq, abV, ac, cxB, adg); #c1(PTPRE) c2(NP_006495) c3(receptor-type tyrosine-protein phosphatase epsilon isoform 1 precursor) c4(165719, 165720) c5( ) c6( ) c7(z, bM, ey, j, mQ); #c1(PTPRE) c2(NP_569119) c3(receptor-type tyrosine-protein phosphatase epsilon isoform 2) c4(233664) c5(233665, 233666, 233667, 233668, 233669, 233670) c6( ) c7(z, bM, ey, j, mQ); #c1(PTPRE) c2(XP_011538295) c3(receptor-type tyrosine-protein phosphatase epsilon isoform X2) c4( ) c5(335970) c6( ) c7(z, bM, ey, j, mQ); #c1(PTPRE) c2(XP_011538297) c3(receptor-type tyrosine-protein phosphatase epsilon isoform X4) c4(335971) c5(335972, 335973, 335974, 335975, 335976, 335977) c6( ) c7(z, bM, ey, j, mQ); #c1(PTPRE) c2(XP_011538300) c3(receptor-type tyrosine-protein phosphatase epsilon isoform X7) c4( ) c5(335978, 335979, 335980, 335981, 335982, 335983, 335984, 335985, 335986, 335987, 335988, 335989, 335990, 335991, 335992, 335993) c6( ) c7(z, bM, ey, j, mQ); #c1(PTPRG) c2(NP_002832) c3(receptor-type tyrosine-protein phosphatase gamma) c4(132616) c5(132617, 132618, 132619, 132620, 132621, 132622) c6( ) c7(bL, x, T, Lu, bug, BO, s, bE, aW, buk, aE, aT, r, aA, Io, bB, j, ci, bK, fr, bz); #c1(PTPRG) c2(XP_005265410) c3(receptor-type tyrosine-protein phosphatase gamma isoform X2) c4(279527) c5(279528, 279529, 279530, 279531, 279532, 279533) c6( ) c7(bL, x, T, Lu, bug, BD, s, bE, aW, buk, aE, aT, r, aA, In, bB, j, ci, bK, fr, bz); #c1(PTPRH) c2(NP_001154912) c3(receptor-type tyrosine-protein phosphatase H isoform 2 precursor) c4(61220) c5(61221, 61222, 61223, 61224, 61225, 61226) c6( ) c7(AK, pi, Zf, bez, rS, dV, r, wR, CZ, q, C, Za, B); #c1(PTPRH) c2(NP_002833) c3(receptor-type tyrosine-protein phosphatase H isoform 1 precursor) c4(132623) c5(132624, 132625, 132626, 132627, 132628, 132629) c6( ) c7(AK, pi, Zf, bez, rS, dV, r, wR, CZ, q, C, Za, B); #c1(PTPRJ) c2(NP_001091973) c3(receptor-type tyrosine-protein phosphatase eta isoform 2 precursor) c4(39095) c5(39096, 39097, 39098, 39099, 39100, 39101, 39102, 39103, 39104, 39105, 39106) c6( ) c7(T, fM, ht, jh, cz, bB, fd, hy, ci, Qo, ai, q, eA, ip, av, hd, py, xE, pe, Db, aT, dz, Od, s, aW, ff, r, en, iK, nM, nB, bE, dX, k, y, bt); #c1(PTPRJ) c2(NP_002834) c3(receptor-type tyrosine-protein phosphatase eta isoform 1 precursor) c4(132630, 132631) c5(132632, 132633, 132634, 132635, 132636, 132637, 132638) c6( ) c7(T, fM, ht, jh, cz, bB, fd, hy, ci, Qo, ai, q, eA, ip, av, hd, py, xE, pe, Db, aT, dz, Od, s, aW, ff, r, en, iK, nM, nB, bE, dX, k, y, bt); #c1(PTPRK) c2(NP_001129120) c3(receptor-type tyrosine-protein phosphatase kappa isoform a precursor) c4(50831) c5(50832, 50833, 50834, 50835, 50836, 50837) c6( ) c7(ck, T, aW, Y, aT, hp, ae, eA, ad, sj); #c1(PTPRK) c2(NP_001278910) c3(receptor-type tyrosine-protein phosphatase kappa isoform c precursor) c4(110888, 110889) c5(110890, 110891, 110892, 110893, 110894, 110895, 110896, 110897, 110898, 110899, 110900, 110901) c6( ) c7(ck, T, aW, Y, aT, hp, ae, eA, ad, sj); #c1(PTPRK) c2(NP_001278912) c3(receptor-type tyrosine-protein phosphatase kappa isoform e) c4(110902) c5(110903, 110904, 110905, 110906, 110907, 110908) c6( ) c7(ck, T, aW, Y, aT, hp, ae, eA, ad, sj); #c1(PTPRK) c2(NP_001278913) c3(receptor-type tyrosine-protein phosphatase kappa isoform f precursor) c4(110909) c5(110910, 110911, 110912, 110913, 110914, 110915) c6( ) c7(ck, 1 aW, Y, aT, hp, ae, eA, ad, sj); #c1(PTPRK) c2(NP_002835) c3(receptor-type tyrosine-protein phosphatase kappa isoform b precursor) c4(132639) c5(132640, 132641, 132642, 132643, 132644, 132645) c6( ) c7(ck, T, aW, Y, aT, hp, ae, eA, ad, sj); #c1(PTPRK) c2(XP_011534317) c3(receptor-type tyrosine-protein phosphatase kappa isoform X2) c4(330684, 330685) c5(330686, 330687, 330688, 330689, 330690, 330691, 330692, 330693, 330694, 330695, 330696, 330697) c6( ) c7(ck, T, aW, Y, aT, hp, ae, eA, ad, sj); #c1(PTPRM) c2(NP_001098714) c3(receptor-type tyrosine-protein phosphatase mu isoform 1 precursor) c4(41524, 41525) c5(41526, 41527, 41528, 41529, 41530, 41531, 41532, 41533, 41534, 41535, 41536, 41537) c6( ) c7(bL, T, aW, eZ, aT, V, ad); #c1(PTPRM) c2(NP_002836) c3(receptor-type tyrosine-protein phosphatase mu isoform 2 precursor) c4(132646, 132647) c5(132648, 132649, 132650, 132651, 132652, 132653, 132654, 132655, 132656, 132657, 132658, 132659) c6( ) c7(bL, 1 aW, eZ, aT, V, ad); #c1(PTPRM) c2(XP_011524018) c3(receptor-type tyrosine-protein phosphatase mu isoform X11) c4(318537) c5(318538, 318539, 318540, 318541, 318542, 318543) c6( ) c7(bL, T, aW, eZ, aT, V, ad); #c1(PTPRN) c2(NP_001186692) c3(receptor-type tyrosine-protein phosphatase-like N isoform 2 precursor) c4(78353) c5(78354, 78355, 78356, 78357, 78358, 78359, 78360, 78361, 78362, 78363) c6( ) c7(bL, gx, mj, A, Hm, Mz, aj, mf, dG, hK, V, dF, J); #c1(PTPRN) c2(NP_001186693) c3(receptor-type tyrosine-protein phosphatase-like N isoform 3) c4(78364) c5(78365, 78366, 78367, 78368, 78369, 78370) c6( ) c7(bL, gx, mj, A, Hm, Mz, aj, mf, dG, hK, V, dF, J); #c1(PTPRN) c2(NP_002837) c3(receptor-type tyrosine-protein phosphatase-like N isoform 1 precursor) c4(132660, 132661) c5(132662, 132663, 132664, 132665, 132666, 132667, 132668) c6( ) c7(bL, gx, mj, A, Hm, Mz, aj, mf, dG, hK, V, dF, J); #c1(PTPRN) c2(XP_011509868) c3(receptor-type tyrosine-protein phosphatase-like N isoform X1) c4( ) c5(300468, 300469, 300470, 300471, 300472) c6( ) c7(bL, gx, mj, A, Hm, Mz, aj, mf, dG, hK, V, dF, J); #c1(PTPRN2) c2(NP_002838) c3(receptor-type tyrosine-protein phosphatase N2 isoform 1 precursor) c4(132669) c5(132670, 132671, 132672, 132673, 132674, 132675) c6( ) c7(bL, mj, A, ac, aT, Mz, aj, mf, dy, bX, he, J); #c1(PTPRN2) c2(NP_570857) c3(receptor-type tyrosine-protein phosphatase N2 isoform 2 precursor) c4(234345) c5(234346, 234347, 234348, 234349, 234350, 234351) c6( ) c7(bL, mj, A, ac, aT, Mz, aj, mf, dy, bX, he, J); #c1(PTPRN2) c2(NP_570858) c3(receptor-type tyrosine-protein phosphatase N2 isoform 3 precursor) c4(234352) c5(234353, 234354, 234355, 234356, 234357, 234358) c6( ) c7(bL, mj, A, ac, aT, Mz, aj, mf, dy, bX, he, J); #c1(PTPR0) c2(NP_002839) c3(receptor-type tyrosine-protein phosphatase O isoform b precursor) c4(132676, 132677) c5(132678, 132679, 132680, 132681, 132682, 132683, 132684, 132685) c6( ) c7(T, fM, jh, cz, ah, uE, x, av, kH, aT, bxg, iU, aW, Y, hl, aq, iR, fq, cxC, ck, sk, cj, it, B); #c1(PTPR0) c2(NP_109592) c3(receptor-type tyrosine-protein phosphatase O isoform a precursor) c4(219743) c5(219744, 219745, 219746, 219747, 219748, 219749, 219750, 219751) c6( ) c7(T, fM, jh, cz, ah, uE, x, av, kH, aT, bxg, iU, aW, Y, hl, aq, iR, fq, cxC, ck, sk, cj, it, B); #c1(PTPR0) c2(NP_109594) c3(receptor-type tyrosine-protein phosphatase O isoform c) c4( ) c5(219752, 219753, 219754, 219755, 219756, 219757, 219758, 219759) c6( ) c7(T, fM, jh, cz, ah, uE, x, av, kH, aT, bxg, iU, aW, Y, hl, aq, iR, fq, cxC, ck, sk, cj, it, B); #c1(PTPR0) c2(NP_109595) c3(receptor-type tyrosine-protein phosphatase O isoform d) c4( ) c5(219760, 219761, 219762, 219763, 219764, 219765, 219766, 219767) c6( ) c7(T, fM, jh, cz, ah, uE, x, av, kH, aT, bxg, iU, aW, Y, hl, aq, iR, fq, cxC, ck, sk, cj, it, B); #c1(PTPR0) c2(XP_011519094) c3(receptor-type tyrosine-protein phosphatase O isoform X1) c4(313687) c5( ) c6( ) c7(T, fM, jh, cz, ah, uE, x, av, kH, aT, bxg, iU, aW, Y, hl, aq, iR, fq, cxC, ck, sk, cj, it, B); #c1(PTPRQ) c2(NP_001138498) c3(phosphatidylinositol phosphatase PTPRQ precursor) c4(56898) c5(56899, 56900, 56901, 56902, 56903, 56904) c6( ) c7(Bh, bK, cxD, EQ); #c1(PTPRR) c2(NP_001193944) c3(receptor-type tyrosine-protein phosphatase R isoform 3) c4(83291, 83292, 83293) c5(83294, 83295, 83296, 83297, 83298, 83299) c6( ) c7(Bh, Be, an); #c1(PTPRR) c2(NP_001193945) c3(receptor-type tyrosine-protein phosphatase R isoform 4) c4(83300) c5(83301, 83302, 83303, 83304, 83305, 83306, 83307, 83308, 83309) c6( ) c7(Bh, Be, an); #c1(PTPRR) c2(NP_002840) c3(receptor-type tyrosine-protein phosphatase R isoform 1 precursor) c4(132686) c5(132687, 132688, 132689, 132690, 132691, 132692) c6( ) c7(Bh, Be, an); #c1(PTPRR) c2(NP_570897) c3(receptor-type tyrosine-protein phosphatase R isoform 2) c4( ) c5(234359, 234360, 234361, 234362, 234363, 234364, 234365, 234366, 234367, 234368, 234369, 234370, 234371) c6( ) c7(Bh, Be, an); #c1(PTPRS) c2(NP_002841) c3(receptor-type tyrosine-protein phosphatase S isoform 1 precursor) c4(132693, 132694, 132695) c5(132696, 132697, 132698, 132699, 132700, 132701, 132702, 132703, 132704, 132705, 132706, 132707, 132708, 132709, 132710, 132711, 132712, 132713) c6( ) c7(bL, ji, iV); #c1(PTPRS) c2(NP_570923) c3(receptor-type tyrosine-protein phosphatase S isoform 3 precursor) c4(234408) c5(234409, 234410, 234411, 234412, 234413, 234414) c6( ) c7(bL, ji, iV); #c1(PTPRS) c2(NP_570924) c3(receptor-type tyrosine-protein phosphatase S isoform 2 precursor) c4(234415) c5(234416, 234417, 234418, 234419, 234420, 234421) c6( ) c7(bL, ji, iV); #c1(PTPRS) c2(NP_570925) c3(receptor-type tyrosine-protein phosphatase S isoform 4 precursor) c4(234422) c5(234423, 234424, 234425, 234426, 234427, 234428) c6( ) c7(bL, ji, iV); #c1(PTPRS) c2(XP_006722875) c3(receptor-type tyrosine-protein phosphatase S isoform X6) c4(294899) c5(294900, 294901, 294902, 294903, 294904, 294905) c6( ) c7(bL, ji, iV); #c1(PTPRS) c2(XP_006722877) c3(receptor-type tyrosine-protein phosphatase S isoform X7) c4(294906) c5(294907, 294908, 294909, 294910, 294911, 294912) c6( ) c7(bL, ji, iV); #c1(PTPRS) c2(XP_006722881) c3(receptor-type tyrosine-protein phosphatase S isoform X11) c4(294913) c5(294914, 294915, 294916, 294917, 294918, 294919) c6( ) c7(bL, ji, iV); #c1(PTPRS) c2(XP_011526459) c3(receptor-type tyrosine-protein phosphatase S isoform X15) c4(320761) c5(320762, 320763, 320764, 320765, 320766, 320767) c6( ) c7(bL, ji, iV); #c1(PTPRT) c2(NP_008981) c3(receptor-type tyrosine-protein phosphatase T isoform 2 precursor) c4(170033, 170034) c5(170035, 170036, 170037, 170038, 170039, 170040, 170041, 170042, 170043, 170044, 170045, 170046) c6( ) c7(bL, T, aC, bB, Wb, aj, fr, yV, eJ, eA, J, ad, ji, ae, d, bug, eZ, as, cm, bE, dy, y); #c1(PTPRT) c2(NP_573400) c3(receptor-type tyrosine-protein phosphatase T isoform 1 precursor) c4(234483, 234484) c5(234485, 234486, 234487, 234488, 234489, 234490, 234481, 234492, 234493, 234494, 234495, 234496) c6( ) c7(bL, T, aC, bB, Wb, aj, fr, yV, eJ, eA, J, ad, ji, ae, d, bug, eZ, as, cm, bE, dy, y); #c1(PTPRT) c2(XP_011526815) c3(receptor-type tyrosine-protein phosphatase T isoform X3) c4(321115) c5(321116, 321117, 321118, 321119, 321120, 321121) c6( ) c7(bL, T, aC, bB, Wb, aj, fr, yV, eJ, eA, J, ad, ji, ae, d, bug, eZ, as, cm, bE, dy, y); #c1(PTPRT) c2(XP_011526816) c3(receptor-type tyrosine-protein phosphatase T isoform X4) c4(321122) c5(321123, 321124, 321125, 321126, 321127, 321128) c6( ) c7(bL, T, aC, bB, Wb, aj, fr, yV, eJ, eA, J, ad, ji, ae, d, bug, eZ, as, cm, bE, dy, y); #c1(PTPRT) c2(XP_011526817) c3(receptor-type tyrosine-protein phosphatase T isoform X5) c4(321129) c5(321130, 321131, 321132, 321133, 321134, 321135) c6( ) c7(bL, T, aC, bB, Wb, aj, fr, yV, eJ, eA, J, ad, ji, ae, d, bug, eZ, as, cm, bE, dy, y); #c1(PTPRZ1) c2(NP_001193768) c3(receptor-type tyrosine-protein phosphatase zeta isoform 3 precursor) c4(82558) c5(82559, 82560, 82561, 82562, 82563, 82564) c6( ) c7(T, wi, aA, cg, fr, il, V, Fc, eA, aR, ft, pX, aT, d, eH, r, as, eF, Hv, bN, fT, c, cB); #c1(PTPRZ1) c2(NP_002842) c3(receptor-type tyrosine-protein phosphatase zeta isoform 1 precursor) c4(132714) c5(132715, 132716, 132717, 132718, 132719, 132720, 132721) c6( ) c7(T, wi, aA, cg, fr, il, V, Fc, eA, aR, ft, pX, aT, d, eH, r, as, eF, Hv, bN, fT, c, cB); #c1(PTRF) c2(NP_036364) c3(polymerase I and transcript release factor) c4(173246, 173247) c5(173248, 173249, 173250, 173251, 173252, 173253, 173254, 173255, 173256, 173257, 173258, 173259) c6( ) c7(T, d, eM, iU, QJ, cxE, xs, jN, oj, v, PQ, qN, iV, ae, GR, ad, mu); #c1(PTRH1) c2(NP_001002913) c3(probable peptidyl-tRNA hydrolase) c4(19752) c5(19753, 19754, 19755, 19756, 19757, 19758, 19759, 19760, 19761, 19762) c6( ) c7(bL, T, zp, AB, eR, rV, pY, Ay, adi, amC, j, cxc, nA, cxa, ml, aY, pd, JW, xt, xx, fU, acX, ahy, amB, Tl, bv, aE, zw, xW, ari, aT, yu, rD, bta, K, bsR, OM, aAG, zg, he, EL, yh, ars, aAL, bA, dQ, bDT, azh, Jg, aAl, s, iU, aW, OX, vj, eH, Lm, nh, dg, aq, eF, Hl, bz, Vm, dr, wW, EJ, bRK, pv, YE, yl, TG, fP, hj, pg, iS, QF, aYS, azg, aAQ, B, aAO); #c1(PTRH2) c2(NP_057161) c3(peptidyl-tRNA hydrolase 2, mitochondrial precursor) c4( ) c5(189215, 189216, 189217, 189218, 189219, 189220, 189221, 189222, 189223) c6( ) c7(T, ft, aW, sw, ff, aT, en, it, ad); #c1(PTRHD1) c2(NP_001013685) c3(putative peptidyl-tRNA hydrolase PTRHD1) c4(25709) c5(25710, 25711, 25712, 25713, 25714, 25715) c6( ) c7(bK); #c1(PTS) c2(NP_000308) c3(6-pyruvoyl tetrahydrobiopterin synthase) c4(6821, 6822) c5(6823, 6824, 6825, 6826, 6827, 6828, 6829, 6830, 6831, 6832, 6833, 6834, 6835, 6836, 6837, 6838, 6839, 6840, 6841, 6842, 6843, 6844, 6845, 6846, 6847, 6848, 6849, 6850, 6851, 6852, 6853, 6854, 6855, 6856, 6857, 6858, 6859, 6860, 6861, 6862, 6863, 6864, 6865, 6866, 6867, 6868, 6869, 6870, 6871, 6872, 6873, 6874, 6875, 6876, 6877, 6878, 6879, 6880, 6881, 6882, 6883, 6884, 6885, 6886, 6887, 6888, 6889, 6890, 6891, 6892, 6893, 6894, 6895, 6896, 6897, 6898, 6899, 6900, 6901, 6902, 6903, 6904, 6905, 6906, 6907, 6908, 6909, 6910, 6911, 6912, 6913, 6914, 6915, 6916, 6917) c6(6918, 6919, 6920) c7(bfb, Wz, aU, dq, aq, acU, Wm, PJ, cxF, B, bN); #c1(PTTG1) c2(NP_001269312) c3(securin) c4(101067) c5(101068, 101069, 101070, 101071, 101072, 101073, 101074, 101075, 101076, 101077, 101078, 101079, 101080, 101081) c6( ) c7(T, aC, IT, ht, fN, fd, bB, n, aj, ci, q, J, ad, eA, wD, cF, hd, py, cc, aT, iv, ey, ae, af, yo, s, vT, qt, asP, Y, aW, ff, iw, cr, r, ks, aq, eZ, kp, en, hf, bu, t, g, bz, cm, op, iR, eM, Jr, nB, bE, vA, gX, gZ, hR, nw, aan, it, B); #c1(PTTG11P) c2(NP_001273751) c3(pituitary turner-transforming gene 1 protein-interacting protein isoform 2 precursor) c4(105767) c5(105768, 105769, 105770, 105771, 105772, 105773) c6( ) c7(T, hd, s, nB, aW, eH, aT, hR, n, hz, eF); #c1(PTTG11P) c2(NP_004330) c3(pituitary turner-transforming gene 1 protein-interacting protein isoform 1 precursor) c4(145213) c5(145214, 145215, 145216, 145217, 145218, 145219, 145220) c6( ) c7(T, hd, s, nB, aW, eH, aT, hR, n, hz, eF); #c1(PTTG2) c2(NP_006598) c3(securin-2) c4(166528) c5(166529, 166530, 166531, 166532, 166533, 166534) c6( ) c7(iR, aq); #c1(PTX3) c2(NP_002843) c3(pentraxin-related protein PTX3 precursor) c4(132722) c5(132723, 132724, 132725, 132726, 132727, 132728) c6( ) c7(oO, T, jv, dD, eR, fR, ea, fG, Hc, aGu, e, aw, wo, cR, eX, cL, v, eq, C, aBI, cd, o, ai, eA, azY, rS, aT, eV, ey, K, IQ, an, qE, bzH, hm, yo, aiV, aW, Y, cr, yq, pm, uC, pb, LB, D, kT, rR, pc, y, ig, au, aiM, at, wq, wR, bas, aS, yH, dy, EY, hh, Pk, ei, aDj); #c1(PUF60) c2(NP_001129505) c3(poly(U)-binding-splicing factor PUF60 isoform c) c4( ) c5(51766, 51767, 51768, 51769, 51770) c6( ) c7(ov, T, ib, cxG, nO, r, bD, q); #c1(PUF60) c2(NP_001258026) c3(poly(U)-binding-splicing factor PUF60 isoform e) c4(95912) c5( ) c6( ) c7(ov, T, ib, cxG, nO, r, bD, q); #c1(PUF60) c2(NP_001258028) c3(poly(U)-binding-splicing factor PUF60 isoform g) c4(95913) c5( ) c6( ) c7(ov, T, ib, cxG, nO, r, bD, q); #c1(PUF60) c2(NP_001258029) c3(poly(U)-binding-splicing factor PUF60 isoform h) c4( ) c5(95914, 95915, 95916, 95917, 95918, 95919, 95920, 95921) c6( ) c7(ov, T, ib, cxG, nO, r, bD, q); #c1(PUF60) c2(NP_055096) c3(poly(U)-binding-splicing factor PUF60 isoform b) c4(178898) c5(178899, 178900, 178901, 178902, 178903, 178904, 178905, 178906, 178907) c6( ) c7(ov, T, ib, cxG, nO, r, bD, q); #c1(PUF60) c2(NP_510965) c3(poly(U)-binding-splicing factor PUF60 isoform a) c4(231083) c5(231084, 231085, 231086, 231087, 231088, 231089, 231090, 231091, 231092) c6( ) c7(ov, T, ib, cxG, nO, r, bD, q); #c1(PUF60) c2(XP_011515231) c3(poly(U)-binding-splicing factor PUF60 isoform X1) c4( ) c5(308046) c6( ) c7(ov, T, ib, cxG, nO, r, bD, q); #c1(PUF60) c2(XP_011515232) c3(poly(U)-binding-splicing factor PUF60 isoform X2) c4( ) c5(308047) c6( ) c7(ov, T, ib, cxG, nO, r, bD, q); #c1(PUM2) c2(NP_001269681) c3(pumilio homolog 2 isoform 2) c4( ) c5(102531, 102532, 102533, 102534, 102535) c6( ) c7(vH, gU); #c1(PUM2) c2(NP_056132) c3(pumilio homolog 2 isoform 1) c4(185850, 185851) c5(185852, 185853, 185854, 185855, 185856, 185857, 185858, 185859, 185860, 185861, 185862) c6( ) c7(vH, gU); #c1(PUM2) c2(XP_005262666) c3(pumilio homolog 2 isoform X4) c4(278031) c5(278032, 278033, 278034, 278035, 278036, 278037) c6( ) c7(vH, gU); #c1(PUM2) c2(XP_006712037) c3(pumilio homolog 2 isoform X2) c4(286354) c5(286355, 286356, 286357, 286358, 286359, 286360, 286361, 286362, 286363, 286364, 286365) c6( ) c7(vH, gU); #c1(PUM2) c2(XP_011531026) c3(pumilio homolog 2 isoform X6) c4(326987, 326988) c5( ) c6( ) c7(vH, gU); #c1(PUM2) c2(XP_011531027) c3(pumilio homolog 2 isoform X7) c4( ) c5(326989, 326990, 326991, 326992, 326993, 326994, 326995, 326996) c6( ) c7(vH, gU); #c1(PURA) c2(NP_005850) c3(transcriptional activator protein Pur-alpha) c4(159867) c5(159868, 159869, 159870, 159871, 159872, 159873) c6( ) c7(aj, bw, bt, af, J, ad); #c1(PURB) c2(NP_150093) c3(transcriptional activator protein Pur-beta) c4(227746) c5(227747, 227748, 227749, 227750, 227751, 227752) c6( ) c7(bw, bt, cd); #c1(PUS1) c2(NP_001002019) c3(tRNA pseudouridine synthase A, mitochondrial isoform 2) c4(19349, 19350, 19351) c5(19352, 19353, 19354, 19355, 19356, 19357, 19358, 19359, 19360, 19361, 19362, 19363, 19364, 19365, 19366, 19367, 19368, 19369) c6( ) c7(kA, aNG, cxH, oj, aA); #c1(PUS1) c2(NP_079491) c3(tRNA pseudouridine synthase A, mitochondrial isoform 1) c4(218341) c5(218342, 218343, 218344, 218345, 218346, 218347, 218348, 218349, 218350, 218351) c6( ) c7(kA, aNG, cxH, oj, aA); #c1(PUS1) c2(XP_011537071) c3(tRNA pseudouridine synthase A, mitochondrial isoform X2) c4( ) c5(334851) c6( ) c7(kA, aNG, cxH, oj, aA); #c1(PUS10) c2(XP_011530879) c3(putative tRNA pseudouridine synthase Pus10 isoform X1) c4(326881, 326882) c5(326883, 326884, 326885, 326886, 326887, 326888, 326889, 326890, 326891, 326892, 326893, 326894, 326895, 326896, 326897, 326898) c6( ) c7(hp, ju, iV); #c1(PVALB) c2(XP_011545203) c3(parvalbumin alpha isoform X2) c4( ) c5(343989, 343990, 343991, 343992, 343993, 343994) c6( ) c7(dt, Uc, ha, bO, Ib, bS, fr, ct, ci, V, Ef, aaF, kf, yT, cxI, vc, bK, K, h, an, afV, hC, Z, cm, bN, D, c, uJ, xg, ek); #c1(PVR) c2(NP_001129240) c3(poliovirus receptor isoform beta precursor) c4(51279) c5(51280, 51281, 51282, 51283, 51284, 51285) c6( ) c7(T, fR, aFc, pi, V, q, eA, dP, zT, iu, xl, aT, h, cxJ, d, s, iE, aW, r, Io, Ph, g, pm, cm, bz, vk, ck, apM, iT, bru, axV, X); #c1(PVR) c2(NP_001129241) c3(poliovirus receptor isoform gamma precursor) c4(51286) c5(51287, 51288, 51289, 51290, 51291, 51292) c6( ) c7(T, fR, aFc, pl, V, q, eA, dP, zT, iu, xl, aT, h, cxJ, d, s, iE, aW, r, Io, Ph, g, pm, cm, bz, vk, ck, apM, iT, bru, axV, X); #c1(PVR) c2(NP_001129242) c3(poliovirus receptor isoform delta precursor) c4(51293) c5(51294, 51295, 51296, 51297, 51298, 51299) c6( ) c7(T, fR, aFc, pl, V, q, eA, dP, zT, iu, xl, aT, h, cxJ, d, s, iE, aW, r, Io, Ph, g, pm, cm, bz, vk, ck, apM, iT, bru, axV, X); #c1(PVR) c2(NP_006496) c3(poliovirus receptor isoform alpha precursor) c4(165721) c5(165722, 165723, 165724, 165725, 165726, 165727) c6( ) c7(T, fR, aFc, pi, V, g, eA, dP, zT, iu, xl, aT, h, cxJ, d, s, iE, aW, r, lo, Ph, g, pm, cm, bz, vk, ck, apM, iT, bru, axV, X); #c1(PVRL1) c2(NP_002846) c3(nectin-1 isoform 1 precursor) c4(132747) c5(132748, 132749, 132750, 132751, 132752, 132753, 132754, 132755) c6( ) c7(T, fR, cxK, oe, aj, zU, sl, eA, aR, J, hX, dP, Na, eW, hd, xl, amJ, aT, Nc, IQ, aW, ff, cr, eZ, fe, alb, en, g, eE, cm, cxL, es, iO, arB, Pa, nB, xD, dc, wR, CZ, y); #c1(PVRL1) c2(NP_976030) c3(nectin-1 isoform 2 precursor) c4(262816) c5(262817, 262818, 262819, 262820, 262821, 262822) c6( ) c7(T, fR, cxK, oe, aj, zU, sl, eA, aR, J, hX, dP, Na, eW, hd, xl, amJ, aT, Nc, IQ, aW, ff, cr, eZ, fe, alb, en, g, eE, cm, cxL, es, iO, arB, Pa, nB, xD, dc, wR, CZ, y); #c1(PVRL1) c2(NP_976031) c3(nectin-1 isoform 3 precursor) c4(262823) c5(262824, 262825, 262826, 262827, 262828, 262829) c6( ) c7(T, fR, cxK, oe, aj, zU, sl, eA, aR, J, hX, dP, Na, eW, hd, xl, amJ, aT, Nc, IQ, aW, ff, cr, eZ, fe, alb, en, g, eE, cm, cxL, es, iO, arB, Pa, nB, xD, dc, wR, CZ, y); #c1(PVRL2) c2(NP_001036189) c3(nectin-2 isoform delta precursor) c4(34040) c5(34041, 34042, 34043, 34044, 34045, 34046) c6( ) c7(ck, zT, T, Na, fM, eW, af, xl, iT, e, Nc, j, m, en, t, V, fK); #c1(PVRL2) c2(NP_002847) c3(nectin-2 isoform alpha precursor) c4(132756) c5(132757, 132758, 132759, 132760, 132761, 132762) c6( ) c7(ck, zT, T, Na, fM, eW, aT, xl, iT, e, Nc, j, m, eo, t, V, fK); #c1(PVRL3) c2(NP_001230215) c3(nectin-3 isoform 2 precursor) c4(86124) c5(86125, 86126, 86127, 86128, 86129, 86130) c6( ) c7(dP, Hx, mP, aW, aT, hD, at); #c1(PVRL3) c2(NP_001230217) c3(nectin-3 isoform 3) c4( ) c5(86131, 86132, 86133, 86134, 86135, 86136) c6( ) c7(dP, Hx, mP, aW, aT, hD, at); #c1(PVRL3) c2(NP_056295) c3(nectin-3 isoform 1 precursor) c4(186998) c5(186999, 187000, 187001, 187002, 187003, 187004) c6( ) c7(dP, Hx, mP, aW, aT, hD, at); #c1(PVRL3) c2(XP_011510966) c3(nectin-3 isoform X4) c4(301428) c5( ) c6( ) c7(dP, Hx, mP, aW, aT, hD, at); #c1(PVRL4) c2(NP_112178) c3(nectin-4 precursor) c4(220639) c5(220640, 220641, 220642, 220643, 220644, 220645) c6( ) c7(dP, zT, T, eM, cxM, amJ, aW, ff, aT, ci, zU, en, g, CQ, bz, iu); #c1(PVRL4) c2(XP_005245565) c3(nectin-4 isoform X3) c4(266725) c5(266726, 266727, 266728, 266729, 266730, 266731) c6( ) c7(dP, zT, T, eM, cxM, amJ, aW, ff, aT, ci, zU, en, g, CQ, bz, iu); #c1(PWP2) c2(NP_005040) c3(periodic tryptophan protein 2 homolog) c4(152381) c5(152382, 152383, 152384, 152385, 152386, 152387) c6( ) c7(f); #c1(PWWP2B) c2(NP_001092107) c3(PWWP domain-containing protein 2B isoform 2) c4(39396) c5(39397, 39398, 39399, 39400, 39401, 39402) c6( ) c7(kl); #c1(PWWP2B) c2(NP_612508) c3(PWWP domain-containing protein 2B isoform 1) c4(236669) c5(236670, 236671, 236672, 236673, 236674, 236675) c6( ) c7(kl); #c1(PXDN) c2(NP_036425) c3(peroxidasin homolog precursor) c4(173753, 173754) c5(173755, 173756, 173757, 173758, 173759, 173760, 173761, 173762, 173763, 173764, 173765, 173766) c6( ) c7(ac, Y, bt, r, dy, bz, cdT, bbG, cxN, q); #c1(PXDNL) c2(NP_653252) c3(peroxidasin-like protein precursor) c4(239357, 239358) c5(239359, 239360, 239361, 239362, 239363, 239364, 239365, 239366, 239367, 239368, 239369, 239370, 239371, 239372, 239373, 239374) c6(239375, 239376, 239377, 239378) c7(akG, oe, gU, ND); #c1(PXK) c2(NP_001276025) c3(PX domain-containing protein kinase-like protein isoform 3) c4(107783) c5(107784, 107785, 107786, 107787, 107788, 107789) c6( ) c7(y, ey, ph, eZ); #c1(PXK) c2(NP_001276027) c3(PX domain-containing protein kinase-like protein isoform 4) c4(107790) c5(107791, 107792, 107793, 107794, 107795, 107796) c6( ) c7(y, ey, pb, eZ); #c1(PXK) c2(NP_001276028) c3(PX domain-containing protein kinase-like protein isoform 5) c4( ) c5(107797) c6( ) c7(y, ey, pb, eZ); #c1(PXK) c2(NP_001276030) c3(PX domain-containing protein kinase-like protein isoform 7) c4( ) c5(107798, 107799, 107800, 107801, 107802, 107803, 107804, 107805, 107806, 107807) c6( ) c7(y, ey, pb, eZ); #c1(PXK) c2(NP_060241) c3(PX domain-containing protein kinase-like protein isoform 1) c4(194930, 194931, 194932, 194933) c5(194934, 194935, 194936, 194937, 194938, 194939, 194940, 194941, 194942, 194943, 194944, 194945) c6( ) c7(y, ey, pb, eZ); #c1(PXK) c2(XP_011532170) c3(PX domain-containing protein kinase-like protein isoform X9) c4( ) c5(328216) c6( ) c7(y, ey, pb, eZ); #c1(PXMP2) c2(NP_061133) c3(peroxisomal membrane protein 2) c4(199435) c5(199436, 199437, 199438, 199439, 199440, 199441, 199442) c6( ) c7(ob, xF, bkY, csv, agU, ci, fu, bX, eA, no, csC, aT, bl, bU, csy, mJ, csB, aW, bT, eH, aFT, eF, cbm, Hp, bkZ, sk, ql, csw, mG, bee, afO); #c1(PXN) c2(NP_001074324) c3(paxillin isoform 2) c4(37096) c5( ) c6( ) c7(T, fM, aA, bB, fr, ci, q, ad, eA, av, iu, ft, Ig, aT, By, dL, K, ae, eL, iU, aW, Y, az, eH, r, Ej, aF, g, eF, t, iK, bz, Ew, eM, bE, m, B); #c1(PXN) c2(NP_001230685) c3(paxillin isoform 3) c4(86568) c5( ) c6( ) c7(T, fM, aA, bB, fr, ci, q, ad, eA, av, iu, ft, Ig, aT, By, dL, K, ae, eL, iU, aW, Y, az, eH, r, Ej, aF, g, eF, t, iK, bz, Ew, eM, bE, m, B); #c1(PXN) c2(NP_002850) c3(paxillin isoform 1) c4(132785) c5( ) c6( ) c7(T, fM, aA, bB, fr, ci, q, ad, eA, av, iu, ft, Ig, aT, By, dL, K, ae, eL, iU, aW, Y, az, eH, r, Ej, aF, g, eF, t, iK, bz, Ew, eM, bE, m, B); #c1(PXN) c2(NP_079433) c3(paxillin isoform 4) c4( ) c5(218109, 218110, 218111, 218112, 218113, 218114, 218115, 218116, 218117, 218118, 218119) c6( ) c7(T, fM, aA, bB, fr, ci, q, ad, eA, av, iu, ft, Ig, aT, By, dL, K, ae, eL, iU, aW, Y, az, eH, r, Ej, aF, g, eF, t, iK, bz, Ew, eM, bE, m, B); #c1(PXN) c2(XP_005253970) c3(paxillin isoform X16) c4( ) c5(272810, 272811, 272812, 272813, 272814, 272815) c6( ) c7(T, fM, aA, bB, fr, ci, q, ad, eA, av, iu, ft, Ig, aT, By, dL, K, ae, eL, iU, aW, Y, az, eH, r, Ej, aF, g, eF, t, iK, bz, Ew, eM, bE, m, B); #c1(PXN) c2(XP_005253972) c3(paxillin isoform X18) c4( ) c5(272816, 272817, 272818, 272819, 272820, 272821) c6( ) c7(T, fM, aA, bB, fr, ci, q, ad, eA, av, iu, ft, Ig, aT, By, dL, K, ae, eL, iU, aW, Y, az, eH, r, Ej, aF, g, eF, t, iK, bz, Ew, eM, bE, m, B); #c1(PXN) c2(XP_005253973) c3(paxillin isoform X19) c4(272822, 272823) c5(272824, 272825, 272826, 272827, 272828, 272829, 272830, 272831) c6( ) c7(T, fM, aA, bB, fr, ci, q, ad, eA, av, iu, ft, Ig, aT, By, dL, K, ae, eL, iU, aW, Y, az, eH, r, Ej, aF, g, eF, t, iK, bz, Ew, eM, bE, m, B); #c1(PXN) c2(XP_005253974) c3(paxillin isoform X20) c4(272832) c5(272833, 272834, 272835, 272836, 272837, 272838) c6( ) c7(T, fM, aA, bB, fr, ci, q, ad, eA, av, iu, ft, Ig, aT, By, dL, K, ae, eL, iU, aW, Y, az, eH, r, Ej, aF, g, eF, t, iK, bz, Ew, eM, bE, m, B); #c1(PXN) c2(XP_006719594) c3(paxillin isoform X1) c4(292662) c5( ) c6( ) c7(T, fM, aA, bB, fr, ci, q, ad, eA, av, iu, ft, Ig, aT, By, dL, K, ae, eL, iU, aW, Y, az, eH, r, Ej, aF, g, eF, t, iK, bz, Ew, eM, bE, m, B); #c1(PXN) c2(XP_011536927) c3(paxillin isoform X12) c4( ) c5(334592) c6( ) c7(T, fM, aA, bB, fr, ci, q, ad, eA, av, iu, ft, Ig, aT, By, dL, K, ae, eL, iU, aW, Y, az, eH, r, Ej, aF, g, eF, t, iK, bz, Ew, eM, bE, m, B); #c1(PXN) c2(XP_011536929) c3(paxillin isoform X21) c4( ) c5(334593, 334594, 334595, 334596, 334597) c6( ) c7(T, fM, aA, bB, fr, ci, q, ad, eA, av, iu, ft, Ig, aT, By, dL, K, ae, eL, iU, aW, Y, az, eH, r, Ej, aF, g, eF, t, iK, bz, Ew, eM, bE, m, B); #c1(PXT1) c2(XP_011512702) c3(peroxisomal testis-specific protein 1 isoform X2) c4(303739, 303740, 303741) c5(303742) c6( ) c7(gU); #c1(PXT1) c2(XP_011512703) c3(peroxisomal testis-specific protein 1 isoform X1) c4( ) c5(303743, 303744, 303745, 303746, 303747, 303748, 303749, 303750, 303751, 303752, 303753, 303754, 303755, 303756, 303757, 303758, 303759) c6( ) c7(gU); #c1(PYCARD) c2(NP_037390) c3(apoptosis-associated speck-like protein containing a CARD isoform a) c4(175195, 175196) c5(175197, 175198, 175199, 175200, 175201, 175202, 175203, 175204, 175205, 175206, 175207, 175208) c6( ) c7(Dw, T, dD, QO, ea, if, al, aA, bB, n, btu, eq, ci, qN, q, ad, ai, eW, av, ft, hd, xE, jz, akU, ds, aoA, BJ, dV, aT, h, agV, K, ae, cp, sj, zl, d, s, up, aW, Y, AQ, ih, ff, r, hQ, aq, Io, aF, en, g, ajz, t, as, bz, cm, ck, gk, Qy, nM, eM, nB, bE, wE, dy, m, IS, hh, y, B, cn); #c1(PYCARD) c2(NP_660183) c3(apoptosis-associated speck-like protein containing a CARD isoform b) c4(240468) c5(240469, 240470, 240471, 240472, 240473, 240474) c6( ) c7(Dw, T, dD, QO, ea, if, al, aA, bB, n, btu, eq, ci, qN, q, ad, ai, eW, av, ft, hd, xE, jz, akU, ds, aoA, BJ, dV, aT, h, agV, K, ae, cp, sj, zl, d, s, up, aW, Y, AQ, ih, ff, r, hQ, aq, Io, aF, en, g, ajz, t, as, bz, cm, ck, gk, Qy, nM, eM, nB, bE, wE, dy, m, IS, hh, y, B, cn); #c1(PYCR1) c2(NP_001269208) c3(pyrroline-5-carboxylate reductase 1, mitochondrial isoform 3) c4(100779) c5(100780, 100781, 100782, 100783, 100784) c6( ) c7(RR, iT, cxO, Uj, IP, rC, CQ, nA, cxQ, cxP, ae, ad); #c1(PYCR1) c2(NP_001269210) c3(pyrroline-5-carboxylate reductase 1, mitochondrial isoform 5) c4(100785) c5(100786, 100787, 100788, 100789, 100790, 100791, 100792, 100793) c6( ) c7(RR, iT, cxO, Uj, IP, rC, CQ, nA, cxO, cxP, ae, ad); #c1(PYCR1) c2(NP_722546) c3(pyrroline-5-carboxylate reductase 1, mitochondrial isoform 2) c4(246814) c5(246815, 246816, 246817, 246818, 246819, 246820) c6( ) c7(RR, iT, cxO, Uj, IP, rC, CQ, nA, cxQ, cxP, ae, ad); #c1(PYCR1) c2(XP_011521886) c3(pyrroline-5-carboxylate reductase 1, mitochondrial isoform X1) c4(316492, 316493) c5(316494, 316495, 316496, 316497, 316498) c6( ) c7(RR, iT, cxO, Uj, IP, rC, CQ, nA, cxQ, cxP, ae, ad); #c1(PYCR1) c2(XP_011521887) c3(pyrroline-5-carboxylate reductase 1, mitochondrial isoform X2) c4( ) c5(316499, 316500, 316501, 316502, 316503, 316504) c6( ) c7(RR, iT, cxO, Uj, IP, rC, CQ, nA, cxQ, cxP, ae, ad); #c1(PYDC1) c2(NP_690865) c3(pyrin domain-containing protein 1) c4(245012) c5(245013, 245014, 245015, 245016, 245017, 245018) c6( ) c7(T, aet, awB, ciV, K, Eh, adz); #c1(PYDC2) c2(NP_001076777) c3(pyrin domain-containing protein 2) c4(37534) c5(37535, 37536, 37537, 37538, 37539, 37540) c6( ) c7(ac, FO, fq, FP, aC); #c1(PYGB) c2(NP_002853) c3(glycogen phosphotase, brain form) c4(132793, 132794) c5(132795, 132796, 132797, 132798, 132799, 132800, 132801, 132802, 132803, 132804, 132805, 132806) c6( ) c7(ac, eM, qK, j, g, af); #c1(PYGL) c2(NP_001157412) c3(glycogen phosphorylase, liver form isoform 2) c4(62164) c5(62165, 62166, 62167, 62168, 62169, 62170) c6( ) c7(byp, A, UT, vX, Bw, B); #c1(PYGL) c2(NP_002854) c3(glycogen phosphorylase, liver form isoform 1) c4(132807) c5(132808, 132809, 132810, 132811, 132812, 132813, 132814, 132815, 132816, 132817, 132818, 132819, 132820, 132821, 132822, 132823, 132824, 132825, 132826, 132827, 132828, 132829, 132830, 132831, 132832, 132833, 132834, 132835, 132836, 132837, 132838, 132839, 132840, 132841, 132842, 132843, 132844, 132845, 132846, 132847, 132848, 132849, 132850, 132851, 132852, 132853, 132854, 132855, 132856, 132857, 132858, 132859, 132860, 132861, 132862, 132863, 132864, 132865, 132866, 132867, 132868, 132869, 132870, 132871, 132872, 132873, 132874, 132875, 132876, 132877, 132878, 132879, 132880, 132881, 132882, 132883, 132884, 132885, 132886, 132887, 132888, 132889, 132890, 132891, 132892, 132893, 132894, 132895, 132896, 132897, 132898, 132899, 132900) c6(132901) c7(byp, A, UT, vX, Bw, B); #c1(PYGM) c2(NP_001158188) c3(glycogen phosphorylase, muscle form isoform 2) c4(63301, 63302) c5(63303, 63304, 63305, 63306, 63307, 63308) c6( ) c7(nD, mj, pY, aW, vX, Bw, oj, aT, hj, aHs, dq, hR, j, ci, C, bq, hJ, uC, add); #c1(PYGM) c2(NP_005600) c3(glycogen phosphorylase, muscle form isoform 1) c4(157874, 157875) c5(157876, 157877, 157878, 157879, 157880, 157881, 157882, 157883, 157884, 157885, 157886, 157887, 157888, 157889) c6( ) c7(nD, mj, pY, aW, vX, Bw, oj, aT, hj, aHs, dq, hR, j, ci, C, bq, hJ, uC, add); #c1(PYG01) c2(NP_056432) c3(pygopus homolog 1) c4(187559) c5(187560, 187561, 187562, 187563, 187564, 187565) c6( ) c7(r); #c1(PYG01) c2(XP_011519748) c3(pygopus homolog 1 isoform X1) c4(314436) c5(314437, 314438, 314439, 314440, 314441, 314442) c6( ) c7(r); #c1(PYG02) c2(NP_612157) c3(pygopus homolog 2) c4(236113, 236114) c5(236115, 236116, 236117, 236118, 236119, 236120, 236121, 236122, 236123, 236124, 236125, 236126, 236127) c6( ) c7(T, d, aW, aT, ci, t, eA); #c1(PYHIN1) c2(NP_689714) c3(pyrin and HIN domain-containing protein 1 isoform alpha 1) c4(243660, 243661) c5(243662, 243663, 243664, 243665, 243666, 243667) c6( ) c7(aW, eZ, bM, aT); #c1(PYHIN1) c2(NP_945146) c3(pyrin and HIN domain-containing protein 1 isoform alpha 2) c4(260667) c5(260668, 260669, 260670, 260671, 260672, 260673) c6( ) c7(aW, eZ, bM, aT); #c1(PYHIN1) c2(NP_945147) c3(pyrin and HIN domain-containing protein 1 isoform beta 1) c4(260674) c5(260675, 260676, 260677, 260678, 260679, 260680) c6( ) c7(aW, eZ, bM, aT); #c1(PYHIN1) c2(NP_945148) c3(pyrin and HIN domain-containing protein 1 isoform beta 2) c4(260681) c5(260682, 260683, 260684, 260685, 260686, 260687) c6( ) c7(aW, eZ, bM, aT); #c1(PYHIN1) c2(XP_005244987) c3(pyrin and HIN domain-containing protein 1 isoform X3) c4(266172) c5(266173, 266174, 266175, 266176, 266177, 266178, 266179, 266180, 266181, 266182, 266183, 266184) c6( ) c7(aW, eZ, bM, aT); #c1(PYROXD1) c2(NP_079130) c3(pyridine nucleotide-disulfide oxidoreductase domain-containing protein 1) c4(217185, 217186) c5(217187, 217188, 217189, 217190, 217191, 217192, 217193) c6( ) c7(nJ, vT); #c1(PYROXD1) c2(XP_006719216) c3(pyridine nucleotide-disulfide oxidoreductase domain-containing protein 1 isoform X1) c4( ) c5(292311, 292312, 292313, 292314, 292315) c6( ) c7(nJ, vT); #c1(PYY) c2(NP_004151) c3(peptide YY preproprotein) c4(143910) c5( ) c6( ) c7(bL, bF, T, iX, ev, Ji, qQ, aeS, aT, yc, cz, jy, v, afE, qM, cxR, ei, af); #c1(PYY) c2(XP_011523337) c3(peptide YY isoform X1) c4(317877) c5(317878, 317879, 317880, 317881, 317882, 317883) c6( ) c7(bL, bF, T, iX, ev, Ji, qQ, aeS, aT, yc, cz, jy, v, afE, qM, cxR, ei, af); #c1(PZP) c2(NP_002855) c3(pregnancy zone protein precursor) c4(132902, 132903) c5(132904, 132905, 132906, 132907, 132908, 132909) c6( ) c7(af, fc); #c1(PZP) c2(XP_011519109) c3(pregnancy zone protein isoform X4) c4( ) c5(313711, 313712, 313713, 313714, 313715, 313716) c6( ) c7(af, fc); #c1(QARS) c2(NP_001259002) c3(glutamine-tRNA ligase isoform b) c4(96925) c5(96926, 96927, 96928, 96929, 96930, 96931) c6( ) c7(QK, ha, ad); #c1(QARS) c2(NP_005042) c3(glutamine-tRNA ligase isoform a) c4(152401) c5(152402, 152403, 152404, 152405, 152406, 152407) c6( ) c7(QK, ha, ad); #c1(QARS) c2(XP_011532275) c3(glutamine-tRNA ligase isoform X1) c4(328336) c5(328337, 328338, 328339, 328340, 328341, 328342) c6( ) c7(QK, ha, ad); #c1(QDPR) c2(NP_000311) c3(dihydropteridine reductase) c4(6935) c5(6936, 6937, 6938, 6939, 6940, 6941) c6( ) c7(bfb, b, i, IW, Ad, bcD, aU, cz, Xg, acU, bK, K, nA, bq, qj, bAk, cB, aR, bN, pC); #c1(QKI) c2(NP_001288014) c3(protein guaking isoform 5) c4(113418) c5(113419, 113420, 113421, 113422, 113423, 113424) c6( ) c7(T, y, dY, pN, aw, EQ, bO, bS, he, Ea, mF, t, ae, eA, ad, hq); #c1(QKI) c2(NP_006766) c3(protein guaking isoform 1) c4(167882) c5(167883, 167884, 167885, 167886, 167887, 167888) c6( ) c7(T, y, dY, pN, aw, EQ, bO, bS, he, Ea, mF, t, ae, eA, ad, hq); #c1(QKI) c2(NP_996735) c3(protein guaking isoform 2) c4(264374) c5(264375, 264376, 264377, 264378, 264379, 264380) c6( ) c7(T, y, dY, pN, aw, EQ, bO, bS, he, Ea, mF, t, ae, eA, ad, hq); #c1(QKI) c2(NP_996736) c3(protein guaking isoform 3) c4(264381) c5(264382, 264383, 264384, 264385, 264386, 264387) c6( ) c7(T, y, dY, pN, aw, EQ, bO, bS, he, Ea, mF, t, ae, eA, ad, hq); #c1(QKI) c2(NP_996737) c3(protein guaking isoform 4) c4(264388) c5(264389, 264390, 264391, 264392, 264393, 264394) c6( ) c7(T, y, dY, pN, aw, EQ, bO, bS, he, Ea, mF, t, ae, eA, ad, hq); #c1(QKI) c2(XP_011534563) c3(protein guaking isoform X4) c4(331105) c5( ) c6( ) c7(T, y, dY, pN, aw, EQ, bO, bS, he, Ea, mF, t, ae, eA, ad, hq); #c1(QPCT) c2(NP_036545) c3(glutaminyl-peptide cyclotransferase precursor) c4(174314, 174315) c5(174316, 174317, 174318, 174319, 174320, 174321, 174322, 174323, 174324, 174325, 174326, 174327) c6( ) c7(T, wu, EQ, aA, n, j, ci, C, qj, fr, ber, q, BJ, hD, rO, bK, wm, hH, af, bA, A, UL, vT, NE, Y, f J, ff, cr, r, eZ, aF, en, Pd, cl, t, g, eE, cm, dR, ck, yl, eM, eD, QT, cj, iS, zu, KY, y, pC); #c1(QPCTL) c2(NP_001156849) c3(glutaminyl-peptide cyclotransferase-like protein isoform 2) c4(62001) c5(62002, 62003, 62004, 62005, 62006, 62007) c6( ) c7(fq); #c1(QPCTL) c2(NP_060129) c3(glutaminyl-peptide cyclotransferase-like protein isoform 1) c4(194304) c5(194305, 194306, 194307, 194308, 194309, 194310, 194311, 194312) c6(194313, 194314) c7(fq); #c1(QPRT) c2(NP_055113) c3(nicotinate-nucleotide pyrophosphorylase [carboxylating] precursor) c4( ) c5(179019, 179020, 179021, 179022, 179023, 179024, 179025, 179026, 179027, 179028) c6( ) c7(qJ, AN, AS); #c1(QPRT) c2(XP_005255280) c3(nicotinate-nucleotide pyrophosphorylase [carboxylating] isoform X1) c4(273580) c5(273581) c6( ) c7(qJ, AN, AS); #c1(QPRT) c2(XP_011544080) c3(nicotinate-nucleotide pyrophosphorylase [carboxylating] isoform X2) c4(343251) c5(343252, 343253, 343254, 343255, 343256, 343257) c6( ) c7(qJ, AN, AS); #c1(QRFP) c2(NP_937823) c3(orexigenic neuropeptide QRFP preproprotein) c4(259199) c5(259200, 259201, 259202, 259203, 259204, 259205, 259206, 259207) c6(259208, 259209) c7(v); #c1(QRFPR) c2(NP_937822) c3(pyroglutamylated RFamide peptide receptor) c4(259192) c5(259193, 259194, 259195, 259196, 259197, 259198) c6( ) c7(j); #c1(QRSL1) c2(NP_060762) c3(glutamyl-tRNA(Gln) amidotransferase subunit A, mitochondrial) c4(197657, 197658) c5(197659, 197660, 197661, 197662, 197663, 197664, 197665, 197666, 197667, 197668, 197669, 197670) c6( ) c7(T, ht, aA, bB, n, oY, v, j, cd, q, ad, er, dP, MS, bpp, aT, iY, K, jj, hu, ae, A, iU, aW, OX, aSt, aF, BG, PU, t, f, bz, cm, bw, ck, gY, xO, bE, wR, m, Mn, bD, bt, B); #c1(QSOX1) c2(NP_001004128) c3(sulfhydryl oxidase 1 isoform b precursor) c4(20461) c5(20462, 20463, 20464, 20465, 20466, 20467, 20468, 20469) c6(20470, 20471) c7(G, aC, aE, aW, aT, kp, K, IB); #c1(QSOX1) c2(NP_002817) c3(sulfhydryl oxidase 1 isoform a precursor) c4(132445) c5(132446, 132447, 132448, 132449, 132450, 132451, 132452, 132453) c6(132454, 132455) c7(G, aC, aE, aW, aT, kp, K, IB); #c1(QSOX2) c2(NP_859052) c3(sulfhydryl oxidase 2 precursor) c4(255395, 255396) c5(255397, 255398, 255399, 255400, 255401, 255402, 255403, 255404, 255405, 255406, 255407, 255408) c6( ) c7(cm); #c1(QTRT1) c2(NP_112486) c3(queuine tRNA-ribosyltransferase) c4(221144, 221145) c5(221146, 221147, 221148, 221149, 221150, 221151, 221152, 221153, 221154, 221155, 221156, 221157) c6( ) c7(bF, gV, ar, av, iV, arA, hG, iS, fd, Kf, ey, ci, R, azr, g, as, qs, bz, y, aJM); #c1(R3HCC1) c2(NP_001129580) c3(R3H and coiled-coil domain-containing protein 1 isoform a) c4(51860, 51861) c5(51862, 51863, 51864, 51865, 51866, 51867, 51868, 51869, 51870, 51871) c6( ) c7(cxS, kl); #c1(R3HCC1) c2(NP_001288579) c3(R3H and coiled-coil domain-containing protein 1 isoform b) c4(113774, 113775, 113776) c5(113777, 113778, 113779, 113780, 113781, 113782, 113783, 113784, 113785, 113786, 113787, 113788, 113789, 113790, 113791, 113792, 113793, 113794, 113795, 113796, 113797, 113798, 113799, 113800) c6( ) c7(cxS, kl); #c1(R3HCC1L) c2(NP_001243548) c3(coiled-coil domain-containing protein R3HCC1L isoform 1) c4(91021) c5( ) c6( ) c7(Pg); #c1(R3HCC1L) c2(NP_001243549) c3(coiled-coil domain-containing protein R3HCC1L isoform 2) c4( ) c5(91022, 91023, 91024, 91025, 91026) c6( ) c7(Pg); #c1(R3HCC1L) c2(NP_001243550) c3(coiled-coil domain-containing protein R3HCC1L isoform 3) c4( ) c5(91027, 91028, 91029, 91030, 91031, 91032, 91033, 91034, 91035, 91036, 91037, 91038) c6( ) c7(Pg); #c1(R3HCC1L) c2(XP_011537941) c3(coiled-coil domain-containing protein R3HCC1L isoform X2) c4(335451) c5(335452) c6( ) c7(Pg); #c1(R3HCC1L) c2(XP_011537950) c3(coiled-coil domain-containing protein R3HCC1L isoform X1) c4(335453) c5(335454, 335455, 335456, 335457, 335458) c6( ) c7(Pg); #c1(R3HCC1L) c2(XP_011537951) c3(coiled-coil domain-containing protein R3HCC1L isoform X3) c4(335459, 335460) c5(335461, 335462, 335463, 335464, 335465, 335466, 335467, 335468, 335469, 335470, 335471) c6( ) c7(Pg); #c1(R3HDM1) c2(NP_001269728) c3(R3H domain-containing protein 1 isoform c) c4(102727) c5(102728, 102729, 102730, 102731, 102732, 102733) c6( ) c7(cm); #c1(R3HDM1) c2(NP_056176) c3(R3H domain-containing protein 1 isoform b) c4(186151) c5(186152, 186153, 186154, 186155, 186156, 186157) c6( ) c7(cm); #c1(R3HDM1) c2(XP_011509184) c3(R3H domain-containing protein 1 isoform X16) c4( ) c5(299800) c6( ) c7(cm); #c1(R3HDML) c2(NP_848586) c3(peptidase inhibitor R3HDML precursor) c4(253885) c5(253886, 253887, 253888, 253889, 253890, 253891, 253892, 253893, 253894) c6( ) c7(gf); #c1(RAB11A) c2(NP_001193765) c3(ras-related protein Rab-11A isoform 2) c4(82551) c5(82552, 82553, 82554, 82555, 82556, 82557) c6( ) c7(bpj, aW, ds, yk, ff, aT, Nl, h, ci, K, en, hJ); #c1(RAB11A) c2(NP_004654) c3(ras-related protein Rab-11A isoform 1) c4(148541) c5(148542, 148543, 148544, 148545, 148546, 148547) c6( ) c7(bpj, aW, ds, yk, ff, aT, NL h, ci, K, en, hJ); #c1(RAB11B) c2(NP_004209) c3(ras-related protein Rab-11B) c4(144328) c5(144329, 144330, 144331, 144332, 144333, 144334) c6( ) c7(h); #c1(RAB11FIP1) c2(NP_001002814) c3(rab11 family-interacting protein 1 isoform 3) c4(19615, 19616) c5(19617, 19618, 19619, 19620, 19621, 19622, 19623) c6( ) c7(h, aW, aT); #c1(RAB11FIP1) c2(NP_079427) c3(rab11 family-interacting protein 1 isoform 1) c4(218058, 218059) c5(218060, 218061, 218062, 218063, 218064, 218065, 218066, 218067, 218068, 218069, 218070, 218071, 218072, 218073, 218074, 218075, 218076, 218077) c6( ) c7(h, aW, aT); #c1(RAB11FIP2) c2(NP_055719) c3(rab11 family-interacting protein 2) c4(183037) c5(183038, 183039, 183040, 183041, 183042, 183043) c6( ) c7(ey); #c1(RAB11FIP2) c2(XP_005269686) c3(rab11 family-interacting protein 2 isoform X1) c4(282713) c5(282714, 282715, 282716, 282717, 282718, 282719) c6( ) c7(ey); #c1(RAB11FIP3) c2(NP_001135744) c3(rab11 family-interacting protein 3 isoform 2) c4(52970, 52971, 52972) c5(52973, 52974, 52975, 52976, 52977, 52978, 52979, 52980, 52981, 52982, 52983, 52984, 52985, 52986, 52987, 52988, 52989, 52990) c6( ) c7(aW, TT, aT); #c1(RAB11FIP3) c2(NP_055515) c3(rab11 family-interacting protein 3 isoform 1) c4(181652) c5(181653, 181654, 181655, 181656, 181657, 181658) c6( ) c7(aW, TT, aT); #c1(RAB11FIP3) c2(XP_005255770) c3(rab11 family-interacting protein 3 isoform X1) c4(273865) c5(273866, 273867, 273868, 273869, 273870, 273871) c6( ) c7(aW, TT, aT); #c1(RAB11FIP3) c2(XP_005255775) c3(rab11 family-interacting protein 3 isoform X6) c4( ) c5(273872) c6( ) c7(aW, TT, aT); #c1(RAB11FIP4) c2(NP_116321) c3(rab11 family-interacting protein 4 isoform 1) c4(226134) c5(226135, 226136, 226137, 226138, 226139, 226140, 226141, 226142, 226143, 226144) c6( ) c7(cz); #c1(RAB11FIP5) c2(NP_056285) c3(rab11 family-interacting protein 5) c4(186936) c5(186937, 186938, 186939, 186940, 186941, 186942) c6( ) c7(bN); #c1(RAB12) c2(NP_001020471) c3(ras-related protein Rab-12) c4(28821) c5(28822, 28823, 28824, 28825, 28826, 28827) c6( ) c7(j); #c1(RAB14) c2(NP_057406) c3(ras-related protein Rab-14) c4(190575, 190576) c5(190577, 190578, 190579, 190580, 190581, 190582, 190583, 190584, 190585, 190586, 190587, 190588) c6( ) c7(h, Qi, eM); #c1(RAB15) c2(NP_941959) c3(ras-related protein Rab-15) c4(260335) c5(260336, 260337, 260338, 260339, 260340, 260341) c6( ) c7(at, dL); #c1(RAB18) c2(NP_001243339) c3(ras-related protein Rab-18 isoform 2) c4(90431) c5(90432, 90433, 90434, 90435, 90436, 90437) c6( ) c7(cxV, yo, OF, cxU, s, cxT, jx, hR, aq, v, JW, B, hX); #c1(RAB18) c2(NP_001243341) c3(ras-related protein Rab-18 isoform 5) c4(90438) c5(90439, 90440, 90441, 90442, 90443, 90444) c6( ) c7(cxV, yo, OF, cxU, s, cxT, jx, hR, aq, v, JW, B, hX); #c1(RAB18) c2(NP_001243344) c3(ras-related protein Rab-18 isoform 4) c4(90450, 90451) c5(90452, 90453, 90454, 90455, 90456, 90457, 90458, 90459, 90460, 90461, 90462, 90463) c6( ) c7(cxV, yo, OF, cxU, s, cxT, jx, hR, aq, v, JW, B, hX); #c1(RAB18) c2(NP_067075) c3(ras-related protein Rab-18 isoform 1) c4(208829) c5(208830, 208831, 208832, 208833, 208834, 208835) c6( ) c7(cxV, yo, OF, cxU, s, cxT, jx, hR, aq, v, JW, B, hX); #c1(RAB1A) c2(NP_004152) c3(ras-related protein Rab-1A isoform 1) c4(143911, 143912) c5(143913, 143914, 143915, 143916, 143917, 143918, 143919, 143920, 143921, 143922, 143923, 143924) c6( ) c7(kf, ci, nz, ae, cd, ad); #c1(RAB1A) c2(NP_056358) c3(ras-related protein Rab-1A isoform 2) c4(187261, 187262) c5(187263, 187264, 187265, 187266, 187267, 187268, 187269, 187270, 187271, 187272, 187273, 187274) c6( ) c7(kf, ci, nz, ae, cd, ad); #c1(RAB1A) c2(XP_005264525) c3(ras-related protein Rab-1A isoform X2) c4(278990, 278991) c5(278992, 278993, 278994, 278995, 278996, 278997, 278998, 278999, 279000, 279001, 279002, 279003) c6( ) c7(kf, ci, nz, ae, cd, ad); #c1(RAB1B) c2(NP_112243) c3(ras-related protein Rab-1B) c4(221080, 221081, 221082) c5(221083, 221084, 221085, 221086, 221087, 221088, 221089, 221090, 221091, 221092, 221093, 221094, 221095, 221096, 221097, 221098, 221099, 221100) c6( ) c7(T, vT, aW, aT, j, K, cm, dR); #c1(RAB20) c2(NP_060287) c3(ras-related protein Rab-20) c4(195202) c5(195203, 195204, 195205, 195206, 195207, 195208) c6( ) c7(T, aC, aE, s, n, ci, g); #c1(RAB21) c2(NP_055814) c3(ras-related protein Rab-21) c4(183667) c5(183668, 183669, 183670, 183671, 183672, 183673) c6( ) c7(T); #c1(RAB22A) c2(NP_065724) c3(ras-related protein Rab-22A) c4(205063) c5(205064, 205065, 205066, 205067, 205068, 205069) c6( ) c7(aj); #c1(RAB23) c2(NP_001265595) c3(ras-related protein Rab-23) c4(98919) c5(98920, 98921, 98922, 98923, 98924, 98925, 98926, 98927, 98928, 98929) c6( ) c7(bDi, OS, aA, bDI, j, v, bz, aF, fq, B, zV, uQ); #c1(RAB24) c2(NP_570137) c3(ras-related protein Rab-24) c4(234032, 234033) c5(234034, 234035, 234036, 234037, 234038, 234039, 234040, 234041, 234042, 234043, 234044, 234045, 234046, 234047, 234048, 234049) c6( ) c7(KB); #c1(RAB25) c2(NP_065120) c3(ras-related protein Rab-25) c4(204046) c5(204047, 204048, 204049, 204050, 204051, 204052) c6( ) c7(cxW, T, sw, n, oH, Yc, aT, dL, K, an, eL, qt, aW, g, t, iK, bz, kP, bE, m, it, X); #c1(RAB27A) c2(NP_899059) c3(ras-related protein Rab-27A) c4(257913, 257914) c5(257915, 257916, 257917, 257918, 257919, 257920, 257921, 257922, 257923, 257924, 257925, 257926, 257927, 257928, 257929, 257930) c6( ) c7(cL, ci, pz, eA, aR, o, sO, dE, aT, dL, ey, eL, AT, IE, aW, Y, oV, ck, XF, km, nw, y, zA, aPG); #c1(RAB27B) c2(XP_005266790) c3(ras-related protein Rab-27B isoform X1) c4(280331) c5(280332, 280333, 280334, 280335, 280336, 280337) c6( ) c7(AT, IE, aW, aT, dL, eL); #c1(RAB28) c2(NP_001017979) c3(ras-related protein Rab-28 isoform 1) c4(26717, 26718) c5(26719, 26720, 26721, 26722, 26723, 26724) c6( ) c7(nx, nC, fq, cxX); #c1(RAB28) c2(NP_001153073) c3(ras-related protein Rab-28 isoform 3) c4(60421) c5(60422, 60423, 60424, 60425, 60426, 60427) c6( ) c7(nx, nC, fq, cxX); #c1(RAB28) c2(NP_004240) c3(ras-related protein Rab-28 isoform 2) c4(144553) c5(144554, 144555, 144556, 144557, 144558, 144559) c6( ) c7(nx, nC, fq, cxX); #c1(RAB28) c2(XP_005248275) c3(ras-related protein Rab-28 isoform X4) c4( ) c5(268287, 268288, 268289, 268290, 268291) c6( ) c7(nx, nC, fq, cxX); #c1(RAB28) c2(XP_011512214) c3(ras-related protein Rab-28 isoform X3) c4( ) c5(302785) c6( ) c7(nx, nC, fq, cxX); #c1(RAB29) c2(NP_001129135) c3(ras-related protein Rab-7L1 isoform 2) c4(50880, 50881) c5(50882, 50883, 50884, 50885, 50886, 50887) c6( ) c7(an); #c1(RAB29) c2(XP_005245628) c3(ras-related protein Rab-7L1 isoform X1) c4(266806) c5(266807, 266808, 266809, 266810, 266811, 266812, 266813, 266814, 266815, 266816, 266817, 266818, 266819, 266820, 266821) c6( ) c7(an); #c1(RAB29) c2(XP_011508398) c3(ras-related protein Rab-7L1 isoform X2) c4( ) c5(299105, 299106, 299107, 299108, 299109) c6( ) c7(an); #c1(RAB2A) c2(NP_001229573) c3(ras-related protein Rab-2A isoform b) c4(84663, 84664) c5(84665, 84666, 84667, 84668, 84669, 84670, 84671, 84672, 84673, 84674, 84675) c6( ) c7(T, kl); #c1(RAB2A) c2(NP_002856) c3(ras-related protein Rab-2A isoform a) c4(132910) c5(132911, 132912, 132913, 132914, 132915, 132916, 132917) c6( ) c7(T, kl); #c1(RAB31) c2(NP_006859) c3(ras-related protein Rab-31) c4(168672, 168673) c5(168674, 168675, 168676, 168677, 168678, 168679, 168680, 168681, 168682, 168683, 168684, 168685) c6( ) c7(aW, t, T, m, aT); #c1(RAB32) c2(NP_006825) c3(ras-related protein Rab-32) c4(168453) c5(168454, 168455, 168456, 168457, 168458, 168459) c6( ) c7(AW, fJ, IF, aA, bB, h, aF, ey, g, cl); #c1(RAB33B) c2(NP_112586) c3(ras-related protein Rab-338) c4( ) c5(221478, 221479, 221480, 221481, 221482, 221483) c6( ) c7(cxY, aRD, Qe); #c1(RAB33B) c2(XP_011530601) c3(ras-related protein Rab-33B isoform X1) c4(326502) c5( ) c6( ) c7(cxY, aRD, 0e); #c1(RAB34) c2(NP_001136096) c3(ras-related protein Rab-34 isoform 2) c4(54333) c5(54334, 54335, 54336, 54337, 54338, 54339, 54340) c6( ) c7(aW, aT); #c1(RAB34) c2(NP_001136097) c3(ras-related protein Rab-34 isoform 3) c4(54341, 54342) c5(54343, 54344, 54345, 54346, 54347, 54348, 54349, 54350, 54351, 54352, 54353, 54354) c6( ) c7(aW, aT); #c1(RAB34) c2(NP_001138414) c3(ras-related protein Rab-34 isoform 4) c4(56605) c5(56606, 56607, 56608, 56609, 56610) c6( ) c7(aW, aT); #c1(RAB34) c2(NP_001138415) c3(ras-related protein Rab-34 isoform 5) c4(56611) c5(56612, 56613, 56614, 56615, 56616, 56617, 56618, 56619, 56620, 56621, 56622) c6( ) c7(aW, aT); #c1(RAB34) c2(NP_001243205) c3(ras-related protein Rab-34 isoform 6) c4(90168) c5(90169, 90170, 90171, 90172, 90173) c6( ) c7(aW, aT); #c1(RAB34) c2(NP_114140) c3(ras-related protein Rab-34 isoform 1) c4(222298, 222299) c5(222300, 222301, 222302, 222303, 222304, 222305, 222306, 222307, 222308, 222309, 222310, 222311, 222312, 222313, 222314, 222315) c6( ) c7(aW, aT); #c1(RAB35) c2(NP_001161078) c3(ras-related protein Rab-35 isoform 2) c4(65277) c5(65278, 65279, 65280, 65281, 65282, 65283, 65284, 65285, 65286, 65287, 65288, 65289, 65290, 65291) c6(65292, 65293, 65294) c7(t, T, m); #c1(RAB35) c2(NP_006852) c3(ras-related protein Rab-35 isoform 1) c4(168655, 168656) c5(168657, 168658, 168659, 168660, 168661, 168662, 168663) c6( ) c7(t, T, m); #c1(RAB35) c2(XP_011536081) c3(ras-related protein Rab-35 isoform X1) c4(333405) c5(333406, 333407, 333408, 333409, 333410, 333411, 333412, 333413, 333414, 333415, 333416) c6(333417, 333418) c7(t, T, m); #c1(RAB36) c2(NP_004905) c3(ras-related protein Rab-36) c4(150663, 150664, 150665) c5(150666, 150667, 150668, 150669, 150670, 150671, 150672, 150673, 150674, 150675, 150676, 150677, 150678, 150679, 150680, 150681, 150682, 150683) c6( ) c7(Or); #c1(RAB36) c2(XP_011528854) c3(ras-related protein Rab-36 isoform X12) c4( ) c5(324227) c6( ) c7(Or); #c1(RAB37) c2(NP_001006639) c3(ras-related protein Rab-37 isoform 2) c4(22276, 22277) c5(22278, 22279, 22280, 22281, 22282, 22283, 22284, 22285, 22286, 22287, 22288, 22289, 22290, 22291, 22292, 22293) c6( ) c7(eM, fr, bX); #c1(RAB37) c2(NP_001157461) c3(ras-related protein Rab-37 isoform 4) c4(62189, 62190) c5(62191, 62192, 62193, 62194, 62195, 62196, 62197, 62198, 62199, 62200, 62201, 62202) c6( ) c7(eM, fr, bX); #c1(RAB37) c2(NP_001157462) c3(ras-related protein Rab-37 isoform 5) c4(62203) c5(62204, 62205, 62206, 62207, 62208, 62209) c6( ) c7(eM, fr, bX); #c1(RAB37) c2(NP_783865) c3(ras-related protein Rab-37 isoform 3) c4(251871, 251872, 251873) c5(251874, 251875, 251876, 251877, 251878, 251879, 251880, 251881, 251882, 251883, 251884, 251885, 251886, 251887, 251888, 251889, 251890, 251891, 251892, 251893, 251894, 251895) c6( ) c7(eM, fr, bX); #c1(RAB37) c2(XP_005257345) c3(ras-related protein Rab-37 isoform X1) c4(275061) c5(275062, 275063, 275064, 275065, 275066, 275067) c6( ) c7(eM, fr, bX); #c1(RAB38) c2(NP_071732) c3(ras-related protein Rab-38) c4(211851) c5(211852, 211853, 211854, 211855, 211856, 211857) c6( ) c7(AT, T, Y, IF, wt, sj); #c1(RAB39A) c2(NP_059986) c3(ras-related protein Rab-39A) c4(193503) c5(193504, 193505, 193506, 193507, 193508, 193509) c6( ) c7(bM); #c1(RAB398) c2(NP_741995) c3(ras-related protein Rab-39B) c4(247552) c5(247553, 247554, 247555, 247556, 247557, 247558) c6( ) c7(ha, Az, nf, nA, cxZ, bN); #c1(RAB3A) c2(XP_011526466) c3(ras-related protein Rab-3A isoform X1) c4(320768) c5(320769, 320770, 320771, 320772, 320773, 320774) c6( ) c7(aW, Gx, aT, nC, bN, L); #c1(RAB3D) c2(NP_004274) c3(ras-related protein Rab-3D) c4(144764) c5(144765, 144766, 144767, 144768, 144769, 144770) c6( ) c7(aW, Fc, aT); #c1(RAB3GAP1) c2(NP_001165906) c3(rab3 GTPase-activating protein catalytic subunit isoform 1) c4(67981) c5(67982, 67983, 67984, 67985, 67986, 67987) c6( ) c7(T, if, jh, aA, ci, qN, q, aR, ad, ft, Ig, aT, ab, ae, af, aJE, cxV, d, aW, ff, cxT, r, aF, en, bP, eD, m, B, L); #c1(RAB3GAP1) c2(NP_036365) c3(rab3 GTPase-activating protein catalytic subunit isoform 2) c4(173260) c5(173261, 173262, 173263, 173264, 173265, 173266) c6( ) c7(T, if, jh, aA, ci, qN, q, aR, ad, ft, Ig, aT, ab, ae, af, aJE, cxV, d, aW, ff, cxT, r, aF, en, bP, eD, m, B, L); #c1(RAB3GAP1) c2(XP_011509127) c3(rab3 GTPase-activating protein catalytic subunit isoform X4) c4(299744) c5(299745, 299746, 299747, 299748, 299749, 299750) c6( ) c7(T, if, jh, aA, ci, qN, q, aR, ad, ft, Ig, aT, ab, ae, af, aJE, cxV, d, aW, ff, cxT, r, aF, en, bP, eD, m, B, L); #c1(RAB3GAP2) c2(NP_036546) c3(rab3 GTPase-activating protein non-catalytic subunit) c4(174328) c5(174329, 174330, 174331, 174332, 174333, 174334) c6( ) c7(cxV, cya, cxT, pl, m, fq, ps); #c1(RAB3IL1) c2(NP_001258615) c3(guanine nucleotide exchange factor for Rab-3A isoform 2) c4(96192) c5(96193, 96194, 96195, 96196, 96197, 96198) c6( ) c7(bzm, bH); #c1(RAB3IL1) c2(NP_037533) c3(guanine nucleotide exchange factor for Rab-3A isoform 1) c4(176068) c5(176069, 176070, 176071, 176072, 176073, 176074) c6( ) c7(bzm, bH); #c1(RAB3IP) c2(NP_001019818) c3(rab-3A-interacting protein isoform A) c4( ) c5(27919, 27920, 27921, 27922, 27923, 27924, 27925, 27926, 27927, 27928, 27929) c6( ) c7(g, r); #c1(RAB3IP) c2(NP_783322) c3(rab-3A-interacting protein isoform alpha 2) c4(251630, 251631, 251632, 251633) c5(251634, 251635, 251636, 251637, 251638, 251639, 251640, 251641) c6( ) c7(g, r); #c1(RAB3IP) c2(NP_783324) c3(rab-3A-interacting protein isoform beta 2) c4(251642, 251643) c5(251644, 251645, 251646, 251647, 251648, 251649, 251650, 251651, 251652) c6( ) c7(q, r); #c1(RAB3IP) c2(XP_006719289) c3(rab-3A-interacting protein isoform X1) c4(292388) c5(292389, 292390, 292391, 292392, 292393, 292394, 292395) c6( ) c7(q, r); #c1(RAB3IP) c2(XP_006719290) c3(rab-3A-interacting protein isoform X2) c4( ) c5(292396, 292397, 292398, 292399, 292400, 292401, 292402, 292403, 292404, 292405, 292406, 292407, 292408, 292409, 292410) c6( ) c7(q, r); #c1(RAB40AL) c2(NP_001027004) c3(ras-related protein Rab-40A-like) c4(30055) c5(30056, 30057, 30058, 30059, 30060, 30061) c6( ) c7(aW, Az, aT, nf, uY, fd, cyb, xb); #c1(RAB40B) c2(NP_006813) c3(ras-related protein Rab-40B) c4(168307, 168308) c5(168309, 168310, 168311, 168312, 168313, 168314, 168315, 168316, 168317, 168318, 168319, 168320, 168321, 168322, 168323, 168324) c6( ) c7(T, if, ht, jh, aA, bB, ci, qN, hF, x, av, aT, bK, K, jj, hu, pi, aW, Y, ff, aF, en, g, cm, bz, bN, ck, es, qJ, iA, bE, dc, hk, uJ, np, k, bt, kS, B); #c1(RAB40C) c2(NP_001166136) c3(ras-related protein Rab-40C isoform a) c4(68286) c5(68287, 68288, 68289, 68290, 68291, 68292, 68293, 68294, 68295, 68296, 68297, 68298, 68299, 68300, 68301, 68302, 68303, 68304) c6( ) c7(aW, fd, aA, uY, aT, aF); #c1(RAB4A) c2(NP_004569) c3(ras-related protein Rab-4A isoform 1) c4(147815) c5(147816, 147817, 147818, 147819, 147820, 147821) c6( ) c7(iM, je, Y, fN, ez, h, cy, eZ, dy, fL, eo, pm, f, V, mC); #c1(RAB4B) c2(NP_057238) c3(ras-related protein Rab-4B) c4(189641, 189642) c5(189643, 189644, 189645, 189646, 189647, 189648, 189649, 189650, 189651, 189652, 189653, 189654) c6( ) c7(at, ad); #c1(RAB5A) c2(NP_001278977) c3(ras-related protein Rab-5A isoform 2) c4(111165) c5(111166, 111167, 111168, 111169, 111170, 111171, 111172, 111173, 111174, 111175, 111176) c6( ) c7(bM, T, Ol, if, jx, j, fr, qN, iu, sO, ds, aT, h, SH, By, afu, B, Du, Io, f, t, bz, c, eM, m, AN); #c1(RAB5A) c2(NP_004153) c3(ras-related protein Rab-5A isoform 1) c4(143925, 143926) c5(143927, 143928, 143929, 143930, 143931, 143932) c6( ) c7(bM, T, Ol, if, jx, j, fr, qN, iu, sO, ds, aT, h, SH, By, afu, B, Du, Io, f, t, bz, c, eM, m, AN); #c1(RAB5B) c2(NP_001238966) c3(ras-related protein Rab-5B isoform 2) c4(88079) c5(88080, 88081, 88082, 88083, 88084, 88085, 88086, 88087, 88088, 88089, 88090, 88091) c6( ) c7(Y, A, qj); #c1(RAB5B) c2(XP_005269109) c3(ras-related protein Rab-5B isoform X1) c4(282306, 282307, 282308) c5(282309, 282310, 282311, 282312, 282313, 282314, 282315, 282316, 282317, 282318, 282319, 282320, 282321, 282322, 282323, 282324) c6( ) c7(Y, A, qj); #c1(RAB5C) c2(NP_001238968) c3(ras-related protein Rab-5C isoform b) c4(88092, 88093, 88094, 88095) c5(88096, 88097, 88098, 88099, 88100, 88101, 88102, 88103, 88104, 88105, 88106) c6( ) c7(T); #c1(RAB5C) c2(XP_011523393) c3(ras-related protein Rab-5C isoform X1) c4(317914) c5(317915, 317916, 317917, 317918, 317919, 317920, 317921, 317922, 317923, 317924, 317925, 317926, 317927, 317928, 317929, 317930, 317931, 317932, 317933, 317934, 317935, 317936, 317937, 317938, 317939, 317940) c6( ) c7(T); #c1(RAB6A) c2(NP_001230647) c3(ras-related protein Rab-BA isoform d) c4(86408) c5(86409, 86410, 86411, 86412, 86413, 86414, 86415, 86416, 86417, 86418, 86419, 86420) c6( ) c7(AT, T, cc, oV, ae, aT, ad); #c1(RAB6A) c2(NP_001230648) c3(ras-related protein Rab-BA isoform c) c4( ) c5(86421, 86422, 86423, 86424, 86425) c6( ) c7(AT, T, cc, oV, ae, af, ad); #c1(RAB6A) c2(NP_002860) c3(ras-related protein Rab-6A isoform a) c4(132918, 132919, 132920, 132921, 132922) c5(132923, 132924, 132925, 132926, 132927, 132928, 132929, 132930, 132931, 132932, 132933, 132934, 132935, 132936, 132937, 132938, 132939, 132940, 132941) c6( ) c7(AT, T, cc, oV, ae, aT, ad); #c1(RAB6A) c2(NP_942599) c3(ras-related protein Rab-6A isoform b) c4(260589, 260590, 260591) c5(260592, 260593, 260594, 260595, 260596, 260597, 260598, 260599, 260600, 260601, 260602, 260603, 260604, 260605, 260606, 260607) c6( ) c7(AT, T, cc, oV, ae, aT, ad); #c1(RAB6B) c2(NP_057661) c3(ras-related protein Rab-6B) c4(192166) c5(192167, 192168, 192169, 192170, 192171, 192172, 192173, 192174, 192175, 192176, 192177) c6( ) c7(T, vT, aW, aT, K, cm, dR); #c1(RAB6B) c2(XP_011511195) c3(ras-related protein Rab-6B isoform X1) c4(301659) c5(301660, 301661, 301662, 301663, 301664, 301665) c6( ) c7(T, vT, aW, aT, K, cm, dR); #c1(RAB6C) c2(NP_115520) c3(ras-related protein Rab-6C) c4(223064) c5(223065, 223066, 223067, 223068, 223069, 223070, 223071, 223072, 223073, 223074, 223075) c6( ) c7(aW, ac, aT); #c1(RAB7A) c2(NP_004628) c3(ras-related protein Rab-7a) c4(148282, 148283) c5(148284, 148285, 148286, 148287, 148288, 148289, 148290, 148291, 148292, 148293, 148294, 148295) c6( ) c7(aJO, AT, T, arY, xU, Pt, aFa, ds, sO, Y, XC, bhc, h, j, fu, bX, bU, bV, cm, AN, afu); #c1(RAB8A) c2(NP_005361) c3(ras-related protein Rab-8A) c4(155433) c5(155434, 155435, 155436, 155437, 155438, 155439) c6( ) c7(ck, aJO, T, fR, bpj, s, aW, Y, aT, aDO, eA, jj, y, nC, kS, B, iP, de); #c1(RAB8B) c2(NP_057614) c3(ras-related protein Rab-8B) c4(191768, 191769) c5(191770, 191771, 191772, 191773, 191774, 191775, 191776, 191777, 191778, 191779, 191780, 191781) c6( ) c7(ey, aIA); #c1(RAB9A) c2(NP_001182257) c3(ras-related protein Rab-9A) c4(74756) c5(74757, 74758, 74759, 74760, 74761, 74762) c6( ) c7(cH, XC); #c1(RABAC1) c2(NP_006414) c3(prenylated Rab acceptor protein 1) c4(164816) c5(164817, 164818, 164819, 164820, 164821, 164822) c6( ) c7(h, wR, T, eA); #c1(RABEP1) c2(NP_001077054) c3(rab GTPase-binding effector protein 1 isoform 2) c4(37605) c5(37606, 37607, 37608, 37609, 37610, 37611, 37612, 37613, 37614, 37615, 37616, 37617, 37618, 37619, 37620, 37621) c6( ) c7(dz, aF, aA, aT); #c1(RABEP1) c2(NP_001278510) c3(rab GTPase-binding effector protein 1 isoform 3) c4(109781) c5(109782, 109783, 109784, 109785, 109786, 109787) c6( ) c7(dz, aF, aA, aT); #c1(RABEP1) c2(NP_004694) c3(rab GTPase-binding effector protein 1 isoform 1) c4(148858, 148859) c5(148860, 148861, 148862, 148863, 148864, 148865, 148866, 148867, 148868, 148869) c6( ) c7(dz, aF, aA, aT); #c1(RABEP2) c2(NP_079092) c3(rab GTPase-binding effector protein 2) c4(216969, 216970, 216971) c5(216972, 216973, 216974, 216975, 216976, 216977, 216978, 216979, 216980, 216981, 216982, 216983, 216984, 216985, 216986, 216987, 216988, 216989) c6( ) c7(qo, ff, aT, Ku, en, nA); #c1(RABEPK) c2(NP_001167623) c3(rab9 effector protein with kelch motifs isoform a) c4( ) c5(69444, 69445, 69446, 69447, 69448, 69449, 69450, 69451) c6( ) c7(bM, dt, A, Jr, z, Y, eE, afS, dV, r, cU, Hn, h, cr, en, eZ, fe, afT, y, V, q); #c1(RABEPK) c2(NP_001167624) c3(rab9 effector protein with kelch motifs isoform b) c4( ) c5(69452, 69453, 69454, 69455, 69456) c6( ) c7(bM, dt, A, Jr, z, Y, eE, afS, dV, r, cU, Hn, h, cr, eo, eZ, fe, afT, y, V, q); #c1(RABEPK) c2(XP_005251697) c3(rab9 effector protein with kelch motifs isoform X1) c4(271049, 271050) c5(271051, 271052, 271053, 271054) c6( ) c7(bM, dt, A, Jr, z, Y, eE, afS, dV, r, cU, Hn, h, cr, eo, eZ, fe, afT, y, V, q); #c1(RABEPK) c2(XP_005251698) c3(rab9 effector protein with kelch motifs isoform X2) c4(271055) c5(271056) c6( ) c7(bM, dt, A, Jr, z, Y, eE, afS, dV, r, cU, Hn, h, cr, eo, eZ, fe, afT, y, V, q); #c1(RABEPK) c2(XP_005251699) c3(rab9 effector protein with kelch motifs isoform X3) c4(271057) c5( ) c6( ) c7(bM, dt, A, Jr, z, Y, eE, afS, dV, r, cU, Hn, h, cr, eo, eZ, fe, afT, y, V, q); #c1(RABEPK) c2(XP_005251700) c3(rab9 effector protein with kelch motifs isoform X4) c4( ) c5(271058, 271059, 271060, 271061, 271062, 271063, 271064, 271065) c6( ) c7(bM, dt, A, Jr, z, Y, eE, afS, dV, r, cU, Hn, h, cr, eo, eZ, fe, afT, y, V, q); #c1(RABEPK) c2(XP_011516422) c3(rab9 effector protein with kelch motifs isoform X5) c4( ) c5(309619, 309620, 309621, 309622, 309623, 309624, 309625, 309626, 309627, 309628, 309629, 309630, 309631, 309632, 309633, 309634, 309635, 309636, 309637, 309638, 309639, 309640, 309641, 309642, 309643, 309644, 309645, 309646, 309647, 309648) c6( ) c7(bM, dt, A, Jr, z, Y, eE, afS, dV, r, cU, Hn, h, cr, eo, eZ, fe, afT, y, V, q); #c1(RABGAP1L) c2(NP_001230692) c3(rab GTPase-activating protein 1-like isoform 8) c4(86576) c5(86577, 86578, 86579, 86580, 86581, 86582, 86583, 86584, 86585, 86586) c6( ) c7(ac, Uw, eZ, cz, aT, UF, bt); #c1(RABGAP1L) c2(NP_001230693) c3(rab GTPase-activating protein 1-like isoform D) c4(86587) c5(86588, 86589, 86590, 86591, 86592, 86593) c6( ) c7(ac, Uw, eZ, cz, aT, UF, bt); #c1(RABGAP1L) c2(NP_001230694) c3(rab GTPase-activating protein 1-like isoform C) c4(86594) c5(86595, 86596, 86597, 86598, 86599, 86600, 86601, 86602, 86603, 86604, 86605, 86606) c6( ) c7(ac, Uw, eZ, cz, aT, UF, bt); #c1(RABGAP1L) c2(NP_055672) c3(rab GTPase-activating protein 1-like isoform A) c4( ) c5(182648, 182649, 182650, 182651, 182652, 182653, 182654, 182655, 182656, 182657, 182658, 182659, 182660, 182661, 182662, 182663, 182664, 182665, 182666, 182667, 182668, 182669, 182670) c6( ) c7(ac, Uw, eZ, cz, aT, UF, bt); #c1(RABGAP1L) c2(XP_005245738) c3(rab GTPase-activating protein 1-like isoform X2) c4(266908) c5(266909, 266910, 266911, 266912, 266913, 266914, 266915, 266916, 266917, 266918, 266919, 266920, 266921, 266922, 266923, 266924, 266925, 266926, 266927, 266928, 266929, 266930, 266931, 266932, 266933) c6( ) c7(ac, Uw, eZ, cz, aT, UF, bt); #c1(RABGAP1L) c2(XP_011508525) c3(rab GTPase-activating protein 1-like isoform X1) c4(299226, 299227, 299228, 299229, 299230, 299231, 299232, 299233) c5(299234) c6( ) c7(ac, Uw, eZ, cz, aT, UF, bt); #c1(RABGEF1) c2(NP_001273989) c3(rab5 GDP/GTP exchange factor isoform a) c4( ) c5(105971, 105972, 105973, 105974, 105975, 105976) c6( ) c7(T, byb, aA, n, wV, bS, v, ct, q, ad, aE, dV, aT, bK, K, ae, d, aW, Y, ff, r, dN, fe, aF, en, pm, Z, t, cm, bz, iK, arJ, nM, W, nb, nB, pc, eM, cj, mf, m, y, bt, B); #c1(RABGEF1) c2(NP_001273990) c3(rab5 GDP/GTP exchange factor isoform b) c4(105977, 105978, 105979, 105980, 105981) c5(105982, 105983, 105984, 105985, 105986, 105987, 105988, 105989, 105990, 105991) c6( ) c7(T, byb, aA, n, wV, bS, v, ct, q, ad, aE, dV, aT, bK, K, ae, d, aW, Y, ff, r, dN, fe, aF, en, pm, Z, t, cm, bz, iK, arJ, nM, W, nb, nB, pc, eM, cj, mf, m, y, bt, B); #c1(RABGEF1) c2(NP_055319) c3(rab5 GDP/GTP exchange factor isoform c) c4(180423) c5(180424, 180425, 180426, 180427, 180428, 180429, 180430, 180431, 180432, 180433, 180434, 180435, 180436, 180437, 180438, 180439, 180440, 180441, 180442, 180443, 180444, 180445, 180446, 180447, 180448, 180449, 180450, 180451, 180452, 180453, 180454) c6( ) c7(T, byb, aA, n, wV, bS, v, ct, q, ad, aE, dV, aT, bK, K, ae, d, aW, Y, ff, r, dN, fe, aF, en, pm, Z, t, cm, bz, iK, arJ, nM, W, nb, nB, pc, eM, cj, mf, m, y, bt, B); #c1(RABIF) c2(NP_002862) c3(guanine nucleotide exchange factor MSS4) c4(132942) c5(132943, 132944, 132945, 132946, 132947, 132948) c6( ) c7(aE, cz); #c1(RABL6) c2(NP_001167459) c3(rab-like protein 6 isoform 3) c4(68944, 68945, 68946, 68947) c5(68948, 68949, 68950, 68951, 68952, 68953, 68954, 68955, 68956, 68957, 68958, 68959) c6( ) c7(aW, nA, aT); #c1(RABL6) c2(NP_001167460) c3(rab-like protein 6 isoform 4) c4(68960, 68961) c5(68962, 68963, 68964, 68965, 68966, 68967, 68968, 68969, 68970, 68971, 68972, 68973, 68974, 68975, 68976, 68977, 68978, 68979) c6( ) c7(aW, nA, aT); #c1(RABL6) c2(NP_078994) c3(rab-like protein 6 isoform 1) c4(216473, 216474, 216475, 216476, 216477, 216478) c5(216479, 216480, 216481, 216482, 216483, 216484, 216485, 216486, 216487, 216488, 216489, 216490, 216491, 216492, 216493, 216494, 216495, 216496, 216497, 216498, 216499, 216500, 216501, 216502, 216503, 216504, 216505, 216506, 216507, 216508, 216509, 216510, 216511, 216512, 216513, 216514, 216515, 216516, 216517, 216518, 216519, 216520) c6(216521, 216522) c7(aW, nA, aT); #c1(RAC1) c2(NP_008839) c3(ras-related C3 botulinum toxin substrate 1 isoform Rac1) c4(168963) c5(168964, 168965, 168966, 168967, 168968, 168969) c6( ) c7(T, aC, pf, azi, if, aI, bB, ci, bv, aE, K, aCU, LC, aW, Ls, hI, as, cm, Qt, eM, iT, mx, U, cj, n, BF, ct, nA, qN, fr, cd, ep, kH, h, By, dL, wb, Um, dx, xf, fe, kp, yq, bQL, dB, PL at, ajW, B, wL, fG, aA, cz, q, eA, lg, aT, cy, dz, ae, jf, afG, iU, Y, r, en, t, bN, ck, ac, mf, dy, aps, zu, bt, iW, jh, bS, zU, iJ, ad, fU, av, cyc, vw, hP, ji, NP, d, lR, ff, aF, iV, Z, bz, eK, gk, Ew, yE, bE, X, aS, iu, rk); #c1(RAC1) c2(NP_061485) c3(ras-related C3 botulinum toxin substrate 1 isoform Rac1b) c4(200343) c5(200344, 200345, 200346, 200347, 200348, 200349) c6( ) c7(T, aC, pf, azi, if, aI, bB, ci, bv, aE, K, aCU, LC, aW, Ls, hI, as, cm, Qt, eM, iT, mx, U, cj, n, BF, ct, nA, qN, fr, cd, ep, kH, h, By, dL, wb, Um, dx, xf, fe, kp, yq, bQL, dB, PL at, ajW, B, wL, fG, aA, cz, q, eA, lg, aT, cy, dz, ae, jf, afG, iU, Y, r, en, t, bN, ck, ac, mf, dy, aps, zu, bt, iW, jh, bS, zU, iJ, ad, fU, av, cyc, vw, hP, ji, NP, d, lR, ff, aF, iV, Z, bz, eK, gk, Ew, yE, bE, X, aS, iu, rk); #c1(RAC2) c2(NP_002863) c3(ras-related C3 botulinum toxin substrate 2) c4(132949, 132950, 132951, 132952) c5(132953, 132954, 132955, 132956, 132957, 132958, 132959, 132960, 132961, 132962, 132963, 132964, 132965, 132966, 132967, 132968, 132969, 132970, 132971, 132972, 132973, 132974, 132975, 132976) c6( ) c7(T, aC, iW, RX, jh, oY, afK, AE, ee, eA, ad, ip, cyd, ke, JX, aT, hD, h, By, K, an, ae, iU, Cw, oV, Y, CM, fe, t, ck, yE, dB, gZ, m, ajW, ajJ, bt, ra, B, rk); #c1(RAC2) c2(XP_006724349) c3(ras-related C3 botulinum toxin substrate 2 isoform X1) c4(295947) c5(295948, 295949, 295950, 295951, 295952, 295953) c6( ) c7(T, aC, iW, RX, jh, oY, afK, AE, ee, eA, ad, ip, cyd, ke, JX, aT, hD, h, By, K, an, ae, iU, Cw, oV, Y, CM, fe, t, ck, yE, dB, gZ, m, ajW, ajJ, bt, ra, B, rk); #c1(RAC3) c2(NP_005043) c3(ras-related C3 botulinum toxin substrate 3) c4(152408) c5(152409, 152410, 152411, 152412, 152413, 152414) c6( ) c7(T, iU, dB, aW, aT, n, ci, ae, eA, ad); #c1(RACGAP1) c2(XP_011536537) c3(rac GTPase-activating protein 1 isoform X2) c4(333914, 333915, 333916, 333917, 333918) c5(333919, 333920, 333921, 333922, 333923, 333924, 333925, 333926, 333927, 333928, 333929, 333930, 333931) c6( ) c7(T, hI, cz, n, nA, ad, ip, hX, iu, aE, aT, cye, dL, hP, K, ey, ae, eL, cxV, kl, iU, aW, r, eE, bz, Ew, eM, B, afH); #c1(RACGAP1) c2(XP_011536542) c3(rac GTPase-activating protein 1 isoform X1) c4(333932, 333933, 333934, 333935, 333936) c5(333937, 333938, 333939, 333940, 333941, 333942, 333943, 333944, 333945, 333946, 333947, 333948, 333949, 333950, 333951, 333952, 333953, 333954, 333955, 333956, 333957, 333958, 333959, 333960, 333961, 333962, 333963, 333964, 333965, 333966, 333967, 333968, 333969, 333970, 333971, 333972, 333973, 333974, 333975, 333976, 333977, 333978, 333979, 333980, 333981, 333982, 333983, 333984, 333985, 333986, 333987, 333988, 333989, 333990, 333991, 333992, 333993, 333994, 333995, 333996, 333997, 333998, 333999, 334000, 334001, 334002, 334003) c6( ) c7(T, hI, cz, n, nA, ad, ip, hX, iu, aE, aT, cye, dL, hP, K, ey, ae, eL, cxV, kl, iU, aW, r, eE, bz, Ew, eM, B, afH); #c1(RAD1) c2(NP_002844) c3(cell cycle checkpoint protein RAD1) c4(132729, 132730) c5(132731, 132732, 132733, 132734, 132735, 132736, 132737, 132738, 132739, 132740, 132741, 132742, 132743, 132744, 132745, 132746) c6( ) c7(bL, cF, ds, jh, cj, aT, aj, J); #c1(RAD17) c2(NP_579917) c3(cell cycle checkpoint protein RAD17 isoform 2) c4(234720) c5(234721, 234722, 234723, 234724, 234725, 234726, 234727, 234728, 234729, 234730, 234731, 234732) c6( ) c7(av, T, eG, aE, eM, bE, aW, wu, aT, hy, ci, K, wm, iK, bz); #c1(RAD17) c2(NP_579919) c3(cell cycle checkpoint protein RAD17 isoform 4) c4(234733) c5(234734, 234735, 234736, 234737, 234738, 234739) c6( ) c7(av, T, eG, aE, eM, bE, aW, wu, aT, hy, ci, K, wm, iK, bz); #c1(RAD17) c2(NP_579922) c3(cell cycle checkpoint protein RAD17 isoform 1) c4(234740, 234741, 234742) c5(234743, 234744, 234745, 234746, 234747, 234748, 234749, 234750, 234751, 234752, 234753, 234754, 234755, 234756, 234757, 234758, 234759, 234760, 234761, 234762, 234763, 234764, 234765, 234766, 234767, 234768, 234769, 234770, 234771, 234772, 234773, 234774, 234775, 234776, 234777, 234778, 234779, 234780, 234781, 234782, 234783, 234784) c6( ) c7(av, T, eG, aE, eM, bE, aW, wu, aT, hy, ci, K, wm, iK, bz); #c1(RAD17) c2(XP_011545257) c3(cell cycle checkpoint protein RAD17 isoform X1) c4(344059, 344060) c5(344061, 344062, 344063, 344064, 344065, 344066, 344067, 344068, 344069, 344070, 344071, 344072, 344073, 344074) c6( ) c7(av, T, eG, aE, eM, bE, aW, wu, aT, hy, ci, K, wm, iK, bz); #c1(RAD18) c2(NP_064550) c3(E3 ubiquitin-protein ligase RAD18) c4(202944, 202945) c5(202946, 202947, 202948, 202949, 202950, 202951, 202952, 202953, 202954, 202955, 202956, 202957) c6( ) c7(av, T, os, eM, r, aT, Io, oZ, ci, g, bz); #c1(RAD21) c2(NP_006256) c3(double-strand-break repair protein rad21 homolog) c4(163323) c5(163324, 163325, 163326, 163327, 163328, 163329) c6( ) c7(T, auW, bB, ci, Qo, aYh, q, ad, vJ, aT, ae, aW, ff, r, en, iK, BU, iT, cyf, bE, cj, aNL); #c1(RAD21L1) c2(NP_001130038) c3(double-strand-break repair protein rad21-like protein 1) c4(52459, 52460, 52461) c5(52462, 52463, 52464, 52465, 52466, 52467, 52468, 52469, 52470, 52471, 52472, 52473, 52474, 52475, 52476, 52477) c6( ) c7(V); #c1(RAD21L1) c2(XP_011527620) c3(double-strand-break repair protein rad21-like protein 1 isoform X4) c4( ) c5(322509, 322510, 322511, 322512, 322513, 322514) c6( ) c7(V); #c1(RAD23A) c2(NP_001257292) c3(UV excision repair protein RAD23 homolog A isoform 3) c4(95074) c5(95075, 95076, 95077, 95078, 95079, 95080) c6( ) c7(Y, CT, aA, aT, h, K, aan, V); #c1(RAD23A) c2(NP_005044) c3(UV excision repair protein RAD23 homolog A isoform 1) c4(152415, 152416) c5(152417, 152418, 152419, 152420, 152421, 152422, 152423, 152424, 152425, 152426, 152427, 152428, 152429, 152430, 152431, 152432) c6( ) c7(Y, CT, aA, aT, h, K, aan, V); #c1(RAD23B) c2(NP_001231642) c3(UV excision repair protein RAD23 homolog B isoform 2) c4(87383, 87384) c5(87385, 87386, 87387, 87388, 87389, 87390) c6( ) c7(Gl, T, gU, ht, fd, Gn, V, eA, ad, ip, Qk, aT, dL, K, hu, eL, aW, Az, nY, zE, bz, fq, eM, dB, cj, at, aan, rA, B); #c1(RAD23B) c2(NP_001231653) c3(UV excision repair protein RAD23 homolog B isoform 3) c4(87391) c5(87392, 87393, 87394, 87395, 87396, 87397, 87398, 87399, 87400, 87401, 87402, 87403, 87404, 87405, 87406, 87407, 87408, 87409, 87410, 87411, 87412, 87413, 87414) c6( ) c7(Gl, T, gU, ht, fd, Gn, V, eA, ad, ip, Qk, aT, dL, K, hu, eL, aW, Az, nY, zE, bz, fq, eM, dB, cj, at, aan, rA, B); #c1(RAD23B) c2(NP_002865) c3(UV excision repair protein RAD23 homolog B isoform 1) c4(132977, 132978, 132979) c5(132980, 132981, 132982, 132983, 132984, 132985, 132986) c6( ) c7(Gl, T, gU, ht, fd, Gn, V, eA, ad, ip, Qk, aT, dL, K, hu, eL, aW, Az, nY, zE, bz, fq, eM, dB, cj, at, aan, rA, B); #c1(RAD50) c2(NP_005723) c3(DNA repair protein RAD50) c4(158847, 158848) c5(158849, 158850, 158851, 158852, 158853, 158854, 158855, 158856, 158857, 158858, 158859, 158860) c6( ) c7(bM, T, os, Dw, aC, WL, cyg, iW, jh, fd, oZ, Gn, bRy, ci, q, ad, eA, Bj, rA, aT, Ds, dL, ae, BO, aW, ff, r, Xk, en, g, t, eE, dr, ajj, ck, iT, dB, m, bC, eg, ht); #c1(RAD51) c2(NP_001157742) c3(DNA repair protein RAD51 homolog 1 isoform 3) c4(62478, 62479, 62480, 62481) c5(62482, 62483, 62484, 62485, 62486, 62487, 62488, 62489, 62490, 62491, 62492, 62493, 62494, 62495, 62496, 62497, 62498, 62499, 62500, 62501, 62502, 62503, 62504, 62505, 62506, 62507, 62508, 62509) c6( ) c7(T, os, aC, if, fd, bB, ci, ip, aE, Qk, K, hu, eG, aW, g, eF, bw, iP, eM, nB, iT, vA, cj, iS, m, ht, qN, eW, hr, cc, h, dL, ey, cM, op, YE, dB, hL, at, cyh, B, aA, hy, V, q, eA, eJ, aT, qv, ae, jf, qw, wr, s, iU, Pg, r, en, cl, t, iK, ck, kP, np, fD, bt, ao, Mb, Zl, iW, jh, oZ, hF, ad, av, asi, hd, Db, oW, fb, qt, ff, eH, aF, Hl, bz, bE); #c1(RAD51) c2(NP_002866) c3(DNA repair protein RAD51 homolog 1 isoform 1) c4(132987, 132988) c5(132989, 132990, 132991, 132992, 132993, 132994, 132995, 132996) c6( ) c7(T, os, aC, if, fd, bB, ci, ip, aE, Qk, K, hu, eG, aW, g, eF, bw, iP, eM, nB, iT, vA, cj, iS, m, ht, qN, eW, hr, cc, h, dL, ey, cM, op, YE, dB, hL, at, cyh, B, aA, hy, V, q, eA, eJ, aT, qv, ae, jf, qw, wr, s, iU, Pg, r, en, cl, t, iK, ck, kP, np, fD, bt, ao, Mb, Zl, iW, jh, oZ, hF, ad, av, asi, hd, Db, oW, fb, qt, ff, eH, aF, Hl, bz, bE); #c1(RAD51) c2(NP_597994) c3(DNA repair protein RAD51 homolog 1 isoform 2) c4(235223, 235224, 235225) c5(235226, 235227, 235228, 235229, 235230, 235231, 235232, 235233, 235234, 235235) c6( ) c7(T, os, aC, if, fd, bB, ci, ip, aE, Qk, K, hu, eG, aW, g, eF, bw, iP, eM, nB, iT, vA, cj, iS, m, ht, qN, eW, hr, cc, h, dL, ey, cM, op, YE, dB, hL, at, cyh, B, aA, hy, V, q, eA, eJ, aT, qv, ae, jf, qw, wr, s, iU, Pg, r, en, cl, t, iK, ck, kP, np, fD, bt, ao, Mb, Zl, iW, jh, oZ, hF, ad, av, asi, hd, Db, oW, fb, qt, ff, eH, aF, Hl, bz, bE); #c1(RAD51) c2(XP_011520164) c3(DNA repair protein RAD51 homolog 1 isoform X3) c4( ) c5(315029, 315030, 315031, 315032, 315033, 315034, 315035, 315036, 315037, 315038, 315039, 315040) c6( ) c7(T, os, aC, if, fd, bB, ci, ip, aE, Qk, K, hu, eG, aW, g, eF, bw, iP, eM, nB, iT, vA, cj, iS, m, ht, qN, eW, hr, cc, h, dL, ey, cM, op, YE, dB, hL, at, cyh, B, aA, hy, V, q, eA, eJ, aT, qv, ae, jf, qw, wr, s, iU, Pg, r, en, cl, t, iK, ck, kP, np, fD, bt, ao, Mb, Zl, iW, jh, oZ, hF, ad, av, asi, hd, Db, oW, fb, qt, ff, eH, aF, Hl, bz, bE); #c1(RAD51AP1) c2(NP_001124334) c3(RAD51-associated protein 1 isoform a) c4(48720) c5(48721, 48722, 48723, 48724, 48725, 48726) c6( ) c7(ck, Mb, jz, K, ajm); #c1(RAD51AP1) c2(NP_006470) c3(RAD51-associated protein 1 isoform b) c4(165438, 165439) c5(165440, 165441, 165442, 165443, 165444, 165445, 165446, 165447, 165448, 165449, 165450, 165451) c6( ) c7(ck, Mb, jz, K, ajm); #c1(RAD51AP1) c2(XP_011519213) c3(RAD51-associated protein 1 isoform X1) c4(313803) c5(313804, 313805, 313806, 313807, 313808, 313809) c6( ) c7(ck, Mb, jz, K, ajm); #c1(RAD51B) c2(NP_002868) c3(DNA repair protein RAD51 homolog 2 isoform 1) c4(133004, 133005, 133006) c5(133007, 133008, 133009, 133010, 133011, 133012) c6( ) c7(wL, pd, V, eA, aT, aed, bc, eG, zQ, d, PE, aW, aeU, t, op, kP, nb, W, dB, vA, m, y, lB); #c1(RAD51B) c2(NP_598193) c3(DNA repair protein RAD51 homolog 2 isoform 3) c4(235384) c5(235385, 235386, 235387, 235388, 235389, 235390) c6( ) c7(wL, pd, V, eA, aT, aed, bc, eG, zQ, d, PE, aW, aeU, t, op, kP, nb, W, dB, vA, m, y, lB); #c1(RAD51B) c2(NP_598194) c3(DNA repair protein RAD51 homolog 2 isoform 2) c4(235391, 235392) c5(235393, 235394, 235395, 235396, 235397, 235398, 235399, 235400, 235401, 235402, 235403, 235404) c6( ) c7(wL, pd, V, eA, aT, aed, bc, eG, zQ, d, PE, aW, aeU, t, op, kP, nb, W, dB, vA, m, y, lB); #c1(RAD51B) c2(XP_011535351) c3(DNA repair protein RAD51 homolog 2 isoform X4) c4(332380) c5(332381, 332382, 332383, 332384, 332385, 332386, 332387, 332388, 332389, 332390) c6( ) c7(wL, pd, V, eA, aT, aed, bc, eG, zQ, d, PE, aW, aeU, t, op, kP, nb, W, dB, vA, m, y, lB); #c1(RAD51B) c2(XP_011535353) c3(DNA repair protein RAD51 homolog 2 isoform X6) c4( ) c5(332391, 332392, 332393, 332394, 332395, 332396, 332397, 332398, 332399, 332400, 332401, 332402) c6( ) c7(wL, pd, V, eA, aT, aed, bc, eG, zQ, d, PE, aW, aeU, t, op, kP, nb, W, dB, vA, m, y, lB); #c1(RAD51C) c2(NP_002867) c3(DNA repair protein RAD51 homolog 3 isoform 2) c4(132997) c5(132998, 132999, 133000, 133001, 133002, 133003) c6( ) c7(qw, T, os, aW, afd, cyi, iK, aT, r, aA, oZ, dL, aF, m, Ld, qv, t, V, q, cyj); #c1(RAD51C) c2(NP_478123) c3(DNA repair protein RAD51 homolog 3 isoform 1) c4(230965) c5(230966, 230967, 230968, 230969, 230970, 230971) c6( ) c7(qw, T, os, aW, afd, cyi, iK, aT, r, aA, oZ, dL, aF, m, Ld, qv, t, V, q, cyj); #c1(RAD51D) c2(NP_001136043) c3(DNA repair protein RAD51 homolog 4 isoform 6) c4(54153) c5(54154, 54155, 54156, 54157, 54158, 54159, 54160, 54161, 54162, 54163) c6( ) c7(T, os, aC, BN, aW, ew, cyk, aT, cj, r, dL, hy, m, oJ, q, oZ, t, V, g, ne); #c1(RAD51D) c2(NP_002869) c3(DNA repair protein RAD51 homolog 4 isoform 1) c4(133013, 133014, 133015, 133016, 133017, 133018) c5(133019, 133020, 133021, 133022, 133023, 133024, 133025, 133026, 133027, 133028, 133029, 133030, 133031, 133032, 133033, 133034, 133035, 133036, 133037, 133038, 133039, 133040, 133041, 133042, 133043, 133044, 133045, 133046, 133047, 133048, 133049, 133050, 133051, 133052, 133053, 133054) c6( ) c7(T, os, aC, BN, aW, ew, cyk, aT, cj, r, dL, hy, m, oJ, q, oZ, t, V, g, ne); #c1(RAD51D) c2(NP_598332) c3(DNA repair protein RAD51 homolog 4 isoform 4) c4(235412) c5(235413, 235414, 235415, 235416, 235417, 235418) c6( ) c7(T, os, aC, BN, aW, ew, cyk, aT, cj, r, dL, hy, m, oJ, q, oZ, t, V, g, ne); #c1(RAD52) c2(NP_001284348) c3(DNA repair protein RAD52 homolog isoform a) c4(111733, 111734) c5(111735, 111736, 111737, 111738, 111739, 111740, 111741, 111742, 111743, 111744, 111745) c6( ) c7(T, if, ci, qN, V, eA, ip, Db, Qk, aT, dL, K, aW, t, bw, bz, ck, nB, dB, Qu, cj, at, m, iu); #c1(RAD52) c2(NP_001284349) c3(DNA repair protein RAD52 homolog isoform b) c4(111746) c5(111747, 111748, 111749, 111750, 111751, 111752) c6( ) c7(T, if, ci, qN, V, eA, ip, Db, Qk, aT, dL, K, aW, t, bw, bz, ck, nB, dB, Qu, cj, at, m, iu); #c1(RAD52) c2(NP_001284350) c3(DNA repair protein RAD52 homolog isoform c) c4( ) c5(111753, 111754, 111755, 111756, 111757) c6( ) c7(T, if, ci, qN, V, eA, ip, Db, Qk, aT, dL, K, aW, t, bw, bz, ck, nB, dB, Qu, cj, at, m, iu); #c1(RAD54B) c2(NP_001192191) c3(DNA repair and recombination protein RAD54B isoform 2) c4(82073) c5(82074, 82075, 82076, 82077, 82078) c6( ) c7(T, kl, aC, dB, aZ, bE, iW, aT, bB, uV, g, V, eA); #c1(RAD54B) c2(NP_001192192) c3(DNA repair and recombination protein RAD54B isoform 3) c4( ) c5(82079, 82080, 82081, 82082, 82083) c6( ) c7(T, kl, aC, dB, aZ, bE, iW, aT, bB, uV, g, V, eA); #c1(RAD54B) c2(NP_036547) c3(DNA repair and recombination protein RAD54B isoform 1) c4(174335, 174336, 174337) c5(174338, 174339, 174340, 174341, 174342, 174343, 174344, 174345, 174346, 174347, 174348, 174349, 174350) c6( ) c7(T, kl, aC, dB, aZ, bE, iW, aT, bB, uV, g, V, eA); #c1(RAD9A) c2(NP_004575) c3(cell cycle checkpoint control protein RAD9A isoform 1) c4(147829) c5(147830, 147831, 147832, 147833, 147834, 147835) c6( ) c7(ae, T, BN, eM, aW, yk, afS, aT, n, K, bz, iu, ad); #c1(RAD9B) c2(NP_001273461) c3(cell cycle checkpoint control protein RAD9B isoform b) c4( ) c5(104965, 104966, 104967, 104968, 104969, 104970, 104971, 104972) c6( ) c7(wu, wm); #c1(RAD9B) c2(NP_001273464) c3(cell cycle checkpoint control protein RAD9B isoform d) c4( ) c5(104973, 104974) c6( ) c7(wu, wm); #c1(RAD9B) c2(NP_689655) c3(cell cycle checkpoint control protein RAD9B isoform 1) c4(243486) c5(243487, 243488, 243489, 243490, 243491, 243492) c6( ) c7(wu, wm); #c1(RAD9B) c2(XP_011536274) c3(cell cycle checkpoint control protein RAD9B isoform X3) c4(333619) c5( ) c6( ) c7(wu, wm); #c1(RAE1) c2(XP_005260640) c3(mRNA export factor isoform X3) c4(276755, 276756, 276757) c5(276758, 276759, 276760) c6( ) c7(ck, T, aq, Ph, rH, iR, cm); #c1(RAE1) c2(XP_011527389) c3(mRNA export factor isoform X2) c4( ) c5(322091, 322092, 322093, 322094, 322095, 322096, 322097, 322098, 322099, 322100, 322101, 322102, 322103) c6( ) c7(ck, T, aq, Ph, rH, iR, cm); #c1(RAE1) c2(XP_011527391) c3(mRNA expert factor isoform X1) c4( ) c5(322104, 322105, 322106, 322107, 322108, 322109, 322110, 322111, 322112, 322113, 322114, 322115, 322116, 322117) c6( ) c7(ck, T, aq, Ph, rH, iR, cm); #c1(RAET1E) c2(NP_001230254) c3(NKG2D ligand 4 isoform 2 precursor) c4(86144) c5(86145, 86146, 86147, 86148, 86149, 86150, 86151) c6( ) c7(bE, Io, m); #c1(RAET1E) c2(NP_001230256) c3(NKG2D ligand 4 isoform 3 precursor) c4(86152) c5(86153, 86154, 86155, 86156, 86157, 86158, 86159, 86160, 86161, 86162, 86163, 86164, 86165, 86166, 86167, 86168, 86169) c6( ) c7(bE, Io, m); #c1(RAET1E) c2(NP_631904) c3(NKG2D ligand 4 isoform 1 precursor) c4(238275) c5(238276, 238277, 238278, 238279, 238280, 238281) c6( ) c7(bE, Io, m); #c1(RAET1E) c2(XP_011533780) c3(NKG2D ligand 4 isoform X4) c4(329918) c5( ) c6( ) c7(bE, Io, m); #c1(RAET1E) c2(XP_011533781) c3(NKG2D ligand 4 isoform X1) c4(329919, 329920) c5(329921, 329922, 329923, 329924, 329925, 329926) c6( ) c7(bE, Io, m); #c1(RAET1L) c2(NP_570970) c3(retinoic acid early transcript 1L protein precursor) c4(234429) c5(234430, 234431, 234432, 234433, 234434, 234435, 234436, 234437, 234438, 234439) c6( ) c7(OW); #c1(RAF1) c2(NP_002871) c3(RAF proto-oncogene serine/threonine-protein kinase) c4(133055, 133056) c5(133057, 133058, 133059, 133060, 133061, 133062, 133063, 133064, 133065, 133066, 133067, 133068) c6( ) c7(bM, T, fR, yS, bO, fd, bB, ci, Qp, afr, aE, pX, ajv, cyn, K, eL, cp, eG, aW, aEI, g, as, eF, Qt, iP, eM, nB, iT, mx, vy, Qw, nw, m, fW, de, cyl, NK, NT, aj, kv, fr, ft, jz, cc, gd, kH, dL, nS, AQ, aq, kp, XT, Qy, bP, dB, bD, B, Dw, dA, yk, jx, aA, yO, q, J, eA, zn, aup, nv, aT, aut, ae, af, Uf, s, iU, Y, r, en, cl, t, iK, Vn, ck, nM, Dy, mG, AH, zu, bt, VB, id, ow, atS, VT, jh, bS, ad, hX, dP, av, hd, Rq, cym, nl, vc, hP, IQ, fb, pq, Yi, d, BO, ff, eH, nh, aF, iR, bz, dr, Hp, es, Ew, bE, adg, y, iu); #c1(RAF1) c2(XP_005265416) c3(RAF proto-oncogene serine/threonine-protein kinase isoform X4) c4(279534) c5(279535, 279536, 279537, 279538, 279539, 279540) c6( ) c7(bM, T, fR, yS, bO, fd, bB, ci, Qp, afr, aE, pX, ajv, cyn, K, eL, cp, eG, aW, aEI, g, as, eF, Qt, iP, eM, nB, iT, mx, vy, Qw, nw, m, fW, de, cyl, NK, NT, aj, kv, fr, ft, jz, cc, gd, kH, dL, oS, AQ, ag, kp, XT, Qy, bP, dB, bD, B, Dw, dA, yk, jx, aA, yO, q, J, eA, zn, aup, nv, aT, aut, ae, af, Uf, s, iU, Y, r, en, cl, t, iK, Vn, ck, nM, Dy, mG, AH, zu, bt, VB, id, ow, atS, VT, jh, bS, ad, hX, dP, av, hd, Rq, cym, nl, vc, hP, IQ, fb, pq, Yi, d, BO, ff, eH, nh, aF, iR, bz, dr, Hp, es, Ew, bE, adg, y, iu); #c1(RAF1) c2(XP_011532277) c3(RAF proto-oncogene serine/threonine-protein kinase isoform X3) c4(328343) c5(328344, 328345, 328346, 328347, 328348, 328349) c6( ) c7(bM, T, fR, yS, bO, fd, bB, ci, Qp, afr, aE, pX, ajv, cyn, K, eL, cp, eG, aW, aEI, g, as, eF, Qt, iP, eM, nB, iT, mx, vy, Qw, nw, m, fW, de, cyl, NK, NT, aj, kv, fr, ft, jz, cc, gd, kH, dL, oS, AQ, aq, kp, XT, Qy, bP, dB, bD, B, Dw, dA, yk, jx, aA, yO, q, J, eA, zn, aup, nv, aT, aut, ae, af, Uf, s, iU, Y, r, en, cl, t, iK, Vn, ck, nM, Dy, mG, AH, zu, bt, VB, id, ow, atS, VT, jh, bS, ad, hX, dP, av, hd, Rq, cym, nl, vc, hP, IQ, fb, pq, Yi, d, BO, ff, eH, nh, aF, iR, bz, dr, Hp, es, Ew, bE, adg, y, iu); #c1(RAG1) c2(XP_005253098) c3(V(D)J recombination-activating protein 1 isoform X1) c4(272153) c5(272154, 272155, 272156, 272157, 272158, 272159) c6( ) c7(Ob, bM, T, dD, aGC, dA, bRe, ea, iW, jh, fd, bB, wV, eq, cuZ, x, ke, cyp, pe, hn, dL, ji, pk, bEg, oV, Y, CM, xs, eZ, zD, CF, bdl, hp, cm, bw, bz, ck, cyo, Zg, bE, cj, at, uz, wR, dy, k, ei, im, y, zA); #c1(RAG2) c2(NP_001230714) c3(V(D)J recombination-activating protein 2) c4(86691, 86692, 86693) c5(86694, 86695, 86696, 86697, 86698, 86699, 86700, 86701, 86702, 86703, 86704, 86705, 86706, 86707, 86708, 86709, 86710, 86711) c6( ) c7(T, dA, iW, jh, fd, v, fr, ci, nA, ai, aZZ, bRT, cuZ, ad, x, eW, cyp, aE, jZ, kH, Ne, aT, h, ji, ajA, pk, ae, dx, yF, Nr, Ix, NE, aW, Y, oV, xs, CM, eZ, po, bdl, iV, pL, Ng, bnc, ck, ar, eU, qe, c, eM, bE, Zg, cj, wR, k, ER, yH, rH, y, st); #c1(RAI1) c2(NP_109590) c3(retinoic acid-induced protein 1) c4(219680, 219681, 219682, 219683, 219684, 219685) c5(219686, 219687, 219688, 219689, 219690, 219691, 219692, 219693, 219694, 219695, 219696, 219697, 219698, 219699, 219700, 219701, 219702, 219703, 219704, 219705, 219706, 219707, 219708, 219709, 219710, 219711, 219712, 219713, 219714, 219715, 219716, 219717, 219718, 219719, 219720, 219721, 219722) c6( ) c7(OF, v, nA, aIX, blg, aaw, bK, K, an, Yi, aIL, jf, VX, cH, Y, Az, bu, cm, dr, bN, hq, cj, ei, bD, biW, xb); #c1(RAI14) c2(NP_001138992) c3(ankycorbin isoform a) c4(58496, 58497, 58498) c5(58499, 58500, 58501, 58502, 58503, 58504, 58505, 58506, 58507, 58508, 58509, 58510, 58511, 58512) c6( ) c7(t, m); #c1(RAI14) c2(NP_001138994) c3(ankycorbin isoform b) c4(58513, 58514, 58515, 58516, 58517, 58518) c5(58519, 58520, 58521, 58522, 58523, 58524, 58525, 58526, 58527, 58528, 58529, 58530, 58531, 58532, 58533, 58534, 58535, 58536, 58537, 58538, 58539, 58540, 58541, 58542, 58543, 58544, 58545, 58546, 58547, 58548, 58549, 58550, 58551, 58552, 58553, 58554, 58555, 58556, 58557, 58558, 58559, 58560, 58561, 58562, 58563, 58564, 58565, 58566, 58567, 58568, 58569, 58570) c6( ) c7(t, m); #c1(RAI14) c2(NP_001138995) c3(ankycorbin isoform c) c4(58571) c5(58572, 58573, 58574, 58575, 58576, 58577) c6( ) c7(t, m); #c1(RAI14) c2(NP_001138997) c3(ankycorbin isoform d) c4(58583) c5(58584, 58585, 58586, 58587, 58588, 58589) c6( ) c7(t, m); #c1(RAI14) c2(XP_011512318) c3(ankycorbin isoform X2) c4(302879) c5(302880, 302881, 302882, 302883, 302884, 302885) c6( ) c7(t, m); #c1(RAI2) c2(NP_001166203) c3(retinoic acid-induced protein 2 isoform 2) c4(68478) c5(68479, 68480, 68481, 68482, 68483, 68484) c6( ) c7(aIV); #c1(RAI2) c2(XP_006724523) c3(retinoic acid-induced protein 2 isoform X1) c4(296011) c5(296012, 296013, 296014, 296015, 296016, 296017, 296018, 296019, 296020, 296021, 296022, 296023, 296024, 296025, 296026, 296027, 296028, 296029) c6( ) c7(aIV); #c1(RALA) c2(XP_006715825) c3(ras-related protein Ral-A isoform X1) c4(289826, 289827) c5(289828, 289829, 289830, 289831, 289832, 289833, 289834, 289835, 289836, 289837, 289838, 289839, 289840, 289841) c6( ) c7(aC, eM, h, Wb, dL, kp, ci, eL, 8); #c1(RALB) c2(NP_002872) c3(ras-related protein Ral-B) c4( ) c5(133069, 133070, 133071, 133072, 133073, 133074, 133075, 133076, 133077, 133078, 133079, 133080, 133081, 133082, 133083, 133084, 133085, 133086) c6( ) c7(c, dL, ci, arA, aC); #c1(RALB) c2(XP_005263781) c3(ras-related protein Ral-B isoform X3) c4(278559) c5(278560, 278561, 278562, 278563, 278564, 278565, 278566, 278567, 278568) c6( ) c7(c, dL, ci, arA, aC); #c1(RALB) c2(XP_011509875) c3(ras-related protein Ral-B isoform X2) c4(300479, 300480) c5(300481) c6( ) c7(c, dL, ci, arA, aC); #c1(RALB) c2(XP_011509876) c3(ras-related protein Ral-B isoform X4) c4(300482) c5( ) c6( ) c7(c, dL, ci, arA, aC); #c1(RALBP1) c2(NP_006779) c3(ralA-binding protein 1) c4(167979, 167980) c5(167981, 167982, 167983, 167984, 167985, 167986, 167987, 167988, 167989, 167990, 167991, 167992, 167993, 167994, 167995, 167996, 167997, 167998) c6( ) c7(T, dA, yG, ha, cz, bB, aj, j, ci, EA, fr, q, J, ad, eA, av, ft, aE, nI, aT, jy, dL, K, ae, eL, eG, d, aW, Y, r, t, cm, bz, iK, ck, es, eM, iA, bE, bo, aS, m, y, iu); #c1(RALGAPA1) c2(NP_001269972) c3(ral GTPase-activating protein subunit alpha-1 isoform 3) c4(103324) c5(103325, 103326, 103327, 103328, 103329, 103330) c6( ) c7(aYc); #c1(RALGAPA1) c2(NP_001269973) c3(ral GTPase-activating protein subunit alpha-1 isoform 4) c4(103331) c5(103332, 103333, 103334, 103335, 103336, 103337, 103338, 103339, 103340, 103341) c6( ) c7(aYc); #c1(RALGAPA1) c2(NP_055805) c3(ral GTPase-activating protein subunit alpha-1 isoform 1) c4(183605) c5(183606, 183607, 183608, 183609, 183610, 183611, 183612, 183613, 183614, 183615, 183616, 183617) c6( ) c7(aYc); #c1(RALGAPA1) c2(NP_919277) c3(ral GTPase-activating protein subunit alpha-1 isoform 2) c4(258441, 258442) c5(258443, 258444, 258445, 258446, 258447, 258448) c6( ) c7(aYc); #c1(RALGAPA1) c2(XP_005267555) c3(ral GTPase-activating protein subunit alpha-1 isoform X12) c4( ) c5(281017, 281018, 281019, 281020, 281021, 281022) c6( ) c7(aYc); #c1(RALGAPA1) c2(XP_006720161) c3(ral GTPase-activating protein subunit alpha-1 isoform X2) c4(293308) c5( ) c6( ) c7(aYc); #c1(RALGAPA2) c2(NP_065076) c3(ral GTPase-activating protein subunit alpha-2) c4( ) c5(203669, 203670, 203671, 203672, 203673, 203674, 203675, 203676, 203677, 203678, 203679, 203680, 203681, 203682, 203683, 203684, 203685, 203686, 203687, 203688, 203689, 203690, 203691, 203692, 203693, 203694, 203695, 203696, 203697) c6( ) c7(eL, V, dL, hI); #c1(RALGAPA2) c2(XP_005260825) c3(ral GTPase-activating protein subunit alpha-2 isoform X2) c4(276923, 276924) c5(276925, 276926, 276927, 276928, 276929, 276930) c6( ) c7(eL, V, dL, hI); #c1(RALGAPA2) c2(XP_006723662) c3(ral GTPase-activating protein subunit alpha-2 isoform X3) c4(295282) c5( ) c6( ) c7(eL, V, dL, hI); #c1(RALGAPA2) c2(XP_011527611) c3(ral GTPase-activating protein subunit alpha-2 isoform X4) c4(322493, 322494, 322495, 322496) c5(322497, 322498, 322499, 322500, 322501, 322502) c6( ) c7(eL, V, dL, hI); #c1(RALGAPA2) c2(XP_011527613) c3(ral GTPase-activating protein subunit alpha-2 isoform X6) c4( ) c5(322503, 322504, 322505, 322506, 322507, 322508) c6( ) c7(eL, V, dL, hI); #c1(RALGAPB) c2(NP_001269847) c3(ral GTPase-activating protein subunit beta isoform 2) c4(102948) c5(102949, 102950, 102951, 102952, 102953, 102954) c6( ) c7(ck, x, T, ft, hI, iU, bE, aW, gp, aI, aT, bB, fd, bw, fr, k, hF, bt, B, hX); #c1(RALGAPB) c2(NP_065069) c3(ral GTPase-activating protein subunit beta isoform 1) c4(203585, 203586) c5(203587, 203588, 203589, 203590, 203591, 203592, 203593, 203594, 203595, 203596, 203597, 203598, 203599, 203600, 203601, 203602, 203603, 203604, 203605, 203606, 203607, 203608) c6( ) c7(ck, x, T, ft, hI, iU, bE, aW, gp, aI, aT, bB, fd, bw, fr, k, hF, bt, B, hX); #c1(RALGAPB) c2(XP_005260519) c3(ral GTPase-activating protein subunit beta isoform X1) c4(276585) c5( ) c6( ) c7(ck, x, T, ft, hI, iU, bE, aW, gp, aI, aT, bB, fd, bw, fr, k, hF, bt, B, hX); #c1(RALGAPB) c2(XP_005260522) c3(ral GTPase-activating protein subunit beta isoform X4) c4(276586, 276587) c5(276588, 276589, 276590, 276591, 276592, 276593, 276594, 276595, 276596, 276597, 276598, 276599) c6( ) c7(ck, x, T, ft, hI, iU, bE, aW, gp, aI, aT, bB, fd, bw, fr, k, hF, bt, B, hX); #c1(RALGDS) c2(NP_001035827) c3(ral guanine nucleotide dissociation stimulator isoform 2) c4(33158, 33159, 33160) c5(33161, 33162, 33163, 33164, 33165, 33166, 33167, 33168, 33169, 33170, 33171, 33172, 33173, 33174, 33175, 33176, 33177, 33178, 33179, 33180, 33181) c6( ) c7(T, c, hk, Y, ff, kp, en, nA); #c1(RALGDS) c2(NP_001258703) c3(ral guanine nucleotide dissociation stimulator isoform 3) c4(96375) c5(96376, 96377, 96378, 96379, 96380, 96381) c6( ) c7(T, c, hk, Y, ff, kp, en, nA); #c1(RALGDS) c2(NP_001258704) c3(ral guanine nucleotide dissociation stimulator isoform 4) c4(96382, 96383) c5(96384, 96385, 96386, 96387, 96388, 96389) c6( ) c7(T, c, hk, Y, ff, kp, en, nA); #c1(RALGDS) c2(NP_001258705) c3(ral guanine nucleotide dissociation stimulator isoform 5) c4(96390) c5(96391, 96392, 96393, 96394, 96395, 96396) c6( ) c7(T, c, hk, Y, ff, kp, en, nA); #c1(RALGDS) c2(NP_006257) c3(ral guanine nucleotide dissociation stimulator isoform 1) c4(163330) c5(163331, 163332, 163333, 163334, 163335, 163336, 163337, 163338, 163339, 163340, 163341, 163342) c6( ) c7(T, c, hk, Y, ff, kp, en, nA); #c1(RALGPS1) c2(NP_001177657) c3(ras-specific guanine nucleotide-releasing factor RalGPS1 isoform 3) c4(72837) c5(72838, 72839, 72840, 72841, 72842, 72843) c6( ) c7(fq); #c1(RALGPS1) c2(NP_001177658) c3(ras-specific guanine nucleotide-releasing factor RalGPS1 isoform 2) c4(72844) c5(72845, 72846, 72847, 72848, 72849, 72850) c6( ) c7(fq); #c1(RALGPS1) c2(NP_001177659) c3(ras-specific guanine nucleotide-releasing factor RalGPS1 isoform 4) c4(72851, 72852, 72853, 72854) c5(72855, 72856, 72857, 72858, 72859, 72860, 72861, 72862, 72863, 72864, 72865, 72866, 72867, 72868, 72869, 72870, 72871, 72872, 72873, 72874, 72875, 72876, 72877, 72878) c6( ) c7(fq); #c1(RALGPS1) c2(NP_055451) c3(ras-specific guanine nucleotide-releasing factor RalGPS1 isoform 1) c4(181244) c5(181245, 181246, 181247, 181248, 181249, 181250) c6( ) c7(fq); #c1(RALGPS1) c2(XP_011517530) c3(ras-specific guanine nucleotide-releasing factor RalGPS1 isoform X4) c4(311327) c5( ) c6( ) c7(fq); #c1(RALGPS1) c2(XP_011517536) c3(ras-specific guanine nucleotide-releasing factor RalGPS1 isoform X9) c4(311328) c5(311329, 311330, 311331, 311332, 311333, 311334) c6( ) c7(fq); #c1(RALGPS1) c2(XP_011517538) c3(ras-specific guanine nucleotide-releasing factor RalGPS1 isoform X11) c4( ) c5(311335, 311336, 311337, 311338, 311339, 311340) c6( ) c7(fq); #c1(RALY) c2(NP_031393) c3(RNA-binding protein Raly isoform 2) c4(172202, 172203, 172204) c5(172205, 172206, 172207, 172208, 172209, 172210, 172211, 172212, 172213, 172214, 172215, 172216, 172217, 172218, 172219, 172220, 172221, 172222) c6( ) c7(aW, ev, r, aT, q, xa); #c1(RALY) c2(NP_057951) c3(RNA-binding protein Raly isoform 1) c4(192600, 192601) c5(192602, 192603, 192604, 192605, 192606, 192607, 192608, 192609, 192610, 192611, 192612, 192613) c6( ) c7(aW, ev, r, aT, q, xa); #c1(RALYL) c2(NP_001093861) c3(RNA-binding Raly-like protein isoform 1) c4(40420, 40421) c5(40422, 40423, 40424, 40425, 40426, 40427, 40428, 40429, 40430, 40431, 40432) c6( ) c7(cm, j, ac, aT); #c1(RALYL) c2(NP_001093862) c3(RNA-binding Raly-like protein isoform 2) c4(40433) c5(40434, 40435, 40436, 40437, 40438, 40439, 40440, 40441, 40442, 40443, 40444) c6( ) c7(cm, j, ac, aT); #c1(RALYL) c2(NP_001274173) c3(RNA-binding Raly-like protein isoform 4) c4(106102) c5(106103, 106104, 106105, 106106, 106107, 106108) c6( ) c7(cm, j, ac, aT); #c1(RALYL) c2(XP_011515765) c3(RNA-binding Raly-like protein isoform X5) c4( ) c5(308567, 308568, 308569, 308570, 308571, 308572, 308573, 308574) c6( ) c7(cm, j, ac, aT); #c1(RAMP1) c2(NP_005846) c3(receptor activity-modifying protein 1 precursor) c4(159837) c5(159838, 159839, 159840, 159841, 159842, 159843, 159844, 159845, 159846, 159847, 159848) c6( ) c7(gx, cZ, T, ac, nv, ea, aw, cE, cz, bgw, uu, ci, dd, ae, ad, eK); #c1(RAMP2) c2(NP_005845) c3(receptor activity-modifying protein 2 precursor) c4(159830) c5(159831, 159832, 159833, 159834, 159835, 159836) c6( ) c7(av, A, d, crt, fG, zR, cz, fQ, fF, v, dy, ci, K, bq, j, lC, g, bz, cd, y); #c1(RAMP3) c2(NP_005847) c3(receptor activity-modifying protein 3 precursor) c4(159849, 159850) c5(159851, 159852, 159853, 159854, 159855, 159856, 159857, 159858, 159859, 159860, 159861, 159862, 159863, 159864, 159865, 159866) c6( ) c7(d, aE, gZ, j, ci, eA); #c1(RAN) c2(NP_001287725) c3(GTP-binding nuclear protein Ran isoform 2) c4( ) c5(112670, 112671, 112672, 112673, 112674, 112675, 112676, 112677) c6( ) c7(T, fd, bB, hy, ww, fr, ci, zP, ad, hX, ib, vJ, iI, iX, aT, h, ae, zQ, BN, B, iU, aW, t, bz, bF, es, c, bE, m, rH, yA, ne); #c1(RAN) c2(NP_006316) c3(GTP-binding nuclear protein Ran isoform 1) c4(163936, 163937, 163938, 163939) c5(163940, 163941, 163942, 163943, 163944, 163945, 163946, 163947, 163948, 163949, 163950, 163951, 163952, 163953, 163954, 163955, 163956, 163957, 163958, 163959, 163960, 163961, 163962, 163963) c6( ) c7(T, fd, bB, hy, ww, fr, ci, zP, ad, hX, ib, vJ, iI, iX, aT, h, ae, zQ, BN, B, iU, aW, t, bz, bF, es, c, bE, m, rH, yA, ne); #c1(RANBP1) c2(NP_002873) c3(ran-specific GTPase-activating protein isoform 2) c4(133087) c5(133088, 133089, 133090, 133091, 133092, 133093) c6( ) c7(bE, T, Y, h, aT); #c1(RANBP1) c2(XP_011528591) c3(ran-specific GTPase-activating protein isoform X1) c4(323813) c5(323814, 323815, 323816, 323817, 323818, 323819) c6( ) c7(bE, T, Y, h, aT); #c1(RANBP1) c2(XP_011528592) c3(ran-specific GTPase-activating protein isoform X2) c4(323820) c5(323821, 323822, 323823, 323824, 323825, 323826) c6( ) c7(bE, T, Y, h, aT); #c1(RANBP10) c2(NP_065901) c3(ran-binding protein 10) c4(206136, 206137) c5(206138, 206139, 206140, 206141, 206142, 206143, 206144, 206145, 206146, 206147, 206148, 206149) c6( ) c7(aA); #c1(RANBP10) c2(XP_005256127) c3(ran-binding protein 10 isoform X1) c4(273955, 273956) c5(273957, 273958, 273959, 273960, 273961, 273962, 273963) c6( ) c7(aA); #c1(RANBP10) c2(XP_005256129) c3(ran-binding protein 10 isoform X2) c4(273964) c5(273965, 273966, 273967, 273968, 273969, 273970, 273971, 273972, 273973, 273974, 273975) c6( ) c7(aA); #c1(RANBP17) c2(NP_075048) c3(ran-binding protein 17) c4(213571) c5(213572, 213573, 213574, 213575, 213576, 213577) c6( ) c7(cd); #c1(RANBP17) c2(XP_011532929) c3(ran-binding protein 17 isoform X3) c4(329099) c5( ) c6( ) c7(cd); #c1(RANBP17) c2(XP_011532933) c3(ran-binding protein 17 isoform X7) c4(329100) c5(329101, 329102, 329103, 329104, 329105, 329106) c6( ) c7(cd); #c1(RANBP17) c2(XP_011532939) c3(ran-binding protein 17 isoform X13) c4( ) c5(329107, 329108, 329109, 329110, 329111, 329112) c6( ) c7(cd); #c1(RANBP2) c2(NP_006258) c3(E3 SUMO-protein ligase RanBP2) c4(163343) c5(163344, 163345, 163346, 163347, 163348, 163349) c6( ) c7(ach, T, d, hb, HP, Y, bE, Tm, fd, bB, asM, h, qj, K, cyq, ci, pC, eA, dr, rp); #c1(RANBP2) c2(XP_005264062) c3(E3 SUMO-protein ligase RanBP2 isoform X5) c4(278663) c5( ) c6( ) c7(ach, T, d, hb, HP, Y, bE, Tm, fd, bB, asM, h, qj, K, cyq, ci, pC, eA, dr, rp); #c1(RANBP3) c2(NP_003615) c3(ran-binding protein 3 isoform RANBP3-a) c4(139647) c5(139648, 139649, 139650, 139651, 139652, 139653) c6( ) c7(bE, kH, bB, Io, m, t); #c1(RANBP3) c2(NP_015559) c3(ran-binding protein 3 isoform RANBP3-b) c4(171860, 171861, 171862) c5(171863, 171864, 171865, 171866, 171867, 171868, 171869, 171870, 171871, 171872, 171873, 171874, 171875, 171876, 171877, 171878, 171879, 171880, 171881, 171882) c6( ) c7(bE, kH, bB, Io, m, t); #c1(RANBP3) c2(NP_015561) c3(ran-binding protein 3 isoform RANBP3-d) c4(171883) c5(171884, 171885, 171886, 171887, 171888, 171889) c6( ) c7(bE, kH, bB, Io, m, t); #c1(RANBP3L) c2(NP_001154901) c3(ran-binding protein 3-like isoform 1) c4(61213) c5(61214, 61215, 61216, 61217, 61218, 61219) c6( ) c7(oe, j); #c1(RANBP3L) c2(NP_659437) c3(ran-binding protein 3-like isoform 2) c4(239888, 239889) c5(239890, 239891, 239892, 239893, 239894, 239895, 239896, 239897, 239898, 239899, 239900, 239901) c6( ) c7(oe, j); #c1(RANBP6) c2(NP_036548) c3(ran-binding protein 6 isoform 1) c4(174351) c5(174352, 174353, 174354, 174355, 174356, 174357) c6( ) c7(bM); #c1(RANBP9) c2(NP_005484) c3(ran-binding protein 9) c4(156629, 156630, 156631) c5(156632, 156633, 156634, 156635, 156636, 156637, 156638, 156639, 156640) c6( ) c7(aW, af, aT); #c1(RANBP9) c2(XP_006715008) c3(ran-binding protein 9 isoform X2) c4( ) c5(288386, 288387, 288388, 288389, 288390) c6( ) c7(aW, af, aT); #c1(RANBP9) c2(XP_011512507) c3(ran-binding protein 9 isoform X1) c4( ) c5(303144, 303145, 303146, 303147, 303148, 303149) c6( ) c7(aW, af, aT); #c1(RANGAP1) c2(NP_001265580) c3(ran GTPase-activating protein 1) c4(98893, 98894, 98895) c5(98896, 98897, 98898, 98899, 98900, 98901, 98902, 98903, 98904, 98905, 98906, 98907, 98908, 98909) c6( ) c7(bL, ck, fM, Kv, Y, jh, Rl, pk, dr, xt, dR); #c1(RANGAP1) c2(XP_005261752) c3(ran GTPase-activating protein 1 isoform X2) c4(277597) c5(277598) c6( ) c7(bL, ck, fM, Kv, Y, jh, Rl, pk, dr, xt, dR); #c1(RANGAP1) c2(XP_005261753) c3(ran GTPase-activating protein 1 isoform X3) c4( ) c5(277599, 277600, 277601, 277602, 277603, 277604) c6( ) c7(bL, ck, fM, Kv, Y, jh, Rl, pk, dr, xt, dR); #c1(RANGAP1) c2(XP_011528595) c3(ran GTPase-activating protein 1 isoform X4) c4(323827, 323828) c5(323829, 323830, 323831, 323832, 323833, 323834, 323835, 323836, 323837, 323838, 323839, 323840) c6( ) c7(bL, ck, fM, Kv, Y, jh, Rl, pk, dr, xt, dR); #c1(RANGAP1) c2(XP_011528599) c3(ran GTPase-activating protein 1 isoform X5) c4( ) c5(323841, 323842, 323843, 323844, 323845, 323846, 323847, 323848, 323849, 323850, 323851, 323852, 323853, 323854, 323855) c6( ) c7(bL, ck, fM, Kv, Y, jh, Rl, pk, dr, xt, dR); #c1(RANGRF) c2(NP_001171272) c3(ran guanine nucleotide release factor isoform B) c4(70028) c5(70029, 70030, 70031, 70032, 70033) c6( ) c7(arD, ajM); #c1(RANGRF) c2(NP_001171273) c3(ran guanine nucleotide release factor isoform C) c4(70034) c5(70035, 70036, 70037, 70038, 70039, 70040) c6( ) c7(arD, ajM); #c1(RANGRF) c2(NP_057576) c3(ran guanine nucleotide release factor isoform A) c4(191415) c5(191416, 191417, 191418, 191419, 191420, 191421, 191422) c6( ) c7(arD, ajM); #c1(RAP1B) c2(NP_001010942) c3(ras-related protein Rap-1b isoform 1 precursor) c4(24274, 24275, 24276, 24277, 24278, 24279, 24280, 24281, 24282, 24283, 24284, 24285, 24286, 24287) c5(24288, 24289, 24290, 24291, 24292, 24293, 24294, 24295, 24296, 24297, 24298, 24299, 24300, 24301, 24302, 24303, 24304, 24305, 24306, 24307, 24308, 24309, 24310, 24311, 24312, 24313, 24314, 24315, 24316, 24317, 24318, 24319, 24320, 24321, 24322, 24323, 24324, 24325, 24326, 24327, 24328, 24329, 24330, 24331, 24332, 24333, 24334, 24335, 24336, 24337, 24338, 24339, 24340, 24341, 24342, 24343, 24344, 24345, 24346, 24347, 24348, 24349, 24350, 24351, 24352, 24353, 24354, 24355, 24356, 24357, 24358, 24359) c6( ) c7(T, aE, nB, vT, aW, Db, ff, aT, cz, bw, K, fD, en, cm, it, q, dR); #c1(RAP1B) c2(NP_001238846) c3(ras-related protein Rap-1b isoform 2) c4(87949) c5(87950, 87951, 87952, 87953, 87954, 87955, 87956, 87957, 87958, 87959, 87960, 87961, 87962, 87963, 87964, 87965, 87966, 87967, 87968, 87969) c6( ) c7(T, aE, nB, vT, aW, Db, ff, aT, cz, bw, K, fD, en, cm, it, q, dR); #c1(RAP1B) c2(NP_001238850) c3(ras-related protein Rap-1b isoform 3) c4(87970, 87971) c5(87972, 87973, 87974, 87975, 87976, 87977) c6( ) c7(T, aE, nB, vT, aW, Db, ff, aT, cz, bw, K, fD, en, cm, it, q, dR); #c1(RAP1B) c2(NP_001238851) c3(ras-related protein Rap-1b isoform 4) c4(87978) c5(87979, 87980, 87981, 87982, 87983, 87984, 87985, 87986, 87987, 87988, 87989, 87990, 87991, 87992, 87993, 87994, 87995, 87996, 87997, 87998, 87999, 88000, 88001) c6( ) c7(T, aE, nB, vT, aW, Db, ff, aT, cz, bw, K, fD, en, cm, it, q, dR); #c1(RAP1GAP2) c2(NP_001093868) c3(rap1 GTPase-activating protein 2 isoform 2) c4(40454) c5(40455, 40456, 40457, 40458, 40459, 40460) c6( ) c7(aw, ac, cz); #c1(RAP1GAP2) c2(NP_055900) c3(rap1 GTPase-activating protein 2 isoform 1) c4(184316) c5(184317, 184318, 184319, 184320, 184321, 184322, 184323, 184324, 184325, 184326, 184327, 184328, 184329, 184330, 184331, 184332) c6( ) c7(aw, ac, cz); #c1(RAP1GAP2) c2(XP_011522040) c3(rap1 GTPase-activating protein 2 isoform X1) c4(316715) c5( ) c6( ) c7(aw, ac, cz); #c1(RAP1GDS1) c2(NP_001093896) c3(rap1 GTPase-GDP dissociation stimulator 1 isoform 1) c4(40517) c5(40518, 40519, 40520, 40521, 40522, 40523) c6( ) c7(x, T, eM, aW, aT, hn, ci, k, bt, ae, ad); #c1(RAP1GDS1) c2(NP_001093897) c3(rap1 GTPase-GDP dissociation stimulator 1 isoform 3) c4(40524) c5(40525, 40526, 40527, 40528, 40529, 40530) c6( ) c7(x, T, eM, aW, aT, hn, ci, k, bt, ae, ad); #c1(RAP1GDS1) c2(NP_001093898) c3(rap1 GTPase-GDP dissociation stimulator 1 isoform 4) c4(40531) c5(40532, 40533, 40534, 40535, 40536, 40537) c6( ) c7(x, T, eM, aW, aT, hn, ci, k, bt, ae, ad); #c1(RAP1GDS1) c2(NP_001093899) c3(rap1 GTPase-GDP dissociation stimulator 1 isoform 5) c4(40538) c5(40539, 40540, 40541, 40542, 40543, 40544) c6( ) c7(x, T, eM, aW, aT, hn, ci, k, bt, ae, ad); #c1(RAP1GDS1) c2(NP_001093900) c3(rap1 GTPase-GDP dissociation stimulator 1 isoform 6) c4(40545) c5(40546, 40547, 40548, 40549, 40550, 40551) c6( ) c7(x, T, eM, aW, aT, hn, ci, k, bt, ae, ad); #c1(RAP1GDS1) c2(NP_066982) c3(rap1 GTPase-GDP dissociation stimulator 1 isoform 2) c4(207959) c5(207960, 207961, 207962, 207963, 207964, 207965) c6( ) c7(x, T, eM, aW, aT, hn, ci, k, bt, ae, ad); #c1(RAP2A) c2(NP_066361) c3(ras-related protein Rap-2a precursor) c4(207204) c5(207205, 207206, 207207, 207208, 207209, 207210) c6( ) c7(Vn, hd, nB, aW, oe, aw, dV, aT, y, ae, ad); #c1(RAP2B) c2(NP_002877) c3(ras-related protein Rap-2b) c4(133094) c5(133095, 133096, 133097, 133098, 133099, 133100) c6( ) c7(T, vT, aW, Y, aT, ci, K, Ea, cm, dR); #c1(RAPGEF1) c2(NP_001291204) c3(rap guanine nucleotide exchange factor 1 isoform c) c4(115573) c5(115574, 115575, 115576, 115577, 115578, 115579, 115580, 115581, 115582, 115583) c6( ) c7(bL, T, ff, gX, aA, bB, m, en, t, fq); #c1(RAPGEF1) c2(NP_005303) c3(rap guanine nucleotide exchange factor 1 isoform a) c4(154796) c5(154797, 154798, 154799, 154800, 154801, 154802, 154803, 154804, 154805, 154806) c6( ) c7(bL, T, ff, gX, aA, bB, m, en, t, fq); #c1(RAPGEF1) c2(NP_941372) c3(rap guanine nucleotide exchange factor 1 isoform b) c4(260313, 260314, 260315) c5(260316, 260317, 260318, 260319, 260320, 260321, 260322, 260323, 260324, 260325, 260326, 260327, 260328, 260329, 260330, 260331, 260332, 260333, 260334) c6( ) c7(bL, T, ff, gX, aA, bB, m, en, t, fq); #c1(RAPGEF1) c2(XP_005272248) c3(rap guanine nucleotide exchange factor 1 isoform X11) c4(283786, 283787) c5(283788, 283789, 283790, 283791, 283792, 283793) c6( ) c7(bL, T, ff, gX, aA, bB, m, en, t, fq); #c1(RAPGEF1) c2(XP_011516873) c3(rap guanine nucleotide exchange factor 1 isoform X3) c4( ) c5(310292, 310293) c6( ) c7(bL, T, ff, gX, aA, bB, m, en, t, fq); #c1(RAPGEF1) c2(XP_011516876) c3(rap guanine nucleotide exchange factor 1 isoform X8) c4(310294, 310295) c5 (310296, 310297, 310298, 310299, 310300, 310301, 310302, 310303, 310304, 310305, 310306) c6( ) c7(bL, T, ff, gX, aA, bB, m, en, t, fq); #c1(RAPGEF1) c2(XP_011516877) c3(rap guanine nucleotide exchange factor 1 isoform X9) c4(310307) c5(310308, 310309, 310310, 310311, 310312, 310313) c6( ) c7(bL, T, ff, gX, aA, bB, m, en, t, fq); #c1(RAPGEF1) c2(XP_011516879) c3(rap guanine nucleotide exchange factor 1 isoform X13) c4(310314, 310315) c5(310316, 310317, 310318, 310319, 310320, 310321, 310322, 310323, 310324, 310325, 310326, 310327) c6( ) c7(bL, T, ff, gX, aA, bB, m, en, t, fq); #c1(RAPGEF1) c2(XP_011516880) c3(rap guanine nucleotide exchange factor 1 isoform X14) c4(310328, 310329) c5(310330, 310331, 310332, 310333, 310334, 310335, 310336, 310337, 310338, 310339, 310340) c6( ) c7(bL, T, ff, gX, aA, bB, m, en, t, fq); #c1(RAPGEF1) c2(XP_011516882) c3(rap guanine nucleotide exchange factor 1 isoform X17) c4( ) c5(310341, 310342, 310343, 310344, 310345) c6( ) c7(bL, T, ff, gX, aA, bB, m, en, t, fq); #c1(RAPGEF1) c2(XP_011516883) c3(rap guanine nucleotide exchange factor 1 isoform X18) c4(310346) c5(310347, 310348, 310349, 310350, 310351, 310352) c6( ) c7(bL, T, ff, gX, aA, bB, m, en, t, fq); #c1(RAPGEF2) c2(NP_055062) c3(rap guanine nucleotide exchange factor 2) c4(178675) c5(178676, 178677, 178678, 178679, 178680, 178681) c6( ) c7(eA, Hr, bA); #c1(RAPGEF3) c2(NP_001092001) c3(rap guanine nucleotide exchange factor 3 isoform a) c4(39222, 39223) c5(39224, 39225, 39226, 39227, 39228, 39229, 39230, 39231, 39232, 39233, 39234, 39235, 39236, 39237, 39238, 39239, 39240) c6( ) c7(cyr, ac, LC, Y, XY, at, E, bS, k, ct, ci, Z, ae, ad, cp, hq); #c1(RAPGEF3) c2(NP_006096) c3(rap guanine nucleotide exchange factor 3 isoform b) c4(161845, 161846, 161847) c5(161848, 161849, 161850, 161851, 161852, 161853, 161854, 161855, 161856, 161857, 161858) c6( ) c7(cyr, ac, LC, Y, XY, at, E, bS, k, ct, ci, Z, ae, ad, cp, hq); #c1(RAPGEF3) c2(XP_011536055) c3(rap guanine nucleotide exchange factor 3 isoform X3) c4(333352) c5(333353, 333354, 333355, 333356, 333357, 333358, 333359, 333360, 333361, 333362, 333363, 333364, 333365, 333366, 333367, 333368) c6( ) c7(cyr, ac, LC, Y, XY, at, E, bS, k, ct, ci, Z, ae, ad, cp, hq); #c1(RAPGEF3) c2(XP_011536058) c3(rap guanine nucleotide exchange factor 3 isoform X6) c4(333369) c5(333370, 333371, 333372, 333373, 333374, 333375) c6( ) c7(cyr, ac, LC, Y, XY, at, E, bS, k, ct, ci, Z, ae, ad, cp, hq); #c1(RAPGEF3) c2(XP_011536061) c3(rap guanine nucleotide exchange factor 3 isoform X9) c4( ) c5(333376, 333377, 333378, 333379, 333380, 333381, 333382) c6( ) c7(cyr, ac, LC, Y, XY, at, E, bS, k, ct, ci, Z, ae, ad, cp, hq); #c1(RAPGEF4) c2(NP_001093867) c3(rap guanine nucleotide exchange factor 4 isoform b) c4(40445, 40446, 40447) c5(40448, 40449, 40450, 40451, 40452, 40453) c6( ) c7(Z, bS, XY, ct, bN); #c1(RAPGEF4) c2(NP_001269828) c3(rap guanine nucleotide exchange factor 4 isoform c) c4( ) c5(102906, 102907, 102908, 102909, 102910, 102911) c6( ) c7(Z, bS, XY, ct, bN); #c1(RAPGEF4) c2(NP_001269829) c3(rap guanine nucleotide exchange factor 4 isoform d) c4(102912, 102913) c5(102914, 102915, 102916, 102917, 102918, 102919) c6( ) c7(Z, bS, XY, ct, bN); #c1(RAPGEF4) c2(NP_008954) c3(rap guanine nucleotide exchange factor 4 isoform a) c4(169748, 169749, 169750) c5(169751, 169752, 169753, 169754, 169755, 169756, 169757, 169758, 169759, 169760, 169761, 169762, 169763, 169764, 169765, 169766, 169767, 169768, 169769, 169770, 169771, 169772, 169773, 169774, 169775, 169776, 169777, 169778, 169779, 169780, 169781, 169782, 169783) c6( ) c7(Z, bS, XY, ct, bN); #c1(RAPGEF4) c2(XP_005246303) c3(rap guanine nucleotide exchange factor 4 isoform X2) c4( ) c5(267036) c6( ) c7(Z, bS, XY, ct, bN); #c1(RAPGEF5) c2(NP_036426) c3(rap guanine nucleotide exchange factor 5) c4(173767, 173768) c5(173769, 173770, 173771, 173772, 173773, 173774, 173775, 173776, 173777, 173778, 173779, 173780, 173781, 173782, 173783) c6( ) c7(bL, AB, eR, qb, e, rf, cz, cQ, dG, aj, amC, aY, J, fU, cys, amB, oT, MS, nH, rX, bK, bsR, he, H, xa, A, are, Y, eZ, gl, aSO, cm, qa, bAh, ac, fP, dy, tq); #c1(RAPGEF5) c2(XP_005249971) c3(rap guanine nucleotide exchange factor 5 isoform X2) c4(269958, 269959) c5(269960) c6( ) c7(bL, AB, eR, qb, e, rf, cz, cQ, dG, aj, amC, aY, J, fU, cys, amB, oT, MS, nH, rX, bK, bsR, he, H, xa, A, are, Y, eZ, gl, aSO, cm, qa, bAh, ac, fP, dy, tq); #c1(RAPGEF5) c2(XP_011513954) c3(rap guanine nucleotide exchange factor 5 isoform X3) c4( ) c5(306376, 306377, 306378, 306379, 306380, 306381, 306382, 306383) c6( ) c7(bL, AB, eR, qb, e, rf, cz, cQ, dG, aj, amC, aY, J, fU, cys, amB, oT, MS, nH, rX, bK, bsR, he, H, xa, A, are, Y, eZ, gl, aSO, cm, qa, bAh, ac, fP, dy, tq); #c1(RAPH1) c2(NP_976241) c3(ras-associated and pleckstrin homology domains-containing protein 1 isoform 3) c4( ) c5(263058, 263059, 263060, 263061, 263062, 263063, 263064, 263065, 263066, 263067, 263068, 263069) c6( ) c7(T, dA, aw, jh, bX, eW, zn, F, zK, aT, aW, eH, Io, zL, eF, zM, zJ, bE, cj, im, y, B); #c1(RAPH1) c2(NP_998754) c3(ras-associated and pleckstrin homology domains-containing protein 1 isoform 1) c4(265818, 265819, 265820, 265821) c5(265822, 265823, 265824, 265825, 265826, 265827, 265828, 265829, 265830, 265831, 265832, 265833, 265834, 265835, 265836, 265837, 265838, 265839) c6( ) c7(T, dA, aw, jh, bX, eW, zn, F, zK, aT, aW, eH, Io, zL, eF, zM, zJ, bE, cj, im, y, B); #c1(RAPH1) c2(XP_005246836) c3(ras-associated and pleckstrin homology domains-containing protein 1 isoform X1) c4(267466, 267467, 267468) c5(267469, 267470, 267471, 267472, 267473, 267474, 267475) c6( ) c7(T, dA, aw, jh, bX, eW, zn, F, zK, aT, aW, eH, Io, zL, eF, zM, zJ, bE, cj, im, y, B); #c1(RAPH1) c2(XP_011509949) c3(ras-associated and pleckstrin homology domains-containing protein 1 isoform X2) c4(300545, 300546, 300547) c5(300548, 300549, 300550, 300551, 300552, 300553, 300554, 300555, 300556, 300557, 300558, 300559, 300560, 300561, 300562, 300563) c6( ) c7(T, dA, aw, jh, bX, eW, zn, F, zK, aT, aW, eH, Io, zL, eF, zM, zJ, bE, cj, im, y, B); #c1(RAPH1) c2(XP_011509950) c3(ras-associated and pleckstrin homology domains-containing protein 1 isoform X3) c4(300564, 300565) c5(300566, 300567, 300568, 300569, 300570, 300571, 300572, 300573, 300574, 300575, 300576, 300577, 300578, 300579, 300580, 300581) c6( ) c7(T, dA, aw, jh, bX, eW, zn, F, zK, aT, aW, eH, Io, zL, eF, zM, zJ, bE, cj, im, y, B); #c1(RAPH1) c2(XP_011509951) c3(ras-associated and pleckstrin homology domains-containing protein 1 isoform X4) c4( ) c5(300582, 300583, 300584, 300585, 300586, 300587, 300588, 300589, 300590, 300591, 300592) c6( ) c7(T, dA, aw, jh, bX, eW, zn, F, zK, aT, aW, eH, Io, zL, eF, zM, zJ, bE, cj, im, y, B); #c1(RAPSN) c2(NP_005046) c3(43 kDa receptor-associated protein of the synapse isoform 1) c4(152433) c5(152434, 152435, 152436, 152437, 152438, 152439) c6( ) c7(xA, aOf, aOi, oj, aDx, cyt); #c1(RAPSN) c2(NP_116034) c3(43 kDa receptor-associated protein of the synapse isoform 2) c4(225259) c5(225260, 225261, 225262, 225263, 225264, 225265) c6( ) c7(xA, aOf, aOi, oj, aDx, cyt); #c1(RARA) c2(NP_001019980) c3(retinoic acid receptor alpha isoform 2) c4(27986, 27987) c5(27988, 27989, 27990, 27991, 27992, 27993, 27994, 27995, 27996, 27997, 27998, 27999) c6( ) c7(T, if, aI, bB, ci, x, Na, K, hu, aW, g, eF, cm, bw, qJ, iT, eM, iA, dc, uJ, k, m, uL, wu, My, ht, by, n, ct, qN, br, hn, on, pi, wC, aq, CQ, mo, bP, cA, hk, Be, hL, B, fM, fZ, aA, v, er, DK, aT, dz, Nc, bK, jj, ae, af, iU, Y, baP, en, cl, t, bN, ck, c, np, bt, jh, css, bS, oH, hF, ad, av, wm, BN, et, ff, eH, aF, Z, iR, bz, es, bE, aVv, dX, y, kS); #c1(RARA) c2(NP_001138774) c3(retinoic acid receptor alpha isoform 4) c4(57649) c5(57650, 57651, 57652, 57653, 57654, 57655, 57656, 57657, 57658, 57659, 57660, 57661) c6( ) c7(T, if, aI, bB, ci, x, Na, K, hu, aW, g, eF, cm, bw, qJ, iT, eM, iA, dc, uJ, k, m, uL, wu, My, ht, by, n, ct, qN, br, hn, on, pi, wC, aq, CQ, mo, bP, cA, hk, Be, hL, B, fM, fZ, aA, v, er, DK, aT, dz, Nc, bK, jj, ae, af, iU, Y, baP, en, cl, t, bN, ck, c, np, bt, jh, css, bS, oH, hF, ad, av, wm, BN, et, ff, eH, aF, Z, iR, bz, es, bE, aVv, dX, y, kS); #c1(RARA) c2(XP_005257609) c3(retinoic acid receptor alpha isoform X3) c4(275299, 275300) c5(275301, 275302, 275303, 275304, 275305, 275306) c6( ) c7(T, if, aI, bB, ci, x, Na, K, hu, aW, g, eF, cm, bw, qJ, iT, eM, iA, dc, uJ, k, m, uL, wu, My, ht, by, n, ct, qN, br, hn, on, pi, wC, aq, CQ, mo, bP, cA, hk, Be, hL, B, fM, fZ, aA, v, er, DK, aT, dz, Nc, bK, jj, ae, af, iU, Y, baP, en, cl, t, bN, ck, c, np, bt, jh, css, bS, oH, hF, ad, av, wm, BN, et, ff, eH, aF, Z, iR, bz, es, bE, aVv, dX, y, kS); #c1(RARA) c2(XP_005257610) c3(retinoic acid receptor alpha isoform X1) c4(275307) c5(275308, 275309, 275310, 275311, 275312, 275313, 275314, 275315, 275316, 275317, 275318) c6( ) c7(T, if, aI, bB, ci, x, Na, K, hu, aW, g, eF, cm, bw, qJ, iT, eM, iA, dc, uJ, k, m, uL, wu, My, ht, by, n, ct, qN, br, hn, on, pi, wC, aq, CQ, mo, bP, cA, hk, Be, hL, B, fM, fZ, aA, v, er, DK, aT, dz, Nc, bK, jj, ae, af, iU, Y, baP, en, cl, t, bN, ck, c, np, bt, jh, css, bS, oH, hF, ad, av, wm, BN, et, ff, eH, aF, Z, iR, bz, es, bE, aVv, dX, y, kS); #c1(RARB) c2(NP_000956) c3(retinoic acid receptor beta isoform 1) c4(17686) c5(17687, 17688, 17689, 17690, 17691, 17692, 17693) c6( ) c7(G, T, iH, Dd, My, ht, aI, if, aA, bB, n, hy, v, it, ci, qN, fr, eA, ad, hX, dP, av, avp, ft, hd, lg, QJ, ds, pX, rC, aT, FN, dL, jj, hu, oi, MO, ae, af, eL, pi, wC, B, kj, s, cvs, nO, aW, Y, ff, Rr, gl, aq, aF, CQ, en, cl, g, t, cm, bz, iK, iP, oU, ck, dS, bF, Dy, eM, nB, bE, eD, cyu, bkv, wk, Be, hL, pg, m, zl, kS, X, VB, cn); #c1(RARB) c2(NP_001277145) c3(retinoic acid receptor beta isoform 3) c4(109141, 109142) c5(109143, 109144, 109145, 109146, 109147, 109148, 109149, 109150, 109151, 109152, 109153, 109154) c6( ) c7(G, T, iH, Dd, My, ht, aI, if, aA, bB, n, hy, v, it, ci, qN, fr, eA, ad, hX, dP, av, avp, ft, hd, lg, QJ, ds, pX, rC, aT, FN, dL, jj, hu, oi, MO, ae, af, eL, pi, wC, B, kj, s, cvs, nO, aW, Y, ff, Rr, gl, aq, aF, CQ, en, cl, g, t, cm, bz, iK, iP, oU, ck, dS, bF, Dy, eM, nB, bE, eD, cyu, bkv, wk, Be, hL, pg, m, zl, kS, X, VB, cn); #c1(RARB) c2(NP_001277195) c3(retinoic acid receptor beta isoform 4) c4( ) c5(109222, 109223) c6( ) c7(G, T, iH, Dd, My, ht, aI, if, aA, bB, n, hy, v, it, ci, qN, fr, eA, ad, hX, dP, av, avp, ft, hd, lg, QJ, ds, pX, rC, aT, FN, dL, jj, hu, oi, MO, ae, af, eL, pi, wC, B, kj, s, cvs, nO, aW, Y, ff, Rr, gl, aq, aF, CQ, en, cl, g, t, cm, bz, iK, iP, oU, ck, dS, bF, Dy, eM, nB, bE, eD, cyu, bkv, wk, Be, hL, pg, m, zl, kS, X, VB, cn); #c1(RARB) c2(NP_001277205) c3(retinoic acid receptor beta isoform 2) c4(109224) c5(109225, 109226, 109227, 109228, 109229, 109230, 109231, 109232) c6( ) c7(G, T, iH, Dd, My, ht, aI, if, aA, bB, n, hy, v, it, ci, gN, fr, eA, ad, hX, dP, av, avp, ft, hd, lg, QJ, ds, pX, rC, aT, FN, dL, jj, hu, oi, MO, ae, af, eL, pi, wC, B, kj, s, cvs, nO, aW, Y, ff, Rr, gl, aq, aF, CQ, en, cl, g, t, cm, bz, iK, iP, oU, ck, dS, bF, Dy, eM, nB, bE, eD, cyu, bkv, wk, Be, hL, pg, m, zl, kS, X, VB, cn); #c1(RARG) c2(NP_001036193) c3(retinoic acid receptor gamma isoform 2) c4(34047) c5(34048, 34049, 34050, 34051, 34052, 34053, 34054, 34055) c6( ) c7(nZ, G, T, fM, aC, aI, Hn, Na, jz, aT, jj, af, wC, aW, Y, ff, CQ, en, g, cm, iK, ck, m, bt, B); #c1(RARG) c2(NP_001230660) c3(retinoic acid receptor gamma isoform 5) c4( ) c5(86513, 86514, 86515, 86516, 86517, 86518) c6( ) c7(nZ, G, T, fM, aC, aI, Hn, Na, jz, aT, jj, af, wC, aW, Y, ff, CQ, en, g, cm, iK, ck, m, bt, B); #c1(RARG) c2(NP_001230661) c3(retinoic acid receptor gamma isoform 3) c4(86519) c5(86520, 86521, 86522, 86523, 86524, 86525) c6( ) c7(nZ, G, T, fM, aC, aI, Hn, Na, jz, aT, jj, af, wC, aW, Y, ff, CQ, en, g, cm, iK, ck, m, bt, B); #c1(RARG) c2(XP_005269112) c3(retinoic acid receptor gamma isoform X3) c4(282325, 282326, 282327) c5(282328, 282329, 282330) c6( ) c7(nZ, G, T, fM, aC, aI, Hn, Na, jz, aT, jj, af, wC, aW, Y, ff, CQ, en, g, cm, iK, ck, m, bt, B); #c1(RARG) c2(XP_005269114) c3(retinoic acid receptor gamma isoform X1) c4( ) c5(282331, 282332, 282333, 282334, 282335, 282336, 282337, 282338) c6( ) c7(nZ, G, T, fM, aC, aI, Hn, Na, jz, aT, jj, af, wC, aW, Y, ff, CQ, en, g, cm, iK, ck, m, bt, B); #c1(RARG) c2(XP_011536930) c3(retinoic acid receptor gamma isoform X2) c4( ) c5(334598, 334599, 334600, 334601, 334602) c6( ) c7(nZ, G, T, fM, aC, aI, Hn, Na, jz, aT, jj, af, wC, aW, Y, ff, CQ, en, g, cm, iK, ck, m, bt, B); #c1(RARRES1) c2(NP_002879) c3(retinoic acid receptor responder protein 1 isoform 2 precursor) c4(133115) c5(133116, 133117, 133118, 133119, 133120, 133121) c6( ) c7(ck, bF, T, jz, IU, MD, bE, aW, ff, cr, aA, bB, it, ci, en, cl, ae, B, ad); #c1(RARRES1) c2(NP_996846) c3(retinoic acid receptor responder protein 1 isoform 1 precursor) c4(264755) c5(264756, 264757, 264758, 264759, 264760) c6( ) c7(ck, bF, T, jz, IU, MD, bE, aW, ff, cr, aA, bB, it, ci, en, cl, ae, B, ad); #c1(RARRES1) c2(XP_005247743) c3(retinoic acid receptor responder protein 1 isoform X1) c4( ) c5(267956) c6( ) c7(ck, bF, T, jz, IU, MD, bE, aW, ff, cr, aA, bB, it, ci, en, cl, ae, B, ad); #c1(RARRES2) c2(NP_002880) c3(retinoic acid receptor responder protein 2 precursor) c4(133122) c5(133123, 133124, 133125, 133126, 133127, 133128, 133129, 133130, 133131, 133132, 133133, 133134, 133135, 133136) c6( ) c7(bL, dD, kl, cW, aZ, Y, e, dh, ea, cr, cz, fe, mf, j, ci, v, ei, eq, ZN, ai, y); #c1(RARRES3) c2(NP_004576) c3(retinoic acid receptor responder protein 3) c4(147836, 147837) c5(147838, 147839, 147840, 147841, 147842, 147843, 147844, 147845, 147846, 147847, 147848, 147849) c6( ) c7(Dw, T, yk, if, jx, aA, ci, EA, qN, q, er, eW, hX, F, hb, Dq, ds, aT, cU, aAn, h, hn, ey, K, IQ, afu, A, d, aW, bes, Y, ff, apn, cr, eZ, aiT, Io, kp, aF, CQ, en, g, iV, t, iK, awi, Bv, Jr, NL, hc, AH, Ug, aiM, cj, m, y, B); #c1(RARS) c2(NP_002878) c3(arginine-tRNA ligase, cytoplasmic) c4(133101, 133102) c5(133103, 133104, 133105, 133106, 133107, 133108, 133109, 133110, 133111, 133112, 133113, 133114) c6( ) c7(ck, T, yo, pc, Js, cyv, kz, oW, cj, kD, pg, dz, dW, CE, ey, UR, bw, ht, Jo); #c1(RARS2) c2(NP_064716) c3(probable arginine-tRNA ligase, mitochondrial precursor) c4(203542, 203543, 203544) c5(203545, 203546, 203547, 203548, 203549, 203550, 203551) c6( ) c7(yr, boQ, hb, awN, cyv, aM, ha, px, UR, bgR, bcT); #c1(RARS2) c2(XP_011534251) c3(probable arginine-tRNA ligase, mitochondrial isoform X3) c4( ) c5(330609, 330610, 330611, 330612, 330613, 330614, 330615, 330616, 330617, 330618, 330619) c6( ) c7(yr, boQ, hb, awN, cyv, aM, ha, px, UR, bgR, bcT); #c1(RASA1) c2(NP_002881) c3(ras GTPase-activating protein 1 isoform 1) c4(133137, 133138, 133139) c5(133140, 133141, 133142, 133143, 133144, 133145, 133146, 133147, 133148, 133149, 133150, 133151, 133152, 133153, 133154, 133155, 133156, 133157) c6( ) c7(cyw, T, jv, hI, Uc, WA, cz, KO, kv, fr, ci, nA, zP, Cd, Cb, q, ad, Fc, UE, aHj, iu, aE, Db, kl, afQ, aFy, aT, hD, dz, dL, hP, K, ey, zy, ae, cjs, eL, Ck, cxV, cyx, zQ, iU, Ub, et, aW, eZ, r, as, bQ, eE, cM, bz, uC, dr, es, Ew, cyy, eM, nB, bE, Iq, k, bt, B, afH); #c1(RASA1) c2(NP_072179) c3(ras GTPase-activating protein 1 isoform 2) c4(212784) c5(212785, 212786, 212787, 212788, 212789, 212790) c6( ) c7(cyw, T, jv, hI, Uc, WA, cz, KO, kv, fr, ci, nA, zP, Cd, Cb, q, ad, Fc, UE, aHj, iu, aE, Db, kl, afQ, aFy, aT, hD, dz, dL, hP, K, ey, zy, ae, cjs, eL, Ck, cxV, cyx, zQ, iU, Ub, et, aW, eZ, r, as, bQ, eE, cM, bz, uC, dr, es, Ew, cyy, eM, nB, bE, Iq, k, bt, B, afH); #c1(RASA1) c2(XP_011541827) c3(ras GTPase-activating protein 1 isoform X1) c4(340394) c5( ) c6( ) c7(cyw, T, jv, hI, Uc, WA, cz, KO, kv, fr, ci, nA, zP, Cd, Cb, q, ad, Fc, UE, aHj, iu, aE, Db, kl, afQ, aFy, aT, hD, dz, dL, hP, K, ey, zy, ae, cjs, eL, Ck, cxV, cyx, zQ, iU, Ub, et, aW, eZ, r, as, bQ, eE, cM, bz, uC, dr, es, Ew, cyy, eM, nB, bE, Iq, k, bt, B, afH); #c1(RASA1) c2(XP_011541828) c3(ras GTPase-activating protein 1 isoform X2) c4( ) c5(340395, 340396, 340397, 340398, 340399, 340400) c6( ) c7(cyw, T, jv, hI, Uc, WA, cz, KD, kv, fr, ci, nA, zP, Cd, Cb, q, ad, Fc, UE, aHj, iu, aE, Db, kl, afQ, aFy, aT, hD, dz, dL, hP, K, ey, zy, ae, cjs, eL, Ck, cxV, cyx, zQ, iU, Ub, et, aW, eZ, r, as, bQ, eE, cM, bz, uC, dr, es, Ew, cyy, eM, nB, bE, Iq, k, bt, B, afH); #c1(RASA2) c2(NP_001290174) c3(ras GTPase-activating protein 2 isoform 2) c4(115053, 115054) c5(115055, 115056, 115057, 115058, 115059, 115060, 115061) c6( ) c7(T, Ub, bE, r, bt, ae, q, ad, dS); #c1(RASA2) c2(NP_006497) c3(ras GTPase-activating protein 2 isoform 3) c4(165728) c5(165729, 165730, 165731, 165732, 165733, 165734) c6( ) c7(T, Ub, bE, r, bt, ae, q, ad, dS); #c1(RASA2) c2(XP_011511362) c3(ras GTPase-activating protein 2 isoform X2) c4( ) c5(301932, 301933, 301934, 301935, 301936) c6( ) c7(T, Ub, bE, r, bt, ae, q, ad, dS); #c1(RASAL1) c2(NP_001180449) c3(rasGAP-activating-like protein 1 isoform 1) c4(74103) c5(74104, 74105, 74106, 74107, 74108, 74109) c6( ) c7(qJ, fU, hd, nM, s, nB, X, r, aA, bj, aF, dy, q, g, B); #c1(RASAL1) c2(NP_001180450) c3(rasGAP-activating-like protein 1 isoform 3) c4(74110) c5(74111, 74112, 74113, 74114, 74115, 74116) c6( ) c7(qJ, fU, hd, nM, s, nB, X, r, aA, bj, aF, dy, q, g, B); #c1(RASAL1) c2(NP_004649) c3(rasGAP-activating-like protein 1 isoform 2) c4(148509) c5(148510, 148511, 148512, 148513, 148514, 148515) c6( ) c7(qJ, fU, hd, nM, s, nB, X, r, aA, bj, aF, dy, q, g, B); #c1(RASAL2) c2(NP_004832) c3(ras GTPase-activating protein nGAP isoform 1) c4(150144) c5(150145, 150146, 150147, 150148, 150149, 150150) c6( ) c7(bL, bM, aW, aT, aA, n, v, aF, fq, X); #c1(RASAL2) c2(NP_733793) c3(ras GTPase-activating protein nGAP isoform 2) c4(247120) c5(247121, 247122, 247123, 247124, 247125, 247126) c6( ) c7(bL, bM, aW, aT, aA, n, v, aF, fq, X); #c1(RASAL2) c2(XP_005245679) c3(ras GTPase-activating protein nGAP isoform X5) c4(266882) c5(266883, 266884, 266885, 266886, 266887, 266888) c6( ) c7(bL, bM, aW, aT, aA, n, v, aF, fq, X); #c1(RASAL2) c2(XP_011508468) c3(ras GTPase-activating protein nGAP isoform X1) c4( ) c5(299188, 299189, 299190, 299191, 299192) c6( ) c7(bL, bM, aW, aT, aA, n, v, aF, fq, X); #c1(RASAL2) c2(XP_011508469) c3(ras GTPase-activating protein nGAP isoform X2) c4(299193) c5(299194, 299195, 299196, 299197, 299198, 299199) c6( ) c7(bL, bM, aW, aT, aA, n, v, aF, fq, X); #c1(RASAL2) c2(XP_011508471) c3(ras GTPase-activating protein nGAP isoform X4) c4(299200) c5( ) c6( ) c7(bL, bM, aW, aT, aA, n, v, aF, fq, X); #c1(RASD1) c2(NP_001186918) c3(dexamethasone-induced Ras-related protein 1 isoform 2) c4(78818) c5(78819, 78820, 78821, 78822, 78823) c6( ) c7(bL, Ez, aW, apI, mg, aT, fd, Ex, wR, aj, J, ad); #c1(RASD1) c2(NP_057168) c3(dexamethasone-induced Ras-related protein 1 isoform 1 proprotein) c4(189274) c5(189275, 189276, 189277, 189278, 189279, 189280, 189281) c6( ) c7(bL, Ez, aW, apI, mg, aT, fd, Ex, wR, aj, J, ad); #c1(RASD2) c2(NP_055125) c3(GTP-binding protein Rhes) c4(179105) c5(179106, 179107, 179108, 179109, 179110, 179111) c6( ) c7(eV, Fo, rR, eX); #c1(RASEF) c2(NP_689786) c3(ras and EF-hand domain-containing protein) c4(243953, 243954) c5(243955, 243956, 243957, 243958, 243959, 243960) c6( ) c7(T, Dy, iU, Y, aw, aT, bz, iP); #c1(RASEF) c2(XP_005251787) c3(ras and EF-hand domain-containing protein isoform X1) c4( ) c5(271190, 271191, 271192, 271193, 271194, 271195) c6( ) c7(T, Dy, iU, Y, aw, aT, bz, iP); #c1(RASGEF1A) c2(NP_001269791) c3(ras-GEF domain-containing family member 1A isoform 1) c4(102818) c5(102819, 102820, 102821, 102822, 102823, 102824, 102825) c6( ) c7(V, ahI, ad); #c1(RASGEF1A) c2(NP_660356) c3(ras-GEF domain-containing family member 1A isoform 2) c4(241068) c5(241069, 241070, 241071, 241072, 241073, 241074, 241075, 241076, 241077) c6( ) c7(V, ahI, ad); #c1(RASGEF1C) c2(NP_778232) c3(ras-GEF domain-containing family member 1C) c4(251462) c5(251463, 251464, 251465, 251466, 251467, 251468, 251469, 251470, 251471, 251472) c6( ) c7(cd); #c1(RASGRF1) c2(NP_001139120) c3(ras-specific guanine nucleotide-releasing factor 1 isoform 3) c4(58725) c5(58726, 58727, 58728, 58729, 58730, 58731) c6( ) c7(bM, T, dD, yS, Dl, ea, ha, EQ, aA, jh, wV, eq, q, ad, eA, afR, aE, afU, aT, bK, K, ux, ae, cC, d, aW, Y, oV, nf, aq, fe, aF, eF, t, nC, bN, cv, bF, cnj, c, eM, iT, wB, U, Be, IF, Xu, Bd, bt, B, y); #c1(RASGRF1) c2(NP_002882) c3(ras-specific guanine nucleotide-releasing factor 1 isoform 1) c4(133158, 133159) c5(133160, 133161, 133162, 133163, 133164, 133165, 133166, 133167, 133168, 133169, 133170, 133171, 133172) c6( ) c7(bM, T, dD, yS, Dl, ea, ha, EQ, aA, jh, wV, eq, q, ad, eA, afR, aE, afU, aT, bK, K, ux, ae, cC, d, aW, Y, oV, nf, aq, fe, aF, eF, t, nC, bN, cv, bF, cnj, c, eM, iT, wB, U, Be, IF, Xu, Bd, bt, B, y); #c1(RASGRF1) c2(NP_722522) c3(ras-specific guanine nucleotide-releasing factor 1 isoform 2) c4(246794) c5(246795, 246796, 246797, 246798, 246799) c6( ) c7(bM, T, dD, yS, Dl, ea, ha, EQ, aA, jh, wV, eq, q, ad, eA, afR, aE, afU, aT, bK, K, ux, ae, cC, d, aW, Y, oV, nf, aq, fe, aF, eF, t, nC, bN, cv, bF, cnj, c, eM, iT, wB, U, Be, IF, Xu, Bd, bt, B, y); #c1(RASGRF2) c2(NP_008840) c3(ras-specific guanine nucleotide-releasing factor 2) c4(168970) c5(168971, 168972, 168973, 168974, 168975, 168976) c6( ) c7(Na, av, zQ, EQ, ci, zP, hS); #c1(RASGRP1) c2(NP_001122074) c3(RAS guanyl-releasing protein 1 isoform b) c4(46385, 46386, 46387, 46388) c5(46389, 46390, 46391, 46392, 46393, 46394) c6( ) c7(bL, dP, T, A, oe, eZ, kH, bK, k, bX, arJ, bt, y); #c1(RASGRP1) c2(NP_005730) c3(RAS guanyl-releasing protein 1 isoform a) c4(158924, 158925) c5(158926, 158927, 158928, 158929, 158930, 158931, 158932, 158933, 158934, 158935, 158936, 158937) c6( ) c7(bL, dP, T, A, oe, eZ, kH, bK, k, bX, arJ, bt, y); #c1(RASGRP2) c2(NP_001092141) c3(RAS guanyl-releasing protein 2) c4(39403, 39404) c5(39405, 39406, 39407, 39408, 39409, 39410, 39411, 39412, 39413, 39414, 39415, 39416, 39417, 39418, 39419, 39420, 39421, 39422, 39423) c6( ) c7(arJ, nD); #c1(RASGRP2) c2(XP_005273764) c3(RAS guanyl-releasing protein 2 isoform X2) c4( ) c5(284827) c6( ) c7(arJ, nD); #c1(RASGRP2) c2(XP_011543021) c3(RAS guanyl-releasing protein 2 isoform X1) c4( ) c5(341727) c6( ) c7(arJ, nD); #c1(RASGRP2) c2(XP_011543025) c3(RAS guanyl-releasing protein 2 isoform X3) c4(341728) c5(341729, 341730, 341731, 341732, 341733, 341734) c6( ) c7(arJ, nD); #c1(RASGRP3) c2(NP_056191) c3(ras guanyl-releasing protein 3 isoform 2) c4(186220, 186221) c5(186222, 186223, 186224, 186225, 186226, 186227, 186228, 186229, 186230, 186231, 186232, 186233, 186234, 186235, 186236, 186237, 186238, 186239, 186240, 186241, 186242, 186243, 186244, 186245, 186246, 186247, 186248, 186249, 186250, 186251, 186252) c6( ) c7(gh, T, qt, aW, Y, oe, oV, eZ, aT, cz, ae, B, ad); #c1(RASGRP3) c2(XP_011531049) c3(ras guanyl-releasing protein 3 isoform X1) c4(327010, 327011, 327012, 327013, 327014) c5(327015, 327016, 327017, 327018, 327019, 327020, 327021, 327022, 327023, 327024, 327025, 327026, 327027, 327028, 327029) c6( ) c7(gh, T, qt, aW, Y, oe, oV, eZ, aT, cz, ae, B, ad); #c1(RASGRP4) c2(NP_001139674) c3(RAS guanyl-releasing protein 4 isoform b) c4(59660) c5(59661, 59662, 59663, 59664, 59665, 59666) c6( ) c7(bM, apG, ahg, j, bt, Tc); #c1(RASGRP4) c2(NP_001139675) c3(RAS guanyl-releasing protein 4 isoform c) c4(59667) c5(59668, 59669, 59670, 59671, 59672, 59673) c6( ) c7(bM, apG, ahg, j, bt, Tc); #c1(RASGRP4) c2(NP_001139676) c3(RAS guanyl-releasing protein 4 isoform d) c4(59674) c5(59675, 59676, 59677, 59678, 59679, 59680) c6( ) c7(bM, apG, ahg, j, bt, Tc); #c1(RASGRP4) c2(NP_001139678) c3(RAS guanyl-releasing protein 4 isoform f) c4(59681) c5(59682, 59683, 59684, 59685, 59686, 59687) c6( ) c7(bM, apG, ahg, j, bt, Tc); #c1(RASGRP4) c2(NP_001139679) c3(RAS guanyl-releasing protein 4 isoform g) c4(59688) c5(59689, 59690, 59691, 59692, 59693, 59694) c6( ) c7(bM, apG, ahg, j, bt, Tc); #c1(RASGRP4) c2(NP_733749) c3(RAS guanyl-releasing protein 4 isoform a) c4(246927, 246928) c5(246929, 246930, 246931, 246932, 246933, 246934, 246935, 246936, 246937, 246938, 246939, 246940) c6( ) c7(bM, apG, ahg, j, bt, Tc); #c1(RASIP1) c2(NP_060275) c3(ras-interacting protein 1) c4(195167) c5(195168, 195169, 195170, 195171, 195172, 195173) c6( ) c7(MV, btY, e, bK, M); #c1(RASIP1) c2(XP_011525357) c3(ras-interacting protein 1 isoform X3) c4( ) c5(319818) c6( ) c7(MV, btY, e, bK, M); #c1(RASL10A) c2(NP_006468) c3(ras-like protein family member 10A precursor) c4(165424, 165425) c5(165426, 165427, 165428, 165429, 165430, 165431, 165432, 165433, 165434, 165435, 165436, 165437) c6( ) c7(T, d, eA); #c1(RASL10B) c2(NP_201572) c3(ras-like protein family member 10B precursor) c4(228272) c5(228273, 228274, 228275, 228276, 228277, 228278) c6( ) c7(kl, aw); #c1(RASL11A) c2(NP_996563) c3(ras-like protein family member 11A) c4(264333) c5(264334, 264335, 264336, 264337, 264338, 264339) c6( ) c7(dP, ad, EQ); #c1(RASL11B) c2(NP_076429) c3(ras-like protein family member 11B) c4(214149) c5(214150, 214151, 214152, 214153, 214154, 214155) c6( ) c7(ea); #c1(RASL12) c2(NP_057647) c3(ras-like protein family member 12) c4(192034, 192035) c5(192036, 192037, 192038, 192039, 192040, 192041, 192042, 192043, 192044, 192045, 192046, 192047) c6( ) c7(aLS, bJq, abW, Ft, nP); #c1(RASSF1) c2(NP_001193886) c3(ras association domain-containing protein 1 isoform B) c4( ) c5(83052, 83053, 83054, 83055, 83056) c6( ) c7(T, abY, fR, hV, if, aI, WV, eb, fd, ci, ip, x, aE, pX, Qk, iv, K, aDZ, hu, MO, eL, aa, Ii, xQ, yo, zQ, Jl, aW, Ls, Qm, g, as, eF, cm, bw, Qt, iP, qJ, eM, nB, iA, go, iS, cX, k, m, zX, aAz, Or, ht, n, fr, qN, rP, biS, Bl, ft, jz, blp, eV, By, dL, Dz, KV, dx, Yl, MD, AQ, hQ, ahJ, aq, fe, mo, Ld, Ye, iO, Qy, bP, asI, dB, Pl, hL, anx, Pr, B, it, cn, jv, dA, WT, eX, aA, aHc, AO, q, er, eA, hW, aAF, BJ, aT, yu, aAD, Tj, ae, amw, jf, iF, s, nO, Y, Lf, r, aJl, eS, en, bu, cl, t, apx, iK, sS, nM, kP, Dy, au, WU, bt, VB, hS, vi, Mb, id, jh, KO, oH, iJ, ad, hX, iC, av, hd, fX, ib, py, ajk, vJ, io, vc, aNR, fb, pq, WW, d, BO, ff, aeV, aoW, aF, iV, iR, bz, YR, bF, es, gk, amS, Ew, Ny, hE, iu, jr); #c1(RASSF1) c2(NP_009113) c3(ras association domain-containing protein 1 isoform A) c4(170784) c5(170785, 170786, 170787, 170788, 170789, 170790) c6( ) c7(T, abY, fR, hV, if, aI, WV, eb, fd, ci, ip, x, aE, pX, Qk, iv, K, aDZ, hu, MO, eL, aa, Ii, xQ, yo, zQ, Jl, aW, Ls, Qm, g, as, eF, cm, bw, Qt, iP, qJ, eM, nB, iA, go, iS, cX, k, m, zX, aAz, Or, ht, n, fr, qN, rP, biS, Bl, ft, jz, blp, eV, By, dL, Dz, KV, dx, Yl, MD, AQ, hQ, ahJ, aq, fe, mo, Ld, Ye, iO, Qy, bP, asI, dB, Pl, hL, anx, Pr, B, it, cn, jv, dA, WT, eX, aA, aHc, AO, q, er, eA, hW, aAF, BJ, aT, yu, aAD, Tj, ae, amw, jf, iF, s, nO, Y, Lf, r, aJl, eS, en, bu, cl, t, apx, iK, sS, nM, kP, Dy, au, WU, bt, VB, hS, vi, Mb, id, jh, KO, oH, iJ, ad, hX, iC, av, hd, fX, ib, py, ajk, vJ, io, vc, aNR, fb, pq, WW, d, BO, ff, aeV, aoW, aF, iV, iR, bz, YR, bF, es, gk, amS, Ew, Ny, hE, iu, jr); #c1(RASSF1) c2(NP_733832) c3(ras association domain-containing protein 1 isoform 0) c4(247218) c5(247219, 247220, 247221, 247222, 247223, 247224, 247225) c6( ) c7(T, abY, fR, hV, if, aI, WV, eb, fd, ci, ip, x, aE, pX, Qk, iv, K, aDZ, hu, MO, eL, aa, Ii, xQ, yo, zQ, Jl, aW, Ls, Qm, g, as, eF, cm, bw, Qt, iP, qJ, eM, nB, iA, go, iS, cX, k, m, zX, aAz, Or, ht, n, fr, qN, rP, biS, Bl, ft, jz, blp, eV, By, dL, Dz, KV, dx, Yl, MD, AQ, hQ, ahJ, aq, fe, mo, Ld, Ye, iO, Qy, bP, asI, dB, Pl, hL, anx, Pr, B, it, cn, jv, dA, WT, eX, aA, aHc, AO, q, er, eA, hW, aAF, BJ, aT, yu, aAD, Tj, ae, amw, jf, iF, s, nO, Y, Lf, r, aJl, eS, en, bu, cl, t, apx, iK, sS, nM, kP, Dy, au, WU, bt, VB, hS, vi, Mb, id, jh, KO, oH, iJ, ad, hX, iC, av, hd, fX, ib, py, ajk, vJ, io, vc, aNR, fb, pq, WW, d, BO, ff, aeV, aoW, aF, iV, iR, bz, YR, bF, es, gk, amS, Ew, Ny, hE, iu, jr); #c1(RASSF1) c2(XP_011531617) c3(ras association domain-containing protein 1 isoform X1) c4(327758, 327759) c5(327760, 327761, 327762, 327763, 327764, 327765) c6( ) c7(T, abY, fR, hV, if, aI, WV, eb, fd, ci, ip, x, aE, pX, Qk, iv, K, aDZ, hu, MO, eL, aa, Ii, xQ, yo, zQ, Jl, aW, Ls, Qm, g, as, eF, cm, bw, Qt, iP, qJ, eM, nB, iA, go, iS, cX, k, m, zX, aAz, Or, ht, n, fr, qN, rP, biS, Bl, ft, jz, blp, eV, By, dL, Dz, KV, dx, Yl, MD, AQ, hQ, ahJ, ag, fe, mo, Ld, Ye, iO, Qy, bP, asI, dB, Pl, hL, anx, Pr, B, it, cn, jv, dA, WT, eX, aA, aHc, AO, q, er, eA, hW, aAF, BJ, aT, yu, aAD, Tj, ae, amw, jf, iF, s, nO, Y, Lf, r, aJl, eS, en, bu, cl, t, apx, iK, sS, nM, kP, Dy, au, WU, bt, VB, hS, vi, Mb, id, jh, KO, oH, iJ, ad, hX, iC, av, hd, fX, ib, py, ajk, vJ, io, vc, aNR, fb, pq, WW, d, BO, ff, aeV, aoW, aF, iV, iR, bz, YR, bF, es, gk, amS, Ew, Ny, hE, iu, jr); #c1(RASSF2) c2(NP_055552) c3(ras association domain-containing protein 2) c4(181903) c5(181904, 181905, 181906, 181907, 181908, 181909, 181910, 181911, 181912, 181913) c6( ) c7(T, AS, sw, if, WT, aA, ci, qN, q, av, hd, aE, aT, ey, dx, s, Y, ff, r, aF, en, t, bz, eM, nB, gX, WU, AN, cn); #c1(RASSF3) c2(NP_835463) c3(ras association domain-containing protein 3) c4(253513) c5(253514, 253515, 253516, 253517, 253518, 253519, 253520, 253521, 253522, 253523, 253524) c6( ) c7(T, OG, eM, aW, r, aT, j, eA, g, cm, iK, bz, q); #c1(RASSF3) c2(XP_011536498) c3(ras association domain-containing protein 3 isoform X3) c4(333859) c5(333860, 333861, 333862, 333863, 333864) c6( ) c7(T, OG, eM, aW, r, aT, j, eA, g, cm, iK, bz, q); #c1(RASSF4) c2(NP_114412) c3(ras association domain-containing protein 4) c4(222635, 222636, 222637) c5(222638, 222639, 222640, 222641, 222642, 222643, 222644, 222645, 222646, 222647, 222648, 222649, 222650, 222651, 222652, 222653, 222654, 222655, 222656, 222657, 222658, 222659, 222660) c6( ) c7(af, eA, Xu); #c1(RASSF4) c2(XP_005271890) c3(ras association domain-containing protein 4 isoform X5) c4(283614, 283615, 283616) c5(283617, 283618, 283619, 283620, 283621, 283622, 283623, 283624, 283625, 283626, 283627, 283628, 283629) c6( ) c7(af, eA, Xu); #c1(RASSF4) c2(XP_006718077) c3(ras association domain-containing protein 4 isoform X4) c4(291497) c5(291498, 291499, 291500, 291501, 291502, 291503) c6( ) c7(af, eA, Xu); #c1(RASSF4) c2(XP_011538557) c3(ras association domain-containing protein 4 isoform X8) c4( ) c5(336314) c6( ) c7(af, eA, Xu); #c1(RASSF5) c2(NP_872604) c3(ras association domain-containing protein 5 isoform A) c4(256490, 256491, 256492) c5(256493, 256494, 256495, 256496, 256497, 256498, 256499, 256500, 256501, 256502, 256503, 256504, 256505, 256506, 256507, 256508, 256509, 256510) c6( ) c7(T, Tb, fr, ci, q, eA, av, hd, py, aT, K, nO, aW, eZ, r, aq, g, as, cm, iK, bz, qJ, OG, eM, nB, anx, B); #c1(RASSF5) c2(NP_872605) c3(ras association domain-containing protein 5 isoform B) c4(256511) c5(256512, 256513, 256514, 256515, 256516, 256517) c6( ) c7(T, Tb, fr, ci, q, eA, av, hd, py, aT, K, nO, aW, eZ, r, aq, g, as, cm, iK, bz, qJ, OG, eM, nB, anx, B); #c1(RASSF5) c2(NP_872606) c3(ras association domain-containing protein 5 isoform C) c4(256518) c5(256519, 256520, 256521, 256522, 256523, 256524) c6( ) c7(T, Tb, fr, ci, q, eA, av, hd, py, aT, K, nO, aW, eZ, r, aq, g, as, cm, iK, bz, qJ, OG, eM, nB, anx, B); #c1(RASSF6) c2(NP_001257320) c3(ras association domain-containing protein 6 isoform c) c4( ) c5(95132, 95133, 95134, 95135, 95136) c6( ) c7(ck, T, aA, n, aF, cm, fq, ao); #c1(RASSF6) c2(NP_001257321) c3(ras association domain-containing protein 6 isoform d) c4(95137) c5(95138, 95139, 95140, 95141, 95142, 95143) c6( ) c7(ck, T, aA, n, aF, cm, fq, ao); #c1(RASSF6) c2(NP_958834) c3(ras association domain-containing protein 6 isoform b) c4(262229) c5(262230, 262231, 262232, 262233, 262234, 262235, 262236) c6( ) c7(ck, T, aA, n, aF, cm, fq, ao); #c1(RASSF6) c2(XP_011529990) c3(ras association domain-containing protein 6 isoform X1) c4(325805) c5(325806, 325807, 325808, 325809, 325810) c6( ) c7(ck, T, aA, n, aF, cm, fq, ao); #c1(RASSF6) c2(XP_011529991) c3(ras association domain-containing protein 6 isoform X3) c4(325811) c5(325812) c6( ) c7(ck, T, aA, n, aF, cm, fq, ao); #c1(RASSF7) c2(NP_001137465) c3(ras association domain-containing protein 7 isoform 2) c4(55871) c5(55872, 55873, 55874, 55875, 55876, 55877, 55878, 55879) c6( ) c7(T, pY, ko, q, er, av, aT, iv, dL, bK, eL, A, aW, Y, ff, r, aq, en, t, cm, bz, bN, ck, nB, dB, m, bt); #c1(RASSF7) c2(NP_001137466) c3(ras association domain-containing protein 7 isoform 3) c4(55880) c5(55881, 55882, 55883, 55884, 55885, 55886, 55887, 55888, 55889, 55890) c6( ) c7(T, pY, ko, q, er, av, aT, iv, dL, bK, eL, A, aW, Y, ff, r, aq, en, t, cm, bz, bN, ck, nB, dB, m, bt); #c1(RASSF7) c2(NP_003466) c3(ras association domain-containing protein 7 isoform 1) c4(138562) c5(138563, 138564, 138565, 138566, 138567, 138568, 138569, 138570) c6( ) c7(T, pY, ko, q, er, av, aT, iv, dL, bK, eL, A, aW, Y, ff, r, aq, en, t, cm, bz, bN, ck, nB, dB, m, bt); #c1(RASSF7) c2(XP_005253204) c3(ras association domain-containing protein 7 isoform X1) c4( ) c5(272281) c6( ) c7(T, pY, ko, q, er, av, aT, iv, dL, bK, eL, A, aW, Y, ff, r, aq, en, t, cm, bz, bN, ck, nB, dB, m, bt); #c1(RASSF7) c2(XP_005253205) c3(ras association domain-containing protein 7 isoform X2) c4( ) c5(272282, 272283, 272284) c6( ) c7(T, pY, ko, q, er, av, aT, iv, dL, bK, eL, A, aW, Y, ff, r, aq, en, t, cm, bz, bN, ck, nB, dB, m, bt); #c1(RASSF7) c2(XP_005253206) c3(ras association domain-containing protein 7 isoform X3) c4( ) c5(272285) c6( ) c7(T, pY, ko, q, er, av, aT, iv, dL, bK, eL, A, aW, Y, ff, r, aq, en, t, cm, bz, bN, ck, nB, dB, m, bt); #c1(RASSF7) c2(XP_006718401) c3(ras association domain-containing protein 7 isoform X6) c4(291823) c5( ) c6( ) c7(T, pY, ko, q, er, av, aT, iv, dL, bK, eL, A, aW, Y, ff, r, aq, en, t, cm, bz, bN, ck, nB, dB, m, bt); #c1(RASSF7) c2(XP_006725207) c3(ras association domain-containing protein 7 isoform X7) c4( ) c5(296718) c6( ) c7(T, pY, ko, q, er, av, aT, iv, dL, bK, eL, A, aW, Y, ff, r, aq, en, t, cm, bz, bN, ck, nB, dB, m, bt); #c1(RASSF7) c2(XP_011518690) c3(ras association domain-containing protein 7 isoform X4) c4( ) c5(313077) c6( ) c7(T, pY, ko, q, er, av, aT, iv, dL, bK, eL, A, aW, Y, ff, r, aq, en, t, cm, bz, bN, ck, nB, dB, m, bt); #c1(RASSF8) c2(NP_001158219) c3(ras association domain-containing protein 8 isoform a) c4(63416, 63417) c5(63418, 63419, 63420, 63421, 63422, 63423, 63424, 63425, 63426, 63427, 63428, 63429, 63430, 63431, 63432, 63433, 63434, 63435) c6( ) c7(av, ft, aHC, g, bz, fq, iu); #c1(RASSF8) c2(NP_009142) c3(ras association domain-containing protein 8 isoform b) c4(171069, 171070, 171071, 171072, 171073, 171074, 171075) c5(171076, 171077, 171078, 171079, 171080, 171081, 171082, 171083, 171084, 171085, 171086, 171087, 171088, 171089, 171090, 171091, 171092, 171093, 171094, 171095, 171096, 171097, 171098, 171099, 171100, 171101, 171102, 171103, 171104, 171105, 171106, 171107, 171108, 171109, 171110, 171111, 171112, 171113, 171114, 171115, 171116, 171117, 171118, 171119, 171120, 171121, 171122, 171123) c6( ) c7(av, ft, aHC, g, bz, fq, iu); #c1(RAX) c2(NP_038463) c3(retinal homeobox protein Rx) c4(176533, 176534) c5(176535, 176536, 176537, 176538, 176539, 176540, 176541, 176542, 176543, 176544, 176545, 176546, 176547, 176548) c6( ) c7(kn, kj, cyz, Y, bYC, Az, Io, K, afu); #c1(RAX2) c2(NP_116142) c3(retina and anterior neural fold homeobox protein 2) c4( ) c5(225480, 225481, 225482, 225483, 225484) c6( ) c7(cyB, nw, cyA); #c1(RAX2) c2(XP_005259719) c3(retina and anterior neural fold homeobox protein 2 isoform X1) c4(276247, 276248, 276249) c5(276250, 276251, 276252, 276253, 276254, 276255, 276256, 276257, 276258, 276259, 276260, 276261, 276262, 276263) c6( ) c7(cyB, nw, cyA); #c1(RB1) c2(NP_000312) c3(retinoblastoma-associated protein) c4(6942, 6943, 6944) c5(6945, 6946, 6947, 6948, 6949, 6950, 6951, 6952, 6953, 6954, 6955, 6956, 6957, 6958, 6959, 6960, 6961, 6962) c6( ) c7(G, T, aC, fR, hV, ea, if, aI, WV, fd, bB, ci, YD, ip, x, bv, aE, pX, Qk, avA, SV, iv, hu, eL, aJE, xQ, eG, yo, zQ, aW, g, as, eF, cm, bw, eY, eM, nB, AM, iA, iT, aep, cj, zv, k, m, Xu, dD, aEj, wu, ht, qy, n, fr, qN, zP, cde, Bl, ft, zf, By, dL, ey, Dz, YT, dx, Yl, AQ, kp, Hu, Qy, YE, bP, dB, hk, hL, hj, hR, E, MW, it, B, cn, fM, jp, jx, aA, hy, v, bZP, q, er, eA, XX, mj, Yn, Ig, hW, qK, aT, aHs, jj, an, ae, af, eu, jf, qw, s, vT, iU, Y, r, en, cl, t, ck, QG, iM, au, aor, cdb, bt, On, Gl, kh, nI, id, eP, ow, aD, iW, jh, Hn, bnS, Fb, eq, hF, iJ, ad, dP, av, bog, hP, wm, iL, d, BN, je, qt, ff, wc, eH, aF, bz, dr, bF, es, gk, amS, bE, bC, y, kS); #c1(RB1) c2(XP_011533473) c3(retinoblastoma-associated protein isoform X1) c4( ) c5(329581) c6( ) c7(G, T, aC, fR, hV, ea, if, aI, WV, fd, bB, ci, YD, ip, x, bv, aE, pX, Qk, avA, SV, iv, hu, eL, aJE, xQ, eG, yo, zQ, aW, g, as, eF, cm, bw, eY, eM, nB, AM, iA, iT, aep, cj, zv, k, m, Xu, dD, aEj, wu, ht, qy, n, fr, qN, zP, cde, Bl, ft, zf, By, dL, ey, Dz, YT, dx, Yl, AQ, kp, Hu, Qy, YE, bP, dB, hk, hL, hj, hR, E, MW, it, B, cn, fM, jp, jx, aA, hy, v, bZP, q, er, eA, XX, mj, Yn, Ig, hW, qK, aT, aHs, jj, an, ae, af, eu, jf, qw, s, vT, iU, Y, r, en, cl, t, ck, QG, iM, au, aor, cdb, bt, On, Gl, kh, nI, id, eP, ow, aD, iW, jh, Hn, bnS, Fb, eq, hF, iJ, ad, dP, av, bog, hP, wm, iL, d, BN, je, qt, ff, wc, eH, aF, bz, dr, bF, es, gk, amS, bE, bC, y, kS); #c1(RB1CC1) c2(NP_001077086) c3(RB1-inducible coiled-coil protein 1 isoform 2) c4(37715) c5(37716, 37717, 37718, 37719, 37720, 37721, 37722, 37723, 37724, 37725) c6( ) c7(bF, T, d, bP, aW, eH, aT, at, dL, K, im, eF, ae, X, ad); #c1(RB1CC1) c2(NP_055596) c3(RB1-inducible coiled-coil protein 1 isoform 1) c4(182160, 182161, 182162) c5(182163, 182164, 182165, 182166, 182167, 182168, 182169, 182170, 182171, 182172, 182173, 182174) c6(182175, 182176) c7(bF, T, d, bP, aW, eH, aT, at, dL, K, im, eF, ae, X, ad); #c1(RB1CC1) c2(XP_011515947) c3(RB1-inducible coiled-coil protein 1 isoform X3) c4(309088) c5(309089) c6( ) c7(bF, T, d, bP, aW, eH, aT, at, dL, K, im, eF, ae, X, ad); #c1(RB1CC1) c2(XP_011515950) c3(RB1-inducible coiled-coil protein 1 isoform X6) c4(309090) c5( ) c6( ) c7(bF, T, d, bP, aW, eH, aT, at, dL, K, im, eF, ae, X, ad); #c1(RB1CC1) c2(XP_011515951) c3(RB1-inducible coiled-coil protein 1 isoform X7) c4( ) c5(309091, 309092) c6( ) c7(bF, T, d, bP, aW, eH, aT, at, dL, K, im, eF, ae, X, ad); #c1(RBAK) c2(NP_066986) c3(RB-associated KRAB zinc finger protein) c4(208025, 208026) c5(208027, 208028, 208029, 208030, 208031, 208032, 208033, 208034, 208035, 208036, 208037, 208038, 208039, 208040, 208041, 208042) c6( ) c7(Ea, oe, agv, fq); #c1(RBBP5) c2(NP_001180201) c3(retinoblastoma-binding protein 5 isoform 2) c4(73370) c5(73371, 73372, 73373, 73374, 73375, 73376) c6( ) c7(d, ac); #c1(RBBP5) c2(NP_005048) c3(retinoblastoma-binding protein 5 isoform 1) c4(152440) c5(152441, 152442, 152443, 152444, 152445, 152446, 152447) c6( ) c7(d, ac); #c1(RBBP6) c2(NP_008841) c3(E3 ubiquitin-protein ligase RBBP6 isoform 1) c4(168977, 168978) c5( ) c6( ) c7(av, T, eW, ac, bP, iE, bE, aW, ff, ht, aT, bB, aj, ci, en, hu, g, bz, eA, J); #c1(RBBP6) c2(NP_061173) c3(E3 ubiquitin-protein ligase RBBP6 isoform 2) c4(199754) c5(199755, 199756, 199757, 199758, 199759, 199760) c6( ) c7(av, T, eW, ac, bP, iE, bE, aW, ff, ht, aT, bB, aj, ci, en, hu, g, bz, eA, J); #c1(RBBP6) c2(NP_116015) c3(E3 ubiquitin-protein ligase RBBP6 isoform 3) c4(225213) c5(225214, 225215, 225216, 225217, 225218, 225219) c6( ) c7(av, T, eW, ac, bP, iE, bE, aW, ff, ht, aT, bB, aj, ci, en, hu, g, bz, eA, J); #c1(RBBP6) c2(XP_005255519) c3(E3 ubiquitin-protein ligase RBBP6 isoform X2) c4( ) c5(273700, 273701, 273702, 273703, 273704, 273705, 273706, 273707, 273708, 273709, 273710, 273711) c6( ) c7(av, T, eW, ac, bP, iE, bE, aW, ff, ht, aT, bB, aj, ci, en, hu, g, bz, eA, J); #c1(RBBP7) c2(NP_001185648) c3(histone-binding protein RBBP7 isoform 1) c4(76023) c5(76024, 76025, 76026, 76027, 76028, 76029) c6( ) c7(bP, dB, aW, aT, nf, ci, K, er); #c1(RBBP7) c2(NP_002884) c3(histone-binding protein RBBP7 isoform 2) c4(133180, 133181) c5(133182, 133183, 133184, 133185, 133186, 133187, 133188, 133189, 133190, 133191, 133192, 133193) c6( ) c7(bP, dB, aW, aT, nf, ci, K, er); #c1(RBBP8) c2(NP_976037) c3(DNA endonuclease RBBP8 isoform b) c4(262851, 262852) c5(262853, 262854, 262855, 262856, 262857, 262858, 262859, 262860, 262861, 262862, 262863, 262864) c6( ) c7(T, aC, fR, ci, iJ, q, ad, aE, aT, dL, K, ae, eL, aW, WE, r, g, cyC, t, aQd, bP, coK, m, us, ahZ); #c1(RBBP8) c2(XP_005258383) c3(DNA endonuclease RBBP8 isoform X3) c4( ) c5(275641) c6( ) c7(T, aC, fR, ci, iJ, q, ad, aE, aT, dL, K, ae, eL, aW, WE, r, g, cyC, t, aQd, bP, coK, m, us, ahZ); #c1(RBBP8) c2(XP_006722584) c3(DNA endonuclease RBBP8 isoform X1) c4(294739, 294740) c5(294741, 294742, 294743, 294744, 294745, 294746, 294747, 294748, 294749, 294750, 294751, 294752, 294753, 294754, 294755, 294756) c6( ) c7(T, aC, fR, ci, iJ, q, ad, aE, aT, dL, K, ae, eL, aW, WE, r, g, cyC, t, aQd, bP, coK, m, us, ahZ); #c1(RBBP9) c2(NP_006597) c3(putative hydrolase RBBP9) c4(166513, 166514) c5(166515, 166516, 166517, 166518, 166519, 166520, 166521, 166522, 166523, 166524, 166525, 166526, 166527) c6( ) c7(bP, ci); #c1(RBCK1) c2(NP_006453) c3(ranBP-type and C3HC4-type zinc finger-containing protein 1 isoform 1) c4(165347) c5(165348, 165349, 165350, 165351, 165352, 165353) c6( ) c7(cc, yQ, aW, oj, aT, cbL); #c1(RBCK1) c2(NP_112506) c3(ranBP-type and C3HC4-type zinc finger-containing protein 1 isoform 2) c4(221284, 221285, 221286, 221287) c5(221288, 221289, 221290, 221291, 221292, 221293, 221294, 221295, 221296, 221297, 221298, 221299, 221300, 221301, 221302, 221303, 221304, 221305, 221306, 221307, 221308, 221309, 221310, 221311, 221312, 221313, 221314, 221315) c6( ) c7(cc, yQ, aW, oj, aT, cbL); #c1(RBCK1) c2(XP_011527440) c3(ranBP-type and C3HC4-type zinc finger-containing protein 1 isoform X2) c4(322185) c5(322186, 322187, 322188, 322189, 322190, 322191) c6( ) c7(cc, yQ, aW, oj, aT, cbL); #c1(RBCK1) c2(XP_011527441) c3(ranBP-type and C3HC4-type zinc finger-containing protein 1 isoform X4) c4(322192) c5( ) c6( ) c7(cc, yQ, aW, oj, aT, cbL); #c1(RBCK1) c2(XP_011527442) c3(ranBP-type and C3HC4-type zinc finger-containing protein 1 isoform X5) c4( ) c5(322193, 322194, 322195, 322196, 322197, 322198) c6( ) c7(cc, yQ, aW, oj, aT, cbL); #c1(RBFOX1) c2(NP_001135805) c3(RNA binding protein fox-1 homolog 1 isoform 5) c4(53288) c5(53289, 53290, 53291, 53292, 53293, 53294) c6( ) c7(Cq, rq, c, af, rz, Gp, wL, ha, r, akf, fe, avI, rs, j, bK, rx, v, aDm, Bd, q, bN); #c1(RBFOX1) c2(NP_001135806) c3(RNA binding protein fox-1 homolog 1 isoform 4) c4(53295) c5(53296, 53297, 53298, 53299, 53300, 53301, 53302, 53303, 53304, 53305, 53306, 53307, 53308, 53309) c6( ) c7(Cq, rq, c, af, rz, Gp, wL, ha, r, akf, fe, avI, rs, j, bK, rx, v, aDm, Bd, q, bN); #c1(RBFOX1) c2(NP_665898) c3(RNA binding protein fox-1 homolog 1 isoform 1) c4(241925) c5(241926, 241927, 241928, 241929, 241930, 241931) c6( ) c7(Cq, rq, c, af, rz, Gp, wL, ha, r, akf, fe, avI, rs, j, bK, rx, v, aDm, Bd, q, bN); #c1(RBFOX1) c2(NP_665899) c3(RNA binding protein fox-1 homolog 1 isoform 2) c4(241932) c5(241933, 241934, 241935, 241936, 241937, 241938) c6( ) c7(Cq, rq, c, af, rz, Gp, wL, ha, r, akf, fe, avI, rs, j, bK, rx, v, aDm, Bd, q, bN); #c1(RBFOX1) c2(NP_665900) c3(RNA binding protein fox-1 homolog 1 isoform 3) c4( ) c5(241939, 241940, 241941, 241942, 241943, 241944) c6( ) c7(Cq, rq, c, af, rz, Gp, wL, ha, r, akf, fe, avI, rs, j, bK, rx, v, aDm, Bd, q, bN); #c1(RBFOX1) c2(XP_005255436) c3(RNA binding protein fox-1 homolog 1 isoform X2) c4(273657) c5(273658, 273659, 273660, 273661, 273662, 273663) c6( ) c7(Cq, rq, c, af, rz, Gp, wL, ha, r, akf, fe, avI, rs, j, bK, rx, v, aDm, Bd, q, bN); #c1(RBFOX1) c2(XP_005255444) c3(RNA binding protein fox-1 homolog 1 isoform X10) c4(273664) c5( ) c6( ) c7(Cq, rq, c, af, rz, Gp, wL, ha, r, akf, fe, avI, rs, j, bK, rx, v, aDm, Bd, q, bN); #c1(RBFOX1) c2(XP_005255451) c3(RNA binding protein fox-1 homolog 1 isoform X17) c4(273665) c5(273666, 273667, 273668, 273669, 273670, 273671) c6( ) c7(Cq, rq, c, af, rz, Gp, wL, ha, r, akf, fe, avI, rs, j, bK, rx, v, aDm, Bd, q, bN); #c1(RBFOX1) c2(XP_011520848) c3(RNA binding protein fox-1 homolog 1 isoform X14) c4(315831) c5(315832, 315833, 315834, 315835, 315836, 315837) c6( ) c7(Cq, rq, c, af, rz, Gp, wL, ha, r, akf, fe, avI, rs, j, bK, rx, v, aDm, Bd, q, bN); #c1(RBFOX2) c2(NP_001026865) c3(RNA binding protein fox-1 homolog 2 isoform 1) c4(29678) c5(29679, 29680, 29681, 29682, 29683, 29684) c6( ) c7(T, eR, zs, ha, bB, lR, nA, ad, fU, Tl, qK, aT, h, ajT, aW, aq, Io, yq, iR, akf, t, bz, pb, ck, bE, NL, m, bt); #c1(RBFOX2) c2(NP_001076045) c3(RNA binding protein fox-1 homolog 2 isoform 3) c4(37343, 37344) c5(37345, 37346, 37347, 37348, 37349, 37350, 37351, 37352, 37353, 37354, 37355, 37356) c6( ) c7(T, eR, zs, ha, bB, lR, nA, ad, fU, Tl, qK, aT, h, ajT, aW, aq, Io, yq, iR, akf, t, bz, pb, ck, bE, NL, m, bt); #c1(RBFOX2) c2(NP_001076046) c3(RNA binding protein fox-1 homolog 2 isoform 4) c4(37357) c5(37358, 37359, 37360, 37361, 37362, 37363, 37364, 37365, 37366, 37367, 37368, 37369) c6( ) c7(T, eR, zs, ha, bB, lR, nA, ad, fU, Tl, qK, aT, h, ajT, aW, aq, Io, yq, iR, akf, t, bz, pb, ck, bE, NL, m, bt); #c1(RBFOX2) c2(NP_001076047) c3(RNA binding protein fox-1 homolog 2 isoform 5) c4(37370) c5(37371, 37372, 37373, 37374, 37375, 37376) c6( ) c7(T, eR, zs, ha, bB, lR, nA, ad, fU, Tl, qK, aT, h, ajT, aW, aq, Io, yq, iR, akf, t, bz, pb, ck, bE, NL, m, bt); #c1(RBFOX2) c2(NP_055124) c3(RNA binding protein fox-1 homolog 2 isoform 2) c4(179098) c5(179099, 179100, 179101, 179102, 179103, 179104) c6( ) c7(T, eR, zs, ha, bB, lR, nA, ad, fU, Tl, qK, aT, h, ajT, aW, aq, Io, yq, iR, akf, t, bz, pb, ck, bE, NL, m, bt); #c1(RBFOX2) c2(XP_005261486) c3(RNA binding protein fox-1 homolog 2 isoform X4) c4(277375, 277376) c5(277377, 277378, 277379, 277380, 277381, 277382, 277383, 277384, 277385, 277386, 277387, 277388) c6( ) c7(T, eR, zs, ha, bB, lR, nA, ad, fU, Tl, qK, aT, h, ajT, aW, aq, Io, yq, iR, akf, t, bz, pb, ck, bE, NL, m, bt); #c1(RBFOX2) c2(XP_005261488) c3(RNA binding protein fox-1 homolog 2 isoform X7) c4(277389) c5(277390, 277391, 277392, 277393, 277394, 277395) c6( ) c7(T, eR, zs, ha, bB, lR, nA, ad, fU, Tl, qK, aT, h, ajT, aW, aq, Io, yq, iR, akf, t, bz, pb, ck, bE, NL, m, bt); #c1(RBFOX2) c2(XP_005261492) c3(RNA binding protein fox-1 homolog 2 isoform X15) c4(277396) c5( ) c6( ) c7(T, eR, zs, ha, bB, lR, nA, ad, fU, Tl, qK, aT, h, ajT, aW, aq, Io, yq, iR, akf, t, bz, pb, ck, bE, NL, m, bt); #c1(RBFOX2) c2(XP_006724252) c3(RNA binding protein fox-1 homolog 2 isoform X11) c4(295881) c5(295882, 295883, 295884, 295885, 295886, 295887) c6( ) c7(T, eR, zs, ha, bB, lR, nA, ad, fU, Tl, qK, aT, h, ajT, aW, aq, Io, yq, iR, akf, t, bz, pb, ck, bE, NL, m, bt); #c1(RBFOX3) c2(NP_001076044) c3(RNA binding protein fox-1 homolog 3) c4(37332) c5(37333, 37334, 37335, 37336, 37337, 37338, 37339, 37340, 37341, 37342) c6( ) c7(rR, c, ha, eZ, Lp, cy, avI, Kh, K, fL, an, akf, on, mC); #c1(RBL1) c2(NP_002886) c3(retinoblastoma-like protein 1 isoform a) c4(133194) c5(133195, 133196, 133197, 133198, 133199, 133200, 133201) c6( ) c7(ae, T, ft, av, bP, s, Db, aW, if, aT, n, ci, qN, cl, t, bz, ad); #c1(RBL1) c2(NP_899662) c3(retinoblastoma-like protein 1 isoform b) c4(258089) c5(258090, 258091, 258092, 258093, 258094, 258095) c6( ) c7(ae, T, ft, av, bP, s, Db, aW, if, aT, n, ci, qN, cl, t, bz, ad); #c1(RBL2) c2(XP_005256140) c3(retinoblastoma-like protein 2 isoform X2) c4(274004) c5(274005, 274006, 274007, 274008, 274009, 274010, 274011) c6( ) c7(T, if, iW, jh, aA, n, ci, qN, q, ad, eA, av, ft, ib, Ig, aT, pk, ae, af, aJE, d, aW, ff, eH, r, hQ, aF, en, cl, eF, t, cm, bz, bP, eD, hL, cj, m, it, B, L); #c1(RBL2) c2(XP_011521554) c3(retinoblastoma-like protein 2 isoform X1) c4(316251) c5(316252, 316253, 316254, 316255, 316256, 316257, 316258) c6( ) c7(T, if, iW, jh, aA, n, ci, qN, q, ad, eA, av, ft, ib, Ig, aT, pk, ae, af, aJE, d, aW, ff, eH, r, hQ, aF, en, cl, eF, t, cm, bz, bP, eD, hL, cj, m, it, B, L); #c1(RBL2) c2(XP_011521555) c3(retinoblastoma-like protein 2 isoform X3) c4(316259, 316260) c5(316261, 316262, 316263, 316264, 316265, 316266, 316267, 316268, 316269, 316270, 316271) c6( ) c7(T, if, iW, jh, aA, n, ci, qN, q, ad, eA, av, ft, ib, Ig, aT, pk, ae, af, aJE, d, aW, ff, eH, r, hQ, aF, en, cl, eF, t, cm, bz, bP, eD, hL, cj, m, it, B, L); #c1(RBM10) c2(NP_001191397) c3(RNA-binding protein 10 isoform 5) c4( ) c5(81496) c6( ) c7(Na, T, aW, aT, bz, cyD); #c1(RBM10) c2(NP_005667) c3(RNA-binding protein 10 isoform 1) c4(158379) c5(158380, 158381, 158382, 158383, 158384) c6( ) c7(Na, T, aW, aT, bz, cyD); #c1(RBM10) c2(NP_690595) c3(RNA-binding protein 10 isoform 2) c4(244884) c5(244885, 244886, 244887, 244888, 244889) c6( ) c7(Na, T, aW, aT, bz, cyD); #c1(RBM10) c2(XP_005272735) c3(RNA-binding protein 10 isoform X2) c4(284168) c5(284169, 284170, 284171, 284172, 284173, 284174) c6( ) c7(Na, T, aW, aT, bz, cyD); #c1(RBM10) c2(XP_005272736) c3(RNA-binding protein 10 isoform X3) c4( ) c5(284175) c6( ) c7(Na, T, aW, aT, bz, cyD); #c1(RBM12) c2(NP_001185769) c3(RNA-binding protein 12) c4(76252, 76253, 76254, 76255, 76256) c5(76257, 76258, 76259, 76260, 76261, 76262, 76263, 76264, 76265, 76266, 76267, 76268, 76269, 76270, 76271, 76272, 76273, 76274, 76275, 76276, 76277, 76278, 76279, 76280, 76281, 76282, 76283, 76284, 76285, 76286, 76287, 76288, 76289, 76290, 76291, 76292, 76293, 76294) c6( ) c7(PE); #c1(RBM14) c2(NP_001185765) c3(RNA-binding protein 14 isoform 2) c4(76238) c5(76239, 76240, 76241, 76242, 76243, 76244) c6( ) c7(T, cc, d, aE, eM, iA, aW, jh, aT, aA, n, aF, fr, ci, eA); #c1(RBM14) c2(NP_001185766) c3(RNA-binding protein 14 isoform 3) c4(76245) c5(76246, 76247, 76248, 76249, 76250, 76251) c6( ) c7(T, cc, d, aE, eM, iA, aW, jh, aT, aA, n, aF, fr, ci, eA); #c1(RBM14) c2(NP_006319) c3(RNA-binding protein 14 isoform 1) c4(163999) c5(164000, 164001, 164002, 164003, 164004, 164005) c6( ) c7(T, cc, d, aE, eM, iA, aW, jh, aT, aA, n, aF, fr, ci, eA); #c1(RBM14-RBM4) c2(NP_001185774) c3(RBM14-RBM4 protein isoform 1) c4(76319) c5(76320, 76321, 76322, 76323, 76324, 76325) c6( ) c7(T, cc, d, aE, eM, iA, aW, jh, aA, aT, n, aF, fr, eA); #c1(RBM14-RBM4) c2(NP_001185775) c3(RBM14-RBM4 protein isoform 2) c4(76326) c5(76327, 76328, 76329, 76330, 76331, 76332) c6( ) c7(T, cc, d, aE, eM, iA, aW, jh, aA, aT, n, aF, fr, eA); #c1(RBM15) c2(XP_011540270) c3(putative RNA-binding protein 15 isoform X2) c4(338681) c5(338682, 338683, 338684, 338685, 338686, 338687) c6( ) c7(ck, T, iU, iY, f, bt); #c1(RBM17) c2(NP_001139019) c3(splicing factor 45) c4(58625, 58626, 58627, 58628, 58629) c5(58630, 58631, 58632, 58633, 58634, 58635, 58636, 58637, 58638, 58639, 58640, 58641, 58642, 58643, 58644, 58645, 58646, 58647, 58648, 58649, 58650, 58651, 58652, 58653, 58654, 58655, 58656, 58657, 58658, 58659, 58660, 58661, 58662, 58663, 58664, 58665, 58666, 58667) c6( ) c7(T, A, kB, Kh, ci, qN); #c1(RBM20) c2(NP_001127835) c3(RNA-binding protein 20) c4(49287, 49288) c5(49289, 49290, 49291, 49292, 49293, 49294, 49295, 49296, 49297, 49298, 49299, 49300) c6( ) c7(cc, anR, oe, mx, tc, cyE, cd); #c1(RBM25) c2(XP_011535346) c3(RNA-binding protein 25 isoform X1) c4(332337, 332338, 332339, 332340, 332341) c5(332342, 332343, 332344, 332345, 332346, 332347, 332348, 332349, 332350, 332351, 332352, 332353, 332354, 332355, 332356, 332357, 332358, 332359, 332360, 332361, 332362, 332363, 332364, 332365, 332366, 332367, 332368, 332369) c6( ) c7(cd); #c1(RBM25) c2(XP_011535347) c3(RNA-binding protein 25 isoform X2) c4( ) c5(332370, 332371, 332372, 332373, 332374, 332375, 332376, 332377, 332378, 332379) c6( ) c7(cd); #c1(RBM26) c2(NP_001273561) c3(RNA-binding protein 26 isoform 2) c4(105234) c5(105235, 105236, 105237, 105238, 105239, 105240) c6( ) c7(jh); #c1(RBM26) c2(NP_071401) c3(RNA-binding protein 26 isoform 3) c4(211436) c5(211437, 211438, 211439, 211440, 211441, 211442) c6( ) c7(jh); #c1(RBM26) c2(XP_011533490) c3(RNA-binding protein 26 isoform X12) c4(329582) c5(329583, 329584, 329585, 329586, 329587, 329588) c6( ) c7(jh); #c1(RBM27) c2(NP_061862) c3(RNA-binding protein 27) c4(200840) c5(200841, 200842, 200843, 200844, 200845, 200846) c6( ) c7(aid); #c1(RBM28) c2(NP_001159607) c3(RNA-binding protein 28 isoform 2) c4(64463) c5(64464, 64465, 64466, 64467, 64468, 64469) c6( ) c7(cyF, bHF, ml); #c1(RBM28) c2(NP_060547) c3(RNA-binding protein 28 isoform 1) c4(196508) c5(196509, 196510, 196511, 196512, 196513, 196514) c6( ) c7(cyF, bHF, ml); #c1(RBM28) c2(XP_011514673) c3(RNA-binding protein 28 isoform X2) c4( ) c5(307328) c6( ) c7(cyF, bHF, ml); #c1(RBM3) c2(NP_006734) c3(RNA-binding protein 3) c4(167554) c5(167555, 167556, 167557, 167558, 167559, 167560, 167561, 167562, 167563, 167564, 167565) c6( ) c7(T, cyG, GU, aW, aT, r, n, K, ae, q, ad); #c1(RBM3) c2(XP_011542240) c3(RNA-binding protein 3 isoform X1) c4(340739, 340740) c5(340741, 340742, 340743, 340744, 340745, 340746, 340747, 340748, 340749, 340750, 340751, 340752, 340753, 340754) c6( ) c7(T, cyG, GU, aW, aT, r, n, K, ae, q, ad); #c1(RBM38) c2(NP_001278709) c3(RNA-binding protein 38 isoform c) c4(110003) c5(110004) c6( ) c7(T, aW, aw, jh, aT, K, m, t); #c1(RBM38) c2(NP_059965) c3(RNA-binding protein 38 isoform a) c4(193410, 193411) c5(193412, 193413, 193414, 193415, 193416, 193417, 193418, 193419, 193420, 193421, 193422) c6( ) c7(T, aW, aw, jh, aT, K, m, t); #c1(RBM38) c2(NP_906270) c3(RNA-binding protein 38 isoform b) c4( ) c5(258103, 258104, 258105, 258106, 258107, 258108) c6( ) c7(T, aW, aw, jh, aT, K, m, t); #c1(RBM39) c2(NP_001229528) c3(RNA-binding protein 39 isoform c) c4(84603, 84604) c5(84605, 84606, 84607, 84608, 84609, 84610, 84611, 84612, 84613, 84614, 84615, 84616) c6( ) c7(gk, T, eJ, eM, eR, aW, aI, aT, hF, bz, B, hX); #c1(RBM39) c2(NP_004893) c3(RNA-binding protein 39 isoform b) c4(150615, 150616, 150617) c5(150618, 150619, 150620, 150621, 150622, 150623, 150624, 150625, 150626, 150627, 150628, 150629) c6( ) c7(gk, T, eJ, eM, eR, aW, aI, aT, hF, bz, B, hX); #c1(RBM39) c2(NP_909122) c3(RNA-binding protein 39 isoform a) c4(258219, 258220, 258221) c5(258222, 258223, 258224, 258225, 258226, 258227, 258228) c6( ) c7(gk, T, eJ, eM, eR, aW, aI, aT, hF, bz, B, hX); #c1(RBM39) c2(XP_006723956) c3(RNA-binding protein 39 isoform X2) c4( ) c5(295574, 295575, 295576, 295577, 295578) c6( ) c7(gk, T, eJ, eM, eR, aW, aI, aT, hF, bz, B, hX); #c1(RBM39) c2(XP_011527412) c3(RNA-binding protein 39 isoform X1) c4( ) c5(322144, 322145, 322146, 322147, 322148, 322149, 322150, 322151, 322152, 322153, 322154, 322155) c6( ) c7(gk, T, eJ, eM, eR, aW, aI, aT, hF, bz, B, hX); #c1(RBM4) c2(NP_001185772) c3(RNA-binding protein 4 isoform 2) c4(76295) c5(76296, 76297, 76298, 76299, 76300, 76301, 76302, 76303, 76304, 76305, 76306, 76307, 76308, 76309, 76310, 76311) c6( ) c7(f, aW, Hx, aT); #c1(RBM4) c2(NP_001185773) c3(RNA-binding protein 4 isoform 3) c4(76312) c5(76313, 76314, 76315, 76316, 76317, 76318) c6( ) c7(f, aW, Hx, aT); #c1(RBM4) c2(NP_002887) c3(RNA-binding protein 4 isoform 1) c4(133202, 133203) c5(133204, 133205, 133206, 133207, 133208, 133209, 133210, 133211, 133212, 133213, 133214, 133215, 133216, 133217, 133218, 133219, 133220, 133221, 133222, 133223, 133224, 133225) c6( ) c7(f, aW, Hx, aT); #c1(RBM45) c2(NP_694453) c3(RNA-binding protein 45) c4(245071, 245072) c5(245073, 245074, 245075, 245076, 245077, 245078, 245079, 245080, 245081, 245082, 245083, 245084) c6( ) c7(ID, bM, T, bJN, xS, bJx, if, e, aI, fd, aeu, cL, bwS, qj, ci, bh, aFV, Jx, Jt, bJe, aY, Tz, lR, aMB, ip, NF, x, AW, xy, xE, vV, aE, bW, dV, azm, rB, K, aFk, be, azh, aEV, Jl, aW, axu, Ih, HA, hI, kt, hN, aVO, pL, bJy, bw, y, xK, Jr, Ip, ii, bIQ, mx, cj, dW, bAD, k, m, lS, abh, Ro, xN, aYZ, yG, fN, ez, n, cQ, aj, fr, uE, pM, qN, apz, qW, cd, br, ai, cde, bJf, ke, Mo, cc, KN, aMj, h, ey, aIY, nP, OV, mR, A, bJl sp, Ib, fe, ax, CQ, mo, gG, Ld, oU, ar, W, bP, lX, bbx, aZL, If, bm, awQ, bzm, eo, ase, acu, Pr, B, abW, bJp, bL, eR, jx, eX, aA, aBo, j, Vh, V, pd, eA, J, o, MK, cF, fh, akU, qp, Id, bJE, aT, vH, kU, lM, sX, Gy, ae, af, dI, aAi, aFS, kl, hM, iU, xR, Y, ayU, lC, Pg, aMA, Io, bJC, aDm, t, pb, bN, lY, ck, cT, ahN, nM, ac, iM, hA, ig, Zg, QG, mG, of, AH, uS, aYx, Da, dy, oX, fD, bt, bIu, vi, Kd, bJq, ow, aD, axd, aZU, dG, uu, jE, hF, aYs, Uy, aue, XB, BY, qC, aoH, ad, hX, F, wD, oz, Dq, ds, bJL, aIg, qh, oj, LA, dm, hD, JK, vB, ji, vO, yF, uQ, atJ, je, lR, aFE, aGS, OQ, azP, wc, cr, eZ, aF, hp, afi, iV, bz, aYt, bJt, LB, ay, gk, Bv, amS, atM, z, Rv, gy, ME, rH, bJo, oQ, ei, hE, ra, hv, pC); #c1(RBM46) c2(NP_659416) c3(probable RNA-binding protein 46 isoform 1) c4(239792) c5(239793, 239794, 239795, 239796, 239797, 239798) c6( ) c7(sj); #c1(RBM47) c2(NP_001092104) c3(RNA-binding protein 47 isoform a) c4(39377) c5(39378, 39379, 39380, 39381, 39382, 39383, 39384, 39385, 39386, 39387) c6( ) c7(aj, j); #c1(RBM47) c2(NP_061900) c3(RNA-binding protein 47 isoform b) c4(201063, 201064, 201065, 201066, 201067, 201068, 201069, 201070) c5(201071, 201072, 201073, 201074, 201075, 201076, 201077, 201078, 201079, 201080, 201081, 201082, 201083, 201084, 201085, 201086, 201087, 201088, 201089, 201090, 201091, 201092, 201093, 201094, 201095, 201096, 201097, 201098, 201099, 201100, 201101, 201102, 201103, 201104, 201105, 201106, 201107, 201108, 201109, 201110, 201111, 201112, 201113, 201114, 201115, 201116, 201117, 201118, 201119, 201120, 201121, 201122, 201123, 201124, 201125, 201126) c6( ) c7(aj, j); #c1(RBM5) c2(NP_005769) c3(RNA-binding protein 5) c4(159196, 159197, 159198, 159199) c5(159200, 159201, 159202, 159203, 159204, 159205, 159206, 159207, 159208, 159209, 159210, 159211, 159212, 159213) c6( ) c7(av, T, ft, bev, aE, eM, aW, aT, vH, ci, g, bz, iu); #c1(RBM5) c2(XP_006712980) c3(RNA-binding protein 5 isoform X1) c4(286943, 286944, 286945) c5( ) c6( ) c7(av, T, ft, bev, aE, eM, aW, aT, vH, ci, g, bz, iu); #c1(RBM5) c2(XP_006712982) c3(RNA-binding protein 5 isoform X4) c4(286946) c5(286947, 286948, 286949, 286950, 286951, 286952) c6( ) c7(av, T, ft, bev, aE, eM, aW, aT, vH, ci, g, bz, iu); #c1(RBM5) c2(XP_011531563) c3(RNA-binding protein 5 isoform X2) c4(327674) c5( ) c6( ) c7(av, T, ft, bev, aE, eM, aW, aT, vH, ci, g, bz, iu); #c1(RBM5) c2(XP_011531564) c3(RNA-binding protein 5 isoform X3) c4( ) c5(327675, 327676, 327677, 327678, 327679, 327680, 327681, 327682, 327683, 327684, 327685, 327686, 327687, 327688, 327689, 327690, 327691, 327692, 327693, 327694, 327695, 327696, 327697, 327698, 327699, 327700, 327701, 327702, 327703, 327704, 327705, 327706, 327707, 327708) c6( ) c7(av, T, ft, bev, aE, eM, aW, aT, vH, ci, g, bz, iu); #c1(RBM6) c2(NP_005768) c3(RNA-binding protein 6 isoform 1) c4(159167, 159168, 159169, 159170) c5(159171, 159172, 159173, 159174, 159175, 159176, 159177, 159178, 159179, 159180, 159181, 159182, 159183, 159184, 159185, 159186, 159187, 159188, 159189, 159190, 159191, 159192, 159193, 159194, 159195) c6( ) c7(ck, T, bev, ft, iY, v, bz); #c1(RBM6) c2(XP_005264842) c3(RNA-binding protein 6 isoform X3) c4(279269) c5(279270, 279271) c6( ) c7(ck, T, bev, ft, iY, v, bz); #c1(RBM6) c2(XP_005264845) c3(RNA-binding protein 6 isoform X1) c4( ) c5(279272, 279273, 279274, 279275, 279276, 279277, 279278, 279279, 279280, 279281, 279282, 279283, 279284, 279285) c6( ) c7(ck, T, bev, ft, iY, v, bz); #c1(RBM6) c2(XP_006712979) c3(RNA-binding protein 6 isoform X2) c4(286936, 286937) c5(286938, 286939, 286940, 286941, 286942) c6( ) c7(ck, T, bev, ft, iY, v, bz); #c1(RBM7) c2(NP_057174) c3(RNA-binding protein 7 isoform b) c4(189312) c5(189313, 189314, 189315, 189316, 189317, 189318) c6( ) c7(eM); #c1(RBMS1) c2(NP_002888) c3(RNA-binding motif, single-stranded-interacting protein 1 isoform c) c4( ) c5(133226, 133227, 133228, 133229, 133230, 133231, 133232, 133233, 133234, 133235, 133236, 133237, 133238, 133239, 133240, 133241, 133242) c6( ) c7(bL, VZ, ac, c, aI, j, C, Ze, B, asE); #c1(RBMS1) c2(NP_058520) c3(RNA-binding motif, single-stranded-interacting protein 1 isoform a) c4(192779) c5(192780, 192781, 192782, 192783, 192784, 192785) c6( ) c7(bL, VZ, ac, c, aI, j, C, Ze, B, asE); #c1(RBMS1) c2(XP_005246796) c3(RNA-binding motif, single-stranded-interacting protein 1 isoform X5) c4( ) c5(267429) c6( ) c7(bL, VZ, ac, c, aI, j, C, Ze, B, asE); #c1(RBMS1) c2(XP_005246797) c3(RNA-binding motif, single-stranded-interacting protein 1 isoform X7) c4(267430) c5(267431, 267432, 267433, 267434, 267435, 267436) c6( ) c7(bL, VZ, ac, c, aI, j, C, Ze, B, asE); #c1(RBMS1) c2(XP_006712734) c3(RNA-binding motif, single-stranded-interacting protein 1 isoform X1) c4(286818) c5( ) c6( ) c7(bL, VZ, ac, c, aI, j, C, Ze, B, asE); #c1(RBMS1) c2(XP_006712737) c3(RNA-binding motif, single-stranded-interacting protein 1 isoform X9) c4(286819) c5(286820, 286821) c6( ) c7(bL, VZ, ac, c, aI, j, C, Ze, B, asE); #c1(RBMS2) c2(NP_002889) c3(RNA-binding motif, single-stranded-interacting protein 2) c4(133243) c5(133244, 133245, 133246, 133247, 133248, 133249) c6( ) c7(c); #c1(RBMS3) c2(NP_001003792) c3(RNA-binding motif, single-stranded-interacting protein 3 isoform 3) c4(20117) c5(20118, 20119, 20120, 20121, 20122, 20123) c6( ) c7(bM, T, aC, oe, ha, jh, aA, bB, tc, aj, TM, Vd, ci, nA, lR, fr, hF, eA, aR, ad, hX, eW, av, ft, aE, WY, ds, SV, aT, kf, Ak, dV, h, K, an, brV, fb, ae, af, dx, iL, d, vT, aW, Y, ff, eZ, nf, aq, aaE, aF, Ku, en, iR, bz, pb, QA, bN, dR, ck, rR, kP, c, ac, bE, Qu, eM, dh, mx, U, aEs, rx, xh, arg, it, B); #c1(RBMS3) c2(NP_001003793) c3(RNA-binding motif, single-stranded-interacting protein 3 isoform 1) c4(20124) c5(20125, 20126, 20127, 20128, 20129, 20130) c6( ) c7(bM, T, aC, oe, ha, jh, aA, bB, tc, aj, TM, Vd, ci, nA, lR, fr, hF, eA, aR, ad, hX, eW, av, ft, aE, WY, ds, SV, aT, kf, Ak, dV, h, K, an, brV, fb, ae, af, dx, iL, d, vT, aW, Y, ff, eZ, nf, aq, aaE, aF, Ku, en, iR, bz, pb, QA, bN, dR, ck, rR, kP, c, ac, bE, Qu, eM, dh, mx, U, aEs, rx, xh, arg, it, B); #c1(RBMS3) c2(NP_001171182) c3(RNA-binding motif, single-stranded-interacting protein 3 isoform 5) c4(69992) c5(69993, 69994, 69995, 69996, 69997, 69998) c6( ) c7(bM, T, aC, oe, ha, jh, aA, bB, tc, aj, TM, Vd, ci, nA, lR, fr, hF, eA, aR, ad, hX, eW, av, ft, aE, WY, ds, SV, aT, kf, Ak, dV, h, K, an, brV, fb, ae, af, dx, iL, d, vT, aW, Y, ff, eZ, nf, aq, aaE, aF, Ku, en, iR, bz, pb, QA, bN, dR, ck, rR, kP, c, ac, bE, Qu, eM, dh, mx, U, aEs, rx, xh, arg, it, B); #c1(RBMS3) c2(NP_001171183) c3(RNA-binding motif, single-stranded-interacting protein 3 isoform 4) c4(69999, 70000) c5(70001, 70002, 70003, 70004, 70005, 70006, 70007, 70008, 70009, 70010, 70011, 70012) c6( ) c7(bM, T, aC, oe, ha, jh, aA, bB, tc, aj, TM, Vd, ci, nA, lR, fr, hF, eA, aR, ad, hX, eW, av, ft, aE, WY, ds, SV, aT, kf, Ak, dV, h, K, an, brV, fb, ae, af, dx, iL, d, vT, aW, Y, ff, eZ, nf, aq, aaE, aF, Ku, en, iR, bz, pb, QA, bN, dR, ck, rR, kP, c, ac, bE, Qu, eM, dh, mx, U, aEs, rx, xh, arg, it, B); #c1(RBMS3) c2(NP_055298) c3(RNA-binding motif, single-stranded-interacting protein 3 isoform 2) c4(180364) c5(180365, 180366, 180367, 180368, 180369, 180370) c6( ) c7(bM, T, aC, oe, ha, jh, aA, bB, tc, aj, TM, Vd, ci, nA, lR, fr, hF, eA, aR, ad, hX, eW, av, ft, aE, WY, ds, SV, aT, kf, Ak, dV, h, K, an, brV, fb, ae, af, dx, iL, d, vT, aW, Y, ff, eZ, nf, aq, aaE, aF, Ku, en, iR, bz, pb, QA, bN, dR, ck, rR, kP, c, ac, bE, Qu, eM, dh, mx, U, aEs, rx, xh, arg, it, B); #c1(RBMS3) c2(XP_005265117) c3(RNA-binding motif, single-stranded-interacting protein 3 isoform X1) c4(279434) c5(279435, 279436, 279437, 279438, 279439, 279440) c6( ) c7(bM, T, aC, oe, ha, jh, aA, bB, tc, aj, TM, Vd, ci, nA, lR, fr, hF, eA, aR, ad, hX, eW, av, ft, aE, WY, ds, SV, aT, kf, Ak, dV, h, K, an, brV, fb, ae, af, dx, iL, d, vT, aW, Y, ff, eZ, nf, aq, aaE, aF, Ku, en, iR, bz, pb, QA, bN, dR, ck, rR, kP, c, ac, bE, Qu, eM, dh, mx, U, aEs, rx, xh, arg, it, B); #c1(RBMX) c2(NP_001158275) c3(RNA-binding motif protein, X chromosome isoform 2) c4(63522, 63523) c5(63524, 63525, 63526, 63527, 63528, 63529, 63530, 63531, 63532, 63533, 63534, 63535) c6( ) c7(T, eM, ff, eZ, aT, vH, en); #c1(RBMX) c2(NP_002130) c3(RNA-binding motif protein, X chromosome isoform 1) c4(125629, 125630) c5(125631, 125632, 125633, 125634, 125635, 125636, 125637, 125638, 125639, 125640, 125641, 125642) c6( ) c7(T, eM, ff, eZ, aT, vH, en); #c1(RBMX2) c2(NP_057108) c3(RNA-binding motif protein, X-linked 2) c4(188931, 188932, 188933) c5(188934, 188935, 188936, 188937, 188938, 188939, 188940, 188941, 188942, 188943, 188944, 188945, 188946, 188947, 188948, 188949, 188950, 188951) c6( ) c7(if); #c1(RBMXL2) c2(NP_055284) c3(RNA-binding motif protein, X-linked-like-2) c4(180275) c5(180276, 180277, 180278, 180279, 180280, 180281) c6( ) c7(g0); #c1(RBMYIA1) c2(XP_011529738) c3(RNA-binding motif protein, Y chromosome, family 1 member A1 isoform X1) c4(325385) c5(325386, 325387, 325388, 325389, 325390, 325391, 325392, 325393, 325394, 325395, 325396) c6( ) c7(bM, T, aC, gU, ha, jh, aA, bB, tc, TM, Vd, ci, nA, lR, fr, hF, eA, aR, ad, hX, eW, ft, aE, WY, ds, SV, aT, kf, Ak, dV, vH, h, K, an, brV, fb, ae, af, dx, iL, yi, d, ND, vT, aW, Y, ff, cyH, eZ, nf, aq, aaE, aF, Ku, en, iR, bz, pb, QA, bN, dR, ck, rR, kP, c, eM, bE, Qu, dh, mx, U, aEs, rx, xh, arg, B); #c1(RBP1) c2(NP_001124464) c3(retinol-binding protein 1 isoform b) c4(49076) c5(49077, 49078, 49079, 49080, 49081, 49082) c6( ) c7(Mb, T, nx, jh, aA, Gn, ci, fr, aFJ, zP, eA, ad, Zp, aE, mP, aT, bbu, dL, Ex, K, ae, eL, zQ, s, aW, Y, ff, aq, en, BE, cl, t, nC, g, op, bP, nB, AM, Pl, vA, hL, m, rA, B, ao, avi); #c1(RBP1) c2(NP_001124465) c3(retinol-binding protein 1 isoform c) c4(49083) c5(49084, 49085, 49086, 49087, 49088, 49089) c6( ) c7(Mb, T, nx, jh, aA, Gn, ci, fr, aFJ, zP, eA, ad, Zp, aE, mP, aT, bbu, dL, Ex, K, ae, eL, zQ, s, aW, Y, ff, aq, en, BE, cl, t, nC, g, op, bP, nB, AM, Pl, vA, hL, m, rA, B, ao, avi); #c1(RBP1) c2(NP_002890) c3(retinol-binding protein 1 isoform a) c4(133250) c5(133251, 133252, 133253, 133254, 133255, 133256) c6( ) c7(Mb, T, nx, jh, aA, Gn, ci, fr, aFJ, zP, eA, ad, Zp, aE, mP, aT, bbu, dL, Ex, K, ae, eL, zQ, s, aW, Y, ff, aq, en, BE, cl, t, nC, g, op, bP, nB, AM, Pl, vA, hL, m, rA, B, ao, avi); #c1(RBP2) c2(NP_004155) c3(retinol-binding protein 2) c4(143933, 143934, 143935) c5(143936, 143937, 143938, 143939, 143940, 143941, 143942, 143943, 143944, 143945, 143946, 143947, 143948, 143949, 143950, 143951, 143952, 143953) c6( ) c7(jf, T, bP, eM, aW, oV, aA, aF, ci, bz, B, er); #c1(RBP3) c2(NP_002891) c3(retinol-binding protein 3 precursor) c4(133257) c5(133258, 133259, 133260, 133261, 133262, 133263) c6( ) c7(bxy, YE, lR, bP, nv, dB, vz, nx, qW, iK, vy, bru, h, cL, aPe, nw, K, nk, nC, cyI, o); #c1(RBP4) c2(NP_006735) c3(retinol-binding protein 4 precursor) c4(167566, 167567, 167568) c5(167569, 167570, 167571, 167572, 167573, 167574, 167575, 167576, 167577, 167578, 167579, 167580, 167581, 167582, 167583, 167584, 167585, 167586, 167587, 167588, 167589, 167590) c6( ) c7(bL, T, dD, aZ, ea, nx, e, uG, aT, aA, jx, if, aj, v, j, ci, eq, qN, zP, fK, J, ad, GK, cyJ, cyK, F, oW, h, jy, ae, af, kl, zQ, d, A, je, fc, Mz, dq, aq, aF, ahI, f, ctm, gk, BU, iM, aPt, c, cO, hk, dh, U, mg, vy, mf, aS, dy, ei, gT, B); #c1(RBPJ) c2(NP_005340) c3(recombining binding protein suppressor of hairless isoform 1) c4(155240, 155241, 155242, 155243, 155244) c5(155245, 155246, 155247, 155248, 155249, 155250, 155251, 155252, 155253, 155254, 155255, 155256, 155257, 155258, 155259, 155260) c6( ) c7(T, aT, aA, eA, ad, dP, bv, akN, aT, h, bj, iY, ji, ae, NM, Us, wC, d, aW, ack, aF, eF, eE, cm, dr, ck, U, cyL, y); #c1(RBPJ) c2(NP_056958) c3(recombining binding protein suppressor of hairless isoform 2) c4(188212, 188213) c5(188214, 188215, 188216, 188217, 188218, 188219) c6( ) c7(T, aT, aA, eA, ad, dP, bv, akN, aT, h, bj, iY, ji, ae, NM, Us, wC, d, aW, ack, aF, eF, eE, cm, dr, ck, U, cyL, y); #c1(RBPJ) c2(NP_976028) c3(recombining binding protein suppressor of hairless isoform 3) c4(262733) c5(262734, 262735, 262736, 262737, 262738, 262739, 262740, 262741, 262742) c6( ) c7(T, aT, aA, eA, ad, dP, bv, akN, aT, h, bj, iY, ji, ae, NM, Us, wC, d, aW, ack, aF, eF, eE, cm, dr, ck, U, cyL, y); #c1(RBPJ) c2(NP_976029) c3(recombining binding protein suppressor of hairless isoform 4) c4(262743, 262744, 262745, 262746, 262747, 262748, 262749, 262750, 262751) c5(262752, 262753, 262754, 262755, 262756, 262757, 262758, 262759, 262760, 262761, 262762, 262763, 262764, 262765, 262766, 262767, 262768, 262769, 262770, 262771, 262772, 262773, 262774, 262775, 262776, 262777, 262778, 262779, 262780, 262781, 262782, 262783, 262784, 262785, 262786, 262787, 262788, 262789, 262790, 262791, 262792, 262793, 262794, 262795, 262796, 262797, 262798, 262799, 262800, 262801, 262802, 262803, 262804, 262805, 262806, 262807, 262808, 262809, 262810, 262811, 262812, 262813, 262814, 262815) c6( ) c7(T, al, aA, eA, ad, dP, bv, akN, aT, h, bj, iY, ji, ae, NM, Us, wC, d, aW, ack, aF, eF, eE, cm, dr, ck, U, cyL, y); #c1(RBPJ) c2(XP_006714026) c3(recombining binding protein suppressor of hairless isoform X2) c4( ) c5(287495, 287496, 287497, 287498, 287499, 287500, 287501, 287502, 287503, 287504, 287505, 287506, 287507, 287508, 287509) c6( ) c7(T, aT, aA, eA, ad, dP, bv, akN, aT, h, bj, iY, ji, ae, NM, Us, wC, d, aW, ack, aF, eF, eE, cm, dr, ck, U, cyL, y); #c1(RBPMS2) c2(NP_919248) c3(RNA-binding protein with multiple splicing 2) c4(258293) c5(258294, 258295, 258296, 258297, 258298, 258299) c6( ) c7(fb, T, cyM); #c1(RBSN) c2(NP_001289307) c3(rabenosyn-5) c4(114138, 114139, 114140) c5(114141, 114142, 114143, 114144, 114145, 114146, 114147, 114148, 114149, 114150, 114151, 114152, 114153, 114154, 114155, 114156, 114157, 114158, 114159, 114160, 114161, 114162, 114163) c6( ) c7(ad); #c1(RBSN) c2(XP_011532304) c3(rabenosyn-5 isoform X4) c4(328467) c5(328468, 328469, 328470, 328471, 328472) c6( ) c7(ad); #c1(RBX1) c2(NP_055063) c3(E3 ubiquitin-protein ligase RBX1) c4(178682) c5(178683, 178684, 178685, 178686, 178687, 178688) c6( ) c7(XX, T, aW, go, aq, dL, aS, fr, iR, eL, B); #c1(RC3H1) c2(NP_001287780) c3(roquin-1 isoform c) c4(112857) c5(112858, 112859, 112860, 112861, 112862, 112863) c6( ) c7(mC, fL, eZ); #c1(RC3H1) c2(NP_742068) c3(roquin-1 isoform b) c4(247957) c5(247958, 247959, 247960, 247961, 247962, 247963, 247964, 247965, 247966, 247967) c6( ) c7(mC, fL, eZ); #c1(RCAN1) c2(NP_001272318) c3(calcipressin-1 isoform d) c4( ) c5(103985, 103986, 103987) c6( ) c7(T, dD, ea, aw, bD, bhL, eq, nA, q, md, av, anj, hd, Hx, hb, aT, cy, ji, K, af, cY, d, Y, Az, r, Ku, g, f, hq, es, rR, ac, iA, nB, AM, wO, bbA, mx, tV, cj, aS, xh, y, ao); #c1(RCAN1) c2(NP_001272320) c3(calcipressin-1 isoform e) c4(103988) c5(103989, 103990, 103991, 103992, 103993, 103994) c6( ) c7(T, dD, ea, aw, bD, bhL, eq, nA, q, md, av, anj, hd, Hx, hb, aT, cy, ji, K, af, cY, d, Y, Az, r, Ku, g, f, hq, es, rR, ac, iA, nB, AM, wO, bbA, mx, tV, cj, aS, xh, y, ao); #c1(RCAN1) c2(NP_001272322) c3(calcipressin-1 isoform b) c4( ) c5(103995, 103996, 103997, 103998, 103999, 104000, 104001, 104002, 104003, 104004, 104005) c6( ) c7(T, dD, ea, aw, bD, bhL, eq, nA, q, md, av, anj, hd, Hx, hb, aT, cy, ji, K, af, cY, d, Y, Az, r, Ku, g, f, hq, es, rR, ac, iA, nB, AM, wO, bbA, mx, tV, cj, aS, xh, y, ao); #c1(RCAN1) c2(NP_004405) c3(calcipressin-1 isoform a) c4(146147) c5(146148, 146149, 146150, 146151, 146152, 146153) c6( ) c7(T, dD, ea, aw, bD, bhL, eq, nA, q, md, av, anj, hd, Hx, hb, aT, cy, ji, K, af, cY, d, Y, Az, r, Ku, g, f, hq, es, rR, ac, iA, nB, AM, wO, bbA, mx, tV, cj, aS, xh, y, ao); #c1(RCAN1) c2(NP_981963) c3(calcipressin-1 isoform c) c4(263219, 263220) c5(263221, 263222, 263223, 263224, 263225, 263226) c6( ) c7(T, dD, ea, aw, bD, bhL, eq, nA, q, md, av, anj, hd, Hx, hb, aT, cy, ji, K, af, cY, d, Y, Az, r, Ku, g, f, hq, es, rR, ac, iA, nB, AM, wO, bbA, mx, tV, cj, aS, xh, y, ao); #c1(RCAN2) c2(NP_005813) c3(calcipressin-2 isoform 1) c4(159633) c5(159634, 159635, 159636, 159637, 159638, 159639) c6( ) c7(f, anj, HN); #c1(RCAN2) c2(XP_011512528) c3(calcipressin-2 isoform X1) c4(303170) c5(303171, 303172, 303173, 303174, 303175, 303176, 303177, 303178, 303179, 303180, 303181, 303182, 303183, 303184) c6( ) c7(f, anj, HN); #c1(RCBTB1) c2(XP_005266498) c3(RCC1 and BTB domain-containing protein 1 isoform X1) c4(280193, 280194) c5(280195, 280196, 280197, 280198, 280199, 280200, 280201, 280202, 280203, 280204, 280205, 280206, 280207, 280208, 280209, 280210) c6( ) c7(eF, bM, eH, mQ, cj); #c1(RCBTB2) c2(NP_001273759) c3(RCC1 and BTB domain-containing protein 2 isoform 1) c4(105788, 105789, 105790) c5(105791, 105792, 105793, 105794, 105795, 105796, 105797, 105798, 105799, 105800, 105801, 105802, 105803, 105804, 105805, 105806, 105807, 105808) c6( ) c7(zJ, ae, fd, ad, hj); #c1(RCBTB2) c2(NP_001273760) c3(RCC1 and BTB domain-containing protein 2 isoform 3) c4( ) c5(105809, 105810, 105811, 105812, 105813) c6( ) c7(zJ, ae, fd, ad, hj); #c1(RCBTB2) c2(NP_001273761) c3(RCC1 and BTB domain-containing protein 2 isoform 4) c4(105814) c5(105815, 105816, 105817, 105818, 105819, 105820) c6( ) c7(zJ, ae, fd, ad, hj); #c1(RCHY1) c2(NP_001009922) c3(RING finger and CHY zinc finger domain-containing protein 1 isoform 3) c4(23728) c5(23729, 23730, 23731, 23732, 23733, 23734) c6( ) c7(es, T, py, iA, aT, n, K, y, iK, ae, B, ad); #c1(RCHY1) c2(NP_056251) c3(RING finger and CHY zinc finger domain-containing protein 1 isoform 1) c4(186727, 186728, 186729) c5(186730, 186731, 186732, 186733, 186734, 186735, 186736, 186737, 186738, 186739, 186740, 186741, 186742, 186743, 186744, 186745, 186746, 186747) c6( ) c7(es, T, py, iA, aT, n, K, y, iK, ae, B, ad); #c1(RCL1) c2(NP_001273629) c3(RNA 3′-terminal phosphate cyclase-like protein isoform b) c4( ) c5(105500, 105501, 105502, 105503, 105504) c6( ) c7(agy, cd, awC, iV); #c1(RCL1) c2(NP_005763) c3(RNA 3′-terminal phosphate cyclase-like protein isoform a) c4(159146, 159147) c5(159148, 159149, 159150, 159151, 159152, 159153, 159154, 159155, 159156, 159157, 159158, 159159) c6( ) c7(agy, cd, awC, iV); #c1(RCL1) c2(XP_006716778) c3(RNA 3′-terminal phosphate cyclase-like protein isoform X2) c4(290449) c5(290450) c6( ) c7(agy, cd, awC, iV); #c1(RCL1) c2(XP_011515975) c3(RNA 3′-terminal phosphate cyclase-like protein isoform X1) c4(309128, 309129) c5(309130, 309131, 309132, 309133, 309134, 309135, 309136, 309137, 309138, 309139, 309140, 309141, 309142, 309143, 309144, 309145, 309146, 309147, 309148, 309149) c6( ) c7(agy, cd, awC, iV); #c1(RCN1) c2(NP_002892) c3(reticulocalbin-1 precursor) c4(133264, 133265) c5(133266, 133267, 133268, 133269, 133270, 133271, 133272, 133273, 133274, 133275, 133276, 133277, 133278, 133279) c6( ) c7(es, zQ, iA, aA, aF, ci, zP, ae, ad); #c1(RCN2) c2(NP_002893) c3(reticulocalbin-2 isoform a precursor) c4(133280) c5(133281, 133282, 133283, 133284, 133285, 133286) c6( ) c7(T, HN); #c1(RCOR1) c2(NP_055971) c3(REST corepressor 1) c4(184800) c5(184801, 184802, 184803, 184804, 184805, 184806, 184807, 184808, 184809, 184810, 184811, 184812) c6( ) c7(nf, ey, cdo, bz, aAe); #c1(RCSD1) c2(NP_443094) c3(capZ-interacting protein) c4(229363, 229364) c5(229365, 229366, 229367, 229368, 229369, 229370, 229371, 229372, 229373, 229374, 229375, 229376) c6( ) c7(k, bA, cz); #c1(RCSD1) c2(XP_005245662) c3(capZ-interacting protein isoform X1) c4(266869) c5(266870, 266871, 266872, 266873, 266874, 266875) c6( ) c7(k, bA, cz); #c1(RCVRN) c2(NP_002894) c3(recoverin) c4(133287) c5(133288, 133289, 133290, 133291, 133292, 133293, 133294) c6( ) c7(T, ft, lR, bP, cwx, Y, nw, K, Tp, nk, nC, oc, cyN); #c1(RD3) c2(NP_001158160) c3(protein RD3) c4(63218) c5(63219, 63220, 63221, 63222, 63223, 63224) c6( ) c7(alF, bFr, lR, c, nw, de); #c1(RDH10) c2(NP_742034) c3(retinol dehydrogenase 10) c4(247886) c5(247887, 247888, 247889, 247890, 247891, 247892) c6( ) c7(s, eM, nx, Fx, ci, V, fq, B); #c1(RDH11) c2(NP_057110) c3(retinol dehydrogenase 11 isoform 1 precursor) c4(188966, 188967) c5(188968, 188969, 188970, 188971, 188972, 188973, 188974, 188975, 188976, 188977, 188978, 188979) c6( ) c7(ae, B, ad, jh); #c1(RDH12) c2(NP_689656) c3(retinol dehydrogenase 12 precursor) c4(243493) c5(243494, 243495, 243496, 243497, 243498, 243499, 243500, 243501, 243502, 243503, 243504, 243505, 243506, 243507) c6( ) c7(xX, lR, bnP, nx, aVv, cyO, nw, K, eQ, nC, cyP, Nh); #c1(RDH14) c2(NP_065956) c3(retinol dehydrogenase 14) c4(206478) c5(206479, 206480, 206481, 206482, 206483, 206484) c6( ) c7(T, q, r); #c1(RDH16) c2(NP_003699) c3(retinol dehydrogenase 16) c4(140250) c5(140251, 140252, 140253, 140254, 140255, 140256) c6( ) c7(hL); #c1(RDH5) c2(NP_002896) c3(11-cis retinol dehydrogenase precursor) c4(133384) c5(133385, 133386, 133387, 133388, 133389, 133390, 133391, 133392, 133393, 133394) c6( ) c7(bL, cZ, cap, b, Sr, dd, lR, hI, aVu, nk, nC, ayj, bF, W, bnP, Be, NO, aSW, nw, OL, oQ, i); #c1(RDH8) c2(NP_056540) c3(retinol dehydrogenase 8) c4(188015) c5(188016, 188017, 188018, 188019, 188020, 188021) c6( ) c7(nw, Be, de); #c1(RDM1) c2(NP_001030008) c3(RAD52 motif-containing protein 1 isoform 2) c4(30823, 30824) c5(30825, 30826, 30827, 30828, 30829, 30830, 30831, 30832, 30833, 30834, 30835, 30836) c6( ) c7(bX); #c1(RDM1) c2(NP_001156592) c3(RAD52 motif-containing protein 1 isoform 3) c4(61752) c5(61753, 61754, 61755, 61756, 61757, 61758) c6( ) c7(bX); #c1(RDM1) c2(NP_001156593) c3(RAD52 motif-containing protein 1 isoform 4) c4(61759, 61760) c5(61761, 61762, 61763, 61764, 61765, 61766) c6( ) c7(bX); #c1(RDM1) c2(NP_001156594) c3(RAD52 motif-containing protein 1 isoform 5) c4( ) c5(61767, 61768, 61769, 61770, 61771, 61772) c6( ) c7(bX); #c1(RDM1) c2(NP_001156596) c3(RAD52 motif-containing protein 1 isoform 6) c4(61773) c5(61774, 61775, 61776, 61777, 61778, 61779) c6( ) c7(bX); #c1(RDM1) c2(NP_001156597) c3(RAD52 motif-containing protein 1 isoform 7) c4(61780) c5(61781, 61782, 61783, 61784, 61785, 61786) c6( ) c7(bX); #c1(RDM1) c2(NP_001156602) c3(RAD52 motif-containing protein 1 isoform 8) c4(61787) c5(61788, 61789, 61790, 61791, 61792, 61793) c6( ) c7(bX); #c1(RDM1) c2(NP_663629) c3(RAD52 motif-containing protein 1 isoform 1) c4(241368) c5(241369, 241370, 241371, 241372, 241373, 241374) c6( ) c7(bX); #c1(RDM1) c2(XP_011522812) c3(RAD52 motif-containing protein 1 isoform X2) c4(317304) c5(317305, 317306, 317307, 317308, 317309, 317310) c6( ) c7(bX); #c1(RDX) c2(NP_001247421) c3(radixin isoform 1) c4(93526, 93527) c5(93528, 93529, 93530, 93531, 93532, 93533, 93534, 93535, 93536, 93537, 93538, 93539, 93540, 93541) c6( ) c7(T, aC, aw, aA, BF, eA, ad, ip, aT, Bh, ae, be, iE, aW, cyQ, kK, hI, hC, aF, hJ, Ew, pZ, gn, ik, iu); #c1(RDX) c2(NP_001247423) c3(radixin isoform 3) c4(93542) c5(93543, 93544, 93545, 93546, 93547, 93548) c6( ) c7(T, aC, aw, aA, BF, eA, ad, ip, aT, Bh, ae, bc, iE, aW, cyQ, kK, hI, hC, aF, hJ, Ew, pZ, gn, ik, iu); #c1(RDX) c2(NP_001247424) c3(radixin isoform 4) c4(93549, 93550) c5(93551, 93552, 93553, 93554, 93555, 93556, 93557, 93558, 93559, 93560, 93561, 93562) c6( ) c7(T, aC, aw, aA, BF, eA, ad, ip, aT, Bh, ae, bc, iE, aW, cyQ, kK, hI, hC, aF, hJ, Ew, pZ, gn, ik, iu); #c1(RDX) c2(NP_001247425) c3(radixin isoform 5) c4(93563) c5(93564, 93565, 93566, 93567, 93568, 93569) c6( ) c7(T, aC, aw, aA, BF, eA, ad, ip, aT, Bh, ae, bc, iE, aW, cyQ, kK, hI, hC, aF, hJ, Ew, pZ, gn, ik, iu); #c1(RDX) c2(NP_002897) c3(radixin isoform 2) c4(133395) c5(133396, 133397, 133398, 133399, 133400, 133401, 133402, 133403, 133404, 133405, 133406, 133407) c6( ) c7(T, aC, aw, aA, BF, eA, ad, ip, aT, Bh, ae, bc, iE, aW, cyQ, kK, hI, hC, aF, hJ, Ew, pZ, gn, ik, iu); #c1(REC8) c2(NP_001041670) c3(meiotic recombination protein REC8 homolog) c4(34247, 34248, 34249) c5(34250, 34251, 34252, 34253, 34254, 34255, 34256, 34257, 34258, 34259, 34260, 34261, 34262, 34263, 34264, 34265, 34266, 34267, 34268, 34269, 34270, 34271) c6( ) c7(bD, Y, ad, ND, vH); #c1(RECK) c2(NP_066934) c3(reversion-inducing cysteine-rich protein with Kazal motifs precursor) c4(207580) c5(207581, 207582, 207583, 207584, 207585, 207586) c6( ) c7(bM, T, aC, aA, bB, n, fd, ci, qN, q, ad, eA, av, iu, jz, no, yt, aT, dL, hu, ae, eL, pI, Jj, eG, d, B, bf, aW, ff, eH, eZ, r, kp, aF, en, g, eF, t, cm, bz, c, eM, bE, gX, m, y, X, bH); #c1(RECQL) c2(XP_006719196) c3(ATP-dependent DNA helicase Q1 isoform X1) c4(292244, 292245, 292246, 292247, 292248, 292249, 292250) c5(292251, 292252, 292253, 292254, 292255, 292256, 292257, 292258, 292259, 292260, 292261, 292262, 292263, 292264, 292265, 292266, 292267, 292268, 292269, 292270, 292271, 292272, 292273, 292274, 292275, 292276, 292277, 292278, 292279, 292280, 292281, 292282, 292283, 292284, 292285, 292286, 292287, 292288, 292289, 292290, 292291, 292292, 292293, 292294, 292295, 292296) c6( ) c7(T, aC, axk, Gn, ci, eJ, aE, ey, K, ask, d, wr, hG, eH, aq, g, eF, t, iK, dr, m, rA); #c1(RECQL5) c2(NP_001003715) c3(ATP-dependent DNA helicase Q5 isoform 2) c4(20048) c5(20049, 20050, 20051, 20052, 20053, 20054) c6( ) c7(T, wr, aE, bE, QJ, eH, r, bB, Gn, K, eF, rA, q, dr); #c1(RECQL5) c2(NP_001003716) c3(ATP-dependent DNA helicase Q5 isoform 3) c4( ) c5(20055, 20056, 20057, 20058, 20059, 20060) c6( ) c7(T, wr, aE, bE, QJ, eH, r, bB, Gn, K, eF, rA, q, dr); #c1(RECQL5) c2(NP_004250) c3(ATP-dependent DNA helicase Q5 isoform 1) c4(144595, 144596) c5(144597, 144598, 144599, 144600, 144601, 144602, 144603, 144604, 144605, 144606, 144607, 144608) c6( ) c7(T, wr, aE, bE, QJ, eH, r, bB, Gn, K, eF, rA, q, dr); #c1(RECQL5) c2(XP_005257879) c3(ATP-dependent DNA helicase Q5 isoform X6) c4(275390) c5(275391, 275392, 275393, 275394, 275395, 275396) c6( ) c7(T, wr, aE, bE, QJ, eH, r, bB, Gn, K, eF, rA, q, dr); #c1(RECQL5) c2(XP_011523784) c3(ATP-dependent DNA helicase Q5 isoform X1) c4(318284) c5( ) c6( ) c7(T, wr, aE, bE, QJ, eH, r, bB, Gn, K, eF, rA, q, dr); #c1(REEP1) c2(NP_001158202) c3(receptor expression-enhancing protein 1 isoform 1) c4(63325) c5(63326, 63327, 63328, 63329, 63330, 63331) c6( ) c7(aV, cyS, cyR, dM, aN, U, ajb, vd, LK); #c1(REEP1) c2(NP_001158203) c3(receptor expression-enhancing protein 1 isoform 3) c4(63332, 63333) c5(63334, 63335, 63336, 63337, 63338, 63339, 63340, 63341, 63342, 63343, 63344, 63345) c6( ) c7(aV, cyS, cyR, dM, aN, U, ajb, vd, LK); #c1(REEP1) c2(NP_001158204) c3(receptor expression-enhancing protein 1 isoform 4) c4(63346) c5(63347, 63348, 63349, 63350, 63351, 63352) c6( ) c7(aV, cyS, cyR, dM, aN, U, ajb, vd, LK); #c1(REEP1) c2(NP_075063) c3(receptor expression-enhancing protein 1 isoform 2) c4(213632) c5(213633, 213634, 213635, 213636, 213637, 213638, 213639, 213640) c6( ) c7(aV, cyS, cyR, dM, aN, U, ajb, vd, LK); #c1(REEP2) c2(NP_001258732) c3(receptor expression-enhancing protein 2 isoform 1) c4(96436) c5(96437, 96438, 96439, 96440, 96441, 96442) c6( ) c7(aV, cyT); #c1(REEP2) c2(NP_057690) c3(receptor expression-enhancing protein 2 isoform 2) c4(192363) c5(192364, 192365, 192366, 192367, 192368, 192369) c6( ) c7(aV, cyT); #c1(REEP3) c2(NP_001001330) c3(receptor expression-enhancing protein 3) c4(18174, 18175, 18176) c5(18177, 18178, 18179, 18180, 18181, 18182, 18183, 18184, 18185, 18186, 18187, 18188, 18189, 18190, 18191, 18192, 18193, 18194) c6( ) c7(aw, bqS, bN); #c1(REEP5) c2(NP_005660) c3(receptor expression-enhancing protein 5) c4(158341, 158342) c5(158343, 158344, 158345, 158346, 158347, 158348, 158349, 158350, 158351, 158352, 158353) c6( ) c7(bF, av, T, B, ac, BO, af, e, X, ff, bO, r, jh, m, en, t, bz, q, L); #c1(REEP6) c2(NP_612402) c3(receptor expression-enhancing protein 6) c4(236392) c5(236393, 236394, 236395, 236396, 236397, 236398) c6( ) c7(bB, bE, T, fe, iV); #c1(REG1A) c2(NP_002900) c3(lithostathine-1-alpha precursor) c4(133416) c5(133417, 133418, 133419, 133420, 133421, 133422) c6( ) c7(T, yS, ci, bwZ, bJj, Ou, K, hH, eL, bc, YL, yo, Jl, aW, aoo, LZ, NR, g, as, akf, eF, cm, bw, eM, Jr, iT, U, m, lS, act, qR, ht, fN, aj, fr, ft, kH, h, aKE, Lg, afu, A, fe, aq, kp, pm, ar, iO, bP, eD, FV, eo, agy, B, bL, aA, cz, v, yO, V, q, J, eA, bza, aT, jj, aKG, ae, af, s, Y, r, lo, t, ck, iM, c, ao, Hn, dG, aNH, hF, ad, aFu, hX, av, NS, io, pq, je, bug, eH, cr, aF, hp, iV, bz, dr, aJx, es, hE, y); #c1(REG1B) c2(NP_006498) c3(lithostathine-1-beta precursor) c4(165735) c5(165736, 165737, 165738, 165739, 165740, 165741, 165742, 165743) c6(165744, 165745) c7(bL, A, fe); #c1(REG3A) c2(NP_620355) c3(regenerating islet-derived protein 3-alpha precursor) c4(237509) c5(237510, 237511, 237512, 237513, 237514, 237515, 237516, 237517, 237518, 237519, 237520, 237521, 237522, 237523, 237524, 237525, 237526, 237527, 237528, 237529) c6(237530, 237531, 237532, 237533, 237534, 237535) c7(bL, T, dA, yk, if, iW, bB, aj, v, iG, ci, qN, aY, cyU, cd, q, J, b, aE, i, aoA, bK, K, wb, af, yo, xX, d, s, Y, cr, r, aq, uF, iR, GR, ck, ar, iO, bE, wq, dT, zG, zI, B, ao); #c1(REL) c2(NP_001278675) c3(proto-oncogene c-Rel isoform 2) c4(109970) c5(109971, 109972, 109973, 109974, 109975, 109976) c6( ) c7(T, fM, iW, eX, jh, fd, ci, ai, wD, Oe, ot, aE, azq, aT, eV, dz, pq, aoX, aW, cr, eZ, lo, yq, hp, hf, eE, iV, iK, Jr, cj, aGg, y); #c1(REL) c2(NP_002899) c3(proto-oncogene c-Rel isoform 1) c4(133408) c5(133409, 133410, 133411, 133412, 133413, 133414, 133415) c6( ) c7(T, fM, iW, eX, jh, fd, ci, ai, wD, Oe, ot, aE, azq, aT, eV, dz, pq, aoX, aW, cr, eZ, lo, yq, hp, hf, eE, iV, iK, Jr, cj, aGg, y); #c1(RELA) c2(NP_001138610) c3(transcription factor p65 isoform 2) c4(57176) c5(57177, 57178, 57179, 57180, 57181, 57182) c6( ) c7(oO, bM, T, os, aC, fR, ea, if, al, bEy, eb, fd, lR, ci, bv, aE, Bc, K, xa, eG, aW, az, asD, LZ, fc, g, hJ, eE, eF, cm, bw, axG, nB, cj, m, hh, ht, aj, BF, fr, qN, qW, eW, kH, cU, lG, pi, wC, EU, gi, fe, aq, kp, cv, dB, hk, cB, B, it, bL, fM, eR, aA, cz, C, V, q, J, eA, eJ, uT, yg, aT, bq, ae, af, eu, aAi, jf, nO, Y, r, en, bu, t, f, iK, pb, ck, ov, iM, ac, c, ig, hr, EY, bt, qb, oA, oZ, dG, ah, hF, ad, XB, kL, dP, av, iC, hd, ib, yt, ds, azq, ji, vP, azR, gj, d, je, ff, xs, eZ, aF, iV, iR, DF, bF, aGg, lC, kS, X, y, brt); #c1(RELA) c2(NP_001230914) c3(transcription factor p65 isoform 4) c4( ) c5(87155, 87156, 87157, 87158, 87159, 87160, 87161, 87162, 87163, 87164, 87165, 87166, 87167, 87168, 87169, 87170, 87171, 87172, 87173, 87174, 87175, 87176) c6( ) c7(oO, bM, T, os, aC, fR, ea, if, al, bEy, eb, fd, lR, ci, bv, aE, Bc, K, xa, eG, aW, az, asD, LZ, fc, g, hJ, eE, eF, cm, bw, axG, nB, cj, m, hh, ht, aj, BF, fr, qN, qW, eW, kH, cU, lG, pi, wC, EU, gi, fe, aq, kp, cv, dB, hk, cB, B, it, bL, fM, eR, aA, cz, C, V, q, J, eA, eJ, uT, yg, aT, bq, ae, af, eu, aAi, jf, nO, Y, r, en, bu, t, f, iK, pb, ck, ov, iM, ac, c, ig, hr, EY, bt, qb, oA, oZ, dG, ah, hF, ad, XB, kL, dP, av, iC, hd, ib, yt, ds, azq, ji, vP, azR, gj, d, je, ff, xs, eZ, aF, iV, iR, DF, bF, aGg, lC, kS, X, y, brt); #c1(RELA) c2(NP_068810) c3(transcription factor p65 isoform 1) c4(210689, 210690, 210691, 210692, 210693) c5(210694, 210695, 210696, 210697, 210698, 210699) c6( ) c7(oO, bM, T, os, aC, fR, ea, if, al, bEy, eb, fd, lR, ci, bv, aE, Bc, K, xa, eG, aW, az, asD, LZ, fc, g, hJ, eE, eF, cm, bw, axG, nB, cj, m, hh, ht, aj, BF, fr, qN, qW, eW, kH, cU, lG, pi, wC, EU, gi, fe, aq, kp, cv, dB, hk, cB, B, it, bL, fM, eR, aA, cz, C, V, q, J, eA, eJ, uT, yg, aT, bq, ae, af, eu, aAi, jf, nO, Y, r, en, bu, t, f, iK, pb, ck, ov, iM, ac, c, ig, hr, EY, bt, qb, oA, oZ, dG, ah, hF, ad, XB, kL, dP, av, iC, hd, ib, yt, ds, azq, ji, vP, azR, gj, d, je, ff, xs, eZ, aF, iV, iR, DF, bF, aGg, lC, kS, X, y, brt); #c1(RELA) c2(XP_011543508) c3(transcription factor p65 isoform X1) c4( ) c5(342383) c6( ) c7(oO, bM, T, os, aC, fR, ea, if, al, bEy, eb, fd, lR, ci, bv, aE, Bc, K, xa, eG, aW, az, asD, LZ, fc, g, hJ, eE, eF, cm, bw, axG, nB, cj, m, hh, ht, aj, BF, fr, qN, qW, eW, kH, cU, lG, pi, wC, EU, gi, fe, aq, kp, cv, dB, hk, cB, B, it, bL, fM, eR, aA, cz, C, V, q, J, eA, eJ, uT, yg, aT, bq, ae, af, eu, aAi, jf, nO, Y, r, en, bu, t, f, iK, pb, ck, ov, iM, ac, c, ig, hr, EY, bt, qb, oA, oZ, dG, ah, hF, ad, XB, kL, dP, av, iC, hd, ib, yt, ds, azq, ji, vP, azR, gj, d, je, ff, xs, eZ, aF, iV, iR, DF, bF, aGg, lC, kS, X, y, brt); #c1(RELA) c2(XP_011543509) c3(transcription factor p65 isoform X2) c4( ) c5(342384) c6( ) c7(oO, bM, T, os, aC, fR, ea, if, al, bEy, eb, fd, lR, ci, bv, aE, Bc, K, xa, eG, aW, az, asD, LZ, fc, g, hJ, eE, eF, cm, bw, axG, nB, cj, m, hh, ht, aj, BF, fr, qN, qW, eW, kH, cU, lG, pi, wC, EU, gi, fe, aq, kp, cv, dB, hk, cB, B, it, bL, fM, eR, aA, cz, C, V, q, J, eA, eJ, uT, yg, aT, bq, ae, af, eu, aAi, jf, nO, Y, r, en, bu, t, f, iK, pb, ck, ov, iM, ac, c, ig, hr, EY, bt, qb, oA, oZ, dG, ah, hF, ad, XB, kL, dP, av, iC, hd, ib, yt, ds, azq, ji, vP, azR, gj, d, je, ff, xs, eZ, aF, iV, iR, DF, bF, aGg, lC, kS, X, y, brt); #c1(RELB) c2(NP_006500) c3(transcription factor RelB) c4(165746) c5(165747, 165748, 165749, 165750, 165751, 165752, 165753, 165754, 165755, 165756) c6( ) c7(y, A, aW, eE, cj, aT, Mz, fd, dy, K, aGg, C, j, eA, bl, ae, B, ad, cl); #c1(RELB) c2(XP_005259184) c3(transcription factor RelB isoform X1) c4(275967) c5(275968, 275969, 275970, 275971, 275972, 275973) c6( ) c7(y, A, aW, eE, cj, aT, Mz, fd, dy, K, aGg, C, j, eA, bl, ae, B, ad, cl); #c1(RELN) c2(NP_005036) c3(reelin isoform a precursor) c4(152326, 152327, 152328, 152329) c5(152330, 152331, 152332, 152333, 152334, 152335, 152336, 152337, 152338, 152339, 152340, 152341, 152342, 152343, 152344, 152345, 152346, 152347, 152348, 152349, 152350, 152351, 152352, 152353) c6( ) c7(nD, aC, oe, ha, aA, n, ct, il, qi, V, cyV, aE, hb, ds, aT, bK, K, hu, he, H, rz, af, Lg, cB, VX, aW, FD, hI, fQ, gI, aF, cm, bN, cA, bE, FB, gT, xg, B, L); #c1(RELN) c2(NP_774959) c3(reelin isoform b precursor) c4(249481) c5(249482, 249483, 249484, 249485, 249486, 249487) c6( ) c7(nD, aC, oe, ha, aA, n, ct, il, qi, V, cyV, aE, hb, ds, aT, bK, K, hu, he, H, rz, af, Lg, cB, VX, aW, FD, hI, fQ, gI, aF, cm, bN, cA, bE, FB, gT, xg, B, L); #c1(REM1) c2(NP_054731) c3(GTP-binding protein REM1) c4(177416) c5(177417, 177418, 177419, 177420, 177421, 177422) c6( ) c7(T, cyW, bO, Nt, aA, aj, bS, j, ct, v, bAM, Eh, J, cF, wM, M, bHp, K, he, alY, alL, az, aF, Z, hq, dR, ayt, cA, vy, uJ, FI); #c1(REN) c2(NP_000528) c3(renin preproprotein) c4(11894, 11895, 11896) c5(11897, 11898, 11899, 11900, 11901, 11902, 11903, 11904, 11905, 11906, 11907, 11908, 11909, 11910, 11911, 11912, 11913, 11914) c6( ) c7(tJ, T, UH, ahS, Fj, fV, ea, e, al, Xi, eb, MF, HS, aoM, aY, x, abH, ws, il, M, Mx, iv, Ou, K, Nj, aDZ, dQ, wt, eN, bc, hm, tw, avH, aW, Fe, hl, bbe, bWB, zC, uC, DL, GR, cyZ, mx, U, vy, wB, k, Hb, xh, fy, amz, dD, uH, bLl, wJ, aw, cQ, aj, fr, ct, ml, cd, aJr, bSq, ft, cc, do, ec, wG, qI, cty, h, jy, afV, ey, bl, he, vx, bkS, A, pm, dw, wU, sf, hq, kT, aLO, bbj, vb, FV, bo, bm, MM, tl, uz, oh, va, hR, fL, at, bD, sZ, aOo, um, bL, vQ, jv, eR, mr, DD, dK, aA, cR, tc, cz, fF, j, v, wo, sI, iI, uW, q, J, er, Mp, XD, tL, rS, aT, cy, bq, hK, Fg, ae, aqC, af, dI, bA, eu, jf, Mr, s, nO, r, wI, sV, Io, An, Mu, tR, sk, ck, tY, tW, ac, wg, hc, kQ, RW, fP, mf, cS, clP, dy, bt, LS, hS, gx, sY, dM, ha, uG, Jy, vr, bS, Jz, uu, dG, MA, eq, tK, mC, ad, fU, nH, F, MS, cyY, ib, sN, vJ, arV, ts, oW, vw, cyX, vc, vP, sj, uX, anR, d, cH, cW, xs, cr, eZ, dq, th, aF, si, Z, dr, qa, eK, pc, ag, gZ, aS, tr, ei, lC, us); #c1(RENBP) c2(NP_002901) c3(N-acylglucosamine 2-epimerase) c4(133423, 133424) c5(133425, 133426, 133427, 133428, 133429, 133430, 133431, 133432, 133433, 133434, 133435, 133436) c6( ) c7(bL, T, dD, ea, if, aw, eX, aA, cz, oR, aj, bS, dG, j, v, eq, qN, aY, J, alp, Ot, qh, oW, Ak, eV, dL, wo, K, dQ, H, eL, uX, A, d, bf, je, bvD, eZ, aq, aF, as, bSy, alj, qa, alm, BU, W, c, ac, rR, iM, mx, U, fP, vy, MW, aS, dy, yA, Lz, B); #c1(REPS1) c2(NP_001122089) c3(ralBP1-associated Eps domain-containing protein 1 isoform b) c4(46434) c5(46435, 46436, 46437, 46438, 46439, 46440) c6( ) c7(ck, ae, T, eG, aE, eM, eL, ha, aT, dL, K, bz, ad); #c1(REPS1) c2(NP_001273540) c3(ralBP1-associated Eps domain-containing protein 1 isoform c) c4(105131, 105132) c5(105133, 105134, 105135, 105136, 105137, 105138, 105139, 105140, 105141, 105142, 105143, 105144) c6( ) c7(ck, ae, T, eG, aE, eM, eL, ha, aT, dL, K, bz, ad); #c1(REPS1) c2(NP_001273541) c3(ralBP1-associated Eps domain-containing protein 1 isoform d) c4(105145, 105146) c5(105147, 105148, 105149, 105150, 105151, 105152) c6( ) c7(ck, ae, T, eG, aE, eM, eL, ha, aT, dL, K, bz, ad); #c1(REPS1) c2(NP_114128) c3(ralBP1-associated Eps domain-containing protein 1 isoform a) c4(222278) c5(222279, 222280, 222281, 222282, 222283, 222284) c6( ) c7(ck, ae, T, eG, aE, eM, eL, ha, aT, dL, K, bz, ad); #c1(REPS1) c2(XP_011534505) c3(ralBP1-associated Eps domain-containing protein 1 isoform X6) c4( ) c5(330968, 330969, 330970, 330971, 330972, 330973) c6( ) c7(ck, ae, T, eG, aE, eM, eL, ha, aT, dL, K, bz, ad); #c1(REPS2) c2(NP_001074444) c3(ralBP1-associated Eps domain-containing protein 2 isoform 2) c4(37113) c5(37114, 37115, 37116, 37117, 37118, 37119) c6( ) c7(eM, aW, aT, iJ, ae, ad); #c1(REPS2) c2(NP_004717) c3(ralBP1-associated Eps domain-containing protein 2 isoform 1) c4(149050, 149051) c5(149052, 149053, 149054, 149055, 149056, 149057) c6( ) c7(eM, aW, aT, iJ, ae, ad); #c1(REPS2) c2(XP_005274683) c3(ralBP1-associated Eps domain-containing protein 2 isoform X7) c4(285330) c5(285331, 285332, 285333, 285334, 285335, 285336) c6( ) c7(eM, aW, aT, iJ, ae, ad); #c1(REPS2) c2(XP_006724586) c3(ralBP1-associated Eps domain-containing protein 2 isoform X4) c4( ) c5(296102, 296103, 296104, 296105, 296106, 296107) c6( ) c7(eM, aW, aT, iJ, ae, ad); #c1(RERG) c2(NP_001177655) c3(ras-related and estrogen-regulated growth inhibitor isoform 2) c4(72830) c5(72831, 72832, 72833, 72834, 72835, 72836) c6( ) c7(T, aW, aT, at, dL, ci); #c1(RERG) c2(NP_116307) c3(ras-related and estrogen-regulated growth inhibitor isoform 1) c4(226105, 226106) c5(226107, 226108, 226109, 226110, 226111, 226112, 226113, 226114, 226115, 226116, 226117, 226118, 226119, 226120, 226121, 226122, 226123, 226124, 226125, 226126) c6( ) c7(T, aW, aT, at, dL, ci); #c1(RERGL) c2(NP_079006) c3(ras-related and estrogen-regulated growth inhibitor-like protein isoform a) c4(216531) c5(216532, 216533, 216534, 216535, 216536, 216537) c6( ) c7(aW, q, aT, r, pN); #c1(REST) c2(NP_001180437) c3(RE1-silencing transcription factor) c4(74052, 74053, 74054) c5(74055, 74056, 74057, 74058, 74059, 74060, 74061, 74062, 74063, 74064, 74065, 74066, 74067, 74068, 74069, 74070, 74071, 74072, 74073) c6( ) c7(T, ha, eX, bO, Hn, n, ci, Fc, eA, ad, ft, M, aT, cy, eV, K, ae, dx, eu, KC, jf, d, aW, Y, nf, bSc, t, f, bz, cm, eK, rR, W, auo, ac, dB, mx, U, gZ, m, xg); #c1(RET) c2(NP_065681) c3(proto-oncogene tyrosine-protein kinase receptor Ret isoform c precursor) c4(204815, 204816) c5(204817, 204818, 204819, 204820, 204821, 204822, 204823, 204824, 204825, 204826, 204827, 204828) c6( ) c7(uB, gh, atT, T, aCh, aC, Tb, cze, bB, ci, bjN, aon, xY, aR, bjV, Vp, XW, xy, aE, pX, cyn, K, pk, azh, li, yo, aCg, bn, EV, aW, Ls, Qv, ahF, Qq, dg, g, cm, QA, aAW, qJ, eM, nB, Ji, iS, bjU, QF, azg, iu, dD, wu, sw, n, ml, atV, SW, cza, aJe, aCi, aJf, ft, Do, azj, wG, KN, eV, dL, btr, aMi, Hu, aay, cM, bzv, Sc, YE, W, dB, hk, hR, at, pg, HB, qF, YH, anx, cB, AN, aAf, dA, AS, eR, eX, fZ, aA, cz, hy, hz, bX, q, er, eJ, Kx, mj, cng, czb, nv, Qg, aT, dz, Fx, an, ahE, eu, jf, Sh, wr, s, nO, iU, Y, r, ahl, czd, hf, t, f, Vi, FT, ck, sS, tY, Dy, c, rR, auz, nM, dy, gT, bt, VB, ahW, pY, Oy, Dd, uO, oH, eq, ad, av, hd, Rq, Db, bjT, wm, yh, Yi, aAL, BN, aus, et, eZ, bfu, czc, aF, aTa, Hl, bz, dr, aHY, Ew, bE, Lj, Km, ne, jr, DB); #c1(RET) c2(NP_066124) c3(proto-oncogene tyrosine-protein kinase receptor Ret isoform a precursor) c4(206803) c5(206804, 206805, 206806, 206807, 206808, 206809) c6( ) c7(uB, gh, atT, T, aCh, aC, Tb, cze, bB, ci, bjN, aon, xY, aR, bjV, Vp, XW, xy, aE, pX, cyn, K, pk, azh, li, yo, aCg, bn, EV, aW, Ls, Qv, ahF, Qq, dg, g, cm, QA, aAW, qJ, eM, nB, Ji, iS, bjU, QF, azg, iu, dD, wu, sw, n, ml, atV, SW, cza, aJe, aCi, aJf, ft, Do, azj, wG, KN, eV, dL, btr, aMi, Hu, aay, cM, bzv, Sc, YE, W, dB, hk, hR, at, pg, HB, qF, YH, anx, cB, AN, aAf, dA, AS, eR, eX, fZ, aA, cz, hy, hz, bX, q, er, eJ, Kx, mj, cng, czb, nv, Qg, at, dz, Fx, an, ahE, eu, jf, Sh, wr, s, nO, iU, Y, r, ahl, czd, hf, t, f, Vi, FT, ck, sS, tY, Dy, c, rR, auz, nM, dy, gT, bt, VB, ahW, pY, Oy, Dd, uO, oH, eq, ad, av, hd, Rq, Db, bjT, wm, yh, Yi, aAL, BN, aus, et, eZ, bfu, czc, aF, aTa, Hl, bz, dr, aHY, Ew, bE, Lj, Km, ne, jr, DB); #c1(RETN) c2(NP_001180303) c3(resistin precursor) c4(73769, 73770) c5(73771, 73772, 73773, 73774, 73775, 73776, 73777, 73778, 73779, 73780, 73781, 73782) c6( ) c7(bL, bM, T, dD, eR, fR, aZ, ea, oe, e, uG, al, cz, cR, fN, aj, dG, j, v, eq, bh, nS, q, J, cd, ai, td, fU, rc, aw, cc, Qg, iX, ts, aT, h, jy, vc, GT, ji, K, uV, qM, nJ, uX, kI, bf, cW, aW, fc, hI, eZ, r, dq, bz, GR, bJ, ac, X, hr, bm, gZ, GN, aS, dy, mf, ei, gT, jd, st, y, vQ); #c1(RETNLB) c2(NP_115968) c3(resistin-like beta precursor) c4(224974) c5(224975, 224976, 224977, 224978, 224979, 224980, 224981, 224982) c6(224983, 224984) c7(LB, Kd, ck, dD, bM, ea, fG, Ox, eq, ji, fD, X, aa); #c1(RETSAT) c2(NP_060220) c3(all-trans-retinol 13,14-reductase precursor) c4(194819, 194820, 194821) c5(194822, 194823, 194824, 194825, 194826, 194827, 194828, 194829, 194830, 194831, 194832, 194833, 194834, 194835, 194836, 194837, 194838, 194839) c6( ) c7(fg); #c1(REV1) c2(NP_001032961) c3(DNA repair protein REV1 isoform 2) c4(31503) c5(31504, 31505, 31506, 31507, 31508, 31509) c6( ) c7(gV, T, os, hd, nB, hG, Wz, if, ff, asD, cn, aT, cj, oZ, K, ci, m, en, qN, bz, ip); #c1(REV1) c2(NP_057400) c3(DNA repair protein REV1 isoform 1) c4(190553) c5(190554, 190555, 190556, 190557, 190558, 190559) c6( ) c7(gV, T, os, hd, nB, hG, Wz, if, ff, asD, cn, aT, cj, oZ, K, ci, m, en, qN, bz, ip); #c1(REV3L) c2(NP_001273361) c3(DNA polymerase zeta catalytic subunit isoform b) c4(104762) c5(104763, 104764, 104765, 104766, 104767) c6( ) c7(T, fM, ib, bE, aW, cr, aT, cj, dL, ci, K, brf, bz, eA, hS); #c1(REV3L) c2(NP_002903) c3(DNA polymerase zeta catalytic subunit isoform a) c4(133444) c5(133445, 133446, 133447, 133448, 133449, 133450, 133451, 133452, 133453, 133454, 133455, 133456, 133457, 133458, 133459) c6( ) c7(T, fM, ib, bE, aW, cr, aT, cj, dL, ci, K, brf, bz, eA, hS); #c1(REV3L) c2(XP_011534337) c3(DNA polymerase zeta catalytic subunit isoform X9) c4(330713) c5(330714, 330715, 330716, 330717, 330718, 330719) c6( ) c7(T, fM, ib, bE, aW, cr, aT, cj, dL, ci, K, brf, bz, eA, hS); #c1(REXO1) c2(NP_065746) c3(RNA exonuclease 1 homolog) c4(205161, 205162) c5(205163, 205164, 205165, 205166, 205167, 205168, 205169, 205170, 205171, 205172, 205173, 205174, 205175) c6( ) c7(es, T, kl, d, Uc, iM, Db, je, LX, Hn, Iu, ae, eA, ad); #c1(REXO1) c2(XP_011526450) c3(RNA exonuclease 1 homolog isoform X5) c4(320754) c5(320755, 320756, 320757, 320758, 320759) c6( ) c7(es, T, kl, d, Uc, iM, Db, je, LX, Hn, Iu, ae, eA, ad); #c1(REXO2) c2(NP_056338) c3(oligoribonuclease, mitochondrial precursor) c4(187151) c5(187152, 187153, 187154, 187155, 187156, 187157) c6( ) c7(T, bE, aW, sw, aT, fd, n, g, zl, bz, iu); #c1(REXO4) c2(NP_001266278) c3(RNA exonuclease 4 isoform 2) c4(99554, 99555) c5(99556, 99557, 99558, 99559, 99560, 99561, 99562, 99563, 99564, 99565, 99566, 99567) c6( ) c7(bD, ac); #c1(REXO4) c2(NP_001266280) c3(RNA exonuclease 4 isoform 4) c4( ) c5(99568, 99569, 99570, 99571, 99572) c6( ) c7(bD, ac); #c1(REXO4) c2(NP_065118) c3(RNA exonuclease 4 isoform 1) c4(204023, 204024, 204025) c5(204026, 204027, 204028, 204029, 204030, 204031, 204032, 204033, 204034, 204035, 204036, 204037, 204038) c6( ) c7(bD, ac); #c1(RFC1) c2(NP_001191676) c3(replication factor C subunit 1 isoform 2) c4(81606) c5(81607, 81608, 81609, 81610, 81611, 81612) c6( ) c7(ng, T, if, jh, aA, sM, cz, oY, ci, V, q, ad, ip, wD, x, yg, aT, dL, K, eL, af, iL, Uf, aoX, aW, ff, eH, r, aF, en, g, eF, f, iK, y, ac, eM, bP, dB, lp, wE, dy, k, ij, bD, Qz, X, us); #c1(RFC1) c2(NP_002904) c3(replication factor C subunit 1 isoform 1) c4(133460) c5(133461, 133462, 133463, 133464, 133465, 133466) c6( ) c7(ng, T, if, jh, aA, sM, cz, oY, ci, V, q, ad, ip, wD, x, yg, aT, dL, K, eL, af, iL, Uf, aoX, aW, ff, eH, r, aF, en, g, eF, f, iK, y, ac, eM, bP, dB, lp, wE, dy, k, ij, bD, Qz, X, us); #c1(RFC1) c2(XP_011512033) c3(replication factor C subunit 1 isoform X2) c4(302686) c5(302687, 302688, 302689, 302690, 302691, 302692) c6( ) c7(ng, T, if, jh, aA, sM, cz, oY, ci, V, q, ad, ip, wD, x, yg, aT, dL, K, eL, af, iL, Uf, aoX, aW, ff, eH, r, aF, en, g, eF, f, iK, y, ac, eM, bP, dB, lp, wE, dy, k, ij, bD, Qz, X, us); #c1(RFC2) c2(NP_002905) c3(replication factor C subunit 2 isoform 2) c4(133467) c5(133468, 133469, 133470, 133471, 133472, 133473) c6( ) c7(bL, bM, alC, W, aW, eH, aT, Mz, dL, v, ei, eF, cm, V); #c1(RFC2) c2(NP_852136) c3(replication factor C subunit 2 isoform 1) c4(254908) c5(254909, 254910, 254911, 254912, 254913, 254914, 254915, 254916) c6( ) c7(bL, bM, alC, W, aW, eH, aT, Mz, dL, v, ei, eF, cm, V); #c1(RFC3) c2(NP_002906) c3(replication factor C subunit 3 isoform 1) c4(133474) c5(133475, 133476, 133477, 133478, 133479, 133480) c6( ) c7(T, ac, pf, r, dL, np, j, af); #c1(RFC3) c2(NP_853536) c3(replication factor C subunit 3 isoform 2) c4(255171) c5(255172, 255173, 255174, 255175, 255176, 255177) c6( ) c7(T, ac, pf, r, dL, np, j, af); #c1(RFC4) c2(NP_853551) c3(replication factor C subunit 4) c4(255178, 255179, 255180, 255181, 255182, 255183) c5(255184, 255185, 255186, 255187, 255188, 255189, 255190, 255191, 255192, 255193, 255194, 255195, 255196, 255197, 255198, 255199, 255200, 255201, 255202, 255203, 255204, 255205, 255206, 255207, 255208, 255209, 255210, 255211, 255212, 255213, 255214, 255215, 255216, 255217, 255218, 255219, 255220, 255221, 255222, 255223) c6( ) c7(V, d, B, dL); #c1(RFC5) c2(NP_001123584) c3(replication factor C subunit 5 isoform 3) c4(47788) c5(47789, 47790, 47791, 47792, 47793) c6( ) c7(V, dL); #c1(RFC5) c2(NP_031396) c3(replication factor C subunit 5 isoform 1) c4(172223) c5(172224, 172225, 172226, 172227, 172228, 172229, 172230) c6( ) c7(V, dL); #c1(RFC5) c2(NP_853556) c3(replication factor C subunit 5 isoform 2) c4(255224, 255225, 255226) c5(255227, 255228, 255229, 255230, 255231, 255232, 255233, 255234, 255235, 255236, 255237, 255238, 255239, 255240, 255241, 255242, 255243, 255244) c6( ) c7(V, dL); #c1(RFFL) c2(NP_001017368) c3(E3 ubiquitin-protein ligase rififylin) c4(26288, 26289, 26290, 26291, 26292, 26293, 26294) c5(26295, 26296, 26297, 26298, 26299, 26300, 26301, 26302, 26303, 26304, 26305, 26306, 26307, 26308, 26309, 26310, 26311, 26312, 26313, 26314, 26315, 26316, 26317, 26318, 26319, 26320, 26321, 26322, 26323, 26324, 26325, 26326, 26327, 26328, 26329, 26330, 26331, 26332, 26333, 26334, 26335, 26336, 26337, 26338, 26339, 26340) c6( ) c7(cF); #c1(RFK) c2(NP_060809) c3(riboflavin kinase) c4(197931) c5(197932, 197933, 197934, 197935, 197936, 197937) c6( ) c7(ad); #c1(RFPL1) c2(NP_066306) c3(ret finger protein-like 1) c4(207169) c5(207170, 207171, 207172, 207173, 207174, 207175) c6( ) c7(dY, aRk); #c1(RFT1) c2(NP_443091) c3(protein RFT1 homolog) c4(229349, 229350) c5(229351, 229352, 229353, 229354, 229355, 229356, 229357, 229358, 229359, 229360, 229361, 229362) c6( ) c7(czf, Km, J, dv, aj); #c1(RFTN1) c2(NP_055965) c3(raftlin) c4(184728, 184729, 184730, 184731) c5(184732, 184733, 184734, 184735, 184736, 184737, 184738, 184739, 184740, 184741, 184742, 184743, 184744, 184745, 184746, 184747, 184748, 184749, 184750, 184751, 184752, 184753, 184754, 184755, 184756, 184757, 184758, 184759) c6( ) c7(hW, bE, vA, bB, v, dw, op); #c1(RFTN2) c2(NP_653230) c3(raftlin-2) c4(239241) c5(239242, 239243, 239244, 239245, 239246, 239247) c6( ) c7(Ea); #c1(RFWD2) c2(NP_001001740) c3(E3 ubiquitin-protein ligase RFWD2 isoform b) c4(19013) c5(19014, 19015, 19016, 19017, 19018, 19019) c6( ) c7(T, cF, aE, c, qt, aW, jx, aT, aA, n, aF, K, g, ir, bt, B, bN); #c1(RFWD2) c2(NP_001273573) c3(E3 ubiquitin-protein ligase RFWD2 isoform c precursor) c4(105323) c5( ) c6( ) c7(T, cF, aE, c, qt, aW, jx, aT, aA, n, aF, K, g, ir, bt, B, bN); #c1(RFWD2) c2(NP_071902) c3(E3 ubiquitin-protein ligase RFWD2 isoform a) c4(212163) c5(212164, 212165, 212166, 212167, 212168, 212169, 212170) c6( ) c7(T, cF, aE, c, qt, aW, jx, aT, aA, n, aF, K, g, ir, bt, B, bN); #c1(RFWD2) c2(XP_005245504) c3(E3 ubiquitin-protein ligase RFWD2 isoform X4) c4( ) c5(266665, 266666, 266667, 266668, 266669) c6( ) c7(T, cF, aE, c, qt, aW, jx, aT, aA, n, aF, K, g, ir, bt, B, bN); #c1(RFWD2) c2(XP_006711550) c3(E3 ubiquitin-protein ligase RFWD2 isoform X7) c4( ) c5(286119, 286120, 286121, 286122, 286123, 286124) c6( ) c7(T, cF, aE, c, qt, aW, jx, aT, aA, n, aF, K, g, ir, bt, B, bN); #c1(RFWD2) c2(XP_011508183) c3(E3 ubiquitin-protein ligase RFWD2 isoform X1) c4(298781) c5( ) c6( ) c7(T, cF, aE, c, qt, aW, jx, aT, aA, n, aF, K, g, ir, bt, B, bN); #c1(RFWD3) c2(NP_060594) c3(E3 ubiquitin-protein ligase RFWD3) c4(196733) c5(196734, 196735, 196736, 196737, 196738, 196739) c6( ) c7(Ld, ey); #c1(RFWD3) c2(XP_006721291) c3(E3 ubiquitin-protein ligase RFWD3 isoform X2) c4(293918) c5(293919, 293920, 293921, 293922, 293923, 293924, 293925) c6( ) c7(Ld, ey); #c1(RFX1) c2(NP_002909) c3(MHC class II regulatory factor RFX1) c4(133481) c5(133482, 133483, 133484, 133485, 133486, 133487, 133488) c6( ) c7(jf, T, B, d, dA, Pf, aW, eZ, aT, eo, fL, Tp, g, eA, Xa, V, WX, mC, MG); #c1(RFX1) c2(XP_011526469) c3(MHC class II regulatory factor RFX1 isoform X1) c4( ) c5(320775) c6( ) c7(jf, T, B, d, dA, Pf, aW, eZ, aT, eo, fL, Tp, g, eA, Xa, V, WX, mC, MG); #c1(RFX2) c2(NP_000626) c3(DNA-binding protein RFX2 isoform a) c4(14068) c5(14069, 14070, 14071, 14072, 14073, 14074, 14075) c6( ) c7(ayR); #c1(RFX2) c2(NP_602309) c3(DNA-binding protein RFX2 isoform b) c4(235764) c5(235765, 235766, 235767, 235768, 235769, 235770, 235771, 235772, 235773, 235774) c6( ) c7(ayR); #c1(RFX3) c2(NP_001269046) c3(transcription factor RFX3 isoform c) c4( ) c5(100307, 100308, 100309, 100310, 100311, 100312, 100313, 100314, 100315, 100316, 100317, 100318, 100319, 100320, 100321, 100322, 100323, 100324, 100325, 100326, 100327, 100328, 100329, 100330, 100331, 100332, 100333, 100334, 100335, 100336, 100337, 100338, 100339, 100340, 100341, 100342) c6( ) c7(Pk, j, lQ, awP); #c1(RFX3) c2(NP_002910) c3(transcription factor RFX3 isoform a) c4(133489, 133490, 133491, 133492, 133493, 133494, 133495) c5(133496, 133497, 133498, 133499, 133500, 133501, 133502, 133503, 133504, 133505) c6( ) c7(Pk, j, lQ, awP); #c1(RFX3) c2(NP_602304) c3(transcription factor RFX3 isoform b) c4(235685) c5(235686, 235687, 235688, 235689, 235690, 235691) c6( ) c7(Pk, j, lQ, awP); #c1(RFX3) c2(XP_006716903) c3(transcription factor RFX3 isoform X1) c4(290545, 290546) c5(290547) c6( ) c7(Pk, j, lQ, awP); #c1(RFX3) c2(XP_006716910) c3(transcription factor RFX3 isoform X5) c4( ) c5(290548, 290549, 290550, 290551, 290552, 290553, 290554, 290555, 290556, 290557, 290558, 290559, 290560, 290561, 290562, 290563, 290564) c6( ) c7(Pk, j, lQ, awP); #c1(RFX3) c2(XP_011516302) c3(transcription factor RFX3 isoform X3) c4(309510, 309511) c5(309512, 309513, 309514, 309515, 309516, 309517, 309518, 309519, 309520, 309521) c6( ) c7(Pk, j, lQ, awP); #c1(RFX4) c2(NP_001193620) c3(transcription factor RFX4 isoform d) c4(82366) c5(82367, 82368, 82369, 82370, 82371, 82372, 82373) c6( ) c7(bK); #c1(RFX4) c2(NP_115880) c3(transcription factor RFX4 isoform a) c4(224443) c5(224444, 224445, 224446, 224447, 224448, 224449) c6( ) c7(bK); #c1(RFX4) c2(NP_998759) c3(transcription factor RFX4 isoform c) c4(265861) c5(265862, 265863, 265864, 265865, 265866, 265867) c6( ) c7(bK); #c1(RFX5) c2(NP_001020774) c3(DNA-binding protein RFX5) c4(29029, 29030, 29031, 29032, 29033, 29034, 29035, 29036, 29037, 29038) c5(29039, 29040, 29041, 29042, 29043, 29044, 29045, 29046, 29047, 29048, 29049, 29050, 29051, 29052, 29053, 29054, 29055, 29056, 29057, 29058, 29059, 29060, 29061, 29062, 29063, 29064, 29065, 29066, 29067, 29068, 29069, 29070, 29071, 29072, 29073, 29074, 29075, 29076, 29077, 29078, 29079, 29080, 29081, 29082, 29083, 29084, 29085, 29086, 29087, 29088, 29089, 29090, 29091, 29092, 29093, 29094, 29095, 29096, 29097, 29098, 29099, 29100, 29101, 29102, 29103, 29104, 29105, 29106, 29107, 29108) c6( ) c7(dD, czh, W, ea, r, eq, Xa, bJR, WX, czg); #c1(RFX6) c2(NP_775831) c3(DNA-binding protein RFX6) c4(250469) c5(250470, 250471, 250472, 250473, 250474, 250475) c6( ) c7(mh, czi, Y, aj, ae, J, ad); #c1(RFX8) c2(NP_001139136) c3(DNA-binding protein RFX8) c4(58758, 58759) c5(58760, 58761, 58762, 58763, 58764, 58765, 58766, 58767, 58768, 58769, 58770, 58771) c6( ) c7(oe, pN); #c1(RFX8) c2(XP_011510074) c3(DNA-binding protein RFX8 isoform X2) c4(300691) c5(300692, 300693, 300694, 300695, 300696, 300697) c6( ) c7(oe, pN); #c1(RFXANK) c2(NP_001265656) c3(DNA-binding protein RFXANK isoform c) c4(99124) c5(99125, 99126, 99127, 99128, 99129, 99130, 99131, 99132, 99133, 99134, 99135, 99136) c6( ) c7(czj, WX, Xa, dA, CF); #c1(RFXANK) c2(NP_001265657) c3(DNA-binding protein RFXANK isoform b) c4(99137) c5(99138, 99139, 99140, 99141, 99142, 99143) c6( ) c7(czj, WX, Xa, dA, CF); #c1(RFXANK) c2(NP_003712) c3(DNA-binding protein RFXANK isoform a) c4(140358, 140359) c5(140360, 140361, 140362, 140363, 140364, 140365, 140366) c6( ) c7(czj, WX, Xa, dA, CF); #c1(RFXAP) c2(NP_000529) c3(regulatory factor X-associated protein) c4(11915) c5(11916, 11917, 11918, 11919, 11920, 11921, 11922) c6( ) c7(ac, WX, Xa, dA, czk); #c1(RGCC) c2(NP_054778) c3(regulator of cell cycle RGCC) c4(177768) c5(177769, 177770, 177771, 177772, 177773, 177774, 177775) c6( ) c7(T, jh, bB, j, ci, eA, hd, aE, aT, K, jj, s, Hl, aW, as, eE, t, bz, ck, es, bP, eM, nB, bE, cj, Hb, kS, X); #c1(RGL1) c2(NP_001284598) c3(ral guanine nucleotide dissociation stimulator-like 1 isoform 2) c4(112124) c5(112125, 112126, 112127, 112128, 112129, 112130) c6( ) c7(alv); #c1(RGL1) c2(NP_001284600) c3(ral guanine nucleotide dissociation stimulator-like 1 isoform 3) c4(112131) c5(112132, 112133, 112134, 112135, 112136, 112137) c6( ) c7(alv); #c1(RGL1) c2(NP_001284601) c3(ral guanine nucleotide dissociation stimulator-like 1 isoform 4) c4(112138) c5(112139, 112140, 112141, 112142, 112143, 112144) c6( ) c7(alv); #c1(RGL1) c2(NP_055964) c3(ral guanine nucleotide dissociation stimulator-like 1 isoform 1) c4(184717) c5(184718, 184719, 184720, 184721, 184722, 184723, 184724, 184725, 184726, 184727) c6( ) c7(alv); #c1(RGL1) c2(XP_011507644) c3(ral guanine nucleotide dissociation stimulator-like 1 isoform X3) c4(297587) c5(297588, 297589, 297590, 297591, 297592, 297593) c6( ) c7(alv); #c1(RGL2) c2(NP_004752) c3(ral guanine nucleotide dissociation stimulator-like 2 isoform 1) c4(149270, 149271) c5(149272, 149273, 149274, 149275, 149276, 149277, 149278, 149279, 149280, 148281, 149282, 149283, 149284, 149285, 149286, 149287, 149288, 149289, 149290, 149291, 149292, 149293, 149294, 149295, 149296, 149297, 149298, 149299, 149300, 149301, 149302, 149303, 149304, 149305, 149306, 149307, 149308, 149309, 149310) c6( ) c7(kp, eZ); #c1(RGL2) c2(XP_011513086) c3(ral guanine nucleotide dissociation stimulator-like 2 isoform X2) c4(304766, 304767) c5(304768, 304769, 304770, 304771, 304772, 304773, 304774, 304775, 304776, 304777, 304778, 304779, 304780, 304781, 304782, 304783, 304784) c6( ) c7(kp, eZ); #c1(RGL2) c2(XP_011513087) c3(ral guanine nucleotide dissociation stimulator-like 2 isoform X3) c4( ) c5(304785, 304786, 304787, 304788, 304789, 304790, 304791, 304792, 304793, 304794, 304795, 304796, 304797, 304798, 304799, 304800, 304801) c6( ) c7(kp, eZ); #c1(RGL4) c2(NP_705843) c3(ral-GDS-related protein precursor) c4(246351, 246352) c5(246353, 246354, 246355, 246356, 246357, 246358, 246359, 246360, 246361, 246362, 246363, 246364) c6( ) c7(db, cZ, T, dd); #c1(RGMA) c2(NP_001159755) c3(repulsive guidance molecule A isoform 1) c4(64739, 64740) c5(64741, 64742, 64743, 64744, 64745, 64746) c6( ) c7(eR, fm, oe, Z, aY, V); #c1(RGMA) c2(NP_001159761) c3(repulsive guidance molecule A isoform 2 precursor) c4(64766) c5(64767, 64768, 64769, 64770, 64771, 64772, 64773, 64774, 64775, 64776, 64777, 64778, 64779, 64780, 64781, 64782, 64783, 64784) c6( ) c7(eR, fm, oe, Z, aY, V); #c1(RGMA) c2(NP_064596) c3(repulsive guidance molecule A isoform 3) c4(203201) c5(203202, 203203, 203204, 203205, 203206, 203207, 203208, 203209) c6( ) c7(eR, fm, oe, Z, aY, V); #c1(RGMB) c2(NP_001012779) c3(RGM domain family member B) c4(25346, 25347) c5(25348, 25349, 25350, 25351, 25352, 25353) c6( ) c7(aW, y, aT); #c1(RGMB) c2(XP_005272023) c3(RGM domain family member B isoform X2) c4( ) c5(283660, 283661, 283662, 283663, 283664, 283665) c6( ) c7(aW, y, aT); #c1(RGMB) c2(XP_011541648) c3(RGM domain family member B isoform X3) c4( ) c5(340198) c6( ) c7(aW, y, aT); #c1(RGN) c2(NP_004674) c3(regucalcin isoform 1) c4(148730) c5(148731, 148732, 148733, 148734, 148735, 148736, 148737, 148738, 148739, 148740, 148741, 148742, 148743, 148744) c6( ) c7(T, amB, jp, aW, dQ, aT, fQ, aq, bS, dy, ct, bq, Z, ae, B, ad); #c1(RGN) c2(XP_006724630) c3(regucalcin isoform X1) c4(296147) c5(296148, 296149, 296150, 296151, 296152, 296153) c6( ) c7(T, amB, jp, aW, dQ, aT, fQ, aq, bS, dy, ct, bq, Z, ae, B, ad); #c1(RGPD2) c2(NP_001071638) c3(RANBP2-like and GRIP domain-containing protein 2) c4(35360, 35361, 35362, 35363) c5(35364, 35365, 35366, 35367, 35368, 35369, 35370, 35371, 35372, 35373, 35374, 35375, 35376, 35377, 35378, 35379, 35380, 35381) c6( ) c7(ck, T, iT, iU, h, bw, m, hf, hF, bt, br); #c1(RGPD2) c2(XP_011531391) c3(RANBP2-like and GRIP domain-containing protein 2 isoform X5) c4( ) c5(327390, 327391, 327392, 327393, 327394, 327395) c6( ) c7(ck, T, iT, iU, h, bw, m, hf, hF, bt, br); #c1(RGR) c2(NP_001012738) c3(RPE-retinal G protein-coupled receptor isoform 2) c4(25243) c5( ) c6( ) c7(cZ, lR, W, czl, nx, Pg, nw, dd, db, nC, VF); #c1(RGR) c2(NP_001012740) c3(RPE-retinal G protein-coupled receptor isoform 3) c4(25244) c5(25245, 25246, 25247, 25248, 25249, 25250, 25251, 25252) c6( ) c7(cZ, lR, W, czl, nx, Pg, nw, dd, db, nC, VF); #c1(RGR) c2(NP_002912) c3(RPE-retinal G protein-coupled receptor isoform 1) c4(133506) c5(133507, 133508, 133509, 133510, 133511, 133512, 133513, 133514, 133515, 133516) c6( ) c7(cZ, lR, W, czl, nx, Pg, nw, dd, db, nC, VF); #c1(RGS1) c2(NP_002913) c3(regulator of G-protein signaling 1) c4(133517) c5(133518, 133519, 133520, 133521, 133522, 133523) c6( ) c7(T, A, iM, BN, je, Y, fJ, ff, jh, kH, cL, hy, hp, lQ, en, eF, Pk, V, ne); #c1(RGS10) c2(NP_001005339) c3(regulator of G-protein signaling 10 isoform a) c4(21403, 21404) c5(21405, 21406, 21407, 21408, 21409, 21410, 21411, 21412, 21413, 21414, 21415, 21416) c6( ) c7(T, zw, BN, W, bE, ff, bB, hy, K, m, ajW, en, t, ne); #c1(RGS10) c2(NP_002916) c3(regulator of G-protein signaling 10 isoform b) c4(133538) c5(133539, 133540, 133541, 133542, 133543, 133544) c6( ) c7(T, zw, BN, W, bE, ff, bB, hy, K, m, ajW, en, t, ne); #c1(RGS11) c2(NP_003825) c3(regulator of G-protein signaling 11 isoform 2) c4(141177) c5( ) c6( ) c7(mR, BN, ff, hy, en, ne); #c1(RGS11) c2(NP_899180) c3(regulator of G-protein signaling 11 isoform 1) c4(257981) c5(257982, 257983, 257984, 257985, 257986, 257987, 257988, 257989, 257990, 257991, 257992, 257993) c6( ) c7(mR, BN, ff, hy, en, ne); #c1(RGS11) c2(XP_011521021) c3(regulator of G-protein signaling 11 isoform X1) c4( ) c5(315964) c6( ) c7(mR, BN, ff, hy, en, ne); #c1(RGS11) c2(XP_011521025) c3(regulator of G-protein signaling 11 isoform X5) c4(315965) c5(315966, 315967, 315968, 315969, 315970, 315971) c6( ) c7(mR, BN, ff, hy, en, ne); #c1(RGS12) c2(NP_937870) c3(regulator of G-protein signaling 12 isoform 3) c4(259355) c5(259356, 259357, 259358, 259359, 259360, 259361) c6( ) c7(ac, BN, ff, hy, en, ne); #c1(RGS12) c2(XP_006713968) c3(regulator of G-protein signaling 12 isoform X1) c4(287436, 287437) c5(287438, 287439, 287440, 287441, 287442, 287443) c6( ) c7(ac, BN, ff, hy, en, ne); #c1(RGS12) c2(XP_006713969) c3(regulator of G-protein signaling 12 isoform X3) c4(287444, 287445) c5(287446, 287447, 287448, 287449, 287450, 287451, 287452, 287453, 287454, 287455, 287456, 287457, 287458, 287459, 287460, 287461, 287462, 287463) c6( ) c7(ac, BN, ff, hy, en, ne); #c1(RGS12) c2(XP_011511844) c3(regulator of G-protein signaling 12 isoform X2) c4(302510) c5(302511, 302512, 302513, 302514, 302515, 302516, 302517, 302518, 302519, 302520) c6( ) c7(ac, BN, ff, hy, en, ne); #c1(RGS13) c2(NP_002918) c3(regulator of G-protein signaling 13) c4(133545) c5(133546, 133547, 133548, 133549, 133550, 133551, 133552, 133553, 133554, 133555) c6( ) c7(BN, ff, jh, hy, en, Vk, ne); #c1(RGS14) c2(NP_006471) c3(regulator of G-protein signaling 14) c4(165452) c5(165453, 165454, 165455, 165456, 165457, 165458) c6( ) c7(BN, ff, hy, en, V, ne); #c1(RGS14) c2(XP_005265851) c3(regulator of G-protein signaling 14 isoform X1) c4(279790, 279791) c5(279792, 279793, 279794, 279795, 279796, 279797, 279798, 279799, 279800, 279801, 279802, 279803) c6( ) c7(BN, ff, hy, en, V, ne); #c1(RGS16) c2(NP_002919) c3(regulator of G-protein signaling 16) c4(133556) c5(133557, 133558, 133559, 133560, 133561, 133562) c6( ) c7(BN, aE, ne, ff, gX, aT, r, hy, ci, en, cm, q); #c1(RGS17) c2(XP_011534055) c3(regulator of G-protein signaling 17 isoform X3) c4(330233) c5(330234, 330235) c6( ) c7(av, aW, oe, aT, at, cd, dL, m, t, bz, xa, ad); #c1(RGS17) c2(XP_011534056) c3(regulator of G-protein signaling 17 isoform X1) c4( ) c5(330236, 330237, 330238, 330239, 330240, 330241, 330242, 330243) c6( ) c7(av, aW, oe, aT, at, cd, dL, m, t, bz, xa, ad); #c1(RGS18) c2(NP_570138) c3(regulator of G-protein signaling 18) c4(234050) c5(234051, 234052, 234053, 234054, 234055, 234056) c6( ) c7(BN, ff, jh, hy, en, Vk, ne); #c1(RGS19) c2(XP_011526788) c3(regulator of G-protein signaling 19 isoform X1) c4(321064) c5(321065, 321066, 321067, 321068, 321069, 321070, 321071, 321072, 321073, 321074) c6( ) c7(bB, bE); #c1(RGS2) c2(NP_002914) c3(regulator of G-protein signaling 2) c4(133524) c5(133525, 133526, 133527, 133528, 133529, 133530) c6( ) c7(gh, dD, ea, oe, e, eX, aA, cz, n, akA, bS, hy, v, eq, ww, V, q, ad, bAO, QU, aT, ta, eV, dL, K, bBp, an, dQ, ae, eL, czm, BN, tb, ff, r, en, as, JI, t, jb, qa, hq, bdn, rR, yP, sv, cS, ei, bt, ne); #c1(RGS20) c2(NP_003693) c3(regulator of G-protein signaling 20 isoform b) c4(140201) c5(140202, 140203, 140204, 140205, 140206, 140207) c6( ) c7(BN, ff, cz, hy, en, ne); #c1(RGS20) c2(NP_733466) c3(regulator of G-protein signaling 20 isoform a) c4(246888) c5(246889, 246890, 246891, 246892, 246893, 246894) c6( ) c7(BN, ff, cz, hy, en, ne); #c1(RGS20) c2(XP_011515924) c3(regulator of G-protein signaling 20 isoform X1) c4( ) c5(309074) c6( ) c7(BN, ff, cz, hy, en, ne); #c1(RGS21) c2(NP_001034241) c3(regulator of G-protein signaling 21) c4(31636) c5(31637, 31638, 31639, 31640, 31641, 31642) c6( ) c7(xY, hp); #c1(RGS22) c2(NP_001273621) c3(regulator of G-protein signaling 22 isoform 2) c4(105488) c5(105489, 105490, 105491, 105492, 105493, 105494) c6( ) c7(T, sS, BN, ff, ht, hy, en, hu, ne); #c1(RGS22) c2(NP_056483) c3(regulator of G-protein signaling 22 isoform 1) c4(187715) c5(187716, 187717, 187718, 187719, 187720, 187721) c6( ) c7(T, sS, BN, ff, ht, hy, en, hu, ne); #c1(RGS3) c2(NP_001263190) c3(regulator of G-protein signaling 3 isoform 7) c4(96985) c5(96986, 96987, 96988, 96989, 96990, 96991) c6( ) c7(BN, ne, ff, hy, eA, en, cd); #c1(RGS3) c2(NP_060260) c3(regulator of G-protein signaling 3 isoform 3) c4(195102) c5(195103, 195104, 195105, 195106, 195107, 195108) c6( ) c7(BN, ne, ff, hy, eA, en, cd); #c1(RGS3) c2(NP_570613) c3(regulator of G-protein signaling 3 isoform 1) c4(234121) c5(234122, 234123, 234124, 234125, 234126, 234127) c6( ) c7(BN, ne, ff, hy, eA, en, cd); #c1(RGS3) c2(NP_602299) c3(regulator of G-protein signaling 3 isoform 4) c4( ) c5(235680, 235681, 235682, 235683, 235684) c6( ) c7(BN, ne, ff, hy, eA, en, cd); #c1(RGS3) c2(NP_652759) c3(regulator of G-protein signaling 3 isoform 6) c4(238805) c5(238806, 238807, 238808, 238809, 238810, 238811, 238812, 238813, 238814, 238815) c6( ) c7(BN, ne, ff, hy, eA, en, cd); #c1(RGS3) c2(NP_652760) c3(regulator of G-protein signaling 3 isoform 5) c4(238816) c5(238817, 238818, 238819, 238820, 238821, 238822, 238823) c6( ) c7(BN, ne, ff, hy, eA, en, cd); #c1(RGS3) c2(XP_006717285) c3(regulator of G-protein signaling 3 isoform X4) c4(290880) c5(290881) c6( ) c7(BN, ne, ff, hy, eA, en, cd); #c1(RGS3) c2(XP_006717287) c3(regulator of G-protein signaling 3 isoform X7) c4(290882) c5( ) c6( ) c7(BN, ne, ff, hy, eA, en, cd); #c1(RGS3) c2(XP_006717293) c3(regulator of G-protein signaling 3 isoform X1) c4( ) c5(290883, 290884, 290885, 290886, 290887, 290888, 290889, 290890, 290891) c6( ) c7(BN, ne, ff, hy, eA, en, cd); #c1(RGS4) c2(NP_001095915) c3(regulator of G-protein signaling 4 isoform 1) c4(40933, 40934, 40935, 40936) c5(40937, 40938, 40939, 40940, 40941, 40942, 40943, 40944) c6( ) c7(iH, bO, cz, ti, hy, bS, cd, eA, kL, dP, aT, bdp, dL, bK, ey, he, eL, af, bvX, BN, aW, ff, gl, Ku, en, cm, jb, sv, ne); #c1(RGS4) c2(NP_001106851) c3(regulator of G-protein signaling 4 isoform 3) c4( ) c5(42624, 42625, 42626, 42627, 42628, 42629, 42630, 42631, 42632, 42633, 42634, 42635, 42636) c6( ) c7(iH, bO, cz, ti, hy, bS, cd, eA, kL, dP, aT, bdp, dL, bK, ey, he, eL, af, bvX, BN, aW, ff, gl, Ku, en, cm, jb, sv, ne); #c1(RGS4) c2(NP_001106852) c3(regulator of G-protein signaling 4 isoform 4) c4(42637) c5(42638, 42639, 42640, 42641, 42642, 42643) c6( ) c7(iH, bO, cz, ti, hy, bS, cd, eA, kL, dP, aT, bdp, dL, bK, ey, he, eL, af, bvX, BN, aW, ff, gl, Ku, en, cm, jb, sv, ne); #c1(RGS4) c2(NP_005604) c3(regulator of G-protein signaling 4 isoform 2) c4( ) c5(157890, 157891, 157892, 157893, 157894, 157895, 157896) c6( ) c7(iH, bO, cz, ti, hy, bS, cd, eA, kL, dP, aT, bdp, dL, bK, ey, he, eL, af, bvX, BN, aW, ff, gl, Ku, en, cm, jb, sv, ne); #c1(RGS5) c2(NP_001241677) c3(regulator of G-protein signaling 5 isoform 2) c4( ) c5(89036, 89037, 89038, 89039, 89040) c6( ) c7(T, dD, cz, n, hy, eq, fr, cd, dL, bK, B, BN, Y, ff, aq, en, iR, HI, qa, YE, iA, iS, at, m, ne); #c1(RGS5) c2(NP_003608) c3(regulator of G-protein signaling 5 isoform 1) c4(139550, 139551, 139552) c5(139553, 139554, 139555, 139556, 139557, 139558, 139559, 139560, 139561, 139562, 139563, 139564, 139565) c6( ) c7(T, dD, cz, n, hy, eq, fr, cd, dL, bK, B, BN, Y, ff, aq, en, iR, HI, qa, YE, iA, iS, at, m, ne); #c1(RGS6) c2(NP_001191346) c3(regulator of G-protein signaling 6 isoform 3) c4(81431, 81432, 81433) c5(81434, 81435, 81436, 81437, 81438, 81439, 81440, 81441, 81442, 81443, 81444, 81445, 81446, 81447, 81448, 81449, 81450, 81451) c6( ) c7(T, hI, WA, cz, KO, v, fr, kv, nA, Fc, ad, UE, iu, aE, aT, hD, dL, hP, K, zy, ae, cjs, eL, cxV, iU, aW, r, as, bQ, eE, bz, dr, es, Ew, eM, Iq, at, bt, B, afH); #c1(RGS6) c2(NP_001191348) c3(regulator of G-protein signaling 6 isoform 5) c4(81452) c5(81453, 81454, 81455, 81456, 81457, 81458) c6( ) c7(T, hl, WA, cz, KO, v, fr, kv, nA, Fc, ad, UE, iu, aE, aT, hD, dL, hP, K, zy, ae, cjs, eL, cxV, iU, aW, r, as, bQ, eE, bz, dr, es, Ew, eM, Iq, at, bt, B, afH); #c1(RGS6) c2(NP_001191353) c3(regulator of G-protein signaling 6 isoform 1) c4(81459, 81460, 81461) c5(81462, 81463, 81464, 81465, 81466, 81467, 81468, 81469, 81470, 81471, 81472) c6( ) c7(T, hl, WA, cz, KO, v, fr, kv, nA, Fc, ad, UE, iu, aE, aT, hD, dL, hP, K, zy, ae, cjs, eL, cxV, iU, aW, r, as, bQ, eE, bz, dr, es, Ew, eM, Iq, at, bt, B, afH); #c1(RGS6) c2(XP_005268292) c3(regulator of G-protein signaling 6 isoform X18) c4( ) c5(281676, 281677, 281678, 281679, 281680, 281681) c6( ) c7(T, hl, WA, cz, KO, v, fr, kv, nA, Fc, ad, UE, iu, aE, aT, hD, dL, hP, K, zy, ae, cjs, eL, cxV, iU, aW, r, as, bQ, eE, bz, dr, es, Ew, eM, Iq, at, bt, B, afH); #c1(RGS6) c2(XP_005268293) c3(regulator of G-protein signaling 6 isoform X1) c4(281682) c5(281683, 281684, 281685, 281686, 281687, 281688, 281689, 281690, 281691, 281692, 281693, 281694, 281695, 281696) c6( ) c7(T, hl, WA, cz, KO, v, fr, kv, nA, Fc, ad, UE, iu, aE, aT, hD, dL, hP, K, zy, ae, cjs, eL, cxV, iU, aW, r, as, bQ, eE, bz, dr, es, Ew, eM, Iq, at, bt, B, afH); #c1(RGS6) c2(XP_011535691) c3(regulator of G-protein signaling 6 isoform X3) c4(332921, 332922) c5(332923, 332924, 332925, 332926, 332927, 332928, 332929, 332930, 332931, 332932, 332933, 332934) c6( ) c7(T, hl, WA, cz, KO, v, fr, kv, nA, Fc, ad, UE, iu, aE, aT, hD, dL, hP, K, zy, ae, cjs, eL, cxV, iU, aW, r, as, bQ, eE, bz, dr, es, Ew, eM, lq, at, bt, B, afH); #c1(RGS6) c2(XP_011535710) c3(regulator of G-protein signaling 6 isoform X20) c4(332935, 332936) c5(332937, 332938, 332939, 332940, 332941, 332942, 332943, 332944, 332945, 332946, 332947, 332948, 332949, 332950, 332951, 332952, 332953) c6( ) c7(T, hl, WA, cz, KO, v, fr, kv, nA, Fc, ad, UE, iu, aE, aT, hD, dL, hP, K, zy, ae, cjs, eL, cxV, iU, aW, r, as, bQ, eE, bz, dr, es, Ew, eM, lq, at, bt, B, afH); #c1(RGS7) c2(NP_001269702) c3(regulator of G-protein signaling 7 isoform 2) c4(102614) c5(102615, 102616, 102617, 102618, 102619, 102620, 102621, 102622, 102623, 102624) c6( ) c7(BN, tb, ff, hy, ww, j, nA, en, V, ne); #c1(RGS7) c2(NP_001269704) c3(regulator of G-protein signaling 7 isoform 3) c4(102637, 102638, 102639) c5(102640, 102641, 102642, 102643, 102644, 102645, 102646, 102647, 102648, 102649, 102650, 102651, 102652, 102653, 102654, 102655, 102656, 102657) c6( ) c7(BN, tb, ff, hy, ww, j, nA, en, V, ne); #c1(RGS7) c2(NP_001269707) c3(regulator of G-protein signaling 7 isoform 4) c4(102665) c5(102666, 102667, 102668, 102669, 102670, 102671, 102672, 102673, 102674, 102675) c6( ) c7(BN, tb, ff, hy, ww, j, nA, en, V, ne); #c1(RGS7) c2(NP_002915) c3(regulator of G-protein signaling 7 isoform 1) c4(133531) c5(133532, 133533, 133534, 133535, 133536, 133537) c6( ) c7(BN, tb, ff, hy, ww, j, nA, en, V, ne); #c1(RGS7) c2(XP_005273275) c3(regulator of G-protein signaling 7 isoform X1) c4(284418, 284419) c5(284420, 284421, 284422, 284423, 284424, 284425) c6( ) c7(BN, tb, ff, hy, ww, j, nA, en, V, ne); #c1(RGS7) c2(XP_005273278) c3(regulator of G-protein signaling 7 isoform X2) c4( ) c5(284426, 284427, 284428, 284429, 284430, 284431) c6( ) c7(BN, tb, ff, hy, ww, j, nA, en, V, ne); #c1(RGS7BP) c2(NP_001025046) c3(regulator of G-protein signaling 7-binding protein isoform 1) c4(29267) c5(29268, 29269, 29270, 29271, 29272, 29273) c6( ) c7(aDy, bM, tk); #c1(RGS8) c2(XP_005245612) c3(regulator of G-protein signaling 8 isoform X1) c4(266767, 266768) c5(266769, 266770, 266771, 266772, 266773, 266774, 266775, 266776, 266777, 266778, 266779, 266780, 266781, 266782, 266783, 266784) c6( ) c7(BN, Ub, ff, hy, en, ne); #c1(RGS8) c2(XP_011508391) c3(regulator of G-protein signaling 8 isoform X2) c4(299076) c5(299077, 299078, 299079, 299080, 299081, 299082, 299083, 299084, 299085, 299086) c6( ) c7(BN, Ub, ff, hy, en, ne); #c1(RGS9) c2(NP_001075424) c3(regulator of G-protein signaling 9 isoform 2) c4(37272) c5(37273, 37274, 37275, 37276, 37277, 37278) c6( ) c7(HF, dD, BN, ac, aw, czn, ff, sv, hy, eq, HL, en, HH, cm, ne, cv); #c1(RGS9) c2(NP_003826) c3(regulator of G-protein signaling 9 isoform 1) c4(141178) c5(141179, 141180, 141181, 141182, 141183, 141184) c6( ) c7(HF, dD, BN, ac, aw, czn, ff, sv, hy, eq, HL, en, HH, cm, ne, cv); #c1(RGS9BP) c2(NP_997274) c3(regulator of G-protein signaling 9-binding protein) c4(265367) c5(265368, 265369, 265370, 265371, 265372, 265373, 265374) c6( ) c7(HF, dD, KE, czn, HL, eq, HH); #c1(RGSL1) c2(NP_001131141) c3(regulator of G-protein signaling protein-like) c4(52615) c5(52616, 52617, 52618, 52619, 52620, 52621) c6( ) c7(aW, af, aT); #c1(RHAG) c2(NP_000315) c3(ammonium transporter Rh type A) c4(6970, 6971, 6972, 6973) c5(6974, 6975, 6976, 6977, 6978, 6979, 6980, 6981, 6982, 6983, 6984, 6985, 6986, 6987, 6988, 6989, 6990, 6991, 6992, 6993, 6994, 6995, 6996, 6997) c6( ) c7(czp, uu, czo, cfR); #c1(RHBDD2) c2(NP_001035546) c3(rhomboid domain-containing protein 2 isoform a) c4(32916, 32917, 32918) c5(32919, 32920, 32921, 32922, 32923, 32924, 32925, 32926, 32927, 32928, 32929, 32930, 32931, 32932, 32933, 32934) c6(32935, 32936) c7(aW, r, aT, n, K, q); #c1(RHBDD2) c2(NP_001035547) c3(rhomboid domain-containing protein 2 isoform b) c4( ) c5(32937, 32938, 32939, 32940, 32941, 32942, 32943, 32944, 32945, 32946, 32947) c6( ) c7(aW, r, aT, n, K, q); #c1(RHBDD3) c2(NP_036397) c3(rhomboid domain-containing protein 3) c4(173587, 173588, 173589) c5(173590, 173591, 173592, 173593, 173594, 173595, 173596, 173597, 173598, 173599, 173600, 173601, 173602, 173603, 173604, 173605, 173606, 173607) c6( ) c7(hR, IB); #c1(RHBDF1) c2(NP_071895) c3(inactive rhomboid protein 1) c4(212120, 212121, 212122) c5(212123, 212124, 212125, 212126, 212127, 212128, 212129, 212130, 212131, 212132, 212133, 212134) c6( ) c7(T, aE, bE, aW, oV, qt, ff, aA, r, aT, bB, aF, en, g, q); #c1(RHBDF1) c2(XP_005255555) c3(inactive rhomboid protein 1 isoform X6) c4( ) c5(273731, 273732, 273733, 273734, 273735, 273736) c6( ) c7(T, aE, bE, aW, oV, qt, ff, aA, r, aT, bB, aF, en, g, q); #c1(RHBDF1) c2(XP_011520900) c3(inactive rhomboid protein 1 isoform X3) c4(315891) c5( ) c6( ) c7(T, aE, bE, aW, oV, qt, ff, aA, r, aT, bB, aF, en, g, q); #c1(RHBDF1) c2(XP_011520901) c3(inactive rhomboid protein 1 isoform X4) c4(315892) c5( ) c6( ) c7(T, aE, bE, aW, oV, qt, ff, aA, r, aT, bB, aF, en, g, q); #c1(RHBDF1) c2(XP_011520902) c3(inactive rhomboid protein 1 isoform X5) c4( ) c5(315893, 315894, 315895, 315896, 315897, 315898, 315899, 315900, 315901, 315902, 315903, 315904) c6( ) c7(T, aE, bE, aW, oV, qt, ff, aA, r, aT, bB, aF, en, g, q); #c1(RHBDF2) c2(NP_001005498) c3(inactive rhomboid protein 2 isoform 2) c4(21755, 21756) c5(21757, 21758, 21759, 21760, 21761, 21762, 21763, 21764, 21765, 21766, 21767, 21768) c6( ) c7(T, kh, aNA, ht, fr, ci, pd, ai, br, aT, bCv, hu, hM, aW, ff, baP, en, cm, t, bw, m, czq, B); #c1(RHBDF2) c2(NP_078875) c3(inactive rhomboid protein 2 isoform 1) c4(215869) c5(215870, 215871, 215872, 215873, 215874, 215875) c6( ) c7(T, kh, aNA, ht, fr, ci, pd, ai, br, aT, bCv, hu, hM, aW, ff, baP, en, cm, t, bw, m, czq, B); #c1(RHBDL1) c2(NP_001265649) c3(rhomboid-related protein 1 isoform 1) c4(99109, 99110) c5(99111, 99112, 99113, 99114, 99115, 99116, 99117, 99118, 99119, 99120, 99121, 99122) c6( ) c7(n, cd); #c1(RHBDL2) c2(NP_001291675) c3(rhomboid-related protein 2 isoform 1) c4(116312, 116313) c5(116314, 116315, 116316, 116317, 116318, 116319, 116320, 116321, 116322, 116323, 116324, 116325, 116326, 116327) c6( ) c7(gv, ad); #c1(RHCE) c2(XP_011540191) c3(blood group Rh(CE) polypeptide isoform X2) c4( ) c5(338586, 338587, 338588, 338589, 338590, 338591, 338592, 338593, 338594, 338595) c6( ) c7(atU, qb, Y, yk, qd, dV, czr, qu, Cl, xL, czs, kL); #c1(RHCE) c2(XP_011540192) c3(blood group Rh(CE) polypeptide isoform X3) c4(338596) c5(338597, 338598, 338599, 338600, 338601, 338602) c6( ) c7(atU, qb, Y, yk, qd, dV, czr, qu, Cl, xL, czs, kL); #c1(RHCG) c2(XP_011519965) c3(ammonium transporter Rh type C isoform X1) c4(314799, 314800, 314801, 314802) c5(314803, 314804, 314805, 314806, 314807, 314808, 314809, 314810, 314811, 314812, 314813, 314814, 314815, 314816, 314817, 314818, 314819, 314820, 314821, 314822, 314823, 314824, 314825, 314826) c6( ) c7(Z); #c1(RHEB) c2(NP_005605) c3(GTP-binding protein Rheb) c4(157897) c5(157898, 157899, 157900, 157901, 157902, 157903) c6( ) c7(hl, Ew, eM, Y, jh, aj, dG, dL, ci, Dz, ae, J, ad); #c1(RHEBL1) c2(NP_653194) c3(GTPase RhebL1 isoform 1 precursor) c4(239000) c5(239001, 239002, 239003, 239004, 239005, 239006) c6( ) c7(py); #c1(RHNO1) c2(NP_001239428) c3(RAD9, HUS1, RAD1-interacting nuclear orphan protein 1 isoform 1) c4(88424, 88425, 88426, 88427) c5(88428, 88429, 88430, 88431, 88432, 88433, 88434, 88435, 88436, 88437, 88438, 88439, 88440, 88441, 88442, 88443, 88444, 88445, 88446, 88447, 88448, 88449, 88450, 88451) c6( ) c7(aW, aT); #c1(RHNO1) c2(NP_001239429) c3(RAD9, HUS1, RAD1-interacting nuclear orphan protein 1 isoform 2) c4(88452) c5(88453, 88454, 88455, 88456, 88457, 88458) c6( ) c7(aW, aT); #c1(RHO) c2(NP_000530) c3(rhodopsin) c4(11923) c5(11924, 11925, 11926, 11927, 11928, 11929, 11930, 11931, 11932, 11933, 11934, 11935, 11936, 11937, 11938, 11939, 11940, 11941, 11942, 11943, 11944, 11945, 11946, 11947, 11948, 11949, 11950, 11951, 11952, 11953, 11954, 11955, 11956, 11957, 11958, 11959, 11960, 11961, 11962, 11963, 11964, 11965, 11966, 11967, 11968, 11969, 11970, 11971, 11972, 11973, 11974, 11975, 11976, 11977, 11978, 11979, 11980, 11981, 11982, 11983, 11984, 11985, 11986, 11987, 11988, 11989, 11990, 11991, 11992, 11993, 11994, 11995, 11996, 11997, 11998, 11999, 12000, 12001, 12002, 12003, 12004, 12005, 12006, 12007, 12008, 12009, 12010, 12011, 12012, 12013, 12014, 12015, 12016, 12017, 12018) c6(12019, 12020, 12021) c7(T, nx, fZ, ah, ci, fr, czw, cap, ad, afR, aT, czu, K, bFs, ae, AT, xX, d, IR, apo, MD, Y, tv, aq, tu, g, nk, iR, t, nC, cm, ayj, dr, bN, bgg, y, W, nb, ac, dB, bnP, eM, bP, czt, czv, cj, U, vy, nw, agf, m, Bd, B, ao, de); #c1(RHOB) c2(NP_004031) c3(rho-related GTP-binding protein RhoB precursor) c4(142956) c5(142957, 142958, 142959, 142960, 142961, 142962) c6( ) c7(pb, av, T, iu, d, nB, aW, Y, ff, aT, r, aA, czx, K, m, ci, q, t, en, B, ad); #c1(RHOBTB1) c2(XP_011538726) c3(rho-related BTB domain-containing protein 1 isoform X1) c4(336477) c5(336478, 336479, 336480, 336481, 336482, 336483, 336484, 336485, 336486, 336487) c6( ) c7(bB, bE, ff, en); #c1(RHOBTB1) c2(XP_011538727) c3(rho-related BTB domain-containing protein 1 isoform X2) c4(336488) c5( ) c6( ) c7(bB, bE, ff, en); #c1(RHOBTB1) c2(XP_011538730) c3(rho-related BTB domain-containing protein 1 isoform X5) c4( ) c5(336489, 336490, 336491, 336492, 336493, 336494) c6( ) c7(bB, bE, ff, en); #c1(RHOBTB2) c2(NP_001153508) c3(rho-related BTB domain-containing protein 2 isoform 1) c4(60630) c5(60631, 60632, 60633, 60634, 60635, 60636, 60637) c6( ) c7(qw, T, qt, aW, Pg, aA, aT, cz, fd, dL, aF, ci, bX, czy, iK, eL, ai); #c1(RHOBTB2) c2(NP_001153509) c3(rho-related BTB domain-containing protein 2 isoform 2) c4(60638) c5(60639, 60640, 60641, 60642, 60643, 60644, 60645, 60646, 60647, 60648, 60649) c6( ) c7(qw, T, qt, aW, Pg, aA, aT, cz, fd, dL, aF, ci, bX, czy, iK, eL, ai); #c1(RHOBTB2) c2(XP_011542756) c3(rho-related BTB domain-containing protein 2 isoform X2) c4(341389) c5( ) c6( ) c7(qw, T, qt, aW, Pg, aA, aT, cz, fd, dL, aF, ci, bX, czy, iK, eL, ai); #c1(RHOBTB3) c2(NP_055714) c3(rho-related BTB domain-containing protein 3) c4(183009) c5(183010, 183011, 183012, 183013, 183014, 183015) c6( ) c7(aj, oe); #c1(RHOBTB3) c2(XP_011541581) c3(rho-related BTB domain-containing protein 3 isoform X1) c4(340118) c5(340119, 340120, 340121, 340122, 340123, 340124) c6( ) c7(aj, oe); #c1(RHOD) c2(NP_055393) c3(rho-related GTP-binding protein RhoD isoform 1) c4(180746) c5(180747, 180748, 180749, 180750, 180751, 180752) c6( ) c7(T, fZ, n, ah, ci, fr, ad, afR, aT, K, ae, xX, d, MD, aW, Y, tv, aq, tu, g, nk, iR, t, nC, bN, ac, eM, dB, cj, agf, m, y, B); #c1(RHOF) c2(NP_061907) c3(rho-related GTP-binding protein RhoF precursor) c4(201140, 201141) c5(201142, 201143, 201144, 201145, 201146, 201147, 201148, 201149, 201150, 201151, 201152, 201153) c6( ) c7(ccn, bcb, ig, xR, dV, CH, h, jh, bDl, eh, ciP, LH); #c1(RHOG) c2(XP_005252973) c3(rho-related GTP-binding protein RhoG isoform X1) c4(272088) c5(272089, 272090, 272091, 272092, 272093, 272094, 272095, 272096, 272097, 272098, 272099, 272100, 272101, 272102, 272103, 272104, 272105, 272106) c6( ) c7(h); #c1(RHOH) c2(NP_001265298) c3(rho-related GTP-binding protein RhoH precursor) c4(98191, 98192, 98193, 98194) c5(98195, 98196, 98197, 98198, 98199, 98200, 98201, 98202, 98203, 98204, 98205, 98206, 98207, 98208, 98209, 98210, 98211, 98212, 98213, 98214, 98215, 98216, 98217, 98218, 98219, 98220, 98221) c6( ) c7(bM, pa, fM, zK, CM, eX, jh, cj, hD, eV, fd, i, bt, zn); #c1(RHOJ) c2(NP_065714) c3(rho-related GTP-binding protein RhoJ precursor) c4(205049) c5(205050, 205051, 205052, 205053, 205054, 205055) c6( ) c7(auv, T, cc, beE, jh, oX, pz, X); #c1(RHOQ) c2(NP_036381) c3(rho-related GTP-binding protein RhoQ precursor) c4(173425) c5(173426, 173427, 173428, 173429, 173430, 173431) c6( ) c7(bL, T, q, r); #c1(RHOT1) c2(NP_001028738) c3(mitochondrial Rho GTPase 1 isoform 2) c4(30589) c5(30590, 30591, 30592, 30593, 30594, 30595) c6( ) c7(c, an); #c1(RHOT1) c2(NP_001028740) c3(mitochondrial Rho GTPase 1 isoform 1) c4(30596) c5(30597, 30598, 30599, 30600, 30601, 30602) c6( ) c7(c, an); #c1(RHOT1) c2(NP_001275683) c3(mitochondrial Rho GTPase 1 isoform 5) c4(107039, 107040) c5(107041, 107042, 107043, 107044, 107045, 107046) c6( ) c7(c, an); #c1(RHOT1) c2(NP_060777) c3(mitochondrial Rho GTPase 1 isoform 3) c4(197734) c5(197735, 197736, 197737, 197738, 197739, 197740, 197741, 197742, 197743, 197744, 197745, 197746) c6( ) c7(c, an); #c1(RHOU) c2(NP_067028) c3(rho-related GTP-binding protein RhoU) c4(208532) c5(208533, 208534, 208535, 208536, 208537, 208538) c6( ) c7(dP, T, hw, aW, hk, Y, afQ, ff, aT, aA, aF, en, an, cd); #c1(RHOV) c2(NP_598378) c3(rho-related GTP-binding protein RhoV) c4(235475) c5(235476, 235477, 235478, 235479, 235480, 235481) c6( ) c7(cm, sk, Ou, ya); #c1(RHOXF1) c2(NP_644811) c3(rhox homeobox family member 1) c4( ) c5(238576, 238577, 238578, 238579, 238580) c6( ) c7(T); #c1(RHOXF1) c2(XP_011529583) c3(rhox homeobox family member 1 isoform X1) c4(325141) c5(325142) c6( ) c7(T); #c1(RHOXF2) c2(NP_115887) c3(rhox homeobox family member 2) c4(224533) c5(224534, 224535, 224536, 224537, 224538, 224539) c6( ) c7(ck, T, aF, aA); #c1(RHPN1) c2(NP_443156) c3(rhophilin-1) c4(229670) c5(229671, 229672, 229673, 229674, 229675, 229676) c6( ) c7(kI); #c1(RHPN2) c2(NP_149094) c3(rhophilin-2) c4(227110, 227111, 227112) c5(227113, 227114, 227115, 227116, 227117, 227118, 227119, 227120, 227121, 227122, 227123, 227124, 227125, 227126, 227127, 227128, 227129, 227130) c6( ) c7(d, eA, r); #c1(RIBC2) c2(NP_056468) c3(RIB43A-like with coiled-coils protein 2) c4(187646, 187647) c5(187648, 187649, 187650, 187651, 187652, 187653, 187654) c6( ) c7(aT); #c1(RIBC2) c2(XP_005261581) c3(RIB43A-like with coiled-coils protein 2 isoform X1) c4( ) c5(277492, 277493, 277494, 277495, 277496) c6( ) c7(aT); #c1(RIC1) c2(NP_001129392) c3(RAB6A-GEF complex partner protein 1 isoform b) c4(51412, 51413) c5(51414, 51415, 51416, 51417, 51418, 51419, 51420, 51421, 51422, 51423, 51424, 51425) c6( ) c7(an); #c1(RIC1) c2(NP_001193486) c3(RAB6A-GEF complex partner protein 1 isoform c) c4(82224) c5(82225, 82226, 82227, 82228, 82229, 82230) c6( ) c7(an); #c1(RIC1) c2(NP_065880) c3(RAB6A-GEF complex partner protein 1 isoform a) c4(206051, 206052) c5(206053, 206054, 206055, 206056, 206057, 206058, 206059, 206060, 206061, 206062, 206063, 206064) c6( ) c7(an); #c1(RIC3) c2(NP_001128581) c3(protein RIC-3 isoform b precursor) c4(50329) c5(50330, 50331, 50332, 50333, 50334, 50335) c6( ) c7(cm, V); #c1(RIC3) c2(NP_001193600) c3(protein RIC-3 isoform c precursor) c4(82321, 82322) c5(82323, 82324, 82325, 82326, 82327, 82328, 82329, 82330, 82331, 82332, 82333, 82334, 82335, 82336, 82337, 82338, 82339, 82340) c6( ) c7(cm, V); #c1(RIC3) c2(NP_001193601) c3(protein RIC-3 isoform d precursor) c4(82341) c5(82342, 82343, 82344, 82345, 82346, 82347) c6( ) c7(cm, V); #c1(RIC3) c2(NP_078833) c3(protein RIC-3 isoform a precursor) c4(215647) c5(215648, 215649, 215650, 215651, 215652, 215653) c6( ) c7(cm, V); #c1(RIC3) c2(XP_006718380) c3(protein RIC-3 isoform X2) c4(291800, 291801, 291802) c5(291803, 291804, 291805, 291806, 291807, 291808) c6( ) c7(cm, V); #c1(RIC3) c2(XP_006718384) c3(protein RIC-3 isoform X4) c4( ) c5(291809, 291810, 291811, 291812, 291813, 291814, 291815) c6( ) c7(cm, V); #c1(RICTOR) c2(NP_001272368) c3(rapamycin-insensitive companion of mTOR isoform 2) c4(104006) c5(104007, 104008, 104009, 104010, 104011, 104012) c6( ) c7(jf, BN, fR, ne, hW, n, hy, eA, g, ae, B, ad, aBs); #c1(RICTOR) c2(NP_689969) c3(rapamycin-insensitive companion of mTOR isoform 1) c4(244631) c5(244632, 244633, 244634, 244635, 244636, 244637) c6( ) c7(jf, BN, fR, ne, hW, n, hy, eA, g, ae, B, ad, aBs); #c1(RIF1) c2(NP_001171134) c3(telomere-associated protein RIF1 isoform 2) c4(69916) c5(69917, 69918, 69919, 69920, 69921, 69922, 69923, 69924, 69925, 69926, 69927, 69928, 69929, 69930) c6( ) c7(eG, cF); #c1(RIF1) c2(NP_060621) c3(telomere-associated protein RIF1 isoform 1) c4(196861) c5(196862, 196863, 196864, 196865, 196866, 196867, 196868, 196869, 196870, 196871, 196872, 196873, 196874, 196875, 196876) c6( ) c7(eG, cF); #c1(RIF1) c2(XP_011509696) c3(telomere-associated protein RIF1 isoform X3) c4(300263, 300264) c5( ) c6( ) c7(eG, cF); #c1(RIF1) c2(XP_011509697) c3(telomere-associated protein RIF1 isoform X4) c4( ) c5(300265, 300266, 300267, 300268, 300269, 300270, 300271) c6( ) c7(eG, cF); #c1(RILP) c2(NP_113618) c3(rab-interacting lysosomal protein) c4(221753) c5(221754, 221755, 221756, 221757, 221758, 221759) c6( ) c7(czz); #c1(RILPL1) c2(NP_847884) c3(RILP-like protein 1) c4(253643) c5(253644, 253645, 253646, 253647, 253648, 253649) c6( ) c7(oe); #c1(RIMBP2) c2(NP_056162) c3(RIMS-binding protein 2) c4(186054) c5(186055, 186056, 186057, 186058, 186059) c6( ) c7(bP, eM, af, aA, aF, bz, B); #c1(RIMBP2) c2(XP_011536407) c3(RIMS-binding protein 2 isoform X3) c4( ) c5(333714) c6( ) c7(bP, eM, af, aA, aF, bz, B); #c1(RIMBP2) c2(XP_011536409) c3(RIMS-binding protein 2 isoform X5) c4(333715, 333716) c5(333717, 333718, 333719, 333720, 333721, 333722, 333723, 333724, 333725, 333726, 333727, 333728) c6( ) c7(bP, eM, af, aA, aF, bz, B); #c1(RIMBP3C) c2(NP_001122105) c3(RIMS-binding protein 3C) c4(46442, 46443) c5(46444, 46445, 46446, 46447, 46448, 46449, 46450, 46451, 46452, 46453, 46454, 46455, 46456, 46457) c6( ) c7(eZ); #c1(RIMS1) c2(NP_001161879) c3(regulating synaptic membrane exocytosis protein 1 isoform 2) c4(66276) c5(66277, 66278, 66279, 66280, 66281, 66282) c6( ) c7(lR, nb, W, nx, aVu, j, blQ, nC); #c1(RIMS1) c2(NP_001161880) c3(regulating synaptic membrane exocytosis protein 1 isoform 3) c4(66283) c5(66284, 66285, 66286, 66287, 66288, 66289) c6( ) c7(lR, nb, W, nx, aVu, j, blQ, nC); #c1(RIMS1) c2(NP_001161881) c3(regulating synaptic membrane exocytosis protein 1 isoform 4) c4(66290) c5( ) c6( ) c7(lR, nb, W, nx, aVu, j, blQ, nC); #c1(RIMS1) c2(NP_001161882) c3(regulating synaptic membrane exocytosis protein 1 isoform 5 precursor) c4(66291) c5(66292, 66293, 66294, 66295, 66296, 66297, 66298) c6( ) c7(lR, nb, W, nx, aVu, j, blQ, nC); #c1(RIMS1) c2(NP_001161883) c3(regulating synaptic membrane exocytosis protein 1 isoform 6) c4( ) c5(66299, 66300, 66301, 66302, 66303) c6( ) c7(lR, nb, W, nx, aVu, j, blQ, nC); #c1(RIMS1) c2(NP_055804) c3(regulating synaptic membrane exocytosis protein 1 isoform 1) c4(183598) c5(183599, 183600, 183601, 183602, 183603, 183604) c6( ) c7(lR, nb, W, nx, aVu, j, blQ, nC); #c1(RIMS1) c2(XP_005248745) c3(regulating synaptic membrane exocytosis protein 1 isoform X7) c4(268519, 268520, 268521, 268522, 268523, 268524) c5(268525, 268526, 268527, 268528, 268529, 268530, 268531, 268532, 268533, 268534, 268535, 268536, 268537, 268538, 268539, 268540, 268541, 268542, 268543, 268544, 268545, 268546, 268547, 268548, 268549, 268550, 268551, 268552, 268553, 268554, 268555, 268556, 268557, 268558, 268559, 268560) c6( ) c7(lR, nb, W, nx, aVu, j, blQ, nC); #c1(RIMS1) c2(XP_011533909) c3(regulating synaptic membrane exocytosis protein 1 isoform X6) c4(330104) c5(330105, 330106, 330107, 330108, 330109, 330110) c6( ) c7(lR, nb, W, nx, aVu, j, blQ, nC); #c1(RIMS1) c2(XP_011533914) c3(regulating synaptic membrane exocytosis protein 1 isoform X12) c4( ) c5(330111, 330112, 330113, 330114, 330115) c6( ) c7(lR, nb, W, nx, aVu, j, blQ, nC); #c1(RIMS1) c2(XP_011533920) c3(regulating synaptic membrane exocytosis protein 1 isoform X17) c4(330116) c5(330117) c6( ) c7(lR, nb, W, nx, aVu, j, blQ, nC); #c1(RIMS2) c2(NP_001093587) c3(regulating synaptic membrane exocytosis protein 2 isoform a) c4(40311) c5(40312, 40313, 40314, 40315, 40316, 40317) c6( ) c7(T, os, aC, bB, ci, x, aU, K, hu, H, eL, bc, aW, La, as, eE, cm, aAW, eM, nB, iT, vA, U, dW, nw, k, m, avU, NK, gU, Ol, ht, NT, n, aj, nA, qN, eW, ft, hw, Ak, h, aYf, dL, cC, oS, kj, aq, op, bP, mg, hR, bfX, fL, jd, it, B, L, bL, fM, dA, cjn, ew, ON, C, q, J, qH, er, Kx, MR, WY, aT, jj, ae, bUd, IE, wr, iU, Y, r, aaE, lo, bu, aaO, t, ck, rR, alC, c, gX, bt, kh, pY, jh, oZ, dG, hF, Fc, mC, ad, Ae, oj, bj, ji, lQ, fb, nJ, uX, aCt, xs, eZ, app, KM, bz, bE, afd, IF, Kj, bC, IC, kS, iu, y); #c1(RIMS2) c2(NP_001269810) c3(regulating synaptic membrane exocytosis protein 2 isoform c) c4(102880) c5(102881, 102882, 102883, 102884, 102885, 102886) c6( ) c7(T, os, aC, bB, ci, x, aU, K, hu, H, eL, bc, aW, La, as, eE, cm, aAW, eM, nB, iT, vA, U, dW, nw, k, m, avU, NK, gU, Ol, ht, NT, n, aj, nA, qN, eW, ft, hw, Ak, h, aYf, dL, cC, oS, kj, aq, op, bP, mg, hR, bfX, fL, jd, it, B, L, bL, fM, dA, cjn, ew, ON, C, q, J, qH, er, Kx, MR, WY, aT, jj, ae, bUd, IE, wr, iU, Y, r, aaE, Io, bu, aaO, t, ck, rR, alC, c, gX, bt, kh, pY, jh, oZ, dG, hF, Fc, mC, ad, Ae, oj, bj, ji, IQ, fb, nJ, uX, aCt, xs, eZ, app, KM, bz, bE, afd, IF, Kj, bC, IC, kS, iu, y); #c1(RIMS2) c2(NP_001269811) c3(regulating synaptic membrane exocytosis protein 2 isoform d) c4(102887) c5(102888, 102889, 102890, 102891, 102892, 102893) c6( ) c7(T, os, aC, bB, ci, x, aU, K, hu, H, eL, bc, aW, La, as, eE, cm, aAW, eM, nB, iT, vA, U, dW, nw, k, m, avU, NK, gU, Ol, ht, NT, n, aj, nA, qN, eW, ft, hw, Ak, h, aYf, dL, cC, oS, kj, aq, op, bP, mg, hR, bfX, fL, jd, it, B, L, bL, fM, dA, cjn, ew, ON, C, q, J, qH, er, Kx, MR, WY, aT, jj, ae, bUd, IE, wr, iU, Y, r, aaE, Io, bu, aaO, t, ck, rR, alC, c, gX, bt, kh, pY, jh, oZ, dG, hF, Fc, mC, ad, Ae, oj, bj, ji, IQ, fb, nJ, uX, aCt, xs, eZ, app, KM, bz, bE, afd, IF, Kj, bC, IC, kS, iu, y); #c1(RIMS2) c2(NP_055492) c3(regulating synaptic membrane exocytosis protein 2 isoform b) c4(181486) c5(181487, 181488, 181489, 181490, 181491, 181492, 181493, 181494, 181495, 181496, 181497, 181498) c6( ) c7(T, os, aC, bB, ci, x, aU, K, hu, H, eL, bc, aW, La, as, eE, cm, aAW, eM, nB, iT, vA, U, dW, nw, k, m, avU, NK, gU, Ol, ht, NT, n, aj, nA, qN, eW, ft, hw, Ak, h, aYf, dL, cC, oS, kj, aq, op, bP, mg, hR, bfX, fL, jd, it, B, L, bL, fM, dA, cjn, ew, ON, C, q, J, qH, er, Kx, MR, WY, aT, jj, ae, bUd, IE, wr, iU, Y, r, aaE, lo, bu, aaO, t, ck, rR, alC, c, gX, bt, kh, pY, jh, oZ, dG, hF, Fc, mC, ad, Ae, oj, bj, ji, IQ, fb, nJ, uX, aCt, xs, eZ, app, KM, bz, bE, afd, IF, Kj, bC, IC, kS, iu, y); #c1(RIMS2) c2(XP_011515692) c3(regulating synaptic membrane exocytosis protein 2 isoform X2) c4(308532) c5( ) c6( ) c7(T, os, aC, bB, ci, x, aU, K, hu, H, eL, bc, aW, La, as, eE, cm, aAW, eM, nB, iT, vA, U, dW, nw, k, m, avU, NK, gU, Ol, ht, NT, n, aj, nA, qN, eW, ft, hw, Ak, h, aYf, dL, cC, oS, kj, aq, op, bP, mg, hR, bfX, fL, jd, it, B, L, bL, fM, dA, cjn, ew, ON, C, q, J, qH, er, Kx, MR, WY, aT, jj, ae, bUd, IE, wr, iU, Y, r, aaE, Io, bu, aaO, t, ck, rR, alC, c, gX, bt, kh, pY, jh, oZ, dG, hF, Fc, mC, ad, Ae, oj, bj, ji, IQ, fb, nJ, uX, aCt, xs, eZ, app, KM, bz, bE, afd, IF, Kj, bC, IC, kS, iu, y); #c1(RIMS2) c2(XP_011515700) c3(regulating synaptic membrane exocytosis protein 2 isoform X13) c4(308533, 308534) c5(308535, 308536, 308537, 308538, 308539, 308540, 308541, 308542, 308543, 308544, 308545, 308546) c6( ) c7(T, os, aC, bB, ci, x, aU, K, hu, H, eL, bc, aW, La, as, eE, cm, aAW, eM, nB, iT, vA, U, dW, nw, k, m, avU, NK, gU, Ol, ht, NT, n, aj, nA, qN, eW, ft, hw, Ak, h, aYf, dL, cC, oS, kj, aq, op, bP, mg, hR, bfX, fL, jd, it, B, L, bL, fM, dA, cjn, ew, ON, C, q, J, qH, er, Kx, MR, WY, aT, jj, ae, bUd, IE, wr, iU, Y, r, aaE, Io, bu, aaO, t, ck, rR, alC, c, gX, bt, kh, pY, jh, oZ, dG, hF, Fc, mC, ad, Ae, oj, bj, ji, IQ, fb, nJ, uX, aCt, xs, eZ, app, KM, bz, bE, afd, IF, Kj, bC, IC, kS, iu, y); #c1(RIMS4) c2(NP_001192246) c3(regulating synaptic membrane exocytosis protein 4 isoform 1) c4(82142) c5(82143, 82144, 82145, 82146, 82147, 82148) c6( ) c7(are); #c1(RIMS4) c2(NP_892015) c3(regulating synaptic membrane exocytosis protein 4 isoform 2) c4(257611) c5(257612, 257613, 257614, 257615, 257616, 257617) c6( ) c7(are); #c1(RIN1) c2(NP_004283) c3(ras and Rah interactor 1) c4(144827, 144828) c5(144829, 144830, 144831, 144832, 144833, 144834) c6( ) c7(iu, T, Jl, aW, Y, bE, ff, aT, bB, n, jj, en, g, B, er); #c1(RIN1) c2(XP_011543703) c3(ras and Rah interactor 1 isoform X3) c4( ) c5(342778, 342779, 342780, 342781, 342782, 342783) c6( ) c7(iu, T, Jl, aW, Y, bE, ff, aT, bB, n, jj, en, g, B, er); #c1(RIN2) c2(NP_001229510) c3(ras and Rab interactor 2 isoform 1) c4(84582) c5(84583, 84584, 84585, 84586, 84587, 84588) c6( ) c7(ac, czA, aT, h, aq, eA, ei, Xu, iR, bw, nJ, B, IU); #c1(RIN2) c2(XP_005260790) c3(ras and Rab interactor 2 isoform X7) c4( ) c5(276878, 276879, 276880, 276881, 276882, 276883) c6( ) c7(ac, czA, aT, h, aq, eA, ei, Xu, iR, bw, nJ, B, IU); #c1(RIN2) c2(XP_011527558) c3(ras and Rab interactor 2 isoform X3) c4(322402) c5( ) c6( ) c7(ac, czA, aT, h, aq, eA, ei, Xu, iR, bw, nJ, B, IU); #c1(RIN3) c2(NP_079108) c3(ras and Rab interactor 3) c4(217061, 217062) c5(217063, 217064, 217065, 217066, 217067, 217068, 217069) c6( ) c7(bi, bdM); #c1(RIN3) c2(XP_011535467) c3(ras and Rab interactor 3 isoform X3) c4(332528) c5(332529, 332530, 332531, 332532, 332533, 332534, 332535, 332536, 332537, 332538, 332539, 332540) c6( ) c7(bi, bdM); #c1(RING1) c2(NP_002922) c3(E3 ubiquitin-protein ligase RING1) c4(133584) c5(133585, 133586, 133587, 133588, 133589, 133590, 133591, 133592, 133593, 133594, 133595, 133596, 133597, 133598, 133599, 133600, 133601, 133602, 133603, 133604, 133605, 133606, 133607, 133608) c6( ) c7(ID, ly, es, A, BN, aE, iW, eZ, n, hy, vc, kp, fr, cM, ae, ne, ad, lx); #c1(RINT1) c2(NP_068749) c3(RAD50-interacting protein 1) c4(210170) c5(210171, 210172, 210173, 210174, 210175, 210176) c6( ) c7(aW, T, BO, aT); #c1(RINT1) c2(XP_011514760) c3(RAD50-interacting protein 1 isoform X1) c4( ) c5(307405) c6( ) c7(aW, T, BO, aT); #c1(RIOK1) c2(NP_113668) c3(serine/threonine-protein kinase RIO1 isoform 1) c4(222033) c5(222034, 222035, 222036, 222037, 222038, 222039) c6( ) c7(aC, d); #c1(RIOK2) c2(NP_001153221) c3(serine/threonine-protein kinase RIO2 isoform 2) c4(60551) c5(60552, 60553, 60554, 60555, 60556, 60557) c6( ) c7(uC, jv, d, cz); #c1(RIOK2) c2(NP_060813) c3(serine/threonine-protein kinase RIO2 isoform 1) c4(197954) c5(197955, 197956, 197957, 197958, 197959, 197960) c6( ) c7(uC, jv, d, cz); #c1(RIOK3) c2(NP_003822) c3(serine/threonine-protein kinase RIO3) c4(141170) c5(141171, 141172, 141173, 141174, 141175, 141176) c6( ) c7(aC, eJ); #c1(RIPK1) c2(NP_003795) c3(receptor-interacting serine/threonine-protein kinase 1) c4(140926, 140927) c5(140928, 140929, 140930, 140931, 140932, 140933, 140934, 140935, 140936, 140937, 140938, 140939, 140940, 140941, 140942, 140943, 140944) c6( ) c7(T, fM, dA, fR, iW, yG, czB, aj, ci, EA, q, J, ad, av, aE, ds, nl, aT, K, eG, d, aW, r, t, iK, lt, eM, bo, m, hE, bt, y); #c1(RIPK1) c2(XP_011513271) c3(receptor-interacting serine/threonine-protein kinase 1 isoform X2) c4(305545) c5( ) c6( ) c7(T, fM, dA, fR, iW, yG, czB, aj, ci, EA, q, J, ad, av, aE, ds, nI, aT, K, eG, d, aW, r, t, iK, lt, eM, bo, m, hE, bt, y); #c1(RIPK2) c2(NP_003812) c3(receptor-interacting serine/threonine-protein kinase 2) c4(141060) c5(141061, 141062, 141063, 141064, 141065, 141066, 141067) c6( ) c7(oO, bL, cZ, T, fM, dA, fR, ya, dD, bM, ea, e, jh, aA, ti, ww, eq, ci, q, ad, eA, bv, AW, l, hd, aE, u, hW, av, Dq, mj, Ou, gl, ji, dd, fb, ae, dx, li, tb, aCt, aCs, r, eZ, fe, aF, zC, g, as, iV, FX, acD, cm, hq, rR, acC, eM, dB, gX, On); #c1(RIPK2) c2(XP_005251149) c3(receptor-interacting serine/threonine-protein kinase 2 isoform X1) c4(270839) c5(270840, 270841, 270842, 270843, 270844) c6( ) c7(oO, bL, cZ, T, fM, dA, fR, ya, dD, bM, ea, e, jh, aA, ti, ww, eq, ci, q, ad, eA, bv, AW, l, hd, aE, u, hW, av, Dq, mj, Ou, gl, ji, dd, fb, ae, dx, li, tb, aCt, aCs, r, eZ, fe, aF, zC, g, as, iV, FX, acD, cm, hq, rR, acC, eM, dB, gX, On); #c1(RIPK3) c2(NP_006862) c3(receptor-interacting serine/threonine-protein kinase 3) c4(168695) c5(168696, 168697, 168698, 168699, 168700, 168701) c6( ) c7(av, ft, d, dD, up, ea, ds, AQ, iW, nl, ceC, cj, fe, nw, v, K, IS, eq, wb, hE); #c1(RIPK4) c2(NP_065690) c3(receptor-interacting serine/threonine-protein kinase 4) c4(204939, 204940, 204941, 204942) c5(204943, 204944, 204945, 204946, 204947, 204948, 204949, 204950, 204951, 204952, 204953, 204954, 204955, 204956, 204957, 204958, 204959, 204960, 204961, 204962, 204963, 204964, 204965, 204966, 204967, 204968, 204969, 204970) c6( ) c7(fM, czC, czB, j, f, Vj, bTm); #c1(RIPPLY2) c2(NP_001009994) c3(protein ripply2) c4(23801, 23802) c5(23803, 23804, 23805, 23806, 23807, 23808, 23809, 23810, 23811, 23812, 23813, 23814) c6( ) c7(XW); #c1(RIT1) c2(NP_001243749) c3(GTP-binding protein Rit1 isoform 3) c4( ) c5(91641, 91642, 91643, 91644, 91645) c6( ) c7(ck, T, iR, yS, Az, czD, bD, aq, Gp, B); #c1(RIT1) c2(NP_001243750) c3(GTP-binding protein Rit1 isoform 1) c4(91646) c5(91647, 91648, 91649, 91650, 91651, 91652, 91653) c6( ) c7(ck, T, iR, yS, Az, czD, bD, aq, Gp, B); #c1(RIT1) c2(NP_008843) c3(GTP-binding protein Rit1 isoform 2) c4(168987, 168988) c5(168989, 168990, 168991, 168992, 168993, 168994) c6( ) c7(ck, T, iR, yS, Az, czD, bD, aq, Gp, B); #c1(RIT2) c2(NP_001259006) c3(GTP-binding protein Rit2 isoform 2) c4(96932) c5(96933, 96934, 96935, 96936, 96937, 96938) c6( ) c7(qC, bL, mj, F, iA, jx, hl, n, cy, v, fr, apt, an, Gp, hE, fq, y, vi); #c1(RIT2) c2(NP_002921) c3(GTP-binding protein Rit2 isoform 1) c4(133577) c5(133578, 133579, 133580, 133581, 133582, 133583) c6( ) c7(qC, bL, mj, F, iA, jx, hl, n, cy, v, fr, apt, an, Gp, hE, fq, y, vi); #c1(RITA1) c2(NP_001273144) c3(RBPJ-interacting and tubulin-associated protein 1 isoform 2) c4(104367, 104368) c5(104369, 104370, 104371, 104372, 104373, 104374, 104375, 104376, 104377, 104378) c6( ) c7(ck, T, nB, aW, cj, aT, fd, cm, bt, eJ, dx); #c1(RITA1) c2(NP_116237) c3(RBPJ-interacting and tubulin-associated protein 1 isoform 1) c4(225885) c5(225886, 225887, 225888, 225889, 225890, 225891, 225892, 225893, 225894, 225895, 225896, 225897, 225898, 225899, 225900, 225901) c6( ) c7(ck, T, nB, aW, cj, aT, fd, cm, bt, eJ, dx); #c1(RLBP1) c2(XP_011520172) c3(retinaldehyde-binding protein 1 isoform X1) c4(315041) c5(315042, 315043, 315044, 315045, 315046, 315047) c6( ) c7(bF, apo, IR, bnP, nx, aSW, nw, czF, OL, nk, czE, db, qW, cap, nC); #c1(RLF) c2(XP_011540196) c3(zinc finger protein Rlf isoform X2) c4( ) c5(338603) c6( ) c7(ft, Kw); #c1(RLIM) c2(NP_899196) c3(E3 ubiquitin-protein ligase RLIM) c4(258000) c5(258001, 258002, 258003, 258004, 258005, 258006, 258007, 258008, 258009, 258010, 258011) c6( ) c7(ad); #c1(RLN1) c2(NP_008842) c3(prorelaxin H1 preproprotein) c4(168979) c5(168980, 168981, 168982, 168983, 168984, 168985, 168986) c6( ) c7(T, nB, vT, aW, Lf, cz, aT, ad); #c1(RLN2) c2(NP_005050) c3(prorelaxin H2 isoform 2 precursor) c4(152448, 152449) c5(152450, 152451, 152452, 152453, 152454, 152455, 152456, 152457, 152458, 152459) c6( ) c7(T, hd, nB, aW, aw, aT, K, ad); #c1(RLN2) c2(NP_604390) c3(prorelaxin H2 isoform 1 preproprotein) c4(235775) c5(235776, 235777, 235778, 235779, 235780, 235781, 235782, 235783, 235784, 235785, 235786, 235787, 235788, 235789, 235790, 235791, 235792, 235793, 235794, 235795, 235796, 235797, 235798, 235799, 235800, 235801, 235802, 235803, 235804, 235805, 235806, 235807, 235808, 235809, 235810, 235811, 235812, 235813, 235814, 235815, 235816, 235817, 235818, 235819, 235820, 235821, 235822, 235823, 235824, 235825, 235826, 235827, 235828, 235829, 235830, 235831, 235832, 235833, 235834, 235835, 235836, 235837, 235838, 235839, 235840, 235841, 235842, 235843, 235844, 235845, 235846, 235847, 235848, 235849, 235850, 235851, 235852, 235853, 235854, 235855, 235856, 235857, 235858, 235859, 235860, 235861, 235862, 235863, 235864, 235865, 235866, 235867, 235868, 235869) c6(235870) c7(T, hd, nB, aW, aw, aT, K, ad); #c1(RLN3) c2(NP_543140) c3(relaxin-3 preproprotein) c4(233380) c5(233381, 233382, 233383, 233384, 233385, 233386) c6( ) c7(j, K); #c1(RMDN1) c2(NP_001273648) c3(regulator of microtubule dynamics protein 1 isoform 3) c4(105543) c5(105544, 105545, 105546, 105547, 105548, 105549) c6( ) c7(T, hI, fM, GC, C, cd, q, ad, Hx, cbH, aE, h, cy, K, XZ, ae, af, d, aW, amI, Y, ff, r, en, U, m, B); #c1(RMDN1) c2(NP_057117) c3(regulator of microtubule dynamics protein 1 isoform 1) c4(188980) c5(188981, 188982, 188983, 188984, 188985, 188986) c6( ) c7(T, hI, fM, GC, C, cd, q, ad, Hx, cbH, aE, h, cy, K, XZ, ae, af, d, aW, amI, Y, ff, r, en, U, m, B); #c1(RMDN2) c2(NP_001164263) c3(regulator of microtubule dynamics protein 2 isoform 2) c4(66855, 66856) c5(66857, 66858, 66859, 66860, 66861, 66862, 66863, 66864, 66865, 66866, 66867, 66868, 66869, 66870, 66871, 66872) c6( ) c7(hl, jh, GC, C, cd, ad, x, Hx, cbH, aE, h, cy, dL, K, XZ, ae, af, d, aW, amI, Y, ff, en, W, U, at, k, m, B); #c1(RMDN2) c2(NP_001164264) c3(regulator of microtubule dynamics protein 2 isoform 3) c4(66873, 66874) c5(66875, 66876, 66877, 66878, 66879, 66880, 66881, 66882, 66883, 66884, 66885, 66886, 66887, 66888, 66889, 66890, 66891, 66892) c6( ) c7(hl, jh, GC, C, cd, ad, x, Hx, cbH, aE, h, cy, dL, K, XZ, ae, af, d, aW, amI, Y, ff, en, W, U, at, k, m, B); #c1(RMDN2) c2(NP_653314) c3(regulator of microtubule dynamics protein 2 isoform 1) c4( ) c5(239559, 239560, 239561, 239562, 239563, 239564) c6( ) c7(hl, jh, GC, C, cd, ad, x, Hx, cbH, aE, h, cy, dL, K, XZ, ae, af, d, aW, amI, Y, ff, en, W, U, at, k, m, B); #c1(RMDN2) c2(XP_011530916) c3(regulator of microtubule dynamics protein 2 isoform X1) c4( ) c5(326913) c6( ) c7(hl, jh, GC, C, cd, ad, x, Hx, cbH, aE, h, cy, dL, K, XZ, ae, af, d, aW, amI, Y, ff, en, W, U, at, k, m, B); #c1(RMDN2) c2(XP_011530917) c3(regulator of microtubule dynamics protein 2 isoform X2) c4(326914, 326915) c5( ) c6( ) c7(hl, jh, GC, C, cd, ad, x, Hx, cbH, aE, h, cy, dL, K, XZ, ae, af, d, aW, amI, Y, ff, en, W, U, at, k, m, B); #c1(RMDN3) c2(NP_001291731) c3(regulator of microtubule dynamics protein 3) c4(116434, 116435, 116436) c5(116437, 116438, 116439, 116440, 116441, 116442, 116443, 116444, 116445, 116446, 116447, 116448, 116449, 116450, 116451, 116452, 116453, 116454, 116455, 116456, 116457, 116458) c6( ) c7(T, hl, GC, ci, C, cd, ad, eA, Hx, afr, cbH, aE, h, cy, K, XZ, ae, af, d, aW, amI, Y, ff, en, sS, U, m, bt, B); #c1(RMI1) c2(XP_011517336) c3(recQ-mediated genome instability protein 1 isoform X1) c4(311004, 311005) c5(311006, 311007, 311008, 311009, 311010, 311011, 311012, 311013, 311014, 311015, 311016, 311017) c6( ) c7(T, ac, hk, Y, gK, ew, r, bw, bt, q, br, ad); #c1(RMI2) c2(NP_689521) c3(recQ-mediated genome instability protein 2) c4(242970, 242971) c5(242972, 242973, 242974, 242975, 242976, 242977, 242978, 242979, 242980, 242981, 242982, 242983) c6( ) c7(aj, Bv, j, K, A); #c1(RMND1) c2(NP_001258866) c3(required for meiotic nuclear division protein 1 homolog isoform 2) c4( ) c5(96605, 96606, 96607, 96608, 96609, 96610, 96611) c6( ) c7(hb, cc, czG, fM); #c1(RMND1) c2(NP_060379) c3(required for meiotic nuclear division protein 1 homolog isoform 1) c4(195702, 195703, 195704, 195705) c5(195706, 195707, 195708, 195709, 195710, 195711) c6( ) c7(hb, cc, czG, fM); #c1(RMND1) c2(XP_005267097) c3(required for meiotic nuclear division protein 1 homolog isoform X1) c4( ) c5(280680, 280681, 280682, 280683, 280684, 280685, 280686, 280687, 280688, 280689, 280690) c6( ) c7(hb, cc, czG, fM); #c1(RNASE1) c2(NP_937875) c3(ribonuclease pancreatic precursor) c4(259362) c5(259363, 259364, 259365, 259366, 259367, 259368, 259369, 259370, 259371, 259372, 259373, 259374, 259375, 259376, 259377, 259378, 259379, 259380) c6( ) c7(T, aC, pf, azi, if, bB, bv, aE, K, aCU, LC, aW, Ls, hI, as, cm, Qt, eM, iT, TG, U, cj, n, BE, ct, nA, qN, fr, no, ep, kH, h, By, wb, Um, dx, xf, fe, kp, yq, bQL, YE, dB, Pl, ajW, B, fG, aA, cz, q, eA, lg, aT, cy, dz, zp, ae, jf, afG, Y, r, en, t, bN, ck, ac, c, AH, HK, mf, dy, aps, zu, bt, jh, bS, zU, iJ, ad, fU, ds, vw, ji, NP, d, BO, ff, aF, iV, Z, bz, dr, eK, Ew, yE, bE, X, aS, iu); #c1(RNASE11) c2(NP_660293) c3(probable ribonuclease 11 precursor) c4(240669, 240670, 240671, 240672, 240673) c5(240674, 240675, 240676, 240677, 240678, 240679, 240680, 240681, 240682, 240683, 240684, 240685, 240686, 240687, 240688, 240689, 240690, 240691, 240692, 240693, 240694, 240695, 240696, 240697, 240698, 240699, 240700, 240701, 240702, 240703, 240704, 240705, 240706, 240707, 240708, 240709, 240710, 240711, 240712, 240713, 240714, 240715, 240716, 240717, 240718, 240719, 240720, 240721, 240722, 240723, 240724, 240725, 240726, 240727, 240728, 240729, 240730, 240731, 240732, 240733, 240734, 240735, 240736, 240737, 240738, 240739, 240740, 240741, 240742, 240743, 240744, 240745, 240746, 240747, 240748, 240749) c6(240750, 240751, 240752, 240753, 240754, 240755, 240756, 240757, 240758, 240759, 240760, 240761, 240762, 240763, 240764, 240765, 240766, 240767, 240768, 240769) c7(aVk); #c1(RNASE12) c2(NP_001019993) c3(probable inactive ribonuclease-like protein 12 precursor) c4(28000) c5(28001, 28002, 28003, 28004, 28005, 28006, 28007, 28008, 28009, 28010, 28011, 28012, 28013, 28014) c6(28015, 28016, 28017, 28018) c7(bN, cH, om, cj, v, nA, bD, biW, alL); #c1(RNASE13) c2(NP_001012264) c3(probable inactive ribonuclease-like protein 13 precursor) c4(24814) c5(24815, 24816, 24817, 24818, 24819, 24820, 24821, 24822) c6(24823, 24824) c7(azx, VM); #c1(RNASE2) c2(NP_002925) c3(non-secretory ribonuclease precursor) c4(133609) c5(133610, 133611, 133612, 133613, 133614, 133615) c6( ) c7(bM, cT, aDu, tW, ac, z, oy, aXb, aKC, bBH, uu, ey, eE, t, qa); #c1(RNASE3) c2(NP_002926) c3(eosinophil cationic protein precursor) c4(133616, 133617) c5(133618, 133619, 133620, 133621, 133622, 133623) c6( ) c7(bM, T, JN, aDy, aoj, Jx, nE, eh, baA, yt, oW, aZW, cU, dV, bYH, aDp, Cy, Nr, czH, sp, bfz, ff, po, lo, bBH, en, aFd, eE, zV, Nq, JA, z, aDB, JM, aNn, ne); #c1(RNASE4) c2(NP_002928) c3(ribonuclease 4 precursor) c4(133631) c5(133632, 133633, 133634, 133635, 133636, 133637, 133638, 133639, 133640, 133641, 133642, 133643, 133644, 133645, 133646, 133647, 133648, 133649, 133650, 133651, 133652, 133653, 133654, 133655, 133656, 133657, 133658, 133659, 133660, 133661, 133662, 133663) c6(133664, 133665, 133666, 133667, 133668, 133669) c7(fQ, aVk, kf, v, ad); #c1(RNASE6) c2(NP_005606) c3(ribonuclease K6 precursor) c4(157904) c5(157905, 157906, 157907, 157908, 157909, 157910) c6( ) c7(bL, hl, aj, ey, nE, J, iq); #c1(RNASE7) c2(NP_115961) c3(ribonuclease 7 precursor) c4(224943, 224944) c5(224945, 224946, 224947, 224948, 224949, 224950, 224951, 224952, 224953, 224954, 224955, 224956, 224957, 224958) c6(224959, 224960, 224861, 224962) c7(nE, eE, uF); #c1(RNASE8) c2(NP_612204) c3(ribonuclease 8 precursor) c4(236203) c5(236204, 236205, 236206, 236207, 236208, 236209) c6( ) c7(aVk); #c1(RNASE9) c2(NP_001103826) c3(inactive ribonuclease-like protein 9 isoform 2 precursor) c4( ) c5(41963, 41964, 41965, 41966, 41967, 41968, 41969, 41970, 41971, 41972, 41973, 41974, 41975, 41976, 41977, 41978, 41979, 41980, 41981, 41982, 41983, 41984, 41985, 41986, 41987, 41988, 41989, 41990, 41991, 41992, 41993, 41994) c6(41995, 41996, 41997, 41998, 41999, 42000, 42001, 42002, 42003, 42004, 42005, 42006) c7(ad); #c1(RNASE9) c2(NP_001103829) c3(inactive ribonuclease-like protein 9 isoform 1 precursor) c4(42007, 42008) c5(42009, 42010, 42011, 42012, 42013, 42014, 42015, 42016, 42017, 42018, 42019, 42020, 42021, 42022, 42023, 42024, 42025, 42026, 42027, 42028, 42029, 42030, 42031, 42032, 42033, 42034, 42035, 42036, 42037, 42038, 42039, 42040) c6(42041, 42042, 42043, 42044, 42045, 42046, 42047, 42048) c7(ad); #c1(RNASEH1) c2(NP_002927) c3(ribonuclease H1 isoform 1 precursor) c4(133624) c5(133625, 133626, 133627, 133628, 133629, 133630) c6( ) c7(T, kF, aF, aA); #c1(RNASEH2A) c2(NP_006388) c3(ribonuclease H2 subunit A) c4(164578) c5(164579, 164580, 164581, 164582, 164583, 164584) c6( ) c7(T, Ez, kh, iU, et, czl, cr, dz, pm, cI, hE, B, Ex); #c1(RNASEH2B) c2(NP_001135751) c3(ribonuclease H2 subunit B isoform 2) c4(53074) c5(53075, 53076, 53077, 53078, 53079, 53080) c6( ) c7(aSu, czJ, Ex, fR); #c1(RNASEH2B) c2(NP_078846) c3(ribonuclease H2 subunit B isoform 1) c4(215682, 215683) c5(215684, 215685, 215686, 215687, 215688, 215689, 215690, 215691, 215692, 215693, 215694, 215695) c6( ) c7(aSu, czJ, Ex, fR); #c1(RNASEH2C) c2(NP_115569) c3(ribonuclease H2 subunit C) c4(223236) c5(223237, 223238, 223239, 223240, 223241, 223242) c6( ) c7(wR, Nj, czK, Ex, wB); #c1(RNASEK) c2(NP_001004333) c3(ribonuclease kappa) c4(20591, 20592) c5(20593, 20594, 20595, 20596, 20597, 20598, 20599, 20600, 20601, 20602, 20603, 20604) c6( ) c7(t, T, m); #c1(RNASEL) c2(NP_066956) c3(2-5A-dependent ribonuclease) c4(207731) c5(207732, 207733, 207734, 207735, 207736, 207737, 207738, 207739, 207740, 207741) c6( ) c7(T, aC, fR, if, iW, jx, bB, oH, ci, qN, Qo, acn, wy, q, ad, F, aE, aT, io, dL, hB, is, ae, af, cgd, BO, Ub, iU, aW, ff, r, nY, aq, Io, en, t, bz, AH, aiM, at, zv, adg, hE, B); #c1(RNASEL) c2(XP_005245468) c3(2-5A-dependent ribonuclease isoform X1) c4(266576, 266577) c5(266578, 266579, 266580, 266581, 266582, 266583, 266584, 266585, 266586, 266587, 266588, 266589) c6( ) c7(T, aC, fR, if, iW, jx, bB, oH, ci, qN, Qo, acn, wy, q, ad, F, aE, aT, io, dL, hB, is, ae, af, cgd, BO, Ub, iU, aW, ff, r, nY, aq, lo, en, t, bz, AH, aiM, at, zv, adg, hE, B); #c1(RNASET2) c2(NP_003721) c3(ribonuclease T2 precursor) c4(140405, 140406, 140407, 140408, 140409) c5(140410, 140411, 140412, 140413, 140414, 140415, 140416, 140417, 140418, 140419, 140420, 140421, 140422, 140423, 140424, 140425, 140426, 140427, 140428, 140429, 140430, 140431, 140432, 140433, 140434, 140435, 140436, 140437, 140438, 140439, 140440, 140441, 140442, 140443) c6( ) c7(T, hb, Y, Ju, hD, czL, aVk, qj, K, m, t, pC); #c1(RND1) c2(NP_055285) c3(rho-related GTP-binding protein Rho6 precursor) c4(180282, 180283) c5(180284, 180285, 180286, 180287, 180288, 180289, 180290, 180291, 180292, 180293, 180294, 180295) c6( ) c7(aA, aT); #c1(RND3) c2(NP_005159) c3(rho-related GTP-binding protein RhoE precursor) c4(153491, 153492, 153493) c5(153494, 153495, 153496, 153497, 153498, 153499, 153500, 153501, 153502, 153503, 153504, 153505, 153506, 153507, 153508, 153509, 153510, 153511, 153512, 153513, 153514, 153515, 153516, 153517, 153518, 153519) c6( ) c7(bL, ae, T, cc, Qf, s, ac, aW, Y, oe, ff, aA, cd, aF, K, en, fq, B, ad); #c1(RNF103) c2(NP_001185880) c3(E3 ubiquitin-protein ligase RNF103 isoform 2) c4( ) c5(76629, 76630, 76631, 76632, 76633, 76634) c6( ) c7(ct); #c1(RNF103) c2(NP_005658) c3(E3 ubiquitin-protein ligase RNF103 isoform 1) c4(158332) c5( ) c6( ) c7(ct); #c1(RNF103-CHMP3) c2(NP_001185883) c3(RNF103-CHMP3 protein) c4(76642, 76643) c5(76644, 76645, 76646, 76647, 76648, 76649) c6( ) c7(h, f, ae, ad); #c1(RNF111) c2(XP_006720638) c3(E3 ubiquitin-protein ligase Arkadia isoform X8) c4(293596) c5(293597, 293598, 293599, 293600, 293601) c6( ) c7(cd, mx, ll); #c1(RNF111) c2(XP_006720642) c3(E3 ubiquitin-protein ligase Arkadia isoform X5) c4( ) c5(293602, 293603, 293604, 293605, 293606, 293607, 293608, 293609, 293610) c6( ) c7(cd, mx, ll); #c1(RNF111) c2(XP_011519998) c3(E3 ubiquitin-protein ligase Arkadia isoform X2) c4(314855) c5(314856, 314857, 314858, 314859, 314860) c6( ) c7(cd, mx, ll); #c1(RNF111) c2(XP_011519999) c3(E3 ubiquitin-protein ligase Arkadia isoform X4) c4(314861) c5(314862, 314863, 314864, 314865, 314866, 314867) c6( ) c7(cd, mx, ll); #c1(RNF111) c2(XP_011520001) c3(E3 ubiquitin-protein ligase Arkadia isoform X1) c4(314868, 314869) c5(314870, 314871, 314872, 314873, 314874) c6( ) c7(cd, mx, ll); #c1(RNF111) c2(XP_011520002) c3(E3 ubiquitin-protein ligase Arkadia isoform X3) c4( ) c5(314875, 314876, 314877, 314878, 314879, 314880) c6( ) c7(cd, mx, ll); #c1(RNF112) c2(NP_009079) c3(RING finger protein 112) c4(170586) c5(170587, 170588, 170589, 170590, 170591, 170592, 170593) c6( ) c7(xy, W, czM, aGU, nA, aHj); #c1(RNF112) c2(XP_006721634) c3(RING finger protein 112 isoform X1) c4( ) c5(294138) c6( ) c7(xy, W, czM, aGU, nA, aHj); #c1(RNF114) c2(NP_061153) c3(E3 ubiquitin-protein ligase RNF114) c4(199600, 199601) c5(199602, 199603, 199604, 199605, 199606, 199607, 199608, 199609, 199610, 199611, 199612, 199613, 199614) c6( ) c7(wD, cr, an); #c1(RNF123) c2(NP_071347) c3(E3 ubiquitin-protein ligase RNF123) c4(211127, 211128) c5(211129, 211130, 211131, 211132, 211133, 211134, 211135, 211136, 211137, 211138, 211139, 211140) c6( ) c7(Z, bS, K, ct, bdq, bdr); #c1(RNF125) c2(NP_060301) c3(E3 ubiquitin-protein ligase RNF125) c4(195273) c5(195274, 195275, 195276, 195277, 195278, 195279) c6( ) c7(q, W, r); #c1(RNF128) c2(NP_078815) c3(E3 ubiquitin-protein ligase RNF128 isoform 2 precursor) c4(215608, 215609) c5(215610, 215611, 215612, 215613, 215614, 215615, 215616, 215617, 215618, 215619, 215620, 215621) c6( ) c7(Pp, iV); #c1(RNF128) c2(NP_919445) c3(E3 ubiquitin-protein ligase RNF128 isoform 1 precursor) c4(258635) c5(258636, 258637, 258638, 258639, 258640, 258641) c6( ) c7(Pp, iV); #c1(RNF130) c2(NP_060904) c3(E3 ubiquitin-protein ligase RNF130 isoform 1 precursor) c4(198566) c5(198567, 198568, 198569, 198570, 198571, 198572) c6( ) c7(j, ad); #c1(RNF135) c2(NP_001171921) c3(E3 ubiquitin-protein ligase RNF135 isoform 3) c4(72026, 72027) c5(72028, 72029, 72030, 72031, 72032, 72033, 72034, 72035, 72036, 72037, 72038) c6( ) c7(T, nX, Az, hP, xb, xt, czN); #c1(RNF135) c2(NP_115698) c3(E3 ubiquitin-protein ligase RNF135 isoform 1) c4(223607) c5(223608, 223609, 223610, 223611, 223612, 223613, 223614, 223615, 223616) c6( ) c7(T, nX, Az, hP, xb, xt, czN); #c1(RNF135) c2(NP_922921) c3(E3 ubiquitin-protein ligase RNF135 isoform 2) c4(258642, 258643) c5(258644, 258645, 258646, 258647, 258648, 258649, 258650, 258651, 258652, 258653) c6( ) c7(T, nX, Az, hP, xb, xt, czN); #c1(RNF135) c2(XP_005258100) c3(E3 ubiquitin-protein ligase RNF135 isoform X2) c4( ) c5(275487, 275488, 275489, 275490, 275491, 275492, 275493) c6( ) c7(T, nX, Az, hP, xb, xt, czN); #c1(RNF135) c2(XP_006722201) c3(E3 ubiquitin-protein ligase RNF135 isoform X1) c4(294634) c5( ) c6( ) c7(T, nX, Az, hP, xb, xt, czN); #c1(RNF138) c2(NP_057355) c3(E3 ubiquitin-protein ligase RNF138 isoform 1) c4(190313) c5(190314, 190315, 190316, 190317, 190318, 190319) c6( ) c7(ey); #c1(RNF138) c2(NP_937761) c3(E3 ubiquitin-protein ligase RNF138 isoform 2) c4(259061) c5(259062, 259063, 259064, 259065, 259066, 259067) c6( ) c7(ey); #c1(RNF139) c2(NP_009149) c3(E3 ubiquitin-protein ligase RNF139) c4(171147) c5(171148, 171149, 171150, 171151, 171152, 171153) c6( ) c7(es, czO, sS, T, d, hd, nB, nv, iA, py, go, fr, Le); #c1(RNF14) c2(XP_005268598) c3(E3 ubiquitin-protein ligase RNF14 isoform X2) c4(281937) c5(281938, 281939, 281940, 281941, 281942) c6( ) c7(T, c, bE, bB, vH, ci, pt, ae, ad); #c1(RNF14) c2(XP_005268600) c3(E3 ubiquitin-protein ligase RNF14 isoform X3) c4(281943, 281944, 281945) c5(281946, 281947, 281948, 281949, 281950, 281951, 281952, 281953, 281954, 281955, 281956, 281957, 281958, 281959, 281960, 281961, 281962, 281963, 281964, 281965, 281966, 281967, 281968, 281969) c6( ) c7(T, c, bE, bB, vH, ci, pt, ae, ad); #c1(RNF14) c2(XP_011536016) c3(E3 ubiquitin-protein ligase RNF14 isoform X1) c4(333277, 333278, 333279, 333280, 333281, 333282, 333283) c5(333284, 333285, 333286, 333287, 333288, 333289, 333290, 333291, 333292, 333293, 333294, 333295, 333296, 333297, 333298, 333299, 333300, 333301, 333302, 333303, 333304, 333305, 333306, 333307, 333308, 333309, 333310, 333311, 333312, 333313, 333314, 333315, 333316, 333317, 333318, 333319, 333320, 333321, 333322, 333323, 333324, 333325, 333326, 333327, 333328, 333329, 333330, 333331, 333332) c6( ) c7(T, c, bE, bB, vH, ci, pt, ae, ad); #c1(RNF144A) c2(XP_005246259) c3(E3 ubiquitin-protein ligase RNF144A isoform X1) c4( ) c5(266996, 266997, 266998, 266999, 267000) c6( ) c7(T, ac, c, aW, aT, Ea); #c1(RNF144A) c2(XP_006711972) c3(E3 ubiquitin-protein ligase RNF144A isoform X2) c4(286310) c5(286311, 286312) c6( ) c7(T, ac, c, aW, aT, Ea); #c1(RNF144A) c2(XP_011508726) c3(E3 ubiquitin-protein ligase RNF144A isoform X3) c4(299348, 299349) c5(299350, 299351, 299352, 299353, 299354, 299355, 299356, 299357, 299358, 299359, 299360, 299361, 299362, 299363, 299364, 299365) c6( ) c7(T, ac, c, aW, aT, Ea); #c1(RNF144B) c2(XP_005249041) c3(E3 ubiquitin-protein ligase RNF144B isoform X1) c4(268937, 268938) c5(268939, 268940, 268941, 268942, 268943, 268944) c6( ) c7(oe, K); #c1(RNF144B) c2(XP_005249043) c3(E3 ubiquitin-protein ligase RNF144B isoform X2) c4( ) c5(268945, 268946, 268947, 268948, 268949, 268950) c6( ) c7(oe, K); #c1(RNF146) c2(NP_001229778) c3(E3 ubiquitin-protein ligase RNF146 isoform b) c4(85229) c5(85230, 85231, 85232, 85233, 85234, 85235) c6( ) c7(eM, aW, aT, t, bz, af); #c1(RNF149) c2(NP_775918) c3(E3 ubiquitin-protein ligase RNF149 precursor) c4(250676) c5(250677, 250678, 250679, 250680, 250681, 250682) c6( ) c7(aC); #c1(RNF150) c2(NP_065775) c3(RING finger protein 150 precursor) c4(205328, 205329, 205330) c5(205331, 205332, 205333, 205334, 205335, 205336, 205337, 205338, 205339, 205340, 205341, 205342, 205343, 205344, 205345, 205346, 205347, 205348) c6( ) c7(Gp); #c1(RNF150) c2(XP_005263207) c3(RING finger protein 150 isoform X1) c4(278358) c5( ) c6( ) c7(Gp); #c1(RNF150) c2(XP_011530449) c3(RING finger protein 150 isoform X2) c4( ) c5(326309) c6( ) c7(Gp); #c1(RNF150) c2(XP_011530450) c3(RING finger protein 150 isoform X3) c4( ) c5(326310, 326311, 326312, 326313, 326314, 326315, 326316, 326317, 326318) c6( ) c7(Gp); #c1(RNF152) c2(NP_775828) c3(E3 ubiquitin-protein ligase RNF152) c4(250453) c5(250454, 250455, 250456, 250457, 250458, 250459) c6( ) c7(Kw); #c1(RNF157) c2(NP_443148) c3(RING finger protein 157) c4(229633, 229634) c5(229635, 229636, 229637, 229638, 229639, 229640, 229641, 229642, 229643, 229644, 229645, 229646) c6( ) c7(oe); #c1(RNF157) c2(XP_005257064) c3(RING finger protein 157 isoform X2) c4(274653) c5( ) c6( ) c7(oe); #c1(RNF157) c2(XP_011522575) c3(RING finger protein 157 isoform X6) c4( ) c5(317167, 317168, 317169, 317170, 317171, 317172) c6( ) c7(oe); #c1(RNF167) c2(NP_056343) c3(E3 ubiquitin- protein ligase RNF167 precursor) c4(187165) c5(187166, 187167, 187168, 187169, 187170, 187171) c6( ) c7(czP); #c1(RNF168) c2(NP_689830) c3(E3 ubiquitin-protein ligase RNF168) c4(244072) c5(244073, 244074, 244075, 244076, 244077, 244078, 244079, 244080, 244081) c6( ) c7(aW, T, auV, aT); #c1(RNF170) c2(NP_001153695) c3(E3 ubiquitin-protein ligase RNF170 isoform a) c4(60855, 60856, 60857) c5(60858, 60859, 60860, 60861, 60862, 60863, 60864, 60865, 60866, 60867, 60868, 60869) c6( ) c7(czQ, bcT); #c1(RNF170) c2(NP_001153696) c3(E3 ubiquitin-protein ligase RNF170 isoform b) c4(60870, 60871) c5(60872, 60873, 60874, 60875, 60876, 60877) c6( ) c7(czQ, bcT); #c1(RNF170) c2(NP_001153697) c3(E3 ubiquitin-protein ligase RNF170 isoform c) c4( ) c5(60878, 60879, 60880, 60881, 60882) c6( ) c7(czQ, bcT); #c1(RNF170) c2(XP_006716468) c3(E3 ubiquitin-protein ligase RNF170 isoform X3) c4(290330) c5(290331, 290332, 290333, 290334, 290335) c6( ) c7(czQ, bcT); #c1(RNF170) c2(XP_006716470) c3(E3 ubiquitin-protein ligase RNF170 isoform X4) c4( ) c5(290336, 290337, 290338, 290339, 290340, 290341, 290342, 290343, 290344, 290345, 290346, 290347) c6( ) c7(czQ, bcT); #c1(RNF180) c2(NP_001107033) c3(E3 ubiquitin-protein ligase RNF180 isoform 1) c4(42799, 42800) c5(42801, 42802, 42803, 42804, 42805, 42806) c6( ) c7(T, aF, A, aA); #c1(RNF180) c2(NP_848627) c3(E3 ubiquitin-protein ligase RNF180 isoform 2) c4(254022, 254023) c5(254024, 254025, 254026, 254027, 254028, 254029) c6( ) c7(T, aF, A, aA); #c1(RNF180) c2(XP_011541645) c3(E3 ubiquitin-protein ligase RNF180 isoform X3) c4( ) c5(340186, 340187, 340188, 340189, 340190, 340191, 340192, 340193, 340194, 340195, 340196, 340197) c6( ) c7(T, aF, A, aA); #c1(RNF182) c2(NP_001158506) c3(E3 ubiquitin-protein ligase RNF182) c4(63633, 63634, 63635, 63636, 63637) c5(63638, 63639, 63640, 63641, 63642, 63643, 63644, 63645, 63646, 63647, 63648, 63649, 63650, 63651, 63652, 63653, 63654, 63655, 63656, 63657, 63658, 63659, 63660, 63661, 63662, 63663, 63664, 63665, 63666, 63667, 63668, 63669, 63670, 63671, 63672, 63673, 63674, 63675, 63676, 63677, 63678) c6( ) c7(y, aw, aT); #c1(RNF19A) c2(XP_005250910) c3(E3 ubiquitin-protein ligase RNF19A isoform X1) c4(270625, 270626) c5(270627, 270628, 270629, 270630, 270631, 270632, 270633, 270634, 270635, 270636, 270637, 270638, 270639, 270640) c6( ) c7(T, aC, ea, if, fd, bB, gf, lR, Lw, bv, xE, aE, rw, dV, K, aW, zC, g, as, eF, cm, bw, eM, cj, NO, Hb, m, NN, NK, dD, NJ, aj, BF, ct, qN, fr, cd, ai, Hx, jz, cU, h, fe, aq, NL, w, hR, B, bL, Dw, NQ, fM, yk, IH, jx, aA, cR, cz, v, C, V, q, eA, eJ, bgk, yw, aT, kf, cy, an, ae, af, hM, wr, iU, Y, r, lo, en, t, iK, pb, ck, c, im, bt, ao, kh, jh, dG, eq, iJ, ad, dP, av, CJ, F, ds, ji, IQ, NM, NP, d, ff, eH, cr, aF, bz, bE, y, iu); #c1(RNF19A) c2(XP_011515258) c3(E3 ubiquitin-protein ligase RNF19A isoform X2) c4(308083, 308084, 308085, 308086) c5(308087, 308088, 308089, 308090, 308091, 308092, 308093, 308094, 308095, 308096, 308097, 308098, 308099, 308100, 308101, 308102, 308103, 308104, 308105, 308106, 308107, 308108, 308109, 308110) c6( ) c7(T, aC, ea, if, fd, bB, gf, lR, Lw, bv, xE, aE, rw, dV, K, aW, zC, g, as, eF, cm, bw, eM, cj, NO, Hb, m, NN, NK, dD, NJ, aj, BF, ct, qN, fr, cd, ai, Hx, jz, cU, h, fe, aq, NL, w, hR, B, bL, Dw, NQ, fM, yk, lH, jx, aA, cR, cz, v, C, V, q, eA, eJ, bgk, yw, aT, kf, cy, an, ae, af, hM, wr, iU, Y, r, lo, en, t, iK, pb, ck, c, im, bt, ao, kh, jh, dG, eq, iJ, ad, dP, av, CJ, F, ds, ji, IQ, NM, NP, d, ff, eH, cr, aF, bz, bE, y, iu); #c1(RNF2) c2(XP_005245470) c3(E3 ubiquitin-protein ligase RING2 isoform X2) c4(266590) c5(266591, 266592, 266593, 266594, 266595, 266596) c6( ) c7(T, dA, Hn, n, fr, anu, ip, jz, ib, aE, py, Nn, aT, h, K, anw, anv, nO, aW, Y, kp, t, bw, bz, iP, kn, es, Ew, Dy, iA, lp, hk, m, anx, VB, hS); #c1(RNF2) c2(XP_011508154) c3(E3 ubiquitin-protein ligase RING2 isoform X1) c4(298639, 298640) c5(298641, 298642, 298643, 298644, 298645, 298646, 298647, 298648, 298649, 298650, 298651, 298652, 298653) c6( ) c7(T, dA, Hn, n, fr, anu, ip, jz, ib, aE, py, Nn, aT, h, K, anw, anv, nO, aW, Y, kp, t, bw, bz, iP, kn, es, Ew, Dy, iA, lp, hk, m, anx, VB, hS); #c1(RNF20) c2(NP_062538) c3(E3 ubiquitin-protein ligase BRE1A) c4(201839, 201840, 201841, 201842) c5(201843, 201844, 201845, 201846, 201847, 201848, 201849, 201850, 201851, 201852, 201853, 201854, 201855, 201856, 201857, 201858, 201859, 201860, 201861, 201862, 201863, 201864, 201865, 201866) c6( ) c7(BI, ae, ad); #c1(RNF207) c2(XP_011539741) c3(RING finger protein 207 isoform X2) c4(337964) c5( ) c6( ) c7(EQ, mu); #c1(RNF207) c2(XP_011539742) c3(RING finger protein 207 isoform X3) c4( ) c5(337965, 337966, 337967, 337968, 337969) c6( ) c7(EQ, mu); #c1(RNF213) c2(NP_001243000) c3(E3 ubiquitin-protein ligase RNF213 isoform 3) c4(89514, 89515) c5(89516, 89517, 89518, 89519, 89520, 89521, 89522, 89523, 89524, 89525, 89526, 89527) c6( ) c7(aJ, bd, Hg, czR); #c1(RNF213) c2(NP_066005) c3(E3 ubiquitin-protein ligase RNF213 isoform 2) c4(206717) c5(206718, 206719, 206720, 206721, 206722, 206723) c6( ) c7(aJ, bd, Hg, czR); #c1(RNF213) c2(XP_005257603) c3(E3 ubiquitin-protein ligase RNF213 isoform X1) c4(275285, 275286) c5(275287, 275288, 275289, 275290, 275291, 275292, 275293, 275294, 275295, 275296, 275297, 275298) c6( ) c7(aJ, bd, Hg, czR); #c1(RNF214) c2(NP_997226) c3(RING finger protein 214 isoform 1) c4(265213, 265214) c5(265215, 265216, 265217, 265218, 265219, 265220, 265221, 265222, 265223, 265224, 265225, 265226, 265227, 265228, 265229, 265230) c6( ) c7(e); #c1(RNF216) c2(NP_996999) c3(E3 ubiquitin-protein ligase RNF216 isoform b) c4(264916) c5(264917, 264918, 264919, 264920, 264921, 264922) c6( ) c7(bEn, v, tk); #c1(RNF216) c2(XP_011513736) c3(E3 ubiquitin-protein ligase RNF216 isoform X1) c4(306035, 306036) c5(306037, 306038, 306039, 306040, 306041, 306042, 306043, 306044, 306045, 306046, 306047, 306048, 306049, 306050, 306051, 306052, 306053) c6( ) c7(bEn, v, tk); #c1(RNF216) c2(XP_011513737) c3(E3 ubiquitin-protein ligase RNF216 isoform X2) c4(306054) c5(306055) c6( ) c7(bEn, v, tk); #c1(RNF24) c2(NP_001127809) c3(RING finger protein 24 isoform 1) c4( ) c5(49265, 49266, 49267, 49268, 49269, 49270, 49271, 49272) c6( ) c7(oe); #c1(RNF24) c2(NP_001127810) c3(RING finger protein 24 isoform 2) c4(49273, 49274) c5(49275, 49276, 49277, 49278, 49279, 49280, 49281, 49282, 49283, 49284, 49285, 49286) c6( ) c7(oe); #c1(RNF24) c2(XP_011527448) c3(RING finger protein 24 isoform X3) c4( ) c5(322213) c6( ) c7(oe); #c1(RNF31) c2(NP_060469) c3(E3 ubiquitin-protein ligase RNF31) c4(196065, 196066, 196067, 196068) c5(196069, 196070, 196071, 196072, 196073, 196074, 196075, 196076, 196077, 196078, 196079, 196080, 196081, 196082, 196083, 196084, 196085, 196086) c6( ) c7(T, aT); #c1(RNF34) c2(NP_079402) c3(E3 ubiquitin-protein ligase RNF34 isoform 2) c4(217931) c5(217932, 217933, 217934, 217935, 217936, 217937) c6( ) c7(ccn, dA, bcb, ig, ht, CT, dV, CH, h, jh, bDl, ciP, eh, X, LH); #c1(RNF34) c2(NP_919247) c3(E3 ubiquitin-protein ligase RNF34 isoform 1) c4(258282) c5(258283, 258284, 258285, 258286, 258287, 258288, 258289, 258290, 258291, 258292) c6( ) c7(ccn, dA, bcb, ig, ht, CT, dV, CH, h, jh, bDl, ciP, eh, X, LH); #c1(RNF39) c2(NP_079512) c3(RING finger protein 39 isoform 1) c4(218453, 218454, 218455, 218456) c5(218457, 218458, 218459, 218460, 218461, 218462, 218463, 218464, 218465, 218466, 218467, 218468, 218469, 218470, 218471, 218472, 218473, 218474, 218475, 218476, 218477, 218478, 218479, 218480, 218481, 218482, 218483, 218484, 218485, 218486, 218487, 218488, 218489, 218490, 218491, 218492, 218493, 218494) c6( ) c7(h, hH, V, iQ, eZ); #c1(RNF39) c2(NP_739575) c3(RING finger protein 39 isoform 2) c4(247357, 247358, 247359, 247360, 247361, 247362) c5(247363, 247364, 247365, 247366, 247367, 247368, 247369, 247370, 247371, 247372, 247373, 247374, 247375, 247376, 247377, 247378, 247379, 247380, 247381, 247382, 247383, 247384, 247385, 247386, 247387, 247388, 247389, 247390, 247391, 247392, 247393, 247394, 247395, 247396, 247397, 247398, 247399, 247400, 247401, 247402, 247403, 247404, 247405, 247406, 247407, 247408, 247409, 247410, 247411, 247412, 247413, 247414, 247415, 247416, 247417, 247418, 247419, 247420, 247421, 247422, 247423, 247424, 247425, 247426, 247427, 247428, 247429, 247430) c6( ) c7(h, hH, V, iQ, eZ); #c1(RNF4) c2(NP_001171939) c3(E3 ubiquitin-protein ligase RNF4 isoform 2) c4(72039, 72040, 72041) c5(72042, 72043, 72044, 72045, 72046, 72047, 72048, 72049, 72050, 72051, 72052, 72053, 72054, 72055, 72056, 72057, 72058, 72059) c6( ) c7(rc, oe, jj, aed, kS, pi); #c1(RNF4) c2(NP_002929) c3(E3 ubiquitin-protein ligase RNF4 isoform 1) c4(133670, 133671) c5(133672, 133673, 133674, 133675, 133676, 133677, 133678, 133679, 133680, 133681, 133682, 133683, 133684, 133685, 133686, 133687, 133688, 133689, 133690, 133691, 133692) c6( ) c7(rc, oe, jj, aed, kS, pi); #c1(RNF40) c2(NP_001193963) c3(E3 ubiquitin-protein ligase BRE1B isoform 3) c4(83350) c5(83351, 83352, 83353, 83354, 83355, 83356, 83357, 83358, 83359, 83360, 83361, 83362, 83363) c6( ) c7(ad, bP, K, ae, er, bN); #c1(RNF40) c2(NP_055586) c3(E3 ubiquitin-protein ligase BRE1B isoform 1) c4(182122, 182123, 182124) c5(182125, 182126, 182127, 182128, 182129, 182130, 182131, 182132, 182133, 182134, 182135, 182136) c6( ) c7(ad, bP, K, ae, er, bN); #c1(RNF40) c2(XP_011544301) c3(E3 ubiquitin-protein ligase BRE1B isoform X3) c4(343453) c5( ) c6( ) c7(ad, bP, K, ae, er, bN); #c1(RNF40) c2(XP_011544302) c3(E3 ubiquitin-protein ligase BRE1B isoform X4) c4( ) c5(343454, 343455, 343456, 343457, 343458, 343459) c6( ) c7(ad, bP, K, ae, er, bN); #c1(RNF41) c2(NP_001229755) c3(E3 ubiquitin-protein ligase NRDP1 isoform 1) c4(85113, 85114, 85115, 85116) c5(85117, 85118, 85119, 85120, 85121, 85122, 85123, 85124, 85125, 85126, 85127, 85128, 85129, 85130, 85131, 85132, 85133, 85134, 85135, 85136, 85137, 85138, 85139, 85140, 85141, 85142, 85143, 85144, 85145, 85146, 85147) c6( ) c7(aW, bO, cj, r, aT, bK, an, he, q, hq); #c1(RNF41) c2(XP_011536037) c3(E3 ubiquitin-protein ligase NRDP1 isoform X1) c4(333333, 333334) c5(333335, 333336, 333337, 333338, 333339, 333340, 333341, 333342, 333343, 333344) c6( ) c7(aW, bO, cj, r, aT, bK, an, he, q, hq); #c1(RNF43) c2(NP_060233) c3(E3 ubiquitin-protein ligase RNF43 precursor) c4(194890, 194891) c5(194892, 194893, 194894, 194895, 194896, 194897, 194898, 194899, 194900, 194901, 194902, 194903) c6( ) c7(T, aC, jz, bE, hL, bcd, r, aA, bB, ci, m, q, g, t, B, cl); #c1(RNF44) c2(XP_005265902) c3(RING finger protein 44 isoform X4) c4( ) c5(279837, 279838, 279839, 279840, 279841) c6( ) c7(gv); #c1(RNF44) c2(XP_011532768) c3(RING finger protein 44 isoform X1) c4(328850, 328851) c5(328852, 328853, 328854, 328855, 328856, 328857, 328858) c6( ) c7(gv); #c1(RNF5) c2(NP_008844) c3(E3 ubiquitin-protein ligase RNF5) c4(168995, 168996) c5(168997, 168998, 168999, 169000, 169001, 169002, 169003, 169004, 169005, 169006, 169007, 169008, 169009, 169010, 169011, 169012, 169013, 169014, 169015, 169016, 169017, 169018, 169019, 169020, 169021, 169022, 169023, 169024, 169025, 169026, 169027, 169028, 169029, 169030, 169031, 169032, 169033, 169034, 169035, 169036, 169037, 169038, 169039, 169040, 169041, 169042, 169043, 169044, 169045, 169046, 169047, 169048) c6( ) c7(es, A, W, aW, Y, cr, aT, eZ, lo, K, cp); #c1(RNF6) c2(NP_005968) c3(E3 ubiquitin-protein ligase RNF6) c4(160840, 160841) c5(160842, 160843, 160844, 160845, 160846, 160847, 160848, 160849, 160850, 160851, 160852, 160853, 160854, 160855, 160856, 160857, 160858, 160859, 160860, 160861) c6( ) c7(cpE, ht, it, bee, ae, ad); #c1(RNF7) c2(NP_001188299) c3(RING-box protein 2 isoform 4) c4(79023) c5(79024, 79025, 79026, 79027, 79028, 79029) c6( ) c7(A, bE, tp, LX, e, qr, bgg, cy, K, bFs, lf, Dm, LT); #c1(RNF7) c2(NP_055060) c3(RING-box protein 2 isoform 1) c4(178661) c5(178662, 178663, 178664, 178665, 178666, 178667) c6( ) c7(A, bE, tp, LX, e, qr, bgg, cy, K, bFs, lf, Dm, LT); #c1(RNF7) c2(NP_899060) c3(RING-box protein 2 isoform 3) c4(257931) c5(257932, 257933, 257934, 257935, 257936, 257937) c6( ) c7(A, bE, tp, LX, e, qr, bgg, cy, K, bFs, lf, Dm, LT); #c1(RNF8) c2(NP_003949) c3(E3 ubiquitin-protein ligase RNF8 isoform 1) c4(142398, 142399) c5(142400, 142401, 142402, 142403, 142404, 142405, 142406) c6( ) c7(os, ac, kP, oZ, cm, bN); #c1(RNF8) c2(NP_898901) c3(E3 ubiquitin-protein ligase RNF8 isoform 2) c4(257858) c5(257859, 257860, 257861, 257862, 257863, 257864) c6( ) c7(os, ac, kP, oZ, cm, bN); #c1(RNF8) c2(XP_006715305) c3(E3 ubiquitin-protein ligase RNF8 isoform X2) c4( ) c5(289491, 289492, 289493, 289494, 289495, 289496) c6( ) c7(os, ac, kP, oZ, cm, bN); #c1(RNGTT) c2(NP_001273355) c3(mRNA-capping enzyme isoform b) c4(104719) c5(104720, 104721, 104722, 104723, 104724, 104725, 104726) c6( ) c7(iR, aq, T, B); #c1(RNGTT) c2(NP_001273357) c3(mRNA-capping enzyme isoform c) c4(104727) c5(104728, 104729, 104730, 104731, 104732) c6( ) c7(iR, aq, T, B); #c1(RNGTT) c2(NP_003791) c3(mRNA-capping enzyme isoform a) c4(140859, 140860, 140861) c5(140862, 140863, 140864, 140865, 140866, 140867, 140868, 140869, 140870, 140871, 140872, 140873, 140874, 140875, 140876, 140877, 140878, 140879) c6( ) c7(iR, aq, T, B); #c1(RNH1) c2(XP_011518565) c3(ribonuclease inhibitor isoform X1) c4(312631, 312632, 312633, 312634, 312635) c5(312636, 312637, 312638, 312639, 312640, 312641, 312642, 312643, 312644, 312645, 312646, 312647, 312648, 312649, 312650, 312651, 312652, 312653, 312654, 312655, 312656, 312657, 312658, 312659, 312660, 312661, 312662, 312663, 312664, 312665, 312666, 312667, 312668, 312669, 312670, 312671, 312672, 312673, 312674, 312675, 312676, 312677, 312678, 312679, 312680, 312681, 312682, 312683, 312684, 312685, 312686, 312687, 312688, 312689, 312690, 312691, 312692, 312693, 312694, 312695, 312696, 312697, 312698, 312699, 312700, 312701, 312702, 312703, 312704, 312705, 312706, 312707, 312708, 312709, 312710, 312711, 312712, 312713, 312714, 312715, 312716) c6(312717, 312718, 312719, 312720, 312721, 312722, 312723, 312724, 312725, 312726, 312727, 312728, 312729, 312730, 312731, 312732, 312733, 312734, 312735, 312736, 312737, 312738, 312739) c7(ck, T, sS, hd, nB, aW, Y, eL, Qo, Lf, cj, aT, aA, h, dL, aF, bu, bz, zn); #c1(RNLS) c2(NP_001026879) c3(renalase isoform 1 precursor) c4(29785) c5(29786, 29787, 29788, 29789, 29790, 29791) c6( ) c7(fU, A, ac, Hm, M, cz, dy, uD, cd, qa); #c1(RNLS) c2(XP_005270006) c3(renalase isoform X6) c4( ) c5(283030) c6( ) c7(fU, A, ac, Hm, M, cz, dy, uD, cd, qa); #c1(RNLS) c2(XP_005270007) c3(renalase isoform X7) c4(283031) c5(283032, 283033, 283034, 283035, 283036, 283037) c6( ) c7(fU, A, ac, Hm, M, cz, dy, uD, cd, qa); #c1(RNLS) c2(XP_011538227) c3(renalase isoform X1) c4(335835) c5(335836, 335837, 335838, 335839, 335840, 335841) c6( ) c7(fU, A, ac, Hm, M, cz, dy, uD, cd, qa); #c1(RNMT) c2(NP_003790) c3(mRNA cap guanine-N7 methyltransferase) c4(140835, 140836) c5(140837, 140838, 140839, 140840, 140841, 140842, 140843, 140844, 140845, 140846, 140847, 140848, 140849, 140850, 140851, 140852, 140853, 140854, 140855, 140856, 140857, 140858) c6( ) c7(T, aC, aCh, pf, bll, bO, fd, bB, ci, aY, bv, aE, Xc, pX, Qk, K, KC, eG, iE, aW, g, as, eF, ir, bw, QA, Qt, iP, eM, iA, Ip, aep, m, Xu, ik, n, fr, rP, ft, gd, kH, dL, kj, aq, kp, Qy, SE, dB, ayS, hL, auh, it, B, dA, eR, jx, aA, aNG, lu, q, eA, aT, rz, ae, jf, s, nO, oV, Y, r, en, aDY, cl, t, Vi, iK, bN, Qi, nM, iM, np, bt, ao, VB, hS, id, LX, bXc, jh, KD, Sv, Fc, aue, ad, dP, av, hd, ib, py, Db, hP, d, bug, je, PE, ff, eH, gl, aF, adj, jb, bz, bF, es, RV, bE, lf, iu); #c1(RNMT) c2(XP_011524055) c3(mRNA cap guanine-N7 methyltransferase isoform X5) c4( ) c5(318643, 318644, 318645, 318646, 318647) c6( ) c7(T, aC, aCh, pf, bll, bO, fd, bB, ci, aY, bv, aE, Xc, pX, Qk, K, KC, eG, iE, aW, g, as, eF, ir, bw, QA, Qt, iP, eM, iA, lp, aep, m, Xu, ik, n, fr, rP, ft, gd, kH, dL, kj, aq, kp, Qy, SE, dB, ayS, hL, auh, it, B, dA, eR, jx, aA, aNG, lu, q, eA, aT, rz, ae, jf, s, nO, oV, Y, r, en, aDY, cl, t, Vi, iK, bN, Qi, nM, iM, np, bt, ao, VB, hS, id, LX, bXc, jh, KD, Sv, Fc, aue, ad, dP, av, hd, ib, py, Db, hP, d, bug, je, PE, ff, eH, gl, aF, adj, jb, bz, bF, es, RV, bE, lf, iu); #c1(RNPEP) c2(NP_064601) c3(aminopeptidase B) c4(203236, 203237, 203238) c5(203239, 203240, 203241, 203242, 203243, 203244, 203245, 203246, 203247, 203248, 203249, 203250) c6( ) c7(aC, hd, WA, ahL, hQ, cz, cm, fr, jj, as, eF, zP, kS); #c1(RNPEP) c2(XP_005245475) c3(aminopeptidase B isoform X1) c4(266597) c5(266598, 266599, 266600, 266601, 266602, 266603) c6( ) c7(aC, hd, WA, ahL, hQ, cz, cm, fr, jj, as, eF, zP, kS); #c1(RNPEP) c2(XP_005245476) c3(aminopeptidase B isoform X2) c4( ) c5(266604, 266605, 266606, 266607, 266608, 266609) c6( ) c7(aC, hd, WA, ahL, hQ, cz, cm, fr, jj, as, eF, zP, kS); #c1(RNPEPL1) c2(NP_060696) c3(arginyl aminopeptidase-like 1) c4(197279) c5(197280, 197281, 197282, 197283, 197284, 197285) c6( ) c7(bL, A, cz, j, bK, y); #c1(RNPS1) c2(NP_001273555) c3(RNA-binding protein with serine-rich domain 1 isoform b) c4( ) c5(105217, 105218, 105219, 105220, 105221, 105222, 105223, 105224, 105225, 105226, 105227, 105228, 105229, 105230, 105231, 105232) c6( ) c7(T, bb, cA, SE, eM, ahk, aT, h, IR, nA, pt, pb); #c1(RNPS1) c2(NP_001273556) c3(RNA-binding protein with serine-rich domain 1 isoform c) c4( ) c5(105233) c6( ) c7(T, bb, cA, SE, eM, ahk, aT, h, IR, nA, pt, pb); #c1(RNPS1) c2(XP_005255106) c3(RNA-binding protein with serine-rich domain 1 isoform X1) c4(273549) c5( ) c6( ) c7(T, bb, cA, SE, eM, ahk, aT, h, IR, nA, pt, pb); #c1(R0B01) c2(NP_001139317) c3(roundabout homolog 1 isoform d) c4(59156) c5(59157, 59158, 59159, 59160, 59161, 59162) c6( ) c7(bM, T, Mb, dA, arS, aw, VT, aA, hy, v, fr, qN, aIP, tK, q, ad, eA, av, ft, aT, io, ae, Ha, ahE, jf, IR, aW, Y, r, aq, kp, aF, ahI, g, iR, jb, bz, bN, es, W, eM, Hs, sv, yA, bdF, B); #c1(R0B01) c2(NP_002932) c3(roundabout homolog 1 isoform a precursor) c4(133707, 133708, 133709) c5(133710, 133711, 133712, 133713, 133714, 133715, 133716, 133717, 133718, 133719, 133720, 133721) c6( ) c7(bM, T, Mb, dA, arS, aw, VT, aA, hy, v, fr, qN, aIP, tK, g, ad, eA, av, ft, aT, io, ae, Ha, ahE, jf, IR, aW, Y, r, aq, kp, aF, ahI, g, iR, jb, bz, bN, es, W, eM, Hs, sv, yA, bdF, B); #c1(R0B01) c2(NP_598334) c3(roundabout homolog 1 isoform b) c4(235419, 235420) c5(235421, 235422, 235423, 235424, 235425, 235426, 235427, 235428, 235429, 235430, 235431, 235432) c6( ) c7(bM, T, Mb, dA, arS, aw, VT, aA, hy, v, fr, qN, aIP, tK, q, ad, eA, av, ft, aT, io, ae, Ha, ahE, jf, IR, aW, Y, r, aq, kp, aF, ahI, g, iR, jb, bz, bN, es, W, eM, Hs, sv, yA, bdF, B); #c1(R0B01) c2(XP_006713340) c3(roundabout homolog 1 isoform X4) c4( ) c5(287141, 287142, 287143, 287144, 287145, 287146) c6( ) c7(bM, T, Mb, dA, arS, aw, VT, aA, hy, v, fr, qN, aIP, tK, g, ad, eA, av, ft, aT, io, ae, Ha, ahE, jf, IR, aW, Y, r, aq, kp, aF, ahI, g, iR, jb, bz, bN, es, W, eM, Hs, sv, yA, bdF, B); #c1(R0B02) c2(NP_001122401) c3(roundabout homolog 2 isoform R0B02a) c4(46757, 46758) c5(46759, 46760, 46761, 46762, 46763, 46764, 46765, 46766, 46767, 46768, 46769, 46770, 46771, 46772, 46773, 46774) c6( ) c7(Kc, T, tY, dY, jz, wG, tL, oe, aw, czS, bcd, r, aur, aj, qN, cm, bN); #c1(R0B02) c2(NP_001276968) c3(roundabout homolog 2 isoform 3 precursor) c4(108855) c5(108856, 108857, 108858, 108859, 108860, 108861) c6( ) c7(Kc, T, tY, dY, jz, wG, tL, oe, aw, czS, bcd, r, aur, aj, qN, cm, bN); #c1(R0B02) c2(NP_002933) c3(roundabout homolog 2 isoform R0B02b precursor) c4(133722) c5(133723, 133724, 133725, 133726, 133727, 133728) c6( ) c7(Kc, T, tY, dY, jz, wG, tL, oe, aw, czS, bcd, r, aur, aj, qN, cm, bN); #c1(R0B02) c2(XP_011532283) c3(roundabout homolog 2 isoform X1) c4(328350) c5( ) c6( ) c7(Kc, T, tY, dY, jz, wG, tL, oe, aw, czS, bcd, r, aur, aj, qN, cm, bN); #c1(R0B03) c2(NP_071765) c3(roundabout homolog 3 precursor) c4(212005, 212006) c5(212007, 212008, 212009, 212010, 212011, 212012, 212013, 212014, 212015, 212016, 212017, 212018, 212019, 212020, 212021) c6( ) c7(Dw, T, dD, czU, ea, if, jx, aA, j, eq, qN, fr, eW, MR, Dq, ds, rC, cU, h, anq, K, afu, A, d, aCg, bes, Y, yL, apn, eZ, ff, aiT, lo, kp, aF, La, en, CQ, bQ, t, iK, awi, dr, czT, bN, Bv, ac, Iq, NL, AH, Uq, aiM, bel, y); #c1(R0B03) c2(XP_011541255) c3(roundabout homolog 3 isoform X1) c4(339911) c5(339912, 339913, 339914, 339915, 339916) c6( ) c7(Dw, T, dD, czU, ea, if, jx, aA, j, eq, qN, fr, eW, MR, Dq, ds, rC, cU, h, anq, K, afu, A, d, aCg, bes, Y, yL, apn, eZ, ff, aiT, lo, kp, aF, La, en, CQ, bQ, t, iK, awi, dr, czT, bN, Bv, ac, Iq, NL, AH, Uq, aiM, bel, y); #c1(R0B04) c2(NP_001288017) c3(roundabout homolog 4 isoform 2) c4(113430, 113431) c5( ) c6( ) c7(c, eM, fG, yL, cz, kp, B, ad, bN); #c1(R0B04) c2(NP_061928) c3(roundabout homolog 4 isoform 1 precursor) c4(201175) c5(201176, 201177, 201178, 201179, 201180, 201181, 201182, 201183, 201184, 201185, 201186, 201187, 201188, 201189, 201190, 201191, 201192, 201193) c6( ) c7(c, eM, fG, yL, cz, kp, B, ad, bN); #c1(R0B04) c2(XP_006718924) c3(roundabout homolog 4 isoform X1) c4( ) c5(292113) c6( ) c7(c, eM, fG, yL, cz, kp, B, ad, bN); #c1(ROCK1) c2(NP_005397) c3(rho-associated protein kinase 1) c4(155693) c5(155694, 155695, 155696, 155697, 155698, 155699) c6( ) c7(bL, uB, T, ID, aC, ea, e, aA, cz, mw, aj, dG, j, v, bB, Lw, eb, fr, q, J, ad, El, dP, eA, bv, av, iu, aE, py, cc, sN, acA, ds, oj, aT, kf, h, dz, dL, K, hH, ae, af, eL, ly, eG, d, bf, aW, eH, r, Qm, aF, as, dw, t, eF, cm, Ix, dR, xd, eM, bE, X, nw, m, fD, ei, IC, bt, B); #c1(ROCK2) c2(NP_004841) c3(rho-associated protein kinase 2) c4(150188, 150189, 150190) c5(150191, 150192, 150193, 150194, 150195, 150196, 150197, 150198, 150199, 150200, 150201, 150202, 150203, 150204, 150205, 150206, 150207, 150208) c6( ) c7(ID, T, e, al, cz, eh, j, eA, aT, h, By, K, hH, wC, ly, d, aW, uC, qa, lx, bF, xd, bE, cj, IC, B); #c1(ROCK2) c2(XP_011508719) c3(rho-associated protein kinase 2 isoform X2) c4( ) c5(299340) c6( ) c7(ID, T, e, al, cz, eb, j, eA, aT, h, By, K, hH, wC, ly, d, aW, uC, qa, lx, bF, xd, bE, cj, IC, B); #c1(ROGD1) c2(NP_078865) c3(protein rogdi homolog) c4(215832) c5(215833, 215834, 215835, 215836, 215837, 215838) c6( ) c7(czV); #c1(ROM1) c2(NP_000318) c3(rod outer segment membrane protein 1) c4(7006) c5(7007, 7008, 7009, 7010, 7011, 7012) c6( ) c7(T, xX, IR, BO, W, z, aW, Sr, nx, aDj, aT, dr, bxi, nw, nk, rz, nC, cap, czW, de); #c1(ROPN1) c2(XP_011511238) c3(ropporin-1A isoform X2) c4( ) c5(301719, 301720, 301721, 301722, 301723, 301724, 301725, 301726, 301727, 301728, 301729, 301730, 301731, 301732, 301733, 301734, 301735, 301736, 301737, 301738, 301739, 301740, 301741, 301742) c6( ) c7(eu, Ea, ac, M, cz); #c1(ROPN1B) c2(XP_005247195) c3(ropporin-1B isoform X3) c4( ) c5(267690, 267691, 267692, 267693, 267694, 267695, 267696, 267697) c6( ) c7(asG, Y); #c1(ROPN1B) c2(XP_011510753) c3(ropporin-1B isoform X2) c4( ) c5(301174, 301175, 301176, 301177, 301178, 301179, 301180, 301181, 301182, 301183, 301184, 301185) c6( ) c7(asG, Y); #c1(ROPN1L) c2(NP_114122) c3(ropporin-1-like protein) c4(222242) c5(222243, 222244, 222245, 222246, 222247, 222248, 222249, 222250, 222251, 222252) c6( ) c7(x, y, I, A, c, u, w, h, n, v, j, m, k, t, fq, o, p); #c1(ROR1) c2(XP_011539828) c3(tyrosine-protein kinase transmembrane receptor ROR1 isoform X1) c4( ) c5(338062, 338063, 338064, 338065, 338066) c6( ) c7(ck, es, T, iu, x, eM, iA, Y, aw, cj, aT, Hn, aj, aF, bK, k, ei, im, cd, er, Qt); #c1(ROR2) c2(NP_004551) c3(tyrosine-protein kinase transmembrane receptor ROR2 precursor) c4(147580) c5(147581, 147582, 147583, 147584, 147585, 147586) c6( ) c7(T, rV, acl, fd, Bm, fr, ci, zU, ad, zw, hW, fb, ae, bA, cp, jf, cml, Y, eH, rs, eF, Qt, dr, ac, rq, czX, dy, YH); #c1(RORA) c2(NP_002934) c3(nuclear receptor ROR-alpha isoform c) c4(133729) c5(133730, 133731, 133732, 133733, 133734, 133735, 133736) c6( ) c7(bL, bM, T, dD, rV, acl, fd, aA, Bm, Hn, im, bS, eq, jE, ct, ci, zU, bX, fr, ad, er, hX, x, iu, Yn, zw, hW, aT, ta, cy, bK, K, IQ, ji, fb, nJ, ae, Um, cp, bA, jf, cml, aW, Y, eH, hl, dq, aq, rs, aF, Z, aGj, eF, Qt, dr, bN, aPY, ck, es, W, rq, eM, iA, Ei, cj, czX, k, cP, ei, GF, YH, B); #c1(RORA) c2(NP_599022) c3(nuclear receptor ROR-alpha isoform b) c4(235569) c5(235570, 235571, 235572, 235573, 235574, 235575, 235576) c6( ) c7(bL, bM, T, dD, rV, acl, fd, aA, Bm, Hn, im, bS, eq, jE, ct, ci, zU, bX, fr, ad, er, hX, x, iu, Yn, zw, hW, aT, ta, cy, bK, K, IQ, ji, fb, nJ, ae, Um, cp, bA, jf, cml, aW, Y, eH, hl, dq, aq, rs, aF, Z, aGj, eF, Qt, dr, bN, aPY, ck, es, W, rq, eM, iA, Ei, cj, czX, k, cP, ei, GF, YH, B); #c1(RORA) c2(NP_599023) c3(nuclear receptor ROR-alpha isoform a) c4(235577) c5(235578, 235579, 235580, 235581, 235582, 235583, 235584) c6( ) c7(bL, bM, T, dD, rV, acl, fd, aA, Bm, Hn, im, bS, eq, jE, ct, ci, zU, bX, fr, ad, er, hX, x, iu, Yn, zw, hW, aT, ta, cy, bK, K, IQ, ji, fb, nJ, ae, Um, cp, bA, jf, cml, aW, Y, eH, hl, dq, aq, rs, aF, Z, aGj, eF, Qt, dr, bN, aPY, ck, es, W, rq, eM, iA, Ei, cj, czX, k, cP, ei, GF, YH, B); #c1(RORA) c2(NP_599024) c3(nuclear receptor ROR-alpha isoform d) c4(235585) c5(235586, 235587, 235588, 235589, 235590, 235591, 235592) c6( ) c7(bL, bM, T, dD, rV, acl, fd, aA, Bm, Hn, im, bS, eq, jE, ct, ci, zU, bX, fr, ad, er, hX, x, iu, Yn, zw, hW, aT, ta, cy, bK, K, IQ, ji, fb, nJ, ae, Um, cp, bA, jf, cml, aW, Y, eH, hl, dq, aq, rs, aF, Z, aGj, eF, Qt, dr, bN, aPY, ck, es, W, rq, eM, iA, Ei, cj, czX, k, cP, ei, GF, YH, B); #c1(RORA) c2(XP_011520177) c3(nuclear receptor ROR-alpha isoform X3) c4( ) c5(315048) c6( ) c7(bL, bM, T, dD, rV, acl, fd, aA, Bm, Hn, im, bS, eq, jE, ct, ci, zU, bX, fr, ad, er, hX, x, iu, Yn, zw, hW, aT, ta, cy, bK, K, IQ, ji, fb, nJ, ae, Um, cp, bA, jf, cml, aW, Y, eH, hl, dq, aq, rs, aF, Z, aGj, eF, Qt, dr, bN, aPY, ck, es, W, rq, eM, iA, Ei, cj, czX, k, cP, ei, GF, YH, B); #c1(RORB) c2(NP_008845) c3(nuclear receptor ROR-beta) c4(169049, 169050) c5(169051, 169052, 169053, 169054, 169055, 169056, 169057, 169058, 169059, 169060, 169061, 169062, 169063) c6( ) c7(aPY, bK, dP); #c1(RORC) c2(NP_001001523) c3(nuclear receptor ROR-gamma isoform b) c4(18602) c5(18603, 18604, 18605, 18606, 18607, 18608, 18609) c6( ) c7(bL, T, OG, cc, bei, pf, aW, JW, wz, aT, Vv, n, r, v, dW, yO, ae, q, dr, ad); #c1(RORC) c2(NP_005051) c3(nuclear receptor ROR-gamma isoform a) c4(152460) c5(152461, 152462, 152463, 152464, 152465, 152466, 152467) c6( ) c7(bL, T, OG, cc, bei, pf, aW, JW, wz, aT, Vv, n, r, v, dW, yO, ae, q, dr, ad); #c1(RORC) c2(XP_006711547) c3(nuclear receptor ROR-gamma isoform X1) c4(286112) c5(286113, 286114, 286115, 286116, 286117, 286118) c6( ) c7(bL, T, OG, cc, bei, pf, aW, JW, wz, aT, Vv, n, r, v, dW, yO, ae, q, dr, ad); #c1(ROS1) c2(NP_002935) c3(proto-oncogene tyrosine-protein kinase ROS precursor) c4(133737) c5(133738, 133739, 133740, 133741, 133742, 133743) c6( ) c7(Mb, T, eR, e, aw, aA, cz, n, j, ci, q, eA, ip, av, jz, aT, dL, eu, azH, d, Jl, aW, Y, r, aF, g, t, bz, eK, iP, kT, ac, eM, Vy, at, m, ei, iu); #c1(ROS1) c2(XP_006715611) c3(proto-oncegene tyrosine-protein kinase ROS isoform X5) c4(289640) c5(289641, 289642, 289643, 289644, 289645, 289646) c6( ) c7(Mb, T, eR, e, aw, aA, cz, n, j, ci, q, eA, ip, av, jz, aT, dL, eu, azH, d, Jl, aW, Y, r, aF, g, t, bz, eK, iP, kT, ac, eM, Vy, at, m, ei, iu); #c1(ROS1) c2(XP_011534357) c3(proto-oncogene tyrosine-protein kinase ROS isoform X8) c4(330731) c5(330732, 330733, 330734, 330735, 330736, 330737) c6( ) c7(Mb, T, eR, e, aw, aA, cz, n, j, ci, q, eA, ip, av, jz, aT, dL, eu, azH, d, Jl, aW, Y, r, aF, g, t, bz, eK, iP, kT, ac, eM, Vy, at, m, ei, iu); #c1(RP1) c2(NP_006260) c3(oxygen-regulated protein 1) c4(163350) c5(163351, 163352, 163353, 163354, 163355, 163356, 163357) c6( ) c7(xX, IR, cO, r, nw, nk, cm, nC, q, RE); #c1(RP1L1) c2(NP_849188) c3(retinitis pigmentosa 1-like 1 protein) c4(254453) c5(254454, 254455, 254456, 254457, 254458, 254459, 254460) c6( ) c7(csr, W, nC, Sr, IR); #c1(RP2) c2(NP_008846) c3(protein XRP2) c4(169064) c5(169065, 169066, 169067, 169068, 169069, 169070) c6( ) c7(afR, kl, xX, czZ, IR, nx, czY, Be, nw, eQ, HU, ayj, nC); #c1(RP9) c2(NP_976033) c3(retinitis pigmentosa 9 protein) c4(262830) c5(262831, 262832, 262833, 262834, 262835, 262836) c6( ) c7(T, b, xX, IR, if, aoA, cAa, qN, i, nC, GR); #c1(RPA1) c2(NP_002936) c3(replication protein A 70 kDa DNA-binding subunit) c4(133744) c5(133745, 133746, 133747, 133748, 133749, 133750) c6( ) c7(eW, T, wr, BN, ac, afl, aT, Nl, hy, dL, j, Kh, xH, V, ne); #c1(RPA2) c2(NP_001284487) c3(replication protein A 32 kDa subunit isoform 3) c4(111895, 111896, 111897, 111898) c5(111899, 111900, 111901, 111902, 111903, 111904) c6( ) c7(BI, T, aiB, qt, aW, aT, cX, dL, eS, K, V); #c1(RPA3) c2(NP_002938) c3(replication protein A 14 kDa subunit) c4(133751) c5(133752, 133753, 133754, 133755, 133756, 133757, 133758, 133759, 133760, 133761) c6( ) c7(V, dL, aw, aT); #c1(RPA4) c2(NP_037479) c3(replication protein A 30 kDa subunit) c4(175738) c5(175739, 175740, 175741, 175742, 175743, 175744) c6( ) c7(dL, c); #c1(RPAIN) c2(NP_001028174) c3(RPA-interacting protein isoform b) c4(30344, 30345, 30346) c5(30347, 30348, 30349, 30350, 30351, 30352) c6( ) c7(dA, eM, aW, bo, yG, aT, aj, fD, EA, y, J); #c1(RPAIN) c2(NP_001153715) c3(RPA-interacting protein isoform a) c4(60890) c5(60891, 60892, 60893, 60894, 60895, 60896) c6( ) c7(dA, eM, aW, bo, yG, aT, aj, fD, EA, y, J); #c1(RPAIN) c2(NP_001153716) c3(RPA-interacting protein isoform c) c4(60897) c5(60898, 60899, 60900, 60901, 60902, 60903) c6( ) c7(dA, eM, aW, bo, yG, aT, aj, fD, EA, y, J); #c1(RPAIN) c2(NP_001153718) c3(RPA-interacting protein isoform d) c4(60904) c5(60905, 60906, 60907, 60908, 60909, 60910, 60911, 60912, 60913, 60914, 60915, 60916) c6( ) c7(dA, eM, aW, bo, yG, aT, aj, fD, EA, y, J); #c1(RPAIN) c2(NP_001153738) c3(RPA-interacting protein isoform e) c4(60965) c5(60966, 60967, 60968, 60969, 60970, 60971, 60972, 60973, 60974, 60975, 60976, 60977) c6( ) c7(dA, eM, aW, bo, yG, aT, aj, fD, EA, y, J); #c1(RPAP1) c2(NP_056355) c3(RNA polymerase II-associated protein 1) c4(187233) c5(187234, 187235, 187236, 187237, 187238, 187239) c6( ) c7(aW, aT); #c1(RPE) c2(NP_001265214) c3(ribulose-phosphate 3-epimerase isoform 3) c4(97950) c5(97951, 97952, 97953, 97954, 97955, 97956) c6( ) c7(bGg, agS, T, AT, bF, IR, nb, W, Ha, aQx, aqV, aVu, Hs, nw, ey, K, db, aqY, Uk); #c1(RPE) c2(NP_008847) c3(ribulose-phosphate 3-epimerase isoform 2) c4(169071, 169072) c5(169073, 169074, 169075, 169076, 169077, 169078, 169079, 169080, 169081, 169082, 169083, 169084, 169085, 169086, 169087, 169088, 169089, 169090) c6( ) c7(bGg, agS, T, AT, bF, IR, nb, W, Ha, aQx, aqV, aVu, Hs, nw, ey, K, db, aqY, Uk); #c1(RPE) c2(NP_954699) c3(ribulose-phosphate 3-epimerase isoform 1) c4(261282, 261283) c5(261284, 261285, 261286, 261287, 261288, 261289, 261290, 261291, 261292, 261293, 261294, 261295, 261296, 261297) c6( ) c7(bGg, agS, T, AT, bF, IR, nb, W, Ha, aQx, aqV, aVu, Hs, nw, ey, K, db, aqY, Uk); #c1(RPGR) c2(NP_000319) c3(X-linked retinitis pigmentosa GTPase regulator isoform A) c4(7013, 7014, 7015) c5(7016, 7017, 7018, 7019, 7020, 7021, 7022, 7023, 7024, 7025, 7026, 7027) c6( ) c7(nx, cAd, jA, Sp, HU, Nh, afR, afm, bgm, K, MG, Ii, xX, IR, Pf, cAc, cAb, czY, aVu, nC, Ud, ayj, W, cnj, nb, U, Be, nw, OL, oQ, bgv, de); #c1(RPGR) c2(NP_001030025) c3(X-linked retinitis pigmentosa GTPase regulator isoform C) c4(30888, 30889, 30890) c5(30891, 30892, 30893, 30894, 30895, 30896, 30897, 30898, 30899, 30900, 30901, 30902, 30903, 30904, 30905, 30906, 30907, 30908, 30909, 30910) c6( ) c7(nx, cAd, jA, Sp, HU, Nh, afR, afm, bgm, K, MG, Ii, xX, IR, Pf, cAc, cAb, czY, aVu, nC, Ud, ayj, W, cnj, nb, U, Be, nw, OL, oQ, bgv, de); #c1(RPGR) c2(XP_005272690) c3(X-linked retinitis pigmentosa GTPase regulator isoform X2) c4( ) c5(284143, 284144, 284145, 284146, 284147, 284148) c6( ) c7(nx, cAd, jA, Sp, HU, Nh, afR, afm, bgm, K, MG, Ii, xX, IR, Pf, cAc, cAb, czY, aVu, nC, Ud, ayj, W, cnj, nb, U, Be, nw, OL, oQ, bgv, de); #c1(RPGRIP1) c2(NP_065099) c3(X-linked retinitis pigmentosa GTPase regulator-interacting protein 1) c4(203926, 203927) c5(203928, 203929, 203930, 203931, 203932, 203933, 203934, 203935, 203936, 203937, 203938, 203939) c6( ) c7(cAe, KE, ago, cAf, IR, dH, nx, U, vm, nw, eQ, dw, nC, Nh, de); #c1(RPGRIP1) c2(XP_011535284) c3(X-linked retinitis pigmentosa GTPase regulator-interacting protein 1 isoform X8) c4(332296) c5(332297, 332298, 332299, 332300, 332301, 332302) c6( ) c7(cAe, KE, ago, cAf, IR, dH, nx, U, vm, nw, eQ, dw, nC, Nh, de); #c1(RPGRIP1) c2(XP_011535285) c3(X-linked retinitis pigmentosa GTPase regulator-interacting protein 1 isoform X9) c4(332303) c5(332304, 332305, 332306, 332307, 332308, 332309, 332310) c6( ) c7(cAe, KE, ago, cAf, IR, dH, nx, U, vm, nw, eQ, dw, nC, Nh, de); #c1(RPGRIP1L) c2(NP_001121369) c3(protein fantom isoform b) c4(45784) c5(45785, 45786, 45787, 45788, 45789, 45790) c6( ) c7(aBW, Ng, bL, alF, ago, cAh, Pf, cd, vm, nw, dy, cAg, bK, oQ, v, Sp, B); #c1(RPGRIP1L) c2(NP_056087) c3(protein fantom isoform a) c4(185635) c5(185636, 185637, 185638, 185639, 185640, 185641) c6( ) c7(aBW, Ng, bL, alF, ago, cAh, Pf, cd, vm, nw, dy, cAg, bK, oQ, v, Sp, B); #c1(RPH3A) c2(NP_001137326) c3(rabphilin-3A isoform 1) c4(55476, 55477, 55478, 55479, 55480, 55481, 55482, 55483, 55484, 55485, 55486, 55487) c5(55488, 55489, 55490, 55481, 55492, 55493, 55494, 55495, 55496, 55497, 55498, 55499, 55500, 55501, 55502, 55503, 55504, 55505, 55506, 55507, 55508, 55509, 55510, 55511, 55512, 55513, 55514, 55515, 55516, 55517, 55518, 55519, 55520, 55521, 55522, 55523, 55524, 55525, 55526, 55527, 55528, 55529, 55530, 55531, 55532, 55533, 55534, 55535, 55536, 55537, 55538, 55539, 55540, 55541, 55542, 55543, 55544, 55545, 55546, 55547, 55548, 55549, 55550, 55551, 55552, 55553, 55554, 55555, 55556, 55557, 55558, 55559, 55560, 55561, 55562, 55563, 55564, 55565, 55566, 55567, 55568, 55569, 55570, 55571, 55572, 55573, 55574, 55575, 55576, 55577, 55578, 55579, 55580) c6( ) c7(ak, rR, r, g, q, sj); #c1(RPH3A) c2(NP_055769) c3(rabphilin-3A isoform 2) c4(183385, 183386) c5(183387, 183388, 183389, 183390, 183391, 183392, 183393, 183394, 183395, 183396, 183397, 183398) c6( ) c7(ak, rR, r, g, q, sj); #c1(RPH3AL) c2(XP_011545302) c3(rab effector Noc2 isoform X5) c4(344075) c5(344076, 344077, 344078, 344079, 344080, 344081) c6( ) c7(qJ, bM, jf, r, fQ, m, an, t, q); #c1(RPH3AL) c2(XP_011545304) c3(rab effector Noc2 isoform X7) c4(344082) c5(344083, 344084, 344085, 344086, 344087, 344088, 344089, 344090, 344091, 344092, 344093, 344094, 344095, 344096) c6( ) c7(qJ, bM, jf, r, fQ, m, an, t, q); #c1(RP1A) c2(NP_653164) c3(ribose-5-phosphate isomerase) c4(238879, 238880) c5(238881, 238882, 238883, 238884, 238885, 238886, 238887, 238888, 238889, 238890, 238891, 238892) c6( ) c7(bxy, nM, cAi, nB, nv, fd, dq, K, bX, zz); #c1(RPL10) c2(NP_001243506) c3(60S ribosomal protein L10 isoform b) c4(90973, 90974) c5(90975, 90976, 90977, 90978, 90979, 90980) c6( ) c7(bN, T, aE, aW, bOL, eL, aT, KO, dL, m, g, er, ae, eA, cAj, ad); #c1(RPL10) c2(NP_001290554) c3(60S ribosomal protein L10 isoform a) c4(115520, 115521) c5(115522, 115523, 115524, 115525, 115526, 115527, 115528, 115529, 115530, 115531, 115532, 115533, 115534, 115535, 115536, 115537, 115538, 115539, 115540, 115541) c6( ) c7(bN, T, aE, aW, bOL, eL, aT, KO, dL, m, g, er, ae, eA, cAj, ad); #c1(RPL10) c2(NP_001290555) c3(60S ribosomal protein L10 isoform d) c4( ) c5(115542, 115543, 115544, 115545, 115546, 115547) c6( ) c7(bN, T, aE, aW, bOL, eL, aT, KO, dL, m, g, er, ae, eA, cAj, ad); #c1(RPL10A) c2(NP_009035) c3(60S ribosomal protein L10a) c4(170342) c5(170343, 170344, 170345, 170346, 170347, 170348) c6( ) c7(ds); #c1(RPL10L) c2(NP_542784) c3(60S ribosomal protein L10-like) c4(233075) c5(233076, 233077, 233078, 233079, 233080, 233081) c6( ) c7(t, j, m); #c1(RPL12) c2(NP_000967) c3(60S ribosomal protein L12) c4(17757, 17758) c5(17759, 17760, 17761, 17762, 17763, 17764, 17765, 17766, 17767, 17768, 17769, 17770) c6( ) c7(Na, Nc, asD, ad); #c1(RPL13) c2(NP_001230060) c3(60S ribosomal protein L13 isoform 3) c4(85861) c5(85862, 85863, 85864, 85865, 85866, 85867) c6( ) c7(aW, ae, aA, ad, aT); #c1(RPL13) c2(NP_150254) c3(60S ribosomal protein L13 isoform 1) c4(228004) c5(228005, 228006, 228007, 228008, 228009, 228010, 228011, 228012, 228013, 228014) c6( ) c7(aW, ae, aA, ad, aT); #c1(RPL14) c2(NP_001030168) c3(60S ribosomal protein L14) c4(30947, 30948) c5(30949, 30950, 30951, 30952, 30953, 30954, 30955, 30956, 30957, 30958, 30959, 30960, 30961, 30962, 30963, 30964) c6( ) c7(bL, av, eM, aj, fr, an, iK, bz, eA, J); #c1(RPL15) c2(NP_001240313) c3(60S ribosomal protein L15 isoform 2) c4(88589, 88590) c5(88591, 88592, 88593, 88594, 88595, 88596, 88597, 88598, 88599, 88600, 88601) c6( ) c7(cAk, CJ, bN, aA); #c1(RPL15) c2(XP_011532288) c3(60S ribosomal protein L15 isoform X1) c4(328351, 328352, 328353, 328354, 328355) c5(328356, 328357, 328358, 328359, 328360, 328361, 328362, 328363, 328364, 328365, 328366, 328367, 328368, 328369, 328370, 328371, 328372, 328373, 328374, 328375, 328376, 328377, 328378, 328379, 328380, 328381, 328382, 328383, 328384, 328385, 328386, 328387, 328388, 328389, 328390, 328391, 328392, 328393, 328394, 328395, 328396, 328397, 328398, 328399, 328400, 328401, 328402) c6( ) c7(cAk, CJ, bN, aA); #c1(RPL17) c2(NP_001030178) c3(60S ribosomal protein L17 isoform a) c4(30973, 30974, 30975) c5(30976, 30977, 30978, 30979, 30980, 30981, 30982, 30983, 30984, 30985, 30986, 30987, 30988, 30989, 30990, 30991, 30992, 30993, 30994, 30995, 30996, 30997) c6( ) c7(T, A, iM, je, aW, Y, jx, eZ, aT, uo, kH, Io, aA, j, aF, h, y, hv); #c1(RPL17) c2(NP_001186274) c3(60S ribosomal protein L17 isoform b) c4( ) c5(77457, 77458, 77459, 77460, 77461, 77462, 77463, 77464) c6( ) c7(T, A, iM, je, aW, Y, jx, eZ, aT, uo, kH, Io, aA, j, aF, h, y, hv); #c1(RPL17-C18orf32) c2(NP_001186284) c3(RPL17-C18orf32 protein isoform 1) c4(77465) c5(77466, 77467, 77468, 77469, 77470, 77471) c6( ) c7(T, A, iM, je, aW, Y, jx, eZ, aT, uo, kH, Io, aA, dW, aF, h, y, hv); #c1(RPL18) c2(NP_000970) c3(60S ribosomal protein L18 isoform 1) c4(17796, 17797, 17798) c5(17799, 17800, 17801, 17802, 17803, 17804, 17805, 17806, 17807, 17808, 17809, 17810, 17811, 17812, 17813, 17814, 17815, 17816, 17817, 17818) c6( ) c7(aA); #c1(RPL18) c2(NP_001257419) c3(60S ribosomal protein L18 isoform 2) c4(95408) c5(95409, 95410, 95411, 95412, 95413, 95414) c6( ) c7(aA); #c1(RPL19) c2(NP_000972) c3(60S ribosomal protein L19) c4(17819) c5(17820, 17821, 17822, 17823, 17824, 17825) c6( ) c7(li, ae, aC, iu, eM, aW, r, aT, ci, bz, q, ad); #c1(RPL21) c2(NP_000973) c3(60S ribosomal protein L21) c4(17826) c5(17827, 17828, 17829, 17830, 17831, 17832, 17833, 17834, 17835, 17836, 17837, 17838, 17839, 17840, 17841, 17842, 17843, 17844) c6( ) c7(eW); #c1(RPL23) c2(NP_000969) c3(60S ribosomal protein L23) c4(17771, 17772, 17773) c5(17774, 17775, 17776, 17777, 17778, 17779, 17780, 17781, 17782, 17783, 17784, 17785, 17786, 17787, 17788, 17789, 17790, 17791, 17792, 17793, 17794, 17795) c6( ) c7(T, azm, Pg, aF, aA); #c1(RPL23A) c2(NP_000975) c3(60S ribosomal protein L23a) c4(17845, 17846, 17847, 17848, 17849) c5(17850, 17851, 17852, 17853, 17854, 17855, 17856, 17857, 17858, 17859, 17860, 17861, 17862, 17863, 17864, 17865, 17866, 17867, 17868, 17869, 17870, 17871, 17872, 17873, 17874, 17875, 17876, 17877, 17878, 17879) c6( ) c7(Y, an, qN, aT); #c1(RPL24) c2(NP_000977) c3(60S ribosomal protein L24) c4(17880, 17881) c5(17882, 17883, 17884, 17885, 17886, 17887, 17888, 17889, 17890, 17891, 17892, 17893) c6( ) c7(Sv); #c1(RPL27A) c2(NP_000981) c3(60S ribosomal protein L27a) c4(17912, 17913) c5(17914, 17915, 17916, 17917, 17918, 17919, 17920, 17921, 17922, 17923, 17924, 17925) c6( ) c7(oX, ky); #c1(RPL29) c2(NP_000983) c3(60S ribosomal protein L29) c4(17926) c5(17927, 17928, 17929, 17930, 17931, 17932, 17933, 17934, 17935, 17936, 17937, 17938, 17939, 17940, 17941, 17942, 17943, 17944, 17945, 17946, 17947, 17948, 17949, 17950, 17951, 17952) c6( ) c7(bL, eW, T, bE, aA, bB, aq, aj, v, aF, ci, K, q, X, J); #c1(RPL3) c2(NP_000958) c3(60S ribosomal protein L3 isoform a) c4(17694, 17695) c5(17696, 17697, 17698, 17699, 17700, 17701, 17702, 17703, 17704, 17705, 17706, 17707) c6( ) c7(beo, zQ, aW, Y, Am, aXY, aT, tv, wR, tu, ci, bQx, zP, fb, f); #c1(RPL30) c2(NP_000980) c3(60S ribosomal protein L30) c4(17894, 17895) c5(17896, 17897, 17898, 17899, 17900, 17901, 17902, 17903, 17904, 17905, 17906, 17907, 17908, 17909, 17910, 17911) c6( ) c7(bB, bE, T, jf, B); #c1(RPL31) c2(NP_000984) c3(60S ribosomal protein L31 isoform 1) c4(17953, 17954, 17955) c5(17956, 17957, 17958, 17959, 17960, 17961, 17962, 17963, 17964, 17965, 17966, 17967, 17968, 17969, 17970, 17971, 17972, 17973, 17974, 17975, 17976, 17977) c6( ) c7(aT); #c1(RPL31) c2(NP_001092047) c3(60S ribosomal protein L31 isoform 2) c4(39260, 39261) c5(39262, 39263, 39264, 39265, 39266, 39267) c6( ) c7(aT); #c1(RPL31) c2(NP_001093163) c3(60S ribosomal protein L31 isoform 3) c4(39906) c5(39907, 39908, 39909, 39910, 39911, 39912, 39913, 39914, 39915, 39916, 39917, 39918) c6( ) c7(aT); #c1(RPL34) c2(XP_006714350) c3(60S ribosomal protein L34 isoform X1) c4(287758) c5(287759, 287760, 287761, 287762, 287763, 287764, 287765, 287766, 287767, 287768, 287769, 287770, 287771, 287772, 287773, 287774, 287775, 287776, 287777, 287778, 287779, 287780) c6( ) c7(ck, iJ, bP); #c1(RPL35) c2(NP_009140) c3(60S ribosomal protein L35) c4(171055, 171056) c5(171057, 171058, 171059, 171060, 171061, 171062, 171063, 171064, 171065, 171066, 171067, 171068) c6( ) c7(aT); #c1(RPL36A) c2(NP_066357) c3(60S ribosomal protein L36a isoform a) c4(207184, 207185, 207186) c5(207187, 207188, 207189, 207190, 207191, 207192, 207193, 207194) c6( ) c7(ae, T, hd, d, nM, eM, nB, iU, aW, aZ, n, K, g, aDZ, bz, B, ad, Qt); #c1(RPL36AL) c2(NP_000992) c3(60S ribosomal protein L36a-like) c4( ) c5(18014, 18015, 18016, 18017, 18018, 18019, 18020, 18021, 18022, 18023) c6( ) c7(B); #c1(RPL37A) c2(NP_000989) c3(60S ribosomal protein L37a) c4(17978, 17979) c5(17980, 17981, 17982, 17983, 17984, 17985, 17986, 17987, 17988, 17989, 17990, 17991) c6( ) c7(kl); #c1(RPL38) c2(NP_000990) c3(60S ribosomal protein L38) c4(17992) c5(17993, 17994, 17995, 17996, 17997, 17998, 17999, 18000, 18001, 18002, 18003, 18004, 18005, 18006) c6( ) c7(aBU, aZR, zo); #c1(RPL39) c2(NP_000991) c3(60S ribosomal protein L39) c4(18007) c5(18008, 18009, 18010, 18011, 18012, 18013) c6( ) c7(aE); #c1(RPL39L) c2(NP_443201) c3(60S ribosomal protein L39-like) c4(229857) c5(229858, 229859, 229860, 229861, 229862, 229863, 229864, 229865, 229866, 229867, 229868, 229869, 229870, 229871) c6( ) c7(t, B, m); #c1(RPL4) c2(NP_000959) c3(60S ribosomal protein L4) c4(17708, 17709, 17710) c5(17711, 17712, 17713, 17714, 17715, 17716, 17717, 17718, 17719, 17720, 17721, 17722, 17723, 17724, 17725, 17726, 17727, 17728) c6( ) c7(az); #c1(RPL41) c2(NP_066927) c3(60S ribosomal protein L41) c4(207529) c5( ) c6( ) c7(cAI, eW); #c1(RPL6) c2(XP_006719612) c3(60S ribosomal protein L6 isoform X1) c4(292663, 292664, 292665, 292666, 292667) c5(292668, 292669, 292670, 292671, 292672, 292673, 292674, 292675, 292676, 292677, 292678, 292679, 292680, 292681, 292682, 292683, 292684, 292685, 292686, 292687, 292688, 292689, 292690, 292691, 292692, 292693, 292694, 292695, 292696, 292697, 292698, 292699, 292700, 292701, 292702, 292703, 292704, 292705) c6( ) c7(zQ, yS, aA, aF, ci, an, zP, fh); #c1(RPL7) c2(NP_000962) c3(60S ribosomal protein L7) c4(17729) c5(17730, 17731, 17732, 17733, 17734, 17735) c6( ) c7(cAm); #c1(RPL7A) c2(NP_000963) c3(60S ribosomal protein L7a) c4(17736, 17737, 17738) c5(17739, 17740, 17741, 17742, 17743, 17744, 17745, 17746, 17747, 17748, 17749, 17750, 17751, 17752, 17753, 17754, 17755, 17756) c6( ) c7(B, aW, eH, r, aT, K, eF, q); #c1(RPLP0) c2(NP_000993) c3(60S acidic ribosomal protein P0) c4(18024, 18025) c5(18026, 18027, 18028, 18029, 18030, 18031, 18032, 18033, 18034, 18035, 18036, 18037, 18038, 18039, 18040, 18041, 18042, 18043, 18044, 18045) c6( ) c7(ck, bM, eM, bE, r, fe, q, B); #c1(RPLP1) c2(NP_000994) c3(60S acidic ribosomal protein P1 isoform 1) c4(18046) c5(18047, 18048, 18049, 18050, 18051, 18052) c6( ) c7(T, jz, hb, bE, wL, cj, bB, y); #c1(RPLP1) c2(NP_998890) c3(60S acidic ribosomal protein P1 isoform 2) c4(266078) c5(266079, 266080, 266081, 266082, 266083, 266084) c6( ) c7(T, jz, hb, bE, wL, cj, bB, y); #c1(RPN1) c2(NP_002941) c3(dolichyl-diphosphooligosaccharide-protein glycosyltransferase subunit 1 precursor) c4(133762, 133763, 133764, 133765) c5(133766, 133767, 133768, 133769, 133770, 133771, 133772, 133773, 133774, 133775, 133776, 133777, 133778, 133779, 133780, 133781, 133782, 133783, 133784, 133785, 133786, 133787, 133788, 133789) c6( ) c7(ck, bs, j, bw, bt, br, ad); #c1(RPN2) c2(NP_001129243) c3(dolichyl-diphosphooligosaccharide-protein glycosyltransferase subunit 2 isoform 2 precursor) c4(51300) c5(51301, 51302, 51303, 51304, 51305, 51306, 51307, 51308, 51309, 51310, 51311, 51312, 51313, 51314, 51315, 51316, 51317, 51318) c6( ) c7(bL, T, dH, aW, ff, aT, en, ad); #c1(RPN2) c2(NP_002942) c3(dolichyl-diphosphooligosaccharide-protein glycosyltransferase subunit 2 isoform 1 precursor) c4(133790) c5(133791, 133792, 133793, 133794, 133795, 133796) c6( ) c7(bL, T, dH, aW, ff, aT, en, ad); #c1(RPN2) c2(XP_005260548) c3(dolichyl-diphosphooligosaccharide-protein glycosyltransferase subunit 2 isoform X2) c4(276607, 276608) c5( ) c6( ) c7(bL, T, dH, aW, ff, aT, en, ad); #c1(RPN2) c2(XP_006723914) c3(dolichyl-diphosphooligosaccharide-protein glycosyltransferase subunit 2 isoform X4) c4(295448) c5( ) c6( ) c7(bL, T, dH, aW, ff, aT, en, ad); #c1(RPN2) c2(XP_006723915) c3(dolichyl-diphosphooligosaccharide-protein glycosyltransferase subunit 2 isoform X5) c4(295449, 295450, 295451, 295452) c5(295453, 295454, 295455, 295456, 295457, 295458, 295459, 295460, 295461, 295462, 295463, 295464, 295465, 295466, 295467, 295468, 295469, 295470, 295471, 295472, 295473, 295474, 295475, 295476, 295477, 295478, 295479, 295480, 295481, 295482) c6( ) c7(bL, T, dH, aW, ff, aT, en, ad); #c1(RPP14) c2(NP_001092253) c3(ribonuclease P protein subunit p14) c4(39443) c5(39444, 39445, 39446, 39447, 39448, 39449, 39450, 39451, 39452, 39453, 39454, 39455, 39456, 39457, 39458) c6( ) c7(sc, jf, T, ft, aEj, aW, Y, jh, aT, cj, r, dL, aF, ci, K, q, EY, g, fr, B, ad); #c1(RPP21) c2(NP_001186049) c3(ribonuclease P protein subunit p21 isoform 1) c4(76935, 76936, 76937) c5(76938, 76939, 76940, 76941, 76942, 76943, 76944, 76945, 76946, 76947, 76948, 76949, 76950, 76951, 76952, 76953, 76954, 76955, 76956, 76957, 76958, 76959, 76960, 76961, 76962, 76963, 76964, 76965, 76966, 76967, 76968) c6( ) c7(eZ); #c1(RPP21) c2(NP_001186050) c3(ribonuclease P protein subunit p21 isoform 3) c4(76969, 76970) c5(76971, 76972, 76973, 76974, 76975, 76976, 76977, 76978, 76979, 76980, 76981, 76982, 76983, 76984, 76985, 76986, 76987, 76988, 76989, 76990, 76991, 76992, 76993, 76994, 76995, 76996, 76997, 76998, 76999) c6( ) c7(eZ); #c1(RPP21) c2(NP_079115) c3(ribonuclease P protein subunit p21 isoform 2) c4(217103, 217104, 217105) c5(217106, 217107, 217108, 217109, 217110, 217111, 217112, 217113, 217114, 217115, 217116, 217117, 217118, 217119, 217120, 217121, 217122, 217123, 217124, 217125, 217126, 217127, 217128, 217129, 217130, 217131, 217132, 217133, 217134, 217135, 217136, 217137, 217138, 217139, 217140, 217141, 217142, 217143, 217144, 217145, 217146, 217147, 217148, 217149, 217150, 217151, 217152, 217153, 217154, 217155, 217156, 217157, 217158, 217159, 217160, 217161, 217162, 217163, 217164, 217165, 217166, 217167) c6( ) c7(eZ); #c1(RPP25) c2(NP_060263) c3(ribonuclease P protein subunit p25) c4(195116) c5(195117, 195118, 195119, 195120, 195121, 195122, 195123, 195124, 195125, 195126) c6( ) c7(hb, bN); #c1(RPP38) c2(NP_001252530) c3(ribonuclease P protein subunit p38) c4(94174, 94175, 94176) c5(94177, 94178, 94179, 94180, 94181, 94182, 94183, 94184, 94185, 94186, 94187, 94188, 94189, 94190, 94191, 94192, 94193, 94194, 94195, 94196, 94197, 94198, 94199, 94200, 94201, 94202) c6( ) c7(Y); #c1(RPP40) c2(NP_006629) c3(ribonuclease P protein subunit p40 isoform a) c4(166723, 166724) c5(166725, 166726, 166727, 166728, 166729, 166730, 166731, 166732, 166733, 166734, 166735, 166736) c6( ) c7(aw); #c1(RPP40) c2(XP_011512555) c3(ribonuclease P protein subunit p40 isoform X1) c4( ) c5(303428) c6( ) c7(aw); #c1(RPRD1A) c2(NP_001290340) c3(regulation of nuclear pre-mRNA domain-containing protein 1A isoform 2) c4(115206) c5(115207, 115208, 115209, 115210, 115211, 115212) c6( ) c7(ey); #c1(RPRD1A) c2(NP_001290342) c3(regulation of nuclear pre-mRNA domain-containing protein 1A isoform 3) c4(115213) c5(115214, 115215, 115216, 115217, 115218, 115219) c6( ) c7(ey); #c1(RPRD1A) c2(NP_060640) c3(regulation of nuclear pre-mRNA domain-containing protein 1A isoform 1) c4(196941) c5(196942, 196943, 196944, 196945, 196946, 196947, 196948, 196949, 196950, 196951) c6( ) c7(ey); #c1(RPRD1B) c2(NP_067038) c3(regulation of nuclear pre-mRNA domain-containing protein 1B) c4(208566) c5(208567, 208568, 208569, 208570, 208571, 208572) c6( ) c7(bK); #c1(RPRD2) c2(NP_001284602) c3(regulation of nuclear pre-mRNA domain-containing protein 2 isoform 2) c4(112145) c5(112146, 112147, 112148, 112149, 112150, 112151) c6( ) c7(cm); #c1(RPRD2) c2(NP_001284603) c3(regulation of nuclear pre-mRNA domain-containing protein 2 isoform 3) c4(112152) c5(112153, 112154, 112155, 112156, 112157, 112158) c6( ) c7(cm); #c1(RPRM) c2(NP_062819) c3(protein reprimo) c4(202146) c5(202147, 202148, 202149, 202150, 202151, 202152) c6( ) c7(ht, aKb, aA, EQ, r); #c1(RPS10) c2(NP_001191020) c3(40S ribosomal protein S10) c4(80549) c5(80550, 80551, 80552, 80553, 80554, 80555) c6( ) c7(cAn, CJ, B, vi); #c1(RPS14) c2(NP_001020242) c3(40S ribosomal protein S14) c4(28333) c5(28334, 28335, 28336, 28337, 28338, 28339, 28340, 28341, 28342, 28343, 28344, 28345, 28346, 28347, 28348, 28349, 28350, 28351) c6( ) c7(Gq, zQ, CJ, Js, aW, oW, aT, kD, Xg, bw, v, oX, ci, br, zP, Jo); #c1(RPS15A) c2(NP_001025180) c3(40S ribosomal protein S15a) c4(29452, 29453) c5(29454, 29455, 29456, 29457, 29458, 29459, 29460, 29461, 29462, 29463) c6( ) c7(B, vi); #c1(RPS16) c2(XP_005259194) c3(40S ribosomal protein S16 isoform X1) c4(275974) c5(275975, 275976, 275977, 275978, 275979, 275980) c6( ) c7(aC, CJ); #c1(RPS18) c2(NP_072045) c3(40S ribosomal protein S18) c4(212450, 212451, 212452) c5(212453, 212454, 212455, 212456, 212457, 212458, 212459, 212460, 212461, 212462, 212463, 212464, 212465, 212466, 212467, 212468, 212469, 212470, 212471, 212472, 212473, 212474, 212475, 212476, 212477, 212478, 212479, 212480, 212481, 212482, 212483, 212484, 212485, 212486, 212487, 212488, 212489, 212490, 212491, 212492, 212493, 212494, 212495, 212496) c6( ) c7(bB, bE, eZ); #c1(RPS19BP1) c2(NP_919307) c3(active regulator of SIRT1) c4(258532) c5(258533, 258534, 258535, 258536, 258537, 258538) c6( ) c7(T, arh); #c1(RPS2) c2(NP_002943) c3(40S ribosomal protein S2) c4(133797, 133798, 133799, 133800) c5(133801, 133802, 133803, 133804, 133805, 133806, 133807, 133808, 133809, 133810, 133811, 133812, 133813, 133814, 133815, 133816, 133817, 133818, 133819, 133820, 133821, 133822, 133823, 133824) c6( ) c7(T, dA, MD, aeB, vJ, ae, ad); #c1(RPS20) c2(NP_001139699) c3(40S ribosomal protein S20 isoform 1) c4(59760, 59761) c5(59762, 59763, 59764, 59765, 59766, 59767) c6( ) c7(bB, bE, jf, q, bh); #c1(RPS24) c2(NP_001135754) c3(40S ribosomal protein S24 isoform b) c4( ) c5(53087, 53088, 53089, 53090, 53091, 53092) c6( ) c7(aov, CJ, Gp, aw, EQ, cAo, qm); #c1(RPS24) c2(NP_001135755) c3(40S ribosomal protein S24 isoform e) c4( ) c5(53093, 53094, 53095, 53096, 53097, 53098) c6( ) c7(aov, CJ, Gp, aw, EQ, cAo, qm); #c1(RPS24) c2(NP_001135757) c3(40S ribosomal protein S24 isoform d) c4(53099, 53100, 53101, 53102) c5(53103, 53104, 53105, 53106, 53107, 53108) c6( ) c7(aov, CJ, Gp, aw, EQ, cAo, qm); #c1(RPS24) c2(NP_148982) c3(40S ribosomal protein S24 isoform a) c4( ) c5(226698, 226699, 226700, 226701, 226702, 226703) c6( ) c7(aov, CJ, Gp, aw, EQ, cAo, qm); #c1(RPS27) c2(NP_001021) c3(40S ribosomal protein S27) c4(29157, 29158) c5( ) c6( ) c7(T, aaH, aA, aLI, IE, hb, aT, bNj, af, d, B, aW, Y, dq, kp, aF, iK, kg, Lq, ati, wS, vi); #c1(RPS27A) c2(NP_001170884) c3(ubiquitin-40S ribosomal protein S27a precursor) c4(69568, 69569, 69570) c5(69571, 69572, 69573, 69574, 69575, 69576, 69577, 69578, 69579, 69580, 69581, 69582, 69583, 69584, 69585, 69586, 69587, 69588, 69589, 69590) c6( ) c7(rR, bE, aW, wu, jh, aT, dL, bK, K, wm, XM, eL, JO, ad); #c1(RPS27L) c2(NP_057004) c3(40S ribosomal protein S27-like) c4(188423, 188424, 188425, 188426, 188427, 188428) c5(188429, 188430, 188431, 188432, 188433, 188434, 188435, 188436, 188437, 188438, 188439, 188440, 188441, 188442, 188443, 188444, 188445, 188446, 188447, 188448, 188449, 188450, 188451) c6( ) c7(q, r); #c1(RPS29) c2(NP_001023) c3(40S ribosomal protein S29 isoform 1) c4(29159, 29160, 29161, 29162, 29163) c5(29164, 29165, 29166, 29167, 29168, 29169) c6( ) c7(av); #c1(RPS29) c2(NP_001025172) c3(40S ribosomal protein S29 isoform 2) c4(29391) c5(29392, 29393, 29394, 29395, 29396, 29397) c6( ) c7(av); #c1(RPS3) c2(NP_000996) c3(40S ribosomal protein S3 isoform 1) c4(18053) c5(18054, 18055, 18056, 18057, 18058, 18059, 18060, 18061, 18062, 18063, 18064, 18065, 18066, 18067) c6( ) c7(Y, ns, ff, caU, cy, en); #c1(RPS3) c2(NP_001247435) c3(40S ribosomal protein S3 isoform 2) c4(93616) c5(93617, 93618, 93619, 93620, 93621, 93622) c6( ) c7(Y, ns, ff, caU, cy, en); #c1(RPS3A) c2(NP_000997) c3(40S ribosomal protein S3a isoform 1) c4(18068, 18069, 18070, 18071, 18072) c5(18073, 18074, 18075, 18076, 18077, 18078, 18079, 18080, 18081, 18082, 18083, 18084, 18085, 18086, 18087, 18088, 18089, 18090, 18091, 18092, 18093, 18094, 18095, 18096, 18097, 18098, 18099, 18100, 18101, 18102, 18103, 18104, 18105, 18106) c6( ) c7(fK, av, B, K, af); #c1(RPS4X) c2(NP_000998) c3(40S ribosomal protein S4, X isoform X isoform) c4(18107, 18108) c5(18109, 18110, 18111, 18112, 18113, 18114, 18115, 18116, 18117, 18118, 18119, 18120) c6( ) c7(xS, T, aiV, aeB, aW, azq, vJ, r, aT, wR, y, q); #c1(RPS4Y1) c2(NP_000999) c3(40S ribosomal protein S4, Y isoform 1) c4(18121, 18122) c5(18123, 18124, 18125, 18126, 18127, 18128, 18129, 18130, 18131, 18132, 18133, 18134) c6( ) c7(vJ); #c1(RPS6KA2) c2(NP_001006933) c3(ribosomal protein S6 kinase alpha-2 isoform b) c4(22352) c5(22353, 22354, 22355, 22356, 22357, 22358) c6( ) c7(bv, T, aE, bE, aW, NS, Y, ff, NT, aT, bB, cd, Io, aj, ci, m, en, t, ae, X, ad); #c1(RPS6KA2) c2(NP_066958) c3(ribosomal protein S6 kinase alpha-2 isoform a) c4(207753, 207754) c5(207755, 207756, 207757, 207758, 207759, 207760, 207761, 207762) c6( ) c7(bv, T, aE, bE, aW, NS, Y, ff, NT, aT, bB, cd, Io, aj, ci, m, en, t, ae, X, ad); #c1(RPS6KA2) c2(XP_005267149) c3(ribosomal protein S6 kinase alpha-2 isoform X4) c4(280791, 280792) c5(280793, 280794, 280795, 280796, 280797, 280798, 280799, 280800, 280801, 280802, 280803, 280804) c6( ) c7(bv, T, aE, bE, aW, NS, Y, ff, NT, aT, bB, cd, Io, aj, ci, m, en, t, ae, X, ad); #c1(RPS6KA2) c2(XP_011534361) c3(ribosomal protein S6 kinase alpha-2 isoform X1) c4(330738) c5( ) c6( ) c7(bv, T, aE, bE, aW, NS, Y, ff, NT, aT, bB, cd, Io, aj, ci, m, en, t, ae, X, ad); #c1(RPS6KA2) c2(XP_011534363) c3(ribosomal protein S6 kinase alpha-2 isoform X5) c4( ) c5(330739, 330740, 330741, 330742, 330743, 330744, 330745, 330746, 330747, 330748, 330749, 330750, 330751, 330752) c6( ) c7(bv, T, aE, bE, aW, NS, Y, ff, NT, aT, bB, cd, Io, aj, ci, m, en, t, ae, X, ad); #c1(RPS6KA3) c2(NP_004577) c3(ribosomal protein S6 kinase alpha-3) c4(147850, 147851) c5(147852, 147853, 147854, 147855, 147856, 147857, 147858) c6( ) c7(bL, aoU, T, fd, bB, hy, v, ci, nA, ad, yt, cAp, nd, kH, aT, h, dz, K, cx, nJ, ae, alK, B, BN, et, aW, Y, ff, eH, nf, gl, Io, aVW, en, eF, t, cm, fq, iK, ck, kP, iT, SE, bE, m, bC, fh, ne); #c1(RPS6KA3) c2(XP_005274630) c3(ribosomal protein S6 kinase alpha-3 isoform X3) c4(285252) c5(285253, 285254) c6( ) c7(bL, aoU, T, fd, bB, hy, v, ci, nA, ad, yt, cAp, nd, kH, aT, h, dz, K, cx, nJ, ae, alK, B, BN, et, aW, Y, ff, eH, nf, gl, Io, aVW, en, eF, t, cm, fq, iK, ck, kP, iT, SE, bE, m, bC, fh, ne); #c1(RPS6KA3) c2(XP_005274634) c3(ribosomal protein S6 kinase alpha-3 isoform X8) c4(285255, 285256) c5(285257, 285258, 285259, 285260, 285261, 285262, 285263, 285264, 285265, 285266, 285267, 285268) c6( ) c7(bL, aoU, T, fd, bB, hy, v, ci, nA, ad, yt, cAp, nd, kH, aT, h, dz, K, cx, nJ, ae, alK, B, BN, et, aW, Y, ff, eH, nf, gl, Io, aVW, en, eF, t, cm, fq, iK, ck, kP, iT, SE, bE, m, bC, fh, ne); #c1(RPS6KA3) c2(XP_006724570) c3(ribosomal protein S6 kinase alpha-3 isoform X7) c4( ) c5(296077, 296078, 296079, 296080, 296081, 296082, 296083, 296084, 296085, 296086) c6( ) c7(bL, aoU, T, fd, bB, hy, v, ci, nA, ad, yt, cAp, nd, kH, aT, h, dz, K, cx, nJ, ae, alK, B, BN, et, aW, Y, ff, eH, nf, gl, Io, aVW, en, eF, t, cm, fq, iK, ck, kP, iT, SE, bE, m, bC, fh, ne); #c1(RPS6KA3) c2(XP_011543865) c3(ribosomal protein S6 kinase alpha-3 isoform X6) c4(342994) c5(342995, 342996, 342997, 342998, 342999) c6( ) c7(bL, aoU, T, fd, bB, hy, v, ci, nA, ad, yt, cAp, nd, kH, aT, h, dz, K, cx, nJ, ae, alK, B, BN, et, aW, Y, ff, eH, nf, gl, Io, aVW, en, eF, t, cm, fq, iK, ck, kP, iT, SE, bE, m, bC, fh, ne); #c1(RPS6KA4) c2(NP_001006945) c3(ribosomal protein S6 kinase alpha-4 isoform b) c4(22372, 22373) c5(22374, 22375, 22376, 22377, 22378, 22379) c6( ) c7(y, AW, bc); #c1(RPS6KA4) c2(NP_001287731) c3(ribosomal protein S6 kinase alpha-4 isoform c) c4(112690) c5(112691, 112692, 112693, 112694, 112695, 112696, 112697, 112698, 112699, 112700, 112701, 112702) c6( ) c7(y, AW, bc); #c1(RPS6KA4) c2(NP_003933) c3(ribosomal protein S6 kinase alpha-4 isoform a) c4(142289) c5(142290, 142291, 142292, 142293, 142294, 142295) c6( ) c7(y, AW, bc); #c1(RPS6KA5) c2(NP_004746) c3(ribosomal protein S6 kinase alpha-5 isoform a) c4(149225, 149226) c5(149227, 149228, 149229, 149230, 148231, 149232, 149233, 149234, 149235, 149236, 149237, 149238) c6( ) c7(bE, aW, ff, cr, aT, cu, dL, ci, K, en, y); #c1(RPS6KA5) c2(NP_872198) c3(ribosomal protein S6 kinase alpha-5 isoform b) c4(255976) c5(255977, 255978, 255979, 255980, 255981, 255982) c6( ) c7(bE, aW, ff, cr, aT, cu, dL, ci, K, en, y); #c1(RPS6KA6) c2(NP_055311) c3(ribosomal protein S6 kinase alpha-6) c4(180395) c5(180396, 180397, 180398, 180399, 180400, 180401) c6( ) c7(iQ, s, iA, bE, Y, nd, hL, aT, nf, h, fr, ci, K, fu, cl); #c1(RPS6KA6) c2(XP_011529220) c3(ribosomal protein S6 kinase alpha-6 isoform X1) c4(324672) c5(324673, 324674, 324675, 324676, 324677, 324678) c6( ) c7(iQ, s, iA, bE, Y, nd, hL, aT, nf, h, fr, ci, K, fu, cl); #c1(RPS6KB1) c2(NP_001258971) c3(ribosomal protein S6 kinase beta-1 isoform b) c4(96848) c5(96849, 96850, 96851, 96852, 96853, 96854) c6( ) c7(bL, T, hi, id, pf, aw, ht, cz, bB, n, hy, v, ci, V, eA, ad, ip, av, aE, NS, aT, iv, jy, dL, bl, K, qM, hu, ae, af, bc, eL, d, bux, BN, B, iU, aW, aq, yq, Ku, t, rY, kP, eM, bP, bE, X, mx, mg, mf, m, ne); #c1(RPS6KB1) c2(NP_001258972) c3(ribosomal protein S6 kinase beta-1 isoform c) c4(96855) c5(96856, 96857, 96858, 96859, 96860, 96861) c6( ) c7(bL, T, hl, id, pf, aw, ht, cz, bB, n, hy, v, ci, V, eA, ad, ip, av, aE, NS, aT, iv, jy, dL, bl, K, qM, hu, ae, af, bc, eL, d, bux, BN, B, iU, aW, aq, yq, Ku, t, rY, kP, eM, bP, bE, X, mx, mg, mf, m, ne); #c1(RPS6KB1) c2(NP_001258973) c3(ribosomal protein S6 kinase beta-1 isoform d) c4( ) c5(96862, 96863, 96864, 96865, 96866) c6( ) c7(bL, T, hl, id, pf, aw, ht, cz, bB, n, hy, v, ci, V, eA, ad, ip, av, aE, NS, aT, iv, jy, dL, bl, K, qM, hu, ae, af, bc, eL, d, bux, BN, B, iU, aW, aq, yq, Ku, t, rY, kP, eM, bP, bE, X, mx, mg, mf, m, ne); #c1(RPS6KB1) c2(NP_001258989) c3(ribosomal protein S6 kinase beta-1 isoform e) c4(96900) c5( ) c6( ) c7(bL, T, hl, id, pf, aw, ht, cz, bB, n, hy, v, ci, V, eA, ad, ip, av, aE, NS, aT, iv, jy, dL, bl, K, qM, hu, ae, af, bc, eL, d, bux, BN, B, iU, aW, aq, yq, Ku, t, rY, kP, eM, bP, bE, X, mx, mg, mf, m, ne); #c1(RPS6KB1) c2(NP_003152) c3(ribosomal protein S6 kinase beta-1 isoform a) c4(135730) c5(135731, 135732, 135733, 135734, 135735, 135736, 135737) c6( ) c7(bL, T, hl, id, pf, aw, ht, cz, bB, n, hy, v, ci, V, eA, ad, ip, av, aE, NS, aT, iv, jy, dL, bl, K, qM, hu, ae, af, bc, eL, d, bux, BN, B, iU, aW, aq, yq, Ku, t, rY, kP, eM, bP, bE, X, mx, mg, mf, m, ne); #c1(RPS6KB2) c2(NP_003943) c3(ribosomal protein S6 kinase beta-2) c4(142353, 142354) c5(142355, 142356, 142357, 142358, 142359, 142360, 142361, 142362, 142363, 142364, 142365, 142366, 142367, 142368, 142369) c6( ) c7(T, BN, eM, ne, aW, NS, aT, hy, np, X); #c1(RPS6KB2) c2(XP_005274221) c3(ribosomal protein S6 kinase beta-2 isoform X1) c4( ) c5(284995) c6( ) c7(T, BN, eM, ne, aW, NS, aT, hy, np, X); #c1(RPS9) c2(XP_006726028) c3(40S ribosomal protein S9 isoform X1) c4(297039, 297040, 297041) c5(297042, 297043, 297044, 297045, 297046, 297047, 297048, 297049, 297050, 297051, 297052, 297053, 297054, 297055, 297056, 297057, 297058, 297059, 297060, 297061, 297062, 297063, 297064, 297065, 297066, 297067, 297068, 297069, 297070, 297071, 297072, 297073, 297074, 297075, 297076, 297077, 297078) c6( ) c7(T, K); #c1(RPSA) c2(NP_002286) c3(40S ribosomal protein SA isoform 1) c4(127329, 127330, 127331) c5(127332, 127333, 127334, 127335, 127336, 127337, 127338, 127339, 127340, 127341, 127342, 127343, 127344, 127345, 127346, 127347, 127348, 127349, 127350, 127351, 127352) c6( ) c7(ID, bM, cZ, T, aw, jh, aA, bB, Hn, fd, ckj, j, ci, C, hF, V, q, BY, x, av, iu, ft, jz, aE, xc, yt, dV, kH, cU, aT, By, cy, h, K, dd, dQ, af, A, je, aW, cAq, Y, afS, cr, r, eZ, fe, aF, g, cI, eE, t, cm, bz, QA, ck, es, iM, eM, Jr, bE, iA, z, U, Zn, eo, k, m, afT, y, bt, X); #c1(RPT0R) c2(NP_001156506) c3(regulatory-associated protein of mTOR isoform 2) c4(61738, 61739) c5(61740, 61741, 61742, 61743, 61744, 61745, 61746, 61747, 61748, 61749, 61750, 61751) c6( ) c7(hl, zw, fR, oe, cr, fd, h, Io, kC, it); #c1(RPT0R) c2(NP_065812) c3(regulatory-associated protein of mTOR isoform 1) c4(205664) c5(205665, 205666, 205667, 205668, 205669, 205670) c6( ) c7(hl, zw, fR, oe, cr, fd, h, Io, kC, it); #c1(RQCD1) c2(NP_001258563) c3(cell differentiation protein RCD1 homolog isoform 1) c4(96132) c5(96133, 96134, 96135, 96136, 96137, 96138) c6( ) c7(aW, nw, bu, aT); #c1(RQCD1) c2(NP_001258564) c3(cell differentiation protein RCD1 homolog isoform 3) c4(96139) c5(96140, 96141, 96142, 96143, 96144, 96145) c6( ) c7(aW, nw, bu, aT); #c1(RQCD1) c2(NP_005435) c3(cell differentiation protein RCD1 homolog isoform 2) c4(156151) c5(156152, 156153, 156154, 156155, 156156, 156157, 156158, 156159, 156160, 156161) c6( ) c7(aW, nw, bu, aT); #c1(RRAD) c2(NP_001122322) c3(GTP-binding protein RAD) c4(46528) c5(46529, 46530, 46531, 46532, 46533, 46534, 46535, 46536, 46537, 46538) c6( ) c7(bL, T, bP, c, eM, aW, aT, gZ, cy, aj, np, K, m, g, hi, t, ae, J, ad); #c1(RRAGA) c2(NP_006561) c3(ras-related GTP-binding protein A) c4(166236) c5(166237, 166238, 166239, 166240, 166241, 166242) c6( ) c7(aPY, aiu, T, oy, aKC); #c1(RRAS) c2(NP_006261) c3(ras-related protein R-Ras precursor) c4(163358) c5(163359, 163360, 163361, 163362, 163363, 163364) c6( ) c7(T, eG, bP, Pg, U, aT, auT, alR, alQ, K, alP, ae, ad, dR); #c1(RRAS2) c2(NP_001096139) c3(ras-related protein R-Ras2 isoform b) c4(41136) c5(41137, 41138, 41139, 41140, 41141, 41142, 41143, 41144, 41145, 41146, 41147, 41148, 41149, 41150, 41151, 41152, 41153, 41154, 41155, 41156, 41157, 41158) c6( ) c7(amg, jp, hW, aW, yk, jh, aT, ci, m, an, t, fq, B); #c1(RRAS2) c2(NP_001170785) c3(ras-related protein R-Ras2 isoform c) c4(69526) c5(69527, 69528, 69529, 69530, 69531, 69532, 69533, 69534, 69535) c6( ) c7(amg, jp, hW, aW, yk, jh, aT, ci, m, an, t, fq, B); #c1(RRAS2) c2(NP_036382) c3(ras-related protein R-Ras2 isoform a) c4(173432, 173433, 173434) c5(173435, 173436, 173437, 173438, 173439, 173440, 173441, 173442, 173443, 173444, 173445, 173446, 173447, 173448, 173449) c6( ) c7(amg, jp, hW, aW, yk, jh, aT, ci, m, an, t, fq, B); #c1(RRBP1) c2(NP_001036041) c3(ribosome-binding protein 1) c4(33814, 33815, 33816, 33817) c5(33818, 33819, 33820, 33821, 33822, 33823, 33824, 33825, 33826, 33827, 33828, 33829, 33830, 33831, 33832, 33833, 33834, 33835, 33836, 33837, 33838, 33839, 33840, 33841, 33842, 33843, 33844, 33845, 33846, 33847, 33848, 33849) c6( ) c7(n, T, oy, jh, aKC); #c1(RREB1) c2(NP_001003700) c3(ras-responsive element-binding protein 1 isoform 3) c4(19982) c5(19983, 19984, 19985, 19986, 19987, 19988) c6( ) c7(T, dA, WT, ci, PJ, q, ad, eW, hX, hd, aE, nv, h, BZ, dL, K, an, ae, eL, avQ, ak, anR, d, Y, CT, Io, g, as, pb, ck, Qi, iO, vW, W, c, iT, eB, U, bC, bt, xg, B); #c1(RREB1) c2(NP_001161816) c3(ras-responsive element-binding protein 1 isoform 2) c4(66076, 66077, 66078) c5(66079, 66080, 66081, 66082, 66083, 66084, 66085, 66086, 66087, 66088, 66089, 66090) c6( ) c7(T, dA, WT, ci, PJ, q, ad, eW, hX, hd, aE, nv, h, BZ, dL, K, an, ae, eL, avQ, ak, anR, d, Y, CT, Io, g, as, pb, ck, Qi, iO, vW, W, c, iT, eB, U, bC, bt, xg, B); #c1(RREB1) c2(XP_006715221) c3(ras-responsive element-binding protein 1 isoform X1) c4(288840, 288841, 288842) c5(288843, 288844, 288845, 288846, 288847, 288848) c6( ) c7(T, dA, WT, ci, PJ, g, ad, eW, hX, hd, aE, nv, h, BZ, dL, K, an, ae, eL, avQ, ak, anR, d, Y, CT, Io, g, as, pb, ck, Qi, iO, vW, W, c, iT, eB, U, bC, bt, xg, B); #c1(RREB1) c2(XP_011513097) c3(ras-responsive element-binding protein 1 isoform X3) c4( ) c5(304802, 304803, 304804, 304805, 304806, 304807, 304808, 304809, 304810, 304811, 304812, 304813, 304814, 304815, 304816, 304817, 304818, 304819, 304820, 304821, 304822, 304823, 304824, 304825) c6( ) c7(T, dA, WT, ci, PJ, q, ad, eW, hX, hd, aE, nv, h, BZ, dL, K, an, ae, eL, avQ, ak, anR, d, Y, CT, Io, g, as, pb, ck, Qi, iO, vW, W, c, iT, eB, U, bC, bt, xg, B); #c1(RRH) c2(NP_006574) c3(visual pigment-like receptor peropsin) c4(166329) c5(166330, 166331, 166332, 166333, 166334, 166335) c6( ) c7(nC, nw); #c1(RRM1) c2(NP_001024) c3(ribonucleoside-diphosphate reductase large subunit) c4(29170, 29171, 29172) c5(29173, 29174, 29175, 29176, 29177, 29178, 29179) c6( ) c7(gV, T, aC, eR, jp, atC, aA, bB, n, hy, ci, bX, Iu, q, er, av, aE, aT, iv, B, BN, hG, aW, ff, aIR, apK, r, nY, iw, Io, aF, en, g, t, bz, iO, Qy, eM, bE, PV, at, bt, ne, hS); #c1(RRM2) c2(NP_001025) c3(ribonucleoside-diphosphate reductase subunit M2 isoform 2) c4(29625) c5( ) c6( ) c7(T, id, if, aA, n, hy, Vd, qN, Iu, q, ad, eJ, iu, aE, WY, aT, dL, ey, ae, eL, kl, qt, aW, Y, r, aaE, kp, aF, g, mo, t, iK, bw, c, eM, gX, U, hL, m, EY, hE, bt, B); #c1(RRM2) c2(NP_001159403) c3(ribonucleoside-diphosphate reductase subunit M2 isoform 1) c4(63963) c5(63964, 63965, 63966, 63967, 63968, 63969) c6( ) c7(T, id, if, aA, n, hy, Vd, qN, lu, q, ad, eJ, iu, aE, WY, aT, dL, ey, ae, eL, kl, qt, aW, Y, r, aaE, kp, aF, g, mo, t, iK, bw, c, eM, gX, U, hL, m, EY, hE, bt, B); #c1(RRM2B) c2(NP_001165948) c3(ribonucleoside-diphosphate reductase subunit M2 B isoform 2) c4(68030, 68031) c5(68032) c6( ) c7(T, cAr, bB, hy, ci, aoz, q, ad, cAs, hb, aT, K, awL, cAt, ae, BN, aW, Y, ev, ff, r, GA, aF, en, g, iV, kC, akQ, SE, bE, it, ne); #c1(RRM2B) c2(NP_001165949) c3(ribonucleoside-diphosphate reductase subunit M2 B isoform 3) c4(68033) c5(68034, 68035, 68036, 68037, 68038, 68039, 68040, 68041, 68042, 68043, 68044, 68045, 68046, 68047, 68048, 68049, 68050, 68051, 68052) c6( ) c7(T, cAr, bB, hy, ci, aoz, q, ad, cAs, hb, aT, K, awL, cAt, ae, BN, aW, Y, ev, ff, r, GA, aF, en, g, iV, kC, akQ, SE, bE, it, ne); #c1(RRM2B) c2(NP_056528) c3(ribonucleoside-diphosphate reductase subunit M2 B isoform 1) c4(187938, 187939, 187940) c5(187941, 187942, 187943, 187944, 187945, 187946, 187947, 187948, 187949, 187950, 187951, 187952, 187953, 187954, 187955, 187956) c6( ) c7(T, cAr, bB, hy, ci, aoz, q, ad, cAs, hb, aT, K, awL, cAt, ae, BN, aW, Y, ev, ff, r, GA, aF, en, g, iV, kC, akQ, SE, bE, it, ne); #c1(RRN3) c2(NP_001287993) c3(RNA polymerase I-specific transcription initiation factor RRN3 isoform 2) c4(113311) c5(113312, 113313, 113314, 113315, 113316, 113317, 113318, 113319, 113320, 113321, 113322, 113323, 113324, 113325, 113326, 113327, 113328) c6( ) c7(Da); #c1(RRN3) c2(NP_060897) c3(RNA polymerase I-specific transcription initiation factor RRN3 isoform 1) c4(198460, 198461, 198462, 198463, 198464, 198465) c5(198466, 198467, 198468, 198469, 198470, 198471, 198472, 198473, 198474, 198475, 198476, 198477, 198478, 198479, 198480, 198481, 198482, 198483, 198484, 198485, 198486, 198487, 198488, 198489, 198490) c6( ) c7(Da); #c1(RRNAD1) c2(NP_001136032) c3(protein RRNAD1 isoform 2) c4(54090) c5(54091, 54092, 54093, 54094, 54095, 54096) c6( ) c7(af); #c1(RRNAD1) c2(NP_057081) c3(protein RRNAD1 isoform 1) c4(188855) c5(188856, 188857, 188858, 188859, 188860, 188861) c6( ) c7(af); #c1(RRP1) c2(NP_003674) c3(ribosomal RNA processing protein 1 homolog A) c4(140102, 140103) c5(140104, 140105, 140106, 140107, 140108, 140109, 140110, 140111, 140112, 140113, 140114, 140115) c6( ) c7(T, af); #c1(RRP1B) c2(NP_055871) c3(ribosomal RNA processing protein 1 homolog B) c4(184047) c5(184048, 184049, 184050, 184051, 184052, 184053) c6( ) c7(aW, T, aT); #c1(RRP9) c2(NP_004695) c3(U3 small nucleolar RNA-interacting protein 2) c4(148870) c5(148871, 148872, 148873, 148874, 148875, 148876) c6( ) c7(aA); #c1(RRS1) c2(NP_055984) c3(ribosome biogenesis regulatory protein homolog) c4(184884) c5(184885, 184886, 184887, 184888, 184889, 184890) c6( ) c7(T, yi, aW, aT, v, DG, ae, ad); #c1(RS1) c2(NP_000321) c3(retinoschisin precursor) c4(7028) c5(7029, 7030, 7031, 7032, 7033, 7034, 7035, 7036, 7037, 7038, 7039, 7040, 7041, 7042, 7043, 7044, 7045, 7046, 7047, 7048, 7049, 7050, 7051, 7052, 7053, 7054, 7055, 7056, 7057, 7058, 7059, 7060, 7061, 7062, 7063, 7064, 7065, 7066, 7067, 7068, 7069, 7070, 7071, 7072, 7073, 7074, 7075, 7076, 7077, 7078, 7079, 7080, 7081, 7082, 7083, 7084, 7085, 7086, 7087, 7088, 7089, 7090, 7091, 7092, 7093, 7094, 7095, 7096, 7097, 7098, 7099, 7100, 7101, 7102, 7103, 7104, 7105, 7106, 7107, 7108, 7109, 7110, 7111, 7112, 7113, 7114, 7115, 7116, 7117, 7118, 7119, 7120) c6( ) c7(W, nb, IR, afA, vy, cAu, nw, bgv); #c1(RSAD2) c2(XP_011508716) c3(radical S-adenosyl methionine domain-containing protein 2 isoform X1) c4(299326, 299327) c5(299328, 299329, 299330, 299331, 299332, 299333) c6( ) c7(dD, ds, Uq, aiM, j, eq, t, ai); #c1(RSAD2) c2(XP_011508717) c3(radical S-adenosyl methionine domain-containing protein 2 isoform X2) c4( ) c5(299334, 299335, 299336, 299337, 299338, 299339) c6( ) c7(dD, ds, Uq, aiM, j, eq, t, ai); #c1(RSF1) c2(NP_057662) c3(remodeling and spacing factor 1) c4(192178, 192179, 192180, 192181, 192182, 192183) c5(192184, 192185, 192186, 192187, 192188, 192189, 192190, 192191, 192192, 192193, 192194, 192195, 192196, 192197, 192198, 192199, 192200, 192201, 192202, 192203, 192204, 192205, 192206, 192207) c6( ) c7(XX, T, auY, id, bE, aW, ff, aT, bB, n, agF, ci, m, en, t, bz, B, hX); #c1(RSF1) c2(XP_005274108) c3(remodeling and spacing factor 1 isoform X1) c4( ) c5(284934, 284935, 284936, 284937, 284938, 284939, 284940, 284941, 284942, 284943, 284944, 284945) c6( ) c7(XX, T, auY, id, bE, aW, ff, aT, bB, n, agF, ci, m, en, t, bz, B, hX); #c1(RSL1D1) c2(NP_056474) c3(ribosomal L1 domain-containing protein 1) c4(187669, 187670, 187671) c5(187672, 187673, 187674, 187675, 187676, 187677, 187678, 187679, 187680, 187681, 187682, 187683, 187684, 187685, 187686, 187687, 187688, 187689, 187690, 187691, 187692, 187693) c6( ) c7(cAm); #c1(RSL24D1) c2(NP_057388) c3(probable ribosome biogenesis protein RLP24) c4(190513) c5(190514, 190515, 190516, 190517, 190518, 190519) c6( ) c7(oe); #c1(RSPH1) c2(NP_543136) c3(radial spoke head 1 homolog isoform 1) c4(233348) c5(233349, 233350, 233351, 233352, 233353, 233354) c6( ) c7(Pf, cAv, aw, MG, aMp); #c1(RSPH4A) c2(NP_001010892) c3(radial spoke head protein 4 homolog A isoform 1) c4(23982, 23983) c5(23984, 23985, 23986, 23987, 23988, 23989, 23990, 23991, 23992, 23993, 23994, 23995) c6( ) c7(cAw, hb, Pf, MG); #c1(RSPH4A) c2(NP_001155136) c3(radial spoke head protein 4 homolog A isoform 2) c4(61471, 61472) c5(61473, 61474, 61475, 61476, 61477, 61478, 61479, 61480, 61481, 61482, 61483, 61484) c6( ) c7(cAw, hb, Pf, MG); #c1(RSPH9) c2(NP_001180270) c3(radial spoke head protein 9 homolog isoform 2) c4(73661) c5(73662, 73663, 73664, 73665, 73666, 73667) c6( ) c7(cAx, BV, Pf, MG); #c1(RSPH9) c2(NP_689945) c3(radial spoke head protein 9 homolog isoform 1) c4(244442) c5(244443, 244444, 244445, 244446, 244447, 244448) c6( ) c7(cAx, BV, Pf, MG); #c1(RSPH9) c2(XP_011512658) c3(radial spoke head protein 9 homolog isoform X2) c4(303635, 303636) c5(303637, 303638, 303639, 303640, 303641, 303642, 303643, 303644, 303645, 303646, 303647, 303648) c6( ) c7(cAx, BV, Pf, MG); #c1(RSP02) c2(NP_001269792) c3(R-spondin-2 isoform 2 precursor) c4(102826) c5(102827, 102828, 102829, 102830, 102831, 102832, 102833, 102834, 102835, 102836) c6( ) c7(y, hP, X, aT); #c1(RSP02) c2(NP_848660) c3(R-spondin-2 isoform 1 precursor) c4(254125, 254126, 254127) c5(254128, 254129, 254130, 254131, 254132, 254133, 254134, 254135, 254136, 254137, 254138, 254139, 254140, 254141, 254142, 254143, 254144, 254145, 254146) c6( ) c7(y, hP, X, aT); #c1(RSP02) c2(XP_011515320) c3(R-spondin-2 isoform X1) c4(308189, 308190, 308191) c5(308192, 308193) c6( ) c7(y, hP, X, aT); #c1(RSP03) c2(NP_116173) c3(R-spondin-3 precursor) c4(225564, 225565) c5(225566, 225567, 225568, 225569, 225570, 225571, 225572, 225573, 225574, 225575, 225576, 225577, 225578, 225579, 225580, 225581) c6(225582, 225583, 225584, 225585) c7(aw, X, bA, aT); #c1(RSP04) c2(NP_001025042) c3(R-spondin-4 isoform 1 precursor) c4(29260) c5(29261, 29262, 29263, 29264, 29265, 29266) c6( ) c7(byn, cAy); #c1(RSP04) c2(NP_001035096) c3(R-spondin-4 isoform 2 precursor) c4(32503) c5(32504, 32505, 32506, 32507, 32508, 32509) c6( ) c7(byn, cAy); #c1(RSRC1) c2(NP_001258763) c3(serine/Arginine-related protein 53 isoform 2) c4(96511) c5(96512, 96513, 96514, 96515, 96516, 96517, 96518, 96519, 96520, 96521) c6( ) c7(cm, v); #c1(RSRC1) c2(NP_057709) c3(serine/Arginine-related protein 53 isoform 1) c4(192462, 192463, 192464) c5(192465, 192466, 192467, 192468, 192469, 192470, 192471, 192472, 192473, 192474, 192475, 192476, 192477, 192478, 192479, 192480, 192481, 192482, 192483, 192484, 192485, 192486) c6( ) c7(cm, v); #c1(RSRC1) c2(XP_011511178) c3(serine/Arginine-related protein 53 isoform X2) c4( ) c5(301653, 301654, 301655, 301656, 301657) c6( ) c7(cm, v); #c1(RSRC2) c2(NP_075388) c3(arginine/serine-rich coiled-coil protein 2) c4(213843) c5( ) c6( ) c7(T, it, ht, hu); #c1(RSRC2) c2(XP_005253659) c3(arginine/serine-rich coiled-coil protein 2 isoform X3) c4(272614) c5( ) c6( ) c7(T, it, ht, hu); #c1(RSRC2) c2(XP_011536990) c3(arginine/serine-rich coiled-coil protein 2 isoform X2) c4(334719) c5( ) c6( ) c7(T, it, ht, hu); #c1(RSRC2) c2(XP_011536991) c3(arginine/serine-rich coiled-coil protein 2 isoform X4) c4( ) c5(334720, 334721, 334722, 334723, 334724, 334725, 334726, 334727, 334728, 334729, 334730, 334731, 334732, 334733, 334734, 334735, 334736, 334737) c6( ) c7(T, it, ht, hu); #c1(RSRP1) c2(XP_011540100) c3(arginine/serine-rich protein 1 isoform X2) c4(338439) c5(338440, 338441, 338442, 338443, 338444, 338445, 338446, 338447, 338448, 338449, 338450, 338451, 338452) c6( ) c7(aw); #c1(RSU1) c2(NP_036557) c3(ras suppressor protein 1 isoform 1) c4(174372, 174373) c5(174374, 174375, 174376, 174377, 174378, 174379, 174380, 174381, 174382, 174383, 174384) c6( ) c7(bF, d, ac, aW, aT, NI, eA, bA); #c1(RSU1) c2(NP_689937) c3(ras suppressor protein 1 isoform 2) c4( ) c5(244396, 244397, 244398, 244399, 244400) c6( ) c7(bF, d, ac, aW, aT, NL eA, bA); #c1(RTCB) c2(NP_055121) c3(tRNA-splicing ligase RtcB homolog) c4(179073, 179074) c5(179075, 179076, 179077, 179078, 179079, 179080, 179081, 179082, 179083, 179084, 179085, 179086) c6( ) c7(bz); #c1(RTEL1) c2(NP_001269938) c3(regulator of telomere elongation helicase 1 isoform 3) c4(103271, 103272) c5(103273, 103274, 103275, 103276, 103277, 103278, 103279, 103280, 103281, 103282, 103283, 103284, 103285) c6( ) c7(Kd, T, bM, fM, iW, jx, eX, qy, fd, jh, ci, apt, hF, eA, aoH, x, aoQ, F, aT, h, eV, bde, pk, aJu, sb, asp, BN, d, iU, aW, Y, mQ, CT, hv, Io, aoY, La, as, ho, Ik, ck, ou, cT, rR, Zg, dB, rW, dc, km, cAz, cj, dW, oX, k, ij, zv, ht, jr); #c1(RTEL1) c2(NP_057518) c3(regulator of telomere elongation helicase 1 isoform 1) c4(191209) c5(191210, 191211, 191212, 191213, 191214, 191215) c6( ) c7(Kd, T, bM, fM, iW, jx, eX, qy, fd, jh, ci, apt, hF, eA, aoH, x, aoQ, F, aT, h, eV, bde, pk, aJu, sb, asp, BN, d, iU, aW, Y, mQ, CT, hv, Io, aoY, La, as, ho, Ik, ck, ou, cT, rR, Zg, dB, rW, dc, km, cAz, cj, dW, oX, k, ij, zv, ht, jr); #c1(RTEL1) c2(NP_116575) c3(regulator of telomere elongation helicase 1 isoform 2) c4(226287) c5(226288, 226289, 226290, 226291, 226292, 226293) c6( ) c7(Kd, T, bM, fM, iW, jx, eX, qy, fd, jh, ci, apt, hF, eA, aoH, x, aoQ, F, aT, h, eV, bde, pk, aJu, sb, asp, BN, d, iU, aW, Y, mQ, CT, hv, Io, aoY, La, as, ho, Ik, ck, ou, cT, rR, Zg, dB, rW, dc, km, cAz, cj, dW, oX, k, ij, zv, ht, jr); #c1(RTKN) c2(NP_001015055) c3(rhotekin isoform a) c4(26184, 26185) c5(26186, 26187, 26188, 26189, 26190, 26191, 26192) c6( ) c7(T, d, Jl, aW, aT, KO, ci, eL); #c1(RTKN) c2(NP_001015056) c3(rhotekin isoform c) c4( ) c5(26193, 26194, 26195, 26196, 26197) c6( ) c7(T, d, Jl, aW, aT, KO, ci, eL); #c1(RTKN) c2(NP_149035) c3(rhotekin isoform b) c4(226875) c5(226876, 226877, 226878, 226879, 226880, 226881) c6( ) c7(T, d, Jl, aW, aT, KO, ci, eL); #c1(RTKN2) c2(NP_001269870) c3(rhotekin-2 isoform 2) c4( ) c5(102990, 102991, 102992, 102993, 102994, 102995) c6( ) c7(y); #c1(RTKN2) c2(NP_660350) c3(rhotekin-2 isoform 1) c4(241047) c5(241048, 241049, 241050, 241051, 241052, 241053) c6( ) c7(y); #c1(RTKN2) c2(XP_006717758) c3(rhotekin-2 isoform X2) c4(291321) c5( ) c6( ) c7(y); #c1(RTKN2) c2(XP_011537761) c3(rhotekin-2 isoform X5) c4(335294, 335295) c5(335296, 335297, 335298, 335299, 335300, 335301, 335302, 335303, 335304, 335305, 335306, 335307) c6( ) c7(y); #c1(RTL1) c2(NP_001128360) c3(retrotransposon-like protein 1) c4(49963) c5(49964, 49965, 49966, 49967, 49968, 49969) c6( ) c7(bL, 1 dA, qj, ci, qN, bNX, ds, Xh, cp, aFS, eG, kj, asf, Y, HA, Io, hu, kk, cm, iP, bm, PC); #c1(RTN1) c2(NP_066959) c3(reticulon-1 isoform A) c4(207763, 207764, 207765) c5(207766, 207767, 207768, 207769, 207770, 207771, 207772, 207773, 207774, 207775, 207776, 207777, 207778, 207779, 207780, 207781, 207782, 207783) c6( ) c7(aV, af, aW, ds, tT, anV, aT, j, fb, q, aa); #c1(RTN1) c2(NP_996734) c3(reticulon-1 isoform C) c4(264367) c5(264368, 264369, 264370, 264371, 264372, 264373) c6( ) c7(aV, af, aW, ds, tT, anV, aT, j, fb, q, aa); #c1(RTN2) c2(NP_005610) c3(reticulon-2 isoform A) c4(157911, 157912) c5(157913, 157914, 157915, 157916, 157917, 157918, 157919) c6( ) c7(bkf, wc, U, Ni, cAA, aw); #c1(RTN2) c2(NP_996783) c3(reticulon-2 isoform B) c4(264527) c5(264528, 264529, 264530, 264531, 264532, 264533, 264534) c6( ) c7(bkf, wc, U, Ni, cAA, awi); #c1(RTN2) c2(NP_996784) c3(reticulon-2 isoform C) c4( ) c5(264535, 264536, 264537, 264538, 264539) c6( ) c7(bkf, wc, U, Ni, cAA, awi); #c1(RTN3) c2(NP_001252518) c3(reticulon-3 isoform e) c4(94059) c5(94060, 94061, 94062, 94063, 94064, 94065, 94066, 94067, 94068, 94069, 94070, 94071) c6( ) c7(iH, ds, Rr, oW, dV, gl, oi, eh, af); #c1(RTN3) c2(NP_001252520) c3(reticulon-3 isoform g) c4(94072) c5(94073, 94074, 94075, 94076, 94077, 94078, 94079, 94080, 94081, 94082, 94083, 94084) c6( ) c7(iH, ds, Rr, oW, dV, gl, oi, eh, af); #c1(RTN3) c2(NP_006045) c3(reticulon-3 isoform a) c4(161434, 161435) c5(161436, 161437, 161438, 161439, 161440, 161441, 161442, 161443, 161444, 161445, 161446, 161447) c6( ) c7(iH, ds, Rr, oW, dV, gl, oi, eh, af); #c1(RTN3) c2(NP_958831) c3(reticulon-3 isoform b) c4(262220) c5( ) c6( ) c7(iH, ds, Rr, oW, dV, gl, oi, eh, af); #c1(RTN3) c2(NP_958832) c3(reticulon-3 isoform c) c4(262221) c5( ) c6( ) c7(iH, ds, Rr, oW, dV, gl, oi, eh, af); #c1(RTN3) c2(NP_958833) c3(reticulon-3 isoform d) c4(262222) c5(262223, 262224, 262225, 262226, 262227, 262228) c6( ) c7(iH, ds, Rr, oW, dV, gl, oi, eh, af); #c1(RTN4) c2(NP_008939) c3(reticulon-4 isoform C) c4(169690) c5(169691, 169692, 169693, 169694, 169695, 169696) c6( ) c7(T, uG, jh, cz, il, Fc, V, q, eA, ft, ds, tT, anV, aT, bK, af, aa, je, bf, aW, ff, en, iM, c, mx, B); #c1(RTN4) c2(NP_065393) c3(reticulon-4 isoform A) c4(204701) c5(204702, 204703, 204704, 204705, 204706, 204707, 204708, 204709, 204710, 204711, 204712) c6( ) c7(T, uG, jh, cz, il, Fc, V, q, eA, ft, ds, tT, anV, aT, bK, af, aa, je, bf, aW, ff, en, iM, c, mx, B); #c1(RTN4) c2(NP_722550) c3(reticulon-4 isoform B) c4(246836, 246837) c5(246838, 246839, 246840, 246841, 246842, 246843, 246844, 246845, 246846, 246847, 246848, 246849) c6( ) c7(T, uG, jh, cz, il, Fc, V, q, eA, ft, ds, tT, anV, aT, bK, af, aa, je, bf, aW, ff, en, iM, c, mx, B); #c1(RTN4) c2(NP_997403) c3(reticulon-4 isoform D) c4(265529) c5(265530, 265531, 265532, 265533, 265534, 265535) c6( ) c7(T, uG, jh, cz, il, Fc, V, q, eA, ft, ds, tT, anV, aT, bK, af, aa, je, bf, aW, ff, en, iM, c, mx, B); #c1(RTN4) c2(XP_011531294) c3(reticulon-4 isoform X1) c4(327265, 327266, 327267) c5(327268, 327269, 327270, 327271, 327272, 327273, 327274, 327275, 327276, 327277, 327278, 327279, 327280, 327281, 327282, 327283, 327284, 327285, 327286, 327287, 327288, 327289, 327290, 327291, 327292) c6( ) c7(T, uG, jh, cz, il, Fc, V, q, eA, ft, ds, tT, anV, aT, bK, af, aa, je, bf, aW, ff, en, iM, c, mx, B); #c1(RTN4IP1) c2(NP_116119) c3(reticulon-4-interacting protein 1, mitochondrial precursor) c4(225407, 225408) c5(225409, 225410, 225411, 225412, 225413, 225414, 225415, 225416, 225417, 225418, 225419, 225420) c6( ) c7(T, hd, nM, nB); #c1(RTN4R) c2(NP_075380) c3(reticulon-4 receptor precursor) c4(213811) c5(213812, 213813, 213814, 213815, 213816, 213817, 213818, 213819) c6( ) c7(DA, cZ, Gt, T, af, agd, Y, RX, agb, gl, cm, eA, byQ, dd, he, V, q, cY); #c1(RTP3) c2(NP_113628) c3(receptor-transporting protein 3) c4(221810) c5(221811, 221812, 221813, 221814, 221815, 221816) c6( ) c7(aq, B, afl); #c1(RTP4) c2(NP_071430) c3(receptor-transporting protein 4) c4(211615) c5(211616, 211617, 211618, 211619, 211620, 211621) c6( ) c7(ds); #c1(RTTN) c2(NP_775901) c3(rotatin) c4(250626, 250627, 250628) c5(250629, 250630, 250631, 250632, 250633, 250634, 250635, 250636, 250637, 250638, 250639, 250640, 250641, 250642, 250643, 250644, 250645, 250646) c6( ) c7(cAB); #c1(RUFY1) c2(NP_001035542) c3(RUN and FYVE domain-containing protein 1 isoform b) c4(32901, 32902) c5( ) c6( ) c7(c); #c1(RUFY1) c2(NP_079434) c3(RUN and FYVE domain-containing protein 1 isoform a) c4(218120) c5(218121, 218122, 218123, 218124, 218125, 218126, 218127, 218128, 218129, 218130, 218131, 218132, 218133, 218134, 218135, 218136) c6( ) c7(c); #c1(RUFY1) c2(XP_006714985) c3(RUN and FYVE domain-containing protein 1 isoform X4) c4( ) c5(288378, 288379, 288380, 288381, 288382, 288383, 288384, 288385) c6( ) c7(c); #c1(RUFY1) c2(XP_011532960) c3(RUN and FYVE domain-containing protein 1 isoform X2) c4(329121) c5(329122, 329123, 329124, 329125, 329126) c6( ) c7(c); #c1(RUFY3) c2(NP_001032519) c3(protein RUFY3 isoform 1) c4(31351) c5(31352, 31353, 31354, 31355, 31356, 31357) c6( ) c7(Pk, e, IQ, an); #c1(RUFY3) c2(NP_001124181) c3(protein RUFY3 isoform 3) c4( ) c5(48435, 48436, 48437, 48438, 48439, 48440, 48441, 48442, 48443, 48444, 48445, 48446) c6( ) c7(Pk, e, IQ, an); #c1(RUFY3) c2(NP_001278923) c3(protein RUFY3 isoform 5) c4(111009) c5(111010, 111011, 111012, 111013, 111014, 111015) c6( ) c7(Pk, e, IQ, an); #c1(RUFY3) c2(NP_055776) c3(protein RUFY3 isoform 2) c4(183424) c5(183425, 183426, 183427, 183428, 183429, 183430, 183431) c6( ) c7(Pk, e, IQ, an); #c1(RUFY3) c2(XP_011530054) c3(protein RUFY3 isoform X4) c4(325880, 325881) c5( ) c6( ) c7(Pk, e, IQ, an); #c1(RUNDC3B) c2(NP_001127877) c3(RUN domain-containing protein 38 isoform b) c4(49418) c5(49419, 49420, 49421, 49422, 49423, 49424) c6( ) c7(aW, aT); #c1(RUNDC3B) c2(NP_001127878) c3(RUN domain-containing protein 38 isoform c) c4(49425) c5(49426, 49427, 49428, 49429, 49430, 49431) c6( ) c7(aW, aT); #c1(RUNDC3B) c2(NP_612147) c3(RUN domain-containing protein 38 isoform a) c4(236064) c5(236065, 236066, 236067, 236068, 236069, 236070) c6( ) c7(aW, aT); #c1(RUNDC3B) c2(XP_011514128) c3(RUN domain-containing protein 38 isoform X1) c4( ) c5(306736) c6( ) c7(aW, aT); #c1(RUNX1) c2(NP_001001890) c3(runt-related transcription factor 1 isoform AML1b) c4(19093) c5(19094, 19095, 19096, 19097, 19098, 19099, 19100, 19101, 19102, 19103, 19104) c6( ) c7(bM, T, os, aC, pf, alT, qx, al, fd, ci, x, oB, K, hH, a a, li, aW, ace, dg, as, Fu, bw, ou, iT, Iq, dW, k, m, xu, zX, ht, n, oY, nA, pM, br, b, Dr, Bj, hn, DU, pi, aBI, Gc, wC, A, pm, cM, yR, Ye, bnN, hk, kz, hL, hR, pg, fL, bD, it, bL, fZ, aA, afK, j, Wa, q, er, eA, anj, oT, yg, aT, dz, jj, ae, IE, iU, iZ, Y, r, gm, en, hf, cl, t, f, bQ, Ci, ck, ac, II, oX, bt, cAC, jh, bs, oZ, pz, hF, ad, dP, iC, fX, oW, iY, pq, iL, et, ff, cr, eZ, gE, aF, iV, age, Ew, II, i, y, kS); #c1(RUNX1) c2(NP_001116079) c3(runt-related transcription factor 1 isoform AML1a) c4(43397) c5(43398, 43399, 43400, 43401, 43402, 43403) c6( ) c7(bM, T, os, aC, pf, alT, qx, al, fd, ci, x, oB, K, hH, aa, li, aW, ace, dg, as, Fu, bw, ou, iT, Iq, dW, k, m, xu, zX, ht, n, oY, nA, pM, br, b, Dr, Bj, hn, DU, pi, aBI, Gc, wC, A, pm, cM, yR, Ye, bnN, hk, kz, hL, hR, pg, fL, bD, it, bL, fZ, aA, afK, j, Wa, q, er, eA, anj, oT, yg, aT, dz, jj, ae, IE, iU, iZ, Y, r, gm, en, hf, cl, t, f, bQ, Ci, ck, ac, II, oX, bt, cAC, jh, bs, oZ, pz, hF, ad, dP, iC, fX, oW, iY, pq, iL, et, ff, cr, eZ, gE, aF, iV, age, Ew, II, i, y, kS); #c1(RUNX1) c2(NP_001745) c3(runt-related transcription factor 1 isoform AML1c) c4(120692, 120693, 120694, 120695) c5(120696, 120697, 120698, 120699, 120700, 120701, 120702, 120703, 120704, 120705, 120706, 120707, 120708, 120709, 120710, 120711, 120712) c6( ) c7(bM, T, os, aC, pf, alT, qx, al, fd, ci, x, oB, K, hH, aa, li, aW, ace, dg, as, Fu, bw, ou, iT, Iq, dW, k, m, xu, zX, ht, n, oY, nA, pM, br, b, Dr, Bj, hn, DU, pi, aBI, Gc, wC, A, pm, cM, yR, Ye, bnN, hk, kz, hL, hR, pg, fL, bD, it, bL, fZ, aA, afK, j, Wa, q, er, eA, anj, oT, yg, aT, dz, jj, ae, IE, iU, iZ, Y, r, gm, en, hf, cl, t, f, bQ, Ci, ck, ac, II, oX, bt, cAC, jh, bs, oZ, pz, hF, ad, dP, iC, fX, oW, iY, pq, iL, et, ff, cr, eZ, gE, aF, iV, age, Ew, II, i, y, kS); #c1(RUNX1) c2(XP_005261125) c3(runt-related transcription factor 1 isoform X2) c4(277242) c5(277243, 277244, 277245, 277246, 277247, 277248) c6( ) c7(bM, T, os, aC, pf, alT, qx, al, fd, ci, x, oB, K, hH, aa, li, aW, ace, dg, as, Fu, bw, ou, iT, Iq, dW, k, m, xu, zX, ht, n, oY, nA, pM, br, b, Dr, Bj, hn, DU, pi, aBI, Gc, wC, A, pm, cM, yR, Ye, bnN, hk, kz, hL, hR, pg, fL, bD, it, bL, fZ, aA, afK, j, Wa, q, er, eA, anj, oT, yg, aT, dz, jj, ae, IE, iU, iZ, Y, r, gm, en, hf, cl, t, f, bQ, Ci, ck, ac, II, oX, bt, cAC, jh, bs, oZ, pz, hF, ad, dP, iC, fX, oW, iY, pq, iL, et, ff, cr, eZ, gE, aF, iV, age, Ew, II, i, y, kS); #c1(RUNX1) c2(XP_005261126) c3(runt-related transcription factor 1 isoform X4) c4(277249) c5( ) c6( ) c7(bM, T, os, aC, pf, alT, qx, al, fd, ci, x, oB, K, hH, aa, li, aW, ace, dg, as, Fu, bw, ou, iT, Iq, dW, k, m, xu, zX, ht, n, oY, nA, pM, br, b, Dr, Bj, hn, DU, pi, aBI, Gc, wC, A, pm, cM, yR, Ye, bnN, hk, kz, hL, hR, pg, fL, bD, it, bL, fZ, aA, afK, j, Wa, q, er, eA, anj, oT, yg, aT, dz, jj, ae, IE, iU, iZ, Y, r, gm, en, hf, cl, t, f, bQ, Ci, ck, ac, II, oX, bt, cAC, jh, bs, oZ, pz, hF, ad, dP, iC, fX, oW, iY, pq, iL, et, ff, cr, eZ, gE, aF, iV, age, Ew, II, i, y, kS); #c1(RUNX1) c2(XP_011528071) c3(runt-related transcription factor 1 isoform X6) c4( ) c5(323147) c6( ) c7(bM, T, os, aC, pf, alT, qx, al, fd, ci, x, oB, K, hH, aa, li, aW, ace, dg, as, Fu, bw, ou, iT, Iq, dW, k, m, xu, zX, ht, n, oY, nA, pM, br, b, Dr, Bj, hn, DU, pi, aBI, Gc, wC, A, pm, cM, yR, Ye, bnN, hk, kz, hL, hR, pg, fL, bD, it, bL, fZ, aA, afK, j, Wa, q, er, eA, anj, oT, yg, aT, dz, jj, ae, IE, iU, iZ, Y, r, gm, en, hf, cl, t, f, bQ, Ci, ck, ac, II, oX, bt, cAC, jh, bs, oZ, pz, hF, ad, dP, iC, fX, oW, iY, pq, iL, et, ff, cr, eZ, gE, aF, iV, age, Ew, II, i, y, kS); #c1(RUNX1) c2(XP_011528072) c3(runt-related transcription factor 1 isoform X7) c4( ) c5(323148, 323149, 323150, 323151, 323152, 323153, 323154, 323155, 323156, 323157, 323158, 323159) c6( ) c7(bM, T, os, aC, pf, alT, qx, al, fd, ci, x, oB, K, hH, aa, li, aW, ace, dg, as, Fu, bw, ou, iT, Iq, dW, k, m, xu, zX, ht, n, oY, nA, pM, br, b, Dr, Bj, hn, DU, pi, aBI, Gc, wC, A, pm, cM, yR, Ye, bnN, hk, kz, hL, hR, pg, fL, bD, it, bL, fZ, aA, afK, j, Wa, q, er, eA, anj, oT, yg, aT, dz, jj, ae, IE, iU, iZ, Y, r, gm, en, hf, cl, t, f, bQ, Ci, ck, ac, II, oX, bt, cAC, jh, bs, oZ, pz, hF, ad, dP, iC, fX, oW, iY, pq, iL, et, ff, cr, eZ, gE, aF, iV, age, Ew, II, i, y, kS); #c1(RUNX1T1) c2(NP_001185560) c3(protein CBFA2T1 isoform B) c4(75854, 75855, 75856, 75857, 75858, 75859, 75860, 75861, 75862, 75863, 75864, 75865, 75866, 75867, 75868, 75869) c5(75870, 75871, 75872, 75873, 75874, 75875, 75876, 75877, 75878, 75879, 75880, 75881, 75882, 75883, 75884, 75885, 75886, 75887, 75888, 75889, 75890, 75891, 75892, 75893, 75894, 75895, 75896, 75897, 75898, 75899, 75900, 75901, 75902, 75903, 75904, 75905, 75906, 75907, 75908, 75909, 75910, 75911, 75912, 75913, 75914, 75915, 75916, 75917, 75918, 75919, 75920, 75921, 75922, 75923, 75924, 75925, 75926, 75927, 75928, 75929, 75930, 75931, 75932, 75933, 75934, 75935, 75936, 75937, 75938, 75939, 75940, 75941, 75942, 75943, 75944, 75945, 75946, 75947, 75948, 75949, 75950, 75951, 75952, 75953) c6( ) c7(oO, T, fM, aw, bs, fd, n, hF, br, er, x, b, fX, ft, Do, sO, Bj, aT, h, dz, hn, iY, jj, pi, aBI, MG, iU, et, aW, Y, Io, PG, pm, f, bw, yR, ck, ou, ac, pc, iT, cj, k, rH, i, y, bt, kS, L); #c1(RUNX1T1) c2(NP_001185562) c3(protein CBFA2T1 isoform D) c4( ) c5(75954) c6( ) c7(oO, T, fM, aw, bs, fd, n, hF, br, er, x, b, fX, ft, Do, sO, Bj, aT, h, dz, hn, iY, jj, pi, aBI, MG, iU, et, aW, Y, Io, PG, pm, f, bw, yR, ck, ou, ac, pc, iT, cj, k, rH, i, y, bt, kS, L); #c1(RUNX1T1) c2(NP_001185563) c3(protein CBFA2T1 isoform E) c4(75955) c5(75956, 75957, 75958, 75959, 75960, 75961, 75962, 75963, 75964) c6( ) c7(oO, T, fM, aw, bs, fd, n, hF, br, er, x, b, fX, ft, Do, sO, Bj, aT, h, dz, hn, iY, jj, pi, aBI, MG, iU, et, aW, Y, Io, PG, pm, f, bw, yR, ck, ou, ac, pc, iT, cj, k, rH, i, y, bt, kS, L); #c1(RUNX1T1) c2(NP_001185608) c3(protein CBFA2T1 isoform F) c4( ) c5(75979, 75980, 75981, 75982, 75983, 75984, 75985, 75986, 75987, 75988, 75989) c6( ) c7(oO, T, fM, aw, bs, fd, n, hF, br, er, x, b, fX, ft, Do, sO, Bj, aT, h, dz, hn, iY, jj, pi, aBI, MG, iU, et, aW, Y, Io, PG, pm, f, bw, yR, ck, ou, ac, pc, iT, cj, k, rH, i, y, bt, kS, L); #c1(RUNX1T1) c2(NP_004340) c3(protein CBFA2T1 isoform A) c4(145480, 145481, 145482, 145483, 145484, 145485) c5(145486, 145487, 145488, 145489, 145490, 145491, 145492, 145493, 145494, 145495, 145496, 145497, 145498, 145499, 145500, 145501, 145502, 145503, 145504, 145505, 145506, 145507, 145508, 145509, 145510, 145511, 145512, 145513, 145514, 145515, 145516, 145517, 145518) c6( ) c7(oO, T, fM, aw, bs, fd, n, hF, br, er, x, b, fX, ft, Do, sO, Bj, aT, h, dz, hn, iY, jj, pi, aBI, MG, iI, et, aW, Y, Io, PG, pm, f, bw, yR, ck, ou, ac, pc, iT, cj, k, rH, i, y, bt, kS, L); #c1(RUNX1T1) c2(NP_783553) c3(protein CBFA2T1 isoform C) c4( ) c5(251678, 251679, 251680, 251681, 251682, 251683, 251684, 251685, 251686, 251687, 251688, 251689, 251690, 251691, 251692, 251693, 251694, 251695, 251696, 251697) c6( ) c7(oO, T, fM, aw, bs, fd, n, hF, br, er, x, b, fX, ft, Do, sO, Bj, aT, h, dz, hn, iY, jj, pi, aBI, MG, iU, et, aW, Y, Io, PG, pm, f, bw, yR, ck, ou, ac, pc, iT, cj, k, rH, i, y, bt, kS, L); #c1(RUNX2) c2(NP_001015051) c3(runt-related transcription factor 2 isoform b) c4(26157) c5(26158, 26159, 26160, 26161, 26162, 26163) c6( ) c7(gh, T, fd, cAG, x, Na, aE, arA, K, pr, aW, IW, Az, PQ, g, eF, bw, zV, cAE, eM, nB, iA, Ig, asR, m, zt, n, Kw, ai, adf, b, zw, ask, Wr, aq, kp, wU, bP, hR, art, B, vQ, bL, AS, bDS, aA, wo, cAF, q, eA, cAD, yg, aT, Nc, jj, ae, af, bA, Y, r, akB, bQ, t, ck, Qi, Ta, acW, nM, cgp, aru, bt, kh, jh, dG, hF, ad, hd, Db, oj, iL, d, eH, dr, es, yE, bE, Fk, i, iu, Tc); #c1(RUNX2) c2(NP_001019801) c3(runt-related transcription factor 2 isoform a) c4( ) c5(27886, 27887, 27888, 27889, 27890, 27891, 27892, 27893, 27894, 27895, 27896, 27897, 27898, 27899, 27900) c6( ) c7(gh, T, fd, cAG, x, Na, aE, arA, K, pr, aW, IW, Az, PQ, g, eF, bw, zV, cAE, eM, nB, iA, Iq, asR, m, zt, n, Kw, ai, adf, b, zw, ask, Wr, ag, kp, wU, bP, hR, art, B, vQ, bL, AS, bDS, aA, wo, cAF, q, eA, cAD, yg, aT, Nc, jj, ae, af, bA, Y, r, akB, bQ, t, ck, Qi, Ta, acW, nM, cgp, aru, bt, kh, jh, dG, hF, ad, hd, Db, oj, iL, d, eH, dr, es, yE, bE, Fk, i, iu, Tc); #c1(RUNX2) c2(NP_001265407) c3(runt-related transcription factor 2 isoform d) c4(98533) c5(98534, 98535, 98536, 98537, 98538, 98539) c6( ) c7(gh, T, fd, cAG, x, Na, aE, arA, K, pr, aW, IW, Az, PQ, g, eF, bw, zV, cAE, eM, nB, iA, Iq, asR, m, zt, n, Kw, ai, adf, b, zw, ask, Wr, aq, kp, wU, bP, hR, art, B, vQ, bL, AS, bDS, aA, wo, cAF, q, eA, cAD, yg, aT, Nc, jj, ae, af, bA, Y, r, akB, bQ, t, ck, Qi, Ta, acW, nM, cgp, aru, bt, kh, jh, dG, hF, ad, hd, Db, oj, iL, d, eH, dr, es, yE, bE, Fk, i, iu, Tc); #c1(RUNX2) c2(XP_011513263) c3(runt-related transcription factor 2 isoform X2) c4(305524, 305525, 305526) c5(305527, 305528, 305529, 305530, 305531, 305532, 305533, 305534) c6( ) c7(gh, T, fd, cAG, x, Na, aE, arA, K, pr, aW, IW, Az, PQ, g, eF, bw, zV, cAE, eM, nB, iA, Ig, asR, m, zt, n, Kw, ai, adf, b, zw, ask, Wr, aq, kp, wU, bP, hR, art, B, vQ, bL, AS, bDS, aA, wo, cAF, q, eA, cAD, yg, aT, Nc, jj, ae, af, bA, Y, r, akB, bQ, t, ck, Qi, Ta, acW, nM, cgp, aru, bt, kh, jh, dG, hF, ad, hd, Db, oj, iL, d, eH, dr, es, yE, bE, Fk, i, iu, Tc); #c1(RUNX2) c2(XP_011513264) c3(runt-related transcription factor 2 isoform X3) c4(305535) c5(305536, 305537, 305538, 305539, 305540, 305541) c6( ) c7(gh, T, fd, cAG, x, Na, aE, arA, K, pr, aW, IW, Az, PQ, g, eF, bw, zV, cAE, eM, nB, iA, Iq, asR, m, zt, n, Kw, ai, adf, b, zw, ask, Wr, ag, kp, wU, bP, hR, art, B, vQ, bL, AS, bDS, aA, wo, cAF, q, eA, cAD, yg, aT, Nc, jj, ae, af, bA, Y, r, akB, bQ, t, ck, Qi, Ta, acW, nM, cgp, aru, bt, kh, jh, dG, hF, ad, hd, Db, oj, iL, d, eH, dr, es, yE, bE, Fk, i, iu, Tc); #c1(RUNX2) c2(XP_011513268) c3(runt-related transcription factor 2 isoform X8) c4( ) c5(305542, 305543, 305544) c6( ) c7(gh, T, fd, cAG, x, Na, aE, arA, K, pr, aW, IW, Az, PQ, g, eF, bw, zV, cAE, eM, nB, iA, Ig, asR, m, zt, n, Kw, ai, adf, b, zw, ask, Wr, aq, kp, wU, bP, hR, art, B, vQ, bL, AS, bDS, aA, wo, cAF, q, eA, cAD, yg, aT, Nc, jj, ae, af, bA, Y, r, akB, bQ, t, ck, Qi, Ta, acW, nM, cgp, aru, bt, kh, jh, dG, hF, ad, hd, Db, oj, iL, d, eH, dr, es, yE, bE, Fk, i, iu, Tc); #c1(RUNX3) c2(XP_011540653) c3(runt-related transcription factor 3 isoform X2) c4(339206) c5(339207, 339208, 339209, 339210, 339211, 339212) c6( ) c7(T, aC, fR, pf, bB, ci, aE, K, hu, eL, cp, Qe, aW, qS, az, LZ, nY, kt, aB, g, cm, arZ, eM, Jr, m, cAH, cZ, iB, ht, n, fr, gN, dL, dd, dx, mR, bVg, aCx, ge, fe, aq, mo, hL, it, B, aA, il, AU, pd, q, cF, afQ, BJ, qK, aT, ae, amw, kl, s, vT, oV, Y, r, en, cl, t, sS, Dy, gX, zu, KY, rA, bt, vi, aD, jh, Gn, jE, hF, ad, afb, wD, av, ji, d, qt, ff, cr, aF, hp, iV, bz, bE, bE, X, iu); #c1(RUVBL1) c2(NP_003698) c3(ruvB-like 1) c4(140242, 140243) c5(140244, 140245, 140246, 140247, 140248, 140249) c6( ) c7(T, aE, bE, aW, if, aT, bB, By, m, qN, t, X, ad); #c1(RUVBL1) c2(XP_011511551) c3(ruvB-like 1 isoform X3) c4( ) c5(302257, 302258, 302259, 302260, 302261, 302262) c6( ) c7(T, aE, bE, aW, if, aT, bB, By, m, qN, t, X, ad); #c1(RUVBL2) c2(NP_006657) c3(ruvB-like 2) c4(166953) c5(166954, 166955, 166956, 166957, 166958, 166959, 166960, 166961, 166962, 166963, 166964) c6( ) c7(ck, T, ac, bE, oV, M, bB, B, eu); #c1(RUVBL2) c2(XP_005258484) c3(ruvB-like 2 isoform X1) c4(275681) c5( ) c6( ) c7(ck, T, ac, bE, oV, M, bB, B, eu); #c1(RUVBL2) c2(XP_011524632) c3(ruvB-like 2 isoform X2) c4( ) c5(319172, 319173, 319174, 319175, 319176) c6( ) c7(ck, T, ac, bE, oV, M, bB, B, eu); #c1(RXFP1) c2(NP_001240658) c3(relaxin receptor 1 isoform 4) c4( ) c5(88679, 88680, 88681, 88682, 88683, 88684, 88685, 88686, 88687, 88688, 88689) c6( ) c7(dP, qJ, gk, T, hd, nv, op, vA, al, cl, ae, ad); #c1(RXFP1) c2(NP_001240661) c3(relaxin receptor 1 isoform 6) c4(88690) c5(88691, 88692, 88693, 88694, 88695, 88696) c6( ) c7(dP, qJ, gk, T, hd, nv, op, vA, al, cl, ae, ad); #c1(RXFP1) c2(NP_067647) c3(relaxin receptor 1 isoform 1) c4(209216, 209217) c5(209218, 209219, 209220, 209221, 209222, 209223, 209224) c6( ) c7(dP, qJ, gk, T, hd, nv, op, vA, al, cl, ae, ad); #c1(RXFP1) c2(XP_011530478) c3(relaxin receptor 1 isoform X3) c4(326370, 326371) c5(326372, 326373, 326374, 326375, 326376, 326377) c6( ) c7(dP, qJ, gk, T, hd, nv, op, vA, al, cl, ae, ad); #c1(RXFP2) c2(NP_001159530) c3(relaxin receptor 2 isoform 2) c4(64258) c5(64259, 64260, 64261, 64262, 64263, 64264) c6( ) c7(gk, yi, nv, Lf, vA, al, bu, ae, op, bA, UF); #c1(RXFP2) c2(NP_570718) c3(relaxin receptor 2 isoform 1) c4(234224) c5(234225, 234226, 234227, 234228, 234229, 234230) c6( ) c7(gk, yi, nv, Lf, vA, al, bu, ae, op, bA, UF); #c1(RXFP3) c2(NP_057652) c3(relaxin-3 receptor 1) c4(192063) c5(192064, 192065, 192066, 192067, 192068, 192069) c6( ) c7(v, K, c1, hq); #c1(RXRA) c2(NP_001278849) c3(retinoic acid receptor RXR-alpha isoform b) c4( ) c5(110720) c6( ) c7(bL, vq, T, AS, jp, My, bB, n, hy, v, j, ci, C, PJ, Fb, zP, fr, q, cd, ad, hX, Mg, av, I, hd, aE, u, It, aT, ah, dL, UN, jj, hB, nJ, ae, af, eN, B, BN, s, aW, ff, cr, r, iy, aq, eZ, CQ, en, cM, bz, op, ck, es, eM, nB, bE, vA, X, wk, at, MJ, IC, bt, ne); #c1(RXRA) c2(NP_001278850) c3(retinoic acid receptor RXR-alpha isoform c) c4( ) c5(110721, 110722, 110723, 110724, 110725) c6( ) c7(bL, vq, T, AS, jp, My, bB, n, hy, v, j, ci, C, PJ, Fb, zP, fr, q, cd, ad, hX, Mg, av, I, hd, aE, u, It, aT, ah, dL, UN, jj, hB, nJ, ae, af, eN, B, BN, s, aW, ff, cr, r, iy, aq, eZ, CQ, en, cM, bz, op, ck, es, eM, nB, bE, vA, X, wk, at, MJ, IC, bt, ne); #c1(RXRA) c2(NP_002948) c3(retinoic acid receptor RXR-alpha isoform a) c4(133837, 133838) c5(133839, 133840, 133841, 133842, 133843, 133844, 133845) c6( ) c7(bL, vq, T, AS, jp, My, bB, n, hy, v, j, ci, C, PJ, Fb, zP, fr, q, cd, ad, hX, Mg, av, I, hd, aE, u, It, aT, ah, dL, UN, jj, hB, nJ, ae, af, eN, B, BN, s, aW, ff, cr, r, iy, aq, eZ, CQ, en, cM, bz, op, ck, es, eM, nB, bE, vA, X, wk, at, MJ, IC, bt, ne); #c1(RXRB) c2(NP_001257330) c3(retinoic acid receptor RXR-beta isoform 1) c4(95187) c5( ) c6( ) c7(AS, iW, aA, ad, av, I, hd, u, It, aT, dL, hB, af, A, aW, cr, eZ, cm, ve, bIS, at, hv); #c1(RXRB) c2(NP_001278918) c3(retinoic acid receptor RXR-beta isoform 3) c4(110971) c5(110972, 110973, 110974, 110975, 110976, 110977, 110978, 110979, 110980, 110981, 110982, 110983, 110984, 110985, 110986, 110987, 110988, 110989, 110990) c6( ) c7(AS, iW, aA, ad, av, I, hd, u, It, aT, dL, hB, af, A, aW, cr, eZ, cm, ve, bIS, at, hv); #c1(RXRB) c2(NP_068811) c3(retinoic acid receptor RXR-beta isoform 2) c4(210700, 210701, 210702) c5(210703, 210704, 210705, 210706, 210707, 210708, 210709, 210710, 210711, 210712, 210713, 210714, 210715, 210716, 210717, 210718, 210719, 210720, 210721, 210722, 210723, 210724, 210725, 210726, 210727, 210728, 210729, 210730, 210731, 210732, 210733, 210734, 210735, 210736, 210737, 210738, 210739, 210740, 210741, 210742, 210743, 210744, 210745, 210746, 210747, 210748, 210749, 210750, 210751, 210752, 210753, 210754, 210755, 210756, 210757, 210758, 210759, 210760, 210761, 210762, 210763, 210764, 210765, 210766, 210767, 210768, 210769, 210770) c6( ) c7(AS, iW, aA, ad, av, I, hd, u, It, aT, dL, hB, af, A, aW, cr, eZ, cm, ve, bIS, at, hv); #c1(RXRB) c2(XP_005249335) c3(retinoic acid receptor RXR-beta isoform X1) c4(269177) c5(269178, 269179, 269180, 269181, 269182, 269183, 269184, 269185, 269186, 269187, 269188, 269189, 269190, 269191, 269192, 269193, 269194, 269195, 269196, 269197, 269198, 269199, 269200, 269201) c6( ) c7(AS, iW, aA, ad, av, I, hd, u, It, aT, dL, hB, af, A, aW, cr, eZ, cm, ve, bIS, at, hv); #c1(RXRB) c2(XP_005249336) c3(retinoic acid receptor RXR-beta isoform X3) c4(269202) c5(269203, 269204, 269205, 269206, 269207, 269208, 269209, 269210, 269211, 269212, 269213, 269214, 269215, 269216, 269217, 269218, 269219, 269220, 269221, 269222, 269223, 269224, 269225, 269226, 269227, 269228, 269229, 269230, 269231, 269232, 269233, 269234, 269235, 269236, 269237, 269238) c6( ) c7(AS, iW, aA, ad, av, I, hd, u, It, aT, dL, hB, af, A, aW, cr, eZ, cm, ve, bIS, at, hv); #c1(RXRG) c2(NP_008848) c3(retinoic acid receptor RXR-gamma isoform a) c4(169091) c5(169092, 169093, 169094, 169095, 169096, 169097, 169098) c6( ) c7(bL, bA, T, iQ, nB, bE, Fi, cz, bB, aj, v, j, fr, af, J, na); #c1(RYBP) c2(NP_036366) c3(RING1 and YY1-binding protein) c4(173267) c5(173268, 173269, 173270, 173271, 173272, 173273, 173274) c6( ) c7(T, iM, je, bK, hH, fq); #c1(RYK) c2(NP_001005861) c3(tyrosine-protein kinase RYK isoform 1 precursor) c4(22129, 22130) c5(22131, 22132, 22133, 22134, 22135, 22136, 22137, 22138, 22139, 22140, 22141, 22142) c6( ) c7(Na, bxy, Az, Nc, m, t); #c1(RYK) c2(NP_002949) c3(tyrosine-protein kinase RYK isoform 2 precursor) c4(133846) c5(133847, 133848, 133849, 133850, 133851, 133852) c6( ) c7(Na, bxy, Az, Nc, m, t); #c1(RYR1) c2(NP_000531) c3(ryanadine receptor 1 isoform 1) c4(12022) c5(12023, 12024, 12025, 12026, 12027, 12028, 12029, 12030, 12031, 12032, 12033, 12034, 12035, 12036, 12037, 12038, 12039, 12040) c6( ) c7(ID, cAI, T, fR, e, Am, bMY, cz, jh, fr, UX, cd, ad, xC, NW, no, ayH, oj, Ak, h, aWs, K, bDK, Aa, ae, aTm, Iy, Al, xi, vj, xz, IW, Ad, cAL, cmG, akB, cAK, Bu, lx, aPd, dR, IJ, ac, ayl, cAJ, VU, jQ, y, jr); #c1(RYR1) c2(NP_001036188) c3(ryanodine receptor 1 isoform 2) c4(34033) c5(34034, 34035, 34036, 34037, 34038, 34039) c6( ) c7(ID, cAI, T, fR, e, Am, bMY, cz, jh, fr, UX, cd, ad, xC, NW, no, ayH, oj, Ak, h, aWs, K, bDK, Aa, ae, aTm, Iy, Al, xi, vj, xz, IW, Ad, cAL, cmG, akB, cAK, Bu, lx, aPd, dR, IJ, ac, ayl, cAJ, VU, jQ, y, jr); #c1(RYR1) c2(XP_006723380) c3(ryanodine receptor 1 isoform X2) c4(295186) c5( ) c6( ) c7(ID, cAI, T, fR, e, Am, bMY, cz, jh, fr, UX, cd, ad, xC, NW, no, ayH, oj, Ak, h, aWs, K, bDK, Aa, ae, aTm, Iy, Al, xi, vj, xz, IW, Ad, cAL, cmG, akB, cAK, Bu, lx, aPd, dR, IJ, ac, ayl, cAJ, VU, jQ, y, jr); #c1(RYR1) c2(XP_011525507) c3(ryanadine receptor 1 isoform X4) c4(319907) c5(319908) c6( ) c7(ID, cAI, T, fR, e, Am, bMY, cz, jh, fr, UX, cd, ad, xC, NW, no, ayH, oj, Ak, h, aWs, K, bDK, Aa, ae, aTm, ly, Al, xi, vj, xz, IW, Ad, cAL, cmG, akB, cAK, Bu, lx, aPd, dR, IJ, ac, ayl, cAJ, VU, jQ, y, jr); #c1(RYR2) c2(XP_006711865) c3(ryanadine receptor 2 isoform X1) c4( ) c5(286240, 286241, 286242, 286243, 286244, 286245, 286246, 286247, 286248, 286249) c6( ) c7(cAP, cAM, mr, wL, acl, oe, e, EQ, cV, arD, tc, bhL, cz, aj, j, atN, si, cAN, V, cd, J, Mg, cc, oj, h, vc, hn, K, bDK, bq, cAQ, af, mu, VX, Y, vj, IW, akB, EZ, cdk, wK, bVf, mx, gZ, bUH, cAO, dy, bD, IC, gq, rf); #c1(RYR2) c2(XP_006711866) c3(ryanodine receptor 2 isoform X2) c4( ) c5(286250) c6( ) c7(cAP, cAM, mr, wL, acl, oe, e, EQ, cV, arD, tc, bhL, cz, aj, j, atN, si, cAN, V, cd, J, Mg, cc, oj, h, vc, hn, K, bDK, bq, cAQ, af, mu, VX, Y, vj, IW, akB, EZ, cdk, wK, bVf, mx, gZ, bUH, cAO, dy, bD, IC, gq, rf); #c1(RYR2) c2(XP_006711867) c3(ryanodine receptor 2 isoform X3) c4(286251) c5( ) c6( ) c7(cAP, cAM, mr, wL, acl, oe, e, EQ, cV, arD, tc, bhL, cz, aj, j, atN, si, cAN, V, cd, J, Mg, cc, oj, h, vc, hn, K, bDK, bq, cAQ, af, mu, VX, Y, vj, IW, akB, EZ, cdk, wK, bVf, mx, gZ, bUH, cAO, dy, bD, IC, gq, rf); #c1(RYR2) c2(XP_006711868) c3(ryanodine receptor 2 isoform X4) c4(286252) c5(286253, 286254, 286255, 286256, 286257, 286258, 286259) c6( ) c7(cAP, cAM, mr, wL, acl, oe, e, EQ, cV, arD, tc, bhL, cz, aj, j, atN, si, cAN, V, cd, J, Mg, cc, oj, h, vc, hn, K, bDK, bq, cAQ, af, mu, VX, Y, vj, IW, akB, EZ, cdk, wK, bVf, mx, gZ, bUH, cAO, dy, bD, IC, gq, rf); #c1(RYR2) c2(XP_006711871) c3(ryanadine receptor 2 isoform X7) c4(286260, 286261) c5(286262, 286263, 286264, 286265, 286266, 286267) c6( ) c7(cAP, cAM, mr, wL, acl, oe, e, EQ, cV, arD, tc, bhL, cz, aj, j, atN, si, cAN, V, cd, J, Mg, cc, oj, h, vc, hn, K, bDK, bq, cAQ, af, mu, VX, Y, vj, IW, akB, EZ, cdk, wK, bVf, mx, gZ, bUH, cAO, dy, bD, IC, gq, rf); #c1(RYR2) c2(XP_006711872) c3(ryanodine receptor 2 isoform X8) c4( ) c5(286268, 286269) c6( ) c7(cAP, cAM, mr, wL, acl, oe, e, EQ, cV, arD, tc, bhL, cz, aj, j, atN, si, cAN, V, cd, J, Mg, cc, oj, h, vc, hn, K, bDK, bq, cAQ, af, mu, VX, Y, vj, IW, akB, EZ, cdk, wK, bVf, mx, gZ, bUH, cAO, dy, bD, IC, gq, rf); #c1(RYR3) c2(NP_001027) c3(ryanadine receptor 3 isoform 1) c4(30322) c5( ) c6( ) c7(dD, ac, dY, ea, vj, e, aw, cz, h, j, K, eq, iG, rE, cd, bN, qc); #c1(RYR3) c2(NP_001230925) c3(ryanodine receptor 3 isoform 2) c4(87177, 87178) c5(87179, 87180, 87181, 87182, 87183, 87184, 87185, 87186, 87187, 87188, 87189, 87190) c6( ) c7(dD, ac, dY, ea, vj, e, aw, cz, h, j, K, eq, iG, rE, cd, bN, qc); #c1(S100A1) c2(NP_006262) c3(protein S100-A1) c4(163365, 163366, 163367, 163368) c5(163369, 163370, 163371, 163372, 163373, 163374, 163375, 163376, 163377, 163378, 163379, 163380, 163381, 163382, 163383, 163384, 163385, 163386, 163387, 163388, 163389, 163390, 163391, 163392) c6( ) c7(bM, T, aNA, Tb, apr, ea, if, e, chc, qj, ci, ip, aE, aeO, SV, Ou, H, eL, cp, ye, aeR, LC, aW, Ls, ih, g, eE, eF, cm, eM, iA, ki, cAS, mx, U, Qw, PV, m, dD, Uc, WA, aw, n, aj, fr, et, qN, cd, asS, ai, eW, BI, cc, kH, h, dL, dx, Yl, Lg, kj, fe, aq, kp, anx, it, B, L, ka, jx, aA, cR, cz, hz, V, avD, q, J, eA, aaF, acj, qK, aT, avt, ae, qk, jf, iF, cAR, Y, Io, Xk, en, cl, t, f, acW, Dy, ac, iM, wR, CZ, auN, fD, aps, id, atY, rQ, aPJ, rl, bS, eq, ad, iG, Tg, Rq, Db, hD, hP, fb, d, je, afe, ff, eH, cr, rM, asV, aF, aiz, iV, Z, adj, es, Ew, VO, MJ, aS, ra, y, xg, iu, pO; #c1(S100A10) c2(NP_002957) c3(protein S100-A10) c4(133926) c5(133927, 133928, 133929, 133930, 133931, 133932, 133933, 133934, 133935, 133936) c6( ) c7(T, ha, bO, aA, n, bS, fr, ct, ci, q, ip, Db, aT, h, bK, K, he, jf, d, r, fe, aF, aFU, Z, eE, hq, hc, ki, Ei, U, hR, wR, ra, zu, bt, it); #c1(S100A11) c2(NP_005611) c3(protein S100-A11) c4(157920) c5(157921, 157922, 157923, 157924, 157925, 157926) c6( ) c7(T, aA, ci, q, ad, Zp, av, aT, nm, By, dL, eL, ae, aW, en, g, eE, t, op, nM, vA, m, it, B); #c1(S100A12) c2(NP_005612) c3(protein S100-A12) c4(157927, 157928, 157929) c5(157930, 157931, 157932, 157933, 157934, 157935, 157936, 157937, 157938, 157939, 157940, 157941) c6( ) c7(bM, cZ, dD, cAT, azf, tQ, Zl, ea, cz, cL, aj, j, uu, v, eq, fe, J, wD, iG, hd, py, nv, aqJ, aT, Aa, K, dd, H, avn, af, bA, azh, Nr, A, bf, aW, ih, eH, fe, hv, po, iV, eF, cm, bz, qa, Nq, kT, ok, y, cA, nB, eM, z, ki, dh, QF, Gg, fD, be, IM, If, bt, vF, fl); #c1(S100A13) c2(XP_011508166) c3(protein S100-A13 isoform X1) c4(298678) c5(298679, 298680, 298681, 298682, 298683, 298684, 298685, 298686, 298687, 298688, 298689, 298690, 298691, 298692, 298693, 298694, 298695, 298696, 298697, 298698, 298699, 298700) c6( ) c7(Dy, Y, ki, as, bz, eA); #c1(S100A14) c2(XP_005245419) c3(protein S100-A14 isoform X1) c4(266521) c5(266522, 266523, 266524, 266525, 266526, 266527, 266528, 266529, 266530, 266531, 266532, 266533, 266534, 266535, 266536, 266537, 266538, 266539) c6( ) c7(T, eM, aW, eE, ht, ff, cr, aT, it, ci, IQ, Xk, hu, en, bz); #c1(S100A16) c2(NP_525127) c3(protein S100-A16) c4( ) c5(231217, 231218, 231219, 231220, 231221, 231222, 231223, 231224, 231225, 231226, 231227, 231228, 231229, 231230) c6( ) c7(T, eA); #c1(S100A16) c2(XP_005244963) c3(protein S100-A16 isoform X2) c4(266167) c5(266168, 266169, 266170, 266171) c6( ) c7(T, eA); #c1(S100A2) c2(NP_005969) c3(protein S100-A2) c4(160862, 160863) c5(160864, 160865, 160866, 160867, 160868, 160869, 160870, 160871, 160872, 160873, 160874, 160875, 160876, 160877, 160878, 160879, 160880, 160881, 160882, 160883) c6( ) c7(T, aA, n, hy, ci, ad, iC, av, BI, cF, aE, aT, ab, ae, jf, iE, aW, Y, ff, aF, en, mo, eE, g, iK, bz, iP, eM, afd, PV, it, iu); #c1(S100A3) c2(NP_002951) c3(protein S100-A3) c4(133853) c5(133854, 133855, 133856, 133857, 133858, 133859, 133860, 133861, 133862, 133863) c6( ) c7(eE, aF, aA); #c1(S100A4) c2(NP_002952) c3(protein S100-A4) c4(133864, 133865) c5(133866, 133867, 133868, 133869, 133870, 133871, 133872, 133873, 133874, 133875, 133876, 133877, 133878, 133879, 133880, 133881, 133882, 133883, 133884, 133885, 133886, 133887, 133888, 133889) c6( ) c7(T, aC, al, bB, zh, ci, ip, x, Vp, gJ, aE, rJ, K, hu, eL, ye, aW, hi, Qm, g, as, eE, eE, cm, eM, nB, vA, Hb, k, m, iu, sc, aiZ, Vo, zX, ht, gy, n, Bl, dL, SD, wC, lb, op, bP, dB, hk, ajd, hL, hR, it, B, fG, aA, q, eA, eJ, acj, Vr, aT, cy, Ex, ae, jf, s, Y, ev, r, en, hf, cl, LV, t, iK, ck, cT, nM, Dy, iM, bt, id, jh, bS, Fb, ad, hX, dP, iC, hd, ib, Db, yt, ab, d, IU, je, ff, eH, cr, aeV, aoW, aF, bz, LB, es, bE, aS, adg, IC, X, y); #c1(S100A5) c2(NP_002953) c3(protein S100-A5) c4( ) c5(133890, 133891, 133892, 133893, 133894, 133895, 133896, 133897) c6( ) c7(eE, ip); #c1(S100A5) c2(XP_011508162) c3(protein S100-A5 isoform X1) c4(298667, 298668) c5(298669, 298670, 298671, 298672, 298673, 298674, 298675) c6( ) c7(eE, ip); #c1(S100A6) c2(NP_055439) c3(protein S100-A6) c4(181140) c5(181141, 181142, 181143, 181144, 181145, 181146, 181147, 181148, 181149, 181150) c6( ) c7(bL, T, qn, aC, dA, nl, boK, eP, aA, cz, eh, Fb, ci, zP, q, ad, eA, hX, ip, iC, AW, Yn, gJ, acj, x, afQ, aT, By, K, Dz, bq, Eg, ae, af, jf, zQ, d, iU, aW, Y, ff, eH, aq, aF, Xk, en, cl, t, g, eE, eE, qa, cm, iR, ov, nM, c, nB, hL, k, m, ht, B); #c1(S100A7) c2(NP_002954) c3(protein S100-A7) c4(133898, 133899) c5(133900, 133901, 133902, 133903, 133904, 133905, 133906, 133907, 133908, 133909) c6( ) c7(T, yk, aee, aA, n, ad, aEQ, Bl, afr, aT, dL, K, IQ, ae, eL, aW, ff, azP, cr, dN, aF, Xk, afs, en, t, eE, iK, pb, sS, hk, JM, in); #c1(S100A7A) c2(NP_789793) c3(protein S100-A7A) c4(252319) c5(252320, 252321, 252322, 252323, 252324, 252325, 252326, 252327, 252328, 252329, 252330, 252331, 252332, 252333) c6( ) c7(T, kl, eM, ff, cr, aT, IQ, Xk, en, bz); #c1(S100A8) c2(NP_002955) c3(protein S100-A8) c4(133910) c5(133911, 133912, 133913, 133914, 133915, 133916, 133917, 133918) c6( ) c7(oO, bM, 1 ea, if, e, cL, ci, bh, Tz, ip, aE, dV, K, H, hH, eL, be, aiJ, Us, hm, UC, li, yo, zQ, Jl, aW, Ih, az, HA, kt, pD, aB, g, eE, eE, cm, y, eM, iT, dc, U, cj, uJ, Uz, eg, cE, dD, aw, Wb, aj, qN, kY, ai, h, dL, hB, pl, A, Ib, fe, kT, dB, hk, hL, at, Br, uz, eo, Pr, B, it, L, hL, pF, mr, aA, cR, fF, v, j, C, AO, V, q, o, J, mj, Ig, qp, Id, aT, cy, jj, kU, ae, dl, le, kl, s, Y, kX, fO, la, r, akY, Io, en, iK, pb, ck, ua, c, ac, dh, dy, fD, kZ, ht, rA, ao, kV, gx, Gl, akd, aD, dM, mL jh, ah, Gn, eq, Uy, ad, wD, dP, od, ds, io, hD, ji, uQ, gj, d, hG, ff, eH, cr, eZ, dN, Ej, aF, hp, Fq, Sm, iV, jh, bz, kN, aS, ra, If, kS, X, hv); #c1(S100A8) c2(XP_011508163) c3(protein S100-A8 isoform X1) c4( ) c5(298676, 298677) c6( ) c7(oO, bM, T, ea, if, e, cL, ci, bh, Tz, ip, aE, dV, K, H, hH, eL, be, aiJ, Us, hm, UC, li, yo, zQ, Jl, aW, Ih, az, HA, kt, pD, aB, g, eE, eE, cm, y, eM, iT, dc, U, cj, uJ, Uz, eg, cE, dD, aw, Wb, aj, qN, kY, ai, h, dL, hB, pl, A, Ib, fe, kT, dB, hk, hL, at, Br, uz, eo, Pr, B, it, L, hL, pF, mr, aA, cR, fF, v, j, C, AO, V, q, o, J, mj, Ig, qp, Id, aT, cy, jj, kU, ae, dl, le, kl, s, Y, kX, fO, la, r, akY, Io, en, iK, pb, ck, ua, c, ac, dh, dy, fD, kZ, ht, rA, ao, kV, gx, Gl, akd, aD, dM, mL jh, ah, Gn, eq, Uy, ad, wD, dP, od, ds, io, hD, ji, uQ, gj, d, hG, ff, eH, cr, eZ, dN, Ej, aF, hp, Fq, Sm, iV, jh, bz, kN, aS, ra, If, kS, X, hv); #c1(S100A9) c2(NP_002956) c3(protein S100-A9) c4(133919) c5(133920, 133921, 133922, 133923, 133924, 133925) c6( ) c7(T, ea, if, e, cL, ci, bh, ip, x, afr, aE, bW, dV, rB, K, bah, hu, H, hH, eL, bc, Us, hm, UC, yo, aW, az, HA, pD, g, as, pL, eE, cm, bw, y, eM, U, cj, uJ, k, Uz, eg, Vj, iu, sc, dD, aEj, aw, ht, n, aj, fr, qN, ai, BI, ft, h, dL, wb, A, fe, aq, ar, dB, mg, at, eo, zB, Pr, B, L, bL, vD, pF, eR, aA, cR, fF, v, j, C, AO, V, pd, q, n, J, eA, aT, cy, ae, af, jf, kl, s, Y, kX, fO, r, lo, Xk, en, pb, ck, ua, c, ac, dh, mf, EY, fD, ao, gx, aD, dM, jh, ah, fu, eq, Uy, ad, wD, dP, fU, F, hD, ji, uQ, gj, d, ff, cr, eZ, dN, aF, hp, Fq, iV, xZ, aS, If, ra, X, hv); #c1(S100B) c2(NP_006263) c3(protein S100-8) c4(163393) c5(163394, 1613395, 163396, 163397, 163398, 163399, 163400, 163401, 163402, 163403) c6( ) c7(bM, T, aNA, Tb, fR, apr, ea, chc, bO, eb, gA, ci, mF, ip, azY, wM, aE, Bc, iX, aeO, SV, Ou, K, H, eL, cp, yo, aeR, aW, Ls, ih, g, as, eF, cm, uC, mZ, eM, iA, ki, cAS, U, Qw, PV, mk, yA, R, dD, aHS, aw, n, aj, ct, aBI, cd, ai, eW, BI, cc, acA, kH, h, IG, SH, dL, mV, mY, he, dx, Yl, Lg, mU, kj, fe, aq, kp, mX, hq, cA, aEG, anx, agy, it, B, mT, L, ka, aoU, jx, aA, cR, mS, hz, Kh, aql, V, avD, q, J, eA, aaF, acj, hb, qK, aT, cy, bK, bq, avt, ae, af, qk, eu, jf, iF, cAR, Y, aPf, lo, Xk, f, acW, Dy, ac, iM, iQ, wR, CZ, auN, fD, aps, Kd, id, atY, aaz, aPJ, ha, rl, gN, jh, bS, eq, qi, ad, iC, Tg, Rq, mW, Ot, hD, hP, fb, atX, d, je, afe, eH, cr, rM, eZ, asV, aF, hp, aiz, iV, Z, adj, es, bhO, Ew, VO, MJ, aS, y, xg, iu); #c1(S100P) c2(NP_005971) c3(protein S100-P) c4(160884) c5(160885, 160888, 160887, 160888, 160889, 160890) c6( ) c7(T, aC, id, aA, bB, fr, ci, qN, q, ad, eJ, dP, jz, aE, aT, aU, ae, aEL, kl, B, s, xR, aW, r, fe, aq, kp, aF, g, iV, iR, t, es, eM, bE, PV, m, it, X); #c1(S100Z) c2(NP_570128) c3(protein S100-Z) c4(234014) c5(234015, 234016, 234017, 234018, 234019, 234020, 234021, 234022, 234023, 234024) c6( ) c7(iV); #c1(S1PR2) c2(NP_004221) c3(sphingosine 1-phosphate receptor 2) c4(144406) c5(144407, 144408, 144409, 144410, 144411, 144412, 144413, 144414, 144415, 144416) c6( ) c7(dP, dD, aW, dh, aT, gZ, cj, aS, K, eq, bq, y, eA); #c1(S1PR3) c2(NP_005217) c3(sphingosine 1-phosphate receptor 3) c4(154105) c5(15410, 154107, 154108, 154109, 154110, 154111, 154112, 154113, 154114, 154115) c6( ) c7(iC, T, aW, aT, fF, cy, n, bnt, C, y); #c1(S1PR4) c2(NP_0037BB) c3(sphingosine 1-phosphate receptor 4 precursor) c4(140671) c5(140672, 140673, 140674, 140675, 140676, 140677) c6( ) c7(aW, T, aT, bq); #c1(S1PR5) c2(NP_001159687) c3(sphingosine 1-phosphate receptor 5) c4(64582, 64583) c5(64584, 64585, 64586, 64587, 64588, 64589, 64590, 64591, 64592, 64593, 64594, 64595, 64596, 64597, 64598, 64599) c6( ) c7(ck, d, v, K, bq, ae, ad); #c1(SAA1) c2(NP_001171477) c3(serum amyloid A-1 protein preproprotein) c4(70271) c5(70272, 70273, 70274, 70275, 70276, 70277, 70278, 70279, 70280, 70281, 70282, 70283, 70284, 70285) c6( ) c7(oO, T, dD, fR, Ke, ea, e, qx, jx, cz, bB, cL, v, j, oZ, eq, ai, o, nH, sO, qI, ja, cU, K, dQ, H, af, aGL, B, mR, fO, ih, cr, fc, iV, dw, YZ, cm, bw, bE, vZ, R, Lz, pJ, X, y); #c1(SAA2) c2(NP_001120852) c3(serum amyloid A-2 protein isoform b precursor) c4(44844) c5(44845, 44846, 44847, 44848, 44849, 44850) c6( ) c7(Ke, e, ih, R, Lz, dw, he, af, y); #c1(SAA2) c2(NP_11081) c3(serum amyloid A-2 protein isoform a precursor) c4(219819) c5(219820, 219821, 219822, 219823, 219824, 219825, 219826, 219827, 219828, 219829, 219830, 219831, 219832, 219833) c6( ) c7(Ke, e, ih, R, Lz, dw, he, af, y); #c1(SAA4) c2(NP_006503) c3(serum amyloid A-4 protein precursor) c4( ) c5(165863, 16584, 16585, 165866, 16587) c6( ) c7(Ke, eH, fZ, j, Lz, eF); #c1(SAAL1) c2(NP_612430) c3(protein SAAL1) c4(236442) c5(236443, 236444, 236445, 236446, 236447, 236448, 236449, 236450) c6(236451, 236452) c7(y, xE, zr); #c1(SAC3D1) c2(NP_037431) c3(SAC3 domain-containing protein 1) c4(175497, 175498) c5(175499, 175500, 175501, 175502, 175503, 175504, 175505, 175506, 175507, 175508, 175509, 175510, 175511, 175512, 175513, 175514) c6( ) c7(bB, bE, Y); #c1(SACM1L) c2(NP_054735) c3(phosphatidylinositide phosphatase SAC1) c4(177472) c5(177473, 177474, 177475, 177476, 177477, 177478) c6( ) c7(bL, ck, x, wg, ac, iM, je, aW, aT, kH, vr, aj, dy, k, Pd, y, J, tD, Rf); #c1(SACM1L) c2(XP_011531802) c3(phosphatidylinositide phosphatase SAC1 isoform X1) c4(327881) c5(327882, 327883, 327884, 327885, 327886, 327887) c6( ) c7(bL, ck, x, wg, ac, iM, je, aW, aT, kH, vr, aj, dy, k, Pd, y, J, tD, Rf); #c1(SACS) c2(NP_001264984) c3(sacsin isoform 2) c4(97667) c5( ) c6( ) c7(ky, ads, kB, KH, U, ao, yZ, fu, bX, yU, gT, ado, aR); #c1(SACS) c2(NP_055178) c3(sacsin isoform 1) c4(179593) c5(179594, 179595, 179596, 179597, 179598, 179599, 179600, 179601, 179602, 179603, 179604) c6B( ) c7(ky, ads, kB, KH, U, ao, yZ, fu, bX, yU, gT, ado, aR); #c1(SACS) c2(XP_011533341) c3(sacsin isoform X3) c4( ) c5(329465, 329466, 329457, 329468, 329469) c6( ) c7(ky, ads, kB, KH, U, ao, yZ, fu, bX, yU, gT, ado, aR); #c1(SAE1) c2(NP_001139185) c3(SUMO-activating enzyme subunit 1 isoform b) c4(58871) c5(58872, 58873, 58874, 58875, 58876, 58877) c6( ) c7(V, aT); #c1(SAE1) c2(NP_00113918) c3(SUMO-activating enzyme subunit 1 isoform c) c4(58878) c5(58879, 58880, 58881, 58882, 58883, 58884) c6( ) c7(V, aT); #c1(SAE1) c2(NP_005491) c3(SUMO-activating enzyme subunit 1 isoform a) c4(156759, 155670) c5(155761, 156752, 156763, 156754, 156765, 156766, 156767, 156768, 156769, 156770, 156771, 1565772) c6( ) c7(V, aT); #c1(SAE1) c2(XP_011524607) c3(SUMO-activating enzyme subunit 1 isoform X2) c4(319150) c5(319151, 319152, 319153, 319154, 319155, 319156) c6( ) c7(V, aT); #c1(SAFB) c2(NP_001188267) c3(scaffold attachment factor B1 isoform 1) c4(78981) c5( ) c6( ) c7(T, iH, akc, pf, if, qN, jz, ds, aT, aPe, K, oi, aW, ff, Rr, LZ, gl, en, g, el, fy, cE); #c1(SAFB) c2(NP_001188268) c3(scaffold attachment factor B1 isoform 2) c4(78982) c5( ) c6( ) c7(T, iH, akc, pf, if, qN, jz, ds, aT, aPe, K, oi, aW, ff, Rr, LZ, gl, en, g, el, fy, cE); #c1(SAFB) c2(NP_001188269) c3(scaffold attachment factor B1 isoform 4) c4(78983, 78984, 78985) c5(78986, 78987, 78988, 78989, 78990, 78991, 78992, 78993, 78994, 78995, 78996, 78997, 78998, 78999, 79000, 79001, 79002, 79003, 79004, 79005, 79006, 79007, 79008, 79009) c6( ) c7(T, iH, akc, pf, if, qN, jz, ds, aT, aPe, K, oi, aW, ff, Rr, LZ, gl, en, g, el, fy, cE); #c1(SAFB) c2(NP_002958) c3(scaffold attachment factor B1 isoform 3) c4(133937) c5( ) c6( ) c7(T, iH, akc, pf, if, qN, jz, ds, aT, aPe, K, oi, aW, ff, Rr, LZ, gl, en, g, el, fy, cE); #c1(SAFB) c2(XP_006722902) c3(scaffold attachment factor B1 isoform X1) c4( ) c5(294927, 294928, 294929, 294930, 294931, 294932, 294933, 294934, 294935, 294936, 294937, 294938, 294939) c6( ) c7(T, iH, akc, pf, if, qN, jz, ds, aT, aPe, K, oi, aW, ff, Rr, LZ, gl, en, g, el, fy, cE); #c1(SAFB2) c2(NP_055464) c3(scaffold attachment factor B2) c4(181329, 181330, 181331) c5(181332, 181333, 181334, 181335, 181336, 181337, 181338) c6( ) c7(T, K, aT); #c1(SAFB2) c2(XP_011526751) c3(scaffold attachment factor B2 isoform X1) c4(321045) c5(321046, 321047, 321048, 321049, 321050, 321051, 321052, 321053, 321054, 321055, 321056, 321057, 321058, 321059, 321060, 321061, 321062) c6( ) c7(T, K, aT); #c1(SAFB2) c2(XP_011526752) c3(scaffold attachment factor B2 isoform X2) c4( ) c5(321063) c6( ) c7(T, K, aT); #c1(SAG) c2(NP_000532) c3(S-arrestin) c4(12041, 12042, 12043, 12044) c5(12045, 12046, 12047, 12048, 12049, 12050, 12051, 12052, 12053, 12054, 12055, 12056, 12057) c6( ) c7(tp, LX, e, cL, qW, o, ds, cy, K, hH, A, IR, cAU, bgh, fe, nk, nC, ayj, Dm, bgg, chr, bE, qr, agl, If, LT); #c1(SAG) c2(XP_011547162) c3(S-arrestin isoform X3) c4( ) c5(345899) c6( ) c7(tp, LX, e, cL, qW, o, ds, cy, K, hH, A, IR, cAU, bgh, fe, nk, nC, ayj, Dm, bgg, chr, bE, qr, agl, If, LT); #c1(SAG) c2(XP_011547165) c3(S-arrestin isoform X6) c4( ) c5(345900, 345901, 345902, 345903, 345904, 345905, 345906, 345907, 345908, 345909, 345910) c6( ) c7(tp, LX, e, cL, qW, o, ds, cy, K, hH, A, IR, cAU, bgh, fe, nk, nC, ayj, Dm, bgg, chr, bE, qr, agl, If, LT); #c1(SAG) c2(XP_011547167) c3(S-arrestin isoform X7) c4(345911) c5(345912, 345913, 345914, 345915, 345918) c6( ) c7(tp, LX, e, cL, qW, o, ds, cy, K, hH, A, IR, cAU, bgh, fe, nk, nC, ayj, Dm, bgg, chr, bE, qr, agl, If, LT); #c1(SAGE1) c2(NP_061136) c3(sarcoma antigen 1) c4(199460) c5(199461, 199462, 199463, 199464, 199465, 199466, 199467, 199468, 199469, 199470, 199471, 199472, 199473, 199474, 199475, 199476, 199477, 199478, 199479, 199480, 199481, 199482, 199483) c6( ) c7(bL, bM, T, wu, NT, aA, n, v, ci, ber, eA, ad, av, BI, hd, aT, IQ, wm, an, ae, eL, jf, d, IR, aW, Y, Gv, ff, aF, en, bz, Hp, c, nB, eM, us); #c1(SAGE1) c2(XP_011529660) c3(sarcoma antigen 1 isoform X2) c4(325304) c5( ) c6( ) c7(bL, bM, T, wu, NT, aA, n, v, ci, ber, eA, ad, av, BI, hd, aT, IQ, wm, an, ae, eL, jf, d, IR, aW, Y, Gv, ff, aF, en, bz, Hp, c, nB, eM, us); #c1(SALL1) c2(NP_001121364) c3(sal-like protein 1 isoform b) c4(45768, 45769, 45770) c5(45771, 45772, 45773, 45774, 45775, 45776) c6( ) c7(aMU, T, MS, yQ, op, aW, vA, aeq, aT, bko, dy, bkE, cAV, er, eW, atb); #c1(SALL1) c2(XP_011521557) c3(sal-like protein 1 isoform X1) c4(315272) c5(316273, 316274, 316275, 316275, 316277, 316278, 316279, 316280, 316281, 316282, 316283, 316284, 316285, 316285, 316287, 316288, 316289, 316290, 316291) c6( ) c7(aMU, T, MS, yQ, op, aW, vA, aeq, aT, bko, dy, bkE, cAV, er, eW, atb); #c1(SALL2) c2(NP_005398) c3(sal-like protein 2 isoform a) c4(155700, 155701) c5(155702, 155703, 155704, 155705, 155706, 155707, 155708) c6( ) c7(kn, d, oV, m, t, iJ, or); #c1(SALL2) c2(XP_011535366) c3(sal-like protein 2 isoform X1) c4( ) c5(332416, 332417, 332418, 332419, 332420, 332421) c6( ) c7(kn, d, oV, m, t, iJ, or); #c1(SALL3) c2(NP_741996) c3(sal-like protein 3) c4(247559, 247560, 247561) c5(247562, 247563, 247564, 2475B6, 247566, 247567, 247568, 247569, 247570, 247571, 247572, 247573, 247574, 247575, 247576, 247577, 247578, 247579, 247580, 247581, 247582) c6( ) c7(y, T, B, Az, pk); #c1(SALL4) c2(NP_065169) c3(sal-like protein 4) c4(204369) c5(204370, 204371, 204372, 204373, 204374, 204375, 204376) c6( ) c7(T, gU, atk, acl, cAW, aw, oA, aA, jh, hF, q, br, eA, x, hb, iI, arH, aT, avQ, aW, oV, Az, r, aF, zZ, bw, ck, ou, aBU, cAX, aNy, k, bD, bt, xg, B); #c1(SALL4) c2(XP_011527224) c3(sal-like protein 4 isoform X2) c4(321772) c5( ) c6( ) c7(T, gU, atk, acl, cAW, aw, oA, aA, jh, hF, q, br, eA, x, hb, iI, arH, aT, avQ, aW, oV, Az, r, aF, zZ, bw, ck, ou, aBU, cAX, aNy, k, bD, bt, xg, B); #c1(SAMD1) c2(NP_612361) c3(atherin) c4( ) c5(236251, 236252, 236253, 236254, 236255) c6( ) c7(ea, dD, eq); #c1(SAMD14) c2(NP_777580) c3(sterile alpha motif domain-containing protein 14 isoform 1) c4(251252) c5(251253, 251254, 251255, 251256, 251257, 251258, 251259, 251260, 251261, 251262, 251263) c6( ) c7(zl, iu, g); #c1(SAMD14) c2(XP_00672181) c3(sterile alpha motif domain-containing protein 14 isoform X1) c4(294315) c5(294316, 294317, 294318, 294319, 294320, 294321) c6( ) c7(zl, iu, g); #c1(SAMD14) c2(XP_011522790) c3(sterile alpha motif domain-containing protein 14 isoform X2) c4( ) c5(317302) c6( ) c7(zl, iu, g); #c1(SAMD4A) c2(NP_001155048) c3(protein Smaug homolog 1 isoform 2) c4(61365, 61366) c5(61367, 61368, 61369, 61370, 61371, 61372, 61373, 61374, 61375, 61376, 61377, 61378) c6( ) c7(IB); #c1(SAMD4A) c2(NP_001155049) c3(protein Smaug homolog 1 isoform 3) c4(B1379) c5(61380, 61381, 61382, 61383, 61384, 51385) c6( ) c7(IB); #c1(SAMD4A) c2(NP_05404) c3(protein Smaug homolog 1 isoform 1) c4(187432, 187433) c5(187434, 187435, 187436, 187437, 187438, 187439, 187440, 187441, 187442, 187443, 187444, 187445, 187446, 187447, 187448, 187449) c6( ) c7(IB); #c1(SAMD5) c2(NP_001025231) c3(sterile alpha motif domain-containing protein 5) c4(29528) c5(29529, 29530, 29531, 29532, 29533, 29534) c6( ) c7(af); #c1(SAMD9) c2(NP_060124) c3(sterile alpha motif domain-containing protein 9) c4(194289, 194290) c5(194291, 194292, 194293, 194294, 194295, 194296, 194297, 194298, 194299, 194300, 194301, 194302, 194303) c6( ) c7(T, dD, bE, ea, ds, cAY, bB, eq, bsR, IS); #c1(SAMD9L) c2(NP_0012942B) c3(sterile alpha motif domain-containing protein 9-like) c4(115404, 115405, 115406) c5(115407, 115408, 115409, 115410, 115411, 115412, 115413, 115414, 115415, 115416, 115417, 115418, 115419, 115420, 115421, 115422, 115423, 115424, 115425, 115426, 115427, 115428, 115429, 115430, 115431, 115432, 115433, 115434, 115435, 115436, 115437, 115438, 115439, 115440, 115441, 115442, 115443, 115444) c6( ) c7(T); #c1(SAMHD1) c2(NP_05289) c3(deoxynucleoside triphosphate triphosphohydrolase SAMHD1) c4(186943, 186944) c5(186945, 186946, 186947, 186948, 186949, 186950) c6( ) c7(ck, eW, Ez, cAZ, ac, hb, eZ, cBa, ZQ, cj, lo, h, by, gn, agy, eA, Ex, afu); #c1(SAMHD1) c2(XP_011527063) c3(deoxynucleoside triphosphate triphosphohydrolase SAMHD1 isoform X2) c4( ) c5(321501, 321502, 321503, 321504, 321505, 321506) c6( ) c7(ck, eW, Ez, cAZ, ac, hb, eZ, cBa, ZQ, cj, lo, h, ey, gn, agy, eA, Ex, afu); #c1(SAMM50) c2(NP_056195) c3(sorting and assembly machinery component 50 homolog) c4(186260, 186261) c5(186262, 186263, 186264, 186265, 186266, 186267, 186268, 186269, 18270, 18271, 18272, 18273) c6( ) c7(j); #c1(SAMSN1) c2(NP_001243299) c3(SAM domain-containing protein SAMSN-1 isoform 2) c4(90395) c5(90396, 90397, 90398, 90399, 90400, 90401) c6( ) c7(av, iV, d, oe, ey, hf, f, fq, eA); #c1(SAMSN1) c2(NP_001273452) c3(SAM domain-containing protein SAMSN-1 isoform 3) c4( ) c5(104931, 104932, 104933, 104934, 104935, 104936) c6( ) c7(av, iV, d, oe, ey, hf, f, fq, eA); #c1(SAMSN1) c2(NP_D71419) c3(SAM domain-containing protein SAMSN-1 isoform 1) c4(211558) c5(211559, 211560, 211561, 211562, 211563, 211564) c6( ) c7(av, iV, d, oe, ey, hf, f, fq, eA); #c1(SAMSN1) c2(XP_011527986) c3(SAM domain-containing protein SAMSN-1 isoform X1) c4(323042) c5( ) c6( ) c7(av, iV, d, oe, ey, hf, f, fq, eA); #c1(SAP30BP) c2(NP_001288768) c3(SAP30-binding protein isoform 3) c4(114019) c5(114020, 114021, 114022, 114023, 114024, 114025) c6( ) c7(v, eA); #c1(SAP30BP) c2(NP_037392) c3(SAP30-binding protein isoform 2) c4(175209, 175210) c5(175211, 175212, 175213, 175214, 175215, 175216, 175217, 175218, 175219, 175220, 175221, 175222, 175223, 175224, 175225, 175226) c6( ) c7(v, eA); #c1(SAP30L) c2(NP_001124534) c3(histone deacetylase complex subunit SAP30L isoform 2) c4(49193) c5(49194, 49195, 49196, 49197, 49198, 49199) c6( ) c7(aj, kl); #c1(SAP30L) c2(NP_001124535) c3(histone deacetylase complex subunit SAP30L isoform 3) c4(49200) c5(49201, 49202, 49203, 49204, 49205, 49206) c6( ) c7(aj, kl); #c1(SAP30L) c2(NP_078908) c3(histone deacetylase complex subunit SAP30L isoform 1) c4(216060) c5(216061, 216062, 216063, 216604, 216065, 216066) c6( ) c7(aj, kl); #c1(SAPCD1) c2(NP_001034740) c3(suppressor APC domain-containing protein 1) c4(32126, 32127, 32128) c5(32129, 32130, 32131, 32132, 32133, 32134, 32135, 32136, 32137, 32138, 32139, 32140, 32141, 32142, 32143, 32144, 32145, 32146, 32147, 32148, 32149, 32150, 32151, 32152, 32153, 32154, 32155, 32156, 32157, 32158, 32159, 32160, 32161, 32162, 32163, 32164, 32165, 32166, 32167, 32168, 32169, 32170, 32171, 32172, 32173, 32174, 32175, 32178, 32177, 32178, 32179, 32180, 32181, 32182, 32183, 32184, 32185, 32186, 32187, 32188, 32189, 32190, 32191) c6( ) c7(y, W, eZ); #c1(SAPCD2) c2(NP_848543) c3(suppressor APC domain-containing protein 2) c4(253799) c5(253800, 253801, 253802, 253803, 253804, 253805) c6( ) c7(aA, bE, aF, q, r); #c1(SAPCD2) c2(XP_011517482) c3(suppressor APC domain-containing protein 2 isoform X1) c4( ) c5(311232) c6( ) c7(aA, bE, aF, q, r); #c1(SAR1A) c2(NP_001136120) c3(GTP-binding protein SAR1a) c4(54374, 54375, 54376, 54377, 54378) c5(54379, 54380, 54381, 54382, 54383, 54384, 54385, 54386, 54387, 54388, 54389, 54390, 54391, 54392, 54393, 54394, 54395, 54396, 54397, 54398, 54399, 54400, 54401, 54402, 54403, 54404, 54405, 54406, 54407, 54408, 54409, 54410, 54411, 54412, 54413, 54414, 54415, 54416, 54417, 54418, 54419, 54420, 54421, 54422, 54423, 54424) c6( ) c7(fM, qb, wO, akr, y, af, fi); #c1(SAR1B) c2(NP_001028675) c3(GTP-binding protein SAR1b) c4(30447, 30448, 30449, 30450) c5(30451, 30452, 30453, 30454, 30455, 30456, 30457, 30458, 30459, 30460, 30461, 30462, 30463, 30464, 30465, 30466, 30467, 30468, 30469, 30470, 30471, 30472, 30473, 30474, 30475, 30476, 30477, 30478, 30479, 30480, 30481, 30482, 30483, 30484, 30485, 30486, 30487, 30488, 30489, 30490) c6( ) c7(bD, ZU, ZV, fi, C); #c1(SARDH) c2(NP_001128179) c3(sarcosine dehydrogenase, mitochondrial precursor) c4(49642, 49643, 49644, 49645, 49646, 49647, 49648, 49649, 49650) c5(49651, 49652, 49653, 49654, 49655, 49656, 49657, 49658, 49659, 49660, 49661, 49662, 49663, 49664, 49665, 49666, 49667, 49668, 49669, 49670, 49671, 49672, 49673, 49674, 49675, 49676, 49677, 49678, 49679, 49680, 49681, 49682, 49683, 49684) c6( ) c7(bL, T, cz, cBb, dG, fr, ci, eA, ad, cc, vz, ds, aT, h, bj, dL, K, vx, fb, ae, eL, yo, aW, dg, kC, op, ck, es, Ew, iA, Ip, vA, vy, gv, anx, agy, y, VB); #c1(SARDH) c2(XP_011516635) c3(sarcosine dehydrogenase, mitochondrial isoform X2) c4( ) c5(310046, 310047, 310048, 310049, 310050, 310051, 310052, 310053, 310054, 310055, 310056, 310057, 310058, 310059, 310060, 310061, 310062, 310063, 310064, 310065, 310066, 310067, 310068, 310069) c6( ) c7(bL, T, cz, cBb, dG, fr, ci, eA, ad, cc, vz, ds, aT, h, bj, dL, K, vx, fb, ae, eL, yo, aW, dg, kC, op, ck, es, Ew, iA, Ip, vA, vy, gv, anx, agy, y, VB); #c1(SARM1) c2(NP_055892) c3(sterile alpha and TIR motif-containing protein 1 precursor) c4(184229, 184230) c5(184231, 184232, 184233, 184234, 184235, 184236, 184237, 184238, 184239, 184240, 184241, 184242, 184243, 184244, 184245, 184246) c6( ) c7(Dw, cch, fM, ds, jh, cU, K); #c1(SARNP) c2(NP_149073) c3(SAP domain-containing ribonucleoprotein) c4(226995, 226996) c5(226997, 226998, 226999, 227000, 227001, 227002, 227003, 227004, 227005, 227006, 227007, 227008, 227009, 227010, 227011, 227012) c6( ) c7(gk, T, eJ, eM, eR, al, hF, bz, B, hX); #c1(SARS2) c2(NP_001139373) c3(serine—tRNA ligase, mitochondrial isoform a precursor) c4(59216) c5(59217, 59218, 59219, 59220, 59221, 59222, 59223, 59224, 59225, 59226) c6( ) c7(DS, fG, aw, cBc, fF, auq, aNG, fw, nH, afm, hb, ds, dk, aT, h, ccl, aa, afu, aW, we, apn, sP, Ni, aiT, pR, lo, aq, CQ, TA, bE, uR, Ei, yH, fD, hE, B); #c1(SARS2) c2(NP_060297) c3(serine—tRNA ligase, mitochondrial isoform b precursor) c4(195252, 195253, 195254) c5(195255, 195256, 195257, 195258, 195259, 195260, 195261, 195262, 195263, 195264, 195265, 195266, 195267, 195268, 195269, 195270, 195271, 195272) c6( ) c7(DS, fG, aw, cBc, fF, auq, aNG, fw, nH, afm, hb, ds, dk, aT, h, ccl, aa, afu, aW, wc, apn, sP, Ni, aiT, pR, lo, aq, CQ, TA, bE, uR, Ei, yH, fD, hE, B); #c1(SART1) c2(NP_005137) c3(U4/U6.U5 tri-snRNP-associated protein 1) c4(153309, 153310) c5(153311, 153312, 153313, 153314, 153315, 153316, 153317, 153318, 153319, 153320, 153321, 153322) c6( ) c7(T, d, aW, ff, r, aT, en, q, ad); #c1(SART3) c2(NP_055521) c3(squamous call carcinoma antigen recognized by T-cells 3) c4(181705, 181706, 181707, 181708, 181709) c5(181710, 181711, 181712, 181713, 181714, 181715, 181716, 181717, 181718, 181719, 181720, 181721, 181722, 181723, 181724, 181725, 181726, 181727, 181728, 181729, 181730, 181731, 181732, 181733, 181734, 181735) c6( ) c7(bM, cZ, T, wu, jh, fd, bB, agH, qN, aQo, ad, kH, wm, dd, zy, eL, ae, je, aW, cm, t, LB, iM, ahC, m); #c1(SART3) c2(XP_011537328) c3(squamous call carcinoma antigen recognized by T-cells 3 isoform X2) c4( ) c5(335034, 335035, 335036, 335037, 335038) c6( ) c7(bM, cZ, T, wu, jh, fd, bB, agH, qN, aQo, ad, kH, wm, dd, zy, eL, ae, je, aW, cm, t, LB, iM, ahC, m); #c1(SASH1) c2(NP_056093) c3(SAM and SH3 domain-containing protein 1) c4(185679) c5(18580, 185681, 185682, 185683, 185684, 185685, 185686, 185687, 185688, 185689, 185690, 185691) c6( ) c7(T, af, bE, aW, aT, bB, n, aeM, bz, X); #c1(SASH1) c2(XP_005266932) c3(SAM and SH3 domain-containing protein 1 isoform X7) c4(280413) c5(280414, 280415, 280416, 280417, 280418, 280419) c6( ) c7(T, af, bE, aW, aT, bB, n, aeM, bz, X); #c1(SASH1) c2(XP_011533941) c3(SAM and SH3 domain-containing protein 1 isoform X4) c4(330130) c5( ) c6( ) c7(T, af, bE, aW, aT, bB, n, aeM, bz, X); #c1(SASH1) c2(XP_011533942) c3(SAM and SH3 domain-containing protein 1 isoform X5) c4(330131, 330132) c5(330133, 330134, 330135, 330136, 330137, 330138, 330139, 330140, 330141, 330142, 330143, 330144) c6( ) c7(T, af, bE, aW, aT, bB, n, aeM, bz, X); #c1(SASH3) c2(NP_061863) c3(SAM and SH3 domain-containing protein 3) c4(200847) c5(200848, 200849, 200850, 200851, 200852, 200853) c6( ) c7(gZ, bB, bE); #c1(SASH3) c2(XP_006724826) c3(SAM and SH3 domain-containing protein 3 isoform X1) c4(296445) c5(296446, 296447, 296448, 296449, 296450, 296451) c6( ) c7(gZ, bB, bE); #c1(SAT1) c2(NP_002961) c3(diamine acetyltransferase 1) c4(133945, 133946, 133947, 133948, 133949, 133950, 133951) c5(133952, 133953, 133954, 133955, 133956, 133957, 133958, 133959, 133960, 133961, 133962, 133963, 133964, 133965, 133966, 133967, 133968, 133969, 133970, 133971, 133972, 133973, 133974, 133975, 133976, 133977, 133978, 133979, 133980, 133981) c6( ) c7(bL, NK, T, dD, ea, NT, bO, aA, bB, fd, jh, bS, j, ct, v, eq, Jt, q, cd, ad, akE, av, ft, bgm, aT, IG, bK, K, bUo, ey, he, ae, eL, B, bkf, s, aW, Y, fJ, r, aq, aF, iV, Z, t, bz, GR, hq, vK, amS, cA, ig, bE, eM, MB, m, ei, y, X); #c1(SAT2) c2(NP_597998) c3(diamine acetyltransferase 2) c4(235236, 235237) c5(235238, 235239, 235240, 235241, 235242, 235243, 235244, 235245, 235246, 235247, 235248, 235249) c6( ) c7(T, fR, s, aW, Y, aT, aA, LA, at, dL, ci, Dz, g, B, Qe); #c1(SATB1) c2(NP_001182399) c3(DNA-binding protein SATB1 isoform 2) c4(74875, 74876) c5(74877, 74878, 74879, 74880, 74881, 74882) c6( ) c7(T, AY, eX, NT, jh, aA, fr, ci, q, ad, eA, b, aT, eV, dL, ae, eL, d, aW, ff, cr, r, fe, aq, aF, PQ, en, iR, bz, fs, bP, bE, at, i, bt, B); #c1(SATB1) c2(NP_0029B2) c3(DNA-binding protein SATB1 isoform 1) c4(133982, 133983, 133984, 133985, 13398) c5(133987, 133988, 133989, 133990, 133991, 133992, 133993, 133994, 133995, 133995, 133997) c6( ) c7(T, AY, eX, NT, jh, aA, fr, ci, q, ad, eA, b, aT, eV, dL, ae, eL, d, aW, ff, cr, r, fe, aq, aF, PQ, en, iR, bz, fs, bP, bE, at, i, bt, B); #c1(SATB1) c2(XP_011532292) c3(DNA-binding protein SATB1 isoform X2) c4( ) c5(328403, 328404, 328405, 328406, 328407, 328408, 328409, 328410, 328411, 328412, 328413, 328414, 328415, 328416, 328417, 328418, 328419, 328420, 328421, 328422, 328423, 328424, 328425, 328426, 328427, 328428, 328429, 328430, 328431, 328432) c6( ) c7(T, AY, eX, NT, jh, aA, fr, ci, q, ad, eA, b, aT, eV, dL, a, eL, d, aW, ff, cr, r, fe, aq, aF, PQ, en, iR, bz, fs, bP, bE, at, i, bt, B); #c1(SATB2) c2(XP_005246453) c3(DNA-binding protein SATB2 isoform X2) c4(267149) c5(267150, 267151, 267152, 267153, 267154, 267155) c6( ) c7(cBe, T, oe, ci, nA, q, Na, ft, cBf, cBg, rz, eH, Az, r, Ej, cl, eF, iV, iK, QG, cBd, hL, zu, rA); #c1(SATB2) c2(XP_011509142) c3(DNA-binding protein SATB2 isoform X1) c4(299763) c5(299764, 299765, 299766, 299767, 299768, 299769, 299770, 299771, 299772, 299773, 299774, 299775, 299776, 299777, 299778) c6( ) c7(cBe, T, oe, ci, nA, q, Na, ft, cBf, cBg, rz, eH, Az, r, Ej, cl, eF, iV, iK, QG, cBd, hL, zu, rA); #c1(SATL1) c2(NP_001012998) c3(spermidine/spermine N(1)-acetyltransferase-like protein 1) c4(25415, 25416) c5(25417, 25418, 25419, 25420, 25421, 25422, 25423, 25424, 25425, 25426, 25427, 25428) c6( ) c7(c); #c1(SATL1) c2(XP_011529242) c3(spermidine/spermine N(1)-acetyltransferase-like protein 1 isoform X1) c4(324679) c5(324680, 324681, 324682, 324683, 324684, 324685) c6( ) c7(c); #c1(SAV1) c2(NP_068590) c3(protein salvador homolog 1) c4(209718, 209719) c5(209720, 209721, 209722, 209723, 209724, 209725, 209726, 209727, 209728) c6( ) c7(T, cd, py); #c1(SAV1) c2(XP_011535359) c3(protein salvador homolog 1 isoform X1) c4( ) c5(332410, 332411, 332412, 332413, 332414, 332415) c6( ) c7(T, cd, py); #c1(SBDS) c2(NP_057122) c3(ribosome maturation protein SBDS) c4(188995) c5(188996, 188997, 188998, 188999, 189000, 189001) c6( ) c7(bL, gV, T, aZA, aFQ, if, Am, fd, jh, bs, bBX, cz, afK, bS, j, ct, gf, aVK, v, bB, oY, qN, IR, br, ad, wD, mj, b, CJ, oz, vJ, ds, i, dv, By, K, aKG, H, ae, af, qk, bA, asA, sb, akV, arl, A, hG, Cw, Fm, Y, az, Rj, hl, eZ, ff, hp, en, g, Z, bw, qs, pb, Wt, yd, ck, VJ, bE, U, cj, dW, XD, hh, y, bt, ao, L); #c1(SBF1) c2(NP_002963) c3(myotubularin-related protein 5) c4(133998, 133999) c5(134000, 134001, 134002, 134003, 134004, 134005, 134006, 134007, 134008, 134009, 134010, 134011) c6( ) c7(gU, cBh, ac, ND, Y, bbH, vH, cgl, bU, bX, dr); #c1(SBF1) c2(XP_005261988) c3(myotubularin-related protein 5 isoform XB) c4(277684) c5(277685, 277686, 277687, 277688, 277689, 277690) c6( ) c7(gU, cBh, ac, ND, Y, bbH, vH, cgl, bU, bX, dr); #c1(SBF1) c2(XP_005261992) c3(myotubularin-related protein 5 isoform X7) c4(277691) c5(277692, 277693, 277694, 277695, 277696, 277697) c6( ) c7(gU, cBh, ac, ND, Y, bbH, vH, cgl, bU, bX, dr); #c1(SBF1) c2(XP_011529011) c3(myotubularin-related protein 5 isoform X3) c4( ) c5(324374) c6( ) c7(gU, cBh, ac, ND, Y, bbH, vH, cgl, bU, bX, dr); #c1(SBF2) c2(NP_112224) c3(myotubularin-related protein 13) c4(220964) c5(220965, 220966, 220967, 220968, 220969, 220970) c6( ) c7(DD, cBi, agU, xz, ogJ, bbH, vr, cgl, bU, dw, bX); #c1(SBN01) c2(NP_001161328) c3(protein strawberry notch homolog 1 isoform 1) c4(65603) c5(65604, 65605, 65606, 65607, 65608, 65609) c6( ) c7(hb, ci, eM, Os); #c1(SBN01) c2(NP_060653) c3(protein strawberry notch homolog 1 isoform 2) c4(197008, 197009) c5(197010, 197011, 197012, 197013, 197014, 197015, 197016, 197017, 197018, 197019, 197020, 197021) c6( ) c7(hb, ci, eM, Os); #c1(SBN02) c2(NP_001093592) c3(protein strawberry notch homolog 2 isoform 2) c4(40332, 40333) c5(40334, 40335, 40336, 40337, 40338, 40339, 40340, 40341, 40342, 40343, 40344, 40345) c6( ) c7(fe, iV, ci, eM, MC); #c1(SBN02) c2(NP_055778) c3(protein strawberry notch homolog 2 isoform 1) c4(183456) c5(183457, 183458, 183459, 183460, 183461, 183462) c6( ) c7(fe, iV, ci, eM, MC); #c1(SBSN) c2(NP_00115950B) c3(suprabasin isoform 1 precursor) c4(64177) c5(64178, 64179, 64180, 64181, 64182, 64183) c6( ) c7(bz, qK); #c1(SBSN) c2(NP_001159507) c3(suprabasin isoform 3 precursor) c4(64184) c5(64185, 64186, 64187, 64188, 64189, 64190) c6( ) c7(bz, qK); #c1(SBSN) c2(NP_940940) c3(suprabasin isoform 2 precursor) c4(260151) c5(260152, 260153, 260154, 260155, 260156, 260157) c6( ) c7(bz, qK); #c1(SC5D) c2(NP_008849) c3(lathosterol oxidase) c4(169099) c5(169100, 169101, 169102, 169103, 169104, 169105, 169106, 169107, 169108, 169109) c6( ) c7(Na, ac, hi, nA, y, beW, ae, ad); #c1(SCAF1) c2(NP_067051) c3(splicing factor, arginine/serine-rich 19) c4(208738, 208739) c5(208740, 208741, 208742, 208743, 208744, 208745, 208746, 208747, 208748, 208749, 208750, 208751) c6( ) c7(ck, gk, pr, bE, aW, aNd, axd, al, jx, aT, bB, m, jj, aNe, t, acD, kS, aR); #c1(SCAF1) c2(XP_011525496) c3(splicing factor, arginine/serine-rich 19 isoform X2) c4( ) c5(319889, 319890) c6( ) c7(ck, gk, pr, bE, aW, aNd, axd, al, jx, aT, bB, m, jj, aNe, t, acD, kS, aR); #c1(SCAF11) c2(NP_004710) c3(protein SCAF11) c4( ) c5(148997, 148998, 148999, 149000, 149001, 149002, 149003, 149004, 149005, 149006, 149007, 149008, 149009, 149010) c6( ) c7(T, aAf, Ol, aA, bB, fr, ci, eA, aE, Tf, h, kf, ahE, ff, aq, aF, ahl, en, iK, eM, bE, m, B, hS); #c1(SCAF11) c2(XP_006719755) c3(protein SCAF11 isoform X5) c4(292965) c5( ) c6( ) c7(T, aAf, Ol, aA, bB, fr, ci, eA, aE, Tf, h, kf, ahE, ff, aq, aF, ahl, en, iK, eM, bE, m, B, hS); #c1(SCAF11) c2(XP_011537286) c3(protein SCAF11 isoform X3) c4(334999) c5(335000, 335001, 335002) c6( ) c7(T, aAf, Ol, aA, bB, fr, ci, eA, aE, Tf, h, kf, ahE, ff, aq, aF, ahl, en, iK, eM, bE, m, B, hS); #c1(SCAF4) c2(NP_00113891) c3(splicing factor, arginine/serine-rich 15 isoform 2) c4(58187) c5(58188, 58189, 58190, 58191, 58192, 58193) c6( ) c7(aj, J, vy, sj); #c1(SCAF4) c2(NP_001138917) c3(splicing factor, arginine/serine-rich 15 isoform 3) c4(58194) c5(58195, 58196, 58197, 58198, 58199, 58200, 58201, 58202, 58203, 58204, 58205, 58206) c6( ) c7(aj, J, vy, sj); #c1(SCAF4) c2(NP_065757) c3(splicing factor, arginine/serine-rich 15 isoform 1) c4(205216) c5( ) c6( ) c7(aj, J, vy, sj); #c1(SCAF4) c2(XP_005261074) c3(splicing factor, arginine/serine-rich 15 isoform X3) c4( ) c5(277133) c6( ) c7(aj, J, vy, sj); #c1(SCAF8) c2(NP_001273118) c3(protein SCAF8 isoform b) c4(104328) c5( ) c6( ) c7(bM, bK); #c1(SCAF8) c2(NP_055707) c3(protein SCAF8 isoform d) c4(182959) c5(182960, 182961, 182962, 182963, 182964, 182965, 182966, 182967, 182968, 182969, 182970, 182971, 182972, 182973, 182974, 182975) c6( ) c7(bM, bK); #c1(SCAI) c2(NP_001138349) c3(protein SCAI isoform 2) c4(56241) c5(5B642, 56243, 56244, 56245, 56246, 56247) c6( ) c7(aW, T, Hb, aT); #c1(SCAI) c2(NP_775961) c3(protein SCAI isoform 1) c4(250838) c5(250839, 250840, 250841, 250842, 250843, 250844) c6( ) c7(aW, T, Hb, aT); #c1(SCAMP2) c2(NP_005688) c3(secretary carrier-associated membrane protein 2) c4(158572, 158573) c5(158574, 158575, 158576, 158577, 158578, 158579, 158580, 158581, 158582, 158583, 158584, 158585) c6( ) c7(FE, Jt); #c1(SCAMP5) c2(XP_006720483) c3(secretary carrier-associated membrane protein 5 isoform X2) c4(293524) c5(293525, 293526) c6( ) c7(bN); #c1(SCAMP5) c2(XP_011519618) c3(secretary carrier-associated membrane protein 5 isoform X1) c4( ) c5(314285, 314286, 314287, 314288, 314289, 314290, 314291, 314292) c6( ) c7(bN); #c1(SCAMP5) c2(XP_011519619) c3(secretary carrier-associated membrane protein 5 isoform X3) c4(314293) c5(314294, 314295, 314296, 314297, 314298, 314299) c6( ) c7(bN); #c1(SCAP) c2(NP_036367) c3(sterol regulatory element-binding protein cleavage-activating protein) c4(173275, 173276, 173277, 173278) c5(173279, 173280, 173281, 173282, 173283, 173284, 173285) c6( ) c7(dD, af, cH, ea, aw, gZ, Zv, v, j, K, eq, bq, dQ, dF, B); #c1(SCAP) c2(XP_005265024) c3(sterol regulatory element-binding protein cleavage-activating protein isoform X2) c4(279346, 279347, 279348) c5(279349, 279350, 279351, 279352, 279353, 279354, 279355, 279356, 279357, 279358, 279359, 279360, 279361, 279362, 279363, 279364, 279365, 279366, 279367, 279368, 279369, 279370, 279371, 279372, 279373) c6( ) c7(dD, af, cH, ea, aw, gZ, Zv, v, j, K, eq, bq, dQ, dF, B); #c1(SCAP) c2(XP_005265026) c3(sterol regulatory element-binding protein cleavage-activating protein isoform X4) c4(279374, 279375) c5(279376, 279377, 279378, 279379, 279380, 279381, 279382, 279383, 279384, 279385, 279386) c6( ) c7(dD, af, cH, ea, aw, gZ, Zv, v, j, K, eq, bq, dQ, dF, B); #c1(SCAP) c2(XP_005265029) c3(sterol regulatory element-binding protein cleavage-activating protein isoform X7) c4( ) c5(279387, 279388, 279389, 279390, 279391, 279392, 279393, 279394, 279395, 279396, 279397) c6( ) c7(dD, af, cH, ea, aw, gZ, Zv, v, j, K, eq, bq, dQ, dF, B); #c1(SCAPER) c2(NP_001139395) c3(S phase cyclin A-associated protein in the endoplasmic reticulum isoform b) c4(59281) c5(59282, 59283, 59284, 59285, 59286) c6( ) c7(Hr, zv, W, nA, iW); #c1(SCAPER) c2(NP_065894) c3(S phase cyclin A-associated protein in the endoplasmic reticulum isoform a) c4(206117) c5(206118, 206119, 206120, 206121, 206122, 206123, 206124, 206125, 206126, 206127, 206128) c6( ) c7(Hr, zv, W, nA, iW); #c1(SCAPER) c2(XP_011519950) c3(S phase cyclin A-associated protein in the endoplasmic reticulum isoform X2) c4( ) c5(314772) c6( ) c7(Hr, zv, W, nA, iW); #c1(SCAPER) c2(XP_011519954) c3(S phase cyclin A-associated protein in the endoplasmic reticulum isoform X6) c4(314773) c5(314774, 314775, 314776, 314777, 314778, 314779) c6( ) c7(Hr, zv, W, nA, iW); #c1(SCARA3) c2(NP_057324) c3(scavenger receptor class A member 3 isoform 1) c4(190142) c5(190143, 190144, 190145, 190146, 190147, 190148) c6( ) c7(ao T, dD, ib, AO, aW, hT, Of, aT, fd, n, Og, eq, ci, K, m, ey, t, bz, ad); #c1(SCARA3) c2(NP_878185) c3(scavenger receptor class A member 3 isoform 2) c4(257049) c5(257050, 257051, 257052, 257053, 257054, 257055) c6( ) c7(ao. T, dD, ib, AO, aW, hT, Of, aT, fd, n, Og, eq, ci, K, m, ey, t, bz, ad); #c1(SCARA5) c2(NP_776194) c3(scavenger receptor class A member 5) c4(250970, 250971, 250972, 250973) c5(250974, 250975, 250976, 250977, 250978, 250979, 250980, 250981, 250982, 250983, 250984, 250985, 250986, 250987, 250988, 250989, 250990, 250991, 250992, 250993, 250994, 250995, 250996, 250997, 250998, 250999, 251000, 251001) c6( ) c7(T, B); #c1(SCARB1) c2(NP_001076428) c3(scavenger receptor class B member 1 isoform 2) c4(37390) c5(37391, 37392, 37393, 37394, 37395, 37396, 37397, 37398, 37399, 37400, 37401, 37402, 37403, 37404, 37405, 37406, 37407, 37408, 37409, 37410, 37411, 37412, 37413, 37414, 37415, 37416, 37417, 37418, 37419, 37420) c6( ) c7(bL, gh, T, dD, dA, fR, eR, ea, e, jx, aw, aj, v, j, ci, bX, eq, fr, zP, J, cBj, cF, Zu, aT, iv, h, dL, K, dQ, anN, aXa, af, zQ, s, cH, aW, ff, Bw, bbs, cu, Pp, en, jb, es, W, ky, gZ, at, oh, acl); #c1(SCARB1) c2(NP_005496) c3(scavenger receptor class B member 1 isoform 1) c4(156794, 156795, 156796, 156797, 156798, 156799, 156800) c5(156801, 156802, 156803, 156804, 156805, 156806, 156807, 156808, 156809, 156810, 156811, 156812, 156813, 156814, 156815, 156816, 156817, 156818) c6( ) c7(bL, gh, T, dD, dA, fR, eR, ea, e, jx, aw, aj, v, j, ci, bX, eq, fr, zP, J, cBj, cF, Zu, aT, iv, h, dL, K, dQ, anN, aXa, af, zQ, s, cH, aW, ff, Bw, bbs, cu, Pp, en, jb, es, W, ky, gZ, at, oh, acl); #c1(SCARB2) c2(NP_001191184) c3(lysosome membrane protein 2 isoform 2 precursor) c4(81094) c5(81095, 81096, 81097, 81098, 81099, 81100) c6( ) c7(vU, bM, yr, co, agT, aYb, agU, ha, U, fP, oz, yZ, lo, ah, as, an, yU, aY, ae, cd, ad); #c1(SCARB2) c2(NP_005497) c3(lysosome membrane protein 2 isoform 1 precursor) c4(156819) c5(156820, 156821, 156822, 156823, 156824, 156825) c6( ) c7(vU, bM, yr, cc, agT, aYb, agU, ha, U, fP, cz, yZ, lo, ah, as, an, yU, aY, ae, cd, ad); #c1(SCARF2) c2(NP_699165) c3(scavenger receptor class F member 2 isoform 1 precursor) c4( ) c5(245779, 245780, 245781, 245782, 245783, 245784) c6( ) c7(cBk, bX); #c1(SCARF2) c2(NP_878315) c3(scavenger receptor class F member 2 isoform 2 precursor) c4(257099, 257100, 257101) c5(257102, 257103, 257104, 257105, 257106, 257107, 257108, 257109, 257110, 257111, 257112, 257113, 257114, 257115, 257116, 257117, 257118, 257119, 257120, 257121) c6(257122, 257123, 257124) c7(cBk, bX); #c1(SCCPDH) c2(NP_057086) c3(saccharapine dehydrogenase-like oxidoreductase) c4(188862, 188863) c5(188864, 188865, 188866, 188867, 188868, 188869, 188870, 188871, 188872, 188873, 188874, 188875) c6( ) c7(aw); #c1(SCD) c2(NP_005054) c3(acyl-CoA desaturase) c4(152468, 152469) c5(152470, 152471, 152472, 152473, 152474, 152475, 152476, 152477, 152478, 152479, 152480, 152481) c6( ) c7(bL, T, dO, qb, ea, o, ow, aA, rf, n, aj, bS, j, ct, ci, v, eq, zP, Eh, Fb, J, ad, mP, fim, aT, jy, vc, bci, dL, K, qM, ae, af, HO, eL, mu, A, zQ, B, aW, fc, dq, aq, aF, g, du, Z, t, aot, bz, c, Fi, m, pw, oQ, ei, gq); #c1(SCD5) c2(NP_001032671) c3(stearnyl-CoA desaturase 5 isoform a) c4(31411) c5(31412, 31413, 31414, 31415, 31416, 31417) c6( ) c7(mR, oz, aw, eZ, h, ci, y, af); #c1(SCD05) c2(NP_079182) c3(stearoyl-CoA desaturase 5 isoform b) c4(217319, 217320) c5(217321, 217322, 217323, 217324, 217325, 217326, 217327, 217328, 217329, 217330, 217331, 217332) c6( ) c7(mR, oz, aw, eZ, h, ci, y, af); #c1(SCFD1) c2(NP_001244305) c3(sec1 family domain-containing protein 1 isoform c) c4(92115) c5( ) c6( ) c7(I, T); #c1(SCFD1) c2(NP_001269961) c3(sec1 family domain-containing protein 1 isoform e) c4(103288) c5(103289, 103290, 103291, 103292, 103293, 103294) c6( ) c7(I, T); #c1(SCFD1) c2(NP_057190) c3(sec1 family domain-containing protein 1 isoform a) c4(189356, 189357, 189358) c5(189359, 189360, 189361, 189362, 189363, 189364, 189365, 189366, 189367, 189368, 189369, 189370, 189371, 189372, 189373, 189374, 189375, 189376, 189377, 189378, 189379, 189380, 189381, 189382) c6( ) c7(IG, T); #c1(SCFD2) c2(NP_B89753) c3(seol family domain-containing protein 2) c4(243859, 243860) c5(243861, 243862, 243863, 243864, 243865, 243866, 243867, 243868, 243869, 243870, 243871, 243872) c6( ) c7(fq, ajP, Ea, oQ); #c1(SCG2) c2(NP_003460) c3(secretogranin-2 precursor) c4(138484, 138485, 138486, 138487) c5(138488, 138489, 138490, 138491, 138492, 138493, 138494, 138495, 138496, 138497, 138498, 138499, 138500, 138501, 138502, 138503, 138504, 138505, 138506, 138507, 138508, 138509, 138510, 138511) c6( ) c7(T, qX, aw, cz, aj, j, V, re, od, J, pX, cy, K, dx, if, iF, LC, Y, hp, g, cm, ac, C, y); #c1(SCG3) c2(NP_001158729) c3(secretogranin-3 isoform 2) c4(63736, 63737) c5(63738, 63739, 63740, 63741, 63742, 63743, 63744, 63745, 63746, 63747) c6( ) c7(bM, T, B, Uc, s, v, cm, af); #c1(SCG3) c2(NP_037375) c3(secretogranin-3 isoform 1 precursor) c4(175104) c5(175105, 175106, 175107, 175108, 175109, 175110, 175111, 175112) c6( ) c7(bM, T, B, Uc, s, v, cm, af); #c1(SCG5) c2(NP_001138229) c3(neuroendncrine protein 7B2 isoform 1 precursor) c4(56070) c5(56071, 56072, 56073, 56074, 56075, 56076, 56077, 56078) c6(56079, 56080) c7(jf, ft, AB, d, oe, qy, r, Ja, mf, m, bz, as, eA, t, cBI, q); #c1(SCG5) c2(NP_003011) c3(neuroendncrine protein 7B2 isoform 2 precursor) c4(134421) c5(134422, 134423, 134424, 134425, 134426, 134427, 134428, 134429) c6(134430, 134431) c7(jf, ft, AB, d, oe, qy, r, Ja, mf, m, bz, as, eA, t, cBI, q); #c1(SCGB1A1) c2(NP_003348) c3(uteroglobin precursor) c4(137694) c5(137695, 137696, 137697, 137698, 137699, 137700) c6( ) c7(bL, bM, T, Dw, JN, eR, fR, sQ, z, dM, fG, cz, fF, BH, j, ci, uE, zo, ad, Vs, av, cF, jz, aFh, apJ, aT, Ds, JK, ey, IQ, uN, aDZ, cBm, ae, eu, aa, uQ, s, aW, sp, mQ, eZ, g, t, cM, bz, baf, zV, DF, bwd, kT, cT, ac, JA, dB, hc, Ny, AM, Ei, hL, JM, uo, E, ut, uJ, dy, m, fD, at, y, qR, iu, aDj); #c1(SCGB1D1) c2(NP_006543) c3(secretoglobin family 1D member 1 precursor) c4(166119) c5(1661120, 166121, 166122, 166123, 166124, 166125, 166126) c6(166127) c7(ej, W, e, aw, ff, cR, h, v, j, aEN, en, g, aKB, hX); #c1(SCGB1D2) c2(NP_006542) c3(secretoglobin family 1D member 2 precursor) c4(166110) c5(166111, 166112, 166113, 166114, 166115, 166116, 166117) B(1166118) c7(T, yo, aW, aT, cz, hR, ci, m, Dz, t); #c1(SCGB2A1) c2(NP_002398) c3(mammaglobin-B precursor) c4(128099) c5(128100, 128101, 128102, 128103, 128104, 128105) c6( ) c7(T, aA, bB, ci, q, jz, aT, MO, aW, Y, r, aq, aF, g, cl, t, bXI, bE, avk, hL, m, B); #c1(SCGB2A2) c2(NP_002402) c3(mammaglobin-A precursor) c4(128120) c5(28121, 128122, 128123, 128124, 128125, 128126) c6(128127) c7(av, T, W, aW, if, aT, n, ci, m, qN, g, t); #c1(SCGB2A2) c2(XP_0052740B2) c3(mammaglobin-A isoform X1) c4(284918) c5(284919, 284920, 284921, 284922, 284923, 284924, 284925, 284926, 284927) c6( ) c7(av, T, W, aW, if, aT, n, ci, m, qN, g, t); #c1(SCGB2B2) c2(NP_00102072) c3(secretoglobin family 2B member 2 precursor) c4(28997) c5(28998, 28999, 29000, 29001, 29002, 29003, 29004, 29005, 29006, 29007) c6(29008, 29009) c7(oe); #c1(SCGB2B2) c2(XP_011525138) c3(seoretoglobin family 2B member 2 isoform X1) 4( ) c5(319577, 319578) c6( ) c7(oe); #c1(SCGB3A1) c2(NP_443095) c3(secretoglobin family 3A member 1 precursor) c4(229377) c5(229378, 229379, 229380, 229381, 229382, 229383) c6( ) c7(T, jh, ci, ad, dP, by, av, ft, Xc, ds, aT, s, aW, Lf, ff, en, bu, g, cm, bz, ck, bF, kP, eM, bP, bt); #c1(SCGB3A2) c2(NP_473364) c3(secretoglobin family 3A member 2 precursor) c4(230403) c5(230404, 230405, 230406, 230407, 230408, 230409) c6( ) c7(bM, z, fG, sp, aCx, hD, zV, fD, pM, ao); #c1(SCGN) c2(NP_008929) c3(secretagagin) c4(16913, 169614) c5(1696615, 169616, 169617, 169618, 169619, 169620, 169621, 169622, 169623, 169624, 169625, 169626, 169627, 169628, 169629) c6(169630, 169631, 169632) c7(hR, yo, nn, q, r); #c1(SCHIP1) c2(NP_00118403B) c3(schwannomin-interacting protein 1 isoform 2) c4(75292) c5(75293, 75294, 75295, 75296, 75297, 75298) c6( ) c7(bF, rQ, py, hp, rP); #c1(SCHIP1) c2(NP_001184037) c3(schwannomin-interacting protein 1 isoform 3) c4(75299) c5(75300, 75301, 75302, 75303, 75304, 75305) c6( ) c7(bF, rQ, py, hp, rP); #c1(SCHIP1) c2(NP_001184038) c3(schwannomin-interacting protein 1 isoform 4) c4(7530B) c5(75307, 75308, 75309, 75310, 75311, 75312, 75313, 75314, 75315, 75316, 75317, 75318) c6( ) c7(bF, rQ, py, hp, rP); #c1(SCHIP1) c2(NP_05539) c3(schwannomin-interacting protein 1 isoform 1) c4(180739) c5(180740, 180741, 180742, 180743, 180744, 180745) c6( ) c7(bF, rQ, py, hp, rP); #c1(SCIN) c2(NP_001106177) c3(adseverin isoform 1) c4(42329, 42330) c5(42331, 42332, 42333, 42334, 42335, 42336, 42337, 42338, 42339, 42340, 42341, 42342, 42343, 42344, 42345, 42346) c6( ) c7(iY, ae, cd, ad); #c1(SCLT1) c2(NP_00128782B) c3(sodium channel and clathrin linker 1 isoform 2) c4( ) c5(112931, 112932, 112933, 112934, 112935, 112936) c6( ) c7(AK, pi, Zf, bez, rS, dV, r, wR, vm, CZ, C, Za, q, ahD); #c1(SCLT1) c2(NP_001287827) c3(sodium channel and clathrin linker 1 isoform 3) c4( ) c5(112937, 112938, 112939, 112940, 112941, 112942) c6( ) c7(AK, pi, Zf, bez, rS, dV, r, wR, vm, CZ, C, Za, q, ahD); #c1(SCLT1) c2(NP_B53244) c3(sodium channel and clathrin linker 1 isoform 1) c4(239302, 239303, 239304) c5(239305, 239306, 239307, 239308, 239309, 239310) c6( ) c7(AK, pi, Zf, bez, rS, dV, r, wR, vm, CZ, C, Za, q, ahD); #c1(SCLT1) c2(XP_011529894) c3(sodium channel and clathrin linker 1 isoform X1) c4(325657) c5( ) c6( ) c7(AK, pi, Zf, bez, rS, dV, r, wR, vm, CZ, C, Za, q, ahD); #c1(SCLT1) c2(XP_011529895) c3(sodium channel and clathrin linker 1 isoform X2) c4( ) c5(325658, 325659, 325660, 325661, 325662, 325663) c6( ) c7(AK, pi, Zf, bez, rS, dV, r, wR, vm, CZ, C, Za, q, ahD); #c1(SCLY) c2(NP_057594) c3(selenocysteine lyase) c4(191495, 191495, 191497, 191498, 191499, 191500) c5(191501, 191502, 191503, 191504, 191505, 191506, 191507, 191508, 191509, 191510, 191511, 191512, 191513, 191514, 191515, 191516, 191517, 191518, 191519, 191520, 191521, 191522, 191523, 191524, 191525, 191526, 191527, 191528, 191529, 191530, 191531, 191532, 191533, 191534, 191535, 191536) c6( ) c7(bdo, T, fM, dA, cbF, iW, oA, bcE, gf, bS, ct, ci, v, hF, aQF, wD, x, PW, qh, aql, kH, hn, K, bXV, iL, je, Y, ff, apK, en, Eg, Z, pb, hq, nk, rR, iM, iT, pg, dW, zv, k, adg, y, bt, B); #c1(SCML2) c2(NP_00080) c3(sex comb on midleg-like protein 2) c4(161751) c5(161752, 161753, 161754, 161755, 161755, 161757, 161758) c6( ) c7(jf); #c1(SCML2) c2(XP_006724521) c3(sex comb on midleg-like protein 2 isoform X3) c4(295990, 295991, 295992) c5(295993, 295994, 295995, 295996, 295997, 295998, 295999, 296000, 296001, 296002, 296003, 296004, 296005, 296006, 296007, 296008, 296009, 296010) c6( ) c7(jf); #c1(SCML4) c2(NP_932347) c3(sex comb on midleg-like protein 4 isoform a) c4(258973) c5(258974, 258975, 258976, 258977, 258978) c6( ) c7(fq); #c1(SCML4) c2(XP_011534003) c3(sex comb on midleg-like protein 4 isoform X6) c04( ) c5(330177, 330178) c6( ) c7(fq); #c1(SCML4) c2(XP_011534006) c3(sex comb on midleg-like protein 4 isoform X8) c4(330179) c5(330180, 330181, 330182, 330183, 330184, 330185) c6( ) c7(fq); #c1(SCN10A) c2(NP_006505) c3(sodium channel protein type 10 subunit alpha isoform 1) c4(16588) c5(165869, 165870, 165871, 165872, 165873, 165874) c6( ) c7(bM, cZ, cBn, T, akd, mr, aW, wL My, cV, EQ, aT, ajM, xH, fu, dd, asT, cm, bt, cmk, aZQ); #c1(SCN11A) c2(XP_011531622) c3(sodium channel protein type 11 subunit alpha isoform X1) c4(327767, 327768) c5(327769, 327770, 327771, 327772, 327773, 327774, 327775, 327776, 327777, 327778, 327779, 327780, 327781, 327782, 327783) c6( ) c7(dP, ae, Y, cBo, cBp, fu, bX, cmk, ad); #c1(SCN1A) c2(NP_001159435) c3(sodium channel protein type 1 subunit alpha isoform 1) c4(64026) c5(64027, 64028, 64029, 64030, 64031, 64032, 64033, 64034, 64035, 64036) c6( ) c7(T, if, oe, ha, EQ, cV, Ir, n, iD, ur, ci, akg, C, byV, FR, uu, qN, q, aR, cBw, iI, Sw, cBt, hb, nX, HX, Im, hg, Tj, ckC, cC, cB, yr, XK, VX, cBu, ff, r, cm, agF, Ia, n, g, MV, t, kC, cBr, xw, akq, cBq, bN, bFf, bdW, wQ, Cq, pa, yX, cBs, akm, HN, cBv, avI, m, xg, gD); #c1(SCN1A) c2(NP_00115943B) c3(sodium channel protein type 1 subunit alpha isoform 3) c4(64037) c5(64038, 64039, 64040, 64041, 64042, 64043) c6( ) c7(T, if, oe, ha, EQ, cV, Ir, n, iD, ur, ci, akg, C, byV, FR, uu, qN, q, aR, cBw, iI, Sw, cBt, hb, nX, HX, Im, hg, Tj, ckC, cC, cB, yr, XK, VX, cBu, ff, r, cm, agF, Ia, n, g, MV, t, kC, cBr, xw, akq, cBq, bN, bFf, bdW, wQ, Cq, pa, yX, cBs, akm, HN, cBv, avI, m, xg, gD); #c1(SCN1A) c2(NP_008851) c3(sodium channel protein type 1 subunit alpha isoform 2) c4(169117) c5(169118, 169119, 169120, 169121, 169122, 169123) c6( ) c7(T, if, oe, ha, EQ, cV, Ir, n, iD, ur, ci, akg, C, byV, FR, uu, qN, q, aR, cBw, iI, Sw, cBt, hb, nX, HX, Im, hg, Tj, ckC, cC, cB, yr, XK, VX, cBu, ff, r, cm, agF, Ia, en, g, MV, t, kC, cBr, xw, akq, cBq, bN, bFf, bdW, w, Cq, pa, yX, cBs, akm, HN, cBv, avI, m, xg, gD); #c1(SCN1B) c2(NP_001028) c3(sodium channel subunit beta-1 isoform a precursor) c4(30717) c5( ) c6( ) c7(bL, iI, akq, yr, aW, wL, ha, HN, aT, ajM, cBy, hg, EZ, byV, cBz, cBx); #c1(SCN1B) c2(NP_950238) c3(sodium channel subunit beta-1 isoform b precursor) c4(260906) c5(260907, 260908, 260909, 260910, 260911, 260912) c6( ) c7(bL, iI, akq, yr, aW, wL, ha, HN, aT, ajM, cBy, hg, EZ, byV, cBz, cBx); #c1(SCN2A) c2(XP_00524BB07) c3(sodium channel protein type 2 subunit alpha isoform X1) c4(267437, 267438) c5(267439, 267440, 267441, 267442, 267443, 267444, 267445, 267446, 267447, 267448, 267449, 267450, 267451, 267452, 267453, 267454) c6( ) c7(cBA, if, ha, Ir, rf, j, nA, bX, byV, FR, qN, iI, cBC, cBB, cBD, Im, hg, an, akr, yr, cBE, akq, bN, Cq, avI, WI); #c1(SCN2A) c2(XP_00524810) c3(sodium channel protein type 2 subunit alpha isoform X2) c4(267455) c5(267456, 267457, 267458, 267459, 267460, 267461, 267462, 267463, 267464, 267465) c6( ) c7(cBA, if, ha, Ir, rf, j, nA, bX, byV, FR, qN, iI, cBC, cBB, cBD, Im, hg, an, akr, yr, cBE, akq, bN, Cq, avI, WI); #c1(SCN2B) c2(NP_004579) c3(sodium channel subunit beta-2 precursor) c4(147859) c5(147860, 147861, 147862, 147863, 147864, 147865) c6( ) c7(cBF, wL, ha, avI, ajM, zo); #c1(SCN3A) c2(NP_001075145) c3(sodium channel protein type 3 subunit alpha isoform 2) c4(3724G) c5(37247, 37248, 37249, 37250, 37251, 37252) c6( ) c7(acf, ha, Ir, cBG, nA, asT, bN); #c1(SCN3A) c2(NP_00107514G) c3(sodium channel protein type 3 subunit alpha isoform 3) c4(37253) c5(37254, 37255, 37256, 37257, 37258, 37259) c6( ) c7(acf, ha, Ir, cBG, nA, asT, bN); #c1(SCN3A) c2(NP_008853) c3(sodium channel protein type 3 subunit alpha isoform 1) c4(169124) c5(169125, 169126, 169127, 169128, 169129, 169130) c6( ) c7(acf, ha, Ir, cBG, nA, asT, bN); #c1(SCN3A) c2(XP_011509913) c3(sodium channel protein type 3 subunit alpha isoform X2) c4(300483) c5(300484, 300485, 300486, 300487, 300488, 300489) c6( ) c7(acf, ha, Ir, cBG, nA, asT, bN); #c1(SCN3A) c2(XP_011509915) c3(sodium channel protein type 3 subunit alpha isoform X4) c4(300490) c5(300491, 300492, 300493, 300494, 300495, 30049) c6( ) c7(acf, ha, Ir, cBG, nA, asT, bN); #c1(SCN3A) c2(XP_01150991B) c3(sodium channel protein type 3 subunit alpha isoform X5) c4(300497) c5(300498, 300499, 300500, 300501, 300502, 300503) c6( ) c7(acf, ha, Ir, cBG, nA, asT, bN); #c1(SCN3B) c2(XP_011541199) c3(sodium channel subunit beta-3 isoform X1) c4(339813, 339814) c5(339815, 33981, 339817, 339818, 339819, 339820, 339821, 339822, 339823, 339824, 339825, 339826, 339827, 339828, 339829, 339830, 339831, 339832, 339833, 339834) c6( ) c7(arD, wL ajM, cBH, tO); #c1(SCN4A) c2(NP_000325) c3(sodium channel protein type 4 subunit alpha) c4(7138) c5(7139, 7140, 7141, 7142, 7143, 7144) c6( ) c7(T, mr, if, cV, bIp, aPI, bX, qN, no, aEX, Ig, bud, ayH, oj, Ak, bU, HY, IW, aUx, cBI, bw, aLY, HT, dR, IJ, xA, W, ayI, bNi, aOB, cBK, bmE, bt, cBJ); #c1(SCN4B) c2(NP_001135820) c3(sodium channel subunit beta-4 isoform 2) c4(53341) c5(53342, 53343, 53344, 53345, 53346, 53347, 53348) c6( ) c7(cBL, wL, HO, mu); #c1(SCN4B) c2(NP_777594) c3(sodium channel subunit beta-4 isoform 1 precursor) c4(251284) c5(251285, 251285, 251267, 251288, 251289, 251290, 251291, 251292) c6( ) c7(cBL, wL, HO, mu); #c1(SCN5A) c2(NP_00032B) c3(sodium channel protein type 5 subunit alpha isoform b) c4(7145) c5(7146, 7147, 7148, 7149, 7150, 7151, 7152, 7153, 7154, 7155) c6( ) c7(bL, cBS, oZ, bHI, T, cBR, mr, cBP, wL, e, aw, EQ, cV, arD, n, bMY, bB, j, ew, fd, atN, ajM, Mk, cBQ, tO, cCa, cBT, cBY, cd, cc, cBZ, Ig, sN, vJ, gq, aT, cy, cBO, adm, K, dd, bHm, HO, hm, mu, ajV, eu, A, anR, cBW, aW, bdv, cBV, cBM, cBN, dg, EZ, Jk, Z, bUw, cM, vo, bfW, dr, cBU, cBX, wK, bE, bNi, bVf, Ji, mx, gZ, bUH, QF, bmE, bii, ra, cBz, rf); #c1(SCN5A) c2(NP_001092874) c3(sodium channel protein type 5 subunit alpha isoform c) c4(39675) c5(3976, 3977, 39678, 3979, 3980, 39681) c6( ) c7(bL, cBS, cZ, bHI, T, cBR, mr, cBP, wL, e, aw, EQ, cV, arD, n, bMY, bB, j, ew, fd, atN, ajM, Mk, cBQ, tO, cCa, cBT, cBY, cd, cc, cBZ, Ig, sN, vJ, gq, aT, cy, cBO, adm, K, dd, bHm, HO, hm, mu, ajV, eu, A, anR, cBW, aW, bdv, cBV, cBM, cBN, dg, EZ, Jk, Z, bUw, cM, vo, bfW, dr, cBU, cBX, wK, bE, bNi, bVf, Ji, mx, gZ, bUH, QF, bmE, bii, ra, cBz, rf); #c1(SCN5A) c2(NP_001092875) c3(sodium channel protein type 5 subunit alpha isoform d) c4(39862) c5(39683, 39684, 39685, 39686, 39687, 39688, 39689, 39690, 39691, 39592) c6( ) c7(bL, cBS, oZ, bHI, T, cBR, mr, cBP, wL, e, aw, EQ, cV, arD, n, bMY, bB, j, ew, fd, atN, ajM, Mk, cBQ, tO, cCa, cBT, cBY, cd, cc, cBZ, Ig, sN, vJ, gq, aT, cy, cBO, adm, K, dd, bHm, HO, hm, mu, ajV, eu, A, anR, cBW, aW, bdv, cBV, cBM, cBN, dg, EZ, Jk, Z, bUw, cM, vo, bfW, dr, cBU, cBX, wK, bE, bNi, bVf, Ji, mx, gZ, bUH, QF, bmE, bii, ra, cBz, rf); #c1(SCN5A) c2(NP_001153632) c3(sodium channel protein type 5 subunit alpha isoform e) c4(60792) c5(60793, 60794, 60795, 60796, 60797, 60798, 60799) c6( ) c7(bL, cBS, cZ, bHI, T, cBR, mr, cBP, wL, e, aw, EQ, cV, arD, n, bMY, bB, j, ew, fd, atN, ajM, Mk, cBQ, tO, cCa, cBT, cBY, cd, cc, cBZ, Ig, sN, vJ, gq, aT, cy, cBO, adm, K, dd, bHm, HO, hm, mu, ajV, eu, A, anR, cBW, aW, bdv, cBV, cBM, cBN, dg, EZ, Jk, Z, bUw, cM, vo, bfW, dr, cBU, cBX, wK, bE, bNi, bVf, Ji, mx, gZ, bUH, QF, bmE, bii, ra, cBz, rf); #c1(SCN5A) c2(NP_001153633) c3(sodium channel protein type 5 subunit alpha isoform f) c4(60800, 60801, 60802) c5(60803, 60804, 60805, 60806, 60807, 60808, 60809, 60810, 60811, 60812, 60813, 60814, 60815, 60816, 60817, 60818, 60819, 60820, 60821, 60822, 60823, 60824) c6( ) c7(bL, cBS, cZ, bHI, T, cBR, mr, cBP, wL, e, aw, EQ, cV, arD, n, bMY, bB, j, ew, fd, atN, ajM, Mk, cBQ, tO, cCa, cBT, cBY, cd, cc, cBZ, Ig, sN, vJ, gq, aT, cy, cBO, adm, K, dd, bHm, HO, hm, mu, ajV, eu, A, anR, cBW, aW, bdv, cBV, cBM, cBN, dg, EZ, Jk, Z, bUw, cM, vo, bfW, dr, cBU, cBX, wK, bE, bNi, bVf, Ji, mx, gZ, bUH, QF, bmE, bii, ra, cBz, rf); #c1(SCN5A) c2(XP_006713345) c3(sodium channel protein type 5 subunit alpha isoform X1) c4(287147) c5(287148, 287149, 287150, 287151, 287152, 287153, 287154) c6( ) c7(bL, cBS, cZ, bHI, T, cBR, mr, cBP, wL, e, aw, EQ, cV, arD, n, bMY, bB, j, ew, fd, atN, ajM, Mk, cBQ, tO, cCa, cBT, cBY, cd, cc, cBZ, Ig, sN, vJ, gq, aT, cy, cBO, adm, K, dd, bHm, HO, hm, mu, ajV, eu, A, anR, cBW, aW, bdv, cBV, cBM, cBN, dg, EZ, Jk, Z, bUw, cM, vo, bfW, dr, cBU, cBX, wK, bE, bNi, bVf, Ji, mx, gZ, bUH, QF, bmE, bii, ra, cBz, rf); #c1(SCN5A) c2(XP_011532294) c3(sodium channel protein type 5 subunit alpha isoform X3) c4(328433) c5(328434, 328435, 328436, 328437, 328438, 328439) c6( ) c7(bL, cBS, cZ, bHI, T, cBR, mr, cBP, wL, e, aw, EQ, cV, arD, n, bMY, bB, j, ew, fd, atN, ajM, Mk, cBQ, tO, cCa, cBT, cBY, cd, cc, cBZ, Ig, sN, vJ, gq, aT, cy, cBO, adm, K, dd, bHm, HO, hm, mu, ajV, eu, A, anR, cBW, aW, bdv, cBV, cBM, cBN, dg, EZ, Jk, Z, bUw, cM, vo, bfW, dr, cBU, cBX, wK, bE, bNi, bVf, Ji, mx, gZ, bUH, QF, bmE, bii, ra, cBz, rf); #c1(SCN7A) c2(NP_002967) c3(sodium channel protein type 7 subunit alpha) c4(134051, 134052, 134053) c5(134054, 134055, 134056, 134057, 134058, 134059, 134060, 134061, 134062, 134063, 134064, 134065, 134066, 134067, 134068, 134069, 134070, 134071, 134072, 134073, 134074, 134075, 134076) c6( ) c7(jf, iF, IE, c, th, Yc, ha, awd, KW, cz, aAh, aur, jN, ww, ajM, bw, il, cm, dx, bN); #c1(SCN8A) c2(NP_001171455) c3(sodium channel protein type 8 subunit alpha isoform 2) c4(70133, 70134) c5(70135, 70136, 70137, 70138, 70139, 70140, 70141, 70142, 70143, 70144, 70145, 70146, 70147, 70148, 70149, 70150, 70151, 70152) c6( ) c7(if, ha, bS, nA, qN, V, cd, aR, eA, Gt, ec, ry, aU, h, aPe, Im, bK, an, he, cB, jf, yr, acR, ih, dq, xw, Iv, cCb, vK, BU, qe, ky, cCc, xD, In, U, uJ, AG, ER, R, zB, xg); #c1(SCN8A) c2(NP_055006) c3(sodium channel protein type 8 subunit alpha isoform 1) c4(178312, 178313) c5(178314, 178315, 178316, 178317, 178318, 178319) c6( ) c7(if, ha, bS, nA, qN, V, cd, aR, eA, Gt, ec, ry, aU, h, aPe, Im, bK, an, he, cB, jf, yr, acR, ih, dq, xw, Iv, cCb, vK, BU, qe, ky, cCc, xD, In, U, uJ, AG, ER, R, zB, xg); #c1(SCN8A) c2(XP_011536953) c3(sodium channel protein type 8 subunit alpha isoform X1) c4(334634) c5(334635, 334636, 334637, 334638, 334639, 334640) c6( ) c7(if, ha, bS, nA, qN, V, cd, aR, eA, Gt, ec, ry, aU, h, aPe, Im, bK, an, he, cB, jf, yr, acR, ih, dq, xw, Iv, cCb, vK, BU, qe, ky, cCc, xD, In, U, uJ, AG, ER, R, zB, xg); #c1(SCN9A) c2(NP_002968) c3(sodium channel protein type 9 subunit alpha) c4(134077) c5( ) c6( ) c7(cZ, aFa, vE, cCf, ha, cCd, cV, bAp, cCe, fu, Ge, ad, aTT, aT, HX, dd, asT, an, ae, aZQ, na, aW, bNA, cCg, aPm, gu, vo, cmk, dr, ccT, eM, xD, bNi, xZ, aqH, uJ, bNy); #c1(SCN9A) c2(XP_011509918) c3(sodium channel protein type 9 subunit alpha isoform X1) c4(300504, 300505) c5(300506, 300507, 300508, 300509, 300510, 300511, 300512, 300513, 300514, 300515, 300516, 300517) c6( ) c7(cZ, aFa, vE, cCf, ha, cCd, cV, bAp, cCe, fu, Ge, ad, aTT, aT, HX, dd, asT, an, ae, aZQ, na, aW, bNA, cCg, aPm, gu, vo, cmk, dr, ccT, eM, xD, bNi, xZ, aqH, uJ, bNy); #c1(SCN9A) c2(XP_011509919) c3(sodium channel protein type 9 subunit alpha isoform X2) c4(300518, 300519) c5(300520, 300521, 300522, 300523, 300524, 300525, 300526, 300527, 300528, 300529, 300530, 300531) c6( ) c7(cZ, aFa, vE, cCf, ha, cCd, cV, bAp, cCe, fu, Ge, ad, aTT, aT, HX, dd, asT, an, ae, aZQ, na, aW, bNA, cCg, aPm, gu, vo, cmk, dr, ccT, eM, xD, bNi, xZ, aqH, uJ, bNy); #c1(SCN9A) c2(XP_011509920) c3(sndium channel protein type 9 subunit alpha isoform X3) c4( ) c5(300532, 300533, 300534, 300535, 300536, 300537) c6( ) c7(cZ, aFa, vE, cCf, ha, cCd, cV, bAp, cCe, fu, Ge, ad, aTT, aT, HX, dd, asT, an, ae, aZQ, na, aW, bNA, cCg, aPm, gu, vo, cmk, dr, ccT, eM, xD, bNi, xZ, aqH, uJ, bNy); #c1(SCNM1) c2(NP_001191785) c3(sodium channel modifier 1 isoform 2) c4( ) c5(81758, 81759, 81760, 81761, 81762) c6( ) c7(aU, aR); #c1(SCNM1) c2(NP_076946) c3(sodium channel modifier 1 isoform 1) c4(214336, 214337) c5(214338, 214339, 214340, 214341, 214342, 214343, 214344) c6( ) c7(aU, aR); #c1(SCNN1A) c2(NP_001029) c3(amiloride-sensitive sodium channel subunit alpha isoform 1) c4( ) c5( ) c6( ) c7(bL, bM, T, dD, ahS, fR, sQ, oe, cz, oR, MF, ah, eq, aT, IQ, an, wt, aa, kl, mR, cCh, vj, cm, uC, cM, qa, kT, c, uR, uo, ut, Lb, dy, ei, bD, ao, cIQ); #c1(SCNN1A) c2(NP_001153047) c3(amilnride-sensitive sodium channel subunit alpha isoform 3) c4(60361, 60362) c5(60363, 60364, 60365, 60366, 60367, 60368) c6( ) c7(bL, bM, T, dD, ahS, fR, sQ, oe, cz, oR, MF, ah, eq, aT, IQ, an, wt, aa, kl, mR, cCh, vj, cm, uC, cM, qa, kT, c, uR, uo, ut, Lb, dy, ei, bD, ao, cIQ); #c1(SCNN1A) c2(NP_001153048) c3(amiloride-sensitive sodium channel subunit alpha isoform 2) c4(60369) c5(60370, 60371, 60372, 60373, 60374, 60375, 60376, 60377, 60378, 60379, 60380, 60381, 60382, 60383, 60384, 60385, 60386, 60387) c6( ) c7(bL, bM, T, dD, ahS, fR, sQ, oe, cz, oR, MF, ah, eq, aT, IQ, an, wt, aa, kl, mR, cCh, vj, cm, uC, cM, qa, kT, c, uR, uo, ut, Lb, dy, ei, bD, ao, cIQ); #c1(SCNN1B) c2(NP_000327) c3(amiloride-sensitive sodium channel subunit beta) c4(7156) c5( ) c6( ) c7(bL, aLZ, dD, ahS, iV, vj, oe, cz, afq, MF, ah, eq, fr, cIQ, uC, vP, ao, aa); #c1(SCNN1B) c2(XP_011544215) c3(amiloride-sensitive sodium channel subunit beta isoform X1) c4(343350) c5(343351, 343352, 343353, 343354, 343355, 343356, 343357) c6( ) c7(bL, aLZ, dD, ahS, iV, vj, oe, cz, afq, MF, ah, eq, fr, cIQ, uC, vP, ao, aa); #c1(SCNN1B) c2(XP_011544216) c3(amiloride-sensitive sodium channel subunit beta isoform X2) c4( ) c5(343358, 343359, 343360, 343361, 343362) c6( ) c7(bL, aLZ, dD, ahS, iV, vj, oe, cz, afq, MF, ah, eq, fr, cIQ, uC, vP, ao, aa); #c1(SCNN1D) c2(XP_011540201) c3(amiloride-sensitive sodium channel subunit delta isoform X1) c4( ) c5(338604, 338605) c6( ) c7(Y, cE, eA); #c1(SCNN1D) c2(XP_011540207) c3(amilnride-sensitive sodium channel subunit delta isoform X7) c4( ) c5(338606) c6( ) c7(Y, cE, eA); #c1(SCNN1D) c2(XP_011540212) c3(amilnride-sensitive sodium channel subunit delta isoform X12) c4( ) c5(338607) c6( ) c7(Y, cE, eA); #c1(SCNN1D) c2(XP_011540215) c3(amilnride-sensitive sodium channel subunit delta isoform X15) c4( ) c5(338608) c6( ) c7(Y, cE, eA); #c1(SCNN1D) c2(XP_011540219) c3(amilnride-sensitive sodium channel subunit delta isoform X19) c4( ) c5(338609) c6( ) c7(Y, cE, eA); #c1(SCNN1D) c2(XP_011540224) c3(amilnride-sensitive sodium channel subunit delta isoform X24) c4(338610) c5( ) c6( ) c7(Y, cE, eA); #c1(SCNN1D) c2(XP_011540228) c3(amilnride-sensitive sodium channel subunit delta isoform X27) c4(338611) c5(338612, 338613, 338614, 338615, 338616) c6( ) c7(Y, cE, eA); #c1(SCNN1D) c2(XP_011540230) c3(amilnride-sensitive sodium channel subunit delta isoform X29) c4( ) c5(338617) c6( ) c7(Y, cE, eA); #c1(SCNN1D) c2(XP_011540233) c3(amilnride-sensitive sodium channel subunit delta isoform X32) c4(338618, 338619) c5(338620, 338621) c6( ) c7(Y, cE, eA); #c1(SCNN1D) c2(XP_011540235) c3(amiloride-sensitive sodium channel subunit delta isoform X33) c4( ) c5(338622, 338623, 338624, 338625, 338626) c6( ) c7(Y, cE, eA); #c1(SCNN1D) c2(XP_011540236) c3(amilnride-sensitive sodium channel subunit delta isoform X34) c4( ) c5(338627, 338628, 338629, 338630, 338631, 338632, 338633, 338634, 338635, 338636, 338637, 338638, 338639, 338640) c6( ) c7(Y, cE, eA); #c1(SCNN1G) c2(NP_001030) c3(amilnride-sensitive sodium channel subunit gamma) c4(31077) c5( ) c6( ) c7(cCi, dD, T, aE, ahS, iV, oe, ff, cz, ao, afq, ME, eq, en, cIQ, azh, aa); #c1(SC01) c2(NP_004580) c3(protein SC01 homolog, mitochondrial) c4(147866, 147867) c5(147868, 147869, 147870, 147871, 147872, 147873, 147874, 147875, 147876, 147877, 147878, 147879) c6( ) c7(cCj, cCl, hb, hl, dV, vc, acJ, aln, kC, cCk); #c1(SCO2) c2(NP_001162582) c3(protein SCO2 homolog, mitochondrial precursor) c4(66376, 66377) c5(66378, 66379, 66380, 66381, 66382, 66383, 66384, 66385, 66386, 66387, 66388, 66389, 66390, 66391, 66392, 66393, 66394, 66395, 66396, 66397, 66398, 66399, 66400, 66401, 66402, 66403, 66404, 66405) c6( ) c7(fu, arX, xt, cc, hb, ds, kf, bdh, vc, bl, ajU, cCm, apl, cCn, aq, px, kC, apq, SE, Be, acJ, B); #c1(SCP2D1) c2(NP_848578) c3(SCP2 sterol-binding domain-containing protein 1) c4(253878) c5(253879, 253880, 253881, 253882, 253883, 253884) c6( ) c7(cm, cd); #c1(SCPEPI) c2(NP_067639) c3(retinoid-inducible serine carboxypeptidase precursor) c4(209141) c5(209142, 209143, 209144, 209145, 209146, 209147, 209148, 209149) c6(209150, 209151) c7(T, iT, iU, WB, aW, cz, aT, fd, bu); #c1(SCRIB) c2(NP_056171) c3(protein scribble homolog isoform b) c4(186102, 186103, 186104) c5(186105, 186106, 186107, 186108, 186109, 186110, 186111, 186112, 186113, 186114, 186115, 186116, 186117, 186118, 186119, 186120, 186121, 186122) c6( ) c7(bF, T, lg, lp, aW, aT, By, X); #c1(SCRIB) c2(NP_874365) c3(protein scribble homolog isoform a) c4(256622) c5(256623, 256624, 256625, 256626, 256627, 256628) c6( ) c7(bF, T, lg, lp, aW, aT, By, X); #c1(SCRN1) c2(NP_001138986) c3(secernin-1 isoform b) c4(58464, 58465, 58466) c5(58467, 58468, 58469, 58470, 58471, 58472, 58473, 58474, 58475, 58476) c6( ) c7(T, bE, aA, bB, r, aF, K, be, q); #c1(SCRN1) c2(NP_001138987) c3(secernin-1 isoform c) c4(58477, 58478) c5(58479, 58480, 58481, 58482, 58483, 58484, 58485, 58486, 58487, 58488, 58489, 58490, 58491, 58492, 58493, 58494, 58495) c6( ) c7(T, bE, aA, bB, r, aF, K, be, q); #c1(SCRN1) c2(NP_055581) c3(secernin-1 isoform a) c4(182076, 182077) c5(182078, 182079, 182080, 182081, 182082, 182083, 182084, 182085, 182086, 182087, 182088, 182089, 182090, 182091, 182092, 182093, 182094, 182095, 182096, 182097, 182098, 182099, 182100) c6( ) c7(T, bE, aA, bB, r, aF, K, be, q); #c1(SCT) c2(XP_011518583) c3(secretin isoform X1) c4(312740) c5(312741, 312742, 312743, 312744, 312745, 312746) c6( ) c7(kV, oO, T, os, aC, ow, qb, eX, jh, rf, bvq, oZ, ci, aY, hF, eW, hr, x, azY, jz, aE, u, arV, aMj, eV, adV, he, iL, kl, je, iU, qt, Y, aNi, aq, Io, aB, g, aot, iR, LV, cm, bz, bw, bN, OC, ck, CC, BU, iM, iT, ag, AR, wB, aiM, fP, cj, U, pg, k, bt, B, aya); #c1(SCTR) c2(NP_002971) c3(secretin receptor precursor) c4(134078) c5(134079, 134080, 134081, 134082, 134083, 134084, 134085, 134086) c6( ) c7(nZ, T, aC, jz, eJ, s, Do, aE, lt, AR, aq, ci, g, iR, ae, B, ad); #c1(SCUBE1) c2(NP_766638) c3(signal peptide, CUB and EGF-like domain-containing protein 1 precursor) c4(249467, 249468) c5(249469, 249470, 249471, 249472, 249473, 249474, 249475, 249476, 249477, 249478, 249479, 249480) c6( ) c7(dA); #c1(SCUBE1) c2(XP_005261809) c3(signal peptide, CUB and EGF-like domain-containing protein 1 isoform X1) c4(277627, 277628) c5(277629, 277630, 277631, 277632, 277633, 277634, 277635) c6( ) c7(dA); #c1(SCUBE1) c2(XP_011528693) c3(signal peptide, CUB and EGF-like domain-containing protein 1 isoform X2) c4(323950, 323951) c5(323952, 323953, 323954, 323955, 323956, 323957, 323958, 323959, 323960, 323961, 323962, 323963) c6( ) c7(dA); #c1(SCUBE2) c2(NP_001164161) c3(signal peptide, CUB and EGF-like domain-containing protein 2 isoform 2 precursor) c4(66650) c5(66651, 66652, 66653, 66654, 66655, 66656) c6( ) c7(T, aW, aT, at, n, dL); #c1(SCUBE2) c2(NP_066025) c3(signal peptide, CUB and EGF-like domain-containing protein 2 isoform 1 precursor) c4(206796) c5(206797, 206798, 206799, 206800, 206801, 206802) c6( ) c7(T, aW, aT, at, n, dL); #c1(SCUBE2) c2(XP_005253089) c3(signal peptide, CUB and EGF-like domain-containing protein 2 isoform X1) c4(272139) c5(272140, 272141, 272142, 272143, 272144, 272145) c6( ) c7(T, aW, aT, at, n, dL); #c1(SCUBE2) c2(XP_005253090) c3(signal peptide, CUB and EGF-like domain-containing protein 2 isoform X3) c4(272146) c5(272147, 272148, 272149, 272150, 272151, 272152) c6( ) c7(T, aW, aT, at, n, dL); #c1(SCUBE3) c2(NP_689966) c3(signal peptide, CUB and EGF-like domain-containing protein 3 isoform 1 precursor) c4(244609) c5(244610, 244611, 244612, 244613, 244614, 244615, 244616, 244617) c6(244618, 244619) c7(T, fr); #c1(SCUBE3) c2(XP_005249000) c3(signal peptide, CUB and EGF-like domain-containing protein 3 isoform X1) c4(268839) c5(268840, 268841, 268842, 268843, 268844, 268845, 268846, 268847) c6(268848, 268849) c7(T, fr); #c1(SCYL1) c2(NP_001041683) c3(N-terminal kinase-like protein isoform 8) c4(34290, 34291, 34292) c5(34293, 34294, 34295, 34296, 34297, 34298, 34299, 34300, 34301, 34302, 34303, 34304, 34305, 34306, 34307, 34308) c6( ) c7(T, iW, jh, aA, zh, ci, ze, qN, fr, alq, zo, ad, eA, x, ft, ib, aE, dV, h, hn, zg, ae, d, zb, ff, aF, en, iV, t, lk, bz, ve, iK, ck, bP, zr, iT, aps, U, zl, k, eg, zk, bt); #c1(SCYL1) c2(NP_065731) c3(N-terminal kinase-like protein isoform A) c4(205115, 205116) c5(205117, 205118, 205119, 205120, 205121, 205122) c6( ) c7(T, iW, jh, aA, zh, ci, ze, qN, fr, alq, zo, ad, eA, x, ft, ib, aE, dV, h, hn, zg, ae, d, zb, ff, aF, en, iV, t, lk, bz, ve, iK, ck, bP, zr, iT, aps, U, zl, k, eg, zk, bt); #c1(SCYL1) c2(XP_005274177) c3(N-terminal kinase-like protein isoform X2) c4(284969) c5(284970, 284871, 284972, 284973, 284974, 284975, 284976, 284977, 284978, 284979, 284980, 284981) c6( ) c7(T, iW, jh, aA, zh, ci, ze, qN, fr, alq, zo, ad, eA, x, ft, ib, aE, dV, h, hn, zg, ae, d, zb, ff, aF, en, iV, t, lk, bz, ve, iK, ck, bP, zr, iT, aps, U, zl, k, eg, zk, bt); #c1(SCYL1) c2(XP_005274178) c3(N-terminal kinase-like protein isoform X3) c4(284982) c5(284983, 284984, 284985, 284986, 284987, 284988, 284989, 284990, 284991, 284992, 284993, 284994) c6( ) c7(T, iW, jh, aA, zh, ci, ze, qN, fr, alq, zo, ad, eA, x, ft, ib, aE, dV, h, hn, zg, ae, d, zb, ff, aF, en, iV, t, lk, bz, ve, iK, ck, bP, zr, iT, aps, U, zl, k, eg, zk, bt); #c1(SCYL3) c2(NP_065156) c3(protein-associating with the carboxyl-terminal domain of ezrin isoform 1) c4(204327, 204328) c5(204329, 204330, 204331, 204332, 204333, 204334, 204335, 204336, 204337, 204338, 204339, 204340) c6( ) c7(bA); #c1(SCYL3) c2(NP_851607) c3(protein-associating with the carboxyl-terminal domain of ezrin isoform 2) c4(254582) c5(254583, 254584, 254585, 254586, 254587, 254588, 254589, 254590, 254591, 254592) c6( ) c7(bA); #c1(SDC1) c2(NP_001006947) c3(syndecan-1 precursor) c4(22380) c5( ) c6( ) c7(T, aC, aiH, if, fd, ci, apQ, aE, K, wt, dQ, eL, li, aW, g, nr, eF, cm, eM, nB, cj, m, R, aw, n, qN, aOJ, Bl, ft, zw, pe, eV, By, dL, fe, aq, CQ, Zj, Wt, hk, hL, eo, abW, B, fM, fG, yk, eX, aA, v, V, q, eA, XX, blr, lg, qK, aT, ae, dl, jf, oV, Y, r, en, apx, aom, t, cl, ck, kP, of, gX, bt, hS, Mb, id, jh, ad, dP, av, fX, ib, Dq, ji, MG, qZ, ff, eH, cr, eZ, iV, bz, LB, y); #c1(SDC1) c2(XP_005262679) c3(syndecan-1 isoform X3) c4( ) c5(278038, 278039, 278040, 278041, 278042, 278043, 278044, 278045, 278046, 278047) c6( ) c7(T, aC, aiH, if, fd, ci, apQ, aE, K, wt, dQ, eL, li, aW, g, nr, eF, cm, eM, nB, cj, m, R, aw, n, qN, aOJ, Bl, ft, zw, pe, eV, By, dL, fe, aq, CQ, Zj, Wt, hk, hL, eo, abW, B, fM, fG, yk, eX, aA, v, V, q, eA, XX, blr, lg, qK, aT, ae, dl, jf, oV, Y, r, en, apx, aom, t, cl, ck, kP, of, gX, bt, hS, Mb, id, jh, ad, dP, av, fX, ib, Dq, ji, MG, qZ, ff, eH, cr, eZ, iV, bz, LB, y); #c1(SDC2) c2(NP_002989) c3(syndecan-2 precursor) c4(134206, 134207, 134208) c5(134209, 134210, 134211, 134212, 134213, 134214, 134215, 134216, 134217, 134218, 134219, 134220, 134221, 134222, 134223, 134224, 134225, 134226, 134227, 134228, 134229, 134230) c6( ) c7(bL, T, kh, dD, AS, fG, bB, oY, v, eq, ci, XM, cd, q, ai, aao, eJ, Na, aE, Db, qK, yg, aT, h, Nc, K, uD, dQ, DA, eG, TY, aW, Y, ev, eH, r, eF, fq, pb, LB, vW, Dy, ac, nB, bE, w, BL, cj, dy, y, B); #c1(SDC2) c2(XP_005251076) c3(syndecan-2 isoform X3) c4(270747) c5(270748, 270749) c6( ) c7(bL, T, kh, dD, AS, fG, bB, oY, v, eq, ci, XM, cd, q, ai, aao, eJ, Na, aE, Db, qK, yg, aT, h, Nc, K, uD, dQ, DA, eG, TY, aW, Y, ev, eH, r, eF, fq, pb, LB, vW, Dy, ac, nB, bE, w, BL, cj, dy, y, B); #c1(SDC2) c2(XP_011515514) c3(syndecan-2 isoform X4) c4( ) c5(308359, 308360, 308361, 308362, 308363, 308364, 308365, 308366) c6( ) c7(bL, T, kh, dD, AS, fG, bB, oY, v, eq, ci, XM, cd, q, ai, aao, eJ, Na, aE, Db, qK, yg, aT, h, Nc, K, uD, dQ, DA, eG, TY, aW, Y, ev, eH, r, eF, fq, pb, LB, vW, Dy, ac, nB, bE, w, BL, cj, dy, y, B); #c1(SDC3) c2(XP_011540764) c3(syndecan-3 isoform X1) c4(339340) c5( ) c6( ) c7(aW, Pl, uY, v, uV, y, eA); #c1(SDC3) c2(XP_011540768) c3(syndecan-3 isoform X5) c4( ) c5(339341, 339342, 339343, 339344, 339345, 339346, 339347, 339348, 339349, 339350, 339351, 339352) c6( ) c7(aW, Pl, uY, v, uV, y, eA); #c1(SDC4) c2(NP_002990) c3(syndecan-4 precursor) c4(134231, 134232) c5(134233, 134234, 134235, 134236, 134237, 134238, 134239) c6( ) c7(oO, bM, T, dD, aw, bB, eq, ci, cd, K, IQ, aiJ, hm, DA, Y, eH, cr, hf, eF, eU, eM, bE, w, dO, bt); #c1(SDC4) c2(XP_011527279) c3(syndecan-4 isoform X1) c4( ) c5(321913, 321914, 321915, 321916, 321917) c6( ) c7(oO, bM, T, dD, aw, bB, eq, ci, cd, K, IQ, aiJ, hm, DA, Y, eH, cr, hf, eF, eU, eM, bE, w, dO, bt); #c1(SDCBP) c2(NP_001007069) c3(syntenin-1 isoform 2) c4(22449) c5(22450, 22451, 22452, 22453, 22454) c6( ) c7(T, dA, aW, Y, aT, aA, n, aF, bQN, iP, cp); #c1(SDCBP) c2(NP_001007071) c3(syntenin-1 isoform 3) c4(22455) c5(22456, 22457, 22458, 22459, 22460, 22461, 22462, 22463) c6( ) c7(T, dA, aW, Y, aT, aA, n, aF, bQN, iP, cp); #c1(SDCBP) c2(NP_005616) c3(syntenin-1 isoform 1) c4(157964) c5(157965, 157966, 157967, 157968, 157969, 157970, 157971, 157972) c6( ) c7(T, dA, aW, Y, aT, aA, n, aF, bQN, iP, cp); #c1(SDCBP) c2(XP_011515873) c3(syntenin-1 isoform X1) c4( ) c5(308852, 308853, 308854, 308855, 308856) c6( ) c7(T, dA, aW, Y, aT, aA, n, aF, bQN, iP, cp); #c1(SDCBP2) c2(NP_001186713) c3(syntenin-2 isoform a) c4(78396, 78397) c5(78398, 78399, 78400, 78401, 78402, 78403, 78404, 78405, 78406, 78407, 78408, 78409, 78410, 78411, 78412) c6( ) c7(bQN); #c1(SDCBP2) c2(NP_056500) c3(syntenin-2 isoform b) c4( ) c5(187793, 187794, 187795, 187796, 187797) c6( ) c7(bQN); #c1(SDCCAG3) c2(NP_001034796) c3(serologically defined colon cancer antigen 3 isoform 1) c4(32307) c5(32308, 32309, 32310, 32311, 32312, 32313) c6( ) c7(bB); #c1(SDCCAG3) c2(NP_001034797) c3(serologically defined colon cancer antigen 3 isoform 3) c4(32314) c5(32315, 32316, 32317, 32318, 32319, 32320) c6( ) c7(bB); #c1(SDCCAG3) c2(NP_006634) c3(serologically defined colon cancer antigen 3 isoform 2) c4(166754) c5(166755, 166756, 166757, 166758, 166759, 166760) c6( ) c7(bB); #c1(SDCCAG8) c2(NP_006633) c3(serologically defined colon cancer antigen 8) c4(166747) c5(166748, 166749, 166750, 166751, 166752, 166753) c6( ) c7(lR, cCo, h, v, Tp, V); #c1(SDCCAG8) c2(XP_006725027) c3(serologically defined colon cancer antigen 8 isoform X3) c4(296543) c5(296544, 296545, 296546, 296547, 296548, 296549) c6( ) c7(lR, cCo, h, v, Tp, V); #c1(SDCCAG8) c2(XP_006725029) c3(serologically defined colon cancer antigen 8 isoform X9) c4(296550) c5(296551, 296552, 296553, 296554, 296555, 296556) c6( ) c7(lR, cCo, h, v, Tp, V); #c1(SDCCAG8) c2(XP_006725036) c3(serologically defined colon cancer antigen 8 isoform X18) c4(296557) c5(296558, 296559, 296560, 296561, 296562, 296563) c6( ) c7(lR, cCo, h, v, Tp, V); #c1(SDCCAG8) c2(XP_011544737) c3(serologically defined colon cancer antigen 8 isoform X12) c4(343808) c5(343809, 343810, 343811, 343812, 343813, 343814) c6( ) c7(lR, cCo, h, v, Tp, V); #c1(SDF2) c2(NP_008854) c3(stromal cell-derived factor 2 precursor) c4(169131) c5(169132, 169133, 169134, 169135, 169136, 169137) c6( ) c7(bL, aW, bM, aT); #c1(SDF2L1) c2(NP_071327) c3(stromal cell-derived factor 2-like protein 1 precursor) c4(210994) c5(210995, 210996, 210997, 210998, 210999, 211000) c6( ) c7(cd, ad); #c1(SDF4) c2(XP_011539858) c3(45 kDa calcium-binding protein isoform X1) c4(338140) c5(338141, 338142, 338143, 338144, 338145, 338146) c6( ) c7(bM, T, Vo, aA, bB, fr, ci, q, ad, Hx, hd, jz, aE, aT, hD, dL, IQ, ae, eL, aW, Y, ev, lb, cr, r, dN, aF, Xk, dw, eE, bz, ar, Dy, bE, z, U, aps, bt, L); #c1(SDHA) c2(NP_001281261) c3(succinate dehydrogenase [ubiguinone] flavoprotein subunit, mitochondrial isoform 2) c4(111607) c5(111608, 111609, 111610, 111611, 111612, 111613) c6( ) c7(cCr, yo, fb, cc, hb, if, ajU, anx, mx, VB, cCp, dL, fr, qN, cCq, cb, cm, cCs, eL, ad, cCt); #c1(SDHA) c2(NP_004159) c3(succinate dehydrogenase [ubiguinone] flavoprotein subunit, mitochondrial isoform 1) c4(143954) c5(143955, 143956, 143957, 143958, 143959, 143960) c6( ) c7(cCr, yo, fb, cc, hb, if, ajU, anx, mx, VB, cCp, dL, fr, qN, cCq, cb, cm, cCs, eL, ad, cCt); #c1(SDHAF1) c2(NP_001036096) c3(succinate dehydrogenase assembly factor 1, mitochondrial) c4(33976) c5(33977, 33978, 33979, 33980, 33981, 33982) c6( ) c7(cCp, bFd, cCt); #c1(SDHAF2) c2(NP_060311) c3(succinate dehydrogenase assembly factor 2, mitochondrial) c4(195316) c5(195317, 195318, 195319, 195320, 195321, 195322) c6( ) c7(ae, T, BC, YE, Do, pX, anE, cCu, ci, anx, HI, bz, VB); #c1(SDHAF4) c2(NP_660310) c3(succinate dehydrogenase assembly factor 4, mitochondrial precursor) c4(240860) c5(240861, 240862, 240863, 240864, 240865, 240866, 240867, 240868) c6(240869, 240870) c7(bL); #c1(SDHC) c2(NP_001030588) c3(succinate dehydrogenase cytochrome b560 subunit, mitochondrial isoform 2 precursor) c4(31034) c5(31035, 31036, 31037, 31038, 31039, 31040) c6( ) c7(T, cz, KO, hy, aNf, fr, cCv, ci, ad, hd, nv, nX, cU, fb, ae, Jg, nO, eH, aq, Hu, eF, es, eM, iA, go, mg, hR, QF, anx, B, VB); #c1(SDHC) c2(NP_001030589) c3(succinate dehydrogenase cytochrome b560 subunit, mitochondrial isoform 3 precursor) c4(31041) c5(31042, 31043, 31044, 31045, 31046, 31047) c6( ) c7(T, cz, KO, hy, aNf, fr, cCv, ci, ad, hd, nv, nX, cU, fb, ae, Jg, nO, eH, aq, Hu, eF, es, eM, iA, go, mg, hR, QF, anx, B, VB); #c1(SDHC) c2(NP_001030590) c3(succinate dehydrogenase cytochrome b560 subunit, mitochondrial isoform 4 precursor) c4(31048) c5(31049, 31050, 31051, 31052, 31053, 31054) c6( ) c7(T, cz, KO, hy, aNf, fr, cCv, ci, ad, hd, nv, nX, cU, fb, ae, Jg, nO, eH, aq, Hu, eF, es, eM, iA, go, mg, hR, QF, anx, B, VB); #c1(SDHC) c2(NP_002992) c3(succinate dehydrogenase cytochrome b560 subunit, mitochondrial isoform 1 precursor) c4(134240) c5(134241, 134242, 134243, 134244, 134245, 134246) c6( ) c7(T, cz, KO, hy, aNf, fr, cCv, ci, ad, hd, nv, nX, cU, fb, ae, Jg, nO, eH, aq, Hu, eF, es, eM, iA, go, mg, hR, QF, anx, B, VB); #c1(SDHD) c2(NP_002993) c3(succinate dehydrogenase [ubiguinone] cytochrome b small subunit, mitochondrial isoform a precursor) c4(134247) c5(134248, 134249, 134250, 134251, 134252, 134253) c6( ) c7(bLx, atT, T, aAx, aA, n, KO, aNf, oH, ci, hy, cCx, qN, fr, chj, AW, hd, oT, nv, nX, pX, KN, bj, jj, fb, Zm, cCt, bWL, cCw, jr, s, Y, cCp, Hu, cm, dr, aHY, es, Ew, iA, VB, hR, bPs, QF, Gg, anx, kS, abh); #c1(SDK1) c2(NP_689957) c3(protein sidekick-1 isoform 1) c4(244531, 244532) c5(244533, 244534, 244535, 244536, 244537, 244538, 244539, 244540, 244541, 244542, 244543, 244544) c6( ) c7(sk, ac, aw, cz, cm, h, he, ae, cd, ad, hS); #c1(SDK2) c2(NP_001138424) c3(protein sidekick-2 precursor) c4(56660, 56661) c5(56662, 56663, 56664, 56665, 56666, 56667, 56668, 56669, 56670, 56671, 56672, 56673, 56674) c6( ) c7(aj, ww); #c1(SDK2) c2(XP_011523216) c3(protein sidekick-2 isoform X1) c4(317745) c5(317746, 317747, 317748, 317749, 317750, 317751) c6( ) c7(aj, ww); #c1(SDK2) c2(XP_011523217) c3(protein sidekick-2 isoform X2) c4( ) c5(317752, 317753, 317754, 317755) c6( ) c7(aj, ww); #c1(SDPR) c2(NP_004648) c3(serum deprivation-response protein) c4(148502) c5(148503, 148504, 148505, 148506, 148507, 148508) c6( ) c7(aW, mC, eZ, aT, bas, fL, cd); #c1(SDR42E1) c2(XP_011521772) c3(short-chain dehydrogenase/reductase family 42E member 1 isoform X1) c4(316461) c5(316462, 316463, 316464, 316465, 316466, 316467) c6( ) c7(aii); #c1(SDR9C7) c2(NP_683695) c3(short-chain dehydrogenase/reductase family 9C member 7) c4(242395) c5(242396, 242397, 242398, 242399, 242400, 242401) c6( ) c7(it); #c1(SDS) c2(NP_006834) c3(L-serine dehydratase/L-threonine deaminase) c4(168531, 168532) c5(168533, 168534, 168535, 168536, 168537, 168538, 168539, 168540, 168541, 168542, 168543, 168544) c6( ) c7(bL, T, aZA, aFQ, if, Am, fd, jh, cz, bBX, bB, asA, bS, j, ct, gf, ci, dG, v, qN, lR, fr, ad, wD, mj, b, cc, vJ, vz, ds, i, dv, By, dL, bj, K, H, vx, ae, af, qk, ao, eL, fb, yo, akV, arl, A, Em, Y, Rj, ff, eZ, dg, hp, en, g, Z, kC, qs, pb, op, es, VJ, Ew, iA, bE, vA, U, cj, vy, XO, anx, hh, y, bt, VB, L); #c1(SEC11A) c2(NP_001258847) c3(signal peptidase complex catalytic subunit SEC11A isoform 5) c4( ) c5(96585, 96586, 96587, 96588, 96589) c6( ) c7(aF, aA); #c1(SEC11A) c2(NP_055115) c3(signal peptidase complex catalytic subunit SEC11A isoform 2) c4(179029, 179030) c5(179031, 179032, 179033, 179034, 179035, 179036, 179037) c6( ) c7(aF, aA); #c1(SEC11C) c2(NP_150596) c3(signal peptidase complex catalytic subunit SEC11C) c4(228124, 228125) c5(228126, 228127, 228128, 228129, 228130, 228131, 228132, 228133, 228134, 228135) c6( ) c7(aC); #c1(SEC13) c2(NP_001129498) c3(protein SEC13 homolog isoform 3) c4(51699, 51700, 51701, 51702) c5(51703, 51704, 51705, 51706, 51707, 51708, 51709) c6( ) c7(VB); #c1(SEC13) c2(NP_001129704) c3(protein SEC13 homolog isoform 2) c4( ) c5(52222, 52223, 52224, 52225, 52226) c6( ) c7(VB); #c1(SEC13) c2(NP_109598) c3(protein SEC13 homolog isoform 4) c4(219768) c5(219769, 219770, 219771, 219772, 219773) c6( ) c7(VB); #c1(SEC13) c2(NP_899195) c3(protein SEC13 homolog isoform 1) c4( ) c5(257994, 257995, 257996, 257997, 257998, 257999) c6( ) c7(VB); #c1(SEC13) c2(XP_005265435) c3(protein SEC13 homolog isoform X3) c4( ) c5(279550, 279551) c6( ) c7(VB); #c1(SEC13) c2(XP_011532298) c3(protein SEC13 homolog isoform X4) c4( ) c5(328440, 328441, 328442, 328443, 328444) c6( ) c7(VB); #c1(SEC14L1) c2(NP_001137470) c3(SEC14-like protein 1 isoform a) c4(55906) c5(55907, 55908, 55909, 55910, 55911, 55912, 55913, 55914, 55915, 55916, 55917, 55918, 55919, 55920, 55921, 55922, 55923, 55924, 55925, 55926) c6( ) c7(t, nC, ae, ad); #c1(SEC14L1) c2(NP_001137473) c3(SEC14-like protein 1 isoform c) c4(55927) c5( ) c6( ) c7(t, nC, ae, ad); #c1(SEC14L1) c2(NP_001191337) c3(SEC14-like protein 1 isoform b) c4(81420) c5(81421, 81422, 81423, 81424, 81425, 81426, 81427, 81428, 81429, 81430) c6( ) c7(t, nC, ae, ad); #c1(SEC14L2) c2(NP_001191133) c3(SEC14-like protein 2 isoform 3) c4(81066) c5(81067, 81068, 81069, 81070, 81071, 81072) c6( ) c7(oO, bM, T, if, eb, bB, cL, bvx, ci, AW, K, hu, hH, cp, aa, dH, aW, hl, g, eE, eM, Jr, aiM, qR, QO, n, fr, qN, eW, ft, cU, h, dL, A, mR, aq, at, Xa, aAl, aCD, zl, B, Dw, AS, bvt, jx, aA, V, q, o, jF, lg, cei, aT, ae, Y, r, afq, Io, aDm, en, iK, pb, ig, bvy, AH, vi, Ke, aDy, iD, ad, hX, av, F, hD, uQ, atJ, d, KS, ff, cr, eZ, aF, xH, hp, iV, bz, bE, z, aCl, y, WX, hv); #c1(SEC14L2) c2(NP_001278861) c3(SEC14-like protein 2 isoform 4) c4( ) c5(110738, 110739, 110740, 110741, 110742) c6( ) c7(oO, bM, T, if, eb, bB, cL, bvx, ci, AW, K, hu, hH, cp, aa, dH, aW, hl, g, eE, eM, Jr, aiM, qR, QO, n, fr, qN, eW, ft, cU, h, dL, A, mR, aq, at, Xa, aAl, aCD, zl, B, Dw, AS, bvt, jx, aA, V, q, o, jF, lg, cei, aT, ae, Y, r, afq, Io, aDm, en, iK, pb, ig, bvy, AH, vi, Ke, aDy, iD, ad, hX, av, F, hD, uQ, atJ, d, KS, ff, cr, eZ, aF, xH, hp, iV, bz, bE, z, aCl, y, WX, hv); #c1(SEC14L2) c2(NP_036561) c3(SEC14-like protein 2 isoform 1) c4(174409, 174410) c5(174411, 174412, 174413, 174414, 174415, 174416, 174417) c6( ) c7(oO, bM, T, if, eb, bB, cL, bvx, ci, AW, K, hu, hH, cp, aa, dH, aW, hl, g, eE, eM, Jr, aiM, qR, QO, n, fr, qN, eW, ft, cU, h, dL, A, mR, aq, at, Xa, aAl, aCD, zl, B, Dw, AS, bvt, jx, aA, V, q, o, jF, lg, cei, aT, ae, Y, r, afq, Io, aDm, en, iK, pb, ig, bvy, AH, vi, Ke, aDy, iD, ad, hX, av, F, hD, uQ, atJ, d, KS, ff, cr, eZ, aF, xH, hp, iV, bz, bE, z, aCl, y, WX, hv); #c1(SEC14L2) c2(NP_203740) c3(SEC14-like protein 2 isoform 2) c4(228468) c5(228469, 228470, 228471, 228472, 228473, 228474) c6( ) c7(oO, bM, T, if, eb, bB, cL, bvx, ci, AW, K, hu, hH, cp, aa, dH, aW, hl, g, eE, eM, Jr, aiM, qR, QO, n, fr, qN, eW, ft, cU, h, dL, A, mR, aq, at, Xa, aAl, aCD, zl, B, Dw, AS, bvt, jx, aA, V, q, o, jF, lg, cei, aT, ae, Y, r, afq, Io, aDm, en, iK, pb, ig, bvy, AH, vi, Ke, aDy, iD, ad, hX, av, F, hD, uQ, atJ, d, KS, ff, cr, eZ, aF, xH, hp, iV, bz, bE, z, aCl, y, WX, hv); #c1(SEC14L3) c2(NP_001244307) c3(SEC14-like protein 3 isoform 2) c4(92116) c5(92117, 92118, 92119, 92120, 92121, 92122, 92123, 92124, 92125, 92126) c6( ) c7(bM, Ke, pf, bvt, aDy, if, oe, jx, iW, eb, fr, qN, V, ai, q, eW, hX, hD, h, azm, bK, hu, hH, uQ, hM, A, mR, Jl, Y, hl, cr, r, eZ, afq, Io, hp, gu, eE, pb, AH, cj, Da, Xa, y, WX, vi); #c1(SEC14L3) c2(NP_001244311) c3(SEC14-like protein 3 isoform 3) c4( ) c5(92127, 92128, 92129, 92130, 92131) c6( ) c7(bM, Ke, pf, bvt, aDy, if, oe, jx, iW, eb, fr, qN, V, ai, q, eW, hX, hD, h, azm, bK, hu, hH, uQ, hM, A, mR, Jl, Y, hl, cr, r, eZ, afq, Io, hp, gu, eE, pb, AH, cj, Da, Xa, y, WX, vi); #c1(SEC14L3) c2(NP_777635) c3(SEC14-like protein 3 isoform 1) c4(251352, 251353) c5(251354, 251355, 251356, 251357, 251358, 251359, 251360) c6( ) c7(bM, Ke, pf, bvt, aDy, if, oe, jx, iW, eb, fr, qN, V, ai, q, eW, hX, hD, h, azm, bK, hu, hH, uQ, hM, A, mR, Jl, Y, hl, cr, r, eZ, afq, Io, hp, gu, eE, pb, AH, cj, Da, Xa, y, WX, vi); #c1(SEC14L3) c2(XP_011528430) c3(SEC14-like protein 3 isoform X1) c4(323575) c5(323576, 323577, 323578, 323579, 323580, 323581) c6( ) c7(bM, Ke, pf, bvt, aDy, if, ne, jx, iW, eb, fr, qN, V, ai, q, eW, hX, hD, h, azm, bK, hu, hH, uQ, hM, A, mR, Jl, Y, hl, cr, r, eZ, afq, Io, hp, gu, eE, pb, AH, cj, Da, Xa, y, WX, vi); #c1(SEC16B) c2(NP_149118) c3(protein transport protein Sec16B) c4(227274, 227275, 227276) c5(227277, 227278, 227279, 227280, 227281, 227282, 227283, 227284, 227285, 227286, 227287, 227288, 227289, 227290, 227291, 227292, 227293, 227294) c6( ) c7(bL, bM, aq, V, nw, HU, fq, 8); #c1(SEC23A) c2(NP_006355) c3(protein transport protein Sec23A) c4(164288, 164289, 164290, 164291) c5(164292, 164293, 164294, 164295, 164296, 164297, 164298, 164299, 164300, 164301, 164302, 164303, 164304, 164305, 164306, 164307, 164308, 164309, 164310, 164311, 164312, 164313, 164314, 164315, 164316, 164317, 164318, 164319, 164320, 164321, 164322, 164323, 164324, 164325, 164326, 164327, 164328) c6( ) c7(ae, ey, cCy); #c1(SEC23A) c2(XP_005267319) c3(protein transport protein Sec23A isoform X1) c4(280890, 280891, 280892, 280893) c5(280894, 280895, 280896, 280897, 280898, 280899, 280900, 280901, 280902, 280903, 280904) c6( ) c7(ae, ey, cCy); #c1(SEC238) c2(NP_001166217) c3(protein transport protein Sec238 isoform 2) c4(68485) c5(68486, 68487, 68488, 68489, 68490, 68491) c6( ) c7(NU, byC, I, u, bzE, hC, adw, dn, oW, bsk, oY, pw, qD, dr); #c1(SEC238) c2(NP_116780) c3(protein transport protein Sec238 isoform 1) c4(226462, 226463) c5(226464, 226465, 226466, 226467, 226468, 226469, 226470, 226471, 226472, 226473, 226474, 226475, 226476, 226477, 226478, 226479, 226480, 226481, 226482, 226483, 226484, 226485, 226486, 226487) c6( ) c7(NU, byC, I, u, bzE, hC, adw, dn, oW, bsk, oY, pw, qD, dr); #c1(SEC23IP) c2(NP_009121) c3(SEC23-interacting protein) c4(170857, 170858, 170859) c5(170860, 170861, 170862, 170863, 170864, 170865, 170866, 170867, 170868, 170869, 170870, 170871) c6( ) c7(dY, pN, bE, sP, EQ, aT, bB, aq, ey, K, m, g, fq, B); #c1(SEC23IP) c2(XP_005269526) c3(SEC23-interacting protein isoform X1) c4(282620) c5( ) c6( ) c7(dY, pN, bE, sP, EQ, aT, bB, aq, ey, K, m, g, fq, B); #c1(SEC23IP) c2(XP_005269527) c3(SEC23-interacting protein isoform X2) c4( ) c5(282621, 282622, 282623, 282624, 282625, 282626, 282627, 282628, 282629, 282630, 282631, 282632) c6( ) c7(dY, pN, bE, sP, EQ, aT, bB, aq, ey, K, m, g, fq, B); #c1(SEC24A) c2(NP_001239160) c3(protein transport protein Sec24A isoform 2) c4(88356) c5(88357, 88358, 88359, 88360, 88361, 88362) c6( ) c7(ac); #c1(SEC24A) c2(NP_068817) c3(protein transport protein Sec24A isoform 1) c4(210811) c5(210812, 210813, 210814, 210815, 210816, 210817) c6( ) c7(ac); #c1(SEC24B) c2(NP_001036199) c3(protein transport protein Sec248 isoform b) c4(34056) c5(34057, 34058, 34059, 34060, 34061, 34062) c6( ) c7(cCz); #c1(SEC24B) c2(NP_001287742) c3(protein transport protein Sec248 isoform c) c4(112753) c5(112754, 112755, 112756, 112757, 112758, 112759) c6( ) c7(cCz); #c1(SEC24B) c2(NP_006314) c3(protein transport protein Sec248 isoform a) c4(163922) c5(163923, 163924, 163925, 163926, 163927, 163928) c6( ) c7(cCz); #c1(SEC24C) c2(NP_940999) c3(protein transport protein Sec24C) c4(260302) c5(260303, 260304, 260305, 260306, 260307, 260308, 260309, 260310, 260311, 260312) c6( ) click bK, af); #c1(SEC24C) c2(XP_011538683) c3(protein transport protein Sec24C isoform X1) c4(336430) c5(336431) c6( ) c7(cA, bK, af); #c1(SEC24C) c2(XP_011538684) c3(protein transport protein Sec24C isoform X2) c4(336432, 336433) c5(336434, 336435, 336436, 336437, 336438, 336439, 336440, 336441, 336442, 336443, 336444, 336445) c6( ) c7(cA, bK, af); #c1(SEC24C) c2(XP_011538686) c3(protein transport protein Sec24C isoform X3) c4( ) c5(336446, 336447, 336448, 336449, 336450, 336451, 336452, 336453, 336454, 336455) c6( ) c7(cA, bK, af); #c1(SEC31A) c2(NP_001070674) c3(protein transport protein Sec31A isoform 4) c4(34768) c5(34769, 34770, 34771, 34772, 34773, 34774, 34775, 34776, 34777, 34778) c6( ) c7(jh); #c1(SEC31A) c2(NP_001177978) c3(protein transport protein Sec31A isoform 5) c4(73254) c5(73255, 73256, 73257, 73258, 73259, 73260, 73261) c6( ) c7(jh); #c1(SEC31A) c2(NP_001287673) c3(protein transport protein Sec31A isoform 6) c4(112499) c5(112500, 112501, 112502, 112503, 112504, 112505, 112506, 112507, 112508, 112509, 112510, 112511, 112512, 112513, 112514, 112515, 112516, 112517, 112518, 112519, 112520) c6( ) c7(jh); #c1(SEC31A) c2(NP_001287674) c3(protein transport protein Sec31A isoform 7) c4(112521) c5(112522, 112523, 112524, 112525, 112526, 112527) c6( ) c7(jh); #c1(SEC31A) c2(NP_057295) c3(protein transport protein Sec31A isoform 2) c4(189945) c5(189946, 189947, 189948, 189949, 189950, 189951, 189952, 189953, 189954, 189955) c6( ) c7(jh); #c1(SEC31A) c2(XP_011530051) c3(protein transport protein Sec31A isoform X2) c4(325847, 325848, 325849, 325850, 325851, 325852) c5(325853, 325854, 325855, 325856, 325857, 325858, 325859, 325860, 325861, 325862, 325863, 325864, 325865, 325866, 325867, 325868, 325869, 325870, 325871, 325872, 325873, 325874, 325875, 325876, 325877, 325878, 325879) c6( ) c7(jh); #c1(SEC61A1) c2(NP_037468) c3(protein transport protein Sec61 subunit alpha isoform 1) c4(175657, 175658, 175659) c5(175660, 175661, 175662, 175663, 175664, 175665, 175666, 175667, 175668, 175669, 175670, 175671, 175672, 175673, 175674, 175675, 175676, 175677) c6( ) c7(J, K, Az, aj); #c1(SEC61G) c2(NP_055117) c3(protein transport protein Sec61 subunit gamma) c4(179045) c5(179046, 179047, 179048, 179049, 179050, 179051, 179052, 179053, 179054, 179055, 179056, 179057, 179058, 179059, 179060, 179061, 179062, 179063) c6( ) c7(eA, fd); #c1(SECG2) c2(NP_003253) c3(translocation protein SECG2) c4(136835) c5( ) c6( ) c7(ae, T, hd, eM, nB, n, K, bz, B, ad); #c1(SECG2) c2(XP_011511416) c3(translocation protein SECG2 isoform X1) c4(302049) c5(302050, 302051, 302052, 302053, 302054, 302055, 302056, 302057, 302058, 302059, 302060, 302061, 302062, 302063, 302064, 302065) c6( ) c7(ae, T, hd, eM, nB, n, K, bz, B, ad); #c1(SEC63) c2(NP_009145) c3(translocation protein SEC63 homolog) c4(171131, 171132) c5(171133, 171134, 171135, 171136, 171137, 171138, 171139) c6( ) c7(T, WQ, K, wB, hl); #c1(SEC63) c2(XP_011533701) c3(translocation protein SEC63 homolog isoform X1) c4(329784) c5(329785, 329786, 329787, 329788, 329789, 329790, 329791, 329792, 329793, 329794, 329795) c6( ) c7(T, WQ, K, wB, hl); #c1(SECISBP2) c2(NP_076982) c3(selenocysteine insertion sequence-binding protein 2 isoform 1) c4(214578, 214579) c5(214580, 214581, 214582, 214583, 214584, 214585, 214586, 214587, 214588, 214589, 214590, 214591, 214592) c6( ) c7(oj, r, hz, q, lM, cCA, xb, rL); #c1(SECISBP2) c2(XP_005252259) c3(selenocysteine insertion sequence-binding protein 2 isoform X7) c4( ) c5(271633) c6( ) c7(oj, r, hz, q, lM, cCA, xb, rL); #c1(SECISBP2) c2(XP_006717345) c3(selenocysteine insertion sequence-binding protein 2 isoform X1) c4(290953) c5(290954, 290955, 290956, 290957, 290958, 290959) c6( ) c7(oj, r, hz, q, lM, cCA, xb, rL); #c1(SECISBP2) c2(XP_011517302) c3(selenocysteine insertion sequence-binding protein 2 isoform X2) c4(310958) c5(310959, 310960, 310961, 310962, 310963) c6( ) c7(oj, r, hz, q, lM, cCA, xb, rL); #c1(SECISBP2) c2(XP_011517304) c3(selenocysteine insertion sequence-binding protein 2 isoform X4) c4(310964) c5(310965, 310966, 310967, 310968, 310969, 310970, 310971, 310972) c6( ) c7(oj, r, hz, q, lM, cCA, xb, rL); #c1(SECISBP2L) c2(NP_001180418) c3(selenocysteine insertion sequence-binding protein 2-like isoform 1) c4(74031) c5(74032, 74033, 74034, 74035, 74036, 74037) c6( ) c7(T, bz); #c1(SECISBP2L) c2(NP_055516) c3(selenocysteine insertion sequence-binding protein 2-like isoform 2) c4(181659) c5(181660, 181661, 181662, 181663, 181664, 181665) c6( ) c7(T, bz); #c1(SECTM1) c2(NP_002995) c3(secreted and transmembrane protein 1 precursor) c4(134254) c5(134255, 134256, 134257, 134258, 134259, 134260) c6( ) c7(bXu, aOu); #c1(SEL1L) c2(NP_001231913) c3(protein sel-1 homolog 1 isoform 2 precursor) c4(87694) c5(87695, 87696, 87697, 87698, 87699, 87700) c6( ) c7(bL, T, aC, ads, ht, jh, hz, baK, aUz, ci, eA, ad, eJ, av, hd, aE, aT, hD, K, hu, dQ, ae, A, aW, ff, fe, akY, Io, kp, en, g, iV, mb, bz, mi, eM, Uq, it); #c1(SEL1L) c2(NP_005056) c3(protein sel-1 homolog 1 isoform 1 precursor) c4(152489) c5(152490, 152491, 152492, 152493, 152494, 152495, 152496) c6( ) c7(bL, T, aC, ads, ht, jh, hz, baK, aUz, ci, eA, ad, eJ, av, hd, aE, aT, hD, K, hu, dQ, ae, A, aW, ff, fe, akY, Io, kp, en, g, iV, mb, bz, mi, eM, Uq, it); #c1(SEL1L) c2(XP_005268045) c3(protein sel-1 homolog 1 isoform X1) c4(281420) c5( ) c6( ) c7(bL, T, aC, ads, ht, jh, hz, baK, aUz, ci, eA, ad, eJ, av, hd, aE, aT, hD, K, hu, dQ, ae, A, aW, ff, fe, akY, Io, kp, en, g, iV, mb, bz, mi, eM, Uq, it); #c1(SEL1L) c2(XP_005268046) c3(protein sel-1 homolog 1 isoform X2) c4( ) c5(281421, 281422, 281423, 281424, 281425) c6( ) c7(bL, T, aC, ads, ht, jh, hz, baK, aUz, ci, eA, ad, eJ, av, hd, aE, aT, hD, K, hu, dQ, ae, A, aW, ff, fe, akY, Io, kp, en, g, iV, mb, bz, mi, eM, Uq, it); #c1(SELE) c2(NP_000441) c3(E-selectin precursor) c4(8988, 8989, 8990, 8991, 8992) c5(8993, 8994, 8995, 8996, 8997, 8998, 8999, 9000, 9001, 9002, 9003, 9004, 9005, 9006, 9007, 9008, 9009, 9010, 9011, 9012, 9013, 9014, 9015, 9016, 9017, 9018, 9019, 9020, 9021, 9022, 9023, 9024, 9025, 9026, 9027, 9028, 9029, 9030, 9031, 9032, 9033, 9034, 9035, 9036, 9037, 9038) c6( ) c7(bM, T, aC, fR, ea, e, bB, cL, fe, ci, aY, Tz, Hr, wa, dY, aE, M, dV, K, ass, aW, asD, hl, fc, zC, g, eE, uC, ou, lt, vy, eg, qR, dD, aw, aj, fr, eh, eW, ec, lG, dL, ey, ux, cY, A, MD, Cw, PX, fJ, fe, cM, ar, kT, W, bPs, uz, fL, Pr, B, bL, eR, AL, wL, fG, oe, rf, aA, cR, cz, fF, v, j, bX, V, bpW, q, o, J, qp, aT, cy, qG, aAD, ae, af, qk, bA, eu, NE, oV, Y, ev, r, en, pb, ck, nM, ac, c, aQd, lV, AH, cCB, hO, wR, mf, cS, byK, ht, gV, sY, aFe, qb, aD, iW, jh, oR, dG, eq, jE, mC, ad, kL, hX, av, hd, LA, hD, JK, ji, vl, yF, uQ, hG, cH, cW, ff, gC, eZ, aF, hp, Fq, qa, D, pc, cCC, bE, aS, agI, ei, XO, lC, X, y); #c1(SELENBP1) c2(NP_001245217) c3(selenium-binding protein 1 isoform 2) c4(92744) c5(92745, 92746, 92747, 92748, 92749, 92750) c6( ) c7(bL, T, pf, e, aA, cz, fd, aj, v, j, q, J, ad, av, axe, aT, afV, bK, K, ae, Nr, aW, r, fQ, gl, po, g, Eg, t, Nq, vK, z, Gs, m, ei, B); #c1(SELENBP1) c2(NP_003935) c3(selenium-binding protein 1 isoform 1) c4(142310) c5(142311, 142312, 142313, 142314, 142315, 142316, 142317, 142318, 142319, 142320) c6( ) c7(bL, T, pf, e, aA, cz, fd, aj, v, j, q, J, ad, av, axe, aT, afV, bK, K, ae, Nr, aW, r, fQ, gl, po, g, Eg, t, Nq, vK, z, Gs, m, ei, B); #c1(SELENBP1) c2(XP_011508412) c3(selenium-binding protein 1 isoform X1) c4(299134) c5(299135, 299136) c6( ) c7(bL, T, pf, e, aA, cz, fd, aj, v, j, q, J, ad, av, axe, aT, afV, bK, K, ae, Nr, aW, r, fQ, gl, po, g, Eg, t, Nq, vK, z, Gs, m, ei, B); #c1(SELK) c2(NP_067060) c3(selenoprotein K) c4(208781, 208782) c5(208783, 208784, 208785, 208786, 208787, 208788, 208789, 208790, 208791, 208792, 208793, 208794) c6( ) c7(ae, RT, ad); #c1(SELL) c2(NP_000646) c3(L-selectin precursor) c4(14150) c5(14151, 14152, 14153, 14154, 14155, 14156) c6( ) c7(bM, T, fR, ea, e, fo, ci, aFV, aE, aoL, Ds, K, hH, asD, zC, uC, vy, cj, dD, aw, aDT, aj, ct, ai, kH, FN, lG, h, ey, A, fe, ar, dB, bm, at, bL, Dw, dA, eR, aA, cR, cz, j, C, V, J, qp, cy, bA, iU, xR, oV, Y, ck, nM, ac, c, aQd, iM, hc, dy, bt, qb, aD, iW, jh, bS, eq, EA, wD, dP, cCD, hD, ji, uX, je, eZ, hp, iV, Z, dr, es, eU, bE, XO, y, fh); #c1(SELO) c2(NP_113642) c3(selenoprotein 0) c4(221893) c5(221894, 221895, 221896, 221897, 221898, 221899) c6( ) c7(LU); #c1(SELP) c2(NP_002996) c3(P-selectin precursor) c4(134261, 134262, 134263) c5(134264, 134265, 134266, 134267, 134268, 134269, 134270, 134271, 134272, 134273, 134274, 134275, 134276, 134277, 134278, 134279, 134280, 134281, 134282, 134283, 134284, 134285, 134286, 134287, 134288, 134289) c6( ) c7(bM, T, ea, e, al, fd, cL, fo, ci, dY, vV, Be, M, K, dQ, DY, hm, aW, mQ, hl, eE, uC, nB, vy, cj, wx, dD, aw, aj, cd, eW, ec, h, lG, ey, cY, A, sp, EU, fQ, cM, ar, Fi, pg, bL, eR, AL, mr, zk, rf, cz, v, j, C, bX, V, eA, o, J, rS, aT, cy, af, eu, bA, iU, NE, r, pb, ck, ac, wO, hc, bSs, fD, sY, bRw, qb, auq, eq, dZ, av, qh, JK, ji, lQ, bGD, vl, sj, d, cH, eZ, kD, bRq, qa, pc, bE, aka, aFb, gZ, MJ, aS, ME, IC, xg, iu, y); #c1(SELP) c2(XP_005245496) c3(P-selectin isoform X2) c4(266610) c5(266611, 266612, 266613, 266614, 266615, 266616) c6( ) c7(bM, T, ea, e, al, fd, cL, fo, ci, dY, vV, Be, M, K, dQ, DY, hm, aW, mQ, hl, eE, uC, nB, vy, cj, wx, dD, aw, aj, cd, eW, ec, h, lG, ey, cY, A, sp, EU, fQ, cM, ar, Fi, pg, bL, eR, AL, mr, zk, rf, cz, v, j, C, bX, V, eA, o, J, rS, aT, cy, af, eu, bA, iU, NE, r, pb, ck, ac, wO, hc, bSs, fD, sY, bRw, qb, auq, eq, dZ, av, qh, JK, ji, lQ, bGD, vl, sj, d, cH, eZ, kD, bRq, qa, pc, bE, aka, aFb, gZ, MJ, aS, ME, IC, xg, iu, y); #c1(SELP) c2(XP_005245497) c3(P-selectin isoform X3) c4(266617, 266618, 266619, 266620, 266621) c5(266622, 266623, 266624, 266625, 266626, 266627, 266628, 266629, 266630, 266631, 266632, 266633, 266634, 266635, 266636, 266637, 266638, 266639, 266640, 266641, 266642, 266643, 266644, 266645, 266646, 266647, 266648, 266649, 266650, 266651, 266652, 266653, 266654, 266655, 266656, 266657, 266658, 266659, 266660, 266661, 266662, 266663, 266664) c6( ) c7(bM, T, ea, e, al, fd, cL, fo, ci, dY, vV, Be, M, K, dQ, DY, hm, aW, mQ, hl, eE, uC, nB, vy, cj, wx, dD, aw, aj, cd, eW, ec, h, lG, ey, cY, A, sp, EU, fQ, cM, ar, Fi, pg, bL, eR, AL, mr, zk, rf, cz, v, j, C, bX, V, eA, o, J, rS, aT, cy, af, eu, bA, iU, NE, r, pb, ck, ac, wO, hc, bSs, fD, sY, bRw, qb, auq, eq, dZ, av, qh, JK, ji, lQ, bGD, vl, sj, d, cH, eZ, kD, bRq, qa, pc, bE, aka, aFb, gZ, MJ, aS, ME, IC, xg, iu, y); #c1(SELPL6) c2(NP_001193538) c3(P-selectin glycoprotein ligand 1 isoform 1 precursor) c4(82253, 82254) c5( ) c6( ) c7(T, dD, ea, iW, aw, ez, fd, aj, v, j, eq, PJ, V, eW, J, aDF, qh, M, cy, ji, K, hm, OV, xR, cr, lo, eE, axp, ck, eU, ac, cj, qq, eo, XO, Gp); #c1(SELPL6) c2(XP_005269133) c3(P-selectin glycoprotein ligand 1 isoform X1) c4(282339) c5(282340, 282341, 282342, 282343, 282344, 282345, 282346, 282347, 282348, 282349, 282350, 282351, 282352, 282353, 282354, 282355, 282356, 282357) c6( ) c7(T, dD, ea, iW, aw, ez, fd, aj, v, j, eq, PJ, V, eW, J, aDF, qh, M, cy, ji, K, hm, OV, xR, cr, Io, eE, axp, ck, eU, ac, cj, qq, eo, XO, Gp); #c1(SELT) c2(NP_057359) c3(selenoprotein T precursor) c4(190334) c5(190335, 190336, 190337, 190338, 190339, 190340) c6( ) c7(ey); #c1(SEMA3A) c2(XP_006715902) c3(semaphorin-3A isoform X1) c4(289903, 289904) c5(289905, 289906, 289907, 289908, 289909, 289910, 289911, 289912, 289913, 289914, 289915, 289916, 289917, 289918, 289919, 289920, 289921, 289922, 289923, 289924, 289925, 289926, 289927, 289928, 289929, 289930) c6(289931, 289932, 289933, 289934, 289935, 289936) c7(T, dt, aC, Ol, oe, e, rf, fd, aj, cCF, ci, V, eA, ad, J, yn, av, yt, fm, aT, h, cCE, ae, af, cY, aW, Y, cr, ahJ, VO, c, ln, vy, wR, UF, hS); #c1(SEMA3A) c2(XP_011514037) c3(semaphorin-3A isoform X2) c4(306461, 306462) c5(306463, 306464, 306465, 306466, 306467, 306468, 306469, 306470, 306471, 306472) c6(306473, 306474) c7(T, dt, aC, Ol, oe, e, rf, fd, aj, cCF, ci, V, eA, ad, J, yn, av, yt, fm, aT, h, cCE, ae, af, cY, aW, Y, cr, ahJ, VO, c, ln, vy, wR, UF, hS); #c1(SEMA3B) c2(NP_001276989) c3(semaphorin-3B isoform 1 precursor) c4(108914, 108915, 108916) c5(108917, 108918, 108919, 108920, 108921, 108922, 108923, 108924, 108925, 108926, 108927, 108928, 108929, 108930, 108931, 108932, 108933, 108934, 108935, 108936, 108937, 108938) c6(108939, 108940, 108941, 108942) c7(T, eA, ad, av, ft, jz, Qk, io, ae, aa, d, aq, g, cm, t, bz, bP, eM, hL, m, it, B, hS); #c1(SEMA3C) c2(NP_006370) c3(semaphorin-3C precursor) c4(164417, 164418, 164419) c5(164420, 164421, 164422, 164423, 164424, 164425, 164426, 164427, 164428, 164429, 164430, 164431, 164432, 164433, 164434, 164435, 164436, 164437, 164438, 164439, 164440) c6(164441, 164442, 164443, 164444, 164445, 164446) c7(ae, T, iu, yt, aw, ff, aT, aA, Hr, aF, ahl, en, eA, y, ahE, B, ad); #c1(SEMA3C) c2(XP_005250170) c3(semaphorin-3C isoform X1) c4( ) c5(270150, 270151, 270152, 270153, 270154, 270155, 270156, 270157) c6(270158, 270159) c7(ae, T, iu, yt, aw, ff, aT, aA, Hr, aF, ahI, en, eA, y, ahE, B, ad); #c1(SEMA3D) c2(NP_689967) c3(semaphorin-3D precursor) c4(244620) c5(244621, 244622, 244623, 244624, 244625, 244626, 244627, 244628) c6(244629, 244630) c7(W, gv, ahI, hH, ahE, eA); #c1(SEMA3E) c2(NP_001171600) c3(semaphorin-3E isoform 2) c4( ) c5(70712, 70713, 70714, 70715, 70716) c6( ) c7(T, wL, Y, avQ, ae, ad, cp); #c1(SEMA3E) c2(NP_036563) c3(semaphorin-3E isoform 1 precursor) c4(174418, 174419, 174420) c5(174421, 174422, 174423, 174424, 174425, 174426, 174427, 174428, 174429, 174430, 174431, 174432, 174433) c6( ) c7(T, wL, Y, avQ, ae, ad, cp); #c1(SEMA3F) c2(NP_004177) c3(semaphorin-3F precursor) c4(144100) c5(144101, 144102, 144103, 144104, 144105, 144106, 144107, 144108) c6(144109, 144110) c7(ae, T, ft, av, ac, VO, bE, aW, Ls, aw, hL, r, aT, bB, cCG, bz, q, ad); #c1(SEMA3F) c2(XP_006713353) c3(semaphorin-3F isoform X5) c4( ) c5(287155, 287156, 287157, 287158, 287159, 287160) c6( ) c7(ae, T, ft, av, ac, VO, bE, aW, Ls, aw, hL, r, aT, bB, cCG, bz, q, ad); #c1(SEMA3F) c2(XP_011532301) c3(semaphorin-3F isoform X2) c4(328445, 328446, 328447, 328448) c5(328449, 328450, 328451, 328452, 328453, 328454, 328455, 328456, 328457, 328458, 328459, 328460, 328461, 328462, 328463, 328464, 328465, 328466) c6( ) c7(ae, T, ft, av, ac, VO, bE, aW, Ls, aw, hL, r, aT, bB, cCG, bz, q, ad); #c1(SEMA3G) c2(NP_064548) c3(semaphorin-3G precursor) c4(202926) c5(202927, 202928, 202929, 202930, 202931, 202932, 202933, 202934) c6(202935, 202936) c7(eA, hS); #c1(SEMA4A) c2(NP_001180231) c3(semaphorin-4A isoform 2) c4(73466) c5(73467, 73468, 73469, 73470, 73471, 73472, 73473, 73474) c6( ) c7(Kd, bM, lR, Ke, eM, z, eE, U, cCl, nw, eo, cCH, oQ, fD, V, nC); #c1(SEMA4A) c2(XP_011508173) c3(semaphorin-4A isoform X2) c4(298732) c5(298733) c6( ) c7(Kd, bM, lR, Ke, eM, z, eE, U, cCl, nw, eo, cCH, oQ, fD, V, nC); #c1(SEMA4A) c2(XP_011508175) c3(semaphorin-4A isoform X1) c4(298734, 298735, 298736, 298737) c5(298738, 298739, 298740, 298741, 298742, 298743, 298744, 298745, 298746, 298747, 298748, 298749, 298750, 298751, 298752, 298753, 298754, 298755, 298756, 298757, 298758, 298759, 298760, 298761, 298762, 298763, 298764, 298765, 298766, 298767, 298768, 298769, 298770, 298771, 298772, 298773, 298774, 298775) c6( ) c7(Kd, bM, lR, Ke, eM, z, eE, U, cCl, nw, eo, cCH, oQ, fD, V, nC); #c1(SEMA4A) c2(XP_011508180) c3(semaphorin-4A isoform X3) c4( ) c5(298776, 298777, 298778, 298779, 298780) c6( ) c7(Kd, bM, lR, Ke, eM, z, eE, U, cCl, nw, eo, cCH, oQ, fD, V, nC); #c1(SEMA4B) c2(NP_064595) c3(semaphorin-4B precursor) c4(203162, 203163, 203164, 203165, 203166) c5(203167, 203168, 203169, 203170, 203171, 203172, 203173, 203174, 203175, 203176, 203177, 203178, 203179, 203180, 203181, 203182, 203183, 203184, 203185, 203186, 203187, 203188, 203189, 203190, 203191, 203192, 203193, 203194, 203195, 203196, 203197, 203198, 203199, 203200) c6( ) c7(bz, iu); #c1(SEMA4B) c2(XP_011519462) c3(semaphorin-4B isoform X1) c4( ) c5(314130) c6( ) c7(bz, iu); #c1(SEMA4D) c2(XP_005251711) c3(semaphorin-4D isoform X1) c4(271066, 271067, 271068, 271069, 271070) c5(271071, 271072, 271073, 271074, 271075, 271076, 271077, 271078, 271079, 271080, 271081, 271082, 271083, 271084, 271085, 271086, 271087, 271088) c6( ) c7(bM, cT, T, aE, af, yE, Y, ff, cj, aj, kp, ci, en, DY, iK, ae, cd, J, ad); #c1(SEMA4D) c2(XP_011516437) c3(semaphorin-4D isoform X2) c4(309650, 309651) c5(309652, 309653, 309654, 309655, 309656, 309657, 309658, 309659, 309660, 309661, 309662, 309663, 309664, 309665, 309666, 309667) c6( ) c7(bM, cT, T, aE, af, yE, Y, ff, cj, aj, kp, ci, en, DY, iK, ae, cd, J, ad); #c1(SEMA4D) c2(XP_011516439) c3(semaphorin-4D isoform X4) c4( ) c5(309668, 309669, 309670, 309671, 309672, 309673, 309674, 309675, 309676, 309677, 309678, 309679, 309680, 309681, 309682, 309683, 309684, 309685, 309686, 309687, 309688, 309689, 309690, 309691) c6( ) c7(bM, cT, T, aE, af, yE, Y, ff, cj, aj, kp, ci, en, DY, iK, ae, cd, J, ad); #c1(SEMA4F) c2(NP_001258590) c3(semaphorin-4F isoform 2 precursor) c4(96167) c5(96168, 96169, 96170, 96171, 96172) c6( ) c7(n, ae, ad); #c1(SEMA4F) c2(NP_004254) c3(semaphorin-4F isoform 1 precursor) c4(144631) c5(144632, 144633, 144634, 144635, 144636, 144637, 144638) c6( ) c7(n, ae, ad); #c1(SEMA4G) c2(NP_001190173) c3(semaphorin-4G isoform 2 precursor) c4(80299) c5(80300, 80301, 80302, 80303, 80304, 80305, 80306, 80307, 80308, 80309, 80310, 80311) c6( ) c7(es, fr); #c1(SEMA4G) c2(NP_060363) c3(semaphorin-4G isoform 1 precursor) c4(195592, 195593) c5(195594, 195595, 195596, 195597, 195598, 195599, 195600, 195601, 195602, 195603, 195604, 195605, 195606, 195607, 195608, 195609, 195610, 195611) c6( ) c7(es, fr); #c1(SEMA4G) c2(XP_005270067) c3(semaphorin-4G isoform X2) c4(283081, 283082, 283083) c5(283084, 283085, 283086, 283087, 283088, 283089, 283090, 283091, 283092, 283093) c6( ) c7(es, fr); #c1(SEMA5A) c2(NP_003957) c3(semaphorin-5A precursor) c4(142444, 142445) c5(142446, 142447, 142448, 142449, 142450, 142451, 142452, 142453, 142454, 142455, 142456, 142457) c6( ) c7(T, aC, dY, aE, aYJ, oe, aw, aA, By, aF, nA, an, as, eA, bN); #c1(SEMA5A) c2(XP_011512461) c3(semaphorin-5A isoform X2) c4( ) c5(303142, 303143) c6( ) c7(T, aC, dY, aE, aYJ, oe, aw, aA, By, aF, nA, an, as, eA, bN); #c1(SEMA5B) c2(NP_001026872) c3(semaphorin-5B isoform 1) c4(29743) c5(29744, 29745, 29746, 29747, 29748, 29749, 29750, 29751, 29752, 29753, 29754, 29755, 29756, 29757, 29758, 29759, 29760, 29761, 29762, 29763) c6( ) c7(fr, ht); #c1(SEMA5B) c2(NP_001243276) c3(semaphorin-5B isoform 2) c4(90349, 90350, 90351, 90352) c5(90353, 90354, 90355, 90356, 90357, 90358, 90359, 90360) c6( ) c7(fr, ht); #c1(SEMA5B) c2(NP_001243277) c3(semaphorin-5B isoform 3 precursor) c4(90361) c5(90362, 90363, 90364, 90365, 90366, 90367) c6( ) c7(fr, ht); #c1(SEMA5B) c2(XP_011511219) c3(semaphorin-5B isoform X1) c4(301697) c5(301698, 301699, 301700, 301701, 301702, 301703, 301704, 301705) c6( ) c7(fr, ht); #c1(SEMA6A) c2(NP_001287709) c3(semaphorin-6A isoform 1 precursor) c4(112582, 112583, 112584, 112585) c5(112586, 112587, 112588, 112589, 112590, 112591) c6( ) c7(bM, T, os, ea, if, al, fd, bB, VV, x, aE, fm, M, aU, iv, K, hu, DY, aiV, dH, aW, ve, uC, cm, eM, Jr, nB, uo, cCL, dW, k, m, yA, aTe, dD, Io, ht, n, aj, fr, qN, cd, ai, eW, cCK, h, he, cY, A, agI, hL, hs, hR, at, HB, it, B, cn, jv, fM, dA, lH, jx, aA, cz, arw, sl, Eh, q, J, er, eA, aT, cy, ae, af, Y, r, en, cl, t, nC, iK, pb, ck, kP, c, aGi, au, ht, rA, ao, ha, oZ, bS, eq, cCJ, ad, qh, ji, vP, lR, ff, wc, cr, eZ, gl, Ej, aF, bz, dr, aYt, eK, gk, RV, bE, uR, lI, dX, y, fh); #c1(SEMAGA) c2(NP_065847) c3(semaphorin-GA isoform 2 precursor) c4(205833) c5(205834, 205835, 205836, 205837, 205838, 205839, 205840, 205841, 205842, 205843, 205844, 205845, 205846, 205847, 205848, 205849) c6( ) c7(bM, T, os, ea, if, al, fd, bB, VV, x, aE, fm, M, aU, iv, K, hu, DY, aiV, dH, aW, ve, uC, cm, eM, Jr, nB, uo, cCL, dW, k, m, yA, aTe, dD, Io, ht, n, aj, fr, qN, cd, ai, eW, cCK, h, he, cY, A, agI, hL, hs, hR, at, HB, it, B, cn, jv, fM, dA, lH, jx, aA, cz, arw, sl, Eh, q, J, er, eA, aT, cy, ae, af, Y, r, en, cl, t, nC, iK, pb, ck, kP, c, aGi, au, ht, rA, ao, ha, oZ, bS, eq, cCJ, ad, qh, ji, vP, lR, ff, wc, cr, eZ, gl, Ej, aF, bz, dr, aYt, eK, gk, RV, bE, uR, lI, dX, y, fh); #c1(SEMAGA) c2(XP_005272099) c3(semaphorin-GA isoform X2) c4(283675) c5(283676, 283677, 283678, 283679, 283680, 283681, 283682, 283683, 283684, 283685, 283686, 283687, 283688, 283689, 283690, 283691, 283692, 283693, 283694, 283695, 283696, 283697, 283698, 283699) c6( ) c7(bM, T, os, ea, if, al, fd, bB, VV, x, aE, fm, M, aU, iv, K, hu, DY, aiV, dH, aW, ve, uC, cm, eM, Jr, nB, uo, cCL, dW, k, m, yA, aTe, dD, Io, ht, n, aj, fr, qN, cd, ai, eW, cCK, h, he, cY, A, agI, hL, hs, hR, at, HB, it, B, cn, jv, fM, dA, lH, jx, aA, cz, arw, sl, Eh, q, J, er, eA, aT, cy, ae, af, Y, r, en, cl, t, nC, iK, pb, ck, kP, c, aGi, au, bt, rA, ao, ha, al, bS, eq, cCJ, ad, qh, ji, vP, lR, ff, wc, cr, eZ, gl, Ej, aF, bz, dr, aYt, eK, gk, RV, bE, uR, lI, dX, y, fh); #c1(SEMA6A) c2(XP_006714726) c3(semaphorin-6A isoform X1) c4(288055) c5( ) c6( ) c7(bM, T, os, ea, if, al, fd, bB, VV, x, aE, fm, M, aU, iv, K, hu, DY, aiV, dH, aW, ve, uC, cm, eM, Jr, nB, uo, cCL, dW, k, m, yA, aTe, dD, Io, ht, n, aj, fr, qN, cd, ai, eW, cCK, h, he, cY, A, agI, hL, hs, hR, at, HB, it, B, cn, jv, fM, dA, lH, jx, aA, cz, arw, sl, Eh, q, J, er, eA, aT, cy, ae, af, Y, r, en, cl, t, nC, iK, pb, ck, kP, c, aGi, au, bt, rA, ao, ha, nZ, bS, eq, cCJ, ad, qh, ji, vP, lR, ff, wc, cr, al, gl, Ej, aF, bz, dr, aYt, eK, gk, RV, bE, uR, lI, dX, y, fh); #c1(SEMA6B) c2(NP_115484) c3(semaphorin-6B precursor) c4(222868, 222869) c5(222870, 222871, 222872, 222873, 222874, 222875, 222876, 222877, 222878, 222879, 222880, 222881, 222882, 222883, 222884, 222885) c6( ) c7(d, im); #c1(SEMA6D) c2(NP_001185928) c3(semaphorin-6D isoform 1 precursor) c4(76776, 76777) c5(76778, 76779, 76780, 76781, 76782, 76783, 76784, 76785, 76786, 76787, 76788, 76789, 76790, 76791, 76792, 76793, 76794, 76795, 76796, 76797) c6( ) c7(eR, nO, fe, an, aY, lB, fq); #c1(SEMA6D) c2(NP_705872) c3(semaphorin-6D isoform 5 precursor) c4(246365) c5(246366, 246367, 246368, 246369, 246370, 246371, 246372, 246373, 246374, 246375) c6( ) c7(eR, nO, fe, an, aY, lB, fq); #c1(SEMA6D) c2(XP_005254744) c3(semaphorin-6D isoform X4) c4(273309, 273310, 273311) c5(273312, 273313, 273314, 273315, 273316, 273317, 273318, 273319, 273320, 273321) c6( ) c7(eR, nO, fe, an, aY, lB, fq); #c1(SEMA6D) c2(XP_005254746) c3(semaphorin-6D isoform X8) c4(273322, 273323) c5(273324, 273325, 273326, 273327, 273328, 273329) c6( ) c7(eR, nO, fe, an, aY, lB, fq); #c1(SEMA6D) c2(XP_011520377) c3(semaphorin-6D isoform X6) c4( ) c5(315199, 315200, 315201, 315202, 315203) c6( ) c7(eR, nO, fe, an, aY, lB, fq); #c1(SEMA6D) c2(XP_011520380) c3(semaphorin-6D isoform X9) c4(315204) c5(315205, 315206, 315207, 315208, 315209, 315210) c6( ) c7(eR, nO, fe, an, aY, lB, fq); #c1(SEMA6D) c2(XP_011520381) c3(semaphorin-60 isoform X3) c4(315211) c5(315212, 315213, 315214, 315215, 315216, 315217) c6( ) c7(eR, nO, fe, an, aY, lB, fq); #c1(SEMA6D) c2(XP_011520383) c3(semaphorin-6D isoform X2) c4(315218) c5(315219, 315220, 315221, 315222, 315223, 315224) c6( ) c7(eR, nO, fe, an, aY, lB, fq); #c1(SEMA6D) c2(XP_011520384) c3(semaphorin-6D isoform X1) c4( ) c5(315225, 315226, 315227, 315228, 315229, 315230, 315231, 315232, 315233, 315234, 315235, 315236, 315237) c6( ) c7(eR, nO, fe, an, aY, lB, fq); #c1(SEMA7A) c2(NP_001139501) c3(semaphorin-7A isoform 2 preproprotein) c4(59434) c5(59435, 59436, 59437, 59438, 59439, 59440) c6( ) c7(T, Y, fG, bW, Du, yq, lR, cCM, pb, yn, UF); #c1(SEMA7A) c2(NP_001139502) c3(semaphorin-7A isoform 3) c4(59441) c5( ) c6( ) c7(T, Y, fG, bW, Du, yq, lR, cCM, pb, yn, UF); #c1(SEMA7A) c2(NP_003603) c3(semaphorin-7A isoform 1 preproprotein) c4(139516) c5(139517, 139518, 139519, 139520, 139521, 139522, 139523, 139524, 139525, 139526, 139527, 139528) c6( ) c7(T, Y, fG, bW, Du, yq, lR, cCM, pb, yn, UF); #c1(SEMG1) c2(NP_002998) c3(semenogelin-1 preproprotein) c4(134290, 134291) c5(134292, 134293, 134294, 134295, 134296, 134297, 134298, 134299, 134300, 134301, 134302, 134303) c6( ) c7(T, iU, MD, Me, r, cj, vH, fd, kp, fr, hu, bt, jJ, q); #c1(SEMG2) c2(NP_002999) c3(semenogelin-2 precursor) c4(134304) c5(134305, 134306, 134307, 134308, 134309, 134310) c6( ) c7(T); #c1(SENP1) c2(NP_001254524) c3(sentrin-specific protease 1) c4(94591, 94592) c5( ) c6( ) c7(ck, ae, eW, nB, bE, aW, vT, aT, bB, PQ, bz, y, kS, pi, ad); #c1(SENP1) c2(XP_006719424) c3(sentrin-specific protease 1 isoform X1) c4(292468) c5(292469, 292470, 292471, 292472) c6( ) c7(ck, ae, eW, nB, bE, aW, vT, aT, bB, PQ, bz, y, kS, pi, ad); #c1(SENP1) c2(XP_011536546) c3(sentrin-specific protease 1 isoform X2) c4( ) c5(334004, 334005, 334006, 334007, 334008) c6( ) c7(ck, ae, eW, nB, bE, aW, vT, aT, bB, PQ, bz, y, kS, pi, ad); #c1(SENP1) c2(XP_011536547) c3(sentrin-specific protease 1 isoform X3) c4( ) c5(334009, 334010, 334011, 334012, 334013, 334014, 334015, 334016, 334017, 334018, 334019, 334020, 334021, 334022, 334023, 334024, 334025, 334026, 334027, 334028, 334029, 334030, 334031) c6( ) c7(ck, ae, eW, nB, bE, aW, vT, aT, bB, PQ, bz, y, kS, pi, ad); #c1(SENP2) c2(NP_067640) c3(sentrin-specific protease 2) c4(209152, 209153, 209154) c5(209155, 209156, 209157, 209158, 209159, 209160, 209161, 209162, 209163, 209164, 209165, 209166, 209167, 209168, 209169) c6( ) c7(bD, eL, acl, dL); #c1(SENP2) c2(XP_005247748) c3(sentrin-specific protease 2 isoform X2) c4(267957) c5(267958, 267959, 267960, 267961, 267962, 267963, 267964, 267965, 267966, 267967, 267968) c6( ) c7(bD, eL, acl, dL); #c1(SENP3) c2(NP_056485) c3(sentrin-specific protease 3) c4(187722, 187723) c5(187724, 187725, 187726, 187727, 187728, 187729, 187730, 187731, 187732, 187733, 187734, 187735) c6( ) c7(cy, T, kS, K, ev); #c1(SENP5) c2(NP_689912) c3(sentrin-specific protease 5) c4(244343) c5(244344, 244345, 244346, 244347, 244348, 244349) c6( ) c7(ff, en); #c1(SENP6) c2(NP_001093879) c3(sentrin-specific protease 6 isoform 2) c4(40475, 40476) c5(40477, 40478, 40479, 40480, 40481, 40482) c6( ) c7(T, K, C); #c1(SENP6) c2(NP_001291721) c3(sentrin-specific protease 6 isoform 3) c4(116383) c5(116384, 116385, 116386, 116387, 116388) c6( ) c7(T, K, C); #c1(SENP6) c2(NP_056386) c3(sentrin-specific protease 6 isoform 1) c4(187385, 187386) c5(187387, 187388, 187389, 187390, 187391, 187392, 187393, 187394, 187395, 187396, 187397, 187398) c6( ) c7(T, K, C); #c1(SENP6) c2(XP_011534049) c3(sentrin-specific protease 6 isoform X4) c4( ) c5(330217, 330218, 330219, 330220, 330221, 330222, 330223) c6( ) c7(T, K, C); #c1(SENP8) c2(NP_001165580) c3(sentrin-specific protease 8) c4( ) c5(67802, 67803, 67804, 67805, 67806, 67807, 67808, 67809, 67810, 67811, 67812, 67813, 67814, 67815) c6( ) c7(bz, AH, cCN, aiK); #c1(SENP8) c2(XP_011519518) c3(sentrin-specific protease 8 isoform X2) c4(314173) c5(314174, 314175, 314176, 314177) c6( ) c7(bz, AH, cCN, aiK); #c1(37135) c2(NP_443070) c3(septin-1) c4(229217) c5(229218, 229219, 229220, 229221, 229222, 229223, 229224, 229225, 229226, 229227) c6( ) c7(uY, T, ff, en); #c1(37500) c2(NP_001008492) c3(septin-2 isoform a) c4(23215, 23216, 23217) c5(23218, 23219, 23220, 23221, 23222, 23223, 23224, 23225, 23226, 23227, 23228, 23229, 23230, 23231, 23232, 23233, 23234, 23235, 23236, 23237, 23238, 23239, 23240, 23241, 23242, 23243, 23244, 23245, 23246, 23247, 23248, 23249, 23250, 23251, 23252, 23253, 23254, 23255, 23256, 23257, 23258, 23259, 23260, 23261, 23262, 23263, 23264) c6( ) c7(dB, eZ, at, dL, K, as, bw, bt, pb); #c1(37500) c2(NP_001269901) c3(septin-2 isoform b) c4(103108) c5(103109, 103110, 103111, 103112, 103113, 103114, 103115) c6( ) c7(dB, eZ, at, dL, K, as, bw, bt, pb); #c1(37500) c2(NP_001269902) c3(septin-2 isoform c) c4(103116) c5( ) c6( ) c7(dB, eZ, at, dL, K, as, bw, bt, pb); #c1(37500) c2(XP_006712610) c3(septin-2 isoform X2) c4(286732, 286733, 286734, 286735) c5(286736, 286737, 286738, 286739, 286740, 286741, 286742, 286743, 286744, 286745) c6( ) c7(dB, eZ, at, dL, K, as, bw, bt, pb); #c1(37500) c2(XP_011509534) c3(septin-2 isoform X3) c4(300120) c5(300121, 300122, 300123, 300124, 300125, 300126) c6( ) c7(dB, eZ, at, dL, K, as, bw, bt, pb); #c1(37865) c2(NP_061979) c3(neuronal-specific septin-3 isoform 8) c4(201575, 201576, 201577, 201578) c5(201579, 201580, 201581, 201582, 201583, 201584, 201585, 201586, 201587, 201588, 201589, 201590, 201591, 201592, 201593, 201594, 201595, 201596, 201597, 201598, 201599, 201600, 201601) c6( ) c7(af, jN); #c1(37865) c2(NP_663786) c3(neuronal-specific septin-3 isoform A) c4(241598, 241599) c5(241600, 241601, 241602, 241603, 241604, 241605, 241606, 241607, 241608, 241609, 241610, 241611, 241612) c6( ) c7(af, jN); #c1(38231) c2(NP_001185642) c3(septin-4 isoform 4) c4(76015) c5(76016, 76017, 76018, 76019, 76020, 76021, 76022) c6( ) c7(T, ad, XX, x, aT, K, ae, azh, ago, d, B, aW, ff, hl, en, as, iK, csw, U, k, hE, X); #c1(38231) c2(NP_001243711) c3(septin-4 isoform 5) c4(91519) c5(91520, 91521, 91522, 91523, 91524, 91525, 91526) c6( ) c7(T, ad, XX, x, aT, K, ae, azh, ago, d, B, aW, ff, hl, en, as, iK, csw, U, k, hE, X); #c1(38231) c2(NP_004565) c3(septin-4 isoform 1) c4(147708) c5(147709, 147710, 147711147712, 147713, 147714, 147715, 147716, 147717, 147718, 147719, 147720, 147721, 147722, 147723, 147724, 147725, 147726, 147727, 147728, 147729, 147730, 147731, 147732, 147733, 147734, 147735, 147736, 147737, 147738, 147739, 147740, 147741, 147742, 147743, 147744, 147745, 147746, 147747, 147748, 147749, 147750, 147751, 147752, 147753, 147754, 147755, 147756, 147757, 147758, 147759, 147760, 147761, 147762, 147763, 147764, 147765, 147766, 147767, 147768, 147769, 147770, 147771, 147772, 147773, 147774, 147775, 147776, 147777, 147778, 147779, 147780, 147781, 147782, 147783, 147784, 147785, 147786, 147787, 147788, 147789, 147790, 147791, 147792, 147793, 147794, 147795, 147796, 147797, 147798, 147799, 147800, 147801, 147802, 147803, 147804) c6(147805, 147806) c7(T, ad, XX, x, aT, K, ae, azh, ago, d, B, aW, ff, hl, en, as, iK, csw, U, k, hE, X); #c1(38231) c2(NP_536340) c3(septin-4 isoform 2) c4(231242) c5(231243, 231244, 231245, 231246, 231247, 231248) c6( ) c7(T, ad, XX, x, aT, K, ae, azh, ago, d, B, aW, ff, hl, en, as, iK, csw, U, k, hE, X); #c1(38231) c2(XP_006722012) c3(septin-4 isoform X3) c4( ) c5(294540, 294541, 294542, 294543, 294544, 294545, 294546, 294547, 294548, 294549, 294550, 294551) c6( ) c7(T, ad, XX, x, aT, K, ae, azh, ago, d, B, aW, ff, hl, en, as, iK, csw, U, k, hE, X); #c1(38231) c2(XP_006722015) c3(septin-4 isoform X6) c4(294552) c5( ) c6( ) c7(T, ad, XX, x, aT, K, ae, azh, ago, d, B, aW, ff, hl, en, as, iK, csw, U, k, hE, X); #c1(38231) c2(XP_011523212) c3(septin-4 isoform X2) c4(317731, 317732) c5( ) c6( ) c7(T, ad, XX, x, aT K, ae, azh, ago, d, B, aW, ff, hl, en, as, iK, csw, U, k, hE, X); #c1(38231) c2(XP_011523214) c3(septin-4 isoform X1) c4( ) c5(317733, 317734, 317735, 317736, 317737) c6( ) c7(T, ad, XX, x, aT, K, ae, azh, ago, d, B, aW, ff, hl, en, as, iK, csw, U, k, hE, X); #c1(38596) c2(NP_001009939) c3(septin-5 isoform 2) c4(23757) c5(23758, 23759, 23760, 23761, 23762, 23763, 23764, 23765, 23766, 23767, 23768) c6( ) c7(bL, ck, x, bgk, iT, RX, bpp, U, k, bt); #c1(38596) c2(NP_002679) c3(septin-5 isoform 1) c4(130869, 130870, 130871, 130872) c5(130873, 130874, 130875, 130876, 130877, 130878, 130879, 130880, 130881, 130882, 130883, 130884, 130885, 130886, 130887, 130888, 130889, 130890, 130891, 130892, 130893, 130894, 130895) c6( ) c7(bL, ck, x, bgk, iT, RX, bpp, U, k, bt); #c1(38961) c2(NP_055944) c3(septin-6 isoform B) c4(184588) c5(184589, 184590, 184591, 184592, 184593, 184594) c6( ) c7(ck, dz, iT, bt); #c1(38961) c2(NP_665801) c3(septin-6 isoform D) c4(241691) c5(241692, 241693, 241694, 241695, 241696, 241697) c6( ) c7(ck, dz, iT, bt); #c1(38961) c2(XP_005262457) c3(septin-6 isoform X3) c4( ) c5(277963) c6( ) c7(ck, dz, iT, bt); #c1(38961) c2(XP_006724811) c3(septin-6 isoform X5) c4(296400) c5(296401, 296402, 296403, 296404, 296405, 296406) c6( ) c7(ck, dz, iT, bt); #c1(38961) c2(XP_006724813) c3(septin-6 isoform X1) c4(296407, 296408, 296409) c5(296410, 296411, 296412, 296413, 296414, 296415, 296416, 296417, 296418, 296419, 296420, 296421, 296422, 296423, 296424, 296425, 296426, 296427, 296428, 296429, 296430, 296431, 296432, 296433, 296434, 296435, 296436, 296437, 296438) c6( ) c7(ck, dz, iT, bt); #c1(38961) c2(XP_011529619) c3(septin-6 isoform X2) c4(325154) c5( ) c6( ) c7(ck, dz, iT, bt); #c1(38961) c2(XP_011529620) c3(septin-6 isoform X4) c4( ) c5(325155, 325156) c6( ) c7(ck, dz, iT, bt); #c1(39326) c2(NP_001011553) c3(septin-7 isoform 2) c4(24618, 24619, 24620) c5(24621, 24622, 24623, 24624, 24625, 24626, 24627, 24628, 24629, 24630, 24631, 24632, 24633, 24634, 24635, 24636, 24637, 24638, 24639, 24640, 24641, 24642, 24643, 24644, 24645, 24646, 24647) c6( ) c7(h, eA, d, K, as); #c1(39326) c2(NP_001229885) c3(septin-7 isoform 3) c4(85490) c5(85491, 85492, 85493, 85494, 85495, 85496, 85497, 85498, 85499, 85500, 85501, 85502, 85503, 85504, 85505, 85506, 85507, 85508, 85509, 85510, 85511, 85512) c6( ) c7(h, eA, d, K, as); #c1(39326) c2(NP_001779) c3(septin-7 isoform 1) c4(121033, 121034, 121035) c5(121036, 121037, 121038, 121039, 121040, 121041, 121042) c6( ) c7(h, eA, d, K, as); #c1(39326) c2(XP_006715869) c3(septin-7 isoform X6) c4(289882) c5( ) c6( ) c7(h, eA, d, K, as); #c1(39326) c2(XP_011513962) c3(septin-7 isoform X5) c4( ) c5(306405, 306406, 306407, 306408, 306409, 306410) c6( ) c7(h, eA, d, K, as); #c1(39326) c2(XP_011513964) c3(septin-7 isoform X8) c4(306411) c5( ) c6( ) c7(h, eA, d, K, as); #c1(40057) c2(NP_001106963) c3(septin-9 isoform a) c4(42685, 42686) c5(42687, 42688, 42689, 42690, 42691, 42692, 42693) c6( ) c7(cCO, T, qx, bB, amj, ci, fu, bX, q, ad, aE, dV, aT, K, ae, pl, s, NE, aW, r, aot, t, cCQ, iK, bw, ck, iT, csw, dB, bt, cCP); #c1(40057) c2(NP_001106965) c3(septin-9 isoform b) c4(42694) c5(42695, 42696, 42697, 42698, 42699, 42700, 42701, 42702) c6( ) c7(cCO, T, qx, bB, amj, ci, fu, bX, q, ad, aE, dV, aT, K, ae, pl, s, NE, aW, r, aot, t, cCQ, iK, bw, ck, iT, csw, dB, bt, cCP); #c1(40057) c2(NP_001106966) c3(septin-9 isoform e) c4( ) c5(42703, 42704, 42705, 42706, 42707, 42708, 42709, 42710, 42711, 42712, 42713, 42714, 42715, 42716) c6( ) c7(cCO, T, qx, bB, amj, ci, fu, bX, q, ad, aE, dV, aT, K, ae, pl, s, NE, aW, r, aot, t, cCQ, iK, bw, ck, iT, csw, dB, bt, cCP); #c1(40057) c2(NP_001106967) c3(septin-9 isoform d) c4(42717) c5(42718, 42719, 42720, 42721, 42722, 42723) c6( ) c7(cCO, T, qx, bB, amj, ci, fu, bX, q, ad, aE, dV, aT, K, ae, pl, s, NE, aW, r, aot, t, cCQ, iK, bw, ck, iT, csw, dB, bt, cCP); #c1(40057) c2(NP_001280625) c3(septin-9 isoform h) c4(111543) c5(111544, 111545, 111546, 111547, 111548, 111549, 111550, 111551) c6( ) c7(cCO, T, qx, bB, amj, ci, fu, bX, q, ad, aE, dV, aT, K, ae, pl, s, NE, aW, r, aot, t, cCQ, iK, bw, ck, iT, csw, dB, bt, cCP); #c1(40057) c2(NP_001280626) c3(septin-9 isoform f) c4( ) c5(111552, 111553, 111554, 111555, 111556, 111557, 111558, 111559, 111560, 111561, 111562, 111563, 111564) c6( ) c7(cCO, T, qx, bB, amj, ci, fu, bX, q, ad, aE, dV, aT, K, ae, pl, s, NE, aW, r, aot, t, cCQ, iK, bw, ck, iT, csw, dB, bt, cCP); #c1(40057) c2(NP_006631) c3(septin-9 isoform c) c4(166737) c5(166738, 166739, 166740, 166741, 166742, 166743, 166744, 166745, 166746) c6( ) c7(cCO, T, qx, bB, amj, ci, fu, bX, q, ad, aE, dV, aT, K, ae, pl, s, NE, aW, r, aot, t, cCQ, iK, bw, ck, iT, csw, dB, bt, cCP); #c1(40057) c2(XP_011522507) c3(septin-9 isoform X4) c4( ) c5(317134) c6( ) c7(cCO, T, qx, bB, amj, ci, fu, bX, q, ad, aE, dV, aT, K, ae, pl, s, NE, aW, r, aot, t, cCQ, iK, bw, ck, iT, csw, dB, bt, cCP); #c1(40057) c2(XP_011522508) c3(septin-9 isoform X5) c4(317135, 317136) c5( ) c6( ) c7(cCO, T, qx, bB, amj, ci, fu, bX, q, ad, aE, dV, aT, K, ae, pl, s, NE, aW, r, aot, t, cCQ, iK, bw, ck, iT, csw, dB, bt, cCP); #c1(40422) c2(NP_653311) c3(septin-10 isoform 1) c4(239550, 239551, 239552) c5(239553, 239554, 239555, 239556, 239557, 239558) c6( ) c7(T, ci); #c1(40422) c2(NP_848699) c3(septin-10 isoform 2) c4(254191) c5(254192, 254193, 254194, 254195, 254196, 254197) c6( ) c7(T, ci); #c1(40422) c2(XP_006712380) c3(septin-10 isoform X5) c4(286629) c5(286630, 286631, 286632, 286633, 286634, 286635, 286636, 286637, 286638, 286639, 286640) c6( ) c7(T, ci); #c1(40422) c2(XP_011508999) c3(septin-10 isoform X1) c4(299585) c5(299586, 299587, 299588, 299589, 299590, 299591) c6( ) c7(T, ci); #c1(40422) c2(XP_011509003) c3(septin-10 isoform X6) c4( ) c5(299592, 299593, 299594, 299595, 299596, 299597) c6( ) c7(T, ci); #c1(40422) c2(XP_011509005) c3(septin-10 isoform X8) c4( ) c5(299598) c6( ) c7(T, ci); #c1(40422) c2(XP_011509006) c3(septin-10 isoform X9) c4(299599) c5(299600, 299601, 299602, 299603, 299604, 299605) c6( ) c7(T, ci); #c1(40422) c2(XP_011509007) c3(septin-10 isoform X10) c4(299606) c5(299607, 299608, 299609, 299610, 299611, 299612) c6( ) c7(T, ci); #c1(40787) c2(NP_060713) c3(septin-11) c4(197388, 197389) c5(197390, 197391, 197392, 197393, 197394, 197395, 197396, 197397, 197398, 197399, 197400, 197401) c6( ) c7(ck, csw, WY, aaE, bK, bt); #c1(41153) c2(NP_001147930) c3(septin-12 isoform 1) c4(60098) c5(60099, 60100, 60101, 60102, 60103, 60104) c6( ) c7(cCR, gU); #c1(41153) c2(NP_653206) c3(septin-12 isoform 2) c4(239064) c5(239065, 239066, 239067, 239068, 239069, 239070) c6( ) c7(cCR, gU); #c1(41883) c2(NP_997249) c3(septin-14) c4(265318, 265319) c5(265320, 265321, 265322, 265323, 265324, 265325, 265326, 265327, 265328, 265329, 265330, 265331) c6( ) c7(d); #c1(42248) c2(NP_004252) c3(15 kDa selenoprotein isoform 1 precursor) c4(144609, 144610) c5(144611, 144612, 144613, 144614, 144615, 144616, 144617) c6( ) c7(av, T, eM, bE, eL, bB, at, dL, bz, ae, B, ad); #c1(SEPHS1) c2(NP_001182531) c3(selenide, water dikinase 1 isoform 2) c4( ) c5(74992, 74993, 74994, 74995, 74996) c6( ) c7(gl, fq, iu, K); #c1(SEPHS1) c2(NP_001182533) c3(selenide, water dikinase 1 isoform 3) c4(74997) c5(74998, 74999, 75000, 75001, 75002, 75003, 75004, 75005, 75006, 75007, 75008, 75009, 75010, 75011, 75012, 75013, 75014, 75015, 75016, 75017, 75018, 75019) c6( ) c7(gl, fq, iu, K); #c1(SEPHS1) c2(NP_036379) c3(selenide, water dikinase 1 isoform 1) c4(173379, 173380, 173381, 173382, 173383) c5(173384, 173385, 173386, 173387, 173388, 173389, 173390, 173391, 173392, 173393, 173394, 173395, 173396) c6( ) c7(gl, fq, iu, K); #c1(SEPHS2) c2(NP_036380) c3(selenide, water dikinase 2) c4(173397, 173398, 173399, 173400) c5(173401, 173402, 173403, 173404, 173405, 173406, 173407, 173408, 173409, 173410, 173411, 173412, 173413, 173414, 173415, 173416, 173417, 173418, 173419, 173420, 173421, 173422, 173423, 173424) c6( ) c7(iu); #c1(SEPP1) c2(NP_001087195) c3(selenoprotein P isoform 2) c4(38248, 38249, 38250) c5(38251, 38252, 38253, 38254, 38255, 38256) c6( ) c7(bL, oq, T, gU, dD, pf, ea, bmk, aw, bB, aj, j, ci, eq, zP, q, aR, J, ad, dP, av, GL, HC, aT, dL, K, ae, zQ, d, s, agT, aW, eZ, r, fe, aq, LB, ac, eM, nB, bE, U, at, im, xg, B); #c1(SEPP1) c2(NP_005401) c3(selenoprotein P isoform 1 precursor) c4( ) c5(155733, 155734, 155735, 155736, 155737, 155738, 155739, 155740, 155741, 155742, 155743, 155744, 155745, 155746, 155747, 155748, 155749, 155750, 155751, 155752, 155753, 155754) c6( ) c7(bL, oq, T, gU, dD, pf, ea, bmk, aw, bB, aj, j, ci, eq, zP, q, aR, J, ad, dP, av, GL, HC, aT, dL, K, ae, zQ, d, s, agT, aW, eZ, r, fe, aq, LB, ac, eM, nB, bE, U, at, im, xg, B); #c1(SEPSECS) c2(NP_058651) c3(O-phosphoseryl-tRNA(Sec) selenium transferase) c4(193020) c5(193021, 193022, 193023, 193024, 193025, 193026) c6( ) c7(qp, cCS, bh); #c1(SEPSECS) c2(XP_005248225) c3(O-phosphose(Sec) selenium transferase isoform X4) c4(268272) c5(268273, 268274, 268275, 268276, 268277, 268278) c6( ) c7(qp, cCS, bh); #c1(SEPW1) c2(NP_003000) c3(selenoprotein W) c4(134311, 134312) c5(134313, 134314, 134315, 134316, 134317, 134318, 134319, 134320, 134321, 134322, 134323, 134324) c6( ) c7(blr, ha, fd); #c1(SERAC1) c2(NP_116250) c3(protein SERAC1) c4(225956, 225957) c5(225958, 225959, 225960, 225961, 225962, 225963, 225964, 225965, 225966, 225967, 225968, 225969, 225970, 225971, 225972, 225973, 225974, 225975, 225976, 225977, 225978, 225979) c6(225980, 225981, 225982, 225983, 225984, 225985) c7(alD, nU, cmH, aU, cCT, cd); #c1(SERAC1) c2(XP_011534499) c3(protein SERAC1 isoform X2) c4(330957) c5( ) c6( ) c7(alD, nU, cmH, aU, cCT, cd); #c1(SERAC1) c2(XP_011534500) c3(protein SERAC1 isoform X3) c4( ) c5(330958, 330959, 330960, 330961, 330962, 330963, 330964, 330965) c6(330966, 330967) c7(alD, nU, cmH, aU, cCT, cd); #c1(SERF1A) c2(NP_068802) c3(small EDRK-rich factor 1 isoform 1) c4(210617, 210618, 210619) c5(210620, 210621, 210622, 210623, 210624, 210625, 210626, 210627, 210628, 210629, 210630, 210631, 210632, 210633, 210634, 210635, 210636, 210637, 210638, 210639, 210640, 210641, 210642) c6( ) c7(kf, arX, bSI, v, apl); #c1(SERF1A) c2(NP_075257) c3(small EDRK-rich factor 1 isoform 2) c4(213744, 213745, 213746) c5(213747, 213748, 213749, 213750, 213751, 213752, 213753, 213754, 213755, 213756, 213757, 213758, 213759, 213760, 213761, 213762, 213763, 213764, 213765, 213766, 213767) c6( ) c7(kf, arX, bSI, v, apl); #c1(SERGEF) c2(NP_036271) c3(secretion-regulating guanine nucleotide exchange factor) c4(172747, 172748, 172749) c5(172750, 172751, 172752, 172753, 172754, 172755, 172756, 172757, 172758, 172759, 172760, 172761, 172762, 172763, 172764, 172765, 172766, 172767) c6( ) c7(PN); #c1(SERINC1) c2(NP_065806) c3(serine incorporator 1 precursor) c4(205631) c5(205632, 205633, 205634, 205635, 205636, 205637, 205638, 205639, 205640, 205641) c6( ) c7(av, eM, bu); #c1(SERINC3) c2(NP_006802) c3(serine incorporator 3 precursor) c4(168206, 168207, 168208, 168209) c5(168210, 168211, 168212, 168213, 168214, 168215, 168216, 168217, 168218, 168219, 168220, 168221, 168222, 168223, 168224, 168225, 168226, 168227, 168228, 168229, 168230, 168231, 168232, 168233, 168234, 168235, 168236, 168237) c6( ) c7(ad, bu); #c1(SERINC5) c2(NP_001167542) c3(serine incorporator 5 isoform 3) c4(69057) c5(69058, 69059, 69060, 69061, 69062, 69063) c6( ) c7(aon); #c1(SERINC5) c2(NP_001167543) c3(serine incorporator 5 isoform 1) c4(69064) c5(69065, 69066, 69067, 69068, 69069, 69070) c6( ) c7(aon); #c1(SERINC5) c2(NP_840060) c3(serine incorporator 5 isoform 2) c4(253614, 253615) c5(253616, 253617, 253618, 253619, 253620, 253621, 253622, 253623, 253624, 253625, 253626, 253627) c6( ) c7(aon); #c1(SERP1) c2(NP_055260) c3(stress-associated endoplasmic reticulum protein 1) c4(180119) c5(180120, 180121, 180122, 180123, 180124, 180125, 180126, 180127, 180128, 180129) c6( ) c7(mf, K); #c1(SERP2) c2(NP_001010897) c3(stress-associated endoplasmic reticulum protein 2) c4(24029) c5(24030, 24031, 24032, 24033, 24034, 24035) c6( ) c7(ck, dh); #c1(SERPINA1) c2(NP_001121179) c3(alpha-1-antitrypsin precursor) c4(45338, 45339, 45340, 45341, 45342, 45343, 45344, 45345, 45346, 45347, 45348) c5(45349, 45350, 45351, 45352, 45353, 45354, 45355, 45356, 45357, 45358, 45359, 45360, 45361, 45362, 45363, 45364, 45365, 45366, 45367, 45368, 45369, 45370, 45371, 45372, 45373, 45374, 45375, 45376, 45377, 45378, 45379, 45380, 45381, 45382, 45383, 45384, 45385, 45386, 45387, 45388, 45389, 45390, 45391, 45392, 45393, 45394, 45395, 45396, 45397, 45398, 45399, 45400, 45401, 45402, 45403, 45404, 45405, 45406, 45407, 45408, 45409, 45410, 45411, 45412, 45413, 45414, 45415, 45416, 45417, 45418, 45419, 45420, 45421, 45422, 45423, 45424, 45425, 45426, 45427, 45428, 45429, 45430, 45431, 45432, 45433, 45434, 45435, 45436, 45437, 45438, 45439, 45440, 45441, 45442, 45443, 45444, 45445, 45446, 45447, 45448, 45449, 45450, 45451, 45452, 45453, 45454, 45455, 45456, 45457, 45458, 45459, 45460, 45461, 45462, 45463, 45464, 45465, 45466, 45467, 45468, 45469, 45470, 45471, 45472, 45473, 45474, 45475, 45476, 45477, 45478, 45479, 45480, 45481, 45482, 45483, 45484, 45485, 45486, 45487, 45488, 45489, 45490, 45491, 45492, 45493, 45494, 45495, 45496, 45497, 45498, 45499, 45500, 45501, 45502, 45503, 45504, 45505, 45506, 45507, 45508, 45509, 45510, 45511, 45512, 45513, 45514, 45515, 45516, 45517, 45518, 45519, 45520, 45521, 45522, 45523, 45524, 45525, 45526, 45527, 45528, 45529, 45530, 45531, 45532, 45533, 45534, 45535, 45536, 45537, 45538, 45539, 45540, 45541, 45542, 45543, 45544, 45545, 45546, 45547, 45548, 45549, 45550, 45551, 45552, 45553, 45554, 45555, 45556, 45557, 45558, 45559, 45560, 45561, 45562, 45563, 45564, 45565, 45566, 45567, 45568, 45569, 45570, 45571, 45572, 45573, 45574, 45575, 45576, 45577, 45578, 45579, 45580, 45581, 45582, 45583, 45584, 45585, 45586, 45587, 45588, 45589, 45590, 45591, 45592, 45593, 45594, 45595, 45596, 45597, 45598, 45599, 45600, 45601, 45602, 45603, 45604, 45605, 45606, 45607, 45608, 45609, 45610, 45611, 45612, 45613, 45614, 45615, 45616, 45617, 45618, 45619, 45620, 45621, 45622, 45623, 45624, 45625, 45626, 45627, 45628, 45629, 45630, 45631, 45632, 45633) c6(45634, 45635, 45636, 45637, 45638, 45639, 45640, 45641, 45642, 45643, 45644, 45645, 45646, 45647, 45648, 45649, 45650, 45651, 45652, 45653, 45654, 45655, 45656, 45657, 45658, 45659, 45660, 45661, 45662) c7(bM, T, Fj, fR, IP, ea, e, al, ame, ci, fw, sD, Tz, xE, aE, dv, cCZ, Ex, us, K, wt, H, be, N, aa, cCX, fc, hl, aDn, kt, bBH, g, hJ, ve, DL, y, aBr, eM, lq, U, bjL, Uw, fy, dD, cCU, Io, yG, aw, aj, qN, qW, ai, jw, ke, auv, b, zw, azj, cU, h, eV, rk, A, mR, ap, aq, jT, aKv, cDa, aFj, hq, Wt, vU, ar, W, cA, bpC, cCW, bo, aic, JM, at, uz, bm, eo, B, eR, jp, dK, oe, bqv, fG, jx, aA, cz, fF, ew, v, j, eX, V, q, J, mj, qp, aT, yu, bK, yb, caR, af, ak, bf, iU, oV, bg, r, afq, Io, bQ, f, kC, pb, FT, axS, pa, cCV, alC, nM, CP, DW, fD, UF, ao, aya, vi, hS, am, qb, uG, jh, dG, Jz, eq, iG, afD, ad, kL, hX, qC, av, F, Db, oz, le, IC, IQ, lz, NP, BO, aus, cr, yy, dq, hv, aF, hp, Fq, iV, iR, bz, dr, aYt, TA, gk, mO, nb, axs, cCY, eB, dX, aS, cbR, i, hE, ra, sH); #c1(SERPINA10) c2(NP_001094077) c3(protein Z-dependent protease inhibitor precursor) c4( ) c5(40617, 40618, 40619, 40620, 40621, 40622, 40623, 40624, 40625, 40626, 40627, 40628, 40629, 40630, 40631, 40632, 40633) c6( ) c7(ag, jv, aw); #c1(SERPINA10) c2(XP_006725226) c3(protein Z-dependent protease inhibitor isoform X1) c4(296719, 296720) c5(296721, 296722, 296723, 296724, 296725, 296726, 296727, 296728, 296729, 296730, 296731) c6( ) c7(ag, jv, aw); #c1(SERPINA11) c2(NP_001073920) c3(serpin A11 precursor) c4(36542) c5(36543, 36544, 36545, 36546, 36547, 36548, 36549, 36550) c6(36551, 36552) c7(iR, aq); #c1(SERPINA12) c2(NP_001291390) c3(serpin A12 precursor) c4(115840) c5(115841, 115842, 115843, 115844, 115845, 115846, 115847, 115848, 115849, 115850, 115851, 115852, 115853, 115854) c6(115855, 115856, 115857, 115858) c7(bL, kl, j, K, v); #c1(SERPINA3) c2(NP_001076) c3(alpha-1-antichymotrypsin precursor) c4(37583, 37584, 37585, 37586) c5( ) c6( ) c7(bL, bM, G, dt, T, am, eR, hV, oe, lo, jN, I, cz, fF, GC, aj, aw, j, et, ci, PJ, eg, cDb, qN, qW, fK, J, cd, ad, qH, eA, AW, Hx, av, sO, crU, gd, M, aT, us, dV, iv, bK, an, H, ae, af, N, hm, aa, ak, A, cH, aW, sp, hl, ap, hv, aq, aUO, aaO, t, alj, KM, ve, wA, iO, pu, W, c, ac, Kv, AV, z, U, vy, at, dX, aS, tr, du, B, abh, L); #c1(SERPINA4) c2(NP_001275961) c3(kallistatin isoform 1) c4( ) c5(107544, 107545, 107546) c6( ) c7(ai, wG, LG, aw, nd, X, RJ, aT, v, nA, UF, he, btr, cE, B, yn); #c1(SERPINA4) c2(NP_006206) c3(kallistatin isoform 2 precursor) c4(162837) c5(162838, 162839, 162840, 162841, 162842, 162843, 162844, 162845, 162846, 162847, 162848) c6( ) c7(ai, wG, LG, aw, nd, X, RJ, aT, v, nA, UF, he, btr, cE, B, yn); #c1(SERPINA5) c2(NP_000615) c3(plasma serine protease inhibitor preproprotein) c4(13802, 13803, 13804, 13805, 13806, 13807, 13808, 13809, 13810, 13811, 13812) c5(13813, 13814, 13815, 13816, 13817, 13818, 13819, 13820, 13821, 13822, 13823, 13824, 13825, 13826, 13827, 13828, 13829, 13830, 13831, 13832, 13833, 13834, 13835, 13836, 13837, 13838, 13839, 13840, 13841, 13842, 13843, 13844, 13845, 13846, 13847, 13848, 13849, 13850, 13851, 13852, 13853, 13854, 13855, 13856, 13857, 13858, 13859, 13860, 13861, 13862, 13863, 13864, 13865, 13866, 13867, 13868, 13869, 13870, 13871, 13872, 13873, 13874, 13875, 13876, 13877, 13878, 13879, 13880, 13881, 13882, 13883, 13884, 13885, 13886, 13887, 13888, 13889, 13890, 13891, 13892, 13893, 13894, 13895, 13896, 13897, 13898, 13899, 13900, 13901, 13902, 13903, 13904, 13905, 13906, 13907, 13908, 13909, 13910, 13911, 13912, 13913, 13914, 13915) c6(13916, 13917, 13918, 13919, 13920, 13921, 13922, 13923, 13924, 13925, 13926, 13927, 13928, 13929, 13930, 13931, 13932, 13933, 13934, 13935, 13936, 13937, 13938, 13939, 13940) c7(T, am, gU, dA, iW, aw, eX, jh, fd, fr, ci, zn, aE, aT, vH, io, eV, xa, N, aW, hQ, nY, aq, ve, t, iK, es, ag, bm, cj, m, IC, B); #c1(SERPINA6) c2(NP_001747) c3(corticosteroid-binding globulin precursor) c4(120720, 120721) c5(120722, 120723, 120724, 120725, 120726, 120727, 120728, 120729, 120730, 120731, 120732, 120733) c6( ) c7(T, am, iW, cz, cL, v, wy, cDc, aVM, ctp, jy, hn, K, aVL, aq, cl, ve, t, dr, ck, iO, sn, hr, m, ei, B); #c1(SERPINA7) c2(NP_000345) c3(thyroxine-binding globulin precursor) c4(7599) c5(7600, 7601, 7602, 7603, 7604, 7605, 7606, 7607, 7608, 7609, 7610, 7611, 7612, 7613) c6(7614, 7615, 7616, 7617) c7(qC, iO, cDe, mO, ob, aus, RK, cDd, bfA, hE, hr, bzb, aq, gT, Ze, B, Rf); #c1(SERPINA9) c2(NP_001035983) c3(serpin A9 isoform B) c4(33624) c5(33625, 33626, 33627, 33628, 33629, 33630, 33631, 33632) c6(33633, 33634) c7(fM, ac, e, aw, jh, aq, j, iR, pk, eu); #c1(SERPINA9) c2(NP_001271204) c3(serpin A9 isoform C) c4(103590, 103591) c5(103592, 103593, 103594, 103595, 103596, 103597, 103598, 103599, 103600) c6(103601, 103602) c7(fM, ac, e, aw, jh, aq, j, iR, pk, eu); #c1(SERPINA9) c2(NP_001271205) c3(serpin A9 isoform D) c4( ) c5(103603, 103604, 103605, 103606, 103607, 103608, 103609) c6(103610, 103611) c7(fM, ac, e, aw, jh, aq, j, iR, pk, eu); #c1(SERPINA9) c2(NP_783866) c3(serpin A9 isoform A) c4(251896) c5(251897, 251898, 251899, 251900, 251901, 251902, 251903, 251904, 251905) c6(251906, 251907) c7(fM, ac, e, aw, jh, aq, j, iR, pk, eu); #c1(SERPINA9) c2(XP_011535017) c3(serpin A9 isoform X1) c4(331697, 331698) c5(331699, 331700, 331701, 331702, 331703, 331704, 331705) c6(331706, 331707) c7(fM, ac, e, aw, jh, aq, j, iR, pk, eu); #c1(SERPINA9) c2(XP_011535019) c3(serpin A9 isoform X2) c4( ) c5(331708, 331709, 331710, 331711, 331712, 331713, 331714, 331715) c6(331716, 331717) c7(fM, ac, e, aw, jh, aq, j, iR, pk, eu); #c1(SERPINB1) c2(NP_109591) c3(leukocyte elastase inhibitor) c4(219723, 219724, 219725) c5(219726, 219727, 219728, 219729, 219730, 219731, 219732, 219733, 219734, 219735, 219736, 219737, 219738, 219739, 219740, 219741, 219742) c6( ) c7(dD, vj, fF, Io, uJ, eq, aa); #c1(SERPINB1) c2(XP_011512637) c3(leukocyte elastase inhibitor isoform X2) c4( ) c5(303600, 303601, 303602, 303603, 303604, 303605, 303606) c6( ) c7(dD, vj, fF, Io, uJ, eq, aa); #c1(SERPINB10) c2(NP_005015) c3(serpin B10) c4(152179) c5(152180, 152181, 152182, 152183, 152184, 152185) c6( ) c7(cqK, ad); #c1(SERPINB13) c2(NP_036529) c3(serpin B13) c4(174250, 174251) c5(174252, 174253, 174254, 174255, 174256, 174257, 174258, 174259, 174260, 174261, 174262, 174263) c6( ) c7(ff, en); #c1(SERPINB13) c2(XP_005266764) c3(serpin B13 isoform X3) c4( ) c5(280318, 280319, 280320, 280321, 280322, 280323) c6( ) c7(ff, en); #c1(SERPINB2) c2(NP_001137290) c3(plasminogen activator inhibitor 2) c4(55259, 55260, 55261, 55262) c5(55263, 55264, 55265, 55266, 55267, 55268, 55269, 55270, 55271, 55272, 55273, 55274, 55275, 55276, 55277, 55278, 55279, 55280, 55281, 55282, 55283, 55284, 55285, 55286, 55287, 55288, 55289, 55290) c6( ) c7(bL, bM, T, aCA, akd, QO, wu, aZ, aD, aw, Ju, iW, aA, ez, oR, aj, Cg, j, v, ape, bX, fd, V, q, J, ad, ft, lg, qp, aT, h, dz, K, wm, dQ, adx, ae, dl, Df, eG, OV, IR, aW, Y, sq, az, bar, eZ, r, ff, aF, aB, uF, en, Sm, g, t, iK, bz, DF, ck, cT, ac, eM, bLZ, iT, Fi, ag, cof, vy, hL, wq, uJ, zv, m, EY, ei, it, B); #c1(SERPINB3) c2(NP_008850) c3(serpin B3) c4(169110) c5(169111, 169112, 169113, 169114, 169115, 169116) c6( ) c7(bM, T, fG, ht, al, ccx, n, ci, hX, ccw, aT, K, aW, ff, hl, cr, eZ, aq, en, g, eE, t, iK, bz, iR, LB, iO, gk, eM, m, hE, it, B, vi); #c1(SERPINB4) c2(NP_778206) c3(serpin B4 isoform 2) c4(251406) c5(251407, 251408, 251409, 251410, 251411, 251412) c6( ) c7(bM, T, yk, if, ccx, n, qN, hX, ccw, hw, aT, K, aW, ff, hl, cr, aq, en, g, eE, iK, bz, eM, hk, adg, hE, rA, B); #c1(SERPINB4) c2(XP_011524440) c3(serpin B4 isoform X1) c4(319025) c5(319026, 319027, 319028, 319029, 319030, 319031) c6( ) c7(bM, T, yk, if, ccx, n, qN, hX, ccw, hw, aT, K, aW, ff, hl, cr, aq, en, g, eE, iK, bz, eM, hk, adg, hE, rA, B); #c1(SERPINB5) c2(NP_002630) c3(serpin B5) c4(130476, 130477) c5(130478, 130479, 130480, 130481, 130482, 130483, 130484, 130485, 130486, 130487, 130488, 130489) c6( ) c7(T, aC, aA, bB, ci, AO, q, ad, av, hd, aE, aT, dL, ae, Df, eL, s, qt, aW, Y, ff, r, kp, aF, en, g, t, bz, eM, nB, bE, Qu, hL, m, X); #c1(SERPINB6) c2(NP_001182220) c3(serpin B6 isoform b) c4(74719, 74720) c5(74721, 74722, 74723, 74724) c6( ) c7(bM, T, Ke, jx, bB, asr, q, eW, F, cDf, afn, aT, h, K, avR, aW, r, tv, aq, bHg, tu, Zb, eK, avT, cT, rR, ac, avS, bE, asg, mG, B, Tc); #c1(SERPINB6) c2(NP_001258751) c3(serpin B6 isoform c) c4( ) c5(96502, 96503) c6( ) c7(bM, T, Ke, jx, bB, asr, q, eW, F, cDf, afn, aT, h, K, avR, aW, r, tv, aq, bHg, tu, Zb, eK, avT, cT, rR, ac, avS, bE, asq, mG, B, Tc); #c1(SERPINB6) c2(NP_001258752) c3(serpin B6 isoform d) c4(96504) c5(96505) c6( ) c7(bM, T, Ke, jx, bB, asr, q, eW, F, cDf, afn, aT, h, K, avR, aW, r, tv, aq, bHg, tu, Zb, eK, avT, cT, rR, ac, avS, bE, asq, mG, B, Tc); #c1(SERPINB6) c2(NP_001284628) c3(serpin B6 isoform a) c4( ) c5(112173, 112174, 112175, 112176, 112177, 112178, 112179, 112180, 112181, 112182, 112183, 112184, 112185, 112186, 112187, 112188, 112189, 112190, 112191, 112192, 112193, 112194, 112195, 112196, 112197) c6( ) c7(bM, T, Ke, jx, bB, asr, q, eW, F, cDf, afn, aT, h, K, avR, aW, r, tv, aq, bHg, tu, Zb, eK, avT, cT, rR, ac, avS, bE, asq, mG, B, Tc); #c1(SERPINB6) c2(XP_011512978) c3(serpin B6 isoform X3) c4( ) c5(304434, 304435, 304436, 304437, 304438, 304439) c6( ) c7(bM, T, Ke, jx, bB, asr, q, eW, F, cDf, afn, aT, h, K, avR, aW, r, tv, aq, bHg, tu, Zb, eK, avT, cT, rR, ac, avS, bE, asq, mG, B, Tc); #c1(SERPINB7) c2(NP_001248760) c3(serpin B7 isoform 2) c4(94009) c5(94010, 94011, 94012, 94013, 94014, 94015) c6( ) c7(eR, cDg, by, aj, ey, uE, t); #c1(SERPINB7) c2(XP_011524538) c3(serpin B7 isoform X1) c4(319113, 319114, 319115) c5(319116, 319117, 319118, 319119, 319120, 319121, 319122, 319123, 319124, 319125, 319126, 319127, 319128, 319129, 319130, 319131, 319132, 319133, 319134, 319135, 319136, 319137, 319138, 319139, 319140, 319141, 319142, 319143, 319144, 319145) c6( ) c7(eR, cDg, by, aj, ey, uE, t); #c1(SERPINB8) c2(NP_001027018) c3(serpin B8 isoform b) c4(30069, 30070) c5(30071, 30072, 30073, 30074, 30075, 30076, 30077, 30078, 30079, 30080, 30081, 30082, 30083, 30084, 30085, 30086, 30087, 30088) c6( ) c7(ac, Jr, e, aw, cr, wR, j, B, eu); #c1(SERPINB8) c2(NP_001263419) c3(serpin B8 isoform c) c4( ) c5(97284, 97285, 97286, 97287, 97288) c6( ) c7(ac, Jr, e, aw, cr, wR, j, B, eu); #c1(SERPINB8) c2(NP_942130) c3(serpin B8 isoform a) c4(260481, 260482) c5(260483, 260484, 260485, 260486, 260487, 260488, 260489, 260490, 260491, 260492, 260493) c6( ) c7(ac, Jr, e, aw, cr, wR, j, B, eu); #c1(SERPINB8) c2(XP_011524327) c3(serpin B8 isoform X1) c4(319001) c5( ) c6( ) c7(ac, Jr, e, aw, cr, wR, j, B, eu); #c1(SERPINB9) c2(XP_005249241) c3(serpin B9 isoform X1) c4(269141) c5(269142, 269143, 269144, 269145, 269146, 269147) c6( ) c7(Nl, Io, Yn, Y, uD); #c1(SERPINB9) c2(XP_011512980) c3(serpin B9 isoform X2) c4( ) c5(304440) c6( ) c7(Nl, Io, Yn, Y, uD); #c1(SERPINC1) c2(NP_000479) c3(antithrombin-III precursor) c4(9485, 9486) c5(9487, 9488, 9489, 9490, 9491, 9492, 9493, 9494, 9495, 9496, 9497, 9498, 9499, 9500, 9501, 9502, 9503, 9504, 9505, 9506, 9507, 9508, 9509, 9510, 9511, 9512, 9513, 9514, 9515, 9516, 9517, 9518, 9519, 9520, 9521, 9522, 9523, 9524, 9525, 9526, 9527, 9528, 9529, 9530, 9531, 9532, 9533, 9534, 9535, 9536, 9537, 9538, 9539, 9540, 9541, 9542, 9543, 9544, 9545, 9546, 9547, 9548, 9549, 9550, 9551, 9552, 9553, 9554, 9555, 9556, 9557, 9558, 9559, 9560, 9561, 9562, 9563, 9564, 9565, 9566, 9567, 9568, 9569, 9570, 9571, 9572, 9573, 9574, 9575, 9576, 9577, 9578, 9579, 9580, 9581, 9582, 9583, 9584, 9585, 9586, 9587, 9588, 9589, 9590, 9591, 9592, 9593, 9594, 9595, 9596, 9597, 9598, 9599, 9600, 9601, 9602, 9603, 9604, 9605, 9606, 9607, 9608, 9609, 9610, 9611, 9612, 9613, 9614, 9615, 9616, 9617, 9618, 9619, 9620, 9621, 9622, 9623, 9624, 9625, 9626, 9627, 9628, 9629, 9630, 9631, 9632, 9633, 9634, 9635, 9636, 9637, 9638, 9639, 9640) c6(9641, 9642, 9643, 9644) c7(P, sY, bpH, T, dD, aSz, ea, uv, ht, DV, aw, cz, sM, n, bpk, fF, ah, aj, aqf, j, eq, aiC, ame, cDi, mC, J, Yh, ad, x, bpl, cfE, amc, M, jo, bU, hu, H, af, cDh, Vb, kl, MX, IR, A, sq, eZ, aq, YG, wd, jh, iR, f, uC, DL, el, qa, eK, ac, se, ag, vb, dW, dX, Km, fL, R, dy, bqo, ij, wx, fh, B, y, Ro); #c1(SERPIND1) c2(NP_000176) c3(heparin cofactor 2 precursor) c4(3842) c5(3843, 3844, 3845, 3846, 3847, 3848, 3849, 3850, 3851, 3852) c6( ) c7(T, dD, bpR, qb, acS, ag, ea, if, hl, aw, cDj, rf, aq, QL, eq, qN, is, uC, B, aQo); #c1(SERPINE1) c2(NP_000593) c3(plasminogen activator inhibitor 1 precursor) c4(13495, 13496, 13497) c5(13498, 13499, 13500, 13501, 13502, 13503, 13504, 13505, 13506, 13507, 13508, 13509, 13510, 13511, 13512, 13513, 13514, 13515) c6( ) c7(T, ea, bO, fd, ci, bRn, aY, GK, bv, aE, fm, hH, aa, bvD, az, ih, YG, aUG, axp, GR, wE, Zn, k, fy, aO, aj, cd, zo, TB, ey, bl, anP, sp, EU, fe, ajz, iO, dB, se, Fi, JQ, ajd, DM, jv, aA, cz, nS, AO, q, cy, Cy, dl, eu, cDo, wr, bf, bg, iy, Io, cl, cDk, pb, cT, rR, ac, CP, hr, tz, ao, aCA, dG, ape, ad, hX, tX, yt, vJ, bgr, IQ, wm, cH, cW, ff, dq, bpA, Sm, aFd, bz, ag, dX, lf, ne, oO, bM, lD, if, e, bB, sD, ip, x, vh, eG, fc, Du, hl, pD, as, cm, gJ, vA, mx, vy, wx aFf, xN, dD, wu, n, aCZ, uE, no, ec, eV, hn, cY, hi, A, hQ, amo, sE, bpx, hL, at, ut, fL, B, wL, eX, fF, vv, v, Qo, V, eJ, hW, wN, rS, sl, Nw, nQ, ae, Lf, DN, bu, t, el, wO, gX, Gg, oR, eq, BY, py, od, qh, sj, d, NH, th, Z, bF, D, yE, cof, lI, gZ, MJ, gB, y, aC, fR, al, Xi, IR, M, K, dF, eL, Hl, aB, g, ve, bwe, uC, iP, bPC, uo, Hb, m, Uw, P, sQ, aw, qy, BH, ft, vC, gq, wb, Vb, MQ, sq, aUP, cDm, aZf, YE, cM, ar, kT, W, afc, mg, gv, gg, bNV, wj, fG, jx, Gg, j, aqf, eA, J, aHu, MR, hb, nX, bq, Eg, kl, Y, aBN, r, cfm, en, bN, QG, sn, c, hc, dh, dy, EY, fD, UF, Mj, gx, sY, am, akd, aZ, aET, ah, dP, fU, sN, aQ, ji, adx, uX, IU, IR, anX, xs, Fq, qa, ei, tQ, eb, crK, aR, il, qM, dQ, eN, hm, aW, hJ, aVc, eM, Jp, sU, uJ, mk, bqh, R, pw, xh, aWG, ez, fr, qN, ai, aDF, ql, ju, h, jy, dL, vx, wC, OV, aq, mo, op, cDn, Vy, vb, bm, qq, uz, bni, bL, eR, atB, dK, DV, sM, cR, C, cDI, ga, cdJ, gp, aT, af, s, oV, ajl, nM, pZ, wq, mf, hS, qX, qb, aD, vr, Fb, tK, mC, XB, kL, bPu, ib, sO, ts, Os, vw, jo, qt, aP, eZ, aF, uF, aDP, eK, LB, zr, bE, pE, z, uR, aS, be, PK, X, us); #c1(SERPINE2) c2(NP_001130000) c3(glia-derived nexin isoform b precursor) c4(52355) c5(52356, 52357, 52358, 52359, 52360, 52361, 52362, 52363, 52364, 52365, 52366, 52367, 52368, 52369, 52370, 52371, 52372, 52373, 52374, 52375, 52376, 52377, 52378, 52379, 52380, 52381, 52382, 52383, 52384, 52385, 52386) c6(52387, 52388) c7(bM, T, am, aC, Ke, cz, Fb, IR, PM, sD, q, av, aE, aet, aT, IG, af, wC, d, Ln, s, aW, ff, r, hp, en, as, cm, pb, eK, Zg, at, aS, mk, be, IC); #c1(SERPINE2) c2(NP_001130002) c3(glia-derived nexin isoform c precursor) c4(52389, 52390, 52391, 52392) c5(52393, 52394, 52395, 52396, 52397, 52398, 52399, 52400, 52401, 52402, 52403, 52404, 52405) c6( ) c7(bM, T, am, aC, Ke, cz, Fb, IR, pM, sD, q, av, aE, aet, aT, IG, af, wC, d, Ln, s, aW, ff, r, hp, en, as, cm, pb, eK, Zg, at, aS, mk, be, IC); #c1(SERPINE2) c2(NP_006207) c3(glia-derived nexin isoform a precursor) c4( ) c5(162849, 162850, 162851, 162852, 162853, 162854, 162855) c6( ) c7(bM, T, am, aC, Ke, cz, Fb, IR, pM, sD, q, av, aE, aet, aT, IG, af, wC, d, Ln, s, aW, ff, r, hp, en, as, cm, pb, eK, Zg, at, aS, mk, be, IC); #c1(SERPINE2) c2(XP_005246698) c3(glia-derived nexin isoform X2) c4(267371) c5(267372) c6( ) c7(bM, T, am, aC, Ke, cz, Fb, IR, pM, sD, q, av, aE, aet, aT, IG, af, wC, d, Ln, s, aW, ff, r, hp, en, as, cm, pb, eK, Zg, at, aS, mk, be, IC); #c1(SERPINE3) c2(NP_001094790) c3(serpin E3 precursor) c4(40712, 40713, 40714) c5(40715, 40716, 40717, 40718, 40719, 40720, 40721, 40722, 40723, 40724, 40725, 40726, 40727, 40728, 40729, 40730, 40731, 40732, 40733, 40734, 40735, 40736, 40737, 40738, 40739, 40740, 40741, 40742, 40743) c6(40744, 40745, 40746, 40747, 40748, 40749, 40750) c7(cd); #c1(SERPINF1) c2(NP_002606) c3(pigment epithelium-derived factor precursor) c4(130241) c5(130242, 130243, 130244, 130245, 130246, 130247) c6( ) c7(T, Th, e, al, bB, aR, GK, aE, aeO, avA, K, EN, DA, bNp, aW, bvD, fc, hl, g, eF, iP, U, vy, nw, m, de, cZ, n, cQ, aj, qW, dd, acd, vx, Um, dx, cDp, aq, aUP, kp, mo, fs, iO, kT, W, bP, dB, bOj, Be, B, bL, v, eA, J, eJ, qK, aT, cy, zp, bq, ae, af, eu, jf, iF, zH, Y, r, en, t, c, JL, dy, auN, wi, uG, Ay, dG, ad, dP, hP, IQ, tt, d, IR, qt, ff, eH, iV, bz, gk, nb, bE, gZ, ei, oQ, GF, vt); #c1(SERPINF2) c2(NP_001159392) c3(alpha-2-antiplasmin isoform a precursor) c4(63926) c5(63927, 63928, 63929, 63930, 63931, 63932) c6( ) c7(T, cDr, aw, dQ, af, cDs, EU, ff, en, nN, cl, DT, Ew, cDq, fa, qq, dX, wx, m, ei, y, csf); #c1(SERPINF2) c2(NP_001159393) c3(alpha-2-antiplasmin isoform b precursor) c4(63933) c5(63934, 63935, 63936, 63937, 63938, 63939, 63940) c6( ) c7(T, cDr, aw, dQ, af, cDs, EU, ff, en, nN, cl, DT, Ew, cDq, fa, qq, dX, wx, m, ei, y, csf); #c1(SERPINF2) c2(XP_005256757) c3(alpha-2-antiplasmin isoform X5) c4(274328) c5(274329, 274330) c6( ) c7(T, cDr, aw, dQ, af, cDs, EU, ff, en, nN, cl, DT, Ew, cDq, fa, qq, dX, wx, m, ei, y, csf); #c1(SERPINF2) c2(XP_005256758) c3(alpha-2-antiplasmin isoform X4) c4( ) c5(274331, 274332, 274333, 274334, 274335, 274336, 274337, 274338, 274339, 274340, 274341, 274342, 274343, 274344, 274345, 274346, 274347, 274348, 274349, 274350, 274351, 274352, 274353, 274354, 274355, 274356, 274357, 274358, 274359, 274360, 274361, 274362, 274363, 274364, 274365, 274366, 274367, 274368, 274369, 274370, 274371, 274372, 274373, 274374, 274375, 274376, 274377, 274378, 274379, 274380, 274381, 274382, 274383, 274384, 274385, 274386, 274387, 274388, 274389, 274390, 274391, 274392, 274393, 274394, 274395, 274396, 274397, 274398, 274399, 274400, 274401, 274402, 274403, 274404, 274405, 274406, 274407, 274408, 274409, 274410, 274411, 274412, 274413, 274414, 274415, 274416, 274417, 274418, 274419, 274420, 274421, 274422, 274423, 274424, 274425, 274426, 274427, 274428, 274429, 274430, 274431, 274432, 274433, 274434, 274435, 274436, 274437, 274438, 274439, 274440, 274441, 274442, 274443, 274444, 274445, 274446, 274447, 274448, 274449, 274450, 274451, 274452, 274453, 274454, 274455, 274456, 274457, 274458, 274459, 274460, 274461, 274462, 274463, 274464, 274465, 274466, 274467, 274468, 274469, 274470, 274471, 274472, 274473, 274474, 274475, 274476, 274477, 274478) c6(274479) c7(T, cDr, aw, dQ, af, cDs, EU, ff, en, nN, cl, DT, Ew, cDq, fa, qq, dX, wx, m, ei, y, csf); #c1(SERPING1) c2(NP_000053) c3(plasma protease C1 inhibitor precursor) c4(836, 837, 838, 839, 840) c5(841, 842, 843, 844, 845, 846, 847, 848, 849, 850, 851, 852, 853, 854, 855, 856, 857, 858, 859, 860, 861, 862, 863, 864, 865, 866, 867, 868, 869, 870, 871, 872, 873, 874, 875, 876, 877, 878, 879, 880, 881, 882, 883, 884, 885, 886, 887, 888, 889, 890, 891, 892, 893, 894, 895, 896, 897, 898, 899, 900, 901, 902, 903, 904, 905, 906, 907, 908, 909, 910, 911, 912, 913, 914, 915, 916, 917, 918, 919, 920, 921, 922, 923, 924, 925, 926, 927, 928, 929, 930, 931, 932, 933, 934, 935, 936, 937, 938, 939, 940, 941, 942, 943, 944, 945, 946, 947, 948, 949, 950, 951, 952, 953, 954, 955, 956, 957, 958, 959, 960, 961, 962, 963, 964, 965, 966, 967, 968, 969, 970, 971, 972, 973, 974, 975, 976, 977, 978, 979, 980, 981, 982, 983, 984, 985, 986, 987, 988, 989, 990, 991, 992, 993, 994, 995, 996, 997, 998, 999, 1000, 1001, 1002, 1003, 1004, 1005, 1006, 1007, 1008, 1009, 1010, 1011, 1012, 1013, 1014, 1015, 1016, 1017, 1018, 1019, 1020, 1021) c6(1022, 1023, 1024, 1025, 1026, 1027, 1028, 1029, 1030, 1031) c7(bM, cDu, DM, iW, aw, bWQ, cDv, aoE, OY, fu, C, zo, baA, i, ds, H, acd, Um, af, tN, Oj, EU, bWS, eZ, aq, Io, pD, t, cM, cDt, cm, dr, kT, W, nb, axs, Qu, RJ, Km, GF, B, hv, L); #c1(SERPINH1) c2(XP_011543629) c3(serpin H1 isoform X1) c4(342637, 342638, 342639, 342640, 342641, 342642, 342643, 342644, 342645, 342646) c5(342647, 342648, 342649, 342650, 342651, 342652, 342653, 342654, 342655, 342656, 342657, 342658, 342659, 342660, 342661, 342662, 342663, 342664, 342665, 342666, 342667, 342668, 342669, 342670, 342671, 342672, 342673, 342674, 342675, 342676, 342677, 342678, 342679, 342680, 342681, 342682, 342683, 342684, 342685, 342686, 342687, 342688, 342689, 342690, 342691, 342692, 342693, 342694, 342695, 342696, 342697, 342698, 342699, 342700, 342701, 342702, 342703, 342704, 342705, 342706, 342707, 342708, 342709, 342710, 342711, 342712, 342713, 342714, 342715, 342716, 342717, 342718, 342719, 342720, 342721, 342722, 342723, 342724, 342725, 342726, 342727, 342728, 342729, 342730, 342731, 342732, 342733, 342734, 342735, 342736, 342737, 342738) c6(342739, 342740, 342741, 342742, 342743, 342744, 342745, 342746, 342747, 342748, 342749, 342750, 342751, 342752, 342753, 342754, 342755, 342756, 342757, 342758, 342759, 342760, 342761, 342762) c7(T, wi, cDw, fR, sQ, e, al, aA, aTy, j, ci, eA, tX, ds, kH, Ne, cy, rB, K, IQ, zp, H, azh, je, aRL, aYp, fQ, aF, aDP, iV, eE, cm, op, ck, LB, iM, bJa, vA, ajd, uo, aDJ, ut, y, cn, L); #c1(SERPINI1) c2(NP_005016) c3(neuroserpin precursor) c4(152186, 152187, 152188) c5(152189, 152190, 152191, 152192, 152193, 152194, 152195, 152196, 152197, 152198, 152199, 152200, 152201, 152202, 152203, 152204, 152205, 152206, 152207, 152208, 152209, 152210) c6( ) c7(axS, T, ke, d, ac, hb, dB, M, U, aA, yZ, aF, cbR, yU, V, ae, af, ad, eK, cB); #c1(SERPINI2) c2(NP_001012303) c3(serpin 12 isoform 1 precursor) c4(24875, 24876) c5(24877, 24878, 24879, 24880, 24881) c6( ) c7(cDx, Bd, T, Be); #c1(SERPINI2) c2(NP_006208) c3(serpin 12 isoform 2 precursor) c4( ) c5(162856, 162857, 162858, 162859, 162860, 162861, 162862, 162863, 162864, 162865, 162866, 162867, 162868, 162869, 162870, 162871, 162872, 162873, 162874, 162875, 162876, 162877, 162878, 162879, 162880, 162881, 162882, 162883, 162884) c6(162885, 162886, 162887, 162888, 162889, 162890, 162891, 162892, 162893, 162894) c7(cDx, Bd, T, Be); #c1(SERTAD1) c2(NP_037508) c3(SERTA domain-containing protein 1) c4(175919) c5(175920, 175921, 175922, 175923, 175924, 175925) c6( ) c7(T, cA, bE, aW, ff, aT, bB, m, en, t, it, X); #c1(SERTAD2) c2(XP_011531506) c3(SERTA domain-containing protein 2 isoform X2) c4( ) c5(327654, 327655) c6( ) c7(T, B, q); #c1(SERTAD2) c2(XP_011531507) c3(SERTA domain-containing protein 2 isoform X1) c4(327656) c5(327657, 327658, 327659, 327660, 327661) c6( ) c7(T, B, q); #c1(SESN1) c2(NP_001186862) c3(sestrin-1 isoform 2) c4(78715) c5(78716, 78717, 78718, 78719, 78720, 78721, 78722) c6( ) c7(bL, BV, K, wy); #c1(SESN1) c2(NP_001186863) c3(sestrin-1 isoform 3) c4( ) c5(78723, 78724, 78725, 78726, 78727) c6( ) c7(bL, BV, K, wy); #c1(SESN1) c2(NP_055269) c3(sestrin-1 isoform 1) c4(180182, 180183) c5(180184, 180185, 180186, 180187, 180188, 180189) c6( ) c7(bL, BV, K, wy); #c1(SESN3) c2(NP_001258523) c3(sestrin-3 isoform 2) c4(96103) c5(96104, 96105, 96106, 96107, 96108, 96109) c6( ) c7(bL, T, VZ, fc, akY, cP, V); #c1(SESN3) c2(NP_653266) c3(sestrin-3 isoform 1) c4(239391, 239392, 239393) c5(239394, 239395, 239396, 239397, 239398, 239399, 239400, 239401, 239402, 239403, 239404, 239405, 239406, 239407, 239408, 239409, 239410, 239411) c6( ) c7(bL, T, VZ, fc, akY, cP, V); #c1(SET) c2(NP_001234929) c3(protein SET isoform 3) c4(87811) c5(87812, 87813, 87814, 87815, 87816, 87817) c6( ) c7(T, id, btY, oA, fd, jh, fr, q, ad, er, axC, av, aE, oW, aT, h, bK, jj, rz, ae, af, gj, kl, iU, aW, Y, r, gm, iK, ck, cDy, W, bt, kS); #c1(SET) c2(NP_001234930) c3(protein SET isoform 4) c4(87818, 87819) c5(87820, 87821, 87822, 87823, 87824, 87825, 87826, 87827, 87828, 87829, 87830, 87831) c6( ) c7(T, id, btY, oA, fd, jh, fr, q, ad, er, axC, av, aE, oW, aT, h, bK, jj, rz, ae, af, gj, kl, iU, aW, Y, r, gm, iK, ck, cDy, W, bt, kS); #c1(SET) c2(NP_003002) c3(protein SET isoform 2) c4(134339) c5(134340, 134341, 134342, 134343, 134344, 134345) c6( ) c7(T, id, btY, oA, fd, jh, fr, q, ad, er, axC, av, aE, oW, aT, h, bK, jj, rz, ae, af, gj, kl, iU, aW, Y, r, gm, iK, ck, cDy, W, bt, kS); #c1(SET) c2(XP_011517213) c3(protein SET isoform X1) c4(310801) c5(310802, 310803, 310804, 310805, 310806, 310807, 310808, 310809, 310810) c6( ) c7(T, id, btY, oA, fd, jh, fr, q, ad, er, axC, av, aE, oW, aT, h, bK, jj, rz, ae, af, gj, kl, iU, aW, Y, r, gm, iK, ck, cDy, W, bt, kS); #c1(SETBP1) c2(NP_001123582) c3(SET-binding protein isoform b) c4(47775) c5(47776, 47777, 47778, 47779, 47780, 47781, 47782, 47783, 47784, 47785, 47786, 47787) c6( ) c7(bL, T, LX, atS, aj, nA, hF, br, ad, x, brH, Ko, aQM, pq, iU, Az, EZ, eE, bw, fq, bN, ck, W, iT, eB, pg, bim, hE, bt, LT); #c1(SETBP1) c2(NP_056374) c3(SET-binding protein isoform a) c4(187334, 187335) c5(187336, 187337, 187338, 187339, 187340, 187341) c6( ) c7(bL, T, LX, atS, aj, nA, hF, br, ad, x, brH, Ko, aQM, pq, iU, Az, EZ, eE, bw, fq, bN, ck, W, iT, eB, pg, bim, hE, bt, LT); #c1(SETD1A) c2(NP_055527) c3(histone-lysine N-methyltransferase SETD1A) c4(181766, 181767, 181768) c5(181769, 181770, 181771, 181772, 181773, 181774, 181775, 181776, 181777, 181778, 181779, 181780, 181781, 181782, 181783, 181784, 181785, 181786, 181787) c6( ) c7(T, bB, hy, BE, hF, Gt, Id, h, ne, BN, BO, ff, dg, en, g, t, bz, ck, sS, eM, bE, CZ, m, y, iu); #c1(SETD1B) c2(NP_055863) c3(histone-lysine N-methyltransferase SETD1B) c4(183986) c5(183987, 183988, 183989, 183990, 183991, 183992, 183993, 183994, 183995, 183996, 183997) c6( ) c7(ff, pm, en, r); #c1(SETD2) c2(NP_054878) c3(histone-lysine N-methyltransferase SETD2) c4(178162, 178163, 178164) c5(178165, 178166, 178167, 178168, 178169, 178170, 178171, 178172, 178173, 178174, 178175, 178176, 178177, 178178, 178179, 178180, 178181, 178182) c6( ) c7(oO, T, ea, if, fd, bB, ci, aE, K, hu, aCU, cp, aW, fc, dg, g, as, cm, iP, y, eM, iA, tG, nw, m, dD, aw, NT, qy, n, fr, qN, rP, cd, md, rC, h, Nf, cY, hQ, fe, aq, kp, YE, bo, qF, B, fG, aA, j, Iu, q, eA, eJ, oT, yw, Id, qK, aT, cy, ae, s, nO, Y, r, en, t, iK, pb, ck, nM, kP, ac, dy, VB, Kd, jh, vr, dG, eq, hF, ad, Jm, hd, py, Db, oW, ji, d, BO, et, ff, aF, iV, iR, bz, eK, es, pc, bE, aS, lC, tP, iu, bEt); #c1(SETD3) c2(XP_011535533) c3(histone-lysine N-methyltransferase setd3 isoform X3) c4(332595) c5(332596) c6( ) c7(jh); #c1(SETD3) c2(XP_011535534) c3(histone-lysine N-methyltransferase setd3 isoform X1) c4( ) c5(332597, 332598, 332599, 332600, 332601) c6( ) c7(jh); #c1(SETD3) c2(XP_011535537) c3(histone-lysine N-methyltransferase setd3 isoform X2) c4(332602) c5(332603, 332604, 332605, 332606, 332607, 332608) c6( ) c7(jh); #c1(SETD5) c2(NP_001073986) c3(SET domain-containing protein 5 isoform 1) c4(36794) c5(36795, 36796, 36797, 36798, 36799, 36800, 36801, 36802, 36803, 36804, 36805, 36806, 36807, 36808, 36809, 36810) c6( ) c7(cDz, nA); #c1(SETD5) c2(NP_001278972) c3(SET domain-containing protein 5 isoform 2) c4(111156) c5(111157, 111158, 111159, 111160, 111161, 111162, 111163, 111164) c6( ) c7(cDz, nA); #c1(SETD5) c2(XP_011532230) c3(SET domain-containing protein 5 isoform X6) c4(328292) c5(328293, 328294) c6( ) c7(cDz, nA); #c1(SETD7) c2(NP_085151) c3(histone-lysine N-methyltransferase SETD7) c4(219481) c5(219482, 219483, 219484, 219485, 219486, 219487) c6( ) c7(T, Is, B, A, aj, dG, ae, q, J, ad); #c1(SETD8) c2(NP_065115) c3(N-lysine methyltransferase SETD8) c4(203992) c5(203993, 203994, 203995, 203996, 203997, 203998, 203999, 204000, 204001, 204002) c6( ) c7(T, eM, aW, aT, K, B); #c1(SETDB2) c2(NP_001153780) c3(histone-lysine N-methyltransferase SETDB2 isoform b) c4(60998) c5(60999, 61000, 61001, 61002, 61003, 61004) c6( ) c7(buV, mQ, bM, r, cj); #c1(SETDB2) c2(NP_114121) c3(histone-lysine N-methyltransferase SETDB2 isoform a) c4(222234) c5(222235, 222236, 222237, 222238, 222239, 222240, 222241) c6( ) c7(buV, mQ, bM, r, cj); #c1(SETMAR) c2(NP_001263254) c3(histone-lysine N-methyltransferase SETMAR isoform 3) c4(97089) c5(97090, 97091, 97092, 97093, 97094, 97095, 97096, 97097, 97098, 97099, 97100) c6( ) c7(bt); #c1(SETMAR) c2(NP_006506) c3(histone-lysine N-methyltransferase SETMAR isoform 1) c4(165875, 165876) c5(165877, 165878, 165879, 165880, 165881, 165882) c6( ) c7(bt); #c1(SETMAR) c2(XP_006713355) c3(histone-lysine N-methyltransferase SETMAR isoform X1) c4( ) c5(287161) c6( ) c7(bt); #c1(SETMAR) c2(XP_006713357) c3(histone-lysine N-methyltransferase SETMAR isoform X2) c4( ) c5(287162) c6( ) c7(bt); #c1(SETX) c2(NP_055861) c3(probable helicase senataxin) c4(183972, 183973) c5(183974, 183975, 183976, 183977, 183978, 183979, 183980, 183981, 183982, 183983, 183984, 183985) c6( ) c7(ads, OI, qy, TM, fu, bX, cDA, ado, aR, bMh, kf, aU, bI, DG, K, KU, adr, KH, eZ, EH, dr, adq, ky, kB, c, U, KA, bC, KF); #c1(SETX) c2(XP_011516707) c3(probable helicase senataxin isoform X1) c4(310158, 310159) c5(310160, 310161, 310162, 310163, 310164, 310165, 310166, 310167, 310168, 310169, 310170, 310171) c6( ) c7(ads, OI, qy, TM, fu, bX, cDA, ado, aR, bMh, kf, aU, bI, DG, K, KU, adr, KH, eZ, EH, dr, adq, ky, kB, c, U, KA, bC, KF); #c1(SETX) c2(XP_011516710) c3(probable helicase senataxin isoform X4) c4( ) c5(310172) c6( ) c7(ads, OI, qy, TM, fu, bX, cDA, ado, aR, bMh, kf, aU, bI, DG, K, KU, adr, KH, eZ, EH, dr, adq, ky, kB, c, U, KA, bC, KF); #c1(SEZ6) c2(NP_001092105) c3(seizure protein 6 homolog isoform 2 precursor) c4(39388, 39389) c5(39390, 39391, 39392, 39393, 39394, 39395) c6( ) c7(n, ha); #c1(SEZ6) c2(NP_001277131) c3(seizure protein 6 homolog isoform 3) c4( ) c5(109107, 109108, 109109, 109110, 109111, 109112) c6( ) c7(n, ha); #c1(SEZ6) c2(NP_849191) c3(seizure protein 6 homolog isoform 1 precursor) c4(254473, 254474) c5(254475, 254476, 254477, 254478, 254479, 254480, 254481) c6( ) c7(n, ha); #c1(SEZ6) c2(XP_011522619) c3(seizure protein 6 homolog isoform X3) c4( ) c5(317174, 317175, 317176, 317177, 317178, 317179) c6( ) c7(n, ha); #c1(SEZ6L) c2(NP_001171702) c3(seizure 6-like protein isoform 2 precursor) c4(71332) c5(71333, 71334, 71335, 71336, 71337, 71338) c6( ) c7(av, ft, A, eM, bK, j, bz); #c1(SEZ6L) c2(NP_001171703) c3(seizure 6-like protein isoform 3 precursor) c4(71339) c5(71340, 71341, 71342, 71343, 71344, 71345) c6( ) c7(av, ft, A, eM, bK, j, bz); #c1(SEZ6L) c2(NP_001171704) c3(seizure 6-like protein isoform 4 precursor) c4(71346) c5( ) c6( ) c7(av, ft, A, eM, bK, j, bz); #c1(SEZ6L) c2(NP_001171705) c3(seizure 6-like protein isoform 5 precursor) c4(71347) c5(71348, 71349, 71350, 71351, 71352, 71353) c6( ) c7(av, ft, A, eM, bK, j, bz); #c1(SEZ6L) c2(NP_001171706) c3(seizure 6-like protein isoform 6 precursor) c4(71354) c5(71355, 71356, 71357, 71358, 71359, 71360) c6( ) c7(av, ft, A, eM, bK, j, bz); #c1(SEZ6L) c2(NP_066938) c3(seizure 6-like protein isoform 1 precursor) c4(207594) c5(207595, 207596, 207597, 207598, 207599, 207600) c6( ) c7(av, ft, A, eM, bK, j, bz); #c1(SEZ6L) c2(XP_005261496) c3(seizure 6-like protein isoform X2) c4( ) c5(277397, 277398, 277399, 277400, 277401, 277402) c6( ) c7(av, ft, A, eM, bK, j, bz); #c1(SEZ6L2) c2(NP_001107572) c3(seizure 6-like protein 2 isoform 4 precursor) c4(42875) c5(42876, 42877, 42878, 42879, 42880, 42881) c6( ) c7(ft, cbH, AQ, UF, aA, aF, K, Uw, rz, bz, af, bN, L); #c1(SEZ6L2) c2(NP_001230262) c3(seizure 6-like protein 2 isoform 6 precursor) c4(86170) c5(86171, 86172, 86173, 86174, 86175, 86176) c6( ) c7(ft, cbH, AQ, UF, aA, aF, K, Uw, rz, bz, af, bN, L); #c1(SEZ6L2) c2(NP_036542) c3(seizure 6-like protein 2 isoform 1 precursor) c4(174307) c5(174308, 174309, 174310, 174311, 174312, 174313) c6( ) c7(ft, cbH, AQ, UF, aA, aF, K, Uw, rz, bz, af, bN, L); #c1(SEZ6L2) c2(NP_963869) c3(seizure 6-like protein 2 isoform 2 precursor) c4(262481) c5(262482, 262483, 262484, 262485, 262486, 262487) c6( ) c7(ft, cbH, AQ, UF, aA, aF, K, Uw, rz, bz, af, bN, L); #c1(SF1) c2(NP_001171501) c3(splicing factor 1 isoform 6) c4(70326) c5( ) c6( ) c7(nD, T, pY, Y, r, iv, cy, t, g); #c1(SF1) c2(NP_004621) c3(splicing factor 1 isoform 1) c4(148270, 148271) c5( ) c6( ) c7(nD, T, pY, Y, r, iv, cy, t, q); #c1(SF1) c2(NP_973724) c3(splicing factor 1 isoform 2) c4(262636) c5(262637, 262638, 262639, 262640, 262641, 262642) c6( ) c7(nD, T, pY, Y, r, iv, cy, t, q); #c1(SF1) c2(NP_973726) c3(splicing factor 1 isoform 4) c4(262643) c5(262644, 262645, 262646, 262647, 262648, 262649) c6( ) c7(nD, T, pY, Y, r, iv, cy, t, q); #c1(SF1) c2(NP_973727) c3(splicing factor 1 isoform 3) c4(262650, 262651) c5(262652, 262653, 262654, 262655, 262656, 262657, 262658, 262659, 262660, 262661, 262662, 262663, 262664, 262665, 262666, 262667, 262668, 262669, 262670, 262671, 262672, 262673, 262674, 262675, 262676, 262677, 262678, 262679, 262680, 262681, 262682) c6( ) c7(nD, T, pY, Y, r, iv, cy, t, q); #c1(SF3A1) c2(NP_005868) c3(splicing factor 3A subunit 1) c4(160018, 160019, 160020) c5(160021, 160022, 160023, 160024, 160025, 160026, 160027, 160028, 160029, 160030, 160031, 160032, 160033, 160034, 160035, 160036, 160037, 160038) c6( ) c7(aT); #c1(SF3B1) c2(NP_001005526) c3(splicing factor 38 subunit 1 isoform 2) c4(21816) c5(21817, 21818, 21819, 21820, 21821, 21822, 21823, 21824, 21825, 21826) c6( ) c7(T, afA, Js, qx, aDT, qy, fZ, bs, n, ol, aeu, oY, fd, jh, abQ, hF, q, br, ad, x, oB, oW, aT, aU, vw, dz, h, jj, pq, Nr, oP, iU, aix, hG, aW, Y, et, gK, pr, r, Mz, kD, po, pm, hf, bw, aiv, iP, Nq, yd, ck, iO, pc, UY, iT, kz, cj, pg, dW, k, bt, Jo); #c1(SF3B1) c2(NP_036565) c3(splicing factor 38 subunit 1 isoform 1) c4(174434) c5(174435, 174436, 174437, 174438, 174439, 174440) c6( ) c7(T, afA, Js, qx, aDT, qy, fZ, bs, n, ol, aeu, oY, fd, jh, abQ, hF, q, br, ad, x, oB, oW, aT, aU, vw, dz, h, jj, pq, Nr, oP, iU, aix, hG, aW, Y, et, gK, pr, r, Mz, kD, po, pm, hf, bw, aiv, iP, Nq, yd, ck, iO, pc, UY, iT, kz, cj, pg, dW, k, bt, Jo); #c1(SF3B2) c2(NP_006833) c3(splicing factor 38 subunit 2) c4(168518) c5(168519, 168520, 168521, 168522, 168523, 168524, 168525, 168526, 168527, 168528, 168529, 168530) c6( ) c7(T, oP, afA, kz, Y, aDT, jh, bs, cj, kD, bw, hf, iP, bt, hr, ad); #c1(SF3B2) c2(XP_005273783) c3(splicing factor 38 subunit 2 isoform X1) c4(284834) c5( ) c6( ) c7(T, oP, afA, kz, Y, aDT, jh, bs, cj, kD, bw, hf, iP, bt, hr, ad); #c1(SF3B6) c2(NP_057131) c3(splicing factor 38 subunit 6) c4(189067) c5(189068, 189069, 189070, 189071, 189072, 189073) c6( ) c7(sc, T, aEj, jh, fr, ci, q, ad, ft, aT, dL, K, jf, aW, Y, r, fe, aF, g, bF, cj, EY, B); #c1(SFI1) c2(NP_001007468) c3(protein SFI1 homolog isoform a) c4(22714) c5(22715, 22716, 22717, 22718, 22719, 22720, 22721, 22722, 22723, 22724, 22725, 22726) c6( ) c7(aY, eR); #c1(SFI1) c2(NP_001245254) c3(protein SFI1 homolog isoform c) c4(92883) c5(92884, 92885, 92886, 92887, 92888, 92889) c6( ) c7(aY, eR); #c1(SFI1) c2(NP_001245255) c3(protein SFI1 homolog isoform d) c4(92890, 92891) c5(92892, 92893, 92894, 92895, 92896, 92897, 92898, 92899, 92900, 92901) c6( ) c7(aY, eR); #c1(SFI1) c2(NP_055590) c3(protein SFI1 homolog isoform b) c4(182145) c5(182146, 182147, 182148, 182149, 182150, 182151) c6( ) c7(aY, eR); #c1(SFI1) c2(XP_011528887) c3(protein SFI1 homolog isoform X12) c4(324271) c5(324272, 324273, 324274, 324275, 324276, 324277) c6( ) c7(aY, eR); #c1(SFI1) c2(XP_011528888) c3(protein SFI1 homolog isoform X13) c4(324278) c5(324279, 324280, 324281, 324282, 324283, 324284, 324285) c6( ) c7(aY, eR); #c1(SFMBT1) c2(NP_057413) c3(scm-like with four MBT domains protein 1) c4(190634, 190635, 190636, 190637, 190638) c5(190639, 190640, 190641, 190642, 190643, 190644, 190645, 190646, 190647, 190648, 190649, 190650, 190651, 190652, 190653, 190654, 190655, 190656, 190657, 190658, 190659, 190660, 190661, 190662, 190663, 190664, 190665, 190666, 190667, 190668, 190669, 190670, 190671, 190672, 190673, 190674, 190675, 190676) c6( ) c7(dB, T, fq, fr, cz); #c1(SFMBT2) c2(NP_001018049) c3(scm-like with four MBT domains protein 2) c4(26915, 26916, 26917) c5(26918, 26919, 26920, 26921, 26922, 26923, 26924, 26925, 26926, 26927, 26928, 26929, 26930, 26931, 26932, 26933, 26934, 26935, 26936, 26937, 26938, 26939, 26940, 26941, 26942, 26943) c6( ) c7(ac, eZ); #c1(SFR1) c2(NP_001002759) c3(swi5-dependent recombination DNA repair protein 1 homolog isoform a) c4(19592, 19593) c5(19594, 19595, 19596, 19597, 19598, 19599, 19600) c6( ) c7(aW, T, aT); #c1(SFR1) c2(NP_660290) c3(swi5-dependent recombination DNA repair protein 1 homolog isoform b) c4( ) c5(240664, 240665, 240666, 240667, 240668) c6( ) c7(aW, T, aT); #c1(SFR1) c2(XP_005269578) c3(swi5-dependent recombination DNA repair protein 1 homolog isoform X1) c4(282648) c5(282649, 282650, 282651, 282652, 282653, 282654) c6( ) c7(aW, T, aT); #c1(SFRP1) c2(NP_003003) c3(secreted frizzled-related protein 1 precursor) c4(134346) c5(134347, 134348, 134349, 134350, 134351, 134352, 134353, 134354, 134355, 134356) c6( ) c7(bM, T, os, aC, pf, if, fd, bB, ci, ip, aE, qM, eL, aW, LZ, g, as, cm, eM, iA, cDB, go, vA, cj, Hb, m, in, n, fr, qN, Bl, ft, jz, dL, sp, fe, aq, mo, dw, op, Be, it, B, jx, aA, bJw, v, C, AO, q, er, eA, MR, hW, aT, jj, ae, bA, jf, s, iU, r, en, cl, apx, t, pb, kP, dy, Bd, bt, vi, id, oZ, ad, hX, dP, av, py, gj, d, ff, aF, iV, bz, bF, es, amS, zr, bE, ei, y, kS, iu); #c1(SFRP2) c2(NP_003004) c3(secreted frizzled-related protein 2 precursor) c4(134357) c5(134358, 134359, 134360, 134361, 134362, 134363) c6( ) c7(bM, T, aC, if, aw, EQ, aA, fd, axk, fr, ci, qN, q, ad, eA, zw, Be, aT, dL, ae, YT, pi, sj, jf, d, s, aW, ff, r, fe, aq, aF, en, g, apx, t, nC, fq, iV, es, YE, iA, bkQ, gX, cj, hR, zl, bt); #c1(SFRP4) c2(NP_003005) c3(secreted frizzled-related protein 4 precursor) c4(134364, 134365) c5(134366, 134367, 134368, 134369, 134370, 134371, 134372, 134373, 134374, 134375, 134376, 134377, 134378, 134379, 134380, 134381) c6(134382, 134383, 134384, 134385) c7(bL, gh, T, aC, if, NT, j, ci, qN, fr, q, ad, dP, amB, dL, ae, bA, s, aW, ff, r, aq, en, t, pb, zV, es, YE, hR, adR, m, azr, Th, bt, B); #c1(SFRP5) c2(NP_003006) c3(secreted frizzled-related protein 5 precursor) c4(134386) c5(134387, 134388, 134389, 134390, 134391, 134392) c6( ) c7(bL, bM, T, aC, aD, if, aA, fd, n, aj, v, fr, qN, hF, q, J, ad, hX, Xc, aT, dL, ae, dx, nO, aW, ff, fc, r, aq, aF, en, cl, g, t, apx, ck, es, bF, sS, amS, pc, eM, iA, mf, m, cP, y, bt, B); #c1(SFSWAP) c2(NP_001248340) c3(splicing factor, suppressor of white-apricat homolog isoform 1) c4(93715, 93716) c5(93717, 93718, 93719, 93720, 93721, 93722) c6( ) c7(cd, VX); #c1(SFSWAP) c2(NP_004583) c3(splicing factor, suppressor of white-apricot homolog isoform 2) c4(147887) c5(147888, 147889, 147890, 147891, 147892, 147893) c6( ) c7(cd, VX); #c1(SFSWAP) c2(XP_011536957) c3(splicing factor, suppressor of white-apricat homolog isoform X3) c4( ) c5(334644, 334645, 334646, 334647, 334648, 334649) c6( ) c7(cd, VX); #c1(SFT2D2) c2(NP_955376) c3(vesicle transport protein SFT2B) c4(261597, 261598) c5(261599, 261600, 261601, 261602, 261603, 261604, 261605, 261606, 261607, 261608, 261609, 261610, 261611, 261612, 261613, 261614, 261615) c6( ) c7(bA, cz); #c1(SFT2D3) c2(NP_116129) c3(vesicle transport protein SFT2C) c4(225458) c5(225459, 225460, 225461, 225462, 225463, 225464) c6( ) c7(q, r); #c1(SFTA2) c2(NP_995326) c3(surfactant-associated protein 2 precursor) c4(263855, 263856) c5(263857, 263858, 263859, 263860, 263861, 263862, 263863, 263864, 263865, 263866, 263867, 263868, 263869, 263870, 263871, 263872, 263873, 263874, 263875, 263876, 263877, 263878, 263879, 263880, 263881, 263882, 263883, 263884, 263885, 263886, 263887) c6(263888, 263889, 263890, 263891, 263892) c7(hH, ft, eZ); #c1(SFTA3) c2(NP_001094811) c3(surfactant-associated protein 3) c4(40765) c5(40766, 40767, 40768, 40769, 40770, 40771) c6( ) c7(cm); #c1(SFTPA1) c2(NP_001158117) c3(pulmonary surfactant-associated protein A1 isoform 3 precursor) c4(63155) c5(63156, 63157, 63158, 63159, 63160, 63161) c6( ) c7(bM, T, Dw, aGC, fF, aBo, fA, br, wa, AK, av, ft, aaU, aMn, bW, oW, cU, jy, SD, aa, afu, eG, iU, ff, ap, pD, EZ, en, g, ajz, bw, bz, LB, vU, eM, Nk, bOj, PV, dT, uJ, at, sZ, iu, ao); #c1(SFTPA1) c2(XP_005270119) c3(pulmonary surfactant-associated protein A1 isoform X2) c4(283111, 283112, 283113) c5(283114, 283115, 283116, 283117, 283118, 283119, 283120, 283121, 283122, 283123, 283124, 283125, 283126, 283127, 283128, 283129, 283130, 283131, 283132, 283133, 283134, 283135, 283136, 283137, 283138, 283139, 283140, 283141, 283142, 283143) c6( ) c7(bM, T, Dw, aGC, fF, aBo, fA, br, wa, AK, av, ft, aaU, aMn, bW, oW, cU, jy, SD, aa, afu, eG, iU, ff, ap, pD, EZ, en, g, ajz, bw, bz, LB, vU, eM, Nk, bOj, PV, dT, uJ, at, sZ, iu, ao); #c1(SFTPA1) c2(XP_006718016) c3(pulmonary surfactant-associated protein A1 isoform X1) c4(291448, 291449) c5(291450, 291451, 291452, 291453, 291454, 291455, 291456, 291457, 291458, 291459) c6( ) c7(bM, T, Dw, aGC, fF, aBo, fA, br, wa, AK, av, ft, aaU, aMn, bW, oW, cU, jy, SD, aa, afu, eG, iU, ff, ap, pD, EZ, en, g, ajz, bw, bz, LB, vU, eM, Nk, bOj, PV, dT, uJ, at, sZ, iu, ao); #c1(SFTPA2) c2(XP_005270185) c3(pulmonary surfactant-associated protein A2 isoform X2) c4(283202, 283203) c5(283204, 283205, 283206, 283207, 283208) c6( ) c7(bM, T, Dw, fG, fF, aBo, v, fA, atK, ad, wD, AK, av, ft, aaU, aMn, bW, Lv, cU, jy, K, SD, ae, aa, afu, eG, mR, ap, pD, EZ, g, ajz, bz, LB, vU, eM, Nk, bOj, PV, at, uJ, fD, y, sZ, iu); #c1(SFTPA2) c2(XP_005270189) c3(pulmonary surfactant-associated protein A2 isoform X1) c4( ) c5(283209, 283210, 283211, 283212, 283213, 283214, 283215, 283216, 283217, 283218, 283219, 283220, 283221) c6( ) c7(bM, T, Dw, fG, fF, aBo, v, fA, atK, ad, wD, AK, av, ft, aaU, aMn, bW, Lv, cU, jy, K, SD, ae, aa, afu, eG, mR, ap, pD, EZ, g, ajz, bz, LB, vU, eM, Nk, bOj, PV, at, uJ, fD, y, sZ, iu); #c1(SFTPB) c2(XP_005264544) c3(pulmonary surfactant-associated protein B isoform X1) c4(279016, 279017, 279018, 279019) c5(279020, 279021, 279022, 279023, 279024, 279025, 279026, 279027, 279028, 279029, 279030, 279031, 279032, 279033, 279034, 279035, 279036, 279037, 279038, 279039, 279040, 279041, 279042, 279043, 279044, 279045, 279046) c6( ) c7(bM, T, cDC, Dw, am, fR, fG, fF, bIB, v, C, fA, atK, fw, sD, ad, av, fE, co, bW, Lv, jy, Ds, SD, ae, Gc, aa, fx, afe, ap, g, bz, pb, dr, LB, qJ, eM, aWV, TJ, Qu, wk, uR, at, dT, uJ, fC, fD, IC, iu, ao); #c1(SFTPC) c2(NP_001165828) c3(pulmonary surfactant-associated protein C isoform 2 proprotein) c4(67906) c5(67907, 67908, 67909, 67910, 67911, 67912) c6( ) c7(ID, bM, T, kh, Dw, fR, Zl, fG, fF, ci, fA, IK, fw, atK, av, fE, brn, ft, bW, Lv, IG, Ds, cU, jy, K, MO, aa, ly, kl, fx ap, Io, aDP, g, crG, Ix, LB, axS, eM, aWV, wk, uR, ajd, adl, fz, dT, uJ, fC, at, fl, cDD, fD, buO, IC, iu); #c1(SFTPC) c2(NP_001165881) c3(pulmonary surfactant-associated protein C isoform 1 proprotein) c4(67913) c5(67914, 67915, 67916, 67917, 67918, 67919) c6( ) c7(ID, bM, T, kh, Dw, fR, ZI, fG, fE, ci, fA, IK, fw, atK, av, fE, brn, ft, bW, Lv, IG, Ds, cU, jy, K, MO, aa, ly, kl, fx, ap, Io, aDP, g, crG, Ix, LB, axS, eM, aWV, wk, uR, ajd, adl, fz, dT, uJ, fC, at, fl, cDD, fD, buO, IC, iu); #c1(SFTPD) c2(NP_003010) c3(pulmonary surfactant-associated protein D precursor) c4(134407, 134408) c5(134409, 134410, 134411, 134412, 134413, 134414, 134415, 134416, 134417, 134418, 134419, 134420) c6( ) c7(bL, bM, T, dD, Dw, fR, Zl, ea, fG, oe, rl, fF, j, eq, C, pM, atK, ai, wa, av, aaU, ds, bW, Lv, cU, Ds, dL, h, K, aDp, eN, qE, aa, cCX, fx, lx, sp, ff, mQ, sP, eZ, rM, fe, pD, uF, en, g, iV, EZ, bz, LB, TA, cT, iQ, Ui, eM, z, Ny, bOj, at, uz, wR, dT, fD, du, y, ao); #c1(SFXN1) c2(NP_073591) c3(sideroflexin-1) c4(213001, 213002, 213003) c5(213004, 213005, 213006, 213007, 213008, 213009, 213010, 213011, 213012, 213013, 213014, 213015, 213016, 213017, 213018, 213019, 213020, 213021) c6( ) c7(bL, oq, am, id, al, n, ci, nA, ad, hX, qC, Bl, hd, aT, dL, ae, eL, N, aW, ff, hl, aJL, cr, kt, en, mv, g, bcR, qe, ER); #c1(SFXN2) c2(NP_849189) c3(sideroflexin-2) c4( ) c5(254461, 254462, 254463, 254464, 254465) c6( ) c7(an); #c1(SFXN2) c2(XP_011537563) c3(sideroflexin-2 isoform X2) c4(335152) c5(335153) c6( ) c7(an); #c1(SFXN4) c2(NP_998814) c3(sideroflexin-4) c4(266025, 266026, 266027) c5(266028, 266029, 266030, 266031, 266032, 266033, 266034) c6( ) c7(cDE, kC, Gq, UP); #c1(SFXN4) c2(XP_005269582) c3(sideroflexin-4 isoform X1) c4(282655, 282656) c5(282657, 282658, 282659, 282660, 282661, 282662, 282663) c6( ) c7(cDE, kC, Gq, UP); #c1(SFXN4) c2(XP_005269584) c3(sideroflexin-4 isoform X2) c4( ) c5(282664, 282665, 282666, 282667, 282668, 282669, 282670, 282671, 282672, 282673, 282674, 282675, 282676, 282677, 282678, 282679) c6( ) c7(cDE, kC, Gq, UP); #c1(SGCA) c2(NP_000014) c3(alpha-sarcoglycan isoform 1 precursor) c4(61) c5(62, 63, 64, 65, 66, 67, 68) c6( ) c7(T, azL, aqZ, Qr, bFz, xs, bgo, oj, km, uY, oh, aan, bX, bgi, cDF, jr); #c1(SGCA) c2(NP_001129169) c3(alpha-sarcoglycan isoform 2 precursor) c4(50972, 50973) c5(50974, 50975, 50976, 50977, 50978, 50979, 50980, 50981, 50982, 50983, 50984, 50985, 50986, 50987) c6( ) c7(T, azL, aqZ, Qr, bFz, xs, bgo, oj, km, uY, oh, aan, bX, bgi, cDF, jr); #c1(SGCA) c2(XP_011523426) c3(alpha-sarcoglycan isoform X5) c4(317950) c5(317951, 317952, 317953, 317954, 317955, 317956, 317957) c6( ) c7(T, azL, aqZ, Qr, bFz, xs, bgo, oj, km, uY, oh, aan, bX, bgi, cDF, jr); #c1(SGCB) c2(NP_000223) c3(beta-sarcoglycan) c4(4781) c5(4782, 4783, 4784, 4785, 4786, 4787, 4788) c6( ) c7(T, cc, aqZ, Ae, Jl, bgu, iB, xs, qK, oj, aA, km, io, auS, aF, aS, K, hB, cm, cDG); #c1(SGCB) c2(XP_011532705) c3(beta-sarcoglycan isoform X1) c4(328733) c5(328734, 328735, 328736, 328737, 328738, 328739, 328740) c6( ) c7(T, cc, aqZ, Ae, Jl, bgu, iB, xs, qK, oj, aA, km, io, auS, aF, aS, K, hB, cm, cDG); #c1(SGCD) c2(NP_758447) c3(delta-sarcoglycan isoform 2) c4(249175) c5(249176, 249177, 249178, 249179, 249180, 249181, 249182, 249183, 249184, 249185, 249186, 249187) c6( ) c7(oe, ht, Ri, cz, mw, cd, cc, lu, vc, K, agW, anR, aqZ, ff, xs, uY, en, cDH, W, ac, mx, km, cDI); #c1(SGCD) c2(XP_005266023) c3(delta-sarcoglycan isoform X1) c4(279890) c5(279891, 279892, 279893, 279894, 279895, 279896, 279897, 279898) c6( ) c7(oe, ht, Ri, cz, mw, cd, cc, lu, vc, K, agW, anR, aqZ, ff, xs, uY, en, cDH, W, ac, mx, km, cDI); #c1(SGCD) c2(XP_011532923) c3(delta-sarcoglycan isoform X2) c4(329090) c5(329091, 329092, 329093, 329094, 329095, 329096, 329097, 329098) c6( ) c7(oe, ht, Ri, cz, mw, cd, cc, lu, vc, K, agW, anR, aqZ, ff, xs, uY, en, cDH, W, ac, mx, km, cDI); #c1(SGCE) c2(NP_001092870) c3(epsilon-sarcoglycan isoform 3) c4(39661) c5(39662, 39663, 39664, 39665, 39666, 39667) c6( ) c7(qx, ha, ml, bS, ct, bd, PW, ayQ, Wk, aU, Wm, rE, he, Wi, yL, xs, LO, ckd, Z, bw, xw, bDO, dr, km, aen, qc); #c1(SGCE) c2(NP_001092871) c3(epsilon-sarcoglycan isoform 1) c4(39668) c5(39669, 39670, 39671, 39672, 39673, 39674) c6( ) c7(qx, ha, ml, bS, ct, bd, PW, ayQ, Wk, aU, Wm, rE, he, Wi, yL, xs, LO, ckd, Z, bw, xw, bDO, dr, km, aen, qc); #c1(SGCE) c2(NP_003910) c3(epsilon-sarcoglycan isoform 2) c4(142100) c5(142101, 142102, 142103, 142104, 142105, 142106) c6( ) c7(qx, ha, ml, bS, ct, bd, PW, ayQ, Wk, aU, Wm, rE, he, Wi, yL, xs, LO, ckd, Z, bw, xw, bDO, dr, km, aen, qc); #c1(SGCE) c2(XP_005250732) c3(epsilon-sarcoglycan isoform X3) c4( ) c5(270494, 270495, 270496, 270497, 270498, 270499) c6( ) c7(qx, ha, ml, bS, et, bd, PW, ayQ, Wk, aU, Wm, rE, he, Wi, yL, xs, LO, ckd, Z, bw, xw, bDO, dr, km, aen, qc); #c1(SGCE) c2(XP_011514965) c3(epsilon-sarcoglycan isoform X1) c4(307773) c5( ) c6( ) c7(qx, ha, ml, bS, et, bd, PW, ayQ, Wk, aU, Wm, rE, he, Wi, yL, xs, LO, ckd, Z, bw, xw, bDO, dr, km, aen, qc); #c1(SGCG) c2(XP_005266562) c3(gamma-sarcoglycan isoform X1) c4( ) c5(280219, 280220, 280221, 280222, 280223, 280224, 280225, 280226, 280227, 280228, 280229, 280230, 280231) c6( ) c7(ng, bM, T, bB, ame, ci, aE, dE, dV, aU, adB, K, bU, hH, yo, aW, lW, hl, uY, Qm, g, eF, cm, eM, wK, TG, vA, uJ, azg, m, bgi, Ri, n, BF, ct, PJ, ado, cd, b, ft, jz, cc, cU, h, jH, pi, adF, bYA, bqy, AQ, pm, op, bP, dB, rx, ER, B, bL, cz, v, j, Kh, C, q, eA, Wn, aT, yu, jj, an, yj, af, ak, wr, aqZ, s, vT, Y, r, akB, t, nC, iK, hY, ck, c, gX, km, aor, im, bKY, bt, Bh, ob, ha, auq, bS, iG, fu, Rk, aop, ds, vc, acQ, fb, SN, xX, d, xs, eH, cr, bgh, CF, yy, Pd, Z, bz, bgg, alm, bE, i, GW); #c1(SGCG) c2(XP_006719924) c3(gamma-sarcoglycan isoform X2) c4(293082) c5(293083, 293084) c6( ) c7(ng, bM, T, bB, ame, ci, aE, dE, dV, aU, adB, K, bU, hH, yo, aW, lW, hl, uY, Qm, g, eF, cm, eM, wK, TG, vA, uJ, azg, m, bgi, Ri, n, BF, ct, PJ, ado, cd, b, ft, jz, cc, cU, h, jH, pi, adF, bYA, bqy, AQ, pm, op, bP, dB, rx, ER, B, bL, cz, v, j, Kh, C, q, eA, Wn, aT, yu, jj, an, yj, af, ak, wr, aqZ, s, vT, Y, r, akB, t, nC, iK, hY, ck, c, gX, km, aor, im, bKY, bt, Bh, ob, ha, auq, bS, iG, fu, Rk, aop, ds, vc, acQ, fb, SN, xX, d, xs, eH, cr, bgh, CF, yy, Pd, Z, bz, bgg, alm, bE, i, GW); #c1(SGCZ) c2(NP_631906) c3(zeta-sarcoglycan) c4(238289, 238290) c5(238291, 238292, 238293, 238294, 238295, 238296, 238297, 238298, 238299, 238300, 238301, 238302) c6( ) c7(hb, aw, km, aj, j, Kw, an, bt, xa, ad); #c1(SGIP1) c2(XP_011540595) c3(SH3-containing GRB2-like protein 3-interacting protein 1 isoform X21) c4( ) c5(339099, 339100) c6( ) c7(ac, dY, e, aw, v, j, eu); #c1(SGK1) c2(NP_001137148) c3(serine/threonine-protein kinase Sgk1 isoform 2) c4(54991, 54992, 54993) c5(54994, 54995, 54996, 54997, 54998, 54999, 55000, 55001, 55002, 55003, 55004, 55005, 55006, 55007, 55008, 55009, 55010, 55011) c6( ) c7(bL, nD, T, jv, ahS, eR, Dd, oe, ha, aw, bO, cz, wo, n, aj, dG, v, ci, qN, fd, zP, aY, cd, J, ad, eA, py, uT, aT, iv, cy, jy, K, ae, Qe, zQ, s, aW, Y, ff, Fe, aq, dg, hp, zC, vs, en, t, cm, qa, bE, es, rR, c, eM, bE, iA, U, MM, gZ, dy, m, clP, ei, lC, bt, B, ao); #c1(SGK1) c2(NP_001137149) c3(serine/threonine-protein kinase Sgk1 isoform 3) c4(55012) c5(55013, 55014, 55015, 55016, 55017, 55018) c6( ) c7(bL, nD, T, jv, ahS, eR, Dd, oe, ha, aw, bO, cz, wo, n, aj, dG, v, ci, qN, fd, zP, aY, cd, J, ad, eA, py, uT, aT, iv, cy, jy, K, ae, Qe, zQ, s, aW, Y, ff, Fe, aq, dg, hp, zC, vs, en, t, cm, qa, bF, es, rR, c, eM, bE, iA, U, MM, gZ, dy, m, clP, ei, lC, bt, B, ao); #c1(SGK1) c2(NP_001137150) c3(serine/threonine-protein kinase Sgk1 isoform 4) c4(55019) c5(55020, 55021, 55022, 55023, 55024, 55025, 55026, 55027, 55028, 55029, 55030, 55031) c6( ) c7(bL, nD, T, jv, ahS, eR, Dd, oe, ha, aw, bO, cz, wo, n, aj, dG, v, ci, qN, fd, zP, aY, cd, J, ad, eA, py, uT, aT, iv, cy, jy, K, ae, Qe, zQ, s, aW, Y, ff, Fe, aq, dg, hp, zC, vs, en, t, cm, qa, bF, es, rR, c, eM, bE, iA, U, MM, gZ, dy, m, clP, ei, lC, bt, B, ao); #c1(SGK1) c2(NP_005618) c3(serine/threonine-protein kinase Sgk1 isoform 1) c4(157973, 157974) c5(157975, 157976, 157977, 157978, 157979, 157980) c6( ) c7(bL, nD, T, jv, ahS, eR, Dd, oe, ha, aw, bO, cz, wo, n, aj, dG, v, ci, qN, fd, zP, aY, cd, J, ad, eA, py, uT, aT, iv, cy, jy, K, ae, Qe, zQ, s, aW, Y, ff, Fe, aq, dg, hp, zC, vs, en, t, cm, qa, bF, es, rR, c, eM, bE, iA, U, MM, gZ, dy, m, clP, ei, lC, bt, B, ao); #c1(SGK2) c2(NP_001186193) c3(serine/threonine-protein kinase Sgk2 isoform alpha) c4(77376, 77377, 77378) c5(77379, 77380, 77381, 77382, 77383, 77384, 77385, 77386, 77387, 77388, 77389, 77390, 77391, 77392, 77393, 77394, 77395, 77396, 77397, 77398, 77399) c6( ) c7(K); #c1(SGK2) c2(NP_057360) c3(serine/threonine-protein kinase Sgk2 isoform beta) c4(190341, 190342) c5(190343, 190344, 190345, 190346, 190347, 190348, 190349, 190350, 190351, 190352, 190353, 190354, 190355, 190356, 190357, 190358, 190359) c6( ) c7(K); #c1(SGK223) c2(XP_005272427) c3(tyrosine-protein kinase SgK223 isoform X1) c4(284018) c5(284019, 284020, 284021, 284022, 284023, 284024, 284025, 284026, 284027, 284028) c6( ) c7(dY); #c1(SGK3) c2(NP_001028750) c3(serine/threonine-protein kinase Sgk3 isoform 1) c4(30614) c5(30615, 30616, 30617, 30618, 30619, 30620, 30621, 30622, 30623, 30624, 30625, 30626, 30627, 30628, 30629, 30630, 30631, 30632, 30633, 30634, 30635, 30636, 30637, 30638, 30639, 30640) c6( ) c7(aW, aT, K, ae, B, ad); #c1(SGK3) c2(NP_733827) c3(serine/threonine-protein kinase Sgk3 isoform 2) c4(247185) c5(247186, 247187, 247188, 247189, 247190, 247191) c6( ) c7(aW, aT, K, ae, B, ad); #c1(SGMS1) c2(XP_011537885) c3(phosphatidylcholine:ceramide cholinephosphotransferase 1 isoform X1) c4(335383, 335384, 335385, 335386) c5(335387, 335388, 335389, 335390, 335391, 335392, 335393, 335394, 335395, 335396, 335397, 335398, 335399, 335400, 335401, 335402, 335403, 335404) c6( ) c7(ck, av, T, aC, eM, uR, r, v, ci, bz); #c1(SGMS1) c2(XP_011537887) c3(phosphatidylcholine:ceramide cholinephosphotransferase 1 isoform X3) c4( ) c5(335405, 335406, 335407, 335408, 335409, 335410) c6( ) c7(ck, av, T, aC, eM, uR, r, v, ci, bz); #c1(SGMS2) c2(NP_001129730) c3(phosphatidylcholine:ceramide cholinephosphotransferase 2) c4(52235, 52236, 52237) c5(52238, 52239, 52240, 52241, 52242, 52243, 52244, 52245, 52246, 52247, 52248, 52249, 52250, 52251, 52252, 52253, 52254, 52255, 52256, 52257, 52258, 52259, 52260, 52261, 52262, 52263) c6( ) c7(bL, dD, ea, fc, jy, v, eq, ci, cP); #c1(SGOL1) c2(NP_001012409) c3(shugoshin-like 1 isoform A1) c4(24925) c5(24926, 24927, 24928, 24929, 24930, 24931, 24932, 24933, 24934, 24935) c6( ) c7(ck, ai, T, NC, eM, ju, r, aA, aF, j, bK, bh, an, bt, bz, q); #c1(SGOL1) c2(NP_001012410) c3(shugoshin-like 1 isoform A2) c4(24936) c5(24937, 24938, 24939, 24940, 24941, 24942, 24943, 24944, 24945, 24946) c6( ) c7(ck, ai, T, NC, eM, ju, r, aA, aF, j, bK, bh, an, bt, bz, q); #c1(SGOL1) c2(NP_001012411) c3(shugoshin-like 1 isoform B1) c4(24947) c5(24948, 24949, 24950, 24951, 24952, 24953, 24954, 24955, 24956, 24957) c6( ) c7(ck, ai, T, NC, eM, ju, r, aA, aF, j, bK, bh, an, bt, bz, q); #c1(SGOL1) c2(NP_001012412) c3(shugoshin-like 1 isoform B2) c4(24958) c5(24959, 24960, 24961, 24962, 24963, 24964, 24965, 24966, 24967, 24968) c6( ) c7(ck, ai, T, NC, eM, ju, r, aA, aF, j, bK, bh, an, bt, bz, q); #c1(SGOL1) c2(NP_001012413) c3(shugoshin-like 1 isoform C1) c4(24969) c5(24970, 24971, 24972, 24973, 24974, 24975, 24976, 24977, 24978, 24979) c6( ) c7(ck, ai, T, NC, eM, ju, r, aA, aF, j, bK, bh, an, bt, bz, q); #c1(SGOL1) c2(NP_001186186) c3(shugoshin-like 1 isoform D1) c4(77321) c5(77322, 77323, 77324, 77325, 77326, 77327) c6( ) c7(ck, ai, T, NC, eM, ju, r, aA, aF, j, bK, bh, an, bt, bz, q); #c1(SGOL1) c2(NP_612493) c3(shugoshin-like 1 isoform C2) c4(236637) c5(236638, 236639, 236640, 236641, 236642, 236643, 236644, 236645, 236646, 236647) c6( ) c7(ck, ai, T, NC, eM, ju, r, aA, aF, j, bK, bh, an, bt, bz, q); #c1(SGPL1) c2(XP_011538619) c3(sphingosine-1-phosphate lyase 1 isoform X1) c4(336344, 336345) c5(336346, 336347, 336348, 336349, 336350, 336351, 336352, 336353, 336354, 336355, 336356, 336357) c6( ) c7(h, T, CM, af, fD); #c1(SGPL1) c2(XP_011538620) c3(sphingosine-1-phosphate lyase 1 isoform X2) c4(336358) c5(336359, 336360, 336361, 336362, 336363, 336364) c6( ) c7(h, T, CM, af, fD); #c1(SGPP1) c2(NP_110418) c3(sphingosine-1-phosphate phosphatase 1) c4(220192) c5(220193, 220194, 220195, 220196, 220197, 220198) c6( ) c7(T, if, fo, ci, bX, qN, Qp, V, q, eA, dP, baA, bv, iu, Xe, Qk, h, ey, K, fb, iL, bA, TC, A, nO, Y, ff, xs, eH, eZ, r, fe, uY, en, eF, nM, eM, B, fI); #c1(SGPP2) c2(NP_689599) c3(sphingosine-1-phosphate phosphatase 2) c4(243182) c5(243183, 243184, 243185, 243186, 243187, 243188) c6( ) c7(dP, cr); #c1(SGSH) c2(NP_000190) c3(N-sulphoglucosamine sulphohydrolase precursor) c4(4155, 4156) c5(4157, 4158, 4159, 4160, 4161, 4162, 4163, 4164, 4165, 4166, 4167, 4168, 4169, 4170, 4171, 4172, 4173, 4174, 4175, 4176, 4177, 4178, 4179, 4180, 4181, 4182, 4183, 4184, 4185, 4186, 4187, 4188, 4189, 4190, 4191, 4192, 4193, 4194, 4195, 4196, 4197, 4198, 4199, 4200, 4201, 4202, 4203, 4204, 4205, 4206, 4207, 4208, 4209, 4210, 4211, 4212, 4213, 4214, 4215, 4216, 4217, 4218, 4219, 4220, 4221, 4222, 4223, 4224, 4225, 4226, 4227, 4228, 4229, 4230, 4231, 4232, 4233, 4234, 4235, 4236, 4237, 4238, 4239, 4240, 4241, 4242, 4243, 4244, 4245, 4246, 4247, 4248, 4249, 4250, 4251, 4252, 4253, 4254) c6( ) c7(cDJ, IE, kg, aiR, U, Lq, agV, cbA, DL); #c1(SGSH) c2(XP_011523428) c3(N-sulphoglucosamine sulphohydrolase isoform X3) c4( ) c5(317958) c6( ) c7(cDJ, IE, kg, aiR, U, Lq, agV, cbA, DL); #c1(SGSH) c2(XP_011523429) c3(N-sulphoglucosamine sulphohydrolase isoform X4) c4(317959) c5(317960, 317961, 317962, 317963) c6( ) c7(cDJ, IE, kg, aiR, U, Lq, agV, cbA, DL); #c1(SGSM2) c2(NP_001091979) c3(small G protein signaling modulator 2 isoform 2) c4(39121) c5(39122, 39123, 39124, 39125, 39126, 39127) c6( ) c7(bL, v); #c1(SGSM2) c2(NP_055668) c3(small G protein signaling modulator 2 isoform 1) c4(182627) c5(182628, 182629, 182630, 182631, 182632, 182633) c6( ) c7(bL, v); #c1(SGSM2) c2(XP_011522412) c3(small G protein signaling modulator 2 isoform X10) c4( ) c5(317082, 317083) c6( ) c7(bL, v); #c1(SGSM3) c2(NP_056520) c3(small G protein signaling modulator 3 isoform 1) c4(187910) c5(187911, 187912, 187913, 187914, 187915, 187916) c6( ) c7(bM, T, pf, yS, ea, if, bO, fd, bB, qj, ci, aY, GK, aE, pX, dV, Ou, K, ass, eL, cp, hm, aW, nY, hN, as, cm, yl, eM, nB, iT, vA, U, iu, dD, vl, NT, BE, qN, Hx, ft, cU, h, bl, he, A, aml, kp, pm, W, bP, hL, HB, rx, it, B, bL, DM, fM, dA, eR, aA, GC, v, j, q, er, eA, hb, Qg, aT, bK, jj, ae, af, jf, iF, Uf, NE, oV, Y, Pg, r, en, cl, f, ck, nM, WP, dy, bt, an, hl, id, bS, dG, eq, ad, hd, py, ds, fb, nJ, d, BO, ff, eZ, Mz, gl, aF, iV, bz, dr, Hp, bF, Ew, bE, MG, y, st, pC); #c1(SGSM3) c2(XP_005261631) c3(small G protein signaling modulator 3 isoform X3) c4(277504) c5(277505) c6( ) c7(bM, T, pf, yS, ea, if, bO, fd, bB, qj, ci, aY, GK, aE, pX, dV, Ou, K, ass, eL, cp, hm, aW, nY, hN, as, cm, yl, eM, nB, iT, vA, U, iu, dD, vl, NT, BF, qN, Hx, ft, cU, h, bl, he, A, aml, kp, pm, W, bP, hL, HB, rx, it, B, bL, DM, fM, dA, eR, aA, GC, v, j, q, er, eA, hb, Qg, aT, bK, jj, ae, af, jf, iF, Uf, NE, oV, Y, Pg, r, en, cl, f, ck, nM, WP, dy, bt, ao, hl, id, bS, dG, eq, ad, hd, py, ds, fb, nJ, d, BO, ff, eZ, Mz, gl, aF, iV, bz, dr, Hp, bF, Ew, bE, MG, y, st, pC); #c1(SGSM3) c2(XP_005261632) c3(small G protein signaling modulator 3 isoform X6) c4( ) c5(277506, 277507, 277508, 277509, 277510) c6( ) c7(bM, T, pf, yS, ea, if, bO, fd, bB, qj, ci, aY, GK, aE, pX, dV, Ou, K, ass, eL, cp, hm, aW, nY, hN, as, cm, yl, eM, nB, iT, vA, U, iu, dD, vl, NT, BF, qN, Hx, ft, cU, h, b, he, A, aml, kp, pm, W, bP, hL, HB, rx, it, B, bL, DM, fM, dA, eR, aA, GC, v, j, q, er, eA, hb, Qg, aT, bK, jj, ae, af, jf, iF, Uf, NE, oV, Y, Pg, r, en, cl, f, ck, nM, WP, dy, bt, ao, hl, id, bS, dG, eq, ad, hd, py, ds, fb, nJ, d, BO, ff, eZ, Mz, gl, aF, iV, bz, dr, Hp, bF, Ew, bE, MG, y, st, pC); #c1(SGSM3) c2(XP_005261634) c3(small G protein signaling modulator 3 isoform X7) c4(277511, 277512) c5(277513, 277514, 277515, 277516, 277517, 277518, 277519, 277520, 277521, 277522, 277523, 277524) c6( ) c7(bM, T, pf, yS, ea, if, bO, fd, bB, qj, ci, aY, GK, aE, pX, dV, Ou, K, ass, eL, cp, hm, aW, nY, hN, as, cm, yl, eM, nB, iT, vA, U, iu, dD, vl, NT, BF, qN, Hx, ft, cU, h, hl, he, A, aml, kp, pm, W, bP, hL, HB, rx, it, B, bL, DM, fM, dA, eR, aA, GC, v, j, q, er, eA, hb, Qg, aT, bK, jj, ae, af, jf, iF, Uf, NE, oV, Y, Pg, r, en, cl, f, ck, nM, WP, dy, bt, ao, hl, id, bS, dG, eq, ad, hd, py, ds, fb, nJ, d, BO, ff, eZ, Mz, gl, aF, iV, bz, dr, Hp, bF, Ew, bE, MG, y, st, pC); #c1(SGTA) c2(XP_011526480) c3(small glutamine-rich tetratricopeptide repeat-containing protein alpha isoform X1) c4(320784) c5(320785, 320786, 320787, 320788, 320789, 320790) c6( ) c7(kl, aZ, it, ae, cd, ad, Qt); #c1(SH2B1) c2(NP_001139267) c3(SH2B adapter protein 1 isoform 1) c4(59044) c5( ) c6( ) c7(bL, bwl, ae, bM, bP, gH, aw, cll, n, jy, v, j, bz, fq, ad); #c1(SH2B1) c2(NP_001139269) c3(SH2B adapter protein 1 isoform 3) c4(59045, 59046) c5(59047, 59048, 59049, 59050, 59051, 59052, 59053, 59054, 59055, 59056, 59057, 59058) c6( ) c7(bL, bwl, ae, bM, bP, gH, aw, cll, n, jy, v, j, bz, fq, ad); #c1(SH2B1) c2(NP_056318) c3(SH2B adapter protein 1 isoform 2) c4(187042, 187043) c5(187044, 187045, 187046, 187047, 187048, 187049, 187050, 187051, 187052, 187053, 187054, 187055, 187056, 187057, 187058, 187059, 187060) c6( ) c7(bL, bwl, ae, bM, bP, gH, aw, cll, n, jy, v, j, bz, fq, ad); #c1(SH2B2) c2(NP_066189) c3(SH2B adapter protein 2) c4(206818) c5(206819, 206820, 206821, 206822, 206823, 206824, 206825, 206826, 206827, 206828, 206829, 206830) c6( ) c7(T, il, ag, eZ, ez, fF, OS, dX); #c1(SH2B2) c2(XP_005277032) c3(SH2B adapter protein 2 isoform X1) c4( ) c5(285748) c6( ) c7(T, il, ag, eZ, ez, fF, OS, dX); #c1(SH2B2) c2(XP_011514042) c3(SH2B adapter protein 2 isoform X3) c4(306475, 306476) c5( ) c6( ) c7(T, il, ag, eZ, ez, fF, OS, dX); #c1(SH2B2) c2(XP_011514043) c3(SH2B adapter protein 2 isoform X4) c4(306477, 306478) c5(306479, 306480, 306481, 306482, 306483, 306484, 306485, 306486, 306487, 306488, 306489, 306490, 306491, 306492, 306493, 306494, 306495, 306496) c6( ) c7(T, il, ag, eZ, ez, fF, OS, dX); #c1(SH2B3) c2(NP_001278353) c3(SH2B adapter protein 3 isoform 2) c4(109591) c5(109592, 109593, 109594, 109595, 109596, 109597) c6( ) c7(oD, bM, T, oe, yG, lo, e, cz, ez, hz, cL, aw, j, qj, bh, V, o, x, pN, dz, K, hK, A, et, eZ, hp, pm, ck, ac, c, pc, pg, aS, k, gT, y); #c1(SH2B3) c2(NP_005466) c3(SH2B adapter protein 3 isoform 1) c4(156412) c5(156413, 156414, 156415, 156416, 156417, 156418) c6( ) c7(oO, bM, T, oe, yG, lo, e, cz, ez, hz, cL, aw, j, qj, bh, V, o, x, pN, dz, K, hK, A, et, eZ, hp, pm, ck, ac, c, pc, pg, aS, k, gT, y); #c1(SH2B3) c2(XP_006719243) c3(SH2B adapter protein 3 isoform X6) c4( ) c5(292355) c6( ) c7(oO, bM, T, oe, yG, lo, e, cz, ez, hz, cL, aw, j, qj, bh, V, o, x, pN, dz, K, hK, A, et, eZ, hp, pm, ck, ac, c, pc, pg, aS, k, gT, y); #c1(SH2D1A) c2(NP_001108409) c3(SH2 domain-containing protein 1A isoform 2) c4(43187) c5(43188, 43189, 43190, 43191, 43192, 43193, 43194, 43195, 43196, 43197, 43198, 43199) c6( ) c7(T, fM, dA, fR, iW, aw, eX, jh, aj, v, C, pz, Za, aR, aGT, J, hX, F, aCF, ds, kH, hD, h, eV, Ze, iY, H, amA, Zd, pk, hm, A, YY, oV, Zf, eZ, Io, ho, Zb, mK, dr, Wt, Cv, ck, L, cDK, xD, Zg, dW, CZ, yH, R, bC, y, bNP, zA, Ro); #c1(SH2D1A) c2(NP_002342) c3(SH2 domain-containing protein 1A isoform 1) c4(127682, 127683) c5(127684, 127685, 127686, 127687, 127688, 127689) c6( ) c7(T, fM, dA, fR, iW, aw, eX, jh, aj, v, C, pz, Za, aR, aGT, J, hX, F, aCF, ds, kH, hD, h, eV, Ze, iY, H, amA, Zd, pk, hm, A, YY, oV, Zf, eZ, Io, ho, Zb, mK, dr, Wt, Cv, ck, L, cDK, xD, Zg, dW, CZ, yH, R, bC, y, bNP, zA, Ro); #c1(SH2D2A) c2(NP_001154913) c3(SH2 domain-containing protein 2A isoform 1) c4(61227) c5(61228, 61229, 61230, 61231, 61232, 61233) c6( ) c7(yW, aw, aFT, cL, j, y, V, o); #c1(SH2D2A) c2(NP_001154914) c3(SH2 domain-containing protein 2A isoform 3) c4(61234) c5(61235, 61236, 61237, 61238, 61239, 61240) c6( ) c7(yW, aw, aFT, cL, j, y, V, o); #c1(SH2D2A) c2(NP_003966) c3(SH2 domain-containing protein 2A isoform 2) c4(142502) c5(142503, 142504, 142505, 142506, 142507, 142508) c6( ) c7(yW, aw, aFT, cL, j, y, V, o); #c1(SH2D3A) c2(NP_005481) c3(SH2 domain-containing protein 3A) c4(156581) c5(156582, 156583, 156584, 156585, 156586, 156587) c6( ) c7(lo, wc, awi, aT); #c1(SH2D3A) c2(XP_005259529) c3(SH2 domain-containing protein 3A isoform X4) c4(276114) c5(276115, 276116, 276117, 276118, 276119, 276120) c6( ) c7(lo, wc, aw, aT); #c1(SH2D3A) c2(XP_006722665) c3(SH2 domain- containing protein 3A isoform X3) c4( ) c5(294795, 294796) c6( ) c7(lo, wc, awi, aT); #c1(SH2D3C) c2(NP_001136005) c3(SH2 domain-containing protein 3C isoform d) c4(53967) c5(53968, 53969, 53970, 53971, 53972, 53973) c6( ) c7(Na, zT, xA, BD, aW, wc, aT, Nc, zW, cm); #c1(SH2D3C) c2(NP_001136006) c3(SH2 domain-containing protein 3C isoform e) c4(53974) c5(53975, 53976, 53977, 53978, 53979, 53980, 53981, 53982, 53983, 53984, 53985) c6( ) c7(Na, zT, xA, BD, aW, wc, aT, Nc, zW, cm); #c1(SH2D3C) c2(NP_001239263) c3(SH2 domain-containing protein 3C isoform f) c4(88391) c5(88392, 88393, 88394, 88395, 88396, 88397) c6( ) c7(Na, zT, xA, BD, aW, wc, aT, Nc, zW, cm); #c1(SH2D3C) c2(NP_005480) c3(SH2 domain-containing protein 3C isoform b) c4(156567) c5(156568, 156569, 156570, 156571, 156572, 156573, 156574, 156575, 156576, 156577, 156578, 156579, 156580) c6( ) c7(Na, zT, xA, 80, aW, wc, aT, Nc, zW, cm); #c1(SH2D3C) c2(NP_733745) c3(SH2 domain-containing protein 3C isoform a) c4(246902, 246903, 246904, 246905) c5(246906, 246907, 246908, 246909, 246910, 246911, 246912, 246913, 246914, 246915, 246916, 246917) c6( ) c7(Na, zT, xA, BD, aW, wc, aT, Nc, zW, cm); #c1(SH2D4A) c2(NP_001167630) c3(SH2 domain-containing protein 4A isoform a) c4(69471) c5(69472, 69473, 69474, 69475, 69476, 69477, 69478, 69479, 69480, 69481) c6( ) c7(B, j); #c1(SH2D4A) c2(NP_001167631) c3(SH2 domain-containing protein 4A isoform b) c4(69482) c5(69483, 69484, 69485, 69486, 69487, 69488) c6( ) c7(B, j); #c1(SH2D4B) c2(NP_001139191) c3(SH2 domain-containing protein 4B isoform 2) c4(58913) c5(58914, 58915, 58916, 58917, 58918, 58919) c6( ) c7(bqW); #c1(SH2D4B) c2(NP_997255) c3(SH2 domain-containing protein 4B isoform 1) c4(265332, 265333, 265334) c5(265335, 265336, 265337, 265338, 265339, 265340, 265341, 265342, 265343, 265344, 265345, 265346, 265347, 265348, 265349, 265350, 265351, 265352) c6( ) c7(bqW); #c1(SH3BGR) c2(NP_001001713) c3(SH3 domain-binding glutamic acid-rich protein isoform b) c4( ) c5(18973, 18974, 18975, 18976, 18977, 18978, 18979, 18980, 18981, 18982, 18983, 18984, 18985, 18986, 18987, 18988) c6( ) c7(f, v, j); #c1(SH3BGR) c2(NP_031367) c3(SH3 domain-binding glutamic acid-rich protein isoform a) c4(171965) c5( ) c6( ) c7(f, v, j); #c1(SH3BGR) c2(XP_011527990) c3(SH3 domain-binding glutamic acid-rich protein isoform X2) c4( ) c5(323043, 323044, 323045, 323046, 323047, 323048, 323049, 323050, 323051) c6( ) c7(f, v, j); #c1(SH3BGRL) c2(NP_003013) c3(SH3 domain-binding glutamic acid-rich-like protein) c4(134432) c5(134433, 134434, 134435, 134436, 134437, 134438) c6( ) c7(f, v, j); #c1(SH3BGRL2) c2(NP_113657) c3(SH3 domain-binding glutamic acid-rich-like protein 2) c4(221975) c5(221976, 221977, 221978, 221979, 221980, 221981) c6( ) c7(nX, lr); #c1(SH3BP1) c2(NP_061830) c3(SH3 domain-binding protein 1) c4(200645, 200646, 200647, 200648) c5(200649, 200650, 200651, 200652, 200653, 200654, 200655, 200656, 200657, 200658, 200659, 200660, 200661, 200662, 200663, 200664, 200665, 200666, 200667, 200668, 200669, 200670, 200671, 200672) c6( ) c7(aj, bo); #c1(SH3BP2) c2(NP_001139327) c3(SH3 domain-binding protein 2 isoform c) c4(59194, 59195, 59196) c5(59197, 59198, 59199, 59200, 59201, 59202, 59203, 59204) c6( ) c7(ck, azi, fr, cDL, zu, dr); #c1(SH3BP2) c2(XP_005248055) c3(SH3 domain-binding protein 2 isoform X4) c4(268182) c5(268183) c6( ) c7(ck, azi, fr, cDL, zu, dr); #c1(SH3BP2) c2(XP_011511849) c3(SH3 domain-binding protein 2 isoform X2) c4(302521) c5(302522, 302523, 302524, 302525, 302526, 302527, 302528) c6( ) c7(ck, azi, fr, cDL, zu, dr); #c1(SH3BP2) c2(XP_011511850) c3(SH3 domain-binding protein 2 isoform X3) c4(302529, 302530, 302531) c5( ) c6( ) c7(ck, azi, fr, cDL, zu, dr); #c1(SH3BP2) c2(XP_011511852) c3(SH3 domain-binding protein 2 isoform X1) c4( ) c5(302532, 302533, 302534, 302535, 302536, 302537, 302538, 302539, 302540, 302541, 302542, 302543, 302544, 302545) c6( ) c7(ck, azi, fr, cDL, zu, dr); #c1(SH3BP2) c2(XP_011511853) c3(SH3 domain-binding protein 2 isoform X5) c4(302546) c5( ) c6( ) c7(ck, azi, fr, cDL, zu, dr); #c1(SH3BP2) c2(XP_011511858) c3(SH3 domain-binding protein 2 isoform X10) c4( ) c5(302547, 302548, 302549, 302550, 302551, 302552, 302553, 302554, 302555, 302556, 302557, 302558, 302559, 302560, 302561, 302562, 302563, 302564, 302565, 302566, 302567, 302568, 302569, 302570, 302571, 302572, 302573, 302574, 302575, 302576, 302577, 302578, 302579, 302580, 302581, 302582, 302583, 302584, 302585, 302586) c6( ) c7(ck, azi, fr, cDL, zu, dr); #c1(SH3BP4) c2(XP_011509196) c3(SH3 domain-binding protein 4 isoform X1) c4(299809, 299810, 299811, 299812, 299813, 299814, 299815) c5(299816, 299817, 299818, 299819, 299820, 299821, 299822, 299823, 299824, 299825, 299826, 299827, 299828, 299829, 299830, 299831, 299832, 299833, 299834, 299835, 299836, 299837, 299838, 299839, 299840, 299841, 299842, 299843, 299844, 299845, 299846, 299847, 299848, 299849, 299850, 299851, 299852, 299853, 299854, 299855, 299856, 299857, 299858, 299859, 299860, 299861, 299862, 299863, 299864, 299865) c6( ) c7(bL, T, DM, eR, oe, DV, bS, v, ai, Na, ql, aT, h, DO, DG, jj, s, aW, ev, aq, iR, iK, ck, DT, ei, kS, B); #c1(SH3BP5) c2(NP_001018009) c3(SH3 domain-binding protein 5 isoform b) c4(26802, 26803, 26804) c5(26805, 26806, 26807, 26808, 26809, 26810, 26811, 26812, 26813, 26814, 26815, 26816, 26817, 26818, 26819, 26820, 26821, 26822, 26823, 26824, 26825) c6( ) c7(hb, azi, aw, af); #c1(SH3BP5) c2(NP_004835) c3(SH3 domain-binding protein 5 isoform a) c4(150166) c5(150167, 150168, 150169, 150170, 150171, 150172, 150173) c6( ) c7(hb, azi, aw, af); #c1(SH3BP5) c2(XP_011532554) c3(SH3 domain-binding protein 5 isoform X3) c4( ) c5(328648, 328649) c6( ) c7(hb, azi, aw, af); #c1(SH3BP5) c2(XP_011532555) c3(SH3 domain-binding protein 5 isoform X4) c4( ) c5(328650, 328651) c6( ) c7(hb, azi, aw, af); #c1(SH3D19) c2(NP_001009555) c3(SH3 domain-containing protein 19 isoform 1) c4( ) c5(23596, 23597, 23598, 23599, 23600, 23601, 23602, 23603) c6( ) c7(bL, qx, T, bM, jh, cz, bB, v, afE, q, hr, ad, hX, x, ke, hd, dV, aT, h, jy, hn, dL, K, aAt, bl, jj, nJ, ae, eL, eG, d, iU, aW, Y, oV, fc, r, aq, aF, Pd, cm, bw, bz, Qt, qa, eK, QA, ck, nM, iT, bE, arx, k, cP, y, bt, B); #c1(SH3D19) c2(NP_001122395) c3(SH3 domain-containing protein 19 isoform 2) c4(46643) c5(46644, 46645, 46646, 46647, 46648, 46649, 46650, 46651, 46652, 46653, 46654) c6( ) c7(bL, gx, T, bM, jh, cz, bB, v, afE, q, hr, ad, hX, x, ke, hd, dV, aT, h, jy, hn, dL, K, aAt, bl, jj, nJ, ae, eL, eG, d, iU, aW, Y, oV, fc, r, aq, aF, Pd, cm, bw, bz, Qt, qa, eK, QA, ck, nM, iT, bE, arx, k, cP, y, bt, B); #c1(SH3D19) c2(NP_001122396) c3(SH3 domain-containing protein 19 isoform 3) c4(46655) c5(46656, 46657, 46658, 46659, 46660, 46661, 46662, 46663) c6( ) c7(bL, qx, T, bM, jh, cz, bB, v, afE, q, br, ad, hX, x, ke, hd, dV, aT, h, jy, hn, dL, K, aAt, bl, jj, nJ, ae, eL, eG, d, iU, aW, Y, oV, fc, r, aq, aF, Pd, cm, bw, bz, Qt, qa, eK, QA, ck, nM, iT, bE, arx, k, cP, y, bt, B); #c1(SH3D19) c2(XP_011529950) c3(SH3 domain-containing protein 19 isoform X4) c4(325743) c5(325744, 325745, 325746, 325747, 325748, 325749, 325750) c6( ) c7(bL, qx, T, bM, jh, cz, bB, v, afE, q, hr, ad, hX, x, ke, hd, dV, aT, h, jy, hn, dL, K, aAt, bl, jj, nJ, ae, eL, eG, d, iU, aW, Y, oV, fc, r, aq, aF, Pd, cm, bw, bz, Qt, qa, eK, QA, ck, nM, iT, bE, arx, k, cP, y, bt, B); #c1(SH3GL1) c2(NP_001186872) c3(endophilin-A2 isoform 2) c4(78728) c5(78729, 78730, 78731, 78732, 78733, 78734) c6( ) c7(ck, x, aT, bw, k, hF, bt, fs, eA); #c1(SH3GL1) c2(NP_001186873) c3(endophilin-A2 isoform 3) c4(78735) c5(78736, 78737, 78738, 78739, 78740, 78741) c6( ) c7(ck, x, aT, bw, k, hF, bt, fs, eA); #c1(SH3GL1) c2(NP_003016) c3(endophilin-A2 isoform 1) c4(134467) c5(134468, 134469, 134470, 134471, 134472, 134473) c6( ) c7(ck, x, aT, bw, k, hF, bt, fs, eA); #c1(SH3GL2) c2(NP_003017) c3(endophilin-A1) c4(134474, 134475, 134476, 134477) c5(134478, 134479, 134480, 134481, 134482, 134483, 134484, 134485, 134486, 134487, 134488, 134489, 134490) c6( ) c7(T, AW, d, id, af, eM, aW, iK, aT, vr, Ej, K, an, V, cd); #c1(SH3GL2) c2(XP_005251606) c3(endophilin-A1 isoform X2) c4( ) c5(271005, 271006, 271007, 271008, 271009, 271010, 271011, 271012, 271013, 271014, 271015) c6( ) c7(T, AW, d, id, af, eM, aW, iK, aT, vr, Ej, K, an, V, cd); #c1(SH3GL3) c2(NP_001288038) c3(endophilin-A3 isoform c) c4(113439) c5(113440, 113441, 113442, 113443, 113444, 113445, 113446, 113447, 113448, 113449) c6( ) c7(eA); #c1(SH3GL3) c2(NP_003018) c3(endophilin-A3 isoform a) c4(134491, 134492) c5(134493, 134494, 134495, 134496, 134497, 134498, 134499, 134500, 134501, 134502, 134503, 134504) c6( ) c7(eA); #c1(SH3KBP1) c2(NP_001019837) c3(SH3 domain-containing kinase-binding protein 1 isoform b) c4(27937, 27938, 27939, 27940) c5(27941, 27942, 27943, 27944, 27945, 27946, 27947, 27948, 27949, 27950, 27951, 27952, 27953, 27954, 27955, 27956, 27957, 27958, 27959, 27960, 27961, 27962, 27963, 27964) c6( ) c7(eW, T, fR, aW, ff, aT, iv, en, X); #c1(SH3KBP1) c2(NP_001171889) c3(SH3 domain-containing kinase-binding protein 1 isoform c) c4(71966) c5(71967, 71968, 71969, 71970, 71971, 71972, 71973, 71974, 71975, 71976, 71977, 71978) c6( ) c7(eW, T, fR, aW, ff, aT, iv, en, X); #c1(SH3KBP1) c2(NP_114098) c3(SH3 domain-containing kinase-binding protein 1 isoform a) c4(222155) c5(222156, 222157, 222158, 222159, 222160, 222161) c6( ) c7(eW, T, fR, aW, ff, aT, iv, en, X); #c1(SH3KBP1) c2(XP_011543800) c3(SH3 domain-containing kinase-binding protein 1 isoform X1) c4(342922) c5(342923) c6( ) c7(eW, T, fR, aW, ff, aT, iv, en, X); #c1(SH3KBP1) c2(XP_011543801) c3(SH3 domain-containing kinase-binding protein 1 isoform X3) c4(342924, 342925) c5(342926, 342927, 342928, 342929, 342930, 342931, 342932, 342933, 342934, 342935, 342936) c6( ) c7(eW, T, fR, aW, ff, aT, iv, en, X); #c1(SH3KBP1) c2(XP_011543803) c3(SH3 domain-containing kinase-binding protein 1 isoform X5) c4( ) c5(342937, 342938, 342939, 342940, 342941, 342942) c6( ) c7(eW, T, fR, aW, ff, aT, iv, en, X); #c1(SH3KBP1) c2(XP_011543804) c3(SH3 domain-containing kinase-binding protein 1 isoform X6) c4(342943) c5( ) c6( ) c7(eW, T, fR, aW, ff, aT, iv, en, X); #c1(SH3PXD2A) c2(NP_055446) c3(SH3 and PX domain-containing protein 2A) c4(181192, 181193, 181194) c5(181195, 181196, 181197, 181198, 181199, 181200, 181201, 181202, 181203, 181204, 181205, 181206, 181207, 181208, 181209, 181210, 181211, 181212) c6( ) c7(iu, By, af, eb); #c1(SH3PXD2A) c2(XP_005270351) c3(SH3 and PX domain-containing protein 2A isoform X3) c4(283362) c5(283363, 283364, 283365, 283366, 283367, 283368) c6( ) c7(iu, By, af, eb); #c1(SH3PXD2A) c2(XP_005270352) c3(SH3 and PX domain-containing protein 2A isoform X4) c4(283369, 283370) c5(283371, 283372, 283373, 283374, 283375, 283376, 283377, 283378, 283379, 283380, 283381, 283382, 283383) c6( ) c7(iu, By, af, eb); #c1(SH3PXD2A) c2(XP_005270354) c3(SH3 and PX domain-containing protein 2A isoform X6) c4(283384) c5(283385, 283386, 283387, 283388, 283389, 283390) c6( ) c7(iu, By, af, eb); #c1(SH3PXD2A) c2(XP_005270355) c3(SH3 and PX domain-containing protein 2A isoform X8) c4(283391) c5(283392, 283393, 283394, 283395, 283396) c6( ) c7(iu, By, af, eb); #c1(SH3PXD2B) c2(NP_001017995) c3(SH3 and PX domain-containing protein 28) c4(26746) c5(26747, 26748, 26749, 26750, 26751, 26752) c6( ) c7(aBU, bE, cDH, Az, bB, v, cDM, bD, xb, zo); #c1(SH3RF1) c2(NP_065921) c3(E3 ubiquitin-protein ligase SH3RF1) c4(206258, 206259, 206260) c5(206261, 206262, 206263, 206264, 206265, 206266, 206267, 206268, 206269, 206270, 206271, 206272, 206273, 206274, 206275, 206276, 206277, 206278) c6( ) c7(bz, an, aT); #c1(SH3RF3) c2(NP_001092759) c3(SH3 domain-containing RING finger protein 3 precursor) c4(39621, 39622) c5(39623, 39624, 39625, 39626, 39627, 39628) c6( ) c7(xa); #c1(SH3RF3) c2(XP_011509411) c3(SH3 domain-containing RING finger protein 3 isoform X1) c4(299968) c5(299969, 299970, 299971, 299972, 299973, 299974) c6( ) c7(xa); #c1(SH3RF3) c2(XP_011509412) c3(SH3 domain-containing RING finger protein 3 isoform X3) c4( ) c5(299975, 299976, 299977, 299978, 299979, 299980) c6( ) c7(xa); #c1(SH3TC2) c2(NP_078853) c3(SH3 domain and tetratricopeptide repeat-containing protein 2) c4(215759, 215760, 215761, 215762) c5(215763, 215764, 215765, 215766, 215767, 215768, 215769, 215770, 215771, 215772, 215773, 215774, 215775, 215776, 215777, 215778, 215779, 215780, 215781, 215782, 215783, 215784, 215785, 215786) c6( ) c7(Js, Iq, agU, aFT, bQ, cDO, cDP, fu, bU, Jo, bN); #c1(SH3YL1) c2(NP_001153069) c3(SH3 domain-containing YSC84-like protein 1 isoform 2) c4(60408) c5(60409, 60410, 60411, 60412, 60413, 60414, 60415, 60416, 60417, 60418, 60419, 60420) c6( ) c7(cm); #c1(SH3YL1) c2(NP_001269611) c3(SH3 domain-containing YSC84-like protein 1 isoform 3) c4(102201) c5(102202, 102203, 102204, 102205, 102206, 102207, 102208, 102209, 102210, 102211) c6( ) c7(cm); #c1(SH3YL1) c2(NP_001269616) c3(SH3 domain-containing YSC84-like protein 1 isoform 4) c4(102213) c5(102214, 102215, 102216, 102217, 102218, 102219) c6( ) c7(cm); #c1(SH3YL1) c2(NP_056492) c3(SH3 domain-containing YSC84-like protein 1 isoform 1) c4(187743, 187744) c5(187745, 187746, 187747, 187748, 187749, 187750, 187751, 187752, 187753, 187754) c6( ) c7(cm); #c1(SHANK1) c2(XP_006723296) c3(SH3 and multiple ankyrin repeat domains protein 1 isoform X1) c4(295100, 295101) c5(295102, 295103, 295104, 295105, 295106, 295107) c6( ) c7(aQc, Pi, gl, fr, nA, rz, bN, hq); #c1(SHANK1) c2(XP_011525315) c3(SH3 and multiple ankyrin repeat domains protein 1 isoform X2) c4(319778) c5(319779, 319780, 319781, 319782, 319783, 319784) c6( ) c7(aQc, Pi, gl, fr, nA, rz, bN, hq); #c1(SHANK1) c2(XP_011525316) c3(SH3 and multiple ankyrin repeat domains protein 1 isoform X3) c4(319785) c5(319786, 319787, 319788, 319789, 319790, 319791, 319792, 319793, 319794, 319795, 319796, 319797, 319798, 319799, 319800) c6( ) c7(aQc, Pi, gl, fr, nA, rz, bN, hq); #c1(SHANK2) c2(NP_036441) c3(SH3 and multiple ankyrin repeat domains protein 2 isoform 1) c4(173899, 173900, 173901, 173902) c5(173903, 173904, 173905, 173906, 173907, 173908, 173909, 173910, 173911, 173912, 173913, 173914, 173915, 173916, 173917, 173918, 173919, 173920) c6( ) c7(rz, oe, ff, VT, it, Ea, nA, WI, cDQ, en, aHr, aR, bN); #c1(SHANK2) c2(NP_573573) c3(SH3 and multiple ankyrin repeat domains protein 2 isoform 2) c4(234574, 234575, 234576, 234577, 234578) c5(234579, 234580, 234581, 234582, 234583, 234584, 234585, 234586, 234587, 234588, 234589, 234590, 234591, 234592, 234593, 234594, 234595, 234596, 234597, 234598, 234599, 234600, 234601, 234602, 234603, 234604, 234605, 234606, 234607, 234608) c6( ) c7(rz, oe, ff, VT, it, Ea, nA, WI, cDQ, en, aHr, aR, bN); #c1(SHANK2) c2(XP_005277989) c3(SH3 and multiple ankyrin repeat domains protein 2 isoform X9) c4(285764) c5(285765, 285766, 285767, 285768, 285769, 285770) c6( ) c7(rz, oe, ff, VT, it, Ea, nA, WI, cDQ, en, aHr, aR, bN); #c1(SHANK2) c2(XP_011543160) c3(SH3 and multiple ankyrin repeat domains protein 2 isoform X7) c4( ) c5(341989, 341990, 341991, 341992, 341993, 341994) c6( ) c7(rz, oe, ff, VT, it, Ea, nA, WI, cDQ, en, aHr, aR, bN); #c1(SHANK3) c2(NP_277052) c3(SH3 and multiple ankyrin repeat domains protein 3) c4(228822, 228823) c5(228824, 228825, 228826, 228827, 228828, 228829, 228830, 228831, 228832, 228833, 228834, 228835) c6( ) c7(bcq, VX, rz, cDS, cDR, aHr, VT, acg, akf, Ko, aQM, nA, bSk, WI, he, ahg, cnv, ad, bN); #c1(SHARPIN) c2(NP_112236) c3(sharpin) c4(221057, 221058) c5(221059, 221060, 221061, 221062, 221063, 221064, 221065, 221066, 221067, 221068, 221069, 221070, 221071) c6( ) c7(yQ, aT, dN, Xm, cbL, eE, ae, eA); #c1(SHB) c2(NP_003019) c3(SH2 domain-containing adapter protein 8) c4(134505, 134506) c5(134507, 134508, 134509, 134510, 134511, 134512, 134513, 134514, 134515, 134516, 134517, 134518, 134519) c6( ) c7(hb, af, cd, ac, c); #c1(SHBG) c2(NP_001139751) c3(sex hormone-binding globulin isoform 2 precursor) c4(59844, 59845) c5(59846, 59847, 59848, 59849, 59850, 59851) c6( ) c7(T, ea, e, al, ci, aTS, aex, il, iX, auB, K, eL, xQ, aW, fc, Ku, g, AM, vA, Gs, m, pw, Uw, dD, gU, sw, zX, aj, et, ml, qN, jw, PD, UD, jy, dL, afV, uV, hB, wC, ael, Nr, sq, hQ, aq, po, op, iO, se, afc, JQ, PI, mg, hL, at, it, B, Rf, bL, aA, cz, ti, v, j, q, J, UE, aT, ae, af, bA, qw, kl, ND, Lf, r, bu, cl, t, Px, f, bN, vK, sn, hr, UF, gT, aZ, iW, RH, jh, btu, bS, eq, dG, ad, yt, vJ, io, aeQ, eZ, yy, dg, aF, Z, Nq, pv, yE, z, gZ, cP, ei, y); #c1(SHBG) c2(NP_001139752) c3(sex hormone-binding globulin isoform 3 precursor) c4(59852, 59853, 59854) c5(59855, 59856, 59857, 59858, 59859, 59860, 59861, 59862, 59863, 59864, 59865, 59866, 59867) c6( ) c7(T, ea, e, al, ci, aTS, aex, il, iX, auB, K, eL, xQ, aW, fc, Ku, g, AM, vA, Gs, m, pw, Uw, dD, gU, sw, zX, aj, et, ml, qN, jw, PD, UD, jy, dL, afV, uV, hB, wC, ael, Nr, sq, hQ, aq, po, op, iD, se, afc, JQ, PI, mg, hL, at, it, B, Rf, bL, aA, cz, ti, v, j, q, J, UE, aT, ae, af, bA, qw, kl, ND, Lf, r, bu, cl, t, Px, f, bN, vK, sn, hr, UF, gT, aZ, iW, RH, jh, btu, bS, eq, dG, ad, yt, vJ, io, aeQ, eZ, yy, dq, aF, Z, Nq, pv, yE, z, gZ, cP, ei, y); #c1(SHBG) c2(NP_001139753) c3(sex hormone-binding globulin isoform 4 precursor) c4(59868) c5(59869, 59870, 59871, 59872, 59873, 59874, 59875, 59876, 59877, 59878, 59879, 59880) c6( ) c7(T, ea, e, al, ci, aTS, aex, il, iX, auB, K, eL, xQ, aW, fc, Ku, g, AM, vA, Gs, m, pw, Uw, dD, gU, sw, zX, aj, et, ml, qN, jw, PD, UD, jy, dL, afV, uV, hB, wC, ael, Nr, sq, hQ, aq, po, op, iO, se, afc, JQ, PI, mg, hL, at, it, B, Rf, bL, aA, cz, ti, v, j, q, J, UE, aT, ae, af, bA, qw, kl, ND, Lf, r, bu, cl, t, Px, f, bN, vK, sn, hr, UF, gT, aZ, iW, RH, jh, btu, bS, eq, dG, ad, yt, vJ, in, aeQ, eZ, yy, dq, aF, Z, Nq, pv, yE, z, gZ, cP, ei, y); #c1(SHBG) c2(NP_001276044) c3(sex hormone-binding globulin isoform 6) c4( ) c5(107831, 107832, 107833, 107834, 107835) c6( ) c7(T, ea, e, al, ci, aTS, aex, il, iX, auB, K, eL, xQ, aW, fc, Ku, g, AM, vA, Gs, m, pw, Uw, dD, gU, sw, zX, aj, et, ml, qN, jw, PD, UD, jy, dL, afV, uV, hB, wC, ael, Nr, sq, hQ, aq, po, op, iO, se, afc, JQ, PI, mg, hL, at, it, B, Rf, bL, aA, cz, ti, v, j, q, J, UE, aT, ae, af, bA, qw, kl, ND, Lf, r, bu, cl, t, Px, f, bN, vK, sn, hr, UF, gT, aZ, iW, RH, jh, btu, bS, eq, dG, ad, yt, vJ, io, aeQ, eZ, yy, dg, aF, Z, Nq, pv, yE, z, gZ, cP, ei, y); #c1(SHC1) c2(NP_001123512) c3(SHC-transforming protein 1 isoform 3) c4(47267, 47268, 47269) c5(47270, 47271, 47272, 47273, 47274, 47275, 47276, 47277, 47278, 47279, 47280, 47281, 47282, 47283, 47284, 47285, 47286) c6( ) c7(bL, T, eR, e, aj, ci, PJ, J, ad, dP, aT, h, K, dQ, ae, d, B, aW, Y, Pg, aLJ, aq, bz, X, vi); #c1(SHC1) c2(NP_001123513) c3(SHC-transforming protein 1 isoform 4) c4( ) c5(47287, 47288, 47289, 47290, 47291, 47292, 47293) c6( ) c7(bL, T, eR, e, aj, ci, PJ, J, ad, dP, aT, h, K, dQ, ae, d, B, aW, Y, Pg, aLJ, aq, bz, X, vi); #c1(SHC1) c2(NP_001189788) c3(SHC-transforming protein 1 isoform 5 precursor) c4(80269, 80270, 80271) c5(80272, 80273, 80274, 80275, 80276, 80277, 80278, 80279, 80280, 80281, 80282, 80283, 80284, 80285, 80286, 80287, 80288, 80289, 80290, 80291, 80292, 80293, 80294) c6( ) c7(bL, T, eR, e, aj, ci, PJ, J, ad, dP, aT, h, K, dQ, ae, d, B, aW, Y, Pg, aLJ, aq, bz, X, vi); #c1(SHC1) c2(NP_003020) c3(SHC-transforming protein 1 isoform 2) c4(134520) c5(134521) c6( ) c7(bL, T, eR, e, aj, ci, PJ, J, ad, dP, aT, h, K, dQ, ae, d, B, aW, Y, Pg, aLJ, aq, bz, X, vi); #c1(SHC1) c2(NP_892113) c3(SHC-transforming protein 1 isoform 1) c4(257693, 257694) c5(257695, 257696, 257697, 257698, 257699, 257700) c6( ) c7(bL, T, eR, e, aj, ci, PJ, J, ad, dP, aT, h, K, dQ, ae, d, B, aW, Y, Pg, aLJ, aq, bz, X, vi); #c1(SHC1) c2(XP_011508194) c3(SHC-transforming protein 1 isoform X2) c4(298782) c5( ) c6( ) c7(bL, T, eR, e, aj, ci, PJ, J, ad, dP, aT, h, K, dQ, ae, d, B, aW, Y, Pg, aLJ, aq, bz, X, vi); #c1(SHC1) c2(XP_011508196) c3(SHC-transforming protein 1 isoform X4) c4(298783) c5( ) c6( ) c7(bL, T, eR, e, aj, ci, PJ, J, ad, dP, aT, h, K, dQ, ae, d, B, aW, Y, Pg, aLJ, aq, bz, X, vi); #c1(SHC1) c2(XP_011508198) c3(SHC-transforming protein 1 isoform X6) c4( ) c5(298784) c6( ) c7(bL, T, eR, e, aj, ci, PJ, J, ad, dP, aT, h, K, dQ, ae, d, B, aW, Y, Pg, aLJ, aq, bz, X, vi); #c1(SHC1) c2(XP_011508199) c3(SHC-transforming protein 1 isoform X8) c4(298785) c5(298786, 298787, 298788, 298789, 298790, 298791, 298792, 298793, 298794, 298795, 298796, 298797, 298798, 298799, 298800, 298801, 298802) c6( ) c7(bL, T, eR, e, aj, ci, PJ, J, ad, dP, aT, h, K, dQ, ae, d, B, aW, Y, Pg, aLJ, aq, bz, X, vi); #c1(SHC2) c2(NP_036567) c3(SHC-transforming protein 2) c4(174449) c5(174450, 174451, 174452, 174453, 174454, 174455) c6( ) c7(GC, Mb, yA, aha); #c1(SHC3) c2(NP_058544) c3(SHC-transforming protein 3) c4(192818) c5(192819, 192820, 192821, 192822, 192823, 192824, 192825) c6( ) c7(iC, T, sS, d, hd, nB, aW, Lf, XY, cj, aT, bnt, ci, as, bu, cm, bz, eA, zn); #c1(SHC3) c2(XP_011517087) c3(SHC-transforming protein 3 isoform X1) c4(310613) c5( ) c6( ) c7(iC, T, sS, d, hd, nB, aW, Lf, XY, cj, aT, bnt, ci, as, bu, cm, bz, eA, zn); #c1(SHC3) c2(XP_011517088) c3(SHC-transforming protein 3 isoform X2) c4( ) c5(310614, 310615, 310616, 310617, 310618, 310619, 310620, 310621, 310622) c6( ) c7(iC, T, sS, d, hd, nB, aW, Lf, XY, cj, aT, bnt, ci, as, bu, cm, bz, eA, zn); #c1(SHC4) c2(NP_976224) c3(SHC-transforming protein 4) c4(262993) c5(262994, 262995, 262996, 262997, 262998, 262999) c6( ) c7(Y, cd); #c1(SHC4) c2(XP_011519854) c3(SHC-transforming protein 4 isoform X2) c4(314591) c5(314592, 314593, 314594, 314595, 314596, 314597) c6( ) c7(Y, cd); #c1(SHCBP1) c2(NP_079021) c3(SHC SH2 domain-binding protein 1) c4(216621) c5(216622, 216623, 216624, 216625, 216626, 216627) c6( ) c7(Jm, aGm, mR, aZy, qt, Y, aZw, ym, Fg); #c1(SHF) c2(NP_001288097) c3(SH2 domain-containing adapter protein F isoform a) c4(113531) c5(113532, 113533, 113534, 113535, 113536, 113537) c6( ) c7(cm, ac); #c1(SHF) c2(NP_612365) c3(SH2 domain-containing adapter protein F isoform b) c4(236256, 236257, 236258) c5(236259, 236260, 236261, 236262, 236263, 236264, 236265, 236266, 236267, 236268, 236269, 236270, 236271, 236272, 236273, 236274, 236275, 236276) c6( ) c7(cm, ac); #c1(SHF) c2(XP_011520479) c3(SH2 domain-containing adapter protein F isoform X4) c4( ) c5(315373) c6( ) c7(cm, ac); #c1(SHFM1) c2(NP_006295) c3(26S proteasome complex subunit DSS1) c4(163766) c5(163767, 163768, 163769, 163770, 163771, 163772) c6( ) c7(T, aC, yk, if, aA, bX, qN, eA, ad, arA, aT, hD, ae, aDV, Pw, hM, aW, ff, aF, en, g, t, bN, dB, hk, afd, m, adg); #c1(SHH) c2(NP_000184) c3(sonic hedgehog protein preproprotein) c4(4004) c5(4005, 4006, 4007, 4008, 4009, 4010) c6( ) c7(cDT, uB, T, aC, fd, bB, ci, cDV, Na, bv, aE, cDU, Be, iv, K, bBp, aJu, eL, aW, az, Az, CT, kt, g, cm, aiv, eM, nB, U, mk, k, BV, iu, asW, RX, ht, n, aj, Nh, jz, bxn, aow, KN, FN, aDM, h, dL, he, Df, Gc, dx, aze, avP, A, MD, iw, Pp, kp, QK, op, Ou, kn, ar, iO, bP, asl, dB, hk, bbx, FB, wk, ajd, hR, eI, zG, eo, YH, bkE, B, fG, yk, aA, cz, j, Xr, il, V, q, J, eA, eJ, azn, uT, eO, aT, Nc, bK, an, bau, ae, dl, jf, iF, cDX, s, Y, ev, r, en, bZE, LV, f, pb, aUv, sS, cdd, ac, c, nG, agw, gT, bt, Kd, id, aD, ha, jh, zU, Fc, ad, hd, ib, ahK, fb, d, ff, aF, Tp, aDP, atb, eK, cuw, LB, bF, bE, bYB, bkh, auK, adg, cDW, ZW, X, y); #c1(SHISA2) c2(NP_001007539) c3(protein shisa-2 homolog precursor) c4(22788) c5(22789, 22790, 22791, 22792, 22793, 22794) c6( ) c7(af, c); #c1(SHISA3) c2(NP_001073974) c3(protein shisa-3 homolog precursor) c4(36748) c5(36749, 36750, 36751, 36752, 36753, 36754) c6( ) c7(T, bz, eM); #c1(SHISA6) c2(NP_001166932) c3(protein shisa-6 homolog isoform 2 precursor) c4(68643) c5(68644, 68645, 68646, 68647, 68648, 68649) c6( ) c7(Bd, fq, Be); #c1(SHISA6) c2(NP_001166933) c3(protein shisa-6 homolog isoform 3 precursor) c4(68650) c5(68651, 68652, 68653, 68654, 68655, 68656) c6( ) c7(Bd, fq, Be); #c1(SHISA6) c2(NP_997269) c3(protein shisa-6 homolog isoform 1 precursor) c4(265360) c5(265361, 265362, 265363, 265364, 265365, 265366) c6( ) c7(Bd, fq, Be); #c1(SHISA9) c2(NP_001138676) c3(protein shisa-9 isoform 1 precursor) c4(57357, 57358) c5(57359, 57360, 57361, 57362, 57363, 57364, 57365, 57366, 57367, 57368, 57369, 57370) c6( ) c7(bL); #c1(SHISA9) c2(NP_001138677) c3(protein shisa-9 isoform 2 precursor) c4(57371) c5(57372, 57373, 57374, 57375, 57376, 57377, 57378, 57379, 57380, 57381, 57382, 57383) c6( ) c7(bL); #c1(SHISA9) c2(XP_005255596) c3(protein shisa-9 isoform X1) c4(273758) c5( ) c6( ) c7(bL); #c1(SHMT1) c2(NP_001268715) c3(serine hydroxymethyltransferase, cytosolic isoform 3) c4( ) c5(100212, 100213, 100214, 100215, 100216, 100217, 100218, 100219, 100220, 100221, 100222) c6( ) c7(T, fM, fV, iW, e, ha, NT, jh, it, bB, oY, uu, q, aR, ad, md, av, x, Na, NS, fS, M, aT, yg, Nc, dL, he, ae, eL, eu, iL, WW, s, aW, ff, r, en, g, eF, t, iK, bz, bN, ac, eM, lp, bE, wE, bm, dy, k, m, bD, y, bt, Pr, X); #c1(SHMT1) c2(NP_683718) c3(serine hydroxymethyltransferase, cytosolic isoform 2) c4(242440) c5(242441, 242442, 242443, 242444, 242445, 242446) c6( ) c7(T, fM, fV, iW, e, ha, NT, jh, it, bB, oY, uu, q, aR, ad, md, av, x, Na, NS, fS, M, aT, yg, Nc, dL, he, ae, eL, eu, iL, WW, s, aW, ff, r, en, g, eF, t, iK, bz, bN, ac, eM, lp, bE, wE, bm, dy, k, m, bD, y, bt, Pr, X); #c1(SHMT1) c2(XP_005256824) c3(serine hydroxymethyltransferase, cytosolic isoform X1) c4(274530, 274531, 274532, 274533, 274534, 274535) c5(274536, 274537, 274538, 274539, 274540, 274541, 274542, 274543, 274544, 274545, 274546, 274547, 274548) c6( ) c7(T, fM, fV, iW, e, ha, NT, jh, it, bB, oY, uu, q, aR, ad, md, av, x, Na, NS, fS, M, aT, yg, Nc, dL, he, ae, eL, eu, iL, WW, s, aW, ff, r, en, g, eF, t, iK, bz, bN, ac, eM, lp, bE, wE, bm, dy, k, m, bD, y, bt, Pr, X); #c1(SHMT1) c2(XP_011522294) c3(serine hydroxymethyltransferase, cytosolic isoform X2) c4(316954) c5(316955, 316956, 316957, 316958, 316959, 316960, 316961, 316962, 316963, 316964, 316965, 316966, 316967, 316968, 316969, 316970, 316971, 316972) c6( ) c7(T, fM, fV, iW, e, ha, NT, jh, it, bB, oY, uu, q, aR, ad, md, av, x, Na, NS, fS, M, aT, yg, Nc, dL, he, ae, eL, eu, iL, WW, s, aW, ff, r, en, g, eF, t, iK, bz, bN, ac, eM, lp, bE, wE, bm, dy, k, m, bD, y, bt, Pr, X); #c1(SHMT2) c2(NP_001159828) c3(serine hydroxymethyltransferase, mitochondrial isoform 2 precursor) c4(64811) c5(64812, 64813, 64814, 64815, 64816, 64817) c6( ) c7(Na, T, iW, Pr, Nc, bz, it); #c1(SHMT2) c2(NP_001159830) c3(serine hydroxymethyltransferase, mitochondrial isoform 3) c4(64818) c5(64819, 64820, 64821, 64822, 64823, 64824, 64825, 64826, 64827, 64828, 64829) c6( ) c7(Na, T, iW, Pr, Nc, bz, it); #c1(SHMT2) c2(NP_005403) c3(serine hydroxymethyltransferase, mitochondrial isoform 1 precursor) c4(155755) c5(155756, 155757, 155758, 155759, 155760, 155761, 155762, 155763, 155764) c6( ) c7(Na, T, iW, Pr, Nc, bz, it); #c1(SHMT2) c2(XP_011536980) c3(serine hydroxymethyltransferase, mitochondrial isoform X1) c4(334668) c5(334669, 334670, 334671, 334672, 334673, 334674) c6( ) c7(Na, T, iW, Pr, Nc, bz, it); #c1(SHOC2) c2(NP_001255968) c3(leucine-rich repeat protein SHOC-2 isoform 2) c4(94982, 94983) c5(94984, 94985, 94986, 94987, 94988, 94989, 94990, 94991, 94992, 94993, 94994, 94995) c6( ) c7(ck, T, yS, cDZ, eZ, afB, cDY, cxs, By); #c1(SHOC2) c2(NP_031399) c3(leucine-rich repeat protein SHOC-2 isoform 1) c4(172252) c5(172253, 172254, 172255, 172256, 172257, 172258) c6( ) c7(ck, T, yS, cDZ, eZ, afB, cDY, cxs, By); #c1(SHOX) c2(NP_000442) c3(short stature homeobox protein isoform SHOXa) c4(9039) c5(9040, 9041, 9042, 9043, 9044, 9045, 9046, 9047, 9048, 9049) c6( ) c7(bBM, amj, vJ, il, anV, Nn, zf, Vv, UD, rD, K, aDC, cEa, xs, eH, uY, VK, eF, zZ, bQ, dr, bdu, bfP, bpY, lq, aoJ, bxG, xb); #c1(SHOX) c2(NP_006874) c3(short stature homeobox protein isoform SHOXb) c4(168759) c5(168760, 168761, 168762, 168763, 168764, 168765, 168766, 168767, 168768, 168769, 168770) c6( ) c7(bBM, amj, vJ, il, anV, Nn, zf, Vv, UD, rD, K, aDC, cEa, xs, eH, uY, VK, eF, zZ, bQ, dr, bdu, bfP, bpY, Iq, aoJ, bxG, xb); #c1(SHOX2) c2(NP_001157150) c3(short stature homeobox protein 2 isoform c) c4(62083, 62084) c5(62085, 62086, 62087, 62088, 62089, 62090, 62091, 62092) c6( ) c7(av, bpY, n, aNL, bK, VK, bz, B, dr, bdu, aa); #c1(SHOX2) c2(NP_003021) c3(short stature homeobox protein 2 isoform b) c4(134522) c5(134523, 134524, 134525, 134526, 134527, 134528, 134529) c6( ) c7(av, bpY, n, aNL, bK, VK, bz, B, dr, bdu, aa); #c1(SHOX2) c2(NP_006875) c3(short stature homeobox protein 2 isoform a) c4(168771) c5(168772, 168773, 168774, 168775, 168776, 168777) c6( ) c7(av, bpY, n, aNL, bK, VK, bz, B, dr, bdu, aa); #c1(SHOX2) c2(XP_006713790) c3(short stature homeobox protein 2 isoform X1) c4( ) c5(287360) c6( ) c7(av, bpY, n, aNL, bK, VK, bz, B, dr, bdu, aa); #c1(SHOX2) c2(XP_006713791) c3(short stature homeobox protein 2 isoform X3) c4( ) c5(287361, 287362, 287363, 287364, 287365, 287366, 287367, 287368, 287369, 287370, 287371) c6( ) c7(av, bpY, n, aNL, bK, VK, bz, B, dr, bdu, aa); #c1(SHPK) c2(NP_037408) c3(sedoheptulokinase) c4(175353) c5(175354, 175355, 175356, 175357, 175358, 175359) c6( ) c7(vr); #c1(SHPRH) c2(NP_001036148) c3(E3 ubiquitin-protein ligase SHPRH isoform a) c4(33990, 33991) c5(33992, 33993, 33994, 33995, 33996, 33997, 33998, 33999, 34000, 34001, 34002, 34003, 34004, 34005, 34006, 34007) c6( ) c7(K); #c1(SHPRH) c2(NP_775105) c3(E3 ubiquitin-protein ligase SHPRH isoform b) c4(249522, 249523) c5(249524, 249525, 249526, 249527, 249528, 249529, 249530, 248531, 249532, 249533, 249534, 249535) c6( ) c7(K); #c1(SHPRH) c2(XP_006715503) c3(E3 ubiquitin-protein ligase SHPRH isoform X2) c4(289602) c5( ) c6( ) c7(K); #c1(SHPRH) c2(XP_011534023) c3(E3 ubiquitin-protein ligase SHPRH isoform X6) c4( ) c5(330195, 330196, 330197, 330198, 330199, 330200) c6( ) c7(K); #c1(SHQ1) c2(NP_060600) c3(protein SHQ1 homolog) c4(196790) c5(196791, 196792, 196793, 196794, 196795, 196796) c6( ) c7(bfG, sb); #c1(SHROOM2) c2(NP_001640) c3(protein Shroom2) c4(119561, 119562, 119563, 119564) c5(119565, 119566, 119567, 119568, 119569, 119570, 119571, 119572, 119573) c6( ) c7(q, r); #c1(SHROOM2) c2(XP_011543808) c3(protein Shroom2 isoform X2) c4( ) c5(342944, 342945, 342946, 342947, 342948, 342949, 342950, 342951, 342952, 342953, 342954, 342955, 342956, 342957, 342958) c6( ) c7(q, r); #c1(SHROOM3) c2(NP_065910) c3(protein Shroom3) c4(206176) c5(206177, 206178, 206179, 206180, 206181, 206182) c6( ) c7(cc, c, Y, akY, dy, j); #c1(SHROOM3) c2(XP_005263222) c3(protein Shroom3 isoform X6) c4( ) c5(278359, 278360, 278361, 278362, 278363, 278364, 278365) c6( ) c7(cc, c, Y, akY, dy, j); #c1(SHROOM3) c2(XP_011530462) c3(protein Shroom3 isoform X5) c4(326326, 326327) c5(326328, 326329, 326330, 326331, 326332, 326333) c6( ) c7(cc, c, Y, akY, dy, j); #c1(SHROOM4) c2(NP_065768) c3(protein Shroom4) c4(205289) c5(205290, 205291, 205292, 205293, 205294, 205295, 205296, 205297, 205298, 205299, 205300, 205301, 205302, 205303, 205304, 205305, 205306, 205307, 205308) c6( ) c7(nf, nA, cEb); #c1(SHROOM4) c2(XP_006724653) c3(protein Shroom4 isoform X2) c4(296177) c5( ) c6( ) c7(nf, nA, cEb); #c1(SI) c2(NP_001032) c3(sucrase-isomaltase, intestinal) c4(31510) c5( ) c6( ) c7(Wv, bL, T, bE, ev, ju, zR, cj, cEc, IG, aj, bB, ji, g, bq, g, J, WW); #c1(SIAE) c2(NP_001186851) c3(sialate O-acetylesterase isoform 2) c4( ) c5(78710, 78711, 78712, 78713, 78714) c6( ) c7(cEd, A, bK, y, bc); #c1(SIAE) c2(NP_733746) c3(sialate O-acetylesterase isoform 1 precursor) c4(246918, 246919) c5(246920, 246921, 246922, 246923, 246924, 246925, 246926) c6( ) c7(cEd, A, bK, y, be); #c1(SIAH1) c2(NP_001006611) c3(E3 ubiquitin-protein ligase SIAH1 isoform b) c4(22199, 22200, 22201) c5(22202, 22203, 22204, 22205, 22206, 22207, 22208, 22209, 22210, 22211, 22212, 22213, 22214, 22215, 22216) c6( ) c7(bF, T, aC, bE, aW, aA, aT, bB, GA, aF, K, an, B); #c1(SIAH1) c2(XP_011521581) c3(E3 ubiquitin-protein ligase SIAH1 isoform X1) c4( ) c5(316311, 316312, 316313, 316314, 316315, 316316, 316317, 316318, 316319, 316320, 316321, 316322, 316323, 316324, 316325, 316326, 316327, 316328, 316329, 316330, 316331, 316332, 316333, 316334, 316335, 316336, 316337, 316338, 316339, 316340, 316341, 316342, 316343, 316344, 316345, 316346, 316347, 316348, 316349, 316350, 316351, 316352, 316353, 316354, 316355, 316356, 316357, 316358, 316359, 316360, 316361, 316362, 316363, 316364, 316365, 316366, 316367, 316368, 316369, 316370, 316371, 316372, 316373, 316374, 316375, 316376, 316377, 316378, 316379, 316380, 316381, 316382, 316383, 316384, 316385, 316386, 316387, 316388, 316389, 316390, 316391, 316392, 316393, 316394, 316395, 316396, 316397, 316398, 316399, 316400, 316401, 316402, 316403, 316404) c6( ) c7(bF, T, aC, bE, aW, aA, aT, bB, GA, aF, K, an, B); #c1(SIAH2) c2(NP_005058) c3(E3 ubiquitin-protein ligase SIAH2) c4(152497) c5(152498, 152499, 152500, 152501, 152502, 152503, 152504) c6( ) c7(ck, ae, T, aW, Y, aw, aT, ZQ, Fb, AO, bz, B, ad); #c1(SIDT1) c2(NP_060169) c3(SID1 transmembrane family member 1 precursor) c4(194606) c5(194607, 194608, 194609, 194610, 194611, 194612) c6( ) c7(asp); #c1(SIGIRR) c2(NP_001128526) c3(single Ig IL-1-related receptor) c4(50166) c5(50167, 50168, 50169, 50170, 50171, 50172, 50173, 50174, 50175, 50176, 50177, 50178, 50179, 50180) c6( ) c7(le, bM, jx, aFr, ls, aDE); #c1(SIGIRR) c2(XP_005253101) c3(single Ig IL-1-related receptor isoform X1) c4(272160) c5(272161, 272162, 272163, 272164, 272165, 272166, 272167, 272168, 272169, 272170, 272171) c6( ) c7(le, bM, jx, aFr, ls, aDE); #c1(SIGLEC1) c2(XP_011527630) c3(sialoadhesin isoform X1) c4(322516, 322517) c5(322518, 322519, 322520, 322521, 322522, 322523, 322524, 322525) c6(322526, 322527) c7(bM, T, fR, ds, eZ, h, y, pb); #c1(SIGLEC1) c2(XP_011527631) c3(sialoadhesin isoform X2) c4(322528) c5(322529, 322530, 322531, 322532, 322533, 322534, 322535, 322536) c6(322537, 322538) c7(bM, T, fR, ds, eZ, h, y, pb); #c1(SIGLEC1) c2(XP_011527634) c3(sialoadhesin isoform X5) c4( ) c5(322539, 322540, 322541, 322542, 322543, 322544, 322545, 322546) c6(322547, 322548) c7(bM, T, fR, ds, eZ, h, y, pb); #c1(SIGLEC11) c2(NP_001128635) c3(sialic acid-binding Ig-like lectin 11 isoform 2 precursor) c4(50412, 50413, 50414) c5(50415, 50416, 50417, 50418, 50419, 50420, 50421, 50422, 50423, 50424, 50425) c6( ) c7(aPK); #c1(SIGLEC11) c2(NP_443116) c3(sialic acid-binding Ig-like lectin 11 isoform 1 precursor) c4(229506) c5(229507, 229508, 229509, 229510, 229511, 229512) c6( ) c7(aPK); #c1(SIGLEC11) c2(XP_005258533) c3(sialic acid-binding Ig-like lectin 11 isoform X1) c4( ) c5(275691, 275692, 275693, 275694, 275695, 275696) c6( ) c7(aPK); #c1(SIGLEC11) c2(XP_005258534) c3(sialic acid-binding Ig-like lectin 11 isoform X2) c4( ) c5(275697, 275698, 275699, 275700, 275701) c6( ) c7(aPK); #c1(SIGLEC14) c2(NP_001092082) c3(sialic acid-binding Ig-like lectin 14 precursor) c4(39296) c5(39297, 39298, 39299, 39300, 39301, 39302) c6( ) c7(cEe, jT, at); #c1(SIGLEC5) c2(NP_003821) c3(sialic acid-binding Ig-like lectin 5 precursor) c4(141159) c5(141160, 141161, 141162, 141163, 141164, 141165, 141166, 141167, 141168, 141169) c6( ) c7(jT, bt); #c1(SIGLEC7) c2(NP_001264130) c3(sialic acid-binding Ig-like lectin 7 isoform 3 precursor) c4( ) c5(97537, 97538, 97539, 97540, 97541, 97542) c6( ) c7(fR, bO, aA, bB, aj, OY, hF, eA, aR, amW, no, ec, aCJ, aql, dz, K, hS, zy, H, RG, WZ, jf, eG, LC, Y, Ls, aF, eE, cm, ck, c, iT, Fi, bt, it, L); #c1(SIGLEC7) c2(NP_055200) c3(sialic acid-binding Ig-like lectin 7 isoform 1 precursor) c4(179753) c5(179754, 179755, 179756, 179757, 179758, 179759) c6( ) c7(fR, bO, aA, bB, aj, OY, hF, eA, aR, amW, no, ec, aCJ, aql, dz, K, hS, zy, H, RG, WZ, jf, eG, LC, Y, Ls, aF, eE, cm, ck, c, iT, Fi, bt, it, L); #c1(SIGLEC7) c2(NP_057627) c3(sialic acid-binding Ig-like lectin 7 isoform 2 precursor) c4(191940, 191941) c5(191942, 191943, 191944, 191945, 191946, 191947) c6( ) c7(fR, bO, aA, bB, aj, OY, hF, eA, aR, amW, no, ec, aCJ, aql, dz, K, hS, zy, H, RG, WZ, jf, eG, LC, Y, Ls, aF, eE, cm, ck, c, iT, Fi, bt, it, L); #c1(SIGLEC8) c2(NP_055257) c3(sialic acid-binding Ig-like lectin 8 precursor) c4(180094) c5(180095, 180096, 180097, 180098, 180099, 180100) c6( ) c7(bM, akc); #c1(SIGLEC8) c2(XP_011525037) c3(sialic acid-binding Ig-like lectin 8 isoform X2) c4(319493, 319494) c5(319495, 319496, 319497, 319498, 319499, 319500, 319501, 319502, 319503, 319504, 319505, 319506) c6( ) c7(bM, akc); #c1(SIGLEC9) c2(NP_001185487) c3(sialic acid-binding Ig-like lectin 9 isoform 1 precursor) c4(75747) c5(75748, 75749, 75750, 75751, 75752, 75753) c6( ) c7(ck, C); #c1(SIGLEC9) c2(NP_055256) c3(sialic acid-binding Ig-like lectin 9 isoform 2 precursor) c4(180087) c5(180088, 180089, 180090, 180091, 180092, 180093) c6( ) c7(ck, C); #c1(SIGLEC9) c2(XP_011525034) c3(sialic acid-binding Ig-like lectin 9 isoform X4) c4(319489) c5(319490, 319491, 319492) c6( ) c7(ck, C); #c1(SIGMAR1) c2(NP_001269136) c3(sigma non-opioid intracellular receptor 1 isoform B) c4(100536) c5(100537, 100538, 100539, 100540, 100541, 100542, 100543, 100544, 100545, 100546, 100547) c6( ) c7(FW, ot, c, axR, WY, sO, aW, dJ, OI, U, aT, bO, jx, cu, Io, h, af, cEf, xt); #c1(SIGMAR1) c2(NP_005857) c3(sigma non-opioid intracellular receptor 1 isoform 1) c4(159974, 159975) c5(159976, 159977, 159978, 159979, 159980, 159981, 159982) c6( ) c7(FW, ot, c, axR, WY, sO, aW, dJ, OI, U, aT, bO, jx, cu, Io, h, af, cEf, xt); #c1(SIGMAR1) c2(NP_671513) c3(sigma non-opioid intracellular receptor 1 isoform 2) c4(242051) c5(242052, 242053, 242054, 242055, 242056, 242057) c6( ) c7(FW, ot, c, axR, WY, sO, aW, dJ, OI, U, aT, bO, jx, cu, Io, h, af, cEf, xt); #c1(SIK1) c2(NP_775490) c3(serine/threonine-protein kinase SIK1) c4(250084) c5(250085, 250086, 250087, 250088, 250089, 250090) c6( ) c7(T, aW, Y, mx, aT, cz, alJ, K, MC, eW); #c1(SIK2) c2(NP_056006) c3(serine/threonine-protein kinase SIK2) c4(185075) c5(185076, 185077, 185078, 185079, 185080, 185081) c6( ) c7(bL, fc, v, j, m, cP, t); #c1(SIK2) c2(XP_011541019) c3(serine/threonine-protein kinase SIK2 isoform X2) c4( ) c5(339558, 339559, 339560) c6( ) c7(bL, fc, v, j, m, cP, t); #c1(SIK3) c2(NP_001268678) c3(serine/threonine-protein kinase SIK3 isoform 3) c4(100126, 100127) c5(100128, 100129, 100130, 100131, 100132, 100133, 100134, 100135, 100136, 100137, 100138, 100139) c6( ) c7(aeP, t, T, m, be); #c1(SIK3) c2(NP_079440) c3(serine/threonine-protein kinase SIK3 isoform 1) c4(218151, 218152) c5(218153, 218154, 218155, 218156, 218157, 218158, 218159, 218160, 218161, 218162, 218163, 218164) c6( ) c7(aeP, t, T, m, be); #c1(SIK3) c2(XP_005271541) c3(serine/threonine-protein kinase SIK3 isoform X4) c4(283448, 283449) c5(283450, 283451, 283452, 283453, 283454, 283455, 283456, 283457, 283458, 283459, 283460, 283461) c6( ) c7(aeP, t, T, m, be); #c1(SIL1) c2(NP_071909) c3(nucleotide exchange factor SIL1 precursor) c4( ) c5(212231, 212232, 212233, 212234, 212235, 212236, 212237, 212238, 212239, 212240, 212241, 212242, 212243, 212244, 212245, 212246, 212247, 212248, 212249, 212250, 212251, 212252, 212253, 212254, 212255, 212256, 212257, 212258) c6( ) c7(Ng, alM, adr, rz, oj, aT, nA, IM, H, bt, ad, bN, L); #c1(SIL1) c2(XP_011541872) c3(nucleotide exchange factor SIL1 isoform X1) c4(340408, 340409, 340410, 340411, 340412) c5(340413, 340414, 340415, 340416, 340417, 340418) c6( ) c7(Ng, alM, adr, rz, oj, aT, nA, IM, H, bt, ad, bN, L); #c1(SIM1) c2(XP_005267157) c3(single-minded homolog 1 isoform X1) c4(280805) c5(280806, 280807, 280808, 280809, 280810, 280811, 280812, 280813, 280814, 280815, 280816) c6( ) c7(aC, VT, aT, dG, cbo, qM, bX, v, rc); #c1(SIM2) c2(NP_005060) c3(single-minded homolog 2 long isoform) c4(152505) c5(152506, 152507, 152508, 152509, 152510, 152511, 152512, 152513) c6( ) c7(G, T, bB, j, ci, nA, pz, eA, ad, Na, anj, aE, aT, ZW, ae, d, cH, aW, Az, bQ, f, EW, GU, dB, bE, kS, X); #c1(SIM2) c2(NP_033664) c3(single-minded homolog 2 short isoform) c4(172296) c5(172297, 172298, 172299, 172300, 172301, 172302) c6( ) c7(G, T, bB, j, ci, nA, pz, eA, ad, Na, anj, aE, aT, ZW, ae, d, cH, aW, Az, bQ, f, EW, GU, dB, bE, kS, X); #c1(SIN3A) c2(XP_006720530) c3(paired amphipathic helix protein Sin3a isoform X1) c4(293542) c5(293543, 293544, 293545, 293546, 293547, 293548, 293549, 293550, 293551, 293552, 293553, 293554, 293555, 293556, 293557) c6( ) c7(bxy, av, T, eM, aXK, aW, aT, vs, bz, iu); #c1(SIN3B) c2(NP_001284524) c3(paired amphipathic helix protein Sin3b isoform 2) c4(111965) c5(111966, 111967, 111968, 111969, 111970, 111971, 111972) c6( ) c7(T, d, aE, aT, kp, K); #c1(SIN3B) c2(NP_056075) c3(paired amphipathic helix protein Sin3b isoform 1) c4(185533) c5(185534, 185535, 185536, 185537, 185538, 185539) c6( ) c7(T, d, aE, aT, kp, K); #c1(SIPA1) c2(NP_694985) c3(signal-induced proliferation-associated protein 1) c4(245562, 245563, 245564) c5(245565, 245566, 245567, 245568, 245569, 245570, 245571, 245572, 245573, 245574, 245575, 245576, 245577, 245578, 245579, 245580, 245581, 245582, 245583, 245584, 245585, 245586, 245587) c6( ) c7(qw, T, aGC, iU, aW, Y, if, oW, aT, ajp, qN, bw, bz, br); #c1(SIPAIL2) c2(NP_065859) c3(signal-induced proliferation-associated 1-like protein 2) c4(205933) c5(205934, 205935, 205936, 205937, 205938, 205939, 205940, 205941, 205942, 205943) c6( ) c7(bM, c); #c1(SIPAIL2) c2(XP_011542547) c3(signal-induced proliferation-associated 1-like protein 2 isoform X2) c4(341089) c5(341090, 341091, 341092, 341093, 341094, 341095) c6( ) c7(bM, c); #c1(SIPAIL3) c2(NP_055888) c3(signal-induced proliferation-associated 1-like protein 3) c4(184203) c5(184204, 184205, 184206, 184207, 184208, 184209) c6( ) c7(cd); #c1(SIPAIL3) c2(XP_011524961) c3(signal-induced proliferation-associated 1-like protein 3 isoform X3) c4( ) c5(319460) c6( ) c7(cd); #c1(SIRPA) c2(NP_542970) c3(tyrosine-protein phosphatase non-receptor type substrate 1 precursor) c4(233121) c5(233122, 233123, 233124, 233125, 233126, 233127, 233128, 233129, 233130, 233131) c6( ) c7(T, yS, aw, cEg, n, bS, et, Ea, ci, pz, aHj, aT, K, d, ND, xR, aW, S, as, Z, yR, dB, m, afW, bt); #c1(SIRPA) c2(XP_011527474) c3(tyrosine-protein phosphatase non-receptor type substrate 1 isoform X1) c4(322230) c5(322231, 322232, 322233, 322234, 322235, 322236) c6( ) c7(T, yS, aw, cEg, n, bS, et, Ea, ci, pz, aHj, aT, K, d, ND, xR, aW, S, as, Z, yR, dB, m, afW, bt); #c1(SIRPB1) c2(NP_001077379) c3(signal-regulatory protein beta-1 isoform 2 precursor) c4(37802) c5(37803, 37804, 37805, 37806, 37807, 37808) c6( ) c7(iW, zv); #c1(SIRPB1) c2(XP_005260701) c3(signal-regulatory protein beta-1 isoform X7) c4(276817) c5(276818, 276819, 276820, 276821, 276822, 276823) c6( ) c7(iW, zv); #c1(SIRPB1) c2(XP_011527433) c3(signal-regulatory protein beta-1 isoform X1) c4(322157, 322158) c5(322159, 322160, 322161, 322162, 322163, 322164) c6( ) c7(iW, zv); #c1(SIRPB1) c2(XP_011527435) c3(signal-regulatory protein beta-1 isoform X1) c4(322165) c5(322166. 322167, 322168, 322169, 322170, 322171) c6( ) c7(iW, zv); #c1(SIRPB1) c2(XP_011527436) c3(signal-regulatory protein beta-1 isoform X2) c4(322172) c5(322173, 322174, 322175, 322176, 322177, 322178) c6( ) c7(iW, zv); #c1(SIRPB1) c2(XP_011527437) c3(signal-regulatory protein beta-1 isoform X3) c4( ) c5(322179, 322180, 322181, 322182, 322183, 322184) c6( ) c7(iW, zv); #c1(SIRPG) c2(NP_001034597) c3(signal-regulatory protein gamma isoform 3 precursor) c4(31900) c5(31901, 31902, 31903, 31904, 31905, 31906, 31907, 31908, 31909, 31910) c6( ) c7(vH, A, aw, eZ, ND); #c1(SIRPG) c2(NP_061026) c3(signal-regulatory protein gamma isoform 1 precursor) c4(199035) c5(199036, 199037, 199038, 199039, 199040, 199041, 199042) c6( ) c7(vH, A, aw, eZ, ND); #c1(SIRPG) c2(NP_543006) c3(signal-regulatory protein gamma isoform 2 precursor) c4(233215) c5(233216, 233217, 233218, 233219, 233220, 233221) c6( ) c7(vH, A, aw, eZ, ND); #c1(SIRPG) c2(XP_011527588) c3(signal-regulatory protein gamma isoform X1) c4(322455) c5(322456, 322457, 322458, 322459, 322460) c6( ) c7(vH, A, aw, eZ, ND); #c1(SIRT1) c2(NP_001135970) c3(NAD-dependent protein deacetylase sirtuin-1 isoform b) c4( ) c5(53774, 53775, 53776, 53777, 53778, 53779, 53780, 53781, 53782, 53783, 53784, 53785, 53786, 53787, 53788, 53789, 53790, 53791, 53792, 53793, 53794, 53795, 53796, 53797, 53798, 53799, 53800, 53801, 53802, 53803, 53804, 53805, 53806, 53807, 53808, 53809, 53810, 53811, 53812, 53813, 53814, 53815, 53816, 53817, 53818, 53819, 53820, 53821, 53822, 53823, 53824, 53825, 53826, 53827, 53828, 53829, 53830, 53831, 53832, 53833, 53834, 53835, 53836, 53837, 53838, 53839, 53840, 53841, 53842, 53843, 53844, 53845, 53846, 53847, 53848, 53849, 53850, 53851, 53852, 53853, 53854, 53855, 53856, 53857, 53858, 53859, 53860, 53861, 53862, 53863, 53864, 53865, 53866, 53867, 53868) c6(53869, 53870, 53871) c7(oO, T, cEi, aoq, ea, e, bO, fd, bB, ci, mF, GK, xE, aE, Bc, K, qM, hH, bYL, aa, DA, aW, fc, hl, CT, Ku, g, cm, axp, cEj, eM, nB, U, vy, uJ, Hb, m, aNn, cZ, dD, OI, aWG, aw, aj, qW, cd, cc, rC, kH, h, jy, eV, bta, dd, A, bux, adF, aq, kp, hq, cA, dB, Qu, ajn, at, E, fL, WL, B, adG, vQ, bL, fM, eX, aA, cR, tc, v, j, C, V, q, J, eA, eJ, MR, adC, aT, cy, dz, bK, bq, ae, af, bA, jf, s, iU, oV, Y, r, en, bSy, t, kC, iK, ck, rR, wg, iM, c, mf, dy, Da, fD, bt, LS, wi, iW, ha, dG, Zh, eq, mC, ad, hX, fU, av, hd, sO, ji, atr, je, IR, qt, ff, cr, eZ, dq, aF, iV, iR, bz, Ek, eK, bE, gZ, apv, cEh, aS, cP, ei, IC, iu, y); #c1(SIRT1) c2(NP_036370) c3(NAD-dependent protein deacetylase sirtuin-1 isoform a) c4(173305, 173306) c5(173307, 173308, 173309, 173310, 173311, 173312, 173313, 173314, 173315) c6( ) c7(oO, T, cEi, aoq, ea, e, bO, fd, bB, ci, mF, GK, xE, aE, Be, K, qM, hH, bYL, aa, DA, aW, fc, hl, CT, Ku, g, cm, axp, cEj, eM, nB, U, vy, uJ, Hb, m, aNn, cZ, dD, OI, aWG, aw, aj, qW, cd, cc, rC, kH, h, jy, eV, bta, dd, A, bux, adF, aq, kp, hq, cA, dB, Qu, ajn, at, E, fL, WL, B, adG, vQ, bL, fM, eX, aA, cR, tc, v, j, C, V, q, J, eA, eJ, MR, adC, aT, cy, dz, bK, bq, ae, af, bA, jf, s, iU, oV, Y, r, en, bSy, t, kC, iK, ck, rR, wg, iM, c, mf, dy, Da, fD, bt, LS, wi, iW, ha, dG, Zh, eq, mC, ad, hX, fU, av, hd, sO, ji, atr, je, IR, qt, ff, cr, eZ, dq, aF, iV, iR, bz, Ek, eK, bE, gZ, apv, cEh, aS, cP, ei, IC, iu, y); #c1(SIRT1) c2(XP_011537863) c3(NAD-dependent protein deacetylase sirtuin-1 isoform X2) c4(335374) c5(335375) c6( ) c7(oO, T, cEi, aoq, ea, e, bO, fd, bB, ci, mF, GK, xE, aE, Be, K, qM, hH, bYL, aa, DA, aW, fc, hl, CT, Ku, g, cm, axp, cEj, eM, nB, U, vy, uJ, Hb, m, aNn, cZ, dD, OI, aWG, aw, aj, qW, cd, cc, rC, kH, h, jy, eV, bta, dd, A, bux, adF, aq, kp, hq, cA, dB, Qu, ajn, at, E, fL, WL, B, adG, vQ, bL, fM, eX, aA, cR, tc, v, j, C, V, g, J, eA, eJ, MR, adC, aT, cy, dz, bK, bq, ae, af, bA, jf, s, iU, oV, Y, r, en, bSy, t, kC, iK, ck, rR, wg, iM, c, mf, dy, Da, fD, bt, LS, wi, iW, ha, dG, Zh, eq, mC, ad, hX, fU, av, hd, sO, ji, atr, je, IR, qt, ff, cr, eZ, dq, aF, iV, iR, bz, Ek, eK, bE, gZ, apv, cEh, aS, cP, ei, IC, iu, y); #c1(SIRT2) c2(NP_001180215) c3(NAD-dependent protein deacetylase sirtuin-2 isoform 3) c4( ) c5(73442, 73443, 73444, 73445, 73446, 73447, 73448, 73449, 73450, 73451, 73452, 73453, 73454, 73455, 73456, 73457, 73458, 73459, 73460, 73461, 73462, 73463, 73464, 73465) c6( ) c7(oO, bL, T, kh, bM, bzx, wj, yk, eX, NT, aA, GC, n, aj, bS, v, ct, fd, q, J, ad, eA, aE, MR, Do, hW, aT, hD, eV, K, pj, hB, an, ae, be, uQ, A, mR, aW, cr, r, eZ, aF, hp, app, eS, iV, Z, t, pb, ck, es, rR, YE, c, cA, eM, atM, U, bt, at, cX, m, gT, aed, Pr, B, y); #c1(SIRT2) c2(NP_036369) c3(NAD-dependent protein deacetylase sirtuin-2 isoform 1) c4(173286, 173287, 173288, 173289, 173290, 173291, 173292) c5(173293, 173294, 173295, 173296, 173297, 173298, 173299, 173300, 173301, 173302, 173303, 173304) c6( ) c7(oO, bL, T, kh, bM, bzx, wj, yk, eX, NT, aA, GC, n, aj, bS, v, et, fd, q, J, ad, eA, aE, MR, Do, hW, aT, hD, eV, K, pj, hB, an, ae, be, uQ, A, mR, aW, cr, r, eZ, aF, hp, app, eS, iV, Z, t, pb, ck, es, rR, YE, c, cA, eM, atM, U, bt, at, cX, m, gT, aed, Pr, B, y); #c1(SIRT2) c2(XP_011524956) c3(NAD-dependent protein deacetylase sirtuin-2 isoform X1) c4( ) c5(319440, 319441, 319442, 319443, 319444, 319445) c6( ) c7(oO, bL, T, kh, bM, bzx, wj, yk, eX, NT, aA, GC, n, aj, bS, v, et, fd, q, J, ad, eA, aE, MR, Do, hW, aT, hD, eV, K, pj, hB, an, ae, be, uQ, A, mR, aW, cr, r, eZ, aF, hp, app, eS, iV, Z, t, pb, ck, es, rR, YE, c, cA, eM, atM, U, bt, at, cX, m, gT, aed, Pr, B, y); #c1(SIRT2) c2(XP_011524958) c3(NAD-dependent protein deacetylase sirtuin-2 isoform X3) c4(319446, 319447) c5(319448, 319449, 319450, 319451, 319452, 319453, 319454, 319455, 319456, 319457, 319458, 319459) c6( ) c7(oO, bL, T, kh, bM, bzx, wj, yk, eX, NT, aA, GC, n, aj, bS, v, et, fd, g, J, ad, eA, aE, MR, Do, hW, aT, hD, eV, K, pj, hB, an, ae, be, uQ, A, mR, aW, cr, r, eZ, aF, hp, app, eS, iV, Z, t, pb, ck, es, rR, YE, c, cA, eM, atM, U, bt, at, cX, m, gT, aed, Pr, B, y); #c1(SIRT3) c2(NP_001017524) c3(NAD-dependent protein deacetylase sirtuin-3, mitochondrial isoform b) c4( ) c5(26559, 26560, 26561, 26562, 26563) c6( ) c7(bL, T, aw, n, hy, v, cd, aT, K, af, B, BN, aW, ff, fc, Mz, dq, en, np, dy, cP, ei, fy, ne); #c1(SIRT3) c2(NP_036371) c3(NAD-dependent protein deacetylase sirtuin-3, mitochondrial isoform a) c4(173316, 173317, 173318) c5(173319, 173320, 173321, 173322, 173323, 173324, 173325, 173326, 173327, 173328, 173329, 173330, 173331) c6( ) c7(bL, T, aw, n, hy, v, cd, aT, K, af, B, BN, aW, ff, fc, Mz, dq, en, np, dy, cP, ei, fy, ne); #c1(SIRT4) c2(NP_036372) c3(NAD-dependent protein deacetylase sirtuin-4) c4(173332) c5(173333, 173334, 173335, 173336, 173337, 173338) c6( ) c7(bL, pk, T, fM); #c1(SIRT5) c2(NP_001180196) c3(NAD-dependent protein deacylase sirtuin-5, mitochondrial isoform 3) c4(73342) c5(73343, 73344, 73345, 73346, 73347, 73348) c6( ) c7(he, iH, aR, c); #c1(SIRT5) c2(NP_001229756) c3(NAD-dependent protein deacylase sirtuin-5, mitochondrial isoform 4) c4( ) c5(85148, 85149, 85150, 85151, 85152) c6( ) c7(he, iH, aR, c); #c1(SIRT5) c2(NP_112534) c3(NAD-dependent protein deacylase sirtuin-5, mitochondrial isoform 2) c4(221330) c5(221331, 221332, 221333, 221334, 221335, 221336) c6( ) c7(he, iH, aR, c); #c1(SIRT5) c2(XP_005249025) c3(NAD-dependent protein deacylase sirtuin-5, mitochondrial isoform X1) c4(268864, 268865) c5(268866, 268867, 268868, 268869, 268870, 268871) c6( ) c7(he, iH, aR, c); #c1(SIRT5) c2(XP_011512746) c3(NAD-dependent protein deacylase sirtuin-5, mitochondrial isoform X4) c4( ) c5(303769) c6( ) c7(he, iH, aR, c); #c1(SIRT6) c2(NP_001180214) c3(NAD-dependent protein deacetylase sirtuin-6 isoform 2) c4(73430) c5(73431, 73432, 73433, 73434, 73435, 73436, 73437, 73438, 73439) c6(73440, 73441) c7(ai, T, wr, xE, MR, bE, aW, yk, IH, CM, fc, aT, bB, aq, at, v, vs, adg, y, bz, B); #c1(SIRT6) c2(NP_057623) c3(NAD-dependent protein deacetylase sirtuin-6 isoform 1) c4(191825) c5(191826, 191827, 191828, 191829, 191830, 191831, 191832, 191833, 191834, 191835, 191836, 191837, 191838, 191839, 191840, 191841, 191842, 191843, 191844, 191845, 191846, 191847, 191848, 191849, 191850, 191851, 191852, 191853, 191854, 191855, 191856, 191857, 191858, 191859, 191860, 191861, 191862, 191863, 191864, 191865, 191866, 191867, 191868, 191869, 191870, 191871, 191872, 191873, 191874, 191875, 191876, 191877, 191878, 191879, 191880, 191881, 191882, 191883, 191884, 191885, 191886, 191887, 191888, 191889, 191890, 191891, 191892, 191893, 191894, 191895, 191896, 191897, 191898, 191899, 191900, 191901, 191902, 191903, 191904, 191905, 191906, 191907, 191908, 191909, 191910, 191911, 191912, 191913, 191914, 191915, 191916, 191917, 191918, 191919, 191920, 191921, 191922) c6(191923, 191924, 191925) c7(ai, T, wr, xE, MR, bE, aW, yk, IH, CM, fc, aT, bB, aq, at, v, vs, adg, y, bz, B); #c1(SIRT6) c2(XP_005259632) c3(NAD-dependent protein deacetylase sirtuin-6 isoform X2) c4(276208) c5(276209, 276210, 276211, 276212, 276213, 276214, 276215, 276216) c6(276217, 276218) c7(ai, T, wr, xE, MR, bE, aW, yk, IH, CM, fc, aT, bB, aq, at, v, vs, adg, y, bz, 8); #c1(SIRT7) c2(NP_057622) c3(NAD-dependent protein deacetylase sirtuin-7) c4(191811, 191812) c5(191813, 191814, 191815, 191816, 191817, 191818, 191819, 191820, 191821, 191822, 191823, 191824) c6( ) c7(ck, T, iR, aW, fc, jh, aT, r, aq, dL, ci, K, q, ei, eL, B); #c1(SIT1) c2(NP_055265) c3(signaling threshold-regulating transmembrane adapter 1 precursor) c4(180147) c5(180148, 180149, 180150, 180151, 180152, 180153) c6( ) c7(h, sO, BE, af, C); #c1(SIVA1) c2(NP_006418) c3(apoptosis regulatory protein Siva isoform 1) c4(164867) c5(164868, 164869, 164870, 164871, 164872, 164873) c6( ) c7(bB, aW, aDX, aT); #c1(SIVA1) c2(NP_068355) c3(apoptosis regulatory protein Siva isoform 2) c4(209325) c5(209326, 209327, 209328, 209329, 209330, 209331) c6( ) c7(bB, aW, aDX, aT); #c1(SIX1) c2(NP_005973) c3(homeobox protein SIX1) c4(160898) c5(160899, 160900, 160901, 160902, 160903, 160904, 160905) c6( ) c7(HQ, T, dA, Dh, sw, if, RX, uO, ajp, ci, qN, q, er, eA, cEk, bv, iu, yQ, aE, bOL, aT, bpf, aMi, cEI, dH, aW, eH, Az, r, g, eF, t, pZ, eM, auZ, np, m, Bh, B); #c1(SIX2) c2(NP_058628) c3(homeobox protein SIX2) c4(192849) c5(192850, 192851, 192852, 192853, 192854, 192855, 192856) c6( ) c7(es, aW, TR, aJL, aT, dy, ci, j, PJ, fr, er); #c1(SIX3) c2(NP_005404) c3(homeobox protein SIX3) c4(155765) c5(155766, 155767, 155768, 155769, 155770, 155771, 155772) c6( ) c7(aNA, kh, kj, bHF, iE, bPt, aJ, ZW, FB, acz, aq, bd, q, bz, iu); #c1(SIX4) c2(NP_059116) c3(homeobox protein SIX4) c4(193120) c5(193121, 193122, 193123, 193124, 193125, 193126, 193127) c6( ) c7(aCQ); #c1(SIX5) c2(NP_787071) c3(homeobox protein SIX5) c4(252061) c5(252062, 252063, 252064, 252065, 252066, 252067, 252068) c6( ) c7(t, ac, yQ, cEm, dR); #c1(SIX6) c2(NP_031400) c3(homeobox protein SIX6) c4(172259) c5(172260, 172261, 172262, 172263, 172264, 172265, 172266) c6( ) c7(cEo, kn, cZ, x, bDf, kj, pZ, dH, cEn, Be, hn, k, dd, dw, agE); #c1(SKA1) c2(NP_001034624) c3(spindle and kinetochore-associated protein 1) c4(31918, 31919) c5(31920, 31921, 31922, 31923, 31924, 31925, 31926, 31927, 31928, 31929, 31930, 31931, 31932, 31933, 31934, 31935, 31936, 31937, 31938) c6( ) c7(bM, AB); #c1(SKA2) c2(NP_001094065) c3(spindle and kinetochore-associated protein 2 isoform 2) c4(40603) c5(40604, 40605, 40606, 40607, 40608, 40609) c6( ) c7(aW, ft, aT); #c1(SKA2) c2(NP_872426) c3(spindle and kinetochore-associated protein 2 isoform 1) c4(256330, 256331) c5(256332, 256333, 256334, 256335, 256336, 256337, 256338, 256339, 256340, 256341, 256342, 256343) c6( ) c7(aW, ft, aT); #c1(SKAP1) c2(NP_003717) c3(src kinase-associated phosphoprotein 1 isoform 1) c4(140383) c5(140384, 140385, 140386, 140387, 140388, 140389) c6( ) c7(t, m, zn); #c1(SKAP2) c2(NP_001290397) c3(src kinase-associated phosphoprotein 2 isoform 2) c4( ) c5(115340, 115341, 115342, 115343, 115344) c6( ) c7(A, iH, dA, dm, akH, bdp, kp, g); #c1(SKAP2) c2(NP_003921) c3(src kinase-associated phosphoprotein 2 isoform 1) c4(142161, 142162, 142163, 142164) c5(142165, 142166, 142167, 142168, 142169, 142170, 142171, 142172, 142173, 142174, 142175, 142176, 142177, 142178, 142179, 142180, 142181, 142182, 142183) c6( ) c7(A, iH, dA, dm, akH, bdp, kp, g); #c1(SKIL) c2(NP_001138569) c3(ski-like protein isoform 2) c4(57004) c5(57005, 57006, 57007, 57008, 57009, 57010, 57011, 57012, 57013, 57014, 57015, 57016) c6( ) c7(T, s, eM, Y, fG, cEp, ff, LZ, fQ, n, ci, IQ, en, Pk, ad); #c1(SKIL) c2(NP_001234937) c3(ski-like protein isoform 1) c4(87860, 87861, 87862) c5(87863, 87864, 87865, 87866, 87867, 87868, 87869, 87870, 87871, 87872, 87873, 87874, 87875, 87876, 87877, 87878) c6( ) c7(T, s, eM, Y, fG, cEp, ff, LZ, fQ, n, ci, IQ, en, Pk, ad); #c1(SKIV2L) c2(NP_008860) c3(helicase SKI2W) c4(169164, 169165, 169166, 169167, 169168, 169169, 169170, 169171) c5(169172, 169173, 169174, 169175, 169176, 169177, 169178, 169179, 169180, 169181, 169182, 169183, 169184, 169185, 169186, 169187, 169188, 169189, 169190, 169191, 169192, 169193, 169194, 169195, 169196, 169197, 169198, 169199, 169200, 169201, 169202, 169203, 169204, 169205, 169206, 169207, 169208, 169209, 169210, 169211, 169212, 169213, 169214, 169215, 169216, 169217, 169218, 169219, 169220, 169221, 169222, 169223, 169224, 169225, 169226, 169227, 169228, 169229, 169230, 169231, 169232, 169233, 169234, 169235, 169236, 169237, 169238, 169239, 169240, 169241, 169242, 169243, 169244, 169245, 169246, 169247, 169248, 169249, 169250, 169251, 169252, 169253, 169254, 169255, 169256, 169257, 169258, 169259, 169260, 169261, 169262, 169263, 169264, 169265, 169266) c6( ) c7(dD, W, nb, Zz, od, ea, If, eZ, cm, ah, eq, aak, acd, aYD, Um, cEq); #c1(SKIV2L) c2(XP_006715231) c3(helicase SKI2W isoform X1) c4( ) c5(288849, 288850, 288851, 288852, 288853, 288854, 288855, 288856, 288857, 288858, 288859, 288860, 288861, 288862, 288863, 288864, 288865, 288866, 288867) c6( ) c7(dD, W, nb, Zz, od, ea, If, eZ, cm, ah, eq, aak, acd, aYD, Um, cEq); #c1(SKIV2L2) c2(NP_056175) c3(superkiller viralicidic activity 2-like 2) c4(186137, 186138) c5(186139, 186140, 186141, 186142, 186143, 186144, 186145, 186146, 186147, 186148, 186149, 186150) c6( ) c7(y); #c1(SKOR1) c2(NP_001244953) c3(SKI family transcriptional corepressor 1) c4(92429) c5(92430, 92431, 92432, 92433, 92434, 92435) c6( ) c7(cF, eR, yL, yY, IR, pj, aGK, aY, pb, awm); #c1(SKOR1) c2(XP_011519850) c3(SKI family transcriptional corepressor 1 isoform X1) c4(314577, 314578) c5(314579, 314580, 314581, 314582, 314583, 314584, 314585, 314586, 314587, 314588, 314589, 314590) c6( ) c7(cF, eR, yL, yY, IR, pj, aGK, aY, pb, awm); #c1(SKOR2) c2(NP_001032891) c3(SKI family transcriptional copreressor 2 isoform 2) c4(31483) c5(31484, 31485, 31486, 31487, 31488, 31489, 31490) c6( ) c7(iK, v); #c1(SKOR2) c2(NP_001264992) c3(SKI family transcriptional copreressor 2 isoform 1) c4(97668) c5(97669, 97670, 97671, 97672, 97673, 97674, 97675) c6( ) c7(iK, v); #c1(SKP1) c2(NP_008861) c3(S-phase kinase-associated protein 1 isoform a) c4(169267, 169268, 169269) c5(169270, 169271, 169272, 169273, 169274, 169275, 169276, 169277, 169278, 169279, 169280, 169281, 169282, 169283, 169284, 169285, 169286, 169287, 169288, 169289, 169290, 169291, 169292, 169293) c6( ) c7(Kv, cm, an, h, afs); #c1(SKP1) c2(NP_733779) c3(S-phase kinase-associated protein 1 isoform b) c4(247059, 247060) c5(247061, 247062, 247063, 247064, 247065, 247066, 247067, 247068, 247069, 247070, 247071, 247072, 247073, 247074) c6( ) c7(Kv, cm, an, h, afs); #c1(SKP2) c2(NP_001230049) c3(S-phase kinase-associated protein 2 isoform 3) c4(85846) c5(85847, 85848, 85849, 85850, 85851) c6( ) c7(T, dD, ea, jh, aA, bB, fd, eq, ci, fr, atp, q, ad, hX, dP, av, ft, hw, aE, il, qK, aT, dL, K, zy, pk, ae, eL, cp, jf, d, s, iU, qt, aW, Y, ff, r, nY, aq, kp, aF, yq, en, g, ir, t, zZ, bz, cm, aJg, ck, RV, bP, eM, nB, bE, aJh, iT, hL, hR, dy, m, bt, it, B); #c1(SKP2) c2(NP_005974) c3(S-phase kinase-associated protein 2 isoform 1) c4(160906, 160907) c5(160908, 160909, 160910, 160911, 160912, 160913, 160914, 160915, 160916, 160917, 160918, 160919, 160920, 160921, 160922) c6( ) c7(T, dD, ea, jh, aA, bB, fd, eq, ci, fr, atp, q, ad, hX, dP, av, ft, hw, aE, il, qK, aT, dL, K, zy, pk, ae, eL, cp, jf, d, s, iU, qt, aW, Y, ff, r, nY, aq, kp, aF, yq, en, g, ir, t, zZ, bz, cm, aJg, ck, RV, bP, eM, nB, bE, aJh, iT, hL, hR, dy, m, bt, it, B); #c1(SKP2) c2(NP_116026) c3(S-phase kinase-associated protein 2 isoform 2) c4(225251) c5(225252, 225253, 225254, 225255, 225256, 225257, 225258) c6( ) c7(T, dD, ea, jh, aA, bB, fd, eq, ci, fr, atp, q, ad, hX, dP, av, ft, hw, aE, il, qK, aT, dL, K, zy, pk, ae, eL, cp, jf, d, s, iU, qt, aW, Y, ff, r, nY, aq, kp, aF, yq, en, g, ir, t, zZ, bz, cm, aJg, ck, RV, bP, eM, nB, bE, aJh, iT, hL, hR, dy, m, bt, it, B); #c1(SLA) c2(NP_001039021) c3(src-like-adapter isoform a) c4(34182, 34183) c5(34184, 34185, 34186, 34187, 34188, 34189, 34190, 34191, 34192, 34193) c6( ) c7(x, qp, qj, k); #c1(SLA) c2(NP_001039022) c3(src-like-adapter isoform b) c4(34194, 34195, 34196, 34137, 34198) c5(34199, 34200, 34201, 34202, 34203, 34204, 34205, 34206) c6( ) c7(x, qp, qj, k); #c1(SLA) c2(NP_001269893) c3(src-like-adapter isoform d) c4( ) c5(103089, 103090, 103091, 103092, 103093, 103094, 103095, 103096, 103097, 103098, 103099, 103100, 103101, 103102, 103103, 103104, 103105, 103106, 103107) c6( ) c7(x, qp, qj, k); #c1(SLA) c2(NP_006739) c3(src-like-adapter isoform c) c4(167614) c5(167615, 167616, 167617, 167618, 167619, 167620, 167621, 167622, 167623, 167624, 167625) c6( ) c7(x, qp, qj, k); #c1(SLA2) c2(NP_115590) c3(src-like-adapter 2 isoform a) c4(223304) c5(223305, 223306, 223307, 223308, 223309, 223310) c6( ) c7(aS); #c1(SLA2) c2(NP_778252) c3(src-like-adapter 2 isoform b) c4(251516) c5(251517, 251518, 251519, 251520, 251521, 251522) c6( ) c7(aS); #c1(SLAIN2) c2(NP_065897) c3(SLAIN motif-containing protein 2) c4(206129) c5(206130, 206131, 206132, 206133, 206134, 206135) c6( ) c7(h); #c1(SLAIN2) c2(XP_005248178) c3(SLAIN motif-containing protein 2 isoform X1) c4( ) c5(268271) c6( ) c7(h); #c1(SLAMF1) c2(NP_003028) c3(signaling lymphocytic activation molecule precursor) c4(134538, 134539, 134540) c5(134541, 134542, 134543, 134544, 134545, 134546, 134547, 134548, 134549, 134550, 134551, 134552, 134553, 134554, 134555, 134556, 134557, 134558) c6( ) c7(bL, fR, axd, jh, fd, mC, aR, aGW, AW, tT, h, dL, afu, eZ, Io, CQ, kk, hc, cj, at, aEG, fL, y, Ze, abh); #c1(SLAMF1) c2(XP_005245513) c3(signaling lymphocytic activation molecule isoform X1) c4(266676, 266677) c5(266678, 266679, 266680, 266681, 266682, 266683) c6( ) c7(bL, fR, axd, jh, fd, mC, aR, aGW, AW, tT, h, dL, afu, eZ, Io, CQ, kk, hc, cj, at, aEG, fL, y, Ze, abh); #c1(SLAMF1) c2(XP_005245514) c3(signaling lymphocytic activation molecule isoform X2) c4( ) c5(266684, 266685, 266686, 266687, 266688, 266689) c6( ) c7(bL, fR, axd, jh, fd, mC, aR, aGW, AW, tT, h, dL, afu, eZ, IO, CQ, kk, he, cj, at, aEG, fL, y, Ze, abh); #c1(SLAMF6) c2(NP_001171643) c3(SLAM family member 6 isoform 1 precursor) c4(71093) c5(71094, 71095, 71096, 71097, 71098, 71099) c6( ) c7(akJ, eZ, fd, hD, h, fL, mC); #c1(SLAMF6) c2(NP_001171645) c3(SLAM family member 6 isoform 4 precursor) c4(71100) c5(71101, 71102, 71103, 71104, 71105, 71106) c6( ) c7(akJ, eZ, fd, hD, h, fL, mC); #c1(SLAMF6) c2(NP_443163) c3(SLAM family member 6 isoform 2 precursor) c4(229684) c5(229685, 229686, 229687, 229688, 229689, 229690) c6( ) c7(akJ, eZ, fd, hD, h, fL, mC); #c1(SLAMF7) c2(NP_001269517) c3(SLAM family member 7 isoform b precursor) c4(101763) c5(101764, 101765, 101766, 101767, 101768, 101769) c6( ) c7(ba, aSP, bg, eZ, fd, uz, Tz); #c1(SLAMF7) c2(NP_001269518) c3(SLAM family member 7 isoform c precursor) c4(101770) c5(101771, 101772, 101773, 101774, 101775, 101776) c6( ) c7(ba, aSP, bg, eZ, fd, uz, Tz); #c1(SLAMF7) c2(NP_001269519) c3(SLAM family member 7 isoform d) c4(101777) c5(101778, 101779, 101780, 101781, 101782, 101783) c6( ) c7(ba, aSP, bg, eZ, fd, uz, Tz); #c1(SLAMF7) c2(NP_001269520) c3(SLAM family member 7 isoform e) c4(101784) c5(101785, 101786, 101787, 101788, 101789, 101790) c6( ) c7(ba, aSP, bg, eZ, fd, uz, Tz); #c1(SLAMF7) c2(NP_001269521) c3(SLAM family member 7 isoform f precursor) c4(101791) c5(101792, 101793, 101794, 101795, 101796, 101797) c6( ) c7(ba, aSP, bg, eZ, fd, uz, Tz); #c1(SLAMF7) c2(NP_001269522) c3(SLAM family member 7 isoform g) c4(101798) c5(101799, 101800, 101801, 101802, 101803, 101804) c6( ) c7(ba, aSP, bg, eZ, fd, uz, Tz); #c1(SLAMF7) c2(NP_067004) c3(SLAM family member 7 isoform a precursor) c4(208256) c5(208257, 208258, 208259, 208260, 208261, 208262) c6( ) c7(ba, aSP, bg, eZ, fd, uz, Tz); #c1(SLAMF8) c2(NP_064510) c3(SLAM family member 8 precursor) c4(202705) c5(202706, 202707, 202708, 202709, 202710, 202711, 202712, 202713, 202714, 202715, 202716) c6( ) c7(ey, lx); #c1(SLAMF8) c2(XP_011508081) c3(SLAM family member 8 isoform X6) c4(298574) c5( ) c6( ) c7(ey, lx); #c1(SLAMF8) c2(XP_011508082) c3(SLAM family member 8 isoform X7) c4( ) c5(298575) c6( ) c7(ey, lx); #c1(SLBP) c2(NP_006518) c3(histone RNA hairpin-binding protein) c4(165947) c5(165948, 165949, 165950, 165951, 165952, 165953) c6( ) c7(T, di, dc, dJ, ey, ad); #c1(SLC10A1) c2(NP_003040) c3(sodium/bile acid cotransporter) c4(134627) c5(134628, 134629, 134630, 134631, 134632, 134633) c6( ) c7(F, vj, hJ, al, bbT, fQ, aq, Io, wC, dQ, B, EB, be, hX); #c1(SLC10A2) c2(NP_000443) c3(ileal sodium/bile acid cotransporter) c4(9050) c5(9051, 9052, 9053, 9054, 9055, 9056) c6( ) c7(aC, Ht, pf, oe, qd, al, bB, Wb, aj, bX, jw, cd, q, aR, ad, I, u, pN, ju, RE, wC, cH, r, hJ, fq, cEr, bE, wz, IB); #c1(SLC10A6) c2(NP_932069) c3(solute carrier family 10 member 6) c4(258786) c5(258787, 258788, 258789, 258790, 258791, 258792) c6( ) c7(ND); #c1(SLC10A7) c2(NP_001025169) c3(sodium/bile acid cotransporter 7 isoform b) c4(29383) c5(29384, 29385, 29386, 29387, 29388, 29389, 29390) c6( ) c7(UF); #c1(SLC10A7) c2(NP_001287771) c3(sodium/bile acid cotransporter 7 isoform d) c4(112837) c5(112838, 112839, 112840, 112841, 112842, 112843, 112844, 112845, 112846, 112847) c6( ) c7(UF); #c1(SLC10A7) c2(NP_115504) c3(sodium/bile acid cotransporter 7 isoform c) c4(222962) c5(222963, 222964, 222965, 222966, 222967, 222968) c6( ) c7(UF); #c1(SLC11A1) c2(NP_000569) c3(natural resistance-associated macrophage protein 1) c4(12782, 12783) c5(12784, 12785, 12786, 12787, 12788, 12789, 12790, 12791, 12792, 12793, 12794) c6( ) c7(bL, bM, T, ajy, dD, Ik, fR, cEs, bcb, if, ht, al, jx, aA, CH, n, cL, aj, eq, qN, V, zo, o, J, LH, ai, aMB, AW, I, F, bOI, yw, u, ady, cEt, bW, Vr, oW, aT, dV, h, azm, bOp, dL, hH, XL eL, aa, uQ, aEV, A, aMm, aW, vj, asD, ge, fe, Io, aF, pD, LJ, aCK, eE, iV, acD, iK, pb, adz, agS, cEu, gk, acC, aQd, ig, aDs, WP, anY, Ny, bRS, at, E, If, y); #c1(SLC11A1) c2(XP_006712773) c3(natural resistance-associated macrophage protein 1 isoform X3) c4(286832) c5(286833, 286834, 286835, 286836, 286837, 286838, 286839) c6( ) c7(bL, bM, T, ajy, dD, Ik, fR, cEs, bcb, if, ht, al, jx, aA, CH, n, cL, aj, eq, qN, V, zo, o, J, LH, ai, aMB, AW, I, F, bOI, yw, u, ady, cEt, bW, Vr, oW, aT, dV, h, azm, bOp, dL, hH, XL eL, aa, uQ, aEV, A, aMm, aW, vj, asD, ge, fe, Io, aF, pD, LJ, aCK, eE, iV, acD, iK, pb, adz, agS, cEu, gk, acC, aQd, ig, aDs, WP, anY, Ny, bRS, at, E, If, y); #c1(SLC11A2) c2(NP_000608) c3(natural resistance-associated macrophage protein 2 isoform 3) c4( ) c5(13710, 13711, 13712, 13713, 13714, 13715, 13716, 13717, 13718, 13719, 13720, 13721, 13722, 13723) c6( ) c7(cEw, yY, al, cEv, bGZ, ci, Rc, yw, oW, yu, cy, eu, yy, aq, hp, iV, gk, BU, ac, aNv, wO, dy, fD, aNt); #c1(SLC11A2) c2(NP_001167596) c3(natural resistance-associated macrophage protein 2 isoform 1) c4(69380, 69381, 69382, 69383) c5(69384, 69385, 69386, 69387, 69388, 69389, 69390, 69391, 69392, 69393, 69394, 69395, 69396) c6( ) c7(cEw, yY, al, cEv, bGZ, ci, Rc, yw, oW, yu, cy, eu, yy, aq, hp, iV, gk, BU, ac, aNv, wO, dy, fD, aNt); #c1(SLC11A2) c2(NP_001167601) c3(natural resistance-associated macrophage protein 2 isoform 4) c4(69397) c5(69398, 69399, 69400, 69401, 69402, 69403, 69404, 69405, 69406, 69407, 69408) c6( ) c7(cEw, yY, al, cEv, bGZ, ci, Rc, yw, oW, yu, cy, eu, yy, aq, hp, iV, gk, Bu, ac, aNv, wO, dy, fD, aNt); #c1(SLC11A2) c2(XP_005268968) c3(natural resistance-associated macrophage protein 2 isoform X2) c4(282253) c5(282254, 282255, 282256) c6( ) c7(cEw, yY, al, cEv, bGZ, ci, Rc, yw, oW, yu, cy, eu, yy, aq, hp, iV, gk, BU, ac, aNv, wO, dy, fD, aNt); #c1(SLC11A2) c2(XP_011536707) c3(natural resistance-associated macrophage protein 2 isoform X1) c4( ) c5(334260, 334261, 334262, 334263, 334264, 334265, 334266, 334267, 334268, 334269, 334270) c6( ) c7(cEw, yY, al, cEv, bGZ, ci, Rc, yw, oW, yu, cy, eu, yy, aq, hp, iV, gk, BU, ac, aNv, wO, dy, fD, aNt); #c1(SLC12A1) c2(NP_000329) c3(solute carrier family 12 member 1 isoform A) c4(7157, 7158, 7159, 7160) c5(7161, 7162, 7163, 7164, 7165, 7166, 7167, 7168, 7169, 7170, 7171, 7172, 7173, 7174, 7175, 7176, 7177, 7178, 7179, 7180, 7181, 7182, 7183, 7184, 7185, 7186, 7187, 7188) c6( ) c7(TI, s, XD, vj, cEx, Fe, cz, vw, dy, aPz, qa); #c1(SLC12A1) c2(NP_001171761) c3(solute carrier family 12 member 1 isoform F) c4(71526) c5(71527, 71528, 71529, 71530, 71531, 71532, 71533, 71534, 71535, 71536, 71537, 71538, 71539, 71540, 71541, 71542, 71543, 71544, 71545, 71546, 71547, 71548, 71549, 71550, 71551, 71552, 71553, 71554, 71555, 71556, 71557, 71558, 71559, 71560, 71561, 71562, 71563, 71564, 71565, 71566, 71567, 71568, 71569, 71570, 71571, 71572, 71573, 71574, 71575, 71576, 71577, 71578, 71579, 71580, 71581, 71582, 71583, 71584, 71585, 71586, 71587, 71588, 71589, 71590, 71591, 71592, 71593, 71594, 71595, 71596, 71597, 71598, 71599, 71600, 71601, 71602, 71603, 71604, 71605, 71606, 71607, 71608, 71609, 71610, 71611, 71612, 71613, 71614, 71615, 71616, 71617, 71618) c6( ) c7(TI, s, XD, vj, cEx, Fe, cz, vw, dy, aPz, qa); #c1(SLC12A1) c2(XP_005254662) c3(solute carrier family 12 member 1 isoform X1) c4(273294) c5( ) c6( ) c7(TI, s, XD, vj, cEx, Fe, cz, vw, dy, aPz, qa); #c1(SLC12A1) c2(XP_005254663) c3(solute carrier family 12 member 1 isoform X2) c4( ) c5(273295) c6( ) c7(TI, s, XD, vj, cEx, Fe, cz, vw, dy, aPz, qa); #c1(SLC12A1) c2(XP_006720719) c3(solute carrier family 12 member 1 isoform X3) c4( ) c5(293617, 293618, 293619, 293620, 293621) c6( ) c7(TI, s, XD, vj, cEx, Fe, cz, vw, dy, aPz, qa); #c1(SLC12A2) c2(NP_001243390) c3(solute carrier family 12 member 2 isoform 2) c4(90657) c5(90658, 90659, 90660, 90661, 90662, 90663) c6( ) c7(bM, e, ha, aw, qy, cz, ci, il, zP, eA, ad, cy, K, zQ, d, oV, Fe, aq, xw, ac, dB, mG, mf, B); #c1(SLC12A3) c2(NP_000330) c3(solute carrier family 12 member 3 isoform 1) c4(7189) c5(7190, 7191, 7192, 7193, 7194, 7195) c6( ) c7(bL, aJV, T, dD, hl, eR, ea, al, cz, yO, ci, eq, aY, hF, iu, Mo, ft, TI, XD, aT, afV, dL, K, aDZ, Xh, Fg, ahE, eL, bA, cgO, jf, cEy, cla, d, aW, Y, ff, Xg, dq, Xj, si, bWB, aPz, ahl, aUO, en, bz, dr, qa, amF, es, eM, iA, dB, cqP, kD, vy, dy, k, aS, ik, aAE); #c1(SLC12A3) c2(NP_001119579) c3(solute carrier family 12 member 3 isoform 2) c4(44161) c5(44162, 44163, 44164, 44165, 44166, 44167, 44168, 44169, 44170, 44171) c6( ) c7(bL, aJV, T, dD, hl, eR, ea, al, cz, yO, ci, eq, aY, hF, iu, Mo, ft, TI, XD, aT, afV, dL, K, aDZ, Xh, Fg, ahE, eL, bA, cgO, jf, cEy, cla, d, aW, Y, ff, Xg, dq, Xj, si, bWB, aPz, ahl, aUO, en, bz, dr, qa, amF, es, eM, iA, dB, cqP, kD, vy, dy, k, aS, ik, aAE); #c1(SLC12A3) c2(NP_001119580) c3(solute carrier family 12 member 3 isoform 3) c4(44172) c5(44173, 44174, 44175, 44176, 44177, 44178) c6( ) c7(bL, aJV, T, dD, hl, eR, ea, al, cz, yO, ci, eq, aY, hF, iu, Mo, ft, TI, XD, aT, afV, dL, K, aDZ, Xh, Fg, ahE, eL, bA, cgO, jf, cEy, cla, d, aW, Y, ff, Xg, dq, Xj, si, bWB, aPz, ahl, aUO, en, bz, dr, qa, amF, es, eM, iA, dB, cqP, kD, vy, dy, k, aS, ik, aAE); #c1(SLC12A4) c2(NP_001139433) c3(solute carrier family 12 member 4 isoform b) c4( ) c5(59331, 59332, 59333, 59334, 59335, 59336) c6( ) c7(qb, ta, if, qN); #c1(SLC12A4) c2(NP_001139434) c3(solute carrier family 12 member 4 isoform c) c4(59337) c5(59338, 59339, 59340, 59341, 59342, 59343) c6( ) c7(qb, ta, if, qN); #c1(SLC12A4) c2(NP_001139435) c3(solute carrier family 12 member 4 isoform d) c4(59344) c5(59345, 59346, 59347, 59348, 59349, 59350) c6( ) c7(qb, ta, if, qN); #c1(SLC12A4) c2(NP_001139436) c3(solute carrier family 12 member 4 isoform e) c4(59351) c5(59352, 59353, 59354, 59355, 59356, 59357) c6( ) c7(qb, ta, if, qN); #c1(SLC12A4) c2(NP_005063) c3(solute carrier family 12 member 4 isoform a) c4(152530, 152531) c5(152532, 152533, 152534, 152535, 152536, 152537) c6( ) c7(qb, ta, if, qN); #c1(SLC12A5) c2(NP_001128243) c3(solute carrier family 12 member 5 isoform 1) c4(49746) c5(49747, 49748, 49749, 49750, 48751, 49752) c6( ) c7(bL, Cq, ql, cA, dB, bE, ha, bB, cy, il, cB, akS); #c1(SLC12A5) c2(NP_065759) c3(solute carrier family 12 member 5 isoform 2) c4(205235, 205236, 205237) c5(205238, 205239, 205240, 205241, 205242, 205243, 205244, 205245, 205246, 205247, 205248, 205249, 205250, 205251, 205252, 205253, 205254, 205255) c6( ) c7(bL, Cq, ql, cA, dB, bE, ha, bB, cy, il, cB, akS); #c1(SLC12AG) c2(NP_001035960) c3(solute carrier family 12 member 6 isoform c) c4(33545) c5( ) c6( ) c7(ql, aW, if, ha, qB, U, aT, ta, iD, bK, fu, bX, qN, cjg); #c1(SLC12AG) c2(NP_001035961) c3(solute carrier family 12 member 6 isoform d) c4(33546, 33547, 33548) c5( ) c6( ) c7(ql, aW, if, ha, qB, U, aT, ta, iD, bK, fu, bX, qN, cjg); #c1(SLC12A6) c2(NP_001035962) c3(solute carrier family 12 member 6 isoform e) c4(33549) c5(33550, 33551, 33552, 33553, 33554, 33555) c6( ) c7(ql, aW, if, ha, qB, U, aT, ta, iD, bK, fu, bX, qN, cjg); #c1(SLC12AG) c2(NP_005126) c3(solute carrier family 12 member 6 isoform b) c4(153078) c5(153079, 153080, 153081, 153082, 153083, 153084) c6( ) c7(ql, aW, if, ha, qB, U, aT, ta, iD, bK, fu, bX, qN, cjg); #c1(SLC12A6) c2(XP_006720856) c3(solute carrier family 12 member 6 isoform X2) c4(293746) c5(293747, 293748, 293749, 293750, 293751, 293752, 293753, 293754, 293755, 293756) c6( ) c7(ql, aW, if, ha, qB, U, aT, ta, iD, bK, fu, bX, qN, cjg); #c1(SLC12A6) c2(XP_011520570) c3(solute carrier family 12 member 6 isoform X1) c4(315499) c5(315500, 315501, 315502, 315503, 315504, 315505, 315506, 315507, 315508, 315509, 315510, 315511, 315512, 315513, 315514, 315515, 315516, 315517, 315518, 315519, 315520, 315521, 315522, 315523, 315524, 315525, 315526, 315527, 315528, 315529) c6( ) c7(ql, aW, if, ha, qB, U, aT, ta, iD, bK, fu, bX, qN, cjg); #c1(SLC12A6) c2(XP_011520571) c3(solute carrier family 12 member 6 isoform X3) c4( ) c5(315530, 315531, 315532, 315533, 315534, 315535, 315536, 315537, 315538, 315539, 315540, 315541) c6( ) c7(ql, aW, if, ha, qB, U, aT, ta, iD, bK, fu, bX, qN, cjg); #c1(SLC12A7) c2(NP_006589) c3(solute carrier family 12 member 7) c4(166475, 166476) c5(166477, 166478, 166479, 166480, 166481, 166482, 166483, 166484, 166485, 166486, 166487, 166488) c6( ) c7(aW, aT, ajT, KN); #c1(SLC12A8) c2(NP_001182412) c3(solute carrier family 12 member 8) c4(74883, 74884, 74885, 74886) c5(74887, 74888, 74889, 74890, 74891, 74892, 74893, 74894, 74895, 74896, 74897, 74898, 74899, 74900, 74901, 74902, 74903, 74904, 74905, 74906, 74907, 74908, 74909, 74910, 74911, 74912, 74913, 74914) c6( ) c7(cr, Jr); #c1(SLC12A9) c2(NP_001254741) c3(solute carrier family 12 member 9 isoform 2) c4(94920, 94921) c5(94922, 94923, 94924, 94925, 94926, 94927, 94928, 94929, 94930, 94931, 94932, 94933, 94934, 94935, 94936, 94937, 94938, 94939) c6( ) c7(gh, T, os, pf, if, al, fd, bB, ci, x, bv, aE, aEX, K, hu, eL, be, Qe, aa, ye, aW, wF, g, as, eF, cm, aAB, eM, nB, AM, iA, iT, wE, cj, k, m, iu, Or, ht, NT, n, alZ, fr, qN, ai, eW, co, zw, kH, h, dL, aJb, pl, ks, aq, kp, Hu, YE, dw, Ld, Ye, bP, dB, pV, fL, WL, it, B, jx, aA, sM, v, j, atp, q, eA, eJ, akU, Vr, aT, cy, jj, yb, ae, ls, s, NE, Y, ev, Lf, r, en, bu, cl, t, f, iK, ck, QG, iM, II, agf, np, im, rA, bt, hS, Mb, kh, id, jh, oZ, dG, pz, iJ, mC, ad, hX, av, hd, Rq, oW, DI, d, je, qt, ff, eH, cr, eZ, gE, VI, aF, iV, iR, KM, bz, LB, gk, bE, bC, y, kS, X); #c1(SLC12A9) c2(NP_001254743) c3(solute carrier family 12 member 9 isoform 3) c4(94940) c5(94941, 94942, 94943, 94944, 94945, 94946, 94947, 94948, 94949, 94950) c6( ) c7(gh, T, os, pf, if, al, fd, bB, ci, x, bv, aE, a EX, K, hu, eL, be, Qe, aa, yo, aW, wF, g, as, eF, cm, aAB, eM, nB, AM, iA, iT, wE, cj, k, m, iu, Or, ht, NT, n, alZ, fr, qN, ai, eW, co, zw, kH, h, dL, aJb, pl, ks, aq, kp, Hu, YE, dw, Ld, Ye, bP, dB, pV, fL, WL, it, B, jx, aA, sM, v, j, atp, q, eA, eJ, akU, Vr, aT, cy, jj, yb, ae, ls, s, NE, Y, ev, Lf, r, en, bu, cl, t, f, iK, ck, QG, iM, II, agf, np, im, rA, bt, hS, Mb, kh, id, jh, oZ, dG, pz, iJ, mC, ad, hX, av, hd, Rq, oW, DI, d, je, qt, ff, eH, cr, eZ, gE, VI, aF, iV, iR, KM, bz, LB, gk, bE, bC, y, kS, X); #c1(SLC12A9) c2(NP_064631) c3(solute carrier family 12 member 9 isoform 1) c4(203398) c5(203399, 203400, 203401, 203402, 203403, 203404) c6( ) c7(gh, T, os, pf, if, al, fd, bB, ci, x, bv, aE, aEX, K, hu, eL, bc, Qe, aa, yo, aW, wF, g, as, eF, cm, aAB, eM, nB, AM, iA, iT, wE, cj, k, m, iu, Or, ht, NT, n, alZ, fr, qN, ai, eW, co, zw, kH, h, dL, aJb, pl, ks, aq, kp, Hu, YE, dw, Ld, Ye, bP, dB, pV, fL, WL, it, B, jx, aA, sM, v, j, atp, q, eA, eJ, akU, Vr, aT, cy, jj, yb, ae, ls, s, NE, Y, ev, Lf, r, en, bu, cl, t, f, iK, ck, QG, iM, II, agf, np, im, rA, bt, hS, Mb, kh, id, jh, oZ, dG, pz, iJ, mC, ad, hX, av, hd, Rq, oW, DI, d, je, qt, ff, eH, cr, eZ, gE, VI, aF, iV, iR, KM, bz, LB, gk, bE, bC, y, kS, X); #c1(SLC12A9) c2(XP_005250561) c3(solute carrier family 12 member 9 isoform X5) c4( ) c5(270373, 270374, 270375, 270376, 270377, 270378) c6( ) c7(gh, T, os, pf, if, al, fd, bB, ci, x, bv, aE, aEX, K, hu, eL, bc, Qe, aa, yo, aW, wF, g, as, eF, cm, aAB, eM, nB, AM, iA, iT, wE, cj, k, m, iu, Or, ht, NT, n, alZ, fr, qN, ai, eW, co, zw, kH, h, dL, aJb, pl, ks, aq, kp, Hu, YF, dw, Ld, Ye, bP, dB, pV, fL, WL, it, B, jx, aA, sM, v, j, atp, q, eA, eJ, akU, Vr, aT, cy, jj, yb, ae, ls, s, NE, Y, ev, Lf, r, en, bu, cl, t, f, iK, ck, QG, iM, II, agf, np, im, rA, bt, hS, Mb, kh, id, jh, oZ, dG, pz, iJ, mC, ad, hX, av, hd, Rq, oW, DI, d, je, qt, ff, eH, cr, eZ, gE, VI, aF, iV, iR, KM, bz, LB, gk, bE, bC, y, kS, X); #c1(SLC12A9) c2(XP_006716118) c3(solute carrier family 12 member 9 isoform X2) c4(290086, 290087) c5( ) c6( ) c7(gh, T, os, pf, if, al, fd, bB, ci, x, bv, aE, aEX, K, hu, eL, be, Qe, aa, ye, aW, wF, g, as, eF, cm, aAB, eM, nB, AM, iA, iT, wE, cj, k, m, iu, Or, ht, NT, n, alZ, fr, qN, ai, eW, co, zw, kH, h, dL, aJb, pl, ks, aq, kp, Hu, YF, dw, Ld, Ye, bP, dB, pV, fL, WL, it, B, jx, aA, sM, v, j, atp, q, eA, eJ, akU, Vr, aT, cy, jj, yb, ae, ls, s, NE, Y, ev, Lf, r, en, bu, cl, t, f, iK, ck, QG, iM, II, agf, np, im, rA, bt, hS, Mb, kh, id, jh, oZ, dG, pz, iJ, mC, ad, hX, av, hd, Rq, oW, DI, d, je, qt, ff, eH, cr, al, gE, VI, aF, iV, iR, KM, bz, LB, gk, bE, bC, y, kS, X); #c1(SLC13A1) c2(NP_071889) c3(solute carrier family 13 member 1) c4(212113) c5(212114, 212115, 212116, 212117, 212118, 212119) c6( ) c7(bL, aw, dq, k, ade, rv, bN); #c1(SLC13A1) c2(XP_011514817) c3(solute carrier family 13 member 1 isoform X1) c4( ) c5(307483) c6( ) c7(bL, aw, dq, k, ade, rv, bN); #c1(SLC13A1) c2(XP_011514821) c3(solute carrier family 13 member 1 isoform X5) c4(307484) c5(307485, 307486, 307487, 307488, 307489) c6( ) c7(bL, aw, dq, k, ade, rv, bN); #c1(SLC13A2) c2(NP_001139447) c3(solute carrier family 13 member 2 isoform a) c4(59372) c5(59373, 59374, 59375, 59376, 59377, 59378) c6( ) c7(FE, aW, m, aT); #c1(SLC13A2) c2(NP_003975) c3(solute carrier family 13 member 2 isoform b) c4(142580, 142581, 142582) c5(142583, 142584, 142585, 142586, 142587, 142588, 142589, 142590, 142591, 142592, 142593, 142594, 142595, 142596, 142597, 142598, 142599, 142600, 142601) c6( ) c7(FE, aW, m, aT); #c1(SLC13A2) c2(XP_006722228) c3(solute carrier family 13 member 2 isoform X5) c4(294649) c5(294650, 294651, 294652, 294653, 294654) c6( ) c7(FE, aW, m, aT); #c1(SLC13A3) c2(NP_001011554) c3(solute carrier family 13 member 3 isoform b) c4(24648) c5(24649, 24650, 24651, 24652, 24653) c6( ) c7(bL); #c1(SLC13A3) c2(NP_001180268) c3(solute carrier family 13 member 3 isoform c precursor) c4(73627, 73628, 73629) c5(73630, 73631, 73632, 73633, 73634, 73635, 73636, 73637, 73638, 73639, 73640, 73641, 73642, 73643, 73644, 73645, 73646, 73647, 73648) c6( ) c7(bL); #c1(SLC13A3) c2(NP_001180269) c3(solute carrier family 13 member 3 isoform d) c4(73649, 73650) c5(73651, 73652, 73653, 73654, 73655, 73656, 73657, 73658, 73659, 73660) c6( ) c7(bL); #c1(SLC13A3) c2(NP_001180271) c3(solute carrier family 13 member 3 isoform e) c4(73668) c5(73669, 73670, 73671, 73672, 73673) c6( ) c7(bL); #c1(SLC13A3) c2(NP_073740) c3(solute carrier family 13 member 3 isoform a precursor) c4(213370, 213371) c5(213372, 213373, 213374, 213375, 213376, 213377, 213378, 213379, 213380, 213381, 213382, 213383, 213384, 213385, 213386, 213387, 213388, 213389, 213390) c6( ) c7(bL); #c1(SLC13A5) c2(NP_001137310) c3(solute carrier family 13 member 5 isoform b) c4(55444) c5(55445, 55446, 55447, 55448, 55449, 55450, 55451, 55452, 55453, 55454) c6( ) c7(aW, Im, m, aT); #c1(SLC13A5) c2(NP_001271439) c3(solute carrier family 13 member 5 isoform d) c4(103960) c5(103961, 103962, 103963, 103964, 103965, 103966) c6( ) c7(aW, Im, m, aT); #c1(SLC13A5) c2(NP_808218) c3(solute carrier family 13 member 5 isoform a) c4(252711) c5(252712, 252713, 252714, 252715, 252716, 252717) c6( ) c7(aW, Im, m, aT); #c1(SLC14A1) c2(NP_001122060) c3(urea transporter 1 isoform 1) c4(46336, 46337, 46338, 46339) c5(46340, 46341, 46342, 46343, 46344, 46345, 46346, 46347, 46348, 46349) c6( ) c7(bM, A, pc, Jr, vj, aw, qd, dV, aj, dL, pm, If, aHj, eL, q); #c1(SLC14A1) c2(NP_056949) c3(urea transporter 1 isoform 2) c4( ) c5(188176, 188177, 188178, 188179, 188180, 188181) c6( ) c7(bM, A, pc, Jr, vj, aw, qd, dV, aj, dL, pm, If, aHj, eL, q); #c1(SLC14A1) c2(XP_011524444) c3(urea transporter 1 isoform X1) c4(319032, 319033) c5(319034) c6( ) c7(bM, A, pc, Jr, vj, aw, qd, dV, aj, dL, pm, If, aHj, eL, q); #c1(SLC14A1) c2(XP_011524446) c3(urea transporter 1 isoform X4) c4( ) c5(319035, 319036, 319037, 319038, 319039, 319040) c6( ) c7(bM, A, pc, Jr, vj, aw, qd, dV, aj, dL, pm, If, aHj, eL, q); #c1(SLC14A2) c2(XP_011524518) c3(urea transporter 2 isoform X1) c4(319073, 319074) c5(319075, 319076, 319077, 319078, 319079, 319080, 319081, 319082, 319083, 319084, 319085) c6( ) c7(bM, T, aC, pf, ea, if, e, boZ, EQ, CH, bB, fd, cL, HH, aBm, aY, Tz, aR, x, bv, AW, aji, u, dV, iv, K, bU, hH, eL, eN, eG, yo, bbC, dH, aW, ih, alR, hl, apn, Ku, Eg, g, eE, eF, cm, mZ, wT, eY, y, jV, eM, iA, wK, dc, bIQ, vA, ZT, Gs, U, cj, vy, uJ, azg, k, m, pw, bi, gD, iu, dD, gU, RX, aw, aj, ww, afE, fr, nA, pM, qN, eW, biS, cc, ec, BR, bKk, Nn, gd, Ak, h, dL, ey, ZW, mV, btr, mY, db, on, pl, he, vx, mU, A, mR, zb, fe, aq, pm, fq, op, mX, W, ky, cEz, dB, Fi, anZ, eD, bP, Ei, hL, fL, bD, it, mT, B, qc, bL, fM, eR, bcb, oe, jx, aA, cR, mS, ti, cz, j, v, C, Wa, q, J, o, eA, PC, cF, Rl, mP, WY, jZ, aql, aT, vH, qv, bK, zp, aUQ, rE, alV, ae, af, jf, qw, iU, Y, yL, r, aaE, Io, aDm, HL, bwL, cl, t, iK, bN, ck, Qi, rR, nM, ac, c, bgy, ig, MB, AH, ro, dy, mf, aan, byK, gT, ao, gV, bNo, qb, aZ, aD, iW, ha, mw, bS, oH, jE, eq, mC, ad, Xv, dP, hX, HE, I, F, CJ, Rq, akR, mW, ds, nl, oW, LA, hD, vc, hP, IQ, ji, yh, yF, mu, aeQ, d, IR, th, hG, ctG, wc, bpO, nh, eH, dN, gl, kD, yy, aF, eZ, Pd, iR, iV, aUC, bz, dr, qa, dR, eK, es, bF, pc, csw, bE, z, anY, be, ei, hE, aAN, X, us); #c1(SLC14A2) c2(XP_011524519) c3(urea transporter 2 isoform X2) c4( ) c5(319086, 319087, 319088, 319089, 319090) c6( ) c7(bM, T, aC, pf, ea, if, e, boZ, EQ, CH, bB, fd, cL, HH, aBm, aY, Tz, aR, x, bv, AW, aji, u, dV, iv, K, bU, hH, eL, eN, eG, ye, bbC, dH, aW, ih, alR, hl, apn, Ku, Eg, g, eE, eF, cm, mZ, wT, eY, y, jV, eM, iA, wK, dc, bIQ, vA, ZT, Gs, U, cj, vy, uJ, azg, k, m, pw, hi, gD, iu, dD, gD, RX, aw, aj, ww, afE, fr, nA, pM, qN, eW, biS, cc, ec, BR, bKk, Nn, gd, Ak, h, dL, ey, ZW, mV, btr, mY, db, on, pl, he, vx, mU, A, mR, zb, fe, aq, pm, fq, op, mX, W, ky, cEz, dB, Fi, anZ, eD, bP, Ei, hL, fL, bD, it, mT, B, qc, bL, fM, eR, bcb, oe, jx, aA, cR, mS, ti, cz, j, v, C, Wa, q, J, o, eA, PC, cF, RI, mP, WY, jZ, aql, aT, vH, qv, bK, zp, aUQ, rE, alV, ae, af, jf, qw, iU, Y, yL, r, aaE, Io, aDm, HL, bwL, cl, t, iK, bN, ck, Qi, rR, nM, ac, c, bgy, ig, MB, AH, ro, dy, mf, aan, byK, gT, ao, gV, bNo, qb, aZ, aD, iW, ha, mw, bS, oH, jE, eq, mC, ad, Xv, dP, hX, HF, I, F, CJ, Rq, akR, mW, ds, nl, oW, LA, hD, vc, hP, IQ, ji, yh, yF, mu, aeQ, d, IR, th, hG, ctG, wc, bpO, nh, eH, dN, gl, kD, yy, aF, eZ, Pd, iR, iV, aUC, bz, dr, qa, dR, eK, es, bF, pc, csw, bE, z, anY, be, ei, hE, aAN, X, us); #c1(SLC15A1) c2(NP_005064) c3(solute carrier family 15 member 1) c4(152538, 152539, 152540) c5(152541, 152542, 152543, 152544, 152545, 152546, 152547, 152548, 152549, 152550, 152551, 152552, 152553, 152554, 152555, 152556, 152557, 152558, 152559) c6( ) c7(Ht, jz, py, vj, baT, fe, ji, iV, eA); #c1(SLC15A2) c2(NP_001139470) c3(solute carrier family 15 member 2 isoform b) c4(59379, 59380) c5(59381, 59382, 59383, 59384, 59385, 59386, 59387, 59388, 59389, 59390, 59391, 59392) c6( ) c7(ao, vj, V, Y); #c1(SLC15A2) c2(NP_066568) c3(solute carrier family 15 member 2 isoform a) c4(207427) c5(207428, 207429, 207430, 207431, 207432, 207433) c6( ) c7(ao, vj, V, Y); #c1(SLC15A4) c2(NP_663623) c3(solute carrier family 15 member 4) c4(241339) c5(241340, 241341, 241342, 241343, 241344, 241345, 241346, 241347, 241348, 241349, 241350, 241351) c6( ) c7(bL, v, eZ, fe); #c1(SLC15A4) c2(XP_011536197) c3(solute carrier family 15 member 4 isoform X1) c4(333492) c5( ) c6( ) c7(bL, v, eZ, fe); #c1(SLC16A1) c2(XP_011540329) c3(monocarboxylate transporter 1 isoform X1) c4(338775, 338776, 338777, 338778, 338779) c5(338780, 338781, 338782, 338783, 338784, 338785, 338786, 338787, 338788, 338789, 338790, 338791, 338792, 338793, 338794, 338795, 338796, 338797, 338798, 338799, 338800, 338801, 338802, 338803, 338804, 338805, 338806, 338807, 338808, 338809, 338810, 338811, 338812, 338813) c6( ) c7(T, dD, fM, cEA, ea, jh, fd, eq, ci, il, eA, ad, cEB, mj, aT, DO, jy, K, hg, fb, ae, d, nO, aW, ff, eH, fe, en, iV, eF, cm, bz, gD, bo, X); #c1(SLC16A10) c2(NP_061063) c3(monocarboxylate transporter 10) c4(199130, 199131) c5(199132, 199133, 199134, 199135, 199136, 199137, 199138, 199139, 199140, 199141, 199142, 199143) c6( ) c7(eL, h, dL, cEC, K, qN, ae, aR, ad); #c1(SLC16A10) c2(XP_006715392) c3(monocarboxylate transporter 10 isoform X2) c4(289509, 289510) c5(289511, 289512, 289513, 289514, 289515, 289516, 289517, 289518, 289519, 289520, 289521, 289522) c6( ) c7(eL, h, dL, cEC, K, qN, ae, aR, ad); #c1(SLC16A10) c2(XP_011533725) c3(monocarboxylate transporter 10 isoform X3) c4(329803, 329804) c5(329805, 329806, 329807, 329808, 329809, 329810, 329811, 329812, 329813, 329814, 329815, 329816) c6( ) c7(eL, h, dL, cEC, K, qN, ae, aR, ad); #c1(SLC16A11) c2(NP_699188) c3(monocarboxylate transporter 11) c4(245828, 245829) c5(245830, 245831, 245832, 245833, 245834, 245835, 245836, 245837, 245838, 245839, 245840, 245841) c6( ) c7(bL, t, m); #c1(SLC16A12) c2(NP_998771) c3(monocarboxylate transporter 12) c4(265894, 265895, 265896, 265897) c5(265898, 265899, 265900, 265901, 265902, 265903, 265904, 265905, 265906, 265907, 265908, 265909, 265910, 265911, 265912, 265913, 265914, 265915, 265916, 265917, 265918, 265919, 265920, 265921) c6( ) c7(aWG, aA, cED, aF, fq, cEE); #c1(SLC16A13) c2(NP_963860) c3(monocarboxylate transporter 13) c4(262444) c5(262445, 262446, 262447, 262448, 262449, 262450) c6( ) c7(bL); #c1(SLC16A2) c2(NP_006508) c3(monocarboxylate transporter 8) c4(165883) c5(165884, 165885, 165886, 165887, 165888, 165889) c6( ) c7(pv, Mo, nM, VX, akx, hr, nf, hz, K, cEC, nA, cb, gT, GR, xt); #c1(SLC16A2) c2(XP_011529317) c3(monocarboxylate transporter 8 isoform X2) c4( ) c5(324745) c6( ) c7(pv, Mo, nM, VX, akx, hr, nf, hz, K, cEC, nA, cb, gT, GR, xt); #c1(SLC16A3) c2(XP_011521909) c3(monocarboxylate transporter 4 isoform X1) c4(316527) c5(316528, 316529, 316530, 316531, 316532, 316533, 316534, 316535, 316536, 316537, 316538, 316539, 316540, 316541, 316542, 316543, 316544, 316545, 316546, 316547, 316548, 316549, 316550, 316551, 316552, 316553, 316554, 316555, 316556, 316557, 316558, 316559, 316560, 316561, 316562, 316563, 316564, 316565, 316566, 316567, 316568, 316569, 316570, 316571, 316572, 316573, 316574, 316575, 316576, 316577, 316578, 316579, 316580, 316581, 316582, 316583, 316584, 316585, 316586, 316587, 316588, 316589, 316590, 316591, 316592, 316593, 316594, 316595, 316596, 316597, 316598, 316599, 316600, 316601, 316602, 316603, 316604, 316605, 316606, 316607, 316608, 316609, 316610, 316611, 316612, 316613, 316614, 316615, 316616, 316617, 316618, 316619, 316620, 316621, 316622, 316623, 316624, 316625, 316626, 316627, 316628, 316629, 316630, 316631, 316632, 316633, 316634, 316635) c6(316636) c7(T, dD, nz, ea, fd, eq, fr, eA, ad, bv, py, aT, K, fb, ae, nO, aW, ff, en, es, iA, IC); #c1(SLC16A6) c2(NP_004685) c3(monocarboxylate transporter 7) c4(148829) c5(148830, 148831, 148832, 148833, 148834, 148835, 148836, 148837, 148838, 148839, 148840, 148841, 148842, 148843) c6( ) c7(dP); #c1(SLC16A6) c2(XP_005257846) c3(monocarboxylate transporter 7 isoform X2) c4(275379) c5(275380, 275381) c6( ) c7(dP); #c1(SLC16A7) c2(XP_005269288) c3(monocarboxylate transporter 2 isoform X1) c4(282534) c5(282535, 282536, 282537, 282538, 282539, 282540, 282541, 282542, 282543, 282544, 282545, 282546, 282547, 282548, 282549, 282550, 282551, 282552, 282553) c6( ) c7(fb, v, bo); #c1(SLC16A7) c2(XP_011537299) c3(monocarboxylate transporter 2 isoform X3) c4(335003) c5(335004, 335005, 335006, 335007, 335008) c6( ) c7(fb, v, bo); #c1(SLC16A8) c2(NP_037488) c3(monocarboxylate transporter 3) c4(175824, 175825) c5(175826, 175827, 175828, 175829, 175830, 175831, 175832, 175833, 175834, 175835, 175836, 175837) c6( ) c7(IC, vj, dD, eq, ea); #c1(SLC16A9) c2(NP_919274) c3(monocarboxylate transporter 9) c4(258396, 258397) c5(258398, 258399, 258400, 258401, 258402, 258403, 258404, 258405, 258406, 258407, 258408, 258409, 258410, 258411, 258412, 258413) c6( ) c7(nD, aj, nn); #c1(SLC17A1) c2(NP_005065) c3(sodium-dependent phosphate transport protein 1) c4(152560, 152561) c5(152562, 152563, 152564, 152565, 152566, 152567, 152568, 152569, 152570, 152571, 152572) c6( ) c7(nD, T, AB, nn, fQ, cEF, AA, af); #c1(SLC17A1) c2(XP_011513122) c3(sodium-dependent phosphate transport protein 1 isoform X3) c4(304916) c5(304917, 304918, 304919, 304920, 304821, 304922, 304923, 304924, 304925, 304926, 304927, 304928, 304929, 304930, 304931) c6( ) c7(nD, T, AB, nn, fQ, cEF, AA, af); #c1(SLC17A2) c2(NP_001273052) c3(sodium-dependent phosphate transport protein 3 isoform a) c4(104260) c5(104261, 104262, 104263, 104264, 104265, 104266) c6( ) c7(nD); #c1(SLC17A2) c2(NP_005826) c3(sodium-dependent phosphate transport protein 3 isoform b) c4(159713) c5(159714, 159715, 159716, 159717, 159718, 159719) c6( ) c7(nD); #c1(SLC17A2) c2(XP_011512529) c3(sodium-dependent phosphate transport protein 3 isoform X4) c4(303185) c5(303186, 303187, 303188, 303189, 303190, 303191) c6( ) c7(nD); #c1(SLC17A3) c2(NP_001091956) c3(sodium-dependent phosphate transport protein 4 isoform a) c4(39011, 39012) c5(39013, 39014, 39015, 39016, 39017, 39018) c6( ) c7(nD, nH, awC, M, cEG, cEH); #c1(SLC17A3) c2(NP_006623) c3(sodium-dependent phosphate transport protein 4 isoform b) c4(166682, 166683) c5(166684, 166685, 166686, 166687, 166688, 166689, 166690, 166691, 166692, 166693, 166694, 166695, 166696, 166697, 166698, 166699, 166700, 166701, 166702, 166703, 166704, 166705) c6( ) c7(nD, nH, awC, M, cEG, cEH); #c1(SLC17A4) c2(NP_005486) c3(probable small intestine urate exporter isoform a) c4(156705) c5(156706, 156707, 156708, 156709, 156710, 156711) c6( ) c7(dD, eq); #c1(SLC17A4) c2(XP_011512519) c3(probable small intestine urate exporter isoform X7) c4(303150) c5(303151, 303152, 303153, 303154, 303155, 303156) c6( ) c7(dD, eq); #c1(SLC17A4) c2(XP_011512521) c3(probable small intestine urate exporter isoform X9) c4(303157) c5(303158, 303159, 303160, 303161, 303162, 303163) c6( ) c7(dD, eq); #c1(SLC17A5) c2(NP_036566) c3(sialin) c4(174441) c5(174442, 174443, 174444, 174445, 174446, 174447, 174448) c6( ) c7(bM, T, dD, eR, ea, al, jx, aj, v, eq, jE, aY, J, kL, hX, F, alp, oW, h, bBN, K, bzw, cEI, Y, fc, gC, hl, lo, lm, gk, alm, cEJ, ayS, U, Lq, cP, hE, B, vi); #c1(SLC17A5) c2(XP_011534052) c3(sialin isoform X3) c4(330226) c5(330227) c6( ) c7(bM, T, dD, eR, ea, al, jx, aj, v, eq, jE, aY, J, kL, hX, F, alp, oW, h, bBN, K, bzw, cEI, Y, fc, gC, hl, lo, lm, gk, alm, cEJ, ayS, U, Lq, cP, hE, B, vi); #c1(SLC17A5) c2(XP_011534053) c3(sialin isoform X4) c4( ) c5(330228, 330229, 330230, 330231, 330232) c6( ) c7(bM, T, dD, eR, ea, al, jx, aj, v, eq, jE, aY, J, kL, hX, F, alp, oW, h, bBN, K, bzw, cEI, Y, fc, gC, hl, lo, lm, gk, alm, cEJ, ayS, U, Lq, cP, hE, B, vi); #c1(SLC17A6) c2(NP_065079) c3(vesicular glutamate transporter 2) c4(203721, 203722) c5(203723, 203724, 203725, 203726, 203727, 203728, 203729, 203730, 203731, 203732, 203733, 203734) c6( ) c7(ot, c, ha, bO, bK, an, xt, ad); #c1(SLC17A7) c2(NP_064705) c3(vesicular glutamate transporter 1) c4(203488, 203489) c5(203490, 203491, 203492, 203493, 203494, 203495, 203496, 203497, 203498, 203499, 203500, 203501) c6( ) c7(et, ha, bO, bK, K, xt); #c1(SLC17A8) c2(NP_001138760) c3(vesicular glutamate transporter 3 isoform 2) c4(57580) c5(57581, 57582, 57583, 57584, 57585, 57586, 57587) c6( ) c7(Bh, mG, ff, en, cEK); #c1(SLC17A8) c2(NP_647480) c3(vesicular glutamate transporter 3 isoform 1) c4(238686) c5(238687, 238688, 238689, 238690, 238691, 238692) c6( ) c7(Bh, mG, ff, en, cEK); #c1(SLC18A1) c2(XP_011542926) c3(chromaffin granule amine transporter isoform X1) c4(341532, 341533) c5(341534, 341535, 341536, 341537, 341538, 341539, 341540, 341541, 341542, 341543, 341544) c6( ) c7(bxy, T, cF, d, eP, aW, U, aT, uJ, bS, bK, et, Z, oi, cm, bt, eA, VB, hq); #c1(SLC18A1) c2(XP_011542928) c3(chromaffin granule amine transporter isoform X2) c4(341545) c5(341546, 341547, 341548, 341549, 341550, 341551, 341552, 341553, 341554, 341555) c6( ) c7(bxy, T, cF, d, eP, aW, U, aT, uJ, bS, bK, et, Z, oi, cm, bt, eA, VB, hq); #c1(SLC18A1) c2(XP_011542930) c3(chromaffin granule amine transporter isoform X3) c4(341556) c5(341557, 341558, 341559, 341560, 341561, 341562, 341563, 341564, 341565, 341566, 341567) c6( ) c7(bxy, T, cF, d, eP, aW, U, aT, uJ, bS, bK, et, Z, oi, cm, bt, eA, VB, hq); #c1(SLC18A2) c2(NP_003045) c3(synaptic vesicular amine transporter) c4(134641) c5(134642, 134643, 134644, 134645, 134646, 134647) c6( ) c7(T, bO, n, aj, bS, gf, et, Fb, VV, aR, ad, J, HF, cF, aji, HC, bK, K, Wm, an, oi, ae, af, aIL, mu, A, Gv, HL, Z, jb, FT, hq, iq, ok, rR, cA, Kv, Gs, Ei, QF, sv, uJ, anx, IB, VB); #c1(SLC18A3) c2(NP_003046) c3(vesicular acetylcholine transporter) c4(134648) c5(134649, 134650, 134651, 134652, 134653, 134654) c6( ) c7(rt, bM, jo, aNR, af, Hr); #c1(SLC19A1) c2(NP_001192135) c3(folate transporter 1 isoform 2) c4(81933, 81934, 81935, 81936) c5(81937, 81938, 81939, 81940, 81941, 81942, 81943, 81944, 81945, 81946, 81947, 81948, 81949, 81950, 81951) c6( ) c7(ng, T, gU, fM, fV, iW, jh, aA, sM, cz, cL, bB, j, ci, Gn, q, aR, o, ad, x, fU, av, Na, Bj, fS, gd, aT, Nc, dL, bK, K, eL, iL, eu, s, aoX, hG, aW, vj, ff, eH, r, Ll, Lk, aF, en, g, eF, f, iK, fq, bz, iV, bN, ck, ac, eM, bP, gY, pE, lp, wE, bwp, bm, at, k, ij, bD, y, rA, X, us); #c1(SLC19A1) c2(NP_001192136) c3(folate transporter 1 isoform 3) c4(81952) c5(81953, 81954, 81955, 81956, 81957, 81958) c6( ) c7(ng, T, gU, fM, fV, iW, jh, aA, sM, cz, cL, bB, j, ci, Gn, q, aR, o, ad, x, fU, av, Na, Bj, fS, gd, aT, Nc, dL, bK, K, eL, iL, eu, s, aoX, hG, aW, vj, ff, eH, r, Ll, Lk, aF, en, g, eF, f, iK, fq, bz, iV, bN, ck, ac, eM, bP, gY, pE, lp, wE, bwp, bm, at, k, ij, bD, y, rA, X, us); #c1(SLC19A1) c2(XP_011528000) c3(folate transporter 1 isoform X3) c4( ) c5(323088) c6( ) c7(ng, T, gU, fM, fV, iW, jh, aA, sM, cz, cL, bB, j, ci, Gn, q, aR, o, ad, x, fU, av, Na, Bj, fS, gd, aT, Nc, dL, bK, K, eL, iL, eu, s, aoX, hG, aW, vj, ff, eH, r, Ll, Lk, aF, en, g, eF, f, iK, fq, bz, iV, bN, ck, ac, eM, bP, gY, pE, lp, wE, bwp, bm, at, k, ij, bD, y, rA, X, us); #c1(SLC19A1) c2(XP_011528007) c3(folate transporter 1 isoform X5) c4( ) c5(323089, 323090, 323091, 323092, 323093, 323094) c6( ) c7(ng, T, gU, fM, fV, iW, jh, aA, sM, cz, cL, bB, j, ci, Gn, q, aR, o, ad, x, fU, av, Na, Bj, fS, gd, aT, Nc, dL, bK, K, eL, iL, eu, s, aoX, hG, aW, vj, ff, eH, r, Ll, Lk, aF, en, g, eF, f, iK, fq, bz, iV, bN, ck, ac, eM, bP, gY, pE, lp, wE, bwp, bm, at, k, ij, bD, y, rA, X, us); #c1(SLC19A1) c2(XP_011528009) c3(folate transporter 1 isoform X7) c4( ) c5(323095, 323096, 323097, 323098) c6( ) c7(ng, T, gU, fM, fV, iW, jh, aA, sM, cz, cL, bB, j, ci, Gn, q, aR, o, ad, x, fU, av, Na, Bj, fS, gd, aT, Nc, dL, bK, K, eL, iL, eu, s, aoX, hG, aW, vj, ff, eH, r, Ll, Lk, aF, en, g, eF, f, iK, fq, bz, iV, bN, ck, ac, eM, bP, gY, pE, lp, wE, bwp, bm, at, k, ij, bD, y, rA, X, us); #c1(SLC19A1) c2(XP_011528010) c3(folate transporter 1 isoform X1) c4(323099) c5(323100, 323101, 323102, 323103, 323104) c6( ) c7(ng, T, gU, fM, fV, iW, jh, aA, sM, cz, cL, bB, j, ci, Gn, q, aR, o, ad, x, fU, av, Na, Bj, fS, gd, aT, Nc, dL, bK, K, eL, iL, eu, s, aoX, hG, aW, vj, ff, eH, r, Ll, Lk, aF, en, g, eF, f, iK, fq, bz, iV, bN, ck, ac, eM, bP, gY, pE, lp, wE, bwp, bm, at, k, ij, bD, y, rA, X, us); #c1(SLC19A1) c2(XP_011528012) c3(folate transporter 1 isoform X8) c4(323105, 323106) c5(323107, 323108, 323109, 323110, 323111, 323112, 323113, 323114, 323115, 323116, 323117) c6( ) c7(ng, T, gU, fM, fV, iW, jh, aA, sM, cz, cL, bB, j, ci, Gn, q, aR, o, ad, x, fU, av, Na, Bj, fS, gd, aT, Nc, dL, bK, K, eL, iL, eu, s, aoX, hG, aW, vj, ff, eH, r, Ll, Lk, aF, en, g, eF, f, iK, fq, bz, iV, bN, ck, ac, eM, bP, gY, pE, lp, wE, bwp, bm, at, k, ij, bD, y, rA, X, us); #c1(SLC19A2) c2(NP_008927) c3(thiamine transporter 1) c4(169592, 169593) c5(169594, 169595, 169596, 169597, 169598, 169599, 169600, 169601, 169602, 169603, 169604, 169605) c6( ) c7(bL, fU, T, cEL, Gm, cCU, UP, iU, se, aW, sq, oW, aT, cz, aj, cEM, J, bA); #c1(SLC19A2) c2(XP_011507379) c3(thiamine transporter 1 isoform X2) c4(297235) c5(297236, 297237, 297238, 297239, 297240, 297241) c6( ) c7(bL, fU, T, cEL, Gm, cCU, UP, iU, se, aW, sq, oW, aT, cz, aj, cEM, J, bA); #c1(SLC19A3) c2(XP_005246931) c3(thiamine transporter 2 isoform X4) c4(267515) c5(267516, 267517, 267518, 267519, 267520, 267521) c6( ) c7(uB, fU, T, cCU, hb, aW, cEN, aT, bcD, aA, aF, K, ajU); #c1(SLC19A3) c2(XP_006712842) c3(thiamine transporter 2 isoform X3) c4(286894) c5( ) c6( ) c7(uB, fU, T, cCU, hb, aW, cEN, aT, bcD, aA, aF, K, ajU); #c1(SLC19A3) c2(XP_011510233) c3(thiamine transporter 2 isoform X2) c4(300800, 300801, 300802) c5(300803, 300804, 300805, 300806, 300807) c6( ) c7(uB, fU, T, cCU, hb, aW, cEN, aT, bcD, aA, aF, K, ajU); #c1(SLC19A3) c2(XP_011510235) c3(thiamine transporter 2 isoform X1) c4( ) c5(300808, 300809, 300810, 300811, 300812, 300813, 300814, 300815, 300816, 300817, 300818, 300819, 300820, 300821, 300822, 300823, 300824, 300825, 300826, 300827, 300828, 300829, 300830) c6( ) c7(uB, fU, T, cCU, hb, aW, cEN, aT, bcD, aA, aF, K, ajU); #c1(SLC1A1) c2(NP_004161) c3(excitatory amine acid transporter 3) c4(143961) c5(143962, 143963, 143964, 143965, 143966, 143967) c6( ) c7(cmC, cEO, ha, bO, GC, cEP, nA, iI, Fc, V, aR, dP, hb, cy, bK, K, rE, he, GZ, ahe, bN, c, ig, pK, qc); #c1(SLC1A1) c2(XP_011516311) c3(excitatory amine acid transporter 3 isoform X3) c4(309523) c5( ) c6( ) c7(cmC, cEO, ha, bO, GC, cEP, nA, iI, Fc, V, aR, dP, hb, cy, bK, K, rE, he, GZ, ahe, bN, c, ig, pK, qc); #c1(SLC1A1) c2(XP_011516312) c3(excitatory amine acid transporter 3 isoform X4) c4( ) c5(309524, 309525, 309526, 309527, 309528, 309529) c6( ) c7(cmC, cEO, ha, bO, GC, cEP, nA, iI, Fc, V, aR, dP, hb, cy, bK, K, rE, he, GZ, ahe, bN, c, ig, pK, qc); #c1(SLC1A2) c2(NP_001182657) c3(excitatory amine acid transporter 2 isoform 2) c4( ) c5(75133, 75134, 75135, 75136, 75137, 75138, 75139, 75140) c6( ) c7(T, bmQ, OI, dM, yY, ha, eX, I, EQ, aA, n, ti, bO, Vd, asF, PJ, iI, V, eA, aR, kL, Gt, aV, hb, HC, h, eV, bK, K, jj, an, he, af, nP, aCt, zD, aPf, cu, aF, as, bN, hq, eK, rR, c, bQC, Gs, cEQ, U, uJ, Da, mk, kS); #c1(SLC1A2) c2(NP_004162) c3(excitatory amine acid transporter 2 isoform 1) c4(143968) c5(143969, 143970, 143971, 143972, 143973, 143974) c6( ) c7(T, bmQ, OI, dM, yY, ha, eX, I, EQ, aA, n, ti, bO, Vd, asF, PJ, iI, V, eA, aR, kL, Gt, aV, hb, HC, h, eV, bK, K, jj, an, he, af, nP, aCt, zD, aPf, cu, aF, as, bN, hq, eK, rR, c, bQC, Gs, cEQ, U, uJ, Da, mk, kS); #c1(SLC1A2) c2(XP_005253124) c3(excitatory amine acid transporter 2 isoform X2) c4(272172) c5(272173, 272174) c6( ) c7(T, bmQ, OI, dM, yY, ha, eX, I, EQ, aA, n, ti, bO, Vd, asF, PJ, iI, V, eA, aR, kL, Gt, aV, hb, HC, h, eV, bK, K, jj, an, he, af, nP, aCt, zD, aPf, cu, aF, as, bN, hq, eK, rR, c, bQC, Gs, cEQ, U, uJ, Da, mk, kS); #c1(SLC1A3) c2(NP_001160167) c3(excitatory amine acid transporter 1 isoform 2) c4(65181) c5(65182, 65183, 65184, 65185, 65186, 65187) c6( ) c7(cmC, cZ, dt, cER, ha, bO, axA, dG, uu, V, WY, h, ey, K, dd, akr, yL, rU, ban, fq, bN, hq, aki, ayo); #c1(SLC1A3) c2(NP_001160168) c3(excitatory amine acid transporter 1 isoform 3) c4(65188) c5(65189, 65190, 65191, 65192, 65193, 65194) c6( ) c7(cmC, cZ, dt, cER, ha, bO, axA, dG, uu, V, WY, h, ey, K, dd, akr, yL, rU, ban, fq, bN, hq, aki, ayo); #c1(SLC1A3) c2(NP_001276868) c3(excitatory amine acid transporter 1 isoform 4) c4(108537) c5(108538, 108539, 108540, 108541, 108542, 108543) c6( ) c7(cmC, cZ, dt, cER, ha, bO, axA, dG, uu, V, WY, h, ey, K, dd, akr, yL, rU, ban, fq, bN, hq, aki, ayo); #c1(SLC1A3) c2(NP_001276869) c3(excitatory amine acid transporter 1 isoform 5) c4(108544, 108545) c5(108546, 108547, 108548, 108549, 108550, 108551, 108552, 108553, 108554, 108555, 108556, 108557, 108558, 108559, 108560, 108561) c6( ) c7(cmC, cZ, dt, cER, ha, bO, axA, dG, uu, V, WY, h, ey, K, dd, akr, yL, rU, ban, fq, bN, hq, aki, ayo); #c1(SLC1A3) c2(XP_005248399) c3(excitatory amine acid transporter 1 isoform X1) c4(268373) c5(268374, 268375, 268376, 268377, 268378, 268379) c6( ) c7(cmC, cZ, dt, cER, ha, bO, axA, dG, uu, V, WY, h, ey, K, dd, akr, yL, rU, ban, fq, bN, hq, aki, ayo); #c1(SLC1A4) c2(NP_001180422) c3(neutral amine acid transporter A isoform 2 precursor) c4(74038) c5(74039, 74040, 74041, 74042, 74043, 74044) c6( ) c7(GC, vj, ac, K); #c1(SLC1A4) c2(NP_003029) c3(neutral amine acid transporter A isoform 1) c4(134559, 134560) c5(134561, 134562, 134563, 134564, 134565, 134566, 134567, 134568, 134569, 134570, 134571, 134572) c6( ) c7(GC, vj, ac, K); #c1(SLC1A5) c2(NP_001138616) c3(neutral amine acid transporter B(O) isoform 2) c4( ) c5(57191, 57192, 57193, 57194, 57195) c6( ) c7(T, nI, if, qN, ad, pX, cy, beo, B, Y, ff, aq, en, g, uC, bz, eM, bC, bt, wS, ao, cn); #c1(SLC1A5) c2(NP_001138617) c3(neutral amine acid transporter B(O) isoform 3) c4( ) c5(57196, 57197, 57198, 57199, 57200, 57201) c6( ) c7(T, nI, if, qN, ad, pX, cy, beo, B, Y, ff, aq, en, g, uC, bz, eM, bC, bt, wS, ao, cn); #c1(SLC1A5) c2(NP_005619) c3(neutral amine acid transporter B(O) isoform 1) c4(157981, 157982, 157983, 157984) c5(157985, 157986, 157987, 157988, 157989, 157990, 157991, 157992, 157993, 157994, 157995, 157996, 157997) c6( ) c7(T, nI, if, qN, ad, pX, cy, beo, B, Y, ff, aq, en, g, uC, bz, eM, bC, bt, wS, ao, cn); #c1(SLC1A6) c2(NP_001259017) c3(excitatory amine acid transporter 4 isoform 1) c4( ) c5(96939, 96940, 96941, 96942, 96943, 96944, 96945, 96946, 96947, 96948, 96949, 96950) c6( ) c7(bO, vj, BC, bK, kH); #c1(SLC1A6) c2(XP_006722906) c3(excitatory amine acid transporter 4 isoform X1) c4(294940, 294941, 294942, 294943) c5(294944, 294945, 294946, 294947, 294948, 294949, 294950, 294851, 294952, 294953, 294954, 294955) c6( ) c7(bO, vj, BC, bK, kH); #c1(SLC20A1) c2(NP_005406) c3(sodium-dependent phosphate transporter 1) c4(155773, 155774) c5(155775, 155776, 155777, 155778, 155779, 155780) c6( ) c7(Ly, IT, acz, aYc, bBS, ci, AO, biN, dP, fU, ib, RN, oW, aT, ey, yo, avP, wr, s, aW, CM, wU, OG, hR, lS, im, gT, VK); #c1(SLC20A1) c2(XP_011509988) c3(sodium-dependent phosphate transporter 1 isoform X1) c4( ) c5(300598, 300599, 300600, 300601, 300602, 300603) c6( ) c7(Ly, IT, acz, aYc, bBS, ci, AO, biN, dP, fU, ib, RN, oW, aT, ey, yo, avP, wr, s, aW, CM, wU, OG, hR, lS, im, gT, VK); #c1(SLC20A2) c2(XP_005273670) c3(sodium-dependent phosphate transporter 2 isoform X1) c4(284774) c5(284775, 284776, 284777, 284778, 284779, 284780, 284781, 284782, 284783, 284784, 284785, 284786, 284787, 284788, 284789, 284790, 284791, 284792, 284793, 284794, 284795, 284796, 284797, 284798) c6( ) c7(fU, PW, ib, aYc, aU, an); #c1(SLC20A2) c2(XP_005273672) c3(sodium-dependent phosphate transporter 2 isoform X2) c4(284799, 284800, 284801, 284802) c5( ) c6( ) c7(fU, PW, ib, aYc, aU, an); #c1(SLC20A2) c2(XP_006716453) c3(sodium-dependent phosphate transporter 2 isoform X3) c4( ) c5(290315, 290316, 290317, 290318, 290319, 290320, 290321, 290322, 290323, 290324, 290325, 290326, 290327, 290328) c6( ) c7(fU, PW, ib, aYc, aU, an); #c1(SLC22A1) c2(NP_003048) c3(solute carrier family 22 member 1 isoform a) c4(134655) c5(134656, 134657, 134658, 134659, 134660, 134661) c6( ) c7(bL, dD, fM, bkx, aZ, ea, if, ht, jx, jh, cz, aj, v, eq, ci, eh, jw, J, ad, jz, F, aE, Do, aMb, qp, dV, aT, K, jo, bq, hu, bc, ls, kl, B, iU, vj, fe, aF, hJ, ck, eM, eD, hR, E, y, X); #c1(SLC22A11) c2(NP_060954) c3(solute carrier family 22 member 11) c4(198871) c5(198872, 198873, 198874, 198875, 198876, 198877) c6( ) c7(nD, nH, nn, h, aY, bA); #c1(SLC22A11) c2(XP_011543469) c3(solute carrier family 22 member 11 isoform X2) c4( ) c5(342370) c6( ) c7(nD, nH, nn, h, aY, bA); #c1(SLC22A12) c2(NP_001263255) c3(solute carrier family 22 member 12 isoform c) c4(97101) c5( ) c6( ) c7(nD, nH, nn, E, cES, dy, cgP, ckw, ei); #c1(SLC22A12) c2(NP_001263256) c3(solute carrier family 22 member 12 isoform d) c4(97102) c5(97103, 97104, 97105, 97106, 97107, 97108) c6( ) c7(nD, nH, nn, E, cES, dy, cgP, ckw, ei); #c1(SLC22A12) c2(NP_653186) c3(solute carrier family 22 member 12 isoform a) c4(238971) c5(238972, 238973, 238974, 238975, 238976, 238977) c6( ) c7(nD, nH, nn, E, cES, dy, cgP, ckw, ei); #c1(SLC22A12) c2(NP_700357) c3(solute carrier family 22 member 12 isoform b) c4( ) c5(245919, 245920, 245921, 245922, 245923, 245924) c6( ) c7(nD, nH, nn, E, cES, dy, cgP, ckw, ei); #c1(SLC22A12) c2(XP_006718494) c3(solute carrier family 22 member 12 isoform X2) c4( ) c5(291887) c6( ) c7(nD, nH, nn, E, cES, dy, cgP, ckw, ei); #c1(SLC22A13) c2(NP_004247) c3(solute carrier family 22 member 13) c4(144581, 144582) c5(144583, 144584, 144585, 144586, 144587, 144588, 144589, 144590, 144591, 144592, 144593, 144594) c6( ) c7(es, K); #c1(SLC22A14) c2(NP_004794) c3(solute carrier family 22 member 14) c4(149912) c5(149913, 149914, 149915, 149916, 149917, 149918, 149919, 149920) c6( ) c7(FE); #c1(SLC22A14) c2(XP_006713479) c3(solute carrier family 22 member 14 isoform X2) c4( ) c5(287167, 287168) c6( ) c7(FE); #c1(SLC22A16) c2(NP_149116) c3(solute carrier family 22 member 16) c4(227259, 227260, 227261) c5(227262, 227263, 227264, 227265, 227266, 227267, 227268, 227269, 227270, 227271, 227272, 227273) c6( ) c7(ck, aW, hL, aT, oi, B); #c1(SLC22A16) c2(XP_005267241) c3(solute carrier family 22 member 16 isoform X9) c4(280836) c5(280837, 280838, 280839, 280840, 280841) c6( ) c7(ck, aW, hL, aT, oi, B); #c1(SLC22A16) c2(XP_011534506) c3(solute carrier family 22 member 16 isoform X1) c4(330974, 330975) c5( ) c6( ) c7(ck, aW, hL, aT, oi, B); #c1(SLC22A16) c2(XP_011534507) c3(solute carrier family 22 member 16 isoform X2) c4(330976, 330977) c5(330978, 330979, 330980, 330981, 330982, 330983, 330984, 330985, 330986, 330987, 330988, 330989) c6( ) c7(ck, aW, hL, aT, oi, B); #c1(SLC22A16) c2(XP_011534511) c3(solute carrier family 22 member 16 isoform X6) c4( ) c5(330990) c6( ) c7(ck, aW, hL, aT, oi, B); #c1(SLC22A16) c2(XP_011534512) c3(solute carrier family 22 member 16 isoform X7) c4( ) c5(330991, 330992, 330993, 330994, 330995, 330996, 330997, 330998, 330999, 331000, 331001, 331002, 331003, 331004, 331005, 331006, 331007, 331008) c6( ) c7(ck, aW, hL, aT, oi, B); #c1(SLC22A17) c2(NP_057693) c3(solute carrier family 22 member 17 isoform b) c4(192384) c5(192385, 192386, 192387, 192388, 192389, 192390) c6( ) c7(B, kP, iU, ci, hu, it, eA); #c1(SLC22A17) c2(NP_065105) c3(solute carrier family 22 member 17 isoform a) c4(203948) c5(203949, 203950, 203951, 203952, 203953, 203954, 203955, 203956, 203957, 203958) c6( ) c7(B, kP, iU, ci, hu, it, eA); #c1(SLC22A18) c2(NP_899056) c3(solute carrier family 22 member 18) c4(257900, 257901) c5(257902, 257903, 257904, 257905, 257906, 257907, 257908, 257909, 257910, 257911, 257912) c6( ) c7(T, akc, pf, if, mI, qN, cET, eA, er, bv, av, dE, dV, aT, aPe, aW, ff, LZ, en, g, bz, iO, el, im, fy, cE, B); #c1(SLC22A18) c2(XP_011518442) c3(solute carrier family 22 member 18 isoform X2) c4( ) c5(312503, 312504, 312505) c6( ) c7(T, akc, pf, if, ml, qN, cET, eA, er, bv, av, dE, dV, aT, aPe, aW, ff, LZ, en, g, bz, iO, el, im, fy, cE, B); #c1(SLC22A18) c2(XP_011518444) c3(solute carrier family 22 member 18 isoform X7) c4( ) c5(312506, 312507, 312508, 312509, 312510) c6( ) c7(T, akc, pf, if, ml, qN, cET, eA, er, bv, av, dE, dV, aT, aPe, aW, ff, LZ, en, g, bz, iO, eI, im, fy, cE, B); #c1(SLC22A18AS) c2(NP_001289791) c3(beckwith-Wiedemann syndrome chromosomal region 1 candidate gene B protein isoform b) c4(114626) c5(114627, 114628, 114629, 114630, 114631, 114632, 114633, 114634, 114635, 114636) c6( ) c7(cm, ml); #c1(SLC22A18AS) c2(NP_009036) c3(beckwith-Wiedemann syndrome chromosomal region 1 candidate gene B protein isoform a) c4(170349) c5(170350, 170351, 170352, 170353, 170354, 170355) c6( ) c7(cm, ml); #c1(SLC22A2) c2(NP_003049) c3(solute carrier family 22 member 2) c4(134662, 134663) c5(134664, 134665, 134666, 134667, 134668, 134669, 134670, 134671, 134672, 134673, 134674, 134675) c6( ) c7(bL, T, fM, eR, eX, RC, cz, fd, jh, aj, j, aY, jw, nH, eV, jo, bq, ls, A, iU, zL, t, fq, fP, E, dy, m, bt); #c1(SLC22A23) c2(NP_001273385) c3(solute carrier family 22 member 23 isoform c) c4( ) c5(104812, 104813, 104814, 104815, 104816, 104817) c6( ) c7(dP, fe, iV); #c1(SLC22A23) c2(NP_056297) c3(solute carrier family 22 member 23 isoform a) c4(187005) c5(187006, 187007, 187008, 187009, 187010, 187011, 187012, 187013) c6( ) c7(dP, fe, iV); #c1(SLC22A23) c2(NP_068764) c3(solute carrier family 22 member 23 isoform b) c4(210266) c5(210267, 210268, 210269, 210270, 210271, 210272, 210273, 210274) c6( ) c7(dP, fe, iV); #c1(SLC22A23) c2(XP_005249342) c3(solute carrier family 22 member 23 isoform X2) c4(269239) c5( ) c6( ) c7(dP, fe, iV); #c1(SLC22A24) c2(NP_001129978) c3(solute carrier family 22 member 24 isoform 3) c4(52348) c5(52349, 52350, 52351, 52352, 52353, 52354) c6( ) c7(E); #c1(SLC22A24) c2(NP_775857) c3(solute carrier family 22 member 24 isoform 2) c4(250493) c5(250494, 250495, 250496, 250497, 250498, 250499) c6( ) c7(E); #c1(SLC22A3) c2(NP_068812) c3(solute carrier family 22 member 3) c4(210771, 210772) c5(210773, 210774, 210775, 210776, 210777, 210778, 210779, 210780, 210781, 210782, 210783, 210784) c6( ) c7(Mb, T, aC, wu, KY, aA, cz, n, bB, wV, j, ci, fr, AO, q, ad, eA, iu, asG, BI, F, hd, aE, jz, PI, aT, rO, dL, K, wm, rE, nJ, ae, eL, A, d, UL, vT, HI, aW, aeC, Y, eH, AQ, nO, r, nY, gI, Qm, aq, kp, aF, g, cI, hJ, t, eF, bz, FT, LB, ok, kP, aDX, nB, bE, eM, eD, iA, X, np, Hb, m, gn, adg, IB, it, B, cn, qc); #c1(SLC22A4) c2(NP_003050) c3(solute carrier family 22 member 4) c4(134676) c5(134677, 134678, 134679, 134680, 134681, 134682) c6( ) c7(Dw, aFc, cz, wV, ai, q, wD, xE, cy, Ds, hH, XI, fb, cEU, A, cEV, cr, ge, r, eZ, fe, hp, iV, cm, aNF, ck, aDX, WP, wR, fL, y, bt, xb); #c1(SLC22A5) c2(NP_003051) c3(solute carrier family 22 member 5) c4(134683) c5(134684, 134685, 134686, 134687, 134688, 134689) c6( ) c7(bM, T, jv, Dw, ra, qb, ol, ew, aA, cz, rf, wV, bS, j, v, bX, Eh, cd, wD, cc, oj, aT, Ds, vc, K, hH, fb, HO, mu, A, aW, cEV, cr, ge, r, fe, aF, aot, iV, t, uC, bw, aDX, bo, mx, m, pw, du, y, xb, gq); #c1(SLC22A6) c2(NP_004781) c3(solute carrier family 22 member 6 isoform a) c4(149576) c5(149577, 149578, 149579, 149580, 149581, 149582) c6( ) c7(cz, h, dy, lS, bK, iV, aY); #c1(SLC22A6) c2(NP_695008) c3(solute carrier family 22 member 6 isoform b) c4(245644, 245645) c5(245646, 245647, 245648, 245649, 245650, 245651, 245652, 245653, 245654, 245655, 245656, 245657) c6( ) c7(cz, h, dy, lS, bK, iV, aY); #c1(SLC22A6) c2(NP_695009) c3(solute carrier family 22 member 6 isoform c) c4(245658) c5(245659, 245660, 245661, 245662, 245663, 245664) c6( ) c7(cz, h, dy, lS, bK, iV, aY); #c1(SLC22A6) c2(NP_695010) c3(solute carrier family 22 member 6 isoform d) c4(245665) c5(245666, 245667, 245668, 245669, 245670, 245671) c6( ) c7(cz, h, dy, lS, bK, iV, aY); #c1(SLC22A7) c2(NP_006663) c3(solute carrier family 22 member 7 isoform a) c4(166999, 167000) c5(167001, 167002, 167003, 167004, 167005, 167006, 167007, 167008, 167009, 167010, 167011, 167012) c6( ) c7(hJ, hC, B, eM); #c1(SLC22A7) c2(NP_696961) c3(solute carrier family 22 member 7 isoform b) c4(245703) c5(245704, 245705, 245706, 245707, 245708, 245709) c6( ) c7(hJ, hC, B, eM); #c1(SLC22A7) c2(XP_011512559) c3(solute carrier family 22 member 7 isoform X2) c4(303454) c5( ) c6( ) c7(hJ, hC, B, eM); #c1(SLC22A7) c2(XP_011512563) c3(solute carrier family 22 member 7 isoform XB) c4(303455, 303456) c5( ) c6( ) c7(hJ, hC, B, eM); #c1(SLC22A7) c2(XP_011512564) c3(solute carrier family 22 member 7 isoform X9) c4( ) c5(303457, 303458, 303459, 303460, 303461, 303462, 303463, 303464, 303465, 303466, 303467, 303468) c6( ) c7(hJ, hC, B, eM); #c1(SLC22A7) c2(XP_011512565) c3(solute carrier family 22 member 7 isoform X10) c4( ) c5(303469, 303470, 303471, 303472, 303473, 303474) c6( ) c7(hJ, hC, B, eM); #c1(SLC22A8) c2(NP_001171661) c3(solute carrier family 22 member 8 isoform 1) c4(71203, 71204) c5(71205, 71206, 71207, 71208, 71209, 71210, 71211, 71212, 71213, 71214, 71215, 71216, 71217, 71218, 71219, 71220, 71221) c6( ) c7(ds, cz, lo, dy, yV, bX); #c1(SLC22A8) c2(NP_001171662) c3(solute carrier family 22 member 8 isoform 2) c4(71222) c5(71223, 71224, 71225, 71226, 71227, 71228) c6( ) c7(ds, cz, lo, dy, yV, bX); #c1(SLC22A8) c2(XP_011543666) c3(solute carrier family 22 member 8 isoform X1) c4(342772) c5(342773, 342774, 342775, 342776, 342777) c6( ) c7(ds, cz, lo, dy, yV, bX); #c1(SLC23A1) c2(NP_005838) c3(solute carrier family 23 member 1 isoform a) c4(159791) c5( ) c6( ) c7(T, iV, fR, sQ, s, dH, iW, hI, jh, aA, uo, aq, ut, dL, at, IQ, aDE, K, hJ, aF, B); #c1(SLC23A1) c2(NP_689898) c3(solute carrier family 23 member 1 isoform b) c4(244290, 244291) c5(244292, 244293, 244294, 244295, 244296) c6( ) c7(T, iV, fR, sQ, s, dH, iW, hI, jh, aA, uo, aq, ut, dL, at, IQ, aDE, K, hJ, aF, B); #c1(SLC23A1) c2(XP_005272206) c3(solute carrier family 23 member 1 isoform X2) c4( ) c5(283758, 283759, 283760, 283761, 283762, 283763) c6( ) c7(T, iV, fR, sQ, s, dH, iW, hI, jh, aA, uo, aq, ut, dL, at, IQ, aDE, K, hJ, aF, B); #c1(SLC23A1) c2(XP_011542067) c3(solute carrier family 23 member 1 isoform X1) c4( ) c5(340592, 340593, 340594, 340595, 340596, 340597) c6( ) c7(T, iV, fR, sQ, s, dH, iW, hI, jh, aA, uo, aq, ut, dL, at, IQ, aDE, K, hJ, aF, B); #c1(SLC23A1) c2(XP_011542070) c3(solute carrier family 23 member 1 isoform X6) c4(340598) c5( ) c6( ) c7(T, iV, fR, sQ, s, dH, iW, hI, jh, aA, uo, aq, ut, dL, at, IQ, aDE, K, hJ, aF, B); #c1(SLC23A1) c2(XP_011542071) c3(solute carrier family 23 member 1 isoform X7) c4( ) c5(340599, 340600, 340601, 340602, 340603, 340604, 340605, 340606) c6( ) c7(T, iV, fR, sQ, s, dH, iW, hI, jh, aA, uo, aq, ut, dL, at, IQ, aDE, K, hJ, aF, B); #c1(SLC23A2) c2(NP_005107) c3(solute carrier family 23 member 2) c4(152943, 152944, 152945) c5(152946, 152947, 152948, 152949, 152950, 152951, 152952, 152953, 152954, 152955) c6( ) c7(s, iW, e, hl, jh, aA, at, dL, aF, K, aDE, hJ, cm, n J); #c1(SLC23A2) c2(XP_005260961) c3(solute carrier family 23 member 2 isoform X2) c4( ) c5(277018, 277019, 277020, 277021, 277022, 277023, 277024, 277025, 277026, 277027, 277028, 277029) c6( ) c7(s, iW, e, hI, jh, aA, at, dL, aF, K, aDE, hJ, cm, nJ); #c1(SLC24A1) c2(NP_004718) c3(sodium/potassium/calcium exchanger 1 isoform 1) c4(149058) c5(149059, 149060, 149061, 149062, 149063, 149064) c6( ) c7(dd, cEW, lR, cZ); #c1(SLC24A1) c2(XP_011520522) c3(sodium/potassium/calcium exchanger 1 isoform X3) c4(315450) c5(315451, 315452, 315453, 315454, 315455, 315456, 315457, 315458, 315459, 315460) c6( ) c7(dd, cEW, lR, cZ); #c1(SLC24A1) c2(XP_011520523) c3(sodium/potassium/calcium exchanger 1 isoform X2) c4(315461) c5(315462, 315463, 315464, 315465, 315466, 315467) c6( ) c7(dd, cEW, lR, cZ); #c1(SLC24A2) c2(XP_005251482) c3(sodium/potassium/calcium exchanger 2 isoform X1) c4(270942) c5(270943, 270944, 270945, 270946, 270947, 270948) c6( ) c7(Wb, bM, ac, lR); #c1(SLC24A2) c2(XP_006716813) c3(sodium/potassium/calcium exchanger 2 isoform X2) c4(290489) c5(290490, 290491, 290492, 290493, 290494, 290495) c6( ) c7(Wb, bM, ac, lR); #c1(SLC24A3) c2(NP_065740) c3(sodium/potassium/calcium exchanger 3 precursor) c4(205130) c5(205131, 205132, 205133, 205134, 205135, 205136) c6( ) c7(bM, bgQ, oe, qK, pL, cm, cd); #c1(SLC24A4) c2(NP_705932) c3(sodium/potassium/calcium exchanger 4 isoform 1) c4(246424, 246425) c5(246426, 246427, 246428, 246429, 246430, 246431, 246432, 246433, 246434, 246435, 246436, 246437, 246438) c6( ) c7(bL, cEX, Dy, lR, hk, Y, cz, Ud); #c1(SLC24A4) c2(NP_705933) c3(sodium/potassium/calcium exchanger 4 isoform 2) c4(246439, 246440) c5(246441, 246442, 246443, 246444, 246445, 246446, 246447, 246448, 246449, 246450, 246451, 246452) c6( ) c7(bL, cEX, Dy, lR, hk, Y, cz, Ud); #c1(SLC24A4) c2(NP_705934) c3(sodium/potassium/calcium exchanger 4 isoform 3) c4( ) c5(246453, 246454, 246455, 246456, 246457) c6( ) c7(bL, cEX, Dy, lR, hk, Y, cz, Ud); #c1(SLC24A4) c2(XP_005267399) c3(sodium/potassium/calcium exchanger 4 isoform X6) c4(280966) c5(280967, 280968, 280969, 280970, 280971) c6( ) c7(bL, cEX, Dy, lR, hk, Y, cz, Ud); #c1(SLC24A4) c2(XP_011534738) c3(sodium/potassium/calcium exchanger 4 isoform X1) c4(331201) c5(331202) c6( ) c7(bL, cEX, Dy, lR, hk, Y, cz, Ud); #c1(SLC24A5) c2(NP_995322) c3(sodium/potassium/calcium exchanger 5 precursor) c4(263841, 263842) c5(263843, 263844, 263845, 263846, 263847, 263848, 263849, 263850, 263851, 263852, 263853, 263854) c6( ) c7(W, eR, hk, Y, afQ, aw, ff, cEY, en, aY); #c1(SLC25A1) c2(NP_001243463) c3(tricarboxylate transport protein, mitochondrial isoform b) c4( ) c5(90879) c6( ) c7(T, dA, LX, RX, bB, ci, C, hF, x, PW, agd, ds, iv, iY, bcV, qD, pq, B, cr, gI, ag, Hu, EZ, aot, t, f, lv, bN, ZL, BU, qe, eM, iT, Ip, bE, m, k, ER, pw, bt, wS, LT); #c1(SLC25A1) c2(NP_001274316) c3(tricarboxylate transport protein, mitochondrial isoform c) c4(106219) c5(106220, 106221, 106222, 106223, 106224, 106225, 106226, 106227, 106228, 106229) c6( ) c7(T, dA, LX, RX, bB, ci, C, hF, x, PW, agd, ds, iv, iY, bcV, qD, pq, B, cr, gI, aq, Hu, EZ, ant, t, f, lv, bN, ZL, BU, qe, eM, iT, Ip, bE, m, k, ER, pw, bt, wS, LT); #c1(SLC25A1) c2(NP_005975) c3(tricarboxylate transport protein, mitochondrial isoform a precursor) c4(160923) c5(160924, 160925, 160926, 160927, 160928, 160929, 160930) c6( ) c7(T, dA, LX, RX, bB, ci, C, hF, x, PW, agd, ds, iv, iY, bcV, qD, pq, B, cr, gI, aq, Hu, EZ, aot, t, f, Iv, bN, ZL, BU, qe, eM, iT, lp, bE, m, k, ER, pw, bt, wS, LT); #c1(SLC25A10) c2(NP_001257817) c3(mitochondrial dicarboxylate carrier isoform 1) c4(95664) c5(95665, 95666, 95667, 95668, 95669, 95670) c6( ) c7(zQ, ag, hl, ci, aWY, jj, zP, bIm); #c1(SLC25A10) c2(NP_001257882) c3(mitochondrial dicarboxylate carrier isoform 3) c4( ) c5(95736) c6( ) c7(zQ, ag, hl, ci, aWY, jj, zP, bIm); #c1(SLC25A10) c2(NP_036272) c3(mitochondrial dicarboxylate carrier isoform 2) c4(172768, 172769) c5(172770, 172771, 172772, 172773, 172774, 172775, 172776, 172777, 172778, 172779, 172780, 172781) c6( ) c7(zQ, ag, hl, ci, aWY, jj, zP, bIm); #c1(SLC25A10) c2(XP_005257131) c3(mitochondrial dicarboxylate carrier isoform X1) c4(274704) c5(274705, 274706, 274707, 274708, 274709) c6( ) c7(zQ, ag, hl, ci, aWY, jj, zP, bIm); #c1(SLC25A12) c2(NP_003696) c3(calcium-binding mitochondrial carrier protein Aralar1) c4(140226, 140227) c5(140228, 140229, 140230, 140231, 140232, 140233) c6( ) c7(rz, cEZ, By, cbE, ais, y, bN); #c1(SLC25A12) c2(XP_011510372) c3(calcium-binding mitochondrial carrier protein Aralar1 isoform X3) c4( ) c5(300907, 300908, 300909, 300910, 300911, 300912) c6( ) c7(rz, cEZ, By, cbE, ais, y, bN); #c1(SLC25A13) c2(NP_001153682) c3(calcium-binding mitochondrial carrier protein Aralar2 isoform 1) c4(60848) c5(60849, 60850, 60851, 60852, 60853, 60854) c6( ) c7(cFb, Na, bEN, fc, hl, cFa, bEM, Nc, byM, cP, ais, hJ, jw, B, bN); #c1(SLC25A13) c2(NP_055066) c3(calcium-binding mitochondrial carrier protein Aralar2 isoform 2) c4(178692, 178693) c5(178694, 178695, 178696, 178697, 178698, 178699) c6( ) c7(cFb, Na, bEN, fc, hi, cFa, bEM, Nc, byM, cP, ais, hJ, jw, B, bN); #c1(SLC25A13) c2(XP_006715894) c3(calcium-binding mitochondrial carrier protein Aralar2 isoform X1) c4( ) c5(289886, 289887, 289888, 289889, 289890, 289891) c6( ) c7(cFb, Na, bEN, fc, hl, cFa, bEM, Nc, byM, cP, ais, hJ, jw, B, bN); #c1(SLC25A14) c2(NP_001269124) c3(brain mitochondrial carrier protein 1 isoform 1 precursor) c4(100495, 100496, 100497) c5(100498, 100499, 100500, 100501, 100502, 100503, 100504, 100505, 100506, 100507, 100508, 100509, 100510, 100511, 100512, 100513, 100514, 100515) c6( ) c7(v); #c1(SLC25A14) c2(NP_001269125) c3(brain mitochondrial carrier protein 1 isoform 2 precursor) c4(100516) c5(100517, 100518, 100519, 100520, 100521, 100522, 100523) c6( ) c7(v); #c1(SLC25A14) c2(NP_001269126) c3(brain mitochondrial carrier protein 1 isoform 3 precursor) c4(100524) c5(100525, 100526, 100527, 100528, 100529, 100530) c6( ) c7(v); #c1(SLC25A14) c2(NP_001269127) c3(brain mitochondrial carrier protein 1 isoform 4) c4( ) c5(100531, 100532, 100533, 100534, 100535) c6( ) c7(v); #c1(SLC25A14) c2(XP_011529704) c3(brain mitochondrial carrier protein 1 isoform X1) c4(325334) c5( ) c6( ) c7(v); #c1(SLC25A15) c2(NP_055067) c3(mitochondrial ornithine transporter 1) c4(178700, 178701, 178702) c5(178703, 178704, 178705, 178706, 178707, 178708, 178709, 178710, 178711, 178712, 178713, 178714, 178715, 178716, 178717, 178718, 178719, 178720, 178721, 178722, 178723, 178724, 178725, 178726, 178727, 178728) c6( ) c7(ahW, bDw, aip, cmt, jA, ali, QK, avx); #c1(SLC25A16) c2(XP_006718050) c3(graves disease carrier protein isoform X2) c4(291476) c5(291477, 291478, 291479, 291480, 291481) c6( ) c7(ck, xQ, T, kh, sS, d, c, nO, Jl, aW, aT, aA, fd, aF, fb, bt, jf); #c1(SLC25A16) c2(XP_011538514) c3(graves disease carrier protein isoform X1) c4(336263) c5(336264, 336265, 336266, 336267, 336268, 336269, 336270) c6( ) c7(ck, xQ, T, kh, sS, d, c, nO, Jl, aW, aT, aA, fd, aF, fb, bt, jf); #c1(SLC25A18) c2(NP_001290413) c3(mitochondrial glutamate carrier 2) c4(115380) c5(115381, 115382, 115383, 115384, 115385, 115386, 115387, 115388) c6( ) c7(ae, fr); #c1(SLC25A18) c2(XP_011544451) c3(mitochondrial glutamate carrier 2 isoform X2) c4( ) c5(343604, 343605, 343606) c6( ) c7(ae, fr); #c1(SLC25A19) c2(XP_006722070) c3(mitochondrial thiamine pyrophosphate carrier isoform X1) c4(294568, 294569) c5(294570, 294571, 294572, 294573, 294574, 294575, 294576, 294577, 294578, 294579, 294580, 294581, 294582, 294583, 294584, 294585, 294586, 294587, 294588, 294589, 294590, 294591, 294592, 294593, 294594, 294595, 294596, 294597) c6( ) c7(d, ob, cFc, cm, fu, QK, cFd); #c1(SLC25A2) c2(NP_114153) c3(mitochondrial ornithine transporter 2) c4(222383) c5(222384, 222385, 222386, 222387, 222388, 222389) c6( ) c7(ahW, bDw); #c1(SLC25A20) c2(NP_000378) c3(mitochondrial carnitine/acylcarnitine carrier protein) c4(8302, 8303) c5(8304, 8305, 8306, 8307, 8308, 8309, 8310, 8311, 8312, 8313, 8314, 8315) c6( ) c7(T, id, e, aoE, bGr, cR, aj, v, j, J, qH, dL, bK, K, eL, af, dx, jf, xQ, iF, A, s, cW, ajx, ge, cl, aNJ, pg, cS, pw, be, sZ, B, jr); #c1(SLC25A21) c2(NP_001164641) c3(mitochondrial 2-oxodicarboxylate carrier isoform 2) c4(67121) c5(67122, 67123, 67124, 67125, 67126, 67127) c6( ) c7(bM, T, ha, fd, bB, n, gA, bS, et, ci, q, zo, ad, ip, aT, h, dz, hn, K, ae, et, aW, Y, r, aq, Z, cm, iR, dR, ck, bF, bE, MC, B); #c1(SLC25A21) c2(NP_085134) c3(mitochondrial 2-oxodicarboxylate carrier isoform 1) c4(219388) c5(219389, 219390, 219391, 219392, 219393, 219394) c6( ) c7(bM, T, ha, fd, bB, n, gA, bS, et, ci, q, zo, ad, ip, aT, h, dz, hn, K, ae, et, aW, Y, r, aq, Z, cm, iR, dR, ck, bF, bE, MC, B); #c1(SLC25A22) c2(XP_011518673) c3(mitochondrial glutamate carrier 1 isoform X1) c4(312992, 312993, 312994, 312995, 312996, 312997, 312998, 312999, 313000, 313001, 313002) c5(313003, 313004, 313005, 313006, 313007, 313008, 313009, 313010, 313011, 313012, 313013, 313014, 313015, 313016, 313017, 313018, 313019, 313020, 313021, 313022, 313023, 313024, 313025, 313026, 313027, 313028, 313029, 313030, 313031, 313032, 313033, 313034, 313035, 313036, 313037, 313038, 313039, 313040, 313041, 313042, 313043, 313044, 313045, 313046, 313047, 313048, 313049, 313050, 313051, 313052, 313053, 313054, 313055, 313056, 313057, 313058, 313059, 313060, 313061, 313062, 313063, 313064, 313065, 313066, 313067, 313068, 313069, 313070, 313071, 313072, 313073, 313074, 313075, 313076) c6( ) c7(crP, yr, ha, lm); #c1(SLC25A23) c2(NP_077008) c3(calcium-binding mitochondrial carrier protein SCaMC-3) c4(214715, 214716) c5(214717, 214718, 214719, 214720, 214721, 214722, 214723, 214724, 214725, 214726, 214727, 214728) c6( ) c7(bF, T, K, m, g, t, iu); #c1(SLC25A23) c2(XP_011526579) c3(calcium-binding mitochondrial carrier protein SCaMC-3 isoform X4) c4( ) c5(320874) c6( ) c7(bF, T, K, m, g, t, iu); #c1(SLC25A23) c2(XP_011526585) c3(calcium-binding mitochondrial carrier protein SCaMC-3 isoform X10) c4(320875) c5(320876, 320877, 320878, 320879, 320880) c6( ) c7(bF, T, K, m, g, t, iu); #c1(SLC25A23) c2(XP_011526586) c3(calcium-binding mitochondrial carrier protein SCaMC-3 isoform X11) c4(320881) c5(320882, 320883, 320884, 320885, 320886, 320887) c6( ) c7(bF, T, K, m, g, t, iu); #c1(SLC25A23) c2(XP_011526587) c3(calcium-binding mitochondrial carrier protein SCaMC-3 isoform X12) c4(320888) c5(320889, 320890, 320891, 320892, 320893, 320894) c6( ) c7(bF, T, K, m, g, t, iu); #c1(SLC25A25) c2(NP_001006642) c3(calcium-binding mitochondrial carrier protein SCaMC-2 isoform b) c4(22317) c5(22318, 22319, 22320, 22321, 22322, 22323) c6( ) c7(Na, Y, Nc); #c1(SLC25A25) c2(NP_001006643) c3(calcium-binding mitochondrial carrier protein SCaMC-2 isoform c precursor) c4(22324) c5(22325, 22326, 22327, 22328, 22329, 22330) c6( ) c7(Na, Y, Nc); #c1(SLC25A25) c2(NP_001252543) c3(calcium-binding mitochondrial carrier protein SCaMC-2 isoform 5 precursor) c4(94238) c5(94239, 94240, 94241, 94242, 94243, 94244) c6( ) c7(Na, Y, Nc); #c1(SLC25A25) c2(NP_443133) c3(calcium-binding mitochondrial carrier protein SCaMC-2 isoform a) c4(229589, 229590) c5(229591, 229592, 229593, 229594, 229595, 229596, 229597) c6( ) c7(Na, Y, Nc); #c1(SLC25A25) c2(XP_005251745) c3(calcium-binding mitochondrial carrier protein SCaMC-2 isoform X1) c4(271138) c5(271139, 271140, 271141, 271142, 271143, 271144) c6( ) c7(Na, Y, Nc); #c1(SLC25A25) c2(XP_005251746) c3(calcium-binding mitochondrial carrier protein SCaMC-2 isoform X4) c4( ) c5(271145, 271146, 271147, 271148, 271149) c6( ) c7(Na, Y, Nc); #c1(SLC25A27) c2(NP_001190980) c3(mitochondrial uncoupling protein 4 isoform 2) c4( ) c5(80366) c6( ) c7(bL, cm, V, aM, uu); #c1(SLC25A27) c2(NP_001190981) c3(mitochondrial uncoupling protein 4 isoform 3) c4(80367) c5(80368, 80369, 80370, 80371, 80372, 80373, 80374, 80375, 80376, 80377, 80378, 80379) c6( ) c7(bL, cm, V, aM, uu); #c1(SLC25A27) c2(NP_004268) c3(mitochondrial uncoupling protein 4 isoform 1) c4(144721, 144722) c5(144723, 144724, 144725, 144726, 144727, 144728, 144729, 144730, 144731, 144732, 144733, 144734) c6( ) c7(bL, cm, V, aM, uu); #c1(SLC25A27) c2(XP_005249540) c3(mitochondrial uncoupling protein 4 isoform X1) c4(269542, 269543, 269544, 269545) c5( ) c6( ) c7(bL, cm, V, aM, uu); #c1(SLC25A27) c2(XP_005249542) c3(mitochondrial uncoupling protein 4 isoform X2) c4( ) c5(269546, 269547, 269548, 269549, 269550, 269551, 269552, 269553, 269554, 269555, 269556, 269557, 269558, 269559, 269560, 269561, 269562) c6( ) c7(bL, cm, V, aM, uu); #c1(SLC25A3) c2(NP_002626) c3(phosphate carrier protein, mitochondrial isoform b precursor) c4(130419) c5(130420, 130421, 130422, 130423, 130424, 130425, 130426, 130427, 130428, 130429, 130430, 130431, 130432, 130433, 130434, 130435, 130436, 130437) c6( ) c7(bL, T, yS, aA, cz, aj, dG, v, yO, fr, V, eA, J, ad, av, bza, aT, h, vc, Ou, ey, K, cFe, ae, A, bug, iU, aW, Y, eH, aF, as, pm, eF, t, bz, dr, ck, es, SE, eo, m); #c1(SLC25A3) c2(NP_005879) c3(phosphate carrier protein, mitochondrial isoform a precursor) c4(160081) c5(160082, 160083, 160084, 160085, 160086, 160087, 160088, 160089, 160090, 160091) c6( ) c7(bL, T, yS, aA, cz, aj, dG, v, yO, fr, V, eA, J, ad, av, bza, aT, h, vc, Ou, ey, K, cFe, ae, A, bug, iU, aW, Y, eH, aF, as, pm, eF, t, bz, dr, ck, es, SE, eo, m); #c1(SLC25A36) c2(NP_001098117) c3(solute carrier family 25 member 36 isoform a) c4(41343) c5(41344, 41345, 41346, 41347, 41348, 41349) c6( ) c7(V, aE, ci); #c1(SLC25A36) c2(NP_060625) c3(solute carrier family 25 member 36 isoform b) c4(196891) c5(196892, 196893, 196894, 196895, 196896, 196897) c6( ) c7(V, aE, ci); #c1(SLC25A37) c2(NP_057696) c3(mitoferrin-1) c4(192391) c5(192392, 192393, 192394, 192395, 192396, 192397) c6( ) c7(ID, T, am, dA, hV, fG, aw, fN, aA, bB, n, aj, bS, v, wV, fd, PJ, aY, V, q, amW, J, eA, ip, x, eW, py, aE, fm, M, ZQ, aT, cy, oW, bI, K, zp, ji, bPQ, N, bA, ly, A, d, aW, Y, oV, xs, hl, r, fe, aE, zC, nr, t, lx, eK, ck, es, lt, ac, c, wg, dB, wO, bE, iA, cj, uJ, m, k, fD, IC, aNl, B); #c1(SLC25A38) c2(NP_060345) c3(solute carrier family 25 member 38) c4(195522) c5(195523, 195524, 195525, 195526, 195527, 195528) c6( ) c7(bDt, U, ac, kA); #c1(SLC25A4) c2(NP_001142) c3(ADP/ATP translocase 1) c4(60077) c5(60078, 60079, 60080, 60081, 60082, 60083) c6( ) c7(vq, bM, T, AY, gU, eR, aFc, bO, mS, aNG, sI, pM, bgR, ad, dP, cc, Bc, mW, oj, aT, vH, h, LE, bK, K, dL, mY, mV, cFf, ae, af, awL, cFg, eL, mU, B, d, ND, dH, aW, xs, t, kC, bz, mZ, eK, mX, Qi, akQ, ac, ctb, cA, uw, mx, at, rx, m, mT, Al); #c1(SLC25A40) c2(NP_061331) c3(solute carrier family 25 member 40) c4(200052) c5(200053, 200054, 200055, 200056, 200057, 200058) c6( ) c7(ff, en); #c1(SLC25A41) c2(NP_775908) c3(solute carrier family 25 member 41) c4(250663, 250664) c5(250665, 250666, 250667, 250668, 250669, 250670, 250671, 250672, 250673, 250674, 250675) c6( ) c7(aW, aT); #c1(SLC25A41) c2(XP_011526228) c3(solute carrier family 25 member 41 isoform X1) c4( ) c5(320491) c6( ) c7(aW, aT); #c1(SLC25A42) c2(NP_848621) c3(mitochondrial coenzyme A transporter SLC25A42) c4(254008) c5(254009, 254010, 254011, 254012, 254013, 254014) c6( ) c7(MD); #c1(SLC25A43) c2(NP_660348) c3(solute carrier family 25 member 43) c4(241021, 241022, 241023) c5(241024, 241025, 241026, 241027, 241028, 241029, 241030, 241031, 241032, 241033, 241034, 241035, 241036, 241037, 241038, 241039, 241040, 241041) c6( ) c7(aW, T, bi, bdM, aT); #c1(SLC25A45) c2(NP_001265179) c3(solute carrier family 25 member 45 isoform c) c4(97920) c5(97921, 97922, 97923, 97924, 97925, 97926) c6( ) c7(Y); #c1(SLC25A45) c2(NP_001287749) c3(solute carrier family 25 member 45 isoform d) c4(112788) c5(112789, 112790, 112791, 112792, 112793, 112794) c6( ) c7(Y); #c1(SLC25A45) c2(XP_011543244) c3(solute carrier family 25 member 45 isoform X2) c4(342028) c5(342029, 342030, 342031, 342032, 342033, 342034, 342035, 342036, 342037, 342038, 342039, 342040) c6( ) c7(Y); #c1(SLC25A45) c2(XP_011543250) c3(solute carrier family 25 member 45 isoform X4) c4(342041) c5(342042, 342043, 342044, 342045, 342046, 342047) c6( ) c7(Y); #c1(SLC25A45) c2(XP_011543251) c3(solute carrier family 25 member 45 isoform X1) c4(342048) c5(342049, 342050, 342051, 342052, 342053, 342054, 342055, 342056) c6( ) c7(Y); #c1(SLC25A46) c2(NP_001290178) c3(solute carrier family 25 member 46 isoform 2) c4(115062) c5(115063, 115064, 115065, 115066, 115067, 115068) c6( ) c7(bM, e); #c1(SLC25A46) c2(NP_001290179) c3(solute carrier family 25 member 46 isoform 3) c4(115069, 115070, 115071, 115072) c5(115073, 115074, 115075, 115076, 115077, 115078, 115079, 115080, 115081, 115082, 115083, 115084, 115085, 115086, 115087, 115088, 115089, 115090, 115091, 115092, 115093, 115094, 115095, 115096, 115097, 115098, 115099) c6( ) c7(bM, e); #c1(SLC25A46) c2(NP_620128) c3(solute carrier family 25 member 46 isoform 1) c4(237315) c5(237316, 237317, 237318, 237319, 237320, 237321, 237322) c6( ) c7(bM, e); #c1(SLC25A47) c2(NP_997000) c3(solute carrier family 25 member 47) c4(264923, 264924) c5(264925, 264926, 264927, 264928, 264929, 264930, 264931) c6( ) c7(B); #c1(SLC25A5) c2(NP_001143) c3(ADP/ATP translocase 2) c4(60084) c5(60085, 60086, 60087, 60088, 60089, 60090) c6( ) c7(T, DM, Uc, eR, aNG, ci, nA, ad, cc, kH, aT, K, ae, je, aW, hI, aq, g, pv, es, iM, mx, hr, rK, gT, B); #c1(SLC25A52) c2(NP_001029344) c3(solute carrier family 25 member 52) c4(30788, 30789) c5(30790, 30791, 30792, 30793, 30794, 30795, 30796, 30797, 30798, 30799, 30800, 30801, 30802, 30803, 30804) c6( ) c7(hb, aW, aT); #c1(SLC25A6) c2(NP_001627) c3(ADP/ATP translocase 3) c4(119338, 119339) c5(119340, 119341, 119342, 119343, 119344, 119345, 119346, 119347, 119348, 119349, 119350, 119351) c6( ) c7(d, mx, aFc, bO, h, bK, K, kC); #c1(SLC26A1) c2(NP_071325) c3(sulfate anine transporter 1 isoform a) c4(210983) c5(210984, 210985, 210986, 210987, 210988, 210989, 210990, 210991, 210992, 210993) c6( ) c7(hq, vK, Tl, s, Y, MB, bO, aT, fd, bS, bK, eL, cd, Qe); #c1(SLC26A1) c2(NP_602297) c3(sulfate anion transporter 1 isoform b) c4(235659) c5(235660, 235661, 235662, 235663, 235664, 235665) c6( ) c7(hq, vK, Tl, s, Y, MB, bO, aT, fd, bS, bK, eL, cd, Qe); #c1(SLC26A2) c2(NP_000103) c3(sulfate transporter) c4(1787, 1788) c5(1789, 1790, 1791, 1792, 1793, 1794, 1795, 1796, 1797, 1798, 1799, 1800) c6( ) c7(T, aA, bB, cL, ade, o, XW, av, ib, ry, aT, aQj, cFh, rv, bA, eG, s, cFk, Az, dq, aF, bQ, dr, vK, cFj, eM, bE, cFi, ln); #c1(SLC26A3) c2(XP_011514169) c3(chloride anion exchanger isoform X1) c4(306768, 306769, 306770) c5(306771, 306772, 306773, 306774, 306775, 306776, 306777, 306778, 306779, 306780, 306781, 306782, 306783, 306784, 306785, 306786, 306787, 306788) c6( ) c7(T, al, jx, jh, bB, aj, cFl, V, q, J, hX, AW, fX, Tl, Iv, ry, lz, ju, hD, bzw, KV, d, s, apn, r, akB, dq, aMF, g, hf, iV, dr, gk, vK, bE, Vu, aer, aZL, ln, U, cj, X, eo, B, ao); #c1(SLC26A4) c2(NP_000432) c3(pendrin) c4(8916, 8917, 8918, 8919, 8920) c5(8921, 8922, 8923, 8924, 8925, 8926, 8927, 8928, 8929, 8930, 8931, 8932, 8933, 8934, 8935, 8936, 8937, 8938, 8939, 8940, 8941, 8942, 8943, 8944) c6( ) c7(bDV, bM, T, bCB, akd, fR, aTk, bCy, bzb, cz, hz, auq, j, ci, ad, Vp, b, hd, xy, RN, nX, ry, aMT, aT, hD, h, K, on, yF, bCA, s, aW, Io, bwF, ale, dr, DF, bCJ, ck, cT, vK, wg, nB, auz, mG, ln, at, Hy, i, gT, bt, Bh); #c1(SLC26A4) c2(XP_006716088) c3(pendrin isoform X2) c4( ) c5(290030, 290031, 290032, 290033, 290034, 290035) c6( ) c7(bDV, bM, T, bCB, akd, fR, aTk, bCy, bzb, cz, hz, auq, j, ci, ad, Vp, b, hd, xy, RN, nX, ry, aMT, aT, hD, h, K, on, yF, bCA, s, aW, Io, bwF, ale, dr, DF, bCJ, ck, cT, vK, wg, nB, auz, mG, ln, at, Hy, i, gT, bt, Bh); #c1(SLC26A5) c2(NP_001161434) c3(prestin isoform e) c4(65791, 65792, 65793, 65794) c5(65795, 65796, 65797, 65798, 65799, 65800, 65801, 65802, 65803, 65804, 65805, 65806, 65807, 65808, 65809, 65810, 65811, 65812, 65813, 65814, 65815, 65816, 65817, 65818, 65819, 65820, 65821, 65822, 65823, 65824, 65825, 65826, 65827) c6( ) c7(Kd, vK, ry, ln, gT, cFm, vi); #c1(SLC26A5) c2(NP_996766) c3(prestin isoform b) c4(264487) c5(264488, 264489, 264490, 264491, 264492, 264493) c6( ) c7(Kd, vK, ry, ln, gT, cFm, vi); #c1(SLC26A5) c2(NP_996767) c3(prestin isoform c) c4(264494) c5(264495, 264496, 264497, 264498, 264499, 264500) c6( ) c7(Kd, vK, ry, ln, gT, cFm, vi); #c1(SLC26A5) c2(NP_996768) c3(prestin isoform d) c4(264501) c5(264502, 264503, 264504, 264505, 264506, 264507) c6( ) c7(Kd, vK, ry, ln, gT, cFm, vi); #c1(SLC26A5) c2(XP_011514472) c3(prestin isoform X1) c4(307166, 307167, 307168, 307169) c5(307170, 307171, 307172, 307173, 307174, 307175, 307176, 307177, 307178, 307179, 307180, 307181, 307182, 307183, 307184, 307185, 307186, 307187, 307188) c6( ) c7(Kd, vK, ry, ln, gT, cFm, vi); #c1(SLC26A6) c2(NP_001035544) c3(solute carrier family 26 member 6 isoform 4) c4( ) c5(32911, 32912, 32913, 32914, 32915) c6( ) c7(vK, VJ, s, bpN, Em, MB, cz, HI, aAN); #c1(SLC26A6) c2(NP_001268661) c3(solute carrier family 26 member 6 isoform 5) c4(100092) c5(100093, 100094, 100095, 100096, 100097, 100098) c6( ) c7(vK, VJ, s, bpN, Em, MB, cz, HI, aAN); #c1(SLC26A6) c2(NP_001268662) c3(solute carrier family 26 member 6 isoform 6) c4(100099) c5(100100, 100101, 100102, 100103, 100104, 100105) c6( ) c7(vK, VJ, s, bpN, Em, MB, cz, HI, aAN); #c1(SLC26A6) c2(NP_075062) c3(solute carrier family 26 member 6 isoform 1) c4(213623, 213624) c5(213625, 213626, 213627, 213628, 213629, 213630, 213631) c6( ) c7(vK, VJ, s, bpN, Em, MB, cz, HI, aAN); #c1(SLC26A6) c2(NP_599025) c3(solute carrier family 26 member 6 isoform 2) c4(235593) c5(235594, 235595, 235596, 235597, 235598, 235599) c6( ) c7(vK, VJ, s, bpN, Em, MB, cz, HI, aAN); #c1(SLC26A6) c2(NP_602298) c3(solute carrier family 26 member 6 isoform 3) c4(235666, 235667) c5(235668, 235669, 235670, 235671, 235672, 235673, 235674, 235675, 235676, 235677, 235678, 235679) c6( ) c7(vK, VJ, s, bpN, Em, MB, cz, HI, aAN); #c1(SLC26A7) c2(NP_439897) c3(anion exchange transporter isoform a) c4(229170) c5(229171, 229172, 229173, 229174, 229175, 229176, 229177, 229178, 229179, 229180, 229181, 229182, 229183, 229184, 229185, 229186) c6( ) c7(Hx, vK, VJ, s, Em, bBQ); #c1(SLC26A7) c2(NP_599028) c3(anion exchange transporter isoform b) c4(235607, 235608) c5(235609, 235610, 235611, 235612, 235613, 235614) c6( ) c7(Hx, vK, VJ, s, Em, bBQ); #c1(SLC26A8) c2(NP_001180405) c3(testis anine transporter 1 isoform a) c4(73954) c5(73955, 73956, 73957, 73958, 73959, 73960, 73961, 73962, 73963, 73964) c6( ) c7(gU, ac, VJ, eR, eL, Em, e, eu, aw, h, dL, j, cID, qN, pt, ae, aR, ad); #c1(SLC26A8) c2(NP_619732) c3(testis anion transporter 1 isoform b) c4(237196) c5(237197, 237198, 237199, 237200, 237201, 237202) c6( ) c7(gU, ac, VJ, eR, eL, Em, e, eu, aw, h, dL, j, cID, qN, pt, ae, aR, ad); #c1(SLC26A9) c2(NP_599152) c3(solute carrier family 26 member 9 isoform b) c4(235641, 235642) c5(235643, 235644, 235645, 235646, 235647, 235648, 235649, 235650, 235651, 235652, 235653, 235654, 235655, 235656, 235657, 235658) c6( ) c7(bL, bM, DF, cFp, jx, aMp, aj, cFn, J, cFo, aa); #c1(SLC26A9) c2(XP_011507425) c3(solute carrier family 26 member 9 isoform X3) c4( ) c5(297349, 297350, 297351) c6( ) c7(bL, bM, DF, cFp, jx, aMp, aj, cFn, J, cFo, aa); #c1(SLC27A1) c2(XP_011526304) c3(long-chain fatty acid transport protein 1 isoform X2) c4(320587) c5(320588, 320589, 320590, 320591, 320592, 320593) c6( ) c7(bL, bxy, e, aw, jy, mf, v, ei, dQ, nS); #c1(SLC27A1) c2(XP_011526305) c3(long-chain fatty acid transport protein 1 isoform X1) c4(320594) c5(320595, 320596, 320597, 320598, 320599, 320600, 320601, 320602, 320603, 320604) c6( ) c7(bL, bxy, e, aw, jy, mf, v, ei, dQ, nS); #c1(SLC27A2) c2(NP_001153101) c3(very long-chain acyl-CoA synthetase isoform 2) c4(60428) c5(60429, 60430, 60431, 60432, 60433, 60434, 60435) c6( ) c7(mD, aW, dF, aT, eA, bz, af); #c1(SLC27A2) c2(NP_003636) c3(very long-chain acyl-CoA synthetase isoform 1) c4(139790) c5(139791, 139792, 139793, 139794, 139795, 139796) c6( ) c7(mD, aW, dF, aT, eA, bz, af); #c1(SLC27A3) c2(NP_077306) c3(long-chain fatty acid transport protein 3) c4(215151, 215152) c5(215153, 215154, 215155, 215156, 215157, 215158, 215159, 215160, 215161, 215162, 215163, 215164) c6( ) c7(T, d, dB, Gp, bz, eA); #c1(SLC27A4) c2(NP_005085) c3(long-chain fatty acid transport protein 4) c4(152751, 152752) c5(152753, 152754, 152755, 152756, 152757, 152758, 152759, 152760, 152761, 152762, 152763, 152764) c6( ) c7(bL, cFq, vj, fc, aA, fn, lo, v, aF, ei, nS, aKo, bxJ); #c1(SLC27A5) c2(NP_036386) c3(bile acyl-CoA synthetase precursor) c4(173467) c5(173468, 173469, 173470, 173471, 173472, 173473) c6( ) c7(oO, bL, T, bM, fM, fG, df, hF, bW, h, vB, K, zy, MG, qE, uQ, aKy, aKD, fc, hl, aq, anW, pb, dr, LB, ig, dc, dO, uR, at, Br, dT, fD, ei, B); #c1(SLC28A1) c2(NP_004204) c3(sodium/nucleoside cotransporter 1 isoform 1) c4(144310) c5(144311, 144312, 144313, 144314, 144315, 144316, 144317, 144318, 144319, 144320) c6( ) c7(gV, aC, av, eJ, af, hG, aE, aW, eM, cj, aT, GR, h, bX, g, bt, Cr, B); #c1(SLC28A1) c2(NP_964014) c3(sodium/nucleoside cotransporter 1 isoform 2) c4(262629) c5(262630, 262631, 262632, 262633, 262634, 262635) c6( ) c7(gV, aC, av, eJ, af, hG, aE, aW, eM, cj, aT, GR, h, bX, g, bt, Cr, B); #c1(SLC28A1) c2(XP_011520509) c3(sodium/nucleoside cotransporter 1 isoform X2) c4(315422) c5( ) c6( ) c7(gV, aC, av, eJ, af, hG, aE, aW, eM, cj, aT, GR, h, bX, g, bt, Cr, B); #c1(SLC28A1) c2(XP_011520512) c3(sodium/nucleoside cotransporter 1 isoform X5) c4(315423) c5(315424, 315425, 315426, 315427, 315428, 315429) c6( ) c7(gV, aC, av, eJ, af, hG, aE, aW, eM, cj, aT, GR, h, bX, g, bt, Cr, B); #c1(SLC28A1) c2(XP_011520515) c3(sodium/nucleoside cotransporter 1 isoform X8) c4(315430) c5(315431, 315432, 315433, 315434, 315435, 315436) c6( ) c7(gV, aC, av, eJ, aT, hG, aE, aW, eM, cj, aT, GR, h, bX, g, bt, Cr, B); #c1(SLC28A1) c2(XP_011520519) c3(sodium/nucleoside cotransporter 1 isoform X1) c4(315437) c5(315438, 315439, 315440, 315441, 315442, 315443) c6( ) c7(gV, aC, av, eJ, aT, hG, aE, aW, eM, cj, aT, GR, h, bX, g, bt, Cr, B); #c1(SLC28A1) c2(XP_011520520) c3(sodium/nucleoside cotransporter 1 isoform X11) c4( ) c5(315444, 315445, 315446, 315447, 315448, 315449) c6( ) c7(gV, aC, av, eJ, af, hG, aE, aW, eM, cj, aT, GR, h, bX, g, bt, Cr, B); #c1(SLC28A2) c2(XP_011520500) c3(sodium/nucleoside cotransporter 2 isoform X1) c4(315415) c5(315416, 315417, 315418, 315419, 315420, 315421) c6( ) c7(oW, cj, dy, bq, Cr, GR, vi); #c1(SLC28A3) c2(NP_001186562) c3(solute carrier family 28 member 3) c4(77821, 77822) c5(77823, 77824, 77825, 77826, 77827, 77828, 77829, 77830, 77831, 77832, 77833, 77834) c6( ) c7(gV, hG, jx, oW, cj, h, bq, GR); #c1(SLC29A1) c2(NP_001071643) c3(eguilibrative nucleoside transporter 1 isoform 1) c4( ) c5(35382, 35383, 35384, 35385, 35386, 35387, 35388, 35389, 35390, 35391, 35392, 35393, 35394, 35395, 35396, 35397, 35398, 35399, 35400, 35401, 35402, 35403, 35404, 35405, 35406, 35407, 35408, 35409, 35410, 35411, 35412, 35413, 35414, 35415, 35416) c6( ) c7(aC, jx, eX, Iu, eJ, x, av, F, aE, oW, h, eV, bq, Cr, eu, je, GR, aap, iM, eM, mg, cj, k, fD, bt); #c1(SLC29A1) c2(NP_001291391) c3(eguilibrative nucleoside transporter 1 isoform 5) c4(115859) c5(115860, 115861, 115862, 115863, 115864, 115865) c6( ) c7(aC, jx, eX, Iu, eJ, x, av, F, aE, oW, h, eV, bq, Cr, eu, je, GR, aap, iM, eM, mg, cj, k, fD, bt); #c1(SLC29A1) c2(NP_001291392) c3(eguilibrative nucleoside transporter 1 isoform 2) c4(115866) c5(115867, 115868, 115869) c6( ) c7(aC, jx, eX, Iu, eJ, x, av, F, aE, oW, h, eV, bq, Cr, eu, je, GR, aap, iM, eM, mg, cj, k, fD, bt); #c1(SLC29A1) c2(NP_001291394) c3(eguilibrative nucleoside transporter 1 isoform 3) c4(115876) c5(115877, 115878, 115879, 115880) c6( ) c7(aC, jx, eX, Iu, eJ, x, av, F, aE, oW, h, eV, bq, Cr, eu, je, GR, aap, iM, eM, mg, cj, k, fD, bt); #c1(SLC29A1) c2(NP_001291395) c3(eguilibrative nucleoside transporter 1 isoform 4) c4( ) c5(115881, 115882) c6( ) c7(aC, jx, eX, Iu, eJ, x, av, F, aE, oW, h, eV, bq, Cr, eu, je, GR, aap, iM, eM, mg, cj, k, fD, bt); #c1(SLC29A2) c2(XP_011543277) c3(eguilibrative nucleoside transporter 2 isoform X2) c4(342071) c5(342072, 342073, 342074, 342075, 342076, 342077, 342078, 342079, 342080, 342081, 342082, 342083, 342084, 342085) c6( ) c7(T, PY, jx, dG, hF, x, Cr, af, bVG, Nr, Y, po, bw, GR, Nq, ck, EW, hL, cj, Fk, k, cFr, fD, bt, B); #c1(SLC29A3) c2(NP_060814) c3(eguilibrative nucleoside transporter 3 isoform a) c4(197961) c5(197962, 197963, 197964, 197965, 197966, 197967) c6( ) c7(bGG, T, A, cI, aE, bD, cCL, aj, bS, Lq, et, IQ, mv, Z, aE, Cr, cFs, J, UE); #c1(SLC29A4) c2(XP_006715730) c3(eguilibrative nucleoside transporter 4 isoform X1) c4(289740, 289741) c5(289742, 289743, 289744, 289745, 289746, 289747, 289748, 289749, 289750, 289751, 289752, 289753, 289754, 289755, 289756) c6( ) c7(cy, Cr, aE); #c1(SLC2A10) c2(NP_110404) c3(solute carrier family 2, facilitated glucose transporter member 10) c4(220102) c5(220103, 220104, 220105, 220106, 220107, 220108) c6( ) c7(bL, bM, kh, Av, aj, Ea, rc, J, bW, nd, aT, aSX, bf, aW, nf, g, bz, aSZ, LB, Bv, agI, iu); #c1(SLC2A11) c2(NP_001020109) c3(solute carrier family 2, facilitated glucose transporter member 11 isoform c) c4(28179, 28180) c5(28181, 28182, 28183, 28184, 28185, 28186) c6( ) c7(bL, bf, Av, fd, ae, ad); #c1(SLC2A11) c2(NP_001020110) c3(solute carrier family 2, facilitated glucose transporter member 11 isoform b) c4(28187) c5(28188, 28189, 28190, 28191, 28192, 28193, 28194, 28195, 28196, 28197, 28198, 28199) c6( ) c7(bL, bf, Av, fd, ae, ad); #c1(SLC2A11) c2(NP_001269793) c3(solute carrier family 2, facilitated glucose transporter member 11 isoform d) c4(102837, 102838) c5(102839, 102840, 102841, 102842, 102843, 102844, 102845, 102846, 102847, 102848, 102849, 102850) c6( ) c7(bL, bf, Av, fd, ae, ad); #c1(SLC2A11) c2(NP_110434) c3(solute carrier family 2, facilitated glucose transporter member 11 isoform a) c4(220347) c5(220348, 220349, 220350, 220351, 220352, 220353) c6( ) c7(bL, bf, Av, fd, ae, ad); #c1(SLC2A12) c2(NP_660159) c3(solute carrier family 2, facilitated glucose transporter member 12) c4(240454) c5(240455, 240456, 240457, 240458, 240459, 240460) c6( ) c7(aW, fd, cz, aT, ae, ad); #c1(SLC2A13) c2(NP_443117) c3(proton myo-inositol cotransporter) c4(229513) c5(229514, 229515, 229516, 229517, 229518, 229519) c6( ) c7(T, eM, ff, an, en, im, lB); #c1(SLC2A13) c2(XP_011536152) c3(proton myo-inositol cotransporter isoform X4) c4(333454) c5(333455, 333456, 333457, 333458, 333459, 333460) c6( ) c7(T, eM, ff, an, en, im, lB); #c1(SLC2A14) c2(NP_001273163) c3(solute carrier family 2, facilitated glucose transporter member 14 isoform b) c4(104401, 104402, 104403, 104404, 104405, 104406, 104407) c5(104408, 104409, 104410, 104411, 104412, 104413, 104414, 104415, 104416, 104417, 104418, 104419, 104420, 104421, 104422, 104423, 104424, 104425, 104426, 104427, 104428, 104429, 104430, 104431, 104432, 104433, 104434, 104435, 104436, 104437, 104438, 104439, 104440, 104441, 104442, 104443, 104444, 104445, 104446, 104447, 104448, 104449, 104450, 104451, 104452) c6( ) c7(bL, eP, eX, bB, dG, eA, x, aT, eV, dL, K, hg, nJ, eL, af, d, vT, aW, ff, eZ, ahJ, en, g, as, t, bz, lU, rR, Qy, eM, nB, bE, mg, mf, m, k, iu); #c1(SLC2A14) c2(NP_001273165) c3(solute carrier family 2, facilitated glucose transporter member 14 isoform c) c4(104453) c5(104454, 104455, 104456, 104457, 104458, 104459, 104460, 104461, 104462, 104463, 104464, 104465, 104466, 104467, 104468, 104469) c6( ) c7(bL, eP, eX, bB, dG, eA, x, aT, eV, dL, K, hg, nJ, eL, af, d, vT, aW, ff, eZ, ahJ, en, g, as, t, bz, lU, rR, Qy, eM, nB, bE, mg, mf, m, k, iu); #c1(SLC2A14) c2(NP_001273166) c3(solute carrier family 2, facilitated glucose transporter member 14 isoform d) c4(104470, 104471) c5(104472, 104473, 104474, 104475, 104476, 104477) c6( ) c7(bL, eP, eX, bB, dG, eA, x, aT, eV, dL, K, hg, nJ, eL, af, d, vT, aW, ff, eZ, ahJ, en, g, as, t, bz, lU, rR, Qy, eM, nB, bE, mg, mf, m, k, iu); #c1(SLC2A14) c2(NP_703150) c3(solute carrier family 2, facilitated glucose transporter member 14 isoform a) c4(246020, 246021, 246022) c5(246023, 246024, 246025, 246026, 246027, 246028, 246029, 246030, 246031, 246032, 246033, 246034, 246035, 246036, 246037, 246038, 246039, 246040, 246041, 246042, 246043, 246044) c6( ) c7(bL, eP, eX, bB, dG, eA, x, aT, eV, dL, K, hg, nJ, eL, af, d, vT, aW, ff, eZ, ahJ, en, g, as, t, bz, lU, rR, Qy, eM, nB, bE, mg, mf, m, k, iu); #c1(SLC2A2) c2(NP_000331) c3(solute carrier family 2, facilitated glucose transporter member 2 isoform 1) c4(7196) c5(7197, 7198, 7199, 7200, 7201, 7202, 7203, 7204, 7205, 7206, 7207, 7208, 7209, 7210, 7211, 7212, 7213, 7214, 7215, 7216, 7217, 7218, 7219, 7220, 7221, 7222, 7223, 7224, 7225, 7226, 7227, 7228, 7229, 7230, 7231, 7232, 7233, 7234, 7235, 7236, 7237, 7238, 7239, 7240, 7241, 7242, 7243, 7244, 7245, 7246, 7247, 7248, 7249, 7250, 7251, 7252, 7253, 7254, 7255, 7256, 7257, 7258, 7259, 7260, 7261, 7262, 7263, 7264, 7265, 7266, 7267, 7268, 7269, 7270, 7271, 7272, 7273, 7274, 7275, 7276, 7277, 7278, 7279, 7280, 7281, 7282, 7283, 7284, 7285, 7286, 7287, 7288, 7289, 7290, 7291, 7292, 7293, 7294, 7295, 7296, 7297, 7298, 7299, 7300, 7301, 7302, 7303, 7304, 7305, 7306, 7307, 7308, 7309, 7310, 7311, 7312, 7313, 7314, 7315, 7316, 7317, 7318, 7319, 7320, 7321, 7322, 7323, 7324, 7325, 7326, 7327, 7328, 7329, 7330, 7331, 7332, 7333, 7334, 7335, 7336, 7337, 7338, 7339, 7340) c6( ) c7(bL, T, dD, fM, Uc, e, bB, aj, dG, v, ci, eq, J, mj, mh, cFt, awd, aT, Ps, bq, blX, yo, A, aW, vj, ff, Bw, fc, ahJ, Io, en, bE, Qu, bo, arC, lZ, hR, mf, dy, B, jr); #c1(SLC2A2) c2(NP_001265587) c3(solute carrier family 2, facilitated glucose transporter member 2 isoform 2) c4(98911) c5(98912, 98913, 98914, 98915, 98916, 98917, 98918) c6( ) c7(bL, T, dD, fM, Uc, e, bB, aj, dG, v, ci, eq, J, mj, mh, cFt, awd, aT, Ps, bq, blX, yo, A, aW, vj, ff, Bw, fc, ahJ, Io, en, bE, Qu, bo, arC, lZ, hR, mf, dy, B, jr); #c1(SLC2A3) c2(NP_008862) c3(solute carrier family 2, facilitated glucose transporter member 3) c4(169294, 169295) c5(169296, 169297, 169298, 169299, 169300, 169301, 169302, 169303, 169304, 169305, 169306, 169307, 169308, 169309) c6( ) c7(bL, eP, eX, cz, bB, dG, ci, eA, dP, aT, IG, eV, dL, K, hg, bq, nJ, eL, af, d, vT, aW, vj, fJ, ff, eZ, ahJ, en, g, as, t, bz, lU, rR, Qy, eM, nB, bE, bo, hr, mg, mf, Lb, m, yA, du, iu); #c1(SLC2A4RG) c2(NP_064446) c3(SLC2A4 regulator) c4(202504) c5(202505, 202506, 202507, 202508, 202509, 202510, 202511, 202512, 202513) c6( ) c7(T, jv, dD, yS, aZ, ea, ha, bS, eq, nA, eA, ad, afR, afU, aT, K, bU, afx, ae, kl, aW, Y, g, cm, nC, bz, dr, bN, ck, bE, HK, yA, bt); #c1(SLC2A5) c2(XP_011540307) c3(solute carrier family 2, facilitated glucose transporter member 5 isoform X2) c4( ) c5(338718, 338719, 338720, 338721, 338722, 338723, 338724, 338725, 338726, 338727, 338728, 338729) c6( ) c7(bL, T, aW, ev, aT, cz, aq, ei, ae, B, ad); #c1(SLC2A6) c2(NP_001138571) c3(solute carrier family 2, facilitated glucose transporter member 6 isoform 2) c4(57017) c5(57018, 57019, 57020, 57021, 57022, 57023) c6( ) c7(nD, T, aw, eZ, fd, cES, j, nz); #c1(SLC2A6) c2(NP_060055) c3(solute carrier family 2, facilitated glucose transporter member 6 isoform 1) c4(193916, 193917) c5(193918, 193919, 193920, 193921, 193922, 193923) c6( ) c7(nD, T, aw, eZ, fd, cES, j, nz); #c1(SLC2A6) c2(XP_011516490) c3(solute carrier family 2, facilitated glucose transporter member 6 isoform X1) c4( ) c5(309888, 309889, 309890, 309891, 309892, 309893) c6( ) c7(nD, T, aw, eZ, fd, cES, j, nz); #c1(SLC2A6) c2(XP_011516491) c3(solute carrier family 2, facilitated glucose transporter member 6 isoform X2) c4(309894) c5(309895, 309896, 309897, 309898, 309899, 309900) c6( ) c7(nD, T, aw, eZ, fd, cES, j, nz); #c1(SLC2A8) c2(NP_001258640) c3(solute carrier family 2, facilitated glucose transporter member 8 isoform 2) c4(96246) c5(96247, 96248, 96249, 96250, 96251, 96252) c6( ) c7(fd); #c1(SLC2A8) c2(NP_001258641) c3(solute carrier family 2, facilitated glucose transporter member 8 isoform 3) c4( ) c5(96253, 96254, 96255, 96256, 96257, 96258, 96259, 96260, 96261, 96262, 96263) c6( ) c7(fd); #c1(SLC2A8) c2(NP_055395) c3(solute carrier family 2, facilitated glucose transporter member 8 isoform 1) c4(180760, 180761) c5(180762, 180763, 180764, 180765, 180766, 180767) c6( ) c7(fd); #c1(SLC2A8) c2(XP_006717147) c3(solute carrier family 2, facilitated glucose transporter member 8 isoform X2) c4(290782) c5( ) c6( ) c7(fd); #c1(SLC2A8) c2(XP_011516905) c3(solute carrier family 2, facilitated glucose transporter member 8 isoform X3) c4(310363, 310364, 310365) c5(310366, 310367, 310368, 310369, 310370, 310371, 310372, 310373, 310374, 310375, 310376, 310377, 310378, 310379, 310380, 310381, 310382, 310383, 310384, 310385, 310386, 310387, 310388) c6( ) c7(fd); #c1(SLC2A8) c2(XP_011516906) c3(solute carrier family 2, facilitated glucose transporter member 8 isoform X4) c4(310389, 310390) c5(310391, 310392, 310393, 310394, 310395, 310396, 310397, 310398, 310399, 310400, 310401, 310402) c6( ) c7(fd); #c1(SLC2A9) c2(NP_001001290) c3(solute carrier family 2, facilitated glucose transporter member 9 isoform 2) c4(18141) c5(18142, 18143, 18144, 18145, 18146, 18147, 18148, 18149, 18150, 18151) c6( ) c7(bL, nD, T, nH, nn, Na, cFu, QU, aw, fd, zj, nq, cES, v, j, ei, af, hq); #c1(SLC2A9) c2(NP_064425) c3(solute carrier family 2, facilitated glucose transporter member 9 isoform 1) c4(202422) c5(202423, 202424, 202425, 202426, 202427, 202428) c6( ) c7(bL, nD, T, nH, nn, Na, cFu, QU, aw, fd, zj, nq, cES, v, j, ei, af, hq); #c1(SLC2A9) c2(XP_006714032) c3(solute carrier family 2, facilitated glucose transporter member 9 isoform X13) c4(287510) c5(287511, 287512, 287513, 287514, 287515, 287516) c6( ) c7(bL, nD, T, nH, nn, Na, cFu, QU, aw, fd, zj, nq, cES, v, j, ei, af, hq); #c1(SLC30A1) c2(NP_067017) c3(zinc transporter 1) c4(208389) c5(208390, 208391, 208392, 208393, 208394, 208395) c6( ) c7(pa, mj, aE, af, mr, qt, sO, aW, wL, aT, at, cy, aq, dL, B); #c1(SLC30A10) c2(NP_061183) c3(zinc transporter ID) c4(199823, 199824) c5(199825, 199826, 199827, 199828, 199829, 199830, 199831, 199832, 199833, 199834, 199835, 199836) c6( ) c7(bL, mj, A, yG, yP, Wk, aU, aj, mf, dG, Mz, jy, J, ad, cFv); #c1(SLC30A10) c2(XP_006711500) c3(zinc transporter 10 isoform X1) c4(286040) c5(286041) c6( ) c7(bL, mj, A, yG, yP, Wk, aU, aj, mf, dG, Mz, jy, J, ad, cFv); #c1(SLC30A10) c2(XP_011508029) c3(zinc transporter 10 isoform X2) c4( ) c5(298483, 298484, 298485, 298486, 298487) c6( ) c7(bL, mj, A, yG, yP, Wk, aU, aj, mf, dG, Mz, jy, J, ad, cFv); #c1(SLC30A3) c2(NP_003450) c3(zinc transporter 3) c4(138439) c5(138440, 138441, 138442, 138443, 138444, 138445) c6( ) c7(l, aj, H, J, DF, L); #c1(SLC30A3) c2(XP_005264608) c3(zinc transporter 3 isoform X4) c4(279143) c5(279144, 279145, 279146, 279147, 279148, 279149, 279150, 279151) c6( ) c7(l, aj, H, J, DF, L); #c1(SLC30A3) c2(XP_006712163) c3(zinc transporter 3 isoform X6) c4( ) c5(286480, 286481) c6( ) c7(l, aj, H, J, DF, L); #c1(SLC30A3) c2(XP_011531403) c3(zinc transporter 3 isoform X5) c4(327460, 327461, 327462) c5(327463, 327464, 327465, 327466, 327467, 327468, 327469, 327470, 327471, 327472, 327473, 327474, 327475, 327476, 327477, 327478) c6( ) c7(l, aj, H, J, DF, L); #c1(SLC30A4) c2(XP_011520299) c3(zinc transporter 4 isoform X1) c4(315150) c5(315151, 315152, 315153, 315154, 315155, 315156) c6( ) c7(cFw, pu, Jp, aNN, IG, at, dL, zx, ae, af, ad); #c1(SLC30A5) c2(NP_075053) c3(zinc transporter 5 isoform 1) c4(213592, 213593) c5(213594, 213595, 213596, 213597, 213598, 213599) c6( ) c7(ey, ad); #c1(SLC30A5) c2(NP_076960) c3(zinc transporter 5 isoform 2) c4(214471) c5(214472, 214473, 214474, 214475, 214476, 214477) c6( ) c7(ey, ad); #c1(SLC30A5) c2(XP_005248626) c3(zinc transporter 5 isoform X1) c4( ) c5(268481, 268482, 268483, 268484, 268485, 268486) c6( ) c7(ey, ad); #c1(SLC30A6) c2(NP_001180442) c3(zinc transporter 6 isoform 1) c4(74074) c5(74075, 74076, 74077, 74078, 74079, 74080) c6( ) c7(af, ad); #c1(SLC30A6) c2(NP_001180443) c3(zinc transporter 6 isoform 3) c4(74081) c5(74082, 74083, 74084, 74085, 74086, 74087) c6( ) c7(af, ad); #c1(SLC30A6) c2(NP_001180444) c3(zinc transporter 6 isoform 4) c4(74088, 74089) c5(74090, 74091, 74092, 74093, 74094, 74095) c6( ) c7(af, ad); #c1(SLC30A6) c2(NP_060434) c3(zinc transporter 6 isoform 2) c4(195917) c5(195918, 195919, 195920, 195921, 195922, 195923, 195924) c6( ) c7(af, ad); #c1(SLC30A6) c2(XP_006712111) c3(zinc transporter 6 isoform X5) c4( ) c5(286412, 286413, 286414, 286415, 286416) c6( ) c7(af, ad); #c1(SLC30A6) c2(XP_011531262) c3(zinc transporter 6 isoform X2) c4(327232) c5( ) c6( ) c7(af, ad); #c1(SLC30A6) c2(XP_011531264) c3(zinc transporter 6 isoform X3) c4( ) c5(327233, 327234, 327235, 327236, 327237, 327238) c6( ) c7(af, ad); #c1(SLC30A6) c2(XP_011531265) c3(zinc transporter 6 isoform X4) c4(327239) c5(327240) c6( ) c7(af, ad); #c1(SLC30A7) c2(XP_011539081) c3(zinc transporter 7 isoform X1) c4(337147) c5(337148, 337149, 337150, 337151, 337152, 337153) c6( ) c7(V, it, ht, ad); #c1(SLC30A8) c2(NP_001166286) c3(zinc transporter 8 isoform b) c4( ) c5(68543, 68544, 68545, 68546, 68547) c6( ) c7(bL, bM, dD, aw, yG, jx, aj, dG, j, v, eq, J, ad, mj, ga, h, jy, kI, A, zR, Mz, yP, mf, lS); #c1(SLC30A8) c2(XP_011515183) c3(zinc transporter 8 isoform X2) c4(308016, 308017) c5(308018, 308019, 308020, 308021, 308022, 308023, 308024) c6( ) c7(bL, bM, dD, aw, yG, jx, aj, dG, j, v, eq, J, ad, mj, ga, h, jy, kI, A, zR, Mz, yP, mf, lS); #c1(SLC30A9) c2(NP_006336) c3(zinc transporter 9) c4(164132, 164133) c5(164134, 164135, 164136, 164137, 164138, 164139, 164140, 164141, 164142, 164143, 164144, 164145) c6( ) c7(ad); #c1(SLC31A1) c2(NP_001850) c3(high affinity copper uptake protein 1) c4(121663, 121664) c5(121665, 121666, 121667, 121668, 121669, 121670, 121671, 121672, 121673, 121674, 121675, 121676) c6( ) c7(eY, ae, T, eM, eL, JT, QP, dL, m, nA, t, bz, ad); #c1(SLC31A2) c2(NP_001851) c3(probable low affinity copper uptake protein 2) c4(121677) c5(121678, 121679, 121680, 121681, 121682, 121683) c6( ) c7(T, nv, fd, K, m, t); #c1(SLC32A1) c2(NP_542119) c3(vesicular inhibitory amine acid transporter) c4(231389) c5(231390, 231391, 231392, 231393, 231394, 231395) c6( ) c7(ha, s); #c1(SLC33A1) c2(NP_001177921) c3(acetyl-coenzyme A transporter 1) c4(73162) c5(73163, 73164, 73165, 73166, 73167, 73168, 73169, 73170, 73171, 73172) c6( ) c7(bL, aiZ, dD, Pt, aZ, ea, e, aw, cz, cQ, bS, j, et, Vd, Lw, v, eq, cd, ad, dP, fU, F, aE, wG, Iu, M, aT, vc, K, Fg, cFy, ae, vP, eu, tw, s, aW, Y, ag, uU, Hu, Z, Mu, qa, Qn, eK, cFx, kT, c, U, MM, MJ, dy, B); #c1(SLC34A1) c2(NP_001161051) c3(sodium-dependent phosphate transport protein 2A isoform 2) c4(65229, 65230) c5(65231, 65232, 65233, 65234, 65235, 65236, 65237, 65238, 65239, 65240, 65241, 65242) c6( ) c7(fU, cFA, AB, Tl, eR, ig, cFz, bbM, aAP, gT, awd, hr, cFC, IG, dy, cFB, azh); #c1(SLC34A1) c2(NP_003043) c3(sodium-dependent phosphate transport protein 2A isoform 1) c4(134634) c5(134635, 134636, 134637, 134638, 134639, 134640) c6( ) c7(fU, cFA, AB, Tl, eR, ig, cFz, bbM, aAP, gT, awd, hr, cFC, IG, dy, cFB, azh); #c1(SLC34A2) c2(NP_001171470) c3(sodium-dependent phosphate transport protein 28 isoform b) c4(70209, 70210) c5(70211, 70212, 70213, 70214, 70215, 70216, 70217, 70218, 70219, 70220, 70221, 70222, 70223, 70224, 70225, 70226) c6( ) c7(eM, fV, bsW, bzo, bta, bsS, cFD); #c1(SLC34A2) c2(NP_006415) c3(sodium-dependent phosphate transport protein 28 isoform a) c4(164823, 164824) c5(164825, 164826, 164827, 164828, 164829, 164830, 164831, 164832, 164833, 164834, 164835, 164836) c6( ) c7(eM, fV, bsW, bzo, bta, bsS, cFD); #c1(SLC34A3) c2(NP_001170788) c3(sodium-dependent phosphate transport protein 2C) c4(69536) c5(69537, 69538, 69539, 69540, 69541, 69542, 69543, 69544, 69545, 69546) c6( ) c7(amB, cFA, Tl, Ay, lZ, dq, cFE, cEF, ars, AA, aAN, cFF, aLI); #c1(SLC34A3) c2(XP_011516564) c3(sodium-dependent phosphate transport protein 2C isoform X2) c4( ) c5(309995) c6( ) c7(amB, cFA, Tl, Ay, lZ, dq, cFE, cEF, ars, AA, aAN, cFF, aLI); #c1(SLC35A1) c2(NP_001161870) c3(CMP-sialic acid transporter isoform b) c4(66224, 66225, 66226) c5(66227, 66228, 66229, 66230, 66231, 66232, 66233, 66234, 66235, 66236, 66237, 66238, 66239, 66240, 66241, 66242, 66243, 66244, 66245, 66246, 66247, 66248, 66249) c6( ) c7(aAV, eh, Km, Lo, K, cFG); #c1(SLC35A1) c2(NP_006407) c3(CMP-sialic acid transporter isoform a) c4(164765, 164766, 164767) c5(164768, 164769, 164770, 164771, 164772, 164773, 164774, 164775, 164776, 164777, 164778, 164779, 164780) c6( ) c7(aAV, eh, Km, Lo, K, cFG); #c1(SLC35A2) c2(NP_001027460) c3(UDP-galactose translocator isoform b) c4(30222) c5(30223, 30224, 30225, 30226, 30227, 30228) c6( ) c7(T, qo, pf, ha, ht, bB, q, ad, hX, cFH, byF, dv, aT, dL, lm, hu, ae, eL, PE, aW, hC, bqy, ff, r, aq, en, cI, bE, hL, Km, B, EB); #c1(SLC35A2) c2(NP_001035963) c3(UDP-galactose translocator isoform c) c4(33556, 33557) c5(33558, 33559, 33560, 33561, 33562, 33563, 33564, 33565, 33566, 33567, 33568, 33569) c6( ) c7(T, qo, pf, ha, ht, bB, q, ad, hX, cFH, byF, dv, aT, dL, lm, hu, ae, eL, PE, aW, hC, bqy, ff, r, aq, en, cI, bE, hL, Km, B, EB); #c1(SLC35A2) c2(NP_001269576) c3(UDP-galactose translocator isoform d) c4(102026) c5(102027, 102028, 102029, 102030, 102031, 102032, 102033, 102034, 102035, 102036, 102037, 102038) c6( ) c7(T, qo, pf, ha, ht, bB, q, ad, hX, cFH, byF, dv, aT, dL, lm, hu, ae, eL, PE, aW, hC, bqy, ff, r, aq, en, cI, bE, hL, Km, B, EB); #c1(SLC35A2) c2(NP_001269577) c3(UDP-galactose translocator isoform e) c4(102039) c5(102040, 102041, 102042, 102043, 102044, 102045) c6( ) c7(T, qo, pf, ha, ht, bB, q, ad, hX, cFH, byF, dv, aT, dL, lm, hu, ae, eL, PE, aW, hC, bqy, ff, r, aq, en, cI, bE, hL, Km, B, EB); #c1(SLC35A2) c2(NP_001269578) c3(UDP-galactose translocator isoform f) c4(102046) c5(102047, 102048, 102049, 102050, 102051, 102052, 102053) c6( ) c7(T, qo, pf, ha, ht, bB, q, ad, hX, cFH, byF, dv, aT, dL, lm, hu, ae, eL, PE, aW, hC, bqy, ff, r, aq, en, cI, bE, hL, Km, B, EB); #c1(SLC35A2) c2(NP_001269580) c3(UDP-galactose translocator isoform h) c4(102054) c5(102055, 102056, 102057, 102058, 102059, 102060) c6( ) c7(T, qo, pf, ha, ht, bB, q, ad, hX, cFH, byF, dv, aT, dL, lm, hu, ae, eL, PE, aW, hC, bqy, ff, r, aq, en, cI, bE, hL, Km, B, EB); #c1(SLC35A2) c2(NP_005651) c3(UDP-galactose translocator isoform a) c4(158286, 158287) c5(158288, 158289, 158290, 158291, 158292, 158293) c6( ) c7(T, qo, pf, ha, ht, bB, q, ad, hX, cFH, byF, dv, aT, dL, lm, hu, ae, eL, PE, aW, hC, bqy, ff, r, aq, en, cI, bE, hL, Km, B, EB); #c1(SLC35A3) c2(XP_011539439) c3(UDP-N-acetylglucosamine transporter isoform X3) c4( ) c5(337598, 337599, 337600, 337601, 337602, 337603) c6( ) c7(cFI, W, af); #c1(SLC35A3) c2(XP_011539440) c3(UDP-N-acetylglucosamine transporter isoform X4) c4(337604) c5(337605) c6( ) c7(cFI, W, af); #c1(SLC35A3) c2(XP_011539441) c3(UDP-N-acetylglucosamine transporter isoform X5) c4( ) c5(337606, 337607, 337608, 337609, 337610, 337611) c6( ) c7(cFI, W, af); #c1(SLC35A4) c2(NP_542401) c3(probable UDP-sugar transporter protein SLC35A4) c4(232351) c5(232352, 232353, 232354, 232355, 232356, 232357, 232358, 232359, 232360, 232361, 232362, 232363, 232364, 232365) c6( ) c7(T, B, aW, aT, aF, iu); #c1(SLC35B2) c2(NP_001273442) c3(adenosine 3′-phospho 5′-phosphosulfate transporter 1 isoform d precursor) c4(104896) c5(104897, 104898, 104899, 104900, 104901, 104902) c6( ) c7(T, fM, TY, iW, Of, jh, cj, Og, Od, cFJ); #c1(SLC35B2) c2(NP_001273446) c3(adenosine 3′-phospho 5′-phosphosulfate transporter 1 isoform e) c4( ) c5(104924) c6( ) c7(T, fM, TY, iW, Of, jh, cj, Og, Od, cFJ); #c1(SLC35B2) c2(NP_001273448) c3(adenosine 3′-phospho 5′-phosphosulfate transporter 1 isoform f) c4(104925) c5(104926, 104927, 104928, 104929, 104930) c6( ) c7(T, fM, TY, iW, Of, jh, cj, Og, Od, cFJ); #c1(SLC35B2) c2(NP_835361) c3(adenosine 3′-phospho 5′-phosphosulfate transporter 1 isoform a precursor) c4(253461, 253462) c5(253463, 253464, 253465, 253466, 253467, 253468, 253469, 253470, 253471, 253472, 253473, 253474, 253475) c6( ) c7(T, fM, TY, iW, Of, jh, cj, Og, Od, cFJ); #c1(SLC35B4) c2(NP_116215) c3(UDP-xylose and UDP-N-acetylglucosamine transporter) c4(225816) c5(225817, 225818, 225819, 225820, 225821, 225822) c6( ) c7(v); #c1(SLC35C1) c2(NP_001138738) c3(GDP-fucose transporter 1 isoform b) c4(57502) c5(57503, 57504, 57505, 57506, 57507, 57508, 57509, 57510) c6( ) c7(dr, B, Km); #c1(SLC35C1) c2(NP_060859) c3(GDP-fucose transporter 1 isoform a) c4(198129, 198130, 198131) c5(198132, 198133, 198134, 198135, 198136, 198137, 198138, 198139, 198140, 198141, 198142, 198143, 198144, 198145) c6( ) c7(dr, B, Km); #c1(SLC35C1) c2(XP_011518505) c3(GDP-fucose transporter 1 isoform X2) c4(312589) c5(312590, 312591, 312592, 312593, 312594, 312595, 312596, 312597, 312598, 312599, 312600, 312601) c6( ) c7(dr, B, Km); #c1(SLC35D3) c2(NP_001008783) c3(solute carrier family 35 member D3) c4(23416) c5(23417, 23418, 23419, 23420, 23421, 23422) c6( ) c7(v, IF, ei); #c1(SLC35F1) c2(NP_001025029) c3(solute carrier family 35 member F1) c4(29232) c5(29233, 29234, 29235, 29236, 29237, 29238) c6( ) c7(e, oe, cd, fq); #c1(SLC35F2) c2(NP_059985) c3(solute carrier family 35 member F2) c4(193484. 193485) c5(193486, 193487, 193488, 193489, 193490, 193481, 193492, 193493, 193494, 193495, 193496, 193497, 193498, 193499, 193500, 193501, 193502) c6( ) c7(j, ac); #c1(SLC35F2) c2(XP_005271655) c3(solute carrier family 35 member F2 isoform X1) c4(283515, 283516) c5(283517, 283518, 283519, 283520, 283521, 283522, 283523, 283524, 283525, 283526, 283527) c6( ) c7(j, ac); #c1(SLC35F3) c2(NP_001287774) c3(putative thiamine transporter SLC35F3 isoform 2) c4(112848) c5(112849, 112850, 112851, 112852, 112853, 112854) c6( ) c7(ac, cCU, aw, cz, gv, K, sj); #c1(SLC35F3) c2(NP_775779) c3(putative thiamine transporter SLC35F3 isoform 1) c4(250266) c5(250267, 250268, 250269, 250270, 250271, 250272) c6( ) c7(ac, cCU, aw, cz, gv, K, sj); #c1(SLC35F4) c2(XP_011535022) c3(solute carrier family 35 member F4 isoform X1) c4(331719) c5( ) c6( ) c7(bK, sj); #c1(SLC35F4) c2(XP_011535026) c3(solute carrier family 35 member F4 isoform X5) c4( ) c5(331720, 331721, 331722, 331723, 331724, 331725) c6( ) c7(bK, sj); #c1(SLC35F6) c2(NP_060347) c3(solute carrier family 35 member F6 precursor) c4(195529, 195530) c5(195531, 195532, 195533, 195534, 195535, 195536, 195537, 195538, 195539, 195540, 195541, 195542) c6( ) c7(aC, kp, aE); #c1(SLC35G1) c2(NP_001128130) c3(solute carrier family 35 member G1 isoform 1) c4(49604) c5(49605, 49606, 49607, 49608, 49609, 49610) c6( ) c7(bL, ck, T, bN, LO, jN, h, aj, bS, v, ct, pm, asA, Z, bt, ae, J, ad); #c1(SLC35G1) c2(NP_694958) c3(solute carrier family 35 member G1 isoform 2) c4(245485) c5(245486, 245487, 245488, 245489, 245490, 245491) c6( ) c7(bL, ck, T, bN, LO, jN, h, aj, bS, v, ct, pm, asA, Z, bt, ae, J, ad); #c1(SLC35G2) c2(NP_001091069) c3(solute carrier family 35 member G2) c4(38448) c5(38449, 38450, 38451, 38452, 38453, 38454, 38455, 38456, 38457, 38458) c6( ) c7(Y, fr); #c1(SLC35G5) c2(NP_473369) c3(solute carrier family 35 member G5) c4(230465) c5(230466, 230467, 230468, 230469, 230470, 230471, 230472) c6( ) c7(cO, bL, nX); #c1(SLC35G6) c2(NP_001096084) c3(solute carrier family 35 member G6) c4(41064) c5(41065, 41066, 41067, 41068, 41069, 41070) c6( ) c7(aT); #c1(SLC36A1) c2(NP_510968) c3(proton-coupled amine acid transporter 1) c4( ) c5(231100, 231101, 231102, 231103, 231104, 231105, 231106, 231107) c6( ) c7(aW, cz, ad, yw, aT); #c1(SLC36A1) c2(XP_011535882) c3(proton-coupled amine acid transporter 1 isoform X2) c4(333152, 333153, 333154, 333155, 333156) c5(333157, 333158) c6( ) c7(aW, cz, ad, yw, aT); #c1(SLC36A1) c2(XP_011535897) c3(proton-coupled amine acid transporter 1 isoform X4) c4( ) c5(333159, 333160) c6( ) c7(aW, cz, ad, yw, aT); #c1(SLC36A1) c2(XP_011535898) c3(proton-coupled amine acid transporter 1 isoform X6) c4( ) c5(333161, 333162) c6( ) c7(aW, cz, ad, yw, aT); #c1(SLC36A2) c2(NP_861441) c3(proton-coupled amine acid transporter 2) c4(255572) c5(255573, 255574, 255575, 255576, 255577, 255578, 255579) c6( ) c7(cFK, fq, cFL, hp); #c1(SLC36A2) c2(XP_006714819) c3(proton-coupled amine acid transporter 2 isoform X1) c4(288249) c5(288250, 288251, 288252, 288253, 288254, 288255) c6( ) c7(cFK, fq, cFL, hp); #c1(SLC37A1) c2(NP_061837) c3(glycerol-3-phosphate transporter) c4(200709, 200710) c5(200711, 200712, 200713, 200714, 200715, 200716, 200717, 200718, 200719, 200720, 200721, 200722, 200723, 200724, 200725, 200726, 200727, 200728, 200729, 200730) c6( ) c7(cFM, aT); #c1(SLC37A1) c2(XP_011527917) c3(glycerol-3-phosphate transporter isoform X3) c4( ) c5(323017) c6( ) c7(cFM, aT); #c1(SLC37A2) c2(NP_001138762) c3(sugar phosphate exchanger 2 isoform 2) c4(57588) c5(57589, 57590, 57591, 57592, 57593, 57594) c6( ) c7(v); #c1(SLC37A2) c2(NP_938018) c3(sugar phosphate exchanger 2 isoform 1) c4(259526) c5(259527, 259528, 259529, 259530, 259531, 259532, 259533, 259534, 259535, 259536) c6( ) c7(v); #c1(SLC37A2) c2(XP_011540963) c3(sugar phosphate exchanger 2 isoform X1) c4(339498) c5(339499, 339500, 339501, 339502, 339503, 339504) c6( ) c7(v); #c1(SLC37A4) c2(NP_001157749) c3(glucose-6-phosphate translocase isoform 1) c4(62539) c5(62540, 62541, 62542, 62543, 62544, 62545, 62546, 62547, 62548, 62549, 62550, 62551, 62552, 62553, 62554, 62555, 62556, 62557, 62558, 62559, 62560, 62561, 62562, 62563, 62564, 62565, 62566, 62567, 62568, 62569, 62570, 62571, 62572, 62573, 62574, 62575, 62576, 62577, 62578, 62579, 62580, 62581, 62582, 62583, 62584, 62585, 62586, 62587, 62588, 62589, 62590, 62591, 62592, 62593, 62594, 62595, 62596, 62597, 62598, 62599, 62600, 62601, 62602, 62603, 62604, 62605, 62606, 62607, 62608, 62609, 62610, 62611, 62612, 62613, 62614, 62615, 62616, 62617, 62618, 62619, 62620, 62621, 62622, 62623, 62624, 62625, 62626, 62627, 62628, 62629, 62630, 62631) c6( ) c7(gV, T, mO, d, A, bye, hG, dB, Bw, fQ, dr, afK, aj, EZ, cEG, AE, ex, bq, eA, J); #c1(SLC37A4) c2(NP_001157750) c3(glucose-6-phosphate translocase isoform 2) c4(62632) c5(62633, 62634, 62635, 62636, 62637, 62638) c6( ) c7(gV, T, mO, d, A, bye, hG, dB, Bw, fQ, dr, afK, aj, EZ, cEG, AE, ex, bq, eA, J); #c1(SLC38A1) c2(NP_001265316) c3(sodium-coupled neutral amine acid transporter 1 isoform 1) c4(98240) c5(98241, 98242, 98243, 98244, 98245, 98246, 98247, 98248, 98249, 98250, 98251, 98252, 98253, 98254, 98255, 98256, 98257, 98258) c6( ) c7(azs, T, bM, bO, fd, bB, x, gs, eL, aW, NR, g, ba, eM, nB, cX, bcI, k, m, NT, n, cQ, aj, fr, cd, amJ, h, dL, hB, aOX, fe, hq, Qy, at, it, B, bL, blI, aA, cz, q, J, eA, XX, nv, aT, bK, sX, ae, bkI, avV, s, nO, bg, r, eS, en, cT, vK, iQ, ig, MB, ciA, bt, blu, hS, gx, iW, ha, jh, bS, ad, kL, hX, dP, l, hd, NS, oW, io, BO, ff, eZ, Ej, aF, bz, bF, apM, bE, X, pP, bC, i, hE, iu, y); #c1(SLC38A2) c2(NP_061849) c3(sodium-coupled neutral amine acid transporter 2) c4(200771) c5(200772, 200773, 200774, 200775, 200776, 200777) c6( ) c7(T, s, aW, Y, ha, aT, aA, LA, ey, ci, K, Dz, g, B, ad); #c1(SLC38A4) c2(NP_001137296) c3(sodium-coupled neutral amine acid transporter 4) c4(55335, 55336, 55337, 55338) c5(55339, 55340, 55341, 55342, 55343, 55344, 55345, 55346, 55347, 55348, 55349, 55350, 55351, 55352, 55353, 55354, 55355, 55356, 55357, 55358, 55359, 55360, 55361, 55362, 55363, 55364, 55365, 55366) c6( ) c7(aw, aj, dG, B, ad); #c1(SLC38A5) c2(NP_277053) c3(sodium-coupled neutral amine acid transporter 5) c4(228836, 228837) c5(228838, 228839, 228840, 228841, 228842, 228843, 228844, 228845, 228846, 228847, 228848, 228849, 228850, 228851, 228852, 228853, 228854, 228855, 228856, 228857, 228858, 228859, 228860, 228861, 228862, 228863, 228864, 228865, 228866, 228867, 228868, 228869, 228870, 228871, 228872, 228873, 228874, 228875, 228876, 228877, 228878, 228879, 228880) c6( ) c7(nA); #c1(SLC38A5) c2(XP_005272751) c3(sodium-coupled neutral amine acid transporter 5 isoform X2) c4( ) c5(284176, 284177) c6( ) c7(nA); #c1(SLC38A5) c2(XP_005272754) c3(sodium-coupled neutral amine acid transporter 5 isoform X3) c4(284178, 284179, 284180, 284181, 284182) c5(284183) c6( ) c7(nA); #c1(SLC38A6) c2(NP_001166173) c3(probable sodium-coupled neutral amine acid transporter 6 isoform 1) c4(68414, 68415, 68416) c5(68417, 68418, 68419, 68420, 68421, 68422, 68423, 68424, 68425, 68426, 68427, 68428, 68429, 68430, 68431, 68432, 68433, 68434) c6( ) c7(gx, azs, T, iW, aA, bB, j, q, ad, av, aE, amJ, aT, dL, jj, Od, ae, eL, bkI, avV, s, aW, ff, r, aF, en, cm, iK, bz, fq, cT, apM, bE, B, blu); #c1(SLC38A6) c2(NP_722518) c3(probable sodium-coupled neutral amine acid transporter 6 isoform 2) c4(246779) c5(246780, 246781, 246782, 246783, 246784, 246785) c6( ) c7(gx, azs, T, iW, aA, bB, j, q, ad, av, aE, amJ, aT, dL, jj, Od, ae, eL, bkI, avV, s, aW, ff, r, aF, en, cm, iK, bz, fq, cT, apM, bE, B, blu); #c1(SLC38A7) c2(NP_060701) c3(putative sodium-coupled neutral amine acid transporter 7) c4(197293) c5(197294, 197295, 197296, 197297, 197298, 197299) c6( ) c7(agd, beo, eM, nO, aW, cER, wS, akr, bO, aT, ff, ti, cFK, v, aXd, K, bC, en, he, cFL, qa); #c1(SLC38A8) c2(NP_001073911) c3(putative sodium-coupled neutral amine acid transporter 8) c4(36498) c5(36499, 36500, 36501, 36502, 36503, 36504, 36505) c6( ) c7(KE, coq, cFN, cFO); #c1(SLC38A9) c2(NP_001245215) c3(putative sodium-coupled neutral amine acid transporter 9 isoform 2) c4( ) c5(92731, 92732, 92733, 92734, 92735, 92736) c6( ) c7(cm, aq); #c1(SLC38A9) c2(NP_001245216) c3(putative sodium-coupled neutral amine acid transporter 9 isoform 3) c4(92737) c5(92738, 92739, 92740, 92741, 92742, 92743) c6( ) c7(cm, aq); #c1(SLC38A9) c2(NP_001269358) c3(putative sodium-coupled neutral amine acid transporter 9 isoform 4) c4( ) c5(101270, 101271, 101272, 101273, 101274) c6( ) c7(cm, aq); #c1(SLC38A9) c2(NP_775785) c3(putative sodium-coupled neutral amine acid transporter 9 isoform 1) c4(250280, 250281, 250282, 250283, 250284, 250285) c5(250286, 250287, 250288, 250289, 250290, 250291, 250292, 250293, 250294, 250295, 250296, 250297, 250298, 250299, 250300, 250301) c6( ) c7(cm, aq); #c1(SLC38A9) c2(XP_011541478) c3(putative sodium-coupled neutral amine acid transporter 9 isoform X3) c4(340065) c5( ) c6( ) c7(cm, aq); #c1(SLC38A9) c2(XP_011541481) c3(putative sodium-coupled neutral amine acid transporter 9 isoform X6) c4(340066) c5( ) c6( ) c7(cm, aq); #c1(SLC38A9) c2(XP_011541484) c3(putative sodium-coupled neutral amine acid transporter 9 isoform X8) c4( ) c5(340067, 340068, 340069, 340070, 340071, 340072) c6( ) c7(cm, aq); #c1(SLC38A9) c2(XP_011541486) c3(putative sodium-coupled neutral amine acid transporter 9 isoform X10) c4( ) c5(340073, 340074, 340075, 340076, 340077, 340078, 340079, 340080, 340081, 340082, 340083, 340084, 340085, 340086, 340087, 340088, 340089, 340090, 340091, 340092, 340093, 340094, 340095) c6( ) c7(cm, aq); #c1(SLC39A1) c2(NP_001258888) c3(zinc transporter ZIP1 isoform a) c4(96654, 96655, 96656, 96657, 96658, 96659) c5(96660, 96661, 96662, 96663, 96664, 96665, 96666, 96667, 96668, 96669, 96670, 96671, 96672, 96673, 96674, 96675, 96676, 96677, 96678, 96679, 96680, 96681, 96682, 96683, 96684, 96685, 96686, 96687, 96688, 96689, 96690, 96691, 96692, 96693, 96694, 96695, 96696, 96697, 96698, 96699, 96700, 96701, 96702, 96703, 96704, 96705, 96706, 96707) c6( ) c7(b, dD, ea, Jp, ao, eq, i, ae, ad); #c1(SLC39A10) c2(NP_001120729) c3(zinc transporter ZIP10 precursor) c4(44723, 44724, 44725, 44726, 44727) c5(44728, 44729, 44730, 44731, 44732, 44733, 44734, 44735, 44736, 44737, 44738, 44739, 44740, 44741, 44742, 44743, 44744, 44745, 44746, 44747, 44748) c6( ) c7(yw, yt, aW, aT, Ea, cm, ad); #c1(SLC39A10) c2(XP_011509809) c3(zinc transporter ZIP10 isoform X2) c4( ) c5(300362, 300363, 300364, 300365, 300366, 300367, 300368, 300369, 300370, 300371, 300372, 300373, 300374) c6( ) c7(yw, yt, aW, aT, Ea, cm, ad); #c1(SLC39A11) c2(NP_001153242) c3(zinc transporter ZIP11 isoform 1) c4(60558) c5(60559, 60560, 60561, 60562, 60563, 60564) c6( ) c7(oe, c); #c1(SLC39A11) c2(NP_631916) c3(zinc transporter ZIP11 isoform 2) c4(238328) c5(238329, 238330, 238331, 238332, 238333, 238334) c6( ) c7(oe, c); #c1(SLC39A12) c2(NP_001138667) c3(zinc transporter ZIP12 isoform 1 precursor) c4(57321, 57322) c5(57323, 57324, 57325, 57326, 57327, 57328, 57329, 57330, 57331, 57332, 57333, 57334, 57335) c6( ) c7(fe, Y, oe, ad, cz); #c1(SLC39A12) c2(NP_001269662) c3(zinc transporter ZIP12 isoform 3 precursor) c4(102454) c5(102455, 102456, 102457, 102458, 102459, 102460) c6( ) c7(fe, Y, oe, ad, cz); #c1(SLC39A12) c2(NP_001269663) c3(zinc transporter ZIP12 isoform 4) c4(102461) c5(102462, 102463, 102464, 102465, 102466) c6( ) c7(fe, Y, oe, ad, cz); #c1(SLC39A12) c2(NP_689938) c3(zinc transporter ZIP12 isoform 2 precursor) c4(244401) c5(244402, 244403, 244404, 244405, 244406, 244407) c6( ) c7(fe, Y, oe, ad, cz); #c1(SLC39A13) c2(NP_001121697) c3(zinc transporter ZIP13 isoform a precursor) c4( ) c5(46091, 46092, 46093, 46094, 46095, 46096) c6( ) c7(uo, cFP, Eh, ad, zw); #c1(SLC39A13) c2(NP_689477) c3(zinc transporter ZIP13 isoform b precursor) c4( ) c5(242824, 242825, 242826, 242827, 242828, 242829) c6( ) c7(uo, cFP, Eh, ad, zw); #c1(SLC39A13) c2(XP_006718444) c3(zinc transporter ZIP13 isoform X3) c4(291874) c5( ) c6( ) c7(uo, cFP, Eh, ad, zw); #c1(SLC39A13) c2(XP_011518770) c3(zinc transporter ZIP13 isoform X1) c4(313173) c5( ) c6( ) c7(uo, cFP, Eh, ad, zw); #c1(SLC39A14) c2(NP_001121903) c3(zinc transporter ZIP14 isoform a precursor) c4( ) c5(46328, 46329, 46330, 46331, 46332, 46333, 46334, 46335) c6( ) c7(T, alX, s, Jp, bo, r, fe, abX, KM, q); #c1(SLC39A14) c2(NP_001128626) c3(zinc transporter ZIP14 isoform c precursor) c4(50368) c5(50369, 50370, 50371, 50372, 50373, 50374) c6( ) c7(T, alX, s, Jp, bo, r, fe, abX, KM, q); #c1(SLC39A14) c2(NP_056174) c3(zinc transporter ZIP14 isoform b precursor) c4(186130) c5(186131, 186132, 186133, 186134, 186135, 186136) c6( ) c7(T, alX, s, Jp, bo, r, fe, abX, KM, q); #c1(SLC39A14) c2(XP_005273520) c3(zinc transporter ZIP14 isoform X3) c4(284666) c5(284667, 284668) c6( ) c7(T, alX, s, Jp, bo, r, fe, abX, KM, q); #c1(SLC39A2) c2(NP_055394) c3(zinc transporter ZIP2 isoform a) c4(180753) c5(180754, 180755, 180756, 180757, 180758, 180759) c6( ) c7(bM, dY, aT, vr, at, dL, eL); #c1(SLC39A3) c2(NP_653165) c3(zinc transporter ZIP3 isoform a) c4(238893, 238894) c5(238895, 238896, 238897, 238898, 238899, 238900, 238901, 238902, 238903, 238904, 238905, 238906) c6( ) c7(T, aE, gI, bK, g, eJ); #c1(SLC39A3) c2(NP_998733) c3(zinc transporter ZIP3 isoform b) c4(265797) c5(265798, 265799, 265800, 265801, 265802, 265803) c6( ) c7(T, aE, gI, bK, g, eJ); #c1(SLC39A4) c2(NP_060237) c3(zinc transporter ZIP4 isoform 1) c4(194904) c5(194905, 194906, 194907, 194908, 194909, 194910) c6( ) c7(cFw, xd, T, aC, aE, Ip, Jp, zx, ae, B, dr); #c1(SLC39A4) c2(NP_570901) c3(zinc transporter ZIP4 isoform 2 precursor) c4(234401) c5(234402, 234403, 234404, 234405, 234406, 234407) c6( ) c7(cFw, xd, T, aC, aE, Ip, Jp, zx, ae, B, dr); #c1(SLC39A6) c2(NP_001092876) c3(zinc transporter ZIP6 isoform 2) c4(39693, 39694) c5(39695, 39696, 39697, 39698, 39699, 39700, 39701, 39702, 39703, 39704) c6( ) c7(T, aE, qt, aW, anV, aT, ao, n, aq, it, ci, iR, ae, B, ad); #c1(SLC39A6) c2(NP_036451) c3(zinc transporter ZIP6 isoform 1 precursor) c4( ) c5(173963, 173964, 173965, 173966, 173967, 173968, 173969, 173970) c6( ) c7(T, aE, qt, aW, anV, aT, ao, n, aq, it, ci, iR, ae, B, ad); #c1(SLC39A6) c2(XP_011524203) c3(zinc transporter ZIP6 isoform X1) c4(318735) c5( ) c6( ) c7(T, aE, qt, aW, anV, aT, ao, n, aq, it, ci, iR, ae, B, ad); #c1(SLC39A7) c2(NP_001070984) c3(zinc transporter SLC39A7 isoform 1 precursor) c4(35157, 35158) c5(35159, 35160, 35161, 35162, 35163, 35164, 35165, 35166, 35167, 35168, 35169, 35170, 35171, 35172, 35173, 35174, 35175, 35176, 35177, 35178, 35179, 35180, 35181, 35182, 35183, 35184, 35185, 35186, 35187, 35188, 35189, 35190, 35191, 35192, 35193, 35194, 35195, 35196, 35197, 35198, 35199, 35200, 35201, 35202, 35203, 35204, 35205, 35206, 35207, 35208, 35209, 35210, 35211, 35212, 35213, 35214, 35215, 35216, 35217, 35218, 35219, 35220, 35221, 35222, 35223, 35224, 35225, 35226, 35227, 35228, 35229, 35230, 35231, 35232, 35233, 35234, 35235, 35236, 35237, 35238, 35239, 35240) c6( ) c7(ac, aW, e, aw, eZ, aT, j, eu); #c1(SLC39A7) c2(NP_001275706) c3(zinc transporter SLC39A7 isoform 2) c4(107129, 107130) c5(107131, 107132, 107133, 107134, 107135, 107136, 107137, 107138, 107139, 107140, 107141, 107142, 107143, 107144, 107145, 107146, 107147, 107148, 107149, 107150, 107151) c6( ) c7(ac, aW, e, aw, eZ, aT, j, eu); #c1(SLC39A8) c2(NP_001128618) c3(zinc transporter ZIP8 isoform a precursor) c4(50350) c5(50351, 50352, 50353, 50354, 50355, 50356, 50357, 50358, 50359, 50360) c6( ) c7(dD, ea, oe, r, cz, h, j, eq, ey, aY, fq, g, ad); #c1(SLC39A8) c2(NP_001128619) c3(zinc transporter ZIP8 isoform b precursor) c4(50361) c5(50362, 50363, 50364, 50365, 50366, 50367) c6( ) c7(dD, ea, oe, r, cz, h, j, eq, ey, aY, fq, q, ad); #c1(SLC39A8) c2(XP_011530483) c3(zinc transporter ZIP8 isoform X2) c4( ) c5(326385) c6( ) c7(dD, ea, oe, r, cz, h, j, eq, ey, aY, fq, q, ad); #c1(SLC39A9) c2(NP_001239079) c3(zinc transporter ZIP9 isoform 3) c4(88253) c5(88254, 88255, 88256, 88257, 88258, 88259) c6( ) c7(aW, ae, ad, aT); #c1(SLC39A9) c2(NP_060845) c3(zinc transporter ZIP9 isoform 1) c4(198099) c5(198100, 198101, 198102, 198103, 198104, 198105, 198106, 198107, 198108, 198109) c6( ) c7(aW, ae, ad, aT); #c1(SLC3A1) c2(NP_000332) c3(neutral and basic amine acid transport protein rBAT) c4(7341, 7342, 7343) c5(7344, 7345, 7346, 7347, 7348, 7349, 7350, 7351, 7352, 7353, 7354, 7355, 7356, 7357, 7358, 7359, 7360, 7361) c6( ) c7(beo, eR, th, cW, azB, Bw, cz, vc, ww, j, ey, cFQ, azC, qa, cFR, hq); #c1(SLC3A2) c2(NP_001012680) c3(4F2 cell-surface antigen heavy chain isoform b) c4(25165, 25166, 25167, 25168, 25169) c5(25170, 25171, 25172, 25173, 25174, 25175, 25176, 25177, 25178, 25179, 25180, 25181, 25182, 25183) c6( ) c7(bM, T, Ap, ea, fd, bgs, ame, ci, Qp, aY, bgM, x, bv, boB, K, bU, hu, pk, aDU, lZ, xQ, Pf, aAg, aW, az, apn, cFU, Au, eE, eu, y, iA, iT, go, vA, mx, aep, cj, bAD, k, m, R, hh, BV, dD, akc, QO, Or, aw, yG, ht, n, oY, fr, nA, Tl, cd, ai, tD, Oe, boz, b, cq, pe, xc, cc, ep, h, jy, eV, hn, aXd, ey, Nr, OV, yi, mR, beo, A, Cu, zb, cFT, Ib, Ad, fe, po, Og, yq, CQ, aYo, aKv, bfW, Wt, op, asE, kT, dB, lf, bm, SZ, fL, eo, dI, bD, WI, bL, Ob, aZA, fM, eR, jx, eX, aA, cz, Wa, V, pd, q, zn, bjA, aT, kf, cy, qU, atw, aWs, rO, kU, ae, aol, hM, amx, iU, oV, ev, r, akB, chy, aom, hf, t, Vk, ho, pb, iK, vk, ck, cT, cCI, cl, OW, c, nM, iQ, hc, dy, ij, bt, Ze, chP, vi, BD, bre, Ke, Pt, aD, iW, oA, asa, aHv, jh, eq, fu, hF, tK, mC, aoH, chE, F, fX, py, ds, qh, oj, hD, chX, vc, ji, fb, chN, nJ, iL, apA, yF, uQ, MG, pq, aqa, qZ, xs, Of, cr, eZ, aF, hp, app, jg, iV, iR, YZ, bji, KM, Nq, es, bF, amS, cFS, eB, gZ, aS, DQ, bC, i, IC, hv); #c1(SLC3A2) c2(NP_001012682) c3(4F2 cell-surface antigen heavy chain isoform e) c4(25184) c5(25185, 25186, 25187, 25188, 25189, 25190, 25191) c6( ) c7(bM, T, Ap, ea, fd, bgs, ame, ci, Op, aY, bgM, x, bv, boB, K, bO, hu, pk, aDU, lZ, xQ, Pf, aAg, aW, az, apn, cFU, Au, eE, ou, y, iA, iT, go, vA, mx, aep, cj, bAD, k, m, R, hh, BV, dD, akc, QO, Or, aw, yG, ht, n, oY, fr, nA, Tl, cd, ai, tD, Oe, boz, b, cq, pe, xc, cc, ep, h, jy, eV, hn, aXd, ey, Nr, OV, yi, mR, beo, A, Cu, zb, cFT, Ib, Ad, fe, po, Og, yq, CQ, aYo, aKv, bfW, Wt, op, asE, kT, dB, lf, bm, SZ, fL, eo, dI, bD, Wl, bL, Ob, aZA, fM, eR, jx, eX, aA, cz, Wa, V, pd, q, zn, bjA, aT, kf, cy, qU, atw, aWs, rO, kU, ae, aol, hM, amx, iU, oV, ev, r, akB, chy, aom, hf, t, Vk, ho, pb, iK, vk, ck, cT, cCI, cI, OW, c, nM, iQ, hc, dy, ij, bt, Ze, chP, vi, BD, bre, Ke, Pt, aD, iW, oA, asa, aHv, jh, eq, fu, hF, tK, mC, aoH, chE, F, fX, py, ds, qh, oj, hD, chX, vc, ji, fb, chN, nJ, iL, apA, yF, uQ, MG, pq, aqa, qZ, xs, Of, cr, eZ, aF, hp, app, jg, iV, iR, YZ, bji, KM, Nq, es, bF, amS, cFS, eB, gZ, aS, DQ, bC, i, IC, hv); #c1(SLC3A2) c2(NP_001013269) c3(4F2 cell-surface antigen heavy chain isoform f) c4( ) c5(25450, 25451, 25452, 25453, 25454, 25455, 25456, 25457, 25458, 25459, 25460, 25461, 25462, 25463, 25464) c6( ) c7(bM, T, Ap, ea, fd, bgs, ame, ci, Qp, aY, bgM, x, bv, boB, K, bU, hu, pk, aDU, lZ, xQ, Pf, aAg, aW, az, apn, cFU, Au, eE, ou, y, iA, iT, go, vA, mx, aep, cj, bAD, k, m, R, hh, BV, dD, akc, QO, Or, aw, yG, ht, n, oY, fr, nA, Tl, cd, ai, tD, Oe, boz, b, cq, pe, xc, cc, ep, h, jy, eV, hn, aXd, ey, Nr, OV, yi, mR, beo, A, Cu, zb, cFT, Ib, Ad, fe, po, Og, yq, CQ, aYo, aKv, bfW, Wt, op, asE, kT, dB, lf, bm, SZ, fL, eo, dI, bD, WI, bL, Ob, aZA, fM, eR, jx, eX, aA, cz, Wa, V, pd, q, zn, bjA, aT, kf, cy, qU, atw, aWs, rO, kU, ae, aol, hM, amx, iU, oV, ev, r, akB, chy, aom, hf, t, Vk, ho, pb, iK, vk, ck, cT, cCI, cI, OW, c, nM, iQ, hc, dy, ij, bt, Ze, chP, vi, BD, bre, Ke, Pt, aD, iW, oA, asa, aHv, jh, eq, fu, hF, tK, mC, aoH, chE, F, fX, py, ds, qh, oj, hD, chX, vc, ji, fb, chN, nJ, iL, apA, yF, uQ, MG, pq, aqa, qZ, xs, Of, cr, eZ, aF, hp, app, jg, iV, iR, YZ, bji, KM, Nq, es, bF, amS, cFS, eB, gZ, aS, DQ, bC, i, IC, hv); #c1(SLC3A2) c2(NP_002385) c3(4F2 cell-surface antigen heavy chain isoform c) c4(128030) c5(128031, 128032, 128033, 128034, 128035, 128036) c6( ) c7(bM, T, Ap, ea, fd, bgs, ame, ci, Qp, aY, bgM, x, bv, boB, K, bU, hu, pk, aDU, lZ, xQ, Pf, aAg, aW, az, apn, cFU, Au, eE, ou, y, iA, iT, go, vA, mx, aep, cj, bAD, k, m, R, hh, BV, dD, akc, QO, Or, aw, yG, ht, n, oY, fr, nA, Tl, cd, ai, tD, Oe, boz, b, cq, pe, xc, cc, ep, h, jy, eV, hn, aXd, ey, Nr, OV, yi, mR, beo, A, Cu, zb, cFT, Ib, Ad, fe, po, Oq, yq, CQ, aYo, aKv, bfW, Wt, op, asE, kT, dB, lf, bm, SZ, fL, eo, dI, bD, Wl, bL, Ob, aZA, fM, eR, jx, eX, aA, cz, Wa, V, pd, q, zn, bjA, aT, kf, cy, gU, atw, aWs, rO, kU, ae, aol, hM, amx, iU, oV, ev, r, akB, chy, aom, hf, t, Vk, ho, pb, iK, vk, ck, cT, cCI, cI, OW, c, nM, iQ, hc, dy, ij, bt, Ze, chP, vi, BD, bre, Ke, Pt, aD, iW, oA, asa, aHv, jh, eq, fu, hF, tK, mC, aoH, chE, F, fX, py, ds, qh, oj, hD, chX, vc, ji, fb, chN, nJ, iL, apA, yF, uQ, MG, pq, aqa, qZ, xs, Of, cr, eZ, aF, hp, app, jg, iV, iR, YZ, bji, KM, Nq, es, bF, amS, cFS, eB, gZ, aS, DQ, bC, i, IC, hv); #c1(SLC40A1) c2(NP_055400) c3(solute carrier family 40 member 1) c4(180797, 180798, 180799, 180800, 180801) c5(180802, 180803, 180804, 180805, 180806, 180807, 180808, 180809, 180810, 180811, 180812, 180813, 180814, 180815, 180816, 180817, 180818, 180819, 180820, 180821, 180822, 180823, 180824, 180825, 180826, 180827, 180828, 180829, 180830, 180831, 180832, 180833, 180834, 180835, 180836) c6( ) c7(aI, eX, n, aUX, bHO, dP, yw, oW, aT, yu, eV, aiJ, beo, fc, atI, hI, yy, aq, bxM, dr, bN, BU, rR, aUW, abX, aUU, ao); #c1(SLC40A1) c2(XP_005246562) c3(solute carrier family 40 member 1 isoform X1) c4(267230) c5(267231, 267232, 267233, 267234, 267235) c6( ) c7(aI, eX, n, aUX, bHO, dP, yw, oW, aT, yu, eV, aiJ, beo, fc, atI, hI, yy, aq, bxM, dr, bN, BU, rR, aUW, abX, aUU, ao); #c1(SLC41A1) c2(XP_005245126) c3(solute carrier family 41 member 1 isoform X1) c4(266308) c5(266309, 266310, 266311, 266312, 266313, 266314) c6( ) c7(byf, vm, EP, an); #c1(SLC43A1) c2(NP_001185739) c3(large neutral amine acids transporter small subunit 3) c4(76158, 76159) c5( ) c6( ) c7(py, wu, jh, aeu, wm, ae, ad); #c1(SLC43A1) c2(XP_005274415) c3(large neutral amine acids transporter small subunit 3 isoform X1) c4( ) c5(285067, 285068, 285069, 285070, 285071, 285072, 285073, 285074, 285075, 285076) c6( ) c7(py, wu, jh, aeu, wm, ae, ad); #c1(SLC43A1) c2(XP_011543622) c3(large neutral amine acids transporter small subunit 3 isoform X2) c4( ) c5(342631, 342632, 342633, 342634, 342635, 342636) c6( ) c7(py, wu, jh, aeu, wm, ae, ad); #c1(SLC43A2) c2(NP_001271428) c3(large neutral amine acids transporter small subunit 4 isoform 3) c4(103953) c5(103954, 103955, 103956, 103957, 103958, 103959) c6( ) c7(T, cER, cFL, bO, ti, v, agd, py, aT, aXd, K, akr, he, beo, nO, aW, ff, en, iK, qa, eM, cFK, bC, wS); #c1(SLC43A2) c2(NP_689559) c3(large neutral amine acids transporter small subunit 4 isoform 2) c4(243104) c5(243105, 243106, 243107, 243108, 243109, 243110) c6( ) c7(T, cER, cFL, bO, ti, v, agd, py, aT, aXd, K, akr, he, beo, nO, aW, ff, en, iK, qa, eM, cFK, bC, wS); #c1(SLC43A2) c2(XP_011521948) c3(large neutral amine acids transporter small subunit 4 isoform X1) c4(316644) c5(316645, 316646, 316647, 316648, 316649, 316650) c6( ) c7(T, cER, cFL, bO, ti, v, agd, py, aT, aXd, K, akr, he, beo, nO, aW, ff, en, iK, qa, eM, cFK, bC, wS); #c1(SLC43A2) c2(XP_011521950) c3(large neutral amine acids transporter small subunit 4 isoform X3) c4( ) c5(316651) c6( ) c7(T, cER, cFL, bO, ti, v, agd, py, aT, aXd, K, akr, he, beo, nO, aW, ff, en, iK, qa, eM, cFK, bC, wS); #c1(SLC43A3) c2(NP_001265135) c3(solute carrier family 43 member 3 isoform 2) c4(97830) c5(97831, 97832, 97833, 97834, 97835, 97836, 97837, 97838, 97839, 97840) c6( ) c7(ey); #c1(SLC43A3) c2(NP_054815) c3(solute carrier family 43 member 3 isoform 1) c4(178012, 178013, 178014, 178015, 178016, 178017, 178018, 178019, 178020, 178021, 178022, 178023) c5(178024, 178025, 178026, 178027, 178028, 178029, 178030, 178031, 178032, 178033, 178034, 178035, 178036, 178037, 178038, 178039, 178040, 178041, 178042, 178043, 178044, 178045, 178046, 178047, 178048, 178049, 178050, 178051, 178052, 178053, 178054, 178055, 178056, 178057, 178058, 178059, 178060, 178061, 178062, 178063, 178064, 178065, 178066, 178067, 178068, 178069, 178070, 178071, 178072, 178073, 178074, 178075, 178076, 178077, 178078, 178079, 178080, 178081, 178082, 178083, 178084, 178085, 178086, 178087, 178088, 178089, 178090, 178091, 178092, 178093, 178094, 178095, 178096, 178097, 178098, 178099, 178100, 178101, 178102) c6( ) c7(ey); #c1(SLC44A1) c2(NP_001273659) c3(choline transporter-like protein 1 isoform b) c4(105563, 105564) c5(105565, 105566, 105567, 105568, 105569, 105570, 105571, 105572, 105573, 105574, 105575, 105576) c6( ) c7(cm, ft, eA, U, bz); #c1(SLC44A1) c2(NP_536856) c3(choline transporter-like protein 1 isoform a) c4(231373) c5(231374, 231375, 231376, 231377, 231378, 231379, 231380, 231381) c6( ) c7(cm, ft, eA, U, bz); #c1(SLC44A1) c2(XP_005251912) c3(choline transporter-like protein 1 isoform X2) c4( ) c5(271283, 271284) c6( ) c7(cm, ft, eA, U, bz); #c1(SLC44A1) c2(XP_006717092) c3(choline transporter-like protein 1 isoform X4) c4(290712) c5(290713, 290714, 290715, 290716, 290717, 290718) c6( ) c7(cm, ft, eA, U, bz); #c1(SLC44A2) c2(NP_001138528) c3(choline transporter-like protein 2 isoform 2) c4(56964) c5(56965, 56966, 56967, 56968, 56969, 56970) c6( ) c7(aFA); #c1(SLC44A2) c2(NP_065161) c3(choline transporter-like protein 2 isoform 1) c4(204348) c5(204349, 204350, 204351, 204352, 204353, 204354) c6( ) c7(aFA); #c1(SLC44A2) c2(XP_005260054) c3(choline transporter-like protein 2 isoform X1) c4(276421) c5(276422, 276423, 276424, 276425, 276426, 276427) c6( ) c7(aFA); #c1(SLC44A4) c2(NP_001171515) c3(choline transporter-like protein 4 isoform 2) c4(70392, 70393) c5(70394, 70395, 70396, 70397, 70398, 70399, 70400, 70401, 70402, 70403, 70404, 70405, 70406, 70407, 70408, 70409, 70410, 70411, 70412, 70413, 70414, 70415, 70416, 70417, 70418, 70419, 70420) c6( ) c7(V, A, gv, qj, eZ); #c1(SLC44A4) c2(NP_001171516) c3(choline transporter-like protein 4 isoform 3) c4(70421, 70422) c5(70423, 70424, 70425, 70426, 70427, 70428, 70429, 70430, 70431, 70432, 70433, 70434, 70435, 70436, 70437, 70438, 70439, 70440, 70441, 70442, 70443, 70444, 70445, 70446, 70447, 70448) c6( ) c7(V, A, gv, qj, eZ); #c1(SLC44A4) c2(NP_079533) c3(choline transporter-like protein 4 isoform 1) c4(218645, 218646, 218647, 218648) c5(218649, 218650, 218651, 218652, 218653, 218654, 218655, 218656, 218657, 218658, 218659, 218660, 218661, 218662, 218663, 218664, 218665, 218666, 218667, 218668, 218669, 218670, 218671, 218672, 218673, 218674, 218675, 218676, 218677, 218678, 218679, 218680, 218681, 218682, 218683, 218684, 218685, 218686, 218687, 218688, 218689, 218690, 218691, 218692, 218693, 218694, 218695, 218696, 218697, 218698, 218699, 218700, 218701, 218702, 218703, 218704) c6( ) c7(V, A, gv, qj, eZ); #c1(SLC44A5) c2(XP_011539285) c3(choline transporter-like protein 5 isoform X3) c4(337354) c5( ) c6( ) c7(e, fq, af); #c1(SLC44A5) c2(XP_011539287) c3(choline transporter-like protein 5 isoform X4) c4(337355) c5(337356, 337357, 337358, 337359, 337360, 337361) c6( ) c7(e, fq, af); #c1(SLC45A2) c2(NP_001012527) c3(membrane-associated transporter protein isoform b) c4(25052) c5(25053, 25054, 25055, 25056, 25057, 25058) c6( ) c7(gV, T, bM, n, cFW, q, ad, byF, afQ, aT, ae, ahU, cFV, cp, hG, aW, Y, hC, ff, r, aid, en, bz, ck, sS, atU, Dy, hk, lB); #c1(SLC45A2) c2(NP_001284346) c3(membrane-associated transporter protein isoform c) c4(111720) c5(111721, 111722, 111723, 111724, 111725, 111726, 111727, 111728, 111729, 111730, 111731, 111732) c6( ) c7(gV, T, bM, n, cFW, q, ad, byF, afQ, aT, ae, ahU, cFV, cp, hG, aW, Y, hC, ff, r, aid, en, bz, ck, sS, atU, Dy, hk, lB); #c1(SLC45A2) c2(NP_057264) c3(membrane-associated transporter protein isoform a) c4(189760, 18976L189762) c5(189763, 189764, 189765, 189766, 189767, 189768) c6( ) c7(gV, T, bM, n, cFW, q, ad, byF, afQ, aT, ae, ahU, cFV, cp, hG, aW, Y, hC, ff, r, aid, en, bz, ck, sS, atU, Dy, hk, lB); #c1(SLC45A2) c2(XP_011512353) c3(membrane-associated transporter protein isoform X1) c4(303050) c5(303051, 303052, 303053, 303054, 303055, 303056, 303057, 303058, 303059, 303060, 303061, 303062) c6( ) c7(gV, T, bM, n, cFW, q, ad, byF, afQ, aT, ae, ahU, cFV, cp, hG, aW, Y, hC, ff, r, aid, en, bz, ck, sS, atU, Dy, hk, lB); #c1(SLC45A3) c2(NP_149093) c3(solute carrier family 45 member 3) c4(227103) c5(227104, 227105, 227106, 227107, 227108, 227109) c6( ) c7(bM, T, ci, an, ae, ad); #c1(SLC45A4) c2(NP_001073900) c3(solute carrier family 45 member 4 isoform 2) c4(36362) c5(36363, 36364, 36365, 36366, 36367, 36368, 36369, 36370) c6( ) c7(he, bK); #c1(SLC45A4) c2(NP_001273575) c3(solute carrier family 45 member 4 isoform 1) c4(105331, 105332) c5(105333, 105334, 105335, 105336, 105337, 105338, 105339, 105340, 105341, 105342, 105343, 105344) c6( ) c7(he, bK); #c1(SLC45A4) c2(NP_001273577) c3(solute carrier family 45 member 4 isoform 3) c4(105345) c5(105346, 105347, 105348, 105349, 105350, 105351) c6( ) c7(he, bK); #c1(SLC46A1) c2(NP_001229295) c3(proton-coupled folate transporter isoform 2) c4(84165) c5(84166, 84167, 84168, 84169, 84170, 84171) c6( ) c7(ng, fU, T, mO, ck, dA, yw, bwm, ib, eM, wE, oW, yy, oX, ao); #c1(SLC46A1) c2(NP_542400) c3(proton-coupled folate transporter isoform 1) c4(232344) c5(232345, 232346, 232347, 232348, 232349, 232350) c6( ) c7(ng, fU, T, mO, ck, dA, yw, bwm, ib, eM, wE, oW, yy, oX, ao); #c1(SLC46A2) c2(NP_149040) c3(thymic stromal cotransporter homolog) c4(226896) c5(226897, 226898, 226899, 226900, 226901, 226902) c6( ) c7(if, qN); #c1(SLC47A1) c2(NP_060712) c3(multidrug and toxin extrusion protein 1) c4(197342, 197343, 197344, 197345, 197346, 197347) c5(197348, 197349, 197350, 197351, 197352, 197353, 197354, 197355, 197356, 197357, 197358, 197359, 197360, 197361, 197362, 197363, 197364, 197365, 197366, 197367, 197368, 197369, 197370, 197371, 197372, 197373, 197374, 197375, 197376, 197377, 197378, 197379, 197380, 197381, 197382, 197383, 197384, 197385, 197386, 197387) c6( ) c7(bL, aj, dy, J, SE); #c1(SLC48A1) c2(NP_060312) c3(heme transporter HRG1) c4(195323, 195324) c5(195325, 195326, 195327, 195328, 195329, 195330, 195331, 195332, 195333, 195334, 195335, 195336, 195337, 195338, 195339, 195340, 195341, 195342, 195343, 195344, 195345, 195346, 195347, 195348, 195349, 195350, 195351, 195352, 195353, 195354, 195355, 195356, 195357) c6( ) c7(aW, T, aT); #c1(SLC48A1) c2(XP_005269073) c3(heme transporter HRG1 isoform X2) c4(282292) c5( ) c6( ) c7(aW, T, aT); #c1(SLC48A1) c2(XP_011536860) c3(heme transporter HRG1 isoform X1) c4(334557, 334558) c5(334559) c6( ) c7(aW, T, aT); #c1(SLC4A1) c2(NP_000333) c3(band 3 anine transport protein) c4(7362) c5(7363, 7364, 7365, 7366, 7367, 7368) c6( ) c7(NU, T, eR, cFX, fR, zs, oe, aA, cz, oY, vm, cGc, aY, cGb, eh, yn, cGa, TI, TK, oW, dV, cGd, ajT, aIf, Em, vj, aF, S, g, aot, qs, bqC, eY, BU, VJ, cGe, cFY, fP, oh, pw, Cl, cfR, wS, cFZ); #c1(SLC4A10) c2(NP_001171486) c3(sodium-driven chloride bicarbonate exchanger isoform 1) c4(70293, 70294) c5(70295, 70296, 70297, 70298, 70299, 70300, 70301, 70302, 70303, 70304, 70305) c6( ) c7(acf, aca, pZ, ha, jx, bS, et, nA, Z, aNX); #c1(SLC4A10) c2(NP_001171487) c3(sodium-driven chloride bicarbonate exchanger isoform 3) c4(70306) c5(70307, 70308, 70309, 70310, 70311) c6( ) c7(acf, aca, pZ, ha, jx, bS, et, nA, Z, aNX); #c1(SLC4A10) c2(NP_071341) c3(sodium-driven chloride bicarbonate exchanger isoform 2) c4(211101) c5(211102, 211103, 211104, 211105, 211106) c6( ) c7(acf, aca, pZ, ha, jx, bS, et, nA, Z, aNX); #c1(SLC4A10) c2(XP_005246752) c3(sodium-driven chloride bicarbonate exchanger isoform X9) c4( ) c5(267413) c6( ) c7(acf, aca, pZ, ha, jx, bS, et, nA, Z, aNX); #c1(SLC4A10) c2(XP_006712706) c3(sodium-driven chloride bicarbonate exchanger isoform X6) c4( ) c5(286811) c6( ) c7(acf, aca, pZ, ha, jx, bS, et, nA, Z, aNX); #c1(SLC4A10) c2(XP_011509810) c3(sodium-driven chloride bicarbonate exchanger isoform X1) c4(300375) c5(300376, 300377) c6( ) c7(acf, aca, pZ, ha, jx, bS, et, nA, Z, aNX); #c1(SLC4A10) c2(XP_011509811) c3(sodium-driven chloride bicarbonate exchanger isoform X2) c4(300378) c5(300379, 300380, 300381, 300382, 300383, 300384) c6( ) c7(acf, aca, pZ, ha, jx, bS, et, nA, Z, aNX); #c1(SLC4A10) c2(XP_011509813) c3(sodium-driven chloride bicarbonate exchanger isoform X4) c4(300385) c5(300386, 300387, 300388, 300389, 300390, 300391, 300392) c6( ) c7(acf, aca, pZ, ha, jx, bS, et, nA, Z, aNX); #c1(SLC4A10) c2(XP_011509814) c3(sodium-driven chloride bicarbonate exchanger isoform X5) c4(300393) c5(300394, 300395, 300396, 300397, 300398, 300399) c6( ) c7(acf, aca, pZ, ha, jx, bS, et, nA, Z, aNX); #c1(SLC4A10) c2(XP_011509817) c3(sodium-driven chloride bicarbonate exchanger isoform X10) c4( ) c5(300400, 300401, 300402, 300403, 300404) c6( ) c7(acf, aca, pZ, ha, jx, bS, et, nA, Z, aNX); #c1(SLC4A11) c2(NP_001167560) c3(sodium bicarbonate transporter-like protein 11 isoform 3) c4(69245, 69246) c5(69247, 69248, 69249, 69250, 69251, 69252, 69253, 69254, 69255, 69256, 69257, 69258) c6( ) c7(cGg, Lu, aIH, aOu, cGh, aW, bmD, mG, Ia, cGf, aT, ah, cGj, alI, cGi); #c1(SLC4A11) c2(NP_001167561) c3(sodium bicarbonate transporter-like protein 11 isoform 1) c4(69259) c5(69260, 69261, 69262, 69263, 69264, 69265) c6( ) c7(cGg, Lu, aIH, aOu, cGh, aW, bmD, mG, Ia, cGf, aT, ah, cGj, alI, cGi); #c1(SLC4A11) c2(NP_114423) c3(sodium bicarbonate transporter-like protein 11 isoform 2) c4(222692) c5(222693, 222694, 222695, 222696, 222697, 222698) c6( ) c7(cGg, Lu, aIH, aOu, cGh, aW, bmD, mG, Ia, cGf, aT, ah, cGj, alI, cGi); #c1(SLC4A1AP) c2(NP_060628) c3(kanadaptin) c4(196898) c5(196899, 196900, 196901, 196902, 196903, 196904) c6( ) c7(af); #c1(SLC4A2) c2(NP_001186622) c3(anion exchange protein 2 isoform 2) c4(77988) c5(77989, 77990, 77991, 77992, 77993, 77994) c6( ) c7(jz, ZZ, bE, vj, hI, aA, bB, at, dL, aF, bc); #c1(SLC4A2) c2(NP_001186623) c3(anion exchange protein 2 isoform 3) c4(77995, 77996) c5(77997, 77998, 77999, 78000, 78001, 78002) c6( ) c7(jz, ZZ, bE, vj, hI, aA, bB, at, dL, aF, bc); #c1(SLC4A2) c2(XP_006716157) c3(anion exchange protein 2 isoform X2) c4( ) c5(290106, 290107, 290108, 290109, 290110, 290111, 290112, 290113, 290114, 290115, 290116, 290117, 290118, 290119, 290120, 290121, 290122, 290123, 290124, 290125, 290126, 290127, 290128, 290129, 290130, 290131, 290132, 290133, 290134, 290135) c6( ) c7(jz, ZZ, bE, vj, hI, aA, bB, at, dL, aF, bc); #c1(SLC4A2) c2(XP_011514799) c3(anion exchange protein 2 isoform X1) c4(307447, 307448, 307449, 307450, 307451, 307452) c5(307453, 307454, 307455, 307456, 307457, 307458, 307459, 307460, 307461, 307462, 307463, 307464, 307465, 307466, 307467, 307468) c6( ) c7(jz, ZZ, bE, vj, hI, aA, bB, at, dL, aF, bc); #c1(SLC4A3) c2(NP_005061) c3(anion exchange protein 3 isoform 1) c4(152514) c5(152515, 152516, 152517, 152518, 152519, 152520, 152521, 152522, 152523, 152524, 152525, 152526, 152527, 152528, 152529) c6( ) c7(gZ, nw, ha, aQw); #c1(SLC4A3) c2(NP_963868) c3(anion exchange protein 3 isoform 2) c4(262479) c5(262480) c6( ) c7(gZ, nw, ha, aQw); #c1(SLC4A3) c2(XP_005246846) c3(anion exchange protein 3 isoform X1) c4(267476) c5(267477, 267478, 267479, 267480, 267481, 267482, 267483, 267484, 267485, 267486) c6( ) c7(gZ, nw, ha, aQw); #c1(SLC4A3) c2(XP_005246847) c3(anion exchange protein 3 isoform X4) c4(267487) c5(267488, 267489, 267490, 267491, 267492, 267493) c6( ) c7(gZ, nw, ha, aQw); #c1(SLC4A3) c2(XP_011509969) c3(anion exchange protein 3 isoform X5) c4( ) c5(300593, 300594, 300595, 300596, 300597) c6( ) c7(gZ, nw, ha, aQw); #c1(SLC4A4) c2(NP_001091954) c3(electrogenic sodium bicarbonate cotransporter 1 isoform 1) c4(39003, 39004) c5(39005, 39006, 39007, 39008, 39009, 39010) c6( ) c7(cGl, lR, ajT, DD, zs, cz, cGk, fr, nA, dw, yj, ao); #c1(SLC4A4) c2(NP_001128214) c3(electrogenic sodium bicarbonate cotransporter 1 isoform 3) c4(49713) c5(49714, 49715, 49716, 49717, 49718, 49719, 49720, 49721, 49722, 49723, 49724, 49725) c6( ) c7(cGl, lR, ajT, DD, zs, cz, cGk, fr, nA, dw, yj, ao); #c1(SLC4A4) c2(NP_003750) c3(electrogenic sodium bicarbonate cotransporter 1 isoform 2) c4(140617) c5(140618, 140619, 140620, 140621, 140622, 140623) c6( ) c7(cGl, lR, ajT, DD, zs, cz, cGk, fr, nA, dw, yj, ao); #c1(SLC4A5) c2(NP_067019) c3(electrogenic sodium bicarbonate cotransporter 4 isoform a) c4(208407, 208408, 208409) c5(208410, 208411, 208412, 208413, 208414, 208415, 208416, 208417, 208418, 208419, 208420, 208421, 208422, 208423, 208424, 208425, 208426, 208427, 208428, 208429, 208430, 208431, 208432, 208433, 208434, 208435, 208436, 208437, 208438, 208439, 208440, 208441, 208442, 208443, 208444, 208445, 208446, 208447) c6( ) c7(v, oe, cz); #c1(SLC4A5) c2(NP_597812) c3(electrogenic sodium bicarbonate cotransporter 4 isoform c) c4(235163, 235164, 235165, 235166, 235167, 235168) c5(235169, 235170, 235171, 235172, 235173, 235174, 235175, 235176, 235177, 235178, 235179, 235180, 235181, 235182, 235183, 235184, 235185, 235186, 235187, 235188, 235189, 235190, 235191, 235192, 235193, 235194, 235195, 235196) c6( ) c7(v, oe, cz); #c1(SLC4A7) c2(NP_001245308) c3(sodium bicarbonate cotransporter 3 isoform b) c4(93071, 93072) c5(93073, 93074, 93075, 93076, 93077, 93078, 93079, 93080, 93081, 93082, 93083, 93084, 93085, 93086, 93087, 93088, 93089, 93090, 93091, 93092) c6( ) c7(FK, T, eM, Pt, aW, PE, aT, lB, cE, ao); #c1(SLC4A7) c2(NP_001245309) c3(sodium bicarbonate cotransporter 3 isoform c) c4(93093) c5(93094, 93095, 93096, 93097, 93098, 93099, 93100, 93101, 93102) c6( ) c7(FK, T, eM, Pt, aW, PE, aT, lB, cE, ao); #c1(SLC4A7) c2(NP_003606) c3(sodium bicarbonate cotransporter 3 isoform a) c4(139536) c5(139537, 139538, 139539, 139540, 139541, 139542) c6( ) c7(FK, 1 eM, Pt, aW, PE, aT, lB, cE, ao); #c1(SLC4A7) c2(XP_005265658) c3(sodium bicarbonate cotransporter 3 isoform X15) c4(279654) c5(279655, 279656, 279657, 279658, 279659, 279660, 279661, 279662, 279663, 279664, 279665, 279666, 279667, 279668) c6( ) c7(FK, 1 eM, Pt, aW, PE, aT, lB, cE, ao); #c1(SLC4A7) c2(XP_011532557) c3(sodium bicarbonate cotransporter 3 isoform X1) c4(328652) c5(328653, 328654, 328655, 328656, 328657, 328658) c6( ) c7(FK, T, eM, Pt, aW, PE, aT, lB, cE, ao); #c1(SLC4A7) c2(XP_011532559) c3(sodium bicarbonate cotransporter 3 isoform X4) c4(328659, 328660, 328661) c5(328662, 328663, 328664, 328665, 328666, 328667) c6( ) c7(FK, 1 eM, Pt, aW, PE, aT, lB, cE, ao); #c1(SLC4A7) c2(XP_011532562) c3(sodium bicarbonate cotransporter 3 isoform X7) c4(328668) c5(328669, 328670, 328671, 328672, 328673, 328674, 328675, 328676) c6( ) c7(FK, 1 eM, Pt, aW, PE, aT, lB, cE, ao); #c1(SLC4A7) c2(XP_011532564) c3(sodium bicarbonate cotransporter 3 isoform X9) c4(328677) c5(328678, 328679, 328680, 328681, 328682, 328683) c6( ) c7(FK, 1 eM, Pt, aW, PE, aT, lB, cE, ao); #c1(SLC4A9) c2(NP_001245355) c3(anion exchange protein 4 isoform 3) c4(93228) c5(93229, 93230, 93231, 93232, 93233) c6( ) c7(oV, ft, eM); #c1(SLC4A9) c2(NP_001245356) c3(anion exchange protein 4 isoform 4) c4(93234) c5(93235, 93236, 93237, 93238, 93239) c6( ) c7(oV, ft, eM); #c1(SLC4A9) c2(NP_001245357) c3(anion exchange protein 4 isoform 1) c4(93240) c5( ) c6( ) c7(oV, ft, eM); #c1(SLC4A9) c2(XP_005268578) c3(anion exchange protein 4 isoform X3) c4(281929) c5(281930, 281931, 281932, 281933, 281934, 281935) c6( ) c7(oV, ft, eM); #c1(SLC4A9) c2(XP_006714862) c3(anion exchange protein 4 isoform X12) c4( ) c5(288271) c6( ) c7(oV, ft, eM); #c1(SLC4A9) c2(XP_011535988) c3(anion exchange protein 4 isoform X1) c4( ) c5(333255, 333256, 333257, 333258, 333259, 333260, 333261, 333262, 333263, 333264) c6( ) c7(oV, ft, eM); #c1(SLC4A9) c2(XP_011535992) c3(anion exchange protein 4 isoform X6) c4( ) c5(333265) c6( ) c7(oV, ft, eM); #c1(SLC50A1) c2(NP_001116309) c3(sugar transporter SWEET1 isoform b) c4(43746) c5(43747, 43748, 43749, 43750, 43751, 43752) c6( ) c7(Ni, n, ci, cGm, bD, eW); #c1(SLC50A1) c2(NP_001116311) c3(sugar transporter SWEET1 isoform c) c4(43753) c5(43754, 43755, 43756, 43757, 43758, 43759) c6( ) c7(Ni, n, ci, cGm, bD, eW); #c1(SLC50A1) c2(NP_001274519) c3(sugar transporter SWEET1 isoform h) c4(106602) c5(106603, 106604, 106605, 106606, 106607, 106608) c6( ) c7(Ni, n, ci, cGm, bD, eW); #c1(SLC50A1) c2(NP_061333) c3(sugar transporter SWEET1 isoform a) c4(200102) c5(200103, 200104, 200105, 200106, 200107, 200108) c6( ) c7(Ni, n, ci, cGm, bD, eW); #c1(SLC51A) c2(NP_689885) c3(organic solute transporter subunit alpha) c4(244253) c5(244254, 244255, 244256, 244257, 244258, 244259) c6( ) c7(hJ, be); #c1(SLC51B) c2(NP_849190) c3(organic solute transporter subunit beta) c4(254466) c5(254467, 254468, 254469, 254470, 254471, 254472) c6( ) c7(v, l, bc, u, hJ); #c1(SLC52A1) c2(NP_060456) c3(solute carrier family 52, riboflavin transporter, member 1 precursor) c4(196032, 196033) c5(196034, 196035, 196036, 196037, 196038, 196039, 196040, 196041, 196042, 196043, 196044, 196045, 196046, 196047, 196048, 196049) c6( ) c7(lD, bM, T, Mb, fG, aw, ez, bB, aj, ci, qN, V, cd, ad, J, BY, dP, ke, ai, eA, av, aE, ZX, dv, lC, aT, h, cy, ae, aW, czf, ff, cr, fe, gl, en, g, iV, t, zV, LB, y, xZ, hk, at, Km, m, fD, ra, zB, cE, ao, aZN); #c1(SLC52A2) c2(NP_001240745) c3(solute carrier family 52, riboflavin transporter, member 2) c4(88722, 88723) c5(88724, 88725, 88726, 88727, 88728, 88729, 88730, 88731, 88732, 88733, 88734, 88735, 88736, 88737, 88738, 88739, 88740, 88741, 88742, 88743, 88744, 88745, 88746, 88747, 88748, 88749, 88750, 88751, 88752, 88753, 88754, 88755) c6( ) c7(bM, T, aC, fG, aA, bB, n, wV, MC, j, ci, C, fu, fr, rc, ad, ady, bv, av, jz, F, aE, vJ, aT, ae, af, cp, aa, mH, OV, d, B, nO, aW, Y, auM, az, eZ, lo, aF, cGn, cl, iK, bz, bdu, LB, ck, EW, es, iA, bpY, bE, acS, uR, hL, cGo, at, aiS, m, fD, ckG, y, bt, cE, X); #c1(SLC52A2) c2(XP_011515602) c3(solute carrier family 52, riboflavin transporter, member 2 isoform X2) c4( ) c5(308449, 308450, 308451, 308452, 308453, 308454) c6( ) c7(bM, T, aC, fG, aA, bB, n, wV, MC, j, ci, C, fu, fr, rc, ad, ady, bv, av, jz, F, aE, vJ, aT, ae, af, cp, aa, mH, OV, d, B, nO, aW, Y, auM, az, eZ, lo, aF, cGn, cl, iK, bz, bdu, LB, ck, EW, es, iA, bpY, bE, acS, uR, hL, cGo, at, aiS, m, fD, ckG, y, bt, cE, X); #c1(SLC52A3) c2(XP_011527450) c3(solute carrier family 52, riboflavin transporter, member 3 isoform X1) c4(322214, 322215) c5(322216, 322217, 322218, 322219, 322220, 322221, 322222, 322223, 322224, 322225, 322226, 322227, 322228) c6( ) c7(biq, c, pf, Ol, ff, ht, gX, cGq, cGn, hu, en, it, cn, cGp); #c1(SLC5A1) c2(NP_000334) c3(sodium/glucose cotransporter 1 isoform 1) c4(7369, 7370) c5(7371, 7372, 7373, 7374, 7375, 7376, 7377, 7378, 7379, 7380, 7381, 7382) c6( ) c7(bL, T, A, s, vj, lz, eft, arC, jN, lZ, gZ, if, j, K, g, lm, cgu); #c1(SLC5A11) c2(NP_001245340) c3(sodium/myo-inositol cotransporter 2 isoform 2) c4(93138) c5(93139, 93140, 93141, 93142, 93143, 93144) c6( ) c7(lp, aj, kl, eZ); #c1(SLC5A11) c2(NP_001245341) c3(sodium/myo-inositol cotransporter 2 isoform 3) c4(93145) c5(93146, 93147, 93148, 93149, 93150, 93151) c6( ) c7(lp, aj, kl, eZ); #c1(SLC5A11) c2(NP_001245342) c3(sodium/myo-inositol cotransporter 2 isoform 4) c4( ) c5(93152, 93153, 93154, 93155, 93156, 93157, 93158, 93159) c6( ) c7(lp, aj, kl, eZ); #c1(SLC5A11) c2(NP_001245343) c3(sodium/myo-inositol cotransporter 2 isoform 5) c4( ) c5(93160, 93161, 93162, 93163, 93164) c6( ) c7(lp, aj, kl, eZ); #c1(SLC5A11) c2(NP_443176) c3(sodium/myo-inositol cotransporter 2 isoform 1) c4(229718) c5(229719, 229720, 229721, 229722, 229723, 229724, 229725, 229726) c6( ) c7(lp, aj, kl, eZ); #c1(SLC5A11) c2(XP_011544025) c3(sodium/myo-inositol cotransporter 2 isoform X2) c4(343194) c5( ) c6( ) c7(lp, aj, kl, eZ); #c1(SLC5A11) c2(XP_011544028) c3(sodium/myo-inositol cotransporter 2 isoform X5) c4(343195) c5(343196) c6( ) c7(lp, aj, kl, eZ); #c1(SLC5A12) c2(NP_848593) c3(sodium-coupled monocarboxylate transporter 2) c4(253927) c5(253928, 253929, 253930, 253931, 253932, 253933, 253934) c6( ) c7(bM, ac); #c1(SLC5A12) c2(XP_006718220) c3(sodium-coupled monocarboxylate transporter 2 isoform X5) c4(291583) c5(291584, 291585, 291586, 291587, 291588, 291589) c6( ) c7(bM, ac); #c1(SLC5A12) c2(XP_011518223) c3(sodium-coupled monocarboxylate transporter 2 isoform X4) c4(312261) c5(312262, 312263, 312264, 312265, 312266) c6( ) c7(bM, ac); #c1(SLC5A2) c2(NP_003032) c3(sodium/glucose cotransporter 2) c4(134573) c5(134574, 134575, 134576, 134577, 134578, 134579) c6( ) c7(bL, kQ, cFt, bo, lZ, cz, jy, aj, dG, K, uL, J, blX); #c1(SLC5A2) c2(XP_006721136) c3(sodium/glucose cotransporter 2 isoform X2) c4(293868) c5(293869, 293870, 293871, 293872, 293873, 293874) c6( ) c7(bL, kQ, cFt, bo, lZ, cz, jy, aj, dG, K, uL, J, blX); #c1(SLC5A3) c2(NP_008864) c3(sedium/mye-inositel cotransporter) c4(169311) c5(169312, 169313, 169314, 169315, 169316, 169317) c6( ) c7(kl, vA, aw, aj, j, K, bK, fr, op); #c1(SLC5A4) c2(NP_055042) c3(low affinity sodium-glucose cotransporter) c4(178507) c5(178508, 178509, 178510, 178511, 178512, 178513) c6( ) c7(bL, T, kQ, cFt, bo, lZ, jy, aj, dG, uL, blX); #c1(SLC5A5) c2(NP_000444) c3(sodium/iodide cotransporter) c4(9057) c5(9058, 9059, 9060, 9061, 9062, 9063) c6( ) c7(T, aC, nl, wu, aw, aA, bB, hz, fd, Fb, ci, fu, q, ad, er, eA, Vp, hd, no, xy, uT, ib, nv, Db, aE, pX, jz, RN, aT, cU, hD, Fx, AN, wm, nJ, ae, af, yF, afu, jf, d, gP, s, aW, Y, ff, r, aq, lo, aF, CQ, en, bu, iR, t, zE, bz, cm, qJ, es, bF, aZT, nM, eM, nB, bE, eD, hR, m, gT, B, cGr); #c1(SLC5A6) c2(XP_006712193) c3(sodium-dependent multivitamin transporter isoform X1) c4(286512) c5(286513, 286514, 286515, 286516, 286517, 286518, 286519, 286520, 286521, 286522, 286523, 286524, 286525, 286526, 286527, 286528) c6( ) c7(aW, ae, ad, aT); #c1(SLC5A6) c2(XP_006712194) c3(sodium-dependent multivitamin transporter isoform X5) c4(286529, 286530, 286531, 286532, 286533, 286534, 286535, 286536, 286537) c5(286538, 286539, 286540, 286541, 286542, 286543, 286544, 286545, 286546, 286547, 286548, 286549, 286550, 286551, 286552, 286553, 286554, 286555, 286556, 286557, 286558, 286559, 286560, 286561, 286562, 286563, 286564, 286565, 286566, 286567, 286568, 286569, 286570, 286571, 286572, 286573, 286574, 286575, 286576, 286577, 286578, 286579, 286580, 286581, 286582, 286583, 286584, 286585) c6( ) c7(aW, ae, ad, aT); #c1(SLC5A7) c2(NP_001291934) c3(high affinity choline transporter 1 isoform a) c4(116517) c5(116518, 116519, 116520, 116521, 116522, 116523, 116524, 116525, 116526, 116527, 116528) c6( ) c7(cA, agl, cGs, gf, K, aiO); #c1(SLC5A7) c2(NP_001291935) c3(high affinity choline transporter 1 isoform b) c4(116529) c5(116530, 116531, 116532, 116533, 116534) c6( ) c7(cA, agl, cGs, gf, K, aiO); #c1(SLC5A8) c2(NP_666018) c3(sodium-coupled monocarboxylate transporter 1) c4(241999) c5(242000, 242001, 242002, 242003, 242004, 242005) c6( ) c7(T, aC, aA, bB, ci, Fc, q, ad, eA, eJ, av, nH, hd, aE, Db, aT, Ex, ae, s, aW, ff, r, aF, en, as, iV, bz, ck, nM, bE, bt, X); #c1(SLC6A1) c2(NP_003033) c3(sodium- and chloride-dependent GABA transporter 1) c4(134580, 134581, 134582) c5(134583, 134584, 134585, 134586, 134587, 134588, 134589, 134590, 134591, 134592, 134593, 134594, 134595, 134596, 134597, 134598, 134599, 134600) c6( ) c7(il, cGt, QR, c, Gp, ha, Z, eu, eK, hq); #c1(SLC6A11) c2(NP_055044) c3(sodium- and chloride-dependent GABA transporter 3) c4(178521, 178522) c5(178523, 178524, 178525, 178526, 178527, 178528) c6( ) c7(bhB, Y, vj, ha, lG, y, cv); #c1(SLC6A12) c2(XP_005253803) c3(sodium- and chloride-dependent betaine transporter isoform X1) c4(272668) c5(272669, 272670, 272671, 272672, 272673, 272674, 272675, 272676, 272677, 272678, 272679, 272680, 272681, 272682, 272683, 272684, 272685, 272686, 272687, 272688, 272689, 272690) c6( ) c7(bM, vj, ha, jx, v, K, as, af); #c1(SLC6A12) c2(XP_005253804) c3(sodium- and chloride-dependent betaine transporter isoform X2) c4(272691) c5( ) c6( ) c7(bM, vj, ha, jx, v, K, as, af); #c1(SLC6A12) c2(XP_011519313) c3(sodium- and chloride-dependent betaine transporter isoform X5) c4( ) c5(313967, 313968, 313969, 313970, 313971, 313972) c6( ) c7(bM, vj, ha, jx, v, K, as, af); #c1(SLC6A13) c2(NP_001177926) c3(sodium- and chloride-dependent GABA transporter 2 isoform 2) c4(73187) c5(73188, 73189, 73190, 73191, 73192, 73193) c6( ) c7(he, vj, ha, eR); #c1(SLC6A13) c2(NP_001230321) c3(sodium- and chloride-dependent GABA transporter 2 isoform 3) c4(86230) c5(86231, 86232, 86233, 86234, 86235, 86236) c6( ) c7(he, vj, ha, eR); #c1(SLC6A13) c2(NP_057699) c3(sodium- and chloride-dependent GABA transporter 2 isoform 1) c4( ) c5(192426, 192427, 192428, 192429, 192430, 192431, 192432, 192433, 192434, 192435, 192436) c6( ) c7(he, vj, ha, eR); #c1(SLC6A13) c2(XP_005253806) c3(sodium- and chloride-dependent GABA transporter 2 isoform X1) c4(272692, 272693) c5(272694) c6( ) c7(he, vj, ha, eR); #c1(SLC6A14) c2(NP_009162) c3(sodium- and chloride-dependent neutral and basic amine acid transporter B(O+)) c4(171199) c5(171200, 171201, 171202, 171203, 171204, 171205) c6( ) c7(LQ, iV, cGu, aW, aZs, aT, fe, v, cFn, bC, qN, wS, aa); #c1(SLC6A15) c2(NP_060527) c3(sodium-dependent neutral amine acid transporter B(O)AT2 isoform 2) c4(196389) c5(196390, 196391, 196392, 196393, 196394, 196395, 196396, 196397, 196398, 196399, 196400, 196401) c6( ) c7(bO, bS, v, K, ct, Z, he); #c1(SLC6A15) c2(XP_011536825) c3(sodium-dependent neutral amine acid transporter B(O)AT2 isoform X1) c4(334512, 334513, 334514) c5(334515, 334516, 334517, 334518, 334519, 334520, 334521, 334522, 334523, 334524, 334525, 334526, 334527) c6( ) c7(bO, bS, v, K, ct, Z, he); #c1(SLC6A15) c2(XP_011536826) c3(sodium-dependent neutral amine acid transporter B(O)AT2 isoform X2) c4( ) c5(334528, 334529, 334530, 334531, 334532) c6( ) c7(bO, bS, v, K, ct, Z, he); #c1(SLC6A15) c2(XP_011536827) c3(sodium-dependent neutral amine acid transporter B(O)AT2 isoform X3) c4(334533) c5( ) c6( ) c7(bO, bS, v, K, ct, Z, he); #c1(SLC6A18) c2(NP_872438) c3(sodium-dependent neutral amine acid transporter B(O)AT3) c4(256376, 256377) c5(256378, 256379, 256380, 256381, 256382, 256383, 256384, 256385, 256386, 256387, 256388, 256389) c6( ) c7(cFK, dL, cFL, cz); #c1(SLC6A19) c2(NP_001003841) c3(sodium-dependent neutral amine acid transporter B(O)AT1) c4(20227) c5(20228, 20229, 20230, 20231, 20232, 20233) c6( ) c7(cd, cFK, cFL, wS, cz); #c1(SLC6A2) c2(NP_001165972) c3(sodium-dependent noradrenaline transporter isoform 2) c4(68053) c5(68054, 68055, 68056, 68057, 68058, 68059, 68060, 68061, 68062, 68063) c6( ) c7(azs, T, bO, bB, ci, lF, aE, iX, pX, K, eL, Jl, aW, g, cm, aiO, aqr, cbM, mx, QF, uJ, wJ, To, ww, ct, aBI, cd, ft, amJ, awb, dL, he, Jj, aq, Jh, hq, ok, cA, dB, uz, jd, B, ll, oe, DV, aA, cz, v, j, q, aT, bK, jj, ae, bkI, ak, avV, blD, s, yL, r, en, iK, aFA, bdn, cT, AH, yH, Fl, awa, VB, blu, gx, pY, iW, oR, bS, ad, av, wv, afm, Od, qE, tb, vj, ff, aF, aTR, Z, bz, apM, Ew, bE, eB, ra, hv); #c1(SLC6A2) c2(NP_001165973) c3(sodium-dependent noradrenaline transporter isoform 3) c4(68064) c5(68065, 68066, 68067, 68068, 68069, 68070) c6( ) c7(azs, T, bO, bB, ci, lF, aE, iX, pX, K, eL, Jl, aW, g, cm, aiO, aqr, cbM, mx, QF, uJ, wJ, To, ww, ct, aBI, cd, ft, amJ, awb, dL, he, Jj, aq, Jh, hq, ok, cA, dB, uz, jd, B, ll, oe, DV, aA, cz, v, j, q, aT, bK, jj, ae, bkl, ak, avV, blD, s, yL, r, en, iK, aFA, bdn, cT, AH, yH, Fl, awa, VB, blu, gx, pY, iW, oR, bS, ad, av, wv, afm, Od, qE, tb, vj, ff, aF, aTR, Z, bz, apM, Ew, bE, eB, ra, hv); #c1(SLC6A2) c2(XP_006721326) c3(sodium-dependent noradrenaline transporter isoform X1) c4(293941) c5(293942, 293943, 293944, 293945, 293946, 293947) c6( ) c7(azs, T, bO, bB, ci, lF, aE, iX, pX, K, eL, Jl, aW, g, cm, aiO, aqr, cbM, mx, QF, uJ, wJ, To, ww, ct, aBI, cd, ft, amJ, awb, dL, he, Jj, aq, Jh, hq, ok, cA, dB, uz, jd, B, ll, oe, DV, aA, cz, v, j, g, aT, bK, jj, ae, bkl, ak, avV, blD, s, yL, r, en, iK, aFA, bdn, cT, AH, yH, Fl, awa, VB, blu, gx, pY, iW, oR, bS, ad, av, wv, afm, Od, qE, tb, vj, ff, aF, aTR, Z, bz, apM, Ew, bE, eB, ra, hv); #c1(SLC6A2) c2(XP_011521599) c3(sodium-dependent noradrenaline transporter isoform X3) c4(316405) c5(316406, 316407, 316408, 316409, 316410, 316411) c6( ) c7(azs, T, bO, bB, ci, lF, aE, iX, pX, K, eL, Jl, aW, g, cm, aiO, aqr, cbM, mx, QF, uJ, wJ, To, ww, ct, aBI, cd, ft, amJ, awb, dL, he, Jj, aq, Jh, hq, ok, cA, dB, uz, jd, B, ll, oe, DV, aA, cz, v, j, q, aT, bK, jj, ae, bkl, ak, avV, blD, s, yL, r, en, iK, aFA, bdn, cT, AH, yH, Fl, awa, VB, blu, gx, pY, iW, oR, bS, ad, av, wv, afm, Od, qE, tb, vj, ff, aF, aTR, Z, bz, apM, Ew, bE, eB, ra, hv); #c1(SLC6A20) c2(NP_064593) c3(sodium- and chloride-dependent transporter XTRP3 isoform 1) c4(203155) c5(203156, 203157, 203158, 203159, 203160, 203161) c6( ) c7(ey, cFK, cFL, C, ib); #c1(SLC6A20) c2(NP_071800) c3(sodium- and chloride-dependent transporter XTRP3 isoform 2) c4(212042) c5(212043, 212044, 212045, 212046, 212047, 212048) c6( ) c7(ey, cFK, cFL, C, ib); #c1(SLC6A20) c2(XP_005265293) c3(sodium- and chloride-dependent transporter XTRP3 isoform X1) c4(279455) c5(279456, 279457, 279458, 279459, 279460, 279461) c6( ) c7(ey, cFK, cFL, C, ib); #c1(SLC6A4) c2(NP_001036) c3(sodium-dependent serotonin transporter) c4(34115, 34116) c5( ) c6( ) c7(lD, tJ, T, uK, aUk, fR, ahc, cbF, e, al, bjf, bO, gf, ur, Gp, Jt, VV, Vp, wM, bhN, cGy, bWj, Fo, iX, Gb, ta, abj, cbf, K, oi, cGF, xa, hm, ly, cGw, zQ, up, amy, aW, hl, Fa, da, bMC, Eg, lm, Jl, eE, mZ, aiO, aaS, bdc, aqr, abS, Kr, cGx, U, ZT, uo, Gs, sv, aTV, abl, cGC, uJ, xh, FW, dD, bok, sQ, aw, n, To, aj, ww, ct, nA, abQ, aPb, cGB, cd, bhM, FY, ke, Zs, h, eV, gl, bWv, mV, mY, Cr, he, aze, wC, mU, abf, PT, Jj, aml, fe, aFx, vo, cM, Gi, lx, mX, Jh, hq, amt, aap, ok, aqp, abV, cA, aUn, uw, yP, Ei, bhU, vL, at, agZ, ut, aqm, uz, bD, lB, jd, mT, qc, bL, beq, jv, aCw, dA, bMD, iH, He, jx, eX, Nt, cz, mS, ti, cGz, j, v, agl, il, cGE, wy, q, J, aqN, AK, Si, aPW, ga, PW, gM, aqt, HJ, aTZ, hb, aVM, sl, QU, agl, aT, wP, bK, ahg, an, rE, rz, af, aFs, aGP, yL, zS, r, iy, cu, HL, wA, f, PE, cGD, pb, FT, tl, bN, Ji, pH, rR, ac, mG, cbE, aTU, amu, lw, Fl, aen, gO, yv, qX, nl, ra, aFe, akd, aat, acl, ha, uG, Gd, bS, uu, eg, bxb, xt, kL, BY, dP, HE, aqq, ot, sN, mW, oz, aqk, Sb, vc, lQ, bME, na, Jc, huh, tb, ue, Gv, gC, cr, eZ, kD, gl, hp, aTR, EZ, iV, Z, EX, jb, cuy, D, gk, cGA, afN, bMA, ll, bMt, gZ, Rm, clW, aS, ei, cGv, pK, lC, aqw, agD, gq, rk); #c1(SLC6A5) c2(XP_011518775) c3(sodium- and chloride-dependent glycine transporter 2 isoform X1) c4(313174) c5(313175, 313176, 313177, 313178, 313179, 313180) c6( ) c7(ll, lF, T, aWN, aW, dB, JI, AH, vj, awa, aT, aA, awb, aF, K, ci, g, cGG, B); #c1(SLC6A6) c2(NP_001127839) c3(sodium- and chloride-dependent taurine transporter isoform c) c4(49333, 49334, 49335, 49336) c5(49337, 49338, 49339, 49340, 49341, 49342, 49343, 49344, 49345, 49346, 49347, 49348, 49349) c6( ) c7(iO, T, jv, lR, vj, r, j, nC, q); #c1(SLC6A6) c2(NP_001127840) c3(sodium- and chloride-dependent taurine transporter isoform b) c4( ) c5(49350, 49351, 49352, 49353, 49354, 49355, 49356, 49357, 49358, 49359) c6( ) c7(iO, T, jv, lR, vj, r, j, nC, q); #c1(SLC6A6) c2(NP_003034) c3(sodium- and chloride-dependent taurine transporter isoform a) c4( ) c5(134601, 134602, 134603, 134604, 134605, 134606, 134607, 134608) c6( ) c7(iO, T, jv, lR, vj, r, j, nC, q); #c1(SLC6A6) c2(XP_006713370) c3(sodium- and chloride-dependent taurine transporter isoform X2) c4( ) c5(287163) c6( ) c7(iO, T, jv, lR, vj, r, j, nC, q); #c1(SLC6A7) c2(NP_055043) c3(sodium-dependent proline transporter) c4(178514) c5(178515, 178516, 178517, 178518, 178519, 178520) c6( ) c7(bM, vj, Xg); #c1(SLC6A8) c2(NP_001136277) c3(sodium- and chloride-dependent creatine transporter 1 isoform 2) c4(54764) c5(54765, 54766, 54767, 54768, 54769, 54770) c6( ) c7(if, ha, NT, aA, bB, n, nA, qN, cd, ad, eW, nc, cjw, Fo, aT, aU, h, K, ca, ake, ae, UF, cH, aW, nf, aF, bzp, Ku, as, bp, cm, dr, bN, mG, Kr, awl, bzW, Uw); #c1(SLC6A8) c2(NP_001136278) c3(sodium- and chloride-dependent creatine transporter 1 isoform 3) c4(54771, 54772) c5(54773, 54774, 54775, 54776, 54777, 54778, 54779, 54780, 54781, 54782, 54783, 54784, 54785, 54786, 54787, 54788, 54789, 54790, 54791, 54792, 54793, 54794, 54795, 54796, 54797) c6( ) c7(if, ha, NT, aA, bB, n, nA, qN, cd, ad, eW, nc, cjw, Fo, aT, aU, h, K, ca, ake, ae, UF, cH, aW, nf, aF, bzp, Ku, as, bp, cm, dr, bN, mG, Kr, awl, bzW, Uw); #c1(SLC6A8) c2(NP_005620) c3(sodium- and chloride-dependent creatine transporter 1 isoform 1) c4(157998, 157999, 158000, 158001) c5(158002, 158003, 158004, 158005, 158006, 158007, 158008, 158009, 158010, 158011, 158012, 158013, 158014) c6( ) c7(if, ha, NT, aA, bB, n, nA, qN, cd, ad, eW, nc, cjw, Fo, aT, aU, h, K, ca, ake, ae, UF, cH, aW, nf, aF, bzp, Ku, as, bp, cm, dr, bN, mG, Kr, awl, bzW, Uw); #c1(SLC6A9) c2(XP_011540319) c3(sodium- and chloride-dependent glycine transporter 1 isoform X1) c4( ) c5(338730, 338731, 338732, 338733, 338734, 338735, 338736, 338737, 338738, 338739, 338740, 338741) c6( ) c7(ke, PT, UZ, cz, gl, agm, Eg, xa); #c1(SLC7A1) c2(XP_005266564) c3(high affinity cationic amine acid transporter 1 isoform X1) c4(280232, 280233) c5(280234, 280235, 280236, 280237, 280238, 280239, 280240, 280241, 280242, 280243, 280244, 280245) c6( ) c7(ga, T, aaU, ig, bE, aW, if, aT, cR, r, cd, cz, bB, m, bl, an, ae, q, ad, bA); #c1(SLC7A10) c2(NP_062823) c3(asc-type amine acid transporter 1) c4(202153) c5(202154, 202155, 202156, 202157, 202158, 202159) c6( ) c7(beo, aW, aT, bns, fe, Th); #c1(SLC7A11) c2(NP_055146) c3(cystine/glutamate transporter) c4(179435) c5(179436, 179437, 179438, 179439, 179440, 179441) c6( ) c7(T, aC, lE, aW, aT, j, K, eA, cGH); #c1(SLC7A13) c2(NP_620172) c3(solute carrier family 7 member 13) c4(237464) c5(237465, 237466, 237467, 237468, 237469, 237470) c6( ) c7(cQ, j); #c1(SLC7A13) c2(XP_011515169) c3(solute carrier family 7 member 13 isoform X1) c4(308002) c5(308003, 308004, 308005, 308006, 308007, 308008) c6( ) c7(cQ, j); #c1(SLC7A14) c2(NP_066000) c3(probable cationic amine acid transporter) c4(206708) c5(206709, 206710, 206711, 206712, 206713, 206714) c6( ) c7(cGI, nw, nk); #c1(SLC7A2) c2(NP_001158243) c3(cationic amine acid transporter 2 isoform 3) c4(63497) c5(63498, 63499, 63500, 63501, 63502, 63503, 63504, 63505, 63506, 63507) c6( ) c7(aaU, ig, vj, aoo, aj, aXd, C, fq, B, J); #c1(SLC7A2) c2(NP_003037) c3(cationic amine acid transporter 2 isoform 1) c4(134609) c5(134610, 134611, 134612, 134613, 134614, 134615, 134616, 134617, 134618, 134619) c6( ) c7(aaU, ig, vj, aoo, aj, aXd, C, fq, B, J); #c1(SLC7A2) c2(XP_005273668) c3(cationic amine acid transporter 2 isoform X1) c4(284765) c5(284766, 284767, 284768, 284769, 284770, 284771, 284772, 284773) c6( ) c7(aaU, ig, vj, aoo, aj, aXd, C, fq, B, J); #c1(SLC7A3) c2(NP_001041629) c3(cationic amine acid transporter 3) c4(34225) c5(34226, 34227, 34228, 34229, 34230, 34231, 34232, 34233, 34234, 34235) c6( ) c7(bVz); #c1(SLC7A4) c2(NP_004164) c3(cationic amine acid transporter 4) c4(143975, 143976) c5(143977, 143978, 143979, 143980, 143981, 143982, 143983, 143984, 143985, 143986, 143987, 143988, 143989, 143990, 143991, 143992) c6( ) c7(bM, T, fM, iW, RX, jx, jh, asa, fd, n, bh, aHj, mC, zn, NF, x, agd, cGK, pe, h, DY, pk, yF, wr, mR, Of, eZ, Og, S, eE, ho, Wt, asE, Cv, ck, iQ, cj, aS, k, fL, bC, y, cGJ); #c1(SLC7A5) c2(NP_003477) c3(large neutral amine acids transporter small subunit 1) c4(138670) c5(138671, 138672, 138673, 138674, 138675, 138676) c6( ) c7(Mb, T, id, yG, fd, acU, fr, eA, ad, eW, av, iu, jz, py, pX, aT, gU, aXd, ey, ji, ae, beo, d, iE, oV, Y, fJ, ff, en, as, iK, dr, eM, go, aGi, B); #c1(SLC7A6) c2(NP_003974) c3(Y+L amine acid transporter 2) c4(142563, 142564) c5(142565, 142566, 142567, 142568, 142569, 142570, 142571, 142572, 142573, 142574, 142575, 142576, 142577, 142578, 142579) c6( ) c7(T, py, bE, jh, aeu, dT, aXd, ae, ad); #c1(SLC7A6) c2(XP_011521741) c3(Y+L amine acid transporter 2 isoform X2) c4( ) c5(316450) c6( ) c7(T, py, bE, jh, aeu, dT, aXd, ae, ad); #c1(SLC7A7) c2(XP_011535601) c3(Y+L amine acid transporter 1 isoform X1) c4(332764, 332765, 332766, 332767, 332768, 332769, 332770, 332771, 332772, 332773, 332774) c5(332775, 332776, 332777, 332778, 332779, 332780, 332781, 332782, 332783, 332784, 332785, 332786, 332787, 332788, 332789, 332790, 332791, 332792, 332793, 332794, 332795, 332796, 332797, 332798, 332799, 332800, 332801, 332802, 332803, 332804, 332805, 332806, 332807, 332808, 332809, 332810, 332811, 332812, 332813, 332814, 332815, 332816, 332817, 332818, 332819, 332820, 332821, 332822, 332823, 332824, 332825, 332826, 332827, 332828, 332829, 332830, 332831, 332832, 332833, 332834, 332835, 332836, 332837, 332838, 332839, 332840, 332841, 332842, 332843, 332844, 332845, 332846, 332847, 332848, 332849, 332850, 332851, 332852, 332853, 332854, 332855, 332856) c6( ) c7(bL, cGL, beo, py, jh, aeu, dT, v, aXd, ae, rL, ad); #c1(SLC7A8) c2(NP_001253965) c3(large neutral amine acids transporter small subunit 2 isoform c) c4(94251, 94252, 94253) c5(94254, 94255, 94256, 94257, 94258, 94259, 94260, 94261, 94262, 94263, 94264, 94265) c6( ) c7(dP, T, py, ac, iT, vA, aXd, bt, B, op); #c1(SLC7A8) c2(NP_001253966) c3(large neutral amine acids transporter small subunit 2 isoform d) c4(94266) c5(94267, 94268, 94269, 94270, 94271, 94272, 94273) c6( ) c7(dP, T, py, ac, iT, vA, aXd, bt, B, op); #c1(SLC7A8) c2(NP_036376) c3(large neutral amine acids transporter small subunit 2 isoform a) c4(173346, 173347, 173348, 173349, 173350) c5(173351, 173352, 173353, 173354, 173355, 173356, 173357, 173358, 173359, 173360, 173361, 173362, 173363, 173364, 173365, 173366, 173367, 173368, 173369, 173370) c6( ) c7(dP, T, py, ac, iT, vA, aXd, bt, B, op); #c1(SLC7A8) c2(NP_877392) c3(large neutral amine acids transporter small subunit 2 isoform b) c4( ) c5(256725, 256726, 256727, 256728, 256729, 256730, 256731, 256732, 256733, 256734, 256735, 256736, 256737, 256738, 256739) c6( ) c7(dP, T, py, ac, iT, vA, aXd, bt, B, op); #c1(SLC7A9) c2(XP_011524704) c3(B(O,+)-type amine acid transporter 1 isoform X1) c4(319193) c5(319194, 319195, 319196, 319197, 319198, 319199, 319200, 319201, 319202, 319203, 319204, 319205) c6( ) c7(fU, AW, beo, A, eR, af, vj, aw, uz, gA, aj, dy, aXd, cGM, y, wS, J); #c1(SLC8A1) c2(NP_001106271) c3(sodium/calcium exchanger 1 isoform B precursor) c4(42412) c5(42413, 42414, 42415, 42416, 42417, 42418, 42419, 42420, 42421, 42422) c6( ) c7(pY, e, aA, cz, aj, j, cd, J, aJf, Bc, lG, cy, K, bq, eu, vj, aq, uU, aF, qa, eK, ac, hR, HB, cB, B); #c1(SLC8A1) c2(NP_001106272) c3(sodium/calcium exchanger 1 isoform C precursor) c4(42423) c5(42424, 42425, 42426, 42427, 42428, 42429) c6( ) c7(pY, e, aA, cz, aj, j, cd, J, aJf, Bc, lG, cy, K, bq, eu, vj, aq, uU, aF, qa, eK, ac, hR, HB, cB, B); #c1(SLC8A1) c2(NP_001239553) c3(sodium/calcium exchanger 1 isoform E precursor) c4(88520) c5(88521, 88522, 88523, 88524, 88525, 88526) c6( ) c7(pY, e, aA, cz, aj, j, cd, J, aJf, Bc, lG, cy, K, bq, eu, vj, aq, uU, aF, qa, eK, ac, hR, HB, cB, B); #c1(SLC8A1) c2(XP_005264571) c3(sodium/calcium exchanger 1 isoform X2) c4(279061, 279062) c5(279063, 279064, 279065, 279066, 279067, 279068, 279069, 279070, 279071, 279072, 279073, 279074, 279075, 279076, 279077, 279078, 279079, 279080, 279081, 279082, 279083, 279084, 279085, 279086) c6( ) c7(pY, e, aA, cz, aj, j, cd, J, aJf, Bc, lG, cy, K, bq, eu, vj, aq, uU, aF, qa, eK, ac, hR, HB, cB, B); #c1(SLC8A1) c2(XP_006712149) c3(sodium/calcium exchanger 1 isoform X11) c4( ) c5(286426, 286427, 286428, 286429, 286430, 286431, 286432, 286433, 286434, 286435, 286436, 286437, 286438, 286439, 286440, 286441, 286442, 286443, 286444, 286445, 286446) c6( ) c7(pY, e, aA, cz, aj, j, cd, J, aJf, Bc, lG, cy, K, bq, eu, vj, aq, uU, aF, qa, eK, ac, hR, HB, cB, B); #c1(SLC8A1) c2(XP_011531358) c3(sedium/calcium exchanger 1 isoform X1) c4(327341) c5(327342, 327343, 327344, 327345, 327346, 327347, 327348, 327349, 327350, 327351, 327352, 327353, 327354, 327355, 327356) c6( ) c7(pY, e, aA, cz, aj, j, cd, J, aJf, Bc, lG, cy, K, bq, eu, vj, aq, uU, aF, qa, eK, ac, hR, HB, cB, B); #c1(SLC8A1) c2(XP_011531360) c3(sodium/calcium exchanger 1 isoform X10) c4(327357, 327358, 327359, 327360) c5(327361, 327362, 327363, 327364, 327365, 327366) c6( ) c7(pY, e, aA, cz, aj, j, cd, J, aJf, Bc, lG, cy, K, bq, eu, vj, aq, uU, aF, qa, eK, ac, hR, HB, cB, B); #c1(SLC8A2) c2(NP_055878) c3(sodium/calcium exchanger 2 precursor) c4(184121, 184122, 184123, 184124) c5(184125, 184126, 184127, 184128, 184129, 184130, 184131, 184132, 184133, 184134, 184135, 184136, 184137, 184138, 184139, 184140, 184141, 184142, 184143, 184144, 184145, 184146, 184147, 184148) c6( ) c7(lG, cB, eA, eu); #c1(SLC8A3) c2(NP_001123889) c3(sodium/calcium exchanger 3 isoform G) c4( ) c5(47976, 47977, 47978, 47979, 47980, 47981) c6( ) c7(lG, eu, cB, ao); #c1(SLC8A3) c2(NP_150287) c3(sodium/calcium exchanger 3 isoform A precursor) c4(228059) c5(228060, 228061, 228062, 228063, 228064, 228065, 228066, 228067, 228068, 228069) c6( ) c7(lG, eu, cB, ao); #c1(SLC8A3) c2(NP_489479) c3(sodium/calcium exchanger 3 isoform B precursor) c4(231012) c5(231013, 231014, 231015, 231016, 231017, 231018) c6( ) c7(lG, eu, cB, ao); #c1(SLC8A3) c2(NP_891977) c3(sodium/calcium exchanger 3 isoform D precursor) c4(257336, 257337, 257338) c5(257339, 257340, 257341, 257342, 257343, 257344, 257345) c6( ) c7(lG, eu, cB, ao); #c1(SLC8A3) c2(NP_891981) c3(sodium/calcium exchanger 3 isoform F) c4( ) c5(257392, 257393, 257394, 257395, 257396) c6( ) c7(lG, eu, cB, ao); #c1(SLC8A3) c2(XP_011535403) c3(sodium/calcium exchanger 3 isoform X2) c4(332422) c5( ) c6( ) c7(lG, eu, cB, ao); #c1(SLC8A3) c2(XP_011535404) c3(sodium/calcium exchanger 3 isoform X1) c4(332423) c5(332424, 332425, 332426, 332427, 332428, 332429, 332430, 332431, 332432, 332433, 332434, 332435) c6( ) c7(lG, eu, cB, ao); #c1(SLC9A1) c2(XP_011540323) c3(sodium/hydrogen exchanger 1 isoform X1) c4(338749, 338750, 338751) c5(338752, 338753, 338754, 338755, 338756, 338757, 338758, 338759, 338760, 338761, 338762, 338763) c6( ) c7(bL, T, dD, eR, ea, if, cz, ajp, dG, j, ci, eq, qN, aY, Fc, cd, eA, Bc, lC, aT, lG, cy, vc, ji, bq, A, d, iU, aW, Y, LZ, blU, fe, iV, Hv, qa, ck, U, hr, gT, bt, ra, B, yv); #c1(SLC9A2) c2(NP_003039) c3(sodium/hydrogen exchanger 2 precursor) c4(134620) c5(134621, 134622, 134623, 134624, 134625, 134626) c6( ) c7(blU, qS, s, cz); #c1(SLC9A3) c2(NP_004165) c3(sodium/hydrogen exchanger 3 isoform 1) c4(143993) c5(143994, 143995, 143996, 143997, 143998, 143999) c6( ) c7(iV, eR, bye, s, vj, qS, aer, jN, aZs, cz, v, cFn, hie, EZ, bq, aY, uC, cFI, ao, aa); #c1(SLC9A3R1) c2(NP_004243) c3(Na(+)/H(+) exchange regulatory cofactor NHE-RF1) c4(144560, 144561) c5(144562, 144563, 144564, 144565, 144566, 144567, 144568, 144569, 144570, 144571, 144572, 144573) c6( ) c7(T, cGN, ci, q, eA, Ot, aT, h, ji, K, A, d, aW, hl, cr, r, nY, aq, fe, cGO, iR, eE, dh, ra, B, ao); #c1(SLC9A3R2) c2(NP_001123484) c3(Na(+)/H(+) exchange regulatory cofactor NHE-RF2 isoform a) c4(47153) c5(47154, 47155, 47156, 47157, 47158, 47159) c6( ) c7(T, aAf, Ol, aA, cz, bB, fr, ci, eA, aE, Tf, aT, kf, h, ahE, B, s, aW, ff, aq, aF, ahl, en, g, iK, eM, bE, m, X, hS); #c1(SLC9A3R2) c2(NP_004776) c3(Na(+)/H(+) exchange regulatory cofactor NHE-RF2 isoform b) c4(149526) c5(149527, 149528, 149529, 149530, 149531, 149532) c6( ) c7(T, aAf, Ol, aA, cz, bB, fr, ci, eA, aE, Tf, aT, kf, h, ahE, B, s, aW, ff, aq, aF, ahl, en, g, iK, eM, bE, m, X, hS); #c1(SLC9A3R2) c2(XP_005255759) c3(Na(+)/H(+) exchange regulatory cofactor NHE-RF2 isoform X1) c4( ) c5(273849) c6( ) c7(T, aAf, Ol, aA, cz, bB, fr, ci, eA, aE, Tf, aT, kf, h, ahE, B, s, aW, ff, aq, aF, ahl, en, g, iK, eM, bE, m, X, hS); #c1(SLC9A4) c2(NP_001011552) c3(sodium/hydrogen exchanger 4 precursor) c4(24611) c5(24612, 24613, 24614, 24615, 24616, 24617) c6( ) c7(hp); #c1(SLC9A5) c2(NP_004585) c3(sodium/hydrogen exchanger 5 precursor) c4(147904, 147905) c5(147906, 147907, 147908, 147909, 147910, 147911, 147912, 147913) c6( ) c7(eR, cuY, U, blU, cGP, aY); #c1(SLC9A5) c2(XP_011521606) c3(sodium/hydrogen exchanger 5 isoform X4) c4( ) c5(316412, 316413, 316414, 316415, 316416) c6( ) c7(eR, cuY, U, blU, cGP, aY); #c1(SLC9A6) c2(NP_001036002) c3(sodium/hydrogen exchanger 6 isoform a precursor) c4(33656) c5(33657, 33658, 33659, 33660, 33661, 33662, 33663) c6( ) c7(eR, tp, LX, n, v, fu, nA, cGV, C, pU, bjQ, auu, cxz, aR, cd, cGT, afm, blb, cGU, nm, cGQ, ey, cGS, an, Cw, Ue, cjK, nf, cGX, cGY, anW, QK, Dm, bN, eK, cGW, cGR, agl, Zn, fD, Wl, aFf, LT); #c1(SLC9A6) c2(NP_006350) c3(sodium/hydrogen exchanger 6 isoform b precursor) c4(164256) c5(164257, 164258, 164259, 164260, 164261, 164262) c6( ) c7(eR, tp, LX, n, v, fu, nA, cGV, C, PU, bjQ, auu, cxz, aR, cd, cGT, afm, blb, cGU, nm, cGQ, ey, cGS, ao, Cw, Ue, cjK, nf, cGX, cGY, anW, QK, Dm, bN, eK, cGW, cGR, agl, Zn, fD, Wl, aFf, LT); #c1(SLC9A6) c2(XP_006724789) c3(sodium/hydrogen exchanger 6 isoform X1) c4(296336) c5(296337, 296338, 296339, 296340, 296341) c6( ) c7(eR, tp, LX, n, v, fu, nA, cGV, C, pU, bjQ, auu, cxz, aR, cd, cGT, afm, blb, cGU, nm, cGQ, ey, cGS, an, Cw, Ue, cjK, nf, cGX, cGY, anW, QK, Dm, bN, eK, cGW, cGR, agl, Zn, fD, Wl, aFf, LT); #c1(SLC9A7) c2(NP_115980) c3(sodium/hydrogen exchanger 7 isoform 2 precursor) c4(225064) c5(225065, 225066, 225067, 225068, 225069, 225070) c6( ) c7(nf, cGR, cGQ, agl); #c1(SLC9A8) c2(NP_001247420) c3(sodium/hydrogen exchanger 8 isoform 1) c4(93518) c5(93519, 93520, 93521, 93522, 93523, 93524, 93525) c6( ) c7(ble); #c1(SLC9A8) c2(NP_056081) c3(sodium/hydrogen exchanger 8 isoform 2) c4(185567, 185568, 185569) c5(185570, 185571, 185572, 185573, 185574, 185575, 185576, 185577, 185578, 185579, 185580) c6( ) c7(ble); #c1(SLC9A8) c2(XP_011527041) c3(sodium/hydrogen exchanger 8 isoform X5) c4( ) c5(321359) c6( ) c7(ble); #c1(SLC9A8) c2(XP_011527046) c3(sodium/hydrogen exchanger 8 isoform X10) c4( ) c5(321360, 321361, 321362, 321363, 321364) c6( ) c7(ble); #c1(SLC9A9) c2(NP_775924) c3(sodium/hydrogen exchanger 9) c4(250711, 250712) c5(250713, 250714, 250715, 250716, 250717, 250718, 250719, 250720, 250721, 250722, 250723, 250724) c6( ) c7(oe, ht, ff, aj, j, en, bN, cGZ); #c1(SLC9B1) c2(NP_001094344) c3(sodium/hydrogen exchanger 9B1 isoform 2) c4(40680) c5(40681, 40682, 40683, 40684, 40685, 40686) c6( ) c7(Ok, wR, aiV, K, aj); #c1(SLC9B1) c2(XP_011529925) c3(sodium/hydrogen exchanger 9B1 isoform X1) c4(325711, 325712, 325713) c5(325714, 325715, 325716, 325717, 325718, 325719) c6( ) c7(Ok, wR, aiV, K, aj); #c1(SLC9B1) c2(XP_011529926) c3(sodium/hydrogen exchanger 9B1 isoform X2) c4( ) c5(325720, 325721, 325722, 325723, 325724, 325725, 325726, 325727, 325728, 325729, 325730, 325731) c6( ) c7(Ok, wR, aiV, K, aj); #c1(SLC9B1) c2(XP_011529928) c3(sodium/hydrogen exchanger 9B1 isoform X4) c4(325732) c5( ) c6( ) c7(Ok, wR, aiV, K, aj); #c1(SLC9B1) c2(XP_011529929) c3(sodium/hydrogen exchanger 9B1 isoform X5) c4( ) c5(325733, 325734, 325735, 325736, 325737, 325738) c6( ) c7(Ok, wR, aiV, K, aj); #c1(SLC9B2) c2(NP_001287685) c3(mitochondrial sodium/hydrogen exchanger 982 isoform 3) c4(112537) c5(112538, 112539, 112540, 112541, 112542, 112543) c6( ) c7(qa, cz); #c1(SLC9B2) c2(XP_005262815) c3(mitochondrial sodium/hydrogen exchanger 982 isoform X3) c4( ) c5(278101, 278102, 278103, 278104, 278105, 278106, 278107, 278108, 278109, 278110, 278111, 278112) c6( ) c7(qa, cz); #c1(SLC9B2) c2(XP_006714148) c3(mitochondrial sodium/hydrogen exchanger 982 isoform X1) c4(287580, 287581, 287582) c5(287583, 287584, 287585, 287586, 287587, 287588, 287589, 287590, 287591, 287592) c6( ) c7(qa, cz); #c1(SLC9B2) c2(XP_006714149) c3(mitochondrial sodium/hydrogen exchanger 982 isoform X2) c4(287593) c5(287594, 287595, 287596, 287597, 287598, 287599) c6( ) c7(qa, cz); #c1(SLC9C1) c2(NP_898884) c3(sodium/hydrogen exchanger ID) c4(257837) c5(257838, 257839, 257840, 257841, 257842, 257843) c6( ) c7(bL, A, lR, eR, cr, cz, fe, cy, dy, K, aY, vl, qa); #c1(SLC9C1) c2(XP_011511018) c3(sodium/hydrogen exchanger ID isoform X5) c4(301460) c5(301461, 301462, 301463, 301464, 301465, 301466) c6( ) c7(bL, A, lR, eR, cr, cz, fe, cy, dy, K, aY, vl, qa); #c1(SLC9C2) c2(NP_848622) c3(sodium/hydrogen exchanger 11) c4(254015) c5(254016, 254017, 254018, 254019, 254020, 254021) c6( ) c7(W, ad, cr); #c1(SLC9C2) c2(XP_011507729) c3(sodium/hydrogen exchanger 11 isoform X4) c4(297809) c5( ) c6( ) c7(W, ad, cr); #c1(SLC9C2) c2(XP_011507732) c3(sodium/hydrogen exchanger 11 isoform X5) c4( ) c5(297810) c6( ) c7(W, ad, cr); #c1(SLC9C2) c2(XP_011507735) c3(sodium/hydrogen exchanger 11 isoform X7) c4( ) c5(297811, 297812, 297813, 297814, 297815) c6( ) c7(W, ad, cr); #c1(SLC01A2) c2(NP_602307) c3(solute carrier organic anion transporter family member 1A2) c4(235692, 235693, 235694, 235695, 235696, 235697, 235698, 235699, 235700) c5(235701, 235702, 235703, 235704, 235705, 235706, 235707, 235708, 235709, 235710, 235711, 235712, 235713, 235714, 235715, 235716, 235717, 235718, 235719, 235720, 235721, 235722, 235723, 235724, 235725, 235726, 235727, 235728, 235729, 235730, 235731, 235732, 235733, 235734, 235735, 235736, 235737, 235738, 235739, 235740, 235741, 235742, 235743, 235744, 235745, 235746, 235747, 235748, 235749, 235750, 235751, 235752, 235753, 235754, 235755, 235756, 235757, 235758, 235759, 235760, 235761, 235762, 235763) c6( ) c7(bL, T, l, A, u, byF, aW, kK, ha, aT, cz, ci, act, iV, iK, ae, ad); #c1(SLC01A2) c2(XP_011519122) c3(solute carrier organic anion transporter family member 1A2 isoform X2) c4(313725) c5(313726, 313727, 313728, 313729, 313730, 313731) c6( ) c7(bL, T, l, A, u, byF, aW, kK, ha, aT, cz, ci, act, iV, iK, ae, ad); #c1(SLGO1B1) c2(NP_006437) c3(solute carrier organic anion transporter family member 1B1) c4(165225) c5(165226, 165227, 165228, 165229, 165230, 165231) c6( ) c7(bL, gV, T, qo, aw, cz, sM, n, aj, v, j, qf, bB, fr, x, cHa, l, cc, u, ec, Iv, byF, fS, gd, aT, oj, h, ux, dQ, bc, s, cH, aW, hC, hl, aq, aB, iR, es, eM, bE, wE, k, m, hE, B, y); #c1(SLC01B3) c2(NP_062818) c3(solute carrier organic anion transporter family member 1B3) c4(202124, 202125) c5(202126, 202127, 202128, 202129, 202130, 202131, 202132, 202133, 202134, 202135, 202136, 202137, 202138, 202139, 202140, 202141, 202142, 202143, 202144, 202145) c6( ) c7(gV, T, eX, bB, C, aY, q, ad, cHa, av, aE, aT, lG, eV, ae, bc, B, iU, hG, aW, Lf, hC, PA, hl, r, aq, g, bu, hJ, aAW, ar, rR, eM, bE, hk, gX, aUS, np, m, adg, X); #c1(SLC01B7) c2(NP_001009562) c3(putative solute carrier organic anion transporter family member 1B7) c4(23604, 23605) c5(23606, 23607, 23608, 23609, 23610, 23611, 23612, 23613, 23614, 23615, 23616, 23617) c6( ) c7(l, u); #c1(SLGO1C1) c2(NP_001139417) c3(solute carrier organic anion transporter family member 1C1 isoform 3) c4(59306) c5(59307, 59308, 59309, 59310, 59311, 59312) c6( ) c7(bS, ct, Z, gT, y, bA); #c1(SLC01C1) c2(NP_001139418) c3(solute carrier organic anion transporter family member 1C1 isoform 1) c4(59313, 59314) c5(59315, 59316, 59317, 59318, 59319, 59320, 59321, 59322, 59323, 59324, 59325, 59326, 59327, 59328, 59329, 59330) c6( ) c7(bS, ct, Z, gT, y, bA); #c1(SLGO1C1) c2(NP_059131) c3(solute carrier organic anion transporter family member 1C1 isoform 2) c4(193202) c5(193203, 193204, 193205, 193206, 193207, 193208) c6( ) c7(bS, et, Z, gT, y, bA); #c1(SLC02A1) c2(NP_005621) c3(solute carrier organic anion transporter family member 2A1) c4(158015, 158016) c5(158017, 158018, 158019, 158020, 158021, 158022, 158023, 158024, 158025, 158026, 158027, 158028) c6( ) c7(s, fV, vj, hC, aBN, r, cHb, pg, ci, avG, iK, q); #c1(SLC02A1) c2(XP_011511392) c3(solute carrier organic anion transporter family member 2A1 isoform X1) c4(301965) c5(301966, 301967, 301968, 301969, 301970, 301971) c6( ) c7(s, fV, vj, hC, aBN, r, cHb, pg, ci, avG, iK, q); #c1(SLC02B1) c2(NP_001138683) c3(solute carrier organic anion transporter family member 2B1 isoform 2) c4(57405, 57406, 57407, 57408, 57409, 57410) c5(57411, 57412, 57413, 57414, 57415, 57416, 57417, 57418, 57413, 57420, 57421, 57422, 57423, 57424, 57425, 57426, 57427, 57428, 57429, 57430, 57431, 57432, 57433, 57434, 57435, 57436) c6( ) c7(hd, aE, nB, aW, hC, aT, aq, iR, iK, ae, ad); #c1(SLC02B1) c2(NP_001138684) c3(solute carrier organic anion transporter family member 281 isoform 3) c4(57437) c5(57438, 57439, 57440, 57441, 57442, 57443, 57444, 57445, 57446, 57447, 57448, 57449, 57450, 57451, 57452, 57453) c6( ) c7(hd, aE, nB, aW, hC, aT, aq, iR, iK, ae, ad); #c1(SLC02B1) c2(NP_009187) c3(solute carrier organic anion transporter family member 281 isoform 1) c4(171383, 171384) c5(171385, 171386, 171387, 171388, 171389, 171390, 171391, 171392, 171393, 171394, 171395, 171396, 171397, 171398, 171399, 171400, 171401, 171402, 171403, 171404, 171405, 171406, 171407, 171408) c6( ) c7(hd, aE, nB, aW, hC, aT, aq, iR, iK, ae, ad); #c1(SLC03A1) c2(NP_001138516) c3(solute carrier organic anion transporter family member 3A1 isoform 2) c4(56919) c5(56920, 56921, 56922, 56923, 56924, 56925) c6( ) c7(T, aE, aW, cz, aT, k, bX); #c1(SLC03A1) c2(NP_037404) c3(solute carrier organic anion transporter family member 3A1 isoform 1) c4(175334) c5(175335, 175336, 175337, 175338, 175339, 175340) c6( ) c7(T, aE, aW, cz, aT, k, bX); #c1(SLC04A1) c2(NP_057438) c3(solute carrier organic anion transporter family member 4A1) c4(190801, 190802, 190803, 190804) c5(190805, 190806, 190807, 190808, 190809, 190810, 190811, 190812, 190813, 190814, 190815, 190816, 190817, 190818, 190819, 190820, 190821, 190822, 190823, 190824, 190825, 190826, 190827, 190828, 190829, 190830, 190831, 190832) c6( ) c7(aE, c, m, t, eJ, vk); #c1(SLC04A1) c2(XP_005260260) c3(solute carrier organic anion transporter family member 4A1 isoform X5) c4( ) c5(276501, 276502, 276503, 276504, 276505, 276506) c6( ) c7(aE, c, m, t, eJ, vk); #c1(SLC04A1) c2(XP_011527095) c3(solute carrier organic anion transporter family member 4A1 isoform X3) c4(321568) c5( ) c6( ) c7(aE, c, m, t, eJ, vk); #c1(SLC04C1) c2(NP_851322) c3(solute carrier organic anion transporter family member 4C1) c4(254562) c5(254563, 254564, 254565, 254566, 254567, 254568) c6( ) c7(cz); #c1(SLC05A1) c2(NP_001139480) c3(solute carrier organic anion transporter family member 5A1 isoform 2) c4(59413) c5(59414, 59415, 59416, 59417, 59418, 59419) c6( ) c7(iR, aW, aw, aq, aT); #c1(SLC05A1) c2(NP_001139481) c3(solute carrier organic anion transporter family member 5A1 isoform 3) c4(59420) c5(59421, 59422, 59423, 59424, 59425, 59426) c6( ) c7(iR, aW, aw, aq, aT); #c1(SLC05A1) c2(NP_112220) c3(solute carrier organic anion transporter family member 5A1 isoform 1) c4(220890) c5(220891, 220892, 220893, 220894, 220895, 220896) c6( ) c7(iR, aW, aw, aq, aT); #c1(SLC06A1) c2(NP_001275931) c3(solute carrier organic anion transporter family member 6A1 isoform 1) c4(107422, 107423) c5(107424, 107425, 107426, 107427, 107428, 107429, 107430, 107431, 107432, 107433, 107434, 107435, 107436, 107437, 107438, 107439, 107440) c6( ) c7(bM, T, go, pf, ea, if, e, al, fd, bB, qj, ci, VV, x, aE, u, dV, K, bU, hu, hH, dF, eL, azh, eG, dH, Ow, aW, Jl, iE, g, as, eE, eF, cm, bw, yd, xK, eM, nB, cj, dW, aZo, k, m, cE, dD, gU, aWG, ht, aw, n, aj, fr, qN, pM, ai, hr, b, ft, aMV, h, eV, hn, dL, vd, hB, he, dx, A, asp, sp, CM, AQ, bed, ge, fe, aq, bFN, pm, dw, kk, Ld, iO, W, bP, asl, dB, uw, at, bFO, it, B, ayV, bL, eR, aZy, Dh, yk, jx, eX, aA, cz, fF, v, j, Qo, q, J, eA, hb, aT, ae, af, bA, qw, avV, s, iU, Y, Lf, afS, r, lo, en, bu, t, iK, pb, zJ, ck, sS, nM, ac, c, ig, Nk, gX, wR, bt, rA, ao, hS, gx, id, akd, HM, jh, bs, lD, oZ, oH, Gn, eq, hF, ad, hX, dP, av, l, hd, oW, aNp, ji, d, lU, bFM, ff, eH, aZw, cr, al, Ej, aF, xH, S, bFP, iV, bz, Ga, qa, eK, es, bE, gZ, i, hE, iu, y, pC); #c1(SLC06A1) c2(NP_001275933) c3(solute carrier organic anion transporter family member 6A1 isoform 2) c4(107460) c5(107461, 107462, 107463, 107464, 107465, 107466) c6( ) c7(bM, T, gn, pf, ea, if, e, al, fd, bB, qj, ci, VV, x, aE, u, dV, K, bU, hu, hH, dF, eL, azh, eG, dH, Ow, aW, Jl, iE, g, as, eE, eF, cm, bw, yd, xK, eM, nB, cj, dW, aZo, k, m, cE, dD, gU, aWG, ht, aw, n, aj, fr, qN, pM, ai, br, b, ft, aMV, h, eV, hn, dL, vd, hB, he, dx, A, asp, sp, CM, AQ, bed, ge, fe, aq, bFN, pm, dw, kk, Ld, iO, W, bP, asl, dB, uw, at, bFO, it, B, ayV, bL, eR, aZy, Dh, yk, jx, eX, aA, cz, fF, v, j, Qn, g, J, eA, hb, aT, ae, af, bA, qw, avV, s, iU, Y, Lf, afS, r, lo, en, bu, t, iK, pb, zJ, ck, sS, nM, ac, c, ig, Nk, gX, wR, bt, rA, ao, hS, gx, id, akd, HM, jh, bs, lD, aZ, oH, Gn, eq, hF, ad, hX, dP, av, l, hd, oW, aNp, ji, d, lU, bFM, ff, eH, aZw, cr, eZ, Ej, aF, xH, S, bFP, iV, bz, Ga, qa, eK, es, bE, gZ, i, hE, iu, y, pC); #c1(SLC06A1) c2(XP_011541455) c3(solute carrier organic anion transporter family member 6A1 isoform X7) c4( ) c5(340037) c6( ) c7(bM, T, qo, pf, ea, if, e, al, fd, bB, qj, ci, VV, x, aE, u, dV, K, bU, hu, hH, dF, eL, azh, eG, dH, Ow, aW, Jl, iE, g, as, eE, eF, cm, bw, yd, xK, eM, nB, cj, dW, aZo, k, m, cE, dD, gU, aWG, ht, aw, n, aj, fr, qN, pM, ai, br, b, ft, aMV, h, eV, hn, dL, vd, hB, he, dx, A, asp, sp, CM, AQ, bed, ge, fe, aq, bFN, pm, dw, kk, Ld, iO, W, bP, asl, dB, uw, at, bFO, it, B, ayV, bL, eR, aZy, Dh, yk, jx, eX, aA, cz, fF, v, j, Qo, q, J, eA, hb, aT, ae, af, bA, qw, avV, s, iU, Y, Lf, afS, r, lo, en, bu, t, iK, pb, zJ, ck, sS, nM, ac, c, ig, Nk, gX, wR, bt, rA, an, hS, gx, id, akd, HM, jh, bs, lD, oZ, oH, Gn, eq, hF, ad, hX, dP, av, l, hd, oW, aNp, ji, d, lU, bFM, ff, eH, aZw, cr, eZ, Ej, aF, xH, S, bFP, iV, bz, Ga, qa, eK, es, bE, gZ, i, hE, iu, y, pC); #c1(SLFN12) c2(NP_001275938) c3(schlafen family member 12) c4(107467, 107468, 107469, 107470) c5(107471, 107472, 107473, 107474, 107475, 107476, 107477, 107478, 107479, 107480, 107481, 107482, 107483, 107484, 107485, 107486, 107487, 107488, 107489, 107490, 107491, 107492, 107493, 107494, 107495, 107496, 107497, 107498, 107499) c6( ) c7(li, T, eU, bE, baT, bB, Qc); #c1(SLFN12L) c2(XP_011522471) c3(schlafen family member 12-like isoform X1) c4(317098, 317099) c5(317100, 317101, 317102, 317103, 317104, 317105, 317106, 317107, 317108, 317109, 317110, 317111, 317112, 317113) c6( ) c7(h, Y, A); #c1(SLFN14) c2(NP_001123292) c3(schlafen family member 14) c4(46862) c5(46863, 46864, 46865, 46866, 46867, 46868) c6( ) c7(Y); #c1(SLFN5) c2(NP_659412) c3(schlafen family member 5) c4(239778) c5(239779, 239780, 239781, 239782, 239783, 239784) c6( ) c7(Y); #c1(SLFN5) c2(XP_005257991) c3(schlafen family member 5 isoform X1) c4(275442) c5(275443, 275444, 275445, 275446, 275447, 275448) c6( ) c7(Y); #c1(SLIT1) c2(NP_003052) c3(slit homolog 1 protein precursor) c4(134690, 134691, 134692, 134693, 134694, 134695) c5(134696, 134697, 134698, 134699, 134700, 134701, 134702, 134703, 134704, 134705, 134706, 134707, 134708, 134709, 134710, 134711, 134712, 134713, 134714, 134715, 134716, 134717, 134718, 134719, 134720, 134721, 134722, 134723, 134724, 134725, 134726, 134727, 134728, 134729, 134730, 134731, 134732, 134733, 134734, 134735, 134736, 134737, 134738, 134739, 134740, 134741, 134742, 134743, 134744, 134745, 134746, 134747, 134748, 134749, 134750) c6(134751, 134752, 134753, 134754, 134755, 134756, 134757, 134758, 134759, 134760, 134761, 134762, 134763, 134764) c7(dP, T, hd, nB, hb, aW, r, aT, aA, aF, np, y, bz, aA). #c1(SLIT2) c2(NP_001276064) c3(slit homolog 2 protein isoform 2 precursor) c4(107844, 107845) c5(107846, 107847, 107848, 107849, 107850, 107851, 107852, 107853, 107854, 107855, 107856, 107857) c6( ) c7(Mb, T, aC, fG, if, ha, aA, n, fr, ci, qN, il, AO, q, ad, eA, Bl, ft, aE, wG, ja, aT, h, ae, jf, Yj, MD, qt, aW, ff, r, fe, kp, aF, en, g, t, cm, bz, ac, dB, hk, np, m, yA, ME, adg, B); #c1(SLIT2) c2(NP_001276065) c3(slit homolog 2 protein isoform 3 precursor) c4(107858) c5(107859, 107860, 10786L107862, 107863, 107864) c6( ) c7(Mb, T, aC, fG, if, ha, aA, n, fr, ci, qN, il, AO, g, ad, eA, Bl, ft, aE, wG, ja, aT, h, ae, jf, Yj, MD, qt, aW, ff, r, fe, kp, aF, en, g, t, cm, bz, ac, dB, hk, np, m, yA, ME, adg, B); #c1(SLIT2) c2(NP_004778) c3(slit homolog 2 protein isoform 1 precursor) c4(149547) c5(149548, 149549, 149550, 149551, 149552, 149553) c6( ) c7(Mb, T, aC, fG, if, ha, aA, n, fr, ci, qN, il, AO, q, ad, eA, Bl, ft, aE, wG, ja, aT, h, ae, jf, Yj, MD, qt, aW, ff, r, fe, kp, aF, en, g, t, cm, bz, ac, dB, hk, np, m, yA, ME, adg, B); #c1(SLIT3) c2(NP_003053) c3(slit homolog 3 protein isoform 2 precursor) c4(134765, 134766) c5(134767, 134768, 134769, 134770, 134771, 134772, 134773, 134774, 134775, 134776, 134777, 134778) c6( ) c7(Mb, T, aC, if, ha, aA, n, v, fr, qN, il, AO, q, ad, eA, dP, Bl, hd, aE, wG, ja, aT, h, an, ae, bA, jf, Yj, MD, qt, aW, ff, r, fe, kp, aF, en, g, t, cm, bz, fq, nB, dB, hk, wk, np, m, yA, adg, y); #c1(SLITRK1) c2(NP_001268432) c3(SLIT and NTRK-like protein 1 precursor) c4(99930) c5(99931, 99932, 99933, 99934, 99935, 99936) c6( ) c7(rE, Wi, yL, he, qc); #c1(SLITRK2) c2(NP_115928) c3(SLIT and NTRK-like protein 2 precursor) c4(224748, 224749) c5(224750, 224751, 224752, 224753, 224754, 224755, 224756, 224757, 224758, 224759, 224760, 224761, 224762, 224763, 224764, 224765, 224766, 224767, 224768, 224769, 224770, 224771, 224772, 224773, 224774, 224775, 224776, 224777, 224778, 224779, 224780, 224781, 224782, 224783, 224784, 224785, 224786) c6( ) c7(bK); #c1(SLITRK3) c2(NP_055741) c3(SLIT and NTRK-like protein 3 precursor) c4(183203, 183204) c5(183205, 183206, 183207, 183208, 183209, 183210, 183211, 183212, 183213, 183214, 183215, 183216, 183217, 183218, 183219, 183220) c6( ) c7(oe, cd); #c1(SLITRK5) c2(NP_056382) c3(SLIT and NTRK-like protein 5 precursor) c4(187356, 187357) c5(187358, 187359, 187360, 187361, 187362, 187363, 187364, 187365, 187366, 187367, 187368, 187369) c6( ) c7(qc, hq); #c1(SLITRK6) c2(NP_115605) c3(SLIT and NTRK-like protein 6 precursor) c4(223361) c5(223362, 223363, 223364, 223365, 223366, 223367) c6( ) c7(cHc, Be); #c1(SLK) c2(NP_001291672) c3(STE20-like serine/threonine-protein kinase isoform 2) c4(116305) c5(116306, 116307, 116308, 116309, 116310, 116311) c6( ) c7(T, aW, ff, aT, lG, zC, en, lB, ae); #c1(SLK) c2(NP_055535) c3(STE20-like serine/threonine-protein kinase isoform 1) c4(181812) c5(181813, 181814, 181815, 181816, 181817, 181818) c6( ) c7(T, aW, ff, aT, lG, zC, en, lB, ae); #c1(SLMAP) c2(NP_001291349) c3(sarcolemmal membrane-associated protein isoform a) c4(115683) c5(115684, 115685, 115686, 115687, 115688, 115689) c6( ) c7(Bm, uY, hW); #c1(SLMAP) c2(NP_001291350) c3(sarcolemmal membrane-associated protein isoform c) c4(115690, 115691) c5(115692, 115693, 115694, 115695, 115696, 115697, 115698, 115699, 115700, 115701, 115702, 115703, 115704) c6( ) c7(Bm, uY, hW); #c1(SLMAP) c2(NP_001291351) c3(sarcolemmal membrane-associated protein isoform d) c4( ) c5(115705, 115706, 115707, 115708, 115709) c6( ) c7(Bm, uY, hW); #c1(SLMAP) c2(NP_001291352) c3(sarcolemmal membrane-associated protein isoform e) c4(115710) c5(115711, 115712, 115713, 115714, 115715) c6( ) c7(Bm, uY, hW); #c1(SLMAP) c2(NP_009090) c3(sarcolemmal membrane-associated protein isoform b) c4(170614) c5(170615, 170616, 170617, 170618, 170619, 170620, 170621, 170622, 170623, 170624) c6( ) c7(Bm, uY, hW); #c1(SLMAP) c2(XP_005265515) c3(sarcolemmal membrane-associated protein isoform X7) c4(279569) c5( ) c6( ) c7(Bm, uY, hW); #c1(SLMAP) c2(XP_005265516) c3(sarcolemmal membrane-associated protein isoform X8) c4(279570) c5( ) c6( ) c7(Bm, uY, hW); #c1(SLMAP) c2(XP_005265521) c3(sarcolemmal membrane-associated protein isoform X11) c4(279571, 279572) c5(279573, 279574, 279575, 279576, 279577, 279578, 279579, 279580, 279581, 279582, 279583, 279584, 279585) c6( ) c7(Bm, uY, hW); #c1(SLMAP) c2(XP_005265529) c3(sarcolemmal membrane-associated protein isoform X19) c4(279586) c5( ) c6( ) c7(Bm, uY, hW); #c1(SLMAP) c2(XP_006713389) c3(sarcolemmal membrane-associated protein isoform X18) c4( ) c5(287165) c6( ) c7(Bm, uY, hW); #c1(SLMAP) c2(XP_011532407) c3(sarcolemmal membrane-associated protein isoform X20) c4( ) c5(328595, 328596, 328597, 328598, 328599, 328600, 328601) c6( ) c7(Bm, uY, hW); #c1(SLMO2) c2(NP_057129) c3(protein slowmo homolog 2 isoform 1) c4(189039) c5(189040, 189041, 189042, 189043, 189044, 189045) c6( ) c7(aC); #c1(SLN) c2(NP_003054) c3(sarcolipin) c4(134779) c5(134780, 134781, 134782, 134783, 134784, 134785, 134786, 134787, 134788, 134789, 134790, 134791, 134792, 134793) c6( ) c7(T, mr, acl, if, akz, bB, n, akA, v, j, qN, cd, aT, aua, Y, aW, EH, Dy, bE, bwE, uS, bD); #c1(SLPI) c2(NP_003055) c3(antileukoproteinase precursor) c4(134794, 134795) c5(134796, 134797, 134798, 134799, 134800, 134801, 134802, 134803) c6(134804, 134805) c7(lD, T, aC, iV, fR, aD, jh, aA, bB, cHd, afK, g, fr, fd, g, eW, BY, dP, av, cfF, cfE, Tl, Cj, aE, WY, pX, ld, kl, aT, ah, h, ji, MO, nJ, bc, aa, ly, Ck, xR, vT, HY, aW, TH, ff, eH, hl, Ce, aq, aaE, kp, aF, en, Ca, anW, t, cl, bz, Ci, pb, DF, lx, eF, iK, D, y, iQ, ac, eM, aBs, TJ, bE, TG, au, X, hR, at, rx, CZ, aS, m, lC, rA, Vj, B, ao); #c1(SLTM) c2(NP_001013865) c3(SAFB-like transcription modulator isoform b) c4(25796) c5( ) c6( ) c7(T, aC, aCh, pf, bll, bO, fd, bB, ci, aY, bv, aE, Xc, pX, Qk, K, KC, eG, iE, aW, g, as, eF, ir, bw, QA, Qt, iP, eM, iA, aep, m, Xu, ik, n, fr, rP, ft, gd, kH, dL, kj, aq, kp, Qy, SE, dB, ayS, hL, auh, it, B, dA, eR, jx, aA, aNG, lu, q, eA, aT, ahg, rz, ae, jf, s, nO, oV, Y, r, en, aDY, cl, t, Vi, iK, bN, Qi, nM, iM, np, bt, ao, VB, hS, id, LX, bXc, jh, KD, Sv, Fc, aue, ad, dP, av, hd, ib, py, Db, hP, d, bug, je, PE, ff, eH, gl, aF, adj, jb, bz, bF, es, RV, bE, lf, iu); #c1(SLTM) c2(NP_079031) c3(SAFB-like transcription modulator isoform a) c4(216666) c5(216667, 216668, 216669, 216670, 216671) c6( ) c7(T, aC, aCh, pf, bll, bO, fd, bB, ci, aY, bv, aE, Xc, pX, Qk, K, KC, eG, iE, aW, g, as, eF, ir, bw, QA, Qt, iP, eM, iA, aep, m, Xu, ik, n, fr, rP, ft, gd, kH, dL, kj, aq, kp, Qy, SE, dB, ayS, hL, auh, it, B, dA, eR, jx, aA, aNG, lu, g, eA, aT, ahg, rz, ae, jf, s, nO, oV, Y, r, en, aDY, cl, t, Vi, iK, bN, Qi, nM, iM, np, bt, an, VB, hS, id, LX, bXc, jh, KD, Sv, Fc, aue, ad, dP, av, hd, ib, py, Db, hP, d, bug, je, PE, ff, eH, gl, aF, adj, jb, bz, bF, es, RV, bE, lf, iu); #c1(SLTM) c2(XP_006720753) c3(SAFB-like transcription modulator isoform X12) c4(293663) c5(293664, 293665, 293666, 293667, 293668, 293669, 293670, 293671, 293672, 293673, 293674, 293675) c6( ) c7(T, aC, aCh, pf, bll, bO, fd, bB, ci, aY, bv, aE, Xc, pX, Qk, K, KC, eG, iE, aW, g, as, eF, ir, bw, QA, Qt, iP, eM, iA, aep, m, Xu, ik, n, fr, rP, ft, gd, kH, dL, kj, aq, kp, Qy, SE, dB, ayS, hL, auh, it, B, dA, eR, jx, aA, aNG, lu, q, eA, aT, ahg, rz, ae, jf, s, nO, oV, Y, r, en, aDY, cl, t, Vi, iK, bN, Qi, nM, iM, np, bt, ao, VB, hS, id, LX, bXc, jh, KD, Sv, Fc, aue, ad, dP, av, hd, ib, py, Db, hP, d, bug, je, PE, ff, eH, gl, aF, adj, jb, bz, bF, es, RV, bE, lf, iu); #c1(SLTM) c2(XP_011520332) c3(SAFB-like transcription modulator isoform X10) c4( ) c5(315192) c6( ) c7(T, aC, aCh, pf, bll, bO, fd, bB, ci, aY, bv, aE, Xc, pX, Qk, K, KC, eG, iE, aW, g, as, eF, ir, bw, QA, Qt, iP, eM, iA, aep, m, Xu, ik, n, fr, rP, ft, gd, kH, dL, kj, aq, kp, Qy, SE, dB, ayS, hL, auh, it, B, dA, eR, jx, aA, aNG, lu, q, eA, aT, ahg, rz, ae, jf, s, nO, oV, Y, r, en, aDY, cl, t, Vi, iK, bN, Qi, nM, iM, np, bt, ao, VB, hS, id, LX, bXc, jh, KD, Sv, Fc, aue, ad, dP, av, hd, ib, py, Db, hP, d, bug, je, PE, ff, eH, gl, aF, adj, jb, bz, bF, es, RV, bE, lf, iu); #c1(SLU7) c2(NP_006416) c3(pre-mRNA-splicing factor SLU7) c4(164837) c5(164838, 164839, 164840, 164841, 164842, 164843, 164844, 164845, 164846, 164847, 164848, 164849, 164850, 164851, 164852, 164853, 164854, 164855, 164856, 164857) c6( ) c7(T, bB, v, rP, hF, cd, ad, M, aT, K, bNL, ae, dF, bfl, xX, d, aW, Y, lb, t, nC, bz, bw, bN, iP, W, c, bE, cj, nw, np, m, bt, B, de); #c1(SLU7) c2(XP_005265850) c3(pre-mRNA-splicing factor SLU7 isoform X2) c4(279783, 279784, 279785) c5(279786, 279787, 279788, 279789) c6( ) c7(T, bB, v, rP, hF, cd, ad, M, aT, K, bNL, ae, dF, bfl, xX, d, aW, Y, lb, t, nC, bz, bw, bN, iP, W, c, bE, cj, nw, np, m, bt, B, de); #c1(SLORP1) c2(NP_065160) c3(secreted Ly-G/uPAR-related protein 1 precursor) c4(204341) c5(204342, 204343, 204344, 204345, 204346, 204347) c6( ) c7(T, by, fu, bX, ai, bCx, ld, aT, h, lQ, bU, aW, Y, bhi, baP, lo, dr, Rd, arE, bvc, Lg, hh); #c1(SLX4) c2(NP_115820) c3(structure-specific endonuclease subunit SLX4) c4(224084) c5(224085, 224086, 224087, 224088, 224089, 224090) c6( ) c7(aW, T, os, oZ, aT); #c1(SLX4) c2(XP_011521017) c3(structure-specific endonuclease subunit SLX4 isoform X1) c4( ) c5(315960, 315961, 315962, 315963) c6( ) c7(aW, T, os, oZ, aT); #c1(SLX4IP) c2(NP_001009608) c3(protein SLX4IP) c4(23673) c5(23674, 23675, 23676, 23677, 23678, 23679) c6( ) c7(x, k); #c1(SMAD1) c2(NP_005891) c3(mothers against decapentaplegic homolog 1) c4(160138, 160139, 160140, 160141, 160142, 160143) c5(160144, 160145, 160146, 160147, 160148, 160149, 160150, 160151, 160152, 160153, 160154, 160155, 160156, 160157, 160158, 160159, 160160, 160161, 160162) c6( ) c7(aC, gU, if, jh, aA, hy, ah, j, qN, ad, av, aE, BJ, ld, aT, bl, bq, ae, A, B, BN, iU, aW, ff, eH, r, fQ, yy, aq, aF, en, eF, t, Ew, iT, w, he, m, lC, bt, ne); #c1(SMAD1) c2(XP_005263050) c3(mothers against decapentaplegic homolog 1 isoform X2) c4( ) c5(278247, 278248, 278249, 278250, 278251, 278252, 278253, 278254, 278255, 278256, 278257, 278258, 278259, 278260, 278261, 278262, 278263, 278264, 278265, 278266, 278267, 278268, 278269, 278270, 278271, 278272, 278273, 278274, 278275, 278276) c6( ) c7(aC, gU, if, jh, aA, hy, ah, j, qN, ad, av, aE, BJ, ld, aT, bl, bq, ae, A, B, BN, iU, aW, ff, eH, r, fQ, yy, aq, aF, en, eF, t, Ew, iT, w, hc, m, lC, bt, ne); #c1(SMAD2) c2(XP_006722514) c3(mothers against decapentaplegic homolog 2 isoform X1) c4(294721) c5(294722, 294723, 294724, 294725, 294726, 294727, 294728, 294729, 294730, 294731, 294732) c6( ) c7(lD, bM, T, aC, ea, if, al, aHH, fd, bB, aeu, ci, Na, aE, K, bc, ly, Jl, aW, Az, MV, g, eF, aKj, eE, cm, eM, iT, vA, Hb, m, NT, aj, fr, qN, BR, bkP, dL, wC, fQ, fe, kp, Hu, op, lx, hk, Vy, mg, at, bD, it, B, fG, yk, jx, aA, v, q, J, eA, brH, sy, aT, cy, ae, yL, r, en, cl, En, t, iK, pb, kP, gX, oX, Ep, bt, hS, jh, ad, av, sN, ah, d, lU, BO, ff, eH, cr, aF, bz, LB, bE, wz, aS, be, MC, lC, ZW); #c1(SMAD2) c2(XP_011524285) c3(mothers against decapentaplegic homolog 2 isoform X2) c4(318774) c5(318775, 318776, 318777, 318778, 318779, 318780) c6( ) c7(lD, bM, T, aC, ea, if, al, aHH, fd, bB, aeu, ci, Na, aE, K, bc, ly, Jl, aW, Az, MV, g, eF, aKj, eE, cm, eM, iT, vA, Hb, m, NT, aj, fr, qN, BR, bkP, dL, wC, fQ, fe, kp, Hu, op, lx, hk, Vy, mg, at, bD, it, B, fG, yk, jx, aA, v, q, J, eA, brH, sy, aT, cy, ae, yL, r, en, cl, En, t, iK, pb, kP, gX, oX, Ep, bt, hS, jh, ad, av, sN, ah, d, lU, BO, ff, eH, cr, aF, bz, LB, bE, wz, aS, be, MC, lC, ZW); #c1(SMAD3) c2(NP_001138574) c3(mothers against decapentaplegic homolog 3 isoform 2) c4( ) c5(57024, 57025, 57026, 57027, 57028, 57029) c6( ) c7(lD, bM, T, aC, Ap, fR, ea, al, Av, bB, lR, ci, Na, aE, HR, K, bc, Qe, ly, yo, aW, Az, hl, eE, eM, vA, iS, Hb, m, dD, NT, n, eW, bRT, hw, Do, FN, h, wC, A, fe, aq, kp, op, lx, kT, bP, dB, bo, at, cHe, it, B, bL, dA, fG, yk, jx, aA, hy, v, j, q, eA, mj, BJ, sy, aT, ae, af, jf, afG, bf, NE, Y, yL, la, r, en, t, iK, pb, ck, bnc, iM, ac, dy, bt, ao, vi, eq, hF, Rk, ad, kL, hX, av, F, sN, lC, lz, nJ, d, BN, je, ff, aF, iV, bz, bF, es, bE, aS, be, lf, ne, y); #c1(SMAD3) c2(NP_001138575) c3(mothers against decapentaplegic homolog 3 isoform 3) c4(57030) c5(57031, 57032, 57033, 57034, 57035, 57036) c6( ) c7(lD, bM, T, aC, Ap, fR, ea, al, Av, bB, lR, ci, Na, aE, HR, K, bc, Qe, ly, yo, aW, Az, hl, eE, eM, vA, iS, Hb, m, dD, NT, n, eW, bRT, hw, Do, FN, h, wC, A, fe, aq, kp, op, lx, kT, bP, dB, bo, at, cHe, it, B, bL, dA, fG, yk, jx, aA, hy, v, j, q, eA, mj, BJ, sy, aT, ae, af, jf, afG, bf, NE, Y, yL, la, r, en, t, iK, pb, ck, bnc, iM, ac, dy, bt, ao, vi, eq, hF, Rk, ad, kL, hX, av, F, sN, lC, lz, nJ, d, BN, je, ff, aF, iV, bz, bE, es, bE, aS, be, lf, ne, y); #c1(SMAD3) c2(NP_001138576) c3(mothers against decapentaplegic homolog 3 isoform 4) c4( ) c5(57037, 57038, 57039, 57040, 57041) c6( ) c7(lD, bM, T, aC, Ap, fR, ea, al, Av, bB, lR, ci, Na, aE, HR, K, bc, Qe, ly, yo, aW, Az, hl, eE, eM, vA, iS, Hb, m, dD, NT, n, eW, bRT, hw, Do, FN, h, wC, A, fe, aq, kp, op, lx, kT, bP, dB, bo, at, cHe, it, B, bL, dA, fG, yk, jx, aA, hy, v, j, q, eA, mj, BJ, sy, aT, ae, af, jf, afG, bf, NE, Y, yL, la, r, en, t, iK, pb, ck, bnc, iM, ac, dy, bt, ao, vi, eq, hF, Rk, ad, kL, hX, av, F, sN, lC, lz, nJ, d, BN, je, ff, aF, iV, bz, bE, es, bE, aS, be, lf, ne, y); #c1(SMAD3) c2(NP_005893) c3(mothers against decapentaplegic homolog 3 isoform 1) c4(160163, 160164) c5(160165, 160166, 160167, 160168, 160169, 160170, 160171, 160172, 160173, 160174, 160175) c6( ) c7(lD, bM, T, aC, Ap, fR, ea, al, Av, bB, lR, ci, Na, aE, HR, K, bc, Qe, ly, ye, aW, Az, hl, eE, eM, vA, iS, Hb, m, dD, NT, n, eW, bRT, hw, Do, FN, h, wC, A, fe, aq, kp, op, lx, kT, bP, dB, bo, at, cHe, it, B, bL, dA, fG, yk, jx, aA, hy, v, j, q, eA, mj, BJ, sy, aT, ae, af, jf, afG, bf, NE, Y, yL, la, r, en, t, iK, pb, ck, bnc, iM, ac, dy, bt, ao, vi, eq, hF, Rk, ad, kL, hX, av, F, sN, lC, lz, nJ, d, BN, je, ff, aF, iV, bz, bE, es, bE, aS, be, lf, ne, y); #c1(SMAD3) c2(XP_011519861) c3(mothers against decapentaplegic homolog 3 isoform X1) c4(314605) c5( ) c6( ) c7(lD, bM, T, aC, Ap, fR, ea, al, Av, bB, lR, ci, Na, aE, HR, K, be, Qe, ly, ye, aW, Az, hl, eE, eM, vA, iS, Hb, m, dD, NT, n, eW, bRT, hw, Do, FN, h, wC, A, fe, aq, kp, op, lx, kT, bP, dB, bo, at, cHe, it, B, bL, dA, fG, yk, jx, aA, hy, v, j, q, eA, mj, BJ, sy, aT, ae, af, jf, afG, bf, NE, Y, yL, la, r, en, t, iK, pb, ck, bnc, iM, ac, dy, bt, ao, vi, eq, hF, Rk, ad, kL, hX, av, F, sN, lC, lz, nJ, d, BN, je, ff, aF, iV, bz, bE, es, bE, aS, be, lf, ne, y); #c1(SMAD3) c2(XP_011519862) c3(mothers against decapentaplegic homolog 3 isoform X2) c4( ) c5(314606) c6( ) c7(lD, bM, T, aC, Ap, fR, ea, al, Av, bB, lR, ci, Na, aE, HR, K, bc, Qe, ly, yo, aW, Az, hl, eE, eM, vA, iS, Hb, m, dD, NT, n, eW, bRT, hw, Do, FN, h, wC, A, fe, aq, kp, op, lx, kT, bP, dB, bo, at, cHe, it, B, bL, dA, fG, yk, jx, aA, hy, v, j, q, eA, mj, BJ, sy, aT, ae, af, jf, afG, bf, NE, Y, yL, la, r, en, t, iK, pb, ck, bnc, iM, ac, dy, bt, ao, vi, eq, hF, Rk, ad, kL, hX, av, F, sN, lC, lz, nJ, d, BN, je, ff, aF, iV, bz, bE, es, bE, aS, be, lf, ne, y); #c1(SMAD4) c2(NP_005350) c3(mothers against decapentaplegic homolog 4) c4(155304, 155305, 155306) c5(155307, 155308, 155309, 155310, 155311, 155312, 155313, 155314, 155315, 155316, 155317, 155318, 155319, 155320, 155321, 155322, 155323, 155324, 155325, 155326, 155327, 155328, 155329, 155330) c6( ) c7(T, os, aC, rV, pf, if, al, aHH, bB, lR, ci, ip, Na, bv, aE, gH, auB, K, hu, zy, eL, Us, YL, Jl, aW, Az, nY, g, MV, cm, eM, nB, iA, ki, go, vA, Ji, aep, Hb, m, gn, YK, Qj, wu, sw, ht, NT, n, fr, gN, Cd, eW, Bl, jz, cGT, kl, gd, dL, KV, Yl, wC, Ck, A, aiB, Yd, AQ, ks, fQ, ahJ, aq, kp, op, bP, bcd, it, B, bL, ka, dA, fG, yk, rf, aA, AO, Cb, q, er, eA, eJ, mj, Yn, brH, aT, Tj, ae, kl, blD, Yw, s, vT, Qr, Y, yL, r, en, bu, cl, LV, t, iK, pb, OC, ck, nM, gX, np, bt, bNx, cHf, Mb, oZ, ad, hX, av, hd, Cj, Db, Ot, oj, oW, io, ji, wm, Yi, WW, BO, qt, Hh, ff, cHg, yy, aF, iV, bz, bF, es, pc, bE, Lb, aS, MC, lC, X, BA); #c1(SMAD5) c2(NP_001001420) c3(mothers against decapentaplegic homolog 5) c4(18364, 18365, 18366, 18367) c5(18368, 18369, 18370, 18371, 18372, 18373, 18374, 18375, 18376, 18377, 18378, 18379, 18380, 18381, 18382, 18383, 18384, 18385, 18386, 18387, 18388, 18389, 18390, 18391, 18392, 18393, 18394, 18395, 18396) c6( ) c7(ck, av, T, A, bP, fR, go, BJ, lC, r, yy, hN, fe, bw, ji, q, iV, aKj, bt, B); #c1(SMAD6) c2(NP_005576) c3(mothers against decapentaplegic homolog 6) c4(157592, 157593) c5(157594, 157595, 157596, 157597, 157598, 157599, 157600, 157601, 157602, 157603, 157604, 157605, 157606) c6( ) c7(bL, adf, acW, eM, ff, lC, r, at, sl, ci, K, m, uE, t, en, bz, q, eA); #c1(SMAD6) c2(XP_011519863) c3(mothers against decapentaplegic homolog 6 isoform X1) c4(314607) c5(314608, 314609, 314610, 314611, 314612, 314613) c6( ) c7(bL, adf, acW, eM, ff, lC, r, at, si, ci, K, m, uE, t, en, bz, q, eA); #c1(SMAD7) c2(NP_001177751) c3(mothers against decapentaplegic homolog 7 isoform 3) c4( ) c5(72961, 72962, 72963, 72964, 72965, 72966, 72967, 72968) c6( ) c7(bL, bM, T, aC, dA, wu, sw, fG, acl, aHH, fZ, aA, n, hy, v, j, ci, uE, bB, qN, lR, fr, q, ad, eA, Na, blC, aE, il, aT, vw, je, ji, K, wm, pj, Ha, ae, aiJ, Qe, cHh, kl, B, BN, yo, vT, A, aW, Y, yL, az, gC, oV, r, fe, ff, kp, aF, en, cl, t, bw, bz, pb, op, ck, es, iO, iM, nB, bE, w, ag, vA, cEp, X, hL, cj, Hs, dy, m, byK, ne); #c1(SMAD7) c2(NP_005895) c3(mothers against decapentaplegic homolog 7 isoform 1) c4(160176, 160177) c5(160178, 160179, 160180, 160181, 160182, 160183, 160184, 160185, 160186) c6( ) c7(bL, bM, T, aC, dA, wu, sw, fG, acl, aHH, fZ, aA, n, hy, v, j, ci, uE, bB, qN, lR, fr, q, ad, eA, Na, blC, aE, il, aT, vw, je, ji, K, wm, pj, Ha, ae, aiJ, Qe, cHh, kl, B, BN, yo, vT, A, aW, Y, yL, az, gC, oV, r, fe, ff, kp, aF, en, cl, t, bw, bz, pb, op, ck, es, iO, iM, nB, bE, w, ag, vA, cEp, X, hL, cj, Hs, dy, m, byK, ne); #c1(SMAD9) c2(NP_001120689) c3(mothers against decapentaplegic homolog 9 isoform a) c4(44592) c5(44593, 44594, 44595, 44596, 44597, 44598, 44599, 44600, 44601, 44602) c6( ) c7(lD, ly, T, s, cHi, bB, BZ, lC, ae, ad, lx, BY); #c1(SMAD9) c2(NP_005896) c3(mothers against decapentaplegic homolog 9 isoform b) c4(160187) c5(160188, 160189, 160190, 160191, 160192, 160193, 160194) c6( ) c7(lD, ly, T, s, cHi, bB, BZ, lC, ae, ad, lx, BY); #c1(SMAGP) c2(NP_001029045) c3(small cell adhesion glycoprotein) c4(30743) c5(30744, 30745, 30746, 30747, 30748, 30749, 30750, 30751, 30752, 30753) c6( ) c7(T, q, eJ, r); #c1(SMAP1) c2(NP_001037770) c3(stromal membrane-associated protein 1 isoform A) c4(34128, 34129) c5(34130, 34131, 34132, 34133, 34134, 34135) c6( ) c7(r); #c1(SMAP1) c2(NP_001268368) c3(stromal membrane-associated protein 1 isoform C) c4(99796) c5(99797, 99798, 99799, 99800, 99801, 99802) c6( ) c7(r); #c1(SMAP1) c2(NP_068759) c3(stromal membrane-associated protein 1 isoform B) c4(210243) c5(210244, 210245, 210246, 210247, 210248, 210249) c6( ) c7(r); #c1(SMAP1) c2(XP_005248817) c3(stromal membrane-associated protein 1 isoform X5) c4(268611, 268612) c5(268613, 268614, 268615, 268616, 268617, 268618, 268619, 268620, 268621, 268622, 268623, 268624, 268625, 268626, 268627, 268628, 268629, 268630, 268631, 268632, 268633, 268634, 268635, 268636) c6( ) c7(r); #c1(SMAP1) c2(XP_011534350) c3(stromal membrane-associated protein 1 isoform X4) c4(330730) c5( ) c6( ) c7(r); #c1(SMARCA1) c2(NP_001269803) c3(probable global transcription activator SNF2L1 isoform d) c4(102879) c5( ) c6( ) c7(eW, T, Or, bB, Sv, iJ, q, ad, eA, hX, ip, bv, av, x, py, aE, cHj, agk, ae, gj, d, Y, ff, r, nf, lo, La, en, as, t, bz, ck, es, bP, eM, iA, bE, k, B); #c1(SMARCA1) c2(XP_005262518) c3(probable global transcription activator SNF2L1 isoform X1) c4(277992) c5(277993, 277994, 277995, 277996, 277997, 277998, 277999) c6( ) c7(eW, T, Or, bB, Sv, iJ, q, ad, eA, hX, ip, bv, av, x, py, aE, cHj, agk, ae, gj, d, Y, ff, r, nf, lo, La, en, as, t, bz, ck, es, bP, eM, iA, bE, k, B); #c1(SMARCA1) c2(XP_005262519) c3(probable global transcription activator SNF2L1 isoform X2) c4( ) c5(278000, 278001, 278002, 278003, 278004, 278005) c6( ) c7(eW, T, Or, bB, Sv, iJ, q, ad, eA, hX, ip, bv, av, x, py, aE, cHj, agk, ae, gj, d, Y, ff, r, nf, lo, La, en, as, t, bz, ck, es, bP, eM, iA, bE, k, B); #c1(SMARCA1) c2(XP_006724845) c3(probable global transcription activator SNF2L1 isoform X3) c4(296453) c5(296454, 296455, 296456, 296457, 296458, 296459, 296460, 296461, 296462, 296463) c6( ) c7(eW, T, Or, bB, Sv, iJ, q, ad, eA, hX, ip, bv, av, x, py, aE, cHj, agk, ae, gj, d, Y, ff, r, nf, lo, La, en, as, t, bz, ck, es, bP, eM, iA, bE, k, B); #c1(SMARCA2) c2(NP_001276326) c3(probable global transcription activator SNF2L2 isoform c) c4(108032, 108033) c5(108034, 108035, 108036, 108037, 108038, 108039, 108040, 108041, 108042, 108043, 108044, 108045, 108046) c6( ) c7(T, yk, Or, aw, EQ, v, bRy, Ea, ci, Fc, iJ, eA, Pu, ad, eJ, av, iu, aE, cHk, qK, aT, agk, rz, d, Y, ff, nf, La, en, g, as, iK, all, ck, sS, ac, qe, ER, B); #c1(SMARCA2) c2(NP_001276327) c3(probable global transcription activator SNF2L2 isoform d) c4(108047) c5(108048, 108049, 108050, 108051, 108052, 108053, 108054, 108055, 108056, 108057, 108058, 108059, 108060, 108061, 108062, 108063, 108064, 108065, 108066, 108067, 108068, 108069, 108070, 108071) c6( ) c7(T, yk, Or, aw, EQ, v, bRy, Ea, ci, Fc, iJ, eA, Pu, ad, eJ, av, iu, aE, cHk, qK, aT, agk, rz, d, Y, ff, nf, La, en, g, as, iK, all, ck, sS, ac, qe, ER, B); #c1(SMARCA2) c2(NP_001276328) c3(probable global transcription activator SNF2L2 isoform e precursor) c4(108072, 108073) c5(108074, 108075, 108076, 108077, 108078, 108079, 108080, 108081, 108082, 108083, 108084) c6( ) c7(T, yk, Or, aw, EQ, v, bRy, Ea, ci, Fc, iJ, eA, Pu, ad, eJ, av, iu, aE, cHk, qK, aT, agk, rz, d, Y, ff, nf, La, en, g, as, iK, all, ck, sS, ac, qe, ER, B); #c1(SMARCA2) c2(NP_001276329) c3(probable global transcription activator SNF2L2 isoform f precursor) c4(108085) c5(108086, 108087, 108088, 108089, 108090, 108091, 108092, 108093) c6( ) c7(T, yk, Or, aw, EQ, v, bRy, Ea, ci, Fc, iJ, eA, Pu, ad, eJ, av, iu, aE, cHk, qK, aT, agk, rz, d, Y, ff, nf, La, en, g, as, iK, all, ck, sS, ac, qe, ER, B); #c1(SMARCA2) c2(NP_003061) c3(probable global transcription activator SNF2L2 isoform a) c4(134822, 134823, 134824, 134825, 134826) c5(134827, 134828, 134829, 134830, 134831, 134832, 134833, 134834, 134835, 134836, 134837, 134838, 134839, 134840, 134841, 134842, 134843, 134844, 134845, 134846, 134847, 134848, 134849) c6( ) c7(T, yk, Or, aw, EQ, v, bRy, Ea, ci, Fc, iJ, eA, Pu, ad, eJ, av, iu, aE, cHk, qK, aT, agk, rz, d, Y, ff, nf, La, en, g, as, iK, all, ck, sS, ac, qe, ER, B); #c1(SMARCA2) c2(NP_620614) c3(probable global transcription activator SNF2L2 isoform b) c4(237998, 237999) c5(238000, 238001, 238002, 238003, 238004, 238005, 238006, 238007, 238008, 238009, 238010) c6( ) c7(T, yk, Or, aw, EQ, v, bRy, Ea, ci, Fc, iJ, eA, Pu, ad, eJ, av, iu, aE, cHk, qk, aT, agk, rz, d, Y, ff, nf, La, en, g, as, iK, all, ck, sS, ac, qe, ER, B); #c1(SMARCA4) c2(NP_001122316) c3(transcription activator BRG1 isoform B) c4(46516) c5(46517, 46518, 46519, 46520, 46521, 46522, 46523, 46524, 46525, 46526, 46527) c6( ) c7(T, os, dD, ea, yk, e, Or, aw, iW, aA, jh, oZ, j, ci, eq, Fc, q, Pu, ad, qH, eA, bv, eJ, ft, av, aE, ec, iu, x, oj, aT, vg, vc, K, bq, agk, pk, ae, jf, cHm, d, je, s, cHl, aW, Y, AQ, cHn, ff, nf, aF, La, en, g, as, t, bz, all, ck, sS, iM, ac, qe, asl, bE, eM, bP, OD, k, ER, MC, lC, B); #c1(SMARCA4) c2(XP_005260085) c3(transcription activator BRG1 isoform X7) c4(276435) c5( ) c6( ) c7(T, os, dD, ea, yk, e, Or, aw, iW, aA, jh, oZ, j, ci, eq, Fc, q, Pu, ad, qH, eA, bv, eJ, ft, av, aE, ec, iu, x, oj, aT, vg, vc, K, bq, agk, pk, ae, jf, cHm, d, je, s, cHl, aW, Y, AQ, cHn, ff, nf, aF, La, en, g, as, t, bz, all, ck, sS, iM, ac, qe, asl, bE, eM, bP, OD, k, ER, MC, lC, B); #c1(SMARCA4) c2(XP_005260089) c3(transcription activator BRG1 isoform X1) c4(276436) c5(276437, 276438, 276439, 276440, 276441, 276442, 276443, 276444, 276445, 276446, 276447, 276448) c6( ) c7(T, os, dD, ea, yk, e, Or, aw, iW, aA, jh, oZ, j, ci, eq, Fc, q, Pu, ad, qH, eA, bv, eJ, ft, av, aE, ec, iu, x, oj, aT, vg, vc, K, bq, agk, pk, ae, jf, cHm, d, je, s, cHl, aW, Y, AQ, cHn, ff, nf, aF, La, en, g, as, t, bz, all, ck, sS, iM, ac, qe, asl, bE, eM, bP, OD, k, ER, MC, lC, B); #c1(SMARCA4) c2(XP_005260090) c3(transcription activator BRG1 isoform X2) c4(276449) c5(276450, 276451, 276452, 276453, 276454, 276455) c6( ) c7(T, os, dD, ea, yk, e, Or, aw, iW, aA, jh, oZ, j, ci, eg, Fc, q, Pu, ad, qH, eA, bv, eJ, ft, av, aE, ec, iu, x, oj, aT, vg, vc, K, bq, agk, pk, ae, jf, cHm, d, je, s, cHl, aW, Y, AQ, cHn, ff, nf, aF, La, en, g, as, t, bz, all, ck, sS, iM, ac, ge, asl, bE, eM, bP, OD, k, ER, MC, lC, B); #c1(SMARCA4) c2(XP_005260091) c3(transcription activator BRG1 isoform X3) c4(276456) c5(276457, 276458, 276459, 276460, 276461, 276462) c6( ) c7(T, os, dD, ea, yk, e, Or, aw, iW, aA, jh, oZ, j, ci, eq, Fc, q, Pu, ad, qH, eA, bv, eJ, ft, av, aE, ec, iu, x, oj, aT, vg, vc, K, bq, agk, pk, ae, jf, cHm, d, je, s, cHl, aW, Y, AQ, cHn, ff, nf, aF, La, en, g, as, t, bz, all, ck, sS, iM, ac, qe, asl, bE, eM, bP, OD, k, ER, MC, lC, B); #c1(SMARCA4) c2(XP_005260092) c3(transcription activator BRG1 isoform X4) c4(276463) c5(276464, 276465, 276466, 276467, 276468, 276469, 276470, 276471, 276472, 276473, 276474, 276475, 276476, 276477, 276478) c6( ) c7(T, os, dD, ea, yk, e, Or, aw, iW, aA, jh, oZ, j, ci, eq, Fc, q, Pu, ad, qH, eA, bv, eJ, ft, av, aE, ec, iu, x, oj, aT, vg, vc, K, bq, agk, pk, ae, jf, cHm, d, je, s, cHl, aW, Y, AQ, cHn, ff, nf, aF, La, en, g, as, t, bz, all, ck, sS, iM, ac, qe, asl, bE, eM, bP, OD, k, ER, MC, lC, B); #c1(SMARCA4) c2(XP_011526500) c3(transcription activator BRG1 isoform X5) c4(320791) c5(320792, 320793, 320794, 320795, 320796, 320797) c6( ) c7(T, os, dD, ea, yk, e, Or, aw, iW, aA, jh, oZ, j, ci, eq, Fc, q, Pu, ad, qH, eA, bv, eJ, ft, av, aE, ec, iu, x, oj, aT, vg, vc, K, bq, agk, pk, ae, jf, cHm, d, je, s, cHl, aW, Y, AQ, cHn, ff, nf, aF, La, en, g, as, t, bz, all, ck, sS, iM, ac, ge, asl, bE, eM, bP, OD, k, ER, MC, lC, B); #c1(SMARCA5) c2(NP_003592) c3(SWI/SNF-related matrix-associated actin-dependent regulator of chromatin subfamily A member 5) c4(139418, 139419) c5(139420, 139421, 139422, 139423, 139424, 139425, 139426, 139427, 139428, 139429, 139430, 139431, 139432, 139433, 139434, 139435) c6( ) c7(ck, if, jf, aW, aT, Ou, S, hF, bt, eW, dx, hX); #c1(SMARCAD1) c2(NP_001121901) c3(SWI/SNF-related matrix-associated actin-dependent regulator of chromatin subfamily A containing DEAD/H box 1 isoform a) c4(46316, 46317) c5(46318, 46319, 46320, 46321, 46322, 46323, 46324, 46325, 46326, 46327) c6( ) c7(bL, T, hW, LX, eH, eF, he); #c1(SMARCAD1) c2(NP_064544) c3(SWI/SNF-related matrix-associated actin-dependent regulator of chromatin subfamily A containing DEAD/H box 1 isoform b) c4(202913) c5(202914, 202915, 202916, 202917, 202918, 202919, 202920, 202921, 202922, 202923, 202924, 202925) c6( ) c7(bL, T, hW, LX, eH, eF, he); #c1(SMARCAL1) c2(XP_005246688) c3(SWI/SNF-related matrix-associated actin-dependent regulator of chromatin subfamily A-like protein 1 isoform X1) c4(267342) c5(267343, 267344, 267345, 267346, 267347, 267348, 267349, 267350, 267351, 267352, 267353, 267354, 267355, 267356, 267357, 267358, 267359) c6( ) c7(Pw, Pv, aGC, eR, gi, dy, K, lM, hE, Pu); #c1(SMARCAL1) c2(XP_006712620) c3(SWI/SNF-related matrix-associated actin-dependent regulator of chromatin subfamily A-like protein 1 isoform X2) c4(286746, 286747, 286748, 286749) c5(286750, 286751, 286752, 286753, 286754, 286755, 286756, 286757, 286758, 286759, 286760, 286761, 286762, 286763, 286764, 286765, 286766, 286767, 286768) c6( ) c7(Pw, Pv, aGC, eR, gi, dy, K, lM, hE, Pu); #c1(SMARCB1) c2(NP_001007469) c3(SWI/SNF-related matrix-associated actin-dependent regulator of chromatin subfamily B member 1 isoform b) c4(22727) c5(22728, 22729, 22730, 22731, 22732, 22733, 22734) c6( ) c7(T, kh, aC, aiH, fR, YU, aNA, Or, n, Sv, ci, cHs, Fc, anu, q, er, qH, eA, ip, bv, x, byh, lg, byg, jZ, SV, aT, dV, MU, Ou, bnt, cHq, K, aDC, hP, agk, h, dx, cp, jf, iF, eG, Uf, d, iU, Hq, Y, Ls, cHn, ev, ff, r, cHt, Qm, dg, aiz, en, g, kJ, cm, bz, Qt, op, Vi, Qx, Hp, es, QG, Ew, bP, dB, dc, vA, AH, RW, cHr, cHu, cHo, k, cHp, bt, jr, ayg); #c1(SMARCB1) c2(NP_003064) c3(SWI/SNF-related matrix-associated actin-dependent regulator of chromatin subfamily B member 1 isoform a) c4(134873, 134874) c5(134875, 134876, 134877, 134878, 134879, 134880, 134881) c6( ) c7(T, kh, aC, aiH, fR, YU, aNA, Or, n, Sv, ci, cHs, Fc, anu, q, er, qH, eA, ip, bv, x, byh, lg, byg, jZ, SV, aT, dV, MU, Ou, bnt, cHq, K, aDC, hP, agk, h, dx, cp, jf, iF, eG, Uf, d, iU, Hq, Y, Ls, cHn, ev, ff, r, cHt, Qm, dg, aiz, en, g, kJ, cm, bz, Qt, op, Vi, Qx, Hp, es, QG, Ew, bP, dB, dc, vA, AH, RW, cHr, cHu, cHo, k, cHp, bt, jr, ayg); #c1(SMARCB1) c2(XP_011545210) c3(SWI/SNF-related matrix-associated actin-dependent regulator of chromatin subfamily B member 1 isoform X1) c4( ) c5(343995, 343996, 343997, 343998, 343999) c6( ) c7(T, kh, aC, aiH, fR, YU, aNA, Or, n, Sv, ci, cHs, Fc, anu, q, er, qH, eA, ip, bv, x, byh, lg, byg, jZ, SV, aT, dV, MU, Ou, bnt, cHq, K, aDC, hP, agk, h, dx, cp, jf, iF, eG, Uf, d, iU, Hq, Y, Ls, cHn, ev, ff, r, cHt, Qm, dg, aiz, en, g, kJ, cm, bz, Qt, op, Vi, Qx, Hp, es, QG, Ew, bP, dB, dc, vA, AH, RW, cHr, cHu, cHo, k, cHp, bt, jr, ayg); #c1(SMARCC1) c2(NP_003065) c3(SWI/SNF complex subunit SMARCC1) c4(134882) c5(134883, 134884, 134885, 134886, 134887, 134888, 134889, 134890) c6( ) c7(av, aE, aW, Dd, r, aT, n, K, g, q, ad); #c1(SMARCC1) c2(XP_011532336) c3(SWI/SNF complex subunit SMARCC1 isoform X1) c4( ) c5(328485, 328486, 328487) c6( ) c7(av, aE, aW, Dd, r, aT, n, K, g, q, ad); #c1(SMARCC1) c2(XP_011532337) c3(SWI/SNF complex subunit SMARCC1 isoform X2) c4( ) c5(328488) c6( ) c7(av, aE, aW, Dd, r, aT, n, K, g, q, ad); #c1(SMARCC2) c2(NP_001123892) c3(SWI/SNF complex subunit SMARCC2 isoform c) c4(47982) c5( ) c6( ) c7(T, EY, K); #c1(SMARCC2) c2(NP_003066) c3(SWI/SNF complex subunit SMARCC2 isoform a) c4(134891) c5(134892, 134893, 134894, 134895, 134896, 134897, 134898) c6( ) c7(T, EY, K); #c1(SMARCC2) c2(NP_620706) c3(SWI/SNF complex subunit SMARCC2 isoform b) c4(238065) c5( ) c6( ) c7(T, EY, K); #c1(SMARCC2) c2(XP_005269158) c3(SWI/SNF complex subunit SMARCC2 isoform X1) c4( ) c5(282364, 282365, 282366, 282367, 282368, 282369, 282370, 282371, 282372, 282373, 282374, 282375) c6( ) c7(T, EY, K); #c1(SMARCD1) c2(NP_003067) c3(SWI/SNF-related matrix-associated actin-dependent regulator of chromatin subfamily D member 1 isoform a) c4(134899, 134900) c5(134901, 134902, 134903, 134904, 134905, 134906) c6( ) c7(T, cHv); #c1(SMARCD1) c2(NP_620710) c3(SWI/SNF-related matrix-associated actin-dependent regulator of chromatin subfamily D member 1 isoform b) c4(238090) c5(238091, 238092, 238093, 238094, 238095, 238096) c6( ) c7(T, cHv); #c1(SMARCD1) c2(XP_005269164) c3(SWI/SNF-related matrix-associated actin-dependent regulator of chromatin subfamily D member 1 isoform X1) c4( ) c5(282376, 282377, 282378, 282379, 282380, 282381) c6( ) c7(T, cHv); #c1(SMARCD3) c2(NP_001003801) c3(SWI/SNF-related matrix-associated actin-dependent regulator of chromatin subfamily D member 3 isoform 2) c4(20155) c5(20156, 20157, 20158, 20159, 20160, 20161) c6( ) c7(aAx, kP); #c1(SMARCD3) c2(NP_003069) c3(SWI/SNF-related matrix-associated actin-dependent regulator of chromatin subfamily D member 3 isoform 1) c4(134907, 134908, 134909) c5(134910, 134911, 134912, 134813, 134914, 134915, 134916, 134917, 134918, 134919, 134920, 134921, 134922, 134923, 134924, 134925) c6( ) c7(aAx, kP); #c1(SMARCD3) c2(XP_011514823) c3(SWI/SNF-related matrix-associated actin-dependent regulator of chromatin subfamily D member 3 isoform X1) c4( ) c5(307505, 307506, 307507, 307508, 307509, 307510) c6( ) c7(aAx, kP); #c1(SMARCE1) c2(NP_003070) c3(SWI/SNF-related matrix-associated actin-dependent regulator of chromatin subfamily E member 1) c4(134926, 134927, 134928, 134929, 134930, 134931, 134932) c5(134933, 134934, 134935, 134936, 134937, 134938, 134939, 134940, 134941, 134942, 134943, 134944, 134945, 134946, 134947, 134948, 134949, 134950, 134951, 134952, 134953, 134954, 134955, 134956, 134957, 134958, 134959, 134960, 134961, 134962, 134963, 134964, 134965, 134966, 134967, 134968, 134969, 134970, 134971, 134972, 134973, 134974, 134975) c6( ) c7(aiB, aW, qK, aT, cHj, agk, cfu, ae, ad); #c1(SMC1A) c2(NP_001268392) c3(structural maintenance of chromosomes protein 1A isoform 2) c4(99826, 99827) c5(99828, 99829, 99830, 99831, 99832, 99833, 99834, 99835, 99836, 99837, 99838, 99839) c6( ) c7(kP, bei, iT, aW, qK, eZ, aT, r, bWO, aNL, dL, aDC, nA, bC, nC); #c1(SMC1A) c2(NP_006297) c3(structural maintenance of chromosomes protein 1A isoform 1) c4(163788, 163789) c5(163790, 163791, 163792, 163793, 163794, 163795, 163796, 163797, 163798, 163799, 163800, 163801) c6( ) c7(kP, bei, iT, aW, qK, eZ, aT, r, bWO, aNL, dL, aDC, nA, bC, nC); #c1(SMC1B) c2(NP_001278430) c3(structural maintenance of chromosomes protein 1B isoform 2) c4(109749) c5(109750, 109751, 109752, 109753, 109754, 109755) c6( ) c7(BN, ND, vH, hy, dL, ne); #c1(SMC1B) c2(NP_683515) c3(structural maintenance of chromosomes protein 1B isoform 1) c4(242362) c5(242363, 242364, 242365, 242366, 242367, 242368) c6( ) c7(BN, ND, vH, hy, dL, ne); #c1(SMC2) c2(XP_011516451) c3(structural maintenance of chromosomes protein 2 isoform X1) c4(309733, 309734) c5(309735, 309736, 309737, 309738, 309739, 309740, 309741, 309742, 309743, 309744, 309745, 309746, 309747, 309748) c6( ) c7(ck, dA, jh, gl, cjN, bX, Eg, fq, Qe); #c1(SMC2) c2(XP_011516453) c3(structural maintenance of chromosomes protein 2 isoform X2) c4( ) c5(309749) c6( ) c7(ck, dA, jh, gl, cjN, bX, Eg, fq, Qe); #c1(SMC2) c2(XP_011516455) c3(structural maintenance of chromosomes protein 2 isoform X4) c4(309750, 309751) c5(309752, 309753, 309754, 309755, 309756, 309757) c6( ) c7(ck, dA, jh, gl, cjN, bX, Eg, fq, Qe); #c1(SMC2) c2(XP_011516456) c3(structural maintenance of chromosomes protein 2 isoform X5) c4( ) c5(309758, 309759, 309760, 309761, 309762, 309763, 309764, 309765, 309766, 309767, 309768) c6( ) c7(ck, dA, jh, gl, cjN, bX, Eg, fq, Qe); #c1(SMC3) c2(NP_005436) c3(structural maintenance of chromosomes protein 3) c4(156162) c5(156163, 156164, 156165, 156166, 156167, 156168) c6( ) c7(T, cHw, bei, Yc, iT, aeB, vJ, bE, aNL, qG, ci, nA, g, nC); #c1(SMC4) c2(NP_005487) c3(structural maintenance of chromosomes protein 4 isoform 1) c4(156712, 156713, 156714, 156715, 156716, 156717, 156718) c5(156719, 156720, 156721, 156722, 156723, 156724, 156725, 156726, 156727, 156728, 156729, 156730, 156731, 156732, 156733, 156734, 156735, 156736, 156737, 156738, 156739, 156740, 156741, 156742, 156743, 156744) c6( ) c7(T, aW, jh, aT, cjN, ey, ae, eA, ad); #c1(SMC4) c2(XP_006713522) c3(structural maintenance of chromosomes protein 4 isoform X3) c4( ) c5(287188, 287189, 287190, 287191, 287192, 287193, 287194, 287195, 287196, 287197, 287198, 287199, 287200, 287201, 287202, 287203, 287204, 287205, 287206, 287207, 287208, 287209, 287210, 287211, 287212, 287213, 287214, 287215, 287216, 287217, 287218, 287219, 287220, 287221) c6( ) c7(T, aW, jh, aT, cjN, ey, ae, eA, ad); #c1(SMC4) c2(XP_011510615) c3(structural maintenance of chromosomes protein 4 isoform X4) c4(301074) c5( ) c6( ) c7(T, aW, jh, aT, cjN, ey, ae, eA, ad); #c1(SMC5) c2(NP_055925) c3(structural maintenance of chromosomes protein 5) c4(184483) c5(184484, 184485, 184486, 184487, 184488, 184489) c6( ) c7(fq, ad); #c1(SMC6) c2(NP_001135758) c3(structural maintenance of chromosomes protein 6) c4(53109, 53110) c5(53111, 53112, 53113, 53114, 53115, 53116, 53117, 53118, 53119, 53120, 53121, 53122, 53123, 53124, 53125, 53126, 53127, 53128, 53129, 53130) c6( ) c7(aW, aT); #c1(SMC6) c2(XP_011531409) c3(structural maintenance of chromosomes protein 6 isoform X1) c4(327493) c5(327494, 327495, 327496, 327497, 327498) c6( ) c7(aW, aT); #c1(SMC6) c2(XP_011531410) c3(structural maintenance of chromosomes protein 6 isoform X2) c4( ) c5(327499) c6( ) c7(aW, aT); #c1(SMCHD1) c2(NP_056110) c3(structural maintenance of chromosomes flexible hinge domain-containing protein 1) c4(185756, 185757) c5(185758, 185759, 185760, 185761, 185762, 185763, 185764, 185765, 185766, 185767, 185768, 185769) c6( ) c7(T, oV, cHx, jh, rx, ey, hf, fq); #c1(SMC04) c2(NP_064564) c3(single-pass membrane and coiled-coil domain-containing protein 4) c4(202990, 202991, 202992) c5(202993, 202994, 202995, 202996) c6( ) c7(cd); #c1(SMC04) c2(XP_011541211) c3(single-pass membrane and coiled-coil domain-containing protein 4 isoform X3) c4( ) c5(339836, 339837, 339838) c6( ) c7(cd); #c1(SMC04) c2(XP_011541213) c3(single-pass membrane and coiled-coil domain-containing protein 4 isoform X5) c4( ) c5(339839, 339840, 339841, 339842, 339843, 339844, 339845, 339846, 339847, 339848, 339849, 339850, 339851, 339852, 339853) c6( ) c7(cd); #c1(SMCP) c2(NP_109588) c3(sperm mitochondrial-associated cysteine-rich protein) c4(219653) c5(219654, 219655, 219656, 219657, 219658, 219659, 219660) c6( ) c7(x, cc, bE, aW, Y, arw, m, k, t, Bu, fq, mu); #c1(SMEK1) c2(NP_001271209) c3(serine/threonine-protein phosphatase 4 regulatory subunit 3A isoform 1) c4(103612) c5(103613, 103614, 103615, 103616, 103617, 103618, 103619, 103620, 103621, 103622) c6( ) c7(cd); #c1(SMEK1) c2(NP_001271210) c3(serine/threonine-protein phosphatase 4 regulatory subunit 3A isoform 3) c4(103623) c5(103624, 103625, 103626, 103627, 103628, 103629, 103630, 103631, 103632, 103633, 103634) c6( ) c7(cd); #c1(SMEK1) c2(XP_005267899) c3(serine/threonine-protein phosphatase 4 regulatory subunit 3A isoform X1) c4(281281, 281282) c5(281283, 281284, 281285, 281286, 281287, 281288) c6( ) c7(cd); #c1(SMEK1) c2(XP_011535238) c3(serine/threonine-protein phosphatase 4 regulatory subunit 3A isoform X2) c4(332088, 332089) c5(332090, 332091, 332092, 332093, 332094, 332095, 332096, 332097, 332098, 332099, 332100, 332101, 332102, 332103, 332104, 332105, 332106, 332107) c6( ) c7(cd); #c1(SMEK2) c2(NP_001116436) c3(serine/threonine-protein phosphatase 4 regulatory subunit 3B isoform 1) c4(43882) c5(43883, 43884, 43885, 43886, 43887, 43888, 43889) c6( ) c7(cH, om, oe); #c1(SMEK2) c2(NP_065196) c3(serine/threonine-protein phosphatase 4 regulatory subunit 3B isoform 2) c4(204547) c5(204548, 204549, 204550, 204551, 204552, 204553) c6( ) c7(cH, om, oe); #c1(SMG1) c2(NP_055907) c3(serine/threonine-protein kinase SMG1) c4(184408, 184409) c5(184410, 184411, 184412, 184413, 184414, 184415, 184416, 184417, 184418, 184419, 184420, 184421) c6( ) c7(T, DD, fd, cR, fr, ci, ai, Vp, hd, aE, aT, h, K, ak, aW, rU, anW, cm, iK, LB, ck, qJ, y, bt, B); #c1(SMG1) c2(XP_005255240) c3(serine/threonine-protein kinase SMG1 isoform X3) c4(273572) c5(273573, 273574, 273575, 273576, 273577, 273578) c6( ) c7(T, DD, fd, cR, fr, ci, ai, Vp, hd, aE, aT, h, K, ak, aW, rU, anW, cm, iK, LB, ck, qJ, y, bt, B); #c1(SMG1) c2(XP_011544072) c3(serine/threonine-protein kinase SMG1 isoform X5) c4( ) c5(343250) c6( ) c7(T, DD, fd, cR, fr, ci, ai, Vp, hd, aE, aT, h, K, ak, aW, rU, anW, cm, iK, LB, ck, qJ, y, bt, B); #c1(SMG6) c2(NP_001269255) c3(telomerase-binding protein EST1A isoform 4) c4(100917) c5(100918, 100919, 100920, 100921, 100922, 100923) c6( ) c7(e, j); #c1(SMG6) c2(NP_060045) c3(telomerase-binding protein EST1A isoform 1) c4(193861, 193862, 193863, 193864) c5(193865, 193866, 193867, 193868, 193869, 193870, 193871, 193872, 193873, 193874, 193875, 193876) c6( ) c7(e, j); #c1(SMG6) c2(XP_005256628) c3(telomerase-binding protein EST1A isoform X1) c4( ) c5(274261, 274262, 274263, 274264, 274265, 274266) c6( ) c7(e, j); #c1(SMG8) c2(NP_060619) c3(protein SMG8) c4(196847, 196848) c5(196849, 196850, 196851, 196852, 196853, 196854, 196855, 196856, 196857, 196858, 196859, 196860) c6( ) c7(dB, fs); #c1(SMIM15) c2(NP_001041714) c3(small integral membrane protein 15) c4(34320) c5(34321, 34322, 34323, 34324, 34325, 34326, 34327, 34328, 34329, 34330) c6( ) c7(oe); #c1(SMIM19) c2(NP_001129148) c3(small integral membrane protein 19) c4(50919) c5(50920, 50921, 50922, 50923, 50924, 50925, 50926, 50927, 50928, 50929, 50930, 50931, 50932, 50933, 50934, 50935, 50936, 50937) c6( ) c7(oe, pN); #c1(SMIM19) c2(XP_005273455) c3(small integral membrane protein 19 isoform X1) c4( ) c5(284595, 284596, 284597, 284598) c6( ) c7(oe, pN); #c1(SMIM20) c2(NP_001138904) c3(small integral membrane protein 20) c4(58116, 58117) c5(58118, 58119, 58120, 58121, 58122, 58123, 58124, 58125, 58126, 58127, 58128, 58129) c6( ) c7(y. A); #c1(SMIM21) c2(NP_001032408) c3(small integral membrane protein 21 isoform 1) c4(31310) c5(31311, 31312, 31313, 31314, 31315, 31316, 31317, 31318, 31319, 31320) c6( ) c7(ac, oe, bK, dy, fq, bA); #c1(SMIM23) c2(NP_001276899) c3(small integral membrane protein 23) c4(108583) c5(108584, 108585, 108586, 108587, 108588, 108589) c6( ) c7(sj); #c1(SMIM5) c2(XP_011523418) c3(small integral membrane protein 5 isoform X2) c4( ) c5(317943) c6( ) c7(py); #c1(SMIM5) c2(XP_011523421) c3(small integral membrane protein 5 isoform X1) c4(317944) c5(317945, 317946, 317947, 317948, 317949) c6( ) c7(py); #c1(SMN2) c2(NP_059107) c3(survival motor neuron protein isoform d) c4(193043) c5(193044, 193045, 193046, 193047, 193048, 193049, 193050, 193051, 193052, 193053, 193054) c6( ) c7(bM, T, boQ, aey, agU, Vd, ci, arX, x, K, bU, ass, apl, Hl, aW, MV, cm, aoS, bdx, ly, eM, cHz, aem, U, cHy, k, Re, Ol, n, fr, b, no, Ak, bl, Ha, mJ, dx, Ad, Ff, gY, axV, oh, MW, bD, it, B, fG, aA, eA, ahL, aT, kf, rz, bsd, aTm, hM, aEk, aYp, pb, beH, beJ, apq, c, cHA, bt, VB, Pt, acl, wV, fu, aoz, hd, afm, oj, biX, Oq, xs, eZ, aE, Pd, dr, aeb, LB, axl, RQ, Hs, i); #c1(SMN2) c2(NP_075013) c3(survival motor neuron protein isoform a) c4(213504) c5(213505, 213506, 213507, 213508, 213509, 213510, 213511, 213512, 213513, 213514, 213515) c6( ) c7(bM, T, boQ, aey, agU, Vd, ci, arX, x, K, bU, ass, apl, Hl, aW, MV, cm, aoS, bdx, ly, eM, cHz, aem, U, cHy, k, Re, Ol, n, fr, b, no, Ak, bl, Ha, mJ, dx, Ad, Ff, gY, axV, oh, MW, bD, it, B, fG, aA, eA, ahL, aT, kf, rz, bsd, aTm, hM, aEk, aYp, pb, beH, beJ, apq, c, cHA, bt, VB, Pt, acl, wV, fu, aoz, hd, afm, oj, biX, Oq, xs, eZ, aE, Pd, dr, aeb, LB, axl, RQ, Hs, i); #c1(SMN2) c2(NP_075014) c3(survival motor neuron protein isoform b) c4(213516) c5(213517, 213518, 213519, 213520, 213521, 213522, 213523, 213524, 213525, 213526, 213527, 213528, 213529, 213530, 213531) c6( ) c7(bM, T, boQ, aey, agU, Vd, ci, arX, x, K, bU, ass, apl, Hl, aW, MV, cm, aoS, bdx, ly, eM, cHz, aem, U, cHy, k, Re, Ol, n, fr, b, no, Ak, bl, Ha, mJ, dx, Ad, Ff, gY, axV, oh, MW, bD, it, B, fG, aA, eA, ahL, aT, kf, rz, bsd, aTm, hM, aEk, aYp, pb, beH, beJ, apq, c, cHA, bt, VB, Pt, acl, wV, fu, aoz, hd, afm, oj, biX, Oq, xs, eZ, aF, Pd, dr, aeb, LB, axl, RQ, Hs, i); #c1(SMN2) c2(XP_011541901) c3(survival motor neuron protein isoform X1) c4(340425) c5(340426, 340427, 340428, 340429, 340430, 340431, 340432, 340433, 340434, 340435, 340436) c6( ) c7(bM, T, boQ, aey, agU, Vd, ci, arX, x, K, bU, ass, apl, Hl, aW, MV, cm, aoS, bdx, ly, eM, cHz, aem, U, cHy, k, Ro, Ol, n, fr, b, no, Ak, bl, Ha, mJ, dx, Ad, Ff, gY, axV, oh, MW, bD, it, B, fG, aA, eA, ahL, aT, kf, rz, bsd, aTm, hM, aEk, aYp, pb, beH, beJ, apq, c, cHA, bt, VB, Pt, acl, wV, fu, aoz, hd, afm, oj, biX, Oq, xs, eZ, aF, Pd, dr, aeb, LB, axl, RQ, Hs, i); #c1(SMN2) c2(XP_011541902) c3(survival motor neuron protein isoform X2) c4(340437) c5(340438, 340439, 340440, 340441, 340442, 340443, 340444, 340445, 340446, 340447, 340448) c6( ) c7(bM, T, boQ, aey, agU, Vd, ci, arX, x, K, bU, ass, apl, Hl, aW, MV, cm, aoS, bdx, ly, eM, cHz, aem, U, cHy, k, Ro, Ol, n, fr, b, no, Ak, bl, Ha, mJ, dx, Ad, Ff, gY, axV, oh, MW, bD, it, B, fG, aA, eA, ahL, aT, kf, rz, bsd, aTm, hM, aEk, aYp, pb, beH, beJ, apq, c, cHA, bt, VB, Pt, acl, wV, fu, aoz, hd, afm, oj, biX, Oq, xs, eZ, aF, Pd, dr, aeb, LB, axl, RQ, Hs, i); #c1(SMO) c2(NP_005622) c3(smoothened homolog precursor) c4(158029) c5(158030, 158031, 158032, 158033, 158034, 158035) c6( ) c7(gh, T, kh, aC, pf, aD, aA, hy, dG, ci, auG, q, ad, ip, bv, av, ib, afQ, aT, dL, K, jj, pk, fb, ae, jf, BN, Qr, nO, aW, ff, eH, wF, CT, aF, en, g, eF, iV, bN, ar, sS, dB, hk, bE, aSp, YH, ne, hS); #c1(SMOC1) c2(NP_001030024) c3(SPARC-related modular calcium-binding protein 1 isoform 1 precursor) c4(30881) c5(30882, 30883, 30884, 30885, 30886, 30887) c6( ) c7(Na, aC, A, iU, tT, cHB, aiM, lo, kp, zU, cm, fg, pb, akE); #c1(SMOC1) c2(NP_071420) c3(SPARC-related modular calcium-binding protein 1 isoform 2 precursor) c4(211565) c5(211566, 211567, 211568, 211569, 211570, 211571) c6( ) c7(Na, aC, A, iU, tT, cHB, aiM, lo, kp, zU, cm, fq, pb, akE); #c1(SMOC2) c2(NP_001159884) c3(SPARC-related modular calcium-binding protein 2 isoform 2 precursor) c4(64874) c5(64875, 64876, 64877, 64878, 64879, 64880, 64881, 64882, 64883, 64884, 64885, 64886) c6( ) c7(bM, yl, aw, jx, hz, qj, pC); #c1(SMOC2) c2(NP_071421) c3(SPARC-related modular calcium-binding protein 2 isoform 1 precursor) c4(211572) c5(211573, 211574, 211575, 211576, 211577, 211578) c6( ) c7(bM, yl, aw, jx, hz, qj, pC); #c1(SMOC2) c2(XP_011534367) c3(SPARC-related modular calcium-binding protein 2 isoform X1) c4(330770) c5( ) c6( ) c7(bM, yl, aw, jx, hz, qj, pC); #c1(SMOC2) c2(XP_011534368) c3(SPARC-related modular calcium-binding protein 2 isoform X2) c4(330771) c5(330772, 330773, 330774, 330775, 330776, 330777) c6( ) c7(bM, yl, aw, jx, hz, qj, pC); #c1(SMOX) c2(NP_787033) c3(spermine oxidase isoform 1) c4(251957) c5(251958, 251959, 251960, 251961, 251962, 251963, 251964, 251965, 251966, 251967) c6( ) c7(gh, Kd, T, pf, aD, NT, aA, bS, ww, C, q, ad, ip, bv, av, ib, aT, h, K, pk, fb, ae, jf, Qr, nO, aW, Ue, ff, az, eH, aF, en, Sm, g, eF, iV, sS, ac, bE, fD, YH, ao, hS); #c1(SMOX) c2(NP_787034) c3(spermine oxidase isoform 2) c4(251968) c5(251969, 251970, 251971, 251972, 251973, 251974) c6( ) c7(gh, Kd, T, pf, aD, NT, aA, bS, ww, C, q, ad, ip, bv, av, ib, aT, h, K, pk, fb, ae, jf, Qr, nO, aW, Ue, ff, az, eH, aF, en, Sm, g, eF, iV, sS, ac, bE, fD, YH, ao, hS); #c1(SMOX) c2(NP_787035) c3(spermine oxidase isoform 3) c4(251975) c5(251976, 251977, 251978, 251979, 251980, 251981) c6( ) c7(gh, Kd, T, pf, aD, NT, aA, bS, ww, C, q, ad, ip, bv, av, ib, aT, h, K, pk, fb, ae, jf, Qr, nO, aW, Ue, ff, az, eH, aF, en, Sm, g, eF, iV, sS, ac, bE, fD, YH, ao, hS); #c1(SMOX) c2(NP_787036) c3(spermine oxidase isoform 4) c4(251982) c5(251983, 251984, 251985, 251986, 251987, 251988) c6( ) c7(gh, Kd, T, pf, aD, NT, aA, bS, ww, C, q, ad, ip, bv, av, ib, aT, h, K, pk, fb, ae, jf, Qr, nO, aW, Ue, ff, az, eH, aF, en, Sm, g, eF, iV, sS, ac, bE, fD, YH, ao, hS); #c1(SMOX) c2(XP_011527563) c3(spermine oxidase isoform X1) c4(322403) c5(322404, 322405, 322406, 322407, 322408, 322409) c6( ) c7(gh, Kd, T, pf, aD, NT, aA, bS, ww, C, q, ad, ip, bv, av, ib, aT, h, K, pk, fb, ae, jf, Qr, nO, aW, Ue, ff, az, eH, aF, en, Sm, g, eF, iV, sS, ac, bE, fD, YH, ao, hS); #c1(SMPD1) c2(NP_000534) c3(sphingomyelin phosphodiesterase isoform 1 precursor) c4(12058) c5(12059, 12060, 12061, 12062, 12063, 12064, 12065, 12066, 12067, 12068, 12069, 12070, 12071, 12072, 12073, 12074, 12075, 12076, 12077, 12078, 12079, 12080, 12081, 12082, 12083, 12084, 12085, 12086, 12087, 12088, 12089, 12090, 12091, 12092, 12093, 12094, 12095, 12096, 12097, 12098, 12099, 12100, 12101, 12102, 12103, 12104, 12105, 12106, 12107, 12108, 12109, 12110, 12111, 12112, 12113, 12114, 12115, 12116, 12117, 12118, 12119, 12120, 12121, 12122, 12123, 12124, 12125, 12126, 12127, 12128, 12129, 12130, 12131, 12132, 12133, 12134, 12135, 12136, 12137, 12138, 12139, 12140, 12141, 12142, 12143, 12144, 12145, 12146, 12147, 12148, 12149, 12150, 12151, 12152, 12153, 12154, 12155) c6(12156, 12157, 12158) c7(kV, oO, T, bM, aPU, bB, bS, j, ct, v, Rk, aR, aT, dL, K, cHC, bq, lQ, he, an, vl, ao, Y, clk, PX, hl, aq, Z, eE, iR, dr, vU, eY, bE, dh, ajn, vy, cG, at, akH, Lq, bt, sH, ek); #c1(SMPD1) c2(NP_001007594) c3(sphingomyelin phosphodiesterase isoform 2 precursor) c4(22835) c5(22836, 22837, 22838, 22839, 22840, 22841, 22842, 22843, 22844, 22845) c6(22846, 22847) c7(kV, oO, T, bM, aPU, bB, bS, j, ct, v, Rk, aR, aT, dL, K, cHC, bq, lQ, he, an, vl, ao, Y, clk, PX, hl, aq, Z, eE, iR, dr, vU, eY, bE, dh, ajn, vy, cG, at, akH, Lq, bt, sH, ek); #c1(SMPD1) c2(XP_011518605) c3(sphingomyelin phosphodiesterase isoform X1) c4(312779, 312780) c5(312781, 312782, 312783, 312784, 312785, 312786, 312787, 312788, 312789, 312790, 312791, 312792, 312793, 312794, 312795, 312796, 312797, 312798, 312799) c6(312800, 312801, 312802, 312803) c7(kV, oO, T, bM, aPU, bB, bS, j, ct, v, Rk, aR, aT, dL, K, cHC, bq, lQ, he, an, vl, ao, Y, clk, PX, hl, aq, Z, eE, iR, dr, vU, eY, bE, dh, ajn, vy, cG, at, akH, Lq, bt, sH, ek); #c1(SMPD1) c2(XP_011518606) c3(sphingomyelin phosphodiesterase isoform X3) c4(312804, 312805) c5(312806, 312807, 312808, 312809, 312810, 312811, 312812, 312813, 312814, 312815, 312816, 312817, 312818, 312819, 312820, 312821, 312822) c6(312823, 312824, 312825, 312826) c7(kV, oO, T, bM, aPU, bB, bS, j, ct, v, Rk, aR, aT, dL, K, cHC, bq, lQ, he, an, vl, ao, Y, clk, PX, hl, aq, Z, eE, iR, dr, vU, eY, bE, dh, ajn, vy, cG, at, akH, Lq, bt, sH, ek); #c1(SMPD2) c2(NP_003071) c3(sphingomyelin phosphodiesterase 2) c4(134976) c5(134977, 134978, 134979, 134980, 134981, 134982) c6( ) c7(ck, T, bE, aW, aT, bB, K, eE, eA, ek); #c1(SMPD3) c2(NP_061137) c3(sphingomyelin phosphodiesterase 3) c4(199484) c5(199485, 199486, 199487, 199488, 199489, 199490) c6( ) c7(ck, T, bBJ, avP, aW, aT, hn, bw, bt); #c1(SMPDL3A) c2(NP_001273067) c3(acid sphingnmyelinase-like phosphodiesterase 3a isoform b) c4(104288) c5(104289, 104290, 104291, 104292, 104293) c6( ) c7(dP, dL); #c1(SMPDL3A) c2(NP_006705) c3(acid sphingnmyelinase-like phosphodiesterase 3a isoform a precursor) c4(167298) c5(167299, 167300, 167301, 167302, 167303, 167304) c6( ) c7(dP, dL); #c1(SMPDL3A) c2(XP_005266854) c3(acid sphingnmyelinase-like phosphodiesterase 3a isoform X1) c4( ) c5(280363) c6( ) c7(dP, dL); #c1(SMPDL3B) c2(XP_011539561) c3(acid sphingnmyelinase-like phosphodiesterase 3b isoform X1) c4(337790) c5(337791, 337792, 337793, 337794, 337795, 337796, 337797, 337798) c6(337799, 337800) c7(sk); #c1(SMPX) c2(NP_055147) c3(small muscular protein) c4(179442) c5(179443, 179444, 179445, 179446, 179447, 179448) c6( ) c7(K, cHD); #c1(SMR3B) c2(NP_006676) c3(submaxillary gland androgen-regulated protein 3B precursor) c4(167070, 167071) c5(167072, 167073, 167074, 167075, 167076, 167077, 167078, 167079, 167080, 167081, 167082, 167083, 167084, 167085, 167086, 167087, 167088, 167089, 167090, 167091, 167092, 167093, 167094, 167095) c6( ) c7(T, aA, bB, n, fd, ci, q, hX, aT, cp, cY, iU, aW, Y, r, aF, g, cm, bz, ck, bE, bt, it, B); #c1(SMS) c2(NP_001245352) c3(spermine synthase isoform 2) c4(93221) c5(93222, 93223, 93224, 93225, 93226, 93227) c6( ) c7(OF, Kk, ha, ml, amj, bS, nA, rc, blg, bK, K, Yi, bA, jf, cHE, Y, LO, nf, gl, cm, xw, hq, cA, Km); #c1(SMS) c2(NP_004586) c3(spermine synthase isoform 1) c4(147914, 147915, 147916) c5(147917, 147918, 147919, 147920, 147921, 147922, 147923, 147924, 147925, 147926, 147927, 147928) c6( ) c7(OF, Kk, ha, ml, amj, bS, nA, rc, blg, bK, K, Yi, bA, jf, cHE, Y, LO, nf, gl, cm, xw, hg, cA, Km); #c1(SMS) c2(XP_011543870) c3(spermine synthase isoform X1) c4( ) c5(343027, 343028, 343029, 343030, 343031, 343032) c6( ) c7(OF, Kk, ha, ml, amj, bS, nA, rc, blg, bK, K, Yi, bA, jf, cHE, Y, LO, nf, gl, cm, xw, hg, cA, Km); #c1(SMTN) c2(NP_008863) c3(smoothelin isoform c) c4(169310) c5( ) c6( ) c7(DQ, aC, K); #c1(SMTN) c2(NP_599031) c3(smoothelin isoform b) c4(235622, 235623) c5( ) c6( ) c7(DQ, aC, K); #c1(SMTN) c2(NP_599032) c3(smoothelin isoform a) c4(235624) c5(235625, 235626, 235627, 235628, 235629, 235630) c6( ) c7(DQ, aC, K); #c1(SMTN) c2(XP_011528634) c3(smoothelin isoform X1) c4( ) c5(323885, 323886, 323887, 323888, 323889) c6( ) c7(DQ, aC, K); #c1(SMTN) c2(XP_011528635) c3(smoothelin isoform X2) c4(323890) c5(323891, 323892, 323893, 323894, 323895, 323896) c6( ) c7(DQ, aC, K); #c1(SMTN) c2(XP_011528636) c3(smoothelin isoform X3) c4( ) c5(323897, 323898, 323899, 323900, 323901, 323902) c6( ) c7(DQ, aC, K); #c1(SMTN) c2(XP_011528637) c3(smoothelin isoform X4) c4( ) c5(323903, 323904, 323905, 323906, 323907, 323908, 323909, 323910, 323911, 323912, 323913, 323914) c6( ) c7(DQ, aC, K); #c1(SMTN) c2(XP_011528639) c3(smoothelin isoform X7) c4(323915) c5(323916, 323917, 323918, 323919, 323920, 323921) c6( ) c7(DQ, aC, K); #c1(SMTN) c2(XP_011528641) c3(smoothelin isoform X10) c4(323922) c5( ) c6( ) c7(DQ, aC, K); #c1(SMTN) c2(XP_011528642) c3(smoothelin isoform X11) c4( ) c5(323923) c6( ) c7(DQ, aC, K); #c1(SMTNL1) c2(NP_001099035) c3(smoothelin-like protein 1) c4(41715, 41716, 41717) c5(41718, 41719, 41720, 41721, 41722, 41723, 41724, 41725, 41726, 41727, 41728, 41729, 41730, 41731, 41732, 41733, 41734, 41735) c6( ) c7(T); #c1(SMU1) c2(NP_060695) c3(WD40 repeat-containing protein SMU1) c4(197271, 197272) c5(197273, 197274, 197275, 197276, 197277, 197278) c6( ) c7(aC); #c1(SMU1) c2(XP_005251560) c3(WD40 repeat-containing protein SMU1 isoform X1) c4( ) c5(270999, 271000, 271001, 271002, 271003, 271004) c6( ) c7(aC); #c1(SMUG1) c2(XP_006719385) c3(single-strand selective monofunctional uracil DNA glycosylase isoform X2) c4(292439) c5(292440, 292441, 292442, 292443, 292444, 292445, 292446, 292447, 292448, 292449, 292450, 292451, 292452, 292453, 292454, 292455, 292456, 292457) c6( ) c7(bL, lD, T, dt, Mb, if, ha, NT, bO, aA, bB, n, it, ci, qN, yU, V, fK, q, eA, chj, iu, ku, b, hd, aE, i, sO, ajv, aT, yT, yZ, fb, af, uQ, ly, agT, aW, anx, eH, ff, r, aF, en, g, eF, t, bz, lx, agS, qJ, Qy, bb, nM, c, nB, bE, eM, OG, FJ, uo, m, qF, R, ij, zu, xg, B); #c1(SMUG1) c2(XP_011536423) c3(single-strand selective monofunctional uracil DNA glycosylase isoform X1) c4(333729, 333730) c5(333731, 333732, 333733, 333734, 333735, 333736, 333737, 333738, 333739, 333740, 333741, 333742, 333743, 333744, 333745, 333746, 333747, 333748, 333749, 333750) c6( ) c7(bL, lD, T, dt, Mb, if, ha, NT, bO, aA, bB, n, it, ci, qN, yU, V, fK, g, eA, chj, iu, ku, b, hd, aE, i, sO, ajv, aT, yT, yZ, fb, af, uQ, ly, agT, aW, anx, eH, ff, r, aE, en, g, eF, t, bz, lx, agS, qJ, Qy, bb, nM, c, nB, bE, eM, OG, FJ, uo, m, qF, R, ij, zu, xg, B); #c1(SMUG1) c2(XP_011536425) c3(single-strand selective monofunctional uracil DNA glycosylase isoform X3) c4(333751, 333752, 333753, 333754) c5(333755, 333756, 333757, 333758, 333759, 333760, 333761, 333762, 333763, 333764, 333765, 333766, 333767, 333768, 333769, 333770, 333771, 333772, 333773, 333774, 333775, 333776, 333777, 333778) c6( ) c7(bL, lD, T, dt, Mb, if, ha, NT, bO, aA, bB, n, it, ci, qN, yU, V, fK, g, eA, chj, iu, ku, b, hd, aE, i, sO, ajv, aT, yT, yZ, fb, af, uQ, ly, agT, aW, anx, eH, ff, r, aE, en, g, eF, t, bz, lx, agS, qJ, Qy, bb, nM, c, nB, bE, eM, OG, FJ, uo, m, qF, R, ij, zu, xg, B); #c1(SMURF1) c2(NP_065162) c3(E3 ubiquitin-protein ligase SMURF1 isoform 1) c4(204355) c5(204356, 204357, 204358, 204359, 204360, 204361) c6( ) c7(T, aC, aE, aW, r, aT, aq, By, oH, lR, iV, iR, pb); #c1(SMURF1) c2(NP_851994) c3(E3 ubiquitin-protein ligase SMURF1 isoform 2) c4(254728) c5(254729, 254730, 254731, 254732, 254733, 254734) c6( ) c7(T, aC, aE, aW, r, aT, aq, By, oH, lR, iV, iR, pb); #c1(SMURF2) c2(NP_073576) c3(E3 ubiquitin-protein ligase SMURF2) c4(212924) c5(212925, 212926, 212927, 212928, 212929, 212930) c6( ) c7(T, kP, bP, aW, ff, U, aT, dy, Hb, en, lR, fr, AO, pb); #c1(SMYD1) c2(NP_938015) c3(histone-lysine N-methyltransferase SMYD1) c4(259512) c5(259513, 259514, 259515, 259516, 259517, 259518) c6( ) c7(bz, iu); #c1(SMYD1) c2(XP_005264213) c3(histone-lysine N-methyltransferase SMYD1 isoform X1) c4(278705) c5(278706, 278707, 278708, 278709, 278710, 278711) c6( ) c7(bz, iu); #c1(SMYD2) c2(NP_064582) c3(N-lysine methyltransferase SMYD2) c4(203098, 203099) c5(203100, 203101, 203102, 203103, 203104, 203105, 203106, 203107, 203108, 203109, 203110, 203111) c6( ) c7(x, ci, T, k); #c1(SMYD3) c2(NP_001161212) c3(histone-lysine N-methyltransferase SMYD3 isoform 1) c4(65504, 65505) c5(65506, 65507, 65508, 65509, 65510, 65511, 65512, 65513) c6( ) c7(T, eG, nv, aW, ff, ht, xa, aT, r, cd, aq, it, bK, ci, q, en, ae, B, ad); #c1(SMYD3) c2(NP_073580) c3(histone-lysine N-methyltransferase SMYD3 isoform 2) c4(212954) c5(212955, 212956, 212957, 212958, 212959, 212960, 212961, 212962, 212963, 212964, 212965, 212966, 212967, 212968, 212969, 212970, 212971, 212972) c6( ) c7(T, eG, nv, aW, ff, ht, xa, aT, r, cd, aq, it, bK, ci, q, en, ae, B, ad); #c1(SMYD3) c2(XP_011542555) c3(histone-lysine N-methyltransferase SMYD3 isoform X1) c4(341107, 341108) c5(341109, 341110) c6( ) c7(T, eG, nv, aW, ff, ht, xa, aT, r, cd, aq, it, bK, ci, q, en, ae, B, ad); #c1(SMYD3) c2(XP_011542557) c3(histone-lysine N-methyltransferase SMYD3 isoform X3) c4( ) c5(341111) c6( ) c7(T, eG, nv, aW, ff, ht, xa, aT, r, cd, aq, it, bK, ci, q, en, ae, B, ad); #c1(SMYD3) c2(XP_011542559) c3(histone-lysine N-methyltransferase SMYD3 isoform X5) c4(341112) c5(341113, 341114, 341115, 341116, 341117, 341118) c6( ) c7(T, eG, nv, aW, ff, ht, xa, aT, r, cd, aq, it, bK, ci, q, en, ae, B, ad); #c1(SMYD3) c2(XP_011542563) c3(histone-lysine N-methyltransferase SMYD3 isoform XG) c4( ) c5(341119, 341120, 341121, 341122, 341123) c6( ) c7(T, eG, nv, aW, ff, ht, xa, aT, r, cd, aq, it, bK, ci, q, en, ae, B, ad); #c1(SMYD4) c2(NP_443160) c3(SET and MYND domain-containing protein 4) c4(229677) c5(229678, 229679, 229680, 229681, 229682, 229683) c6( ) c7(jf, aW, j, aT); #c1(SMYD4) c2(XP_011521935) c3(SET and MYND domain-containing protein 4 isoform X2) c4( ) c5(316637) c6( ) c7(jf, aW, j, aT); #c1(SMYD5) c2(NP_006053) c3(SET and MYND domain-containing protein 5) c4(161505) c5(161506, 161507, 161508, 161509, 161510, 161511, 161512) c6( ) c7(ck, eM, aW, aT, gE, jj, B); #c1(SNAI1) c2(NP_005976) c3(zinc finger protein SNAI1) c4(160931) c5(160932, 160933, 160934, 160935, 160936, 160937, 160938) c6( ) c7(T, aA, cz, n, hy, v, bB, ci, fr, Lw, PJ, Qn, agY, AO, q, ad, eA, hX, iJ, hd, aE, Db, yt, aT, io, rO, rD, K, hB, ae, jf, d, BN, B, aW, Y, ff, eH, r, aF, en, cl, hJ, t, eF, bz, zV, LB, eM, iA, dB, bE, X, at, aPG, Hb, m, ei, ne); #c1(SNAI2) c2(NP_003059) c3(zinc finger protein SNAI2) c4(134806) c5(134807, 134808, 134809, 134810, 134811, 134812, 134813, 134814, 134815, 134816, 134817, 134818, 134819) c6(134820, 134821) c7(cHF, T, ht, it, bB, n, amj, v, fr, ci, bjN, Qo, q, ad, eA, asG, hd, ib, jz, hW, yt, Db, aT, aAE, ahE, ae, d, aW, Y, ff, eH, ahl, en, cl, g, t, eF, bz, cm, LB, bE, np, m, aPG, ik, B); #c1(SNAI3) c2(NP_840101) c3(zinc finger protein SNAI3) c4(253628) c5(253629, 253630, 253631, 253632, 253633, 253634, 253635) c6( ) c7(Y, wz); #c1(SNAP23) c2(NP_003816) c3(synaptosomal-associated protein 23 isoform SNAP23A) c4(141104) c5(141105, 141106, 141107, 141108, 141109, 141110) c6( ) c7(bL, YE, s, j, pz, iJ); #c1(SNAP23) c2(NP_570710) c3(synaptosomal-asseciated protein 23 isoform SNAP238) c4(234135) c5(234136, 234137, 234138, 234139, 234140, 234141, 234142, 234143, 234144, 234145) c6( ) c7(bL, YE, s, j, pz, iJ); #c1(SNAP25) c2(NP_003072) c3(synaptosomal-associated protein 25 isoform SNAP25A) c4(134983) c5(134984, 134985, 134986, 134987, 134988, 134989) c6( ) c7(bL, T, id, iH, lT, Or, e, ha, bO, jh, Jd, cHG, ct, nA, afE, cd, aR, x, cF, no, KB, aE, WY, kH, h, dL, bK, ox, wb, bq, H, he, rz, af, eL, na, bA, iz, je, s, akL, Sj, f, cm, ck, kn, pH, hb, YE, c, iM, acw, k, bC, ei); #c1(SNAP25) c2(NP_570824) c3(synaptosomal-associated protein 25 isoform SNAP258) c4(234281, 234282) c5(234283, 234284, 234285, 234286, 234287, 234288, 234289, 234290, 234291, 234292, 234293, 234294) c6( ) c7(bL, T, id, iH, lT, Or, e, ha, bO, jh, Jd, cHG, ct, nA, afE, cd, aR, x, cF, no, KB, aE, WY, kH, h, dL, bK, ox, wb, bq, H, he, rz, af, eL, na, bA, iz, je, s, akL, Sj, f, cm, ck, kn, pH, hb, YE, c, iM, acw, k, bC, ei); #c1(SNAP29) c2(NP_004773) c3(synaptosomal-associated protein 29) c4(149504) c5(149505, 149506, 149507, 149508, 149509, 149510) c6( ) c7(v, fp, cHH, lQ, by); #c1(SNAP47) c2(NP_444280) c3(synaptosomal-associated protein 47) c4(230260, 230261, 230262) c5(230263, 230264, 230265, 230266, 230267, 230268, 230269, 230270, 230271, 230272, 230273, 230274, 230275, 230276, 230277, 230278, 230279, 230280) c6( ) c7(vx, K); #c1(SNAP47) c2(XP_005273101) c3(synaptosomal-associated protein 47 isoform X3) c4(284292) c5(284293, 284294, 284295, 284296, 284297) c6( ) c7(vx, K); #c1(SNAP47) c2(XP_006711797) c3(synaptosomal-asseciated protein 47 isoform X2) c4(286232) c5(286233, 286234, 286235, 286236, 286237, 286238, 286239) c6( ) c7(vx, K); #c1(SNAP91) c2(NP_001229721) c3(clathrin coat assembly protein AP180 isoform a) c4(84902, 84903) c5(84904, 84905, 84906, 84907, 84908, 84909, 84910, 84911, 84912, 84913, 84914, 84915, 84916, 84917, 84918, 84919, 84920, 84921, 84922, 84923) c6( ) c7(ck, Na, T, iT, amJ, rO, Nc, gE, hf, hF, bt); #c1(SNAP91) c2(NP_001229722) c3(clathrin coat assembly protein AP180 isoform b) c4(84924) c5(84925, 84926, 84927, 84928, 84929, 84930) c6( ) c7(ck, Na, T, iT, amJ, rO, Nc, gE, hf, hF, bt); #c1(SNAP91) c2(NP_001229723) c3(clathrin coat assembly protein AP180 isoform c) c4(84931, 84932) c5(84933, 84934, 84935, 84936, 84937, 84938, 84939, 84940, 84941, 84942, 84943, 84944, 84945, 84946, 84947, 84948, 84949, 84950, 84851, 84952, 84953, 84954, 84955, 84956, 84957, 84958, 84959, 84960, 84961, 84962, 84963, 84964, 84965, 84966, 84967, 84968, 84969, 84970, 84971, 84972, 84973, 84974, 84975, 84976, 84977, 84978) c6( ) c7(ck, Na, T, iT, amJ, rO, Nc, gE, hf, hF, bt); #c1(SNAP91) c2(NP_001243646) c3(clathrin coat assembly protein AP180 isoform d) c4( ) c5(91307) c6( ) c7(ck, Na, T, iT, amJ, rO, Nc, gE, hf, hF, bt); #c1(SNAP91) c2(XP_011534571) c3(clathrin coat assembly protein AP180 isoform X4) c4(331106, 331107) c5(331108, 331109, 331110, 331111, 331112, 331113, 331114, 331115, 331116, 331117) c6( ) c7(ck, Na, T, iT, amJ, rO, Nc, gE, hf, hF, bt); #c1(SNAP91) c2(XP_011534573) c3(clathrin coat assembly protein AP180 isoform X6) c4(331118) c5( ) c6( ) c7(ck, Na, T, iT, amJ, rO, Nc, gE, hf, hF, bt); #c1(SNAP91) c2(XP_011534574) c3(clathrin coat assembly protein AP180 isoform X7) c4(331119) c5( ) c6( ) c7(ck, Na, T, iT, amJ, rO, Nc, gE, hf, hF, bt); #c1(SNAP91) c2(XP_011534578) c3(clathrin coat assembly protein AP180 isoform X11) c4(331120) c5(331121, 331122, 331123, 331124, 331125, 331126) c6( ) c7(ck, Na, T, iT, amJ, rO, Nc, gE, hf, hF, bt); #c1(SNAP91) c2(XP_011534582) c3(clathrin coat assembly protein AP180 isoform X15) c4(331127, 331128) c5( ) c6( ) c7(ck, Na, T, iT, amJ, rO, Nc, gE, hf, hF, bt); #c1(SNAPC1) c2(NP_003073) c3(snRNA-activating protein complex subunit 1) c4(134990) c5(134991, 134992, 134993, 134994, 134995, 134996, 134997) c6( ) c7(aT); #c1(SNAPC4) c2(NP_003077) c3(snRNA-activating protein complex subunit 4) c4(135017) c5(135018, 135019, 135020, 135021, 135022, 135023, 135024) c6( ) c7(mR); #c1(SNAPC5) c2(NP_006040) c3(snRNA-activating protein complex subunit 5) c4(161400, 161401) c5(161402, 161403, 161404, 161405, 161406, 161407, 161408, 161409, 161410, 161411, 161412, 161413, 161414, 161415, 161416, 161417) c6( ) c7(W); #c1(SNCA) c2(NP_009292) c3(alpha-synuclein isoform NACP112) c4(171772) c5(171773, 171774, 171775, 171776, 171777, 171778, 171779, 171780, 171781, 171782, 171783, 171784, 171785, 171786, 171787, 171788, 171789, 171790, 171791, 171792, 171793, 171794) c6( ) c7(T, aaH, yY, jx, GC, Gd, cHL, ct, alS, bfD, aR, ad, Hx, Gt, brS, cHK, HC, kH, aT, h, K, an, H, ae, xa, dF, alL, af, NN, ak, hZ, Jj, A, qZ, s, je, jf, cHJ, Y, aW, Ls, eZ, gl, cu, dg, lo, as, Rl, cm, xw, cHl, GB, FT, vU, bb, iM, c, Gs, U, uo, sv, aqm, CD, Lq, R, y, aen, CW, hv, L); #c1(SNCA) c2(XP_011530509) c3(alpha-synuclein isoform X2) c4(326405) c5( ) c6( ) c7(T, aaH, yY, jx, GC, Gd, cHL, ct, alS, bfD, aR, ad, Hx, Gt, brS, cHK, HC, kH, aT, h, K, an, H, ae, xa, dF, alL, af, NN, ak, hZ, Jj, A, qZ, s, je, jf, cHJ, Y, aW, Ls, eZ, gl, cu, dg, lo, as, Rl, cm, xw, cHl, GB, FT, vU, bb, iM, c, Gs, U, uo, sv, aqm, CD, Lq, R, y, aen, CW, hv, L); #c1(SNCA) c2(XP_011530510) c3(alpha-synuclein isoform X1) c4(326406, 326407, 326408) c5(326409, 326410, 326411, 326412, 326413, 326414, 326415, 326416, 326417, 326418, 326419, 326420, 326421, 326422, 326423, 326424, 326425, 326426, 326427, 326428, 326429, 326430, 326431, 326432, 326433, 326434, 326435, 326436, 326437, 326438, 326439, 326440) c6( ) c7(T, aaH, yY, jx, GC, Gd, cHL, ct, alS, bfD, aR, ad, Hx, Gt, brS, cHK, HC, kH, aT, h, K, an, H, ae, xa, dF, alL, af, NN, ak, hZ, Jj, A, qZ, s, je, jf, cHJ, Y, aW, Ls, eZ, gl, cu, dg, lo, as, Rl, cm, xw, cHl, GB, FT, vU, bb, iM, c, Gs, U, uo, sv, agm, CD, Lq, R, y, aen, CW, hv, L); #c1(SNCAIP) c2(NP_001229864) c3(synphilin-1 isoform 1A) c4( ) c5(85485, 85486, 85487, 85488, 85489) c6( ) c7(ak, U, GC, v, K, act, an, cm, GB); #c1(SNCAIP) c2(NP_005451) c3(synphilin-1 isoform 1) c4(156291, 156292) c5(156293, 156294, 156295, 156296, 156297, 156298) c6( ) c7(ak, U, GC, v, K, act, an, cm, GB); #c1(SNCAIP) c2(XP_011542047) c3(synphilin-1 isoform X3) c4(340571) c5( ) c6( ) c7(ak, U, GC, v, K, act, an, cm, GB); #c1(SNCAIP) c2(XP_011542048) c3(synphilin-1 isoform X4) c4(340572) c5( ) c6( ) c7(ak, U, GC, v, K, act, an, cm, GB); #c1(SNCAIP) c2(XP_011542051) c3(synphilin-1 isoform X7) c4(340573, 340574) c5(340575, 340576, 340577, 340578, 340579, 340580, 340581) c6( ) c7(ak, U, GC, v, K, act, an, cm, GB); #c1(SNCB) c2(NP_003076) c3(beta-synuclein) c4(134998) c5(134999, 135000, 135001, 135002, 135003, 135004, 135005, 135006, 135007, 135008, 135009, 135010, 135011, 135012, 135013, 135014, 135015, 135016) c6( ) c7(jf, ak, aDA, U, cm, K, an, AO, Fc, qW); #c1(SNCG) c2(NP_003078) c3(gamma-synuclein) c4(135025) c5(135026, 135027, 135028, 135029, 135030, 135031) c6( ) c7(T, al, bB, V, ct, ci, PJ, zP, q, hX, dP, av, Bl, iC, aT, dL, K, an, af, ak, zQ, aW, ff, r, aq, cu, en, dw, t, Px, iR, bP, bE, U, m, CW); #c1(SNCG) c2(XP_011538407) c3(gamma-synuclein isoform X1) c4(336086) c5(336087, 336088, 336089, 336090, 336091, 336092) c6( ) c7(T, al, bB, v, ct, ci, PJ, zP, q, hX, dP, av, Bl, iC, aT, dL, K, an, af, ak, zQ, aW, ff, r, aq, cu, en, dw, t, Px, iR, bP, bE, U, m, CW); #c1(SND1) c2(NP_055205) c3(staphylococcal nuclease domain-containing protein 1) c4(179804, 179805) c5(179806, 179807, 179808, 179809, 179810, 179811, 179812, 179813, 179814, 179815, 179816, 179817, 179818) c6( ) c7(bN, T, iM, je, bE, aW, go, jh, aT, ahC, kH, bB, fd, K, qN, ae, X, ad, pl); #c1(SNED1) c2(NP_001073906) c3(sushi, nidogen and EGF-like domain-containing protein 1 precursor) c4(36433, 36434, 36435, 36436) c5(36437, 36438, 36439, 36440, 36441, 36442, 36443, 36444, 36445, 36446, 36447, 36448, 36449, 36450, 36451, 36452, 36453, 36454, 36455, 36456, 36457, 36458, 36459, 36460, 36461, 36462, 36463, 36464, 36465, 36466, 36467, 36468) c6(36469, 36470, 36471, 36472, 36473, 36474, 36475, 36476) c7(jf, d, bE, wu, bB, aj, v, ci, wm, eA, J); #c1(SNED1) c2(XP_011509239) c3(sushi, nidogen and EGF-like domain-containing protein 1 isoform X6) c4( ) c5(299891) c6( ) c7(jf, d, bE, wu, bB, aj, v, ci, wm, eA, J); #c1(SNF8) c2(NP_009172) c3(vacuolar-sorting protein SNF8) c4(171249) c5(171250, 171251, 171252, 171253, 171254, 171255) c6( ) c7(ck, T, dD, ea, h, eq, cm, bt); #c1(SNIP1) c2(XP_011540462) c3(smad nuclear-interacting protein 1 isoform X1) c4( ) c5(338932) c6( ) c7(eM, cHM, T, bz); #c1(SNRK) c2(NP_001094064) c3(SNF-related serine/threonine-protein kinase) c4(40588) c5(40589, 40590, 40591, 40592, 40593, 40594, 40595, 40596, 40597, 40598, 40599, 40600, 40601, 40602) c6( ) c7(bB, bE); #c1(SNRNP200) c2(NP_054733) c3(05 small nuclear ribonucleoprotein 200 kDa helicase) c4(177423, 177424, 177425, 177426, 177427, 177428) c5(177429, 177430, 177431, 177432, 177433, 177434, 177435, 177436, 177437, 177438, 177439, 177440, 177441, 177442, 177443, 177444, 177445, 177446, 177447, 177448, 177449, 177450, 177451, 177452, 177453, 177454, 177455, 177456, 177457, 177458, 177459, 177460, 177461, 177462, 177463, 177464) c6( ) c7(nC, cHN, xX, lR, U); #c1(SNRNP27) c2(NP_006848) c3(U4/U6.U5 small nuclear ribonucleoprotein 27 kDa protein) c4(168598) c5(168599, 168600, 168601, 168602, 168603, 168604, 168605, 168606, 168607, 168608) c6( ) c7(lW); #c1(SNRNP70) c2(NP_001287998) c3(U1 small nuclear ribonucleoprotein 70 kDa isoform 2) c4(113350) c5(113351, 113352, 113353, 113354, 113355, 113356, 113357) c6( ) c7(bL, bM, aj, v, Kh, aGX, ww, eA, mC, J, ad, wG, bW, vH, dL, bK, rz, ae, eL, tb, eZ, abn, pb, uo, fL, ei); #c1(SNRNP70) c2(NP_003080) c3(U1 small nuclear ribonucleoprotein 70 kDa isoform 1) c4(135053, 135054) c5(135055, 135056, 135057, 135058, 135059, 135060, 135061, 135062, 135063, 135064) c6( ) c7(bL, bM, aj, v, Kh, aGX, ww, eA, mC, J, ad, wG, bW, vH, dL, bK, rz, ae, eL, tb, eZ, abn, pb, uo, fL, ei); #c1(SNRNP70) c2(XP_011525542) c3(U1 small nuclear ribonucleoprotein 70 kDa isoform X1) c4( ) c5(319969, 319970, 319971, 319972, 319973, 319974) c6( ) c7(bL, bM, aj, v, Kh, aGX, ww, eA, mC, J, ad, wG, bW, vH, dL, bK, rz, ae, eL, tb, eZ, abn, pb, uo, fL, ei); #c1(SNRPA) c2(NP_004587) c3(U1 small nuclear ribonucleoprotein A) c4(147929, 147930) c5(147931, 147932, 147933, 147934, 147935, 147936, 147937, 147938, 147939, 147940, 147941, 147942, 147943) c6( ) c7(aGX, mC, fL, uE, eZ); #c1(SNRPB) c2(NP_003082) c3(small nuclear ribonucleoprotein-associated proteins B and B′ isoform B) c4(135065, 135066) c5(135067, 135068, 135069, 135070, 135071, 135072, 135073, 135074, 135075, 135076, 135077, 135078, 135079, 135080, 135081, 135082, 135083, 135084, 135085, 135086, 135087, 135088, 135089, 135090) c6( ) c7(nC, aA, eZ, U, aT); #c1(SNRPB) c2(NP_937859) c3(small nuclear ribonucleoprotein-associated proteins B and B′ isoform B′) c4(259334) c5( ) c6( ) c7(nC, aA, eZ, U, aT); #c1(SNRPC) c2(NP_003084) c3(U1 small nuclear ribonucleoprotein C) c4(135091, 135092, 135093) c5(135094, 135095, 135096, 135097, 135098, 135099, 135100, 135101, 135102, 135103, 135104, 135105, 135106, 135107, 135108, 135109, 135110, 135111, 135112, 135113) c6( ) c7(eZ); #c1(SNRPD1) c2(NP_008869) c3(small nuclear ribonucleoprotein Sm D1 isoform 1) c4(169339) c5(169340, 169341, 169342, 169343, 169344, 169345) c6( ) c7(aY, eZ, fP); #c1(SNRPD3) c2(NP_004166) c3(small nuclear ribonucleoprotein Sm D3) c4(144000, 144001) c5(144002, 144003, 144004, 144005, 144006, 144007, 144008, 144009, 144010, 144011, 144012, 144013) c6( ) c7(h, zP, zQ, ci); #c1(SNRPE) c2(NP_001291393) c3(small nuclear ribonucleoprotein E isoform 2) c4( ) c5(115870, 115871, 115872, 115873, 115874, 115875) c6( ) c7(DS, T, AS, cHO, bB, bS, ci, Qp, q, ad, eA, zn, XX, av, aqt, hd, jz, aE, avA, aT, hP, K, fb, ae, eL, cp, atX, eG, yo, d, s, aW, Fm, Y, r, aq, yq, g, bz, Qt, iP, ck, es, nM, Dy, eM, nB, bE, Qu, CD, np, auN, ei, y, bt, it, X, On); #c1(SNRPE) c2(NP_003085) c3(small nuclear ribonucleoprotein E isoform 1) c4(135114, 135115, 135116) c5(135117, 135118, 135119, 135120, 135121, 135122, 135123, 135124, 135125, 135126, 135127, 135128) c6( ) c7(DS, T, AS, cHO, bB, bS, ci, Qp, q, ad, eA, zn, XX, av, aqt, hd, jz, aE, avA, aT, hP, K, fb, ae, eL, cp, atX, eG, yo, d, s, aW, Fm, Y, r, aq, yq, g, bz, Qt, iP, ck, es, nM, Dy, eM, nB, bE, Qu, CD, np, auN, ei, y, bt, it, X, On); #c1(SNRPF) c2(NP_003086) c3(small nuclear ribonucleoprotein F) c4(135129) c5(135130, 135131, 135132, 135133, 135134, 135135) c6( ) c7(bv, an); #c1(SNRPN) c2(NP_073719) c3(small nuclear ribonucleoprotein-associated protein N) c4(213219, 213220, 213221, 213222) c5(213223, 213224, 213225, 213226, 213227, 213228, 213229, 213230, 213231, 213232, 213233, 213234, 213235, 213236, 213237, 213238, 213239, 213240, 213241, 213242, 213243, 213244, 213245, 213246, 213247) c6( ) c7(T, gU, wu, OI, ml, oA, KY, Vd, fu, hF, arX, q, rc, x, no, cHP, ahL, oj, Ak, kf, biX, rO, bl, K, wm, bU, he, rz, dx, ND, vT, apl, eZ, r, cm, dr, aeb, bN, axl, bdx, apq, c, aem, agl, U, axV, oh, cHy, MW, k, auK, bt); #c1(SNTA1) c2(NP_003089) c3(alpha-1-syntrophin) c4(135136) c5(135137, 135138, 135139, 135140, 135141, 135142) c6( ) c7(T, aW, aT, vc, EZ, Bu, cB, cHQ, mu); #c1(SNTB1) c2(NP_066301) c3(beta-1-syntrophin) c4(207141, 207142) c5(207143, 207144, 207145, 207146, 207147, 207148, 207149, 207150, 207151, 207152) c6( ) c7(b, e, Be, cz, akY, aj, i); #c1(SNTG1) c2(NP_001274743) c3(gamma-1-syntrophin isoform 2) c4(106739) c5(106740, 106741, 106742, 106743, 106744, 106745, 106746, 106747, 106748, 106749) c6( ) c7(bL, W, hb, uY, rr, bQ, iu); #c1(SNTG1) c2(XP_011515849) c3(gamma-1-syntrophin isoform X1) c4(308816, 308817) c5(308818, 308819, 308820, 308821, 308822, 308823, 308824, 308825, 308826, 308827) c6( ) c7(bL, W, hb, uY, rr, bQ, iu); #c1(SNTG1) c2(XP_011515852) c3(gamma-1-syntrophin isoform X4) c4( ) c5(308828, 308829, 308830, 308831, 308832, 308833) c6( ) c7(bL, W, hb, uY, rr, bQ, iu); #c1(SNTG2) c2(NP_061841) c3(gamma-2-syntrophin) c4(200738) c5(200739, 200740, 200741, 200742, 200743, 200744) c6( ) c7(bS, VX, bN); #c1(SNUPN) c2(NP_005692) c3(snurportin-1) c4(158586, 158587) c5(158588, 158589, 158590, 158591, 158592, 158593, 158594, 158595, 158596, 158597, 158598, 158599, 158600, 158601, 158602, 158603) c6( ) c7(wR); #c1(SNURF) c2(NP_005669) c3(SNRPN upstream reading frame protein) c4(158399, 158400) c5(158401, 158402, 158403, 158404, 158405, 158406, 158407, 158408, 158409, 158410, 158411, 158412, 158413, 158414, 158415, 158416, 158417, 158418, 158419, 158420) c6( ) c7(rc); #c1(SNW1) c2(NP_036377) c3(SNW domain-containing protein 1) c4(173371) c5(173372, 173373, 173374, 173375, 173376, 173377, 173378) c6( ) c7(bM, T, Dy, aE, Y, Ex); #c1(SNW1) c2(XP_005267470) c3(SNW domain-containing protein 1 isoform X2) c4( ) c5(280990, 280991, 280992, 280993, 280994, 280995, 280996, 280997, 280998, 280999, 281000, 281001) c6( ) c7(bM, T, Dy, aE, Y, Ex); #c1(SNW1) c2(XP_005267471) c3(SNW domain-containing protein 1 isoform X1) c4(281002, 281003) c5( ) c6( ) c7(bM, T, Dy, aE, Y, Ex); #c1(SNX1) c2(NP_003090) c3(sorting nexin-1 isoform a) c4(135143, 135144) c5(135145, 135146, 135147, 135148, 135149, 135150, 135151, 135152, 135153, 135154, 135155, 135156) c6( ) c7(eM, bE, cz, r, bB, q, ci, bz, X, qa); #c1(SNX1) c2(NP_683758) c3(sorting nexin-1 isoform b) c4(242536) c5(242537, 242538, 242539, 242540, 242541, 242542, 242543, 242544, 242545) c6( ) c7(eM, bE, cz, r, bB, q, ci, bz, X, qa); #c1(SNX10) c2(NP_001186764) c3(sorting nexin-10 isoform 1) c4(78536, 78537) c5(78538, 78539, 78540, 78541, 78542, 78543, 78544, 78545, 78546, 78547) c6( ) c7(zw, ac, pN, zs, ey, an, cHR, bA); #c1(SNX10) c2(NP_001186766) c3(sorting nexin-10 isoform 2) c4( ) c5(78548) c6( ) c7(zw, ac, pN, zs, ey, an, cHR, bA); #c1(SNX10) c2(NP_001186767) c3(sorting nexin-10 isoform 3) c4( ) c5(78549, 78550, 78551, 78552, 78553) c6( ) c7(zw, ac, pN, zs, ey, an, cHR, bA); #c1(SNX12) c2(NP_001243117) c3(sorting nexin-12 isoform 4) c4(89969) c5(89970, 89971, 89972, 89973, 89974, 89975) c6( ) c7(af); #c1(SNX12) c2(NP_037478) c3(sorting nexin-12 isoform 1) c4(175731) c5(175732, 175733, 175734, 175735, 175736, 175737) c6( ) c7(af); #c1(SNX14) c2(NP_001284543) c3(sorting nexin-14 isoform c) c4(112028) c5(112029, 112030, 112031, 112032, 112033, 112034) c6( ) c7(WI, nA); #c1(SNX14) c2(NP_001291408) c3(sorting nexin-14 isoform d) c4(115935) c5( ) c6( ) c7(WI, nA); #c1(SNX14) c2(NP_065201) c3(sorting nexin-14 isoform b) c4(204561) c5(204562, 204563, 204564, 204565, 204566, 204567) c6( ) c7(WI, nA); #c1(SNX14) c2(NP_722523) c3(sorting nexin-14 isoform a) c4(246800) c5(246801, 246802, 246803, 246804, 246805, 246806, 246807, 246808, 246809, 246810, 246811, 246812, 246813) c6( ) c7(WI, nA); #c1(SNX14) c2(XP_011534280) c3(sorting nexin-14 isoform X4) c4(330647) c5( ) c6( ) c7(WI, nA); #c1(SNX14) c2(XP_011534282) c3(sorting nexin-14 isoform X6) c4( ) c5(330648, 330649, 330650, 330651, 330652) c6( ) c7(WI, nA); #c1(SNX16) c2(NP_690049) c3(sorting nexin-16 isoform a) c4(244828, 244829, 244830, 244831) c5(244832, 244833, 244834, 244835, 244836, 244837, 244838, 244839, 244840, 244841) c6( ) c7(ad, pZ); #c1(SNX16) c2(NP_690050) c3(sorting nexin-16 isoform b) c4(244842) c5(244843, 244844, 244845, 244846, 244847, 244848) c6( ) c7(ad, pZ); #c1(SNX16) c2(XP_005251341) c3(sorting nexin-16 isoform X3) c4(270885) c5(270886, 270887, 270888, 270889, 270890, 270891, 270892, 270893, 270894, 270895, 270896, 270897, 270898, 270899, 270900, 270901, 270902, 270903, 270904, 270905, 270906, 270907, 270908, 270909) c6( ) c7(ad, pZ); #c1(SNX18) c2(NP_001096045) c3(sorting nexin-18 isoform a) c4(40989) c5(40990, 40991, 40992, 40993, 40994, 40995, 40996) c6( ) c7(hH); #c1(SNX18) c2(NP_001138899) c3(sorting nexin-18 isoform c) c4( ) c5(58115) c6( ) c7(hH); #c1(SNX18) c2(NP_443102) c3(sorting nexin-18 isoform b) c4(229433, 229434) c5(229435, 229436, 229437, 229438, 229439, 229440, 229441, 229442, 229443, 229444, 229445) c6( ) c7(hH); #c1(SNX19) c2(NP_001288018) c3(sorting nexin-19 isoform 2) c4(113432) c5(113433, 113434, 113435, 113436, 113437) c6( ) c7(dD, ac, ea, e, aw, eq, j, eu); #c1(SNX19) c2(NP_055573) c3(sorting nexin-19 isoform 1) c4(182023, 182024) c5(182025, 182026, 182027, 182028, 182029, 182030, 182031, 182032, 182033, 182034, 182035, 182036, 182037) c6( ) c7(dD, ac, ea, e, aw, eq, j, eu); #c1(SNX2) c2(NP_003091) c3(sorting nexin-2 isoform 1) c4(135157) c5(135158, 135159, 135160, 135161, 135162, 135163) c6( ) c7(bz, ey); #c1(SNX20) c2(NP_001138444) c3(sorting nexin-20 isoform 3) c4(56799) c5(56800, 56801, 56802, 56803, 56804, 56805) c6( ) c7(fe, AW); #c1(SNX20) c2(NP_699168) c3(sorting nexin-20 isoform 2) c4(245799) c5(245800, 245801, 245802, 245803, 245804, 245805) c6( ) c7(fe, AW); #c1(SNX20) c2(NP_878274) c3(sorting nexin-20 isoform 1) c4(257078, 257079) c5(257080, 257081, 257082, 257083, 257084, 257085, 257086, 257087, 257088, 257089, 257090, 257091) c6( ) c7(fe, AW); #c1(SNX24) c2(NP_054754) c3(sorting nexin-24) c4( ) c5(177626, 177627, 177628, 177629, 177630, 177631) c6( ) c7(fq, ey); #c1(SNX24) c2(XP_005272029) c3(sorting nexin-24 isoform X2) c4(283666) c5( ) c6( ) c7(fq, ey); #c1(SNX24) c2(XP_006714655) c3(sorting nexin-24 isoform X5) c4(287940) c5(287941, 287942, 287943, 287944, 287945, 287946, 287947, 287948, 287949, 287950) c6( ) c7(fq, ey); #c1(SNX25) c2(XP_005263324) c3(sorting nexin-25 isoform X7) c4(278431) c5(278432, 278433) c6( ) c7(il, ha); #c1(SNX25) c2(XP_011530604) c3(sorting nexin-25 isoform X2) c4( ) c5(326719) c6( ) c7(il, ha); #c1(SNX25) c2(XP_011530606) c3(sorting nexin-25 isoform X4) c4(326720) c5( ) c6( ) c7(il, ha); #c1(SNX29) c2(NP_115543) c3(sorting nexin-29) c4(223137, 223138, 223139, 223140) c5(223141, 223142, 223143, 223144, 223145, 223146) c6( ) c7(oe, ac, pN); #c1(SNX29) c2(XP_005255740) c3(sorting nexin-29 isoform X11) c4( ) c5(273821, 273822, 273823, 273824, 273825, 273826, 273827, 273828, 273829, 273830, 273831, 273832, 273833, 273834, 273835, 273836, 273837, 273838, 273839, 273840, 273841, 273842, 273843, 273844, 273845, 273846, 273847, 273848) c6( ) c7(oe, ac, pN); #c1(SNX29) c2(XP_011521041) c3(sorting nexin-29 isoform X3) c4(316012) c5( ) c6( ) c7(oe, ac, pN); #c1(SNX29) c2(XP_011521042) c3(sorting nexin-29 isoform X4) c4(316013) c5( ) c6( ) c7(oe, ac, pN); #c1(SNX29) c2(XP_011521046) c3(sorting nexin-29 isoform X9) c4(316014) c5(316015, 316016, 316017, 316018, 316019, 316020) c6( ) c7(oe, ac, pN); #c1(SNX29) c2(XP_011521049) c3(sorting nexin-29 isoform X12) c4( ) c5(316021, 316022, 316023, 316024, 316025, 316026) c6( ) c7(oe, ac, pN); #c1(SNX3) c2(NP_001287857) c3(sorting nexin-3 isoform c) c4(113048) c5(113049, 113050, 113051, 113052, 113053, 113054) c6( ) c7(kj, arA, ff, bBU, cHS, en, QK); #c1(SNX3) c2(NP_001287858) c3(sorting nexin-3 isoform d) c4(113055) c5(113056, 113057, 113058, 113059, 113060, 113061) c6( ) c7(kj, arA, ff, bBU, cHS, en, QK); #c1(SNX3) c2(NP_003786) c3(sorting nexin-3 isoform a) c4(140790) c5(140791, 140792, 140793, 140794, 140795, 140796) c6( ) c7(kj, arA, ff, bBU, cHS, en, QK); #c1(SNX3) c2(NP_690040) c3(sorting nexin-3 isoform b) c4(244794) c5(244795, 244796, 244797, 244798, 244799, 244800) c6( ) c7(kj, arA, ff, bBU, cHS, en, QK); #c1(SNX30) c2(NP_001013012) c3(sorting nexin-30) c4(25436) c5(25437, 25438, 25439, 25440, 25441, 25442) c6( ) c7(Na, Nc); #c1(SNX30) c2(XP_005252043) c3(sorting nexin-30 isoform X2) c4( ) c5(271495, 271496, 271497, 271498, 271499, 271500) c6( ) c7(Na, Nc); #c1(SNX30) c2(XP_011516993) c3(sorting nexin-30 isoform X1) c4(310480) c5( ) c6( ) c7(Na, Nc); #c1(SNX5) c2(NP_689413) c3(sorting nexin-5 isoform a) c4(242678, 242679, 242680) c5(242681, 242682, 242683, 242684, 242685, 242686, 242687, 242688, 242689, 242690, 242691, 242692, 242693, 242694, 242695, 242696, 242697, 242698, 242699, 242700, 242701, 242702) c6( ) c7(af, aA); #c1(SNX9) c2(NP_057308) c3(sorting nexin-9) c4(190034, 190035) c5(190036, 190037, 190038, 190039, 190040, 190041, 190042, 190043, 190044, 190045) c6( ) c7(bM, bE, mQ, aT, bB, X); #c1(SNX9) c2(XP_005267072) c3(sorting nexin-9 isoform X1) c4( ) c5(280668) c6( ) c7(bM, bE, mQ, aT, bB, X); #c1(SNX9) c2(XP_011534188) c3(sorting nexin-9 isoform X2) c4( ) c5(330498, 330499, 330500, 330501, 330502) c6( ) c7(bM, bE, mQ, aT, bB, X); #c1(SOAT1) c2(NP_001239440) c3(sterol O-acyltransferase 1 isoform 2) c4( ) c5(88459, 88460, 88461, 88462, 88463, 88464) c6( ) c7(T, os, ea, e, fd, ci, amW, ip, x, aE, K, dQ, aVT, dH, aW, apn, bw, Qt, eM, nB, iT, qA, dD, akc, oY, aj, fr, ai, nV, zw, pe, kH, cU, h, eV, pi, aq, pm, iO, dB, hL, nL, B, bL, fM, dA, jx, eX, J, er, oT, nv, aWJ, aT, dz, jj, ae, af, iU, Y, cl, f, ck, sS, iM, dy, bt, zA, iW, rl, jh, aHv, oZ, eq, hF, ad, hd, ds, oW, pq, uQ, d, je, et, cr, rM, bz, eK, baa, pc, zr, aS, bC, y, kS); #c1(SOAT1) c2(NP_001239441) c3(sterol O-acyltransferase 1 isoform 3) c4( ) c5(88465, 88466, 88467, 88468, 88469) c6( ) c7(T, os, ea, e, fd, ci, amW, ip, x, aE, K, dQ, aVT, dH, aW, apn, bw, Qt, eM, nB, iT, qA, dD, akc, oY, aj, fr, ai, nV, zw, pe, kH, cU, h, eV, pi, aq, pm, iO, dB, hL, nL, B, bL, fM, dA, jx, eX, J, er, oT, nv, aWJ, aT, dz, jj, ae, af, iU, Y, cl, f, ck, sS, iM, dy, bt, zA, iW, rl, jh, aHv, oZ, eq, hF, ad, hd, ds, oW, pq, uQ, d, je, et, cr, rM, bz, eK, baa, pc, zr, aS, bC, y, kS); #c1(SOAT1) c2(XP_011508213) c3(sterol O-acyltransferase 1 isoform X1) c4(298803, 298804, 298805, 298806, 298807) c5(298808, 298809, 298810, 298811, 298812, 298813, 298814, 298815, 298816, 298817, 298818, 298819, 298820) c6( ) c7(T, os, ea, e, fd, ci, amW, ip, x, aE, K, dQ, aVT, dH, aW, apn, bw, Qt, eM, nB, iT, qA, dD, akc, oY, aj, fr, ai, nV, zw, pe, kH, cU, h, eV, pi, aq, pm, iO, dB, hL, nL, B, bL, fM, dA, jx, eX, J, er, oT, nv, aWJ, aT, dz, jj, ae, af, iU, Y, cl, f, ck, sS, iM, dy, bt, zA, iW, rl, jh, aHv, oZ, eq, hF, ad, hd, ds, oW, pq, uQ, d, je, et, cr, rM, bz, eK, baa, pc, zr, aS, bC, y, kS); #c1(SOAT1) c2(XP_011508214) c3(sterol O-acyltransferase 1 isoform X2) c4( ) c5(298821, 298822, 298823, 298824, 298825, 298826) c6( ) c7(T, os, ea, e, fd, ci, amW, ip, x, aE, K, dQ, aVT, dH, aW, apn, bw, Qt, eM, nB, iT, qA, dD, akc, oY, aj, fr, ai, nV, zw, pe, kH, cU, h, eV, pi, aq, pm, iO, dB, hL, nL, B, bL, fM, dA, jx, eX, J, er, oT, nv, aWJ, aT, dz, jj, ae, af, iU, Y, cl, f, ck, sS, iM, dy, bt, zA, iW, rl, jh, aHv, oZ, eq, hF, ad, hd, ds, oW, pq, uQ, d, je, et, cr, rM, bz, eK, baa, pc, zr, aS, bC, y, kS); #c1(SOAT2) c2(NP_003569) c3(sterol O-acyltransferase 2) c4(139233) c5(139234, 139235, 139236, 139237, 139238, 139239) c6( ) c7(iu, iV, I, dD, eR, u, cH, ea, at, aq, dL, j, ah, v, bq, dQ, eq, B); #c1(SOBP) c2(NP_060483) c3(sine oculis-binding protein homolog) c4(196195) c5(196196, 196197, 196198, 196199, 196200, 196201) c6( ) c7(gl, cHT, ac, nA); #c1(SOBP) c2(XP_011534223) c3(sine oculis-binding protein homolog isoform X3) c4(330577) c5( ) c6( ) c7(gl, cHT, ac, nA); #c1(SOBP) c2(XP_011534225) c3(sine oculis-binding protein homolog isoform X5) c4( ) c5(330578, 330579, 330580, 330581, 330582, 330583) c6( ) c7(gl, cHT, ac, nA); #c1(SOCS1) c2(NP_003736) c3(suppressor of cytokine signaling 1) c4(140526) c5(140527, 140528, 140529, 140530, 140531, 140532, 140533, 140534, 140535, 140536, 140537) c6( ) c7(bM, T, aC, ea, if, al, fd, bB, ci, aE, pX, K, eL, bc, cp, yo, pr, aW, hl, g, bw, Qt, eM, nB, cj, m, dD, wu, aw, aFc, n, aj, fr, qN, qW, eW, br, pe, kH, h, eV, dL, pi, A, mR, fJ, fQ, aq, pm, auC, iO, aOL, hs, hR, pg, eo, cB, B, cn, bL, fM, jp, fG, jx, eX, aA, v, C, AO, V, q, J, oT, aT, yu, dz, ae, af, iU, vT, nO, Y, r, lo, en, LV, t, iK, ck, iM, ig, bt, jh, eq, jE, ad, LH, hX, fU, hd, F, ds, IQ, wm, pq, NM, d, je, et, ff, cr, eZ, Ej, aF, hp, iV, bz, LB, gk, pc, bE, dO, hE, kS, y); #c1(SOCS2) c2(NP_001257400) c3(suppressor of cytokine signaling 2) c4(95307, 95308) c5(95309, 95310, 95311, 95312, 95313, 95314, 95315, 95316, 95317, 95318, 95319, 95320, 95321, 95322, 95323, 95324, 95325, 95326, 95327, 95328, 95329, 95330, 95331, 95332, 95333, 95334, 95335, 95336, 95337, 95338, 95339, 95340, 95341, 95342, 95343) c6( ) c7(bL, bM, T, Dw, aD, pQ, Fb, ci, C, JW, q, ad, cF, pe, vJ, aT, Ds, dz, ae, iU, et, aW, Y, fJ, ff, eZ, r, en, cl, pm, t, pc, hL, aS, m, y, ao); #c1(SOCS2) c2(XP_011537236) c3(suppressor of cytokine signaling 2 isoform X1) c4(334960, 334961) c5(334962, 334963, 334964, 334965, 334966) c6( ) c7(bL, bM, T, Dw, aD, pQ, Fb, ci, C, JW, q, ad, cF, pe, vJ, aT, Ds, dz, ae, iU, et, aW, Y, fJ, ff, eZ, r, en, cl, pm, t, pc, hL, aS, m, y, ao); #c1(SOCS3) c2(NP_003946) c3(suppressor of cytokine signaling 3) c4(142377) c5(142378, 142379, 142380, 142381, 142382, 142383) c6( ) c7(bM, T, fR, ea, if, al, CH, bB, fd, ci, xE, aE, Ds, K, dF, cHU, pr, aW, hl, g, eE, eF, uC, cm, fT, eM, nB, aiM, U, Hb, dD, Bm, n, aj, fr, qN, ai, ke, jz, aZv, cU, IG, h, A, fJ, fe, aq, kp, pm, dB, bo, aOL, hL, hs, at, pg, eo, cB, B, bL, Dw, IH, jx, aA, v, j, C, V, q, J, eA, hW, aT, dz, bq, ae, kl, iU, nO, xR, Y, fO, r, lo, en, iK, ck, ig, dy, fD, bt, vi, gV, bjX, aCA, iW, dG, eq, ad, hX, fU, av, hd, F, ib, cHV, ds, ji, jo, d, Di, hG, et, yx, eH, ff, cr, eZ, aF, iV, KM, bz, gk, eU, pc, bE, aS, rH, ei, hE, y); #c1(SOCS4) c2(NP_543143) c3(suppressor of cytokine signaling 4) c4(233387) c5(233388, 233389, 233390, 233391, 233392, 233393, 233394, 233395, 233396, 233397, 233398, 233399, 233400, 233401) c6( ) c7(gk, F, bo, al, aOL, IG, v, dL, eL); #c1(SOCS5) c2(NP_659198) c3(suppressor of cytokine signaling 5) c4(239730) c5(239731, 239732, 239733, 239734, 239735, 239736, 239737, 239738, 239739, 239740) c6( ) c7(T, aCA, A, aOL, qR, at, fe, K, eE, qW); #c1(SOCS6) c2(XP_005266840) c3(suppressor of cytokine signaling 6 isoform X1) c4(280356) c5(280357, 280358, 280359, 280360, 280361, 280362) c6( ) c7(T, d, QO, Qu, eZ, r, aA, n, aq, aF, K, iR, q); #c1(SOCS7) c2(NP_055413) c3(suppressor of cytokine signaling 7) c4(180915) c5(180916, 180917, 180918, 180919, 180920, 180921, 180922, 180923, 180924, 180925) c6( ) c7(gk, T, d, F, Qu, bo, al, aOL, r, aA, n, aq, dL, v, aF, iR, eL, q); #c1(SOD1) c2(NP_000445) c3(superoxide dismutase [Cu—Zn]) c4(9064, 9065) c5(9066, 9067, 9068, 9069, 9070, 9071, 9072, 9073, 9074, 9075, 9076, 9077) c6( ) c7(ID, bM, T, xS, fR, aey, ea, al, bB, Vd, ci, qj, aR, Gt, aE, lu, Bc, bMh, dV, K, bU, hu, hH, wt, cHY, li, eG, zQ, aiV, apl, aW, cHX, wF, alR, hl, LZ, fc, dg, vs, arq, cnV, Ku, g, uC, cm, bb, eM, Kv, aem, wB, U, vy, bel, fC, nw, m, R, act, cZ, dt, dD, Ol, aWG, My, aw, n, cQ, aj, bOX, et, nA, PJ, aHj, cd, co, Hx, b, no, i, ju, eT, Ak, h, IG, dL, bl, dd, awL, db, wn, wC, A, asp, acR, bYg, axR, fe, ax, ack, aq, wd, kk, aKv, hq, ar, W, bP, dB, at, oh, va, eo, acJ, eq, B, L, bL, eR, mr, fG, rf, aA, cz, ti, aNG, j, il, V, q, J, eA, Kx, PW, di, MR, WY, HC, aT, kf, cy, aWJ, jj, bq, an, cHW, rz, ae, af, eu, alL, bA, ak, axW, WQ, r, TQ, aaE, HL, en, t, xw, f, bN, ck, bmS, rR, apq, tW, c, ac, cvr, wO, Uq, hr, wR, dy, AC, gT, aen, aya, cmC, bLx, wi, id, Pt, MH, qb, iW, jN, acU, dG, ah, eq, ad, BY, av, HF, F, Ae, aet, Hk, ts, oj, ab, oW, ama, ji, NM, sj, uX, d, IR, cH, PE, Zf, aav, ff, cr, eZ, kD, yy, bOW, aF, bz, dr, eK, IU, axl, gk, EW, akQ, VO, bE, dJ, aEY, aDB, aS, Kj, IM, y, kS, rk, pC); #c1(SOD2) c2(NP_001019636) c3(superoxide dismutase [Mn], mitochondrial isoform A precursor) c4(27797, 27798) c5(27799, 27800, 27801, 27802, 27803, 27804, 27805, 27806, 27807, 27808, 27809, 27810, 27811, 27812, 27813, 27814) c6( ) c7(bM, T, aC, fR, ea, e, al, bO, fd, fo, qj, aei, ci, HH, mF, aE, bW, azm, HR, K, oi, H, dQ, dF, hH, eL, aa, zQ, aW, fc, LZ, nY, vs, g, cnV, aBa, uC, cm, y, fT, bhB, eM, Kv, dc, mx, U, cj, vy, sv, aCy, uJ, m, abp, R, zv, iu, dD, gU, sw, OI, aw, ht, NT, n, aj, fr, ct, qN, PJ, qW, cd, ai, ke, b, cc, h, IG, Gw, dL, vd, acd, awL, ahA, wC, A, mR, sp, aq, cv, ar, W, cA, bP, dB, hk, uw, bo, aic, bm, gw, at, eQ, IB, it, B, L, bL, fM, aCw, kA, yk, jx, aA, cR, ti, cz, hy, j, v, C, AE, bX, Zk, V, q, J, eA, ga, bgk, uT, Ig, apJ, HC, aT, cy, bK, bq, cla, rz, an, ae, af, Ir, bA, eu, ajU, ak, nO, Y, aM, r, akY, HL, en, t, kC, xw, f, iK, rY, ck, ac, c, pZ, mG, clb, hr, wR, dy, cS, cHZ, Gl, bmQ, MH, iW, jh, ID, aET, bS, dG, fu, eq, ad, kL, wD, fU, HF, av, ib, yt, aCJ, Hk, IG, ts, oW, IQ, jo, vl, sj, uQ, NP, uX, cH, ff, eZ, yy, So, gl, aF, iV, Z, bz, IU, bF, gk, axs, wz, gZ, aCI, aS, ei, Gu, i, Pk, X, rk, pC); #c1(SOD2) c2(NP_001019637) c3(superoxide dismutase [Mn], mitochondrial isoform B precursor) c4(27815) c5(27816, 27817, 27818, 27819, 27820, 27821, 27822, 27823, 27824, 27825) c6( ) c7(bM, T, aC, fR, ea, e, al, bO, fd, fo, qj, aei, ci, HH, mF, aE, bW, azm, HR, K, oi, H, dQ, dF, hH, eL, aa, zQ, aW, fc, LZ, nY, vs, g, cnV, aBa, uC, cm, y, fT, bhB, eM, Kv, dc, mx, U, cj, vy, sv, aCy, uJ, m, abp, R, zv, iu, dD, gU, sw, OI, aw, ht, NT, n, aj, fr, et, qN, PJ, qW, cd, ai, ke, b, cc, h, IG, Gw, dL, vd, acd, awL, ahA, wC, A, mR, sp, aq, cv, ar, W, cA, bP, dB, hk, uw, bo, aic, bm, gw, at, eQ, IB, it, B, L, bL, fM, aCw, kA, yk, jx, aA, cR, ti, cz, hy, j, v, C, AE, bX, Zk, V, q, J, eA, ga, bgk, uT, Ig, apJ, HC, aT, cy, bK, bq, cla, rz, an, ae, af, Ir, bA, eu, ajU, ak, nO, Y, aM, r, akY, HL, en, t, kC, xw, f, iK, rY, ck, ac, c, pZ, mG, clb, hr, wR, dy, cS, cHZ, Gl, bmQ, MH, iW, jh, ID, aET, bS, dG, fu, eq, ad, kL, wD, fU, HF, av, ib, yt, aCJ, Hk, IC, ts, oW, IQ, jo, vl, sj, uQ, NP, uX, cH, ff, eZ, yy, So, gl, aF, iV, Z, bz, IU, bF, gk, axs, wz, gZ, aCI, aS, ei, Gu, i, Pk, X, rk, pC); #c1(SOD3) c2(NP_003093) c3(extracellular superoxide dismutase [Cu—Zn] precursor) c4(135164) c5(135165, 135166, 135167, 135168, 135169, 135170) c6( ) c7(bL, sY, dD, gU, bmQ, DD, iW, e, aw, cz, BH, aj, j, qj, bX, PJ, eq, cd, ad, eA, Vp, hd, xE, uT, aE, aT, ab, cy, dL, K, rz, ae, NP, aW, sp, dN, cnV, t, nC, uC, qa, eK, LB, y, nB, dB, vZ, at, IG, rk, pC); #c1(SOHLH1) c2(NP_001012415) c3(spermatogenesis- and oogenesis-specific basic helix-loop-helix-containing protein 1 isoform b) c4(24980) c5(24981, 24982, 24983, 24984, 24985, 24986) c6( ) c7(vH, pt, aec); #c1(SOHLH1) c2(NP_001095147) c3(spermatogenesis- and oogenesis-specific basic helix-loop-helix-containing protein 1 isoform a) c4(40847) c5(40848, 40849, 40850, 40851, 40852, 40853) c6( ) c7(vH, pt, aec); #c1(SOHLH2) c2(NP_060296) c3(spermatogenesis- and oogenesis-specific basic helix-loop-helix-containing protein 2 isoform 1) c4(195245) c5(195246, 195247, 195248, 195249, 195250, 195251) c6( ) c7(il, t, T, zZ, m); #c1(SON) c2(NP_001278340) c3(protein SON isoform E) c4( ) c5(109554, 109555, 109556) c6( ) c7(ck, T, pa, ds, qK, aT); #c1(SON) c2(NP_115571) c3(protein SON isoform B) c4(223243) c5(223244, 223245, 223246, 223247, 223248, 223249, 223250, 223251, 223252, 223253, 223254, 223255, 223256, 223257, 223258, 223259, 223260, 223261) c6( ) c7(ck, T, pa, ds, qK, aT); #c1(SON) c2(NP_620305) c3(protein SON isoform F) c4(237507, 237508) c5( ) c6( ) c7(ck, T, pa, ds, qK, aT); #c1(SORBS1) c2(NP_001030127) c3(sorbin and SH3 domain-containing protein 1 isoform 4) c4(30925) c5(30926, 30927, 30928, 30929, 30930, 30931, 30932, 30933, 30934, 30935) c6( ) c7(bL, bM, T, Ke, jx, cz, aj, v, q, J, eW, F, afn, aT, h, uV, kl, avR, aW, r, tv, aq, tu, avT, cT, rR, wg, ac, avS, tr, B); #c1(SORBS1) c2(NP_001030128) c3(sorbin and SH3 domain-containing protein 1 isoform 5) c4(30936) c5(30937, 30938, 30939, 30940, 30941, 30942, 30943, 30944, 30945, 30946) c6( ) c7(bL, bM, T, Ke, jx, cz, aj, v, q, J, eW, F, afn, aT, h, uV, kl, avR, aW, r, tv, aq, tu, avT, cT, rR, wg, ac, avS, tr, B); #c1(SORBS1) c2(NP_001277223) c3(sorbin and SH3 domain-containing protein 1 isoform 8) c4(109239) c5(109240, 109241, 109242, 109243, 109244, 109245) c6( ) c7(bL, bM, T, Ke, jx, cz, aj, v, q, J, eW, F, afn, aT, h, uV, kl, avR, aW, r, tv, aq, tu, avT, cT, rR, wg, ac, avS, tr, B); #c1(SORBS1) c2(NP_001277226) c3(sorbin and SH3 domain-containing protein 1 isoform 11) c4(109246) c5(109247, 109248, 109249, 109250, 109251, 109252) c6( ) c7(bL, bM, T, Ke, jx, cz, aj, v, q, J, eW, F, afn, aT, h, uV, kl, avR, aW, r, tv, aq, tu, avT, cT, rR, wg, ac, avS, tr, B); #c1(SORBS1) c2(NP_056200) c3(sorbin and SH3 domain-containing protein 1 isoform 2) c4(186286) c5(186287, 186288, 186289, 186290, 186291, 186292) c6( ) c7(bL, bM, T, Ke, jx, cz, aj, v, q, J, eW, F, afn, aT, h, uV, kl, avR, aW, r, tv, aq, tu, avT, cT, rR, wg, ac, avS, tr, B); #c1(SORBS1) c2(NP_079267) c3(sorbin and SH3 domain-containing protein 1 isoform 6) c4(217635) c5(217636, 217637, 217638, 217639, 217640, 217641) c6( ) c7(bL, bM, T, Ke, jx, cz, aj, v, q, J, eW, F, afn, aT, h, uV, kl, avR, aW, r, tv, aq, tu, avT, cT, rR, wg, ac, avS, tr, B); #c1(SORBS1) c2(XP_006717644) c3(sorbin and SH3 domain-containing protein 1 isoform X4) c4(291263) c5(291264, 291265, 291266, 291267, 291268, 291269, 291270, 291271, 291272, 291273) c6( ) c7(bL, bM, T, Ke, jx, cz, aj, v, q, J, eW, F, afn, aT, h, uV, kl, avR, aW, r, tv, aq, tu, avT, cT, rR, wg, ac, avS, tr, B); #c1(SORBS1) c2(XP_006717652) c3(sorbin and SH3 domain-containing protein 1 isoform X1) c4(291274) c5(291275, 291276, 291277, 291278, 291279, 291280, 291281, 291282, 291283, 291284) c6( ) c7(bL, bM, T, Ke, jx, cz, aj, v, q, J, eW, F, afn, aT, h, uV, kl, avR, aW, r, tv, aq, tu, avT, cT, rR, wg, ac, avS, tr, B); #c1(SORBS1) c2(XP_006717654) c3(sorbin and SH3 domain-containing protein 1 isoform X2) c4(291285) c5(291286, 291287, 291288, 291289, 291290, 291291) c6( ) c7(bL, bM, T, Ke, jx, cz, aj, v, q, J, eW, F, afn, aT, h, uV, kl, avR, aW, r, tv, aq, tu, avT, cT, rR, wg, ac, avS, tr, B); #c1(SORBS1) c2(XP_006717658) c3(sorbin and SH3 domain-containing protein 1 isoform X3) c4(291292) c5(291293, 291294, 291295, 291296, 291297, 291298) c6( ) c7(bL, bM, T, Ke, jx, cz, aj, v, q, J, eW, F, afn, aT, h, uV, kl, avR, aW, r, tv, aq, tu, avT, cT, rR, wg, ac, avS, tr, B); #c1(SORBS1) c2(XP_011537471) c3(sorbin and SH3 domain-containing protein 1 isoform X38) c4( ) c5(335081) c6( ) c7(bL, bM, T, Ke, jx, cz, aj, v, q, J, eW, F, afn, aT, h, uV, kl, avR, aW, r, tv, aq, tu, avT, cT, rR, wg, ac, avS, tr, B); #c1(SORBS2) c2(NP_001139142) c3(sorbin and SH3 domain-containing protein 2 isoform 3) c4( ) c5(58785, 58786, 58787, 58788, 58789, 58790, 58791, 58792, 58793, 58794, 58795, 58796, 58797, 58798, 58799, 58800, 58801, 58802, 58803, 58804, 58805, 58806, 58807, 58808, 58809, 58810, 58811, 58812, 58813, 58814, 58815, 58816, 58817, 58818, 58819, 58820, 58821, 58822, 58823, 58824, 58825, 58826, 58827) c6( ) c7(T, aC, aE, it); #c1(SORBS2) c2(NP_001139143) c3(sorbin and SH3 domain-containing protein 2 isoform 4) c4( ) c5(58828, 58829, 58830, 58831, 58832) c6( ) c7(T, aC, aE, it); #c1(SORBS2) c2(NP_001139144) c3(sorbin and SH3 domain-containing protein 2 isoform 5) c4(58833) c5(58834, 58835, 58836, 58837, 58838, 58839) c6( ) c7(T, aC, aE, it); #c1(SORBS2) c2(NP_001139145) c3(sorbin and SH3 domain-containing protein 2 isoform 6) c4( ) c5(58840, 58841, 58842, 58843, 58844) c6( ) c7(T, aC, aE, it); #c1(SORBS2) c2(NP_001139146) c3(sorbin and SH3 domain-containing protein 2 isoform 7) c4(58845, 58846) c5(58847, 58848, 58849, 58850, 58851, 58852, 58853, 58854, 58855, 58856, 58857, 58858) c6( ) c7(T, aC, aE, it); #c1(SORBS2) c2(NP_001139147) c3(sorbin and SH3 domain-containing protein 2 isoform 8) c4( ) c5(58859) c6( ) c7(T, aC, aE, it); #c1(SORBS2) c2(NP_001257700) c3(sorbin and SH3 domain-containing protein 2 isoform 9) c4(95586, 95587) c5(95588, 95589, 95590, 95591, 95592, 95593, 95594, 95595, 95596, 95597, 95598, 95599, 95600, 95601, 95602, 95603) c6( ) c7(T, aC, aE, it); #c1(SORBS2) c2(NP_003594) c3(sorbin and SH3 domain-containing protein 2 isoform 1) c4(139443) c5(139444, 139445, 139446, 139447, 139448, 139449, 139450, 139451, 139452, 139453) c6( ) c7(T, aC, aE, it); #c1(SORBS2) c2(XP_005263364) c3(sorbin and SH3 domain-containing protein 2 isoform X20) c4(278455) c5(278456) c6( ) c7(T, aC, aE, it); #c1(SORBS2) c2(XP_005263365) c3(sorbin and SH3 domain-containing protein 2 isoform X28) c4(278457) c5(278458) c6( ) c7(T, aC, aE, it); #c1(SORBS2) c2(XP_005263367) c3(sorbin and SH3 domain-containing protein 2 isoform X30) c4( ) c5(278459) c6( ) c7(T, aC, aE, it); #c1(SORBS2) c2(XP_005263370) c3(sorbin and SH3 domain-containing protein 2 isoform X33) c4(278460) c5(278461) c6( ) c7(T, aC, aE, it); #c1(SORBS2) c2(XP_006714444) c3(sorbin and SH3 domain-containing protein 2 isoform X25) c4(287843) c5( ) c6( ) c7(T, aC, aE, it); #c1(SORBS2) c2(XP_011530665) c3(sorbin and SH3 domain-containing protein 2 isoform X2) c4( ) c5(326745, 326746, 326747, 326748, 326749) c6( ) c7(T, aC, aE, it); #c1(SORBS2) c2(XP_011530667) c3(sorbin and SH3 domain-containing protein 2 isoform X5) c4(326750, 326751) c5( ) c6( ) c7(T, aC, aE, it); #c1(SORBS2) c2(XP_011530668) c3(sorbin and SH3 domain-containing protein 2 isoform X6) c4(326752) c5( ) c6( ) c7(T, aC, aE, it); #c1(SORBS2) c2(XP_011530676) c3(sorbin and SH3 domain-containing protein 2 isoform X12) c4(326753, 326754, 326755) c5( ) c6( ) c7(T, aC, aE, it); #c1(SORBS3) c2(NP_005766) c3(vinexin isoform 1) c4(159160) c5(159161, 159162, 159163, 159164, 159165, 159166) c6( ) c7(oe); #c1(SORBS3) c2(XP_005273428) c3(vinexin isoform X1) c4( ) c5(284583, 284584, 284585, 284586, 284587) c6( ) c7(oe); #c1(SORBS3) c2(XP_006716329) c3(vinexin isoform X2) c4(290226) c5( ) c6( ) c7(oe); #c1(SORBS3) c2(XP_006716331) c3(vinexin isoform X3) c4( ) c5(290227) c6( ) c7(oe); #c1(SORCS1) c2(NP_001013049) c3(VPS10 domain-containing receptor SorCS1 isoform b precursor) c4(25443) c5(25444, 25445, 25446, 25447, 25448, 25449) c6( ) c7(bL, cF, dt, dD, A, oe, bo, aj, v, dy, eq, an, af, J); #c1(SORCS1) c2(NP_001193501) c3(VPS10 domain-containing receptor SorCS1 isoform f precursor) c4(82239) c5(82240, 82241, 82242, 82243, 82244, 82245) c6( ) c7(bL, cF, dt, dD, A, oe, bo, aj, v, dy, eq, an, af, J); #c1(SORCS1) c2(NP_443150) c3(VPS10 domain-containing receptor SorCS1 isoform a precursor) c4(229656) c5(229657, 229658, 229659, 229660, 229661, 229662) c6( ) c7(bL, cF, dt, dD, A, oe, bo, aj, v, dy, eq, an, af, J); #c1(SORCS1) c2(XP_011537505) c3(VPS10 domain-containing receptor SorCS1 isoform X5) c4(335113) c5( ) c6( ) c7(bL, cF, dt, dD, A, oe, bo, aj, v, dy, eq, an, af, J); #c1(SORCS1) c2(XP_011537509) c3(VPS10 domain-containing receptor SorCS1 isoform X9) c4( ) c5(335114, 335115, 335116, 335117, 335118, 335119) c6( ) c7(bL, cF, dt, dD, A, oe, bo, aj, v, dy, eq, an, af, J); #c1(SORCS2) c2(NP_065828) c3(VPS10 domain-containing receptor SorCS2 precursor) c4(205706) c5(205707, 205708, 205709, 205710, 205711, 205712) c6( ) c7(bL, ac, gZ, j, bK, ad); #c1(SORCS2) c2(XP_005248044) c3(VPS10 domain-containing receptor SorCS2 isoform X1) c4( ) c5(268181) c6( ) c7(bL, ac, gZ, j, bK, ad); #c1(SORCS2) c2(XP_011511819) c3(VPS10 domain-containing receptor SorCS2 isoform X5) c4(302490) c5(302491, 302492, 302493, 302494, 302495) c6( ) c7(bL, ac, gZ, j, bK, ad); #c1(SORCS3) c2(NP_055793) c3(VPS10 domain-containing receptor SorCS3 precursor) c4(183540, 183541) c5(183542, 183543, 183544, 183545, 183546, 183547, 183548) c6( ) c7(Z, bS, j, et, aA); #c1(SORCS3) c2(XP_011537844) c3(VPS10 domain-containing receptor SorCS3 isoform X2) c4(335352) c5(335353, 335354, 335355, 335356, 335357, 335358, 335359, 335360, 335361, 335362, 335363) c6( ) c7(Z, bS, j, et, aA); #c1(SORD) c2(NP_003095) c3(sorbitol dehydrogenase) c4(135171) c5(135172, 135173, 135174, 135175, 135176, 135177) c6( ) c7(bL, T, s, Pq, Bc, vy, wz, aj, dy, bq, t, J); #c1(SORL1) c2(NP_003096) c3(sortilin-related receptor preproprotein) c4(135178) c5(135179, 135180, 135181, 135182, 135183, 135184, 135185) c6( ) c7(bL, dD, aaH, ea, oe, cz, aj, eq, hF, fK, J, x, sO, bK, af, cm, f, ac, aS, k, bt, CW, L); #c1(SOS1) c2(NP_005624) c3(son of sevenless homolog 1) c4(158036, 158037) c5(158038, 158039, 158040, 158041, 158042, 158043, 158044, 158045, 158046, 158047, 158048, 158049, 158050, 158051, 158052, 158053) c6( ) c7(T, apr, yS, ea, if, pf, al, bIl, fd, bB, axk, ci, bv, aE, K, eL, bc, cp, hm, bvR, aW, fc, Az, PQ, brr, g, eF, qj, cnj, eM, iT, U, Hb, m, dD, Ol, aw, NT, n, aj, fr, qN, md, afR, ft, cc, zw, Nn, gd, eV, dL, bl, ux, Ha, cC, bIP, fe, aq, yq, fq, iO, Sc, hk, Pl, bjK, bD, bli, B, bL, AS, eR, fG, jx, eX, aA, fF, v, yO, q, J, er, eA, aup, nX, afU, aT, cxs, cy, aut, bK, jj, bau, ae, dl, jf, Uf, Sh, Qr, nO, iU, Y, ev, r, aYp, en, aDY, t, nC, iK, pb, bN, ck, rR, nM, QG, c, hc, bt, ao, hS, On, kh, ha, atS, VT, jh, wV, eq, iJ, ad, dP, fU, hd, ib, MS, py, pq, d, ff, eH, eZ, nf, aF, KM, bz, dr, eK, bF, gk, KD, clc, bE, IF, Hs, cP, hE, y); #c1(SOS1) c2(XP_005264572) c3(son of sevenless homolog 1 isoform X5) c4(279087, 279088) c5(279089, 279090, 279091, 279092, 279093, 279094, 279095, 279096, 279097, 279098, 279099, 279100) c6( ) c7(T, apr, yS, ea, if, pf, al, bIl, fd, bB, axk, ci, bv, aE, K, eL, bc, cp, hm, bvR, aW, fc, Az, PQ, brr, g, eF, qJ, cnj, eM, iT, U, Hb, m, dD, Ol, aw, NT, n, aj, fr, qN, md, afR, ft, cc, zw, Nn, gd, eV, dL, bl, ux, Ha, cC, bIP, fe, aq, yq, fq, iO, Sc, hk, Pl, bjK, bD, bli, B, bL, AS, eR, fG, jx, eX, aA, fF, v, yO, q, J, er, eA, aup, nX, afU, aT, cxs, cy, aut, bK, jj, bau, ae, dl, jf, Uf, Sh, Qr, nO, iU, Y, ev, r, aYp, en, aDY, t, nC, iK, pb, bN, ck, rR, nM, QG, c, hc, bt, ao, hS, On, kh, ha, atS, VT, jh, wV, eq, iJ, ad, dP, fU, hd, ib, MS, py, pq, d, ff, eH, eZ, nf, aF, KM, bz, dr, eK, bF, gk, KD, clc, bE, IF, Hs, cP, hE, y); #c1(SOS1) c2(XP_011531364) c3(son of sevenless homolog 1 isoform X3) c4(327367) c5( ) c6( ) c7(T, apr, yS, ea, if, pf, al, bIl, fd, bB, axk, ci, bv, aE, K, eL, bc, cp, hm, bvR, aW, fc, Az, PQ, brr, g, eF, qJ, cnj, eM, iT, U, Hb, m, dD, Ol, aw, NT, n, aj, fr, qN, md, afR, ft, cc, zw, Nn, gd, eV, dL, bl, ux, Ha, cC, bIP, fe, aq, yq, fq, iO, Sc, hk, Pl, bjK, bD, bli, B, bL, AS, eR, fG, jx, eX, aA, fF, v, yO, q, J, er, eA, aup, nX, afU, aT, cxs, cy, aut, bK, jj, bau, ae, dl, jf, Uf, Sh, Qr, nO, iU, Y, ev, r, aYp, en, aDY, t, nC, iK, pb, bN, ck, rR, nM, QG, c, hc, bt, ao, hS, On, kh, ha, atS, VT, jh, wV, eq, iJ, ad, dP, fU, hd, ib, MS, py, pq, d, ff, eH, eZ, nf, aF, KM, bz, dr, eK, bF, gk, KD, clc, bE, IF, Hs, cP, hE, y); #c1(SOS1) c2(XP_011531367) c3(son of sevenless homolog 1 isoform X7) c4(327368) c5(327369, 327370, 327371, 327372, 327373, 327374) c6( ) c7(T, apr, yS, ea, if, pf, al, bIl, fd, bB, axk, ci, bv, aE, K, eL, bc, cp, hm, bvR, aW, fc, Az, PQ, brr, g, eF, qJ, cnj, eM, iT, U, Hb, m, dD, Ol, aw, NT, n, aj, fr, qN, md, afR, ft, cc, zw, Nn, gd, eV, dL, bl, ux, Ha, cC, bIP, fe, aq, yq, fq, iO, Sc, hk, Pl, bjK, bD, bli, B, bL, AS, eR, fG, jx, eX, aA, fF, v, yO, q, J, er, eA, aup, nX, afU, aT, cxs, cy, aut, bK, jj, bau, ae, dl, jf, Uf, Sh, Qr, nO, iU, Y, ev, r, aYp, en, aDY, t, nC, iK, pb, bN, ck, rR, nM, QG, c, hc, bt, ao, hS, On, kh, ha, atS, VT, jh, wV, eq, iJ, ad, dP, fU, hd, ib, MS, py, pq, d, ff, eH, eZ, nf, aF, KM, bz, dr, eK, bF, gk, KD, clc, bE, IF, Hs, cP, hE, y); #c1(SOS2) c2(NP_008870) c3(son of sevenless homolog 2) c4(169346, 169347) c5(169348, 169349, 169350, 169351, 169352, 169353, 169354, 169355, 169356, 169357, 169358, 169359) c6( ) c7(T, dD, yS, OI, ea, ha, jh, wV, eq, eA, ad, afR, aE, vJ, afU, aT, bK, K, ux, ae, af, cC, d, aW, Y, nf, t, nC, bN, bF, cnj, c, eM, iT, U, IF, y, bt); #c1(SOST) c2(NP_079513) c3(sclerostin precursor) c4(218495) c5(218496, 218497, 218498, 218499, 218500, 218501) c6( ) c7(T, cle, cld, zs, fd, clf, v, zU, sg, ad, zw, bfJ, caw, rv, bA, eH, eF, akb, aSb, dr, D, bi, it); #c1(SOSTDC1) c2(NP_056279) c3(sclerostin domain-containing protein 1 precursor) c4(186907, 186908) c5(186909, 186910, 186911, 186912, 186913, 186914, 186915, 186916, 186917, 186918, 186919, 186920, 186921, 186922, 186923, 186924) c6(186925, 186926, 186927, 186928) c7(es, T, py, iA, aW, aT, dy, ci, fr, er); #c1(SOX1) c2(NP_005977) c3(transcription factor SOX-1) c4(160939) c5(160940, 160941, 160942, 160943, 160944, 160945) c6( ) c7(xC, ft, if, m, qN, t, B, ad); #c1(SOX10) c2(NP_008872) c3(transcription factor SOX-10) c4(169378, 169379, 169380) c5(169381, 169382, 169383, 169384, 169385, 169386, 169387, 169388, 169389, 169390, 169391, 169392, 169393, 169394, 169395, 169396, 169397, 169398, 169399, 169400, 169401, 169402, 169403, 169404) c6( ) c7(cZ, T, atY, agU, amj, ci, bjN, clh, bX, clg, iJ, eA, aR, yn, aJe, aJf, asG, KN, aT, hP, clk, bU, dd, cb, ahE, jf, UL, aW, Y, aek, Ls, ahl, as, aTa, cm, fs, cfO, Hp, ck, bgy, dB, hk, mG, cli, Km, clj, B); #c1(SOX11) c2(NP_003099) c3(transcription factor SOX-11) c4(135300) c5(135301, 135302, 135303, 135304, 135305, 135306, 135307) c6( ) c7(T, gU, fM, oe, jh, aA, fd, n, Ea, cd, eA, zn, x, ft, qK, hn, dL, an, eL, jf, d, kj, aF, as, hf, t, bz, fq, ck, kn, ac, dy, m, k, oQ, bD); #c1(SOX12) c2(NP_008874) c3(transcription factor SOX-12) c4(169417) c5(169418, 169419, 169420, 169421, 169422, 169423, 169424, 169425, 169426, 169427, 169428) c6( ) c7(bB, bE); #c1(SOX13) c2(NP_005677) c3(transcription factor SOX-13) c4(158444, 158445, 158446) c5(158447, 158448, 158449, 158450, 158451, 158452) c6( ) c7(bL, A, yG, cz, aj, J); #c1(SOX13) c2(XP_005245680) c3(transcription factor SOX-13 isoform X1) c4( ) c5(266889, 266890, 266891, 266892, 266893, 266894, 266895, 266896, 266897, 266898, 266899, 266900) c6( ) c7(bL, A, yG, cz, aj, J); #c1(SOX14) c2(NP_004180) c3(transcription factor SOX-14) c4(144135) c5(144136, 144137, 144138, 144139, 144140, 144141) c6( ) c7(anB, Km, hl, arB); #c1(SOX15) c2(NP_008873) c3(protein SOX-15) c4(169405) c5(169406, 169407, 169408, 169409, 169410, 169411, 169412, 169413, 169414, 169415, 169416) c6( ) c7(T, kl, aC, aE, bE, bB, ey); #c1(SOX17) c2(NP_071899) c3(transcription factor SOX-17) c4(212156) c5(212157, 212158, 212159, 212160, 212161, 212162) c6( ) c7(T, wu, ht, aA, bB, q, jz, tT, aT, Vv, wm, hu, Qe, d, aW, r, aF, apx, cm, bz, cll, eM, bE, eD, gX, KY, it, us); #c1(SOX18) c2(NP_060889) c3(transcription factor SOX-18) c4(198417) c5(198418, 198419, 198420, 198421, 198422, 198423, 198424) c6( ) c7(Ck, T, dD, alu, aW, ea, clm, aT, Vv, n, aA, aF, eq, IQ, Pk); #c1(SOX2) c2(NP_003097) c3(transcription factor SOX-2) c4(135186) c5(135187, 135188, 135189, 135190, 135191, 135192, 135193, 135194, 135195, 135196, 135197, 135198, 135199, 135200, 135201, 135202, 135203, 135204, 135205, 135206, 135207, 135208, 135209, 135210, 135211, 135212, 135213, 135214, 135215, 135216, 135217, 135218, 135219, 135220, 135221, 135222, 135223, 135224, 135225, 135226, 135227, 135228, 135229, 135230, 135231, 135232, 135233, 135234, 135235, 135236, 135237, 135238, 135239, 135240, 135241, 135242, 135243, 135244, 135245, 135246, 135247, 135248, 135249, 135250, 135251, 135252, 135253, 135254, 135255, 135256, 135257, 135258, 135259, 135260, 135261, 135262, 135263, 135264, 135265, 135266, 135267, 135268, 135269, 135270, 135271, 135272, 135273, 135274, 135275, 135276, 135277, 135278, 135279, 135280, 135281, 135282, 135283, 135284, 135285, 135286) c6(135287) c7(T, acz, if, fd, bB, ci, beM, aE, hu, hm, Jl, aW, az, g, as, eF, cm, eM, m, avU, gD, wu, ht, n, aj, bBS, qN, Bl, ft, A, kj, AQ, Lh, mo, auC, kn, W, dB, Qu, eD, Be, hR, it, B, dA, eR, aA, v, il, AO, q, J, eA, aT, rO, bq, ahE, ae, jf, s, vT, oV, Y, r, ahl, en, t, KQ, iK, mG, hO, Da, UF, Bd, rA, KY, ha, Gn, ad, dP, av, wm, cnt, d, ff, eH, eZ, aF, iV, bz, Hp, bE, Km, bkh, oQ, iu); #c1(SOX21) c2(NP_009015) c3(transcription factor SOX-21) c4(170252) c5(170253, 170254, 170255, 170256, 170257, 170258, 170259) c6( ) c7(eA, ft, d, dr, pr); #c1(SOX3) c2(NP_005625) c3(transcription factor SOX-3) c4(158054) c5(158055, 158056, 158057, 158058, 158059, 158060, 158061) c6( ) c7(bBJ, gU, clq, acz, mL it, clp, n, adi, v, nA, afz, cd, acX, ahy, ft, mh, RN, tT, xW, vH, EL, an, af, jf, aeT, avP, cln, OX, Rj, nf, Pd, dr, EJ, clo); #c1(SOX4) c2(NP_003098) c3(transcription factor SOX-4) c4(135288) c5(135289, 135290, 135291, 135292, 135293, 135294, 135295, 135296, 135297, 135298, 135299) c6( ) c7(T, dA, jp, aA, n, kM, q, ad, eA, iC, av, x, ft, aE, qK, aT, dL, K, ae, eL, cp, bA, jf, d, je, aW, Y, r, kp, aF, g, cl, cM, bz, ck, iM, kP, Dy, eM, dB, bE, iT, hL, k, bD, ht, B); #c1(SOX5) c2(NP_001248343) c3(transcription factor SOX-5 isoform d) c4(93731) c5(93732, 93733, 93734, 93735, 93736, 93737, 93738, 93739, 93740, 93741) c6( ) c7(ae, iQ, VX, ND, pN, mr, wu, wL, Kr, vH, amj, at, eA, wm, pt, fq, pb, ad); #c1(SOX5) c2(NP_008871) c3(transcription factor SOX-5 isoform a) c4(169360) c5(169361, 169362, 169363, 169364, 169365, 169366, 169367, 169368, 169369, 169370, 169371, 169372, 169373, 169374, 169375, 169376, 169377) c6( ) c7(ae, iQ, VX, ND, pN, mr, wu, wL, Kr, vH, amj, at, eA, wm, pt, fq, pb, ad); #c1(SOX5) c2(NP_694534) c3(transcription factor SOX-5 isoform b) c4(245086) c5( ) c6( ) c7(ae, iQ, VX, ND, pN, mr, wu, wL, Kr, vH, amj, at, eA, wm, pt, fq, pb, ad); #c1(SOX5) c2(NP_821078) c3(transcription factor SOX-5 isoform c) c4( ) c5(253208, 253209, 253210, 253211, 253212, 253213) c6( ) c7(ae, iQ, VX, ND, pN, mr, wu, wL, Kr, vH, amj, at, eA, wm, pt, fq, pb, ad); #c1(SOX5) c2(XP_011519141) c3(transcription factor SOX-5 isoform X7) c4(313733, 313734) c5(313735, 313736, 313737, 313738, 313739, 313740) c6( ) c7(ae, iQ, VX, ND, pN, mr, wu, wL, Kr, vH, amj, at, eA, wm, pt, fq, pb, ad); #c1(SOX6) c2(NP_001139283) c3(transcription factor SOX-6 isoform 3) c4(59112, 59113, 59114) c5(59115, 59116, 59117, 59118, 59119, 59120, 59121, 59122, 59123, 59124, 59125, 59126, 59127, 59128, 59129) c6( ) c7(mj, dY, aw, ht, v, eA, hu, it, B, zV, bA); #c1(SOX6) c2(NP_001139291) c3(transcription factor SOX-6 isoform 4) c4(59137) c5(59138, 59139, 59140, 59141, 59142, 59143, 59144, 59145, 59146, 59147, 59148) c6( ) c7(mj, dY, aw, ht, v, eA, hu, it, B, zV, bA); #c1(SOX6) c2(NP_059978) c3(transcription factor SOX-6 isoform 1) c4(193436, 193437) c5(193438, 193439, 193440, 193441, 193442, 193443, 193444, 193445, 193446, 193447, 193448, 193449, 193450, 193451) c6( ) c7(mj, dY, aw, ht, v, eA, hu, it, B, zV, bA); #c1(SOX6) c2(NP_201583) c3(transcription factor SOX-6 isoform 2) c4(228287) c5(228288, 228289, 228290, 228291, 228292, 228293, 228294, 228295, 228296, 228297) c6( ) c7(mj, dY, aw, ht, v, eA, hu, it, B, zV, bA); #c1(SOX7) c2(NP_113627) c3(transcription factor SOX-7) c4(221792, 221793) c5(221794, 221795, 221796, 221797, 221798, 221799, 221800, 221801, 221802, 221803, 221804, 221805, 221806, 221807, 221808, 221809) c6( ) c7(md, T, eM, aW, wk, hL, aT, r, n, aA, aF, q, g, cl, bD, bz, B, ad); #c1(SOX8) c2(NP_055402) c3(transcription factor SOX-8) c4(180844) c5(180845, 180846, 180847, 180848, 180849, 180850) c6( ) c7(WH, kj, pr, fd, bX, V, aMi); #c1(SOX9) c2(NP_000337) c3(transcription factor SOX-9) c4(7383, 7384) c5(7385, 7386, 7387, 7388, 7389, 7390, 7391, 7392, 7393, 7394, 7395, 7396, 7397) c6( ) c7(bM, T, aC, pf, clt, bB, ci, bjN, aR, Na, aE, aeO, Eo, PI, cls, hu, eL, UL, zQ, aeR, bgA, aGb, aW, aeC, pr, Az, nY, g, eM, BP, apy, m, Le, ht, n, aj, uE, zP, cd, FN, bff, UD, dL, jy, aMi, Pp, kp, acD, dB, hk, aNd, In, bD, aA, aNe, q, eA, aeZ, afQ, aT, clk, jj, ae, jf, s, Y, aek, r, en, cl, t, ck, cgp, Kg, kh, clr, acl, axd, adW, ad, iC, vJ, hP, IQ, aeT, d, VX, ff, cr, aF, aiz, bz, dr, Ew, bE, X, kS, iu); #c1(SP1) c2(NP_612482) c3(transcription factor Sp1 isoform a) c4(236621) c5(236622, 236623, 236624, 236625, 236626, 236627, 236628) c6( ) c7(bM, T, dD, fR, ea, if, aw, ha, fd, aA, Ij, cz, hy, dG, bB, ci, eq, qN, IR, akG, q, ad, eA, hX, eW, bv, Hx, gJ, av, aE, ec, iu, aT, ab, cy, hD, dL, jy, K, h, vx, ae, af, cp, bA, d, BN, B, s, Jl, aW, Y, aiV, nO, fc, eZ, r, ff, aq, aF, en, t, bz, pb, bN, eK, ck, bP, eM, nB, bE, hk, VA, X, wB, uz, np, k, m, cP, nz, it, ne, ao, cn); #c1(SP1) c2(XP_011536998) c3(transcription factor Sp1 isoform X1) c4(334744) c5(334745, 334746, 334747, 334748, 334749, 334750) c6( ) c7(bM, T, dD, fR, ea, if, aw, ha, fd, aA, Ij, cz, hy, dG, bB, ci, eq, qN, IR, akG, q, ad, eA, hX, eW, bv, Hx, gJ, av, aE, ec, iu, aT, ab, cy, hD, dL, jy, K, h, vx, ae, af, cp, bA, d, BN, B, s, Jl, aW, Y, aiV, nO, fc, eZ, r, ff, aq, aF, en, t, bz, pb, bN, eK, ck, bP, eM, nB, bE, hk, VA, X, wB, uz, np, k, m, cP, nz, it, ne, ao, cn); #c1(SP100) c2(NP_001073860) c3(nuclear autoantigen Sp-100 isoform 1) c4(36138, 36139) c5(36140, 36141, 36142, 36143, 36144, 36145, 36146, 36147, 36148, 36149, 36150, 36151, 36152) c6( ) c7(ck, eW, T, pi, d, cF, dB, cj, Io, eA, jj, kS, be, ip); #c1(SP100) c2(NP_001193630) c3(nuclear autoantigen Sp-100 isoform 3) c4(82379) c5(82380, 82381, 82382, 82383, 82384, 82385) c6( ) c7(ck, eW, T, pi, d, cF, dB, cj, Io, eA, jj, kS, be, ip); #c1(SP100) c2(NP_001193631) c3(nuclear autoantigen Sp-100 isoform 4) c4( ) c5(82386, 82387, 82388, 82389, 82390, 82391, 82392, 82393, 82394, 82395, 82396, 82397) c6( ) c7(ck, eW, T, pi, d, cF, dB, cj, Io, eA, jj, kS, be, ip); #c1(SP100) c2(NP_001193632) c3(nuclear autoantigen Sp-100 isoform 5) c4(82398) c5(82399, 82400, 82401, 82402, 82403, 82404) c6( ) c7(ck, eW, T, pi, d, cF, dB, cj, Io, eA, jj, kS, be, ip); #c1(SP100) c2(NP_001193633) c3(nuclear autoantigen Sp-100 isoform 6) c4(82405) c5(82406, 82407, 82408, 82409, 82410, 82411) c6( ) c7(ck, eW, T, pi, d, cF, dB, cj, Io, eA, jj, kS, be, ip); #c1(SP100) c2(NP_003104) c3(nuclear autoantigen Sp-100 isoform 2) c4(135353, 135354, 135355) c5(135356, 135357, 135358, 135359, 135360, 135361, 135362) c6( ) c7(ck, eW, T, pi, d, cF, dB, cj, Io, eA, jj, kS, be, ip); #c1(SP110) c2(NP_001171944) c3(sp110 nuclear body protein isoform d) c4(72067, 72068, 72069, 72070, 72071) c5(72072, 72073, 72074, 72075, 72076, 72077, 72078, 72079, 72080, 72081, 72082, 72083, 72084, 72085, 72086, 72087, 72088, 72089, 72090, 72091, 72092, 72093, 72094, 72095, 72096, 72097) c6( ) c7(dA, fR, ig, oV, jx, cj, csx, aCK, LH); #c1(SP110) c2(NP_004501) c3(sp110 nuclear body protein isoform b) c4( ) c5(146966, 146967, 146968, 146969, 146970, 146971, 146972, 146973, 146974, 146975) c6( ) c7(dA, fR, ig, oV, jx, cj, csx, aCK, LH); #c1(SP110) c2(XP_005246582) c3(sp110 nuclear body protein isoform X3) c4(267244) c5(267245, 267246, 267247, 267248, 267249, 267250) c6( ) c7(dA, fR, ig, oV, jx, cj, csx, aCK, LH); #c1(SP110) c2(XP_006712550) c3(sp110 nuclear body protein isoform X4) c4(286721) c5(286722, 286723, 286724, 286725, 286726, 286727) c6( ) c7(dA, fR, ig, oV, jx, cj, csx, aCK, LH); #c1(SP110) c2(XP_006712552) c3(sp110 nuclear body protein isoform X7) c4(286728) c5( ) c6( ) c7(dA, fR, ig, oV, jx, cj, csx, aCK, LH); #c1(SP140) c2(NP_001005176) c3(nuclear body protein SP140 isoform 2) c4(21106) c5(21107, 21108, 21109, 21110, 21111, 21112) c6( ) c7(fR, cj, Io, jj, If, V, bc); #c1(SP140) c2(NP_001265380) c3(nuclear body protein SP140 isoform 3) c4(98399) c5(98400, 98401, 98402, 98403, 98404, 98405) c6( ) c7(fR, cj, Io, jj, If, V, bc); #c1(SP140) c2(NP_001265382) c3(nuclear body protein SP140 isoform 5) c4(98406) c5(98407, 98408, 98409, 98410, 98411, 98412) c6( ) c7(fR, cj, Io, jj, If, V, bc); #c1(SP140) c2(NP_009168) c3(nuclear body protein SP140 isoform 1) c4(171235) c5(171236, 171237, 171238, 171239, 171240, 171241) c6( ) c7(fR, cj, Io, jj, If, V, bc); #c1(SP140) c2(XP_005246311) c3(nuclear body protein SP140 isoform X9) c4(267037) c5(267038, 267039, 267040, 267041, 267042, 267043) c6( ) c7(fR, cj, Io, jj, If, V, bc); #c1(SP140) c2(XP_011508823) c3(nuclear body protein SP140 isoform X12) c4(299404) c5(299405, 299406, 299407, 299408, 299409, 299410) c6( ) c7(fR, cj, Io, jj, If, V, bc); #c1(SP140) c2(XP_011508825) c3(nuclear body protein SP140 isoform X14) c4(299411) c5(299412, 299413, 299414, 299415, 299416, 299417) c6( ) c7(fR, cj, Io, jj, If, V, bc); #c1(SP2) c2(NP_003101) c3(transcription factor SP2) c4(135308) c5(135309, 135310, 135311, 135312, 135313, 135314, 135315, 135316) c6( ) c7(ff, jE, en); #c1(SP2) c2(XP_011523442) c3(transcription factor Sp2 isoform X5) c4(317971) c5( ) c6( ) c7(ff, jE, en); #c1(SP2) c2(XP_011523446) c3(transcription factor SP2 isoform X8) c4( ) c5(317972, 317973, 317974, 317975, 317976) c6( ) c7(ff, jE, en); #c1(SP3) c2(NP_001017371) c3(transcription factor Sp3 isoform 2) c4( ) c5(26368, 26369, 26370, 26371, 26372) c6( ) c7(bv, gJ, hW, aw, at, gl, dL, dy, eA, V, B); #c1(SP3) c2(NP_001166183) c3(transcription factor Sp3 isoform 3) c4(68469, 68470) c5( ) c6( ) c7(bv, gJ, hW, aw, at, gl, dL, dy, eA, V, B); #c1(SP3) c2(NP_003102) c3(transcription factor Sp3 isoform 1) c4(135317, 135318) c5(135319, 135320, 135321, 135322, 135323, 135324, 135325, 135326, 135327, 135328, 135329, 135330, 135331, 135332, 135333, 135334, 135335, 135336, 135337, 135338, 135339, 135340, 135341, 135342, 135343) c6( ) c7(bv, gJ, hW, aw, at, gl, dL, dy, eA, V, B); #c1(SP4) c2(NP_003103) c3(transcription factor Sp4) c4(135344) c5(135345, 135346, 135347, 135348, 135349, 135350, 135351, 135352) c6( ) c7(T, hd, ac, nB, bE, WY, cz, bB, gl, dL, bK, he, Cb, X, clu); #c1(SP4) c2(XP_011513790) c3(transcription factor Sp4 isoform X5) c4(306256) c5( ) c6( ) c7(T, hd, ac, nB, bE, WY, cz, bB, gl, dL, bK, he, Cb, X, clu); #c1(SP4) c2(XP_011513791) c3(transcription factor Sp4 isoform X6) c4( ) c5(306257, 306258, 306259, 306260, 306261, 306262) c6( ) c7(T, hd, ac, nB, bE, WY, cz, bB, gl, dL, bK, he, Cb, X, clu); #c1(SP5) c2(NP_001003845) c3(transcription factor Sp5) c4(20234) c5(20235, 20236, 20237, 20238, 20239, 20240) c6( ) c7(ad); #c1(SP6) c2(NP_954871) c3(transcription factor Sp6) c4(261474) c5(261475, 261476, 261477, 261478, 261479, 261480, 261481, 261482, 261483, 261484) c6( ) c7(bL, dq, sS); #c1(SP7) c2(NP_690599) c3(transcription factor Sp7 isoform a) c4(244896, 244897) c5(244898, 244899, 244900, 244901, 244902, 244903, 244904, 244905, 244906, 244907, 244908, 244909) c6( ) c7(D, zw, buz, zt, eH, eF); #c1(SP7) c2(XP_011536203) c3(transcription factor Sp7 isoform X1) c4( ) c5(333493, 333494, 333495, 333496, 333497) c6( ) c7(D, zw, buz, zt, eH, eF); #c1(SP8) c2(NP_874359) c3(transcription factor Sp8 isoform 1) c4(256612, 256613, 256614) c5(256615, 256616, 256617, 256618, 256619, 256620, 256621) c6( ) c7(gl, T, bK); #c1(SP8) c2(XP_011513478) c3(transcription factor Sp8 isoform X1) c4( ) c5(305766, 305767, 305768, 305769, 305770, 305771, 305772, 305773, 305774, 305775, 305776) c6( ) c7(gl, T, bK); #c1(SPA17) c2(XP_011541172) c3(sperm surface protein SP17 isoform X1) c4(339768) c5(339769, 339770, 339771, 339772, 339773, 339774, 339775, 339776, 339777, 339778) c6( ) c7(T, eM, if, ff, ht, hL, fd, m, hu, bu, en, t, qN, g, y, cl); #c1(SPACA1) c2(NP_112222) c3(sperm acrosome membrane-associated protein 1 precursor) c4(220950) c5(220951, 220952, 220953, 220954, 220955, 220956) c6( ) c7(FE); #c1(SPACA3) c2(NP_776246) c3(sperm acrosome membrane-associated protein 3) c4(251023, 251024, 251025) c5(251026, 251027, 251028, 251029, 251030, 251031, 251032, 251033, 251034, 251035, 251036, 251037) c6( ) c7(T, bu); #c1(SPAG1) c2(NP_757367) c3(sperm-associated antigen 1) c4(248736) c5(248737, 248738, 248739, 248740, 248741, 248742, 248743, 248744, 248745, 248746) c6( ) c7(T, bVm, aE, Pf, clv, eJ, MG); #c1(SPAG11A) c2(NP_001075021) c3(sperm-associated antigen 11A precursor) c4(37176) c5(37177, 37178, 37179, 37180, 37181, 37182, 37183, 37184) c6(37185, 37186) c7(ae, T, kT, bM, y, c, pf, wB, aA, aF, j, t, bau, af, ad, El); #c1(SPAG11A) c2(XP_005272448) c3(sperm-associated antigen 11A isoform X1) c4(284029, 284030, 284031) c5(284032) c6( ) c7(ae, T, kT, bM, y, c, pf, wB, aA, aF, j, t, bau, af, ad, El); #c1(SPAG11A) c2(XP_005272449) c3(sperm-associated antigen 11A isoform X2) c4(284033, 284034, 284035, 284036, 284037) c5(284038) c6( ) c7(ae, T, kT, bM, y, c, pf, wB, aA, aF, j, t, bau, af, ad, El); #c1(SPAG11A) c2(XP_005272450) c3(sperm-associated antigen 11A isoform X3) c4(284039, 284040, 284041) c5(284042, 284043, 284044, 284045, 284046, 284047, 284048, 284049, 284050) c6(284051, 284052) c7(ae, T, kT, bM, y, c, pf, wB, aA, aF, j, t, bau, af, ad, El); #c1(SPAG11B) c2(NP_057596) c3(sperm-associated antigen 11B isoform A preproprotein) c4(191537) c5(191538, 191539, 191540, 191541, 191542, 191543, 191544) c6(191545, 191546) c7(ae, T, kT, bM, y, c, pf, wB, aA, aF, j, t, bau, af, ad, El); #c1(SPAG11B) c2(NP_478107) c3(sperm-associated antigen 11B isoform G preproprotein) c4(230901) c5(230902, 230903, 230904, 230905, 230906, 230907, 230908, 230909) c6(230910, 230911) c7(ae, T, kT, bM, y, c, pf, wB, aA, aF, j, t, bau, af, ad, El); #c1(SPAG11B) c2(NP_478108) c3(sperm-associated antigen 11B isoform D preproprotein) c4(230912, 230913, 230914, 230915, 230916, 230917) c5(230918, 230919, 230920, 230921, 230922, 230923, 230924) c6(230925, 230926) c7(ae, T, kT, bM, y, c, pf, wB, aA, aF, j, t, bau, af, ad, El); #c1(SPAG11B) c2(NP_478109) c3(sperm-associated antigen 11B isoform H preproprotein) c4(230927) c5(230928, 230929, 230930, 230931, 230932, 230933, 230934) c6(230935) c7(ae, T, kT, bM, y, c, pf, wB, aA, aF, j, t, bau, af, ad, El); #c1(SPAG11B) c2(NP_478110) c3(sperm-associated antigen 11B isoform C preproprotein) c4(230936) c5(230937, 230938, 230939, 230940, 230941, 230942, 230943) c6(230944, 230945) c7(ae, T, kT, bM, y, c, pf, wB, aA, aF, j, t, bau, af, ad, El); #c1(SPAG11B) c2(NP_478113) c3(sperm-associated antigen 11B isoform B precursor) c4(230946, 230947) c5(230948, 230949, 230950, 230951, 230952, 230953) c6(230954) c7(ae, T, kT, bM, y, c, pf, wB, aA, aF, j, t, bau, af, ad, El); #c1(SPAG11B) c2(NP_478114) c3(sperm-associated antigen 11B isoform E precursor) c4(230955) c5(230956, 230957, 230958, 230959, 230960, 230961, 230962, 230963) c6(230964) c7(ae, T, kT, bM, y, c, pf, wB, aA, aF, j, t, bau, af, ad, El); #c1(SPAG16) c2(NP_001020607) c3(sperm-associated antigen 16 protein isoform 2) c4(28969) c5(28970, 28971, 28972, 28973, 28974, 28975) c6( ) c7(ac, aw, aFE, EQ, at, sj); #c1(SPAG16) c2(NP_078808) c3(sperm-associated antigen 16 protein isoform 1) c4(215567) c5(215568, 215569, 215570, 215571, 215572, 215573) c6( ) c7(ac, aw, aFE, EQ, at, sj); #c1(SPAG16) c2(XP_011510116) c3(sperm-associated antigen 16 protein isoform X1) c4(300712) c5(300713, 300714, 300715, 300716, 300717, 300718) c6( ) c7(ac, aw, aFE, EQ, at, sj); #c1(SPAG16) c2(XP_011510122) c3(sperm-associated antigen 16 protein isoform X7) c4(300719) c5(300720, 300721, 300722, 300723, 300724, 300725) c6( ) c7(ac, aw, aFE, EQ, at, sj); #c1(SPAG16) c2(XP_011510123) c3(sperm-associated antigen 16 protein isoform X8) c4(300726) c5(300727, 300728, 300729, 300730, 300731, 300732) c6( ) c7(ac, aw, aFE, EQ, at, sj); #c1(SPAG16) c2(XP_011510129) c3(sperm-associated antigen 16 protein isoform X13) c4(300733) c5(300734, 300735, 300736, 300737, 300738, 300739) c6( ) c7(ac, aw, aFE, EQ, at, sj); #c1(SPAG4) c2(NP_003107) c3(sperm-associated antigen 4 protein) c4(135376) c5(135377, 135378, 135379, 135380, 135381, 135382) c6( ) c7(es, T, fr, py); #c1(SPAG5) c2(NP_006452) c3(sperm-associated antigen 5) c4(165333, 165334) c5(165335, 165336, 165337, 165338, 165339, 165340, 165341, 165342, 165343, 165344, 165345, 165346) c6( ) c7(if, kP, qN, aT); #c1(SPAG6) c2(NP_001240783) c3(sperm-associated antigen 6 isoform 3) c4(88808) c5(88809, 88810, 88811, 88812, 88813, 88814, 88815, 88816, 88817, 88818, 88819, 88820) c6( ) c7(aW, aw, dV, aT); #c1(SPAG6) c2(NP_036575) c3(sperm-associated antigen 6 isoform 1) c4(174456, 174457, 174458) c5(174459, 174460, 174461, 174462, 174463, 174464, 174465, 174466, 174467, 174468, 174469, 174470) c6( ) c7(aW, aw, dV, aT); #c1(SPAG6) c2(NP_758442) c3(sperm-associated antigen 6 isoform 2) c4(249167, 249168) c5(249169, 249170, 249171, 249172, 249173, 249174) c6( ) c7(aW, aw, dV, aT); #c1(SPAG6) c2(XP_005252702) c3(sperm-associated antigen 6 isoform X1) c4(272019) c5( ) c6( ) c7(aW, aw, dV, aT); #c1(SPAG6) c2(XP_005252703) c3(sperm-associated antigen 6 isoform X2) c4( ) c5(272020, 272021, 272022, 272023, 272024, 272025, 272026, 272027, 272028, 272029, 272030, 272031) c6( ) c7(aW, aw, dV, aT); #c1(SPAG7) c2(NP_004881) c3(sperm-associated antigen 7) c4(150523) c5(150524, 150525, 150526, 150527, 150528, 150529) c6( ) c7(NY); #c1(SPAG8) c2(NP_001034681) c3(sperm-associated antigen 8 isoform 1) c4(32083, 32084) c5( ) c6( ) c7(bb, c, om, dq, v, K, GK); #c1(SPAG8) c2(NP_758516) c3(sperm-associated antigen 8 isoform 2) c4(249239) c5(249240, 249241, 249242, 249243, 249244, 249245) c6( ) c7(bb, c, om, dq, v, K, GK); #c1(SPAG8) c2(XP_005251493) c3(sperm-associated antigen 8 isoform X1) c4( ) c5(270949, 270950, 270951, 270952, 270953, 270954, 270955, 270956, 270957, 270958, 270959, 270960) c6( ) c7(bb, c, om, dq, v, K, GK); #c1(SPAG8) c2(XP_011516146) c3(sperm-associated antigen 8 isoform X4) c4( ) c5(309369, 309370, 309371, 309372, 309373) c6( ) c7(bb, c, om, dq, v, K, GK); #c1(SPAG9) c2(NP_001123999) c3(C-Jun-amino-terminal kinase-interacting protein 4 isoform 2) c4(48228, 48229) c5(48230, 48231, 48232, 48233, 48234, 48235, 48236, 48237, 48238, 48239, 48240, 48241) c6( ) c7(T, id, AS, if, bB, fr, Ea, qN, q, ad, XX, Vp, hd, aT, dL, AN, ae, eL, iU, aW, ff, r, en, bu, as, bz, pb, es, kP, eM, nB, bE, iA, m, B); #c1(SPAG9) c2(NP_001124000) c3(C-Jun-amino-terminal kinase-interacting protein 4 isoform 1) c4(48242, 48243, 48244) c5(48245, 48246, 48247, 48248, 48249, 48250, 48251, 48252, 48253, 48254, 48255, 48256, 48257, 48258, 48259, 48260, 48261, 48262, 48263, 48264, 48265, 48266, 48267, 48268) c6( ) c7(T, id, AS, if, bB, fr, Ea, qN, q, ad, XX, Vp, hd, aT, dL, AN, ae, eL, iU, aW, ff, r, en, bu, as, bz, pb, es, kP, eM, nB, bE, iA, m, B); #c1(SPAG9) c2(NP_001238900) c3(C-Jun-amino-terminal kinase-interacting protein 4 isoform 4) c4(88040) c5(88041, 88042, 88043, 88044, 88045, 88046) c6( ) c7(T, id, AS, if, bB, fr, Ea, qN, q, ad, XX, Vp, hd, aT, dL, AN, ae, eL, iU, aW, ff, r, en, bu, as, bz, pb, es, kP, eM, nB, bE, iA, m, B); #c1(SPAG9) c2(NP_003962) c3(C-Jun-amino-terminal kinase-interacting protein 4 isoform 3) c4(142486) c5(142487, 142488, 142489, 142490, 142491, 142492) c6( ) c7(T, id, AS, if, bB, fr, Ea, qN, q, ad, XX, Vp, hd, aT, dL, AN, ae, eL, iU, aW, ff, r, en, bu, as, bz, pb, es, kP, eM, nB, bE, iA, m, B); #c1(SPAG9) c2(XP_005257825) c3(C-Jun-amino-terminal kinase-interacting protein 4 isoform X2) c4(275371) c5( ) c6( ) c7(T, id, AS, if, bB, fr, Ea, qN, q, ad, XX, Vp, hd, aT, dL, AN, ae, eL, iU, aW, ff, r, en, bu, as, bz, pb, es, kP, eM, nB, bE, iA, m, B); #c1(SPAG9) c2(XP_005257826) c3(C-Jun-amino-terminal kinase-interacting protein 4 isoform X3) c4(275372) c5( ) c6( ) c7(T, id, AS, if, bB, fr, Ea, qN, q, ad, XX, Vp, hd, aT, dL, AN, ae, eL, iU, aW, ff, r, en, bu, as, bz, pb, es, kP, eM, nB, bE, iA, m, B); #c1(SPAG9) c2(XP_005257831) c3(C-Jun-amino-terminal kinase-interacting protein 4 isoform X9) c4( ) c5(275373, 275374, 275375, 275376, 275377, 275378) c6( ) c7(T, id, AS, if, bB, fr, Ea, qN, q, ad, XX, Vp, hd, aT, dL, AN, ae, eL, iU, aW, ff, r, en, bu, as, bz, pb, es, kP, eM, nB, bE, iA, m, B); #c1(SPAM1) c2(XP_011514825) c3(hyaluronidase PH-20 isoform X1) c4(307511) c5(307512, 307513, 307514, 307515, 307516, 307517, 307518, 307519) c6(307520, 307521) c7(T, ft, aW, eL, go, ff, hL, aT, n, dL, ci, m, en, t, iK, ae, ad, cl); #c1(SPAM1) c2(XP_011514826) c3(hyaluronidase PH-20 isoform X2) c4(307522, 307523) c5( ) c6( ) c7(T, ft, aW, eL, go, ff, hL, aT, n, dL, ci, m, en, t, iK, ae, ad, cl); #c1(SPAM1) c2(XP_011514827) c3(hyaluronidase PH-20 isoform X3) c4( ) c5(307524, 307525, 307526, 307527, 307528, 307529, 307530, 307531, 307532, 307533, 307534, 307535, 307536, 307537, 307538, 307539, 307540, 307541, 307542, 307543, 307544, 307545, 307546, 307547, 307548, 307549) c6(307550, 307551, 307552, 307553, 307554, 307555, 307556, 307557) c7(T, ft, aW, eL, go, ff, hL, aT, n, dL, ci, m, en, t, iK, ae, ad, cl); #c1(SPAM1) c2(XP_011514828) c3(hyaluronidase PH-20 isoform X4) c4( ) c5(307558, 307559, 307560, 307561, 307562, 307563, 307564) c6(307565) c7(T, ft, aW, eL, go, ff, hL, aT, n, dL, ci, m, en, t, iK, ae, ad, cl); #c1(SPANXA2) c2(NP_663695) c3(sperm protein associated with the nucleus on the X chromosome A) c4(241421, 241422) c5(241423, 241424, 241425, 241426, 241427, 241428, 241429, 241430, 241431, 241432, 241433, 241434, 241435, 241436, 241437) c6( ) c7(BI, T, gU, ND, vT, wu, iU, Y, eD, r, cj, vH, fd, wm, bu, t, bt, ae, q, ad); #c1(SPANXB1) c2(NP_115850) c3(sperm protein associated with the nucleus on the X chromosome B/F) c4(224259) c5(224260, 224261, 224262, 224263, 224264, 224265) c6( ) c7(gU, ND, Y, vH, ae, ad); #c1(SPANXD) c2(NP_115793) c3(sperm protein associated with the nucleus on the X chromosome D) c4(223918) c5(223919, 223920, 223921, 223922, 223923, 223924, 223925, 223926, 223927, 223928) c6( ) c7(vH, ae, gU, ad, ND); #c1(SPANXN4) c2(NP_001009613) c3(sperm protein associated with the nucleus on the X chromosome N4) c4(23680) c5(23681, 23682, 23683, 23684, 23685, 23686) c6( ) c7(oe, fq); #c1(SPARC) c2(NP_003109) c3(SPARC precursor) c4(135383, 135384) c5(135385, 135386, 135387, 135388, 135389, 135390, 135391, 135392, 135393, 135394, 135395, 135396, 135397, 135398, 135399, 135400, 135401, 135402) c6( ) c7(T, aC, Js, pf, ea, if, al, fd, bB, IR, ci, cab, ip, xE, aE, ari, iv, Ou, K, apj, eL, cp, xQ, dH, Jl, aW, hl, g, as, eF, ir, uC, cm, bw, eM, iA, vy, m, cE, Vj, dD, zX, zt, aw, n, aj, fr, qN, zw, aOu, dL, pj, uc, clw, dx, mR, MD, Xg, fQ, kp, dw, dB, anC, uw, mg, hL, pg, sa, it, B, Jo, bL, dA, cHB, dK, fG, aA, cz, wo, v, j, AO, q, J, eA, yg, aT, dz, zp, ae, af, bA, aAi, jf, iF, iU, Y, la, r, lo, cl, t, Vq, pb, ov, vK, acW, pZ, DW, gX, dy, bt, sY, aZ, eq, ad, qC, bRP, av, jo, uX, d, IR, et, eH, aF, bz, LB, es, D, bE, aFb, y, aUg, X); #c1(SPARCL1) c2(NP_001121782) c3(SPARC-like protein 1 isoform 1 precursor) c4(46151, 46152, 46153, 46154, 46155, 46156, 46157, 46158) c5(46159, 46160, 46161, 46162, 46163, 46164, 46165, 46166, 46167, 46168, 46169, 46170, 46171, 46172, 46173, 46174, 46175, 46176, 46177, 46178, 46179, 46180, 46181, 46182, 46183, 46184, 46185, 46186, 46187, 46188, 46189, 46190, 46191, 46192, 46193, 46194, 46195, 46196, 46197, 46198, 46199, 46200, 46201, 46202, 46203, 46204, 46205, 46206, 46207, 46208, 46209, 46210, 46211, 46212, 46213, 46214, 46215, 46216, 46217, 46218, 46219, 46220, 46221, 46222, 46223, 46224, 46225, 46226, 46227, 46228, 46229, 46230, 46231, 46232) c6(46233, 46234, 46235, 46236, 46237, 46238, 46239, 46240, 46241, 46242, 46243, 46244, 46245, 46246, 46247, 46248, 46249, 46250) c7(T, aC, ha, aA, bB, ci, V, eA, ad, hX, dP, av, aE, ae, r, kp, aF, t, eM, bE, m, B); #c1(SPAST) c2(NP_055761) c3(spastin isoform 1) c4(183329) c5(183330, 183331, 183332, 183333, 183334, 183335) c6( ) c7(cjZ, aiZ, aiY, Ol, amp, ha, cly, rf, aeu, uu, nA, bX, il, V, aR, Ks, LN, no, aV, lu, hb, af, axW, bMm, LO, ajb, TQ, gl, bQ, dr, Qn, clx, ky, c, bhD, Iq, U, cB); #c1(SPAST) c2(NP_955468) c3(spastin isoform 2) c4(261807) c5(261808, 261809, 261810, 261811, 261812, 261813) c6( ) c7(cjZ, aiZ, aiY, Ol, amp, ha, cly, rf, aeu, uu, nA, bX, il, V, aR, Ks, LN, no, aV, lu, hb, af, axW, bMm, LO, ajb, TQ, gl, bQ, dr, Qn, clx, ky, c, bhD, Iq, U, cB); #c1(SPAST) c2(XP_011531369) c3(spastin isoform X2) c4( ) c5(327375) c6( ) c7(cjZ, aiZ, aiY, Ol, amp, ha, cly, rf, aeu, uu, nA, bX, il, V, aR, Ks, LN, no, aV, lu, hb, af, axW, bMm, LO, ajb, TQ, gl, bQ, dr, Qn, clx, ky, c, bhD, Iq, U, cB); #c1(SPATA13) c2(NP_001159743) c3(spermatogenesis-associated protein 13 isoform 1) c4(64663, 64664) c5( ) c6( ) c7(bF, eu, ac, s); #c1(SPATA13) c2(NP_001273721) c3(spermatogenesis-associated protein 13 isoform 3) c4(105709, 105710) c5(105711, 105712, 105713, 105714, 105715, 105716, 105717, 105718, 105719, 105720, 105721, 105722, 105723) c6( ) c7(bF, eu, ac, s); #c1(SPATA13) c2(NP_001273723) c3(spermatogenesis-associated protein 13 isoform 5) c4(105724) c5(105725, 105726, 105727, 105728, 105729, 105730) c6( ) c7(bF, eu, ac, s); #c1(SPATA13) c2(NP_694568) c3(spermatogenesis-associated protein 13 isoform 2) c4( ) c5(245291, 245292, 245293, 245294, 245295, 245296, 245297, 245298, 245299, 245300, 245301) c6( ) c7(bF, eu, ac, s); #c1(SPATA16) c2(NP_114161) c3(spermatogenesis-associated protein 16) c4(222468) c5(222469, 222470, 222471, 222472, 222473, 222474) c6( ) c7(bEw, gU, ad); #c1(SPATA17) c2(XP_005273109) c3(spermatogenesis-associated protein 17 isoform X1) c4(284298) c5(284299, 284300, 284301, 284302, 284303, 284304) c6( ) c7(vH, iX, gU); #c1(SPATA18) c2(NP_660306) c3(mitochondria-eating protein isoform 1) c4(240853) c5(240854, 240855, 240856, 240857, 240858, 240859) c6( ) c7(km); #c1(SPATA18) c2(XP_005265775) c3(mitochondria-eating protein isoform X6) c4( ) c5(279717) c6( ) c7(km); #c1(SPATA18) c2(XP_011532671) c3(mitochondria-eating protein isoform X1) c4( ) c5(328721) c6( ) c7(km); #c1(SPATA19) c2(NP_001278921) c3(spermatogenesis-associated protein 19, mitochondrial precursor) c4(110998) c5(110999, 111000, 111001, 111002, 111003, 111004, 111005, 111006, 111007, 111008) c6( ) c7(ae, T, sS, ad); #c1(SPATA2) c2(NP_001129245) c3(spermatogenesis-associated protein 2) c4(51319, 51320) c5(51321, 51322, 51323, 51324, 51325, 51326, 51327, 51328, 51329, 51330, 51331, 51332, 51333, 51334, 51335, 51336) c6( ) c7(T, A, iM, qZ, je, aW, Y, jx, cr, aT, uo, kH, Io, h, eZ, y, hv); #c1(SPATA20) c2(NP_001245301) c3(spermatogenesis-associated protein 20 isoform 2 precursor) c4(93035, 93036, 93037, 93038) c5(93039, 93040, 93041, 93042, 93043, 93044) c6( ) c7(jz); #c1(SPATA20) c2(NP_001245302) c3(spermatogenesis-associated protein 20 isoform 3) c4( ) c5(93045, 93046, 93047, 93048, 93049) c6( ) c7(jz); #c1(SPATA20) c2(NP_073738) c3(spermatogenesis-associated protein 20 isoform 1 precursor) c4(213343) c5(213344, 213345, 213346, 213347, 213348, 213349, 213350, 213351, 213352, 213353, 213354, 213355, 213356, 213357, 213358, 213359) c6( ) c7(jz); #c1(SPATA21) c2(XP_011539714) c3(spermatogenesis-associated protein 21 isoform X1) c4( ) c5(337939) c6( ) c7(aq, kl); #c1(SPATA21) c2(XP_011539716) c3(spermatogenesis-associated protein 21 isoform X3) c4(337940) c5( ) c6( ) c7(aq, kl); #c1(SPATA21) c2(XP_011539719) c3(spermatogenesis-associated protein 21 isoform X6) c4( ) c5(337941, 337942, 337943, 337944, 337945, 337946) c6( ) c7(aq, kl); #c1(SPATA21) c2(XP_011539722) c3(spermatogenesis-associated protein 21 isoform X8) c4(337947) c5(337948, 337949, 337950, 337951, 337952, 337953, 337954) c6( ) c7(aq, kl); #c1(SPATA22) c2(NP_001164166) c3(spermatogenesis-associated protein 22 isoform 2) c4(66686) c5(66687, 66688, 66689, 66690, 66691, 66692, 66693, 66694, 66695, 66696, 66697, 66698, 66699, 66700) c6( ) c7(vH, ND); #c1(SPATA22) c2(NP_001164167) c3(spermatogenesis-associated protein 22 isoform 3) c4(66701) c5(66702, 66703, 66704, 66705, 66706, 66707) c6( ) c7(vH, ND); #c1(SPATA22) c2(NP_001164170) c3(spermatogenesis-associated protein 22 isoform 1) c4(66708) c5(66709, 66710, 66711, 66712, 66713, 66714) c6( ) c7(vH, ND); #c1(SPATA22) c2(XP_005256887) c3(spermatogenesis-associated protein 22 isoform X4) c4(274558) c5(274559, 274560, 274561, 274562, 274563, 274564) c6( ) c7(vH, ND); #c1(SPATA25) c2(NP_542175) c3(spermatogenesis-associated protein 25) c4(232184) c5(232185, 232186, 232187, 232188, 232189, 232190) c6( ) c7(vH); #c1(SPATA25) c2(XP_011526833) c3(spermatogenesis-associated protein 25 isoform X1) c4( ) c5(321191) c6( ) c7(vH); #c1(SPATA5) c2(NP_660208) c3(spermatogenesis-associated protein 5) c4(240552) c5(240553, 240554, 240555, 240556, 240557, 240558) c6( ) c7(OW); #c1(SPATA7) c2(NP_001035518) c3(spermatogenesis-associated protein 7 isoform 2) c4(32842) c5(32843, 32844, 32845, 32846, 32847, 32848, 32849, 32850, 32851, 32852) c6( ) c7(alF, nx, ci, nC, ae, cyP, ad); #c1(SPATA7) c2(NP_060888) c3(spermatogenesis-associated protein 7 isoform 1) c4(198409, 198410) c5(198411, 198412, 198413, 198414, 198415, 198416) c6( ) c7(alF, nx, ci, nC, ae, cyP, ad); #c1(SPATA7) c2(XP_006720268) c3(spermatogenesis-associated protein 7 isoform X8) c4( ) c5(293335, 293336, 293337, 293338, 293339, 293340, 293341, 293342) c6( ) c7(alF, nx, ci, nC, ae, cyP, ad); #c1(SPATA8) c2(NP_775770) c3(spermatogenesis-associated protein 8 isoform 1) c4(250243) c5(250244, 250245, 250246, 250247, 250248, 250249) c6( ) c7(aw, cd, ac, an); #c1(SPATA9) c2(NP_114158) c3(spermatogenesis-associated protein 9) c4(222423, 222424) c5(222425, 222426, 222427, 222428, 222429, 222430, 222431, 222432, 222433, 222434, 222435, 222436, 222437, 222438, 222439, 222440) c6( ) c7(nJ, gU, UI); #c1(SPATC1) c2(NP_001127846) c3(speriolin isoform 2) c4(49367) c5(49368, 49369, 49370, 48371, 49372, 49373) c6( ) c7(dt, jX); #c1(SPATC1) c2(NP_940974) c3(speriolin isoform 1) c4(260223) c5(260224, 260225, 260226, 260227, 260228, 260229) c6( ) c7(dt, jX); #c1(SPC24) c2(NP_872319) c3(kinetochore protein Spc24) c4(256114) c5(256115, 256116, 256117, 256118, 256119, 256120, 256121, 256122, 256123, 256124) c6( ) c7(aw); #c1(SPC24) c2(XP_005259810) c3(kinetochore protein Spc24 isoform X2) c4(276306) c5(276307, 276308, 276309, 276310, 276311, 276312) c6( ) c7(aw); #c1(SPC25) c2(NP_065726) c3(kinetochore protein Spc25) c4(205070) c5(205071, 205072, 205073, 205074, 205075, 205076) c6( ) c7(ey); #c1(SPC25) c2(XP_011545240) c3(kinetochore protein Spc25 isoform X1) c4(344052) c5( ) c6( ) c7(ey); #c1(SPC25) c2(XP_011545242) c3(kinetochore protein Spc25 isoform X3) c4( ) c5(344053, 344054, 344055, 344056, 344057, 344058) c6( ) c7(ey); #c1(SPCS3) c2(NP_068747) c3(signal peptidase complex subunit 3) c4(210163) c5(210164, 210165, 210166, 210167, 210168, 210169) c6( ) c7(cd, j); #c1(SPDEF) c2(NP_001239223) c3(SAM pointed domain-containing Ets transcription factor isoform 2) c4(88377) c5(88378, 88379, 88380, 88381, 88382) c6( ) c7(ae, T, s, bE, aW, ayS, X, aT, r, adR, bdp, bB, m, ct, ci, g, t, bz, q, ad); #c1(SPDEF) c2(NP_036523) c3(SAM pointed domain-containing Ets transcription factor isoform 1) c4( ) c5(174227, 174228, 174229, 174230, 174231) c6( ) c7(ae, T, s, bE, aW, ayS, X, aT, r, adR, bdp, bB, m, ct, ci, g, t, bz, q, ad); #c1(SPDEF) c2(XP_005249045) c3(SAM pointed domain-containing Ets transcription factor isoform X1) c4(268951) c5(268952, 268953, 268954) c6( ) c7(ae, T, s, bE, aW, ayS, X, aT, r, adR, bdp, bB, m, ct, ci, g, t, bz, q, ad); #c1(SPDL1) c2(NP_060255) c3(protein Spindly) c4(195048, 195049, 195050, 195051, 195052) c5(195053, 195054, 195055, 195056, 195057, 195058, 195059, 195060, 195061, 195062, 195063, 195064, 195065, 195066, 195067, 195068, 195069, 195070, 195071, 195072, 195073, 195074, 195075, 195076, 195077, 195078, 195079, 195080, 195081, 195082, 195083, 195084, 195085, 195086, 195087, 195088, 195089, 195090, 195091, 195092, 195093, 195094) c6( ) c7(bX); #c1(SPDL1) c2(XP_011532891) c3(protein Spindly isoform X1) c4(329071, 329072) c5( ) c6( ) c7(bX); #c1(SPDYA) c2(NP_001008779) c3(speedy protein A isoform 2) c4( ) c5(23397, 23398, 23399, 23400, 23401, 23402) c6( ) c7(T, aW, aT, n, eA, hE, B); #c1(SPDYA) c2(NP_001136106) c3(speedy protein A isoform 1) c4(54355, 54356) c5(54357, 54358, 54359, 54360, 54361, 54362, 54363, 54364, 54365, 54366) c6( ) c7(T, aW, aT, n, eA, hE, B); #c1(SPECC1) c2(NP_001028726) c3(cytospin-B isoform 4) c4(30519, 30520) c5(30521, 30522, 30523, 30524, 30525, 30526, 30527) c6( ) c7(aW, ds, tT, anV, aaG, wc, aT, pR, act, pq, q, aa); #c1(SPECC1) c2(NP_001028727) c3(cytospin-B isoform 2) c4(30528) c5(30529, 30530, 30531, 30532, 30533, 30534) c6( ) c7(aW, ds, tT, anV, aaG, wc, aT, pR, act, pq, q, aa); #c1(SPECC1) c2(NP_001230367) c3(cytospin-B isoform 5) c4( ) c5(86256, 86257, 86258, 86259, 86260) c6( ) c7(aW, ds, tT, anV, aaG, wc, aT, pR, act, pq, q, aa); #c1(SPECC1) c2(NP_001230368) c3(cytospin-B isoform 1) c4(86261) c5(86262, 86263, 86264, 86265, 86266, 86267) c6( ) c7(aW, ds, tT, anV, aaG, wc, aT, pR, act, pq, q, aa); #c1(SPECC1) c2(NP_690868) c3(cytospin-B isoform 3) c4(245026, 245027) c5(245028, 245029, 245030, 245031, 245032, 245033) c6( ) c7(aW, ds, tT, anV, aaG, wc, aT, pR, act, pq, q, aa); #c1(SPECC1) c2(XP_005256917) c3(cytospin-B isoform X4) c4( ) c5(274577, 274578, 274579, 274580, 274581) c6( ) c7(aW, ds, tT, anV, aaG, wc, aT, pR, act, pq, q, aa); #c1(SPECC1) c2(XP_011522375) c3(cytospin-B isoform X1) c4(317048) c5(317049, 317050, 317051, 317052, 317053, 317054) c6( ) c7(aW, ds, tT, anV, aaG, wc, aT, pR, act, pq, q, aa); #c1(SPECC1) c2(XP_011522376) c3(cytospin-B isoform X2) c4(317055) c5(317056) c6( ) c7(aW, ds, tT, anV, aaG, wc, aT, pR, act, pq, q, aa); #c1(SPECC1) c2(XP_011522378) c3(cytospin-B isoform X3) c4( ) c5(317057, 317058, 317059, 317060, 317061, 317062) c6( ) c7(aW, ds, tT, anV, aaG, wc, aT, pR, act, pq, q, aa); #c1(SPECC1L) c2(NP_001138940) c3(cytospin-A isoform 1) c4(58436) c5(58437, 58438, 58439, 58440, 58441, 58442, 58443, 58444, 58445, 58446) c6( ) c7(azs, clz); #c1(SPECC1L) c2(NP_001241661) c3(cytospin-A isoform 2) c4(89000, 89001, 89002) c5(89003, 89004, 89005, 89006, 89007, 89008, 89009, 89010, 89011, 89012, 89013, 89014, 89015, 89016, 89017, 89018, 89019, 89020) c6( ) c7(azs, clz); #c1(SPEF2) c2(NP_079143) c3(sperm flagellar protein 2 isoform 1) c4(217229) c5(217230, 217231, 217232, 217233, 217234, 217235) c6( ) c7(V); #c1(SPEF2) c2(NP_653323) c3(sperm flagellar protein 2 isoform 2) c4(239595) c5(239596, 239597, 239598, 239599, 239600, 239601) c6( ) c7(V); #c1(SPEF2) c2(XP_011512438) c3(sperm flagellar protein 2 isoform X2) c4(303128) c5(303129, 303130, 303131, 303132, 303133, 303134) c6( ) c7(V); #c1(SPEG) c2(NP_001166947) c3(striated muscle preferentially expressed protein kinase isoform 4) c4(68700) c5(68701, 68702, 68703, 68704, 68705, 68706, 68707, 68708, 68709, 68710, 68711) c6( ) c7(ea, xz, mx, UX); #c1(SPEG) c2(NP_005867) c3(striated muscle preferentially expressed protein kinase isoform 1) c4(160004, 160005) c5(160006, 160007, 160008, 160009, 160010, 160011, 160012, 160013, 160014, 160015, 160016, 160017) c6( ) c7(ea, xz, mx, UX); #c1(SPEG) c2(XP_005246296) c3(striated muscle preferentially expressed protein kinase isoform X9) c4(267028) c5( ) c6( ) c7(ea, xz, mx, UX); #c1(SPEG) c2(XP_011508781) c3(striated muscle preferentially expressed protein kinase isoform X1) c4( ) c5(299376, 299377) c6( ) c7(ea, xz, mx, UX); #c1(SPEG) c2(XP_011508783) c3(striated muscle preferentially expressed protein kinase isoform X3) c4( ) c5(299378, 299379) c6( ) c7(ea, xz, mx, UX); #c1(SPEG) c2(XP_011508784) c3(striated muscle preferentially expressed protein kinase isoform X4) c4( ) c5(299380) c6( ) c7(ea, xz, mx, UX); #c1(SPEG) c2(XP_011508788) c3(striated muscle preferentially expressed protein kinase isoform X13) c4( ) c5(299381, 299382, 299383, 299384, 299385, 299386, 299387) c6( ) c7(ea, xz, mx, UX); #c1(SPESP1) c2(NP_663633) c3(sperm equatorial segment protein 1 precursor) c4(241389) c5(241390, 241391, 241392, 241393, 241394, 241395) c6( ) c7(bL, bt, dy, eR); #c1(SPG11) c2(NP_001153699) c3(spatacsin isoform 2) c4(60883) c5(60884, 60885, 60886, 60887, 60888, 60889) c6( ) c7(bcR, cIC, bAn, c, bcS, cIA, lu, aV, dM, cIB, Kk, TO, ha, U, nw, bk, nA, Qn); #c1(SPG11) c2(NP_079413) c3(spatacsin isoform 1) c4(218021, 218022) c5(218023, 218024, 218025, 218026, 218027, 218028, 218029, 218030, 218031, 218032, 218033, 218034) c6( ) c7(bcR, cIC, bAn, c, bcS, cIA, lu, aV, dM, cIB, Kk, TO, ha, U, nw, bk, nA, Qn); #c1(SPG20) c2(NP_055902) c3(spartin) c4(184340) c5(184341, 184342, 184343, 184344, 184345, 184346, 184347, 184348, 184349, 184350, 184351, 184352, 184353, 184354, 184355, 184356, 184357, 184358) c6( ) c7(T, s, bcS, aV, pf, r, bl, bkk, q); #c1(SPG21) c2(NP_001121362) c3(maspardin isoform b) c4(45759) c5(45760, 45761, 45762, 45763, 45764, 45765) c6( ) c7(ok, Qn, Xd, aV, cID, ao); #c1(SPG21) c2(NP_057714) c3(maspardin isoform a) c4(192494) c5(192495, 192496, 192497, 192498, 192499, 192500, 192501, 192502, 192503, 192504) c6( ) c7(ok, Qn, Xd, aV, cID, ao); #c1(SPG7) c2(NP_003110) c3(paraplegin isoform 1 precursor) c4(135403, 135404) c5(135405, 135406, 135407, 135408, 135409, 135410, 135411, 135412, 135413) c6( ) c7(gV, T, dA, qb, OI, cIE, jh, fd, bZ, v, ci, yV, q, ad, eA, eJ, eW, aV, clA, aN, aT, dL, ey, awL, ae, af, eL, PP, bcS, s, aW, Y, OX, oV, hG, axW, r, Io, t, cta, kC, cm, Qn, ck, kT, kB, mx, U, cj, iS, MJ, awK, m, gT, bt, B); #c1(SPG7) c2(NP_955399) c3(paraplegin isoform 2 precursor) c4(261702) c5(261703, 261704, 261705, 261706, 261707, 261708, 261709) c6( ) c7(gV, T, dA, qb, OI, cIE, jh, fd, bZ, v, ci, yV, q, ad, eA, eJ, eW, aV, clA, aN, aT, dL, ey, awL, ae, af, eL, PP, bcS, s, aW, Y, OX, oV, hG, axW, r, Io, t, cta, kC, cm, Qn, ck, kT, kB, mx, U, cj, iS, MJ, awK, m, gT, bt, B); #c1(SPG7) c2(XP_005256378) c3(paraplegin isoform X4) c4( ) c5(274132, 274133, 274134, 274135, 274136, 274137) c6( ) c7(gV, T, dA, qb, OI, cIE, jh, fd, bZ, v, ci, yV, q, ad, eA, eJ, eW, aV, clA, aN, aT, dL, ey, awL, ae, af, eL, PP, bcS, s, aW, Y, OX, oV, hG, axW, r, Io, t, cta, kC, cm, Qn, ck, kT, kB, mx, U, cj, iS, MJ, awK, m, gT, bt, B); #c1(SPG7) c2(XP_006721327) c3(paraplegin isoform X1) c4(293948) c5(293949, 293950, 293951) c6( ) c7(gV, T, dA, qb, OI, cIE, jh, fd, bZ, v, ci, yV, q, ad, eA, eJ, eW, aV, clA, aN, aT, dL, ey, awL, ae, af, eL, PP, bcS, s, aW, Y, OX, oV, hG, axW, r, Io, t, cta, kC, cm, Qn, ck, kT, kB, mx, U, cj, iS, MJ, awK, m, gT, bt, B); #c1(SPHK1) c2(NP_068807) c3(sphingosine kinase 1 isoform 1) c4(210660) c5(210661, 210662, 210663, 210664, 210665) c6( ) c7(bL, T, qb, fG, ht, jN, eX, aA, cz, n, bB, dG, v, ci, C, Fb, fd, q, ad, ai, eA, mj, hd, ib, aE, aT, CQ, eV, ji, K, hu, KV, ae, Qe, d, s, nO, iU, aW, Y, ff, eH, r, fe, dq, aq, aF, zC, en, mo, pL, t, g, as, eF, op, iR, bw, LB, ck, es, kP, eM, nB, bE, iA, WS, vA, AH, X, uR, m, Hb, qF, B, hS); #c1(SPHK1) c2(NP_892010) c3(sphingosine kinase 1 isoform 2) c4(257577, 257578, 257579) c5(257580, 257581, 257582, 257583, 257584, 257585, 257586, 257587, 257588, 257589) c6( ) c7(bL, T, qb, fG, ht, jN, eX, aA, cz, n, bB, dG, v, ci, C, Fb, fd, q, ad, ai, eA, mj, hd, ib, aE, aT, CQ, eV, ji, K, hu, KV, ae, Qe, d, s, nO, iU, aW, Y, ff, eH, r, fe, dq, aq, aF, zC, en, mo, pL, t, g, as, eF, op, iR, bw, LB, ck, es, kP, eM, nB, bE, iA, WS, vA, AH, X, uR, m, Hb, qF, B, hS); #c1(SPHK1) c2(XP_011523741) c3(sphingosine kinase 1 isoform X1) c4( ) c5(318219, 318220, 318221, 318222, 318223, 318224, 318225, 318226, 318227, 318228, 318229, 318230, 318231, 318232, 318233, 318234, 318235, 318236) c6(318237) c7(bL, T, qb, fG, ht, jN, eX, aA, cz, n, bB, dG, v, ci, C, Fb, fd, q, ad, ai, eA, mj, hd, ib, aE, aT, CQ, eV, ji, K, hu, KV, ae, Qe, d, s, nO, iU, aW, Y, ff, eH, r, fe, dq, aq, aF, zC, en, mo, pL, t, g, as, eF, op, iR, bw, LB, ck, es, kP, eM, nB, bE, iA, WS, vA, AH, X, uR, m, Hb, qF, B, hS); #c1(SPHK2) c2(NP_001191087) c3(sphingosine kinase 2 isoform b) c4( ) c5(80979) c6( ) c7(ck, x, T, d, ac, eM, nO, aW, wO, fG, CM, aT, aA, aF, k, as, eA); #c1(SPHK2) c2(XP_006723354) c3(sphingosine kinase 2 isoform X1) c4(295150, 295151, 295152, 295153, 295154) c5(295155, 295156, 295157, 295158, 295159, 295160, 295161, 295162, 295163, 295164, 295165, 295166, 295167, 295168, 295169, 295170, 295171, 295172, 295173, 295174, 295175, 295176, 295177, 295178) c6( ) c7(ck, x, T, d, ac, eM, nO, aW, wO, fG, CM, aT, aA, aF, k, as, eA); #c1(SPHK2) c2(XP_011525436) c3(sphingosine kinase 2 isoform X2) c4(319856) c5(319857, 319858, 319859, 319860, 319861, 319862, 319863, 319864, 319865, 319866) c6( ) c7(ck, x, T, d, ac, eM, nO, aW, wO, fG, CM, aT, aA, aF, k, as, eA); #c1(SPHK2) c2(XP_011525437) c3(sphingosine kinase 2 isoform X3) c4( ) c5(319867, 319868, 319869, 319870, 319871) c6( ) c7(ck, x, T, d, ac, eM, nO, aW, wO, fG, CM, aT, aA, aF, k, as, eA); #c1(SPHKAP) c2(NP_001136116) c3(A-kinase anchor protein SPHKAP isoform 1) c4(54367) c5(54368, 54369, 54370, 54371, 54372, 54373) c6( ) c7(Dy, ac, Y, cm, bt, eA, Ex); #c1(SPHKAP) c2(NP_085126) c3(A-kinase anchor protein SPHKAP isoform 2) c4(219331) c5(219332, 219333, 219334, 219335, 219336, 219337) c6( ) c7(Dy, ac, Y, cm, bt, eA, Ex); #c1(SPI1) c2(NP_001074016) c3(transcription factor PU.1 isoform 1) c4(36973) c5(36974, 36975, 36976, 36977, 36978, 36979) c6( ) c7(T, fM, Ik, fR, cIF, eX, jh, fd, C, x, eV, ji, K, jj, iU, eZ, iV, Hv, ck, bnN, iT, cj, bt); #c1(SPI1) c2(NP_003111) c3(transcription factor PU.1 isoform 2) c4(135414) c5(135415, 135416, 135417, 135418, 135419, 135420, 135421) c6( ) c7(T, fM, Ik, fR, cIF, eX, jh, fd, C, x, eV, ji, K, jj, iU, eZ, iV, Hv, ck, bnN, iT, cj, bt); #c1(SPIB) c2(NP_001230927) c3(transcription factor Spi-B isoform 2) c4(87191) c5(87192, 87193, 87194, 87195, 87196, 87197) c6( ) c7(ck, Of, r, Og, q, pi, bc); #c1(SPIB) c2(NP_003112) c3(transcription factor Spi-B isoform 1) c4(135422) c5(135423, 135424, 135425, 135426, 135427, 135428, 135429, 135430, 135431, 135432, 135433) c6( ) c7(ck, Of, r, Og, q, pi, bc); #c1(SPIC) c2(NP_689536) c3(transcription factor Spi-C) c4(243015) c5(243016, 243017, 243018, 243019, 243020, 243021, 243022, 243023, 243024, 243025, 243026) c6( ) c7(q, r); #c1(SPIDR) c2(NP_001073863) c3(DNA repair-scaffolding protein isoform 1) c4(36161) c5(36162, 36163, 36164, 36165, 36166, 36167) c6( ) c7(x, T, q, k, r); #c1(SPIDR) c2(NP_001269845) c3(DNA repair-scaffolding protein isoform 2) c4(102941) c5(102942, 102943, 102944, 102945, 102946, 102947) c6( ) c7(x, T, q, k, r); #c1(SPIN1) c2(NP_006708) c3(spindlin-1) c4(167319) c5(167320, 167321, 167322, 167323, 167324, 167325, 167326, 167327, 167328, 167329) c6( ) c7(t, T, ff, m, en); #c1(SPIN2A) c2(NP_061876) c3(spindlin-2A) c4(200888) c5(200889, 200890, 200891, 200892, 200893, 200894, 200895, 200896) c6( ) c7(fQ, agx, agz); #c1(SPINK1) c2(NP_003113) c3(pancreatic secretory trypsin inhibitor precursor) c4(135434) c5(135435, 135436, 135437, 135438, 135439, 135440) c6( ) c7(bL, Mb, T, aC, eR, cwb, al, jN, aA, bB, n, aj, jh, j, ci, fr, aMd, iG, aY, alx, J, q, ad, hX, eJ, ZZ, bEN, aE, oz, nX, bJj, aMj, aT, h, jH, dL, wb, aKE, aCO, aKG, dQ, ais, ae, dF, azh, eL, A, s, iU, qt, aW, oV, ff, fc, r, aq, hp, en, g, t, cff, HI, OC, es, gk, ar, GU, iA, bE, X, gX, fP, aMc, zl, bEM, m, IS, ei, aKr, bt, B, ao, ayZ, vi); #c1(SPINK2) c2(NP_001258647) c3(serine protease inhibitor Kazal-type 2 isoform 1 precursor) c4(96264) c5(96265, 96266, 96267, 96268, 96269, 96270) c6( ) c7(ck, T, hp, jh); #c1(SPINK2) c2(NP_001258649) c3(serine protease inhibitor Kazal-type 2 isoform 4 precursor) c4(96271) c5(96272, 96273, 96274, 96275, 96276, 96277) c6( ) c7(ck, T, hp, jh); #c1(SPINK2) c2(NP_066937) c3(serine protease inhibitor Kazal-type 2 isoform 2 precursor) c4(207587) c5(207588, 207589, 207590, 207591, 207592, 207593) c6( ) c7(ck, T, hp, jh); #c1(SPINK2) c2(XP_011532707) c3(serine protease inhibitor Kazal-type 2 isoform X1) c4(328741) c5( ) c6( ) c7(ck, T, hp, jh); #c1(SPINK4) c2(NP_055286) c3(serine protease inhibitor Kazal-type 4 precursor) c4(180296, 180297) c5(180298, 180299, 180300, 180301, 180302, 180303, 180304, 180305, 180306, 180307, 180308, 180309, 180310, 180311, 180312, 180313) c6( ) c7(pX, Ja, hp); #c1(SPINK5) c2(NP_001121170) c3(serine protease inhibitor Kazal-type 5 isoform a precursor) c4(45324) c5(45325, 45326, 45327, 45328, 45329, 45330, 45331, 45332, 45333, 45334, 45335, 45336) c6( ) c7(bM, FW, bRw, ad, fn, IQ, bGD, A, sp, ff, aEW, hp, en, eE, cM, zV, cT, buT, z, Km, bim, be); #c1(SPINK5) c2(NP_001121171) c3(serine protease inhibitor Kazal-type 5 isoform c precursor) c4(45337) c5( ) c6( ) c7(bM, FW, bRw, ad, fn, IQ, bGD, A, sp, ff, aEW, hp, en, eE, cM, zV, cT, buT, z, Km, bim, be); #c1(SPINK5) c2(NP_006837) c3(serine protease inhibitor Kazal-type 5 isoform b precursor) c4(168545) c5(168546, 168547, 168548, 168549, 168550, 168551) c6( ) c7(bM, FW, bRw, ad, fn, IQ, bGD, A, sp, ff, aEW, hp, en, eE, cM, zV, cT, buT, z, Km, bim, be); #c1(SPINK6) c2(NP_001182219) c3(serine protease inhibitor Kazal-type 6 precursor) c4(74701, 74702) c5(74703, 74704, 74705, 74706, 74707, 74708, 74709, 74710, 74711, 74712, 74713, 74714, 74715, 74716) c6(74717, 74718) c7(eE, RJ, zg); #c1(SPINK7) c2(NP_115955) c3(serine protease inhibitor Kazal-type 7 precursor) c4(224920) c5(224921, 224922, 224923, 224924, 224925, 224926, 224927) c6(224928) c7(T, aC, ff, ht, it, ci, en, hu, g, bz, B); #c1(SPINT1) c2(NP_001027539) c3(kunitz-type protease inhibitor 1 isoform 2 precursor) c4(30251) c5(30252, 30253, 30254, 30255, 30256, 30257, 30258, 30259, 30260, 30261, 30262, 30263, 30264, 30265) c6(30266, 30267, 30268, 30269) c7(T, al, aA, sM, Bm, bB, fr, ci, q, ad, amg, aE, ds, gd, aT, dL, ae, eL, jf, d, s, aW, ff, hl, aq, aF, Fq, en, cl, t, g, op, gk, bE, wE, vA, gX, hL, at, m, vi); #c1(SPINT1) c2(XP_006720720) c3(kunitz-type protease inhibitor 1 isoform X1) c4(293622, 293623) c5(293624, 293625, 293626, 293627, 293628, 293629, 293630, 293631, 293632, 293633, 293634, 293635, 293636, 293637, 293638, 293639) c6(293640, 293641, 293642, 293643) c7(T, al, aA, sM, Bm, bB, fr, ci, q, ad, amg, aE, ds, gd, aT, dL, ae, eL, jf, d, s, aW, ff, hl, aq, aF, Fq, en, cl, t, g, op, gk, bE, wE, vA, gX, hL, at, m, vi); #c1(SPINT1) c2(XP_011520260) c3(kunitz-type protease inhibitor 1 isoform X3) c4( ) c5(315098) c6( ) c7(T, al, aA, sM, Bm, bB, fr, ci, q, ad, amg, aE, ds, gd, aT, dL, ae, eL, jf, d, s, aW, ff, hl, aq, aF, Fq, en, cl, t, g, op, gk, bE, wE, vA, gX, hL, at, m, vi); #c1(SPINT2) c2(NP_001159575) c3(kunitz-type protease inhibitor 2 isoform b precursor) c4(64302) c5(64303, 64304, 64305, 64306, 64307, 64308) c6( ) c7(T, jv, aMW, if, ha, aA, Bm, fr, ci, qN, bmx, zP, q, ad, eA, ajL, py, aE, amg, aT, ble, ae, jf, le, zQ, d, aW, blU, aq, aF, g, cl, as, ajB, t, op, xd, asl, vA, hL, cIG, m, B); #c1(SPINT2) c2(NP_066925) c3(kunitz-type protease inhibitor 2 isoform a precursor) c4(207515) c5(207516, 207517, 207518, 207519, 207520, 207521) c6( ) c7(T, jv, aMW, if, ha, aA, Bm, fr, ci, qN, bmx, zP, q, ad, eA, ajL, py, aE, amg, aT, ble, ae, jf, le, zQ, d, aW, blU, aq, aF, g, cl, as, ajB, t, op, xd, asl, vA, hL, cIG, m, B); #c1(SPNS1) c2(NP_001135921) c3(protein spinster homolog 1 isoform 4) c4(53559) c5(53560, 53561, 53562, 53563, 53564) c6( ) c7(d, aaU, z, ff, h, en, ae, eW, ad); #c1(SPNS1) c2(NP_001135922) c3(protein spinster homolog 1 isoform 2) c4(53565) c5(53566, 53567, 53568, 53569, 53570) c6( ) c7(d, aaU, z, ff, h, en, ae, eW, ad); #c1(SPNS1) c2(NP_001135923) c3(protein spinster homolog 1 isoform 3) c4(53571) c5(53572, 53573, 53574, 53575, 53576) c6( ) c7(d, aaU, z, ff, h, en, ae, eW, ad); #c1(SPNS1) c2(NP_114427) c3(protein spinster homolog 1 isoform 1) c4(222699) c5(222700, 222701, 222702, 222703, 222704, 222705, 222706) c6( ) c7(d, aaU, z, ff, h, en, ae, eW, ad); #c1(SPNS1) c2(XP_006721159) c3(protein spinster homolog 1 isoform X2) c4( ) c5(293887, 293888) c6( ) c7(d, aaU, z, ff, h, en, ae, eW, ad); #c1(SPNS2) c2(NP_001118230) c3(protein spinster homolog 2) c4(44047) c5(44048, 44049, 44050, 44051, 44052, 44053) c6( ) c7(md); #c1(SPO11) c2(NP_036576) c3(meiotic recombination protein SPO11 isoform a) c4(174471) c5(174472, 174473, 174474, 174475, 174476, 174477) c6( ) c7(vH, bt, gU, ND, il); #c1(SPO11) c2(NP_937998) c3(meiotic recombination protein SPO11 isoform b) c4(259485, 259486) c5(259487, 259488, 259489, 259490, 259491, 259492, 259493, 259494, 259495, 259496, 259497, 259498) c6( ) c7(vH, bt, gU, ND, il); #c1(SPO11) c2(XP_005260438) c3(meiotic recombination protein SPO11 isoform X3) c4(276540) c5(276541, 276542, 276543, 276544, 276545, 276546) c6( ) c7(vH, bt, gU, ND, il); #c1(SPOCK1) c2(NP_004589) c3(testican-1 precursor) c4(147944, 147945) c5(147946, 147947, 147948, 147949, 147950, 147951, 147952, 147953, 147954, 147955, 147956, 147957, 147958, 147959, 147960, 147961, 147962, 147963, 147964, 147965, 147966, 147967, 147968) c6(147969, 147970, 147971, 147972, 147973, 147974) c7(aC, d, eM, dH, aA, aj, kp, aF, B, ad); #c1(SPOCK2) c2(NP_001127906) c3(testican-2 isoform 1 precursor) c4(49487) c5(49488, 49489, 49490, 49491, 49492, 49493) c6( ) c7(mR, eA, aT); #c1(SPOCK2) c2(NP_055582) c3(testican-2 isoform 2 precursor) c4(182101, 182102) c5(182103, 182104, 182105, 182106, 182107, 182108, 182109, 182110, 182111, 182112, 182113, 182114) c6( ) c7(mR, eA, aT); #c1(SPOCK2) c2(XP_011538706) c3(testican-2 isoform X1) c4(336470) c5(336471, 336472, 336473, 336474, 336475, 336476) c6( ) c7(mR, eA, aT); #c1(SPOCK3) c2(NP_001035249) c3(testican-3 isoform 1 precursor) c4(32666) c5(32667, 32668, 32669, 32670, 32671, 32672, 32673, 32674, 32675, 32676, 32677, 32678, 32679, 32680, 32681, 32682, 32683, 32684, 32685, 32686) c6( ) c7(je, iM, kH); #c1(SPOCK3) c2(NP_001191281) c3(testican-3 isoform 3) c4(81271) c5(81272, 81273, 81274, 81275, 81276, 81277, 81278) c6( ) c7(je, iM, kH); #c1(SPOCK3) c2(NP_001191282) c3(testican-3 isoform 4) c4( ) c5(81279, 81280, 81281, 81282, 81283, 81284, 81285) c6( ) c7(je, iM, kH); #c1(SPOCK3) c2(NP_001191283) c3(testican-3 isoform 5) c4( ) c5(81286) c6( ) c7(je, iM, kH); #c1(SPOCK3) c2(NP_001191284) c3(testican-3 isoform 6) c4(81287, 81288) c5(81289, 81290, 81291, 81292, 81293, 81294, 81295, 81296) c6( ) c7(je, iM, kH); #c1(SPOCK3) c2(NP_001191285) c3(testican-3 isoform 7 precursor) c4(81297, 81298) c5(81299, 81300, 81301, 81302, 81303, 81304, 81305, 81306, 81307, 81308, 81309, 81310, 81311, 81312, 81313, 81314) c6( ) c7(je, iM, kH); #c1(SPOCK3) c2(NP_001191287) c3(testican-3 isoform 9 precursor) c4(81315, 81316) c5(81317, 81318, 81319, 81320, 81321, 81322, 81323, 81324, 81325, 81326, 81327, 81328, 81329, 81330, 81331, 81332) c6( ) c7(je, iM, kH); #c1(SPOCK3) c2(NP_001238896) c3(testican-3 isoform 11 precursor) c4(88016, 88017) c5(88018, 88019, 88020, 88021, 88022, 88023, 88024, 88025, 88026, 88027, 88028, 88029, 88030, 88031, 88032, 88033, 88034, 88035, 88036, 88037, 88038, 88039) c6( ) c7(je, iM, kH); #c1(SPOCK3) c2(NP_058646) c3(testican-3 isoform 2 precursor) c4(192949, 192950) c5(192951, 192952, 192953, 192954, 192955, 192956, 192957, 192958, 192959, 192960, 192961, 192962, 192963, 192964, 192965, 192966, 192967, 192968, 192969, 192970, 192971, 192972, 192973, 192974, 192975, 192976, 192977, 192978, 192979, 192980, 192981, 192982, 192983, 192984, 192985, 192986, 192987, 192988, 192989, 192990) c6( ) c7(je, iM, kH); #c1(SPON1) c2(NP_006099) c3(spondin-1 precursor) c4(161868, 161869) c5(161870, 161871, 161872, 161873, 161874, 161875, 161876, 161877, 161878, 161879, 161880, 161881, 161882, 161883) c6(161884, 161885) c7(ci, m); #c1(SPON2) c2(NP_001185950) c3(spondin-2 precursor) c4(76805, 76806, 76807, 76808, 76809, 76810, 76811) c5(76812, 76813, 76814, 76815, 76816, 76817, 76818, 76819, 76820, 76821, 76822, 76823, 76824, 76825, 76826, 76827, 76828, 76829, 76830, 76831, 76832, 76833, 76834, 76835, 76836, 76837, 76838, 76839, 76840, 76841, 76842, 76843, 76844, 76845) c6( ) c7(bL, sp, mQ, bz, B, ad); #c1(SPOP) c2(NP_003554) c3(speckle-type POZ protein) c4(139069, 139070, 139071, 139072, 139073, 139074, 139075, 139076, 139077, 139078, 139079) c5(139080, 139081, 139082, 139083, 139084, 139085, 139086, 139087, 139088, 139089, 139090, 139091, 139092, 139093, 139094, 139095, 139096, 139097, 139098, 139099, 139100, 139101, 139102, 139103, 139104, 139105, 139106, 139107, 139108, 139109, 139110, 139111, 139112, 139113, 139114, 139115, 139116, 139117, 139118, 139119, 139120, 139121, 139122, 139123, 139124, 139125, 139126, 139127, 139128, 139129, 139130, 139131, 139132, 139133, 139134, 139135, 139136, 139137, 139138, 139139, 139140, 139141, 139142, 139143, 139144, 139145, 139146, 139147, 139148, 139149, 139150, 139151, 139152, 139153, 139154, 139155, 139156, 139157, 139158, 139159, 139160) c6( ) c7(es, T, iO, py, iA, Ub, go, hL, aT, fr, ae, cd, ad); #c1(SPP1) c2(NP_000573) c3(osteopontin isoform OPN-b precursor) c4(12825) c5(12826, 12827, 12828, 12829, 12830, 12831) c6( ) c7(oO, bM, T, aC, fR, tQ, apr, fV, ea, e, al, if, fd, bB, cL, fo, ci, mF, Qp, ip, x, bv, dY, aE, Ma, aDk, bW, Qk, M, iv, K, qM, hu, wt, dF, cp, aa, xQ, ZH, up, dH, LC, aW, Ls, az, XV, hl, mQ, HA, uY, Ih, fc, g, as, eF, bw, mK, zV, iP, y, eM, nB, iA, mx, k, m, IS, hh, fy, act, YS, iu, cll, dD, zt, Or, ht, aw, qy, n, aj, qN, zP, cd, ai, baA, ke, Bl, ft, jz, zw, Xe, h, alO, hn, jl, ey, bnv, nP, bmc, Dg, A, CN, anP, hQ, fQ, sm, bQc, Vt, aq, kp, ks, gG, fe, cM, wU, vU, ar, dB, GC, ajd, hL, at, E, bm, eo, fL, it, B, fl, vQ, bL, Dw, dA, eR, jp, DD, fG, jx, aA, cz, wo, hy, v, j, OY, C, sl, acn, lu, V, q, J, o, qH, eA, eJ, aT, Oi, cy, bq, kU, ae, af, eu, bA, CB, ak, Uf, kl, bf, s, nO, iZ, Y, ev, ate, r, Io, en, cl, t, bNt, pb, ov, cT, QG, acW, ac, c, nM, iM, hc, nG, Da, dy, fl, fD, bt, awa, VB, hS, Mb, kh, BD, ob, aZ, aD, vr, wV, dG, eq, jE, mC, ad, hX, dP, aHF, av, F, fX, ib, py, akJ, hD, vw, Dj, ji, fb, vP, iL, sj, uQ, TC, d, BN, je, qt, ff, xs, eH, cr, eZ, dN, gE, si, VI, Fq, aF, iR, iV, Bu, bz, qa, LB, clH, D, baa, Bv, es, zr, Ew, yE, bE, X, gZ, cP, be, hE, aAN, ne, atd); #c1(SPP1) c2(NP_001035147) c3(osteopontin isoform OPN-a precursor) c4(32517, 32518) c5(32519, 32520, 32521, 32522, 32523, 32524, 32525, 32526, 32527, 32528, 32529, 32530) c6( ) c7(oO, bM, T, aC, fR, tQ, apr, fV, ea, e, al, if, fd, bB, cL, fo, ci, mF, Qp, ip, x, bv, dY, aE, Ma, aDk, bW, Qk, M, iv, K, qM, hu, wt, dF, cp, aa, xQ, ZH, up, dH, LC, aW, Ls, az, XV, hl, mQ, HA, uY, Ih, fc, g, as, eF, bw, mK, zV, iP, y, eM, nB, iA, mx, k, m, IS, hh, fy, act, YS, iu, cll, dD, zt, Or, ht, aw, qy, n, aj, qN, zP, cd, ai, baA, ke, Bl, ft, jz, zw, Xe, h, alO, hn, jl, ey, bnv, nP, bmc, Dg, A, CN, anP, hQ, fQ, sm, bQc, Vt, aq, kp, ks, gG, fe, cM, wU, vU, ar, dB, GC, ajd, hL, at, E, bm, eo, fL, it, B, fl, vQ, bL, Dw, dA, eR, jp, DD, fG, jx, aA, cz, wo, hy, v, j, OY, C, sl, acn, lu, V, q, J, o, qH, eA, eJ, aT, Oi, cy, bq, kU, ae, af, eu, bA, CB, ak, Uf, kl, bf, s, nO, iZ, Y, ev, ate, r, Io, en, cl, t, bNt, pb, ov, cT, QG, acW, ac, c, nM, iM, hc, nG, Da, dy, fl, fD, bt, awa, VB, hS, Mb, kh, BD, ob, aZ, aD, vr, wV, dG, eq, jE, mC, ad, hX, dP, aHF, av, F, fX, ib, py, akJ, hD, vw, Dj, ji, fb, vP, iL, sj, uQ, TC, d, BN, je, qt, ff, xs, eH, cr, eZ, dN, gE, si, VI, Fq, aF, iR, iV, Bu, bz, qa, LB, clH, D, baa, Bv, es, zr, Ew, yE, bE, X, gZ, cP, be, hE, aAN, ne, atd); #c1(SPP1) c2(NP_001035149) c3(osteopontin isoform OPN-c precursor) c4(32538) c5(32539, 32540, 32541, 32542, 32543, 32544) c6( ) c7(oO, bM, T, aC, fR, tQ, apr, fV, ea, e, al, if, fd, bB, cL, fo, ci, mF, Qp, ip, x, bv, dY, aE, Ma, aDk, bW, Qk, M, iv, K, qM, hu, wt, dF, cp, aa, xQ, ZH, up, dH, LC, aW, Ls, az, XV, hl, mQ, HA, uY, Ih, fc, g, as, eF, bw, mK, zV, iP, y, eM, nB, iA, mx, k, m, IS, hh, fy, act, YS, iu, cll, dD, zt, Or, ht, aw, qy, n, aj, qN, zP, cd, ai, baA, ke, Bl, ft, jz, zw, Xe, h, alO, hn, jl, ey, bnv, nP, bmc, Dg, A, CN, anP, hQ, fQ, sm, bQc, Vt, aq, kp, ks, gG, fe, cM, wU, vU, ar, dB, GC, ajd, hL, at, E, bm, eo, fL, it, B, fl, vQ, bL, Dw, dA, eR, jp, DD, fG, jx, aA, cz, wo, hy, v, j, OY, C, sl, acn, lu, V, q, J, o, qH, eA, eJ, aT, Oi, cy, bq, kU, ae, af, eu, bA, CB, ak, Uf, kl, bf, s, nO, iZ, Y, ev, ate, r, Io, en, cl, t, bNt, pb, ov, cT, QG, acW, ac, c, nM, iM, hc, nG, Da, dy, fl, fD, bt, awa, VB, hS, Mb, kh, BD, ob, aZ, aD, vr, wV, dG, eq, jE, mC, ad, hX, dP, aHF, av, F, fX, ib, py, akJ, hD, vw, Dj, ji, fb, vP, iL, sj, uQ, TC, d, BN, je, qt, ff, xs, eH, cr, eZ, dN, gE, si, VI, Fq, aF, iR, iV, Bu, bz, qa, LB, clH, D, baa, Bv, es, zr, Ew, yE, bE, X, gZ, cP, be, hE, aAN, ne, atd); #c1(SPP1) c2(NP_001238758) c3(osteopontin isoform 4 precursor) c4(87893) c5(87894, 87895, 87896, 87897, 87898, 87899) c6( ) c7(oO, bM, T, aC, fR, tQ, apr, fV, ea, e, al, if, fd, bB, cL, fo, ci, mF, Qp, ip, x, bv, dY, aE, Ma, aDk, bW, Qk, M, iv, K, qM, hu, wt, dF, cp, aa, xQ, ZH, up, dH, LC, aW, Ls, az, XV, hl, mQ, HA, uY, Ih, fc, g, as, eF, bw, mK, zV, iP, y, eM, nB, iA, mx, k, m, IS, hh, fy, act, YS, iu, cll, dD, zt, Or, ht, aw, qy, n, aj, qN, zP, cd, ai, baA, ke, Bl, ft, jz, zw, Xe, h, alO, hn, jl, ey, bnv, nP, bmc, Dg, A, CN, anP, hQ, fQ, sm, bQc, Vt, aq, kp, ks, gG, fe, cM, wU, vU, ar, dB, GC, ajd, hL, at, E, bm, eo, fL, it, B, fl, vQ, bL, Dw, dA, eR, jp, DD, fG, jx, aA, cz, wo, hy, v, j, OY, C, sl, acn, lu, V, q, J, o, qH, eA, eJ, aT, Oi, cy, bq, kU, ae, af, eu, bA, CB, ak, Uf, kl, bf, s, nO, iZ, Y, ev, ate, r, Io, en, cl, t, bNt, pb, ov, cT, QG, acW, ac, c, nM, iM, hc, nG, Da, dy, fl, fD, bt, awa, VB, hS, Mb, kh, BD, ob, aZ, aD, vr, wV, dG, eq, jE, mC, ad, hX, dP, aHF, av, F, fX, ib, py, akJ, hD, vw, Dj, ji, fb, vP, iL, sj, uQ, TC, d, BN, je, qt, ff, xs, eH, cr, eZ, dN, gE, si, VI, Fq, aF, iR, iV, Bu, bz, qa, LB, clH, D, baa, Bv, es, zr, Ew, yE, bE, X, gZ, cP, be, hE, aAN, ne, atd); #c1(SPP2) c2(NP_008875) c3(secreted phosphoprotein 24 precursor) c4(169429) c5(169430, 169431, 169432, 169433, 169434, 169435, 169436, 169437, 169438, 169439, 169440, 169441) c6( ) c7(bM, cr, bA); #c1(SPPL2A) c2(NP_116191) c3(signal peptide peptidase-like 2A precursor) c4(225666) c5(225667, 225668, 225669, 225670, 225671, 225672) c6( ) c7(Mb, T, hd, kP, WY, aW, eH, aep, aT, aaE, dL, as, eF, eL, B); #c1(SPPL2B) c2(NP_001070706) c3(signal peptide peptidase-like 28 isoform 3 precursor) c4(34779) c5(34780, 34781, 34782, 34783, 34784, 34785, 34786, 34787, 34788, 34789) c6( ) c7(hk, CW); #c1(SPPL2B) c2(NP_694533) c3(signal peptide peptidase-like 28 isoform 2 precursor) c4(245085) c5( ) c6( ) c7(hk, CW); #c1(SPPL2B) c2(XP_011526440) c3(signal peptide peptidase-like 28 isoform X1) c4( ) c5(320751, 320752) c6( ) c7(hk, CW); #c1(SPPL2B) c2(XP_011526442) c3(signal peptide peptidase-like 28 isoform X3) c4( ) c5(320753) c6( ) c7(hk, CW); #c1(SPPL2C) c2(NP_787078) c3(signal peptide peptidase-like 2C precursor) c4(252069, 252070) c5(252071, 252072, 252073, 252074, 252075, 252076, 252077, 252078, 252079, 252080, 252081, 252082) c6( ) c7(act, an); #c1(SPPL3) c2(NP_620584) c3(signal peptide peptidase-like 3) c4(237798) c5(237799, 237800, 237801, 237802, 237803, 237804, 237805, 237806, 237807, 237808, 237809, 237810) c6( ) c7(bL, T, au, d, dV); #c1(SPPL3) c2(XP_011536226) c3(signal peptide peptidase-like 3 isoform X1) c4(333543) c5( ) c6( ) c7(bL, T, au, d, dV); #c1(SPR) c2(NP_003115) c3(sepiapterin reductase) c4(135441) c5(135442, 135443, 135444, 135445, 135446, 135447) c6( ) c7(bN, bfb, aji, bAk, cA, clJ, aU, ctY, bK, an, Z, f, aWT, ae, bAI, ad); #c1(SPRED1) c2(NP_689807) c3(sprouty-related, EVH1 domain-containing protein 1) c4(244016) c5(244017, 244018, 244019, 244020, 244021, 244022) c6( ) c7(aBK, ly, T, ID, x, aeR, Ew, nX, aeO, aiz, k, eA, ae, B, ad, lx, uQ); #c1(SPRED2) c2(NP_001121682) c3(sprouty-related, EVH1 domain-containing protein 2 isoform b) c4(46041) c5(46042, 46043, 46044, 46045, 46046, 46047) c6( ) c7(cF, Ew, nX, rD, y, ae, B, ad); #c1(SPRED2) c2(XP_005264257) c3(sprouty-related, EVH1 domain-containing protein 2 isoform X2) c4(278737) c5( ) c6( ) c7(cF, Ew, nX, rD, y, ae, B, ad); #c1(SPRED2) c2(XP_005264259) c3(sprouty-related, EVH1 domain-containing protein 2 isoform X4) c4( ) c5(278738, 278739, 278740, 278741, 278742, 278743) c6( ) c7(cF, Ew, nX, rD, y, ae, B, ad); #c1(SPRED2) c2(XP_006712029) c3(sprouty-related, EVH1 domain-containing protein 2 isoform X1) c4(286346) c5(286347, 286348, 286349, 286350, 286351, 286352) c6( ) c7(cF, Ew, nX, rD, y, ae, B, ad); #c1(SPRED3) c2(XP_011525279) c3(sprouty-related, EVH1 domain-containing protein 3 isoform X1) c4(319729, 319730) c5(319731, 319732, 319733, 319734, 319735, 319736, 319737, 319738, 319739, 319740, 319741, 319742) c6( ) c7(nX, Ew); #c1(SPRED3) c2(XP_011525281) c3(sprouty-related, EVH1 domain-containing protein 3 isoform X3) c4( ) c5(319743) c6( ) c7(nX, Ew); #c1(SPRN) c2(NP_001012526) c3(shadow of prion protein precursor) c4(25040) c5(25041, 25042, 25043, 25044, 25045, 25046, 25047, 25048, 25049, 25050, 25051) c6( ) c7(dt, jX, dS); #c1(SPRR1A) c2(NP_001186757) c3(cornifin-A) c4(78512) c5(78513, 78514, 78515, 78516, 78517, 78518, 78519, 78520, 78521, 78522) c6( ) c7(fM, lg, ff, en, eE, it); #c1(SPRR1B) c2(NP_003116) c3(cornifin-B) c4(135448, 135449) c5(135450, 135451, 135452, 135453, 135454, 135455, 135456, 135457, 135458, 135459, 135460, 135461) c6( ) c7(Qy, rl, rM, K, g, IQ, eE); #c1(SPRR2A) c2(NP_005979) c3(small proline-rich protein 2A) c4(160946) c5(160947, 160948, 160949, 160950, 160951, 160952) c6( ) c7(aJJ, T, jz, xu, alC, eW, A, eD, qh, hl, jx, aA, aj, v, K, Pd, it, YK, J, aa); #c1(SPRR2B) c2(NP_001017418) c3(small proline-rich protein 2B) c4(26478) c5( ) c6( ) c7(bM); #c1(SPRR3) c2(NP_001091058) c3(small proline-rich protein 3) c4(38388, 38389, 38390) c5(38391, 38392, 38393, 38394, 38395, 38396, 38397, 38398, 38399, 38400, 38401, 38402, 38403, 38404, 38405, 38406, 38407, 38408, 38409, 38410, 38411, 38412) c6( ) c7(T, aEl, eE, ff, it, ci, K, Xk, IQ, hu, en, bzT, g); #c1(SPRTN) c2(NP_001010984) c3(sprT-like domain-containing protein Spartan isoform b) c4(24461) c5(24462, 24463, 24464, 24465, 24466, 24467) c6( ) c7(T, MR, rC, La, ci, K, B); #c1(SPRTN) c2(NP_001248391) c3(sprT-like domain-containing protein Spartan isoform c) c4(93936) c5(93937, 93938, 93939, 93940, 93941, 93942, 93943, 93944, 93945, 93946, 93947, 93948, 93949) c6( ) c7(T, MR, rC, La, ci, K, B); #c1(SPRTN) c2(NP_114407) c3(sprT-like domain-containing protein Spartan isoform a) c4(222593, 222594) c5(222595, 222596, 222597, 222598, 222599, 222600) c6( ) c7(T, MR, rC, La, ci, K, B); #c1(SPRTN) c2(XP_006711881) c3(sprT-like domain-containing protein Spartan isoform X1) c4(286277) c5(286278) c6( ) c7(T, MR, rC, La, ci, K, B); #c1(SPRTN) c2(XP_011542590) c3(sprT-like domain-containing protein Spartan isoform X2) c4( ) c5(341160, 341161, 341162, 341163, 341164, 341165) c6( ) c7(T, MR, rC, La, ci, K, B); #c1(SPRY1) c2(NP_001244968) c3(protein sprouty homolog 1) c4(92479, 92480, 92481, 92482) c5(92483, 92484, 92485, 92486, 92487, 92488, 92489, 92490, 92491, 92492, 92493, 92494, 92495, 92496, 92497, 92498, 92499, 92500, 92501, 92502, 92503, 92504, 92505, 92506, 92507, 92508, 92509, 92510) c6( ) c7(T, al, v, ad, x, bv, nv, nX, aeO, aT, ae, aMi, bA, aeR, Qr, aW, pm, t, Qt, gk, Ew, bE, k, Xu, B); #c1(SPRY2) c2(NP_005833) c3(protein sprouty homolog 2) c4(159748, 159749) c5(159750, 159751, 159752, 159753, 159754, 159755, 159756, 159757, 159758, 159759, 159760, 159761, 159762, 159763, 159764, 159765, 159766, 159767, 159768, 159769, 159770) c6( ) c7(bL, T, fM, wu, iW, al, jh, cz, ckQ, bB, aj, v, ci, eA, ad, Na, clK, av, hd, pN, nX, aT, rD, Nc, wm, ae, aa, eG, aW, Y, Az, aq, g, hf, cl, cm, iR, bz, bvU, Qt, gk, nM, Ew, eM, nB, bE, KY, B); #c1(SPRY3) c2(NP_005831) c3(protein sprouty homolog 3) c4(159734, 159735) c5(159736, 159737, 159738, 159739, 159740, 159741, 159742, 159743, 159744, 159745, 159746, 159747) c6( ) c7(nX, Ew); #c1(SPRY4) c2(NP_001280218) c3(protein sprouty homolog 4 isoform 2) c4(111467, 111468) c5(111469, 111470, 111471, 111472, 111473, 111474, 111475, 111476, 111477, 111478, 111479, 111480, 111481, 111482, 111483, 111484) c6( ) c7(T, cIL, ac, eM, vT, Ew, nX, oe, Y, Lf, Lb, j, EA, bu, pm, fb, bz, Ld, ad, cp); #c1(SPRY4) c2(NP_112226) c3(protein sprouty homolog 4 isoform 1) c4(220971, 220972) c5(220973, 220974, 220975, 220976, 220977, 220978, 220979, 220980) c6( ) c7(T, cIL, ac, eM, vT, Ew, nX, oe, Y, Lf, Lb, j, EA, bu, pm, fb, bz, Ld, ad, cp); #c1(SPRYD7) c2(NP_001120954) c3(SPRY domain-containing protein 7 isoform 2) c4(44982) c5(44983, 44984, 44985, 44986, 44987, 44988) c6( ) c7(cgf); #c1(SPRYD7) c2(NP_065189) c3(SPRY domain-containing protein 7 isoform 1) c4(204501) c5(204502, 204503, 204504, 204505, 204506, 204507) c6( ) c7(cgf); #c1(SPSB3) c2(NP_543137) c3(SPRY domain-containing SOCS box protein 3) c4(233355, 233356) c5(233357, 233358, 233359, 233360, 233361, 233362, 233363, 233364, 233365, 233366, 233367, 233368, 233369, 233370, 233371, 233372) c6( ) c7(v); #c1(SPSB4) c2(NP_543138) c3(SPRY domain-containing SOCS box protein 4) c4(233373) c5(233374, 233375, 233376, 233377, 233378, 233379) c6( ) c7(wL, aj); #c1(SPTA1) c2(XP_011508218) c3(spectrin alpha chain, erythrocytic 1 isoform X1) c4(298839, 298840) c5(298841, 298842, 298843, 298844, 298845, 298846, 298847, 298848, 298849, 298850, 298851, 298852) c6( ) c7(os, VJ, HY, qb, Fm, cIN, dV, cz, cr, jh, S, ci, pw, cIM, qs); #c1(SPTAN1) c2(NP_001123910) c3(spectrin alpha chain, non-erythrocytic 1 isoform 1) c4(47983) c5( ) c6( ) c7(kn, T, b, eZ, bE, aJ, i, ha, afi, oj, U, r, aA, cIO, bB, fN, oZ, nA, bd, aF, cC); #c1(SPTAN1) c2(NP_001182461) c3(spectrin alpha chain, non-erythrocytic 1 isoform 3) c4(74948) c5(74949, 74950, 74951, 74952, 74953) c6( ) c7(kn, T, b, eZ, bE, aJ, i, ha, afi, oj, U, r, aA, cIO, bB, fN, oZ, nA, bd, aF, cC); #c1(SPTAN1) c2(XP_006717308) c3(spectrin alpha chain, non-erythrocytic 1 isoform X1) c4(290892) c5( ) c6( ) c7(kn, T, b, eZ, bE, aJ, i, ha, afi, oj, U, r, aA, cIO, bB, fN, oZ, nA, bd, aF, cC); #c1(SPTAN1) c2(XP_006717311) c3(spectrin alpha chain, non-erythrocytic 1 isoform X4) c4(290893) c5(290894, 290895, 290896, 290897, 290898, 290899, 290900, 290901, 290902, 290903, 290904, 290905, 290906) c6( ) c7(kn, T, b, eZ, bE, aJ, i, ha, afi, oj, U, r, aA, cIO, bB, fN, oZ, nA, bd, aF, cC); #c1(SPTAN1) c2(XP_006717312) c3(spectrin alpha chain, non-erythrocytic 1 isoform X5) c4(290907) c5(290908, 290909, 290910, 290911, 290912, 290913) c6( ) c7(kn, T, b, eZ, bE, aJ, i, ha, afi, oj, U, r, aA, cIO, bB, fN, oZ, nA, bd, aF, cC); #c1(SPTAN1) c2(XP_006717316) c3(spectrin alpha chain, non-erythrocytic 1 isoform X9) c4( ) c5(290914, 290915, 290916, 290917, 290918, 290919) c6( ) c7(kn, T, b, eZ, bE, aJ, i, ha, afi, oj, U, r, aA, cIO, bB, fN, oZ, nA, bd, aF, cC); #c1(SPTB) c2(NP_000338) c3(spectrin beta chain, erythrocytic isoform b) c4(7398, 7399) c5(7400, 7401, 7402, 7403, 7404, 7405, 7406, 7407, 7408, 7409) c6( ) c7(VJ, ac, c, Fm, vA, oj, S, cIP, eg, qs, eu, clQ, ald); #c1(SPTB) c2(NP_001020029) c3(spectrin beta chain, erythrocytic isoform a) c4(28080, 28081, 28082) c5(28083, 28084, 28085, 28086, 28087, 28088, 28089, 28090, 28091, 28092, 28093, 28094, 28095, 28096, 28097, 28098, 28099, 28100, 28101, 28102, 28103, 28104, 28105, 28106, 28107, 28108, 28109, 28110) c6( ) c7(VJ, ac, c, Fm, vA, oj, S, cIP, eg, qs, eu, clQ, ald); #c1(SPTBN1) c2(NP_842565) c3(spectrin beta chain, non-erythrocytic 1 isoform 2) c4(253636) c5(253637, 253638, 253639, 253640, 253641, 253642) c6( ) c7(T, bE, Bj, ml, gX, r, aA, bB, dz, fN, aF, pw, bt, q, bA); #c1(SPTBN1) c2(XP_006712150) c3(spectrin beta chain, non-erythrocytic 1 isoform X1) c4(286447, 286448) c5(286449, 286450, 286451, 286452, 286453, 286454, 286455, 286456, 286457, 286458, 286459, 286460) c6( ) c7(T, bE, Bj, ml, gX, r, aA, bB, dz, fN, aF, pw, bt, q, bA); #c1(SPTBN2) c2(NP_008877) c3(spectrin beta chain, non-erythrocytic 2) c4( ) c5(169442, 169443, 169444, 169445, 169446, 169447, 169448, 169449, 169450, 169451, 169452, 169453, 169454) c6( ) c7(Ng, alM, bM, BC, ky, kB, aDy, Kv, cIR, U, rf, yZ, EH, cC); #c1(SPTBN2) c2(XP_005274250) c3(spectrin beta chain, non-erythrocytic 2 isoform X1) c4(285006, 285007, 285008, 285009) c5(285010, 285011, 285012, 285013, 285014, 285015, 285016, 285017, 285018, 285019, 285020, 285021, 285022, 285023, 285024, 285025) c6( ) c7(Ng, alM, bM, BC, ky, kB, aDy, Kv, cIR, U, rf, yZ, EH, cC); #c1(SPTBN4) c2(NP_066022) c3(spectrin beta chain, non-erythrocytic 4 isoform sigma1) c4(206752, 206753, 206754, 206755) c5(206756, 206757, 206758, 206759, 206760, 206761, 206762, 206763, 206764, 206765, 206766, 206767, 206768, 206769, 206770, 206771, 206772, 206773, 206774, 206775, 206776, 206777, 206778, 206779, 206780, 206781, 206782, 206783, 206784, 206785, 206786) c6( ) c7(kl, fr, ac); #c1(SPTBN4) c2(NP_079489) c3(spectrin beta chain, non-erythrocytic 4 isoform sigma5) c4(218335) c5(218336, 218337, 218338, 218339, 218340) c6( ) c7(kl, fr, ac); #c1(SPTBN4) c2(XP_011525475) c3(spectrin beta chain, non-erythrocytic 4 isoform X2) c4(319888) c5( ) c6( ) c7(kl, fr, ac); #c1(SPTBN5) c2(NP_057726) c3(spectrin beta chain, non-erythrocytic 5) c4(192533) c5(192534, 192535, 192536, 192537, 192538, 192539, 192540) c6( ) c7(ac); #c1(SPTLC1) c2(NP_006406) c3(serine palmitoyltransferase 1 isoform a) c4(164757, 164758) c5(164759, 164760, 164761, 164762, 164763, 164764) c6( ) c7(T, Zm, bb, ql, xU, Pt, aFa, bT, xi, U, bhc, dr, j, fu, bX, bU, cm, aen, af, aR); #c1(SPTLC1) c2(NP_847894) c3(serine palmitoyltransferase 1 isoform b) c4( ) c5(253650, 253651, 253652, 253653, 253654, 253655) c6( ) c7(T, Zm, bb, ql, xU, Pt, aFa, bT, xi, U, bhc, dr, j, fu, bX, bU, cm, aen, af, aR); #c1(SPTLC2) c2(NP_004854) c3(serine palmitoyltransferase 2) c4(150317) c5(150318, 150319, 150320, 150321, 150322, 150323) c6( ) c7(xU, Pt, cIS, Hn, n, blY, fu); #c1(SPTLC3) c2(NP_060797) c3(serine palmitoyltransferase 3) c4(197881, 197882, 197883, 197884) c5(197885, 197886, 197887, 197888, 197889, 197890) c6( ) c7(beA, U); #c1(SPTLC3) c2(XP_011527581) c3(serine palmitoyltransferase 3 isoform X2) c4(322430) c5(322431, 322432, 322433, 322434, 322435, 322436, 322437, 322438, 322439, 322440, 322441, 322442, 322443, 322444, 322445, 322446, 322447, 322448, 322449, 322450, 322451, 322452, 322453, 322454) c6( ) c7(beA, U); #c1(SPTSSB) c2(NP_001035189) c3(serine palmitoyltransferase small subunit B) c4(32565) c5(32566, 32567, 32568, 32569, 32570, 32571, 32572, 32573, 32574) c6( ) c7(fq); #c1(SPTSSB) c2(XP_011510784) c3(serine palmitoyltransferase small subunit B isoform X1) c4( ) c5(301193) c6( ) c7(fq); #c1(SPTY2D1) c2(NP_919261) c3(protein SPT2 homolog) c4(258333, 258334) c5(258335, 258336, 258337, 258338, 258339, 258340, 258341, 258342, 258343, 258344, 258345, 258346) c6( ) c7(j, ac); #c1(SPZ1) c2(NP_115956) c3(spermatogenic leucine zipper protein 1) c4(224929, 224930) c5(224931, 224932, 224933, 224934, 224935, 224936, 224937, 224938, 224939, 224940, 224941, 224942) c6( ) c7(T, Tb, DD, aZ, if, e, aA, bB, fd, v, IR, ci, qN, fr, cd, ad, ai, eA, DJ, Dq, aT, cy, ae, cp, jf, eG, asp, s, nO, aW, Y, oV, ff, aF, en, cl, dw, aaO, cm, bz, pb, bfP, DT, eM, iA, bE, hL, agf, mf, m, y, iu); #c1(SQLE) c2(NP_003120) c3(squalene monooxygenase) c4(135462) c5(135463, 135464, 135465, 135466, 135467, 135468, 135469) c6( ) c7(jp, cH, aW, aT, aq, m, t, ae, B, dr, ad); #c1(SQLE) c2(XP_011515548) c3(squalene monooxygenase isoform X1) c4(308374, 308375) c5(308376, 308377, 308378, 308379, 308380, 308381, 308382, 308383, 308384, 308385, 308386) c6( ) c7(jp, cH, aW, aT, aq, m, t, ae, B, dr, ad); #c1(SQRDL) c2(NP_067022) c3(sulfide:quinone oxidoreductase, mitochondrial) c4(208455) c5(208456, 208457, 208458, 208459, 208460, 208461, 208462, 208463, 208464, 208465) c6( ) c7(fe, fq, ad, an); #c1(SQSTM1) c2(NP_001135771) c3(sequestosome-1 isoform 2) c4( ) c5(53186, 53187, 53188, 53189, 53190, 53191, 53192, 53193, 53194, 53195, 53196, 53197, 53198, 53199, 53200, 53201, 53202, 53203, 53204, 53205, 53206, 53207, 53208, 53209, 53210, 53211, 53212) c6( ) c7(bM, T, fM, OI, if, jh, GC, To, v, Vd, ci, BF, aue, q, ad, eA, eJ, Kx, jz, py, aE, zw, WY, dE, oj, aT, bdM, h, K, an, Wr, nJ, ae, af, bc, d, mR, iU, aW, Y, ff, az, alR, eH, r, aq, aaE, dg, kp, CQ, en, g, eF, f, cm, iK, es, bb, kP, c, W, eM, iA, U, Kj, EY, bdR, bi, zu, bt, xg, B); #c1(SQSTM1) c2(NP_003891) c3(sequestosome-1 isoform 1) c4(141905, 141906, 141907, 141908, 141909) c5(141910, 141911, 141912, 141913, 141914, 141915, 141916, 141917, 141918, 141919, 141920) c6( ) c7(bM, T, fM, OI, if, jh, GC, To, v, Vd, ci, BF, aue, q, ad, eA, eJ, Kx, jz, py, aE, zw, WY, dE, oj, aT, bdM, h, K, an, Wr, nJ, ae, af, bc, d, mR, iU, aW, Y, ff, az, alR, eH, r, aq, aaE, dg, kp, CQ, en, g, eF, f, cm, iK, es, bb, kP, c, W, eM, iA, U, Kj, EY, bdR, bi, zu, bt, xg, B); #c1(SRA1) c2(NP_001030312) c3(steroid receptor RNA activator 1 isoform 1) c4(30998) c5(30999, 31000, 31001, 31002, 31003, 31004, 31005) c6( ) c7(T, axd, n, oH, ci, aNe, ad, aR, cF, ws, aT, dL, jj, XZ, ae, af, eL, xQ, pr, aW, fc, aq, EZ, cl, t, acD, bz, ck, aNd, at, mf, np, m, cP, kS, B); #c1(SRBD1) c2(NP_060549) c3(S1 RNA-binding domain-containing protein 1) c4(196515, 196516) c5(196517, 196518, 196519, 196520, 196521, 196522, 196523, 196524, 196525, 196526, 196527, 196528) c6( ) c7(dw, e, HQ, dH); #c1(SRC) c2(NP_005408) c3(proto-oncogene tyrosine-protein kinase Src) c4(155781, 155782) c5(155783, 155784, 155785, 155786, 155787, 155788, 155789, 155790, 155791, 155792, 155793, 155794, 155795, 155796, 155797, 155798, 155799, 155800, 155801, 155802, 155803, 155804, 155805, 155806) c6( ) c7(bL, T, dD, aC, ya, ow, azi, fG, zs, jh, aA, cz, bB, eq, ci, AO, iJ, q, ad, eA, zn, hX, eJ, iu, ft, ib, aE, afb, yt, pX, oW, aT, cU, IG, Ou, dL, h, ox, ji, fb, pq, ae, eu, VC, gj, d, B, iU, qt, aW, Y, ff, r, aq, aF, en, cl, as, t, cm, bz, Qt, bN, asE, ck, D, ac, eM, nB, dB, bE, bP, cj, at, pg, m, adg, zu, bt, cB, X, hS); #c1(SRCAP) c2(NP_006653) c3(helicase SRCAP) c4(166912, 166913, 166914, 166915) c5(166916, 166917, 166918, 166919, 166920, 166921, 166922, 166923, 166924, 166925, 166926, 166927, 166928, 166929, 166930, 166931, 166932, 166933, 166934, 166935, 166936, 166937, 166938, 166939, 166940, 166941, 166942, 166943, 166944, 166945) c6( ) c7(ck, qK, all, aVB, ae, ad); #c1(SRCIN1) c2(NP_079524) c3(SRC kinase signaling inhibitor 1) c4(218597, 218598, 218599) c5(218600, 218601, 218602, 218603, 218604, 218605, 218606, 218607, 218608, 218609, 218610, 218611, 218612, 218613, 218614, 218615, 218616, 218617) c6( ) c7(ac, il, eZ, aT, bz, iu); #c1(SRD5A1) c2(XP_011512405) c3(3-oxo-5-alpha-steroid 4-dehydrogenase 1 isoform X1) c4(303092, 303093) c5(303094, 303095, 303096, 303097, 303098, 303099, 303100, 303101, 303102, 303103, 303104) c6( ) c7(bL, G, T, aZ, iW, adW, n, v, Fb, ci, Ns, bX, avO, eA, ad, dP, aex, il, dv, aT, PD, uV, ae, ael, kl, bf, Ln, aW, fc, PA, Pp, g, PF, bN, pu, kP, ag, aez, m, cP, gT, B); #c1(SRD5A2) c2(XP_011531370) c3(3-oxo-5-alpha-steroid 4-dehydrogenase 2 isoform X1) c4( ) c5(327376) c6( ) c7(bL, G, T, aZ, bbn, jx, adW, n, aj, Ns, bX, avO, ad, dP, aej, F, aex, vJ, aT, UD, ae, af, aeQ, ael, yi, kl, UL, Ln, Ub, aW, hl, aq, Pp, cl, iR, t, bN, gk, pu, UB, hL, aez, aeM, gv, m, B); #c1(SRD5A3) c2(NP_078868) c3(polyprenol reductase) c4(215847) c5(215848, 215849, 215850, 215851, 215852, 215853) c6( ) c7(cIU, ky, dv, Km, nA, oQ, cIT, ae, LS, ad); #c1(SREBF1) c2(NP_001005291) c3(sterol regulatory element-binding protein 1 isoform a) c4(21322, 21323, 21324) c5(21325, 21326, 21327, 21328, 21329, 21330, 21331, 21332, 21333, 21334, 21335, 21336, 21337) c6( ) c7(bL, T, dD, fM, tS, eR, aoq, ea, jx, cz, aj, v, j, eq, aY, gb, q, J, st, GK, ad, hX, LL, uT, ws, QJ, rC, aT, h, jy, K, bq, dQ, an, ae, af, hi, A, d, cH, aW, aBq, fc, r, dq, aq, cl, GR, JP, au, bo, hL, dy, Fw, cP, du, ei, B, vQ); #c1(SREBF1) c2(NP_004167) c3(sterol regulatory element-binding protein 1 isoform b) c4(144014, 144015, 144016, 144017) c5(144018, 144019, 144020, 144021, 144022, 144023, 144024, 144025, 144026, 144027, 144028, 144029, 144030, 144031, 144032, 144033, 144034, 144035, 144036) c6( ) c7(bL, T, dD, fM, tS, eR, aoq, ea, jx, cz, aj, v, j, eq, aY, gb, q, J, st, GK, ad, hX, LL, uT, ws, QJ, rC, aT, h, jy, K, bq, dQ, an, ae, af, hi, A, d, cH, aW, aBq, fc, r, dq, aq, cl, GR, JP, au, bo, hL, dy, Fw, cP, du, ei, B, vQ); #c1(SREBF1) c2(XP_005256829) c3(sterol regulatory element-binding protein 1 isoform X1) c4(274549) c5( ) c6( ) c7(bL, T, dD, fM, tS, eR, aoq, ea, jx, cz, aj, v, j, eq, aY, gb, q, J, st, GK, ad, hX, LL, uT, ws, QJ, rC, aT, h, jy, K, bq, dQ, an, ae, af, hi, A, d, cH, aW, aBg, fc, r, dq, aq, cl, GR, JP, au, bo, hL, dy, Fw, cP, du, ei, B, vQ); #c1(SREBF1) c2(XP_006721633) c3(sterol regulatory element-binding protein 1 isoform X2) c4(294120) c5(294121, 294122, 294123, 294124, 294125, 294126, 294127, 294128, 294129, 294130, 294131, 294132, 294133, 294134, 294135, 294136, 294137) c6( ) c7(bL, T, dD, fM, tS, eR, aoq, ea, jx, cz, aj, v, j, eq, aY, gb, q, J, st, GK, ad, hX, LL, uT, ws, QJ, rC, aT, h, jy, K, bq, dQ, an, ae, af, hi, A, d, cH, aW, aBq, fc, r, dq, aq, cl, GR, JP, au, bo, hL, dy, Fw, cP, du, ei, B, vQ); #c1(SREBF1) c2(XP_011522300) c3(sterol regulatory element-binding protein 1 isoform X3) c4(316973) c5(316974, 316975, 316976, 316977, 316978, 316979) c6( ) c7(bL, T, dD, fM, tS, eR, aoq, ea, jx, cz, aj, v, j, eq, aY, gb, q, J, st, GK, ad, hX, LL, uT, ws, QJ, rC, aT, h, jy, K, bq, dQ, an, ae, af, hi, A, d, cH, aW, aBq, fc, r, dq, aq, cl, GR, JP, au, bo, hL, dy, Fw, cP, du, ei, B, vQ); #c1(SREBF1) c2(XP_011522301) c3(sterol regulatory element-binding protein 1 isoform X4) c4( ) c5(316980, 316981, 316982, 316983, 316984, 316985) c6( ) c7(bL, T, dD, fM, tS, eR, aoq, ea, jx, cz, aj, v, j, eq, aY, gb, q, J, st, GK, ad, hX, LL, uT, ws, QJ, rC, aT, h, jy, K, bq, dQ, an, ae, af, hi, A, d, cH, aW, aBq, fc, r, dq, aq, cl, GR, JP, au, bo, hL, dy, Fw, cP, du, ei, B, vQ); #c1(SREBF2) c2(NP_004590) c3(sterol regulatory element-binding protein 2) c4(147975, 147976, 147977) c5(147978, 147979, 147980, 147981, 147982, 147983, 147984, 147985, 147986, 147987, 147988, 147989, 147990, 147991, 147992, 147993, 147994, 147995, 147996) c6( ) c7(T, dD, ZP, eR, ea, aw, aA, cz, aj, v, j, eq, aY, gb, J, ad, dY, aT, h, dL, K, dQ, ae, af, eL, bFd, cH, cW, aW, hI, r, cm, iO, cO, gZ, nT, mf, cS, m, dy, du, va, ei, B, ek); #c1(SREBF2) c2(XP_011528649) c3(sterol regulatory element-binding protein 2 isoform X2) c4(323924) c5(323925, 323926, 323927, 323928, 323929, 323930) c6( ) c7(T, dD, ZP, eR, ea, aw, aA, cz, aj, v, j, eq, aY, gb, J, ad, dY, aT, h, dL, K, dQ, ae, af, eL, bFd, cH, cW, aW, hI, r, cm, iO, cO, gZ, nT, mf, cS, m, dy, du, va, ei, B, ek); #c1(SREK1) c2(NP_001070667) c3(splicing regulatory glutamine/lysine-rich protein 1 isoform a) c4(34767) c5( ) c6( ) c7(af); #c1(SREK1) c2(NP_001257421) c3(splicing regulatory glutamine/lysine-rich protein 1 isoform c) c4(95415) c5(95416, 95417, 95418, 95419, 95420) c6( ) c7(af); #c1(SREK1) c2(NP_631907) c3(splicing regulatory glutamine/lysine-rich protein 1 isoform b) c4(238303) c5( ) c6( ) c7(af); #c1(SREK1) c2(XP_005248499) c3(splicing regulatory glutamine/lysine-rich protein 1 isoform X5) c4( ) c5(268430, 268431, 268432, 268433, 268434, 268435) c6( ) c7(af); #c1(SREK1) c2(XP_011541472) c3(splicing regulatory glutamine/lysine-rich protein 1 isoform X3) c4(340051) c5(340052, 340053, 340054, 340055, 340056, 340057, 340058, 340059, 340060, 340061, 340062, 340063, 340064) c6( ) c7(af); #c1(SREK1IP1) c2(NP_776190) c3(protein SREK1IP1) c4(250964) c5(250965, 250966, 250967, 250968, 250969) c6( ) c7(af); #c1(SRF) c2(NP_001278930) c3(serum response factor isoform 2) c4( ) c5(111058, 111059, 111060, 111061, 111062) c6( ) c7(T, aCh, AS, Am, ha, Xi, aFc, aA, cz, n, bS, et, aql, cd, ad, md, cc, MR, aEX, sN, Db, aRD, h, iY, Ex, K, IQ, AN, ae, af, dl, JU, cr, Z, QK, pb, wT, nM, ac, eM, mx, aS, y, cB, B); #c1(SRF) c2(NP_003122) c3(serum response factor isoform 1) c4(135471, 135472) c5(135473, 135474, 135475, 135476, 135477, 135478, 135479, 135480) c6( ) c7(T, aCh, AS, Am, ha, Xi, aFc, aA, cz, n, bS, et, aql, cd, ad, md, cc, MR, aEX, sN, Db, aRD, h, iY, Ex, K, IQ, AN, ae, af, dl, JU, cr, Z, QK, pb, wT, nM, ac, eM, mx, aS, y, cB, B); #c1(SRFBP1) c2(NP_689759) c3(serum response factor-binding protein 1) c4(243888) c5(243889, 243890, 243891, 243892, 243893, 243894) c6( ) c7(iu, ci, T, cd, dx); #c1(SRGAP1) c2(NP_065813) c3(SLIT-ROBO Rho GTPase-activating protein 1) c4(205671) c5(205672, 205673, 205674, 205675, 205676, 205677) c6( ) c7(nA); #c1(SRGAP1) c2(XP_005269099) c3(SLIT-ROBO Rho GTPase-activating protein 1 isoform X1) c4(282299) c5(282300, 282301, 282302, 282303, 282304, 282305) c6( ) c7(nA); #c1(SRGAP2) c2(NP_001287881) c3(SLIT-ROBO Rho GTPase-activating protein 2 isoform d) c4(113118) c5(113119, 113120, 113121, 113122, 113123, 113124) c6( ) c7(kh, ZH, c, CN, bP, aW, Y, aT, Lb, nA); #c1(SRGAP2) c2(NP_056141) c3(SLIT-ROBO Rho GTPase-activating protein 2 isoform a) c4(185916, 185917, 185918) c5(185919, 185920, 185921, 185922, 185923, 185924, 185925, 185926, 185927, 185928, 185929, 185930) c6( ) c7(kh, ZH, c, CN, bP, aW, Y, aT, Lb, nA); #c1(SRGAP2) c2(XP_011507658) c3(SLIT-ROBO Rho GTPase-activating protein 2 isoform X6) c4(297601, 297602) c5(297603) c6( ) c7(kh, ZH, c, CN, bP, aW, Y, aT, Lb, nA); #c1(SRGAP2) c2(XP_011507660) c3(SLIT-ROBO Rho GTPase-activating protein 2 isoform X7) c4( ) c5(297604, 297605, 297606, 297607, 297608, 297609, 297610, 297611, 297612, 297613, 297614) c6( ) c7(kh, ZH, c, CN, bP, aW, Y, aT, Lb, nA); #c1(SRGAP2) c2(XP_011507661) c3(SLIT-ROBO Rho GTPase-activating protein 2 isoform X8) c4( ) c5(297615, 297616, 297617, 297618, 297619, 297620) c6( ) c7(kh, ZH, c, CN, bP, aW, Y, aT, Lb, nA); #c1(SRGAP3) c2(NP_001028289) c3(SLIT-ROBO Rho GTPase-activating protein 3 isoform b) c4(30440) c5(30441, 30442, 30443, 30444, 30445, 30446) c6( ) c7(ZH, c, ac, CN, aW, aT, By, j, nA, an); #c1(SRGAP3) c2(NP_055665) c3(SLIT-ROBO Rho GTPase-activating protein 3 isoform a) c4(182620) c5(182621, 182622, 182623, 182624, 182625, 182626) c6( ) c7(ZH, c, ac, CN, aW, aT, By, j, nA, an); #c1(SRGAP3) c2(XP_011532602) c3(SLIT-ROBO Rho GTPase-activating protein 3 isoform X3) c4(328704) c5( ) c6( ) c7(ZH, c, ac, CN, aW, aT, By, j, nA, an); #c1(SRGAP3) c2(XP_011532604) c3(SLIT-ROBO Rho GTPase-activating protein 3 isoform X5) c4( ) c5(328705, 328706, 328707, 328708, 328709, 328710) c6( ) c7(ZH, c, ac, CN, aW, aT, By, j, nA, an); #c1(SRGN) c2(NP_002718) c3(serglycin precursor) c4(131392) c5(131393, 131394, 131395, 131396, 131397, 131398) c6( ) c7(T, dA, aE, aW, aT, it, fd, ey, K, qF, pz, jj, bt, kS); #c1(SRI) c2(NP_001243821) c3(sorcin isoform D) c4(91802) c5(91803, 91804, 91805, 91806, 91807, 91808) c6( ) c7(gV, T, afK, cd, eA, q, cc, xy, aT, K, rE, eG, hG, aW, bT, Pg, r, fq, ck, Mw, bt, iu, kG, qc); #c1(SRI) c2(NP_003121) c3(sorcin isoform A) c4(135470) c5( ) c6( ) c7(gV, T, afK, cd, eA, q, cc, xy, aT, K, rE, eG, hG, aW, bT, Pg, r, fq, ck, Mw, bt, iu, kG, qc); #c1(SRI) c2(NP_944490) c3(sorcin isoform B) c4(260622) c5(260623, 260624, 260625, 260626, 260627, 260628, 260629, 260630, 260631, 260632, 260633, 260634) c6( ) c7(gV, T, afK, cd, eA, q, cc, xy, aT, K, rE, eG, hG, aW, bT, Pg, r, fq, ck, Mw, bt, iu, kG, qc); #c1(SRL) c2(NP_001092284) c3(sarcalumenin precursor) c4(39515, 39516, 39517) c5(39518, 39519, 39520, 39521, 39522, 39523, 39524, 39525, 39526, 39527, 39528, 39529, 39530, 39531, 39532, 39533, 39534, 39535) c6( ) c7(bES, aj); #c1(SRMS) c2(NP_543013) c3(tyrosine-protein kinase Srms) c4(233251) c5(233252, 233253, 233254, 233255, 233256, 233257) c6( ) c7(aq, T, aT); #c1(SRP14) c2(NP_003125) c3(signal recognition particle 14 kDa protein) c4(135490) c5(135491, 135492, 135493, 135494, 135495, 135496) c6( ) c7(dx, Ea); #c1(SRP19) c2(NP_001191122) c3(signal recognition particle 19 kDa protein isoform 2) c4(81048) c5(81049, 81050, 81051, 81052, 81053, 81054) c6( ) c7(ac); #c1(SRP19) c2(NP_001191125) c3(signal recognition particle 19 kDa protein isoform 4) c4(81055) c5(81056, 81057, 81058, 81059, 81060) c6( ) c7(ac); #c1(SRP19) c2(NP_003126) c3(signal recognition particle 19 kDa protein isoform 1) c4(135497) c5(135498, 135499, 135500, 135501, 135502, 135503, 135504) c6( ) c7(ac); #c1(SRP68) c2(NP_001247431) c3(signal recognition particle subunit SRP68 isoform 2) c4(93581, 93582) c5(93583, 93584, 93585, 93586, 93587, 93588, 93589, 93590, 93591, 93592, 93593, 93594, 93595) c6( ) c7(Pk, Az, IQ); #c1(SRP68) c2(NP_001247432) c3(signal recognition particle subunit SRP68 isoform 3) c4( ) c5(93596, 93597, 93598, 93599, 93600) c6( ) c7(Pk, Az, IQ); #c1(SRP68) c2(NP_055045) c3(signal recognition particle subunit SRP68 isoform 1) c4(178529, 178530, 178531, 178532, 178533) c5(178534, 178535, 178536, 178537, 178538, 178539, 178540, 178541, 178542, 178543, 178544, 178545, 178546, 178547, 178548, 178549, 178550, 178551, 178552, 178553, 178554, 178555, 178556, 178557) c6( ) c7(Pk, Az, IQ); #c1(SRP72) c2(NP_001254651) c3(signal recognition particle subunit SRP72 isoform 2) c4(94790, 94791) c5(94792, 94793, 94794, 94795, 94796, 94797, 94798, 94799, 94800, 94801, 94802, 94803) c6( ) c7(bw, cIV, hr, bs); #c1(SRP72) c2(NP_008878) c3(signal recognition particle subunit SRP72 isoform 1) c4(169455) c5(169456, 169457, 169458, 169459, 169460, 169461) c6( ) c7(bw, clV, hr, bs); #c1(SRP9) c2(NP_001123912) c3(signal recognition particle 9 kDa protein isoform 1) c4(47984) c5(47985, 47986, 47987, 47988, 47989, 47990, 47991, 47992, 47993, 47994, 47995) c6( ) c7(X); #c1(SRP9) c2(NP_003124) c3(signal recognition particle 9 kDa protein isoform 2) c4(135481, 135482) c5(135483, 135484, 135485, 135486, 135487, 135488, 135489) c6( ) c7(X); #c1(SRPK1) c2(NP_003128) c3(SRSF protein kinase 1) c4(135505, 135506) c5(135507, 135508, 135509, 135510, 135511, 135512, 135513, 135514, 135515, 135516, 135517, 135518, 135519, 135520) c6( ) c7(iu, T, aC, iM, Dy, fR, s, vT, aW, Y, Qu, X, eM, aT, lo, je, m, t, q, cp, hX); #c1(SRPK2) c2(NP_872633) c3(SRSF protein kinase 2 isoform b precursor) c4(256591) c5(256592, 256593, 256594, 256595, 256596) c6( ) c7(ck, iu, fR, eM, Qu, Io, IR, bt, fq, pb, hX); #c1(SRPK2) c2(NP_872634) c3(SRSF protein kinase 2 isoform a) c4(256597) c5( ) c6( ) c7(ck, iu, fR, eM, Qu, Io, IR, bt, fq, pb, hX); #c1(SRPK2) c2(XP_011514836) c3(SRSF protein kinase 2 isoform X4) c4( ) c5(307566, 307567, 307568, 307569, 307570, 307571, 307572, 307573, 307574, 307575, 307576, 307577, 307578, 307579, 307580, 307581) c6( ) c7(ck, iu, fR, eM, Qu, Io, IR, bt, fq, pb, hX); #c1(SRPK2) c2(XP_011514840) c3(SRSF protein kinase 2 isoform X2) c4(307582) c5( ) c6( ) c7(ck, iu, fR, eM, Qu, Io, IR, bt, fq, pb, hX); #c1(SRPK2) c2(XP_011514841) c3(SRSF protein kinase 2 isoform X10) c4( ) c5(307583) c6( ) c7(ck, iu, fR, eM, Qu, Io, IR, bt, fq, pb, hX); #c1(SRPR) c2(NP_001171313) c3(signal recognition particle receptor subunit alpha isoform 2) c4(70041) c5(70042, 70043, 70044, 70045, 70046, 70047) c6( ) c7(es, Us); #c1(SRPR) c2(NP_003130) c3(signal recognition particle receptor subunit alpha isoform 1) c4(135521) c5(135522, 135523, 135524, 135525, 135526, 135527) c6( ) c7(es, Us); #c1(SRPRB) c2(NP_067026) c3(signal recognition particle receptor subunit beta) c4(208503, 208504) c5(208505, 208506, 208507, 208508, 208509, 208510, 208511, 208512, 208513, 208514, 208515, 208516) c6( ) c7(aW, X, B, eA); #c1(SRPX) c2(NP_001164221) c3(sushi repeat-containing protein SRPX isoform 2 precursor) c4(66822) c5(66823, 66824, 66825, 66826, 66827, 66828, 66829, 66830, 66831, 66832, 66833, 66834) c6( ) c7(T, bS, ey, ci, et, g, Z, nC, hq); #c1(SRPX) c2(NP_001164222) c3(sushi repeat-containing protein SRPX isoform 3 precursor) c4(66835) c5(66836, 66837, 66838, 66839, 66840, 66841) c6( ) c7(T, bS, ey, ci, et, g, Z, nC, hq); #c1(SRPX) c2(NP_001164223) c3(sushi repeat-containing protein SRPX isoform 4 precursor) c4(66842) c5(66843, 66844, 66845, 66846, 66847, 66848) c6( ) c7(T, bS, ey, ci, et, g, Z, nC, hq); #c1(SRPX) c2(NP_006298) c3(sushi repeat-containing protein SRPX isoform 1 precursor) c4(163802, 163803) c5(163804, 163805, 163806, 163807, 163808, 163809) c6( ) c7(T, bS, ey, ci, et, g, Z, nC, hq); #c1(SRPX2) c2(XP_005262178) c3(sushi repeat-containing protein SRPX2 isoform X1) c4(277767) c5(277768, 277769, 277770, 277771, 277772, 277773) c6( ) c7(T, bwZ, hF, oe, ha, gX, r, VT, aA, akf, aF, nA, KU, g, clW, q); #c1(SRR) c2(XP_011522276) c3(serine racemase isoform X1) c4(316947) c5(316948, 316949, 316950, 316951, 316952, 316953) c6( ) c7(bL, dP, bM, c, wO, e, eZ, aj, DG, fD, J, eK); #c1(SRRM1) c2(NP_001290377) c3 (serine/arginine repetitive matrix protein 1 isoform 1) c4(115324) c5( ) c6( ) c7(aPF); #c1(SRRM1) c2(XP_011538784) c3 (serine/arginine repetitive matrix protein 1 isoform X8) c4( ) c5(336518, 336519) c6( ) c7(aPF); #c1(SRRM1) c2(XP_011538785) c3 (serine/arginine repetitive matrix protein 1 isoform X9) c4(336520) c5(336521, 336522, 336523, 336524, 336525, 336526, 336527, 336528, 336529, 336530, 336531, 336532, 336533, 336534, 336535, 336536) c6( ) c7(aPF); #c1(SRRM2) c2(NP_057417) c3 (serine/arginine repetitive matrix protein 2) c4(190677) c5(190678, 190679, 190680, 190681, 190682, 190683, 190684, 190685, 190686, 190687, 190688, 190689, 190690, 190691, 190692, 190693, 190694, 190695, 190696) c6( ) c7(bM, T, aC, ha, jh, aA, bB, tc, TM, Vd, ci, nA, IR, fr, hF, eA, aR, ad, hX, eW, ft, aE, WY, ds, SV, aT, kf, Ak, dV, h, K, an, brV, fb, ae, af, dx, iL, d, vT, aW, Y, ff, eZ, nf, aq, aaE, aF, Ku, en, iR, bz, pb, QA, bN, dR, ck, rR, kP, c, eM, bE, Qu, dh, mx, U, aEs, rx, xh, arg, B); #c1(SRRM2) c2(XP_005255283) c3 (serine/arginine repetitive matrix protein 2 isoform X1) c4(273582, 273583) c5(273584) c6( ) c7(bM, T, aC, ha, jh, aA, bB, tc, TM, Vd, ci, nA, IR, fr, hF, eA, aR, ad, hX, eW, ft, aE, WY, ds, SV, aT, kf, Ak, dV, h, K, an, brV, fb, ae, af, dx, iL, d, vT, aW, Y, ff, eZ, nf, aq, aaE, aF, Ku, en, iR, bz, pb, QA, bN, dR, ck, rR, kP, c, eM, bE, Qu, dh, mx, U, aEs, rx, xh, arg, B); #c1(SRRM2) c2(XP_005255284) c3 (serine/arginine repetitive matrix protein 2 isoform X2) c4(273585, 273586, 273587) c5(273588, 273589, 273590, 273591, 273592, 273593, 273594, 273595, 273596, 273597, 273598, 273599, 273600, 273601, 273602, 273603, 273604, 273605, 273606) c6( ) c7(bM, T, aC, ha, jh, aA, bB, tc, TM, Vd, ci, nA, IR, fr, hF, eA, aR, ad, hX, eW, ft, aE, WY, ds, SV, aT, kf, Ak, dV, h, K, an, brV, fb, ae, af, dx, iL, d, vT, aW, Y, ff, eZ, nf, aq, aaE, aF, Ku, en, iR, bz, pb, QA, bN, dR, ck, rR, kP, c, eM, bE, Qu, dh, mx, U, aEs, rx, xh, arg, B); #c1(SRRM2) c2(XP_011520745) c3 (serine/arginine repetitive matrix protein 2 isoform X4) c4( ) c5(315762) c6( ) c7(bM, T, aC, ha, jh, aA, bB, tc, TM, Vd, ci, nA, IR, fr, hF, eA, aR, ad, hX, eW, ft, aE, WY, ds, SV, aT, kf, Ak, dV, h, K, an, brV, fb, ae, af, dx, iL, d, vT, aW, Y, ff, eZ, nf, aq, aaE, aF, Ku, en, iR, bz, pb, QA, bN, dR, ck, rR, kP, c, eM, bE, Qu, dh, mx, U, aEs, rx, xh, arg, B); #c1(SRRM4) c2(NP_919262) c3 (serine/arginine repetitive matrix protein 4) c4(258347) c5(258348, 258349, 258350, 258351, 258352, 258353, 258354) c6( ) c7(ft); #c1(SRRM4) c2(XP_011537157) c3 (serine/arginine repetitive matrix protein 4 isoform X1) c4( ) c5(334917, 334918, 334919) c6( ) c7(ft); #c1(SRRT) c2(XP_005250462) c3(serrate RNA effector molecule homolog isoform X1) c4(270323) c5(270324, 270325, 270326, 270327, 270328, 270329) c6( ) c7(jz, bO); #c1(SRRT) c2(XP_005250463) c3(serrate RNA effector molecule homolog isoform X2) c4(270330, 270331) c5(270332, 270333, 270334, 270335, 270336, 270337, 270338, 270339) c6( ) c7(jz, bO); #c1(SRRT) c2(XP_005250464) c3(serrate RNA effector molecule homolog isoform X3) c4(270340) c5(270341, 270342, 270343, 270344, 270345, 270346) c6( ) c7(jz, bO); #c1(SRRT) c2(XP_005250465) c3(serrate RNA effector molecule homolog isoform X4) c4(270347, 270348) c5(270349, 270350, 270351, 270352, 270353, 270354) c6( ) c7(jz, bO); #c1(SRRT) c2(XP_006716086) c3(serrate RNA effector molecule homolog isoform X6) c4( ) c5(290025, 290026, 290027, 290028, 290029) c6( ) c7(jz, bO); #c1(SRRT) c2(XP_011514593) c3(serrate RNA effector molecule homolog isoform X5) c4( ) c5(307301, 307302, 307303, 307304, 307305) c6( ) c7(jz, bO); #c1(SRSF1) c2(NP_001071634) c3 (serine/arginine-rich splicing factor 1 isoform 2) c4(35353) c5(35354, 35355, 35356, 35357, 35358, 35359) c6( ) c7(T, hF, q, av, Ig, ds, rC, aT, kf, h, on, cp, iU, aW, ff, ahk, lb, eZ, r, aq, Io, en, iR, cm, bz, ck, es, ac, eM, iA, Qu, iu); #c1(SRSF1) c2(NP_008855) c3 (serine/arginine-rich splicing factor 1 isoform 1) c4(169138) c5(169139, 169140, 169141, 169142, 169143, 169144) c6( ) c7(T, hF, q, av, Ig, ds, rC, aT, kf, h, on, cp, iU, aW, ff, ahk, lb, eZ, r, aq, Io, en, iR, cm, bz, ck, es, ac, eM, iA, Qu, iu); #c1(SRSF10) c2(NP_001287865) c3 (serine/arginine-rich splicing factor 10 isoform 8) c4(113095) c5(113096, 113097, 113098, 113099, 113100, 113101) c6( ) c7(t, kl, hL); #c1(SRSF11) c2(XP_011540729) c3 (serine/arginine-rich splicing factor 11 isoform X1) c4(339290, 339291) c5( ) c6( ) c7(q, ci); #c1(SRSF11) c2(XP_011540733) c3 (serine/arginine-rich splicing factor 11 isoform X4) c4( ) c5(339292, 339293, 339294, 339295, 339296, 339297) c6( ) c7(q, ci); #c1(SRSF11) c2(XP_011540735) c3 (serine/arginine-rich splicing factor 11 isoform X7) c4( ) c5(339298) c6( ) c7(q, ci); #c1(SRSF12) c2(NP_542781) c3 (serine/arginine-rich splicing factor 12) c4(233056) c5(233057, 233058, 233059, 233060, 233061, 233062) c6( ) c7(af); #c1(SRSF2) c2(NP_001182356) c3 (serine/arginine-rich splicing factor 2) c4(74824, 74825, 74826, 74827, 74828) c5(74829, 74830, 74831, 74832, 74833, 74834, 74835, 74836, 74837, 74838, 74839, 74840, 74841, 74842, 74843, 74844, 74845, 74846, 74847, 74848, 74849, 74850, 74851, 74852, 74853, 74854, 74855, 74856, 74857, 74858) c6( ) c7(T, atk, jh, bs, ol, ci, nA, zP, hr, x, av, Hx, b, iu, h, zp, on, pq, ajU, zQ, xX, ahk, bw, bz, yR, dR, ck, c, SE, Qu, eM, wl, pg, i, bt, B); #c1(SRSF3) c2(NP_003008) c3 (serine/arginine-rich splicing factor 3) c4(134393, 134394) c5(134395, 134396, 134397, 134398, 134399, 134400, 134401, 134402, 134403, 134404, 134405, 134406) c6( ) c7(T, PZ, bE, aqJ, ds, EQ, bB, cm, bK, m, bNL, hf, t, dr); #c1(SRSF4) c2(XP_011540253) c3 (serine/arginine-rich splicing factor 4 isoform X1) c4( ) c5(338655, 338656, 338657, 338658, 338659, 338660, 338661, 338662, 338663, 338664, 338665, 338666, 338667, 338668, 338669, 338670, 338671, 338672, 338673) c6( ) c7(pt, dF, B, vi); #c1(SRSF5) c2(XP_005268055) c3 (serine/arginine-rich splicing factor 5 isoform X1) c4(281427) c5( ) c6( ) c7(T, uK, Ew, iq, pZ, bE, aW, Ls, ahk, hI, lb, aT, eX, eV, ajM, bS, et, Z, ae, HO, ad); #c1(SRSF5) c2(XP_005268057) c3 (serine/arginine-rich splicing factor 5 isoform X2) c4(281428) c5(281429, 281430, 281431, 281432, 281433, 281434, 281435, 281436, 281437, 281438, 281439, 281440, 281441, 281442, 281443, 281444, 281445, 281446, 281447, 281448) c6( ) c7(T, uK, Ew, iq, pZ, bE, aW, Ls, ahk, hI, lb, aT, eX, eV, ajM, bS, ct, Z, ae, HO, ad); #c1(SRSF6) c2(NP_006266) c3 (serine/arginine-rich splicing factor 6) c4(163436) c5(163437, 163438, 163439, 163440, 163441, 163442) c6( ) c7(T, bE, yk, ahk, rC, aT, bB, pt); #c1(SRSF7) c2(NP_001026854) c3 (serine/arginine-rich splicing factor 7 isoform 1) c4(29661) c5( ) c6( ) c7(U); #c1(SRSF7) c2(NP_001182375) c3 (serine/arginine-rich splicing factor 7 isoform 2) c4(74874) c5( ) c6( ) c7(U); #c1(SRSF7) c2(XP_005264542) c3 (serine/arginine-rich splicing factor 7 isoform X2) c4( ) c5(279004, 279005, 279006, 279007, 279008, 279009, 279010, 279011, 279012, 279013, 279014, 279015) c6( ) c7(U); #c1(SRSF9) c2(NP_003760) c3 (serine/arginine-rich splicing factor 9) c4(140657) c5(140658, 140659, 140660, 140661, 140662, 140663) c6( ) c7(h, pt, bb, pZ); #c1(SRXN1) c2(NP_542763) c3(sulfirednxin-1) c4(233022) c5(233023, 233024, 233025, 233026, 233027, 233028) c6( ) c7(aW, fr, K, aT); #c1(SRY) c2(NP_003131) c3(sex-determining region Y protein) c4(135528, 135529, 135530) c5(135531, 135532, 135533, 135534, 135535, 135536, 135537, 135538, 135539, 135540, 135541, 135542, 135543, 135544, 135545, 135546, 135547, 135548, 135549) c6( ) c7(bfh, T, gU, Ke, acz, aec, cz, adW, n, aj, v, clX, eh, bjN, Fb, IR, UI, cIY, q, J, ad, KL, hX, er, BI, ft, aeZ, aE, cIZ, vJ, PL MP, aT, FN, bff, vH, UD, rO, PD, h, brV, ae, cIK, UF, aeT, UL, ND, bgA, bfg, aHW, aeC, aek, xs, Y, aW, r, pr, aGb, ff, Pp, Ku, en, cm, pb, Qi, kc, Uu, aeB, Qu, afe, eB, uo, Ux, Uw, Le, KY, B, y); #c1(SS18) c2(NP_001007560) c3(protein SSXT isoform 1) c4(22795, 22796, 22797, 22798, 22799) c5(22800, 22801, 22802, 22803, 22804, 22805, 22806, 22807, 22808, 22809, 22810, 22811) c6( ) c7(jf, bv, T, bIC, aNA, Qf, QG, n, cJa, hP, bu, iJ, dx); #c1(SS18) c2(NP_005628) c3(protein SSXT isoform 2) c4(158080, 158081) c5(158082, 158083, 158084, 158085, 158086, 158087, 158088, 158089) c6( ) c7(jf, bv, T, bIC, aNA, Qf, QG, n, cJa, hP, bu, iJ, dx); #c1(SS18) c2(XP_006722590) c3(protein SSXT isoform X3) c4( ) c5(294757, 294758, 294759, 294760, 294761, 294762, 294763, 294764, 294765, 294766, 294767) c6( ) c7(jf, bv, T, bIC, aNA, Qf, QG, n, cJa, hP, bu, iJ, dx); #c1(SS18) c2(XP_011524454) c3(protein SSXT isoform X4) c4( ) c5(319041, 319042, 319043, 319044, 319045, 319046, 319047, 319048) c6( ) c7(jf, bv, T, bIC, aNA, Qf, QG, n, cJa, hP, bu, iJ, dx); #c1(SS18L1) c2(NP_945173) c3(calcium-responsive transactivator isoform 1) c4(260688) c5(260689, 260690, 260691, 260692, 260693, 260694, 260695, 260696, 260697, 260698) c6( ) c7(pb, Ck, ac, Y, eZ, dy, IS, IR, be, IG, iJ, bDY, lx); #c1(SS18L1) c2(XP_011527068) c3(calcium-responsive transactivator isoform X2) c4( ) c5(321507) c6( ) c7(pb, Ck, ac, Y, eZ, dy, IS, IR, be, IG, iJ, bDY, lx); #c1(SS18L1) c2(XP_011527069) c3(calcium-responsive transactivator isoform X3) c4(321508, 321509) c5(321510, 321511, 321512, 321513, 321514, 321515, 321516, 321517, 321518, 321519, 321520, 321521) c6( ) c7(pb, Ck, ac, Y, eZ, dy, IS, IR, bc, IG, iJ, bDY, lx); #c1(SSB) c2(NP_003133) c3(lupus La protein) c4(135565, 135566, 135567, 135568, 135569, 135570) c5(135571, 135572, 135573, 135574, 135575, 135576, 135577, 135578, 135579, 135580, 135581, 135582, 135583, 135584, 135585, 135586, 135587, 135588, 135589, 135590, 135591, 135592, 135593, 135594, 135595, 135596, 135597, 135598, 135599, 135600, 135601, 135602, 135603, 135604, 135605, 135606, 135607, 135608, 135609, 135610) c6( ) c7(Ob, gV, T, aFQ, jx, fN, ai, mC, hX, xy, rw, hD, IQ, dl, bc, bnX, hG, eZ, pb, uw, AH, dy, fL, y); #c1(SSBP1) c2(NP_001243442) c3(single-stranded DNA-binding protein, mitochondrial precursor) c4(90770, 90771, 90772, 90773) c5(90774, 90775, 90776, 90777, 90778, 90779, 90780, 90781, 90782, 90783, 90784, 90785, 90786, 90787, 90788, 90789, 90790, 90791, 90792, 90793, 90794, 90795, 90796, 90797, 90798, 90799, 90800, 90801, 90802, 90803, 90804, 90805, 90806, 90807, 90808, 90809, 90810, 90811, 90812, 90813, 90814, 90815, 90816, 90817, 90818, 90819, 90820, 90821, 90822, 90823, 90824, 90825) c6( ) c7(wr, Pk, xH, IQ, cm, eW); #c1(SSBP2) c2(NP_001243662) c3(single-stranded DNA-binding protein 2 isoform 3) c4(91321) c5(91322, 91323, 91324, 91325, 91326, 91327) c6( ) c7(ck, x, T, d, iT, iX, it, k, bt, ae, ad, sj); #c1(SSBP2) c2(NP_036578) c3(single-stranded DNA-binding protein 2 isoform 2) c4(174478, 174479) c5(174480, 174481, 174482, 174483, 174484, 174485, 174486, 174487, 174488, 174489, 174490, 174491) c6( ) c7(ck, x, T, d, iT, iX, it, k, bt, ae, ad, sj); #c1(SSFA2) c2(NP_001123917) c3(sperm-specific antigen 2 isoform 1) c4(48011) c5(48012, 48013, 48014, 48015, 48016, 48017) c6( ) c7(bB, bE, T, fd); #c1(SSFA2) c2(NP_001274432) c3(sperm-specific antigen 2 isoform 3) c4(106534) c5(106535) c6( ) c7(bB, bE, T, fd); #c1(SSFA2) c2(NP_001274433) c3(sperm-specific antigen 2 isoform 4) c4( ) c5(106536, 106537, 106538, 106539, 106540) c6( ) c7(bB, bE, T, fd); #c1(SSFA2) c2(NP_006742) c3(sperm-specific antigen 2 isoform 2) c4(167626) c5(167627, 167628, 167629, 167630, 167631, 167632) c6( ) c7(bB, bE, T, fd); #c1(SSH1) c2(NP_001154802) c3(protein phosphatase Slingshot homolog 1 isoform 2) c4(61080) c5(61081, 61082, 61083, 61084, 61085, 61086, 61087, 61088, 61089, 61090, 61091, 61092) c6( ) c7(eW, aQo, agH, aA); #c1(SSH1) c2(NP_001154803) c3(protein phosphatase Slingshot homolog 1 isoform 3) c4(61093) c5(61094, 61095, 61096, 61097, 61098, 61099, 61100) c6( ) c7(eW, aQo, agH, aA); #c1(SSH1) c2(NP_061857) c3(protein phosphatase Slingshot homolog 1 isoform 1) c4(200832, 200833) c5(200834, 200835, 200836, 200837, 200838, 200839) c6( ) c7(eW, aQo, agH, aA); #c1(SSH1) c2(XP_005269043) c3(protein phosphatase Slingshot homolog 1 isoform X7) c4(282261) c5(282262, 282263, 282264, 282265, 282266, 282267) c6( ) c7(eW, aQo, agH, aA); #c1(SSH2) c2(NP_001269058) c3(protein phosphatase Slingshot homolog 2 isoform 1) c4(100343) c5(100344, 100345, 100346, 100347, 100348, 100349) c6( ) c7(buL, hd, fr, ci, aA); #c1(SSH2) c2(NP_001269060) c3(protein phosphatase Slingshot homolog 2 isoform 4) c4(100350) c5(100351, 100352, 100353, 100354, 100355, 100356) c6( ) c7(buL, hd, fr, ci, aA); #c1(SSH2) c2(NP_203747) c3(protein phosphatase Slingshot homolog 2 isoform 2) c4(228475, 228476) c5(228477, 228478, 228479, 228480, 228481, 228482, 228483, 228484, 228485, 228486, 228487, 228488) c6( ) c7(buL, hd, fr, ci, aA); #c1(SSMEM1) c2(NP_660311) c3(serine-rich single-pass membrane protein 1) c4(240871) c5(240872, 240873, 240874, 240875, 240876, 240877) c6( ) c7(cd); #c1(SSNA1) c2(NP_003722) c3(Sjoegren syndrome nuclear autoantigen 1) c4(140444) c5(140445, 140446, 140447, 140448, 140449, 140450) c6( ) c7(pb, aFQ); #c1(SSPN) c2(NP_005077) c3(sarcospan isoform 1) c4(152666, 152667, 152668, 152669, 152670) c5(152671, 152672, 152673, 152674, 152675, 152676, 152677, 152678, 152679, 152680, 152681, 152682, 152683, 152684, 152685, 152686, 152687, 152688, 152689, 152690) c6( ) c7(cc, aD, xs, km, wR, fr, bgi); #c1(SSPN) c2(XP_011519157) c3(sarcospan isoform X1) c4( ) c5(313756, 313757, 313758, 313759, 313760, 313761, 313762, 313763, 313764, 313765, 313766, 313767, 313768, 313769) c6( ) c7(cc, aD, xs, km, wR, fr, bgi); #c1(SSP0) c2(NP_940857) c3(SCO-spondin precursor) c4( ) c5(259960, 259961, 259962, 259963, 259964, 259965, 259966, 259967, 259968, 259969, 259970, 259971, 259972, 259973, 259974, 259975, 259976) c6( ) c7(c); #c1(SSRI) c2(NP_003135) c3(translocon-associated protein subunit alpha isoform 1 precursor) c4(135611, 135612) c5(135613, 135614, 135615, 135616, 135617, 135618, 135619, 135620, 135621, 135622, 135623, 135624) c6( ) c7(T, avm, aW, ff, ht, eH, aT, aeV, ey, en, hu, eF); #c1(SSR2) c2(XP_011508225) c3(translocon-associated protein subunit beta isoform X2) c4(298858, 298859, 298860) c5(298861, 298862) c6( ) c7(cm, PX, ad); #c1(SSR2) c2(XP_011508226) c3(translocon-associated protein subunit beta isoform X1) c4( ) c5(298863, 298864, 298865, 298866, 298867, 298868, 298869, 298870, 298871, 298872, 298873, 298874, 298875, 298876, 298877, 298878, 298879, 298880, 298881, 298882) c6( ) c7(cm, PX, ad); #c1(SSRP1) c2(NP_003137) c3(FACT complex subunit SSRP1) c4(135625) c5(135626, 135627, 135628, 135629, 135630, 135631, 135632) c6( ) c7(ar, T, y, vJ, aW, eZ, aT, nm, Io, wb, fL, zC, C, aGj, KY, ae, ad); #c1(SSSCA1) c2(NP_006387) c3(Sjoegren syndrome/scleroderma autoantigen 1 isoform 1) c4(164567) c5(164568, 164569, 164570, 164571, 164572, 164573, 164574, 164575) c6(164576, 164577) c7(T, ea, if, fd, bB, ci, aE, il, Qk, K, eL, be, xQ, ye, aW, as, cm, bw, GR, eM, nB, dc, go, vA, cj, m, dD, NT, n, fr, qN, jz, h, dL, ge, aq, zZ, iO, bP, hR, it, B, fM, aoE, aA, q, eA, XX, aT, dz, ae, af, jf, s, iU, Y, r, en, cl, t, iK, pb, aEp, ck, nM, iM, dy, bt, On, hS, hi, Ke, pY, jh, eq, ad, hX, hd, ib, fb, d, je, et, ff, apb, aF, bz, bE, aS, EB); #c1(SST) c2(NP_001039) c3(somatostatin preproprotein) c4(34207) c5( ) c6( ) c7(T, aC, Th, cJb, bO, fd, bB, ci, Jx, ip, Vp, aE, pX, aeO, ye, aeR, JI, aW, Ls, az, LZ, g, as, cm, eM, nB, vA, vy, bmt, uJ, m, bBY, hh, gD, OF, xn, IT, wu, ht, aj, fr, ml, JW, eW, ke, ft, Do, h, jy, gl, vx, cly, bmu, ks, aq, Hu, mb, ar, bkn, W, cA, bpC, dB, Qu, hL, hR, anx, cB, B, bL, iH, jx, aA, cz, hy, C, il, pd, q, J, eA, mj, mP, aAF, nv, hb, aT, bK, ae, af, dl, CB, apL, jf, Uf, s, nO, Y, apK, r, en, cl, wA, t, iK, acp, bN, Ta, bNx, iW, jh, dG, oH, fu, OH, Fc, bfD, ad, dP, av, Tg, hd, iC, io, hD, Ti, hP, wm, fb, Yi, d, BN, IR, ff, aF, iV, bz, bF, OG, VO, mi, bE, AR, ra, y, xg, ne, Tc); #c1(SSTR1) c2(NP_001040) c3(somatostatin receptor type 1) c4(34224) c5( ) c6( ) c7(aC, IT, ha, aA, hy, eA, ad, mj, aE, mP, Dn, pX, aT, bq, fb, ae, Yi, yo, BN, s, aW, ks, aF, nB, hR, cB, ne); #c1(SSTR2) c2(NP_001041) c3(somatostatin receptor type 2) c4( ) c5( ) c6( ) c7(T, dD, aC, AS, IT, vf, ea, bXJ, ha, bB, hz, hy, v, eq, ci, il, JW, eA, ad, eJ, ip, av, tg, ft, mj, aE, mP, Do, nv, Sb, pX, aT, vg, hD, blg, Nf, AN, bg, fb, ae, Yi, jf, yo, B, BN, s, aW, ks, EZ, g, cm, OG, eM, nB, cj, hR, bmt, cB, ne); #c1(SSTR3) c2(XP_005261778) c3(somatostatin receptor type 3 isoform X1) c4(277605) c5(277606, 277607, 277608, 277609, 277610, 277611, 277612, 277613, 277614, 277615) c6( ) c7(T, aC, akd, fR, aA, ad, mj, hd, pX, aT, dL, bq, ae, yo, s, Jl, vj, aF, g, OG, nB, at, cB); #c1(SSTR4) c2(NP_001043) c3(somatostatin receptor type 4) c4(34342) c5(34343, 34344, 34345, 34346, 34347, 34348) c6( ) c7(bL, bM, T, iH, yk, hU, ha, cz, fd, v, ci, yp, ye, xY, cd, ad, eA, yn, av, mj, xW, aT, h, xV, Ex, K, yb, gl, bK, yh, yj, ae, yi, xX, d, xO, s, nO, aW, Y, yc, ahJ, yg, g, t, nC, bz, iK, iP, dR, jg, ok, yf, bP, yl, xZ, cj, tl, m, y, cB); #c1(SSTR5) c2(NP_001166031) c3(somatostatin receptor type 5) c4(68078, 68079) c5(68080, 68081, 68082, 68083, 68084, 68085, 68086, 68087, 68088, 68089, 68090, 68091, 68092, 68093, 68094, 68095) c6( ) c7(T, aC, IT, vf, mS, ci, OH, JW, ad, tg, mj, aE, Dn, mW, cJc, aT, vg, blg, bK, bg, mY, he, mV, ae, mU, yo, s, ahJ, g, mZ, bN, mX, OG, cA, AR, bmt, hR, cB, mT); #c1(SSUH2) c2(NP_001243677) c3(protein SSUH2 homolog isoform 1) c4(91346) c5(91347, 91348, 91349, 91350, 91351, 91352, 91353, 91354) c6( ) c7(iP); #c1(SSUH2) c2(NP_057015) c3(protein SSUH2 homolog isoform 3) c4(188515, 188516) c5(188517, 188518, 188519, 188520, 188521, 188522, 188523, 188524, 188525, 188526, 188527, 188528, 188529, 188530, 188531, 188532) c6( ) c7(iP); #c1(SSUH2) c2(XP_011532076) c3(protein SSUH2 homolog isoform X1) c4(328133) c5(328134, 328135, 328136, 328137) c6( ) c7(iP); #c1(SSUH2) c2(XP_011532077) c3(protein SSUH2 homolog isoform X2) c4( ) c5(328138, 328139) c6( ) c7(iP); #c1(SSX1) c2(NP_005626) c3(protein SSX1) c4(158062, 158063) c5(158064, 158065, 158066, 158067, 158068, 158069, 158070, 158071, 158072, 158073, 158074, 158075, 158076, 158077, 158078, 158079) c6( ) c7(ck, T, bIC, Qf, af, Y, fd, bX, bu, iJ, B); #c1(SSX2B) c2(NP_001157889) c3(protein SSX2 isoform b) c4(62865, 62866) c5(62867, 62868, 62869, 62870, 62871, 62872, 62873, 62874, 62875, 62876, 62877, 62878, 62879, 62880, 62881) c6( ) c7(T, aNA, wu, ht, jh, fd, bB, iJ, aHy, ad, bv, aT, hP, K, wm, hu, ae, aW, Y, eH, r, bu, eF, bIC, QG, Qf, iT, cJa, bt); #c1(SSX2B) c2(NP_001265630) c3(protein SSX2 isoform a) c4(99057) c5(99058, 99059, 99060, 99061, 99062, 99063, 99064, 99065, 99066, 99067, 99068, 99069) c6( ) c7(T, aNA, wu, ht, jh, fd, bB, iJ, aHy, ad, bv, aT, hP, K, wm, hu, ae, aW, Y, eH, r, bu, eF, bIC, QG, Qf, iT, cJa, bt); #c1(SSX2IP) c2(XP_011538914) c3(afadin- and alpha-actinin-binding protein isoform X4) c4(336975, 336976) c5(336977, 336978, 336979, 336980, 336981, 336982, 336983, 336984, 336985, 336986, 336987, 336988) c6( ) c7(ey, j); #c1(SSX4B) c2(NP_001030004) c3(protein SSX4 isoform a) c4(30805) c5(30806, 30807, 30808, 30809, 30810, 30811, 30812, 30813, 30814, 30815, 30816) c6( ) c7(T, dB, Y, fd, bX, bu, iJ); #c1(SSX4B) c2(NP_001035702) c3(protein SSX4 isoform b) c4(32959) c5(32960, 32961, 32962, 32963, 32964, 32965, 32966, 32967, 32968, 32969) c6( ) c7(T, dB, Y, fd, bX, bu, iJ); #c1(SSX5) c2(NP_066295) c3(protein SSX5 isoform a) c4(207122) c5(207123, 207124, 207125, 207126, 207127, 207128, 207129) c6( ) c7(T, B, Y); #c1(SSX5) c2(XP_011542251) c3(protein SSX5 isoform X1) c4(340766, 340767) c5(340768, 340769, 340770, 340771, 340772, 340773, 340774, 340775, 340776, 340777, 340778, 340779, 340780, 340781, 340782, 340783, 340784, 340785, 340786) c6( ) c7(T, B, Y); #c1(ST13) c2(NP_003923) c3(hsc70-interacting protein isoform 1) c4(142184, 142185, 142186, 142187) c5(142188, 142189, 142190, 142191, 142192, 142193, 142194, 142195, 142196, 142197, 142198, 142199, 142200, 142201, 142202, 142203, 142204, 142205, 142206, 142207, 142208, 142209, 142210, 142211) c6( ) c7(bL, T, id, it, bB, aj, v, q, J, ad, eA, ft, anl, ds, hi, K, jj, aVV, zy, ae, d, Y, ff, CT, r, aq, en, g, bz, bE, cj, kS, B); #c1(ST14) c2(NP_068813) c3(suppressor of tumorigenicity 14 protein) c4(210785) c5(210786, 210787, 210788, 210789, 210790, 210791) c6( ) c7(T, dD, ea, sM, bB, eq, ci, nA, qN, fr, cJd, eA, ad, ds, qh, gd, aT, oj, fn, ji, ae, dF, sb, aW, ev, ff, xs, hI, fe, aq, aEW, Ku, Pd, en, t, g, bz, iV, alu, aUJ, bE, wE, gX, Fw, m, bD, vi); #c1(ST18) c2(NP_055497) c3(suppression of tumorigenicity 18 protein) c4(181548, 181548) c5(181550, 181551, 181552, 181553, 181554, 181555, 181556, 181557, 181558, 181559, 181560, 181561, 181562, 181563, 181564, 181565, 181566, 181567) c6( ) c7(aW, WP, aT, sa, iu, IJ); #c1(ST20) c2(NP_001094349) c3(suppressor of tumorigenicity 20 protein) c4(40687) c5(40688, 40689, 40690, 40691, 40692, 40693, 40694, 40695, 40696, 40697) c6( ) c7(T, if, r, aq, q, qN, iR, B); #c1(ST3GALI) c2(XP_005251082) c3(CMP-N-acetylneuraminate-beta-galactosamide-alpha-2,3-sialyltransferase 1 isoform X1) c4(270750, 270751, 270752, 270753) c5(270754, 270755, 270756, 270757, 270758, 270759, 270760, 270761, 270762, 270763, 270764, 270765, 270766, 270767, 270768, 270769, 270770, 270771, 270772, 270773, 270774, 270775, 270776, 270777, 270778, 270779, 270780, 270781, 270782, 270783, 270784, 270785, 270786, 270787, 270788, 270789, 270790, 270791, 270792, 270793, 270794, 270795, 270796, 270797, 270798, 270799, 270800) c6(270801, 270802, 270803) c7(T, oe, n, ci, ade, cd, ad, dY, aT, hD, dL, bK, eL, af, ae, sj, aW, gl, agF, t, pb, ac, m, cn); #c1(ST3GAL2) c2(NP_008858) c3(CMP-N-acetylneuraminate-beta-galactosamide-alpha-2,3-sialyltransferase 2) c4(169145) c5(169146, 169147, 169148, 169149, 169150, 169151, 169152, 169153, 169154, 169155, 169156, 169157, 169158, 169159) c6(169160, 169161, 169162, 169163) c7(ae, ad, ati); #c1(ST3GAL4) c2(NP_001241687) c3(CMP-N-acetylneuraminate-beta-galactosamide-alpha-2,3-sialyltransferase 4 isoform 2) c4(89055, 89056) c5(89057, 89058, 89059, 89060, 89061, 89062, 89063, 89064, 89065, 89066, 89067, 89068, 89069, 89070, 89071, 89072, 89073, 89074, 89075, 89076, 89077, 89078, 89079, 89080, 89081, 89082, 89083, 89084, 89085, 89086, 89087, 89088, 89089, 89090) c6(89091, 89092, 89093, 89094, 89095, 89096, 89097, 89098, 89099, 89100) c7(eJ, bE, LG, Y, if, qK, cn, r, cy, aj, dG, j, ci, ade, qN, fr, lC, B, J, cp, uX); #c1(ST3GAL4) c2(NP_001241688) c3(CMP-N-acetylneuraminate-beta-galactosamide-alpha-2,3-sialyltransferase 4 isoform 3 precursor) c4(89101) c5(89102, 89103, 89104, 89105, 89106, 89107, 89108, 89109, 89110, 89111, 89112, 89113, 89114, 89115, 89116, 89117) c6(89118, 89119, 89120, 89121) c7(eJ, bE, LG, Y, if, qK, cn, r, cy, aj, dG, j, ci, ade, qN, fr, lC, B, J, cp, uX); #c1(ST3GAL4) c2(NP_006269) c3(CMP-N-acetylneuraminate-beta-galactosamide-alpha-2,3-sialyltransferase 4 isoform 1 precursor) c4(163451, 163452) c5(163453, 163454, 163455, 163456, 163457, 163458, 163459, 163460, 163461, 163462, 163463, 163464, 163465, 163466) c6(163467, 163468) c7(eJ, bE, LG, Y, if, qK, cn, r, cy, aj, dG, j, ci, ade, qN, fr, lC, B, J, cp, uX); #c1(ST3GAL5) c2(NP_001035902) c3(lactosylceramide alpha-2,3-sialyltransferase isoform 2) c4(33346) c5(33347, 33348, 33349, 33350, 33351, 33352, 33353, 33354, 33355, 33356, 33357) c6( ) c7(y, ha, ey, m, t, cJe); #c1(ST3GAL5) c2(NP_003887) c3(lactosylceramide alpha-2,3-sialyltransferase isoform 1) c4(141827, 141828, 141829) c5(141830, 141831, 141832, 141833, 141834, 141835, 141836) c6( ) c7(y, ha, ey, m, t, cJe); #c1(ST3GAL5) c2(XP_005264687) c3(lactosylceramide alpha-2,3-sialyltransferase isoform X1) c4(279193, 279194) c5(279195, 279196, 279197, 279198, 279199, 279200, 279201, 279202, 279203, 279204, 279205, 279206) c6( ) c7(y, ha, ey, m, t, cJe); #c1(ST3GAL5) c2(XP_011531445) c3(lactosylceramide alpha-2,3-sialyltransferase isoform X2) c4( ) c5(327579, 327580, 327581, 327582, 327583, 327584) c6( ) c7(y, ha, ey, m, t, cJe); #c1(ST3GAL6) c2(NP_001258074) c3(type 2 lactosamine alpha-2,3-sialyltransferase isoform 3) c4(95922) c5(95923) c6( ) c7(T, aA, fd, v, aF, ci, m, t, B); #c1(ST3GAL6) c2(NP_001258075) c3(type 2 lactosamine alpha-2,3-sialyltransferase isoform 1) c4(95924) c5(95925, 95926, 95927, 95928, 95929, 95930, 95931, 95932, 95933, 95934, 95935, 95936, 95937, 95938) c6( ) c7(T, aA, fd, v, aF, ci, m, t, B); #c1(ST3GAL6) c2(NP_001258076) c3(type 2 lactosamine alpha-2,3-sialyltransferase isoform 4) c4(95939) c5(95940, 95941, 95942, 95943, 95944) c6( ) c7(T, aA, fd, v, aF, ci, m, t, B); #c1(ST3GAL6) c2(XP_005247124) c3(type 2 lactosamine alpha-2,3-sialyltransferase isoform X3) c4(267687) c5(267688, 267689) c6( ) c7(T, aA, fd, v, aF, ci, m, t, B); #c1(ST3GAL6) c2(XP_006713537) c3(type 2 lactosamine alpha-2,3-sialyltransferase isoform X4) c4( ) c5(287222) c6( ) c7(T, aA, fd, v, aF, ci, m, t, B); #c1(ST3GAL6) c2(XP_011510637) c3(type 2 lactosamine alpha-2,3-sialyltransferase isoform X6) c4( ) c5(301085, 301086, 301087, 301088, 301089, 301090, 301091, 301092) c6( ) c7(T, aA, fd, v, aF, ci, m, t, B); #c1(ST5) c2(NP_005409) c3(suppression of tumorigenicity 5 protein isoform 1) c4(155807, 155808) c5(155809, 155810, 155811, 155812, 155813, 155814, 155815, 155816, 155817, 155818, 155819, 155820, 155821, 155822, 155823, 155824, 155825) c6( ) c7(hb); #c1(ST5) c2(NP_631896) c3(suppression of tumorigenicity 5 protein isoform 2) c4(238202, 238203, 238204, 238205, 238206, 238207) c5(238208, 238209, 238210, 238211, 238212, 238213, 238214, 238215, 238216, 238217, 238218, 238219, 238220, 238221, 238222, 238223, 238224, 238225, 238226, 238227, 238228, 238229, 238230, 238231, 238232, 238233, 238234, 238235, 238236, 238237, 238238, 238239, 238240, 238241, 238242, 238243, 238244, 238245, 238246, 238247, 238248, 238249, 238250, 238251, 238252, 238253, 238254, 238255) c6( ) c7(hb); #c1(ST5) c2(XP_005253134) c3(suppression of tumorigenicity 5 protein isoform X5) c4( ) c5(272175, 272176, 272177) c6( ) c7(hb); #c1(ST5) c2(XP_011518611) c3(suppression of tumorigenicity 5 protein isoform X3) c4(312827, 312828, 312829, 312830, 312831) c5(312832, 312833, 312834, 312835, 312836, 312837, 312838, 312839, 312840, 312841, 312842, 312843, 312844, 312845, 312846) c6( ) c7(hb); #c1(ST5) c2(XP_011518612) c3(suppression of tumorigenicity 5 protein isoform X4) c4(312847, 312848, 312849, 312850, 312851, 312852) c5(312853) c6( ) c7(hb); #c1(ST5) c2(XP_011518619) c3(suppression of tumorigenicity 5 protein isoform X6) c4(312854, 312855, 312856) c5( ) c6( ) c7(hb); #c1(ST5) c2(XP_011518624) c3(suppression of tumorigenicity 5 protein isoform X10) c4(312857, 312858) c5(312859, 312860, 312861, 312862, 312863, 312864, 312865, 312866, 312867, 312868, 312869, 312870, 312871, 312872, 312873, 312874, 312875, 312876, 312877, 312878, 312879, 312880, 312881, 312882, 312883, 312884, 312885, 312886, 312887, 312888, 312889, 312890, 312891, 312892, 312893, 312894, 312895, 312896, 312897, 312898, 312899, 312900, 312901, 312902, 312903, 312904, 312905, 312906, 312907, 312908, 312909, 312910, 312911, 312912, 312913, 312914, 312915, 312916, 312917, 312918, 312919, 312920, 312921, 312922, 312923, 312924, 312925, 312926, 312927, 312928, 312929, 312930, 312931, 312932, 312933, 312934, 312935, 312936, 312937, 312938, 312939, 312940, 312941, 312942, 312943) c6( ) c7(hb); #c1(ST5) c2(XP_011518630) c3(suppression of tumorigenicity 5 protein isoform X11) c4(312944, 312945, 312946) c5( ) c6( ) c7(hb); #c1(ST5) c2(XP_011518632) c3(suppression of tumorigenicity 5 protein isoform X12) c4( ) c5(312947, 312948, 312949, 312950, 312951, 312952, 312953, 312954, 312955, 312956) c6( ) c7(hb); #c1(ST6GALI) c2(NP_775323) c3(beta-galactoside alpha-2,6-sialyltransferase 1 isoform a) c4(249957, 249958, 249959, 249960, 249961, 249962, 249963, 249964, 249965, 249966, 249967) c5(249968, 249969, 249970, 248971, 249972, 249973, 249974, 249975, 249976, 249977, 249978, 249979, 249980, 249981, 249982, 249983, 249984, 249985, 249986, 249987, 249988, 249989, 249990, 249991, 249992, 249993, 249994, 249995, 249996, 249997, 249998, 249999, 250000, 250001, 250002, 250003, 250004, 250005, 250006, 250007, 250008, 250009, 250010, 250011, 250012, 250013, 250014, 250015, 250016, 250017, 250018, 250019, 250020, 250021, 250022, 250023, 250024, 250025, 250026, 250027, 250028, 250029, 250030, 250031, 250032, 250033, 250034, 250035, 250036, 250037, 250038, 250039, 250040, 250041, 250042, 250043, 250044, 250045, 250046, 250047) c6(250048, 250049, 250050, 250051, 250052, 250053, 250054) c7(bL, T, if, al, aA, bB, ci, qN, q, eA, hD, ey, eL, oV, ev, ff, hI, r, aF, en, g, t, pb, ck, gk, bE, m, lC, B, cn); #c1(ST6GALI) c2(NP_775324) c3(beta-galactoside alpha-2,6-sialyltransferase 1 isoform b) c4( ) c5(250055, 250056, 250057, 250058, 250059, 250060, 250061) c6( ) c7(bL, T, if, al, aA, bB, ci, qN, q, eA, hD, ey, eL, oV, ev, ff, hI, r, aF, en, g, t, pb, ck, gk, bE, m, lC, B, cn); #c1(ST6GAL2) c2(NP_001135824) c3(beta-galactoside alpha-2,6-sialyltransferase 2 isoform b) c4(53356) c5(53357, 53358, 53359, 53360, 53361, 53362) c6( ) c7(aw, j, eA); #c1(ST6GAL2) c2(NP_115917) c3(beta-galactoside alpha-2,6-sialyltransferase 2 isoform a) c4(224675, 224676, 224677) c5(224678, 224679, 224680, 224681, 224682, 224683, 224684, 224685, 224686, 224687, 224688, 224689, 224690, 224691, 224692, 224693) c6( ) c7(aw, j, eA); #c1(ST6GAL2) c2(XP_011510305) c3(beta-galactnside alpha-2,6-sialyltransferase 2 isoform X5) c4( ) c5(300879, 300880, 300881, 300882, 300883, 300884) c6( ) c7(aw, j, eA); #c1(ST6GALNACI) c2(NP_060884) c3(alpha-N-acetylgalactosaminide alpha-2,6-sialyltransferase 1 isoform 1) c4(198366) c5(198367, 198368, 198369, 198370, 198371, 198372, 198373, 198374, 198375) c6(198376, 198377) c7(T, aT, gl, dL, bK, eL); #c1(ST6GALNACI) c2(XP_011523297) c3(alpha-N-acetylgalactosaminide alpha-2,6-sialyltransferase 1 isoform X1) c4(317812) c5( ) c6( ) c7(T, aT, gl, dL, bK, eL); #c1(ST6GALNACI) c2(XP_011523298) c3(alpha-N-acetylgalactosaminide alpha-2,6-sialyltransferase 1 isoform X2) c4( ) c5(317813, 317814, 317815, 317816, 317817) c6( ) c7(T, aT, gl, dL, bK, eL); #c1(ST6GALNAC2) c2(NP_006447) c3(alpha-N-acetylgalactosaminide alpha-2,6-sialyltransferase 2 precursor) c4(165309) c5(165310, 165311, 165312, 165313, 165314, 165315) c6( ) c7(aW, T, ey, aT); #c1(ST6GALNAC4) c2(NP_778204) c3(alpha-N-acetyl-neuraminyl-2,3-beta-galactnsyl-1, 3-N-acetyl-galactosaminide alpha-2,6-sialyltransferase isoform a) c4(251382, 251383) c5(251384, 251385, 251386, 251387, 251388, 251389, 251390) c6( ) c7(OY); #c1(ST6GALNAC4) c2(NP_778205) c3(alpha-N-acetyl-neuraminyl-2,3-beta-galactnsyl-1, 3-N-acetyl-galactosaminide alpha-2,6-sialyltransferase isoform b) c4(251391, 251392) c5(251393, 251394, 251395, 251396, 251397, 251398, 251399, 251400, 251401, 251402, 251403, 251404, 251405) c6( ) c7(OY); #c1(ST6GALNAC4) c2(XP_011516829) c3(alpha-N-acetyl-neuraminyl-2,3-beta-galactosyl-1, 3-N-acetyl-galactosaminide alpha-2,6-sialyltransferase isoform X1) c4( ) c5(310265, 310266, 310267) c6( ) c7(OY); #c1(ST6GALNAC6) c2(NP_001273928) c3(alpha-N-acetylgalactosaminide alpha-2,6-sialyltransferase 6 isoform b) c4(105903, 105904) c5(105905, 105906, 105907, 105908, 105909, 105910) c6( ) c7(es, T, iA); #c1(ST6GALNAC6) c2(NP_001273930) c3(alpha-N-acetylgalactosaminide alpha-2,6-sialyltransferase 6 isoform c) c4(105911, 105912) c5(105913, 105914, 105915, 105916, 105917, 105918, 105919, 105920, 105921, 105922, 105923, 105924, 105925) c6( ) c7(es, T, iA); #c1(ST6GALNAC6) c2(NP_038471) c3(alpha-N-acetylgalactosaminide alpha-2,6-sialyltransferase 6 isoform a) c4(176585) c5(176586, 176587, 176588, 176589, 176590, 176591, 176592, 176593, 176594, 176595, 176596, 176597, 176598) c6( ) c7(es, T, iA); #c1(ST6GALNAC6) c2(XP_011516916) c3(alpha-N-acetylgalactosaminide alpha-2,6-sialyltransferase 6 isoform X3) c4( ) c5(310428, 310429, 310430, 310431, 310432, 310433) c6( ) c7(es, T, iA); #c1(ST7) c2(NP_060882) c3(suppressor of tumorigenicity 7 protein isoform a) c4(198320, 198321, 198322) c5(198323, 198324, 198325, 198326, 198327, 198328, 198329, 198330, 198331, 198332, 198333, 198334, 198335, 198336, 198337, 198338, 198339, 198340, 198341, 198342, 198343, 198344, 198345, 198346, 198347, 198348, 198349, 198350, 198351, 198352, 198353, 198354, 198355, 198356, 198357, 198358) c6( ) c7(T, B, bE, aW, r, aT, bB, ci, hu, q); #c1(ST7) c2(NP_068708) c3(suppressor of tumorigenicity 7 protein isoform b) c4(210084, 210085, 210086, 210087) c5(210088, 210089, 210090, 210091, 210092, 210093) c6( ) c7(T, B, bE, aW, r, aT, bB, ci, hu, q); #c1(ST7L) c2(XP_011539931) c3(suppressor of tumorigenicity 7 protein-like isoform X3) c4(338276, 338277) c5(338278, 338279, 338280, 338281, 338282, 338283, 338284, 338285, 338286, 338287, 338288, 338289) c6( ) c7(T, aF, eA, aA); #c1(ST8SIA1) c2(NP_001291379) c3(alpha-N-acetylneuraminide alpha-2,8-sialyltransferase isoform 2) c4(115809) c5(115810, 115811, 115812, 115813, 115814) c6( ) c7(ck, av, dD, iU, qt, aW, Y, oV, hi, aT, eq, V, iq); #c1(ST8SIA1) c2(NP_003025) c3(alpha-N-acetylneuraminide alpha-2,8-sialyltransferase isoform 1) c4(134530) c5(134531, 134532, 134533, 134534, 134535, 134536, 134537) c6( ) c7(ck, av, dD, iU, qt, aW, Y, oV, hI, aT, eg, V, iq); #c1(ST8SIA2) c2(NP_006002) c3(alpha-2,8-sialyltransferase 88 precursor) c4(161102, 161103) c5(161104, 161105, 161106, 161107, 161108, 161109, 161110, 161111, 161112, 161113, 161114, 161115) c6( ) c7(T, cA, eM, ql, cm, BE, bK, he, cd, bN); #c1(ST8SIA3) c2(NP_056963) c3(sia-alpha-2,3-Gal-beta-1,4-GlcNAc-R:alpha 2,8-sialyltransferase) c4(188220, 188221) c5(188222, 188223, 188224, 188225, 188226, 188227, 188228, 188229, 188230, 188231, 188232, 188233) c6( ) c7(j); #c1(ST8SIA4) c2(NP_005659) c3(CMP-N-acetylneuraminate-poly-alpha-2, 8-sialyltransferase isoform a precursor) c4(158333, 158334) c5(158335, 158336, 158337, 158338, 158339, 158340) c6( ) c7(bL, T, jv, eR, QO, oe, emu, cz, vr, j, ci, q, ad, kL, afR, I, aT, io, h, aaW, hB, ae, dF, Yi, sj, Em, ff, r, fe, uY, aq, Ku, en, cm, uC, bz, fq, qa, rR, VJ, ac, mg, uz, Gp, B); #c1(ST8SIA4) c2(NP_778222) c3(CMP-N-acetylneuraminate-poly-alpha-2, 8-sialyltransferase isoform b precursor) c4( ) c5(251413, 251414, 251415, 251416, 251417, 251418) c6( ) c7(bL, 1 jv, eR, QO, oe, cmu, cz, vr, j, ci, q, ad, kL, afR, I, aT, io, h, aaW, hB, ae, dF, Yi, sj, Em, ff, r, fe, uY, aq, Ku, en, cm, uC, bz, fq, qa, rR, VJ, ac, mg, uz, Gp, B); #c1(ST8SIA6) c2(NP_001004470) c3(alpha-2,8-sialyltransferase BE precursor) c4(20766, 20767, 20768) c5(20769, 20770, 20771, 20772, 20773, 20774, 20775) c6( ) c7(k); #c1(ST8SIA6) c2(XP_011517754) c3(alpha-2,8-sialyltransferase BE isoform X1) c4( ) c5(311587, 311588, 311589, 311590, 311591, 311592, 311593, 311594, 311595, 311596, 311597) c6( ) c7(k); #c1(STAB1) c2(NP_055951) c3(stabilin-1 precursor) c4(184638) c5(184639, 184640, 184641, 184642, 184643, 184644) c6( ) c7(dy, B); #c1(STAB1) c2(XP_005265032) c3(stabilin-1 isoform X4) c4( ) c5(279398, 279399, 279400, 279401, 279402) c6( ) c7(dy, B); #c1(STAB2) c2(NP_060034) c3(stabilin-2 precursor) c4(193797) c5(193798, 193799, 193800, 193801, 193802, 193803, 193804, 193805) c6( ) c7(ac, fc, GR, j, cP, B); #c1(STAB2) c2(XP_011536843) c3(stabilin-2 isoform X5) c4(334534) c5( ) c6( ) c7(ac, fc, GR, j, cP, B); #c1(STAB2) c2(XP_011536844) c3(stabilin-2 isoform X6) c4( ) c5(334535, 334536, 334537, 334538, 334539, 334540) c6( ) c7(ac, fc, GR, j, cP, B); #c1(STAC) c2(NP_003140) c3(SH3 and cysteine-rich domain-containing protein isoform 1) c4(135633, 135634) c5(135635, 135636, 135637, 135638, 135639, 135640, 135641) c6( ) c7(oe, fJ); #c1(STAC) c2(XP_011532340) c3(SH3 and cysteine-rich domain-containing protein isoform X3) c4( ) c5(328489, 328490, 328491, 328492, 328493) c6( ) c7(oe, fJ); #c1(STAC3) c2(NP_001273185) c3(SH3 and cysteine-rich domain-containing protein 3 isoform b) c4( ) c5(104514, 104515, 104516, 104517, 104518) c6( ) c7(cJf); #c1(STAC3) c2(NP_659501) c3(SH3 and cysteine-rich domain-containing protein 3 isoform a) c4(240254, 240255, 240256) c5(240257, 240258, 240259, 240260, 240261, 240262, 240263, 240264, 240265, 240266, 240267, 240268, 240269) c6( ) c7(cJf); #c1(STAG1) c2(NP_005853) c3(cohesin subunit SA-1) c4(159890, 159891) c5(159892, 159893, 159894, 159895, 159896, 159897, 159898, 159899, 159900, 159901, 159902, 159903, 159904, 159905, 159906, 159907, 159908, 159909, 159910, 159911, 159912, 159913, 159914, 159915) c6( ) c7(fr, K, m, t, ae, ad); #c1(STAG1) c2(XP_011510634) c3(cohesin subunit SA-1 isoform X2) c4(301083) c5( ) c6( ) c7(fr, K, m, t, ae, ad); #c1(STAG1) c2(XP_011510635) c3(cohesin subunit SA-1 isoform X1) c4(301084) c5( ) c6( ) c7(fr, K, m, t, ae, ad); #c1(STAG2) c2(NP_001036215) c3(cohesin subunit SA-2 isoform a) c4(34063, 34064, 34065, 34066, 34067, 34068, 34069, 34070) c5(34071, 34072, 34073, 34074, 34075, 34076, 34077, 34078, 34079, 34080, 34081, 34082, 34083, 34084, 34085, 34086, 34087, 34088, 34089, 34090, 34091) c6( ) c7(T, d, id, c, iT, eL, SV, dL, ci, g, aYh); #c1(STAG2) c2(NP_001269347) c3(cohesin subunit SA-2 isoform b) c4(101183, 101184) c5(101185, 101186, 101187, 101188, 101189, 101190, 101191, 101192, 101193, 101194, 101195, 101196, 101197, 101198, 101199, 101200, 101201, 101202, 101203, 101204, 101205, 101206, 101207, 101208, 101209, 101210, 101211, 101212, 101213, 101214, 101215, 101216, 101217, 101218, 101219, 101220, 101221, 101222, 101223, 101224, 101225, 101226, 101227, 101228, 101229, 101230, 101231, 101232, 101233, 101234, 101235) c6( ) c7(T, d, id, c, iT, eL, SV, dL, ci, g, aYh); #c1(STAG3) c2(NP_001269646) c3(cohesin subunit SA-3 isoform 2) c4( ) c5(102383, 102384, 102385) c6( ) c7(t, gU, m, cJg); #c1(STAG3) c2(NP_001269647) c3(cohesin subunit SA-3 isoform 3) c4(102386, 102387, 102388, 102389, 102390, 102391) c5(102392, 102393, 102394, 102395, 102396, 102397, 102398, 102399, 102400, 102401, 102402, 102403, 102404, 102405) c6( ) c7(t, gU, m, cJg); #c1(STAG3) c2(NP_036579) c3(cohesin subunit SA-3 isoform 1) c4(174492, 174493, 174494, 174495, 174496, 174497) c5(174498, 174499, 174500, 174501, 174502, 174503, 174504, 174505, 174506, 174507, 174508, 174509, 174510, 174511, 174512, 174513) c6( ) c7(t, gU, m, cJg); #c1(STAG3) c2(XP_005250173) c3(cohesin subunit SA-3 isoform X2) c4(270160) c5(270161, 270162, 270163, 270164, 270165) c6( ) c7(t, gU, m, cJg); #c1(STAG3) c2(XP_011514046) c3(cohesin subunit SA-3 isoform X3) c4(306497, 306498, 306499, 306500) c5(306501, 306502, 306503, 306504, 306505, 306506, 306507, 306508, 306509, 306510, 306511, 306512, 306513, 306514, 306515, 306516, 306517, 306518, 306519, 306520, 306521, 306522, 306523, 306524, 306525, 306526, 306527, 306528, 306529, 306530, 306531, 306532, 306533, 306534, 306535, 306536, 306537, 306538, 306539, 306540, 306541, 306542, 306543, 306544, 306545, 306546, 306547, 306548, 306549, 306550, 306551, 306552, 306553, 306554, 306555) c6( ) c7(t, gU, m, cJg); #c1(STAG3) c2(XP_011514047) c3(cohesin subunit SA-3 isoform X4) c4( ) c5(306556, 306557, 306558, 306559, 306560, 306561, 306562, 306563, 306564, 306565, 306566, 306567, 306568, 306569, 306570, 306571, 306572, 306573, 306574, 306575, 306576, 306577, 306578, 306579, 306580, 306581, 306582, 306583, 306584) c6( ) c7(t, gU, m, cJg); #c1(STAM) c2(NP_003464) c3(signal transducing adapter molecule 1) c4(138547) c5(138548, 138549, 138550, 138551, 138552, 138553, 138554) c6( ) c7(B, al, fc); #c1(STAM) c2(XP_005252660) c3(signal transducing adapter molecule 1 isoform X2) c4(271956, 271957, 271958) c5(271959, 271960, 271961, 271962, 271963, 271964, 271965, 271966, 271967, 271968, 271969, 271970, 271971, 271972, 271973, 271974, 271975) c6( ) c7(B, al, fc); #c1(STAM2) c2(NP_005834) c3(signal transducing adapter molecule 2) c4(159771) c5(159772, 159773, 159774, 159775, 159776, 159777) c6( ) c7(dc, T, ad); #c1(STAMBP) c2(NP_998787) c3(STAM-binding protein) c4(265974, 265975, 265976) c5(265977, 265978, 265979, 265980, 265981, 265982, 265983, 265984, 265985, 265986, 265987, 265988, 265989, 265990, 265991, 265992, 265993, 265994) c6( ) c7(cyw, hb, ha, aFy, cJh, QK); #c1(STAMBP) c2(XP_011530787) c3(STAM-binding protein isoform X3) c4(326813, 326814) c5(326815, 326816, 326817, 326818, 326819, 326820, 326821, 326822, 326823, 326824, 326825, 326826, 326827, 326828, 326829, 326830, 326831, 326832, 326833, 326834, 326835, 326836, 326837, 326838) c6( ) c7(cyw, hb, ha, aFy, cJh, QK); #c1(STAMBPLI) c2(NP_065850) c3(AMSH-like protease) c4(205850, 205851, 205852) c5(205853, 205854, 205855, 205856, 205857, 205858, 205859, 205860, 205861, 205862, 205863, 205864, 205865, 205866, 205867, 205868, 205869, 205870, 205871, 205872, 205873, 205874) c6( ) c7(iM, je, cd); #c1(STAP1) c2(NP_036240) c3(signal-transducing adaptor protein 1) c4(172584) c5(172585, 172586, 172587, 172588, 172589, 172590, 172591, 172592, 172593, 172594) c6( ) c7(cI, an); #c1(STAP2) c2(NP_001013863) c3(signal-transducing adaptor protein 2 isoform 2) c4(25789) c5(25790, 25791, 25792, 25793, 25794, 25795) c6( ) c7(aW, cF, iU, aT); #c1(STAP2) c2(NP_060190) c3(signal-transducing adaptor protein 2 isoform 1) c4(194668, 194669, 194670, 194671) c5(194672, 194673, 194674, 194675, 194676, 194677, 194678, 194679, 194680, 194681, 194682, 194683, 194684, 194685, 194686, 194687, 194688, 194689, 194690, 194691, 194692, 194693, 194694, 194695, 194696, 194697) c6( ) c7(aW, cF, iU, aT); #c1(STAP2) c2(XP_011526425) c3(signal-transducing adaptor protein 2 isoform X1) c4( ) c5(320727, 320728, 320729, 320730, 320731, 320732, 320733, 320734, 320735, 320736) c6( ) c7(aW, cF, iu, aT); #c1(STAR) c2(NP_000340) c3(steroidogenic acute regulatory protein, mitochondrial) c4(7410, 7411) c5(7412, 7413, 7414, 7415, 7416, 7417, 7418, 7419, 7420, 7421, 7422, 7423) c6( ) c7(bL, gh, T, aZ, iW, baV, jN, bO, cz, n, bS, et, Fc, eA, ad, UE, qC, dP, aX, BJ, iv, h, bK, bq, hK, ae, af, aK, kl, avH, gP, aW, Hu, cI, Z, t, baW, aqp, hL, Rm, va, m, UF, gT); #c1(STARD10) c2(NP_006636) c3(PCTP-like protein) c4(166776, 166777, 166778, 166779, 166780) c5(166781, 166782, 166783, 166784, 166785, 166786, 166787, 166788, 166789, 166790, 166791, 166792, 166793, 166794, 166795, 166796, 166797, 166798, 166799, 166800, 166801, 166802, 166803, 166804, 166805, 166806, 166807, 166808, 166809, 166810, 166811, 166812, 166813, 166814, 166815, 166816, 166817, 166818) c6( ) c7(aW, ad, aT); #c1(STARD13) c2(NP_001230395) c3(stAR-related lipid transfer protein 13 isoform 5) c4( ) c5(86268, 86269, 86270, 86271, 86272, 86273) c6( ) c7(T, d, pN, iR, aW, Y, hL, aT, aq, ci, K, nA, as, B, us, c1); #c1(STARD13) c2(NP_821074) c3(stAR-related lipid transfer protein 13 isoform 1) c4(253177) c5(253178, 253179, 253180, 253181, 253182, 253183, 253184) c6( ) c7(T, d, PN, iR, aW, Y, hL, aT, aq, ci, K, nA, as, B, us, cI); #c1(STARD13) c2(NP_821075) c3(stAR-related lipid transfer protein 13 isoform 2) c4(253185, 253186) c5(253187, 253188, 253189, 253190, 253191, 253192, 253193, 253194, 253195, 253196, 253197) c6( ) c7(T, d, pN, iR, aW, Y, hL, aT, aq, ci, K, nA, as, B, us, cI); #c1(STARD13) c2(XP_011533600) c3(stAR-related lipid transfer protein 13 isoform X2) c4(329711) c5( ) c6( ) c7(T, d, pN, iR, aW, Y, hL, aT, aq, ci, K, nA, as, B, us, cI); #c1(STARD3) c2(NP_001159409) c3(stAR-related lipid transfer protein 3 isoform 2) c4(63970) c5(63971, 63972, 63973, 63974, 63975, 63976) c6( ) c7(T, aW, aA, aT, aF, ae, ad); #c1(STARD3) c2(NP_001159410) c3(stAR-related lipid transfer protein 3 isoform 3) c4(63977) c5(63978, 63979, 63980, 63981, 63982, 63983) c6( ) c7(T, aW, aA, aT, aF, ae, ad); #c1(STARD3) c2(NP_006795) c3(stAR-related lipid transfer protein 3 isoform 1) c4(168140, 168141) c5(168142, 168143, 168144, 168145, 168146, 168147, 168148, 168149, 168150, 168151, 168152, 168153) c6( ) c7(T, aW, aA, aT, aF, ae, ad); #c1(STARD3NL) c2(NP_114405) c3(MLN64 N-terminal domain homolog) c4(222552, 222553, 222554, 222555, 222556) c5(222557, 222558, 222559, 222560, 222561, 222562, 222563, 222564, 222565, 222566, 222567, 222568, 222569, 222570, 222571, 222572, 222573, 222574, 222575, 222576, 222577, 222578, 222579, 222580, 222581, 222582, 222583, 222584, 222585, 222586, 222587, 222588, 222589, 222590, 222591, 222592) c6( ) c7(iW, C); #c1(STARD5) c2(NP_871629) c3(stAR-related lipid transfer protein 5) c4(255947) c5(255948, 255949, 255950, 255951, 255952, 255953) c6( ) c7(K); #c1(STARD7) c2(NP_064536) c3(stAR-related lipid transfer protein 7, mitochondrial precursor) c4(202885) c5(202886, 202887, 202888, 202889, 202890, 202891) c6( ) c7(nJ, B); #c1(STARD8) c2(NP_001135975) c3(stAR-related lipid transfer protein 8 isoform a) c4(53898) c5(53899, 53900, 53901, 53902, 53903, 53904, 53905, 53906, 53907, 53908, 53909, 53910, 53911, 53912, 53913, 53914, 53915) c6( ) c7(T, aW, aT, ci, ae, ad); #c1(STARD8) c2(NP_055540) c3(stAR-related lipid transfer protein 8 isoform b) c4(181832) c5( ) c6( ) c7(T, aW, aT, ci, ae, ad); #c1(STARD8) c2(XP_005262371) c3(stAR-related lipid transfer protein 8 isoform X2) c4(277861) c5(277862, 277863, 277864, 277865, 277866) c6( ) c7(T, aW, aT, ci, ae, ad); #c1(STARD9) c2(NP_065810) c3(stAR-related lipid transfer protein 9) c4(205642) c5(205643, 205644, 205645, 205646, 205647, 205648) c6( ) c7(ac); #c1(STARD9) c2(XP_011520141) c3(stAR-related lipid transfer protein 9 isoform X9) c4( ) c5(315021, 315022) c6( ) c7(ac); #c1(STAT1) c2(NP_009330) c3(signal transducer and activator of transcription 1-alpha/beta isoform alpha) c4(171827, 171828, 171829, 171830, 171831, 171832, 171833, 171834) c5(171835, 171836, 171837, 171838, 171839, 171840, 171841, 171842, 171843, 171844, 171845, 171846) c6( ) c7(oO, bM, T, os, fR, ea, aAx, al, fd, bB, ci, x, bOI, aE, Bc, ja, Ds, azm, K, eL, cp, eG, cJj, aW, apn, g, cm, bw, ha, eM, nB, iT, aiM, cj, k, Hb, m, dD, akc, fN, n, Mi, fr, MT, qW, pe, kH, cU, IG, aDa, dL, bOp, DU, bQd, jy, ey, h, pi, afu, A, ag, CQ, beP, pm, jT, RB, Pa, dB, Qu, In, bm, at, fL, it, B, aMk, Dw, bOi, Ik, fG, jx, aA, cR, C, V, pd, q, er, eA, xx, mj, bNv, aT, aAn, cy, jj, bq, Gy, ae, bA, bf, iU, nO, Y, fO, bg, r, Io, en, t, f, iK, ck, cT, vK, iM, kP, ac, hc, wR, CZ, gT, bt, zA, zu, ao, vi, gV, bxK, jh, oZ, eq, jE, EA, hF, mC, ad, cJi, hX, qC, F, ib, afm, ds, oW, nJ, atX, d, je, ff, eZ, aF, hp, Fq, anW, iV, bz, wW, gk, Bv, zr, bE, aS, If, kS, X, y); #c1(STAT1) c2(NP_644671) c3(signal transducer and activator of transcription 1-alpha/beta isoform beta) c4( ) c5(238490, 238491, 238492, 238493, 238494, 238495, 238496, 238497, 238498, 238499, 238500, 238501, 238502, 238503, 238504, 238505, 238506, 238507, 238508, 238509, 238510, 238511, 238512, 238513, 238514, 238515, 238516, 238517, 238518, 238519, 238520, 238521, 238522, 238523, 238524, 238525, 238526, 238527, 238528, 238529, 238530, 238531, 238532, 238533, 238534) c6( ) c7(oO, bM, T, os, fR, ea, aAx, al, fd, bB, ci, x, bOI, aE, Be, ja, Ds, azm, K, eL, cp, eG, cJj, aW, apn, g, cm, bw, ha, eM, nB, iT, aiM, cj, k, Hb, m, dD, akc, fN, n, Mi, fr, MT, gW, pe, kH, cU, IG, aDa, dL, bOp, DU, bQd, jy, ey, h, pi, afu, A, aq, CQ, beP, pm, jT, RB, Pa, dB, Qu, In, bm, at, fL, it, B, aMk, Dw, bOi, Ik, fG, jx, aA, cR, C, V, pd, q, er, eA, xx, mj, bNv, aT, aAn, cy, jj, bq, Cy, ae, bA, bf, iU, nO, Y, fO, bg, r, Io, en, t, f, iK, ck, cT, vK, iM, kP, ac, he, wR, CZ, gT, bt, zA, zu, ao, vi, gV, bxK, jh, oZ, eq, jE, EA, hF, mC, ad, cJi, hX, qC, F, ib, afm, ds, oW, nJ, atX, d, je, ff, eZ, aF, hp, Fq, anW, iV, bz, wW, gk, Bv, zr, bE, aS, If, kS, X, y); #c1(STAT2) c2(NP_005410) c3(signal transducer and activator of transcription 2 isoform 1) c4(155826) c5(155827, 155828, 155829, 155830, 155831, 155832, 155833) c6( ) c7(gV, T, bM, al, jx, bB, EA, V, F, ja, aT, cU, IG, h, DU, jj, hG, aW, Y, cr, eZ, aq, Io, CQ, W, iT, bE, aiM, B); #c1(STAT2) c2(NP_938146) c3(signal transducer and activator of transcription 2 isoform 2) c4(259617) c5(259618, 259619, 259620, 259621, 259622, 259623) c6( ) c7(gV, T, bM, al, jx, bB, EA, V, F, ja, aT, cU, IG, h, DU, jj, hG, aW, Y, cr, eZ, ag, Io, CQ, W, iT, bE, aiM, B); #c1(STAT2) c2(XP_005269168) c3(signal transducer and activator of transcription 2 isoform X7) c4(282382) c5(282383, 282384, 282385, 282386, 282387, 282388) c6( ) c7(gV, T, bM, al, jx, bB, EA, V, F, ja, aT, cU, IG, h, DU, jj, hG, aW, Y, cr, eZ, aq, Io, CQ, W, iT, bE, aiM, B); #c1(STAT3) c2(NP_003141) c3(signal transducer and activator of transcription 3 isoform 2) c4(135642) c5(135643, 135644, 135645, 135646, 135647, 135648, 135649) c6( ) c7(oO, bM, T, ID, aC, fR, tQ, hV, ea, if, e, al, Xi, yS, pf, bB, fd, ci, aY, amW, ip, x, xy, xE, aE, Xc, Be, ja, DO, Ds, K, qM, hu, hH, dF, be, eL, cp, aa, ly, zQ, ZH, Jl, aW, Ls, az, HA, fc, CT, vs, g, as, eE, eF, cm, baR, Qt, bw, ou, eM, nB, xD, Iq, iA, iT, mx, U, cj, aep, wB, uJ, dW, k, Hb, m, hh, aDM, qm, ik, bhp, iu, xN, aiu, dD, sw, aw, ht, NT, fN, qy, Bm, n, aj, fr, qN, aOJ, zP, qW, cd, hr, asS, ai, md, eW, ft, jz, cc, aoc, aeX, gd, kH, h, crs, jy, dL, bI, eV, asT, dx, cY, A, mR, CN, Gw, CM, bIP, fe, aq, kp, yq, pm, fs, lx, ar, W, dB, hk, hL, at, pg, oh, it, B, bL, Dw, fM, dA, eR, wL, yk, IH, jx, eX, aA, fF, hz, hy, v, j, btX, AO, V, q, J, er, eA, Ig, hW, nv, Qg, aoA, qp, afQ, aT, qU, aZd, cy, Fx, jj, bq, ae, af, eu, jf, kl, bf, iU, nO, xR, oV, Y, fO, r, afq, Io, en, hf, zM, LV, t, f, cI, iK, bQ, ck, Ta, sS, nM, kP, Dy, aQd, iM, Nk, he, QG, gX, wR, mf, np, yH, dy, fD, CZ, Da, bt, zA, rA, LS, ao, hS, im, gV, GI, Ve, Zl, aD, iW, jh, KO, wV, buc, eq, pz, hF, atK, ad, kL, hX, bhq, av, afb, hd, F, et, ib, Db, py, arV, IC, hD, ji, Iz, fb, nJ, pq, yF, aXz, DI, d, je, hG, qt, cJk, eH, ff, cr, eZ, dq, Ej, aF, iV, Z, iR, KM, bz, qa, bF, es, gk, eU, pc, zr, bE, z, gZ, bC, ei, adg, hE, X, y, Tc); #c1(STAT3) c2(NP_644805) c3(signal transducer and activator of transcription 3 isoform 1) c4(238549, 238550) c5(238551, 238552, 238553, 238554, 238555, 238556, 238557, 238558, 238559, 238560, 238561, 238562, 238563, 238564) c6( ) c7(oO, bM, T, ID, aC, fR, tQ, hV, ea, if, e, al, Xi, yS, pf, bB, fd, ci, aY, amW, ip, x, xy, xE, aE, Xc, Be, ja, DO, Ds, K, qM, hu, hH, dF, be, eL, cp, aa, ly, zQ, ZH, Jl, aW, Ls, az, HA, fc, CT, vs, g, as, eE, eF, cm, baR, Qt, bw, ou, eM, nB, xD, Iq, iA, iT, mx, U, cj, aep, wB, uJ, dW, k, Hb, m, hh, aDM, qm, ik, bhp, iu, xN, aiu, dD, sw, aw, ht, NT, fN, qy, Bm, n, aj, fr, qN, aOJ, zP, qW, cd, hr, asS, ai, md, eW, ft, jz, cc, aoc, aeX, gd, kH, h, crs, jy, dL, bI, eV, asT, dx, cY, A, mR, CN, Gw, CM, bIP, fe, aq, kp, yq, pm, fs, lx, ar, W, dB, hk, hL, at, pg, oh, it, B, bL, Dw, fM, dA, eR, wL, yk, IH, jx, eX, aA, fF, hz, hy, v, j, btX, AO, V, g, J, er, eA, Ig, hW, nv, Qg, aoA, qp, afQ, aT, gU, aZd, cy, Fx, jj, bq, ae, af, eu, jf, kl, bf, iU, nO, xR, oV, Y, fO, r, afq, Io, en, hf, zM, LV, t, f, cI, iK, bQ, ck, Ta, sS, nM, kP, Dy, aQd, iM, Nk, hc, QG, gX, wR, mf, np, yH, dy, fD, CZ, Da, bt, zA, rA, LS, ao, hS, im, gV, GI, Ve, Zl, aD, iW, jh, KO, wV, buc, eq, pz, hF, atK, ad, kL, hX, bhq, av, afb, hd, F, et, ib, Db, py, arV, IC, hD, ji, Iz, fb, nJ, pq, yF, aXz, DI, d, je, hG, qt, cJk, eH, ff, cr, eZ, dq, Ej, aF, iV, Z, iR, KM, bz, qa, bF, es, gk, eU, pc, zr, bE, z, gZ, bC, ei, adg, hE, X, y, Tc); #c1(STAT3) c2(NP_998827) c3(signal transducer and activator of transcription 3 isoform 3) c4(266057) c5(266058, 266059, 266060, 266061, 266062, 266063) c6( ) c7(oO, bM, T, ID, aC, fR, tQ, hV, ea, if, e, al, Xi, yS, pf, bB, fd, ci, aY, amW, ip, x, xy, xE, aE, Xc, Bc, ja, DO, Ds, K, qM, hu, hH, dF, bc, eL, cp, aa, ly, zQ, ZH, Jl, aW, Ls, az, HA, fc, CT, vs, g, as, eE, eF, cm, baR, Qt, bw, ou, eM, nB, xD, Ig, iA, iT, mx, U, cj, aep, wB, uJ, dW, k, Hb, m, hh, aDM, qm, ik, bhp, iu, xN, aiu, dD, sw, aw, ht, NT, fN, qy, Bm, n, aj, fr, gN, aOJ, zP, gW, cd, hr, asS, ai, md, eW, ft, jz, cc, aoc, aeX, gd, kH, h, crs, jy, dL, bI, eV, asT, dx, cY, A, mR, CN, Cw, CM, bIP, fe, aq, kp, yq, pm, fs, lx, ar, W, dB, hk, hL, at, pg, oh, it, B, bL, Dw, fM, dA, eR, wL, yk, IH, jx, eX, aA, fF, hz, hy, v, j, btX, AD, V, q, J, er, eA, Ig, hW, nv, Qg, aoA, qp, afQ, aT, qU, aZd, cy, Ex, jj, bq, ae, af, eu, jf, kl, bf, iU, nO, xR, oV, Y, fO, r, afq, Io, en, hf, zM, LV, t, f, cI, iK, bQ, ck, Ta, sS, nM, kP, Dy, aQd, iM, Nk, he, QG, gX, wR, mf, np, yH, dy, fD, CZ, Da, bt, zA, rA, LS, ao, hS, im, gV, GI, Ve, ZI, aD, iW, jh, KO, wV, hue, eq, pz, hF, atK, ad, kL, hX, bhq, av, afb, hd, F, ot, ib, Db, py, arV, IC, hD, ji, Iz, fb, nJ, pq, yF, aXz, DI, d, je, hG, qt, cJk, eH, ff, cr, eZ, dq, Ej, aF, iV, Z, iR, KM, bz, qa, bF, es, gk, eU, pc, zr, bE, z, gZ, bC, ei, adg, hE, X, y, Tc); #c1(STAT4) c2(NP_003142) c3(signal transducer and activator of transcription 4) c4(135650, 135651, 135652, 135653) c5(135654, 135655, 135656, 135657, 135658, 135659, 135660, 135661, 135662, 135663) c6( ) c7(bL, bM, T, dD, Dw, eR, xM, ra, ea, dK, e, yG, fG, fN, aA, cR, oY, cL, v, qj, jE, eq, hh, ez, aY, V, IR, mC, o, cd, ai, dP, hX, eW, wD, hW, aT, Ds, bOp, ey, bay, hH, IM, be, yF, aEV, OV, A, aW, HA, hI, cr, ge, Pr, ax, eZ, aF, fc, fe, jh, iV, pb, yd, Bv, eU, jx, zr, ig, aCT, cJI, hc, z, aDu, ajd, fP, uo, hr, oh, at, k, Hb, fL, y, Mj, B); #c1(STAT4) c2(XP_011510006) c3(signal transducer and activator of transcription 4 isoform X2) c4( ) c5(300619, 300620, 300621, 300622, 300623, 300624) c6( ) c7(bL, bM, T, dD, Dw, eR, xM, ra, ea, dK, e, yG, fG, fN, aA, cR, oY, cL, v, qj, jE, eq, bh, ez, aY, V, IR, mC, o, cd, ai, dP, hX, eW, wD, hW, aT, Ds, bOp, ey, bay, hH, IM, bc, yF, aEV, OV, A, aW, HA, hI, cr, ge, Pr, ax, eZ, aF, fc, fe, jh, iV, pb, yd, Bv, eU, jx, zr, ig, aCT, cJI, he, z, aDu, ajd, fP, uo, hr, oh, at, k, Hb, fL, y, Mj, B); #c1(STAT4) c2(XP_011510008) c3(signal transducer and activator of transcription 4 isoform X3) c4( ) c5(300625, 300626, 300627, 300628, 300629, 300630, 300631, 300632, 300633, 300634, 300635, 300636, 300637) c6( ) c7(bL, bM, T, dD, Dw, eR, xM, ra, ea, dK, e, yG, fG, fN, aA, cR, oY, cL, v, qj, jE, eq, bh, ez, aY, V, IR, mC, o, cd, ai, dP, hX, eW, wD, hW, aT, Ds, bOp, ey, bay, hH, IM, bc, yF, aEV, OV, A, aW, HA, hI, cr, ge, Pr, ax, eZ, aF, fc, fe, jh, iV, pb, yd, Bv, eU, jx, zr, ig, aCT, cJI, hc, z, aDu, ajd, fP, uo, hr, oh, at, k, Hb, fL, y, Mj, B); #c1(STAT5A) c2(NP_001275648) c3(signal transducer and activator of transcription 5A isoform 2) c4(106888) c5(106889, 106890, 106891, 106892, 106893, 106894, 106895, 106896, 106897) c6( ) c7(bM, T, if, fd, ci, a mW, x, Ds, K, cp, zQ, aW, Ls, aGQ, g, eE, cm, bw, eM, iT, cj, k, m, in, Ro, IT, n, aj, qN, zP, bkU, kH, h, IG, eV, bI, ox, A, aq, Og, pm, yR, ok, dB, In, pg, B, bL, Dw, fM, dA, Dh, jx, eX, afK, hy, j, v, asA, AO, q, J, mj, aT, kf, dz, jj, aPF, ae, iU, oV, r, en, hf, t, iK, ck, Ta, iM, c, bt, aJc, iW, oA, jh, hF, ad, av, btw, bj, d, je, et, ff, xs, Of, eZ, dN, iV, eU, pc, aS, y, iu, Tc); #c1(STAT5A) c2(NP_001275649) c3(signal transducer and activator of transcription 5A isoform 3) c4(106898, 106899) c5(106900, 106901, 106902, 106903, 106904, 106905) c6( ) c7(bM, T, if, fd, ci, a mW, x, Ds, K, cp, zQ, aW, Ls, aGQ, g, eE, cm, bw, eM, iT, cj, k, m, in, Ro, IT, n, aj, qN, zP, bkU, kH, h, IG, eV, bI, ox, A, aq, Og, pm, yR, ok, dB, In, pg, B, bL, Dw, fM, dA, Dh, jx, eX, afK, hy, j, v, asA, AO, q, J, mj, aT, kf, dz, jj, aPF, ae, iU, oV, r, en, hf, t, iK, ck, Ta, iM, c, bt, aJc, iW, oA, jh, hF, ad, av, btw, bj, d, je, et, ff, xs, Of, eZ, dN, iV, eU, pc, aS, y, iu, Tc); #c1(STAT5A) c2(NP_003143) c3(signal transducer and activator of transcription 5A isoform 1) c4(135664, 135665) c5(135666, 135667, 135668, 135669, 135670, 135671, 135672, 135673, 135674, 135675, 135676, 135677, 135678) c6( ) c7(bM, T, if, fd, ci, amW, x, Ds, K, cp, zQ, aW, Ls, aGQ, g, eE, cm, bw, eM, iT, cj, k, m, in, Ro, IT, n, aj, gN, zP, bkU, kH, h, IG, eV, hi, ox, A, aq, Og, pm, yR, ok, dB, In, pg, B, bL, Dw, fM, dA, Dh, jx, eX, afK, hy, j, v, asA, AO, g, J, mj, aT, kf, dz, jj, aPF, ae, iU, oV, r, en, hf, t, iK, ck, Ta, iM, c, bt, aJc, iW, oA, jh, hF, ad, av, btw, bj, d, je, et, ff, xs, Of, eZ, dN, iV, eU, pc, aS, y, iu, Tc); #c1(STAT5A) c2(XP_005257681) c3(signal transducer and activator of transcription 5A isoform X1) c4( ) c5(275320, 275321, 275322, 275323, 275324, 275325) c6( ) c7(bM, T, if, fd, ci, amW, x, Ds, K, cp, zQ, aW, Ls, aGQ, g, eE, cm, bw, eM, iT, cj, k, m, in, Ro, IT, n, aj, qN, zP, bkU, kH, h, IG, eV, bI, ox, A, ag, Og, pm, yR, ok, dB, In, pg, B, bL, Dw, fM, dA, Dh, jx, eX, afK, hy, j, v, asA, AO, q, J, mj, aT, kf, dz, jj, aPF, ae, iU, oV, r, en, hf, t, iK, ck, Ta, iM, c, bt, aJc, iW, oA, jh, hF, ad, av, btw, bj, d, je, et, ff, xs, Of, eZ, dN, iV, eU, pc, aS, y, iu, Tc); #c1(STAT5B) c2(NP_036580) c3(signal transducer and activator of transcription 58) c4(174514) c5(174515, 174516, 174517, 174518, 174519, 174520, 174521) c6( ) c7(T, if, fd, ci, a mW, x, aE, K, aa, aW, Ls, g, eE, cm, bw, eM, iT, cj, k, m, IT, aj, qN, bkU, kH, h, IG, By, eV, ox, A, Rj, aq, Og, pm, yR, dB, In, Ei, pg, B, fM, Dh, eX, afK, hy, v, as A, avO, q, J, eA, mj, aT, kf, dz, jj, bq, ae, iU, oV, Y, r, hf, t, iK, ck, Ta, iM, bKn, bt, aJc, gV, Ve, iW, oA, jh, hF, ad, av, btw, bj, ji, jo, d, je, hG, et, Of, dN, aDw, eU, pc, aS, y, iu, Tc); #c1(STAT5B) c2(XP_005257683) c3(signal transducer and activator of transcription 58 isoform X2) c4(275326) c5(275327, 275328, 275329, 275330, 275331, 275332) c6( ) c7(T, if, fd, ci, amW, x, aE, K, aa, aW, Ls, g, eE, cm, bw, eM, iT, cj, k, m, IT, aj, qN, bkU, kH, h, IG, By, eV, ox, A, Rj, aq, Og, pm, yR, dB, In, Ei, pg, B, fM, Dh, eX, afK, hy, v, asA, avO, q, J, eA, mj, aT, kf, dz, jj, bq, ae, iU, oV, Y, r, hf, t, iK, ck, Ta, iM, bKn, bt, aJc, gV, Ve, iW, oA, jh, hF, ad, av, btw, bj, ji, jo, d, je, hG, et, Of, dN, aDw, eU, pc, aS, y, iu, Tc); #c1(STAT6) c2(XP_006719637) c3(signal transducer and activator of transcription 6 isoform X1) c4(292755, 292756, 292757, 292758, 292759, 292760, 292761, 292762, 292763, 292764) c5(292765, 292766, 292767, 292768, 292769, 292770, 292771, 292772, 292773, 292774, 292775, 292776, 292777, 292778, 292779, 292780, 292781, 292782, 292783, 292784, 292785, 292786, 292787, 292788, 292789, 292790, 292791, 292792, 292793, 292794, 292795, 292796, 292797, 292798, 292799, 292800, 292801, 292802, 292803, 292804, 292805, 292806, 292807, 292808, 292809, 292810, 292811, 292812, 292813, 292814, 292815, 292816, 292817, 292818, 292819, 292820, 292821, 292822, 292823, 292824, 292825, 292826, 292827, 292828, 292829, 292830, 292831, 292832, 292833, 292834, 292835, 292836, 292837, 292838, 292839, 292840, 292841, 292842, 292843, 292844, 292845, 292846, 292847, 292848, 292849, 292850, 292851) c6( ) c7(bM, T, fR, ea, if, bB, ci, bv, dV, Ds, aW, Du, g, as, eE, eM, iA, bIQ, cj, k, Hb, dD, akc, n, fr, qN, ai, cU, IG, eV, cml, Nr, sp, fe, aq, po, at, B, Dw, fM, eR, eX, hy, j, bX, V, q, eA, arH, apJ, aT, ae, r, akY, ck, cT, hr, wR, dy, ij, bt, aD, iW, jh, wV, ah, eq, ad, dP, av, hD, ji, IQ, d, bPY, eZ, dN, hp, Fq, iV, DF, Nq, bE, z, aFb, y, X); #c1(STAT6) c2(XP_011537009) c3(signal transducer and activator of transcription 6 isoform X2) c4(334751) c5( ) c6( ) c7(bM, T, fR, ea, if, bB, ci, bv, dV, Ds, aW, Du, g, as, eE, eM, iA, bIQ, cj, k, Hb, dD, akc, n, fr, gN, ai, cU, IG, eV, cml, Nr, sp, fe, aq, po, at, B, Dw, fM, eR, eX, hy, j, bX, V, q, eA, arH, apJ, aT, ae, r, akY, ck, cT, hr, wR, dy, ij, bt, aD, iW, jh, wV, ah, eq, ad, dP, av, hD, ji, IQ, d, bPY, eZ, dN, hp, Fq, iV, DF, Nq, bE, z, aFb, y, X); #c1(STATH) c2(NP_001009181) c3(statherin isoform b precursor) c4(23510) c5(23511, 23512, 23513, 23514, 23515, 23516) c6( ) c7(bN); #c1(STATH) c2(NP_003145) c3(statherin isoform a precursor) c4(135679) c5(135680, 135681, 135682, 135683, 135684, 135685) c6( ) c7(bN); #c1(STA02) c2(NP_001157852) c3(double-stranded RNA-binding protein Staufen homolog 2 isoform a) c4(62769) c5(62770, 62771, 62772, 62773, 62774, 62775) c6( ) c7(V, fq); #c1(STA02) c2(NP_001157853) c3(double-stranded RNA-binding protein Staufen homolog 2 isoform b) c4(62776, 62777, 62778, 62779, 62780) c5(62781, 62782, 62783, 62784, 62785, 62786, 62787) c6( ) c7(V, fq); #c1(STA02) c2(NP_001157854) c3(double-stranded RNA-binding protein Staufen homolog 2 isoform c) c4(62788) c5(62789, 62790, 62791, 62792, 62793, 62794) c6( ) c7(V, fq); #c1(STA02) c2(NP_001157855) c3(double-stranded RNA-binding protein Staufen homolog 2 isoform d) c4(62795) c5(62796, 62797, 62798, 62799, 62800) c6( ) c7(V, fq); #c1(STA02) c2(NP_001157856) c3(double-stranded RNA-binding protein Staufen homolog 2 isoform e) c4( ) c5(62801, 62802, 62803, 62804, 62805, 62806, 62807, 62808, 62809, 62810, 62811, 62812, 62813, 62814, 62815, 62816, 62817, 62818, 62819, 62820, 62821, 62822, 62823, 62824, 62825, 62826, 62827, 62828, 62829) c6( ) c7(V, fq); #c1(STA02) c2(NP_001157857) c3(double-stranded RNA-binding protein Staufen homolog 2 isoform f) c4(62830) c5(62831, 62832, 62833, 62834, 62835) c6( ) c7(V, fq); #c1(STBD1) c2(NP_003934) c3(starch-binding domain-containing protein 1) c4(142296, 142297) c5(142298, 142299, 142300, 142301, 142302, 142303, 142304, 142305, 142306, 142307, 142308, 142309) c6( ) c7(ex, sT, an); #c1(STCI) c2(NP_003146) c3(stanniocalcin-1 precursor) c4(135686, 135687) c5(135688, 135689, 135690, 135691, 135692, 135693, 135694, 135695, 135696, 135697, 135698, 135699, 135700, 135701, 135702, 135703, 135704, 135705, 135706, 135707, 135708) c6(135709) c7(aLC, T, jv, bkx, if, aA, bB, qN, AO, q, ad, aJf, mj, aT, bUP, IG, K, aDW, ae, Yi, azh, aa, eu, bbC, aW, Hq, r, aF, cI, t, nC, fg, bz, cma, ck, W, nb, c, bE, eM, bP, au, X, Ji, gX, hL, nw, dy, m, it, B, de); #c1(STC2) c2(NP_003705) c3(stanniocalcin-2 precursor) c4(140280) c5(140281, 140282, 140283, 140284, 140285, 140286, 140287, 140288) c6(140289, 140290) c7(T, ht, aA, zP, q, ad, dP, hb, aT, IG, bta, K, hu, ae, aW, vj, r, aF, cm, t, ar, bP, c, wO, m, y, it); #c1(STEAP1) c2(NP_036581) c3(metalloreductase STEAPI) c4(174522) c5(174523, 174524, 174525, 174526, 174527, 174528) c6( ) c7(T, eM, aW, aT, n, v, np, K, m, t, ae, dx, ad); #c1(STEAP2) c2(NP_001231873) c3(metalloreductase STEAP2 isoform a) c4(87592) c5(87593, 87594, 87595, 87596, 87597, 87598, 87599, 87600, 87601, 87602, 87603, 87604, 87605, 87606) c6( ) c7(ae, ci, T, dx, ad); #c1(STEAP2) c2(NP_001231874) c3(metalloreductase STEAP2 isoform b) c4(87607) c5(87608, 87609, 87610, 87611, 87612, 87613, 87614, 87615, 87616, 87617, 87618, 87619, 87620, 87621) c6( ) c7(ae, ci, T, dx, ad); #c1(STEAP2) c2(NP_001231875) c3(metalloreductase STEAP2 isoform c) c4(87622, 87623, 87624) c5(87625, 87626, 87627, 87628, 87629, 87630, 87631, 87632, 87633, 87634, 87635, 87636, 87637, 87638, 87639, 87640, 87641, 87642) c6( ) c7(ae, ci, T, dx, ad); #c1(STEAP3) c2(NP_001008410) c3(metalloreductase STEAP3 isoform b) c4(23191) c5(23192, 23193, 23194, 23195, 23196, 23197, 23198, 23199, 23200, 23201, 23202, 23203, 23204, 23205, 23206, 23207, 23208, 23209, 23210, 23211, 23212, 23213, 23214) c6( ) c7(ae, gk, T, cJm, aNv, al, r, bGZ, K, ci, avG, Rc, bGO, g, ad); #c1(STEAP3) c2(NP_878919) c3(metalloreductase STEAP3 isoform a) c4(257213, 257214) c5(257215, 257216, 257217, 257218, 257219, 257220, 257221, 257222, 257223, 257224, 257225) c6( ) c7(ae, gk, T, cJm, aNv, al, r, bGZ, K, ci, avG, Rc, bGO, q, ad); #c1(STEAP4) c2(NP_001192245) c3(metalloreductase STEAP4 isoform 2) c4(82135) c5(82136, 82137, 82138, 82139, 82140, 82141) c6( ) c7(bL, dD, ea, v, eq, ei, gO, ae, ad); #c1(STEAP4) c2(NP_078912) c3(metalloreductase STEAP4 isoform 1) c4(216088) c5(216089, 216090, 216091, 216092, 216093, 216094) c6( ) c7(bL, dD, ea, v, eq, ei, qO, ae, ad); #c1(STH) c2(NP_001007533) c3(saitohin) c4(22774) c5(22775, 22776, 22777, 22778, 22779, 22780) c6( ) c7(Hx, rR, bb, WY, U, act, an, af); #c1(STIL) c2(XP_011540294) c3(SCL-interrupting locus protein isoform X2) c4(338688) c5(338689, 338690, 338691, 338692, 338693, 338694, 338695) c6( ) c7(T, if, DV, cJn, ci, nA, qN, x, fX, akU, h, aij, aii, ff, kp, en, g, QK, ck, dc, cj, Lo, k, IG); #c1(STIL) c2(XP_011540295) c3(SCL-interrupting locus protein isoform X1) c4(338696) c5(338697, 338698, 338699, 338700, 338701, 338702, 338703, 338704, 338705, 338706, 338707, 338708, 338709, 338710) c6( ) c7(T, if, DV, cJn, ci, nA, qN, x, fX, akU, h, aij, aii, ff, kp, en, g, QK, ck, dc, cj, Lo, k, IC); #c1(STIL) c2(XP_011540300) c3(SCL-interrupting locus protein isoform X5) c4(338711) c5( ) c6( ) c7(T, if, DV, cJn, ci, nA, qN, x, fX, akU, h, aij, aii, ff, kp, en, g, QK, ck, dc, cj, Lo, k, IC); #c1(STIL) c2(XP_011540302) c3(SCL-interrupting locus protein isoform X6) c4( ) c5(338712) c6( ) c7(T, if, DV, cJn, ci, nA, qN, x, fX, akU, h, aij, aii, ff, kp, en, g, QK, ck, dc, cj, Lo, k, IC); #c1(STIL) c2(XP_011540303) c3(SCL-interrupting locus protein isoform X7) c4( ) c5(338713, 338714, 338715, 338716, 338717) c6( ) c7(T, if, DV, cJn, ci, nA, qN, x, fX, akO, h, aij, aii, ff, kp, en, g, QK, ck, dc, cj, Lo, k, IC); #c1(STIM1) c2(NP_003147) c3(stromal interaction molecule 1 isoform 2 precursor) c4(135710) c5(135711, 135712, 135713, 135714, 135715, 135716) c6( ) c7(bM, T, dD, hi, aiK, Dh, ea, if, Or, iB, cJo, cz, n, eq, ci, qN, mC, er, eA, bv, bjv, dV, aT, h, cJp, af, aa, d, mR, aW, Y, Ls, ff, eZ, dN, Io, cnc, gm, beP, en, cI, t, cm, bz, Qt, dr, nM, eM, dB, AM, gX, hL, gZ, dX, cS, m, fL, bt, B); #c1(STIM2) c2(NP_001162588) c3(stromal interaction molecule 2 isoform 3 precursor) c4(66406, 66407) c5(66408, 66409, 66410, 66411, 66412, 66413, 66414, 66415, 66416, 66417, 66418, 66419) c6( ) c7(d, aiK, bE, aW, Y, aT, r, bB, pg, j, aXL, cm, q); #c1(STIM2) c2(NP_001162589) c3(stromal interaction molecule 2 isoform 1 precursor) c4(66420, 66421) c5(66422, 66423, 66424, 66425, 66426, 66427, 66428, 66429, 66430, 66431, 66432, 66433, 66434) c6( ) c7(d, aiK, bE, aW, Y, aT, r, bB, pg, j, aXL, cm, g); #c1(STIM2) c2(NP_065911) c3(stromal interaction molecule 2 isoform 2 precursor) c4(206183, 206184) c5(206185, 206186, 206187, 206188, 206189, 206190, 206191, 206192, 206193, 206194, 206195) c6( ) c7(d, aiK, bE, aW, Y, aT, r, bB, pg, j, aXL, cm, q); #c1(STIP1) c2(NP_006810) c3(stress-induced-phosphoprotein 1 isoform b) c4(168292) c5(168293, 168294, 168295, 168296, 168297, 168298) c6( ) c7(nJ, bM, 1 ft, d, Y, ff, U, aT, it, K, m, EY, f, t, en, bz, eA); #c1(STK10) c2(NP_005981) c3 (serine/threonine-protein kinase 10) c4(160960) c5(160961, 160962, 160963, 160964, 160965, 160966, 160967, 160968, 160969, 160970) c6( ) c7(dN, Ld, IQ); #c1(STK11) c2(NP_000446) c3 (serine/threonine-protein kinase STK11) c4(9078, 9079) c5(9080, 9081, 9082, 9083, 9084, 9085, 9086, 9087, 9088, 9089, 9090, 9091) c6( ) c7(T, aC, azf, if, fd, bB, ci, aE, K, hu, eL, cp, iE, aW, nY, g, cm, Qt, eM, go, avo, m, asW, ht, n, aj, qN, cc, KN, jy, dL, uV, ZN, Yl, Yd, ag, kp, Ld, Ye, Qy, hk, JQ, mg, hL, at, HB, YH, B, bL, yk, aA, cz, v, q, J, eA, eJ, bGn, aT, dz, af, qw, kl, s, NE, Y, aEk, Lf, r, en, bu, cI, t, apx, iK, sS, nM, Dy, Li, YW, gX, np, bt, GI, hI, aZ, dG, av, ccJ, py, bj, mu, aeQ, BO, ff, dq, aF, KM, bz, dr, bE, ei, MC, iu); #c1(STK11) c2(XP_011526511) c3 (serine/threonine-protein kinase STK11 isoform X2) c4( ) c5(320808, 320809, 320810, 320811, 320812) c6( ) c7(T, aC, azf, if, fd, bB, ci, aE, K, hu, eL, cp, iE, aW, nY, g, cm, Qt, eM, go, avo, m, asW, ht, n, aj, qN, cc, KN, jy, dL, uV, ZN, YI, Yd, aq, kp, Ld, Ye, Qy, hk, JQ, mg, hL, at, HB, YH, B, bL, yk, aA, cz, v, q, J, eA, eJ, bGn, aT, dz, af, qw, kl, s, NE, Y, aEk, Lf, r, en, bu, cI, t, apx, iK, sS, nM, Dy, Li, YW, gX, np, bt, GL hi, aZ, dG, av, ccJ, py, bj, mu, aeQ, BO, ff, dq, aE, KM, bz, dr, bE, ei, MC, iu); #c1(STK111P) c2(NP_443134) c3 (serine/threonine-protein kinase 11-interacting protein) c4(229598) c5(229599, 229600, 229601, 229602, 229603, 229604) c6( ) c7(g, MC); #c1(STK1IIP) c2(XP_011508831) c3 (serine/threonine-protein kinase 11-interacting protein isoform X5) c4(299418) c5(299419, 299420, 299421, 299422, 299423, 299424) c6( ) c7(g, MC); #c1(STK17A) c2(NP_004751) c3 (serine/threonine-protein kinase 17A) c4(149263) c5(149264, 149265, 149266, 149267, 149268, 149269) c6( ) c7(T, cF, d, eD, Lf, K, bu, eA); #c1(STK17B) c2(NP_004217) c3 (serine/threonine-protein kinase 178) c4(144367, 144368) c5(144369, 144370, 144371, 144372, 144373, 144374, 144375, 144376, 144377, 144378, 144379, 144380, 144381, 144382, 144383, 144384) c6( ) c7(LB, T, hd, nM, r, Ea, cm, q); #c1(STK19) c2(NP_004188) c3 (serine/threonine-protein kinase 19 isoform 1) c4(144177, 144178, 144179, 144180, 144181) c5(144182, 144183, 144184, 144185, 144186, 144187, 144188, 144189, 144190, 144191, 144192, 144193, 144194, 144195, 144196, 144197, 144198, 144199, 144200, 144201, 144202, 144203, 144204, 144205, 144206, 144207, 144208, 144209, 144210, 144211144212, 144213, 144214, 144215, 144216, 144217, 144218, 144219, 144220, 144221, 144222, 144223, 144224, 144225, 144226, 144227, 144228, 144229, 144230, 144231, 144232, 144233) c6( ) c7(bF, T, A, xX, IR, W, eZ, r, h, nw, nk, nC, q); #c1(STK19) c2(NP_115830) c3 (serine/threonine-protein kinase 19 isoform 2) c4(224187, 224188) c5(224189, 224190, 224191, 224192, 224193, 224194, 224195, 224196, 224197, 224198, 224199, 224200, 224201, 224202, 224203, 224204, 224205, 224206, 224207, 224208, 224209, 224210, 224211, 224212) c6( ) c7(bF, T, A, xX, IR, W, eZ, r, h, nw, nk, nC, q); #c1(STK24) c2(NP_001027467) c3 (serine/threonine-protein kinase 24 isoform b precursor) c4(30229, 30230, 30231) c5(30232, 30233, 30234, 30235, 30236, 30237, 30238, 30239, 30240, 30241, 30242, 30243, 30244, 30245, 30246, 30247, 30248, 30249, 30250) c6( ) c7(LB, qa, adi, fe, cy, bK, K, EL, pd, ae, af, ad); #c1(STK24) c2(NP_001273578) c3 (serine/threonine-protein kinase 24 isoform c precursor) c4(105352, 105353) c5(105354, 105355, 105356, 105357, 105358, 105359) c6( ) c7(LB, qa, adi, fe, cy, bK, K, EL, pd, ae, af, ad); #c1(STK24) c2(NP_003567) c3 (serine/threonine-protein kinase 24 isoform a precursor) c4(139219) c5(139220, 139221, 139222, 139223, 139224, 139225) c6( ) c7(LB, qa, adi, fe, cy, bK, K, EL, pd, ae, af, ad); #c1(STK24) c2(XP_005254135) c3 (serine/threonine-protein kinase 24 isoform X1) c4( ) c5(273005, 273006, 273007, 273008, 273009) c6( ) c7(LB, qa, adi, fe, cy, bK, K, EL, pd, ae, af, ad); #c1(STK25) c2(NP_001258907) c3 (serine/threonine-protein kinase 25 isoform 1) c4(96774, 96775) c5(96776, 96777, 96778, 96779, 96780, 96781, 96782, 96783, 96784, 96785, 96786, 96787, 96788, 96789, 96790, 96791, 96792) c6( ) c7(aW, cJq, aT, cy, K, EL, cm, ae, EJ); #c1(STK25) c2(NP_001269237) c3 (serine/threonine-protein kinase 25 isoform 3) c4( ) c5(100836, 100837, 100838, 100839, 100840, 100841, 100842, 100843, 100844, 100845, 100846, 100847, 100848) c6( ) c7(aW, cJq, aT, cy, K, EL, cm, ae, EJ); #c1(STK25) c2(XP_006712260) c3 (serine/threonine-protein kinase 25 isoform X3) c4(286586) c5(286587) c6( ) c7(aW, cJq, aT, cy, K, EL, cm, ae, EJ); #c1(STK25) c2(XP_011508797) c3 (serine/threonine-protein kinase 25 isoform X1) c4(299394) c5( ) c6( ) c7(aW, cJq, aT, cy, K, EL, cm, ae, EJ); #c1(STK25) c2(XP_011508798) c3 (serine/threonine-protein kinase 25 isoform X4) c4( ) c5(299395, 299396, 299397, 299398, 299399, 299400) c6( ) c7(aW, cJq, aT, cy, K, EL, cm, ae, EJ); #c1(STK26) c2(NP_001035917) c3 (serine/threonine-protein kinase 26 isoform 3) c4(33376) c5(33377, 33378, 33379, 33380, 33381, 33382) c6( ) c7(T, n, ci, ae, B, ad); #c1(STK26) c2(NP_001035918) c3 (serine/threonine-protein kinase 26 isoform 2) c4(33383) c5(33384, 33385, 33386, 33387, 33388, 33389) c6( ) c7(T, n, ci, ae, B, ad); #c1(STK26) c2(NP_057626) c3 (serine/threonine-protein kinase 26 isoform 1) c4(191933) c5(191934, 191935, 191936, 191937, 191938, 191939) c6( ) c7(T, n, ci, ae, B, ad); #c1(STK3) c2(NP_006272) c3 (serine/threonine-protein kinase 3 isoform 1) c4(163469) c5(163470, 163471, 163472, 163473, 163474, 163475) c6( ) c7(LB, hd, nB, qb, aW, r, aT, q, B); #c1(STK3) c2(XP_011515550) c3 (serine/threonine-protein kinase 3 isoform X1) c4(308387) c5(308388, 308389, 308390, 308391, 308392, 308393) c6( ) c7(LB, hd, nB, qb, aW, r, aT, q, B); #c1(STK31) c2(NP_001247433) c3 (serine/threonine-protein kinase 31 isoform b) c4( ) c5(93601, 93602, 93603, 93604, 93605, 93606, 93607, 93608) c6( ) c7(T, bE, aw, ht, gX, r, bB, bu, bX, hu, q); #c1(STK31) c2(NP_001247434) c3 (serine/threonine-protein kinase 31 isoform c) c4(93609) c5(93610, 93611, 93612, 93613, 93614, 93615) c6( ) c7(T, bE, aw, ht, gX, r, bB, bu, bX, hu, q); #c1(STK31) c2(NP_113602) c3 (serine/threonine-protein kinase 31 isoform a) c4(221657, 221658) c5(221659, 221660, 221661, 221662, 221663, 221664, 221665, 221666) c6( ) c7(T, bE, aw, ht, gX, r, bB, bu, bX, hu, q); #c1(STK31) c2(XP_006715821) c3 (serine/threonine-protein kinase 31 isoform X5) c4( ) c5(289819, 289820, 289821, 289822, 289823, 289824, 289825) c6( ) c7(T, bE, aw, ht, gX, r, bB, bu, bX, hu, q); #c1(STK31) c2(XP_011513751) c3 (serine/threonine-protein kinase 31 isoform X2) c4( ) c5(306099, 306100, 306101, 306102, 306103) c6( ) c7(T, bE, aw, ht, gX, r, bB, bu, bX, hu, q); #c1(STK31) c2(XP_011513753) c3 (serine/threonine-protein kinase 31 isoform X3) c4(306104) c5( ) c6( ) c7(T, bE, aw, ht, gX, r, bB, bu, bX, hu, q); #c1(STK31) c2(XP_011513754) c3 (serine/threonine-protein kinase 31 isoform X4) c4(306105) c5( ) c6( ) c7(T, bE, aw, ht, gX, r, bB, bu, bX, hu, q); #c1(STK32A) c2(NP_001106195) c3 (serine/threonine-protein kinase 32A isoform 1) c4(42383) c5(42384, 42385, 42386, 42387, 42388, 42389) c6( ) c7(bz, cd, hp); #c1(STK32A) c2(NP_001274669) c3 (serine/threonine-protein kinase 32A isoform 3) c4(106609) c5( ) c6( ) c7(bz, cd, hp); #c1(STK32A) c2(NP_659438) c3 (serine/threonine-protein kinase 32A isoform 2) c4(239902) c5(239903, 239904, 239905, 239906, 239907, 239908, 239909, 239910, 239911, 239912, 239913, 239914) c6( ) c7(bz, cd, hp); #c1(STK328) c2(NP_060871) c3 (serine/threonine-protein kinase 328) c4(198206, 198207) c5(198208, 198209, 198210, 198211, 198212, 198213, 198214) c6( ) c7(Na, T, apM, EQ, Nc, boJ); #c1(STK32C) c2(NP_775846) c3 (serine/threonine-protein kinase 32C) c4(250485, 250486) c5(250487, 250488, 250489, 250490, 250491, 250492) c6( ) c7(bL); #c1(STK32C) c2(XP_011537990) c3 (serine/threonine-protein kinase 32C isoform X1) c4( ) c5(335528) c6( ) c7(bL); #c1(STK32C) c2(XP_011537991) c3 (serine/threonine-protein kinase 32C isoform X2) c4(335529, 335530, 335531, 335532) c5(335533, 335534, 335535, 335536, 335537, 335538, 335539, 335540, 335541, 335542, 335543, 335544, 335545, 335546, 335547, 335548, 335549, 335550, 335551, 335552, 335553, 335554, 335555, 335556) c6( ) c7(bL); #c1(STK32C) c2(XP_011537998) c3 (serine/threonine-protein kinase 32C isoform X5) c4( ) c5(335557, 335558, 335559, 335560, 335561) c6( ) c7(bL); #c1(STK33) c2(NP_001275990) c3 (serine/threonine-protein kinase 33 isoform a) c4(107659, 107660, 107661, 107662) c5(107663, 107664, 107665, 107666, 107667, 107668, 107669, 107670, 107671, 107672, 107673, 107674, 107675, 107676) c6( ) c7(bL, bM, T, fq, v); #c1(STK33) c2(XP_011518600) c3 (serine/threonine-protein kinase 33 isoform X3) c4(312747, 312748) c5(312749, 312750, 312751, 312752, 312753, 312754, 312755, 312756, 312757, 312758, 312759, 312760, 312761, 312762, 312763, 312764, 312765, 312766, 312767, 312768, 312769, 312770, 312771, 312772, 312773, 312774, 312775, 312776, 312777, 312778) c6( ) c7(bL, bM, T, fq, v); #c1(STK35) c2(NP_543026) c3 (serine/threonine-protein kinase 35) c4(233280, 233281) c5(233282, 233283, 233284, 233285, 233286, 233287, 233288, 233289, 233290, 233291, 233292, 233293) c6( ) c7(j); #c1(STK35) c2(XP_011527476) c3 (serine/threonine-protein kinase 35 isoform X1) c4(322237) c5(322238, 322239, 322240, 322241, 322242, 322243) c6( ) c7(j); #c1(STK38L) c2(NP_055815) c3 (serine/threonine-protein kinase 38-like) c4(183674, 183675, 183676) c5(183677, 183678, 183679, 183680, 183681, 183682, 183683, 183684, 183685, 183686, 183687, 183688, 183689, 183690, 183691, 183692, 183693, 183694, 183695, 183696, 183697, 183698, 183699, 183700, 183701, 183702) c6( ) c7(hk, T, nw); #c1(STK38L) c2(XP_005253399) c3 (serine/threonine-protein kinase 38-like isoform X2) c4(272464) c5(272465) c6( ) c7(hk, T, nw); #c1(STK38L) c2(XP_011518915) c3 (serine/threonine-protein kinase 38-like isoform X4) c4( ) c5(313339, 313340, 313341, 313342, 313343) c6( ) c7(hk, T, nw); #c1(STK39) c2(NP_037365) c3(STE20/SPS1-related proline-alanine-rich protein kinase) c4(175037) c5(175038, 175039, 175040, 175041, 175042, 175043) c6( ) c7(qa, bN, fM, if, oe, aT, cz, aj, v, afV, K, qN, an, ae, J, ad); #c1(STK4) c2(NP_006273) c3 (serine/threonine-protein kinase 4) c4(163476, 163477) c5(163478, 163479, 163480, 163481, 163482, 163483, 163484, 163485, 163486, 163487, 163488, 163489) c6( ) c7(T, bwU, bgQ, aw, aA, bB, ci, V, q, ad, hd, cc, aE, aT, K, ae, d, aW, Y, r, fe, aF, cI, iV, cm, nM, eM, nB, bE, mx, hL, apv, ra, zA, B); #c1(STK4) c2(XP_005260590) c3 (serine/threonine-protein kinase 4 isoform X4) c4(276729) c5(276730, 276731, 276732, 276733, 276734, 276735, 276736, 276737, 276738, 276739) c6( ) c7(T, bwU, bgQ, aw, aA, bB, ci, V, q, ad, hd, cc, aE, aT, K, ae, d, aW, Y, r, fe, aF, cI, iV, cm, nM, eM, nB, bE, mx, hL, apv, ra, zA, B); #c1(STMN2) c2(NP_001186143) c3(stathmin-2 isoform 1) c4(77211) c5(77212, 77213, 77214, 77215, 77216, 77217) c6( ) c7(cZ, aaF, F, dt, aqJ, K, jX, dd, ahl, H, dS, ahE, L); #c1(STMN2) c2(NP_008960) c3(stathmin-2 isoform 2) c4(169917, 169918) c5(169919, 169920, 169921, 169922, 169923, 169924, 169925, 169926, 169927, 169928, 169929, 169930) c6( ) c7(cZ, aaF, F, dt, aqJ, K, jX, dd, ahl, H, dS, ahE, L); #c1(STMN3) c2(NP_001263239) c3(stathmin-3 isoform 2) c4( ) c5(97082, 97083, 97084, 97085, 97086) c6( ) c7(eM, aW, ff, NT, aT, g, en); #c1(STMN3) c2(NP_056978) c3(stathmin-3 isoform 1) c4(188310, 188311) c5(188312, 188313, 188314, 188315, 188316, 188317, 188318) c6( ) c7(eM, aW, ff, NT, aT, g, en); #c1(STMN4) c2(NP_001269983) c3(stathmin-4 isoform 3) c4(103355) c5(103356, 103357, 103358, 103359, 103360, 103361) c6( ) c7(cm); #c1(STMN4) c2(NP_110422) c3(stathmin-4 isoform 1) c4(220256) c5(220257, 220258, 220259, 220260, 220261, 220262) c6( ) c7(cm); #c1(STOM) c2(NP_004090) c3(erythrocyte band 7 integral membrane protein isoform a) c4(143483, 143484) c5(143485, 143486, 143487, 143488, 143489, 143490, 143491, 143492, 143493, 143494, 143495, 143496) c6( ) c7(Na, T, Ed, eM, hQ, Nc, cfR, czp, xw, it, eA); #c1(STOM) c2(NP_937837) c3(erythrocyte band 7 integral membrane protein isoform b) c4(259258) c5(259259, 259260, 259261, 259262, 259263, 259264) c6( ) c7(Na, T, Ed, eM, hQ, Nc, cfR, czp, xw, it, eA); #c1(STOML1) c2(NP_001243602) c3(stomatin-like protein 1 isoform 3) c4(91140) c5(91141, 91142, 91143, 91144, 91145, 91146) c6( ) c7(h); #c1(STOML1) c2(NP_001243603) c3(stomatin-like protein 1 isoform 4) c4(91147) c5(91148, 91148, 91150, 91151, 91152, 91153) c6( ) c7(h); #c1(STOML1) c2(NP_001243604) c3(stomatin-like protein 1 isoform 5) c4(91154) c5(91155, 91156, 91157, 91158, 91159, 91160) c6( ) c7(h); #c1(STOML1) c2(NP_001243605) c3(stomatin-like protein 1 isoform 6) c4(91161) c5(91162, 91163, 91164, 91165, 91166) c6( ) c7(h); #c1(STOML1) c2(NP_001243606) c3(stomatin-like protein 1 isoform 7) c4(91167) c5(91168, 91169, 91170, 91171, 91172, 91173, 91174) c6( ) c7(h); #c1(STOML1) c2(NP_004800) c3(stomatin-like protein 1 isoform 1) c4(149959) c5(149960, 149961, 149962, 149963, 149964, 149965) c6( ) c7(h); #c1(STOML2) c2(NP_001273960) c3(stomatin-like protein 2, mitochondrial isoform b) c4(105937) c5(105938, 105939, 105940, 105941, 105942, 105943) c6( ) c7(zJ, T, AM, ff, Of, aA, io, it, fd, aF, Og, K, en, hB, g, bz, eA, cnb); #c1(STOML2) c2(NP_038470) c3(stomatin-like protein 2, mitochondrial isoform a) c4(176578) c5(176579, 176580, 176581, 176582, 176583, 176584) c6( ) c7(zJ, T, AM, ff, Of, aA, io, it, fd, aF, Og, K, en, hB, g, bz, eA, cnb); #c1(STOML3) c2(NP_001137505) c3(stomatin-like protein 3 isoform 2) c4(55935) c5(55936, 55937, 55938, 55939, 55940) c6( ) c7(mj, agl, eA, nA, cfR, rc, On); #c1(STOML3) c2(NP_660329) c3(stomatin-like protein 3 isoform 1) c4(240949) c5(240950, 240951, 240952, 240953, 240954, 240955, 240956) c6( ) c7(mj, agl, eA, nA, cfR, rc, On); #c1(STON1) c2(NP_001185524) c3(stonin-1) c4(75775) c5(75776, 75777, 75778, 75779, 75780, 75781, 75782, 75783, 75784, 75785, 75786, 75787, 75788, 75789, 75790) c6( ) c7(q, BO, r); #c1(STON1-GTF2AIL) c2(NP_001185522) c3(STON1-GTF2A1L protein isoform 2) c4(75761) c5(75762, 75763, 75764, 75765, 75766, 75767) c6( ) c7(q, BO, r); #c1(STON1-GTF2AIL) c2(NP_001185523) c3(STON1-GTF2A1L protein isoform 3) c4(75768) c5(75769, 75770, 75771, 75772, 75773, 75774) c6( ) c7(q, BO, r); #c1(STON1-GTF2AIL) c2(NP_758515) c3(STON1-GTF2A1L protein isoform 1) c4(249224) c5(249225, 249226, 249227, 249228, 249229, 249230, 249231, 249232, 249233, 249234, 249235, 249236, 249237, 249238) c6( ) c7(g, BO, r); #c1(STOX1) c2(NP_001123631) c3(storkhead-box protein 1 isoform b) c4(47893) c5(47894, 47895, 47896, 47897, 47898, 47899) c6( ) c7(nJ, uC, eb, cz, cJr); #c1(STOX1) c2(NP_001123632) c3(storkhead-box protein 1 isoform c) c4(47900) c5(47901, 47902, 47903, 47904, 47905, 47906) c6( ) c7(nJ, uC, eh, cz, cJr); #c1(STOX1) c2(NP_001123633) c3(storkhead-box protein 1 isoform a) c4(47907) c5(47908, 47909, 47910, 47911, 47912, 47913, 47914, 47915, 47916, 47917, 47918, 47919, 47920, 47921, 47922, 47923) c6( ) c7(nJ, uC, eb, cz, cJr); #c1(STOX1) c2(XP_011537756) c3(storkhead-box protein 1 isoform X1) c4(335293) c5( ) c6( ) c7(nJ, uC, eb, cz, cJr); #c1(STRA13) c2(NP_001257935) c3(centromere protein X isoform 1) c4(95821) c5(95822, 95823, 95824, 95825, 95826, 95827) c6( ) c7(bL, T, py, eM, Ae, aW, aT, aA, oZ, aF, K); #c1(STRA13) c2(NP_659435) c3(centromere protein X isoform 2) c4(239881) c5(239882, 239883, 239884, 239885, 239886, 239887) c6( ) c7(bL, T, py, eM, Ae, aW, aT, aA, oZ, aF, K); #c1(STRA6) c2(NP_001136091) c3(stimulated by retinoic acid gene 6 protein homolog isoform b) c4(54302) c5(54303, 54304, 54305, 54306, 54307) c6( ) c7(md, ctm, T, bL, kn, kj, bE, wk, X, Az, r, gZ, nA, oQ, bD, y, q, Gc, aa); #c1(STRA6) c2(NP_001136092) c3(stimulated by retinoic acid gene 6 protein homolog isoform c) c4(54308) c5(54309, 54310, 54311, 54312, 54313, 54314) c6( ) c7(md, ctm, 1 bL, kn, kj, bE, wk, X, Az, r, gZ, nA, oQ, bD, y, q, Gc, aa); #c1(STRA6) c2(NP_001185969) c3(stimulated by retinoic acid gene 6 protein homolog isoform d) c4(76846) c5(76847, 76848, 76849, 76850, 76851, 76852, 76853, 76854, 76855) c6( ) c7(md, ctm, T, bL, kn, kj, bE, wk, X, Az, r, gZ, nA, oQ, bD, y, q, Gc, aa); #c1(STRA6) c2(NP_001185970) c3(stimulated by retinoic acid gene 6 protein homolog isoform e) c4(76856, 76857) c5( ) c6( ) c7(md, ctm, T, bL, kn, kj, bE, wk, X, Az, r, gZ, nA, oQ, bD, y, q, Gc, aa); #c1(STRA6) c2(NP_001185971) c3(stimulated by retinoic acid gene 6 protein homolog isoform f) c4(76858) c5(76859, 76860, 76861, 76862, 76863, 76864, 76865, 76866, 76867, 76868) c6( ) c7(md, ctm, T, bL, kn, kj, bE, wk, X, Az, r, gZ, nA, oQ, bD, y, q, Gc, aa); #c1(STRA6) c2(XP_011520185) c3(stimulated by retinoic acid gene 6 protein homolog isoform X1) c4(315049) c5(315050, 315051, 315052, 315053, 315054, 315055, 315056, 315057, 315058, 315059, 315060, 315061, 315062, 315063) c6( ) c7(md, ctm, T, bL, kn, kj, bE, wk, X, Az, r, gZ, nA, oQ, bD, y, q, Gc, aa); #c1(STRA6) c2(XP_011520186) c3(stimulated by retinoic acid gene 6 protein homolog isoform X2) c4(315064, 315065) c5(315066, 315067, 315068, 315069, 315070, 315071, 315072, 315073, 315074, 315075, 315076, 315077, 315078, 315079, 315080) c6( ) c7(md, ctm, T, bL, kn, kj, bE, wk, X, Az, r, gZ, nA, oQ, bD, y, q, Gc, aa); #c1(STRA8) c2(NP_872295) c3(stimulated by retinoic acid gene 8 protein homolog) c4(256037) c5(256038, 256039, 256040, 256041, 256042, 256043) c6( ) c7(vH, ND); #c1(STRADA) c2(NP_001003787) c3(STE20-related kinase adapter protein alpha isoform 1) c4(20093) c5(20094, 20095, 20096, 20097, 20098, 20099) c6( ) c7(jf, T, ha, cJs, dz, g, MG); #c1(STRADA) c2(NP_001159441) c3(STE20-related kinase adapter protein alpha isoform 5) c4(64056) c5(64057, 64058, 64059, 64060, 64061) c6( ) c7(jf, T, ha, cJs, dz, g, MG); #c1(STRADA) c2(NP_001159442) c3(STE20-related kinase adapter protein alpha isoform 6) c4(64062) c5(64063, 64064, 64065, 64066, 64067) c6( ) c7(jf, T, ha, cJs, dz, g, MG); #c1(STRADA) c2(NP_699166) c3(STE20-related kinase adapter protein alpha isoform 3) c4(245785, 245786) c5(245787, 245788, 245789, 245790, 245791, 245792, 245793, 245794, 245795, 245796, 245797, 245798) c6( ) c7(jf, T, ha, cJs, dz, g, MG); #c1(STRADA) c2(XP_005257855) c3(STE20-related kinase adapter protein alpha isoform X4) c4(275384) c5( ) c6( ) c7(jf, T, ha, cJs, dz, g, MG); #c1(STRADA) c2(XP_005257856) c3(STE20-related kinase adapter protein alpha isoform X1) c4( ) c5(275385, 275386, 275387, 275388, 275389) c6( ) c7(jf, T, ha, cJs, dz, g, MG); #c1(STRADA) c2(XP_011523768) c3(STE20-related kinase adapter protein alpha isoform X3) c4( ) c5(318265, 318266) c6( ) c7(jf, T, ha, cJs, dz, g, MG); #c1(STRADA) c2(XP_011523769) c3(STE20-related kinase adapter protein alpha isoform X5) c4( ) c5(318267) c6( ) c7(jf, T, ha, cJs, dz, g, MG); #c1(STRADB) c2(NP_001193793) c3(STE20-related kinase adapter protein beta isoform 2) c4(82620) c5(82621, 82622, 82623, 82624, 82625) c6( ) c7(c); #c1(STRADB) c2(NP_061041) c3(STE20-related kinase adapter protein beta isoform 1) c4(199104, 199105) c5(199106, 199107, 199108, 199109, 199110, 199111, 199112, 199113, 199114, 199115, 199116, 199117, 199118, 199119, 199120, 199121, 199122) c6( ) c7(c); #c1(STRAP) c2(NP_009109) c3(serine-threonine kinase receptor-associated protein) c4(170725, 170726) c5(170727, 170728, 170729, 170730, 170731, 170732, 170733, 170734, 170735, 170736, 170737, 170738, 170739, 170740, 170741, 170742) c6( ) c7(T, aW, Ak, kf, aT, r, ci, iu, dx); #c1(STRAP) c2(XP_005253351) c3(serine-threonine kinase receptor-associated protein isoform X1) c4(272436) c5(272437, 272438, 272439, 272440, 272441) c6( ) c7(T, aW, Ak, kf, aT, r, ci, iu, dx); #c1(STRC) c2(NP_714544) c3(stereocilin precursor) c4(246565, 246566) c5(246567, 246568, 246569, 246570, 246571, 246572, 246573, 246574, 246575, 246576, 246577, 246578, 246579, 246580, 246581, 246582, 246583, 246584, 246585, 246586, 246587, 246588, 246589, 246590, 246591, 246592, 246593, 246594, 246595) c6( ) c7(cJt, bCd, gU, alA); #c1(STRC) c2(XP_011519579) c3(stereocilin isoform X1) c4(314247, 314248) c5(314249, 314250, 314251, 314252, 314253) c6( ) c7(cJt, bCd, gU, alA); #c1(STRC) c2(XP_011519581) c3(stereocilin isoform X2) c4(314254) c5( ) c6( ) c7(cJt, bCd, gU, alA); #c1(STRN) c2(NP_003153) c3(striatin) c4(135738, 135739) c5(135740, 135741, 135742, 135743, 135744, 135745, 135746, 135747, 135748, 135749, 135750, 135751) c6( ) c7(ac, wK, aw, e, j, eu); #c1(STRN) c2(XP_005264576) c3(striatin isoform X2) c4(279101) c5(279102, 279103, 279104, 279105, 279106, 279107) c6( ) c7(ac, wK, aw, e, j, eu); #c1(STRN3) c2(NP_001077362) c3(striatin-3 isoform 1) c4(37752) c5(37753, 37754, 37755, 37756, 37757, 37758) c6( ) c7(ft, B, aFQ, cd, Pr, pb, bAf); #c1(STRN3) c2(NP_055389) c3(striatin-3 isoform 2) c4(180732) c5(180733, 180734, 180735, 180736, 180737, 180738) c6( ) c7(ft, B, aFQ, cd, Pr, pb, bAf); #c1(STRN4) c2(NP_001034966) c3(striatin-4 isoform 2) c4(32415) c5(32416, 32417, 32418, 32419, 32420, 32421, 32422) c6( ) c7(T, aE, cj); #c1(STRN4) c2(NP_037535) c3(striatin-4 isoform 1) c4(176084, 176085) c5(176086, 176087, 176088, 176089, 176090, 176091, 176092, 176093, 176094, 176095, 176096, 176097) c6( ) c7(T, aE, cj); #c1(STRN4) c2(XP_006723237) c3(striatin-4 isoform X5) c4( ) c5(295048, 295049, 295050, 295051, 295052) c6( ) c7(T, aE, cj); #c1(STRN4) c2(XP_011525179) c3(striatin-4 isoform X4) c4(319625) c5( ) c6( ) c7(T, aE, cj); #c1(STS) c2(NP_000342) c3(steryl-sulfatase precursor) c4(7424) c5(7425, 7426, 7427, 7428, 7429, 7430) c6( ) c7(T, ea, if, al, bB, ci, ip, Gt, aE, dV, K, aW, fc, g, as, cm, eM, m, hh, dD, QO, n, nA, pM, qN, eW, yn, ft, aOu, jz, ahj, h, aPe, Dz, yi, AQ, hQ, aq, ajz, KE, Qy, bP, dB, hL, hR, el, ZY, zl, cJu, B, cn, Dw, cz, v, q, eJ, UE, hW, akU, aoA, aT, vH, yu, agV, zg, bq, ae, kl, s, NO, Y, r, Io, en, cI, t, cio, bN, rR, au, aZ, jh, btu, eq, ad, afb, dP, av, btD, buR, ds, nd, fn, cJv, IQ, hP, d, ff, bz, dr, gk, mO, bE, y, X); #c1(STT3A) c2(NP_001265432) c3(dolichyl-diphosphooligosaccharide-protein glycosyltransferase subunit STT3A isoform a) c4(98583) c5(98584, 98585, 98586, 98587, 98588, 98589, 98590, 98591, 98592, 98593) c6( ) c7(qJ, cJw, pa, lg, dv, h); #c1(STT3B) c2(NP_849193) c3(dolichyl-diphespheeligesaccharide-protein glycosyltransferase subunit STT3B) c4(254482) c5(254483, 254484, 254485, 254486, 254487, 254488) c6( ) c7(cJx, SL); #c1(STUB1) c2(NP_005852) c3(E3 ubiquitin-protein ligase CHIP isoform a) c4(159883) c5(159884, 159885, 159886, 159887, 159888, 159889) c6( ) c7(bEn, T, ky, anl, ajm, kB, aW, af, U, aT, r, bw, K, m, Tp, t, q, aR, UE); #c1(STX11) c2(NP_003755) c3(syntaxin-11) c4( ) c5(140652, 140653, 140654, 140655, 140656) c6( ) c7(cJy, T, EA, pz, bw, bt, zA); #c1(STX11) c2(XP_011534515) c3(syntaxin-11 isoform X2) c4(331009) c5(331010) c6( ) c7(cJy, T, EA, pz, bw, bt, zA); #c1(STX16) c2(NP_001001433) c3(syntaxin-16 isoform a) c4(18426, 18427, 18428, 18429, 18430) c5(18431, 18432, 18433, 18434, 18435, 18436, 18437, 18438, 18439, 18440, 18441, 18442, 18443) c6( ) c7(bWA, dg, xW, EL, EJ); #c1(STX16) c2(NP_001128244) c3(syntaxin-16 isoform c) c4(49753, 49754, 49755, 49756) c5(49757, 49758, 49759, 49760, 49761, 49762, 49763) c6( ) c7(bWA, dg, xW, EL, EJ); #c1(STX16) c2(NP_001128245) c3(syntaxin-16 isoform d) c4(49764, 49765, 49766, 49767) c5(49768, 49769, 49770, 49771, 49772, 49773, 49774, 49775, 49776, 49777, 49778, 49779, 49780, 49781, 49782, 49783, 49784, 49785) c6( ) c7(bWA, dg, xW, EL, EJ); #c1(STX16) c2(NP_001191797) c3(syntaxin-16 isoform e) c4( ) c5(81769, 81770, 81771, 81772, 81773, 81774, 81775, 81776, 81777, 81778, 81779, 81780, 81781, 81782, 81783, 81784, 81785, 81786, 81787, 81788, 81789, 81790, 81791, 81792, 81793, 81794, 81795, 81796, 81797, 81798, 81799, 81800, 81801, 81802, 81803, 81804, 81805) c6( ) c7(bWA, dg, xW, EL, EJ); #c1(STX16) c2(NP_003754) c3(syntaxin-16 isoform b) c4(140642) c5(140643, 140644, 140645, 140646, 140647, 140648, 140649, 140650, 140651) c6( ) c7(bWA, dg, xW, EL, EJ); #c1(STX17) c2(NP_060389) c3(syntaxin-17) c4(195755, 195756) c5(195757, 195758, 195759, 195760, 195761, 195762, 195763, 195764, 195765, 195766, 195767, 195768, 195769, 195770, 195771, 195772, 195773, 195774, 195775, 195776, 195777, 195778, 195779, 195780) c6( ) c7(hk, Y, OW, cJz, bdY); #c1(STX18) c2(NP_058626) c3(syntaxin-18) c4(192833) c5(192834, 192835, 192836, 192837, 192838, 192839) c6( ) c7(Na, aC, aW, oe, cz, aT, Nc, rz, cgj, ad); #c1(STX1A) c2(NP_001159375) c3(syntaxin-1A isoform 2) c4(63913) c5(63914, 63915, 63916, 63917, 63918, 63919, 63920, 63921, 63922, 63923, 63924, 63925) c6( ) c7(bL, bVk, eR, aQc, ha, aj, v, uu, BE, nA, J, aE, ql, K, af, s, akq, bN, YE, alC, Gx, mf, pJ); #c1(STX1A) c2(NP_004594) c3(syntaxin-1A isoform 1) c4(147997, 147998, 147999) c5(148000, 148001, 148002, 148003, 148004, 148005) c6( ) c7(bL, bVk, eR, aQc, ha, aj, V, uu, BE, nA, J, aE, ql, K, af, s, akq, bN, YE, alC, Gx, mf, pJ); #c1(STX1A) c2(XP_011514843) c3(syntaxin-1A isoform X1) c4( ) c5(307584, 307585, 307586, 307587, 307588, 307589) c6( ) c7(bL, bVk, eR, aQc, ha, aj, v, uu, BE, nA, J, aE, ql, K, af, s, akq, bN, YE, alC, Gx, mf, PJ); #c1(STX1B) c2(NP_443106) c3(syntaxin-1B) c4(229453) c5(229454, 229455, 229456, 229457, 229458, 229459) c6( ) c7(ha); #c1(STX2) c2(NP_001971) c3(syntaxin-2 isoform 1) c4(122746) c5(122747, 122748, 122749, 122750, 122751, 122752) c6( ) c7(LB, iV, gU, PA, ql, fG, ajd, Ni, fe, dy, K, Hb, BE, Im, pJ, aDP, aY); #c1(STX2) c2(XP_005253613) c3(syntaxin-2 isoform X1) c4(272592) c5(272593, 272594, 272595, 272596, 272597, 272598) c6( ) c7(LB, iV, gU, pA, ql, fG, ajd, Ni, fe, dy, K, Hb, BE, Im, pJ, aDP, aY); #c1(STX3) c2(NP_001171511) c3(syntaxin-3 isoform 2) c4(70357, 70358) c5(70359, 70360, 70361, 70362, 70363, 70364, 70365, 70366, 70367, 70368, 70369, 70370, 70371, 70372, 70373, 70374, 70375, 70376, 70377, 70378, 70379, 70380, 70381, 70382, 70383) c6( ) c7(bpj); #c1(STX3) c2(XP_005274257) c3(syntaxin-3 isoform X3) c4(285026) c5(285027, 285028, 285029, 285030, 285031) c6( ) c7(bpj); #c1(STX3) c2(XP_011543521) c3(syntaxin-3 isoform X1) c4(342391, 342392, 342393) c5( ) c6( ) c7(bpj); #c1(STX3) c2(XP_011543523) c3(syntaxin-3 isoform X4) c4( ) c5(342394, 342395, 342396, 342397, 342398, 342399) c6( ) c7(bpj); #c1(STX4) c2(NP_001259025) c3(syntaxin-4 isoform 2) c4(96951) c5(96952, 96953, 96954, 96955, 96956, 96957) c6( ) c7(bL, aj, J, ad); #c1(STX4) c2(NP_004595) c3(syntaxin-4 isoform 3) c4(148006) c5(148007, 148008, 148009, 148010, 148011, 148012) c6( ) c7(bL, aj, J, ad); #c1(STX5) c2(NP_001231595) c3(syntaxin-5 isoform 2) c4(87318) c5(87319, 87320, 87321, 87322, 87323, 87324) c6( ) c7(lc); #c1(STX5) c2(XP_011543524) c3(syntaxin-5 isoform X1) c4(342400, 342401, 342402) c5(342403, 342404, 342405, 342406, 342407, 342408, 342409) c6( ) c7(lc); #c1(STX5) c2(XP_011543525) c3(syntaxin-5 isoform X2) c4( ) c5(342410, 342411, 342412, 342413, 342414, 342415) c6( ) c7(lc); #c1(STX5) c2(XP_011543526) c3(syntaxin-5 isoform X3) c4( ) c5(342416, 342417, 342418, 342419, 342420) c6( ) c7(lc); #c1(STX6) c2(NP_001273139) c3(syntaxin-6 isoform 2) c4( ) c5(104349, 104350, 104351, 104352, 104353) c6( ) c7(ey, act); #c1(STX6) c2(NP_005810) c3(syntaxin-6 isoform 1) c4(159624, 159625) c5(159626, 159627, 159628, 159629, 159630, 159631, 159632) c6( ) c7(ey, act); #c1(STX8) c2(NP_004844) c3(syntaxin-8) c4(150225) c5(150226, 150227, 150228, 150229, 150230, 150231) c6( ) c7(xZ, Lq, af); #c1(STXBP1) c2(NP_001027392) c3(syntaxin-binding protein 1 isoform b) c4(30116) c5(30117, 30118, 30119, 30120, 30121, 30122) c6( ) c7(cJC, bN, aqa, yr, cJB, hb, dc, ha, cC, h, Im, K, nA, xw, af, cJA); #c1(STXBP1) c2(NP_003156) c3(syntaxin-binding protein 1 isoform a) c4(135752, 135753, 135754) c5(135755, 135756, 135757, 135758, 135759, 135760, 135761, 135762, 135763, 135764, 135765, 135766, 135767, 135768, 135769, 135770, 135771, 135772) c6( ) c7(cJC, bN, aqa, yr, cJB, hb, dc, ha, cC, h, Im, K, nA, xw, af, cJA); #c1(STXBP2) c2(NP_001120868) c3(syntaxin-binding protein 2 isoform b) c4(44872) c5(44873, 44874, 44875, 44876, 44877, 44878) c6( ) c7(pz, kQ, zA, cJD, dX); #c1(STXBP2) c2(NP_001258963) c3(syntaxin-binding protein 2 isoform c) c4(96821, 96822) c5(96823, 96824, 96825, 96826, 96827, 96828, 96829, 96830, 96831, 96832, 96833, 96834) c6( ) c7(pz, kQ, zA, cJD, dX); #c1(STXBP2) c2(NP_008880) c3(syntaxin-binding protein 2 isoform a) c4(169476, 169477) c5(169478, 169479, 169480, 169481, 169482, 169483, 169484, 169485, 169486, 169487, 169488, 169489) c6( ) c7(pz, kQ, zA, cJD, dX); #c1(STXBP4) c2(NP_848604) c3(syntaxin-binding protein 4) c4(253942) c5(253943, 253944, 253945, 253946, 253947, 253948) c6( ) c7(bL, aW, fe, fq, aT); #c1(STXBP4) c2(XP_006721860) c3(syntaxin-binding protein 4 isoform X6) c4(294327) c5(294328, 294329, 294330, 294331, 294332, 294333, 294334, 294335, 294336, 294337) c6( ) c7(bL, aW, fe, fq, aT); #c1(STXBP5) c2(NP_001121187) c3(syntaxin-binding protein 5 isoform b) c4(45718, 45719) c5(45720, 45721, 45722, 45723, 45724, 45725) c6( ) c7(QL, cd, pA); #c1(STXBP5) c2(NP_640337) c3(syntaxin-binding protein 5 isoform a) c4(238444, 238445) c5(238446, 238447, 238448, 238449, 238450, 238451, 238452, 238453, 238454, 238455, 238456, 238457) c6( ) c7(QL, cd, pA); #c1(STXBP5) c2(XP_006715402) c3(syntaxin-binding protein 5 isoform X4) c4( ) c5(289523) c6( ) c7(QL, cd, pA); #c1(STXBP5) c2(XP_011533753) c3(syntaxin-binding protein 5 isoform X3) c4(329872, 329873) c5(329874, 329875, 329876, 329877, 329878, 329879, 329880, 329881, 329882, 329883, 329884, 329885) c6( ) c7(QL, cd, pA); #c1(STXBP5) c2(XP_011533755) c3(syntaxin-binding protein 5 isoform X6) c4(329886, 329887) c5(329888, 329889, 329890, 329891, 329892, 329893, 329894, 329895, 329896, 329897, 329898) c6( ) c7(QL, cd, pA); #c1(STXBP5) c2(XP_011533756) c3(syntaxin-binding protein 5 isoform X7) c4( ) c5(329899, 329900, 329901, 329902, 329903, 329904, 329905) c6( ) c7(QL, cd, pA); #c1(STXBP5L) c2(NP_055795) c3(syntaxin-binding protein 5-like) c4(183556) c5(183557, 183558, 183559, 183560, 183561, 183562) c6( ) c7(F, al); #c1(STXBP5L) c2(XP_011511635) c3(syntaxin-binding protein 5-like isoform X8) c4( ) c5(302391, 302392, 302393, 302394, 302395, 302396) c6( ) c7(F, al); #c1(STXBP6) c2(NP_001291406) c3(syntaxin-binding protein 6) c4(115890, 115891, 115892) c5(115893, 115894, 115895, 115896, 115897, 115898, 115899, 115900, 115901, 115902, 115903, 115904, 115905, 115906, 115907, 115908, 115909, 115910, 115911, 115912, 115913, 115914, 115915, 115916, 115917, 115918, 115919, 115920, 115921, 115922, 115923) c6( ) c7(y, oe, cd, bN, PN); #c1(STXBP6) c2(XP_011534971) c3(syntaxin-binding protein 6 isoform X1) c4( ) c5(331526, 331527, 331528, 331529, 331530, 331531) c6( ) c7(y, oe, cd, bN, PN); #c1(STYK1) c2(XP_005253474) c3(tyrosine-protein kinase STYK1 isoform X1) c4(272518) c5(272519, 272520, 272521, 272522, 272523, 272524, 272525, 272526) c6(272527, 272528) c7(av, T, eM, aT, bz, bw, ae, ad); #c1(STYK1) c2(XP_011519041) c3(tyrosine-protein kinase STYK1 isoform X2) c4(313508, 313509, 313510, 313511) c5(313512, 313513, 313514, 313515, 313516, 313517, 313518, 313519, 313520, 313521, 313522, 313523, 313524, 313525, 313526, 313527, 313528, 313529, 313530, 313531, 313532, 313533, 313534, 313535) c6( ) c7(av, T, eM, aT, bz, bw, ae, ad); #c1(STYX) c2(NP_001124173) c3 (serine/threonine/tyrosine-interacting protein) c4(48406) c5(48407, 48408, 48409, 48410, 4840, 48412, 48413, 48414, 48415, 48416) c6( ) c7(A, gU, ND, vH, aj, J); #c1(SUB1) c2(NP_006704) c3(activated RNA polymerase II transcriptional coactivator P15) c4(167261, 167262, 167263) c5(167264, 167265, 167266, 167267, 167268, 167269, 167270, 167271, 167272, 167273, 167274, 167275, 167276, 167277, 167278, 167279, 167280, 167281, 167282, 167283, 167284, 167285, 167286, 167287, 167288, 167289, 167290, 167291, 167292, 167293, 167294, 167295, 167296, 167297) c6( ) c7(sc, T, aC, fM, id, aEj, ht, jx, jh, aA, fd, j, ci, fr, hF, Fc, q, ad, eA, ip, x, av, iu, ft, fX, ib, nv, kH, aT, h, hn, dL, K, jj, XZ, hu, rz, hS, ae, eL, Zm, pq, jf, d, je, s, aix, iU, aW, Y, ff, r, aF, en, cI, g, t, as, iK, bw, iP, ck, qJ, iM, bP, eM, aJm, dB, iT, cj, pg, k, EY, bt, B, vi); #c1(SUCLA2) c2(NP_003841) c3 (succinyl-CoA ligase [ADP-forming] subunit beta, mitochondrial precursor) c4(141280, 141281, 141282, 141283, 141284, 141285, 141286) c5(141287, 141288, 141289, 141290, 141291, 141292, 141293, 141294, 141295, 141296, 141297, 141298, 141299, 141300, 141301, 141302, 141303, 141304, 141305, 141306, 141307, 141308) c6( ) c7(dD, ea, ha, I, aj, bS, v, et, eq, nE, aoz, J, eW, K, af, cJF, cmG, Z, f, px, SE, cJE, R, awl, L); #c1(SUCLA2) c2 (XP_011533594) c3 (succinyl-CoA ligase [ADP-forming] subunit beta, mitochondrial isoform X1) c4( ) c5(329678, 329679, 329680, 329681, 329682, 329683, 329684) c6( ) c7(dD, ea, ha, I, aj, bS, v, et, eq, nE, aoz, J, eW, K, af, cJF, cmG, Z, f, px, SE, cJE, R, awl, L); #c1(SUCLA2) c2(XP_011533595) c3 (succinyl-CoA ligase [ADP-forming] subunit beta, mitochondrial isoform X2) c4( ) c5(329685, 329686, 329687, 329688, 329689, 329690, 329691, 329692, 329693, 329694, 329695, 329696, 329697, 329698, 329699, 329700, 329701) c6( ) c7(dD, ea, ha, I, aj, bS, v, et, eq, nE, aoz, J, eW, K, af, cJF, cmG, Z, f, px, SE, cJE, R, awl, L); #c1(SUCLGI) c2(NP_003840) c3(succinyl-CoA ligase [ADP/GDP-forming] subunit alpha, mitochondrial precursor) c4(141273) c5(141274, 141275, 141276, 141277, 141278, 141279) c6( ) c7(cJG, aoz, clb, aA); #c1(SUCLG2) c2(NP_001171070) c3(succinyl-CoA ligase [GDP-forming] subunit beta, mitochondrial isoform 1 precursor) c4(69803, 69804) c5(69805, 69806, 69807, 69808, 69809, 69810) c6( ) c7(dP, ayB, v, cF); #c1(SUCLG2) c2(NP_003839) c3(succinyl-CoA ligase [GDP-forming] subunit beta, mitochondrial isoform 2 precursor) c4(141260) c5(141261, 141262, 141263, 141264, 141265, 141266, 141267, 141268, 141269, 141270, 141271, 141272) c6( ) c7(dP, ayB, v, cF); #c1(SUCNR1) c2(NP_149039) c3(succinate receptor 1) c4(226889) c5(226890, 226891, 226892, 226893, 226894, 226895) c6( ) c7(cZ, dD, ac, W, ea, cz, yy, eq, dd, aeP, aY, vP); #c1(SUC0) c2(NP_055098) c3(SUN domain-containing ossification factor isoform 1 precursor) c4(178920) c5(178921, 178922, 178923, 178924, 178925, 178926) c6( ) c7(h, Ew, bNo); #c1(SUC0) c2(NP_057311) c3(SUN domain-containing ossification factor isoform 2) c4(190046) c5(190047, 190048, 190049, 190050, 190051, 190052) c6( ) c7(h, Ew, bNo); #c1(SUDS3) c2(NP_071936) c3(sin3 histone deacetylase corepressor complex component SDS3) c4(212396, 212397) c5(212398, 212399, 212400, 212401, 212402, 212403, 212404, 212405, 212406, 212407) c6( ) c7(aHP, T, aHQ, cz); #c1(SUDS3) c2(XP_011536973) c3(sin3 histone deacetylase corepressor complex component SDS3 isoform X1) c4( ) c5(334666, 334667) c6( ) c7(aHP, T, aHQ, cz); #c1(SUFU) c2(NP_001171604) c3(suppressor of fused homolog isoform 2) c4( ) c5(70733, 70734, 70735, 70736, 70737, 70738) c6( ) c7(jf, bv, asW, BN, Qr, asI, dB, Y, hy, C, YH, ne, ip, hS); #c1(SUFU) c2(NP_057253) c3(suppressor of fused homolog isoform 1) c4(189730, 189731) c5(189732, 189733, 189734, 189735, 189736, 189737) c6( ) c7(jf, bv, asW, BN, Qr, asI, dB, Y, hy, C, YH, ne, ip, hS); #c1(SUGCT) c2(NP_001180240) c3(succinate-hydroxymethylglutarate CoA-transferase isoform 1) c4(73497) c5(73498, 73499, 73500, 73501, 73502, 73503) c6( ) c7(aC, j, k, Ea, uu, cJH, fq, cd, ad); #c1(SUGCT) c2(NP_001180241) c3(succinate-hydroxymethylglutarate CoA-transferase isoform 2) c4(73504) c5(73505, 73506, 73507, 73508, 73509, 73510) c6( ) c7(aC, j, k, Ea, uu, cJH, fq, cd, ad); #c1(SUGCT) c2(NP_001180242) c3(succinate-hydroxymethylglutarate CoA-transferase isoform 3) c4(73511) c5(73512, 73513, 73514, 73515, 73516, 73517) c6( ) c7(aC, j, k, Ea, uu, cJH, fq, cd, ad); #c1(SUGCT) c2(XP_011513829) c3(succinate-hydroxymethylglutarate CoA-transferase isoform X4) c4(306271) c5( ) c6( ) c7(aC, j, k, Ea, uu, cJH, fq, cd, ad); #c1(SUGCT) c2(XP_011513832) c3(succinate-hydroxymethylglutarate CoA-transferase isoform X7) c4( ) c5(306272, 306273, 306274, 306275, 306276, 306277) c6( ) c7(aC, j, k, Ea, uu, cJH, fq, cd, ad); #c1(SUGP1) c2(NP_757386) c3(SURP and G-patch domain-containing protein 1) c4(249108, 249109, 249110) c5(249111, 249112, 249113, 249114, 249115, 249116, 249117, 249118, 249119, 249120, 249121, 249122, 249123, 249124, 249125, 249126, 249127, 249128) c6( ) c7(T, if, aA, Vd, qN, ad, WY, oW, aT, K, ae, d, je, aW, aq, aF, BU, iM, c, dB, U, B); #c1(SUGT1) c2(NP_001124384) c3(suppressor of G2 allele of SKP1 homolog isoform SGT1B) c4(48754) c5(48755, 48756, 48757, 48758, 48759, 48760, 48761, 48762, 48763, 48764, 48765, 48766, 48767, 48768) c6( ) c7(cd); #c1(SUGT1) c2(NP_006695) c3(suppressor of G2 allele of SKP1 homolog isoform SGT1A) c4(167203, 167204) c5(167205, 167206, 167207, 167208, 167209, 167210, 167211, 167212) c6( ) c7(cd); #c1(SUGT1) c2(XP_011533194) c3(suppressor of G2 allele of SKP1 homolog isoform X2) c4(329329) c5(329330, 329331, 329332, 329333, 329334, 329335) c6( ) c7(cd); #c1(SULF1) c2(NP_055985) c3(extracellular sulfatase Sulf-1 precursor) c4(184891, 184892) c5(184893, 184894, 184895, 184896, 184897, 184898, 184899, 184900, 184901, 184902, 184903, 184904, 184905, 184906, 184907, 184908, 184909, 184910) c6( ) c7(ar, T, aC, iu, aE, AO, cF, aW, fG, aT, fZ, n, aA, aq, aF, m, bu, t, iK, bz, B); #c1(SULF1) c2(XP_011515796) c3(extracellular sulfatase Sulf-1 isoform X1) c4(308576, 308577, 308578, 308579) c5(308580, 308581, 308582, 308583, 308584, 308585, 308586, 308587, 308588, 308589) c6( ) c7(ar, T, aC, iu, aE, AO, cF, aW, fG, aT, fZ, n, aA, aq, aF, m, bu, t, iK, bz, B); #c1(SULF1) c2(XP_011515797) c3(extracellular sulfatase Sulf-1 isoform X3) c4( ) c5(308590, 308591, 308592, 308593, 308594, 308595, 308596, 308597, 308598, 308599, 308600, 308601, 308602, 308603, 308604, 308605, 308606, 308607, 308608, 308609) c6( ) c7(ar, T, aC, iu, aE, AO, cF, aW, fG, aT, fZ, n, aA, aq, aF, m, bu, t, iK, bz, B); #c1(SULF2) c2(NP_061325) c3(extracellular sulfatase Sulf-2 isoform a precursor) c4(200010, 200011) c5(200012, 200013, 200014, 200015, 200016, 200017, 200018, 200019, 200020, 200021, 200022, 200023, 200024, 200025, 200026, 200027) c6( ) c7(bL, T, wL, fG, yk, aw, fZ, aA, cJI, fd, v, cd, q, eA, eJ, dP, iu, aT, qt, aW, fe, aF, bu, me, cm, bz, iP, LB, es, ar, eM, iA, B); #c1(SULF2) c2(NP_940998) c3(extracellular sulfatase Sulf-2 isoform b precursor) c4(260295) c5(260296, 260297, 260298, 260299, 260300, 260301) c6( ) c7(bL, T, wL, fG, yk, aw, fZ, aA, cJI, fd, v, cd, q, eA, eJ, dP, iu, aT, qt, aW, fe, aF, bu, me, cm, bz, iP, LB, es, ar, eM, iA, B); #c1(SULF2) c2(XP_011527218) c3(extracellular sulfatase Sulf-2 isoform X6) c4(321763) c5(321764, 321765, 321766, 321767, 321768, 321769) c6( ) c7(bL, T, wL, fG, yk, aw, fZ, aA, cJI, fd, v, cd, q, eA, eJ, dP, iu, aT, qt, aW, fe, aF, bu, me, cm, bz, iP, LB, es, ar, eM, iA, B); #c1(SULT1A1) c2(NP_803878) c3(sulfotransferase 1A1 isoform a) c4(252670) c5(252671, 252672, 252673, 252674, 252675, 252676, 252677, 252678, 252679, 252680, 252681, 252682, 252683, 252684, 252685, 252686, 252687, 252688, 252689) c6( ) c7(bL, GI, atT, cJJ, T, bM, aC, id, nZ, QO, if, ht, aA, bB, n, hy, gf, j, ci, qN, fw, q, ad, eA, av, aT, Gw, dL, hu, ae, ne, Yi, eL, zQ, avV, d, B, s, aW, ff, mQ, aeU, r, aq, aF, en, cI, gW, t, iK, bz, Ld, qa, iT, dB, bE, X, pP, mg, hL, Gu, oQ, If, aed, QS, BA); #c1(SULT1A1) c2(NP_803880) c3(sulfotransferase 1A1 isoform b) c4(252690, 252691) c5(252692, 252693, 252694, 252695, 252696, 252697, 252698, 252699, 252700, 252701, 252702) c6( ) c7(bL, GI, atT, cJJ, T, bM, aC, id, nZ, QO, if, ht, aA, bB, n, hy, gf, j, ci, qN, fw, q, ad, eA, av, aT, Gw, dL, hu, ae, ne, Yi, eL, zQ, avV, d, B, s, aW, ff, mQ, aeU, r, aQ, aF, en, cI, gW, t, iK, bz, Ld, qa, iT, dB, bE, X, pP, mg, hL, Gu, oQ, If, aed, QS, BA); #c1(SULT1A2) c2(NP_803564) c3(sulfotransferase 1A2) c4( ) c5(252664, 252665, 252666, 252667, 252668, 252669) c6( ) c7(T, aW, r, aT, dL, j, ad); #c1(SULT1A2) c2(XP_006721139) c3(sulfotransferase 1A2 isoform X1) c4(293875, 293876) c5(293877, 293878, 293879, 293880, 293881, 293882, 293883, 293884, 293885, 293886) c6( ) c7(T, aW, r, aT, dL, j, ad); #c1(SULT1A4) c2(NP_001017390) c3(sulfotransferase 1A4) c4(26373) c5(26374, 26375, 26376, 26377, 26378, 26379, 26380, 26381, 26382, 26383, 26384, 26385, 26386, 26387, 26388, 26389, 26390, 26391, 26392, 26393, 26394, 26395, 26396, 26397, 26398, 26399) c6( ) c7(eF, Kd, eH); #c1(SULT1B1) c2(NP_055280) c3(sulfotransferase family cytosolic 1B member 1) c4(180253, 180254) c5(180255, 180256, 180257, 180258, 180259, 180260, 180261, 180262, 180263, 180264, 180265, 180286) c6( ) c7(aw); #c1(SULT1C2) c2(NP_001047) c3(sulfotransferase 1C2 isoform a) c4(34349, 34350) c5(34351, 34352, 34353, 34354, 34355, 34356, 34357, 34358, 34359, 34360, 34361, 34362) c6( ) c7(BN, aW, aT, hy, bt, ne); #c1(SULT1C2) c2(NP_789795) c3(sulfotransferase 1C2 isoform b) c4(252342) c5(252343, 252344, 252345, 252346, 252347, 252348) c6( ) c7(BN, aW, aT, hy, bt, ne); #c1(SULT1E1) c2(NP_005411) c3(estrogen sulfotransferase) c4(155834) c5(155835, 155836, 155837, 155838, 155839, 155840) c6( ) c7(DS, T, cJJ, RX, aI, aA, bB, n, bZ, v, Fb, ci, nA, Fc, pd, eA, ad, kL, aE, M, aT, iv, lG, rO, ae, al, kl, lR, TY, dH, JI, aW, r, fQ, aq, aF, bu, cl, t, iK, bz, Ld, gk, c, dB, bE, hL, cj, hR, m, bgi, Bh, B, ao); #c1(SULT2A1) c2(NP_003158) c3(bile salt sulfotransferase) c4(135773) c5(135774, 135775, 135776, 135777, 135778, 135779, 135780) c6( ) c7(bM, T, lT, aZ, if, aA, fd, ci, qN, eA, ad, aT, h, By, dL, bK, uV, Xb, ae, be, yo, akV, avH, kl, s, rh, aHW, aW, Y, hl, fQ, as, cl, eE, iV, PF, adz, bN, aBs, AV, HW, bQN, y, B); #c1(SULT2B1) c2(NP_004596) c3(sulfotransferase family cytosolic 28 member 1 isoform a) c4(148013) c5(148014, 148015, 148016, 148017, 148018, 148019) c6( ) c7(aW, aw, jx, r, aT, q, bX, cI, ae, B, ad); #c1(SULT2B1) c2(NP_814444) c3(sulfotransferase family cytosolic 2B member 1 isoform b) c4(253033) c5(253034, 253035, 253036, 253037, 253038, 253039) c6( ) c7(aW, aw, jx, r, aT, q, bX, cI, ae, B, ad); #c1(SULT4A1) c2(NP_055166) c3(sulfotransferase 4A1) c4(179549, 179550) c5(179551, 179552, 179553, 179554, 179555, 179556, 179557, 179558, 179559, 179560, 179561, 179562) c6( ) c7(yo, iH, BN, Y, HB, hy, ci, bX, ne); #c1(SULT4A1) c2(XP_011528423) c3(sulfotransferase 4A1 isoform X2) c4(323531) c5(323532, 323533, 323534, 323535, 323536, 323537) c6( ) c7(yo, iH, BN, Y, HB, hy, ci, bX, ne); #c1(SUMF1) c2(NP_001158146) c3(sulfatase-modifying factor 1 isoform 2 precursor) c4(63189) c5(63190, 63191, 63192, 63193, 63194, 63195) c6( ) c7(lE, kB, oe, agV, ade, V); #c1(SUMF1) c2(NP_001158147) c3(sulfatase-modifying factor 1 isoform 3 precursor) c4(63196) c5(63197, 63198, 63199, 63200, 63201, 63202) c6( ) c7(lE, kB, oe, agV, ade, V); #c1(SUMF1) c2(NP_877437) c3(sulfatase-modifying factor 1 isoform 1 precursor) c4(256813) c5(256814, 256815, 256816, 256817, 256818, 256819) c6( ) c7(lE, kB, oe, agV, ade, V); #c1(SUMF1) c2(XP_011531926) c3(sulfatase-modifying factor 1 isoform X2) c4(327961, 327962) c5(327963, 327964, 327965, 327966, 327967, 327968, 327969, 327970, 327971, 327972, 327973, 327974) c6( ) c7(lE, kB, oe, agV, ade, V); #c1(SUMF2) c2(NP_001035934) c3(sulfatase-modifying factor 2 isoform c precursor) c4(33471) c5(33472, 33473, 33474, 33475, 33476, 33477) c6( ) c7(azU, RG, dc, qr, tv, tu, aaW, BF, bC, auu, pJ, aFf, ao); #c1(SUMF2) c2(NP_001035935) c3(sulfatase-modifying factor 2 isoform d precursor) c4(33478) c5(33479, 33480, 33481, 33482, 33483, 33484) c6( ) c7(azU, RG, dc, qr, tv, tu, aaW, BF, bC, auu, pJ, aFf, ao); #c1(SUMF2) c2(NP_001123541) c3(sulfatase-modifying factor 2 isoform e precursor) c4(47460) c5(47461, 47462, 47463, 47464, 47465, 47466) c6( ) c7(azU, RG, dc, qr, tv, tu, aaW, BF, bC, auu, pJ, aFf, ao); #c1(SUMF2) c2(NP_001139805) c3(sulfatase-modifying factor 2 isoform g) c4( ) c5(59985, 59986, 59987, 59988, 59989) c6( ) c7(azU, RG, dc, qr, tv, tu, aaW, BF, bC, auu, pJ, aFf, ao); #c1(SUMF2) c2(NP_056226) c3(sulfatase-modifying factor 2 isoform b precursor) c4(186590, 186591) c5(186592, 186593, 186594, 186595, 186596, 186597, 186598) c6( ) c7(azU, RG, dc, qr, tv, tu, aaW, BF, bC, auu, pJ, aFf, ao); #c1(SUMF2) c2(XP_011513556) c3(sulfatase-modifying factor 2 isoform X1) c4(305843) c5(305844, 305845, 305846, 305847, 305848, 305849) c6( ) c7(azU, RG, dc, qr, tv, tu, aaW, BF, bC, auu, pJ, aFf, ao); #c1(SUMO1) c2(NP_001005781) c3(small ubiquitin-related modifier 1 isoform a precursor) c4(22049, 22050) c5(22051, 22052, 22053, 22054, 22055, 22056, 22057, 22058, 22059, 22060, 22061, 22062) c6( ) c7(T, acI, cd, ad, eA, Na, Db, yt, cJK, amJ, QJ, aT, dz, dL, Nc, jj, aVq, ae, eL, pi, aOX, A, d, aW, ff, rU, aq, en, hJ, QK, eF, bz, cm, ck, apM, bb, rR, c, eM, dB, U, bD, cst, bt, kS, B, y); #c1(SUMO1) c2(NP_001005782) c3(small ubiquitin-related modifier 1 isoform b precursor) c4(22063) c5(22064, 22065, 22066, 22067, 22068, 22069, 22070, 22071, 22072, 22073, 22074, 22075, 22076, 22077) c6( ) c7(T, acI, cd, ad, eA, Na, Db, yt, cJK, amJ, QJ, aT, dz, dL, Nc, jj, aVg, ae, eL, pi, aOX, A, d, aW, ff, rU, aq, en, hJ, QK, eF, bz, cm, ck, apM, bb, rR, c, eM, dB, U, bD, cst, bt, kS, B, y); #c1(SUMO2) c2(NP_001005849) c3(small ubiquitin-related modifier 2 isoform b precursor) c4(22116) c5(22117, 22118, 22119, 22120, 22121, 22122) c6( ) c7(ae, rR, aXK, aW, rU, ew, aT, iY, K, YH, jj, y, kS, pi, ad); #c1(SUMO2) c2(NP_008868) c3(small ubiquitin-related modifier 2 isoform a precursor) c4(169325, 169326) c5(169327, 169328, 169329, 169330, 169331, 169332, 169333, 169334, 169335, 169336, 169337, 169338) c6( ) c7(ae, rR, aXK, aW, rU, ew, aT, iY, K, YH, jj, y, kS, pi, ad); #c1(SUMO3) c2(NP_001273345) c3(small ubiquitin-related modifier 3 isoform 2) c4(104712) c5(104713, 104714, 104715, 104716, 104717, 104718) c6( ) c7(ae, rR, aXK, aW, ew, aT, iY, K, YH, y, kS, pi, ad); #c1(SUMO3) c2(NP_008867) c3(small ubiquitin-related modifier 3 isoform 1 precursor) c4(169318) c5(169319, 169320, 169321, 169322, 169323, 169324) c6( ) c7(ae, rR, aXK, aW, ew, aT, iY, K, YH, y, kS, pi, ad); #c1(SUMO4) c2(NP_001002255) c3(small ubiquitin-related modifier 4) c4(19448) c5(19449, 19450, 19451, 19452, 19453, 19454) c6( ) c7(bL, yG, cL, aj, j, v, uE, mI, o, J, uT, cJL, hD, hH, yF, A, HA, aGQ, cr, eZ, vy, fL, R, y, B); #c1(SUN1) c2(NP_001124437) c3(SUN domain-containing protein 1 isoform a) c4(48865, 48866, 48867, 48868, 48869) c5(48870, 48871, 48872, 48873, 48874, 48875, 48876, 48877, 48878, 48879, 48880, 48881, 48882, 48883, 48884, 48885, 48886, 48887, 48888, 48889, 48890, 48891, 48892, 48893, 48894, 48895) c6( ) c7(ac, MR, xs, rC, uY, Fw); #c1(SUN1) c2(NP_001165415) c3(SUN domain-containing protein 1 isoform c) c4(67667, 67668, 67669, 67670, 67671) c5(67672, 67673, 67674, 67675, 67676, 67677) c6( ) c7(ac, MR, xs, rC, uY, Fw); #c1(SUN1) c2(NP_001165416) c3(SUN domain-containing protein 1 isoform d) c4(67678) c5(67679, 67680, 67681, 67682, 67683, 67684, 67685, 67686, 67687, 67688, 67689, 67690, 67691) c6( ) c7(ac, MR, xs, rC, uY, Fw); #c1(SUN1) c2(NP_001165417) c3(SUN domain-containing protein 1 isoform e) c4(67692) c5(67693, 67694, 67695, 67696, 67697, 67698, 67699, 67700, 67701, 67702, 67703, 67704, 67705, 67706, 67707, 67708, 67709, 67710, 67711, 67712, 67713, 67714, 67715, 67716, 67717, 67718, 67719, 67720, 67721, 67722, 67723, 67724, 67725) c6( ) c7(ac, MR, xs, rC, uY, Fw); #c1(SUN1) c2(NP_079430) c3(SUN domain-containing protein 1 isoform b) c4(218093, 218094) c5(218095, 218096, 218097, 218098, 218099, 218100, 218101, 218102, 218103, 218104, 218105, 218106, 218107, 218108) c6( ) c7(ac, MR, xs, rC, uY, Fw); #c1(SUN2) c2(NP_001186508) c3(SUN domain-containing protein 2 isoform a) c4(77728, 77729) c5(77730, 77731, 77732, 77733, 77734, 77735) c6( ) c7(anR, aCg, iW, rC, uY, Fw, IQ, bU, bz); #c1(SUN2) c2(NP_001186509) c3(SUN domain-containing protein 2 isoform b) c4(77736, 77737, 77738, 77739) c5(77740, 77741, 77742, 77743, 77744, 77745, 77746, 77747, 77748, 77749, 77750, 77751, 77752, 77753, 77754, 77755, 77756, 77757, 77758, 77759, 77760, 77761, 77762, 77763, 77764, 77765, 77766, 77767, 77768, 77769, 77770, 77771, 77772, 77773, 77774, 77775) c6( ) c7(anR, aCg, iW, rC, uY, Fw, IQ, bU, bz); #c1(SUN2) c2(XP_011528406) c3(SUN domain-containing protein 2 isoform X1) c4(323501, 323502, 323503) c5(323504, 323505, 323506, 323507, 323508, 323509, 323510, 323511, 323512, 323513, 323514, 323515, 323516, 323517, 323518) c6( ) c7(anR, aCg, iW, rC, uY, Fw, IQ, bU, bz); #c1(SUN2) c2(XP_011528407) c3(SUN domain-containing protein 2 isoform X2) c4(323519) c5(323520, 323521, 323522, 323523, 323524, 323525, 323526, 323527, 323528, 323529, 323530) c6( ) c7(anR, aCg, iW, rC, uY, Fw, IQ, bU, bz); #c1(SUN3) c2(NP_001025190) c3(SUN domain-containing protein 3 isoform 1) c4(29491, 29492) c5(29493, 29494, 29495, 29496, 29497, 29498, 29499, 29500, 29501, 29502) c6( ) c7(c, an); #c1(SUN3) c2(NP_001271279) c3(SUN domain-containing protein 3 isoform 2) c4(103820) c5(103821, 103822, 103823, 103824, 103825, 103826, 103827, 103828, 103829, 103830, 103831, 103832, 103833) c6( ) c7(c, an); #c1(SUN3) c2(XP_011513554) c3(SUN domain-containing protein 3 isoform X1) c4(305832) c5(305833) c6( ) c7(c, an); #c1(SUN3) c2(XP_011513555) c3(SUN domain-containing protein 3 isoform X2) c4( ) c5(305834, 305835, 305836, 305837, 305838, 305839, 305840, 305841, 305842) c6( ) c7(c, an); #c1(SUOX) c2(NP_000447) c3(sulfite oxidase, mitochondrial) c4(9092, 9093) c5(9094, 9095, 9096, 9097, 9098, 9099, 9100, 9101, 9102, 9103, 9104, 9105, 9106, 9107, 9108) c6( ) c7(bM, mO, A, OW, fc, cod); #c1(SUOX) c2(XP_005269169) c3(sulfite oxidase, mitochondrial isoform X1) c4(282389, 282390) c5(282391, 282392, 282393, 282394, 282395, 282396, 282397, 282398, 282399, 282400, 282401, 282402, 282403, 282404, 282405, 282406, 282407, 282408, 282409, 282410, 282411, 282412, 282413, 282414, 282415, 282416, 282417, 282418, 282419) c6( ) c7(bM, mO, A, OW, fc, cod); #c1(SUPT20H) c2(NP_001014308) c3(transcription factor SPT20 homolog isoform a) c4(25804) c5(25805, 25806, 25807, 25808, 25809, 25810, 25811, 25812, 25813, 25814, 25815, 25816) c6( ) c7(es, T, iu, py, aW, if, aT, aF, ci, qN, ae, B, ad); #c1(SUPT20H) c2(NP_060039) c3(transcription factor SPT20 homolog isoform b) c4(193831) c5(193832, 193833, 193834, 193835, 193836, 193837, 193838, 193839, 193840, 193841, 193842, 193843, 193844, 193845, 193846) c6( ) c7(es, T, iu, py, aW, if, aT, aF, ci, qN, ae, B, ad); #c1(SUPT20H) c2(XP_005266515) c3(transcription factor SPT20 homolog isoform X5) c4(280211) c5( ) c6( ) c7(es, T, iu, py, aW, if, aT, aF, ci, qN, ae, B, ad); #c1(SUPT20H) c2(XP_005266522) c3(transcription factor SPT20 homolog isoform X12) c4(280212) c5( ) c6( ) c7(es, T, iu, py, aW, if, aT, aF, ci, qN, ae, B, ad); #c1(SUPT20H) c2(XP_005266525) c3(transcription factor SPT20 homolog isoform X14) c4( ) c5(280213, 280214, 280215, 280216, 280217, 280218) c6( ) c7(es, T, iu, py, aW, if, aT, aF, ci, qN, ae, B, ad); #c1(SUPT3H) c2(NP_001248752) c3(transcription initiation protein SPT3 homolog isoform 3) c4( ) c5(93989, 93990, 93991, 93992, 93993, 93994) c6( ) c7(Kw, U); #c1(SUPT3H) c2(NP_003590) c3(transcription initiation protein SPT3 homolog isoform 1) c4(139401, 139402) c5(139403, 139404, 139405, 139406, 139407, 139408, 139409, 139410, 139411, 139412, 139413, 139414, 139415, 139416, 139417) c6( ) c7(Kw, U); #c1(SUPT3H) c2(NP_852001) c3(transcription initiation protein SPT3 homolog isoform 2) c4(254788) c5(254789, 254790, 254791, 254792, 254793, 254794, 254795, 254796, 254797, 254798) c6( ) c7(Kw, U); #c1(SUPT4H1) c2(NP_003159) c3(transcription elongation factor SPT4) c4(135781) c5(135782, 135783, 135784, 135785, 135786, 135787, 135788) c6( ) c7(on); #c1(SUPT7L) c2(NP_001269658) c3(STAGA complex 65 subunit gamma isoform a) c4(102425) c5(102426, 102427, 102428, 102429, 102430, 102431) c6( ) c7(T, dA, bfY, qb, ew, aA, jh, aj, lR, fu, fr, hF, V, akW, eA, J, wD, aMp, x, BI, bOc, fh, oG, oW, aT, kH, cU, aLr, hn, h, IQ, bDk, afU, DY, ao, Ft, A, cJM, je, iU, xR, aW, Y, cr, eZ, gl, ln, aF, pD, hp, afq, hf, aot, iV, bw, bz, pb, jg, aHi, ck, es, ou, BU, pa, Fr, iM, avS, y, hk, eU, cj, wR, bfX, m, k, pw, bC, gT, bt, ei, B, hv); #c1(SUPT7L) c2(NP_001269660) c3(STAGA complex 65 subunit gamma isoform b) c4(102432) c5(102433, 102434, 102435, 102436, 102437, 102438, 102439, 102440, 102441, 102442, 102443, 102444, 102445, 102446) c6( ) c7(T, dA, bfY, qb, ew, aA, jh, aj, lR, fu, fr, hF, V, akW, eA, J, wD, aMp, x, Bl, bOc, fh, oG, oW, aT, kH, cU, aLr, hn, h, IQ, bDk, afU, DY, ao, Ft, A, cJM, je, iU, xR, aW, Y, cr, eZ, gI, lo, aF, pD, hp, afq, hf, aot, iV, bw, bz, pb, jg, aHi, ck, es, ou, BU, pa, Fr, iM, avS, y, hk, eU, cj, wR, bfX, m, k, pw, bC, gT, bt, ei, B, hv); #c1(SUPT7L) c2(NP_001269661) c3(STAGA complex 65 subunit gamma isoform c) c4(102447) c5(102448, 102449, 102450, 102451, 102452, 102453) c6( ) c7(T, dA, bfY, qb, ew, aA, jh, aj, lR, fu, fr, hF, V, akW, eA, J, wD, aMp, x, Bl, bOc, fh, oG, oW, aT, kH, cU, aLr, hn, h, IQ, bDk, afU, DY, ao, Ft, A, cJM, je, iU, xR, aW, Y, cr, eZ, gl, lo, aF, pD, hp, afq, hf, aot, iV, bw, bz, pb, jg, aHi, ck, es, ou, BU, pa, Fr, iM, avS, y, hk, eU, cj, wR, bfX, m, k, pw, bC, gT, bt, ei, B, hv); #c1(SUPV3L1) c2(NP_003162) c3(ATP-dependent RNA helicase SUPV3L1, mitochondrial isoform 1) c4(135789, 135790) c5(135791, 135792, 135793, 135794, 135795, 135796, 135797) c6( ) c7(li, T, sF, aT, aeM, af); #c1(SUPV3L1) c2(XP_011538409) c3(ATP-dependent RNA helicase SUPV3L1, mitochondrial isoform X2) c4( ) c5(336093, 336094, 336095, 336096, 336097, 336098) c6( ) c7(li, T, sF, aT, aeM, af); #c1(SURF1) c2(NP_003163) c3(surfeit locus protein 1 isoform 1) c4(135798, 135799) c5(135800, 135801, 135802, 135803, 135804, 135805, 135806, 135807, 135808, 135809, 135810, 135811) c6( ) c7(ob, agU, aAs, caG, nA, bX, aR, vc, aIn, bU, cb, ajU, Az, aUx, mv, kC, ky, SE, U, oh, acJ, it); #c1(SURF4) c2(NP_001267718) c3(surfeit locus protein 4 isoform 3) c4( ) c5(99653, 99654, 99655, 99656, 99657, 99658) c6( ) c7(ad); #c1(SURF4) c2(NP_001267721) c3(surfeit locus protein 4 isoform 5) c4(99659) c5(99660, 99661, 99662, 99663, 99664) c6( ) c7(ad); #c1(SURF4) c2(NP_149351) c3(surfeit locus protein 4 isoform 1) c4(227460, 227461, 227462) c5(227463, 227464, 227465, 227466, 227467, 227468, 227469, 227470, 227471, 227472, 227473, 227474) c6( ) c7(ad); #c1(SURF4) c2(XP_011517246) c3(surfeit locus protein 4 isoform X1) c4(310829) c5(310830, 310831, 310832, 310833, 310834, 310835) c6( ) c7(ad); #c1(SURF4) c2(XP_011517247) c3(surfeit locus protein 4 isoform X2) c4( ) c5(310836) c6( ) c7(ad); #c1(SUSD1) c2(NP_001269569) c3(sushi domain-containing protein 1 isoform 1 precursor) c4(101999) c5(102000, 102001, 102002, 102003, 102004, 102005) c6( ) c7(Na, Nc, c); #c1(SUSD1) c2(NP_001269572) c3(sushi domain-containing protein 1 isoform 3 precursor) c4(102006) c5(102007, 102008, 102009, 102010, 102011, 102012) c6( ) c7(Na, Nc, c); #c1(SUSD1) c2(NP_071931) c3(sushi domain-containing protein 1 isoform 2 precursor) c4(212380) c5(212381, 212382, 212383, 212384, 212385, 212386) c6( ) c7(Na, Nc, c); #c1(SUSD2) c2(NP_062547) c3(sushi domain-containing protein 2 precursor) c4(201936) c5(201937, 201938, 201939, 201940, 201941, 201942) c6( ) c7(aW, c, aT); #c1(SUSD4) c2(NP_001032252) c3(sushi domain-containing protein 4 isoform b precursor) c4(31184) c5(31185, 31186, 31187, 31188, 31189, 31190, 31191, 31192, 31193, 31194, 31195, 31196, 31197, 31198, 31199, 31200, 31201, 31202, 31203, 31204, 31205, 31206) c6( ) c7(aw, bX); #c1(SUSD4) c2(NP_060452) c3(sushi domain-containing protein 4 isoform a precursor) c4(196001, 196002, 196003, 196004) c5(196005, 196006, 196007, 196008, 196009, 196010, 196011, 196012, 196013, 196014, 196015) c6( ) c7(aw, bX); #c1(SUSD4) c2(XP_005273229) c3(sushi domain-containing protein 4 isoform X4) c4( ) c5(284380, 284381, 284382, 284383, 284384) c6( ) c7(aw, bX); #c1(SUSD4) c2(XP_011507988) c3(sushi domain-containing protein 4 isoform X2) c4(298429) c5(298430, 298431, 298432, 298433, 298434, 298435) c6( ) c7(aw, bX); #c1(SUSD6) c2(NP_055549) c3(uncharacterized protein KIAA0247 precursor) c4(181889) c5(181890, 181891, 181892, 181893, 181894, 181895) c6( ) c7(q, r); #c1(SUV39H1) c2(NP_001269095) c3(histone-lysine N-methyltransferase SUV39H1 isoform 1) c4(100431) c5(100432, 100433, 100434, 100435, 100436, 100437) c6( ) c7(ck, T, A, Qr, Be, mC, aW, eZ, aT, r, n, aj, dG, K, fL, q, Xu, bt, B, J, ad); #c1(SUV39H1) c2(NP_003164) c3(histone-lysine N-methyltransferase SUV39H1 isoform 2) c4(135812, 135813, 135814) c5(135815, 135816, 135817, 135818, 135819, 135820, 135821, 135822, 135823, 135824, 135825, 135826, 135827, 135828, 135829, 135830, 135831, 135832, 135833, 135834, 135835, 135836, 135837, 135838) c6( ) c7(ck, T, A, Qr, Be, mC, aW, eZ, aT, r, n, aj, dG, K, fL, q, Xu, bt, B, J, ad); #c1(SUV39H2) c2(NP_001180353) c3(histone-lysine N-methyltransferase SUV39H2 isoform 1) c4(73865, 73866) c5(73867, 73868, 73869, 73870, 73871, 73872) c6( ) c7(av, bz, pb, A, vy); #c1(SUV39H2) c2(NP_001180354) c3(histone-lysine N-methyltransferase SUV39H2 isoform 2) c4( ) c5(73873, 73874, 73875, 73876, 73877) c6( ) c7(av, bz, pb, A, vy); #c1(SUV39H2) c2(NP_001180355) c3(histone-lysine N-methyltransferase SUV39H2 isoform 3) c4(73878, 73879) c5(73880, 73881, 73882, 73883, 73884, 73885, 73886) c6( ) c7(av, bz, pb, A, vy); #c1(SUV39H2) c2(NP_001180356) c3(histone-lysine N-methyltransferase SUV39H2 isoform 4) c4( ) c5(73887, 73888, 73889, 73890, 73891) c6( ) c7(av, bz, pb, A, vy); #c1(SUV39H2) c2(XP_011517963) c3(histone-lysine N-methyltransferase SUV39H2 isoform X2) c4( ) c5(312008) c6( ) c7(av, bz, pb, A, vy); #c1(SUV420H2) c2(NP_116090) c3(histone-lysine N-methyltransferase SUV420H2) c4(225339) c5(225340, 225341, 225342, 225343, 225344, 225345, 225346) c6( ) c7(aq, aT, bq); #c1(SUZ12) c2(NP_056170) c3(polycomb protein SUZ12) c4(186095) c5(186096, 186097, 186098, 186099, 186100, 186101) c6( ) c7(T, if, aA, ci, qN, q, br, ad, hX, eA, aeO, aT, dL, hP, ae, eL, dx, d, aeR, iU, aW, Y, r, aq, aF, aiz, cI, iR, aEm, bw, Ew, dB, lp, hL, m, Th, bt, kS, B); #c1(SV2B) c2(NP_055663) c3(synaptic vesicle glycoprotein 2B isoform 1) c4(182598, 182599) c5(182600, 182601, 182602, 182603, 182604, 182605, 182606, 182607, 182608, 182609, 182610, 182611, 182612, 182613, 182614, 182615, 182616, 182617, 182618, 182619) c6( ) c7(Z, hF, y, dy, ac); #c1(SV2C) c2(NP_001284645) c3(synaptic vesicle glycoprotein 2C isoform 2) c4(112236) c5(112237, 112238, 112239, 112240, 112241, 112242) c6( ) c7(VZ, cz); #c1(SV2C) c2(NP_055794) c3(synaptic vesicle glycoprotein 2C isoform 1) c4(183549) c5(183550, 183551, 183552, 183553, 183554, 183555) c6( ) c7(VZ, cz); #c1(SVEP1) c2(NP_699197) c3(sushi, von Willebrand factor type A, EGF and pentraxin domain-containing protein 1 precursor) c4(245849, 245850, 245851, 245852, 245853, 245854) c5(245855, 245856, 245857, 245858, 245859, 245860, 245861, 245862, 245863, 245864, 245865, 245866, 245867, 245868, 245869, 245870, 245871, 245872, 245873, 245874, 245875, 245876, 245877, 245878, 245879, 245880, 245881, 245882, 245883, 245884, 245885, 245886, 245887, 245888, 245889, 245890) c6( ) c7(aW, ahW, ahI, aT); #c1(SV1L) c2(NP_003165) c3(supervillin isoform 1) c4(135839) c5(135840, 135841, 135842, 135843, 135844, 135845) c6( ) c7(es, bt, aj, fr, K, aZf, V); #c1(SV1L) c2(NP_068506) c3(supervillin isoform 2) c4(209380, 209381) c5(209382, 209383, 209384, 209385, 209386, 209387, 209388, 209389, 209390, 209391, 209392) c6( ) c7(es, bt, aj, fr, K, aZf, V); #c1(SV1L) c2(XP_011517932) c3(supervillin isoform X1) c4(311936) c5(311937, 311938, 311939, 311940, 311941, 311942) c6( ) c7(es, bt, aj, fr, K, aZf, V); #c1(SV1L) c2(XP_011517935) c3(supervillin isoform X4) c4(311943) c5(311944, 311945, 311946, 311947, 311948) c6( ) c7(es, bt, aj, fr, K, aZf, V); #c1(SV1L) c2(XP_011517940) c3(supervillin isoform X8) c4( ) c5(311949, 311950, 311951, 311952, 311953, 311954) c6( ) c7(es, bt, aj, fr, K, aZf, V); #c1(SVIP) c2(NP_683691) c3(small VCP/P97-interacting protein) c4(242380) c5(242381, 242382, 242383, 242384, 242385) c6( ) c7(bL, cd); #c1(SV0P) c2(NP_061181) c3(synaptic vesicle 2-related protein) c4(199804) c5(199805, 199806, 199807, 199808, 199809, 199810, 199811, 199812, 199813, 199814, 199815) c6( ) c7(j, bX); #c1(SWAP70) c2(NP_055870) c3(switch-associated protein 70 isoform 1) c4(184040) c5(184041, 184042, 184043, 184044, 184045, 184046) c6( ) c7(t, ad, m, fR, ae); #c1(SWT1) c2(NP_060143) c3(transcriptional protein SWT1) c4(194427, 194428) c5(194429, 194430, 194431, 194432, 194433, 194434, 194435, 194436, 194437, 194438, 194439, 194440, 194441, 194442, 194443, 194444) c6( ) c7(ck, bt, jj); #c1(SYBU) c2(NP_001093213) c3(syntabulin isoform b) c4(39955, 39956, 39957, 39958) c5(39959, 39960, 39961, 39962, 39963, 39964, 39965, 39966, 39967, 39968, 39969, 39970, 39971, 39972, 39973, 39974, 39975, 39976, 39977, 39978, 39979, 39980, 39981, 39982, 39983, 39984, 39985, 39986, 39987, 39988, 39989, 39990, 39991, 39992, 39993, 39994, 39995, 39996, 39997, 39998, 39999, 40000, 40001, 40002, 40003) c6( ) c7(hl, GC, C, cd, ad, Hx, cbH, aE, h, cy, K, XZ, ae, af, d, aW, amI, Y, ff, en, U, m, B); #c1(SYBU) c2(NP_001093214) c3(syntabulin isoform a) c4(40004, 40005, 40006, 40007, 40008, 40009) c5(40010, 40011, 40012, 40013, 40014, 40015, 40016, 40017, 40018, 40019, 40020, 40021, 40022, 40023, 40024, 40025, 40026, 40027, 40028, 40029, 40030, 40031, 40032, 40033, 40034, 40035, 40036, 40037, 40038, 40039, 40040, 40041, 40042, 40043, 40044, 40045, 40046, 40047, 40048, 40049, 40050, 40051, 40052, 40053, 40054, 40055, 40056, 40057, 40058, 40059, 40060, 40061, 40062, 40063, 40064, 40065, 40066, 40067, 40068, 40069, 40070, 40071, 40072, 40073, 40074, 40075, 40076, 40077, 40078, 40079) c6( ) c7(hl, GC, C, cd, ad, Hx, cbH, aE, h, cy, K, XZ, ae, af, d, aW, amI, Y, ff, en, U, m, B); #c1(SYBU) c2(NP_001093225) c3(syntabulin isoform d) c4(40080, 40081, 40082, 40083, 40084) c5(40085, 40086, 40087, 40088, 40089, 40090, 40091, 40092, 40093, 40094, 40095, 40096, 40097, 40098, 40099, 40100, 40101, 40102, 40103, 40104, 40105, 40106, 40107, 40108) c6( ) c7(hl, GC, C, cd, ad, Hx, cbH, aE, h, cy, K, XZ, ae, af, d, aW, amI, Y, ff, en, U, m, B); #c1(SYBU) c2(NP_001093226) c3(syntabulin isoform c) c4(40109, 40110) c5(40111, 40112, 40113, 40114, 40115, 40116, 40117, 40118, 40119, 40120, 40121) c6( ) c7(hl, GC, C, cd, ad, Hx, cbH, aE, h, cy, K, XZ, ae, af, d, aW, amI, Y, ff, en, U, m, B); #c1(SYCE1) c2(NP_001137235) c3(synaptonemal complex central element protein 1 isoform 3) c4(55087, 55088) c5(55089, 55090, 55091, 55092, 55093, 55094, 55095, 55096) c6( ) c7(vJ, iI); #c1(SYCE1) c2(NP_001137236) c3(synaptonemal complex central element protein 1 isoform 4) c4(55097) c5(55098, 55099, 55100, 55101, 55102, 55103) c6( ) c7(vJ, iI); #c1(SYCE1) c2(NP_570140) c3(synaptonemal complex central element protein 1 isoform 1) c4( ) c5(234057, 234058, 234059, 234060, 234061, 234062, 234063, 234064) c6( ) c7(vJ, iI); #c1(SYCE1L) c2(NP_001123451) c3(synaptonemal complex central element protein 1-like) c4(47093) c5(47094, 47095, 47096, 47097, 47098, 47099) c6( ) c7(T, ha, jx, fr, ci, lu, q, ft, F, ib, aE, jL, aT, be, ls, aW, Y, kK, hC, ff, ln, aF, en, hf, hJ, g, bz, eM, m, hE, bt, B, hS); #c1(SYCP2) c2(NP_055073) c3(synaptonemal complex protein 2) c4(178775, 178776) c5(178777, 178778, 178779, 178780, 178781, 178782, 178783, 178784, 178785, 178786, 178787, 178788, 178789, 178790, 178791, 178792) c6( ) c7(vH, if, qN, af, ND); #c1(SYCP2L) c2(NP_001035364) c3(synaptonemal complex protein 2-like) c4(32823, 32824) c5(32825, 32826, 32827, 32828, 32829, 32830, 32831, 32832, 32833, 32834, 32835, 32836) c6( ) c7(gv); #c1(SYCP3) c2(NP_001171420) c3(synaptonemal complex protein 3) c4(70066) c5(70067, 70068, 70069, 70070, 70071, 70072, 70073, 70074, 70075, 70076, 70077, 70078, 70079) c6( ) c7(T, sn, iT, if, vH, aDC, qN, pt, bt, cJN); #c1(SYCP3) c2(XP_005268979) c3(synaptonemal complex protein 3 isoform X1) c4( ) c5(282257) c6( ) c7(T, sn, iT, if, vH, aDC, qN, pt, bt, cJN); #c1(SYK) c2(XP_011517248) c3(tyrosine-protein kinase SYK isoform X1) c4(310837) c5(310838, 310839, 310840, 310841, 310842, 310843, 310844, 310845, 310846, 310847) c6( ) c7(bL, cxW, T, dD, fM, dA, rV, fR, ea, yk, iW, jh, cz, n, eq, ci, V, ai, x, azY, ft, ib, aT, Vv, dz, hn, cmI, qt, aW, Y, ff, Of, eZ, Og, en, hf, me, wA, bw, bz, ck, Ew, bP, cj, CZ, ME, k, fD, bt, B); #c1(SYK) c2(XP_011517249) c3(tyrosine-protein kinase SYK isoform X2) c4(310848) c5(310849, 310850, 310851, 310852, 310853, 310854, 310855, 310856, 310857, 310858) c6( ) c7(bL, cxW, T, dD, fM, dA, rV, fR, ea, yk, iW, jh, cz, n, eq, ci, V, ai, x, azY, ft, ib, aT, Vv, dz, hn, cmI, qt, aW, Y, ff, Of, eZ, Og, en, hf, mo, wA, bw, bz, ck, Ew, bP, cj, CZ, ME, k, fD, bt, B); #c1(SYMPK) c2(XP_011525656) c3(symplekin isoform X1) c4(320067, 320068) c5(320069, 320070, 320071, 320072, 320073, 320074, 320075, 320076, 320077, 320078, 320079) c6( ) c7(aA); #c1(SYMPK) c2(XP_011525657) c3(symplekin isoform X2) c4( ) c5(320080) c6( ) c7(aA); #c1(SYN1) c2(NP_008881) c3(synapsin-1 isoform Ia) c4(169490) c5( ) c6( ) c7(bL, Qi, T, bb, aW, dR, ha, Ir, aT, cm, avI, an, cJO, Fc, af, bN, L); #c1(SYN1) c2(NP_598006) c3(synapsin-1 isoform Ib) c4(235282) c5(235283, 235284, 235285, 235286, 235287, 235288, 235289, 235290, 235291, 235292, 235293, 235294, 235295, 235296, 235297, 235298) c6( ) c7(bL, Qi, T, bb, aW, dR, ha, Ir, aT, cm, avI, an, cJO, Fc, af, bN, L); #c1(SYN2) c2(NP_003169) c3(synapsin-2 isoform IIb) c4( ) c5(135853) c6( ) c7(bL, nX, ha, avI, bK, af, bN, zn); #c1(SYN2) c2(NP_598328) c3(synapsin-2 isoform IIa) c4(235405) c5(235406, 235407, 235408, 235409, 235410, 235411) c6( ) c7(bL, nX, ha, avI, bK, af, bN, zn); #c1(SYN2) c2(XP_006713376) c3(synapsin-2 isoform X3) c4( ) c5(287164) c6( ) c7(bL, nX, ha, avI, bK, af, bN, zn); #c1(SYN3) c2(NP_598344) c3(synapsin-3 isoform IIIc) c4(235433) c5(235434, 235435, 235436, 235437, 235438, 235439, 235440, 235441, 235442, 235443, 235444, 235445, 235446, 235447, 235448, 235449) c6( ) c7(cF, W, wK, Vr, EQ, Ir, n, aHU, dL, bK, Da, V, eL, bN); #c1(SYN3) c2(XP_011528711) c3(synapsin-3 isoform X1) c4(323964) c5( ) c6( ) c7(cF, W, wK, Vr, EQ, Ir, n, aHU, dL, bK, Da, V, eL, bN); #c1(SYN3) c2(XP_011528712) c3(synapsin-3 isoform X2) c4(323965) c5( ) c6( ) c7(cF, W, wK, Vr, EQ, Ir, n, aHU, dL, bK, Da, V, eL, bN); #c1(SYN3) c2(XP_011528714) c3(synapsin-3 isoform X4) c4( ) c5(323966, 323967, 323968, 323969, 323970, 323971) c6( ) c7(cF, W, wK, Vr, EQ, Ir, n, aHU, dL, bK, Da, V, eL, bN); #c1(SYN3) c2(XP_011528715) c3(synapsin-3 isoform X5) c4(323972, 323973) c5( ) c6( ) c7(cF, W, wK, Vr, EQ, Ir, n, aHU, dL, bK, Da, V, eL, bN); #c1(SYN3) c2(XP_011528716) c3(synapsin-3 isoform X6) c4( ) c5(323974, 323975, 323976, 323977, 323978, 323979, 323980, 323981, 323982, 323983, 323984, 323985) c6( ) c7(cF, W, wK, Vr, EQ, Ir, n, aHU, dL, bK, Da, V, eL, bN); #c1(SYNCRIP) c2(NP_001153146) c3(heterogeneous nuclear ribonucleoprotein Q isoform 3) c4( ) c5(60452, 60453, 60454, 60455, 60456, 60457) c6( ) c7(kf, bB, bE, ey); #c1(SYNCRIP) c2(NP_001153148) c3(heterogeneous nuclear ribonucleoprotein Q isoform 5) c4( ) c5(60458, 60459, 60460, 60461, 60462, 60463, 60464, 60465, 60466, 60467, 60468, 60469) c6( ) c7(kf, bB, bE, ey); #c1(SYNCRIP) c2(NP_001153149) c3(heterogeneous nuclear ribonucleoprotein Q isoform 6) c4(60470) c5( ) c6( ) c7(kf, bB, bE, ey); #c1(SYNCRIP) c2(NP_006363) c3(heterogeneous nuclear ribonucleoprotein Q isoform 1) c4(164379, 164380) c5( ) c6( ) c7(kf, bB, bE, ey); #c1(SYNDIG1) c2(NP_079169) c3(synapse differentiation-inducing gene protein 1) c4(217284) c5(217285, 217286, 217287, 217288, 217289, 217290) c6( ) c7(aC, gf, aw); #c1(SYNE1) c2(NP_149062) c3(nesprin-1 isoform 2) c4(226968, 226969, 226970) c5(226971, 226972, 226973, 226974, 226975, 226976, 226977, 226978, 226979, 226980, 226981, 226982) c6( ) c7(bL, T, oe, ht, ci, q, x, cc, cJP, aT, bK, K, ji, cJQ, s, aW, Y, ff, xs, r, uY, en, g, t, qa, ck, Dy, ky, kB, gZ, Fw, m, k, lB, B); #c1(SYNE1) c2(NP_892006) c3(nesprin-1 isoform 1) c4(257450, 257451, 257452) c5(257453, 257454, 257455, 257456, 257457, 257458, 257459, 257460, 257461, 257462, 257463, 257464, 257465, 257466, 257467, 257468, 257469, 257470) c6( ) c7(bL, T, oe, ht, ci, q, x, cc, cJP, aT, bK, K, ji, cJQ, s, aW, Y, ff, xs, r, uY, en, g, t, qa, ck, Dy, ky, kB, gZ, Fw, m, k, lB, B); #c1(SYNE1) c2(XP_006715475) c3(nesprin-1 isoform X8) c4( ) c5(289582, 289583, 289584, 289585, 289586, 289587) c6( ) c7(bL, T, oe, ht, ci, q, x, cc, cJP, aT, bK, K, ji, cJQ, s, aW, Y, ff, xs, r, uY, en, g, t, qa, ck, Dy, ky, kB, gZ, Fw, m, k, lB, B); #c1(SYNE1) c2(XP_006715479) c3(nesprin-1 isoform X12) c4(289588) c5(289589, 289590, 289591, 289592, 289593, 289594, 289595, 289596, 289597, 289598, 289599, 289600) c6( ) c7(bL, T, oe, ht, ci, q, x, cc, cJP, aT, bK, K, ji, cJQ, s, aW, Y, ff, xs, r, uY, en, g, t, qa, ck, Dy, ky, kB, gZ, Fw, m, k, lB, B); #c1(SYNE1) c2(XP_011533948) c3(nesprin-1 isoform X23) c4(330145) c5( ) c6( ) c7(bL, T, oe, ht, ci, q, x, cc, cJP, aT, bK, K, ji, cJQ, s, aW, Y, ff, xs, r, uY, en, g, t, qa, ck, Dy, ky, kB, gZ, Fw, m, k, lB, B); #c1(SYNE2) c2(NP_055995) c3(nesprin-2 isoform 1) c4(185002, 185003, 185004, 185005) c5(185006, 185007, 185008, 185009, 185010, 185011, 185012, 185013, 185014, 185015, 185016, 185017, 185018, 185019, 185020, 185021, 185022, 185023, 185024, 185025, 185026, 185027, 185028, 185029, 185030, 185031, 185032, 185033) c6( ) c7(cJR, cc, wL, xs, Fw, fr); #c1(SYNE2) c2(NP_878914) c3(nesprin-2 isoform 2) c4(257167) c5(257168, 257169, 257170, 257171, 257172) c6( ) c7(cJR, cc, wL, xs, Fw, fr); #c1(SYNE2) c2(NP_878917) c3(nesprin-2 isoform 4) c4(257192) c5(257193, 257194, 257195, 257196, 257197, 257198) c6( ) c7(cJR, cc, wL, xs, Fw, fr); #c1(SYNE2) c2(NP_878918) c3(nesprin-2 isoform 5) c4(257199, 257200) c5(257201, 257202, 257203, 257204, 257205, 257206, 257207, 257208, 257209, 257210, 257211, 257212) c6( ) c7(cJR, cc, wL, xs, Fw, fr); #c1(SYNE2) c2(XP_005267511) c3(nesprin-2 isoform X3) c4( ) c5(281016) c6( ) c7(cJR, cc, wL, xs, Fw, fr); #c1(SYNE2) c2(XP_006720147) c3(nesprin-2 isoform X13) c4(293294) c5(293295, 293296, 293297, 293298, 293299, 293300) c6( ) c7(cJR, cc, wL, xs, Fw, fr); #c1(SYNE2) c2(XP_011534879) c3(nesprin-2 isoform X1) c4( ) c5(331414, 331415, 331416, 331417, 331418, 331419) c6( ) c7(cJR, cc, wL, xs, Fw, fr); #c1(SYNE2) c2(XP_011534886) c3(nesprin-2 isoform X14) c4(331420) c5(331421) c6( ) c7(cJR, cc, wL, xs, Fw, fr); #c1(SYNE4) c2(NP_001034965) c3(nesprin-4 isoform 1) c4(32408) c5(32409, 32410, 32411, 32412, 32413, 32414) c6( ) c7(cJS, bCd); #c1(SYNE4) c2(NP_001284664) c3(nesprin-4 isoform 2) c4(112281) c5(112282, 112283, 112284, 112285, 112286, 112287) c6( ) c7(cJS, bCd); #c1(SYNGAP1) c2(NP_006763) c3(ras/Rap GTPase-activating protein SynGAP) c4(167821, 167822, 167823, 167824, 167825) c5(167826, 167827, 167828, 167829, 167830, 167831, 167832, 167833, 167834, 167835, 167836, 167837, 167838, 167839, 167840, 167841, 167842, 167843, 167844, 167845, 167846, 167847, 167848, 167849, 167850, 167851, 167852, 167853, 167854, 167855, 167856, 167857, 167858, 167859, 167860, 167861, 167862, 167863, 167864, 167865, 167866, 167867) c6( ) c7(bVI, cyw, Ck, bN, ot, kl, ha, ol, aFy, eZ, cJT, nA, Cd, hg, rz, Cb, dr, xt); #c1(SYNGR1) c2(NP_004702) c3(synaptogyrin-1 isoform 1a) c4(148931, 148932) c5(148933, 148934, 148935, 148936, 148937, 148938) c6( ) c7(bt, bK); #c1(SYNGR1) c2(NP_663783) c3(synaptogyrin-1 isoform 1b) c4(241578, 241579) c5(241580, 241581, 241582, 241583, 241584, 241585, 241586, 241587, 241588, 241589, 241590, 241591, 241592, 241593, 241594, 241595, 241596, 241597) c6( ) c7(bt, bK); #c1(SYNGR1) c2(NP_663791) c3(synaptogyrin-1 isoform 1c) c4(241638) c5(241639, 241640, 241641, 241642, 241643, 241644) c6( ) c7(bt, bK); #c1(SYNGR2) c2(NP_004701) c3(synaptogyrin-2) c4(148924) c5(148925, 148926, 148927, 148928, 148929, 148930) c6( ) c7(T); #c1(SYNGR2) c2(XP_005257849) c3(synaptogyrin-2 isoform X1) c4( ) c5(275382, 275383) c6( ) c7(T); #c1(SYNJ1) c2(NP_001153774) c3(synaptojanin-1 isoform c) c4(60985) c5(60986, 60987, 60988, 60989, 60990) c6( ) c7(KC, bv, bAn, cJU, tx, cm, uJ, bK, f, nC, xg, af); #c1(SYNJ1) c2(NP_001153778) c3(synaptojanin-1 isoform d) c4(60991) c5(60992, 60993, 60994, 60995, 60996, 60997) c6( ) c7(KC, bv, bAn, cJU, tx, cm, uJ, bK, f, nC, xg, af); #c1(SYNJ1) c2(NP_003886) c3(synaptojanin-1 isoform a) c4(141806, 141807) c5(141808, 141809, 141810, 141811, 141812, 141813, 141814, 141815, 141816, 141817, 141818, 141819, 141820, 141821, 141822, 141823, 141824, 141825, 141826) c6( ) c7(KC, bv, bAn, cJU, tx, cm, uJ, bK, f, nC, xg, af); #c1(SYNJ1) c2(NP_982271) c3(synaptojanin-1 isoform b) c4(263248) c5(263249) c6( ) c7(KC, bv, bAn, cJU, tx, cm, uJ, bK, f, nC, xg, af); #c1(SYNJ2) c2(NP_001171559) c3(synaptojanin-2 isoform 2) c4( ) c5(70582, 70583, 70584, 70585, 70586, 70587) c6( ) c7(aT, gf, Jt, cd, ad, zn); #c1(SYNJ2) c2(NP_003889) c3(synaptojanin-2 isoform 1) c4(141895, 141896, 141897, 141898) c5(141899, 141900, 141901, 141902, 141903, 141904) c6( ) c7(aT, gf, Jt, cd, ad, zn); #c1(SYNJ2) c2(XP_005267257) c3(synaptojanin-2 isoform X7) c4( ) c5(280842) c6( ) c7(aT, gf, Jt, cd, ad, zn); #c1(SYNJ2) c2(XP_006715655) c3(synaptojanin-2 isoform X3) c4(289688) c5(289689, 289690, 289691, 289692, 289693, 289694) c6( ) c7(aT, gf, Jt, cd, ad, zn); #c1(SYNJ2) c2(XP_011534526) c3(synaptojanin-2 isoform X2) c4(331019) c5(331020, 331021, 331022, 331023, 331024, 331025) c6( ) c7(aT, gf, Jt, cd, ad, zn); #c1(SYNJ2) c2(XP_011534531) c3(synaptojanin-2 isoform X8) c4(331026) c5(331027, 331028, 331029, 331030, 331031, 331032, 331033, 331034, 331035, 331036, 331037, 331038) c6( ) c7(aT, gf, Jt, cd, ad, zn); #c1(SYNJ2) c2(XP_011534532) c3(synaptojanin-2 isoform X9) c4( ) c5(331039, 331040, 331041, 331042, 331043, 331044) c6( ) c7(aT, gf, Jt, cd, ad, zn); #c1(SYNJ2BP) c2(NP_060843) c3(synaptojanin-2-binding protein) c4(198092) c5(198093, 198094, 198095, 198096, 198097, 198098) c6( ) c7(aW, aT); #c1(SYNM) c2(NP_056101) c3(synemin isoform B) c4(185712, 185713) c5(185714, 185715, 185716, 185717, 185718, 185719, 185720, 185721, 185722, 185723, 185724, 185725) c6( ) c7(T, GC, n, Hr, Dq, oj, aT, K, an, Ii, ak, yo, Pw, d, s, aW, app, cm, hq, Bv, ky, U, aen, B); #c1(SYNM) c2(NP_663780) c3(synemin isoform A) c4(241555) c5(241556, 241557, 241558, 241559, 241560, 241561) c6( ) c7(T, GC, n, Hr, Dq, oj, aT, K, an, Ii, ak, yo, Pw, d, s, aW, app, cm, hq, Bv, ky, U, aen, B); #c1(SYNP0) c2(NP_001103444) c3(synaptopodin isoform B) c4(41907) c5( ) c6( ) c7(sk, dK, vw, ah, K, ey, uW, uC, ad); #c1(SYNP0) c2(NP_001159681) c3(synaptopodin isoform C) c4(64556) c5(64557, 64558, 64559, 64560, 64561, 64562, 64563, 64564, 64565, 64566, 64567, 64568, 64569, 64570, 64571, 64572) c6( ) c7(sk, dK, vw, ah, K, ey, uW, uC, ad); #c1(SYNP0) c2(NP_009217) c3(synaptopodin isoform A) c4(171564) c5(171565, 171566, 171567, 171568, 171569) c6( ) c7(sk, dK, vw, ah, K, ey, uW, uC, ad); #c1(SYNP0) c2(XP_006714818) c3(synaptopodin isoform X3) c4( ) c5(288248) c6( ) c7(sk, dK, vw, ah, K, ey, uW, uC, ad); #c1(SYNP02) c2(NP_001122405) c3(synaptopodin-2 isoform b) c4(46796) c5(46797, 46798, 46799, 46800, 46801, 46802) c6( ) c7(ae, ad); #c1(SYNP02) c2(NP_001122406) c3(synaptopodin-2 isoform c) c4(46803) c5(46804, 46805, 46806, 46807, 46808, 46809) c6( ) c7(ae, ad); #c1(SYNP02) c2(NP_001273683) c3(synaptopodin-2 isoform d) c4( ) c5(105608) c6( ) c7(ae, ad); #c1(SYNP02) c2(NP_001273684) c3(synaptopodin-2 isoform e) c4(105609) c5(105610, 105611, 105612, 105613, 105614) c6( ) c7(ae, ad); #c1(SYNP02) c2(NP_597734) c3(synaptopodin-2 isoform a) c4(235156) c5(235157, 235158, 235159, 235160, 235161, 235162) c6( ) c7(ae, ad); #c1(SYNPR) c2(NP_001123475) c3(synaptoporin isoform 1) c4(47113, 47114) c5(47115, 47116, 47117, 47118, 47119, 47120) c6( ) c7(bM, ac); #c1(SYNPR) c2(NP_653243) c3(synaptoporin isoform 2 precursor) c4(239289) c5(239290, 239291, 239292, 239293, 239294, 239295, 239296, 239297, 239298, 239299, 239300, 239301) c6( ) c7(bM, ac); #c1(SYP) c2(NP_003170) c3(synaptophysin) c4(135854, 135855) c5(135856, 135857, 135858, 135859, 135860, 135861, 135862, 135863, 135864, 135865, 135866, 135867, 135868, 135869) c6( ) c7(cZ, Th, Or, aaI, ahX, ti, aj, bS, ct, ci, bNe, Fc, iJ, J, xt, aao, ad, iC, ft, IE, ot, nv, WY, pX, SV, iv, h, bK, K, acQ, dd, ae, af, Yi, dx, Lg, li, jf, yp, d, bux, s, AQ, anx, ff, nf, Hu, BG, en, g, Z, cm, eK, chr, tj, ac, c, eM, wO, Xu, cJV, xg); #c1(SYP) c2(XP_011542253) c3(synaptophysin isoform X2) c4( ) c5(340787, 340788, 340789, 340790, 340791) c6( ) c7(cZ, Th, Or, aaI, ahX, ti, aj, bS, ct, ci, bNe, Fc, iJ, J, xt, aao, ad, iC, ft, IE, ot, nv, WY, pX, SV, iv, h, bK, K, acQ, dd, ae, af, Yi, dx, Lg, li, jf, yo, d, bux, s, AQ, anx, ff, nf, Hu, BG, en, g, Z, cm, eK, chr, tj, ac, c, eM, wO, Xu, cJV, xg); #c1(SYPL1) c2(NP_006745) c3(synaptophysin-like protein 1 isoform a) c4(167633, 167634) c5(167635, 167636, 167637, 167638, 167639, 167640, 167641, 167642, 167643) c6(167644, 167645) c7(ey); #c1(SYPL1) c2(NP_874384) c3(synaptophysin-like protein 1 isoform b) c4( ) c5(256657, 256658, 256659, 256660, 256661) c6( ) c7(ey); #c1(SYPL2) c2(XP_011539585) c3(synaptophysin-like protein 2 isoform X1) c4(337816) c5( ) c6( ) c7(L); #c1(SYPL2) c2(XP_011539587) c3(synaptophysin-like protein 2 isoform X4) c4(337817) c5(337818, 337819, 337820, 337821, 337822, 337823) c6( ) c7(L); #c1(SYT1) c2(NP_001278830) c3(synaptotagmin-1 isoform 2) c4(110677) c5(110678, 110679, 110680, 110681, 110682, 110683, 110684, 110685, 110686, 110687, 110688, 110689, 110690, 110691, 110692, 110693, 110694, 110695, 110696, 110697, 110698, 110699, 110700, 110701) c6( ) c7(oO, bM, T, os, if, al, bEy, eb, fd, lR, ci, bv, aE, K, eG, aW, az, asD, g, eE, cm, bw, axG, nB, cj, iS, m, ht, aj, BF, nA, qN, eW, kH, cU, pi, dx, gi, fe, kp, fq, Qf, dB, cJa, it, B, aA, C, V, q, J, eA, eJ, aSg, yg, aT, ae, af, aAi, jf, nO, Y, r, en, bu, t, f, iK, pb, ck, blC, iM, ac, c, ig, hr, bt, qb, ha, oZ, dG, iJ, ad, XB, dP, hd, azq, hP, ji, azR, gj, d, je, ff, xs, eZ, aF, iV, DF, bF, QC, y, kS, X, brt); #c1(SYT1) c2(NP_005630) c3(synaptotagmin-1 isoform 1) c4(158096, 158097, 158098, 158099, 158100) c5(158101, 158102, 158103, 158104, 158105, 158106, 158107, 158108, 158109, 158110, 158111, 158112, 158113, 158114, 158115, 158116, 158117, 158118, 158119, 158120) c6( ) c7(oO, bM, T, os, if, aI, bEy, eb, fd, lR, ci, bv, aE, K, eG, aW, az, asD, g, eE, cm, bw, axG, nB, cj, iS, m, ht, aj, BF, nA, qN, eW, kH, cU, pi, dx, gi, fe, kp, fq, Qf, dB, cJa, it, B, aA, C, V, q, J, eA, eJ, aSg, yg, aT, ae, af, aAi, jf, nO, Y, r, en, bu, t, f, iK, pb, ck, blC, iM, ac, c, ig, hr, bt, qb, ha, oZ, dG, iJ, ad, XB, dP, hd, azq, hP, ji, azR, gj, d, je, ff, xs, eZ, aF, iV, DF, bF, QC, y, kS, X, brt); #c1(SYT11) c2(NP_689493) c3(synaptotagmin-11) c4(242918, 242919) c5(242920, 242921, 242922, 242923, 242924, 242925, 242926, 242927, 242928, 242929, 242930, 242931) c6( ) c7(bL, an); #c1(SYT12) c2(NP_001171351) c3(synaptotagmin-12) c4( ) c5(70055, 70056, 70057, 70058, 70059, 70060, 70061, 70062, 70063, 70064, 70065) c6( ) c7(bL); #c1(SYT12) c2(XP_006718800) c3(synaptotagmin-12 isoform X3) c4( ) c5(292002, 292003) c6( ) c7(bL); #c1(SYT12) c2(XP_011543648) c3(synaptotagmin-12 isoform X2) c4(342763) c5(342764) c6( ) c7(bL); #c1(SYT13) c2(NP_065877) c3(synaptotagmin-13 isoform 1) c4(206042) c5(206043, 206044, 206045, 206046, 206047, 206048, 206049, 206050) c6( ) c7(aq, cu); #c1(SYT14) c2(NP_001139733) c3(synaptotagmin-14 isoform 1) c4(59789) c5(59790, 59791, 59792, 59793, 59794, 59795) c6( ) c7(oe, aw, U, cJW); #c1(SYT14) c2(NP_001139734) c3(synaptotagmin-14 isoform 3) c4(59796, 59797) c5(59798, 59799, 59800, 59801, 59802, 59803, 59804, 59805, 59806, 59807, 59808, 59809, 59810) c6( ) c7(oe, aw, U, cJW); #c1(SYT14) c2(NP_001139736) c3(synaptotagmin-14 isoform 2) c4(59811) c5(59812, 59813, 59814, 59815, 59816, 59817, 59818, 59819, 59820, 59821) c6( ) c7(oe, aw, U, cJW); #c1(SYT14) c2(NP_694994) c3(synaptotagmin-14 isoform 4) c4(245607, 245608) c5(245609, 245610, 245611, 245612, 245613, 245614, 245615, 245616, 245617, 245618, 245619) c6( ) c7(oe, aw, U, cJW); #c1(SYT4) c2(NP_065834) c3(synaptotagmin-4) c4(205752, 205753) c5(205754, 205755, 205756, 205757, 205758, 205759, 205760, 205761, 205762, 205763, 205764, 205765) c6( ) c7(bL, he, Y, fe); #c1(SYT6) c2(XP_011539054) c3(synaptotagmin-6 isoform X2) c4( ) c5(337125, 337126, 337127, 337128, 337129, 337130, 337131, 337132, 337133, 337134, 337135, 337136) c6( ) c7(he, fr); #c1(SYT9) c2(NP_783860) c3(synaptotagmin-9) c4(251764) c5(251765, 251766, 251767, 251768, 251769, 251770) c6( ) c7(aE); #c1(SYT9) c2(XP_011518204) c3(synaptotagmin-9 isoform X3) c4(312239) c5(312240, 312241, 312242, 312243, 312244, 312245) c6( ) c7(aE); #c1(SYTL1) c2(XP_011540618) c3(synaptotagmin-like protein 1 isoform X4) c4(339146) c5(339147, 339148, 339149, 339150, 339151, 339152) c6( ) c7(h, ae, ci); #c1(SYTL2) c2(NP_001156423) c3(synaptotagmin-like protein 2 isoform g) c4(61712) c5(61713, 61714, 61715, 61716, 61717, 61718, 61719) c6( ) c7(T, AM, ff, km, aA, io, it, aF, K, en, hB, bz); #c1(SYTL2) c2(NP_001156424) c3(synaptotagmin-like protein 2 isoform h) c4( ) c5(61720, 61721, 61722, 61723, 61724, 61725, 61726, 61727, 61728, 61729) c6( ) c7(T, AM, ff, km, aA, io, it, aF, K, en, hB, bz); #c1(SYTL2) c2(NP_001156425) c3(synaptotagmin-like protein 2 isoform i) c4(61730, 61731) c5(61732, 61733, 61734, 61735, 61736, 61737) c6( ) c7(T, AM, ff, km, aA, io, it, aF, K, en, hB, bz); #c1(SYTL2) c2(NP_001276537) c3(synaptotagmin-like protein 2 isoform j) c4( ) c5(108215, 108216, 108217, 108218, 108219, 108220, 108221, 108222, 108223, 108224) c6( ) c7(T, AM, ff, km, aA, io, it, aF, K, en, hB, bz); #c1(SYTL2) c2(NP_116561) c3(synaptotagmin-like protein 2 isoform a) c4(226179) c5(226180, 226181, 226182, 226183, 226184, 226185, 226186, 226187, 226188, 226189, 226190, 226191) c6( ) c7(T, AM, ff, km, aA, io, it, aF, K, en, hB, bz); #c1(SYTL2) c2(NP_996812) c3(synaptotagmin-like protein 2 isoform b) c4( ) c5(264612, 264613, 264614, 264615, 264616, 264617, 264618, 264619, 264620, 264621, 264622, 264623, 264624, 264625, 264626, 264627, 264628, 264629, 264630, 264631, 264632, 264633, 264634, 264635, 264636, 264637, 264638, 264639) c6( ) c7(T, AM, ff, km, aA, io, it, aF, K, en, hB, bz); #c1(SYTL2) c2(NP_996813) c3(synaptotagmin-like protein 2 isoform f) c4( ) c5(264640, 264641, 264642, 264643, 264644, 264645) c6( ) c7(T, AM, ff, km, aA, io, it, aF, K, en, hB, bz); #c1(SYTL2) c2(XP_005274114) c3(synaptotagmin-like protein 2 isoform X5) c4(284946, 284947, 284948, 284949) c5(284950, 284851, 284952, 284953, 284954, 284955, 284956, 284957, 284958, 284959, 284960, 284961) c6( ) c7(T, AM, ff, km, aA, io, it, aF, K, en, hB, bz); #c1(SYTL2) c2(XP_005274118) c3(synaptotagmin-like protein 2 isoform X13) c4(284962) c5(284963) c6( ) c7(T, AM, ff, km, aA, io, it, aF, K, en, hB, bz); #c1(SYTL2) c2(XP_011543408) c3(synaptotagmin-like protein 2 isoform X4) c4( ) c5(342299, 342300) c6( ) c7(T, AM, ff, km, aA, io, it, aF, K, en, hB, bz); #c1(SYTL2) c2(XP_011543409) c3(synaptotagmin-like protein 2 isoform X6) c4(342301, 342302) c5( ) c6( ) c7(T, AM, ff, km, aA, io, it, aF, K, en, hB, bz); #c1(SYTL2) c2(XP_011543410) c3(synaptotagmin-like protein 2 isoform X7) c4(342303, 342304, 342305) c5(342306, 342307, 342308, 342309, 342310, 342311) c6( ) c7(T, AM, ff, km, aA, io, it, aF, K, en, hB, bz); #c1(SYTL2) c2(XP_011543411) c3(synaptotagmin-like protein 2 isoform X8) c4(342312) c5(342313, 342314, 342315, 342316, 342317, 342318) c6( ) c7(T, AM, ff, km, aA, io, it, aF, K, en, hB, bz); #c1(SYTL2) c2(XP_011543412) c3(synaptotagmin-like protein 2 isoform X9) c4(342319) c5( ) c6( ) c7(T, AM, ff, km, aA, io, it, aF, K, en, hB, bz); #c1(SYTL5) c2(NP_001156806) c3(synaptotagmin-like protein 5 isoform 2) c4(61983) c5(61984, 61985, 61986, 61987, 61988, 61989) c6( ) c7(iX); #c1(SYTL5) c2(NP_001156807) c3(synaptotagmin-like protein 5 isoform 1) c4(61990) c5(61991, 61992, 61993, 61994, 61995, 61996, 61997, 61998, 61999, 62000) c6( ) c7(iX); #c1(SYVN1) c2(NP_115807) c3(E3 ubiquitin-protein ligase synoviolin isoform a precursor) c4(223979, 223980) c5(223981, 223982, 223983, 223984, 223985, 223986, 223987, 223988, 223989, 223990, 223991, 223992, 223993, 223994, 223995, 223996, 223997, 223998, 223999, 224000, 224001, 224002, 224003, 224004, 224005, 224006, 224007, 224008, 224009) c6( ) c7(T, RX, aI, oA, aOH, jh, fr, iJ, xE, rw, jZ, K, mR, ff, en, bw, avK, es, iA, Jr, km, Kg, y); #c1(SYVN1) c2(NP_757385) c3(E3 ubiquitin-protein ligase synoviolin isoform b precursor) c4(249106, 249107) c5( ) c6( ) c7(T, RX, aI, oA, aOH, jh, fr, iJ, xE, rw, jZ, K, mR, ff, en, bw, avK, es, iA, Jr, km, Kg, y); #c1(T) c2(NP_001257413) c3(brachyury protein isoform 2) c4(95376, 95377) c5(95378, 95379, 95380, 95381, 95382, 95383, 95384, 95385, 95386, 95387, 95388, 95389) c6( ) c7(cJY, cJX, ff, ci, en, ik); #c1(T) c2(NP_003172) c3(brachyury protein isoform 1) c4(135870) c5(135871, 135872, 135873, 135874, 135875, 135876, 135877) c6( ) c7(cJY, cJX, ff, ci, en, ik); #c1(TAAR1) c2(NP_612200) c3(trace amine-associated receptor 1) c4(236189) c5(236190, 236191, 236192, 236193, 236194, 236195) c6( ) c7(bEV, fy, xg); #c1(TAAR2) c2(NP_001028252) c3(trace amine-associated receptor 2 isoform 1) c4(30414, 30415) c5(30416, 30417, 30418, 30419, 30420, 30421, 30422) c6( ) c7(h); #c1(TAAR2) c2(NP_055441) c3(trace amine-associated receptor 2 isoform 2) c4( ) c5(181158, 181159, 181160, 181161, 181162, 181163, 181164, 181165) c6( ) c7(h); #c1(TAAR5) c2(NP_003958) c3(trace amine-associated receptor 5) c4(142458) c5(142459, 142460, 142461, 142462, 142463, 142464) c6( ) c7(bFo, cIl); #c1(TAAR6) c2(NP_778237) c3(trace amine-associated receptor 6) c4(251491, 251492) c5(251493, 251494, 251495, 251496, 251497, 251498, 251499, 251500, 251501, 251502, 251503, 251504) c6( ) c7(Z, bS, bK, ct, bO); #c1(TAB1) c2(NP_006107) c3(TGF-beta-activated kinase 1 and MAP3K7-binding protein 1 isoform alpha) c4(161901) c5(161902, 161903, 161904, 161905, 161906, 161907) c6( ) c7(bM, kI, y, aT); #c1(TAB1) c2(NP_705717) c3(TGF-beta-activated kinase 1 and MAP3K7-binding protein 1 isoform beta) c4(246275) c5(246276, 246277, 246278, 246279, 246280, 246281) c6( ) c7(bM, kI, y, aT); #c1(TAB2) c2(NP_001278964) c3(TGF-beta-activated kinase 1 and MAP3K7-binding protein 2 isoform b) c4(111149) c5(111150, 111151, 111152, 111153, 111154, 111155) c6( ) c7(md, A, bjA, aZ, aW, au, aw, aT, hD, cJZ, ci, bD, y); #c1(TAB2) c2(NP_055908) c3(TGF-beta-activated kinase 1 and MAP3K7-binding protein 2 isoform a) c4(184422, 184423) c5(184424, 184425, 184426, 184427, 184428, 184429, 184430, 184431, 184432, 184433, 184434, 184435, 184436, 184437, 184438, 184439, 184440, 184441, 184442, 184443) c6( ) c7(md, A, bjA, aZ, aW, au, aw, aT, hD, cJZ, ci, bD, y); #c1(TAB3) c2(XP_005274539) c3(TGF-beta-activated kinase 1 and MAP3K7-binding protein 3 isoform X1) c4(285128) c5(285129, 285130, 285131, 285132, 285133, 285134, 285135, 285136, 285137, 285138, 285139, 285140, 285141, 285142) c6( ) c7(nD, c, af, cr, n, tv, tu, C, B, amL); #c1(TAB3) c2(XP_005274540) c3(TGF-beta-activated kinase 1 and MAP3K7-binding protein 3 isoform X3) c4(285143) c5(285144, 285145, 285146, 285147, 285148, 285149) c6( ) c7(nD, c, af, cr, n, tv, tu, C, B, amL); #c1(TAB3) c2(XP_011543790) c3(TGF-beta-activated kinase 1 and MAP3K7-binding protein 3 isoform X5) c4(342890) c5(342891, 342892, 342893, 342894, 342895, 342896) c6( ) c7(nD, c, af, cr, n, tv, tu, C, B, amL); #c1(TAC1) c2(NP_003173) c3(protachykinin-1 isoform beta precursor) c4(135878) c5(135879, 135880, 135881, 135882, 135883, 135884) c6( ) c7(bM, T, vS, pf, ea, bO, ci, Jx, x, xy, aE, fS, Ds, abj, K, GO, hu, UO, aW, mQ, as, hJ, eE, cm, y, eM, JA, Ji, U, k, Dv, cE, rt, cZ, dD, n, To, aj, oY, ct, cd, jz, cU, h, wb, dd, he, cKa, asp, bux, cly, sp, fe, pm, vo, hq, cA, w, at, uz, pg, YH, it, Dw, wL, aA, v, j, V, eA, J, cF, DK, aT, dz, bK, UN, ae, af, Y, fO, la, r, lo, tu, iK, rY, aHi, ck, Qi, Ta, sS, bN, ac, c, yW, bQC, dh, auT, mf, qX, df, Hn, biV, bS, eq, Fb, ad, dP, Tg, WR, IC, vB, ji, uQ, cr, tv, EZ, iV, Z, bz, bF, zr, HP, dJ, rH, lf, ra, jr, Tc); #c1(TAC1) c2(NP_054702) c3(protachykinin-1 isoform alpha precursor) c4(177307) c5(177308, 177309, 177310, 177311, 177312, 177313) c6( ) c7(bM, T, vS, pf, ea, bO, ci, Jx, x, xy, aE, fS, Ds, abj, K, GO, hu, UO, aW, mQ, as, hJ, eE, cm, y, eM, JA, Ji, U, k, Dv, cE, rt, cZ, dD, n, To, aj, oY, ct, cd, jz, cU, h, wb, dd, he, cKa, asp, bux, cly, sp, fe, pm, vo, hq, cA, w, at, uz, pg, YH, it, Dw, wL, aA, v, j, V, eA, J, cF, DK, aT, dz, bK, UN, ae, af, Y, fO, la, r, lo, tu, iK, rY, aHi, ck, Qi, Ta, sS, bN, ac, c, yW, bQC, dh, auT, mf, qX, df, Hn, biV, bS, eq, Fb, ad, dP, Tg, WR, IC, vB, ji, uQ, cr, tv, EZ, iV, Z, bz, bF, zr, HP, dJ, rH, lf, ra, jr, Tc); #c1(TAC1) c2(NP_054703) c3(protachykinin-1 isoform gamma precursor) c4(177314) c5(177315, 177316, 177317, 177318, 177319, 177320) c6( ) c7(bM, T, vS, pf, ea, bO, ci, Jx, x, xy, aE, fS, Ds, abj, K, GO, hu, UO, aW, mQ, as, hJ, eE, cm, y, eM, JA, Ji, U, k, Dv, cE, rt, cZ, dD, n, To, aj, oY, ct, cd, jz, cU, h, wb, dd, he, cKa, asp, bux, cly, sp, fe, pm, vo, hq, cA, w, at, uz, pg, YH, it, Dw, wL, aA, v, j, V, eA, J, cF, DK, aT, dz, bK, UN, ae, af, Y, fO, la, r, ln, tu, iK, rY, aHi, ck, Qi, Ta, sS, bN, ac, c, yW, bQC, dh, auT, mf, qX, df, Hn, biV, bS, eq, Fb, ad, dP, Tg, WR, IC, vB, ji, uQ, cr, tv, EZ, iV, Z, bz, bF, zr, HP, dJ, rH, lf, ra, jr, Tc); #c1(TAC3) c2(NP_001171525) c3(tachykinin-3 isoform 2 preproprotein) c4(70449) c5(70450, 70451, 70452, 70453, 70454, 70455, 70456, 70457) c6( ) c7(bM, aMP, yi, vA, cz, eb, K, UF, uC, V, cKb, op, UE); #c1(TAC3) c2(XP_011537013) c3(tachykinin-3 isoform X1) c4(334752) c5(334753, 334754, 334755, 334756, 334757, 334758, 334759, 334760, 334761, 334762, 334763, 334764, 334765, 334766, 334767, 334768, 334769, 334770, 334771, 334772) c6( ) c7(bM, aMP, yi, vA, cz, eb, K, UF, uC, V, cKb, op, UE); #c1(TAC4) c2(NP_001070971) c3(tachykinin-4 isoform beta precursor) c4(35119) c5(35120, 35121, 35122, 35123, 35124, 35125, 35126) c6(35127) c7(bM, V, eA); #c1(TAC4) c2(NP_001070972) c3(tachykinin-4 isoform gamma precursor) c4(35128) c5(35129, 35130, 35131, 35132, 35133, 35134, 35135) c6(35136) c7(bM, V, eA); #c1(TAC4) c2(NP_001070973) c3(tachykinin-4 isoform delta precursor) c4(35137) c5(35138, 35139, 35140, 35141, 35142, 35143, 35144) c6(35145) c7(bM, V, eA); #c1(TAC4) c2(NP_001070974) c3(tachykinin-4 isoform alpha-2 precursor) c4(35146) c5(35147, 35148, 35149, 35150, 35151, 35152, 35153, 35154) c6(35155, 35156) c7(bM, V, eA); #c1(TAC4) c2(NP_733786) c3(tachykinin-4 isoform alpha precursor) c4(247089, 247090) c5(247091, 247092, 247093, 247094, 247095, 247096, 247097, 247098, 247099, 247100, 247101, 247102, 247103, 247104, 247105) c6(247106, 247107, 247108) c7(bM, V, eA); #c1(TACC1) c2(NP_001116296) c3(transforming acidic coiled-coil-containing protein 1 isoform 2) c4(43725) c5(43726, 43727, 43728, 43729, 43730, 43731) c6( ) c7(aW, aF, aA, aT); #c1(TACC1) c2(NP_001139688) c3(transforming acidic coiled-coil-containing protein 1 isoform 3) c4(59723, 59724, 59725, 59726, 59727) c5(59728, 59729, 59730, 59731, 59732, 59733, 59734, 59735, 59736, 59737, 59738, 59739, 59740, 59741, 59742) c6( ) c7(aW, aF, aA, aT); #c1(TACC1) c2(NP_006274) c3(transforming acidic coiled-coil-containing protein 1 isoform 1) c4(163490) c5(163491, 163492, 163493, 163494, 163495, 163496, 163497, 163498, 163499, 163500, 163501, 163502, 163503) c6( ) c7(aW, aF, aA, aT); #c1(TACC1) c2(XP_011542934) c3(transforming acidic coiled-coil-containing protein 1 isoform X1) c4(341580) c5(341581, 341582, 341583, 341584, 341585, 341586, 341587, 341588, 341589, 341590, 341591) c6( ) c7(aW, aF, aA, aT); #c1(TACC1) c2(XP_011542936) c3(transforming acidic coiled-coil-containing protein 1 isoform X5) c4(341592, 341593, 341594, 341595) c5(341596, 341597, 341598, 341599, 341600, 341601, 341602, 341603, 341604, 341605, 341606, 341607, 341608, 341609, 341610, 341611, 341612, 341613, 341614, 341615, 341616, 341617, 341618, 341619, 341620, 341621, 341622) c6( ) c7(aW, aF, aA, aT); #c1(TACC1) c2(XP_011542938) c3(transforming acidic coiled-coil-containing protein 1 isoform X7) c4(341623, 341624) c5(341625, 341626, 341627, 341628, 341629, 341630, 341631, 341632, 341633, 341634, 341635, 341636) c6( ) c7(aW, aF, aA, aT); #c1(TACC2) c2(NP_001278805) c3(transforming acidic coiled-coil-containing protein 2 isoform e) c4( ) c5(110139) c6( ) c7(aW, ae, ad, aT); #c1(TACC2) c2(NP_001278806) c3(transforming acidic coiled-coil-containing protein 2 isoform f) c4(110140) c5(110141, 110142, 110143, 110144, 110145, 110146) c6( ) c7(aW, ae, ad, aT); #c1(TACC2) c2(NP_008928) c3(transforming acidic coiled-coil-containing protein 2 isoform d) c4(169606) c5(169607, 169608, 169609, 169610, 169611, 169612) c6( ) c7(aW, ae, ad, aT); #c1(TACC2) c2(NP_996742) c3(transforming acidic coiled-coil-containing protein 2 isoform c) c4(264395) c5(264396, 264397, 264398, 264399, 264400, 264401) c6( ) c7(aW, ae, ad, aT); #c1(TACC2) c2(NP_996743) c3(transforming acidic coiled-coil-containing protein 2 isoform b) c4(264402) c5(264403, 264404, 264405, 264406, 264407, 264408, 264409, 264410, 264411, 264412) c6( ) c7(aW, ae, ad, aT); #c1(TACC2) c2(NP_996744) c3(transforming acidic coiled-coil-containing protein 2 isoform a) c4(264413) c5(264414, 264415, 264416, 264417, 264418, 264419, 264420, 264421, 264422, 264423) c6( ) c7(aW, ae, ad, aT); #c1(TACC2) c2(XP_006717616) c3(transforming acidic coiled-coil-containing protein 2 isoform X15) c4(291250) c5(291251, 291252, 291253, 291254, 291255, 291256) c6( ) c7(aW, ae, ad, aT); #c1(TACC2) c2(XP_006717617) c3(transforming acidic coiled-coil-containing protein 2 isoform X16) c4(291257) c5(291258, 291259, 291260, 291261, 291262) c6( ) c7(aW, ae, ad, aT); #c1(TACC3) c2(NP_006333) c3(transforming acidic coiled-coil-containing protein 3) c4(164094, 164095) c5(164096, 164097, 164098, 164099, 164100, 164101) c6( ) c7(T, oS, id, d, Qu, if, jh, aT, fd, dL, qN, eL, eA); #c1(TACC3) c2(XP_005247986) c3(transforming acidic coiled-coil-containing protein 3 isoform X1) c4(268163) c5( ) c6( ) c7(T, oS, id, d, Qu, if, jh, aT, fd, dL, qN, eL, eA); #c1(TACC3) c2(XP_005247987) c3(transforming acidic coiled-coil-containing protein 3 isoform X4) c4(268164) c5(268165, 268166, 268167, 268168, 268169, 268170, 268171) c6( ) c7(T, oS, id, d, Qu, if, jh, aT, fd, dL, qN, eL, eA); #c1(TACC3) c2(XP_011511689) c3(transforming acidic coiled-coil-containing protein 3 isoform X3) c4( ) c5(302418, 302419, 302420, 302421, 302422, 302423, 302424, 302425, 302426, 302427, 302428, 302429) c6( ) c7(T, oS, id, d, Qu, if, jh, aT, fd, dL, qN, eL, eA); #c1(TACC1) c2(NP_057444) c3(translational activator of cytochrome c oxidase 1) c4(190923) c5(190924, 190925, 190926, 190927, 190928, 190929) c6( ) c7(bZ, aUx, acJ, ajU); #c1(TACR1) c2(NP_001049) c3(substance-P receptor isoform long) c4(34377, 34378) c5(34379, 34380, 34381, 34382, 34383, 34384) c6( ) c7(bM, T, jv, qX, vS, cz, n, Gd, ww, ci, eA, ad, dP, x, aji, aE, bWj, WR, aT, cU, h, bK, UN, K, bah, ji, aCU, on, he, ae, akl, uQ, tn, d, th, aW, sp, EU, Y, fe, tv, Io, tu, as, iV, pm, f, cM, iK, hq, ck, ar, Ta, bP, c, cA, Ei, k, EY, YH, yA, IC, cE, y, Tc); #c1(TACR1) c2(NP_056542) c3(substance-P receptor isoform short) c4( ) c5(188082, 188083, 188084, 188085, 188086, 188087) c6( ) c7(bM, T, jv, gX, vS, cz, n, Gd, ww, ci, eA, ad, dP, x, aji, aE, bWj, WR, aT, cU, h, bK, UN, K, bah, ji, aCU, on, he, ae, akl, uQ, tn, d, th, aW, sp, EU, Y, fe, tv, Io, tu, as, iV, pm, f, cM, iK, hq, ck, ar, Ta, bP, c, cA, Ei, k, EY, YH, yA, IC, cE, y, Tc); #c1(TACR2) c2(NP_001048) c3(substance-K receptor) c4(34363, 34364) c5(34365, 34366, 34367, 34368, 34369, 34370, 34371, 34372, 34373, 34374, 34375, 34376) c6( ) c7(cw, bM, Dw, tn, ac, at, fe, Ds, ji, K, bah, iV, IC, blu); #c1(TACR3) c2(NP_001050) c3(neuromedin-K receptor) c4(34385) c5(34386, 34387, 34388, 34389, 34390, 34391) c6( ) c7(bL, bM, Dw, cz, bBX, eb, wV, bS, ct, bWN, UE, bWj, h, Ds, yi, cu, Io, Z, op, aMP, AV, vA, Gx, UF, y, cKc); #c1(TADA1) c2(NP_444281) c3(transcriptional adapter 1) c4(230281) c5(230282, 230283, 230284, 230285, 230286, 230287) c6( ) c7(bL, A, cz, tV, j, y, bA); #c1(TADA2A) c2(NP_001159577) c3(transcriptional adapter 2-alpha isoform a) c4(64323) c5(64324, 64325, 64326, 64327, 64328, 64329, 64330, 64331, 64332, 64333, 64334, 64335, 64336, 64337, 64338, 64339) c6( ) c7(y, j, ac, dV); #c1(TADA2A) c2(NP_001278847) c3(transcriptional adapter 2-alpha isoform b) c4(110713) c5(110714, 110715, 110716, 110717, 110718, 110719) c6( ) c7(y, j, ac, dV); #c1(TADA2A) c2(XP_011523456) c3(transcriptional adapter 2-alpha isoform X1) c4(317977) c5( ) c6( ) c7(y, j, ac, dV); #c1(TADA2A) c2(XP_011523458) c3(transcriptional adapter 2-alpha isoform X3) c4( ) c5(317978, 317979, 317980, 317981, 317982) c6( ) c7(y, j, ac, dV); #c1(TADA3) c2(NP_006345) c3(transcriptional adapter 3 isoform a) c4(164194, 164195, 164196) c5(164197, 164198, 164199, 164200, 164201, 164202, 164203, 164204, 164205, 164206, 164207) c6( ) c7(aW, aT); #c1(TADA3) c2(NP_597814) c3(transcriptional adapter 3 isoform b) c4( ) c5(235197, 235198, 235199, 235200, 235201, 235202, 235203, 235204, 235205, 235206, 235207, 235208) c6( ) c7(aW, aT); #c1(TAF1) c2(NP_001273003) c3(transcription initiation factor TFIID subunit 1 isoform 3) c4(104143, 104144) c5(104145, 104146, 104147, 104148, 104149, 104150) c6( ) c7(qJ, ae, T, hd, nB, oe, bps, aep, Yk, akt, aU, pD, j, cm, aVc, af, ad); #c1(TAF1) c2(NP_004597) c3(transcription initiation factor TFIID subunit 1 isoform 1) c4(148020) c5(148021, 148022, 148023, 148024, 148025, 148026, 148027) c6( ) c7(qJ, ae, T, hd, nB, oe, bps, aep, Yk, akt, aU, pD, j, cm, aVc, af, ad); #c1(TAF1) c2(NP_620278) c3(transcription initiation factor TFIID subunit 1 isoform 2) c4(237492) c5(237493, 237494, 237495, 237496, 237497, 237498, 237499) c6( ) c7(qJ, ae, T, hd, nB, oe, bps, aep, Yk, akt, aU, pD, j, cm, aVc, af, ad); #c1(TAF1) c2(XP_005262352) c3(transcription initiation factor TFIID subunit 1 isoform X1) c4( ) c5(277846) c6( ) c7(qJ, ae, T, hd, nB, oe, bps, aep, Yk, akt, aU, pD, j, cm, aVc, af, ad); #c1(TAF1) c2(XP_005262354) c3(transcription initiation factor TFIID subunit 1 isoform X3) c4(277847) c5(277848, 277849, 277850, 277851, 277852, 277853) c6( ) c7(qJ, ae, T, hd, nB, oe, bps, aep, Yk, akt, aU, pD, j, cm, aVc, af, ad); #c1(TAF1) c2(XP_006724745) c3(transcription initiation factor TFIID subunit 1 isoform X5) c4(296298) c5(296299, 296300, 296301, 296302, 296303, 296304, 296305, 296306, 296307, 296308) c6( ) c7(qJ, ae, T, hd, nB, oe, bps, aep, Yk, akt, aU, pD, j, cm, aVc, af, ad); #c1(TAF15) c2(NP_631961) c3(TATA-binding protein-associated factor 2N isoform 1) c4(238416, 238417) c5( ) c6( ) c7(ck, T, kh, aNA, QG, c, WY, au, aA, aaE, PJ, eF, bt, ae, ad); #c1(TAF15) c2(XP_011523617) c3(TATA-binding protein-associated factor 2N isoform X2) c4( ) c5(318090, 318091, 318092, 318093, 318094, 318095, 318096, 318097, 318098, 318099, 318100, 318101, 318102, 318103, 318104, 318105, 318106) c6( ) c7(ck, T, kh, aNA, QG, c, WY, au, aA, aaE, PJ, eF, bt, ae, ad); #c1(TAF1B) c2(NP_005671) c3(TATA box-binding protein-associated factor RNA polymerase I subunit B) c4(158421) c5(158422, 158423, 158424, 158425, 158426, 158427, 158428) c6( ) c7(q); #c1(TAF1B) c2(XP_011508713) c3(TATA box-binding protein-associated factor RNA polymerase I subunit B isoform X2) c4(299319) c5(299320) c6( ) c7(q); #c1(TAF1B) c2(XP_011508715) c3(TATA box-binding protein-associated factor RNA polymerase I subunit B isoform X3) c4( ) c5(299321, 299322, 299323, 299324, 299325) c6( ) c7(q); #c1(TAF1C) c2(NP_001230089) c3(TATA box-binding protein-associated factor RNA polymerase I subunit C isoform 6) c4( ) c5(85895, 85896, 85897, 85898, 85899) c6( ) c7(bN); #c1(TAF1C) c2(NP_647610) c3(TATA box-binding protein-associated factor RNA polymerase I subunit C isoform 2) c4(238797, 238798) c5(238799, 238800, 238801, 238802, 238803) c6( ) c7(bN); #c1(TAF1C) c2(XP_005256283) c3(TATA box-binding protein-associated factor RNA polymerase I subunit C isoform X1) c4(274053) c5(274054, 274055, 274056, 274057, 274058, 274059, 274060, 274061, 274062, 274063, 274064) c6( ) c7(bN); #c1(TAF1C) c2(XP_006721389) c3(TATA box-binding protein-associated factor RNA polymerase I subunit C isoform X3) c4(293955, 293956) c5(293957, 293958, 293959, 293960, 293961, 293962, 293963, 293964, 293965, 293966, 293967, 293968, 293969, 293970) c6( ) c7(bN); #c1(TAF1D) c2(NP_077021) c3(TATA box-binding protein-associated factor RNA polymerase I subunit D) c4(214760) c5(214761, 214762, 214763, 214764, 214765, 214766, 214767, 214768, 214769, 214770, 214771, 214772, 214773, 214774) c6( ) c7(Pk, IQ); #c1(TAF2) c2(NP_003175) c3(transcription initiation factor TFIID subunit 2) c4(135900) c5(135901, 135902, 135903, 135904, 135905, 135906, 135907) c6( ) c7(cKd, rU, U, CQ, nA, cm); #c1(TAF3) c2(NP_114129) c3(transcription initiation factor TFIID subunit 3) c4(222285, 222286) c5(222287, 222288, 222289, 222290, 222291, 222292, 222293, 222294, 222295, 222296, 222297) c6( ) c7(ac, abV, aw, e, j, eu); #c1(TAF3) c2(XP_011518043) c3(transcription initiation factor TFIID subunit 3 isoform X1) c4( ) c5(312052, 312053, 312054) c6( ) c7(ac, abV, aw, e, j, eu); #c1(TAF4) c2(NP_003176) c3(transcription initiation factor TFIID subunit 4) c4(135908, 135909) c5(135910, 135911, 135912, 135913, 135914, 135915, 135916, 135917, 135918, 135919, 135920, 135921, 135922, 135923, 135924) c6( ) c7(on, ac); #c1(TAF4B) c2(NP_001280654) c3(transcription initiation factor TFIID subunit 4B isoform 1) c4(111565) c5(111566, 111567, 111568, 111569, 111570, 111571, 111572) c6( ) c7(il, T, ci, ev); #c1(TAF4B) c2(NP_005631) c3(transcription initiation factor TFIID subunit 4B isoform 2) c4(158121, 158122) c5(158123, 158124, 158125, 158126, 158127, 158128) c6( ) c7(il, T, ci, ev); #c1(TAF4B) c2(XP_005258396) c3(transcription initiation factor TFIID subunit 4B isoform X2) c4( ) c5(275642, 275643, 275644, 275645, 275646, 275647) c6( ) c7(il, T, ci, ev); #c1(TAF5L) c2(NP_001020418) c3(TAF5-like RNA polymerase II p300/CBP-associated factor-associated factor 65 kDa subunit 5L isoform b) c4(28753, 28754) c5(28755, 28756, 28757, 28758, 28759, 28760, 28761, 28762, 28763, 28764, 28765, 28766) c6( ) c7(ac, A, aj, J, aT); #c1(TAF5L) c2(NP_055224) c3(TAF5-like RNA polymerase II p300/CBP-associated factor-associated factor 65 kDa subunit 5L isoform a) c4(179926) c5(179927, 179928, 179929, 179930, 179931, 179932, 179933, 179934, 179935, 179936) c6( ) c7(ac, A, aj, J, aT); #c1(TAF6) c2(NP_001177344) c3(transcription initiation factor TFIID subunit 6 isoform epsilon) c4(72663, 72664, 72665, 72666, 72667) c5(72668, 72669, 72670, 72671, 72672, 72673, 72674, 72675, 72676, 72677, 72678, 72679, 72680, 72681, 72682, 72683, 72684, 72685, 72686, 72687, 72688, 72689, 72690, 72691, 72692, 72693) c6( ) c7(aNL); #c1(TAF6) c2(NP_005632) c3(transcription initiation factor TFIID subunit 6 isoform alpha) c4(158129, 158130, 158131, 158132) c5(158133, 158134, 158135, 158136, 158137, 158138, 158139, 158140, 158141, 158142, 158143, 158144, 158145, 158146, 158147, 158148, 158149, 158150, 158151, 158152, 158153, 158154, 158155, 158156, 158157, 158158, 158159, 158160, 158161, 158162, 158163, 158164, 158165, 158166, 158167, 158168, 158169, 158170, 158171, 158172, 158173) c6( ) c7(aNL); #c1(TAF7) c2(NP_005633) c3(transcription initiation factor TFIID subunit 7) c4(158174) c5(158175, 158176, 158177, 158178, 158179, 158180, 158181) c6( ) c7(bM); #c1(TAF7L) c2(NP_001161946) c3(transcription initiation factor TFIID subunit 7-like isoform 2) c4( ) c5(66304, 66305, 66306, 66307, 66308) c6( ) c7(gU); #c1(TAF7L) c2(NP_079161) c3(transcription initiation factor TFIID subunit 7-like isoform 1) c4(217275, 217276) c5(217277, 217278, 217279, 217280, 217281, 217282, 217283) c6( ) c7(gU); #c1(TAF7L) c2(XP_005262208) c3(transcription initiation factor TFIID subunit 7-like isoform X2) c4(277774) c5(277775, 277776, 277777, 277778, 277779, 277780, 277781, 277782, 277783, 277784) c6( ) c7(gU); #c1(TAF8) c2(NP_612639) c3(transcription initiation factor TFIID subunit 8) c4(236729, 236730) c5(236731, 236732, 236733, 236734, 236735, 236736) c6( ) c7(af, aT, kH); #c1(TAF8) c2(XP_005248906) c3(transcription initiation factor TFIID subunit 8 isoform X3) c4( ) c5(268776, 268777, 268778, 268779, 268780, 268781) c6( ) c7(af, aT, kH); #c1(TAF8) c2(XP_011512598) c3(transcription initiation factor TFIID subunit 8 isoform X1) c4(303501) c5(303502, 303503, 303504, 303505, 303506, 303507, 303508, 303509, 303510, 303511) c6( ) c7(af, aT, kH); #c1(TAF8) c2(XP_011512599) c3(transcription initiation factor TFIID subunit 8 isoform X2) c4(303512) c5(303513, 303514, 303515, 303516, 303517, 303518) c6( ) c7(af, aT, kH); #c1(TAF9) c2(NP_003178) c3(transcription initiation factor TFIID subunit 9) c4(135925, 135926, 135927, 135928, 135929, 135930) c5(135931, 135932, 135933, 135934, 135935, 135936, 135937, 135938, 135939, 135940, 135941, 135942, 135943, 135944, 135945, 135946, 135947, 135948, 135949, 135950, 135951, 135952, 135953, 135954, 135955, 135956, 135957, 135958, 135959, 135960, 135961, 135962, 135963, 135964, 135965, 135966, 135967, 135968, 135969, 135970, 135971, 135972, 135973, 135974, 135975, 135976, 135977, 135978, 135979) c6( ) c7(h, iu, ey, B); #c1(TAGAP) c2(NP_001265662) c3(T-cell activation Rho GTPase-activating protein isoform d) c4( ) c5(99182, 99183, 99184, 99185, 99186, 99187) c6( ) c7(A, ju, cr, cKe, cL, hp, C, iV, y, V); #c1(TAGAP) c2(NP_473455) c3(T-cell activation Rho GTPase-activating protein isoform b) c4(230553, 230554, 230555) c5(230556, 230557, 230558, 230559, 230560, 230561) c6( ) c7(A, ju, cr, cKe, cL, hp, C, iV, y, V); #c1(TAGAP) c2(NP_620165) c3(T-cell activation Rho GTPase-activating protein isoform c) c4(237437) c5(237438, 237439, 237440, 237441, 237442, 237443) c6( ) c7(A, ju, cr, cKe, cL, hp, C, iV, y, V); #c1(TAGAP) c2(NP_687034) c3(T-cell activation Rho GTPase-activating protein isoform a) c4( ) c5(242651, 242652, 242653, 242654, 242655, 242656) c6( ) c7(A, ju, cr, cKe, cL, hp, C, iV, y, V); #c1(TAGLN) c2(NP_001001522) c3(transgelin) c4(18566, 18567, 18568) c5(18569, 18570, 18571, 18572, 18573, 18574, 18575, 18576, 18577, 18578, 18579, 18580, 18581, 18582, 18583, 18584, 18585, 18586, 18587, 18588, 18589, 18590, 18591, 18592, 18593, 18594, 18595, 18596, 18597, 18598, 18599, 18600, 18601) c6( ) c7(ng, bM, T, dD, aC, ea, fG, e, aA, bB, vr, aj, v, eq, ci, q, J, ad, dP, iu, aE, aT, K, ae, B, bf, anP, wr, r, aF, g, bz, pb, LB, eM, bE, DW, dy, fD, du, IC, it, X); #c1(TAGLN2) c2(NP_001264153) c3(transgelin-2 isoform a) c4(97582, 97583, 97584) c5(97585, 97586, 97587, 97588, 97589, 97590, 97591, 97592, 97593) c6( ) c7(bxC, B, aW, aT, dL, fr, iK, eL, iu); #c1(TAGLN2) c2(NP_003555) c3(transgelin-2 isoform b) c4( ) c5(139161, 139162, 139163, 139164, 139165, 139166, 139167, 139168, 139169, 139170, 139171, 139172, 139173) c6( ) c7(bxC, B, aW, aT, dL, fr, iK, eL, iu); #c1(TAL1) c2(NP_001277334) c3(T-cell acute lymphocytic leukemia protein 1 isoform 1) c4(109340, 109341) c5(109342, 109343, 109344, 109345, 109346, 109347, 109348, 109349, 109350, 109351, 109352, 109353, 109354) c6( ) c7(bdo, T, fM, dA, iW, DV, oA, jh, bcE, bS, gf, ct, ci, v, pz, hF, aQF, eJ, wD, x, PW, oT, fX, dE, qh, agI, oW, kH, aT, hn, dL, K, bXV, eL, iL, asp, je, aW, Y, ff, apK, en, Eg, Z, pm, pb, hq, ck, rR, iM, cKf, iT, au, pg, dW, zv, k, adg, y, bt); #c1(TAL1) c2(XP_011540349) c3(T-cell acute lymphocytic leukemia protein 1 isoform X2) c4( ) c5(338814, 338815, 338816, 338817) c6( ) c7(bdo, T, fM, dA, iW, DV, oA, jh, bcE, bS, gf, et, ci, v, pz, hF, aQF, eJ, wD, x, PW, oT, fX, dE, qh, agI, oW, kH, aT, hn, dL, K, bXV, eL, iL, asp, je, aW, Y, ff, apK, en, Eg, Z, pm, pb, hq, ck, rR, iM, cKf, iT, au, pg, dW, zv, k, adg, y, bt); #c1(TAL2) c2(NP_005412) c3(T-cell acute lymphocytic leukemia protein 2) c4(155841) c5(155842, 155843, 155844, 155845, 155846, 155847, 155848) c6( ) c7(je, iM); #c1(TALD01) c2(NP_006746) c3(transaldolase) c4(167646, 167647) c5(167648, 167649, 167650, 167651, 167652, 167653, 167654, 167655, 167656, 167657, 167658, 167659) c6( ) c7(gk, aBb, qb, yk, ff, al, iK, CT, kH, cKg, dq, Io, aj, hy, aBp, en, an, ars, V, B, J); #c1(TAMM41) c2(NP_620162) c3(phosphatidate cytidylyltransferase, mitochondrial isoform b precursor) c4(237430) c5(237431, 237432, 237433, 237434, 237435, 237436) c6( ) c7(oQ); #c1(TANC1) c2(NP_203752) c3(protein TANC1 isoform 1) c4( ) c5(228507, 228508, 228509, 228510, 228511) c6( ) c7(bv, j); #c1(TANC1) c2(XP_005246975) c3(protein TANC1 isoform X8) c4(267571, 267572) c5(267573) c6( ) c7(bv, j); #c1(TANC1) c2(XP_011510348) c3(protein TANC1 isoform X2) c4( ) c5(300899) c6( ) c7(bv, j); #c1(TANC1) c2(XP_011510360) c3(protein TANC1 isoform X14) c4(300900) c5(300901, 300902, 300903, 300904, 300905, 300906) c6( ) c7(bv, j); #c1(TANC2) c2(XP_005257260) c3(protein TANC2 isoform X1) c4(275014) c5(275015, 275016, 275017, 275018, 275019, 275020) c6( ) c7(aW, aT); #c1(TANC2) c2(XP_011522904) c3(protein TANC2 isoform X9) c4(317387) c5(317388, 317389, 317390, 317391, 317392, 317393) c6( ) c7(aW, aT); #c1(TANG02) c2(NP_001270045) c3(transport and Golgi organization protein 2 homolog isoform a) c4(103362, 103363, 103364) c5(103365, 103366, 103367, 103368, 103369, 103370, 103371, 103372, 103373, 103374, 103375, 103376, 103377, 103378, 103379, 103380, 103381) c6( ) c7(ac); #c1(TANG02) c2(NP_001270058) c3(transport and Golgi organization protein 2 homolog isoform b) c4(103382) c5(103383, 103384, 103385, 103386, 103387, 103388) c6( ) c7(ac); #c1(TANG02) c2(NP_001270083) c3(transport and Golgi organization protein 2 homolog isoform c) c4( ) c5(103389, 103390, 103391, 103392, 103393, 103394) c6( ) c7(ac); #c1(TANG02) c2(NP_001270115) c3(transport and Golgi organization protein 2 homolog isoform d) c4(103395) c5(103396, 103397, 103398, 103399, 103400, 103401, 103402, 103403, 103404, 103405, 103406, 103407, 103408, 103409) c6( ) c7(ac); #c1(TANG02) c2(NP_001270128) c3(transport and Golgi organization protein 2 homolog isoform e) c4(103410) c5( ) c6( ) c7(ac); #c1(TANG02) c2(NP_001270144) c3(transport and Golgi organization protein 2 homolog isoform f) c4(103411) c5(103412, 103413, 103414, 103415, 103416, 103417) c6( ) c7(ac); #c1(TANG02) c2(NP_001270164) c3(transport and Golgi organization protein 2 homolog isoform g) c4(103418) c5(103419, 103420, 103421, 103422, 103423) c6( ) c7(ac); #c1(TANG02) c2(NP_001270177) c3(transport and Golgi organization protein 2 homolog isoform h) c4( ) c5(103424, 103425, 103426, 103427, 103428, 103429, 103430) c6( ) c7(ac); #c1(TANK) c2(NP_004171) c3(TRAF family member-associated NF-kappa-B activator isoform a) c4( ) c5(144051, 144052, 144053, 144054, 144055, 144056, 144057, 144058) c6( ) c7(bM, T, aC, fR, jx, jh, fd, bB, j, qj, eA, aE, aT, h, K, Od, cp, eG, d, aW, Y, eZ, as, bz, yE, bE, cj, y, bt, iu, pC); #c1(TANK) c2(NP_597841) c3(TRAF family member-associated NF-kappa-B activator isoform b) c4(235209) c5(235210, 235211, 235212, 235213, 235214, 235215, 235216, 235217, 235218, 235219, 235220, 235221, 235222) c6( ) c7(bM, T, aC, fR, jx, jh, fd, bB, j, qj, eA, aE, aT, h, K, Od, cp, eG, d, aW, Y, eZ, as, bz, yE, bE, cj, y, bt, iu, pC); #c1(TANK) c2(XP_005246264) c3(TRAF family member-associated NF-kappa-B activator isoform X1) c4(267001, 267002) c5(267003, 267004, 267005, 267006, 267007) c6( ) c7(bM, T, aC, fR, jx, jh, fd, bB, j, qj, eA, aE, aT, h, K, Od, cp, eG, d, aW, Y, eZ, as, bz, yE, bE, cj, y, bt, iu, pC); #c1(TAOK1) c2(NP_079418) c3(serine/threonine-protein kinase TAO1 isoform 2) c4(218042) c5(218043, 218044, 218045, 218046, 218047, 218048, 218049) c6( ) c7(g, T, q, afW); #c1(TAOK1) c2(XP_011523362) c3(serine/threonine-protein kinase TAO1 isoform X1) c4(317884, 317885) c5(317886, 317887, 317888, 317889, 317890, 317891, 317892) c6( ) c7(g, T, q, afW); #c1(TAOK2) c2(NP_001238972) c3(serine/threonine-protein kinase TAO2 isoform 3) c4(88107) c5(88108, 88109, 88110, 88111, 88112, 88113, 88114) c6( ) c7(iu, T, ft, cbH, AQ, UF, aA, aE, K, g, Uw, hF, bt, af, bN, L); #c1(TAOK2) c2(NP_004774) c3(serine/threonine-protein kinase TAO2 isoform 2) c4(149511) c5(149512, 149513, 149514, 149515, 149516, 149517, 149518) c6( ) c7(iu, T, ft, cbH, AQ, UF, aA, aE, K, g, Uw, hF, bt, af, bN, L); #c1(TAOK2) c2(NP_057235) c3(serine/threonine-protein kinase TAO2 isoform 1) c4(189634) c5(189635, 189636, 189637, 189638, 189639, 189640) c6( ) c7(iu, T, ft, cbH, AQ, UF, aA, aE, K, g, Uw, hF, bt, af, bN, L); #c1(TAOK2) c2(XP_011544290) c3(serine/threonine-protein kinase TAO2 isoform X7) c4(343439) c5(343440, 343441, 343442, 343443, 343444, 343445) c6( ) c7(iu, T, ft, cbH, AQ, UF, aA, aE, K, g, Uw, hF, bt, af, bN, L); #c1(TAOK3) c2(NP_057365) c3(serine/threonine-protein kinase TAO3) c4(190360, 190361, 190362, 190363) c5(190364, 190365, 190366, 190367, 190368, 190369, 190370, 190371, 190372, 190373, 190374, 190375, 190376, 190377, 190378, 190379) c6( ) c7(aW, ae, aT); #c1(TAOK3) c2(XP_006719509) c3(serine/threonine-protein kinase TAO3 isoform X3) c4(292597, 292598, 292599, 292600, 292601) c5(292602, 292603, 292604, 292605, 292606, 292607, 292608, 292609, 292610, 292611, 292612, 292613, 292614, 292615, 292616, 292617, 292618, 292619, 292620, 292621, 292622, 292623, 292624, 292625, 292626) c6( ) c7(aW, ae, aT); #c1(TAOK3) c2(XP_011536740) c3(serine/threonine-protein kinase TAO3 isoform X2) c4( ) c5(334397, 334398, 334399, 334400, 334401, 334402, 334403, 334404, 334405, 334406, 334407, 334408, 334409, 334410, 334411) c6( ) c7(aW, ae, aT); #c1(TAOK3) c2(XP_011536742) c3(serine/threonine-protein kinase TAO3 isoform X4) c4( ) c5(334412) c6( ) c7(aW, ae, aT); #c1(TAP1) c2(NP_000584) c3(antigen peptide transporter 1 isoform 1) c4(13164, 13165) c5(13166, 13167, 13168, 13169, 13170, 13171, 13172, 13173, 13174, 13175, 13176, 13177, 13178, 13179, 13180, 13181, 13182, 13183, 13184, 13185, 13186, 13187, 13188, 13189, 13190, 13191, 13192, 13193, 13194, 13195, 13196, 13197, 13198, 13199, 13200, 13201, 13202, 13203, 13204, 13205, 13206, 13207, 13208, 13209, 13210, 13211, 13212, 13213, 13214, 13215, 13216, 13217, 13218, 13219, 13220, 13221, 13222, 13223, 13224) c6( ) c7(bM, T, fR, if, al, eb, bB, cL, qj, ci, dV, ja, Ds, K, hH, akX, cp, Jl, aW, asD, hI, mQ, eE, uC, mK, eM, Jr, aiM, cKh, fr, qN, ai, eW, ft, cU, h, ey, A, mR, sp, kp, CQ, Zj, bo, JM, Xa, aAI, fL, aCD, B, Dw, bvt, jx, cz, bJw, j, V, q, eA, aT, Y, afS, r, afq, lo, aDm, iK, pb, pZ, AH, ao, vi, sY, Ke, aDy, ha, iD, hX, F, hD, uQ, atJ, d, cr, eZ, aF, bz, bE, z, aCl, y, WX, X); #c1(TAP1) c2(NP_001278951) c3(antigen peptide transporter 1 isoform 2) c4(111087) c5( ) c6( ) c7(bM, T, fR, if, al, eb, bB, cL, qj, ci, dV, ja, Ds, K, hH, akX, cp, JI, aW, asD, hI, mQ, eE, uC, mK, eM, Jr, aiM, cKh, fr, qN, ai, eW, ft, cU, h, ey, A, mR, sp, kp, CQ, Zj, bo, JM, Xa, aAI, fL, aCD, B, Dw, bvt, jx, cz, bJw, j, V, q, eA, aT, Y, afS, r, afq, Io, aDm, iK, pb, pZ, AH, ao, vi, sY, Ke, aDy, ha, iD, hX, F, hD, uQ, atJ, d, cr, eZ, aF, bz, bE, z, aCI, y, WX, X); #c1(TAP2) c2(NP_000535) c3(antigen peptide transporter 2 isoform 1) c4(12159) c5(12160, 12161, 12162, 12163, 12164, 12165, 12166, 12167, 12168, 12169, 12170, 12171, 12172, 12173, 12174, 12175, 12176, 12177) c6( ) c7(bM, T, os, Dw, fR, Ke, bvt, aDy, if, pf, jx, iW, fN, eb, n, cL, bJw, oZ, fr, bX, qN, V, q, mC, ai, hX, eW, AW, F, od, hD, h, Ds, azm, bK, ey, hu, hH, af, uQ, hM, A, mR, Jl, axu, Y, asD, afS, hI, r, mQ, cr, lo, aDm, hp, gu, eZ, afq, eE, uC, pb, Zj, y, pZ, AH, JM, cj, Da, Xa, fL, If, WX, ao, vi); #c1(TAP2) c2(NP_001276972) c3(antigen peptide transporter 2 isoform 3) c4(108862, 108863) c5(108864, 108865, 108866, 108867, 108868, 108869, 108870, 108871, 108872, 108873, 108874, 108875, 108876, 108877, 108878, 108879, 108880, 108881, 108882) c6( ) c7(bM, T, os, Dw, fR, Ke, bvt, aDy, if, pf, jx, iW, fN, eb, n, cL, bJw, oZ, fr, bX, qN, V, q, mC, ai, hX, eW, AW, F, od, hD, h, Ds, azm, bK, ey, hu, hH, af, uQ, hM, A, mR, Jl, axu, Y, asD, afS, hI, r, mQ, cr, lo, aDm, hp, gu, eZ, afq, eE, uC, pb, Zj, y, pZ, AH, JM, cj, Da, Xa, fL, If, WX, ao, vi); #c1(TAP2) c2(NP_061313) c3(antigen peptide transporter 2 isoform 2) c4(199940, 199941, 199942, 199943, 199944) c5(199945, 199946, 199947, 199948, 199949, 199950, 199951, 199952, 199953, 199954, 199955, 199956, 199957, 199958, 199959, 199960, 199961, 199962, 199963, 199964, 199965, 199966, 199967, 199968, 199969, 199970, 199971, 199972, 199973, 199974, 199975, 199976, 199977, 199978, 199979, 199980, 199981, 199982, 199983, 199984, 199985, 199986, 199987, 199988, 199989, 199990, 199991, 199992, 199993, 199994, 199995, 199996, 199997, 199998, 199999, 200000, 200001, 200002, 200003, 200004, 200005, 200006, 200007, 200008, 200009) c6( ) c7(bM, T, os, Dw, fR, Ke, bvt, aDy, if, pf, jx, iW, fN, eb, n, cL, bJw, oZ, fr, bX, qN, V, q, mC, ai, hX, eW, AW, F, od, hD, h, Ds, azm, bK, ey, hu, hH, af, uQ, hM, A, mR, Jl, axu, Y, asD, afS, hI, r, mQ, cr, Io, aDm, hp, gu, eZ, afq, eE, uC, pb, Zj, y, pZ, AH, JM, cj, Da, Xa, fL, If, WX, ao, vi); #c1(TAPBP) c2(NP_003181) c3(tapasin isoform 1 precursor) c4(135994, 135995, 135996, 135997, 135998, 135999) c5(136000, 136001, 136002, 136003, 136004, 136005, 136006, 136007, 136008, 136009, 136010, 136011, 136012, 136013, 136014, 136015, 136016, 136017, 136018, 136019, 136020, 136021, 136022, 136023, 136024, 136025, 136026, 136027, 136028, 136029, 136030, 136031, 136032, 136033, 136034, 136035, 136036, 136037, 136038, 136039, 136040, 136041, 136042, 136043, 136044, 136045, 136046, 136047, 136048, 136049, 136050, 136051, 136052, 136053, 136054, 136055, 136056, 136057, 136058, 136059, 136060, 136061, 136062, 136063, 136064, 136065, 136066) c6( ) c7(bM, aC, bxC, dA, bxK, bvt, aDy, if, jx, cL, cKi, ci, qN, fr, q, o, ft, h, A, d, mR, Y, eZ, r, lo, g, bz, Zj, eM, yW); #c1(TAPBP) c2(NP_757345) c3(tapasin isoform 2 precursor) c4(248633, 248634) c5(248635, 248636, 248637, 248638, 248639, 248640, 248641, 248642, 248643, 248644, 248645, 248646, 248647, 248648, 248649, 248650, 248651, 248652, 248653, 248654, 248655, 248656, 248657) c6( ) c7(bM, aC, bxC, dA, bxK, bvt, aDy, if, jx, cL, cKi, ci, qN, fr, q, o, ft, h, A, d, mR, Y, eZ, r, Io, g, bz, Zj, eM, yW); #c1(TAPBP) c2(NP_757346) c3(tapasin isoform 3 precursor) c4(248658, 248659, 248660, 248661) c5(248662, 248663, 248664, 248665, 248666, 248667, 248668, 248669, 248670, 248671, 248672, 248673, 248674, 248675, 248676, 248677, 248678, 248679, 248680, 248681, 248682, 248683, 248684, 248685, 248686, 248687, 248688, 248689, 248690, 248691, 248692, 248693, 248694, 248695, 248696, 248697, 248698, 248699, 248700, 248701, 248702) c6( ) c7(bM, aC, bxC, dA, bxK, bvt, aDy, if, jx, cL, cKi, ci, qN, fr, q, o, ft, h, A, d, mR, Y, eZ, r, Io, g, bz, Zj, eM, yW); #c1(TAPBP) c2(XP_011513130) c3(tapasin isoform X1) c4(304946) c5(304947, 304948, 304949, 304950, 304951, 304952, 304953, 304954, 304955, 304956, 304957, 304958, 304959, 304960) c6( ) c7(bM, aC, bxC, dA, bxK, bvt, aDy, if, jx, cL, cKi, ci, qN, fr, q, o, ft, h, A, d, mR, Y, eZ, r, Io, g, bz, Zj, eM, yW); #c1(TAPBPL) c2(NP_060479) c3(tapasin-related protein precursor) c4(196152) c5(196153, 196154, 196155, 196156, 196157, 196158) c6( ) c7(af); #c1(TARBP1) c2(NP_005637) c3(probable methyltransferase TARBP1) c4(158182) c5(158183, 158184, 158185, 158186, 158187, 158188, 158189, 158190) c6( ) c7(aw, j); #c1(TARBP2) c2(NP_599150) c3(RISC-loading complex subunit TARBP2 isoform a) c4(235631, 235632) c5(235633, 235634, 235635, 235636, 235637, 235638, 235639, 235640) c6( ) c7(es, T, id, yk, bfz, aT, iv, h, fr, ci, as, ne, ad); #c1(TARBP2) c2(XP_005269172) c3(RISC-loading complex subunit TARBP2 isoform X1) c4( ) c5(282420, 282421, 282422, 282423, 282424, 282425, 282426, 282427) c6( ) c7(es, T, id, yk, bfz, aT, iv, h, fr, ci, as, ne, ad); #c1(TARP) c2(XP_011513708) c3(TCR gamma alternate reading frame protein isoform X2) c4(305996) c5(305997, 305998, 305999, 306000, 306001, 306002) c6( ) c7(bM, aGC, ha, jh, akW, ad, x, fX, afU, kH, hn, bK, IQ, ae, xR, Ca, ck, ou, coi, cj, k, i, y, LS); #c1(TARS) c2(NP_001245366) c3(threonine-tRNA ligase, cytoplasmic isoform 1) c4(93273, 93274, 93275) c5(93276, 93277, 93278, 93279, 93280, 93281, 93282, 93283, 93284, 93285, 93286, 93287, 93288, 93289, 93290, 93291, 93292, 93293, 93294, 93295, 93296, 93297, 93298, 93299, 93300, 93301, 93302, 93303) c6( ) c7(ds); #c1(TARS) c2(NP_001245367) c3(threonine-tRNA ligase, cytoplasmic isoform 2) c4(93304, 93305) c5(93306, 93307, 93308, 93309, 93310, 93311) c6( ) c7(ds); #c1(TARSL2) c2(NP_689547) c3(probable threonine-tRNA ligase 2, cytoplasmic) c4(243062, 243063, 243064) c5(243065, 243066, 243067, 243068, 243069, 243070, 243071, 243072, 243073, 243074, 243075, 243076, 243077, 243078, 243079, 243080, 243081, 243082) c6( ) c7(ds); #c1(TAS2R1) c2(NP_062545) c3(taste receptor type 2 member 1) c4(201908) c5(201909, 201910, 201911, 201912, 201913, 201914) c6( ) c7(bM, fq, ac, bN); #c1(TAS2R10) c2(NP_076410) c3(taste receptor type 2 member 10) c4(214076) c5(214077, 214078, 214079, 214080, 214081, 214082) c6( ) c7(aS); #c1(TAS2R13) c2(NP_076409) c3(taste receptor type 2 member 13) c4(214069) c5(214070, 214071, 214072, 214073, 214074, 214075) c6( ) c7(bL, ae, aC, wE, sM, Gd, mf, dG, K, KM, ad); #c1(TAS2R14) c2(NP_076411) c3(taste receptor type 2 member 14) c4(214083) c5(214084, 214085, 214086, 214087, 214088, 214089, 214090) c6( ) c7(v, r); #c1(TAS2R16) c2(NP_058641) c3(taste receptor type 2 member 16) c4(192906) c5(192907, 192908, 192909, 192910, 192911, 192912) c6( ) c7(aNU, xY, Gs, XY); #c1(TAS2R38) c2(NP_789787) c3(taste receptor type 2 member 38) c4(252294) c5(252295, 252296, 252297, 252298, 252299, 252300) c6( ) c7(ka, T, aCh, AS, Dd, n, hz, bS, j, ct, ci, aon, v, xY, q, aCi, Si, Vp, hd, xy, azj, afm, nv, Qg, Db, aT, aNU, Ex, jf, aCg, aW, Gv, r, aFd, Z, zV, aAW, cKj, qJ, sS, nM, nB, hk, ki, Gs, YH, AN); #c1(TAS2R50) c2(NP_795371) c3(taste receptor type 2 member 50) c4(252437) c5(252438, 252439, 252440, 252441, 252442, 252443) c6( ) c7(ac, aw, e, gZ, j, eu); #c1(TAS2R60) c2(NP_803186) c3(taste receptor type 2 member 60) c4(252547) c5(252548, 252549, 252550, 252551, 252552, 252553) c6( ) c7(Y); #c1(TAS2R9) c2(NP_076406) c3(taste receptor type 2 member 9) c4(214062) c5(214063, 214064, 214065, 214066, 214067, 214068) c6( ) c7(GE); #c1(TASP1) c2(NP_060184) c3(threonine aspartase 1 precursor) c4(194643, 194644) c5(194645, 194646, 194647, 194648, 194649, 194650, 194651) c6( ) c7(B); #c1(TASP1) c2(XP_011527592) c3(threonine aspartase 1 isoform X2) c4(322461, 322462, 322463) c5(322464, 322465, 322466, 322467, 322468, 322469, 322470, 322471, 322472) c6( ) c7(B); #c1(TASP1) c2(XP_011527597) c3(threonine aspartase 1 isoform X5) c4( ) c5(322473, 322474, 322475, 322476, 322477, 322478, 322479, 322480, 322481, 322482, 322483, 322484, 322485, 322486, 322487, 322488, 322489, 322490, 322491) c6( ) c7(B); #c1(TAT) c2(NP_000344) c3(tyrosine aminotransferase) c4(7452) c5(7453, 7454, 7455, 7456, 7457, 7458, 7459, 7460, 7461, 7462, 7463, 7464, 7465, 7466, 7467, 7468, 7469, 7470, 7471, 7472, 7473, 7474, 7475, 7476, 7477, 7478, 7479, 7480, 7481, 7482, 7483, 7484, 7485, 7486, 7487, 7488, 7489, 7490, 7491, 7492, 7493, 7494, 7495, 7496, 7497, 7498, 7499, 7500, 7501, 7502, 7503, 7504, 7505, 7506, 7507, 7508, 7509, 7510, 7511, 7512, 7513, 7514, 7515, 7516, 7517, 7518, 7519, 7520, 7521, 7522, 7523, 7524, 7525, 7526, 7527, 7528, 7529, 7530, 7531, 7532, 7533, 7534, 7535, 7536, 7537, 7538, 7539, 7540, 7541, 7542, 7543, 7544, 7545, 7546, 7547, 7548, 7549, 7550, 7551, 7552, 7553, 7554, 7555, 7556, 7557, 7558, 7559, 7560, 7561, 7562, 7563, 7564, 7565, 7566, 7567, 7568, 7569, 7570, 7571, 7572, 7573, 7574, 7575, 7576, 7577, 7578, 7579, 7580, 7581, 7582, 7583, 7584, 7585, 7586, 7587, 7588, 7589, 7590, 7591, 7592, 7593, 7594, 7595, 7596, 7597) c6(7598) c7(bL, T, DM, cKk, fM, Ke, e, DV, jh, aiC, bS, fr, ct, C, aiA, nA, ai, ad, eA, eJ, ip, x, eW, aE, pX, aT, h, cy, K, ae, pi, mu, le, aiB, qt, aW, oV, CM, cr, yq, gu, as, Z, kk, cm, bz, eK, ck, pH, ok, iQ, c, eM, bE, Uq, U, QT, QF, aiD, mf, k, m, EY, be, ym, bt, kS, B, y); #c1(TATDN1) c2(NP_001139632) c3(putative deoxyribonuclease TATDN1 isoform b) c4( ) c5(59579, 59580, 59581, 59582, 59583, 59584, 59585, 59586, 59587, 59588) c6( ) c7(B); #c1(TATDN1) c2(NP_114415) c3(putative deoxyribonuclease TATDN1 isoform a) c4(222675, 222676) c5(222677, 222678, 222679, 222680, 222681, 222682, 222683, 222684) c6( ) c7(B); #c1(TATDN1) c2(XP_006716729) c3(putative deoxyribonuclease TATDN1 isoform X2) c4(290445) c5( ) c6( ) c7(B); #c1(TAX1BP1) c2(NP_001073333) c3(tax1-binding protein 1 isoform 2) c4(35885) c5(35886, 35887, 35888, 35889, 35890, 35891, 35892, 35893, 35894, 35895) c6( ) c7(y, hy); #c1(TAX1BP1) c2(NP_001193831) c3(tax1-binding protein 1 isoform 3) c4(82703) c5(82704, 82705, 82706, 82707, 82708, 82709) c6( ) c7(y, hy); #c1(TAX1BP1) c2(NP_006015) c3(tax1-binding protein 1 isoform 1) c4(161188) c5(161189, 161190, 161191, 161192, 161193, 161194) c6( ) c7(y, hy); #c1(TAX1BP1) c2(XP_005249957) c3(tax1-binding protein 1 isoform X1) c4(269944, 269945) c5(269946, 269947, 269948, 269949, 269950, 269951, 269952, 269953, 269954, 269955, 269956, 269957) c6( ) c7(y, hy); #c1(TAX1BP3) c2(NP_055419) c3(tax1-binding protein 3 isoform 1) c4(181036) c5(181037, 181038, 181039, 181040, 181041, 181042) c6( ) c7(d, eA); #c1(TAZ) c2(NP_000107) c3(tafazzin isoform 1) c4(1816, 1817) c5(1818, 1819, 1820, 1821, 1822, 1823, 1824, 1825, 1826, 1827, 1828, 1829) c6( ) c7(gV, T, atk, fd, bB, afK, bS, ct, aoM, q, cd, vN, eA, cc, aT, vc, aWs, hG, aW, Y, asy, cmH, aNq, r, bp, Z, kC, Qt, dr, bfW, Bt, Dy, eM, bE, mx, wB, dy, m, lM); #c1(TAZ) c2(NP_851828) c3(tafazzin isoform 2) c4(254659) c5(254660, 254661, 254662, 254663, 254664, 254665) c6( ) c7(gV, T, atk, fd, bB, afK, bS, ct, aoM, q, cd, vN, eA, cc, aT, vc, aWs, hG, aW, Y, asy, cmH, aNq, r, bp, Z, kC, Qt, dr, bfW, Bt, Dy, eM, bE, mx, wB, dy, m, lM); #c1(TAZ) c2(NP_851829) c3(tafazzin isoform 3) c4(254666) c5(254667, 254668, 254669, 254670, 254671, 254672) c6( ) c7(gV, T, atk, fd, bB, afK, bS, ct, aoM, q, cd, vN, eA, cc, aT, vc, aWs, hG, aW, Y, asy, cmH, aNq, r, bp, Z, kC, Qt, dr, bfW, Bt, Dy, eM, bE, mx, wB, dy, m, lM); #c1(TAZ) c2(NP_851830) c3(tafazzin isoform 4) c4(254673) c5(254674, 254675, 254676, 254677, 254678, 254679) c6( ) c7(gV, T, atk, fd, bB, afK, bS, ct, aoM, q, cd, vN, eA, cc, aT, vc, aWs, hG, aW, Y, asy, cmH, aNq, r, bp, Z, kC, Qt, dr, bfW, Bt, Dy, eM, bE, mx, wB, dy, m, lM); #c1(TAZ) c2(XP_011529491) c3(tafazzin isoform X4) c4( ) c5(324956) c6( ) c7(gV, T, atk, fd, bB, afK, bS, ct, aoM, q, cd, vN, eA, cc, aT, vc, aWs, hG, aW, Y, asy, cmH, aNq, r, bp, Z, kC, Qt, dr, bfW, Bt, Dy, eM, bE, mx, wB, dy, m, lM); #c1(TBATA) c2(XP_011537769) c3(protein TBATA isoform X5) c4(335308) c5(335309) c6( ) c7(aW, lO, V, h, aT); #c1(TBATA) c2(XP_011537770) c3(protein TBATA isoform X6) c4( ) c5(335310, 335311, 335312, 335313, 335314) c6( ) c7(aW, lO, V, h, aT); #c1(TBATA) c2(XP_011537785) c3(protein TBATA isoform X18) c4(335315) c5( ) c6( ) c7(aW, lO, V, h, aT); #c1(TBATA) c2(XP_011537787) c3(protein TBATA isoform X21) c4( ) c5(335316, 335317, 335318, 335319, 335320, 335321) c6( ) c7(aW, lO, V, h, aT); #c1(TBC1D1) c2(NP_001240841) c3(TBC1 domain family member 1 isoform 2) c4(88937) c5(88938, 88939, 88940, 88941, 88942, 88943) c6( ) c7(ac, vr, v, bS, qM, bSo); #c1(TBC1D1) c2(NP_055988) c3(TBC1 domain family member 1 isoform 1) c4(184952) c5(184953, 184954, 184955, 184956, 184957, 184958, 184959) c6( ) c7(ac, vr, v, bS, qM, bSo); #c1(TBC1D1) c2(XP_011511963) c3(TBC1 domain family member 1 isoform X3) c4(302612) c5( ) c6( ) c7(ac, vr, v, bS, qM, bSo); #c1(TBC1D1) c2(XP_011511965) c3(TBC1 domain family member 1 isoform X7) c4( ) c5(302613) c6( ) c7(ac, vr, v, bS, qM, bSo); #c1(TBC1D1) c2(XP_011511966) c3(TBC1 domain family member 1 isoform X8) c4(302614) c5(302615, 302616, 302617, 302618, 302619, 302620) c6( ) c7(ac, vr, v, bS, qM, bSo); #c1(TBC1D1) c2(XP_011511967) c3(TBC1 domain family member 1 isoform X9) c4( ) c5(302621, 302622, 302623) c6( ) c7(ac, vr, v, bS, qM, bSo); #c1(TBC1D1) c2(XP_011511972) c3(TBC1 domain family member 1 isoform X16) c4( ) c5(302624, 302625, 302626, 302627, 302628) c6( ) c7(ac, vr, v, bS, qM, bSo); #c1(TBC1D15) c2(NP_001139685) c3(TBC1 domain family member 15 isoform 3) c4(59703, 59704) c5(59705, 59706, 59707, 59708, 59709, 59710, 59711, 59712) c6( ) c7(bK); #c1(TBC1D15) c2(NP_001139686) c3(TBC1 domain family member 15 isoform 2) c4(59713) c5(59714, 59715, 59716, 59717, 59718, 59719, 59720, 59721, 59722) c6( ) c7(bK); #c1(TBC1D15) c2(NP_073608) c3(TBC1 domain family member 15 isoform 1) c4(213058) c5(213059, 213060, 213061, 213062, 213063, 213064, 213065, 213066, 213067, 213068, 213069, 213070, 213071, 213072, 213073) c6( ) c7(bK); #c1(TBC1D16) c2(NP_001258774) c3(TBC1 domain family member 16 isoform c) c4( ) c5(96522, 96523, 96524, 96525, 96526, 96527) c6( ) c7(Y, ac); #c1(TBC1D16) c2(NP_061893) c3(TBC1 domain family member 16 isoform a) c4(201009, 201010) c5(201011, 201012, 201013, 201014, 201015, 201016) c6( ) c7(Y, ac); #c1(TBC1D2) c2(NP_001254500) c3(TBC1 domain family member 2A isoform 1) c4(94533, 94534, 94535) c5(94536, 94537, 94538, 94539, 94540, 94541, 94542, 94543, 94544, 94545, 94546, 94547) c6( ) c7(Na, V, Nc); #c1(TBC1D2) c2(NP_001254501) c3(TBC1 domain family member 2A isoform 3) c4( ) c5(94548, 94549, 94550, 94551, 94552, 94553) c6( ) c7(Na, V, Nc); #c1(TBC1D2) c2(NP_060891) c3(TBC1 domain family member 2A isoform 2) c4(198425) c5(198426, 198427, 198428, 198429, 198430, 198431) c6( ) c7(Na, V, Nc); #c1(TBC1D20) c2(NP_653229) c3(TBC1 domain family member 20) c4(239223, 239224) c5(239225, 239226, 239227, 239228, 239229, 239230, 239231, 239232, 239233, 239234, 239235, 239236, 239237, 239238, 239239, 239240) c6( ) c7(cxV, ac, gU, cKI); #c1(TBC1D22A) c2(NP_001271232) c3(TBC1 domain family member 22A isoform b) c4(103673) c5(103674, 103675, 103676, 103677, 103678, 103679, 103680, 103681, 103682, 103683, 103684, 103685) c6( ) c7(ac, aw, oe, an, fq, cd); #c1(TBC1D22A) c2(NP_055161) c3(TBC1 domain family member 22A isoform a) c4(179534, 179535, 179536) c5(179537, 179538, 179539, 179540, 179541, 179542, 179543, 179544, 179545, 179546, 179547, 179548) c6( ) c7(ac, aw, oe, an, fq, cd); #c1(TBC1D22A) c2(XP_005261553) c3(TBC1 domain family member 22A isoform X5) c4(277474) c5(277475, 277476, 277477, 277478, 277479, 277480) c6( ) c7(ac, aw, oe, an, fq, cd); #c1(TBC1D228) c2(NP_060242) c3(TBC1 domain family member 228) c4(194946) c5(194947, 194948, 194949, 194950, 194951, 194952) c6( ) c7(oe); #c1(TBC1D24) c2(NP_001186036) c3(TBC1 domain family member 24 isoform 1) c4(76916) c5(76917, 76918, 76919, 76920, 76921, 76922) c6( ) c7(cZ, beO, cKo, cKm, ha, lr, cKn, aft, yZ, lm, nA, dd, yU, Bh, byk); #c1(TBC1D24) c2(NP_065756) c3(TBC1 domain family member 24 isoform 2) c4(205204) c5(205205, 205206, 205207, 205208, 205209, 205210, 205211, 205212, 205213, 205214, 205215) c6( ) c7(cZ, beO, cKo, cKm, ha, lr, cKn, aft, yZ, lm, nA, dd, yU, Bh, byk); #c1(TBC1D25) c2(NP_002527) c3(TBC1 domain family member 25) c4(129563, 129564, 129565, 129566) c5(129567, 129568, 129569, 129570, 129571, 129572, 129573, 129574, 129575, 129576, 129577, 129578, 129579, 129580, 129581, 129582, 129583, 129584, 129585, 129586, 129587, 129588, 129589, 129590) c6( ) c7(bS, BG, nA, Vi, iJ, hq); #c1(TBC1D32) c2(NP_689943) c3(protein broad-minded) c4(244435) c5(244436, 244437, 244438, 244439, 244440, 244441) c6( ) c7(fq); #c1(TBC1D3C) c2(XP_006721970) c3(TBC1 domain family member 3C isoform X3) c4( ) c5(294506, 294507, 294508, 294509, 294510) c6( ) c7(ae, ad); #c1(TBC1D3F) c2(NP_115634) c3(TBC1 domain family member 3F) c4(223394, 223395, 223396) c5(223397, 223398, 223399, 223400, 223401, 223402, 223403, 223404, 223405, 223406, 223407, 223408, 223409, 223410, 223411) c6( ) c7(ad); #c1(TBC1D4) c2(NP_001273587) c3(TBC1 domain family member 4 isoform 2) c4(105365) c5(105366, 105367, 105368, 105369, 105370, 105371) c6( ) c7(bL, kI, oe, vr, jy, eE); #c1(TBC1D4) c2(NP_001273588) c3(TBC1 domain family member 4 isoform 3) c4(105372, 105373) c5(105374, 105375, 105376, 105377, 105378, 105379, 105380, 105381, 105382, 105383, 105384, 105385) c6( ) c7(bL, kI, oe, vr, jy, eE); #c1(TBC1D4) c2(NP_055647) c3(TBC1 domain family member 4 isoform 1) c4(182520) c5(182521, 182522, 182523, 182524, 182525, 182526, 182527) c6( ) c7(bL, kI, oe, vr, jy, eE); #c1(TBC1D4) c2(XP_005266662) c3(TBC1 domain family member 4 isoform X4) c4( ) c5(280273, 280274, 280275, 280276, 280277, 280278, 280279) c6( ) c7(bL, kI, oe, vr, jy, eE); #c1(TBC1D4) c2(XP_006719966) c3(TBC1 domain family member 4 isoform X3) c4(293116) c5( ) c6( ) c7(bL, kI, oe, vr, jy, eE); #c1(TBC1D5) c2(NP_001127853) c3(TBC1 domain family member 5 isoform a) c4(49388, 49389, 49390) c5(49391, 49392, 49393, 49394, 49395, 49396) c6( ) c7(T, cd); #c1(TBC1D5) c2(NP_055559) c3(TBC1 domain family member 5 isoform b) c4(181931) c5(181932, 181933, 181934, 181935, 181936, 181937, 181938, 181939, 181940, 181941, 181942, 181943, 181944, 181945, 181946, 181947, 181948, 181948, 181950, 181951, 181952, 181953) c6( ) c7(T, cd); #c1(TBC1D7) c2(NP_001137438) c3(TBC1 domain family member 7 isoform b) c4(55712, 55713, 55714, 55715, 55716) c5(55717, 55718, 55719, 55720, 55721, 55722, 55723, 55724, 55725, 55726, 55727, 55728, 55729, 55730, 55731, 55732, 55733, 55734, 55735, 55736, 55737, 55738, 55739, 55740, 55741, 55742, 55743, 55744, 55745, 55746, 55747, 55748, 55749) c6( ) c7(hI, eM, e, hp, PY, nA, bz); #c1(TBC1D7) c2(NP_001245386) c3(TBC1 domain family member 7 isoform c) c4(93421) c5(93422, 93423, 93424, 93425, 93426, 93427) c6( ) c7(hl, eM, e, hp, PY, nA, bz); #c1(TBC1D7) c2(NP_057579) c3(TBC1 domain family member 7 isoform a) c4(191423, 191424, 191425, 191426, 191427, 191428) c5(191429, 191430, 191431, 191432, 191433, 191434, 191435, 191436, 191437, 191438, 191439, 191440, 191441, 191442, 191443, 191444, 191445, 191446, 191447, 191448, 191449, 191450, 191451, 191452, 191453, 191454, 191455, 191456, 191457, 191458, 191459, 191460, 191461, 191462, 191463, 191464, 191465, 191466, 191467, 191468, 191469) c6( ) c7(hI, eM, e, hp, PY, nA, bz); #c1(TBC1D8) c2(NP_001095896) c3(TBC1 domain family member 8) c4(40926) c5(40927, 40928, 40929, 40930, 40931, 40932) c6( ) c7(T, dB, ds, h, fr, m, ir, t, bA); #c1(TBC1D8) c2(XP_005263920) c3(TBC1 domain family member 8 isoform X2) c4(278576) c5(278577, 278578, 278579, 278580, 278581, 278582) c6( ) c7(T, dB, ds, h, fr, m, ir, t, bA); #c1(TBC1D9) c2(NP_055945) c3(TBC1 domain family member 9) c4(184595) c5(184596, 184597, 184598, 184599, 184600, 184601) c6( ) c7(T, hV, if, aI, bO, fd, bB, gA, ci, ip, x, bv, aE, gH, iX, M, dV, iv, gs, K, hu, eL, be, eG, iE, aW, az, ih, hN, aB, g, ir, eE, cm, bw, iP, eM, iA, iT, cj, iS, k, m, eg, gn, in, ik, gD, fW, gp, aw, ht, n, fr, ct, eW, br, ft, ec, h, hn, dL, hB, is, dx, ia, hT, gi, iw, hQ, fe, aq, gG, iO, dB, hL, hj, hs, it, B, fM, dA, fZ, aA, hz, j, iI, q, er, eA, hW, aT, dz, gz, jj, an, gS, ae, jf, gc, hM, iF, gP, iU, Y, ev, r, en, hf, cI, gQ, t, ho, iK, hY, ck, iM, ac, hA, au, gX, hO, dy, ij, im, ht, ao, gx, ie, id, aD, ha, gN, bs, jh, bS, ah, hF, ad, hX, av, fX, ib, io, hP, ji, iL, iz, gj, d, je, hG, cH, et, ff, gK, eH, eZ, gE, hp, aF, jg, iV, Z, iR, bz, bF, es, gk, bE, eB, y, ix); #c1(TBCA) c2(NP_001284667) c3(tubulin-specific chaperone A isoform 1) c4(112288) c5(112289, 112290, 112291, 112292, 112293, 112294) c6( ) c7(DI, OV, zH, xZ, hE, zD, vc, v, m, eE, t); #c1(TBCA) c2(NP_004598) c3(tubulin-specific chaperone A isoform 2) c4(148028) c5(148029, 148030, 148031, 148032, 148033, 148034) c6( ) c7(DI, OV, zH, xZ, hE, zD, vc, v, m, eE, t); #c1(TBCC) c2(NP_003183) c3(tubulin-specific chaperone C) c4(136067) c5(136068, 136069, 136070, 136071, 136072, 136073, 136074, 136075, 136076, 136077) c6( ) c7(ck, T, iU, aW, bK, ht); #c1(TBCD) c2(NP_005984) c3(tubulin-specific chaperone D) c4(160978, 160979, 160980) c5(160981, 160982, 160983, 160984, 160985, 160986, 160987, 160988, 160989, 160990, 160991, 160992, 160993, 160994) c6( ) c7(dy, ac); #c1(TBCD) c2(XP_005256453) c3(tubulin-specific chaperone D isoform X1) c4(274184, 274185) c5(274186) c6( ) c7(dy, ac); #c1(TBCD) c2(XP_011521898) c3(tubulin-specific chaperone D isoform X12) c4(316505) c5(316506, 316507, 316508, 316509, 316510, 316511, 316512, 316513, 316514, 316515, 316516, 316517, 316518, 316519, 316520, 316521) c6( ) c7(dy, ac); #c1(TBCD) c2(XP_011521902) c3(tubulin-specific chaperone D isoform X16) c4( ) c5(316522, 316523, 316524, 316525, 316526) c6( ) c7(dy, ac); #c1(TBCE) c2(NP_001072983) c3(tubulin-specific chaperone E isoform a) c4(35435) c5(35436, 35437, 35438, 35439, 35440, 35441, 35442, 35443, 35444, 35445) c6( ) c7(oO, cKq, OI, OX, cKp, Az, Hz, h, v, K, OM, cKr, eW); #c1(TBCE) c2(NP_001274730) c3(tubulin-specific chaperone E isoform b) c4(106713) c5(106714, 106715, 106716, 106717, 106718, 106719) c6( ) c7(oO, cKq, OI, OX, cKp, Az, Hz, h, v, K, OM, cKr, eW); #c1(TBCEL) c2(NP_001123519) c3(tubulin-specific chaperone cofactor E-like protein) c4(47301) c5(47302, 47303, 47304, 47305, 47306, 47307, 47308, 47309, 47310, 47311) c6( ) c7(ao, g, K, rV); #c1(TBK1) c2(XP_005268867) c3(serine/threonine-protein kinase TBK1 isoform X1) c4(282139, 282140, 282141) c5(282142, 282143, 282144, 282145, 282146, 282147, 282148, 282149, 282150, 282151, 282152, 282153, 282154, 282155, 282156, 282157, 282158, 282159) c6( ) c7(oO, HQ, cZ, T, fR, jx, j, eh, eW, ad, hX, F, aT, K, dd, ae, afu, dH, aW, Y, eZ, lo, alb, CQ, dw, bz, pZ, eM, eg, hh, B); #c1(TBKBP1) c2(NP_055541) c3(TANK-binding kinase 1-binding protein 1) c4(181833, 181834) c5(181835, 181836, 181837, 181838, 181839, 181840, 181841, 181842, 181843, 181844, 181845, 181846) c6( ) c7(mR, fR); #c1(TBL1X) c2(NP_001132938) c3(F-box-like/WD repeat-containing protein TBL1X isoform a) c4(52688, 52689, 52690, 52691) c5(52692, 52693, 52694, 52695, 52696, 52697, 52698, 52699, 52700, 52701, 52702, 52703, 52704, 52705, 52706, 52707, 52708, 52709, 52710, 52711, 52712, 52713, 52714, 52715, 52716, 52717, 52718, 52719) c6( ) c7(VX, aW, mG, fc, aT, im, ei, cP); #c1(TBL1X) c2(XP_011543873) c3(F-box-like/WD repeat-containing protein TBL1X isoform X1) c4(343033) c5(343034, 343035, 343036, 343037, 343038, 343039, 343040, 343041, 343042, 343043, 343044, 343045, 343046, 343047, 343048, 343049) c6( ) c7(VX, aW, mG, fc, aT, im, ei, cP); #c1(TBL1XR1) c2(XP_005247828) c3(F-box-like/WD repeat-containing protein TBL1XR1 isoform X3) c4( ) c5(268001) c6( ) c7(x, ae, gj, T, Ew, if, fc, jh, n, hn, v, k, cP, ei, qN, ey, bz, ad); #c1(TBL1XR1) c2(XP_005247833) c3(F-box-like/WD repeat-containing protein TBL1XR1 isoform X4) c4( ) c5(268002, 268003, 268004, 268005, 268006, 268007) c6( ) c7(x, ae, gj, T, Ew, if, fc, jh, n, hn, v, k, cP, ei, qN, ey, bz, ad); #c1(TBL1XR1) c2(XP_011511445) c3(F-box-like/WD repeat-containing protein TBL1XR1 isoform X1) c4(302079, 302080, 302081, 302082, 302083, 302084, 302085, 302086, 302087, 302088) c5(302089, 302090, 302091, 302092, 302093, 302094, 302095, 302096, 302097, 302098, 302099, 302100, 302101, 302102, 302103, 302104, 302105, 302106, 302107, 302108, 302109, 302110, 302111, 302112, 302113, 302114, 302115, 302116, 302117, 302118, 302119, 302120, 302121, 302122, 302123, 302124, 302125, 302126, 302127, 302128, 302129, 302130, 302131, 302132, 302133, 302134, 302135, 302136, 302137, 302138, 302139, 302140, 302141, 302142, 302143, 302144, 302145, 302146, 302147, 302148, 302149) c6( ) c7(x, ae, gj, T, Ew, if, fc, jh, n, hn, v, k, cP, ei, qN, ey, bz, ad); #c1(TBL1Y) c2(NP_599021) c3(F-box-like/WD repeat-containing protein TBL1Y) c4(235542, 235543) c5(235544, 235545, 235546, 235547, 235548, 235549, 235550, 235551, 235552, 235553, 235554, 235555, 235556, 235557, 235558, 235559, 235560, 235561, 235562, 235563, 235564, 235565, 235566, 235567, 235568) c6( ) c7(aW, mG, fc, aT, im, j, cP, ei, bN); #c1(TBL1Y) c2(XP_005262629) c3(F-box-like/WD repeat-containing protein TBL1Y isoform X1) c4(278027) c5( ) c6( ) c7(aW, mG, fc, aT, im, j, cP, ei, bN); #c1(TBL2) c2(NP_036585) c3(transducin beta-like protein 2 precursor) c4(174543, 174544) c5(174545, 174546, 174547, 174548, 174549, 174550, 174551, 174552, 174553, 174554, 174555, 174556) c6( ) c7(cO, bL); #c1(TBL3) c2(NP_006444) c3(transducin beta-like protein 3) c4(165267) c5(165268, 165269, 165270, 165271, 165272, 165273, 165274, 165275, 165276, 165277) c6( ) c7(dy, ac); #c1(TBP) c2(NP_001165556) c3(TATA-box-binding protein isoform 2) c4(67757) c5(67758, 67759, 67760, 67761, 67762, 67763, 67764, 67765, 67766, 67767, 67768, 67769, 67770, 67771, 67772, 67773, 67774) c6( ) c7(T, cvj, fG, yY, rf, GC, qj, ci, jX, aGK, nA, q, aR, PW, akN, bgk, KB, aT, Wk, aU, yZ, dL, K, Wm, an, on, nJ, af, eL, A, s, aW, Em, Y, r, fe, aq, EH, ckd, RI, g, ajG, pb, GB, rR, VJ, ky, cEz, kB, Kv, bE, eD, U, IC, B, pC); #c1(TBP) c2(NP_003185) c3(TATA-box-binding protein isoform 1) c4(136078, 136079, 136080, 136081, 136082) c5(136083, 136084, 136085, 136086, 136087, 136088, 136089, 136090, 136091, 136092, 136093, 136094, 136095, 136096, 136097, 136098, 136099, 136100, 136101, 136102, 136103, 136104, 136105, 136106) c6( ) c7(T, cvj, fG, yY, rf, GC, qj, ci, jX, aGK, nA, q, aR, PW, akN, bgk, KB, aT, Wk, aU, yZ, dL, K, Wm, an, on, nJ, af, eL, A, s, aW, Em, Y, r, fe, aq, EH, ckd, RI, g, ajG, pb, GB, rR, VJ, ky, cEz, kB, Kv, bE, eD, U, IC, B, pC); #c1(TBPL1) c2(NP_004856) c3(TATA box-binding protein-like protein 1) c4(150335, 150336, 150337, 150338, 150339) c5(150340, 150341, 150342, 150343, 150344, 150345, 150346, 150347, 150348, 150349, 150350, 150351, 150352, 150353, 150354, 150355, 150356, 150357, 150358, 150359, 150360, 150361, 150362, 150363, 150364, 150365, 150366, 150367, 150368, 150369, 150370) c6( ) c7(bM, T, os, gU, yk, e, cV, cbc, aA, tc, bB, aNG, uu, ci, oZ, IN, fd, hF, q, cd, ad, auf, MR, kH, aT, vw, aYf, dL, vH, K, h, ae, eL, ajU, pl, je, ND, aW, Y, Gv, ff, hl, r, fe, aF, jh, en, iV, pL, vo, cm, dr, iP, ck, iM, eM, kB, lI, hk, bE, wB, U, nw, dy, WL, kS, B); #c1(TBPL2) c2(NP_950248) c3(TATA box-binding protein-like protein 2) c4(260931) c5(260932, 260933, 260934, 260935, 260936, 260937) c6( ) c7(dP, T, dD, iM, je, op, ea, vA, bo, kH, bB, dq, aj, eq, K, J); #c1(TBR1) c2(NP_006584) c3(T-box brain protein 1) c4(166396, 166397, 166398) c5(166399, 166400, 166401, 166402, 166403, 166404, 166405, 166406, 166407, 166408, 166409, 166410, 166411, 166412, 166413, 166414, 166415, 166416, 166417) c6( ) c7(nA, r); #c1(TBRG1) c2(NP_116200) c3(transforming growth factor beta regulator 1) c4(225716, 225717) c5(225718, 225719, 225720, 225721, 225722, 225723) c6( ) c7(oU); #c1(TBRG1) c2(XP_005271766) c3(transforming growth factor beta regulator 1 isoform X1) c4( ) c5(283572, 283573, 283574, 283575, 283576, 283577) c6( ) c7(oU); #c1(TBX1) c2(NP_005983) c3(T-box transcription factor TBX1 isoform B) c4(160971) c5(160972, 160973, 160974, 160975, 160976, 160977) c6( ) c7(bM, T, aiH, e, aiC, ci, Na, ahd, aW, Az, g, cAS, sv, pw, axN, ik, Zo, RX, n, aLn, nA, bVE, md, aUb, DM, he, Gc, OX, aMH, aMJ, cKu, hq, aLi, cA, bD, iH, v, Eh, q, Mg, qK, yg, aT, bK, rz, qk, kl, Y, cKp, r, en, cI, bN, cKs, cKt, HK, FI, atk, acl, oA, vG, hF, agY, xt, hX, av, agd, Db, aQj, Pc, WZ, ff, aJk, gl, hp, S, jb, bz, dr, qa, Ew, aBU, bYB, auH, be, y); #c1(TBX1) c2(NP_542377) c3(T-box transcription factor TBX1 isoform A) c4(232289) c5(232290, 232291, 232292, 232293, 232294, 232295) c6( ) c7(bM, T, aiH, e, aiC, ci, Na, ahd, aW, Az, g, cAS, sv, pw, axN, ik, Zo, RX, n, aLn, nA, bVE, md, aUb, OM, he, Gc, OX, aMH, aMJ, cKu, hq, aLi, cA, bD, iH, v, Eh, q, Mg, qK, yg, aT, bK, rz, gk, kl, Y, cKp, r, en, cl, bN, cKs, cKt, HK, FI, atk, acl, oA, vG, hF, agY, xt, hX, av, agd, Db, aQj, Pc, WZ, ff, aJk, gl, hp, S, jb, bz, dr, qa, Ew, aBU, bYB, auH, be, y); #c1(TBX1) c2(NP_542378) c3(T-box transcription factor TBX1 isoform C) c4(232296, 232297) c5(232298, 232299, 232300, 232301, 232302, 232303, 232304, 232305, 232306, 232307, 232308) c6( ) c7(bM, T, aiH, e, aiC, ci, Na, ahd, aW, Az, g, cAS, sv, pw, axN, ik, Zo, RX, n, aLn, nA, bVE, md, aUb, OM, he, Gc, OX, aMH, aMJ, cKu, hq, aLi, cA, bD, iH, v, Eh, q, Mg, qK, yg, aT, bK, rz, qk, kl, Y, cKp, r, en, cI, bN, cKs, cKt, HK, FI, atk, acl, oA, vG, hF, agY, xt, hX, av, agd, Db, aQj, Pc, WZ, ff, aJk, gl, hp, S, jb, bz, dr, qa, Ew, aBU, bYB, auH, be, y); #c1(TBX10) c2(NP_005986) c3(T-box transcription factor TBX10) c4(160995) c5(160996, 160997, 160998, 160999, 161000, 161001) c6( ) c7(Na, Nc, apM, aOX); #c1(TBX10) c2(XP_011543294) c3(T-box transcription factor TBX10 isoform X1) c4( ) c5(342086) c6( ) c7(Na, Nc, apM, aOX); #c1(TBX18) c2(NP_001073977) c3(T-box transcription factor TBX18) c4(36755) c5(36756, 36757, 36758, 36759, 36760, 36761) c6( ) c7(eF, eH, j, Kw); #c1(TBX18) c2(XP_006715665) c3(T-box transcription factor TBX18 isoform X4) c4( ) c5(289701) c6( ) c7(eF, eH, j, Kw); #c1(TBX18) c2(XP_011534549) c3(T-box transcription factor TBX18 isoform X1) c4(331085) c5(331086, 331087, 331088, 331089, 331090, 331091) c6( ) c7(eF, eH, j, Kw); #c1(TBX19) c2(NP_005140) c3(T-box transcription factor TBX19) c4(153337, 153338, 153339, 153340) c5(153341, 153342, 153343, 153344, 153345, 153346, 153347, 153348, 153349, 153350, 153351, 153352, 153353, 153354, 153355, 153356, 153357, 153358, 153359, 153360, 153361, 153362, 153363, 153364, 153365) c6( ) c7(s, Wt, cz, aVh, vg, bS, OD, ml, aVL, bmd, bA); #c1(TBX2) c2(XP_011523460) c3(T-box transcription factor TBX2 isoform X1) c4(317983, 317984) c5(317985, 317986, 317987, 317988, 317989, 317990, 317991, 317992, 317993, 317994, 317995, 317996, 317997) c6( ) c7(md, T, aE, aW, Y, acI, aT iv, dL, dy, ci, K, j, BM, eL); #c1(TBX20) c2(NP_001071121) c3(T-box transcription factor TBX20 isoform 1) c4(35294) c5(35295, 35296, 35297, 35298, 35299, 35300) c6( ) c7(Mg, bwO, dD, cc, ac, rz, ea, acI, aw, al, gZ, bD, aaw, j, eq, cKv, hH, nC); #c1(TBX20) c2(NP_001159692) c3(T-box transcription factor TBX20 isoform 2) c4( ) c5(64600) c6( ) c7(Mg, bwO, dD, cc, ac, rz, ea, acI, aw, al, gZ, bD, aaw, j, eq, cKv, hH, nC); #c1(TBX21) c2(NP_037483) c3(T-box transcription factor TBX21) c4(175756) c5(175757, 175758, 175759, 175760, 175761, 175762, 175763) c6( ) c7(bM, Dw, fR, eX, bO, aA, xM, hz, IR, bh, pM, V, qW, eW, amW, zn, hX, b, cKw, hD, eV, Ds, A, cwV, aCx, eZ, BG, Z, eE, pb, ck, eU, dW, Tu, i, hE, y); #c1(TBX22) c2(NP_001103348) c3(T-box transcription factor TBX22 isoform 1) c4(41874) c5(41875, 41876, 41877, 41878, 41879, 41880, 41881, 41882, 41883, 41884, 41885, 41886) c6( ) c7(kn, Na, aVh, h, Nc, aml, aVg, bYQ, cKx, ao); #c1(TBX22) c2(NP_001103349) c3(T-box transcription factor TBX22 isoform 2) c4( ) c5(41887, 41888, 41889, 41890, 41891, 41892, 41893, 41894, 41895) c6( ) c7(kn, Na, aVh, h, Nc, aml, aVg, bYQ, cKx, ao); #c1(TBX22) c2(XP_006725480) c3(T-box transcription factor TBX22 isoform X1) c4(296823) c5( ) c6( ) c7(kn, Na, aVh, h, Nc, aml, aVg, bYQ, cKx, ao); #c1(TBX3) c2(NP_005987) c3(T-box transcription factor TBX3 isoform 1) c4(161002) c5(161003, 161004, 161005, 161006, 161007, 161008, 161009) c6( ) c7(T, acI, oe, aw, EQ, aA, cz, hz, nA, Dr, aT, dL, eL, af, aW, Y, r, aJk, aq, iR, t, iK, atb, oU, iO, ac, bE, dy, y, B); #c1(TBX3) c2(NP_057653) c3(T-box transcription factor TBX3 isoform 2) c4(192070, 192071) c5(192072, 192073, 192074, 192075, 192076, 192077, 192078, 192079, 192080, 192081, 192082, 192083) c6( ) c7(T, acI, oe, aw, EQ, aA, cz, hz, nA, Dr, aT, dL, eL, af, aW, Y, r, aJk, aq, iR, t, iK, atb, oU, iO, ac, bE, dy, y, B); #c1(TBX4) c2(NP_060958) c3(T-box transcription factor TBX4) c4(198887) c5( ) c6( ) c7(ID, Iy, XW, bhl, aT, gl, cKy, aOm, Ix); #c1(TBX4) c2(XP_011523792) c3(T-box transcription factor TBX4 isoform X1) c4( ) c5(318285) c6( ) c7(ID, Iy, XW, bhl, aT, gl, cKy, aOm, Ix); #c1(TBX4) c2(XP_011523793) c3(T-box transcription factor TBX4 isoform X2) c4( ) c5(318286, 318287, 318288, 318289, 318290, 318291) c6( ) c7(ID, Iy, XW, bhl, aT, gl, cKy, aOm, Ix); #c1(TBX4) c2(XP_011523796) c3(T-box transcription factor TBX4 isoform X3) c4(318292) c5(318293, 318294, 318295, 318296, 318297) c6( ) c7(ID, Iy, XW, bhl, aT, gl, cKy, aOm, Ix); #c1(TBX5) c2(NP_542448) c3(T-box transcription factor TBX5 isoform 3) c4( ) c5(232980, 232981, 232982, 232983, 232984, 232985) c6( ) c7(T, mr, atk, bkF, acI, aw, wL, EQ, cz, Hn, j, ci, BM, cd, afb, qH, md, cF, ft, aE, h, rz, eL, Gc, eG, are, eH, aF, eF, cm, atb, arB, gY, bhl, gZ, bD, vt, B); #c1(TBX5) c2(NP_852259) c3(T-box transcription factor TBX5 isoform 1) c4(254931, 254932, 254933, 254934) c5(254935, 254936, 254937, 254938, 254939, 254940, 254941, 254942, 254943, 254944, 254945, 254946, 254947, 254948, 254949, 254950, 254951, 254952, 254953, 254954, 254955, 254956, 254957) c6( ) c7(T, mr, atk, bkF, acI, aw, wL, EQ, cz, Hn, j, ci, BM, cd, afb, qH, md, cF, ft, aE, h, rz, eL, Gc, eG, are, eH, aE, eF, cm, atb, arB, gY, bhl, gZ, bD, vt, B); #c1(TBX6) c2(NP_004599) c3(T-box transcription factor TBX6) c4(148035, 148036) c5(148037, 148038, 148039, 148040, 148041, 148042, 148043, 148044, 148045, 148046, 148047, 148048, 148049, 148050, 148051, 148052, 148053) c6( ) c7(qb, Iq, bZI, bQ, bxG, bBk, bfU); #c1(TBXA2R) c2(NP_963998) c3(thromboxane A2 receptor isoform beta) c4(262611) c5(262612, 262613, 262614, 262615, 262616, 262617) c6( ) c7(bM, T, cKz, xu, ea, aw, j, PM, q, ad, brX, jo, af, iU, sp, r, as, eE, bz, eK, ac, z, JM, qq, dX, wx, Tu, m); #c1(TBXA2R) c2(XP_011526516) c3(thromboxane A2 receptor isoform X1) c4(320813) c5(320814, 320815, 320816, 320817, 320818, 320819) c6( ) c7(bM, T, cKz, xu, ea, aw, j, pM, q, ad, brX, jo, af, iU, sp, r, as, eE, bz, eK, ac, z, JM, qq, dX, wx, Tu, m); #c1(TBXAS1) c2(NP_001052) c3(thromboxane-A synthase isoform 1) c4(34392, 34393, 34394) c5(34395, 34396, 34397, 34398, 34399, 34400, 34401, 34402, 34403, 34404, 34405, 34406, 34407, 34408, 34409, 34410, 34411, 34412, 34413, 34414, 34415) c6( ) c7(bM, sY, cKA, ea, dK, aw, uO, cz, ad, av, cF, fS, aT, IG, dL, jo, af, eu, aW, EU, uC, eK, tk, ac, wg, hc, hR, wx, m); #c1(TBXAS1) c2(NP_001159725) c3(thromboxane-A synthase isoform 3) c4(64630, 64631) c5(64632, 64633, 64634, 64635, 64636, 64637) c6( ) c7(bM, sY, cKA, ea, dK, aw, uO, cz, ad, av, cF, fS, aT, IG, dL, jo, af, eu, aW, EU, uC, eK, tk, ac, wg, hc, hR, wx, m); #c1(TBXAS1) c2(NP_001159726) c3(thromboxane-A synthase isoform 4) c4( ) c5(64638, 64639, 64640, 64641, 64642) c6( ) c7(bM, sY, cKA, ea, dK, aw, uO, cz, ad, av, cF, fS, aT, IG, dL, jo, af, eu, aW, EU, uC, eK, tk, ac, wg, hc, hR, wx, m); #c1(TBXAS1) c2(NP_112246) c3(thromboxane-A synthase isoform 2) c4(221101, 221102, 221103) c5(221104, 221105, 221106, 221107, 221108, 221109, 221110, 221111, 221112, 221113, 221114, 221115, 221116, 221117, 221118, 221119, 221120, 221121, 221122, 221123, 221124, 221125, 221126, 221127) c6( ) c7(bM, sY, cKA, ea, dK, aw, uO, cz, ad, av, cF, fS, aT, IG, dL, jo, af, eu, aW, EU, uC, eK, tk, ac, wg, hc, hR, wx, m); #c1(TCAIM) c2(NP_001025010) c3(T-cell activation inhibitor, mitochondrial isoform 2) c4(29193) c5(29194, 29195, 29196, 29197, 29198, 29199, 29200, 29201, 29202, 29203) c6( ) c7(cr); #c1(TCAIM) c2(NP_776187) c3(T-cell activation inhibitor, mitochondrial isoform 1) c4(250946) c5(250947, 250948, 250949, 250950, 250951, 250952, 250953, 250954, 250955, 250956) c6( ) c7(cr); #c1(TCAP) c2(NP_003664) c3(telethonin) c4(140048) c5(140049, 140050, 140051, 140052, 140053, 140054, 140055) c6( ) c7(cKC, AY, cc, aqZ, aW, xs, mx, km, aT, vc, cKB, mo); #c1(TCEA1) c2(NP_006747) c3(transcription elongation factor A protein 1 isoform 1) c4(167660, 167661) c5(167662, 167663, 167664, 167665, 167666, 167667) c6( ) c7(T, aE, c, aW, Y, aT); #c1(TCEA1) c2(NP_958845) c3(transcription elongation factor A protein 1 isoform 2) c4(262273) c5(262274, 262275, 262276, 262277, 262278, 262279) c6( ) c7(T, aE, c, aW, Y, aT); #c1(TCEA1) c2(XP_011515881) c3(transcription elongation factor A protein 1 isoform X2) c4( ) c5(308857, 308858, 308859, 308860, 308861, 308862) c6( ) c7(T, aE, c, aW, Y, aT); #c1(TCEA2) c2(NP_003186) c3(transcription elongation factor A protein 2 isoform a) c4(136107, 136108, 136109, 136110) c5(136111, 136112, 136113, 136114, 136115, 136116, 136117, 136118, 136119, 136120, 136121, 136122, 136123, 136124, 136125, 136126, 136127) c6( ) c7(aW, T, aE, bt, aT); #c1(TCEA2) c2(NP_942016) c3(transcription elongation factor A protein 2 isoform b) c4( ) c5(260429, 260430, 260431, 260432, 260433, 260434, 260435, 260436, 260437, 260438, 260439, 260440, 260441, 260442, 260443, 260444, 260445, 260446, 260447, 260448, 260449, 260450, 260451) c6( ) c7(aW, T, aE, bt, aT); #c1(TCEA2) c2(XP_005260286) c3(transcription elongation factor A protein 2 isoform X1) c4(276512, 276513) c5( ) c6( ) c7(aW, T, aE, bt, aT); #c1(TCEA3) c2(XP_011540358) c3(transcription elongation factor A protein 3 isoform X5) c4( ) c5(338818, 338819, 338820, 338821, 338822, 338823) c6( ) c7(aW, T, aE, aT); #c1(TCEAL1) c2(NP_001006641) c3(transcription elongation factor A protein-like 1) c4(22294, 22295) c5(22296, 22297, 22298, 22299, 22300, 22301, 22302, 22303, 22304, 22305, 22306, 22307, 22308, 22309, 22310, 22311, 22312, 22313, 22314, 22315, 22316) c6( ) c7(hd, id, nF, hL, at, dL, qN, t); #c1(TCEAL2) c2(NP_525129) c3(transcription elongation factor A protein-like 2) c4(231231) c5(231232, 231233, 231234, 231235, 231236, 231237, 231238, 231239, 231240, 231241) c6( ) c7(an); #c1(TCEAL4) c2(NP_001287830) c3(transcription elongation factor A protein-like 4 isoform 5) c4(112944, 112945, 112946, 112947, 112948, 112949) c5(112950, 112951, 112952, 112953, 112954, 112955, 112956, 112957, 112958, 112959, 112960, 112961, 112962, 112963, 112964, 112965, 112966) c6( ) c7(T, hd, ci, nB); #c1(TCEAL7) c2(NP_689491) c3(transcription elongation factor A protein-like 7) c4(242884) c5(242885, 242886, 242887, 242888, 242889, 242890, 242891, 242892, 242893, 242894) c6( ) c7(T, Jl, aA, aE, m, cl, t, ad); #c1(TCEB1) c2(NP_001191793) c3(transcription elongation factor 8 polypeptide 1 isoform b) c4(81763) c5(81764, 81765, 81766, 81767, 81768) c6( ) c7(aW, VB, aT, h, fr, ci, ae, LS, ad); #c1(TCEB1) c2(XP_011515883) c3(transcription elongation factor 8 polypeptide 1 isoform X1) c4(308863, 308864) c5(308865, 308866, 308867, 308868, 308869, 308870, 308871, 308872, 308873, 308874, 308875, 308876, 308877, 308878, 308879, 308880, 308881, 308882, 308883, 308884, 308885, 308886, 308887, 308888, 308889, 308890, 308891, 308892, 308893, 308894, 308895, 308896, 308897) c6( ) c7(aW, VB, aT, h, fr, ci, ae, LS, ad); #c1(TCEB2) c2(NP_009039) c3(transcription elongation factor 8 polypeptide 2 isoform a) c4(170363) c5(170364, 170365, 170366, 170367, 170368, 170369) c6( ) c7(aW, RI, B, VB); #c1(TCEB2) c2(NP_996896) c3(transcription elongation factor 8 polypeptide 2 isoform b) c4(264857) c5(264858, 264859, 264860, 264861, 264862, 264863) c6( ) c7(aW, RI, B, VB); #c1(TCEB3C) c2(NP_663628) c3(RNA polymerase II transcription factor SIII subunit A3) c4(241361) c5(241362, 241363, 241364, 241365, 241366, 241367) c6( ) c7(pX); #c1(TCERG1) c2(NP_001035095) c3(transcription elongation regulator 1 isoform 2) c4(32496) c5(32497, 32498, 32499, 32500, 32501, 32502) c6( ) c7(rR, hp); #c1(TCERG1) c2(NP_006697) c3(transcription elongation regulator 1 isoform 1) c4(167227) c5(167228, 167229, 167230, 167231, 167232, 167233, 167234) c6( ) c7(rR, hp); #c1(TCERG1L) c2(NP_777597) c3(transcription elongation regulator 1-like protein) c4(251293) c5(251294, 251295, 251296, 251297, 251298, 251299) c6( ) c7(bL, T, ac, bE, r, bB, aj, v, ci, q, J); #c1(TCF12) c2(NP_003196) c3(transcription factor 12 isoform b) c4(136193, 136194) c5(136195, 136196, 136197, 136198, 136199, 136200, 136201, 136202, 136203, 136204, 136205, 136206, 136207, 136208, 136209, 136210, 136211) c6( ) c7(x, aNA, cKD, wL, r, k, agj, an, cm, q, zV); #c1(TCF12) c2(NP_996920) c3(transcription factor 12 isoform a) c4(264896) c5(264897, 264898, 264899, 264900, 264901, 264902, 264903, 264904, 264905, 264906, 264907, 264908) c6( ) c7(x, aNA, cKD, wL, r, k, agj, an, cm, q, zV); #c1(TCF12) c2(NP_996923) c3(transcription factor 12 isoform c) c4(264909) c5(264910, 264911, 264912, 264913, 264914, 264915) c6( ) c7(x, aNA, cKD, wL, r, k, agj, an, cm, q, zV); #c1(TCF12) c2(XP_005254670) c3(transcription factor 12 isoform X5) c4(273296) c5( ) c6( ) c7(x, aNA, cKD, wL, r, k, agj, an, cm, q, zV); #c1(TCF12) c2(XP_011520263) c3(transcription factor 12 isoform X2) c4(315099, 315100) c5( ) c6( ) c7(x, aNA, cKD, wL, r, k, agj, an, cm, q, zV); #c1(TCF12) c2(XP_011520268) c3(transcription factor 12 isoform X8) c4( ) c5(315101, 315102, 315103, 315104, 315105, 315106, 315107, 315108, 315109, 315110, 315111, 315112) c6( ) c7(x, aNA, cKD, wL, r, k, agj, an, cm, q, zV); #c1(TCF15) c2(NP_004600) c3(transcription factor 15) c4(148054) c5(148055, 148056, 148057, 148058, 148059, 148060, 148061) c6( ) c7(kl); #c1(TCF19) c2(XP_005249391) c3(transcription factor 19 isoform X1) c4(269274, 269275) c5(269276, 269277, 269278, 269279, 269280, 269281, 269282, 269283, 269284, 269285, 269286, 269287, 269288, 269289, 269290, 269291, 269292) c6( ) c7(mj, A, cr, eZ, v, K, jE, hH, V, X); #c1(TCF19) c2(XP_005272924) c3(transcription factor 19 isoform X1) c4(284233) c5(284234, 284235, 284236, 284237, 284238, 284239, 284240, 284241, 284242, 284243, 284244, 284245, 284246, 284247, 284248, 284249, 284250, 284251, 284252, 284253, 284254, 284255, 284256, 284257, 284258, 284259, 284260, 284261, 284262, 284263, 284264, 284265, 284266, 284267, 284268, 284269, 284270, 284271, 284272, 284273, 284274, 284275, 284276, 284277, 284278, 284279, 284280, 284281) c6( ) c7(mj, A, cr, eZ, v, K, jE, hH, V, X); #c1(TCF19) c2(XP_005275645) c3(transcription factor 19 isoform X1) c4(285688) c5( ) c6( ) c7(mj, A, cr, eZ, v, K, jE, hH, V, X); #c1(TCF20) c2(NP_005641) c3(transcription factor 20 isoform 1) c4(158206) c5(158207, 158208, 158209, 158210, 158211, 158212) c6( ) c7(bL, ash, v, ad, aT); #c1(TCF20) c2(NP_852469) c3(transcription factor 20 isoform 2) c4(254998) c5(254999, 255000, 255001, 255002, 255003, 255004) c6( ) c7(bL, ash, v, ad, aT); #c1(TCF21) c2(NP_003197) c3(transcription factor 21) c4(136212) c5(136213, 136214, 136215, 136216, 136217, 136218, 136219, 136220, 136221, 136222) c6( ) c7(T, dD, ok, Dy, eM, ea, Y, ff, iw, iv, hy, j, ci, en, eq, g, iK, bz, cp); #c1(TCF25) c2(NP_055787) c3(transcription factor 25) c4(183499) c5(183500, 183501, 183502, 183503, 183504, 183505, 183506, 183507, 183508, 183509, 183510, 183511, 183512) c6( ) c7(ac); #c1(TCF25) c2(XP_005256355) c3(transcription factor 25 isoform X4) c4(274120) c5(274121, 274122, 274123, 274124, 274125, 274126) c6( ) c7(ac); #c1(TCF25) c2(XP_011521262) c3(transcription factor 25 isoform X8) c4(316171) c5( ) c6( ) c7(ac); #c1(TCF3) c2(NP_001129611) c3(transcription factor E2-alpha isoform E47) c4(52012) c5(52013, 52014, 52015, 52016, 52017, 52018, 52019, 52020, 52021, 52022) c6( ) c7(T, wu, jh, fZ, aA, hF, q, ad, x, oG, TK, aT, hn, wm, pk, ae, azh, aW, Y, cr, r, aF, cm, ck, ou, eU, QG, eD, Hb, m, k); #c1(TCF3) c2(NP_003191) c3(transcription factor E2-alpha isoform E12) c4(136133) c5(136134, 136135, 136136, 136137, 136138, 136139) c6( ) c7(T, wu, jh, fZ, aA, hF, q, ad, x, oG, TK, aT, hn, wm, pk, ae, azh, aW, Y, cr, r, aF, cm, ck, ou, eU, QG, eD, Hb, m, k); #c1(TCF3) c2(XP_011526524) c3(transcription factor E2-alpha isoform X6) c4(320820) c5(320821, 320822, 320823, 320824, 320825, 320826) c6( ) c7(T, wu, jh, fZ, aA, hF, q, ad, x, oG, TK, aT, hn, wm, pk, ae, azh, aW, Y, cr, r, aF, cm, ck, ou, eU, QG, eD, Hb, m, k); #c1(TCF3) c2(XP_011526525) c3(transcription factor E2-alpha isoform X7) c4( ) c5(320827) c6( ) c7(T, wu, jh, fZ, aA, hF, q, ad, x, oG, TK, aT, hn, wm, pk, ae, azh, aW, Y, cr, r, aF, cm, ck, ou, eU, QG, eD, Hb, m, k); #c1(TCF3) c2(XP_011526529) c3(transcription factor E2-alpha isoform X10) c4(320828) c5(320829, 320830, 320831, 320832, 320833) c6( ) c7(T, wu, jh, fZ, aA, hF, q, ad, x, oG, TK, aT, hn, wm, pk, ae, azh, aW, Y, cr, r, aF, cm, ck, ou, eU, QG, eD, Hb, m, k); #c1(TCF4) c2(NP_001230155) c3(transcription factor 4 isoform c) c4(86000, 86001, 86002) c5(86003, 86004, 86005, 86006, 86007, 86008, 86009, 86010, 86011, 86012, 86013, 86014, 86015, 86016, 86017, 86018, 86019) c6( ) c7(bL, xN, T, iV, bkx, atS, NT, aA, bB, mS, fr, ci, nA, bX, aQK, pz, q, ad, eA, eW, x, iu, hd, aOu, Yc, hb, mW, aT, h, bK, K, mY, mV, ahE, Kq, he, KV, Qe, ae, mU, dF, Lu, d, B, s, aW, Y, Yd, Az, r, fe, gl, hN, aq, aF, ahI, g, cl, Z, t, QK, fs, mZ, bz, as, mX, ck, es, hF, iA, dB, bE, bmD, agI, cKE, gX, gZ, at, np, m, yA, Iw, mT); #c1(TCF4) c2(NP_001230160) c3(transcription factor 4 isoform g) c4(86020) c5(86021, 86022, 86023, 86024, 86025, 86026) c6( ) c7(bL, xN, T, iV, bkx, atS, NT, aA, bB, mS, fr, ci, nA, bX, aQK, pz, q, ad, eA, eW, x, iu, hd, aOu, Yc, hb, mW, aT, h, bK, K, mY, mV, ahE, Kg, he, KV, Qe, ae, mU, dF, Lu, d, B, s, aW, Y, Yd, Az, r, fe, gl, hN, aq, aF, ahI, g, cl, Z, t, QK, fs, mZ, bz, as, mX, ck, es, hF, iA, dB, bE, bmD, agI, cKE, gX, gZ, at, np, m, yA, Iw, mT); #c1(TCF4) c2(NP_001230161) c3(transcription factor 4 isoform h) c4(86027) c5(86028, 86029, 86030, 86031, 86032, 86033) c6( ) c7(bL, xN, T, iV, bkx, atS, NT, aA, bB, mS, fr, ci, nA, bX, aQK, pz, q, ad, eA, eW, x, iu, hd, aOu, Yc, hb, mW, aT, h, bK, K, mY, mV, ahE, Kq, he, KV, Qe, ae, mU, dF, Lu, d, B, s, aW, Y, Yd, Az, r, fe, gl, hN, aq, aF, ahI, g, cl, Z, t, QK, fs, mZ, bz, as, mX, ck, es, bE, iA, dB, bE, bmD, agI, cKE, gX, gZ, at, np, m, yA, Iw, mT); #c1(TCF4) c2(NP_001230163) c3(transcription factor 4 isoform j) c4(86034) c5(86035, 86036, 86037, 86038, 86039, 86040) c6( ) c7(bL, xN, T, iV, bkx, atS, NT, aA, bB, mS, fr, ci, nA, bX, aQK, pz, q, ad, eA, eW, x, iu, hd, aOu, Yc, hb, mW, aT, h, bK, K, mY, mV, ahE, Kq, he, KV, Qe, ae, mU, dF, Lu, d, B, s, aW, Y, Yd, Az, r, fe, gl, hN, aq, aF, ahI, g, cl, Z, t, QK, fs, mZ, bz, as, mX, ck, es, bE, iA, dB, bE, bmD, agI, cKE, gX, gZ, at, np, m, yA, Iw, mT); #c1(TCF4) c2(NP_003190) c3(transcription factor 4 isoform b) c4( ) c5(136128, 136129, 136130, 136131, 136132) c6( ) c7(bL, xN, T, iV, bkx, atS, NT, aA, bB, mS, fr, ci, nA, bX, aQK, pz, q, ad, eA, eW, x, iu, hd, aOu, Yc, hb, mW, aT, h, bK, K, mY, mV, ahE, Kq, he, KV, Qe, ae, mU, dF, Lu, d, B, s, aW, Y, Yd, Az, r, fe, gl, hN, aq, aF, ahI, g, cl, Z, t, QK, fs, mZ, bz, as, mX, ck, es, bE, iA, dB, bE, bmD, agI, cKE, gX, gZ, at, np, m, yA, Iw, mT); #c1(TCF4) c2(XP_011524458) c3(transcription factor 4 isoform X6) c4(319049, 319050) c5(319051) c6( ) c7(bL, xN, T, iV, bkx, atS, NT, aA, bB, mS, fr, ci, nA, bX, aQK, pz, q, ad, eA, eW, x, iu, hd, aOu, Yc, hb, mW, aT, h, bK, K, mY, mV, ahE, Kq, he, KV, Qe, ae, mU, dF, Lu, d, B, s, aW, Y, Yd, Az, r, fe, gl, hN, aq, aF, ahI, g, cl, Z, t, QK, fs, mZ, bz, as, mX, ck, es, bE, iA, dB, bE, bmD, agI, cKE, gX, gZ, at, np, m, yA, Iw, mT); #c1(TCF4) c2(XP_011524459) c3(transcription factor 4 isoform X7) c4(319052) c5( ) c6( ) c7(bL, xN, T, iV, bkx, atS, NT, aA, bB, mS, fr, ci, nA, bX, aQK, pz, q, ad, eA, eW, x, iu, hd, aOu, Yc, hb, mW, aT, h, bK, K, mY, mV, ahE, Kq, he, KV, Qe, ae, mU, dF, Lu, d, B, s, aW, Y, Yd, Az, r, fe, gl, hN, ag, aF, ahI, g, cl, Z, t, QK, fs, mZ, bz, as, mX, ck, es, bE, iA, dB, bE, bmD, agI, cKE, gX, gZ, at, np, m, yA, Iw, mT); #c1(TCF4) c2(XP_011524460) c3(transcription factor 4 isoform X9) c4( ) c5(319053) c6( ) c7(bL, xN, T, iV, bkx, atS, NT, aA, bB, mS, fr, ci, nA, bX, aQK, pz, q, ad, eA, eW, x, iu, hd, aOu, Yc, hb, mW, aT, h, bK, K, mY, mV, ahE, Kq, he, KV, Qe, ae, mU, dF, Lu, d, B, s, aW, Y, Yd, Az, r, fe, gl, hN, aq, aF, ahI, g, cl, Z, t, QK, fs, mZ, bz, as, mX, ck, es, bF, iA, dB, bE, bmD, agI, cKE, gX, gZ, at, np, m, yA, Iw, mT); #c1(TCF7) c2(NP_001128323) c3(transcription factor 7 isoform 3) c4(49835) c5(49836, 49837, 49838, 49839, 49840, 49841) c6( ) c7(bL, bM, T, bqP, jh, aA, bB, aj, j, ci, q, J, JK, bKm, eu. A, s, r, aF, cM, bF, ac, bE, bo, mf, k, B); #c1(TCF7) c2(NP_003193) c3(transcription factor 7 isoform 1) c4(136154, 136155) c5(136156, 136157, 136158, 136159, 136160, 136161, 136162, 136163) c6( ) c7(bL, bM, T, bqP, jh, aA, bB, aj, j, ci, q, J, JK, bKm, eu, A, s, r, aF, cM, bF, ac, bE, bo, mf, k, B); #c1(TCF7) c2(NP_963965) c3(transcription factor 7 isoform 4) c4( ) c5(262591, 262592, 262593, 262594, 262595, 262596, 262597, 262598, 262599, 262600, 262601, 262602, 262603, 262604, 262605, 262606, 262607, 262608, 262609, 262610) c6( ) c7(bL, bM, T, bqP, jh, aA, bB, aj, j, ci, q, J, JK, bKm, eu, A, s, r, aF, cM, bF, ac, bE, bo, mf, k, B); #c1(TCF7) c2(NP_998813) c3(transcription factor 7 isoform 2) c4( ) c5(266020, 266021, 266022, 266023, 266024) c6( ) c7(bL, bM, T, bqP, jh, aA, bB, aj, j, ci, q, J, JK, bKm, eu, A, s, r, aF, cM, bF, ac, bE, bo, mf, k, B); #c1(TCF7) c2(XP_006714742) c3(transcription factor 7 isoform X2) c4(288056, 288057, 288058, 288059) c5(288060, 288061, 288062, 288063, 288064, 288065, 288066, 288067, 288068, 288069, 288070, 288071, 288072, 288073) c6( ) c7(bL, bM, T, bqP, jh, aA, bB, aj, j, ci, q, J, JK, bKm, eu, A, s, r, aF, cM, bF, ac, bE, bo, mf, k, B); #c1(TCF7) c2(XP_006714747) c3(transcription factor 7 isoform X8) c4(288074, 288075, 288076, 288077, 288078) c5(288079, 288080, 288081, 288082, 288083, 288084, 288085, 288086, 288087, 288088, 288089, 288090, 288091, 288092, 288093, 288094, 288095, 288096, 288097, 288098) c6( ) c7(bL, bM, T, bqP, jh, aA, bB, aj, j, ci, q, J, JK, bKm, eu, A, s, r, aF, cM, bF, ac, bE, bo, mf, k, B); #c1(TCF7L1) c2(NP_112573) c3(transcription factor 7-like 1) c4(221442) c5(221443, 221444, 221445, 221446, 221447, 221448) c6( ) c7(ck, x, eu, T, QG, nB, aW, aT, fZ, aA, pk, aF, bK, m, k, bX, cm); #c1(TCF7L1) c2(XP_006712172) c3(transcription factor 7-like 1 isoform X1) c4( ) c5(286493) c6( ) c7(ck, x, eu, T, QG, nB, aW, aT, fZ, aA, pk, aF, bK, m, k, bX, cm); #c1(TCF7L2) c2(NP_001139746) c3(transcription factor 7-like 2 isoform 1) c4(59822, 59823) c5(59824, 59825, 59826, 59827, 59828, 59829) c6( ) c7(T, bkx, ea, e, bB, ci, aQK, x, K, dQ, bhm, dF, Qe, aW, fc, hl, g, Eg, as, iA, cKE, vy, k, m, IS, iu, xN, dD, yG, NT, aj, fr, nA, ml, eW, RD, Yc, h, jy, he, KV, vx, A, Yd, fe, aq, fs, W, dB, Fi, agI, mg, hL, B, bL, jv, iH, aA, cz, v, j, bX, q, J, eA, aPW, ga, hb, aT, bK, ahE, ae, af, Lu, kl, s, Y, r, ahI, cl, t, ck, ac, gX, mf, np, dy, yv, aZ, LX, dG, eq, pz, ad, av, hd, py, NS, Kq, uX, d, IR, cW, zR, gl, aF, iV, iR, bz, dr, bF, es, bE, bmD, ei, X); #c1(TCF7L2) c2(NP_001139755) c3(transcription factor 7-like 2 isoform 3) c4(59881) c5(59882, 59883, 59884, 59885, 59886, 59887, 59888, 59889, 59890, 59891, 59892, 59893) c6( ) c7(T, bkx, ea, e, bB, ci, aQK, x, K, dQ, bhm, dF, Qe, aW, fc, hl, g, Eg, as, iA, cKE, vy, k, m, IS, iu, xN, dD, yG, NT, aj, fr, nA, ml, eW, RD, Yc, h, jy, he, KV, vx, A, Yd, fe, aq, fs, W, dB, Fi, agI, mg, hL, B, bL, jv, iH, aA, cz, v, j, bX, q, J, eA, aPW, ga, hb, aT, bK, ahE, ae, af, Lu, kl, s, Y, r, ahI, cl, t, ck, ac, gX, mf, np, dy, yv, aZ, LX, dG, eq, pz, ad, av, hd, py, NS, Kq, uX, d, IR, cW, zR, gl, aF, iV, iR, bz, dr, bF, es, bE, bmD, ei, X); #c1(TCF7L2) c2(NP_001139757) c3(transcription factor 7-like 2 isoform 5) c4(59894) c5(59895, 59896, 59897, 59898, 59899, 59900) c6( ) c7(T, bkx, ea, e, bB, ci, aQK, x, K, dQ, bhm, dF, Qe, aW, fc, hl, g, Eg, as, iA, cKE, vy, k, m, IS, iu, xN, dD, yG, NT, aj, fr, nA, ml, eW, RD, Yc, h, jy, he, KV, vx, A, Yd, fe, aq, fs, W, dB, Fi, agI, mg, hL, B, bL, jv, iH, aA, cz, v, j, bX, q, J, eA, aPW, ga, hb, aT, bK, ahE, ae, af, Lu, kl, s, Y, r, ahI, cl, t, ck, ac, gX, mf, np, dy, yv, aZ, LX, dG, eq, pz, ad, av, hd, py, NS, Kq, uX, d, IR, cW, zR, gl, aF, iV, iR, bz, dr, bF, es, bE, bmD, ei, X); #c1(TCF7L2) c2(NP_001185457) c3(transcription factor 7-like 2 isoform 10) c4( ) c5(75613, 75614, 75615, 75616, 75617, 75618) c6( ) c7(T, bkx, ea, e, bB, ci, aQK, x, K, dQ, bhm, dF, Qe, aW, fc, hl, g, Eg, as, iA, cKE, vy, k, m, IS, iu, xN, dD, yG, NT, aj, fr, nA, ml, eW, RD, Yc, h, jy, he, KV, vx, A, Yd, fe, aq, fs, W, dB, Fi, agI, mg, hL, B, bL, jv, iH, aA, cz, v, j, bX, q, J, eA, aPW, ga, hb, aT, bK, ahE, ae, af, Lu, kl, s, Y, r, ahI, cl, t, ck, ac, gX, mf, np, dy, yv, aZ, LX, dG, eq, pz, ad, av, hd, py, NS, Kq, uX, d, IR, cW, zR, gl, aF, iV, iR, bz, dr, bF, es, bE, bmD, ei, X); #c1(TCF7L2) c2(NP_001185459) c3(transcription factor 7-like 2 isoform 12) c4(75619) c5(75620, 75621, 75622, 75623, 75624, 75625) c6( ) c7(T, bkx, ea, e, bB, ci, aQK, x, K, dQ, bhm, dF, Qe, aW, fc, hl, g, Eg, as, iA, cKE, vy, k, m, IS, iu, xN, dD, yG, NT, aj, fr, nA, ml, eW, RD, Yc, h, jy, he, KV, vx, A, Yd, fe, aq, fs, W, dB, Fi, agI, mg, hL, B, bL, jv, iH, aA, cz, v, j, bX, q, J, eA, aPW, ga, hb, aT, bK, ahE, ae, af, Lu, kl, s, Y, r, ahI, cl, t, ck, ac, gX, mf, np, dy, yv, aZ, LX, dG, eq, pz, ad, av, hd, py, NS, Kq, uX, d, IR, cW, zR, gl, aF, iV, iR, bz, dr, bF, es, bE, bmD, ei, X); #c1(TCF7L2) c2(NP_110383) c3(transcription factor 7-like 2 isoform 2) c4(219841, 219842) c5(219843, 219844, 219845, 219846, 219847, 219848, 219849) c6( ) c7(T, bkx, ea, e, bB, ci, aQK, x, K, dQ, bhm, dF, Qe, aW, fc, hl, g, Eg, as, iA, cKE, vy, k, m, IS, iu, xN, dD, yG, NT, aj, fr, nA, ml, eW, RD, Yc, h, jy, he, KV, vx, A, Yd, fe, aq, fs, W, dB, Fi, agI, mg, hL, B, bL, jv, iH, aA, cz, v, j, bX, q, J, eA, aPW, ga, hb, aT, bK, ahE, ae, af, Lu, kl, s, Y, r, ahI, cl, t, ck, ac, gX, mf, np, dy, yv, aZ, LX, dG, eq, pz, ad, av, hd, py, NS, Kq, uX, d, IR, cW, zR, gl, aF, iV, iR, bz, dr, bF, es, bE, bmD, ei, X); #c1(TCF7L2) c2(XP_005270137) c3(transcription factor 7-like 2 isoform X9) c4(283144) c5( ) c6( ) c7(T, bkx, ea, e, bB, ci, aQK, x, K, dQ, bhm, dF, Qe, aW, fc, hl, g, Eg, as, iA, cKE, vy, k, m, IS, iu, xN, dD, yG, NT, aj, fr, nA, mL eW, RD, Yc, h, jy, he, KV, vx, A, Yd, fe, aq, fs, W, dB, Fi, agI, mg, hL, B, bL, jv, iH, aA, cz, v, j, bX, q, J, eA, aPW, ga, hb, aT, bK, ahE, ae, af, Lu, kl, s, Y, r, ahI, cl, t, ck, ac, gX, mf, np, dy, yv, aZ, LX, dG, eg, pz, ad, av, hd, py, NS, Kq, uX, d, IR, cW, zR, gl, aF, iV, iR, bz, dr, bF, es, bE, bmD, ei, X); #c1(TCF7L2) c2(XP_005270141) c3(transcription factor 7-like 2 isoform X13) c4(283145, 283146, 283147) c5(283148, 283149, 283150, 283151, 283152, 283153, 283154, 283155, 283156, 283157, 283158, 283159, 283160, 283161, 283162, 283163, 283164, 283165, 283166, 283167, 283168, 283169, 283170, 283171) c6( ) c7(T, bkx, ea, e, bB, ci, aQK, x, K, dQ, bhm, dF, Qe, aW, fc, hl, g, Eg, as, iA, cKE, vy, k, m, IS, iu, xN, dD, yG, NT, aj, fr, nA, ml, eW, RD, Yc, h, jy, he, KV, vx, A, Yd, fe, aq, fs, W, dB, Fi, agI, mg, hL, B, bL, jv, iH, aA, cz, v, j, bX, q, J, eA, aPW, ga, hb, aT, bK, ahE, ae, af, Lu, kl, s, Y, r, ahI, cl, t, ck, ac, gX, mf, np, dy, yv, aZ, LX, dG, eq, pz, ad, av, hd, py, NS, Kq, uX, d, IR, cW, zR, gl, aF, iV, iR, bz, dr, bF, es, bE, bmD, ei, X); #c1(TCF7L2) c2(XP_005270143) c3(transcription factor 7-like 2 isoform X15) c4(283172) c5(283173) c6( ) c7(T, bkx, ea, e, bB, ci, aQK, x, K, dQ, bhm, dF, Qe, aW, fc, hl, g, Eg, as, iA, cKE, vy, k, m, IS, iu, xN, dD, yG, NT, aj, fr, nA, ml, eW, RD, Yc, h, jy, he, KV, vx, A, Yd, fe, aq, fs, W, dB, Fi, agI, mg, hL, B, bL, jv, iH, aA, cz, v, j, bX, q, J, eA, aPW, ga, hb, aT, bK, ahE, ae, af, Lu, kl, s, Y, r, ahI, cl, t, ck, ac, gX, mf, np, dy, yv, aZ, LX, dG, eq, pz, ad, av, hd, py, NS, Kq, uX, d, IR, cW, zR, gl, aF, iV, iR, bz, dr, bF, es, bE, bmD, ei, X); #c1(TCF7L2) c2(XP_005270151) c3(transcription factor 7-like 2 isoform X24) c4(283174) c5(283175, 283176, 283177, 283178, 283179, 283180) c6( ) c7(T, bkx, ea, e, bB, ci, aQK, x, K, dQ, bhm, dF, Qe, aW, fc, hl, g, Eg, as, iA, cKE, vy, k, m, IS, iu, xN, dD, yG, NT, aj, fr, nA, mL eW, RD, Yc, h, jy, he, KV, vx, A, Yd, fe, aq, fs, W, dB, Fi, agI, mg, hL, B, bL, jv, iH, aA, cz, v, j, bX, q, J, eA, aPW, ga, hb, aT, bK, ahE, ae, af, Lu, kl, s, Y, r, ahI, cl, t, ck, ac, gX, mf, np, dy, yv, aZ, LX, dG, eg, pz, ad, av, hd, py, NS, Kq, uX, d, IR, cW, zR, gl, aF, iV, iR, bz, dr, bF, es, bE, bmD, ei, X); #c1(TCF7L2) c2(XP_005270153) c3(transcription factor 7-like 2 isoform X31) c4(283181) c5(283182, 283183, 283184, 283185, 283186, 283187) c6( ) c7(T, bkx, ea, e, bB, ci, aQK, x, K, dQ, bhm, dF, Qe, aW, fc, hl, g, Eg, as, iA, cKE, vy, k, m, IS, iu, xN, dD, yG, NT, aj, fr, nA, ml, eW, RD, Yc, h, jy, he, KV, vx, A, Yd, fe, aq, fs, W, dB, Fi, agI, mg, hL, B, bL, jv, iH, aA, cz, v, j, bX, q, J, eA, aPW, ga, hb, aT, bK, ahE, ae, af, Lu, kl, s, Y, r, ahI, cl, t, ck, ac, gX, mf, np, dy, yv, aZ, LX, dG, eg, pz, ad, av, hd, py, NS, Kq, uX, d, IR, cW, zR, gl, aF, iV, iR, bz, dr, bF, es, bE, bmD, ei, X); #c1(TCF7L2) c2(XP_005270159) c3(transcription factor 7-like 2 isoform X34) c4(283188) c5(283189, 283190, 283191, 283192, 283193, 283194) c6( ) c7(T, bkx, ea, e, bB, ci, aQK, x, K, dQ, bhm, dF, Qe, aW, fc, hl, g, Eg, as, iA, cKE, vy, k, m, IS, iu, xN, dD, yG, NT, aj, fr, nA, ml, eW, RD, Yc, h, jy, he, KV, vx, A, Yd, fe, aq, fs, W, dB, Fi, agI, mg, hL, B, bL, jv, iH, aA, cz, v, j, bX, q, J, eA, aPW, ga, hb, aT, bK, ahE, ae, af, Lu, kl, s, Y, r, ahI, cl, t, ck, ac, gX, mf, np, dy, yv, aZ, LX, dG, eg, pz, ad, av, hd, py, NS, Kq, uX, d, IR, cW, zR, gl, aF, iV, iR, bz, dr, bF, es, bE, bmD, ei, X); #c1(TCF7L2) c2(XP_006718019) c3(transcription factor 7-like 2 isoform X27) c4( ) c5(291460, 291461, 291462, 291463, 291464) c6( ) c7(T, bkx, ea, e, bB, ci, aQK, x, K, dQ, bhm, dF, Qe, aW, fc, hl, g, Eg, as, iA, cKE, vy, k, m, IS, iu, xN, dD, yG, NT, aj, fr, nA, ml, eW, RD, Yc, h, jy, he, KV, vx, A, Yd, fe, aq, fs, W, dB, Fi, agI, mg, hL, B, bL, jv, iH, aA, cz, v, j, bX, q, J, eA, aPW, ga, hb, aT, bK, ahE, ae, af, Lu, kl, s, Y, r, ahI, cl, t, ck, ac, gX, mf, np, dy, yv, aZ, LX, dG, eq, pz, ad, av, hd, py, NS, Kq, uX, d, IR, cW, zR, gl, aF, iV, iR, bz, dr, bF, es, bE, bmD, ei, X); #c1(TCF7L2) c2(XP_011538418) c3(transcription factor 7-like 2 isoform X25) c4(336099) c5(336100, 336101, 336102, 336103, 336104, 336105) c6( ) c7(T, bkx, ea, e, bB, ci, aQK, x, K, dQ, bhm, dF, Qe, aW, fc, hl, g, Eg, as, iA, cKE, vy, k, m, IS, iu, xN, dD, yG, NT, aj, fr, nA, ml, eW, RD, Yc, h, jy, he, KV, vx, A, Yd, fe, aq, fs, W, dB, Fi, agI, mg, hL, B, bL, jv, iH, aA, cz, v, j, bX, q, J, eA, aPW, ga, hb, aT, bK, ahE, ae, af, Lu, kl, s, Y, r, ahI, cl, t, ck, ac, gX, mf, np, dy, yv, aZ, LX, dG, eq, pz, ad, av, hd, py, NS, Kq, uX, d, IR, cW, zR, gl, aF, iV, iR, bz, dr, bF, es, bE, bmD, ei, X); #c1(TCFL5) c2(NP_006593) c3(transcription factor-like 5 protein isoform 1) c4(166505) c5(166506, 166507, 166508, 166509, 166510, 166511, 166512) c6( ) c7(x, d, ac, s, oz, iI, aw, np, ci, k, bX, ao); #c1(TCFL5) c2(XP_005260241) c3(transcription factor-like 5 protein isoform X1) c4(276479) c5(276480, 276481, 276482, 276483, 276484, 276485) c6( ) c7(x, d, ac, s, oz, iI, aw, np, ci, k, bX, ao); #c1(TCHH) c2(NP_009044) c3(trichohyalin) c4(170383) c5(170384, 170385, 170386, 170387, 170388, 170389, 170390, 170391) c6( ) c7(bdQ); #c1(TCHP) c2(XP_011537139) c3(trichoplein keratin filament-binding protein isoform X1) c4(334870, 334871, 334872) c5(334873, 334874, 334875, 334876, 334877, 334878, 334879, 334880, 334881, 334882, 334883, 334884, 334885, 334886, 334887, 334888, 334889, 334890, 334891, 334892, 334893, 334894, 334895, 334896, 334897, 334898) c6( ) c7(bL, T, hl, jW, pY, bui, if, jx, aA, bB, Fb, fr, ci, qN, q, cd, ad, er, eA, ip, oT, ft, eq, Rl, py, aMT, aT, K, jj, ae, pi, avQ, bF, bum, d, cH, aW, Y, Ls, eH, ff, r, aYp, aq, aF, yq, Ku, en, cl, t, eF, bz, cm, iR, nU, ck, kn, kT, sS, YE, es, eM, iA, dB, bE, bP, afd, iT, Ew, azg, m, zu, bt, kS, B, VB, cn); #c1(TCIRG1) c2(NP_006044) c3(V-type proton ATPase 116 kDa subunit a isoform 3 isoform b) c4(161433) c5( ) c6( ) c7(bL, XW, bsH, ID, zw, aiV, enh, zs, wR, ajW, C, hh, bA, BY); #c1(TCIRG1) c2(XP_011543028) c3(V-type proton ATPase 116 kDa subunit a isoform 3 isoform X1) c4(341735, 341736) c5(341737, 341738, 341739, 341740, 341741, 341742, 341743, 341744, 341745, 341746, 341747, 341748) c6( ) c7(bL, XW, bsH, ID, zw, aiV, enh, zs, wR, ajW, C, hh, bA, BY); #c1(TCIRG1) c2(XP_011543029) c3(V-type proton ATPase 116 kDa subunit a isoform 3 isoform X2) c4(341749, 341750) c5(341751, 341752, 341753, 341754, 341755, 341756, 341757, 341758, 341759, 341760, 341761, 341762) c6( ) c7(bL, XW, bsH, ID, zw, aiV, enh, zs, wR, ajW, C, hh, bA, BY); #c1(TCIRG1) c2(XP_011543031) c3(V-type proton ATPase 116 kDa subunit a isoform 3 isoform X4) c4( ) c5(341763, 341764, 341765, 341766, 341767, 341768, 341769, 341770) c6( ) c7(bL, XW, bsH, ID, zw, aiV, enh, zs, wR, ajW, C, hh, bA, BY); #c1(TCL1A) c2(NP_001092195) c3(T-cell leukemia/lymphoma protein IA) c4(39424) c5(39425, 39426, 39427, 39428, 39429, 39430, 39431, 39432, 39433, 39434, 39435, 39436, 39437, 39438, 39439, 39440, 39441, 39442) c6( ) c7(oO, T, fM, wu, jh, fd, alq, cd, x, cc, kH, aT, K, wm, cKE, pk, on, aoI, zQ, je, aW, oV, ho, bw, ck, iM, ac, beE, cj, k, bC, bt, B); #c1(TCL1B) c2(NP_004909) c3(T-cell leukemia/lymphoma protein IB) c4(150711) c5(150712, 150713, 150714, 150715, 150716, 150717, 150718, 150719, 150720, 150721) c6( ) c7(T, fM, w jh, fd, alq, kH, aT, K, wm, cKF, pk, on, aoI, je, aW, oV, ho, ck, iM, nB, beE, cj, bC, bt, B, L); #c1(TCN1) c2(NP_001053) c3(transcobalamin-1 precursor) c4(34416) c5(34417, 34418, 34419, 34420, 34421, 34422) c6( ) c7(T, dD, fM, iW, mN, j, eq, aQF, ad, h, ae, af, iU, pL, f, fq, hq, pH, GG, UP, wE, au); #c1(TCN2) c2(NP_000346) c3(transcobalamin-2 isoform 1 precursor) c4(7618) c5(7619, 7620, 7621, 7622, 7623, 7624) c6( ) c7(dD, eR, fR, sQ, fV, e, jh, aA, sM, mN, v, j, eq, cKH, q, ad, ip, md, Na, ib, M, dV, Nc, IQ, avl, af, eu, Uf, d, s, r, Ll, Lk, g, iV, f, bN, apM, ac, UP, dB, Ip, wE, bm, uo, ut, uJ, aS, cKG, ij, eg, bD, us); #c1(TCN2) c2(NP_001171655) c3(transcobalamin-2 isoform 2 precursor) c4(71161) c5(71162, 71163, 71164, 71165, 71166, 71167) c6( ) c7(dD, eR, fR, sQ, fV, e, jh, aA, sM, mN, v, j, eq, cKH, q, ad, ip, md, Na, ib, M, dV, Nc, IQ, avl, af, eu, Uf, d, s, r, Ll, Lk, g, iV, f, bN, apM, ac, UP, dB, Ip, wE, bm, uo, ut, uJ, aS, cKG, ij, eq, bD, us); #c1(TCOF1) c2(NP_000347) c3(treacle protein isoform b) c4(7625) c5(7626, 7627, 7628, 7629, 7630, 7631) c6( ) c7(agS, Na, aMU, Cq, yr, if, aMS, cC, Az, HN, Xg, fe, Km, K, nA, ahI, uF, qN, zW, ahE, Wt); #c1(TCOF1) c2(NP_001008657) c3(treacle protein isoform c) c4(23338) c5(23339, 23340, 23341, 23342, 23343, 23344) c6( ) c7(agS, Na, aMU, Cq, yr, if, aMS, cC, Az, HN, Xg, fe, Km, K, nA, ahI, uF, qN, zW, ahE, Wt); #c1(TCOF1) c2(NP_001128715) c3(treacle protein isoform d) c4(50615) c5(50616, 50617, 50618, 50619, 50620, 50621) c6( ) c7(agS, Na, aMU, Cq, yr, if, aMS, cC, Az, HN, Xg, fe, Km, K, nA, ahI, uF, qN, zW, ahE, Wt); #c1(TCOF1) c2(NP_001128716) c3(treacle protein isoform e) c4(50622) c5(50623, 50624, 50625, 50626, 50627, 50628) c6( ) c7(agS, Na, aMU, Cq, yr, if, aMS, cC, Az, HN, Xg, fe, Km, K, nA, ahI, uF, qN, zW, ahE, Wt); #c1(TCOF1) c2(NP_001128717) c3(treacle protein isoform f) c4(50629) c5(50630, 50631, 50632, 50633, 50634, 50635) c6( ) c7(agS, Na, aMU, Cq, yr, if, aMS, cC, Az, HN, Xg, fe, Km, K, nA, ahI, uF, qN, zW, ahE, Wt); #c1(TCOF1) c2(NP_001182070) c3(treacle protein isoform g) c4(74552) c5(74553, 74554, 74555, 74556, 74557, 74558) c6( ) c7(agS, Na, aMU, Cq, yr, if, aMS, cC, Az, HN, Xg, fe, Km, K, nA, ahI, uF, qN, zW, ahE, Wt); #c1(TCOF1) c2(XP_005268561) c3(treacle protein isoform X3) c4(281908) c5(281909, 281910, 281911, 281912, 281913, 281914) c6( ) c7(agS, Na, aMU, Cq, yr, if, aMS, cC, Az, HN, Xg, fe, Km, K, nA, ahI, uF, qN, zW, ahE, Wt); #c1(TCOF1) c2(XP_005268562) c3(treacle protein isoform X4) c4(281915) c5(281916, 281917, 281918, 281919, 281920, 281921) c6( ) c7(agS, Na, aMU, Cq, yr, if, aMS, cC, Az, HN, Xg, fe, Km, K, nA, ahI, uF, qN, zW, ahE, Wt); #c1(TCP1) c2(NP_001008897) c3(T-complex protein 1 subunit alpha isoform b) c4( ) c5(23483, 23484, 23485, 23486, 23487) c6( ) c7(qX, If, r, f, q, ad); #c1(TCP1) c2(NP_110379) c3(T-complex protein 1 subunit alpha isoform a) c4(219796, 219797, 219798) c5(219799, 219800, 219801, 219802, 219803, 219804, 219805, 219806, 219807, 219808, 219809, 219810, 219811) c6( ) c7(qX, If, r, f, q, ad); #c1(TCP10) c2(NP_004601) c3(T-complex protein 10A homolog) c4(148062) c5(148063, 148064, 148065, 148066, 148067) c6( ) c7(j); #c1(TCP10L2) c2(NP_001138593) c3(putative t-complex protein 10A homolog 2) c4(57126) c5(57127, 57128, 57129, 57130, 57131, 57132, 57133) c6( ) c7(cz, pN); #c1(TCP11L1) c2(NP_060863) c3(T-complex protein 11-like protein 1) c4(198146, 198147, 198148) c5(198149, 198150, 198151, 198152, 198153, 198154, 198155, 198156, 198157, 198158, 198159, 198160, 198161, 198162, 198163, 198164, 198165, 198166, 198167, 198168) c6( ) c7(h); #c1(TCP11L1) c2(XP_011518508) c3(T-complex protein 11-like protein 1 isoform X2) c4(312602) c5( ) c6( ) c7(h); #c1(TCP11L1) c2(XP_011518510) c3(T-complex protein 11-like protein 1 isoform X3) c4( ) c5(312603, 312604, 312605, 312606, 312607, 312608, 312609, 312610, 312611, 312612, 312613, 312614) c6( ) c7(h); #c1(TCTA) c2(NP_071503) c3(T-cell leukemia translocation-altered gene protein) c4(211784) c5(211785, 211786, 211787, 211788, 211789, 211790) c6( ) c7(dL, kH); #c1(TCTEI) c2(XP_011512640) c3(T-complex-associated testis-expressed protein 1 isoform X1) c4(303607) c5(303608, 303609, 303610, 303611, 303612, 303613) c6( ) c7(akB); #c1(TCTEI) c2(XP_011512642) c3(T-complex-associated testis-expressed protein 1 isoform X4) c4(303614) c5(303615, 303616, 303617, 303618, 303619, 303620, 303621, 303622, 303623, 303624) c6( ) c7(akB); #c1(TCTN1) c2(NP_001076006) c3(tectonic-1 isoform 2 precursor) c4(37310) c5(37311, 37312, 37313, 37314, 37315, 37316, 37317, 37318) c6(37319, 37320) c7(cKI); #c1(TCTN1) c2(NP_001076007) c3(tectonic-1 isoform 1 precursor) c4(37321) c5(37322, 37323, 37324, 37325, 37326, 37327, 37328, 37329) c6(37330, 37331) c7(cKI); #c1(TCTN1) c2(NP_001167446) c3(tectonic-1 isoform 4) c4(68895) c5(68896, 68897, 68898, 68899, 68900, 68901, 68902, 68903, 68904, 68905) c6(68906, 68907) c7(cKI); #c1(TCTN1) c2(NP_001167447) c3(tectonic-1 isoform 5 precursor) c4(68908) c5(68909, 68910, 68911, 68912, 68913, 68914, 68915, 68916, 68917) c6(68918, 68919) c7(cKI); #c1(TCTN1) c2(NP_078825) c3(tectonic-1 isoform 3 precursor) c4(215622) c5(215623, 215624, 215625, 215626, 215627, 215628, 215629, 215630) c6(215631, 215632) c7(cKI); #c1(TCTN1) c2(XP_005253993) c3(tectonic-1 isoform X12) c4(272857) c5(272858, 272859, 272860, 272861, 272862, 272863, 272864) c6(272865, 272866) c7(cKI); #c1(TCTN1) c2(XP_011537036) c3(tectonic-1 isoform X2) c4(334798) c5(334799, 334800, 334801, 334802, 334803, 334804, 334805, 334806, 334807, 334808, 334809, 334810) c6(334811, 334812) c7(cKI); #c1(TCTN1) c2(XP_011537039) c3(tectonic-1 isoform X6) c4(334813) c5(334814, 334815, 334816, 334817, 334818, 334819, 334820, 334821) c6(334822, 334823) c7(cKI); #c1(TCTN1) c2(XP_011537041) c3(tectonic-1 isoform X8) c4(334824) c5( ) c6( ) c7(cKI); #c1(TCTN2) c2(NP_001137322) c3(tectonic-2 isoform 2 precursor) c4(55469) c5(55470, 55471, 55472, 55473, 55474, 55475) c6( ) c7(vm, ago, cKJ); #c1(TCTN2) c2(NP_079085) c3(tectonic-2 isoform 1 precursor) c4(216930) c5(216931, 216932, 216933, 216934, 216935, 216936) c6( ) c7(vm, ago, cKJ); #c1(TCTN3) c2(NP_001137445) c3(tectonic-3 isoform b precursor) c4(55758) c5(55759, 55760, 55761, 55762, 55763, 55764) c6( ) c7(bet, cKK, j); #c1(TCTN3) c2(NP_056446) c3(tectonic-3 isoform a precursor) c4(187580, 187581, 187582) c5(187583, 187584, 187585, 187586, 187587) c6( ) c7(bet, cKK, j); #c1(TCTN3) c2(XP_005269747) c3(tectonic-3 isoform X2) c4(282739) c5(282740, 282741, 282742, 282743, 282744, 282745) c6( ) c7(bet, cKK, j); #c1(TCTN3) c2(XP_011537929) c3(tectonic-3 isoform X1) c4( ) c5(335424, 335425, 335426, 335427, 335428, 335429, 335430) c6( ) c7(bet, cKK, j); #c1(TCTN3) c2(XP_011537930) c3(tectonic-3 isoform X3) c4( ) c5(335431, 335432, 335433, 335434, 335435, 335436) c6( ) c7(bet, cKK, j); #c1(TDG) c2(NP_003202) c3(G/T mismatch-specific thymine DNA glycosylase) c4(136223) c5(136224, 136225, 136226, 136227, 136228, 136229, 136230) c6( ) c7(av, T, bE, CT, aA, r, bB, dL, aF, V, q, hX); #c1(TDG) c2(XP_011537017) c3(G/T mismatch-specific thymine DNA glycosylase isoform X2) c4(334773) c5(334774, 334775, 334776, 334777, 334778) c6( ) c7(av, T, bE, CT, aA, r, bB, dL, aF, V, q, hX); #c1(TDGF1) c2(NP_001167607) c3(teratocarcinoma-derived growth factor 1 isoform 2) c4( ) c5(69409, 69410, 69411, 69412, 69413) c6( ) c7(T, acI, aA, bB, n, Hn, j, ci, Ea, cKL, q, eA, dP, aE, hW, aT, bA, vT, aW, Y, ff, r, en, bu, t, op, Dy, eM, bE, eD, vA, m, bD, ZW, X); #c1(TDGF1) c2(NP_003203) c3(teratocarcinoma-derived growth factor 1 isoform 1 precursor) c4(136231, 136232) c5(136233, 136234, 136235, 136236, 136237, 136238, 136239, 136240, 136241) c6( ) c7(T, acI, aA, bB, n, Hn, j, ci, Ea, cKL, q, eA, dP, aE, hW, aT, bA, vT, aW, Y, ff, r, en, bu, t, op, Dy, eM, bE, eD, vA, m, bD, ZW, X); #c1(TDO2) c2(NP_005642) c3(tryptophan 2,3-dioxygenase) c4(158213) c5(158214, 158215, 158216, 158217, 158218, 158219) c6( ) c7(tJ, T, cKM, bO, To, ti, bS, aqu, et, gf, Gd, uu, qc, qi, rc, iX, agI, bma, aaw, bK, K, aqD, H, he, rz, bME, af, xf, aWm, yL, xs, zR, gl, Z, vo, uC, bN, hq, cA, dB, Ei, uJ, FI, ra, pK, xg, agZ, L); #c1(TDP1) c2(XP_006720263) c3(tyrosyl-DNA phosphodiesterase 1 isoform X3) c4( ) c5(293329, 293330, 293331, 293332, 293333, 293334) c6( ) c7(gV, T, bv, c, kB, hG, eM, KH, cKN, U, bk, K, bC, kC, bz, aR); #c1(TDP1) c2(XP_011535245) c3(tyrosyl-DNA phosphodiesterase 1 isoform X1) c4(332108, 332109, 332110, 332111, 332112, 332113, 332114) c5(332115, 332116, 332117, 332118, 332119, 332120, 332121, 332122, 332123, 332124, 332125) c6( ) c7(gV, T, bv, c, kB, hG, eM, KH, cKN, U, bk, K, bC, kC, bz, aR); #c1(TDP1) c2(XP_011535246) c3(tyrosyl-DNA phosphodiesterase 1 isoform X2) c4(332126) c5(332127, 332128, 332129, 332130, 332131, 332132, 332133, 332134, 332135, 332136, 332137, 332138, 332139, 332140, 332141, 332142, 332143, 332144, 332145, 332146, 332147, 332148, 332149, 332150, 332151, 332152, 332153, 332154, 332155, 332156, 332157, 332158, 332159, 332160, 332161) c6( ) c7(gV, T, bv, c, kB, HG, eM, KH, cKN, U, bk, K, bC, kC, bz, aR); #c1(TDP2) c2(NP_057698) c3(tyrosyl-DNA phosphodiesterase 2) c4(192398, 192399, 192400, 192401) c5(192402, 192403, 192404, 192405, 192406, 192407, 192408, 192409, 192410, 192411, 192412, 192413, 192414, 192415, 192416, 192417, 192418, 192419, 192420, 192421, 192422, 192423, 192424, 192425) c6( ) c7(T, cF, eM, yW, afv, np, yA, bz); #c1(TDRD1) c2(NP_942090) c3(tudor domain-containing protein 1) c4(260459) c5(260460, 260461, 260462, 260463, 260464, 260465) c6( ) c7(n, ae, gU, ad); #c1(TDRD1) c2(XP_005270036) c3(tudor domain-containing protein 1 isoform X4) c4(283049, 283050) c5(283051, 283052, 283053, 283054, 283055, 283056, 283057, 283058, 283059, 283060, 283061, 283062) c6( ) c7(n, ae, gU, ad); #c1(TDRD1) c2(XP_011538266) c3(tudor domain-containing protein 1 isoform X3) c4(335895) c5(335896. 335897, 335898, 335899, 335900, 335901) c6( ) c7(n, ae, gU, ad); #c1(TDRD1) c2(XP_011538267) c3(tudor domain-containing protein 1 isoform X5) c4(335902) c5(335903, 335904, 335905, 335906, 335907, 335908) c6( ) c7(n, ae, gU, ad); #c1(TDRD3) c2(NP_001139542) c3(tudor domain-containing protein 3 isoform 1) c4(59478, 59479) c5(59480, 59481, 59482, 59483, 59484, 59485, 59486, 59487, 59488, 59489) c6( ) c7(gv, K, Ku); #c1(TDRD3) c2(NP_110421) c3(tudor domain-containing protein 3 isoform 2) c4( ) c5(220245, 220246, 220247, 220248, 220249, 220250, 220251, 220252, 220253, 220254, 220255) c6( ) c7(gv, K, Ku); #c1(TDRD3) c2(XP_011533551) c3(tudor domain-containing protein 3 isoform X5) c4(329669) c5(329670, 329671, 329672, 329673, 329674) c6( ) c7(gv, K, Ku); #c1(TDRD5) c2(NP_001186020) c3(tudor domain-containing protein 5 isoform 2) c4(76876) c5(76877, 76878, 76879, 76880, 76881, 76882, 76883, 76884, 76885, 76886) c6( ) c7(cz); #c1(TDRD5) c2(XP_005244992) c3(tudor domain-containing protein 5 isoform X1) c4(266192, 266193) c5(266194, 266195, 266196, 266197, 266198, 266199, 266200, 266201, 266202, 266203, 266204, 266205) c6( ) c7(cz); #c1(TDRD6) c2(NP_001010870) c3(tudor domain-containing protein 6 isoform 1) c4(23863, 23864, 23865) c5(23866, 23867, 23868, 23869, 23870, 23871, 23872, 23873, 23874, 23875, 23876, 23877, 23878, 23879, 23880, 23881, 23882, 23883) c6( ) c7(bB, bE); #c1(TDRD6) c2(NP_001161831) c3(tudor domain-containing protein 6 isoform 2) c4(66114) c5(66115, 66116, 66117, 66118, 66119, 66120) c6( ) c7(bB, bE); #c1(TDRD7) c2(NP_001289813) c3(tudor domain-containing protein 7 isoform 2) c4( ) c5(114667, 114668, 114669, 114670, 114671, 114672) c6( ) c7(gU, aA, zh, fr, ze, zo, ad, ft, ib, aE, ds, dV, zg, cKO, ae, d, zb, ff, aF, en, dw, ve, t, bz, zr, zl, eg, zk); #c1(TDRD7) c2(NP_055105) c3(tudor domain-containing protein 7 isoform 1) c4(178977, 178978, 178979) c5(178980, 178981, 178982, 178983, 178984, 178985, 178986) c6( ) c7(gU, aA, zh, fr, ze, zo, ad, ft, ib, aE, ds, dV, zg, cKO, ae, d, zb, ff, aF, en, dw, ve, t, bz, zr, zl, eg, zk); #c1(TDRD7) c2(XP_011516726) c3(tudor domain-containing protein 7 isoform X2) c4( ) c5(310195, 310196, 310197, 310198, 310199) c6( ) c7(gU, aA, zh, fr, ze, zo, ad, ft, ib, aE, ds, dV, zg, cKO, ae, d, zb, ff, aF, en, dw, ve, t, bz, zr, zl, eg, zk); #c1(TDRD9) c2(NP_694591) c3(putative ATP-dependent RNA helicase TDRD9) c4(245344, 245345, 245346) c5(245347, 245348, 245349, 245350, 245351, 245352) c6( ) c7(bL, A, cz, j, bK, y); #c1(TDRD9) c2(XP_005267366) c3(putative ATP-dependent RNA helicase TDRD9 isoform X6) c4( ) c5(280912, 280913, 280914, 280915, 280916, 280917) c6( ) c7(bL, A, cz, j, bK, y); #c1(TDRD9) c2(XP_011534703) c3(putative ATP-dependent RNA helicase TDRD9 isoform X9) c4( ) c5(331193, 331194, 331195, 331196, 331197, 331198) c6( ) c7(bL, A, cz, j, bK, y); #c1(TDRKH) c2(NP_001077433) c3(tudor and KH domain-containing protein isoform b) c4(37868) c5(37869, 37870, 37871, 37872, 37873, 37874) c6( ) c7(iU); #c1(TDRKH) c2(XP_005244913) c3(tudor and KH domain-containing protein isoform X2) c4( ) c5(266161, 266162, 266163, 266164, 266165) c6( ) c7(iU); #c1(TDRKH) c2(XP_011507405) c3(tudor and KH domain-containing protein isoform X1) c4(297286, 297287, 297288, 297289) c5(297290, 297291, 297292, 297293, 297294, 297295, 297296, 297297, 297298, 297299, 297300, 297301, 297302, 297303, 297304, 297305, 297306, 297307, 297308, 297309, 297310, 297311, 297312, 297313, 297314, 297315, 297316, 297317, 297318, 297319, 297320) c6( ) c7(iU); #c1(TDRP) c2(NP_001243042) c3(testis development-related protein isoform 2) c4(89656) c5(89657, 89658, 89659, 89660, 89661, 89662, 89663, 89664, 89665, 89666) c6( ) c7(cm, ac); #c1(TDRP) c2(XP_006716295) c3(testis development-related protein isoform X1) c4(290219) c5(290220, 290221, 290222, 290223, 290224, 290225) c6( ) c7(cm, ac); #c1(TDRP) c2(XP_011533027) c3(testis development-related protein isoform X10) c4( ) c5(329239) c6( ) c7(cm, ac); #c1(TEAD1) c2(NP_068780) c3(transcriptional enhancer factor TEF-1) c4(210502, 210503, 210504, 210505) c5(210506, 210507, 210508, 210509, 210510, 210511, 210512, 210513, 210514, 210515, 210516, 210517, 210518, 210519, 210520, 210521, 210522, 210523, 210524, 210525, 210526, 210527, 210528, 210529, 210530, 210531, 210532, 210533, 210534, 210535, 210536, 210537, 210538, 210539, 210540) c6( ) c7(T, wu, aw, fd, qN, eA, ad, aE, cfd, aT, h, aYf, aUm, K, wm, nJ, cKP, d, Qr, vT, aW, Em, Y, Lf, Lh, bu, t, bz, qa, ck, VJ, ac, c, eM, U, m, B); #c1(TEAD2) c2(NP_001243587) c3(transcriptional enhancer factor TEF-4 isoform 1) c4(91107) c5(91108, 91109, 91110, 91111, 91112, 91113, 91114, 91115, 91116, 91117) c6( ) c7(kl); #c1(TEAD2) c2(NP_001243590) c3(transcriptional enhancer factor TEF-4 isoform 2) c4(91118) c5(91119, 91120, 91121, 91122, 91123, 91124, 91125, 91126, 91127, 91128) c6( ) c7(kl); #c1(TEAD2) c2(NP_001243591) c3(transcriptional enhancer factor TEF-4 isoform 4) c4( ) c5(91129, 91130, 91131, 91132, 91133) c6( ) c7(kl); #c1(TEAD2) c2(NP_003589) c3(transcriptional enhancer factor TEF-4 isoform 3) c4(139393) c5(139394, 139395, 139396, 139397, 139398, 139399, 139400) c6( ) c7(kl); #c1(TEAD2) c2(XP_011525704) c3(transcriptional enhancer factor TEF-4 isoform X3) c4(320121) c5(320122) c6( ) c7(kl); #c1(TEAD3) c2(NP_003205) c3(transcriptional enhancer factor TEF-5) c4(136266, 136267, 136268) c5(136269, 136270, 136271, 136272, 136273, 136274, 136275, 136276, 136277, 136278, 136279, 136280, 136281) c6( ) c7(ac); #c1(TEAD4) c2(NP_003204) c3(transcriptional enhancer factor TEF-3 isoform 1) c4(136242, 136243, 136244, 136245, 136246) c5(136247, 136248, 136249, 136250, 136251, 136252, 136253, 136254, 136255, 136256, 136257, 136258, 136259, 136260, 136261, 136262, 136263, 136264, 136265) c6( ) c7(f, vt, aF, aA); #c1(TEAD4) c2(NP_958849) c3(transcriptional enhancer factor TEF-3 isoform 2) c4(262280) c5(262281, 262282, 262283, 262284, 262285, 262286, 262287, 262288, 262289, 262290, 262291, 262292) c6( ) c7(f, vt, aF, aA); #c1(TEAD4) c2(NP_958851) c3(transcriptional enhancer factor TEF-3 isoform 3) c4( ) c5(262293, 262294, 262295, 262296, 262297) c6( ) c7(f, vt, aF, aA); #c1(TEC) c2(XP_011512038) c3(tyrosine-protein kinase Tec isoform X1) c4(302693) c5(302694, 302695, 302696, 302697, 302698, 302699) c6( ) c7(hM, kh, aNA, cF, aW, aT, Vv, h, fe, bw, fr, ci, cm, pd, B, hr); #c1(TECPR2) c2(NP_001166102) c3(tectonin beta-propeller repeat-containing protein 2 isoform 2) c4(68151, 68152) c5(68153, 68154, 68155, 68156, 68157, 68158) c6( ) c7(cKQ, aV, U); #c1(TECPR2) c2(NP_055659) c3(tectonin beta-propeller repeat-containing protein 2 isoform 1) c4(182567) c5(182568, 182569, 182570, 182571, 182572, 182573, 182574, 182575, 182576, 182577, 182578, 182579) c6( ) c7(cKQ, aV, Q); #c1(TECR) c2(NP_612510) c3(very-long-chain enoyl-CoA reductase) c4(236676) c5(236677, 236678, 236679, 236680, 236681, 236682) c6( ) c7(sb, T, gZ, nA, be, cKR); #c1(TECR) c2(XP_006723010) c3(very-long-chain enoyl-CoA reductase isoform X3) c4(294980) c5(294981, 294982, 294983, 294984, 294985, 294986) c6( ) c7(sb, T, gZ, nA, be, cKR); #c1(TECRL) c2(NP_001010874) c3(trans-2,3-enoyl-CoA reductase-like) c4(23891) c5(23892, 23893, 23894, 23895, 23896, 23897) c6( ) c7(If); #c1(TECTA) c2(NP_005413) c3(alpha-tectorin precursor) c4(155849) c5(155850, 155851, 155852, 155853, 155854, 155855, 155856, 155857, 155858, 155859) c6( ) c7(cKT, Bh, mG, cKS, cKU); #c1(TEF) c2(NP_001138870) c3(thyrotroph embryonic factor isoform 2) c4(57971, 57972) c5(57973, 57974, 57975, 57976, 57977, 57978, 57979, 57980, 57981, 57982, 57983, 57984, 57985, 57986, 57987, 57988) c6( ) c7(ckM, bkh, bO); #c1(TEF) c2(NP_003207) c3(thyrotroph embryonic factor isoform 1) c4(136282) c5(136283, 136284, 136285, 136286, 136287, 136288, 136289) c6( ) c7(ckM, bkh, bO); #c1(TEFM) c2(NP_078959) c3(transcription elongation factor, mitochondrial) c4(216267, 216268) c5(216269, 216270, 216271, 216272, 216273, 216274, 216275, 216276, 216277, 216278, 216279, 216280, 216281, 216282, 216283, 216284) c6( ) c7(nX, xb, Az, xt); #c1(TEK) c2(NP_000450) c3(angiopoietin-1 receptor isoform 1 precursor) c4(9133) c5(9134, 9135, 9136, 9137, 9138, 9139, 9140, 9141, 9142, 9143) c6( ) c7(ID, T, aC, ea, ci, Vp, Iv, Be, pX, K, eL, Iy, eG, aW, Ls, as, bw, uC, cKW, eM, iA, bDr, nB, iT, mx, m, ym, sw, aw, n, aj, oY, fr, Cd, jw, ai, eW, kl, h, dL, cY, cKX, fe, op, Ix, dB, Vy, E, ER, bD, B, bL, fM, dA, jp, aA, fF, j, C, bDq, iI, Cb, q, eA, eJ, Yn, aT, cy, dz, dl, eu, iu, Y, r, t, cKV, ck, nM, ac, wO, dh, bt, df, ad, wD, Jm, dP, hd, iY, ji, fb, pq, IR, et, cr, aF, Fq, qe, bE, uR, II, IC, y); #c1(TEK) c2(NP_001277006) c3(angiopoietin-1 receptor isoform 2 precursor) c4(108968) c5(108969, 108970, 108971, 108972, 108973, 108974) c6( ) c7(ID, T, aC, ea, ci, Vp, Iv, Be, PX, K, eL, Iy, eG, aW, Ls, as, bw, uC, cKW, eM, iA, bDr, nB, iT, mx, m, ym, sw, aw, n, aj, oY, fr, Cd, jw, ai, eW, kl, h, dL, cY, cKX, fe, op, Ix, dB, Vy, E, ER, bD, B, bL, fM, dA, jp, aA, fF, j, C, bDq, iI, Cb, q, eA, eJ, Yn, aT, cy, dz, dl, eu, iU, Y, r, t, cKV, ck, nM, ac, wO, dh, bt, df, ad, wD, Jm, dP, hd, iY, ji, fb, pq, IR, et, cr, aF, Fq, qe, bE, uR, II, IC, y); #c1(TEK) c2(NP_001277007) c3(angiopoietin-1 receptor isoform 3 precursor) c4(108975) c5( ) c6( ) c7(ID, T, aC, ea, ci, Vp, Iv, Be, pX, K, eL, Iy, eG, aW, Ls, as, bw, uC, cKW, eM, iA, bDr, nB, iT, mx, m, ym, sw, aw, n, aj, oY, fr, Cd, jw, ai, eW, kl, h, dL, cY, cKX, fe, op, Ix, dB, Vy, E, ER, bD, B, bL, fM, dA, jp, aA, fF, j, C, bDq, iI, Cb, q, eA, eJ, Yn, aT, cy, dz, dl, eu, iU, Y, r, t, cKV, ck, nM, ac, wO, dh, bt, df, ad, wD, Jm, dP, hd, iY, ji, fb, pq, IR, et, cr, aF, Fq, qe, bE, uR, II, IC, y); #c1(TEK) c2(XP_005251620) c3(angiopoietin-1 receptor isoform X2) c4(271016) c5(271017, 271018, 271019, 271020, 271021, 271022, 271023, 271024, 271025, 271026, 271027, 271028) c6( ) c7(ID, T, aC, ea, ci, Vp, Iv, Be, pX, K, eL, Iy, eG, aW, Ls, as, bw, uC, cKW, eM, iA, bDr, nB, iT, mx, m, ym, sw, aw, n, aj, oY, fr, Cd, jw, ai, eW, kl, h, dL, cY, cKX, fe, op, Ix, dB, Vy, E, ER, bD, B, bL, fM, dA, jp, aA, fF, j, C, bDq, iI, Cb, q, eA, eJ, Yn, aT, cy, dz, dl, eu, iU, Y, r, t, cKV, ck, nM, ac, wO, dh, bt, df, ad, wD, Jm, dP, hd, iY, ji, fb, pq, IR, et, cr, aF, Fq, qe, bE, uR, II, IC, y); #c1(TEKT1) c2(NP_444515) c3(tektin-1) c4(230368, 230369) c5(230370, 230371, 230372, 230373, 230374, 230375, 230376, 230377, 230378, 230379, 230380, 230381) c6( ) c7(hD); #c1(TEKT5) c2(NP_653275) c3(tektin-5) c4(239471) c5(239472, 239473, 239474, 239475, 239476, 239477) c6( ) c7(bB, bE, T, bu); #c1(TELO2) c2(NP_057195) c3(telomere length regulation protein TEL2 homolog) c4(189428, 189429) c5(189430, 189431, 189432, 189433, 189434, 189435, 189436, 189437, 189438, 189439, 189440, 189441) c6( ) c7(ck, T, os, jh, aA, fd, dz, oZ, aF, nA, y, it); #c1(TENM1) c2(NP_055068) c3(teneurin-1 isoform 3) c4(178729) c5(178730, 178731, 178732, 178733, 178734, 178735, 178736, 178737) c6(178738, 178739) c7(T, kj, bE, r, bB, IQ, q); #c1(TENM1) c2(XP_011529536) c3(teneurin-1 isoform X1) c4(325054) c5(325055, 325056, 325057, 325058, 325059, 325060, 325061, 325062, 325063) c6(325064, 325065) c7(T, kj, bE, r, bB, IQ, q); #c1(TENM2) c2(NP_001116151) c3(teneurin-2) c4(43671, 43672, 43673) c5(43674, 43675, 43676, 43677, 43678, 43679, 43680, 43681, 43682, 43683, 43684, 43685, 43686, 43687, 43688, 43689, 43690, 43691) c6( ) c7(IB, cm, T, cd); #c1(TENM2) c2(XP_011532906) c3(teneurin-2 isoform X3) c4(329073, 329074, 329075) c5( ) c6( ) c7(IB, cm, T, cd); #c1(TENM3) c2(NP_001073946) c3(teneurin-3) c4(36649, 36650) c5(36651, 36652, 36653, 36654, 36655, 36656, 36657, 36658, 36659, 36660, 36661, 36662, 36663, 36664, 36665, 36666) c6( ) c7(cKY, T, kj, aW, aw, aT, r, n, cu, q); #c1(TENM4) c2(NP_001092286) c3(teneurin-4) c4(39536) c5(39537, 39538, 39539, 39540, 39541) c6( ) c7(bL, bM, ac, af, e, oe, EQ, aT, cz, aj, dy, bK, fq, cd); #c1(TENM4) c2(XP_011543227) c3(teneurin-4 isoform X1) c4(342024) c5(342025) c6( ) c7(bL, bM, ac, af, e, oe, EQ, aT, cz, aj, dy, bK, fq, cd); #c1(TENM4) c2(XP_011543231) c3(teneurin-4 isoform X4) c4( ) c5(342026) c6( ) c7(bL, bM, ac, af, e, oe, EQ, aT, cz, aj, dy, bK, fq, cd); #c1(TEP1) c2(XP_005268084) c3(telomerase protein component 1 isoform X1) c4(281486, 281487, 281488, 281489) c5(281490, 281491, 281492, 281493, 281494, 281495, 281496, 281497, 281498, 281499, 281500, 281501) c6( ) c7(bL, Mb, T, e, fr, ci, eA, YD, ad, av, M, aT, dV, bj, dL, d, CN, aW, ff, hl, en, t, bz, ac, iA, nB, at, m, B); #c1(TEP1) c2(XP_011535412) c3(telomerase protein component 1 isoform X2) c4( ) c5(332436, 332437, 332438, 332439, 332440, 332441) c6( ) c7(bL, Mb, T, e, fr, ci, eA, YD, ad, av, M, aT, dV, bj, dL, d, CN, aW, ff, hl, en, t, bz, ac, iA, nB, at, m, B); #c1(TEP1) c2(XP_011535413) c3(telomerase protein component 1 isoform X3) c4( ) c5(332442, 332443, 332444, 332445, 332446, 332447) c6( ) c7(bL, Mb, T, e, fr, ci, eA, YD, ad, av, M, aT, dV, bj, dL, d, CN, aW, ff, hl, en, t, bz, ac, iA, nB, at, m, B); #c1(TEPP) c2(NP_950247) c3(testis, prostate and placenta-expressed protein isoform 1 precursor) c4(260920) c5(260921, 260922, 260923, 260924, 260925, 260926, 260927, 260928) c6(260929, 260930) c7(fe); #c1(TEPP) c2(NP_955535) c3(testis, prostate and placenta-expressed protein isoform 2 precursor) c4(261899) c5(261900, 261901, 261902, 261903, 261904, 261905, 261906, 261907) c6(261908, 261909) c7(fe); #c1(TERF1) c2(NP_003209) c3(telomeric repeat-binding factor 1 isoform 2) c4(136373) c5(136374, 136375, 136376, 136377, 136378, 136379, 136380) c6( ) c7(bL, T, yk, e, WL, aA, cz, fd, cQ, bRy, ci, hF, eA, dP, av, x, auf, kH, aT, aYf, dL, K, hu, ae, pi, uQ, sb, je, iU, aW, Y, xs, uY, Io, aq, aF, La, as, cl, Hu, bw, bz, ck, iM, ac, eM, dB, hL, cj, at, dW, oX, k, bC, bt, kS, B, Vi); #c1(TERF1) c2(NP_059523) c3(telomeric repeat-binding factor 1 isoform 1) c4(193378) c5(193379, 193380, 193381, 193382, 193383, 193384) c6( ) c7(bL, T, yk, e, WL, aA, cz, fd, cQ, bRy, ci, hF, eA, dP, av, x, auf, kH, aT, aYf, dL, K, hu, ae, pi, uQ, sb, je, iU, aW, Y, xs, uY, Io, aq, aF, La, as, cl, Hu, bw, bz, ck, iM, ac, eM, dB, hL, cj, at, dW, oX, k, bC, bt, kS, B, vi); #c1(TERF1) c2(XP_011515884) c3(telomeric repeat-binding factor 1 isoform X3) c4(308898) c5(308899, 308900, 308901, 308902, 308903) c6( ) c7(bL, T, yk, e, WL, aA, cz, fd, cQ, bRy, ci, hF, eA, dP, av, x, auf, kH, aT, aYf, dL, K, hu, ae, pi, uQ, sb, je, iI, aW, Y, xs, uY, Io, aq, aF, La, as, cl, Hu, bw, bz, ck, iM, ac, eM, dB, hL, cj, at, dW, oX, k, bC, bt, kS, B, vi); #c1(TERF2) c2(NP_005643) c3(telomeric repeat-binding factor 2) c4(158220) c5(158221, 158222, 158223, 158224, 158225, 158226) c6( ) c7(bL, T, os, yk, e, jh, aA, bB, tc, oZ, fd, ci, hF, cd, q, ad, auf, MR, kH, aT, h, aYf, dL, K, ae, eL, pi, je, aW, Y, ff, r, fe, aF, en, cl, pL, cm, iV, bz, ck, iM, ac, eM, bE, hk, hL, at, dW, WL, kS, B); #c1(TERF2IP) c2(NP_061848) c3(telomeric repeat-binding factor 2-interacting protein 1) c4(200764) c5(200765, 200766, 200767, 200768, 200769, 200770) c6( ) c7(bL, sc, T, byb, e, aA, wV, bS, v, et, ci, ad, aE, dV, aT, bK, K, ae, d, aW, Y, ff, fe, aF, en, pm, Z, t, cm, bz, iK, arJ, nM, W, nb, nB, ac, bE, pc, eM, cj, mf, m, y, bt, B); #c1(TERT) c2(NP_001180305) c3(telomerase reverse transcriptase isoform 2) c4(73790, 73791) c5(73792, 73793, 73794, 73795, 73796, 73797, 73798, 73799, 73800, 73801, 73802, 73803, 73804, 73805, 73806, 73807) c6( ) c7(bM, T, aC, fR, pf, ea, if, e, al, fd, cLa, bB, ci, aon, ip, x, Vp, afr, bv, aE, bW, pX, ja, iv, K, hu, aJu, eL, Qe, a a, DA, aAu, aW, az, hl, mQ, cKZ, g, as, pL, eF, cm, QA, bw, iP, yd, qJ, eM, nB, aWZ, wE, bTq, cLc, cj, dW, k, m, gn, bsS, pw, QS, sc, dD, ht, NT, n, fr, qN, ee, eW, hr, Bl, ft, jz, amJ, zf, cU, IG, aux, hn, dL, h, pi, pi, CN, fe, ag, kp, Hu, cM, Ld, Zj, Wt, op, YE, bP, dB, rW, hk, mg, hL, at, aiS, YH, WL, it, B, fM, dA, AS, fG, aYJ, yk, jx, aA, sM, hy, j, Qo, Iu, q, er, eA, eJ, aHu, auf, Ig, nv, nX, afQ, Vr, aT, jj, ae, sb, jf, s, Qr, nO, oV, Y, Lf, iU, r, en, hf, hu, t, Px, cl, iK, ck, sS, nM, Dy, ac, iM, QG, Cz, nG, np, dy, oX, bt, vi, Gl, kh, id, aD, iW, jh, oH, bRy, eq, ad, afb, hX, dP, av, hd, Db, IG, oW, cLb, fb, cjU, d, je, Gv, ff, xs, eH, Ej, aF, iV, bz, LB, es, gk, bE, bE, Lj, cLd, ajw, Lb, bC, hE, kS, iu, y, cjV); #c1(TERT) c2(NP_937983) c3(telomerase reverse transcriptase isoform 1) c4(259450) c5(259451, 259452, 259453, 259454, 259455, 259456) c6( ) c7(bM, T, aC, fR, pf, ea, if, e, al, fd, cLa, bB, ci, aon, ip, x, Vp, afr, bv, aE, bW, PX, ja, iv, K, hu, aJu, eL, Qe, aa, DA, aAu, aW, az, hl, mQ, cKZ, g, as, pL, eF, cm, QA, bw, iP, yd, qJ, eM, nB, aWZ, wE, bTq, cLc, cj, dW, k, m, gn, bsS, pw, QS, sc, dD, ht, NT, n, fr, qN, ee, eW, hr, Bl, ft, jz, amJ, zf, cU, IG, aux, hn, dL, h, pi, pl, CN, fe, aq, kp, Hu, cM, Ld, Zj, Wt, op, YE, bP, dB, rW, hk, mg, hL, at, aiS, YH, WL, it, B, fM, dA, AS, fG, aYJ, yk, jx, aA, sM, hy, j, Qo, Iu, q, er, eA, eJ, aHu, auf, Ig, nv, nX, afQ, Vr, aT, jj, ae, sb, jf, s, Qr, nO, oV, Y, Lf, iU, r, en, hf, hu, t, Px, cl, iK, ck, sS, nM, Dy, ac, iM, QG, Cz, nG, np, dy, oX, bt, vi, GL kh, id, aD, iW, jh, oH, bRy, eq, ad, afb, hX, dP, av, hd, Db, IG, oW, cLb, fb, cjU, d, je, Gv, ff, xs, eH, Ej, aF, iV, bz, LB, es, gk, bE, bE, Lj, cLd, ajw, Lb, bC, hE, kS, iu, y, cjV); #c1(TES) c2(NP_056456) c3(testin isoform 1) c4(187616, 187617, 187618) c5(187619, 187620, 18762L187622, 187623, 187624, 187625, 187626, 187627, 187628, 187629, 187630) c6( ) c7(ck, ix, T, dD, d, hw, x, aW, ea, jh, aT, aA, aF, j, eq, er, ae, ad); #c1(TES) c2(NP_690042) c3(testin isoform 2) c4( ) c5(244801, 244802, 244803, 244804, 244805, 244806) c6( ) c7(ck, ix, T, dD, d, hw, x, aW, ea, jh, aT, aA, aF, j, eq, er, ae, ad); #c1(TES) c2(XP_005250315) c3(testin isoform X1) c4(270253) c5(270254, 270255, 270256, 270257, 270258, 270259) c6( ) c7(ck, ix, T, dD, d, hw, x, aW, ea, jh, aT, aA, aF, j, eq, er, ae, ad); #c1(TESC) c2(NP_001161797) c3(calcineurin B homologous protein 3 isoform 2) c4(66029) c5(66030, 66031, 66032, 66033, 66034, 66035) c6( ) c7(T, dD, hl, ea, cz, yO, ci, eq, hE, Mo, ft, aT, afV, dL, K, aDZ, Xh, eL, jf, d, aW, Y, ff, Xj, en, bz, qa, dr, ck, es, eM, iA, dB, dy, bt, ik, iu); #c1(TESC) c2(NP_060369) c3(calcineurin B homologous protein 3 isoform 1) c4(195640, 195641) c5(195642, 195643, 195644, 195645, 195646, 195647, 195648, 195649, 195650, 195651, 195652, 195653) c6( ) c7(T, dD, hl, ea, cz, yO, ci, eq, hF, Me, ft, aT, afV, dL, K, aDZ, Xh, eL, jf, d, aW, Y, ff, Xj, en, bz, qa, dr, ck, es, eM, iA, dB, dy, bt, ik, iu); #c1(TESPA1) c2(NP_001129502) c3(protein TESPA1 isoform 1) c4(51717, 51718, 51719, 51720) c5(51721, 51722, 51723, 51724, 51725, 51726, 51727, 51728, 51729, 51730, 51731, 51732, 51733, 51734, 51735, 51736, 51737, 51738, 51739, 51740, 51741, 51742, 51743, 51744) c6( ) c7(ac); #c1(TESPA1) c2(NP_055611) c3(protein TESPA1 isoform 2) c4( ) c5(182270, 182271, 182272, 182273, 182274) c6( ) c7(ac); #c1(TET1) c2(NP_085128) c3(methylcytosine dioxygenase TET1) c4(219338) c5(219339, 219340, 219341, 219342, 219343, 219344) c6( ) c7(ck, T, af, aW, vA, r, aT, gl, dz, azm, y, bt, B, op); #c1(TET1) c2(XP_011538506) c3(methylcytosine dioxygenase TET1 isoform X1) c4( ) c5(336255, 336256, 336257, 336258, 336259, 336260) c6( ) c7(ck, T, af, aW, vA, r, aT, gl, dz, azm, y, bt, B, op); #c1(TET1) c2(XP_011538507) c3(methylcytosine dioxygenase TET1 isoform X2) c4(336261) c5( ) c6( ) c7(ck, T, af, aW, vA, r, aT, gl, dz, azm, y, bt, B, op); #c1(TET1) c2(XP_011538509) c3(methylcytosine dioxygenase TET1 isoform X4) c4( ) c5(336262) c6( ) c7(ck, T, af, aW, vA, r, aT, gl, dz, azm, y, bt, B, op); #c1(TET2) c2(NP_001120680) c3(methylcytosine dioxygenase TET2 isoform a) c4(44517, 44518) c5(44519, 44520, 44521, 44522, 44523, 44524, 44525, 44526, 44527, 44528, 44529, 44530, 44531, 44532, 44533, 44534, 44535, 44536, 44537, 44538, 44539) c6( ) c7(T, fM, Js, iW, gx, fd, EQ, fZ, bs, n, ol, aeu, oY, qy, aqf, fr, abQ, hF, eA, hr, ad, er, x, oB, dn, aT, aU, oW, dz, vw, h, jj, pq, ae, Nr, oP, UT, aix, hG, aW, Y, et, gK, iU, pr, Mz, kD, po, gm, jh, pm, hf, cl, aKj, bw, aiv, yR, Nq, yd, ck, Ta, pc, UY, iT, kz, hL, cj, pg, dW, k, bt, Jo, Tc); #c1(TET2) c2(NP_060098) c3(methylcytosine dioxygenase TET2 isoform b) c4(194106) c5(194107, 194108, 194109, 194110, 194111, 194112, 194113, 194114, 194115, 194116, 194117, 194118, 194119, 194120, 194121, 194122) c6( ) c7(T, fM, Js, iW, gx, fd, EQ, fZ, bs, n, ol, aeu, oY, qy, aqf, fr, abQ, hF, eA, hr, ad, er, x, oB, dn, aT, aU, oW, dz, vw, h, jj, pq, ae, Nr, oP, UT, aix, hG, aW, Y, et, gK, iU, pr, Mz, kD, po, gm, jh, pm, hf, cl, aKj, bw, aiv, yR, Nq, yd, ck, Ta, pc, UY, iT, kz, hL, cj, pg, dW, k, bt, Jo, Tc); #c1(TET2) c2(XP_006714305) c3(methylcytosine dioxygenase TET2 isoform X2) c4(287683) c5(287684, 287685, 287686, 287687, 287688, 287689) c6( ) c7(T, fM, Js, iW, qx, fd, EQ, fZ, bs, n, ol, aeu, oY, qy, aqf, fr, abQ, hF, eA, hr, ad, er, x, oB, dn, aT, aU, oW, dz, vw, h, jj, pq, ae, Nr, oP, UT, aix, hG, aW, Y, et, gK, iU, pr, Mz, kD, po, gm, jh, pm, hf, cl, aKj, bw, aiv, yR, Nq, yd, ck, Ta, pc, UY, iT, kz, hL, cj, pg, dW, k, bt, Jo, Tc); #c1(TET2) c2(XP_011530345) c3(methylcytosine dioxygenase TET2 isoform X3) c4(326204, 326205) c5( ) c6( ) c7(T, fM, Js, iW, qx, fd, EQ, fZ, bs, n, ol, aeu, oY, qy, aqf, fr, abQ, hF, eA, hr, ad, er, x, oB, dn, aT, aU, oW, dz, vw, h, jj, pq, ae, Nr, oP, UT, aix, hG, aW, Y, et, gK, iU, pr, Mz, kD, po, gm, jh, pm, hf, cl, aKj, bw, aiv, yR, Nq, yd, ck, Ta, pc, UY, iT, kz, hL, cj, pg, dW, k, bt, Jo, Tc); #c1(TET3) c2(XP_005264244) c3(methylcytosine dioxygenase TET3 isoform X1) c4(278736) c5( ) c6( ) c7(T, pN, vA, dz, bt, B, op); #c1(TET3) c2(XP_011530988) c3(methylcytosine dioxygenase TET3 isoform X4) c4(326939) c5(326940, 326941, 326942, 326943, 326944, 326945, 326946, 326947, 326948, 326949, 326950, 326951) c6( ) c7(T, pN, vA, dz, bt, B, op); #c1(TET3) c2(XP_011530992) c3(methylcytosine dioxygenase TET3 isoform X7) c4( ) c5(326952, 326953) c6( ) c7(T, pN, vA, dz, bt, B, op); #c1(TEX101) c2(NP_001123483) c3(testis-expressed sequence 101 protein isoform 2 precursor) c4( ) c5(47148, 47149, 47150, 47151, 47152) c6( ) c7(T, sS, ac); #c1(TEX101) c2(NP_113639) c3(testis-expressed sequence 101 protein isoform 1) c4(221850, 221851, 221852) c5(221853, 221854, 221855, 221856, 221857, 221858, 221859, 221860, 221861, 221862, 221863, 221864, 221865, 221866, 221867, 221868, 221869) c6( ) c7(T, sS, ac); #c1(TEX11) c2(NP_001003811) c3(testis-expressed sequence 11 protein isoform 1) c4(20188, 20189) c5(20190, 20191, 20192, 20193, 20194, 20195, 20196, 20197, 20198, 20199, 20200, 20201, 20202, 20203, 20204, 20205) c6( ) c7(vH, ND); #c1(TEX11) c2(NP_112566) c3(testis-expressed sequence 11 protein isoform 2) c4(221404) c5(221405, 221406, 221407, 221408, 221409, 221410) c6( ) c7(vH, ND); #c1(TEX14) c2(NP_001188386) c3(inactive serine/threonine-protein kinase TEX14 isoform c) c4(79099) c5(79100, 79101, 79102, 79103, 79104, 79105) c6( ) c7(vH, aW, Ld, ND, aT); #c1(TEX14) c2(NP_112562) c3(inactive serine/threonine-protein kinase TEX14 isoform b) c4(221397) c5(221398, 221399, 221400, 221401, 221402, 221403) c6( ) c7(vH, aW, Ld, ND, aT); #c1(TEX14) c2(NP_938207) c3(inactive serine/threonine-protein kinase TEX14 isoform a) c4(259808) c5(259809, 259810, 259811, 259812, 259813, 259814) c6( ) c7(vH, aW, Ld, ND, aT); #c1(TEX15) c2(NP_112561) c3(testis-expressed sequence 15 protein) c4(221396) c5( ) c6( ) c7(vH, NO); #c1(TEX15) c2(XP_011542895) c3(testis-expressed sequence 15 protein isoform X3) c4( ) c5(341489, 341490, 341481, 341492, 341493, 341494) c6( ) c7(vH, ND); #c1(TEX264) c2(NP_001230655) c3(testis-expressed sequence 264 protein isoform 1 precursor) c4(86426, 86427, 86428, 86429, 86430) c5(86431, 86432, 86433, 86434, 86435, 86436, 86437, 86438, 86439, 86440, 86441, 86442, 86443, 86444, 86445, 86446, 86447, 86448, 86449, 86450, 86451, 86452, 86453, 86454, 86455, 86456, 86457, 86458, 86459, 86460, 86461, 86462, 86463, 86464, 86465, 86466, 86467, 86468, 86469, 86470, 86471, 86472, 86473, 86474, 86475, 86476, 86477, 86478, 86479, 86480, 86481, 86482, 86483, 86484, 86485, 86486, 86487, 86488, 86489, 86490, 86491, 86492) c6(86493, 86494, 86495, 86496, 86497, 86498, 86499, 86500, 86501, 86502, 86503, 86504, 86505, 86506, 86507, 86508, 86509, 86510, 86511, 86512) c7(ey); #c1(TEX264) c2(XP_011532106) c3(testis-expressed sequence 264 protein isoform X2) c4(328150, 328151) c5(328152, 328153, 328154, 328155, 328156, 328157, 328158, 328159, 328160, 328161) c6( ) c7(ey); #c1(TEX29) c2(NP_689537) c3(testis-expressed sequence 29 protein isoform 2) c4(243027) c5(243028, 243029, 243030, 243031, 243032, 243033) c6( ) c7(cd, gv, j); #c1(TEX30) c2(NP_001273705) c3(testis-expressed sequence 30 protein isoform 3) c4( ) c5(105678, 105679, 105680, 105681, 105682, 105683, 105684, 105685) c6( ) c7(NT, ci, s); #c1(TEX30) c2(XP_005254154) c3(testis-expressed sequence 30 protein isoform X1) c4(273032, 273033) c5(273034, 273035, 273036, 273037, 273038, 273039, 273040, 273041) c6( ) c7(NT, ci, s); #c1(TEX35) c2(NP_001164193) c3(testis-expressed sequence 35 protein isoform 2) c4(66769) c5(66770, 66771, 66772, 66773, 66774, 66775) c6( ) c7(B); #c1(TEX35) c2(NP_001164194) c3(testis-expressed sequence 35 protein isoform 3) c4(66776) c5(66777, 66778, 66779, 66780, 66781, 66782, 66783, 66784, 66785, 66786, 66787, 66788, 66789, 66790) c6( ) c7(B); #c1(TEX35) c2(NP_001164195) c3(testis-expressed sequence 35 protein isoform 4) c4(66791) c5(66792, 66793, 66794, 66795, 66796, 66797, 66798, 66799, 66800, 66801, 66802, 66803) c6( ) c7(B); #c1(TEX35) c2(NP_115502) c3(testis-expressed sequence 35 protein isoform 1) c4(222953, 222954, 222955) c5(222956, 222957, 222958, 222959, 222960, 222961) c6( ) c7(B); #c1(TEX40) c2(NP_001034585) c3(testis-expressed sequence 40 protein) c4(31882) c5(31883, 31884, 31885, 31886, 31887, 31888) c6( ) c7(m); #c1(TF) c2(XP_011511402) c3(serotransferrin isoform X1) c4(302011, 302012) c5(302013, 302014, 302015, 302016, 302017, 302018, 302019, 302020, 302021, 302022, 302023, 302024) c6( ) c7(oO, bL, T, Ve, bM, e, aw, yY, v, ah, ci, zP, gb, ad, kL, av, iu, cLe, dY, yt, oW, aT, yu, cy, jj, bq, an, H, ae, af, eu, VF, mu, hi, zQ, d, s, aW, Y, fc, fQ, yy, aq, fe, Z, bN, ck, ar, W, ac, aNv, dB, nB, WP, eM, U, at, y, kS, B, ao, L); #c1(TFAM) c2(NP_001257711) c3(transcription factor A, mitochondrial isoform 2 precursor) c4(95618) c5(95619, 95620, 95621, 95622, 95623, 95624) c6( ) c7(bL, T, JC, aw, jh, aj, aNG, q, J, aoz, cd, cc, MR, hb, oj, aT, IG, vd, K, an, awL, af, Is, bux, aW, fc, r, awJ, t, kC, bz, hJ, Hv, akQ, ac, c, Qu, tV, hR, at, acJ, m, ei, gT, cB, p); #c1(TFAM) c2(NP_003192) c3(transcription factor A, mitochondrial isoform 1 precursor) c4(136140, 136141) c5(136142, 136143, 136144, 136145, 136146, 136147, 136148, 136149, 136150, 136151, 136152, 136153) c6( ) c7(bL, T, JC, aw, jh, aj, aNG, q, J, aoz, cd, cc, MR, hb, oj, aT, IG, vd, K, an, awL, af, Is, bux, aW, fc, r, awJ, t, kC, bz, hJ, Hv, akQ, ac, c, Qu, tV, hR, at, acJ, m, ei, gT, cB, p); #c1(TFAM) c2(XP_011538423) c3(transcription factor A, mitochondrial isoform X2) c4( ) c5(336106) c6( ) c7(bL, T, JC, aw, jh, aj, aNG, q, J, aoz, cd, cc, MR, hb, oj, aT, IG, vd, K, an, awL, af, Is, bux, aW, fc, r, awJ, t, kC, bz, hJ, Hv, akQ, ac, c, Qu, tV, hR, at, acJ, m, ei, gT, cB, p); #c1(TFAP2A) c2(NP_001027451) c3(transcription factor AP-2-alpha isoform b) c4(30134) c5(30135, 30136, 30137, 30138, 30139, 30140) c6( ) c7(T, bB, Fb, fr, ci, Xt, q, ad, eA, cc, yQ, Yc, aE, oW, aT, Nc, K, nJ, ae, cp, bVo, Ii, iU, Jl, aW, Y, ff, Az, r, dN, kp, en, mo, bVp, t, g, as, iK, vU, bF, Dy, bP, Ip, bE, hR, dy, m, bt, X); #c1(TFAP2A) c2(NP_001035890) c3(transcription factor AP-2-alpha isoform c) c4(33332) c5(33333, 33334, 33335, 33336, 33337, 33338) c6( ) c7(T, bB, Fb, fr, ci, Xt, q, ad, eA, cc, yQ, Yc, aE, oW, aT, Nc, K, nJ, ae, cp, bVo, Ii, iU, JL aW, Y, ff, Az, r, dN, kp, en, mo, bVp, t, g, as, iK, vU, bF, Dy, bP, Ip, bE, hR, dy, m, bt, X); #c1(TFAP2A) c2(NP_003211) c3(transcription factor AP-2-alpha isoform a) c4(136381, 136382, 136383) c5(136384, 136385, 136386, 136387, 136388, 136389, 136390, 136391, 136392, 136393, 136394, 136395, 136396, 136397, 136398, 136399, 136400, 136401, 136402, 136403, 136404, 136405) c6( ) c7(T, bB, Fb, fr, ci, Xt, q, ad, eA, cc, yQ, Yc, aE, oW, aT, Nc, K, nJ, ae, cp, bVo, Ii, iU, Jl, aW, Y, ff, Az, r, dN, kp, en, mo, bVp, t, g, as, iK, vU, bF, Dy, bP, Ip, bE, hR, dy, m, bt, X); #c1(TFAP2B) c2(NP_003212) c3(transcription factor AP-2-beta) c4(136406) c5(136407, 136408, 136409, 136410, 136411, 136412, 136413) c6( ) c7(bL, atk, Nt, gf, bS, et, j, v, fr, av, Eo, aT, bK, cLf, aW, Y, Az, Au, g, Z, bz, fq, hq, arB, Dy, eM, bP, ei, Xu, iu); #c1(TFAP2B) c2(XP_011513139) c3(transcription factor AP-2-beta isoform X2) c4(304961, 304962) c5(304963, 304964, 304965, 304966, 304967, 304968, 304969, 304970, 304971, 304972, 304973, 304974) c6( ) c7(bL, atk, Nt, gf, bS, et, j, v, fr, av, Eo, aT, bK, cLf, aW, Y, Az, Au, g, Z, bz, fq, hq, arB, Dy, eM, bP, ei, Xu, iu); #c1(TFAP2C) c2(NP_003213) c3(transcription factor AP-2 gamma) c4(136414, 136415, 136416) c5(136417, 136418, 136419, 136420, 136421, 136422, 136423, 136424, 136425, 136426, 136427, 136428, 136429, 136430, 136431, 136432, 136433, 136434, 136435) c6( ) c7(BI, ac, wu, aW, Y, vA, aT, aA, ci, K, cl, wm, op); #c1(TFAP4) c2(NP_003214) c3(transcription factor AP-4) c4(136436) c5(136437, 136438, 136439, 136440, 136441, 136442, 136443) c6( ) c7(B, q, r); #c1(TFB1M) c2(NP_057104) c3(dimethyladenosine transferase 1, mitochondrial) c4(188909) c5(188910, 188911, 188912, 188913, 188914, 188915, 188916) c6( ) c7(bL, af, as, an); #c1(TFB1M) c2(XP_011534174) c3(dimethyladenosine transferase 1, mitochondrial isoform X2) c4( ) c5(330472) c6( ) c7(bL, af, as, an); #c1(TFB2M) c2(NP_071761) c3(dimethyladenosine transferase 2, mitochondrial) c4(211989, 211990) c5(211991, 211992, 211993, 211994, 211995, 211996, 211997) c6( ) c7(af, as, an); #c1(TFB2M) c2(XP_011542550) c3(dimethyladenosine transferase 2, mitochondrial isoform X1) c4( ) c5(341096, 341097, 341098, 341099, 341100, 341101) c6( ) c7(af, as, an); #c1(TFCP2) c2(NP_001166924) c3(alpha-globin transcription factor CP2 isoform 3) c4(68583, 68584) c5(68585, 68586, 68587, 68588, 68589, 68590, 68591, 68592, 68593, 68594, 68595, 68596) c6( ) c7(h, agI, af, U, bO); #c1(TFCP2) c2(NP_005644) c3(alpha-globin transcription factor CP2 isoform 1) c4(158227) c5(158228, 158229, 158230, 158231, 158232, 158233, 158234) c6( ) c7(h, agI, af, U, bO); #c1(TFDP1) c2(XP_005268384) c3(transcription factor Dp-1 isoform X1) c4(281769, 281770) c5(281771, 281772, 281773, 281774, 281775, 281776) c6( ) c7(bF, av, af, eM, aW, iW, ff, aT, en, t, bz, B, L); #c1(TFDP1) c2(XP_005268385) c3(transcription factor Dp-1 isoform X2) c4(281777) c5( ) c6( ) c7(bF, av, aT, eM, aW, iW, ff, al en, t, bz, B, L); #c1(TFDP1) c2(XP_005268387) c3(transcription factor Dp-1 isoform X5) c4( ) c5(281778, 281779, 281780, 281781, 281782, 281783, 281784, 281785, 281786, 281787, 281788, 281789) c6( ) c7(bF, av, aT, eM, aW, iW, ff, aT, en, t, bz, B, L); #c1(TFDP1) c2(XP_005268388) c3(transcription factor Dp-1 isoform X6) c4(281790) c5(281791, 281792, 281793, 281794, 281795, 281796) c6( ) c7(bF, av, aT, eM, aW, iW, ff, aT, en, t, bz, B, L); #c1(TFDP1) c2(XP_011535822) c3(transcription factor Dp-1 isoform X4) c4(333020) c5(333021, 333022, 333023, 333024, 333025, 333026) c6( ) c7(bF, av, aT, eM, aW, iW, ff, aT, en, t, bz, B, L); #c1(TFDP2) c2(NP_001171609) c3(transcription factor Dp-2 isoform 1) c4(70783, 70784, 70785) c5(70786, 70787, 70788, 70789, 70790, 70791, 70792, 70793, 70794, 70795, 70796, 70797, 70798, 70799, 70800, 70801) c6( ) c7(bP, eR, Db, if, r, dy, q, qN, t, B); #c1(TFDP2) c2(NP_001171610) c3(transcription factor Dp-2 isoform 2) c4(70802, 70803, 70804, 70805) c5(70806, 70807, 70808, 70809, 70810, 70811, 70812, 70813, 70814, 70815, 70816, 70817, 70818, 70819, 70820, 70821, 70822, 70823) c6( ) c7(bP, eR, Db, if, r, dy, q, qN, t, B); #c1(TFDP2) c2(NP_001171611) c3(transcription factor Dp-2 isoform 3) c4(70824) c5(70825, 70826, 70827, 70828, 70829, 70830) c6( ) c7(bP, eR, Db, if, r, dy, q, qN, t, B); #c1(TFDP2) c2(NP_001171612) c3(transcription factor Dp-2 isoform 4) c4(70831) c5(70832, 70833, 70834, 70835, 70836, 70837, 70838) c6( ) c7(bP, eR, db, if, r, dy, q, qN, t, B); #c1(TFDP2) c2(NP_001171613) c3(transcription factor Dp-2 isoform 5) c4( ) c5(70839, 70840, 70841, 70842, 70843) c6( ) c7(bP, eR, Db, if, r, dy, q, qN, t, B); #c1(TFDP2) c2(XP_005247788) c3(transcription factor Dp-2 isoform X1) c4(267989, 267990, 267991) c5(267992, 267993, 267994, 267995) c6( ) c7(bP, eR, db, if, r, dy, q, qN, t, B); #c1(TFDP2) c2(XP_011511409) c3(transcription factor Dp-2 isoform X4) c4( ) c5(302025, 302026, 302027, 302028, 302029, 302030, 302031, 302032, 302033, 302034, 302035, 302036, 302037, 302038, 302039, 302040, 302041, 302042, 302043, 302044, 302045, 302046, 302047, 302048) c6( ) c7(bP, eR, Db, if, r, dy, q, qN, t, B); #c1(TFDP3) c2(NP_057605) c3(transcription factor Dp family member 3) c4(191707) c5(191708, 191709, 191710, 191711, 191712, 191713) c6( ) c7(aq, B, bu); #c1(TFE3) c2(NP_006512) c3(transcription factor E3 isoform 1) c4(165920) c5( ) c6( ) c7(T, apr, zs, aHx, jh, aj, dG, fr, ci, rP, er, J, py, bPa, bOZ, aim, azH, kj, dq, BG, g, Vi, cm, adj, es, QG, iA, Vy, go, nw, ei, ym, bOQ); #c1(TFE3) c2(XP_006724612) c3(transcription factor E3 isoform X1) c4( ) c5(296113, 296114, 296115, 296116, 296117, 296118, 296119) c6( ) c7(T, apr, zs, aHx, jh, aj, dG, fr, ci, rP, er, J, py, bPa, bOZ, aim, azH, kj, dq, BG, g, Vi, cm, adj, es, QG, iA, Vy, go, nw, ei, ym, bOQ); #c1(TFEB) c2(NP_001161299) c3(transcription factor EB isoform 2) c4(65564, 65565, 65566, 65567, 65568, 65569, 65570, 65571) c5(65572, 65573, 65574, 65575, 65576, 65577, 65578, 65579, 65580, 65581, 65582, 65583, 65584, 65585, 65586, 65587, 65588, 65589, 65590, 65591, 65592, 65593, 65594, 65595, 65596, 65597, 65598, 65599, 65600, 65601, 65602) c6( ) c7(vU, es, am, d, kj, iA, Y, Vi, hl, Lq, j, ci, Kj, v, ei, H, fr, L); #c1(TFEB) c2(NP_001258872) c3(transcription factor EB isoform 3) c4(96620) c5(96621, 96622, 96623, 96624, 96625, 96626, 96627, 96628, 96629, 96630, 96631, 96632, 96633, 96634, 96635) c6( ) c7(vU, es, am, d, kj, iA, Y, Vi, hl, Lq, j, ci, Kj, v, ei, H, fr, L); #c1(TFEB) c2(XP_006715276) c3(transcription factor EB isoform X1) c4(289442) c5(289443, 289444, 289445, 289446, 289447, 289448, 289449, 289450, 289451, 289452, 289453, 289454, 289455, 289456, 289457, 289458, 289459, 289460, 289461, 289462, 289463, 289464, 289465, 289466, 289467, 289468, 289469, 289470, 289471, 289472, 289473, 289474, 289475, 289476, 289477) c6( ) c7(vU, es, am, d, kj, iA, Y, Vi, hl, Lq, j, ci, Kj, v, ei, H, fr, L); #c1(TFEC) c2(NP_001018068) c3(transcription factor EC isoform b) c4( ) c5(27052, 27053, 27054, 27055, 27056, 27057, 27058, 27059, 27060, 27061) c6( ) c7(ey, kj, eZ); #c1(TFEC) c2(NP_001231512) c3(transcription factor EC isoform c) c4(87277) c5(87278, 87279, 87280, 87281, 87282, 87283) c6( ) c7(ey, kj, eZ); #c1(TFEC) c2(NP_036384) c3(transcription factor EC isoform a) c4( ) c5(173450, 173451, 173452, 173453, 173454) c6( ) c7(ey, kj, eZ); #c1(TFEC) c2(XP_011514270) c3(transcription factor EC isoform X2) c4(306845, 306846) c5(306847, 306848, 306849, 306850, 306851, 306852, 306853, 306854) c6( ) c7(ey, kj, eZ); #c1(TFEC) c2(XP_011514272) c3(transcription factor EC isoform X4) c4(306855, 306856) c5(306857, 306858) c6( ) c7(ey, kj, eZ); #c1(TFF1) c2(NP_003216) c3(trefoil factor 1 precursor) c4(136444) c5(136445, 136446, 136447, 136448, 136449, 136450) c6( ) c7(gV, T, Mb, pf, aD, fG, aA, bB, BH, ci, pz, yU, zP, q, ad, XX, jz, di, aE, nv, rJ, bW, aT, h, yZ, dL, ji, hu, MO, H, ae, af, dl, aa, B, s, hG, NE, aW, oV, XE, MD, XC, ff, fe, kp, hp, aB, en, g, aF, t, iV, tR, bF, EW, fT, ac, bP, bE, dJ, IF, at, dy, im, agT, CW, L); #c1(TFF2) c2(NP_005414) c3(trefoil factor 2 precursor) c4(155860) c5(155861, 155862, 155863, 155864, 155865, 155866) c6( ) c7(bM, T, aC, fR, aD, aA, BH, ci, jz, aE, aT, hu, af, dl, aa, Ii, Jl, aW, ff, az, kt, fe, aF, en, g, iV, bE, z, X); #c1(TFF3) c2(NP_003217) c3(trefoil factor 3 precursor) c4(136451, 136452) c5(136453, 136454, 136455, 136456, 136457, 136458, 136459, 136460, 136461, 136462, 136463, 136464) c6( ) c7(T, AS, Dh, jx, NT, aA, bB, Wb, BF, ci, q, ad, fU, hd, aE, qg, anV, aT, dL, AN, K, ji, hu, ae, be, B, s, NE, aW, ff, r, fe, pR, aF, hp, zC, en, cl, iV, bF, nM, nB, bE, hL, abt, E, at, aUS, dy, X); #c1(TFG) c2(NP_001007566) c3(protein TEG isoform 1) c4(22824) c5(22825, 22826, 22827, 22828, 22829, 22830, 22831, 22832, 22833, 22834) c6( ) c7(cLg, aNA, kh, d, hd, ql, nB, cLh, nM, bT, Y, QG, hl, qy, jh, ey, bU, ae, eA, ad, cp); #c1(TFG) c2(XP_005247123) c3(protein TEG isoform X2) c4(267652, 267653, 267654, 267655, 267656) c5(267657, 267658, 267659, 267660, 267661, 267662, 267663, 267664, 267665, 267666, 267667, 267668, 267669, 267670, 267671, 267672, 267673, 267674, 267675, 267676, 267677, 267678, 267679, 267680, 267681, 267682, 267683, 267684, 267685, 267686) c6( ) c7(cLg, aNA, kh, d, hd, gl, nB, cLh, nM, bT, Y, QG, hl, qy, jh, ey, bU, ae, eA, ad, cp); #c1(TFIP11) c2(XP_011528381) c3(tuftelin-interacting protein 11 isoform X1) c4(323419, 323420, 323421, 323422, 323423, 323424, 323425) c5(323426, 323427, 323428, 323429, 323430, 323431, 323432, 323433, 323434, 323435, 323436, 323437, 323438, 323439, 323440, 323441, 323442, 323443, 323444, 323445, 323446, 323447, 323448, 323449, 323450, 323451, 323452, 323453, 323454, 323455, 323456, 323457, 323458, 323459, 323460, 323461, 323462, 323463, 323464, 323465, 323466, 323467, 323468, 323469, 323470, 323471, 323472, 323473, 323474, 323475, 323476, 323477, 323478, 323479) c6( ) c7(tN, T, Ta, aE, s, bE, ki, cr, r, bB, fe, ci, eE, he, q); #c1(TFP1) c2(NP_001027452) c3(tissue factor pathway inhibitor isoform b precursor) c4(30141, 30142) c5(30143, 30144, 30145, 30146, 30147, 30148, 30149, 30150, 30151, 30152, 30153, 30154, 30155, 30156, 30157, 30158, 30159, 30160, 30161, 30162, 30163, 30164, 30165, 30166, 30167, 30168, 30169, 30170, 30171, 30172, 30173, 30174, 30175, 30176, 30177, 30178, 30179, 30180) c6( ) c7(oO, bM, T, ea, if, al, eb, bB, ci, aY, aMB, K, wt, eL, hm, bpU, ayT, aW, YG, g, uC, wT, YK, P, dD, aw, ez, fr, qN, h, jy, dL, ey, ux, pl, hi, sq, aq, kT, vb, eQ, B, aJJ, eR, DV, fF, cR, j, q, aT, cy, an, ajU, Y, LO, Pg, r, en, kC, iK, bN, pH, cLi, Dy, ac, ha, ml, oR, wV, dG, ah, SY, eq, gb, Fc, iJ, hX, ib, qh, ji, Yj, cW, ff, bz, gk, DT, bE, ag, ID, dX, rH); #c1(TFP1) c2(NP_006278) c3(tissue factor pathway inhibitor isoform a precursor) c4(163504, 163505, 163506, 163507, 163508) c5(163509, 163510, 163511, 163512, 163513, 163514, 163515, 163516, 163517, 163518, 163519, 163520, 163521, 163522, 163523, 163524) c6( ) c7(oO, bM, T, ea, if, al, eb, bB, ci, aY, aMB, K, wt, eL, hm, bpU, ayT, aW, YG, g, uC, wT, YK, P, dD, aw, ez, fr, qN, h, jy, dL, ey, ux, pl, hi, sq, aq, kT, vb, eQ, B, aJJ, eR, DV, fF, cR, j, q, aT, cy, an, ajU, Y, LO, Pg, r, en, kC, iK, bN, pH, cLi, Dy, ac, ha, ml, oR, wV, dG, ah, SY, eq, gb, Fc, iJ, hX, ib, qh, ji, Yj, cW, ff, bz, gk, DT, bE, ag, IO, dX, rH); #c1(TFP12) c2(NP_001257933) c3(tissue factor pathway inhibitor 2 isoform 3 precursor) c4(95814) c5(95815, 95816, 95817, 95818, 95819, 95820) c6( ) c7(gh, T, dD, aC, wu, ea, if, e, ht, aA, bB, fd, eq, ci, qN, q, ad, eA, eJ, ip, av, aJO, aE, aT, io, h, K, wm, hu, nJ, ae, af, cp, eG, d, s, vT, aW, Em, Y, Lf, Lh, r, nY, kp, aF, g, bu, t, cm, bz, fs, qa, ck, VJ, ac, c, eM, dB, bE, aep, U, bko, m, y, B); #c1(TFP12) c2(NP_006519) c3(tissue factor pathway inhibitor 2 isoform 1 precursor) c4(165954) c5(165955, 165956, 165957, 165958, 165959, 165960) c6( ) c7(gh, T, dD, aC, wu, ea, if, e, ht, aA, bB, fd, eg, ci, qN, q, ad, eA, eJ, ip, av, aJO, aE, aT, io, h, K, wm, hu, nJ, ae, af, cp, eG, d, s, vT, aW, Em, Y, Lf, Lh, r, nY, kp, aF, g, bu, t, cm, bz, fs, qa, ck, VJ, ac, c, eM, dB, bE, aep, U, bko, m, y, B); #c1(TFPT) c2(NP_037474) c3(TCF3 fusion partner) c4(175724) c5(175725, 175726, 175727, 175728, 175729, 175730) c6( ) c7(IR); #c1(TFR2) c2(NP_001193784) c3(transferrin receptor protein 2 isoform 2) c4(82606) c5(82607, 82608, 82609, 82610, 82611, 82612) c6( ) c7(bGu, T, al, cz, aHv, hF, hr, x, F, yw, pN, tT, oW, aT, yu, aIX, iU, atI, hl, yy, aq, as, bw, ck, W, aUW, k, pw, y, ht, B, ao); #c1(TFR2) c2(XP_005250610) c3(transferrin receptor protein 2 isoform X1) c4(270444, 270445) c5(270446, 270447, 270448, 270449, 270450, 270451, 270452, 270453, 270454, 270455, 270456) c6( ) c7(bGu, T, al, cz, aHv, hF, hr, x, F, yw, PN, tT, oW, aT, yu, aIX, iU, atI, hl, yy, aq, as, bw, ck, W, aUW, k, pw, y, ht, B, ao); #c1(TFR2) c2(XP_005250611) c3(transferrin receptor protein 2 isoform X2) c4( ) c5(270457, 270458, 270459, 270460, 270461) c6( ) c7(bGu, T, al, cz, aHv, hF, hr, x, F, yw, pN, tT, oW, aT, yu, aIX, iI, atI, hl, yy, aq, as, bw, ck, W, aUW, k, pw, y, ht, B, ao); #c1(TFRC) c2(NP_003225) c3(transferrin receptor protein 1) c4(136465, 136466) c5(136467, 136468, 136469, 136470, 136471, 136472, 136473, 136474, 136475, 136476, 136477, 136478, 136479, 136480) c6( ) c7(T, ea, if, al, fd, bB, ip, bv, cLI, Be, rJ, dV, K, pk, eL, yo, aW, as, cm, bw, wT, fT, iT, cj, nw, k, m, abX, pw, de, NU, dD, oY, aj, fr, qN, cd, hr, eW, h, dL, ey, bl, cY, aq, dw, aBs, bP, asI, dB, xO, at, it, B, bL, jv, jx, rf, QZ, j, v, q, J, eA, yw, aT, cLk, yu, dz, jj, jf, kl, s, iU, iZ, Y, r, en, hf, t, iK, ck, BU, kP, awC, aUW, bt, yv, hl, Ve, qb, aZ, iW, jh, bs, aHv, pl, eq, hF, ad, hX, av, CJ, F, cLj, oz, oW, iY, ji, Xb, vj, yx, ff, kD, yy, hp, S, Kp, bz, gk, bE, bC, asz, kS); #c1(TG) c2(NP_003226) c3(thyroglobulin precursor) c4(136481, 136482, 136483) c5(136484, 136485, 136486, 136487, 136488, 136489, 136490, 136491, 136492, 136493, 136494, 136495, 136496, 136497, 136498, 136499, 136500, 136501) c6( ) c7(T, aCh, fR, Dd, bzb, bfx, cLo, asM, n, aj, hz, pl, ci, boy, bfr, biO, aYs, mC, J, eW, x, Vp, hd, xy, cLm, mP, Db, nv, iI, RN, cLq, hD, h, Ex, yF, A, Ix, s, hG, aus, bxz, eZ, fe, bxF, xv, hp, g, iV, zZ, cM, f, bN, qJ, cDe, aZT, nM, bP, nB, auz, Lj, cDd, hr, Lp, cLn, abt, cLp, k, fL, oQ, gT, AN, cLr); #c1(TG) c2(XP_005251095) c3(thyroglobulin isoform X2) c4(270804, 270805) c5(270806, 270807, 270808, 270809, 270810, 270811) c6( ) c7(T, aCh, fR, Dd, bzb, bfx, cLo, asM, n, aj, hz, pl, ci, boy, bfr, biO, aYs, mC, J, eW, x, Vp, hd, xy, cLm, mP, Db, nv, iI, RN, cLq, hD, h, Ex, yF, A, Ix, s, hG, aus, bxz, eZ, fe, bxF, xv, hp, g, iV, zZ, cM, f, bN, qJ, cDe, aZT, nM, bP, nB, auz, Lj, cDd, hr, Lp, cLn, abt, cLp, k, fL, oQ, gT, AN, cLr); #c1(TG) c2(XP_005251100) c3(thyroglobulin isoform X5) c4( ) c5(270812, 270813, 270814, 270815, 270816, 270817) c6( ) c7(T, aCh, fR, Dd, bzb, bfx, cLo, asM, n, aj, hz, pl, ci, boy, bfr, biO, aYs, mC, J, eW, x, Vp, hd, xy, cLm, mP, Db, nv, iI, RN, cLq, hD, h, Ex, yF, A, Ix, s, hG, aus, bxz, eZ, fe, bxF, xv, hp, g, iV, zZ, cM, f, bN, qJ, cDe, aZT, nM, bP, nB, auz, Lj, cDd, hr, Lp, cLn, abt, cLp, k, fL, oQ, gT, AN, cLr); #c1(TGFA) c2(NP_001093161) c3(protransforming growth factor alpha isoform 2 preproprotein) c4(39897) c5(39898, 39899, 39900, 39901, 39902, 39903, 39904, 39905) c6( ) c7(oO, azs, T, aC, if, al, bB, ci, ip, Na, aE, pX, aeO, K, hu, bky, eL, aa, DA, yo, bjy, aeR, aW, aEI, kt, g, as, eF, zE, uC, cm, Qt, eM, iA, AM, go, oy, NI, uJ, m, iu, aVF, fr, btF, auO, b, no, amJ, gd, h, ey, Gc, MD, fe, atf, aq, iO, hL, pV, it, B, rG, jp, Dh, fG, Lx, jx, aA, cLs, hy, v, AD, q, er, eA, Ig, nv, BJ, HC, aT, Nc, jj, ae, dl, s, Y, ev, r, en, bu, cl, t, KQ, iK, tR, sS, nM, kP, Dy, ac, bpv, gX, CZ, dy, fD, rA, VB, vi, gx, jh, Hn, jE, ad, hX, av, hd, F, ib, py, Db, hP, nJ, Yi, d, qt, vj, ff, xs, PA, eH, cr, aF, hp, anW, iR, KM, bz, LB, es, apM, zr, bE, uR, azT, aKC, aS, ra, i, IC, kS, X, y); #c1(TGFA) c2(NP_003227) c3(protransforming growth factor alpha isoform 1 preproprotein) c4(136502) c5(136503, 136504, 136505, 136506, 136507, 136508, 136509, 136510) c6( ) c7(oO, azs, T, aC, if, al, bB, ci, ip, Na, aE, PX, aeO, K, hu, bky, eL, aa, DA, yo, bjy, aeR, aW, aEI, kt, g, as, eF, zE, uC, cm, Qt, eM, iA, AM, go, oy, NI, uJ, m, iu, aVF, fr, btF, auO, b, no, amJ, gd, h, ey, Gc, MD, fe, atf, aq, iO, hL, pV, it, B, rG, jp, Dh, fG, Lx, jx, aA, cLs, hy, v, AD, q, er, eA, Ig, nv, BJ, HG, aT, Nc, jj, ae, dl, s, Y, ev, r, en, bu, cl, t, KQ, iK, tR, sS, nM, kP, Dy, ac, bpv, gX, CZ, dy, fD, rA, VB, vi, gx, jh, Hn, jE, ad, hX, av, hd, F, ib, py, Db, hP, nJ, Yi, d, qt, vj, ff, xs, PA, eH, cr, aF, hp, anW, iR, KM, bz, LB, es, apM, zr, bE, uR, azT, aKC, aS, ra, i, IG, kS, X, y); #c1(TGFB1) c2(NP_000651) c3(transforming growth factor beta-1 precursor) c4(14170, 14171, 14172) c5(14173, 14174, 14175, 14176, 14177, 14178, 14179, 14180, 14181, 14182, 14183, 14184, 14185, 14186, 14187, 14188, 14189, 14190, 14191, 14192, 14193, 14194, 14195, 14196, 14197, 14198, 14199, 14200, 14201, 14202, 14203, 14204, 14205, 14206, 14207, 14208, 14209, 14210, 14211, 14212, 14213, 14214, 14215, 14216, 14217, 14218, 14219, 14220, 14221, 14222, 14223, 14224, 14225, 14226, 14227, 14228, 14229, 14230, 14231, 14232, 14233, 14234, 14235, 14236, 14237, 14238, 14239, 14240, 14241, 14242, 14243, 14244, 14245, 14246, 14247, 14248, 14249, 14250, 14251, 14252, 14253, 14254, 14255, 14256, 14257, 14258, 14259, 14260, 14261, 14262, 14263, 14264, 14265, 14266, 14267, 14268) c6(14269) c7(T, ea, Av, aza, fd, aoj, ci, bRn, aY, bv, aE, dV, BZ, Ds, hu, zy, hH, aiJ, aa, Ii, Iy, yo, az, nY, uY, zC, ha, fT, Jr, nB, wE, bhl, cj, Zn, cX, k, fy, ht, biB, cQ, aj, cd, hr, vM, aSa, VI, bkP, IG, Gw, ey, aaK, on, mR, Ln, anP, aJ, sp, EU, Hz, aRL, ge, fQ, fe, adz, eD, Be, E, DM, aA, cz, atp, AO, q, zn, jj, sX, bA, hf, bg, IC, sV, Io, eS, cl, pb, sk, rR, OW, ac, iM, ig, CP, bt, ao, gV, iW, uG, jN, jh, dG, uu, ad, hX, bRP, yt, iY, bgr, IQ, amY, bPM, NP, ff, afi, dq, iV, bz, DF, ag, aDB, azT, aKC, If, IC, ra, ne, iu, aRD, oO, bM, ID, qo, vS, if, e, bB, cL, ur, bh, sD, Tz, ip, aHR, Na, cfq, ws, fS, bc, eG, up, dH, fc, hl, Qm, eE, eF, cm, bw, qJ, vA, oy, mx, vy, in, bBT, dD, gU, akc, zt, n, oY, uE, jz, eV, DU, A, RT, AQ, Ib, po, bxh, vo, bP, cA, hL, at, pg, ut, B, pF, dA, mr, wL, eX, fF, GC, v, Zk, V, MK, cLx, sy, Id, aWJ, bau, ae, hM, zH, ev, afq, acB, bu, t, ck, cLy, amP, yH, zu, gO, vi, dM, eq, BY, Tg, hd, py, abP, hD, rN, Dj, JK, XL nJ, sj, d, je, et, rM, kD, Z, arv, bF, D, gk, yE, Ny, dO, wz, gZ, Hs, y, ng, asg, aC, fR, al, CH, axk, gf, IR, Vp, AW, rJ, bW, M, rB, K, cLu, wt, dF, eL, Hl, axu, asD, mq, aGQ, aB, g, ve, bwe, uC, iP, ou, aDs, uy, U, uo, dW, Hb, m, NK, aFQ, sQ, sw, zX, Io, aw, NT, fN, BH, bdL, pM, asS, ft, kH, Lv, cU, Ha, CN, jT, cM, Ld, Zj, ar, kT, wk, mg, gg, Pr, it, L, fM, fG, oe, jx, wo, hz, j, aYW, pd, eA, J, er, XX, Ig, hb, nX, Nc, bq, aRR, kl, xR, Y, Pg, r, en, En, wA, iK, sn, c, aQd, hc, azK, Da, dy, fD, LS, Gl, sY, kh, am, id, CS, aZ, bgQ, em, uO, bS, ah, Jm, dP, cLw, oj, io, aSf, ji, Yi, IU, atA, vj, eH, cr, cLt, hp, KM, qa, adA, Nq, RQ, TA, Bv, pu, Lj, X, aCl, cP, ei, hE, vt, EB, G, eh, aTy, Lw, Jx, bOy, iI, avA, qM, apj, dQ, ass, bQv, hm, DA, zQ, aW, eM, wK, Jp, wB, cLv, uJ, abp, R, qR, cLz, vl, tp, wh, fr, et, hd, QN, aPb, ai, eW, amB, cc, aOu, wG, rl, h, dL, pj, hB, SD, wC, Nr, Dg, aq, kp, cFn, mo, dw, op, Ix, Wt, vD, IX, hk, hm, gw, uz, hR, aDE, bni, bL, Dw, eR, uv, cR, hy, C, aoC, ady, mj, ga, blC, mP, uT, qp, afQ, aT, bK, zg, af, Uf, s, iU, yL, Ia, akY, aDm, bQ, f, brm, IY, nM, pZ, fP, aJY, im, Ke, Zl, qb, aD, vr, Fb, jE, aFJ, kL, av, F, ib, vw, vO, uQ, qt, eZ, yy, gl, aF, eK, LB, es, eU, pc, Uj, bE, z, aS, be, adg, cbO, us); #c1(TGFB1) c2(XP_011525544) c3(transforming growth factor beta-1 isoform X1) c4(319975) c5( ) c6( ) c7(T, ea, Av, aza, fd, aoj, ci, bRn, aY, bv, aE, dV, BZ, Ds, hu, zy, hH, aiJ, aa, Ii, Iy, yo, az, nY, uY, zC, ba, fT, Jr, nB, wE, bhl, cj, Zn, cX, k, fy, ht, biB, cQ, aj, cd, hr, vM, aSa, VI, bkP, IG, Gw, ey, aaK, on, mR, Ln, anP, aJ, sp, EU, Hz, aRL, ge, fQ, fe, adz, eD, Be, E, DM, aA, cz, atp, AO, q, zn, jj, sX, bA, bf, bg, IC, sV, Io, eS, cl, pb, sk, rR, OW, ac, iM, ig, CP, bt, ao, gV, iW, uG, jN, jh, dG, uu, ad, hX, bRP, yt, iY, bgr, IQ, amY, bPM, NP, ff, afi, dq, iV, bz, DF, ag, aDB, azT, a KG, If, IG, ra, ne, iu, aRD, oO, bM, ID, qo, vS, if, e, bB, cL, ur, bh, sD, Tz, ip, aHR, Na, cfq, ws, fS, be, eG, up, dH, fc, hl, Qm, eE, eF, cm, bw, qJ, vA, oy, mx, vy, in, bBT, dD, gU, akc, zt, n, oY, uE, jz, eV, DU, A, RT, AQ, Ib, po, bxh, vo, bP, cA, hL, at, pg, ut, B, pF, dA, mr, wL, eX, fF, GC, v, Zk, V, MK, cLx, sy, Id, aWJ, bau, ae, hM, zH, ev, afq, acB, bu, t, ck, cLy, amP, yH, zu, gO, vi, dM, eq, BY, Tg, hd, py, abP, hD, rN, Dj, JK, XL nJ, sj, d, je, et, rM, kD, Z, arv, bF, D, gk, yE, Ny, dO, wz, gZ, Hs, y, ng, asg, aC, fR, al, CH, axk, gf, IR, Vp, AW, rJ, bW, M, rB, K, cLu, wt, dF, eL, Hl, axu, asD, mQ, aGQ, aB, g, ve, bwe, uC, iP, ou, aDs, uy, U, uo, dW, Hb, m, NK, aFQ, sQ, sw, zX, Io, aw, NT, fN, BH, bdL, pM, asS, ft, kH, Lv, cU, Ha, CN, jT, cM, Ld, Zj, ar, kT, wk, mg, gg, Pr, it, L, fM, fG, oe, jx, wo, hz, j, aYW, pd, eA, J, er, XX, Ig, hb, nX, Nc, bq, aRR, kl, xR, Y, Pg, r, en, En, wA, iK, sn, c, aQd, hc, azK, Da, dy, fD, LS, GL sY, kh, am, id, CS, aZ, bgQ, em, uO, bS, ah, Jm, dP, cLw, oj, io, aSf, ji, Yi, IU, atA, vj, eH, cr, cLt, hp, KM, qa, adA, Nq, RQ, TA, Bv, pu, Lj, X, aCl, cP, ei, hE, vt, EB, G, eb, aTy, Lw, Jx, bOy, iI, avA, qM, apj, dQ, ass, bQv, hm, DA, zQ, aW, eM, wK, Jp, wB, cLv, uJ, abp, R, qR, cLz, vl, tp, wh, fr, et, hd, qN, aPb, ai, eW, amB, cc, aOu, wG, rl, h, dL, pj, hB, SD, wC, Nr, Dg, aq, kp, cFn, mo, dw, op, Ix, Wt, vD, IX, hk, hm, gw, uz, hR, aDE, bni, bL, Dw, eR, uv, cR, hy, C, aoC, ady, mj, ga, blC, mP, uT, qp, afQ, aT, bK, zg, af, Uf, s, iU, yL, Ia, akY, aDm, bQ, f, brm, IY, nM, pZ, fP, aJY, im, Ke, ZL gb, aD, vr, Fb, jE, aFJ, kL, av, F, ib, vw, vO, uQ, qt, eZ, yy, gl, aF, eK, LB, es, eU, pc, Uj, bE, z, aS, be, adg, cbO, us); #c1(TGFBIII) c2(NP_001035919) c3(transforming growth factor beta-1-induced transcript 1 protein isoform 1) c4(33390, 33391) c5(33392, 33393, 33394, 33395, 33396, 33397, 33398, 33399, 33400, 33401, 33402) c6(33403, 33404) c7(dP, T, Ln, vH, n, PU, pt, ae, LS, ad); #c1(TGFBIII) c2(NP_001158191) c3(transforming growth factor beta-1-induced transcript 1 protein isoform 2) c4( ) c5(63309, 63310, 63311, 63312, 63313, 63314, 63315, 63316, 63317, 63318, 63319, 63320) c6(63321, 63322, 63323, 63324) c7(dP, T, Ln, vH, n, PU, pt, ae, LS, ad); #c1(TGFB2) c2(NP_001129071) c3(transforming growth factor beta-2 isoform 1 precursor) c4(50730) c5(50731, 50732, 50733, 50734, 50735, 50736, 50737) c6( ) c7(bM, T, al, Av, aza, bB, aoj, ci, aY, aZO, xE, aE, ws, dV, Ds, K, cpm, eG, dH, aW, wF, Az, Du, g, eF, cm, eM, mx, bru, m, vF, eg, dt, dD, vl, tp, wh, Io, aw, n, eh, ft, ju, Ha, PX, dw, cLA, Qf, eD, Be, bD, apE, B, Dw, eR, DD, dK, fG, v, eA, uT, DK, aT, bg, rv, ae, jf, Y, An, en, t, sS, c, dy, cfe, Mb, kh, id, aZ, rl, jh, eq, ad, dP, F, LA, ah, IQ, baU, cLC, uQ, d, ff, eH, eZ, rM, hp, iV, atb, cLB, D, Uj, bE, z, aEY, wz, Hs, be, If, y); #c1(TGFB2) c2(NP_003229) c3(transforming growth factor beta-2 isoform 2 precursor) c4(136511) c5(136512, 136513, 136514, 136515, 136516, 136517, 136518) c6( ) c7(bM, T, al, Av, aza, bB, aoj, ci, aY, aZO, xE, aE, ws, dV, Ds, K, cpm, eG, dH, aW, wF, Az, Du, g, eF, cm, eM, mx, bru, m, vF, eg, dt, dD, vl, tp, wh, Io, aw, n, eh, ft, ju, Ha, PX, dw, cLA, Qf, eD, Be, bD, apE, B, Dw, eR, DD, dK, fG, v, eA, uT, DK, aT, bq, rv, ae, jf, Y, An, en, t, sS, c, dy, cfe, Mb, kh, id, aZ, rl, jh, eq, ad, dP, F, LA, ah, IQ, baU, cLC, uQ, d, ff, eH, eZ, rM, hp, iV, atb, cLB, D, Uj, bE, z, aEY, wz, Hs, be, If, y); #c1(TGFB3) c2(NP_003230) c3(transforming growth factor beta-3 preproprotein) c4(136519, 136520, 136521) c5(136522, 136523, 136524, 136525, 136526, 136527, 136528, 136529, 136530, 136531, 136532, 136533, 136534, 136535, 136536, 136537, 136538, 136539, 136540, 136541, 136542, 136543, 136544, 136545, 136546, 136547, 136548, 136549, 136550, 136551, 136552, 136553, 136554, 136555, 136556, 136557, 136558, 136559, 136560, 136561, 136562, 136563, 136564, 136565, 136566, 136567, 136568, 136569, 136570, 136571, 136572, 136573, 136574, 136575, 136576, 136577, 136578, 136579, 136580, 136581, 136582, 136583, 136584, 136585, 136586, 136587, 136588, 136589, 136590, 136591, 136592, 136593, 136594, 136595, 136596, 136597, 136598, 136599, 136600, 136601, 136602, 136603, 136604, 136605, 136606, 136607, 136608, 136609, 136610, 136611, 136612, 136613, 136614, 136615, 136616, 136617, 136618, 136619, 136620, 136621, 136622, 136623, 136624, 136625) c6(136626, 136627, 136628, 136629, 136630) c7(T, dt, kh, dD, AL, tp, fG, al, rl, aza, cz, n, eh, v, j, ci, cLE, eq, ad, Na, av, ft, F, uT, amJ, nX, ju, aT, Nc, cBf, ae, cpm, sj, uQ, aoa, bf, aW, Y, eZ, r, rM, hp, g, cl, iV, t, bwe, uC, op, D, sS, apM, eM, nB, wK, vA, cLD, bm, dy, m, y, iu); #c1(TGFB1) c2(NP_000349) c3(transforming growth factor-beta-induced protein ig-h3 precursor) c4(7632, 7633, 7634) c5(7635, 7636, 7637, 7638, 7639, 7640, 7641, 7642, 7643, 7644, 7645, 7646, 7647, 7648, 7649, 7650, 7651, 7652) c6( ) c7(Mb, T, dD, aC, id, fG, al, cLI, j, ci, ur, uu, eq, IR, q, ad, eA, av, iu, aOu, py, cLH, bFI, dv, ah, ey, H, bXu, ae, aPB, uX, cLK, Lu, cLG, bwk, Y, Ia, Ia, cLF, boD, t, bz, pb, cm, adz, kT, gk, cLJ, cLM, dy, m, R, cLL, y, it, B, jr); #c1(TGFBR1) c2(NP_001124388) c3(TGF-beta receptor type-1 isoform 2 precursor) c4(48777, 48778) c5(48779, 48780, 48781, 48782, 48783, 48784, 48785, 48786, 48787, 48788, 48789) c6( ) c7(bM, T, aC, if, e, al, Av, aza, bB, IR, ci, Na, AW, aE, Ds, hH, eL, hm, yo, aiV, aW, hl, g, eF, bw, y, eM, vA, cj, uo, Dt, k, Hb, m, Th, asW, vl, brL, tp, aj, Mi, nA, qN, brK, ai, ft, kl, dL, Ck, fQ, kp, alf, dw, op, hk, bm, at, YH, bD, Pr, B, Dw, dA, yk, aA, cR, cz, wo, Eh, q, nX, yg, aT, bfq, rv, ae, qw, bf, xU, s, Y, yL, r, en, t, iK, pb, amF, ac, dy, bt, iW, atS, jh, ad, av, F, yt, IQ, WW, ff, eH, eZ, aF, si, bz, cLB, es, brG, bE, aS, be, IC, X, us); #c1(TGFBR1) c2(NP_004603) c3(TGF-beta receptor type-1 isoform 1 precursor) c4(148068, 148069, 148070) c5(148071, 148072, 148073, 148074, 148075, 148076, 148077, 148078, 148079, 148080, 148081, 148082, 148083, 148084, 148085, 148086, 148087, 148088, 148089) c6( ) c7(bM, T, aC, if, e, al, Av, aza, bB, IR, ci, Na, AW, aE, Ds, hH, eL, hm, yo, aiV, aW, hl, g, eF, bw, y, eM, vA, cj, uo, Dt, k, Hb, m, Th, asW, vl, brL, tp, aj, Mi, nA, qN, brK, ai, ft, kl, dL, Ck, fQ, kp, alf, dw, op, hk, bm, at, YH, bD, Pr, B, Dw, dA, yk, aA, cR, cz, wo, Eh, q, nX, yg, aT, bfq, rv, ae, qw, bf, xU, s, Y, yL, r, en, t, iK, pb, amF, ac, dy, bt, iW, atS, jh, ad, av, F, yt, IQ, WW, ff, eH, eZ, aF, si, bz, cLB, es, brG, bE, aS, be, IC, X, us); #c1(TGFBR2) c2(NP_001020018) c3(TGF-beta receptor type-2 isoform A precursor) c4(28055) c5(28056, 28057, 28058, 28059, 28060, 28061, 28062) c6( ) c7(oO, bM, T, ID, Ap, aC, e, al, Av, aza, bB, aeu, ur, ci, qj, IR, ip, Na, AW, aE, iv, cLP, K, hu, be, aiJ, Qe, Iy, aW, Az, nY, uY, Au, g, bw, eM, nB, cj, uo, k, m, Xu, iu, brF, vl, brL, tp, RX, ht, aw, n, Mi, fr, uE, nA, bao, hr, Bl, ft, jz, zw, IG, Gw, hB, dx, bhg, fQ, kp, yq, Ix, Qy, bP, Qu, cLN, hL, aXv, pg, bm, bD, Pr, B, it, bL, fM, eR, fG, oe, rf, aA, cz, ti, hy, j, Eh, q, eA, cLO, brH, nX, afQ, yg, aT, Tj, ae, qw, bf, s, oV, Y, yL, fO, r, aYp, en, cl, t, iK, pb, amF, ck, cT, sS, ac, DW, dy, im, JO, GI, iW, atS, rl, jh, uu, ad, BY, av, F, brB, io, ji, baU, WW, BO, ff, xs, eZ, rM, aF, si, iV, bz, eK, RV, brG, bE, aS, be, Gu, IC, X, us); #c1(TGFBR2) c2(NP_003233) c3(TGF-beta receptor type-2 isoform B precursor) c4(136645) c5(136646, 136647, 136648, 136649, 136650, 136651) c6( ) c7(oO, bM, T, ID, Ap, aC, e, al, Av, aza, bB, aeu, ur, ci, qj, IR, ip, Na, AW, aE, iv, cLP, K, hu, be, aiJ, Qe, Iy, aW, Az, nY, uY, Au, g, bw, eM, nB, cj, uo, k, m, Xu, iu, brF, vl, brL, tp, RX, ht, aw, n, Mi, fr, uE, nA, bao, hr, Bl, ft, jz, zw, IG, Gw, hB, dx, bhg, fQ, kp, yq, Ix, Qy, bP, Qu, cLN, hL, aXv, pg, bm, bD, Pr, B, it, bL, fM, eR, fG, oe, rf, aA, cz, ti, hy, j, Eh, q, eA, cLO, brH, nX, afQ, yg, aT, Tj, ae, qw, bf, s, oV, Y, yL, fD, r, aYp, en, cl, t, iK, pb, amF, ck, cT, sS, ac, DW, dy, im, JO, GI, iW, atS, rl, jh, uu, ad, BY, av, F, brB, io, ji, baU, WW, BO, ff, xs, eZ, rM, aF, si, iV, bz, eK, RV, brG, bE, aS, be, Gu, IC, X, us); #c1(TGFBR2) c2(XP_011532345) c3(TGF-beta receptor type-2 isoform X1) c4(328499) c5(328500) c6( ) c7(nO, bM, T, ID, Ap, aC, e, al, Av, aza, bB, aeu, ur, ci, qj, IR, ip, Na, AW, aE, iv, cLP, K, hu, be, aiJ, Qe, Iy, aW, Az, nY, uY, Au, g, bw, eM, nB, cj, uo, k, m, Xu, iu, brF, vl, brL, tp, RX, ht, aw, n, Mi, fr, uE, nA, bao, hr, Bl, ft, jz, zw, IG, Gw, hB, dx, bhg, fQ, kp, yq, Ix, Qy, bP, Qu, cLN, hL, aXv, pg, bm, bD, Pr, B, it, bL, fM, eR, fG, oe, rf, aA, cz, ti, hy, j, Eh, q, eA, cLO, brH, nX, afQ, yg, aT, Tj, ae, qw, bf, s, oV, Y, yL, fO, r, aYp, en, cl, t, iK, pb, amF, ck, cT, sS, ac, DW, dy, im, JO, GI, iW, atS, rl, jh, uu, ad, BY, av, F, brB, io, ji, baU, WW, BO, ff, xs, eZ, rM, aF, si, iV, bz, eK, RV, brG, bE, aS, be, Gu, IC, X, us); #c1(TGFBR2) c2(XP_011532346) c3(TGF-beta receptor type-2 isoform X2) c4(328501) c5( ) c6( ) c7(oO, bM, T, ID, Ap, aC, e, al, Av, aza, bB, aeu, ur, ci, qj, IR, ip, Na, AW, aE, iv, cLP, K, hu, be, aiJ, Qe, Iy, aW, Az, nY, uY, Au, g, bw, eM, nB, cj, uo, k, m, Xu, iu, brF, vl, brL, tp, RX, ht, aw, n, Mi, fr, uE, nA, bao, hr, Bl, ft, jz, zw, IG, Gw, hB, dx, bhg, fQ, kp, yq, Ix, Qy, bP, Qu, cLN, hL, aXv, pg, bm, bD, Pr, B, it, hL, fM, eR, fG, oe, rf, aA, cz, ti, hy, j, Eh, q, eA, cLO, brH, nX, afQ, yg, aT, Tj, ae, qw, bf, s, oV, Y, yL, fO, r, aYp, en, cl, t, iK, pb, amF, ck, cT, sS, ac, DW, dy, im, JO, GI, iW, atS, rl, jh, uu, ad, BY, av, F, brB, io, ji, baU, WW, BO, ff, xs, eZ, rM, aF, si, iV, bz, eK, RV, brG, bE, aS, be, Gu, IC, X, us); #c1(TGFBR2) c2(XP_011532347) c3(TGF-beta receptor type-2 isoform X3) c4( ) c5(328502, 328503, 328504, 328505, 328506, 328507, 328508, 328509, 328510, 328511) c6( ) c7(oO, bM, T, ID, Ap, aC, e, al, Av, aza, bB, aeu, ur, ci, qj, IR, ip, Na, AW, aE, iv, cLP, K, hu, be, aiJ, Qe, Iy, aW, Az, nY, uY, Au, g, bw, eM, nB, cj, uo, k, m, Xu, iu, brF, vl, brL, tp, RX, ht, aw, n, Mi, fr, uE, nA, bao, hr, Bl, ft, jz, zw, IG, Gw, hB, dx, bhg, fQ, kp, yq, Ix, Qy, bP, Qu, cLN, hL, aXv, pg, bm, bD, Pr, B, it, hL, fM, eR, fG, oe, rf, aA, cz, ti, hy, j, Eh, q, eA, cLO, brH, nX, afQ, yg, aT, Tj, ae, qw, bf, s, oV, Y, yL, fO, r, aYp, en, cl, t, iK, pb, amF, ck, cT, sS, ac, DW, dy, im, JO, GI, iW, atS, rl, jh, uu, ad, BY, av, F, brB, io, ji, baU, WW, BO, ff, xs, eZ, rM, aF, si, iV, bz, eK, RV, brG, bE, aS, be, Gu, IC, X, us); #c1(TGFBRAPI) c2(NP_001136093) c3(transforming growth factor-beta receptor-associated protein 1) c4(54315, 54316) c5(54317, 54318, 54319, 54320, 54321, 54322, 54323, 54324, 54325, 54326, 54327, 54328, 54329, 54330, 54331, 54332) c6( ) c7(T, F, iQ, tL, aW, ht, aT, r, K, uE, hu, it, q); #c1(TGIF1) c2(NP_001265611) c3(homeobox protein TGIF1 isoform e) c4( ) c5(98973, 98974, 98975) c6( ) c7(asg, s, bPI, aBU, YX, bPt, FB, aJ, QM, Be, ZW, ff, gl, dL, bl, bd, en, eL); #c1(TGIF1) c2(NP_001265613) c3(homeobox protein TGIF1 isoform c) c4(98976) c5(98977, 98978, 98979, 98980, 98981, 98982, 98983, 98984, 98985, 98986, 98987, 98988, 98989, 98990, 98991, 98992, 98993) c6( ) c7(asg, s, bPI, aBU, YX, bPt, FB, aJ, QM, Be, ZW, ff, gl, dL, bl, bd, en, eL); #c1(TGIF1) c2(NP_733796) c3(homeobox protein TGIF1 isoform a) c4(247127) c5(247128, 247129, 247130, 247131, 247132, 247133, 247134, 247135, 247136, 247137, 247138) c6( ) c7(asg, s, bPI, aBU, YX, bPt, FB, aJ, QM, Be, ZW, ff, gl, dL, bl, bd, en, eL); #c1(TGIF1) c2(NP_775299) c3(homeobox protein TGIF1 isoform b) c4(249938, 249939, 249940, 249941, 249942, 249943, 249944, 249945, 249946) c5(249947, 249948, 249949, 249950, 249951, 249952, 249953, 249954, 249955, 249956) c6( ) c7(asg, s, bPI, aBU, YX, bPt, FB, aJ, QM, Be, ZW, ff, gl, dL, bl, bd, en, eL); #c1(TGIF1) c2(XP_011524037) c3(homeobox protein TGIF1 isoform X1) c4( ) c5(318566, 318567, 318568, 318569, 318570, 318571, 318572, 318573, 318574, 318575, 318576, 318577, 318578, 318579, 318580, 318581, 318582, 318583, 318584, 318585, 318586, 318587, 318588, 318589, 318590, 318591, 318592, 318593, 318594, 318595, 318596, 318597, 318598, 318599, 318600, 318601, 318602, 318603, 318604, 318605, 318606, 318607, 318608, 318609, 318610, 318611, 318612, 318613, 318614, 318615, 318616, 318617, 318618, 318619, 318620) c6( ) c7(asg, s, bPI, aBU, YX, bPt, FB, aJ, QM, Be, ZW, ff, gl, dL, bl, bd, en, eL); #c1(TGIF2) c2(NP_001186444) c3(homeobox protein TGIF2) c4(77654, 77655) c5(77656, 77657, 77658, 77659, 77660, 77661, 77662, 77663, 77664, 77665, 77666, 77667, 77668, 77669, 77670, 77671, 77672, 77673, 77674, 77675) c6( ) c7(jf, ZW, NT); #c1(TGIF2-C20orf24) c2(NP_001186464) c3(TGIF2-C20orf24 protein) c4(77676) c5(77677, 77678, 77679, 77680, 77681, 77682) c6( ) c7(jf, ZW, NT); #c1(TGIF2LX) c2(NP_620410) c3(homeobox protein TGIF2LX) c4(237575) c5(237576, 237577, 237578, 237579, 237580, 237581, 237582, 237583, 237584, 237585) c6( ) c7(vJ, ae, iI, oe, ad); #c1(TGM1) c2(NP_000350) c3(protein-glutamine gamma-glutamyltransferase K) c4(7653, 7654, 7655, 7656, 7657, 7658) c5(7659, 7660, 7661, 7662, 7663, 7664, 7665, 7666, 7667, 7668, 7669, 7670, 7671, 7672, 7673, 7674, 7675, 7676, 7677, 7678, 7679, 7680, 7681, 7682, 7683, 7684, 7685, 7686, 7687, 7688, 7689, 7690, 7691, 7692, 7693, 7694, 7695, 7696, 7697, 7698, 7699) c6( ) c7(xS, cLR, mI, rl, n, btu, ad, av, btD, ft, bnC, Tt, buR, aEJ, fn, dL, IQ, cLT, jj, ae, af, cLQ, oV, ff, LO, hl, cr, rM, hQ, en, eE, bz, iq, bjw, rR, eM, Ts, IV, U, NI, at, cLS, act); #c1(TGM2) c2(NP_945189) c3(protein-glutamine gamma-glutamyltransferase 2 isoform b) c4( ) c5(260717, 260718, 260719, 260720, 260721, 260722, 260723, 260724, 260725, 260726, 260727, 260728) c6( ) c7(bM, T, aC, al, ci, aR, ip, x, aE, K, eL, cp, eG, dH, aW, g, cm, aAW, biO, eM, mx, U, QF, m, k, act, Zo, pG, ht, n, aj, fr, ju, PD, ZN, he, Ha, A, Ib, bJi, kp, dw, btK, vD, dB, Qu, bo, Po, B, bL, dA, cz, q, J, eA, nv, Qg, aT, cy, btE, bK, jj, ae, Lu, s, iU, Y, r, Io, en, t, rR, ac, c, pZ, IV, cLU, mf, np, VB, id, Fb, fu, ad, hD, bj, WZ, d, IU, asf, ff, xs, hp, app, iV, bz, kN, Bv, Hs, cP, be, BA); #c1(TGM2) c2(XP_011527331) c3(protein-glutamine gamma-glutamyltransferase 2 isoform X1) c4(321954, 321955, 321956, 321957, 321958) c5(321959, 321960, 321961, 321962, 321963, 321964, 321965, 321966, 321967, 321968, 321969, 321970, 321971, 321972, 321973, 321974, 321975, 321976) c6( ) c7(bM, T, aC, al, ci, aR, ip, x, aE, K, eL, cp, eG, dH, aW, g, cm, aAW, biO, eM, mx, U, QF, m, k, act, Zo, pG, ht, n, aj, fr, ju, PD, ZN, he, Ha, A, Ib, bJi, kp, dw, btK, vD, dB, Qu, bo, Po, B, bL, dA, cz, q, J, eA, nv, Qg, aT, cy, btE, bK, jj, ae, Lu, s, iU, Y, r, Io, en, t, rR, ac, c, pZ, IV, cLU, mf, np, VB, id, Fb, fu, ad, hD, bj, WZ, d, IU, asf, ff, xs, hp, app, iV, bz, kN, Bv, Hs, cP, be, BA); #c1(TGM3) c2(NP_003236) c3(protein-glutamine gamma-glutamyltransferase E) c4(136652, 136653) c5(136654, 136655, 136656, 136657, 136658, 136659, 136660, 136661, 136662, 136663, 136664, 136665) c6( ) c7(T, sS, rR, IV, ff, ht, cr, aT, IQ, en, hu, eE); #c1(TGM4) c2(NP_003232) c3(protein-glutamine gamma-glutamyltransferase 4) c4(136638) c5(136639, 136640, 136641, 136642, 136643, 136644) c6( ) c7(vH, uz, ae, ad); #c1(TGM5) c2(NP_004236) c3(protein-glutamine gamma-glutamyltransferase 5 isoform 2) c4(144509) c5(144510, 144511, 144512, 144513, 144514, 144515) c6( ) c7(av, aFQ, kB, cr, rf, IO, IQ, eE, cLV); #c1(TGM5) c2(NP_963925) c3(protein-glutamine gamma-glutamyltransferase 5 isoform 1) c4(262577, 262578) c5(262579, 262580, 262581, 262582, 262583, 262584, 262585, 262586, 262587, 262588, 262589, 262590) c6( ) c7(av, aFQ, kB, cr, rf, IO, IQ, eE, cLV); #c1(TGM6) c2(NP_001241663) c3(protein-glutamine gamma-glutamyltransferase 6 isoform 2) c4(89021) c5(89022, 89023, 89024, 89025, 89026, 89027) c6( ) c7(ac, kB, bJi, rf, IO, ht, aR, cLW); #c1(TGM6) c2(NP_945345) c3(protein-glutamine gamma-glutamyltransferase 6 isoform 1) c4(260843) c5(260844, 260845, 260846, 260847, 260848, 260849) c6( ) c7(ac, kB, bJi, rf, IO, ht, aR, cLW); #c1(TGM7) c2(NP_443187) c3(protein-glutamine gamma-glutamyltransferase Z) c4(229760) c5(229761, 229762, 229763, 229764, 229765, 229766) c6( ) c7(aW, aT); #c1(TG0LN2) c2(NP_001193770) c3(trans-Golgi network integral membrane protein 2 isoform 3 precursor) c4(82565) c5(82566, 82567, 82568, 82569, 82570, 82571) c6( ) c7(hz, bS, cA, afu); #c1(TG0LN2) c2(NP_001193773) c3(trans-Golgi network integral membrane protein 2 isoform 4 precursor) c4(82572, 82573) c5(82574, 82575, 82576, 82577, 82578, 82579, 82580, 82581, 82582, 82583, 82584, 82585) c6( ) c7(hz, bS, cA, afu); #c1(TG0LN2) c2(NP_006455) c3(trans-Golgi network integral membrane protein 2 isoform 1 precursor) c4(165354) c5(165355, 165356, 165357, 165358, 165359, 165360) c6( ) c7(hz, bS, cA, afu); #c1(TGS1) c2(NP_079107) c3(trimethylguanosine synthase) c4(217054) c5(217055, 217056, 217057, 217058, 217059, 217060) c6( ) c7(cm, T, bz, dA); #c1(TH) c2(NP_000351) c3(tyrosine 3-monooxygenase isoform b) c4(7700) c5(7701, 7702, 7703, 7704, 7705, 7706) c6( ) c7(bM, T, os, Th, e, aAx, Jd, qj, aR, aji, fm, aU, K, cm, uC, mZ, yl, Kv, QF, uJ, act, aWX, rt, bfb, IT, RX, aw, adk, aj, ct, nA, cd, eW, Ak, h, aNU, DM, mY, mV, he, bAI, dx, mU, bmc, A, cly, fQ, mX, cv, bJ, cA, bo, sZ, B, mT, bL, oe, aOH, aA, cz, mS, wo, v, ON, avO, wy, V, J, hb, HC, bK, bq, an, ae, af, eu, ak, kl, Qr, yL, akt, Io, bN, Qi, pa, bAn, ac, HK, VB, wi, ha, uG, jh, acU, oZ, bS, uu, qi, aue, xt, ad, Tg, agd, mW, sO, bma, Sb, na, Gv, aF, EZ, qa, gZ, ei, pC); #c1(TH) c2(NP_954986) c3(tyrosine 3-monooxygenase isoform a) c4(261506) c5(261507, 261508, 261509, 261510, 261511, 261512, 261513) c6( ) c7(bM, T, os, Th, e, aAx, Jd, qj, aR, aji, fm, aU, K, cm, uC, mZ, yl, Kv, QF, uJ, act, aWX, rt, bfb, IT, RX, aw, adk, aj, ct, nA, cd, eW, Ak, h, aNU, DM, mY, mV, he, bAI, dx, mU, bmc, A, cly, fQ, mX, cv, bJ, cA, bo, sZ, B, mT, bL, oe, aOH, aA, cz, mS, wo, v, ON, avO, wy, V, J, hb, HC, bK, bq, an, ae, af, eu, ak, kl, Qr, yL, akt, Io, bN, Qi, pa, bAn, ac, HK, VB, wi, ha, uG, jh, acU, oZ, bS, uu, qi, aue, xt, ad, Tg, agd, mW, sO, bma, Sb, na, Gv, aF, EZ, qa, gZ, ei, pC); #c1(TH) c2(NP_954987) c3(tyrosine 3-monooxygenase isoform c) c4(261514) c5(261515, 261516, 261517, 261518, 261519, 261520) c6( ) c7(bM, T, os, Th, e, aAx, Jd, qj, aR, aji, fm, aU, K, cm, uC, ml, yl, Kv, QF, uJ, act, aWX, rt, bfb, IT, RX, aw, adk, aj, ct, nA, cd, eW, Ak, h, aNU, DM, mY, mV, hc, bAI, dx, mU, bmc, A, cly, fQ, mX, cv, bJ, cA, bo, sZ, B, mT, bL, oe, aOH, aA, cz, mS, wo, v, ON, avO, wy, V, J, hb, HC, bK, bq, an, ae, af, eu, ak, kl, Qr, yL, akt, Io, bN, Qi, pa, bAn, ac, HK, VB, wi, ha, uG, jh, acU, oZ, bS, uu, qi, aue, xt, ad, Tg, agd, mW, sO, bma, Sb, na, Gv, aF, EZ, qa, gZ, ei, pC); #c1(TH) c2(XP_011518637) c3(tyrosine 3-monooxygenase isoform X1) c4(312957) c5(312958, 312959, 312960, 312961, 312962, 312963) c6( ) c7(bM, T, os, Th, e, aAx, Jd, qj, aR, aji, fm, aU, K, cm, uC, mZ, yl, Kv, QF, uJ, act, aWX, rt, bfb, IT, RX, aw, adk, aj, ct, nA, cd, eW, Ak, h, aNU, DM, mY, mV, hc, bAI, dx, mU, bmc, A, cly, fQ, mX, cv, bJ, cA, bo, sZ, B, mT, bL, oe, aOH, aA, cz, mS, wo, v, ON, avO, wy, V, J, hb, HC, bK, bq, an, ae, af, eu, ak, kl, Qr, yL, akt, Io, bN, Qi, pa, bAn, ac, HK, VB, wi, ha, uG, jh, acU, aZ, bS, uu, qi, aue, xt, ad, Tg, agd, mW, sO, bma, Sb, na, Gv, aF, EZ, qa, gZ, ei, pC); #c1(THADA) c2(NP_001077422) c3(thyroid adenoma-associated protein isoform a) c4(37835, 37836) c5(37837, 37838, 37839, 37840, 37841, 37842, 37843, 37844, 37845, 37846, 37847, 37848, 37849, 37850, 37851, 37852, 37853, 37854, 37855, 37856, 37857, 37858) c6( ) c7(bL, kl, s, al, h, aj, v, AN, ci, Nc, cl, J, bvU, ad); #c1(THADA) c2(NP_001258573) c3(thyroid adenoma-associated protein isoform c) c4(96160) c5(96161, 96162, 96163, 96164, 96165, 96166) c6( ) c7(bL, kl, s, al, h, aj, v, AN, ci, Nc, cl, J, bvU, ad); #c1(THADA) c2(XP_006712128) c3(thyroid adenoma-associated protein isoform X5) c4(286417) c5(286418, 286419, 286420, 286421, 286422, 286423) c6( ) c7(bL, kl, s, al, h, aj, v, AN, ci, Nc, cl, J, bvU, ad); #c1(THADA) c2(XP_006712131) c3(thyroid adenoma-associated protein isoform X8) c4(286424) c5( ) c6( ) c7(bL, kl, s, aZ, h, aj, v, AN, ci, Nc, cl, J, bvU, ad); #c1(THAP1) c2(NP_060575) c3(THAP domain-containing protein 1 isoform 1) c4(196630) c5(196631, 196632, 196633, 196634, 196635, 196636, 196637) c6( ) c7(aOQ, an, Wk, akt, aGM, aU, WI, bAm, bAq, aUR, aUZ, Wm, cLX, bDO, aH); #c1(THAP1) c2(NP_945354) c3(THAP domain-containing protein 1 isoform 2) c4(260893) c5(260894, 260895, 260896, 260897, 260898) c6( ) c7(aOQ, an, Wk, akt, aGM, aU, WI, bAm, bAq, aUR, aUZ, Wm, cLX, bDO, aH); #c1(THAP10) c2(NP_064532) c3(THAP domain-containing protein ID) c4(202878) c5(202879, 202880, 202881, 202882, 202883, 202884) c6( ) c7(aW, aT); #c1(THAP11) c2(NP_065190) c3(THAP domain-containing protein 11) c4(204508) c5(204509, 204510, 204511, 204512, 204513, 204514) c6( ) c7(bB, aq, bE, B); #c1(THAP2) c2(NP_113623) c3(THAP domain-containing protein 2) c4(221785) c5(221786, 221787, 221788, 221789, 221790, 221791) c6( ) c7(j); #c1(THAP6) c2(NP_653322) c3(THAP domain-containing protein 6) c4(239584) c5(239585, 239586, 239587, 239588, 239589, 239590, 239591, 239592, 239593, 239594) c6( ) c7(cd); #c1(THAP6) c2(XP_005262831) c3(THAP domain-containing protein 6 isoform X5) c4( ) c5(278113, 278114, 278115, 278116, 278117, 278118, 278119, 278120, 278121, 278122, 278123, 278124) c6( ) c7(cd); #c1(THAP6) c2(XP_006714172) c3(THAP domain-containing protein 6 isoform X4) c4(287636) c5( ) c6( ) c7(cd); #c1(THBD) c2(NP_000352) c3(thrombomodulin precursor) c4(7707, 7708) c5(7709, 7710, 7711, 7712, 7713, 7714, 7715, 7716, 7717, 7718, 7719, 7720, 7721, 7722, 7723, 7724, 7725, 7726, 7727, 7728, 7729, 7730, 7731, 7732, 7733, 7734, 7735, 7736, 7737, 7738, 7739, 7740, 7741, 7742, 7743, 7744, 7745, 7746, 7747, 7748, 7749, 7750, 7751, 7752, 7753, 7754, 7755, 7756, 7757, 7758, 7759, 7760, 7761, 7762, 7763, 7764, 7765, 7766, 7767, 7768, 7769, 7770, 7771, 7772, 7773, 7774, 7775, 7776, 7777, 7778, 7779, 7780, 7781, 7782, 7783, 7784, 7785, 7786, 7787, 7788, 7789, 7790, 7791, 7792, 7793, 7794, 7795, 7796, 7797, 7798, 7799, 7800, 7801, 7802, 7803, 7804, 7805, 7806, 7807, 7808) c6(7809) c7(bM, T, ea, if, e, al, eh, ame, ci, vh, M, K, hH, eL, hm, ih, uC, aUF, eM, wE, dW, wx, m, eg, P, dD, cLY, aw, bd, qN, qW, ai, eW, ql, bud, cU, dL, wC, aJ, fQ, ahJ, kT, bm, E, B, bL, eR, DD, aGu, DV, aA, sM, cz, fF, j, C, mj, uT, cy, jj, bq, ae, af, bA, iZ, Y, DN, aDm, en, t, wg, ac, ig, AH, cS, dy, bt, hS, sY, qb, oR, eq, ad, bqs, Jm, cLZ, nH, Cj, jo, ff, eZ, dN, gE, aF, bz, eK, TA, DT, ag, gZ, aS, y, fh); #c1(THBS1) c2(NP_003237) c3(thrombospondin-1 precursor) c4(136666) c5(136667, 136668, 136669, 136670, 136671, 136672, 136673) c6( ) c7(ID, T, aC, Th, ea, if, e, al, aHx, WV, fd, bBR, bB, IR, ci, aR, ip, afr, aE, Bc, aEJ, rB, K, eL, cp, mH, Iy, DA, aW, Ih, g, eF, cm, uC, iP, qJ, eM, nB, iA, vy, cj, aZo, Hb, m, cE, dD, aw, fN, aj, fr, qN, zP, cd, ai, BI, gd, kH, Ne, IG, aOM, dL, h, wC, asp, aiB, aq, kp, dw, op, Ix, kT, Vy, cMb, hL, te, aiS, ph, Pr, B, it, cn, cir, DD, atB, Ju, WT, aA, v, j, qn, V, q, J, eA, eJ, DJ, Ig, aT, cy, jj, bq, kU, ae, jf, s, nO, oV, Y, r, aJI, Io, en, cl, aaO, t, pb, ck, nM, ac, iM, iQ, WU, agf, wR, mf, yH, fD, sY, id, aZ, rl, jh, dG, eq, ad, aiN, XB, Jm, dP, av, hd, Dq, aCJ, oj, uD, WW, uX, d, je, Di, qt, ff, eH, Ce, rM, dN, kD, aF, bz, aJx, DT, RV, zr, bE, cMa, gZ, aS, IC, kS, iu, y, BA); #c1(THBS1) c2(XP_011520273) c3(thrombospondin-1 isoform X2) c4(315113) c5(315114, 315115, 315116, 315117, 315118, 315119, 315120, 315121, 315122) c6( ) c7(ID, T, aC, Th, ea, if, e, al, aHx, WV, fd, bBR, bB, IR, ci, aR, ip, afr, aE, Bc, aEJ, rB, K, eL, cp, mH, Iy, DA, aW, Ih, g, eF, cm, uC, iP, qJ, eM, nB, iA, vy, cj, aZo, Hb, m, cE, dD, aw, fN, aj, fr, qN, zP, cd, ai, BI, gd, kH, Ne, IG, aOM, dL, h, wC, asp, aiB, aq, kp, dw, op, Ix, kT, Vy, cMb, hL, te, aiS, ph, Pr, B, it, cn, cir, DD, atB, Ju, WT, aA, v, j, Qn, V, q, J, eA, eJ, DJ, Ig, aT, cy, jj, bq, kU, ae, jf, s, nO, oV, Y, r, aJI, Io, en, cl, aaO, t, pb, ck, nM, ac, iM, iQ, WU, agf, wR, mf, yH, fD, sY, id, aZ, rl, jh, dG, eq, ad, aiN, XB, Jm, dP, av, hd, Dq, aCJ, oj, uD, WW, uX, d, je, Di, qt, ff, eH, Ce, rM, dN, kD, aF, bz, aJx, DT, RV, zr, bE, cMa, gZ, aS, IC, kS, iu, y, BA); #c1(THBS2) c2(NP_003238) c3(thrombospondin-2 precursor) c4(136674, 136675, 136676) c5(136677, 136678, 136679, 136680, 136681, 136682, 136683, 136684, 136685, 136686, 136687, 136688, 136689, 136690, 136691, 136692, 136693, 136694) c6( ) c7(bL, CX, T, dD, dA, eR, iB, yk, if, aw, cz, bB, n, wV, fd, j, ci, eq, qN, cd, ad, eA, rl, gd, aCV, aT, K, ae, aRs, aiB, s, cW, aW, Y, oV, ff, en, cl, g, t, op, Ek, aik, aDX, eM, bE, AM, hL, m, be, ei, fy); #c1(THBS3) c2(NP_001239537) c3(thrombospondin-3 isoform 3 precursor) c4(88477, 88478) c5(88479, 88480, 88481, 88482, 88483, 88484, 88485, 88486, 88487, 88488, 88489, 88490, 88491, 88492, 88493, 88494, 88495, 88496, 88497, 88498, 88499, 88500, 88501) c6(88502, 88503, 88504, 88505, 88506, 88507) c7(eF, eH); #c1(THBS3) c2(NP_009043) c3(thrombospondin-3 isoform 1 precursor) c4(170370, 170371, 170372) c5(170373, 170374, 170375, 170376, 170377, 170378, 170379, 170380) c6(170381, 170382) c7(eF, eH); #c1(THBS3) c2(XP_006711561) c3(thrombospondin-3 isoform X2) c4( ) c5(286125, 286126, 286127, 286128, 286129, 286130, 286131, 286132, 286133) c6(286134, 286135) c7(eF, eH); #c1(THBS4) c2(NP_003239) c3(thrombospondin-4 precursor) c4(136695) c5(136696, 136697, 136698, 136699, 136700, 136701, 136702, 136703) c6(136704, 136705) c7(bM, sY, T, dD, eR, ea, e, aw, cz, j, ci, eq, q, K, H, af, bkS, s, r, g, t, uC, ac, dh, aTW, L); #c1(THEG) c2(NP_057669) c3(testicular haploid expressed gene protein isoform 1) c4(192264) c5(192265, 192266, 192267, 192268, 192269) c6( ) c7(x, T, gU, cqN, ac, dB, Y, hF, PI, aA, vH, cm, aF, m, k, bu, t, pt, rc, UE); #c1(THEG) c2(NP_954672) c3(testicular haploid expressed gene protein isoform 2) c4(261233) c5(261234, 261235, 261236, 261237, 261238, 261239) c6( ) c7(x, T, gU, cqN, ac, dB, Y, hF, PI, aA, vH, cm, aF, m, k, bu, t, pt, rc, UE); #c1(THEG) c2(XP_011526351) c3(testicular haploid expressed gene protein isoform X1) c4( ) c5(320649) c6( ) c7(x, T, gU, cqN, ac, dB, Y, hF, PL aA, vH, cm, aF, m, k, bu, t, pt, rc, UE); #c1(THEM4) c2(NP_444283) c3(acyl-coenzyme A thioesterase THEM4) c4(230296) c5(230297, 230298, 230299, 230300, 230301, 230302) c6( ) c7(bL, d, B, eA, bz, eJ); #c1(THEM5) c2(NP_872384) c3(acyl-coenzyme A thioesterase THEM5) c4(256289, 256290) c5(256291, 256292, 256293, 256294, 256295, 256296, 256297, 256298, 256299, 256300, 256301, 256302) c6( ) c7(fc); #c1(THEM5) c2(XP_011507723) c3(acyl-coenzyme A thioesterase THEM5 isoform X1) c4( ) c5(297808) c6( ) c7(fc); #c1(THEM6) c2(NP_057731) c3(protein THEM6 precursor) c4(192549) c5(192550, 192551, 192552, 192553, 192554, 192555, 192556, 192557) c6(192558, 192559) c7(q, r); #c1(THEMIS) c2(NP_001010923) c3(protein THEMIS isoform 2) c4(24171, 24172, 24173) c5(24174, 24175, 24176, 24177, 24178, 24179, 24180, 24181, 24182, 24183, 24184, 24185, 24186, 24187, 24188, 24189, 24190, 24191) c6( ) c7(T, A, cc, ig, aM, LZ, aT, v, hp); #c1(THEMIS) c2(NP_001158157) c3(protein THEMIS isoform 1) c4(63209) c5(63210, 63211, 63212, 63213, 63214, 63215, 63216, 63217) c6( ) c7(T, A, cc, ig, aM, LZ, aT, v, hp); #c1(THEMIS) c2(XP_011534115) c3(protein THEMIS isoform X1) c4(330355) c5( ) c6( ) c7(T, A, cc, ig, aM, LZ, aT, v, hp); #c1(THEMIS2) c2(XP_011540747) c3(protein THEMIS2 isoform X1) c4(339320) c5(339321, 339322, 339323, 339324, 339325, 339326) c6( ) c7(ck, T, AM, aW, hL, aT, m, cl, t); #c1(THG1L) c2(NP_060342) c3(probable tRNA(His) guanylyltransferase) c4(195499, 195500) c5(195501, 195502, 195503, 195504, 195505, 195506) c6( ) c7(K, Hb); #c1(THNSL1) c2(NP_079114) c3(threonine synthase-like 1) c4(217092) c5(217093, 217094, 217095, 217096, 217097, 217098, 217099, 217100, 217101, 217102) c6( ) c7(cz); #c1(THNSL2) c2(NP_001231605) c3(threonine synthase-like 2 isoform 2) c4(87325) c5(87326, 87327, 87328, 87329, 87330, 87331, 87332, 87333, 87334, 87335, 87336, 87337, 87338, 87339) c6(87340, 87341, 87342, 87343) c7(uz, y, zf); #c1(THNSL2) c2(NP_001231607) c3(threonine synthase-like 2 isoform 3) c4( ) c5(87344, 87345, 87346, 87347, 87348, 87349, 87350) c6(87351, 87352) c7(uz, y, zf); #c1(THNSL2) c2(NP_060741) c3(threonine synthase-like 2 isoform 1) c4(197569) c5(197570, 197571, 197572, 197573, 197574, 197575, 197576, 197577, 197578, 197579, 197580, 197581, 197582, 197583) c6(197584, 197585, 197586, 197587) c7(uz, y, zf); #c1(THNSL2) c2(XP_005264460) c3(threonine synthase-like 2 isoform X9) c4(278941, 278942) c5(278943, 278944, 278945, 278946, 278947, 278948, 278949, 278950, 278951) c6(278952, 278953) c7(uz, y, zf); #c1(THNSL2) c2(XP_005264461) c3(threonine synthase-like 2 isoform X10) c4(278954) c5( ) c6( ) c7(uz, y, zf); #c1(THNSL2) c2(XP_006712107) c3(threonine synthase-like 2 isoform X13) c4( ) c5(286402, 286403, 286404, 286405, 286406, 286407, 286408, 286409) c6(286410, 286411) c7(uz, y, zf); #c1(THOC1) c2(NP_005122) c3(THO complex subunit 1) c4(153064) c5(153065, 153066, 153067, 153068, 153069, 153070) c6( ) c7(ae, T, aC, aE, fR, aW, aT, n, PQ, m, bK, g, t, bz, eJ, ad); #c1(THOC2) c2(NP_001075019) c3(THO complex subunit 2) c4(37162) c5(37163, 37164, 37165, 37166, 37167, 37168, 37169, 37170, 37171, 37172, 37173, 37174, 37175) c6( ) c7(Dr, bS); #c1(THOC2) c2(XP_011529673) c3(THO complex subunit 2 isoform X4) c4(325314) c5( ) c6( ) c7(Dr, bS); #c1(THOC2) c2(XP_011529676) c3(THO complex subunit 2 isoform X6) c4(325315) c5(325316, 325317, 325318, 325319, 325320, 325321, 325322, 325323, 325324, 325325, 325326) c6( ) c7(Dr, bS); #c1(THOC5) c2(NP_001002878) c3(THO complex subunit 5 homolog) c4(19687) c5(19688, 19689, 19690, 19691, 19692, 19693, 19694, 19695, 19696, 19697, 19698, 19699, 19700, 19701, 19702, 19703, 19704, 19705, 19706, 19707, 19708, 19709, 19710, 19711, 19712, 19713, 19714, 19715, 19716, 19717, 19718, 19719, 19720, 19721, 19722, 19723) c6( ) c7(ck, iU); #c1(THOC5) c2(XP_005261856) c3(THO complex subunit 5 homolog isoform X1) c4(277643, 277644, 277645) c5( ) c6( ) c7(ck, iU); #c1(THOC6) c2(NP_001135822) c3(THO complex subunit 6 homolog isoform 2) c4(53349) c5(53350, 53351, 53352, 53353, 53354, 53355) c6( ) c7(cMc); #c1(THOC6) c2(NP_077315) c3(THO complex subunit 6 homolog isoform 1) c4(215209) c5(215210, 215211, 215212, 215213, 215214, 215215) c6( ) c7(cMc); #c1(THOP1) c2(NP_003240) c3(thimet oligopeptidase) c4(136706, 136707) c5(136708, 136709, 136710, 136711, 136712, 136713) c6( ) c7(eY, ae, T, xc, aaH, Or, er, bm, cj, bK, ci, il, V, bz, fK, ad); #c1(THOP1) c2(XP_011526530) c3(thimet oligopeptidase isoform X1) c4( ) c5(320834, 320835, 320836, 320837, 320838, 320839) c6( ) c7(eY, ae, T, xc, aaH, Or, er, bm, cj, bK, ci, il, V, bz, fK, ad); #c1(THP0) c2(NP_001276932) c3(thrombopoietin isoform 5) c4( ) c5(108680, 108681, 108682) c6( ) c7(T, os, e, al, ci, x, Vp, xy, K, biP, DY, hl, bw, uC, cMd, iT, nB, cj, dW, k, hh, aeA, aw, br, cc, RN, h, bOY, hn, dL, DU, Hz, fQ, aq, aGd, pm, iO, cA, kz, pg, B, DM, dA, eR, jx, hz, j, C, Wa, biO, bKE, mP, dz, bK, iU, cMe, t, Cv, ck, pa, AH, hr, JH, gT, bt, vi, gV, sY, jh, bs, oZ, bLo, hF, av, hd, F, CJ, bpp, cMf, oW, hD, iY, yF, hG, et, kD, oK, gk, arB, pc, brt); #c1(THP0) c2(NP_001276951) c3(thrombopoietin isoform 2 precursor) c4(108703) c5(108704, 108705, 108706, 108707, 108708, 108709, 108710, 108711) c6(108712, 108713) c7(T, os, e, al, ci, x, Vp, xy, K, biP, DY, hl, bw, uC, cMd, iT, nB, cj, dW, k, hh, aeA, aw, br, cc, RN, h, bOY, hn, dL, DU, Hz, fQ, aq, aGd, pm, iO, cA, kz, pg, B, DM, dA, eR, jx, hz, j, C, Wa, biO, bKE, mP, dz, bK, iU, cMe, t, Cv, ck, pa, AH, hr, JH, gT, bt, vi, gV, sY, jh, bs, oZ, bLo, hF, av, hd, F, CJ, bpp, cMf, oW, hD, iY, yF, hG, et, kD, oK, gk, arB, pc, brt); #c1(THP0) c2(NP_001276956) c3(thrombopoietin isoform 4 precursor) c4(108716) c5(108717, 108718, 108719, 108720, 108721, 108722, 108723, 108724, 108725) c6(108726, 108727) c7(T, os, e, al, ci, x, Vp, xy, K, biP, DY, hl, bw, uC, cMd, iT, nB, cj, dW, k, hh, aeA, aw, hr, cc, RN, h, bOY, hn, dL, DU, Hz, fQ, aq, aGd, pm, iO, cA, kz, pg, B, DM, dA, eR, jx, hz, j, C, Wa, biO, bKE, mP, dz, bK, iU, cMe, t, Cv, ck, pa, AH, hr, JH, gT, bt, vi, gV, sY, jh, bs, oZ, bLo, hF, av, hd, F, CJ, bpp, cMf, oW, hD, iY, yF, hG, et, kD, oK, gk, arB, pc, brt); #c1(THP0) c2(NP_001276957) c3(thrombopoietin isoform 1 precursor) c4(108728, 108729) c5(108730, 108731, 108732, 108733, 108734, 108735, 108736, 108737, 108738, 108739, 108740, 108741, 108742, 108743, 108744, 108745, 108746, 108747, 108748, 108749, 108750, 108751, 108752, 108753, 108754, 108755, 108756, 108757, 108758, 108759, 108760, 108761, 108762, 108763, 108764, 108765, 108766, 108767, 108768, 108769, 108770, 108771, 108772, 108773, 108774, 108775, 108776, 108777, 108778, 108779, 108780, 108781, 108782, 108783, 108784, 108785, 108786, 108787, 108788, 108789, 108790, 108791, 108792, 108793, 108794, 108795, 108796, 108797, 108798, 108799, 108800, 108801, 108802, 108803, 108804, 108805, 108806, 108807, 108808, 108809, 108810, 108811, 108812, 108813, 108814, 108815, 108816, 108817, 108818, 108819, 108820, 108821, 108822, 108823, 108824, 108825, 108826, 108827, 108828, 108829, 108830, 108831, 108832, 108833, 108834, 108835, 108836) c6(108837, 108838, 108839, 108840, 108841, 108842, 108843) c7(T, os, e, al, ci, x, Vp, xy, K, biP, DY, hl, bw, uC, cMd, iT, nB, cj, dW, k, hh, aeA, aw, br, cc, RN, h, bOY, hn, dL, DU, Hz, fQ, aq, aGd, pm, iO, cA, kz, pg, B, DM, dA, eR, jx, hz, j, C, Wa, biO, bKE, mP, dz, bK, iU, cMe, t, Cv, ck, pa, AH, hr, JH, gT, bt, vi, gV, sY, jh, bs, oZ, bLo, hF, av, hd, F, CJ, bpp, cMf, oW, hD, iY, yF, hG, et, kD, oK, gk, arB, pc, brt); #c1(THRA) c2(NP_001177847) c3(thyroid hormone receptor alpha isoform 3) c4(73096) c5(73097, 73098, 73099, 73100, 73101, 73102) c6( ) c7(T, aA, cz, v, j, hX, dP, hd, no, bfJ, aT, jj, af, qw, s, qt, aW, gT, cMg, aq, aF, t, dr, Ew, GU, nB, eM, wk, m, hE, 8); #c1(THRA) c2(NP_003241) c3(thyroid hormone receptor alpha isoform 2) c4(136714) c5(136715, 136716, 136717, 136718, 136719, 136720, 136721, 136722, 136723, 136724, 136725) c6( ) c7(T, aA, cz, v, j, hX, dP, hd, no, bfJ, aT, jj, af, qw, s, qt, aW, gT, cMg, aq, aF, t, dr, Ew, GU, nB, eM, wk, m, hE, B); #c1(THRA) c2(NP_955366) c3(thyroid hormone receptor alpha isoform 1) c4(261570) c5(261571, 261572, 261573, 261574, 261575, 261576, 261577, 261578, 261579, 261580, 261581) c6( ) c7(T, aA, cz, v, j, hX, dP, hd, no, bfJ, aT, jj, af, qw, s, qt, aW, gT, cMg, aq, aF, t, dr, Ew, GU, nB, eM, wk, m, hE, B); #c1(THRB) c2(NP_001239563) c3(thyrnid hormone receptor beta) c4(88527, 88528) c5(88529, 88530, 88531, 88532, 88533, 88534, 88535, 88536, 88537, 88538, 88539, 88540, 88541, 88542, 88543, 88544, 88545, 88546, 88547, 88548, 88549, 88550, 88551) c6( ) c7(T, gU, dA, ht, bzb, cMj, hz, aj, v, fr, ci, ml, qN, J, av, cF, ft, hd, xy, py, Db, aT, hD, hu, cMi, af, yF, aW, AQ, Az, cMh, atf, g, dr, ck, pv, es, qJ, nM, sn, iA, nB, cMk, wk, hr, hR, B, VB); #c1(THRSP) c2(NP_003242) c3(thyroid hormone-inducible hepatic protein) c4(136726) c5(136727, 136728, 136729, 136730, 136731, 136732) c6( ) c7(zQ, aW, aT, n, v, ci, zP, B); #c1(THSD1) c2(NP_061146) c3(thrombospondin type-1 domain-containing protein 1 isoform 1 precursor) c4(199512, 199513, 199514) c5(199515, 199516, 199517, 199518, 199519, 199520, 199521, 199522, 199523, 199524, 199525, 199526, 199527, 199528, 199529, 199530, 199531, 199532, 199533, 199534, 199535, 199536, 199537, 199538) c6(199539, 199540, 199541, 199542, 199543, 199544) c7(T, it, q, hu, r); #c1(THSD1) c2(NP_954872) c3(thrombospondin type-1 domain-containing protein 1 isoform 2 precursor) c4(261485) c5(261486, 261487, 261488, 261489, 261490, 261491, 261492, 261493) c6(261494, 261495) c7(T, it, q, hu, r); #c1(THSD4) c2(NP_001273358) c3(thrombospondin type-1 domain-containing protein 4 isoform 2 precursor) c4(104733, 104734) c5(104735, 104736, 104737, 104738, 104739, 104740, 104741, 104742, 104743, 104744, 104745, 104746, 104747, 104748, 104749, 104750) c6(104751, 104752, 104753, 104754) c7(yE, at, Dp, gv, lB, bA); #c1(THSD4) c2(NP_079093) c3(thrombospondin type-1 domain-containing protein 4 isoform 1 precursor) c4(216990) c5(216991, 216992, 216993, 216994, 216995, 216996, 216997, 216998, 216999, 217000, 217001, 217002, 217003, 217004) c6(217005, 217006, 217007, 217008) c7(yE, at, Dp, gv, lB, bA); #c1(THSD7A) c2(NP_056019) c3(thrombospondin type-1 domain-containing protein 7A precursor) c4(185165, 185166) c5(185167, 185168, 185169, 185170, 185171, 185172, 185173, 185174, 185175, 185176, 185177, 185178) c6( ) c7(abV, yE, EQ, bK, fq, bA); #c1(THYN1) c2(NP_001032381) c3(thymocyte nuclear protein 1 isoform 2) c4( ) c5(31280, 31281, 31282, 31283, 31284) c6( ) c7(ad); #c1(THYN1) c2(NP_001032382) c3(thymocyte nuclear protein 1 isoform 1) c4( ) c5(31285, 31286, 31287, 31288, 31289, 31290, 31291, 31292, 31293, 31294, 31295) c6( ) c7(ad); #c1(THYN1) c2(XP_005271584) c3(thymocyte nuclear protein 1 isoform X1) c4(283481) c5(283482, 283483, 283484) c6( ) c7(ad); #c1(THYN1) c2(XP_005271585) c3(thymocyte nuclear protein 1 isoform X2) c4(283485) c5(283486) c6( ) c7(ad); #c1(TIA1) c2(NP_071320) c3(nucleolysin TIA-1 isoform P40 isoform 1) c4(210942) c5(210943, 210944, 210945, 210946, 210947, 210948) c6( ) c7(aoU, T, fM, fR, mr, Ol, iW, jh, hX, kf, K, li, lb, lo, vs, bji, Bu, c, cj, zv, y, B); #c1(TIA1) c2(NP_071505) c3(nucleolysin TIA-1 isoform p40 isoform 2) c4(211791) c5(211792, 211793, 211794, 211795, 211796, 211797) c6( ) c7(aoU, T, fM, fR, mr, Ol, iW, jh, hX, kf, K, li, lb, lo, vs, bji, Bu, c, cj, zv, y, B); #c1(TIA1) c2(XP_011531379) c3(nucleolysin TIA-1 isoform P40 isoform X1) c4(327383) c5(327384, 327385, 327386, 327387, 327388, 327389) c6( ) c7(aoU, T, fM, fR, mr, Ol, iW, jh, hX, kf, K, li, lb, lo, vs, bji, Bu, c, cj, zv, y, B); #c1(TIAF1) c2(NP_004731) c3(TGFB1-induced anti-apoptotic factor 1) c4(149148) c5(149149, 149150, 149151, 149152, 148153, 149154, 149155, 149156, 149157) c6( ) c7(T, af, K); #c1(TIAL1) c2(NP_001029097) c3(nucleolysin TIAR isoform 2) c4(30757) c5(30758, 30759, 30760, 30761, 30762, 30763) c6( ) c7(fR, aT, fe, lo, vs, K); #c1(TIAL1) c2(NP_003243) c3(nucleolysin TIAR isoform 1) c4(136733, 136734, 136735) c5(136736, 136737, 136738, 136739, 136740, 136741, 136742, 136743, 136744, 136745, 136746, 136747, 136748, 136749, 136750, 136751, 136752, 136753) c6( ) c7(fR, aT, fe, lo, vs, K); #c1(TIAL1) c2(XP_005270167) c3(nucleolysin TIAR isoform X2) c4(283195) c5(283196, 283197, 283198, 283199, 283200, 283201) c6( ) c7(fR, aT, fe, lo, vs, K); #c1(TIAM1) c2(XP_005261095) c3(T-lymphoma invasion and metastasis-inducing protein 1 isoform X1) c4(277183, 277184, 277185, 277186) c5(277187, 277188, 277189, 277190, 277191, 277192, 277193, 277194, 277195, 277196, 277197, 277198) c6( ) c7(T, aC, jh, aA, v, fr, ci, PJ, q, ad, hX, aE, aT, h, cp, Qe, B, aW, Y, r, aq, aF, aZg, f, cm, bP, c, bE, hk, bt, it, X); #c1(TIAM1) c2(XP_005261097) c3(T-lymphoma invasion and metastasis-inducing protein 1 isoform X2) c4( ) c5(277199, 277200, 277201, 277202, 277203, 277204, 277205, 277206, 277207, 277208, 277209, 277210) c6( ) c7(T, aC, jh, aA, v, fr, ci, PJ, q, ad, hX, aE, aT, h, cp, Qe, B, aW, Y, r, aq, aE, aZg, f, cm, bP, c, bE, hk, bt, it, X); #c1(TIAM2) c2(NP_036586) c3(T-lymphoma invasion and metastasis-inducing protein 2 isoform a) c4(174557, 174558, 174559, 174560, 174561, 174562, 174563, 174564, 174565, 174566, 174567) c5(174568, 174569, 174570, 174571, 174572, 174573, 174574, 174575, 174576, 174577, 174578, 174579, 174580, 174581, 174582, 174583, 174584, 174585, 174586, 174587, 174588, 174589, 174590, 174591, 174592, 174593, 174594, 174595, 174596, 174597, 174598, 174599, 174600, 174601, 174602, 174603, 174604, 174605, 174606, 174607, 174608, 174609, 174610, 174611, 174612, 174613, 174614, 174615, 174616, 174617, 174618, 174619, 174620, 174621, 174622, 174623, 174624, 174625, 174626, 174627, 174628, 174629, 174630, 174631, 174632, 174633, 174634, 174635, 174636, 174637) c6( ) c7(T, aq, bK, iR, lB, B); #c1(TICAM1) c2(NP_891549) c3(TIR domain-containing adapter molecule 1) c4(257266) c5(257267, 257268, 257269, 257270, 257271, 257272, 257273) c6( ) c7(Dw, cMl, jx, wV, C, aBl, atK, eW, aE, ds, cU, cy, eu, lo, hp, cMm, uF, pm, ac, NL, EY, fD, hh); #c1(TICAM2) c2(NP_067681) c3(TIR domain-containing adapter molecule 2) c4(209297) c5(209298, 209299, 209300, 209301, 209302, 209303) c6( ) c7(T, ea, if, fd, bB, ci, aE, il, Qk, K, eL, bc, xQ, yo, aW, as, cm, bw, GR, eM, nB, dc, ki, go, vA, cj, m, Hb, dD, NT, n, fr, qN, jz, h, dL, ge, aq, zZ, iO, bP, hL, hR, it, B, fM, aoE, aA, q, eA, XX, aT, dz, ae, af, jf, s, iU, Y, r, en, cl, t, iK, aEp, ck, nM, iM, dy, EY, bt, On, hS, hl, Ke, pY, jh, eq, ad, hX, hd, ib, fb, d, je, et, ff, apb, aF, uF, bz, bE, aS, EB); #c1(TICRR) c2(NP_689472) c3(treslin) c4(242811) c5(242812, 242813, 242814, 242815, 242816, 242817) c6( ) c7(bX); #c1(TIFA) c2(NP_443096) c3(TRAF-interacting protein with FHA domain-containing protein A) c4(229384, 229385) c5(229386, 229387, 229388, 229389, 229390, 229391, 229392, 229393, 229394, 229395, 229396, 229397, 229398, 229399, 229400, 229401) c6( ) c7(fq); #c1(TIGD2) c2(NP_663761) c3(tigger transposable element-derived protein 2) c4(241537) c5(241538, 241539, 241540, 241541, 241542, 241543) c6( ) c7(j); #c1(TIGIT) c2(NP_776160) c3(T-cell immunoreceptor with Ig and ITIM domains precursor) c4(250884, 250885) c5(250886, 250887, 250888, 250889, 250890, 250891, 250892, 250893, 250894, 250895, 250896, 250897, 250898, 250899, 250900, 250901) c6( ) c7(aw); #c1(TIMD4) c2(NP_001140198) c3(T-cell immunoglobulin and mucin domain-containing protein 4 isoform 2 precursor) c4(60061) c5(60062, 60063, 60064, 60065, 60066, 60067) c6( ) c7(bM, cT, nX, apJ, eZ, y, eh); #c1(TIMD4) c2(NP_612388) c3(T-cell immunoglobulin and mucin domain-containing protein 4 isoform 1 precursor) c4(236335) c5(236336, 236337, 236338, 236339, 236340, 236341) c6( ) c7(bM, cT, nX, apJ, eZ, y, eh); #c1(TIMELESS) c2(NP_003911) c3(protein timeless homolog) c4(142107) c5(142108, 142109, 142110, 142111, 142112, 142113, 142114) c6( ) c7(bM, T, if, Nt, bS, et, qN, Nv, V, ai, ad, eA, ft, tT, aT, h, alX, bK, ey, oi, uQ, iU, aW, hl, eZ, lo, Z, eE, bz, cT, eM, z, fD, bC, ei, hE, B, y, afX); #c1(TIMELESS) c2(XP_011537241) c3(protein timeless homolog isoform X1) c4(334967) c5(334968, 334969, 334970, 334871, 334972, 334973) c6( ) c7(bM, T, if, Nt, bS, et, qN, Nv, V, ai, ad, eA, ft, tT, aT, h, alX, bK, ey, oi, uQ, iU, aW, hl, eZ, lo, Z, eE, bz, cT, eM, z, fD, bC, ei, hE, B, y, afX); #c1(TIMM10) c2(NP_036588) c3(mitochondrial import inner membrane translocase subunit Tim10) c4(174645) c5(174646, 174647, 174648, 174649, 174650, 174651, 174652, 174653, 174654, 174655, 174656, 174657, 174658, 174659) c6( ) c7(bv); #c1(TIMM17A) c2(NP_006326) c3(mitochondrial import inner membrane translocase subunit Tim17-A) c4(164048) c5(164049, 164050, 164051, 164052, 164053, 164054) c6( ) c7(aW, kC, aT); #c1(TIMM21) c2(NP_054896) c3(mitochondrial import inner membrane translocase subunit Tim21 precursor) c4(178248) c5(178249, 178250, 178251, 178252, 178253, 178254, 178255, 178256) c6(178257, 178258) c7(W); #c1(TIMM22) c2(NP_037469) c3(mitochondrial import inner membrane translocase subunit Tim22) c4(175678) c5(175679, 175680, 175681, 175682, 175683, 175684) c6( ) c7(aPn); #c1(TIMM23) c2(NP_006318) c3(mitochondrial import inner membrane translocase subunit Tim23) c4(163964, 163965, 163966, 163967, 163968) c5(163969, 163970, 163971, 163972, 163973, 163974, 163975, 163976, 163977, 163978, 163979, 163980, 163981, 163982, 163983, 163984, 163985, 163986, 163987, 163988, 163989, 163990, 163991, 163992, 163993, 163994, 163995, 163996, 163997, 163998) c6( ) c7(afX); #c1(TIMM23) c2(XP_011537400) c3(mitochondrial import inner membrane translocase subunit Tim23 isoform X1) c4(335051) c5( ) c6( ) c7(afX); #c1(TIMM23) c2(XP_011537401) c3(mitochondrial import inner membrane translocase subunit Tim23 isoform X2) c4(335052) c5(335053, 335054, 335055, 335056, 335057, 335058, 335059, 335060, 335061, 335062, 335063, 335064, 335065, 335066, 335067, 335068, 335069, 335070) c6( ) c7(afX); #c1(TIMM44) c2(NP_006342) c3(mitochondrial import inner membrane translocase subunit TIM44) c4(164176) c5(164177, 164178, 164179, 164180, 164181, 164182) c6( ) c7(aj, hd, J); #c1(TIMM50) c2(NP_001001563) c3(mitochondrial import inner membrane translocase subunit TIM50) c4(18791, 18792) c5(18793, 18794, 18795, 18796, 18797, 18798) c6( ) c7(aW, eM, aT); #c1(TIMM50) c2(XP_011525793) c3(mitochondrial import inner membrane translocase subunit TIM50 isoform X1) c4( ) c5(320198, 320199, 320200, 320201, 320202, 320203) c6( ) c7(aW, eM, aT); #c1(TIMM8A) c2(NP_004076) c3(mitochondrial import inner membrane translocase subunit Tim8 A isoform 1) c4(143360) c5(143361, 143362, 143363, 143364, 143365, 143366) c6( ) c7(T, if, jh, aA, bB, it, vm, cMn, qN, q, eJ, eW, Ks, iu, aE, aT, aU, dL, eL, aW, Y, r, hQ, aq, aF, bho, t, bz, cm, iK, es, eM, iA, bE, mG, vA, U, m, Bh, B, afX); #c1(TIMM8B) c2(NP_036591) c3(mitochondrial import inner membrane translocase subunit Tim8 B) c4(174660, 174661) c5(174662, 174663, 174664, 174665, 174666, 174667, 174668, 174669, 174670, 174671, 174672, 174673) c6( ) c7(aw); #c1(TIMMDC1) c2(NP_057673) c3(complex I assembly factor TIMMDC1, mitochondrial precursor) c4(192277) c5(192278, 192279, 192280, 192281, 192282, 192283) c6( ) c7(bqS, be); #c1(TIMP1) c2(NP_003245) c3(metalloproteinase inhibitor 1 precursor) c4(136754, 136755, 136756, 136757) c5(136758, 136759, 136760, 136761, 136762, 136763, 136764, 136765, 136766, 136767, 136768, 136769, 136770, 136771, 136772, 136773, 136774, 136775, 136776, 136777, 136778, 136779, 136780, 136781, 136782, 136783, 136784, 136785, 136786) c6( ) c7(lD, bM, T, aC, fR, pf, ea, if, al, bEy, fd, cMp, bB, cL, aTy, zh, ci, lR, aY, HU, aR, ip, wa, x, Vp, Hr, xE, aE, Ma, ws, fm, K, hu, pk, ass, eL, Ur, cp, ly, ye, up, dH, aW, Rr, Du, hl, uY, bjk, g, as, pL, hJ, uC, eE, eF, mK, bw, aAW, y, fT, eM, nB, iT, wE, mx, vy, tV, nw, k, Hb, cMo, m, fy, R, hh, lS, ym, iu, Ro, ayw, dD, aFG, vl, aRX, aw, NT, qy, n, aj, fr, bd, pM, qN, bkU, cd, ai, ke, afR, Bl, cc, zY, ec, rC, gd, Ak, Lv, h, eV, dL, jl, aUm, ey, hB, aNj, pi, bzr, A, mR, aJ, bMq, fQ, hQ, aq, aGd, fe, pm, mo, cM, sE, avf, lx, kT, W, dB, NL, hk, Pl, Qu, hL, bm, at, uz, B, vQ, bL, Dw, fM, dA, eR, Dh, fG, lH, eX, aA, cz, v, j, C, V, q, J, er, eA, oT, Yn, cfd, qp, ceS, rS, aT, cy, Ex, bq, ae, af, kl, wr, bf, s, De, iU, Y, r, aYp, lo, en, cl, t, pb, ck, nM, ac, c, hc, gX, wq, mf, dy, Mn, JH, fD, Bd, bt, sY, iW, uG, jh, vr, eq, jE, ad, kL, afb, dP, aHF, wD, hd, F, alp, yt, oW, ah, bgr, Aa, nJ, uX, d, cfb, lR, lU, qZ, ff, xs, czY, eH, eZ, yy, dq, Ej, aF, hp, uF, Fq, iV, BG, bz, Hp, LB, D, alm, gk, bMX, bE, ll, sG, gZ, wz, aS, lf, X, us); #c1(TIMP1) c2(XP_005272702) c3(metalloproteinase inhibitor 1 isoform X1) c4(284152, 284153) c5(284154, 284155, 284156, 284157, 284158, 284159, 284160) c6( ) c7(lD, bM, T, aC, fR, pf, ea, if, al, bEy, fd, cMp, bB, cL, aTy, zh, ci, lR, aY, HU, aR, ip, wa, x, Vp, Hr, xE, aE, Ma, ws, fm, K, hu, pk, ass, eL, Ur, cp, ly, yo, up, dH, aW, Rr, Du, hl, uY, bjk, g, as, pL, hJ, uC, eE, eF, mK, bw, aAW, y, fT, eM, nB, iT, wE, mx, vy, tV, nw, k, Hb, cMo, m, fy, R, hh, lS, ym, iu, Ro, ayw, dD, aFG, vl, aRX, aw, NT, qy, n, aj, fr, bd, pM, qN, bkU, cd, ai, ke, afR, Bl, cc, zY, ec, rC, gd, Ak, Lv, h, eV, dL, jl, aUm, ey, hB, aNj, pl, bzr, A, mR, aJ, bMq, fQ, hQ, aq, aGd, fe, pm, mo, cM, sE, avf, lx, kT, W, dB, NL, hk, Pl, Qu, hL, bm, at, uz, B, vQ, bL, Dw, fM, dA, eR, Dh, fG, lH, eX, aA, cz, v, j, C, V, q, J, er, eA, oT, Yn, cfd, qp, ceS, rS, aT, cy, Ex, bq, ae, af, kl, wr, bf, s, De, iU, Y, r, aYp, lo, en, cl, t, pb, ck, nM, ac, c, hc, gX, wq, mf, dy, Mn, JH, fD, Bd, bt, sY, iW, uG, jh, vr, eq, jE, ad, kL, afb, dP, aHF, wD, hd, F, alp, yt, oW, ah, bgr, Aa, nJ, uX, d, cfb, lR, lU, qZ, ff, xs, czY, eH, eZ, yy, dq, Ej, aF, hp, uF, Eg, iV, BG, bz, Hp, LB, D, aim, gk, bMX, bE, ll, sG, gZ, wz, aS, lf, X, us); #c1(TIMP2) c2(NP_003246) c3(metalloproteinase inhibitor 2 precursor) c4(136787, 136788) c5(136789, 136790, 136791, 136792, 136793, 136794, 136795, 136796, 136797, 136798, 136799, 136800) c6( ) c7(T, aC, if, al, bEy, fd, bB, ci, Tz, ip, x, Na, dY, aE, M, eL, DA, eG, Jl, aW, uY, g, as, eF, cm, uC, bw, aAW, y, fT, eM, ki, vA, tV, k, m, gn, fy, Vj, iu, dD, aFG, vl, FG, aO, aw, NT, n, aj, fr, bd, qN, cd, ai, cc, Ak, h, eV, dL, jl, hB, cY, bzr, aJ, hQ, fe, aq, cM, sE, op, dB, hk, wk, Be, hL, at, uz, bm, Pr, B, ka, fM, dA, eR, mr, wL, eX, aA, cz, j, C, V, Eh, q, J, eA, qp, aT, Nc, bq, ae, af, bA, bf, iU, De, iZ, Ue, Y, r, uU, en, cl, bQ, t, nC, iK, pb, ck, ajl, rR, ac, c, dy, Gg, JH, bt, JO, hS, sY, iW, uG, jh, vr, eq, jE, ad, afb, wD, dP, hd, F, sN, io, ab, vc, nJ, WZ, mu, uX, xX, cfb, d, ff, xs, NH, eH, Ej, aF, bz, bE, azT, sG, aS, lf, X, us); #c1(TIMP3) c2(NP_000353) c3(metalloproteinase inhibitor 3 precursor) c4(7810, 7811) c5(7812, 7813, 7814, 7815, 7816, 7817, 7818, 7819, 7820, 7821, 7822, 7823, 7824) c6( ) c7(bM, T, fR, pf, ea, if, al, Xi, eh, bB, zh, ci, lR, Hr, ip, Na, dY, K, eL, cMq, aW, hl, g, Uk, iP, ba, eM, mx, bjY, U, aqV, uo, vy, nw, m, bJv, de, rt, cZ, dD, vl, sQ, tp, aw, n, aj, fr, qN, PJ, rP, cd, jz, lG, bci, dL, dd, db, A, qY, fe, aq, kp, W, Be, bm, uz, rx, ut, sZ, B, it, bL, dA, fG, aA, cz, v, j, AO, V, q, J, eA, BJ, aT, Nc, Ex, ae, jf, bf, s, Y, bg, r, en, cl, t, nC, btO, Dm, pb, iK, nM, ac, c, dh, aJQ, np, dy, bnl, vi, bGg, iW, vr, eq, ad, av, hd, F, ard, py, Sr, ah, Aa, aqX, jo, lQ, aNR, ji, nJ, uX, d, lR, qt, ff, xs, cr, aF, bz, ayj, iq, LB, es, TA, amS, nb, bE, aS, be, GF, y, us); #c1(TIMP4) c2(NP_003247) c3(metalloproteinase inhibitor 4 precursor) c4(136801) c5(136802, 136803, 136804, 136805, 136806, 136807) c6( ) c7(bL, T, fR, sQ, uv, al, jx, aw, aj, j, uE, aCQ, Fc, cd, J, ad, ai, er, eA, hd, F, Be, aT, h, cy, Ex, K, lQ, ae, Dl, d, De, aW, fO, as, pL, pb, Hp, LB, D, nB, dc, lf, bm, tV, uo, uz, ut, fy, B, y); #c1(TINAG) c2(NP_055279) c3(tubulointerstitial nephritis antigen) c4(180244, 180245) c5(180246, 180247, 180248, 180249, 180250, 180251, 180252) c6( ) c7(dy); #c1(TINAG) c2(XP_006715124) c3(tubulointerstitial nephritis antigen isoform X1) c4(288752) c5( ) c6( ) c7(dy); #c1(TINAG) C2(XP_006715126) c3(tubulointerstitial nephritis antigen isoform X3) c4( ) c5(288753, 288754, 288755, 288756, 288757, 288758, 288759, 288760, 288761, 288762, 288763) c6( ) c7(dy); #c1(TINAG) c2(XP_011512801) c3(tubulointerstitial nephritis antigen isoform X7) c4(303860, 303861) c5(303862, 303863, 303864, 303865, 303866, 303867, 303868, 303869, 303870, 303871, 303872, 303873) c6( ) c7(dy); #c1(TINF2) c2(NP_001092744) c3(TERF1-interacting nuclear factor 2 isoform 1) c4(39605) c5(39606, 39607, 39608, 39609, 39610, 39611, 39612) c6( ) c7(aA, ci, cMs, auf, nX, kH, cMr, pl, sb, Ng, je, byn, Y, cKZ, iM, aWZ, ajw, dW, aiS, oX, xb, aYd); #c1(TINF2) c2(NP_036593) c3(TERF1-interacting nuclear factor 2 isoform 2) c4(174674) c5(174675, 174676, 174677, 174678, 174679, 174680, 174681, 174682, 174683, 174684) c6( ) c7(aA, ci, cMs, auf, nX, kH, cMr, pl, sb, Ng, je, byn, Y, cKZ, iM, aWZ, ajw, dW, aiS, oX, xb, aYd); #c1(TINF2) c2(XP_005267586) c3(TERF1-interacting nuclear factor 2 isoform X2) c4(281024, 281025) c5(281026, 281027, 281028, 281029, 281030, 281031, 281032) c6( ) c7(aA, ci, cMs, auf, nX, kH, cMr, pi, sb, Ng, je, byn, Y, cKZ, iM, aWZ, ajw, dW, aiS, oX, xb, aYd); #c1(TIPARP) c2(NP_001171646) c3(TCDD-inducible poly [ADP-ribose] polymerase) c4(71107, 71108, 71109) c5(71110, 71111, 71112, 71113, 71114, 71115, 71116, 71117, 71118, 71119, 71120, 71121, 71122, 71123, 71124, 71125, 71126, 71127, 71128, 71129, 71130, 71131, 71132, 71133, 71134, 71135, 71136, 71137, 71138, 71139) c6( ) c7(bM, T, aw, aA, Hn, aj, qN, g, ad, eA, hX, eW, hd, aE, aT, h, cy, K, NM, ae, dx, cp, d, B, s, aW, Y, Yd, eH, ff, r, aF, hp, en, eF, t, cm, axG, bF, ac, c, nB, bE, m, hE, cnU, y); #c1(TIPIN) c2(NP_001276915) c3(TIMELESS-interacting protein isoform 2) c4( ) c5(108618, 108619, 108620, 108621, 108622) c6( ) c7(K); #c1(TIPIN) c2(NP_060328) c3(TIMELESS-interacting protein isoform 1) c4(195412) c5( ) c6( ) c7(K); #c1(TIPIN) c2(XP_005254578) c3(TIMELESS-interacting protein isoform X1) c4(273257) c5(273258, 273259, 273260, 273261, 273262, 273263, 273264) c6( ) c7(K); #c1(TIPRL) c2(NP_001026970) c3(TIP41-like protein isoform 2) c4(29998) c5(29999, 30000, 30001, 30002, 30003, 30004) c6( ) c7(B, bA, cz); #c1(TIPRL) c2(NP_690866) c3(TIP41-like protein isoform 1) c4(245019) c5(245020, 245021, 245022, 245023, 245024, 245025) c6( ) c7(B, bA, cz); #c1(TIRAP) c2(XP_005271456) c3(toll/interleukin-1 receptor domain-containing adapter protein isoform X3) c4( ) c5(283424, 283425, 283426, 283427, 283428) c6( ) c7(oO, T, fR, azW, aHV, if, ht, eX, aA, fF, BH, v, ci, C, eq, pH, q, ad, akU, Uh, dV, Os, aT, h, eV, bTf, iY, aaW, hu, lZ, aW, Zf, eZ, r, fe, aq, ls, aF, uF, aCK, eE, t, f, iK, ck, cMt, ig, ki, gX, Br, aYx, m, EY, fD, y, bt, B, aDj); #c1(TIRAP) c2(XP_011540883) c3(toll/interleukin-1 receptor domain-containing adapter protein isoform X2) c4(339402) c5(339403, 339404, 339405, 339406, 339407) c6( ) c7(oO, T, fR, azW, aHV, if, ht, eX, aA, fF, BH, v, ci, C, eg, pH, q, ad, akU, Uh, dV, Os, aT, h, eV, bTf, iY, aaW, hu, lZ, aW, Zf, eZ, r, fe, aq, ls, aF, uF, aCK, eE, t, f, iK, ck, cMt, ig, ki, gX, Br, aYx, m, EY, fD, y, bt, B, aDj); #c1(TIRAP) c2(XP_011540884) c3(toll/interleukin-1 receptor domain-containing adapter protein isoform X1) c4(339408, 339409) c5(339410, 339411, 339412, 339413, 339414, 339415, 339416, 339417, 339418, 339419, 339420, 339421, 339422, 339423, 339424, 339425) c6( ) c7(oO, T, fR, azW, aHV, if, ht, eX, aA, fF, BH, v, ci, C, eg, pH, q, ad, akU, Uh, dV, Os, aT, h, eV, bTf, iY, aaW, hu, lZ, aW, Zf, eZ, r, fe, aq, ls, aF, uF, aCK, eE, t, f, iK, ck, cMt, ig, ki, gX, Br, aYx, m, EY, fD, y, bt, B, aDj); #c1(TJP1) c2(NP_003248) c3(tight junction protein ZO-1 isoform a) c4(136808) c5( ) c6( ) c7(bM, atj, RX, jx, qW, cd, Bl, hb, zf, aT, lG, bq, dF, eu, A, aW, Y, fO, hp, hJ, nB, agl, wz, aS, B); #c1(TJP1) c2(NP_783297) c3(tight junction protein ZO-1 isoform b) c4(251579) c5( ) c6( ) c7(bM, atj, RX, jx, qW, cd, Bl, hb, zf, aT, lG, bq, dF, eu, A, aW, Y, fO, hp, hJ, nB, agl, wz, aS, B); #c1(TJP1) c2(XP_006725617) c3(tight junction protein ZO-1 isoform X2) c4( ) c5(296925, 296926, 296927, 296928, 296929, 296930) c6( ) c7(bM, atj, RX, jx, qW, cd, Bl, hb, zf, aT, lG, bq, dF, eu, A, aW, Y, fO, hp, hJ, nB, agl, wz, aS, B); #c1(TJP1) c2(XP_006725621) c3(tight junction protein ZO-1 isoform X9) c4( ) c5(29693q, 296932, 296933, 296934, 296935, 296936) c6( ) c7(bM, atj, RX, jx, qW, cd, Bl, hb, zf, aT, lG, bq, dF, eu, A, aW, Y, fO, hp, hJ, nB, agl, wz, aS, B); #c1(TJP2) c2(NP_001163885) c3(tight junction protein ZO-2 isoform 5) c4(66467) c5( ) c6( ) c7(Bl, cl, eJ, AO, qt, Y, cz, cL, v, ci, jw, Bh, anh, o, wT); #c1(TJP2) c2(NP_001163886) c3(tight junction protein ZO-2 isoform 4) c4(66468) c5(66469, 66470, 66471, 66472, 66473, 66474) c6( ) c7(Bl, cl, eJ, AO, qt, Y, cz, cL, v, ci, jw, Bh, anh, o, wT); #c1(TJP2) c2(NP_001163887) c3(tight junction protein ZO-2 isoform 3) c4(66475) c5(66476, 66477, 66478, 66479, 66480, 66481) c6( ) c7(Bl, cl, eJ, AO, qt, Y, cz, cL, v, ci, jw, Bh, anh, o, wT); #c1(TJP2) c2(NP_001164101) c3(tight junction protein ZO-2 isoform 6) c4(66603) c5(66604, 66605, 66606, 66607, 66608, 66609, 66610, 66611, 66612, 66613, 66614, 66615, 66616, 66617, 66618, 66619, 66620) c6( ) c7(Bl, cl, eJ, AO, qt, Y, cz, cL, v, ci, jw, Bh, anh, o, wT); #c1(TJP2) c2(NP_004808) c3(tight junction protein ZO-2 isoform 1) c4(149980) c5(149981, 149982, 149983, 149984, 149985, 149986) c6( ) c7(Bl, cl, eJ, AO, qt, Y, cz, cL, v, ci, jw, Bh, anh, o, wT); #c1(TJP2) c2(NP_963923) c3(tight junction protein ZO-2 isoform 2) c4(262564) c5(262565, 262566, 262567, 262568, 262569, 262570, 262571, 262572, 262573, 262574, 262575, 262576) c6( ) c7(Bl, cl, eJ, AO, qt, Y, cz, cL, v, ci, jw, Bh, anh, o, wT); #c1(TJP2) c2(XP_006717387) c3(tight junction protein ZO-2 isoform X3) c4( ) c5(291042) c6( ) c7(Bl, cl, eJ, AO, qt, Y, cz, cL, v, ci, jw, Bh, anh, o, wT); #c1(TJP2) c2(XP_011517511) c3(tight junction protein ZO-2 isoform X4) c4(311304, 311305) c5( ) c6( ) c7(Bl, cl, eJ, AO, qt, Y, cz, cL, v, ci, jw, Bh, anh, o, wT); #c1(TJP3) c2(NP_001254489) c3(tight junction protein ZO-3 isoform 1) c4(94484) c5( ) c6( ) c7(ad, MD); #c1(TJP3) c2(NP_001254490) c3(tight junction protein ZO-3 isoform 2) c4(94485, 94486, 94487, 94488) c5(94489, 94490, 94491, 94492, 94493, 94494, 94495, 94496, 94497, 94498, 94499, 94500, 94501, 94502, 94503, 94504, 94505, 94506, 94507, 94508, 94509, 94510, 94511, 94512, 94513, 94514, 94515, 94516, 94517, 94518) c6( ) c7(ad, MD); #c1(TK1) c2(NP_003249) c3(thymidine kinase, cytosolic) c4(136809) c5(136810, 136811, 136812, 136813, 136814, 136815, 136816, 136817, 136818, 136819) c6( ) c7(T, fM, jp, qx, aDT, Hn, ci, eA, aoz, eW, av, aE, oj, aT, h, btE, fb, vT, aW, t, bw, btK, eM, dB, cj, hR, bt); #c1(TK2) c2(NP_001166114) c3(thymidine kinase 2 isoform 2) c4(68201, 68202) c5(68203, 68204, 68205, 68206, 68207, 68208, 68209, 68210) c6( ) c7(qx, ha, Hn, aNG, ci, bgR, agQ, aoz, oj, kf, yZ, btE, fb, cJF, vT, aqP, px, bw, btK, dR, ac, ky, kB, U, awl); #c1(TK2) c2(NP_001166115) c3(thymidine kinase 2, mitochondrial isoform 3 precursor) c4(68211) c5(68212, 68213, 68214, 68215, 68216, 68217) c6( ) c7(qx, ha, Hn, aNG, ci, bgR, agQ, aoz, oj, kf, yZ, btE, fb, cJF, vT, aqP, px, bw, btK, dR, ac, ky, kB, U, awl); #c1(TK2) c2(NP_001166116) c3(thymidine kinase 2, mitochondrial isoform 4 precursor) c4(68218) c5(68219, 68220, 68221, 68222, 68223, 68224) c6( ) c7(qx, ha, Hn, aNG, ci, bgR, agQ, aoz, oj, kf, yZ, btE, fb, cJF, vT, aqP, px, bw, btK, dR, ac, ky, kB, U, awl); #c1(TK2) c2(NP_001258863) c3(thymidine kinase 2 isoform 5) c4(96598) c5(96599, 96600, 96601, 96602, 96603, 96604) c6( ) c7(qx, ha, Hn, aNG, ci, bgR, agQ, aoz, oj, kf, yZ, btE, fb, cJF, vT, aqP, px, bw, btK, dR, ac, ky, kB, U, awl); #c1(TK2) c2(NP_001258979) c3(thymidine kinase 2, mitochondrial isoform 7 precursor) c4( ) c5(96892, 96893, 96894, 96895, 96896, 96897, 96898, 96899) c6( ) c7(qx, ha, Hn, aNG, ci, bgR, agQ, aoz, oj, kf, yZ, btE, fb, cJF, vT, aqP, px, bw, btK, dR, ac, ky, kB, U, awl); #c1(TK2) c2(NP_004605) c3(thymidine kinase 2, mitochondrial isoform 1 precursor) c4(148090, 148091) c5(148092, 148093, 148094, 148095, 148096, 148097, 148098, 148099, 148100, 148101, 148102, 148103) c6( ) c7(qx, ha, Hn, aNG, ci, bgR, aqO, anz, nj, kf, yZ, btE, fb, cJF, vT, aqP, px, bw, btK, dR, ac, ky, kB, U, awl); #c1(TKT) c2(NP_001128527) c3(transketolase isoform 1) c4(50181, 50182) c5(50183, 50184, 50185, 50186, 50187, 50188, 50189, 50190, 50191, 50192, 50193, 50194, 50195, 50196, 50197, 50198, 50199) c6( ) c7(T, abY, cCU, if, aj, dG, ci, qN, zP, V, J, Gm, mj, yt, Xe, ajU, zQ, iU, aq, aqM, Gs, U, B); #c1(TKT) c2(NP_001244957) c3(transketolase isoform 2) c4(92444) c5(92445, 92446, 92447, 92448, 92449, 92450) c6( ) c7(T, abY, cCU, if, aj, dG, ci, qN, zP, V, J, Gm, mj, yt, Xe, ajU, zQ, iU, aq, aqM, Gs, l, B); #c1(TKT) c2(XP_011532357) c3(transketolase isoform X2) c4(328512) c5(328513, 328514, 328515, 328516, 328517) c6( ) c7(T, abY, cCU, if, aj, dG, ci, qN, zP, V, J, Gm, mj, yt, Xe, ajU, zQ, iU, aq, aqM, Gs, U, B); #c1(TKTL1) c2(NP_001139405) c3(transketolase-like protein 1 isoform b) c4(59287, 59288) c5(59289) c6( ) c7(T, if, jh, aA, nR, oH, ci, qN, q, hd, BJ, aT, btE, K, fb, d, iU, vT, aW, Y, ff, r, aq, aF, en, iK, op, btK, nM, nB, vA, B, Ex); #c1(TKTL1) c2(NP_001139406) c3(transketolase-like protein 1 isoform c) c4( ) c5(59290, 59291, 59292, 59293, 59294, 59295, 59296, 59297, 59298, 59299, 59300, 59301, 59302, 59303, 59304, 59305) c6( ) c7(T, if, jh, aA, oR, oH, ci, qN, q, hd, BJ, aT, btE, K, fb, d, iU, vT, aW, Y, ff, r, aq, aF, en, iK, op, btK, nM, nB, vA, B, Ex); #c1(TKTL1) c2(NP_036385) c3(transketolase-like protein 1 isoform a) c4(173455, 173456) c5(173457, 173458, 173459, 173460, 173461, 173462, 173463, 173464, 173465, 173466) c6( ) c7(T, if, jh, aA, oR, oH, ci, qN, q, hd, BJ, aT, btE, K, fb, d, iU, vT, aW, Y, ff, r, aq, aF, en, iK, op, btK, nM, nB, vA, B, Ex); #c1(TKTL2) c2(NP_115512) c3(transketolase-like protein 2) c4(223011) c5(223012, 223013, 223014, 223015, 223016, 223017) c6( ) c7(if, oH, qN); #c1(TLDC1) c2(XP_005256131) c3(TLD domain-containing protein 1 isoform X2) c4(273976) c5(273977) c6( ) c7(akY); #c1(TLDC1) c2(XP_005256132) c3(TLD domain-containing protein 1 isoform X1) c4(273978, 273979) c5(273980, 273981, 273982, 273983, 273984, 273985, 273986, 273987, 273988, 273989, 273990, 273991, 273992, 273993, 273994, 273995, 273996) c6( ) c7(akY); #c1(TLE1) c2(NP_001290032) c3(transducin-like enhancer protein 1 isoform 1) c4( ) c5(114941) c6( ) c7(bL, ck, xN, T, il, QG, aW, mg, r, aT, bS, hP, et, iJ, Z, bt, bz, iu); #c1(TLE1) c2(NP_001290033) c3(transducin-like enhancer protein 1 isoform 3) c4( ) c5(114942, 114943, 114944, 114945, 114846, 114947) c6( ) c7(bL, ck, xN, T, il, QG, aW, mg, r, aT, bS, hP, et, iJ, Z, bt, bz, iu); #c1(TLE1) c2(NP_005068) c3(transducin-like enhancer protein 1 isoform 2) c4(152580) c5(152581, 152582, 152583, 152584, 152585, 152586, 152587) c6( ) c7(bL, ck, xN, T, il, QG, aW, mg, r, aT, bS, hP, et, iJ, Z, bt, bz, iu); #c1(TLE1) c2(XP_005252210) c3(transducin-like enhancer protein 1 isoform X4) c4(271609) c5( ) c6( ) c7(bL, ck, xN, T, il, QG, aW, mg, r, aT, bS, hP, et, iJ, Z, bt, bz, iu); #c1(TLE1) c2(XP_005252213) c3(transducin-like enhancer protein 1 isoform X6) c4(271610, 271611) c5(271612, 271613, 271614, 271615, 271616, 271617, 271618, 271619, 271620, 271621, 271622) c6( ) c7(bL, ck, xN, T, il, QG, aW, mg, r, aT, bS, hP, et, iJ, Z, bt, bz, iu); #c1(TLE1) c2(XP_005252220) c3(transducin-like enhancer protein 1 isoform X12) c4(271623) c5(271624, 271625, 271626, 271627, 271628, 271629, 271630, 271631, 271632) c6( ) c7(bL, ck, xN, T, il, QG, aW, mg, r, aT, bS, hP, et, iJ, Z, bt, bz, iu); #c1(TLE2) c2(NP_001138233) c3(transducin-like enhancer protein 2 isoform 2) c4(56089, 56090) c5(56091, 56092, 56093, 56094, 56095, 56096, 56097, 56098, 56099, 56100, 56101, 56102, 56103, 56104, 56105, 56106) c6( ) c7(as, bEu, ip); #c1(TLE2) c2(NP_001138234) c3(transducin-like enhancer protein 2 isoform 3) c4(56107) c5(56108, 56109, 56110, 56111, 56112, 56113, 56114, 56115, 56116, 56117, 56118, 56119, 56120, 56121, 56122, 56123, 56124, 56125, 56126) c6( ) c7(as, bEu, ip); #c1(TLE2) c2(NP_001287775) c3(transducin-like enhancer protein 2 isoform 4) c4(112855) c5(112856) c6( ) c7(as, bEu, ip); #c1(TLE2) c2(NP_003251) c3(transducin-like enhancer protein 2 isoform 1) c4(136827, 136828) c5(136829, 136830, 136831, 136832, 136833, 136834) c6( ) c7(as, bEu, ip); #c1(TLE2) c2(XP_005259694) c3(transducin-like enhancer protein 2 isoform X3) c4(276231) c5(276232, 276233, 276234, 276235, 276236, 276237, 276238, 276239) c6( ) c7(as, bEu, ip); #c1(TLE3) c2(NP_001098662) c3(transducin-like enhancer protein 3 isoform b) c4(41375) c5(41376, 41377, 41378, 41379, 41380, 41381, 41382, 41383, 41384, 41385, 41386, 41387) c6( ) c7(aT, bK, PJ, y, ad, ip); #c1(TLE3) c2(NP_001269908) c3(transducin-like enhancer protein 3 isoform e) c4(103124, 103125) c5(103126, 103127, 103128, 103129, 103130, 103131, 103132, 103133, 103134, 103135, 103136, 103137) c6( ) c7(aT, bK, PJ, y, ad, ip); #c1(TLE3) c2(NP_001269909) c3(transducin-like enhancer protein 3 isoform d) c4(103138) c5(103139, 103140, 103141, 103142, 103143, 103144) c6( ) c7(aT, bK, PJ, y, ad, ip); #c1(TLE3) c2(NP_001269910) c3(transducin-like enhancer protein 3 isoform f) c4(103145, 103146) c5(103147, 103148, 103149, 103150, 103151, 103152) c6( ) c7(aT, bK, PJ, y, ad, ip); #c1(TLE3) c2(NP_001269911) c3(transducin-like enhancer protein 3 isoform g) c4( ) c5(103153, 103154) c6( ) c7(aT, bK, PJ, y, ad, ip); #c1(TLE3) c2(NP_005069) c3(transducin-like enhancer protein 3 isoform a) c4(152588) c5(152589, 152590, 152591, 152592, 152593, 152594) c6( ) c7(aT, bK, PJ, y, ad, ip); #c1(TLE3) c2(NP_065959) c3(transducin-like enhancer protein 3 isoform c) c4(206485) c5(206486, 206487, 206488, 206489, 206490, 206491) c6( ) c7(aT, bK, PJ, y, ad, ip); #c1(TLE4) c2(NP_001269677) c3(transducin-like enhancer protein 4 isoform 1) c4(102510, 102511) c5(102512, 102513, 102514, 102515, 102516, 102517, 102518, 102519, 102520, 102521, 102522, 102523) c6( ) c7(bM, zQ, s, aW, EQ, aT, OE, v, gv, ci, bK, j, zP, bt); #c1(TLE4) c2(NP_001269678) c3(transducin-like enhancer protein 4 isoform 2) c4(102524) c5(102525, 102526, 102527, 102528, 102529, 102530) c6( ) c7(bM, zQ, s, aW, EQ, aT, OE, v, gv, ci, bK, j, zP, bt); #c1(TLE4) c2(NP_001269682) c3(transducin-like enhancer protein 4 isoform 4) c4(102536) c5(102537, 102538, 102539, 102540, 102541, 102542) c6( ) c7(bM, zQ, s, aW, EQ, aT, OE, v, gv, ci, bK, j, zP, bt); #c1(TLE4) c2(NP_001269689) c3(transducin-like enhancer protein 4 isoform 5) c4( ) c5(102569, 102570, 102571, 102572, 102573) c6( ) c7(bM, zQ, s, aW, EQ, aT, OE, v, gv, ci, bK, j, zP, bt); #c1(TLE4) c2(NP_008936) c3(transducin-like enhancer protein 4 isoform 3) c4(169654) c5(169655, 169656, 169657, 169658, 169659, 169660, 169661) c6( ) c7(bM, zQ, s, aW, EQ, aT, OE, v, gv, ci, bK, j, zP, bt); #c1(TLE4) c2(XP_006717331) c3(transducin-like enhancer protein 4 isoform X11) c4(290920) c5( ) c6( ) c7(bM, zQ, s, aW, EQ, aT, OE, v, gv, ci, bK, j, zP, bt); #c1(TLE4) c2(XP_011517258) c3(transducin-like enhancer protein 4 isoform X6) c4(310859) c5(310860, 310861, 310862, 310863, 310864, 310865) c6( ) c7(bM, zQ, s, aW, EQ, aT, OE, v, gv, ci, bK, j, zP, bt); #c1(TLE6) c2(NP_001137458) c3(transducin-like enhancer protein 6 isoform 1) c4(55833, 55834, 55835, 55836) c5(55837, 55838, 55839, 55840, 55841, 55842, 55843, 55844, 55845, 55846, 55847, 55848, 55849, 55850) c6( ) c7(X, gX); #c1(TLE6) c2(NP_079036) c3(transducin-like enhancer protein 6 isoform 2) c4( ) c5(216699, 216700, 216701, 216702, 216703, 216704, 216705, 216706, 216707, 216708) c6( ) c7(X, gX); #c1(TLK1) c2(NP_001130026) c3(serine/threonine-protein kinase tousled-like 1 isoform 2) c4(52443) c5(52444, 52445, 52446, 52447, 52448, 52449, 52450, 52451) c6( ) c7(eW, T, jz, Y, qK, aT, alJ, gv, K, ey, MG, ae, ne, ad); #c1(TLK1) c2(NP_001130027) c3(serine/threonine-protein kinase tousled-like 1 isoform 3) c4(52452) c5(52453, 52454, 52455, 52456, 52457, 52458) c6( ) c7(eW, T, jz, Y, qK, aT, aT, J, gv, K, ey, MG, ae, ne, ad); #c1(TLK1) c2(NP_036422) c3(serine/threonine-protein kinase tousled-like 1 isoform 1) c4(173698, 173699, 173700) c5(173701, 173702, 173703, 173704, 173705, 173706, 173707, 173708, 173709, 173710, 173711, 173712, 173713, 173714) c6( ) c7(eW, T, jz, Y, qK, aT, alJ, gv, K, ey, MG, ae, ne, ad); #c1(TLK1) c2(XP_005247038) c3(serine/threonine-protein kinase tousled-like 1 isoform X2) c4( ) c5(267593, 267594, 267595, 267596, 267597, 267598) c6( ) c7(eW, T, jz, Y, qK, aT, alJ, gv, K, ey, MG, ae, ne, ad); #c1(TLK2) c2(NP_001271262) c3(serine/threonine-protein kinase tousled-like 2 isoform C) c4(103772) c5(103773, 103774, 103775, 103776, 103777, 103778) c6( ) c7(aW, aT, ag, cm, ae, B, ad); #c1(TLK2) c2(NP_001271292) c3(serine/threonine-protein kinase tousled-like 2 isoform B) c4(103856) c5(103857, 103858, 103859, 103860, 103861, 103862, 103863, 103864, 103865, 103866) c6( ) c7(aW, aT, ag, cm, ae, B, ad); #c1(TLK2) c2(NP_006843) c3(serine/threonine-protein kinase tousled-like 2 isoform A) c4(168591) c5(168592, 168593, 168594, 168595, 168596, 168597) c6( ) c7(aW, aT, aq, cm, ae, B, ad); #c1(TLL1) c2(NP_001191689) c3(tolloid-like protein 1 isoform 2 precursor) c4(81613) c5(81614, 81615, 81616, 81617, 81618, 81619) c6( ) c7(bL, nD, cMu, oe, eH, j, zp, eF, cd); #c1(TLL1) c2(NP_036596) c3(tolloid-like protein 1 isoform 1 precursor) c4(174692) c5(174693, 174694, 174695, 174696, 174697, 174698, 174699, 174700) c6( ) c7(bL, nD, cMu, oe, eH, j, zp, eF, cd); #c1(TLL2) c2(NP_036597) c3(tolloid-like protein 2 precursor) c4(174701) c5(174702, 174703, 174704, 174705, 174706, 174707) c6( ) c7(bK); #c1(TLN1) c2(NP_006280) c3(talin-1) c4(163525, 163526) c5(163527, 163528, 163529, 163530, 163531, 163532, 163533, 163534, 163535, 163536, 163537, 163538) c6( ) c7(T, kP, yt, aW, ff, aT, n, K, en, ae, B, ad, bA); #c1(TLN2) c2(XP_011520408) c3(talin-2 isoform X1) c4(315281) c5(315282, 315283, 315284, 315285, 315286, 315287, 315288, 315289, 315290, 315291) c6( ) c7(il, bX); #c1(TLR1) c2(NP_003254) c3(toll-like receptor 1 precursor) c4(136836, 136837, 136838, 136839, 136840) c5(136841, 136842, 136843, 136844, 136845, 136846, 136847, 136848, 136849, 136850, 136851, 136852, 136853, 136854, 136855, 136856, 136857, 136858, 136859, 136860, 136861, 136862, 136863, 136864, 136865, 136866, 136867, 136868, 136869, 136870, 136871, 136872, 136873, 136874) c6( ) c7(bM, T, fR, fd, ci, ip, wa, azY, AW, cMy, dV, Ds, cp, aW, az, mQ, g, eE, bw, uC, eM, cMv, m, eg, aNn, aSs, xN, fr, aBl, ai, Uh, h, ey, aDp, cMw, fe, aq, nN, aOL, aDE, it, B, cMz, Dw, DM, dA, aZy, aA, j, acn, C, V, g, aOj, aWc, akU, jZ, si, aT, ae, dl, Y, Pg, r, aDm, en, cl, t, Ym, cMx, nM, ig, wR, CZ, EY, aDj, sY, azW, iW, jh, ad, oW, BO, ff, aZw, aFr, aF, uF, Sm, iR, iV, wz, gy, y); #c1(TLR10) c2(XP_011512064) c3(toll-like receptor 10 isoform X1) c4(302701) c5(302702, 302703, 302704, 302705, 302706, 302707, 302708, 302709, 302710, 302711, 302712, 302713, 302714, 302715, 302716, 302717, 302718, 302719) c6( ) c7(bM, Dw, nM, aW, sp, iW, mQ, ja, aT, fd, Ds, V, ae, ad, wa); #c1(TLR2) c2(XP_011530518) c3(toll-like receptor 2 isoform X1) c4(326441) c5(326442, 326443, 326444, 326445, 326446, 326447) c6( ) c7(oO, bM, T, lD, aC, xS, fR, pf, ea, if, e, qx, al, eb, bB, fd, qj, cMF, bRn, ci, Tz, wa, aEQ, bPE, AW, cMy, aE, Be, M, dV, Ds, azm, bnF, K, aZS, zy, hH, DY, bc, Us, hm, bzH, bJX, ly, aa, aEV, LG, aW, hC, bNq, cMA, az, hl, mQ, ih, kt, pD, zC, aB, pL, eE, axp, uC, bw, zV, bm, aEP, fT, eM, aDs, xD, dc, ki, cj, uo, Zn, uJ, bas, Hb, m, R, aNn, eg, jM, abh, blB, ajy, dD, aBe, QO, sQ, Ht, aw, xM, aj, BE, aBl, pM, qN, Za, eh, zo, ai, eW, aDF, Vs, baA, cc, wG, Uh, eT, h, lG, jy, dL, bOp, aFi, ux, hB, wb, aDp, ey, Nr, asp, A, oo, sp, EU, fQ, aq, po, fe, CQ, nN, ajz, jT, cM, bxB, lx, oU, Wt, cpN, kT, ar, cMC, dB, bOj, bRS, mg, aOL, hL, bPs, ut, uz, eo, at, aDE, JM, B, vQ, bL, cMz, Dw, lk, AL, cMG, eR, fG, jx, YN, aee, cR, aA, cz, hy, j, v, C, aBe, azF, V, g, J, eA, DK, aWc, jZ, si, gp, aT, Oi, cy, cMB, bK, cMH, yb, bg, aAt, gG, af, dl, aFs, le, bNR, aQk, xR, cMe, Y, fO, Pg, r, iy, akY, lo, ls, afq, t, Ym, pb, aff, ajl, cT, ac, aQd, ig, WP, cmU, fP, wq, wR, re, cS, dy, cMD, EY, JH, fD, bt, mf, CZ, aDj, an, HQ, sY, hl, BD, Ke, azW, akd, LX, aD, df, axd, iW, jh, vr, dG, eq, jE, atK, ad, aoH, LH, hX, F, bNN, aFl, ds, Os, rN, io, vB, aNp, lQ, jo, ji, Xl, NM, vO, cME, uQ, CL, BN, anX, Zf, cr, eZ, dN, aFr, aF, si, aDd, hp, aCK, aFd, uF, iV, aDH, Nq, LB, gk, axs, bE, z, anY, wz, sG, gy, ei, lf, ra, ne, y, pC); #c1(TLR3) c2(NP_003256) c3(toll-like receptor 3 precursor) c4(136875, 136876, 136877) c5(136878, 136879, 136880, 136881, 136882, 136883, 136884, 136885, 136886, 136887, 136888, 136889, 136890, 136891, 136892, 136893, 136894, 136895) c6( ) c7(oO, bM, T, xS, fR, pf, e, bB, ci, bh, cMl, fw, wa, xy, aE, aDk, Ds, K, aDU, bc, aa, bkr, aW, bNq, hl, apn, mQ, g, cm, uC, Uk, aDX, nB, eM, mx, uo, nw, jM, hh, cZ, sQ, NT, fN, xM, n, fr, et, uE, aBl, Za, ai, eW, cc, cU, lG, h, aPe, ey, eV, dd, aDp, afu, bvO, A, aXy, ZC, lb, fe, aq, pm, jT, ar, W, aCz, NL, hL, ut, fL, B, Dw, fG, jx, eX, cz, fF, v, C, bX, V, q, hb, akU, aT, ae, Y, fO, r, akY, lo, en, bNt, nM, ac, hc, AH, wR, fD, bt, sY, BD, jh, wV, bS, jE, mC, ad, hX, dP, F, ds, akJ, nl, oW, ji, lQ, d, qZ, ff, NH, nh, eZ, hp, Fq, Z, aDH, LB, Bv, bE, Lj, wz, Xs, GF, y); #c1(TLR4) c2(NP_003257) c3(toll-like receptor 4 isoform C) c4(136896) c5(136897, 136898, 136899, 136900, 136901) c6( ) c7(T, ea, fd, ci, bRn, aY, azY, aE, n/v, dV, Ds, zy, hH, aa, ye, az, ih, vs, zC, GR, ba, fT, aZx, gt, cML, dc, Zn, has, k, eg, nD, blB, aj, qW, cd, zo, lG, ey, pi, mR, Gw, sp, EU, ge, fQ, fe, CQ, adz, aBs, bbz, eD, pV, E, Dp, DM, aA, cz, bX, q, aWb, bNQ, Cc, aWc, yu, Oi, cy, eu, le, baq, bg, aMA, iy, lo, pb, cT, ac, ig, bt, zA, bTc, an, gV, BD, iW, jh, dG, fu, ad, hX, yt, oW, lQ, ckF, cH, cW, ff, dq, Sm, aFd, iV, bz, DF, xZ, dX, lC, ra, ne, iu, oO, bM, if, e, bB, cL, Tz, ip, x, bPx, ja, azm, bc, dH, fc, hl, kt, pD, eE, bw, cMN, lt, ki, mx, vy, tV, bjL, pJ, abh, ajy, dD, n, aCZ, ec, eV, hn, A, yq, dC, aOL, hL, at, ut, SZ, fL, eo, cB, B, ek, NQ, dA, Lx, eX, fF, GC, v, V, rS, sl, ld, ae, cMK, hM, cMJ, iZ, DN, t, aff, asw, ck, cMx, cht, re, JH, HQ, oR, wV, eq, Pm, afm, ds, Xl, sj, CL, hG, Zf, NH, aFt, dN, aDN, D, gk, wz, MJ, gy, y, hv, pC, fR, atj, al, qj, lR, aMB, wa, bOl, AW, xE, u, Be, M, K, aZS, DY, dF, eL, bzH, cMM, qS, asD, mQ, aAT, hN, aB, g, uC, aDs, bPC, uo, Hb, m, Le, sQ, aw, NT, BH, aBl, pM, pU, eh, Uh, kH, cU, aFi, wb, cMO, aDp, nN, cM, fq, Zb, bMc, kT, ar, W, bbx, Br, gg, Pr, L, fM, AL, cMG, oe, jx, aee, uZ, j, eA, J, o, hb, jZ, gG, bq, bNR, xR, Y, r, brW, ls, en, iK, Ym, aQd, hc, dh, tM, wR, cS, dy, EY, fD, sY, bjX, aFe, bQH, bS, dP, fU, io, ji, BN, cr, hp, iR, bPn, aFb, sG, cP, ei, xg, pf, eh, Jx, dY, YX, aaW, H, eN, hm, DA, LG, aW, arZ, eM, Jp, uJ, R, wh, My, ez, qN, ai, ql, ju, h, dL, ux, hB, he, OV, oo, bar, aCE, aq, Hu, dw, Wt, asE, vD, NL, hk, hR, uz, aDE, bL, Dw, lk, eR, aBo, hy, OY, C, ady, mP, uT, qp, afQ, aT, bK, an, qk, af, s, oV, aDm, ajl, wg, nM, pZ, aJt, vZ, WP, AH, fP, wq, CZ, aDj, Kd, Ke, aD, ha, aAk, vr, Fb, Jz, jE, mC, kL, LH, av, bPu, l, F, Os, jo, uQ, yx, eZ, yy, aFr, aF, aDd, uF, eK, axs, atM, bE, z, aS, be, gq); #c1(TLR4) c2(NP_612564) c3(toll-like receptor 4 isoform A precursor) c4(236683) c5(236684, 236685, 236686, 236687, 236688, 236689, 236690) c6( ) c7(T, ea, fd, ci, bRn, aY, azY, aE, rw, dV, Ds, zy, hH, aa, ye, az, ih, vs, zC, GR, ba, fT, aZx, gt, cML, dc, Zn, has, k, eg, nD, blB, aj, qW, cd, zo, lG, ey, pi, mR, Gw, sp, EU, ge, fQ, fe, CQ, adz, aBs, bbz, eD, pV, E, Dp, DM, aA, cz, bX, q, aWb, bNQ, Cc, aWc, yu, Oi, cy, eu, le, baq, bg, aMA, iy, lo, pb, cT, ac, ig, bt, zA, bTc, ao, gV, BD, iW, jh, dG, fu, ad, hX, yt, oW, lQ, ckF, cH, cW, ff, dq, Sm, aFd, iV, bz, DF, xZ, dX, lC, ra, ne, iu, oO, bM, if, e, bB, cL, Tz, ip, x, bPx, ja, azm, bc, dH, fc, hl, kt, pD, eE, bw, cMN, lt, ki, mx, vy, tV, bjL, pJ, abh, ajy, dD, n, aCZ, ec, eV, hn, A, yq, dC, aOL, hL, at, ut, SZ, fL, eo, cB, B, ek, NQ, dA, Lx, eX, fF, GC, v, V, rS, si, ld, ae, cMK, hM, cMJ, iZ, DN, t, aff, asw, ck, cMx, cht, re, JH, HQ, oR, wV, eq, Pm, afm, ds, Xl, sj, CL, hG, Zf, NH, aFt, dN, aDN, D, gk, wz, MJ, gy, y, hv, pC, fR, atj, al, qj, lR, aMB, wa, bOl, AW, xE, u, Be, M, K, aZS, DY, dF, eL, bzH, cMM, qS, asD, mQ, aAT, hN, aB, g, uC, aDs, bPC, uo, Hb, m, Le, sQ, aw, NT, BH, aBl, pM, pU, eh, Uh, kH, cU, aFi, wb, cMO, aDp, nN, cM, fq, Zb, bMc, kT, ar, W, bbx, Br, gg, Pr, L, fM, AL, cMG, oe, jx, aee, uZ, j, eA, J, o, hb, jZ, qG, bq, bNR, xR, Y, r, brW, ls, en, iK, Ym, aQd, hc, dh, tM, wR, cS, dy, EY, fD, sY, bjX, aFe, bQH, bS, dP, fU, io, ji, BN, cr, hp, iR, bPn, aFb, sG, cP, ei, xg, pf, eh, Jx, dY, YX, aaW, H, eN, hm, DA, LG, aW, arZ, eM, Jp, uJ, R, wh, My, ez, qN, ai, ql, ju, h, dL, ux, hB, he, OV, oo, bar, aCE, aq, Hu, dw, Wt, asE, vD, NL, hk, hR, uz, aDE, bL, Dw, lk, eR, aBo, hy, OY, C, ady, mP, uT, qp, afQ, aT, bK, an, qk, af, s, oV, aDm, ajl, wg, nM, pZ, aJt, vZ, WP, AH, fP, wq, CZ, aDj, Kd, Ke, aD, ha, aAk, vr, Fb, Jz, jE, mC, kL, LH, av, bPu, l, F, Os, jo, uQ, yx, eZ, yy, aFr, aF, aDd, uF, eK, axs, atM, bE, z, aS, be, gq); #c1(TLR5) c2(XP_006711569) c3(toll-like receptor 5 isoform X1) c4(286136, 286137) c5(286138, 286139, 286140, 286141, 286142, 286143, 286144, 286145, 286146, 286147, 286148, 286149, 286150, 286151) c6( ) c7(kV, bL, sY, DM, T, bM, fR, Dw, e, jh, aA, bB, aj, v, ci, C, uE, V, mC, J, cMP, q, ad, zT, wa, cF, aWc, ds, qp, Uh, aT, h, Ds, qG, ji, yb, DY, ao, aa, mR, aW, fO, az, eZ, r, fe, aF, uF, nN, kk, iV, uC, cMx, y, fT, eM, bE, wz, gZ, uz, Dt, fL, EY, fD, bNH, aSs, X, hv); #c1(TLR6) c2(NP_006059) c3(toll-like receptor 6 precursor) c4(161529, 161530, 161531, 161532) c5(161533, 161534, 161535, 161536, 161537, 161538, 161539, 161540, 161541, 161542, 161543, 161544, 161545, 161546, 161547, 161548, 161549, 161550, 161551, 161552, 161553, 161554, 161555, 161556, 161557, 161558, 161559, 161560) c6( ) c7(bM, sY, Dw, fR, Ke, iW, cz, fd, ci, C, aBl, Vh, atK, V, ad, wa, azY, cwM, aWc, jZ, si, dV, aT, h, Ds, ae, sp, mQ, Du, aFr, fe, uF, iV, eE, bw, uC, nM, ig, wz, at, wR, gy, uJ, EY, aDE, CZ, aNn, y, aDj); #c1(TLR7) c2(NP_057646) c3(toll-like receptor 7 precursor) c4(192027) c5(192028, 192029, 192030, 192031, 192032, 192033) c6( ) c7(Kd, T, dD, bM, BD, fR, sQ, Dw, ea, jx, eX, RC, jh, hy, v, eq, V, mC, g, ad, hX, wa, eW, b, F, aE, ds, afQ, M, Os, h, eV, Ds, ji, lQ, amA, ae, OV, eZ, ff, Y, yx, lb, fJ, cr, ks, dN, aq, lo, aDm, hp, CQ, Fq, en, g, jT, fe, Wt, LB, sS, Bv, W, eM, iQ, hk, hc, cj, uo, ut, yH, fL, i, hE, B, y); #c1(TLR8) c2(NP_619542) c3(toll-like receptor 8 isoform 2 precursor) c4(236881) c5(236882, 236883, 236884, 236885, 236886) c6( ) c7(bM, T, os, Dw, BD, fR, sQ, jx, eX, RC, oZ, j, V, eW, ad, LH, wa, afQ, M, h, eV, Ds, ey, lQ, ae, him, OV, aHW, Y, ff, Pg, cr, eZ, fe, aiT, lo, hp, CQ, Fq, en, pb, asE, ig, hk, Ei, uo, ut, fL, y, Ze); #c1(TLR8) c2(XP_011543832) c3(toll-like receptor 8 isoform X1) c4(342962) c5(342963, 342964, 342965, 342966, 342967, 342968, 342969) c6( ) c7(bM, T, os, Dw, BD, fR, sQ, jx, eX, RC, oZ, j, V, eW, ad, LH, wa, af, M, h, eV, Ds, ey, lQ, ae, him, OV, aHW, Y, ff, Pg, cr, eZ, fe, aiT, lo, hp, CQ, Fq, en, pb, asE, ig, hk, Ei, uo, ut, fL, y, Ze); #c1(TLR9) c2(NP_059138) c3(toll-like receptor 9 precursor) c4(193230, 193231) c5(193232, 193233, 193234, 193235, 193236, 193237, 193238, 193239, 193240, 193241, 193242, 193243) c6( ) c7(oO, bM, T, aC, fR, if, e, fd, bB, ci, bRn, aY, wa, aE, dV, Ds, K, hH, bc, cp, bzH, bJX, aa, bkr, aW, az, mQ, hN, g, eE, ve, uC, cm, bw, zV, lt, eM, mx, cj, uo, Zn, aCy, aGN, m, eg, fy, aSs, NK, ajy, dD, sQ, lo, ht, aw, n, aj, oY, fr, aBl, uE, qN, eh, ai, eW, pe, cU, h, hn, wb, ey, A, sp, EU, ge, fe, aCE, adz, Wt, hq, asE, kT, dB, aOL, hL, at, uz, ut, fL, Tr, it, B, bL, Dw, fM, dA, eR, jx, aA, aBo, v, j, C, V, q, J, eA, mP, bNQ, jZ, si, apJ, aT, yu, Oi, aFm, ae, af, uA, him, le, xR, DN, r, afq, lo, en, cl, t, ck, cT, iQ, kP, ig, hc, wR, dy, yH, cMD, JH, fD, bt, vi, Kd, sY, aD, iW, jh, eq, jE, cMQ, mC, ad, hX, av, ds, eW, ji, lQ, uQ, CL, d, yx, ff, cr, eZ, aF, Sm, iV, bz, aYt, DF, LB, DT, bE, z, aDB, wz, aCl, y, iu); #c1(TLX1) c2(NP_001182446) c3(T-cell leukemia homeobox protein 1 isoform 2) c4( ) c5(74915, 74916, 74917, 74918, 74919) c6( ) c7(ck, ph, T, NA, fM, iM, x, je, jh, kH, adW, hn, k, il, hF); #c1(TLX1) c2(NP_005512) c3(T-cell leukemia homeobox protein 1 isoform 1) c4(156980, 156981) c5(156982, 156983, 156984, 156985, 156986, 156987, 156988, 156989) c6( ) c7(ck, ph, T, NA, fM, iM, x, je, jh, kH, adW, hn, k, il, hF); #c1(TLX2) c2(NP_057254) c3(T-cell leukemia homeobox protein 2) c4(189738) c5(189739, 189740, 189741, 189742, 189743, 189744, 189745) c6( ) c7(T, ha, cz, bS, et, bh, cd, clK, bjV, cMR, JD, kH, K, fb, je, Z, t, iM, ac, uS, en, m); #c1(TLX3) c2(NP_066305) c3(T-cell leukemia homeobox protein 3) c4(207161) c5(207162, 207163, 207164, 207165, 207166, 207167, 207168) c6( ) c7(ck, x, T, kH, hn, dL, k, ph, hF, eL); #c1(TM4SF1) c2(NP_055035) c3(transmembrane 4 L6 family member 1) c4(178433, 178434) c5(178435, 178436, 178437, 178438, 178439, 178440, 178441, 178442, 178443, 178444, 178445, 178446) c6( ) c7(T, aE, aW, Y, aT, g, ae, ad); #c1(TM4SF20) c2(NP_079071) c3(transmembrane 4 L6 family member 20) c4(216894, 216895) c5(216896, 216897, 216898, 216899, 216900, 216901, 216902, 216903, 216904, 216905, 216906) c6( ) c7(cMS, Kr, CD); #c1(TM4SF4) c2(NP_004608) c3(transmembrane 4 L6 family member 4) c4(148143) c5(148144, 148145, 148146, 148147, 148148, 148149) c6( ) c7(T, kl, aZ, hl, aq, iR, B); #c1(TM4SF5) c2(NP_003954) c3(transmembrane 4 L6 family member 5 precursor) c4(142421) c5(142422, 142423, 142424, 142425, 142426, 142427) c6( ) c7(av, T, B); #c1(TM6SF2) c2(NP_001001524) c3(transmembrane 6 superfamily member 2) c4(18610, 18611, 18612) c5(18613, 18614, 18615, 18616, 18617, 18618, 18619, 18620, 18621, 18622, 18623, 18624, 18625, 18626, 18627, 18628, 18629, 18630) c6( ) c7(aw); #c1(TM7SF2) c2(NP_001264162) c3(delta(14)-sterol reductase isoform 2) c4(97608) c5(97609, 97610, 97611, 97612, 97613, 97614) c6( ) c7(lD, T, kh, dD, aC, ea, aw, al, jx, aA, cz, bB, aj, j, ci, eq, fr, cd, J, ai, eJ, Vs, Vp, av, iu, aE, lv, fm, Vr, jZ, pX, gd, aT, dV, cy, uD, cY, hm, ly, A, d, lR, nO, aW, xs, hl, aq, Vl, as, t, Vk, bz, lx, eK, gk, y, eM, dB, wO, bE, ll, aS, m, dy, bC, ei, lC, B, us); #c1(TM7SF2) c2(NP_003264) c3(delta(14)-sterol reductase isoform 1) c4(136924, 136925) c5(136926, 136927, 136928, 136929, 136930, 136931, 136932, 136933, 136934, 136935, 136936, 136937) c6( ) c7(lD, T, kh, dD, aC, ea, aw, al, jx, aA, cz, bB, aj, j, ci, eq, fr, cd, J, ai, eJ, Vs, Vp, av, iu, aE, lv, fm, Vr, jZ, pX, gd, aT, dV, cy, uD, cY, hm, ly, A, d, lR, nO, aW, xs, hl, aq, Vl, as, t, Vk, bz, lx, eK, gk, y, eM, dB, wO, bE, ll, aS, m, dy, bC, ei, lC, B, us); #c1(TM9SF2) c2(NP_004791) c3(transmembrane 9 superfamily member 2 precursor) c4(149885) c5(149886, 149887, 149888, 149889, 149890, 149891) c6( ) c7(aw, VZ, ey); #c1(TM9SF4) c2(NP_055557) c3(transmembrane 9 superfamily member 4 precursor) c4(181922) c5(181923, 181924, 181925, 181926, 181927, 181928, 181929, 181930) c6( ) c7(T, Y); #c1(TM9SF4) c2(XP_005260679) c3(transmembrane 9 superfamily member 4 isoform X1) c4(276805, 276806) c5(276807, 276808, 276809, 276810, 276811, 276812, 276813, 276814, 276815, 276816) c6( ) c7(T, Y); #c1(TMBIM4) c2(NP_001269535) c3(protein lifeguard 4 isoform a) c4(101830) c5(101831, 101832, 101833, 101834, 101835, 101836) c6( ) c7(bL, om, hl, cMT, lo, wR, aj, v, nS, ae, J, ad); #c1(TMBIM4) c2(NP_001269538) c3(protein lifeguard 4 isoform c) c4( ) c5(101837, 101838, 101839, 101840, 101841) c6( ) c7(bL, om, hl, cMT, lo, wR, aj, v, nS, ae, J, ad); #c1(TMBIM4) c2(NP_057140) c3(protein lifeguard 4 isoform b) c4(189081, 189082, 189083) c5(189084, 189085, 189086, 189087, 189088, 189089, 189090, 189091, 189092, 189093, 189094, 189095) c6( ) c7(bL, om, hl, cMT, lo, wR, aj, v, nS, ae, J, ad); #c1(TMBIM6) c2(NP_003208) c3(bax inhibitor 1 isoform 1) c4(136290, 136291, 136292, 136293, 136294, 136295, 136296, 136297, 136298, 136299) c5(136300, 136301, 136302, 136303, 136304, 136305, 136306, 136307, 136308, 136309, 136310, 136311, 136312, 136313, 136314, 136315, 136316, 136317, 136318, 136319, 136320, 136321, 136322, 136323, 136324, 136325, 136326, 136327, 136328, 136329, 136330, 136331, 136332, 136333, 136334, 136335, 136336, 136337, 136338, 136339, 136340, 136341, 136342, 136343, 136344, 136345, 136346, 136347, 136348, 136349, 136350, 136351, 136352, 136353, 136354, 136355, 136356, 136357, 136358, 136359, 136360, 136361, 136362, 136363, 136364, 136365, 136366, 136367, 136368, 136369, 136370, 136371, 136372) c6( ) c7(LB, ck, Mo, T, ac, iE, wO, aW, fG, NT, aT, lG, K, ci, g, bt, ae, af, ad); #c1(TMBIM6) c2(XP_005269183) c3(bax inhibitor 1 isoform X1) c4(282428, 282429, 282430) c5(282431, 282432, 282433, 282434, 282435, 282436, 282437, 282438, 282439, 282440, 282441, 282442, 282443, 282444, 282445, 282446, 282447, 282448, 282449, 282450, 282451, 282452, 282453, 282454, 282455, 282456, 282457, 282458, 282459, 282460, 282461, 282462, 282463, 282464, 282465, 282466, 282467, 282468, 282469, 282470, 282471, 282472, 282473, 282474, 282475) c6( ) c7(LB, ck, Mo, T, ac, iE, wO, aW, fG, NT, aT, lG, K, ci, g, bt, ae, af, ad); #c1(TMC1) c2(NP_619636) c3(transmembrane channel-like protein 1) c4(236913) c5(236914, 236915, 236916, 236917, 236918, 236919, 236920, 236921, 236922, 236923, 236924, 236925, 236926, 236927, 236928, 236929, 236930, 236931, 236932, 236933, 236934, 236935, 236936, 236937, 236938, 236939, 236940, 236941, 236942, 236943, 236944, 236945, 236946, 236947, 236948, 236949, 236950) c6( ) c7(cMV, cMU, mG, aF, Bh, bCJ); #c1(TMC1) c2(XP_011516515) c3(transmembrane channel-like protein 1 isoform X1) c4(309915, 309916, 309917, 309918) c5(309919) c6( ) c7(cMV, cMU, mG, aF, Bh, bCJ); #c1(TMC2) c2(NP_542789) c3(transmembrane channel-like protein 2) c4(233100) c5(233101, 233102, 233103, 233104, 233105, 233106) c6( ) c7(eZ); #c1(TMC3) c2(NP_001074001) c3(transmembrane channel-like protein 3) c4(36902, 36903) c5(36904, 36905, 36906, 36907, 36908, 36909, 36910, 36911, 36912, 36913, 36914, 36915) c6( ) c7(c); #c1(TMC5) c2(NP_001098718) c3(transmembrane channel-like protein 5 isoform a) c4(41544) c5(41545, 41546, 41547, 41548, 41549, 41550, 41551, 41552, 41553, 41554) c6( ) c7(ff, ht, en); #c1(TMC5) c2(NP_001098719) c3(transmembrane channel-like protein 5 isoform b) c4(41555) c5(41556, 41557, 41558, 41559, 41560, 41561) c6( ) c7(ff, ht, en); #c1(TMC5) c2(NP_079056) c3(transmembrane channel-like protein 5 isoform c) c4(216788, 216789) c5(216790, 216791, 216792, 216793, 216794, 216795, 216796, 216797, 216798, 216799, 216800, 216801) c6( ) c7(ff, ht, en); #c1(TMC6) c2(NP_009198) c3(transmembrane channel-like protein 6) c4(171460) c5(171461, 171462, 171463, 171464, 171465, 171466, 171467, 171468, 171469, 171470, 171471, 171472, 171473, 171474) c6( ) c7(pa, lg, yk, if, ff, en, qN); #c1(TMC6) c2(XP_005257054) c3(transmembrane channel-like protein 6 isoform X3) c4(274646) c5(274647, 274648, 274649, 274650, 274651, 274652) c6( ) c7(pa, lg, yk, if, ff, en, qN); #c1(TMC6) c2(XP_011522558) c3(transmembrane channel-like protein 6 isoform X2) c4(317145) c5( ) c6( ) c7(pa, lg, yk, if, ff, en, qN); #c1(TMC6) c2(XP_011522559) c3(transmembrane channel-like protein 6 isoform X5) c4( ) c5(317146, 317147, 317148, 317149, 317150, 317151) c6( ) c7(pa, lg, yk, if, ff, en, qN); #c1(TMC6) c2(XP_011522560) c3(transmembrane channel-like protein 6 isoform X6) c4(317152) c5(317153, 317154, 317155, 317156, 317157, 317158) c6( ) c7(pa, lg, yk, if, ff, en, qN); #c1(TMC8) c2(NP_689681) c3(transmembrane channel-like protein 8) c4(243567) c5(243568, 243569, 243570, 243571, 243572, 243573) c6( ) c7(pa, lg, yk, if, ff, en, qN); #c1(TMC8) c2(XP_011522713) c3(transmembrane channel-like protein 8 isoform X9) c4(317235) c5(317236, 317237, 317238, 317239, 317240, 317241) c6( ) c7(pa, lg, yk, if, ff, en, qN); #c1(TMCC1) c2(XP_006713615) c3(transmembrane and coiled-coil domains protein 1 isoform X3) c4( ) c5(287241) c6( ) c7(if, qN, lg, apx); #c1(TMCC1) c2(XP_011510881) c3(transmembrane and coiled-coil domains protein 1 isoform X1) c4(301324, 301325) c5(301326, 301327, 301328, 301329, 301330, 301331, 301332, 301333) c6( ) c7(if, qN, lg, apx); #c1(TMCC1) c2(XP_011510883) c3(transmembrane and coiled-coil domains protein 1 isoform X2) c4(301334) c5(301335, 301336, 301337, 301338, 301339) c6( ) c7(if, qN, lg, apx); #c1(TMCC1) c2(XP_011510884) c3(transmembrane and coiled-coil domains protein 1 isoform X4) c4(301340) c5(301341, 301342, 301343, 301344, 301345, 301346) c6( ) c7(if, qN, lg, apx); #c1(TMCC1) c2(XP_011510886) c3(transmembrane and coiled-coil domains protein 1 isoform X6) c4( ) c5(301347, 301348, 301349, 301350, 301351) c6( ) c7(if, qN, lg, apx); #c1(TMCC2) c2(NP_001229854) c3(transmembrane and coiled-coil domains protein 2 isoform 2) c4(85428) c5(85429, 85430, 85431, 85432, 85433) c6( ) c7(afW); #c1(TMCC2) c2(NP_001284540) c3(transmembrane and coiled-coil domains protein 2 isoform 3) c4(112007) c5(112008, 112009, 112010, 112011, 112012, 112013, 112014, 112015, 112016, 112017, 112018, 112019) c6( ) c7(afW); #c1(TMCC2) c2(NP_001284542) c3(transmembrane and coiled-coil domains protein 2 isoform 4) c4(112020, 112021) c5(112022, 112023, 112024, 112025, 112026, 112027) c6( ) c7(afW); #c1(TMCC2) c2(NP_055673) c3(transmembrane and coiled-coil domains protein 2 isoform 1) c4(182671) c5(182672, 182673, 182674, 182675, 182676, 182677, 182678) c6( ) c7(afW); #c1(TMCC3) c2(NP_065749) c3(transmembrane and coiled-coil domains protein 3 isoform 1) c4(205176) c5(205177, 205178, 205179, 205180, 205181, 205182) c6( ) c7(cd, cz); #c1(TMCO1) c2(NP_061899) c3(transmembrane and coiled-coil domain-containing protein 1 isoform a) c4(201049, 201050) c5(201051, 201052, 201053, 201054, 201055, 201056, 201057, 201058, 201059, 201060, 201061, 201062) c6( ) c7(aPn, pZ, dH, cMW, Az, cz, nA, dw, dr); #c1(TMCO4) c2(XP_011539488) c3(transmembrane and coiled-coil domain-containing protein 4 isoform X1) c4(337678, 337679) c5(337680, 337681, 337682, 337683, 337684, 337685, 337686, 337687, 337688, 337689, 337690, 337691) c6( ) c7(bM); #c1(TMCO5A) c2(XP_005254225) c3(transmembrane and coiled-coil domain-containing protein 5A isoform X1) c4(273121, 273122) c5(273123, 273124, 273125, 273126, 273127, 273128) c6( ) c7(vr, fq, bK); #c1(TMCO5A) c2(XP_011519564) c3(transmembrane and coiled-coil domain-containing protein 5A isoform X2) c4(314197, 314198) c5( ) c6( ) c7(vr, fq, bK); #c1(TMCO5A) c2(XP_011519565) c3(transmembrane and coiled-coil domain-containing protein 5A isoform X3) c4(314199, 314200) c5(314201, 314202, 314203, 314204, 314205, 314206, 314207, 314208, 314209, 314210, 314211, 314212) c6( ) c7(vr, fq, bK); #c1(TMCO5A) c2(XP_011519566) c3(transmembrane and coiled-coil domain-containing protein 5A isoform X4) c4( ) c5(314213, 314214, 314215, 314216, 314217, 314218, 314219, 314220, 314221, 314222, 314223, 314224, 314225, 314226, 314227, 314228, 314229, 314230) c6( ) c7(vr, fq, bK); #c1(TMED1) c2(NP_006849) c3(transmembrane emp24 domain-containing protein 1 precursor) c4(168609) c5(168610, 168611, 168612, 168613, 168614, 168615) c6( ) c7(bM, dD, ea, e, h, wR, j, eq, eJ); #c1(TMED10) c2(NP_006818) c3(transmembrane emp24 domain-containing protein 10 precursor) c4(168372) c5(168373, 168374, 168375, 168376, 168377, 168378) c6( ) c7(T, eG, bP, Pg, U, aT, auT, alR, alQ, K, alP, ae, GW, ad); #c1(TMED2) c2(NP_006806) c3(transmembrane emp24 domain-containing protein 2 precursor) c4(168263, 168264, 168265) c5(168266, 168267, 168268, 168269, 168270, 168271, 168272, 168273, 168274, 168275, 168276, 168277, 168278, 168279, 168280, 168281, 168282, 168283) c6( ) c7(if, iW, j, qN, hX, ds, jZ, dV, kH, h, SH, ey, he, nJ, CB, je, aHW, lo, kk, ck, iM, iQ, cA, bE, NL, aEG, zv, aEN, EB); #c1(TMED3) c2(NP_001288132) c3(transmembrane emp24 domain-containing protein 3 isoform b precursor) c4( ) c5(113588, 113589, 113590, 113591, 113592, 113593) c6( ) c7(h, ae, ad); #c1(TMED3) c2(NP_031390) c3(transmembrane emp24 domain-containing protein 3 isoform a precursor) c4(172187, 172188) c5(172189, 172190, 172191, 172192, 172193, 172194) c6( ) c7(h, ae, ad); #c1(TMED4) c2(NP_872353) c3(transmembrane emp24 domain-containing protein 4 isoform 1 precursor) c4(256176, 256177) c5(256178, 256179, 256180, 256181, 256182, 256183, 256184, 256185, 256186, 256187, 256188, 256189) c6( ) c7(g); #c1(TMED7) c2(NP_861974) c3(transmembrane emP24 domain-containing protein 7 precursor) c4(255742) c5(255743, 255744, 255745, 255746, 255747, 255748) c6( ) c7(T, ea, if, fd, bB, ci, aE, il, Qk, K, eL, bc, xQ, ye, aW, as, cm, bw, GR, eM, nB, dc, ki, go, vA, cj, m, Hb, dD, NT, n, fr, qN, jz, h, dL, ge, aq, zZ, iO, bP, hL, hR, it, B, fM, aoE, aA, q, eA, XX, aT, dz, ae, af, jf, s, iU, Y, r, en, cl, t, iK, aEp, ck, nM, iM, dy, bt, On, hS, hl, Ke, pY, jh, eq, ad, hX, hd, ib, fb, d, je, et, ff, apb, aF, bz, bE, aS, EB); #c1(TMED7-TICAM2) c2(NP_001157940) c3(TRAM adaptor with GOLD domain isoform 1 precursor) c4(62897, 62898, 62899) c5(62900, 62901, 62902, 62903, 62904, 62905, 62906, 62907, 62908, 62909, 62910) c6( ) c7(T, ea, if, fd, bB, ci, aE, il, Qk, K, eL, bc, xQ, ye, aW, as, cm, bw, GR, eM, nB, dc, ki, go, vA, cj, m, Hb, dD, NT, n, fr, qN, jz, h, dL, ge, aq, zZ, iO, bP, hL, hR, it, B, fM, aoE, aA, q, eA, XX, aT, dz, ae, af, jf, s, iU, Y, r, en, cl, t, iK, aEp, ck, nM, iM, dy, bt, On, hS, hl, Ke, pY, jh, eq, ad, hX, hd, ib, fb, d, je, et, ff, apb, aF, bz, bE, aS, EB); #c1(TMED7-TICAM2) c2(NP_001157941) c3(TRAM adaptor with GOLD domain isoform 2 precursor) c4( ) c5(62911, 62912, 62913, 62914, 62915, 62916, 62917, 62918, 62919, 62920, 62921) c6( ) c7(T, ea, if, fd, bB, ci, aE, il, Qk, K, eL, bc, xQ, ye, aW, as, cm, bw, GR, eM, nB, dc, ki, go, vA, cj, m, Hb, dD, NT, n, fr, qN, jz, h, dL, ge, aq, zZ, iO, bP, hL, hR, it, B, fM, aoE, aA, q, eA, XX, aT, dz, ae, af, jf, s, iU, Y, r, en, cl, t, iK, aEp, ck, nM, iM, dy, bt, On, hS, hl, Ke, pY, jh, eq, ad, hX, hd, ib, fb, d, je, et, ff, apb, aF, bz, bE, aS, EB); #c1(TMED9) c2(NP_059980) c3(transmembrane emp24 domain-containing protein 9 precursor) c4(193463) c5(193464, 193465, 193466, 193467, 193468, 193469) c6( ) c7(Hx, ac, c, U, h, fr, gD, aR); #c1(TMEFF1) c2(NP_003683) c3(tomoregulin-1 precursor) c4(140178) c5(140179, 140180, 140181, 140182, 140183, 140184) c6( ) c7(dB, Na, T, Nc); #c1(TMEFF2) c2(NP_057276) c3(tomoregulin-2 precursor) c4(189808) c5(189809, 189810, 189811, 189812, 189813, 189814) c6( ) c7(T, Js, pf, zt, ht, aA, hz, aj, qj, q, ad, hd, no, aT, dL, YQ, ae, eL, amw, kl, B, s, aW, az, LZ, r, fe, aF, g, ahV, bE, y, nB, kz, hr, dX, np, zl, gT, it, X, Jo, pC); #c1(TMEM100) c2(NP_060756) c3(transmembrane protein 100) c4(197627) c5(197628, 197629, 197630, 197631, 197632, 197633, 197634, 197635, 197636, 197637, 197638, 197639, 197640, 197641) c6( ) c7(bz, ey); #c1(TMEM101) c2(XP_011523653) c3(transmembrane protein 101 isoform X2) c4(318144) c5(318145, 318146, 318147, 318148, 318149, 318150, 318151, 318152, 318153, 318154, 318155) c6( ) c7(v); #c1(TMEM101) c2(XP_011523655) c3(transmembrane protein 101 isoform X1) c4(318156) c5(318157, 318158, 318159, 318160, 318161) c6( ) c7(v); #c1(TMEM105) c2(NP_848615) c3(transmembrane protein 105) c4(253994) c5(253995, 253996, 253997, 253998, 253999, 254000) c6( ) c7(ac); #c1(TMEM1068) c2(XP_005249846) c3(transmembrane protein 1068 isoform X1) c4(269895, 269896, 269897) c5(269898, 269899, 269900, 269901, 269902, 269903, 269904, 269905, 269906, 269907, 269908, 269909, 269910, 269911, 269912, 269913, 269914, 269915, 269916, 269917, 269918) c6( ) c7(VZ, hb, c, WY, Ol, aaE); #c1(TMEM108) c2(NP_001269794) c3(transmembrane protein 108 isoform 2 precursor) c4(102851) c5(102852, 102853, 102854, 102855, 102856, 102857) c6( ) c7(bL, v, an); #c1(TMEM108) c2(XP_011511399) c3(transmembrane protein 108 isoform X1) c4(301972, 301973, 301974, 301975, 301976) c5(301977, 301978, 301979, 301980, 301981, 301982, 301983, 301984, 301985, 301986, 301987, 301988, 301989, 301990, 301991, 301992, 301993, 301994, 301995, 301996, 301997, 301998, 301999, 302000, 302001, 302002, 302003, 302004, 302005, 302006, 302007, 302008, 302009, 302010) c6( ) c7(bL, v, an); #c1(TMEM11) c2(NP_003867) c3(transmembrane protein 11, mitochondrial) c4(141639) c5(141640, 141641, 141642, 141643, 141644, 141645) c6( ) c7(nv, hL, cfE, xH); #c1(TMEM114) c2(NP_001277026) c3(transmembrane protein 114 isoform c) c4(108984) c5(108985, 108986, 108987, 108988, 108989, 108990) c6( ) c7(arm); #c1(TMEM115) c2(NP_008955) c3(transmembrane protein 115) c4(169784) c5(169785, 169786, 169787, 169788, 169789, 169790) c6( ) c7(s); #c1(TMEM117) c2(NP_001273141) c3(transmembrane protein 117 isoform c) c4(104354) c5(104355, 104356, 104357, 104358, 104359, 104360) c6( ) c7(oe, fq); #c1(TMEM117) c2(NP_001273142) c3(transmembrane protein 117 isoform d) c4( ) c5(104361, 104362, 104363, 104364, 104365, 104366) c6( ) c7(oe, fq); #c1(TMEM117) c2(XP_011537134) c3(transmembrane protein 117 isoform X1) c4(334862, 334863) c5(334864, 334865, 334866, 334867, 334868, 334869) c6( ) c7(oe, fq); #c1(TMEM126A) c2(NP_001231664) c3(transmembrane protein 126A isoform 2) c4( ) c5(87434, 87435, 87436, 87437, 87438) c6( ) c7(vd, awK, cMX); #c1(TMEM126A) c2(NP_115649) c3(transmembrane protein 126A isoform 1) c4(223447, 223448) c5(223449, 223450, 223451, 223452, 223453, 223454, 223455) c6( ) c7(vd, awK, cMX); #c1(TMEM127) c2(NP_001180233) c3(transmembrane protein 127) c4(73475) c5(73476, 73477, 73478, 73479, 73480, 73481, 73482, 73483, 73484, 73485) c6( ) c7(T, PX, Hu, fr, anx, dr); #c1(TMEM128) c2(NP_001284480) c3(transmembrane protein 128 isoform 1) c4(111856, 111857) c5(111858, 111859, 111860, 111861, 111862, 111863, 111864, 111865, 111866, 111867, 111868, 111869, 111870, 111871, 111872, 111873) c6( ) c7(an); #c1(TMEM128) c2(NP_116316) c3(transmembrane protein 128 isoform 2) c4(226127) c5(226128, 226129, 226130, 226131, 226132, 226133) c6( ) c7(an); #c1(TMEM132A) c2(NP_060340) c3(transmembrane protein 132A isoform a precursor) c4(195488) c5(195489, 195490, 195491, 195492, 195493, 195494, 195495, 195496) c6(195497, 195498) c7(T, j, K); #c1(TMEM132A) c2(NP_821174) c3(transmembrane protein 132A isoform b precursor) c4(253353) c5(253354, 253355, 253356, 253357, 253358, 253359, 253360) c6( ) c7(T, j, K); #c1(TMEM1328) c2(NP_443139) c3(transmembrane protein 1328 isoform a) c4(229619) c5(229620, 229621, 229622, 229623, 229624, 229625) c6( ) c7(Y, dY, bA, an); #c1(TMEM132C) c2(NP_001129575) c3(transmembrane protein 132C precursor) c4(51853) c5(51854, 51855, 51856, 51857, 51858, 51859) c6( ) c7(aj); #c1(TMEM132D) c2(NP_597705) c3(transmembrane protein 132D precursor) c4(235079, 235080) c5(235081, 235082, 235083, 235084, 235085, 235086) c6( ) c7(bM, T, if, aw, ww, qN, hF, pd, x, ft, lg, kH, aT, h, abj, hn, afu, je, th, aW, aq, cm, hq, ck, iM, cj, k, bt); #c1(TMEM132D) c2(XP_011536196) c3(transmembrane protein 132D isoform X1) c4( ) c5(333486, 333487, 333488, 333489, 333490, 333491) c6( ) c7(bM, T, if, aw, ww, qN, hF, pd, x, ft, lg, kH, aT, h, abj, hn, afu, je, th, aW, aq, cm, hq, ck, iM, cj, k, bt); #c1(TMEM132E) c2(NP_001291367) c3(transmembrane protein 132E precursor) c4( ) c5(115756, 115757, 115758, 115759, 115760, 115761) c6( ) c7(aW, j, ac, aT); #c1(TMEM132E) c2(XP_011522615) c3(transmembrane protein 132E isoform X2) c4(317173) c5( ) c6( ) c7(aW, j, ac, aT); #c1(TMEM134) c2(NP_001072118) c3(transmembrane protein 134 isoform b) c4(35417) c5(35418, 35419, 35420, 35421, 35422, 35423) c6( ) c7(W); #c1(TMEM134) c2(NP_079400) c3(transmembrane protein 134 isoform a) c4(217924) c5(217925, 217926, 217927, 217928, 217929, 217930) c6( ) c7(W); #c1(TMEM135) c2(NP_001162195) c3(transmembrane protein 135 isoform 2) c4(66356, 66357) c5(66358, 66359, 66360, 66361, 66362, 66363, 66364, 66365, 66366, 66367, 66368, 66369, 66370, 66371, 66372, 66373, 66374, 66375) c6( ) c7(ac, aw, ey, nA, V, ajj, bA); #c1(TMEM135) c2(NP_075069) c3(transmembrane protein 135 isoform 1) c4(213704, 213705, 213706) c5(213707, 213708, 213709, 213710, 213711, 213712, 213713, 213714, 213715, 213716, 213717, 213718) c6( ) c7(ac, aw, ey, nA, V, ajj, bA); #c1(TMEM138) c2(NP_057548) c3(transmembrane protein 138) c4(191349) c5(191350, 191351, 191352, 191353, 191354, 191355) c6( ) c7(cMY); #c1(TMEM138) c2(XP_006718648) c3(transmembrane protein 138 isoform X1) c4(291949) c5(291950) c6( ) c7(cMY); #c1(TMEM138) c2(XP_011543402) c3(transmembrane protein 138 isoform X5) c4( ) c5(342294, 342295, 342296, 342297, 342298) c6( ) c7(cMY); #c1(TMEM1508) c2(XP_011525158) c3(transmembrane protein 1508 isoform X1) c4(319597) c5(319598, 319599, 319600, 319601, 319602, 319603, 319604, 319605, 319606, 319607) c6( ) c7(gv); #c1(TMEM151A) c2(NP_694998) c3(transmembrane protein 151A) c4(245630) c5(245631, 245632, 245633, 245634, 245635, 245636) c6( ) c7(kl); #c1(TMEM151B) c2(NP_001131032) c3(transmembrane protein 151B) c4(52557, 52558) c5(52559, 52560, 52561, 52562, 52563, 52564, 52565, 52566, 52567, 52568, 52569, 52570) c6( ) c7(kl); #c1(TMEM154) c2(NP_689893) c3(transmembrane protein 154 precursor) c4(244276) c5(244277, 244278, 244279, 244280, 244281, 244282) c6( ) c7(fq); #c1(TMEM154) c2(XP_011530018) c3(transmembrane protein 154 isoform X1) c4(325815) c5(325816, 325817, 325818, 325819, 325820, 325821) c6( ) c7(fq); #c1(TMEM158) c2(NP_056259) c3(transmembrane protein 158 precursor) c4(186783) c5(186784, 186785, 186786, 186787, 186788, 186789, 186790) c6( ) c7(aW, T, fq, aT); #c1(TMEM160) c2(NP_060324) c3(transmembrane protein 160 precursor) c4(195396) c5(195397, 195398, 195399, 195400, 195401, 195402) c6( ) c7(v); #c1(TMEM161B) c2(NP_699185) c3(transmembrane protein 161B isoform 2) c4(245813, 245814) c5(245815, 245816, 245817, 245818, 245819, 245820) c6( ) c7(bM); #c1(TMEM161B) c2(XP_006714616) c3(transmembrane protein 161B isoform X2) c4( ) c5(287927, 287928, 287929, 287930, 287931, 287932) c6( ) c7(bM); #c1(TMEM163) c2(NP_112185) c3(transmembrane protein 163) c4(220667, 220668) c5(220669, 220670, 220671, 220672, 220673, 220674) c6( ) c7(an); #c1(TMEM163) c2(XP_011510251) c3(transmembrane protein 163 isoform X1) c4( ) c5(300857, 300858, 300859, 300860, 300861, 300862) c6( ) c7(an); #c1(TMEM165) c2(NP_060945) c3(transmembrane protein 165 precursor) c4(198840, 198841) c5(198842, 198843, 198844, 198845, 198846, 198847, 198848, 198849, 198850, 198851, 198852, 198853) c6( ) c7(arv, cMZ, Km, dv); #c1(TMEM169) c2(NP_001135784) c3(transmembrane protein 169) c4(53249, 53250, 53251) c5(53252, 53253, 53254, 53255, 53256, 53257, 53258, 53259, 53260, 53261, 53262, 53263, 53264, 53265, 53266, 53267, 53268, 53269, 53270, 53271, 53272, 53273, 53274, 53275, 53276, 53277, 53278, 53279, 53280, 53281) c6( ) c7(at, j); #c1(TMEM170A) c2(NP_660297) c3(transmembrane protein 170A isoform 1) c4(240781) c5(240782, 240783, 240784, 240785, 240786, 240787, 240788, 240789, 240790, 240791) c6( ) c7(j); #c1(TMEM171) c2(NP_001154814) c3(transmembrane protein 171 isoform 2) c4(61101) c5(61102, 61103, 61104, 61105, 61106, 61107) c6( ) c7(dS); #c1(TMEM171) c2(NP_775761) c3(transmembrane protein 171 isoform 1) c4(250203) c5(250204, 250205, 250206, 250207, 250208, 250209) c6( ) c7(dS); #c1(TMEM173) c2(NP_938023) c3(stimulator of interferon genes protein isoform 1) c4(259537, 259538) c5(259539, 259540, 259541, 259542, 259543, 259544) c6( ) c7(Uq, AH, jx, lo, bw, it); #c1(TMEM173) c2(XP_011535941) c3(stimulator of interferon genes protein isoform X2) c4( ) c5(333228, 333229, 333230, 333231, 333232, 333233) c6( ) c7(Uq, AH, jx, lo, bw, it); #c1(TMEM175) c2(NP_001284354) c3(transmembrane protein 175 isoform 2) c4(111758) c5( ) c6( ) c7(an); #c1(TMEM175) c2(NP_001284355) c3(transmembrane protein 175 isoform 3) c4( ) c5(111759, 111760, 111761, 111762, 111763) c6( ) c7(an); #c1(TMEM175) c2(NP_115702) c3(transmembrane protein 175 isoform 1) c4(223646) c5(223647, 223648, 223649, 223650, 223651, 223652, 223653) c6( ) c7(an); #c1(TMEM175) c2(XP_005272364) c3(transmembrane protein 175 isoform X5) c4(284004, 284005) c5(284006, 284007, 284008, 284009, 284010, 284011, 284012, 284013, 284014, 284015, 284016, 284017) c6( ) c7(an); #c1(TMEM176B) c2(NP_001094784) c3(transmembrane protein 176B isoform b) c4(40705) c5(40706, 40707, 40708, 40709, 40710, 40711) c6( ) c7(H, fr, L); #c1(TMEM176B) c2(NP_054739) c3(transmembrane protein 176B isoform a) c4(177500) c5(177501, 177502, 177503, 177504, 177505, 177506, 177507, 177508, 177509, 177510, 177511, 177512, 177513, 177514, 177515, 177516, 177517, 177518, 177519, 177520, 177521, 177522, 177523, 177524, 177525, 177526) c6( ) c7(H, fr, L); #c1(TMEM178A) c2(NP_689603) c3(transmembrane protein 178A isoform 1 precursor) c4(243221, 243222) c5(243223, 243224, 243225, 243226, 243227, 243228, 243229) c6( ) c7(na); #c1(TMEM178A) c2(XP_005264202) c3(transmembrane protein 178A isoform X2) c4( ) c5(278700, 278701, 278702, 278703, 278704) c6( ) c7(na); #c1(TMEM18) c2(NP_690047) c3(transmembrane protein 18) c4(244814, 244815) c5(244816, 244817, 244818, 244819, 244820, 244821, 244822, 244823, 244824, 244825, 244826, 244827) c6( ) c7(bL, bM, d, qQ, aj, v, fq, eA, J); #c1(TMEM182) c2(NP_653233) c3(transmembrane protein 182 precursor) c4(239258) c5(239259, 239260, 239261, 239262, 239263, 239264) c6( ) c7(dw, oe, bK, aw, ED); #c1(TMEM182) c2(XP_011508933) c3(transmembrane protein 182 isoform X2) c4(299495) c5(299496, 299497, 299498, 299499, 299500, 299501) c6( ) c7(dw, oe, bK, aw, EQ); #c1(TMEM183A) c2(NP_612400) c3(transmembrane protein 183A) c4(236385) c5(236386, 236387, 236388, 236389, 236390, 236391) c6( ) c7(cz); #c1(TMEM184C) c2(NP_060711) c3(transmembrane protein 184C) c4(197335) c5(197336, 197337, 197338, 197339, 197340, 197341) c6( ) c7(hd, nB); #c1(TMEM185A) c2(NP_001167563) c3(transmembrane protein 185A isoform 2) c4(69266) c5(69267, 69268, 69269, 69270, 69271, 69272, 69273, 69274, 69275, 69276, 69277, 69278) c6( ) c7(nf, nA); #c1(TMEM185A) c2(NP_115897) c3(transmembrane protein 185A isoform 1) c4(224563, 224564) c5(224565, 224566, 224567, 224568, 224569, 224570) c6( ) c7(nf, nA); #c1(TMEM187) c2(XP_011529501) c3(transmembrane protein 187 isoform X1) c4(324980, 324981, 324982) c5(324983, 324984, 324985, 324986, 324987, 324988, 324989, 324990, 324891, 324992, 324993, 324994, 324995, 324996, 324997, 324998, 324999, 325000) c6( ) c7(eZ); #c1(TMEM189) c2(NP_001155977) c3(transmembrane protein 189 isoform 2) c4(61680) c5(61681, 61682, 61683, 61684, 61685, 61686, 61687, 61688) c6( ) c7(T, dA, WT, ci, PJ, eW, ad, hX, h, BZ, K, ae, avQ, ak, anR, d, CT, lo, as, pb, ck, Qi, iO, vW, c, iT, eB, U, bC, bt, xg, 8); #c1(TMEM189) c2(NP_954580) c3(transmembrane protein 189 isoform 1) c4(261044, 261045) c5(261046, 261047, 261048, 261049, 261050, 261051, 261052, 261053, 261054, 261055, 261056, 261057) c6( ) c7(T, dA, WT, ci, PJ, eW, ad, hX, h, BZ, K, ae, avQ, ak, anR, d, CT, lo, as, pb, ck, Qi, iO, vW, c, iT, eB, U, bC, bt, xg, B); #c1(TMEM189-UBE2V1) c2(NP_954673) c3(TMEM189-UBE2V1 fusion protein) c4(261240) c5(261241, 261242, 261243, 261244, 261245, 261246, 261247, 261248, 261249, 261250) c6( ) c7(T, dA, WT, ci, PJ, eW, ad, hX, cF, h, BZ, K, ae, avQ, ak, anR, d, CT, lo, as, pb, ck, Qi, iO, vW, c, iT, eB, U, bC, bt, xg, B); #c1(TMEM199) c2(NP_689677) c3(transmembrane protein 199) c4(243540, 243541) c5(243542, 243543, 243544, 243545, 243546, 243547, 243548, 243549, 243550, 243551, 243552) c6( ) c7(aW, aT); #c1(TMEM2) c2(NP_001129292) c3(transmembrane protein 2 isoform b) c4(51363) c5(51364, 51365, 51366, 51367, 51368, 51369, 51370, 51371, 51372, 51373, 51374, 51375, 51376) c6( ) c7(ae, oe, ad); #c1(TMEM2) c2(NP_037522) c3(transmembrane protein 2 isoform a) c4(175991, 175992, 175993) c5(175994, 175995, 175996, 175997, 175998, 175999, 176000, 176001, 176002, 176003, 176004) c6( ) c7(ae, oe, ad); #c1(TMEM200A) c2(NP_001245206) c3(transmembrane protein 200A) c4(92695) c5(92696, 92697, 92698, 92699, 92700, 92701, 92702, 92703, 92704, 92705, 92706, 92707, 92708, 92709) c6( ) c7(jf, fq); #c1(TMEM205) c2(NP_001138888) c3(transmembrane protein 205) c4(58086) c5(58087, 58088, 58089, 58090, 58091, 58092, 58093, 58094, 58095, 58096, 58097, 58098, 58099, 58100) c6( ) c7(T); #c1(TMEM207) c2(NP_997199) c3(transmembrane protein 207 precursor) c4(265166) c5(265167, 265168, 265169, 265170, 265171, 265172) c6( ) c7(YL, T, j); #c1(TMEM209) c2(NP_001288092) c3(transmembrane protein 209 isoform 2) c4(113505, 113506) c5(113507, 113508, 113509, 113510, 113511, 113512, 113513, 113514, 113515, 113516, 113517, 113518, 113519, 113520, 113521, 113522, 113523, 113524, 113525, 113526, 113527, 113528, 113529, 113530) c6( ) c7(bz); #c1(TMEM209) c2(NP_116231) c3(transmembrane protein 209 isoform 1) c4(225865, 225866) c5(225867, 225868, 225869, 225870, 225871, 225872, 225873, 225874, 225875, 225876, 225877) c6( ) c7(bz); #c1(TMEM209) c2(XP_011514950) c3(transmembrane protein 209 isoform X2) c4(307713) c5( ) c6( ) c7(bz); #c1(TMEM209) c2(XP_011514951) c3(transmembrane protein 209 isoform X3) c4(307714) c5(307715) c6( ) c7(bz); #c1(TMEM213) c2(NP_001078898) c3(transmembrane protein 213 precursor) c4(37998) c5(37999, 38000, 38001, 38002, 38003) c6( ) c7(aC, py); #c1(TMEM213) c2(XP_005250224) c3(transmembrane protein 213 isoform X1) c4(270213) c5(270214, 270215, 270216, 270217, 270218, 270219, 270220) c6( ) c7(aC, py); #c1(TMEM215) c2(NP_997723) c3(transmembrane protein 215) c4(265783) c5(265784, 265785, 265786, 265787, 265788, 265789) c6( ) c7(oe); #c1(TMEM216) c2(NP_001167461) c3(transmembrane protein 216 isoform 2) c4(68980) c5(68981, 68982, 68983, 68984, 68985, 68986) c6( ) c7(ago, cNb, cNa, vm, zG, dr); #c1(TMEM216) c2(NP_001167462) c3(transmembrane protein 216 isoform 3) c4(68987) c5(68988, 68989, 68990, 68991, 68992, 68993) c6( ) c7(ago, cNb, cNa, vm, zG, dr); #c1(TMEM217) c2(NP_001273330) c3(transmembrane protein 217 isoform 3) c4(104690) c5(104691, 104692, 104693, 104694, 104695, 104696) c6( ) c7(af); #c1(TMEM217) c2(NP_660359) c3(transmembrane protein 217 isoform 1) c4(241096) c5(241097, 241098, 241099, 241100, 241101, 241102) c6( ) c7(af); #c1(TMEM217) c2(XP_011512667) c3(transmembrane protein 217 isoform X2) c4( ) c5(303687) c6( ) c7(af); #c1(TMEM219) c2(NP_001077082) c3(insulin-like growth factor-binding protein 3 receptor precursor) c4(37686) c5(37687, 37688, 37689, 37690, 37691, 37692, 37693, 37694, 37695, 37696) c6( ) c7(ae, T, bM, aW, aT, bz, ad); #c1(TMEM220) c2(NP_001004313) c3(transmembrane protein 220 precursor) c4(20546) c5(20547, 20548, 20549, 20550, 20551, 20552) c6( ) c7(aw); #c1(TMEM220) c2(XP_005256691) c3(transmembrane protein 220 isoform X1) c4(274296) c5(274297, 274298, 274299, 274300, 274301, 274302) c6( ) c7(aw); #c1(TMEM229A) c2(NP_001129474) c3(transmembrane protein 229A) c4(51554) c5(51555, 51556, 51557, 51558, 51559, 51560) c6( ) c7(fq); #c1(TMEM231) c2(NP_001070884) c3(transmembrane protein 231 isoform 1) c4(34890) c5(34891, 34892, 34893, 34894, 34895, 34896, 34897) c6( ) c7(cNc, ago, cNd); #c1(TMEM231) c2(NP_001070886) c3(transmembrane protein 231 isoform 2) c4(34898) c5(34899, 34900, 34901, 34902, 34903, 34904) c6( ) c7(cNc, ago, cNd); #c1(TMEM233) c2(NP_001130006) c3(transmembrane protein 233) c4(52406) c5(52407, 52408, 52409, 52410, 52411, 52412) c6( ) c7(hH, j); #c1(TMEM237) c2(NP_001037850) c3(transmembrane protein 237 isoform a) c4(34143, 34144) c5(34145, 34146, 34147, 34148, 34149, 34150, 34151, 34152, 34153, 34154, 34155, 34156) c6( ) c7(cNe); #c1(TMEM237) c2(NP_689601) c3(transmembrane protein 237 isoform b) c4(243189, 243190, 243191) c5(243192, 243193, 243194, 243195, 243196, 243197, 243198, 243199, 243200, 243201, 243202, 243203, 243204, 243205, 243206, 243207, 243208, 243209) c6( ) c7(cNe); #c1(TMEM241) c2(NP_116322) c3(transmembrane protein 241) c4(226145) c5(226146, 226147, 226148, 226149, 226150, 226151, 226152, 226153, 226154, 226155, 226156, 226157) c6( ) c7(ac); #c1(TMEM241) c2(XP_005258430) c3(transmembrane protein 241 isoform X4) c4( ) c5(275669, 275670, 275671, 275672, 275673) c6( ) c7(ac); #c1(TMEM241) c2(XP_006722624) c3(transmembrane protein 241 isoform X6) c4(294779) c5(294780, 294781, 294782, 294783, 294784, 294785) c6( ) c7(ac); #c1(TMEM241) c2(XP_011524534) c3(transmembrane protein 241 isoform X1) c4(319110) c5(319111) c6( ) c7(ac); #c1(TMEM241) c2(XP_011524535) c3(transmembrane protein 241 isoform X2) c4(319112) c5( ) c6( ) c7(ac); #c1(TMEM244) c2(NP_001010876) c3(transmembrane protein 244) c4(23898) c5(23899, 23900, 23901, 23902, 23903, 23904, 23905, 23906, 23907, 23908) c6( ) c7(v, cd); #c1(TMEM245) c2(NP_114401) c3(transmembrane protein 245) c4(222531, 222532) c5(222533, 222534, 222535, 222536, 222537, 222538, 222539, 222540, 222541, 222542, 222543, 222544) c6( ) c7(ad); #c1(TMEM245) c2(XP_011516749) c3(transmembrane protein 245 isoform X2) c4(310206) c5(310207, 310208, 310209, 310210, 310211, 310212) c6( ) c7(ad); #c1(TMEM25) c2(NP_001137507) c3(transmembrane protein 25 isoform 2 precursor) c4(55941, 55942) c5(55943, 55944, 55945, 55946, 55947, 55948, 55949, 55950, 55951, 55952, 55953, 55954, 55955, 55956, 55957, 55958) c6( ) c7(aW, aT); #c1(TMEM25) c2(NP_001137508) c3(transmembrane protein 25 isoform 3 precursor) c4(55959) c5(55960, 55961, 55962, 55963, 55964, 55965) c6( ) c7(aW, aT); #c1(TMEM25) c2(NP_001137509) c3(transmembrane protein 25 isoform 4 precursor) c4(55966) c5(55967, 55968, 55969, 55970, 55971, 55972) c6( ) c7(aW, aT); #c1(TMEM25) c2(NP_001137510) c3(transmembrane protein 25 isoform 5 precursor) c4(55973) c5(55974, 55975, 55976, 55977, 55978, 55979, 55980, 55981, 55982, 55983, 55984, 55985) c6( ) c7(aW, aT); #c1(TMEM25) c2(NP_116169) c3(transmembrane protein 25 isoform 1 precursor) c4(225536) c5(225537, 225538, 225539, 225540, 225541, 225542) c6( ) c7(aW, aT); #c1(TMEM25) c2(XP_011541338) c3(transmembrane protein 25 isoform X2) c4(339943) c5(339944, 339945, 339946, 339947, 339948, 339949) c6( ) c7(aW, aT); #c1(TMEM259) c2(NP_001028198) c3(membralin isoform 1) c4(30360) c5(30361, 30362, 30363, 30364, 30365, 30366) c6( ) c7(ci); #c1(TMEM259) c2(NP_219488) c3(membralin isoform 2) c4( ) c5(228588, 228589, 228590, 228591, 228592, 228593, 228594) c6( ) c7(ci); #c1(TMEM259) c2(XP_005259733) c3(membralin isoform X2) c4(276279) c5( ) c6( ) c7(ci); #c1(TMEM261) c2(NP_219500) c3(transmembrane protein 261) c4(228653) c5(228654, 228655, 228656, 228657, 228658, 228659) c6( ) c7(alv, ad); #c1(TMEM27) c2(NP_065716) c3(collectrin precursor) c4(205056) c5(205057, 205058, 205059, 205060, 205061, 205062) c6( ) c7(amA, dy, wS, KW); #c1(TMEM30A) c2(NP_001137430) c3(cell cycle control protein 50A isoform 2) c4(55679, 55680) c5(55681, 55682, 55683, 55684, 55685, 55686, 55687, 55688, 55689, 55690, 55691, 55692, 55693, 55694, 55695, 55696) c6( ) c7(ey); #c1(TMEM30A) c2(NP_060717) c3(cell cycle control protein 50A isoform 1) c4(197431, 197432, 197433) c5(197434, 197435, 197436, 197437, 197438, 197439, 197440, 197441, 197442, 197443, 197444, 197445, 197446, 197447, 197448, 197449, 197450, 197451, 197452, 197453) c6( ) c7(ey); #c1(TMEM308) c2(NP_001017970) c3(cell cycle control protein 508) c4(26691, 26692) c5(26693, 26694, 26695, 26696, 26697, 26698, 26699, 26700, 26701, 26702) c6( ) c7(Y, bjl, ip); #c1(TMEM37) c2(NP_899063) c3(voltage-dependent calcium channel gamma-like subunit) c4(257938) c5(257939, 257940, 257941, 257942, 257943, 257944) c6( ) c7(zQ, ci); #c1(TMEM38A) c2(NP_076979) c3(trimeric intracellular cation channel type A) c4(214564) c5(214565, 214566, 214567, 214568, 214569, 214570) c6( ) c7(qa, cz); #c1(TMEM388) c2(NP_060582) c3(trimeric intracellular cation channel type B) c4(196673, 196674, 196675) c5(196676, 196677, 196678, 196679, 196680, 196681, 196682) c6( ) c7(cNf, v, zp); #c1(TMEM388) c2(XP_005252132) c3(trimeric intracellular cation channel type B isoform X1) c4( ) c5(271567, 271568, 271569, 271570, 271571, 271572) c6( ) c7(cNf, v, zp); #c1(TMEM388) c2(XP_005252133) c3(trimeric intracellular cation channel type B isoform X2) c4(271573) c5(271574, 271575, 271576, 271577, 271578, 271579) c6( ) c7(cNf, v, zp); #c1(TMEM388) c2(XP_005252135) c3(trimeric intracellular cation channel type B isoform X6) c4( ) c5(271580, 271581, 271582, 271583, 271584, 271585) c6( ) c7(cNf, v, zp); #c1(TMEM388) c2(XP_011517135) c3(trimeric intracellular cation channel type B isoform X7) c4(310663) c5(310664, 310665, 310666, 310667, 310668) c6( ) c7(cNf, v, zp); #c1(TMEM39A) c2(NP_060736) c3(transmembrane protein 39A) c4(197547, 197548) c5(197549, 197550, 197551, 197552, 197553, 197554) c6( ) c7(V, ac, eZ); #c1(TMEM39A) c2(XP_005247635) c3(transmembrane protein 39A isoform X2) c4(267891, 267892) c5( ) c6( ) c7(V, ac, eZ); #c1(TMEM39A) c2(XP_011511260) c3(transmembrane protein 39A isoform X3) c4( ) c5(301750, 301751, 301752, 301753, 301754, 301755, 301756, 301757, 301758, 301759, 301760, 301761, 301762, 301763, 301764, 301765, 301766, 301767) c6( ) c7(V, ac, eZ); #c1(TMEM40) c2(NP_001271335) c3(transmembrane protein 40 isoform a) c4(103904, 103905) c5(103906, 103907, 103908, 103909, 103910, 103911, 103912, 103913) c6( ) c7(WY); #c1(TMEM40) c2(NP_001271336) c3(transmembrane protein 40 isoform c) c4(103914) c5(103915, 103916, 103917, 103918, 103919, 103920) c6( ) c7(WY); #c1(TMEM40) c2(NP_001271337) c3(transmembrane protein 40 isoform d) c4(103921) c5(103922, 103923, 103924, 103925, 103926, 103927) c6( ) c7(WY); #c1(TMEM40) c2(NP_060776) c3(transmembrane protein 40 isoform b) c4( ) c5(197726, 197727, 197728, 197729, 197730, 197731, 197732, 197733) c6( ) c7(WY); #c1(TMEM43) c2(NP_077310) c3(transmembrane protein 43) c4(215186) c5(215187, 215188, 215189, 215190, 215191, 215192) c6( ) c7(cc, wK, cAq, oj, Fw, cd, cNg); #c1(TMEM45A) c2(NP_060474) c3(transmembrane protein 45A) c4( ) c5(196124, 196125, 196126, 196127, 196128) c6( ) c7(T, aW, aT, ag, iR, B); #c1(TMEM45A) c2(XP_005247626) c3(transmembrane protein 45A isoform X1) c4(267882, 267883) c5(267884, 267885, 267886, 267887, 267888, 267889, 267890) c6( ) c7(T, aW, aT, aq, iR, B); #c1(TMEM47) c2(NP_113630) c3(transmembrane protein 47) c4(221817) c5(221818, 221819, 221820, 221821, 221822, 221823) c6( ) c7(nf); #c1(TMEM5) c2(NP_055069) c3(transmembrane protein 5 isoform 1) c4(178740) c5(178741, 178742, 178743, 178744, 178745, 178746) c6( ) c7(vJ, UD, cNh, ci, Cd); #c1(TMEM508) c2(NP_006125) c3(transmembrane protein 508) c4(162225, 162226, 162227, 162228) c5(162229, 162230, 162231, 162232, 162233, 162234, 162235, 162236, 162237, 162238, 162239, 162240, 162241, 162242, 162243, 162244, 162245, 162246, 162247, 162248, 162249, 162250, 162251, 162252, 162253, 162254, 162255, 162256, 162257, 162258, 162259) c6( ) c7(T); #c1(TMEM55A) c2(NP_061180) c3(type 2 phosphatidylinnsitnl 4,5-bisphosphate 4-phosphatase) c4(199797) c5(199798, 199799, 199800, 199801, 199802, 199803) c6( ) c7(an); #c1(TMEM57) c2(XP_011540006) c3(macoilin isoform X2) c4(338320) c5(338321, 338322, 338323, 338324, 338325, 338326) c6( ) c7(j); #c1(TMEM60) c2(NP_116325) c3(transmembrane protein 60) c4(226165) c5(226166, 226167, 226168, 226169, 226170, 226171) c6( ) c7(eR); #c1(TMEM62) c2(NP_079232) c3(transmembrane protein 62) c4(217555) c5(217556, 217557, 217558, 217559, 217560, 217561) c6( ) c7(bM); #c1(TMEM63A) c2(NP_055513) c3(CSC1-like protein 1) c4(181628, 181629, 181630) c5(181631, 181632, 181633, 181634, 181635, 181636) c6( ) c7(aA); #c1(TMEM63A) c2(XP_006711905) c3(CSC1-like protein 1 isoform X5) c4( ) c5(286294, 286295, 286296, 286297, 286298, 286299, 286300, 286301, 286302, 286303, 286304, 286305) c6( ) c7(aA); #c1(TMEM67) c2(NP_001135773) c3(Meckelin isoform 2) c4(53213) c5(53214, 53215, 53216, 53217, 53218, 53219) c6( ) c7(aBW, ul, ago, arS, dO, al, cNi, hl, wB, KA, KF, vm, zG, cqq, Tp, cNj, cd); #c1(TMEM67) c2(NP_714915) c3(Meckelin isoform 1 precursor) c4(246618) c5(246619, 246620, 246621, 246622, 246623, 246624) c6( ) c7(aBW, ul, ago, arS, dO, al, cNi, hl, wB, KA, KF, vm, zG, cqq, Tp, cNj, cd); #c1(TMEM70) c2(NP_001035703) c3(transmembrane protein 70, mitochondrial isoform b) c4( ) c5(32970, 32971, 32972, 32973, 32974) c6( ) c7(lD, ly, cc, aW, cmH, cmG, aT, oj, aly, aNG, Pp, cNk, px, kC, lx, akP); #c1(TMEM70) c2(NP_060336) c3(transmembrane protein 70, mitochondrial isoform a) c4(195449, 195450) c5(195451, 195452, 195453, 195454, 195455, 195456, 195457) c6( ) c7(lD, ly, cc, aW, cmH, cmG, aT, oj, aly, aNG, Pp, cNk, px, kC, lx, akP); #c1(TMEM748) c2(NP_001291677) c3(transmembrane protein 748 isoform 1) c4(116328, 116329) c5(116330, 116331, 116332, 116333, 116334, 116335, 116336, 116337, 116338, 116339, 116340, 116341) c6( ) c7(V); #c1(TMEM79) c2(NP_115699) c3(transmembrane protein 79) c4(223617, 223618) c5(223619, 223620, 223621, 223622, 223623, 223624, 223625, 223626, 223627, 223628, 223629, 223630, 223631) c6( ) c7(eE); #c1(TMEM87A) c2(NP_001103973) c3(transmembrane protein 87A isoform 2 precursor) c4(42049) c5(42050, 42051, 42052, 42053, 42054, 42055) c6( ) c7(ac); #c1(TMEM87A) c2(NP_001273416) c3(transmembrane protein 87A isoform 3) c4(104852) c5(104853, 104854, 104855, 104856, 104857, 104858) c6( ) c7(ac); #c1(TMEM87A) c2(NP_056312) c3(transmembrane protein 87A isoform 1 precursor) c4(187028, 187029) c5(187030, 187031, 187032, 187033, 187034, 187035, 187036, 187037, 187038, 187039, 187040, 187041) c6( ) c7(ac); #c1(TMEM88) c2(NP_981956) c3(transmembrane protein 88) c4(263198) c5(263199, 263200, 263201, 263202, 263203, 263204) c6( ) c7(bz); #c1(TMEM89) c2(NP_001008270) c3(transmembrane protein 89 precursor) c4(23124) c5(23125, 23126, 23127, 23128, 23129, 23130) c6( ) c7(oe); #c1(TMEM88) c2(NP_001036055) c3(transmembrane protein 88 isoform a) c4(33890) c5(33891, 33892, 33893, 33894, 33895, 33896, 33897, 33898) c6( ) c7(T, bE, aW, aA, r, aT, bB, aF, q); #c1(TMEM88) c2(NP_057530) c3(transmembrane protein 88 isoform b) c4( ) c5(191267, 191268, 191269, 191270, 191271, 191272, 191273, 191274) c6( ) c7(T, bE, aW, aA, r, aT, bB, aF, q); #c1(TMEM88) c2(XP_011516206) c3(transmembrane protein 88 isoform X5) c4(309436) c5(309437, 309438, 309439, 309440) c6( ) c7(T, bE, aW, aA, r, aT, bB, aF, q); #c1(TMEM95) c2(XP_005256677) c3(transmembrane protein 95 isoform X2) c4(274288) c5(274289, 274290, 274291, 274292, 274293, 274294, 274295) c6( ) c7(aer); #c1(TMEM95) c2(XP_011522119) c3(transmembrane protein 95 isoform X1) c4(316752) c5(316753, 316754, 316755, 316756, 316757, 316758) c6( ) c7(aer); #c1(TMEM97) c2(NP_055388) c3(transmembrane protein 97) c4(180719) c5(180720, 180721, 180722, 180723, 180724, 180725, 180726, 180727, 180728, 180729, 180730, 180731) c6( ) c7(t, q, m, eM, r); #c1(TMEM97) c2(XP_005258022) c3(transmembrane protein 97 isoform X1) c4(275456) c5( ) c6( ) c7(t, q, m, eM, r); #c1(TMEM98) c2(NP_001288675) c3(transmembrane protein 98) c4(113920, 113921, 113922, 113923) c5(113924, 113925, 113926, 113927, 113928, 113929, 113930, 113931, 113932, 113933, 113934, 113935, 113936, 113937, 113938, 113939, 113940, 113941, 113942, 113943, 113944, 113945, 113946, 113947, 113948, 113948, 113950) c6( ) c7(B, bK, bX); #c1(TMF1) c2(NP_009045) c3(TATA element modulatory factor) c4(170392, 170393) c5(170394, 170395, 170396, 170397, 170398, 170399, 170400, 170401, 170402, 170403, 170404, 170405, 170406) c6( ) c7(kl, K, ad); #c1(TMF1) c2(XP_011532358) c3(TATA element modulatory factor isoform X1) c4(328518, 328519) c5(328520, 328521, 328522, 328523, 328524, 328525, 328526, 328527, 328528, 328529, 328530, 328531) c6( ) c7(kl, K, ad); #c1(TMIE) c2(NP_671729) c3(transmembrane inner ear expressed protein precursor) c4(242174) c5(242175, 242176, 242177, 242178, 242179, 242180) c6( ) c7(cNl, Bh, beM, bCy, bCd); #c1(TMIE) c2(XP_011531876) c3(transmembrane inner ear expressed protein isoform X1) c4( ) c5(327929) c6( ) c7(cNl, Bh, beM, bCy, bCd); #c1(TMIGD2) c2(NP_653216) c3(transmembrane and immunoglobulin domain-containing protein 2 isoform 1 precursor) c4(239136) c5(239137, 239138, 239139, 239140, 239141, 239142) c6( ) c7(K); #c1(TMIGD3) c2(NP_001289609) c3(transmembrane and immunoglobulin domain containing 3 isoform 4) c4(114296, 114297) c5(114298, 114299, 114300, 114301, 114302, 114303, 114304, 114305, 114306, 114307, 114308, 114309, 114310, 114311, 114312, 114313, 114314, 114315) c6( ) c7(bL, fe, fD, iV); #c1(TMLHE) c2(NP_001171726) c3(trimethyllysine dioxygenase, mitochondrial isoform 2 precursor) c4(71463) c5(71464, 71465, 71466, 71467, 71468, 71469) c6( ) c7(bN, cNm, nA, rz); #c1(TMLHE) c2(NP_060666) c3(trimethyllysine dioxygenase, mitochondrial isoform 1 precursor) c4(197066) c5(197067, 197068, 197069, 197070, 197071, 197072) c6( ) c7(bN, cNm, nA, rz); #c1(TMOD1) c2(NP_001159588) c3(tropomodulin-1) c4(64392, 64393) c5(64394, 64395, 64396, 64397, 64398, 64399, 64400, 64401, 64402, 64403, 64404, 64405, 64406, 64407, 64408, 64409) c6( ) c7(id, ad); #c1(TMOD2) c2(NP_001136357) c3(tropomodulin-2 isoform b) c4(54852) c5(54853, 54854, 54855, 54856, 54857, 54858) c6( ) c7(oe, id); #c1(TMOD2) c2(NP_055363) c3(tropomodulin-2 isoform a) c4(180605) c5(180606, 180607, 180608, 180609, 180610, 180611) c6( ) c7(oe, id); #c1(TMOD3) c2(NP_055362) c3(tropomodulin-3) c4(180587, 180588) c5(180589, 180590, 180591, 180592, 180593, 180594, 180595, 180596, 180597, 180598, 180599, 180600, 180601, 180602, 180603, 180604) c6( ) c7(oe, id); #c1(TMOD4) c2(NP_037485) c3(tropomodulin-4) c4(175794, 175795) c5(175796, 175797, 175798, 175799, 175800, 175801, 175802, 175803, 175804, 175805, 175806, 175807) c6( ) c7(T); #c1(TMOD4) c2(XP_005245161) c3(tropomodulin-4 isoform X2) c4(266332) c5(266333, 266334, 266335, 266336, 266337, 266338) c6( ) c7(T); #c1(TMPO) c2(NP_001027454) c3(thymopoietin isoform beta) c4(30188) c5(30189, 30190, 30191, 30192, 30193, 30194) c6( ) c7(jf, nZ, T, av, eW, A, mx, j, fu, ey, y, bz, bc, cNn); #c1(TMPO) c2(NP_001027455) c3(thymopoietin isoform gamma) c4(30195) c5(30196, 30197, 30198, 30199, 30200, 30201, 30202, 30203, 30204, 30205, 30206, 30207) c6( ) c7(jf, nZ, T, av, eW, A, mx, j, fu, ey, y, bz, bc, cNn); #c1(TMPO) c2(NP_003267) c3(thymopoietin isoform alpha) c4(136945) c5(136946, 136947, 136948, 136949, 136950, 136951) c6( ) c7(jf, nZ, T, av, eW, A, mx, j, fu, ey, y, bz, bc, cNn); #c1(TMPRSS11A) c2(NP_001107859) c3(transmembrane protease serine 11A isoform 2) c4(43040, 43041) c5(43042, 43043, 43044, 43045, 43046, 43047, 43048, 43049, 43050, 43051, 43052, 43053) c6( ) c7(it, ht, ff, en, hu); #c1(TMPRSS11A) c2(NP_872412) c3(transmembrane protease serine 11A isoform 1) c4(256310) c5(256311, 256312, 256313, 256314, 256315, 256316) c6( ) c7(it, ht, ff, en, hu); #c1(TMPRSS11B) c2(NP_872308) c3(transmembrane protease serine 11B) c4(256067) c5(256068, 256069, 256070, 256071, 256072, 256073, 256074, 256075, 256076) c6(256077, 256078) c7(ac, e, ht, aw, j, hu, eu); #c1(TMPRSS11B) c2(XP_011529911) c3(transmembrane protease serine 11B isoform X2) c4(325671) c5(325672, 325673, 325674, 325675, 325676) c6( ) c7(ac, e, ht, aw, j, hu, eu); #c1(TMPRSS11D) c2(NP_004253) c3(transmembrane protease serine 11D) c4(144618, 144619) c5(144620, 144621, 144622, 144623, 144624, 144625, 144626, 144627, 144628) c6(144629, 144630) c7(bM, T, aDu, Jr, aCT, ds, wc, dV, fd, aXd, XZ, ae, eW, ad, DF, hX); #c1(TMPRSS11D) c2(XP_005265767) c3(transmembrane protease serine 11D isoform X1) c4( ) c5(279708, 279709, 279710, 279711, 279712, 279713, 279714) c6(279715, 279716) c7(bM, T, aDu, Jr, aCT, ds, wc, dV, fd, aXd, XZ, ae, eW, ad, DF, hX); #c1(TMPRSS11E) c2(NP_054777) c3(transmembrane protease serine HE precursor) c4(177750, 177751) c5(177752, 177753, 177754, 177755, 177756, 177757, 177758, 177759, 177760, 177761, 177762, 177763, 177764, 177765) c6(177766, 177767) c7(iK, ff, en, anW); #c1(TMPRSS13) c2(NP_001070731) c3(transmembrane protease serine 13 isoform 1) c4(34815, 34816, 34817) c5(34818, 34819, 34820, 34821, 34822, 34823, 34824, 34825, 34826, 34827, 34828, 34829, 34830, 34831, 34832, 34833, 34834) c6( ) c7(T, qo, Uc, Ul, if, aA, it, j, ci, qN, PJ, fr, q, ad, rc, dP, ft, aE, lg, jZ, pX, dV, aT, bOu, NM, ae, VF, d, cKU, aW, Y, r, lo, aF, xH, g, kk, iK, bz, op, qe, c, eM, dc, vA, agl, DC, uz, ER, eg, Pr, B); #c1(TMPRSS13) c2(NP_001193718) c3(transmembrane protease serine 13 isoform 2) c4(82485) c5(82486, 82487, 82488, 82489, 82490, 82491) c6( ) c7(T, qo, Uc, Ol, if, aA, it, j, ci, qN, PJ, fr, q, ad, rc, dP, ft, aE, lg, jZ, pX, dV, aT, bOu, NM, ae, VF, d, cKU, aW, Y, r, lo, aF, xH, g, kk, iK, bz, op, qe, c, eM, dc, vA, agl, DC, uz, ER, eg, Pr, B); #c1(TMPRSS13) c2(NP_001193719) c3(transmembrane protease serine 13 isoform 3) c4(82492) c5(82493, 82494, 82495, 82496, 82497, 82498) c6( ) c7(T, qo, Uc, Ol, if, aA, it, j, ci, qN, PJ, fr, q, ad, rc, dP, ft, aE, lg, jZ, pX, dV, aT, bOu, NM, ae, VF, d, cKU, aW, Y, r, lo, aF, xH, g, kk, iK, bz, op, qe, c, eM, dc, vA, agl, DC, uz, ER, eg, Pr, B); #c1(TMPRSS13) c2(NP_001231924) c3(transmembrane protease serine 13 isoform 4) c4(87729) c5(87730, 87731, 87732, 87733, 87734, 87735, 87736) c6( ) c7(T, qo, Uc, Ol, if, aA, it, j, ci, qN, PJ, fr, q, ad, rc, dP, ft, aE, lg, jZ, pX, dV, aT, bOu, NM, ae, VF, d, cKU, aW, Y, r, lo, aF, xH, g, kk, iK, bz, op, qe, c, eM, dc, vA, agl, DC, uz, ER, eg, Pr, B); #c1(TMPRSS15) c2(NP_002763) c3(enteropeptidase precursor) c4(131790) c5(131791, 131792, 131793, 131794, 131795, 131796) c6( ) c7(T, EQ, v, cNo, ci, g); #c1(TMPRSS15) c2(XP_011527958) c3(enteropeptidase isoform X1) c4( ) c5(323018, 323019) c6( ) c7(T, EQ, v, cNo, ci, g); #c1(TMPRSS2) c2(NP_001128571) c3(transmembrane protease serine 2 isoform 1) c4(50282, 50283, 50284) c5(50285, 50286, 50287, 50288, 50289, 50290, 50291, 50292, 50293, 50294) c6( ) c7(gh, G, T, dA, fZ, n, bnS, Fb, ci, ad, ft, ds, ae, iU, NE, qt, AQ, wc, g, GU, np, ht); #c1(TMPRSS2) c2(XP_005261100) c3(transmembrane protease serine 2 isoform X3) c4(277211) c5( ) c6( ) c7(gh, G, T, dA, fZ, n, bnS, Fb, ci, ad, ft, ds, ae, iU, NE, qt, AQ, wc, g, GU, np, ht); #c1(TMPRSS2) c2(XP_011528033) c3(transmembrane protease serine 2 isoform X1) c4( ) c5(323119, 323120, 323121, 323122, 323123, 323124, 323125, 323126, 323127, 323128, 323129, 323130, 323131) c6( ) c7(gh, G, T, dA, fZ, n, bnS, Fb, ci, ad, ft, ds, ae, iU, NE, qt, AQ, wc, g, GU, np, ht); #c1(TMPRSS2) c2(XP_011528034) c3(transmembrane protease serine 2 isoform X2) c4( ) c5(323132, 323133, 323134, 323135, 323136) c6( ) c7(gh, G, T, dA, fZ, n, bnS, Fb, ci, ad, ft, ds, ae, iU, NE, qt, AQ, wc, g, GU, np, ht); #c1(TMPRSS3) c2(NP_001243246) c3(transmembrane protease serine 3 isoform 4) c4(90245) c5(90246, 90247, 90248, 90249, 90250, 90251) c6( ) c7(cZ, gJ, T, aE, agT, dd, mG, alA, cNq, yU, yZ, m, OM, t, cNp, Bh, bCJ); #c1(TMPRSS3) c2(NP_076927) c3(transmembrane protease serine 3 isoform 1) c4(214287, 214288) c5(214289, 214290, 214291, 214292, 214293, 214294, 214295, 214296, 214297, 214298, 214299, 214300) c6( ) c7(cZ, gJ, T, aE, agT, dd, mG, alA, cNq, yU, yZ, m, OM, t, cNp, Bh, bCJ); #c1(TMPRSS3) c2(NP_115781) c3(transmembrane protease serine 3 isoform 3) c4(223874) c5(223875, 223876, 223877, 223878, 223879, 223880) c6( ) c7(cZ, gJ, T, aE, agT, dd, mG, alA, cNq, yU, yZ, m, OM, t, cNp, Bh, bCJ); #c1(TMPRSS4) c2(NP_001077416) c3(transmembrane protease serine 4 isoform 3) c4(37828) c5(37829, 37830, 37831, 37832, 37833, 37834) c6( ) c7(cZ, T, aw, aA, bB, g, av, hd, aE, io, cNq, hB, dd, ff, r, aE, en, g, t, bz, eM, nB, bE, alA, m, Bh); #c1(TMPRSS4) c2(NP_001167022) c3(transmembrane protease serine 4 isoform 4) c4(68881) c5(68882, 68883, 68884, 68885, 68886, 68887) c6( ) c7(cZ, T, aw, aA, bB, q, av, hd, aE, io, cNq, hB, dd, ff, r, aE, en, g, t, bz, eM, nB, bE, alA, m, Bh); #c1(TMPRSS4) c2(NP_001167023) c3(transmembrane protease serine 4 isoform 5) c4(68888) c5(68889, 68890, 68891, 68892, 68893, 68894) c6( ) c7(cZ, T, aw, aA, bB, q, av, hd, aE, io, cNq, hB, dd, ff, r, aE, en, g, t, bz, eM, nB, bE, alA, m, Bh); #c1(TMPRSS4) c2(NP_063947) c3(transmembrane protease serine 4 isoform 1) c4(202394) c5(202395, 202396, 202397, 202398, 202399, 202400) c6( ) c7(cZ, T, aw, aA, bB, q, av, hd, aE, io, cNq, hB, dd, ff, r, aE, en, g, t, bz, eM, nB, bE, alA, m, Bh); #c1(TMPRSS6) c2(NP_705837) c3(transmembrane protease serine 6 isoform 2) c4(246303, 246304, 246305) c5(246306, 246307, 246308, 246309, 246310, 246311, 246312, 246313, 246314, 246315, 246316, 246317, 246318) c6( ) c7(bL, T, kP, yw, PN, oz, awC, aUW, aW, oW, aT, cz, yu, yy, K, pw, an, Rc, qD, ae, ad); #c1(TMPRSS6) c2(XP_006724225) c3(transmembrane protease serine 6 isoform X2) c4(295851) c5(295852, 295853, 295854, 295855, 295856, 295857, 295858, 295859, 295860, 295861, 295862) c6( ) c7(bL, T, kP, yw, PN, oz, awC, aUW, aW, oW, aT, cz, yu, yy, K, pw, an, Rc, qD, ae, ad); #c1(TMPRSS6) c2(XP_011528290) c3(transmembrane protease serine 6 isoform X1) c4(323355) c5(323356, 323357, 323358, 323359, 323360, 323361, 323362, 323363, 323364, 323365) c6( ) c7(bL, T, kP, yw, PN, oz, awC, aUW, aW, oW, aT, cz, yu, yy, K, pw, an, Rc, qD, ae, ad); #c1(TMPRSS7) c2(NP_001036040) c3(transmembrane protease serine 7) c4(33808) c5(33809, 33810, 33811, 33812, 33813) c6( ) c7(lB); #c1(TMPRSS7) c2(XP_011511057) c3(transmembrane protease serine 7 isoform X1) c4(301471, 301472, 301473) c5(301474, 301475, 301476, 301477, 301478, 301479, 301480, 301481, 301482, 301483, 301484, 301485, 301486, 301487, 301488, 301489, 301490, 301491, 301492) c6( ) c7(lB); #c1(TMPRSS9) c2(NP_892018) c3(transmembrane protease serine 9) c4(257625) c5(257626, 257627, 257628, 257629, 257630, 257631) c6( ) c7(PH); #c1(TMPRSS9) c2(XP_011526285) c3(transmembrane protease serine 9 isoform X6) c4(320547) c5(320548, 320549, 320550, 320551, 320552, 320553) c6( ) c7(pH); #c1(TMSB10) c2(NP_066926) c3(thymosin beta-10) c4(207522) c5(207523, 207524, 207525, 207526, 207527, 207528) c6( ) c7(T, dD, ea, eq, ci, av, hd, jz, aE, aT, Ex, K, bK, hu, Y, f J, cm, t, nM, Dy, ig, m); #c1(TMSB15B) c2(NP_919305) c3(thymosin beta-15B) c4(258522) c5(258523, 258524, 258525, 258526, 258527, 258528, 258529, 258530, 258531) c6( ) c7(kP, bE, bB, h, cm, ae, ad); #c1(TMSB4X) c2(NP_066932) c3(thymosin beta-4) c4(207545, 207546) c5(207547, 207548, 207549, 207550, 207551, 207552, 207553, 207554, 207555, 207556, 207557, 207558, 207559, 207560, 207561, 207562, 207563, 207564, 207565, 207566, 207567, 207568, 207569, 207570, 207571, 207572, 207573, 207574, 207575) c6(207576, 207577, 207578, 207579) c7(T, kh, aCA, aC, id, bfx, rf, aA, bB, fd, j, ci, fr, PJ, q, ad, eA, x, F, aE, K, bq, vx, hm, yF, le, eG, d, Y, r, aF, eM, bE, bsO, bm, k, hE); #c1(TMTC1) c2(NP_001180380) c3(transmembrane and TPR repeat-containing protein 1 isoform 1) c4(73892) c5(73893, 73894, 73895, 73896, 73897, 73898, 73899) c6( ) c7(he, fq, bK, Zt); #c1(TMTC1) c2(NP_787057) c3(transmembrane and TPR repeat-containing protein 1 isoform 2) c4(252033) c5(252034, 252035, 252036, 252037, 252038) c6( ) c7(he, fq, bK, Zt); #c1(TMTC1) c2(XP_005253556) c3(transmembrane and TPR repeat-containing protein 1 isoform X4) c4(272551, 272552, 272553) c5(272554, 272555, 272556, 272557, 272558, 272559, 272560, 272561, 272562, 272563, 272564, 272565, 272566, 272567, 272568, 272569, 272570, 272571) c6( ) c7(he, fq, bK, Zt); #c1(TMTC2) c2(NP_689801) c3(transmembrane and TPR repeat-containing protein 2 precursor) c4(243995) c5(243996, 243997, 243998, 243999, 244000, 244001) c6( ) c7(fe, fq, ad, pZ); #c1(TMTC3) c2(NP_861448) c3(transmembrane and TPR repeat-containing protein 3) c4(255587, 255588) c5(255589, 255590, 255591, 255592, 255593, 255594, 255595, 255596, 255597, 255598, 255599, 255600) c6( ) c7(gV, jh, hG); #c1(TMX1) c2(NP_110382) c3(thioredoxin-related transmembrane protein 1 precursor) c4(219834) c5(219835, 219836, 219837, 219838, 219839, 219840) c6( ) c7(ey, eZ); #c1(TMX2) c2(NP_001137484) c3(thioredoxin-related transmembrane protein 2 isoform 2) c4(55928) c5(55929, 55930, 55931, 55932, 55933, 55934) c6( ) c7(aW, aT); #c1(TMX2) c2(NP_057043) c3(thioredoxin-related transmembrane protein 2 isoform 1 precursor) c4(188613) c5(188614, 188615, 188616, 188617, 188618, 188619) c6( ) c7(aW, aT); #c1(TMX3) c2(NP_061895) c3(protein disulfide-isomerase TMX3 precursor) c4(201017, 201018) c5(201019, 201020, 201021, 201022, 201023, 201024, 201025, 201026, 201027, 201028) c6( ) c7(kn, kj); #c1(TMX3) c2(XP_011524334) c3(protein disulfide-isomerase TMX3 isoform X1) c4(319002) c5(319003, 319004, 319005, 319006, 319007, 319008, 319009, 319010) c6( ) c7(kn, kj); #c1(TNC) c2(NP_002151) c3(tenascin precursor) c4(125974) c5(125975, 125976, 125977, 125978, 125979, 125980, 125981, 125982, 125983, 125984, 125985, 125986, 125987, 125988, 125989, 125990) c6( ) c7(lD, bM, T, ea, if, e, al, bB, lR, ci, Hr, ip, Na, aE, Be, rn, fm, pX, K, lQ, eL, ly, eG, aW, Ls, g, as, eE, zE, eF, cm, eM, nB, wB, vy, Hb, m, fy, dD, pG, aw, qy, n, fr, cd, ai, Mo, Bl, jz, h, mJ, dx, wC, aiB, ks, kp, jT, cM, lx, dB, hk, ajd, nz, it, vQ, cNs, dA, fG, Lx, fZ, v, j, AO, Eh, q, eA, bag, nv, aT, Nc, Ex, zp, bq, ae, jf, bf, nO, Y, en, cNr, t, iK, pb, ck, cT, rR, cNt, all, ro, rA, Bh, awa, hS, kh, Dd, Fb, eq, SY, aFJ, ad, qC, fU, aHF, hd, dP, ib, av, iC, Ot, hP, lQ, uQ, d, qt, ff, eH, cr, aiz, si, bz, cNu, LB, Ew, zr, bE, z, gZ, aS, adg, lC, y); #c1(TNC) c2(XP_005252031) c3(tenascin isoform X16) c4(271468) c5(271469, 271470, 271471, 271472, 271473, 271474, 271475, 271476) c6( ) c7(lD, bM, T, ea, if, e, al, bB, lR, ci, Hr, ip, Na, aE, Be, rn, fm, pX, K, lQ, eL, ly, eG, aW, Ls, g, as, eE, zE, eF, cm, eM, nB, wB, vy, Hb, m, fy, dD, pG, aw, qy, n, fr, cd, ai, Mo, Bl, jz, h, mJ, dx, wC, aiB, ks, kp, jT, cM, lx, dB, hk, ajd, nz, it, vQ, cNs, dA, fG, Lx, fZ, v, j, AO, Eh, q, eA, bag, nv, aT, Nc, Ex zp, bq, ae, jf, bf, nO, Y, en, cNr, t, iK, pb, ck, cT, rR, cNt, all, ro, rA, Bh, awa, hS, kh, Dd, Fb, eq, SY, aFJ, ad, qC, fU, aHF, hd, dP, ib, av, iC, Ot, hP, lQ, uQ, d, qt, ff, eH, cr, aiz, si, bz, cNu, LB, Ew, zr, bE, z, gZ, aS, adg, lC, y); #c1(TNC) c2(XP_005252032) c3(tenascin isoform X18) c4(271477, 271478) c5(271479, 271480, 271481, 271482, 271483, 271484, 271485, 271486, 271487, 271488, 271489, 271490, 271491, 271492, 271493) c6(271494) c7(lD, bM, T, ea, if, e, al, bB, lR, ci, Hr, ip, Na, aE, Be, rn, fm, pX, K, lQ, eL, ly, eG, aW, Ls, g, as, eE, zE, eF, cm, eM, nB, wB, vy, Hb, m, fy, dD, pG, aw, qy, n, fr, cd, ai, Mo, Bl, jz, h, mJ, dx, wC, aiB, ks, kp, jT, cM, lx, dB, hk, ajd, nz, it, vQ, cNs, dA, fG, Lx, fZ, v, j, AO, Eh, q, eA, bag, nv, aT, Nc, Ex, zp, bq, ae, jf, bf, nO, Y, en, cNr, t, iK, pb, ck, cT, rR, cNt, all, ro, rA, Bh, awa, hS, kh, Dd, Fb, eg, SY, aFJ, ad, qC, fU, aHF, hd, dP, ib, av, iC, Ot, hP, lQ, uQ, d, qt, ff, eH, cr, aiz, si, bz, cNu, LB, Ew, zr, bE, z, gZ, aS, adg, lC, y); #c1(TNC) c2(XP_006717159) c3(tenascin isoform X1) c4(290783) c5( ) c6( ) c7(lD, bM, T, ea, if, e, al, bB, lR, ci, Hr, ip, Na, aE, Be, rn, fm, pX, K, lQ, eL, ly, eG, aW, Ls, g, as, eE, zE, eF, cm, eM, nB, wB, vy, Hb, m, fy, dD, pG, aw, qy, n, fr, cd, ai, Mo, Bl, jz, h, mJ, dx, wC, aiB, ks, kp, jT, cM, lx, dB, hk, ajd, nz, it, vQ, cNs, dA, fG, Lx, fZ, v, j, AO, Eh, q, eA, bag, nv, aT, Nc, Ex, zp, bq, ae, jf, bf, nO, Y, en, cNr, t, iK, pb, ck, cT, rR, cNt, all, ro, rA, Bh, awa, hS, kh, Dd, Fb, eq, SY, aFJ, ad, qC, fU, aHF, hd, dP, ib, av, iC, Ot, hP, lQ, uQ, d, qt, ff, eH, cr, aiz, si, bz, cNu, LB, Ew, zr, bE, z, gZ, aS, adg, lC, y); #c1(TNC) c2(XP_011516929) c3(tenascin isoform X11) c4(310441, 310442) c5(310443, 310444, 310445, 310446, 310447, 310448, 310449, 310450, 310451, 310452, 310453, 310454, 310455, 310456, 310457, 310458) c6( ) c7(lD, bM, T, ea, if, e, al, bB, lR, ci, Hr, ip, Na, aE, Be, rn, fm, pX, K, lQ, eL, ly, eG, aW, Ls, g, as, eE, zE, eF, cm, eM, nB, wB, vy, Hb, m, fy, dD, pG, aw, qy, n, fr, cd, ai, Mo, Bl, jz, h, mJ, dx, wC, aiB, ks, kp, jT, cM, lx, dB, hk, ajd, nz, it, vQ, cNs, dA, fG, Lx, fZ, v, j, AO, Eh, q, eA, bag, nv, aT, Nc, Ex, zp, bq, ae, jf, bf, nO, Y, en, cNr, t, iK, pb, ck, cT, rR, cNt, all, ro, rA, Bh, awa, hS, kh, Dd, Fb, eq, SY, aFJ, ad, qC, fU, aHF, hd, dP, ib, av, iC, Ot, hP, lQ, uQ, d, qt, ff, eH, cr, aiz, si, bz, cNu, LB, Ew, zr, bE, z, gZ, aS, adg, lC, y); #c1(TNC) c2(XP_011516931) c3(tenascin isoform X14) c4(310459) c5(310460, 310461, 310462, 310463, 310464, 310465, 310466, 310467) c6( ) c7(lD, bM, T, ea, if, e, al, bB, lR, ci, Hr, ip, Na, aE, Be, rn, fm, pX, K, lQ, eL, ly, eG, aW, Ls, g, as, eE, zE, eF, cm, eM, nB, wB, vy, Hb, m, fy, dD, pG, aw, qy, n, fr, cd, ai, Mo, Bl, jz, h, mJ, dx, wC, aiB, ks, kp, jT, cM, lx, dB, hk, ajd, nz, it, vQ, cNs, dA, fG, Lx, fZ, v, j, AO, Eh, q, eA, bag, nv, aT, Nc, Ex, zp, bq, ae, jf, bf, nO, Y, en, cNr, t, iK, pb, ck, cT, rR, cNt, all, ro, rA, Bh, awa, hS, kh, Dd, Fb, eq, SY, aFJ, ad, qC, fU, aHF, hd, dP, ib, av, iC, Ot, hP, IQ, uQ, d, qt, ff, eH, cr, aiz, si, bz, cNu, LB, Ew, zr, bE, z, gZ, aS, adg, IC, y); #c1(TNF) c2(NP_000585) c3(tumor necrosis factor) c4(13225, 13226) c5(13227, 13228, 13229, 13230, 13231, 13232, 13233, 13234, 13235, 13236, 13237, 13238, 13239, 13240, 13241, 13242, 13243, 13244, 13245, 13246, 13247, 13248, 13249, 13250, 13251, 13252, 13253, 13254, 13255, 13256) c6( ) c7(uB, gh, T, os, ea, bO, fd, Vd, ci, aY, bIt, aDI, bv, bQB, xy, aE, rw, bJj, dV, bbu, Ds, Bi, hu, zy, hH, LG, aiJ, cp, VF, aa, ly, azh, hC, az, nY, uY, dg, vs, tU, lk, GR, zV, axG, ba, fT, gt, Jr, nB, dc, iA, wE, Ji, cj, aFp, cNC, Zn, Dt, k, bAD, aZo, azg, fy, IS, vF, eg, aEw, LT, cE, nD, aYZ, bPN, ht, xJ, aj, PJ, bPL, qW, cGB, hr, tD, cd, zo, brn, Wy, aoc, aSa, IG, Gw, aNj, ey, ox, bl, bEg, NX, pl, mR, anP, sp, xi, ge, fQ, sm, bNY, fe, aMJ, CQ, adz, hq, vU, iO, ok, RB, dB, Fi, eD, bOj, Ei, ajd, aoB, E, aqm, abW, DM, jv, aZy, DD, aA, cz, bX, wy, nS, g, Wu, zn, av, aWb, nH, aCX, yu, Oi, cNB, cy, aAD, jj, rz, sX, caR, dl, bA, eu, le, aFS, bf, nO, fO, lC, bg, aMA, iy, lo, bRQ, cl, Vk, pb, Cv, ov, cT, rR, OW, ua, ac, ig, iM, Nk, iQ, mG, AU, tz, pS, bt, Ze, bQz, ao, rA, gV, og, Ve, acv, arS, axd, uG, iW, jh, aZH, oZ, dG, Sv, fu, uu, aYs, ad, wD, aoH, hX, HF, yt, vJ, Ot, oW, IQ, wm, cNG, bPM, aAy, WZ, cNH, lx, ZE, cH, cW, ff, Of, aLI, nh, afi, Mz, cxe, dq, cNM, py, EZ, Sm, aFd, iV, bz, aZz, aYt, DF, aJx, amK, oK, aDH, Om, anY, ag, aDB, cmZ, aDJ, ME, aEN, oQ, afT, Pk, lC, lf, ne, rk, iu, bsJ, oO, bM, lD, qo, vS, bQI, xS, if, e, bB, cL, gA, ur, auu, bh, sD, ajC, Tz, ip, yM, x, vV, fS, bFU, Yy, ja, us, azm, bc, akX, bQs, eG, up, YY, JI, dH, fc, hl, kt, pD, NR, sz, aFU, as, eE, eF, Qt, cm, bQF, bw, eY, aqr, lt, bQI, xD, ii, ki, vA, aGe, mx, vy, bcl, Dv, pJ, aFf, Vj, abh, avY, xN, dD, gU, bJs, aBe, Ht, wu, zt, yG, n, aCZ, uE, Mo, jz, no, pe, ec, zw, RN, Xe, ccy, bRM, eV, hn, bQx, cY, xP, A, fJ, lb, aeU, hQ, QP, po, yq, amo, bQL, vo, cNI, jq, bP, cA, aZR, Pl, ajn, hL, at, apY, bPs, awQ, ut, cNE, fL, eo, cB, B, qc, vQ, pF, dA, wL, IH, eX, YN, fF, GC, aNG, v, Qo, aFn, V, eJ, Yn, bQG, yw, bjv, bjA, WY, cNy, sl, ld, bRt, rS, aDt, azv, XZ, rE, ae, to, bIm, aFs, hM, jf, zH, iZ, vR, ev, DN, aLJ, afq, HL, acB, bu, t, cuQ, aff, vk, aHG, ck, kP, wO, gX, hD, auT, oX, yH, byK, vi, HQ, hl, ra, Yu, MH, dM, df, oR, wV, eg, qi, Fc, aGW, BY, hd, CJ, cNP, od, afm, Db, aLz, ds, aCJ, Hk, qh, hD, rN, JK, nJ, sj, d, je, hG, KS, wc, aFt, cNw, dN, th, anW, Z, Hv, dr, cND, aDN, bF, D, gk, yE, Ny, dO, bQS, ll, wz, gZ, aef, MJ, gy, Hs, rH, agl, ajt, y, kS, cNO, sH, hv, pC, cNA, aC, cNQ, fR, hV, azi, zs, atj, al, CH, axk, gf, qj, aGX, IR, aBm, Qp, aMB, wa, bOm, AW, bOn, wM, xE, bJG, u, Bc, rJ, pX, bW, bJK, M, aLr, K, wt, DY, dF, cnS, N, mH, bzH, eL, aEV, aCM, bn, aAg, aAT, qS, asD, mQ, aGQ, axu, wF, hN, aB, g, pL, ve, uC, iP, bRI, aJX, aik, yl, xK, aDs, AM, uy, aer, Gs, U, uo, dW, Hb, m, abX, bJv, NK, FW, sQ, aiK, sw, gp, aw, fN, BH, NJ, BF, apt, aBI, pM, aGQ, pH, eh, fK, asS, ft, kH, Lv, cU, Ne, nm, wb, uV, ZN, aDp, Ha, dx, aXy, arp, Ni, alw, ks, Og, aGg, YE, jT, cM, Zb, Ld, Zj, bMc, kT, ar, GG, W, SE, bbx, xD, wk, bo, mg, JM, Br, aiS, gg, IB, Pr, it, L, ayV, ach, aAf, fM, AL, wj, fG, jx, aee, wo, zN, uZ, bJw, j, hz, azF, sl, aYW, il, pd, eA, J, o, cNx, bJO, bJn, hb, nX, jZ, apJ, ceS, aCV, bg, bPQ, aCr, azO, kl, PK, xR, cNN, Ue, Y, Pg, apK, r, wl, aHU, cNE, en, wA, aoG, iK, bN, QG, sn, c, Dy, aQd, hA, hc, aDA, of, dh, tM, uS, caP, wR, Da, rK, dy, EY, fD, bxj, gT, LS, blu, gx, sY, kh, GI, aFe, bmQ, am, Pt, aZ, LX, em, id, bs, awz, bS, auq, SY, ah, iG, pl, hF, gh, iJ, dP, fU, ceQ, fX, sN, NY, cLg, oj, io, vB, aNp, bNL, hP, aSf, aOh, ji, NM, WW, uX, IU, BN, IR, anv, anX, aZI, eH, Sn, cr, si, hp, Fq, Pd, iR, YZ, KM, qa, dR, Nq, TA, Bv, Lj, aFb, eB, sG, aEs, aCI, cP, ei, Gu, hE, vt, xg, bol, bJx, pf, eh, zh, Jx, mF, fw, bMW, aR, bHS, dY, aDk, iI, iX, bOL, bAy, aYm, qM, bU, oi, H, dQ, eN, aWf, pk, hm, akV, zQ, bLs, aAu, aW, aEH, Ih, Rr, aOW, bdk, aRS, hJ, arZ, cNJ, eM, iT, Jp, qr, aqV, uJ, mk, gn, R, pw, aSs, qR, gD, aEj, My, bmW, ez, zj, Mi, ct, jG, qN, fr, kD, aPb, ai, eW, xC, ke, Bl, cc, hw, qg, wG, ql, kl, ju, zf, h, jy, Nf, aPe, dL, bam, pj, hB, vx, bnv, afu, wC, Nr, PT, OV, asp, oo, bVg, qY, aq, kp, mo, gG, dw, acD, op, Ix, oU, Wt, ZL, Qy, vD, bpC, NL, hk, uw, Qu, bm, uz, va, aAI, aDE, bai, bni, bD, bL, Ob, Dw, Ik, eR, Wz, dK, uv, yk, DV, rf, sM, cR, tc, baK, hy, OY, C, aoG, alx, ady, cF, ga, GL, mP, uT, Vr, gp, afQ, HC, aT, dz, bK, adV, UN, cNz, an, kU, af, aZQ, aQk, ND, iU, oV, aNi, akY, aDm, IA, kC, cNK, f, OC, wf, IY, ajI, akF, sS, wg, nM, pZ, Zg, vZ, IV, ahN, AH, fP, aGV, mf, CZ, bko, im, hS, Kd, qX, Ke, qb, aD, Me, oH, jE, pz, cNL, mC, Uy, cNv, LH, qC, XB, dZ, I, F, et, kL, xl, oz, sO, NS, azq, Os, vw, jo, aFI, vO, yF, uQ, bwk, Di, aFE, eZ, yy, Ej, aFr, xv, aF, gu, Tp, eK, Hp, LB, es, eO, axs, atM, bE, pE, Rv, z, uR, arj, aS, aGg, be, Lz, pK, XO, fh, X, Ex); #c1(TNFAIP1) c2(NP_066960) c3(BTB/POZ domain-containing adapter for CUL3-mediated RhoA degradation protein 2) c4(207784, 207785) c5(207786, 207787, 207788, 207789, 207790, 207791, 207792, 207793, 207794, 207795, 207796, 207797) c6( ) c7(bM, ac, aW, eZ, aT, v, my, ey, aF, y, af, uQ); #c1(TNFAIP2) c2(NP_006282) c3(tumor necrosis factor alpha-induced protein 2) c4(163565, 163566, 163567) c5(163568, 163569, 163570, 163571, 163572, 163573, 163574, 163575, 163576, 163577, 163578, 163579, 163580, 163581, 163582, 163583) c6( ) c7(GI, T, eM, if, ht, aA, By, hy, j, aF, qN, Gu, Gw, t, iK, jj, af); #c1(TNFAIP2) c2(XP_011535415) c3(tumor necrosis factor alpha-induced protein 2 isoform X2) c4(332448) c5(332449, 332450, 332451, 332452, 332453, 332454, 332455, 332456, 332457, 332458, 332459) c6( ) c7(GI, T, eM, if, ht, aA, By, hy, j, aF, qN, Gu, Gw, t, iK, jj, af); #c1(TNFAIP2) c2(XP_011535417) c3(tumor necrosis factor alpha-induced protein 2 isoform X3) c4( ) c5(332460) c6( ) c7(GI, T, eM, if, ht, aA, By, hy, j, aF, qN, Gu, Gw, t, iK, jj, af); #c1(TNFAIP3) c2(NP_006281) c3(tumor necrosis factor alpha-induced protein 3) c4(163539, 163540, 163541, 163542, 163543, 163544, 163545, 163546) c5(163547, 163548, 163549, 163550, 163551, 163552, 163553, 163554, 163555, 163556, 163557, 163558, 163559, 163560, 163561, 163562, 163563, 163564) c6( ) c7(bL, bM, T, dD, fM, eX, fN, jh, cL, j, eq, uE, V, q, Uy, o, ad, ai, wD, eV, hn, hH, af, hM, A, d, mR, HA, cr, ge, r, eZ, fe, hp, iV, t, cM, ve, pb, eU, zr, JM, cj, yH, ij, y); #c1(TNFAIP3) c2(XP_011534398) c3(tumor necrosis factor alpha-induced protein 3 isoform X2) c4(330784) c5(330785, 330786, 330787, 330788, 330789, 330790, 330791, 330792, 330793, 330794, 330795, 330796, 330797, 330798, 330799, 330800, 330801, 330802, 330803, 330804, 330805, 330806, 330807, 330808, 330809, 330810, 330811, 330812, 330813, 330814, 330815, 330816, 330817, 330818, 330819, 330820) c6( ) c7(bL, bM, T, dD, fM, eX, fN, jh, cL, j, eq, uE, V, q, Uy, o, ad, ai, wD, eV, hn, hH, af, hM, A, d, mR, HA, cr, ge, r, eZ, fe, hp, iV, t, cM, ve, pb, eU, zr, JM, cj, yH, ij, y); #c1(TNFAIP6) c2(NP_009046) c3(tumor necrosis factor-inducible gene 6 protein precursor) c4(170407) c5(170408, 170409, 170410, 170411, 170412, 170413) c6( ) c7(ai, T, wi, ds, fJ, JM, r, hN, IQ, Lw, t, Pk, cM, q, ad, pl, aa); #c1(TNFAIP8) c2(NP_001071122) c3(tumor necrosis factor alpha-induced protein 8 isoform b) c4(35301) c5(35302, 35303, 35304, 35305, 35306, 35307) c6( ) c7(T, if, oe, jh, bB, n, fr, jE, qN, ad, aT, ey, ae, aW, g, iK, bz, eM, iA, bE, m, it); #c1(TNFAIP8) c2(NP_001273742) c3(tumor necrosis factor alpha-induced protein 8 isoform a) c4(ID5744) c5(ID5745, 105746, 105747, 105748, 105749, 105750, 105751, 105752, 105753, 105754) c6( ) c7(T, if, oe, jh, bB, n, fr, jE, qN, ad, aT, ey, ae, aW, g, iK, bz, eM, iA, bE, m, it); #c1(TNFAIP8L2) c2(NP_078851) c3(tumor necrosis factor alpha-induced protein 8-like protein 2) c4(215752) c5(215753, 215754, 215755, 215756, 215757, 215758) c6( ) c7(Kd, hE, jE, eZ, hX); #c1(TNFAIP8L3) c2(NP_997264) c3(tumor necrosis factor alpha-induced protein 8-like protein 3) c4(265353) c5(265354, 265355, 265356, 265357, 265358, 265359) c6( ) c7(T); #c1(TNFRSFIOA) c2(NP_003835) c3(tumor necrosis factor receptor superfamily member 10A) c4(141246) c5(141247, 141248, 141249, 141250, 141251, 141252) c6( ) c7(gV, T, dD, fM, fR, pf, ht, jx, qy, aA, bB, fd, jh, eq, ci, bX, fr, q, ad, eA, wD, cF, F, ib, ec, fS, oW, aT, h, cNR, ja, dL, DU, jj, ae, eL, jf, A, d, B, s, je, aW, Y, ff, HA, hl, eH, r, aq, Io, aF, en, g, as, t, eF, bz, iK, iR, bN, ck, bE, iM, W, bE, eD, cj, at, aeM, m, y, ht, X); #c1(TNFRSF10B) c2(NP_003833) c3(tumor necrosis factor receptor superfamily member 10B isoform 1 precursor) c4(141239) c5(141240, 141241, 141242, 141243, 141244, 141245) c6( ) c7(bL, bM, T, aC, fM, fR, jp, e, jh, aA, bB, fd, fr, ci, q, ad, eA, eW, XX, bv, av, ib, aE, gd, aT, h, cNR, dL, K, ae, eL, cY, d, B, s, je, aW, Y, eH, cr, r, eZ, ag, lo, kp, aF, g, kk, t, eF, bz, iK, ck, bE, eU, iM, kP, eM, dB, bE, eD, AH, cj, m, y, ht, X, vi); #c1(TNFRSFIOB) c2(NP_671716) c3(tumor necrosis factor receptor superfamily member 10B isoform 2 precursor) c4(242146, 242147) c5(242148, 242149, 242150, 242151, 242152, 242153, 242154, 242155, 242156, 242157, 242158, 242159) c6( ) c7(bL, bM, T, aC, fM, fR, jp, e, jh, aA, bB, fd, fr, ci, q, ad, eA, eW, XX, bv, av, ib, aE, gd, aT, h, cNR, dL, K, ae, eL, cY, d, B, s, je, aW, Y, eH, cr, r, eZ, aq, lo, kp, aF, g, kk, t, eF, bz, iK, ck, bF, eU, iM, kP, eM, dB, bE, eD, AH, cj, m, y, bt, X, vi); #c1(TNFRSF10C) c2(NP_003832) c3(tumor necrosis factor receptor superfamily member 10C precursor) c4(141218, 141219, 141220) c5(141221, 141222, 141223, 141224, 141225, 141226, 141227, 141228, 141229, 141230, 141231, 141232, 141233, 141234, 141235, 141236, 141237, 141238) c6( ) c7(gV, T, fd, bB, amj, aoj, nA, eA, ad, anj, jz, aE, ec, aT, K, jj, MO, ae, Nr, hG, Y, eZ, po, g, f, t, cm, Nq, EW, bE, m, bt, B); #c1(TNFRSF10D) c2(NP_003831) c3(tumor necrosis factor receptor superfamily member 10D precursor) c4(141211) c5(141212, 141213, 141214, 141215, 141216, 141217) c6( ) c7(T, fR, aAz, fd, bB, hy, ci, eA, ad, aE, ec, aT, jj, ae, BN, aW, Y, aF, cm, bz, eM, bE, y, bt, ne); #c1(TNFRSF11A) c2(NP_001257880) c3(tumor necrosis factor receptor superfamily member 11A isoform 4 precursor) c4(95729) c5(95730, 95731, 95732, 95733, 95734, 95735) c6( ) c7(oO, T, kh, dD, mr, ea, zs, IH, e, zt, fd, cL, v, j, eq, wV, ai, o, ad, eA, cNT, zw, ds, rS, yg, aT, dV, bdM, ae, af, cNV, hm, bA, A, d, aW, Y, ff, eH, cNS, eZ, cNU, en, as, pL, eF, iV, bz, D, eM, yE, cj, uz, IS, fD, bi, zu, bt, Ze, y); #c1(TNFRSF11A) c2(NP_003830) c3(tumor necrosis factor receptor superfamily member 11A isoform 1 precursor) c4(141200) c5(141201, 141202, 141203, 141204, 141205, 141206, 141207, 141208, 141209, 141210) c6( ) c7(oO, T, kh, dD, mr, ea, zs, IH, e, zt, fd, cL, v, j, eq, wV, ai, o, ad, eA, cNT, zw, ds, rS, yg, aT, dV, bdM, ae, af, cNV, hm, bA, A, d, aW, Y, ff, eH, cNS, eZ, cNU, en, as, pL, eF, iV, bz, D, eM, yE, cj, uz, IS, fD, hi, zu, bt, Ze, y); #c1(TNFRSF11B) c2(NP_002537) c3(tumor necrosis factor receptor superfamily member 11B precursor) c4(129635) c5(129636, 129637, 129638, 129639, 129640, 129641) c6( ) c7(oO, T, ea, zs, e, al, fd, cL, zh, ci, cNX, Tz, aE, pX, M, aZn, K, dQ, azh, hm, aW, Np, hl, pL, eF, zV, ba, aGI, rq, eM, mx, azg, bi, dD, Ly, FG, zt, aw, zj, n, aj, fr, cd, ai, zw, IT, rC, zf, aFq, adX, awV, A, mR, Hz, aq, kp, pm, vU, adZ, bm, at, uz, pg, B, vQ, bL, dA, eR, mr, oe, IH, aA, cz, wo, v, j, V, q, J, o, eA, uT, rS, yg, aT, dz, ae, af, eu, bA, aRR, bf, fO, bg, aeS, r, cNW, akB, lo, rs, pa, iM, tW, ac, hc, cNt, cS, gT, zu, hl, bQb, vr, wV, dG, eq, azk, ad, dP, fU, abk, av, F, oW, bdM, iY, uX, je, vj, eH, eZ, cNU, aF, iR, HI, aZz, D, gk, yE, aS, ei, y); #c1(TNFRSF12A) c2(NP_057723) c3(tumor necrosis factor receptor superfamily member 12A precursor) c4(192505, 192506) c5(192507, 192508, 192509, 192510, 192511, 192512, 192513, 192514, 192515, 192516, 192517, 192518) c6( ) c7(bL, gh, T, dD, fM, hl, id, pf, ea, dK, aw, uG, aA, fd, n, v, eq, Fb, uE, V, eA, ad, hX, sN, hb, Dq, M, aT, cy, bl, K, ji, dQ, ae, Us, d, IR, aW, Y, Ib, aq, aF, g, cI, iR, t, KM, bz, eK, ck, D, ac, eM, dB, wO, WP, mx, hL, E, B); #c1(TNFRSF13B) c2(NP_036584) c3(tumor necrosis factor receptor superfamily member 13B) c4(174529, 174530) c5(174531, 174532, 174533, 174534, 174535, 174536, 174537, 174538, 174539, 174540, 174541, 174542) c6( ) c7(oO, bM, T, dA, jh, fd, aFF, eA, di, bjA, afm, ds, zA, DY, cOb, uQ, cOa, oV, ff, IC, cr, awv, eZ, afq, en, cNY, cNZ, Wt, asE, ck, IY, ac, zr, dJ, of, eB, cj, tr, fL, ei, bD, y, Ze, us); #c1(TNFRSF13C) c2(NP_443177) c3(tumor necrosis factor receptor superfamily member 13C) c4(229727) c5(229728, 229729, 229730, 229731, 229732, 229733) c6( ) c7(T, fM, iW, cOc, eX, jh, fd, V, mC, zn, x, ec, DY, eG, eH, cr, eZ, eF, Wt, aAB, ou, eB, cj, eo, fL, k, y, hv); #c1(TNFRSF14) c2(NP_001284534) c3(tumor necrosis factor receptor superfamily member 14 isoform 2 precursor) c4( ) c5(111983, 111984, 111985, 111986, 111987, 111988, 111989, 111990, 111991, 111992, 111993, 111994) c6( ) c7(bM, T, dD, akc, fR, aw, ht, jh, fd, eq, bh, V, ai, aR, eW, xE, xl, aT, hu, qw, A, gZ, aW, eZ, fe, hp, iV, eE, ik, eo, y, it); #c1(TNFRSF19) c2(NP_001191388) c3(tumor necrosis factor receptor superfamily member 19 isoform 3) c4(81490) c5(81491, 81492, 81493, 81494, 81495) c6( ) c7(av, d, hk, Y, r, V, bz, q, Qe); #c1(TNFRSF19) c2(NP_061117) c3(tumor necrosis factor receptor superfamily member 19 isoform 1 precursor) c4(199193) c5(199194, 199195, 199196, 199197, 199198, 199199) c6( ) c7(av, d, hk, Y, r, V, bz, q, Qe); #c1(TNFRSF19) c2(NP_683760) c3(tumor necrosis factor receptor superfamily member 19 isoform 2 precursor) c4(242553) c5(242554, 242555, 242556, 242557, 242558, 242559, 242560, 242561, 242562, 242563, 242564) c6( ) c7(av, d, hk, Y, r, V, bz, q, Qe); #c1(TNFRSF1A) c2(NP_001056) c3(tumor necrosis factor receptor superfamily member 1A precursor) c4(34423, 34424) c5(34425, 34426, 34427, 34428, 34429, 34430, 34431, 34432, 34433, 34434, 34435, 34436, 34437, 34438, 34439, 34440) c6(34441, 34442, 34443, 34444) c7(bM, T, fR, ea, fd, cL, lR, aGX, mF, aBm, Tz, amW, yM, xE, aE, bW, dV, Ds, K, hu, hH, bc, bzH, aa, eG, aW, axu, asD, hl, mQ, ih, fc, vs, as, bw, uC, qr, mx, U, uo, k, m, R, bks, dD, sQ, My, aw, NJ, aj, ct, aBI, qW, cd, ai, eh, aPb, jz, bud, ju, Lv, IG, cU, Ne, dL, jy, h, NX, pi, nP, PT, mR, A, lb, fe, aq, CQ, bQL, cM, kT, RB, xD, Fi, hs, uz, ut, at, eo, fL, cOe, cOd, bD, B, bL, Dw, agx, fM, fG, Lx, jx, rf, aA, hz, v, j, OY, V, aIx, J, cF, bjA, aWc, cdC, nX, aT, cy, UN, bq, an, af, eu, CB, Y, fO, aLJ, Ox, en, t, f, pb, iM, sn, c, ac, pZ, wO, aQd, AU, bxj, mf, EY, fD, bt, rA, ao, sY, aFe, qb, aD, iW, jh, bS, eq, pi, agz, wD, hX, dP, F, py, NY, oW, lQ, nJ, qE, uQ, d, je, ff, cr, eZ, aF, iV, Z, bz, dr, LB, Hw, gk, eU, axs, yE, Lj, aFb, aS, cP, Lz, ei, If, ra, X, y); #c1(TNFRSF1B) c2(XP_011540365) c3(tumor necrosis factor receptor superfamily member 1B isoform X4) c4(338852, 338853) c5( ) c6( ) c7(bM, T, fR, e, al, bO, fd, bB, cL, ci, Tz, amW, aR, yM, aE, bW, dV, Ds, K, qM, aDZ, zy, H, hH, bzH, eG, LG, aW, Ls, mQ, hI, g, eE, cm, uC, bw, iT, mx, cj, uo, dW, wx, bBI, rt, dD, sQ, sw, My, ht, aw, aj, et, aBI, uE, qW, cd, ai, eh, boz, ec, ju, Ne, h, ux, uV, bQx, Ha, A, mR, anP, CM, fe, CO, jT, cM, Wt, RB, xO, Fi, at, bjK, ut, uz, fL, it, L, bL, Dw, jx, aee, aA, cz, v, j, OY, Qo, V, q, J, o, eA, cF, aWc, rS, aql, aT, cy, dz, UN, af, eu, bA, jf, kl, s, iU, Ue, Y, fO, r, en, t, pb, aff, bN, ck, sS, ac, c, aQd, he, AU, mf, fD, bt, hS, sY, aFe, aZ, iW, jh, bS, eq, fu, pl, qi, hF, mC, wD, dP, py, oz, aCJ, oj, oW, hD, ji, IQ, aFI, qE, WZ, cH, ff, cr, eZ, dq, aE, iV, Z, qa, aYt, dR, LB, Bv, axs, yE, HP, bE, Lj, aFb, Hs, aS, ei, y, sH); #c1(TNFRSF21) c2(NP_055267) c3(tumor necrosis factor receptor superfamily member 21 precursor) c4(180168, 180169) c5(180170, 180171, 180172, 180173, 180174, 180175, 180176, 180177, 180178, 180179, 180180, 180181) c6( ) c7(dP, BN, c, U, hy, ww, uu, ey, ne, ad); #c1(TNFRSF6B) c2(NP_003814) c3(tumor necrosis factor receptor superfamily member 68 precursor) c4(141080, 141081) c5(141082, 141083, 141084, 141085, 141086, 141087, 141088, 141089, 141090, 141091, 141092, 141093, 141094, 141095, 141096) c6( ) c7(T, fM, hV, iW, ht, jh, aA, bB, n, aj, fd, fr, ci, q, J, ai, eA, eJ, BI, zw, aE, aT, cjN, ey, hu, pk, af, d, B, anP, je, aW, ff, cr, r, eZ, aq, fe, aE, en, g, as, t, jT, iV, iM, dB, bE, he, Ny, m, y, it, X, On); #c1(TNFRSF8) c2(XP_011540743) c3(tumor necrosis factor receptor superfamily member 8 isoform X1) c4( ) c5(339317) c6( ) c7(bM, T, fM, dA, fR, eP, wu, iW, yG, aI, eX, fd, jh, ctW, ci, hF, TI, wa, x, fX, F, bIC, DK, TK, ju, apG, kH, aT, h, eV, je, ji, K, IQ, cOg, wm, pk, amY, Nr, asp, cOf, xR, aoX, vT, aW, Y, afF, A, Lh, eZ, po, afq, hp, bWt, zL, Ca, eE, bWs, uC, pb, Wt, asE, Ng, ck, Ta, BU, yR, iM, zr, iQ, iT, eU, eD, Zg, ajd, cj, zv, k, fD, i, y, KY, Tc); #c1(TNFRSF8) c2(XP_011540745) c3(tumor necrosis factor receptor superfamily member 8 isoform X3) c4( ) c5(339318) c6( ) c7(bM, T, fM, dA, fR, eP, wu, iW, yG, aI, eX, fd, jh, ctW, ci, hF, TI, wa, x, fX, F, bIC, DK, TK, ju, apG, kH, aT, h, eV, je, ji, K, lQ, cOg, wm, pk, amY, Nr, asp, cOf, xR, aoX, vT, aW, Y, afF, A, Lh, eZ, po, afq, hp, bWt, zL, Ca, eE, bWs, uC, pb, Wt, asE, Nq, ck, Ta, BU, yR, iM, zr, iQ, iT, eU, eD, Zg, ajd, cj, zv, k, fD, i, y, KY, Tc); #c1(TNFRSF8) c2(XP_011540746) c3(tumor necrosis factor receptor superfamily member 8 isoform X2) c4(339319) c5( ) c6( ) c7(bM, T, fM, dA, fR, eP, wu, iW, yG, aI, eX, fd, jh, ctW, ci, hF, TI, wa, x, fX, F, bIC, DK, TK, ju, apG, kH, aT, h, eV, je, ji, K, lQ, cOg, wm, pk, amY, Nr, asp, cOf, xR, aoX, vT, aW, Y, afF, A, Lh, eZ, po, afq, hp, bWt, zL, Ca, eE, bWs, uC, pb, Wt, asE, Nq, ck, Ta, BU, yR, iM, zr, iQ, iT, eU, eD, Zg, ajd, cj, zv, k, fD, i, y, KY, Tc); #c1(TNFSF10) c2(NP_001177871) c3(tumor necrosis factor ligand superfamily member 10 isoform 2) c4(73103) c5(73104, 73105, 73106, 73107, 73108) c6( ) c7(bM, T, os, aC, fR, pf, ea, if, e, fd, bB, axk, aoj, zh, ci, aAo, x, aE, Ou, K, hu, pk, eL, bc, cp, li, eG, JI, aW, az, hl, g, as, eE, cm, bw, Qt, iP, eM, nB, iA, iT, mx, bru, cj, Zn, dW, k, m, iu, aiu, dD, ht, n, aj, fr, qN, zP, ai, br, eW, jz, no, zw, ec, kH, h, jy, Nf, dL, pi, dx, cY, A, cOH, mR, MD, PX, lb, hQ, ks, aq, Og, kp, pm, dB, Qu, hL, va, it, B, bL, fM, Ju, jx, aA, hy, bgR, V, g, J, eA, Yn, qK, yg, aT, aAn, Fx, adV, jj, bq, ae, af, ne, jf, qw, kl, s, nO, iU, eV, Y, ev, r, lo, aDm, en, cl, t, f, iK, pb, vk, ck, ov, bTk, kP, ac, iM, awN, AH, JH, im, bt, vi, hS, gV, Mb, kh, id, ow, em, oA, jh, eZ, dG, eq, jE, Fb, hF, ad, hX, dP, av, hd, ib, ds, oW, ji, d, BN, je, hG, ff, eH, Of, eZ, aF, iR, Bu, bz, es, eU, bE, apv, hE, kS, X, y); #c1(TNFSF10) c2(NP_003801) c3(tumor necrosis factor ligand superfamily member 10 isoform 1) c4(140993) c5(140994, 140995, 140996, 140997, 140998, 140999, 141000) c6( ) c7(bM, T, ns, aC, fR, pf, ea, if, e, fd, bB, axk, aoj, zh, ci, aAo, x, aE, Ou, K, hu, pk, eL, be, cp, li, eG, JI, aW, az, hl, g, as, eF, cm, bw, Qt, iP, eM, nB, iA, iT, mx, bru, cj, Zn, dW, k, m, iu, aiu, dD, ht, n, aj, fr, qN, zP, ai, hr, eW, jz, no, zw, ec, kH, h, jy, Nf, dL, pi, dx, cY, A, cOh, mR, MD, PX, Ib, hQ, ks, aq, Og, kp, pm, dB, Qu, hL, va, it, B, bL, fM, Ju, jx, aA, hy, bgR, V, q, J, eA, Yn, qK, yg, aT, aAn, Ex, adV, jj, bq, ae, af, ne, jf, gw, kl, s, nO, iU, oV, Y, ev, r, lo, aDm, en, cl, t, f, iK, pb, vk, ck, ov, bTk, kP, ac, iM, awN, AH, JH, im, bt, vi, hS, gV, Mb, kh, id, ow, em, oA, jh, oZ, dG, eq, jE, Fb, hF, ad, hX, dP, av, hd, ib, ds, oW, ji, d, BN, je, hG, ff, eH, Of, eZ, aF, iR, Bu, bz, es, eU, bE, apv, hE, kS, X, y); #c1(TNFSF11) c2(NP_003692) c3(tumor necrosis factor ligand superfamily member 11 isoform 1) c4(140192) c5(140193, 140194, 140195, 140196, 140197, 140198, 140199, 140200) c6( ) c7(T, cjH, dD, ea, zs, oe, lH, e, EQ, aA, zt, aw, cL, aj, zh, ci, v, eq, wV, cNX, V, fr, ai, J, ad, bEa, cNT, amB, zw, xE, uT, pN, pX, yg, kH, aT, ae, bPQ, af, bA, aRR, azh, A, mR, je, aW, Y, bg, hl, eH, eZ, akB, cxe, cNU, jh, CQ, g, fd, pL, eF, iK, bz, aZz, dr, bQ, arv, eU, acW, iM, c, zr, yE, eM, cwA, go, aFb, cj, uz, bAD, azg, lS, zu, B, y, vQ); #c1(TNFSF11) c2(NP_143026) c3(tumor necrosis factor ligand superfamily member 11 isoform 2) c4(226604) c5(226605, 226606, 226607, 226608, 226609, 226610, 226611, 226612, 226613, 226614, 226615, 226616, 226617, 226618, 226619, 226620) c6( ) c7(T, cjH, dD, ea, zs, oe, lH, e, EQ, aA, zt, aw, cL, aj, zh, ci, v, eq, wV, cNX, V, fr, ai, J, ad, bEa, cNT, amB, zw, xE, uT, pN, pX, yg, kH, aT, ae, bPQ, af, bA, aRR, azh, A, mR, je, aW, Y, bg, hl, eH, eZ, akB, cxe, cNU, jh, CQ, g, fd, pL, eF, iK, bz, aZz, dr, bQ, arv, eU, acW, iM, c, zr, yE, eM, cwA, go, aFb, cj, uz, bAD, azg, lS, zu, B, y, vQ); #c1(TNFSF12) c2(NP_003800) c3(tumor necrosis factor ligand superfamily member 12 proprotein) c4(140986) c5(140987, 140988, 140989, 140990, 140991, 140992) c6( ) c7(bL, dD, ea, aA, bB, v, eq, pz, eA, ad, hb, M, aT, ae, d, qt, aW, eZ, aF, D, bE, y); #c1(TNFSF12-TNFSF13) c2(NP_742086) c3(TNFSF12-TNFSF13 protein) c4(248054) c5(248055, 248056, 248057, 248058, 248059, 248060, 248061, 248062, 248063, 248064, 248065, 248066) c6(248067, 248068) c7(bL, dD, d, hb, aW, ea, bE, qt, M, aT, aA, bB, eZ, v, eq, aF, y, ae, eA, ad); #c1(TNFSF13) c2(NP_001185552) c3(tumor necrosis factor ligand superfamily member 13 isoform zeta) c4(75832) c5(75833, 75834, 75835, 75836, 75837, 75838, 75839, 75840, 75841) c6(75842, 75843) c7(Ob, bM, T, dD, fM, dA, ea, iW, aw, eX, fN, aA, fd, jh, j, ci, eq, V, q, eA, Wu, aT, cU, h, eV, hn, ey, ji, d, s, cW, oV, ff, eZ, r, lo, aF, hp, en, g, eE, ve, bz, pb, Wt, ck, zr, bE, cj, eo, fL, lf, bt, Ze, y); #c1(TNFSF13) c2(NP_001185553) c3(tumor necrosis factor ligand superfamily member 13 isoform eta) c4(75844) c5(75845, 75846, 75847, 75848, 75849, 75850, 75851) c6(75852, 75853) c7(Ob, bM, T, dD, fM, dA, ea, iW, aw, eX, fN, aA, fd, jh, j, ci, eq, V, q, eA, Wu, aT, cU, h, eV, hn, ey, ji, d, s, cW, oV, ff, eZ, r, lo, aF, hp, en, g, eE, ve, bz, pb, Wt, ck, zr, bE, cj, en, fL, lf, bt, Ze, y); #c1(TNFSF13) c2(NP_003799) c3(tumor necrosis factor ligand superfamily member 13 isoform alpha proprotein) c4(140975) c5(140976, 140977, 140978, 140979, 140980, 140981, 140982, 140983) c6(140984, 140985) c7(Ob, bM, T, dD, fM, dA, ea, iW, aw, eX, fN, aA, fd, jh, j, ci, eq, V, q, eA, Wu, aT, cU, h, eV, hn, ey, ji, d, s, cW, oV, ff, eZ, r, lo, aF, hp, en, g, eE, ve, bz, pb, Wt, ck, zr, bE, cj, eo, fL, lf, bt, Ze, y); #c1(TNFSF13) c2(NP_742084) c3(tumor necrosis factor ligand superfamily member 13 isoform beta proprotein) c4(248032) c5(248033, 248034, 248035, 248036, 248037, 248038, 248039, 248040) c6(248041, 248042) c7(Ob, bM, T, dD, fM, dA, ea, iW, aw, eX, fN, aA, fd, jh, j, ci, eq, V, q, eA, Wu, aT, cU, h, eV, hn, ey, ji, d, s, cW, oV, ff, eZ, r, lo, aF, hp, en, g, eE, ve, bz, pb, Wt, ck, zr, bE, cj, en, fL, lf, bt, Ze, y); #c1(TNFSF13) c2(NP_742085) c3(tumor necrosis factor ligand superfamily member 13 isoform gamma proprotein) c4(248043) c5(248044, 248045, 248046, 248047, 248048, 248049, 248050, 248051) c6(248052, 248053) c7(Ob, bM, T, dD, fM, dA, ea, iW, aw, eX, fN, aA, fd, jh, j, ci, eq, V, q, eA, Wu, aT, cU, h, eV, hn, ey, ji, d, s, cW, oV, ff, eZ, r, lo, aF, hp, en, g, eE, ve, bz, pb, Wt, ck, zr, bE, cj, eo, fL, lf, bt, Ze, y); #c1(TNFSF13B) c2(NP_001139117) c3(tumor necrosis factor ligand superfamily member 13B isoform 2) c4(58705) c5(58706, 58707, 58708, 58709, 58710, 58711) c6( ) c7(bM, T, fR, fd, bh, x, bv, xE, aE, dV, zy, hH, pk, DY, axu, eF, ve, uC, cj, bAD, k, cOj, cZ, aFQ, fN, apt, uE, cd, ai, ec, aow, aMj, cU, h, eV, ey, dd, Og, kp, cOi, kk, Wt, eo, fL, fM, dA, jx, eX, v, j, V, eA, acH, jj, ae, hM, oV, lo, en, pb, OC, ck, c, yW, yH, ij, iW, jh, cOk, mC, ad, aoH, dP, bTr, IQ, Od, aOh, uQ, ff, aFE, eH, eZ, Of, BG, iV, zr, eB, If, kS, y, acG); #c1(TNFSF13B) c2(NP_006564) c3(tumnr necrosis factor ligand superfamily member 13B isoform 1) c4(166265, 166266) c5(166267, 166268, 166269, 166270, 166271, 166272) c6( ) c7(bM, T, fR, fd, bh, x, bv, xE, aE, dV, zy, hH, pk, DY, axu, eF, ve, uC, cj, bAD, k, cOj, cZ, aFQ, fN, apt, uE, cd, ai, ec, aow, aMj, cU, h, eV, ey, dd, Og, kp, cOi, kk, Wt, en, fL, fM, dA, jx, eX, v, j, V, eA, acH, jj, ae, hM, oV, lo, en, pb, OC, ck, c, yW, yH, ij, iW, jh, cOk, mC, ad, aoH, dP, bTr, lQ, Od, aOh, uQ, ff, aFE, eH, eZ, Of, BG, iV, zr, eB, lf, kS, y, acG); #c1(TNFSF13B) c2(XP_005254086) c3(tumor necrosis factor ligand superfamily member 13B isoform X1) c4( ) c5(272876, 272877, 272878, 272879, 272880, 272881) c6( ) c7(bM, T, fR, fd, bh, x, bv, xE, aE, dV, zy, hH, pk, DY, axu, eF, ve, uC, cj, bAD, k, cOj, cZ, aFQ, fN, apt, uE, cd, ai, ec, aow, aMj, cU, h, eV, ey, dd, Og, kp, cOi, kk, Wt, eo, fL, fM, dA, jx, eX, v, j, V, eA, acH, jj, ae, hM, oV, lo, en, pb, OC, ck, c, yW, yH, ij, iW, jh, cOk, mC, ad, aoH, dP, bTr, lQ, Od, aOh, uQ, ff, aFE, eH, eZ, Of, BG, iV, zr, eB, If, kS, y, acG); #c1(TNFSF14) c2(NP_003798) c3(tumor necrosis factor ligand superfamily member 14 isoform 1 precursor) c4(140964) c5(140965, 140966, 140967, 140968, 140969, 140970, 140971, 140972, 140973, 140974) c6( ) c7(bL, hM, T, fM, qb, fG, if, jh, aA, fd, rf, aj, v, lN, ci, qN, V, q, J, ai, eW, cF, xE, rS, M, h, ji, bU, Nr, iZ, cH, aW, Y, vj, Du, r, fe, po, aF, eE, wA, Nq, y, ac, c, ll, cj, IC, B, EB, vi); #c1(TNFSF14) c2(NP_742011) c3(tumor necrosis factor ligand superfamily member 14 isoform 2) c4(247590) c5(247591, 247592, 247593, 247594, 247595, 247596) c6( ) c7(bL, hM, T, fM, qb, fG, if, jh, aA, fd, rf, aj, v, lN, ci, qN, V, q, J, ai, eW, cF, xE, rS, M, h, ji, bU, Nr, iZ, cH, aW, Y, vj, Du, r, fe, po, aF, eE, wA, Nq, y, ac, c, ll, cj, IC, B, EB, vi); #c1(TNFSF15) c2(NP_001191273) c3(tumor necrosis factor ligand superfamily member 15 isoform VEGI-192) c4( ) c5(81265, 81266, 81267, 81268, 81269, 81270) c6( ) c7(T, dD, eq, ai, AW, xE, pe, bc, aGP, A, Di, cr, ge, dN, fe, iV, pL, t, acD, acG, gt, Ji, m, cOI, y, ra); #c1(TNFSF15) c2(NP_005109) c3(tumor necrosis factor ligand superfamily member 15 isoform VEGI-251 precursor) c4(152964, 152965) c5(152966, 152967, 152968, 152969, 152970, 152971) c6( ) c7(T, dD, eq, ai, AW, xE, pe, bc, aGP, A, Di, cr, ge, dN, fe, iV, pL, t, acD, acG, gt, Ji, m, cOI, y, ra); #c1(TNFSF18) c2(NP_005083) c3(tumor necrosis factor ligand superfamily member 18) c4(152737, 152738) c5(152739, 152740, 152741, 152742, 152743, 152744, 152745, 152746, 152747, 152748, 152749, 152750) c6( ) c7(ck, jx, cj, aT, fd, fe, hp, eE, bt); #c1(TNFSF4) c2(NP_001284491) c3(tumor necrosis factor ligand superfamily member 4 isoform 2) c4(111912) c5(111913, 111914, 111915, 111916, 111917, 111918, 111919, 111920, 111921, 111922) c6( ) c7(bM, T, dD, eR, ea, e, jx, aw, eX, cz, fd, aj, eq, eW, hX, cF, dY, ec, ds, M, h, eV, ji, bay, bc, aEV, qw, A, je, eZ, fe, yq, hp, pb, lx, eK, ck, iM, ac, cOm, bt, X); #c1(TNFSF4) c2(NP_003317) c3(tumor necrosis factor ligand superfamily member 4 isoform 1) c4( ) c5(137452, 137453, 137454, 137455, 137456) c6( ) c7(bM, T, dD, eR, ea, e, jx, aw, eX, cz, fd, aj, eq, eW, hX, cF, dY, ec, ds, M, h, eV, ji, bay, bc, aEV, qw, A, je, eZ, fe, yq, hp, pb, lx, eK, ck, iM, ac, cOm, bt, X); #c1(TNFSF4) c2(XP_011508266) c3(tumor necrosis factor ligand superfamily member 4 isoform X1) c4(298963) c5(298964) c6( ) c7(bM, T, dD, eR, ea, e, jx, aw, eX, cz, fd, aj, eq, eW, hX, cF, dY, ec, ds, M, h, eV, ji, bay, bc, aEV, qw, A, je, eZ, fe, yq, hp, pb, lx, eK, ck, iM, ac, cOm, bt, X); #c1(TNFSF8) c2(NP_001235) c3(tumor necrosis factor ligand superfamily member 8 isoform 1) c4(87879) c5(87880, 87881, 87882, 87883, 87884, 87885) c6( ) c7(T, iW, oe, eX, jh, fd, ci, hX, zw, bIC, eV, ji, lQ, bay, Us, aEV, A, asp, vT, cr, eE, bz, ck, rR, Dy, eD, cj, bt); #c1(TNFSF9) c2(NP_003802) c3(tumor necrosis factor ligand superfamily member 9) c4(141001) c5(141002, 141003, 141004, 141005, 141006, 141007) c6( ) c7(T, dD, fM, ea, aA, cz, fd, eq, V, ad, vV, Rq, ds, h, bay, ae, bc, aEV, g, jT, t, cm, ck, D, ac, cj, y); #c1(TNIK) c2(NP_001155032) c3(TRAF2 and NCK-interacting protein kinase isoform 2) c4(61273) c5( ) c6( ) c7(T, aW, r, aT, j, lQ, Pk, q); #c1(TNIK) c2(NP_001155033) c3(TRAF2 and NCK-interacting protein kinase isoform 3) c4(61274, 61275) c5( ) c6( ) c7(T, aW, r, aT, j, lQ, Pk, q); #c1(TNIK) c2(NP_001155034) c3(TRAF2 and NCK-interacting protein kinase isoform 4) c4(61276) c5(61277, 61278, 61279, 61280, 61281, 61282, 61283, 61284, 61285, 61286, 61287, 61288) c6( ) c7(T, aW, r, aT, j, lQ, Pk, q); #c1(TNIK) c2(NP_001155035) c3(TRAF2 and NCK-interacting protein kinase isoform 5) c4(61289, 61290) c5( ) c6( ) c7(T, aW, r, aT, j, lQ, Pk, q); #c1(TNIK) c2(NP_001155036) c3(TRAF2 and NCK-interacting protein kinase isoform 6) c4(61291) c5(61292, 61293, 61294, 61295, 61296, 61297, 61298, 61299, 61300, 61301, 61302, 61303) c6( ) c7(T, aW, r, aT, j, lQ, Pk, q); #c1(TNIK) c2(NP_001155037) c3(TRAF2 and NCK-interacting protein kinase isoform 7) c4(61304) c5(61305, 61306, 61307, 61308, 61309, 61310, 61311, 61312, 61313, 61314, 61315, 61316, 61317, 61318, 61319, 61320, 61321, 61322) c6( ) c7(T, aW, r, aT, j, lQ, Pk, q); #c1(TNIK) c2(NP_001155038) c3(TRAF2 and NCK-interacting protein kinase isoform 8) c4(61323) c5( ) c6( ) c7(T, aW, r, aT, j, lQ, Pk, q); #c1(TNIK) c2(NP_055843) c3(TRAF2 and NCK-interacting protein kinase isoform 1) c4(183856) c5(183857, 183858, 183859, 183860, 183861, 183862, 183863, 183864, 183865, 183866, 183867, 183868, 183869, 183870, 183871, 183872, 183873, 183874) c6( ) c7(T, aW, r, aT, j, lQ, Pk, q); #c1(TNIP1) c2(NP_001239315) c3(TNFAIP3-interacting protein 1 isoform 2) c4( ) c5(88412) c6( ) c7(sb, bM, hM, mR, aWF, Jr, Ue, fN, aT, at, cr, eZ, dL, C, y, pb, wD); #c1(TNIP1) c2(NP_001239322) c3(TNFAIP3-interacting protein 1 isoform 4) c4(88413) c5(88414, 88415, 88416, 88417, 88418, 88419, 88420, 88421, 88422, 88423) c6( ) c7(sb, bM, hM, mR, aWF, Jr, Ue, fN, aT, at, cr, eZ, dL, C, y, pb, wD); #c1(TNIP1) c2(NP_001245385) c3(TNFAIP3-interacting protein 1 isoform 6) c4(93372, 93373, 93374, 93375, 93376, 93377, 93378) c5(93379, 93380, 93381, 93382, 93383, 93384, 93385, 93386, 93387, 93388, 93389, 93390, 93391, 93392, 93393, 93394, 93395, 93396, 93397, 93398, 93399, 93400, 93401, 93402, 93403, 93404, 93405, 93406, 93407, 93408, 93409, 93410, 93411, 93412, 93413, 93414, 93415, 93416, 93417, 93418, 93419, 93420) c6( ) c7(sb, bM, hM, mR, aWF, Jr, Ue, fN, aT, at, cr, eZ, dL, C, y, pb, wD); #c1(TNIP1) c2(XP_006714814) c3(TNFAIP3-interacting protein 1 isoform X3) c4(288234, 288235) c5(288236, 288237, 288238, 288239, 288240, 288241, 288242, 288243, 288244, 288245, 288246, 288247) c6( ) c7(sb, bM, hM, mR, aWF, Jr, Ue, fN, aT, at, cr, eZ, dL, C, y, pb, wD); #c1(TNIP1) c2(XP_011535840) c3(TNFAIP3-interacting protein 1 isoform X2) c4(333104, 333105, 333106) c5(333107, 333108, 333109, 333110, 333111, 333112, 333113, 333114, 333115, 333116, 333117, 333118, 333119, 333120, 333121, 333122, 333123, 333124, 333125, 333126, 333127, 333128, 333129, 333130, 333131, 333132, 333133, 333134, 333135, 333136) c6( ) c7(sb, bM, hM, mR, aWF, Jr, Ue, fN, aT, at, cr, eZ, dL, C, y, pb, wD); #c1(TNIP2) c2(NP_001154999) c3(TNFAIP3-interacting protein 2 isoform 2) c4( ) c5(61255, 61256, 61257, 61258, 61259, 61260) c6( ) c7(ck, y); #c1(TNIP2) c2(NP_077285) c3(TNFAIP3-interacting protein 2 isoform 1) c4(214934, 214935) c5(214936, 214937, 214938, 214939, 214940, 214941) c6( ) c7(ck, y); #c1(TNIP3) c2(NP_001122315) c3(TNFAIP3-interacting protein 3 isoform 2) c4(46510) c5(46511, 46512, 46513, 46514, 46515) c6( ) c7(azU, fq, C); #c1(TNIP3) c2(NP_001231693) c3(TNFAIP3-interacting protein 3 isoform 3) c4( ) c5(87439) c6( ) c7(azU, fq, C); #c1(TNIP3) c2(NP_079149) c3(TNFAIP3-interacting protein 3 isoform 1) c4(217264) c5(217265, 217266, 217267, 217268, 217269, 217270, 217271, 217272, 217273, 217274) c6( ) c7(azU, fq, C); #c1(TNIP3) c2(XP_011530558) c3(TNFAIP3-interacting protein 3 isoform X1) c4( ) c5(326483, 326484) c6( ) c7(azU, fq, C); #c1(TNK1) c2(XP_011522347) c3(non-receptor tyrosine-protein kinase TNK1 isoform X1) c4(317019) c5(317020, 317021, 317022, 317023, 317024, 317025, 317026, 317027, 317028, 317029) c6( ) c7(ck, af, aE); #c1(TNK2) c2(NP_001010938) c3(activated CDC42 kinase 1 isoform 2) c4(24253, 24254) c5(24255, 24256, 24257, 24258, 24259, 24260, 24261, 24262, 24263, 24264, 24265, 24266) c6( ) c7(gh, T, es, eM, iA, aW, Ls, ha, aT, aA, aq, By, aF, fr, g, ae, iu, ad); #c1(TNK2) c2(NP_005772) c3(activated CDC42 kinase 1 isoform 1) c4(159225) c5(159226, 159227, 159228, 159229, 159230, 159231, 159232, 159233, 159234) c6( ) c7(gh, T, es, eM, iA, aW, Ls, ha, aT, aA, aq, By, aF, fr, g, ae, iu, ad); #c1(TNK2) c2(XP_005269325) c3(activated CDC42 kinase 1 isoform X4) c4( ) c5(282554) c6( ) c7(gh, 1 es, eM, iA, aW, Ls, ha, aT, aA, aq, By, aF, fr, g, ae, iu, ad); #c1(TNK2) c2(XP_005269332) c3(activated CDC42 kinase 1 isoform X9) c4( ) c5(282555) c6( ) c7(gh, T, es, eM, iA, aW, Ls, ha, aT, aA, aq, By, aF, fr, g, ae, iu, ad); #c1(TNK2) c2(XP_011510619) c3(activated CDC42 kinase 1 isoform X1) c4( ) c5(301076, 301077, 301078, 301079, 301080, 301081) c6( ) c7(gh, T, es, eM, iA, aW, Ls, ha, aT, aA, ag, By, aF, fr, g, ae, iu, ad); #c1(TNKS) c2(NP_003738) c3(tankyrase-1) c4(140538) c5(140539, 140540, 140541, 140542, 140543, 140544) c6( ) c7(bM, T, id, e, aA, fd, n, v, ci, eA, eW, M, aT, dL, eL, NM, aW, aF, as, cm, bz, ac, at, aNL); #c1(TNKS2) c2(NP_079511) c3(tankyrase-2) c4(218446) c5(218447, 218448, 218449, 218450, 218451, 218452) c6( ) c7(sS, ac, aW, yk, e, if, ff, hL, aT, n, en, cI, qN, bz); #c1(TNMD) c2(NP_071427) c3(tenemedulin) c4(211608) c5(211609, 211610, 211611, 211612, 211613, 211614) c6( ) c7(bL, bF, W, ac, eM, LC, baS, uo, dq, aj, mf, v, eA, ei, aFf, af, J); #c1(TNN) c2(NP_071376) c3(tenascin-N precursor) c4(211251) c5(211252, 211253, 211254, 211255, 211256, 211257, 211258, 211259) c6(211260, 211261) c7(aT); #c1(TNN) c2(XP_011508171) c3(tenascin-N isoform X3) c4(298721) c5(298722, 298723, 298724, 298725, 298726, 298727, 298728, 298729) c6(298730, 298731) c7(aT); #c1(TNNC1) c2(NP_003271) c3(troponin C, slow skeletal and cardiac muscles) c4(136963) c5(136964, 136965, 136966, 136967, 136968, 136969) c6( ) c7(bM, T, AY, fG, n, cc, aE, cOo, aT, vc, K, zp, cOn, anR, d, aW, ff, kp, en, mo, aYo, g, pb, eM, mx, ro, awa); #c1(TNNI1) c2(NP_003272) c3(troponin I, slow skeletal muscle) c4(136970, 136971, 136972) c5(136973, 136974, 136975, 136976, 136977, 136978, 136979, 136980, 136981, 136982, 136983, 136984, 136985, 136986, 136987, 136988, 136989, 136990, 136991, 136992, 136993, 136994, 136995, 136996, 136997, 136998, 136999, 137000, 137001, 137002) c6( ) c7(bM, eN, lS); #c1(TNNI2) c2(NP_001139313) c3(troponin I, fast skeletal muscle isoform 2) c4(59149) c5(59150, 59151, 59152, 59153, 59154, 59155) c6( ) c7(chE, oj); #c1(TNNI2) c2(NP_003273) c3(troponin I, fast skeletal muscle isoform 1) c4(137003) c5(137004, 137005, 137006, 137007, 137008, 137009, 137010, 137011, 137012, 137013, 137014, 137015, 137016, 137017) c6( ) c7(chE, oj); #c1(TNNI3) c2(NP_000354) c3(troponin I, cardiac muscle) c4(7825) c5(7826, 7827, 7828, 7829, 7830, 7831) c6( ) c7(eR, Hm, aw, akA, bS, et, cd, cOg, cc, rS, cOs, oj, cy, vc, cOp, af, hm, AX, anR, uY, g, mo, Z, aYo, YE, akF, cI, ac, cOr, mx, gZ, wx, gq, sH, vQ); #c1(TNNT1) c2(NP_001278703) c3(troponin T, slow skeletal muscle isoform c) c4(109977, 109978) c5(109979, 109980, 109981, 109982, 109983, 109984, 109985, 109986, 109987, 109988, 109989, 109990, 109991, 109992, 109993, 109994, 109995, 109996, 109997, 109998, 109999, 110000, 110001, 110002) c6( ) c7(cc, Am, cOt, dR); #c1(TNNT1) c2(NP_003274) c3(troponin T, slow skeletal muscle isoform a) c4(137018) c5(137019, 137020, 137021, 137022, 137023, 137024, 137025, 137026, 137027, 137028) c6( ) c7(cc, Am, cOt, dR); #c1(TNNT1) c2(XP_006723406) c3(troponin T, slow skeletal muscle isoform X4) c4(295198) c5( ) c6( ) c7(cc, Am, cOt, dR); #c1(TNNT1) c2(XP_011525548) c3(troponin T, slow skeletal muscle isoform X5) c4(319976) c5( ) c6( ) c7(cc, Am, cOt, dR); #c1(TNNT2) c2(NP_001001430) c3(troponin T, cardiac muscle isoform 2) c4(18397, 18398, 18399, 18400) c5( ) c6( ) c7(dD, cun, e, cOu, aw, cyE, j, eq, cd, cc, cOs, cOw, vc, cOv, anR, mo, aYo, dr, bfW, wT, cI, ac, mx, ll, gZ, at, gg, jr, vQ); #c1(TNNT2) c2(NP_001001431) c3(troponin T, cardiac muscle isoform 3) c4(18401, 18402, 18403) c5(18404, 18405, 18406, 18407, 18408, 18409, 18410, 18411, 18412, 18413, 18414, 18415, 18416, 18417, 18418, 18419, 18420, 18421, 18422, 18423, 18424, 18425) c6( ) c7(dD, cun, e, cOu, aw, cyE, j, eg, cd, cc, cOs, cOw, vc, cOv, anR, mo, aYo, dr, bfW, wT, cI, ac, mx, ll, gZ, at, gq, jr, vQ); #c1(TNNT2) c2(XP_011508242) c3(troponin T, cardiac muscle isoform X4) c4( ) c5(298883) c6( ) c7(dD, cun, e, cOu, aw, cyE, j, eq, cd, cc, cOs, cOw, vc, cOv, anR, mo, aYo, dr, bfW, wT, cI, ac, mx, ll, gZ, at, gg, jr, vQ); #c1(TNNT2) c2(XP_011508245) c3(troponin T, cardiac muscle isoform X7) c4(298884) c5( ) c6( ) c7(dD, cun, e, cOu, aw, cyE, j, eq, cd, cc, cOs, cOw, vc, cOv, anR, mo, aYo, dr, bfW, wT, cI, ac, mx, ll, gZ, at, gq, jr, vQ); #c1(TNNT2) c2(XP_011508246) c3(troponin T, cardiac muscle isoform X8) c4( ) c5(298885, 298886, 298887, 298888, 298889, 298890, 298891, 298892, 298893, 298894, 298895, 298896, 298897, 298898, 298899, 298900, 298901, 298902, 298903, 298904) c6( ) c7(dD, cun, e, cOu, aw, cyE, j, eq, cd, cc, cOs, cOw, vc, cOv, anR, mo, aYo, dr, bfW, wT, cI, ac, mx, ll, gZ, at, gq, jr, vQ); #c1(TNNT2) c2(XP_011508248) c3(troponin T, cardiac muscle isoform X10) c4( ) c5(298905, 298906, 298907, 298908, 298909, 298910, 298911, 298912, 298913, 298914, 298915, 298916, 298917, 298918, 298919, 298920, 298921) c6( ) c7(dD, cun, e, cOu, aw, cyE, j, eq, cd, cc, cOs, cOw, vc, cOv, anR, mo, aYo, dr, bfW, wT, cl, ac, mx, ll, gZ, at, gq, jr, vQ); #c1(TNNT3) c2(NP_001036245) c3(troponin T, fast skeletal muscle isoform 3) c4(34092) c5( ) c6( ) c7(chE, XW, chF); #c1(TNNT3) c2(NP_001036246) c3(troponin T, fast skeletal muscle isoform 2) c4(34093) c5( ) c6( ) c7(chE, XW, chF); #c1(TNNT3) c2(NP_001284575) c3(troponin T, fast skeletal muscle isoform 4) c4(112069) c5( ) c6( ) c7(chE, XW, chF); #c1(TNNT3) c2(NP_006748) c3(troponin T, fast skeletal muscle isoform 1) c4(167668) c5( ) c6( ) c7(chE, XW, chF); #c1(TNNT3) c2(XP_006718351) c3(troponin T, fast skeletal muscle isoform X15) c4(291712, 291713) c5( ) c6( ) c7(chE, XW, chF); #c1(TNNT3) c2(XP_006718355) c3(troponin T, fast skeletal muscle isoform X4) c4(291714) c5( ) c6( ) c7(chE, XW, chF); #c1(TNNT3) c2(XP_006718356) c3(troponin T, fast skeletal muscle isoform X5) c4(291715) c5( ) c6( ) c7(chE, XW, chF); #c1(TNNT3) c2(XP_006718358) c3(troponin T, fast skeletal muscle isoform X7) c4(291716) c5( ) c6( ) c7(chE, XW, chF); #c1(TNNT3) c2(XP_006718363) c3(troponin T, fast skeletal muscle isoform X12) c4(291717) c5( ) c6( ) c7(chE, XW, chF); #c1(TNNT3) c2(XP_006718364) c3(troponin T, fast skeletal muscle isoform X13) c4(291718) c5(291719, 291720, 291721, 291722, 291723, 291724, 291725, 291726, 291727, 291728, 291729, 291730) c6( ) c7(chE, XW, chF); #c1(TNNT3) c2(XP_006718365) c3(troponin T, fast skeletal muscle isoform X14) c4( ) c5(291731, 291732, 291733, 291734, 291735, 291736, 291737, 291738, 291739, 291740, 291741, 291742, 291743, 291744, 291745, 291746, 291747, 291748, 291749, 291750, 291751, 291752, 291753, 291754, 291755, 291756, 291757, 291758, 291759, 291760, 291761, 291762, 291763, 291764, 291765, 291766, 291767, 291768, 291769, 291770, 291771, 291772, 291773, 291774, 291775, 291776, 291777, 291778, 291779, 291780, 291781, 291782, 291783, 291784, 291785, 291786, 291787, 291788, 291789, 291790) c6( ) c7(chE, XW, chF); #c1(TNNT3) c2(XP_011518645) c3(troponin T, fast skeletal muscle isoform X1) c4(312981) c5( ) c6( ) c7(chE, XW, chF); #c1(TNP1) c2(NP_003275) c3(spermatid nuclear transition protein 1) c4(137029) c5(137030, 137031, 137032, 137033, 137034, 137035) c6( ) c7(T, gU, GY, ND, aW, aT, vH, y, ai); #c1(TNP2) c2(NP_005416) c3(nuclear transition protein 2) c4(155867) c5(155868, 155869, 155870, 155871, 155872, 155873) c6( ) c7(vH, A, gU, ND); #c1(TNP01) c2(NP_002261) c3(transportin-1 isoform 1) c4(127036, 127037) c5(127038, 127039, 127040, 127041, 127042, 127043, 127044, 127045, 127046, 127047, 127048, 127049, 127050, 127051, 127052) c6( ) c7(bM, T, Dw, dA, aD, fG, IH, bLS, jh, fd, aj, j, ci, UX, fr, pz, q, J, cd, aXI, aoH, eW, zw, aXC, xE, aWc, M, kH, cU, aT, dV, h, K, mJ, azh, ceo, je, caK, bf, aW, xz, r, fe, aq, lo, iV, Bu, kC, pb, QA, aBs, LB, ck, pa, iM, aDA, c, bE, wO, hc, aS, fD, bwg, y, bt, B); #c1(TNP01) c2(XP_005248557) c3(transportin-1 isoform X1) c4(268459) c5(268460, 268461, 268462, 268463, 268464) c6( ) c7(bM, T, Dw, dA, aD, fG, lH, bLS, jh, fd, aj, j, ci, UX, fr, pz, q, J, cd, aXI, aoH, eW, zw, aXC, xE, aWc, M, kH, cU, aT, dV, h, K, mJ, azh, ceo, je, caK, bf, aW, xz, r, fe, aq, lo, iV, Bu, kC, pb, QA, aBs, LB, ck, pa, iM, aDA, c, bE, wO, hc, aS, fD, bwg, y, bt, B); #c1(TNP01) c2(XP_005248558) c3(transportin-1 isoform X2) c4(268465) c5(268466, 268467, 268468, 268469, 268470, 268471, 268472) c6( ) c7(bM, T, Dw, dA, aD, fG, lH, bLS, jh, fd, aj, j, ci, UX, fr, pz, q, J, cd, aXI, aoH, eW, zw, aXC, xE, aWc, M, kH, cU, aT, dV, h, K, mJ, azh, ceo, je, caK, bf, aW, xz, r, fe, aq, lo, iV, Bu, kC, pb, QA, aBs, LB, ck, pa, iM, aDA, c, bE, wO, hc, aS, fD, bwg, y, bt, B); #c1(TNP02) c2(NP_001129667) c3(transportin-2 isoform 2) c4(52126, 52127, 52128) c5(52129, 52130, 52131, 52132, 52133, 52134, 52135, 52136, 52137, 52138, 52139, 52140, 52141, 52142, 52143, 52144, 52145, 52146, 52147, 52148, 52149, 52150, 52151, 52152, 52153, 52154, 52155, 52156) c6( ) c7(kl, an); #c1(TNP02) c2(NP_001129668) c3(transportin-2 isoform 1) c4(52157, 52158) c5(52159, 52160, 52161, 52162, 52163, 52164, 52165, 52166, 52167, 52168) c6( ) c7(kl, an); #c1(TNP03) c2(NP_001177957) c3(transportin-3 isoform 2) c4(73236) c5(73237, 73238, 73239, 73240, 73241, 73242) c6( ) c7(km, oj, h, eZ, lo, gn, pb, y, cOx, be); #c1(TNP03) c2(NP_036602) c3(transportin-3 isoform 1) c4(174737, 174738) c5(174739, 174740, 174741, 174742, 174743, 174744, 174745, 174746, 174747, 174748, 174749, 174750, 174751, 174752, 174753, 174754) c6( ) c7(km, oj, h, eZ, lo, gn, pb, y, cOx, be); #c1(TNR) c2(XP_011508249) c3(tenascin-R isoform X1) c4(298922) c5(298923, 298924, 298925, 298926, 298927, 298928, 298929, 298930, 298931, 298932) c6( ) c7(jf, sY, T, d, fm, oe, U, aT, bK, ey, nA, Hp, uC, Lg, Fc); #c1(TNR) c2(XP_011508250) c3(tenascin-R isoform X2) c4(298933) c5(298934, 298935, 298936, 298937, 298938, 298939) c6( ) c7(jf, sY, T, d, fm, oe, U, aT, bK, ey, nA, Hp, uC, Lg, Fc); #c1(TNR) c2(XP_011508251) c3(tenascin-R isoform X3) c4(298940, 298941) c5(298942, 298943, 298944, 298945, 298946, 298947) c6( ) c7(jf, sY, T, d, fm, oe, U, aT, bK, ey, nA, Hp, uC, Lg, Fc); #c1(TNRC18) c2(NP_001073964) c3(trinucleotide repeat-containing gene 18 protein) c4(36717, 36718, 36719, 36720) c5(36721, 36722, 36723, 36724, 36725, 36726, 36727, 36728, 36729, 36730, 36731, 36732, 36733) c6( ) c7(aw); #c1(TNRC18) c2(XP_011513890) c3(trinucleotide repeat-containing gene 18 protein isoform X1) c4(306316) c5(306317, 306318, 306319, 306320, 306321, 306322, 306323, 306324, 306325, 306326, 306327, 306328, 306329, 306330, 306331, 306332, 306333, 306334) c6( ) c7(aw); #c1(TNRC6A) c2(NP_055309) c3(trinucleotide repeat-containing gene 6A protein) c4(180388) c5(180389, 180390, 180391, 180392, 180393, 180394) c6( ) c7(T, aA, r); #c1(TNRC6A) c2(XP_005255314) c3(trinucleotide repeat-containing gene 6A protein isoform X7) c4( ) c5(273607, 273608, 273609, 273610, 273611, 273612) c6( ) c7(T, aA, r); #c1(TNRC6A) c2(XP_011544094) c3(trinucleotide repeat-containing gene 6A protein isoform X2) c4(343266) c5( ) c6( ) c7(T, aA, r); #c1(TNRC6B) c2(NP_001020014) c3(trinucleotide repeat-containing gene 68 protein isoform 3) c4(28019, 28020) c5(28021, 28022, 28023, 28024, 28025, 28026, 28027, 28028, 28029, 28030, 28031, 28032, 28033, 28034, 28035, 28036) c6( ) c7(op, kl, ad, vA); #c1(TNRC6B) c2(NP_001155973) c3(trinucleotide repeat-containing gene 68 protein isoform 1) c4(61673) c5(61674, 61675, 61676, 61677, 61678, 61679) c6( ) c7(op, kl, ad, vA); #c1(TNRC6B) c2(NP_055903) c3(trinucleotide repeat-containing gene 68 protein isoform 2) c4(184359, 184360) c5(184361, 184362, 184363, 184364, 184365, 184366, 184367, 184368, 184369, 184370, 184371, 184372, 184373) c6( ) c7(ep, kl, ad, vA); #c1(TNS1) c2(NP_072174) c3(tensin-1) c4(212777) c5(212778, 212779, 212780, 212781, 212782, 212783) c6( ) c7(T, aA, cd, q, mC, ad, eA, Na, aT, bj, K, ae, d, aW, Y, eZ, r, aq, aF, iR, ck, es, mO, qJ, c, eM, TJ, iA, at, Dp, m, fL, B, hS); #c1(TNS1) c2(XP_011510017) c3(tensin-1 isoform X5) c4(300638) c5( ) c6( ) c7(T, aA, cd, q, mC, ad, eA, Na, aT, bj, K, ae, d, aW, Y, eZ, r, aq, aF, iR, ck, es, mO, qJ, c, eM, TJ, iA, at, Dp, m, fL, B, hS); #c1(TNS1) c2(XP_011510019) c3(tensin-1 isoform X7) c4(300639) c5(300640, 300641, 300642, 300643, 300644, 300645) c6( ) c7(T, aA, cd, q, mC, ad, eA, Na, aT, bj, K, ae, d, aW, Y, eZ, r, aq, aF, iR, ck, es, mO, qJ, c, eM, TJ, iA, at, Dp, m, fL, B, hS); #c1(TNS1) c2(XP_011510024) c3(tensin-1 isoform X11) c4( ) c5(300646, 300647, 300648, 300649, 300650, 300651, 300652, 300653, 300654, 300655, 300656, 300657, 300658, 300659, 300660) c6( ) c7(T, aA, cd, q, mC, ad, eA, Na, aT, bj, K, ae, d, aW, Y, eZ, r, aq, aF, iR, ck, es, mO, qJ, c, eM, TJ, iA, at, Dp, m, fL, B, hS); #c1(TNS2) c2(NP_056134) c3(tensin-like C1 domain-containing phosphatase isoform 1) c4(185863) c5(185864, 185865, 185866, 185867, 185868, 185869) c6( ) c7(bl, d, aSO); #c1(TNS2) c2(NP_736610) c3(tensin-like C1 domain-containing phosphatase isoform 2) c4(247330, 247331, 247332, 247333) c5(247334, 247335, 247336, 247337, 247338, 247339, 247340, 247341, 247342, 247343, 247344, 247345, 247346, 247347, 247348, 247349, 247350, 247351, 247352, 247353, 247354, 247355, 247356) c6( ) c7(bl, d, aSO); #c1(TNS2) c2(NP_938072) c3(tensin-like C1 domain-containing phosphatase isoform 3) c4( ) c5(259608, 259609) c6( ) c7(bl, d, aSD); #c1(TNS2) c2(XP_011536381) c3(tensin-like C1 domain-containing phosphatase isoform X3) c4( ) c5(333692) c6( ) c7(bl, d, aSO); #c1(TNS3) c2(XP_011513778) c3(tensin-3 isoform X2) c4( ) c5(306188, 306189, 306190, 306191, 306192, 306193, 306194, 306195, 306196) c6( ) c7(lg, lJ, bzb, aT); #c1(TNS3) c2(XP_011513779) c3(tensin-3 isoform X3) c4(306197) c5(306198, 306199, 306200, 306201, 306202, 306203, 306204) c6( ) c7(lg, lJ, bzb, aT); #c1(TNS3) c2(XP_011513780) c3(tensin-3 isoform X4) c4(306205) c5(306206) c6( ) c7(lg, IJ, bzb, aT); #c1(TNS3) c2(XP_011513781) c3(tensin-3 isoform X5) c4(306207, 306208) c5(306209) c6( ) c7(lg, IJ, bzb, aT); #c1(TNS3) c2(XP_011513785) c3(tensin-3 isoform X1) c4(306210, 306211) c5(306212, 306213, 306214, 306215, 306216, 306217, 306218, 306219, 306220, 306221, 306222, 306223, 306224, 306225, 306226, 306227, 306228, 306229, 306230, 306231, 306232) c6( ) c7(lg, lJ, bzb, aT); #c1(TNS3) c2(XP_011513786) c3(tensin-3 isoform X6) c4(306233) c5(306234, 306235, 306236, 306237, 306238, 306239, 306240, 306241, 306242, 306243, 306244) c6( ) c7(lg, lJ, bzb, aT); #c1(TNS4) c2(NP_116254) c3(tensin-4 precursor) c4(225986, 225987) c5(225988, 225989, 225990, 225991, 225992, 225993, 225994, 225995, 225996, 225997) c6( ) c7(ae, T, av, aE, Y, r, aA, aF, pd, bz, q, ad, cp); #c1(TNS4) c2(XP_005257801) c3(tensin-4 isoform X1) c4( ) c5(275365, 275366, 275367, 275368, 275369, 275370) c6( ) c7(ae, T, av, aE, Y, r, aA, aF, pd, bz, q, ad, cp); #c1(TNXB) c2(NP_061978) c3(tenascin-X isoform 1 precursor) c4(201431, 201432, 201433, 201434, 201435, 201436, 201437, 201438, 201439, 201440, 201441, 201442, 201443, 201444, 201445, 201446, 201447, 201448, 201449, 201450) c5(201451, 201452, 201453, 201454, 201455, 201456, 201457, 201458, 201459, 201460, 201461, 201462, 201463, 201464, 201465, 201466, 201467, 201468, 201469, 201470, 201471, 201472, 201473, 201474, 201475, 201476, 201477, 201478, 201479, 201480, 201481, 201482, 201483, 201484, 201485, 201486, 201487, 201488, 201489, 201490, 201481, 201492, 201493, 201494, 201495, 201496, 201497, 201498, 201499, 201500, 201501, 201502, 201503, 201504, 201505, 201506, 201507, 201508, 201509, 201510, 201511, 201512, 201513, 201514, 201515, 201516, 201517, 201518, 201519, 201520, 201521, 201522, 201523, 201524, 201525, 201526, 201527, 201528, 201529, 201530, 201531, 201532, 201533, 201534, 201535, 201536, 201537, 201538, 201539, 201540, 201541, 201542, 201543, 201544, 201545, 201546, 201547, 201548, 201549, 201550, 201551, 201552, 201553, 201554, 201555, 201556, 201557, 201558, 201559, 201560, 201561, 201562, 201563, 201564, 201565, 201566, 201567, 201568, 201569, 201570) c6(201571, 201572, 201573, 201574) c7(T, cOA, Jy, ci, Eh, afb, qC, ib, wG, oj, adX, h, aSF, cOz, af, xQ, A, aW, oV, cr, eZ, aiz, cOy, Ew, W, adZ, un, m, y, hS); #c1(TNXB) c2(NP_115859) c3(tenascin-X isoform 2) c4( ) c5(224338, 224339, 224340, 224341, 224342, 224343, 224344, 224345, 224346, 224347, 224348, 224349, 224350, 224351, 224352) c6(224353, 224354) c7(T, cOA, Jy, ci, Eh, afb, qC, ib, wG, oj, adX, h, aSF, cOz, af, xQ, A, aW, oV, cr, eZ, aiz, cOy, Ew, W, adZ, un, m, y, hS); #c1(TOB1) c2(NP_001230806) c3(protein Tnb1 isoform 1) c4(86752) c5(86753, 86754, 86755, 86756, 86757, 86758, 86759, 86760, 86761, 86762) c6( ) c7(dP, ov, T, kh, av, aW, mF, aT, NI, aA, aE, aOJ, bz); #c1(TOB2) c2(NP_057356) c3(protein Tob2) c4(190320, 190321) c5(190322, 190323, 190324, 190325, 190326, 190327, 190328, 190329, 190330, 190331, 190332, 190333) c6( ) c7(qj); #c1(TOLL1P) c2(NP_061882) c3(toll-interacting protein) c4(200918, 200919) c5(200920, 200921, 200922, 200923, 200924, 200925, 200926, 200927, 200928, 200929, 200930, 200931) c6( ) c7(apJ, ji, ac, C, wz); #c1(TOM1) c2(NP_001129201) c3(target of Myb protein 1 isoform 3) c4(51149) c5(51150, 51151, 51152, 51153, 51154) c6( ) c7(x, mU, cA, mW, mZ, mS, mY, bK, mV, mL mX); #c1(TOM1) c2(NP_001129202) c3(target of Myb protein 1 isoform 4) c4(51155, 51156) c5(51157, 51158, 51159, 51160, 51161, 51162, 51163, 51164, 51165, 51166, 51167, 51168) c6( ) c7(x, mU, cA, mW, ml, mS, mY, bK, mV, mL mX); #c1(TOM1) c2(NP_001129204) c3(target of Myb protein 1 isoform 2) c4(51174) c5(51175, 51176, 51177, 51178, 51179, 51180, 51181, 51182) c6( ) c7(x, mU, cA, mW, mZ, mS, mY, bK, mV, mL mX); #c1(TOM1) c2(NP_005479) c3(target of Myb protein 1 isoform 1) c4(156545, 156546, 156547, 156548) c5(156549, 156550, 156551, 156552, 156553, 156554, 156555, 156556, 156557, 156558, 156559, 156560, 156561, 156562, 156563, 156564, 156565, 156566) c6( ) c7(x, mU, cA, mW, ml, mS, mY, bK, mV, mL mX); #c1(TOM1) c2(XP_011528120) c3(target of Myb protein 1 isoform X1) c4(323200) c5( ) c6( ) c7(x, mU, cA, mW, mZ, mS, mY, bK, mV, mL mX); #c1(TOM1) c2(XP_011528121) c3(target of Myb protein 1 isoform X2) c4(323201) c5(323202, 323203, 323204, 323205, 323206, 323207, 323208, 323209, 323210, 323211, 323212, 323213, 323214, 323215, 323216, 323217, 323218) c6( ) c7(x, mU, cA, mW, ml, mS, mY, bK, mV, mT, mX); #c1(TOM1L1) c2(NP_005477) c3(TOM1-like protein 1) c4(156529, 156530, 156531) c5(156532, 156533, 156534, 156535, 156536, 156537, 156538, 156539, 156540, 156541, 156542, 156543, 156544) c6( ) c7(ad); #c1(TOM1L1) c2(XP_011522458) c3(TOM1-like protein 1 isoform X2) c4( ) c5(317085, 317086, 317087, 317088, 317089, 317090, 317091, 317092, 317093, 317094, 317095, 317096, 317097) c6( ) c7(ad); #c1(TOMM20) c2(NP_055580) c3(mitochondrial import receptor subunit TOM20 homolog) c4(182069) c5(182070, 182071, 182072, 182073, 182074, 182075) c6( ) c7(K); #c1(TOMM34) c2(NP_006800) c3(mitochondrial import receptor subunit TOM34) c4(168192) c5(168193, 168194, 168195, 168196, 168197, 168198) c6( ) c7(X, W); #c1(TOMM40) c2(NP_001122389) c3(mitochondrial import receptor subunit TOM40 homolog) c4(46593) c5(46594, 46595, 46596, 46597, 46598, 46599, 46600, 46601, 46602, 46603, 46604, 46605, 46606, 46607) c6( ) c7(af, sO, e, bO, aT, gl, bS, et, ei, Z, aaO, fK, cbh, vi); #c1(TOMM70A) c2(NP_055635) c3(mitochondrial import receptor subunit TOM70) c4(182418, 182419) c5(182420, 182421, 182422, 182423, 182424, 182425, 182426, 182427, 182428, 182429, 182430, 182431) c6( ) c7(wR, cbG); #c1(TONSL) c2(NP_038460) c3(tonsoku-like protein) c4(176503, 176504) c5(176505, 176506, 176507, 176508, 176509, 176510, 176511, 176512, 176513, 176514, 176515, 176516, 176517) c6( ) c7(T, dD, eq, K, kl); #c1(TOP1) c2(NP_003277) c3(DNA topoisomerase 1) c4(137036) c5(137037, 137038, 137039, 137040, 137041, 137042) c6( ) c7(gV, T, os, fR, fV, fG, ha, fd, bB, n, oZ, IR, q, aue, ad, x av, ft, gd, aT, oW, hn, dL, K, rz, lM, ae, eL, kI, d, hG, aW, Y, r, Qm, eF, cm, bz, pb, ck, eM, bE, nF, bk, dy, k, bt, B); #c1(TOP2A) c2(NP_001058) c3(DNA topoisomerase 2-alpha) c4(34445, 34446, 34447) c5(34448, 34449, 34450, 34451, 34452, 34453, 34454, 34455, 34456, 34457, 34458, 34459, 34460, 34461, 34462, 34463, 34464, 34465) c6( ) c7(bL, T, atC, e, if, eX, jh, aA, n, ci, hF, q, ad, er, eA, eJ, oB, ip, ft, x, aE, aeO, qK, aT, iv, eV, dL, hP, K, ey, hB, ae, eL, gj, kl, d, B, aeR, JI, aW, Y, qt, ff, iw, apK, r, Ej, aF, en, g, t, cM, bz, auC, ck, Dy, gt, eM, au, cj, hR, m, k, bC, bt, X, jr); #c1(TOP2A) c2(XP_005257689) c3(DNA topoisomerase 2-alpha isoform X1) c4(275333) c5(275334, 275335, 275336, 275337, 275338, 275339) c6( ) c7(bL, T, atC, e, if, eX, jh, aA, n, ci, hF, q, ad, er, eA, eJ, oB, ip, ft, x, aE, aeO, gK, aT, iv, eV, dL, hP, K, ey, hB, ae, eL, gj, kl, d, B, aeR, JI, aW, Y, qt, ff, iw, apK, r, Ej, aF, en, g, t, cM, bz, auC, ck, Dy, gt, eM, au, cj, hR, m, k, bC, bt, X, jr); #c1(TOP2B) c2(NP_001059) c3(DNA topoisomerase 2-beta) c4(34466, 34467, 34468) c5(34469, 34470, 34471, 34472, 34473, 34474, 34475, 34476, 34477, 34478, 34479, 34480, 34481, 34482, 34483, 34484, 34485, 34486, 34487, 34488, 34489) c6( ) c7(ck, ae, T, eM, Pt, iT, cE, EQ, cj, jj, as, cm, bt, bz, cd, ad); #c1(TOP2B) c2(XP_005265484) c3(DNA topoisomerase 2-beta isoform X1) c4(279558, 279559) c5(279560, 279561, 279562, 279563, 279564, 279565, 279566, 279567) c6( ) c7(ck, ae, T, eM, Pt, iT, cE, EQ, cj, jj, as, cm, bt, bz, cd, ad); #c1(TOP2B) c2(XP_011532359) c3(DNA topoisomerase 2-beta isoform X2) c4( ) c5(328532, 328533, 328534, 328535, 328536) c6( ) c7(ck, ae, T, eM, Pt, iT, cE, EQ, cj, jj, as, cm, bt, bz, cd, ad); #c1(TOP3A) c2(NP_004609) c3(DNA topoisomerase 3-alpha) c4(148150, 148151) c5(148152, 148153, 148154, 148155, 148156, 148157) c6( ) c7(bv, T, MR, aW, aT, h, dL, as, bt, eL); #c1(TOP3A) c2(XP_005256833) c3(DNA topoisomerase 3-alpha isoform X1) c4(274550) c5(274551, 274552, 274553, 274554, 274555, 274556, 274557) c6( ) c7(bv, T, MR, aW, aT, h, dL, as, bt, eL); #c1(TOP3A) c2(XP_011522302) c3(DNA topoisomerase 3-alpha isoform X2) c4(316986) c5(316987, 316988, 316989, 316990, 316991, 316992) c6( ) c7(bv, T, MR, aW, aT, h, dL, as, bt, eL); #c1(TOP3A) c2(XP_011522303) c3(DNA topoisomerase 3-alpha isoform X3) c4( ) c5(316993, 316994, 316995, 316996, 316997) c6( ) c7(bv, T, MR, aW, aT, h, dL, as, bt, eL); #c1(TOP3B) c2(NP_001269042) c3(DNA topoisomerase 3-beta-1) c4(100280, 100281, 100282, 100283, 100284, 100285) c5(100286, 100287, 100288, 100289, 100290, 100291, 100292, 100293, 100294, 100295, 100296, 100297, 100298, 100299, 100300, 100301, 100302, 100303, 100304, 100305, 100306) c6( ) c7(aw); #c1(TOP3B) c2(XP_005261870) c3(DNA topoisomerase 3-beta-1 isoform X2) c4( ) c5(277647, 277648, 277649, 277650, 277651, 277652) c6( ) c7(aw); #c1(TOP3B) c2(XP_011528786) c3(DNA topoisomerase 3-beta-1 isoform X3) c4(324113, 324114, 324115, 324116, 324117, 324118) c5(324119, 324120, 324121, 324122, 324123, 324124, 324125, 324126, 324127, 324128, 324129, 324130, 324131, 324132, 324133, 324134, 324135, 324136, 324137, 324138, 324139, 324140, 324141, 324142, 324143, 324144, 324145, 324146, 324147, 324148, 324149, 324150, 324151, 324152, 324153, 324154, 324155, 324156, 324157, 324158, 324159, 324160, 324161, 324162, 324163, 324164, 324165, 324166) c6( ) c7(aw); #c1(TOPBP1) c2(NP_008958) c3(DNA topoisomerase 2-binding protein 1) c4(169802) c5(169803, 169804, 169805, 169806, 169807, 169808) c6( ) c7(ID, T, aC, aE, aW, Ot, arS, ew, aT, cj, r, K, m, ci, g, t, q, BY); #c1(TOPORS) c2(NP_001182551) c3(E3 ubiquitin-protein ligase Topers isoform 2) c4(75032) c5(75033, 75034, 75035, 75036, 75037, 75038) c6( ) c7(ae, xX, eM, cOB, nw, ci, eF, nC, bz, ad); #c1(TPRS) c2(NP_005793) c3(E3 ubiquitin-protein ligase Topers isoform 1) c4(159376) c5(159377, 159378, 159379, 159380, 159381, 159382) c6( ) c7(ae, xX, eM, cOB, nw, ci, eF, nC, bz, ad); #c1(TOR1A) c2(NP_000104) c3(torsin-1A precursor) c4(1801, 1802) c5(1803, 1804, 1805, 1806, 1807, 1808, 1809, 1810, 1811, 1812, 1813, 1814) c6( ) c7(cOC, oR, aj, j, bfD, aR, Wk, aU, aks, Wl, K, Wm, bAm, an, rE, aH, beX, Wi, yL, ayn, aGM, HL, dg, hp, cOF, xw, bDO, cOD, aiO, cEz, cOE, aGO, vL, aUZ, aUR, aen, bAr, ps, qc); #c1(TOR1AIP1) c2(NP_056417) c3(torsin-1A-interacting protein 1 isoform 2) c4(187511) c5(187512, 187513, 187514, 187515, 187516, 187517, 187518, 187519, 187520, 187521, 187522, 187523) c6( ) c7(aU, eW, xs); #c1(TOR1AIP1) c2(XP_011507706) c3(torsin-1A-interacting protein 1 isoform X2) c4(297716) c5( ) c6( ) c7(aU, eW, xs); #c1(TOR1AIP2) c2(NP_071742) c3(interferon alpha responsive protein isoform a) c4(211902) c5(211903, 211904, 211905, 211906, 211907, 211908) c6( ) c7(aU); #c1(TOR1AIP2) c2(NP_659471) c3(torsin-1A-interacting protein 2 isoform b) c4(240091) c5(240092, 240093, 240094, 240095, 240096, 240097) c6( ) c7(aU); #c1(TOR1B) c2(NP_055321) c3(torsin-1B precursor) c4(180462, 180463) c5(180464, 180465, 180466, 180467, 180468, 180469, 180470, 180471, 180472, 180473, 180474, 180475) c6( ) c7(aU, ds, bDO, j); #c1(TOR2A) c2(NP_001078816) c3(prosalusin isoform a precursor) c4(37901) c5(37902, 37903, 37904, 37905, 37906, 37907, 37908, 37909) c6(37910, 37911) c7(dD, ea, dh, j, eq, aCQ, cm); #c1(TOR2A) c2(NP_001127902) c3(prosalusin isoform c precursor) c4(49445) c5(49446, 49447, 49448, 49449, 49450, 49451, 49452, 49453) c6(49454, 49455) c7(dD, ea, dh, j, eq, aCQ, cm); #c1(TOR2A) c2(NP_001127903) c3(prosalusin isoform d precursor) c4(49456) c5(49457, 49458, 49459, 49460, 49461, 49462) c6(49463) c7(dD, ea, dh, j, eq, aCQ, cm); #c1(TOR2A) c2(NP_569726) c3(prosalusin isoform b precursor) c4(233828) c5(233829, 233830, 233831, 233832, 233833, 233834, 233835, 233836, 233837) c6(233838, 233839) c7(dD, ea, dh, j, eq, aCQ, cm); #c1(TOR2A) c2(XP_011516857) c3(prosalusin isoform X3) c4( ) c5(310290, 310291) c6( ) c7(dD, ea, dh, j, eq, aCQ, cm); #c1(TOX) c2(NP_055544) c3(thymocyte selection-associated high mobility group hex protein TOX) c4(181868, 181869) c5(181870, 181871, 181872, 181873, 181874, 181875, 181876, 181877, 181878, 181879, 181880, 181881) c6( ) c7(T, ac, qb, e, aw, EQ, aT, j, cm, fq, eu); #c1(TOX2) c2(NP_001092266) c3(TOX high mobility group hex family member 2 isoform c) c4(39481, 39482) c5(39483, 39484, 39485, 39486, 39487, 39488, 39489, 39490, 39491, 39492, 39493, 39494, 39495, 39496) c6( ) c7(Gp, av, T, bz, cm); #c1(TOX2) c2(NP_001092267) c3(TOX high mobility group hex family member 2 isoform a) c4(39497) c5(39498, 39499, 39500, 39501, 39502, 39503, 39504, 39505, 39506) c6( ) c7(Gp, av, T, bz, cm); #c1(TOX2) c2(NP_001092268) c3(TOX high mobility group hex family member 2 isoform b) c4(39507) c5(39508, 39509, 39510, 39511, 39512, 39513) c6( ) c7(Gp, av, T, bz, cm); #c1(TOX2) c2(XP_005260643) c3(TOX high mobility group hex family member 2 isoform X2) c4( ) c5(276761, 276762, 276763, 276764, 276765, 276766, 276767, 276768, 276769, 276770, 276771) c6( ) c7(Gp, av, T, bz, cm); #c1(TOX2) c2(XP_006723947) c3(TOX high mobility group box family member 2 isoform X1) c4(295551) c5( ) c6( ) c7(Gp, av, T, bz, cm); #c1(TOX3) c2(NP_001073899) c3(TOX high mobility group box family member 3 isoform 1) c4(36355) c5(36356, 36357, 36358, 36359, 36360, 36361) c6( ) c7(T, zQ, kP, c, PE, aW, yY, aeU, aT, cHd, cX, eS, bK, m, t, aed); #c1(TOX3) c2(NP_001139660) c3(TOX high mobility group box family member 3 isoform 2) c4(59629) c5(59630, 59631, 59632, 59633, 59634, 59635) c6( ) c7(T, zQ, kP, c, PE, aW, yY, aeU, aT, cHd, cX, eS, bK, m, t, aed); #c1(TOX4) c2(NP_001290452) c3(TOX high mobility group box family member 4 isoform 2) c4(115479, 115480) c5(115481, 115482, 115483, 115484, 115485, 115486, 115487, 115488, 115489, 115490, 115491, 115492) c6( ) c7(T, fM, bP, bE, r, bB, n, ci, cl, g); #c1(TOX4) c2(NP_055643) c3(TOX high mobility group box family member 4 isoform 1) c4(182501) c5(182502, 182503, 182504, 182505, 182506, 182507, 182508, 182509, 182510, 182511) c6( ) c7(T, fM, bP, bE, r, bB, n, ci, cl, q); #c1(TP53) c2(NP_000537) c3(cellular turner antigen p53 isoform a) c4(12271, 12272, 12273, 12274, 12275, 12276, 12277, 12278) c5(12279, 12280, 12281, 12282, 12283, 12284, 12285, 12286, 12287, 12288, 12289, 12290, 12291, 12292, 12293, 12294, 12295, 12296, 12297, 12298, 12299, 12300, 12301, 12302, 12303, 12304, 12305, 12306, 12307, 12308, 12309, 12310, 12311, 12312, 12313, 12314, 12315, 12316, 12317, 12318, 12319, 12320, 12321, 12322, 12323, 12324, 12325, 12326, 12327, 12328, 12329, 12330, 12331, 12332, 12333, 12334, 12335, 12336, 12337, 12338, 12339, 12340, 12341, 12342, 12343, 12344, 12345, 12346, 12347, 12348, 12349, 12350, 12351, 12352, 12353, 12354, 12355, 12356, 12357, 12358, 12359, 12360, 12361, 12362, 12363, 12364, 12365, 12366, 12367, 12368, 12369, 12370, 12371, 12372, 12373, 12374, 12375, 12376, 12377, 12378, 12379, 12380, 12381, 12382, 12383, 12384, 12385, 12386, 12387, 12388, 12389, 12390) c6(12391, 12392, 12393, 12394, 12395, 12396, 12397) c7(uB, gh, T, os, cEi, ea, aeu, cOQ, Vd, ci, aAo, jO, bfG, aJa, YD, GK, amR, aEl, bv, xy, aE, lv, ajv, auB, SV, aoK, dV, cPe, iv, hu, zy, aiJ, cp, aa, li, cPk, yo, cOV, ZH, cOf, iE, Ls, az, Az, QB, nY, CT, dg, PQ, zC, zE, lk, bfw, fT, cOG, iA, cPc, nB, dc, lp, avZ, bkv, cj, cX, k, fy, cE, cjG, YK, bxC, iB, aO, ht, RC, aj, auA, cd, hr, cOP, aoc, cty, aeX, rC, KN, bUP, IG, bkP, Gw, ey, bl, Dz, on, YT, aJb, bmF, pl, Yl, aig, MD, Lh, ge, ahJ, fe, pm, iN, cPt, iO, bbz, ok, bkn, asl, dB, eD, bed, pV, E, avr, qF, aCD, bkE, Pn, aJJ, jp, Dh, fZ, aA, ol, bWZ, cz, yp, lu, AO, Eh, rd, q, aHy, zn, RU, bkJ, akU, qK, cPa, kf, rO, jj, ch, cOR, dl, iF, wr, gP, NE, nO, bfz, fO, cPh, iy, auX, lo, eS, cl, bkp, gQ, pb, cfZ, pa, rR, cdd, ac, iM, iQ, RW, nG, WU, aWQ, aor, aws, aps, bt, rA, On, gV, Mb, qz, iW, jh, Hn, KD, oZ, dG, Gn, fu, cHs, ceY, OE, buc, ad, afb, hX, iC, cPs, avp, Yt, avu, wD, yt, vJ, Ot, avs, oW, bj, iY, IQ, wm, cPn, ahK, aoZ, apw, MG, BO, cW, ff, gK, gC, nh, aeV, brp, Sm, iV, bz, amS, auH, aeH, Pk, aed, ne, rk, jr, bsJ, IC, bM, BA, iu, aEn, Fv, aKu, e, if, bB, cL, IN, cOU, aon, asr, sD, brq, ip, x, aif, cGK, ws, Ma, aeO, Gb, bFU, ja, us, azm, aNZ, aJu, be, Qe, xQ, eG, anr, aeR, dH, Jl, hl, kt, Qm, cKZ, NR, as, eF, ir, cm, aHd, Qt, bw, bEu, qJ, eY, lt, Kv, ii, vA, cON, mx, iS, hh, cOJ, in, ik, Th, Vj, sc, dD, gU, Qj, afA, IT, wu, atC, zt, aDT, n, oY, nA, Mo, b, no, cfF, Hx, Do, jz, amJ, gd, aaj, aYf, hn, eV, apD, aYF, pi, aeJ, hi, bUj, ia, aMC, A, RT, cPh, kj, hT, PX, AQ, Xg, hQ, GA, yq, sE, aJP, YE, bP, aQn, Pl, agl, ajn, hL, hj, at, nL, pg, SZ, eo, cB, B, bmX, cug, AS, dA, eX, v, Qo, cPi, V, aYh, eJ, Yn, hW, wN, BJ, eO, AJ, aHs, bPF, avt, iZ, ae, jf, Lu, Yw, cOT, vT, aBq, ev, auc, bvJ, Qr, axW, Lf, bbs, qL, acB, aYz, bu, apx, LV, KQ, t, ho, Px, vk, el, ck, kP, ll, cwA, aGi, cLy, au, gX, anD, oX, Gg, auN, zu, cOK, vi, HQ, nZ, hl, Dd, aBz, ml, cOH, eq, Fc, Tg, bkq, asi, aop, hd, CJ, Db, py, ds, cPl, hD, Ti, vc, bkw, bby, anN, nJ, aqa, Yj, d, auY, je, hG, et, dN, aoW, aWR, anW, gW, Z, dr, aVz, bE, gk, csl, afd, cOY, pP, Hs, a My, QC, rH, y, kS, sH, cOO, pC, aC, fR, Js, azf, hV, al, alN, CH, axk, qj, IR, Qp, Vp, afr, gJ, bnj, u, aEX, Xc, Bc, rJ, pX, bW, Qk, M, bJK, ayX, DO, K, aDZ, eL, avn, Us, aci, bPf, bn, pr, aEl, qS, wF, LZ, col, buS, aB, apm, g, pL, cvf, ve, QA, apB, iP, aAW, ou, bDd, aJw, AM, nF, U, PV, QF, cPd, dW, Hb, m, cPg, cPr, QO, sw, gp, zX, OI, NT, fN, cek, qy, aw, Qh, zP, JW, asS, biS, ft, bkm, lt, Tf, blp, Nn, kH, cU, aOM, By, Jn, ZN, KV, Ha, dx, awV, cPy, FZ, CN, aJL, ks, agF, YE, jT, cM, fs, XT, Zj, Ld, kn, ar, kT, kz, ml, bWg, Tk, bo, auR, Lq, azr, zl, nz, IB, Pr, it, Jo, WL, aGn, fM, avm, boq, fG, aoE, jx, wo, hz, j, btX, acn, il, pd, eA, J, o, er, XX, amg, MR, lg, aAF, yg, qv, aAv, bq, Fg, sb, avg, xR, Y, bEc, ayU, r, en, wA, aoG, aER, cPo, iK, bN, chr, QG, YV, sn, c, auo, Dy, hA, bei, bbA, wR, cS, np, dy, EY, KY, LS, gx, CX, kh, Gl, akd, id, bkL, oA, bs, auq, bS, bkM, agH, OH, hF, XM, buj, iJ, Jm, fU, dP, fX, io, hP, ji, Yi, WW, IU, BN, IR, aus, anv, xs, eH, cr, aJI, gE, VI, bow, iR, KM, aAr, Bv, beC, Ew, Lj, asq, AR, bC, hE, G, jW, auW, pf, YU, qx, WV, zh, cPv, mF, aR, aQo, aJM, IS, dY, Ou, bnt, KP, apj, MO, pk, bXt, Zm, akV, zQ, bnh, aAu, aW, La, ahV, cOW, eM, iT, aep, uJ, gn, jM, Xu, QS, cZ, cPx, ajm, aEj, bui, Or, aBx, Bm, Wb, awr, fr, et, qN, ai, eW, co, Bl, hw, aMT, ic, h, dL, pj, hB, ask, Xh, aOU, cue, Gc, Df, Lg, Ck, YO, aiB, iw, aq, kp, Hu, mo, Ca, dw, op, aoO, oU, Gq, Qy, bkQ, cPj, Qu, hk, Vy, bm, gw, uz, oh, rx, cOL, ati, hR, YH, eQ, anx, ZZ, adG, cn, bL, cPp, eR, cPg, cjn, yk, WT, ew, tc, hy, aHa, bBs, azn, cOI, bkG, ga, mj, cOZ, nv, Vr, aoA, gp, afQ, ahL, aT, aJy, dz, Ex, Tj, ckx, af, qw, Uf, cPm, s, iU, oV, cPu, aJI, akY, f, brm, OC, sS, wg, nM, pZ, aGo, cPf, cPz, aJY, bko, aJQ, im, cOS, ava, VB, hS, bLx, Kd, Ke, Zl, aD, YM, cOX, Fb, oH, jE, aFJ, bkO, qC, av, I, F, ib, Rq, oz, sO, NS, Ye, azq, nl, cPw, cOM, bua, Od, fb, pq, iL, avQ, qt, Hq, eZ, yy, Ej, Xj, aF, aJT, Hp, LB, es, eU, RV, aoR, pc, kg, bE, WK, auw, aJz, aS, MC, adg, X, Ex); #c1(TP53) c2(NP_001119585) c3(cellular turner antigen P53 isoform c) c4(44179) c5(44180, 44181, 44182, 44183, 44184, 44185, 44186, 44187, 44188, 44189, 44190, 44191, 44192, 44193, 44194, 44195, 44196) cG(44197, 44198, 44199, 44200) c7(uB, gh, T, os, cEi, ea, aeu, cOQ, Vd, ci, aAo, jO, bfG, aJa, YD, GK, amR, aEI, bv, xy, aE, lv, ajv, auB, SV, aoK, dV, cPe, iv, hu, zy, aiJ, cp, aa, li, cPk, yo, cOV, ZH, cOf, iE, Ls, az, Az, QB, nY, CT, dg, PQ, zC, zE, Ik, bfw, fT, cOG, iA, cPc, nB, dc, lp, avZ, bkv, cj, cX, k, fy, cE, cjG, YK, bxC, iB, aO, ht, RC, aj, auA, cd, hr, cOP, aoc, cty, aeX, rC, KN, bUP, IG, bkP, Gw, ey, bl, Dz, on, YT, aJb, bmF, pl, YI, aig, MD, Lh, ge, ahJ, fe, pm, iN, cPt, iO, bbz, ok, bkn, asl, dB, eD, bcd, pV, E, avr, qF, aCD, bkE, Po, aJJ, jp, Dh, fZ, aA, ol, bWZ, cz, yp, lu, AD, Eh, rd, q, aHy, zn, RU, bkJ, akU, qK, cPa, kf, rO, jj, ch, cOR, dl, iF, wr, gP, NE, nO, bfz, fO, cPh, iy, auX, lo, eS, cl, bkp, gQ, pb, cfZ, pa, rR, cdd, ac, iM, iQ, RW, nG, WU, aWQ, aor, aws, aps, bt, rA, On, gV, Mb, qz, iW, jh, Hn, KD, oZ, dG, Gn, fu, cHs, ceY, OE, buc, ad, afb, hX, iC, cPs, avp, Yt, avu, wD, yt, vJ, Ot, avs, oW, bj, iY, IQ, wm, cPn, ahK, aoZ, apw, MG, BO, cW, ff, gK, gC, nh, aeV, brp, Sm, iV, bz, amS, auH, aeH, Pk, aed, ne, rk, jr, bsJ, IC, bM, BA, iu, aEn, Fv, aKu, e, if, bB, cL, IN, cOU, aon, asr, sD, brq, ip, x, aif, cGK, ws, Ma, aeO, Gb, bFU, ja, us, azm, aNZ, aJu, be, Qe, xQ, eG, anr, aeR, dH, JI, hl, kt, Qm, cKZ, NR, as, eF, ir, cm, aHd, Qt, bw, bEu, qJ, eY, lt, Kv, ii, vA, cON, mx, iS, hh, cOJ, in, ik, Th, Vj, sc, dD, gU, Qj, afA, IT, wu, atC, zt, aDT, n, oY, nA, Mo, b, no, cfF, Hx, Do, jz, amJ, gd, aaj, aYf, hn, eV, apD, aYF, pi, aeJ, hi, bUj, ia, aMC, A, RT, cPh, kj, hT, PX, AQ, Xg, hQ, GA, yq, sE, aJP, YE, bP, aQn, Pl, agl, ajn, hL, hj, at, nL, pg, SZ, eo, cB, B, bmX, cug, AS, dA, eX, v, Qn, cPi, V, aYh, eJ, Yn, hW, wN, BJ, eO, AJ, aHs, bPF, avt, iZ, ae, jf, Lu, Yw, cOT, vT, aBq, ev, auc, bvJ, Qr, axW, Lf, bbs, qL, acB, aYz, bu, apx, LV, KQ, t, ho, Px, vk, el, ck, kP, ll, cwA, aGi, cLy, au, gX, anD, oX, Gg, auN, zu, cOK, vi, HQ, nZ, hl, Dd, aBz, ml, cOH, eq, Fc, Tg, bkg, asi, aep, hd, CJ, Db, py, ds, cPI, hD, Ti, vc, bkw, bby, anN, nJ, aqa, Yj, d, auY, je, hG, et, dN, aoW, aWR, anW, gW, Z, dr, aVz, bF, gk, csl, afd, cDY, pP, Hs, aMy, QC, rH, y, kS, sH, cOO, pC, aC, fR, Js, azf, hV, al, alN, CH, axk, qj, IR, Qp, Vp, afr, gJ, bnj, u, aEX, Xc, Be, rJ, pX, bW, Qk, M, bJK, ayX, DO, K, aDZ, eL, avn, Us, aci, bPf, bn, pr, aEl, qS, wF, LZ, col, buS, aB, apm, g, pL, cvf, ve, QA, apB, iP, aAW, ou, bDd, aJw, AM, nF, U, PV, QF, cPd, dW, Hb, m, cPq, cPr, QO, sw, gp, zX, OI, NT, fN, cek, qy, aw, Qh, zP, JW, asS, biS, ft, bkm, lt, Tf, blp, Nn, kH, cU, aOM, By, Jn, ZN, KV, Ha, dx, awV, cPy, FZ, CN, aJL, ks, agF, YE, jT, cM, fs, XT, Zj, Ld, kn, ar, kT, kz, anZ, bWq, Tk, bo, auR, Lq, azr, zl, nz, lB, Pr, it, Jo, WL, aGn, fM, avm, boq, fG, aoE, jx, wo, hz, j, btX, acn, il, pd, eA, J, o, er, XX, amg, MR, lg, aAF, yg, qv, aAv, bq, Fg, sb, avg, xR, Y, bEc, ayU, r, en, wA, aoG, aER, cPo, iK, bN, chr, QG, YV, sn, c, auo, Dy, hA, bei, bbA, wR, cS, np, dy, EY, KY, LS, gx, CX, kh, GI, akd, id, bkL, oA, bs, auq, bS, bkM, agH, OH, hF, XM, buj, iJ, Jm, fU, dP, fX, io, hP, ji, Yi, WW, IU, BN, IR, aus, anv, xs, eH, cr, aJl, gE, VI, bow, iR, KM, aAr, Bv, beC, Ew, Lj, asq, AR, bC, hE, G, jW, auW, pf, YU, qx, WV, zh, cPv, mF, aR, aQo, aJM, IS, dY, Ou, bnt, KP, apj, MO, pk, bXt, Zm, akV, zQ, bnh, aAu, aW, La, ahV, cOW, eM, iT, aep, uJ, gn, jM, Xu, QS, cZ, cPx, ajm, aEj, bui, Or, aBx, Bm, Wb, awr, fr, et, qN, ai, eW, co, Bl, hw, aMT, ic, h, dL, pj, hB, ask, Xh, aOU, cue, Gc, Df, Lg, Ck, YO, aiB, iw, ag, kp, Hu, mo, Ca, dw, op, aoO, oU, Gq, Qy, bkQ, cPj, Qu, hk, Vy, bm, gw, uz, oh, rx, cOL, ati, hR, YH, eQ, anx, ZZ, adG, cn, bL, cPp, eR, cPg, cjn, yk, WT, ew, tc, hy, aHa, bBs, azn, cOI, bkG, ga, mj, cOZ, nv, Vr, aoA, gp, afQ, ahL, aT, aJy, dz, Fx, Tj, ckx, af, qw, Uf, cPm, s, iU, oV, cPu, aJI, akY, f, brm, OC, sS, wg, nM, pZ, aGo, cPf, cPz, aJY, bko, aJQ, im, cOS, ava, VB, hS, bLx, Kd, Ke, Zl, aD, YM, cOX, Fb, oH, jE, aFJ, bkO, qC, av, I, F, ib, Rq, oz, sO, NS, Yo, azq, nl, cPw, cOM, bua, Od, fb, pq, iL, avQ, qt, Hq, eZ, yy, Ej, Xj, aF, aJT, Hp, LB, es, eU, RV, aoR, pc, kg, bE, WK, auw, aJz, aS, MG, adg, X, Ex); #c1(TP53) c2(NP_001119586) c3(cellular turner antigen p53 isoform b) c4(44201) c5(44202, 44203, 44204, 44205, 44206, 44207, 44208, 44209, 44210, 44211, 44212, 44213, 44214, 44215, 44216, 44217, 44218, 44219, 44220, 44221, 44222, 44223, 44224, 44225, 44226, 44227, 44228, 44229, 44230, 44231, 44232, 44233, 44234, 44235, 44236, 44237, 44238, 44239) c6(44240, 44241, 44242, 44243, 44244, 44245, 44246, 44247) c7(uB, gh, T, os, cEi, ea, aeu, cOQ, Vd, ci, aAo, jO, bfG, aJa, YD, GK, amR, aEl, bv, xy, aE, lv, ajv, auB, SV, aoK, dV, cPe, iv, hu, zy, aiJ, cp, aa, li, cPk, ye, cOV, ZH, cOf, iE, Ls, az, Az, QB, nY, CT, dg, PQ, zC, zE, lk, bfw, fT, cOG, iA, cPc, nB, dc, lp, avZ, bkv, cj, cX, k, fy, cE, cjG, YK, bxC, iB, aO, ht, RC, aj, auA, cd, hr, cOP, aoc, cty, aeX, rC, KN, bUP, IG, bkP, Gw, ey, bl, Dz, on, YT, aJb, bmF, pl, Yl, aig, MD, Lh, ge, ahJ, fe, pm, iN, cPt, iO, bbz, ok, bkn, asl, dB, eD, bed, pV, E, avr, gF, aCD, bkE, Po, aJJ, jp, Dh, fZ, aA, ol, bWZ, cz, yp, lu, AO, Eh, rd, q, aHy, zn, RU, bkJ, akU, qK, cPa, kf, rO, jj, ch, cOR, dl, iF, wr, gP, NE, nO, bfz, fO, cPh, iy, auX, lo, eS, cl, bkp, gQ, pb, cfZ, pa, rR, cdd, ac, iM, iQ, RW, nG, WU, a WQ, aor, aws, aps, bt, rA, On, gV, Mb, qz, iW, jh, Hn, KD, oZ, dG, Gn, fu, cHs, ceY, OE, buc, ad, afb, hX, iC, cPs, avp, Yt, avu, wD, yt, vJ, Ot, avs, oW, bj, iY, lQ, wm, cPn, ahK, aoZ, apw, MG, BO, cW, ff, gK, gC, nh, aeV, brp, Sm, iV, bz, amS, auH, aeH, Pk, aed, ne, rk, jr, bsJ, IC, bM, BA, iu, aEn, Fv, aKu, e, if, bB, cL, IN, cOU, aon, asr, sD, brq, ip, x, aif, cGK, ws, Ma, aeO, Gb, bFU, ja, us, azm, aNZ, aJu, bc, Qe, xQ, eG, anr, aeR, dH, Jl, hl, kt, Qm, cKZ, NR, as, eF, ir, cm, aHd, Qt, bw, bEu, qJ, eY, lt, Kv, ii, vA, cON, mx, iS, hh, cOJ, in, ik, Th, Vj, sc, dD, gU, Qj, afA, lT, wu, atC, zt, aDT, n, oY, nA, Mo, b, no, cfF, Hx, Do, jz, amJ, gd, aaj, aYf, hn, eV, apD, aYF, pi, aeJ, hi, bUj, ia, aMC, A, RT, cPb, kj, hT, PX, AQ, Xg, hQ, GA, yq, sE, aJP, YE, bP, aQn, Pl, agl, ajn, hL, hj, at, nL, pg, SZ, eo, cB, B, bmX, cug, AS, dA, eX, v, Qo, cPi, V, aYh, eJ, Yn, hW, wN, BJ, eO, AJ, aHs, bPF, avt, iZ, ae, jf, Lu, Yw, cOT, vT, aBq, ev, auc, bvJ, Qr, axW, Lf, bbs, qL, acB, aYz, bu, apx, LV, KQ, t, ho, Px, vk, el, ck, kP, ll, cwA, aGi, cLy, au, gX, anD, oX, Gg, auN, zu, cOK, vi, HQ, nZ, hl, Dd, aBz, ml, cOH, eq, Fc, Tg, bkq, asi, aop, hd, CJ, Db, py, ds, cPl, hD, Ti, vc, bkw, bby, anN, nJ, aqa, Yj, d, auY, je, hG, et, dN, aoW, aWR, anW, gW, Z, dr, aVz, bF, gk, csl, afd, cOY, pP, Hs, aMy, QC, rH, y, kS, sH, cOO, pC, aC, fR, Js, azf, hV, al, alN, CH, axk, qj, lR, Qp, Vp, afr, gJ, bnj, u, aEX, Xc, Be, rJ, pX, bW, Qk, M, bJK, ayX, DO, K, aDZ, eL, avn, Us, aci, bPf, bn, pr, aEl, qS, wf, LZ, col, buS, aB, apm, g, pL, cvf, ve, QA, apB, iP, aAW, ou, bDd, aJw, AM, nF, U, PV, QF, cPd, dW, Hb, m, cPq, cPr, QO, sw, gp, zX, OI, NT, fN, cek, qy, aw, Qh, zP, JW, asS, biS, ft, bkm, lt, Tf, blp, Nn, kH, cU, aOM, By, Jn, ZN, KV, Ha, dx, awV, cPy, FZ, CN, aJL, ks, agF, YE, jT, cM, fs, XT, Zj, Ld, kn, ar, kT, kz, ml, bWg, Tk, bo, auR, Lq, azr, zl, nz, IB, Pr, it, Jo, WL, aGn, fM, avm, boq, fG, aoE, jx, wo, hz, j, btX, acn, il, pd, eA, J, o, er, XX, amg, MR, lg, aAF, yg, qv, aAv, bq, Eg, sb, avg, xR, Y, bEc, ayU, r, en, wA, aoG, aER, cPo, iK, bN, chr, QG, YV, sn, c, auo, Dy, hA, bei, bbA, wR, cS, np, dy, EY, KY, LS, gx, CX, kh, Gl, akd, id, bkL, oA, hs, auq, bS, bkM, agH, OH, hF, XM, buj, iJ, Jm, fU, dP, fX, io, hP, ji, Yi, WW, IU, BN, IR, aus, anv, xs, eH, cr, aJI, gE, VI, bow, iR, KM, aAr, Bv, beC, Ew, Lj, asq, AR, bC, hE, G, jW, auW, pf, YU, qx, WV, zh, cPv, mF, aR, aQo, aJM, IS, dY, Ou, bnt, KP, apj, MO, pk, bXt, Zm, akV, zQ, bnh, aAu, aW, La, ahV, cOW, eM, iT, aep, uJ, gn, jM, Xu, QS, cZ, cPx, ajm, aEj, bui, Or, aBx, Bm, Wb, awr, fr, et, qN, ai, eW, co, Bl, hw, aMT, ic, h, dL, pj, hB, ask, Xh, aOU, cue, Gc, Df, Lg, Ck, YO, aiB, iw, ag, kp, Hu, mo, Ca, dw, op, aoO, oU, Gq, Qy, bkQ, cPj, Qu, hk, Vy, bm, gw, uz, oh, rx, cOL, ati, hR, YH, eQ, anx, ZZ, adG, cn, bL, cPp, eR, cPg, cjn, yk, WT, ew, tc, hy, aHa, bBs, azn, cOI, bkG, ga, mj, cOZ, nv, Vr, aoA, qp, afQ, ahL, aT, aJy, dz, Fx, Tj, ckx, af, qw, Uf, cPm, s, iU, oV, cPu, aJl, akY, f, brm, OC, sS, wg, nM, pZ, aGo, cPf, cPz, aJY, bko, aJQ, im, cOS, ava, VB, hS, bLx, Kd, Ke, Zl, aD, YM, cOX, Fb, oH, jE, aFJ, bkO, qC, av, l, F, ib, Rq, oz, sO, NS, Yn, azq, nl, cPw, cOM, bua, Od, fb, pg, iL, avQ, qt, Hq, eZ, yy, Ej, Xj, aF, aJT, Hp, LB, es, eU, RV, aeR, pc, kg, bE, WK, auw, aJz, aS, MG, adg. X. Ex); #c1(TP53) c2(NP_001119587) c3(cellular tumer antigen p53 isoform d) c4(44248) c5( ) c6( ) c7(uB, gh, T, os, cEi, ea, aeu, cOQ, Vd, ci, aAo, jO, bfG, aJa, YD, GK, amR, aEl, bv, xy, aE, Iv, ajv, auB, SV, aoK, dV, cPe, iv, hu, zy, aiJ, cp, aa, li, cPk, yo, cOV, ZH, cOf, iE, Ls, az, Az, QB, nY, CT, dg, PQ, zC, zE, lk, bfw, fT, cOG, iA, cPc, nB, dc, lp, avZ, bkv, cj, cX, k, fy, cE, cjG, YK, bxC, iB, aO, ht, RC, aj, auA, cd, hr, cOP, aoc, cty, aeX, rC, KN, bUP, IG, bkP, Gw, ey, bl, Dz, on, YT, aJb, bmF, pl, Yl, aig, MO, Lh, ge, ahJ, fe, pm, iN, cPt, iO, bbz, ok, bkn, asl, dB, eD, bed, pV, E, avr, qF, aCD, bkE, Pn, aJJ, jp, Dh, fZ, aA, ol, bWZ, cz, yp, lu, AO, Eh, rd, g, aHy, zn, RU, bkJ, akU, qK, cPa, kf, rO, jj, ch, cOR, dl, iF, wr, gP, NE, nO, bfz, fO, cPh, iy, auX, lo, eS, cl, bkp, gQ, pb, cfZ, pa, rR, cdd, ac, iM, iQ, RW, nG, WU, aWQ, aor, aws, aps, bt, rA, On, gV, Mb, qz, iW, jh, Hn, KD, oZ, dG, Gn, fu, cHs, ceY, OE, hue, ad, afb, hX, iC, cPs, avp, Yt, avu, wD, yt, vJ, Ot, avs, oW, bj, iY, IQ, wm, cPn, ahK, aoZ, apw, MG, BO, cW, ff, gK, gC, nh, aeV, brp, Sm, iV, bz, amS, auH, aeH, Pk, aed, ne, rk, jr, bsJ, IC, bM, BA, iu, aEn, Fv, aKu, e, if, bB, cL, lN, cOU, aon, asr, sD, brq, ip, x, aif, cGK, ws, Ma, aeO, Gb, bFO, ja, us, azm, aNZ, aJu, be, Qe, xQ, eG, anr, aeR, dH, Jl, hl, kt, Qm, cKZ, NR, as, eF, ir, cm, aHd, Qt, bw, bEu, qJ, eY, lt, Kv, ii, vA, cON, mx, iS, hh, cOJ, in, ik, Th, Vj, sc, dD, gU, Qj, afA, IT, wu, atC, zt, aDT, n, oY, nA, Mo, b, no, cfF, Hx, Do, jz, amJ, gd, aaj, aYf, hn, eV, apD, aYF, pi, aeJ, hi, bUj, ia, aMC, A, RT, cPh, kj, hT, PX, AQ, Xg, hQ, GA, yq, sE, aJP, YE, bP, aQn, Pl, agl, ajn, hL, hj, at, nL, pg, SZ, eo, cB, B, bmX, cug, AS, dA, eX, v, Qn, cPi, V, aYh, eJ, Yn, hW, wN, BJ, eO, AJ, aHs, bPF, avt, iZ, ae, jf, Lu, Yw, cOT, vT, aBq, ev, auc, bvJ, Qr, axW, Lf, bbs, qL, acB, aYz, bu, apx, LV, KQ, t, ho, Px, vk, el, ck, kP, ll, cwA, aGi, cLy, au, gX, anD, oX, Gg, auN, zu, cOK, vi, HQ, nZ, hl, Dd, aBz, ml, cOH, eg, Fc, Tg, bkq, asi, aop, hd, CJ, Db, py, ds, cPl, hD, Ti, vc, bkw, bby, anN, nJ, aqa, Yj, d, auY, je, hG, et, dN, aoW, aWR, anW, gW, Z, dr, aVz, bF, gk, csl, afd, cOY, pP, Hs, aMy, QC, rH, y, kS, sH, cOO, pC, aC, fR, Js, azf, hV, al, alN, CH, axk, qj, IR, Qp, Vp, afr, gJ, bnj, u, aEX, Xc, Bc, rJ, pX, bW, Qk, M, bJK, ayX, DO, K, aDZ, eL, avn, Us, aci, bPf, bn, pr, aEl, qS, wf, LZ, col, buS, aB, apm, g, pL, cvf, ve, QA, apB, iP, aAW, ou, bDd, aJw, AM, nF, U, PV, QF, cPd, dW, Hb, m, cPq, cPr, QO, sw, gp, zX, OI, NT, fN, cek, qy, aw, Qh, zP, JW, asS, biS, ft, bkm, lt, Tf, blp, Nn, kH, cU, aOM, By, Jn, ZN, KV, Ha, dx, awV, cPy, FZ, CN, aJL, ks, agF, YE, jT, cM, fs, XT, Zj, Ld, kn, ar, kT, kz, anZ, bWq, Tk, bo, auR, Lq, azr, zl, nz, IB, Pr, it, Jo, WL, aGn, fM, avm, boq, fG, aoE, jx, wo, hz, j, btX, acn, il, pd, eA, J, o, er, XX, amg, MR, lg, aAF, yg, qv, aAv, bq, Fg, sb, avg, xR, Y, bEc, ayU, r, en, wA, aoG, aER, cPo, iK, bN, chr, QG, YV, sn, c, auo, Dy, hA, bei, bbA, wR, cS, np, dy, EY, KY, LS, gx, CX, kh, Gl, akd, id, bkL, oA, bs, auq, bS, bkM, agH, OH, hF, XM, buj, iJ, Jm, fU, dP, fX, io, hP, ji, Yi, WW, IU, BN, IR, aus, anv, xs, eH, cr, aJl, gE, VI, bow, iR, KM, aAr, Bv, beC, Ew, Lj, asq, AR, bC, hE, G, jW, auW, pf, YU, qx, WV, zh, cPv, mF, aR, aQo, aJM, IS, dY, Ou, bnt, KP, apj, MO, pk, bXt, Zm, akV, zQ, bnh, aAu, aW, La, ahV, cOW, eM, iT, aep, uJ, gn, jM, Xu, QS, cZ, cPx, ajm, aEj, bui, Or, aBx, Bm, Wb, awr, fr, et, qN, ai, eW, co, Bl, hw, aMT, ic, h, dL, pj, hB, ask, Xh, aOU, cue, Gc, Df, Lg, Ck, YO, aiB, iw, aq, kp, Hu, mo, Ca, dw, op, aoO, oU, Gq, Qy, bkQ, cPj, Qu, hk, Vy, bm, gw, uz, oh, rx, cOL, ati, hR, YH, eQ, anx, IL, adG, cn, bL, cPp, eR, cPg, cjn, yk, WT, ew, tc, hy, aHa, bBs, azn, cOl, bkG, ga, mj, cOZ, nv, Vr, aoA, qp, afQ, ahL, aT, aJy, dz, Ex, Tj, ckx, af, qw, Uf, cPm, s, iU, oV, cPu, aJl, akY, f, brm, OC, sS, wg, nM, pZ, aGo, cPf, cPz, aJY, bko, aJQ, im, cOS, ava, VB, hS, bLx, Kd, Ke, Zl, aD, YM, cOX, Fb, oH, jE, aFJ, bkO, qC, av, I, F, ib, Rq, oz, sO, NS, Yo, azq, nl, cPw, cOM, bua, Od, fb, pq, iL, avQ, qt, Hq, eZ, yy, Ej, Xj, aF, aJT, Hp, LB, es, eU, RV, aeR, pc, kg, bE, WK, auw, adz, aS, MG, adg, X, Ex); #c1(TP53) c2(NP_001119588) c3(cellular turner antigen p53 isoform e) c4( ) c5(44249, 44250, 44251, 44252, 44253, 44254, 44255, 44256, 44257, 44258, 44259, 44260, 44261, 44262) c6(44263, 44264, 44265) c7(uB, gh, T, os, cEi, ea, aeu, cOQ, Vd, ci, aAo, jO, bfG, aJa, YD, GK, amR, aEl, bv, xy, aE, lv, ajv, auB, SV, aoK, dV, cPe, iv, hu, zy, aiJ, cp, aa, li, cPk, yo, cOV, ZH, cOf, iE, Ls, az, Az, QB, nY, CT, dg, PQ, zC, zE, lk, bfw, fT, cOG, iA, cPc, nB, dc, lp, avZ, bkv, cj, cX, k, fy, cE, cjG, YK, bxC, iB, aO, ht, RC, aj, auA, cd, hr, cOP, aoc, cty, aeX, rC, KN, bUP, IG, bkP, Gw, ey, bl, Dz, on, YT, aJb, bmF, pl, Yl, aig, MD, Lh, ge, ahJ, fe, pm, iN, cPt, iO, bbz, ok, bkn, asl, dB, eD, bcd, pV, E, avr, qF, aCD, bkE, Po, aJJ, jp, Dh, fZ, aA, ol, bWZ, cz, yp, lu, AO, Eh, rd, q, aHy, zn, RU, bkJ, akU, qK, cPa, kf, rO, jj, ch, cOR, dl, iF, wr, gP, NE, nO, bfz, fO, cPh, iy, auX, lo, eS, cl, bkp, gQ, pb, cfZ, pa, rR, cdd, ac, iM, iQ, RW, nG, WO, aWQ, aor, aws, aps, bt, rA, On, gV, Mb, qz, iW, jh, Hn, KD, oZ, dG, Gn, fu, cHs, ceY, OE, buc, ad, afb, hX, iC, cPs, avp, Yt, avu, wD, yt, vJ, Ot, avs, oW, bj, iY, IQ, wm, cPn, ahK, aoZ, apw, MG, BO, cW, ff, gK, gC, nh, aeV, brp, Sm, iV, bz, amS, auH, aeH, Pk, aed, ne, rk, jr, bsJ, IC, bM, BA, iu, aEn, Fv, aKu, e, if, bB, cL, lN, cOU, aon, asr, sD, brq, ip, x, aif, cGK, ws, Ma, aeO, Gb, bFU, ja, us, azm, aNZ, aJu, be, Qe, xQ, eG, anr, aeR, dH, Jl, hl, kt, Qm, cKZ, NR, as, eF, ir, cm, aHd, Qt, bw, bEu, qJ, eY, It, Kv, ii, vA, cON, mx, iS, hh, cOJ, in, ik, Th, Vj, sc, dD, gU, Qj, afA, IT, wu, atC, zt, aDT, n, oY, nA, Mo, b, no, cfF, Hx, Do, jz, amJ, gd, aaj, aYf, hn, eV, apD, aYF, pi, aeJ, hi, bUj, ia, aMC, A, RT, cPb, kj, hT, PX, AQ, Xg, hQ, GA, yq, sE, aJP, YE, bP, aQn, Pl, agl, ajn, hL, hj, at, nL, pg, SZ, eo, cB, B, bmX, cug, AS, dA, eX, v, Qo, cPi, V, aYh, eJ, Yn, hW, wN, BJ, eO, AJ, aHs, bPF, avt, iZ, ae, jf, Lu, Yw, cOT, vT, aBq, ev, auc, bvJ, Qr, axW, Lf, bbs, qL, acB, aYz, bu, apx, LV, KQ, t, ho, Px, vk, el, ck, kP, ll, cwA, aGi, cLy, au, gX, anD, oX, Gg, auN, zu, cOK, vi, HQ, nZ, hl, Dd, aBz, ml, cOH, eq, Fc, Tg, bkq, asi, aop, hd, CJ, Db, py, ds, cPl, hD, Ti, vc, bkw, bby, anN, nJ, aqa, Yj, d, auY, je, hG, et, dN, aoW, aWR, anW, gW, Z, dr, aVz, bF, gk, csl, afd, cOY, pP, Hs, a My, QC, rH, y, kS, sH, cOO, pC, aC, fR, Js, azf, hV, al, alN, CH, axk, qj, lR, Qp, Vp, afr, gJ, bnj, u, aEX, Xc, Be, rJ, pX, bW, Qk, M, bJK, ayX, DO, K, aDZ, eL, avn, Us, aci, bPf, bn, pr, aEl, qS, wF, LZ, col, buS, aB, apm, g, pL, cvf, ve, QA, apB, iP, aAW, ou, bDd, aJw, AM, nF, U, PV, QF, cPd, dW, Hb, m, cPq, cPr, QO, sw, gp, zX, OI, NT, fN, cek, qy, aw, Qh, zP, JW, asS, biS, ft, bkm, lt, Tf, blp, Nn, kH, cU, aOM, By, Jn, ZN, KV, Ha, dx, awV, cPy, FZ, CN, aJL, ks, agF, YF, jT, cM, fs, XT, Zj, Ld, kn, ar, kT, kz, anZ, bWq, Tk, bo, auR, Lq, azr, zl, nz, IB, Pr, it, Jo, WL, aGn, fM, avm, boq, fG, aoE, jx, wo, hz, j, btX, acn, il, pd, eA, J, o, er, XX, amg, MR, Ig, aAF, yg, qv, aAv, bq, Fg, sb, avg, xR, Y, bEc, ayU, r, en, wA, aoG, aER, cPo, iK, bN, chr, QG, YV, sn, c, auo, Dy, hA, bei, bbA, wR, cS, np, dy, EY, KY, LS, gx, CX, kh, Gl, akd, id, bkL, oA, bs, auq, bS, bkM, agH, OH, hF, XM, buj, iJ, Jm, fU, dP, fX, io, hP, ji, Yi, WW, IU, BN, IR, aus, anv, xs, eH, cr, aJl, gE, Vl, bow, iR, KM, aAr, Bv, beC, Ew, Lj, asq, AR, bC, hE, G, jW, auW, pf, YU, qx, WV, zh, cPv, mF, aR, aQn, aJM, IS, dY, Ou, bnt, KP, apj, MO, pk, bXt, Zm, akV, zQ, bnh, aAu, aW, La, ahV, cOW, eM, iT, aep, uJ, gn, jM, Xu, QS, cZ, cPx, ajm, aEj, bui, Or, aBx, Bm, Wb, awr, fr, et, qN, ai, eW, co, Bl, hw, aMT, ic, h, dL, pj, hB, ask, Xh, aOU, cue, Gc, Df, Lg, Ck, YO, aiB, iw, aq, kp, Hu, mo, Ca, dw, op, aoO, oU, Gq, Qy, bkQ, cPj, Qu, hk, Vy, bm, gw, uz, oh, rx, cOL, ati, hR, YH, eQ, anx, ZZ, adG, cn, bL, cPp, eR, cPg, cjn, yk, WT, ew, tc, hy, aHa, bBs, azn, cOI, bkG, ga, mj, cOZ, nv, Vr, aoA, qp, afQ, ahL, aT, aJy, dz, Ex, Tj, ckx, af, qw, Uf, cPm, s, iU, oV, cPu, a Jl, akY, f, brm, OC, sS, wg, nM, pZ, aGn, cPf, cPz, aJY, bko, aJQ, im, cOS, ava, VB, hS, bLx, Kd, Ke, Zl, aD, YM, cOX, Fb, oH, jE, aFJ, bkO, qC, av, I, F, ib, Rq, nz, sO, NS, Yo, azq, nl, cPw, cOM, bua, Od, fb, pq, iL, avQ, qt, Hq, eZ, yy, Ej, Xj, aF, aJT, Hp, LB, es, eU, RV, aeR, pc, kg, bE, WK, auw, aJz, aS, MG, adg, X, Ex); #c1(TP53) c2(NP_001119590) c3(cellular turner antigen p53 isoform g) c4(44266) c5(44267) c6( ) c7(uB, gh, T, os, cEi, ea, aeu, cOQ, Vd, ci, aAo, jO, bfG, aJa, YD, GK, amR, aEl, bv, xy, aE, lv, ajv, auB, SV, aoK, dV, cPe, iv, hu, zy, aiJ, cp, aa, li, cPk, yn, cOV, ZH, cOf, iE, Ls, az, Az, QB, nY, CT, dg, PQ, zC, zE, Ik, bfw, fT, cOG, iA, cPc, nB, dc, lp, avZ, bkv, cj, cX, k, fy, cE, cjG, YK, bxC, iB, aO, ht, RC, aj, auA, cd, hr, cOP, aoc, cty, aeX, rC, KN, bUP, IG, bkP, Gw, ey, bl, Dz, on, YT, aJb, bmF, pl, Yl, aig, MD, Lh, ge, ahJ, fe, pm, iN, cPt, iO, bbz, ok, bkn, asl, dB, eD, bed, pV, E, avr, qF, aCD, bkE, Po, aJJ, jp, Dh, fZ, aA, ol, bWZ, cz, yp, lu, AO, Eh, rd, q, aHy, zn, RU, bkJ, akU, qK, cPa, kf, rO, jj, ch, cOR, dl, iF, wr, gP, NE, nO, bfz, fO, cPh, iy, auX, lo, eS, cl, bkp, gQ, pb, cfZ, pa, rR, cdd, ac, iM, iQ, RW, nG, WU, aWQ, aor, aws, aps, ht, rA, On, gV, Mb, qz, iW, jh, Hn, KD, oZ, dG, Gn, fu, cHs, ceY, OE, buc, ad, afb, hX, iC, cPs, avp, Yt, avu, wD, yt, vJ, Ot, avs, oW, bj, iY, lQ, wm, cPn, ahK, aoZ, apw, MG, BO, cW, ff, gK, gC, nh, aeV, brp, Sm, iV, bz, amS, auH, aeH, Pk, aed, ne, rk, jr, bsJ, lC, bM, BA, iu, aEn, Fv, aKu, e, if, bB, cL, lN, cOU, aon, asr, sD, brq, ip, x, aif, cGK, ws, Ma, aeO, Gb, bFU, ja, us, azm, aNZ, aJu, be, Qe, xQ, eG, anr, aeR, dH, Jl, hl, kt, Qm, cKZ, NR, as, eF, ir, cm, aHd, Qt, bw, bEu, qJ, eY, lt, Kv, ii, vA, cON, mx, iS, hh, cOJ, in, ik, Th, Vj, sc, dD, gU, Qj, afA, lT, wu, atC, zt, aDT, n, oY, nA, Mo, b, no, cfF, Hx, Do, jz, amJ, gd, aaj, aYf, hn, eV, apD, aYF, pi, aeJ, hi, bUj, ia, aMC, A, RT, cPb, kj, hT, PX, AQ, Xg, hQ, GA, yq, sE, aJP, YE, bP, aQn, Pl, agl, ajn, hL, hj, at, nL, pg, SZ, eo, cB, B, bmX, cug, AS, dA, eX, v, Qn, cPi, V, aYh, eJ, Yn, hW, wN, BJ, eO, AJ, aHs, bPF, avt, iZ, ae, jf, Lu, Yw, cOT, vT, aBq, ev, auc, bvJ, Qr, axW, Lf, bbs, qL, acB, aYz, bu, apx, LV, KQ, t, ho, Px, vk, el, ck, kP, ll, cwA, aGi, cLy, au, gX, anD, oX, Gg, auN, zu, cOK, vi, HQ, nZ, hl, Dd, aBz, mL cOH, eq, Fc, Tg, bkq, asi, aop, hd, CJ, Db, py, ds, cPI, hD, Ti, vc, bkw, bby, anN, nJ, aqa, Yj, d, auY, je, hG, et, dN, aoW, aWR, anW, gW, Z, dr, aVz, bF, gk, csl, afd, cOY, pP, Hs, aMy, QC, rH, y, kS, sH, cOO, pC, aC, fR, Js, azf, hV, aI, aIN, CH, axk, qj, IR, Qp, Vp, afr, gJ, bnj, u, aEX, Xc, Bc, rJ, pX, bW, Qk, M, bJK, ayX, DO, K, aDZ, eL, avn, Us, aci, bPf, bn, pr, aEl, qS, wF, LZ, col, buS, aB, apm, g, pL, cvf, ve, QA, apB, iP, aAW, ou, bDd, aJw, AM, nF, U, PV, QF, cPd, dW, Hb, m, cPq, cPr, QO, sw, gp, zX, OI, NT, fN, cek, qy, aw, Qh, zP, JW, asS, biS, ft, bkm, lt, Tf, blp, Nn, kH, cU, aOM, By, Jn, ZN, KV, Ha, dx, awV, cPy, FZ, CN, aJL, ks, agF, YE, jT, cM, fs, XT, Zj, Ld, kn, ar, kT, kz, ml, bWq, Tk, bo, auR, Lq, azr, zl, nz, IB, Pr, it, Jo, WL, aGn, fM, avm, boq, fG, aoE, jx, wo, hz, j, btX, acn, il, pd, eA, J, o, er, XX, amg, MR, lg, aAF, yg, qv, aAv, bg, Eg, sb, avg, xR, Y, bEc, ayU, r, en, wA, aoG, aER, cPo, iK, bN, chr, QG, YV, sn, c, auo, Dy, hA, bei, bbA, wR, cS, np, dy, EY, KY, LS, gx, CX, kh, Gl, akd, id, bkL, oA, bs, auq, bS, bkM, agH, OH, hF, XM, buj, iJ, Jm, fU, dP, fX, in, hP, ji, Yi, WW, IU, BN, IR, aus, anv, xs, eH, cr, aJl, gE, VI, bow, iR, KM, aAr, Bv, beC, Ew, Lj, asq, AR, bC, hE, G, jW, auW, pf, YU, qx, WV, zh, cPv, mF, aR, aQo, aJM, lS, dY, Ou, bnt, KP, apj, MO, pk, bXt, Zm, akV, zQ, bnh, aAu, aW, La, ahV, cOW, eM, iT, aep, uJ, gn, jM, Xu, QS, cZ, cPx, ajm, aEj, bui, Or, aBx, Bm, Wb, awr, fr, et, qN, ai, eW, co, Bl, hw, aMT, ic, h, dL, pj, hB, ask, Xh, aOU, cue, Gc, Df, Lg, Ck, YO, aiB, iw, aq, kp, Hu, mo, Ca, dw, op, aoO, oU, Gq, Qy, bkQ, cPj, Qu, hk, Vy, bm, gw, uz, oh, rx, cOL, ati, hR, YH, eQ, anx, ZZ, adG, cn, bL, cPp, eR, cPg, cjn, yk, WT, ew, tc, hy, aHa, bBs, azn, cOI, bkG, ga, mj, cOZ, nv, Vr, aoA, qp, afQ, ahL, aT, aJy, dz, Ex, Tj, ckx, af, qw, Uf, cPm, s, iU, oV, cPu, aJl, akY, f, brm, OC, sS, wg, nM, pZ, aGo, cPf, cPz, aJY, bko, aJQ, im, cOS, ava, VB, hS, bLx, Kd, Ke, ZL aD, YM, cOX, Fb, oH, jE, aFJ, bkO, qC, av, I, F, ib, Rq, nz, sO, NS, Yo, azq, nl, cPw, cOM, bua, Od, fb, pq, iL, avQ, qt, Hq, eZ, yy, Ej, Xj, aF, aJT, Hp, LB, es, eU, RV, aoR, pc, kg, bE, WK, auw, adz, aS, MG, adg, X, Ex); #c1(TP53) c2(NP_001263625) c3(cellular turner antigen P53 isoform i) c4( ) c5(97289, 97290, 97291, 97292, 97293, 97294, 97295, 97296, 97297, 97298, 97299, 97300, 97301, 97302, 97303) c6(97304, 97305, 97306, 97307) c7(uB, gh, T, os, cEi, ea, aeu, cOQ, Vd, ci, aAo, jO, bfG, aJa, YD, GK, amR, aEl, bv, xy, aE, lv, ajv, auB, SV, aoK, dV, cPe, iv, hu, zy, aiJ, cp, aa, li, cPk, yo, cOV, ZH, cOf, iE, Ls, az, Az, QB, nY, CT, dg, PQ, zC, zE, Ik, bfw, fT, cOG, iA, cPc, nB, dc, lp, avZ, bkv, cj, cX, k, fy, cE, cjG, YK, bxC, iB, aO, ht, RC, aj, auA, cd, hr, cOP, aoc, cty, aeX, rC, KN, bUP, IG, bkP, Gw, ey, bl, Dz, on, YT, aJb, bmF, pi, Yl, aig, MD, Lh, ge, ahJ, fe, pm, iN, cPt, iO, bbz, ok, bkn, asl, dB, eD, bcd, pV, E, avr, qF, aCD, bkE, Po, aJJ, jp, Dh, fZ, aA, ol, bWZ, cz, yp, lu, AO, Eh, rd, q, aHy, zn, RU, bkJ, akU, qK, cPa, kf, rO, jj, ch, cOR, dl, iF, wr, gP, NE, nO, bfz, fO, cPh, iy, auX, lo, eS, cl, bkp, gQ, pb, cfZ, pa, rR, edd, ac, iM, iQ, RW, nG, WU, aWQ, aor, aws, aps, bt, rA, On, gV, Mb, qz, iW, jh, Hn, KO, oZ, dG, Gn, fu, cHs, ceY, OE, buc, ad, afb, hX, iC, cPs, avp, Yt, avu, wD, yt, vJ, Ot, avs, oW, bj, iY, lQ, wm, cPn, ahK, aoZ, apw, MG, BO, cW, ff, gK, gC, nh, aeV, brp, Sm, iV, bz, amS, auH, aeH, Pk, aed, ne, rk, jr, bsJ, lC, bM, BA, iu, aEn, Fv, aKu, e, if, bB, cL, lN, cOU, aon, asr, sD, brq, ip, x, aif, cGK, ws, Ma, aeO, Gb, bFU, ja, us, azm, aNZ, aJu, be, Qe, xQ, eG, anr, aeR, dH, Jl, hi, kt, Qm, cKZ, NR, as, eF, ir, cm, aHd, Qt, bw, bEu, qJ, eY, lt, Kv, ii, vA, cON, mx, iS, hh, cOJ, in, ik, Th, Vj, sc, dD, gU, Qj, afA, lT, wu, atC, zt, aDT, n, oY, nA, Mo, b, no, cfF, Hx, Do, jz, amJ, gd, aaj, aYf, hn, eV, apD, aYF, pi, aeJ, hi, bUj, ia, aMC, A, RT, cPh, kj, hT, PX, AQ, Xg, hQ, GA, yq, sE, aJP, YE, bP, aQn, Pl, agl, ajn, hL, hj, at, nL, pg, SZ, eo, cB, B, bmX, cug, AS, dA, eX, v, Qo, cPi, V, aYh, eJ, Yn, hW, wN, BJ, eO, AJ, aHs, bPF, avt, iZ, ae, jf, Lu, Yw, cOT, vT, aBq, ev, auc, bvJ, Qr, axW, Lf, bbs, qL, acB, aYz, bu, apx, LV, KQ, t, ho, Px, vk, el, ck, kP, ll, cwA, aGi, cLy, au, gX, anD, oX, Gg, auN, zu, cOK, vi, HQ, nZ, hl, Dd, aBz, ml, cOH, eq, Fc, Tg, bkq, asi, aop, hd, CJ, Db, py, ds, cPl, hD, Ti, vc, bkw, bby, anN, nJ, aqa, Yj, d, auY, je, hG, et, dN, aoW, aWR, anW, gW, Z, dr, aVz, bF, gk, csl, afd, cOY, pP, Hs, aMy, QC, rH, y, kS, sH, cOO, pC, aC, fR, Js, azf, hV, al, alN, CH, axk, qj, IR, Qp, Vp, afr, gJ, bnj, u, aEX, Xc, Be, rJ, pX, bW, Qk, M, bJK, ayX, DO, K, aDZ, eL, avn, Us, aci, bPf, bn, pr, aEl, qS, wf, LZ, col, buS, aB, apm, g, pL, cvf, ve, QA, apB, iP, aAW, ou, bDd, aJw, AM, nF, U, PV, QF, cPd, dW, Hb, m, cPq, cPr, QO, sw, gp, zX, OI, NT, fN, cek, qy, aw, Qh, zP, JW, asS, biS, ft, bkm, It, Tf, blp, Nn, kH, cU, aOM, By, Jn, ZN, KV, Ha, dx, awV, cPy, FZ, CN, aJL, ks, agF, YE, jT, cM, fs, XT, Zj, Ld, kn, ar, kT, kz, anZ, bWq, Tk, bo, auR, Lq, azr, zl, nz, IB, Pr, it, Jo, WL, aGn, fM, avm, boq, fG, aoE, jx, wo, hz, j, btX, acn, il, pd, eA, J, o, er, XX, amg, MR, lg, aAF, yg, qv, aAv, bq, Fg, sb, avg, xR, Y, bEc, ayU, r, en, wA, aoG, aER, cPo, iK, bN, chr, QG, YV, sn, c, auo, Dy, hA, bei, bbA, wR, cS, np, dy, EY, KY, LS, gx, CX, kh, Gl, akd, id, bkL, oA, bs, auq, bS, bkM, agH, OH, hF, XM, buj, iJ, Jm, fU, dP, fX, io, hP, ji, Yi, WW, IU, BN, IR, aus, anv, xs, eH, cr, aJl, gE, VI, bow, iR, KM, aAr, Bv, beC, Ew, Lj, asq, AR, bC, hE, G, jW, auW, pf, YU, qx, WV, zh, cPv, mF, aR, aQn, aJM, IS, dY, Ou, bnt, KP, apj, MO, pk, bXt, Zm, akV, zQ, bnh, aAu, aW, La, ahV, cOW, eM, iT, aep, uJ, gn, jM, Xu, QS, cZ, cPx, ajm, aEj, bui, Or, aBx, Bm, Wb, awr, fr, et, qN, ai, eW, co, Bl, hw, aMT, ic, h, dL, pj, hB, ask, Xh, aOU, cue, Gc, Df, Lg, Ck, YO, aiB, iw, aq, kp, Hu, mo, Ca, dw, op, aoO, oU, Gq, Qy, bkQ, cPj, Qu, hk, Vy, bm, gw, uz, oh, rx, cOL, ati, hR, YH, eQ, anx, ZZ, adG, cn, bL, cPp, eR, cPg, cjn, yk, WT, ew, tc, hy, aHa, bBs, azn, cOl, bkG, ga, mj, cOZ, nv, Vr, aoA, qp, afQ, ahL, aT, aJy, dz, Ex, Tj, ckx, af, qw, Uf, cPm, s, iU, oV, cPu, aJl, akY, f, brm, OC, sS, wg, nM, pZ, aGo, cPf, cPz, aJY, bko, aJQ, im, cOS, ava, VB, hS, bLx, Kd, Ke, Zl, aD, YM, cOX, Fb, oH, jE, aFJ, bkO, qC, av, I, F, ib, Rq, oz, sO, NS, Ye, azq, nl, cPw, cOM, bua, Od, fb, pq, iL, avQ, qt, Hq, eZ, yy, Ej, Xj, aF, aJT, Hp, LB, es, eU, RV, aoR, pc, kg, bE, WK, auw, aJz, aS, MG, adg, X, Ex); #c1(TP53) c2(NP_001263626) c3(cellular turner antigen p53 isoform j) c4(97308) c5(97309, 97310, 97311, 97312, 97313, 97314) cG(97315) c7(uB, gh, T, os, cEi, ea, aeu, cOQ, Vd, ci, aAo, jO, bfG, aJa, YD, GK, amR, aEl, bv, xy, aE, lv, ajv, auB, SV, aoK, dV, cPe, iv, hu, zy, aiJ, cp, aa, li, cPk, ye, cOV, ZH, cOf, iE, Ls, az, Az, QB, nY, CT, dg, PQ, zC, zE, lk, bfw, fT, cOG, iA, cPc, nB, dc, lp, avZ, bkv, cj, cX, k, fy, cE, cjG, YK, bxC, iB, aO, ht, RC, aj, auA, cd, hr, cOP, aoc, cty, aeX, rC, KN, bUP, lG, bkP, Gw, ey, bl, Dz, on, YT, aJb, bmF, pl, Yl, aig, MO, Lh, ge, ahJ, fe, pm, iN, cPt, iO, bbz, ok, bkn, asl, dB, eD, bcd, pV, E, avr, qF, aCD, bkE, Po, aJJ, jp, Dh, fZ, aA, ol, bWZ, cz, yp, lu, AO, Eh, rd, q, aHy, zn, RU, bkJ, akU, qK, cPa, kf, rO, jj, ch, cOR, dl, iF, wr, gP, NE, nO, bfz, fO, cPh, iy, auX, lo, eS, cl, bkp, gQ, pb, cfZ, pa, rR, edd, ac, iM, iQ, RW, nG, WU, aWQ, aor, aws, aps, bt, rA, On, gV, Mb, qz, iW, jh, Hn, KD, oZ, dG, Gn, fu, cHs, ceY, OE, buc, ad, afb, hX, iC, cPs, avp, Yt, avu, wD, yt, vJ, Ot, avs, oW, bj, iY, IQ, wm, cPn, ahK, aoZ, apw, MG, BO, cW, ff, gK, gC, nh, aeV, brp, Sm, iV, bz, amS, auH, aeH, Pk, aed, ne, rk, jr, bsJ, lC, bM, BA, iu, aEn, Fv, aKu, e, if, bB, cL, IN, cOU, aon, asr, sD, brq, ip, x, aif, cGK, ws, Ma, aeO, Gb, bFU, ja, us, azm, aNZ, aJu, bc, Qe, xQ, eG, anr, aeR, dH, Jl, hl, kt, Qm, cKZ, NR, as, eF, ir, cm, aHd, Qt, bw, bEu, qJ, eY, lt, Kv, ii, vA, cON, mx, iS, hh, cOJ, in, ik, Th, Vj, sc, dD, gU, Qj, afA, IT, wu, atC, zt, aDT, n, oY, nA, Mo, b, no, cfF, Hx, Do, jz, amJ, gd, aaj, aYf, hn, eV, apD, aYF, pi, aeJ, hi, bUj, ia, aMC, A, RT, cPh, kj, hT, PX, AQ, Xg, hQ, GA, yq, sE, aJP, YE, bP, aQn, Pl, agl, ajn, hL, hj, at, nL, pg, SZ, eo, cB, B, bmX, cug, AS, dA, eX, v, Qn, cPi, V, aYh, eJ, Yn, hW, wN, BJ, eO, AJ, aHs, bPF, avt, iZ, ae, jf, Lu, Yw, cOT, vT, aBq, ev, auc, bvJ, Qr, axW, Lf, bbs, qL, acB, aYz, bu, apx, LV, KQ, t, ho, Px, vk, el, ck, kP, ll, cwA, aGi, cLy, au, gX, anD, oX, Gg, auN, zu, cOK, vi, HQ, nZ, hl, Dd, aBz, mL cOH, eq, Fc, Tg, bkq, asi, aep, hd, CJ, Ob, py, ds, cPl, hD, Ti, vc, bkw, bby, anN, nJ, aqa, Yj, d, auY, je, hG, et, dN, aoW, aWR, anW, gW, Z, dr, aVz, bF, gk, csl, afd, cOY, pP, Hs, a My, QC, rH, y, kS, sH, cOO, pC, aC, fR, Js, azf, hV, al, alN, CH, axk, qj, IR, Qp, Vp, afr, gJ, bnj, u, aEX, Xc, Be, rJ, pX, bW, Qk, M, bJK, ayX, DO, K, aDZ, eL, avn, Us, aci, bPf, bn, pr, aEl, qS, wF, LZ, col, buS, aB, apm, g, pL, cvf, ve, QA, apB, iP, aAW, ou, bDd, aJw, AM, nF, U, PV, QF, cPd, dW, Hb, m, cPq, cPr, QO, sw, gp, zX, OI, NT, fN, cek, qy, aw, Qh, zP, JW, asS, biS, ft, bkm, It, Tf, blp, Nn, kH, cU, aOM, By, Jn, ZN, KV, Ha, dx, awV, cPy, FZ, CN, aJL, ks, agF, YE, jT, cM, fs, XT, Zj, Ld, kn, ar, kT, kz, ml, bWq, Tk, bo, auR, Lq, azr, zl, nz, lB, Pr, it, Jo, WL, aGn, fM, avm, boq, fG, aoE, jx, wo, hz, j, btX, acn, il, pd, eA, J, o, er, XX, amg, MR, lg, aAF, yg, qv, aAv, bq, Eg, sb, avg, xR, Y, bEc, ayU, r, en, wA, aoG, aER, cPo, iK, bN, chr, QG, YV, sn, c, auo, Dy, hA, bei, bbA, wR, cS, np, dy, EY, KY, LS, gx, CX, kh, Gl, akd, id, bkL, oA, bs, auq, bS, bkM, agH, OH, hF, XM, buj, iJ, Jm, fU, dP, fX, io, hP, ji, Yi, WW, IU, BN, IR, aus, anv, xs, eH, cr, aJI, gE, VI, bow, iR, KM, aAr, Bv, beC, Ew, Lj, asq, AR, bC, hE, G, jW, auW, pf, YU, qx, WV, zh, cPv, mF, aR, aQo, aJM, IS, dY, Ou, bnt, KP, apj, MO, pk, bXt, Zm, akV, zQ, bnh, aAu, aW, La, ahV, cOW, eM, iT, aep, uJ, gn, jM, Xu, QS, cZ, cPx, ajm, aEj, bui, Or, aBx, Bm, Wb, awr, fr, et, qN, ai, eW, co, Bl, hw, aMT, ic, h, dL, pj, hB, ask, Xh, aOU, cue, Gc, Df, Lg, Ck, YO, aiB, iw, aq, kp, Hu, mo, Ca, dw, op, aoO, nO, Gq, Qy, bkQ, cPj, Qu, hk, Vy, bm, gw, uz, oh, rx, cOL, ati, hR, YH, eQ, anx, ZZ, adG, cn, bL, cPp, eR, cPg, cjn, yk, WT, ew, tc, hy, aHa, bBs, azn, cOI, bkG, ga, mj, cOZ, nv, Vr, aoA, gp, afQ, ahL, aT, aJy, dz, Ex, Tj, ckx, af, qw, Uf, cPm, s, iU, oV, cPu, aJl, akY, f, brm, OC, sS, wg, nM, pZ, aGo, cPf, cPz, aJY, bko, aJQ, im, cOS, ava, VB, hS, bLx, Kd, Ke, Zl, aD, YM, cOX, Fb, oH, jE, aFJ, bkO, qC, av, I, F, ib, Rq, oz, sO, NS, Yo, azq, nl, cPw, cOM, bua, Od, fb, pq, iL, avQ, qt, Hq, eZ, yy, Ej, Xj, aF, aJT, Hp, LB, es, eU, RV, aoR, pc, kg, bE, WK, auw, adz, aS, MG, adg, X, Ex); #c1(TP53AIPI) c2(NP_001182123) c3(P53-regulated apoptosis-inducing protein 1 isoform c) c4(74595) c5(74596, 74597, 74598, 74599, 74600, 74601) c6( ) c7(ae, T, av, fR, eM, az, aA, aq, aF, ci, K, bz, B, ad); #c1(TP53AIPI) c2(NP_001182124) c3(p53-regulated apoptosis-inducing protein 1 isoform b) c4(74602) c5(74603, 74604, 74605, 74606, 74607, 74608) c6( ) c7(ae, T, av, fR, eM, az, aA, aq, aF, ci, K, bz, B, ad); #c1(TP53BP1) c2(NP_001135451) c3(tumor suppressor p53-binding protein 1 isoform 2) c4(52943) c5(52944, 52945, 52946, 52947, 52948, 52949) c6( ) c7(T, kh, fM, aC, AS, if, ht, jh, aA, fd, n, hy, ci, qN, atV, mC, ad, eA, azn, hd, aE, afQ, aT, K, ae, Nr, d, iU, aW, oV, ff, eZ, ks, po, en, g, t, iK, bz, Ng, sS, kP, auV, nB, hk, cj, at, m, fL, bC, cE, AN); #c1(TP53BP1) c2(NP_001135452) c3(tumor suppressor p53-binding protein 1 isoform 1) c4(52950) c5(52951, 52952, 52953, 52954, 52955, 52956, 52957, 52958, 52959, 52960, 52961, 52962) c6( ) c7(T, kh, fM, aC, AS, if, ht, jh, aA, fd, n, hy, ci, qN, atV, mC, ad, eA, azn, hd, aE, afQ, aT, K, ae, Nr, d, iU, aW, oV, ff, eZ, ks, po, en, g, t, iK, bz, Nq, sS, kP, auV, nB, hk, cj, at, m, fL, bC, cE, AN); #c1(TP53BP1) c2(NP_005648) c3(tumor suppressor p53-binding protein 1 isoform 3) c4(158251) c5( ) c6( ) c7(T, kh, fM, aC, AS, if, ht, jh, aA, fd, n, hy, ci, qN, atV, mC, ad, eA, azn, hd, aE, afQ, aT, K, ae, Nr, d, iU, aW, oV, ff, eZ, ks, po, en, g, t, iK, bz, Nq, sS, kP, auV, nB, hk, cj, at, m, fL, bC, cE, AN); #c1(TP53BP1) c2(XP_011520287) c3(tumor suppressor p53-binding protein 1 isoform X2) c4(315123) c5(315124, 315125, 315126, 315127, 315128, 315129) c6( ) c7(T, kh, fM, aC, AS, if, ht, jh, aA, fd, n, hy, ci, qN, atV, mC, ad, eA, azn, hd, aE, afQ, aT, K, ae, Nr, d, iU, aW, oV, ff, eZ, ks, po, en, g, t, iK, bz, Nq, sS, kP, auV, nB, hk, cj, at, m, fL, bC, cE, AN); #c1(TP53BP2) c2(NP_001026855) c3(apoptosis-stimulating of p53 protein 2 isoform 1) c4(29662) c5(29663, 29664, 29665, 29666, 29667, 29668, 29669, 29670) c6( ) c7(ck, T, ZH, af, aoc, CN, aW, jh, aA, hn, aF, hF, nJ, B, hX); #c1(TP53BP2) c2(XP_011542570) c3(apoptosis-stimulating of p53 protein 2 isoform X2) c4(341124) c5( ) c6( ) c7(ck, T, ZH, af, aoc, CN, aW, jh, aA, hn, aF, hF, nJ, B, hX); #c1(TP53BP2) c2(XP_011542571) c3(apoptosis- stimulating of P53 protein 2 isoform X1) c4(341125) c5(341126, 341127, 341128, 341129, 341130) c6( ) c7(ck, T, ZH, af, aoc, CN, aW, jh, aA, hn, aF, hF, nJ, B, hX); #c1(TP53BP2) c2(XP_011542572) c3(apoptosis-stimulating of P53 protein 2 isoform X3) c4( ) c5(341131, 341132, 341133, 341134, 341135, 341136) c6( ) c7(ck, T, ZH, af, aoc, CN, aW, jh, aA, hn, aF, hF, nJ, B, hX); #c1(TP53111) c2(NP_001245253) c3(tumor protein P53-inducible protein 11) c4(92852, 92853, 92854, 92855, 92856, 92857, 92858) c5(92859, 92860, 92861, 92862, 92863, 92864, 92865, 92866, 92867, 92868, 92869, 92870, 92871, 92872, 92873, 92874, 92875, 92876, 92877, 92878, 92879, 92880, 92881, 92882) c6( ) c7(aq, aF, B, aA); #c1(TP53111) c2(XP_005253286) c3(tumor protein p53-inducible protein 11 isoform X2) c4( ) c5(272380, 272381, 272382, 272383, 272384, 272385, 272386, 272387, 272388, 272389, 272390, 272391, 272392, 272393, 272394, 272395, 272396, 272397, 272398, 272399, 272400, 272401, 272402, 272403, 272404, 272405, 272406, 272407, 272408, 272409) c6( ) c7(aq, aF, B, aA); #c1(TP53113) c2(NP_612358) c3(tumor protein p53-inducible protein 13 precursor) c4(236237, 236238) c5(236239, 236240, 236241, 236242, 236243, 236244, 236245, 236246, 236247, 236248, 236249, 236250) c6( ) c7(K); #c1(TP5313) c2(NP_001193731) c3(guinnne oxidoreductase PIG3 isoform 2) c4(82523) c5(82524, 82525, 82526, 82527, 82528, 82529, 82530, 82531, 82532, 82533, 82534, 82535) c6( ) c7(T, fM, zQ, eM, aT, at, dL, ci, K, m, iK, ae, ad); #c1(TP5313) c2(NP_671713) c3(guinnne oxidoreductase PIG3 isoform 1) c4(242134, 242135) c5(242136, 242137, 242138, 242139, 242140, 242141, 242142, 242143, 242144, 242145) c6( ) c7(T, fM, zQ, eM, aT, at, dL, ci, K, m, iK, ae, ad); #c1(TP531NPI) c2(NP_001129205) c3(tumor protein p53-inducible nuclear protein 1 isoform b) c4(51183) c5(51184, 51185, 51186, 51187, 51188, 51189, 51190, 51191, 51192, 51193, 51194) c6( ) c7(bL, ck, T, cc, aE, iA, aW, Y, aD, aT, aA, aF, wb, ci, K, fr, eA); #c1(TP531NPI) c2(XP_011515688) c3(tumor protein p53-inducible nuclear protein 1 isoform X1) c4(308523, 308524) c5(308525, 308526, 308527, 308528, 308529, 308530, 308531) c6( ) c7(bL, ck, T, cc, aE, iA, aW, Y, aD, aT, aA, aF, wb, ci, K, fr, eA); #c1(TP531NP2) c2(NP_067025) c3(tumor protein P53-inducible nuclear protein 2) c4(208478, 208479, 208480) c5(208481, 208482, 208483, 208484, 208485, 208486, 208487, 208488, 208489, 208490, 208481, 208492, 208493, 208494, 208495, 208496, 208497, 208498, 208499, 208500, 208501, 208502) c6( ) c7(T, aW, pQ, aeS, aT, jh, dL, ci, K, zZ, iK, eL); #c1(TP53RK) c2(NP_291028) c3(TP53-regulating kinase) c4(228902, 228903) c5(228904, 228905, 228906, 228907, 228908, 228909, 228910, 228911, 228912, 228913, 228914, 228915) c6( ) c7(T, cF, K); #c1(TP53TG3C) c2(NP_001192188) c3(TP53-target gene 3 protein) c4(82037, 82038) c5(82039, 82040, 82041, 82042, 82043, 82044, 82045, 82046, 82047, 82048, 82049, 82050, 82051, 82052, 82053, 82054, 82055, 82056, 82057, 82058, 82059, 82060, 82061, 82062, 82063, 82064, 82065, 82066, 82067, 82068, 82069, 82070, 82071, 82072) c6( ) c7(T); #c1(TP63) c2(NP_001108450) c3(tumor protein 63 isoform 2) c4(43200) c5(43201, 43202, 43203, 43204, 43205, 43206, 43207, 43208, 43209, 43210, 43211, 43212) c6( ) c7(aOR, bM, T, aC, Fv, if, ci, cPD, YD, ip, Na, aOS, aE, arA, PX, Eo, dV, K, hu, eL, Ur, Ii, iE, aW, cPB, are, az, Az, aOW, OZ, aEl, LZ, arK, g, eE, zE, eF, cm, eM, Jr, cPc, lq, nB, vA, nF, wK, cj, aPc, k, m, cE, wu, iB, zt, ht, Bm, n, qN, ld, aPb, Bl, ft, amJ, PD, cU, h, dL, Dz, aOU, aOX, A, MD, ks, fe, po, aOT, op, Ye, Qy, Qu, eD, hR, at, eo, YH, it, B, lp, fM, yk, arN, AO, V, pd, q, er, Zp, akG, aOY, cPE, hW, nX, afQ, qK, aT, rO, rD, Nc, Tj, aPa, avt, aOV, ae, le, xR, Y, Lf, afS, r, en, bu, t, Ud, iK, sS, QG, kP, cPA, zu, KY, rA, id, atS, jh, Hn, zU, adg, cPC, ad, aOZ, av, hd, ib, Db, IQ, wm, fb, nJ, aeQ, ff, eH, cr, eZ, asV, Ej, bz, atb, dr, LB, z, afT, y, xg, iu); #c1(TP63) c2(NP_001108451) c3(tumor protein 63 isoform 3) c4(43213) c5(43214, 43215, 43216, 43217, 43218, 43219) c6( ) c7(aOR, bM, T, aC, Fv, if, ci, cPD, YD, ip, Na, aOS, aE, arA, pX, Eo, dV, K, hu, eL, Ur, li, iE, aW, cPB, are, az, Az, aOW, OZ, aEl, LZ, arK, g, eE, zE, eF, cm, eM, Jr, cPc, lq, nB, vA, nF, wK, cj, aPc, k, m, cE, wu, iB, zt, ht, Bm, n, qN, Id, aPb, Bl, ft, amJ, PD, cU, h, dL, Dz, aOU, aOX, A, MD, ks, fe, po, aOT, op, Ye, Qy, Qu, eD, hR, at, eo, YH, it, B, lp, fM, yk, arN, AO, V, pd, q, er, Zp, akG, aOY, cPE, hW, nX, afO, gK, aT, rO, rD, Nc, Tj, aPa, avt, aOV, ae, le, xR, Y, Lf, afS, r, en, bu, t, Ud, iK, sS, QG, kP, cPA, zu, KY, rA, id, atS, jh, Hn, zU, adg, cPC, ad, aOZ, av, hd, ib, Db, IQ, wm, fb, nJ, aeQ, ff, eH, cr, eZ, asV, Ej, bz, atb, dr, LB, z, afT, y, xg, iu); #c1(TPG3) c2(NP_001108452) c3(tumor protein 63 isoform 4) c4(43220, 43221, 43222, 43223) c5(43224, 43225, 43226, 43227, 43228, 43229, 43230, 43231, 43232, 43233, 43234, 43235) c6( ) c7(aOR, bM, T, aC, Fv, if, ci, cPD, YD, ip, Na, aOS, aE, arA, pX, Eo, dV, K, hu, eL, Ur, li, iE, aW, cPB, are, az, Az, aOW, OZ, aEl, LZ, arK, g, eE, zE, eF, cm, eM, Jr, cPc, lq, nB, vA, nF, wK, cj, aPc, k, m, cE, wu, iB, zt, ht, Bm, n, qN, ld, aPb, Bl, ft, amJ, PD, cU, h, dL, Dz, aOU, aOX, A, MD, ks, fe, po, aOT, op, Ye, Qy, Qu, eD, hR, at, eo, YH, it, B, lp, fM, yk, arN, AO, V, pd, q, er, Zp, akG, aOY, cPE, hW, nX, afQ, qK, aT, rO, rD, Nc, Tj, aPa, avt, aOV, ae, le, xR, Y, Lf, afS, r, en, bu, t, Ud, iK, sS, QG, kP, cPA, zu, KY, rA, id, atS, jh, Hn, zU, adg, cPC, ad, aOZ, av, hd, ib, Db, lQ, wm, fb, nJ, aeQ, ff, eH, cr, eZ, asV, Ej, bz, atb, dr, LB, z, afT, y, xg, iu); #c1(TPG3) c2(NP_001108453) c3(tumor protein 63 isoform 5) c4(43236) c5(43237, 43238, 43239, 43240, 43241, 43242, 43243, 43244, 43245, 43246, 43247, 43248) c6( ) c7(aOR, bM, T, aC, Fv, if, ci, cPD, YD, ip, Na, aOS, aE, arA, pX, Eo, dV, K, hu, eL, Ur, li, iE, aW, cPB, are, az, Az, aOW, OZ, aEl, LZ, arK, g, eE, zE, eF, cm, eM, Jr, cPc, lq, nB, vA, nF, wK, cj, aPc, k, m, cE, wu, iB, zt, ht, Bm, n, qN, ld, aPb, Bl, ft, amJ, PD, cU, h, dL, Dz, aOU, aOX, A, MD, ks, fe, po, aOT, op, Ye, Qy, Qu, eD, hR, at, eo, YH, it, B, lp, fM, yk, arN, AO, V, pd, q, er, Zp, akG, aOY, cPE, hW, nX, afQ, qK, aT, rO, rD, Nc, Tj, aPa, avt, aOV, ae, le, xR, Y, Lf, afS, r, en, bu, t, Ud, iK, sS, QG, kP, cPA, zu, KY, rA, id, atS, jh, Hn, zU, adg, cPC, ad, aOZ, av, hd, ib, Db, lQ, wm, fb, nJ, aeQ, ff, eH, cr, eZ, asV, Ej, bz, atb, dr, LB, z, afT, y, xq, iu); #c1(TPG3) c2(NP_001108454) c3(tumor protein 63 isoform 6) c4(43249) c5(43250, 43251, 43252, 43253, 43254, 43255) c6( ) c7(aOR, bM, T, aC, Fv, if, ci, cPD, YD, ip, Na, aOS, aE, arA, pX, Eo, dV, K, hu, eL, Ur, li, iE, aW, cPB, are, az, Az, aOW, OZ, aEl, LZ, arK, g, eE, zE, eF, cm, eM, Jr, cPc, lq, nB, vA, nF, wK, cj, aPc, k, m, cE, wu, iB, zt, ht, Bm, n, qN, ld, aPb, Bl, ft, amJ, PD, cU, h, dL, Dz, aOU, aOX, A, MD, ks, fe, po, aOT, op, Ye, Qy, Qu, eD, hR, at, eo, YH, it, B, lp, fM, yk, arN, AO, V, pd, q, er, Zp, akG, aOY, cPE, hW, nX, afQ, qK, aT, rO, rD, Nc, Tj, aPa, avt, aOV, ae, le, xR, Y, Lf, afS, r, en, bu, t, Ud, iK, sS, QG, kP, cPA, zu, KY, rA, id, atS, jh, Hn, zU, adg, cPC, ad, aOZ, av, hd, ib, Db, IQ, wm, fb, nJ, aeQ, ff, eH, cr, eZ, asV, Ej, bz, atb, dr, LB, z, afT, y, xg, iu); #c1(TP63) c2(NP_003713) c3(tumor protein 63 isoform 1) c4(140367, 140368) c5(140369, 140370, 140371, 140372, 140373, 140374, 140375) c6( ) c7(aOR, bM, T, aC, Fv, if, ci, cPD, YD, ip, Na, aOS, aE, arA, PX, Eo, dV, K, hu, eL, Ur, li, iE, aW, cPB, are, az, Az, aOW, OZ, aEl, LZ, arK, g, eE, zE, eF, cm, eM, Jr, cPc, lq, nB, vA, nF, wK, cj, aPc, k, m, cE, wu, iB, zt, ht, Bm, n, qN, ld, aPb, Bl, ft, amJ, PD, cU, h, dL, Dz, aOU, aOX, A, MD, ks, fe, po, aOT, op, Ye, Qy, Qu, eD, hR, at, eo, YH, it, B, lp, fM, yk, arN, AO, V, pd, q, er, Zp, akG, aOY, cPE, hW, nX, afQ, qK, aT, rO, rD, Nc, Tj, aPa, avt, aOV, ae, le, xR, Y, Lf, afS, r, en, bu, t, Ud, iK, sS, QG, kP, cPA, zu, KY, rA, id, atS, jh, Hn, zU, adg, cPC, ad, aOZ, av, hd, ib, Db, IQ, wm, fb, nJ, aeQ, ff, eH, cr, eZ, asV, Ej, bz, atb, dr, LB, z, afT, y, xg, iu); #c1(TPG3) c2(XP_005247900) c3(tumor protein 63 isoform X3) c4(268033, 268034) c5(268035, 268036, 268037, 268038, 268039, 268040) c6( ) c7(aOR, bM, T, aC, Fv, if, ci, cPD, YD, ip, Na, aOS, aE, arA, pX, Eo, dV, K, hu, eL, Ur, li, iE, aW, cPB, are, az, Az, aOW, OZ, aEl, LZ, arK, g, eE, zE, eF, cm, eM, Jr, cPc, lq, nB, vA, nF, wK, cj, aPc, k, m, cE, wu, iB, zt, ht, Bm, n, qN, ld, aPb, Bl, ft, amJ, PD, cU, h, dL, Dz, aOU, aOX, A, MD, ks, fe, po, aOT, op, Ye, Qy, Qu, eD, hR, at, eo, YH, it, B, lp, fM, yk, arN, AO, V, pd, q, er, Zp, akG, aOY, cPE, hW, nX, afQ, qK, aT, rO, rD, Nc, Tj, aPa, avt, aOV, ae, le, xR, Y, Lf, afS, r, en, bu, t, Ud, iK, sS, QG, kP, cPA, zu, KY, rA, id, atS, jh, Hn, zU, adg, cPC, ad, aOZ, av, hd, ib, Db, IQ, wm, fb, nJ, aeQ, ff, eH, cr, eZ, asV, Ej, bz, atb, dr, LB, z, afT, y, xg, iu); #c1(TP63) c2(XP_005247901) c3(tumor protein 63 isoform X5) c4( ) c5(268041, 268042, 268043, 268044, 268045, 268046, 268047, 268048, 268049, 268050, 268051, 268052) c6( ) c7(aOR, bM, T, aC, Fv, if, ci, cPD, YD, ip, Na, aOS, aE, arA, pX, Eo, dV, K, hu, eL, Ur, li, iE, aW, cPB, are, az, Az, aOW, OZ, aEl, LZ, arK, g, eE, zE, eF, cm, eM, Jr, cPc, lq, nB, vA, nF, wK, cj, aPc, k, m, cE, wu, iB, zt, ht, Bm, n, qN, ld, aPb, Bl, ft, amJ, PD, cU, h, dL, Dz, aOU, aOX, A, MD, ks, fe, po, aOT, op, Ye, Qy, Qu, eD, hR, at, eo, YH, it, B, lp, fM, yk, arN, AO, V, pd, q, er, Zp, akG, aOY, cPE, hW, nX, afQ, qK, aT, rO, rD, Nc, Tj, aPa, avt, aOV, ae, le, xR, Y, Lf, afS, r, en, bu, t, Ud, iK, sS, QG, kP, cPA, zu, KY, rA, id, atS, jh, Hn, zU, adg, cPC, ad, aOZ, av, hd, ib, Db, lQ, wm, fb, nJ, aeQ, ff, eH, cr, eZ, asV, Ej, bz, atb, dr, LB, z, afT, y, xg, iu); #c1(TP73) c2(XP_011540366) c3(tumor protein p73 isoform X1) c4(338854, 338855) c5(338856, 338857, 338858, 338859, 338860, 338861, 338862, 338863, 338864, 338865, 338866, 338867, 338868) c6( ) c7(gh, T, os, aC, fR, ea, if, al, fd, bB, ci, ip, x, aE, Ma, K, hu, eL, Jl, aW, g, as, eF, ir, cm, bw, eM, nB, iA, nF, iT, cj, iS, k, m, Xu, dD, ht, NT, n, afE, fr, qN, hr, co, jz, hn, dL, hB, MD, GA, aq, Og, Zj, YE, bP, dB, eD, hL, JM, pV, eo, it, B, fM, jx, aA, hy, V, q, eA, gK, aT, jj, ae, af, jf, gw, s, iU, Y, r, en, hf, cl, t, iK, ck, cT, ac, gX, aor, ht, aD, iW, ha, jh, oZ, oH, eq, hF, Fc, ad, afb, hX, iC, av, hd, NS, io, yF, d, BN, afE, ff, eH, Of, aF, bz, Hp, es, gk, aBU, bE, aS, adg, iu, BA); #c1(TPBG) c2(XP_011534399) c3(trophoblast glycoprotein isoform X1) c4(330821) c5(330822, 330823, 330824, 330825, 330826, 330827, 330828, 330829, 330830, 330831, 330832, 330833, 330834, 330835) c6( ) c7(T, j, ci, fb, uC, fq, cd, ad); #c1(TPCN1) c2(NP_001137291) c3(two pore calcium channel protein 1 isoform 1) c4(55291, 55292) c5(55293, 55294, 55295, 55296, 55297, 55298, 55299, 55300, 55301, 55302, 55303) c6( ) c7(hd, nM, cc, Db, nB, ci, cd); #c1(TPCN1) c2(NP_001288143) c3(two pore calcium channel protein 1 isoform 3) c4( ) c5(113611, 113612, 113613, 113614, 113615) c6( ) c7(hd, nM, cc, Db, nB, ci, cd); #c1(TPCN1) c2(NP_060371) c3(two pore calcium channel protein 1 isoform 2) c4(195654, 195655, 195656) c5(195657, 195658, 195659, 195660, 195661, 195662, 195663, 195664, 195665, 195666, 195667, 195668, 195669, 195670, 195671, 195672) c6( ) c7(hd, nM, cc, Db, nB, ci, cd); #c1(TPCN1) c2(XP_005253962) c3(two pore calcium channel protein 1 isoform X5) c4( ) c5(272790, 272791) c6( ) c7(hd, nM, cc, Db, nB, ci, cd); #c1(TPCN2) c2(NP_620714) c3(two pore calcium channel protein 2) c4(238111) c5(238112, 238113, 238114, 238115, 238116, 238117) c6( ) c7(cPF, Sc, cc, cd, ad); #c1(TPCN2) c2(XP_006718519) c3(two pore calcium channel protein 2 isoform X14) c4( ) c5(291888, 291889, 291890, 291891, 291892, 291893) c6( ) c7(cPF, Sc, cc, cd, ad); #c1(TPCN2) c2(XP_011543107) c3(two pore calcium channel protein 2 isoform X8) c4(341956) c5( ) c6( ) c7(cPF, Sc, cc, cd, ad); #c1(TPD52) c2(NP_001020423) c3(tumor protein D52 isoform 1) c4(28787, 28788, 28789) c5(28790, 28791, 28792, 28793, 28794, 28795, 28796, 28797, 28798, 28799, 28800, 28801, 28802, 28803, 28804, 28805, 28806) c6( ) c7(bL, T, eR, wu, aw, aj, v, ci, J, ad, Bj, aT, wm, ae, bA, s, aW, Y, t, ou, eD, m, ei, y, X); #c1(TPD52) c2(NP_001020424) c3(tumor protein D52 isoform 2) c4(28807) c5(28808, 28809, 28810, 28811, 28812, 28813) c6( ) c7(bL, T, eR, wu, aw, aj, v, ci, J, ad, Bj, aT, wm, ae, bA, s, aW, Y, t, ou, eD, m, ei, y, X); #c1(TPD52) c2(NP_001274069) c3(tumor protein D52 isoform 4) c4(106006) c5(106007) c6( ) c7(bL, T, eR, wu, aw, aj, v, ci, J, ad, Bj, aT, wm, ae, bA, s, aW, Y, t, ou, eD, m, ei, y, X); #c1(TPD52) c2(NP_001274071) c3(tumor protein D52 isoform 5) c4(106008) c5(106009, 106010, 106011, 106012, 106013, 106014) c6( ) c7(bL, T, eR, wu, aw, aj, v, ci, J, ad, Bj, aT, wm, ae, bA, s, aW, Y, t, ou, eD, m, ei, y, X); #c1(TPD52) c2(NP_005070) c3(tumor protein D52 isoform 3) c4(152595) c5(152596, 152597, 152598, 152599, 152600, 152601, 152602, 152603, 152604, 152605, 152606, 152607) c6( ) c7(bL, T, eR, wu, aw, aj, v, ci, J, ad, Bj, aT, wm, ae, bA, s, aW, Y, t, ou, eD, m, ei, y, X); #c1(TPD52L1) c2(NP_001003396) c3(tumor protein D53 isoform 3) c4(19797) c5(19798, 19799, 19800, 19801, 19802, 19803) c6( ) c7(aW, iV, fq, ad, aT); #c1(TPD52L1) c2(NP_001003397) c3(tumor protein D53 isoform 4) c4(19804, 19805) c5(19806, 19807, 19808, 19809, 19810, 19811, 19812, 19813, 19814, 19815) c6( ) c7(aW, iV, fq, ad, aT); #c1(TPD52L1) c2(NP_003278) c3(tumor protein D53 isoform 1) c4(137043, 137044, 137045, 137046) c5(137047, 137048, 137049, 137050, 137051, 137052, 137053, 137054, 137055, 137056, 137057, 137058, 137059) c6( ) c7(aW, iV, fq, ad, aT); #c1(TPD52L1) c2(XP_005267179) c3(tumor protein D53 isoform X1) c4( ) c5(280817, 280818, 280819, 280820, 280821) c6( ) c7(aW, iV, fq, ad, aT); #c1(TPD52L1) c2(XP_011534400) c3(tumor protein D53 isoform X2) c4( ) c5(330836, 330837, 330838, 330839, 330840, 330841, 330842, 330843, 330844, 330845, 330846, 330847, 330848, 330849, 330850, 330851) c6( ) c7(aW, iV, fq, ad, aT); #c1(TPD52L2) c2(NP_001230821) c3(tumor protein D54 isoform h) c4(86775) c5(86776, 86777, 86778, 86779, 86780, 86781) c6( ) c7(T, eA); #c1(TPD52L2) c2(NP_003279) c3(tumor protein D54 isoform e) c4(137060) c5(137061, 137062, 137063, 137064, 137065, 137066) c6( ) c7(T, eA); #c1(TPD52L2) c2(NP_955391) c3(tumor protein D54 isoform f) c4(261667) c5(261668, 261669, 261670, 261671, 261672, 261673) c6( ) c7(T, eA); #c1(TPD52L2) c2(NP_955392) c3(tumor protein D54 isoform a) c4(261674) c5(261675, 261676, 261677, 261678, 261679, 261680) c6( ) c7(T, eA); #c1(TPD52L2) c2(NP_955393) c3(tumor protein D54 isoform b) c4(261681) c5(261682, 261683, 261684, 261685, 261686, 261687) c6( ) c7(T, eA); #c1(TPD52L2) c2(NP_955394) c3(tumor protein D54 isoform c) c4(261688) c5(261689, 261690, 261691, 261692, 261693, 261694) c6( ) c7(T, eA); #c1(TPD52L2) c2(NP_955395) c3(tumor protein 054 isoform d) c4(261695) c5(261696, 261697, 261698, 261699, 261700, 261701) c6( ) c7(T, eA); #c1(TPGS2) c2(NP_001258879) c3(tubulin polyglutamylase complex subunit 2 isoform 3) c4(96647) c5(96648, 96649, 96650, 96651, 96652, 96653) c6( ) c7(aj, A, J); #c1(TPGS2) c2(NP_056291) c3(tubulin polyglutamylase complex subunit 2 isoform 1) c4(186951) c5(186952, 186953, 186954, 186955, 186956, 186957) c6( ) c7(aj, A, J); #c1(TPHI) c2(NP_004170) c3(tryptaphan 5-hydroxylase 1) c4(144037, 144038) c5(144039, 144040, 144041, 144042, 144043, 144044, 144045, 144046, 144047, 144048, 144049, 144050) c6( ) c7(lD, tJ, FW, bok, FG, aqo, al, bO, cz, bS, gf, et, uu, v, ww, qi, aR, jz, zw, iX, pX, aql, MU, bma, bK, K, mY, he, rz, af, na, bA, wC, ly, tb, Gv, HL, aTY, bQ, Z, akb, lx, hq, bN, cA, ZT, Gs, mg, bLi, vL, Ei, uJ, Fl, aTU, pw, ra, lC, jd, cPG); #c1(TPH2) c2(NP_775489) c3(tryptaphan 5-hydroxylase 2) c4(250070, 250071) c5(250072, 250073, 250074, 250075, 250076, 250077, 250078, 250079, 250080, 250081, 250082, 250083) c6( ) c7(tJ, FW, al, bO, mS, Gd, bS, gf, ct, To, aqu, bMs, uu, qi, ww, aQF, rc, wy, VV, ft, wv, mW, iX, aVM, aql, bma, aaw, bK, K, aqD, oi, mY, mV, he, bME, rz, na, xf, rE, mU, wC, aWm, cPH, tb, yL, xs, dq, EZ, Z, vo, cM, mZ, bN, mX, hq, pH, cA, Ei, uJ, ei, ra, pK, lf, xg, mT, agZ, qc); #c1(TPI1) c2(NP_000356) c3(trinsephosphate isomerase isoform 1) c4(7832) c5(7833, 7834, 7835, 7836, 7837, 7838) c6( ) c7(bM, cPl, T, aA, cHG, HH, V, eA, aR, PW, xl, aWJ, aT, Ak, dV, af, bA, iU, Y, ff, eZ, tv, dq, dg, tu, S, en, g, aF, zz, dr, iP, cT, mO, dc, cPJ, byG, Cl, lM, it, B, afX); #c1(TPI1) c2(NP_001152759) c3(triosephosphate isomerase isoform 2) c4(60164, 60165) c5(60166, 60167, 60168, 60169, 60170, 60171, 60172) c6( ) c7(bM, cPI, T, aA, cHG, HH, V, eA, aR, PW, xl, aWJ, aT, Ak, dV, af, bA, iU, Y, ff, eZ, tv, dq, dg, tu, S, en, g, aT, zz, dr, iP, cT, mO, dc, cPJ, byG, Cl, lM, it, B, afX); #c1(TPI1) c2(NP_001244955) c3(triosephosphate isomerase isoform 3) c4( ) c5(92436, 92437, 92438, 92439, 92440, 92441, 92442, 92443) c6( ) c7(bM, cPl, T, aA, cHG, HH, V, eA, aR, PW, xl, aWJ, aT, Ak, dV, af, bA, iU, Y, ff, eZ, tv, dq, dg, tu, S, en, g, aT, zz, dr, iP, cT, mO, dc, cPJ, byG, Cl, IM, it, B, afX); #c1(TPK1) c2(NP_001035947) c3(thiamin pyrophosphokinase 1 isoform b) c4(33508) c5(33509, 33510, 33511, 33512, 33513, 33514) c6( ) c7(bL, oe, cPK, ac, an); #c1(TPK1) c2(XP_005250027) c3(thiamin pyrophosphokinase 1 isoform X1) c4(270027, 270028) c5(270029, 270030, 270031, 270032, 270033, 270034, 270035, 270036, 270037, 270038, 270039, 270040) c6( ) c7(bL, oe, cPK, ac, an); #c1(TPK1) c2(XP_011514337) c3(thiamin pyrnphosphokinase 1 isoform X3) c4(307049) c5(307050, 307051, 307052, 307053, 307054, 307055) c6( ) c7(bL, oe, cPK, ac, an); #c1(TPM1) c2(NP_000357) c3(trnpnmynsin alpha-1 chain isoform Tpm1.5cy) c4(7839) c5(7840, 7841, 7842, 7843, 7844, 7845) c6( ) c7(Mb, cPM, T, Am, ht, cz, akA, ci, q, cd, eA, jz, cc, Ag, oj, aT, vc, aWs, K, anR, cPL, aW, Y, r, dg, mo, dr, bfW, cl, Ai, mx, afW, ei, it, ao); #c1(TPM1) c2(NP_001018004) c3(tropomyosin alpha-1 chain isoform Tpm1.6cy) c4(26760) c5(26761, 26762, 26763, 26764, 26765, 26766) c6( ) c7(Mb, cPM, T, Am, ht, cz, akA, ci, q, cd, eA, jz, cc, Ag, oj, aT, vc, aWs, K, anR, cPL, aW, Y, r, dg, mo, dr, bfW, cl, Ai, mx, afW, ei, it, ao); #c1(TPM1) c2(NP_001018005) c3(tropomyosin alpha-1 chain isoform Tpm1.1st) c4(26767, 26768) c5(26769, 26770, 26771, 26772, 26773, 26774, 26775, 26776, 26777, 26778, 26779, 26780) c6( ) c7(Mb, cPM, T, Am, ht, cz, akA, ci, q, cd, eA, jz, cc, Ag, oj, aT, vc, aWs, K, anR, cPL, aW, Y, r, dg, me, dr, bfW, cl, Ai, mx, afW, ei, it, ao); #c1(TPM1) c2(NP_001018006) c3(tropomyosin alpha-1 chain isoform Tpm1.7cy) c4(26781) c5(26782, 26783, 26784, 26785, 26786, 26787) c6( ) c7(Mb, cPM, T, Am, ht, cz, akA, ci, q, cd, eA, jz, cc, Ag, oj, aT, vc, aWs, K, anR, cPL, aW, Y, r, dg, mo, dr, bfW, cl, Ai, mx, afW, ei, it, ao); #c1(TPM1) c2(NP_001018007) c3(tropomyosin alpha-1 chain isoform Tpm1.4sm) c4(26788) c5(26789, 26790, 26791, 26792, 26793, 26794) c6( ) c7(Mb, cPM, T, Am, ht, cz, akA, ci, q, cd, eA, jz, cc, Ag, oj, aT, vc, aWs, K, anR, cPL, aW, Y, r, dg, me, dr, bfW, cl, Ai, mx, afW, ei, it, ao); #c1(TPM1) c2(NP_001018008) c3(tropomyosin alpha-1 chain isoform Tpm1.12br) c4(26795) c5(26796, 26797, 26798, 26799, 26800, 26801) c6( ) c7(Mb, cPM, T, Am, ht, cz, akA, ci, q, cd, eA, jz, cc, Ag, oj, aT, vc, aWs, K, anR, cPL, aW, Y, r, dg, mo, dr, bfW, cl, Ai, mx, afW, ei, it, ao); #c1(TPM1) c2(NP_001018020) c3(tropomyosin alpha-1 chain isoform Tpm1.3sm) c4(26866) c5(26867, 26868, 26869, 26870, 26871, 26872) c6( ) c7(Mb, cPM, T, Am, ht, cz, akA, ci, q, cd, eA, jz, cc, Ag, oj, aT, vc, aWs, K, anR, cPL, aW, Y, r, dg, mo, dr, bfW, cl, Ai, mx, afW, ei, it, ao); #c1(TPM1) c2(XP_005254694) c3(tropomyosin alpha-1 chain isoform X15) c4(273297) c5(273298, 273299, 273300, 273301, 273302, 273303) c6( ) c7(Mb, cPM, T, Am, ht, cz, akA, ci, q, cd, eA, jz, cc, Ag, oj, aT, vc, aWs, K, anR, cPL, aW, Y, r, dg, mo, dr, bfW, cl, Ai, mx, afW, ei, it, ao); #c1(TPM2) c2(NP_001288155) c3(tropomyosin beta chain isoform Tpm2.3) c4(113616, 113617) c5(113618, 113619, 113620, 113621, 113622, 113623, 113624, 113625, 113626, 113627, 113628, 113629) c6( ) c7(chE, XW, cPN, chF, are, Am, Af, Ad, oj, it, vc, chy, bl, bBe, ae, cPO, ad); #c1(TPM2) c2(NP_003280) c3(tropomyosin beta chain isoform Tpm2.2st) c4(137067) c5(137068, 137069, 137070, 137071, 137072, 137073) c6( ) c7(chE, XW, cPN, chF, are, Am, Af, Ad, oj, it, vc, chy, bl, bBe, ae, cPO, ad); #c1(TPM2) c2(NP_998839) c3(tropomyosin beta chain isoform Tpm2.1sm/cy) c4(266064) c5(266065, 266066, 266067, 266068, 266069, 266070) c6( ) c7(chE, XW, cPN, chF, are, Am, Af, Ad, oj, it, vc, chy, bI, bBe, ae, cP0, ad); #c1(TPM3) c2(NP_001036816) c3(tropomyosin alpha-3 chain isoform Tpm3.2cy) c4(34094) c5(34095, 34096, 34097, 34098, 34099, 34100) c6( ) c7(T, cPP, if, Am, iW, jh, aA, n, ci, qN, zP, eA, hd, no, Ag, TK, oj, vc, Ou, K, nJ, jf, iF, zQ, xX, d, B, Af, Ad, aq, g, as, iR, cPQ, cm, iV, Ta, xA, nM, bP, nB, Ai, xj, Km, X, Tc); #c1(TPM3) c2(NP_001036817) c3(tropomyosin alpha-3 chain isoform Tpm3.7cy) c4(34101) c5(34102, 34103, 34104, 34105, 34106, 34107) c6( ) c7(T, cPP, if, Am, iW, jh, aA, n, ci, qN, zP, eA, hd, no, Ag, TK, oj, vc, Ou, K, nJ, jf, iF, zQ, xX, d, B, Af, Ad, aq, g, as, iR, cPQ, cm, iV, Ta, xA, nM, bP, nB, Ai, xj, Km, X, Tc); #c1(TPM3) c2(NP_001036818) c3(tropomyosin alpha-3 chain isoform Tpm3.4cy) c4(34108) c5(34109, 34110, 34111, 34112, 34113, 34114) c6( ) c7(T, cPP, if, Am, iW, jh, aA, n, ci, qN, zP, eA, hd, no, Ag, TK, oj, vc, Ou, K, nJ, jf, iF, zQ, xX, d, B, Af, Ad, aq, g, as, iR, cPQ, cm, iV, Ta, xA, nM, bP, nB, Ai, xj, Km, X, Tc); #c1(TPM3) c2(NP_001265118) c3(tropomyosin alpha-3 chain isoform Tpm3.5cy) c4( ) c5(97809, 97810, 97811, 97812, 97813, 97814) c6( ) c7(T, cPP, if, Am, iW, jh, aA, n, ci, qN, zP, eA, hd, no, Ag, TK, oj, vc, Ou, K, nJ, jf, iF, zQ, xX, d, B, Af, Ad, aq, g, as, iR, cPQ, cm, iV, Ta, xA, nM, bP, nB, Ai, xj, Km, X, Tc); #c1(TPM3) c2(NP_689476) c3(tropomyosin alpha-3 chain isoform Tpm3.12st) c4( ) c5(242818, 242819, 242820, 242821, 242822, 242823) c6( ) c7(T, cPP, if, Am, iW, jh, aA, n, ci, qN, zP, eA, hd, no, Ag, TK, oj, vc, Ou, K, nJ, jf, iF, zQ, xX, d, B, Af, Ad, aq, g, as, iR, cPQ, cm, iV, Ta, xA, nM, bP, nB, Ai, xj, Km, X, Tc); #c1(TPM3) c2(NP_705935) c3(tropomyosin alpha-3 chain isoform Tpm3.1cy) c4(246458, 246459) c5(246460, 246461, 246462, 246463, 246464, 246465, 246466, 246467, 246468, 246469, 246470, 246471) c6( ) c7(T, cPP, if, Am, iW, jh, aA, n, ci, qN, zP, eA, hd, no, Ag, TK, oj, vc, Ou, K, nJ, jf, iF, zQ, xX, d, B, Af, Ad, aq, g, as, iR, cPQ, cm, iV, Ta, xA, nM, bP, nB, Ai, xj, Km, X, Tc); #c1(TPM3) c2(XP_006711578) c3(tropomyosin alpha-3 chain isoform X3) c4(286152) c5(286153, 286154, 286155, 286156, 286157, 286158) c6( ) c7(T, cPP, if, Am, iW, jh, aA, n, ci, qN, zP, eA, hd, no, Ag, TK, oj, vc, Ou, K, nJ, jf, iF, zQ, xX, d, B, Af, Ad, aq, g, as, iR, cPQ, cm, iV, Ta, xA, nM, bP, nB, Ai, xj, Km, X, Tc); #c1(TPM3) c2(XP_006711584) c3(tropomyosin alpha-3 chain isoform X8) c4( ) c5(286159, 286160, 286161, 286162, 286163, 286164) c6( ) c7(T, cPP, if, Am, iW, jh, aA, n, ci, qN, zP, eA, hd, no, Ag, TK, oj, vc, Ou, K, nJ, jf, iF, zQ, xX, d, B, Af, Ad, aq, g, as, iR, cPQ, cm, iV, Ta, xA, nM, bP, nB, Ai, xj. Km, X, Tc); #c1(TPM3) c2(XP_011508253) c3(tropomyosin alpha-3 chain isoform X2) c4(298948, 298949) c5( ) c6( ) c7(T, cPP, if, Am, iW, jh, aA, n, ci, qN, zP, eA, hd, no, Ag, TK, oj, vc, Ou, K, nJ, jf, iF, zQ, xX, d, B, Af, Ad, aq, g, as, iR, cPQ, cm, iV, Ta, xA, nM, bP, nB, Ai, xj, Km, X, Tc); #c1(TPM3) c2(XP_011508254) c3(tropomyosin alpha-3 chain isoform X9) c4(298950) c5( ) c6( ) c7(T, cPP, if, Am, iW, jh, aA, n, ci, qN, zP, eA, hd, no, Ag, TK, oj, vc, Ou, K, nJ, jf, iF, zQ, xX, d, B, Af, Ad, aq, g, as, iR, cPQ, cm, iV, Ta, xA, nM, bP, nB, Ai, xj, Km, X, Tc); #c1(TPM4) c2(NP_001138632) c3(tropomyosin alpha-4 chain isoform Tpm4.1cy) c4(57292) c5(57293, 57294, 57295, 57296, 57297, 57298, 57299, 57300, 57301, 57302) c6( ) c7(qt, ht, bA); #c1(TPM4) c2(NP_003281) c3(tropomyosin alpha-4 chain isoform Tpm4.2cy) c4(137074) c5(137075, 137076, 137077, 137078, 137079, 137080) c6( ) c7(qt, ht, bA); #c1(TPMT) c2(NP_000358) c3(thiopurine S-methyltransferase) c4(7846) c5(7847, 7848, 7849, 7850, 7851, 7852) c6( ) c7(bL, gV, T, Am, aTP, oY, bh, oL, hF, V, ai, x, fX, fS, aT, h, hn, IQ, cPR, bc, ln, cPT, BN, aix, hG, hI, eZ, ge, r, fe, iV, cM, ck, cPS, ou, hA, dB, bE, aiS, XO, k, fL, gg, y, bt); #c1(TP0) c2(NP_001193673) c3(thyroid peroxidase isoform a precursor) c4(82459) c5(82460, 82461, 82462, 82463, 82464, 82465, 82466, 82467, 82468, 82469, 82470) c6( ) c7(T, os, aCh, fR, aI, cLo, ci, aon, Vp, xy, Sq, K, biP, dF, hI, kt, bw, eM, nB, dD, aw, yG, aj, RN, cPV, dL, DU, A, bxz, Hz, aq, cA, pg, fL, Po, B, cGr, bL, AS, jx, fZ, GC, hz, bX, Wa, biO, q, J, eA, mP, nv, Fx, bK, hK, ae, ak, s, iU, r, t, ck, nM, hr, KA, gT, cJY, oZ, pI, eq, aYs, mC, ad, hd, F, Db, cLq, bpp, cMf, hD, yF, lx, wc, eZ, kD, xv, hp, bz, dr, gk, Lj, cPU, ei); #c1(TP0) c2(NP_001193674) c3(thyroid peroxidase isoform b precursor) c4(82471) c5(82472, 82473, 82474, 82475, 82476, 82477) c6( ) c7(T, os, aCh, fR, aI, cLo, ci, aon, Vp, xy, Sq, K, biP, dF, hI, kt, bw, eM, nB, dD, aw, yG, aj, RN, cPV, dL, DU, A, bxz, Hz, aq, cA, pg, fL, Po, B, cGr, bL, AS, jx, fZ, GC, hz, bX, Wa, biO, q, J, eA, mP, nv, Fx, bK, hK, ae, ak, s, iU, r, t, ck, nM, hr, KA, gT, cJY, oZ, pl, eq, aYs, mC, ad, hd, F, Db, cLq, bpp, cMf, hD, yF, lx, wc, eZ, kD, xv, hp, bz, dr, gk, Lj, cPU, ei); #c1(TP0) c2(NP_783652) c3(thyroid peroxidase isoform d precursor) c4(251713) c5(251714, 251715, 251716, 251717, 251718, 251719) c6( ) c7(T, os, aCh, fR, aI, cLo, ci, aon, Vp, xy, Sq, K, biP, dF, hI, kt, bw, eM, nB, dD, aw, yG, aj, RN, cPV, dL, DU, A, bxz, Hz, aq, cA, pg, fL, Po, B, cGr, bL, AS, jx, fZ, GC, hz, bX, Wa, biO, q, J, eA, mP, nv, Fx, bK, hK, ae, ak, s, iU, r, t, ck, nM, hr, KA, gT, cJY, oZ, pI, eq, aYs, mC, ad, hd, F, Db, cLq, bpp, cMf, hD, yF, lx, wc, eZ, kD, xv, hp, bz, dr, gk, Lj, cPU, ei); #c1(TP0) c2(NP_783653) c3(thyroid peroxidase isoform e precursor) c4(251720) c5(251721, 251722, 251723, 251724, 251725, 251726, 251727, 251728, 251729, 251730) c6( ) c7(T, os, aCh, fR, aI, cLo, ci, aon, Vp, xy, Sq, K, biP, dF, hI, kt, bw, eM, nB, dD, aw, yG, aj, RN, cPV, dL, DU, A, bxz, Hz, aq, cA, pg, fL, Po, B, cGr, bL, AS, jx, fZ, GC, hz, bX, Wa, biO, q, J, eA, mP, nv, Fx, bK, hK, ae, ak, s, iU, r, t, ck, nM, hr, KA, gT, cJY, oZ, pI, eq, aYs, mC, ad, hd, F, Db, cLq, bpp, cMf, hD, yF, lx, wc, eZ, kD, xv, hp, bz, dr, gk, Lj, cPU, ei); #c1(TP0) c2(XP_011508681) c3(thyroid peroxidase isoform X1) c4( ) c5(299290) c6( ) c7(T, os, aCh, fR, aI, cLo, ci, aon, Vp, xy, Sq, K, biP, dF, hI, kt, bw, eM, nB, dD, aw, yG, aj, RN, cPV, dL, DU, A, bxz, Hz, aq, cA, pg, fL, Po, B, cGr, bL, AS, jx, fZ, GC, hz, bX, Wa, biO, q, J, eA, mP, nv, Fx, bK, hK, ae, ak, s, iU, r, t, ck, nM, hr, KA, gT, cJY, oZ, pI, eq, aYs, mC, ad, hd, F, Db, cLq, bpp, cMf, hD, yF, lx, wc, eZ, kD, xv, hp, bz, dr, gk, Lj, cPU, ei); #c1(TP0) c2(XP_011508682) c3(thyroid peroxidase isoform X2) c4(299291) c5(299292, 299293, 299294, 299295, 299296, 299297) c6( ) c7(T, os, aCh, fR, aI, cLo, ci, aon, Vp, xy, Sq, K, biP, dF, hI, kt, bw, eM, nB, dD, aw, yG, aj, RN, cPV, dL, DU, A, bxz, Hz, aq, cA, pg, fL, Po, B, cGr, bL, AS, jx, fZ, GC, hz, bX, Wa, biO, q, J, eA, mP, nv, Fx, bK, hK, ae, ak, s, iU, r, t, ck, nM, hr, KA, gT, cJY, oZ, pI, eq, aYs, mC, ad, hd, F, Db, cLq, bpp, cMf, hD, yF, lx, wc, eZ, kD, xv, hp, bz, dr, gk, Lj, cPU, ei); #c1(TP0) c2(XP_011508684) c3(thyroid peroxidase isoform X4) c4(299298, 299299, 299300) c5(299301, 299302, 299303, 299304, 299305, 299306, 299307, 299308, 299309, 299310, 299311, 299312, 299313, 299314, 299315, 299316) c6( ) c7(T, os, aCh, fR, aI, cLo, ci, aon, Vp, xy, Sq, K, biP, dF, hI, kt, bw, eM, nB, dD, aw, yG, aj, RN, cPV, dL, DU, A, bxz, Hz, aq, cA, pg, fL, Po, B, cGr, bL, AS, jx, fZ, GC, hz, bX, Wa, biO, q, J, eA, mP, nv, Fx, bK, hK, ae, ak, s, iU, r, t, ck, nM, hr, KA, gT, cJY, oZ, pI, eq, aYs, mC, ad, hd, F, Db, cLq, bpp, cMf, hD, yF, lx, wc, eZ, kD, xv, hp, bz, dr, gk, Lj, cPU, ei); #c1(TPP1) c2(NP_000382) c3(tripeptidyl-peptidase 1 preproprotein) c4(8336, 8337) c5(8338, 8339, 8340, 8341, 8342, 8343, 8344, 8345, 8346, 8347, 8348, 8349) c6( ) c7(eR, ha, ci, bX, ad, aR, auf, mP, hb, h, K, af, sb, d, iU, rU, dg, dr, rY, rW, cPW, U, cj, Lg, aPM, bt, B); #c1(TPP2) c2(NP_003282) c3(tripeptidyl-peptidase 2) c4(137081) c5(137082, 137083, 137084, 137085, 137086, 137087) c6( ) c7(jh, U); #c1(TPPP) c2(NP_008961) c3(tubulin polymerization-promoting protein) c4(169931) c5(169932, 169933, 169934, 169935, 169936, 169937) c6( ) c7(if, iW, GC, fr, qN, aR, hX, ke, Hx, ds, jZ, dV, kH, h, SH, dL, an, he, eL, af, CB, ak, je, aHW, lo, iV, kk, ck, rR, iM, ac, c, cA, bE, NL, iU, U, aEG, zv, aEN, gD, EB); #c1(TPPP2) c2(XP_005267381) c3(tubulin polymerization-promoting protein family member 2 isoform X1) c4(280918) c5(280919, 280920, 280921, 280922, 280923, 280924, 280925, 280926, 280927, 280928) c6( ) c7(ck, eM, Y, iS, fd, bw, v, K, hF, vt, B, ip); #c1(TPPP3) c2(NP_057224) c3(tubulin polymerization-promoting protein family member 3) c4(189563) c5(189564, 189565, 189566, 189567, 189568, 189569, 189570, 189571, 189572, 189573) c6( ) c7(cm, xs); #c1(TPR) c2(NP_003283) c3(nucleoprotein TPR) c4(137088, 137089) c5(137090, 137091, 137092, 137093, 137094, 137095, 137096, 137097, 137098, 137099, 137100, 137101, 137102, 137103, 137104, 137105) c6( ) c7(T, os, d, nM, nB, Oy, awP, aA, oZ, aF, K, fu, bU, on); #c1(TPRG1) c2(NP_940887) c3(tumor protein p63-regulated gene 1 protein) c4( ) c5(260041, 260042, 260043, 260044, 260045, 260046, 260047, 260048) c6( ) c7(j, an); #c1(TPRG1) c2(XP_005247439) c3(tumor protein p63-regulated gene 1 protein isoform X2) c4(267834) c5(267835, 267836) c6( ) c7(j, an); #c1(TPRG1) c2(XP_005247445) c3(tumor protein p63-regulated gene 1 protein isoform X7) c4(267837) c5(267838, 267839, 267840, 267841, 267842, 267843) c6( ) c7(j, an); #c1(TPRN) c2(NP_001121700) c3(taperin) c4(46115, 46116) c5(46117, 46118, 46119, 46120, 46121, 46122, 46123, 46124, 46125, 46126, 46127, 46128) c6( ) c7(Bh, cPX); #c1(TPSAB1) c2(NP_003285) c3(tryptase alpha/beta-1 precursor) c4(137106, 137107, 137108) c5(137109, 137110, 137111, 137112, 137113, 137114, 137115, 137116, 137117, 137118, 137119, 137120, 137121, 137122, 137123, 137124, 137125, 137126, 137127, 137128, 137129, 137130) c6( ) c7(bM, eG, mQ, y, V, Tc); #c1(TPSB2) c2(NP_077078) c3(tryptase beta-2 preproprotein) c4(214833) c5(214834, 214835, 214836, 214837, 214838, 214839) c6( ) c7(mQ, Tc); #c1(TPSD1) c2(NP_036349) c3(tryptase delta precursor) c4(173148, 173149) c5(173150, 173151, 173152, 173153, 173154, 173155, 173156, 173157, 173158, 173159, 173160, 173161) c6( ) c7(Jm, bM, Ta, IU, HI, bm, fe, dy, lC, bt, Tc); #c1(TPSG1) c2(NP_036599) c3(tryptase gamma preproprotein) c4(174716) c5(174717, 174718, 174719, 174720, 174721, 174722) c6( ) c7(Jm, bM, Ta, BU, x, IU, HI, aW, bm, aT, at, fe, dy, aDR, k, ji, lC, bt, y, aDQ, Tc); #c1(TPSG1) c2(XP_011520749) c3(tryptase gamma isoform X1) c4( ) c5(315763) c6( ) c7(Jm, bM, Ta, BU, x, IU, HI, aW, bm, aT, at, fe, dy, aDR, k, ji, lC, bt, y, aDQ, Tc); #c1(TPT1) c2(NP_001273202) c3(translationally-controlled turner protein isoform 3) c4( ) c5(104567, 104568, 104569, 104570, 104571, 104572, 104573, 104574, 104575, 104576, 104577, 104578, 104579) c6( ) c7(lD, bM, T, AS, cz, bB, alQ, ci, alP, alR, eA, ad, eJ, dP, av, aE, cfd, fS, dV, aT, aUm, K, ae, af, ly, eG, yi, aW, ev, Pg, lx, ck, gJ, Ew, bP, bE, U, auT, y, AN); #c1(TPT1) c2(NP_003286) c3(translationally-controlled turner protein isoform 2) c4(137131, 137132, 137133, 137134) c5(137135, 137136, 137137, 137138, 137139, 137140, 137141137142, 137143, 137144, 137145, 137146, 137147, 137148, 137149, 137150, 137151137152, 137153, 137154, 137155, 137156, 137157, 137158, 137159) c6( ) c7(lD, bM, T, AS, cz, bB, alQ, ci, alP, alR, eA, ad, eJ, dP, av, aE, cfd, fS, dV, aT, aUm, K, ae, aT, ly, eG, yi, aW, ev, Pg, lx, ck, qJ, Ew, bP, bE, U, auT, y, AN); #c1(TPTE) c2(NP_954868) c3(putative tyrosine-protein phosphatase TPTE isoform beta) c4(261453) c5(261454, 261455, 261456, 261457, 261458, 261459) c6( ) c7(f); #c1(TPTE) c2(NP_954869) c3(putative tyrosine-protein phosphatase TPTE isoform gamma) c4(261460) c5(261461, 261462, 261463, 261464, 261465, 261466) c6( ) c7(f); #c1(TPTE) c2(NP_954870) c3(putative tyrosine-protein phosphatase TPTE isoform alpha) c4(261467) c5(261468, 261469, 261470, 261471, 261472, 261473) c6( ) c7(f); #c1(TPTE2) c2(NP_001135440) c3(phosphatidylinositol 3,4,5-trisphosphate 3-phosphatase TPTE2 isoform delta) c4(52891, 52892) c5(52893, 52894, 52895, 52896, 52897, 52898, 52899, 52900, 52901, 52902, 52903, 52904, 52905, 52906, 52907, 52908) c6( ) c7(aq, B, al); #c1(TPTE2) c2(NP_570141) c3(phosphatidylinositol 3,4,5-trisphosphate 3-phosphatase TPTE2 isoform alpha) c4(234065) c5(234066, 234067, 234068, 234069, 234070, 234071, 234072, 234073, 234074, 234075) c6( ) c7(aq, B, al); #c1(TPTE2) c2(NP_954863) c3(phosphatidylinositol 3,4,5-trisphosphate 3-phosphatase TPTE2 isoform gamma) c4(261428, 261429, 261430) c5(261431, 261432, 261433, 261434, 261435, 261436, 261437, 261438, 261439, 261440, 261441, 261442, 261443, 261444, 261445, 261446, 261447, 261448, 261449, 261450, 261451, 261452) c6( ) c7(aq, B, al); #c1(TPX2) c2(XP_011527001) c3(targeting protein for XklP2 isoform X1) c4(321343, 321344) c5(321345, 321346, 321347, 321348, 321349, 321350, 321351, 321352, 321353, 321354, 321355, 321356) c6( ) c7(T, aC, if, iW, jh, fd, bB, n, ci, qN, g, ad, eJ, av, aE, kH, aT, ey, ae, je, qt, PX, ff, r, kp, en, as, cm, bz, iM, eM, bE, Qu, ahC, B, kG); #c1(TRA2A) c2(NP_001269688) c3(transformer-2 protein homolog alpha isoform 3) c4(102550) c5(102551, 102552, 102553, 102554, 102555, 102556, 102557, 102558, 102559, 102560, 102561, 102562, 102563, 102564, 102565, 102566, 102567, 102568) c6( ) c7(Pk, IQ); #c1(TRA2A) c2(NP_037425) c3(transformer-2 protein homolog alpha isoform 1) c4(175495, 175496) c5( ) c6( ) c7(Pk, IQ); #c1(TRA2A) c2(XP_011513633) c3(transformer-2 protein homolog alpha isoform X2) c4( ) c5(305943) c6( ) c7(Pk, IQ); #c1(TRA2B) c2(NP_001230808) c3(transformer-2 protein homolog beta isoform 2) c4( ) c5(86763, 86764, 86765, 86766, 86767, 86768, 86769, 86770, 86771, 86772, 86773, 86774) c6( ) c7(bM, Hx, W, bE, kf, bB, v, K, g, fq); #c1(TRA2B) c2(NP_004584) c3(transformer-2 protein homolog beta isoform 1) c4(147894, 147895) c5(147896, 147897, 147898, 147899, 147900, 147901, 147902) c6(147903) c7(bM, Hx, W, bE, kf, bB, v, K, g, fq); #c1(TRABD) c2(NP_079480) c3(traB domain-containing protein) c4( ) c5(218266, 218267, 218268, 218269, 218270, 218271, 218272, 218273, 218274, 218275, 218276) c6( ) c7(ck, x, aF, aA); #c1(TRABD) c2(XP_006724485) c3(traB domain-containing protein isoform X7) c4(295984) c5( ) c6( ) c7(ck, x, aF, aA); #c1(TRABD) c2(XP_011529016) c3(traB domain-containing protein isoform X4) c4( ) c5(324375, 324376, 324377) c6( ) c7(ck, x, aF, aA); #c1(TRABD2A) c2(NP_001074293) c3(metalloprotease TIKI1 isoform 2 precursor) c4(37075) c5(37076, 37077, 37078, 37079, 37080, 37081) c6( ) c7(ac); #c1(TRABD2A) c2(NP_001263982) c3(metalloprotease TIKI1 isoform 1 precursor) c4(97402) c5(97403, 97404, 97405, 97406, 97407, 97408) c6( ) c7(ac); #c1(TRADD) c2(XP_011521722) c3(tumor necrosis factor receptor type 1-associated DEATH domain protein isoform X1) c4(316438) c5(316439, 316440, 316441, 316442, 316443, 316444) c6( ) c7(Hw, d, mR, dB, iW, eH, eZ, aT, mK, oY, fd, eF, eA); #c1(TRAF1) c2(NP_001177876) c3(TNF receptor-associated factor 1 isoform b) c4(73116) c5(73117, 73118, 73119, 73120, 73121) c6( ) c7(Kd, T, dD, ea, iW, e, jh, bB, cL, eq, fr, C, EA, Uy, o, ad, ai, dP, eA, aT, h, ey, K, af, bc, aa, A, aW, axu, KS, ff, eZ, Au, en, g, pL, ck, bF, sS, OW, ac, zr, bE, go, cj, uJ, fD, y, Pr, X); #c1(TRAF1) c2(NP_005649) c3(TNF receptor-associated factor 1 isoform a) c4(158252) c5(158253, 158254, 158255, 158256, 158257, 158258, 158259, 158260, 158261, 158262, 158263) c6( ) c7(Kd, T, dD, ea, iW, e, jh, bB, cL, eq, fr, C, EA, Uy, n, ad, ai, dP, eA, aT, h, ey, K, af, bc, aa, A, aW, axu, KS, ff, eZ, Au, en, g, pL, ck, bF, sS, OW, ac, zr, bE, go, cj, uJ, fD, y, Pr, X); #c1(TRAF2) c2(NP_066961) c3(TNF receptor-associated factor 2) c4( ) c5(207798, 207799, 207800, 207801, 207802, 207803, 207804, 207805, 207806, 207807, 207808, 207809, 207810, 207811, 207812, 207813, 207814, 207815, 207816, 207817, 207818, 207819, 207820, 207821, 207822, 207823, 207824, 207825, 207826, 207827, 207828, 207829, 207830, 207831, 207832) c6( ) c7(bM, T, aC, fM, fR, sQ, iW, jh, aA, bB, fd, zh, qj, ze, fr, zo, ad, eA, ft, ib, aE, oW, aT, dV, h, K, zg, IQ, Od, ae, af, cp, eG, d, aW, Y, zb, ff, eZ, vt, aF, en, t, ve, bz, zr, bE, cj, uo, zl, ut, eq, zk, bt, iu, pC); #c1(TRAF2) c2(XP_005266156) c3(TNF receptor-associated factor 2 isoform X3) c4(279930, 279931, 279932, 279933) c5(279934, 279935, 279936, 279937, 279938, 279939, 279940, 279941, 279942, 279943, 279944) c6( ) c7(bM, T, aC, fM, fR, sQ, iW, jh, aA, bB, fd, zh, qj, ze, fr, zo, ad, eA, ft, ib, aE, oW, aT, dV, h, K, zg, IQ, Od, ae, af, cp, eG, d, aW, Y, zb, ff, eZ, vt, aF, en, t, ve, bz, zr, bE, cj, uo, zl, ut, eq, zk, bt, iu, pC); #c1(TRAF2) c2(XP_011517275) c3(TNF receptor-associated factor 2 isoform X2) c4(310866, 310867, 310868) c5(310869) c6( ) c7(bM, T, aC, fM, fR, sQ, iW, jh, aA, bB, fd, zh, qj, ze, fr, zo, ad, eA, ft, ib, aE, oW, aT, dV, h, K, zg, lD, Dd, ae, af, cp, eG, d, aW, Y, zb, ff, eZ, vt, aF, en, t, ve, bz, zr, bE, cj, uo, zl, ut, eq, zk, bt, iu, pC); #c1(TRAF3) c2(NP_001186356) c3(TNF receptor-associated factor 3 isoform 3) c4(77507) c5(77508, 77509, 77510, 77511, 77512, 77513, 77514, 77515, 77516, 77517, 77518, 77519) c6( ) c7(T, iW, eX, jh, fd, aj, cPY, ci, q, J, ad, eW, dV, aT, aU, h, eV, K, ae, af, aW, ff, xs, wc, aiT, lo, en, ck, bNF, cj, CZ); #c1(TRAF3) c2(NP_003291) c3(TNF receptor-associated factor 3 isoform 1) c4(137200) c5(137201, 137202, 137203, 137204, 137205, 137206, 137207, 137208, 137209, 137210) c6( ) c7(T, iW, eX, jh, fd, aj, cPY, ci, q, J, ad, eW, dV, aT, aU, h, eV, K, ae, af, aW, ff, xs, wc, aiT, lo, en, ck, bNF, cj, CZ); #c1(TRAF3) c2(NP_663778) c3(TNF receptor-associated factor 3 isoform 2) c4(241544) c5(241545, 241546, 241547, 241548, 241549, 241550, 241551, 241552, 241553, 241554) c6( ) c7(T, iW, eX, jh, fd, aj, cPY, ci, q, J, ad, eW, dV, aT, aU, h, eV, K, ae, af, aW, ff, xs, wc, aiT, lo, en, ck, bNF, cj, CZ); #c1(TRAF3) c2(XP_011535418) c3(TNF receptor-associated factor 3 isoform X2) c4(332461) c5( ) c6( ) c7(T, iW, eX, jh, fd, aj, cPY, ci, q, J, ad, eW, dV, aT, aU, h, eV, K, ae, af, aW, ff, xs, wc, aiT, lo, en, ck, bNF, cj, CZ); #c1(TRAF3IP1) c2(NP_001132962) c3(TRAF3-interacting protein 1 isoform 2) c4(52720, 52721) c5(52722, 52723, 52724, 52725, 52726, 52727, 52728, 52729, 52730, 52731, 52732, 52733) c6( ) c7(bNF, afu); #c1(TRAF3IP1) c2(NP_056465) c3(TRAF3-interacting protein 1 isoform 1) c4(187631, 187632) c5(187633, 187634, 187635, 187636, 187637, 187638, 187639, 187640, 187641, 187642, 187643, 187644) c6( ) c7(bNF, afu); #c1(TRAF3IP2) c2(NP_001157753) c3(adapter protein CIKS isoform 3) c4(62639) c5(62640, 62641, 62642, 62643, 62644, 62645) c6( ) c7(dD, ea, fN, cR, aj, j, eq, Za, wD, cfd, aUm, K, cQa, hH, qY, HA, cr, eZ, dN, da, fe, iV, eE, Pa, Jr, wR, aS, ra, cPZ); #c1(TRAF3IP2) c2(NP_001157755) c3(adapter protein CIKS isoform 5) c4( ) c5(62646, 62647, 62648, 62649, 62650, 62651) c6( ) c7(dD, ea, fN, cR, aj, j, eq, Za, wD, cfd, aUm, K, cQa, hH, qY, HA, cr, eZ, dN, da, fe, iV, eE, Pa, Jr, wR, aS, ra, cPZ); #c1(TRAF3IP2) c2(NP_679211) c3(adapter protein CIKS isoform 2) c4(242188) c5(242189, 242190, 242191, 242192, 242193) c6( ) c7(dD, ea, fN, cR, aj, j, eq, Za, wD, cfd, aUm, K, cQa, hH, qY, HA, cr, eZ, dN, da, fe, iV, eE, Pa, Jr, wR, aS, ra, cPZ); #c1(TRAF4) c2(NP_004286) c3(TNF receptor-associated factor 4) c4(144847, 144848, 144849, 144850) c5(144851, 144852, 144853, 144854, 144855, 144856, 144857, 144858, 144859, 144860, 144861, 144862, 144863, 144864, 144865, 144866, 144867, 144868, 144869, 144870, 144871, 144872, 144873, 144874) c6( ) c7(T, aW, iK, aT, h, ci, K, g, aed, bz, af, TT); #c1(TRAF4) c2(XP_011523806) c3(TNF receptor-associated factor 4 isoform X1) c4(318328) c5(318329, 318330, 318331, 318332, 318333, 318334) c6( ) c7(T, aW, iK, aT, h, ci, K, g, aed, bz, af, TT); #c1(TRAF4) c2(XP_011523810) c3(TNF receptor-associated factor 4 isoform X4) c4(318335, 318336) c5(318337, 318338, 318339, 318340, 318341, 318342, 318343, 318344, 318345, 318346, 318347, 318348) c6( ) c7(T, aW, iK, aT, h, ci, K, g, aed, bz, aT, TT); #c1(TRAF5) c2(NP_665702) c3(TNF receptor-associated factor 5) c4(241659) c5(241660, 241661, 241662, 241663, 241664, 241665, 241666, 241667, 241668, 241669, 241670, 241671, 241672, 241673, 241674, 241675, 241676, 241677, 241678, 241679) c6( ) c7(mR, iW, HA, jx, fd, h, lo, j, agI, hH, qW, aT, y); #c1(TRAF5) c2(XP_011508259) c3(TNF receptor-associated factor 5 isoform X2) c4(298951) c5( ) c6( ) c7(mR, iW, HA, jx, fd, h, lo, j, agI, hH, qW, aT, y); #c1(TRAF6) c2(NP_665802) c3(TNF receptor-associated factor 6) c4(241698) c5(241699, 241700, 241701, 241702, 241703, 241704, 241705, 241706, 241707, 241708) c6( ) c7(oO, agx, T, dD, ea, iW, jx, jh, aA, it, fd, j, ci, C, agz, eq, mC, hr, cF, bjA, bjv, aT, h, dL, bI, eL, af, bA, aW, Y, mQ, eZ, kD, kp, aF, bw, Zb, bz, pb, rR, lt, atM, Jr, nB, wR, cbL, fL, y, bt, Pr, iu); #c1(TRAF7) c2(NP_115647) c3(E3 ubiquitin-protein ligase TRAF7) c4(223422) c5(223423, 223424, 223425, 223426, 223427, 223428) c6( ) c7(bwj, ip); #c1(TRAFD1) c2(NP_006691) c3(TRAF-type zinc finger domain-containing protein 1) c4(167164, 167165, 167166, 167167) c5(167168, 167169, 167170, 167171, 167172, 167173, 167174, 167175, 167176, 167177, 167178, 167179, 167180, 167181167182, 167183, 167184, 167185, 167186, 167187, 167188, 167189, 167190, 167191, 167192, 167193, 167194, 167195) c6( ) c7(A); #c1(TRAK1) c2(NP_001036111) c3(trafficking kinesin-binding protein 1 isoform 1) c4(33984) c5(33985, 33986, 33987, 33988, 33989) c6( ) c7(IF, aR, NE, aA); #c1(TRAK1) c2(NP_001252539) c3(trafficking kinesin-binding protein 1 isoform 5) c4(94212) c5(94213, 94214, 94215, 94216, 94217, 94218) c6( ) c7(IF, aR, NE, aA); #c1(TRAK1) c2(NP_055780) c3(trafficking kinesin-binding protein 1 isoform 2) c4(183463) c5(183464, 183465, 183466, 183467, 183468, 183469) c6( ) c7(IF, aR, NE, aA); #c1(TRAK1) c2(XP_005265013) c3(trafficking kinesin-binding protein 1 isoform X2) c4(279330) c5(279331, 279332, 279333, 279334, 279335, 279336) c6( ) c7(IF, aR, NE, aA); #c1(TRAK1) c2(XP_005265014) c3(trafficking kinesin-binding protein 1 isoform X3) c4(279337) c5(279338, 279339, 279340, 279341, 279342, 279343) c6( ) c7(IF, aR, NE, aA); #c1(TRAK1) c2(XP_005265017) c3(trafficking kinesin-binding protein 1 isoform X6) c4( ) c5(279344) c6(279345) c7(IF, aR, NE, aA); #c1(TRAK1) c2(XP_011531789) c3(trafficking kinesin-binding protein 1 isoform X1) c4( ) c5(327880) c6( ) c7(IF, aR, NE, aA); #c1(TRAK2) c2(NP_055864) c3(trafficking kinesin-binding protein 2) c4(183998, 183999, 184000) c5(184001, 184002, 184003, 184004, 184005, 184006, 184007, 184008, 184009, 184010, 184011, 184012, 184013, 184014, 184015, 184016, 184017) c6( ) c7(af, c); #c1(TRAK2) c2(XP_011509993) c3(trafficking kinesin-binding protein 2 isoform X3) c4(300611) c5(300612, 300613, 300614, 300615, 300616, 300617, 300618) c6( ) c7(af, c); #c1(TRAM1) c2(NP_055109) c3(translocating chain-associated membrane protein 1) c4(178996, 178997) c5(178998, 178999, 179000, 179001, 179002, 179003, 179004) c6( ) c7(eW, T, aW, ki, jx, aep, aT, hL, ey, Hb, ci, cl, g, gT, eA, ae, B, ad, afu); #c1(TRAMIL1) c2(NP_689615) c3(translocating chain-associated membrane protein 1-like 1) c4(243274) c5(243275, 243276, 243277, 243278, 243279, 243280) c6( ) c7(v, ad); #c1(TRAM2) c2(NP_036420) c3(translocating chain-associated membrane protein 2) c4(173679) c5(173680, 173681, 173682, 173683, 173684, 173685) c6( ) c7(aw); #c1(TRAP1) c2(NP_001258978) c3(heat shock protein 75 kDa, mitochondrial isoform 2) c4(96885) c5(96886, 96887, 96888, 96889, 96890, 96891) c6( ) c7(T, ac, tL, aW, bE, ht, aT, r, cy, aA, it, K, uE, hu, ae, q, ad); #c1(TRAP1) c2(NP_057376) c3(heat shock protein 75 kDa, mitochondrial isoform 1 precursor) c4(190462) c5(190463, 190464, 190465, 190466, 190467, 190468) c6( ) c7(T, ac, tL, aW, bE, ht, aT, r, cy, aA, it, K, uE, hu, ae, q, ad); #c1(TRAPPC1) c2(NP_067033) c3(trafficking protein particle complex subunit 1) c4(208539) c5(208540, 208541, 208542, 208543, 208544, 208545, 208546, 208547, 208548, 208549) c6( ) c7(F, jE); #c1(TRAPPG10) c2(NP_003265) c3(trafficking protein particle complex subunit 10) c4(136938) c5(136939, 136940, 136941, 136942, 136943, 136944) c6( ) c7(vj, ha, amj, yZ, IQ, nA, yU, Pk, axC); #c1(TRAPPG10) c2(XP_005261225) c3(trafficking protein particle complex subunit 10 isoform X4) c4(277270) c5(277271, 277272, 277273, 277274, 277275, 277276) c6( ) c7(vj, ha, amj, yZ, IQ, nA, yU, Pk, axC); #c1(TRAPPC10) c2(XP_011528019) c3(trafficking protein particle complex subunit 10 isoform X5) c4( ) c5(323118) c6( ) c7(vj, ha, amj, yZ, lD, nA, yU, Pk, axC); #c1(TRAPPC11) c2(NP_068761) c3(trafficking protein particle complex subunit 11 isoform a) c4(210250, 210251) c5(210252, 210253, 210254, 210255, 210256, 210257) c6( ) c7(cQb, oj, km, aj, nA, xw, cd); #c1(TRAPPC11) c2(NP_951008) c3(trafficking protein particle complex subunit 11 isoform b) c4(260958) c5(260959, 260960, 260961, 260962, 260963, 260964) c6( ) c7(cQb, oj, km, aj, nA, xw, cd); #c1(TRAPPC11) c2(XP_011530482) c3(trafficking protein particle complex subunit 11 isoform X1) c4( ) c5(326378, 326379, 326380, 326381, 326382, 326383, 326384) c6( ) c7(cQb, oj, km, aj, nA, xw, cd); #c1(TRAPPC2) c2(NP_001122307) c3(trafficking protein particle complex subunit 2 isoform 2) c4(46472, 46473, 46474, 46475) c5(46476, 46477, 46478, 46479, 46480, 46481, 46482, 46483, 46484, 46485, 46486, 46487, 46488) c6( ) c7(ati, nA, Wr, QK, rv, dr, lc); #c1(TRAPPC2) c2(XP_011543868) c3(trafficking protein particle complex subunit 2 isoform X1) c4( ) c5(343000, 343001, 343002, 343003, 343004, 343005, 343006, 343007, 343008, 343009, 343010, 343011, 343012, 343013, 343014, 343015, 343016, 343017, 343018, 343019, 343020, 343021, 343022, 343023, 343024, 343025, 343026) c6( ) c7(ati, nA, Wr, QK, rv, dr, lc); #c1(TRAPPC4) c2(NP_057230) c3(trafficking protein particle complex subunit 4) c4(189606) c5(189607, 189608, 189609, 189610, 189611, 189612) c6( ) c7(g, an, s, r); #c1(TRAPPC9) c2(NP_001153844) c3(trafficking protein particle complex subunit 9 isoform b) c4(61005) c5(61006, 61007, 61008, 61009, 61010) c6( ) c7(ac, dy, V, nA, QK, cQc, fq, cd, bN, lc); #c1(TRAPPC9) c2(NP_113654) c3(trafficking protein particle complex subunit 9 isoform a) c4(221956) c5(221957, 221958, 221959, 221960, 221961, 221962, 221963) c6( ) c7(ac, dy, V, nA, QK, cQc, fq, cd, bN, lc); #c1(TRAPPC9) c2(XP_011515628) c3(trafficking protein particle complex subunit 9 isoform X2) c4(308476) c5(308477, 308478, 308479, 308480, 308481, 308482) c6( ) c7(ac, dy, V, nA, QK, cQc, fq, cd, bN, lc); #c1(TRAPPC9) c2(XP_011515632) c3(trafficking protein particle complex subunit 9 isoform X6) c4( ) c5(308483) c6( ) c7(ac, dy, V, nA, QK, cQc, fq, cd, bN, lc); #c1(TRAT1) c2(NP_057472) c3(T-cell receptor-associated transmembrane adapter 1) c4(191129) c5(191130, 191131, 191132, 191133, 191134, 191135) c6( ) c7(T, aW, aT, h, n, gn, bC, cm); #c1(TRDMT1) c2(NP_004403) c3(tRNA (cytosine(38)-C(5))-methyltransferase) c4(146133, 146134) c5(146135, 146136, 146137, 146138, 146139, 146140, 146141, 146142, 146143, 146144, 146145, 146146) c6( ) c7(T, ft, ac, eM, lp, aA, m, bz, B, ad); #c1(TRDMT1) c2(XP_005252429) c3(tRNA (cytosine(38)-C(5))-methyltransferase isoform X2) c4(271788, 271789) c5( ) c6( ) c7(T, ft, ac, eM, lp, aA, m, bz, B, ad); #c1(TRDMT1) c2(XP_005252432) c3(tRNA (cytosine(38)-C(5))-methyltransferase isoform X5) c4(271790) c5(271791, 271792, 271793, 271794, 271795, 271796, 271797, 271798, 271799, 271800, 271801, 271802, 271803, 271804, 271805, 271806) c6( ) c7(T, ft, ac, eM, lp, aA, m, bz, B, ad); #c1(TRDMT1) c2(XP_011517647) c3(tRNA (cytosine(38)-C(5))-methyltransferase isoform X6) c4( ) c5(311491) c6( ) c7(T, ft, ac, eM, lp, aA, m, bz, B, ad); #c1(TRDMT1) c2(XP_011517649) c3(tRNA (cytosine(38)-C(5))-methyltransferase isoform X8) c4(311492) c5(311493, 311484, 311495, 311496, 311497, 311498, 311499) c6( ) c7(T, ft, ac, eM, lp, aA, m, bz, B, ad); #c1(TRDN) c2(NP_001238916) c3(triadin isoform 2) c4(88047) c5( ) c6( ) c7(cQd, cy, ey, NW, bK); #c1(TRDN) c2(NP_001242949) c3(triadin isoform 3) c4(89371, 89372) c5( ) c6( ) c7(cQd, cy, ey, NW, bK); #c1(TRDN) c2(NP_001242950) c3(triadin isoform 4) c4(89373, 89374) c5(89375, 89376, 89377, 89378, 89379, 89380, 89381, 89382, 89383, 89384, 89385, 89386, 89387, 89388, 89389, 89390, 89391, 89392, 89393, 89394, 89395, 89396, 89397, 89398) c6( ) c7(cQd, cy, ey, NW, bK); #c1(TRDN) c2(NP_001242951) c3(triadin isoform 5) c4(89399, 89400) c5(89401, 89402, 89403, 89404, 89405, 89406, 89407, 89408, 89409, 89410, 89411, 89412, 89413, 89414, 89415, 89416, 89417, 89418, 89419, 89420, 89421, 89422, 89423, 89424) c6( ) c7(cQd, cy, ey, NW, bK); #c1(TRDN) c2(NP_006064) c3(triadin isoform 1) c4(161584, 161585, 161586, 161587) c5(161588, 161589, 161590, 161591, 161592, 161593, 161594, 161595, 161596, 161597, 161598, 161599, 161600, 161601, 161602, 161603, 161604, 161605) c6( ) c7(cQd, cy, ey, NW, bK); #c1(TRDN) c2(XP_011533684) c3(triadin isoform X1) c4(329741) c5( ) c6( ) c7(cQd, cy, ey, NW, bK); #c1(TREH) c2(NP_001287994) c3(trehalase isoform 2 precursor) c4(113329, 113330) c5(113331, 113332, 113333, 113334, 113335, 113336, 113337, 113338, 113339, 113340, 113341, 113342) c6( ) c7(bL, T, aj, eA, J, cQe, aBy, H, jf, je, aZs, eZ, bBG, kJ, bz, ck, vW, iM, eM, dy, R, L); #c1(TREH) c2(NP_009111) c3(trehalase isoform 1 precursor) c4(170750, 170751, 170752, 170753) c5(170754, 170755, 170756, 170757, 170758, 170759, 170760, 170761, 170762, 170763, 170764, 170765, 170766, 170767, 170768, 170769, 170770, 170771) c6( ) c7(bL, T, aj, eA, J, cQe, aBy, H, jf, je, aZs, eZ, bBG, kJ, bz, ck, vW, iM, eM, dy, R, L); #c1(TREH) c2(XP_011540866) c3(trehalase isoform X1) c4( ) c5(339396, 339397, 339398, 339399, 339400, 339401) c6( ) c7(bL, T, aj, eA, J, cQe, aBy, H, jf, je, aZs, eZ, bBG, kJ, bz, ck, vW, iM, eM, dy, R, L); #c1(TREM1) c2(NP_001229518) c3(triggering receptor expressed on myeloid cells 1 isoform 2 precursor) c4(84589) c5(84590, 84591, 84592, 84593, 84594, 84595) c6( ) c7(kV, oO, T, fR, sQ, LX, cL, C, ai, o, Tz, aDF, aT, ji, IQ, aWf, he, le, mR, aW, aoo, bg, hl, la, fe, aB, nN, iV, axp, bz, ba, ar, eM, cj, uo, at, wR, ut, dy, cMD, fD, y, ra, an); #c1(TREM1) c2(NP_001229519) c3(triggering receptor expressed on myeloid cells 1 isoform 3 precursor) c4(84596) c5(84597, 84598, 84599, 84600, 84601, 84602) c6( ) c7(kV, oO, T, fR, sQ, LX, cL, C, ai, o, Tz, aDF, aT, ji, lQ, aWf, he, le, mR, aW, aoo, bg, hl, la, fe, aB, nN, iV, axp, bz, ha, ar, eM, cj, uo, at, wR, ut, dy, cMD, fD, y, ra, an); #c1(TREM1) c2(NP_061113) c3(triggering receptor expressed on myeloid cells 1 isoform 1 precursor) c4(199158) c5(199159, 199160, 199161, 199162, 199163, 199164) c6( ) c7(kV, oO, T, fR, sQ, LX, cL, C, ai, o, Tz, aDF, aT, ji, lQ, aWf, he, le, mR, aW, aoo, bg, hl, la, fe, aB, nN, iV, axp, bz, ha, ar, eM, cj, uo, at, wR, ut, dy, cMD, fD, y, ra, ao); #c1(TREM2) c2(NP_001258750) c3(triggering receptor expressed on myeloid cells 2 precursor isoform 2 precursor) c4(96488, 96489) c5(96490, 96491, 96492, 96493, 96494, 96495, 96496, 96497, 96498, 96499, 96500, 96501) c6( ) c7(o0, d, bb, c, af, hb, WY, OI, M, U, aaE, axQ, act, H, V, fK, dr); #c1(TREM2) c2(NP_061838) c3(triggering receptor expressed on myeloid cells 2 precursor isoform 1 precursor) c4(200731) c5(200732, 200733, 200734, 200735, 200736, 200737) c6( ) c7(oO, d, bb, c, af, hb, WY, OI, M, U, aaE, axQ, act, H, V, fK, dr); #c1(TREML1) c2(NP_001258736) c3(trem-like transcript 1 protein isoform b precursor) c4(96457) c5(96458, 96459, 96460, 96461, 96462) c6( ) c7(dc, C); #c1(TREML1) c2(NP_001258737) c3(trem-like transcript 1 protein isoform c precursor) c4(96463) c5(96464, 96465, 96466, 96467, 96468, 96469) c6( ) c7(dc, C); #c1(TREML1) c2(NP_835468) c3(trem-like transcript 1 protein isoform a precursor) c4(253539) c5(253540, 253541, 253542, 253543, 253544, 253545, 253546) c6( ) c7(dc, C); #c1(TREML2) c2(NP_079083) c3(trem-like transcript 2 protein precursor) c4(216922) c5(216923, 216924, 216925, 216926, 216927, 216928) c6( ) c7(cz); #c1(TRERF1) c2(XP_006715208) c3(transcriptional-regulating factor 1 isoform X2) c4(288825) c5(288826, 288827, 288828, 288829, 288830, 288831) c6( ) c7(aW, LG, bX, aT); #c1(TRERF1) c2(XP_006715210) c3(transcriptional-regulating factor 1 isoform X10) c4(288832) c5(288833, 288834, 288835, 288836, 288837, 288838, 288839) c6( ) c7(aW, LG, bX, aT); #c1(TRERF1) c2(XP_011513052) c3(transcriptional-regulating factor 1 isoform X1) c4(304643) c5(304644, 304645, 304646, 304647, 304648, 304649) c6( ) c7(aW, LG, bX, aT); #c1(TREX1) c2(NP_009179) c3(three-prime repair exonuclease 1 isoform c) c4(171331, 171332) c5(171333, 171334, 171335, 171336, 171337, 171338, 171339, 171340, 171341, 171342, 171343, 171344, 171345, 171346, 171347) c6( ) c7(T, Ez, aC, uu, mC, hb, Dq, ds, h, K, cb, lR, cQg, eZ, cQf, ack, lo, g, aaO, pb, boN, lt, wR, aSu, fL, y. Ex); #c1(TREX1) c2(NP_057465) c3(three-prime repair exonuclease 1 isoform a) c4(191100) c5(191101, 191102, 191103, 191104, 191105, 191106, 191107, 191108) c6( ) c7(T, Ez, aC, uu, mC, hb, Dq, ds, h, K, cb, lR, cQg, eZ, cQf, ack, lo, g, aaO, pb, boN, lt, wR, aSu, fL, y. Ex); #c1(TREX1) c2(NP_338599) c3(three-prime repair exonuclease 1 isoform b) c4(228916) c5(228917, 228918, 228919, 228920, 228921, 228922, 228923, 228924, 228925) c6( ) c7(T, Ez, aC, uu, mC, hb, Dq, ds, h, K, cb, lR, cQg, eZ, cQf, ack, lo, g, aaO, pb, boN, lt, wR, aSu, fL, y. Ex); #c1(TREX2) c2(NP_542432) c3(three prime repair exonuclease 2) c4(232837, 232838, 232839) c5(232840, 232841, 232842, 232843, 232844, 232845, 232846, 232847, 232848, 232849, 232850, 232851, 232852, 232853, 232854, 232855, 232856, 232857, 232858, 232859, 232860, 232861, 232862, 232863, 232864, 232865, 232866, 232867, 232868, 232869, 232870, 232871, 232872, 232873, 232874, 232875, 232876) c6( ) c7(ad, eZ, bq); #c1(TRH) c2(NP_009048) c3(thyrotropin releasing hormone preproprotein) c4(170414) c5(170415, 170416, 170417, 170418, 170419, 170420) c6( ) c7(bL, T, cQh, cQj, WL, ha, bzb, bO, cz, cQ, bS, bRy, et, cow, biO, JW, xt, dP, cF, hD, K, EL, dQ, he, NM, ae, uQ, aqa, yo, d, s, iU, Y, Fe, aq, lo, Z, cox, cm, bw, amt, pv, cQi, ky, dJ, bo, U, cj, hr, hR, gT, bt, B); #c1(TRHDE) c2(NP_037513) c3(thyrotropin-releasing hormone-degrading ectoenzyme) c4(175959) c5(175960, 175961, 175962, 175963, 175964, 175965) c6( ) c7(y, j); #c1(TRHR) c2(XP_011515565) c3(thyrotropin-releasing hormone receptor isoform X1) c4(308394) c5(308395, 308396, 308397, 308398, 308399, 308400, 308401, 308402, 308403, 308404) c6( ) c7(pv, aPW, cQl, yo, s, cQk, lT, cz, hR, v, gT, JW, qa, apL); #c1(TRIAP1) c2(NP_057483) c3(TP53-regulated inhibitor of apoptosis 1) c4(191143) c5(191144, 191145, 191146, 191147, 191148, 191149) c6( ) c7(fd); #c1(TRIB1) c2(NP_079471) c3(tribbles homolog 1 isoform 1) c4(218216) c5(218217, 218218, 218219, 218220, 218221, 218222) c6( ) c7(bL, ck, aC, ec, iT, cO, e, aw, M, fe, n, iY, v, j, bw, ei, f, bt, Qt); #c1(TRIB2) c2(NP_067675) c3(tribbles homolog 2) c4(209271) c5(209272, 209273, 209274, 209275, 209276, 209277, 209278, 209279) c6(209280, 209281) c7(T, yk, EQ, oH, j, qW, ad, cF, ae, af, iU, Y, fe, aq, g, iR, bw, ck, iT, cj, aS, bt); #c1(TRIB3) c2(NP_001288117) c3(tribbles homolog 3 isoform 1) c4( ) c5(113556, 113557, 113558, 113559, 113560, 113561, 113562, 113563, 113564, 113565, 113566, 113567) c6( ) c7(bL, T, dD, aC, ea, e, aw, sM, n, aj, dG, j, v, eq, q, J, ad, aT, K, ae, af, aW, r, bw, KM, ck, wE, mf, cS, ei, bt); #c1(TRIB3) c2(NP_001288130) c3(tribbles homolog 3 isoform 2) c4(113579, 113580, 113581) c5(113582, 113583, 113584, 113585, 113586, 113587) c6( ) c7(bL, T, dD, aC, ea, e, aw, sM, n, aj, dG, j, v, eq, q, J, ad, aT, K, ae, aT, aW, r, bw, KM, ck, wE, mf, cS, ei, bt); #c1(TRIM10) c2(NP_006769) c3(tripartite motif-containing protein 10 isoform 1) c4(167908, 167909, 167910) c5(167911, 167912, 167913, 167914, 167915, 167916, 167917, 167918, 167919, 167920, 167921, 167922, 167923, 167924, 167925, 167926, 167927, 167928, 167929, 167930, 167931, 167932, 167933, 167934, 167935, 167936, 167937, 167938, 167939, 167940, 167941, 167942, 167943, 167944, 167945, 167946, 167947, 167948, 167949, 167950, 167951, 167952, 167953, 167954, 167955, 167956, 167957, 167958, 167959, 167960, 167961, 167962, 167963, 167964, 167965, 167966, 167967, 167968, 167969, 167970, 167971) c6( ) c7(V, eZ, KU); #c1(TRIM10) c2(NP_439893) c3(tripartite motif-containing protein 10 isoform 2) c4(229137) c5(229138, 229139, 229140, 229141, 229142, 229143, 229144, 229145, 229146, 229147, 229148, 229149, 229150, 229151, 229152, 229153, 229154, 229155, 229156, 229157, 229158, 229159, 229160, 229161, 229162, 229163, 229164, 229165, 229166, 229167, 229168, 229169) c6( ) c7(V, eZ, KU); #c1(TRIM10) c2(XP_011512526) c3(tripartite motif-containing protein 10 isoform X3) c4( ) c5(303164, 303165, 303166, 303167, 303168, 303169) c6( ) c7(V, eZ, KU); #c1(TRIM11) c2(NP_660215) c3(E3 ubiquitin-protein ligase TRIM11) c4(240559, 240560) c5(240561, 240562, 240563, 240564, 240565, 240566, 240567, 240568, 240569, 240570, 240571, 240572) c6( ) c7(T, d, eA, km); #c1(TRIM13) c2(NP_001007279) c3(E3 ubiquitin-protein ligase TRIM13 isoform 2) c4(22685, 22686, 22687, 22688) c5(22689, 22690, 22691, 22692, 22693, 22694, 22695, 22696, 22697, 22698, 22699, 22700, 22701, 22702, 22703, 22704, 22705, 22706, 22707) c6( ) c7(gV, T, dA, qb, jh, fd, v, ci, q, ad, eA, eW, aT, dL, ae, af, eL, PP, s, hG, aW, Y, OX, oV, r, lo, t, cm, ck, kT, mx, cj, iS, MJ, m, gT, bt, B); #c1(TRIM13) c2(NP_998755) c3(E3 ubiquitin-protein ligase TRIM13 isoform 1) c4( ) c5(265840, 265841, 265842, 265843, 265844, 265845, 265846, 265847, 265848, 265849, 265850, 265851, 265852, 265853, 265854, 265855, 265856, 265857, 265858, 265859, 265860) c6( ) c7(gV, T, dA, qb, jh, fd, v, ci, q, ad, eA, eW, aT, dL, ae, af, eL, PP, s, hG, aW, Y, OX, oV, r, lo, t, cm, ck, kT, mx, cj, iS, MJ, m, gT, bt, B); #c1(TRIM15) c2(NP_150232) c3(tripartite motif-containing protein 15) c4(227853, 227854, 227855, 227856, 227857) c5(227858, 227859, 227860, 227861, 227862, 227863, 227864, 227865, 227866, 227867, 227868, 227869, 227870, 227871, 227872, 227873, 227874, 227875, 227876, 227877, 227878, 227879, 227880, 227881, 227882, 227883, 227884, 227885, 227886, 227887, 227888, 227889, 227890, 227891, 227892, 227893, 227894, 227895, 227896, 227897, 227898, 227899, 227900, 227901, 227902, 227903, 227904, 227905, 227906, 227907, 227908, 227909, 227910, 227911, 227912, 227913, 227914, 227915, 227916, 227917, 227918, 227919, 227920, 227921, 227922, 227923, 227924) c6( ) c7(V, eZ, cr); #c1(TRIM15) c2(XP_011513289) c3(tripartite motif-containing protein 15 isoform X1) c4(305552) c5(305553, 305554, 305555, 305556, 305557, 305558, 305559, 305560, 305561, 305562, 305563, 305564, 305565, 305566, 305567, 305568, 305569, 305570, 305571, 305572, 305573, 305574, 305575, 305576, 305577, 305578) c6( ) c7(V, eZ, cr); #c1(TRIM15) c2(XP_011545633) c3(tripartite motif-containing protein 15 isoform X2) c4( ) c5(344553, 344554, 344555, 344556, 344557, 344558, 344559, 344560, 344561, 344562, 344563, 344564, 344565, 344566, 344567, 344568, 344569, 344570, 344571, 344572, 344573, 344574, 344575, 344576, 344577, 344578, 344579, 344580, 344581) c6( ) c7(V, eZ, cr); #c1(TRIM16) c2(NP_006461) c3(tripartite motif-containing protein 16) c4(165396) c5(165397, 165398, 165399, 165400, 165401, 165402, 165403, 165404, 165405, 165406, 165407) c6( ) c7(cm, fG, T, kS, jj); #c1(TRIM17) c2(NP_001020111) c3(E3 ubiquitin-protein ligase TRIM17 isoform 1) c4(28200, 28201) c5(28202, 28203, 28204, 28205, 28206, 28207, 28208, 28209, 28210, 28211, 28212, 28213, 28214, 28215, 28216) c6( ) c7(km, aF, aRk, aA); #c1(TRIM17) c2(NP_001128327) c3(E3 ubiquitin-protein ligase TRIM17 isoform 3) c4(49842, 49843) c5(49844, 49845, 49846, 49847, 49848, 49849, 49850, 48851, 49852, 49853, 49854, 49855, 49856, 49857, 49858, 49859, 49860, 49861) c6( ) c7(km, aF, aRk, aA); #c1(TRIM2) c2(NP_001123539) c3(tripartite motif-containing protein 2 isoform 2) c4(47458) c5(47459) c6( ) c7(V, bk, cQm); #c1(TRIM2) c2(NP_056086) c3(tripartite motif-containing protein 2 isoform 1) c4(185622) c5(185623, 185624, 185625, 185626, 185627, 185628, 185629, 185630, 185631, 185632, 185633, 185634) c6( ) c7(V, bk, cQm); #c1(TRIM21) c2(NP_003132) c3(E3 ubiquitin-protein ligase TRIM21) c4(135550, 135551) c5(135552, 135553, 135554, 135555, 135556, 135557, 135558, 135559, 135560, 135561, 135562, 135563, 135564) c6( ) c7(Ob, T, cQn, cQo, qb, fN, bB, ci, mC, q, ai, ft, xy, rw, NS, nI, aT, hD, h, K, lQ, azv, atZ, DY, dl, yo, Yj, s, aW, ff, lb, ih, nh, eZ, dN, aiT, lo, bJC, afi, NR, en, YZ, t, bz, ck, bF, Bv, bE, uw, hR, aYx, cQp, azy, dy, fL, R, y, jr); #c1(TRIM22) c2(NP_001186502) c3(E3 ubiquitin-protein ligase TRIM22 isoform 2) c4(77714, 77715) c5(77716, 77717, 77718, 77719, 77720, 77721, 77722, 77723, 77724, 77725, 77726, 77727) c6( ) c7(h, Kd, ds, fR); #c1(TRIM22) c2(NP_006065) c3(E3 ubiquitin-protein ligase TRIM22 isoform 1) c4(161606, 161607, 161608) c5(161609, 161610, 161611, 161612, 161613, 161614, 161615, 161616, 161617, 161618, 161619, 161620, 161621, 161622, 161623, 161624, 161625, 161626, 161627, 161628) c6( ) c7(h, Kd, ds, fR); #c1(TRIM23) c2(NP_001647) c3(E3 ubiquitin-protein ligase TRIM23 isoform alpha) c4(119714) c5(119715, 119716, 119717, 119718, 119719, 119720, 119721, 119722, 119723, 119724, 119725) c6( ) c7(T, aW, r, aT, ji, apx, q); #c1(TRIM23) c2(NP_150230) c3(E3 ubiquitin-protein ligase TRIM23 isoform beta) c4(227837) c5(227838, 227839, 227840, 227841, 227842, 227843) c6( ) c7(T, aW, r, aT, ji, apx, q); #c1(TRIM23) c2(NP_150231) c3(E3 ubiquitin-protein ligase TRIM23 isoform gamma) c4(227844, 227845) c5(227846, 227847, 227848, 227849, 227850, 227851, 227852) c6( ) c7(T, aW, r, aT, ji, apx, q); #c1(TRIM24) c2(NP_003843) c3(transcription intermediary factor 1-alpha isoform b) c4(141321, 141322) c5(141323, 141324, 141325, 141326, 141327, 141328, 141329, 141330, 141331, 141332, 141333, 141334, 141335) c6( ) c7(x, T, hd, Bv, nM, eM, aW, iK, aT, n, aq, k, iR, cm, bt, bz, B); #c1(TRIM24) c2(NP_056989) c3(transcription intermediary factor 1-alpha isoform a) c4(188348, 188349) c5(188350, 188351, 188352, 188353, 188354, 188355, 188356, 188357, 188358, 188359, 188360, 188361) c6( ) c7(x, T, hd, Bv, nM, eM, aW, iK, aT, n, aq, k, iR, cm, bt, bz, B); #c1(TRIM25) c2(NP_005073) c3(E3 ubiquitin/ISG15 ligase TRIM25) c4(152630) c5(152631, 152632, 152633, 152634, 152635, 152636, 152637, 152638, 152639, 152640) c6( ) c7(aW, ds, hL, aT, ci, g); #c1(TRIM26) c2(XP_005249435) c3(tripartite motif-containing protein 26 isoform X1) c4(269305, 269306, 269307, 269308, 269309) c5(269310, 269311, 269312, 269313, 269314, 269315, 269316, 269317, 269318, 269319, 269320, 269321, 269322, 269323, 269324, 269325, 269326, 269327, 269328, 269329, 269330, 269331, 269332, 269333, 269334, 269335, 269336, 269337, 269338, 269339, 269340, 269341, 269342, 269343, 269344, 269345, 269346, 269347, 269348, 269349, 269350, 269351, 269352, 269353, 269354, 269355, 269356, 269357, 269358, 269359, 269360, 269361, 269362, 269363, 269364, 269365, 269366, 269367, 269368, 269369, 269370, 269371, 269372, 269373, 269374, 269375, 269376, 269377, 269378, 269379, 269380, 269381, 269382, 269383, 269384, 269385, 269386, 269387, 269388, 269389, 269390, 269391, 269392, 269393, 269394, 269395, 269396, 269397, 269398, 269399, 269400, 269401, 269402, 269403, 269404, 269405, 269406, 269407, 269408, 269409, 269410, 269411, 269412, 269413, 269414, 269415, 269416, 269417, 269418, 269419, 269420, 269421, 269422, 269423, 269424, 269425, 269426, 269427, 269428, 269429, 269430, 269431) c6( ) c7(Le, T, wu, al, jh, aA, Hn, n, bX, V, eW, hX, jz, F, KN, rO, vm hH, Df, vT, JI, hI, Lh, eZ, aq, aF, g, iR, f, KQ, KM, bF, iO, gk, kQ, bC, be, hE, KY, B); #c1(TRIM26) c2(XP_011513161) c3(tripartite motif-containing protein 26 isoform X2) c4( ) c5(305015, 305016, 305017, 305018, 305019, 305020, 305021, 305022, 305023, 305024, 305025, 305026, 305027, 305028, 305029, 305030, 305031, 305032, 305033, 305034, 305035, 305036, 305037, 305038, 305039, 305040, 305041, 305042, 305043, 305044, 305045, 305046, 305047, 305048, 305049, 305050, 305051, 305052, 305053, 305054, 305055, 305056, 305057, 305058, 305059, 305060, 305061, 305062, 305063, 305064, 305065, 305066, 305067, 305068, 305069, 305070, 305071, 305072, 305073, 305074, 305075, 305076, 305077, 305078, 305079, 305080, 305081, 305082, 305083, 305084, 305085, 305086, 305087, 305088, 305089, 305090, 305091, 305092, 305093, 305094, 305095, 305096, 305097, 305098, 305099, 305100, 305101) c6( ) c7(Le, T, wu, al, jh, aA, Hn, n, bX, V, eW, hX, jz, F, KN, rO, wm, hH, Df, vT, Jl, hl, Lh, eZ, aq, aF, g, iR, f, KQ, KM, bF, iU, gk, kQ, bC, be, hE, KY, B); #c1(TRIM27) c2(NP_006501) c3(zinc finger protein REP) c4(165757, 165758, 165759, 165760, 165761, 165762, 165763, 165764) c5(165765, 165766, 165767, 165768, 165769, 165770, 165771, 165772, 165773, 165774, 165775, 165776, 165777, 165778, 165779, 165780, 165781, 165782, 165783, 165784, 165785, 165786, 165787, 165788, 165789, 165790, 165791, 165792, 165793, 165794, 165795, 165796, 165797, 165798, 165799, 165800, 165801, 165802, 165803, 165804, 165805, 165806, 165807, 165808, 165809, 165810, 165811, 165812, 165813, 165814, 165815, 165816, 165817, 165818, 165819, 165820, 165821, 165822, 165823, 165824, 165825, 165826, 165827, 165828, 165829, 165830, 165831, 165832, 165833, 165834, 165835, 165836, 165837, 165838, 165839, 165840, 165841, 165842, 165843, 165844, 165845, 165846, 165847, 165848, 165849, 165850, 165851, 165852, 165853, 165854, 165855, 165856, 165857, 165858, 165859, 165860, 165861, 165862) c6( ) c7(T, bkF, yk, bB, eA, afb, aE, adX, dL, K, eL, Y, eH, eZ, cI, eF, nM, adZ, wO, hk, hL, it); #c1(TRIM28) c2(NP_005753) c3(transcription intermediary factor 1-beta) c4(159026, 159027) c5(159028, 159029, 159030, 159031, 159032, 159033, 159034, 159035, 159036, 159037, 159038, 159039, 159040) c6( ) c7(av, T, eM, aW, Y, aT, aA, n, h, aF, bC, g, bz); #c1(TRIM29) c2(NP_036233) c3(tripartite motif-containing protein 29) c4(172522, 172523, 172524, 172525, 172526, 172527) c5(172528, 172529, 172530, 172531, 172532, 172533, 172534, 172535, 172536, 172537, 172538, 172539, 172540, 172541, 172542, 172543, 172544, 172545, 172546, 172547, 172548, 172549, 172550, 172551, 172552, 172553) c6( ) c7(T, aE, aW, if, ff, aT, n, kp, bC, en, qN, ad); #c1(TRIM29) c2(XP_005271547) c3(tripartite motif-containing protein 29 isoform X4) c4( ) c5(283462, 283463, 283464, 283465, 283466, 283467) c6( ) c7(T, aE, aW, if, ff, aT, n, kp, bC, en, qN, ad); #c1(TRIM29) c2(XP_011541033) c3(tripartite motif-containing protein 29 isoform X1) c4( ) c5(339564, 339565, 339566, 339567, 339568) c6( ) c7(T, aE, aW, if, ff, aT, n, kp, bC, en, qN, ad); #c1(TRIM3) c2(XP_011518146) c3(tripartite motif-containing protein 3 isoform X1) c4(312128, 312129, 312130, 312131, 312132) c5(312133, 312134, 312135, 312136, 312137, 312138, 312139, 312140, 312141, 312142, 312143, 312144, 312145, 312146, 312147, 312148, 312149, 312150, 312151, 312152, 312153, 312154, 312155, 312156, 312157, 312158, 312159, 312160, 312161, 312162, 312163, 312164, 312165, 312166, 312167, 312168, 312169, 312170, 312171) c6( ) c7(dB, eA, v, d, K); #c1(TRIM3) c2(XP_011518147) c3(tripartite motif-containing protein 3 isoform X2) c4(312172) c5(312173, 312174, 312175, 312176, 312177, 312178) c6( ) c7(dB, eA, v, d, K); #c1(TRIM31) c2(NP_008959) c3(E3 ubiquitin-protein ligase TRIM31) c4(169809, 169810, 169811, 169812, 169813, 169814, 169815, 169816) c5(169817, 169818, 169819, 169820, 169821, 169822, 169823, 169824, 169825, 169826, 169827, 169828, 169829, 169830, 169831, 169832, 169833, 169834, 169835, 169836, 169837, 169838, 169839, 169840, 169841, 169842, 169843, 169844, 169845, 169846, 169847, 169848, 169849, 169850, 169851, 169852, 169853, 169854, 169855, 169856, 169857, 169858, 169859, 169860, 169861, 169862, 169863, 169864, 169865, 169866, 169867, 169868, 169869, 169870, 169871, 169872, 169873, 169874, 169875, 169876, 169877, 169878, 169879, 169880, 169881, 169882, 169883, 169884, 169885, 169886, 169887, 169888, 169889, 169890, 169891, 169892, 169893, 169894, 169895, 169896, 169897, 169898, 169899, 169900, 169901, 169902, 169903, 169904, 169905, 169906, 169907, 169908, 169909, 169910, 169911, 169912, 169913, 169914, 169915, 169916) c6( ) c7(T, eM, cQq, Jl, aW, dE, bE, cr, aT, aA, bB, yy, he, aF, eZ, nA, ei, nS, hH); #c1(TRIM31) c2(XP_011512567) c3(E3 ubiquitin-protein ligase TRIM31 isoform X5) c4(303475) c5( ) c6( ) c7(T, eM, cQq, Jl, aW, dE, bE, cr, aT, aA, bB, yy, he, aF, eZ, nA, ei, nS, hH); #c1(TRIM31) c2(XP_011512568) c3(E3 ubiquitin-protein ligase TRIM31 isoform X4) c4( ) c5(303476, 303477, 303478, 303479, 303480, 303481) c6( ) c7(T, eM, cQq, Jl, aW, dE, bE, cr, aT, aA, bB, yy, he, aF, eZ, nA, ei, nS, hH); #c1(TRIM32) c2(XP_011516700) c3(E3 ubiquitin-protein ligase TRIM32 isoform X1) c4(310131, 310132) c5(310133, 310134, 310135, 310136, 310137, 310138, 310139, 310140, 310141, 310142, 310143, 310144, 310145, 310146, 310147, 310148, 310149, 310150) c6( ) c7(ck, T, lR, eD, ff, xs, oj, km, cr, yT, aiW, v, en, Tp, adg, rz, iK, cnS); #c1(TRIM34) c2(NP_067629) c3(tripartite motif-containing protein 34 isoform 1) c4(209090) c5(209091, 209092, 209093, 209094, 209095, 209096, 209097, 209098, 209099, 209100, 209101, 209102) c6( ) c7(h); #c1(TRIM35) c2(NP_741983) c3(tripartite motif-containing protein 35 isoform 1) c4(247523, 247524) c5(247525, 247526, 247527, 247528, 247529, 247530, 247531, 247532, 247533, 247534, 247535, 247536, 247537) c6( ) c7(ck, B); #c1(TRIM36) c2(NP_001017397) c3(E3 ubiquitin-protein ligase TRIM3G isoform 2) c4(26405) c5(26406, 26407, 26408, 26409, 26410, 26411) c6( ) c7(ad); #c1(TRIM36) c2(NP_001017398) c3(E3 ubiquitin-protein ligase TRIM36 isoform 3) c4(26412) c5(26413, 26414, 26415, 26416, 26417, 26418) c6( ) c7(ad); #c1(TRIM36) c2(NP_061170) c3(E3 ubiquitin-protein ligase TRIM36 isoform 1) c4(199726) c5(199727, 199728, 199729, 199730, 199731, 199732) c6( ) c7(ad); #c1(TRIM37) c2(NP_056109) c3(E3 ubiquitin-protein ligase TRIM37) c4(185747) c5(185748, 185749, 185750, 185751, 185752, 185753, 185754, 185755) c6( ) c7(adf, eM, cQq, aW, Az, aT, mE, ey, ei, t, nS, er, ae, ad); #c1(TRIM37) c2(XP_005257444) c3(E3 ubiquitin-protein ligase TRIM37 isoform X8) c4(275114) c5(275115, 275116, 275117, 275118, 275119, 275120) c6( ) c7(adf, eM, cQq, aW, Az, aT, mE, ey, ei, t, nS, er, ae, ad); #c1(TRIM37) c2(XP_005257447) c3(E3 ubiquitin-protein ligase TRIM37 isoform X10) c4(275121) c5(275122, 275123, 275124, 275125, 275126) c6( ) c7(adf, eM, cQq, aW, Az, aT, mE, ey, ei, t, nS, er, ae, ad); #c1(TRIM37) c2(XP_011523134) c3(E3 ubiquitin-protein ligase TRIM37 isoform X2) c4( ) c5(317678, 317679) c6( ) c7(adf, eM, cQq, aW, Az, aT, mE, ey, ei, t, nS, er, ae, ad); #c1(TRIM37) c2(XP_011523138) c3(E3 ubiquitin-protein ligase TRIM37 isoform X7) c4( ) c5(317680) c6( ) c7(adf, eM, cQq, aW, Az, aT, mE, ey, ei, t, nS, er, ae, ad); #c1(TRIM38) c2(XP_005248857) c3(E3 ubiquitin-protein ligase TRIM38 isoform X1) c4(268656) c5(268657, 268658, 268659, 268660, 268661, 268662, 268663, 268664, 268665, 268666, 268667, 268668, 268669, 268670, 268671) c6( ) c7(ih, eZ); #c1(TRIM38) c2(XP_011512534) c3(E3 ubiquitin-protein ligase TRIM38 isoform X2) c4( ) c5(303193) c6( ) c7(ih, eZ); #c1(TRIM39) c2(NP_067076) c3(E3 ubiquitin-protein ligase TRIM39 isoform 1) c4(208836, 208837, 208838, 208839) c5(208840, 208841, 208842, 208843, 208844, 208845, 208846, 208847, 208848, 208849, 208850, 208851, 208852, 208853, 208854, 208855, 208856, 208857, 208858, 208859, 208860, 208861, 208862, 208863, 208864, 208865, 208866, 208867, 208868, 208869, 208870, 208871, 208872, 208873, 208874, 208875, 208876, 208877, 208878, 208879, 208880, 208881, 208882, 208883, 208884, 208885, 208886, 208887, 208888, 208889, 208890, 208891, 208892, 208893, 208894, 208895, 208896, 208897, 208898, 208899, 208900, 208901, 208902, 208903, 208904, 208905, 208906, 208907, 208908, 208909, 208910, 208911, 208912, 208913, 208914, 208915, 208916) c6( ) c7(eZ); #c1(TRIM39) c2(NP_742013) c3(E3 ubiquitin-protein ligase TRIM39 isoform 2) c4(247597, 247598, 247599, 247600, 247601) c5(247602, 247603, 247604, 247605, 247606, 247607, 247608, 247609, 247610, 247611, 247612, 247613, 247614, 247615, 247616, 247617, 247618, 247619, 247620, 247621, 247622, 247623, 247624, 247625, 247626, 247627, 247628, 247629, 247630, 247631, 247632, 247633, 247634, 247635, 247636, 247637, 247638, 247639, 247640, 247641, 247642, 247643, 247644, 247645, 247646, 247647, 247648, 247649, 247650, 247651, 247652, 247653, 247654, 247655, 247656, 247657, 247658, 247659, 247660, 247661, 247662, 247663, 247664, 247665, 247666, 247667, 247668, 247669, 247670, 247671, 247672, 247673, 247674, 247675, 247676, 247677, 247678, 247679, 247680, 247681, 247682, 247683, 247684, 247685, 247686, 247687, 247688, 247689, 247690, 247691, 247692, 247693, 247694, 247695, 247696, 247697, 247698, 247699, 247700, 247701, 247702, 247703, 247704, 247705, 247706, 247707, 247708, 247709, 247710, 247711, 247712, 247713, 247714, 247715, 247716, 247717, 247718, 247719, 247720, 247721, 247722, 247723, 247724, 247725, 247726, 247727, 247728, 247729, 247730, 247731, 247732, 247733, 247734, 247735, 247736, 247737, 247738, 247739, 247740, 247741, 247742, 247743, 247744, 247745, 247746, 247747, 247748, 247749, 247750, 247751, 247752, 247753, 247754, 247755, 247756, 247757, 247758, 247759, 247760, 247761, 247762, 247763, 247764, 247765, 247766, 247767, 247768, 247769, 247770, 247771, 247772, 247773, 247774, 247775, 247776, 247777, 247778, 247779, 247780, 247781, 247782, 247783, 247784, 247785, 247786, 247787, 247788, 247789, 247790, 247791, 247792, 247793, 247794, 247795, 247796, 247797, 247798, 247799, 247800, 247801, 247802, 247803, 247804, 247805, 247806, 247807, 247808, 247809, 247810, 247811, 247812, 247813, 247814, 247815, 247816, 247817, 247818, 247819, 247820, 247821, 247822, 247823, 247824, 247825, 247826, 247827, 247828, 247829, 247830, 247831, 247832, 247833, 247834, 247835, 247836, 247837, 247838, 247839, 247840, 247841, 247842, 247843, 247844, 247845, 247846, 247847, 247848, 247849, 247850, 247851, 247852, 247853, 247854, 247855, 247856, 247857, 247858, 247859, 247860, 247861, 247862, 247863, 247864, 247865, 247866, 247867, 247868, 247869, 247870, 247871, 247872, 247873, 247874, 247875, 247876) c6( ) c7(eZ); #c1(TRIM40) c2(NP_001273562) c3(tripartite motif-containing protein 40 isoform a) c4(105241) c5(105242, 105243, 105244, 105245, 105246, 105247, 105248, 105249, 105250, 105251, 105252, 105253, 105254, 105255, 105256, 105257, 105258, 105259, 105260, 105261, 105262, 105263, 105264, 105265, 105266, 105267, 105268, 105269, 105270, 105271, 105272, 105273, 105274, 105275, 105276, 105277) c6( ) c7(V, eZ, cr); #c1(TRIM40) c2(NP_619645) c3(tripartite motif-containing protein 40 isoform b) c4(236960, 236961, 236962) c5(236963, 236964, 236965, 236966, 236967, 236968, 236969, 236970, 236971, 236972, 236973, 236974, 236975, 236976, 236977, 236978, 236979, 236980, 236981, 236982, 236983, 236984, 236985, 236986, 236987, 236988, 236989, 236990, 236991, 236992, 236993, 236994, 236995, 236996, 236997, 236998, 236999) c6( ) c7(V, eZ, cr); #c1(TRIM40) c2(XP_011545906) c3(tripartite motif-containing protein 40 isoform X2) c4(344791) c5(344792, 344793, 344794, 344795, 344796, 344797, 344798, 344799, 344800, 344801) c6( ) c7(V, eZ, cr); #c1(TRIM40) c2(XP_011546687) c3(tripartite motif-containing protein 40 isoform X2) c4(345471) c5(345472, 345473, 345474, 345475, 345476, 345477, 345478, 345479, 345480, 345481) c6( ) c7(V, eZ, cr); #c1(TRIM42) c2(NP_689829) c3(tripartite motif-containing protein 42) c4(244065) c5(244066, 244067, 244068, 244069, 244070, 244071) c6( ) c7(V, m); #c1(TRIM44) c2(NP_060053) c3(tripartite motif-containing protein 44) c4(193887) c5(193888, 193889, 193890, 193891, 193892, 193893) c6( ) c7(n, T, aF, aA, aT); #c1(TRIM5) c2(NP_149023) c3(tripartite motif-containing protein 5 isoform alpha) c4(226791, 226792) c5(226793, 226794, 226795, 226796, 226797, 226798, 226799, 226800, 226801, 226802, 226803, 226804, 226805) c6( ) c7(ck, Ke, fR, ih, h, lo, gn, V); #c1(TRIM5) c2(NP_149083) c3(tripartite motif-containing protein 5 isoform gamma) c4(227055) c5(227056, 227057, 227058, 227059, 227060, 227061) c6( ) c7(ck, Ke, fR, ih, h, lo, gn, V); #c1(TRIM5) c2(NP_149084) c3(tripartite motif-containing protein 5 isoform delta) c4(227062, 227063) c5(227064, 227065, 227066, 227067, 227068, 227069, 227070, 227071, 227072, 227073, 227074, 227075, 227076, 227077, 227078, 227079) c6( ) c7(ck, Ke, fR, ih, h, lo, gn, V); #c1(TRIM5) c2(XP_006718421) c3(tripartite motif-containing protein 5 isoform X7) c4( ) c5(291842, 291843, 291844, 291845, 291846, 291847, 291848, 291849, 291850, 291851, 291852, 291853) c6( ) c7(ck, Ke, fR, ih, h, lo, gn, V); #c1(TRIM5) c2(XP_011518727) c3(tripartite motif-containing protein 5 isoform X4) c4( ) c5(313136) c6( ) c7(ck, Ke, fR, ih, h, lo, gn, V); #c1(TRIM5) c2(XP_011518729) c3(tripartite motif-containing protein 5 isoform X6) c4(313137, 313138, 313139) c5(313140, 313141, 313142, 313143, 313144, 313145) c6( ) c7(ck, Ke, fR, ih, h, lo, gn, V); #c1(TRIM50) c2(NP_835226) c3(E3 ubiquitin-protein ligase TRIM50 isoform a) c4(253389) c5(253390, 253391, 253392, 253393, 253394, 253395, 253396, 253397, 253398, 253399) c6( ) c7(alC); #c1(TRIM56) c2(NP_112223) c3(E3 ubiquitin-protein ligase TRIM56) c4(220957) c5(220958, 220959, 220960, 220961, 220962, 220963) c6( ) c7(T, vi); #c1(TRIM58) c2(NP_056246) c3(E3 ubiquitin-protein ligase TRIM58) c4(186705) c5(186706, 186707, 186708, 186709, 186710, 186711, 186712) c6( ) c7(cz); #c1(TRIM59) c2(NP_775107) c3(tripartite motif-containing protein 59) c4(249543, 249544, 249545, 249546, 249547, 249548) c5(249549, 249550, 248551, 249552, 249553, 249554, 249555, 249556, 249557, 249558, 249559, 249560, 249561, 249562, 249563, 249564, 249565, 249566, 249567, 249568, 249569, 249570, 249571, 249572, 249573, 249574, 249575, 249576, 249577, 249578, 249579, 249580, 249581, 249582, 249583, 249584) c6( ) c7(ae, ad, aF, aA); #c1(TRIM62) c2(XP_011540007) c3(E3 ubiquitin-protein ligase TRIM62 isoform X1) c4(338327) c5(338328, 338329, 338330, 338331, 338332, 338333) c6( ) c7(T, aW, aT, n, ci, bz); #c1(TRIM66) c2(NP_055633) c3(tripartite motif-containing protein 66) c4(182401) c5(182402, 182403, 182404, 182405, 182406) c6( ) c7(v); #c1(TRIM66) c2(XP_011518813) c3(tripartite motif-containing protein 66 isoform X5) c4( ) c5(313201, 313202) c6( ) c7(v); #c1(TRIM68) c2(NP_001291425) c3(E3 ubiquitin-protein ligase TRIM68 isoform 2) c4( ) c5(116010, 116011, 116012, 116013, 116014, 116015) c6( ) c7(bL, ae, ad, fN, eZ); #c1(TRIM68) c2(NP_060543) c3(E3 ubiquitin-protein ligase TRIM68 isoform 1) c4(196476, 196477) c5(196478, 196479, 196480, 196481, 196482, 196483, 196484) c6( ) c7(bL, ae, ad, fN, eZ); #c1(TRIM69) c2(NP_001288073) c3(E3 ubiquitin-protein ligase TRIM69 isoform c) c4( ) c5(113491, 113492, 113493, 113494, 113495, 113496, 113497, 113498) c6( ) c7(Dw, wV, C, aBI, atK, eW, cF, aE, ds, cU, cy, pi, eu, lo, hp, cMm, pm, ac, NL, fD, hh, kS); #c1(TRIM69) c2(NP_001288074) c3(E3 ubiquitin-protein ligase TRIM69 isoform d) c4(113499) c5(113500, 113501, 113502, 113503, 113504) c6( ) c7(Dw, wV, C, aBI, atK, eW, cF, aE, ds, cU, cy, pi, eu, lo, hp, cMm, pm, ac, NL, fD, hh, kS); #c1(TRIM69) c2(NP_542783) c3(E3 ubiquitin-protein ligase TRIM69 isoform b) c4(233063, 233064) c5(233065, 233066, 233067, 233068, 233069, 233070, 233071, 233072, 233073, 233074) c6( ) c7(Dw, wV, C, aBI, atK, eW, cF, aE, ds, cU, cy, pi, eu, lo, hp, cMm, pm, ac, NL, fD, hh, kS); #c1(TRIM69) c2(NP_892030) c3(E3 ubiquitin-protein ligase TRIM69 isoform a) c4(257682) c5(257683, 257684, 257685, 257686, 257687, 257688, 257689, 257690, 257691, 257692) c6( ) c7(Dw, wV, C, aBI, atK, eW, cF, aE, ds, cU, cy, pi, eu, lo, hp, cMm, pm, ac, NL, fD, hh, kS); #c1(TRIM6-TRIM34) c2(NP_001003819) c3(tripartite motif-containing 6 and tripartite motif-containing 34) c4(20206) c5(20207, 20208, 20209, 20210, 20211, 20212, 20213, 20214, 20215, 20216, 20217, 20218, 20219) c6( ) c7(h); #c1(TRIM71) c2(NP_001034200) c3(E3 ubiquitin-protein ligase TRIM71) c4(31581) c5(31582, 31583, 31584, 31585, 31586, 31587) c6( ) c7(iR, aq, B); #c1(TRIM72) c2(NP_001008275) c3(tripartite motif-containing protein 72) c4(23131) c5(23132, 23133, 23134, 23135, 23136, 23137) c6( ) c7(cd, xs, eZ, oj); #c1(TRIM73) c2(NP_944606) c3(tripartite motif-containing protein 73) c4(260649, 260650) c5(260651, 260652, 260653, 260654, 260655, 260656, 260657, 260658, 260659, 260660, 260661, 260662, 260663, 260664, 260665, 260666) c6( ) c7(alC); #c1(TRIM74) c2(XP_011514491) c3(tripartite motif-containing protein 74 isoform X2) c4(307196, 307197) c5(307198, 307199, 307200, 307201, 307202, 307203, 307204, 307205, 307206, 307207, 307208, 307209) c6( ) c7(alC); #c1(TRIM8) c2(NP_112174) c3(probable E3 ubiquitin-protein ligase TRIM8) c4(220610, 220611) c5(220612, 220613, 220614, 220615, 220616, 220617, 220618, 220619, 220620, 220621, 220622, 220623) c6( ) c7(ac); #c1(TRIM9) c2(NP_055978) c3(E3 ubiquitin-protein ligase TRIM9 isoform 1) c4(184857) c5(184858, 184859, 184860, 184861, 184862, 184863) c6( ) c7(ak, j, qe, ER, fr); #c1(TRIM9) c2(NP_443210) c3(E3 ubiquitin-protein ligase TRIM9 isoform 2) c4(229936) c5(229937, 229938, 229939, 229940, 229941, 229942) c6( ) c7(ak, j, qe, ER, fr); #c1(TRIM9) c2(XP_011534691) c3(E3 ubiquitin-protein ligase TRIM9 isoform X1) c4(331186) c5(331187, 331188, 331189, 331190, 331191, 331192) c6( ) c7(ak, j, qe, ER, fr); #c1(TR10) c2(NP_009049) c3(triple functional domain protein) c4(170421, 170422) c5(170423, 170424, 170425, 170426, 170427, 170428, 170429, 170430, 170431, 170432, 170433, 170434, 170435, 170436, 170437, 170438, 170439, 170440, 170441, 170442, 170443, 170444, 170445, 170446) c6( ) c7(ZL, d, aq, dL, hP, ci, bt, eL); #c1(TR10) c2(XP_011512413) c3(triple functional domain protein isoform X4) c4(303105, 303106) c5( ) c6( ) c7(ZL, d, aq, dL, hP, ci, bt, eL); #c1(TR10) c2(XP_011512414) c3(triple functional domain protein isoform X5) c4(303107) c5(303108, 303109, 303110, 303111, 303112, 303113) c6( ) c7(ZL, d, aq, dL, hP, ci, bt, eL); #c1(TR10) c2(XP_011512415) c3(triple functional domain protein isoform X6) c4( ) c5(303114) c6( ) c7(ZL, d, aq, dL, hP, ci, bt, eL); #c1(TR10BP) c2(NP_001034230) c3(TR10 and F-actin-binding protein isoform 6) c4(31620, 31621, 31622, 31623) c5(31624, 31625, 31626, 31627, 31628, 31629, 31630, 31631, 31632, 31633, 31634, 31635) c6( ) c7(cQr, Bh); #c1(TR10BP) c2(NP_008963) c3(TR10 and F-actin-binding protein isoform 1) c4(169938) c5(169939, 169940, 169941, 169942, 169943, 169944, 169945) c6( ) c7(cQr, Bh); #c1(TR10BP) c2(NP_619538) c3(TR10 and F-actin-binding protein isoform 2) c4(236847) c5(236848, 236849, 236850, 236851, 236852, 236853, 236854, 236855, 236856, 236857, 236858, 236859, 236860, 236861, 236862, 236863, 236864, 236865, 236866) c6( ) c7(cQr, Bh); #c1(TRIP10) c2(NP_001275891) c3(cdc42-interacting protein 4 isoform 1) c4(107297) c5(107298, 107299, 107300, 107301, 107302, 107303) c6( ) c7(T, rR, s, dB, aW, if, eX, cj, aT, aq, eV, fD, qN, iR, axp, aDF); #c1(TRIP10) c2(NP_001275892) c3(cdc42-interacting protein 4 isoform 3) c4(107304) c5(107305, 107306, 107307, 107308, 107309, 107310) c6( ) c7(T, rR, s, dB, aW, if, eX, cj, aT, aq, eV, fD, qN, iR, axp, aDF); #c1(TRIP10) c2(NP_004231) c3(cdc42-interacting protein 4 isoform 2) c4(144494) c5(144495, 144496, 144497, 144498, 144499, 144500) c6( ) c7(T, rR, s, dB, aW, if, eX, cj, aT, aq, eV, fD, qN, iR, axp, aDF); #c1(TRIP11) c2(NP_004230) c3(thyroid receptor-interacting protein 11) c4(144478, 144479) c5(144480, 144481, 144482, 144483, 144484, 144485, 144486, 144487, 144488, 144489, 144490, 144491, 144492, 144493) c6( ) c7(bt, bP, cQs); #c1(TRIP13) c2(NP_001159732) c3(pachytene checkpoint protein 2 homolog isoform 2) c4( ) c5(64643, 64644, 64645, 64646, 64647, 64648) c6( ) c7(UR, n, QK, xR, XD); #c1(TRIP13) c2(NP_004228) c3(pachytene checkpoint protein 2 homolog isoform 1) c4(144465, 144466) c5(144467, 144468, 144469, 144470, 144471, 144472, 144473, 144474, 144475) c6(144476, 144477) c7(UR, n, QK, xR, XD); #c1(TRIP4) c2(NP_057297) c3(activating signal cointegrator 1) c4(189956) c5(189957, 189958, 189959, 189960, 189961, 189962, 189963) c6( ) c7(bns, aW, beo, aT); #c1(TRIP6) c2(XP_011514847) c3(thyroid receptor-interacting protein 6 isoform X1) c4(307590) c5(307591, 307592, 307593, 307594, 307595, 307596, 307597, 307598) c6( ) c7(T, d, ja, CQ, ci, K); #c1(TRIQK) c2(XP_011515284) c3(triple QxxK/R motif-containing protein isoform X1) c4(308118, 308119) c5(308120, 308121, 308122, 308123, 308124, 308125, 308126, 308127, 308128, 308129, 308130, 308131, 308132, 308133, 308134, 308135, 308136, 308137, 308138, 308139, 308140, 308141, 308142, 308143, 308144, 308145, 308146, 308147, 308148, 308149, 308150, 308151, 308152, 308153, 308154, 308155, 308156, 308157, 308158, 308159, 308160, 308161, 308162, 308163) c6( ) c7(j, an); #c1(TRMT1) c2(NP_001136026) c3(tRNA (guanine(26)-N(2))-dimethyltransferase isoform 2) c4(54051) c5(54052, 54053, 54054, 54055, 54056, 54057) c6( ) c7(nA); #c1(TRMT1) c2(NP_060192) c3(tRNA (guanine(26)-N(2))-dimethyltransferase isoform 1) c4(194707) c5(194708, 194709, 194710, 194711, 194712, 194713, 194714, 194715, 194716, 194717) c6( ) c7(nA); #c1(TRMT10A) c2(NP_001128137) c3(tRNA methyltransferase ID homolog A) c4(49611, 49612, 49613) c5(49614, 49615, 49616, 49617, 49618, 49619, 49620, 49621, 49622, 49623, 49624, 49625, 49626, 49627) c6( ) c7(QK, aj, aij, J); #c1(TRMT10A) c2(XP_006714481) c3(tRNA methyltransferase ID homolog A isoform X2) c4( ) c5(287864, 287865, 287866, 287867, 287868, 287869, 287870, 287871, 287872, 287873, 287874, 287875) c6( ) c7(QK, aj, aij, J); #c1(TRMT12) c2(NP_060426) c3(tRNA wybutosine-synthesizing protein 2 homolog) c4(195910) c5(195911, 195912, 195913, 195914, 195915, 195916) c6( ) c7(aW, aT); #c1(TRMT44) c2(NP_689757) c3(probable tRNA (uracil-0(2)-)-methyltransferase) c4(243881) c5(243882, 243883, 243884, 243885, 243886, 243887) c6( ) c7(cj); #c1(TRMT44) c2(XP_011511711) c3(probable tRNA (uracil-0(2)-)-methyltransferase isoform X5) c4(302432) c5(302433, 302434, 302435, 302436, 302437, 302438) c6( ) c7(cj); #c1(TRMT5) c2(NP_065861) c3(tRNA (guanine(37)-N1)-methyltransferase) c4(205944) c5(205945, 205946, 205947, 205948, 205949, 205950) c6( ) c7(fq); #c1(TRMU) c2(NP_001269711) c3(mitochondrial tRNA-specific 2-thiouridylase 1 isoform d) c4( ) c5(102682) c6( ) c7(bL, gk, cc, ac, mG, aI, hI, cQu, cQt, bgR, ajU); #c1(TRMU) c2(NP_060476) c3(mitochondrial tRNA-specific 2-thiouridylase 1 isoform a) c4(196129, 196130) c5(196131, 196132, 196133, 196134, 196135, 196136, 196137, 196138, 196139) c6( ) c7(bL, gk, cc, ac, mG, aI, hI, cQu, cQt, bgR, ajU); #c1(TRMU) c2(XP_005261738) c3(mitochondrial tRNA-specific 2-thiouridylase 1 isoform X6) c4( ) c5(277594) c6( ) c7(bL, gk, cc, ac, mG, aI, hI, cQu, cQt, bgR, ajU); #c1(TRMU) c2(XP_011528575) c3(mitochondrial tRNA-specific 2-thiouridylase 1 isoform X4) c4(323725, 323726) c5(323727, 323728, 323729, 323730, 323731, 323732, 323733, 323734, 323735, 323736, 323737, 323738, 323739, 323740, 323741, 323742, 323743, 323744, 323745, 323746, 323747, 323748, 323749, 323750) c6( ) c7(bL, gk, cc, ac, mG, aI, hI, cQu, cQt, bgR, ajU); #c1(TRMU) c2(XP_011528577) c3(mitochondrial tRNA-specific 2-thiouridylase 1 isoform X5) c4( ) c5(323751) c6( ) c7(bL, gk, cc, ac, mG, aI, hI, cQu, cQt, bgR, ajU); #c1(TR0) c2(NP_001034794) c3(trophinin isoform 5) c4(32279, 32280, 32281) c5(32282, 32283, 32284, 32285, 32286, 32287) c6( ) c7(dP, Vs, T, hB, afc, io, aq, Ld, bu, iR, t, bz, B); #c1(TR0) c2(NP_001258112) c3(trophinin isoform 6) c4( ) c5(95964, 95965, 95966, 95967, 95968, 95969) c6( ) c7(dP, Vs, T, hB, afc, io, aq, Ld, bu, iR, t, bz, B); #c1(TR0) c2(NP_001258113) c3(trophinin isoform 7) c4(95970, 95971) c5(95972, 95973, 95974, 95975, 95976, 95977, 95978) c6( ) c7(dP, Vs, T, hB, afc, io, aq, Ld, bu, iR, t, bz, B); #c1(TR0) c2(NP_057241) c3(trophinin isoform 2) c4(189688, 189689, 189690) c5(189691, 189692, 189693, 189694, 189695, 189696, 189697, 189698, 189699, 189700) c6( ) c7(dP, Vs, T, hB, afc, io, aq, Ld, bu, iR, t, bz, B); #c1(TR0) c2(NP_808225) c3(trophinin isoform 4) c4(252725) c5(252726, 252727, 252728, 252729, 252730, 252731, 252732, 252733, 252734, 252735, 252736, 252737) c6( ) c7(dP, Vs, T, hB, afc, io, aq, Ld, bu, iR, t, bz, B); #c1(TR0) c2(XP_006724668) c3(trophinin isoform X3) c4(296186, 296187, 296188, 296189) c5(296190, 296191, 296192, 296193, 296194, 296195, 296196, 296197, 296198, 296199, 296200, 296201, 296202, 296203, 296204, 296205, 296206, 296207, 296208, 296209, 296210, 296211, 296212, 296213, 296214, 296215, 296216, 296217, 296218, 296219, 296220, 296221, 296222, 296223, 296224, 296225, 296226, 296227, 296228, 296229, 296230, 296231, 296232, 296233, 296234, 296235, 296236, 296237, 296238, 296239, 296240, 296241, 296242, 296243, 296244, 296245, 296246, 296247, 296248, 296249) c6( ) c7(dP, Vs, T, hB, afc, io, aq, Ld, bu, iR, t, bz, B); #c1(TR0) c2(XP_011529117) c3(trophinin isoform X2) c4(324448, 324449, 324450) c5( ) c6( ) c7(dP, Vs, T, hB, afc, io, aq, Ld, bu, iR, t, bz, B); #c1(TR0VE2) c2(NP_001035828) c3(60 kDa SS-A/Ro ribonucleoprotein isoform 1) c4(33182) c5(33183, 33184, 33185, 33186, 33187, 33188) c6( ) c7(bnX, sN, cQn, aW, fN, aT, eZ, fL, mC); #c1(TR0VE2) c2(NP_001035829) c3(60 kDa SS-A/Ro ribonucleoprotein isoform 3) c4(33189, 33190) c5(33191, 33192, 33193, 33194, 33195, 33196) c6( ) c7(bnX, sN, cQn, aW, fN, aT, eZ, fL, mG); #c1(TR0VE2) c2(NP_001166995) c3(60 kDa SS-A/Ro ribonucleoprotein isoform 2) c4(68783, 68784) c5(68785, 68786, 68787, 68788, 68789, 68790, 68791, 68792, 68793, 68794, 68795, 68796, 68797, 68798, 68799) c6( ) c7(bnX, sN, cQn, aW, fN, aT, eZ, fL, mG); #c1(TR0VE2) c2(NP_001166996) c3(60 kDa SS-A/Ro ribonucleoprotein isoform 4) c4(68800) c5(68801, 68802, 68803, 68804, 68805, 68806, 68807, 68808, 68809, 68810, 68811, 68812) c6( ) c7(bnX, sN, cQn, aW, fN, aT, eZ, fL, mG); #c1(TR0VE2) c2(XP_011508224) c3(60 kDa SS-A/Ro ribonucleoprotein isoform X3) c4( ) c5(298853, 298854, 298855, 298856, 298857) c6( ) c7(bnX, sN, cQn, aW, fN, aT, eZ, fL, mG); #c1(TRPA1) c2(XP_011515926) c3(transient receptor potential cation channel subfamily A member 1 isoform X2) c4(309075) c5(309076, 309077, 309078, 309079, 309080, 309081) c6( ) c7(bM, T, oe, aw, azd, auq, aj, fu, IN, cQw, V, cd, J, ai, dP, ft, aTT, ji, af, cQv, ES, sp, mQ, zD, bz, cmk, iP, ac, bP, lI, xZ, bTg); #c1(TRPA1) c2(XP_011515927) c3(transient receptor potential cation channel subfamily A member 1 isoform X1) c4( ) c5(309082, 309083, 309084, 309085, 309086, 309087) c6( ) c7(bM, T, oe, aw, azd, auq, aj, fu, lN, cQw, V, cd, J, ai, dP, ft, aTT, ji, af, cQv, ES, sp, mQ, zD, bz, cmk, iP, ac, bP, lI, xZ, bTg); #c1(TRPC1) c2(NP_001238774) c3(short transient receptor potential channel 1 isoform 1) c4(87900, 87901) c5(87902, 87903, 87904, 87905, 87906, 87907) c6( ) c7(bL, lD, T, eR, cz, hB, qj, ci, vN, ad, eA, BY, aT, K, bq, ae, Zm, bsK, A, aW, Y, Vk, bz, eM, bE, pg, y, pC); #c1(TRPC1) c2(NP_003295) c3(short transient receptor potential channel 1 isoform 2) c4(137211) c5(137212, 137213, 137214, 137215, 137216, 137217, 137218) c6( ) c7(bL, lD, T, eR, cz, hB, qj, ci, vN, ad, eA, BY, aT, K, bq, ae, Zm, bsK, A, aW, Y, Vk, bz, eM, bE, pg, y, pC); #c1(TRPC1) c2(XP_005247796) c3(short transient receptor potential channel 1 isoform X2) c4( ) c5(267996, 267997, 267998, 267999, 268000) c6( ) c7(bL, lD, T, eR, cz, bB, qj, ci, vN, ad, eA, BY, aT, K, bq, ae, Zm, bsK, A, aW, Y, Vk, bz, eM, bE, pg, y, pC); #c1(TRPC3) c2(NP_001124170) c3(short transient receptor potential channel 3 isoform a) c4(48387) c5(48388, 48389, 48390, 48391, 48392, 48393, 48394, 48395, 48396, 48397, 48398, 48399, 48400, 48401, 48402, 48403, 48404, 48405) c6( ) c7(lD, T, mr, cz, j, cd, ad, BY, fU, cF, bK, K, akr, SD, ae, azh, sj, t, qa, alC, ky, m, lC, iu, cQx); #c1(TRPC3) c2(NP_003296) c3(short transient receptor potential channel 3 isoform b) c4(137219, 137220) c5(137221, 137222, 137223, 137224, 137225) c6( ) c7(lD, T, mr, cz, j, cd, ad, BY, fU, cF, bK, K, akr, SD, ae, azh, sj, t, qa, alC, ky, m, lC, iu, cQx); #c1(TRPC3) c2(XP_011530520) c3(short transient receptor potential channel 3 isoform X2) c4( ) c5(326448) c6( ) c7(lD, T, mr, cz, j, cd, ad, BY, fU, cF, bK, K, akr, SD, ae, azh, sj, t, qa, alC, ky, m, lC, iu, cQx); #c1(TRPC3) c2(XP_011530521) c3(short transient receptor potential channel 3 isoform X3) c4(326449) c5( ) c6( ) c7(lD, T, mr, cz, j, cd, ad, BY, fU, cF, bK, K, akr, SD, ae, azh, sj, t, qa, alC, ky, m, lC, iu, cQx); #c1(TRPC4) c2(NP_001129427) c3(short transient receptor potential channel 4 isoform beta) c4(51483) c5(51484, 51485, 51486, 51487, 51488, 51489) c6( ) c7(ac, aw, cD, pg, fr, hg, bX, ir, lC, fq); #c1(TRPC4) c2(NP_001129428) c3(short transient receptor potential channel 4 isoform gamma) c4(51490, 51491) c5(51492, 51493, 51494, 51495, 51496, 51497, 51498, 51499, 51500, 51501, 51502, 51503) c6( ) c7(ac, aw, cD, pg, fr, hg, bX, ir, lC, fq); #c1(TRPC4) c2(NP_001129429) c3(short transient receptor potential channel 4 isoform delta) c4(51504) c5(51505, 51506, 51507, 51508, 51509, 51510, 51511, 51512, 51513, 51514) c6( ) c7(ac, aw, cD, pg, fr, hg, bX, ir, lC, fq); #c1(TRPC4) c2(NP_001129430) c3(short transient receptor potential channel 4 isoform zeta) c4(51515) c5(51516, 51517, 51518, 51519, 51520, 51521, 51522, 51523, 51524, 51525) c6( ) c7(ac, aw, cD, pg, fr, hg, bX, ir, lC, fq); #c1(TRPC4) c2(NP_003297) c3(short transient receptor potential channel 4 isoform epsilon) c4(137226) c5(137227, 137228, 137229, 137230, 137231, 137232) c6( ) c7(ac, aw, cD, pg, fr, hg, bX, ir, lC, fq); #c1(TRPC4) c2(NP_057263) c3(short transient receptor potential channel 4 isoform alpha) c4(189753) c5(189754, 189755, 189756, 189757, 189758, 189759) c6( ) c7(ac, aw, cD, pg, fr, hg, bX, ir, lC, fq); #c1(TRPC4AP) c2(NP_955400) c3(short transient receptor potential channel 4-associated protein isoform b) c4(261710) c5(261711, 261712, 261713, 261714, 261715, 261716) c6( ) c7(bNX, T, af); #c1(TRPC4AP) c2(XP_011527072) c3(short transient receptor potential channel 4-associated protein isoform X1) c4(321522, 321523, 321524) c5(321525, 321526, 321527, 321528, 321529, 321530, 321531, 321532, 321533, 321534, 321535, 321536, 321537, 321538, 321539, 321540, 321541, 321542) c6( ) c7(bNX, T, af); #c1(TRPC4AP) c2(XP_011527076) c3(short transient receptor potential channel 4-associated protein isoform X5) c4(321543) c5(321544, 321545, 321546, 321547, 321548, 321549) c6( ) c7(bNX, T, af); #c1(TRPC5) c2(NP_036603) c3(short transient receptor potential channel 5) c4(174755) c5(174756, 174757, 174758, 174759, 174760, 174761) c6( ) c7(fU, T, cz, dy, nA, y, hq); #c1(TRPC6) c2(NP_004612) c3(short transient receptor potential channel 6) c4(148158, 148159) c5(148160, 148161, 148162, 148163, 148164, 148165, 148166, 148167, 148168, 148169, 148170, 148171) c6( ) c7(bL, lD, T, eR, dK, e, uv, al, aA, cz, wo, aj, dG, ah, ci, cQy, aY, cd, J, ad, BY, eA, bEk, vw, IG, K, Bz, he, ae, aa, sj, wC, d, ff, gi, cr, vs, aF, en, ir, t, Bx, sk, at, dy, m, lC, uL); #c1(TRPC7) c2(NP_001161048) c3(short transient receptor potential channel 7 isoform 3) c4(65208, 65209) c5(65210, 65211, 65212, 65213, 65214, 65215, 65216, 65217, 65218, 65219, 65220, 65221) c6( ) c7(Y, aj, bK, oi, bw, fq); #c1(TRPC7) c2(NP_001161049) c3(short transient receptor potential channel 7 isoform 2) c4(65222) c5(65223, 65224, 65225, 65226, 65227, 65228) c6( ) c7(Y, aj, bK, oi, bw, fq); #c1(TRPC7) c2(NP_065122) c3(short transient receptor potential channel 7 isoform 1) c4(204053) c5(204054, 204055, 204056, 204057, 204058, 204059) c6( ) c7(Y, aj, bK, oi, bw, fq); #c1(TRPM1) c2(NP_001238949) c3(transient receptor potential cation channel subfamily M member 1 isoform 1) c4(88055, 88056, 88057) c5(88058, 88059, 88060, 88061, 88062, 88063, 88064, 88065) c6( ) c7(Dy, dY, Y, cQA, cQz, ahV, cp, cyN); #c1(TRPM1) c2(NP_001238953) c3(transient receptor potential cation channel subfamily M member 1 isoform 3) c4( ) c5(88066, 88067, 88068, 88069, 88070, 88071) c6( ) c7(Dy, dY, Y, cQA, cQz, ahV, cp, cyN); #c1(TRPM1) c2(NP_001238959) c3(transient receptor potential cation channel subfamily M member 1 isoform 4) c4(88072) c5(88073, 88074, 88075, 88076, 88077, 88078) c6( ) c7(Dy, dY, Y, cQA, cQz, ahV, cp, cyN); #c1(TRPM1) c2(NP_002411) c3(transient receptor potential cation channel subfamily M member 1 isoform 2) c4(128200, 128201, 128202) c5(128203, 128204, 128205, 128206, 128207, 128208, 128209, 128210, 128211, 128212, 128213, 128214, 128215, 128216, 128217, 128218, 128219, 128220, 128221, 128222, 128223, 128224) c6( ) c7(Dy, dY, Y, cQA, cQz, ahV, cp, cyN); #c1(TRPM2) c2(XP_005261228) c3(transient receptor potential cation channel subfamily M member 2 isoform X1) c4(277277) c5(277278, 277279, 277280, 277281, 277282, 277283, 277284, 277285, 277286, 277287) c6( ) c7(bL, T, c, cA, lI, aW, Y, ha, aT, TQ, n, aj, iD, bK, ci, K, lN, oi, J, ad); #c1(TRPM2) c2(XP_006724112) c3(transient receptor potential cation channel subfamily M member 2 isoform X5) c4(295752, 295753) c5(295754, 295755, 295756, 295757, 295758, 295759, 295760, 295761, 295762, 295763, 295764, 295765, 295766, 295767, 295768, 295769, 295770, 295771) c6( ) c7(bL, T, c, cA, lI, aW, Y, ha, aT, TQ, n, aj, iD, bK, ci, K, lN, oi, J, ad); #c1(TRPM2) c2(XP_011528037) c3(transient receptor potential cation channel subfamily M member 2 isoform X2) c4( ) c5(323137) c6( ) c7(bL, T, c, cA, lI, aW, Y, ha, aT TQ, n, aj, iD, bK, ci, K, lN, oi, J, ad); #c1(TRPM2) c2(XP_011528038) c3(transient receptor potential cation channel subfamily M member 2 isoform X3) c4(323138) c5( ) c6( ) c7(bL, T, c, cA, lI, aW, Y, ha, aT, TQ, n, aj, iD, bK, ci, K, lN, oi, J, ad); #c1(TRPM3) c2(NP_001007472) c3(transient receptor potential cation channel subfamily M member 3 isoform k) c4(22742) c5(22743, 22744, 22745, 22746, 22747, 22748) c6( ) c7(cc, py, ac, dY, aw, j, aXL, xa); #c1(TRPM3) c2(NP_066003) c3(transient receptor potential cation channel subfamily M member 3 isoform a) c4(206715, 206716) c5( ) c6( ) c7(cc, py, ac, dY, aw, j, aXL, xa); #c1(TRPM3) c2(NP_079247) c3(transient receptor potential cation channel subfamily M member 3 isoform b) c4(217592) c5( ) c6( ) c7(cc, py, ac, dY, aw, j, aXL, xa); #c1(TRPM3) c2(NP_996827) c3(transient receptor potential cation channel subfamily M member 3 isoform d) c4(264672) c5( ) c6( ) c7(cc, py, ac, dY, aw, j, aXL, xa); #c1(TRPM3) c2(NP_996828) c3(transient receptor potential cation channel subfamily M member 3 isoform e) c4(264673) c5( ) c6( ) c7(cc, py, ac, dY, aw, j, aXL, xa); #c1(TRPM3) c2(NP_996829) c3(transient receptor potential cation channel subfamily M member 3 isoform f) c4(264674) c5( ) c6( ) c7(cc, py, ac, dY, aw, j, aXL, xa); #c1(TRPM3) c2(NP_996830) c3(transient receptor potential cation channel subfamily M member 3 isoform g) c4(264675) c5( ) c6( ) c7(cc, py, ac, dY, aw, j, aXL, xa); #c1(TRPM3) c2(NP_996831) c3(transient receptor potential cation channel subfamily M member 3 isoform h) c4( ) c5(264676, 264677, 264678, 264679, 264680, 264681, 264682, 264683, 264684, 264685) c6( ) c7(cc, py, ac, dY, aw, j, aXL, xa); #c1(TRPM3) c2(XP_011517337) c3(transient receptor potential cation channel subfamily M member 3 isoform X1) c4(311018) c5(311019, 311020, 311021, 311022, 311023, 311024, 311025) c6( ) c7(cc, py, ac, dY, aw, j, aXL, xa); #c1(TRPM3) c2(XP_011517340) c3(transient receptor potential cation channel subfamily M member 3 isoform X4) c4( ) c5(311026, 311027, 311028, 311029, 311030, 311031, 311032, 311033, 311034, 311035) c6( ) c7(cc, py, ac, dY, aw, j, aXL, xa); #c1(TRPM3) c2(XP_011517341) c3(transient receptor potential cation channel subfamily M member 3 isoform X5) c4( ) c5(311036, 311037, 311038, 311039, 311040, 311041, 311042, 311043, 311044, 311045) c6( ) c7(cc, py, ac, dY, aw, j, aXL, xa); #c1(TRPM3) c2(XP_011517343) c3(transient receptor potential cation channel subfamily M member 3 isoform X7) c4( ) c5(311046, 311047, 311048, 311049, 311050, 311051, 311052, 311053, 311054, 311055) c6( ) c7(cc, py, ac, dY, aw, j, aXL, xa); #c1(TRPM3) c2(XP_011517344) c3(transient receptor potential cation channel subfamily M member 3 isoform X8) c4(311056) c5(311057, 311058, 311059, 311060, 311061, 311062) c6( ) c7(cc, py, ac, dY, aw, j, aXL, xa); #c1(TRPM3) c2(XP_011517345) c3(transient receptor potential cation channel subfamily M member 3 isoform X9) c4( ) c5(311063, 311064, 311065, 311066, 311067, 311068) c6( ) c7(cc, py, ac, dY, aw, j, aXL, xa); #c1(TRPM3) c2(XP_011517346) c3(transient receptor potential cation channel subfamily M member 3 isoform X10) c4( ) c5(311069, 311070, 311071, 311072, 311073, 311074) c6( ) c7(cc, py, ac, dY, aw, j, aXL, xa); #c1(TRPM3) c2(XP_011517349) c3(transient receptor potential cation channel subfamily M member 3 isoform X13) c4(311075) c5(311076, 311077, 311078, 311079, 311080, 311081, 311082, 311083) c6( ) c7(cc, py, ac, dY, aw, j, aXL, xa); #c1(TRPM4) c2(NP_001182156) c3(transient receptor potential cation channel subfamily M member 4 isoform 2) c4(74624) c5(74625, 74626, 74627, 74628, 74629, 74630) c6( ) c7(ae, ajM, eo, K, C, bUw, V, cQB, ad); #c1(TRPM4) c2(NP_060106) c3(transient receptor potential cation channel subfamily M member 4 isoform 1) c4(194182) c5(194183, 194184, 194185, 194186, 194187, 194188) c6( ) c7(ae, ajM, eo, K, C, bUw, V, cQB, ad); #c1(TRPM4) c2(XP_005259074) c3(transient receptor potential cation channel subfamily M member 4 isoform X2) c4(275956) c5( ) c6( ) c7(ae, ajM, eo, K, C, bUw, V, cQB, ad); #c1(TRPM4) c2(XP_005259075) c3(transient receptor potential cation channel subfamily M member 4 isoform X3) c4( ) c5(275957) c6( ) c7(ae, ajM, eo, K, C, bUw, V, cQB, ad); #c1(TRPM4) c2(XP_011525348) c3(transient receptor potential cation channel subfamily M member 4 isoform X1) c4( ) c5(319812, 319813, 319814, 319815, 319816, 319817) c6( ) c7(ae, ajM, eo, K, C, bUw, V, cQB, ad); #c1(TRPM5) c2(NP_055370) c3(transient receptor potential cation channel subfamily M member 5) c4(180637, 180638, 180639) c5(180640, 180641, 180642, 180643, 180644, 180645, 180646, 180647, 180648, 180649, 180650, 180651, 180652, 180653, 180654, 180655, 180656, 180657, 180658, 180659) c6( ) c7(bL, aW, bv, g, aT); #c1(TRPM5) c2(XP_011518337) c3(transient receptor potential cation channel subfamily M member 5 isoform X1) c4(312337) c5(312338, 312339, 312340, 312341, 312342, 312343) c6( ) c7(bL, aW, bv, g, aT); #c1(TRPM6) c2(NP_001170781) c3(transient receptor potential cation channel subfamily M member 6 isoform b) c4(69512) c5(69513, 69514, 69515, 69516, 69517, 69518) c6( ) c7(bL, Tl, uv, cz, sH, aj, Bx, J); #c1(TRPM6) c2(NP_001170782) c3(transient receptor potential cation channel subfamily M member 6 isoform c) c4(69519) c5(69520, 69521, 69522, 69523, 69524, 69525) c6( ) c7(bL, Tl, uv, cz, sH, aj, Bx, J); #c1(TRPM6) c2(NP_060132) c3(transient receptor potential cation channel subfamily M member 6 isoform a) c4(194326, 194327, 194328) c5(194329, 194330, 194331, 194332, 194333, 194334, 194335, 194336, 194337, 194338, 194339, 194340, 194341, 194342, 194343, 194344, 194345, 194346) c6( ) c7(bL, Tl, uv, cz, sH, aj, Bx, J); #c1(TRPM6) c2(XP_011516550) c3(transient receptor potential cation channel subfamily M member 6 isoform X5) c4(309953) c5( ) c6( ) c7(bL, Tl, uv, cz, sH, aj, Bx, J); #c1(TRPM6) c2(XP_011516551) c3(transient receptor potential cation channel subfamily M member 6 isoform X6) c4( ) c5(309954, 309955, 309956, 309957, 309958, 309959) c6( ) c7(bL, Tl, uv, cz, sH, aj, Bx, J); #c1(TRPM6) c2(XP_011516552) c3(transient receptor potential cation channel subfamily M member 6 isoform X7) c4(309960) c5( ) c6( ) c7(bL, Tl, uv, cz, sH, aj, Bx, J); #c1(TRPM6) c2(XP_011516553) c3(transient receptor potential cation channel subfamily M member 6 isoform X8) c4(309961, 309962, 309963) c5( ) c6( ) c7(bL, Tl, uv, cz, sH, aj, Bx, J); #c1(TRPM6) c2(XP_011516554) c3(transient receptor potential cation channel subfamily M member 6 isoform X9) c4(309964) c5(309965, 309966, 309967, 309968, 309969, 309970, 309971, 309972, 309973, 309974, 309975, 309976) c6( ) c7(bL, Tl, uv, cz, sH, aj, Bx, J); #c1(TRPM6) c2(XP_011516555) c3(transient receptor potential cation channel subfamily M member 6 isoform X10) c4( ) c5(309977, 309978, 309979, 309980, 309981, 309982) c6( ) c7(bL, Tl, uv, cz, sH, aj, Bx, J); #c1(TRPM6) c2(XP_011516557) c3(transient receptor potential cation channel subfamily M member 6 isoform X12) c4( ) c5(309983, 309984, 309985, 309986, 309987, 309988, 309989, 309990, 309991, 309992, 309993, 309994) c6( ) c7(bL, Tl, uv, cz, sH, aj, Bx, J); #c1(TRPM7) c2(NP_060142) c3(transient receptor potential cation channel subfamily M member 7 isoform a) c4(194420) c5(194421, 194422, 194423, 194424, 194425, 194426) c6( ) c7(bL, T, mr, byf, e, al, aA, cz, aj, dG, ci, eJ, J, M, aT, lG, cy, K, an, eu, s, Jl, aW, Y, aav, aF, mo, Bx, ac, c, U, aS); #c1(TRPM8) c2(NP_076985) c3(transient receptor potential cation channel subfamily M member 8) c4(214601, 214602, 214603, 214604) c5(214605, 214606, 214607, 214608, 214609, 214610, 214611, 214612, 214613, 214614, 214615, 214616, 214617, 214618, 214619, 214620, 214621, 214622, 214623, 214624, 214625, 214626, 214627) c6( ) c7(gh, cZ, T, bM, auq, v, ur, uu, q, ad, crU, pX, aT, dd, ae, aW, xi, Y, eH, ff, r, kp, en, g, eF, vo, cm, bz, jb, Jp); #c1(TRPM8) c2(XP_011510112) c3(transient receptor potential cation channel subfamily M member 8 isoform X1) c4( ) c5(300710, 300711) c6( ) c7(gh, cZ, T, bM, auq, v, ur, uu, q, ad, crU, pX, aT, dd, ae, aW, xi, Y, eH, ff, r, kp, en, g, eF, vo, cm, bz, jb, Jp); #c1(TRPS1) c2(NP_001269831) c3(zinc finger transcription factor Trps1 isoform 2) c4(102920) c5(102921, 102922, 102923, 102924, 102925, 102926) c6( ) c7(rV, oe, cz, asM, ci, bX, zP, ad, cF, boY, Db, aT, ae, bdw, Dg, zQ, TY, aW, cQD, Az, eH, cQC, aSt, mv, eF, dr, EW, ac, auZ, gZ, y, bt); #c1(TRPS1) c2(XP_011515568) c3(zinc finger transcription factor Trps1 isoform X2) c4(308405) c5(308406, 308407, 308408, 308409, 308410, 308411, 308412) c6( ) c7(rV, oe, cz, asM, ci, bX, zP, ad, cF, boY, Db, aT, ae, bdw, Dg, zQ, TY, aW, cQD, Az, eH, cQC, aSt, mv, eF, dr, EW, ac, auZ, gZ, y, bt); #c1(TRPS1) c2(XP_011515569) c3(zinc finger transcription factor Trps1 isoform X1) c4(308413) c5(308414) c6( ) c7(rV, oe, cz, asM, ci, bX, zP, ad, cF, boY, Db, aT, ae, bdw, Dg, zQ, TY, aW, cQD, Az, eH, cQC, aSt, mv, eF, dr, EW, ac, auZ, gZ, y, bt); #c1(TRPS1) c2(XP_011515570) c3(zinc finger transcription factor Trps1 isoform X3) c4( ) c5(308415, 308416, 308417, 308418, 308419) c6( ) c7(rV, oe, cz, asM, ci, bX, zP, ad, cF, boY, Db, aT, ae, bdw, Dg, zQ, TY, aW, cQD, Az, eH, cQC, aSt, mv, eF, dr, EW, ac, auZ, gZ, y, bt); #c1(TRPV1) c2(NP_542437) c3(transient receptor potential cation channel subfamily V member 1) c4(232940, 232941, 232942, 232943) c5(232944, 232945, 232946, 232947, 232948, 232949, 232950, 232951, 232952, 232953, 232954, 232955, 232956, 232957, 232958, 232959, 232960, 232961, 232962, 232963, 232964, 232965, 232966, 232967, 232968, 232969, 232970, 232971, 232972, 232973, 232974, 232975, 232976, 232977, 232978, 232979) c6( ) c7(bM, cZ, T, dD, akd, e, uv, azd, alH, ur, cQH, uu, pM, dG, aj, v, eq, ai, J, ad, aAq, cQF, dP, eA, uT, Jb, pX, cE, h, cy, dL, K, UN, dd, aNR, aDW, ae, eL, bEV, Dl, aFs, tn, d, mQ, fc, fQ, aiL, cQE, akY, gu, coP, as, iV, cm, jb, DF, bN, ar, D, Ta, iI, bP, iO, xZ, uR, at, cQG, ra, zB, bFC, y, Tc); #c1(TRPV2) c2(NP_057197) c3(transient receptor potential cation channel subfamily V member 2) c4(189449) c5(189450, 189451, 189452, 189453, 189454, 189455) c6( ) c7(T, cc, d, id, lI, Ae, eL, e, xs, fd, dL, lN, bgq, ae, eA, ad); #c1(TRPV2) c2(XP_006721606) c3(transient receptor potential cation channel subfamily V member 2 isoform X4) c4(294118) c5( ) c6( ) c7(T, cc, d, id, lI, Ae, eL, e, xs, fd, dL, lN, bgq, ae, eA, ad); #c1(TRPV2) c2(XP_011522226) c3(transient receptor potential cation channel subfamily V member 2 isoform X8) c4( ) c5(316850, 316851, 316852, 316853, 316854, 316855) c6( ) c7(T, cc, d, id, lI, Ae, eL, e, xs, fd, dL, lN, bgq, ae, eA, ad); #c1(TRPV3) c2(NP_001245134) c3(transient receptor potential cation channel subfamily V member 3 isoform 1) c4(92539, 92540) c5(92541, 92542, 92543, 92544, 92545, 92546, 92547, 92548, 92549, 92550, 92551, 92552) c6( ) c7(cZ, cQI, ccA, dN, ur, lQ, uu, dd, eE); #c1(TRPV3) c2(NP_659505) c3(transient receptor potential cation channel subfamily V member 3 isoform 2) c4(240270) c5(240271, 240272, 240273, 240274, 240275, 240276, 240277, 240278, 240279, 240280) c6( ) c7(cZ, cQI, ccA, dN, ur, lQ, uu, dd, eE); #c1(TRPV4) c2(NP_001170902) c3(transient receptor potential cation channel subfamily V member 4 isoform d) c4(69591) c5(69592, 69593, 69594, 69595, 69596, 69597) c6( ) c7(bM, Pt, bBr, cV, cQO, fu, bX, pM, Qn, fw, aR, zw, no, cQN, cEK, Jb, rw, Ak, kf, cQJ, UN, K, bU, bV, rv, cQQ, cQM, bA, azh, Oq, ao, bT, cQS, zD, cQL, fe, cnP, iO, cQR, ql, xZ, cQP, cQK, U, MM, at, wB, bk, aSk, jr); #c1(TRPV4) c2(XP_005253975) c3(transient receptor potential cation channel subfamily V member 4 isoform X2) c4(272839) c5(272840, 272841, 272842, 272843, 272844, 272845, 272846, 272847, 272848, 272849) c6( ) c7(bM, Pt, bBr, cV, cQO, fu, bX, pM, Qo, fw, aR, zw, no, cQN, cEK, Jb, rw, Ak, kf, cQJ, UN, K, bU, bV, n, cQQ, cQM, bA, azh, Oq, ao, bT, cQS, zD, cQL, fe, cnP, iO, cQR, qI, xZ, cQP, cQK, U, MM, at, wB, bk, aSk, jr); #c1(TRPV4) c2(XP_011536933) c3(transient receptor potential cation channel subfamily V member 4 isoform X3) c4(334603) c5(334604, 334605, 334606, 334607, 334608, 334609, 334610, 334611, 334612, 334613) c6( ) c7(bM, Pt, bBr, cV, cQO, fu, bX, pM, Qo, fw, aR, zw, no, cQN, cEK, Jb, rw, Ak, kf, cQJ, UN, K, bU, bV, rv, cQQ, cQM, bA, azh, Oq, an, bT, cQS, zD, cQL, fe, cnP, iO, cQR, qI, xZ, cQP, cQK, U, MM, at, wB, bk, aSk, jr); #c1(TRPV4) c2(XP_011536934) c3(transient receptor potential cation channel subfamily V member 4 isoform X1) c4(334614) c5(334615, 334616, 334617, 334618, 334619, 334620, 334621, 334622, 334623, 334624) c6( ) c7(bM, Pt, bBr, cV, cQO, fu, bX, pM, Qo, fw, aR, zw, no, cQN, cEK, Jb, rw, Ak, kf, cQJ, UN, K, bU, bV, n, cQQ, cQM, bA, azh, Oq, ao, bT, cQS, zD, cQL, fe, cnP, iO, cQR, qI, xZ, cQP, cQK, U, MM, at, wB, bk, aSk, jr); #c1(TRPV4) c2(XP_011536935) c3(transient receptor potential cation channel subfamily V member 4 isoform X4) c4(334625) c5(334626, 334627, 334628, 334629, 334630, 334631) c6( ) c7(bM, Pt, bBr, cV, cQO, fu, bX, pM, Qo, fw, aR, zw, no, cQN, cEK, Jb, rw, Ak, kf, cQJ, UN, K, bU, bV, rv, cQQ, cQM, bA, azh, Oq, ao, bT, cQS, zD, cQL, fe, cnP, iO, cQR, qI, xZ, cQP, cQK, U, MM, at, wB, bk, aSk, jr); #c1(TRPV5) c2(NP_062815) c3(transient receptor potential cation channel subfamily V member 5) c4(202089, 202090) c5(202091, 202092, 202093, 202094, 202095, 202096, 202097, 202098, 202099, 202100, 202101, 202102) c6( ) c7(ck, Tl, iT, ig, aAP, aoo, cz, aj, afV, bWB, K, C, ars, J); #c1(TRPV6) c2(NP_061116) c3(transient receptor potential cation channel subfamily V member 6) c4(199179, 199180) c5(199181, 199182, 199183, 199184, 199185, 199186, 199187, 199188, 199189, 199190, 199191, 199192) c6( ) c7(T, aYJ, if, jh, bB, Fb, ci, nA, cd, q, ad, aT, Ko, K, lQ, bK, an, UK, ae, azh, kl, aW, r, g, qa, dr, ck, alC, ig, bE, m, im); #c1(TRRAP) c2(NP_001231509) c3(transformation/transcription domain-associated protein isoform 1) c4(87267) c5(87268, 87269, 87270, 87271, 87272, 87273, 87274, 87275, 87276) c6( ) c7(BI, T, Y, eD, rU, U, jh, rO, bUo, ae, ad); #c1(TRRAP) c2(NP_003487) c3(transformation/transcription domain-associated protein isoform 2) c4(138726, 138727) c5(138728, 138729, 138730, 138731, 138732, 138733, 138734, 138735, 138736, 138737, 138738, 138739) c6( ) c7(BI, T, Y, eD, rU, U, jh, rO, bUo, ae, ad); #c1(TSACC) c2(NP_001291755) c3(TSSK6-activating co-chaperone protein isoform c) c4(116478) c5(116479, 116480, 116481, 116482, 116483) c6( ) c7(cc, aE, iA, aW, aA, aT, aF, fr, eA); #c1(TSACC) c2(NP_653228) c3(TSSK6-activating co-chaperone protein isoform a) c4( ) c5(239206, 239207, 239208, 239209, 239210, 239211, 239212, 239213, 239214, 239215, 239216, 239217, 239218, 239219, 239220, 239221, 239222) c6( ) c7(cc, aE, iA, aW, aA, aT, aF, fr, eA); #c1(TSC1) c2(NP_001155899) c3(hamartin isoform 4) c4(61632, 61633, 61634) c5(61635, 61636, 61637, 61638, 61639, 61640) c6( ) c7(T, jW, Js, hV, ea, if, pf, al, Xi, Ir, fd, bB, ci, aY, ip, x, bv, aE, Xc, il, cQT, pX, aeO, Qk, avA, ajv, iv, gs, K, aDZ, hu, bOZ, pk, eL, aa, auQ, yo, aeR, Jl, aW, Ls, CT, dg, g, as, eF, zE, ir, cm, apB, bw, iP, qJ, eM, nB, iA, lM, iT, go, wB, cj, iS, QF, cX, azg, m, in, ik, iu, sc, asW, dD, lT, ht, cQU, Bm, n, aj, fr, nA, qN, hr, Mo, ft, jz, Do, gd, h, yZ, afV, dL, is, Xh, pi, aeJ, cC, Lg, Dg, asp, CN, iw, alt, ks, aq, agF, kp, pm, alf, oU, iO, byI, YE, bP, ky, dB, hk, Vy, hL, hR, pg, HB, MW, SZ, avr, YH, anx, Qz, it, B, Jo, aAE, bL, fM, yk, jx, fZ, aA, cz, hy, bol, yO, Qo, yU, lu, q, J, er, eA, XX, oT, mj, Rl, Ig, nv, hb, qK, aT, cxs, dz, zp, jj, rz, ae, ne, jf, qw, Uf, Yw, s, nO, iU, Y, ev, Lf, r, baP, lo, eS, Lc, en, bu, cl, t, ho, iK, bN, ck, sS, nM, kP, Dy, QG, gX, aJQ, dy, zu, bt, VB, hS, Mb, hl, kh, id, pY, ha, mL, jh, KO, aZ, Fb, Gn, jE, eq, adg, hF, Fc, anu, xt, ad, hX, Jm, dP, av, hd, ib, py, iC, bjn, Db, bkq, NS, arV, io, hD, bj, hP, ji, nJ, aAL, d, BN, aQp, bug, BO, TY, vj, et, qt, eH, cr, ff, Ej, Xj, aF, iR, bz, dr, ga, bF, es, gk, Ew, bE, afd, aS, bC, MC, buL, kS, X); #c1(TSC1) c2(XP_006717335) c3(hamartin isoform X2) c4( ) c5(290921, 290922, 290923, 290924, 290925, 290926, 290927, 290928, 290929, 290930, 290931, 290932, 290933, 290934, 290935, 290936, 290937, 290938) c6( ) c7(T, jW, Js, hV, ea, if, pf, al, Xi, Ir, fd, bB, ci, aY, ip, x, bv, aE, Xc, il, cQT, pX, aeO, Qk, avA, ajv, iv, gs, K, aDZ, hu, bOZ, pk, eL, aa, auQ, yo, aeR, JL, aW, Ls, CT, dg, g, as, eF, zE, ir, cm, apB, bw, iP, qJ, eM, nB, iA, IM, iT, go, wB, cj, iS, QF, cX, azg, m, in, ik, iu, sc, asW, dD, lT, ht, cQU, Bm, n, aj, fr, nA, qN, hr, Mo, ft, jz, Do, gd, h, yZ, afV, dL, is, Xh, pi, aeJ, cC, Lg, Dg, asp, CN, iw, alt, ks, aq, agF, kp, pm, alf, oU, iO, byI, YE, bP, ky, dB, hk, Vy, hL, hR, pg, HB, MW, SZ, avr, YH, anx, Qz, it, B, Jo, aAE, bL, fM, yk, jx, fZ, aA, cz, hy, boI, yO, Qo, yU, lu, q, J, er, eA, XX, oT, mj, Rl, lg, nv, hb, gK, aT, cxs, dz, zp, jj, rz, ae, ne, jf, gw, Uf, Yw, s, nO, iU, Y, ev, Lf, r, baP, lo, eS, Lc, en, bu, cl, t, ho, iK, bN, ck, sS, nM, kP, Dy, QG, gX, aJQ, dy, zu, bt, VB, hS, Mb, hl, kh, id, pY, ha, ml, jh, KO, oZ, Fb, Gn, jE, eq, adg, hF, Fc, anu, xt, ad, hX, Jm, dP, av, hd, ib, py, iC, bjn, Db, bkq, NS, arV, io, hD, bj, hP, ji, nJ, aAL, d, BN, aQp, bug, BO, TY, vj, et, qt, eH, cr, ff, Ej, Xj, aF, iR, bz, dr, qa, bF, es, gk, Ew, bE, afd, aS, bC, MG, buL, kS, X); #c1(TSC1) c2(XP_011517281) c3(hamartin isoform X1) c4(310870, 310871) c5(310872, 310873, 310874, 310875, 310876, 310877, 310878, 310879, 310880, 310881) c6( ) c7(T, jW, Js, hV, ea, if, pf, al, Xi, Ir, fd, bB, ci, aY, ip, x, bv, aE, Xc, il, cQT, pX, aeO, Qk, avA, ajv, iv, gs, K, aDZ, hu, bOZ, pk, eL, aa, auQ, yo, aeR, JI, aW, Ls, CT, dg, g, as, eF, zE, ir, cm, apB, bw, iP, gJ, eM, nB, iA, IM, iT, go, wB, cj, iS, QF, cX, azg, m, in, ik, iu, sc, asW, dD, lT, ht, cQU, Bm, n, aj, fr, nA, qN, br, Mo, ft, jz, Do, gd, h, yZ, afV, dL, is, Xh, pi, aeJ, cC, Lg, Dg, asp, CN, iw, alt, ks, aq, agF, kp, pm, alf, oU, iO, byI, YE, bP, ky, dB, hk, Vy, hL, hR, pg, HB, MW, SZ, avr, YH, anx, Qz, it, B, Jo, aAE, bL, fM, yk, jx, fZ, aA, cz, hy, bol, yO, Qo, yU, lu, q, J, er, eA, XX, oT, mj, RI, lg, nv, hb, qK, aT, cxs, dz, zp, jj, rz, ae, ne, jf, qw, Uf, Yw, s, nO, iU, Y, ev, Lf, r, baP, lo, eS, Lc, en, bu, cl, t, ho, iK, bN, ck, sS, nM, kP, Dy, QG, gX, aJQ, dy, zu, bt, VB, hS, Mb, hl, kh, id, pY, ha, ml, jh, KO, oZ, Fb, Gn, jE, eq, adg, hF, Fc, anu, xt, ad, hX, Jm, dP, av, hd, ib, py, iC, bjn, Db, bkq, NS, arV, io, hD, bj, hP, ji, nJ, aAL, d, BN, aQp, bug, BO, TY, vj, et, qt, eH, cr, ff, Ej, Xj, aF, iR, bz, dr, qa, bF, es, gk, Ew, bE, afd, aS, bC, MG, buL, kS, X); #c1(TSC2) c2(NP_000539) c3(tuberin isoform 1) c4(12398) c5(12399, 12400, 12401, 12402, 12403, 12404) c6( ) c7(T, aC, pf, Xi, lr, fd, ci, aY, aR, K, Nj, bOZ, MO, pk, aa, yo, aW, g, as, JI, iA, go, vA, wB, vF, ik, cE, bSp, cQU, n, aj, fr, PY, nA, Mo, cty, KN, h, dL, Xh, Lg, cC, awV, alt, op, hq, bP, dB, eD, hL, cB, eA, J, lg, hb, HC, aT, an, rz, af, jf, bf, s, Y, en, bN, dy, bt, hl, id, arS, ha, jE, hF, anu, bKb, xt, hX, Jm, iC, bkq, ib, Db, NS, arV, ff, Xj, Z, bz, dr, es, MG, IM, X); #c1(TSC2) c2(NP_001107854) c3(tuberin isoform 5) c4(43033) c5(43034, 43035, 43036, 43037, 43038, 43039) c6( ) c7(T, aC, pf, Xi, Ir, fd, ci, aY, aR, K, Nj, bOZ, MO, pk, aa, yo, aW, g, as, JI, iA, go, vA, wB, vF, ik, cE, bSp, cQU, n, aj, fr, PY, nA, Mo, cty, KN, h, dL, Xh, Lg, cC, awV, alt, op, hq, bP, dB, eD, hL, cB, eA, J, lg, hb, HC, aT, an, rz, af, jf, bf, s, Y, en, bN, dy, bt, hl, id, arS, ha, jE, hF, anu, bKb, xt, hX, Jm, iC, bkq, ib, Db, NS, arV, ff, Xj, Z, bz, dr, es, MG, IM, X); #c1(TSC2) c2(XP_005255586) c3(tuberin isoform XG) c4(273737) c5(273738, 273739, 273740, 273741, 273742, 273743) c6( ) c7(T, aC, pf, Xi, Ir, fd, ci, aY, aR, K, Nj, bOZ, MO, pk, aa, yo, aW, g, as, JI, iA, go, vA, wB, vF, ik, cE, bSp, cQU, n, aj, fr, PY, nA, Mo, cty, KN, h, dL, Xh, Lg, cC, awV, alt, op, hq, bP, dB, eD, hL, cB, eA, J, lg, hb, HC, aT, an, rz, af, jf, bf, s, Y, en, bN, dy, bt, hl, id, arS, ha, jE, hF, anu, bKb, xt, hX, Jm, iC, bkq, ib, Db, NS, arV, ff, Xj, Z, bz, dr, es, MG, IM, X); #c1(TSC2) c2(XP_005255588) c3(tuberin isoform X7) c4(273744, 273745) c5(273746, 273747, 273748, 273749, 273750, 273751, 273752, 273753, 273754, 273755, 273756, 273757) c6( ) c7(T, aC, pf, Xi, Ir, fd, ci, aY, aR, K, Nj, bOZ, MO, pk, aa, yo, aW, g, as, JI, iA, go, vA, wB, vF, ik, cE, bSp, cQU, n, aj, fr, PY, nA, Mo, cty, KN, h, dL, Xh, Lg, cC, awV, alt, op, hg, bP, dB, eD, hL, cB, eA, J, lg, hb, HC, aT, an, rz, af, jf, bf, s, Y, en, bN, dy, bt, hl, id, arS, ha, jE, hF, anu, bKb, xt, hX, Jm, iC, bkq, ib, Db, NS, arV, ff, Xj, Z, bz, dr, es, MC, IM, X); #c1(TSC2) c2(XP_011520943) c3(tuberin isoform X8) c4(315943) c5(315944, 315945, 315946, 315947, 315948, 315949) c6( ) c7(T, aC, pf, Xi, Ir, fd, ci, aY, aR, K, Nj, bOZ, MO, pk, aa, yo, aW, g, as, JI, iA, go, vA, wB, vF, ik, cE, bSp, cQU, n, aj, fr, PY, nA, Mo, cty, KN, h, dL, Xh, Lg, cC, awV, alt, op, hg, bP, dB, eD, hL, cB, eA, J, lg, hb, HC, aT, an, rz, af, jf, bf, s, Y, en, bN, dy, bt, hl, id, arS, ha, jE, hF, anu, bKb, xt, hX, Jm, iC, bkq, ib, Db, NS, arV, ff, Xj, Z, bz, dr, es, MG, IM, X); #c1(TSC22D1) c2(NP_001230728) c3(TSC22 domain family protein 1 isoform 4) c4(86726, 86727) c5(86728, 86729, 86730, 86731, 86732, 86733, 86734, 86735, 86736, 86737, 86738, 86739) c6( ) c7(bL, T, zQ, jp, dB, if, qy, aT, jh, QE, Qb, ci, qN, as, zP, Fc, ae, amW, ad); #c1(TSC22D1) c2(NP_006013) c3(TSC22 domain family protein 1 isoform 2) c4(161151, 161152) c5(161153, 161154, 161155, 161156, 161157, 161158, 161159, 161160, 161161, 161162, 161163, 161164, 161165) c6( ) c7(bL, T, zQ, jp, dB, if, qy, aT, jh, QE, Qb, ci, qN, as, zP, Fc, ae, amW, ad); #c1(TSC22D1) c2(NP_904358) c3(TSC22 domain family protein 1 isoform 1) c4(258096) c5(258097, 258098, 258099, 258100, 258101, 258102) c6( ) c7(bL, T, zQ, jp, dB, if, qy, aT, jh, QE, Qb, ci, qN, as, zP, Fc, ae, amW, ad); #c1(TSC22D3) c2(NP_001015881) c3(TSC22 domain family protein 3 isoform 3) c4( ) c5(26228, 26229, 26230, 26231, 26232, 26233, 26234, 26235, 26236, 26237) c6( ) c7(ck, bM, gU, xE, rq, byn, Y, Ei, fd, jy, rs, v, ci, Ca, brw, ai, y, bA); #c1(TSC22D3) c2(NP_004080) c3(TSC22 domain family protein 3 isoform 2) c4(143381, 143382, 143383, 143384) c5(143385, 143386, 143387, 143388, 143389, 143390, 143391, 143392, 143393, 143394, 143395, 143396, 143397, 143398, 143399) c6( ) c7(ck, bM, gU, xE, rq, byn, Y, Ei, fd, jy, rs, v, ci, Ca, brw, ai, y, bA); #c1(TSC22D3) c2(NP_932174) c3(TSC22 domain family protein 3 isoform 1) c4(258863, 258864, 258865, 258866, 258867, 258868, 258869, 258870, 258871, 258872) c5(258873, 258874, 258875, 258876, 258877, 258878, 258879, 258880, 258881, 258882, 258883, 258884, 258885, 258886, 258887, 258888, 258889, 258890, 258891, 258892, 258893, 258894, 258895, 258896, 258897, 258898, 258899, 258900, 258901, 258902, 258903, 258904, 258905, 258906, 258907, 258908, 258909, 258910, 258911, 258912, 258913, 258914, 258915, 258916, 258917, 258918, 258919, 258920, 258921, 258922, 258923, 258924, 258925, 258926, 258927, 258928, 258929, 258930, 258931, 258932, 258933, 258934, 258935, 258936, 258937, 258938, 258939, 258940, 258941, 258942, 258943, 258944) c6( ) c7(ck, bM, gU, xE, rq, byn, Y, Ei, fd, jy, rs, v, ci, Ca, brw, ai, y, bA); #c1(TSC22D4) c2(NP_001289972) c3(TSC22 domain family protein 4 isoform a) c4(114886) c5(114887, 114888, 114889, 114890, 114891, 114892, 114893) c6( ) c7(amK, T); #c1(TSEN2) c2(NP_001138865) c3(tRNA-splicing endonuclease subunit Sen2 isoform 2) c4(57938) c5(57939, 57940, 57941, 57942, 57943, 57944, 57945, 57946, 57947, 57948) c6( ) c7(QK, xw, cQV, ad, nA); #c1(TSEN2) c2(NP_001138866) c3(tRNA-splicing endonuclease subunit Sen2 isoform 3) c4(57949) c5(57950, 57951, 57952, 57953, 57954, 57955) c6( ) c7(QK, xw, cQV, ad, nA); #c1(TSEN2) c2(NP_001138867) c3(tRNA-splicing endonuclease subunit Sen2 isoform 4) c4(57956) c5(57957, 57958, 57959, 57960, 57961, 57962) c6( ) c7(QK, xw, cQV, ad, nA); #c1(TSEN2) c2(NP_079541) c3(tRNA-splicing endonuclease subunit Sen2 isoform 1) c4(219161, 219162, 219163, 219164) c5(219165, 219166, 219167, 219168, 219169, 219170, 219171, 219172, 219173, 219174, 219175, 219176, 219177, 219178, 219179, 219180, 219181, 219182, 219183, 219184, 219185, 219186, 219187, 219188, 219189, 219190, 219191, 219192) c6( ) c7(QK, xw, cQV, ad, nA); #c1(TSEN34) c2(NP_001269261) c3(tRNA-splicing endonuclease subunit Sen34 isoform 1) c4( ) c5(100933, 100934, 100935, 100936, 100937, 100938, 100939, 100940, 100941, 100942, 100943, 100944, 100945, 100946, 100947, 100948, 100949, 100950, 100951, 100952, 100953, 100954, 100955, 100956, 100957, 100958, 100959, 100960, 100961, 100962, 100963, 100964, 100965, 100966, 100967, 100968, 100969, 100970, 100971, 100972, 100973, 100974, 100975, 100976, 100977, 100978, 100979, 100980, 100981, 100982, 100983, 100984, 100985) c6( ) c7(UR, QK, xw, cQV, nA); #c1(TSEN34) c2(NP_001269262) c3(tRNA-splicing endonuclease subunit Sen34 isoform 2) c4(100986, 100987) c5(100988, 100989, 100990, 100991, 100992, 100993) c6( ) c7(UR, QK, xw, cQV, nA); #c1(TSEN34) c2(XP_005259298) c3(tRNA-splicing endonuclease subunit Sen34 isoform X1) c4(276056) c5(276057, 276058, 276059) c6( ) c7(UR, QK, xw, cQV, nA); #c1(TSEN54) c2(NP_997229) c3(tRNA-splicing endonuclease subunit Sen54) c4(265238, 265239) c5(265240, 265241, 265242, 265243, 265244, 265245, 265246) c6( ) c7(cQX, cyv, aU, UR, cQW, nA, QK, xw); #c1(TSEN54) c2(XP_006721884) c3(tRNA-splicing endonuclease subunit Sen54 isoform X5) c4( ) c5(294361, 294362, 294363, 294364, 294365) c6( ) c7(cQX, cyv, aU, UR, cQW, nA, QK, xw); #c1(TSEN54) c2(XP_011522919) c3(tRNA-splicing endonuclease subunit Sen54 isoform X3) c4(317421) c5( ) c6( ) c7(cQX, cyv, aU, UR, cQW, nA, QK, xw); #c1(TSEN54) c2(XP_011522920) c3(tRNA-splicing endonuclease subunit Sen54 isoform X4) c4( ) c5(317422, 317423, 317424, 317425, 317426, 317427) c6( ) c7(cQX, cyv, aU, UR, cQW, nA, QK, xw); #c1(TSFM) c2(NP_001166166) c3(elongation factor Ts, mitochondrial isoform 3 precursor) c4(68379) c5(68380, 68381, 68382, 68383, 68384) c6( ) c7(lM, hb, cc, cQY); #c1(TSFM) c2(NP_001166167) c3(elongation factor Ts, mitochondrial isoform 1 precursor) c4(68385) c5(68386, 68387, 68388, 68389, 68390, 68391) c6( ) c7(lM, hb, cc, cQY); #c1(TSFM) c2(NP_001166168) c3(elongation factor Ts, mitochondrial isoform 4 precursor) c4(68392) c5(68393, 68394, 68395, 68396, 68397, 68398) c6( ) c7(lM, hb, cc, cQY); #c1(TSFM) c2(NP_005717) c3(elongation factor Ts, mitochondrial isoform 2 precursor) c4(158798, 158799) c5(158800, 158801, 158802, 158803, 158804, 158805, 158806, 158807, 158808, 158809, 158810, 158811, 158812) c6( ) c7(lM, hb, cc, cQY); #c1(TSG101) c2(NP_006283) c3(tumor susceptibility gene 101 protein) c4(163584, 163585) c5(163586, 163587, 163588, 163589, 163590, 163591) c6( ) c7(T, if, jx, aBz, jh, aA, ci, qN, ad, er, ft, hd, aT, h, dL, K, bU, pk, ae, Jl, aW, bZC, aq, lo, aF, iR, t, bz, ck, nB, gX, at, m, im, bt, B); #c1(TSG101) c2(XP_005253165) c3(tumor susceptibility gene 101 protein isoform X1) c4( ) c5(272227, 272228, 272229, 272230, 272231, 272232) c6( ) c7(T, if, jx, aBz, jh, aA, ci, qN, ad, er, ft, hd, aT, h, dL, K, bU, pk, ae, Jl, aW, bZC, aq, lo, aF, iR, t, bz, ck, nB, gX, at, m, im, bt, B); #c1(TSGA10) c2(NP_878915) c3(testis-specific gene 10 protein) c4( ) c5(257173, 257174, 257175, 257176, 257177, 257178, 257179, 257180, 257181, 257182, 257183, 257184, 257185, 257186, 257187, 257188, 257189, 257190, 257191) c6( ) c7(ck, x, T, B, Y, hF, dL, k, hf, t, X, ad); #c1(TSGA10) c2(XP_011510236) c3(testis-specific gene 10 protein isoform X2) c4(300831, 300832, 300833) c5(300834) c6( ) c7(ck, x, T, B, Y, hF, dL, k, hf, t, X, ad); #c1(TSGA10) c2(XP_011510237) c3(testis-specific gene 10 protein isoform X3) c4( ) c5(300835, 300836, 300837, 300838) c6( ) c7(ck, x, T, B, Y, hF, dL, k, hf, t, X, ad); #c1(TSGA10) c2(XP_011510246) c3(testis-specific gene 10 protein isoform X4) c4( ) c5(300839, 300840, 300841, 300842, 300843, 300844) c6( ) c7(ck, x, T, B, Y, hF, dL, k, hf, t, X, ad); #c1(TSHR) c2(XP_005268094) c3(thyrotropin receptor isoform X3) c4(281502, 281503) c5(281504, 281505, 281506, 281507, 281508, 281509, 281510, 281511, 281512, 281513) c6( ) c7(bDV, cJY, T, aC, Uc, AS, fR, sQ, wJ, sw, Dd, aw, cRa, bzb, cz, cRe, bWZ, hz, bBV, fd, ci, ml, cRg, biO, cRi, V, cRh, Vp, hd, xy, av, mP, cQZ, cRb, cRc, nv, akU, Db, cje, aT, hD, LA, Fx, IQ, AN, bDW, yF, aQy, li, bDT, aK, zQ, lx, s, bwB, cRk, aus, mR, ajP, cRd, bxF, xv, Hu, f, Bu, cm, cRj, dr, qJ, pv, nM, sn, nB, cxd, Lj, bNJ, hr, uo, ut, oQ, gT, cRf, jr); #c1(TSHR) c2(XP_005268096) c3(thyrotropin receptor isoform X1) c4(281514) c5(281515, 281516, 281517, 281518, 281519, 281520) c6( ) c7(bDV, cJY, T, aC, Uc, AS, fR, sQ, wJ, sw, Dd, aw, cRa, bzb, cz, cRe, bWZ, hz, bBV, fd, ci, ml, cRg, biO, cRi, V, cRh, Vp, hd, xy, av, mP, cQZ, cRb, cRc, nv, akU, Db, cje, aT, hD, LA, Fx, IQ, AN, bDW, yF, aQy, li, bDT, aK, zQ, lx, s, bwB, cRk, aus, mR, ajP, cRd, bxF, xv, Hu, f, Bu, cm, cRj, dr, qJ, pv, nM, sn, nB, cxd, Lj, bNJ, hr, uo, ut, oQ, gT, cRf, jr); #c1(TSHR) c2(XP_006720308) c3(thyrotropin receptor isoform X2) c4(293345) c5(293346, 293347, 293348, 293349, 293350, 293351) c6( ) c7(bDV, cJY, T, aC, Uc, AS, fR, sQ, wJ, sw, Dd, aw, cRa, bzb, cz, cRe, bWZ, hz, bBV, fd, ci, ml, cRg, biO, cRi, V, cRh, Vp, hd, xy, av, mP, cQZ, cRb, cRc, nv, akU, Db, cje, aT, hD, LA, Fx, IQ, AN, bDW, yF, aQy, li, bDT, aK, zQ, lx, s, bwB, cRk, aus, mR, ajP, cRd, bxF, xv, Hu, f, Bu, cm, cRj, dr, qJ, pv, nM, sn, nB, cxd, Lj, bNJ, hr, uo, ut, oQ, gT, cRf, jr); #c1(TSHR) c2(XP_011535421) c3(thyrotropin receptor isoform X4) c4( ) c5(332462, 332463, 332464, 332465, 332466, 332467) c6( ) c7(bDV, cJY, T, aC, Uc, AS, fR, sQ, wJ, sw, Dd, aw, cRa, bzb, cz, cRe, bWZ, hz, bBV, fd, ci, ml, cRg, biO, cRi, V, cRh, Vp, hd, xy, av, mP, cQZ, cRb, cRc, nv, akU, Db, cje, aT, hD, LA, Fx, IQ, AN, bDW, yF, aQy, li, bDT, aK, zQ, lx, s, bwB, cRk, aus, mR, ajP, cRd, bxF, xv, Hu, f, Bu, cm, cRj, dr, qJ, pv, nM, sn, nB, cxd, Lj, bNJ, hr, uo, ut, oQ, gT, cRf, jr); #c1(TSHZ1) c2(NP_005777) c3(teashirt homolog 1) c4(159249) c5(159250, 159251, 159252, 159253, 159254, 159255, 159256, 159257, 159258, 159259) c6( ) c7(T, AS, I, cz, rf, aR, ad, yn, dP, iu, akN, sO, aDo, aT, bK, AN, H, on, ae, af, eu, alL, ak, d, hf, aW, sg, aq, Qm, bu, xw, qJ, L, tj, ac, ky, kB, c, qe, rR, Kv, eM, mx, kq, bel, ER, R, be, y, B, cRI); #c1(TSHZ2) c2(NP_001180350) c3(teashirt homolog 2 isoform 2) c4(73858) c5(73859, 73860, 73861, 73862, 73863, 73864) c6( ) c7(aw, fX, ad); #c1(TSHZ2) c2(NP_775756) c3(teashirt homolog 2 isoform 1) c4(250182) c5(250183, 250184, 250185, 250186, 250187, 250188) c6( ) c7(aw, fX, ad); #c1(TSHZ3) c2(NP_065907) c3(teashirt homolog 3) c4(206169) c5(206170, 206171, 206172, 206173, 206174, 206175) c6( ) c7(fX, c, aW, cRn, aT, cz, j, Ea, cRm, ae, ad); #c1(TSLP) c2(NP_149024) c3(thymic stromal lymphopoietin isoform 1 precursor) c4(226806, 226807) c5(226808, 226809, 226810, 226811, 226812, 226813, 226814) c6( ) c7(bM, T, dD, Dw, akc, ea, fG, aD, jx, cz, bBR, v, gj, eq, bRn, aVU, Jx, apt, lR, ai, aoH, dP, x, afm, dn, aT, cU, ji, K, qM, IM, cgQ, Us, sj, aa, aW, sp, az, hl, cr, akY, lo, iV, eE, pb, ck, cT, yI, DW, cj, at, k, yH, ei, i, hE, y, pC); #c1(TSLP) c2(XP_011542000) c3(thymic stromal lymphopoietin isoform X1) c4( ) c5(340493, 340494, 340495, 340496, 340497) c6( ) c7(bM, T, dD, Dw, akc, ea, fG, aD, jx, cz, bBR, v, qj, eq, bRn, aVU, Jx, apt, lR, ai, aoH, dP, x, afm, dn, aT, cU, ji, K, qM, IM, cgQ, Us, sj, aa, aW, sp, az, hl, cr, akY, lo, iV, eE, pb, ck, cT, yl, DW, cj, at, k, yH, ei, i, hE, y, pC); #c1(TSN) c2(NP_001248330) c3(translin isoform 2) c4(93694) c5(93695, 93696, 93697, 93698, 93699) c6( ) c7(T, ac, au, jh, Xu, Le, B, Hr); #c1(TSN) c2(NP_004613) c3(translin isoform 1) c4(148172, 148173) c5(148174, 148175, 148176, 148177, 148178, 148179, 148180, 148181, 148182, 148183, 148184, 148185, 148186) c6( ) c7(T, ac, au, jh, Xu, Le, B, Hr); #c1(TSNAX) c2(NP_005990) c3(translin-associated protein X) c4(161050, 161051) c5(161052, 161053, 161054, 161055, 161056, 161057, 161058, 161059, 161060, 161061, 161062, 161063) c6( ) c7(T, bO, vL, agm, bK, ahg, cl, Z, he, bN); #c1(TSPAN10) c2(NP_001277141) c3(tetraspanin-10 isoform a) c4(109119, 109120) c5(109121) c6( ) c7(aw, ac); #c1(TSPAN10) c2(NP_114151) c3(tetraspanin-10 isoform b) c4( ) c5(222361, 222362, 222363, 222364, 222365, 222366) c6( ) c7(aw, ac); #c1(TSPAN10) c2(XP_011523627) c3(tetraspanin-10 isoform X1) c4( ) c5(318135, 318136, 318137, 318138, 318139, 318140) c6( ) c7(aw, ac); #c1(TSPAN11) c2(XP_011518982) c3(tetraspanin-11 isoform X1) c4(313440, 313441) c5(313442, 313443, 313444, 313445, 313446, 313447, 313448, 313449, 313450, 313451, 313452, 313453, 313454, 313455, 313456, 313457) c6( ) c7(eZ); #c1(TSPAN12) c2(XP_011514296) c3(tetraspanin-12 isoform X1) c4(306942, 306943, 306944, 306945, 306946) c5(306947, 306948, 306949, 306950, 306951, 306952, 306953, 306954, 306955, 306956, 306957, 306958, 306959, 306960, 306961, 306962, 306963, 306964, 306965, 306966, 306967, 306968, 306969, 306970, 306971, 306972, 306973, 306974, 306975, 306976, 306977, 306978, 306979, 306980) c6( ) c7(bN, T, cRn, byl, byj); #c1(TSPAN13) c2(NP_055214) c3(tetraspanin-13) c4(179876) c5(179877, 179878, 179879, 179880, 179881, 179882) c6( ) c7(aW, ae, dA, ad, aT); #c1(TSPAN14) c2(NP_001121781) c3(tetraspanin-14 isoform 2) c4(46144) c5(46145, 46146, 46147, 46148, 46149, 46150) c6( ) c7(bqW, eM); #c1(TSPAN14) c2(NP_112189) c3(tetraspanin-14 isoform 1) c4(220675, 220676, 220677, 220678) c5(220679, 220680, 220681, 220682, 220683, 220684, 220685, 220686, 220687, 220688, 220689, 220690, 220691, 220692, 220693, 220694, 220695, 220696, 220697, 220698, 220699, 220700, 220701, 220702, 220703, 220704, 220705, 220706, 220707, 220708, 220709, 220710, 220711, 220712, 220713, 220714, 220715, 220716) c6( ) c7(bqW, eM); #c1(TSPAN14) c2(XP_011538520) c3(tetraspanin-14 isoform X2) c4(336271) c5( ) c6( ) c7(bqW, eM); #c1(TSPAN16) c2(NP_001269438) c3(tetraspanin-16 isoform 2) c4( ) c5(101668) c6( ) c7(x, k); #c1(TSPAN16) c2(NP_036598) c3(tetraspanin-16 isoform 1) c4(174708, 174709) c5(174710, 174711, 174712, 174713, 174714, 174715) c6( ) c7(x, k); #c1(TSPAN16) c2(XP_011526203) c3(tetraspanin-16 isoform X1) c4( ) c5(320472, 320473, 320474, 320475, 320476) c6( ) c7(x, k); #c1(TSPAN18) c2(XP_006718435) c3(tetraspanin-18 isoform X2) c4(291861, 291862) c5(291863, 291864, 291865, 291866, 291867, 291868, 291869, 291870, 291871, 291872) c6( ) c7(pf); #c1(TSPAN18) c2(XP_011518761) c3(tetraspanin-18 isoform X1) c4(313153, 313154) c5(313155, 313156, 313157, 313158, 313159, 313160, 313161, 313162, 313163, 313164, 313165, 313166, 313167, 313168, 313169, 313170, 313171, 313172) c6( ) c7(pf); #c1(TSPAN31) c2(NP_005972) c3(tetraspanin-31) c4(160891) c5(160892, 160893, 160894, 160895, 160896, 160897) c6( ) c7(T, sw, ha, aA, bS, et, iJ, hW, yg, cU, h, d, Qr, ff, eH, aF, en, eE, cm, Z, iK, QG, au, QC, AG, cil, nz, bt); #c1(TSPAN32) c2(NP_620591) c3(tetraspanin-32) c4(237858) c5(237859, 237860, 237861, 237862, 237863) c6( ) c7(ds, jZ, aE); #c1(TSPAN32) c2(XP_011518113) c3(tetraspanin-32 isoform X3) c4( ) c5(312107) c6( ) c7(ds, jZ, aE); #c1(TSPAN32) c2(XP_011518124) c3(tetraspanin-32 isoform X14) c4(312108) c5(312109, 312110, 312111, 312112, 312113, 312114) c6( ) c7(ds, jZ, aE); #c1(TSPAN33) c2(NP_848657) c3(tetraspanin-33) c4(254089) c5(254090, 254091, 254092, 254093, 254094, 254095) c6( ) c7(fM, jh, eZ, bw, bt, eu); #c1(TSPAN4) c2(XP_005253159) c3(tetraspanin-4 isoform X1) c4(272178, 272173, 272180, 272181, 272182) c5(272183, 272184, 272185, 272186, 272187, 272188, 272189, 272190, 272191, 272192, 272193, 272194, 272195, 272196, 272197, 272198, 272199, 272200, 272201, 272202, 272203, 272204, 272205, 272206, 272207, 272208, 272209, 272210, 272211, 272212, 272213, 272214, 272215, 272216, 272217, 272218, 272219, 272220, 272221, 272222, 272223, 272224, 272225, 272226) c6( ) c7(T, dt); #c1(TSPAN4) c2(XP_011518638) c3(tetraspanin-4 isoform X3) c4(312964) c5(312965, 312966, 312967) c6( ) c7(T, dt); #c1(TSPAN4) c2(XP_011518643) c3(tetraspanin-4 isoform X2) c4( ) c5(312968, 312969, 312970, 312971, 312972, 312973, 312974, 312975, 312976, 312977, 312978, 312979, 312980) c6( ) c7(T, dt); #c1(TSPAN6) c2(NP_003261) c3(tetraspanin-6 isoform a) c4(136910, 136911) c5(136912, 136913, 136914, 136915, 136916, 136917, 136918, 136919, 136920, 136921, 136922, 136923) c6( ) c7(vr); #c1(TSPAN7) c2(NP_004606) c3(tetraspanin-7) c4(148104, 148105, 148106, 148107, 148108) c5(148109, 148110, 148111, 148112, 148113, 148114, 148115, 148116, 148117, 148118, 148119, 148120, 148121, 148122, 148123, 148124, 148125, 148126, 148127, 148128, 148129, 148130, 148131, 148132, 148133, 148134, 148135, 148136, 148137, 148138, 148139, 148140) c6(148141, 148142) c7(T, py, iW, jA, cRp, nA, ae, af, ad); #c1(TSPAN8) c2(XP_006719646) c3(tetraspanin-8 isoform X1) c4(292852) c5(292853, 292854, 292855, 292856, 292857, 292858, 292859, 292860, 292861, 292862, 292863, 292864, 292865, 292866) c6( ) c7(bL, T, e, ht, DV, al, aj, v, ci, bh, q, J, h, bK, Y, r, dS, gk, abV, W, cA, bE, uJ, y, 8); #c1(TSPAN9) c2(NP_001161792) c3(tetraspanin-9) c4(66016) c5(66017, 66018, 66019, 66020, 66021, 66022, 66023, 66024, 66025, 66026, 66027, 66028) c6( ) c7(bL, aw, ac, af); #c1(TSPEAR) c2(NP_001258966) c3(thrombospondin-type laminin G domain and EAR repeat-containing protein isoform 2) c4( ) c5(96835, 96836, 96837, 96838, 96839, 96840) c6( ) c7(ha, cRq, cA); #c1(TSPEAR) c2(NP_659428) c3(thrombospondin-type laminin G domain and EAR repeat-containing protein isoform 1 precursor) c4(239813, 239814, 239815) c5(239816, 239817, 239818, 239819, 239820, 239821, 239822, 239823, 239824, 239825, 239826, 239827) c6( ) c7(ha, cRq, cA); #c1(TSP0) c2(NP_001243459) c3(translocator protein) c4(90852, 90853) c5(90854, 90855, 90856, 90857, 90858, 90859, 90860, 90861, 90862, 90863, 90864, 90865, 90866, 90867, 90868, 90869, 90870, 90871, 90872, 90873) c6( ) c7(bM, T, aCA, AS, dA, aw, bO, jh, oY, aj, bS, qc, et, ci, bX, Fb, wV, V, ww, q, J, ad, aXI, eA, XX, hd, aT, hD, ahr, cy, dL, bK, K, h, rE, H, nJ, ae, agK, d, IR, th, aW, Y, ff, r, en, as, Z, cm, xe, bz, iK, bN, hq, bax, L, YE, nB, dB, wO, U, tV, be, hh, Ro); #c1(TSP02) c2(XP_011512699) c3(translocator protein 2 isoform X1) c4(303728) c5(303729, 303730, 303731, 303732, 303733, 303734, 303735, 303736, 303737, 303738) c6( ) c7(at, iW); #c1(TSPY1) c2(NP_003299) c3(testis-specific Y-encoded protein 1 isoform TSPY-L) c4(137233) c5(137234, 137235, 137236, 137237, 137238, 137239, 137240, 137241, 137242, 137243, 137244, 137245) c6( ) c7(T, gU, wu, oY, UI, rc, ad, UE, BI, BJ, PI, aT, h, wm, ae, vT, aW, aq, bu, iR, pb, aeH, Lb, bxG, Le, B); #c1(TSPY10) c2(NP_001269398) c3(testis-specific Y-encoded protein 10) c4(101568) c5(101569, 101570, 101571, 101572, 101573, 101574, 101575, 101576, 101577, 101578, 101579, 101580, 101581, 101582, 101583) c6( ) c7(T, gU, wu, oY, UI, ad, BI, BJ, PI, aT, h, wm, ae, vT, aW, aq, bu, iR, pb, aeH, bxG, Le, B); #c1(TSPY10) c2(XP_002344239) c3(testis-specific Y-encoded protein 10 isoform X1) c4(266103) c5(266104, 266105, 266106, 266107, 266108, 266109, 266110, 266111, 266112, 266113, 266114) c6( ) c7(T, gU, wu, oY, UI, ad, BI, BJ, PI, aT, h, wm, ae, vT, aW, aq, bu, iR, pb, aeH, bxG, Le, B); #c1(TSPY3) c2(XP_011542306) c3(testis-specific Y-encoded protein 3 isoform X2) c4(340909) c5(340910, 340911) c6( ) c7(T, gU, wu, oY, UI, ad, BI, BJ, PI, aT, h, wm, ae, vT, aW, aq, bu, iR, pb, aeH, bxG, Le, B); #c1(TSPY4) c2(NP_001157943) c3(testis-specific Y-encoded protein 4) c4(62929, 62930, 62931, 62932) c5(62933, 62934, 62935, 62936, 62937, 62938, 62939, 62940, 62941, 62942, 62943, 62944) c6( ) c7(T, gU, m, oY, UI, ad, BI, BJ, PI, aT, h, wm, ae, vT, aW, aq, bu, iR, pb, aeH, bxG, Le, B); #c1(TSPY4) c2(XP_005272800) c3(testis-specific Y-encoded protein 4 isoform X1) c4(284184, 284185, 284186) c5(284187, 284188, 284189, 284190, 284191, 284192, 284193, 284194, 284195, 284196, 284197, 284198, 284199, 284200, 284201, 284202, 284203) c6( ) c7(T, gU, wu, oY, UI, ad, BI, BJ, PI, aT, h, wm, ae, vT, aW, aq, bu, iR, pb, aeH, bxG, Le, B); #c1(TSPYL1) c2(NP_003300) c3(testis-specific Y-encoded-like protein 1) c4(137246, 137247) c5(137248, 137249, 137250, 137251, 137252, 137253, 137254, 137255, 137256, 137257, 137258, 137259) c6( ) c7(EZ, aeT, eA, gU, cRr); #c1(TSPYL2) c2(NP_071400) c3(testis-specific Y-encoded-like protein 2) c4(211429) c5(211430, 211431, 211432, 211433, 211434, 211435) c6( ) c7(NU, T, eU, eW, eM, alc, xR, adw, hL, jh, h, bz, B); #c1(TSPYL4) c2(NP_067680) c3(testis-specific Y-encoded-like protein 4) c4(209290) c5(209291, 209292, 209293, 209294, 209295, 209296) c6( ) c7(Y); #c1(TSPYL5) c2(NP_277047) c3(testis-specific Y-encoded-like protein 5) c4(228807) c5(228808, 228809, 228810, 228811, 228812, 228813) c6( ) c7(aW, aA, aT, aF, eA, ad); #c1(TSR1) c2(NP_060598) c3(pre-rRNA-processing protein TSR1 homolog) c4(196761) c5(196762, 196763, 196764, 196765, 196766, 196767) c6( ) c7(e); #c1(TSSC1) c2(NP_003301) c3(protein TSSC1) c4(137260) c5(137261, 137262, 137263, 137264, 137265, 137266) c6( ) c7(IB); #c1(TSSC1) c2(XP_011508685) c3(protein TSSC1 isoform X1) c4( ) c5(299317) c6( ) c7(IB); #c1(TSSK1B) c2(NP_114417) c3(testis-specific serine/threonine-protein kinase 1) c4(222685) c5(222686, 222687, 222688, 222689, 222690, 222691) c6( ) c7(gU, IR, pb); #c1(TSSK2) c2(NP_443732) c3(testis-specific serine/threonine-protein kinase 2) c4(230066) c5(230067, 230068, 230069, 230070, 230071, 230072) c6( ) c7(uo, pb); #c1(TSSK4) c2(NP_001171668) c3(testis-specific serine/threonine-protein kinase 4 isoform 1) c4(71243) c5(71244, 71245, 71246, 71247, 71248, 71249) c6( ) c7(vH, gU, ND); #c1(TSSK4) c2(NP_777604) c3(testis-specific serine/threonine-protein kinase 4 isoform 2) c4(251318, 251319) c5(251320, 251321, 251322, 251323, 251324, 251325) c6( ) c7(vH, gU, ND); #c1(TST) c2(NP_003303) c3(thiosulfate sulfurtransferase) c4(137274, 137275, 137276) c5(137277, 137278, 137279, 137280, 137281, 137282, 137283, 137284, 137285, 137286, 137287, 137288, 137289, 137290, 137291, 137292, 137293, 137294, 137295, 137296, 137297, 137298) c6( ) c7(bGg, LX, nx, aeu, cap, ad, Sr, h, ji, aqX, db, xX, IR, nk, nC, W, nb, ig, cvP, uJ, nw, B, LT); #c1(TSTA3) c2(NP_003304) c3(GDP-L-fucose synthase) c4( ) c5(137299, 137300, 137301, 137302, 137303, 137304, 137305, 137306, 137307, 137308, 137309, 137310, 137311, 137312, 137313, 137314, 137315, 137316, 137317, 137318, 137319, 137320, 137321) c6( ) c7(bz); #c1(TSTD1) c2(NP_001106676) c3(thiosulfate sulfurtransferase/rhodanese-like domain-containing protein 1 isoform 3) c4(42581) c5(42582, 42583, 42584, 42585, 42586, 42587) c6( ) c7(qt, T, Db); #c1(TSTD1) c2(NP_001106677) c3(thiosulfate sulfurtransferase/rhodanese-like domain-containing protein 1 isoform 2) c4(42588) c5(42589, 42590, 42591, 42592, 42593, 42594) c6( ) c7(qt, T, Db); #c1(TSTD1) c2(NP_001106678) c3(thiosulfate sulfurtransferase/rhodanese-like domain-containing protein 1 isoform 1) c4(42595, 42596) c5(42597, 42598, 42599, 42600, 42601, 42602, 42603, 42604, 42605, 42606, 42607, 42608) c6( ) c7(qt, T, Db); #c1(TTBK1) c2(NP_115927) c3(tau-tubulin kinase 1) c4(224732, 224733) c5(224734, 224735, 224736, 224737, 224738, 224739, 224740, 224741, 224742, 224743, 224744, 224745, 224746, 224747) c6( ) c7(Hx, af); #c1(TTBK1) c2(XP_011513248) c3(tau-tubulin kinase 1 isoform X2) c4( ) c5(305501, 305502) c6( ) c7(Hx, af); #c1(TTBK2) c2(NP_775771) c3(tau-tubulin kinase 2) c4(250250, 250251, 250252) c5(250253, 250254, 250255, 250256, 250257, 250258) c6( ) c7(aIM, iA, kB, Y, rf, fr, cRs, xw); #c1(TTBK2) c2(XP_006720466) c3(tau-tubulin kinase 2 isoform X4) c4( ) c5(293517, 293518, 293519, 293520, 293521, 293522) c6( ) c7(aIM, iA, kB, Y, rf, fr, cRs, xw); #c1(TTBK2) c2(XP_011519571) c3(tau-tubulin kinase 2 isoform X6) c4( ) c5(314231, 314232, 314233, 314234, 314235, 314236) c6( ) c7(aIM, iA, kB, Y, rf, fr, cRs, xw); #c1(TTC1) c2(NP_001269429) c3(tetratricopeptide repeat protein 1) c4(101635) c5(101636, 101637, 101638, 101639, 101640, 101641, 101642, 101643, 101644, 101645) c6( ) c7(hq); #c1(TTC12) c2(NP_060338) c3(tetratricopeptide repeat protein 12) c4(195466) c5(195467, 195468, 195469, 195470, 195471, 195472) c6( ) c7(Y, XY, Gd, aj, j, k, IB, FT); #c1(TTC12) c2(XP_011541187) c3(tetratricopeptide repeat protein 12 isoform X4) c4(339787) c5( ) c6( ) c7(Y, XY, Gd, aj, j, k, IB, FT); #c1(TTC12) c2(XP_011541189) c3(tetratricopeptide repeat protein 12 isoform X6) c4(339788) c5(339789, 339790, 339791, 339792, 339793, 339794) c6( ) c7(Y, XY, Gd, aj, j, k, IB, FT); #c1(TTC12) c2(XP_011541191) c3(tetratricopeptide repeat protein 12 isoform X7) c4( ) c5(339795, 339796, 339797, 339798, 339799, 339800, 339801, 339802, 339803, 339804, 339805, 339806, 339807, 339808, 339809, 339810, 339811, 339812) c6( ) c7(Y, XY, Gd, aj, j, k, IB, FT); #c1(TTC17) c2(NP_060729) c3(tetratricopeptide repeat protein 17) c4(197489) c5(197490, 197491, 197492, 197493, 197494, 197495, 197496, 197497) c6( ) c7(cm, bM); #c1(TTC19) c2(NP_060245) c3(tetratricopeptide repeat protein 19, mitochondrial isoform 1 precursor) c4(194971, 194972, 194973) c5(194974, 194975, 194976, 194977, 194978, 194979, 194980, 194981, 194982, 194983, 194984, 194985, 194986, 194987, 194988, 194989, 194990) c6( ) c7(cRt, bYg, hb, afc, U, aqb, aR, aqe); #c1(TTC19) c2(XP_011522252) c3(tetratricopeptide repeat protein 19, mitochondrial isoform X1) c4( ) c5(316888, 316889) c6( ) c7(cRt, bYg, hb, afc, U, aqb, aR, aqe); #c1(TTC21B) c2(NP_079029) c3(tetratricopeptide repeat protein 21B) c4(216659) c5(216660, 216661, 216662, 216663, 216664, 216665) c6( ) c7(cRu, cRv, dy, Tp, IB, af); #c1(TTC21B) c2(XP_006712824) c3(tetratricopeptide repeat protein 21B isoform X3) c4(286882, 286883) c5(286884) c6( ) c7(cRu, cRv, dy, Tp, IB, af); #c1(TTC21B) c2(XP_011510172) c3(tetratricopeptide repeat protein 21B isoform X1) c4(300740) c5( ) c6( ) c7(cRu, cRv, dy, Tp, IB, af); #c1(TTC21B) c2(XP_011510173) c3(tetratricopeptide repeat protein 21B isoform X2) c4( ) c5(300741, 300742, 300743, 300744, 300745, 300746) c6( ) c7(cRu, cRv, dy, Tp, IB, af); #c1(TTC28) c2(NP_001138890) c3(tetratricopeptide repeat protein 28) c4(58101) c5(58102, 58103, 58104, 58105, 58106, 58107) c6( ) c7(v, q, r); #c1(TTC29) c2(NP_001287690) c3(tetratricopeptide repeat protein 29 isoform 1) c4(112544, 112545, 112546) c5(112547, 112548, 112549, 112550, 112551, 112552, 112553, 112554, 112555, 112556, 112557, 112558, 112559, 112560, 112561, 112562, 112563, 112564, 112565, 112566, 112567, 112568) c6( ) c7(j); #c1(TTC29) c2(XP_006714398) c3(tetratricopeptide repeat protein 29 isoform X1) c4(287827) c5(287828) c6( ) c7(j); #c1(TTC29) c2(XP_006714399) c3(tetratricopeptide repeat protein 29 isoform X3) c4(287829) c5( ) c6( ) c7(j); #c1(TTC29) c2(XP_011530612) c3(tetratricopeptide repeat protein 29 isoform X6) c4( ) c5(326721, 326722, 326723, 326724, 326725, 326726) c6( ) c7(j); #c1(TTC3) c2(NP_001001894) c3(E3 ubiquitin-protein ligase TTC3) c4(19113, 19114) c5(19115, 19116, 19117, 19118, 19119, 19120, 19121, 19122, 19123, 19124, 19125, 19126, 19127, 19128, 19129, 19130, 19131, 19132, 19133, 19134) c6( ) c7(f, anj, A); #c1(TTC3) c2(XP_005261109) c3(E3 ubiquitin-protein ligase TTC3 isoform X3) c4(277212) c5(277213, 277214, 277215, 277216, 277217, 277218) c6( ) c7(f, anj, A); #c1(TTC3) c2(XP_005261113) c3(E3 ubiquitin-protein ligase TTC3 isoform X6) c4(277219) c5( ) c6( ) c7(f, anj, A); #c1(TTC3) c2(XP_011528044) c3(E3 ubiquitin-protein ligase TTC3 isoform X8) c4( ) c5(323139, 323140, 323141, 323142, 323143, 323144, 323145) c6( ) c7(f, anj, A); #c1(TTC37) c2(NP_055454) c3(tetratricopeptide repeat protein 37) c4(181251, 181252) c5(181253, 181254, 181255, 181256, 181257, 181258, 181259, 181260, 181261, 181262, 181263, 181264) c6( ) c7(aYD); #c1(TTC39A) c2(NP_001284592) c3(tetratricopeptide repeat protein 39A isoform 4) c4(112100) c5(112101, 112102, 112103, 112104, 112105, 112106) c6( ) c7(aW, aj, aq); #c1(TTC39A) c2(NP_001284594) c3(tetratricopeptide repeat protein 39A isoform 6) c4(112107) c5(112108, 112109, 112110, 112111, 112112, 112113) c6( ) c7(aW, aj, aq); #c1(TTC39A) c2(NP_001284595) c3(tetratricopeptide repeat protein 39A isoform 7) c4( ) c5(112114, 112115, 112116, 112117, 112118, 112119, 112120, 112121, 112122, 112123) c6( ) c7(aW, aj, aq); #c1(TTC39A) c2(XP_011539356) c3(tetratricopeptide repeat protein 39A isoform X1) c4( ) c5(337438, 337439) c6( ) c7(aW, aj, aq); #c1(TTC398) c2(NP_001161812) c3(tetratricopeptide repeat protein 398 isoform 3) c4(66061, 66062) c5(66063, 66064, 66065, 66066, 66067, 66068) c6( ) c7(bL, nX, j, aj); #c1(TTC398) c2(NP_001161813) c3(tetratricopeptide repeat protein 398 isoform 4) c4(66069) c5(66070, 66071, 66072, 66073, 66074, 66075) c6( ) c7(bL, nX, j, aj); #c1(TTC398) c2(NP_689787) c3(tetratricopeptide repeat protein 398 isoform 1) c4(243961, 243962) c5(243963, 243964, 243965, 243966, 243967, 243968, 243969, 243970, 243971, 243972, 243973, 243974, 243975) c6( ) c7(bL, nX, j, aj); #c1(TTC398) c2(XP_011516035) c3(tetratricopeptide repeat protein 398 isoform X2) c4( ) c5(309238, 309239, 309240, 309241, 309242) c6( ) c7(bL, nX, j, aj); #c1(TTC5) c2(NP_612385) c3(tetratricopeptide repeat protein 5) c4(236328) c5(236329, 236330, 236331, 236332, 236333, 236334) c6( ) c7(ck, T, ci, K, bt, iu, dx); #c1(TTC6) c2(XP_011535733) c3(tetratricopeptide repeat protein 6 isoform X3) c4( ) c5(332969, 332970, 332971, 332972, 332973, 332974, 332975, 332976, 332977, 332978) c6( ) c7(cRw, dL, cd, PN); #c1(TTC7A) c2(NP_001275882) c3(tetratricopeptide repeat protein 7A isoform 3) c4( ) c5(107270, 107271, 107272, 107273, 107274, 107275, 107276, 107277, 107278, 107279, 107280, 107281) c6( ) c7(fe, y, fq, bsz); #c1(TTC7A) c2(NP_001275884) c3(tetratricopeptide repeat protein 7A isoform 4) c4(107282) c5( ) c6( ) c7(fe, y, fq, bsz); #c1(TTC7A) c2(NP_065191) c3(tetratricopeptide repeat protein 7A isoform 2) c4(204515, 204516, 204517) c5(204518, 204519, 204520, 204521, 204522, 204523) c6( ) c7(fe, y, fq, bsz); #c1(TTC7A) c2(XP_011531301) c3(tetratricopeptide repeat protein 7A isoform X2) c4( ) c5(327300, 327301, 327302, 327303, 327304, 327305) c6( ) c7(fe, y, fq, bsz); #c1(TTC7B) c2(NP_001010854) c3(tetratricopeptide repeat protein 7B) c4(23838, 23839, 23840) c5(23841, 23842, 23843, 23844, 23845, 23846, 23847, 23848, 23849, 23850, 23851, 23852, 23853) c6( ) c7(e, ac, M); #c1(TTC7B) c2(XP_011534800) c3(tetratricopeptide repeat protein 7B isoform X2) c4(331288) c5(331289, 331290, 331291, 331292, 331293, 331294, 331295, 331296, 331297, 331298, 331299) c6( ) c7(e, ac, M); #c1(TTC8) c2(NP_001275710) c3(tetratricopeptide repeat protein 8 isoform D) c4(107152) c5(107153, 107154, 107155, 107156, 107157, 107158) c6( ) c7(IR, cRx, cRy, v, Tp, nC, cd); #c1(TTC8) c2(NP_001275711) c3(tetratricopeptide repeat protein 8 isoform E) c4(107159) c5(107160, 107161, 107162, 107163, 107164, 107165) c6( ) c7(IR, cRx, cRy, v, Tp, nC, cd); #c1(TTC8) c2(NP_001275712) c3(tetratricopeptide repeat protein 8 isoform F) c4( ) c5(107166, 107167, 107168, 107169, 107170, 107171, 107172, 107173, 107174, 107175, 107176) c6( ) c7(IR, cRx, cRy, v, Tp, nC, cd); #c1(TTC8) c2(NP_653197) c3(tetratricopeptide repeat protein 8 isoform A) c4(239018, 239019, 239020) c5(239021, 239022, 239023, 239024, 239025, 239026, 239027, 239028, 239029, 239030, 239031) c6( ) c7(IR, cRx, cRy, v, Tp, nC, cd); #c1(TTC8) c2(NP_938051) c3(tetratricopeptide repeat protein 8 isoform B) c4(259562, 259563) c5(259564, 259565, 259566, 259567, 259568, 259569) c6( ) c7(IR, cRx, cRy, v, Tp, nC, cd); #c1(TTC8) c2(NP_938052) c3(tetratricopeptide repeat protein 8 isoform C) c4(259570) c5(259571, 259572, 259573, 259574, 259575, 259576, 259577) c6( ) c7(IR, cRx, cRy, v, Tp, nC, cd); #c1(TTC8) c2(XP_011534736) c3(tetratricopeptide repeat protein 8 isoform X6) c4( ) c5(331200) c6( ) c7(IR, cRx, cRy, v, Tp, nC, cd); #c1(TTC9) c2(NP_056166) c3(tetratricopeptide repeat protein 9A) c4(186060) c5(186061, 186062, 186063, 186064, 186065, 186066) c6( ) c7(VR); #c1(TTC9B) c2(NP_689692) c3(tetratricopeptide repeat protein 98) c4(243581) c5(243582, 243583, 243584, 243585, 243586, 243587) c6( ) c7(aqN); #c1(TTC9C) c2(NP_776171) c3(tetratricopeptide repeat protein 9C) c4( ) c5(250919, 250920, 250921, 250922, 250923, 250924, 250925, 250926, 250927, 250928, 250929, 250930, 250931) c6( ) c7(ad); #c1(TTC9C) c2(XP_011543265) c3(tetratricopeptide repeat protein 9C isoform X2) c4(342059, 342060, 342061) c5(342062, 342063, 342064, 342065, 342066, 342067, 342068, 342069, 342070) c6( ) c7(ad); #c1(TTF1) c2(XP_006717336) c3(transcription termination factor 1 isoform X1) c4(290939, 290940) c5(290941, 290942, 290943, 290944, 290945, 290946, 290947, 290948, 290949, 290950, 290951, 290952) c6( ) c7(Fv, T, apr, ci, av, ft, hd, Db, RN, h, bpf, Ex, biQ, NE, AQ, ff, kt, ahl, ckd, en, g, bw, bz, Qy, nM, eM, nB, fD, gT, iu); #c1(TTF2) c2(XP_011540606) c3(transcription termination factor 2 isoform X4) c4(339101) c5(339102, 339103, 339104, 339105, 339106, 339107) c6( ) c7(Na, nM, aE, bwB, aMW, Nc, cBf, gT, aQy); #c1(TTI1) c2(NP_001290386) c3(TELO2-interacting protein 1 homolog) c4(115325) c5(115326, 115327, 115328, 115329, 115330, 115331, 115332, 115333, 115334, 115335, 115336, 115337, 115338, 115339) c6( ) c7(fd); #c1(TTI2) c2(NP_079391) c3(TELO2-interacting protein 2) c4(217905, 217906, 217907) c5(217908, 217909, 217910, 217911, 217912, 217913, 217914, 217915, 217916, 217917, 217918, 217919, 217920, 217921, 217922, 217923) c6( ) c7(cRz, nA); #c1(TTI2) c2(XP_011542967) c3(TELO2-interacting protein 2 isoform X1) c4( ) c5(341669, 341670, 341671, 341672, 341673, 341674) c6( ) c7(cRz, nA); #c1(TTK) c2(XP_011534401) c3(dual specificity protein kinase TTK isoform X1) c4(330852, 330853, 330854, 330855) c5(330856, 330857, 330858, 330859, 330860, 330861) c6( ) c7(T, os, aaH, ht, jh, aA, oZ, aLI, iu, IE, aE, hb, aT, bNj, dL, ey, hu, eL, af, kI, d, aW, Y, r, dq, kp, aF, iK, kP, c, kg, Lq, ati, wS); #c1(TTK) c2(XP_011534402) c3(dual specificity protein kinase TTK isoform X2) c4(330862) c5(330863, 330864, 330865, 330866, 330867, 330868, 330869, 330870, 330871, 330872, 330873, 330874, 330875, 330876, 330877, 330878, 330879, 330880, 330881, 330882, 330883, 330884, 330885, 330886) c6( ) c7(T, os, aaH, ht, jh, aA, oZ, aLI, iu, IE, aE, hb, aT, bNj, dL, ey, hu, eL, af, kI, d, aW, Y, r, dq, kp, aE, iK, kP, c, kg, Lq, ati, wS); #c1(TTL) c2(NP_714923) c3(tubulin-tyrosine ligase) c4(246625) c5(246626, 246627, 246628, 246629, 246630, 246631) c6( ) c7(cm, ae, ad); #c1(TTLL1) c2(NP_036395) c3(probable tubulin polyglutamylase TTLL1) c4(173566, 173567, 173568) c5(173569, 173570, 173571, 173572, 173573, 173574, 173575, 173576, 173577, 173578, 173579, 173580, 173581, 173582, 173583, 173584, 173585, 173586) c6( ) c7(cm, ae, ad); #c1(TTLL10) c2(XP_011539472) c3(inactive polyglycylase TTLL10 isoform X4) c4( ) c5(337677) c6( ) c7(nx); #c1(TTLL11) c2(NP_001132914) c3(tubulin polyglutamylase TTLL11 isoform a) c4(52639) c5(52640, 52641, 52642, 52643, 52644, 52645) c6( ) c7(Na, Nc); #c1(TTLL11) c2(NP_919228) c3(tubulin polyglutamylase TTLL11 isoform b) c4(258275) c5(258276, 258277, 258278, 258279, 258280, 258281) c6( ) c7(Na, Nc); #c1(TTLL11) c2(XP_005251785) c3(tubulin polyglutamylase TTLL11 isoform X3) c4(271182) c5(271183, 271184, 271185, 271186, 271187, 271188, 271189) c6( ) c7(Na, Nc); #c1(TTLL12) c2(NP_055955) c3(tubulin-tyrosine ligase-like protein 12) c4(184672, 184673) c5(184674, 184675, 184676, 184677, 184678, 184679, 184680, 184681, 184682, 184683, 184684, 184685) c6( ) c7(bX); #c1(TTLL12) c2(XP_011528317) c3(tubulin tyrosine ligase-like protein 12 isoform X1) c4( ) c5(323381) c6( ) c7(bX); #c1(TTLL3) c2(NP_001021100) c3(tubulin monoglycylase TTLL3) c4(29127, 29128, 29129) c5(29130, 29131, 29132, 29133, 29134, 29135, 29136, 29137, 29138, 29139, 29140, 29141, 29142, 29143, 29144, 29145, 29146, 29147, 29148, 29149) c6( ) c7(q); #c1(TTLL4) c2(NP_055455) c3(tubulin polyglutamylase TTLL4) c4(181265, 181266, 181267, 181268) c5(181269, 181270, 18127L181272, 181273, 181274, 181275, 181276, 181277, 181278) c6( ) c7(kp, aE); #c1(TTLL4) c2(XP_006712939) c3(tubulin polyglutamylase TTLL4 isoform X3) c4( ) c5(286910, 286911, 286912, 286913, 286914, 286915, 286916, 286917, 286918, 286919, 286920, 286921, 286922, 286923, 286924, 286925, 286926, 286927) c6( ) c7(kp, aE); #c1(TTLL5) c2(NP_055887) c3(tubulin polyglutamylase TTLL5) c4(184175, 184176, 184177, 184178) c5(184179, 184180, 184181, 184182, 184183, 184184, 184185, 184186, 184187, 184188, 184189, 184190, 184191, 184192, 184193, 184194, 184195, 184196, 184197, 184198, 184199, 184200, 184201, 184202) c6( ) c7(t, T, nx, m); #c1(TTLL6) c2(NP_001124390) c3(tubulin polyglutamylase TTLL6 isoform 1) c4(48790, 48791, 48792, 48793, 48794, 48795) c5(48796, 48797, 48798, 48799, 48800, 48801, 48802, 48803, 48804, 48805, 48806, 48807, 48808, 48809, 48810, 48811, 48812, 48813, 48814, 48815, 48816, 48817, 48818, 48819, 48820, 48821, 48822, 48823, 48824, 48825, 48826, 48827, 48828, 48829, 48830, 48831) c6( ) c7(cm, aw); #c1(TTLL6) c2(NP_775894) c3(tubulin polyglutamylase TTLL6 isoform 2) c4(250590, 250591) c5(250592, 250593, 250594, 250595, 250596, 250597, 250598, 250599, 250600, 250601, 250602, 250603) c6( ) c7(cm, aw); #c1(TTLL7) c2(XP_011540457) c3(tubulin polyglutamylase TTLL7 isoform X2) c4(338924) c5(338925, 338926, 338927, 338928, 338929, 338930) c6( ) c7(af); #c1(TTLL7) c2(XP_011540459) c3(tubulin polyglutamylase TTLL7 isoform X4) c4(338931) c5( ) c6( ) c7(af); #c1(TTLL8) c2(XP_011529043) c3(protein monoglycylase TTLL8 isoform X1) c4(324384, 324385) c5( ) c6( ) c7(ac); #c1(TTLL8) c2(XP_011529044) c3(protein monoglycylase TTLL8 isoform X2) c4(324386) c5(324387, 324388, 324389, 324390, 324391, 324392, 324393, 324394, 324395, 324396, 324397, 324398, 324399, 324400, 324401, 324402, 324403, 324404) c6( ) c7(ac); #c1(TTLL9) c2(NP_001008409) c3(probable tubulin polyglutamylase TTLL9) c4(23179) c5(23180, 23181, 23182, 23183, 23184, 23185, 23186, 23187, 23188, 23189, 23190) c6( ) c7(aq, kl); #c1(TTLL9) c2(XP_005260366) c3(probable tubulin polyglutamylase TTLL9 isoform X19) c4(276525) c5(276526, 276527, 276528, 276529, 276530) c6( ) c7(aq, kl); #c1(TTLL9) c2(XP_006723786) c3(probable tubulin polyglutamylase TTLL9 isoform X12) c4(295387) c5(295388, 295389, 295390, 295391, 295392) c6( ) c7(aq, kl); #c1(TTLL9) c2(XP_006723787) c3(probable tubulin polyglutamylase TTLL9 isoform X13) c4( ) c5(295393, 295394, 295395, 295396, 295397) c6( ) c7(aq, kl); #c1(TTLL9) c2(XP_011526933) c3(probable tubulin polyglutamylase TTLL9 isoform X7) c4( ) c5(321221) c6( ) c7(aq, kl); #c1(TTLL9) c2(XP_011526936) c3(probable tubulin polyglutamylase TTLL9 isoform X10) c4(321222) c5(321223, 321224, 321225, 321226, 321227, 321228) c6( ) c7(aq, kl); #c1(TTLL9) c2(XP_011526937) c3(probable tubulin polyglutamylase TTLL9 isoform X11) c4(321229) c5(321230) c6( ) c7(aq, kl); #c1(TTLL9) c2(XP_011526942) c3(probable tubulin polyglutamylase TTLL9 isoform X16) c4( ) c5(321231) c6( ) c7(aq, kl); #c1(TTLL9) c2(XP_011526948) c3(probable tubulin polyglutamylase TTLL9 isoform X24) c4(321232) c5(321233, 321234, 321235, 321236, 321237) c6( ) c7(aq, kl); #c1(TTN) c2(NP_001243779) c3(titin isoform N2BA) c4(91718) c5( ) c6( ) c7(gx, T, cRE, UU, aj, cRA, gf, ci, j, cRB, pd, cd, J, cRD, ad, cc, Ag, Ws, oj, Ak, kf, cy, vc, h, K, atO, rz, bDW, ae, cRC, Ii, hM, anR, xz, xs, Ad, wI, bwc, uY, dg, aYo, cRE, f, Kc, Bv, abV, wK, azK, km, mx, gZ, jr); #c1(TTN) c2(NP_001254479) c3(titin isoform IC) c4(94402, 94403) c5(94404, 94405, 94406, 94407, 94408, 94409, 94410, 94411, 94412, 94413, 94414, 94415, 94416, 94417, 94418) c6(94419, 94420) c7(gx, T, cRE, UU, aj, cRA, gf, ci, j, cRB, pd, cd, J, cRD, ad, cc, Ag, Ws, oj, Ak, kf, cy, vc, h, K, atO, rz, bDW, ae, cRC, Ii, hM, anR, xz, xs, Ad, wI, bwc, uY, dg, aYo, cRE, f, Kc, Bv, abV, wK, azK, km, mx, gZ, jr); #c1(TTN) c2(NP_003310) c3(titin isoform N2-B) c4( ) c5(137351, 137352, 137353, 137354, 137355, 137356) c6( ) c7(gx, T, cRE, UU, aj, cRA, gf, ci, j, cRB, pd, cd, J, cRD, ad, cc, Ag, Ws, oj, Ak, kf, cy, vc, h, K, atO, rz, bDW, ae, cRC, Ii, hM, anR, xz, xs, Ad, wI, bwc, uY, dg, aYo, cRE, f, Kc, Bv, abV, wK, azK, km, mx, gZ, jr); #c1(TTN) c2(NP_596869) c3(titin isoform N2-A) c4(234947) c5(234948, 234949, 234950, 234851, 234952, 234953, 234954, 234955, 234956, 234957, 234958, 234959, 234960) c6( ) c7(gx, T, cRE, UU, aj, cRA, gf, ci, j, cRB, pd, cd, J, cRD, ad, cc, Ag, Ws, oj, Ak, kf, cy, vc, h, K, atO, rz, bDW, ae, cRC, Ii, hM, anR, xz, xs, Ad, wI, bwc, uY, dg, aYo, cRE, f, Kc, Bv, abV, wK, azK, km, mx gZ, jr); #c1(TTN) c2(NP_596870) c3(titin isoform novex-3) c4(234961, 234962) c5(234963, 234964, 234965, 234966, 234967, 234968, 234969, 234970, 234971, 234972, 234973, 234974) c6( ) c7(gx, T, cRE, UU, aj, cRA, gf, ci, j, cRB, pd, cd, J, cRD, ad, cc, Ag, Ws, oj, Ak, kf, cy, vc, h, K, atO, rz, bDW, ae, cRC, Ii, hM, anR, xz, xs, Ad, wI, bwc, uY, dg, aYo, cRE, f, Kc, Bv, abV, wK, azK, km, mx, gZ, jr); #c1(TTN) c2(NP_597676) c3(titin isoform novex-1) c4( ) c5(234975) c6( ) c7(gx, T, cRE, UU, aj, cRA, gf, ci, j, cRB, pd, cd, J, cRD, ad, cc, Ag, Ws, oj, Ak, kf, cy, vc, h, K, atO, rz, bDW, ae, cRC, Ii, hM, anR, xz, xs, Ad, wI, bwc, uY, dg, aYo, cRE, f, Kc, Bv, abV, wK, azK, km, mx, gZ, jr); #c1(TTN) c2(XP_011510031) c3(titin isoform X1) c4(300661) c5(300662, 300663, 300664, 300665, 300666) c6(300667) c7(gx, T, cRE, UU, aj, cRA, gf, ci, j, cRB, pd, cd, J, cRD, ad, cc, Ag, Ws, oj, Ak, kf, cy, vc, h, K, atO, rz, bDW, ae, cRC, Ii, hM, anR, xz, xs, Ad, wI, bwc, uY, dg, aYo, cRF, f, Kc, Bv, abV, wK, azK, km, mx, gZ, jr); #c1(TTN) c2(XP_011510034) c3(titin isoform X4) c4(300668) c5(300669, 300670, 300671, 300672, 300673, 300674, 300675) c6( ) c7(gx, T, cRE, UU, aj, cRA, gf, ci, j, cRB, pd, cd, J, cRD, ad, cc, Ag, Ws, oj, Ak, kf, cy, vc, h, K, atO, rz, bDW, ae, cRC, Ii, hM, anR, xz, xs, Ad, wI, bwc, uY, dg, aYo, cRF, f, Kc, Bv, abV, wK, azK, km, mx, gZ, jr); #c1(TTPA) c2(NP_000361) c3(alpha-tocopherol transfer protein) c4(7853) c5(7854, 7855, 7856, 7857, 7858, 7859) c6( ) c7(cw, dD, bBr, aw, eq, bSj, aR, ad, PW, Lv, aU, h, hi, DG, ae, af, sb, IR, aXy, KH, rU, aq, EH, nC, KM, dr, rY, wT, aUn, kB, rW, U, cj, y, B); #c1(TTR) c2(NP_000362) c3(transthyretin precursor) c4(7860, 7861, 7862, 7863) c5(7864, 7865, 7866, 7867, 7868, 7869, 7870, 7871, 7872, 7873, 7874, 7875, 7876, 7877, 7878, 7879, 7880, 7881, 7882, 7883, 7884, 7885, 7886, 7887, 7888, 7889, 7890, 7891, 7892, 7893, 7894, 7895, 7896, 7897, 7898, 7899, 7900, 7901, 7902, 7903, 7904, 7905, 7906, 7907, 7908, 7909, 7910, 7911, 7912, 7913, 7914, 7915, 7916, 7917, 7918, 7919, 7920, 7921, 7922, 7923, 7924, 7925, 7926, 7927, 7928, 7929, 7930, 7931, 7932, 7933, 7934, 7935, 7936, 7937, 7938, 7939, 7940, 7941, 7942, 7943, 7944, 7945, 7946, 7947, 7948, 7949, 7950, 7951, 7952, 7953, 7954, 7955, 7956, 7957, 7958, 7959, 7960, 7961, 7962, 7963, 7964, 7965, 7966, 7967, 7968, 7969, 7970, 7971, 7972, 7973, 7974, 7975, 7976, 7977, 7978, 7979, 7980, 7981, 7982, 7983, 7984, 7985, 7986, 7987, 7988, 7989, 7990, 7991, 7992, 7993, 7994, 7995, 7996, 7997, 7998, 7999, 8000, 8001, 8002, 8003, 8004, 8005, 8006, 8007, 8008, 8009, 8010, 8011, 8012, 8013, 8014, 8015, 8016, 8017, 8018, 8019, 8020, 8021, 8022, 8023) c6( ) c7(T, bkx, aXW, cRP, ea, aKu, I, aKs, ci, aR, ip, Na, bnt, K, H, cRH, mH, aW, Zc, Ls, RK, dg, cm, cad, Kv, U, abX, R, ckG, dD, bzb, n, cQ, fr, et, nA, cd, RD, aIZ, ke, jz, cc, cty, KN, agW, cRR, bV, cRN, Df, mJ, aGL, A, cRM, ahJ, aq, kp, aay, dw, aKv, aYo, Rn, iO, cRQ, abt, aiS, bk, anx, B, cRS, L, bL, DD, amp, asB, rf, cz, bX, eA, eJ, cRL, cRI, Ig, aT, af, eu, jf, aaO, cRJ, f, zJ, tj, c, cRO, aKp, aor, dy, bKY, gT, bt, bLx, cyG, ob, aaI, aKw, RH, oR, bS, eq, fu, iC, av, aop, Ob, sO, ds, Dq, cRG, oW, vc, aNp, ji, vI, Yi, cRK, EH, Z, YZ, dr, aeb, bF, cDd, gZ, aS, Lz, hE, xg); #c1(TTYH1) c2(NP_001005367) c3(protein tweety homolog 1 isoform 2) c4(21507) c5(21508, 21509, 21510, 21511, 21512, 21513) c6( ) c7(dB); #c1(TTYH1) c2(NP_001188390) c3(protein tweety homolog 1 isoform 3) c4(79111) c5(79112, 79113, 79114, 79115, 79116, 79117, 79118, 79119) c6( ) c7(dB); #c1(TTYH1) c2(NP_065710) c3(protein tweety homolog 1 isoform 1) c4(205019, 205020) c5(205021, 205022, 205023, 205024, 205025, 205026) c6( ) c7(dB); #c1(TTYH1) c2(XP_006726337) c3(protein tweety homolog 1 isoform X1) c4( ) c5(297142, 297143, 297144, 297145, 297146) c6( ) c7(dB); #c1(TTYH2) c2(NP_116035) c3(protein tweety homolog 2 isoform 1) c4(225266) c5(225267, 225268, 225269, 225270, 225271, 225272) c6( ) c7(fr, aaw, X); #c1(TTYH2) c2(NP_443101) c3(protein tweety homolog 2 isoform 2) c4( ) c5(229428, 229429, 229430, 229431, 229432) c6( ) c7(fr, aaw, X); #c1(TTYH2) c2(XP_005257881) c3(protein tweety homolog 2 isoform X1) c4(275397) c5(275398) c6( ) c7(fr, aaw, X); #c1(TUB) c2(NP_003311) c3(tubby protein homolog isoform a) c4(137357) c5(137358, 137359, 137360, 137361, 137362, 137363, 137364, 137365, 137366) c6(137367, 137368) c7(bL, alF, IR, nx, nw, v, ei, nk, nC, ad); #c1(TUB) c2(NP_813977) c3(tubby protein homolog isoform b) c4(253022) c5(253023, 253024, 253025, 253026, 253027, 253028, 253029, 253030) c6(253031, 253032) c7(bL, alF, IR, nx, nw, v, ei, nk, nC, ad); #c1(TUBA1A) c2(NP_001257328) c3(tubulin alpha-1A chain isoform 1) c4(95170) c5(95171, 95172, 95173, 95174, 95175, 95176, 95177, 95178, 95179, 95180) c6( ) c7(Mo, afe, Iq, FB, ED, bdU, eja, cRT, j, nA, bQ, UK, FI, ahZ); #c1(TUBA1A) c2(NP_001257329) c3(tubulin alpha-1A chain isoform 2) c4( ) c5(95181, 95182, 95183, 95184, 95185, 95186) c6( ) c7(Mo, afe, Iq, FB, ED, bdU, eja, cRT, j, nA, bQ, QK, FI, ahZ); #c1(TUBA1B) c2(NP_006073) c3(tubulin alpha-1B chain) c4(161666) c5(161667, 161668, 161669, 161670, 161671, 161672) c6( ) c7(ble, if, bB, qN, ad, aqJ, bPG, aT, ae, bA, aW, Y, ff, ED, eZ, en, cl, bz, eM, bE, bdU, B); #c1(TUBA1C) c2(NP_001290046) c3(tubulin alpha-IC chain isoform b) c4(114960, 114961) c5(114962, 114963, 114964, 114965, 114966, 114967) c6( ) c7(ad, aA); #c1(TUBA1C) c2(NP_116093) c3(tubulin alpha-IC chain isoform c) c4(225347) c5(225348, 225349, 225350, 225351, 225352, 225353) c6( ) c7(ad, aA); #c1(TUBA3D) c2(NP_525125) c3(tubulin alpha-3C/D chain) c4(231181, 231182) c5(231183, 231184, 231185, 231186, 231187, 231188, 231189, 231190, 231191, 231192, 231193, 231194, 231195, 231196, 231197, 231198, 231199, 231200, 231201, 231202) c6( ) c7(bUh, aOZ, eM); #c1(TUBA4A) c2(NP_001265481) c3(tubulin alpha-4A chain isoform 2) c4( ) c5(98674, 98675, 98676, 98677, 98678, 98679, 98680) c6(98681, 98682) c7(eM, c, aT, en, PJ, V); #c1(TUBA4A) c2(NP_005991) c3(tubulin alpha-4A chain isoform 1) c4(161064, 161065) c5(161066, 161067, 161068, 161069, 161070, 161071, 161072, 161073, 161074) c6(161075, 161076) c7(eM, c, aT, en, PJ, V); #c1(TUBA8) c2(NP_001180343) c3(tubulin alpha-8 chain isoform 2) c4(73838) c5(73839, 73840, 73841, 73842, 73843, 73844) c6( ) c7(iH, af, bE, hie, X, hI, Zn, eh, jy, bK, ci, C, oi, dF, B); #c1(TUBA8) c2(NP_061816) c3(tubulin alpha-8 chain isoform 1) c4(200469) c5(200470, 200471, 200472, 200473, 200474, 200475, 200476) c6( ) c7(iH, af, bE, hie, X, hI, Zn, eh, jy, bK, ci, C, oi, dF, B); #c1(TUBB) c2(NP_001280142) c3(tubulin beta chain isoform c) c4(111370) c5(111371, 111372, 111373, 111374, 111375, 111376) c6( ) c7(es, T, av, OK, cF, iA, aW, e, mx, eZ, aT, fr, m, DY, t); #c1(TUBB) c2(NP_001280145) c3(tubulin beta chain isoform e) c4(111377, 111378) c5(111379, 111380, 111381, 111382, 111383, 111384, 111385, 111386, 111387, 111388, 111389, 111390, 111391, 111392, 111393, 111394, 111395, 111396, 111397, 111398, 111399, 111400, 111401, 111402, 111403, 111404, 111405, 111406, 111407, 111408, 111409, 111410, 111411, 111412, 111413, 111414, 111415, 111416, 111417, 111418, 111419, 111420, 111421, 111422, 111423, 111424, 111425, 111426, 111427, 111428, 111429, 111430, 111431, 111432, 111433, 111434, 111435, 111436, 111437, 111438, 111439, 111440, 111441, 111442, 111443, 111444, 111445, 111446, 111447, 111448, 111449, 111450, 111451, 111452, 111453, 111454, 111455, 111456, 111457, 111458, 111459, 111460, 111461) c6( ) c7(es, T, av, QK, cF, iA, aW, e, mx, eZ, aT, fr, m, DY, t); #c1(TUBB) c2(NP_821133) c3(tubulin beta chain isoform b) c4(253232, 253233, 253234, 253235, 253236, 253237) c5(253238, 253239, 253240, 253241, 253242, 253243, 253244, 253245, 253246, 253247, 253248, 253249, 253250, 253251, 253252, 253253, 253254, 253255, 253256, 253257, 253258, 253259, 253260, 253261, 253262, 253263, 253264, 253265, 253266, 253267, 253268, 253269, 253270, 253271, 253272, 253273, 253274, 253275, 253276, 253277, 253278, 253279, 253280, 253281, 253282, 253283, 253284, 253285, 253286, 253287, 253288, 253289, 253290, 253291, 253292, 253293, 253294, 253295, 253296, 253297, 253298, 253299, 253300, 253301, 253302, 253303, 253304, 253305, 253306, 253307, 253308, 253309, 253310, 253311, 253312, 253313, 253314, 253315, 253316, 253317, 253318, 253319, 253320, 253321, 253322, 253323, 253324, 253325, 253326, 253327, 253328, 253329, 253330, 253331, 253332, 253333, 253334, 253335, 253336, 253337, 253338, 253339, 253340, 253341, 253342, 253343, 253344, 253345, 253346, 253347, 253348, 253349, 253350, 253351, 253352) c6( ) c7(es, T, av, QK, cF, iA, aW, e, mx, eZ, aT, fr, m, DY, t); #c1(TUBB1) c2(NP_110400) c3(tubulin beta-1 chain) c4(220045) c5(220046, 220047, 220048, 220049, 220050, 220051) c6( ) c7(qq, e, aw, ac, cRU); #c1(TUBB2A) c2(NP_001060) c3(tubulin beta-2A chain) c4(34490) c5(34491, 34492, 34493, 34494, 34495, 34496) c6( ) c7(aA, bt, ha, cRV); #c1(TUBB2B) c2(NP_821080) c3(tubulin beta-28 chain) c4(253225) c5(253226, 253227, 253228, 253229, 253230, 253231) c6( ) c7(cRW, aUI, zQ, QK, Iq, FB, ED, aT, ci, bxw, bQ, zP, cRX); #c1(TUBB3) c2(NP_001184110) c3(tubulin beta-3 chain isoform 2) c4(75375) c5(75376, 75377, 75378, 75379, 75380, 75381, 75382, 75383) c6( ) c7(sc, T, kh, aNA, if, amp, ha, e, fN, XJ, aA, zN, n, jN, jh, ci, qN, UR, XM, Fc, hr, ad, yn, av, anB, ft, aE, Ig, cRZ, aT, aU, rO, dL, K, ae, eL, jf, KG, aUI, Jg, XK, PK, d, hM, A, aW, ff, cRY, aGM, Io, aF, bxw, en, g, t, XI, bDO, bz, dr, pb, cm, bw, es, eM, XG, XO, m, XN, X, XL, L); #c1(TUBB3) c2(NP_006077) c3(tubulin beta-3 chain isoform 1) c4(161714, 161715) c5(161716, 161717, 161718, 161719, 161720, 161721, 161722, 161723, 161724, 161725, 161726, 161727, 161728, 161729, 161730, 161731, 161732, 161733) c6( ) c7(sc, T, kh, aNA, if, amp, ha, e, fN, XJ, aA, zN, n, jN, jh, ci, qN, UR, XM, Fc, hr, ad, yn, av, anB, ft, aE, Ig, cRZ, aT, aU, rO, dL, K, ae, eL, jf, KG, aUI, Jg, XK, PK, d, hM, A, aW, ff, cRY, aGM, In, aF, bxw, en, g, t, XI, bDO, bz, dr, pb, cm, bw, es, eM, XG, XO, m, XN, X, XL, L); #c1(TUBB4A) c2(NP_001276056) c3(tubulin beta-4A chain isoform 2) c4(107843) c5( ) c6( ) c7(cZ, T, kh, cSa, qy, fd, fr, V, eA, ad, cSb, Tg, tT, ds, akJ, aT, Wk, aU, h, dL, dd, he, ae, eL, uQ, ael, A, d, aW, Y, eH, Pg, nY, aGM, Io, as, eF, t, QK, bDO, bz, cm, Cv, IV, mx, gZ, aez, eo, m, blu); #c1(TUBB4A) c2(NP_006078) c3(tubulin beta-4A chain isoform 3) c4( ) c5(161734, 161735, 161736, 161737, 161738, 161739, 161740, 161741, 161742, 161743) c6( ) c7(cZ, T, kh, cSa, qy, fd, fr, V, eA, ad, cSb, Tg, tT, ds, akJ, aT, Wk, aU, h, dL, dd, he, ae, eL, uQ, ael, A, d, aW, Y, eH, Pg, nY, aGM, Io, as, eF, t, QK, bDO, bz, cm, Cv, IV, mx, gZ, aez, eo, m, blu); #c1(TUBB4B) c2(NP_006079) c3(tubulin beta-48 chain) c4(161744) c5(161745, 161746, 161747, 161748, 161749, 161750) c6( ) c7(bM, T, byb, e, ame, ci, Us, hm, aW, hi, g, cm, qJ, y, bhB, eM, iA, Gs, mx, cj, uJ, zv, m, pw, iu, dt, cV, aj, fr, cd, ai, xC, Mo, ft, i, BR, cU, A, Cw, sp, agF, aPP, CQ, jT, ER, aNX, B, aNW, Dw, Rt, cz, tc, QZ, v, V, g, oT, Ig, aT, wP, bK, jj, Cy, arI, xR, oV, Y, r, Io, t, arJ, pb, ck, cT, BU, ac, IV, mG, wR, mf, bt, hS, iW, jh, aNH, tT, oW, hD, agm, IQ, mu, d, lx, Gv, xs, cr, dN, S, bz, qa, blZ, bF, es, eU, qe, bE, z, ag, dX, pK, If, gg, hv); #c1(TUBB6) c2(NP_001290455) c3(tubulin beta-6 chain isoform 3) c4( ) c5(115493, 115494, 115495, 115496, 115497, 115498) c6( ) c7(q, r); #c1(TUBB6) c2(NP_001290456) c3(tubulin beta-6 chain isoform 4) c4( ) c5(115499, 115500, 115501, 115502, 115503) c6( ) c7(q, r); #c1(TUBB6) c2(NP_115914) c3(tubulin beta-6 chain isoform 1) c4(224651, 224652, 224653) c5(224654, 224655, 224656, 224657, 224658, 224659, 224660, 224661, 224662, 224663, 224664, 224665, 224666) c6( ) c7(q, r); #c1(TUBD1) c2(NP_001180538) c3(tubulin delta chain isoform 2) c4(74220) c5(74221, 74222, 74223, 74224, 74225, 74226, 74227) c6( ) c7(aT); #c1(TUBD1) c2(NP_001180539) c3(tubulin delta chain isoform 3) c4(74228, 74229) c5(74230, 74231, 74232, 74233, 74234, 74235) c6( ) c7(aT); #c1(TUBD1) c2(NP_001180540) c3(tubulin delta chain isoform 4) c4(74236) c5(74237, 74238, 74239, 74240, 74241, 74242, 74243, 74244, 74245, 74246, 74247) c6( ) c7(aT); #c1(TUBD1) c2(NP_001180541) c3(tubulin delta chain isoform 5) c4(74248) c5( ) c6( ) c7(aT); #c1(TUBD1) c2(NP_001180542) c3(tubulin delta chain isoform 6) c4( ) c5(74249, 74250, 74251, 74252, 74253, 74254, 74255, 74256, 74257, 74258, 74259) c6( ) c7(aT); #c1(TUBD1) c2(NP_057345) c3(tubulin delta chain isoform 1) c4(190224, 190225) c5(190226, 190227, 190228, 190229, 190230, 190231) c6( ) c7(aT); #c1(TUBD1) c2(XP_005257482) c3(tubulin delta chain isoform X2) c4( ) c5(275152) c6( ) c7(aT); #c1(TUBE1) c2(NP_057346) c3(tubulin epsilon chain) c4(190232, 190233) c5(190234, 190235, 190236, 190237, 190238, 190239, 190240, 190241, 190242, 190243, 190244, 190245) c6( ) c7(A, aT); #c1(TUBE1) c2(XP_011534176) c3(tubulin epsilon chain isoform X1) c4(330473) c5(330474, 330475, 330476, 330477, 330478, 330479, 330480, 330481, 330482, 330483) c6( ) c7(A, aT); #c1(TUBG1) c2(NP_001061) c3(tubulin gamma-1 chain) c4(34497) c5(34498, 34499, 34500, 34501, 34502, 34503) c6( ) c7(PK, aW, FD, al zN, cja, cSc, QK); #c1(TUBG2) c2(NP_057521) c3(tubulin gamma-2 chain) c4(191239) c5(191240, 191241, 191242, 191243, 191244, 191245) c6( ) c7(aT); #c1(TUBGCP2) c2(NP_001243546) c3(gamma-tubulin complex component 2 isoform 1) c4(91014) c5(91015, 91016, 91017, 91018, 91019, 91020) c6( ) c7(aZJ, aw); #c1(TUBGCP2) c2(NP_006650) c3(gamma-tubulin complex component 2 isoform 2) c4(166887, 166888, 166889) c5(166890, 166891, 166892, 166893, 166894, 166895, 166896, 166897, 166898, 166899, 166900, 166901, 166902, 166903, 166904, 166905, 166906, 166907, 166908, 166909, 166910, 166911) c6( ) c7(aZJ, aw); #c1(TUBGCP3) c2(NP_006313) c3(gamma-tubulin complex component 3 isoform 1) c4(163915) c5(163916, 163917, 163918, 163919, 163920, 163921) c6( ) c7(aq, y); #c1(TUBGCP4) c2(NP_001273343) c3(gamma-tubulin complex component 4 isoform a) c4( ) c5(104711) c6( ) c7(aT); #c1(TUBGCP4) c2(NP_055259) c3(gamma-tubulin complex component 4 isoform b) c4(180108) c5(180109, 180110, 180111, 180112, 180113, 180114, 180115, 180116, 180117, 180118) c6( ) c7(aT); #c1(TUBGCP4) c2(XP_011519757) c3(gamma-tubulin complex component 4 isoform X3) c4(314449) c5(314450, 314451, 314452, 314453, 314454) c6( ) c7(aT); #c1(TUBGCP5) c2(NP_001096080) c3(gamma-tubulin complex component 5 isoform b) c4(41057) c5(41058, 41059, 41060, 41061, 41062, 41063) c6( ) c7(rc, bN); #c1(TUBGCP5) c2(NP_443135) c3(gamma-tubulin complex component 5 isoform a) c4(229605) c5(229606, 229607, 229608, 229609, 229610, 229611) c6( ) c7(rc, bN); #c1(TUBGCP6) c2(NP_065194) c3(gamma-tubulin complex component 6) c4(204524, 204525, 204526) c5(204527, 204528, 204529, 204530, 204531, 204532, 204533, 204534, 204535, 204536, 204537, 204538, 204539, 204540, 204541, 204542, 204543, 204544, 204545, 204546) c6( ) c7(h, QK, IR); #c1(TUFM) c2(NP_003312) c3(elongation factor Tu, mitochondrial precursor) c4(137369) c5(137370, 137371, 137372, 137373, 137374, 137375) c6( ) c7(bM, yo, dD, ea, ht, cj, cSd, v, eq, hX); #c1(TOFT1) c2(NP_001119809) c3(tuftelin isoform 2) c4(44304, 44305, 44306) c5(44307, 44308, 44309, 44310, 44311, 44312, 44313, 44314, 44315, 44316, 44317, 44318, 44319, 44320, 44321, 44322, 44323, 44324, 44325, 44326, 44327, 44328, 44329, 44330) c6(44331, 44332, 44333, 44334, 44335, 44336) c7(ka, Ud, Id); #c1(TUFT1) c2(NP_001288246) c3(tuftelin isoform 3) c4(113708, 113709) c5(113710, 113711, 113712, 113713, 113714, 113715, 113716, 113717) c6(113718, 113719) c7(ka, Ud, ki); #c1(TUFT1) c2(NP_064512) c3(tuftelin isoform 1) c4(202717) c5(202718, 202719, 202720, 202721, 202722, 202723, 202724, 202725, 202726, 202727, 202728, 202729, 202730, 202731, 202732, 202733, 202734, 202735, 202736, 202737, 202738, 202739, 202740, 202741, 202742, 202743, 202744, 202745, 202746, 202747, 202748, 202749, 202750, 202751, 202752, 202753, 202754, 202755, 202756, 202757, 202758, 202759, 202760, 202761, 202762, 202763, 202764, 202765, 202766, 202767, 202768, 202769, 202770, 202771, 202772, 202773, 202774, 202775, 202776, 202777, 202778, 202779, 202780, 202781, 202782, 202783, 202784, 202785, 202786, 202787, 202788, 202789, 202790, 202791, 202792, 202793, 202794, 202795, 202796, 202797, 202798, 202799, 202800, 202801, 202802, 202803, 202804, 202805, 202806, 202807, 202808, 202809, 202810, 202811, 202812) c6(202813, 202814, 202815) c7(ka, Ud, ki); #c1(TUFT1) c2(XP_011508263) c3(tuftelin isoform X1) c4(298952) c5(298953, 298954, 298955, 298956, 298957, 298958, 298959, 298960) c6(298961, 298962) c7(ka, Ud, ki); #c1(TULP1) c2(NP_001276324) c3(tubby-related protein 1 isoform 2) c4(108018, 108019) c5(108020, 108021, 108022, 108023, 108024, 108025, 108026, 108027, 108028, 108029, 108030, 108031) c6( ) c7(alF, IR, cSf, cwx, cSg, cSe, nw, v, nk, nC); #c1(TULP1) c2(NP_003313) c3(tubby-related protein 1 isoform 1) c4(137376) c5(137377, 137378, 137379, 137380, 137381, 137382, 137383) c6( ) c7(alF, IR, cSf, cwx, cSg, cSe, nw, v, nk, nC); #c1(TULP2) c2(NP_003314) c3(tubby-related protein 2) c4(137384) c5(137385, 137386, 137387, 137388, 137389, 137390, 137391) c6( ) c7(nC, nw, cSe); #c1(TULP3) c2(NP_001153880) c3(tubby-related protein 3 isoform 2) c4(61011) c5(61012, 61013, 61014, 61015, 61016, 61017, 61018) c6( ) c7(kp, eJ, aE); #c1(TULP3) c2(NP_003315) c3(tubby-related protein 3 isoform 1) c4(137392, 137393, 137394) c5(137395, 137396, 137397, 137398, 137399, 137400, 137401, 137402, 137403, 137404, 137405, 137406, 137407, 137408, 137409, 137410, 137411, 137412, 137413, 137414, 137415, 137416) c6( ) c7(kp, eJ, aE); #c1(TULP4) c2(NP_001007467) c3(tubby-related protein 4 isoform 2) c4( ) c5(22708, 22709, 22710, 22711, 22712, 22713) c6( ) c7(bOx); #c1(TULP4) c2(NP_064630) c3(tubby-related protein 4 isoform 1) c4(203389, 203390) c5(203391, 203392, 203393, 203394, 203395, 203396, 203397) c6( ) c7(bOx); #c1(TOSC1) c2(NP_001004125) c3(tumor suppressor candidate gene 1 protein) c4(20441) c5(20442, 20443, 20444, 20445, 20446, 20447) c6( ) c7(dY, PN, hk, Y, aA, cz, aE, hB, bz, ad); #c1(TOSC2) c2(NP_009206) c3(tumor suppressor candidate 2) c4(171498) c5(171499, 171500, 171501, 171502, 171503, 171504) c6( ) c7(T, dA, iW, aj, v, cd, av, ft, ib, aT, d, nO, aW, r, uF, iK, bz, ck, c, eM, Qu, wq, dT, zG, zI, ao); #c1(TOSC3) c2(NP_006756) c3(tumor suppressor candidate 3 isoform a precursor) c4(167738) c5(167739, 167740, 167741, 167742, 167743, 167744, 167745, 167746, 167747, 167748, 167749, 167750, 167751, 167752) c6( ) c7(bM, kh, d, cSh, ff, dv, eH, m, nA, en, eF, t, ad); #c1(TOSC3) c2(NP_839952) c3(tumor suppressor candidate 3 isoform b precursor) c4(253577) c5(253578, 253579, 253580, 253581, 253582, 253583) c6( ) c7(bM, kh, d, cSh, ff, dv, eH, m, nA, en, eF, t, ad); #c1(TOSC5) c2(NP_758955) c3(tumor suppressor candidate 5) c4(249398) c5(249399, 249400, 248401, 249402, 249403, 249404) c6( ) c7(aj, J); #c1(TUT1) c2(NP_073741) c3(speckle targeted PIP5K1A-regulated poly(A) polymerase) c4(213391, 213392) c5(213393, 213394, 213395, 213396, 213397, 213398, 213399, 213400, 213401, 213402, 213403, 213404) c6( ) c7(T); #c1(TVP238) c2(NP_057162) c3(Golgi apparatus membrane protein TVP23 homolog B) c4(189224) c5(189225, 189226, 189227, 189228, 189229, 189230) c6( ) c7(aC); #c1(TWF1) c2(NP_001229326) c3(twinfilin-1 isoform 1) c4(84206) c5(84207, 84208, 84209, 84210, 84211, 84212) c6( ) c7(aW, jh, aT); #c1(TWF1) c2(NP_002813) c3(twinfilin-1 isoform 2) c4(132405, 132406) c5(132407, 132408, 132409, 132410, 132411, 132412, 132413, 132414, 132415, 132416, 132417, 132418) c6( ) c7(aW, jh, aT); #c1(TWIST1) c2(XP_011513798) c3(twist-related protein 1 isoform X1) c4(306263) c5(306264, 306265, 306266, 306267, 306268, 306269, 306270) c6( ) c7(gh, T, aC, rV, if, bB, ci, zW, ash, aE, bnt, K, hu, eL, aa, aW, are, Az, btB, agj, g, eF, cm, bw, zV, eM, nB, m, bsB, zt, ht, aBx, n, nA, qN, cd, hr, ai, agi, By, dL, Dz, cSj, btj, dB, btW, hL, zG, art, it, B, fG, aA, v, AO, q, eA, aT, rz, ae, bA, jr, avg, s, Y, r, en, c1, t, iK, mG, np, yH, cSk, cSi, auq, zO, pz, xt, ad, av, hd, yt, hP, fb, aca, ff, eH, dg, aeV, aF, aJW, iV, bz, aII, LB, eO, bE, uR, iu, sH); #c1(TWIST2) c2(NP_001258822) c3(twist-related protein 2) c4(96563) c5(96564, 96565, 96566, 96567, 96568, 96569) c6( ) c7(T, asW, if, ci, qN, q, cSI, x, rC, aT, iL, B, aW, ff, eH, r, en, eF, t, Ci, ck, cj, m, k, aAE); #c1(TWSG1) c2(NP_065699) c3(twisted gastrulation protein homolog 1 precursor) c4(204997) c5(204998, 204999, 205000, 205001, 205002, 205003) c6( ) c7(T, id, if, al, KY, aA, bB, n, fr, ci, qN, g, ad, x, av, ft, ib, aE, py, aT, gs, K, ZW, ae, jf, aW, Y, ff, r, aF, en, g, t, cm, bz, gk, Ew, bP, eM, bE, afd, hR, aSp, m, bt, it, B, VB); #c1(TXK) c2(NP_003319) c3(tyrosine-protein kinase TXK) c4(137457) c5(137458, 137459, 137460, 137461, 137462, 137463) c6( ) c7(hH); #c1(TXLNG) c2(NP_001162154) c3(gamma-taxilin isoform 2) c4(66338, 66339) c5(66340, 66341, 66342, 66343, 66344, 66345, 66346, 66347, 66348, 66349, 66350, 66351, 66352, 66353, 66354, 66355) c6( ) c7(aq, B); #c1(TXLNG) c2(NP_060830) c3(gamma-taxilin isoform 1) c4(198027, 198028, 198029, 198030) c5(198031, 198032, 198033, 198034, 198035, 198036, 198037) c6( ) c7(aq, B); #c1(TXLNG) c2(XP_005274615) c3(gamma-taxilin isoform X2) c4(285215, 285216) c5(285217, 285218, 285219, 285220, 285221, 285222, 285223, 285224, 285225, 285226, 285227, 285228, 285229, 285230, 285231, 285232, 285233, 285234, 285235, 285236, 285237, 285238, 285239, 285240, 285241, 285242, 285243, 285244) c6( ) c7(aq, B); #c1(TXLNG) c2(XP_011543845) c3(gamma-taxilin isoform X1) c4( ) c5(342986) c6( ) c7(aq, B); #c1(TXN) c2(NP_001231867) c3(thioredoxin isoform 2) c4(87585) c5(87586, 87587, 87588, 87589, 87590, 87591) c6( ) c7(T, os, aC, ea, e, eh, bB, fd, ci, aR, aE, Bc, K, aiV, Pf, aW, fc, hI, zC, as, eF, cm, eM, aCT, wE, ki, vA, U, cj, m, dD, gU, aw, fN, BH, aj, PJ, JW, cd, ai, ke, b, cc, kH, cU, IG, oS, A, dw, op, aDu, B, bL, aA, sM, cz, q, J, eA, uT, Ig, aT, cy, adV, bq, ae, eu, Y, afS, cSm, r, t, f, iK, tR, ck, iM, ac, c, wR, dy, ao, hS, yv, oZ, dG, eq, wV, ad, dP, av, yt, ds, ji, MG, d, je, dq, aF, bz, dr, qa, Hp, D, bE, apv, i, hE, y); #c1(TXN) c2(NP_003320) c3(thioredoxin isoform 1) c4(137464) c5(137465, 137466, 137467, 137468, 137469, 137470) c6( ) c7(T, os, aC, ea, e, eh, bB, fd, ci, aR, aE, Be, K, aiV, Pf, aW, fc, hI, zC, as, eF, cm, eM, aCT, wE, ki, vA, U, cj, m, dD, gU, aw, fN, BH, aj, PJ, JW, cd, ai, ke, b, cc, kH, cU, IG, oS, A, dw, op, aDu, B, bL, aA, sM, cz, q, J, eA, uT, Ig, aT, cy, adV, bq, ae, eu, Y, afS, cSm, r, t, f, iK, tR, ck, iM, ac, c, wR, dy, an, hS, yv, oZ, dG, eq, wV, ad, dP, av, yt, ds, ji, MG, d, je, dq, aF, bz, dr, qa, Hp, D, bE, apv, i, hE, y); #c1(TXN2) c2(XP_005261565) c3(thioredoxin, mitochondrial isoform X2) c4( ) c5(277481, 277482) c6( ) c7(BN, Ip, Be, aW, eH, mx, aT, IG, aj, hy, K, C, bq, eF, ne, J); #c1(TXN2) c2(XP_006724289) c3(thioredoxin, mitochondrial isoform X1) c4(295888) c5(295889, 295890, 295891, 295892, 295893, 295894, 295895, 295896) c6( ) c7(BN, Ip, Be, aW, eH, mx, aT, IG, aj, hy, K, C, bq, eF, ne, J); #c1(TXNDC15) c2(NP_078991) c3(thioredoxin domain-containing protein 15 precursor) c4(216438, 216439, 216440) c5(216441, 216442, 216443, 216444, 216445, 216446, 216447, 216448, 216449, 216450, 216451, 216452, 216453, 216454, 216455, 216456, 216457, 216458) c6( ) c7(aW, fd, aT); #c1(TXNDC16) c2(NP_065835) c3(thioredoxin domain-containing protein 16 isoform 1 precursor) c4(205766) c5(205767, 205768, 205769, 205770, 205771, 205772, 205773, 205774) c6(205775, 205776) c7(Na, ip); #c1(TXNDC17) c2(NP_116120) c3(thioredoxin domain-containing protein 17) c4(225421) c5(225422, 225423, 225424, 225425, 225426, 225427) c6( ) c7(it); #c1(TXNDC5) c2(NP_001139021) c3(thioredoxin domain-containing protein 5 isoform 3) c4(58675) c5(58676, 58677, 58678, 58679, 58680) c6( ) c7(T, y, mR, aE, Jl, fO, NT, aT, aA, aq, fd, aF, qj, K, qN, iR, AO, B, ad, pC); #c1(TXNDC5) c2(NP_110437) c3(thioredoxin domain-containing protein 5 isoform 1 precursor) c4(220368, 220369) c5(220370, 220371, 220372, 220373, 220374, 220375, 220376, 220377, 220378, 220379, 220380, 220381, 220382) c6( ) c7(T, y, mR, aE, Jl, fO, NT, aT, aA, aq, fd, aF, qj, K, qN, iR, AO, B, ad, pC); #c1(TXNL1) c2(NP_004777) c3(thioredoxin-like protein 1) c4(149533, 149534) c5(149535, 149536, 149537, 149538, 149539, 149540, 149541, 149542, 149543, 149544, 149545, 149546) c6( ) c7(bt, aF, K, aA); #c1(TXNRD1) c2(NP_001087240) c3(thioredoxin reductase 1, cytoplasmic isoform 3) c4(38268, 38269, 38270, 38271, 38272, 38273, 38274, 38275, 38276, 38277, 38278, 38279, 38280, 38281, 38282, 38283, 38284) c5(38285, 38286, 38287, 38288, 38289, 38290, 38291, 38292, 38293, 38294, 38295, 38296, 38297, 38298, 38299, 38300, 38301, 38302) c6( ) c7(bM, T, eR, WA, aw, ha, ol, bB, bZ, aj, Vd, j, v, PJ, nE, aR, J, ad, qC, fU, HF, av, ib, yQ, hb, oj, adX, aT, IG, Ak, bK, K, Gz, bq, hS, jj, ae, ajU, bA, aK, DA, kl, s, aW, aM, az, hl, ff, So, dq, HL, en, Z, f, px, bz, eE, dr, bN, iK, ck, mO, adc, c, adZ, SE, dB, bE, awN, eM, bo, U, avF, eQ, anx, IM, y, kS, ao, DB); #c1(TXNRD1) c2(NP_001248374) c3(thioredoxin reductase 1, cytoplasmic isoform 4) c4( ) c5(93836, 93837, 93838, 93839, 93840, 93841, 93842, 93843, 93844, 93845, 93846, 93847, 93848, 93849, 93850, 93851, 93852, 93853, 93854, 93855, 93856, 93857, 93858, 93859, 93860, 93861, 93862, 93863, 93864, 93865, 93866, 93867, 93868, 93869, 93870, 93871, 93872, 93873, 93874, 93875, 93876, 93877, 93878, 93879, 93880, 93881, 93882, 93883, 93884, 93885, 93886, 93887, 93888, 93889, 93890, 93891, 93892) c6( ) c7(bM, T, eR, WA, aw, ha, ol, bB, bZ, aj, Vd, j, v, PJ, nE, aR, J, ad, qC, fU, HE, av, ib, yQ, hb, oj, adX, aT, IG, Ak, bK, K, Gz, bq, hS, jj, ae, ajU, bA, aK, DA, kl, s, aW, aM, az, hi, ff, So, dq, HL, en, Z, f, px, bz, eE, dr, bN, iK, ck, mO, adc, c, adZ, SE, dB, bE, awN, eM, bo, U, avF, eQ, anx, IM, y, kS, ao, DB); #c1(TXNRD1) c2(NP_001248375) c3(thioredoxin reductase 1, cytoplasmic isoform 5) c4( ) c5(93893, 93894, 93895, 93896, 93897) c6( ) c7(bM, T, eR, WA, aw, ha, ol, bB, bZ, aj, Vd, j, v, PJ, nE, aR, J, ad, qC, fU, HE, av, ib, yQ, hb, oj, adX, aT, IG, Ak, bK, K, Gz, bq, hS, jj, ae, ajU, bA, aK, DA, kl, s, aW, aM, az, hl, ff, So, dq, HL, en, Z, f, px, bz, eE, dr, bN, iK, ck, mO, adc, c, adZ, SE, dB, bE, awN, eM, bo, U, avF, eQ, anx, IM, y, kS, ao, DB); #c1(TXNRD1) c2(NP_003321) c3(thioredoxin reductase 1, cytoplasmic isoform 1) c4(137471, 137472) c5(137473, 137474, 137475, 137476, 137477, 137478, 137479, 137480, 137481, 137482, 137483, 137484) c6( ) c7(bM, T, eR, WA, aw, ha, ol, bB, bZ, aj, Vd, j, v, PJ, nE, aR, J, ad, qC, fU, HE, av, ib, yQ, hb, oj, adX, aT, IG, Ak, bK, K, Gz, bq, hS, jj, ae, ajU, bA, aK, DA, kl, s, aW, aM, az, hi, ff, So, dq, HL, en, Z, f, px, bz, eE, dr, bN, iK, ck, mO, adc, c, adZ, SE, dB, bE, awN, eM, bo, U, avF, eO, anx, IM, y, kS, ao, DB); #c1(TXNRD1) c2(NP_877420) c3(thioredoxin reductase 1, cytoplasmic isoform 2) c4( ) c5(256765, 256766, 256767, 256768, 256769, 256770, 256771, 256772, 256773, 256774, 256775, 256776, 256777, 256778, 256779, 256780, 256781, 256782, 256783, 256784, 256785, 256786, 256787, 256788, 256789) c6( ) c7(bM, T, eR, WA, aw, ha, ol, bB, bZ, aj, Vd, j, v, PJ, nE, aR, J, ad, qC, fU, HE, av, ib, yQ, hb, oj, adX, aT, IG, Ak, bK, K, Gz, bq, hS, jj, ae, ajU, bA, aK, DA, kl, s, aW, aM, az, hi, ff, So, dq, HL, en, Z, f, px, bz, eE, dr, bN, iK, ck, mO, adc, c, adZ, SE, dB, bE, awN, eM, bo, U, avF, eQ, anx, IM, y, kS, ao, DB); #c1(TXNRD2) c2(NP_001269441) c3(thioredoxin reductase 2, mitochondrial isoform 2 precursor) c4(101669) c5(101670, 101671, 101672, 101673, 101674, 101675) c6( ) c7(oq, T, Js, zt, aA, hz, gf, qj, q, ad, md, hd, no, aT, IG, dL, K, bq, ae, aK, aW, r, aF, ahV, pv, y, aZT, nB, kz, ali, hr, mx, dX, gT, B, Jo, pC); #c1(TXNRD2) c2(NP_006431) c3(thioredoxin reductase 2, mitochondrial isoform 1 precursor) c4(165155, 165156, 165157, 165158, 165159, 165160) c5(165161, 165162, 165163, 165164, 165165, 165166, 165167, 165168, 165169, 165170, 165171165172, 165173, 165174, 165175, 165176, 165177, 165178, 165179, 165180, 165181, 165182, 165183, 165184, 165185, 165186, 165187, 165188, 165189, 165190, 165191, 165192, 165193, 165194, 165195) c6( ) c7(oq, T, Js, zt, aA, hz, gf, qj, q, ad, md, hd, no, aT, IG, dL, K, bq, ae, aK, aW, r, aF, ahV, pv, y, aZT, nB, kz, ali, hr, mx, dX, gT, B, Jo, pC); #c1(TXNRD3) c2(NP_001166984) c3(thioredoxin reductase 3 isoform 2) c4(68757, 68758) c5(68759, 68760, 68761, 68762, 68763, 68764, 68765, 68766, 68767, 68768) c6( ) c7(uH, e, aw, cz, cy, aj, sl, ae, J, ad); #c1(TXNRD3) c2(NP_443115) c3(thioredoxin reductase 3 isoform 1) c4(229498) c5(229499, 229500, 229501, 229502, 229503, 229504, 229505) c6( ) c7(uH, e, aw, cz, cy, aj, sl, ae, J, ad); #c1(TXNRD3NB) c2(NP_001034872) c3(protein TXNRD3NB) c4(32371) c5(32372, 32373, 32374, 32375, 32376, 32377, 32378, 32379, 32380, 32381, 32382) c6( ) c7(cr); #c1(TYK2) c2(XP_011526547) c3(non-receptor tyrosine-protein kinase TYK2 isoform X1) c4(320848) c5(320849, 320850, 320851, 320852, 320853, 320854, 320855, 320856, 320857, 320858) c6( ) c7(bL, gV, T, bM, Dw, al, bO, jh, bS, v, fr, V, mC, ad, bhq, ip, F, aT, Ds, hn, DU, btE, fb, bc, uQ, A, aW, oV, cr, eZ, dN, cu, lo, pm, t, bw, cSn, btK, ck, pc, iT, nL, pg, fL, y, bt, zA); #c1(TYK2) c2(XP_011526549) c3(non-receptor tyrosine-protein kinase TYK2 isoform X2) c4(320859) c5(320860, 320861, 320862, 320863, 320864, 320865) c6( ) c7(bL, gV, T, bM, Dw, al, bO, jh, bS, v, fr, V, mC, ad, bhq, ip, F, aT, Ds, hn, DU, btE, fb, bc, uQ, A, aW, oV, cr, eZ, dN, cu, lo, pm, t, bw, cSn, btK, ck, pc, iT, nL, pg, fL, y, bt, zA); #c1(TYK2) c2(XP_011526550) c3(non-receptor tyrosine-protein kinase TYK2 isoform X3) c4(320866) c5( ) c6( ) c7(bL, gV, T, bM, Dw, al, bO, jh, bS, v, fr, V, mC, ad, bhq, ip, F, aT, Ds, hn, DU, btE, fb, bc, uQ, A, aW, oV, cr, eZ, dN, cu, lo, pm, t, bw, cSn, btK, ck, pc, iT, nL, pg, fL, y, bt, zA); #c1(TYK2) c2(XP_011526554) c3(non-receptor tyrosine-protein kinase TYK2 isoform X7) c4( ) c5(320867, 320868, 320869, 320870, 320871, 320872) c6( ) c7(bL, gV, T, bM, Dw, al, bO, jh, bS, v, fr, V, mC, ad, bhq, ip, F, aT, Ds, hn, DU, btE, fb, bc, uQ, A, aW, oV, cr, eZ, dN, cu, lo, pm, t, bw, cSn, btK, ck, pc, iT, nL, pg, fL, y, bt, zA); #c1(TYMP) c2(NP_001107227) c3(thymidine phosphotase isoform 1 proprotein) c4(42814) c5(42815, 42816, 42817, 42818, 42819, 42820, 42821, 42822, 42823, 42824, 42825, 42826, 42827, 42828) c6( ) c7(bL, T, dD, aC, KR, ea, if, al, NT, cSp, aA, bB, n, aj, aNG, j, ci, fu, bX, eq, qN, q, ad, eA, dP, hd, aE, cSo, hb, afQ, aT, Nf, dL, K, dF, eL, Ft, xQ, d, s, aW, Y, ev, ff, cr, r, ks, aF, brr, en, avG, GF, t, cM, kC, bz, Px, cI, g, cm, ar, mO, sS, nM, Fr, c, zr, bE, hk, eM, X, gX, hL, m, IM, y, it, B, Al); #c1(TYMS) c2(NP_001062) c3(thymidylate synthase) c4(34504, 34505, 34506) c5(34507, 34508, 34509, 34510, 34511, 34512, 34513, 34514, 34515, 34516, 34517, 34518, 34519, 34520, 34521, 34522, 34523, 34524) c6( ) c7(ng, G, T, aC, pf, fV, if, fd, bB, ci, aR, ip, x, Na, aE, iL, fS, pX, dV, ja, azm, K, hu, hH, eL, cSq, In, Jl, aW, CT, LZ, NR, g, eF, GR, fT, eM, iA, Ip, wE, k, m, iu, sw, ht, NT, aip, n, oY, awr, fr, et, qN, zP, eW, ft, qg, qd, h, Gw, hn, dL, wb, ey, ask, hi, MX, AQ, ahJ, aq, YE, zZ, cM, ar, bP, gY, Qu, hL, bm, at, bD, Qz, Pr, B, it, fM, atB, fZ, aA, hy, cSr, j, bX, q, hb, qK, yg, aT, bSx, Nc, Tj, ae, ne, eu, Uf, s, nO, iU, Y, ev, aZs, apK, r, en, aDY, cI, t, f, iK, ck, Qi, ac, aGi, nG, gX, dy, ij, byK, aws, bt, gV, Gl, Dd, iW, jh, bS, uu, hF, ad, afb, av, ib, py, NS, oW, iL, WW, d, hG, ff, eZ, aF, avG, Z, bz, iq, es, bE, cgA, Gu, i, y, X); #c1(TYR) c2(NP_000363) c3(tyrosinase precursor) c4(8024) c5(8025, 8026, 8027, 8028, 8029, 8030, 8031, 8032, 8033, 8034, 8035, 8036, 8037, 8038, 8039, 8040, 8041, 8042, 8043, 8044, 8045, 8046, 8047, 8048, 8049, 8050, 8051, 8052, 8053, 8054, 8055, 8056, 8057, 8058, 8059, 8060, 8061, 8062, 8063, 8064, 8065, 8066, 8067, 8068, 8069, 8070, 8071, 8072, 8073, 8074, 8075, 8076, 8077, 8078, 8079, 8080, 8081, 8082, 8083, 8084, 8085, 8086, 8087, 8088, 8089, 8090, 8091, 8092, 8093, 8094, 8095, 8096, 8097, 8098, 8099, 8100, 8101, 8102, 8103, 8104, 8105, 8106, 8107, 8108, 8109, 8110, Bill, 8112, 8113, 8114, 8115, 8116, 8117) c6(8H8) c7(T, qj, pC, cSw, YD, aJD, aIx, K, cp, Ls, HA, XC, bHy, cm, iP, eM, aBO, bbF, m, gn, cZ, n, rc, eW, Nn, azt, kH, dL, cSv, dd, he, awL, MX, kj, cSx, bP, cA, dB, hk, at, JJ, cSu, yk, ze, oc, V, eA, cSt, afQ, bK, an, ae, Y, yL, cSs, en, bu, t, bN, ck, sS, iM, Dy, cer, rK, ao, hI, iW, cSz, ad, cmw, Rq, ds, cb, atX, d, je, asf, ff, cr, eZ, gl, cSy, aTa, dr, bE, IF, bC, aYn); #c1(TYRO3) c2(NP_006284) c3(tyrosine-protein kinase receptor TYRO3 precursor) c4(163592) c5( ) c6( ) c7(bM, T, dD, cSA, Bm, eq, ai, mC, ad, av, hW, h, cy, ae, eG, Ls, eZ, lo, pL, bz, Qt, ck, cS, fL, QC, bt); #c1(TYRO3) c2(XP_011520294) c3(tyrosine-protein kinase receptor TYRO3 isoform X1) c4( ) c5(315130, 315131, 315132, 315133, 315134, 315135, 315136) c6( ) c7(bM, T, dD, cSA, Bm, eq, ai, mC, ad, av, hW, h, cy, ae, eG, Ls, eZ, lo, PL, bz, Qt, ck, cS, fL, QC, bt); #c1(TYRO3) c2(XP_011520295) c3(tyrosine-protein kinase receptor TYRO3 isoform X2) c4(315137) c5(315138, 315139, 315140, 315141, 315142) c6( ) c7(bM, T, dD, cSA, Bm, eq, ai, mC, ad, av, hW, h, cy, ae, eG, Ls, eZ, lo, pL, bz, Qt, ck, cS, fL, QC, bt); #c1(TYROBP) c2(NP_001166985) c3(TYRO protein tyrosine kinase-binding protein isoform 3 precursor) c4(68769) c5(68770, 68771, 68772, 68773, 68774, 68775) c6( ) c7(y, hi, abg, eZ, amW, he, dy, axQ, ey, mF, t, Fc, bOF, dr, Hp); #c1(TYROBP) c2(NP_003323) c3(TYRO protein tyrosine kinase-binding protein isoform 1 precursor) c4(137485) c5(137486, 137487, 137488, 137489, 137490, 137491) c6( ) c7(y, hi, abg, eZ, a mW, he, dy, axQ, ey, mF, t, Fc, bOF, dr, Hp); #c1(TYROBP) c2(NP_937758) c3(TYRO protein tyrosine kinase-binding protein isoform 2 precursor) c4(259050) c5(259051, 259052, 259053, 259054, 259055, 259056, 259057, 259058, 259059, 259060) c6( ) c7(y, hi, abg, eZ, a mW, he, dy, axQ, ey, mF, t, Fc, bOF, dr, Hp); #c1(TYRP1) c2(NP_000541) c3(5,6-dihydroxyindole-2-carboxylic acid oxidase precursor) c4(12405, 12406, 12407) c5(12408, 12409, 12410, 12411, 12412, 12413, 12414, 12415, 12416, 12417, 12418, 12419, 12420, 12421, 12422, 12423, 12424, 12425) c6( ) c7(bM, T, ZV, lT, e, cSz, cV, cbc, bB, jN, aNG, uu, qj, IN, V, aYs, pC, ad, aJO, av, xy, cSt, ec, afQ, aT, hD, vw, cmx, HR, K, ae, ajU, cp, kj, aW, Y, Gv, ff, hi, XC, FU, en, bHy, dw, t, vo, g, cm, dr, iP, cSB, Dy, GU, kB, II, hk, bE, wB, U, IF, nw, dy, cSC, m, gn, eo, L); #c1(TYSND1) c2(NP_001035363) c3(peroxisomal leader peptide-processing protease isoform b) c4(32815) c5(32816, 32817, 32818, 32819, 32820, 32821, 32822) c6( ) c7(gU, aL); #c1(TYSND1) c2(NP_775826) c3(peroxisomal leader peptide-processing protease isoform a) c4(250446) c5(250447, 250448, 250449, 250450, 250451, 250452) c6( ) c7(gU, aL); #c1(TYW1B) c2(XP_011514532) c3(S-adenosyl-L-methionine-dependent tRNA 4-demethylwyosine synthase isoform X1) c4(307233) c5( ) c6( ) c7(ac, an); #c1(TYW1B) c2(XP_011514534) c3(S-adenosyl-L-methionine-dependent tRNA 4-demethylwyosine synthase isoform X3) c4(307234) c5(307235, 307236, 307237, 307238, 307239, 307240, 307241, 307242, 307243, 307244) c6( ) c7(ac, an); #c1(U2AF1) c2(NP_001020375) c3(splicing factor U2AF 35 kDa subunit isoform c) c4( ) c5(28685, 28686, 28687, 28688, 28689, 28690, 28691, 28692) c6( ) c7(pq, T, cPs, aE, yR, cj, cz, h, bw, yZ, np, ci, g, hf, yY, f, bt, hr, bA); #c1(U2AF2) c2(NP_001012496) c3(splicing factor U2AF 65 kDa subunit isoform b) c4(25012) c5(25013, 25014, 25015, 25016, 25017, 25018) c6( ) c7(q, r); #c1(U2AF2) c2(NP_009210) c3(splicing factor U2AF 65 kDa subunit isoform a) c4(171532) c5(171533, 171534, 171535, 171536, 171537, 171538) c6( ) c7(q, r); #c1(UACA) c2(NP_001008225) c3(uveal autoantigen with coiled-coil domains and ankyrin repeats isoform 2) c4(22916, 22917) c5(22918, 22919, 22920, 22921, 22922, 22923, 22924, 22925, 22926, 22927, 22928, 22929) c6( ) c7(eM, T, B, mP, bX); #c1(UACA) c2(NP_060473) c3(uveal autoantigen with coiled-coil domains and ankyrin repeats isoform 1) c4(196117) c5(196118, 196119, 196120, 196121, 196122, 196123) c6( ) c7(eM, T, B, mP, bX); #c1(UACA) c2(XP_005254586) c3(uveal autoantigen with coiled-coil domains and ankyrin repeats isoform X4) c4(273265) c5(273266, 273267, 273268, 273269, 273270, 273271) c6( ) c7(eM, T, B, mP, bX); #c1(UAP1) c2(NP_003106) c3(UDP-N-acetylhexosamine pyrophospherylase) c4(135363) c5(135364, 135365, 135366, 135367, 135368, 135369, 135370, 135371, 135372, 135373, 135374, 135375) c6( ) c7(cz); #c1(UAP1) c2(XP_005245522) c3(UDP-N-acetylhexosamine pyrophosphorylase isoform X2) c4(266690) c5(266691, 266692, 266693, 266694, 266695, 266696) c6( ) c7(cz); #c1(UAP1) c2(XP_011508217) c3(UDP-N-acetylhexosamine pyrophosphorylase isoform X1) c4(298827, 298828) c5(298829, 298830, 298831, 298832, 298833, 298834, 298835, 298836, 298837, 298838) c6( ) c7(cz); #c1(UBA1) c2(XP_011542255) c3(ubiquitin-like modifier-activating enzyme 1 isoform X2) c4(340792, 340793, 340794, 340795, 340796) c5(340797, 340798, 340799, 340800, 340801, 340802, 340803, 340804, 340805, 340806, 340807, 340808, 340809, 340810) c6( ) c7(Qi, apq, apl, kf, cSD, arX, y); #c1(UBA1) c2(XP_011542256) c3(ubiquitin-like modifier-activating enzyme 1 isoform X3) c4(340811) c5(340812, 340813, 340814, 340815, 340816, 340817, 340818, 340819, 340820, 340821, 340822, 340823) c6( ) c7(Qi, apq, apl, kf, cSD, arX, y); #c1(UBA1) c2(XP_011542257) c3(ubiquitin-like modifier-activating enzyme 1 isoform X4) c4(340824) c5( ) c6( ) c7(Qi, apq, apl, kf, cSD, arX, y); #c1(UBA1) c2(XP_011542258) c3(ubiquitin-like modifier-activating enzyme 1 isoform X1) c4( ) c5(340825, 340826, 340827, 340828, 340829, 340830, 340831, 340832, 340833, 340834, 340835, 340836, 340837, 340838, 340839, 340840, 340841, 340842, 340843, 340844) c6( ) c7(Qi, apq, apl, kf, cSD, arX, y); #c1(UBA2) c2(NP_005490) c3(SUMO-activating enzyme subunit 2) c4(156752) c5(156753, 156754, 156755, 156756, 156757, 156758) c6( ) c7(ahs, ahp, WO, FB, nd, aeq, ha, aT, nf, aU, cC, aht, Im, h, nA, ahu, FD, xw, aR, bN); #c1(UBA2) c2(XP_005258461) c3(SUMO-activating enzyme subunit 2 isoform X1) c4( ) c5(275680) c6( ) c7(ahs, ahp, WO, FB, nd, aeq, ha, aT, nf, aU, cC, aht, Im, h, nA, ahu, ED, xw, aR, bN); #c1(UBA2) c2(XP_006723025) c3(SUMO-activating enzyme subunit 2 isoform X3) c4(294987, 294988) c5(294989, 294990, 294991, 294992, 294993, 294994, 294995, 294996, 294997, 294998, 294999) c6( ) c7(ahs, ahp, WO, FB, nd, aeq, ha, aT, nf, aU, cC, aht, Im, h, nA, ahu, ED, xw, aR, bN); #c1(UBA2) c2(XP_011524606) c3(SUMO-activating enzyme subunit 2 isoform X2) c4( ) c5(319149) c6( ) c7(ahs, ahp, WO, FB, nd, aeq, ha, aT, nf, aU, cC, aht, Im, h, nA, ahu, FD, xw, aR, bN); #c1(UBA3) c2(NP_003959) c3(NEDD8-activating enzyme E1 catalytic subunit isoform 1) c4(142465) c5(142466, 142467, 142468, 142469, 142470, 142471) c6( ) c7(f); #c1(UBA3) c2(NP_937838) c3(NEDD8-activating enzyme E1 catalytic subunit isoform 2) c4(259265) c5(259266, 259267, 259268, 259269, 259270, 259271) c6( ) c7(f); #c1(UBA3) c2(XP_011532512) c3(NEDD8-activating enzyme E1 catalytic subunit isoform X1) c4(328634) c5( ) c6( ) c7(f); #c1(UBA3) c2(XP_011532513) c3(NEDD8-activating enzyme E1 catalytic subunit isoform X2) c4( ) c5(328635, 328636, 328637, 328638, 328639, 328640) c6( ) c7(f); #c1(UBA7) c2(NP_003326) c3(ubiquitin-like modifier-activating enzyme 7) c4(137492) c5(137493, 137494, 137495, 137496, 137497, 137498) c6( ) c7(av, T, aoT, lo, jj, bz, kS, pi); #c1(UBAC1) c2(NP_057256) c3(ubiquitin-associated domain-containing protein 1) c4(189746) c5(189747, 189748, 189749, 189750, 189751, 189752) c6( ) c7(C); #c1(UBAC2) c2(NP_001137544) c3(ubiquitin-associated domain-containing protein 2 isoform 1 precursor) c4(56014) c5(56015, 56016, 56017, 56018, 56019, 56020) c6( ) c7(hH, sS); #c1(UBAC2) c2(NP_808882) c3(ubiquitin-associated domain-containing protein 2 isoform 2) c4(253002) c5(253003, 253004, 253005, 253006, 253007, 253008) c6( ) c7(hH, sS); #c1(UBAP1) c2(NP_001164672) c3(ubiquitin-associated protein 1 isoform 2) c4(67168) c5(67169, 67170, 67171, 67172, 67173, 67174) c6( ) c7(WY, aw, rS, aaE, ci, hm); #c1(UBAP1) c2(NP_001164673) c3(ubiquitin-associated protein 1 isoform 3) c4(67175) c5(67176, 67177, 67178, 67179, 67180, 67181) c6( ) c7(WY, aw, rS, aaE, ci, hm); #c1(UBAP1) c2(NP_057609) c3(ubiquitin-associated protein 1 isoform 1) c4(191721, 191722) c5(191723, 191724, 191725, 191726, 191727, 191728, 191729, 191730, 191731, 191732, 191733, 191734, 191735, 191736, 191737, 191738, 191739, 191740, 191741, 191742, 191743, 191744, 191745, 191746) c6( ) c7(WY, aw, rS, aaE, ci, hm); #c1(UBAP2) c2(NP_001269458) c3(ubiquitin-associated protein 2 isoform 4) c4(101707, 101708, 101709) c5(101710, 101711, 101712, 101713, 101714, 101715, 101716, 101717, 101718, 101719, 101720, 101721) c6( ) c7(WY); #c1(UBAP2) c2(NP_001269459) c3(ubiquitin-associated protein 2 isoform 5) c4( ) c5(101722, 101723, 101724, 101725, 101726, 101727, 101728, 101729, 101730, 101731, 101732, 101733) c6( ) c7(WY); #c1(UBAP2) c2(NP_060919) c3(ubiquitin-associated protein 2 isoform 1) c4(198635, 198636, 198637, 198638, 198639, 198640, 198641, 198642) c5(198643, 198644, 198645, 198646, 198647, 198648, 198649, 198650, 198651, 198652, 198653, 198654, 198655, 198656, 198657, 198658, 198659, 198660, 198661, 198662, 198663, 198664, 198665, 198666, 198667, 198668, 198669, 198670, 198671, 198672, 198673, 198674, 198675, 198676, 198677, 198678, 198679, 198680, 198681, 198682, 198683, 198684, 198685, 198686, 198687, 198688, 198689, 198690, 198691, 198692) c6( ) c7(WY); #c1(UBASH3A) c2(NP_001001895) c3(ubiquitin-associated and SH3 domain-containing protein A isoform 2) c4(19135) c5(19136, 19137, 19138, 19139, 19140, 19141) c6( ) c7(A, Y, eZ, hD, cL, v, hp, aj, qj, y, J); #c1(UBASH3A) c2(NP_001230396) c3(ubiquitin-associated and SH3 domain-containing protein A isoform 3) c4(86274) c5(86275, 86276, 86277, 86278, 86279, 86280) c6( ) c7(A, Y, eZ, hD, cL, v, hp, aj, qj, y, J); #c1(UBASH3A) c2(NP_061834) c3(ubiquitin-associated and SH3 domain-containing protein A isoform 1) c4(200695) c5(200696, 200697, 200698, 200699, 200700, 200701) c6( ) c7(A, Y, eZ, hD, cL, v, hp, aj, qj, y, J); #c1(UBASH3A) c2(XP_011527907) c3(ubiquitin-associated and SH3 domain-containing protein A isoform X2) c4(323003) c5( ) c6( ) c7(A, Y, eZ, hD, cL, v, hp, aj, qj, y, J); #c1(UBASH3A) c2(XP_011527911) c3(ubiquitin-associated and SH3 domain-containing protein A isoform X4) c4( ) c5(323004, 323005, 323006, 323007, 323008, 323009) c6( ) c7(A, Y, eZ, hD, cL, v, hp, aj, qj, y, J); #c1(UBASH3B) c2(NP_116262) c3(ubiquitin-associated and SH3 domain-containing protein B) c4(226020) c5(226021, 226022, 226023, 226024, 226025, 226026) c6( ) c7(bL, bM, hL, Xi, n, mC, ad, x, aT, Xh, hH, ae, uQ, mR, iU, aW, eZ, aq, Xj, iR, ac, Vy, k, fL, ym, bt); #c1(UBB) c2(NP_001268647) c3(polyubiquitin-B precursor) c4(100002, 100003, 100004, 100005, 100006, 100007, 100008) c5(100009, 100010, 100011, 100012, 100013, 100014, 100015, 100016, 100017, 100018, 100019, 100020, 100021, 100022, 100023, 100024, 100025, 100026, 100027, 100028, 100029, 100030, 100031, 100032, 100033, 100034, 100035, 100036, 100037, 100038, 100039, 100040, 100041, 100042, 100043, 100044, 100045, 100046, 100047, 100048, 100049, 100050, 100051, 100052, 100053, 100054, 100055, 100056, 100057, 100058, 100059, 100060, 100061, 100062, 100063, 100064, 100065, 100066, 100067, 100068, 100069, 100070) c6( ) c7(T, if, GC, qN, Hx, Dq, alO, H, af, ak, adF, Ib, bSc, aaO, f, cm, axG, bb, cBd, U, act, aOI, L); #c1(UBC) c2(NP_066289) c3(polyubiquitin-C) c4(207043, 207044, 207045, 207046) c5(207047, 207048, 207049, 207050, 207051, 207052, 207053, 207054, 207055, 207056, 207057, 207058, 207059, 207060, 207061, 207062) c6( ) c7(rR, wu, aW, jh, aT, dL, j, K, bK, g, wm, eL, JO); #c1(UBD) c2(NP_006389) c3(ubiquitin D) c4(164585, 164586, 164587) c5(164588, 164589, 164590, 164591, 164592, 164593, 164594, 164595, 164596, 164597, 164598, 164599, 164600, 164601, 164602, 164603, 164604, 164605, 164606, 164607, 164608, 164609, 164610, 164611, 164612, 164613, 164614, 164615, 164616, 164617, 164618, 164619) c6( ) c7(T, 60, bB, n, aj, ci, iI, V, g, J, hX, Gt, h, jj, rE, hH, af, bc, Gv, eZ, r, kp, hp, rR, bE, aUS, dy, kS, B, qc); #c1(UBE2A) c2(NP_001269090) c3(ubiquitin-conjugating enzyme E2 A isoform 4) c4( ) c5(100402, 100403, 100404, 100405, 100406, 100407) c6( ) c7(nf, atf, bxm, K, nA, WI, cSE); #c1(UBE2A) c2(NP_003327) c3(ubiquitin-conjugating enzyme E2 A isoform 1) c4(137499, 137500) c5(137501, 137502, 137503, 137504, 137505, 137506) c6( ) c7(nf, atf, bxm, K, nA, WI, cSE); #c1(UBE2A) c2(NP_861427) c3(ubiquitin-conjugating enzyme E2 A isoform 2) c4(255557) c5(255558, 255559, 255560, 255561, 255562, 255563, 255564) c6( ) c7(nf, atf, bxm, K, nA, WI, cSE); #c1(UBE2B) c2(NP_003328) c3(ubiquitin-conjugating enzyme E2 B) c4(137507) c5(137508, 137509, 137510, 137511137512, 137513, 137514) c6( ) c7(T, gU, yk, if, jx, jh, ci, qN, eW, no, Ig, aT, vH, h, K, ND, aW, hi, aq, aw, pa, bP, aSu, rH, B); #c1(UBE2C) c2(NP_001268671) c3(ubiquitin-conjugating enzyme E2 C isoform 7) c4( ) c5(100120, 100121, 100122, 100123, 100124, 100125) c6( ) c7(Fv, T, pf, if, jh, ci, qN, q, ad, eA, Vp, hd, aT, Ex, ae, d, B, s, qt, aW, ff, r, en, g, as, zE, cm, bz, Qy, bP, eM, nB, m, X); #c1(UBE2C) c2(NP_008950) c3(ubiquitin-conjugating enzyme E2 C isoform 1) c4(169717, 169718) c5(169719, 169720, 169721, 169722, 169723, 169724, 169725, 169726) c6( ) c7(Fv, T, pf, if, jh, ci, qN, q, ad, eA, Vp, hd, aT, Ex, ae, d, B, s, qt, aW, ff, r, en, g, as, zE, cm, bz, Qy, bP, eM, nB, m, X); #c1(UBE2C) c2(NP_861515) c3(ubiquitin-conjugating enzyme E2 C isoform 2) c4(255616) c5(255617, 255618, 255619, 255620, 255621, 255622) c6( ) c7(Fv, T, pf, if, jh, ci, qN, q, ad, eA, Vp, hd, aT, Ex, ae, d, B, s, qt, aW, ff, r, en, g, as, zE, cm, bz, Qy, bP, eM, nB, m, X); #c1(UBE2C) c2(NP_861516) c3(ubiquitin-conjugating enzyme E2 C isoform 3) c4(255623, 255624) c5(255625, 255626, 255627, 255628, 255629, 255630) c6( ) c7(Fv, T, pf, if, jh, ci, qN, q, ad, eA, Vp, hd, aT, Ex, ae, d, B, s, qt, aW, ff, r, en, g, as, zE, cm, bz, Qy, bP, eM, nB, m, X); #c1(UBE2C) c2(NP_861517) c3(ubiquitin-conjugating enzyme E2 C isoform 4) c4( ) c5(255631, 255632, 255633, 255634, 255635, 255636, 255637, 255638) c6( ) c7(Fv, T, pf, if, jh, ci, qN, q, ad, eA, Vp, hd, aT, Ex, ae, d, B, s, qt, aW, ff, r, en, g, as, zE, cm, bz, Qy, bP, eM, nB, m, X); #c1(UBE2D1) c2(NP_003329) c3(ubiquitin-conjugating enzyme E2 D1 isoform 1) c4(137515) c5(137516, 137517, 137518, 137519, 137520, 137521) c6( ) c7(T, yw, oW, yy, yu, af); #c1(UBE2D2) c2(NP_003330) c3(ubiquitin-conjugating enzyme E2 D2 isoform 1) c4(137522, 137523) c5(137524, 137525, 137526, 137527, 137528, 137529, 137530, 137531, 137532, 137533, 137534, 137535) c6( ) c7(bw, T); #c1(UBE2D2) c2(NP_862821) c3(ubiquitin-conjugating enzyme E2 D2 isoform 2) c4( ) c5(255757, 255758, 255759, 255760, 255761, 255762, 255763, 255764) c6( ) c7(bw, T); #c1(UBE2D3) c2(NP_003331) c3(ubiquitin-conjugating enzyme E2 D3 isoform 1) c4(137536, 137537) c5(137538, 137539, 137540, 137541, 137542, 137543, 137544, 137545, 137546, 137547, 137548, 137549, 137550, 137551, 137552, 137553, 137554, 137555, 137556, 137557, 137558, 137559, 137560, 137561, 137562, 137563, 137564, 137565, 137566, 137567, 137568, 137569, 137570, 137571, 137572, 137573, 137574, 137575, 137576, 137577, 137578, 137579, 137580, 137581, 137582, 137583, 137584, 137585) c6( ) c7(aW, aj, ey, nB, aT); #c1(UBE2D3) c2(NP_871621) c3(ubiquitin-conjugating enzyme E2 D3 isoform 2) c4(255924, 255925, 255926) c5(255927, 255928, 255929, 255930, 255931, 255932) c6( ) c7(aW, aj, ey, nB, aT); #c1(UBE2D3) c2(NP_871622) c3(ubiquitin-conjugating enzyme E2 D3 isoform 3) c4(255933) c5(255934, 255935, 255936, 255937, 255938, 255939) c6( ) c7(aW, aj, ey, nB, aT); #c1(UBE2E1) c2(NP_001189405) c3(ubiquitin-conjugating enzyme E2 E1 isoform 3) c4(79373) c5(79374, 79375, 79376, 79377, 79378, 79379) c6( ) c7(Pk, czP, IQ); #c1(UBE2E1) c2(NP_003332) c3(ubiquitin-conjugating enzyme E2 E1 isoform 1) c4(137586) c5(137587, 137588, 137589, 137590, 137591, 137592) c6( ) c7(Pk, czP, IQ); #c1(UBE2E1) c2(NP_872607) c3(ubiquitin-conjugating enzyme E2 E1 isoform 2) c4(256525) c5(256526, 256527, 256528, 256529, 256530, 256531) c6( ) c7(Pk, czP, IQ); #c1(UBE2E2) c2(NP_689866) c3(ubiquitin-conjugating enzyme E2 E2) c4(244202) c5(244203, 244204, 244205, 244206, 244207, 244208, 244209, 244210, 244211, 244212) c6( ) c7(bL, T, aW, oe, ht, ff, aT, en); #c1(UBE2E3) c2(NP_006348) c3(ubiquitin-conjugating enzyme E2 E3) c4(164222, 164223) c5(164224, 164225, 164226, 164227, 164228, 164229, 164230, 164231, 164232, 164233, 164234, 164235, 164236, 164237, 164238, 164239, 164240, 164241, 164242, 164243, 164244, 164245, 164246, 164247, 164248, 164249, 164250, 164251, 164252, 164253, 164254, 164255) c6( ) c7(aW, mR, hp, Ig); #c1(UBE2G1) c2(NP_003333) c3(ubiquitin-conjugating enzyme E2 G1) c4(137593) c5(137594, 137595, 137596, 137597, 137598, 137599) c6( ) c7(T, ey); #c1(UBE2G2) c2(NP_003334) c3(ubiquitin-conjugating enzyme E2 G2 isoform 1) c4(137600, 137601) c5(137602, 137603, 137604, 137605, 137606, 137607, 137608) c6( ) c7(ck); #c1(UBE2G2) c2(NP_872630) c3(ubiquitin-conjugating enzyme E2 G2 isoform 2) c4( ) c5(256572, 256573, 256574, 256575, 256576) c6( ) c7(ck); #c1(UBE2H) c2(NP_003335) c3(ubiquitin-conjugating enzyme E2 H isoform 1) c4(137609) c5(137610, 137611, 137612, 137613, 137614, 137615) c6( ) c7(kl, bN); #c1(UBE2H) c2(NP_874356) c3(ubiquitin-conjugating enzyme E2 H isoform 2) c4(256598) c5(256599, 256600, 256601, 256602, 256603, 256604) c6( ) c7(kl, bN); #c1(UBE21) c2(NP_003336) c3(SUMO-conjugating enzyme UBC9) c4(137616) c5(137617, 137618, 137619, 137620, 137621, 137622, 137623, 137624, 137625, 137626, 137627, 137628, 137629, 137630, 137631, 137632, 137633, 137634, 137635, 137636, 137637, 137638, 137639, 137640, 137641, 137642) c6( ) c7(T, sw, aA, fd, v, ci, hF, zP, ip, iu, arA, aT, K, af, zQ, aW, Y, wc, aF, g, t, bw, bz, ck, Qi, eM, bt, iS, m, vt, B); #c1(UBE2J1) c2(NP_057105) c3(ubiquitin-conjugating enzyme E2 J1) c4(188917, 188918) c5(188919, 188920, 188921, 188922, 188923, 188924, 188925, 188926, 188927, 188928, 188929, 188930) c6( ) c7(jf); #c1(UBE2K) c2(NP_001104582) c3(ubiquitin-conjugating enzyme E2 K isoform 2) c4(42193) c5(42194, 42195, 42196, 42197, 42198, 42199) c6( ) c7(T, rR, bgk, B, aiB, if, alg, ht, cSF, bUn, aT, agl, jh, qN, hu, rP, cnS); #c1(UBE2K) c2(NP_001104583) c3(ubiquitin-conjugating enzyme E2 K isoform 3) c4(42200) c5(42201, 42202, 42203, 42204, 42205, 42206) c6( ) c7(T, rR, bgk, B, aiB, if, alg, ht, cSF, bUn, aT, agl, jh, qN, hu, rP, cnS); #c1(UBE2K) c2(NP_005330) c3(ubiquitin-conjugating enzyme E2 K isoform 1) c4(155043) c5(155044, 155045, 155046, 155047, 155048, 155049) c6( ) c7(T, rR, bgk, B, aiB, if, alg, ht, cSF, bUn, aT, agl, jh, qN, hu, rP, cnS); #c1(UBE2L3) c2(NP_001243284) c3(ubiquitin-conjugating enzyme E2 L3 isoform 4) c4(90368) c5(90369, 90370, 90371, 90372, 90373, 90374) c6( ) c7(eZ, ey, hp, jE, iV, y, ae, ad, hX); #c1(UBE2L3) c2(NP_001243285) c3(ubiquitin-conjugating enzyme E2 L3 isoform 3) c4(90375) c5(90376, 90377, 90378, 90379, 90380, 90381) c6( ) c7(eZ, ey, hp, jE, iV, y, ae, ad, hX); #c1(UBE2L3) c2(NP_003338) c3(ubiquitin-conjugating enzyme E2 L3 isoform 1) c4(137643) c5(137644, 137645, 137646, 137647, 137648, 137649) c6( ) c7(eZ, ey, hp, jE, iV, y, ae, ad, hX); #c1(UBE2L6) c2(NP_004214) c3(ubiquitin/ISG15-conjugating enzyme E2 L6 isoform 1) c4(144335, 144336, 144337) c5(144338, 144339, 144340, 144341, 144342, 144343, 144344, 144345) c6( ) c7(aW, ds, T, aT); #c1(UBE2L6) c2(NP_937826) c3(ubiquitin/ISG15-conjugating enzyme E2 L6 isoform 2) c4( ) c5(259225, 259226, 259227, 259228, 259229, 259230, 259231, 259232, 259233, 259234) c6( ) c7(aW, ds, T, aT); #c1(UBE2M) c2(NP_003960) c3(NEDD8-conjugating enzyme Ubc12) c4(142472) c5(142473, 142474, 142475, 142476, 142477, 142478) c6( ) c7(T, id); #c1(UBE2N) c2(NP_003339) c3(ubiquitin-conjugating enzyme E2 N) c4(137650) c5(137651, 137652, 137653, 137654, 137655, 137656) c6( ) c7(T, if, BE, eA, hr, av, b, jz, JT, io, dL, K, eL, asp, ff, cr, lo, agF, en, g, as, t, cI, bz, cm, bw, eM, hL, m, i, it, B); #c1(UBE2N) c2(XP_011537021) c3(ubiquitin-conjugating enzyme E2 N isoform X1) c4( ) c5(334779) c6( ) c7(T, if, BE, eA, hr, av, b, jz, JT, io, dL, K, eL, asp, ff, cr, lo, agF, en, g, as, t, cI, bz, cm, bw, eM, hL, m, i, it, B); #c1(UBE2Q2) c2(NP_001138807) c3(ubiquitin-conjugating enzyme E2 Q2 isoform 2) c4(57764) c5(57765, 57766, 57767, 57768, 57769, 57770, 57771, 57772, 57773, 57774) c6( ) c7(T, eR, aW, aT, aBx, iK); #c1(UBE2Q2) c2(NP_775740) c3(ubiquitin-conjugating enzyme E2 Q2 isoform 1) c4(250140) c5(250141, 250142, 250143, 250144, 250145, 250146) c6( ) c7(T, eR, aW, aT, aBx, iK); #c1(UBE2Q2) c2(XP_005254844) c3(ubiquitin-conjugating enzyme E2 Q2 isoform X2) c4(273336) c5(273337, 273338, 273339, 273340, 273341, 273342) c6( ) c7(T, eR, aW, aT, aBx, iK); #c1(UBE2QL1) c2(NP_001138633) c3(ubiquitin-conjugating enzyme E2Q-like protein 1) c4( ) c5(57303, 57304, 57305, 57306, 57307) c6( ) c7(hH, fr, es); #c1(UBE2QL1) c2(XP_005248304) c3(ubiquitin-conjugating enzyme E2Q-like protein 1 isoform X1) c4(268300) c5(268301) c6( ) c7(hH, fr, es); #c1(UBE2R2) c2(NP_060281) c3(ubiquitin-conjugating enzyme E2 R2) c4(195181) c5(195182, 195183, 195184, 195185, 195186, 195187) c6( ) c7(ac); #c1(UBE2S) c2(NP_055316) c3(ubiquitin-conjugating enzyme E2 S) c4(180402) c5(180403, 180404, 180405, 180406, 180407, 180408) c6( ) c7(T, bgk, B, aiB, aW, if, alg, ht, cSF, bUn, aT, agl, jh, qN, hu, rP, cnS); #c1(UBE2T) c2(NP_054895) c3(ubiquitin-conjugating enzyme E2 T) c4(178241) c5(178242, 178243, 178244, 178245, 178246, 178247) c6( ) c7(av, bmc, os, T, dD, rR, qt, aW, Y, dE, ea, aT, nf, oZ, eq, C, iK, B); #c1(UBE2U) c2(XP_011539067) c3(ubiquitin-conjugating enzyme E2 U isoform X1) c4(337139, 337140) c5(337141, 337142, 337143, 337144, 337145, 337146) c6( ) c7(fq); #c1(UBE2V1) c2(NP_001027459) c3(ubiquitin-conjugating enzyme E2 variant 1 isoform d) c4(30215) c5(30216, 30217, 30218, 30219, 30220, 30221) c6( ) c7(T, dA, WT, ci, PJ, eW, ad, hX, h, BZ, K, ae, avQ, ak, anR, d, CT, lo, as, pb, ck, Qi, iO, vW, c, iT, eB, U, bC, ht, xg, B); #c1(UBE2V1) c2(NP_001244322) c3(ubiquitin-conjugating enzyme E2 variant 1 isoform a) c4(92163) c5(92164, 92165, 92166, 92167, 92168, 92169, 92170, 92171, 92172, 92173) c6( ) c7(T, dA, WT, ci, PJ, eW, ad, hX, h, BZ, K, ae, avQ, ak, anR, d, CT, lo, as, pb, ck, Qi, iO, vW, c, iT, eB, U, bC, ht, xg, B); #c1(UBE2V1) c2(NP_001244325) c3(ubiquitin-conjugating enzyme E2 variant 1 isoform f) c4(92174) c5(92175, 92176, 92177, 92178, 92179, 92180) c6( ) c7(T, dA, WT, ci, PJ, eW, ad, hX, h, BZ, K, ae, avQ, ak, anR, d, CT, lo, as, pb, ck, Qi, iO, vW, c, iT, eB, U, bC, ht, xg, B); #c1(UBE2V1) c2(NP_071887) c3(ubiquitin-conjugating enzyme E2 variant 1 isoform c) c4(212084, 212085) c5(212086, 212087, 212088, 212089, 212090, 212091, 212092, 212093, 212094, 212095, 212096, 212097, 212098, 212099, 212100, 212101) c6( ) c7(T, dA, WT, ci, PJ, eW, ad, hX, h, BZ, K, ae, avQ, ak, anR, d, CT, lo, as, pb, ck, Qi, iO, vW, c, iT, eB, U, bC, bt, xg, B); #c1(UBE2V2) c2(NP_003341) c3(ubiquitin-conjugating enzyme E2 variant 2) c4(137657) c5(137658, 137659, 137660, 137661, 137662, 137663) c6( ) c7(K); #c1(UBE2Z) c2(NP_075567) c3(ubiquitin-conjugating enzyme E2 Z) c4(213972, 213973) c5(213974, 213975, 213976, 213977, 213978, 213979, 213980, 213981, 213982, 213983, 213984, 213985) c6( ) c7(T, acu, gC, cr, j, gu, m, t, hq); #c1(UBE3A) c2(XP_005268328) c3(ubiquitin-protein ligase E3A isoform X1) c4(281739) c5(281740, 281741, 281742, 281743, 281744, 281745, 281746, 281747) c6( ) c7(T, fR, if, ha, n, nA, qN, rc, aR, ad, boY, Ig, aT, K, aW, Az, aPP, Xl, dr, bN, Qi, rR, cSG, iT, agl, U, bt); #c1(UBE3A) c2(XP_006720737) c3(ubiquitin-protein ligase E3A isoform X2) c4(293644, 293645) c5(293646, 293647, 293648, 293649, 293650, 293651, 293652, 293653, 293654, 293655, 293656, 293657, 293658, 293659) c6( ) c7(T, fR, if, ha, n, nA, qN, rc, aR, ad, boY, Ig, aT, K, aW, Az, aPP, Xl, dr, bN, Qi, rR, cSG, iT, agl, U, bt); #c1(UBE3A) c2(XP_011520297) c3(ubiquitin-protein ligase E3A isoform X3) c4(315143) c5(315144, 315145, 315146, 315147, 315148, 315149) c6( ) c7(T, fR, if, ha, n, nA, qN, rc, aR, ad, boY, Ig, aT, K, aW, Az, aPP, XL dr, bN, Qi, rR, cSG, iT, agl, U, bt); #c1(UBE3B) c2(NP_001257380) c3(ubiquitin-protein ligase E3B isoform 3) c4(95275) c5(95276, 95277, 95278, 95279, 95280, 95281, 95282, 95283, 95284, 95285, 95286, 95287, 95288, 95289) c6( ) c7(cSF, amj, cBg, Wl, cm, cSH); #c1(UBE3B) c2(NP_569733) c3(ubiquitin-protein ligase E3B isoform 1) c4(233883, 233884) c5(233885, 233886, 233887, 233888, 233889, 233890, 233891, 233892, 233893, 233894, 233895, 233896, 233897, 233898, 233899, 233900, 233901, 233902, 233903, 233904, 233905, 233906) c6( ) c7(cSF, amj, cBg, Wl, cm, cSH); #c1(UBE3B) c2(XP_006719745) c3(ubiquitin-protein ligase E3B isoform X4) c4(292958) c5(292959, 292960, 292961, 292962, 292963, 292964) c6( ) c7(cSF, amj, cBg, W, cm, cSH); #c1(UBE3B) c2(XP_011537262) c3(ubiquitin-protein ligase E3B isoform X2) c4(334989) c5(334990, 334991, 334992, 334993, 334994, 334995) c6( ) c7(cSF, amj, cBg, Wl, cm, cSH); #c1(UBE3B) c2(XP_011537263) c3(ubiquitin-protein ligase E3B isoform X5) c4( ) c5(334996) c6( ) c7(cSF, amj, cBg, WL cm, cSH); #c1(UBE3B) c2(XP_011537264) c3(ubiquitin-protein ligase E3B isoform X6) c4(334997) c5( ) c6( ) c7(cSF, amj, cBg, Wl, cm, cSH); #c1(UBE3C) c2(NP_055486) c3(ubiquitin-protein ligase E3C) c4(181434) c5(181435, 181436, 181437, 181438, 181439, 181440) c6( ) c7(aDy, bM, B); #c1(UBE3C) c2(XP_005249621) c3(ubiquitin-protein ligase E3C isoform X2) c4(269757) c5(269758, 269759, 269760, 269761, 269762, 269763) c6( ) c7(aDy, bM, B); #c1(UBE4A) c2(NP_001191006) c3(ubiquitin conjugation factor E4 A isoform 2) c4(80511) c5(80512, 80513, 80514, 80515, 80516, 80517) c6( ) c7(T, IR, K, iV, cm, pb); #c1(UBE4A) c2(NP_004779) c3(ubiquitin conjugation factor E4 A isoform 1) c4(149554, 149555) c5(149556, 149557, 149558, 149559, 149560, 149561, 149562, 149563, 149564, 149565, 149566, 149567) c6( ) c7(T, IR, K, iV, cm, pb); #c1(UBE4B) c2(XP_011538792) c3(ubiquitin conjugation factor E4 B isoform X4) c4( ) c5(336537, 336538, 336539, 336540, 336541, 336542) c6( ) c7(T, cc, aq, IR, K, jE, pb, cm, B); #c1(UBIAD1) c2(XP_011539606) c3(ubiA prenyltransferase domain-containing protein 1 isoform X2) c4( ) c5(337843, 337844, 337845, 337846, 337847, 337848) c6( ) c7(aOu, py, cH, qb, eL, dL, fr, oQ, cSI, ae, cd, ad); #c1(UBL3) c2(NP_009037) c3(ubiquitin-like protein 3 precursor) c4(170356) c5(170357, 170358, 170359, 170360, 170361, 170362) c6( ) c7(yy, Fq); #c1(UBL4A) c2(NP_055050) c3(ubiquitin-like protein 4A) c4(178602) c5(178603, 178604, 178605, 178606, 178607, 178608) c6( ) c7(agx, T, qo, byy, qb, KW, fd, KO, mN, qf, nA, agz, eg, aCi, b, vJ, oj, aT, nW, dV, dz, UD, bK, K, h, yj, byw, iU, aW, hC, xs, uY, S, Ku, avG, Pd, hJ, BG, zz, dr, adA, byB, BU, VJ, ac, qe, yN, byG, cj, hO, mf, pw, ER, Cl, i, IG, X); #c1(UBL5) c2(NP_001041706) c3(ubiquitin-like protein 5) c4(34309) c5(34310, 34311, 34312, 34313, 34314, 34315, 34316, 34317, 34318, 34319) c6( ) c7(T, qn, bcb, fd, aj, v, j, bgR, J, hX, aE, qh, aT, cU, kH, h, iz, je, aW, hp, iM, eM, aiM, wR, ei, bt, ao); #c1(UBL7) c2(NP_001273669) c3(ubiquitin-like protein 7 isoform a) c4( ) c5(105584, 105585, 105586, 105587, 105588, 105589, 105590, 105591, 105592) c6( ) c7(Cw); #c1(UBL7) c2(NP_001273671) c3(ubiquitin-like protein 7 isoform b) c4(105593) c5(105594) c6( ) c7(Cw); #c1(UBLCP1) c2(NP_659486) c3(ubiquitin-like domain-containing CTD phosphatase 1) c4(240172) c5(240173, 240174, 240175, 240176, 240177, 240178) c6( ) c7(vr, cr); #c1(UBN1) c2(NP_001072982) c3(ubinuclein-1 isoform a) c4(35424) c5(35425, 35426, 35427, 35428, 35429, 35430, 35431, 35432, 35433, 35434) c6( ) c7(bxS, c); #c1(UBN1) c2(NP_001275585) c3(ubinuclein-1 isoform b) c4(106849) c5(106850, 106851, 106852, 106853, 106854, 106855) c6( ) c7(bxS, c); #c1(UBOX5) c2(NP_001254513) c3(RING finger protein 37 isoform c) c4(94590) c5( ) c6( ) c7(LB); #c1(UBOX5) c2(NP_055763) c3(RING finger protein 37 isoform a) c4(183336) c5(183337, 183338, 183339, 183340, 183341, 183342) c6( ) c7(LB); #c1(UBOX5) c2(NP_955447) c3(RING finger protein 37 isoform b) c4(261724) c5(261725, 261726, 261727, 261728, 261729, 261730, 261731, 261732, 261733, 261734, 261735, 261736) c6( ) c7(LB); #c1(UBP1) c2(NP_001121632) c3(upstream-binding protein 1 isoform LBP-1a) c4(45913) c5(45914, 45915, 45916, 45917, 45918, 45919, 45920, 45921, 45922, 45923, 45924, 45925) c6( ) c7(h, hH); #c1(UBP1) c2(NP_001121633) c3(upstream-binding protein 1 isoform LBP-1b) c4(45926, 45927) c5(45928, 45929, 45930, 45931, 45932, 45933, 45934, 45935, 45936, 45937, 45938) c6( ) c7(h, hH); #c1(UBQLN1) c2(NP_038466) c3(ubiguilin-1 isoform 1) c4(176563) c5(176564, 176565, 176566, 176567, 176568, 176569) c6( ) c7(av, iu, rR, c, aW, eX, cz, aT, eV, K, cGn, an, as, cm, af); #c1(UBQLN1) c2(NP_444295) c3(ubiguilin-1 isoform 2) c4(230316) c5(230317, 230318, 230319, 230320, 230321, 230322) c6( ) c7(av, iu, rR, c, aW, eX, cz, aT, eV, K, cGn, an, as, cm, af); #c1(UBQLN2) c2(NP_038472) c3(ubiguilin-2) c4(176599, 176600) c5(176601, 176602, 176603, 176604, 176605, 176606, 176607, 176608, 176609, 176610, 176611, 176612) c6( ) c7(bb, c, axR, WY, cSJ, aaE, PJ); #c1(UBQLNL) c2(NP_659490) c3(ubiguilin-like protein) c4(240186, 240187) c5(240188, 240189, 240190, 240191, 240192, 240193, 240194, 240195, 240196, 240197, 240198, 240199) c6( ) c7(T); #c1(UBR1) c2(NP_777576) c3(E3 ubiquitin-protein ligase UBR1) c4(251202, 251203, 251204) c5(251205, 251206, 251207, 251208, 251209, 251210, 251211, 251212, 251213, 251214, 251215, 251216, 251217, 251218, 251219, 251220, 251221, 251222) c6( ) c7(ar, T, fM, aKG, cSK, nA); #c1(UBR3) c2(NP_742067) c3(E3 ubiquitin-protein ligase UBR3) c4(247939, 247940) c5(247941, 247942, 247943, 247944, 247945, 247946, 247947, 247948, 247949, 247950, 247951, 247952, 247953, 247954, 247955, 247956) c6( ) c7(eu, VZ, ac, M); #c1(UBR3) c2(XP_005246357) c3(E3 ubiquitin-protein ligase UBR3 isoform X3) c4(267082) c5(267083, 267084, 267085, 267086, 267087, 267088) c6( ) c7(eu, VZ, ac, M); #c1(UBR4) c2(XP_011539410) c3(E3 ubiquitin-protein ligase UBR4 isoform X1) c4( ) c5(337528, 337529, 337530, 337531, 337532, 337533, 337534, 337535, 337536, 337537, 337538, 337539, 337540) c6( ) c7(T, Y, aA, aF, aan, akr); #c1(UBR4) c2(XP_011539414) c3(E3 ubiquitin-protein ligase UBR4 isoform X5) c4(337541) c5(337542, 337543, 337544, 337545, 337546, 337547) c6( ) c7(T, Y, aA, aF, aan, akr); #c1(UBR4) c2(XP_011539419) c3(E3 ubiquitin-protein ligase UBR4 isoform X10) c4(337548) c5( ) c6( ) c7(T, Y, aA, aF, aan, akr); #c1(UBR4) c2(XP_011539420) c3(E3 ubiquitin-protein ligase UBR4 isoform X11) c4(337549, 337550) c5( ) c6( ) c7(T, Y, aA, aF, aan, akr); #c1(UBR4) c2(XP_011539421) c3(E3 ubiquitin-protein ligase UBR4 isoform X12) c4(337551) c5(337552, 337553, 337554, 337555, 337556, 337557) c6( ) c7(T, Y, aA, aF, aan, akr); #c1(UBR4) c2(XP_011539422) c3(E3 ubiquitin-protein ligase UBR4 isoform X13) c4(337558, 337559) c5(337560, 337561, 337562, 337563, 337564, 337565, 337566, 337567, 337568, 337569, 337570, 337571) c6( ) c7(T, Y, aA, aF, aan, akr); #c1(UBR4) c2(XP_011539423) c3(E3 ubiquitin-protein ligase UBR4 isoform X14) c4(337572, 337573) c5(337574, 337575, 337576, 337577, 337578, 337579, 337580, 337581, 337582, 337583, 337584, 337585) c6( ) c7(T, Y, aA, aF, aan, akr); #c1(UBR5) c2(NP_001269802) c3(E3 ubiquitin-protein ligase UBR5 isoform 2) c4(102865, 102866) c5(102867, 102868, 102869, 102870, 102871, 102872, 102873, 102874, 102875, 102876, 102877, 102878) c6( ) c7(bF, T, bgk, B, aiB, aW, if, agl, cSF, bUn, aT, aA, jh, aF, m, ci, qN, t, cnS); #c1(UBR5) c2(NP_056986) c3(E3 ubiquitin-protein ligase UBR5 isoform 1) c4(188341) c5(188342, 188343, 188344, 188345, 188346, 188347) c6( ) c7(bF, T, bgk, B, aiB, aW, if, agl, cSF, bUn, aT, aA, jh, aF, m, ci, qN, t, cnS); #c1(UBR5) c2(XP_005251019) c3(E3 ubiquitin-protein ligase UBR5 isoform X4) c4( ) c5(270723, 270724, 270725, 270726, 270727, 270728) c6( ) c7(bF, T, bgk, B, aiB, aW, if, agl, cSF, bUn, aT, aA, jh, aF, m, ci, qN, t, cnS); #c1(UBR5) c2(XP_011515407) c3(E3 ubiquitin-protein ligase UBR5 isoform X2) c4(308235) c5( ) c6( ) c7(bF, T, bgk, B, aiB, aW, if, agl, cSF, bUn, aT, aA, jh, aF, m, ci, qN, t, cnS); #c1(UBR7) c2(NP_786924) c3(putative E3 ubiquitin-protein ligase UBR7) c4(251916, 251917, 251918) c5(251919, 251920, 251921, 251922, 251923, 251924, 251925, 251926, 251927, 251928, 251929, 251930, 251931, 251932, 251933, 251934, 251935, 251936, 251937, 251938) c6( ) c7(nA); #c1(UBTD2) c2(NP_689490) c3(ubiquitin domain-containing protein 2) c4(242877) c5(242878, 242879, 242880, 242881, 242882, 242883) c6( ) c7(j); #c1(UBTF) c2(NP_001070151) c3(nucleolar transcription factor 1 isoform b) c4(34611) c5(34612, 34613, 34614, 34615, 34616, 34617, 34618, 34619, 34620, 34621, 34622, 34623, 34624, 34625, 34626, 34627, 34628, 34629) c6( ) c7(aq, y, B, K); #c1(UBTF) c2(XP_006722123) c3(nucleolar transcription factor 1 isoform X1) c4(294611) c5(294612, 294613, 294614, 294615, 294616, 294617, 294618, 294619, 294620, 294621, 294622, 294623, 294624, 294625, 294626) c6( ) c7(aq, y, B, K); #c1(UBXN1) c2(NP_001273006) c3(UBX domain-containing protein 1 isoform 2) c4(104156, 104157, 104158) c5(104159, 104160, 104161, 104162, 104163, 104164, 104165, 104166, 104167, 104168, 104169, 104170, 104171) c6( ) c7(aA); #c1(UBXN1) c2(NP_001273007) c3(UBX domain-containing protein 1 isoform 3) c4( ) c5(104172, 104173, 104174, 104175, 104176, 104177) c6( ) c7(aA); #c1(UBXN1) c2(NP_056937) c3(UBX domain-containing protein 1 isoform 1) c4(188153) c5(188154, 188155, 188156, 188157, 188158, 188159) c6( ) c7(aA); #c1(UBXN2A) c2(NP_859064) c3(UBX domain-containing protein 2A) c4(255456, 255457) c5(255458, 255459, 255460, 255461, 255462, 255463, 255464, 255465, 255466, 255467, 255468, 255469, 255470, 255471, 255472, 255473) c6( ) c7(bB, bE); #c1(UBXN2A) c2(XP_011530936) c3(UBX domain-containing protein 2A isoform X2) c4(326916) c5(326917, 326918, 326919, 326920) c6(326921, 326922) c7(bB, bE); #c1(UBXN2B) c2(NP_001071087) c3(UBX domain-containing protein 28) c4(35267) c5(35268, 35269, 35270, 35271, 35272, 35273) c6( ) c7(Pg); #c1(UBXN4) c2(NP_055422) c3(UBX domain-containing protein 4) c4(181063, 181064) c5(181065, 181066, 181067, 181068, 181069, 181070, 181071, 181072, 181073, 181074, 181075, 181076) c6( ) c7(ab, af, K); #c1(UCHL1) c2(NP_004172) c3(ubiquitin carboxyl-terminal hydrolase isozyme L1) c4(144059, 144060, 144061) c5(144062, 144063, 144064, 144065, 144066, 144067, 144068, 144069, 144070, 144071, 144072, 144073, 144074, 144075, 144076, 144077, 144078, 144079) c6( ) c7(bL, T, fM, apr, if, iW, ht, fd, jh, aA, GC, n, aj, dG, v, ci, bX, qN, fr, AO, q, aR, J, ad, bv, av, I, cSL, fX, u, nv, gd, aT, cU, h, K, hB, an, NM, sX, dx, cSM, ae, af, ak, IR, s, xR, aW, Y, ff, r, awu, EH, aF, bSc, en, g, t, cm, bz, iK, GB, Wt, rR, YE, aDA, eM, bP, wk, gX, U, Lq, m, rH, Xu, zu, it, B); #c1(UCHL3) c2(NP_005993) c3(ubiquitin carboxyl-terminal hydrolase isozyme L3 isoform 2) c4(161077) c5(161078, 161079, 161080, 161081, 161082, 161083) c6( ) c7(ak, if, g, U); #c1(UCHL3) c2(XP_011533514) c3(ubiquitin carboxyl-terminal hydrolase isozyme L3 isoform X1) c4( ) c5(329607, 329608) c6( ) c7(ak, if, g, U); #c1(UCHL3) c2(XP_011533516) c3(ubiquitin carboxyl-terminal hydrolase isozyme L3 isoform X3) c4(329609, 329610) c5(329611, 329612, 329613, 329614, 329615, 329616, 329617, 329618, 329619, 329620, 329621) c6( ) c7(ak, if, g, I); #c1(UCHL5) c2(NP_001186190) c3(ubiquitin carboxyl-terminal hydrolase isozyme L5 isoform 2) c4(77328) c5( ) c6( ) c7(T, if, fd, n, bq, jh, it); #c1(UCHL5) c2(NP_001186191) c3(ubiquitin carboxyl-terminal hydrolase isozyme L5 isoform 3) c4(77329) c5(77330, 77331, 77332, 77333, 77334, 77335, 77336, 77337, 77338, 77339, 77340, 77341, 77342, 77343, 77344, 77345, 77346, 77347, 77348, 77349, 77350, 77351, 77352, 77353, 77354, 77355, 77356, 77357, 77358, 77359) c6( ) c7(T, if, fd, n, bq, jh, it); #c1(UCHL5) c2(NP_001186192) c3(ubiquitin carboxyl-terminal hydrolase isozyme L5 isoform 4) c4(77360) c5(77361, 77362, 77363, 77364, 77365, 77366, 77367, 77368, 77369, 77370, 77371, 77372, 77373, 77374, 77375) c6( ) c7(T, if, fd, n, bq, jb, it); #c1(UCHL5) c2(NP_057068) c3(ubiquitin carboxyl-terminal hydrolase isozyme L5 isoform 1) c4(188755) c5(188756, 188757, 188758, 188759, 188760) c6( ) c7(T, if, fd, n, bq, jb, it); #c1(UCHL5) c2(XP_005245301) c3(ubiquitin carboxyl-terminal hydrolase isozyme L5 isoform X2) c4(266416) c5( ) c6( ) c7(T, if, fd, n, bq, jb, it); #c1(UCHL5) c2(XP_005245302) c3(ubiquitin carboxyl-terminal hydrolase isozyme L5 isoform X8) c4( ) c5(266417) c6( ) c7(T, if, fd, n, bq, jb, it); #c1(UCHL5) c2(XP_005245303) c3(ubiquitin carboxyl-terminal hydrolase isozyme L5 isoform X9) c4(266418, 266419, 266420, 266421, 266422) c5(266423, 266424, 266425, 266426, 266427) c6( ) c7(T, if, fd, n, bq, jb, it); #c1(UCHL5) c2(XP_005245305) c3(ubiquitin carboxyl-terminal hydrolase isozyme L5 isoform X13) c4(266428) c5(266429, 266430, 266431, 266432, 266433, 266434) c6( ) c7(T, if, fd, n, bq, jb, it); #c1(UCHL5) c2(XP_005245306) c3(ubiquitin carboxyl-terminal hydrolase isozyme L5 isoform X16) c4(266435) c5(266436, 266437, 266438, 266439, 266440) c6( ) c7(T, if, fd, n, bq, jb, it); #c1(UCHL5) c2(XP_006711429) c3(ubiquitin carboxyl-terminal hydrolase isozyme L5 isoform X1) c4(286010) c5( ) c6( ) c7(T, if, fd, n, bq, jb, it); #c1(UCHL5) c2(XP_006711433) c3(ubiquitin carboxyl-terminal hydrolase isozyme L5 isoform X10) c4(286011) c5(286012, 286013, 286014, 286015, 286016, 286017) c6( ) c7(T, if, fd, n, bq, jb, it); #c1(UCHL5) c2(XP_011507907) c3(ubiquitin carboxyl-terminal hydrolase isozyme L5 isoform X5) c4( ) c5(298207, 298208, 298209, 298210, 298211, 298212) c6( ) c7(T, if, fd, n, bq, jb, it); #c1(UCHL5) c2(XP_011507908) c3(ubiquitin carboxyl-terminal hydrolase isozyme L5 isoform X7) c4(298213) c5(298214, 298215, 298216, 298217, 298218, 298219, 298220, 298221, 298222, 298223, 298224) c6( ) c7(T, if, fd, n, bq, jb, it); #c1(UCK1) c2(NP_001129426) c3(uridine-cytidine kinase 1 isoform b) c4(51476) c5(51477, 51478, 51479, 51480, 51481, 51482) c6( ) c7(bw, cbm, np); #c1(UCK1) c2(NP_001248379) c3(uridine-cytidine kinase 1 isoform c) c4(93905) c5(93906, 93907, 93908, 93909, 93910, 93911) c6( ) c7(bw, cbm, np); #c1(UCK1) c2(NP_001248380) c3(uridine-cytidine kinase 1 isoform d) c4(93912) c5(93913, 93914, 93915, 93916, 93917, 93918) c6( ) c7(bw, cbm, np); #c1(UCK1) c2(NP_113620) c3(uridine-cytidine kinase 1 isoform a) c4(221767) c5(221768, 221769, 221770, 221771, 221772, 221773) c6( ) c7(bw, cbm, np); #c1(UCK2) c2(NP_036606) c3(uridine-cytidine kinase 2) c4(174780, 174781) c5(174782, 174783, 174784, 174785, 174786, 174787, 174788, 174789, 174790, 174791, 174792, 174793) c6( ) c7(ac, ds, bu, cz, r, jh, Ld, bq, q, bA); #c1(UCKL1) c2(NP_001180308) c3(uridine-cytidine kinase-like 1 isoform 2) c4(73808, 73809) c5(73810, 73811, 73812, 73813, 73814, 73815, 73816, 73817, 73818, 73819, 73820, 73821) c6( ) c7(T); #c1(UCKL1) c2(NP_060329) c3(uridine-cytidine kinase-like 1 isoform 1) c4(195413, 195414, 195415) c5(195416, 195417, 195418, 195419, 195420, 195421, 195422, 195423, 195424, 195425, 195426, 195427) c6( ) c7(T); #c1(UCKL1) c2(XP_005260273) c3(uridine-cytidine kinase-like 1 isoform X4) c4(276507) c5( ) c6( ) c7(T); #c1(UCKL1) c2(XP_006723872) c3(uridine-cytidine kinase-like 1 isoform X5) c4( ) c5(295416) c6( ) c7(T); #c1(UCKL1) c2(XP_011527175) c3(uridine-cytidine kinase-like 1 isoform X11) c4( ) c5(321679, 321680, 321681, 321682, 321683) c6( ) c7(T); #c1(UCKL1) c2(XP_011527176) c3(uridine-cytidine kinase-like 1 isoform X12) c4( ) c5(321684, 321685, 321686, 321687, 321688, 321689) c6( ) c7(T); #c1(UCMA) c2(NP_660357) c3(unique cartilage matrix-associated protein isoform 1 preproprotein) c4(241078) c5(241079, 241080, 241081, 241082, 241083, 241084, 241085, 241086) c6(241087, 241088) c7(T, aA, fr, eA, ad, av, ft, zw, aE, PX, aT, K, ae, gj, aW, aF, g, cm, t, bz, iK, es, eM, iA, m, IS, y); #c1(UCN) c2(NP_003344) c3(urocortin preproprotein) c4(137664) c5(137665, 137666, 137667, 137668, 137669, 137670) c6( ) c7(bM, T, os, aD, em, e, bO, cz, eh, fd, aj, bS, j, et, nA, v, aNG, oZ, Fb, fr, eA, ad, eW, dP, x, py, aEX, hb, Be, aT, LA, cy, hn, ji, K, he, ae, ye, s, aW, Y, aoo, az, ff, ag, jh, en, c1, Z, t, hg, axI, kP, ac, eM, bE, AM, iT, hL, cj, JM, acJ, k, m, y, bt, Bh, B); #c1(UCN2) c2(NP_149976) c3(urocortin-2 preproprotein) c4(227714) c5(227715, 227716, 227717, 227718, 227719, 227720) c6( ) c7(dP, Bv, r, ji, q, y, ZW, cd, cDV); #c1(UCN3) c2(NP_444277) c3(urocortin-3 preproprotein) c4(230241) c5(230242, 230243, 230244, 230245, 230246, 230247, 230248, 230249) c6(230250, 230251) c7(T, bO, cz, n, v, Gn, ci, bd, eW, aMB, dP, av, K, aa, s, aJ, Hu, g, Z, bz, hq, eM, y, iu); #c1(UCP1) c2(NP_068605) c3(mitochondrial brown fat uncoupling protein 1) c4(209782) c5(209783, 209784, 209785, 209786, 209787, 209788) c6( ) c7(bL, T, dD, eR, ea, oe, eX, jh, cz, bB, aj, v, j, eq, bX, cd, J, ad, uT, aT, eV, K, qM, dQ, ae, A, aoX, cH, cW, aW, hl, Mz, dg, bJ, bE, Fi, vy, hj, ei, bTg); #c1(UCP2) c2(NP_003346) c3(mitochondrial uncoupling protein 2) c4(137671, 137672) c5(137673, 137674, 137675, 137676, 137677, 137678, 137679, 137680, 137681, 137682, 137683, 137684) c6( ) c7(T, ea, e, bB, aoj, ci, aY, Bc, iX, M, K, qM, zQ, bbC, aW, fc, hN, vs, nB, Ip, wE, U, vy, Hb, dD, aw, aj, zP, cd, bSq, do, jL, jy, ey, uV, vx, A, fq, bJ, bo, hL, qc, bL, fM, eR, gU, cz, sM, cR, hz, v, j, C, V, GS, J, Yn, uT, aT, cy, bq, eu, kl, Y, kC, ck, pO, c, ac, hr, mf, cSN, cS, gT, aZ, ha, dG, eq, ad, fU, hD, uX, cr, eZ, dq, iV, bBu, bz, bE, ei, y, X); #c1(UCP3) c2(NP_003347) c3(mitochondrial uncoupling protein 3 isoform UCP3L) c4(137685, 137686, 137687) c5(137688, 137689, 137690, 137691, 137692, 137693) c6( ) c7(bL, dD, eR, e, aw, gU, cz, aj, dG, j, v, eq, cd, J, ad, uT, Be, iX, jy, dL, K, qM, bq, af, A, Mz, dq, iy, g, cM, aHG, bJ, D, c, hr, at, mf, ei, gT); #c1(UCP3) c2(NP_073714) c3(mitochondrial uncoupling protein 3 isoform UCP3S) c4(213200) c5(213201, 213202, 213203, 213204, 213205, 213206, 213207, 213208, 213209, 213210, 213211, 213212, 213213, 213214, 213215, 213216, 213217, 213218) c6( ) c7(bL, dD, eR, e, aw, gU, cz, aj, dG, j, v, eq, cd, J, ad, uT, Be, iX, jy, dL, K, qM, bq, af, A, Mz, dq, iy, g, cM, aHG, bJ, D, c, hr, at, mf, ei, gT); #c1(UEVLD) c2(NP_001035787) c3(ubiquitin-conjugating enzyme E2 variant 3 isoform a) c4(33064) c5(33065, 33066, 33067, 33068, 33069, 33070) c6( ) c7(ci); #c1(UEVLD) c2(NP_001248311) c3(ubiquitin-conjugating enzyme E2 variant 3 isoform c) c4(93664) c5(93665, 93666, 93667, 93668, 93669, 93670) c6( ) c7(ci); #c1(UEVLD) c2(NP_001248313) c3(ubiquitin-conjugating enzyme E2 variant 3 isoform e) c4(93671) c5( ) c6( ) c7(ci); #c1(UEVLD) c2(NP_001284700) c3(ubiquitin-conjugating enzyme E2 variant 3 isoform h) c4(112335) c5(112336, 112337, 112338, 112339, 112340, 112341) c6( ) c7(ci); #c1(UEVLD) c2(NP_060784) c3(ubiquitin-conjugating enzyme E2 variant 3 isoform b) c4(197788) c5(197789, 197790, 197791, 197792, 197793, 197794) c6( ) c7(ci); #c1(UEVLD) c2(XP_011518500) c3(ubiquitin-conjugating enzyme E2 variant 3 isoform X1) c4( ) c5(312583) c6( ) c7(ci); #c1(UEVLD) c2(XP_011518503) c3(ubiquitin-conjugating enzyme E2 variant 3 isoform X4) c4( ) c5(312584, 312585, 312586, 312587, 312588) c6( ) c7(ci); #c1(UFD1L) c2(NP_001030324) c3(ubiquitin fusion degradation protein 1 homolog isoform B) c4( ) c5(31006, 31007, 31008, 31009, 31010, 31011) c6( ) c7(agd, cpq, RX, bFc, Az, bwE, ci, bD, agY, xg); #c1(UFD1L) c2(NP_005650) c3(ubiquitin fusion degradation protein 1 homolog isoform A) c4(158264, 158265, 158266, 158267) c5(158268, 158269, 158270, 158271, 158272, 158273, 158274, 158275, 158276, 158277, 158278, 158279, 158280, 15828L158282, 158283, 158284, 158285) c6( ) c7(agd, cpq, RX, bFc, Az, bwE, ci, bD, agY, xg); #c1(UFL1) c2(NP_056138) c3(E3 UFM1-protein ligase 1) c4(185902) c5(185903, 185904, 185905, 185906, 185907, 185908) c6( ) c7(iu, T, ff, g, en, bz, B); #c1(UFM1) c2(NP_001273633) c3(ubiquitin-fold modifier 1 isoform 3) c4(105512) c5(105513, 105514, 105515, 105516, 105517, 105518) c6( ) c7(aW, aT); #c1(UFM1) c2(NP_057701) c3(ubiquitin-fold modifier 1 isoform 1 precursor) c4(192448) c5(192449, 192450, 192451, 192452, 192453, 192454) c6( ) c7(aW, aT); #c1(UGCG) c2(NP_003349) c3(ceramide glucosyltransferase) c4(137701) c5(137702, 137703, 137704, 137705, 137706, 137707) c6( ) c7(bL, T, fd, bB, j, aT, ah, ey, K, aT, d, aW, S, aER, UZ, ck, vU, bE, aGe, bzm, m, y, B); #c1(UGDH) c2(NP_001171629) c3(UDP-glucose G-dehydrogenase isoform 2) c4(71026) c5(71027, 71028, 71029, 71030, 71031, 71032, 71033, 71034, 71035, 71036, 71037, 71038, 71039, 71040, 71041, 71042, 71043, 71044, 71045, 71046, 71047, 71048, 71049, 71050) c6( ) c7(dc, bo, aWJ, hD, jy, aq, xv, pw); #c1(UGDH) c2(NP_001171630) c3(UDP-glucose 6-dehydrogenase isoform 3) c4(71051) c5(71052, 71053, 71054, 71055, 71056) c6( ) c7(dc, bo, aWJ, hD, jy, aq, xv, pw); #c1(UGDH) c2(NP_003350) c3(UDP-glucose 6-dehydrogenase isoform 1) c4(137708) c5(137709, 137710, 137711, 137712, 137713, 137714, 137715, 137716, 137717, 137718, 137719, 137720, 137721, 137722, 137723, 137724, 137725, 137726, 137727) c6( ) c7(dc, bo, aWJ, hD, jy, aq, xv, pw); #c1(UGDH) c2(XP_005262724) c3(UDP-glucose G-dehydrogenase isoform X1) c4(278056, 278057, 278058, 278059, 278060, 278061) c5(278062, 278063, 278064, 278065, 278066, 278067, 278068, 278069, 278070, 278071, 278072, 278073, 278074, 278075) c6( ) c7(dc, bo, aWJ, hD, jy, aq, xv, pw); #c1(UGGT1) c2(NP_064505) c3(UDP-glucose:glycoprotein glucosyltransferase 1 precursor) c4(202667) c5(202668, 202669, 202670, 202671, 202672, 202673, 202674, 202675, 202676, 202677, 202678, 202679) c6( ) c7(am, bqy, hC, ff, K, en, EB); #c1(UGGT1) c2(XP_006712697) c3(UDP-glucose:glycoprotein glucosyltransferase 1 isoform X1) c4(286810) c5( ) c6( ) c7(am, bqy, hC, ff, K, en, EB); #c1(UGGT2) c2(NP_064506) c3(UDP-glucose:glycoprotein glucosyltransferase 2 precursor) c4(202680) c5(202681, 202682, 202683, 202684, 202685, 202686) c6( ) c7(bL, ff, ac, en); #c1(UGGT2) c2(XP_011519403) c3(UDP-glucose:glycoprotein glucosyltransferase 2 isoform X8) c4(314050, 314051, 314052, 314053) c5(314054, 314055, 314056, 314057, 314058, 314059, 314060, 314061, 314062, 314063, 314064, 314065, 314066, 314067, 314068, 314069, 314070, 314071, 314072, 314073, 314074, 314075, 314076, 314077) c6( ) c7(bL, ff, ac, en); #c1(UGP2) c2(NP_006750) c3(UTP-glucose-1-phosphate uridylyltransferase isoform a) c4(167669, 167670, 167671, 167672, 167673, 167674, 167675, 167676, 167677, 167678) c5(167679, 167680, 167681, 167682, 167683, 167684, 167685, 167686, 167687, 167688, 167689, 167690, 167691, 167692, 167693, 167694, 167695, 167696, 167697, 167698, 167699, 167700, 167701, 167702, 167703, 167704, 167705, 167706, 167707, 167708, 167709) c6( ) c7(bt); #c1(UGP2) c2(XP_005264594) c3(UTP-glucose-1-phosphate uridylyltransferase isoform X1) c4( ) c5(279110, 279111, 279112, 279113, 279114, 279115, 279116, 279117, 279118, 279119, 279120, 279121, 279122, 279123, 279124, 279125, 279126, 279127, 279128, 279129, 279130, 279131, 279132, 279133, 279134, 279135, 279136, 279137, 279138, 279139, 279140, 279141, 279142) c6( ) c7(bt); #c1(UGT1A1) c2(NP_000454) c3(UDP-glucuronosyltransferase 1-1 precursor) c4(9144, 9145) c5(9146, 9147, 9148, 9149, 9150, 9151, 9152, 9153, 9154, 9155, 9156, 9157, 9158, 9159, 9160, 9161, 9162, 9163, 9164, 9165, 9166, 9167, 9168, 9169, 9170, 9171, 9172, 9173, 9174, 9175, 9176, 9177, 9178, 9179, 9180, 9181, 9182, 9183, 9184, 9185, 9186, 9187, 9188, 9189, 9190, 9191, 9192, 9193, 9194, 9195, 9196, 9197, 9198, 9199, 9200, 9201, 9202, 9203, 9204, 9205, 9206, 9207, 9208, 9209, 9210, 9211, 9212, 9213, 9214, 9215, 9216, 9217, 9218, 9219, 9220, 9221, 9222, 9223, 9224, 9225, 9226, 9227, 9228, 9229, 9230, 9231, 9232, 9233, 9234, 9235, 9236, 9237, 9238, 9239, 9240, 9241, 9242, 9243, 9244, 9245, 9246, 9247) c6(9248) c7(Mh, T, qo, fR, fV, if, e, bB, aE, u, fS, M, K, hu, eL, byv, bny, aW, hC, fc, hi, g, Im, eM, adI, uo, uJ, k, m, pw, cJJ, dD, sQ, aw, ht, NT, n, aj, Wb, fr, JW, cd, cHa, jz, Yc, byF, gd, h, eV, dL, cSO, bqy, AQ, cSP, fe, aq, anZ, hL, E, ut, ER, it, B, bL, wj, aCw, eX, rf, aA, tc, v, j, qf, C, q, J, aT, ae, eu, s, r, en, cI, t, aYl, hY, ck, BU, VJ, ac, hA, Yz, rA, an, gV, qb, ha, Gn, eq, ad, av, avp, I, F, ds, oW, IQ, hG, cH, PE, Em, ff, aid, aF, S, aot, iR, iV, dr, bF, es, qe, yE, bE, be, X, EB); #c1(UGT1A10) c2(NP_061948) c3(UDP-glucuronosyltransferase 1-10 precursor) c4(201258) c5(201259, 201260, 201261, 201262, 201263, 201264) c6( ) c7(bF, EB, T, jz, aW, ds, hC, bqy, ff, aT, r, aq, Yz, ci, en, q, dr); #c1(UGT1A3) c2(NP_061966) c3(UDP-glucuronosyltransferase 1-3 precursor) c4(201340) c5(201341, 201342, 201343, 201344, 201345, 201346, 201347) c6( ) c7(bF, EB, cJJ, byF, ds, hC, bqy, ff, adI, ag, Yz, en, hJ, dr); #c1(UGT1A4) c2(NP_009051) c3(UDP-glucuronosyltransferase 1-4 precursor) c4(170447) c5(170448, 170449, 170450, 170451, 170452, 170453) c6( ) c7(Mh, EB, bF, ds, hC, ha, bqy, ff, at, aq, dL, Yz, en, dr); #c1(UGT1A5) c2(NP_061951) c3(UDP-glucuronosyltransferase 1-5 precursor) c4(201279) c5(201280, 201281, 201282, 201283, 201284, 201285) c6( ) c7(ds, hC, bqy, ff, dr, en, EB); #c1(UGT1A6) c2(NP_001063) c3(UDP-glucuronosyltransferase 1-6 isoform 1 precursor) c4(34525, 34526, 34527, 34528, 34529) c5(34530, 34531, 34532, 34533, 34534, 34535, 34536, 34537, 34538, 34539, 34540, 34541) c6( ) c7(bM, T, ha, eX, n, j, q, byF, ds, aT, eV, ajV, B, su, s, hG, aW, bqy, hC, ff, r, aq, aB, en, bz, dr, bF, bE, Yz, Tu, m, X, EB); #c1(UGT1A6) c2(NP_995584) c3(UDP-glucuronosyltransferase 1-6 isoform 2) c4( ) c5(263958, 263959, 263960, 263961, 263962, 263963) c6( ) c7(bM, T, ha, eX, n, j, q, byF, ds, aT, eV, ajV, B, su, s, hG, aW, bqy, hC, ff, r, aq, aB, en, bz, dr, bF, bE, Yz, Tu, m, X, EB); #c1(UGT1A7) c2(NP_061950) c3(UDP-glucuronosyltransferase 1-7 precursor) c4(201272) c5(201273, 201274, 201275, 201276, 201277, 201278) c6( ) c7(gV, T, al, jx, aA, bB, hy, Gn, jE, ci, iG, q, eJ, hX, EB, aE, byF, ds, fS, gd, dL, eL, hG, bqy, hC, ff, r, aq, lo, aDd, en, iV, bz, dr, ar, gk, eM, bE, gX, adI, zI, rA, B, hv); #c1(UGT1A8) c2(NP_061949) c3(UDP-glucuronosyltransferase 1-8 precursor) c4(201265) c5(201266, 201267, 201268, 201269, 201270, 201271) c6( ) c7(EB, fR, hG, ff, aW, ds, fS, ht, hC, bqy, aT, r, n, oY, dL, aq, en, hu, it, dr); #c1(UGT1A9) c2(NP_066307) c3(UDP-glucuronosyltransferase 1-9 precursor) c4(207176) c5(207177, 207178, 207179, 207180, 207181, 207182, 207183) c6( ) c7(gV, T, bB, ci, q, ad, Iv, ds, fS, aT, dL, B, hG, bqy, hC, ff, r, ag, en, Im, dr, eM, bE, E, uJ, If, X, EB); #c1(UGT2A1) c2(NP_001239203) c3(UDP-glucuronosyltransferase 2A1 isoform 2 precursor) c4(88363) c5(88364, 88365, 88366, 88367, 88368, 88369) c6( ) c7(T); #c1(UGT2A1) c2(NP_001239204) c3(UDP-glucuronosyltransferase 2A1 isoform 3 precursor) c4(88370) c5(88371, 88372, 88373, 88374, 88375, 88376) c6( ) c7(T); #c1(UGT2A1) c2(NP_001288168) c3(UDP-glucuronosyltransferase 2A1 isoform 4 precursor) c4( ) c5(113672, 113673, 113674, 113675, 113676, 113677) c6( ) c7(T); #c1(UGT2A1) c2(NP_006789) c3(UDP-glucuronosyltransferase 2A1 isoform 1 precursor) c4(168083, 168084) c5(168085, 168086, 168087, 168088, 168089, 168090) c6( ) c7(T); #c1(UGT2A2) c2(NP_001099147) c3(UDP-glucuronosyltransferase 2A2 isoform UGT2A2_i1) c4(41804) c5(41805, 41806, 41807, 41808, 41809, 41810) c6( ) c7(T); #c1(UGT2A3) c2(NP_079019) c3(UDP- glucuronosyltransferase 2A3 precursor) c4(216602) c5(216603, 216604, 216605, 216606, 216607, 216608, 216609, 216610, 216611, 216612, 216613, 216614, 216615, 216616, 216617, 216618, 216619, 216620) c6( ) c7(hy, ne, BN); #c1(UGT2A3) c2(XP_011544634) c3(UDP-glucuronosyltransferase 2A3 isoform X1) c4(343753) c5(343754) c6( ) c7(hy, ne, BN); #c1(UGT2B10) c2(NP_001066) c3(UDP-glucuronosyltransferase 2B10 isoform 1 precursor) c4(34549) c5(34550, 34551, 34552, 34553, 34554, 34555, 34556, 34557, 34558, 34559) c6( ) c7(PE, T, Y); #c1(UGT2B11) c2(NP_001064) c3(UDP-glucuronosyltransferase 2B11 precursor) c4(34542) c5(34543, 34544, 34545, 34546, 34547, 34548) c6( ) c7(Mb, aT); #c1(UGT2B15) c2(NP_001067) c3(UDP-glucuronosyltransferase 2B15 precursor) c4(34560, 34561) c5(34562, 34563, 34564, 34565, 34566, 34567, 34568, 34569, 34570, 34571, 34572, 34573) c6( ) c7(bL, bF, T, cJJ, ad, byF, aW, Y, NT, aT, r, n, aq, Yz, ae, q, LS, cp); #c1(UGT2B28) c2(NP_001193933) c3(UDP-glucuronosyltransferase 2828 isoform 2 precursor) c4(83236) c5(83237, 83238, 83239, 83240, 83241, 83242) c6( ) c7(q, r); #c1(UGT2B28) c2(NP_444267) c3(UDP-glucuronosyltransferase 2828 isoform 1 precursor) c4(230208) c5(230209, 230210, 230211, 230212, 230213, 230214) c6( ) c7(q, r); #c1(UGT2B4) c2(NP_001284544) c3(UDP-glucuronosyltransferase 284 isoform 2 precursor) c4(112035) c5(112036, 112037, 112038, 112039, 112040, 112041) c6( ) c7(bF, Mb, cJJ, kl, iI, aW, ht, aT, v, Yz, hu, it, B, bc); #c1(UGT2B4) c2(NP_001284545) c3(UDP-glucuronosyltransferase 284 isoform 3) c4(112042) c5(112043, 112044, 112045, 112046, 112047, 112048) c6( ) c7(bF, Mb, cJJ, kl, iI, aW, ht, aT, v, Yz, hu, it, B, bc); #c1(UGT2B4) c2(NP_066962) c3(UDP-glucuronosyltransferase 284 isoform 1 precursor) c4(207833) c5(207834, 207835, 207836, 207837, 207838, 207839) c6( ) c7(bF, Mb, cJJ, kl, iI, aW, ht, aT, v, Yz, hu, it, B, bc); #c1(UGT2B7) c2(NP_001065) c3(UDP-glucuronosyltransferase 287 precursor) c4( ) c5( ) c6( ) c7(gL, T, cJJ, id, VR, eR, qb, ha, n, aj, ci, bX, ad, byF, fS, cSQ, aT, h, dL, gl, aTX, eL, cp, hG, aW, r, aq, cI, iR, bF, es, iA, hL, Yz, B, hv); #c1(UGT3A2) c2(NP_001161788) c3(UDP-glucuronosyltransferase 3A2 isoform 2 precursor) c4(65994, 65995) c5(65996, 65997, 65998, 65999, 66000, 66001, 66002, 66003, 66004, 66005, 66006, 66007, 66008, 66009, 66010, 66011) c6(66012, 66013, 66014, 66015) c7(hy, ne, BN); #c1(UGT3A2) c2(NP_777574) c3(UDP-glucuronosyltransferase 3A2 isoform 1 precursor) c4(251178, 251179) c5(251180, 251181, 251182, 251183, 251184, 251185, 251186, 251187, 251188, 251189, 251190, 251191, 251192, 251193, 251194, 251195, 251196) c6(251197, 251198, 251199, 251200, 251201) c7(hy, ne, BN); #c1(UGT8) c2(NP_001121646) c3(2-hydroxyacylsphingosine 1-beta-galactosyltransferase precursor) c4(46009) c5( ) c6( ) c7(T, aC, pf, ha, fF, qN, aE, arA, sO, jZ, aT, Ps, s, aW, Y, qs, bz, fq, dR, ej, ar, qJ, nM, be); #c1(UGT8) c2(XP_006714366) c3(2-hydroxyacylsphingosine 1-beta-galactosyltransferase isoform X1) c4(287794) c5(287795, 287796, 287797, 287798, 287799, 287800, 287801, 287802, 287803, 287804, 287805, 287806, 287807, 287808, 287809, 287810) c6( ) c7(T, aC, pf, ha, fF, qN, aE, arA, sO, jZ, aT, Ps, s, aW, Y, qs, bz, fq, dR, ej, ar, qJ, nM, be); #c1(UHMK1) c2(NP_001171692) c3(serine/threonine-protein kinase Kist isoform 2) c4(71314) c5(71315, 71316, 71317, 71318, 71319, 71320) c6( ) c7(ck, x, aW, aeO, gK, aT, aiz, bK, k, bw, bt); #c1(UHMK1) c2(NP_653225) c3(serine/threonine-protein kinase Kist isoform 3) c4(239185) c5(239186, 239187, 239188, 239189, 239190, 239191) c6( ) c7(ck, x, aW, aeO, gK, aT, aiz, bK, k, bw, bt); #c1(UHMK1) c2(NP_787062) c3(serine/threonine-protein kinase Kist isoform 1) c4(252047) c5(252048, 252049, 252050, 252051, 252052, 252053) c6( ) c7(ck, x, aW, aeO, gK, aT, aiz, bK, k, bw, bt); #c1(UHRF1) c2(NP_001276980) c3(E3 ubiquitin-protein ligase UHRF1 isoform 1) c4( ) c5(108897, 108898, 108899, 108900, 108901, 108902, 108903, 108904, 108905, 108906, 108907, 108908, 108909, 108910, 108911, 108912, 108913) c6( ) c7(T, aA, bB, V, q, ad, eA, x, qK, aT, hn, dL, ae, eL, qw, aW, yx, r, aE, bz, es, ac, eM, nB, bE, iA, eo, k, aSs, B); #c1(UHRF1) c2(NP_037414) c3(E3 ubiquitin-protein ligase UHRF1 isoform 2) c4(175374, 175375, 175376) c5(175377, 175378, 175379, 175380, 175381, 175382, 175383, 175384, 175385, 175386) c6( ) c7(T, aA, bB, V, q, ad, eA, x, qK, aT, hn, dL, ae, eL, qw, aW, yx, r, aF, bz, es, ac, eM, nB, bE, iA, eo, k, aSs, B); #c1(UHRF1BP1) c2(NP_060224) c3(UHRF1-binding protein 1) c4(194840, 194841) c5(194842, 194843, 194844, 194845, 194846, 194847, 194848, 194849, 194850, 194851, 194852, 194853) c6( ) c7(aW, T, eZ, aT); #c1(UHRF2) c2(NP_690856) c3(E3 ubiquitin-protein ligase UHRF2) c4(244982, 244983) c5(244984, 244985, 244986, 244987, 244988, 244989, 244990) c6( ) c7(T, eM, aW, r, aT, bz, q); #c1(UHRF2) c2(XP_011516005) c3(E3 ubiquitin-protein ligase UHRF2 isoform X1) c4(309208) c5(309209, 309210, 309211, 309212, 309213, 309214, 309215) c6( ) c7(T, eM, aW, r, aT, bz, q); #c1(UHRF2) c2(XP_011516007) c3(E3 ubiquitin-protein ligase UHRF2 isoform X2) c4( ) c5(309216, 309217, 309218, 309219, 309220) c6( ) c7(T, eM, aW, r, aT, bz, q); #c1(UIMC1) c2(NP_057374) c3(BRCA1-A complex subunit RAP80) c4(190426, 190427, 190428) c5(190429, 190430, 190431, 190432, 190433, 190434, 190435, 190436, 190437, 190438, 190439, 190440, 190441, 190442, 190443, 190444, 190445, 190446, 190447, 190448, 190449, 190450, 190451, 190452, 190453, 190454, 190455) c6( ) c7(T, eM, aW, aT, gv, m, t, X); #c1(UIMC1) c2(XP_005265988) c3(BRCA1-A complex subunit RAP80 isoform X2) c4(279843) c5( ) c6( ) c7(T, eM, aW, aT, gv, m, t, X); #c1(UIMC1) c2(XP_005265990) c3(BRCA1-A complex subunit RAP80 isoform X7) c4( ) c5(279844, 279845, 279846, 279847, 279848, 279849) c6( ) c7(T, eM, aW, aT, gv, m, t, X); #c1(UIMC1) c2(XP_005265993) c3(BRCA1-A complex subunit RAP80 isoform X9) c4(279850) c5(279851, 279852, 279853, 279854, 279855, 279856) c6( ) c7(T, eM, aW, aT, gv, m, t, X); #c1(UIMC1) c2(XP_011532870) c3(BRCA1-A complex subunit RAP80 isoform X3) c4(329061, 329062) c5( ) c6( ) c7(T, eM, aW, aT, gv, m, t, X); #c1(UIMC1) c2(XP_011532872) c3(BRCA1-A complex subunit RAP80 isoform X6) c4( ) c5(329063, 329064, 329065, 329066, 329067, 329068) c6( ) c7(T, eM, aW, aT, gv, m, t, X); #c1(ULBP1) c2(NP_079494) c3(NKG2D ligand 1 precursor) c4(218367) c5(218368, 218369, 218370, 218371, 218372, 218373, 218374, 218375, 218376, 218377) c6( ) c7(ck, T, dA, bE, iK, jh, bB, n, h, gE, K, bt, bz, B); #c1(ULBP2) c2(NP_079493) c3(NKG2D ligand 2 preproprotein) c4(218359) c5(218360, 218361, 218362, 218363, 218364, 218365, 218366) c6( ) c7(ck, T, dA, ac, aE, bE, iU, Y, aA, h, fd, K); #c1(ULBP3) c2(NP_078794) c3(NKG2D ligand 3 precursor) c4(215491, 215492, 215493) c5(215494, 215495, 215496, 215497, 215498, 215499, 215500, 215501, 215502, 215503, 215504, 215505, 215506, 215507, 215508, 215509, 215510, 215511, 215512, 215513, 215514, 215515) c6( ) c7(VZ, OW, jh); #c1(ULK1) c2(NP_003556) c3(serine/threonine-protein kinase ULK1) c4(139174) c5(139175, 139176, 139177, 139178, 139179, 139180) c6( ) c7(T, eM, aW, aT, h, fe, K, it, eA); #c1(ULK1) c2(XP_011537101) c3(serine/threonine-protein kinase ULK1 isoform X2) c4( ) c5(334861) c6( ) c7(T, eM, aW, aT, h, fe, K, it, eA); #c1(ULK2) c2(NP_001136082) c3(serine/threonine-protein kinase ULK2) c4(54273) c5(54274, 54275, 54276, 54277, 54278, 54279, 54280, 54281, 54282, 54283) c6( ) c7(d, eA, an); #c1(ULK3) c2(NP_001092906) c3(serine/threonine-protein kinase ULK3 isoform a) c4(39764) c5(39765, 39766, 39767, 39768, 39769, 39770) c6( ) c7(iU, cz); #c1(ULK3) c2(XP_005254346) c3(serine/threonine-protein kinase ULK3 isoform X1) c4(273160) c5(273161, 273162, 273163, 273164, 273165, 273166) c6( ) c7(iU, cz); #c1(ULK4) c2(NP_060356) c3(serine/threonine-protein kinase ULK4) c4(195571, 195572) c5(195573, 195574, 195575, 195576, 195577, 195578) c6( ) c7(hb, oe, fd, cz, bK, K); #c1(ULK4) c2(XP_011532181) c3(serine/threonine-protein kinase ULK4 isoform X10) c4( ) c5(328217, 328218, 328219, 328220, 328221, 328222, 328223, 328224, 328225, 328226, 328227) c6( ) c7(hb, oe, fd, cz, bK, K); #c1(UMOD) c2(NP_001008390) c3(uromodulin isoform a preproprotein) c4(23145) c5( ) c6( ) c7(nD, cSS, dD, eR, ea, e, bKw, zj, cz, aj, vm, eq, aVK, aY, vN, J, fU, bIk, nH, cSR, aT, h, bKs, K, bq, uD, bA, sj, A, bKt, bKv, qa, hq, ll, fP, hO, lO, dy, cgP, aAN); #c1(UMOD) c2(NP_001265543) c3(uromodulin isoform b preproprotein) c4(98792) c5(98793, 98794, 98795, 98796, 98797, 98798, 98799, 98800, 98801, 98802) c6( ) c7(nD, cSS, dD, eR, ea, e, bKw, zj, cz, aj, vm, eq, aVK, aY, vN, J, fU, bIk, nH, cSR, aT, h, bKs, K, bq, uD, bA, sj, A, bKt, bKv, qa, hq, ll, fP, hO, lO, dy, cgP, aAN); #c1(UMOD) c2(XP_011544241) c3(uromodulin isoform X3) c4(343379) c5(343380, 343381, 343382, 343383, 343384, 343385, 343386, 343387, 343388, 343389, 343390, 343391, 343392, 343393, 343394, 343395, 343396, 343397) c6( ) c7(nD, cSS, dD, eR, ea, e, bKw, zj, cz, aj, vm, eq, aVK, aY, vN, J, fU, bIk, nH, cSR, aT, h, bKs, K, bq, uD, bA, sj, A, bKt, bKv, qa, hq, ll, fP, hO, lO, dy, cgP, aAN); #c1(UMOD) c2(XP_011544242) c3(uromodulin isoform X4) c4( ) c5(343398, 343399) c6( ) c7(nD, cSS, dD, eR, ea, e, bKw, zj, cz, aj, vm, eq, aVK, aY, vN, J, fU, bIk, nH, cSR, aT, h, bKs, K, bq, uD, bA, sj, A, bKt, bKv, qa, hq, ll, fP, hO, lO, dy, cgP, aAN); #c1(UMODL1) c2(NP_001004416) c3(uromodulin-like 1 isoform 1 precursor) c4(20659, 20660, 20661) c5(20662, 20663, 20664, 20665, 20666, 20667, 20668, 20669, 20670, 20671, 20672, 20673, 20674, 20675) c6( ) c7(Be); #c1(UMODL1) c2(NP_775839) c3(uromodulin-like 1 isoform 2 precursor) c4(250476) c5(250477, 250478, 250479, 250480, 250481, 250482, 250483, 250484) c6( ) c7(Be); #c1(UMODL1) c2(XP_011528090) c3(uromodulin-like 1 isoform X1) c4(323167) c5(323168, 323169, 323170, 323171, 323172) c6( ) c7(Be); #c1(UMODL1) c2(XP_011528091) c3(uromodulin-like 1 isoform X2) c4(323173) c5( ) c6( ) c7(Be); #c1(UMODL1) c2(XP_011528097) c3(uromodulin-like 1 isoform X3) c4(323174) c5( ) c6( ) c7(Be); #c1(UMODL1) c2(XP_011528102) c3(uromodulin-like 1 isoform X7) c4( ) c5(323175, 323176) c6( ) c7(Be); #c1(UMODL1) c2(XP_011528104) c3(uromodulin-like 1 isoform X8) c4(323177) c5(323178, 323179, 323180, 323181, 323182, 323183) c6( ) c7(Be); #c1(UMODL1) c2(XP_011528105) c3(uromodulin-like 1 isoform X9) c4(323184) c5(323185, 323186, 323187, 323188, 323189, 323190, 323191, 323192, 323193, 323194, 323195, 323196, 323197, 323198) c6( ) c7(Be); #c1(UMPS) c2(NP_000364) c3(uridine 5′-monophosphate synthase) c4(8119, 8120, 8121, 8122) c5(8123, 8124, 8125, 8126, 8127, 8128, 8129, 8130, 8131, 8132, 8133, 8134, 8135, 8136, 8137, 8138, 8139, 8140, 8141, 8142, 8143, 8144, 8145, 8146) c6( ) c7(gV, G, T, aC, qb, aA, n, awr, cnk, ci, q, ad, gd, aT, dV, bq, CK, B, hG, hC, ff, r, en, g, bz, VJ, eM, pw, aws, X); #c1(UNC119) c2(NP_005139) c3(protein unc-119 homolog A isoform a) c4(153330) c5(153331, 153332, 153333, 153334, 153335, 153336) c6( ) c7(lR, aqV, nw, nC, aJc, aa); #c1(UNC119) c2(NP_473376) c3(protein unc-119 homolog A isoform b) c4(230511, 230512) c5(230513, 230514, 230515, 230516, 230517, 230518, 230519, 230520, 230521, 230522, 230523, 230524) c6( ) c7(lR, aqV, nw, nC, aJc, aa); #c1(UNC13A) c2(NP_001073890) c3(protein unc-13 homolog A) c4(36316, 36317, 36318) c5(36319, 36320, 36321, 36322, 36323, 36324, 36325, 36326, 36327, 36328, 36329, 36330, 36331, 36332, 36333, 36334, 36335, 36336) c6( ) c7(bb, dG, Vd, c); #c1(UNC13B) c2(NP_006368) c3(protein unc-13 homolog B) c4(164410) c5(164411, 164412, 164413, 164414, 164415, 164416) c6( ) c7(A, anp, an, dG, dy, pz); #c1(UNC13B) c2(XP_011515983) c3(protein unc-13 homolog B isoform X1) c4(309155) c5(309156) c6( ) c7(A, anp, an, dG, dy, pz); #c1(UNC13B) c2(XP_011515986) c3(protein unc-13 homolog B isoform X4) c4(309157, 309158) c5(309159, 309160, 309161, 309162, 309163, 309164, 309165, 309166, 309167, 309168, 309169, 309170) c6( ) c7(A, anp, an, dG, dy, pz); #c1(UNC13B) c2(XP_011515988) c3(protein unc-13 homolog B isoform X6) c4( ) c5(309171, 309172, 309173, 309174, 309175, 309176) c6( ) c7(A, anp, an, dG, dy, pz); #c1(UNC13C) c2(NP_001074003) c3(protein unc-13 homolog C) c4(36916, 36917, 36918) c5(36919, 36920, 36921, 36922, 36923, 36924, 36925, 36926, 36927, 36928, 36929, 36930, 36931, 36932, 36933, 36934, 36935, 36936) c6( ) c7(e, oe, bX, an, fq, cd); #c1(UNC13D) c2(NP_954712) c3(protein unc-13 homolog D) c4(261333, 261334, 261335) c5(261336, 261337, 261338, 261339, 261340, 261341, 261342, 261343, 261344, 261345, 261346, 261347, 261348, 261349, 261350, 261351, 261352, 261353) c6( ) c7(gV, T, bxK, hG, aW, Bj, aT, bQc, aq, cL, zA, mK, pz, iR, hF, cST, ai, o); #c1(UNC45A) c2(NP_001034764) c3(protein unc-45 homolog A isoform 3) c4(32272) c5(32273, 32274, 32275, 32276, 32277, 32278) c6( ) c7(cm, aW, ci, aT); #c1(UNC45A) c2(NP_061141) c3(protein unc-45 homolog A isoform 2) c4(199505) c5(199506, 199507, 199508, 199509, 199510, 199511) c6( ) c7(cm, aW, ci, aT); #c1(UNC45B) c2(NP_001253981) c3(protein unc-45 homolog B isoform 2) c4(94354) c5(94355, 94356, 94357, 94358, 94359, 94360, 94361) c6( ) c7(gZ, cc, K, Az); #c1(UNC45B) c2(NP_775259) c3(protein unc-45 homolog B isoform 1) c4(249680) c5(249681, 249682, 249683, 249684, 249685, 249686, 249687, 249688, 249689, 249690) c6( ) c7(gZ, cc, K, Az); #c1(UNC5A) c2(NP_588610) c3(netrin receptor UNC5A precursor) c4(234785, 234786) c5(234787, 234788, 234789, 234790, 234791, 234792, 234793, 234794, 234795, 234796, 234797, 234798) c6( ) c7(eL, dL); #c1(UNC5B) c2(NP_001231818) c3(netrin receptor UNC5B isoform 2 precursor) c4(87564) c5(87565, 87566, 87567, 87568, 87569, 87570) c6( ) c7(jf, T, dD, iA, ea, eL, r, n, dL, eq, K, fr, y, ae, q); #c1(UNC5B) c2(NP_734465) c3(netrin receptor UNC5B isoform 1 precursor) c4(247292) c5(247293, 247294, 247295, 247296, 247297, 247298) c6( ) c7(jf, T, dD, iA, ea, eL, r, n, dL, eq, K, fr, y, ae, q); #c1(UNC5C) c2(NP_003719) c3(netrin receptor UNC5C precursor) c4(140390, 140391) c5(140392, 140393, 140394, 140395, 140396, 140397, 140398, 140399, 140400, 140401, 140402, 140403, 140404) c6( ) c7(T, iA, bE, Y, go, aw, r, aA, bB, v, aF, ci, fr, an, y, q, Qe); #c1(UNC5D) c2(NP_543148) c3(netrin receptor UNC5D precursor) c4(233465, 233466) c5(233467, 233468, 233469, 233470, 233471, 233472, 233473, 233474, 233475, 233476, 233477, 233478) c6( ) c7(cm, es, fr, ci, iA); #c1(UNC5D) c2(XP_011542706) c3(netrin receptor UNC5D isoform X8) c4( ) c5(341259) c6( ) c7(cm, es, fr, ci, iA); #c1(UNC5D) c2(XP_011542707) c3(netrin receptor UNC5D isoform X9) c4( ) c5(341260) c6( ) c7(cm, es, fr, ci, iA); #c1(UNC79) c2(NP_065869) c3(protein unc-79 homolog) c4(205958) c5(205959, 205960, 205961, 205962, 205963) c6( ) c7(oe); #c1(UNC79) c2(XP_011544953) c3(protein unc-79 homolog isoform X3) c4(343945) c5(343946, 343947, 343948, 343949, 343950, 343951) c6( ) c7(oe); #c1(UNC79) c2(XP_011544954) c3(protein unc-79 homolog isoform X4) c4(343952, 343953) c5(343954, 343955, 343956, 343957, 343958, 343959, 343960, 343961, 343962, 343963, 343964, 343965) c6( ) c7(oe); #c1(UNC79) c2(XP_011544956) c3(protein unc-79 homolog isoform X6) c4( ) c5(343966) c6( ) c7(oe); #c1(UNC79) c2(XP_011544962) c3(protein unc-79 homolog isoform X11) c4(343967, 343968, 343969) c5( ) c6( ) c7(oe); #c1(UNC93A) c2(NP_001137419) c3(protein unc-93 homolog A isoform 2) c4(55665) c5(55666, 55667, 55668, 55669, 55670, 55671) c6( ) c7(t); #c1(UNC93A) c2(XP_011534209) c3(protein unc-93 homolog A isoform X1) c4(330534) c5(330535, 330536, 330537, 330538, 330539, 330540) c6( ) c7(t); #c1(UNC93A) c2(XP_011534210) c3(protein unc-93 homolog A isoform X2) c4(330541) c5( ) c6( ) c7(t); #c1(UNC93A) c2(XP_011534211) c3(protein unc-93 homolog A isoform X3) c4( ) c5(330542, 330543, 330544, 330545, 330546, 330547) c6( ) c7(t); #c1(UNC93B1) c2(NP_112192) c3(protein unc-93 homolog B1) c4(220724) c5(220725, 220726, 220727, 220728, 220729, 220730) c6( ) c7(xD, eW, cSU, yx, hh); #c1(UNC93B1) c2(XP_011543592) c3(protein unc-93 homolog B1 isoform X1) c4(342508) c5( ) c6( ) c7(xD, eW, cSU, yx, hh); #c1(UNC93B1) c2(XP_011543593) c3(protein unc-93 homolog B1 isoform X2) c4( ) c5(342509, 342510, 342511, 342512, 342513, 342514, 342515, 342516, 342517) c6( ) c7(xD, eW, cSU, yx, hh); #c1(UNG) c2(NP_003353) c3(uracil-DNA glycosylase isoform UNG1 precursor) c4(137728) c5(137729, 137730, 137731, 137732, 137733, 137734, 137735, 137736, 137737, 137738, 137739, 137740) c6( ) c7(T, dA, ew, jh, bB, gA, hF, q, cSV, ad, Oe, x, eW, h, dL, K, ae, afu, d, iU, Cw, oV, zb, ff, r, en, bz, ck, ac, bE, U, k, bt, zA); #c1(UNG) c2(NP_550433) c3(uracil-DNA glycosylase isoform UNG2) c4(233486, 233487) c5(233488, 233489, 233490, 233481, 233492, 233493) c6( ) c7(T, dA, ew, jh, bB, gA, hF, q, cSV, ad, Oe, x, eW, h, dL, K, ae, afu, d, iU, Cw, oV, zb, ff, r, en, bz, ck, ac, bE, U, k, bt, zA); #c1(UPB1) c2(NP_057411) c3(beta-ureidopropionase) c4(190612, 190613, 190614) c5(190615, 190616, 190617, 190618, 190619, 190620, 190621, 190622, 190623, 190624, 190625, 190626) c6( ) c7(dq, cC, cd, bN, cSW); #c1(UPB1) c2(XP_011528526) c3(beta-ureidopropionase isoform X3) c4( ) c5(323665, 323666, 323667, 323668, 323669, 323670) c6( ) c7(dq, cC, cd, bN, cSW); #c1(UPF1) c2(NP_002902) c3(regulator of nonsense transcripts 1 isoform 2) c4(133437) c5(133438, 133439, 133440, 133441, 133442, 133443) c6( ) c7(T, cSX, aA, r, ci, bC, ae, ad); #c1(UPF2) c2(NP_542166) c3(regulator of nonsense transcripts 2) c4(232142) c5(232143, 232144, 232145, 232146, 232147, 232148, 232149, 232150, 232151, 232152, 232153, 232154, 232155, 232156, 232157) c6( ) c7(c, ad, nA, r); #c1(UPF2) c2(XP_011517750) c3(regulator of nonsense transcripts 2 isoform X1) c4(311570, 311571) c5(311572, 311573, 311574, 311575, 311576) c6( ) c7(c, ad, nA, r); #c1(UPF2) c2(XP_011517751) c3(regulator of nonsense transcripts 2 isoform X2) c4( ) c5(311577, 311578, 311579, 311580, 311581, 311582, 311583, 311584, 311585, 311586) c6( ) c7(c, ad, nA, r); #c1(UPF3A) c2(NP_075387) c3(regulator of nonsense transcripts 3A isoform hUpf3p) c4(213834, 213835) c5(213836, 213837, 213838, 213839, 213840, 213841, 213842) c6( ) c7(c); #c1(UPF3A) c2(NP_542418) c3(regulator of nonsense transcripts 3A isoform hUpf3pdelta) c4(232830) c5(232831, 232832, 232833, 232834, 232835, 232836) c6( ) c7(c); #c1(UPF3A) c2(XP_011533150) c3(regulator of nonsense transcripts 3A isoform X5) c4( ) c5(329295, 329296, 329297, 329298, 329299) c6( ) c7(c); #c1(UPF3B) c2(NP_075386) c3(regulator of nonsense transcripts 3B isoform 2) c4(213820, 213821) c5(213822, 213823, 213824, 213825, 213826, 213827, 213828, 213829, 213830, 213831, 213832, 213833) c6( ) c7(cSY, nf, nA, QK, bN, bKE); #c1(UPF3B) c2(NP_542199) c3(regulator of nonsense transcripts 3B isoform 1) c4(232280) c5(232281, 232282, 232283, 232284, 232285, 232286) c6( ) c7(cSY, nf, nA, QK, bN, bKE); #c1(UPK1A) c2(NP_001268372) c3(uroplakin-1a isoform 2) c4(99803) c5(99804, 99805, 99806, 99807, 99808, 99809) c6( ) c7(T, id, wG, Jl, aA, aF, it); #c1(UPK1A) c2(NP_008931) c3(uroplakin-1a isoform 1) c4(169633) c5(169634, 169635, 169636, 169637, 169638, 169639) c6( ) c7(T, id, wG, Jl, aA, aF, it); #c1(UPK1B) c2(NP_008883) c3(uroplakin-1b) c4(169491, 169492, 169493) c5(169494, 169495, 169496, 169497, 169498, 169499, 169500, 169501, 169502, 169503, 169504, 169505, 169506, 169507, 169508, 169509, 169510, 169511) c6( ) c7(eL, T, dt, id, ci); #c1(UPK2) c2(NP_006751) c3(uroplakin-2 precursor) c4(167710) c5(167711, 167712, 167713, 167714, 167715, 167716) c6( ) c7(XX, T, id, ff, aJN, dL, en, eL); #c1(UPK3A) c2(NP_001161046) c3(uroplakin-3a isoform 2 precursor) c4(65201) c5(65202, 65203, 65204, 65205, 65206, 65207) c6( ) c7(id, wG, lI, n, dL, lN, bX); #c1(UPK3A) c2(NP_008884) c3(uroplakin-3a isoform 1 precursor) c4(169512) c5(169513, 169514, 169515, 169516, 169517, 169518) c6( ) c7(id, wG, lI, n, dL, lN, bX); #c1(UPP1) c2(NP_001274355) c3(uridine phosphorylase 1 isoform a) c4(106239, 106240, 106241, 106242) c5(106243, 106244, 106245, 106246, 106247, 106248, 106249, 106250, 106251, 106252, 106253, 106254, 106255, 106256) c6( ) c7(ck, T, wi, aW, Jp, fJ, aT, r, ci, m, t, q); #c1(UPP1) c2(NP_001274357) c3(uridine phosphorylase 1 isoform b) c4(106269) c5(106270, 106271, 106272, 106273, 106274, 106275) c6( ) c7(ck, T, wi, aW, Jp, fJ, aT, r, ci, m, t, q); #c1(UPP1) c2(XP_006715834) c3(uridine phosphorylase 1 isoform X5) c4(289842) c5(289843, 289844, 289845, 289846, 289847, 289848, 289849, 289850, 289851, 289852, 289853, 289854, 289855, 289856, 289857, 289858, 289859, 289860, 289861, 289862, 289863, 289864, 289865, 289866) c6( ) c7(ck, T, wi, aW, Jp, fJ, aT, r, ci, m, t, q); #c1(UPP2) c2(NP_001128570) c3(uridine phosphorylase 2 isoform b) c4(50273, 50274) c5(50275, 50276, 50277, 50278, 50279, 50280, 50281) c6( ) c7(T, id, VX, ff, en, bN); #c1(UPP2) c2(NP_775491) c3(uridine phosphorylase 2 isoform a) c4( ) c5(250091, 250092, 250093, 250094, 250095, 250096, 250097) c6(250098, 250099) c7(T, id, VX, ff, en, bN); #c1(UPRT) c2(NP_659489) c3(uracil phosphoribosyltransferase homolog) c4(240179) c5(240180, 240181, 240182, 240183, 240184, 240185) c6( ) c7(ck, T, aE, bE, r, bB, m, eA, bq, CQ, t, iK, q); #c1(UQCC1) c2(NP_001171906) c3(ubiquinol-cytochrome-c reductase complex assembly factor 1 isoform c) c4(72012) c5(72013, 72014, 72015, 72016, 72017, 72018) c6( ) c7(aqe); #c1(UQCC1) c2(NP_060714) c3(ubiquinol-cytochrome-c reductase complex assembly factor 1 isoform a) c4(197402, 197403, 197404) c5(197405, 197406, 197407, 197408, 197409, 197410, 197411, 197412, 197413, 197414, 197415, 197416) c6( ) c7(aqe); #c1(UQCC1) c2(NP_955781) c3(ubiquinol-cytochrome-c reductase complex assembly factor 1 isoform b) c4(261967) c5(261968, 261969, 261970, 261971, 261972, 261973, 261974, 261975, 261976, 261977, 261978, 261979) c6( ) c7(aqe); #c1(UQCC1) c2(XP_011527180) c3(ubiquinol-cytochrome-c reductase complex assembly factor 1 isoform X2) c4(321690, 321691, 321692, 321693) c5(321694) c6( ) c7(aqe); #c1(UQCC1) c2(XP_011527183) c3(ubiquinol-cytochrome-c reductase complex assembly factor 1 isoform X4) c4( ) c5(321695, 321696, 321697, 321698, 321699, 321700) c6( ) c7(aqe); #c1(UQCC1) c2(XP_011527186) c3(ubiquinol-cytochrome-c reductase complex assembly factor 1 isoform X5) c4( ) c5(321701, 321702, 321703, 321704, 321705, 321706, 321707, 321708, 321709, 321710, 321711, 321712, 321713, 321714, 321715, 321716, 321717, 321718) c6( ) c7(aqe); #c1(UQCC2) c2(NP_115716) c3(ubiquinol-cytochrome-c reductase complex assembly factor 2) c4(223694, 223695) c5(223696, 223697, 223698, 223699, 223700, 223701, 223702, 223703, 223704, 223705, 223706, 223707) c6( ) c7(aqe, kQ, eZ); #c1(UQCRB) c2(NP_006285) c3(cytochrome b-c1 complex subunit 7 isoform 1) c4(163593) c5(163594, 163595, 163596, 163597, 163598, 163599) c6( ) c7(aqb, SE, ad, bo, aqe); #c1(UQCRC1) c2(NP_003356) c3(cytochrome b-c1 complex subunit 1, mitochondrial precursor) c4(137748) c5(137749, 137750, 137751, 137752, 137753, 137754) c6( ) c7(t); #c1(UQCRC2) c2(NP_003357) c3(cytochrome b-c1 complex subunit 2, mitochondrial precursor) c4(137755) c5(137756, 137757, 137758, 137759, 137760, 137761) c6( ) c7(cSZ, v, cF); #c1(UQCRFS1) c2(NP_005994) c3(cytochrome b-c1 complex subunit Rieske, mitochondrial) c4(161084) c5(161085, 161086, 161087, 161088, 161089, 161090) c6( ) c7(T, eG, d, W, eM, aW, nI, aT, r, j, ci, K, m, iK, q, ad); #c1(UQCRQ) c2(NP_055217) c3(cytochrome b-c1 complex subunit 8) c4(179897) c5(179898, 179899, 179900, 179901, 179902, 179903, 179904, 179905, 179906, 179907, 179908, 179909, 179910, 179911) c6( ) c7(aqb, cTa, SE, bo, aqe); #c1(URB2) c2(XP_005273417) c3(unhealthy ribosome biogenesis protein 2 homolog isoform X2) c4( ) c5(284579) c6( ) c7(oe); #c1(URGCP) c2(NP_001071131) c3(up-regulator of cell proliferation isoform 3) c4(35308, 35309, 35310) c5(35311, 35312, 35313, 35314, 35315, 35316, 35317, 35318, 35319) c6( ) c7(eH, aA, eF, cm, B, hX); #c1(URGCP) c2(NP_001277005) c3(up-regulator of cell proliferation isoform 2) c4(108943) c5(108944, 108945, 108946, 108947, 108948, 108949, 108950, 108951, 108952, 108953, 108954, 108955, 108956, 108957, 108958, 108959, 108960, 108961, 108962, 108963, 108964, 108965, 108966, 108967) c6( ) c7(eH, aA, eF, cm, B, hX); #c1(URGCP) c2(NP_060390) c3(up-regulator of cell proliferation isoform 1) c4(195781) c5(195782, 195783, 195784, 195785, 195786, 195787, 195788, 195789, 195790) c6( ) c7(eH, aA, eF, cm, B, hX); #c1(URI1) c2(NP_001239570) c3(unconventional prefoldin RPB5 interactor 1 isoform c) c4(88552) c5(88553, 88554, 88555, 88556, 88557, 88558) c6( ) c7(ov, cZ, bM, ig, dB, On, eX, bDJ, eV, bDI, m, ci, dd, pL, t, B, y, hX); #c1(URI1) c2(NP_003787) c3(unconventional prefoldin RPB5 interactor 1 isoform a) c4(140797) c5(140798, 140799, 140800, 140801, 140802, 140803, 140804) c6( ) c7(ov, cZ, bM, ig, dB, On, eX, bDJ, eV, bDI, m, ci, dd, pL, t, B, y, hX); #c1(URI1) c2(XP_005259419) c3(unconventional prefoldin RPB5 interactor 1 isoform X1) c4(276093, 276094) c5( ) c6( ) c7(ov, cZ, bM, ig, dB, On, eX, bDJ, eV, bDI, m, ci, dd, pL, t, B, y, hX); #c1(URI1) c2(XP_011525737) c3(unconventional prefoldin RPB5 interactor 1 isoform X3) c4( ) c5(320140, 320141, 320142, 320143, 320144, 320145, 320146, 320147, 320148, 320149, 320150) c6( ) c7(ov, cZ, bM, ig, dB, On, eX, bDJ, eV, bDI, m, ci, dd, pL, t, B, y, hX); #c1(URM1) c2(NP_001129419) c3(ubiquitin-related modifier 1 isoform b) c4(51467) c5(51468, 51469, 51470, 51471, 51472, 51473, 51474, 51475) c6( ) c7(aA); #c1(URM1) c2(NP_001252511) c3(ubiquitin-related modifier 1 isoform c) c4( ) c5(94042, 94043, 94044, 94045, 94046, 94047, 94048, 94049, 94050) c6( ) c7(aA); #c1(URM1) c2(NP_112176) c3(ubiquitin-related modifier 1 isoform a) c4(220624, 220625) c5(220626, 220627, 220628, 220629, 220630, 220631) c6( ) c7(aA); #c1(UROC1) c2(NP_001159446) c3(urocanate hydratase isoform 2) c4(64084) c5(64085, 64086, 64087, 64088, 64089, 64090) c6( ) c7(cTc, cTb, nA); #c1(UROC1) c2(NP_653240) c3(urocanate hydratase isoform 1) c4(239273) c5(239274, 239275, 239276, 239277, 239278, 239279) c6( ) c7(cTc, cTb, nA); #c1(UROD) c2(XP_011540382) c3(uroporphyrinogen decarboxylase isoform X1) c4(338869) c5(338870, 338871, 338872, 338873, 338874, 338875, 338876, 338877, 338878, 338879) c6( ) c7(T, btY, QW, jx, ml, aHv, aCm, bS, hy, ct, C, rc, bbB, qC, MP, nI, cTf, yu, cTh, lQ, cTg, rz, fb, bsq, iz, Nu, vT, LO, hl, nh, yy, cTd, dq, Z, dr, bN, OC, iO, cTe, agI, QV, abX, aCo, hE, KY); #c1(UROS) c2(NP_000366) c3(uroporphyrinogen-III synthase) c4(8147, 8148) c5(8149, 8150, 8151, 8152, 8153, 8154, 8155, 8156, 8157, 8158) c6( ) c7(mO, nI, cTi, dq, Km, S, dr); #c1(UROS) c2(XP_005270195) c3(uroporphyrinogen-III synthase isoform X2) c4(283243) c5( ) c6( ) c7(mO, nI, cTi, dq, Km, S, dr); #c1(UROS) c2(XP_005270197) c3(uroporphyrinogen-III synthase isoform X6) c4( ) c5(283244, 283245, 283246, 283247, 283248, 283249) c6( ) c7(mO, nI, cTi, dq, Km, S, dr); #c1(UROS) c2(XP_005270198) c3(uroporphyrinogen-III synthase isoform X7) c4(283250) c5(283251, 283252, 283253, 283254, 283255, 283256, 283257, 283258, 283259, 283260, 283261, 283262) c6( ) c7(mO, nI, cTi, dq, Km, S, dr); #c1(USB1) c2(NP_001182231) c3(U6 snRNA phosphodiesterase isoform 2) c4(74725) c5(74726, 74727, 74728, 74729, 74730, 74731) c6( ) c7(sb, gV, hG, aVA, lQ, ask); #c1(USB1) c2(NP_001191840) c3(U6 snRNA phosphodiesterase isoform 3) c4(81848) c5(81849, 81850, 81851, 81852, 81853, 81854) c6( ) c7(sb, gV, hG, aVA, lQ, ask); #c1(USB1) c2(NP_078874) c3(U6 snRNA phosphodiesterase isoform 1) c4(215861, 215862) c5(215863, 215864, 215865, 215866, 215867, 215868) c6( ) c7(sb, gV, hG, aVA, lQ, ask); #c1(USB1) c2(XP_011521630) c3(U6 snRNA phosphodiesterase isoform X1) c4( ) c5(316425, 316426, 316427, 316428, 316429, 316430) c6( ) c7(sb, gV, hG, aVA, lQ, ask); #c1(USE1) c2(NP_060937) c3(vesicle transport protein USE1) c4(198784, 198785, 198786) c5(198787, 198788, 198789, 198790, 198791, 198792, 198793, 198794, 198795, 198796, 198797, 198798, 198799, 198800, 198801, 198802, 198803, 198804, 198805) c6( ) c7(T, ib, hX, aW, acu, gC, cr, aT, fd, jh, gu, m, t, hq); #c1(USF1) c2(NP_001263302) c3(upstream stimulatory factor 1 isoform 1) c4(97126, 97127, 97128) c5(97129, 97130, 97131, 97132, 97133, 97134, 97135, 97136, 97137, 97138, 97139, 97140, 97141, 97142, 97143, 97144, 97145, 97146) c6( ) c7(bL, T, dD, ea, e, bB, aj, dG, j, ci, v, eq, J, TB, av, Mo, hd, dY, ec, aT, K, dQ, af, kj, cW, aW, eZ, xH, Ku, g, bF, dC, nB, bE, Fi, eM, ei, Zw, L); #c1(USF1) c2(NP_996888) c3(upstream stimulatory factor 1 isoform 2) c4( ) c5(264810, 264811, 264812, 264813, 264814) c6( ) c7(bL, T, dD, ea, e, bB, aj, dG, j, ci, v, eq, J, TB, av, Mo, hd, dY, ec, aT, K, dQ, af, kj, cW, aW, eZ, xH, Ku, g, bF, dC, nB, bE, Fi, eM, ei, Zw, L); #c1(USF2) c2(NP_003358) c3(upstream stimulatory factor 2 isoform 1) c4(137762) c5(137763, 137764, 137765, 137766, 137767, 137768, 137769) c6( ) c7(gh, G, T, n, aoM, ci, q, ad, aFu, dP, ft, fX, hd, aT, K, ae, af, iU, aW, ff, r, aq, Fq, Ku, en, g, bw, bF, nB, wR, B); #c1(USF2) c2(NP_997174) c3(upstream stimulatory factor 2 isoform 2) c4(265061, 265062) c5(265063, 265064, 265065, 265066, 265067, 265068, 265069, 265070, 265071, 265072, 265073, 265074) c6( ) c7(gh, G, T, n, aoM, ci, q, ad, aFu, dP, ft, fX, hd, aT, K, ae, af, iU, aW, ff, r, aq, Eq, Ku, en, g, bw, bF, nB, wR, B); #c1(USH1C) c2(NP_001284693) c3(harmonin isoform c) c4(112328) c5(112329, 112330, 112331, 112332, 112333, 112334) c6( ) c7(aIx, cTk, lR, bE, mG, bB, oc, nw, me, nk, cTj, Bh, q, bCJ); #c1(USH1C) c2(NP_005700) c3(harmonin isoform a) c4(158640, 158641) c5(158642, 158643, 158644, 158645, 158646, 158647, 158648, 158649, 158650, 158651, 158652, 158653) c6( ) c7(aIx, cTk, lR, bE, mG, bB, oc, nw, me, nk, cTj, Bh, q, bCJ); #c1(USH1C) c2(NP_710142) c3(harmonin isoform b3) c4(246472) c5(246473, 246474, 246475, 246476, 246477, 246478, 246479, 246480) c6( ) c7(aIx, cTk, lR, bE, mG, bB, oc, nw, me, nk, cTj, Bh, q, bCJ); #c1(USH1G) c2(NP_775748) c3(Usher syndrome type-1G protein isoform 1) c4(250161) c5(250162, 250163, 250164, 250165, 250166, 250167) c6( ) c7(iH, aIx, lR, dA, bdp, Xz, bS, et, nw, coA, Z, oc); #c1(USH2A) c2(NP_009054) c3(usherin isoform A) c4( ) c5(170469, 170470, 170471, 170472, 170473, 170474) c6( ) c7(aIx, lR, xI, mG, cTI, FQ, nw, Nh, nk, rz, nC, cpK, oc, dr, ad); #c1(USH2A) c2(NP_996816) c3(usherin isoform B) c4(264646, 264647, 264648) c5(264649, 264650, 264651, 264652, 264653, 264654, 264655, 264656, 264657, 264658, 264659, 264660, 264661, 264662, 264663, 264664) c6( ) c7(aIx, lR, xI, mG, cTI, FQ, nw, Nh, nk, rz, nC, cpK, oc, dr, ad); #c1(USO1) c2(NP_001276978) c3(general vesicular transport factor p115 isoform 1) c4(108890) c5(108891, 108892, 108893, 108894, 108895, 108896) c6( ) c7(oO, T, bvt, wL, if, jx, aA, eb, n, cL, fr, bvx, ci, qN, V, eW, o, ad, hX, jF, av, F, dY, h, K, lQ, hu, hH, bA, aa, uQ, A, mR, dH, Y, KS, cr, eZ, afq, lo, aF, xH, hp, iV, eE, iK, bz, kn, y, ig, bvy, Pk, qR, hv); #c1(USO1) c2(NP_003706) c3(general vesicular transport factor p115 isoform 2) c4(140291, 140292) c5(140293, 140294, 140295, 140296, 140297, 140298, 140299, 140300, 140301, 140302, 140303, 140304, 140305, 140306, 140307, 140308, 140309, 140310, 140311) c6( ) c7(oO, T, bvt, wL, if, jx, aA, eb, n, cL, fr, bvx, ci, qN, V, eW, o, ad, hX, jF, av, F, dY, h, K, lQ, hu, hH, bA, aa, uQ, A, mR, dH, Y, KS, cr, eZ, afq, lo, aF, xH, hp, iV, eE, iK, bz, kn, y, ig, bvy, Pk, qR, hv); #c1(USO1) c2(XP_006714460) c3(general vesicular transport factor p115 isoform X2) c4(287844) c5( ) c6( ) c7(oO, T, bvt, wL, if, jx, aA, eb, n, cL, fr, bvx, ci, qN, V, eW, o, ad, hX, jF, av, F, dY, h, K, lQ, hu, hH, bA, aa, uQ, A, mR, dH, Y, KS, cr, eZ, afq, lo, aF, xH, hp, iV, eE, iK, bz, kn, y, ig, bvy, Pk, qR, hv); #c1(USP10) c2(NP_005144) c3(ubiquitin carboxyl-terminal hydrolase 10 isoform 2) c4(153380) c5(153381, 153382, 153383, 153384, 153385, 153386, 153387) c6( ) c7(bB, Io, d, K); #c1(USP10) c2(XP_006721394) c3(ubiquitin carboxyl-terminal hydrolase 10 isoform X2) c4(293971, 293972) c5(293973, 293974, 293975, 293976, 293977, 293978) c6( ) c7(bB, Io, d, K); #c1(USP10) c2(XP_011521745) c3(ubiquitin carboxyl-terminal hydrolase 10 isoform X3) c4( ) c5(316451, 316452, 316453, 316454, 316455) c6( ) c7(bB, Io, d, K); #c1(USP11) c2(NP_004642) c3(ubiquitin carboxyl-terminal hydrolase 11) c4(148459, 148460) c5(148461, 148462, 148463, 148464, 148465, 148466, 148467, 148468, 148469, 148470, 148471, 148472) c6( ) c7(os, lR, aE, oZ, kp, nA, oQ, nC); #c1(USP12) c2(NP_872294) c3(ubiquitin carboxyl-terminal hydrolase 12) c4(256030) c5(256031, 256032, 256033, 256034, 256035, 256036) c6( ) c7(iV); #c1(USP13) c2(NP_003931) c3(ubiquitin carboxyl-terminal hydrolase 13) c4(142268) c5(142269, 142270, 142271, 142272, 142273, 142274) c6( ) c7(aW, Pk, Y, lQ, aT); #c1(USP14) c2(NP_001032411) c3(ubiquitin carboxyl-terminal hydrolase 14 isoform b) c4(31321) c5(31322, 31323, 31324, 31325, 31326, 31327, 31328, 31329, 31330, 31331) c6( ) c7(T, fd, ci, aR, aJM, av, arA, Ak, ey, Kf, g, iV, as, cm, qs, bz, bF, ar, iS, azr, R, y); #c1(USP14) c2(NP_005142) c3(ubiquitin carboxyl-terminal hydrolase 14 isoform a) c4(153366, 153367) c5(153368, 153369, 153370, 153371, 153372, 153373, 153374, 153375, 153376, 153377, 153378, 153379) c6( ) c7(T, fd, ci, aR, aJM, av, arA, Ak, ey, Kf, g, iV, as, cm, qs, bz, bF, ar, iS, azr, R, y); #c1(USP15) c2(NP_001239007) c3(ubiquitin carboxyl-terminal hydrolase 15 isoform 1) c4(88147) c5(88148, 88149, 88150, 88151, 88152, 88153) c6( ) c7(oO, T, d, aE, qY, fe, m, t, eA); #c1(USP15) c2(NP_001239008) c3(ubiquitin carboxyl-terminal hydrolase 15 isoform 3) c4(88154, 88155) c5(88156, 88157, 88158, 88159, 88160, 88161, 88162, 88163, 88164, 88165, 88166, 88167) c6( ) c7(oO, T, d, aE, qY, fe, m, t, eA); #c1(USP15) c2(NP_006304) c3(ubiquitin carboxyl-terminal hydrolase 15 isoform 2) c4(163857, 163858) c5(163859, 163860, 163861, 163862, 163863, 163864, 163865, 163866, 163867, 163868, 163869, 163870) c6( ) c7(oO, T, d, aE, qY, fe, m, t, eA); #c1(USP17L2) c2(NP_958804) c3(ubiquitin carboxyl-terminal hydrolase 17) c4(262208) c5(262209, 262210, 262211, 262212, 262213, 262214) c6( ) c7(T, K, eZ, aT); #c1(USP17L30) c2(NP_001243796) c3(ubiquitin specific peptidase 17-like family member 30) c4(91726) c5(91727, 91728, 91729, 91730, 91731, 91732, 91733, 91734, 91735, 91736, 91737, 91738, 91739, 91740, 91741, 91742, 91743, 91744, 91745, 91746, 91747, 91748, 91749, 91750) c6( ) c7(T, eZ); #c1(USP18) c2(NP_059110) c3(ubl carboxyl-terminal hydrolase 18) c4(193064, 193065) c5(193066, 193067, 193068, 193069, 193070, 193071) c6( ) c7(T, Bv, F, A, aZv, yG, jx, fc, lo, eo, K, cP, V, bz, er); #c1(USP18) c2(XP_006724137) c3(ubl carboxyl-terminal hydrolase 18 isoform X1) c4( ) c5(295811, 295812, 295813, 295814, 295815, 295816) c6( ) c7(T, Bv, F, A, aZv, yG, jx, fc, lo, eo, K, cP, V, bz, er); #c1(USP2) c2(NP_001230688) c3(ubiquitin carboxyl-terminal hydrolase 2 isoform c) c4(86569) c5(86570, 86571, 86572, 86573, 86574, 86575) c6( ) c7(bL, T, B, ad, vH); #c1(USP2) c2(NP_741994) c3(ubiquitin carboxyl-terminal hydrolase 2 isoform b) c4(247538, 247539) c5(247540, 247541, 247542, 247543, 247544, 247545, 247546, 247547, 247548, 247549, 247550, 247551) c6( ) c7(bL, T, B, ad, vH); #c1(USP2) c2(XP_005271779) c3(ubiquitin carboxyl-terminal hydrolase 2 isoform X1) c4(283584) c5(283585, 283586, 283587, 283588, 283589, 283590) c6( ) c7(bL, T, B, ad, vH); #c1(USP20) c2(XP_005251722) c3(ubiquitin carboxyl-terminal hydrolase 20 isoform X1) c4(271089) c5(271090, 271091, 271092, 271093, 271094, 271095, 271096, 271097, 271098, 271099, 271100, 271101, 271102, 271103) c6( ) c7(ac); #c1(USP22) c2(NP_056091) c3(ubiquitin carboxyl-terminal hydrolase 22) c4(185649, 185650, 185651) c5(185652, 185653, 185654, 185655, 185656, 185657, 185658, 185659, 185660, 185661, 185662, 185663, 185664, 185665, 185666, 185667, 185668, 185669) c6( ) c7(ck, T, nM, s, eM, bE, if, qK, r, bB, q, ci, qN, cd); #c1(USP25) c2(NP_001269970) c3(ubiquitin carboxyl-terminal hydrolase 25 isoform USP25m) c4(103310) c5(103311, 103312, 103313, 103314, 103315, 103316) c6( ) c7(fe, f, av, ww, eM); #c1(USP25) c2(NP_001269971) c3(ubiquitin carboxyl-terminal hydrolase 25 isoform USP25b) c4(103317) c5(103318, 103319, 103320, 103321, 103322, 103323) c6( ) c7(fe, f, av, ww, eM); #c1(USP25) c2(NP_037528) c3(ubiquitin carboxyl-terminal hydrolase 25 isoform USP25a) c4(176026) c5(176027, 176028, 176029, 176030, 176031, 176032) c6( ) c7(fe, f, av, ww, eM); #c1(USP26) c2(NP_114113) c3(ubiquitin carboxyl-terminal hydrolase 26) c4(222190) c5(222191, 222192, 222193, 222194, 222195, 222196, 222197, 222198, 222199, 222200) c6( ) c7(gO, ND, aMv, vH, UI, JO, UE); #c1(USP28) c2(NP_065937) c3(ubiquitin carboxyl-terminal hydrolase 28 isoform 1) c4(206331) c5(206332, 206333, 206334, 206335, 206336, 206337, 206338, 206339) c6( ) c7(T, aW, aT, r, n, dL, np, ci, KV, eL, q); #c1(USP28) c2(XP_005271696) c3(ubiquitin carboxyl-terminal hydrolase 28 isoform X10) c4(283534) c5(283535, 283536, 283537, 283538, 283539, 283540) c6( ) c7(T, aW, aT, r, n, dL, np, ci, KV, eL, q); #c1(USP3) c2(NP_001243631) c3(ubiquitin carboxyl-terminal hydrolase 3 isoform 2) c4(91259) c5(91260, 91261, 91262, 91263, 91264, 91265) c6( ) c7(cd); #c1(USP3) c2(NP_006528) c3(ubiquitin carboxyl-terminal hydrolase 3 isoform 1) c4(166009, 166010, 166011, 166012, 166013) c5(166014, 166015, 166016, 166017, 166018, 166019, 166020, 166021, 166022, 166023, 166024, 166025, 166026, 166027, 166028, 166029, 166030, 166031, 166032, 166033, 166034, 166035, 166036, 166037, 166038) c6( ) c7(cd); #c1(USP3) c2(XP_006720853) c3(ubiquitin carboxyl-terminal hydrolase 3 isoform X2) c4( ) c5(293741, 293742, 293743, 293744, 293745) c6( ) c7(cd); #c1(USP3) c2(XP_011520568) c3(ubiquitin carboxyl-terminal hydrolase 3 isoform X5) c4(315492) c5(315493, 315494, 315495, 315496, 315497, 315498) c6( ) c7(cd); #c1(USP32) c2(NP_115971) c3(ubiquitin carboxyl-terminal hydrolase 32) c4(225000) c5(225001, 225002, 225003, 225004, 225005, 225006, 225007, 225008, 225009, 225010, 225011, 225012) c6( ) c7(bB, aW, Io, K, aT); #c1(USP32) c2(XP_011523675) c3(ubiquitin carboxyl-terminal hydrolase 32 isoform X3) c4(318165) c5( ) c6( ) c7(bB, aW, Io, K, aT); #c1(USP33) c2(XP_011539358) c3(ubiquitin carboxyl-terminal hydrolase 33 isoform X4) c4(337440, 337441) c5(337442, 337443, 337444, 337445, 337446, 337447, 337448, 337449, 337450, 337451, 337452, 337453, 337454, 337455, 337456, 337457, 337458, 337459) c6( ) c7(x, k); #c1(USP36) c2(XP_005257599) c3(ubiquitin carboxyl-terminal hydrolase 36 isoform X1) c4(275274) c5(275275, 275276, 275277, 275278, 275279, 275280, 275281, 275282, 275283, 275284) c6( ) c7(t, m, an); #c1(USP36) c2(XP_011523369) c3(ubiquitin carboxyl-terminal hydrolase 36 isoform X2) c4(317893) c5( ) c6( ) c7(t, m, an); #c1(USP36) c2(XP_011523372) c3(ubiquitin carboxyl-terminal hydrolase 36 isoform X5) c4( ) c5(317894, 317895, 317896, 317897, 317898, 317899) c6( ) c7(t, m, an); #c1(USP36) c2(XP_011523373) c3(ubiquitin carboxyl-terminal hydrolase 36 isoform X6) c4(317900) c5( ) c6( ) c7(t, m, an); #c1(USP36) c2(XP_011523374) c3(ubiquitin carboxyl-terminal hydrolase 36 isoform X7) c4( ) c5(317901, 317902, 317903, 317904, 317905, 317906) c6( ) c7(t, m, an); #c1(USP37) c2(XP_005246779) c3(ubiquitin carboxyl-terminal hydrolase 37 isoform X1) c4(267414) c5(267415, 267416, 267417, 267418, 267419, 267420, 267421, 267422, 267423, 267424, 267425, 267426, 267427, 267428) c6( ) c7(jf, jj, ac); #c1(USP4) c2(NP_001238806) c3(ubiquitin carboxyl-terminal hydrolase 4 isoform c) c4(87908) c5(87909, 87910, 87911, 87912, 87913, 87914) c6( ) c7(T, ft, aW, aT, ci, iK, B); #c1(USP4) c2(NP_003354) c3(ubiquitin carboxyl-terminal hydrolase 4 isoform a) c4(137741) c5(137742, 137743, 137744, 137745, 137746, 137747) c6( ) c7(T, ft, aW, aT, ci, iK, B); #c1(USP4) c2(NP_955475) c3(ubiquitin carboxyl-terminal hydrolase 4 isoform b) c4(261842) c5(261843, 261844, 261845, 261846, 261847, 261848) c6( ) c7(T, ft, aW, aT, ci, iK, B); #c1(USP40) c2(NP_060688) c3(ubiquitin carboxyl-terminal hydrolase 40) c4(197165, 197166) c5(197167, 197168, 197169, 197170, 197171, 197172, 197173, 197174, 197175, 197176, 197177, 197178, 197179, 197180, 197181, 197182) c6( ) c7(GB, an); #c1(USP40) c2(XP_006712675) c3(ubiquitin carboxyl-terminal hydrolase 40 isoform X2) c4(286790) c5( ) c6( ) c7(GB, an); #c1(USP40) c2(XP_011509699) c3(ubiquitin carboxyl-terminal hydrolase 40 isoform X3) c4(300272) c5( ) c6( ) c7(GB, an); #c1(USP40) c2(XP_011509703) c3(ubiquitin carboxyl-terminal hydrolase 40 isoform X7) c4( ) c5(300273, 300274, 300275, 300276, 300277, 300278) c6( ) c7(GB, an); #c1(USP40) c2(XP_011509704) c3(ubiquitin carboxyl-terminal hydrolase 40 isoform X8) c4( ) c5(300279, 300280, 300281, 300282, 300283, 300284) c6( ) c7(GB, an); #c1(USP42) c2(NP_115548) c3(ubiquitin carboxyl-terminal hydrolase 42) c4(223147) c5(223148, 223149, 223150, 223151, 223152, 223153) c6( ) c7(ck, T, bt); #c1(USP42) c2(XP_005249940) c3(ubiquitin carboxyl-terminal hydrolase 42 isoform X5) c4( ) c5(269943) c6( ) c7(ck, T, bt); #c1(USP43) c2(NP_001254505) c3(ubiquitin carboxyl-terminal hydrolase 43 isoform 2) c4(94576) c5(94577, 94578, 94579, 94580, 94581, 94582) c6( ) c7(fq, Ea); #c1(USP43) c2(NP_694942) c3(ubiquitin carboxyl-terminal hydrolase 43 isoform 1) c4(245453) c5(245454, 245455, 245456, 245457, 245458, 245459) c6( ) c7(fq, Ea); #c1(USP44) c2(NP_001265322) c3(ubiquitin carboxyl-terminal hydrolase 44) c4(98259) c5(98260, 98261, 98262, 98263, 98264, 98265, 98266, 98267, 98268, 98269, 98270, 98271, 98272, 98273) c6( ) c7(T, bz); #c1(USP44) c2(XP_006719691) c3(ubiquitin carboxyl-terminal hydrolase 44 isoform X3) c4(292883, 292884) c5(292885, 292886, 292887, 292888, 292889, 292890, 292891, 292892, 292893, 292894, 292895, 292896) c6( ) c7(T, bz); #c1(USP46) c2(NP_001127695) c3(ubiquitin carboxyl-terminal hydrolase 46 isoform 2) c4(49231) c5(49232, 49233, 49234, 49235, 49236, 49237) c6( ) c7(aqv, bE, r, bB, bK, q); #c1(USP46) c2(NP_073743) c3(ubiquitin carboxyl-terminal hydrolase 46 isoform 1) c4(213426) c5(213427, 213428, 213429, 213430, 213431, 213432) c6( ) c7(aqv, bE, r, bB, bK, q); #c1(USP48) c2(XP_011540564) c3(ubiquitin carboxyl-terminal hydrolase 48 isoform X1) c4(339051) c5(339052, 339053, 339054, 339055, 339056, 339057) c6( ) c7(xa); #c1(USP49) c2(NP_001273483) c3(ubiquitin carboxyl-terminal hydrolase 49 isoform a) c4(104981, 104982) c5(104983, 104984, 104985, 104986, 104987, 104988, 104989, 104990, 104991, 104992, 104993, 104994, 104995, 104996, 104997, 104998, 104999, 105000, 105001, 105002) c6( ) c7(ac); #c1(USP49) c2(NP_061031) c3(ubiquitin carboxyl-terminal hydrolase 49 isoform b) c4(199083, 199084) c5(199085, 199086, 199087, 199088, 199089, 199090, 199091, 199092, 199093, 199094, 199095, 199096) c6( ) c7(ac); #c1(USP5) c2(NP_001092006) c3(ubiquitin carboxyl-terminal hydrolase 5 isoform 1) c4(39241) c5(39242, 39243, 39244, 39245, 39246, 39247) c6( ) c7(xZ, f, d, gu); #c1(USP5) c2(NP_003472) c3(ubiquitin carboxyl-terminal hydrolase 5 isoform 2) c4(138618) c5(138619, 138620, 138621, 138622, 138623, 138624) c6( ) c7(xZ, f, d, gu); #c1(USP6) c2(NP_001291213) c3(ubiquitin carboxyl-terminal hydrolase 6) c4(115584) c5(115585, 115586, 115587, 115588, 115589, 115590, 115591, 115592, 115593, 115594, 115595, 115596, 115597, 115598, 115599, 115600, 115601, 115602) c6( ) c7(T, acW, BL, aW, yg, aT, n, azg, zu, asb); #c1(USP6) c2(XP_011522359) c3(ubiquitin carboxyl-terminal hydrolase 6 isoform X2) c4(317030) c5( ) c6( ) c7(T, acW, BL, aW, yg, aT, n, azg, zu, asb); #c1(USP6) c2(XP_011522360) c3(ubiquitin carboxyl-terminal hydrolase 6 isoform X3) c4(317031, 317032) c5( ) c6( ) c7(T, acW, BL, aW, yg, aT, n, azg, zu, asb); #c1(USP6) c2(XP_011522361) c3(ubiquitin carboxyl-terminal hydrolase 6 isoform X4) c4(317033) c5(317034, 317035, 317036, 317037, 317038, 317039, 317040, 317041, 317042, 317043, 317044, 317045) c6( ) c7(T, acW, BL, aW, yg, aT, n, azg, zu, asb); #c1(USP6NL) c2(NP_001073960) c3(USP6 N-terminal-like protein isoform 2) c4(36700) c5(36701, 36702, 36703, 36704, 36705, 36706) c6( ) c7(Y); #c1(USP6NL) c2(NP_055503) c3(USP6 N-terminal-like protein isoform 1) c4(181596) c5(181597, 181598, 181599, 181600, 181601, 181602, 181603, 181604, 181605, 181606) c6( ) c7(Y); #c1(USP7) c2(NP_001273386) c3(ubiquitin carboxyl-terminal hydrolase 7 isoform 2) c4(104818) c5(104819, 104820, 104821, 104822, 104823, 104824) c6( ) c7(T, aw, fd, bB, ci, qN, cd, ad, eW, cfd, aT, KP, K, aUm, nJ, ae, aW, ff, La, en, g, cm, ck, eM, bE, kS); #c1(USP7) c2(NP_003461) c3(ubiquitin carboxyl-terminal hydrolase 7 isoform 1) c4(138512, 138513, 138514) c5(138515, 138516, 138517, 138518, 138519, 138520, 138521, 138522, 138523, 138524, 138525, 138526, 138527, 138528, 138529, 138530, 138531, 138532) c6( ) c7(T, aw, fd, bB, ci, qN, cd, ad, eW, cfd, aT, KP, K, aUm, nJ, ae, aW, ff, La, en, g, cm, ck, eM, bE, kS); #c1(USP8) c2(NP_001122082) c3(ubiquitin carboxyl-terminal hydrolase 8 isoform a) c4(46402, 46403, 46404, 46405) c5(46406, 46407, 46408, 46409, 46410, 46411, 46412, 46413, 46414, 46415, 46416, 46417, 46418, 46419) c6( ) c7(OD, bz, d, OH, eM); #c1(USP8) c2(XP_006720825) c3(ubiquitin carboxyl-terminal hydrolase 8 isoform X2) c4(293724) c5( ) c6( ) c7(OD, bz, d, OH, eM); #c1(USP8) c2(XP_011520496) c3(ubiquitin carboxyl-terminal hydrolase 8 isoform X3) c4( ) c5(315391, 315392, 315393, 315394, 315395, 315396, 315397, 315398, 315399, 315400, 315401, 315402, 315403, 315404, 315405, 315406, 315407, 315408, 315409, 315410, 315411, 315412, 315413, 315414) c6( ) c7(OD, bz, d, OH, eM); #c1(USP9X) c2(NP_001034679) c3(probable ubiquitin carboxyl-terminal hydrolase FAF-X isoform 3) c4(32069) c5(32070, 32071, 32072, 32073, 32074, 32075) c6( ) c7(T, cc, fM, aE, cTm, vJ, aW, iI, mx, H, aT, r, fd, kp, q, nA, dw, YZ, B); #c1(USP9X) c2(NP_001034680) c3(probable ubiquitin carboxyl-terminal hydrolase FAF-X isoform 4) c4(32076) c5(32077, 32078, 32079, 32080, 32081, 32082) c6( ) c7(T, cc, fM, aE, cTm, vJ, aW, iI, mx, H, aT, r, fd, kp, q, nA, dw, YZ, 8); #c1(USP9Y) c2(XP_011529771) c3(probable ubiquitin carboxyl-terminal hydrolase FAF-Y isoform X1) c4(325441) c5(325442, 325443, 325444, 325445, 325446, 325447, 325448, 325449, 325450, 325451, 325452, 325453, 325454) c6( ) c7(vH, ND, gU, cyH, j); #c1(USP9Y) c2(XP_011529772) c3(probable ubiquitin carboxyl-terminal hydrolase FAF-Y isoform X2) c4(325455) c5( ) c6( ) c7(vH, ND, gU, cyH, j); #c1(USPL1) c2(NP_005791) c3(SUMO-specific isopeptidase USPL1) c4(159362) c5(159363, 159364, 159365, 159366, 159367, 159368) c6( ) c7(aW, aT); #c1(UST) c2(NP_005706) c3(uronyl 2-sulfotransferase) c4(158666) c5(158667, 158668, 158669, 158670, 158671, 158672) c6( ) c7(dP, oe, j, aw); #c1(UTF1) c2(NP_003568) c3(undifferentiated embryonic cell transcription factor 1) c4(139226) c5(139227, 139228, 139229, 139230, 139231, 139232) c6( ) c7(vT, wu, if, eD, rO, ci, qN, wm, cm, KY); #c1(UTP14A) c2(NP_001159693) c3(U3 small nucleolar RNA-associated protein 14 homolog A isoform 2) c4(64601) c5(64602, 64603, 64604, 64605, 64606, 64607) c6( ) c7(K); #c1(UTP14A) c2(NP_006640) c3(U3 small nucleolar RNA-associated protein 14 homolog A isoform 1) c4(166834, 166835) c5(166836, 166837, 166838, 166839, 166840, 166841, 166842, 166843, 166844, 166845, 166846, 166847) c6( ) c7(K); #c1(UTP14A) c2(XP_011529566) c3(U3 small nucleolar RNA-associated protein 14 homolog A isoform X1) c4(325108, 325109) c5(325110, 325111, 325112, 325113, 325114, 325115, 325116, 325117, 325118, 325119, 325120, 325121) c6( ) c7(K); #c1(UTP14C) c2(NP_067677) c3(U3 small nucleolar RNA-associated protein 14 homolog C) c4(209282) c5(209283, 209284, 209285, 209286, 209287, 209288, 209289) c6( ) c7(gU); #c1(UTP20) c2(NP_055318) c3(small subunit processome component 20 homolog) c4(180416) c5(180417, 180418, 180419, 180420, 180421, 180422) c6( ) c7(dD, eq, bX, aT); #c1(UTRN) c2(NP_009055) c3(utrophin) c4(170475, 170476, 170477, 170478) c5(170479, 170480, 170481, 170482, 170483, 170484, 170485, 170486, 170487, 170488, 170489, 170490, 170491, 170492, 170493, 170494, 170495, 170496) c6( ) c7(lD, Ri, cz, KD, dG, cc, Ae, oj, aT, cy, bl, K, an, ly, hM, aW, xs, uY, t, lx, xA, wg, c, dc, bgo, U, NN); #c1(UTRN) c2(XP_005267184) c3(utrophin isoform X5) c4(280822) c5(280823, 280824, 280825, 280826, 280827, 280828) c6( ) c7(lD, Ri, cz, KD, dG, cc, Ae, oj, aT, cy, bl, K, an, ly, hM, aW, xs, uY, t, lIx, xA, wg, c, dc, bgo, U, NN); #c1(UTRN) c2(XP_006715623) c3(utrophin isoform X10) c4(289647) c5(289648, 289649, 289650, 289651, 289652, 289653, 289654, 289655, 289656, 289657, 289658, 289659, 289660, 289661, 289662, 289663, 289664, 289665, 289666, 289667, 289668, 289669, 289670, 289671, 289672, 289673, 289674, 289675, 289676, 289677, 289678, 289679) c6( ) c7(lD, Ri, cz, KD, dG, cc, Ae, oj, aT, cy, bl, K, an, ly, hM, aW, xs, uY, t, lx, xA, wg, c, dc, bgo, U, NN); #c1(UTRN) c2(XP_011534407) c3(utrophin isoform X4) c4(330887, 330888, 330889) c5(330890, 330891, 330892, 330893, 330894, 330895) c6( ) c7(lD, Ri, cz, KD, dG, cc, Ae, oj, aT, cy, bl, K, an, ly, hM, aW, xs, uY, t, lx, xA, wg, c, dc, bgo, U, NN); #c1(UTRN) c2(XP_011534411) c3(utrophin isoform X9) c4(330896) c5(330897, 330898, 330899, 330900, 330901, 330902) c6( ) c7(lD, Ri, cz, KD, dG, cc, Ae, oj, aT, cy, bI, K, an, ly, hM, aW, xs, uY, t, lx, xA, wg, c, dc, bgo, U, NN); #c1(UTS2) c2(XP_011538839) c3(urotensin-2 isoform X1) c4(336859) c5(336860, 336861, 336862, 336863, 336864, 336865, 336866, 336867) c6(336868, 336869) c7(bL, bM, T, dD, eR, vf, ea, e, al, aw, cz, cR, bB, aj, v, j, eb, vp, eq, aY, cd, q, J, PC, dP, bv, Tg, cc, sN, Bc, aql, iv, cy, hH, Fg, s, cW, r, Hu, cm, uC, xw, pb, qa, kT, bE, mg, fP, bm, mf, dy, ei, lC, sC, y); #c1(UTS2) c2(XP_011538840) c3(urotensin-2 isoform X2) c4(336870, 336871, 336872) c5(336873, 336874, 336875, 336876, 336877, 336878, 336879, 336880, 336881, 336882, 336883, 336884, 336885, 336886, 336887, 336888, 336889, 336890, 336891, 336892, 336893, 336894, 336895, 336896) c6(336897, 336898, 336899, 336900, 336901, 336902) c7(bL, bM, T, dD, eR, vf, ea, e, al, aw, cz, cR, bB, aj, v, j, eb, vp, eq, aY, cd, q, J, PC, dP, bv, Tg, cc, sN, Bc, aql, iv, cy, hH, Fg, s, cW, r, Hu, cm, uC, xw, pb, qa, kT, bE, mg, fP, bm, mf, dy, ei, lC, sC, y); #c1(UTS2B) c2(NP_937795) c3(urotensin-2B precursor) c4(259097, 259098) c5(259099, 259100, 259101, 259102, 259103, 259104, 259105, 259106, 259107, 259108, 259109, 259110, 259111, 259112, 259113, 259114, 259115, 259116, 259117, 259118, 259119) c6(259120, 259121, 259122, 259123, 259124) c7(dD, aw, uG, mg, j, eq, lC, af); #c1(UTS2R) c2(NP_061822) c3(urotensin-2 receptor) c4(200519) c5(200520, 200521, 200522, 200523, 200524, 200525) c6( ) c7(bM, T, aC, pf, ea, if, e, boZ, CH, bB, fd, cL, HH, aBm, aY, VV, Tz, aR, x, bv, AW, aji, u, Bc, M, dV, K, qM, bU, hH, eL, eN, hm, li, eG, ye, bbC, dH, aW, aAu, ih, alR, hl, apn, Ku, Eg, g, eE, eF, cm, mZ, wT, eY, y, jV, eM, iA, wK, dc, blQ, vA, ZT, bxS, U, cj, vy, Gs, uJ, azg, k, m, R, pw, bi, gD, iu, dD, gU, aEj, RX, aw, aj, ww, afE, fr, nA, pM, qN, eW, axC, biS, cc, no, ec, BR, bKk, Nn, gd, Ak, h, dL, ey, ZW, mV, btr, mY, db, on, pi, he, vx, mU, A, mR, zb, fe, aq, op, mX, W, ky, cEz, dB, Fi, anZ, eD, yP, Ei, hL, bm, E, fL, bD, jd, it, mT, B, cn, qc, bL, aoU, fM, eR, bcb, jx, aA, cR, mS, ti, cz, j, v, C, Wa, vp, q, J, o, eA, cF, RI, mP, WY, jZ, aql, MI, aT, vH, qv, bK, zp, bq, aUQ, XZ, an, aIV, ae, af, rE, jf, qw, s, iU, Y, yL, r, aaE, Io, aDm, HL, bwL, cl, t, iK, bN, ck, Qi, rR, nM, ac, c, bgy, ig, MB, AH, ro, dy, mf, aan, byK, gT, lJ, ao, gV, bNo, aDy, qb, aZ, aD, ha, iW, mw, bP, bS, oH, jE, uu, eq, Fb, mC, ad, Xv, dP, hX, HF, I, F, hd, Rq, akR, CJ, mW, ds, nl, oW, LA, hD, vc, hP, lQ, ji, yh, yF, mu, aeQ, d, lR, tb, hG, ctG, Gv, wc, bpO, nh, eH, dN, gI, kD, yy, aF, eZ, Pd, iR, iV, aUC, bz, dr, qa, dR, eK, es, bF, pc, csw, bE, z, anY, afd, be, ei, hE, aAN, X, us); #c1(UTY) c2(NP_001245181) c3(histone demethylase UTY isoform 7) c4(92633) c5( ) c6( ) c7(j); #c1(UTY) c2(NP_001245183) c3(histone demethylase UTY isoform 9) c4(92634) c5(92635, 92636, 92637, 92638, 92639, 92640) c6( ) c7(j); #c1(UTY) c2(NP_001245189) c3(histone demethylase UTY isoform 15) c4(92641) c5( ) c6( ) c7(j); #c1(UTY) c2(NP_001245192) c3(histone demethylase UTY isoform 18) c4(92642) c5( ) c6( ) c7(j); #c1(UTY) c2(NP_009056) c3(histone demethylase UTY isoform 3) c4(170497) c5( ) c6( ) c7(j); #c1(UTY) c2(NP_872601) c3(histone demethylase UTY isoform 1) c4(256468, 256469) c5(256470, 256471, 256472, 256473, 256474, 256475, 256476, 256477, 256478, 256479, 256480, 256481, 256482, 256483, 256484, 256485, 256486, 256487, 256488, 256489) c6( ) c7(j); #c1(UTY) c2(XP_011529751) c3(histone demethylase UTY isoform X9) c4( ) c5(325397, 325398, 325399, 325400, 325401, 325402) c6( ) c7(j); #c1(UTY) c2(XP_011529752) c3(histone demethylase UTY isoform X10) c4( ) c5(325403, 325404, 325405, 325406, 325407, 325408) c6( ) c7(j); #c1(UTY) c2(XP_011529754) c3(histone demethylase UTY isoform X12) c4( ) c5(325409, 325410, 325411, 325412, 325413, 325414, 325415, 325416, 325417, 325418, 325419, 325420) c6( ) c7(j); #c1(UTY) c2(XP_011529761) c3(histone demethylase UTY isoform X17) c4(325421) c5( ) c6( ) c7(j); #c1(UTY) c2(XP_011529762) c3(histone demethylase UTY isoform X19) c4( ) c5(325422) c6( ) c7(j); #c1(UTY) c2(XP_011529763) c3(histone demethylase UTY isoform X21) c4(325423) c5( ) c6( ) c7(j); #c1(UTY) c2(XP_011529764) c3(histone demethylase UTY isoform X22) c4(325424, 325425, 325426) c5(325427, 325428, 325429, 325430, 325431, 325432) c6( ) c7(j); #c1(UTY) c2(XP_011529767) c3(histone demethylase UTY isoform X26) c4(325433) c5( ) c6( ) c7(j); #c1(UVRAG) c2(NP_003360) c3(UV radiation resistance-associated gene protein) c4(137770, 137771) c5(137772, 137773, 137774, 137775, 137776, 137777, 137778, 137779, 137780, 137781, 137782, 137783, 137784, 137785, 137786, 137787, 137788, 137789) c6( ) c7(aOR, bM, T, Fv, if, bB, qj, ci, Na, aOS, aE, arA, pX, K, hu, eL, Ii, aW, aEI, az, Az, aOW, OZ, LZ, arK, g, eF, eM, nB, aPc, m, iB, zt, ht, n, qN, aPb, ft, amJ, dL, Dz, aOU, aOX, bmc, aiB, MD, ks, aOT, fM, yk, aA, arN, AO, akG, q, er, aOY, qK, aT, rO, Nc, Tj, avt, aOV, ae, xR, Lf, Y, r, en, bu, t, iK, sS, QG, kP, zu, rA, zU, ad, aOZ, hd, Db, lQ, ff, eH, cr, asV, Ej, aF, bz, atb, dr, LB, bE, adg, aPa); #c1(UVRAG) c2(XP_011543528) c3(UV radiation resistance-associated gene protein isoform X1) c4(342447) c5( ) c6( ) c7(aOR, bM, T, Fv, if, bB, qj, ci, Na, aOS, aE, arA, pX, K, hu, eL, Ii, aW, aEI, az, Az, aOW, OZ, LZ, arK, g, eF, eM, nB, aPc, m, iB, zt, ht, n, qN, aPb, ft, amJ, dL, Dz, aOU, aOX, bmc, aiB, MO, ks, aOT, fM, yk, aA, arN, AO, akG, q, er, aOY, qK, aT, rO, Nc, Tj, avt, aOV, ae, xR, Lf, Y, r, en, bu, t, iK, sS, QG, kP, zu, rA, zU, ad, aOZ, hd, Db, lQ, ff, eH, cr, asV, Ej, aF, bz, atb, dr, LB, bE, adg, aPa); #c1(UVSSA) c2(XP_011511824) c3(UV-stimulated scaffold protein A isoform X5) c4( ) c5(302496, 302497, 302498, 302499) c6( ) c7(cTn, KP, La, bnH); #c1(UVSSA) c2(XP_011511832) c3(UV-stimulated scaffold protein A isoform X7) c4(302500) c5( ) c6( ) c7(cTn, KP, La, bnH); #c1(UVSSA) c2(XP_011511836) c3(UV-stimulated scaffold protein A isoform X11) c4( ) c5(302501, 302502, 302503, 302504, 302505, 302506, 302507, 302508, 302509) c6( ) c7(cTn, KP, La, bnH); #c1(UXS1) c2(NP_001240804) c3(UDP-glucuronic acid decarboxylase 1 isoform 1) c4(88835, 88836, 88837, 88838, 88839, 88840) c5(88841, 88842, 88843, 88844, 88845, 88846) c6( ) c7(ac, bpc, Az); #c1(UXS1) c2(NP_001240805) c3(UDP-glucuronic acid decarboxylase 1 isoform 3) c4( ) c5(88847, 88848, 88849, 88850, 88851, 88852, 88853, 88854, 88855, 88856, 88857, 88858, 88859, 88860, 88861, 88862, 88863, 88864, 88865, 88866, 88867, 88868, 88869, 88870, 88871, 88872) c6( ) c7(ac, bpc, Az); #c1(UXS1) c2(NP_079352) c3(UDP-glucuronic acid decarboxylase 1 isoform 2) c4(217812, 217813) c5(217814, 217815, 217816, 217817, 217818, 217819) c6( ) c7(ac, bpc, Az); #c1(UXS1) c2(XP_006712838) c3(UDP-glucuronic acid decarboxylase 1 isoform X4) c4( ) c5(286891, 286892, 286893) c6( ) c7(ac, bpc, Az); #c1(UXS1) c2(XP_011510205) c3(UDP-glucuronic acid decarboxylase 1 isoform X2) c4( ) c5(300783, 300784, 300785, 300786, 300787, 300788) c6( ) c7(ac, bpc, Az); #c1(UXS1) c2(XP_011510206) c3(UDP-glucuronic acid decarboxylase 1 isoform X3) c4( ) c5(300789) c6( ) c7(ac, bpc, Az); #c1(UXT) c2(NP_004173) c3(protein UXT isoform 2) c4(144080, 144081) c5(144082, 144083, 144084, 144085, 144086, 144087, 144088, 144089, 144090, 144091) c6( ) c7(T, ae, cl, ad); #c1(UXT) c2(NP_705582) c3(protein UXT isoform 1) c4(246117) c5(246118, 246119, 246120, 246121, 246122, 246123, 246124, 246125) c6( ) c7(T, ae, cl, ad); #c1(VAC14) c2(NP_060522) c3(protein VAC14 homolog) c4(196356, 196357) c5(196358, 196359, 196360, 196361, 196362, 196363, 196364, 196365, 196366, 196367, 196368, 196369) c6( ) c7(h, B, bU, kH); #c1(VAMP1) c2(NP_001284367) c3(vesicle-associated membrane protein 1 isoform 4) c4( ) c5(111838, 111839, 111840, 111841, 111842, 111843, 111844) c6( ) c7(YE, aR, s, Gx); #c1(VAMP1) c2(NP_055046) c3(vesicle-associated membrane protein 1 isoform 1) c4(178558, 178559, 178560) c5(178561, 178562, 178563, 178564, 178565, 178566, 178567, 178568, 178569, 178570, 178571, 178572) c6( ) c7(YE, aR, s, Gx); #c1(VAMP1) c2(NP_058439) c3(vesicle-associated membrane protein 1 isoform 3) c4(192744) c5(192745, 192746, 192747, 192748, 192749) c6( ) c7(YE, aR, s, Gx); #c1(VAMP1) c2(NP_954740) c3(vesicle-associated membrane protein 1 isoform 2) c4(261361) c5(261362, 261363, 261364, 261365, 261366, 261367) c6( ) c7(YE, aR, s, Gx); #c1(VAMP2) c2(NP_055047) c3(vesicle-associated membrane protein 2) c4(178573) c5(178574, 178575, 178576, 178577, 178578, 178579) c6( ) c7(bL, T, ha, Gx, bK, nA, kk, af); #c1(VAMP4) c2(NP_001172056) c3(vesicle-associated membrane protein 4 isoform 2) c4(72363) c5(72364, 72365, 72366, 72367, 72368, 72369, 72370, 72371, 72372, 72373) c6( ) c7(bL, aj, J); #c1(VAMP4) c2(NP_003753) c3(vesicle-associated membrane protein 4 isoform 1) c4(140631) c5(140632, 140633, 140634, 140635, 140636, 140637, 140638, 140639, 140640, 140641) c6( ) c7(bL, aj, J); #c1(VAMP7) c2(NP_001138621) c3(vesicle-associated membrane protein 7 isoform 2) c4(57247) c5(57248, 57249, 57250, 57251, 57252, 57253) c6( ) c7(mU, T, cA, mW, aW, mZ, aT, mS, mY, bK, eA, kk, mV, iK, mT, Zj, mX); #c1(VAMP7) c2(NP_001172112) c3(vesicle-associated membrane protein 7 isoform 3) c4(72408) c5(72409, 72410, 72411, 72412, 72413, 72414, 72415) c6( ) c7(mU, T, cA, mW, aW, mZ, aT, mS, mY, bK, eA, kk, mV, iK, mT, Zj, mX); #c1(VAMP7) c2(NP_005629) c3(vesicle-associated membrane protein 7 isoform 1) c4(158090) c5(158091, 158092, 158093, 158094, 158095) c6( ) c7(mU, T, cA, mW, aW, mZ, aT, mS, mY, bK, eA, kk, mV, iK, mT, Zj, mX); #c1(VAMP8) c2(NP_003752) c3(vesicle-associated membrane protein 8) c4(140624) c5(140625, 140626, 140627, 140628, 140629, 140630) c6( ) c7(T, dD, ea, e, aw, j, ci, eq, fr, zP, jy, ey, vx, eu, zQ, oV, eH, eF, ac, iA, gZ, dy); #c1(VANGL2) c2(NP_065068) c3(vang-like protein 2) c4(203578) c5(203579, 203580, 203581, 203582, 203583, 203584) c6( ) c7(md, T, iU, Ip, Y, r, aA, aF, oQ, Bd, q); #c1(VAPA) c2(NP_003565) c3(vesicle-associated membrane protein-associated protein A isoform 1) c4(139204) c5(139205, 139206, 139207, 139208, 139209, 139210) c6( ) c7(ac, c, uJ, bK, j, yA, fq); #c1(VAPA) c2(NP_919415) c3(vesicle-associated membrane protein-associated protein A isoform 2) c4(258546) c5(258547, 258548, 258549, 258550, 258551, 258552) c6( ) c7(ac, c, uJ, bK, j, yA, fq); #c1(VAPB) c2(NP_001182606) c3(vesicle-associated membrane protein-associated protein B/C isoform 2) c4(75108) c5(75109, 75110, 75111, 75112, 75113, 75114) c6( ) c7(cTo, c, OI, HC, aT, kf, U, PJ, cTp, cTg); #c1(VAPB) c2(NP_004729) c3(vesicle-associated membrane protein-associated protein B/C isoform 1) c4(149123) c5(149124, 149125, 149126, 149127, 149128, 149129) c6( ) c7(cTo, c, OI, HC, aT, kf, U, PJ, cTp, cTq); #c1(VARS) c2(NP_006286) c3(valine—tRNA ligase) c4(163600, 163601, 163602, 163603) c5(163604, 163605, 163606, 163607, 163608, 163609, 163610, 163611, 163612, 163613, 163614, 163615, 163616, 163617, 163618, 163619, 163620, 163621, 163622, 163623, 163624, 163625, 163626, 163627, 163628, 163629, 163630, 163631, 163632, 163633, 163634, 163635, 163636, 163637, 163638, 163639, 163640, 163641, 163642, 163643, 163644, 163645, 163646, 163647, 163648, 163649, 163650, 163651, 163652, 163653, 163654, 163655, 163656, 163657, 163658, 163659, 163660, 163661, 163662, 163663, 163664, 163665, 163666, 163667, 163668, 163669, 163670, 163671, 163672, 163673, 163674, 163675, 163676, 163677, 163678, 163679, 163680, 163681, 163682, 163683, 163684) c6( ) c7(kC, eZ); #c1(VARS) c2(XP_005249419) c3(valine—tRNA ligase isoform X1) c4(269304) c5( ) c6( ) c7(kC, eZ); #c1(VARS) c2(XP_005274943) c3(valine—tRNA ligase isoform X1) c4(285541, 285542, 285543) c5( ) c6( ) c7(kC, eZ); #c1(VARS) c2(XP_011513147) c3(valine—tRNA ligase isoform X2) c4(304975, 304976) c5(304977, 304978, 304979, 304980, 304981, 304982, 304983, 304984, 304985, 304986, 304987, 304988, 304989, 304990, 304991, 304992, 304993, 304994, 304995, 304996, 304997, 304998, 304999, 305000, 305001, 305002, 305003, 305004, 305005, 305006, 305007, 305008, 305009, 305010, 305011, 305012) c6( ) c7(kC, eZ); #c1(VARS2) c2(NP_001161205) c3(valine—tRNA ligase, mitochondrial isoform 3) c4(65390) c5( ) c6( ) c7(hH, kC, AW, eZ); #c1(VARS2) c2(NP_001161206) c3(valine—tRNA ligase, mitochondrial isoform 1) c4(65391, 65392, 65393, 65394) c5(65395, 65396, 65397, 65398, 65399, 65400, 65401, 65402, 65403, 65404, 65405, 65406, 65407, 65408, 65409, 65410, 65411, 65412, 65413, 65414, 65415, 65416, 65417, 65418, 65419, 65420, 65421, 65422, 65423, 65424, 65425, 65426, 65427, 65428, 65429, 65430, 65431, 65432, 65433, 65434, 65435, 65436, 65437, 65438, 65439, 65440, 65441, 65442, 65443, 65444, 65445, 65446, 65447, 65448, 65449, 65450, 65451, 65452, 65453, 65454, 65455, 65456, 65457, 65458, 65459, 65460, 65461, 65462, 65463, 65464, 65465, 65466, 65467, 65468, 65469, 65470, 65471, 65472, 65473, 65474, 65475, 65476, 65477, 65478, 65479, 65480, 65481, 65482, 65483, 65484, 65485, 65486, 65487, 65488, 65489, 65490, 65491, 65492, 65493, 65494, 65495) c6( ) c7(hH, kC, AW, eZ); #c1(VARS2) c2(NP_065175) c3(valine—tRNA ligase, mitochondrial isoform 2 precursor) c4(204392, 204393, 204394, 204395, 204396, 204397, 204398, 204399, 204400, 204401) c5(204402, 204403, 204404, 204405, 204406, 204407, 204408, 204409, 204410, 204411, 204412, 204413, 204414, 204415, 204416, 204417, 204418, 204419, 204420, 204421, 204422, 204423, 204424, 204425, 204426, 204427, 204428, 204429, 204430, 204431, 204432, 204433, 204434, 204435, 204436, 204437, 204438, 204439, 204440, 204441, 204442, 204443, 204444, 204445, 204446, 204447, 204448, 204449, 204450, 204451, 204452, 204453, 204454, 204455, 204456, 204457, 204458, 204459, 204460, 204461) c6( ) c7(hH, kC, AW, eZ); #c1(VASH1) c2(NP_055724) c3(vasohibin-1) c4(183118, 183119) c5(183120, 183121, 183122, 183123, 183124, 183125, 183126, 183127) c6(183128, 183129) c7(bL, gk, DA, T, aE, qt, uG, aI, aT, r, aj, v, j, K, ci, mo, eS, q, J); #c1(VASH1) c2(XP_006720143) c3(vasohibin-1 isoform X3) c4( ) c5(293284, 293285, 293286, 293287, 293288, 293289, 293290, 293291) c6(293292, 293293) c7(bL, gk, DA, T, aE, qt, uG, aI, aT, r, aj, v, j, K, ci, mo, eS, q, J); #c1(VASH2) c2(NP_001129946) c3(vasohibin-2 isoform 2) c4(52334) c5(52335, 52336, 52337, 52338, 52339, 52340, 52341, 52342) c6( ) c7(T, aq, m, ir, iR, t, B); #c1(VASH2) c2(NP_001129947) c3(vasohibin-2 isoform 3) c4( ) c5(52343, 52344, 52345, 52346, 52347) c6( ) c7(T, aq, m, ir, iR, t, B); #c1(VASH2) c2(NP_001287985) c3(vasohibin-2 isoform 4) c4(113294, 113295) c5(113296, 113297, 113298, 113299, 113300, 113301113302, 113303) c6( ) c7(T, aq, m, ir, iR, t, B); #c1(VASH2) c2(NP_079025) c3(vasohibin-2 isoform 1) c4(216639) c5(216640, 216641, 216642, 216643, 216644, 216645) c6( ) c7(T, aq, m, ir, iR, t, B); #c1(VASH2) c2(XP_011508292) c3(vasohibin-2 isoform X4) c4( ) c5(298981) c6( ) c7(T, aq, m, ir, iR, t, B); #c1(VASH2) c2(XP_011508293) c3(vasohibin-2 isoform X5) c4(298982, 298983) c5(298984) c6( ) c7(T, aq, m, ir, iR, t, B); #c1(VASH2) c2(XP_011508297) c3(vasohibin-2 isoform X7) c4( ) c5(298985, 298986, 298987, 298988, 298989) c6( ) c7(T, aq, m, ir, iR, t, B); #c1(VASH2) c2(XP_011508299) c3(vasohibin-2 isoform X9) c4( ) c5(298990) c6( ) c7(T, aq, m, ir, iR, t, B); #c1(VASH2) c2(XP_011508300) c3(vasohibin-2 isoform X10) c4( ) c5(298991, 298992, 298993, 298994, 298995, 298996) c6( ) c7(T, aq, m, ir, iR, t, B); #c1(VASP) c2(NP_003361) c3(vasodilator-stimulated phosphoprotein) c4(137790) c5( ) c6( ) c7(T, aW, e, dh, az, mx, aT, aA, By, dG, aF, K, Sm); #c1(VASP) c2(XP_005259257) c3(vasodilator-stimulated phosphoprotein isoform X2) c4( ) c5(276015, 276016, 276017, 276018, 276019, 276020, 276021) c6( ) c7(T, aW, e, dh, az, mx, aT, aA, By, dG, aF, K, Sm); #c1(VAT1) c2(NP_006364) c3(synaptic vesicle membrane protein VAT-1 homolog) c4(164381, 164382, 164383, 164384) c5(164385, 164386, 164387, 164388, 164389, 164390, 164391, 164392, 164393, 164394, 164395, 164396, 164397, 164398, 164399, 164400, 164401, 164402, 164403, 164404, 164405, 164406, 164407, 164408, 164409) c6( ) c7(aW, d, eA, eP, aT); #c1(VAT1L) c2(NP_065978) c3(synaptic vesicle membrane protein VAT-1 homolog-like) c4(206584) c5(206585, 206586, 206587, 206588, 206589, 206590) c6( ) c7(he, ac); #c1(VAV1) c2(NP_001245136) c3(proto-oncogene vav isoform 3) c4(92553, 92554) c5(92555, 92556, 92557, 92558, 92559, 92560, 92561, 92562, 92563, 92564, 92565, 92566) c6( ) c7(T, aC, fM, dA, fZ, aA, dP, aE, aT, K, jj, pk, jf, VC, A, aiB, et, iE, aW, Y, CM, kp, aF, g, cm, bz, Wt, ck, cj, k, bt, B); #c1(VAV1) c2(NP_005419) c3(proto-oncogene vav isoform 1) c4(155874) c5(155875, 155876, 155877, 155878, 155879, 155880, 155881, 155882, 155883, 155884) c6( ) c7(T, aC, fM, dA, fZ, aA, dP, aE, aT, K, jj, pk, jf, VC, A, aiB, et, iE, aW, Y, CM, kp, aF, g, cm, bz, Wt, ck, cj, k, bt, B); #c1(VAV2) c2(NP_001127870) c3(guanine nucleotide exchange factor VAV2 isoform 1) c4(49411) c5(49412, 49413, 49414, 49415, 49416, 49417) c6( ) c7(pZ, dH, aW, ff, sa, aT, By, K, en, t, V); #c1(VAV2) c2(NP_003362) c3(guanine nucleotide exchange factor VAV2 isoform 2) c4(137791) c5(137792, 137793, 137794, 137795, 137796, 137797) c6( ) c7(pZ, dH, aW, ff, sa, aT, By, K, en, t, V); #c1(VAV2) c2(XP_005272270) c3(guanine nucleotide exchange factor VAV2 isoform X2) c4(283937, 283938) c5(283939, 283940, 283941, 283942, 283943, 283944, 283945, 283946, 283947, 283948, 283949, 283950) c6( ) c7(pZ, dH, aW, ff, sa, aT, By, K, en, t, V); #c1(VAV3) c2(XP_011538805) c3(guanine nucleotide exchange factor VAV3 isoform X2) c4(336544) c5( ) c6( ) c7(ae, T, fM, d, pZ, dH, aW, aT, aA, n, cz, aF, ey, dw, gT, sa, fs, ad); #c1(VAX1) c2(NP_001106175) c3(ventral anterior homeobox 1 isoform a) c4(42322) c5(42323, 42324, 42325, 42326, 42327, 42328) c6( ) c7(apM, kj, ff, cTr, n, dL, en, g, eL, bvU); #c1(VAX1) c2(NP_954582) c3(ventral anterior homeobox 1 isoform b) c4(261058) c5(261059, 261060, 261061, 261062, 261063, 261064) c6( ) c7(apM, kj, ff, cTr, n, dL, en, g, eL, bvU); #c1(VAX2) c2(NP_036608) c3(ventral anterior homeobox 2) c4(174794) c5(174795, 174796, 174797, 174798, 174799, 174800, 174801) c6( ) c7(tT); #c1(VBP1) c2(NP_001290472) c3(prefoldin subunit 3 isoform 2) c4(115504) c5(115505) c6( ) c7(h, dz, fr, VB, py); #c1(VBP1) c2(NP_001290473) c3(prefoldin subunit 3 isoform 3) c4(115506) c5(115507, 115508, 115509, 115510, 115511, 115512) c6( ) c7(h, dz, fr, VB, py); #c1(VBP1) c2(NP_003363) c3(prefoldin subunit 3 isoform 1) c4( ) c5(137798, 137799, 137800, 137801, 137802) c6( ) c7(h, dz, fr, VB, py); #c1(VCAN) c2(NP_001119808) c3(versican core protein isoform 2 precursor) c4(44297) c5(44298, 44299, 44300, 44301, 44302, 44303) c6( ) c7(rt, G, sY, T, pG, kh, dD, bM, ea, yk, hV, if, hE, aw, aA, fd, Fb, eq, ci, rm, qN, fr, lu, q, ad, eA, hX, dP, fU, ip, ld, qK, aT, lG, dL, K, fb, ae, eL, bf, Ln, aW, Y, eH, r, aq, aF, as, cI, pL, aRq, cM, t, uC, op, eF, iR, iV, kT, acW, dB, hk, vb, vA, hL, bm, aS, m, dy, fy, B, us); #c1(VCAN) c2(NP_001157569) c3(versican core protein isoform 3 precursor) c4(62246) c5(62247, 62248, 62249, 62250, 62251, 62252) c6( ) c7(rt, G, sY, T, pG, kh, dD, bM, ea, yk, hV, if, hE, aw, aA, fd, Fb, eq, ci, rm, qN, fr, lu, q, ad, eA, hX, dP, fU, ip, ld, qK, aT, lG, dL, K, fb, ae, eL, bf, Ln, aW, Y, eH, r, aq, aF, as, cI, pL, aRq, cM, t, uC, op, eF, iR, iV, kT, acW, dB, hk, vb, vA, hL, bm, aS, m, dy, fy, B, us); #c1(VCAN) c2(NP_001157570) c3(versican core protein isoform 4 precursor) c4(62253, 62254) c5(62255, 62256, 62257, 62258, 62259, 62260, 62261, 62262, 62263, 62264, 62265, 62266) c6( ) c7(rt, G, sY, T, PG, kh, dD, bM, ea, yk, hV, if, hE, aw, aA, fd, Fb, eq, ci, rm, qN, fr, lu, q, ad, eA, hX, dP, fU, ip, ld, qK, aT, lG, dL, K, fb, ae, eL, bf, Ln, aW, Y, eH, r, aq, aF, as, cI, pL, aRq, cM, t, uC, op, eF, iR, iV, kT, acW, dB, hk, vb, vA, hL, bm, aS, m, dy, fy, B, us); #c1(VCAN) c2(NP_004376) c3(versican core protein isoform 1 precursor) c4(145903) c5(145904, 145905, 145906, 145907, 145908, 145909) c6( ) c7(rt, G, sY, T, PG, kh, dD, bM, ea, yk, hV, if, hE, aw, aA, fd, Fb, eq, ci, rm, qN, fr, lu, q, ad, eA, hX, dP, fU, ip, ld, qK, aT, lG, dL, K, fb, ae, eL, bf, Ln, aW, Y, eH, r, aq, aF, as, cI, pL, aRq, cM, t, uC, op, eF, iR, iV, kT, acW, dB, hk, vb, vA, hL, bm, aS, m, dy, fy, B, us); #c1(VCL) c2(NP_003364) c3(vinculin isoform VCL) c4(137803, 137804) c5(137805, 137806, 137807, 137808, 137809, 137810, 137811, 137812, 137813, 137814, 137815, 137816, 137817, 137818, 137819, 137820, 137821, 137822) c6( ) c7(T, dD, ea, cTt, ci, BF, eq, fr, eA, ad, av, cc, hw, pX, cTs, By, vc, K, aGh, ae, bA, xs, bz, Qx, nG, mx); #c1(VCL) c2(NP_054706) c3(vinculin isoform meta-VCL) c4(177328, 177329) c5(177330, 177331, 177332, 177333, 177334, 177335, 177336, 177337, 177338, 177339, 177340, 177341) c6( ) c7(T, dD, ea, cTt, ci, BF, eq, fr, eA, ad, av, cc, hw, pX, cTs, By, vc, K, aGh, ae, bA, xs, bz, Qx, nG, mx); #c1(VCL) c2(XP_005270199) c3(vinculin isoform X1) c4(283263) c5(283264, 283265, 283266, 283267, 283268, 283269) c6( ) c7(T, dD, ea, cTt, ci, BF, eq, fr, eA, ad, av, cc, hw, pX, cTs, By, vc, K, aGh, ae, bA, xs, bz, Qx, nG, mx); #c1(VCL) c2(XP_005270200) c3(vinculin isoform X2) c4(283270) c5( ) c6( ) c7(T, dD, ea, cTt, ci, BF, eq, fr, eA, ad, av, cc, hw, pX, cTs, By, vc, K, aGh, ae, bA, xs, bz, Qx, nG, mx); #c1(VCP) c2(NP_009057) c3(transitional endoplasmic reticulum ATPase) c4(170498) c5(170499, 170500, 170501, 170502, 170503, 170504) c6( ) c7(T, uf, alW, Ol, if, it, n, Vd, ci, qN, PJ, aR, xt, ad, cc, no, aE, aV, Do, zw, WY, Ws, Dq, oj, aT, Ak, alO, aiW, cy, bdM, K, bI, hu, bV, an, chD, ae, af, aW, bht, Y, Lf, alR, aaE, bOW, aF, bu, eF, alj, dr, ck, rR, bb, Ew, c, Kv, eM, bEf, bxS, U, cTu, axV, oh, nw, m, fD, bi, lM, xg, B, ao); #c1(VCX) c2(NP_038480) c3(variable charge X-linked protein 1) c4(176710, 176711) c5(176712, 176713) c6( ) c7(btu, oe, nA, hQ); #c1(VCX) c2(XP_011543792) c3(variable charge X-linked protein 1 isoform X1) c4(342908) c5( ) c6( ) c7(btu, oe, nA, hQ); #c1(VCX2) c2(NP_057462) c3(variable charge X-linked protein 2) c4(191061, 191062) c5(191063, 191064, 191065, 191066, 191067, 191068, 191069, 191070, 191071, 191072, 191073, 191074, 191075, 191076, 191077, 191078, 191079, 191080, 191081, 191082, 191083, 191084, 191085, 191086, 191087, 191088, 191089, 191090, 191091, 191092, 191093, 191094, 191095, 191096) c6( ) c7(btu, nA, hQ); #c1(VCX3A) c2(NP_057463) c3(variable charge X-linked protein 3) c4(191097, 191098, 191099) c5( ) c6( ) c7(nf, btu, hQ, nA, Kn); #c1(VCX3A) c2(XP_006724557) c3(variable charge X-linked protein 3 isoform X1) c4(296076) c5( ) c6( ) c7(nf, btu, hQ, nA, Kn); #c1(VCX3B) c2(NP_001001888) c3(variable charge X-linked protein 38) c4(19068, 19069) c5(19070, 19071, 19072, 19073, 19074, 19075, 19076, 19077, 19078, 19079, 19080, 19081, 19082, 19083, 19084, 19085, 19086, 19087, 19088, 19089, 19090, 19091, 19092) c6( ) c7(btu, nA, hQ); #c1(VCY) c2(NP_004670) c3(testis-specific basic protein Y 1) c4(148713) c5(148714, 148715, 148716, 148717, 148718, 148719, 148720, 148721, 148722) c6( ) c7(btu, nA, hQ); #c1(VDAC1) c2(XP_005272132) c3(voltage-dependent anion-selective channel protein 1 isoform X1) c4(283715) c5(283716, 283717, 283718, 283719, 283720, 283721, 283722, 283723, 283724, 283725, 283726, 283727, 283728, 283729) c6( ) c7(T, cF, c, eM, aW, ha, aT, PV, n, aNG, fd, fe, ci, K, cx, cm, V, af, aBs); #c1(VDAC2) c2(NP_001171712) c3(voltage-dependent anion-selective channel protein 2 isoform 1) c4(71381, 71382, 71383) c5(71384, 71385, 71386, 71387, 71388, 71389, 71390, 71391, 71392, 71393, 71394, 71395) c6( ) c7(gC, fM, aW, Y, ff, ha, aT, kf, h, aj, avF, zV, en, lC, bz, J, ip); #c1(VDAC2) c2(XP_011538430) c3(voltage-dependent anion-selective channel protein 2 isoform X1) c4(336191, 336192, 336193, 336194) c5(336195, 336196, 336197, 336198, 336199, 336200, 336201, 336202, 336203, 336204, 336205, 336206, 336207, 336208, 336209, 336210, 336211, 336212, 336213, 336214, 336215, 336216, 336217, 336218, 336219, 336220, 336221, 336222, 336223, 336224, 336225, 336226, 336227, 336228) c6( ) c7(gC, fM, aW, Y, ff, ha, aT, kf, h, aj, avF, zV, en, lc, bz, J, ip); #c1(VDR) c2(NP_000367) c3(vitamin D3 receptor isoform VDRA) c4(8159) c5(8160, 8161, 8162, 8163, 8164, 8165, 8166, 8167, 8168, 8169, 8170, 8171, 8172, 8173, 8174, 8175, 8176, 8177, 8178, 8179, 8180, 8181, 8182, 8183, 8184, 8185, 8186, 8187, 8188, 8189, 8190, 8191) c6( ) c7(bM, G, T, aC, fR, e, aI, bB, cL, gf, qj, ci, bh, bbZ, aY, Tz, bOI, AW, dV, Ds, azm, rB, K, bbV, dF, bc, Zm, mH, aa, azh, aEV, zQ, aW, bsZ, hI, LZ, Qv, g, eE, eF, ba, xK, rq, Jr, nB, eM, iA, vA, U, cj, PV, vy, iS, azg, k, m, pw, IS, bi, qR, iu, FW, dD, bbW, aYZ, sw, aAP, aw, ht, NT, xJ, aj, fr, ai, amB, jz, zw, acm, aow, rI, cU, h, dL, aDp, aaK, hi, cgB, Nr, Dg, mR, A, sp, OX, arp, ge, ks, bbX, aq, yq, po, CQ, fe, zZ, cM, bJ, vU, kT, YE, sF, hk, at, uz, fL, it, B, rp, bL, vQ, fM, Ik, rG, bcb, eR, yk, oe, jx, cz, wo, hy, v, j, amC, C, il, V, q, J, o, eA, MR, afQ, aT, aAR, jj, an, hK, ae, af, eu, bA, aRR, eC, qw, kl, s, iZ, Y, aCH, bg, r, iy, aDm, rs, Lc, en, bQ, t, aDQ, ck, ajl, arr, sS, OW, Dy, c, ac, BU, aQd, ig, iQ, hr, hO, aeM, wR, dy, fD, bt, ars, gx, id, aFe, aZ, iW, axd, Ay, eq, jE, azk, mC, ad, kL, hX, dP, av, abk, hd, F, wD, yt, vJ, NS, oW, hD, Dj, JK, IQ, vB, ji, nJ, yF, sj, uQ, BN, gt, PE, vj, ff, cr, eZ, aFr, hp, iV, HI, bz, dr, Ng, es, gk, yE, bE, bbY, aFb, aED, X, aef, bon, ei, asz, y, ne, sH, pC); #c1(VDR) c2(NP_001017536) c3(vitamin D3 receptor isoform VDRB1) c4(26595, 26596, 26597, 26598, 26599) c5(26600, 26601, 26602, 26603, 26604, 26605, 26606, 26607, 26608, 26609, 26610, 26611, 26612) c6( ) c7(bM, G, T, aC, fR, e, aI, bB, cL, gf, gj, ci, bh, bbZ, aY, Tz, bOI, AW, dV, Os, azm, rB, K, bbV, dF, bc, Zm, mH, aa, azh, aEV, zQ, aW, bsZ, hI, LZ, Qv, g, eE, eF, ha, xK, rg, Jr, nB, eM, iA, vA, U, cj, PV, vy, iS, azg, k, m, pw, IS, bi, qR, iu, FW, dD, bbW, aYZ, sw, aAP, aw, ht, NT, xJ, aj, fr, ai, amB, jz, zw, acm, aow, rl, cU, h, dL, aDp, aaK, hi, cgB, Nr, Dg, mR, A, sp, OX, arp, ge, ks, bbX, ag, yg, po, CQ, fe, zZ, cM, bJ, vU, kT, YE, sF, hk, at, uz, fL, it, B, rp, bL, vQ, fM, lk, rG, bcb, eR, yk, oe, jx, cz, wo, hy, v, j, amC, C, iI, V, q, J, o, eA, MR, afQ, aT, aAR, jj, an, hK, ae, af, eu, bA, aRR, eC, qw, kl, s, iZ, Y, aCH, bg, r, iy, aDm, rs, Lc, en, bQ, t, aDQ, ck, ajl, arr, sS, OW, Dy, c, ac, BU, aQd, ig, iQ, hr, hO, aeM, wR, dy, fD, bt, ars, gx, id, aFe, aZ, iW, axd, Ay, eq, jE, azk, mC, ad, kL, hX, dP, av, abk, hd, F, wD, yt, vJ, NS, oW, hD, Dj, JK, IQ, vB, ji, nJ, yF, sj, uQ, BN, qt, PE, vj, ff, cr, eZ, aFr, hp, iV, Hl, bz, dr, Nq, es, gk, yE, bE, bbY, aFb, aED, X, aef, bon, ei, asz, y, ne, sH, pC); #c1(VEGFA) c2(NP_001020537) c3(vascular endothelial growth factor A isoform a) c4(28842, 28843, 28844) c5(28845, 28846, 28847, 28848, 28849, 28850, 28851, 28852, 28853, 28854, 28855) c6(28856, 28857) c7(T, bVx, ea, bO, fd, fe, aKs, ci, jO, aY, Hr, bv, xy, aE, awe, fm, rw, Vv, hu, aCU, hH, aiJ, cp, aa, ly, ye, iE, wp, bvD, Ls, az, nY, fT, aZx, iA, nB, wE, cj, k, act, bvC, fy, uL, cE, bxC, RX, ht, sh, RG, cQ, aj, PJ, cd, Wy, adL, cty, Gf, bkP, bxi, ey, dd, pi, mR, anP, MD, aJ, Hz, fQ, fe, pm, iO, bkn, dB, bPc, bsO, Be, aoB, E, AN, DD, aA, cz, hX, Iu, AO, q, bNX, oT, aWb, vz, MP, qK, cy, jj, sR, rv, dl, eu, le, iF, aGP, NE, nO, fO, bg, bsI, bcD, ln, Lc, cl, bkp, pb, ov, beH, iM, ac, ua, VA, aDR, PN, bt, an, On, Mb, og, eP, rQ, iW, uG, jN, jh, dG, uu, fu, xt, ad, hX, afb, aHF, iC, wD, yt, tT, cTl, oW, cTw, IQ, WZ, azH, ue, cH, PE, cW, ff, EH, EZ, iV, bz, DF, amS, aUN, aDJ, oQ, IC, If, ne, jr, BA, iu, oO, bM, ID, bkx, if, e, bB, cL, lN, ip, aJO, x, blg, aeO, ja, cvG, xQ, eG, aeR, byj, Jl, fc, hl, Qg, kt, Qm, as, eE, eF, cm, bw, Qt, gJ, bh, xD, acS, go, vA, mx, vy, bru, tG, ym, in, bms, Vj, rt, dD, IT, bMe, n, oY, uE, Cd, El, md, jz, Xe, gd, eV, bav, cY, A, RT, hT, PX, fJ, hQ, yq, YE, bP, cTF, aOL, hL, at, pg, ut, en, sZ, B, cB, tg, dA, mr, eX, fF, v, Ge, Cb, V, eJ, Kx, cTH, RI, WY, BJ, rS, nQ, bau, ae, jf, zH, De, vR, vT, ev, blq, Qr, iZ, bSI, bu, t, ho, acp, vk, ck, vW, kP, lI, wO, gX, hO, yv, biL, hl, ob, Dd, dM, acl, asa, eq, adg, Fc, BY, hd, cTv, py, bNN, Db, Hk, LA, hD, bvM, nJ, sj, d, je, et, Z, arv, bE, gk, yE, bVu, ajw, lI, gZ, Hs, y, aC, UH, fR, al, axk, lR, Vp, cTK, gJ, aGm, xE, cTG, wM, Be, pX, Qk, M, K, GO, wt, eL, adT, qS, LZ, aB, g, pL, uC, Vm, iP, AM, nF, U, PV, uo, QF, m, P, sQ, sw, OI, aw, NT, qy, BH, pM, aCQ, cTC, eh, asS, JW, aky, ft, kH, cU, GT, Jn, ZN, Ha, dx, cTE, bsK, cTD, YF, cM, ar, kT, W, afc, bo, JM, bdA, gg, cTx, nz, Pr, it, fl, ayV, fM, wj, AL, KR, avm, fG, aGt, jx, zN, j, iI, uW, pd, eA, J, o, er, XX, Mg, anj, aHu, lg, bq, kl, PK, Y, r, en, wA, iK, Dm, Ci, bN, bmS, beJ, Dy, sn, c, hc, bxj, Da, np, dy, EY, fD, gT, Kg, bzT, gx, sY, kh, Gl, id, Pt, aZ, oA, bS, ah, SY, hF, gb, buj, iJ, aAq, Jm, fU, dP, fX, sN, io, vB, hP, ji, aOh, Yi, uX, aeQ, BN, IR, anX, vj, eH, cr, si, Vl, Eg, iR, Bu, bVw, qa, TA, Bv, Ew, nb, cgA, Fk, cP, ei, vt, G, Tb, auW, pf, eh, zh, aR, bII, cTJ, dQ, MO, eN, hm, DA, ayT, bvR, LC, aW, cnV, eM, iT, uJ, nw, mk, gn, R, Xu, cZ, tp, Wb, ko, fr, ct, hd, gN, ai, eW, Vs, BI, boz, cc, hw, Yc, wG, kl, h, jy, dL, ux, hB, SD, vx, db, Cm, wC, CM, iw, ag, kp, mo, gG, dw, op, lx, aoO, oU, bpC, cTz, gY, hk, cTA, Qu, bm, Vy, hR, aSW, uz, aAl, anx, bD, um, bL, eR, atB, dK, yk, rf, cR, tc, cJI, hy, Kh, C, cF, uT, nv, Vr, qp, afQ, HC, aT, dz, Fx, qk, af, qw, Uf, s, iU, aZB, oV, Ia, aaE, aDm, cTy, f, aDQ, wf, amF, wg, nM, aKp, IV, AH, mf, VB, awY, hS, Ke, Zl, gb, aD, Cl, Fb, tK, av, F, ot, aaU, Cj, ib, sO, NS, cTB, fb, uQ, qt, eZ, Ej, VW, aF, aDd, eK, Hp, LB, es, bPZ, RV, pc, zr, bE, z, uR, Vw, aS, QD, be, XO, GF, tP, X, us); #c1(VEGFA) c2(NP_001020538) c3(vascular endothelial growth factor A isoform c) c4(28858, 28859, 28860) c5(28861, 28862, 28863, 28864, 28865, 28866, 28867, 28868, 28869, 28870) c6(28871, 28872) c7(T, bVx, ea, bO, fd, fo, aKs, ci, jO, aY, Hr, bv, xy, aE, awe, fm, rw, Vv, hu, aCU, hH, aiJ, cp, aa, ly, ye, iE, wp, bvD, Ls, az, nY, fT, aZx, iA, nB, wE, cj, k, act, bvC, fy, uL, cE, bxC, RX, ht, sh, RC, cQ, aj, PJ, cd, Wy, adL, cty, Cf, bkP, bxi, ey, dd, pl, mR, anP, MD, aJ, Hz, fQ, fe, pm, iO, bkn, dB, bPc, bsO, Be, aoB, E, AN, DD, aA, cz, bX, lu, AO, q, bNX, oT, aWb, vz, MP, qK, cy, jj, sR, rv, dl, eu, le, iF, aGP, NE, nO, fO, bg, bsI, bcD, Io, Lc, cl, bkp, pb, ov, beH, iM, ac, ua, VA, aDR, PN, bt, ao, On, Mb, oq, eP, rQ, iW, uG, jN, jh, dG, uu, fu, xt, ad, hX, afb, aHF, iC, wD, yt, tT, cTl, oW, cTw, IQ, WZ, azH, ue, cH, PE, cW, ff, EH, EZ, iV, bz, DF, amS, aUN, aDJ, oQ, IC, If, ne, jr, BA, iu, oO, bM, ID, bkx, if, e, bB, cL, lN, ip, aJO, x, blg, aeO, ja, cvG, xQ, eG, aeR, byj, Jl, fc, hl, Qg, kt, Qm, as, eE, eF, cm, bw, Qt, qJ, bb, xD, acS, go, vA, mx, vy, bru, tG, ym, in, bms, Vj, rt, dD, lT, bMe, n, oY, uE, Cd, El, md, jz, Xe, gd, eV, bav, cY, A, RT, hT, PX, fJ, hQ, yq, YE, bP, cTF, aOL, hL, at, pg, ut, eo, sZ, B, cB, tq, dA, mr, eX, fF, v, Ge, Cb, V, eJ, Kx, cTH, RI, WY, BJ, rS, nQ, bau, ae, jf, zH, De, vR, vT, ev, blq, Qr, iZ, bSI, bu, t, ho, acp, vk, ck, vW, kP, lI, wO, gX, hO, yv, biL, hl, ob, Dd, dM, acl, asa, eq, adg, Fc, BY, hd, cTv, py, bNN, Db, Hk, LA, hD, bvM, nJ, sj, d, je, et, Z, arv, bF, gk, yE, bVu, ajw, lI, gZ, Hs, y, aC, UH, fR, al, axk, IR, Vp, cTK, gJ, aGm, xE, cTG, wM, Be, pX, qk, M, K, GO, wt, eL, adT, qS, LZ, aB, g, pL, uC, Vm, iP, AM, nF, U, PV, uo, QF, m, P, sQ, sw, OI, aw, NT, qy, BH, pM, aCQ, cTC, eh, asS, JW, aky, ft, kH, cU, GT, Jn, ZN, Ha, dx, cTE, bsK, cTD, YF, cM, ar, kT, W, afc, bo, JM, bdA, gg, cTx, nz, Pr, it, fl, ayV, fM, wj, AL, KR, avm, fG, aGt, jx, zN, j, iI, uW, pd, eA, J, o, er, XX, Mg, anj, aHu, lg, bg, kl, PK, Y, r, en, wA, iK, Dm, Ci, bN, bmS, beJ, Dy, sn, c, hc, bxj, Da, np, dy, EY, fD, gT, Kg, bzT, gx, sY, kh, Gl, id, Pt, aZ, oA, bS, ah, SY, hF, gb, buj, iJ, aAq, Jm, fU, dP, fX, sN, io, vB, hP, ji, aOh, Yi, uX, aeQ, BN, IR, anX, vj, eH, cr, si, Vl, Eg, iR, Bu, bVw, qa, TA, Bv, Ew, nb, cgA, Fk, cP, ei, vt, G, Tb, auW, pf, eb, zh, aR, bII, cTJ, dQ, MO, eN, hm, DA, ayT, bvR, LC, aW, cnV, eM, iT, uJ, nw, mk, gn, R, Xu, cZ, tp, Wb, ko, fr, ct, bd, qN, ai, eW, Vs, Bl, boz, cc, hw, Yc, wG, kl, h, jy, dL, ux, hB, SD, vx, db, Um, wC, CM, iw, aq, kp, mo, gG, dw, op, lx, aoO, oU, bpC, cTz, gY, hk, cTA, Qu, bm, Vy, hR, aSW, uz, aAI, anx, bD, um, bL, eR, atB, dK, yk, rf, cR, tc, cJI, hy, Kh, C, cF, uT, nv, Vr, qp, afQ, HC, aT, dz, Fx, qk, af, qw, Uf, s, iU, aZB, oV, la, aaE, aDm, cTy, f, aDQ, wf, amF, wg, nM, aKp, IV, AH, mf, VB, awY, hS, Ke, Zl, gb, aD, Cl, Fb, tK, av, F, ot, aaU, Cj, ib, sO, NS, cTB, fb, uQ, qt, eZ, Ej, VW, aF, aDd, eK, Hp, LB, es, bPZ, RV, pc, zr, bE, z, uR, Vw, aS, QD, be, XO, GF, tP, X, us); #c1(VEGFA) c2(NP_001020539) c3(vascular endothelial growth factor A isoform d) c4(28873, 28874, 28875, 28876) c5(28877, 28878, 28879, 28880, 28881, 28882, 28883, 28884, 28885, 28886) c6(28887, 28888) c7(T, bVx, ea, bO, fd, fo, aKs, ci, jO, aY, Hr, bv, xy, aE, awe, fm, rw, Vv, hu, aCU, hH, aiJ, cp, aa, ly, ye, iE, wp, bvD, Ls, az, nY, fT, aZx, iA, nB, wE, cj, k, act, bvC, fy, uL, cE, bxC, RX, ht, sh, RC, cQ, aj, PJ, cd, Wy, adL, cty, Cf, bkP, bxi, ey, dd, pI, mR, anP, MD, aJ, Hz, fQ, fe, pm, iO, bkn, dB, bPc, bsO, Be, aoB, E, AN, DD, aA, cz, bX, Iu, AO, q, bNX, oT, aWb, vz, MP, qK, cy, jj, sR, rv, dl, eu, le, iF, aGP, NE, nO, fO, bg, bsI, bcD, Io, Lc, cl, bkp, pb, ov, beH, iM, ac, ua, VA, aDR, PN, bt, ao, On, Mb, oq, eP, rQ, iW, uG, jN, jh, dG, uu, fu, xt, ad, hX, afb, aHF, iC, wD, yt, tT, cTl, oW, cTw, IQ, WZ, azH, ue, cH, PE, cW, ff, EH, EZ, iV, bz, DF, amS, aUN, aDJ, oQ, IC, If, ne, jr, BA, iu, oO, bM, ID, bkx, if, e, bB, cL, lN, ip, aJO, x, blg, aeO, ja, cvG, xQ, eG, aeR, byj, Jl, fc, hl, Qg, kt, Qm, as, eE, eF, cm, bw, Qt, qJ, bb, xD, acS, go, vA, mx, vy, bru, tG, ym, in, bms, Vj, rt, dD, IT, bMe, n, oY, uE, Cd, El, md, jz, Xe, gd, eV, bav, cY, A, RT, hT, PX, fJ, hQ, yq, YE, bP, cTF, aOL, hL, at, pg, ut, eo, sZ, B, cB, tq, dA, mr, eX, fF, v, Ge, Cb, V, eJ, Kx, cTH, RI, WY, BJ, rS, nQ, bau, ae, jf, zH, De, vR, vT, ev, blq, Qr, iZ, bSI, bu, t, ho, acp, vk, ck, vW, kP, lI, wO, gX, hO, yv, biL, hl, nb, Dd, dM, acl, asa, eq, adg, Fc, BY, hd, cTv, py, bNN, Db, Hk, LA, hD, bvM, nJ, sj, d, je, et, Z, arv, bF, gk, yE, bVu, ajw, lI, gZ, Hs, y, aC, UH, fR, al, axk, IR, Vp, cTK, gJ, aGm, xE, cTG, wM, Bc, pX, Qk, M, K, GO, wt, eL, adT, qS, LZ, aB, g, pL, uC, Vm, iP, AM, nF, U, PV, uo, QF, m, P, sQ, sw, OI, aw, NT, qy, BH, pM, aCQ, cTC, eh, asS, JW, aky, ft, kH, cU, GT, Jn, ZN, Ha, dx, cTE, bsK, cTD, YF, cM, ar, kT, W, afc, bo, JM, bdA, gg, cTx, nz, Pr, it, fl, ayV, fM, wj, AL, KR, avm, fG, aGt, jx, zN, j, iI, uW, pd, eA, J, o, er, XX, Mg, anj, aHu, lg, bg, kl, PK, Y, r, en, wA, iK, Dm, Ci, bN, bmS, beJ, Dy, sn, c, hc, bxj, Da, np, dy, EY, fD, gT, Kg, bzT, gx, sY, kh, Gl, id, Pt, aZ, oA, bS, ah, SY, hF, gb, buj, iJ, aAq, Jm, fU, dP, fX, sN, io, vB, hP, ji, aOh, Yi, uX, aeQ, BN, IR, anX, vj, eH, cr, si, VI, Eg, iR, Bu, bVw, ga, TA, Bv, Ew, nb, cgA, Fk, cP, ei, vt, G, Th, auW, pf, eb, zh, aR, bII, cTJ, dQ, MO, eN, hm, DA, ayT, bvR, LC, aW, cnV, eM, iT, uJ, nw, mk, gn, R, Xu, cZ, tp, Wb, ko, fr, et, bd, qN, ai, eW, Vs, Bl, boz, cc, hw, Yc, wG, kl, h, jy, dL, ux, hB, SD, vx, db, Um, wC, CM, iw, aq, kp, mo, gG, dw, op, lx, aoO, oU, bpC, cTz, gY, hk, cTA, Qu, bm, Vy, hR, aSW, uz, aAl, anx, bD, um, bL, eR, atB, dK, yk, rf, cR, tc, cJl, hy, Kh, C, cF, uT, nv, Vr, qp, afQ, HC, aT, dz, Fx, qk, af, qw, Uf, s, iU, aZB, oV, la, aaE, aDm, cTy, f, aQO, wf, amF, wg, nM, aKp, IV, AH, mf, VB, awY, hS, Ke, Zl, qb, aD, Cl, Fb, tK, av, F, ot, aaU, Cj, ib, sO, NS, cTB, fb, uQ, qt, eZ, Ej, VW, aF, aDd, eK, Hp, LB, es, bPZ, RV, pc, zr, bE, z, uR, Vw, aS, QD, be, XO, GF, tP, X, us); #c1(VEGFA) c2(NP_001020540) c3(vascular endothelial growth factor A isoform e) c4(28889, 28890, 28891) c5(28892, 28893, 28894, 28895, 28896, 28897, 28898, 28899, 28900, 28901) c6(28902, 28903) c7(T, bVx, ea, bO, fd, fo, aKs, ci, jO, aY, Hr, bv, xy, aE, awe, fm, rw, Vv, hu, aCU, hH, aiJ, cp, aa, ly, ye, iE, wp, bvD, Ls, az, nY, fT, aZx, iA, nB, wE, cj, k, act, bvC, fy, uL, cE, bxC, RX, ht, sh, RC, cQ, aj, PJ, cd, Wy, adL, cty, Cf, bkP, bxi, ey, dd, pI, mR, anP, MD, aJ, Hz, fQ, fe, pm, iO, bkn, dB, bPc, bsO, Be, aoB, E, AN, DD, aA, cz, bX, Iu, AO, q, bNX, oT, aWb, vz, MP, qK, cy, jj, sR, rv, dl, eu, le, iF, aGP, NE, nO, fO, bg, bsI, bcD, In, Lc, cl, bkp, pb, nv, beH, iM, ac, ua, VA, aDR, PN, bt, ao, On, Mb, oq, eP, rQ, iW, uG, jN, jh, dG, uu, fu, xt, ad, hX, afb, aHF, iC, wD, yt, tT, cTl, oW, cTw, IQ, WZ, azH, ue, cH, PE, cW, ff, EH, EZ, iV, bz, DF, amS, aUN, aDJ, oQ, IC, If, ne, jr, BA, iu, oO, bM, ID, bkx, if, e, bB, cL, lN, ip, aJO, x, blg, aeO, ja, cvG, xQ, eG, aeR, byj, Jl, fc, hl, Qq, kt, Qm, as, eE, eF, cm, bw, Qt, qJ, bb, xD, acS, go, vA, mx, vy, bru, tG, ym, in, bms, Vj, rt, dD, IT, bMe, n, oY, uE, Cd, El, md, jz, Xe, gd, eV, bav, cY, A, RT, hT, PX, fJ, hQ, yq, YE, bP, cTF, aOL, hL, at, pg, ut, eo, sZ, B, cB, tq, dA, mr, eX, fF, v, Ge, Cb, V, eJ, Kx, cTH, RI, WY, BJ, rS, nQ, bau, ae, jf, zH, De, vR, vT, ev, blq, Qr, iZ, bSl, bu, t, ho, acp, vk, ck, vW, kP, lI, wO, gX, hO, yv, biL, hl, ob, Dd, dM, acl, asa, eq, adg, Fc, BY, hd, cTv, py, bNN, Db, Hk, LA, hO, bvM, nJ, sj, d, je, et, Z, arv, bF, gk, yE, bVu, ajw, lI, gZ, Hs, y, aC, UH, fR, al, axk, IR, Vp, cTK, gJ, aGm, xE, cTG, wM, Be, pX, Qk, M, K, GO, wt, eL, adT, qS, LZ, aB, g, pL, uC, Vm, iP, AM, nF, U, PV, uo, QF, m, P, sQ, sw, Ol, aw, NT, qy, BH, pM, aCQ, cTG, eh, asS, JW, aky, ft, kH, cU, GT, Jn, ZN, Ha, dx, cTE, bsK, cTD, YE, cM, ar, kT, W, afc, bo, JM, bdA, gg, cTx, nz, Pr, it, fl, ayV, fM, wj, AL, KR, avm, fG, aGt, jx, zN, j, il, uW, pd, eA, J, o, er, XX, Mg, anj, aHu, lg, bg, kl, PK, Y, r, en, wA, iK, Dm, Ci, bN, bmS, beJ, Dy, sn, c, hc, bxj, Da, np, dy, EY, fD, gT, Kg, bzT, gx, sY, kh, Gl, id, Pt, aZ, oA, bS, ah, SY, hF, gb, buj, iJ, aAq, Jm, fU, dP, fX, sN, io, vB, hP, ji, aOh, Yi, uX, aeQ, BN, IR, anX, vj, eH, cr, si, VI, Eg, iR, Bu, bVw, qa, TA, Bv, Ew, nb, cgA, Fk, cP, ei, vt, G, Tb, auW, pf, eb, zh, aR, bII, cTJ, dQ, MO, eN, hm, DA, ayT, bvR, LC, aW, cnV, eM, iT, uJ, nw, mk, gn, R, Xu, cZ, tp, Wb, ko, fr, et, bd, qN, ai, eW, Vs, Bl, boz, cc, hw, Yc, wG, kl, h, jy, dL, ux, hB, SD, vx, db, Um, wC, CM, iw, ag, kp, mo, gG, dw, op, lx, aoO, oU, bpC, cTz, gY, hk, cTA, Qu, bm, Vy, hR, aSW, uz, aAl, anx, bD, um, bL, eR, atB, dK, yk, rf, cR, tc, cJl, hy, Kh, C, cF, uT, nv, Vr, qp, afQ, HC, aT, dz, Fx, qk, af, qw, Uf, s, iU, aZB, oV, la, aaE, aDm, cTy, f, aDQ, wf, amF, wg, nM, aKp, IV, AH, mf, VB, awY, hS, Ke, Zl, gb, aD, Cl, Fb, tK, av, F, ot, aaU, Cj, ib, sO, NS, cTB, fb, uQ, qt, eZ, Ej, VW, aF, aDd, eK, Hp, LB, es, bPZ, RV, pc, zr, bE, z, uR, Vw, aS, QD, be, XO, GF, tP, X, us); #c1(VEGFA) c2(NP_001020541) c3(vascular endothelial growth factor A isoform f) c4(28904, 28905, 28906) c5(28907, 28908, 28909, 28910, 28911, 28912, 28913, 28914, 28915, 28916, 28917) c6(28918, 28919) c7(T, bVx, ea, bO, fd, fo, aKs, ci, jO, aY, Hr, bv, xy, aE, awe, fm, rw, Vv, hu, aCU, hH, aiJ, cp, aa, ly, ye, iE, wp, bvD, Ls, az, nY, fT, aZx, iA, nB, wE, cj, k, act, bvC, fy, uL, cE, bxC, RX, ht, sh, RC, cQ, aj, PJ, cd, Wy, adL, cty, Cf, bkP, bxi, ey, dd, pi, mR, anP, MD, aJ, Hz, fQ, fe, pm, iO, bkn, dB, bPc, bsO, Be, aoB, E, AN, DD, aA, cz, bX, Iu, AO, q, bNX, oT, aWb, vz, MP, qK, cy, jj, sR, rv, dl, eu, le, iF, aGP, NE, nO, fO, bg, bsI, bcD, In, Lc, cl, bkp, pb, ov, beH, iM, ac, ua, VA, aDR, PN, bt, ao, On, Mb, oq, eP, rQ, iW, uG, jN, jh, dG, uu, fu, xt, ad, hX, afb, aHF, iC, wD, yt, tT, cTI, oW, cTw, IQ, WZ, azH, ue, cH, PE, cW, ff, EH, EZ, iV, bz, DF, amS, aUN, aDJ, oQ, IC, If, ne, jr, BA, iu, oO, bM, ID, bkx, if, e, bB, cL, lN, ip, aJO, x, blg, aeO, ja, cvG, xQ, eG, aeR, byj, Jl, fc, hl, Qq, kt, Qm, as, eE, eF, cm, bw, Qt, qJ, bb, xD, acS, go, vA, mx, vy, bru, tG, ym, in, bms, Vj, rt, dD, IT, bMe, n, oY, uE, Cd, El, md, jz, Xe, gd, eV, bav, cY, A, RT, hT, PX, fJ, hQ, yg, YE, bP, cTF, aOL, hL, at, pg, ut, eo, sZ, B, cB, tq, dA, mr, eX, fF, v, Ge, Cb, V, eJ, Kx, cTH, RI, WY, BJ, rS, nQ, bau, ae, jf, zH, De, vR, vT, ev, blq, Qr, iZ, bSI, bu, t, ho, acp, vk, ck, vW, kP, lI, wO, gX, hO, yv, biL, hl, ob, Dd, dM, acl, asa, eq, adg, Fc, BY, hd, cTv, py, bNN, Db, Hk, LA, hD, bvM, nJ, sj, d, je, et, Z, arv, bF, gk, yE, bVu, ajw, lI, gZ, Hs, y, aC, UH, fR, al, axk, IR, Vp, cTK, gJ, aGm, xE, cTG, wM, Be, pX, Qk, M, K, GO, wt, eL, adT, qS, LZ, aB, g, pL, uC, Vm, iP, AM, nF, U, PV, uo, QF, m, P, sQ, sw, Ol, aw, NT, qy, BH, pM, aCQ, cTG, eh, asS, JW, aky, ft, kH, cU, GT, Jn, ZN, Ha, dx, cTE, bsK, cTD, YF, cM, ar, kT, W, afe, bo, JM, bdA, gg, cTx, nz, Pr, it, fI, ayV, fM, wj, AL, KR, avm, fG, aGt, jx, zN, j, il, uW, pd, eA, J, o, er, XX, Mg, anj, aHu, lg, bg, kl, PK, Y, r, en, wA, iK, Dm, Ci, bN, bmS, bed, Dy, sn, c, hc, bxj, Da, np, dy, EY, fD, gT, Kg, bzT, gx, sY, kh, Gl, id, Pt, aZ, oA, bS, ah, SY, hF, gb, buj, iJ, aAq, Jm, fU, dP, fX, sN, io, vB, hP, ji, aOh, Yi, uX, aeQ, BN, IR, anX, vj, eH, cr, si, Vl, Fq, iR, Bu, bVw, ga, TA, Bv, Ew, nb, cgA, Fk, cP, ei, vt, G, Tb, auW, pf, eb, zh, aR, bII, cTJ, dQ, MO, eN, hm, DA, ayT, bvR, LC, aW, cnV, eM, iT, uJ, nw, mk, gn, R, Xu, cZ, tp, Wb, ko, fr, ct, bd, gN, ai, eW, Vs, Bl, boz, cc, hw, Yc, wG, kl, h, jy, dL, ux, hB, SD, vx, db, Um, wC, CM, iw, aq, kp, mo, gG, dw, op, lx, aoO, oU, bpC, cTz, gY, hk, cTA, Qu, bm, Vy, hR, aSW, uz, aAl, anx, bD, um, bL, eR, atB, dK, yk, rf, cR, tc, cJl, hy, Kh, C, cF, uT, nv, Vr, qp, afQ, HC, aT, dz, Fx, qk, af, qw, Uf, s, iU, aZB, oV, Ia, aaE, aDm, cTy, f, aDQ, wf, amF, wg, nM, aKp, IV, AH, mf, VB, awY, hS, Ke, Zl, qb, aD, Cl, Fb, tK, av, F, ot, aaU, Cj, ib, sO, NS, cTB, fb, uQ, qt, eZ, Ej, VW, aF, aDd, eK, Hp, LB, es, bPZ, RV, pc, zr, bE, z, uR, Vw, aS, QD, be, XO, GF, tP, X, us); #c1(VEGFA) c2(NP_001028928) c3(vascular endothelial growth factor A isoform g) c4(30702, 30703, 30704) c5(30705, 30706, 30707, 30708, 30709, 30710, 30711, 30712, 30713, 30714) c6(30715, 30716) c7(T, bVx, ea, bO, fd, fo, aKs, ci, jO, aY, Hr, bv, xy, aE, awe, fm, rw, Vv, hu, aCU, hH, aiJ, cp, aa, ly, ye, iE, wp, bvD, Ls, az, nY, fT, aZx, iA, nB, wE, cj, k, act, bvC, fy, uL, cE, bxC, RX, ht, sh, RC, cQ, aj, PJ, cd, Wy, adL, cty, Cf, bkP, bxi, ey, dd, pl, mR, anP, MD, aJ, Hz, fQ, fe, pm, iO, bkn, dB, bPc, bsO, Be, aoB, E, AN, DD, aA, cz, bX, Iu, AO, q, bNX, oT, aWb, vz, MP, qK, cy, jj, sR, rv, dl, eu, le, iF, aGP, NE, nO, fO, bg, bsI, bcD, In, Lc, cl, bkp, pb, ov, beH, iM, ac, ua, VA, aDR, PN, bt, ao, On, Mb, oq, eP, rQ, iW, uG, jN, jh, dG, uu, fu, xt, ad, hX, afb, aHF, iC, wD, yt, tT, cTl, oW, cTw, IQ, WZ, azH, ue, cH, PE, cW, ff, EH, EZ, iV, bz, DF, amS, aUN, aDJ, oQ, IC, If, ne, jr, BA, iu, oO, bM, lD, bkx, if, e, bB, cL, lN, ip, aJO, x, blg, aeO, ja, cvG, xQ, eG, aeR, byj, Jl, fc, hl, Qq, kt, Qm, as, eE, eF, cm, bw, Qt, qJ, bb, xD, acS, go, vA, mx, vy, bru, tG, ym, in, bms, Vj, rt, dD, IT, bMe, n, oY, uE, Cd, El, md, jz, Xe, gd, eV, bav, cY, A, RT, hT, PX, fJ, hQ, yq, YE, bP, cTF, aOL, hL, at, pg, ut, eo, sZ, B, cB, tq, dA, mr, eX, fF, v, Ge, Cb, V, eJ, Kx, cTH, RI, WY, BJ, rS, nQ, bau, ae, jf, zH, De, vR, vT, ev, blq, Qr, iZ, bSl, bu, t, ho, acp, vk, ck, vW, kP, lI, wO, gX, hO, yv, biL, hl, nb, Dd, dM, acl, asa, eq, adg, Fc, BY, hd, cTv, py, bNN, Db, Hk, LA, hD, bvM, nJ, sj, d, je, et, Z, arv, bF, gk, yE, bVu, ajw, lI, gZ, Hs, y, aC, UH, fR, al, axk, lR, Vp, cTK, gJ, aGm, xE, cTG, wM, Be, pX, Qk, M, K, GO, wt, eL, adT, gS, LZ, aB, g, pL, uC, Vm, iP, AM, nF, U, PV, uo, QF, m, P, sQ, sw, Ol, aw, NT, qy, BH, pM, aCQ, cTG, eh, asS, JW, aky, ft, kH, cU, GT, Jn, ZN, Ha, dx, cTE, bsK, cTD, YF, cM, ar, kT, W, afe, bo, JM, bdA, gg, cTx, nz, Pr, it, fl, ayV, fM, wj, AL, KR, avm, fG, aGt, jx, zN, j, iI, uW, pd, eA, J, o, er, XX, Mg, anj, aHu, lg, bg, kl, PK, Y, r, en, wA, iK, Dm, Ci, bN, bmS, bed, Dy, sn, c, hc, bxj, Da, np, dy, EY, fD, gT, Kg, bzT, gx, sY, kh, Gl, id, Pt, aZ, oA, bS, ah, SY, hF, gb, buj, iJ, aAq, Jm, fU, dP, fX, sN, io, vB, hP, ji, aOh, Yi, uX, aeQ, BN, IR, anX, vj, eH, cr, si, Vl, Fq, iR, Bu, bVw, qa, TA, Bv, Ew, nb, cgA, Fk, cP, ei, vt, G, Tb, auW, pf, eh, zh, aR, bII, cTJ, dQ, MO, eN, hm, DA, ayT, bvR, LC, aW, cnV, eM, iT, uJ, nw, mk, gn, R, Xu, cZ, tp, Wb, ko, fr, ct, bd, gN, ai, eW, Vs, Bl, boz, cc, hw, Yc, wG, kl, h, jy, dL, ux, hB, SD, vx, db, Um, wC, CM, iw, aq, kp, mo, gG, dw, op, lx, aoO, oU, bpC, cTz, gY, hk, cTA, Qu, bm, Vy, hR, aSW, uz, aAl, anx, bD, um, hL, eR, atB, dK, yk, rf, cR, tc, cJl, hy, Kh, C, cF, uT, nv, Vr, qp, afQ, HC, aT, dz, Fx, qk, af, qw, Uf, s, iU, aZB, oV, la, aaE, aDm, cTy, f, aDO, wf, amF, wg, nM, aKp, IV, AH, mf, VB, awY, hS, Ke, Zl, qb, aD, Cl, Fb, tK, av, F, ot, aaU, Cj, ib, sO, NS, cTB, fb, uQ, qt, eZ, Ej, VW, aF, aDd, eK, Hp, LB, es, bPZ, RV, pc, zr, bE, z, uR, Vw, aS, QD, be, XO, GF, tP, X, us); #c1(VEGFA) c2(NP_001165093) c3(vascular endothelial growth factor A isoform h) c4(67290, 67291, 67292) c5(67293, 67294, 67295, 67296, 67297, 67298, 67299, 67300, 67301, 67302) c6(67303, 67304) c7(T, bVx, ea, bO, fd, fo, aKs, ci, jO, aY, Hr, bv, xy, aE, awe, fm, rw, Vv, hu, aCU, hH, aiJ, cp, aa, ly, ye, iE, wp, bvD, Ls, az, nY, fT, aZx, iA, nB, wE, cj, k, act, bvC, fy, uL, cE, bxC, RX, ht, sh, RC, cQ, aj, PJ, cd, Wy, adL, cty, Cf, bkP, bxi, ey, dd, pl, mR, anP, MD, aJ, Hz, fQ, fe, pm, iO, bkn, dB, bPc, bsO, Be, aoB, E, AN, DD, aA, cz, bX, lu, AO, q, bNX, oT, aWb, vz, MP, qK, cy, jj, sR, rv, dl, eu, le, iF, aGP, NE, nO, fO, bg, bsI, bcD, Io, Lc, cl, bkp, pb, ov, beH, iM, ac, ua, VA, aDR, PN, bt, ao, On, Mb, oq, eP, rQ, iW, uG, jN, jh, dG, uu, fu, xt, ad, hX, afb, aHF, iC, wD, yt, tT, cTI, oW, cTw, IQ, WZ, azH, ue, cH, PE, cW, ff, EH, EZ, iV, bz, DF, amS, aUN, aDJ, oQ, IC, If, ne, jr, BA, iu, oO, bM, ID, bkx, if, e, bB, cL, lN, ip, aJO, x, blg, aeO, ja, cvG, xQ, eG, aeR, byj, Jl, fc, hl, Qq, kt, Qm, as, eE, eF, cm, bw, Qt, qJ, bb, xD, acS, go, vA, mx, vy, bru, tG, ym, in, bms, Vj, rt, dD, IT, bMe, n, oY, uE, Cd, El, md, jz, Xe, gd, eV, bav, cY, A, RT, hT, PX, fJ, hQ, yq, YE, bP, cTF, aOL, hL, at, pg, ut, eo, sZ, B, cB, tq, dA, mr, eX, fF, v, Ge, Cb, V, eJ, Kx, cTH, RI, WY, BJ, rS, nQ, bau, ae, jf, zH, De, vR, vT, ev, blq, Qr, iZ, bSI, bu, t, ho, acp, vk, ck, vW, kP, lI, wO, gX, hO, yv, biL, hl, ob, Dd, dM, acl, asa, eq, adg, Fc, BY, hd, cTv, py, bNN, Db, Hk, LA, hD, bvM, nJ, sj, d, je, et, Z, arv, bF, gk, yE, bVu, ajw, lI, gZ, Hs, y, aC, UH, fR, al, axk, lR, Vp, cTK, gJ, aGm, xE, cTG, wM, Be, pX, Qk, M, K, GO, wt, eL, adT, qS, LZ, aB, g, pL, uC, Vm, iP, AM, nF, U, PV, uo, QF, m, P, sQ, sw, Ol, aw, NT, qy, BH, pM, aCQ, cTG, eh, asS, JW, aky, ft, kH, cU, GT, Jn, ZN, Ha, dx, cTE, bsK, cTD, YF, cM, ar, kT, W, afe, bo, JM, bdA, gg, cTx, nz, Pr, it, fI, ayV, fM, wj, AL, KR, avm, fG, aGt, jx, zN, j, il, uW, pd, eA, J, o, er, XX, Mg, anj, aHu, lg, bq, kl, PK, Y, r, en, wA, iK, Dm, Ci, bN, bmS, bed, Dy, sn, c, hc, bxj, Da, np, dy, EY, fD, gT, Kg, bzT, gx, sY, kh, Gl, id, Pt, aZ, oA, bS, ah, SY, hF, gb, buj, iJ, aAg, Jm, fU, dP, fX, sN, io, vB, hP, ji, aOh, Yi, uX, aeQ, BN, IR, anX, vj, eH, cr, si, Vl, Eg, iR, Bu, bVw, qa, TA, Bv, Ew, nb, cgA, Fk, cP, ei, vt, G, Tb, auW, pf, eb, zh, aR, bII, cTJ, dQ, MO, eN, hm, DA, ayT, bvR, LC, aW, cnV, eM, iT, uJ, nw, mk, gn, R, Xu, cZ, tp, Wb, ko, fr, ct, bd, qN, ai, eW, Vs, Bl, boz, cc, hw, Yc, wG, kl, h, jy, dL, ux, hB, SD, vx, db, Um, wC, CM, iw, aq, kp, mo, gG, dw, op, lx, aoO, nU, bpC, cTz, gY, hk, cTA, Qu, bm, Vy, hR, aSW, uz, aAl, anx, bD, um, bL, eR, atB, dK, yk, rf, cR, tc, cJl, hy, Kh, C, cF, uT, nv, Vr, gp, afQ, HC, aT, dz, Ex, qk, af, qw, Uf, s, iU, aZB, oV, la, aaE, aDm, cTy, f, aDQ, wf, amF, wg, nM, aKp, IV, AH, mf, VB, awY, hS, Ke, Zl, gb, aD, Cl, Fb, tK, av, F, ot, aaU, Cj, ib, sO, NS, cTB, fb, uQ, qt, eZ, Ej, VW, aF, aDd, eK, Hp, LB, es, bPZ, RV, pc, zr, bE, z, uR, Vw, aS, QD, be, XO, GF, tP, X, us); #c1(VEGFA) c2(NP_001165094) c3(vascular endothelial growth factor A isoform i precursor) c4( ) c5(67305, 67306, 67307, 67308, 67309, 67310, 67311, 67312) c6(67313, 67314) c7(T, bVx, ea, bO, fd, fo, aKs, ci, jO, aY, Hr, bv, xy, aE, awe, fm, rw, Vv, hu, aCU, hH, aiJ, cp, aa, ly, ye, iE, wp, bvD, Ls, az, nY, fT, aZx, iA, nB, wE, cj, k, act, bvC, fy, uL, cE, bxC, RX, ht, sh, RC, cQ, aj, PJ, cd, Wy, adL, cty, Cf, bkP, bxi, ey, dd, pl, mR, anP, MD, aJ, Hz, fQ, fe, pm, iO, bkn, dB, bPc, bsO, Be, aoB, E, AN, DD, aA, cz, bX, lu, AO, q, bNX, oT, aWb, vz, MP, qK, cy, jj, sR, rv, dl, eu, le, iF, aGP, NE, nO, fO, bg, bsI, bcD, Io, Lc, cl, bkp, pb, ov, beH, iM, ac, ua, VA, aDR, PN, bt, ao, On, Mb, oq, eP, rQ, iW, uG, jN, jh, dG, uu, fu, xt, ad, hX, afb, aHF, iC, wD, yt, tT, cTl, oW, cTw, IQ, WZ, azH, ue, cH, PE, cW, ff, EH, EZ, iV, bz, DF, amS, aUN, aDJ, oQ, IC, If, ne, jr, BA, iu, oO, bM, ID, bkx, if, e, bB, cL, lN, ip, aJO, x, blg, aeO, ja, cvG, xQ, eG, aeR, byj, Jl, fc, hl, Qq, kt, Qm, as, eE, eF, cm, bw, Qt, qJ, bb, xD, acS, go, vA, mx, vy, bru, tG, ym, in, bms, Vj, rt, dD, IT, bMe, n, oY, uE, Cd, El, md, jz, Xe, gd, eV, bav, cY, A, RT, hT, PX, fJ, hQ, yq, YE, bP, cTF, aOL, hL, at, pg, ut, eo, sZ, B, cB, tq, dA, mr, eX, fF, v, Ge, Cb, V, eJ, Kx, cTH, RI, WY, BJ, rS, nQ, bau, ae, jf, zH, De, vR, vT, ev, blq, Qr, iZ, bSI, bu, t, ho, acp, vk, ck, vW, kP, lI, wO, gX, hO, yv, biL, hl, nb, Dd, dM, acl, asa, eq, adg, Fc, BY, hd, cTv, py, bNN, Db, Hk, LA, hD, bvM, nJ, sj, d, je, et, Z, arv, bF, gk, yE, bVu, ajw, lI, gZ, Hs, y, aC, UH, fR, al, axk, IR, Vp, cTK, gJ, aGm, xE, cTG, wM, Be, pX, Qk, M, K, GO, wt, eL, adT, qS, LZ, aB, g, pL, uC, Vm, iP, AM, nF, U, PV, uo, QF, m, P, sQ, sw, Ol, aw, NT, qy, BH, pM, aCQ, cTG, eh, asS, JW, aky, ft, kH, cU, GT, Jn, ZN, Ha, dx, cTE, bsK, cTD, YF, cM, ar, kT, W, afc, bo, JM, bdA, gg, cTx, nz, Pr, it, fl, ayV, fM, wj, AL, KR, avm, fG, aGt, jx, zN, j, iI, uW, pd, eA, J, o, er, XX, Mg, anj, aHu, lg, bg, kI, PK, Y, r, en, wA, iK, Dm, Ci, bN, bmS, beJ, Dy, sn, c, hc, bxj, Da, np, dy, EY, fD, gT, Kg, bzT, gx, sY, kh, Gl, id, Pt, aZ, oA, bS, ah, SY, hF, gb, buj, iJ, aAq, Jm, fU, dP, fX, sN, io, vB, hP, ji, aOh, Yi, uX, aeQ, BN, IR, anX, vj, eH, cr, si, Vl, Eg, iR, Bu, bVw, ga, TA, Bv, Ew, nb, cgA, Fk, cP, ei, vt, G, Tb, auW, pf, eb, zh, aR, bII, cTJ, dQ, MO, eN, hm, DA, ayT, bvR, LC, aW, cnV, eM, iT, uJ, nw, mk, gn, R, Xu, cZ, tp, Wb, ko, fr, et, bd, gN, ai, eW, Vs, Bl, boz, cc, hw, Yc, wG, kl, h, jy, dL, ux, hB, SD, vx, db, Um, wC, CM, iw, aq, kp, mo, gG, dw, op, lx, aoO, oU, bpC, cTz, gY, hk, cTA, Qu, bm, Vy, hR, aSW, uz, aAl, anx, bD, um, bL, eR, atB, dK, yk, rf, cR, tc, cJI, hy, Kh, C, cF, uT, nv, Vr, qp, afQ, HC, aT, dz, Ex, qk, af, qw, Uf, s, iU, aZB, oV, Ia, aaE, aDm, cTy, f, aDQ, wf, amF, wg, nM, aKp, IV, AH, mf, VB, awY, hS, Ke, Zl, qb, aD, Cl, Fb, tK, av, F, ot, aaU, Cj, ib, sO, NS, cTB, fb, uQ, qt, eZ, Ej, VW, aF, aDd, eK, Hp, LB, es, bPZ, RV, pc, zr, bE, z, uR, Vw, aS, QD, be, XO, GF, tP, X, us); #c1(VEGFA) c2(NP_001165095) c3(vascular endothelial growth factor A isoform j precursor) c4( ) c5(67315, 67316, 67317, 67318, 67319, 67320, 67321, 67322) c6(67323, 67324) c7(T, bVx, ea, bO, fd, fo, aKs, ci, jO, aY, Hr, bv, xy, aE, awe, fm, rw, Vv, hu, aCO, hH, aiJ, cp, aa, ly, ye, iE, wp, bvD, Ls, az, nY, fT, aZx, iA, nB, wE, cj, k, act, bvC, fy, uL, cE, bxC, RX, ht, sh, RC, cQ, aj, PJ, cd, Wy, adL, cty, Cf, bkP, bxi, ey, dd, pl, mR, anP, MO, aJ, Hz, fQ, fe, pm, iO, bkn, dB, bPc, bsO, Be, aoB, E, AN, DD, aA, cz, bX, lu, AO, q, bNX, oT, aWb, vz, MP, qK, cy, jj, sR, rv, dl, eu, le, iF, aGP, NE, nO, fO, bg, bsI, bcD, Io, Lc, cl, bkp, pb, ov, beH, iM, ac, ua, VA, aDR, PN, bt, ao, On, Mb, oq eP, rQ, iW, uG, jN, jh, dG, uu, fu, xt, ad, hX, afb, aHF, iC, wD, yt, tT, cTl, oW, cTw, IQ, WZ, azH, ue, cH, PE, cW, ff, EH, EZ, iV, bz, DF, amS, aUN, aDJ, oQ, IC, If, ne, jr, BA, iu, oO, bM, ID, bkx, if, e, bB, cL, lN, ip, aJO, x, blg, aeO, ja, cvG, xQ, eG, aeR, byj, Jl, fc, hl, Qq, kt, Qm, as, eE, eF, cm, bw, Qt, qJ, bb, xD, acS, go, vA, mx, vy, bru, tG, ym, in, bms, Vj, rt, dD, IT, bMe, n, oY, uE, Cd, El, md, jz, Xe, gd, eV, bav, cY, A, RT, hT, PX, fJ, hQ, yg, YE, bP, cTF, aOL, hL, at, pg, ut, eo, sZ, B, cB, tq, dA, mr, eX, fF, v, Ge, Cb, V, eJ, Kx, cTH, RI, WY, BJ, rS, nQ, bau, ae, jf, zH, De, vR, vT, ev, blq, Qr, iZ, bSl, bu, t, ho, acp, vk, ck, vW, kP, lI, wO, gX, hO, yv, biL, hl, ob, Dd, dM, acl, asa, eq, adg, Fc, BY, hd, cTv, py, bNN, Db, Hk, LA, hD, bvM, nJ, sj, d, je, et, Z, arv, bF, gk, yE, bVu, ajw, lI, gZ, Hs, y, aC, UH, fR, al, axk, lR, Vp, cTK, gJ, aGm, xE, cTG, wM, Be, pX, Qk, M, K, GO, wt, eL, adT, qS, LZ, aB, g, pL, uC, Vm, iP, AM, nF, U, PV, uo, QF, m, P, sQ, sw, OI, aw, NT, qy, BH, pM, aCQ, cTG, eh, asS, JW, aky, ft, kH, cU, GT, Jn, ZN, Ha, dx, cTE, bsK, cTD, YF, cM, ar, kT, W, afc, bo, JM, bdA, gg, cTx, nz, Pr, it, fl, ayV, fM, wj, AL, KR, avm, fG, aGt, jx, zN, j, il, uW, pd, eA, J, o, er, XX, Mg, anj, aHu, lg, bq, kl, PK, Y, r, en, wA, iK, Dm, Ci, bN, bmS, beJ, Dy, sn, c, hc, bxj, Da, np, dy, EY, fD, gT, Kg, bzT, gx, sY, kh, Gl, id, Pt, aZ, oA, bS, ah, SY, hF, gb, buj, iJ, aAg, Jm, fU, dP, fX, sN, io, vB, hP, ji, aOh, Yi, uX, aeQ, BN, IR, anX, vj, eH, cr, si, Vl, Eg, iR, Bu, bVw, qa, TA, Bv, Ew, nb, cgA, Fk, cP, ei, vt, G, Tb, auW, pf, eb, zh, aR, bII, cTJ, dQ, MO, eN, hm, DA, ayT, bvR, LC, aW, cnV, eM, iT, uJ, nw, mk, gn, R, Xu, cZ, tp, Wb, ko, fr, ct, bd, gN, ai, eW, Vs, Bl, boz, cc, hw, Yc, wG, kl, h, jy, dL, ux, hB, SD, vx, db, Um, wC, CM, iw, ag, kp, mo, gG, dw, op, lx, aoO, nO, bpC, cTz, gY, hk, cTA, Qu, bm, Vy, hR, aSW, uz, aAl, anx, bD, um, bL, eR, atB, dK, yk, rf, cR, tc, cJl, hy, Kh, C, cF, uT, nv, Vr, qp, afQ, HC, aT, dz, Fx, qk, af, qw, Uf, s, iU, aZB, oV, la, aaE, aDm, cTy, f, aDQ, wf, amF, wg, nM, aKp, IV, AH, mf, VB, awY, hS, Ke, Zl, qb, aD, Cl, Fb, tK, av, F, ot, aaU, Cj, ib, sO, NS, cTB, fb, uQ, gt, eZ, Ej, VW, aF, aDd, eK, Hp, LB, es, bPZ, RV, pc, zr, bE, z, uR, Vw, aS, QD, be, XO, GF, tP, X, us); #c1(VEGFA) c2(NP_001165096) c3(vascular endothelial growth factor A isoform k precursor) c4( ) c5(67325, 67326, 67327, 67328, 67329, 67330, 67331, 67332, 67333) c6(67334, 67335) c7(T, bVx, ea, bO, fd, fo, aKs, ci, jO, aY, Hr, bv, xy, aE, awe, fm, rw, Vv, hu, aCU, hH, aiJ, cp, aa, ly, ye, iE, wp, bvD, Ls, az, nY, fT, aZx, iA, nB, wE, cj, k, act, bvC, fy, uL, cE, bxC, RX, ht, sh, RC, cQ, aj, PJ, cd, Wy, adL, cty, Cf, bkP, bxi, ey, dd, pl, mR, anP, MD, aJ, Hz, fQ, fe, pm, iO, bkn, dB, bPc, bsO, Be, aoB, E, AN, DD, aA, cz, bX, lu, AO, q, bNX, oT, aWb, vz, MP, qK, cy, jj, sR, rv, dl, eu, le, iF, aGP, NE, nO, fO, bg, bsI, bcD, Io, Lc, cl, bkp, pb, ov, beH, iM, ac, ua, VA, aDR, PN, bt, ao, On, Mb, oq, eP, rQ, iW, uG, jN, jh, dG, uu, fu, xt, ad, hX, afb, aHF, iC, wD, yt, tT, cTl, oW, cTw, IQ, WZ, azH, ue, cH, PE, cW, ff, EH, EZ, iV, bz, DF, amS, aUN, aDJ, oQ, lC, If, ne, jr, BA, iu, oO, bM, ID, bkx, if, e, hB, cL, lN, ip, aJO, x, blg, aeO, ja, cvG, xQ, eG, aeR, byj, Jl, fc, hl, Qg, kt, Qm, as, eE, eF, cm, bw, Qt, gJ, bb, xD, acS, go, vA, mx, vy, bru, tG, ym, in, bms, Vj, rt, dD, IT, bMe, n, oY, uE, Cd, El, md, jz, Xe, gd, eV, bav, cY, A, RT, hT, PX, fJ, hQ, yq, YE, bP, cTF, aOL, hL, at, pg, ut, eo, sZ, B, cB, tq, dA, mr, eX, fF, v, Ge, Cb, V, eJ, Kx, cTH, RI, WY, BJ, rS, nQ, bau, ae, jf, zH, De, vR, vT, ev, blq, Qr, iZ, bSI, bu, t, ho, acp, vk, ck, vW, kP, lI, wO, gX, hO, yv, biL, hl, ob, Dd, dM, acl, asa, eq, adg, Fc, BY, hd, cTv, py, bNN, Db, Hk, LA, hD, bvM, nJ, sj, d, je, et, Z, arv, bF, gk, yE, bVu, ajw, lI, gZ, Hs, y, aC, UH, fR, al, axk, lR, Vp, cTK, gJ, aGm, xE, cTG, wM, Bc, pX, Qk, M, K, GO, wt, eL, adT, gS, LZ, aB, g, pL, uC, Vm, iP, AM, nF, U, PV, uo, QF, m, P, sQ, sw, OI, aw, NT, qy, BH, pM, aCQ, cTG, eh, asS, JW, aky, ft, kH, cU, GT, Jn, ZN, Ha, dx, cTE, bsK, cTD, YE, cM, ar, kT, W, afc, bo, JM, bdA, gg, cTx, nz, Pr, it, fl, ayV, fM, wj, AL, KR, avm, fG, aGt, jx, zN, j, iI, uW, pd, eA, J, o, er, XX, Mg, anj, aHu, Ig, bq, kI, PK, Y, r, en, wA, iK, Dm, Ci, bN, bmS, beJ, Dy, sn, c, hc, bxj, Da, np, dy, EY, fD, gT, Kg, bzT, gx, sY, kh, Gl, id, Pt, aZ, oA, bS, ah, SY, hF, gb, buj, iJ, aAq, Jm, fU, dP, fX, sN, io, vB, hP, ji, aOh, Yi, uX, aeQ, BN, IR, anX, vj, eH, cr, si, Vl, Fq, iR, Bu, bVw, qa, TA, Bv, Ew, nb, cgA, Fk, cP, ei, vt, G, Th, auW, pf, eb, zh, aR, bII, cTJ, dQ, MO, eN, hm, DA, ayT, bvR, LC, aW, cnV, eM, iT, uJ, nw, mk, gn, R, Xu, cZ, tp, Wb, ko, fr, ct, bd, qN, ai, eW, Vs, Bl, boz, cc, hw, Yc, wG, kl, h, jy, dL, ux, hB, Sd, vx, db, Um, wC, CM, iw, ag, kp, mo, gG, dw, op, lx, aoO, nU, bpC, cTz, gY, hk, cTA, Qu, bm, Vy, hR, aSW, uz, aAl, anx, bD, um, bL, eR, atB, dK, yk, rf, cR, tc, cJl, hy, Kh, C, cF, uT, nv, Vr, qp, afQ, HC, aT, dz, Fx, qk, af, qw, Uf, s, iU, aZB, oV, la, aaE, aDm, cTy, f, aDQ, wf, amF, wg, nM, aKp, IV, AH, mf, VB, awY, hS, Ke, Zl, gb, aD, Cl, Fb, tK, av, F, ot, aaU, Cj, ib, sO, NS, cTB, fb, uQ, qt, eZ, Ej, VW, aF, aDd, eK, Hp, LB, es, bPZ, RV, pc, zr, bE, z, uR, Vw, aS, QD, be, XO, GF, tP, X, us); #c1(VEGFA) c2(NP_001165097) c3(vascular endothelial growth factor A isoform 1 precursor) c4( ) c5(67336, 67337, 67338, 67339, 67340, 67341, 67342, 67343, 67344, 67345, 67346, 67347, 67348, 67349, 67350, 67351, 67352, 67353, 67354, 67355, 67356, 67357, 67358, 67359, 67360, 67361, 67362, 67363, 67364, 67365, 67366, 67367, 67368, 67369, 67370, 67371, 67372, 67373, 67374, 67375, 67376, 67377, 67378, 67379, 67380, 67381, 67382, 67383, 67384, 67385, 67386, 67387, 67388, 67389, 67390, 67391, 67392, 67393, 67394, 67395, 67396, 67397, 67398, 67399, 67400, 67401, 67402, 67403, 67404, 67405, 67406, 67407, 67408, 67409, 67410, 67411, 67412, 67413, 67414, 67415, 67416, 67417, 67418, 67419, 67420, 67421, 67422, 67423, 67424, 67425, 67426, 67427, 67428, 67429, 67430, 67431, 67432) c6(67433, 67434, 67435) c7(T, bVx, ea, bO, fd, fo, aKs, ci, jO, aY, Hr, bv, xy, aE, awe, fm, rw, Vv, hu, aCU, hH, aiJ, cp, aa, ly, ye, iE, wp, bvD, Ls, az, nY, fT, aZx, iA, nB, wE, cj, k, act, bvC, fy, uL, cE, bxC, RX, ht, sh, RC, cQ, aj, PJ, cd, Wy, adL, cty, Cf, bkP, bxi, ey, dd, pl, mR, anP, MD, aJ, Hz, fQ, fe, pm, iO, bkn, dB, bPc, bsO, Be, aoB, E, AN, DD, aA, cz, bX, Iu, AO, q, bNX, oT, aWb, vz, MP, qK, cy, jj, sR, rv, dl, eu, le, iF, aGP, NE, nO, fO, bg, bsI, bcD, Io, Lc, cl, bkp, pb, ov, beH, iM, ac, ua, VA, aDR, PN, bt, ao, On, Mb, oq, eP, rO, iW, uG, jN, jh, dG, uu, fu, xt, ad, hX, afb, aHF, iC, wD, yt, tT, cTI, oW, cTw, IQ, WZ, azH, ue, cH, PE, cW, ff, EH, EZ, iV, bz, DF, amS, aUN, aDJ, oQ, IC, If, ne, jr, BA, iu, oO, bM, ID, bkx, if, e, bB, cL, lN, ip, aJO, x, blg, aeO, ja, cvG, xQ, eG, aeR, byj, Jl, fc, hl, Qq, kt, Qm, as, eE, eF, cm, bw, Qt, qJ, bb, xD, acS, go, vA, mx, vy, bru, tG, ym, in, bms, Vj, rt, dD, IT, bMe, n, oY, uE, Cd, El, md, jz, Xe, gd, eV, bav, cY, A, RT, hT, PX, fJ, hQ, yq, YE, bP, cTF, aOL, hL, at, pg, ut, en, sZ, B, cB, tq, dA, mr, eX, fF, v, Ge, Cb, V, eJ, Kx, cTH, RI, WY, BJ, rS, nQ, bau, ae, jf, zH, De, vR, vT, ev, blq, Qr, iZ, bSl, bu, t, ho, acp, vk, ck, vW, kP, lI, wO, gX, hO, yv, biL, hl, nb, Dd, dM, acl, asa, eq, adg, Fc, BY, hd, cTv, py, bNN, Db, Hk, LA, hD, bvM, nJ, sj, d, je, et, Z, arv, bF, gk, yE, bVu, ajw, lI, gZ, Hs, y, aC, UH, fR, al, axk, lR, Vp, cTK, gJ, aGm, xE, cTG, wM, Be, pX, Qk, M, K, GO, wt, eL, adT, qS, LZ, aB, g, pL, uC, Vm, iP, AM, nF, U, PV, uo, QF, m, P, sQ, sw, Ol, aw, NT, qy, BH, pM, aCQ, cTC, eh, asS, JW, aky, ft, kH, cU, GT, Jn, ZN, Ha, dx, cTE, bsK, cTD, YE, cM, ar, kT, W, afe, bo, JM, bdA, gg, cTx, nz, Pr, it, fl, ayV, fM, wj, AL, KR, avm, fG, aGt, jx, zN, j, il, uW, pd, eA, J, o, er, XX, Mg, anj, aHu, lg, bg, kl, PK, Y, r, en, wA, iK, Dm, Ci, bN, bmS, beJ, Dy, sn, c, hc, bxj, Da, np, dy, EY, fD, gT, Kg, bzT, gx, sY, kh, Gl, id, Pt, aZ, oA, bS, ah, SY, hF, gb, buj, iJ, aAg, Jm, fU, dP, fX, sN, io, vB, hP, ji, aOh, Yi, uX, aeQ, BN, IR, anX, vj, eH, cr, si, Vl, Eg, iR, Bu, bVw, qa, TA, Bv, Ew, nb, cgA, Fk, cP, ei, vt, G, Tb, auW, pf, eb, zh, aR, bII, cTJ, dQ, MO, eN, hm, DA, ayT, bvR, LC, aW, cnV, eM, iT, uJ, nw, mk, gn, R, Xu, cZ, tp, Wb, ko, fr, xt, hd, qN, ai, eW, Vs, Bl, boz, cc, hw, Yc, wG, kl, h, jy, dL, ux, hB, SD, vx, db, Um, wC, CM, iw, aq, kp, mo, gG, dw, op, lx, aoO, oU, bpC, cTz, gY, hk, cTA, Qu, bm, Vy, hR, aSW, uz, aAl, anx, bD, um, bL, eR, atB, dK, yk, rf, cR, tc, cJl, hy, Kh, C, cF, uT, nv, Vr, qp, afQ, HC, aT, dz, Ex, qk, af, qw, Uf, s, iU, aZB, oV, la, aaE, aDm, cTy, f, aDQ, wf, amF, wg, nM, aKp, IV, AH, mf, VB, awY, hS, Ke, Zl, gb, aD, Cl, Fb, tK, av, F, ot, aaU, Cj, ib, sO, NS, cTB, fb, uQ, qt, eZ, Ej, VW, aF, aDd, eK, Hp, LB, es, bPZ, RV, pc, zr, bE, z, uR, Vw, aS, QD, be, XO, GF, tP, X, us); #c1(VEGFA) c2(NP_001165098) c3(vascular endothelial growth factor A isoform m precursor) c4( ) c5(67436, 67437, 67438, 67439, 67440, 67441, 67442, 67443, 67444) c6(67445, 67446) c7(T, bVx, ea, bO, fd, fo, aKs, ci, jO, aY, Hr, bv, xy, aE, awe, fm, rw, Vv, hu, aCO, hH, aiU, cp, aa, ly, ye, iE, wp, bvD, Ls, az, nY, fT, aZx, iA, nB, wE, cj, k, act, bvC, fy, uL, cE, bxC, RX, ht, sh, RC, cQ, aj, PJ, cd, Wy, adL, cty, Cf, bkP, bxi, ey, dd, pl, mR, anP, MD, aJ, Hz, fQ, fe, pm, iO, bkn, dB, bPc, bsO, Be, aoB, E, AN, DD, aA, cz, bX, lu, AO, q, bNX, oT, aWb, vz, MP, qK, cy, jj, sR, rv, dl, eu, le, iF, aGP, NE, nO, fO, bg, bsI, bcD, Io, Lc, cl, bkp, pb, ov, beH, iM, ac, ua, VA, aDR, PN, bt, ao, On, Mb, oq, eP, rQ, iW, uG, jN, jh, dG, uu, fu, xt, ad, hX, afb, aHF, iC, wD, yt, tT, cTl, oW, cTw, IQ, WZ, azH, ue, cH, PE, cW, ff, EH, EZ, iV, bz, DF, amS, aUN, aDJ, oQ, lC, If, ne, jr, BA, iu, oO, bM, lD, bkx, if, e, bB, cL, IN, ip, aJO, x, blg, aeO, ja, cvG, xQ, eG, aeR, byj, Jl, fc, hl, Qq, kt, Qm, as, eE, eF, cm, bw, Qt, gJ, bb, xD, acS, go, vA, mx, vy, bru, tG, ym, in, bms, Vj, rt, dD, IT, bMe, n, oY, uE, Cd, El, md, jz, Xe, gd, eV, bav, cY, A, RT, hT, PX, fJ, hQ, yq, YE, bP, cTF, aOL, hL, at, pg, ut, eo, sZ, B, cB, tq, dA, mr, eX, fF, v, Ge, Cb, V, eJ, Kx, cTH, RI, WY, BJ, rS, nQ, bau, ae, jf, zH, De, vR, vT, ev, blq, Qr, iZ, bSl, bu, t, ho, acp, vk, ck, vW, kP, lI, wO, gX, hO, yv, biL, hl, ob, Dd, dM, acl, asa, eq, adg, Fc, BY, hd, cTv, py, bNN, Db, Hk, LA, hD, bvM, nJ, sj, d, je, et, Z, arv, bF, gk, yE, bVu, ajw, lI, gZ, Hs, y, aC, UH, fR, al, axk, lR, Vp, cTK, gJ, aGm, xE, cTG, wM, Be, pX, Qk, M, K, GO, wt, eL, adT, qS, LZ, aB, g, pL, uC, Vm, iP, AM, nF, U, PV, uo, QF, m, P, sQ, sw, OI, aw, NT, qy, BH, pM, aCQ, cTG, eh, asS, JW, aky, ft, kH, cU, GT, Jn, ZN, Ha, dx, cTE, bsK, cTD, YE, cM, ar, kT, W, afc, bo, JM, bdA, gg, cTx, nz, Pr, it, fl, ayV, fM, wj, AL, KR, avm, fG, aGt, jx, zN, j, il, uW, pd, eA, J, o, er, XX, Mg, anj, aHu, lg, bg, kl, PK, Y, r, en, wA, iK, Dm, Ci, bN, bmS, beJ, Dy, sn, c, hc, bxj, Da, np, dy, EY, fD, gT, Kg, bzT, gx, sY, kh, Gl, id, Pt, aZ, oA, bS, ah, SY, hF, gb, buj, iJ, aAq, Jm, fU, dP, fX, sN, io, vB, hP, ji, aOh, Yi, uX, aeQ, BN, IR, anX, vj, eH, cr, si, Vl, Eg, iR, Bu, bVw, ga, TA, Bv, Ew, nb, cgA, Fk, cP, ei, vt, G, Th, auW, pf, eb, zh, aR, bII, cTJ, dQ, MO, eN, hm, DA, ayT, bvR, LC, aW, cnV, eM, iT, uJ, nw, mk, qn, R, Xu, cZ, tp, Wb, ko, fr, ct, bd, qN, ai, eW, Vs, Bl, boz, cc, hw, Yc, wG, kl, h, jy, dL, ux, hB, SD, vx, db, Um, wC, CM, iw, aq, kp, mo, gG, dw, op, lx, aoO, nO, bpC, cTz, gY, hk, cTA, Qu, bm, Vy, hR, aSW, uz, aAl, anx, bD, um, bL, eR, atB, dK, yk, rf, cR, tc, cJl, hy, Kh, C, cF, uT, nv, Vr, qp, afQ, HC, aT, dz, Ex, qk, af, qw, Uf, s, iQ, aZB, oV, la, aaE, aDm, cTy, f, aDQ, wf, amF, wg, nM, aKp, IV, AH, mf, VB, awY, hS, Ke, Zl, qb, aD, Cl, Fb, tK, av, F, ot, aaU, Cj, ib, sO, NS, cTB, fb, uQ, qt, eZ, Ej, VW, aF, aDd, eK, Hp, LB, es, bPZ, RV, pc, zr, bE, z, uR, Vw, aS, QD, be, XO, GF, tP, X, us); #c1(VEGFA) c2(NP_001165099) c3(vascular endothelial growth factor A isoform n precursor) c4( ) c5(67447, 67448, 67449, 67450, 67451, 67452, 67453, 67454) c6(67455, 67456) c7(T, bVx, ea, bO, fd, fo, aKs, ci, jO, aY, Hr, bv, xy, aE, awe, fm, rw, Vv, hu, aCU, hH, aiJ, cp, aa, ly, ye, iE, wp, bvD, Ls, az, nY, fT, aZx, iA, nB, wE, cj, k, act, bvC, fy, uL, cE, bxC, RX, ht, sh, RC, cQ, aj, PJ, cd, Wy, adL, cty, Cf, bkP, bxi, ey, dd, pl, mR, anP, MD, aJ, Hz, fQ, fe, pm, iO, bkn, dB, bPc, bsO, Be, aoB, E, AN, DD, aA, cz, bX, lu, AO, q, bNX, oT, aWb, vz, MP, qK, cy, jj, sR, rv, dl, eu, le, iF, aGP, NE, nO, fO, bg, bsl, bcD, Io, Lc, cl, bkp, pb, ov, beH, iM, ac, ua, VA, aDR, PN, bt, ao, On, Mb, oq, eP, rQ, iW, uG, jN, jh, dG, uu, fu, xt, ad, hX, afb, aHF, iC, wD, yt, tT, cTl, oW, cTw, IQ, WZ, azH, ue, cH, PE, cW, ff, EH, EZ, iV, bz, DF, amS, aUN, aDJ, oQ, IC, If, ne, jr, BA, iu, oO, bM, lD, bkx, if, e, hB, cL, lN, ip, aJO, x, blg, aeO, ja, cvG, xQ, eG, aeR, byj, Jl, fc, hl, Qq, kt, Qm, as, eE, eF, cm, bw, Qt, gJ, bb, xD, acS, go, vA, mx, vy, bru, tG, ym, in, bms, Vj, rt, dD, lT, bMe, n, oY, uE, Cd, El, md, jz, Xe, gd, eV, bav, cY, A, RT, hT, PX, fJ, hQ, yq, YE, bP, cTF, aOL, hL, at, pg, ut, eo, sZ, B, cB, tg, dA, mr, eX, fF, v, Ge, Cb, V, eJ, Kx, cTH, RI, WY, BJ, rS, nQ, bau, ae, jf, zH, De, vR, vT, ev, blq, Qr, iZ, bSl, bu, t, ho, acp, vk, ck, vW, kP, lI, wO, gX, hO, yv, biL, hl, ob, Dd, dM, acl, asa, eq, adg, Fc, BY, hd, cTv, py, bNN, Db, Hk, LA, hO, bvM, nJ, sj, d, je, et, Z, arv, bF, gk, yE, bVu, ajw, lI, gZ, Hs, y, aC, uH, fR, al, axk, lR, Vp, cTK, gJ, aGm, xE, cTG, wM, Bc, pX, Qk, M, K, GO, wt, eL, adT, qS, LZ, aB, g, pL, uC, Vm, iP, AM, nF, U, PV, uo, QF, m, P, sQ, sw, OI, aw, NT, gy, BH, pM, aCQ, cTC, eh, asS, JW, aky, ft, kH, cU, GT, Jn, ZN, Ha, dx, cTE, bsK, cTD, YF, cM, ar, kT, W, afe, bo, JM, bdA, gg, cTx, nz, Pr, it, fl, ayV, fM, wj, AL, KR, avm, fG, aGt, jx, zN, j, il, uW, pd, eA, J, o, er, XX, Mg, anj, aHu, lg, bq, kl, PK, Y, r, en, wA, iK, Dm, Ci, bN, bmS, beJ, Dy, sn, c, hc, bxj, Da, np, dy, EY, fD, gT, Kg, bzT, gx, sY, kh, Gl, id, Pt, aZ, oA, bS, ah, SY, hF, gb, buj, iJ, aAg, Jm, fU, dP, fX, sN, in, vB, hP, ji, aOh, Yi, uX, aeQ, BN, IR, anX, vj, eH, cr, si, Vl, Eg, iR, Bu, bVw, qa, TA, Bv, Ew, nb, cgA, Fk, cP, ei, vt, G, Th, auW, pf, eb, zh, aR, bII, cTJ, dQ, MO, eN, hm, DA, ayT, bvR, LC, aW, cnV, eM, iT, uJ, nw, mk, gn, R, Xu, cZ, tp, Wb, ko, fr, ct, bd, qN, ai, eW, Vs, Bl, boz, cc, hw, Yc, wG, kl, h, jy, dL, ux, hB, SD, vx, db, Um, wC, CM, iw, aq, kp, mo, gG, dw, op, lx, aoO, oU, bpC, cTz, gY, hk, cTA, Qu, bm, Vy, hR, aSW, uz, aAI, anx, bD, um, bL, eR, atB, dK, yk, rf, cR, tc, cJl, hy, Kh, C, cF, uT, nv, Vr, qp, afQ, HC, aT, dz, Fx, qk, af, qw, Uf, s, iU, aZB, oV, Ia, aaE, aDm, cTy, f, aDQ, wf, amF, wg, nM, aKp, IV, AH, mf, VB, awY, hS, Ke, Zl, qb, aD, Cl, Fb, tK, av, F, ot, aaU, Cj, ib, sO, NS, cTB, fb, uQ, qt, eZ, Ej, VW, aF, aDd, eK, Hp, LB, es, bPZ, RV, pc, zr, bE, z, uR, Vw, aS, QD, be, XO, GF, tP, X, us); #c1(VEGFA) c2(NP_001165100) c3(vascular endothelial growth factor A isoform o precursor) c4( ) c5(67457, 67458, 67459, 67460, 67461, 67462, 67463, 67464, 67465) c6(67466, 67467) c7(T, bVx, ea, bO, fd, fo, aKs, ci, jO, aY, Hr, bv, xy, aE, awe, fm, rw, Vv, hu, aCU, hH, aiJ, cp, aa, ly, ye, iE, wp, bvD, Ls, az, nY, fT, aZx, iA, nB, wE, cj, k, act, bvC, fy, uL, cE, bxC, RX, ht, sh, RC, cQ, aj, PJ, cd, Wy, adL, cty, Cf, bkP, bxi, ey, dd, pl, mR, anP, MD, aJ, Hz, fQ, fe, pm, iO, bkn, dB, bPc, bsO, Be, aoB, E, AN, DD, aA, cz, bX, lu, AO, q, bNX, oT, aWb, vz, MP, qK, cy, jj, sR, rv, dl, eu, le, iF, aGP, NE, nO, fO, bg, bsI, bcD, In, Lc, cl, bkp, pb, ov, beH, iM, ac, ua, VA, aDR, PN, bt, ao, On, Mb, oq, eP, rQ, iW, uG, jN, jh, dG, uu, fu, xt, ad, hX, afb, aHF, iC, wD, yt, tT, cTl, oW, cTw, IQ, WZ, azH, ue, cH, PE, cW, ff, EH, EZ, iV, bz, DF, amS, aUN, aDJ, oQ, IC, If, ne, jr, BA, iu, oO, bM, ID, bkx, if, e, bB, cL, lN, ip, aJO, x, blg, aeO, ja, cvG, xQ, eG, aeR, byj, Jl, fc, hl, Qg, kt, Qm, as, eE, eF, cm, bw, Qt, qJ, bb, xD, acS, go, vA, mx, vy, bru, tG, ym, in, bms, Vj, rt, dD, lT, bMe, n, oY, uE, Cd, El, md, jz, Xe, gd, eV, bav, cY, A, RT, hT, PX, fJ, hQ, yq, YE, bP, cTE, aOL, hL, at, pg, ut, eo, sZ, B, cB, tq, dA, mr, eX, fF, v, Ge, Cb, V, eJ, Kx, cTH, RI, WY, BJ, rS, nQ, bau, ae, jf, zH, De, vR, vT, ev, blq, Qr, iZ, bSI, bu, t, ho, acp, vk, ck, vW, kP, II, wO, gX, hO, yv, biL, hl, nb, Dd, dM, acl, asa, eq, adg, Fc, BY, hd, cTv, py, bNN, Db, Hk, LA, hO, bvM, nJ, sj, d, je, et, Z, arv, bF, gk, yE, bVu, ajw, lI, gZ, Hs, y, aC, OH, fR, al, axk, IR, Vp, cTK, gJ, aGm, xE, cTG, wM, Be, pX, Qk, M, K, GO, wt, eL, adT, qS, LZ, aB, g, pL, uC, Vm, iP, AM, nF, U, PV, uo, QF, m, P, sQ, sw, Ol, aw, NT, qy, BH, pM, aCQ, cTG, eh, asS, JW, aky, ft, kH, cU, GT, Jn, ZN, Ha, dx, cTE, bsK, cTD, YF, cM, ar, kT, W, afc, bo, JM, bdA, gg, cTx, nz, Pr, it, fl, ayV, fM, wj, AL, KR, avm, fG, aGt, jx, zN, j, iI, uW, pd, eA, J, o, er, XX, Mg, anj, aHu, lg, bg, kl, PK, Y, r, en, wA, iK, Dm, Ci, bN, bmS, bed, Dy, sn, c, he, bxj, Da, np, dy, EY, fD, gT, Kg, bzT, gx, sY, kh, Gl, id, Pt, aZ, oA, bS, ah, SY, hF, gb, buj, iJ, aAq, Jm, fU, dP, fX, sN, io, vB, hP, ji, aOh, Yi, uX, aeQ, BN, IR, anX, vj, eH, cr, si, Vl, Eg, iR, Bu, bVw, ga, TA, Bv, Ew, nb, cgA, Fk, cP, ei, vt, G, Th, auW, pf, eb, zh, aR, bII, cTJ, dQ, MO, eN, hm, DA, ayT, bvR, LC, aW, cnV, eM, iT, uJ, nw, mk, gn, R, Xu, cZ, tp, Wb, ko, fr, et, bd, gN, ai, eW, Vs, Bl, boz, cc, hw, Yc, wG, kl, h, jy, dL, ux, hB, SD, vx, db, Um, wC, CM, iw, aq, kp, mo, gG, dw, op, lx, aoO, nU, bpC, cTz, gY, hk, cTA, Qu, bm, Vy, hR, aSW, uz, aAl, anx, bD, um, bL, eR, atB, dK, yk, rf, cR, tc, cJl, hy, Kh, C, cF, uT, nv, Vr, qp, afQ, HC, aT, dz, Ex, gk, af, gw, Of, s, iO, aZB, oV, la, aaE, aDm, cTy, f, aDO, wf, amF, wg, nM, aKp, IV, AH, mf, VB, awY, hS, Ke, Zl, qb, aD, Cl, Fb, tK, av, F, ot, aaU, Cj, ib, sO, NS, cTB, fb, uQ, qt, eZ, Ej, VW, aF, aDd, eK, Hp, LB, es, bPZ, RV, pc, zr, bE, z, uR, Vw, aS, QD, be, XO, GF, tP, X, us); #c1(VEGFA) c2(NP_001165101) c3(vascular endothelial growth factor A isoform p precursor) c4( ) c5(67468, 67469, 67470, 67471, 67472, 67473, 67474, 67475, 67476) c6(67477, 67478) c7(T, bVx, ea, bO, fd, fo, aKs, ci, jO, aY, Hr, bv, xy, aE, awe, fm, rw, Vv, hu, aCO, hH, aiJ, cp, aa, ly, yo, iE, wp, bvD, Ls, az, nY, fT, aZx, iA, nB, wE, cj, k, act, bvC, fy, uL, cE, bxC, RX, ht, sh, RC, cQ, aj, PJ, cd, Wy, adL, cty, Cf, bkP, bxi, ey, dd, pl, mR, anP, MD, aJ, Hz, fQ, fe, pm, iO, bkn, dB, bPc, bsO, Be, aoB, E, AN, DD, aA, cz, bX, Iu, AO, q, bNX, oT, aWb, vz, MP, qK, cy, jj, sR, rv, dl, eu, le, iF, aGP, NE, nO, fO, bg, bsI, bcD, ln, Lc, cl, bkp, pb, nv, beH, iM, ac, ua, VA, aDR, PN, bt, ao, On, Mb, oq, eP, rQ, iW, uG, jN, jh, dG, uu, fu, xt, ad, hX, afb, aHF, iC, wD, yt, tT, cTI, oW, cTw, lQ, WZ, azH, ue, cH, PE, cW, ff, EH, EZ, iV, bz, DF, amS, aUN, aDJ, oQ, IC, lf, ne, jr, BA, iu, oO, bM, lD, bkx, if, e, bB, cL, lN, ip, aJO, x, blg, aeO, ja, cvG, xQ, eG, aeR, byj, JI, fc, hI, Qq, kt, Qm, as, eE, eF, cm, bw, Qt, qJ, bb, xD, acS, go, vA, mx, vy, bru, tG, ym, in, bms, Vj, rt, dD, lT, bMe, n, oY, uE, Cd, EI, md, jz, Xe, gd, eV, bav, cY, A, RT, hT, PX, fJ, hQ, yq, YE, bP, cTF, aOL, hL, at, pg, ut, eo, sZ, B, cB, tq, dA, mr, eX, fF, v, Ge, Cb, V, eJ, Kx, cTH, RI, WY, BJ, rS, nQ, bau, ae, jf, zH, De, vR, vT, ev, blq, Qr, iZ, bSI, bu, t, ho, acp, vk, ck, vW, kP, lI, wO, gX, hO, yv, biL, hI, ob, Dd, dM, acI, asa, eq, adg, Fc, BY, hd, cTv, py, bNN, Db, Hk, LA, hD, bvM, nJ, sj, d, je, et, Z, arv, bF, gk, yE, bVu, ajw, lI, gZ, Hs, y, aC, UH, fR, aI, axk, lR, Vp, cTK, gJ, aGm, xE, cTG, wM, Bc, pX, Qk, M, K, GO, wt, eL, adT, qS, LZ, aB, g, pL, uC, Vm, iP, AM, nF, U, PV, uo, QF, m, P, sQ, sw, OI, aw, NT, qy, BH, pM, aCQ, cTC, eh, asS, JW, aky, ft, kH, cU, GT, Jn, ZN, Ha, dx, cTE, bsK, cTD, YF, cM, ar, kT, W, afc, bo, JM, bdA, gg, cTx, nz, Pr, it, fI, ayV, fM, wj, AL, KR, avm, fG, aGt, jx, zN, j, iI, uW, pd, eA, J, o, er, XX, Mg, anj, aHu, Ig, bq, kI, PK, Y, r, en, wA, iK, Dm, Ci, bN, bmS, beJ, Dy, sn, c, hc, bxj, Da, np, dy, EY, fD, gT, Kg, bzT, gx, sY, kh, GI, id, Pt, aZ, oA, bS, ah, SY, hF, gb, buj, iJ, aAq, Jm, fU, dP, fX, sN, io, vB, hP, ji, aOh, Yi, uX, aeQ, BN, lR, anX, vj, eH, cr, si, VI, Fq, iR, Bu, bVw, qa, TA, Bv, Ew, nb, cgA, Fk, cP, ei, vt, G, Tb, auW, pf, eb, zh, aR, bII, cTJ, dQ, MO, eN, hm, DA, ayT, bvR, LC, aW, cnV, eM, iT, uJ, nw, mk, gn, R, Xu, cZ, tp, Wb, ko, fr, ct, bd, qN, ai, eW, Vs, BI, boz, cc, hw, Yc, wG, kI, h, jy, dL, ux, hB, SD, vx, db, Um, wC, CM, iw, aq, kp, me, gG, dw, op, lx, aoO, oU, bpC, cTz, gY, hk, cTA, Qu, bm, Vy, hR, aSW, uz, aAI, anx, bD, um, bL, eR, atB, dK, yk, rf, cR, tc, cJI, hy, Kh, C, cF, uT, nv, Vr, qp, afQ, HC, aT, dz, Fx, qk, af, qw, Uf, s, iU, aZB, oV, la, aaE, aDm, cTy, f, aDQ, wf, amF, wg, nM, aKp, IV, AH, mf, VB, awY, hS, Ke, ZI, qb, aD, Cl, Fb, tK, av, F, ot, aaU, Cj, ib, sO, NS, cTB, fb, uQ, qt, eZ, Ej, VW, aF, aDd, eK, Hp, LB, es, bPZ, RV, pc, zr, bE, z, uR, Vw, aS, QD, be, XD, GF, tP, X, us); #c1(VEGFA) c2(NP_001191314) c3(vascular endothelial growth factor A isoform r) c4(81365, 81366, 81367) c5(81368, 81369, 81370, 81371, 81372, 81373, 81374, 81375, 81376, 81377) c6(81378, 81379) c7(T, bVx, ea, bO, fd, fo, aKs, ci, jO, aY, Hr, bv, xy, aE, awe, fm, rw, Vv, hu, aCU, hH, aiJ, cp, aa, ly, yo, iE, wp, bvD, Ls, az, nY, fT, aZx, iA, nB, wE, cj, k, act, bvC, fy, uL, cE, bxC, RX, ht, sh, RC, cQ, aj, PJ, cd, Wy, adL, cty, Cf, bkP, bxi, ey, dd, pl, mR, anP, MD, aJ, Hz, fQ, fe, pm, iO, bkn, dB, bPc, bsO, Be, aoB, E, AN, DD, aA, cz, bX, lu, AO, q, bNX, oT, aWb, vz, MP, qK, cy, jj, sR, rv, dl, eu, le, iF, aGP, NE, nO, fO, bg, bsI, bcD, Io, Lc, cl, bkp, pb, ov, beH, iM, ac, ua, VA, aDR, PN, bt, ao, On, Mb, oq, eP, rQ, iW, uG, jN, jh, dG, uu, fu, xt, ad, hX, afb, aHF, iC, wD, yt, tT, cTI, oW, cTw, IQ, WZ, azH, ue, cH, PE, cW, ff, EH, EZ, iV, bz, DF, amS, aUN, aDJ, oQ, IC, lf, ne, jr, BA, iu, oO, bM, lD, bkx, if, e, bB, cL, lN, ip, aJO, x, blg, aeO, ja, cvG, xQ, eG, aeR, byj, JI, fc, hI, Qq, kt, Qm, as, eE, eF, cm, bw, Qt, gJ, bb, xD, acS, go, vA, mx, vy, bru, tG, ym, in, bms, Vj, rt, dD, lT, bMe, n, oY, uE, Cd, EI, md, jz, Xe, gd, eV, bav, cY, A, RT, hT, PX, fJ, hQ, yq, YE, bP, cTF, aOL, hL, at, pg, ut, eo, sZ, B, cB, tq, dA, mr, eX, fF, v, Ge, Cb, V, eJ, Kx, cTH, RI, WY, BJ, rS, nQ, bau, ae, jf, zH, De, vR, vT, ev, blq, Qr, iZ, bSI, bu, t, ho, acp, vk, ck, vW, kP, lI, wO, gX, hO, yv, biL, hI, ob, Dd, dM, acI, asa, eq, adg, Fc, BY, hd, cTv, py, bNN, Db, Hk, LA, hD, bvM, nJ, sj, d, je, et, Z, arv, bF, gk, yE, bVu, ajw, lI, gZ, Hs, y, aC, UH, fR, aI, axk, lR, Vp, cTK, gJ, aGm, xE, cTG, wM, Be, pX, Qk, M, K, GO, wt, eL, adT, qS, LZ, aB, g, pL, uC, Vm, iP, AM, nF, U, PV, uo, QF, m, P, sQ, sw, DI, aw, NT, qy, BH, pM, aCQ, cTC, eh, asS, JW, aky, ft, kH, cU, GT, Jn, ZN, Ha, dx, cTE, bsK, cTD, YF, cM, ar, kT, W, afc, bo, JM, bdA, gg, cTx, nz, Pr, it, fI, ayV, fM, wj, AL, KR, avm, fG, aGt, jx, zN, j, iI, uW, pd, eA, J, o, er, XX, Mg, anj, aHu, Ig, bq, kI, PK, Y, r, en, wA, iK, Dm, Ci, bN, bmS, bed, Dy, sn, c, he, bxj, Da, np, dy, EY, fD, gT, Kg, bzT, gx, sY, kh, GI, id, Pt, aZ, oA, bS, ah, SY, hF, gb, buj, iJ, aAq, Jm, fU, dP, fX, sN, io, vB, hP, ji, aOh, Yi, uX, aeQ, BN, IR, anX, vj, eH, cr, si, VI, Fq, iR, Bu, bVw, qa, TA, Bv, Ew, nb, cgA, Fk, cP, ei, vt, G, Th, auW, pf, eb, zh, aR, bII, cTJ, dQ, MO, eN, hm, DA, ayT, bvR, LC, aW, cnV, eM, iT, uJ, nw, mk, gn, R, Xu, cZ, tp, Wb, ko, fr, ct, bd, qN, ai, eW, Vs, BI, boz, cc, hw, Yc, wG, kI, h, jy, dL, ux, hB, SD, vx, db, Um, wC, CM, iw, aq, kp, mo, gG, dw, op, lx, aoO, oU, bpC, cTz, gY, hk, cTA, Qu, bm, Vy, hR, aSW, uz, aAI, anx, bD, um, bL, eR, atB, dK, yk, rf, cR, tc, cJI, hy, Kh, C, cF, uT, nv, Vr, qp, afQ, HC, aT, dz, Fx, qk, af, qw, Uf, s, iU, aZB, oV, la, aaE, aDm, cTy, f, aDQ, wf, amF, wg, nM, aKp, IV, AH, mf, VB, awY, hS, Ke, ZI, qb, aD, CI, Fb, tK, av, F, ot, aaU, Cj, ib, sO, NS, cTB, fb, uQ, qt, eZ, Ej, VW, aF, aDd, eK, Hp, LB, es, bPZ, RV, pc, zr, bE, z, uR, Vw, aS, QD, be, XO, GF, tP, X, us); #c1(VEGFA) c2(NP_001273973) c3(vascular endothelial growth factor A isoform s) c4( ) c5(105944, 105945, 105946, 105947, 105948, 105949, 105950, 105951) c6( ) c7(T, bVx, ea, bO, fd, fo, aKs, ci, jO, aY, Hr, bv, xy, aE, awe, fm, rw, Vv, hu, aCU, hH, aiJ, cp, aa, ly, yo, iE, wp, bvD, Ls, az, nY, fT, aZx, iA, nB, wE, cj, k, act, bvC, fy, uL, cE, bxC, RX, ht, sh, RC, cQ, aj, PJ, cd, Wy, adL, cty, Cf, bkP, bxi, ey, dd, pI, mR, anP, MD, aJ, Hz, fQ, fe, pm, iO, bkn, dB, bPc, bsO, Be, aoB, E, AN, DD, aA, cz, bX, lu, AO, q, bNX, oT, aWb, vz, MP, qK, cy, jj, sR, rv, dI, eu, le, iF, aGP, NE, nO, fO, bg, bsI, bcD, Io, Lc, cI, bkp, pb, ov, beH, iM, ac, ua, VA, aDR, PN, bt, ao, On, Mb, oq, eP, rQ, iW, uG, jN, jh, dG, uu, fu, xt, ad, hX, afb, aHF, iC, wD, yt, tT, cTI, oW, cTw, IQ, WZ, azH, ue, cH, PE, cW, ff, EH, EZ, iV, bz, DF, amS, aUN, aDJ, oQ, IC, lf, ne, jr, BA, iu, oO, bM, lD, bkx, if, e, bB, cL, lN, ip, aJO, x, blg, aeO, ja, cvG, xQ, eG, aeR, byj, JI, fc, hl, Qq, kt, Qm, as, eE, eF, cm, bw, Qt, qJ, bb, xD, acS, go, vA, mx, vy, bru, tG, ym, in, bms, Vj, rt, dD, lT, bMe, n, oY, uE, Cd, El, md, jz, Xe, gd, eV, bav, cY, A, RT, hT, PX, fJ, hQ, yq, YE, bP, cTF, aOL, hL, at, pg, ut, eo, sZ, B, cB, tq, dA, mr, eX, fF, v, Ge, Cb, V, eJ, Kx, cTH, RI, WY, BJ, rS, nQ, bau, ae, jf, zH, De, vR, vT, ev, blq, Qr, iZ, bSI, bu, t, ho, acp, vk, ck, vW, kP, lI, wO, gX, hO, yv, biL, hI, ob, Dd, dM, acI, asa, eq, adg, Fc, BY, hd, cTv, py, bNN, Db, Hk, LA, hD, bvM, nJ, sj, d, je, et, Z, arv, bF, gk, yE, bVu, ajw, lI, gZ, Hs, y, aC, UH, fR, al, axk, IR, Vp, cTK, gJ, aGm, xE, cTG, wM, Bc, pX, Qk, M, K, GO, wt, eL, adT, qS, LZ, aB, g, pL, uC, Vm, iP, AM, nF, U, PV, uo, QF, m, P, sQ, sw, OI, aw, NT, qy, BH, pM, aCQ, cTG, eh, asS, JW, aky, ft, kH, cU, GT, Jn, ZN, Ha, dx, cTE, bsK, cTD, YF, cM, ar, kT, W, afc, bo, JM, bdA, gg, cTx, nz, Pr, it, fI, ayV, fM, wj, AL, KR, avm, fG, aGt, jx, zN, j, iI, uW, pd, eA, J, o, er, XX, Mg, anj, aHu, Ig, bq, kl, PK, Y, r, en, wA, iK, Dm, Ci, bN, bmS, beJ, Dy, sn, c, hc, bxj, Da, np, dy, EY, fD, gT, Kg, bzT, gx, sY, kh, GI, id, Pt, aZ, oA, bS, ah, SY, hF, gb, buj, iJ, aAq, Jm, fU, dP, fX, sN, io, vB, hP, ji, aOh, Yi, uX, aeQ, BN, IR, anX, vj, eH, cr, si, VI, Eq, iR, Bu, bVw, qa, TA, Bv, Ew, nb, cgA, Fk, cP, ei, vt, G, Tb, auW, pf, eh, zh, aR, bII, cTJ, dQ, MO, eN, hm, DA, ayT, bvR, LC, aW, cnV, eM, iT, uJ, nw, mk, gn, R, Xu, cZ, tp, Wb, ko, fr, ct, bd, qN, ai, eW, Vs, BI, boz, cc, hw, Yc, wG, kl, h, jy, dL, ux, hB, SD, vx, db, Um, wC, CM, iw, aq, kp, mo, gG, dw, op, lx, aoO, oU, bpC, cTz, gY, hk, cTA, Qu, bm, Vy, hR, aSW, uz, aAI, anx, bD, um, bL, eR, atB, dK, yk, rf, cR, tc, cJI, hy, Kh, C, cF, uT, nv, Vr, qp, afQ, HC, aT, dz, Fx, qk, af, qw, Uf, s, iU, aZB, oV, la, aaE, aDm, cTy, f, aDQ, wf, amF, wg, nM, aKp, IV, AH, mf, VB, awY, hS, Ke, ZI, qb, aD, Cl, Fb, tK, av, F, ot, aaU, Cj, ib, sO, NS, cTB, fb, uQ, qt, eZ, Ej, VW, aF, aDd, eK, Hp, LB, es, bPZ, RV, pc, zr, bE, z, uR, Vw, aS, QD, be, XO, GF, tP, X, us); #c1(VEGFA) c2(NP_003367) c3(vascular endothelial growth factor A isoform b) c4(137823, 137824, 137825) c5(137826, 137827, 137828, 137829, 137830, 137831, 137832, 137833, 137834, 137835) c6(137836, 137837) c7(T, bVx, ea, bO, fd, fo, aKs, ci, jO, aY, Hr, bv, xy, aE, awe, fm, n/v, Vv, hu, aCU, hH, aiJ, cp, aa, ly, yo, iE, wp, bvD, Ls, az, nY, fT, aZx, iA, nB, wE, cj, k, act, bvC, fy, uL, cE, bxC, RX, ht, sh, RC, cQ, aj, PJ, cd, Wy, adL, cty, Cf, bkP, bxi, ey, dd, pI, mR, anP, MD, aJ, Hz, fQ, fe, pm, iO, bkn, dB, bPc, bsO, Be, aoB, E, AN, DD, aA, cz, bX, lu, AO, q, bNX, oT, aWb, vz, MP, qK, cy, jj, sR, rv, dl, eu, le, iF, aGP, NE, nO, fO, bg, bsI, bcD, Io, Lc, cl, bkp, pb, ov, beH, iM, ac, ua, VA, aDR, PN, bt, ao, On, Mb, oq, eP, rQ, iW, uG, jN, jh, dG, uu, fu, xt, ad, hX, afb, aHF, iC, wD, yt, tT, cTI, oW, cTw, lQ, WZ, azH, ue, cH, PE, cW, ff, EH, EZ, iV, bz, DF, amS, aUN, aDJ, oQ, IC, lf, ne, jr, BA, iu, oO, bM, lD, bkx, if, e, bB, cL, lN, ip, aJO, x, blg, aeO, ja, cvG, xQ, eG, aeR, byj, JI, fc, hl, Qq, kt, Qm, as, eE, eF, cm, bw, Qt, gJ, bb, xD, acS, go, vA, mx, vy, bru, tG, ym, in, bms, Vj, rt, dD, lT, bMe, n, oY, uE, Cd, EI, md, jz, Xe, gd, eV, bav, cY, A, RT, hT, PX, fJ, hQ, yq, YE, bP, cTF, aOL, hL, at, pg, ut, eo, sZ, B, cB, tq, dA, mr, eX, fF, v, Ge, Cb, V, eJ, Kx, cTH, RI, WY, BJ, rS, nQ, bau, ae, jf, zH, De, vR, vT, ev, blq, Qr, iZ, bSI, bu, t, ho, acp, vk, ck, vW, kP, lI, wO, gX, hO, yv, biL, hI, ob, Dd, dM, acl, asa, eq, adg, Fc, BY, hd, cTv, py, bNN, Db, Hk, LA, hD, bvM, nJ, sj, d, je, et, Z, arv, bF, gk, yE, bVu, ajw, lI, gZ, Hs, y, aC, UH, fR, al, axk, IR, Vp, cTK, gJ, aGm, xE, cTG, wM, Bc, pX, Qk, M, K, GO, wt, eL, adT, qS, LZ, aB, g, pL, uC, Vm, iP, AM, nF, U, PV, uo, QF, m, P, sQ, sw, OI, aw, NT, qy, BH, pM, aCQ, cTC, eh, asS, JW, aky, ft, kH, cU, GT, Jn, ZN, Ha, dx, cTE, bsK, cTD, YF, cM, ar, kT, W, afc, bo, JM, bdA, gg, cTx, nz, Pr, it, fI, ayV, fM, wj, AL, KR, avm, fG, aGt, jx, zN, j, iI, uW, pd, eA, J, o, er, XX, Mg, anj, aHu, Ig, bq, kl, PK, Y, r, en, wA, iK, Dm, Ci, bN, bmS, beJ, Dy, sn, c, he, bxj, Da, np, dy, EY, fD, gT, Kg, bzT, gx, sY, kh, GI, id, Pt, aZ, oA, bS, ah, SY, hF, gb, buj, iJ, aAq, Jm, fU, dP, fX, sN, io, vB, hP, ji, aOh, Yi, uX, aeQ, BN, IR, anX, vj, eH, cr, si, VI, Fq, iR, Bu, bVw, qa, TA, Bv, Ew, nb, cgA, Fk, cP, ei, vt, G, Tb, auW, pf, eh, zh, aR, bII, cTJ, dQ, MO, eN, hm, DA, ayT, bvR, LC, aW, cnV, eM, iT, uJ, nw, mk, gn, R, Xu, cZ, tp, Wb, ko, fr, et, bd, qN, ai, eW, Vs, BI, boz, cc, hw, Yc, wG, kI, h, jy, dL, ux, hB, SD, vx, db, Um, wC, CM, iw, aq, kp, mo, gG, dw, op, lx, aoO, oU, bpC, cTz, gY, hk, cTA, Qu, bm, Vy, hR, aSW, uz, aAI, anx, bD, um, bL, eR, atB, dK, yk, rf, cR, tc, cJI, hy, Kh, C, cF, uT, nv, Vr, qp, afQ, HC, aT, dz, Ex, qk, af, qw, Uf, s, iU, aZB, oV, la, aaE, aDm, cTy, f, aDQ, wf, amF, wg, nM, aKp, IV, AH, mf, VB, awY, hS, Ke, ZI, qb, aD, Cl, Fb, tK, av, F, ot, aaU, Cj, ib, sO, NS, cTB, fb, uQ, qt, eZ, Ej, VW, aF, aDd, eK, Hp, LB, es, bPZ, RV, pc, zr, bE, z, uR, Vw, aS, QD, be, XO, GF, tP, X, us); #c1(VEGFB) c2(NP_001230662) c3(vascular endothelial growth factor B isoform VEGFB-167 precursor) c4(86526) c5(86527, 86528, 86529, 86530, 86531, 86532, 86533, 86534) c6( ) c7(sY, T, dD, aw, j, ci, eq, fr, cd, aR, ad, cTL, ip, aE, Db, Vv, cy, adx, s, as, cI, uC, iA, U, hL, gZ, m, B); #c1(VEGFB) c2(NP_003368) c3(vascular endothelial growth factor B isoform VEGFB-186 precursor) c4(137838) c5(137839, 137840, 137841, 137842, 137843, 137844, 137845) c6( ) c7(sY, T, dD, aw, j, ci, eq, fr, cd, aR, ad, cTL, ip, aE, Db, Vv, cy, adx, s, as, cI, uC, iA, U, hL, gZ, m, B); #c1(VEGFC) c2(NP_005420) c3(vascular endothelial growth factor C preproprotein) c4(155885, 155886) c5(155887, 155888, 155889, 155890, 155891, 155892, 155893, 155894, 155895, 155896, 155897, 155898, 155899, 155900, 155901, 155902, 155903, 155904, 155905, 155906, 155907, 155908, 155909, 155910, 155911, 155912, 155913, 155914, 155915, 155916, 155917, 155918, 155919, 155920, 155921, 155922, 155923, 155924, 155925, 155926, 155927, 155928, 155929, 155930, 155931, 155932, 155933, 155934, 155935, 155936, 155937, 155938, 155939, 155940, 155941, 155942, 155943, 155944, 155945, 155946, 155947, 155948, 155949, 155950, 155951, 155952, 155953, 155954, 155955, 155956, 155957, 155958, 155959, 155960, 155961, 155962, 155963, 155964, 155965, 155966, 155967, 155968, 155969, 155970, 155971, 155972, 155973, 155974, 155975, 155976, 155977, 155978, 155979, 155980) c6( ) c7(uB, T, aC, Th, if, eh, bB, ci, PB, aGm, aE, Vv, K, hu, eL, cp, aa, dH, LG, aW, g, eE, eF, uC, cm, bw, gJ, eM, nB, iA, vy, PO, m, ym, Vj, iu, QO, sw, ht, n, aj, fr, qN, ft, jz, h, IG, dL, hB, hi, mR, hQ, kp, fq, W, Vy, hR, it, B, fM, dA, AL, aA, j, Gb, q, J, eA, nv, aT, cy, ae, s, xR, oV, Y, r, en, t, iK, ck, bmS, nM, Dy, gX, PN, bt, hS, Mb, sY, acI, iW, jh, dG, gb, ad, Jm, dP, av, hd, ib, Db, ds, io, d, ff, aF, bPK, bz, bE, y, X); #c1(VENTX) c2(NP_055283) c3(homeobox protein VENTX) c4(180267) c5(180268, 180269, 180270, 180271, 180272, 180273, 180274) c6( ) c7(fe, hf, cj); #c1(VEPH1) c2(NP_001161383) c3(ventricular zone-expressed PH domain-containing protein homolog 1 isoform 2) c4(65645) c5(65646, 65647, 65648, 65649, 65650, 65651, 65652, 65653, 65654, 65655) c6( ) c7(T, GT, dY); #c1(VEPH1) c2(NP_001161387) c3(ventricular zone-expressed PH domain-containing protein homolog 1 isoform 3) c4(65656) c5(65657, 65658, 65659, 65660, 65661, 65662, 65663, 65664, 65665, 65666) c6( ) c7(T, GT, dY); #c1(VEPH1) c2(NP_001161389) c3(ventricular zone-expressed PH domain-containing protein homolog 1 isoform 5) c4(65667, 65668) c5(65669, 65670, 65671, 65672, 65673, 65674, 65675, 65676, 65677, 65678, 65679, 65680, 65681, 65682, 65683, 65684, 65685, 65686, 65687, 65688, 65689, 65690, 65691, 65692) c6( ) c7(T, GT, dY); #c1(VEPH1) c2(NP_078897) c3(ventricular zone-expressed PH domain-containing protein homolog 1 isoform 1) c4(215979, 215980, 215981) c5(215982, 215983, 215984, 215985, 215986, 215987, 215988, 215989, 215990, 215991) c6( ) c7(T, GT, dY); #c1(VEZT) c2(NP_060069) c3(vezatin) c4(194027, 194028, 194029) c5(194030, 194031, 194032, 194033, 194034, 194035, 194036, 194037, 194038, 194039, 194040, 194041) c6( ) c7(dP); #c1(VEZT) c2(XP_011536849) c3(vezatin isoform X6) c4( ) c5(334541, 334542, 334543, 334544, 334545, 334546) c6( ) c7(dP); #c1(VGF) c2(XP_011514851) c3(neurosecretory protein VGF isoform X1) c4(307599, 307600) c5(307601, 307602, 307603, 307604, 307605, 307606, 307607, 307608, 307609, 307610, 307611, 307612, 307613, 307614, 307615, 307616) c6( ) c7(bL, bO, bS, ci, ct, bxy, dL, bK, K, he, eL, af, dI, yq, Z, t, iK, avf, bN, c, cA, m); #c1(VGLL1) c2(NP_057351) c3(transcription cofactor vestigial-like protein 1) c4(190269, 190270, 190271, 190272) c5(190273, 190274, 190275, 190276, 190277, 190278, 190279, 190280, 190281, 190282, 190283, 190284, 190285, 190286, 190287, 190288, 190289, 190290, 190291, 190292, 190293, 190294, 190295, 190296) c6( ) c7(asT, aW, ci, AO, aT); #c1(VGLL2) c2(NP_703154) c3(transcription cofactor vestigial-like protein 2 isoform 2) c4(246069) c5(246070, 246071, 246072, 246073, 246074, 246075) c6( ) c7(Y); #c1(VGLL2) c2(NP_872586) c3(transcription cofactor vestigial-like protein 2 isoform 1) c4(256436) c5(256437, 256438, 256439, 256440, 256441, 256442) c6( ) c7(Y); #c1(VGLL3) c2(NP_057290) c3(transcription cofactor vestigial-like protein 3) c4(189911) c5(189912, 189913, 189914, 189915, 189916, 189917) c6( ) c7(bA, t, v, m, ad); #c1(VGLL3) c2(XP_005264809) c3(transcription cofactor vestigial-like protein 3 isoform X2) c4(279248) c5(279249, 279250, 279251, 279252, 279253, 279254) c6( ) c7(bA, t, v, m, ad); #c1(VGLL4) c2(NP_001121691) c3(transcription cofactor vestigial-like protein 4 isoform a) c4(46070) c5(46071, 46072, 46073, 46074, 46075, 46076) c6( ) c7(T, iX, aA, aF, j, bK); #c1(VGLL4) c2(NP_001121692) c3(transcription cofactor vestigial-like protein 4 isoform c) c4(46077) c5(46078, 46079, 46080, 46081, 46082, 46083) c6( ) c7(T, iX, aA, aF, j, bK); #c1(VGLL4) c2(NP_001121693) c3(transcription cofactor vestigial-like protein 4 isoform d) c4(46084) c5(46085, 46086, 46087, 46088, 46089, 46090) c6( ) c7(T, iX, aA, aF, j, bK); #c1(VGLL4) c2(NP_001271319) c3(transcription cofactor vestigial-like protein 4 isoform e) c4(103890) c5(103891, 103892, 103893, 103894, 103895, 103896) c6( ) c7(T, iX, aA, aF, j, bK); #c1(VGLL4) c2(NP_055482) c3(transcription cofactor vestigial-like protein 4 isoform b) c4(181377, 181378, 181379, 181380, 181381) c5(181382, 181383, 181384, 181385, 181386, 181387, 181388, 181389, 181390, 181391, 181392, 181393, 181394, 181395, 181396, 181397, 181398, 181399, 181400, 181401, 181402, 181403, 181404, 181405, 181406, 181407, 181408, 181409, 181410, 181411) c6( ) c7(T, iX, aA, aF, j, bK); #c1(VHL) c2(NP_000542) c3(von Hippel-Lindau disease turner suppressor isoform 1) c4(12426, 12427) c5(12428, 12429, 12430, 12431, 12432, 12433, 12434, 12435, 12436, 12437, 12438, 12439) c6( ) c7(atT, T, aC, e, ci, aY, Hr, ip, IS, awe, bII, pX, K, Nj, MO, aSI, eL, Us, Qe, aW, dg, zC, g, as, cm, bw, gJ, eM, nB, iA, go, cj, QF, m, ym, czO, WA, fr, rP, bkU, ft, Do, dL, ni, YI, Hu, bzv, bP, dB, Vy, aoB, anx, nz, cFI, uI, dA, eR, aA, hy, lu, q, er, eA, oT, RI, nv, aT, cy, jj, sR, bID, s, iU, en, t, auo, he, bmR, aJS, VB, hI, jh, aNf, Jm, av, ib, py, Db, fb, cTM, bug, IR, ff, anQ, EZ, bz, dr, bF, es, Ew, bE, Km, aS, bC, oQ, iu, bEt); #c1(VHL) c2(NP_937799) c3(von Hippel-Lindau disease turner suppressor isoform 2) c4(259132) c5(259133, 259134, 259135, 259136, 259137, 259138) c6( ) c7(atT, T, aC, e, ci, aY, Hr, ip, IS, awe, bII, pX, K, Nj, MO, aSI, eL, Us, Qe, aW, dg, zC, g, as, cm, bw, gJ, eM, nB, iA, go, cj, QF, m, ym, czO, WA, fr, rP, bkU, ft, Do, dL, ni, YI, Hu, bzv, bP, dB, Vy, aoB, anx, nz, cFI, uI, dA, eR, aA, hy, lu, q, er, eA, oT, RI, nv, aT, cy, jj, sR, bID, s, iU, en, t, auo, hc, bmR, aJS, VB, hI, jh, aNf, Jm, av, ib, py, Db, fb, cTM, bug, IR, ff, anQ, EZ, bz, dr, bF, es, Ew, bE, Km, aS, bC, oQ, iu, bEt); #c1(VHLL) c2(NP_001004319) c3(von Hippel-Lindau-like protein) c4(20577) c5(20578, 20579, 20580, 20581, 20582, 20583) c6( ) c7(ck, BI, T, RB, aE, QO, aVI, ds, if, aiM, cU, h, Io, EA, qN, aMk); #c1(VIL1) c2(NP_009058) c3(villin-1) c4(170505, 170506, 170507) c5(170508, 170509, 170510, 170511, 170512, 170513, 170514, 170515, 170516, 170517, 170518, 170519, 170520, 170521, 170522, 170523, 170524, 170525, 170526) c6( ) c7(Fv, ai, ft, A, ff, n, cL, ci, en, apx, y, B, o); #c1(VIM) c2(XP_011517951) c3(vimentin isoform X1) c4(311962, 311963, 311964, 311965, 311966) c5(311967, 311968, 311969, 311970, 311971, 311972, 311973, 311974, 311975, 311976, 311977, 311978, 311979, 311980, 311981, 311982, 311983, 311984, 311985, 311986, 311987, 311988, 311989, 311990, 311991, 311992, 311993, 311994, 311995, 311996, 311997, 311998, 311999, 312000) c6( ) c7(gh, T, fR, pf, hV, ea, al, bB, cL, ci, ip, bv, aE, iv, K, bOZ, eL, li, aW, Qm, g, as, pL, eF, cm, Qx, iP, eM, Jr, nB, iA, U, cj, bAD, Hb, m, zv, Th, dD, cTN, OI, Dr, qy, asM, n, fr, qN, PJ, aOr, ai, EI, ke, b, jz, Tf, eV, dL, Xh, dx, YO, OV, hQ, ag, mo, ceO, eD, va, bk, it, B, arO, cn, pF, fM, jp, DD, KR, bBr, jx, eX, aA, v, q, o, er, eA, PC, XX, hW, BJ, yg, aT, jj, ae, jf, cPm, s, nO, iU, Y, fO, r, en, cl, t, iK, rY, ck, pa, iM, kP, Dy, AH, bdP, hr, adR, dy, EY, JH, fD, zu, bt, Mb, kh, eP, aaz, iW, ha, jh, eq, bNK, iJ, ad, wD, hX, abZ, av, hd, ib, d, je, xz, eH, ff, aJK, aF, bz, eK, dR, LB, es, gk, eU, bE, i, y, kS, iu); #c1(VIMP) c2(NP_060915) c3(selenoprotein S isoform 2) c4(198601) c5( ) c6( ) c7(bL, bM, am, dD, e, aA, aj, v, j, eq, q, Tz, J, ad, xy, M, K, A, r, dq, uC, fT, ac, eM, y, B); #c1(VIMP) c2(NP_982298) c3(selenoprotein S isoform 1) c4(263315) c5(263316, 263317, 263318, 263319, 263320, 263321, 263322, 263323, 263324, 263325, 263326, 263327, 263328, 263329, 263330) c6( ) c7(bL, bM, am, dD, e, aA, aj, v, j, eq, q, Tz, J, ad, xy, M, K, A, r, dq, uC, fT, ac, eM, y, B); #c1(VIP) c2(NP_003372) c3(VIP peptides isoform 1 preproprotein) c4(137846) c5(137847, 137848, 137849, 137850, 137851, 137852, 137853, 137854, 137855, 137856, 137857, 137858, 137859, 137860, 137861, 137862, 137863, 137864, 137865, 137866, 137867, 137868, 137869, 137870, 137871, 137872, 137873, 137874, 137875, 137876, 137877, 137878, 137879, 137880, 137881, 137882, 137883, 137884, 137885, 137886, 137887, 137888, 137889, 137890, 137891, 137892, 137893, 137894, 137895, 137896, 137897, 137898, 137899, 137900, 137901, 137902, 137903, 137904, 137905, 137906, 137907, 137908, 137909, 137910, 137911, 137912, 137913, 137914, 137915, 137916, 137917, 137918, 137919, 137920, 137921, 137922, 137923, 137924, 137925, 137926, 137927, 137928, 137929, 137930, 137931, 137932, 137933, 137934, 137935, 137936, 137937, 137938, 137939, 137940) c6(137941) c7(cDT, gh, T, bM, lD, bB, ci, Jx, ip, xE, rw, iv, Ds, bzw, Qe, ly, bn, aW, mQ, g, eE, cm, eM, U, vy, cZ, BH, akA, nA, qW, ai, cU, h, dd, he, dx mR, RT, cly, sp, lx, JM, at, uz, Dw, v, V, pd, aT, cy, bK, ae, eu, jf, hM, fO, f, aTQ, bN, EJ, cT, Ta, ac, c, EY, fD, ao, bNx, gx, jN, uu, ad, BY, Tg, IC, ji, IQ, aNR, hp, bz, qa, bE, rH, ei, y, Tc); #c1(VIP) c2(NP_919416) c3(VIP peptides isoform 2 preproprotein) c4(258553) c5(258554, 258555, 258556, 258557, 258558, 258559, 258560) c6( ) c7(cDT, gh, T, bM, ID, bB, ci, Jx, ip, xE, rw, iv, Ds, bzw, Qe, ly, bn, aW, mQ, g, eE, cm, eM, U, vy, cZ, BH, akA, nA, qW, ai, cU, h, dd, he, dx, mR, RT, cly, sp, lx, JM, at, uz, Dw, v, V, pd, aT, cy, bK, ae, eu, jf, hM, fO, f, aTQ, bN, EJ, cT, Ta, ac, c, EY, fD, ao, bNx, gx, jN, uu, ad, BY, Tg, IC, ji, IQ, aNR, hp, bz, qa, bE, rH, ei, y, Tc); #c1(VIP) c2(XP_006715625) c3(VIP peptides isoform X1) c4(289680) c5(289681, 289682, 289683, 289684, 289685, 289686, 289687) c6( ) c7(cDT, gh, T, bM, ID, bB, ci, Jx, ip, xE, rw, iv, Ds, bzw, Qe, ly, bn, aW, mQ, g, eE, cm, eM, U, vy, cZ, BH, akA, nA, qW, ai, cU, h, dd, he, dx, mR, RT, cly, sp, lx, JM, at, uz, Dw, v, V, pd, aT, cy, bK, ae, eu, jf, hM, fO, f, aTQ, bN, EJ, cT, Ta, ac, c, EY, fD, ao, bNx, gx, jN, uu, ad, BY, Tg, IC, ji, IQ, aNR, hp, bz, qa, bE, rH, ei, y, Tc); #c1(VIPAS39) c2(NP_001180244) c3(spermatogenesis-defective protein 39 homolog isoform 1) c4(73518, 73519, 73520, 73521) c5(73522, 73523, 73524, 73525, 73526, 73527, 73528, 73529, 73530, 73531, 73532, 73533, 73534, 73535, 73536, 73537, 73538, 73539, 73540, 73541, 73542, 73543, 73544, 73545, 73546, 73547) c6( ) c7(IM, cTO, afk, Ik); #c1(VIPAS39) c2(NP_001180245) c3(spermatogenesis-defective protein 39 homolog isoform 2) c4(73548) c5(73549, 73550, 73551, 73552, 73553, 73554, 73555, 73556, 73557, 73558, 73559, 73560) c6( ) c7(IM, cTO, afk, Ik); #c1(VIPR1) c2(NP_001238811) c3(vasoactive intestinal polypeptide receptor 1 isoform 2) c4( ) c5(87915, 87916, 87917, 87918, 87919) c6( ) c7(Kd, T, fR, ya, boZ, al, jx, bB, n, uu, apt, q, ad, F, aZv, qh, aT, h, iY, bK, adV, ae, dx, mR, bn, aW, vj, ff, fO, hI, r, kD, aq, Io, fe, EZ, en, g, iV, f, cm, bz, bN, TA, gk, bE, hj, at, qF, hE, B, y, vi); #c1(VIPR1) c2(NP_001238812) c3(vasoactive intestinal polypeptide receptor 1 isoform 3) c4(87920) c5(87921, 87922, 87923, 87924, 87925, 87926) c6( ) c7(Kd, T, fR, ya, boZ, aI, jx, bB, n, uu, apt, q, ad, F, aZv, qh, aT, h, iY, bK, adV, ae, dx, mR, bn, aW, vj, ff, fO, hI, r, kD, aq, Io, fe, EZ, en, g, iV, f, cm, bz, bN, TA, gk, bE, hj, at, qF, hE, B, y, vi); #c1(VIPR1) c2(NP_001238813) c3(vasoactive intestinal polypeptide receptor 1 isoform 4) c4(87927) c5(87928, 87929, 87930, 87931, 87932, 87933) c6( ) c7(Kd, T, fR, ya, boZ, aI, jx, bB, n, uu, apt, q, ad, F, aZv, qh, aT, h, iY, bK, adV, ae, dx, mR, bn, aW, vj, ff, fO, hI, r, kD, aq, Io, fe, EZ, en, g, iV, f, cm, bz, bN, TA, gk, bE, hj, at, qF, hE, B, y, vi); #c1(VIPR1) c2(NP_001238814) c3(vasoactive intestinal polypeptide receptor 1 isoform 5) c4(87934) c5( ) c6( ) c7(Kd, T, fR, ya, boZ, aI, jx, bB, n, uu, apt, q, ad, F, aZv, qh, aT, h, iY, bK, adV, ae, dx, mR, bn, aW, vj, ff, fO, hI, r, kD, aq, Io, fe, EZ, en, g, iV, f, cm, bz, bN, TA, gk, bE, hj, at, qF, hE, B, y, vi); #c1(VIPR1) c2(NP_004615) c3(vasoactive intestinal polypeptide receptor 1 isoform 1 precursor) c4(148187) c5(148188, 148189, 148190, 148191, 148192, 148193, 148194) c6( ) c7(Kd, T, fR, ya, boZ, aI, jx, bB, n, uu, apt, q, ad, F, aZv, qh, aT, h, iY, bK, adV, ae, dx, mR, bn, aW, vj, ff, fO, hI, r, kD, aq, Io, fe, EZ, en, g, iV, f, cm, bz, bN, TA, gk, bE, hj, at, qF, hE, B, y, vi); #c1(VIPR2) c2(NP_001291451) c3(vasoactive intestinal polypeptide receptor 2 isoform 2 precursor) c4( ) c5(116074, 116075, 116076, 116077, 116078, 116079) c6( ) c7(ae, T, NC, ac, Ei, Be, cm, uu, en, ei, eE, Bd, V, bz, ai, dx, ad); #c1(VIPR2) c2(NP_003373) c3(vasoactive intestinal polypeptide receptor 2 isoform 1 precursor) c4(137942, 137943) c5(137944, 137945, 137946, 137947, 137948, 137949) c6( ) c7(ae, T, NC, ac, Ei, Be, cm, uu, en, ei, eE, Bd, V, bz, ai, dx, ad); #c1(VIT) c2(NP_001171440) c3(vitrin isoform 2 precursor) c4(70087) c5(70088, 70089, 70090, 70091, 70092, 70093, 70094, 70095, 70096) c6(70097, 70098) c7(fq, ac); #c1(VIT) c2(NP_001171441) c3(vitrin isoform 3 precursor) c4(70099) c5(70100, 70101, 70102, 70103, 70104, 70105, 70106, 70107) c6(70108, 70109) c7(fq, ac); #c1(VIT) c2(NP_001171442) c3(vitrin isoform 4 precursor) c4(70110, 70111) c5(70112, 70113, 70114, 70115, 70116, 70117, 70118, 70119) c6(70120, 70121) c7(fq, ac); #c1(VIT) c2(NP_001171443) c3(vitrin isoform 5 precursor) c4(70122) c5(70123, 70124, 70125, 70126, 70127, 70128, 70129, 70130) c6(70131, 70132) c7(fq, ac); #c1(VIT) c2(NP_444506) c3(vitrin isoform 1 precursor) c4(230323) c5(230324, 230325, 230326, 230327, 230328, 230329, 230330, 230331) c6(230332, 230333) c7(fq, ac); #c1(VIT) c2(XP_011531207) c3(vitrin isoform X1) c4(327159) c5(327160, 327161, 327162, 327163, 327164, 327165, 327166, 327167) c6(327168, 327169) c7(fq, ac); #c1(VIT) c2(XP_011531208) c3(vitrin isoform X2) c4( ) c5(327170, 327171, 327172, 327173, 327174, 327175, 327176, 327177) c6(327178, 327179) c7(fq, ac); #c1(VKORC1) c2(NP_076869) c3(vitamin K epoxide reductase complex subunit 1 isoform 1 precursor) c4(214186) c5(214187, 214188, 214189, 214190, 214191, 214192) c6( ) c7(bL, dD, Ly, mr, ea, wL, e, aw, ez, vr, Mi, j, eq, cd, ad, hX, fU, ga, vh, M, acb, wt, adx, ae, cTP, af, bA, eu, eZ, aq, aaD, cM, ac, ag, fP, gZ, bcu, gg, dX, aS, bcc, IS, vF, ei, wx, B); #c1(VKORC1) c2(NP_996560) c3(vitamin K epoxide reductase complex subunit 1 isoform 2 precursor) c4(264309) c5(264310, 264311, 264312, 264313, 264314, 264315) c6( ) c7(bL, dD, Ly, mr, ea, wL, e, aw, ez, vr, Mi, j, eq, cd, ad, hX, fU, ga, vh, M, acb, wt, adx, ae, cTP, af, bA, eu, eZ, aq, aaD, cM, ac, ag, fP, gZ, bcu, gg, dX, aS, bcc, IS, vF, ei, wx, B); #c1(VLDLR) c2(NP_001018066) c3(very low-density lipoprotein receptor isoform b precursor) c4(27045) c5(27046, 27047, 27048, 27049, 27050, 27051) c6( ) c7(bL, bM, T, dD, ea, bO, aA, cR, bS, ah, ct, C, ci, v, eq, dY, ec, io, vw, cy, K, bq, dQ, he, hB, dF, af, hm, JI, ZC, fc, FD, Io, EH, aF, Z, bN, cT, W, ky, dC, Fi, bhU, adI, xg); #c1(VLDLR) c2(NP_003374) c3(very low-density lipoprotein receptor isoform a precursor) c4(137950) c5(137951, 137952, 137953, 137954, 137955, 137956) c6( ) c7(bL, bM, T, dD, ea, bO, aA, cR, bS, ah, ct, C, ci, v, eq, dY, ec, io, vw, cy, K, bq, dQ, he, hB, dF, af, hm, JI, ZC, fc, FD, Io, EH, aF, Z, bN, cT, W, ky, dC, Fi, bhU, adI, xg); #c1(VLDLR) c2(XP_011516331) c3(very low-density lipoprotein receptor isoform X1) c4(309530, 309531) c5(309532, 309533, 309534, 309535, 309536, 309537, 309538, 309539, 309540, 309541, 309542, 309543) c6( ) c7(bL, bM, T, dD, ea, bO, aA, cR, bS, ah, ct, C, ci, v, eq, dY, ec, io, vw, cy, K, bq, dQ, he, hB, dF, af, hm, JI, ZC, fc, DD, Io, EH, aF, Z, bN, cT, W, ky, dC, Fi, bhU, adI, xg); #c1(VMA21) c2(NP_001017980) c3(vacuolar ATPase assembly integral membrane protein VMA21) c4(26725) c5(26726, 26727, 26728, 26729, 26730, 26731) c6( ) c7(adI, aiW, cTQ, akd, oj); #c1(VMA21) c2(XP_011529427) c3(vacuolar ATPase assembly integral membrane protein VMA21 isoform X1) c4(324855) c5(324856, 324857, 324858, 324859, 324860, 324861) c6( ) c7(adI, aiW, cTQ, akd, oj); #c1(VMO1) c2(NP_001138411) c3(vitelline membrane outer layer protein 1 homolog isoform 2 precursor) c4(56577) c5(56578, 56579, 56580, 56581, 56582, 56583, 56584) c6(56585, 56586) c7(fr); #c1(VMO1) c2(NP_001138412) c3(vitelline membrane outer layer protein 1 homolog isoform 3 precursor) c4(56587) c5(56588, 56589, 56590, 56591, 56592, 56593, 56594) c6(56595, 56596) c7(fr); #c1(VMO1) c2(NP_001138413) c3(vitelline membrane outer layer protein 1 homolog isoform 4 precursor) c4(56597) c5(56598, 56599, 56600, 56601, 56602, 56603) c6(56604) c7(fr); #c1(VMO1) c2(NP_872372) c3(vitelline membrane outer layer protein 1 homolog isoform 1 precursor) c4(256270) c5(256271, 256272, 256273, 256274, 256275, 256276, 256277, 256278, 256279, 256280, 256281) c6(256282, 256283) c7(fr); #c1(VMP1) c2(NP_112200) c3(vacuole membrane protein 1) c4(220747, 220748, 220749, 220750, 220751) c5(220752, 220753, 220754, 220755, 220756, 220757, 220758, 220759, 220760, 220761, 220762, 220763, 220764, 220765, 220766, 220767, 220768, 220769, 220770, 220771, 220772, 220773, 220774, 220775, 220776, 220777, 220778, 220779, 220780, 220781) c6( ) c7(es, T, aC, ar, aE, iA, wb, K, ey, B); #c1(VNIR2) c2(NP_776255) c3(vomeronasal type-1 receptor 2) c4(251050) c5(251051, 251052, 251053, 251054, 251055, 251056) c6( ) c7(dc, T); #c1(VNIR4) c2(NP_776256) c3(vomeronasal type-1 receptor 4) c4(251057) c5(251058, 251059, 251060, 251061, 251062, 251063, 251064) c6( ) c7(dc, T); #c1(VNN1) c2(NP_004657) c3(pantetheinase precursor) c4(148574) c5(148575, 148576, 148577, 148578, 148579, 148580) c6( ) c7(ac, e, aAh, awd, dV, r, cz, cr, fe, ji, K, cP, iV, eE, q, bA); #c1(VNN2) c2(NP_001229279) c3(vascular non-inflammatory molecule 2 isoform 3 precursor) c4(84113, 84114, 84115, 84116, 84117) c5(84118, 84119, 84120, 84121, 84122, 84123, 84124, 84125, 84126, 84127, 84128, 84129, 84130, 84131, 84132, 84133, 84134, 84135, 84136, 84137, 84138, 84139, 84140, 84141, 84142, 84143, 84144, 84145, 84146, 84147, 84148, 84149, 84150) c6( ) c7(aAh, awd, dV, aT, cr, eE, pd); #c1(VNN2) c2(NP_004656) c3(vascular non-inflammatory molecule 2 isoform 1 precursor) c4(148555, 148556, 148557, 148558) c5(148559, 148560, 148561, 148562, 148563, 148564, 148565, 148566, 148567, 148568, 148569, 148570, 148571, 148572, 148573) c6( ) c7(aAh, awd, dV, aT, cr, eE, pd); #c1(VNN2) c2(XP_006715656) c3(vascular non-inflammatory molecule 2 isoform X1) c4( ) c5(289695, 289696, 289697, 289698, 289699) c6( ) c7(aAh, awd, dV, aT, cr, eE, pd); #c1(VNN2) c2(XP_011534533) c3(vascular non-inflammatory molecule 2 isoform X2) c4( ) c5(331045, 331046, 331047, 331048, 331049, 331050, 331051) c6( ) c7(aAh, awd, dV, aT, cr, eE, pd); #c1(VNN3) c2(NP_001278632) c3(vascular non-inflammatory molecule 3) c4( ) c5(109908, 109909) c6( ) c7(eE, cr); #c1(VOPP1) c2(NP_001271212) c3(vesicular, overexpressed in cancer, prosurvival protein 1 isoform 3) c4(103635) c5(103636, 103637, 103638, 103639, 103640) c6( ) c7(bt, ff, en); #c1(VOPP1) c2(NP_110423) c3(vesicular, overexpressed in cancer, prosurvival protein 1 isoform 1 precursor) c4(220263) c5(220264, 220265, 220266, 220267, 220268) c6( ) c7(bt, ff, en); #c1(VOPP1) c2(XP_011513840) c3(vesicular, overexpressed in cancer, prosurvival protein 1 isoform X2) c4( ) c5(306278, 306279) c6( ) c7(bt, ff, en); #c1(VPRBP) c2(NP_055518) c3(protein VPRBP isoform 1) c4(181666, 181667) c5(181668, 181669, 181670, 181671, 181672, 181673, 181674, 181675, 181676, 181677, 181678, 181679, 181680, 181681, 181682, 181683, 181684, 181685, 181686, 181687, 181688, 181689) c6( ) c7(T, y, dA, eM, asP, aW, bo, yG, aT, h, aj, K, m, EA, t, J); #c1(VPRBP) c2(XP_006713491) c3(protein VPRBP isoform X3) c4(287169) c5( ) c6( ) c7(T, y, dA, eM, asP, aW, bo, yG, aT, h, aj, K, m, EA, t, J); #c1(VPRBP) c2(XP_011532582) c3(protein VPRBP isoform X2) c4(328697) c5(328698, 328699, 328700, 328701, 328702, 328703) c6( ) c7(T, y, dA, eM, asP, aW, bo, yG, aT, h, aj, K, m, EA, t, J); #c1(VPREB1) c2(NP_009059) c3(immunoglobulin iota chain isoform 1 precursor) c4(170527, 170528) c5(170529, 170530, 170531, 170532, 170533, 170534, 170535, 170536, 170537, 170538, 170539, 170540) c6( ) c7(ck, x, T, iT, eZ, pk, hf, hF, y, Wt); #c1(VPREB3) c2(NP_037510) c3(pre-B lymphocyte protein 3 precursor) c4(175940) c5(175941, 175942, 175943, 175944, 175945, 175946) c6( ) c7(pk, fM, jh); #c1(VPS11) c2(XP_011541201) c3(vacuolar protein sorting-associated protein 11 homolog isoform X1) c4( ) c5(339835) c6( ) c7(bE, if, bB, aei, qN, cI, eW); #c1(VPS13A) c2(NP_001018047) c3(vacuolar protein sorting-associated protein 13A isoform C) c4(26901) c5(26902, 26903, 26904, 26905, 26906, 26907) c6( ) c7(bUd, Pw, T, aR, ZM, U, r, aU, aA, ZU, yy, bI, bX, iI, xw, bgI, dr); #c1(VPS13A) c2(NP_001018048) c3(vacuolar protein sorting-associated protein 13A isoform D) c4(26908) c5(26909, 26910, 26911, 26912, 26913, 26914) c6( ) c7(bUd, Pw, T, aR, ZM, U, r, aU, aA, ZU, yy, bI, bX, iI, xw, bgI, dr); #c1(VPS13A) c2(NP_056001) c3(vacuolar protein sorting-associated protein 13A isoform B) c4(185068) c5(185069, 185070, 185071, 185072, 185073, 185074) c6( ) c7(bUd, Pw, T, aR, ZM, U, r, aU, aA, ZU, yy, bI, bX, iI, xw, bgI, dr); #c1(VPS13A) c2(NP_150648) c3(vacuolar protein sorting-associated protein 13A isoform A) c4(228254) c5(228255, 228256, 228257, 228258, 228259, 228260) c6( ) c7(bUd, Pw, T, aR, ZM, U, r, aU, aA, ZU, yy, bI, bX, iI, xw, bgI, dr); #c1(VPS13B) c2(NP_056058) c3(vacuolar protein sorting-associated protein 13B isoform 3) c4(185432) c5(185433, 185434, 185435, 185436, 185437, 185438) c6( ) c7(gV, rT, hG, hk, Y, mG, XC, QK, af, bA); #c1(VPS13B) c2(NP_689777) c3(vacuolar protein sorting-associated protein 13B isoform 1) c4(243931, 243932) c5(243933, 243934, 243935, 243936, 243937, 243938) c6( ) c7(gV, rT, hG, hk, Y, mG, XC, QK, af, bA); #c1(VPS13B) c2(NP_858047) c3(vacuolar protein sorting-associated protein 13B isoform 4) c4(255312) c5(255313, 255314, 255315, 255316, 255317, 255318) c6( ) c7(gV, rT, hG, hk, Y, mG, XC, QK, af, bA); #c1(VPS13B) c2(XP_005250858) c3(vacuolar protein sorting-associated protein 13B isoform X1) c4(270611) c5(270612, 270613, 270614, 270615, 270616, 270617) c6( ) c7(gV, rT, hG, hk, Y, mG, XC, QK, af, bA); #c1(VPS13B) c2(XP_011515154) c3(vacuolar protein sorting-associated protein 13B isoform X5) c4( ) c5(307996) c6( ) c7(gV, rT, hG, hk, Y, mG, XC, QK, af, bA); #c1(VPS13B) c2(XP_011515157) c3(vacuolar protein sorting-associated protein 13B isoform X9) c4( ) c5(307997, 307998, 307999, 308000, 308001) c6( ) c7(gV, rT, hG, hk, Y, mG, XC, QK, af, bA); #c1(VPS13C) c2(NP_001018098) c3(vacuolar protein sorting-associated protein 13C isoform 28) c4(27326) c5( ) c6( ) c7(bL, aj, v, J); #c1(VPS13C) c2(NP_060154) c3(vacuolar protein sorting-associated protein 13C isoform 1A) c4(194512) c5(194513, 194514, 194515, 194516, 194517, 194518, 194519, 194520, 194521, 194522, 194523, 194524) c6( ) c7(bL, aj, v, J); #c1(VPS13C) c2(NP_060550) c3(vacuolar protein sorting-associated protein 13C isoform 1B) c4(196529) c5( ) c6( ) c7(bL, aj, v, J); #c1(VPS13C) c2(NP_065872) c3(vacuolar protein sorting-associated protein 13C isoform 2A) c4(205989) c5(205990, 205991, 205992, 205993, 205994, 205995, 205996, 205997, 205998, 205999, 206000, 206001) c6( ) c7(bL, aj, v, J); #c1(VPS26A) c2(NP_001030337) c3(vacuolar protein sorting-associated protein 26A isoform 2) c4(31020) c5(31021, 31022, 31023, 31024, 31025, 31026) c6( ) c7(bL, dL); #c1(VPS26A) c2(NP_004887) c3(vacuolar protein sorting-associated protein 26A isoform 1) c4(150545, 150546) c5(150547, 150548, 150549, 150550, 150551, 150552, 150553, 150554, 150555, 150556, 150557, 150558, 150559, 150560, 150561, 150562, 150563) c6( ) c7(bL, dL); #c1(VPS26A) c2(XP_011538680) c3(vacuolar protein sorting-associated protein 26A isoform X1) c4(336417) c5(336418, 336419, 336420, 336421, 336422) c6( ) c7(bL, dL); #c1(VPS28) c2(NP_057292) c3(vacuolar protein sorting-associated protein 28 homolog isoform 1) c4(189934) c5(189935, 189936, 189937, 189938, 189939, 189940, 189941, 189942, 189943, 189944) c6( ) c7(h, ds); #c1(VPS28) c2(NP_898880) c3(vacuolar protein sorting-associated protein 28 homolog isoform 2) c4(257807) c5(257808, 257809, 257810, 257811, 257812, 257813) c6( ) c7(h, ds); #c1(VPS33A) c2(NP_075067) c3(vacuolar protein sorting-associated protein 33A) c4(213655) c5(213656, 213657, 213658, 213659, 213660, 213661) c6( ) c7(afk, IF); #c1(VPS338) c2(NP_061138) c3(vacuolar protein sorting-associated protein 338 isoform 1) c4(199491, 199492) c5(199493, 199494, 199495, 199496, 199497, 199498, 199499, 199500, 199501, 199502, 199503, 199504) c6( ) c7(mG, afk, Z, IM, Ik, jw); #c1(VPS35) c2(NP_060676) c3(vacuolar protein sorting-associated protein 35) c4(197099, 197100) c5(197101, 197102, 197103, 197104, 197105, 197106, 197107, 197108, 197109, 197110, 197111, 197112) c6( ) c7(bL, T, af, cTR, r, aA, v, an, NN, GB); #c1(VPS36) c2(NP_057159) c3(vacuolar protein-sorting-associated protein 36 isoform 1) c4(189201) c5(189202, 189203, 189204, 189205, 189206, 189207) c6( ) c7(cgf); #c1(VPS37A) c2(NP_001138624) c3(vacuolar protein sorting-associated protein 37A isoform 2) c4(57254) c5(57255, 57256, 57257, 57258, 57259, 57260) c6( ) c7(cTS, TP, oe, EQ, m, t); #c1(VPS37A) c2(NP_689628) c3(vacuolar protein sorting-associated protein 37A isoform 1) c4(243339) c5(243340, 243341, 243342, 243343, 243344, 243345) c6( ) c7(cTS, TP, oe, EQ, m, t); #c1(VPS37A) c2(XP_006716349) c3(vacuolar protein sorting-associated protein 37A isoform X1) c4(290262) c5(290263, 290264, 290265, 290266, 290267, 290268) c6( ) c7(cTS, TP, oe, EQ, m, t); #c1(VPS378) c2(NP_078943) c3(vacuolar protein sorting-associated protein 378) c4(216209) c5(216210, 216211, 216212, 216213, 216214, 216215) c6( ) c7(h); #c1(VPS378) c2(XP_011537044) c3(vacuolar protein sorting-associated protein 378 isoform X1) c4( ) c5(334830) c6( ) c7(h); #c1(VPS37C) c2(NP_060436) c3(vacuolar protein sorting-associated protein 37C) c4(195925, 195926, 195927) c5(195928, 195929, 195930, 195931, 195932, 195933, 195934, 195935, 195936, 195937, 195938, 195939, 195940, 195941, 195942, 195943, 195944, 195945, 195946) c6( ) c7(ck, h); #c1(VPS39) c2(NP_001288067) c3(vam6/Vps39-like protein isoform a) c4(113484) c5(113485, 113486, 113487, 113488, 113489, 113490) c6( ) c7(aT); #c1(VPS39) c2(NP_056104) c3(vam6/Vps39-like protein isoform b) c4(185726) c5(185727, 185728, 185729, 185730, 185731, 185732) c6( ) c7(aT); #c1(VPS39) c2(XP_011519705) c3(vam6/Vps39-like protein isoform X1) c4( ) c5(314377) c6( ) c7(aT); #c1(VPS41) c2(NP_055211) c3(vacuolar protein sorting-associated protein 41 homolog isoform 1) c4(179854, 179855) c5(179856, 179857, 179858, 179859, 179860, 179861, 179862, 179863, 179864, 179865, 179866, 179867) c6( ) c7(T, dY, an); #c1(VPS41) c2(NP_542198) c3(vacuolar protein sorting-associated protein 41 homolog isoform 2) c4(232273) c5(232274, 232275, 232276, 232277, 232278, 232279) c6( ) c7(T, dY, an); #c1(VPS4A) c2(NP_037377) c3(vacuolar protein sorting-associated protein 4A) c4(175145) c5(175146, 175147, 175148, 175149, 175150, 175151) c6( ) c7(afu); #c1(VPS4B) c2(NP_004860) c3(vacuolar protein sorting-associated protein 48) c4(150378) c5(150379, 150380, 150381, 150382, 150383, 150384) c6( ) c7(aW, er, aT); #c1(VPS51) c2(NP_037397) c3(vacuolar protein sorting-associated protein 51 homolog) c4(175259) c5(175260, 175261, 175262, 175263, 175264, 175265) c6( ) c7(ID, T, aC, ea, e, ci, xE, Iv, pX, M, dV, K, eL, tw, ly, eG, aW, Qm, as, bw, eM, AM, vA, mx, vy, Hb, m, fy, dD, vI, aw, n, aj, ww, Mi, fr, eh, cd, hr, EI, ai, do, wG, gd, h, dL, ey, cY, A, Vt, kp, mo, op, Ix, hq, bm, B, aA, cR, tc, cz, v, q, J, eA, eJ, rS, aT, ae, r, cI, t, ck, kP, wO, dh, dy, bt, kh, dG, eq, ad, Jm, sN, d, IR, th, aF, qa, Hp, Il, ei, If, y); #c1(VPS52) c2(NP_001276105) c3(vacuolar protein sorting-associated protein 52 homolog isoform 4) c4( ) c5(108002, 108003, 108004, 108005, 108006, 108007, 108008, 108009, 108010) c6( ) c7(T, Ht, dA, pf, ha, bO, bB, GC, gA, ww, zU, XM, cTT, ad, iu, ku, cQZ, QU, dV, aT, vH, K, fb, ae, li, th, iU, aW, Y, eZ, agj, pL, wA, bz, hq, nM, bE, PI, yP, hr, uz, abd, B); #c1(VPS52) c2(NP_072047) c3(vacuolar protein sorting-associated protein 52 homolog isoform 1) c4(212497, 212498, 212499, 212500) c5(212501, 212502, 212503, 212504, 212505, 212506, 212507, 212508, 212509, 212510, 212511, 212512, 212513, 212514, 212515, 212516, 212517, 212518, 212519, 212520, 212521, 212522, 212523, 212524, 212525, 212526, 212527, 212528, 212529, 212530, 212531, 212532, 212533, 212534, 212535, 212536, 212537, 212538, 212539, 212540, 212541, 212542, 212543, 212544, 212545, 212546, 212547, 212548, 212549, 212550, 212551, 212552, 212553, 212554, 212555, 212556, 212557, 212558, 212559, 212560, 212561, 212562, 212563, 212564, 212565, 212566, 212567) c6( ) c7(T, Ht, dA, pf, ha, bO, bB, GC, gA, ww, zU, XM, cTT, ad, iu, ku, cQZ, QU, dV, aT, vH, K, fb, ae, li, th, iU, aW, Y, eZ, agj, pL, wA, bz, hq, nM, bE, PI, yP, hr, uz, abd, B); #c1(VPS53) c2(NP_001121631) c3(vacuolar protein sorting-associated protein 53 homolog isoform 1) c4(45892, 45893, 45894) c5(45895, 45896, 45897, 45898, 45899, 45900, 45901, 45902, 45903, 45904, 45905, 45906, 45907, 45908, 45909, 45910, 45911, 45912) c6( ) c7(T, if, r, aq, q, qN, iR, B); #c1(VPS53) c2(NP_060759) c3(vacuolar protein sorting-associated protein 53 homolog isoform 2) c4(197649, 197650) c5(197651, 197652, 197653, 197654, 197655, 197656) c6( ) c7(T, if, r, aq, q, qN, iR, B); #c1(VPS53) c2(XP_011522255) c3(vacuolar protein sorting-associated protein 53 homolog isoform X1) c4(316896) c5(316897, 316898, 316899, 316900, 316901, 316902, 316903, 316904, 316905, 316906, 316907, 316908) c6( ) c7(T, if, r, aq, q, qN, iR, B); #c1(VPS54) c2(NP_001005739) c3(vacuolar protein sorting-associated protein 54 isoform 2) c4(22000) c5(22001, 22002, 22003, 22004, 22005, 22006, 22007, 22008, 22009, 22010) c6( ) c7(apl, c, apq, HC, PJ); #c1(VPS54) c2(NP_057600) c3(vacuolar protein sorting-associated protein 54 isoform 1) c4(191558, 191559) c5(191560, 191561, 191562, 191563, 191564, 191565, 191566, 191567, 191568, 191569, 191570, 191571) c6( ) c7(apl, c, apq, HC, PJ); #c1(VPS72) c2(NP_001258016) c3(vacuolar protein sorting-associated protein 72 homolog isoform 1) c4(95905) c5(95906, 95907, 95908, 95909, 95910, 95911) c6( ) c7(bz, eM); #c1(VPS72) c2(NP_005988) c3(vacuolar protein sorting-associated protein 72 homolog isoform 2) c4(161010) c5(161011, 161012, 161013, 161014, 161015, 161016, 161017) c6( ) c7(bz, eM); #c1(VPS8) c2(NP_001009921) c3(vacuolar protein sorting-associated protein 8 homolog isoform a) c4(23713, 23714, 23715) c5(23716, 23717, 23718, 23719, 23720, 23721, 23722, 23723, 23724, 23725, 23726, 23727) c6( ) c7(an); #c1(VPS8) c2(NP_056118) c3(vacuolar protein sorting-associated protein 8 homolog isoform b) c4(185770, 185771, 185772, 185773, 185774) c5(185775, 185776, 185777, 185778, 185779, 185780, 185781, 185782, 185783, 185784, 185785, 185786) c6( ) c7(an); #c1(VPS8) c2(XP_005247310) c3(vacuolar protein sorting-associated protein 8 homolog isoform X2) c4( ) c5(267766, 267767, 267768, 267769, 267770, 267771, 267772, 267773, 267774, 267775, 267776, 267777, 267778, 267779, 267780, 267781, 267782, 267783, 267784, 267785, 267786, 267787, 267788, 267789) c6( ) c7(an); #c1(VRK1) c2(NP_003375) c3(serine/threonine-protein kinase VRK1) c4(137957) c5(137958, 137959, 137960, 137961, 137962, 137963) c6( ) c7(av, T, bP, boQ, aW, ff, jx, aT, kf, fe, aj, UR, ci, Ea, nA, en, g, bz, eW); #c1(VRK2) c2(NP_001123953) c3(serine/threonine-protein kinase VRK2 isoform 1) c4(48119, 48120, 48121) c5(48122, 48123, 48124, 48125, 48126, 48127, 48128, 48129, 48130, 48131, 48132, 48133, 48134, 48135, 48136, 48137) c6( ) c7(T, Cq, aW, ha, aT, bK, ci); #c1(VRK2) c2(NP_001123954) c3(serine/threonine-protein kinase VRK2 isoform 2) c4(48138) c5( ) c6( ) c7(T, Cq, aW, ha, aT, bK, ci); #c1(VRK2) c2(XP_006712154) c3(serine/threonine-protein kinase VRK2 isoform X2) c4(286461) c5(286462, 286463, 286464, 286465, 286466, 286467, 286468, 286469, 286470, 286471, 286472, 286473, 286474, 286475, 286476, 286477, 286478, 286479) c6( ) c7(T, Cq, aW, ha, aT, bK, ci); #c1(VSIG1) c2(NP_001164024) c3(V-set and immunoglobulin domain-containing protein 1 isoform 1 precursor) c4(66517) c5(66518, 66519, 66520, 66521, 66522, 66523) c6( ) c7(t, aF, aA); #c1(VSIG1) c2(NP_872413) c3(V-set and immunoglobulin domain-containing protein 1 isoform 2 precursor) c4(256317) c5(256318, 256319, 256320, 256321, 256322, 256323) c6( ) c7(t, aF, aA); #c1(VSIG10) c2(NP_061959) c3(V-set and immunoglobulin domain-containing protein 10 precursor) c4(201311) c5(201312, 201313, 201314, 201315, 201316, 201317) c6( ) c7(bL); #c1(VSIG2) c2(NP_055127) c3(V-set and immunoglobulin domain-containing protein 2 precursor) c4(179112, 179113) c5(179114, 179115, 179116, 179117, 179118, 179119, 179120, 179121, 179122, 179123) c6( ) c7(cTU, eZ, hO, dL, K, eL); #c1(VSIG2) c2(XP_011541029) c3(V-set and immunoglobulin domain-containing protein 2 isoform X1) c4( ) c5(339561, 339562) c6( ) c7(cTU, eZ, hO, dL, K, eL); #c1(VSIG2) c2(XP_011541030) c3(V-set and immunoglobulin domain-containing protein 2 isoform X2) c4( ) c5(339563) c6( ) c7(cTU, eZ, hO, dL, K, eL); #c1(VSIG4) c2(NP_001093901) c3(V-set and immunoglobulin domain-containing protein 4 isoform 2 precursor) c4(40552) c5(40553, 40554, 40555, 40556, 40557, 40558) c6( ) c7(eM, ey, ci, bt, bz, ai); #c1(VSIG4) c2(NP_001171759) c3(V-set and immunoglobulin domain-containing protein 4 isoform 4 precursor) c4( ) c5(71514, 71515, 71516, 71517, 71518, 71519, 71520, 71521, 71522, 71523, 71524, 71525) c6( ) c7(eM, ey, ci, bt, bz, ai); #c1(VSIG4) c2(NP_001244332) c3(V-set and immunoglobulin domain-containing protein 4 isoform 5 precursor) c4(92189) c5(92190, 92191, 92192, 92193, 92194, 92195) c6( ) c7(eM, ey, ci, bt, bz, ai); #c1(VSIG4) c2(NP_009199) c3(V-set and immunoglobulin domain-containing protein 4 isoform 1 precursor) c4(171475, 171476, 171477) c5(171478, 171479, 171480, 171481, 171482, 171483) c6( ) c7(eM, ey, ci, bt, bz, ai); #c1(VSNL1) c2(NP_003376) c3(visinin-like protein 1) c4(137964, 137965, 137966) c5(137967, 137968, 137969, 137970, 137971, 137972, 137973, 137974, 137975, 137976, 137977, 137978, 137979, 137980, 137981, 137982, 137983, 137984, 137985, 137986, 137987, 137988, 137989, 137990, 137991, 137992) c6( ) c7(cZ, T, c, af, eM, ff, eH, r, cm, K, bz, en, eA, H, adg, xg, q, L); #c1(VSTM1) c2(NP_001275720) c3(V-set and transmembrane domain-containing protein 1 isoform 2) c4(107177) c5(107178, 107179, 107180, 107181, 107182, 107183) c6( ) c7(cd); #c1(VSTM1) c2(NP_001275721) c3(V-set and transmembrane domain-containing protein 1 isoform 3 precursor) c4(107184) c5(107185, 107186, 107187, 107188, 107189, 107190, 107191, 107192, 107193, 107194, 107195, 107196) c6( ) c7(cd); #c1(VSTM1) c2(NP_001275722) c3(V-set and transmembrane domain-containing protein 1 isoform 4) c4( ) c5(107197) c6( ) c7(cd); #c1(VSTM1) c2(NP_940883) c3(V-set and transmembrane domain-containing protein 1 isoform 1 precursor) c4(260034) c5(260035, 260036, 260037, 260038, 260039, 260040) c6( ) c7(cd); #c1(VSTM1) c2(XP_011545826) c3(V-set and transmembrane domain-containing protein 1 isoform X5) c4(344760) c5( ) c6( ) c7(cd); #c1(VSX1) c2(NP_001243200) c3(visual system homeobox 1 isoform c) c4(90136) c5(90137, 90138, 90139, 90140, 90141, 90142, 90143, 90144, 90145, 90146, 90147, 90148, 90149, 90150, 90151, 90152, 90153, 90154) c6( ) c7(gh, T, aSP, e, cTV, zU, LI, ad, cTW, LH, aOu, aE, ec, ah, vw, LG, ae, Lu, bnk, IR, Az, LJ, W, nb, cA, ig, zG); #c1(VSX1) c2(NP_001243201) c3(visual system homeobox 1 isoform d) c4(90155) c5(90156, 90157, 90158, 90159, 90160, 90161, 90162, 90163, 90164, 90165, 90166, 90167) c6( ) c7(gh, T, aSP, e, cTV, zU, LI, ad, cTW, LH, aOu, aE, ec, ah, vw, LG, ae, Lu, bnk, IR, Az, LJ, W, nb, cA, ig, zG); #c1(VSX1) c2(NP_055403) c3(visual system homeobox 1 isoform a) c4(180851, 180852, 180853, 180854) c5(180855, 180856, 180857, 180858, 180859, 180860) c6( ) c7(gh, T, aSP, e, cTV, zU, LI, ad, cTW, LH, aOu, aE, ec, ah, vw, LG, ae, Lu, bnk, IR, Az, LJ, W, nb, cA, ig, zG); #c1(VSX1) c2(NP_955457) c3(visual system homeobox 1 isoform b) c4(261771) c5(261772, 261773, 261774, 261775, 261776, 261777) c6( ) c7(gh, T, aSP, e, cTV, zU, LI, ad, cTW, LH, aOu, aE, ec, ah, vw, LG, ae, Lu, bnk, IR, Az, LJ, W, nb, cA, ig, zG); #c1(VSX2) c2(NP_878314) c3(visual system homeobox 2) c4(257092) c5(257093, 257094, 257095, 257096, 257097, 257098) c6( ) c7(kn, kj, cTZ, nx, r, cTY, sa, cTX); #c1(VSX2) c2(XP_011535021) c3(visual system homeobox 2 isoform X1) c4( ) c5(331718) c6( ) c7(kn, kj, cTZ, nx, r, cTY, sa, cTX); #c1(VTA1) c2(NP_001273300) c3(vacuolar protein sorting-associated protein VTA1 homolog isoform b) c4( ) c5(104637, 104638, 104639, 104640, 104641) c6( ) c7(T, pf, e, aA, bB, n, q, ad, aT, axc, h, dL, K, ae, s, aW, PX, r, aF, g, bz, bE, it, B); #c1(VTA1) c2(NP_001273301) c3(vacuolar protein sorting-associated protein VTA1 homolog isoform c) c4(104642) c5(104643, 104644, 104645, 104646, 104647, 104648) c6( ) c7(T, pf, e, aA, bB, n, q, ad, aT, axc, h, dL, K, ae, s, aW, PX, r, aF, g, bz, bE, it, B); #c1(VTA1) c2(NP_057569) c3(vacuolar protein sorting-associated protein VTA1 homolog isoform a) c4(191380, 191381, 191382) c5(191383, 191384, 191385, 191386, 191387, 191388, 191389, 191390, 191391, 191392, 191393, 191394, 191395) c6( ) c7(T, pf, e, aA, bB, n, q, ad, aT, axc, h, dL, K, ae, s, aW, PX, r, aF, g, bz, bE, it, B); #c1(VTCN1) c2(XP_011540445) c3(V-set domain-containing T-cell activation inhibitor 1 isoform X1) c4(338922) c5( ) c6( ) c7(T, dA, oe, ht, aA, cL, aj, fr, AO, q, J, o, aE, oz, aT, gs, ey, hu, qw, A, aW, Y, r, kp, hp, aF, t, bz, dy, m, hE, in, y, BA); #c1(VTCN1) c2(XP_011540447) c3(V-set domain-containing T-cell activation inhibitor 1 isoform X3) c4(338923) c5( ) c6( ) c7(T, dA, oe, ht, aA, cL, aj, fr, AO, q, J, o, aE, oz, aT, gs, ey, hu, qw, A, aW, Y, r, kp, hp, aF, t, bz, dy, m, hE, in, y, BA); #c1(VTI1A) c2(NP_660207) c3(vesicle transport through interaction with t-SNAREs homolog 1A) c4(240545) c5(240546, 240547, 240548, 240549, 240550, 240551) c6( ) c7(ac, e, aw, r, j, q, g, eu, af, ad); #c1(VTI1A) c2(XP_005269601) c3(vesicle transport through interaction with t-SNAREs homolog 1A isoform X7) c4(282680) c5(282681, 282682, 282683, 282684, 282685, 282686) c6( ) c7(ac, e, aw, r, j, q, g, eu, af, ad); #c1(VTI1B) c2(NP_006361) c3(vesicle transport through interaction with t-SNAREs homolog 1B) c4(164344) c5(164345, 164346, 164347, 164348, 164349, 164350) c6( ) c7(af); #c1(VTN) c2(NP_000629) c3(vitronectin precursor) c4(14090, 14091) c5(14092, 14093, 14094, 14095, 14096, 14097, 14098, 14099, 14100, 14101, 14102, 14103, 14104) c6( ) c7(bL, T, dD, dA, ea, DV, qy, aA, cz, n, j, ci, eq, fr, hF, q, ad, eA, hX, dP, hd, RI, aE, ciJ, tT, dk, aT, cy, db, ae, ajU, hm, afu, d, arI, aW, Y, wc, aaP, aq, Io, YG, aF, CQ, g, as, dw, t, bwe, ir, cm, auC, iK, ck, bF, arY, W, cA, pc, eM, DW, aS, m, rH, ei, hh, hE, B, y); #c1(VWA2) c2(NP_001258975) c3(von Willebrand factor A domain-containing protein 2 precursor) c4(96867, 96868) c5(96869, 96870, 96871, 96872, 96873, 96874, 96875, 96876, 96877, 96878, 96879, 96880, 96881, 96882) c6(96883, 96884) c7(aj, aw, X, J, A); #c1(VWA3A) c2(NP_775886) c3(von Willebrand factor A domain-containing protein 3A precursor) c4(250561, 250562) c5(250563, 250564, 250565, 250566, 250567, 250568, 250569, 250570, 250571, 250572, 250573, 250574, 250575, 250576, 250577, 250578) c6(250579, 250580, 250581, 250582) c7(bK); #c1(VWA3A) c2(XP_011544044) c3(von Willebrand factor A domain-containing protein 3A isoform X1) c4(343220) c5(343221) c6( ) c7(bK); #c1(VWA3B) c2(NP_659429) c3(von Willebrand factor A domain-containing protein 38) c4(239828, 239829) c5(239830, 239831, 239832, 239833, 239834, 239835, 239836, 239837, 239838, 239839, 239840, 239841) c6( ) c7(cd); #c1(VWA3B) c2(XP_006712420) c3(von Willebrand factor A domain-containing protein 38 isoform X6) c4(286641) c5(286642, 286643, 286644, 286645, 286646, 286647) c6( ) c7(cd); #c1(VWA3B) c2(XP_011509074) c3(von Willebrand factor A domain-containing protein 38 isoform X4) c4(299671) c5( ) c6( ) c7(cd); #c1(VWA3B) c2(XP_011509078) c3(von Willebrand factor A domain-containing protein 38 isoform X11) c4( ) c5(299672, 299673, 299674, 299675, 299676, 299677) c6( ) c7(cd); #c1(VWA5A) c2(NP_055437) c3(von Willebrand factor A domain-containing protein 5A isoform 1) c4(181132) c5( ) c6( ) c7(T, aW, Y, aT, ci, qN, an, cp); #c1(VWA5A) c2(NP_938057) c3(von Willebrand factor A domain-containing protein 5A isoform 2) c4( ) c5(259592, 259593, 259594, 259595, 259596, 259597, 259598, 259599, 259600, 259601, 259602, 259603, 259604, 259605, 259606, 259607) c6( ) c7(T, aW, Y, aT, ci, qN, an, cp); #c1(VWA5A) c2(XP_011541130) c3(von Willebrand factor A domain-containing protein 5A isoform X1) c4(339643, 339644) c5(339645, 339646, 339647, 339648, 339649, 339650, 339651, 339652, 339653, 339654) c6( ) c7(T, aW, Y, aT, ci, qN, an, cp); #c1(VWA5B1) c2(XP_011538989) c3(von Willebrand factor A domain-containing protein 581 isoform X1) c4(337032) c5(337033, 337034, 337035, 337036, 337037, 337038, 337039, 337040, 337041, 337042, 337043, 337044, 337045, 337046) c6(337047, 337048, 337049, 337050) c7(oe); #c1(VWA5B1) c2(XP_011538990) c3(von Willebrand factor A domain-containing protein 581 isoform X2) c4(337051) c5(337052, 337053, 337054, 337055, 337056, 337057, 337058, 337059) c6(337060, 337061) c7(oe); #c1(VWA5B1) c2(XP_011538996) c3(von Willebrand factor A domain-containing protein 581 isoform X7) c4(337062) c5(337063, 337064, 337065, 337066, 337067, 337068, 337069, 337070) c6(337071, 337072) c7(oe); #c1(VWA5B1) c2(XP_011539000) c3(von Willebrand factor A domain-containing protein 581 isoform X12) c4(337073) c5(337074, 337075, 337076, 337077, 337078, 337079, 337080, 337081) c6(337082, 337083) c7(oe); #c1(VWA7) c2(NP_079534) c3(von Willebrand factor A domain-containing protein 7 precursor) c4(218705, 218706, 218707) c5(218708, 218709, 218710, 218711, 218712, 218713, 218714, 218715, 218716, 218717, 218718, 218719, 218720, 218721, 218722, 218723, 218724, 218725, 218726, 218727, 218728, 218729, 218730, 218731, 218732, 218733, 218734, 218735, 218736, 218737, 218738, 218739, 218740, 218741, 218742, 218743, 218744, 218745, 218746, 218747, 218748, 218749, 218750, 218751, 218752, 218753, 218754, 218755, 218756, 218757, 218758, 218759, 218760, 218761, 218762, 218763, 218764, 218765, 218766, 218767, 218768, 218769, 218770, 218771, 218772, 218773) c6(218774, 218775, 218776, 218777, 218778, 218779, 218780, 218781, 218782, 218783, 218784, 218785, 218786, 218787, 218788, 218789, 218790, 218791, 218792, 218793) c7(V, A, af, eZ); #c1(VWA7) c2(XP_005249484) c3(von Willebrand factor A domain-containing protein 7 isoform X2) c4( ) c5(269498, 269499, 269500, 269501, 269502, 269503, 269504, 269505, 269506, 269507, 269508, 269509, 269510, 269511, 269512, 269513, 269514, 269515, 269516, 269517, 269518, 269519, 269520, 269521, 269522, 269523, 269524, 269525, 269526, 269527, 269528, 269529, 269530, 269531) c6(269532, 269533, 269534, 269535, 269536, 269537, 269538, 269539, 269540, 269541) c7(V, A, af, eZ); #c1(VWA7) c2(XP_005272961) c3(von Willebrand factor A domain-containing protein 7 isoform X2) c4(284282, 284283) c5( ) c6( ) c7(V, A, af, eZ); #c1(VWA8) c2(NP_001009814) c3(von Willebrand factor A domain-containing protein 8 isoform b precursor) c4(23701, 23702) c5(23703, 23704, 23705, 23706, 23707, 23708, 23709, 23710) c6(23711, 23712) c7(mU, mW, mZ, mS, mY, bK, uu, mV, fq, mT, bN, mX); #c1(VWA8) c2(NP_055873) c3(von Willebrand factor A domain-containing protein 8 isoform a precursor) c4(184071) c5(184072, 184073, 184074, 184075, 184076, 184077, 184078, 184079, 184080, 184081, 184082, 184083, 184084, 184085, 184086, 184087) c6(184088, 184089, 184090, 184091) c7(mU, mW, mZ, mS, mY, bK, uu, mV, fq, mT, bN, mX); #c1(VWCE) c2(NP_689931) c3(von Willebrand factor C and EGF domain-containing protein precursor) c4(244371) c5(244372, 244373, 244374, 244375, 244376, 244377, 244378, 244379) c6(244380, 244381) c7(hX, T, aF, B, aA); #c1(VWDE) c2(NP_001129396) c3(von Willebrand factor D and EGF domain-containing protein precursor) c4(51426, 51427) c5(51428, 51429, 51430, 51431, 51432, 51433, 51434, 51435, 51436, 51437, 51438, 51439, 51440, 51441, 51442) c6(51443, 51444) c7(ad); #c1(VWDE) c2(XP_005249698) c3(von Willebrand factor D and EGF domain-containing protein isoform X3) c4( ) c5(269792, 269793, 269794, 269795, 269796) c6( ) c7(ad); #c1(VWDE) c2(XP_011513477) c3(von Willebrand factor D and EGF domain-containing protein isoform X2) c4(305765) c5( ) c6( ) c7(ad); #c1(VWF) c2(NP_000543) c3(von Willebrand factor preproprotein) c4(12440, 12441, 12442) c5(12443, 12444, 12445, 12446, 12447, 12448, 12449, 12450, 12451, 12452, 12453, 12454, 12455, 12456, 12457, 12458, 12459, 12460, 12461, 12462, 12463, 12464, 12465, 12466, 12467, 12468, 12469, 12470, 12471, 12472, 12473, 12474, 12475, 12476, 12477, 12478, 12479, 12480, 12481, 12482, 12483, 12484, 12485, 12486, 12487, 12488, 12489, 12490, 12491, 12492, 12493, 12494, 12495, 12496, 12497, 12498, 12499, 12500, 12501, 12502, 12503, 12504, 12505, 12506, 12507, 12508, 12509, 12510, 12511, 12512, 12513, 12514, 12515, 12516, 12517, 12518, 12519, 12520, 12521, 12522, 12523, 12524, 12525, 12526, 12527, 12528, 12529, 12530, 12531, 12532, 12533, 12534, 12535, 12536, 12537, 12538, 12539, 12540, 12541, 12542, 12543, 12544, 12545, 12546, 12547, 12548, 12549, 12550, 12551, 12552, 12553, 12554, 12555, 12556, 12557, 12558, 12559, 12560, 12561, 12562, 12563, 12564, 12565, 12566, 12567, 12568, 12569, 12570, 12571, 12572, 12573, 12574, 12575, 12576, 12577, 12578, 12579, 12580, 12581, 12582, 12583, 12584, 12585, 12586, 12587, 12588) c6( ) c7(DS, UH, ahf, vf, ea, e, al, fo, ci, aY, tg, M, dV, vg, adB, K, DY, H, hH, hm, bgB, Bw, hl, vs, eF, uC, DL, y, xK, vy, pJ, P, dD, xu, pA, ZF, cUb, aw, oY, cQ, aj, cUf, cd, eh, ql, Cf, h, yZ, ey, aUH, vx, bpq, wC, A, sq, fe, aUP, aZf, op, ZL, se, Vy, vb, hR, gg, at, cUc, B, fl, L, bL, iH, bpt, aUI, mr, eR, cUe, wL, cz, cR, arw, v, j, C, bX, nS, J, DJ, Wn, DK, ry, cuq, dn, aT, cy, bK, bq, yj, qk, af, eu, cUg, Y, el, cUa, bCY, ac, aUJ, DW, AH, hr, fP, dy, jQ, bt, vi, sY, bgQ, CI, vr, uu, eq, bED, av, vJ, bpp, qh, qV, oW, Os, vc, aUE, vl, azS, UT, cH, vj, eH, kD, aUD, ant, bqz, bz, DI, eK, D, gk, DT, ag, IF, gZ, MJ, dX, aS, DQ, ei, IC, cUd, hv); #c1(WAPAL) c2(NP_055860) c3(wings apart-like protein homolog) c4(183954, 183955) c5(183956, 183957, 183958, 183959, 183960, 183961, 183962, 183963, 183964, 183965, 183966, 183967, 183968, 183969, 183970, 183971) c6( ) c7(T); #c1(WAPAL) c2(XP_011537849) c3(wings apart-like protein homolog isoform X1) c4( ) c5(335364, 335365, 335366, 335367, 335368, 335369, 335370, 335371, 335372, 335373) c6( ) c7(T); #c1(WARS) c2(XP_006720312) c3(tryptophan-tRNA ligase, cytoplasmic isoform X1) c4(293352, 293353, 293354, 293355, 293356, 293357, 293358, 293359, 293360, 293361, 293362, 293363, 293364, 293365, 293366, 293367, 293368, 293369, 293370, 293371, 293372, 293373, 293374) c5(293375, 293376, 293377, 293378, 293379, 293380, 293381, 293382, 293383, 293384, 293385, 293386, 293387, 293388, 293389, 293390, 293391, 293392, 293393, 293394, 293395, 293396, 293397, 293398, 293399, 293400, 293401, 293402, 293403, 293404, 293405, 293406, 293407, 293408, 293409, 293410, 293411, 293412, 293413, 293414, 293415, 293416, 293417, 293418, 293419, 293420, 293421, 293422, 293423, 293424, 293425, 293426, 293427, 293428, 293429, 293430, 293431, 293432, 293433, 293434, 293435, 293436, 293437, 293438, 293439, 293440, 293441, 293442, 293443, 293444, 293445, 293446, 293447, 293448, 293449, 293450, 293451, 293452, 293453, 293454, 293455, 293456, 293457, 293458, 293459, 293460, 293461, 293462, 293463, 293464, 293465, 293466, 293467, 293468, 293469, 293470, 293471, 293472, 293473, 293474, 293475, 293476, 293477, 293478, 293479, 293480, 293481, 293482, 293483, 293484, 293485, 293486, 293487, 293488, 293489, 293490, 293481, 293492, 293493, 293494, 293495, 293496) c6( ) c7(bL, T, eR, mr, bfY, aw, ha, fN, cz, jh, ti, aj, v, jE, ci, nS, aY, XM, q, adb, J, hX, x, agd, cc, aE, aT, hD, jy, vc, hn, adm, K, A, ff, r, dq, yq, en, qa, Wt, ou, BU, HN, mg, cj, avl, k, ei, dl, XN, adh, abh); #c1(WARS) c2(XP_011535439) c3(tryptophan-tRNA ligase, cytoplasmic isoform X2) c4( ) c5(332468, 332469, 332470, 332471, 332472, 332473, 332474, 332475, 332476, 332477, 332478, 332479, 332480, 332481, 332482, 332483, 332484, 332485, 332486, 332487, 332488, 332489, 332490, 332491, 332492, 332493, 332494, 332495, 332496, 332497, 332498, 332499, 332500, 332501, 332502, 332503) c6( ) c7(bL, T, eR, mr, bfY, aw, ha, fN, cz, jh, ti, aj, v, jE, ci, nS, aY, XM, q, adb, J, hX, x, agd, cc, aE, aT, hD, jy, vc, hn, adm, K, A, ff, r, dq, yq, en, qa, Wt, ou, BU, HN, mg, cj, avl, k, ei, dl, XN, adh, abh); #c1(WARS2) c2(XP_011538796) c3(tryptophan-tRNA ligase, mitochondrial isoform X2) c4( ) c5(336543) c6( ) c7(hD, dq, aw, aE); #c1(WAS) c2(NP_000368) c3(wiskott-Aldrich syndrome protein) c4(8192) c5(8193, 8194, 8195, 8196, 8197, 8198) c6( ) c7(gV, T, dA, bs, bB, eh, afK, v, ai, br, eA, ds, aT, h, By, DU, ji, d, lx, hG, Cw, aW, oV, yL, fO, bys, asK, CF, gl, fe, aGd, cOi, BG, eE, cm, jb, bw, ok, bQI, dB, bE, cUh, wR, zA, B); #c1(WAS) c2(XP_011542279) c3(wiskott-Aldrich syndrome protein isoform X1) c4(340881) c5(340882, 340883, 340884, 340885, 340886, 340887) c6( ) c7(gV, T, dA, bs, bB, eh, afK, v, ai, br, eA, ds, aT, h, By, DU, ji, d, lx, hG, Cw, aW, oV, yL, fO, bys, asK, CF, gl, fe, aGd, cOi, BG, eE, cm, jb, bw, ok, bQI, dB, bE, cUh, wR, zA, 8); #c1(WASF1) c2(NP_001020106) c3(wiskott-Aldrich syndrome protein family member 1) c4(28146, 28147, 28148, 28149) c5(28150, 28151, 28152, 28153, 28154, 28155, 28156, 28157, 28158, 28159, 28160, 28161, 28162, 28163, 28164, 28165, 28166, 28167, 28168, 28169, 28170, 28171) c6( ) c7(bv, T, sO, aW, bO, aT, r, cz, By, gf, bK, aj, nA, v, BG, he, ae, q, J, ad, aHY); #c1(WASF1) c2(XP_011534537) c3(wiskott-Aldrich syndrome protein family member 1 isoform X2) c4( ) c5(331059, 331060, 331061, 331062, 331063, 331064, 331065, 331066, 331067, 331068, 331069, 331070, 331071, 331072, 331073, 331074, 331075, 331076, 331077, 331078, 331079, 331080, 331081, 331082, 331083, 331084) c6( ) c7(bv, T, sO, aW, bO, aT, r, cz, By, gf, bK, aj, nA, v, BG, he, ae, q, J, ad, aHY); #c1(WASF3) c2(NP_001278894) c3(wiskott-Aldrich syndrome protein family member 3 isoform 2) c4(110836) c5(110837, 110838, 110839, 110840, 110841, 110842) c6( ) c7(T, aw, bO, cz, aj, v, q, J, ad, Tg, ds, aqI, aT, K, ae, CL, aW, r, BG, cm, fq, op, kP, vA, im); #c1(WASF3) c2(NP_006637) c3(wiskott-Aldrich syndrome protein family member 3 isoform 1) c4(166819) c5(166820, 166821, 166822, 166823, 166824, 166825, 166826) c6( ) c7(T, aw, bO, cz, aj, v, q, J, ad, Tg, ds, aqI, aT, K, ae, CL, aW, r, BG, cm, fq, op, kP, vA, im); #c1(WASH1) c2(XP_011515960) c3(WAS protein family homolog 1 isoform X2) c4( ) c5(309093) c6( ) c7(T, cA, uJ); #c1(WASH1) c2(XP_011515962) c3(WAS protein family homolog 1 isoform X4) c4(309094) c5( ) c6( ) c7(T, cA, uJ); #c1(WASH1) c2(XP_011515966) c3(WAS protein family homolog 1 isoform X7) c4(309095, 309096) c5(309097, 309098, 309099, 309100, 309101, 309102, 309103, 309104, 309105, 309106, 309107, 309108) c6( ) c7(T, cA, uJ); #c1(WASH1) c2(XP_011515967) c3(WAS protein family homolog 1 isoform X8) c4(309109, 309110) c5(309111, 309112, 309113, 309114, 309115, 309116, 309117, 309118, 309119, 309120, 309121, 309122) c6( ) c7(T, cA, uJ); #c1(WASH1) c2(XP_011515968) c3(WAS protein family homolog 1 isoform X9) c4( ) c5(309123, 309124, 309125, 309126, 309127) c6( ) c7(T, cA, uJ); #c1(WASL) c2(NP_003932) c3(neural Wiskott-Aldrich syndrome protein) c4(142275, 142276) c5(142277, 142278, 142279, 142280, 142281, 142282, 142283, 142284, 142285, 142286, 142287, 142288) c6( ) c7(aW, ha, r, aT, vH, By, ah, BF, eA, BG, q); #c1(WBP1L) c2(NP_001077382) c3(WW domain binding protein 1-like isoform 1 precursor) c4(37809) c5(37810, 37811, 37812, 37813, 37814, 37815) c6( ) c7(x, hF, k); #c1(WBP1L) c2(NP_060257) c3(WW domain binding protein 1-like isoform 2) c4(195095) c5(195096, 195097, 195098, 195099, 195100, 195101) c6( ) c7(x, hF, k); #c1(WBP2) c2(NP_036610) c3(WW domain-binding protein 2) c4(174802, 174803, 174804, 174805) c5(174806, 174807, 174808, 174809, 174810, 174811, 174812, 174813, 174814, 174815, 174816, 174817, 174818) c6( ) c7(aW, aT); #c1(WBP2) c2(XP_011522881) c3(WW domain-binding protein 2 isoform X1) c4( ) c5(317355, 317356, 317357, 317358, 317359) c6( ) c7(aW, aT); #c1(WBP2) c2(XP_011522882) c3(WW domain-binding protein 2 isoform X2) c4(317360) c5(317361, 317362, 317363, 317364, 317365, 317366, 317367, 317368, 317369, 317370, 317371, 317372) c6( ) c7(aW, aT); #c1(WBSCR17) c2(NP_071924) c3(putative polypeptide N-acetylgalactosaminyltransferase-like protein 3) c4(212336) c5(212337, 212338, 212339, 212340, 212341, 212342) c6( ) c7(af); #c1(WBSCR22) c2(NP_001189489) c3(probable IBS rRNA (guanine-N(7))-methyltransferase isoform 1) c4(80257) c5(80258, 80259, 80260, 80261, 80262, 80263) c6( ) c7(T, alC, fD, aa); #c1(WBSCR22) c2(NP_059998) c3(probable IBS rRNA (guanine-N(7))-methyltransferase isoform 2) c4(193600) c5(193601, 193602, 193603, 193604, 193605, 193606) c6( ) c7(T, alC, fD, aa); #c1(WBSCR22) c2(XP_006715910) c3(probable IBS rRNA (guanine-N(7))-methyltransferase isoform X1) c4(289937) c5( ) c6( ) c7(T, alC, fD, aa); #c1(WBSCR22) c2(XP_011514080) c3(probable IBS rRNA (guanine-N(7))-methyltransferase isoform X2) c4( ) c5(306691, 306692, 306693, 306694, 306695, 306696) c6( ) c7(T, alC, fD, aa); #c1(WDFY2) c2(NP_443182) c3(WD repeat and FYVE domain-containing protein 2) c4(229747) c5(229748, 229749, 229750, 229751, 229752, 229753) c6( ) c7(T, m); #c1(WDFY4) c2(NP_065996) c3(WD repeat- and FYVE domain-containing protein 4) c4(206655, 206656, 206657, 206658, 206659) c5(206660, 206661, 206662, 206663, 206664, 206665, 206666, 206667, 206668, 206669, 206670, 206671, 206672, 206673, 206674, 206675, 206676, 206677, 206678, 206679, 206680, 206681, 206682, 206683, 206684, 206685, 206686, 206687, 206688, 206689, 206690, 206691, 206692, 206693, 206694, 206695, 206696, 206697, 206698, 206699, 206700) c6( ) c7(hH, fq, dL, eZ); #c1(WDFY4) c2(XP_011538293) c3(WD repeat- and FYVE domain-containing protein 4 isoform X5) c4(335953, 335954) c5(335955, 335956, 335957, 335958, 335959, 335960) c6( ) c7(hH, fq, dL, eZ); #c1(WDFY4) c2(XP_011538294) c3(WD repeat- and FYVE domain-containing protein 4 isoform X6) c4(335961, 335962) c5(335963, 335964, 335965, 335966, 335967, 335968, 335969) c6( ) c7(hH, fq, dL, eZ); #c1(WDHD1) c2(NP_001008397) c3(WD repeat and HMG-box DNA-binding protein 1 isoform 2) c4(23153, 23154) c5(23155, 23156, 23157, 23158, 23159, 23160, 23161, 23162, 23163, 23164) c6( ) c7(T, dD, eR, ea, hU, e, bO, cz, bB, n, aj, wo, afE, j, eq, asF, VV, eh, q, J, ad, aMB, fU, aCY, F, hd, tL, rw, gd, aT, h, K, aFm, ae, eL, qE, DA, A, aW, Y, ff, az, eH, r, gl, en, eF, t, bz, uP, qJ, bE, dO, afd, cBv, wR, azg, m, R, bC, bt, B); #c1(WDHD1) c2(NP_009017) c3(WD repeat and HMG-box DNA-binding protein 1 isoform 1) c4(170281) c5(170282, 170283, 170284, 170285, 170286, 170287, 170288) c6( ) c7(T, dD, eR, ea, hU, e, bO, cz, bB, n, aj, wo, afE, j, eq, asF, VV, eh, q, J, ad, aMB, fU, aCY, F, hd, tL, rw, gd, aT, h, K, aFm, ae, eL, qE, DA, A, aW, Y, ff, az, eH, r, gl, en, eF, t, bz, uP, qJ, bE, dO, afd, cBv, wR, azg, m, R, bC, bt, B); #c1(WDHD1) c2(XP_006720075) c3(WD repeat and HMG-box DNA-binding protein 1 isoform X1) c4(293196) c5(293197, 293198, 293199, 293200, 293201, 293202, 293203) c6( ) c7(T, dD, eR, ea, hU, e, bO, cz, bB, n, aj, wo, afE, j, eq, asF, VV, eh, q, J, ad, aMB, fU, aCY, F, hd, tL, rw, gd, aT, h, K, aFm, ae, eL, qE, DA, A, aW, Y, ff, az, eH, r, gl, en, eF, t, bz, uP, qJ, bE, dO, afd, cBv, wR, azg, m, R, bC, bt, B); #c1(WDPCP) c2(NP_056994) c3(WD repeat-containing and planar cell polarity effector protein fritz homolog isoform 2) c4(188376) c5(188377, 188378, 188379, 188380, 188381, 188382) c6( ) c7(wL, cUi, Tp); #c1(WDR1) c2(NP_005103) c3(WD repeat-containing protein 1 isoform 2) c4(152888, 152889) c5(152890, 152891, 152892, 152893, 152894, 152895, 152896, 152897, 152898, 152899, 152900, 152901, 152902, 152903, 152904) c6( ) c7(Na, nn, nB, ea, Y, Ox, h, DU, bz, bA); #c1(WDR1) c2(NP_059830) c3(WD repeat-containing protein 1 isoform 1) c4(193385) c5(193386, 193387, 193388, 193389, 193390, 193391, 193392, 193393, 193394, 193395) c6( ) c7(Na, nn, nB, ea, Y, Ox, h, DU, bz, bA); #c1(WDR1) c2(XP_006714051) c3(WD repeat-containing protein 1 isoform X1) c4(287518) c5(287519, 287520, 287521, 287522, 287523, 287524, 287525) c6( ) c7(Na, nn, nB, ea, Y, Ox, h, DU, bz, bA); #c1(WDR11) c2(NP_060587) c3(WD repeat-containing protein 11) c4(196692) c5(196693, 196694, 196695, 196696, 196697, 196698) c6( ) c7(bM, T, jx, bwS, bcE, j, pd, eA, yn, aoH, NF, hD, be, bHF, iU, hI, cUj, aF, Vk, pb, OW, nM, Lj, cj, UF, y, IB, hv); #c1(WDR12) c2(NP_060726) c3(ribosome biogenesis protein WDR12) c4(197482) c5(197483, 197484, 197485, 197486, 197487, 197488) c6( ) c7(aw, j); #c1(WDR17) c2(NP_733828) c3(WD repeat-containing protein 17 isoform 1) c4(247192, 247193) c5(247194, 247195, 247196, 247197, 247198, 247199, 247200, 247201, 247202, 247203, 247204, 247205, 247206, 247207, 247208, 247209, 247210) c6( ) c7(aq); #c1(WDR17) c2(NP_851782) c3(WD repeat-containing protein 17 isoform 2) c4(254593) c5( ) c6( ) c7(aq); #c1(WDR17) c2(XP_011529883) c3(WD repeat-containing protein 17 isoform X1) c4( ) c5(325649, 325650, 325651, 325652, 325653, 325654, 325655) c6( ) c7(aq); #c1(WDR17) c2(XP_011529885) c3(WD repeat-containing protein 17 isoform X2) c4(325656) c5( ) c6( ) c7(aq); #c1(WDR19) c2(NP_079408) c3(WD repeat-containing protein 19) c4(217967, 217968, 217969) c5(217970, 217971, 217972, 217973, 217974, 217975, 217976, 217977, 217978, 217979, 217980, 217981, 217982, 217983, 217984, 217985, 217986, 217987, 217988, 217989, 217990, 217991, 217992, 217993) c6( ) c7(T, cUk, vT, cUm, bOx, fP, h, cUI, n, vm, yq, XU, fd, Vz, Sp, nC, ae, af, ad, aY, uQ); #c1(WDR20) c2(NP_001229344) c3(WD repeat-containing protein 20 isoform 5) c4(84254) c5(84255, 84256, 84257, 84258, 84259, 84260) c6( ) c7(T, ht, ml, amj, v, j, rc, q, bv, jz, xW, hu, bfS, yo, BO, NS, vT, LO, r, f, bF, bE, agI, Xu, B); #c1(WDR20) c2(NP_001229345) c3(WD repeat-containing protein 20 isoform 6) c4(84261, 84262) c5( ) c6( ) c7(T, ht, ml, amj, v, j, rc, q, bv, jz, xW, hu, bfS, yo, BO, ND, vT, LO, r, f, bF, bE, agI, Xu, B); #c1(WDR20) c2(NP_001229346) c3(WD repeat-containing protein 20 isoform 7) c4(84263, 84264) c5(84265, 84266, 84267, 84268, 84269, 84270) c6( ) c7(T, ht, ml, amj, v, j, rc, q, bv, jz, xW, hu, bfS, yo, BO, ND, vT, LO, r, f, bF, bE, agI, Xu, B); #c1(WDR20) c2(NP_001229347) c3(WD repeat-containing protein 20 isoform 8) c4(84271) c5(84272) c6( ) c7(T, ht, ml, amj, v, j, rc, q, bv, jz, xW, hu, bfS, yo, BO, ND, vT, LO, r, f, bF, bE, agI, Xu, B); #c1(WDR20) c2(NP_653175) c3(WD repeat-containing protein 20 isoform 2) c4(238944) c5(238945, 238946, 238947, 238948, 238949, 238950) c6( ) c7(T, ht, ml, amj, v, j, rc, q, bv, jz, xW, hu, bfS, yo, BO, ND, vT, LO, r, f, bF, bE, agI, Xu, B); #c1(WDR20) c2(NP_851808) c3(WD repeat-containing protein 20 isoform 1) c4(254594) c5(254595, 254596, 254597, 254598, 254599, 254600) c6( ) c7(T, ht, ml, amj, v, j, rc, q, bv, jz, xW, hu, bfS, yo, BO, ND, vT, LO, r, f, bF, bE, agI, Xu, B); #c1(WDR20) c2(NP_851825) c3(WD repeat-containing protein 20 isoform 3) c4(254615) c5(254616, 254617, 254618, 254619, 254620, 254621, 254622, 254623, 254624, 254625, 254626, 254627, 254628, 254629, 254630, 254631, 254632, 254633, 254634, 254635, 254636, 254637, 254638, 254639, 254640, 254641, 254642, 254643, 254644) c6( ) c7(T, ht, ml, amj, v, j, rc, q, bv, jz, xW, hu, bfS, yo, BO, ND, vT, LO, r, f, bF, bE, agI, Xu, B); #c1(WDR20) c2(XP_011535647) c3(WD repeat-containing protein 20 isoform X13) c4(332896) c5(332897, 332898, 332899, 332900, 332901, 332902) c6( ) c7(T, ht, ml, amj, v, j, rc, q, bv, jz, xW, hu, bfS, yo, BO, ND, vT, LO, r, f, bF, bE, agI, Xu, B); #c1(WDR26) c2(NP_001108585) c3(WD repeat-containing protein 26 isoform b) c4(43258) c5(43259) c6( ) c7(Y, uR, cU, wq, BF, K); #c1(WDR26) c2(NP_079436) c3(WD repeat-containing protein 26 isoform a) c4(218137, 218138) c5(218139, 218140, 218141, 218142, 218143, 218144, 218145, 218146, 218147, 218148, 218149, 218150) c6( ) c7(Y, uR, cU, wq, BF, K); #c1(WDR26) c2(XP_006711880) c3(WD repeat-containing protein 26 isoform X1) c4(286276) c5( ) c6( ) c7(Y, uR, cU, wq, BF, K); #c1(WDR26) c2(XP_011542582) c3(WD repeat-containing protein 26 isoform X3) c4( ) c5(341143, 341144, 341145, 341146, 341147) c6( ) c7(Y, uR, cU, wq, BF, K); #c1(WDR26) c2(XP_011542584) c3(WD repeat-containing protein 26 isoform X5) c4( ) c5(341148, 341149, 341150, 341151, 341152, 341153) c6( ) c7(Y, uR, cU, wq, BF, K); #c1(WDR31) c2(NP_001012361) c3(WD repeat-containing protein 31 isoform 1) c4(24904) c5(24905, 24906, 24907, 24908, 24909, 24910) c6( ) c7(aw, eu, e, j, ac); #c1(WDR31) c2(NP_660284) c3(WD repeat-containing protein 31 isoform 3) c4(240634, 240635) c5(240636, 240637, 240638, 240639, 240640, 240641, 240642) c6( ) c7(aw, eu, e, j, ac); #c1(WDR34) c2(NP_443076) c3(WD repeat-containing protein 34) c4(229276) c5(229277, 229278, 229279, 229280, 229281, 229282, 229283) c6( ) c7(bjc, cUn, bt, jj, bja); #c1(WDR34) c2(XP_011517481) c3(WD repeat-containing protein 34 isoform X1) c4(311219, 311220) c5(311221, 311222, 311223, 311224, 311225, 311226, 311227, 311228, 311229, 311230, 311231) c6( ) c7(bjc, cUn, bt, jj, bja); #c1(WDR35) c2(NP_001006658) c3(WD repeat-containing protein 35 isoform 1) c4(22331) c5(22332, 22333, 22334, 22335, 22336, 22337) c6( ) c7(gk, T, cUo, bOx, aI, zG, cUp, atL); #c1(WDR35) c2(NP_065830) c3(WD repeat-containing protein 35 isoform 2) c4(205720) c5(205721, 205722, 205723, 205724, 205725, 205726, 205727) c6( ) c7(gk, T, cUo, bOx, aI, zG, cUp, atL); #c1(WDR35) c2(XP_011531309) c3(WD repeat-containing protein 35 isoform X1) c4(327306) c5(327307, 327308, 327309, 327310, 327311) c6( ) c7(gk, T, cUo, bOx, aI, zG, cUp, atL); #c1(WDR36) c2(NP_644810) c3(WD repeat-containing protein 36) c4(238565) c5(238566, 238567, 238568, 238569, 238570, 238571, 238572, 238573, 238574, 238575) c6( ) c7(HQ, bM, akc, pZ, dH, z, aw, v, cUq, K, dw, IJ); #c1(WDR37) c2(NP_054742) c3(WD repeat-containing protein 37) c4(177527, 177528, 177529) c5(177530, 177531, 177532, 177533, 177534, 177535, 177536, 177537, 177538, 177539, 177540, 177541, 177542, 177543, 177544, 177545, 177546, 177547, 177548, 177549, 177550, 177551) c6( ) c7(eR, dy, ac, cF); #c1(WDR4) c2(NP_387510) c3(tRNA (guanine-N(7)-)-methyltransferase non-catalytic subunit WDR4 isoform 1) c4(229013) c5(229014, 229015, 229016, 229017, 229018, 229019, 229020, 229021, 229022, 229023) c6( ) c7(cz); #c1(WDR43) c2(NP_055946) c3(WD repeat-containing protein 43) c4(184602) c5(184603, 184604, 184605, 184606, 184607, 184608) c6( ) c7(Xg); #c1(WDR45) c2(NP_001025067) c3(WD repeat domain phosphoinositide-interacting protein 4 isoform 2) c4(29299, 29300, 29301) c5(29302, 29303, 29304, 29305, 29306, 29307, 29308, 29309, 29310, 29311, 29312, 29313, 29314, 29315, 29316, 29317, 29318, 29319, 29320, 29321, 29322, 29323, 29324, 29325, 29326, 29327, 29328, 29329, 29330, 29331) c6( ) c7(aU, axa, cUr, nA); #c1(WDR45) c2(NP_009006) c3(WD repeat domain phosphoinositide-interacting protein 4 isoform 1) c4(170198, 170199, 170200) c5(170201, 170202, 170203, 170204, 170205, 170206, 170207, 170208, 170209, 170210, 170211, 170212, 170213) c6( ) c7(aU, axa, cUr, nA); #c1(WDR458) c2(NP_062559) c3(WD repeat domain phosphoinositide-interacting protein 3) c4(201950, 201951) c5(201952, 201953, 201954, 201955, 201956, 201957, 201958, 201959, 201960, 201961, 201962, 201963, 201964) c6( ) c7(nA); #c1(WDR46) c2(NP_005443) c3(WD repeat-containing protein 46 isoform 1) c4(156214, 156215, 156216, 156217, 156218, 156219) c5(156220, 156221, 156222, 156223, 156224, 156225, 156226, 156227, 156228, 156229, 156230, 156231, 156232, 156233, 156234, 156235, 156236, 156237, 156238, 156239, 156240, 156241, 156242, 156243, 156244, 156245, 156246, 156247, 156248, 156249, 156250, 156251, 156252, 156253, 156254, 156255, 156256, 156257, 156258, 156259, 156260, 156261, 156262, 156263, 156264, 156265, 156266, 156267, 156268) c6( ) c7(Y, eZ, aA); #c1(WDR48) c2(NP_001290331) c3(WD repeat-containing protein 48 isoform 2) c4(115178, 115179, 115180) c5(11181, 115182, 115183, 115184, 115185, 115186, 115187, 115188, 115189, 115190, 115191, 115192, 115193, 115194, 115195, 115196, 115197) c6( ) c7(os, XE, eH, jh, r, oZ, eF, nJ); #c1(WDR48) c2(NP_001290332) c3(WD repeat-containing protein 48 isoform 3) c4( ) c5(115198) c6( ) c7(os, XE, eH, jh, r, oZ, eF, nJ); #c1(WDR48) c2(NP_065890) c3(WD repeat-containing protein 48 isoform 1) c4(206079) c5(206080, 206081, 206082, 206083, 206084, 206085) c6( ) c7(os, XE, eH, jh, r, oZ, eF, nJ); #c1(WDR49) c2(NP_849146) c3(WD repeat-containing protein 49) c4(254280, 254281) c5(254282, 254283, 254284, 254285, 254286, 254287, 254288, 254289, 254290, 254291, 254292, 254293) c6( ) c7(j); #c1(WDR5) c2(XP_005272220) c3(WD repeat-containing protein 5 isoform X1) c4(283775) c5(283776, 283777, 283778, 283779, 283780, 283781, 283782, 283783, 283784, 283785) c6( ) c7(aW, ae, ad, aT); #c1(WDR55) c2(XP_005268526) c3(WD repeat-containing protein 55 isoform X1) c4(281876) c5(281877, 281878, 281879, 281880, 281881, 281882) c6( ) c7(aw, eu, e, j, ac); #c1(WDR60) c2(NP_060521) c3(WD repeat-containing protein 60) c4(196349) c5(196350, 196351, 196352, 196353, 196354, 196355) c6( ) c7(zG, cUs); #c1(WDR62) c2(NP_001077430) c3(WD repeat-containing protein 62 isoform 1) c4(37859, 37860, 37861) c5(37862, 37863, 37864, 37865, 37866, 37867) c6( ) c7(T, aii, afy, cUu, FB, aA, aF, nA, QK, cUt, aij); #c1(WDR62) c2(NP_775907) c3(WD repeat-containing protein 62 isoform 2) c4(250656) c5(250657, 250658, 250659, 250660, 250661, 250662) c6( ) c7(T, aii, afy, cUu, FB, aA, aF, nA, QK, cUt, aij); #c1(WDR62) c2(XP_005258866) c3(WD repeat-containing protein 62 isoform X2) c4(275837) c5( ) c6( ) c7(T, aii, afy, cUu, FB, aA, aF, nA, QK, cUt, aij); #c1(WDR62) c2(XP_011525140) c3(WD repeat-containing protein 62 isoform X3) c4( ) c5(319579, 319580, 319581, 319582, 319583, 319584, 319585, 319586, 319587, 319588, 319589, 319590, 319591, 319592, 319593, 319594, 319595, 319596) c6( ) c7(T, aii, afy, cUu, FB, aA, aF, nA, QK, cUt, aij); #c1(WDR64) c2(NP_653226) c3(WD repeat-containing protein 64) c4(239192, 239193) c5(239194, 239195, 239196, 239197, 239198, 239199, 239200, 239201, 239202, 239203, 239204, 239205) c6( ) c7(V); #c1(WDR66) c2(NP_001171474) c3(WD repeat-containing protein 66 isoform 2) c4(70239) c5(70240, 70241, 70242, 70243, 70244, 70245) c6( ) c7(en, it, ff, afW); #c1(WDR66) c2(NP_653269) c3(WD repeat-containing protein 66 isoform 1) c4(239432) c5(239433, 239434, 239435, 239436, 239437, 239438) c6( ) c7(en, it, ff, afW); #c1(WDR7) c2(NP_056100) c3(WD repeat-containing protein 7 isoform 1) c4(185699) c5(185700, 185701, 185702, 185703, 185704, 185705, 185706, 185707, 185708, 185709, 185710, 185711) c6( ) c7(V, pN); #c1(WDR7) c2(NP_443066) c3(WD repeat-containing protein 7 isoform 2) c4(229187) c5(229188, 229189, 229190, 229191, 229192, 229193, 229194, 229195, 229196, 229197) c6( ) c7(V, pN); #c1(WDR7) c2(XP_005266731) c3(WD repeat-containing protein 7 isoform X3) c4(280289) c5( ) c6( ) c7(V, pN); #c1(WDR70) c2(NP_060504) c3(WD repeat-containing protein 70) c4(196281) c5(196282, 196283, 196284, 196285, 196286, 196287) c6( ) c7(hb); #c1(WDR72) c2(XP_011519737) c3(WD repeat-containing protein 72 isoform X1) c4(314406, 314407, 314408) c5(314409, 314410, 314411, 314412, 314413, 314414, 314415, 314416, 314417, 314418, 314419, 314420, 314421, 314422, 314423, 314424, 314425, 314426, 314427, 314428, 314429, 314430) c6( ) c7(eR, Ud, A, cUv, ac); #c1(WDR74) c2(NP_060563) c3(WD repeat-containing protein 74) c4(196576, 196577, 196578) c5(196579, 196580, 196581, 196582, 196583, 196584, 196585, 196586, 196587, 196588, 196589, 196590, 196591, 196592) c6( ) c7(Y); #c1(WDR76) c2(NP_079184) c3(WD repeat-containing protein 76 isoform 1) c4(217339, 217340) c5(217341, 217342, 217343, 217344, 217345, 217346, 217347) c6( ) c7(q, CT, r); #c1(WDR76) c2(XP_005254737) c3(WD repeat-containing protein 76 isoform X1) c4( ) c5(273304, 273305, 273306, 273307, 273308) c6( ) c7(q, CT, r); #c1(WDR78) c2(XP_011540464) c3(WD repeat-containing protein 78 isoform X2) c4(338933) c5(338934, 338935, 338936, 338937, 338938, 338939) c6( ) c7(cj); #c1(WDR81) c2(NP_001157145) c3(WD repeat-containing protein 81 isoform 3) c4(62068, 62069) c5(62070, 62071, 62072, 62073, 62074, 62075) c6( ) c7(Sv, cUw, ky, adI); #c1(WDR81) c2(NP_001157281) c3(WD repeat-containing protein 81 isoform 1) c4(62134) c5(62135, 62136, 62137, 62138, 62139, 62140, 62141) c6( ) c7(Sv, cUw, ky, adI); #c1(WDR81) c2(XP_011521953) c3(WD repeat-containing protein 81 isoform X1) c4(316652, 316653, 316654) c5(316655, 316656, 316657, 316658, 316659, 316660, 316661, 316662, 316663, 316664, 316665, 316666, 316667, 316668, 316669, 316670, 316671, 316672, 316673, 316674, 316675, 316676, 316677) c6( ) c7(Sv, cUw, ky, adI); #c1(WDR83) c2(NP_115708) c3(WD repeat domain-containing protein 83) c4(223669) c5(223670, 223671, 223672, 223673, 223674, 223675, 223676, 223677, 223678, 223679) c6( ) c7(T, aF, aA); #c1(WDR86) c2(NP_001271190) c3(WD repeat-containing protein 86 isoform 3) c4( ) c5(103545, 103546, 103547, 103548, 103549) c6( ) c7(j); #c1(WDR86) c2(NP_938026) c3(WD repeat-containing protein 86 isoform 2) c4(259555) c5(259556, 259557, 259558, 259559, 259560, 259561) c6( ) c7(j); #c1(WDR86) c2(XP_005250046) c3(WD repeat-containing protein 86 isoform X4) c4(270059) c5(270060) c6( ) c7(j); #c1(WDR93) c2(NP_001271324) c3(WD repeat-containing protein 93 isoform 2) c4(103897) c5(103898, 103899, 103900, 103901, 103902, 103903) c6( ) c7(c); #c1(WDR93) c2(NP_064597) c3(WD repeat-containing protein 93 isoform 1) c4(203210) c5(203211, 203212, 203213, 203214, 203215, 203216) c6( ) c7(c); #c1(WEE1) c2(NP_001137448) c3(wee1-like protein kinase isoform 2) c4(55779) c5(55780, 55781, 55782, 55783, 55784) c6( ) c7(jf, T, yo, d, kP, eM, aW, Y, eH, aT, hR, n, K, eA, eF, cm, B, cp); #c1(WEE1) c2(NP_003381) c3(wee1-like protein kinase isoform 1) c4(138059) c5(138060, 138061, 138062, 138063, 138064, 138065, 138066) c6( ) c7(jf, T, yo, d, kP, eM, aW, Y, eH, aT, hR, n, K, eA, eF, cm, B, cp); #c1(WFDC1) c2(NP_001269395) c3(WAP four-disulfide core domain protein 1 isoform 1 precursor) c4(101561) c5(101562, 101563, 101564, 101565, 101566, 101567) c6( ) c7(T, eG, arH, Y, h, y, ae, ad, cp); #c1(WFDC2) c2(XP_011526797) c3(WAP four-disulfide core domain protein 2 isoform X1) c4(321075, 321076, 321077, 321078, 321079, 321080, 321081, 321082) c5(321083, 321084, 321085, 321086, 321087, 321088, 321089, 321090, 321091, 321092, 321093, 321094, 321095, 321096, 321097) c6(321098, 321099, 321100) c7(T, hL, oH, ci, m, cl, t, ad); #c1(WFS1) c2(NP_001139325) c3(wolframin) c4(59176, 59177) c5(59178, 59179, 59180, 59181, 59182, 59183, 59184, 59185, 59186, 59187, 59188, 59189, 59190, 59191, 59192, 59193) c6( ) c7(bL, tJ, aZ, Hm, aOH, bO, mS, aj, bS, dG, ct, v, aOG, aR, aqs, J, axC, av, mj, adG, mW, h, jy, bK, K, vd, an, mY, mV, he, mU, A, adF, Mz, cUA, Z, kC, mZ, bN, bCJ, mX, cA, cUy, mG, cUz, U, mg, Ei, awK, mf, ei, cUx, Bh, mT); #c1(WHSC1) c2(NP_015627) c3(histone-lysine N-methyltransferase NSD2 isoform 4) c4(171905, 171906, 171907, 171908) c5(171909, 171910, 171911, 171912, 171913, 171914, 171915, 171916, 171917, 171918, 171919, 171920, 171921, 171922, 171923, 171924, 171925, 171926, 171927, 171928, 171929, 171930, 171931, 171932, 171933, 171934, 171935, 171936, 171937) c6( ) c7(ck, ae, T, dP, x, aW, aOH, aT, fd, aeu, Ko, k, bz, ad, axC); #c1(WHSC1) c2(NP_579878) c3(histone-lysine N-methyltransferase NSD2 isoform 1) c4(234683) c5(234684, 234685, 234686, 234687, 234688, 234689, 234690, 234691, 234692, 234693, 234694, 234695, 234696, 234697, 234698, 234699, 234700, 234701, 234702, 234703, 234704, 234705, 234706) c6( ) c7(ck, ae, T, dP, x, aW, aOH, aT, fd, aeu, Ko, k, bz, ad, axC); #c1(WHSC1) c2(XP_006713977) c3(histone-lysine N-methyltransferase NSD2 isoform X1) c4(287476, 287477) c5(287478, 287479, 287480, 287481, 287482, 287483, 287484, 287485, 287486, 287487) c6( ) c7(ck, ae, T, dP, x, aW, aOH, aT, fd, aeu, Ko, k, bz, ad, axC); #c1(WHSC1) c2(XP_011511861) c3(histone-lysine N-methyltransferase NSD2 isoform X4) c4(302587) c5(302588, 302589, 302590, 302591, 302592, 302593) c6( ) c7(ck, ae, T, dP, x, aW, aOH, aT, fd, aeu, Ko, k, bz, ad, axC); #c1(WHSC1) c2(XP_011511862) c3(histone-lysine N-methyltransferase NSD2 isoform X5) c4( ) c5(302594) c6( ) c7(ck, ae, T, dP, x, aW, aOH, aT, fd, aeu, Ko, k, bz, ad, axC); #c1(WHSC1L1) c2(NP_060248) c3(histone-lysine N-methyltransferase NSD3 isoform short) c4(195007, 195008) c5(195009, 195010, 195011, 195012, 195013, 195014, 195015, 195016, 195017, 195018, 195019, 195020, 195021, 195022) c6( ) c7(av, T, ft, eM, aW, eL, aT, fd, aq, kp, bt, bz, eJ); #c1(WHSC1L1) c2(NP_075447) c3(histone-lysine N-methyltransferase NSD3 isoform long) c4(213866, 213867, 213868) c5(213869, 213870, 213871, 213872, 213873, 213874, 213875, 213876, 213877, 213878, 213879, 213880) c6( ) c7(av, T, ft, eM, aW, eL, aT, fd, aq, kp, bt, bz, eJ); #c1(WHSC1L1) c2(XP_005273604) c3(histone-lysine N-methyltransferase NSD3 isoform X3) c4(284707) c5(284708, 284709, 284710, 284711, 284712, 284713) c6( ) c7(av, T, ft, eM, aW, eL, aT, fd, aq, kp, bt, bz, eJ); #c1(WHSC1L1) c2(XP_005273605) c3(histone-lysine N-methyltransferase NSD3 isoform X4) c4(284714) c5(284715, 284716, 284717, 284718, 284719, 284720) c6( ) c7(av, T, ft, eM, aW, eL, aT, fd, aq, kp, bt, bz, eJ); #c1(WHSC1L1) c2(XP_011542864) c3(histone-lysine N-methyltransferase NSD3 isoform X1) c4(341474) c5(341475, 341476, 341477, 341478, 341479, 341480, 341481, 341482, 341483) c6( ) c7(av, T, ft, eM, aW, eL, aT, fd, aq, kp, bt, bz, eJ); #c1(WIF1) c2(NP_009122) c3(wnt inhibitor factor 1 precursor) c4(170872) c5(170873, 170874, 170875, 170876, 170877, 170878, 170879, 170880, 170881) c6( ) c7(bM, T, pf, if, IH, ht, aA, bB, n, fr, ci, qN, q, ad, ai, afb, av, ib, aE, bxn, aT, dL, jj, ZW, eL, YT, bA, qw, d, s, aW, Y, ev, fO, eH, iw, r, LZ, Pp, g, as, eF, apx, cm, bz, ahV, ck, es, bF, eM, iA, bE, gX, hR, y, bt, it, B, cn, vQ); #c1(WIPF1) c2(NP_003378) c3(WAS/WASL-interacting protein family member 1) c4(137993, 137994, 137995, 137996, 137997) c5(137998, 137999, 138000, 138001, 138002, 138003, 138004, 138005, 138006, 138007, 138008, 138009, 138010, 138011, 138012, 138013, 138014, 138015, 138016, 138017, 138018, 138019, 138020, 138021, 138022, 138023, 138024, 138025, 138026, 138027, 138028, 138029, 138030, 138031, 138032, 138033, 138034, 138035, 138036) c6( ) c7(r, By, aGd, DU, BF, ey, BG, q, cUB); #c1(WIPF2) c2(NP_573571) c3(WAS/WASL-interacting protein family member 2) c4(234566, 234567) c5(234568, 234569, 234570, 234571, 234572, 234573) c6( ) c7(BG); #c1(WIPF2) c2(XP_011522715) c3(WAS/WASL-interacting protein family member 2 isoform X3) c4( ) c5(317242, 317243, 317244, 317245, 317246, 317247, 317248, 317249, 317250, 317251, 317252) c6( ) c7(BG); #c1(WIPF3) c2(NP_001073998) c3(WAS/WASL-interacting protein family member 3) c4(36879, 36880) c5(36881, 36882, 36883, 36884, 36885, 36886, 36887, 36888, 36889, 36890, 36891, 36892, 36893, 36894, 36895, 36896, 36897, 36898) c6( ) c7(vH, BG); #c1(WIPI1) c2(NP_060453) c3(WD repeat domain phosphoinositide-interacting protein 1) c4(196016, 196017) c5(196018, 196019, 196020, 196021, 196022, 196023, 196024) c6( ) c7(T, du); #c1(WIPI1) c2(XP_005257554) c3(WD repeat domain phosphoinositide-interacting protein 1 isoform X1) c4( ) c5(275262, 275263, 275264, 275265, 275266) c6( ) c7(T, du); #c1(WIPI2) c2(NP_001028690) c3(WD repeat domain phosphoinositide-interacting protein 2 isoform c) c4(30491) c5(30492, 30493, 30494, 30495, 30496, 30497) c6( ) c7(aw); #c1(WIPI2) c2(NP_001028691) c3(WD repeat domain phosphoinositide-interacting protein 2 isoform d) c4(30498) c5(30499, 30500, 30501, 30502, 30503, 30504) c6( ) c7(aw); #c1(WIPI2) c2(NP_001028692) c3(WD repeat domain phosphoinositide-interacting protein 2 isoform e) c4(30505, 30506) c5(30507, 30508, 30509, 30510, 30511, 30512, 30513, 30514, 30515, 30516, 30517, 30518) c6( ) c7(aw); #c1(WIPI2) c2(NP_056425) c3(WD repeat domain phosphoinositide-interacting protein 2 isoform a) c4(187545) c5(187546, 187547, 187548, 187549, 187550, 187551) c6( ) c7(aw); #c1(WIPI2) c2(NP_057087) c3(WD repeat domain phosphoinositide-interacting protein 2 isoform b) c4(188876) c5(188877, 188878, 188879, 188880, 188881, 188882) c6( ) c7(aw); #c1(WISP1) c2(NP_001191798) c3(WNT1-inducible-signaling pathway protein 1 isoform 3 precursor) c4(81806) c5(81807, 81808, 81809, 81810, 81811, 81812) c6( ) c7(bM, T, kh, cIe, fG, cz, bB, ci, q, av, cF, jz, NS, aT, ji, qk, B, MD, aW, eH, r, aF, iV, eF, t, bz, LB, bE, X); #c1(WISP1) c2(NP_001191799) c3(WNT1-inducible-signaling pathway protein 1 isoform 4 precursor) c4(81813) c5(81814, 81815, 81816, 81817, 81818, 81819) c6( ) c7(bM, T, kh, cIe, fG, cz, bB, ci, q, av, cF, jz, NS, aT, ji, qk, B, MD, aW, eH, r, aF, iV, eF, t, bz, LB, bE, X); #c1(WISP1) c2(NP_003873) c3(WNT1-inducible-signaling pathway protein 1 isoform 1 precursor) c4(141698) c5(141699, 141700, 141701, 141702, 141703, 141704) c6( ) c7(bM, T, kh, cIe, fG, cz, bB, ci, q, av, cF, jz, NS, aT, ji, qk, B, MD, aW, eH, r, aF, iV, eF, t, bz, LB, bE, X); #c1(WISP1) c2(NP_543028) c3(WNT1-inducible-signaling pathway protein 1 isoform 2 precursor) c4(233294) c5(233295, 233296, 233297, 233298, 233299, 233300) c6( ) c7(bM, T, kh, cIe, fG, cz, bB, ci, q, av, cF, jz, NS, aT, ji, qk, B, MD, aW, eH, r, aF, iV, eF, t, bz, LB, bE, X); #c1(WISP1) c2(XP_006716743) c3(WNT1-inducible-signaling pathway protein 1 isoform X2) c4(290446) c5( ) c6( ) c7(bM, T, kh, cIe, fG, cz, bB, ci, q, av, cF, jz, NS, aT, ji, qk, B, MD, aW, eH, r, aF, iV, eF, t, bz, LB, bE, X); #c1(WISP1) c2(XP_011515661) c3(WNT1-inducible-signaling pathway protein 1 isoform X3) c4( ) c5(308508, 308509, 308510, 308511, 308512, 308513) c6( ) c7(bM, T, kh, cIe, fG, cz, bB, ci, q, av, cF, jz, NS, aT, ji, qk, B, MD, aW, eH, r, aF, iV, eF, t, bz, LB, bE, X); #c1(WISP2) c2(XP_005260660) c3(WNT1-inducible-signaling pathway protein 2 isoform X1) c4(276786, 276787) c5(276788, 276789, 276790, 276791, 276792, 276793, 276794, 276795, 276796, 276797, 276798, 276799, 276800, 276801, 276802, 276803, 276804) c6( ) c7(eW, T, eJ, aE, aW, vA, r, aT, hR, Ja, g, im, q, op); #c1(WISP3) c2(NP_003871) c3(WNT1-inducible-signaling pathway protein 3 isoform 1 precursor) c4(141666) c5(141667, 141668, 141669, 141670, 141671, 141672, 141673, 141674, 141675, 141676, 141677, 141678, 141679, 141680, 141681141682, 141683, 141684, 141685, 141686, 141687, 141688, 141689, 141690, 141691, 141692, 141693, 141694, 141695, 141696, 141697) c6( ) c7(gh, T, kh, e, aRm, cL, ci, zU, LI, q, o, ad, LH, ai, aE, ec, aT, vw, Wr, LG, ae, rv, B, MD, aW, r, LJ, dr, cA, ig, zG, y, X); #c1(WISP3) c2(NP_937882) c3(WNT1-inducible-signaling pathway protein 3 isoform 3) c4(259388, 259389, 259390, 259391) c5(259392, 259393, 259394, 259395, 259396, 259397, 259398, 259399, 259400, 259401) c6( ) c7(gh, T, kh, e, aRm, cL, ci, zU, LI, q, o, ad, LH, ai, aE, ec, aT, vw, Wr, LG, ae, rv, B, MD, aW, r, LJ, dr, cA, ig, zG, y, X); #c1(WISP3) c2(XP_011534525) c3(WNT1-inducible-signaling pathway protein 3 isoform X4) c4( ) c5(331011, 331012, 331013, 331014, 331015, 331016, 331017, 331018) c6( ) c7(gh, T, kh, e, aRm, cL, ci, zU, LI, q, o, ad, LH, ai, aE, ec, aT, vw, Wr, LG, ae, rv, B, MD, aW, r, LJ, dr, cA, ig, zG, y, X); #c1(WLS) c2(XP_011540493) c3(protein wntless homolog isoform X1) c4(338980) c5(338981, 338982, 338983, 338984, 338985, 338986) c6( ) c7(T, ht, jh, aA, bB, kM, fd, fr, ci, kO, hF, q, ad, eA, x, av, iu, ft, ib, aE, dV, aT, h, dL, K, hu, ae, bc, eL, bA, jf, gc, kF, d, iZ, hG, aW, Y, kK, ff, cr, r, aq, Ph, aF, en, hf, cl, t, kC, bz, ho, dr, as, cm, ck, iR, eM, bE, gX, cj, hL, m, rH, bt, B); #c1(WNK1) c2(NP_001171914) c3(serine/threonine-protein kinase WNK1 isoform 4) c4(72019) c5(72020, 72021, 72022, 72023, 72024, 72025) c6( ) c7(oO, bM, T, os, ahS, if, e, al, bEy, eh, fd, IR, ci, bv, aE, K, eG, aW, Fe, az, asD, bWB, g, eE, cm, bw, axG, nB, cj, bqQ, m, tp, ht, aj, BF, qN, eW, md, kH, cU, pi, bT, gi, fe, kp, dB, bjx, tl, it, B, aOo, L, oe, aA, cz, C, bX, V, q, J, eA, eJ, yg, cUC, aT, ae, af, eu, aAi, jf, nO, Y, r, en, t, f, cmk, pb, iK, ck, iM, tW, c, ac, ig, hr, cFC, dy, bt, Pt, qb, aFa, oZ, dG, fu, ad, XB, dP, hd, cbH, azq, ji, akS, azR, gj, d, je, ff, xs, eZ, aF, iV, qa, DF, bF, cqP, y, kS, X, brt); #c1(WNK1) c2(NP_055638) c3(serine/threonine-protein kinase WNK1 isoform 2) c4(182432) c5(182433, 182434, 182435, 182436, 182437, 182438) c6( ) c7(oO, bM, T, os, ahS, if, e, al, bEy, eh, fd, IR, ci, bv, aE, K, eG, aW, Fe, az, asD, bWB, g, eE, cm, bw, axG, nB, cj, bqQ, m, tp, ht, aj, BF, qN, eW, md, kH, cU, pi, bT, gi, fe, kp, dB, bjx, tl, it, B, aOo, L, oe, aA, cz, C, bX, V, q, J, eA, eJ, yg, cUC, aT, ae, af, eu, aAi, jf, nO, Y, r, en, t, f, cmk, pb, iK, ck, iM, tW, c, ac, ig, hr, cFC, dy, bt, Pt, qb, aFa, oZ, dG, fu, ad, XB, dP, hd, cbH, azq, ji, akS, azR, gj, d, je, ff, xs, eZ, aF, iV, qa, DF, bF, cqP, y, kS, X, brt); #c1(WNK1) c2(NP_061852) c3(serine/threonine-protein kinase WNK1 isoform 1) c4(200785, 200786, 200787) c5(200788, 200789, 200790, 200791, 200792, 200793, 200794, 200795, 200796, 200797, 200798, 200799, 200800, 200801, 200802, 200803, 200804, 200805) c6( ) c7(oO, bM, T, os, ahS, if, e, al, bEy, eh, fd, IR, ci, bv, aE, K, eG, aW, Fe, az, asD, bWB, g, eE, cm, bw, axG, nB, cj, bqQ, m, tp, ht, aj, BF, qN, eW, md, kH, cU, pi, bT, gi, fe, kp, dB, bjx, tl, it, B, aOo, L, oe, aA, cz, C, bX, V, q, J, eA, eJ, yg, cUC, aT, ae, af, eu, aAi, jf, nO, Y, r, en, t, f, cmk, pb, iK, ck, iM, tW, c, ac, ig, hr, cFC, dy, bt, Pt, qb, aFa, oZ, dG, fu, ad, XB, dP, hd, cbH, azq, ji, akS, azR, gj, d, je, ff, xs, eZ, aF, iV, qa, DF, bF, cqP, y, kS, X, brt); #c1(WNK1) c2(XP_011519300) c3(serine/threonine-protein kinase WNK1 isoform X2) c4(313946) c5( ) c6( ) c7(oO, bM, T, os, ahS, if, e, al, bEy, eh, fd, IR, ci, bv, aE, K, eG, aW, Fe, az, asD, bWB, g, eE, cm, bw, axG, nB, cj, bqQ, m, tp, ht, aj, BF, qN, eW, md, kH, cU, pi, bT, gi, fe, kp, dB, bjx, tl, it, B, aOo, L, oe, aA, cz, C, bX, V, q, J, eA, eJ, yg, cUC, aT, ae, af, eu, aAi, jf, nO, Y, r, en, t, f, cmk, pb, iK, ck, iM, tW, c, ac, ig, hr, cFC, dy, bt, Pt, qb, aFa, oZ, dG, fu, ad, XB, dP, hd, cbH, azq, ji, akS, azR, gj, d, je, ff, xs, eZ, aF, iV, qa, DF, bD, cqP, y, kS, X, brt); #c1(WNK1) c2(XP_011519310) c3(serine/threonine-protein kinase WNK1 isoform X13) c4(313947) c5(313948, 313949, 313950, 313951, 313952, 313953, 313954) c6( ) c7(oO, bM, T, os, ahS, if, e, al, bEy, eh, fd, IR, ci, bv, aE, K, eG, aW, Fe, az, asD, bWB, g, eE, cm, bw, axG, nB, cj, bqQ, m, tp, ht, aj, BE, qN, eW, md, kH, cU, pi, bT, gi, fe, kp, dB, bjx, tl, it, B, aOo, L, oe, aA, cz, C, bX, V, q, J, eA, eJ, yg, cUC, aT, ae, af, eu, aAi, jf, nO, Y, r, en, t, f, cmk, pb, iK, ck, iM, tW, c, ac, ig, hr, cFC, dy, bt, Pt, qb, aFa, oZ, dG, fu, ad, XB, dP, hd, cbH, azg, ji, akS, azR, gj, d, je, ff, xs, eZ, aF, iV, qa, DF, bF, cqP, y, kS, X, brt); #c1(WNK1) c2(XP_011519311) c3(serine/threonine-protein kinase WNK1 isoform X14) c4(313955) c5(313956, 313957, 313958, 313959, 313960, 313961, 313962, 313963, 313964, 313965, 313966) c6( ) c7(oO, bM, T, os, ahS, if, e, al, bEy, eh, fd, IR, ci, bv, aE, K, eG, aW, Fe, az, asD, bWB, g, eE, cm, bw, axG, nB, cj, bqQ, m, tp, ht, aj, BF, qN, eW, md, kH, cU, pi, bT, gi, fe, kp, dB, bjx, tl, it, B, aOo, L, oe, aA, cz, C, bX, V, q, J, eA, eJ, yg, cUC, aT, ae, af, eu, aAi, jf, nO, Y, r, en, t, f, cmk, pb, iK, ck, iM, tW, c, ac, ig, hr, cFC, dy, bt, Pt, qb, aFa, oZ, dG, fu, ad, XB, dP, hd, cbH, azq, ji, akS, azR, gj, d, je, ff, xs, eZ, aF, iV, qa, DF, bF, cqP, y, kS, X, brt); #c1(WNK2) c2(NP_001269323) c3(serine/threonine-protein kinase WNK2 isoform 1) c4(101125, 101126) c5(101127, 101128, 101129, 101130, 101131, 101132, 101133, 101134, 101135, 101136, 101137, 101138) c6( ) c7(ar, T, d, Dy, ac, dB, Y, kp, dy, LV, eA, ip); #c1(WNK2) c2(XP_005252197) c3(serine/threonine-protein kinase WNK2 isoform X12) c4(271594) c5(271595, 271596, 271597, 271598, 271599, 271600) c6( ) c7(ar, T, d, Dy, ac, dB, Y, kp, dy, LV, eA, ip); #c1(WNK2) c2(XP_005252198) c3(serine/threonine-protein kinase WNK2 isoform X1) c4(271601) c5(271602, 271603, 271604, 271605, 271606, 271607, 271608) c6( ) c7(ar, T, d, Dy, ac, dB, Y, kp, dy, LV, eA, ip); #c1(WNK2) c2(XP_011517229) c3(serine/threonine-protein kinase WNK2 isoform X3) c4(310812) c5(310813) c6( ) c7(ar, T, d, Dy, ac, dB, Y, kp, dy, LV, eA, ip); #c1(WNK2) c2(XP_011517235) c3(serine/threonine-protein kinase WNK2 isoform X10) c4(310814) c5(310815, 310816, 310817, 310818, 310819) c6( ) c7(ar, T, d, Dy, ac, dB, Y, kp, dy, LV, eA, ip); #c1(WNK2) c2(XP_011517242) c3(serine/threonine-protein kinase WNK2 isoform X18) c4( ) c5(310820, 310821, 310822, 310823, 310824, 310825, 310826, 310827, 310828) c6( ) c7(ar, T, d, Dy, ac, dB, Y, kp, dy, LV, eA, ip); #c1(WNK3) c2(NP_065973) c3(serine/threonine-protein kinase WNK3 isoform 1) c4(206557) c5(206558, 206559, 206560, 206561, 206562, 206563, 206564, 206565, 206566, 206567, 206568, 206569, 206570, 206571, 206572, 206573, 206574, 206575, 206576) c6( ) c7(nf, bN, bqN); #c1(WNK3) c2(XP_006724656) c3(serine/threonine-protein kinase WNK3 isoform X1) c4(296178, 296179) c5(296180, 296181, 296182, 296183, 296184, 296185) c6( ) c7(nf, bN, bqN); #c1(WNK4) c2(NP_115763) c3(serine/threonine-protein kinase WNK4) c4(223852) c5(223853, 223854, 223855, 223856, 223857, 223858) c6( ) c7(qa, bA, jf, ahS, cqP, Fe, gC, cz, cUD, tl, afV, bWB, K, cUE, aY, dr, aOo); #c1(WNK4) c2(XP_005257652) c3(serine/threonine-protein kinase WNK4 isoform X1) c4( ) c5(275319) c6( ) c7(qa, bA, jf, ahS, cqP, Fe, gC, cz, cUD, tl, afV, bWB, K, cUE, aY, dr, aOo); #c1(WNK4) c2(XP_006722085) c3(serine/threonine-protein kinase WNK4 isoform X10) c4(294605) c5(294606, 294607, 294608, 294609, 294610) c6( ) c7(qa, bA, jf, ahS, cqP, Fe, gC, cz, cUD, tl, afV, bWB, K, cUE, aY, dr, aOo); #c1(WNK4) c2(XP_011523437) c3(serine/threonine-protein kinase WNK4 isoform XB) c4(317964) c5(317965, 317966, 317967, 317968, 317969, 317970) c6( ) c7(qa, bA, jf, ahS, cqP, Fe, gC, cz, cUD, tl, afV, bWB, K, cUE, aY, dr, aOo); #c1(WNT1) c2(NP_005421) c3(proto-oncogene Wnt-1 precursor) c4(155981, 155982) c5(155983, 155984, 155985, 155986, 155987, 155988, 155989, 155990, 155991, 155992, 155993, 155994) c6( ) c7(cUF, bM, T, fG, ht, aA, n, cUG, ci, q, ad, eA, hX, Na, ft, aE, afQ, aT, h, zp, rz, ae, bA, jf, B, MD, qt, aW, Y, ff, r, fe, aq, aF, en, bw, QA, LB, iO, bF, fT, bP, pP, U, aqH, y, bt, ra, X); #c1(WNT10A) c2(NP_079492) c3(protein Wnt-10a precursor) c4(218352) c5(218353, 218354, 218355, 218356, 218357, 218358) c6( ) c7(T, bjB, ht, aA, Hn, fr, amI, q, amH, cUK, bjv, bjA, hu, bjy, cUI, az, r, aF, cUH, hk, dy, cUJ); #c1(WNT10B) c2(NP_003385) c3(protein Wnt-10b precursor) c4(138103) c5(138104, 138105, 138106, 138107, 138108, 138109, 138110, 138111) c6( ) c7(T, kP, arA, c, yE, aW, if, eF, eH, aT, aA, v, oH, ci, qN, cI, cUL, t, aF, aRR); #c1(WNT10B) c2(XP_011537024) c3(protein Wnt-10b isoform X1) c4( ) c5(334780) c6( ) c7(T, kP, arA, c, yE, aW, if, eF, eH, aT, aA, v, oH, ci, qN, cI, cUL, t, aF, aRR); #c1(WNT10B) c2(XP_011537025) c3(protein Wnt-10b isoform X2) c4(334781, 334782) c5(334783, 334784, 334785, 334786, 334787, 334788, 334789) c6( ) c7(T, kP, arA, c, yE, aW, if, eF, eH, aT, aA, v, oH, ci, qN, cI, cUL, t, aF, aRR); #c1(WNT10B) c2(XP_011537026) c3(protein Wnt-10b isoform X3) c4( ) c5(334790, 334791, 334792, 334793, 334794, 334795, 334796, 334797) c6( ) c7(T, kP, arA, c, yE, aW, if, eF, eH, aT, aA, v, oH, ci, qN, cI, cUL, t, aF, aRR); #c1(WNT11) c2(NP_004617) c3(protein Wnt-11 precursor) c4(148202, 148203) c5(148204, 148205, 148206, 148207, 148208, 148209, 148210, 148211, 148212, 148213, 148214, 148215) c6( ) c7(oO, T, EQ, bB, n, hy, fr, bX, cd, q, ad, Na, gH, aT, bma, Nc, ae, B, BN, aW, r, g, ck, bF, ac, bE, Hb, bt, ne); #c1(WNT16) c2(NP_057171) c3(protein Wnt-IB isoform 2) c4(189292, 189293) c5(189294, 189295, 189296, 189297, 189298, 189299, 189300, 189301, 189302, 189303, 189304, 189305, 189306, 189307, 189308) c6(189309, 189310, 189311) c7(ck, ou, e, v, afl, bD, agk, bA); #c1(WNT16) c2(NP_476509) c3(protein Wnt-IB isoform 1 precursor) c4(230678) c5(230679, 230680, 230681, 230682, 230683, 230684, 230685, 230686) c6( ) c7(ck, ou, e, v, afl, bD, agk, bA); #c1(WNT2) c2(NP_003382) c3(protein Wnt-2 precursor) c4(138067) c5(138068, 138069, 138070, 138071, 138072, 138073) c6( ) c7(T, if, e, aA, ci, q, eA, bv, jz, ib, aE, oW, aT, yu, cUM, Dz, aUQ, s, Qr, nO, aW, Y, r, aF, cl, t, pb, bN, gX, an); #c1(WNT2B) c2(NP_001278809) c3(protein Wnt-2b isoform 3) c4( ) c5(110147, 110148, 110149, 110150, 110151, 110152, 110153) c6(110154, 110155) c7(T, BN, dB, if, eD, ht, Be, r, aA, Hn, Io, hy, bK, aF, qN, t, Bd, ne); #c1(WNT3) c2(NP_110380) c3(proto-oncogene Wnt-3 precursor) c4(219812) c5(219813, 219814, 219815, 219816, 219817, 219818) c6( ) c7(T, aw, aA, CH, bB, ci, cUN, Na, AW, bKk, oW, aT, bma, Nc, an, aa, Y, aF, hp, bz, pb, ac, eM, ig, bE, Ny, dy, act, B); #c1(WNT3A) c2(NP_149122) c3(protein Wnt-3a precursor) c4(227295) c5(227296, 227297, 227298, 227299, 227300, 227301) c6( ) c7(IH, fd, cR, bB, fr, q, eA, ad, dP, x, Na, zw, fm, aT, Nc, K, ae, d, aW, Y, r, t, ck, iA, bE, m, gT, B); #c1(WNT3A) c2(XP_011542622) c3(protein Wnt-3a isoform X2) c4(341181) c5(341182, 341183, 341184, 341185, 341186, 341187) c6( ) c7(IH, fd, cR, bB, fr, q, eA, ad, dP, x, Na, zw, fm, aT, Nc, K, ae, d, aW, Y, r, t, ck, iA, bE, m, gT, B); #c1(WNT4) c2(XP_011539899) c3(protein Wnt-4 isoform X1) c4( ) c5(338164) c6( ) c7(T, UH, eR, xo, v, aY, cUO, ad, dP, iI, BJ, aT, xp, uV, Dz, Ur, UL, aW, ff, en, hf, cl, zZ, t, iV, ck, bfP, hR, E, at, bxG, m, Hb, dy, fD); #c1(WNT4) c2(XP_011539900) c3(protein Wnt-4 isoform X2) c4( ) c5(338165, 338166, 338167, 338168, 338169) c6( ) c7(T, UH, eR, xo, v, aY, cUO, ad, dP, iI, BJ, aT, xp, uV, Dz, Ur, UL, aW, ff, en, hf, cl, zZ, t, iV, ck, bfP, hR, E, at, bxG, m, Hb, dy, fD); #c1(WNT4) c2(XP_011539901) c3(protein Wnt-4 isoform X3) c4(338170, 338171, 338172) c5(338173, 338174, 338175, 338176, 338177, 338178, 338179, 338180, 338181, 338182, 338183, 338184, 338185, 338186, 338187, 338188, 338189, 338190) c6( ) c7(T, UH, eR, xo, v, aY, cUO, ad, dP, iI, BJ, aT, xp, uV, Dz, Ur, UL, aW, ff, en, hf, cI, zZ, t, iV, ck, bfP, hR, E, at, bxG, m, Hb, dy, fD); #c1(WNT5A) c2(NP_001243034) c3(protein Wnt-5a isoform 2 precursor) c4( ) c5(89639, 89640, 89641, 89642, 89643, 89644, 89645, 89646, 89647, 89648, 89649, 89650, 89651, 89652, 89653, 89654, 89655) c6( ) c7(T, dD, fM, aC, ea, if, jx, aA, bB, fd, v, eq, ci, C, AO, q, ad, er, hX, eA, eJ, av, x, Na, aE, bW, kH, aT, bma, Nc, dL, in, H, KV, ae, eL, dx, cp, Ur, Qe, qw, jf, cml, d, je, aW, Y, ff, az, cr, r, aF, VI, en, hf, kk, t, cM, bz, g, LB, ck, sS, nM, iM, c, nB, dB, bE, eM, iT, X, ajd, cfv, m, MG, y, bt, B, L); #c1(WNT5A) c2(NP_003383) c3(protein Wnt-5a isoform 1) c4(138074, 138075, 138076, 138077, 138078) c5(138079, 138080, 138081, 138082, 138083, 138084, 138085, 138086, 138087, 138088, 138089, 138090, 138091, 138092, 138093, 138094, 138095) c6( ) c7(T, dD, fM, aC, ea, if, jx, aA, bB, fd, v, eq, ci, C, AO, q, ad, er, hX, eA, eJ, av, x, Na, aE, bW, kH, aT, bma, Nc, dL, in, H, KV, ae, eL, dx, cp, Ur, Qe, qw, jf, cml, d, je, aW, Y, ff, az, cr, r, aF, VI, en, hf, kk, t, cM, bz, g, LB, ck, sS, nM, iM, c, nB, dB, bE, eM, iT, X, ajd, cfv, m, MG, y, bt, B, L); #c1(WNT5B) c2(NP_110402) c3(protein Wnt-5b precursor) c4(220066) c5(220067, 220068, 220069, 220070, 220071, 220072, 220073, 220074, 220075, 220076, 220077, 220078, 220079, 220080) c6( ) c7(bL, aW, vA, eH, qK, ff, aT, v, en, eF, op); #c1(WNT6) c2(NP_006513) c3(protein Wnt-6 precursor) c4(165921) c5(165922, 165923, 165924, 165925, 165926, 165927) c6( ) c7(aW, az, aA, aT, dL, aF, eL); #c1(WNT7A) c2(NP_004616) c3(protein Wnt-7a precursor) c4(148195) c5(148196, 148197, 148198, 148199, 148200, 148201) c6( ) c7(T, oe, fr, PJ, dP, XW, av, x, ib, Na, aT, Nc, cUP, bK, Ur, xs, la, cUQ, Z, t, bz, op, atb, ck, bfP, eM, go, vA, k, m); #c1(WNT7B) c2(NP_478679) c3(protein Wnt-7b precursor) c4(230986, 230987) c5(230988, 230989, 230990, 230991, 230992, 230993, 230994, 230995, 230996, 230997, 230998, 230999, 231000, 231001, 231002, 231003, 231004, 231005, 231006, 231007, 231008, 231009, 231010) c6(231011) c7(ae, T, aE, Dh, aW, eL, Vr, aT, aA, dL, aF, Dz, bz, ad); #c1(WNT7B) c2(XP_011528668) c3(protein Wnt-7b isoform X1) c4(323931, 323932, 323933) c5(323934, 323935, 323936, 323937, 323938, 323939, 323940, 323941, 323942, 323943, 323944, 323945, 323946, 323947, 323948, 323949) c6( ) c7(ae, T, aE, Dh, aW, eL, Vr, al aA, dL, aF, Dz, bz, ad); #c1(WNT8A) c2(NP_490645) c3(protein Wnt-8a isoform 3 precursor) c4(231019) c5(231020, 231021, 231022, 231023, 231024, 231025, 231026, 231027, 231028) c6(231029, 231030) c7(Na, wL, aA, bma, Nc, aF); #c1(WNT8B) c2(NP_003384) c3(protein Wnt-8b precursor) c4(138096) c5(138097, 138098, 138099, 138100, 138101, 138102) c6( ) c7(YL, aA, r, aF, ci, g, q); #c1(WNT9A) c2(NP_003386) c3(protein Wnt-9a precursor) c4(138112) c5(138113, 138114, 138115, 138116, 138117, 138118, 138119, 138120) c6(138121, 138122) c7(bF, T, hn, aT); #c1(WNT9B) c2(NP_003387) c3(protein Wnt-9b precursor) c4(138123) c5(138124, 138125, 138126, 138127, 138128, 138129, 138130, 138131) c6(138132, 138133) c7(Na, bfP, Io, bma, Nc); #c1(WNT9B) c2(XP_005257694) c3(protein Wnt-8b isoform X2) c4(275340) c5(275341, 275342, 275343, 275344, 275345, 275346, 275347, 275348) c6(275349, 275350) c7(Na, bfP, Io, bma, Nc); #c1(WNT9B) c2(XP_011523480) c3(protein Wnt-8b isoform X1) c4(318006) c5(318007, 318008, 318009, 318010, 318011, 318012, 318013, 318014) c6(318015, 318016) c7(Na, bfP, Io, bma, Nc); #c1(WRAP53) c2(NP_001137462) c3(telomerase Cajal body protein 1) c4(55851, 55852) c5(55853, 55854, 55855, 55856, 55857, 55858, 55859, 55860, 55861, 55862, 55863, 55864, 55865, 55866, 55867, 55868, 55869, 55870) c6( ) c7(sb, GI, T, asi, cUR, aW, ht, aT, at, hy, dL, Gw, Gu); #c1(WRAP53) c2(XP_011522254) c3(telomerase Cajal body protein 1 isoform X1) c4( ) c5(316890, 316891, 316892, 316893, 316894, 316895) c6( ) c7(sb, GI, T, asi, cUR, aW, ht, aT, at, hy, dL, Gw, Gu); #c1(WRB) c2(NP_001139690) c3(tail-anchored protein insertion receptor WRB isoform 2) c4(59743) c5(59744, 59745, 59746, 59747, 59748, 59749, 59750, 59751, 59752) c6( ) c7(sc, T, aA, j, ci, q, ad, eA, dP, aT, aW, Y, ff, r, Ej, aT, en, cm, f, t, bz, ck, Dy, m, 8); #c1(WRB) c2(NP_004618) c3(tail-anchored protein insertion receptor WRB isoform 1) c4(148216, 148217) c5(148218, 148219, 148220, 148221, 148222, 148223, 148224, 148225, 148226, 148227, 148228, 148229) c6( ) c7(sc, T, aA, j, ci, q, ad, eA, dP, aT, aW, Y, ff, r, Ej, aF, en, cm, f, t, bz, ck, Dy, m, B); #c1(WRB) c2(XP_011528046) c3(tail-anchored protein insertion receptor WRB isoform X2) c4( ) c5(323146) c6( ) c7(sc, T, aA, j, ci, q, ad, eA, dP, aT, aW, Y, ff, r, Ej, aF, en, cm, f, t, bz, ck, Dy, m, B); #c1(WRN) c2(NP_000544) c3(Werner syndrome ATP-dependent helicase) c4(12589) c5(12590, 12591, 12592, 12593, 12594, 12595) c6( ) c7(bL, T, os, dD, dA, aEj, hV, cUS, ea, aw, ht, iW, ew, jh, bB, aj, v, j, ci, bX, oZ, eq, V, q, J, eA, asi, LL, MR, QJ, rC, yg, aT, h, dL, K, hu, ask, dx, alK, wr, iU, JI, aW, aAu, Of, r, Og, La, Ik, DL, pb, dr, iK, Qi, ac, at, bon, bC, ei, iu); #c1(WRN) c2(XP_011542942) c3(Werner syndrome ATP-dependent helicase isoform X2) c4( ) c5(341637) c6( ) c7(bL, T, os, dD, dA, aEj, hV, cUS, ea, aw, ht, iW, ew, jh, bB, aj, v, j, ci, bX, oZ, eq, V, q, J, eA, asi, LL, MR, QJ, rC, yg, aT, h, dL, K, hu, ask, dx, alK, wr, iU, JI, aW, aAu, Of, r, Og, La, Ik, DL, pb, dr, iK, Qi, ac, at, bon, bC, ei, iu); #c1(WRNIP1) c2(NP_064520) c3(ATPase WRNIP1 isoform 1) c4(202849, 202850) c5(202851, 202852, 202853, 202854, 202855, 202856, 202857, 202858, 202859, 202860, 202861, 202862, 202863) c6( ) c7(MR); #c1(WRNIP1) c2(NP_569079) c3(ATPase WRNIP1 isoform 2) c4(233651, 233652) c5(233653, 233654, 233655, 233656, 233657, 233658, 233659, 233660, 233661, 233662, 233663) c6( ) c7(MR); #c1(WSB1) c2(NP_056441) c3(WD repeat and SOCS hex-containing protein 1 isoform 1) c4(187566) c5(187567, 187568, 187569, 187570, 187571, 187572) c6( ) c7(cm, T, aE, K); #c1(WSB1) c2(NP_599027) c3(WD repeat and SOCS hex-containing protein 1 isoform 2) c4(235600) c5(235601, 235602, 235603, 235604, 235605, 235606) c6( ) c7(cm, T, aE, K); #c1(WSB1) c2(XP_011522907) c3(WD repeat and SOCS box-containing protein 1 isoform X1) c4(317394) c5(317395, 317396, 317397, 317398, 317399, 317400) c6( ) c7(cm, T, aE, K); #c1(WSCD1) c2(NP_056068) c3(WSC domain-containing protein 1) c4(185495) c5(185496, 185497, 185498, 185499, 185500, 185501, 185502, 185503, 185504, 185505) c6( ) c7(aq); #c1(WSCD2) c2(NP_001291376) c3(WSC domain-containing protein 2) c4(115798) c5(115799, 115800, 115801, 115802, 115803, 115804, 115805, 115806, 115807, 115808) c6( ) c7(bK, aQo, cz); #c1(WSCD2) c2(XP_011537323) c3(WSC domain-containing protein 2 isoform X1) c4(335023) c5(335024, 335025, 335026, 335027, 335028, 335029, 335030, 335031, 335032, 335033) c6( ) c7(bK, aQo, cz); #c1(WT1) c2(NP_000369) c3(Wilms turner protein isoform A) c4(8199) c5(8200, 8201, 8202, 8203, 8204, 8205, 8206, 8207, 8208, 8209, 8210) c6( ) c7(T, os, aC, aNA, hV, bB, ci, aY, ip, x, aE, PI, K, aGb, aW, Ih, hI, ayY, g, eF, bw, bfw, cUV, eM, nB, iA, iT, oy, tV, azg, k, m, Xu, bvC, iu, n, ko, fr, nA, hr, cUY, h, UD, aqK, hn, Gc, dx, Nr, cUW, yi, gi, aq, po, Pp, kp, cM, bP, Vy, wk, hL, B, AS, eR, cz, v, Cb, q, er, eA, aeZ, Zp, cUZ, hW, aT, kU, ae, af, cUT, jf, iF, s, vT, iU, Y, Lf, r, gm, Lc, en, hf, bu, t, f, iK, bN, ck, sk, hc, dy, bt, hS, ml, jh, bs, adW, cUX, oZ, ah, hF, ad, Jm, dP, av, hd, fX, ib, py, vJ, vw, cVa, cUU, fb, iL, d, BN, ff, aeq, eH, Ej, iR, aEm, bz, Nq, es, arY, bE, UB, aKC, oQ, X); #c1(WT1) c2(NP_001185480) c3(Wilms turner protein isoform E) c4(75726, 75727) c5(75728, 75729, 75730, 75731, 75732, 75733, 75734, 75735, 75736, 75737, 75738, 75739) c6( ) c7(T, os, aC, aNA, hV, bB, ci, aY, ip, x, aE, PI, K, aGb, aW, Ih, hI, ayY, g, eF, bw, bfw, cUV, eM, nB, iA, iT, oy, tV, azg, k, m, Xu, bvC, iu, n, ko, fr, nA, hr, cUY, h, UD, aqK, hn, Gc, dx, Nr, cUW, yi, gi, aq, po, Pp, kp, cM, bP, Vy, wk, hL, B, AS, eR, cz, v, Cb, q, er, eA, aeZ, Zp, cUZ, hW, aT, kU, ae, af, cUT, jf, iF, s, vT, iU, Y, Lf, r, gm, Lc, en, hf, bu, t, f, iK, bN, ck, sk, hc, dy, bt, hS, ml, jh, bs, adW, cUX, oZ, ah, hF, ad, Jm, dP, av, hd, fX, ib, py, vJ, vw, cVa, cUU, fb, iL, d, BN, ff, aeq, eH, Ej, iR, aEm, bz, Nq, es, arY, bE, UB, aKC, oQ, X); #c1(WT1) c2(NP_001185481) c3(Wilms turner protein isoform F) c4(75740) c5(75741, 75742, 75743, 75744, 75745, 75746) c6( ) c7(T, os, aC, aNA, hV, bB, ci, aY, ip, x, aE, PI, K, aGb, aW, Ih, hI, ayY, g, eF, bw, bfw, cUV, eM, nB, iA, iT, oy, tV, azg, k, m, Xu, bvC, iu, n, ko, fr, nA, hr, cUY, h, UD, aqK, hn, Gc, dx, Nr, cUW, yi, gi, aq, po, Pp, kp, cM, bP, Vy, wk, hL, B, AS, eR, cz, v, Cb, q, er, eA, aeZ, Zp, cUZ, hW, aT, kU, ae, af, cUT, jf, iF, s, vT, iU, Y, Lf, r, gm, Lc, en, hf, bu, t, f, iK, bN, ck, sk, hc, dy, bt, hS, ml, jh, bs, adW, cUX, oZ, ah, hF, ad, Jm, dP, av, hd, fX, ib, py, vJ, vw, cVa, cUU, fb, iL, d, BN, ff, aeq, eH, Ej, iR, aEm, bz, Nq, es, arY, bE, UB, aKC, oQ, X); #c1(WT1) c2(NP_077742) c3(Wilms turner protein isoform B) c4(215356) c5(215357, 215358, 215359, 215360, 215361, 215362) c6( ) c7(T, os, aC, aNA, hV, bB, ci, aY, ip, x, aE, PI, K, aGb, aW, Ih, hI, ayY, g, eF, bw, bfw, cUV, eM, nB, iA, iT, oy, tV, azg, k, m, Xu, bvC, iu, n, ko, fr, nA, hr, cUY, h, UD, aqK, hn, Gc, dx, Nr, cUW, yi, gi, aq, po, Pp, kp, cM, bP, Vy, wk, hL, B, AS, eR, cz, v, Cb, q, er, eA, aeZ, Zp, cUZ, hW, aT, kU, ae, af, cUT, jf, iF, s, vT, iU, Y, Lf, r, gm, Lc, en, hf, bu, t, f, iK, bN, ck, sk, hc, dy, bt, hS, ml, jh, bs, adW, cUX, oZ, ah, hF, ad, Jm, dP, av, hd, fX, ib, py, vJ, vw, cVa, cUU, fb, iL, d, BN, ff, aeq, eH, Ej, iR, aEm, bz, Nq, es, arY, bE, UB, aKC, oQ, X); #c1(WT1) c2(NP_077744) c3(Wilms turner protein isoform D) c4(215363, 215364, 215365) c5(215366, 215367, 215368, 215369, 215370, 215371, 215372, 215373, 215374, 215375, 215376, 215377, 215378) c6( ) c7(T, os, aC, aNA, hV, bB, ci, aY, ip, x, aE, PI, K, aGb, aW, Ih, hI, ayY, g, eF, bw, bfw, cUV, eM, nB, iA, iT, oy, tV, azg, k, m, Xu, bvC, iu, n, ko, fr, nA, hr, cUY, h, UD, aqK, hn, Gc, dx, Nr, cUW, yi, gi, aq, po, Pp, kp, cM, bP, Vy, wk, hL, B, AS, eR, cz, v, Cb, q, er, eA, aeZ, Zp, cUZ, hW, aT, kU, ae, af, cUT, jf, iF, s, vT, iU, Y, Lf, r, gm, Lc, en, hf, bu, t, f, iK, bN, ck, sk, hc, dy, bt, hS, ml, jh, bs, adW, cUX, oZ, ah, hF, ad, Jm, dP, av, hd, fX, ib, py, vJ, vw, cVa, cUU, fb, iL, d, BN, ff, aeq, eH, Ej, iR, aEm, bz, Nq, es, arY, bE, UB, aKC, oQ, X); #c1(WTAP) c2(NP_001257460) c3(pre-mRNA-splicing regulator WTAP isoform 1) c4(95469, 95470) c5(95471, 95472, 95473, 95474, 95475, 95476) c6( ) c7(T, jz, d, F, Pp, jE); #c1(WTAP) c2(NP_690597) c3(pre-mRNA-splicing regulator WTAP isoform 2) c4( ) c5(244890, 244891, 244892, 244893, 244894, 244895) c6( ) c7(T, jz, d, F, Pp, jE); #c1(WTIP) c2(NP_001073905) c3(Wilms turner protein 1-interacting protein) c4(36426) c5(36427, 36428, 36429, 36430, 36431, 36432) c6( ) c7(Pp, er); #c1(WWC1) c2(NP_001155133) c3(protein KIBRA isoform 1) c4(61464) c5(61465, 61466, 61467, 61468, 61469, 61470) c6( ) c7(T, FW, ot, sO, aW, LX, Ei, aT, aA, gI, bS, aF, ct, Z, cm, cM, af); #c1(WWC1) c2(NP_056053) c3(protein KIBRA isoform 3) c4(185398) c5(185399, 185400, 185401, 185402, 185403, 185404) c6( ) c7(T, FW, ot, sO, aW, LX, Ei, aT, aA, gI, bS, aF, ct, Z, cm, cM, af); #c1(WWC2) c2(NP_079225) c3(protein WWC2) c4(217520, 217521, 217522, 217523) c5(217524, 217525, 217526, 217527, 217528, 217529, 217530, 217531, 217532, 217533, 217534, 217535, 217536, 217537, 217538, 217539, 217540, 217541, 217542, 217543, 217544, 217545, 217546, 217547) c6( ) c7(oe); #c1(WWC2) c2(XP_011530571) c3(protein WWC2 isoform X1) c4(326486) c5(326487, 326488, 326489, 326490, 326491, 326492) c6( ) c7(oe); #c1(WWOX) c2(NP_001278926) c3(WW domain-containing oxidoreductase isoform 4) c4( ) c5(111016, 111017, 111018) c6( ) c7(T, os, aC, id, iB, Dd, oe, ha, e, ht, fZ, aA, bB, aj, v, j, ci, nA, oZ, qN, hF, AO, fr, q, ad, er, eA, ip, aw, ft, hd, aE, jz, eO, aT, io, h, dL, bK, K, bta, hB, an, ae, af, eL, WW, if, d, Jl, aW, ff, cVb, eH, r, dq, lo, aF, PQ, en, hf, gW, t, QK, fq, bz, g, eF, cm, ck, iK, fd, ky, nB, bE, eM, go, bo, it, nw, m, adg, Pr, B); #c1(WWOX) c2(NP_057457) c3(WW domain-containing oxidoreductase isoform 1) c4(190997) c5(190998, 190999, 191000, 191001, 191002, 191003, 191004, 191005, 191006, 191007, 191008, 191009, 191010) c6( ) c7(T, os, aC, id, iB, Dd, oe, ha, e, ht, fZ, aA, bB, aj, v, j, ci, nA, oZ, qN, hF, AO, fr, q, ad, er, eA, ip, aw, ft, hd, aE, jz, eO, aT, io, h, dL, bK, K, bta, hB, an, ae, af, eL, WW, if, d, Jl, aW, ff, cVb, eH, r, dq, lo, aF, PQ, en, hf, gW, t, QK, fq, bz, g, eF, cm, ck, iK, fd, ky, nB, bE, eM, go, bo, it, nw, m, adg, Pr, B); #c1(WWOX) c2(NP_570607) c3(WW domain-containing oxidoreductase isoform 2) c4(234090) c5(234091, 234092, 234093, 234094, 234095, 234096, 234097, 234098, 234099, 234100, 234101, 234102, 234103, 234104, 234105, 234106, 234107, 234108, 234109, 234110, 234111, 234112, 234113, 234114, 234115, 234116, 234117, 234118, 234119, 234120) c6( ) c7(T, os, aC, id, iB, Dd, oe, ha, e, ht, fZ, aA, bB, aj, v, j, ci, nA, oZ, qN, hF, AO, fr, q, ad, er, eA, ip, aw, ft, hd, aE, jz, eO, aT, io, h, dL, bK, K, bta, hB, an, ae, af, eL, WW, if, d, Jl, aW, ff, cVb, eH, r, dq, lo, aF, PQ, en, hf, gW, t, QK, fq, bz, g, eF, cm, ck, iK, fd, ky, nB, bE, eM, go, bo, it, nw, m, adg, Pr, B); #c1(WWOX) c2(XP_011521402) c3(WW domain-containing oxidoreductase isoform X1) c4(316216) c5( ) c6( ) c7(T, os, aC, id, iB, Dd, oe, ha, e, ht, fZ, aA, bB, aj, v, j, ci, nA, oZ, qN, hF, AO, fr, q, ad, er, eA, ip, aw, ft, hd, aE, jz, eO, aT, io, h, dL, bK, K, bta, hB, an, ae, af, eL, WW, if, d, Jl, aW, ff, cVb, eH, r, dq, lo, aF, PQ, en, hf, gW, t, QK, fq, bz, g, eF, cm, ck, iK, fd, ky, nB, bE, eM, go, bo, it, nw, m, adg, Pr, B); #c1(WWOX) c2(XP_011521404) c3(WW domain-containing oxidoreductase isoform X3) c4(316217, 316218) c5( ) c6( ) c7(T, os, aC, id, iB, Dd, oe, ha, e, ht, fZ, aA, bB, aj, v, j, ci, nA, oZ, qN, hF, AO, fr, q, ad, er, eA, ip, aw, ft, hd, aE, jz, eO, aT, io, h, dL, bK, K, bta, hB, an, ae, af, eL, WW, if, d, Jl, aW, ff, cVb, eH, r, dq, lo, aF, PQ, en, hf, gW, t, QK, fq, bz, g, eF, cm, ck, iK, fd, ky, nB, bE, eM, go, bo, it, nw, m, adg, Pr, B); #c1(WWOX) c2(XP_011521405) c3(WW domain-containing oxidoreductase isoform X4) c4(316219) c5( ) c6( ) c7(T, os, aC, id, iB, Dd, oe, ha, e, ht, fZ, aA, bB, aj, v, j, ci, nA, oZ, qN, hF, AO, fr, q, ad, er, eA, ip, aw, ft, hd, aE, jz, eO, aT, io, h, dL, bK, K, bta, hB, an, ae, af, eL, WW, if, d, Jl, aW, ff, cVb, eH, r, dq, lo, aF, PQ, en, hf, gW, t, QK, fq, bz, g, eF, cm, ck, iK, fd, ky, nB, bE, eM, go, bo, it, nw, m, adg, Pr, B); #c1(WWOX) c2(XP_011521406) c3(WW domain-containing oxidoreductase isoform X6) c4(316220) c5( ) c6( ) c7(T, os, aC, id, iB, Dd, oe, ha, e, ht, fZ, aA, bB, aj, v, j, ci, nA, oZ, qN, hF, AO, fr, q, ad, er, eA, ip, aw, ft, hd, aE, jz, eO, aT, io, h, dL, bK, K, bta, hB, an, ae, af, eL, WW, if, d, Jl, aW, ff, cVb, eH, r, dq, lo, aF, PQ, en, hf, gW, t, QK, fq, bz, g, eF, cm, ck, iK, fd, ky, nB, bE, eM, go, bo, it, nw, m, adg, Pr, B); #c1(WWP1) c2(XP_005250817) c3(NEDD4-like E3 ubiquitin-protein ligase WWP1 isoform X1) c4(270559, 270560, 270561) c5(270562, 270563, 270564, 270565, 270566, 270567, 270568, 270569, 270570, 270571) c6( ) c7(T, aW, aT, in, ae, ad); #c1(WWP1) c2(XP_005250818) c3(NEDD4-like E3 ubiquitin-protein ligase WWP1 isoform X2) c4(270572) c5(270573, 270574, 270575, 270576, 270577, 270578, 270579, 270580, 270581, 270582, 270583, 270584, 270585) c6( ) c7(T, aW, aT, in, ae, ad); #c1(WWP1) c2(XP_011515104) c3(NEDD4-like E3 ubiquitin-protein ligase WWP1 isoform X3) c4( ) c5(307973, 307974, 307975, 307976, 307977) c6( ) c7(T, aW, aT, in, ae, ad); #c1(WWP2) c2(NP_001257384) c3(NEDD4-like E3 ubiquitin-protein ligase WWP2 isoform WWP2-N) c4( ) c5(95296, 95297, 95298, 95299, 95300, 95301) c6( ) c7(aw, aRo); #c1(WWP2) c2(NP_955456) c3(NEDD4-like E3 ubiquitin-protein ligase WWP2 isoform WWP2-C) c4( ) c5(261766, 261767, 261768, 261769, 261770) c6( ) c7(aw, aRo); #c1(WWP2) c2(XP_011521127) c3(NEDD4-like E3 ubiquitin-protein ligase WWP2 isoform X1) c4(316038, 316039, 316040, 316041, 316042, 316043) c5(316044, 316045, 316046, 316047, 316048, 316049, 316050, 316051, 316052, 316053, 316054, 316055, 316056, 316057, 316058, 316059, 316060, 316061, 316062, 316063, 316064, 316065) c6( ) c7(aw, aRo); #c1(WWP2) c2(XP_011521128) c3(NEDD4-like E3 ubiquitin-protein ligase WWP2 isoform X2) c4( ) c5(316066, 316067, 316068, 316069, 316070, 316071, 316072, 316073, 316074, 316075, 316076) c6( ) c7(aw, aRo); #c1(WWTR1) c2(NP_001161750) c3(WW domain-containing transcription regulator protein 1) c4(65913, 65914, 65915, 65916, 65917) c5(65918, 65919, 65920, 65921, 65922, 65923, 65924, 65925, 65926, 65927, 65928, 65929, 65930, 65931, 65932, 65933, 65934, 65935, 65936, 65937, 65938, 65939, 65940, 65941, 65942, 65943, 65944, 65945, 65946, 65947, 65948, 65949) c6( ) c7(gV, cSS, T, dD, atk, fd, bB, afK, eq, aoM, cd, q, vN, eA, cc, aT, bI, hH, azH, d, hG, aW, Y, cmH, r, bp, dw, t, bz, Qt, dr, bfW, Dy, eM, bE, mx, wB, dy, m, ym, cba); #c1(XAB2) c2(NP_064581) c3(pre-mRNA-splicing factor SYF1) c4(203084, 203085) c5(203086, 203087, 203088, 203089, 203090, 203091, 203092, 203093, 203094, 203095, 203096, 203097) c6( ) c7(bv, T, aXH, jj, V, kS); #c1(XAF1) c2(NP_059993) c3(XIAP-associated factor 1 isoform 1) c4(193547, 193548, 193549) c5(193550, 193551, 193552, 193553, 193554, 193555, 193556, 193557, 193558, 193559, 193560, 193561, 193562, 193563, 193564, 193565, 193566, 193567) c6( ) c7(T, aA, bB, n, fd, fr, ci, qN, V, ad, hX, ds, dL, K, ae, eL, uQ, d, Y, r, aq, aF, g, iR, cm, QS, es, bE, AH, X, gX, B); #c1(XAF1) c2(NP_954590) c3(XIAP-associated factor 1 isoform 2) c4(261072) c5(261073, 261074, 261075, 261076, 261077, 261078) c6( ) c7(T, aA, bB, n, fd, fr, ci, qN, V, ad, hX, ds, dL, K, ae, eL, uQ, d, Y, r, aq, aF, g, iR, cm, QS, es, bE, AH, X, gX, B); #c1(XAF1) c2(XP_005256765) c3(XIAP-associated factor 1 isoform X7) c4(274480) c5(274481, 274482, 274483, 274484, 274485, 274486) c6( ) c7(T, aA, bB, n, fd, fr, ci, qN, V, ad, hX, ds, dL, K, ae, eL, uQ, d, Y, r, aq, aF, g, iR, cm, QS, es, bE, AH, X, gX, B); #c1(XAGE1B) c2(NP_001091065) c3(X antigen family member 1 isoform d) c4(38413) c5(38414, 38415, 38416, 38417, 38418, 38419, 38420, 38421, 38422, 38423, 38424, 38425, 38426, 38427, 38428, 38429, 38430, 38431, 38432, 38433, 38434, 38435, 38436, 38437, 38438, 38439, 38440, 38441, 38442, 38443, 38444, 38445, 38446, 38447) c6( ) c7(av, T, Y, qK, Xu, bu, ae, iu, ad); #c1(XAGE1E) c2(NP_001091073) c3(X antigen family member 1 isoform a) c4(38459, 38460) c5(38461, 38462, 38463, 38464, 38465, 38466, 38467, 38468, 38469, 38470, 38471, 38472, 38473, 38474, 38475, 38476, 38477, 38478, 38479, 38480, 38481, 38482, 38483, 38484, 38485, 38486, 38487, 38488, 38489, 38490, 38481, 38492, 38493, 38494, 38495, 38496, 38497, 38498, 38499, 38500, 38501, 38502, 38503, 38504, 38505, 38506) c6( ) c7(T, Y, Xu, bu, ae, iu, ad); #c1(XBP1) c2(NP_001073007) c3(X-box-binding protein 1 isoform XBP1(S)) c4(35580) c5(35581, 35582, 35583, 35584, 35585, 35586, 35587, 35588, 35589) c6(35590, 35591) c7(bL, lD, T, dD, fM, ea, iW, eX, bO, fd, jh, mS, NJ, v, qj, ct, ci, PJ, EA, eq, eA, zw, pe, mW, aT, Ne, cy, jy, dL, bK, K, eV, ji, oi, dF, ly, je, aai, aW, Y, Of, fc, fe, Og, g, aom, Z, t, iV, lx, yl, iM, c, eM, aiM, cj, vL, at, uJ, wz, m, cP, ei, y, bt, B, pC); #c1(XBP1) c2(NP_005071) c3(X-box-binding protein 1 isoform XBP1(U)) c4(152608, 152609, 152610) c5(152611, 152612, 152613, 152614, 152615, 152616, 152617, 152618, 152619, 152620, 152621, 152622, 152623, 152624, 152625, 152626, 152627, 152628, 152629) c6( ) c7(bL, lD, T, dD, fM, ea, iW, eX, bO, fd, jh, mS, NJ, v, qj, ct, ci, PJ, EA, eq, eA, zw, pe, mW, aT, Ne, cy, jy, dL, bK, K, eV, ji, oi, dF, ly, je, aai, aW, Y, Of, fc, fe, Og, g, aom, Z, t, iV, lx, yl, iM, c, eM, aiM, cj, vL, at, uJ, wz, m, cP, ei, y, bt, B, pC); #c1(XCL1) c2(XP_011508167) c3(lymphotactin isoform X1) c4(298701) c5(298702, 298703, 298704, 298705, 298706, 298707) c6( ) c7(bM, aW, aCJ, dh, CM, aT, cj, aA, cz, aF, ey, m, ci, pb, h, y, ME, B, ajj, bA); #c1(XCL2) c2(NP_003166) c3(cytokine SCM-1 beta precursor) c4(135846) c5(135847, 135848, 135849, 135850, 135851, 135852) c6( ) c7(B, m); #c1(XCR1) c2(NP_001019815) c3(chemokine XC receptor 1) c4(27901, 27902) c5(27903, 27904, 27905, 27906, 27907, 27908, 27909, 27910, 27911, 27912, 27913, 27914, 27915, 27916, 27917, 27918) c6( ) c7(h, hH, hp, m); #c1(XDH) c2(NP_000370) c3(xanthine dehydrogenase/oxidase) c4(8211) c5(8212, 8213, 8214, 8215, 8216, 8217) c6( ) c7(bM, T, dD, wi, fR, ea, e, ht, al, fN, aA, cR, cz, bB, Xn, eq, ci, C, sI, zP, q, cd, ip, fU, nH, iu, cc, dY, HC, aT, IG, cy, DU, K, wC, zQ, aW, ff, r, fe, aF, en, t, bz, dr, bN, ar, dB, cLU, bE, gZ, E, at, wx, dy, k, Hb, m, B, rk); #c1(XG) c2(NP_001135391) c3(glycoprotein Xg isoform 2 precursor) c4(52853, 52854) c5(52855, 52856, 52857, 52858, 52859, 52860) c6( ) c7(buR, xs, KW, Ri, hQ, uY, btu, Km, cVc, yn, cVd); #c1(XG) c2(NP_001135392) c3(glycoprotein Xg isoform 3 precursor) c4(52861) c5(52862, 52863, 52864, 52865, 52866, 52867) c6( ) c7(buR, xs, KW, Ri, hQ, uY, btu, Km, cVc, yn, cVd); #c1(XG) c2(NP_780778) c3(glycoprotein Xg isoform 1 precursor) c4(251560) c5(251561, 251562, 251563, 251564, 251565, 251566, 251567, 251568, 251569, 251570, 251571) c6( ) c7(buR, xs, KW, Ri, hQ, uY, btu, Km, cVc, yn, cVd); #c1(XG) c2(XP_011543878) c3(glycoprotein Xg isoform X7) c4( ) c5(343050) c6( ) c7(buR, xs, KW, Ri, hQ, uY, btu, Km, cVc, yn, cVd); #c1(XIAP) c2(XP_011529631) c3(E3 ubiquitin-protein ligase XIAP isoform X1) c4(325158, 325159, 325160, 325161, 325162, 325163) c5(325164, 325165, 325166, 325167, 325168, 325169, 325170, 325171, 325172, 325173, 325174, 325175, 325176, 325177, 325178, 325179, 325180, 325181, 325182, 325183, 325184, 325185, 325186, 325187, 325188, 325189, 325190, 325191, 325192, 325193, 325194, 325195, 325196, 325197, 325198, 325199, 325200, 325201, 325202, 325203, 325204, 325205, 325206, 325207, 325208, 325209, 325210, 325211, 325212, 325213, 325214, 325215, 325216, 325217, 325218, 325219, 325220, 325221, 325222, 325223, 325224, 325225, 325226, 325227, 325228, 325229, 325230, 325231, 325232, 325233, 325234, 325235, 325236, 325237, 325238, 325239, 325240, 325241, 325242, 325243, 325244, 325245, 325246, 325247, 325248, 325249, 325250, 325251, 325252, 325253, 325254, 325255, 325256, 325257, 325258, 325259, 325260, 325261, 325262, 325263, 325264, 325265, 325266, 325267, 325268, 325269, 325270, 325271, 325272, 325273, 325274, 325275, 325276, 325277, 325278, 325279, 325280, 325281, 325282) c6(325283, 325284) c7(gh, T, bM, aC, fR, if, eb, bB, fd, ci, bv, aE, Be, K, eL, akV, YY, aW, ih, g, cm, bw, eM, nB, iA, cj, m, QS, cZ, wu, ht, aj, fr, qN, PJ, zP, cd, ft, jz, hw, kH, eV, dL, dd, MD, fe, kp, dw, bQL, Wt, B, fM, dA, eX, aA, hz, hy, V, q, J, eA, uT, aT, vH, cy, ae, gP, iU, nO, oV, Y, r, aZg, t, iK, ck, nM, iM, c, bt, Ze, zA, aDj, LS, kh, jh, dG, pz, hF, ad, afb, av, ib, NY, Dq, wm, uQ, d, BN, je, aF, bz, LB, es, bE, X, y, ne); #c1(XIRP1) c2(NP_001185550) c3(xin actin-binding repeat-containing protein 1 isoform 2) c4(75825) c5(75826, 75827, 75828, 75829, 75830, 75831) c6( ) c7(aj); #c1(XIRP1) c2(NP_919269) c3(xin actin-binding repeat-containing protein 1 isoform 1) c4(258368, 258369) c5(258370, 258371, 258372, 258373, 258374, 258375, 258376, 258377, 258378, 258379, 258380, 258381) c6( ) c7(aj); #c1(XIRP2) c2(NP_001073278) c3(xin actin-binding repeat-containing protein 2 isoform 2) c4(35708) c5(35709, 35710, 35711, 35712, 35713, 35714, 35715, 35716, 35717, 35718, 35719) c6( ) c7(aWm, aw, bN); #c1(XIRP2) c2(NP_001186072) c3(xin actin-binding repeat-containing protein 2 isoform 3) c4(77020, 77021) c5(77022, 77023, 77024, 77025, 77026, 77027, 77028, 77029, 77030, 77031) c6( ) c7(aWm, aw, bN); #c1(XIRP2) c2(NP_001186073) c3(xin actin-binding repeat-containing protein 2 isoform 4) c4(77032, 77033) c5(77034, 77035, 77036, 77037, 77038, 77039, 77040, 77041, 77042, 77043, 77044) c6( ) c7(aWm, aw, bN); #c1(XIRP2) c2(NP_001186074) c3(xin actin-binding repeat-containing protein 2 isoform 5) c4( ) c5(77045, 77046, 77047, 77048, 77049) c6( ) c7(aWm, aw, bN); #c1(XIRP2) c2(NP_689594) c3(xin actin-binding repeat-containing protein 2 isoform 1) c4(243123) c5(243124, 243125, 243126, 243127, 243128, 243129, 243130, 243131, 243132, 243133, 243134) c6( ) c7(aWm, aw, bN); #c1(XK) c2(NP_066569) c3(membrane transport protein XK precursor) c4(207434) c5(207435, 207436, 207437, 207438, 207439, 207440) c6( ) c7(T, mr, aA, oY, fr, bX, bgl, Ak, ZU, K, he, ZM, af, iw, aF, as, cm, xw, iA, U, iu, L); #c1(XKR4) c2(NP_443130) c3(XK-related protein 4) c4(229571) c5(229572, 229573, 229574, 229575, 229576, 229577, 229578, 229579, 229580, 229581) c6( ) c7(aw, IB, oe, cd); #c1(XKR6) c2(NP_775954) c3(XK-related protein 6) c4(250778, 250779) c5(250780, 250781, 250782, 250783, 250784, 250785, 250786, 250787, 250788, 250789, 250790, 250791) c6( ) c7(c0, eZ); #c1(XKR9) c2(NP_001274188) c3(XK-related protein 9 isoform 2) c4(106138) c5(106139, 106140, 106141, 106142, 106143, 106144, 106145, 106146, 106147, 106148) c6( ) c7(ad); #c1(XKR9) c2(XP_011515829) c3(XK-related protein 9 isoform X4) c4(308787) c5(308788, 308789, 308790, 308791, 308792, 308793) c6( ) c7(ad); #c1(XPA) c2(NP_000371) c3(DNA repair protein complementing XP-A cells) c4(8218) c5(8219, 8220, 8221, 8222, 8223, 8224) c6( ) c7(gV, T, Gl, gU, aC, yk, ht, jh, aA, n, hy, oZ, Gn, ci, fr, Qn, V, q, ad, eW, ke, av, iu, hw, aE, aXH, avA, afQ, rC, yg, aT, rA, dL, lQ, ae, Qe, aW, Y, ff, eH, CT, r, aF, La, en, bu, cl, t, g, bz, eF, op, cm, iK, es, sS, Zi, eM, iT, hk, pP, hL, m, bt, Vj, B); #c1(XPC) c2(NP_004619) c3(DNA repair protein complementing XP-C cells) c4(148230, 148231, 148232) c5(148233, 148234, 148235, 148236, 148237, 148238, 148239, 148240, 148241, 148242, 148243, 148244, 148245, 148246, 148247, 148248) c6( ) c7(T, aC, pf, if, ci, ip, afr, aE, u, Qk, ja, K, hu, eL, aW, sP, CT, La, g, eF, zE, fT, eM, cj, m, gU, ht, n, fr, h, eV, dL, hB, FZ, ks, aq, dB, hk, Vy, hL, at, nL, NB, it, B, yk, jx, eX, aA, hy, Qn, V, q, eA, yg, aT, vH, ae, s, ND, aBq, Y, r, en, cl, t, iK, bN, sS, rR, Dy, rA, bt, gV, Gl, id, Gn, ad, hX, av, I, io, rL, WW, d, hG, ff, aF, bz, dr, es, Zi, iu); #c1(XPC) c2(XP_011532394) c3(DNA repair protein complementing XP-C cells isoform X1) c4(328551, 328552) c5( ) c6( ) c7(T, aC, pf, if, ci, ip, afr, aE, u, Qk, ja, K, hu, eL, aW, sP, CT, La, g, eF, zE, fT, eM, cj, m, gU, ht, n, fr, h, eV, dL, hB, FZ, ks, aq, dB, hk, Vy, hL, at, nL, NB, it, B, yk, jx, eX, aA, hy, Qn, V, q, eA, yg, aT, vH, ae, s, ND, aBq, Y, r, en, cl, t, iK, bN, sS, rR, Dy, rA, bt, gV, Gl, id, Gn, ad, hX, av, I, io, rL, WW, d, hG, ff, aF, bz, dr, es, Zi, iu); #c1(XPC) c2(XP_011532395) c3(DNA repair protein complementing XP-C cells isoform X2) c4(328553, 328554) c5(328555, 328556, 328557, 328558, 328559, 328560, 328561, 328562, 328563, 328564, 328565, 328566, 328567, 328568, 328569, 328570, 328571, 328572, 328573, 328574, 328575, 328576, 328577, 328578, 328579, 328580) c6( ) c7(T, aC, pf, if, ci, ip, afr, aE, u, Qk, ja, K, hu, eL, aW, sP, CT, La, g, eF, zE, fT, eM, cj, m, gU, ht, n, fr, h, eV, dL, hB, FZ, ks, aq, dB, hk, Vy, hL, at, nL, NB, it, B, yk, jx, eX, aA, hy, Qn, V, q, eA, yg, aT, vH, ae, s, ND, aBq, Y, r, en, cl, t, iK, bN, sS, rR, Dy, rA, bt, gV, Gl, id, Gn, ad, hX, av, I, io, rL, WW, d, hG, ff, aF, bz, dr, es, Zi, iu); #c1(XPNPEP1) c2(NP_001161076) c3(xaa-Pro aminopeptidase 1 isoform 2) c4(65265) c5(65266, 65267, 65268, 65269, 65270, 65271) c6( ) c7(bF, Fq, f, cm, af, L); #c1(XPNPEP1) c2(NP_065116) c3(xaa-Pro aminopeptidase 1 isoform 1) c4(204003, 204004, 204005) c5(204006, 204007, 204008, 204009, 204010, 204011, 204012, 204013, 204014, 204015, 204016, 204017, 204018, 204019, 204020, 204021, 204022) c6( ) c7(bF, Fq, f, cm, af, L); #c1(XPNPEP1) c2(XP_011538435) c3(xaa-Pro aminopeptidase 1 isoform X5) c4(336229) c5( ) c6( ) c7(bF, Fq, f, cm, af, L); #c1(XPNPEP1) c2(XP_011538436) c3(xaa-Pro aminopeptidase 1 isoform X6) c4( ) c5(336230, 336231, 336232, 336233, 336234, 336235) c6( ) c7(bF, Fq, f, cm, af, L); #c1(XPNPEP2) c2(NP_003390) c3(xaa-Pro aminopeptidase 2 precursor) c4(138134, 138135) c5(138136, 138137, 138138, 138139, 138140, 138141, 138142, 138143, 138144, 138145, 138146, 138147) c6( ) c7(cVf, cVe); #c1(XPNPEP3) c2(NP_071381) c3(probable Xaa-Pro aminopeptidase 3 isoform 1) c4(211285, 211286, 211287, 211288) c5(211289, 211290, 211291, 211292, 211293, 211294, 211295, 211296, 211297, 211298, 211299, 211300, 211301, 211302, 211303, 211304, 211305, 211306, 211307, 211308, 211309, 211310, 211311, 211312) c6( ) c7(cVg, dy, vm); #c1(XPO1) c2(XP_011531399) c3(exportin-1 isoform X1) c4(327396, 327397, 327398, 327399, 327400) c5(327401, 327402, 327403, 327404, 327405, 327406, 327407, 327408, 327409, 327410, 327411, 327412, 327413, 327414, 327415, 327416, 327417, 327418, 327419) c6( ) c7(T, fd, oZ, fr, ci, eA, ad, hX, qC, x, aE, dV, Ne, h, K, rz, ae, je, Y, aq, eF, t, iR, bN, dR, ck, es, bF, iM, kP, eM, iA, cj, m, k, bD, bt, B); #c1(XPO1) c2(XP_011531400) c3(exportin-1 isoform X3) c4(327420, 327421, 327422) c5(327423, 327424, 327425, 327426, 327427, 327428, 327429, 327430, 327431, 327432, 327433, 327434, 327435, 327436, 327437, 327438, 327439, 327440, 327441, 327442, 327443, 327444, 327445, 327446, 327447, 327448, 327449, 327450, 327451, 327452, 327453, 327454, 327455, 327456, 327457, 327458, 327459) c6( ) c7(T, fd, oZ, fr, ci, eA, ad, hX, qC, x, aE, dV, Ne, h, K, rz, ae, je, Y, aq, eF, t, iR, bN, dR, ck, es, bF, iM, kP, eM, iA, cj, m, k, bD, bt, B); #c1(XPO4) c2(NP_071904) c3(exportin-4) c4(212192, 212193) c5(212194, 212195, 212196, 212197, 212198, 212199, 212200, 212201, 212202, 212203, 212204, 212205, 212206, 212207, 212208, 212209, 212210, 212211) c6( ) c7(pN, al, aq, bK, jE, iR, cm, B, hX); #c1(XPO4) c2(XP_011533499) c3(exportin-4 isoform X1) c4(329589) c5( ) c6( ) c7(pN, al, aq, bK, jE, iR, cm, B, hX); #c1(XPO5) c2(NP_065801) c3(exportin-5) c4(205561, 205562, 205563, 205564, 205565) c5(205566, 205567, 205568, 205569, 205570, 205571, 205572, 205573, 205574, 205575, 205576, 205577, 205578, 205579, 205580, 205581, 205582, 205583, 205584, 205585, 205586, 205587, 205588, 205589, 205590, 205591, 205592, 205593, 205594, 205595) c6( ) c7(XX, es, T, id, BN, vJ, il, hy, fr, ci, ne); #c1(XPO6) c2(NP_001257869) c3(exportin-6 isoform 1) c4( ) c5(95690, 95691, 95692, 95693, 95694) c6( ) c7(IB); #c1(XPO6) c2(NP_055986) c3(exportin-6 isoform 2) c4(184911, 184912) c5(184913, 184814, 184915, 184916, 184917, 184918, 184919) c6( ) c7(IB); #c1(XPO7) c2(NP_055839) c3(exportin-7) c4(183798, 183799, 183800) c5(183801, 183802, 183803, 183804, 183805, 183806, 183807, 183808, 183809, 183810, 183811, 183812, 183813, 183814, 183815, 183816, 183817, 183818) c6( ) c7(aw); #c1(XPR1) c2(NP_001129141) c3(xenotropic and polytropic retrovirus receptor 1 isoform 2) c4(50888) c5(50889, 50890, 50891, 50892, 50893, 50894) c6( ) c7(bL, T, dD, ea, jx, bB, v, eq, fr, wy, q, ad, hX, jF, I, hd, aE, yw, u, dn, aT, ji, K, jj, ae, pi, aW, eH, hl, LZ, r, fc, aq, g, hJ, eF, cm, bz, iR, bbT, jq, pv, ej, W, eM, bE, fD, ei, y, kS, B); #c1(XPR1) c2(NP_004727) c3(xenotropic and polytropic retrovirus receptor 1 isoform 1) c4(149116) c5(149117, 149118, 149119, 149120, 149121, 149122) c6( ) c7(bL, T, dD, ea, jx, bB, v, eq, fr, wy, q, ad, hX, jF, I, hd, aE, yw, u, dn, aT, ji, K, jj, ae, pi, aW, eH, hl, LZ, r, fc, aq, g, hJ, eF, cm, bz, iR, bbT, jq, pv, ej, W, eM, bE, fD, ei, y, kS, B); #c1(XRCC1) c2(NP_006288) c3(DNA repair protein XRCC1) c4(163685, 163686, 163687, 163688, 163689) c5(163690, 163691, 163692, 163693, 163694, 163695, 163696, 163697, 163698, 163699, 163700, 163701, 163702, 163703, 163704, 163705, 163706, 163707, 163708, 163709, 163710, 163711, 163712, 163713, 163714, 163715, 163716, 163717) c6( ) c7(atT, T, aC, pf, atj, if, al, aHx, bB, qj, ci, aY, aR, ip, aE, u, Qk, K, hu, pk, eL, Zm, cp, cOV, zQ, dH, axz, aW, CT, adp, nY, kt, LZ, NR, g, zE, uC, Qx, ou, fT, y, eM, nB, iA, iT, go, vA, cj, k, m, cE, iu, Vj, gU, Uc, QO, WA, sw, aWG, ht, NT, aw, n, aj, fr, qN, rP, b, ft, hw, qg, i, gd, IG, eV, dL, Gw, hB, ask, Xh, ny, FZ, AQ, ge, aq, cM, Zj, op, bbz, Sc, W, bP, dB, hk, Qu, PL hL, gw, at, NB, Pr, B, it, bL, fM, eR, yk, eX, aA, hy, v, j, Qo, Zk, V, AO, q, eA, eJ, Rl, afQ, cVh, aT, vH, Tj, ae, af, eu, qw, avV, Sh, s, vT, nO, iU, Y, yL, r, lo, en, bu, cl, t, Vi, iK, pb, ck, Qi, sS, nM, ac, Dy, kP, aJt, c, pZ, iQ, gX, fD, bt, rA, VB, ao, hS, gV, Gl, hl, id, nZ, Zl, aD, rQ, iW, jh, vr, Gn, jE, asl, hF, ad, kL, hX, dP, av, Tg, I, hd, ib, Rg, Db, py, NS, io, rX, hD, Yi, WW, BN, bug, hG, ff, eZ, Ej, aF, iV, gW, bz, es, Zi, bE, Lb, bC, Gu, adg, hE, ne, rk, pC); #c1(XRCC2) c2(NP_005422) c3(DNA repair protein XRCC2) c4(155995) c5(155996, 155997, 155998, 155999, 156000, 156001) c6( ) c7(Gl, T, os, aC, yk, iW, ht, aA, hy, oZ, Qo, V, q, eA, ip, aE, NS, Qk, bkP, aT, Gw, dL, eL, qw, aW, Y, ff, r, Qm, NR, en, g, zE, t, ck, sS, eM, nB, dB, vA, cj, m, Gu); #c1(XRCC3) c2(XP_005268103) c3(DNA repair protein XRCC3 isoform X1) c4(281521, 281522, 281523, 281524, 281525, 281526) c5(281527, 281528, 281529, 281530, 281531, 281532, 281533, 281534, 281535, 281536, 281537, 281538, 281539, 281540, 281541, 281542, 281543, 281544, 281545, 281546, 281547, 281548, 281549, 281550, 281551, 281552, 281553, 281554, 281555, 281556, 281557, 281558, 281559, 281560, 281561, 281562, 281563, 281564, 281565, 281566, 281567, 281568, 281569, 281570, 281571, 281572, 281573, 281574, 281575, 281576, 281577, 281578) c6( ) c7(atT, T, aC, pf, if, fd, ci, ip, aE, Qk, hu, eL, zQ, aW, CT, nY, g, as, bw, eM, nB, vA, m, cE, aw, ht, NT, fr, qN, zP, aLl, hw, Nn, eV, Gw, dL, Ck, ny, cM, dB, hk, hL, at, WL, B, yk, eX, aA, hy, j, bX, Qo, Zk, V, q, eA, eJ, blN, afQ, aT, ae, qw, s, Y, r, en, t, iK, ck, sS, Dy, bt, gV, Gl, aD, iW, oZ, Gn, asl, ad, av, hd, ib, Rq, Db, yt, lQ, WW, d, BN, aOb, ff, eZ, aF, bz, es, Gu); #c1(XRCC4) c2(NP_072044) c3(DNA repair protein XRCC4 isoform 1) c4(212439) c5(212440, 212441, 212442, 212443, 212444, 212445, 212446, 212447, 212448, 212449) c6( ) c7(bL, T, os, dA, iW, jh, aA, fd, oZ, fr, V, iJ, q, ad, eA, ip, dP, aHu, Db, Qk, aT, dL, eL, aW, ff, hl, r, aq, aF, en, g, iR, cm, bz, avx, op, pb, bJ, ck, eM, nB, dB, vA, cj, at, m, B); #c1(XRCC4) c2(XP_011541931) c3(DNA repair protein XRCC4 isoform X4) c4( ) c5(340449, 340450, 340451, 340452, 340453) c6( ) c7(bL, T, os, dA, iW, jh, aA, fd, oZ, fr, V, iJ, q, ad, eA, ip, dP, aHu, Db, Qk, aT, dL, eL, aW, ff, hl, r, aq, aF, en, g, iR, cm, bz, avx, op, pb, bJ, ck, eM, nB, dB, vA, cj, at, m, B); #c1(XRCC5) c2(NP_066964) c3(X-ray repair cross-complementing protein 5) c4(207847) c5(207848, 207849, 207850, 207851, 207852, 207853, 207854, 207855, 207856, 207857) c6( ) c7(T, os, id, al, aA, bB, n, hy, oZ, j, ci, fd, V, mC, q, eA, hX, ip, iu, eW, aT, Ou, dL, hS, eL, CB, B, BN, s, iU, aW, Y, ff, eZ, r, aq, alb, aF, en, g, iR, pm, iK, bz, eM, nB, dB, bE, iT, cj, at, fL, qF, m, hh, bC, it, ne, Ro); #c1(XRCC6) c2(NP_001275905) c3(X-ray repair cross-complementing protein 6 isoform 1) c4(107318, 107319, 107320) c5(107321, 107322, 107323, 107324, 107325, 107326, 107327, 107328, 107329, 107330, 107331, 107332, 107333, 107334, 107335, 107336, 107337, 107338, 107339, 107340) c6( ) c7(T, os, id, dA, if, ht, eX, aA, bB, n, hy, oZ, fr, ci, qN, fd, V, mC, q, ad, eA, eW, ib, aT, cy, eV, dL, hu, ae, eL, pi, d, s, iU, aW, Y, ff, eZ, r, alb, aF, en, g, cm, iK, bz, Ye, rR, eM, iT, dB, bE, cj, fL, m, WL, Vj, B); #c1(XRCC6) c2(NP_001275906) c3(X-ray repair cross-complementing protein 6 isoform 2) c4(107341) c5(107342, 107343, 107344, 107345, 107346, 107347) c6( ) c7(T, os, id, dA, if, ht, eX, aA, bB, n, hy, oZ, fr, ci, qN, fd, V, mC, q, ad, eA, eW, ib, aT, cy, eV, dL, hu, ae, eL, pl, d, s, iU, aW, Y, ff, eZ, r, alb, aF, en, g, cm, iK, bz, Ye, rR, eM, iT, dB, bE, cj, fL, m, WL, Vj, B); #c1(XRCC6) c2(NP_001275907) c3(X-ray repair cross-complementing protein 6 isoform 3) c4(107348) c5(107349, 107350, 107351, 107352, 107353, 107354, 107355, 107356, 107357, 107358, 107359, 107360) c6( ) c7(T, os, id, dA, if, ht, eX, aA, bB, n, hy, oZ, fr, ci, qN, fd, V, mC, q, ad, eA, eW, ib, aT, cy, eV, dL, hu, ae, eL, pl, d, s, iU, aW, Y, ff, eZ, r, alb, aF, en, g, cm, iK, bz, Ye, rR, eM, iT, dB, bE, cj, fL, m, WL, Vj, B); #c1(XRCC6BP1) c2(NP_150592) c3(mitochondrial inner membrane protease ATP23 homolog) c4(228110) c5(228111, 228112, 228113, 228114, 228115, 228116) c6( ) c7(d, eA, qy, Hp); #c1(XRN1) c2(NP_001269786) c3(5′-3′ exoribonuclease 1 isoform c) c4(102765, 102766) c5(102767, 102768, 102769, 102770, 102771, 102772, 102773, 102774, 102775, 102776, 102777, 102778) c6( ) c7(en, c, ff, K, aiM); #c1(XRN1) c2(NP_001269788) c3(5′-3′ exoribonuclease 1 isoform d) c4(102790, 102791) c5(102792, 102793, 102794, 102795, 102796, 102797, 102798, 102799, 102800, 102801, 102802, 102803) c6( ) c7(en, c, ff, K, aiM); #c1(XRN1) c2(NP_061874) c3(5′-3′ exoribonuclease 1 isoform a) c4(200874) c5(200875, 200876, 200877, 200878, 200879, 200880) c6( ) c7(en, c, ff, K, aiM); #c1(XRN2) c2(NP_036387) c3(5′-3′ exoribonuclease 2) c4(173474, 173475) c5(173476, 173477, 173478, 173479, 173480, 173481, 173482, 173483, 173484, 173485, 173486, 173487, 173488, 173489, 173490, 173491, 173492) c6( ) c7(av, bz); #c1(XRRA1) c2(NP_001257309) c3(X-ray radiation resistance-associated protein 1 isoform 2) c4(95125) c5(95126, 95127, 95128, 95129, 95130, 95131) c6( ) c7(T); #c1(XRRA1) c2(NP_892014) c3(X-ray radiation resistance-associated protein 1 isoform 1) c4(257597, 257598) c5(257599, 257600, 257601, 257602, 257603, 257604, 257605, 257606, 257607, 257608, 257609, 257610) c6( ) c7(T); #c1(XRRA1) c2(XP_011543058) c3(X-ray radiation resistance-associated protein 1 isoform X3) c4(341855, 341856) c5(341857, 341858, 341859, 341860, 341861, 341862, 341863, 341864, 341865, 341866, 341867, 341868) c6( ) c7(T); #c1(XRRA1) c2(XP_011543062) c3(X-ray radiation resistance-associated protein 1 isoform X7) c4(341869) c5( ) c6( ) c7(T); #c1(XRRA1) c2(XP_011543066) c3(X-ray radiation resistance-associated protein 1 isoform X11) c4( ) c5(341870, 341871, 341872, 341873, 341874, 341875) c6( ) c7(T); #c1(XXYLT1) c2(NP_689744) c3(xyloside xylosyltransferase 1) c4(243832, 243833, 243834) c5(243835, 243836, 243837, 243838, 243839, 243840) c6( ) c7(eM); #c1(XXYLT1) c2(XP_011510752) c3(xyloside xylosyltransferase 1 isoform X3) c4( ) c5(301158, 301159, 301160, 301161, 301162, 301163, 301164, 301165, 301166, 301167, 301168, 301169, 301170, 301171, 301172, 301173) c6( ) c7(eM); #c1(XYLB) c2(NP_005099) c3(xylulose kinase) c4(152860, 152861) c5(152862, 152863, 152864, 152865, 152866, 152867, 152868, 152869, 152870, 152871, 152872, 152873) c6( ) c7(M, EQ); #c1(XYLT1) c2(NP_071449) c3(xylosyltransferase 1 precursor) c4(211739) c5(211740, 211741, 211742, 211743, 211744, 211745) c6( ) c7(A, bf, oe, fO, bm, cz, fo, dy, IB, fq); #c1(XYLT2) c2(NP_071450) c3(xylosyltransferase 2) c4(211746, 211747) c5(211748, 211749, 211750, 211751, 211752, 211753, 211754, 211755, 211756, 211757, 211758, 211759, 211760, 211761, 211762, 211763) c6( ) c7(A, oe, cz, fo, dy, fl, qa); #c1(XYLT2) c2(XP_011523416) c3(xylosyltransferase 2 isoform X2) c4( ) c5(317942) c6( ) c7(A, oe, cz, fo, dy, fl, qa); #c1(YAE1D1) c2(NP_001269375) c3(yae1 domain-containing protein 1 isoform 2) c4(101346) c5(101347, 101348, 101349, 101350, 101351, 101352) c6( ) c7(ac); #c1(YAE1D1) c2(NP_064577) c3(yae1 domain-containing protein 1 isoform 1) c4(203059) c5(203060, 203061, 203062, 203063, 203064, 203065) c6( ) c7(ac); #c1(YAP1) c2(NP_001123617) c3(yorkie homolog isoform 1) c4(47873) c5(47874, 47875, 47876, 47877, 47878, 47879, 47880) c6( ) c7(Mb, T, aZ, if, aw, ht, aA, cz, bB, ci, qN, q, ad, ip, ft, hd, ib, aE, jz, nv, hb, cVi, aT, K, hu, ae, af, kl, Qr, Jl, aW, Y, ff, eH, r, aq, aF, en, eF, t, iK, bz, Qt, iR, iP, ck, kn, iO, Ew, Dy, eM, nB, bE, wR, np, m, it, B, hS); #c1(YAP1) c2(NP_001181973) c3(yorkie homolog isoform 3) c4(74453) c5(74454, 74455, 74456, 74457, 74458, 74459) c6( ) c7(Mb, T, aZ, if, aw, ht, aA, cz, bB, ci, qN, q, ad, ip, ft, hd, ib, aE, jz, nv, hb, cVi, aT, K, hu, ae, af, kl, Qr, Jl, aW, Y, ff, eH, r, aq, aF, en, eF, t, iK, bz, Qt, iR, iP, ck, kn, iO, Ew, Dy, eM, nB, bE, wR, np, m, it, B, hS); #c1(YAP1) c2(NP_001181974) c3(yorkie homolog isoform 4) c4(74460) c5(74461, 74462, 74463, 74464, 74465) c6( ) c7(Mb, T, aZ, if, aw, ht, aA, cz, bB, ci, qN, q, ad, ip, ft, hd, ib, aE, jz, nv, hb, cVi, aT, K, hu, ae, af, kl, Qr, Jl, aW, Y, ff, eH, r, aq, aF, en, eF, t, iK, bz, Qt, iR, iP, ck, kn, iO, Ew, Dy, eM, nB, bE, wR, np, m, it, B, hS); #c1(YAP1) c2(NP_001269027) c3(yorkie homolog isoform 5) c4(100266) c5(100267, 100268, 100269, 100270, 100271, 100272) c6( ) c7(Mb, T, aZ, if, aw, ht, aA, cz, bB, ci, qN, q, ad, ip, ft, hd, ib, aE, jz, nv, hb, cVi, aT, K, hu, ae, af, kl, Qr, Jl, aW, Y, ff, eH, r, aq, aF, en, eF, t, iK, bz, Qt, iR, iP, ck, kn, iO, Ew, Dy, eM, nB, bE, wR, np, m, it, B, hS); #c1(YAP1) c2(NP_001269029) c3(yorkie homolog isoform 8) c4(100273) c5(100274, 100275, 100276, 100277, 100278, 100279) c6( ) c7(Mb, T, aZ, if, aw, ht, aA, cz, bB, ci, qN, q, ad, ip, ft, hd, ib, aE, jz, nv, hb, cVi, aT, K, hu, ae, af, kl, Qr, Jl, aW, Y, ff, eH, r, aq, aF, en, eF, t, iK, bz, Qt, iR, iP, ck, kn, iO, Ew, Dy, eM, nB, bE, wR, np, m, it, B, hS); #c1(YAP1) c2(NP_006097) c3(yorkie homolog isoform 2) c4(161859) c5(161860, 161861, 161862, 161863, 161864, 161865, 161866, 161867) c6( ) c7(Mb, T, aZ, if, aw, ht, aA, cz, bB, ci, qN, q, ad, ip, ft, hd, ib, aE, jz, nv, hb, cVi, aT, K, hu, ae, af, kl, Qr, Jl, aW, Y, ff, eH, r, aq, aF, en, eF, t, iK, bz, Qt, iR, iP, ck, kn, iO, Ew, Dy, eM, nB, bE, wR, np, m, it, B, hS); #c1(YAP1) c2(XP_005271437) c3(transcriptional coactivator YAP1 isoform X2) c4(283397) c5(283398, 283399, 283400, 283401, 283402, 283403) c6( ) c7(Mb, T, aZ, if, aw, ht, aA, cz, bB, ci, qN, q, ad, ip, ft, hd, ib, aE, jz, nv, hb, cVi, aT, K, hu, ae, af, kl, Qr, Jl, aW, Y, ff, eH, r, aq, aF, en, eF, t, iK, bz, Qt, iR, iP, ck, kn, iO, Ew, Dy, eM, nB, bE, wR, np, m, it, B, hS); #c1(YARS2) c2(NP_001035526) c3(tyrosine-tRNA ligase, mitochondrial precursor) c4(32853) c5(32854, 32855, 32856, 32857, 32858, 32859) c6( ) c7(kA, oj, aNG, fu, bU, cVj, cxH); #c1(YBX2) c2(NP_057066) c3(Y-box-binding protein 2) c4(188743) c5(188744, 188745, 188746, 188747, 188748, 188749, 188750, 188751, 188752) c6(188753, 188754) c7(gU, ND, wu, aMv, vH, wm, Le); #c1(YBX3) c2(NP_001138898) c3(Y-box-binding protein 3 isoform b) c4(58108) c5(58109, 58110, 58111, 58112, 58113, 58114) c6( ) c7(Hw, T, py, avS, aW, Pg, jh, aT, cy, bt, B); #c1(YBX3) c2(NP_003642) c3(Y-box-binding protein 3 isoform a) c4(139852) c5(139853, 139854, 139855, 139856, 139857, 139858, 139859) c6( ) c7(Hw, T, py, avS, aW, Pg, jh, aT, cy, bt, B); #c1(YDJC) c2(NP_001017964) c3(UPF0249 protein ydjC homolog) c4(26677) c5(26678, 26679, 26680, 26681, 26682, 26683) c6( ) c7(hp, cr); #c1(YDJC) c2(XP_011528208) c3(UPF0249 protein ydjC homolog isoform X1) c4(323301) c5(323302, 323303, 323304, 323305, 323306, 323307) c6( ) c7(hp, cr); #c1(YEATS4) c2(NP_006521) c3(YEATS domain-containing protein 4 isoform 1) c4(165970) c5(165971, 165972, 165973, 165974, 165975, 165976, 165977) c6( ) c7(d, eM, pN, au, cz, as, bz, fs, eA); #c1(YES1) c2(XP_011524038) c3(tyrosine-protein kinase Yes isoform X1) c4(318621) c5(318622, 318623, 318624, 318625, 318626, 318627, 318628, 318629, 318630, 318631, 318632, 318633, 318634, 318635) c6( ) c7(T, d, aE, bE, Y, aw, aT, aA, bB, h, aF, ey, K, B); #c1(YIF1A) c2(NP_065203) c3(protein YIF1A isoform 1) c4(204575) c5(204576, 204577, 204578, 204579, 204580, 204581) c6( ) c7(aq); #c1(YIPF1) c2(XP_011539907) c3(protein YIPF1 isoform X3) c4(338191) c5(338192, 338193, 338194, 338195, 338196) c6( ) c7(bt); #c1(YIPF3) c2(NP_056203) c3(protein YIPF3) c4(186311) c5(186312, 186313, 186314, 186315, 186316, 186317) c6( ) c7(cUW, fr); #c1(YIPF5) c2(NP_001020118) c3(protein YIPF5 isoform a) c4(28238, 28239, 28240, 28241) c5(28242, 28243, 28244, 28245, 28246, 28247, 28248, 28249, 28250, 28251, 28252, 28253, 28254, 28255, 28256, 28257, 28258, 28259, 28260, 28261, 28262, 28263, 28264, 28265, 28266) c6( ) c7(ey, hp); #c1(YIPF5) c2(NP_001258661) c3(protein YIPF5 isoform b) c4(96289, 96290) c5(96291, 96292, 96293, 96294, 96295, 96296, 96297, 96298, 96299, 96300, 96301, 96302, 96303, 96304, 96305) c6( ) c7(ey, hp); #c1(YKT6) c2(NP_006546) c3(synaptobrevin homolog YKT6) c4(166142, 166143) c5(166144, 166145, 166146, 166147, 166148, 166149, 166150, 166151, 166152, 166153, 166154, 166155) c6( ) c7(aT); #c1(YLPM1) c2(NP_062535) c3(YLP motif-containing protein 1) c4(201812, 201813) c5(201814, 201815, 201816, 201817, 201818, 201819, 201820, 201821, 201822, 201823, 201824, 201825, 201826, 201827, 201828, 201829, 201830, 201831) c6( ) c7(AT, aW, aT); #c1(YLPM1) c2(XP_011535268) c3(YLP motif-containing protein 1 isoform X2) c4(332170) c5( ) c6( ) c7(AT, aW, aT); #c1(YLPM1) c2(XP_011535269) c3(YLP motif-containing protein 1 isoform X3) c4( ) c5(332171, 332172) c6( ) c7(AT, aW, aT); #c1(YME1L1) c2(NP_001240795) c3(ATP-dependent zinc metalloprotease YME1L1 isoform 4) c4(88821, 88822) c5(88823, 88824, 88825, 88826, 88827, 88828, 88829, 88830, 88831, 88832, 88833, 88834) c6( ) c7(y, ji, F, K, Ht); #c1(YME1L1) c2(NP_055078) c3(ATP-dependent zinc metalloprotease YME1L1 isoform 3) c4(178817, 178818, 178819) c5(178820, 178821, 178822, 178823, 178824, 178825, 178826, 178827, 178828, 178829, 178830, 178831, 178832, 178833, 178834, 178835, 178836) c6( ) c7(y, ji, F, K, Ht); #c1(YME1L1) c2(NP_647473) c3(ATP-dependent zinc metalloprotease YME1L1 isoform 1) c4(238620, 238621) c5(238622, 238623, 238624, 238625, 238626, 238627, 238628, 238629, 238630, 238631, 238632, 238633, 238634) c6( ) c7(y, ji, F, K, Ht); #c1(YPEL1) c2(NP_037445) c3(protein yippee-like 1) c4(175551) c5(175552, 175553, 175554, 175555, 175556, 175557) c6( ) c7(aT); #c1(YPEL2) c2(NP_001005404) c3(protein yippee-like 2) c4(21640) c5(21641, 21642, 21643, 21644, 21645, 21646) c6( ) c7(aW, aT); #c1(YPEL3) c2(NP_001138996) c3(protein yippee-like 3 isoform 2) c4( ) c5(58578, 58579, 58580, 58581, 58582) c6( ) c7(bE, aW, aT, bB, j, g, t, X); #c1(YPEL3) c2(NP_113665) c3(protein yippee-like 3 isoform 1) c4(222017, 222018) c5(222019, 222020, 222021, 222022, 222023, 222024, 222025) c6( ) c7(bE, aW, aT, bB, j, g, t, X); #c1(YPEL4) c2(NP_659445) c3(protein yippee-like 4) c4(239939, 239940) c5(239941, 239942, 239943, 239944, 239945, 239946, 239947, 239948, 239949, 239950, 239951, 239952, 239953, 239954, 239955, 239956, 239957, 239958, 239959, 239960, 239961, 239962, 239963, 239964) c6( ) c7(aT); #c1(YPEL5) c2(NP_001120872) c3(protein yippee-like 5) c4(44893) c5(44894, 44895, 44896, 44897, 44898, 44899, 44900, 44801, 44902, 44903, 44904, 44905, 44906, 44907, 44908, 44909, 44910, 44911, 44912, 44913, 44914, 44915) c6( ) c7(bX, aT); #c1(YTHDC1) c2(NP_001026902) c3(YTH domain-containing protein 1 isoform 1) c4(29944) c5(29945, 29946, 29947, 29948, 29949, 29950, 29951, 29952, 29953, 29954) c6( ) c7(T, Fw, hL, cl); #c1(YTHDC1) c2(NP_588611) c3(YTH domain-containing protein 1 isoform 2) c4(234799) c5(234800, 234801, 234802, 234803, 234804, 234805, 234806, 234807, 234808, 234809, 234810, 234811, 234812, 234813, 234814, 234815, 234816) c6( ) c7(T, Fw, hL, cl); #c1(YTHDC2) c2(NP_073739) c3(probable ATP-dependent RNA helicase YTHDC2) c4(213360) c5(213361, 213362, 213363, 213364, 213365, 213366, 213367, 213368, 213369) c6( ) c7(qb); #c1(YTHDC2) c2(XP_011541886) c3(probable ATP-dependent RNA helicase YTHDC2 isoform X4) c4(340419) c5(340420, 340421, 340422, 340423, 340424) c6( ) c7(qb); #c1(YWHAB) c2(NP_647539) c3(14-3-3 protein beta/alpha) c4(238709, 238710, 238711) c5(238712, 238713, 238714, 238715, 238716, 238717, 238718, 238719, 238720, 238721, 238722, 238723, 238724, 238725, 238726, 238727, 238728, 238729, 238730, 238731, 238732, 238733) c6( ) c7(iu, T, hl, eZ, aA, cj, GC, aF, eA, eu, bN, dS); #c1(YWHAE) c2(NP_006752) c3(14-3-3 protein epsilon) c4(167717, 167718) c5(167719, 167720, 167721, 167722, 167723, 167724, 167725, 167726, 167727, 167728, 167729, 167730) c6( ) c7(tJ, T, Js, qx, fd, qy, fZ, aA, n, ol, bS, aeu, bB, oY, fr, abQ, hF, eA, br, ad, x, oB, av, iu, cc, jZ, oW, aT, aU, dV, dz, vw, bK, h, jj, bdS, afx, pq, Nr, afy, oP, aix, hG, aW, Y, et, gK, iU, FD, pr, Mz, kD, po, aF, jh, pm, bw, aiv, bN, Nq, yd, ck, pc, UY, iA, bE, iT, kz, FB, bt, cj, pg, dW, biJ, k, eg, Th, aEc, B, Jo); #c1(YWHAG) c2(NP_036611) c3(14-3-3 protein gamma) c4(174819, 174820, 174821) c5(174822, 174823, 174824, 174825, 174826, 174827, 174828, 174829, 174830, 174831, 174832, 174833, 174834, 174835, 174836, 174837, 174838, 174839) c6( ) c7(av, alC, blw, op, aW, vA, aT, nA, hf, f, V, bz, iu, aR, eK); #c1(YWHAH) c2(NP_003396) c3(14-3-3 protein eta) c4(138163) c5(138164, 138165, 138166, 138167, 138168, 138169) c6( ) c7(T, cc, d, iT, an, aT, ti, bK, ey, bq, he, iK); #c1(YWHAQ) c2(NP_006817) c3(14-3-3 protein theta) c4(168347, 168348, 168349) c5(168350, 168351, 168352, 168353, 168354, 168355, 168356, 168357, 168358, 168359, 168360, 168361, 168362, 168363, 168364, 168365, 168366, 168367, 168368, 168369, 168370, 168371) c6( ) c7(av, Hx, aaF, dt, fR, c, WY, aav, aaG, U, aT, cj, eZ, OY, bl, act, af, aR, dS); #c1(YWHAZ) c2(NP_001129172) c3(14-3-3 protein zeta/delta) c4(50988, 50989, 50990, 50991, 50992, 50993, 50994, 50995, 50996, 50997, 50998) c5(50999, 51000, 51001, 51002, 51003, 51004, 51005, 51006, 51007, 51008, 51009, 51010, 51011, 51012, 51013, 51014, 51015, 51016, 51017, 51018, 51019, 51020, 51021, 51022, 51023, 51024, 51025, 51026, 51027, 51028, 51029, 51030, 51031, 51032, 51033, 51034, 51035, 51036, 51037, 51038, 51039, 51040, 51041, 51042, 51043, 51044, 51045, 51046, 51047, 51048, 51049, 51050, 51051, 51052, 51053, 51054, 51055, 51056, 51057, 51058, 51059, 51060, 51061, 51062, 51063, 51064, 51065, 51066, 51067, 51068, 51069, 51070, 51071, 51072, 51073, 51074, 51075, 51076, 51077, 51078, 51079, 51080, 51081, 51082, 51083, 51084, 51085, 51086, 51087, 51088, 51089, 51090, 51091, 51092, 51093, 51094, 51095, 51096, 51097, 51098, 51099, 51100) c6( ) c7(DS, bM, T, ea, e, al, bB, ci, auu, aR, gJ, K, zQ, Jl, aW, zE, cm, eM, U, m, Ro, NK, dD, Ht, aw, n, aj, zP, ai, Yc, ey, aq, ky, cA, at, B, eR, dK, aA, cz, fF, v, j, C, V, q, J, jF, axa, bUp, aT, bZk, cy, an, ae, af, ne, Pw, kl, s, ev, Zt, aAm, r, akY, en, t, iK, bN, cT, Yq, c, mf, EY, aan, dG, eq, qi, ad, av, ji, cb, ff, aF, iV, bz, bF, gk, bE, z, X, HN, aS, y, xg, iu); #c1(YWHAZ) c2(XP_011515592) c3(14-3-3 protein zeta/delta isoform X2) c4( ) c5(308420) c6( ) c7(DS, bM, T, ea, e, al, bB, ci, auu, aR, gJ, K, zQ, Jl, aW, zE, cm, eM, U, m, Re, NK, dD, Ht, aw, n, aj, zP, ai, Yc, ey, aq, ky, cA, at, B, eR, dK, aA, cz, fF, v, j, C, V, q, J, jF, axa, bUp, aT, bZk, cy, an, ae, af, ne, Pw, kl, s, ev, Zt, aAm, r, akY, en, t, iK, bN, cT, Yq, c, mf, EY, aan, dG, eq, qi, ad, av, ji, cb, ff, aF, iV, bz, bF, gk, bE, z, X, HN, aS, y, xg, iu); #c1(YY1) c2(NP_003394) c3(transcriptional repressor protein YY1) c4(138148, 138149) c5(138150, 138151, 138152, 138153, 138154, 138155, 138156, 138157, 138158, 138159, 138160, 138161, 138162) c6( ) c7(bL, bM, T, bfY, if, iW, jh, cz, bB, fd, aj, bS, bcK, ci, nA, fu, dG, bfU, v, hF, q, J, cd, ad, hX, eA, ip, mj, ib, x, pp, iX, aql, yg, kH, aT, h, vc, hn, H, RG, ae, A, iU, xR, aW, Y, eH, bfV, r, eZ, kp, hp, eF, t, fr, bz, akG, bfW, bw, hq, ck, qJ, BU, cA, avS, bE, iT, aDs, cj, bfX, k, m, pw, y, bt, Mj, B, EB, L); #c1(YY1AP1) c2(NP_001185832) c3(YY1-associated protein 1 isoform 6) c4(76487, 76488) c5(76489, 76490, 76491, 76492, 76493, 76494, 76495, 76496, 76497, 76498, 76499, 76500) c6( ) c7(T, aw, aA, cz, bB, q, ad, jz, aE, aT, ae, aW, Y, r, aq, aF, iR, t, Qt, iP, W, Dy, eM, bE, m, it, B, hS); #c1(YY1AP1) c2(NP_001185833) c3(YY1-associated protein 1 isoform 7) c4(76501, 76502, 76503) c5(76504, 76505, 76506, 76507, 76508, 76509, 76510, 76511) c6( ) c7(T, aw, aA, cz, bB, q, ad, jz, aE, aT, ae, aW, Y, r, aq, aF, iR, t, Qt, iP, W, Dy, eM, bE, m, it, B, hS); #c1(YY1AP1) c2(NP_001185834) c3(YY1-associated protein 1 isoform 8) c4( ) c5(76512, 76513, 76514, 76515, 76516, 76517, 76518, 76519, 76520, 76521, 76522, 76523, 76524, 76525, 76526, 76527, 76528, 76529, 76530, 76531, 76532) c6( ) c7(T, aw, aA, cz, bB, q, ad, jz, aE, aT, ae, aW, Y, r, aq, aF, iR, t, Qt, iP, W, Dy, eM, bE, m, it, B, hS); #c1(YY1AP1) c2(NP_001185835) c3(YY1-associated protein 1 isoform 9) c4( ) c5(76533, 76534, 76535, 76536, 76537, 76538, 76539, 76540, 76541, 76542, 76543, 76544, 76545, 76546, 76547, 76548, 76549, 76550, 76551, 76552, 76553, 76554, 76555, 76556, 76557, 76558, 76559, 76560, 76561, 76562) c6( ) c7(T, aw, aA, cz, bB, q, ad, jz, aE, aT, ae, aW, Y, r, aq, aF, iR, t, Qt, iP, W, Dy, eM, bE, m, it, B, hS); #c1(YY1AP1) c2(NP_620829) c3(YY1-associated protein 1 isoform 2) c4(238129, 238130, 238131, 238132, 238133, 238134, 238135) c5(238136, 238137, 238138, 238139, 238140, 238141) c6( ) c7(T, aw, aA, cz, bB, q, ad, jz, aE, aT, ae, aW, Y, r, aq, aF, iR, t, Qt, iP, W, Dy, eM, bE, m, it, B, hS); #c1(YY1AP1) c2(NP_620832) c3(YY1-associated protein 1 isoform 5) c4( ) c5(238142) c6( ) c7(T, aw, aA, cz, bB, q, ad, jz, aE, aT, ae, aW, Y, r, aq, aF, iR, t, Qt, iP, W, Dy, eM, bE, m, it, B, hS); #c1(YY1AP1) c2(XP_011508023) c3(YY1-associated protein 1 isoform X2) c4(298455, 298456) c5(298457, 298458, 298459, 298460, 298461, 298462, 298463, 298464, 298465, 298466, 298467, 298468, 298469, 298470, 298471, 298472, 298473) c6( ) c7(T, aw, aA, cz, bB, q, ad, jz, aE, aT, ae, aW, Y, r, aq, aF, iR, t, Qt, iP, W, Dy, eM, bE, m, it, B, hS); #c1(YY1AP1) c2(XP_011508024) c3(YY1-associated protein 1 isoform X1) c4( ) c5(298474, 298475, 298476, 298477, 298478, 298479, 298480, 298481, 298482) c6( ) c7(T, aw, aA, cz, bB, q, ad, jz, aE, aT, ae, aW, Y, r, aq, aF, iR, t, Qt, iP, W, Dy, eM, bE, m, it, B, hS); #c1(ZACN) c2(NP_851321) c3(zinc-activated ligand-gated ion channel precursor) c4(254548, 254549) c5(254550, 254551, 254552, 254553, 254554, 254555, 254556, 254557, 254558, 254559, 254560, 254561) c6( ) c7(bL, T, sS, mh, ZH, s, CN, yo, aW, lW, ff, ml, aT, hR, dG, m, ci, en, t, iK, JW); #c1(ZAK) c2(NP_598407) c3(mitogen-activated protein kinase kinase kinase MLT isoform 2) c4(235517, 235518, 235519) c5(235520, 235521, 235522, 235523, 235524, 235525, 235526, 235527, 235528, 235529, 235530, 235531, 235532, 235533, 235534, 235535, 235536, 235537, 235538, 235539, 235540, 235541) c6( ) c7(x, asc, d, fM, ac, aE, bE, jh, cj, aT, n, bB, kp, SZ, k, h, fd, bt, bz, cd); #c1(ZAK) c2(XP_005246697) c3(mitogen-activated protein kinase kinase kinase MLT isoform X1) c4(267360) c5(267361, 267362, 267363, 267364, 267365, 267366, 267367, 267368, 267369, 267370) c6( ) c7(x, asc, d, fM, ac, aE, bE, jh, cj, aT, n, bB, kp, SZ, k, h, fd, bt, bz, cd); #c1(ZAP70) c2(NP_001070) c3(tyrosine-protein kinase ZAP-70 isoform 1) c4(35264, 35265, 35266) c5( ) c6( ) c7(Gl, T, fM, dA, bRe, if, aDT, eX, jh, oY, Sv, ci, qN, ai, aHT, ad, eA, x, fX, h, eV, By, hn, baJ, cVk, Xb, akV, cVI, iU, rh, aHW, oV, Of, eZ, Og, as, aBs, Cv, ck, pc, AV, HW, cj, amP, k, aDb, y); #c1(ZAP70) c2(NP_997402) c3(tyrosine-protein kinase ZAP-70 isoform 2) c4( ) c5(265524, 265525, 265526, 265527, 265528) c6( ) c7(Gl, T, fM, dA, bRe, if, aDT, eX, jh, oY, Sv, ci, qN, ai, aHT, ad, eA, x, fX, h, eV, By, hn, baJ, cVk, Xb, akV, cVI, iU, rh, aHW, oV, Of, eZ, Og, as, aBs, Cv, ck, pc, AV, HW, cj, amP, k, aDb, y); #c1(ZAR1) c2(NP_783318) c3(zygote arrest protein 1) c4(251621) c5(251622, 251623, 251624, 251625, 251626, 251627, 251628, 251629) c6( ) c7(dB, T, if, Y, qN); #c1(ZAR1L) c2(NP_001130043) c3(ZAR1-like protein) c4(52478, 52479) c5(52480, 52481, 52482, 52483, 52484, 52485) c6( ) c7(aW, aT); #c1(ZAR1L) c2(XP_011533503) c3(ZAR1-like protein isoform X1) c4( ) c5(329590, 329591, 329592, 329593, 329594, 329595) c6( ) c7(aW, aT); #c1(ZASP) c2(NP_001276862) c3(ZO-2 associated speckle protein) c4( ) c5(108509) c6( ) c7(Ws, cc, K, oj, mx); #c1(ZBED1) c2(NP_001164606) c3(zinc finger BED domain-containing protein 1) c4(67052, 67053) c5(67054, 67055, 67056, 67057, 67058, 67059, 67060, 67061, 67062, 67063, 67064, 67065, 67066, 67067, 67068, 67069, 67070, 67071, 67072, 67073) c6( ) c7(T, aep, cB, ci, K, g, EZ, ae, eW, ad, afu); #c1(ZBED4) c2(NP_055653) c3(zinc finger BED domain-containing protein 4) c4(182546) c5(182547, 182548, 182549, 182550, 182551, 182552) c6( ) c7(uJ, ey); #c1(ZBED5) c2(NP_001137139) c3(zinc finger BED domain-containing protein 5) c4(54962) c5(54963, 54964, 54965, 54966, 54967, 54968, 54969, 54970, 54971, 54972) c6( ) c7(bL, fq, EQ, cz); #c1(ZBP1) c2(NP_001153890) c3(Z-DNA-binding protein 1 isoform c) c4(61019) c5(61020, 61021, 61022, 61023, 61024, 61025) c6( ) c7(T, aW, eZ, aT, j, fL, Ea, pb, mC); #c1(ZBP1) c2(NP_001153891) c3(Z-DNA-binding protein 1 isoform d) c4(61026) c5(61027, 61028, 61029, 61030, 61031, 61032) c6( ) c7(T, aW, eZ, aT, j, fL, Ea, pb, mC); #c1(ZBP1) c2(NP_110403) c3(Z-DNA-binding protein 1 isoform a) c4(220081, 220082, 220083) c5(220084, 220085, 220086, 220087, 220088, 220089, 220090, 220091, 220092, 220093, 220094, 220095, 220096, 220097, 220098, 220099, 220100, 220101) c6( ) c7(T, aW, eZ, aT, j, fL, Ea, pb, mC); #c1(ZBP1) c2(XP_011527359) c3(Z-DNA-binding protein 1 isoform X1) c4(321977) c5(321978, 321979, 321980, 321981, 321982, 321983) c6( ) c7(T, aW, eZ, aT, j, fL, Ea, pb, mC); #c1(ZBTB10) c2(NP_001099009) c3(zinc finger and BTB domain-containing protein 10 isoform a) c4(41630) c5(41631, 41632, 41633, 41634, 41635, 41636, 41637, 41638, 41639, 41640) c6( ) c7(aW, gT, aF, aA, aT); #c1(ZBTB10) c2(NP_001264074) c3(zinc finger and BTB domain-containing protein 1D isoform c) c4(97493) c5(97494, 97495, 97496, 97497, 97498, 97499) c6( ) c7(aW, gT, aF, aA, aT); #c1(ZBTB10) c2(NP_076418) c3(zinc finger and BTB domain-containing protein 1D isoform b) c4(214112) c5(214113, 214114, 214115, 214116, 214117, 214118) c6( ) c7(aW, gT, aF, aA, aT); #c1(ZBTB12) c2(NP_862825) c3(zinc finger and BTB domain-containing protein 12) c4( ) c5(255772, 255773, 255774, 255775, 255776, 255777, 255778, 255779, 255780, 255781, 255782, 255783, 255784, 255785, 255786, 255787, 255788) c6( ) c7(A, W, cr, eZ, V, B); #c1(ZBTB12) c2(XP_011512685) c3(zinc finger and BTB domain-containing protein 12 isoform X1) c4(303693) c5(303694, 303695, 303696) c6( ) c7(A, W, cr, eZ, V, B); #c1(ZBTB14) c2(NP_001137295) c3(zinc finger and BTB domain-containing protein 14) c4(55323) c5(55324, 55325, 55326, 55327, 55328, 55329, 55330, 55331, 55332, 55333, 55334) c6( ) c7(Be); #c1(ZBTB16) c2(NP_001018011) c3(zinc finger and BTB domain-containing protein 16) c4(26826, 26827) c5(26828, 26829, 26830, 26831, 26832, 26833, 26834, 26835, 26836, 26837, 26838, 26839, 26840, 26841, 26842, 26843, 26844) c6( ) c7(iW, bO, qN, g, ad, cVm, jj, ae, pi, cp, iU, Y, r, lo, t, ck, ac, zG, m, bD, y, bt, kS); #c1(ZBTB16) c2(XP_005271715) c3(zinc finger and BTB domain-containing protein 1G isoform X2) c4(283558, 283559) c5(283560, 283561, 283562, 283563, 283564, 283565, 283566, 283567, 283568, 283569, 283570, 283571) c6( ) c7(iW, bO, qN, q, ad, cVm, jj, ae, pi, cp, iU, Y, r, lo, t, ck, ac, zG, m, bD, y, bt, kS); #c1(ZBTB17) c2(XP_011540387) c3(zinc finger and BTB domain-containing protein 17 isoform X3) c4(338888) c5( ) c6( ) c7(T, fM, mx, jh, cm, K, m, t, AN); #c1(ZBTB17) c2(XP_011540389) c3(zinc finger and BTB domain-containing protein 17 isoform X4) c4( ) c5(338889, 338890, 338891, 338892, 338893, 338894) c6( ) c7(T, fM, mx, jh, cm, K, m, t, AN); #c1(ZBTB17) c2(XP_011540390) c3(zinc finger and BTB domain-containing protein 17 isoform X1) c4(338895) c5(338896, 338897, 338898, 338899, 338900, 338901, 338902, 338903, 338904, 338905, 338906, 338907, 338908, 338909, 338910, 338911) c6( ) c7(T, fM, mx, jh, cm, K, m, t, AN); #c1(ZBTB18) c2(NP_991331) c3(zinc finger and BTB domain-containing protein 18 isoform 1) c4(263431, 263432) c5(263433, 263434, 263435, 263436, 263437, 263438, 263439, 263440, 263441, 263442, 263443, 263444, 263445, 263446) c6( ) c7(jf, dB, cVn, uz, cVo, bp); #c1(ZBTB2) c2(NP_065912) c3(zinc finger and BTB domain-containing protein 2) c4(206196) c5(206197, 206198, 206199, 206200, 206201, 206202, 206203) c6( ) c7(aA, aF, q, r); #c1(ZBT820) c2(NP_001157814) c3(zinc finger and BTB domain-containing protein 20 isoform 1) c4(62720, 62721, 62722) c5(62723, 62724, 62725, 62726, 62727, 62728, 62729, 62730, 62731, 62732, 62733, 62734, 62735, 62736, 62737, 62738, 62739, 62740, 62741, 62742) c6( ) c7(dY, eM, cVp, aA, n, aq, aF, iR, bz, B); #c1(ZBT820) c2(NP_001157817) c3(zinc finger and BTB domain-containing protein 20 isoform 2) c4(62743) c5(62744, 62745, 62746, 62747, 62748, 62749, 62750, 62751, 62752, 62753, 62754, 62755, 62756, 62757, 62758, 62759, 62760, 62761, 62762, 62763, 62764, 62765, 62766, 62767, 62768) c6( ) c7(dY, eM, cVp, aA, n, aq, aF, iR, bz, B); #c1(ZBTB21) c2(NP_001091872) c3(zinc finger and BTB domain-containing protein 21 isoform L) c4(38741, 38742) c5(38743, 38744, 38745, 38746, 38747, 38748, 38749, 38750, 38751, 38752, 38753, 38754, 38755, 38756, 38757, 38758, 38759, 38760, 38761, 38762, 38763, 38764, 38765) c6( ) c7(f, j); #c1(ZBTB21) c2(NP_001091873) c3(zinc finger and BTB domain-containing protein 21 isoform S) c4(38766, 38767) c5(38768, 38769, 38770, 38771, 38772, 38773, 38774, 38775, 38776, 38777, 38778, 38779, 38780, 38781) c6( ) c7(f, j); #c1(ZBT822) c2(NP_001138810) c3(zinc finger and BTB domain-containing protein 22) c4(57789, 57790, 57791) c5(57792, 57793, 57794, 57795, 57796, 57797, 57798, 57799, 57800, 57801, 57802, 57803, 57804, 57805, 57806, 57807, 57808, 57809, 57810, 57811, 57812, 57813, 57814, 57815, 57816, 57817, 57818, 57819, 57820, 57821, 57822, 57823, 57824, 57825, 57826, 57827, 57828, 57829, 57830, 57831, 57832, 57833, 57834, 57835, 57836, 57837, 57838, 57839, 57840, 57841, 57842, 57843, 57844, 57845, 57846, 57847, 57848, 57849, 57850, 57851, 57852) c6( ) c7(eZ); #c1(ZBT824) c2(NP_055612) c3(zinc finger and BTB domain-containing protein 24 isoform 1) c4(182275) c5(182276, 182277, 182278, 182279, 182280, 182281) c6( ) c7(T, aW, aT, aq, cVq, nA, B); #c1(ZBT832) c2(NP_055198) c3(zinc finger and BTB domain-containing protein 32) c4(179722) c5(179723, 179724, 179725, 179726, 179727, 179728, 179729, 179730, 179731, 179732) c6( ) c7(oZ, os, jj, kS); #c1(ZBT833) c2(NP_006768) c3(transcriptional regulator Kaiso) c4(167889) c5(167890, 167891, 167892, 167893, 167894, 167895, 167896, 167897, 167898, 167899, 167900, 167901, 167902, 167903, 167904, 167905, 167906, 167907) c6( ) c7(T, X, g); #c1(ZBT834) c2(NP_001092740) c3(zinc finger and BTB domain-containing protein 34) c4( ) c5(39593, 39594, 39595, 39596, 39597) c6( ) c7(aE); #c1(ZBT834) c2(XP_005252046) c3(zinc finger and BTB domain-containing protein 34 isoform X1) c4(271501) c5(271502, 271503) c6( ) c7(aE); #c1(ZBT834) c2(XP_011517001) c3(zinc finger and BTB domain-containing protein 34 isoform X2) c4(310481) c5(310482, 310483, 310484, 310485, 310486) c6( ) c7(aE); #c1(ZBT838) c2(NP_001073881) c3(zinc finger and BTB domain-containing protein 38) c4(36220, 36221, 36222, 36223, 36224, 36225, 36226) c5(36227, 36228, 36229, 36230, 36231, 36232, 36233, 36234, 36235, 36236, 36237, 36238, 36239, 36240, 36241, 36242, 36243, 36244, 36245, 36246, 36247, 36248, 36249, 36250, 36251, 36252, 36253, 36254, 36255, 36256, 36257, 36258, 36259, 36260, 36261, 36262, 36263, 36264, 36265, 36266, 36267, 36268, 36269, 36270, 36271, 36272, 36273, 36274, 36275, 36276, 36277, 36278, 36279) c6( ) c7(xb, dt, ad, dS); #c1(ZBT838) c2(XP_005247313) c3(zinc finger and BTB domain-containing protein 38 isoform X3) c4(267790) c5(267791, 267792, 267793, 267794, 267795, 267796, 267797) c6( ) c7(xb, dt, ad, dS); #c1(ZBT838) c2(XP_011510912) c3(zinc finger and BTB domain-containing protein 38 isoform X2) c4(301370, 301371, 301372, 301373) c5(301374, 301375, 301376, 301377, 301378, 301379, 301380, 301381, 301382, 301383, 301384, 301385, 301386, 301387, 301388, 301389, 301390) c6( ) c7(xb, dt, ad, dS); #c1(ZBTB4) c2(NP_065950) c3(zinc finger and BTB domain-containing protein 4) c4(206457) c5(206458, 206459, 206460, 206461, 206462, 206463, 206464, 206465, 206466, 206467, 206468, 206469, 206470) c6( ) c7(aW, aE, ae, ad, aT); #c1(ZBTB41) c2(NP_919290) c3(zinc finger and BTB domain-containing protein 41) c4(258479) c5(258480, 258481, 258482, 258483, 258484, 258485) c6( ) c7(W); #c1(ZBT846) c2(XP_005260254) c3(zinc finger and BTB domain-containing protein 46 isoform X1) c4(276486) c5(276487, 276488, 276489, 276490, 276491, 276492, 276493, 276494, 276495, 276496, 276497, 276498, 276499, 276500) c6( ) c7(V, eA); #c1(ZBT848) c2(XP_011539612) c3(zinc finger and BTB domain-containing protein 48 isoform X1) c4(337854) c5( ) c6( ) c7(cm, T); #c1(ZBT848) c2(XP_011539614) c3(zinc finger and BTB domain-containing protein 48 isoform X2) c4( ) c5(337855, 337856, 337857, 337858, 337859, 337860) c6( ) c7(cm, T); #c1(ZBT849) c2(NP_660334) c3(zinc finger and BTB domain-containing protein 49) c4(240986, 240987) c5(240988, 240989, 240990, 240991, 240992, 240993, 240994, 240995, 240996, 240997, 240998, 240999) c6( ) c7(K); #c1(ZBT849) c2(XP_005248008) c3(zinc finger and BTB domain-containing protein 49 isoform X3) c4( ) c5(268174, 268175, 268176, 268177, 268178, 268179, 268180) c6( ) c7(K); #c1(ZBT849) c2(XP_011511718) c3(zinc finger and BTB domain-containing protein 49 isoform X2) c4(302440, 302441) c5(302442, 302443, 302444, 302445, 302446, 302447) c6( ) c7(K); #c1(ZBTB5) c2(NP_055687) c3(zinc finger and BTB domain-containing protein 5) c4(182775) c5(182776, 182777, 182778, 182779, 182780, 182781) c6( ) c7(bOL, bP); #c1(ZBTB7C) c2(NP_001034449) c3(zinc finger and BTB domain-containing protein 7C) c4( ) c5(31724, 31725, 31726, 31727, 31728, 31729, 31730, 31731) c6( ) c7(bL, es, eR, iA, h, bE, e, bB, dq, aj, mf, j, dG, v, ei, qN, aY, GR, J, ip); #c1(ZBTB7C) c2(XP_011524163) c3(zinc finger and BTB domain-containing protein 7C isoform X2) c4(318717) c5(318718, 318719, 318720, 318721, 318722, 318723, 318724, 318725, 318726, 318727, 318728) c6( ) c7(bL, es, eR, iA, h, bE, e, bB, dq, aj, mf, j, dG, v, ei, qN, aY, GR, J, ip); #c1(ZBTB7C) c2(XP_011524171) c3(zinc finger and BTB domain-containing protein 7C isoform X4) c4(318729, 318730) c5(318731, 318732, 318733) c6( ) c7(bL, es, eR, iA, h, bE, e, bB, dq, aj, mf, j, dG, v, ei, qN, aY, GR, J, ip); #c1(ZBTB9) c2(NP_689948) c3(zinc finger and BTB domain-containing protein 9) c4(244474) c5(244475, 244476, 244477, 244478, 244479, 244480, 244481, 244482, 244483, 244484) c6( ) c7(at, eZ); #c1(ZC2HC1B) c2(NP_001013645) c3(zinc finger C2HC domain-containing protein 1B) c4(25646, 25647, 25648, 25649) c5(25650, 25651, 25652, 25653, 25654, 25655, 25656, 25657, 25658, 25659, 25660, 25661, 25662, 25663, 25664, 25665, 25666, 25667, 25668, 25669, 25670, 25671, 25672, 25673) c6( ) c7(ac); #c1(ZC3H10) c2(NP_116175) c3(zinc finger CCCH domain-containing protein 10) c4(225586, 225587, 225588, 225589) c5(225590, 225591, 225592, 225593, 225594, 225595, 225596, 225597, 225598, 225599, 225600, 225601, 225602, 225603, 225604, 225605, 225606, 225607, 225608, 225609, 225610, 225611, 225612, 225613) c6( ) c7(pb); #c1(ZC3H11A) c2(NP_055642) c3(zinc finger CCCH domain-containing protein 11A) c4(182465, 182466, 182467) c5(182468, 182469, 182470, 182471, 182472, 182473, 182474, 182475, 182476, 182477, 182478, 182479, 182480, 182481, 182482, 182483, 182484, 182485, 182486, 182487, 182488, 182489, 182490, 182491, 182492, 182493, 182494, 182495, 182496, 182497, 182498, 182499, 182500) c6( ) c7(aW, cz, Be, aT); #c1(ZC3H11A) c2(XP_011508506) c3(zinc finger CCCH domain-containing protein 11A isoform X2) c4(299218) c5(299219, 299220, 299221, 299222, 299223, 299224, 299225) c6( ) c7(aW, cz, Be, aT); #c1(ZC3H12C) c2(NP_203748) c3(probable ribonuclease ZC3H12C) c4(228489) c5(228490, 228481, 228492, 228493, 228494, 228495) c6( ) c7(dh, cr); #c1(ZC3H12D) c2(NP_997243) c3(probable ribonuclease ZC3H12D) c4(265268, 265269, 265270) c5(265271, 265272, 265273, 265274, 265275, 265276, 265277, 265278, 265279, 265280, 265281, 265282, 265283, 265284, 265285, 265286, 265287, 265288, 265289, 265290, 265291, 265292) c6( ) c7(bF, bE, jh, bB, bC, bD, bz); #c1(ZC3H14) c2(NP_001153575) c3(zinc finger CCCH domain-containing protein 14 isoform 5) c4(60672) c5(60673, 60674, 60675, 60676, 60677, 60678) c6( ) c7(Hx); #c1(ZC3H14) c2(NP_001153576) c3(zinc finger CCCH domain-containing protein 14 isoform 6) c4(60679) c5(60680, 60681, 60682, 60683, 60684, 60685) c6( ) c7(Hx); #c1(ZC3H14) c2(NP_079100) c3(zinc finger CCCH domain-containing protein 14 isoform 1) c4(217016) c5(217017, 217018, 217019, 217020, 217021, 217022) c6( ) c7(Hx); #c1(ZC3H14) c2(NP_997543) c3(zinc finger CCCH domain-containing protein 14 isoform 2) c4(265586) c5(265587, 265588, 265589, 265590, 265591, 265592) c6( ) c7(Hx); #c1(ZC3H14) c2(NP_997544) c3(zinc finger CCCH domain-containing protein 14 isoform 3) c4(265593, 265594) c5(265595, 265596, 265597, 265598, 265599, 265600, 265601, 265602) c6( ) c7(Hx); #c1(ZC3H14) c2(NP_997545) c3(zinc finger CCCH domain-containing protein 14 isoform 4) c4(265603, 265604) c5(265605, 265606, 265607, 265608, 265609, 265610, 265611, 265612, 265613, 265614, 265615, 265616) c6( ) c7(Hx); #c1(ZC3H14) c2(XP_005268124) c3(zinc finger CCCH domain-containing protein 14 isoform X1) c4(281579) c5(281580, 281581, 281582, 281583, 281584, 281585) c6( ) c7(Hx); #c1(ZC3H14) c2(XP_005268125) c3(zinc finger CCCH domain-containing protein 14 isoform X2) c4(281586, 281587) c5(281588, 281589, 281590, 281591, 281592, 281593, 281594, 281595, 281596, 281597, 281598, 281599) c6( ) c7(Hx); #c1(ZC3H14) c2(XP_005268126) c3(zinc finger CCCH domain-containing protein 14 isoform X5) c4(281600) c5(281601, 281602) c6( ) c7(Hx); #c1(ZC3H14) c2(XP_005268127) c3(zinc finger CCCH domain-containing protein 14 isoform X6) c4(281603, 281604, 281605) c5(281606, 281607, 281608, 281609, 281610, 281611) c6( ) c7(Hx); #c1(ZC3H14) c2(XP_011535464) c3(zinc finger CCCH domain-containing protein 14 isoform X8) c4( ) c5(332504, 332505, 332506, 332507, 332508, 332509, 332510, 332511, 332512, 332513, 332514, 332515, 332516, 332517, 332518, 332519, 332520, 332521, 332522, 332523, 332524, 332525, 332526, 332527) c6( ) c7(Hx); #c1(ZC3H15) c2(NP_060941) c3(zinc finger CCCH domain-containing protein 15) c4(198806, 198807, 198808) c5(198809, 198810, 198811, 198812, 198813, 198814, 198815, 198816, 198817, 198818, 198819, 198820, 198821, 198822, 198823, 198824, 198825, 198826, 198827, 198828, 198829, 198830, 198831, 198832) c6( ) c7(ck, bt); #c1(ZC3H15) c2(XP_011509787) c3(zinc finger CCCH domain-containing protein 15 isoform X1) c4(300347) c5( ) c6( ) c7(ck, bt); #c1(ZC3H3) c2(NP_055932) c3(zinc finger CCCH domain-containing protein 3) c4(184512) c5(184513, 184514, 184515, 184516, 184517) c6( ) c7(ac); #c1(ZC3H3) c2(XP_006716599) c3(zinc finger CCCH domain-containing protein 3 isoform X2) c4( ) c5(290419) c6( ) c7(ac); #c1(ZC3H4) c2(NP_055983) c3(zinc finger CCCH domain-containing protein 4) c4(184877) c5(184878, 184879, 184880, 184881, 184882, 184883) c6( ) c7(fq); #c1(ZC3H4) c2(XP_011524973) c3(zinc finger CCCH domain-containing protein 4 isoform X7) c4( ) c5(319463) c6( ) c7(fq); #c1(ZC3H7A) c2(NP_054872) c3(zinc finger CCCH domain-containing protein 7A) c4(178133) c5(178134, 178135, 178136, 178137, 178138, 178139, 178140, 178141, 178142, 178143) c6( ) c7(Th, T); #c1(ZC3H7B) c2(NP_060060) c3(zinc finger CCCH domain-containing protein 78) c4(193937) c5(193938, 193939, 193940, 193941, 193942, 193943, 193944, 193945, 193946, 193947) c6( ) c7(Th, BD); #c1(ZC3HAV1) c2(NP_064504) c3(zinc finger CCCH-type antiviral protein 1 isoform 1) c4(202657, 202658, 202659) c5(202660, 202661, 202662, 202663, 202664, 202665, 202666) c6( ) c7(AT, aW, aT, h, V, hX); #c1(ZC3HAV1) c2(NP_078901) c3(zinc finger CCCH-type antiviral protein 1 isoform 2) c4( ) c5(215992, 215993, 215994, 215995, 215996, 215997, 215998, 215999, 216000, 216001, 216002) c6( ) c7(AT, aW, aT, h, V, hX); #c1(ZC3HC1) c2(NP_001269119) c3(nuclear-interacting partner of ALK isoform 2) c4(100481) c5(100482, 100483, 100484, 100485, 100486, 100487) c6( ) c7(ea, dD, j, y, eq); #c1(ZC3HC1) c2(NP_001269120) c3(nuclear-interacting partner of ALK isoform 3) c4(100488) c5(100489, 100490, 100491, 100492, 100493, 100494) c6( ) c7(ea, dD, j, y, eq); #c1(ZC3HC1) c2(NP_057562) c3(nuclear-interacting partner of ALK isoform 1) c4(191363) c5(191364, 191365, 191366, 191367, 191368, 191369) c6( ) c7(ea, dD, j, y, eq); #c1(ZC4H2) c2(NP_001171504) c3(zinc finger C4H2 domain-containing protein isoform 3) c4(70327) c5(70328, 70329, 70330, 70331, 70332, 70333) c6( ) c7(lf, oR, cVr, nA); #c1(ZC4H2) c2(NP_001230733) c3(zinc finger C4H2 domain-containing protein isoform 2) c4( ) c5(86740, 86741, 86742, 86743, 86744) c6( ) c7(lf, oR, cVr, nA); #c1(ZC4H2) c2(NP_061154) c3(zinc finger C4H2 domain-containing protein isoform 1) c4(199615, 199616, 199617) c5(199618, 199619, 199620, 199621, 199622, 199623, 199624, 199625, 199626, 199627, 199628, 199629, 199630) c6( ) c7(lf, oR, cVr, nA); #c1(ZCCHC11) c2(XP_011539402) c3(terminal uridylyltransferase 4 isoform X11) c4(337515) c5( ) c6( ) c7(T); #c1(ZCCHC11) c2(XP_011539404) c3(terminal uridylyltransferase 4 isoform X14) c4( ) c5(337516, 337517, 337518, 337519, 337520, 337521, 337522, 337523, 337524, 337525, 337526, 337527) c6( ) c7(T); #c1(ZCCHC12) c2(NP_776159) c3(zinc finger CCHC domain-containing protein 12) c4(250877) c5(250878, 250879, 250880, 250881, 250882, 250883) c6( ) c7(nf); #c1(ZCCHC14) c2(NP_055959) c3(zinc finger CCHC domain-containing protein 14) c4(184700) c5( ) c6( ) c7(awX); #c1(ZCCHC14) c2(XP_005255915) c3(zinc finger CCHC domain-containing protein 14 isoform X1) c4( ) c5(273895, 273896, 273897, 273898, 273899, 273900) c6( ) c7(awX); #c1(ZCCHC2) c2(NP_060212) c3(zinc finger CCHC domain-containing protein 2) c4(1947 G8) c5(194769, 194770, 194771, 194772, 194773, 194774, 194775) c6( ) c7(ey, ds, cd, y); #c1(ZCCHC3) c2(NP_149080) c3(zinc finger CCHC domain-containing protein 3) c4(227048) c5(227049, 227050, 227051, 227052, 227053, 227054) c6( ) c7(bK); #c1(ZCCHC6) c2(NP_001171988) c3(terminal uridylyltransferase 7 isoform 1) c4(72123, 72124) c5(72125, 72126, 72127, 72128, 72129, 72130, 72131, 72132, 72133, 72134, 72135, 72136, 72137, 72138, 72139, 72140, 72141, 72142, 72143, 72144, 72145, 72146, 72147, 72148, 72149) c6( ) c7(bA); #c1(ZCCHC6) c2(NP_001172003) c3(terminal uridylyltransferase 7 isoform 2) c4(72171, 72172, 72173) c5(72174, 72175, 72176, 72177, 72178, 72179) c6( ) c7(bA); #c1(ZCCHC6) c2(XP_005252265) c3(terminal uridylyltransferase 7 isoform XG) c4(271634) c5( ) c6( ) c7(bA); #c1(ZCCHC6) c2(XP_005252266) c3(terminal uridylyltransferase 7 isoform X7) c4(271635) c5(271636, 271637, 271638, 271639, 271640, 271641, 271642, 271643, 271644, 271645, 271646, 271647, 271648, 271649, 271650, 271651, 271652) c6( ) c7(bA); #c1(ZCCHC6) c2(XP_006717346) c3(terminal uridylyltransferase 7 isoform X2) c4(290960, 290961) c5( ) c6( ) c7(bA); #c1(ZCCHC8) c2(NP_060082) c3(zinc finger CCHC domain-containing protein 8) c4(194056, 194057) c5(194058, 194059, 194060, 194061, 194062, 194063, 194064, 194065, 194066, 194067, 194068, 194069, 194070) c6( ) c7(nA); #c1(ZCCHC8) c2(XP_011536857) c3(zinc finger CCHC domain-containing protein 8 isoform X3) c4(334547) c5(334548, 334549, 334550, 334551, 334552, 334553, 334554, 334555, 334556) c6( ) c7(nA); #c1(ZCRB1) c2(NP_149105) c3(zinc finger CCHC-type and RNA-binding motif-containing protein 1) c4(227178) c5(227179, 227180, 227181, 227182, 227183, 227184) c6( ) c7(B, cVs); #c1(ZCWPW1) c2(NP_001244937) c3(zinc finger CW-type PWWP domain protein 1 isoform 2) c4(92342) c5(92343, 92344, 92345, 92346, 92347, 92348) c6( ) c7(W); #c1(ZCWPW1) c2(NP_060454) c3(zinc finger CW-type PWWP domain protein 1 isoform 1) c4(196025) c5(196026, 196027, 196028, 196029, 196030, 196031) c6( ) c7(W); #c1(ZCWPW1) c2(XP_005250536) c3(zinc finger CW-type PWWP domain protein 1 isoform X5) c4( ) c5(270367, 270368, 270369, 270370, 270371, 270372) c6( ) c7(W); #c1(ZCWPW1) c2(XP_006716099) c3(zinc finger CW-type PWWP domain protein 1 isoform X1) c4(290036) c5( ) c6( ) c7(W); #c1(ZCWPW1) c2(XP_006716100) c3(zinc finger CW-type PWWP domain protein 1 isoform X2) c4(290037) c5(290038, 290039, 290040, 290041, 290042, 290043) c6( ) c7(W); #c1(ZCWPW1) c2(XP_006716103) c3(zinc finger CW-type PWWP domain protein 1 isoform X4) c4( ) c5(290044, 290045, 290046, 290047, 290048, 290049) c6( ) c7(W); #c1(ZDBF2) c2(NP_065974) c3(DBF4-type zinc finger-containing protein 2 isoform 1) c4(206577) c5(206578, 206579, 206580, 206581, 206582, 206583) c6( ) c7(ft); #c1(ZDHHC1) c2(NP_037436) c3(probable palmitoyltransferase ZDHHC1) c4(175522) c5(175523, 175524, 175525, 175526, 175527, 175528, 175529) c6( ) c7(bL, y, A, j, cz); #c1(ZDHHC1) c2(XP_005255972) c3(probable palmitoyltransferase ZDHHC1 isoform XG) c4( ) c5(273909) c6( ) c7(bL, y, A, j, cz); #c1(ZDHHC11) c2(NP_079062) c3(probable palmitoyltransferase ZDHHC11) c4(216852) c5(216853, 216854, 216855, 216856, 216857, 216858, 216859, 216860, 216861, 216862) c6( ) c7(eL, dL); #c1(ZDHHC12) c2(NP_116188) c3(probable palmitoyltransferase ZDHHC12) c4(225628, 225629) c5(225630, 225631, 225632, 225633, 225634, 225635, 225636, 225637, 225638, 225639, 225640, 225641, 225642, 225643, 225644, 225645, 225646, 225647, 225648, 225649, 225650, 225651) c6( ) c7(rR); #c1(ZDHHC12) c2(XP_011517418) c3(probable palmitoyltransferase ZDHHC12 isoform X2) c4( ) c5(311130, 311131, 311132, 311133, 311134, 311135, 311136, 311137) c6( ) c7(rR); #c1(ZDHHC13) c2(NP_001001483) c3(palmitoyltransferase ZDHHC13 isoform 2) c4(18508) c5( ) c6( ) c7(bA, aeM, rR, ac, R); #c1(ZDHHC13) c2(NP_061901) c3(palmitoyltransferase ZDHHC13 isoform 1) c4(201127) c5(201128, 201129, 201130, 201131, 201132, 201133, 201134, 201135, 201136, 201137, 201138, 201139) c6( ) c7(bA, aeM, rR, ac, R); #c1(ZDHHC14) c2(NP_078906) c3(probable palmitoyltransferase ZDHHC14 isoform 1) c4(216046, 216047) c5(216048, 216049, 216050, 216051, 216052, 216053, 216054, 216055, 216056, 216057, 216058, 216059) c6( ) c7(T, ae, ad); #c1(ZDHHC14) c2(NP_714968) c3(probable palmitoyltransferase ZDHHC14 isoform 2) c4(246670) c5(246671, 246672, 246673, 246674, 246675, 246676) c6( ) c7(T, ae, ad); #c1(ZDHHC15) c2(NP_001139728) c3(palmitoyltransferase ZDHHC15 isoform 2) c4(59768) c5(59769, 59770, 59771, 59772, 59773, 59774) c6( ) c7(nf, cVt, rR, rY); #c1(ZDHHC15) c2(NP_659406) c3(palmitoyltransferase ZDHHC15 isoform 1) c4(239763) c5(239764, 239765, 239766, 239767, 239768, 239769, 239770) c6( ) c7(nf, cVt, rR, rY); #c1(ZDHHC15) c2(XP_011529179) c3(palmitoyltransferase ZDHHC15 isoform X2) c4(324580) c5(324581, 324582, 324583, 324584, 324585) c6( ) c7(nf, cVt, rR, rY); #c1(ZDHHC17) c2(NP_056151) c3(palmitoyltransferase ZDHHC17) c4(185976) c5(185977, 185978, 185979, 185980, 185981, 185982, 185983, 185984, 185985, 185986) c6( ) c7(rR); #c1(ZDHHC17) c2(XP_005268808) c3(palmitoyltransferase ZDHHC17 isoform X5) c4(282103) c5(282104, 282105, 282106, 282107, 282108, 282109) c6( ) c7(rR); #c1(ZDHHC2) c2(NP_057437) c3(palmitoyltransferase ZDHHC2) c4(190794) c5(190795, 190796, 190797, 190798, 190799, 190800) c6( ) c7(T, Jl, Y, aA, aq, aF, y, B); #c1(ZDHHC7) c2(NP_001139020) c3(palmitoyltransferase ZDHHC7 isoform 1) c4(58668) c5(58669, 58670, 58671, 58672, 58673, 58674) c6( ) c7(aW); #c1(ZDHHC7) c2(NP_060210) c3(palmitoyltransferase ZDHHC7 isoform 2) c4(194761) c5(194762, 194763, 194764, 194765, 194766, 194767) c6( ) c7(aW); #c1(ZDHHC8) c2(NP_037505) c3(probable palmitoyltransferase ZDHHC8 isoform 2) c4(175889, 175890) c5(175891, 175892, 175893, 175894, 175895, 175896, 175897, 175898, 175899, 175900, 175901, 175902) c6( ) c7(agd, ib, RX, an, agY, hS); #c1(ZDHHC8) c2(XP_006724302) c3(probable palmitoyltransferase ZDHHC8 isoform X1) c4(295897) c5(295898, 295899, 295900, 295901, 295902, 295903) c6( ) c7(agd, ib, RX, an, agY, hS); #c1(ZDHHC9) c2(NP_001008223) c3(palmitoyltransferase ZDHHC9) c4(22897, 22898, 22899) c5(22900, 22901, 22902, 22903, 22904, 22905, 22906, 22907, 22908, 22909, 22910, 22911, 22912, 22913, 22914, 22915) c6( ) c7(T, ev, cVu, r, q, g, X); #c1(ZDHHC9) c2(XP_011529649) c3(palmitoyltransferase ZDHHC9 isoform X1) c4( ) c5(325298, 325299, 325300, 325301, 325302, 325303) c6( ) c7(T, ev, cVu, r, q, g, X); #c1(ZEB1) c2(NP_001121600) c3(zinc finger E-box-binding homeobox 1 isoform a) c4(45832, 45833, 45834) c5(45835, 45836, 45837, 45838, 45839, 45840, 45841, 45842, 45843, 45844, 45845, 45846, 45847) c6( ) c7(T, os, aSP, zX, cVw, bou, jh, aA, bB, n, oZ, it, j, ci, q, ad, iu, ft, hd, aOu, hw, hW, yt, ib, aE, jz, aT, ah, dL, rB, hB, ae, eL, Lu, d, kj, je, aW, Y, ev, eH, ff, eZ, r, Qm, kp, aF, en, cl, eF, t, bz, cVv, iM, kP, eM, nB, bE, bmD, X, hL, m, all, B, hS); #c1(ZEB1) c2(NP_001167564) c3(zinc finger E-box-binding homeobox 1 isoform c) c4(69279) c5(69280, 69281, 69282, 69283, 69284, 69285) c6( ) c7(T, os, aSP, zX, cVw, bou, jh, aA, bB, n, oZ, it, j, ci, q, ad, iu, ft, hd, aOu, hw, hW, yt, ib, aE, jz, aT, ah, dL, rB, hB, ae, eL, Lu, d, kj, je, aW, Y, ev, eH, ff, eZ, r, Qm, kp, aF, en, cl, eF, t, bz, cVv, iM, kP, eM, nB, bE, bmD, X, hL, m, all, B, hS); #c1(ZEB1) c2(NP_001167566) c3(zinc finger E-box-binding homeobox 1 isoform e) c4(69286) c5(69287, 69288, 69289, 69290, 69291, 69292) c6( ) c7(T, os, aSP, zX, cVw, bou, jh, aA, bB, n, oZ, it, j, ci, q, ad, iu, ft, hd, aOu, hw, hW, yt, ib, aE, jz, aT, ah, dL, rB, hB, ae, eL, Lu, d, kj, je, aW, Y, ev, eH, ff, eZ, r, Qm, kp, aF, en, cl, eF, t, bz, cVv, iM, kP, eM, nB, bE, bmD, X, hL, m, all, B, hS); #c1(ZEB1) c2(NP_001167567) c3(zinc finger E-box-binding homeobox 1 isoform f) c4(69293, 69294) c5(69295, 69296, 69297, 69298, 69299, 69300, 69301, 69302, 69303, 69304, 69305, 69306, 69307, 69308, 69309, 69310, 69311, 69312, 69313, 69314, 69315, 69316, 69317, 69318) c6( ) c7(T, os, aSP, zX, cVw, bou, jh, aA, bB, n, al, it, j, ci, q, ad, iu, ft, hd, aOu, hw, hW, yt, ib, aE, jz, aT, ah, dL, rB, hB, ae, eL, Lu, d, kj, je, aW, Y, ev, eH, ff, al, r, Qm, kp, aF, en, cl, eF, t, bz, cVv, iM, kP, eM, nB, bE, bmD, X, hL, m, all, B, hS); #c1(ZEB1) c2(NP_110378) c3(zinc finger E-box-binding homeobox 1 isoform b) c4(219774, 219775, 219776) c5(219777, 219778, 219779, 219780, 219781, 219782, 219783, 219784, 219785, 219786, 219787, 219788, 219789, 219790, 219791, 219792, 219793, 219794, 219795) c6( ) c7(T, os, aSP, zX, cVw, bou, jh, aA, bB, n, oZ, it, j, ci, q, ad, iu, ft, hd, aOu, hw, hW, yt, ib, aE, jz, aT, ah, dL, rB, hB, ae, eL, Lu, d, kj, je, aW, Y, ev, eH, ff, eZ, r, Qm, kp, aF, en, cl, eF, t, bz, cVv, iM, kP, eM, nB, bE, bmD, X, hL, m, all, B, hS); #c1(ZEB1) c2(XP_011517950) c3(zinc finger E-box-binding homeobox 1 isoform X1) c4(311955, 311956) c5(311957, 311958, 311959, 311960, 311961) c6( ) c7(T, os, aSP, zX, cVw, bou, jh, aA, bB, n, al, it, j, ci, q, ad, iu, ft, hd, aOu, hw, hW, yt, ib, aE, jz, aT, ah, dL, rB, hB, ae, eL, Lu, d, kj, je, aW, Y, ev, eH, ff, eZ, r, Qm, kp, aF, en, cl, eF, t, bz, cVv, iM, kP, eM, nB, bE, bmD, X, hL, m, all, B, hS); #c1(ZEB2) c2(NP_001165124) c3(zinc finger E-box-binding homeobox 2 isoform 2) c4(67490) c5(67491, 67492, 67493, 67494, 67495, 67496, 67497, 67498, 67499, 67500, 67501, 67502, 67503) c6( ) c7(T, aAf, bou, fG, Ol, aA, bB, bD, cQ, fr, ci, bjN, nA, q, ad, eA, ft, ib, aE, hW, yt, Tf, aT, kf, h, dL, ahE, ae, Gc, eL, aW, Y, ff, eH, r, aq, Pp, bSZ, ahl, en, ir, Z, t, eF, aF, iK, all, ck, es, eM, iA, bE, Be, m, Wl, it, B, hS); #c1(ZEB2) c2(NP_055610) c3(zinc finger E-box-binding homeobox 2 isoform 1) c4(182219, 182220, 182221, 182222, 182223, 182224, 182225) c5(182226, 182227, 182228, 182229, 182230, 182231, 182232, 182233, 182234, 182235, 182236, 182237, 182238, 182239, 182240, 182241, 182242, 182243, 182244, 182245, 182246, 182247, 182248, 182249, 182250, 182251, 182252, 182253, 182254, 182255, 182256, 182257, 182258, 182259, 182260, 182261, 182262, 182263, 182264, 182265, 182266, 182267, 182268, 182269) c6( ) c7(T, aAf, bou, fG, OL aA, bB, bD, cQ, fr, ci, bjN, nA, q, ad, eA, ft, ib, aE, hW, yt, Tf, aT, kf, h, dL, ahE, ae, Gc, eL, aW, Y, ff, eH, r, aq, Pp, bSZ, ahl, en, ir, Z, t, eF, aF, iK, all, ck, es, eM, iA, bE, Be, m, Wl, it, B, hS); #c1(ZFAND3) c2(NP_068762) c3(AN1-type zinc finger protein 3) c4(210258) c5(210259, 210260, 210261, 210262, 210263, 210264, 210265) c6( ) c7(bL); #c1(ZFAND5) c2(NP_001095891) c3(AN1-type zinc finger protein 5) c4(40899, 40900) c5(40901, 40902, 40903, 40904, 40905, 40906, 40907, 40908, 40909, 40910, 40911, 40912, 40913, 40914, 40915, 40916, 40917, 40918, 40919, 40920, 40921, 40922, 40923, 40924, 40925) c6( ) c7(ad); #c1(ZFAND6) c2(NP_001229846) c3(AN1-type zinc finger protein 6 isoform b) c4(85403) c5(85404, 85405, 85406, 85407, 85408) c6( ) c7(bL, A, cz, awj, j, lQ, Pk, y); #c1(ZFAND6) c2(NP_061879) c3(AN1-type zinc finger protein 6 isoform a) c4(200897) c5(200898, 200899, 200900, 200901, 200902, 200903, 200904, 200905, 200906, 200907, 200908, 200909, 200910, 200911, 200912, 200913, 200914, 200915, 200916, 200917) c6( ) c7(bL, A, cz, awj, j, lQ, Pk, y); #c1(ZFAND6) c2(XP_011519985) c3(AN1-type zinc finger protein 6 isoform X2) c4( ) c5(314841, 314842, 314843, 314844, 314845, 314846, 314847, 314848) c6( ) c7(bL, A, cz, awj, j, lQ, Pk, y); #c1(ZFAT) c2(NP_001025110) c3(zinc finger protein ZFAT isoform 2) c4(29332) c5(29333, 29334, 29335, 29336, 29337, 29338, 29339, 29340, 29341, 29342, 29343, 29344, 29345, 29346) c6( ) c7(bL, A, Lj, cz, hD, cLn, hz, j, y, yF); #c1(ZFAT) c2(NP_001167628) c3(zinc finger protein ZFAT isoform 3) c4(69457) c5(69458, 69459, 69460, 69461, 69462, 69463) c6( ) c7(bL, A, Lj, cz, hD, cLn, hz, j, y, yF); #c1(ZFAT) c2(NP_001167629) c3(zinc finger protein ZFAT isoform 4) c4(69464) c5(69465, 69466, 69467, 69468, 69469, 69470) c6( ) c7(bL, A, Lj, cz, hD, cLn, hz, j, y, yF); #c1(ZFAT) c2(NP_065914) c3(zinc finger protein ZFAT isoform 1) c4(206204) c5(206205, 206206, 206207, 206208, 206209, 206210, 206211, 206212, 206213, 206214) c6( ) c7(bL, A, Lj, cz, hD, cLn, hz, j, y, yF); #c1(ZFAT) c2(XP_011515506) c3(zinc finger protein ZFAT isoform X2) c4(308358) c5( ) c6( ) c7(bL, A, Lj, cz, hD, cLn, hz, j, y, yF); #c1(ZFC3H1) c2(NP_659419) c3(zinc finger C3H1 domain-containing protein) c4(239799, 239800) c5(239801, 239802, 239803, 239804, 239805, 239806, 239807, 239808, 239809, 239810, 239811, 239812) c6( ) c7(j); #c1(ZFHX2) c2(XP_006720345) c3(zinc finger homeobox protein 2 isoform X5) c4( ) c5(293502) c6( ) c7(fq); #c1(ZFHX2) c2(XP_011535551) c3(zinc finger homeobox protein 2 isoform X1) c4(332609, 332610, 332611) c5(332612, 332613, 332614, 332615, 332616, 332617, 332618, 332619, 332620, 332621, 332622, 332623, 332624, 332625, 332626, 332627, 332628, 332629, 332630) c6( ) c7(fq); #c1(ZFHX2) c2(XP_011535552) c3(zinc finger homeobox protein 2 isoform X2) c4(332631, 332632) c5( ) c6( ) c7(fq); #c1(ZFHX2) c2(XP_011535553) c3(zinc finger homeobox protein 2 isoform X3) c4( ) c5(332633, 332634, 332635, 332636, 332637, 332638, 332639, 332640, 332641, 332642, 332643, 332644) c6( ) c7(fq); #c1(ZFHX2) c2(XP_011535554) c3(zinc finger homeobox protein 2 isoform X4) c4( ) c5(332645) c6( ) c7(fq); #c1(ZFHX3) c2(NP_001158238) c3(zinc finger homeobox protein 3 isoform B) c4(63491) c5(63492, 63493, 63494, 63495, 63496) c6( ) c7(T, mr, wL, if, e, aw, aA, aj, j, qN, ad, b, M, aT, ae, eu, aW, aq, aF, pT, cm, iK, fq, ac, i, If, B); #c1(ZFHX3) c2(NP_008816) c3(zinc finger homeobox protein 3 isoform A) c4(168778) c5(168779, 168780, 168781, 168782, 168783, 168784, 168785) c6( ) c7(T, mr, wL, if, e, aw, aA, aj, j, qN, ad, b, M, aT, ae, eu, aW, aq, aF, pT, cm, iK, fq, ac, i, If, B); #c1(ZFHX4) c2(XP_011515897) c3(zinc finger homeobox protein 4 isoform X1) c4(309002, 309003, 309004) c5(309005, 309006, 309007, 309008, 309009, 309010, 309011, 309012, 309013, 309014, 309015, 309016, 309017, 309018, 309019, 309020, 309021, 309022, 309023, 309024, 309025, 309026, 309027, 309028, 309029, 309030, 309031, 309032, 309033, 309034, 309035, 309036, 309037, 309038, 309039) c6( ) c7(iC, KG, cVx, d, eA); #c1(ZFHX4) c2(XP_011515898) c3(zinc finger homeobox protein 4 isoform X2) c4(309040, 309041, 309042, 309043) c5(309044, 309045, 309046, 309047, 309048, 309049, 309050, 309051, 309052, 309053, 309054, 309055, 309056, 309057, 309058, 309059, 309060, 309061, 309062, 309063) c6( ) c7(iC, KG, cVx, d, eA); #c1(ZFHX4) c2(XP_011515899) c3(zinc finger homeobox protein 4 isoform X3) c4(309064) c5(309065) c6( ) c7(iC, KG, cVx, d, eA); #c1(ZFP1) c2(XP_011521223) c3(zinc finger protein 1 homolog isoform X2) c4( ) c5(316143, 316144, 316145) c6( ) c7(bP, T, ae, ad, bA); #c1(ZFP30) c2(NP_055713) c3(zinc finger protein 30 homolog) c4(182994) c5(182995, 182996, 182997, 182998, 182999, 183000, 183001, 183002, 183003, 183004, 183005, 183006, 183007, 183008) c6( ) c7(ac); #c1(ZFP30) c2(XP_011524942) c3(zinc finger protein 30 homolog isoform X4) c4(319424) c5(319425, 319426, 319427, 319428, 319429, 319430, 319431) c6( ) c7(ac); #c1(ZFP36) c2(NP_003398) c3(tristetraprolin) c4(138170) c5(138171, 138172, 138173, 138174, 138175, 138176, 138177, 138178) c6( ) c7(T, DM, dD, eR, Ke, ea, if, DV, jh, bB, aj, bS, j, ci, v, eq, qN, ai, J, ad, hX, eA, ke, eW, gI, aT, h, DO, DG, jj, d, s, aW, ev, gC, dN, aq, lo, iR, cM, iK, ck, DT, bE, dh, aeM, ei, y, kS, B); #c1(ZFP36L1) c2(NP_001231630) c3(zinc finger protein 36, C3H1 type-like 1 isoform 2) c4(87360, 87361) c5(87362, 87363, 87364, 87365) c6( ) c7(x, Do, aW, aT, hn, hp, m, k, cl, g, V, aiJ); #c1(ZFP36L1) c2(NP_004917) c3(zinc finger protein 36, C3H1 type-like 1 isoform 1) c4( ) c5(150762, 150763, 150764, 150765, 150766, 150767, 150768, 150769, 150770, 150771, 150772, 150773, 150774) c6( ) c7(x, Do, aW, aT, hn, hp, m, k, cl, g, V, aiJ); #c1(ZFP36L2) c2(NP_008818) c3(zinc finger protein 36, C3H1 type-like 2) c4(168808) c5(168809, 168810, 168811, 168812, 168813, 168814, 168815, 168816) c6( ) c7(ck, nJ, T, x, CN, eM, Qu, aW, ff, jh, aT, hn, k, en, hF, bt, ad); #c1(ZFP37) c2(NP_001269444) c3(zinc finger protein 37 homolog isoform 1) c4(101676) c5(101677, 101678, 101679, 101680, 101681, 101682) c6( ) c7(cvZ, K, cVy, atb); #c1(ZFP37) c2(NP_001269447) c3(zinc finger protein 37 homolog isoform 2) c4(101689) c5(101690, 101691, 101692, 101693, 101694, 101695) c6( ) c7(cvZ, K, cVy, atb); #c1(ZFP37) c2(NP_003399) c3(zinc finger protein 37 homolog isoform 3) c4(138179) c5(138180, 138181, 138182, 138183, 138184, 138185, 138186) c6( ) c7(cvZ, K, cVy, atb); #c1(ZFP42) c2(NP_001291287) c3(zinc finger protein 42 homolog) c4(115633) c5(115634, 115635, 115636, 115637, 115638, 115639, 115640, 115641, 115642, 115643, 115644) c6( ) c7(es, T, d, Uc, iM, Db, wu, LX, eD, je, Hn, np, ci, wm, fr, lu, ae, eA, ad); #c1(ZFP57) c2(XP_006715150) c3(zinc finger protein 57 homolog isoform X2) c4( ) c5(288800, 288801, 288802, 288803, 288804, 288805) c6( ) c7(A, d, mh, lW, ml, eZ, aj, hH, fq, J); #c1(ZFP57) c2(XP_011512872) c3(zinc finger protein 57 homolog isoform X1) c4(304167, 304168, 304169, 304170) c5(304171, 304172, 304173, 304174, 304175, 304176, 304177, 304178, 304179, 304180, 304181, 304182, 304183, 304184, 304185, 304186, 304187, 304188, 304189, 304190, 304191, 304192, 304193, 304194, 304195, 304196, 304197, 304198, 304199, 304200, 304201, 304202, 304203, 304204, 304205, 304206, 304207, 304208, 304209, 304210, 304211, 304212, 304213, 304214, 304215, 304216, 304217, 304218, 304219, 304220, 304221, 304222, 304223, 304224, 304225, 304226, 304227, 304228, 304229, 304230, 304231, 304232, 304233, 304234, 304235, 304236, 304237, 304238, 304239, 304240, 304241, 304242, 304243, 304244, 304245, 304246, 304247) c6( ) c7(A, d, mh, lW, mL eZ, aj, hH, fq, J); #c1(ZFP64) c2(NP_060667) c3(zinc finger protein 64 isoform a) c4(197073) c5(197074, 197075, 197076, 197077, 197078, 197079, 197080) c6( ) c7(c, aA); #c1(ZFPG4) c2(NP_071371) c3(zinc finger protein 64 isoform b) c4(211223) c5(211224, 211225, 211226, 211227, 211228, 211229) c6( ) c7(c, aA); #c1(ZFP64) c2(NP_955458) c3(zinc finger protein 64 isoform c) c4(261778, 261779) c5(261780, 261781, 261782, 261783, 261784, 261785, 261786, 261787, 261788, 261789, 261790, 261791) c6( ) c7(c, aA); #c1(ZFP64) c2(NP_955459) c3(zinc finger protein 64 isoform d) c4(261792, 261793, 261794) c5(261795, 261796, 261797, 261798, 261799, 261800, 261801, 261802, 261803, 261804, 261805, 261806) c6( ) c7(c, aA); #c1(ZFP64) c2(XP_005260507) c3(zinc finger protein 64 isoform X3) c4(276572) c5(276573, 276574, 276575, 276576, 276577, 276578, 276579, 276580, 276581, 276582, 276583, 276584) c6( ) c7(c, aA); #c1(ZFP64) c2(XP_006723885) c3(zinc finger protein 64 isoform X2) c4(295417, 295418) c5(295419, 295420, 295421, 295422, 295423, 295424, 295425, 295426, 295427, 295428, 295429, 295430) c6( ) c7(c, aA); #c1(ZFP82) c2(NP_597723) c3(zinc finger protein 82 homolog) c4(235112, 235113) c5(235114, 235115, 235116, 235117, 235118, 235119) c6( ) c7(aF, aA); #c1(ZFP82) c2(XP_005258867) c3(zinc finger protein 82 homolog isoform X1) c4( ) c5(275838, 275839, 275840, 275841, 275842, 275843) c6( ) c7(aF, aA); #c1(ZFP91) c2(NP_444251) c3(E3 ubiquitin-protein ligase ZFP91 isoform 1) c4(230096, 230097) c5(230098, 230099, 230100, 230101, 230102, 230103, 230104, 230105, 230106, 230107, 230108, 230109, 230110) c6( ) c7(bt); #c1(ZFPM1) c2(NP_722520) c3(zinc finger protein ZFPM1) c4(246786) c5(246787, 246788, 246789, 246790, 246791, 246792, 246793) c6( ) c7(BU, oW, bzB, at, pg, dL, aGd, DU); #c1(ZFPM1) c2(XP_011521214) c3(zinc finger protein ZFPM1 isoform X1) c4( ) c5(316141) c6( ) c7(BU, oW, bzB, at, pg, dL, aGd, DU); #c1(ZFPM1) c2(XP_011521219) c3(zinc finger protein ZFPM1 isoform X6) c4( ) c5(316142) c6( ) c7(BU, oW, bzB, at, pg, dL, aGd, DU); #c1(ZFPM2) c2(NP_036214) c3(zinc finger protein ZFPM2) c4(172410) c5(172411, 172412, 172413, 172414, 172415, 172416, 172417) c6( ) c7(Mg, aLi, aeT, MS, vJ, acl, wk, cVz, bs, adW, UD, cm, aLn, bw, cVA, bD, t, er, cd, br); #c1(ZFPM2) c2(XP_011515249) c3(zinc finger protein ZFPM2 isoform X2) c4( ) c5(308064) c6( ) c7(Mg, aLi, aeT, MS, vJ, acl, wk, cVz, bs, adW, UD, cm, aLn, bw, cVA, bD, t, er, cd, br); #c1(ZFPM2) c2(XP_011515250) c3(zinc finger protein ZFPM2 isoform X3) c4(308065, 308066) c5(308067, 308068, 308069, 308070, 308071, 308072, 308073, 308074, 308075) c6( ) c7(Mg, aLi, aeT, MS, vJ, acl, wk, cVz, bs, adW, UD, cm, aLn, bw, cVA, bD, t, er, cd, br); #c1(ZFPM2) c2(XP_011515251) c3(zinc finger protein ZFPM2 isoform X4) c4( ) c5(308076, 308077, 308078, 308079, 308080, 308081, 308082) c6( ) c7(Mg, aLi, aeT, MS, vJ, acl, wk, cVz, bs, adW, UD, cm, aLn, bw, cVA, bD, t, er, cd, br); #c1(ZFR) c2(NP_057191) c3(zinc finger RNA-binding protein) c4(189383, 189384, 189385) c5(189386, 189387, 189388, 189389, 189390, 189391, 189392, 189393, 189394, 189395, 189396, 189397, 189398, 189399, 189400, 189401, 189402, 189403, 189404) c6( ) c7(sp); #c1(ZFR2) c2(NP_001139112) c3(zinc finger RNA-binding protein 2 isoform 2) c4(58692) c5(58693, 58694, 58695, 58696, 58697, 58698) c6( ) c7(cz); #c1(ZFR2) c2(NP_055989) c3(zinc finger RNA-binding protein 2 isoform 1) c4(184960, 184961) c5(184962, 184963, 184964, 184965, 184966, 184967) c6( ) c7(cz); #c1(ZFR2) c2(XP_011526135) c3(zinc finger RNA-binding protein 2 isoform X5) c4( ) c5(320401, 320402, 320403, 320404, 320405, 320406) c6( ) c7(cz); #c1(ZFX) c2(NP_001171557) c3(zinc finger X-chromosomal protein isoform 2) c4( ) c5(70577, 70578, 70579, 70580, 70581) c6( ) c7(T, eM, vJ, aW, aT, aA, Ej, Fb, aF, eA, ae, B, ad); #c1(ZFX) c2(NP_001171566) c3(zinc finger X-chromosomal protein isoform 3) c4(70609) c5(70610, 70611, 70612, 70613, 70614, 70615, 70616, 70617, 70618, 70619, 70620, 70621, 70622, 70623, 70624, 70625, 70626, 70627, 70628, 70629, 70630, 70631) c6( ) c7(T, eM, vJ, aW, aT, aA, Ej, Fb, aF, eA, ae, B, ad); #c1(ZFX) c2(XP_005274649) c3(zinc finger X-chromosomal protein isoform X1) c4(285269, 285270, 285271, 285272) c5(285273, 285274, 285275, 285276, 285277, 285278, 285279, 285280, 285281, 285282, 285283, 285284, 285285, 285286, 285287, 285288, 285289, 285290, 285291, 285292, 285293) c6( ) c7(T, eM, vJ, aW, aT, aA, Ej, Fb, aF, eA, ae, B, ad); #c1(ZFX) c2(XP_006724578) c3(zinc finger X-chromosomal protein isoform X3) c4(296087) c5(296088, 296089, 296090, 296091, 296092, 296093) c6( ) c7(T, eM, vJ, aW, aT, aA, Ej, Fb, aF, eA, ae, B, ad); #c1(ZFX) c2(XP_011543880) c3(zinc finger X-chromosomal protein isoform X2) c4(343051, 343052) c5(343053, 343054, 343055, 343056, 343057, 343058) c6( ) c7(T, eM, vJ, aW, aT, aA, Ej, Fb, aF, eA, ae, B, ad); #c1(ZFX) c2(XP_011543885) c3(zinc finger X-chromosomal protein isoform X4) c4(343059) c5(343060, 343061) c6( ) c7(T, eM, vJ, aW, aT, aA, Ej, Fb, aF, eA, ae, B, ad); #c1(ZFY) c2(NP_001138747) c3(zinc finger Y-chromosomal protein isoform 2) c4(57519) c5( ) c6( ) c7(bfh, aeT, clZ, vJ, bff, UD, Pp, Fb, g, f, Df); #c1(ZFY) c2(NP_001138748) c3(zinc finger Y-chromosomal protein isoform 3) c4(57520) c5(57521, 57522, 57523, 57524, 57525, 57526) c6( ) c7(bfh, aeT, clZ, vJ, bff, UD, Pp, Fb, g, f, Df); #c1(ZFY) c2(XP_006724936) c3(zinc finger Y-chromosomal protein isoform X1) c4(296494) c5(296495, 296496, 296497, 296498, 296499, 296500, 296501, 296502, 296503, 296504, 296505, 296506, 296507) c6( ) c7(bfh, aeT, clZ, vJ, bff, UD, Pp, Fb, g, f, Df); #c1(ZFY) c2(XP_011529777) c3(zinc finger Y-chromosomal protein isoform X3) c4(325565) c5(325566, 325567, 325568, 325569, 325570, 325571, 325572, 325573, 325574, 325575, 325576, 325577, 325578) c6( ) c7(bfh, aeT, clZ, vJ, bff, UD, Pp, Fb, g, f, Df); #c1(ZFYVE19) c2(NP_001070736) c3(abscission/NoCut checkpoint regulator isoform 1) c4(34835) c5(34836, 34837, 34838, 34839, 34840, 34841) c6( ) c7(ck); #c1(ZFYVE19) c2(NP_001245349) c3(abscission/NoCut checkpoint regulator isoform 2) c4(93209) c5(93210, 93211, 93212, 93213, 93214, 93215) c6( ) c7(ck); #c1(ZFYVE19) c2(NP_001245350) c3(abscission/NoCut checkpoint regulator isoform 4) c4( ) c5(93216, 93217, 93218, 93219, 93220) c6( ) c7(ck); #c1(ZFYVE19) c2(NP_116239) c3(abscission/NoCut checkpoint regulator isoform 3) c4(225902, 225903) c5(225904, 225905, 225906, 225907, 225908, 225909, 225910) c6( ) c7(ck); #c1(ZFYVE21) c2(NP_001185882) c3(zinc finger FYVE domain-containing protein 21 isoform 1) c4(76635) c5(76636, 76637, 76638, 76639, 76640, 76641) c6( ) c7(hk, Y); #c1(ZFYVE21) c2(NP_076976) c3(zinc finger FYVE domain-containing protein 21 isoform 2) c4(214550) c5(214551, 214552, 214553, 214554, 214555, 214556) c6( ) c7(hk, Y); #c1(ZFYVE26) c2(NP_056161) c3(zinc finger FYVE domain-containing protein 26) c4(186040, 186041) c5(186042, 186043, 186044, 186045, 186046, 186047, 186048, 186049, 186050, 18605L186052, 186053) c6( ) c7(ky, bcS, aV, aW, Kk, cIB, ha, tx, aT, nw, bk, nA, Qn); #c1(ZFYVE27) c2(NP_001002261) c3(protrudin isoform a) c4(19477, 19478) c5(19479, 19480, 19481, 19482, 19483, 19484, 19485, 19486, 19487, 19488, 19489, 19490) c6( ) c7(aV, cVB); #c1(ZFYVE27) c2(NP_001002262) c3(protrudin isoform c) c4(19491, 19492) c5(19493, 19494, 19495, 19496, 19497, 19498, 19499, 19500, 19501, 19502, 19503, 19504) c6( ) c7(aV, cVB); #c1(ZFYVE27) c2(NP_001167590) c3(protrudin isoform d) c4(69353) c5(69354, 69355, 69356, 69357, 69358, 69359) c6( ) c7(aV, cVB); #c1(ZFYVE27) c2(NP_001167591) c3(protrudin isoform e) c4(69360) c5(69361, 69362, 69363, 69364, 69365, 69366) c6( ) c7(aV, cVB); #c1(ZFYVE27) c2(NP_001167592) c3(protrudin isoform f) c4(69367) c5(69368, 69369, 69370, 69371, 69372) c6( ) c7(aV, cVB); #c1(ZFYVE27) c2(NP_001167593) c3(protrudin isoform g) c4(69373) c5(69374, 69375, 69376, 69377, 69378, 69379) c6( ) c7(aV, cVB); #c1(ZFYVE27) c2(NP_653189) c3(protrudin isoform b) c4(238993) c5(238994, 238995, 238996, 238997, 238998, 238999) c6( ) c7(aV, cVB); #c1(ZFYVE27) c2(XP_005269562) c3(protrudin isoform X4) c4( ) c5(282647) c6( ) c7(aV, cVB); #c1(ZFYVE28) c2(NP_001166127) c3(lateral signaling target protein 2 homolog isoform 3) c4(68255) c5(68256, 68257, 68258, 68259, 68260, 68261) c6( ) c7(Ea); #c1(ZFYVE28) c2(NP_001166128) c3(lateral signaling target protein 2 homolog isoform 4) c4(68262) c5(68263, 68264, 68265, 68266, 68267, 68268) c6( ) c7(Ea); #c1(ZFYVE28) c2(NP_001166129) c3(lateral signaling target protein 2 homolog isoform 5) c4(68269) c5(68270, 68271, 68272, 68273, 68274, 68275) c6( ) c7(Ea); #c1(ZFYVE28) c2(NP_001166130) c3(lateral signaling target protein 2 homolog isoform 1) c4( ) c5(68276, 68277, 68278, 68279, 68280) c6( ) c7(Ea); #c1(ZFYVE28) c2(NP_001166131) c3(lateral signaling target protein 2 homolog isoform 6) c4( ) c5(68281, 68282, 68283, 68284, 68285) c6( ) c7(Ea); #c1(ZFYVE28) c2(NP_066023) c3(lateral signaling target protein 2 homolog isoform 2) c4(206787, 206788) c5(206789, 206790, 206791, 206792, 206793, 206794, 206795) c6( ) c7(Ea); #c1(ZFYVE28) c2(XP_006713963) c3(lateral signaling target protein 2 homolog isoform X1) c4(287434) c5( ) c6( ) c7(Ea); #c1(ZFYVE28) c2(XP_006713967) c3(lateral signaling target protein 2 homolog isoform X8) c4( ) c5(287435) c6( ) c7(Ea); #c1(ZFYVE9) c2(XP_011540739) c3(zinc finger FYVE domain-containing protein 9 isoform X1) c4(339299, 339300) c5(339301, 339302, 339303, 339304, 339305, 339306, 339307, 339308, 339309, 339310, 339311, 339312, 339313, 339314, 339315, 339316) c6( ) c7(T, jz, fM, y, wO, ds, tT, anV, aW, aT, m, akr, t, iK, q, ad, aa); #c1(ZG16B) c2(NP_660295) c3(zymogen granule protein 16 homolog B precursor) c4(240770) c5(240771, 240772, 240773, 240774, 240775, 240776, 240777, 240778) c6(240779, 240780) c7(T, aC, aE); #c1(ZGLP1) c2(NP_001096637) c3(GATA-type zinc finger protein 1) c4(41256) c5(41257, 41258, 41259, 41260, 41261, 41262) c6( ) c7(bL, mj, A, dA, e, al, jy, blg, dG, j, aj, v, ra, J, hm); #c1(ZGPAT) c2(NP_001076582) c3(zinc finger CCCH-type with G patch domain-containing protein isoform c) c4(37501) c5(37502, 37503, 37504, 37505, 37506, 37507, 37508, 37509, 37510, 37511, 37512, 37513, 37514, 37515) c6( ) c7(bL, A, kj, yw, aE, cz, pz, fe, aj, zx, K, j, eA, y, ae, B, J, ad); #c1(ZGPAT) c2(NP_001182583) c3(zinc finger CCCH-type with G patch domain-containing protein isoform d) c4(75095) c5(75096, 75097, 75098, 75099, 75100, 75101, 75102, 75103, 75104, 75105, 75106, 75107) c6( ) c7(bL, A, kj, yw, aE, cz, pz, fe, aj, zx, K, j, eA, y, ae, B, J, ad); #c1(ZGPAT) c2(NP_115916) c3(zinc finger CCCH-type with G patch domain-containing protein isoform a) c4(224667, 224668) c5(224669, 224670, 224671, 224672, 224673, 224674) c6( ) c7(bL, A, kj, yw, aE, cz, pz, fe, aj, zx, K, j, eA, y, ae, B, J, ad); #c1(ZHX1) c2(NP_009153) c3(zinc fingers and homeoboxes protein 1) c4(171162) c5(171163, 171164, 171165, 171166, 171167, 171168, 171169, 171170, 171171, 171172, 171173, 171174, 171175, 171176, 171177) c6( ) c7(aF, aA); #c1(ZHX2) c2(XP_011515234) c3(zinc fingers and homeoboxes protein 2 isoform X1) c4(308048, 308049) c5(308050, 308051, 308052, 308053, 308054, 308055, 308056, 308057, 308058, 308059, 308060, 308061, 308062) c6( ) c7(T, yS, yk, eX, bO, aA, bB, fd, kv, ci, Qp, q, ad, eA, zn, dP, afr, hd, aE, Rq, nv, pX, nl, gd, aT, cyn, eV, K, lQ, ae, cp, eG, Uf, oS, BO, iU, aW, Y, eH, nh, r, aq, kp, aF, g, cl, as, eF, iR, bz, Qt, iP, Hp, ck, nM, Dy, eM, nB, dB, bE, iT, Ew, aaG, Qw, adg, bt, B, fW); #c1(ZIC1) c2(NP_003403) c3(zinc finger protein ZIC1) c4(138187) c5(138188, 138189, 138190, 138191, 138192, 138193, 138194) c6( ) c7(T, YU, aA, bB, Xr, V, q, aR, ft, hd, MG, jf, Ng, nO, r, atf, aF, bz, nM, nB, dB, Ip, bE, au, gX, Km, ZW, B); #c1(ZIC2) c2(NP_009060) c3(zinc finger protein ZIC 2) c4(170541, 170542) c5(170543, 170544, 170545, 170546, 170547, 170548, 170549, 170550) c6( ) c7(jf, cZ, ft, bPl, bPt, Ip, if, FB, asl, ff, Be, r, Xr, en, cl, qN, ZW, q, aR, ad, MG); #c1(ZIC2) c2(XP_011519412) c3(zinc finger protein ZIC 2 isoform X1) c4(314078) c5(314079, 314080, 314081, 314082, 314083, 314084, 314085, 314086, 314087, 314088, 314089) c6( ) c7(jf, cZ, ft, bPl, bPt, Ip, if, FB, asl, ff, Be, r, Xr, en, cl, qN, ZW, q, aR, ad, MG); #c1(ZIC3) c2(NP_003404) c3(zinc finger protein ZIC 3) c4(138195, 138196) c5(138197, 138198, 138199, 138200, 138201, 138202, 138203, 138204, 138205, 138206, 138207, 138208, 138209) c6( ) c7(md, gV, nD, cVC, hG, Ip, bgH, ckm, aMS, Az, byd, gv, brc, j, bD, BV, fq, Gc); #c1(ZIC4) c2(NP_001161850) c3(zinc finger protein ZIC 4 isoform 1 precursor) c4(66164) c5(66165, 66166, 66167, 66168, 66169, 66170, 66171, 66172, 66173, 66174) c6( ) c7(atf, ft, Ng, Xr, MG); #c1(ZIC4) c2(NP_001161851) c3(zinc finger protein ZIC 4 isoform 2) c4(66175, 66176, 66177, 66178, 66179) c5(66180, 66181, 66182, 66183, 66184, 66185, 66186, 66187, 66188) c6( ) c7(atf, ft, Ng, Xr, MG); #c1(ZIC4) c2(XP_011511533) c3(zinc finger protein ZIC 4 isoform X1) c4( ) c5(302223, 302224, 302225, 302226, 302227, 302228, 302229, 302230, 302231, 302232, 302233, 302234, 302235, 302236, 302237, 302238, 302239, 302240, 302241, 302242, 302243, 302244, 302245, 302246, 302247, 302248) c6( ) c7(atf, ft, Ng, Xr, MG); #c1(ZIC5) c2(NP_149123) c3(zinc finger protein ZIC 5) c4(227302, 227303) c5(227304, 227305, 227306, 227307, 227308, 227309, 227310, 227311, 227312, 227313, 227314, 227315, 227316, 227317, 227318) c6( ) c7(Xr, FB, Az, ZW); #c1(ZIK1) c2(NP_001010879) c3(zinc finger protein interacting with ribonucleoprotein K) c4(23962, 23963) c5(23964, 23965, 23966, 23967, 23968, 23969, 23970, 23971, 23972, 23973, 23974) c6( ) c7(T); #c1(ZIK1) c2(XP_011525062) c3(zinc finger protein interacting with ribonucleoprotein K isoform X1) c4(319524) c5(319525, 319526, 319527, 319528, 319529, 319530) c6( ) c7(T); #c1(ZIK1) c2(XP_011525064) c3(zinc finger protein interacting with ribonucleoprotein K isoform X3) c4( ) c5(319531, 319532, 319533, 319534, 319535) c6( ) c7(T); #c1(ZIM2) c2(NP_001139799) c3(zinc finger imprinted 2) c4(59958) c5(59959, 59960, 59961, 59962, 59963, 59964, 59965, 59966, 59967, 59968, 59969, 59970, 59971, 59972, 59973, 59974, 59975, 59976, 59977, 59978, 59979, 59980, 59981, 59982, 59983, 59984) c6( ) c7(gK); #c1(ZKSCAN1) c2(NP_001273983) c3(zinc finger protein with KRAB and SCAN domains 1 isoform b) c4( ) c5(105952, 105953, 105954, 105955, 105956, 105957) c6( ) c7(cOR, aF, ml, ei, aA); #c1(ZKSCAN1) c2(NP_001273984) c3(zinc finger protein with KRAB and SCAN domains 1 isoform c) c4( ) c5(105958, 105959, 105960, 105961, 105962, 105963) c6( ) c7(cOR, aF, ml, ei, aA); #c1(ZKSCAN1) c2(NP_003430) c3(zinc finger protein with KRAB and SCAN domains 1 isoform a) c4(138367, 138368, 138369, 138370) c5(138371, 138372, 138373, 138374, 138375, 138376, 138377) c6( ) c7(cOR, aF, ml, ei, aA); #c1(ZKSCAN1) c2(XP_005250622) c3(zinc finger protein with KRAB and SCAN domains 1 isoform X2) c4( ) c5(270462, 270463, 270464, 270465, 270466, 270467) c6( ) c7(cOR, aF, ml, ei, aA); #c1(ZKSCAN3) c2(NP_001229824) c3(zinc finger protein with KRAB and SCAN domains 3 isoform 2) c4( ) c5(85343, 85344, 85345, 85346, 85347, 85348) c6( ) c7(T, bE, r, bB, fd, Kj, K, ae, q, ad); #c1(ZKSCAN3) c2(NP_077819) c3(zinc finger protein with KRAB and SCAN domains 3 isoform 1) c4(215400, 215401) c5(215402, 215403, 215404, 215405, 215406, 215407, 215408, 215409, 215410, 215411, 215412, 215413, 215414, 215415, 215416, 215417) c6( ) c7(T, bE, r, bB, fd, Kj, K, ae, q, ad); #c1(ZKSCAN3) c2(XP_005249480) c3(zinc finger protein with KRAB and SCAN domains 3 isoform X4) c4( ) c5(269497) c6( ) c7(T, bE, r, bB, fd, Kj, K, ae, q, ad); #c1(ZKSCAN3) c2(XP_006715279) c3(zinc finger protein with KRAB and SCAN domains 3 isoform X3) c4(289478, 289479) c5( ) c6( ) c7(T, bE, r, bB, fd, Kj, K, ae, q, ad); #c1(ZKSCAN7) c2(NP_001275520) c3(zinc finger protein with KRAB and SCAN domains 7 isoform 2) c4( ) c5(106805, 106806, 106807, 106808, 106809, 106810, 106811, 106812, 106813, 106814) c6( ) c7(T, uT, vA, aj, Lc, cm, J, cd, op); #c1(ZKSCAN7) c2(NP_061121) c3(zinc finger protein with KRAB and SCAN domains 7 isoform 1) c4(199232, 199233) c5(199234, 199235, 199236, 199237, 199238, 199239, 199240, 199241, 199242, 199243, 199244) c6( ) c7(T, uT, vA, aj, Lc, cm, J, cd, op); #c1(ZKSCAN7) c2(XP_011547035) c3(zinc finger protein with KRAB and SCAN domains 7 isoform X1) c4(345862) c5( ) c6( ) c7(T, uT, vA, aj, Lc, cm, J, cd, op); #c1(ZKSCAN7) c2(XP_011547042) c3(zinc finger protein with KRAB and SCAN domains 7 isoform X7) c4( ) c5(345863, 345864, 345865, 345866, 345867, 345868) c6( ) c7(T, uT, vA, aj, Lc, cm, J, cd, op); #c1(ZMAT3) c2(XP_005247763) c3(zinc finger matrin-type protein 3 isoform X2) c4(267969) c5(267970, 267971, 267972, 267973, 267974, 267975, 267976, 267977, 267978, 267979, 267980, 267981) c6( ) c7(T, bE, Qu, ff, bt, HC, cj, bB, en, hu, cm, it); #c1(ZMAT3) c2(XP_011511375) c3(zinc finger matrin-type protein 3 isoform X1) c4(301949, 301950) c5(301951, 301952, 301953, 301954, 301955, 301956) c6( ) c7(T, bE, Qu, ff, ht, HC, cj, bB, en, hu, cm, it); #c1(ZMAT4) c2(NP_001129203) c3(zinc finger matrin-type protein 4 isoform b) c4( ) c5(51169, 51170, 51171, 51172, 51173) c6( ) c7(Bd, bK, Be, an); #c1(ZMAT4) c2(NP_078921) c3(zinc finger matrin-type protein 4 isoform a) c4( ) c5(216124, 216125, 216126, 216127, 216128, 216129, 216130, 216131, 216132, 216133) c6( ) c7(Bd, bK, Be, an); #c1(ZMAT4) c2(XP_011542945) c3(zinc finger matrin-type protein 4 isoform X1) c4(341651, 341652) c5(341653, 341654) c6( ) c7(Bd, bK, Be, an); #c1(ZMAT4) c2(XP_011542947) c3(zinc finger matrin-type protein 4 isoform X3) c4(341655) c5(341656) c6( ) c7(Bd, bK, Be, an); #c1(ZMIZ1) c2(NP_065071) c3(zinc finger MIZ domain-containing protein 1) c4(203618, 203619, 203620) c5(203621, 203622, 203623, 203624, 203625, 203626, 203627, 203628, 203629, 203630, 203631, 203632) c6( ) c7(bL, ck, T, iV, A, aW, hk, ff, Qo, pQ, cr, aT, bB, fe, bK, k, hp, qj, en, V, B); #c1(ZMIZ1) c2(XP_006717987) c3(zinc finger MIZ domain-containing protein 1 isoform X1) c4(291412) c5( ) c6( ) c7(bL, ck, T, iV, A, aW, hk, ff, Qo, pQ, cr, aT, bB, fe, bK, k, hp, qj, en, V, B); #c1(ZMIZ1) c2(XP_006717988) c3(zinc finger MIZ domain-containing protein 1 isoform X2) c4(291413) c5(291414, 291415, 291416, 291417, 291418, 291419, 291420, 291421, 291422, 291423, 291424, 291425) c6( ) c7(bL, ck, T, iV, A, aW, hk, ff, Qo, pQ, cr, aT, bB, fe, bK, k, hp, qj, en, V, B); #c1(ZMIZ1) c2(XP_011538282) c3(zinc finger MIZ domain-containing protein 1 isoform X4) c4( ) c5(335947, 335948, 335949, 335950, 335951, 335952) c6( ) c7(bL, ck, T, iV, A, aW, hk, ff, Qo, pQ, cr, aT, bB, fe, bK, k, hp, qj, en, V, B); #c1(ZMYM2) c2(XP_011533519) c3(zinc finger MYM-type protein 2 isoform X3) c4( ) c5(329622, 329623, 329624, 329625) c6( ) c7(btw, et, fd, aA, nf, n, dz, aq, aF, m, ci, pg, iR, t, kS, B, hX); #c1(ZMYM2) c2(XP_011533523) c3(zinc finger MYM-type protein 2 isoform X1) c4(329626, 329627, 329628) c5(329629, 329630, 329631, 329632, 329633, 329634, 329635, 329636, 329637, 329638, 329639, 329640, 329641, 329642, 329643, 329644) c6( ) c7(btw, ct, fd, aA, nf, n, dz, aq, aF, m, ci, pg, iR, t, kS, B, hX); #c1(ZMYM2) c2(XP_011533524) c3(zinc finger MYM-type protein 2 isoform X4) c4( ) c5(329645, 329646, 329647, 329648, 329649, 329650, 329651) c6( ) c7(btw, et, fd, aA, nf, n, dz, aq, aF, m, ci, pg, iR, t, kS, B, hX); #c1(ZMYM3) c2(NP_001164633) c3(zinc finger MYM-type protein 3 isoform 2) c4(67092, 67093) c5(67094, 67095, 67096, 67097, 67098, 67099) c6( ) c7(nf, jf, cj); #c1(ZMYM3) c2(NP_001164634) c3(zinc finger MYM-type protein 3 isoform 3) c4(67100, 67101) c5(67102, 67103, 67104, 67105, 67106, 67107, 67108, 67109, 67110, 67111, 67112, 67113, 67114, 67115, 67116, 67117, 67118, 67119, 67120) c6( ) c7(nf, jf, cj); #c1(ZMYM3) c2(NP_005087) c3(zinc finger MYM-type protein 3 isoform 1) c4(152765, 152766, 152767) c5(152768, 152769, 152770, 152771, 152772, 152773, 152774, 152775, 152776, 152777, 152778, 152779, 152780, 152781, 152782, 152783, 152784, 152785, 152786, 152787, 152788, 152789, 152790) c6( ) c7(nf, jf, cj); #c1(ZMYM4) c2(XP_011540726) c3(zinc finger MYM-type protein 4 isoform X5) c4(339288, 339289) c5( ) c6( ) c7(g, ff, en); #c1(ZMYM5) c2(NP_001034738) c3(zinc finger MYM-type protein 5 isoform 2) c4(32112) c5(32113, 32114, 32115, 32116, 32117, 32118) c6( ) c7(kl); #c1(ZMYM5) c2(NP_001034739) c3(zinc finger MYM-type protein 5 isoform 1) c4(32119) c5(32120, 32121, 32122, 32123, 32124, 32125) c6( ) c7(kl); #c1(ZMYM5) c2(NP_001136156) c3(zinc finger MYM-type protein 5 isoform 3) c4( ) c5(54451, 54452, 54453, 54454, 54455) c6( ) c7(kl); #c1(ZMYM5) c2(XP_011533611) c3(zinc finger MYM-type protein 5 isoform X2) c4(329721) c5(329722) c6( ) c7(kl); #c1(ZMYND10) c2(NP_056980) c3(zinc finger MYND domain-containing protein 10) c4(188319) c5(188320, 188321, 188322, 188323, 188324, 188325) c6( ) c7(T, if, ci, eA, br, av, jz, ds, io, dL, Nj, K, cVD, eL, MG, Pf, ff, lo, agF, bxx, as, g, en, cl, t, bz, cm, bw, eM, aiM, hL, m, it, B); #c1(ZMYND11) c2(NP_001189394) c3(zinc finger MYND domain-containing protein 11 isoform d) c4(79337) c5(79338, 79339, 79340, 79341, 79342, 79343) c6( ) c7(bN, aW, aw, nA, aT); #c1(ZMYND11) c2(NP_001189397) c3(zinc finger MYND domain-containing protein 11 isoform g) c4(79344, 79345) c5(79346, 79347, 79348, 79349, 79350, 79351, 79352, 79353, 79354, 79355, 79356, 79357) c6( ) c7(bN, aW, aw, nA, aT); #c1(ZMYND11) c2(NP_997644) c3(zinc finger MYND domain-containing protein 11 isoform b) c4(265657) c5(265658, 265659, 265660, 265661, 265662, 265663) c6( ) c7(bN, aW, aw, nA, aT); #c1(ZMYND11) c2(XP_005252416) c3(zinc finger MYND domain-containing protein 11 isoform X1) c4(271725, 271726) c5(271727, 271728, 271729, 271730, 271731, 271732, 271733, 271734, 271735, 271736, 271737, 271738, 271739, 271740) c6( ) c7(bN, aW, aw, nA, aT); #c1(ZMYND11) c2(XP_006717439) c3(zinc finger MYND domain-containing protein 11 isoform X2) c4(291093, 291094, 291095) c5(291096, 291097, 291098, 291099, 291100, 291101, 291102, 291103, 291104, 291105, 291106, 291107, 291108, 291109, 291110, 291111, 291112, 291113) c6( ) c7(bN, aW, aw, nA, aT); #c1(ZMYND11) c2(XP_011517603) c3(zinc finger MYND domain-containing protein 11 isoform X5) c4(311373) c5(311374, 311375, 311376, 311377, 311378, 311379, 311380, 311381, 311382, 311383, 311384, 311385, 311386, 311387, 311388) c6( ) c7(bN, aW, aw, nA, aT); #c1(ZMYND11) c2(XP_011517604) c3(zinc finger MYND domain-containing protein 11 isoform X3) c4(311389) c5(311390, 311391, 311392, 311393, 311394, 311395) c6( ) c7(bN, aW, aw, nA, aT); #c1(ZMYND8) c2(NP_001268698) c3(protein kinase C-binding protein 1 isoform d) c4( ) c5(100147, 100148, 100149, 100150, 100151, 100152, 100153, 100154, 100155, 100156, 100157) c6( ) c7(bL, ae, ad); #c1(ZMYND8) c2(NP_001268701) c3(protein kinase C-binding protein 1 isoform f) c4(100158, 100159) c5(100160, 100161, 100162, 100163, 100164, 100165) c6( ) c7(bL, ae, ad); #c1(ZMYND8) c2(NP_001268703) c3(protein kinase C-binding protein 1 isoform h) c4( ) c5(100166, 100167, 100168, 100169, 100170, 100171, 100172, 100173, 100174, 100175, 100176) c6( ) c7(bL, ae, ad); #c1(ZMYND8) c2(NP_001268704) c3(protein kinase C-binding protein 1 isoform i) c4(100177) c5(100178, 100179, 100180, 100181, 100182, 100183) c6( ) c7(bL, ae, ad); #c1(ZMYND8) c2(NP_001268706) c3(protein kinase C-binding protein 1 isoform k) c4(100184) c5(100185, 100186, 100187, 100188, 100189, 100190) c6( ) c7(bL, ae, ad); #c1(ZMYND8) c2(NP_001268710) c3(protein kinase C-binding protein 1 isoform o) c4(100191) c5( ) c6( ) c7(bL, ae, ad); #c1(ZMYND8) c2(NP_001268711) c3(protein kinase C-binding protein 1 isoform p) c4(100192) c5(100193, 100194, 100195, 100196, 100197, 100198) c6( ) c7(bL, ae, ad); #c1(ZMYND8) c2(NP_001268712) c3(protein kinase C-binding protein 1 isoform g) c4( ) c5(100199, 100200, 100201, 100202, 100203, 100204) c6( ) c7(bL, ae, ad); #c1(ZMYND8) c2(NP_001268713) c3(protein kinase C-binding protein 1 isoform r) c4(100205) c5(100206, 100207, 100208, 100209, 100210, 100211) c6( ) c7(bL, ae, ad); #c1(ZMYND8) c2(NP_036540) c3(protein kinase C-binding protein 1 isoform b) c4(174293) c5(174294, 174295, 174296, 174297, 174298, 174299) c6( ) c7(bL, ae, ad); #c1(ZMYND8) c2(NP_898868) c3(protein kinase C-binding protein 1 isoform a) c4(257790, 257791, 257792) c5(257793, 257794, 257795, 257796, 257797, 257798, 257799) c6( ) c7(bL, ae, ad); #c1(ZMYND8) c2(NP_898869) c3(protein kinase C-binding protein 1 isoform c) c4(257800) c5(257801, 257802, 257803, 257804, 257805, 257806) c6( ) c7(bL, ae, ad); #c1(ZMYND8) c2(XP_005260413) c3(protein kinase C-binding protein 1 isoform X2) c4(276531) c5(276532, 276533, 276534, 276535, 276536, 276537, 276538) c6( ) c7(bL, ae, ad); #c1(ZMYND8) c2(XP_005260423) c3(protein kinase C-binding protein 1 isoform X11) c4(276539) c5( ) c6( ) c7(bL, ae, ad); #c1(ZMYND8) c2(XP_006723826) c3(protein kinase C-binding protein 1 isoform X8) c4( ) c5(295407) c6( ) c7(bL, ae, ad); #c1(ZMYND8) c2(XP_011527057) c3(protein kinase C-binding protein 1 isoform X12) c4( ) c5(321500) c6( ) c7(bL, ae, ad); #c1(ZNF10) c2(NP_056209) c3(zinc finger protein 10) c4(186340, 186341, 186342, 186343, 186344, 186345) c5(186346, 186347, 186348, 186349, 186350, 186351, 186352, 186353, 186354, 186355, 186356, 186357, 186358, 186359, 186360, 186361, 186362, 186363, 186364, 186365, 186366, 186367, 186368, 186369, 186370, 186371, 186372, 186373, 186374, 186375, 186376, 186377) c6(186378, 186379) c7(hf); #c1(ZNF106) c2(NP_001271236) c3(zinc finger protein 106 isoform 3) c4(103686) c5(103687, 103688, 103689, 103690, 103691, 103692) c6( ) c7(fq); #c1(ZNF106) c2(NP_071918) c3(zinc finger protein 106 isoform 1) c4(212290) c5(212291, 212292, 212293, 212294, 212295, 212296, 212297) c6( ) c7(fq); #c1(ZNF107) c2(NP_001013768) c3(zinc finger protein 107 isoform a) c4(25759, 25760) c5(25761, 25762, 25763, 25764, 25765, 25766, 25767, 25768, 25769, 25770) c6( ) c7(h); #c1(ZNF107) c2(NP_001269288) c3(zinc finger protein 107 isoform b) c4(101034) c5(101035, 101036, 101037, 101038, 101039, 101040, 101041, 101042, 101043, 101044, 101045, 101046, 101047, 101048, 101049, 101050, 101051, 101052, 101053) c6( ) c7(h); #c1(ZNF107) c2(NP_001269289) c3(zinc finger protein 107 isoform c) c4( ) c5(101054) c6( ) c7(h); #c1(ZNF112) c2(NP_001076804) c3(zinc finger protein 112 isoform 1) c4(37547, 37548, 37549, 37550, 37551) c5(37552, 37553, 37554, 37555, 37556, 37557, 37558, 37559, 37560, 37561, 37562, 37563, 37564, 37565, 37566, 37567, 37568, 37569, 37570, 37571, 37572, 37573, 37574, 37575, 37576, 37577, 37578, 37579, 37580, 37581, 37582) c6( ) c7(eZ); #c1(ZNF121) c2(XP_011526569) c3(zinc finger protein 121 isoform X2) c4( ) c5(320873) c6( ) c7(Db, hd, nB); #c1(ZNF131) c2(NP_001284477) c3(zinc finger protein 131 isoform 1) c4(111845) c5(111846, 111847, 111848, 111849, 111850, 111851, 111852, 111853, 111854, 111855) c6( ) c7(aW, ey, aT); #c1(ZNF131) c2(NP_003423) c3(zinc finger protein 131 isoform 2) c4(138322, 138323, 138324, 138325) c5(138326, 138327, 138328, 138329, 138330, 138331, 138332, 138333, 138334, 138335, 138336, 138337, 138338, 138339, 138340, 138341, 138342, 138343, 138344, 138345, 138346, 138347, 138348, 138349, 138350, 138351, 138352, 138353, 138354, 138355, 138356, 138357) c6( ) c7(aW, ey, aT); #c1(ZNF131) c2(XP_011512426) c3(zinc finger protein 131 isoform X3) c4( ) c5(303127) c6( ) c7(aW, ey, aT); #c1(ZNF132) c2(NP_003424) c3(zinc finger protein 132) c4(138358, 138359) c5(138360, 138361, 138362, 138363, 138364, 138365, 138366) c6( ) c7(aw, eu, e, j, ac); #c1(ZNF132) c2(XP_005259267) c3(zinc finger protein 132 isoform X1) c4( ) c5(276022, 276023, 276024, 276025, 276026, 276027) c6( ) c7(aw, eu, e, j, ac); #c1(ZNF133) c2(NP_001269925) c3(zinc finger protein 133 isoform b) c4(103247, 103248) c5(103249, 103250, 103251, 103252, 103253, 103254, 103255) c6( ) c7(acw); #c1(ZNF133) c2(NP_001269930) c3(zinc finger protein 133 isoform c) c4( ) c5(103256, 103257, 103258, 103259, 103260, 103261, 103262, 103263, 103264, 103265) c6( ) c7(acw); #c1(ZNF133) c2(NP_001269931) c3(zinc finger protein 133 isoform d) c4(103266) c5(103267, 103268) c6( ) c7(acw); #c1(ZNF133) c2(NP_001269934) c3(zinc finger protein 133 isoform f) c4( ) c5(103269) c6( ) c7(acw); #c1(ZNF133) c2(NP_001269935) c3(zinc finger protein 133 isoform g) c4( ) c5(103270) c6( ) c7(acw); #c1(ZNF133) c2(XP_005260875) c3(zinc finger protein 133 isoform X4) c4(276944) c5(276945, 276946, 276947, 276948, 276949, 276950, 276951) c6( ) c7(acw); #c1(ZNF133) c2(XP_005260877) c3(zinc finger protein 133 isoform X1) c4( ) c5(276952, 276953, 276954, 276955, 276956, 276957, 276958, 276959) c6( ) c7(acw); #c1(ZNF133) c2(XP_006723680) c3(zinc finger protein 133 isoform X2) c4(295284) c5(295285, 295286, 295287, 295288, 295289) c6( ) c7(acw); #c1(ZNF133) c2(XP_006723681) c3(zinc finger protein 133 isoform X6) c4( ) c5(295290, 295291, 295292, 295293, 295294, 295295, 295296, 295297) c6( ) c7(acw); #c1(ZNF133) c2(XP_011527636) c3(zinc finger protein 133 isoform X3) c4(322549, 322550, 322551) c5(322552, 322553, 322554, 322555, 322556, 322557, 322558, 322559) c6( ) c7(acw); #c1(ZNF141) c2(NP_003432) c3(zinc finger protein 141) c4(138378, 138379) c5(138380, 138381, 138382, 138383, 138384, 138385, 138386, 138387, 138388, 138389, 138390, 138391, 138392) c6( ) c7(rR, eX, cVE, eV, zG, axC); #c1(ZNF141) c2(XP_011511864) c3(zinc finger protein 141 isoform X1) c4(302595) c5(302596, 302597, 302598, 302599, 302600) c6( ) c7(rR, eX, cVE, eV, zG, axC); #c1(ZNF143) c2(NP_001269585) c3(zinc finger protein 143 isoform 2) c4(102061, 102062, 102063) c5(102064, 102065, 102066, 102067, 102068) c6( ) c7(ae, T, alC, bE, ml, bB, cOR, bz, ad); #c1(ZNF143) c2(NP_001269586) c3(zinc finger protein 143 isoform 3) c4(102069) c5(102070, 102071, 102072, 102073, 102074, 102075) c6( ) c7(ae, T, alC, bE, ml, bB, cOR, bz, ad); #c1(ZNF143) c2(NP_003433) c3(zinc finger protein 143 isoform 1) c4(138393, 138394) c5(138395, 138396, 138397, 138398, 138399) c6( ) c7(ae, T, alC, bE, ml, bB, cOR, bz, ad); #c1(ZNF143) c2(XP_005253178) c3(zinc finger protein 143 isoform X2) c4(272246, 272247) c5(272248, 272249) c6( ) c7(ae, T, alC, bE, ml, bB, cOR, bz, ad); #c1(ZNF143) c2(XP_005253179) c3(zinc finger protein 143 isoform X3) c4( ) c5(272250) c6( ) c7(ae, T, alC, bE, mL bB, cOR, bz, ad); #c1(ZNF143) c2(XP_005253183) c3(zinc finger protein 143 isoform X4) c4( ) c5(272251, 272252, 272253, 272254, 272255, 272256, 272257, 272258, 272259, 272260, 272261, 272262, 272263, 272264, 272265, 272266, 272267, 272268, 272269, 272270, 272271, 272272, 272273, 272274, 272275, 272276, 272277, 272278, 272279, 272280) c6( ) c7(ae, T, alC, bE, ml, bB, cOR, bz, ad); #c1(ZNF146) c2(XP_005259271) c3(zinc finger protein OZF isoform X1) c4(276028) c5(276029, 276030, 276031, 276032, 276033, 276034, 276035, 276036, 276037, 276038, 276039) c6( ) c7(ci); #c1(ZNF148) c2(NP_068799) c3(zinc finger protein 148) c4(210555, 210556, 210557, 210558, 210559, 210560, 210561) c5(210562, 210563, 210564, 210565, 210566, 210567, 210568, 210569, 210570, 210571, 210572, 210573, 210574, 210575, 210576, 210577, 210578, 210579, 210580, 210581, 210582, 210583, 210584, 210585, 210586, 210587, 210588, 210589, 210590, 210591, 210592, 210593, 210594, 210595, 210596, 210597, 210598, 210599, 210600, 210601, 210602, 210603, 210604, 210605, 210606, 210607, 210608, 210609, 210610, 210611, 210612, 210613, 210614, 210615, 210616) c6( ) c7(dD, B, ea, Y, awP, aq, eq, bC, bz, X, qa, hX); #c1(ZNF154) c2(NP_001078853) c3(zinc finger protein 154) c4(37936, 37937) c5(37938, 37939, 37940, 37941, 37942, 37943, 37944, 37945, 37946, 37947, 37948, 37949, 37950, 37951, 37952, 37953, 37954) c6( ) c7(n, dL, eL); #c1(ZNF160) c2(XP_005259436) c3(zinc finger protein 160 isoform X2) c4( ) c5(276095) c6( ) c7(bpq, ad, aA); #c1(ZNF160) c2(XP_011525767) c3(zinc finger protein 160 isoform X1) c4(320151) c5(320152, 320153, 320154, 320155, 320156, 320157, 320158, 320159, 320160, 320161, 320162, 320163, 320164, 320165) c6( ) c7(bpq, ad, aA); #c1(ZNF160) c2(XP_011525768) c3(zinc finger protein 160 isoform X3) c4(320166) c5(320167, 320168, 320169, 320170, 320171, 320172) c6( ) c7(bpq, ad, aA); #c1(ZNF169) c2(NP_003439) c3(zinc finger protein 169 isoform 1) c4(138400) c5(138401, 138402, 138403, 138404, 138405, 138406, 138407) c6( ) c7(alf, fq); #c1(ZNF169) c2(NP_919301) c3(zinc finger protein 169 isoform 2) c4(258493, 258494) c5(258495, 258496, 258497, 258498, 258499, 258500, 258501, 258502, 258503, 258504, 258505, 258506) c6( ) c7(alf, fq); #c1(ZNF175) c2(NP_009078) c3(zinc finger protein 175) c4(170578) c5(170579, 170580, 170581, 170582, 170583, 170584, 170585) c6( ) c7(amN, fR, h, hh, y, CB); #c1(ZNF177) c2(NP_001166122) c3(zinc finger protein 177 isoform a) c4(68240) c5(68241, 68242, 68243, 68244, 68245, 68246, 68247) c6( ) c7(aA); #c1(ZNF177) c2(NP_003442) c3(zinc finger protein 177 isoform b) c4(138408) c5(138409, 138410, 138411, 138412, 138413, 138414, 138415, 138416, 138417, 138418, 138419, 138420) c6( ) c7(aA); #c1(ZNF182) c2(NP_001007089) c3(zinc finger protein 182 isoform 2) c4(22476) c5(22477, 22478, 22479, 22480, 22481, 22482, 22483) c6( ) c7(iJ); #c1(ZNF182) c2(NP_008893) c3(zinc finger protein 182 isoform 1) c4(169519) c5(169520, 169521, 169522, 169523, 169524, 169525, 169526, 169527, 169528, 169529, 169530, 169531, 169532, 169533) c6( ) c7(iJ); #c1(ZNF184) c2(NP_009080) c3(zinc finger protein 184) c4(170594, 170595, 170596) c5(170597, 170598, 170599, 170600, 170601, 170602, 170603, 170604, 170605, 170606, 170607, 170608, 170609, 170610, 170611, 170612, 170613) c6( ) c7(cm); #c1(ZNF184) c2(XP_011513163) c3(zinc finger protein 184 isoform X2) c4( ) c5(305102, 305103, 305104, 305105, 305106, 305107) c6( ) c7(cm); #c1(ZNF185) c2(NP_001171586) c3(zinc finger protein 185 isoform 9) c4(70646) c5(70647, 70648, 70649, 70650, 70651, 70652, 70653, 70654, 70655) c6( ) c7(av, vA, bz, ae, op, ad, uM); #c1(ZNF185) c2(XP_005274788) c3(zinc finger protein 185 isoform X1) c4(285402) c5(285403, 285404, 285405, 285406, 285407, 285408) c6( ) c7(av, vA, bz, ae, op, ad, uM); #c1(ZNF185) c2(XP_005274790) c3(zinc finger protein 185 isoform X9) c4( ) c5(285409) c6( ) c7(av, vA, bz, ae, op, ad, uM); #c1(ZNF185) c2(XP_005274792) c3(zinc finger protein 185 isoform X2) c4(285410) c5(285411, 285412, 285413, 285414, 285415, 285416) c6( ) c7(av, vA, bz, ae, op, ad, uM); #c1(ZNF185) c2(XP_005274794) c3(zinc finger protein 185 isoform X3) c4(285417, 285418, 285419) c5(285420, 285421, 285422, 285423, 285424, 285425, 285426, 285427, 285428, 285429, 285430, 285431, 285432, 285433, 285434, 285435, 285436, 285437) c6( ) c7(av, vA, bz, ae, op, ad, uM); #c1(ZNF185) c2(XP_005274795) c3(zinc finger protein 185 isoform X4) c4(285438) c5(285439, 285440, 285441, 285442, 285443, 285444, 285445) c6( ) c7(av, vA, bz, ae, op, ad, uM); #c1(ZNF185) c2(XP_005274796) c3(zinc finger protein 185 isoform X12) c4(285446) c5( ) c6( ) c7(av, vA, bz, ae, op, ad, uM); #c1(ZNF185) c2(XP_005274798) c3(zinc finger protein 185 isoform X5) c4( ) c5(285447) c6( ) c7(av, vA, bz, ae, op, ad, uM); #c1(ZNF185) c2(XP_005274799) c3(zinc finger protein 185 isoform X14) c4(285448) c5(285449, 285450, 285451, 285452, 285453, 285454) c6( ) c7(av, vA, bz, ae, op, ad, uM); #c1(ZNF185) c2(XP_005274801) c3(zinc finger protein 185 isoform X18) c4(285455) c5(285456, 285457, 285458, 285459, 285460, 285461) c6( ) c7(av, vA, bz, ae, op, ad, uM); #c1(ZNF185) c2(XP_005274802) c3(zinc finger protein 185 isoform X6) c4(285462) c5(285463, 285464, 285465, 285466, 285467, 285468) c6( ) c7(av, vA, bz, ae, op, ad, uM); #c1(ZNF185) c2(XP_005274803) c3(zinc finger protein 185 isoform X19) c4(285469) c5(285470, 285471, 285472, 285473, 285474, 285475) c6( ) c7(av, vA, bz, ae, op, ad, uM); #c1(ZNF185) c2(XP_011529496) c3(zinc finger protein 185 isoform X15) c4(324957, 324958) c5(324959, 324960, 324861, 324962, 324963, 324964, 324965, 324966, 324967, 324968, 324969, 324970, 324971, 324972, 324973) c6( ) c7(av, vA, bz, ae, op, ad, uM); #c1(ZNF185) c2(XP_011529498) c3(zinc finger protein 185 isoform X17) c4( ) c5(324974, 324975, 324976, 324977, 324978, 324979) c6( ) c7(av, vA, bz, ae, op, ad, uM); #c1(ZNF189) c2(NP_001265160) c3(zinc finger protein 189 isoform 3) c4(97873) c5(97874, 97875, 97876, 97877, 97878, 97879, 97880, 97881, 97882, 97883, 97884, 97885) c6( ) c7(eL, dL, ff, en); #c1(ZNF189) c2(NP_003443) c3(zinc finger protein 189 isoform 1) c4(138421, 138422) c5(138423, 138424, 138425, 138426, 138427, 138428, 138429) c6( ) c7(eL, dL, ff, en); #c1(ZNF197) c2(NP_001020026) c3(zinc finger protein 197 isoform 2) c4(28063) c5(28064, 28065, 28066, 28067, 28068, 28069, 28070, 28071, 28072, 28073, 28074, 28075, 28076, 28077, 28078, 28079) c6( ) c7(ck, hd, eM, nB, Db, Y, iS, fd, bw, v, K, hF, vt, B, ip); #c1(ZNF197) c2(XP_011547029) c3(zinc finger protein 197 isoform X1) c4(345842, 345843, 345844) c5(345845, 345846, 345847, 345848, 345849, 345850, 345851, 345852, 345853, 345854, 345855, 345856, 345857, 345858, 345859, 345860, 345861) c6( ) c7(ck, hd, eM, nB, Db, Y, iS, fd, bw, v, K, hF, vt, B, ip); #c1(ZNF2) c2(NP_001017396) c3(zinc finger protein 2 isoform b) c4( ) c5(26400, 26401, 26402, 26403, 26404) c6( ) c7(NI); #c1(ZNF2) c2(NP_001269327) c3(zinc finger protein 2 isoform c) c4(101139, 101140) c5(101141, 101142, 101143, 101144, 101145, 101146, 101147) c6( ) c7(NI); #c1(ZNF2) c2(NP_001278533) c3(zinc finger protein 2 isoform d) c4( ) c5(109804, 109805, 109806, 109807, 109808) c6( ) c7(NI); #c1(ZNF2) c2(NP_001278534) c3(zinc finger protein 2 isoform e) c4(109809) c5(109810, 109811, 109812, 109813, 109814, 109815) c6( ) c7(NI); #c1(ZNF2) c2(NP_066574) c3(zinc finger protein 2 isoform a) c4(207441, 207442) c5(207443, 207444, 207445, 207446, 207447, 207448, 207449) c6( ) c7(NI); #c1(ZNF20) c2(NP_066966) c3(zinc finger protein 20 isoform 1) c4(207858, 207859) c5(207860, 207861, 207862, 207863, 207864, 207865, 207866, 207867, 207868, 207869, 207870, 207871, 207872) c6( ) c7(Db, hd, nB); #c1(ZNF202) c2(NP_001288709) c3(zinc finger protein 202 isoform 1) c4(113951) c5(113952, 113953, 113954, 113955, 113956, 113957, 113958, 113959, 113960, 113961, 113962, 113963, 113964, 113965, 113966) c6( ) c7(dD, ea, eD, aw, aA, j, eq); #c1(ZNF205) c2(XP_005255615) c3(zinc finger protein 205 isoform X1) c4(273759, 273760, 273761) c5(273762, 273763, 273764, 273765, 273766, 273767, 273768, 273769, 273770, 273771, 273772, 273773, 273774, 273775, 273776, 273777, 273778, 273779, 273780, 273781, 273782, 273783, 273784) c6( ) c7(kl); #c1(ZNF212) c2(NP_036388) c3(zinc finger protein 212) c4(173493) c5(173494, 173495, 173496, 173497, 173498, 173499, 173500, 173501, 173502) c6( ) c7(j); #c1(ZNF214) c2(XP_006718371) c3(zinc finger protein 214 isoform X1) c4(291791) c5(291792, 291793, 291794, 291795, 291796, 291797, 291798, 291799) c6( ) c7(AV, yi, ND); #c1(ZNF214) c2(XP_011518657) c3(zinc finger protein 214 isoform X2) c4( ) c5(312982, 312983, 312984) c6( ) c7(AV, yi, ND); #c1(ZNF215) c2(NP_037382) c3(zinc finger protein 215) c4(175168) c5(175169, 175170, 175171, 175172, 175173, 175174, 175175, 175176, 175177, 175178, 175179) c6( ) c7(AV, yi, ml, bAF); #c1(ZNF215) c2(XP_011518662) c3(zinc finger protein 215 isoform X2) c4(312985) c5( ) c6( ) c7(AV, yi, ml, bAF); #c1(ZNF215) c2(XP_011518665) c3(zinc finger protein 215 isoform X5) c4( ) c5(312986, 312987, 312988, 312989, 312990, 312991) c6( ) c7(AV, yi, ml, bAF); #c1(ZNF217) c2(NP_006517) c3(zinc finger protein 217) c4(165928, 165929) c5(165930, 165931, 165932, 165933, 165934, 165935, 165936, 165937, 165938, 165939, 165940, 165941, 165942, 165943, 165944, 165945, 165946) c6( ) c7(T, aA, bB, ci, lu, eA, aT, dL, ae, d, s, aW, r, aF, eS, t, ck, bE, auZ, cX, gn, m); #c1(ZNF217) c2(XP_005260602) c3(zinc finger protein 217 isoform X1) c4(276740) c5(276741, 276742, 276743, 276744, 276745, 276746) c6( ) c7(T, aA, bB, ci, lu, eA, aT, dL, ae, d, s, aW, r, aF, eS, t, ck, bE, auZ, cX, gn, m); #c1(ZNF22) c2(NP_008894) c3(zinc finger protein 22) c4(169534) c5(169535, 169536, 169537, 169538, 169539, 169540, 169541) c6( ) c7(cVF); #c1(ZNF224) c2(XP_005259278) c3(zinc finger protein 224 isoform X1) c4(276040, 276041) c5(276042, 276043, 276044, 276045, 276046, 276047, 276048, 276049, 276050, 276051, 276052, 276053, 276054, 276055) c6( ) c7(eL, dL, af, er); #c1(ZNF23) c2(NP_001291421) c3(zinc finger protein 23 isoform a) c4(115976, 115977, 115978) c5(115979, 115980, 115981, 115982, 115983, 115984, 115985, 115986, 115987, 115988, 115989, 115990, 115991, 115992, 115993, 115994, 115995) c6( ) c7(T, B, ac, bt); #c1(ZNF23) c2(NP_001291423) c3(zinc finger protein 23 isoform b) c4( ) c5(115996, 115997, 115998, 115999, 116000, 116001, 116002, 116003, 116004, 116005, 116006, 116007, 116008, 116009) c6( ) c7(T, B, ac, bt); #c1(ZNF230) c2(XP_011525595) c3(zinc finger protein 230 isoform X1) c4(319981) c5(319982, 319983, 319984, 319985, 319986, 319987, 319988) c6( ) c7(vH, hn, at, dL); #c1(ZNF236) c2(NP_031371) c3(zinc finger protein 236) c4(171980) c5(171981, 171982, 171983, 171984, 171985, 171986, 171987) c6( ) c7(cm, aj, K, dy, J); #c1(ZNF236) c2(XP_011524470) c3(zinc finger protein 236 isoform X6) c4(319054) c5(319055, 319056, 319057, 319058, 319059, 319060, 319061, 319062, 319063, 319064) c6( ) c7(cm, aj, K, dy, J); #c1(ZNF239) c2(XP_011538534) c3(zinc finger protein 239 isoform X2) c4( ) c5(336290, 336291, 336292, 336293, 336294) c6( ) c7(bL, bA); #c1(ZNF239) c2(XP_011538539) c3(zinc finger protein 239 isoform X3) c4(336295) c5(336296) c6( ) c7(bL, bA); #c1(ZNF239) c2(XP_011538540) c3(zinc finger protein 239 isoform X1) c4( ) c5(336297, 336298, 336299, 336300, 336301, 336302, 336303, 336304, 336305, 336306, 336307, 336308, 336309, 336310, 336311, 336312, 336313) c6( ) c7(bL, bA); #c1(ZNF24) c2(NP_008896) c3(zinc finger protein 24) c4(169542) c5(169543, 169544, 169545, 169546, 169547, 169548, 169549, 169550, 169551, 169552, 169553) c6( ) c7(T, alC, aW, aT, aq, B); #c1(ZNF248) c2(XP_011517899) c3(zinc finger protein 248 isoform X1) c4(311797, 311798, 311799) c5(311800, 311801, 311802, 311803, 311804, 311805, 311806, 311807, 311808, 311809, 311810) c6( ) c7(nJ, fM, CN, GA); #c1(ZNF248) c2(XP_011517902) c3(zinc finger protein 248 isoform X2) c4(311811) c5(311812, 311813, 311814, 311815, 311816, 311817, 311818, 311819, 311820, 311821, 311822, 311823, 311824, 311825, 311826, 311827, 311828, 311829) c6( ) c7(nJ, fM, CN, GA); #c1(ZNF253) c2(NP_066385) c3(zinc finger protein 253) c4(207279) c5(207280, 207281, 207282, 207283, 207284, 207285, 207286, 207287, 207288, 207289, 207290) c6( ) c7(T, dA, WT, ci, PJ, eW, hX, h, BZ, K, avQ, ak, anR, d, CT, ln, as, pb, ck, Qi, iD, vW, c, iT, eB, U, bC, bt, xg, B); #c1(ZNF260) c2(NP_001012774) c3(zinc finger protein 260) c4(25335) c5(25336, 25337, 25338, 25339, 25340, 25341, 25342, 25343, 25344, 25345) c6( ) c7(ajx, mE, mL, aL, aI, aR); #c1(ZNF263) c2(NP_005732) c3(zinc finger protein 263) c4(158938, 158939) c5(158940, 158941, 158942, 158943, 158944, 158945, 158946) c6( ) c7(ea, dD, eq); #c1(ZNF263) c2(XP_006720898) c3(zinc finger protein 263 isoform X5) c4( ) c5(293757, 293758, 293759, 293760, 293761, 293762) c6( ) c7(ea, dD, eq); #c1(ZNF264) c2(NP_003408) c3(zinc finger protein 264) c4(138226) c5(138227, 138228, 138229, 138230, 138231, 138232, 138233, 138234, 138235, 138236, 138237) c6( ) c7(fq, j); #c1(ZNF266) c2(NP_006622) c3(zinc finger protein 266) c4( ) c5(166670, 166671, 166672, 166673, 166674, 166675, 166676, 166677, 166678, 166679, 166680, 166681) c6( ) c7(bP, T, ae, ad, bA); #c1(ZNF266) c2(XP_006722686) c3(zinc finger protein 266 isoform X2) c4(294828) c5(294829, 294830, 294831) c6( ) c7(bP, T, ae, ad, bA); #c1(ZNF267) c2(NP_001252517) c3(zinc finger protein 267 isoform 2) c4( ) c5(94058) c6( ) c7(Pk, gk, al, B, IQ); #c1(ZNF267) c2(NP_003405) c3(zinc finger protein 267 isoform 1) c4(138210, 138211, 138212) c5(138213, 138214, 138215, 138216, 138217, 138218, 138219, 138220, 138221, 138222, 138223, 138224, 138225) c6( ) c7(Pk, gk, al, B, IQ); #c1(ZNF268) c2(NP_001159353) c3(zinc finger protein 268 isoform a) c4(63808, 63809, 63810) c5(63811, 63812, 63813, 63814, 63815, 63816, 63817, 63818, 63819, 63820, 63821, 63822, 63823, 63824, 63825, 63826, 63827, 63828, 63829, 63830, 63831, 63832, 63833, 63834, 63835, 63836) c6( ) c7(ck, if, cn, qN); #c1(ZNF268) c2(NP_001159356) c3(zinc finger protein 268 isoform e) c4(63837) c5(63838, 63839, 63840, 63841, 63842) c6( ) c7(ck, if, cn, qN); #c1(ZNF268) c2(NP_001159357) c3(zinc finger protein 268 isoform f) c4(63843) c5(63844, 63845, 63846, 63847, 63848, 63849, 63850, 63851, 63852) c6( ) c7(ck, if, cn, qN); #c1(ZNF268) c2(NP_001159358) c3(zinc finger protein 268 isoform g) c4(63853) c5(63854, 63855, 63856, 63857, 63858) c6( ) c7(ck, if, cn, qN); #c1(ZNF268) c2(NP_001159359) c3(zinc finger protein 268 isoform h) c4(63859) c5(63860, 63861, 63862, 63863, 63864, 63865, 63866, 63867, 63868) c6( ) c7(ck, if, cn, qN); #c1(ZNF268) c2(NP_694422) c3(zinc finger protein 268 isoform b) c4(245064) c5(245065, 245066, 245067, 245068, 245069, 245070) c6( ) c7(ck, if, cn, qN); #c1(ZNF273) c2(NP_066971) c3(zinc finger protein 273) c4(207892, 207893, 207894, 207895) c5(207896, 207897, 207898, 207899, 207900, 207901, 207902, 207903, 207904, 207905, 207906, 207907, 207908, 207909, 207910, 207911, 207912, 207913, 207914) c6( ) c7(aPm); #c1(ZNF273) c2(XP_011514052) c3(zinc finger protein 273 isoform X2) c4( ) c5(306585, 306586, 306587, 306588, 306589, 306590) c6( ) c7(aPm); #c1(ZNF274) c2(NP_057409) c3(neurotrophin receptor-interacting factor homolog isoform a) c4(190596) c5(190597, 190598, 190599, 190600, 190601, 190602) c6( ) c7(HC); #c1(ZNF274) c2(XP_011524628) c3(neurotrophin receptor-interacting factor homolog isoform X1) c4(319157) c5(319158, 319159, 319160, 319161, 319162, 319163, 319164, 319165) c6( ) c7(HC); #c1(ZNF274) c2(XP_011524629) c3(neurotrophin receptor-interacting factor homolog isoform X2) c4(319166) c5(319167, 319168, 319169, 319170, 319171) c6( ) c7(HC); #c1(ZNF276) c2(NP_001106997) c3(zinc finger protein 276 isoform a) c4(42771, 42772) c5(42773, 42774, 42775, 42776, 42777, 42778, 42779, 42780, 42781, 42782, 42783, 42784, 42785, 42786) c6( ) c7(oZ, os); #c1(ZNF276) c2(XP_005256381) c3(zinc finger protein 276 isoform X2) c4(274163) c5( ) c6( ) c7(oZ, os); #c1(ZNF276) c2(XP_005256385) c3(zinc finger protein 276 isoform X3) c4( ) c5(274164, 274165, 274166, 274167, 274168) c6( ) c7(oZ, os); #c1(ZNF277) c2(NP_068834) c3(zinc finger protein 277) c4(210836, 210837) c5(210838, 210839, 210840, 210841, 210842, 210843, 210844, 210845, 210846, 210847, 210848, 210849, 210850) c6( ) c7(bB, bE, oe); #c1(ZNF2808) c2(XP_011545198) c3(zinc finger protein 2808 isoform X1) c4(343978) c5(343979, 343980, 343981, 343982, 343983, 343984, 343985, 343986, 343987, 343988) c6( ) c7(ad); #c1(ZNF280D) c2(NP_001002843) c3(zinc finger protein 280D isoform 2) c4(19642) c5(19643, 19644, 19645, 19646, 19647, 19648, 19649, 19650) c6( ) c7(an); #c1(ZNF280D) c2(NP_001275518) c3(zinc finger protein 280D isoform 3) c4(106792) c5(106793, 106794, 106795, 106796, 106797, 106798, 106799, 106800, 106801, 106802, 106803, 106804) c6( ) c7(an); #c1(ZNF280D) c2(XP_005254540) c3(zinc finger protein 280D isoform X5) c4(273232) c5(273233, 273234, 273235, 273236, 273237, 273238) c6( ) c7(an); #c1(ZNF280D) c2(XP_005254542) c3(zinc finger protein 280D isoform X12) c4( ) c5(273239, 273240, 273241, 273242, 273243, 273244) c6( ) c7(an); #c1(ZNF280D) c2(XP_011520005) c3(zinc finger protein 280D isoform X1) c4(314881, 314882, 314883) c5(314884, 314885, 314886, 314887, 314888, 314889, 314890, 314891, 314892) c6( ) c7(an); #c1(ZNF280D) c2(XP_011520012) c3(zinc finger protein 280D isoform X10) c4(314893) c5( ) c6( ) c7(an); #c1(ZNF280D) c2(XP_011520013) c3(zinc finger protein 280D isoform X11) c4( ) c5(314894, 314895, 314896, 314897, 314898) c6( ) c7(an); #c1(ZNF281) c2(NP_001268222) c3(zinc finger protein 281 isoform 1) c4(99678) c5(99679, 99680, 99681, 99682, 99683, 99684, 99685, 99686, 99687, 99688, 99689) c6( ) c7(n, q, r); #c1(ZNF281) c2(NP_001268223) c3(zinc finger protein 281 isoform 2) c4(99690, 99691) c5(99692, 99693, 99694, 99695, 99696, 99697, 99698, 99699, 99700, 99701, 99702, 99703, 99704) c6( ) c7(n, q, r); #c1(ZNF282) c2(NP_001290410) c3(zinc finger protein 282 isoform 2) c4(115366, 115367) c5(115368, 115369, 115370, 115371, 115372, 115373, 115374, 115375, 115376, 115377, 115378, 115379) c6( ) c7(je, iM, kH); #c1(ZNF282) c2(NP_003566) c3(zinc finger protein 282 isoform 1) c4(139211) c5(139212, 139213, 139214, 139215, 139216, 139217, 139218) c6( ) c7(je, iM, kH); #c1(ZNF282) c2(XP_011514930) c3(zinc finger protein 282 isoform X2) c4( ) c5(307687) c6( ) c7(je, iM, kH); #c1(ZNF286B) c2(NP_001138517) c3(putative zinc finger protein 286B) c4(56926) c5(56927, 56928, 56929, 56930, 56931, 56932) c6( ) c7(oe); #c1(ZNF296) c2(NP_660331) c3(zinc finger protein 296) c4(240957, 240958) c5(240959, 240960, 240961, 240962, 240963, 240964, 240965, 240966, 240967, 240968, 240969, 240970, 240971) c6( ) c7(ck, x, iT, k, bt, eA, Fc); #c1(ZNF300) c2(NP_001166302) c3(zinc finger protein 300 isoform 1) c4(68548, 68549, 68550, 68551) c5(68552, 68553, 68554, 68555, 68556, 68557, 68558, 68559, 68560) c6( ) c7(bL, ck, A, fM, aW, ff, jh, cj, aT, cz, j, jj, en, hf, y); #c1(ZNF300) c2(XP_006714869) c3(zinc finger protein 300 isoform X1) c4( ) c5(288272, 288273, 288274, 288275, 288276, 288277, 288278, 288279, 288280, 288281, 288282, 288283, 288284, 288285, 288286, 288287) c6( ) c7(bL, ck, A, fM, aW, ff, jh, cj, aT, cz, j, jj, en, hf, y); #c1(ZNF311) c2(NP_001010877) c3(zinc finger protein 311) c4(23909, 23910) c5(23911, 23912, 23913, 23914, 23915, 23916, 23917, 23918, 23919, 23920, 23921, 23922, 23923, 23924, 23925, 23926, 23927, 23928, 23929, 23930, 23931, 23932, 23933, 23934, 23935, 23936, 23937, 23938, 23939, 23940, 23941, 23942, 23943, 23944, 23945, 23946, 23947, 23948, 23949, 23950, 23951, 23952, 23953, 23954, 23955, 23956, 23957, 23958, 23959, 23960, 23961) c6( ) c7(y, eZ); #c1(ZNF311) c2(XP_005249076) c3(zinc finger protein 311 isoform X1) c4(268955) c5( ) c6( ) c7(y, eZ); #c1(ZNF311) c2(XP_006726148) c3(zinc finger protein 311 isoform X7) c4( ) c5(297121, 297122, 297123, 297124, 297125) c6( ) c7(y, eZ); #c1(ZNF311) c2(XP_011546718) c3(zinc finger protein 311 isoform X3) c4(345482) c5( ) c6( ) c7(y, eZ); #c1(ZNF311) c2(XP_011546721) c3(zinc finger protein 311 isoform X6) c4( ) c5(345483) c6( ) c7(y, eZ); #c1(ZNF318) c2(NP_055160) c3(zinc finger protein 318) c4(179526) c5(179527, 179528, 179529, 179530, 179531, 179532, 179533) c6( ) c7(dD, ea, e, v, eq, m, t); #c1(ZNF318) c2(XP_011512754) c3(zinc finger protein 318 isoform X2) c4(303781) c5(303782, 303783, 303784, 303785, 303786, 303787, 303788) c6( ) c7(dD, ea, e, v, eq, m, t); #c1(ZNF32) c2(NP_001005368) c3(zinc finger protein 32) c4(21514) c5(21515, 21516, 21517, 21518, 21519, 21520, 21521, 21522, 21523, 21524, 21525) c6( ) c7(ae, T, fq, jh); #c1(ZNF320) c2(NP_997216) c3(zinc finger protein 320) c4(265192) c5(265193, 265194, 265195, 265196, 265197, 265198, 265199, 265200, 265201, 265202) c6( ) c7(af); #c1(ZNF322) c2(NP_001229728) c3(zinc finger protein 322) c4(84979, 84980, 84981) c5(84982, 84983, 84984, 84985, 84986, 84987, 84988, 84989, 84990, 84991, 84992, 84993, 84994, 84995, 84996, 84997, 84998, 84999, 85000, 85001, 85002, 85003, 85004, 85005, 85006, 85007) c6( ) c7(oe); #c1(ZNF330) c2(NP_001278931) c3(zinc finger protein 330 isoform 2) c4(111063) c5(111064, 111065, 111066, 111067, 111068, 111069) c6( ) c7(Gp, cm, oe, W); #c1(ZNF330) c2(XP_011530177) c3(zinc finger protein 330 isoform X1) c4(326057, 326058, 326059, 326060) c5(326061, 326062, 326063, 326064, 326065, 326066, 326067, 326068, 326069, 326070, 326071, 326072, 326073, 326074, 326075, 326076, 326077, 326078, 326079, 326080, 326081, 326082, 326083, 326084) c6( ) c7(Gp, cm, oe, W); #c1(ZNF331) c2(NP_061025) c3(zinc finger protein 331) c4(198926, 198927, 198928, 198929, 198930, 198931, 198932, 198933, 198934, 198935, 198936, 198937) c5(198938, 198939, 198940, 198941, 198942, 198943, 198944, 198945, 198946, 198947, 198948, 198949, 198950, 198951, 198952, 198953, 198954, 198955, 198956, 198957, 198958, 198959, 198960, 198961, 198962, 198963, 198964, 198965, 198966, 198967, 198968, 198969, 198970, 198971, 198972, 198973, 198974, 198975, 198976, 198977, 198978, 198979, 198980, 198981, 198982, 198983, 198984, 198985, 198986, 198987, 198988, 198989, 198990, 198991, 198992, 198993, 198994, 198995, 198996, 198997, 198998, 198999, 199000, 199001, 199002, 199003, 199004, 199005, 199006, 199007, 199008, 199009, 199010, 199011, 199012, 199013, 199014, 199015, 199016, 199017, 199018, 199019, 199020, 199021, 199022, 199023, 199024, 199025, 199026, 199027, 199028, 199029, 199030, 199031, 199032, 199033, 199034) c6( ) c7(ck, T, eJ, nB, bE, aW, gX, aT, cj, aA, bB, cm, aF, lQ, ci, fd, Pk, bt, B, dx); #c1(ZNF334) c2(XP_011527196) c3(zinc finger protein 334 isoform X5) c4( ) c5(321726) c6( ) c7(y, j); #c1(ZNF334) c2(XP_011527197) c3(zinc finger protein 334 isoform X6) c4( ) c5(321727) c6( ) c7(y, j); #c1(ZNF334) c2(XP_011527198) c3(zinc finger protein 334 isoform X1) c4(321728, 321729) c5(321730, 321731, 321732, 321733, 321734, 321735, 321736) c6( ) c7(y, j); #c1(ZNF334) c2(XP_011527199) c3(zinc finger protein 334 isoform X2) c4( ) c5(321737, 321738, 321739, 321740, 321741) c6( ) c7(y, j); #c1(ZNF335) c2(NP_071378) c3(zinc finger protein 335) c4(211262, 211263, 211264) c5(211265, 211266, 211267, 211268, 211269, 211270, 211271, 211272, 211273, 211274, 211275, 211276, 211277) c6( ) c7(cVG); #c1(ZNF335) c2(XP_005260563) c3(zinc finger protein 335 isoform X2) c4( ) c5(276627, 276628, 276629, 276630, 276631, 276632) c6( ) c7(cVG); #c1(ZNF343) c2(NP_001269424) c3(zinc finger protein 343 isoform 1) c4(101607, 101608) c5(101609, 101610, 101611, 101612, 101613, 101614, 101615, 101616, 101617, 101618, 101619, 101620) c6( ) c7(Ea); #c1(ZNF343) c2(NP_001269426) c3(zinc finger protein 343 isoform 2) c4(101621) c5( ) c6( ) c7(Ea); #c1(ZNF343) c2(NP_001269428) c3(zinc finger protein 343 isoform 4) c4(101622) c5(101623, 101624, 101625, 101626, 101627, 101628, 101629, 101630, 101631, 101632, 101633, 101634) c6( ) c7(Ea); #c1(ZNF35) c2(NP_003411) c3(zinc finger protein 35) c4(138253, 138254, 138255, 138256) c5(138257, 138258, 138259, 138260, 138261, 138262, 138263, 138264, 138265, 138266, 138267, 138268, 138269, 138270, 138271, 138272, 138273, 138274, 138275, 138276, 138277, 138278, 138279, 138280, 138281) c6( ) c7(es, T, aE, iA, aW, Y, aT, Nf, dL, eL, eW); #c1(ZNF350) c2(NP_067645) c3(zinc finger protein 350) c4(209202) c5(209203, 209204, 209205, 209206, 209207, 209208, 209209) c6( ) c7(zQ, dB, aW, if, Qk, aT, kH, at, dL, ci, qN, eA, t, X, ip); #c1(ZNF354A) c2(NP_005640) c3(zinc finger protein 354A) c4(158191, 158192) c5(158193, 158194, 158195, 158196, 158197, 158198, 158199, 158200, 158201, 158202, 158203, 158204, 158205) c6( ) c7(BI, T, vT, wu, eD, lG, wm, bu, t); #c1(ZNF365) c2(NP_055766) c3(protein ZNF365 isoform A) c4(183365) c5(183366, 183367, 183368, 183369, 183370, 183371) c6( ) c7(cVH, xN, T, PE, aW, HA, aT, aA, fe, K, m, eE, t); #c1(ZNF365) c2(NP_955522) c3(protein ZNF365 isoform B) c4(261856, 261857) c5(261858, 261859, 261860, 261861, 261862, 261863, 261864, 261865, 261866, 261867, 261868, 261869) c6( ) c7(cVH, xN, T, PE, aW, HA, aT, aA, fe, K, m, eE, t); #c1(ZNF365) c2(NP_955523) c3(protein ZNF365 isoform C) c4(261870) c5(261871, 261872, 261873, 261874, 261875, 261876) c6( ) c7(cVH, xN, T, PE, aW, HA, aT, aA, fe, K, m, eE, t); #c1(ZNF365) c2(NP_955524) c3(protein ZNF365 isoform D) c4(261877) c5(261878, 261879, 261880, 261881, 261882, 261883) c6( ) c7(cVH, xN, T, PE, aW, HA, aT, aA, fe, K, m, eE, t); #c1(ZNF366) c2(NP_689838) c3(zinc finger protein 366) c4(244114) c5(244115, 244116, 244117, 244118, 244119, 244120, 244121) c6( ) c7(IB, dD, eq, aT); #c1(ZNF367) c2(NP_710162) c3(zinc finger protein 367) c4(246541) c5(246542, 246543, 246544, 246545, 246546, 246547) c6( ) c7(alf, n, py, d, as); #c1(ZNF382) c2(NP_001243767) c3(zinc finger protein 382 isoform 2) c4(91681) c5(91682, 91683, 91684, 91685, 91686, 91687) c6( ) c7(ci); #c1(ZNF382) c2(NP_116214) c3(zinc finger protein 382 isoform 1) c4(225808) c5(225809, 225810, 225811, 225812, 225813, 225814, 225815) c6( ) c7(ci); #c1(ZNF383) c2(XP_011524892) c3(zinc finger protein 383 isoform X1) c4(319298) c5(319299, 319300, 319301, 319302, 319303, 319304) c6( ) c7(bM); #c1(ZNF384) c2(NP_001035009) c3(zinc finger protein 384 isoform c) c4(32423) c5(32424, 32425, 32426, 32427, 32428, 32429) c6( ) c7(ck, x, ci, k, hF, bA); #c1(ZNF384) c2(NP_001129206) c3(zinc finger protein 384 isoform d) c4(51195, 51196) c5(51197, 51198, 51199, 51200, 51201, 51202, 51203, 51204, 51205, 51206) c6( ) c7(ck, x, ci, k, hF, bA); #c1(ZNF384) c2(NP_597733) c3(zinc finger protein 384 isoform a) c4(235131, 235132) c5(235133, 235134, 235135, 235136, 235137, 235138, 235139, 235140, 235141, 235142, 235143, 235144, 235145, 235146, 235147, 235148, 235149, 235150, 235151, 235152, 235153, 235154, 235155) c6( ) c7(ck, x, ci, k, hF, bA); #c1(ZNF384) c2(XP_011519223) c3(zinc finger protein 384 isoform X1) c4(313810) c5( ) c6( ) c7(ck, x, ci, k, hF, bA); #c1(ZNF384) c2(XP_011519226) c3(zinc finger protein 384 isoform X3) c4( ) c5(313811, 313812, 313813, 313814, 313815, 313816) c6( ) c7(ck, x, ci, k, hF, bA); #c1(ZNF384) c2(XP_011519227) c3(zinc finger protein 384 isoform X4) c4( ) c5(313817, 313818, 313819, 313820, 313821) c6( ) c7(ck, x, ci, k, hF, bA); #c1(ZNF385A) c2(NP_001124439) c3(zinc finger protein 385A isoform a) c4(48896) c5(48897, 48898, 48899, 48900, 48901, 48902, 48903, 48904, 48905) c6( ) c7(IR); #c1(ZNF385A) c2(NP_001124440) c3(zinc finger protein 385A isoform b) c4(48906) c5(48907, 48908, 48909, 48910, 48911, 48912) c6( ) c7(IR); #c1(ZNF385A) c2(NP_001276930) c3(zinc finger protein 385A isoform d) c4( ) c5(108649, 108650, 108651, 108652, 108653) c6( ) c7(IR); #c1(ZNF385A) c2(NP_001276931) c3(zinc finger protein 385A isoform c) c4( ) c5(108654, 108655, 108656, 108657, 108658, 108659, 108660, 108661, 108662, 108663, 108664, 108665, 108666, 108667, 108668, 108669, 108670, 108671, 108672, 108673, 108674, 108675, 108676, 108677, 108678, 108679) c6( ) c7(IR); #c1(ZNF385A) c2(XP_011536470) c3(zinc finger protein 385A isoform X2) c4(333820, 333821, 333822, 333823) c5(333824, 333825, 333826) c6( ) c7(IR); #c1(ZNF385A) c2(XP_011536473) c3(zinc finger protein 385A isoform X5) c4(333827) c5(333828) c6( ) c7(IR); #c1(ZNF385B) c2(NP_001106868) c3(zinc finger protein 385B isoform 2) c4(42644, 42645, 42646) c5(42647, 42648, 42649, 42650, 42651, 42652, 42653, 42654, 42655) c6( ) c7(Na, c, an, aj, v, Nc, m, nA, bX, avQ, bN); #c1(ZNF385B) c2(NP_001106869) c3(zinc finger protein 385B isoform 3) c4( ) c5(42656, 42657, 42658, 42659, 42660, 42661, 42662, 42663, 42664, 42665, 42666, 42667, 42668) c6( ) c7(Na, c, an, aj, v, Nc, m, nA, bX, avQ, bN); #c1(ZNF385B) c2(NP_689733) c3(zinc finger protein 385B isoform 1) c4(243802, 243803) c5(243804, 243805, 243806, 243807, 243808) c6( ) c7(Na, c, an, aj, v, Nc, m, nA, bX, avQ, bN); #c1(ZNF385B) c2(XP_011509016) c3(zinc finger protein 385B isoform X2) c4(299613) c5( ) c6( ) c7(Na, c, an, aj, v, Nc, m, nA, bX, avQ, bN); #c1(ZNF385B) c2(XP_011509017) c3(zinc finger protein 385B isoform X3) c4( ) c5(299614) c6( ) c7(Na, c, an, aj, v, Nc, m, nA, bX, avQ, bN); #c1(ZNF385B) c2(XP_011509019) c3(zinc finger protein 385B isoform X4) c4(299615) c5( ) c6( ) c7(Na, c, an, aj, v, Nc, m, nA, bX, avQ, bN); #c1(ZNF385B) c2(XP_011509025) c3(zinc finger protein 385B isoform X8) c4( ) c5(299616, 299617, 299618, 299619, 299620, 299621, 299622, 299623, 299624, 299625, 299626, 299627, 299628, 299629, 299630, 299631, 299632, 299633) c6( ) c7(Na, c, an, aj, v, Nc, m, nA, bX, avQ, bN); #c1(ZNF385D) c2(NP_078973) c3(zinc finger protein 385D) c4(216360) c5(216361, 216362, 216363, 216364, 216365, 216366) c6( ) c7(e, oe, VT, Ir, j, bK, IB, fq, xa); #c1(ZNF391) c2(XP_011512871) c3(zinc finger protein 391 isoform X1) c4(304153, 304154) c5(304155, 304156, 304157, 304158, 304159, 304160, 304161, 304162, 304163, 304164, 304165, 304166) c6( ) c7(y); #c1(ZNF395) c2(NP_061130) c3(zinc finger protein 395) c4(199272, 199273, 199274, 199275, 199276, 199277) c5(199278, 199279, 199280, 199281, 199282, 199283, 199284, 199285, 199286, 199287, 199288, 199289, 199290, 199291, 199292, 199293, 199294, 199295, 199296, 199297, 199298, 199299, 199300, 199301, 199302, 199303, 199304, 199305, 199306, 199307, 199308, 199309, 199310, 199311, 199312, 199313, 199314, 199315, 199316) c6( ) c7(T, hd, A, nB, iR, aW, oV, eH, eZ, aT, h, hz, cL, aq, oX, bde, pz, eF, mK, o); #c1(ZNF398) c2(NP_065832) c3(zinc finger protein 398 isoform b) c4( ) c5(205728, 205729, 205730, 205731, 205732, 205733, 205734, 205735, 205736, 205737, 205738, 205739, 205740, 205741, 205742, 205743, 205744) c6( ) c7(ae, T, eM, yk, ff, aT, h, m, en, t, bz, B); #c1(ZNF398) c2(NP_733787) c3(zinc finger protein 398 isoform a) c4(247109) c5(247110, 247111, 247112, 247113, 247114, 247115, 247116, 247117, 247118, 247119) c6( ) c7(ae, T, eM, yk, ff, aT, h, m, en, t, bz, B); #c1(ZNF398) c2(XP_011514741) c3(zinc finger protein 398 isoform X3) c4(307386, 307387) c5(307388, 307389, 307390, 307391, 307392, 307393, 307394, 307395) c6( ) c7(ae, T, eM, yk, ff, aT, h, m, en, t, bz, B); #c1(ZNF407) c2(NP_001139661) c3(zinc finger protein 407 isoform 2) c4( ) c5(59636, 59637, 59638, 59639, 59640, 59641) c6( ) c7(fq); #c1(ZNF407) c2(NP_001139662) c3(zinc finger protein 407 isoform 3) c4(59642) c5(59643, 59644, 59645, 59646, 59647, 59648, 59649, 59650, 59651, 59652) c6( ) c7(fq); #c1(ZNF407) c2(NP_060227) c3(zinc finger protein 407 isoform 1) c4(194861, 194862) c5(194863, 194864, 194865, 194866, 194867, 194868) c6( ) c7(fq); #c1(ZNF41) c2(NP_700359) c3(zinc finger protein 41) c4(245925) c5(245926, 245927, 245928, 245929, 245930, 245931, 245932, 245933, 245934, 245935, 245936) c6( ) c7(nd, nf, nA, xg, he, iJ); #c1(ZNF41) c2(XP_006724618) c3(zinc finger protein 41 isoform X4) c4(296120, 296121) c5(296122, 296123, 296124, 296125, 296126, 296127, 296128, 296129, 296130, 296131, 296132, 296133) c6( ) c7(nd, nf, nA, xg, he, iJ); #c1(ZNF410) c2(NP_001229853) c3(zinc finger protein 410 isoform a) c4(85421) c5(85422, 85423, 85424, 85425, 85426, 85427) c6( ) c7(T, A, eR, ig, bE, aW, hI, r, aT, uz, bB, at, qj, fe, ER, ei, bw, Hl, q, pC); #c1(ZNF410) c2(NP_001229855) c3(zinc finger protein 410 isoform c) c4(85434, 85435, 85436, 85437) c5(85438, 85439, 85440, 85441, 85442, 85443, 85444, 85445, 85446, 85447, 85448, 85449, 85450, 85451, 85452, 85453, 85454, 85455, 85456, 85457, 85458, 85459, 85460, 85461, 85462, 85463, 85464, 85465, 85466) c6( ) c7(T, A, eR, ig, bE, aW, hI, r, aT, uz, bB, at, qj, fe, ER, ei, bw, Hl, q, pC); #c1(ZNF410) c2(NP_001229856) c3(zinc finger protein 410 isoform d) c4(85467) c5(85468, 85469, 85470, 85471, 85472, 85473) c6( ) c7(T, A, eR, ig, bE, aW, hI, r, aT, uz, bB, at, qj, fe, ER, ei, bw, Hl, q, pC); #c1(ZNF410) c2(NP_001229857) c3(zinc finger protein 410 isoform e) c4( ) c5(85474, 85475) c6( ) c7(T, A, eR, ig, bE, aW, hI, r, aT, uz, bB, at, qj, fe, ER, ei, bw, Hl, q, pC); #c1(ZNF410) c2(NP_067011) c3(zinc finger protein 410 isoform b) c4(208328, 208329, 208330, 208331) c5(208332, 208333, 208334, 208335, 208336, 208337, 208338, 208339, 208340, 208341, 208342, 208343, 208344, 208345, 208346, 208347, 208348, 208349, 208350) c6( ) c7(T, A, eR, ig, bE, aW, hI, r, aT, uz, bB, at, qj, fe, ER, ei, bw, Hl, q, pC); #c1(ZNF415) c2(NP_001129510) c3(zinc finger protein 415 isoform 1) c4(51786) c5(51787, 51788, 51789, 51790, 51791, 51792) c6( ) c7(T); #c1(ZNF415) c2(NP_060825) c3(zinc finger protein 415 isoform 2) c4( ) c5(198007, 198008, 198009, 198010, 198011) c6( ) c7(T); #c1(ZNF415) c2(XP_006723331) c3(zinc finger protein 415 isoform X5) c4(295129) c5(295130) c6( ) c7(T); #c1(ZNF415) c2(XP_006723333) c3(zinc finger protein 415 isoform X2) c4( ) c5(295131) c6( ) c7(T); #c1(ZNF415) c2(XP_006723337) c3(zinc finger protein 415 isoform X8) c4(295132, 295133) c5(295134, 295135, 295136, 295137, 295138, 295139, 295140, 295141, 295142, 295143, 295144, 295145, 295146, 295147, 295148, 295149) c6( ) c7(T); #c1(ZNF415) c2(XP_011525400) c3(zinc finger protein 415 isoform X3) c4(319845) c5( ) c6( ) c7(T); #c1(ZNF415) c2(XP_011525408) c3(zinc finger protein 415 isoform X6) c4( ) c5(319846, 319847, 319848, 319849, 319850) c6( ) c7(T); #c1(ZNF419) c2(NP_001091961) c3(zinc finger protein 419 isoform 1) c4(39019, 39020) c5(39021, 39022, 39023, 39024, 39025, 39026, 39027, 39028, 39029, 39030, 39031, 39032) c6( ) c7(fr); #c1(ZNF419) c2(NP_001091962) c3(zinc finger protein 419 isoform 3) c4(39033, 39034, 39035) c5(39036, 39037, 39038, 39039, 39040, 39041, 39042, 39043, 39044, 39045, 39046, 39047, 39048, 39049, 39050) c6( ) c7(fr); #c1(ZNF419) c2(NP_001091963) c3(zinc finger protein 419 isoform 4) c4(39051, 39052) c5(39053, 39054, 39055, 39056, 39057, 39058, 39059, 39060, 39061, 39062, 39063, 39064, 39065, 39066, 39067) c6( ) c7(fr); #c1(ZNF419) c2(NP_001091964) c3(zinc finger protein 419 isoform 5) c4(39068) c5(39069, 39070, 39071, 39072, 39073, 39074) c6( ) c7(fr); #c1(ZNF419) c2(NP_001091965) c3(zinc finger protein 419 isoform 6) c4(39075) c5(39076, 39077, 39078, 39079, 39080) c6( ) c7(fr); #c1(ZNF419) c2(NP_001091966) c3(zinc finger protein 419 isoform 7) c4(39081) c5(39082, 39083, 39084, 39085, 39086, 39087, 39088) c6( ) c7(fr); #c1(ZNF419) c2(NP_001278672) c3(zinc finger protein 419 isoform 8) c4(109963) c5(109964, 109965, 109966, 109967, 109968, 109969) c6( ) c7(fr); #c1(ZNF419) c2(NP_078967) c3(zinc finger protein 419 isoform 2) c4(216319) c5(216320, 216321, 216322, 216323, 216324, 216325) c6( ) c7(fr); #c1(ZNF423) c2(NP_001258549) c3(zinc finger protein 423 isoform 2) c4( ) c5(96126, 96127, 96128, 96129, 96130, 96131) c6( ) c7(bM, iU, aW, cVI, eZ, aT, cm, Xr, hF, xa, y); #c1(ZNF423) c2(NP_055884) c3(zinc finger protein 423 isoform 1) c4(184158) c5(184159, 184160, 184161, 184162, 184163, 184164, 184165, 184166) c6( ) c7(bM, iU, aW, cVI, eZ, aT, cm, Xr, hF, xa, y); #c1(ZNF423) c2(XP_005255914) c3(zinc finger protein 423 isoform X4) c4(273894) c5( ) c6( ) c7(bM, iU, aW, cVI, eZ, aT, cm, Xr, hF, xa, y); #c1(ZNF423) c2(XP_011521264) c3(zinc finger protein 423 isoform X2) c4( ) c5(316172, 316173) c6( ) c7(bM, iU, aW, cVI, eZ, aT, cm, Xr, hF, xa, y); #c1(ZNF430) c2(NP_001166142) c3(zinc finger protein 430 isoform 2) c4(68305, 68306) c5(68307, 68308, 68309, 68310, 68311, 68312, 68313, 68314, 68315, 68316, 68317, 68318) c6( ) c7(kl); #c1(ZNF430) c2(NP_079465) c3(zinc finger protein 430 isoform 1) c4(218201) c5(218202, 218203, 218204, 218205, 218206, 218207) c6( ) c7(kl); #c1(ZNF432) c2(XP_011525850) c3(zinc finger protein 432 isoform X1) c4(320272) c5(320273, 320274, 320275, 320276, 320277, 320278, 320279) c6( ) c7(fe, aT); #c1(ZNF433) c2(NP_001073880) c3(zinc finger protein 433) c4( ) c5(36214, 36215, 36216, 36217, 36218, 36219) c6( ) c7(V); #c1(ZNF433) c2(XP_011526024) c3(zinc finger protein 433 isoform X1) c4(320369) c5( ) c6( ) c7(V); #c1(ZNF433) c2(XP_011526025) c3(zinc finger protein 433 isoform X2) c4(320370) c5( ) c6( ) c7(V); #c1(ZNF433) c2(XP_011526027) c3(zinc finger protein 433 isoform X4) c4( ) c5(320371) c6( ) c7(V); #c1(ZNF438) c2(NP_001137240) c3(zinc finger protein 438 isoform a) c4(55104, 55105, 55106) c5(55107, 55108, 55109, 55110, 55111, 55112, 55113, 55114, 55115, 55116, 55117, 55118, 55119, 55120, 55121, 55122, 55123, 55124, 55125, 55126, 55127) c6( ) c7(Y); #c1(ZNF438) c2(NP_001137241) c3(zinc finger protein 438 isoform c) c4( ) c5(55128, 55129, 55130, 55131, 55132, 55133) c6( ) c7(Y); #c1(ZNF438) c2(NP_001137243) c3(zinc finger protein 438 isoform b) c4(55134, 55135) c5(55136, 55137, 55138, 55139, 55140, 55141, 55142, 55143, 55144, 55145, 55146, 55147, 55148, 55149, 55150, 55151, 55152, 55153, 55154, 55155, 55156, 55157, 55158, 55159) c6( ) c7(Y); #c1(ZNF44) c2(NP_001157748) c3(zinc finger protein 44 isoform 1) c4(62525, 62526) c5(62527, 62528, 62529, 62530, 62531, 62532, 62533, 62534, 62535, 62536, 62537, 62538) c6( ) c7(ck, cOR, fb); #c1(ZNF44) c2(NP_057348) c3(zinc finger protein 44 isoform 2) c4(190253, 190254) c5(190255, 190256, 190257, 190258, 190259, 190260, 190261, 190262, 190263, 190264, 190265, 190266, 190267, 190268) c6( ) c7(ck, cOR, fb); #c1(ZNF44) c2(XP_011526364) c3(zinc finger protein 44 isoform X1) c4( ) c5(320658, 320659, 320660) c6( ) c7(ck, cOR, fb); #c1(ZNF44) c2(XP_011526365) c3(zinc finger protein 44 isoform X2) c4( ) c5(320661) c6( ) c7(ck, cOR, fb); #c1(ZNF443) c2(NP_005806) c3(zinc finger protein 443) c4(159595, 159596) c5(159597, 159598, 159599, 159600, 159601, 159602, 159603, 159604, 159605, 159606, 159607, 159608, 159609) c6( ) c7(B); #c1(ZNF444) c2(XP_011525370) c3(zinc finger protein 444 isoform X1) c4(319819) c5(319820, 319821, 319822, 319823, 319824, 319825) c6( ) c7(YP); #c1(ZNF45) c2(NP_003416) c3(zinc finger protein 45) c4(138282, 138283) c5(138284, 138285, 138286, 138287, 138288, 138289, 138290, 138291, 138292, 138293, 138294, 138295) c6( ) c7(V); #c1(ZNF451) c2(NP_001026794) c3(zinc finger protein 451 isoform 1) c4(29633) c5(29634, 29635, 29636, 29637, 29638, 29639) c6( ) c7(ck, ae, kS, ad, jj); #c1(ZNF451) c2(NP_001244202) c3(zinc finger protein 451 isoform 3) c4(92025) c5(92026, 92027, 92028, 92029, 92030, 92031, 92032) c6( ) c7(ck, ae, kS, ad, jj); #c1(ZNF451) c2(NP_056370) c3(zinc finger protein 451 isoform 2) c4(187327) c5(187328, 187329, 187330, 187331, 187332, 187333) c6( ) c7(ck, ae, kS, ad, jj); #c1(ZNF462) c2(NP_067047) c3(zinc finger protein 462) c4(208713) c5(208714, 208715, 208716, 208717, 208718, 208719) c6( ) c7(ad); #c1(ZNF462) c2(XP_006717278) c3(zinc finger protein 462 isoform X3) c4(290858) c5(290859, 290860, 290861, 290862, 290863, 290864) c6( ) c7(ad); #c1(ZNF462) c2(XP_006717281) c3(zinc finger protein 462 isoform X4) c4(290865, 290866) c5(290867, 290868, 290869, 290870, 290871, 290872, 290873, 290874, 290875, 290876, 290877, 290878, 290879) c6( ) c7(ad); #c1(ZNF469) c2(NP_001120936) c3(zinc finger protein 469) c4(44974) c5(44975, 44976, 44977, 44978, 44979, 44980, 44981) c6( ) c7(aTf, nX, ev, cTV, la, ah, K, aqf, aOm, aOl); #c1(ZNF483) c2(NP_001007170) c3(zinc finger protein 483 isoform b) c4(22525) c5(22526, 22527, 22528, 22529, 22530, 22531, 22532, 22533, 22534, 22535, 22536, 22537, 22538, 22539, 22540, 22541, 22542, 22543, 22544) c6( ) c7(v); #c1(ZNF483) c2(NP_597721) c3(zinc finger protein 483 isoform a) c4(235103, 235104, 235105) c5(235106, 235107, 235108, 235109, 235110, 235111) c6( ) c7(v); #c1(ZNF490) c2(NP_065765) c3(zinc finger protein 490) c4(205267) c5(205268, 205269, 205270, 205271, 205272, 205273, 205274) c6( ) c7(bK); #c1(ZNF492) c2(NP_065906) c3(zinc finger protein 492) c4(206157) c5(206158, 206159, 206160, 206161, 206162, 206163, 206164, 206165, 206166, 206167, 206168) c6( ) c7(ab, aw); #c1(ZNF496) c2(NP_116141) c3(zinc finger protein 496) c4(225472) c5(225473, 225474, 225475, 225476, 225477, 225478, 225479) c6( ) c7(c); #c1(ZNF496) c2(XP_005273385) c3(zinc finger protein 496 isoform X4) c4(284549) c5(284550, 284551, 284552, 284553, 284554, 284555) c6( ) c7(c); #c1(ZNF501) c2(NP_659481) c3(zinc finger protein 501) c4(240137, 240138) c5(240139, 240140, 240141, 240142, 240143, 240144, 240145, 240146, 240147, 240148, 240149, 240150) c6( ) c7(ck, cOR, fb); #c1(ZNF507) c2(NP_001129628) c3(zinc finger protein 507) c4(52077, 52078) c5(52079, 52080, 52081, 52082, 52083, 52084, 52085, 52086, 52087, 52088, 52089, 52090, 52091, 52092, 52093, 52094) c6( ) c7(he, bN); #c1(ZNF512) c2(NP_001258215) c3(zinc finger protein 512 isoform b) c4(95992) c5(95993, 95994, 95995, 95996, 95997, 95998, 95999) c6( ) c7(om); #c1(ZNF512) c2(NP_001258217) c3(zinc finger protein 512 isoform c) c4( ) c5(96000, 96001, 96002, 96003, 96004) c6( ) c7(om); #c1(ZNF512) c2(NP_001258218) c3(zinc finger protein 512 isoform d) c4( ) c5(96005, 96006, 96007, 96008, 96009) c6( ) c7(om); #c1(ZNF512) c2(NP_115810) c3(zinc finger protein 512 isoform a) c4(224017, 224018, 224019, 224020) c5(224021, 224022, 224023, 224024, 224025, 224026, 224027, 224028, 224029, 224030, 224031, 224032, 224033) c6( ) c7(om); #c1(ZNF512B) c2(NP_065764) c3(zinc finger protein 512B) c4( ) c5(205256, 205257, 205258, 205259, 205260, 205261, 205262, 205263, 205264, 205265, 205266) c6( ) c7(c); #c1(ZNF512B) c2(XP_005260283) c3(zinc finger protein 512B isoform X2) c4(276508) c5(276509, 276510, 276511) c6( ) c7(c); #c1(ZNF513) c2(NP_001188388) c3(zinc finger protein 513 isoform 2) c4( ) c5(79106, 79107, 79108, 79109, 79110) c6( ) c7(dB, uz, cVJ, nk); #c1(ZNF513) c2(NP_653232) c3(zinc finger protein 513 isoform 1) c4(239248, 239249) c5(239250, 239251, 239252, 239253, 239254, 239255, 239256, 239257) c6( ) c7(dB, uz, cVJ, nk); #c1(ZNF516) c2(NP_055458) c3(zinc finger protein 516) c4(181305) c5(181306, 181307, 181308, 181309, 181310, 181311, 181312, 181313, 181314, 181315, 181316) c6( ) c7(q, r); #c1(ZNF516) c2(XP_011524579) c3(zinc finger protein 516 isoform X3) c4(319147) c5(319148) c6( ) c7(q, r); #c1(ZNF519) c2(XP_011523906) c3(zinc finger protein 519 isoform X1) c4(318433) c5(318434, 318435, 318436, 318437, 318438, 318439, 318440, 318441, 318442, 318443) c6( ) c7(c); #c1(ZNF521) c2(NP_056276) c3(zinc finger protein 521) c4(186869, 186870, 186871) c5(186872, 186873, 186874, 186875, 186876, 186877, 186878, 186879, 186880, 186881, 186882, 186883, 186884, 186885, 186886, 186887, 186888, 186889, 186890) c6( ) c7(dB, x, jf, ck, k); #c1(ZNF536) c2(NP_055532) c3(zinc finger protein 536) c4(181806) c5(181807, 181808, 181809, 181810, 181811) c6( ) c7(e, fq, fr); #c1(ZNF536) c2(XP_011525861) c3(zinc finger protein 536 isoform X2) c4( ) c5(320287) c6( ) c7(e, fq, fr); #c1(ZNF555) c2(NP_001166246) c3(zinc finger protein 555 isoform 2) c4(68529) c5(68530, 68531, 68532, 68533, 68534, 68535) c6( ) c7(ac); #c1(ZNF555) c2(NP_690004) c3(zinc finger protein 555 isoform 1) c4(244704) c5(244705, 244706, 244707, 244708, 244709, 244710) c6( ) c7(ac); #c1(ZNF559) c2(NP_001189335) c3(zinc finger protein 559 isoform a) c4(79283, 79284) c5(79285, 79286, 79287) c6( ) c7(aF, aA); #c1(ZNF559) c2(NP_001189336) c3(zinc finger protein 559 isoform c) c4( ) c5(79288, 79289, 79290, 79291, 79292, 79293) c6( ) c7(aF, aA); #c1(ZNF559) c2(NP_115886) c3(zinc finger protein 559 isoform b) c4( ) c5(224522, 224523, 224524, 224525, 224526, 224527, 224528, 224529, 224530, 224531, 224532) c6( ) c7(aF, aA); #c1(ZNF568) c2(NP_001191766) c3(zinc finger protein 568 isoform 3) c4( ) c5(81739, 81740, 81741, 81742, 81743) c6( ) c7(j); #c1(ZNF568) c2(NP_001191767) c3(zinc finger protein 568 isoform 5) c4(81744) c5(81745, 81746, 81747, 81748, 81749, 81750, 81751, 81752, 81753, 81754, 81755, 81756) c6( ) c7(j); #c1(ZNF568) c2(NP_001191768) c3(zinc finger protein 568 isoform 6) c4(81757) c5( ) c6( ) c7(j); #c1(ZNF568) c2(NP_940941) c3(zinc finger protein 568 isoform 1) c4(260158, 260159) c5(260160, 260161, 260162, 260163, 260164, 260165, 260166) c6( ) c7(j); #c1(ZNF569) c2(NP_689697) c3(zinc finger protein 569) c4( ) c5(243604, 243605, 243606, 243607, 243608, 243609, 243610, 243611, 243612, 243613, 243614, 243615) c6( ) c7(T, dA, WT, ci, PJ, eW, hX, h, BZ, K, cOR, fb, avQ, ak, anR, d, CT, Io, as, pb, ck, Qi, iO, vW, c, iT, eB, U, bC, bt, xg, B); #c1(ZNF569) c2(XP_005258621) c3(zinc finger protein 569 isoform X3) c4( ) c5(275702, 275703, 275704, 275705, 275706) c6( ) c7(T, dA, WT, ci, PJ, eW, hX, h, BZ, K, cOR, fb, avQ, ak, anR, d, CT, Io, as, pb, ck, Qi, iU, vW, c, iT, eB, U, bC, bt, xg, B); #c1(ZNF569) c2(XP_006723111) c3(zinc finger protein 569 isoform X2) c4(295011, 295012, 295013) c5(295014) c6( ) c7(T, dA, WT, ci, PJ, eW, hX, h, BZ, K, cOR, fb, avQ, ak, anR, d, CT, Io, as, pb, ck, Qi, iU, vW, c, iT, eB, U, bC, bt, xg, B); #c1(ZNF577) c2(NP_001129062) c3(zinc finger protein 577 isoform b) c4( ) c5(50705, 50706, 50707, 50708, 50709, 50710, 50711, 50712, 50713, 50714, 50715, 50716, 50717, 50718, 50719, 50720, 50721, 50722) c6( ) c7(g, ff, pm, en); #c1(ZNF577) c2(XP_011525714) c3(zinc finger protein 577 isoform X1) c4(320123, 320124, 320125, 320126, 320127) c5(320128, 320129, 320130, 320131, 320132, 320133, 320134, 320135, 320136, 320137, 320138, 320139) c6( ) c7(g, ff, pm, en); #c1(ZNF580) c2(NP_057286) c3(zinc finger protein 580) c4( ) c5(189853, 189854, 189855, 189856, 189857, 189858, 189859, 189860, 189861, 189862, 189863, 189864, 189865, 189866) c6( ) c7(j); #c1(ZNF580) c2(XP_005259024) c3(zinc finger protein 580 isoform X4) c4(275924) c5( ) c6( ) c7(j); #c1(ZNF581) c2(XP_006723303) c3(zinc finger protein 581 isoform X1) c4(295108) c5(295109, 295110, 295111, 295112, 295113, 295114, 295115) c6( ) c7(j); #c1(ZNF582) c2(NP_653291) c3(zinc finger protein 582) c4( ) c5(239518, 239519, 239520, 239521, 239522) c6( ) c7(if, QO, qN); #c1(ZNF582) c2(XP_006723107) c3(zinc finger protein 582 isoform X1) c4(295009) c5(295010) c6( ) c7(if, QO, qN); #c1(ZNF583) c2(XP_011524819) c3(zinc finger protein 583 isoform X1) c4(319228, 319229, 319230) c5(319231, 319232, 319233, 319234, 319235, 319236, 319237, 319238, 319239, 319240, 319241, 319242, 319243, 319244, 319245, 319246, 319247, 319248, 319249, 319250, 319251, 319252) c6( ) c7(r); #c1(ZNF585B) c2(NP_689492) c3(zinc finger protein 585B) c4(242895, 242896, 242897) c5(242898, 242899, 242900, 242901, 242902, 242903, 242904, 242905, 242906, 242907, 242908, 242909, 242910, 242911, 242912, 242913, 242914, 242915, 242916, 242917) c6( ) c7(bM); #c1(ZNF592) c2(NP_055445) c3(zinc finger protein 592) c4(181179) c5(181180, 181181, 181182, 181183, 181184, 181185, 181186, 181187, 181188, 181189, 181190, 181191) c6( ) c7(gZ, bFu, nA, cVK); #c1(ZNF596) c2(XP_011533044) c3(zinc finger protein 596 isoform X1) c4(329251, 329252) c5(329253, 329254, 329255, 329256, 329257, 329258, 329259, 329260, 329261, 329262) c6( ) c7(bX); #c1(ZNF596) c2(XP_011533046) c3(zinc finger protein 596 isoform X2) c4( ) c5(329263, 329264, 329265, 329266, 329267, 329268) c6( ) c7(bX); #c1(ZNF606) c2(NP_079303) c3(zinc finger protein 606) c4(217709, 217710, 217711) c5(217712, 217713, 217714, 217715, 217716, 217717, 217718, 217713, 217720, 217721, 217722, 217723, 217724, 217725, 217726, 217727, 217728, 217729) c6( ) c7(IB); #c1(ZNF607) c2(NP_001166148) c3(zinc finger protein 607 isoform 2) c4(68339) c5(68340, 68341, 68342, 68343, 68344, 68345) c6( ) c7(ac); #c1(ZNF607) c2(NP_116078) c3(zinc finger protein 607 isoform 1) c4(225332) c5(225333, 225334, 225335, 225336, 225337, 225338) c6( ) c7(ac); #c1(ZNF608) c2(NP_065798) c3(zinc finger protein 608) c4(205515, 205516) c5(205517, 205518, 205519, 205520, 205521, 205522, 205523, 205524, 205525, 205526, 205527, 205528, 205529, 205530, 205531, 205532, 205533, 205534, 205535, 205536, 205537, 205538, 205539) c6( ) c7(v, cd); #c1(ZNF608) c2(XP_005272096) c3(zinc finger protein 608 isoform X2) c4(283674) c5( ) c6( ) c7(v, cd); #c1(ZNF608) c2(XP_011541822) c3(zinc finger protein 608 isoform X3) c4(340392) c5( ) c6( ) c7(v, cd); #c1(ZNF608) c2(XP_011541823) c3(zinc finger protein 608 isoform X4) c4( ) c5(340393) c6( ) c7(v, cd); #c1(ZNF615) c2(XP_011525128) c3(zinc finger protein 615 isoform X1) c4(319542, 319543, 319544) c5(319545, 319546, 319547, 319548, 319549, 319550, 319551, 319552, 319553, 319554, 319555, 319556, 319557, 319558, 319559, 319560, 319561, 319562) c6( ) c7(an); #c1(ZNF615) c2(XP_011525129) c3(zinc finger protein 615 isoform X4) c4(319563) c5(319564, 319565, 319566, 319567, 319568, 319569) c6( ) c7(an); #c1(ZNF615) c2(XP_011525130) c3(zinc finger protein 615 isoform X2) c4(319570) c5(319571, 319572, 319573, 319574, 319575, 319576) c6( ) c7(an); #c1(ZNF618) c2(NP_588615) c3(zinc finger protein 618) c4(234825) c5(234826, 234827, 234828, 234829, 234830, 234831) c6( ) c7(Na, Nc, oe, dy, ac); #c1(ZNF618) c2(XP_011516505) c3(zinc finger protein 618 isoform X9) c4(309901, 309902) c5(309903, 309904, 309905, 309906, 309907, 309908, 309909, 309910, 309911, 309912, 309913, 309914) c6( ) c7(Na, Nc, oe, dy, ac); #c1(ZNF627) c2(NP_660338) c3(zinc finger protein 627 isoform 1) c4(241000) c5(241001, 241002, 241003, 241004, 241005, 241006) c6( ) c7(cH, aw); #c1(ZNF629) c2(NP_001073886) c3(zinc finger protein 629) c4(36309) c5(36310, 36311, 36312, 36313, 36314, 36315) c6( ) c7(T, dA, WT, ci, PJ, eW, hX, h, BZ, K, cOR, fb, avQ, ak, anR, d, CT, Io, as, pb, ck, Qi, iO, vW, c, iT, eB, U, bC, bt, xg, B); #c1(ZNF639) c2(NP_001290355) c3(zinc finger protein 639) c4(115241, 115242, 115243, 115244, 115245) c5(115246, 115247, 115248, 115249, 115250, 115251, 115252, 115253, 115254, 115255, 115256, 115257, 115258, 115259, 115260, 115261, 115262, 115263, 115264, 115265, 115266, 115267, 115268, 115269, 115270, 115271, 115272, 115273, 115274, 115275, 115276, 115277, 115278, 115279, 115280, 115281, 115282, 115283, 115284) c6( ) c7(h, oe, ff, en); #c1(ZNF644) c2(XP_011540563) c3(zinc finger protein 644 isoform X1) c4(339050) c5( ) c6( ) c7(cVL, asg); #c1(ZNF645) c2(NP_689790) c3(E3 ubiquitin-protein ligase ZNF645) c4(243976) c5(243977, 243978, 243979, 243980, 243981, 243982, 243983) c6( ) c7(cnT, T, os, dt, fM, hI, yS, al, jh, bB, ME, aj, v, BE, ci, C, nA, oZ, aY, yU, fr, q, J, ad, hX, eA, eW, oT, bgk, aE, Ig, py, rw, aT, h, yT, yZ, bI, K, jj, bU, an, pq, ae, cnS, pi, bF, ak, JI, aW, Y, Ls, cr, bTw, nf, aiT, dq, Io, r, aq, Tp, iR, bw, bz, bN, hq, ck, dS, es, bAn, alC, jV, eM, iA, bE, iT, agI, U, aS, art, y, bt, kS, B, VB); #c1(ZNF646) c2(NP_055514) c3(zinc finger protein 646) c4(181637, 181638, 181639) c5(181640, 181641, 181642, 181643, 181644, 181645, 181646, 181647, 181648, 181649, 181650, 181651) c6( ) c7(an); #c1(ZNF646) c2(XP_005255769) c3(zinc finger protein 646 isoform X2) c4(273850) c5(273851, 273852, 273853, 273854, 273855, 273856, 273857, 273858, 273859, 273860, 273861, 273862, 273863, 273864) c6( ) c7(an); #c1(ZNF652) c2(NP_001138837) c3(zinc finger protein 652) c4(57912) c5(57913, 57914, 57915, 57916, 57917, 57918, 57919, 57920, 57921, 57922) c6( ) c7(T, aW, oe, cz, aT, ad); #c1(ZNF652) c2(XP_005257223) c3(zinc finger protein 652 isoform X1) c4(274806) c5(274807, 274808, 274809, 274810, 274811, 274812) c6( ) c7(T, aW, oe, cz, aT, ad); #c1(ZNF654) c2(NP_060763) c3(zinc finger protein 654) c4(197671) c5(197672, 197673, 197674, 197675, 197676, 197677) c6( ) c7(T, dA, v, ci, eA, q, hd, aT, d, aW, Y, oV, ff, r, aq, en, bu, t, bz, iP, eM, nB, eD, B); #c1(ZNF664) c2(NP_689650) c3(zinc finger protein 664) c4(243440, 243441) c5(243442, 243443, 243444, 243445, 243446, 243447, 243448, 243449, 243450, 243451, 243452, 243453, 243454, 243455, 243456, 243457, 243458, 243459, 243460, 243461, 243462, 243463, 243464, 243465) c6( ) c7(aw); #c1(ZNF667) c2(NP_071386) c3(zinc finger protein 667) c4(211313, 211314, 211315, 211316) c5(211317, 211318, 211319, 211320, 211321, 211322, 211323, 211324, 211325, 211326, 211327, 211328, 211329, 211330, 211331, 211332) c6( ) c7(oe); #c1(ZNF667) c2(XP_011525513) c3(zinc finger protein 667 isoform X2) c4( ) c5(319929, 319930, 319931, 319932, 319933, 319934, 319935, 319936, 319937, 319938, 319939, 319940) c6( ) c7(oe); #c1(ZNF668) c2(NP_078982) c3(zinc finger protein 668 isoform a) c4(216396, 216397) c5(216398, 216399, 216400, 216401, 216402, 216403, 216404, 216405, 216406, 216407, 216408, 216409, 216410, 216411, 216412, 216413, 216414, 216415, 216416, 216417, 216418, 216419, 216420, 216421, 216422, 216423) c6( ) c7(aW, XV, aT); #c1(ZNF668) c2(XP_011544251) c3(zinc finger protein 668 isoform X1) c4(343400, 343401, 343402, 343403) c5(343404, 343405, 343406, 343407, 343408, 343409, 343410, 343411, 343412, 343413, 343414, 343415, 343416, 343417, 343418, 343419, 343420, 343421, 343422, 343423, 343424, 343425, 343426, 343427, 343428, 343429, 343430, 343431) c6( ) c7(aW, XV, aT); #c1(ZNF674) c2(NP_001139763) c3(zinc finger protein 674 isoform 2) c4(59908) c5(59909, 59910, 59911, 59912, 59913, 59914) c6( ) c7(nf, nx, nA); #c1(ZNF674) c2(NP_001177346) c3(zinc finger protein 674 isoform 3) c4( ) c5(72694) c6( ) c7(nf, nx, nA); #c1(ZNF674) c2(XP_011542244) c3(zinc finger protein 674 isoform X1) c4(340755) c5(340756, 340757, 340758, 340759, 340760, 340761, 340762, 340763) c6( ) c7(nf, nx, nA); #c1(ZNF674) c2(XP_011542245) c3(zinc finger protein 674 isoform X2) c4( ) c5(340764, 340765) c6( ) c7(nf, nx, nA); #c1(ZNF676) c2(XP_011526034) c3(zinc finger protein 676 isoform X1) c4( ) c5(320372) c6( ) c7(hz); #c1(ZNF676) c2(XP_011526042) c3(zinc finger protein 676 isoform X5) c4(320373) c5(320374, 320375, 320376, 320377, 320378) c6( ) c7(hz); #c1(ZNF678) c2(NP_848644) c3(zinc finger protein 678) c4(254048, 254049, 254050) c5(254051, 254052, 254053, 254054, 254055, 254056, 254057, 254058, 254059, 254060, 254061, 254062, 254063, 254064, 254065, 254066, 254067, 254068) c6( ) c7(xb); #c1(ZNF683) c2(XP_011539498) c3(zinc finger protein 683 isoform X2) c4(337698) c5(337699) c6( ) c7(NI, ae, ad); #c1(ZNF687) c2(NP_001291693) c3(zinc finger protein 687) c4(116342) c5(116343, 116344, 116345, 116346, 116347, 116348, 116349, 116350, 116351, 116352, 116353, 116354, 116355, 116356, 116357, 116358, 116359, 116360, 116361) c6( ) c7(bt); #c1(ZNF687) c2(XP_005245423) c3(zinc finger protein 687 isoform X2) c4(266565, 266566) c5(266567, 266568, 266569) c6( ) c7(bt); #c1(ZNF689) c2(NP_612456) c3(zinc finger protein 689) c4(236535, 236536) c5(236537, 236538, 236539, 236540, 236541, 236542, 236543, 236544, 236545, 236546, 236547, 236548, 236549) c6( ) c7(iR, aq, B, eZ); #c1(ZNF7) c2(NP_001269725) c3(zinc finger protein 7 isoform 3) c4(102720) c5(102721, 102722, 102723, 102724, 102725, 102726) c6( ) c7(bL, pk); #c1(ZNF7) c2(XP_006716719) c3(zinc finger protein 7 isoform X2) c4( ) c5(290440, 290441, 290442, 290443, 290444) c6( ) c7(bL, pk); #c1(ZNF7) c2(XP_011515593) c3(zinc finger protein 7 isoform X4) c4( ) c5(308421) c6( ) c7(bL, pk); #c1(ZNF7) c2(XP_011515594) c3(zinc finger protein 7 isoform X3) c4(308422) c5(308423, 308424, 308425, 308426, 308427, 308428) c6( ) c7(bL, pk); #c1(ZNF7) c2(XP_011515596) c3(zinc finger protein 7 isoform X1) c4(308429, 308430) c5(308431, 308432, 308433, 308434, 308435, 308436, 308437, 308438, 308439, 308440, 308441, 308442) c6( ) c7(bL, pk); #c1(ZNF703) c2(NP_079345) c3(zinc finger protein 703) c4(217769, 217770) c5(217771, 217772, 217773, 217774, 217775, 217776, 217777, 217778, 217779, 217780, 217781, 217782, 217783) c6( ) c7(aW, T, aT); #c1(ZNF704) c2(NP_001028895) c3(zinc finger protein 704) c4( ) c5(30697, 30698, 30699, 30700, 30701) c6( ) c7(iU, bt, c); #c1(ZNF704) c2(XP_005251336) c3(zinc finger protein 704 isoform X1) c4(270882) c5(270883, 270884) c6( ) c7(iU, bt, c); #c1(ZNF704) c2(XP_006716527) c3(zinc finger protein 704 isoform X2) c4(290371) c5(290372, 290373, 290374, 290375, 290376) c6( ) c7(iU, bt, c); #c1(ZNF706) c2(NP_001254638) c3(zinc finger protein 706) c4(94743, 94744) c5(94745, 94746, 94747, 94748, 94749, 94750, 94751, 94752, 94753, 94754, 94755, 94756, 94757, 94758, 94759, 94760, 94761, 94762, 94763, 94764, 94765, 94766, 94767, 94768, 94769, 94770, 94771, 94772, 94773, 94774, 94775) c6( ) c7(cd); #c1(ZNF711) c2(NP_068838) c3(zinc finger protein 711) c4(210861) c5(210862, 210863, 210864, 210865, 210866, 210867, 210868, 210869, 210870, 210871, 210872) c6( ) c7(nf, cVM); #c1(ZNF711) c2(XP_005262245) c3(zinc finger protein 711 isoform X3) c4(277793, 277794) c5(277795, 277796, 277797, 277798, 277799, 277800, 277801, 277802, 277803, 277804, 277805, 277806) c6( ) c7(nf, cVM); #c1(ZNF716) c2(NP_001152751) c3(zinc finger protein 716) c4(60129, 60130) c5(60131, 60132, 60133, 60134, 60135, 60136, 60137, 60138, 60139, 60140, 60141, 60142) c6( ) c7(fq, Ea); #c1(ZNF717) c2(NP_001277137) c3(zinc finger protein 111 isoform a) c4( ) c5(109114, 109115, 109116, 109117, 109118) c6( ) c7(aur, Kc, oe, dY, aj); #c1(ZNF717) c2(XP_006712975) c3(zinc finger protein 111 isoform X5) c4(286929) c5(286930, 286931, 286932, 286933, 286934, 286935) c6( ) c7(aur, Kc, oe, dY, aj); #c1(ZNF717) c2(XP_011531546) c3(zinc finger protein 717 isoform X2) c4(327671) c5( ) c6( ) c7(aur, Kc, oe, dY, aj); #c1(ZNF717) c2(XP_011531547) c3(zinc finger protein 717 isoform X3) c4( ) c5(327672) c6( ) c7(aur, Kc, oe, dY, aj); #c1(ZNF717) c2(XP_011531551) c3(zinc finger protein 717 isoform X8) c4( ) c5(327673) c6( ) c7(aur, Kc, oe, dY, aj); #c1(ZNF74) c2(NP_001243453) c3(zinc finger protein 74 isoform a) c4(90826, 90827, 90828) c5(90829, 90830, 90831, 90832, 90833, 90834, 90835, 90836, 90837, 90838, 90839, 90840, 90841, 90842, 90843, 90844, 90845, 90846, 90847, 90848, 90849, 90850, 90851) c6( ) c7(RX); #c1(ZNF746) c2(NP_001156946) c3(zinc finger protein 746 isoform 1) c4(62040) c5(62041, 62042, 62043, 62044, 62045, 62046) c6( ) c7(K, c); #c1(ZNF746) c2(NP_689770) c3(zinc finger protein 746 isoform 2) c4(243916) c5(243917, 243918, 243919, 243920, 243921, 243922) c6( ) c7(K, c); #c1(ZNF750) c2(NP_078978) c3(zinc finger protein 750) c4(216374, 216375) c5(216376, 216377, 216378, 216379, 216380, 216381, 216382, 216383, 216384, 216385, 216386, 216387) c6( ) c7(aOR, cVN, azP, cr); #c1(ZNF76) c2(NP_001278961) c3(zinc finger protein 76 isoform 2) c4(111117) c5(111118, 111119, 111120, 111121, 111122, 111123, 111124, 111125, 111126, 111127, 111128, 111129, 111130, 111131, 111132, 111133, 111134, 111135, 111136, 111137, 111138, 111139, 111140, 111141) c6( ) c7(oe); #c1(ZNF76) c2(NP_003418) c3(zinc finger protein 76 isoform 1) c4(138296, 138297, 138298, 138299, 138300) c5(138301, 138302, 138303, 138304, 138305, 138306, 138307, 138308, 138309, 138310, 138311, 138312, 138313) c6( ) c7(oe); #c1(ZNF76) c2(XP_011513157) c3(zinc finger protein 76 isoform X7) c4( ) c5(305013) c6( ) c7(oe); #c1(ZNF76) c2(XP_011513158) c3(zinc finger protein 76 isoform X8) c4( ) c5(305014) c6( ) c7(oe); #c1(ZNF763) c2(NP_001012771) c3(zinc finger protein 763) c4(25296, 25297, 25298, 25299) c5(25300, 25301, 25302, 25303, 25304, 25305, 25306, 25307, 25308, 25309, 25310, 25311, 25312, 25313, 25314, 25315, 25316, 25317, 25318, 25319, 25320, 25321, 25322, 25323) c6( ) c7(T, dA, WT, ci, PJ, eW, hX, h, BZ, K, cOR, fb, avQ, ak, anR, d, CT, Io, as, pb, ck, Qi, iO, vW, c, iT, eB, U, bC, bt, xg, B); #c1(ZNF764) c2(NP_001166150) c3(zinc finger protein 764 isoform 2) c4(68346) c5(68347, 68348, 68349, 68350, 68351, 68352) c6( ) c7(pv); #c1(ZNF764) c2(NP_219363) c3(zinc finger protein 764 isoform 1) c4(228566) c5(228567, 228568, 228569, 228570, 228571, 228572, 228573) c6( ) c7(pv); #c1(ZNF765) c2(XP_006723529) c3(zinc finger protein 765 isoform X1) c4(295234) c5(295235, 295236, 295237, 295238, 295239, 295240, 295241) c6( ) c7(fr); #c1(ZNF765) c2(XP_006723530) c3(zinc finger protein 765 isoform X2) c4(295242) c5(295243, 295244, 295245, 295246, 295247) c6( ) c7(fr); #c1(ZNF774) c2(NP_001004309) c3(zinc finger protein 774) c4(20525, 20526) c5(20527, 20528, 20529, 20530, 20531, 20532, 20533, 20534, 20535, 20536, 20537, 20538) c6( ) c7(y); #c1(ZNF776) c2(NP_775903) c3(zinc finger protein 776) c4(250647, 250648, 250649) c5(250650, 250651, 250652, 250653, 250654, 250655) c6( ) c7(fq); #c1(ZNF778) c2(NP_001188336) c3(zinc finger protein 778 isoform 1) c4( ) c5(79085, 79086, 79087, 79088, 79089) c6( ) c7(bN); #c1(ZNF778) c2(NP_872337) c3(zinc finger protein 778 isoform 2) c4(256138) c5(256139, 256140, 256141, 256142, 256143, 256144) c6( ) c7(bN); #c1(ZNF778) c2(XP_011521241) c3(zinc finger protein 778 isoform X2) c4(316153) c5(316154) c6( ) c7(bN); #c1(ZNF784) c2(NP_976308) c3(zinc finger protein 784) c4(263095) c5(263096, 263097, 263098, 263099, 263100, 263101, 263102) c6( ) c7(aw); #c1(ZNF79) c2(NP_001273625) c3(zinc finger protein 79 isoform b) c4( ) c5(105495, 105496, 105497, 105498, 105499) c6( ) c7(ac); #c1(ZNF79) c2(NP_009066) c3(zinc finger protein 79 isoform a) c4(170551, 170552) c5(170553, 170554, 170555, 170556, 170557, 170558, 170559, 170560) c6( ) c7(ac); #c1(ZNF80) c2(NP_009067) c3(zinc finger protein 80) c4(170561) c5(170562, 170563, 170564, 170565, 170566, 170567, 170568, 170569, 170570, 170571, 170572) c6( ) c7(Z, bS, ct); #c1(ZNF800) c2(XP_005250238) c3(zinc finger protein 800 isoform X1) c4( ) c5(270221, 270222, 270223, 270224, 270225, 270226, 270227, 270228, 270229, 270230, 270231, 270232, 270233, 270234, 270235, 270236, 270237, 270238, 270239, 270240, 270241, 270242, 270243, 270244, 270245, 270246, 270247, 270248, 270249, 270250, 270251, 270252) c6( ) c7(bL); #c1(ZNF800) c2(XP_011514161) c3(zinc finger protein 800 isoform X2) c4(306739, 306740, 306741, 306742) c5( ) c6( ) c7(bL); #c1(ZNF804A) c2(NP_919226) c3(zinc finger protein 804A) c4(258261) c5(258262, 258263, 258264, 258265, 258266, 258267) c6( ) c7(mU, cA, rz, mW, mZ, ha, mS, gI, mY, he, bK, uJ, yA, fr, mV, lB, mT, bN, mX); #c1(ZNF8048) c2(NP_857597) c3(zinc finger protein 8048) c4(255276) c5(255277, 255278, 255279, 255280, 255281, 255282) c6( ) c7(gT, fq, ac, iX); #c1(ZNF81) c2(XP_011542204) c3(zinc finger protein 81 isoform X1) c4(340683, 340684, 340685, 340686) c5(340687, 340688, 340689, 340690, 340691, 340692, 340693, 340694, 340695, 340696, 340697, 340698, 340699, 340700, 340701, 340702, 340703, 340704, 340705, 340706, 340707, 340708, 340709, 340710, 340711, 340712, 340713, 340714, 340715, 340716, 340717, 340718) c6( ) c7(nf, cVO, iJ, nA); #c1(ZNF812) c2(XP_011526544) c3(putative zinc finger protein 812 isoform X1) c4( ) c5(320840) c6( ) c7(bK); #c1(ZNF812) c2(XP_011526545) c3(putative zinc finger protein 812 isoform X2) c4(320841) c5(320842, 320843, 320844, 320845, 320846, 320847) c6( ) c7(bK); #c1(ZNF813) c2(NP_001004301) c3(zinc finger protein 813) c4(20518) c5(20519, 20520, 20521, 20522, 20523, 20524) c6( ) c7(j); #c1(ZNF816) c2(NP_001189386) c3(zinc finger protein 816) c4(79319, 79320) c5(79321, 79322, 79323, 79324, 79325, 79326, 79327, 79328, 79329, 79330, 79331, 79332, 79333, 79334, 79335, 79336) c6( ) c7(cr, Jr); #c1(ZNF823) c2(NP_001073962) c3(zinc finger protein 823 isoform 1) c4(36707, 36708, 36709) c5(36710, 36711, 36712, 36713, 36714, 36715, 36716) c6( ) c7(d, aW, oe, dh, aT, aj, v, ei, y, J, hX); #c1(ZNF823) c2(NP_001284539) c3(zinc finger protein 823 isoform 3) c4( ) c5(112002, 112003, 112004, 112005, 112006) c6( ) c7(d, aW, oe, dh, aT, aj, v, ei, y, J, hX); #c1(ZNF823) c2(NP_059977) c3(zinc finger protein 823 isoform 2) c4( ) c5(193430, 193431, 193432, 193433, 193434, 193435) c6( ) c7(d, aW, oe, dh, aT, aj, v, ei, y, J, hX); #c1(ZNF827) c2(NP_849157) c3(zinc finger protein 827) c4(254320) c5(254321, 254322, 254323, 254324, 254325) c6( ) c7(oe); #c1(ZNF827) c2(XP_011529935) c3(zinc finger protein 827 isoform X2) c4( ) c5(325739) c6( ) c7(oe); #c1(ZNF827) c2(XP_011529936) c3(zinc finger protein 827 isoform X3) c4( ) c5(325740, 325741, 325742) c6( ) c7(oe); #c1(ZNF829) c2(NP_001165450) c3(zinc finger protein 829 isoform 1) c4(67749) c5(67750, 67751) c6( ) c7(q, r); #c1(ZNF829) c2(XP_011525235) c3(zinc finger protein 829 isoform X1) c4( ) c5(319704, 319705, 319706, 319707, 319708, 319709, 319710, 319711) c6( ) c7(q, r); #c1(ZNF831) c2(NP_848552) c3(zinc finger protein 831) c4(253834) c5(253835, 253836, 253837, 253838, 253839, 253840, 253841) c6( ) c7(Y, aC, ac, Be); #c1(ZNF91) c2(NP_001287880) c3(zinc finger protein 91 isoform 2) c4(113111) c5(113112, 113113, 113114, 113115, 113116, 113117) c6( ) c7(wu, wm); #c1(ZNF91) c2(NP_003421) c3(zinc finger protein 91 isoform 1) c4(138314) c5(138315, 138316, 138317, 138318, 138319, 138320, 138321) c6( ) c7(wu, wm); #c1(ZNF91) c2(XP_006722943) c3(zinc finger protein 91 isoform X2) c4( ) c5(294956) c6( ) c7(wu, wm); #c1(ZNF92) c2(NP_001274461) c3(zinc finger protein 92 isoform 3) c4(106555) c5(106556, 106557, 106558, 106559, 106560, 106561, 106562) c6( ) c7(ae, ad); #c1(ZNF92) c2(NP_009070) c3(zinc finger protein 92 isoform 1) c4( ) c5(170573, 170574, 170575, 170576, 170577) c6( ) c7(ae, ad); #c1(ZNF92) c2(NP_689839) c3(zinc finger protein 92 isoform 2) c4(244122, 244123) c5(244124, 244125, 244126, 244127, 244128, 244129, 244130) c6( ) c7(ae, ad); #c1(ZNF93) c2(NP_112495) c3(zinc finger protein 93) c4(221165, 221166) c5(221167, 221168, 221169, 221170, 221171, 221172, 221173, 221174, 221175, 221176, 221177, 221178, 221179) c6( ) c7(T, dx); #c1(ZNF93) c2(XP_011526641) c3(zinc finger protein 93 isoform X1) c4(320942) c5(320943, 320944, 320945, 320946, 320947, 320948) c6( ) c7(T, dx); #c1(ZNF98) c2(NP_001092096) c3(zinc finger protein 98) c4(39331, 39332) c5(39333, 39334, 39335, 39336, 39337, 39338, 39339) c6( ) c7(ab, aw); #c1(ZNFX1) c2(NP_066363) c3(NFX1-type zinc finger-containing protein 1) c4(207225, 207226, 207227, 207228, 207229, 207230) c5(207231, 207232, 207233, 207234, 207235, 207236, 207237, 207238, 207239, 207240, 207241, 207242, 207243, 207244, 207245, 207246, 207247, 207248, 207249, 207250, 207251, 207252, 207253, 207254, 207255, 207256, 207257, 207258, 207259, 207260, 207261, 207262, 207263, 207264) c6( ) c7(ad); #c1(ZNFX1) c2(XP_011527226) c3(NFX1-type zinc finger-containing protein 1 isoform X2) c4( ) c5(321773, 321774, 321775, 321776, 321777, 321778) c6( ) c7(ad); #c1(ZNHIT2) c2(NP_055020) c3(zinc finger HIT domain-containing protein 2) c4(178327) c5(178328, 178329, 178330, 178331, 178332, 178333) c6( ) c7(nJ, Y); #c1(ZNHIT3) c2(NP_004764) c3(zinc finger HIT domain-containing protein 3 isoform 1) c4(149401) c5(149402, 149403, 149404, 149405, 149406, 149407) c6( ) c7(go, ey, k); #c1(ZNRD1) c2(NP_001265715) c3(DNA-directed RNA polymerase I subunit RPA12) c4(99190) c5(99191, 99192, 99193, 99194, 99195, 99196, 99197, 99198, 99199, 99200, 99201, 99202, 99203, 99204, 99205, 99206, 99207, 99208, 99209, 99210, 99211, 99212, 99213, 99214, 99215, 99216, 99217, 99218, 99219, 99220, 99221, 99222, 99223, 99224, 99225, 99226, 99227, 99228, 99229, 99230, 99231, 99232, 99233, 99234, 99235, 99236, 99237, 99238, 99239, 99240, 99241, 99242, 99243, 99244, 99245, 99246, 99247, 99248, 99249, 99250, 99251, 99252, 99253, 99254, 99255, 99256, 99257, 99258, 99259, 99260, 99261, 99262, 99263, 99264, 99265, 99266, 99267, 99268, 99269, 99270, 99271, 99272, 99273, 99274, 99275, 99276, 99277, 99278, 99279, 99280, 99281, 99282, 99283, 99284, 99285, 99286, 99287, 99288, 99289, 99290, 99291, 99292, 99293, 99294, 99295, 99296, 99297, 99298, 99299, 99300) c6( ) c7(ck, bM, iQ, aDy, aD, ht, qh, eZ, aA, h, aF, hu, g, Sm); #c1(ZNRF3) c2(NP_001193927) c3(E3 ubiquitin-protein ligase ZNRF3 isoform 1 precursor) c4(83195, 83196) c5(83197, 83198, 83199, 83200, 83201, 83202, 83203, 83204, 83205, 83206, 83207, 83208, 83209, 83210, 83211, 83212, 83213, 83214, 83215, 83216, 83217, 83218, 83219, 83220, 83221) c6( ) c7(iv, T, aC); #c1(ZNRF3) c2(XP_011528740) c3(E3 ubiquitin-protein ligase ZNRF3 isoform X3) c4(324052) c5( ) c6( ) c7(iv, T, aC); #c1(ZNRF3) c2(XP_011528741) c3(E3 ubiquitin-protein ligase ZNRF3 isoform X4) c4( ) c5(324053) c6( ) c7(iv, T, aC); #c1(ZP1) c2(NP_997224) c3(zona pellucida sperm- binding protein 1 precursor) c4(265203) c5(265204, 265205, 265206, 265207, 265208, 265209, 265210, 265211, 265212) c6( ) c7(qq); #c1(ZP1) c2(XP_011543155) c3(zona pellucida sperm-binding protein 1 isoform X1) c4(341983) c5(341984, 341985, 341986, 341987, 341988) c6( ) c7(qq); #c1(ZP4) c2(NP_067009) c3(zona pellucida sperm-binding protein 4 preproprotein) c4(208302) c5(208303, 208304, 208305, 208306, 208307, 208308, 208309) c6( ) c7(V, pZ, cz); #c1(ZPBP2) c2(NP_942141) c3(zona pellucida-binding protein 2 isoform 1 precursor) c4(260545) c5(260546, 260547, 260548, 260549, 260550, 260551) c6( ) c7(bM, nH, A, eZ, iV, y); #c1(ZPBP2) c2(NP_955353) c3(zona pellucida-binding protein 2 isoform 2 precursor) c4(261531) c5(261532, 261533, 261534, 261535, 261536, 261537) c6( ) c7(bM, nH, A, eZ, iV, y); #c1(ZPLD1) c2(NP_778226) c3(zona pellucida-like domain-containing protein 1 precursor) c4(251419) c5(251420, 251421, 251422, 251423, 251424, 251425, 251426, 251427) c6( ) c7(bL, ac, aw, v, j, cd); #c1(ZPLD1) c2(XP_011510713) c3(zona pellucida-like domain-containing protein 1 isoform X1) c4(301148) c5( ) c6( ) c7(bL, ac, aw, v, j, cd); #c1(ZPLD1) c2(XP_011510714) c3(zona pellucida-like domain-containing protein 1 isoform X2) c4( ) c5(301149, 301150, 301151, 301152, 301153, 301154, 301155, 301156) c6( ) c7(bL, ac, aw, v, j, cd); #c1(ZPR1) c2(NP_003895) c3(zinc finger protein ZPR1) c4(141932) c5(141933, 141934, 141935, 141936, 141937, 141938, 141939) c6( ) c7(cO, om, e, kf, j, ae, ad); #c1(ZRANB3) c2(NP_001273497) c3(DNA annealing helicase and endonuclease ZRANB3 isoform 2) c4(105059, 105060, 105061, 105062, 105063, 105064) c5(105065, 105066, 105067, 105068, 105069, 105070, 105071, 105072, 105073, 105074, 105075, 105076, 105077, 105078, 105079, 105080, 105081, 105082, 105083, 105084, 105085, 105086, 105087, 105088, 105089, 105090, 105091, 105092, 105093, 105094) c6( ) c7(cm, K, eK); #c1(ZRANB3) c2(NP_115519) c3(DNA annealing helicase and endonuclease ZRANB3 isoform 1) c4(223056) c5(223057, 223058, 223059, 223060, 223061, 223062, 223063) c6( ) c7(cm, K, eK); #c1(ZRANB3) c2(XP_011510269) c3(DNA annealing helicase and endonuclease ZRANB3 isoform X4) c4( ) c5(300863, 300864, 300865, 300866, 300867) c6( ) c7(cm, K, eK); #c1(ZRSR2) c2(NP_005080) c3(U2 small nuclear ribonucleoprotein auxiliary factor 35 kDa subunit-related protein 2) c4(152721, 152722) c5(152723) c6( ) c7(gV, T, bs, bw, bt, af, br); #c1(ZRSR2) c2(XP_006724582) c3(U2 small nuclear ribonucleoprotein auxiliary factor 35 kDa subunit-related protein 2 isoform X2) c4(296094) c5( ) c6( ) c7(gV, T, bs, bw, bt, af, br); #c1(ZRSR2) c2(XP_011543891) c3(U2 small nuclear ribonucleoprotein auxiliary factor 35 kDa subunit-related protein 2 isoform X1) c4( ) c5(343063, 343064, 343065, 343066, 343067, 343068) c6( ) c7(gV, T, bs, bw, bt, af, br); #c1(ZRSR2) c2(XP_011543892) c3(U2 small nuclear ribonucleoprotein auxiliary factor 35 kDa subunit-related protein 2 isoform X3) c4( ) c5(343069, 343070, 343071, 343072, 343073, 343074, 343075) c6( ) c7(gV, T, bs, bw, bt, af, br); #c1(ZSCAN18) c2(NP_001139014) c3(zinc finger and SCAN domain-containing protein 18 isoform 1) c4(58598) c5(58599, 58600, 58601, 58602, 58603, 58604, 58605, 58606, 58607, 58608, 58609) c6( ) c7(fr, jz, q, gX, r); #c1(ZSCAN18) c2(NP_001139016) c3(zinc finger and SCAN domain-containing protein 18 isoform 2) c4(58610) c5(58611, 58612, 58613, 58614, 58615, 58616) c6( ) c7(fr, jz, q, gX, r); #c1(ZSCAN18) c2(XP_005259231) c3(zinc finger and SCAN domain-containing protein 18 isoform X1) c4(276009) c5(276010, 276011, 276012, 276013, 276014) c6( ) c7(fr, jz, q, gX, r); #c1(ZSCAN22) c2(NP_862829) c3(zinc finger and SCAN domain-containing protein 22) c4(255804) c5(255805, 255806, 255807, 255808, 255809, 255810) c6( ) c7(aq); #c1(ZSCAN26) c2(NP_001104509) c3(zinc finger and SCAN domain-containing protein 26 isoform b) c4( ) c5(42152) c6( ) c7(eZ); #c1(ZSCAN31) c2(NP_001230173) c3(zinc finger and SCAN domain-containing protein 31 isoform 2) c4( ) c5(86041, 86042, 86043, 86044, 86045) c6( ) c7(fq, eZ); #c1(ZSCAN31) c2(XP_011513115) c3(zinc finger and SCAN domain-containing protein 31 isoform X1) c4(304833, 304834, 304835, 304836, 304837, 304838, 304839, 304840, 304841, 304842) c5(304843, 304844, 304845, 304846, 304847, 304848, 304849, 304850, 304851, 304852, 304853, 304854, 304855, 304856, 304857, 304858, 304859, 304860, 304861, 304862, 304863, 304864, 304865, 304866, 304867, 304868, 304869, 304870, 304871, 304872, 304873, 304874, 304875, 304876, 304877, 304878, 304879, 304880, 304881, 304882, 304883, 304884, 304885, 304886, 304887, 304888, 304889, 304890, 304891, 304892, 304893, 304894, 304895, 304896, 304897, 304898, 304899, 304900, 304801, 304902, 304903, 304904, 304905, 304906, 304907, 304908) c6( ) c7(fq, eZ); #c1(ZSCAN32) c2(NP_001271458) c3(zinc finger and SCAN domain-containing protein 32 isoform c) c4( ) c5(103980, 103981, 103982, 103983, 103984) c6( ) c7(oe); #c1(ZSCAN32) c2(XP_005255461) c3(zinc finger and SCAN domain-containing protein 32 isoform X5) c4( ) c5(273672) c6( ) c7(oe); #c1(ZSCAN32) c2(XP_011520857) c3(zinc finger and SCAN domain-containing protein 32 isoform X1) c4(315839, 315840, 315841, 315842) c5(315843, 315844, 315845, 315846, 315847, 315848, 315849, 315850, 315851, 315852, 315853, 315854, 315855, 315856, 315857, 315858, 315859, 315860, 315861) c6( ) c7(oe); #c1(ZSCAN32) c2(XP_011520859) c3(zinc finger and SCAN domain-containing protein 32 isoform X2) c4(315862) c5(315863, 315864, 315865, 315866, 315867, 315868, 315869, 315870, 315871, 315872) c6( ) c7(oe); #c1(ZSCAN9) c2(NP_001186408) c3(zinc finger and SCAN domain-containing protein 9 isoform 1) c4( ) c5(77625, 77626, 77627, 77628, 77629) c6( ) c7(fq, eZ); #c1(ZSCAN9) c2(NP_006290) c3(zinc finger and SCAN domain-containing protein 9 isoform 2) c4(163718) c5(163719, 163720, 163721, 163722, 163723, 163724, 163725, 163726, 163727, 163728, 163729, 163730, 163731) c6( ) c7(fq, eZ); #c1(ZSCAN9) c2(XP_011513178) c3(zinc finger and SCAN domain-containing protein 9 isoform X2) c4(305108) c5(305109) c6( ) c7(fq, eZ); #c1(ZSCAN9) c2(XP_011513180) c3(zinc finger and SCAN domain-containing protein 9 isoform X4) c4(305110) c5(305111, 305112, 305113, 305114) c6( ) c7(fq, eZ); #c1(ZSWIM2) c2(NP_872327) c3(E3 ubiquitin-protein ligase ZSWIM2) c4(256125) c5(256126, 256127, 256128, 256129, 256130, 256131) c6( ) c7(ac); #c1(ZSWIM6) c2(NP_065979) c3(zinc finger SWIM domain-containing protein 6) c4(206591) c5(206592, 206593, 206594, 206595, 206596, 206597) c6( ) c7(cVP, atb); #c1(ZW10) c2(NP_004715) c3(centromere/kinetochore protein zw10 homolog) c4(149022, 149023) c5(149024, 149025, 149026, 149027, 149028, 149029, 149030, 148031, 149032, 149033, 149034, 149035) c6( ) c7(eF); #c1(ZWILCH) c2(NP_001274752) c3(protein zwilch homolog isoform 2) c4( ) c5(106765, 106766, 106767, 106768, 106769, 106770, 106771, 106772) c6( ) c7(aW, aT); #c1(ZWILCH) c2(NP_060445) c3(protein zwilch homolog isoform 1) c4(195976, 195977) c5(195978, 195979, 195980, 195981, 195982, 195983, 195984, 195985) c6( ) c7(aW, aT); #c1(ZWINT) c2(NP_001005413) c3(ZW10 interactor isoform b) c4(21654) c5(21655, 21656, 21657, 21658, 21659, 21660, 21661, 21662, 21663, 21664, 21665, 21666) c6( ) c7(aW, aT, ey, an, ae, af, ad); #c1(ZWINT) c2(NP_008988) c3(ZW10 interactor isoform a) c4(170092, 170093, 170094) c5(170095, 170096, 170097, 170098, 170099, 170100, 170101, 170102, 170103, 170104, 170105, 170106, 170107, 170108, 170109, 170110) c6( ) c7(aW, aT, ey, an, ae, af, ad); #c1(ZYX) c2(NP_001010972) c3(zyxin) c4(24360, 24361, 24362) c5(24363, 24364, 24365, 24366, 24367, 24368, 24369, 24370, 24371, 24372, 24373, 24374, 24375, 24376, 24377, 24378, 24379, 24380) c6( ) c7(ck, T, bE, Y, ff, hj, cR, bB, Gn, K, en, rA, bz, B, dx); #c1(ZYX) c2(XP_011514869) c3(zyxin isoform X1) c4( ) c5(307617) c6( ) c7(ck, T, bE, Y, ff, hj, cR, bB, Gn, K, en, rA, bz, B, dx); #c1(ZYX) c2(XP_011514871) c3(zyxin isoform X3) c4(307618, 307619) c5(307620, 307621, 307622, 307623, 307624, 307625, 307626, 307627, 307628, 307629, 307630, 307631) c6( ) c7(ck, T, bE, Y, ff, hj, cR, bB, Gn, K, en, rA, bz, B, dx); #c1(ZZEF1) c2(NP_055928) c3(zinc finger ZZ-type and EF-hand domain-containing protein 1) c4(184490) c5(184491, 184492, 184493, 184494, 184495, 184496) c6( ) c7(T); #c1(ZZEF1) c2(XP_011522061) c3(zinc finger ZZ-type and EF-hand domain-containing protein 1 isoform X6) c4( ) c5(316717) c6( ) c7(T); #c1(ZZZ3) c2(XP_011539507) c3(ZZ-type zinc finger-containing protein 3 isoform X3) c4(337706) c5(337707, 337708, 337709, 337710, 337711, 337712, 337713) c6( ) c7(v);

[0124] Table C:

[0125] Abbreviation Dictionary for the “Related disease, disorder or condition” corresponding to feature “c7”, whereby each Related disease, disorder or condition is depicted with a specific abbreviation and its written form, i.e. prostate cancer corresponds to the abbreviation “A” and vice versa.

[0126] Formula: Related disease, disorder or condition=Abbreviation;

[0127] type 1 diabetes mellitus=A; stomach cancer=aA; lung disease=aa; cerebral vasospasm=Aa; renal phosphaturia=AA; ascending colon cancer=aAa; apolipoprotein c-ii deficiency=aaa; chlamydophila infections=aaA; high grade dysplastic nodule=aAA; lupus-like syndrome=aAB; mental retardation and microcephaly with pontine and cerebellar hypoplasia=aAb; postoperative confusion=aaB; chylomicronemia syndrome=aab; low grade dysplastic nodule=aAC; fg syndrome 4=aAc; myotonic muscular dystrophy=aac; carbon monoxide poisoning=aaC; x-linked infantile nystagmus=aAd; deficiency of triacylglycerol lipase=aad; anthracosis=aAD; warfarin sensitivity=aaD; germinoma=aAE; fg syndrome=aAe; steatorrhea=aae; grn-related frontotemporal dementia=aaE; marden-walker syndrome=aAf; acquired cjd=aaF; apolipoprotein c-iii deficiency=aaf; supratentorial primitive neuroectodermal tumor=aAF; corticobasal degeneration=aaG; tissue sensitivity=aAG; fat redistribution=aag; bacterial sepsis=aAg; alzheimer's disease with early onset=aaH; intestinal carcinoma=aah; cystinosis=aAh; hyperparathyroidism 1=aAH; amebiasis=aAi; hyperparathyroidism, neonatal severe primary=aAI; akathisia, drug-induced=aaI; hypotriglyceridaemia=aai; autoimmune lymphoproliferative syndrome, type iia=aAj; subarachnoid hemorrhage, anourysmal=aaJ; dermatofibrosarcoma protuberans=aaj; epilepsy, idiopathyic generalized, susceptibility to, 8=aAJ; lipoprotein glomerulopathy=aak; spinal asteophytosis=aaK; hypocalcemia, autosomal dominant 1=aAK; caspase B deficiency=aAk; dementia, familial danish=aal; vertebral artery dissection=aaL; hydrosalpinx=aAl; hyperparathyroidism 3=aAL; perceptual disorders=aaM; neuroferritinopathy=aAm; pyruvate dehydrogenase e3-binding protein deficiency=aam; hypercalciuric hypercalcomia=aAM; fragile x tremor ataxia syndrome=aan; disorders of excessive somnolence=aaN; nephralithiasis, calcium oxalate=aAN; reoviridae infections=aAn; inclusion body myopathy, sporadic=aaO; hyperparathyroid=aAO; cerebral amyloid angiopathy, familial=aao; posterior capsule apacification=aAo; idiopathyic hypercalciuria=aAP; alcohol withdrawal seizures=aap; soft drusen=aaP; spinal cord stroke=aAp; speech-sound disorder=aaq; neonatal hyperparathyroidism=aAQ; taxicosis=aaQ; erosisve esophagitis=aAq; infiltrating duct carcinoma=aAr; calcium metabolism disease=aAR; stomatitis, herpetic=aaR; plaque, atherosclerotic=aar; hypocapnia=aAs; depressive syndrome=aaS; fetal nutrition disorders=aas; lactose intolerance=aAS; mercury poisoning, nervous system=aat; ebola hemorrhagic fever=aAT; hypersensitive syndrome=aaT; krabbe disease=aAt; glaucomatous retinal degeneration=aAU; mercury poisoning=aau; vulva cancer=aAu; keratitis, herpetic=aaU; encephalyitozoonosis=aAv; amyotrophyic lateral sclerosis-parkinsonism/dementia complex 1=aav; vulvovaginal atrophy=aAV; lupus vasculitis, central nervous system=aaV; neurobehavioral manifestations=aaw; enteropathogenic escherichia coli gastrointestinal tract infection=aAw; cross infection=aaW; recessive dystrophyic epidermaolysis bullosa=aAW; stage, neuroblastoma=aAx; yin deficiency=aaX; abnormalities, drug-induced=aAX; sensation disorders=aax; amyloidosis, primary cutaneous=aay; terminal ileitis=aAy; acatalasemia japanese type=aAY; closed head injuries=aaY; renoprival hypertension=aAZ; tumors in children=aAz; head injuries, closed=aaz; persistent vegetative state=aaZ; keratoconus=ab; nemaline myopathy 3=Ab; peptic ulcer disease=aB; familial x-linked hypophosphatemiac vitamin d refractory rickets=AB; intravenous drug abuse=abA; muscular dystrophy, limb-girdle, type 1c=aBA; cerebral hemorrhage, traumatic=aba; radiotoxicity=aBa; arteriosclerosis of aorta=abB; deficiency of catalase=aBb; long qt syndrome 9=aBB; diarrhea, infantile=abb; paramyxoviridae infections=abc; creatine phosphokinase, elevated serum=aBC; progressive multiple sclerosis=abC; hypocatalasemia=aBc; dementia in parkinson's disease=abd; embryopathy=aBd; rippling muscle disease, 1=aBD; forgetting=abD; reproductive tract infections=aBe; mixed dementia=abe; chronic anxiety=abE; myopathy, distal, tateyama type=aBE; sexual abuse=abf; soft neurological signs=abF; female genital tract infection=aBf; rippling muscle disease 2 (disorder)=aBF; progressive dementia=abg; hyperirritability=aBG; post-concussion syndrome=abG; arterial leg ulcer=aBg; mitral valve endocarditis=aBh; rippling muscle disease=aBH; leprosy—patients=abh; subcortical vascular dementia=abH; loss of memory ability=abI; executive dysfunction=abi; core binding factor acute myeloid leukemia=aBI; acute ulcer=aBi; pipecolic acidemia=aBj; anxiety and fear=abj; sarcoma of mesentery=aBJ; prodromal period=abJ; aspergilloma=aBk; legius syndrome=aBK; visuospatial deficit=abK; osteoporosis risk=abk; aspergillosis=aBl; dysphoric mood=abl; daytime somnolence=abL; noonan syndrome-like disorder with or without juvenile myelomannocytic leukemia=aBL; prodrome=abM; dementia associated with alcoholism=abm; pericarditis=aBm; clubbing of nail=aBM; mobility poor=abN; refsum disease=aBn; primary hypertrophyic asteoarthropathy=aBN; early onset schizophrenia=abn; post-traumatic amnesia=abo; cystathionine beta-synthase deficiency=aBO; recurrent genital herpes simplex=abO; allergic bronchopulmonary aspergillosis=aBo; sensory denervation=abP; acatalasia=aBp; carotid artery, internal, dissection=aBP; cerebravascular amyloidosis=abp; severe dementia=abq; homacystinuria, pyridoxine-responsive=aBQ; photosensitive trichothindystrophy=aBq; severe depression=abQ; acute nephropathy=abR; variegate porphyria=aBr; intracranial sinus thrombosis=aBR; mobility limitation=abr; iatrogenic creutzfeldt-jakab disease=abs; clinical depression=abS; gonorrhea=aBs; 46, xy sex reversal 5=aBS; congenital dyserythropoietic anemia, type i=aBT; cardiovascular infections=abT; actinomycosis=aBt; iodine deficiency syndrome=abt; spermatogenic failure 7=aBu; tetralogy of fallot with pulmonary atresia=abu; tuberous xanthnma=abU; otitis media, susceptibility to =aBU; disease=abV; mental retardation, autosomal recessive 3=aBV; lipodystrophy, congenital generalized, type 3=aBv; frontal dementia=abv; circulatory arrest=abw; pulmonary hypertension, primary, 3=aBw; optic neuritis=abW; coach syndrome=aBW; hypothalamic-pituitary-adrenal axis dysfunction=abx; joubert syndrome 9=aBX; hypopharyngeal carcinoma=aBx; siderosis=abX; triplegia=aby; mixed olignastracytoma=aBy; nasopharyngitis=abY; meckel syndrome, type 6=aBY; intracranial athernsclerosis=abz; meckel syndrome=aBZ; uterine carcinoma=aBz; tic disorder=abZ; cerebravascular disease=ac; myopathy, actin, congenital, with cares=Ac; motor disturbances=AC; pancreatic cancer=aC; hennekam syndrome=aCa; hypoplastic left heart syndrome=acA; intracranial hypertension=aca; allergic conjunctivitis=aCA; ciliary dyskinesia, primary, 17=aCb; exanthem=acB; vitamin k deficiency hemorrhagic disease=acb; herpes gestationis=aCB; ciliary dyskinesia, primary, 20=aCc; schizophreniform disorder=acc; macular degeneration, age-related, 2=aCC; leprosy, multibacillary=acC; ciliary dyskinesia, primary, 14=aCd; leprosy, paucibacillary=acD; recurrent respiratory papillomatosis=aCD; choroid disease=acd; focal segmental glomerulosclerosis 4, susceptibility to =acE; patau syndrome=ace; ciliary dyskinesia, primary, 15=aCe; pulmonary aspergillosis=aCE; familial hematuria=acF; skin symptom=aCF; deafness, autosomal dominant 44=aCf; complex partial epilepsy=acf; mandibuloacral dysplasia with type a lipodystrophy=aCg; pseudopelade=acG; paragonimiasis=aCG; communication disorder=acg; adenomatous goiter=aCh; aids (disease)=aCH; lichen planus follicularis=acH; quadriplegia=ach; color blindness=aCi; dermatomycosis=aci; extrinsic allergic alveolitis=aCI; phencyclidine abuse=acI; alveaolitis=aCJ; ciliary dyskinesia, primary, 27=aCj; intracranial vasospasm=acj; cytochrome-c oxidase deficiency disease=acJ; cerebral amyloid angiopathy, app-related=acK; cadasil=ack; generalized progressive retinal atrophy=aCk; mycobacterium tuberculosis, susceptibility to =aCK; coronary artery disease, modifier of =aCL; myopathy, centronuclear, 4=aCl; ventricular septal defect=acl; alzheimer disease type 4=acL; neuropathy, painful=aCM; spondylosis=acm; three m syndrome 1=aCm; dementia, familial british=acM; ampulla of vater carcinoma=acn; cerebral hemorrhage with amyloidosis, hereditary, dutch type=acN; three m syndrome 3=aCn; nephropathy, chronic tubulointerstitial=aCN; alzheimer disease, familial, 1=acO; acute recurrent pancreatitis=aCO; 3-m syndrome=aCo; sea-blue histiocyte syndrome=aco; angiomyalipom=aCp; bacterial peritonitis=aCP; macular retinal edema=acp; alzheimer disease, early-onset, with cerebral amyloid angiopathy=acP; cerebral amyloid angiopathy, hereditary=acQ; coronary occlusion=aCQ; nominal aphasia=acq; chronic dermatitis=aCq; chronic ulcer of skin=aCr; holoprosencephalyy=acr; general paresis=acR; cumulative trauma disorders=aCR; chronic constipation=aCs; carotid artery occlusion=acS; arteriolosclerosis=acs; cancer pain=aCS; morphine dependencye=aCt; behavior disturbance=acT; asthmatic pulmonary eosinophilia=aCT; progressive supranuclear palsy=act; phenylketonuria=acU; herpes zoster=acu; cancer angiogenesis=aCU; idiopathyic environmental intolerance=aCu; muscle amp deaminase deficiency=acV; viral myocarditis=aCV; high grade astrocytic tumor=aCv; pityriasis versicolor=acv; multiple chemical sensitivity=aCw; alagille syndrome=acw; viral arthritis=aCW; fibrous dysplasia=acW; osteodystrophy=acX; infection by leishmania braziliensis=aCX; asthma, susceptibility to =aCx; carotid artery dissection=acx; leishmaniasis, diffuse cutaneous=aCY; granuloma, respiratory tract=aCy; exophthalmos=acy; deficiency of phosphorylase kinase=acY; otitis=aCZ; gains deficiency=acZ; human immunodeficiency virus type 1, susceptibility to =aCz; hypopituitarism=acz; baraitser-winter syndrome=AD; congenital myopathy=Ad; prostate cancer=ad; gastritis=aD; acute miliary tuberculosis=aDa; priapism=adA; sandhoff disease=aDA; cardiac glycogenosis=ada; seronegative rheumatoid arthritis=aDb; intestinal schistosomiasis=aDB; diabetes insipidus, nephrogenic, x-linked=adB; conduction system abnormalities=adb; viral meningoencephalyitis=aDc; diabetes insipidus, nephrogenic, autosomal=adC; methemoglobinemia=adc; nondisjunction=aDC; taxoplasmosis, animal=aDD; congenital nephrogenic diabetes insipidus=adD; digestive system cancers=aDd; glycogen storage disease vii=add; mucopolysaccharidosis iv=ade; borderline tuberculoid leprosy=aDe; balance disorder=adE; pregnancy complications, infectious=aDE; lobar pneumonia=aDF; arthritis symptoms=aDf; neurohypophyseal diabetes insipidus=adF; mccune albright syndrome=adf; lung disease granulomatous=aDg; diabetes insipidus=adG; late onset asthma=aDG; skin squamous cell carcinoma=adg; giI blood group=adH; renal vasculitis=aDh; wolff-parkinson-white syndrome=adh; viral respiratory infection=aDH; pseudopseudohypoparathyroidism=adi; auricular swelling=aDi; dysequilibrium syndrome=adI; pneumonia in children=aDI; collagen-vascular disease=aDJ; clear cell sarcoma=adj; recurrent optic neuritis=adJ; pelvic inflammatory disease=aDj; myelitis, transverse=adK; skin damage=aDK; optic nerve glioma=adk; acute myocarditis=aDk; periapical periodontitis=aDl; acute myocardial ischemia=adL; yusho disease=aDL; danon disease=adl; atrioventricular block=adm; posterior uveitis=aDM; bilateral optic neuritis=adM; dengue hemorrhagic fever=aDm; hyponatremic=adN; orchitis=aDn; adenine phosphoribosyltransferase deficiency=adn; boutonneuse fever=aDN; granulomatous angiitis=aDo; spastic ataxia charlevoix-saguenay type=ado; obstructive hydrocephalyus=adO; yellow fever=aDO; myelitis=adP; nonspecific interstitial pneumonia=aDP; early-onset ataxia with oculomator apraxia and hypoalbuminemia=adp; branchiolitis=aDp; endocervicitis=aDq; diffuse palmoplantar keratoderma, bothnian type=adQ; ataxia telangiectasisa like disorder=adq; idiopathyic osteoarthritis=aDQ; marinesco-sjogren syndrome=adr; degenerative joint disease involving multiple joints=aDR; varicose veinss=aDr; morphologically altered structure=adR; early onset cerebellar ataxia=ads; cerebral cavernous malformations 2=aDS; cutaneous leishmaniasis=aDs; keratitis-ichthyosis-deafness syndrome=adS; mucocutaneous leishmaniasis=aDt; perivascular tumor=adT; cross-dependencye=adt; richter's syndrome=aDT; acute heart failure=adU; pulmonary eosinophilia=aDu; limb-girdle muscular dystrophy, type 2b=adu; inflammatory cardiomyopathy=aDU; edema, cardiac=adv; friedreich ataxia 1=adV; asymptomatic multiple myeloma=aDV; pancreatic cystadenoma=aDv; congenital dyserythropoietic anemia=adw; esophageal disease=aDW; 4B, xy disorders of sex development=adW; t-lymphocytopenia=aDw; retinal veins occlusion=adx; myasthenia=aDx; coxsackievirus infections=aDX; congenital adrenal hyperplasia due to 21 hydroxylase deficiency=adX; gastroesophageal cancer=aDY; hypospadias 1, x-linked=adY; leishmaniasis=ady; aspirin-sensitive asthma with nasal polyps=aDy; epithelial hyperplasia=aDZ; 21-hydroxylase deficiency=adZ; visceral leishmaniasis=adz; rocio virus encephalyitis=aDz; muscle degeneration=Ae; prostate carcinoma=ae; pancreatic carcinoma=aE; qualitative abnormality of granulocyte=AE; mantle lymphoma=aEa; diabetes mellitus, insulin-dependent, 22=aEA; reactive thrombocytosis=aeA; bulbospinal neuronopathy, x-linked recessive=aea; primary graft dysfunction=aEB; gonadal dysgenesis, 45.x=aeB; stage, kaposi's sarcoma=aEb; heredodegenerative disorders, nervous system=aeb; hiv disease progression=aEC; testicular dysgenesis syndrome=aeC; male hypagonadism=aec; endometrial sarcoma=aEc; malignant neoplasm of male breast=aed; hernia congenital=aeD; maladjustment=aEd; substance abuse, intravenous=aED; diseases or conditions=aeE; infertility tubal factor=aEE; high grade endometrial stromal sarcoma=aEe; acne vulgaris=aen; hiv-1 infection=aEF; supernumerary structure=aeF; endometrial stromal sarcoma, high grade=aEf; spinal diseases=aef; transsexualism=aeg; asymptomatic human immunodeficiency virus infection=aEG; palisaded myofibroblastoma=aEg; bilateral inguinal hernia=aeG; cecal benign neoplasm=aEh; intratubular malignant germ cells=aeH; morning stiffness (>1 hour)=aEH; phenotypic heterogeneity=aeh; laryngeal disease=aEi; neoplasms, hormone-dependent=aei; infections specific to perinatal period=aEI; disorder of neutrophyils=aeI; ocular surface disease=aEJ; large prostate=aej; vulva carcinoma=aEj; endocrine glands—cancer=aeJ; summer-type hypersensitivity pneumoniatis=aeK; 46, xx testicular disorders of sex development=aek; flaviviral diseases=aEK; adenomayoma=aEk; verrucous carcinoma=aEl; 5-alpha reductase deficiency=ael; dysplastic nodule=aeL; biliary structure=aEL endometrial stromal tumor=aEm; end stage aids=aEM; lower motor neuron disease=aem; alopecia=aeM; motor symptoms=aen; prostate malignant phyllodes tumor=aeN; primary hiv infection=aEN; anus neoplasm=aEn; atypical polypoid adenomayoma=aEo; peripheral nervous system neoplasm=aeO; chromosome 11p deletion syndrome=aeon; upper urinary tract infection=aEO; hypertrophyic pyloric stenosis=aeP; poorly differentiated carcinoma=aep; bubonic plague=aEP; malignant ciliary body melanoma=aEp; female reproductive system disease=aEQ; gynecomastia=aeQ; senile angioma=aEq; congenital malformation of genital organs=aeq; subfertility, male=aer; neurofibroma=aeR; thoracic injuries=aEr; natural killer cell leukemia=aER; amenorrhea=aeS; alphavirus infections=aEs; biliary tract disease=aES; bulbospinal neuronopathy=aes; acute kidney tubular necrosis=aET; loss of scalp hair=aet; anterior uveitis idiopathyic=aEt; 46 xy gonadal dysgenesis=aT; west nile fever=aEU; male breast cancer=aeU; primary disease=aeu; alphaviral infection=aEu; female infertility associated with anovulation=aev; pediatric human immunodeficiency virus infection=aEv; mycobacterium avium complex disease=aEV; benign breast phyllodes tumor=aeV; netherton syndrome=aEW; apocrine gland carcinoma=aew; benign prostate phyllodes tumor=aeW; recurrent aphthous ulcer=aEw; idiopathyic hirsutism=aex; lymphoma, extranodal nk-t-call=aEx; myelomannocytic leukemia=aEX; pleomorphic adenoma carcinoma=aeX; hereditary motor neuron disease=aey; mitochondrial pathyology=aEY; hereditary allergy=aEy; tenosynovial giant cell tumor=aeY; neuropathy, hereditary sensory, with spastic paraplegia, autosomal recessive=aEZ; chancroid=aEz; pseudohermaphrodite (non-specific)=aez; sertoli cell tumor=aeZ; alzheimer's disease=af; fryns-aftimos syndrome=AF; cap myopathy=Af; stomach carcinoma=aF; placental site trophyoblastic tumor=afa; hereditary sensory and autonomic neuropathyies=aFa; transfusion related acute lung injury=aFA; retinoschisis 1, x-linked, juvenile=afA; pleomorphic adenoma=afb; alveolar bone loss=aFb; hair disease=afB; immune neutropenia=aFB; relative polycythemia=aFC; hyperargininemia=afC; enterovirus infections=aFc; infertility=afc; gram-negative bacterial infections=aFd; antibody deficiency due to defect in cdl9=aFD; hereditary breast ovarian cancer=afd; carbamoyl phosphate synthetase i deficiency disease=afD; hunger=afE; pulmonary sclerosisng hemangioma=afe; pemphigus foliaceus=aFE; periodontal attachment loss=aFe; acne=aff; community-acquired infections=aFf; embryonal testis carcinoma=afF; antibody deficiency syndrome=aFF; viral meningitis=aFG; adams-oliver syndrome=afG; aicardi syndrome=afg; chlamydia pneumoniae infection=aFg; microphthalmia, syndromeic 7=afH; prurigo=aFh; atrophyic muscular disease=afh; alveolar pyorrhea=aFH; arthritis by pattern of joint involvement=aFI; coronary spastic angina=afI; congenital heart block=afi; septicemia due to gram-negative organism, unspecified=aFi; condyloma=aFJ; gingival fibromatosi=afj; cholestasis in newborn=aFj; nephrotic syndrome, idiopathyic, steroid-resistant=afJ; acute lyme disease=aFk; neutropenia, severe congenital, autosomal recessive 3=afK; genital infection=aFK; arthrogryposis renal dysfunction cholestasis syndrome=afk; coronary arteritis=aFl; giving-way=afl; birbeck granule deficiency=aFL; nephrotic syndrome, type 8=aft; acute malaria=aFm; respiratory tract infections=afm; lichen simplex chronicus=afM; cavitation of lung=aFM; mannose-binding protein deficiency=afn; immunodeficiency due to defect in cd3-zeta=aFN; neurodermatitis=afN; distal colitis=aFn; obstructive disease=afo; sepsis of the newborn=aFO; tomaculous neuropathy=afO; refractory cytopenia with multilineage dysplasia (rcmd)=aFo; slowed nerve conduction velocity, autosomal dominant=afP; acute arthritis=aFp; copd, severe early-onset=afp; bacterial sepsis of newborn=aFP; peeling skin syndrome=aFQ; basal cell carcinoma=afQ; bacterial diarrhoea=aFq; branchiectasis=afq; keratoacanthoma=afr; x-linked retinitis pigmentosa=afR; bacterial vaginosis=aFr; lymphoproliferative syndrome 2=aFR; echinococcosis=afS; sympathyetic ophthalmia=aFS; burning mouth syndrome=aFs; tonsillitis=afs; cardiac sarcoidosis=afT; appendicitis=aFt; inflammatory neuropathy=aFT; myoclonic epilepsy, familial infantile=aft; paracoccidioidomycosis=aFU; choledochal cyst=aFu; aarskag-scott syndrome=afU; vesicular stomatitis=afu; rheumatoid vasculitis=aFV; gitelman syndrome=afV; atrioventricular bloc=afv; eczema herpeticum=aFv; pulmonary paracoccidioidomycosis=aFW; mean platelet volume=afW; heterotopia, periventricular, autosomal recessive=afw; nephropathy with pretibial epidermaolysis bullosa and deafness=aFw; fuchs' heterochromic uveitis=aFX; opioid abuse=aFx; mahr-tranebjaerg syndrome=afX; periventricular heterotopia=afx; hypoplasia of corpus callosum=afy; mental retardation, x-linked 45=afY; myasthenic syndrome, congenital, slow-channel=aFY; capillary malformations, congenital, 1=aFy; double cortex=afZ; focal segmental glomerulosclerosis 3, susceptibility to =aFZ; periventricular nodular heterotopia=afz; thalassemia minor=aFz; familial glucocorticoid deficiency 1=aG; nemaline myopathy, autosomal recessive=Ag; severe hypoxic ischemiac encephalyopathy=AG; thrombophilia=ag; schizoaffective disorder, bipolar type=aga; lymphoid depletion=aGA; talkativeness=aGa; macular degeneration, age-related, 8=agA; retinal pigment epithelial detachment=agB; immunodeficiency 18=aGB; frasier syndrome=aGb; prodromal symptoms=agb; t lymphocyte deficiency=aGC; schizotypal personality disorder=agc; methylmalonic aciduria due to transcobalamin receptor defect=aGc; choroiditis=agC; thrombocytopenia 1=aGd; immunodeficiency 17=aGD; retinal drusen=agD; velocardiofacial syndrome=agd; akt4 epitope deficiency=aGE; hypopituitaris=agE; gaucher disease, type i=aGe; acquired polycythemia=age; gaucher disease, type iii=aGf; kidney hypertrophy=agf; infection by human herpesvirus 7=aGF; ovary serous adenocarcinoma=agF; mucopolysaccharidosis ii=agG; immunodeficiency with hyper-igm, type 3=aGG; hyperekplexia and epilepsy=agg; heat stroke=aGg; quebec platelet disorder=aGh; mental retardation, autosomal dominant 12=agh; porokeratosis, disseminated superficial actinic 1=agH; subacute combined degeneration=aGH; retinal vasculitis=agI; cancer regression=aGi; osteoporosis (osteopenia)=aGI; scaphycephaly=agi; neurotic disorder=agJ; synostosis=agj; rupture, spontaneous=aGJ; acute-on-chronic liver failure=aGj; coffin-siris syndrome=agk; fibrous papule of nose=aGk; anxiety, separation=agK; sclerosis of the skin=aGK; immunoglobulin deposition disease=aGL; fibrous papule of face=aGl; angelman syndrome=agl; metachromatic leukodystrophy, congenital type=agL; metachromatic leukodystrophy, juvenile type=agM; maple syrup urine disease=agm; lymphangioma=aGm; spastic dysphonia=aGM; adult disease=agn; metachromatic leukodystrophy, adult type=agN; poxviridae infections=aGN; fibrous histincytoma=aGn; meckel syndrome type 1=ago; arylsulfatase a deficiency=agO; cutaneous fibrous histincytoma=aGo; meige syndrome=aGO; platelet glycoprotein iv deficiency=aGp; diverticulitis=aGP; joubert syndrome 8=agp; chronic psychosis=agP; erythema infectiosum=aGQ; retinitis pigmentosa with or without situs inversus=agq; pseudoarylsulfatase a deficiency=agQ; plasmodium falciparum blood infection level=aGq; retinitis pigmentosa 55=agr; sulfatiduria=agR; coronary heart disease, susceptibility to, 7=aGr; oral hairy leukoplakia=aGR; bardet-biedl syndrome 3=ags; pterygium of conjunctiva and cornea=aGs; cavity=agS; taxoplasmosis, cerebral=aGS; septal hypertrophy=aGt; immunodeficiency congenital=aGT; spastic paraplegia 61, autosomal recessive=agt; unverricht-lundborg syndrome=agT; demyelinating polyneuropathy=agU; ciliary dyskinesia, primary, 23=agu; exercise-induced angina=aGu; autoimmune thrombocytopenia=aGU; breast liposarcoma=aGv; hyperaldosteronis=agv; mucosulfatidosis=agV; hyper-igm immunodeficiency, x-linked, with ectodermal dysplasia, hypohidrotic=aGV; lymphocytosis—absolute=aGw; cardiac symptom=agW; currarino triad=agw; tuberculoid leprosy=aGW; lubs x-linked mental retardation syndrome=agX; mixed connective tissue disease=aGX; severe combined immunodeficiency, autosomal recessive, t cell negative, b cell positive, nk cell positive=aGx; incontinentia pigmenti, familial male-lethal type=agx; human immunodeficiency virus, type 2 [hiv-2]=agy; urban schosser spohn syndrome=aGY; severe combined immunodeficiency, autosomal recessive, t cell-negative, b cell-positive, nk cell-negative=aGy; 22q11 deletion syndrome=agY; bloch-sulzberger syndrome=agz; cognitive function 1, social=agZ; immunodeficiency 19=aGz; incoherent thinking=aGZ; bjornstad syndrome=aH; dengue disease=AH; intranuclear rod myopathy=Ah; nephrotic syndrome=ah; farber lipogranulomatosis=ahA; specific language impairment=aha; stage ib cervical cancer=aHa; myxoid chondrosarcoma=aHA; pneumonia due to gram negative bacteria=aHb; glaucoma 1, open angle, f=ahB; congenital fibrosarcoma=aHB; facial hemihypertrophy=ahb; intraductal papilloma=aHc; visual symptoms=ahC; synpolydactyly=aHC; autistic behavior=ahc; chromosome 22q11.2 microduplication syndrome=ahd; gliomatosis cerebri=aHd; orofaciodigital syndrome=ahD; aquagenic pruritus=aHD; obsession=ahe; hirschsprung disease 1=ahE; omodysplasia=aHe; basophilic leukemia=aHE; patent foramen ovale=ahf; wound, healed=aHF; cchs with hirschsprung disease=ahF; hemolytic uremic syndrome, atypical, susceptibility to, 2=aHf; mucopidermaoid tumor=ahG; diarrhea-negative hemolytic uremic syndrome=aHg; asperger syndrome=ahg; buffalo hump=aHG; lichen disease=aHH; streptococcus pyogenes infection=aHh; cerebrovascular occlusion=ahH; chondrodysplasia punctata, brachytelephalangic=ahh; shipyard eye=aHi; hirschsprung's disease=ahI; x-linked chondrodysplasia punctata 1=ahi; agammaglobulinemia 3, autosomal recessive=aHI; islet cell tumor=ahJ; chondrodysplasia punctata=ahj; autoimmune hemolytic anemia=aHj; agammaglobulinemia 6, autosomal recessive=aHJ; olfactory neuroblastoma=ahK; thymus squamous cell carcinoma=aHk; vitreoretinochoroidopathy=ahk; chromosome 12, 12p trisomy=aHK; cd59 deficiency=aHl; differentiating neuroblastoma=ahL; lissencephaly, x-linked, 2=ahl; neuroborreliosis=aHL; nephrotic syndrome in children=aHM; cromer blood group system=aHm; taste sour=ahM; epileptic encephalyopathy, early infantile, 1=ahm; primary progressive multiple sclerosis=ahN; swine vesicular disease=aHn; functional proteinuria=aHN; mental retardation, x-linked, with or without seizures, arx-related=ahn; hyperalgesia, primary=ahO; immunodeficiency, common variable, 6=aHO; proud syndrome=aho; intravascular hemolysis=aHo; partington x-linked mental retardation syndrome=ahp; hemoglobinuria=aHp; anticoagulants causing adverse effects in therapeutic use=aHP; autonomic nervous system imbalance=ahP; mastitis-metritis-agalactia syndrome=aHq; cryptogenic west syndrome=ahq; decubitus ulce=ahQ; poisoning by anticoagulant=aHQ; bladder cancer stage=aHR; paroxysmal nonkinesigenic dyskinesia=ahR; brain cyst=ahr; 22q13.3 deletion syndrome=aHr; pseudohypoaldosteronism=ahS; partington syndrome=ahs; lipomatosis, multiple=aHs; dental pulp exposure=aHS; cd8 deficiency, familial=aHT; hexadactyly=aHt; hydranencephaly=aht; skin/hair/eye pigmentation, variation in, 9=ahT; pigment deposition=ahU; myoma=aHu; ideomator apraxia=ahu; multiple sclerosis, chronic progressive=aHU; neoplasms, glandular and epithelial=ahv; plasmodium ovale infection=aHV; porphyria cutanea tarda=aHv; skin pigmentation disorder=ahV; urea cycle disorder=ahW; acute hiv infection=aHW; lipomatous cancer=aHw; combined saposin deficiency=ahw; congenital mesoblastic nephroma=aHx; pineal gland cancer=ahX; jankovic rivera syndrome=ahx; opitz trigonocephaly syndrome=aHX; glomus tumor=aHY; pseudohypoparathyroidism type 1b=ahy; cellular myxoid liposarcoma=aHy; asparagine synthetase deficiency=ahY; microcephaly, congenital=ahZ; saposin d (disease)=ahz; intravenous leiomyomatosis=aHz; blastema predominant kidney wilms' tumor=aHZ; arthritis=ai; peroxisome biogenesis disorders=aI; nemaline myopathy, autosomal dominant=Ai; dysostasis=AI; hypertyrosinemia, richner-hanhart type=aiA; deafness, autosomal recessive=aIA; secondary hemochromatosis=aIa; aminoacylase 2 deficiency=aia; cerebral degeneration=aib; juvenile macular degeneration and hypotrichosis=aIB; unilateral multicystic dysplastic kidney=aIb: ductal breast carcinoma=aiB; antithrombin iii deficiency=aiC; congenital hypotrichia=aIC; pectus excavatum=aIc; canavan disease=aic; purine nucleoside phosphorylase deficiency=aiD; no-reflow phenomenon=aID; neonatal anemia=aId; choledocholithiasis=aid; cone-rod dystrophy 15=aIE; cerebellar ataxia, cayman type=aiE; pica disease=aIe; ectopia lentis, spontaneous filtering blebs, and craniofacial dysmorphism=aie; vascular degeneration=aif; keratoacanthoma familial=aIf; clear cell sarcoma, of tendons and aponeuroses=aiF; leber congenital amaurosi=aIF; pemphigus and fogo selvagem=aIg; round cell sarcoma=aiG; hermaphroditis=aIG; hepatobiliary benign neoplasm=aig; myoepithelioma=aiH; corneal dystrophy and perceptive deafness=aIH; microcephaly, primary autosomal recessive, 5=aih; meier-garlin syndrome 5=aIh; cerebellar lesion=ail; meier-garlin syndrome=aIi; chandler syndrome=aIl; autosomal recessive primary microcephaly=aii; hereditary wilms' tumor=aIj; primary microcephaly=aij; varicose ulcer=aiJ; vascular ischemia=aIJ; intervertebral disc disease=aik; acquired atrophy of ovary=aIK; polyp of corpus uter=aIk; secondary infection=aiK; vulvar disease=aIl; heartburn=aiL; congenital torticollis=ail; melanoma, cutaneous malignant, susceptibility to, 3=alL; childhood kidney cell carcinoma=aim; lobular neoplasmia=aIm; inflammatory mfh=aIM; west nile viral infection=aiM; spongiotic dermatitis=aIn; intracortical osteogenic sarcoma=aIN; thromboembolism in children=ain; infective dermatitis=aiN; gastric signet ring cell adenocarcinoma=aIo; recurrent depression=aiO; multiple pathyologies=aIO; masa syndrome=aio; hyperammonemia=aip; malignant mesenchymoma=alp; chronic myelopathy=aiP; developmental reading disorder=aIP; isodicentric chromosome 15 syndrome=al; argininosuccinic acid synthetase deficiency, complete=aiq; hyperplastic lymph node=aIq; inflammatory disease of the central nervous system=aiQ; supraglottis squamous cell carcinoma=aiR; familial tremor=air; invasive tubular breast carcinoma=air; central nervous system lesion=aiR; ectodermal dysplasia, ectrodactyly, and macular dystrophy=aIs; microcephaly, primary autosomal recessive, 3=aIS; bone marrow disease=aiS; citrullinemia=ais; transient myeloproliferative disorder of down syndrome=aIT; bohring syndrome=ait; mental retardation, autosomal dominant 3=alt; rna virus infections=aiT; hypereosinophilia=aiu; inflammatory bowel disease 10=aiU; epileptic encephalyopathy, early infantile, 2=aIU; hypotrichosis=aIu; nance-horan syndrome=aIV; single gene defect=aiv; cryptococcosis=aiV; compulsive personality disorder=aIv; vacuolar myopathy=aiW; anemia hemoglobin=aiw; gastric cancer stage=aIw; rett syndrome, atypical=aIW; neonatal hemochromatosis=aIX; secondary malignant neoplasm=aix; aicar transformylase inosine monophosphate cyclohydrolase deficiency=aiX; usher syndrome, type i=aIx; spastic paraplegia 3, autosomal dominant=aiY; bainbridge-ropers syndrome=aiy; myoclonic encephalyopathy=aIY; usher syndrome, type id=aIy; plexiform neurofibroma=aiz; spastic paraplegia 10, autosomal dominant=aiZ; usher syndrome, type 1d=aIz; blackout=aIZ; moyamoya disease 1=aJ; actin-accumulation myopathy=Aj; diabetes mellitus=aj; tonsil cancer=AJ; neuropathy, hereditary sensory, type id=aja; leukemiac infiltration=ajA; familial primary gastric lymphoma=aJA; nodular ganglioneuroblastoma=aJa; hereditary autosomal dominant spastic paraplegia=ajb; invasive bladder transitional cell carcinoma=aJb; autosomal aneuploidy=aJB; metastases to ovary=ajB; chronic pelvic pain of female=ajC; cerebral palsy, spastic, diplegiac=ajc; superficial gastritis=aJC; immunodeficiency 13=aJc; idiopathyic interstitial pneumonia=ajd; multiple endocrine neoplasmia, type iv=aJd; proliferative verrucous oral leukoplakia=aJD; chodritis=ajD; megacolon, not hirschsprung's=aJe; polychondritis=ajE; retinomas (translucent, grayish retinal mass protruding into the vitreous)=aJE; donohue syndrome=aje; neuropathy, hereditary sensory, type if =ajf; tubular adenomas and adenocarcinomas=aJF; megaolan=aJf; pelvic pain=ajF; myoclonic cerebellar dyssynergia=ajG; clear cell adenofibroma=aJg; vaginal cancer=aJG; at, complementation group e=ajg; cystadenofibroma=aJh; ataxia-telangiectasisa variant=ajh; cervicitis=aJH; sly syndrome=ajH; peniale neaoplasm=aJI; intrauterine growth retardation, metaphyseal dysplasia, adrenal hypoplasia congenita, and genital anomalies=aJi; diurnal dystonia=aji; dacryoadenitis=ajI; gestational chorincarcinoma=aJj; anus cancer=aJJ; contralateral breast cancer=ajj; central nervous system leukemia=ajJ; relapsing polychondritis=ajK; supratentorial cancer=aJK; polyomavirus infections=ajk; ulnar-mammary syndrome=aJk; sarcoma family syndrome of Ii and fraumeni=aJI; ovarian brenner tumor=aJL; krukenberg carcinoma=ajL; aggressive periodontitis, generalized=ajl; trichoepithelioma multiple familial=aJm; aggressive non-hodgkin lymphoma=ajm; liver angiosarcoma=aJM; brugada syndrome=ajM; radiation damage=ajn; cerebellar liponeurocytoma=ajN; melanoma-pancreatic cancer syndrome=aJn; bladder squamous cell carcinoma=aJN; amelanotic melanoma=aJO; lymphoblastic leukemia in children=ajo; melanoma, cutaneous malignant, susceptibility to, 2=aJo; retinal nonattachment, nonsyndromeic congenital=ajO; eye carcinoma in situ=ajP; cervical cancer stage=ajp; melanoma astrocytoma syndrome=aJp; papillary squamous carcinoma=aJP; oculopalateocerebral syndrome=aJq; benign meningioma=aJQ; hodgkin's disease in children=ajq; persistent hyperplastic primary vitreaou=ajQ; cerebral small vessel diseases=aJr; isolated cervical dystonia=ajr; vascular; intracranial=ajR; brain stem astrocytic neoplasm=aJR; microacystic adenoma=aJS; idiopathyic polypoidal choroidal vasculopathy=ajs; physical function=aJs; neuropathy ataxia and retinis pigmentosa=ajS; keratinizing squamous cell carcinoma=aJT; gastro-esophageal reflux disease with esophagitis=aJt; renal tubular acidosis=ajT; eales disease=ajt; cervix small cell carcinoma=aJU; laryngopharyngeal cancer=aju; leigh disease=ajU; chromosome 10, monosomy 10q=aJu; pineal region germinoma=aJV; gastrointestinal symptom=ajV; li-fraumeni syndrome=ajv; glandular neoplasms=aJv; hypopharynx cancer=aJW; infantile malignant osteopetrosis=ajW; neuroblastoma recurrent=aJw; coats disease=ajw; sensorineural hearing loss, bilateral=ajX; human t-cell lymphotrophic virus, type i [htlv-i]=aJx; infantile refsum disease=ajx; juvenile myelomonocytic leukemia=aJX; meningitis, meningococcal=ajy; vulval intraepithelial neoplasmia grade 3=aJy; alcohol dependence=aJY; deformity of bone=ajY; meningitis, pneumococcal=ajz; leukemia, chronic lymphocytic, susceptibility to, 2=aJz; holoprosencephaly 11=aJZ; recurrent ulcer=ajZ; lowy body dementia=ak; metachromatic leukodystrophy=AK; glucocorticoid deficiency=aK; neuromuscular disease=Ak; lipomatosis=aKA; non-st elevation (nstemi) myocardial infarction=aka; muscle relaxation=akA; meier-garlin syndrome 4=aKa; hyperostosis=akb; wolman disease=aKB; barrett's esophagu=aKb; central core myopathy=akB; darier disease, segmental=akC; bile reflux=aKc; eosinophilic esophagitis=akc; disseminated eosinophilic collagen disease=aKC; loeffler syndrome=aKD; dyspepsia=akd; glandular cystitis=aKd; darier disease, acral hemorrhagic type=akD; keratosis follicularis=akE; speech and language disorder=ake; mucinous intrahepatic cholangiocarcinoma=aKe; pancreatic insufficiency=aKE; benign epilepsy with centrotemporal spikes=akf; pancreatic malabsorption=aKF; myocardial stunning=akF; deafness, autosomal dominant 4=aKf; exocrine pancreatic insufficiency=aKG; episodic ataxia with nystagmus=akg; hailey-hailey disease=akG; deafness, autosomal dominant 4b=aKg; follicular carcinoma, widely invasive=aKh; hemiplegiac migraine, familial type 2=akh; sphingolipidosis=akH; congenital hypoplasia of thymus=aKH; deafness, autosomal recessive 12=akI; alternating hemiplegia of childhood=aki; chromosome 10, monosomy 10p=aKI; colon carcinoma in situ=aKi; alternating hemiplegia of childhood 1=akj; microcephaly, primary autosomal recessive, 6=aKJ; encephalyomyelitis=akJ; myeloid tumor suppressor=aKj; migraine, familial basilar=akk; familial acute myeloid leukemia with mutated cebpa=aKk; pericentrin=aKK; spinocerebellar ataxia, x-linked 1=akK; microcephaly 8, primary, autosomal recessive=aKL; ventilator-induced lung injury=akl; histiocytic leukemia=aKl; olivopontocerebellar atrophy=akL; mitochondrial complex v (atp synthase) deficiency, nuclear type 4=akM; microcephaly 9, primary, autosomal recessive=aKM; specific granule deficiency=aKm; hemiplegiac migraine=akm; seckel syndrome 5=aKN; polyarteritis nodes=aKn; spinocerebellar ataxia 17=akN; epilepsy and migraine=akn; mitochondrial complex v (atp synthase) deficiency, nuclear type 3=akO; transient neurological symptoms=ako; symptoms/complaints of eyelids=aKo; ataxia telangiectasis=aKO; amyloidosis, hereditary, transthyretin-related=aKp; migraine with typical aura=akp; nephronophthisis 15=aKP; complex v deficiency=akP; benign familial neonatal epilepsy=akq; maturity-onset diabetes of the young, type 8, with exocrine dysfunction=aKq; morbid obesity and spermatogenic failure=aKQ; kearns-sayre syndrome=akQ; joubert syndrome 5=aKR; marie unna congenital hypotrichosis=akR; cerebral palsy, ataxiac, autosomal recessive=aKr; episodic ataxia=akr; hereditary sensory autonomic neuropathy, type 2=akS; senile cardiac amyloidosis=aKs; senior-loken syndrome 6=aKS; dystonia 12=aks; leber congenital amaurosis 10=aKT; dystonia 3, torsion, x-linked=akt; benign symmetrical lipomatosis=aKt; acute hepatitis e=akT; meckel syndrome, type 4=aKU; cervix disease=akU; alternating hemiplegia of childhood 2=aku; late-onset disorders=aKu; capes syndrome=akv; anogenital venereal wart=akV; protein misfolding disorders=aKv; bardet-biedl syndrome 14=aKV; joubert syndrome 15=aKW; greig cephalyopolysyndactyly syndrome=akW; ulnar nerve entrapment=aKw; neonatal infection=akw; atrophy of pancreas=aKx; mosaic variegated aneuploidy syndrome 2=aKX; motor disorder=akx; cowpox=akX; seckel syndrome 6=aKY; acute respiratory disease=aKy; esophagitis=akY; chronic mountain sickness=aky; brody myopathy=akz; mental retardation, x-linked, with epilepsy=akZ; alcohol-induced chronic pancreatitis=aKz; nephronophthisis 2=aKZ; ophthalmoplegia=Al; hellp syndrome=AL; zellweger spectrum=aL; liver cirrhosis=al; cutaneous telangiectasisa and cancer syndrome, familial=alA; hemorrhagic colitis=aLA; retinitis pigmentosa 26=aLa; parkinsonism with spasticity, x-linked=ala; renal disease (acute) nos=aLB; blepharophimosis=alB; dna virus infections=alb; ichthyosis, congenital, autosomal recessive 9=aLb; wrinkly skin syndrome=alc; nonexudative age-related macular degeneration=aLC; williams-beuren syndrome=alC; primary hypercholesterolemia=aLc; cutis laxa, autosomal recessive, type iia=ald; heterotaxy, visceral, 6, autosomal=aLd; costeff optic atrophy syndrome=alD; hiv nephropathy=aLD; enlarged vestibular agueduct=ale; immunodeficiency syndrome, variable=alE; ocular sarcoidosis=aLE; van der woude syndrome 2=aLe; renal tubular acidosis, distal, autosomal recessive=alf; alpha-thalassemia myelodysplasia syndrome=alF; hemolytic uremic syndrome, atypical, susceptibility to, 4=aLf; verotoxigenic escherichia coli gastrointestinal tract infection=aLF; psychomotor impairment=alG; renal tubular acidosis, distal, autosomal recessive, with late-onset sensorineural hearing loss=alg; complement factor b deficiency=aLg; complement abnormality=aLG; endocapillary glomerulonephritis=aLH; necrotizing ulcerative gingivitis=aLh; renal tubular acidosis, distal, with progressive nerve deafness=alh; generalized pruritus=alH; panuveitis=aLI; rubinstein-taybi syndrome=alI; conotruncal cardiac defects=aLi; neural hearing loss=ali; relapsing fever=aLJ; adult astrocytic tumorur=alJ; distal myopathy, nonaka type=alj; heterotaxy, visceral, 2, autosomal=aLj; occipital horn syndrome=alk; transposition of the great arteries, dextro-looped 2=aLk; tick-borne relapsing fever=aLK; coffin-lowry syndrome=alK; misalignment=aLI; spinocerebellar ataxia 2=alL; spinal muscular atrophy, distal, x-linked 3=all; congenital afibrinogenemia=aLL; proliferative glomerulonephritis=aLM; polysplenia syndrome=aLm; salla disease=alm; spinocerebellar degenerations=alM; cfhr5 deficiency=aLN; hypocupremia=aln; progressive cerebellar degeneration=alN; double outlet right ventricle=aLn; thin basement membrane disease=aLO; blotchy=aln; decreased tendon reflex=alO; transposition of the great arteries, dextro-looped 1=aLo; disorder of complement=aLP; complement factor d deficiency=aLp; spinocerebellar ataxia 10=alP; sialuria=alp; neisseriaceae infections=aLq; hemolytic uremic syndrome, atypical, susceptibility to, 3=aLQ; spinocerebellar ataxia 36=alQ; deficiency of ferroxidase=alq; kayser-fleischer ring=alr; macular degeneration, age-related, 13=aLR; tdp-43 proteinopathyies=alR; arthus reaction=aLr; cirrhosis, familial, with pulmonary hypertension=als; rigid spine syndrome=aLs; acute hemorrhagic leukoencephalyitis=aLS; autosomal dominant parkinsonism=alS; heart cancer=alt; action tremor=alT; macular degeneration, age-related, 4=aLt; nemaline myopathy 7=aLT; calcaneal apophysitis=alU; cerebellar ataxia, mental retardation, and dysequilibrium syndrome 4=alu; properdin deficiency, x-linked=aLU; complement factor i deficiency=aLu; basal laminar drusen=aLv; end-position nystagmus=alV; attention deficit and disruptive behavior disorders=alv; properdin deficiency, type iii=aLV; properdin deficiency, type ii=aLW; reducing-body myopathy=aLw nervous system-degeneration=alW; cholestasis, intrahepatic, of pregnancy, 1=alw; simple febrile seizure=aLX; scapuloperoneal myopathy=aLx; dyssomnias=alX; idiopathyic chronic pancreatitis=alx; mitochondrial complex v (atp synthase) deficiency, nuclear type 1=aly; myotonia congenita=aLY; cataplexy and narcolepsy=alY; properdin deficiency disease=aLy; mitochondrial complex v (atp synthase) deficiency, atpaf2 type=alz; bronchiectasis with or without elevated sweat chloride 1=aLZ; multifocal choroiditis=aLz; amyloid polyneuropathy type i=alZ; nemaline myopathy=Am; endometrial adenocarcinoma=AM; alpha 1-antitrypsin deficiency=am; nicotinamide adenine dinucleotide coenzyme q reductase deficiency=aM; pure autonomic failure=ama; genetic diseases, x-linked=amA; colonic disease=aMA; lactose intolerance, adult type=aMa; osteomalacia=amB; lactase persistence=aMb; effects of heat=amb; typhoid fever=aMB; hepatobiliary disease=aMC; x-linked hypophosphatemiac rickets=amC; hereditary antithrombin iii deficiency=amc; pancreatitis idiopathyic=aMc; ileus=aMD; exotropia=amd; conotruncal anomaly face syndrome=amD; pancreas divisum=aMd; echngenic bowel=aMe; mite infestation=aME; protein c deficiency=ame; caudal duplication anomaly=amE; burkholderia infections=aMf; bicuspid aortic valve=amF; choroidal dystrophy, central areolar 2=amf; congenital secretory chloride diarrhea=aMF; uterus leiomyosarcoma=amg; 3b-hydroxysteroid dehydrogenase deficiency=aMG; oligodontia-colorectal cancer syndrome=amG; child nutrition disorders=aMg; epidermaolysa bullosa simplex and limb girdle muscular dystrophy=aMH; male infertility with large-headed, multiflagellar, polyploid spermatozoa=amh; congenital absence of vas deferens=aMh; tenth agenisi, selective, 1=amH; congenital absence of kidney=aMi; primary infertility=ami; thyroid cancer, follicular=aMI; hypodontia=ami; dysmorphic features=amj; autoimmune pancreatitis=aMj; cleft palate with cleft lip=amJ; severe hereditary factor viii deficiency disease=aMJ; wasting syndrome=amK; parainfluenza=aMk; nephrogenic syndrome of inappropriate antidiuresis=amk; hormone related neoplasm/cancer=aMK; hypertelorism with esophageal abnormality and hypospadias=aml; antibiotic-associated diarrhea=amL; fibrocystic disease of pancreas=aMl; temper tantrum=aML; pulmonary mycobacterium avium complex infection=aMm; driving under influence of alcohol or drugs=amM; familial diabetes insipidus=amm; congenital myasthenic syndrome with episodic apnea=aMM; cytomaegalovirus encephalyitis=amN; epileptic encephalyopathy, childhood-onset=aMN; chronic lung injury=aMn; familial central diabetes insipidus=amn; infectious disorder of bronchus=aMo; scoliosis, idiopathyic, susceptibility to, 3=aMO; multiple trauma=amo; amyloidosis, familial visceral=amO; idiopathyic bronchiectasis=aMp; paraproteinemias=amP; idiopathyic hypogonadotropic hypogonadism=aMP; mixed sensory-motor polyneuropathy=amp; hemodialysis-associated amyloidosis=amQ; bilateral agenisi=aMq; polydipsia, psychogenic=amq; hypogonadotropic hypogonadism 5 with or without anosmia=aMQ; distal ileal obstruction syndrome=aMr; kallmann syndrome 5=aMR; hypersexuality state=amr; peripheral neuroepithelioma=amR; plasmacytic leukemia=amS; chronic emphysema=aMs; hemifacial microsomia=aMS; chronic hyponatremia=ams; dysthymic disorder=amt; respiratory morbidity=aMt; blood group antigen p=amT; ear malformation=aMT; goldenhar syndrome=aMU; premature ejaculation=amu; muscular dystrophy-dystroglycanopathy (congenital with brain and eye anomalies), type a, 11=amU; teratospermia=aMu; krause-kivlin syndrome=amV; facial paralysis=aMV; inappropriate adh syndrome=amv; abnormal spermatogenesis=aMv; leukemia, large granular lymphocytic=amW; flat ductal epithelial atypia=amw; choanal atresia=aMW; hypotonic dehydration=aMw; autism, susceptibility to, 18=aMX; t-cell lymphocytosis=amX; aspartylglucosaminuria=amx; paranasal sinus disease=aMx; melancholia=amy; gastrointestinal system disease=aMy; hodgkin's lymphoma, nodular sclerosis=amY; right ventricular outflow tract obstruction=aMY; li-fraumeni syndrome 2=aMZ; maxillary sinusitis=aMz; azotemia=amz; multiple joint dislocations, short stature, craniofacial dysmorphism, and congenital heart defects=amZ; van der woude syndrome=An; thyroid adenoma=AN; parkinson's disease=an; spastic paraplegia type 7=aN; encounter due to estrogen receptor status=aNa; exoskeletal myxoid chondrosarcoma=aNA; axenfeld-rieger syndrome=anA; spastic paraplegia 26, autosomal recessive=ana; endometrial diseases=aNb; mobius syndrome=anB; chronic non-a non-b hepatitis=aNB; congenital disorder of glycosylation type 2d=anb; childhood teratoma=aNc; congenital disorder of glycosylation, type iiid=anc; fibrous bands=anC; fumarase deficiency=aNC; endometrioid ovary carcinoma=anD; ehlers-danlos syndrome progeroid typ=and; skeletal malformation=aNd; social anhedonia=aND; muscular dystrophy-dystroglycanopathy (congenital with brain and eye anomalies), type a, 13=ane; congenital anomaly of skeletal bone=aNe; luft disease=aNE; diabetes mellitus, insulin-dependent, 4=anE; bardet-biedl syndrome 1=anF; islet cell tumor syndrome=aNf; carnitine deficiency=aNF; meckel syndrome, type 9=anf; cecum adenocarcinoma=aNg; bardet-biedl syndrome 10=anG; meckel syndrome, type 10=ang; mitochondrial myopathy=aNG; pyruvate decarboxylase deficiency=aNH; bardet-biedl syndrome 12=anH; hypercholanemia, familial=anh; small intestine neuroendocrine neoplasm=aNh; brain stem glioma=aNI; zollinger-ellison syndrome=aNi; mckusick kaufman syndrome=anI; hemolytic uremic syndrome, atypical, susceptibility to, 1=ani; down syndrome critical region=anj; collagenous colitis=aNj; bardet-biedl syndrome 2=anJ; carnitine palmitoyltransferase ii deficiency=aNJ; gastrinom=anK; lymphocytic colitis=aNk; head-cancer=ank; mandibular hypoplasia=aNK; asthma-related traits, susceptibility to, 7=aNl; cornealia de lange syndrome=aNL; bardet-biedl syndrome 4=anL; periampullary adenocarcinoma=anl; bardet-biedl syndrome 7=anM; myopathy, myofibrillar, bag3-related=anm; herniated disk=aNm; megalocornea=aNM; gram-positive bacterial infections=aNn; catatonia=aNN; cardiomyopathy, dilated, 1hh=ann; exencephaly=anN; bardet-biedl syndrome 9=anO; infectious pustular vulvovaginitis=ano; chitotriosisdase deficiency=aNo; chromosome 15g13.3 microdeletion syndrome=aNO; crescentic glomerulonephritis=anP; filariasis=aNp; airway constriction=aNP; benzodiazepine abuse=anp; pemphigu=aNQ; nestor-guillermo progeria syndrome=anq; rapidly progressive glomerulonephritis=anQ; myoglobinuria, recurrent=aNq; endometrial clear cell adenocarcinoma=anr; familial dilated cardiomyopathy=anR; muscular dystrophy, congenital, megaconial type=aNr; bladder disease=aNR; myasthenic syndrome, congenital, fast-channel=aNS; contiguous abcd1/dxs1375e deletion syndrome=anS; pontocerebellar hypoplasia, type 8=aNs; multifocal motor neuropathy=ans; myasthenic syndrome, congenital, postsynaptic slew-channel=aNT; cornea cancer=ant; htlv-ii infections=anT; frontotemporal dementia, chromosome 3-linked=aNt; tumor predisposition syndrome=anu; tobacco dependencye=aNU; developmental verbal dyspraxia=anU; amyotrophyic lateral sclerosis, chmp2b-related=aNu; estrogen resistance=anV; benign pleural mesothelioma=anv; epilepsy, nocturnal frontal lobe, type 4=aNV; anemia, hypochromic microcytic=aNv; oral pharyngeal disorder=anW; cataract, posterior polar, 3=aNw; benign intermediate mesothelioma=anw; autosomal dominant nocturnal frontal lobe epilepsy=aNW; frontal lobe epilepsy=aNX; yersinia infections=anX; paraganglioma=anx; duane retraction syndrome 2=aNx; tuberculosis, extrapulmonary=anY; duane syndrome=aNy; iridogoniodysgenesis, dominant type=any; lung cancer susceptibility 2 (disorder)=aNY; rieger eye malformation sequence=anz; smokers lung=aNZ; manifest vertical sguint=aNz; breast cancer (non-specific) premenopausal=anZ; aortic aneurysm, familial thoracic 6=Ao; breast ductal carcinoma=AO; atherosclerotic occlusive disease=aO; cystic fibrosis=ao; bamforth syndrome=aoa; uterine cervical dysplasia=aoA; epilepsy, nocturnal frontal lobe, type 1=aOa; deafness, autosomal recessive 48=aOA; electroencephalyogram, low-voltage=aOb; butyrylcholinesterase deficiency=aob; thomsen disease=aOB; venous retinal branch occlusion=aoB; lipodystrophy, familial partial, type 5=aOC; ring chromosome 20 syndrome=aOc; chronic idiopathyic neutropenia=aoC; gestational trophyoblastic disease=aoc; bare lymphocyte syndrome, type ii, complementation group a=aOD; superinfection=aoD; nocturnal epilepsy=aOd; apnea, postanesthetic=aod; north american indian childhood cirrhosis=aOE; butyrylcholinesterase deficiency, fluoride-resistant, Japanese type=aoe; schizephrenia 13=aOe; oropharynx (excludes nasopharynx)=aoE; weakness of limb=aof; ichthyosis, leukocyte vacuoles, alopecia, and sclerosisng cholangitis=aOF; myasthenic syndrome, congenital, type id=aOf; myelokathexis=aoF; attention deficit-hyperactivity=aog; wolfram syndrome 2=aOG; canarypox=aoG; epilepsy, nocturnal frontal lobe, type 3=aOg; mixed cryoglobulinemia=aoH; skin manifestations=aOh; wolfram syndrome=aOH; adult-onset obesity=aoh; pena shokeir syndrome, type 1=aOi; primary cutaneous b-cell lymphoma=aoI; prolonged neuromuscular block=aoi; diabetes insipidu=aOI; growth hormone treatment=aoJ; clinically isolated syndrome=aOJ; pregnancy complications, parasitic=aOj; churg-strauss syndrome=aoj; maple syrup urine disease, type ia=aok; lymphocytic lymphoma=aoK; intrauterine infection=aOK; ehlers-danlos syndrome, musculocontractural type 1=aOk; follicular lymphoma, grade 1=aoL; filarial elephantiasis=aOL; branched-chain ketoacid dehydrogenase kinase deficiency=aol; ehlers-danlos syndrome 6b=aOl; kidney clear cell sarcoma=aOM; joint instability=aOm; multicystic dysplastic kidney=aoM; neoplasms, plasma cell=aom; follicular neoplasm=aon; ventricular septal defect 2=aON; spondyloepiphyseal dysplasia, omani type=aOn; malignant lymphoma-lymphocytic, intermediate differentiation=aoN; atrial septal defect 8=aOO; in situ cancer=aoO; gastritis h pylori=aoo; apparent mineralocorticoid excess=aOo; larsen syndrome, recessive type=aOp; plasma cell tumor, malignant=aop; primary cutaneous diffuse large cell b-cell lymphoma=aoP; cervical dystonia, primary=aOP; adult-onset dystonias=aOQ; sertoli-leydig cell tumor of intermediate differentiation=aOq; follicular non-hodgkin's lymphoma, large cell (clinical)=aoQ; overnutrition=aoq; hay-wells syndrome=aOR; plasma cell neoplasm=anr; sertoli-leydig cell tumor=aOr; stage i endometrial cancer=aoR; colon mucinous adenocarcinoma=aOs; rapp-hodgkin syndrome=aOS; enterochromaffin-like cell carcinoid=aoS; fetal hemoglobin quantitative trait locus 5=aos; sindbis virus infection=aoT; hemoglobinopathy=aot; macular corneal dystrophy, type ii=aOt; propping zerres syndrome=aOT; codependency=aoU; corneal dystrophy, fuchs' endothelial, 1=aou; corneal dystrophy=aOu; ectrodactyly-cleft lip/palate syndrome=aOU; foot deformities, congenital=aOV; macular corneal dystrophy=aOv; diamond-blackfan anemia 1=aov; essential mixed cryoglobulinemia=aoV; minor oral aphthous ulceration=aOW; temtamy preaxial brachydactyly syndrome=aOw; syndactyly, type iv=aow; endometrial cancer stage=aoW; extranodal lymphoma=aoX; persistent polyclonal b-cell lymphocytosis=aox; cleft lip, isolated=aOX; tumoral calcinosis, hyperphosphatemiac, familial=aOx; hyperostosis-hyperphosphatemia syndrome=aOy; follicular lymphoma, grade 3=aoY; hypertrichosis congenital generalized x-linked=aoy; limbal stem cell deficiency=aOY; depletion of mitochondrial dna=aoz; usher syndrome, type ij=aOz; clouston syndrome=aOZ; laryngeal papillomatosis=aoZ; obstructive lung disease=ap; mural thrombus of heart=aP; aortic aneurysm, familial thoracic 1=Ap; von economo's disease=AP; cerebral lymphoma=apA; acalculous cholecystitis=aPA; atypical burkitt's lymphoma=apa; gray zone lymphoma=aPa; fibrillary astrocytoma=apB; gelatinous drop-like corneal dystrophy=aPB; aphthous stomatitis=aPb; epithelial inclusion cyst=apb; protoplasmic astrocytoma=apC; ulcerative stomatitis=aPc; cerebellar decompression injury=ape; deafness, autosomal recessive 29=aPC; lymphoma, follicular, grade 2=apd; precursor b lymphoblastic lymphoma/leukemia=apD; exertional rhabdomyolysis=aPd; manz syndrome=aPD; intraocular lymphoma=apE; lymphoma of intestine=aPE; punctate inner choroidopathy=aPe; venous hypertension=ape; urinary outflow obstruction=apf; menstrual spotting=aPF; liver lymphoma=apF; hepatic encephalyopathy=aPf; cold-induced sweating syndrome 2=aPg; piebaldism=aPG; mast-cell leukemia=apG; disuse osteoporosis=apg; Scheuermann's disease=aPH; grade 3b follicular lymphoma=aph; xeroderma pigmentosaum=apH; cold-induced sweating syndrome 1=aPh; survival motor neuron spinal muscular atrophy=apI; congenital myotonia, autosomal recessive form=aPi; drugged state=api; familial chronic mucocutaneous candidiasis=aPI; dermatitis and eczema=apJ; vulvovaginal candidiasis=aPJ; morphea=apj; obscure african cardiomyopathy=aPj; precursor b-cell lymphoblastic lymphoma=apk; thymus neoplasms=apK; acute gastric mucosal erosison=aPK; myotonia levior=aPk; intestinal pseudo-obstructio=aPL; myotonic disease=aPl; nervous system cancer=apl; functionless pituitary adenoma=apL; cleft lip with or without cleft palate=apM; thyroid lymphoma=apm; myotonic dystrophy type=aPm; ceroid lipofuscinosis, neuronal, 2=aPM; juvenile disease=aPN; rabies=apn; megalencephalyic leukoencephalyopathy with subcortical cysts=aPn; otofaciocervical syndrome 1=apN; htlv infections=apO; retinitis=apo; infantile disease=aPO; leukoencephalyopathy with ataxia=aPo; epilepsy with grand mal seizures on awakening=aPp; oculopharyngeal muscular dystrophy=app; alkalemia=aPP; hodgkin lymphoma, nodular lymphocyte predominance=apP; primary cutaneous large b-cell lymphoma of the leg=apQ; ceroid lipofuscinosis, neuronal 5=aPQ; werdnig-hoffmann disease=apq; low molecular weight proteinuria with hypercalciuria and nephrocalcinosis=aPq; parkinson disease 9=aPR; idiopathyic cd4-positive t-lymphocytopenia=apR; granular cell tumor=apr; nephrolithiasis, x-linked recessive, with renal failure=aPr; muscle benign neoplasm=aps; renal tubular transport disease=aPs; ceroid lipofuscinosis, neuronal 8=aPS; composite lymphoma=apS; dent disease=aPt; cryoglobulinemia=apt; high grade b-cell non-hodgkin's lymphoma=apT; adult neuronal ceroid lipofuscinosis=aPT; ceroid lipofuscinosis, neuronal, 6=aPU; osteopetrosis, autosomal recessive 4=aPu; hypercarotenemia and vitamin a deficiency, autosomal dominant=apU; female reproductive endometrioid cancer=apu; ceroid lipofuscinosis, neuronal, 8=aPV; osteopetrosis, autosomal dominant 2=aPv; microphthalmia, syndromeic 2=apV; thoracic outlet syndrome=apv; thinness=aPW; bartter syndrome, type 4a=aPw; inverted papilloma=apw; microphthalmia, syndromeic 1=apW; cervical adenocarcinoma=apx; bartter syndrome, type 4b=aPx; anorexia and bulimia syndrome=aPX; myeloid metaplasia=apX; eosinophilic leukemia=apY; mesenchymal chondrosarcoma=apy; bartter syndrome, type 3, with hypocalciuria=aPy; winter depression=aPY; sleep-wake schedule disorder, advanced phase type=aPZ; hypokalemic alkalosis=aPz; focal epithelial hyperplasia=apz; autosomal recessive agammaglobulinemia=apZ; lung oat cell carcinoma=AQ; mural thrombus=aQ; multisystemic smooth muscle dysfunction syndrome=Aq; liver cancer=aq; reversible cerebral vasoconstriction syndrome=aqA; circadian rhythm disorder=aQa; stereotypic movement disorder=aqa; amaurosis hypertrichosis=aQA; delayed sleep phase=aQb; post-traumatic vegetative state=aqB; jalili syndrome=aQB; mitochondrial complex iii deficiency=aqb; high-functioning autism=aQc; psychosocial stressor=aqC; mitochondrial complex iii deficiency, nuclear type 1=aqe; aortic valve insufficienc=aQC; adult attention deficit hyperactivity disorder=aqD; q fever=aQd; leigh syndrome due to mitochondrial complex iii deficiency=aqd; iv drug use=aQD; gonadal dysgenesis xx type deafness=aQe; ubiquinone dehydrogenase=aqe; spine degeneration=aqE; polysubstance abuse=aQE; hepatic veins thrombosis=aqf; perrault syndrome 3=aQf; nerve pain=aqE; perfectionism=aQF; hydroxyacyl-coa dehydrogenase, type 2, deficiency=aqg; intrapartum fetal hypoxia=aqG; deafness, autosomal recessive 81=aQg; abdominal discomfort=aQG; dissociative disorder=aqH; tobacco addiction, susceptibility to=aqh; retinitis pigmentosa 61=aQh; cold-induced sweating syndrome=aQH; eating disorder=aqI; myopathy, congenital, compton-north=aQI; wounds, penetrating=aqi; circling behavior=aQi; epilepsy, familial adult myoclonic, 5=aQJ; pain, referred=aqj; riley-day syndrome=aqJ; auditory system disease=aQj; pitt-hopkins syndrome=aQK; aggressive periodontitis, localized=aQk; herein abuse=aqk; wagr syndrome=aqK; cortical dysplasia-focal epilepsy syndrome=aQL; conversion disorder=aqL; social stress=aql; adult atopic dermatitis=aQl; Wernicke encephalyopathy=aqM; aortic stenosis symptomatic=aQm; language development disorders=aQM; methamphetamine dependencye=aqm; postpartum depression=aqN; autism, susceptibility to, 15=aQN; telangiectasisa, hereditary benign=aQn; brain morphology=aqn; impulsive aggression=aqo; pitt-hopkins-like syndrome 1=aQO; spinocerebellar ataxia 31=aqO; porokeratosis=aQn; selective mutism=aQP; neurologic manifestations=aQp; depressive episode, unspecified=aqp; marie's cerebellar ataxia=aqP; chronic depression=aqq; retinitis pigmentosa 49=aQq; stuttering=aQQ; spinocerebellar ataxia 4=aqQ; neurodegeneration with brain iron accumulation 6=aQR; achromatopsia 3=aQr; depressive disorder, treatment-resistant=aqr; hemangiom=aqR; achromatopsia 2=aQs; pseudohypoparathyroidism and pseudopseudohypoparathyroidism=aQS; bestrophyinopathy=aqS; psychiatric hospitalization=aqs; psychiatric diagnosis=aqt; achromatopsia 1=aQt; deafness, autosomal dominant 9=aQT; doyne honeycomb retinal dystrophy=aqT; achromatopsia=aQu; self-induced vomiting=aqu; dilated cardiomyopathy 3b=aqU; usher syndrome, type 1f=aQU; feeling despair=aqv; late-onset retinal degeneration=aqV; retinitis pigmentosa 45=aQv; dominant sensorineural hearing loss=aQV; retinitis pigmentosa, concentric=aqW; progressive retinal atrophy=aQw; autoimmune sensorineural hearing loss=aQW; emotional disturbance=aqw; clinical anxiety=aqx; stargardt disease 1=aQx; macular dystrophy, vitelliform, adult-onset=aqX; inner ear disease=aQX; acute disseminated encephalyitis=aqy; congenital hypothyroidis=aQy; ocular hypotension=aQY; macular dystrophy, vitelliform=aqY; hypomagnesemia 6, renal=aQz; sarcoglycanopathyies=aqZ; vegetative state=aqz; labyrinthine disease=aQZ; pancreatitis=ar; moyamoya disease 5=Ar; gastrinoma=AR; nervous system disease=aR; split-hand/foot malformation=arA; vestibular disease=aRa; fibrochondrogenesis 2=aRA; macular dystrophy, concentric annular=ara; grip strength decreased=aRB; limb defects=arB; congenital disorder of glycosylation, type 2g=aRb; microcornea, rod-cone dystrophy, cataract, and posterior staphyloma=arb; exostosis=aRC; cerebrocostomandibular-like syndrome=aRc; glucose-galactose malabsorption=arC; dmd-associated dilated cardiomyopathy=arc; cerebrocostomandibular syndrome=aRd; sorsby's fundus dystrophy=ard; paroxysmal ventricular fibrillation=arD; smith-mccort dysplasia=aRD; deformity of limb=are; erythrokeratoderma=arE; epidermaolysis bullosa, junctional, non-herlitz type=aRE; congenital disorder of glycosylation, type iij=aRe; epidermaolysis bullosa, junctional, localisata variant (disorder)=aRF; congenital disorder of glycosylation, type iii=aRf; myopathy with abnormal lipid metabolism=arf; carbohydrate intolerance=arE; inherited platelet disorder=arG; congenital disorder of glycosylation, type iil=aRg; age-related osteoporosis=arg; linear iga bullous dermatosis=aRG; high weight=arh; duane retraction syndrome=arH; shaheen syndrome=aRh; junctional epidermaolysis bullosa mitis=aRH; lichen planus pemphigoides=aRI; idiopathyic juvenile osteoporosis=ari; glanzmann's thrombasthenia=arI; congenital disorder of glycosylation type 2e=aRi; autoimmune skin disease=aRJ; wet macular degeneration=arj; congenital disorder of glycosylation, type iih=aRj; leukocyte adhesion deficiency=arJ; cataract, cortical, juvenile-onset=ark; localized junctional epidermaolysis bullosa=aRK; opitz gbbb syndrome, x-linked=aRk; poikiloderma of kindler=arK; cicatricial pemphigoid=aRL; epidermaolysis bullosa letalis=arL; metaphyseal chondrodysplasia schmid type=aRl; cataract, age-related nuclear=arl; mast-cell sarcoma=aRM; generalized epidermaolysis bullosa simplex=arM; arthropathy, progressive pseudorheumatoid, of childhood=aRm; cataract, autosomal dominant=arm; congenital anosmia=aRN; coxa vara (acquired)=aRn; cataract 12, multiple types=arn; rundown=arN; cartilage disease=aRo; d-2-hydroxyglutaric aciduria 2=aRO; cataract, autosomal dominant, multiple types 1=aro; epidermaolysis bullosa simplex=arO; short-sleeper=arP; vitamin d-resistant rickets, hereditary=arp; osteogenesis imperfecta, recessive perinatal lethal=aRP; weaver syndrome=aRp; oi/eds combined syndrome=aRQ; choline deficiency disease=arQ; hyaloideoretinal degeneration of wagner=aRq; dental fluorosis=arq; fibrochondrogenesis 1=aRr; heterotaxy, visceral, 5, autosomal=arR; vitamin d-resistant rickets=arr; spinal fractures=aRR; oral manifestations=aRS; lumbar disc herniation, susceptibility to=aRs; rickets=ars; polycystic kidney disease 1=arS; soft tissue injuries=aRT; saethre-chotzen syndrome=art; vitreous syneresis=aRt; renal dysplasia, cystic, susceptibility to =arT; renal dysplasia diffuse cystic=arU; fibrochondrogenesi=aRu; ossifying fibroma=aru; giant cell fibroblastoma=aRU; deafness, autosomal dominant 13=aRv; bruck syndrome=aRV; polycystic kidney-body part=arV; camurati-engelmann disease=arv; brittle bone disorder=aRW; spinal muscular atrophy, lower extremity-predominant, 2, autosomal dominant=arW; pierre robin syndrome with fetal chondrodysplasia=aRw; scleroatonic muscular dystrophy=arw; juvenile spinal muscular atrophy=arX; chondrodysplasia punctata, x-linked dominant type=arx; lipodermatosclerosis=aRX; deafness, autosomal recessive 53=aRx; peritoneal mesothelioma=arY; chief cell adenocarcinoma=ary; megaepiphyseal dwarfism=aRy; collagen disease=aRY; stickler syndrome, type 3=aRz; caffey disease=aRZ; split-hand/foot malformation with long bone deficiency=arz; lesion of stomach=arZ; vascular disease=aS; astrocytoma=as; aortic aneurysm and dissection=As; follicular adenoma=AS; laron syndrome=asA; extranodal marginal zone b-cell lymphoma=asa; cervical incompetence=aSa; maxillofacial abnormalities=aSA; familial amyloid polyneuropathy, type iv=asB; pseudosarcomatous fibromatosis=asb; aortic aneurysm, familial abdominal 1=aSB; sclerosteosis=aSb; autosomal recessive chronic granulomatous disease=asC; gastrointestinal lymphoma=asc; ehlers-danlos syndrome, cardiac valvular form=aSc; cystocele=aSC; acrogeria=aSD; childhood malignant schwannoma=asd; osteogenesis imperfecta with blue sclerae and normal teeth=aSd; brucellosis=asD; old thrombus=aSe; hiatus hernia=aSE; bruton-type agammaglobulinemia=asE; intrinsic asthma=ase; alexander disease=asF; type iii ehlers-danlos syndrome=aSF; stage iv skin melanoma=asf; fasciitis=aSf; melorheostosis=aSG; basal-like breast carcinoma=asG; serum creatinine=aSg; degenerative myopia=asg; cervical polyp=asH; maturity-onset diabetes of the young, type 11=ash; platyspondylic lethal skeletal dysplasia, torrance type=aSh; rectal prolapse=aSH; stickler syndrome, type i, nonsyndromeic ocular=aSi; haematotoxicity=asi; childhood medulloblastoma=asi; angiopathy, hereditary, with nephropathy, aneurysms, and muscle cramps=aSI; chromosome instability syndromes=asj; osteogenesis imperfecta, type xiii=asJ; stickler syndrome, type 1=aSj; cerebral autosomal recessive arteriopathy with subcortical infarcts and leukoencephalyopathy=aSJ; hepatitis, infectious canine=aSK; spondylometaphyseal dysplasia, kozlowski type=aSk; rothmund-thomson syndrome=ask; pneumocystis infections=asK; epiphyseal dysplasia, multiple, with myopia and conductive deafness=aSl; irido-corneal dysgenesis=aSL; mutagen sensitivity=asl; epidermaolysis bullosa dystrophyica=asL; trichorhinophalangeal syndrome type ii=asM; osteoarthritis with mild chondrodysplasia=aSm; agammaglobulinemia 4, autosomal recessive=asm; paralytic stroke=aSM; persistent generalized lymphadenopathy=asn; ovarian dysgenesis 2=asN; spondyloperipheral dysplasia short ulna=aSn; porencephaly 2=aSN; complement component deficiency=asn; czech dysplasia, metatarsal type=aSo; pierson syndrome=aSO; premature ovarian failure 4=asO; parasitic helminthiasis infectious disease=asp; corneal dystrophy, posterior polymorphous, 1=aSP; jaw abnormalities=aSp; ovarian insufficiency=asP; alport syndrome, autosomal recessive=aSQ; 46 xx gonadal dysgenesis=asQ; mast cell neoplasm=asq; rhegmatogenous retinal detachment, autosomal dominant =aSq; benign mastocytoma=asr; hematuria, benign familial=aSR; ossification of the posterior longitudinal ligament of the spine=asR; vitreoretinopathy with phalangeal epiphyseal dysplasia=aSr; cholesteatoma=asS; toxoplasmosis, ocular=aSs; alport syndrome, autosomal dominant=aSS; chronic venous insufficiency=ass; trichorhinophalangeal syndrome=aSt; trigeminal neuralgia =asT; biogenesis of lysosome-related organelles complex 1, subunit 3=ast; alport syndrome, recessive type=aST; bacterial osteomyelitis=asu; congenital infectious disease=aSu; root resorption=asU; benign hematuria=aSU; hermansky-pudlak syndrome 9=asv; avascular necrosis of the capital femoral epiphysis=aSv; chondroblastoma=asV; retinal lattice degeneration=aSV; oculodentodigital dysplasia=asW; eye diseases, hereditary=aSW; emphysema, hereditary pulmonary=asw; claudication=aSw; chronic idiopathyic pulmonary fibrosis=aSX; hyperbiliverdinemia=asx; orofacial cleft 11=asX; congenital vitreous anomaly=aSx; empty vitreous=aSy; axenfeld-rieger syndrome, type 3=asY; anterior lenticonus=aSY; pygmy=asy; nutrition disease=asz; microphthalmia, syndromeic 6=asZ; antisynthetase syndrome=aSZ; legg-calve-perthes disease=aSz; chronic obstructive pulmonary disease=at; mydriasis, congenital=At; choroideremia=AT; breast cancer=aT; short syndrome=ata; sporadic primary pulmonary hypertension=atA; waardenburg's syndrome=aTa; epiphyseal dysplasia, multiple, 6=aTA; vascular occlusion=atB; acguired eguinovarus deformity=aTB; limb deformities, congenital=atb; esophagus leiomyoma=aTb; anorectal atresia=atc; deafness, x-linked 6=aTc; myeloblastosis=atC; epiphyseal dysplasia, multiple, 2=aTC; stickler syndrome, type v=aTD; leiomyomatosis, esophageal and vulval, with nephropathy=aTd; banti's syndrome=atD; aortic sclerosis=atd; multiple mitochondrial dysfunctions syndrome 2=atE; chronic sciatica=aTE; kyphoscoliosis deformity of spine=aTe; aortic valve sclerosis=ate; dysmorphism=atf; multiple mitochondrial dysfunctions syndrome=atF; corneal thinning=aTf; endoskeletal dysplasia=aTF; epiphyseal dysplasia, multiple, 3=aTG; hypertrophyic obesity=atg; floppy=aTg; bisphosphoglycerate mutase=atG; cleft palate-lateral synechia syndrome=ath; incontinentia pigmenti achromians=aTh; deficiency of bisphosphoglycerate mutase=atH; carnevale syndrome=aTH; mucopolysaccharidosis i=ati; oculopalateoskeletal syndrome=aTI; keratosis pilaris=aTi; polycythemi=atI; peptic esophagitis=atj; dengue shock syndrome=atJ; malpuech facial clefting syndrome=aTJ; myosclerosis, autosomal recessive=aTj; holt-oram syndrome=atk; contagious pustular dermatitis=aTk; dog diseases=aTK; bacterial pneumonia=atK; cirrhosis and chronic liver disease=aTL; benign scapuloperoneal muscular dystrophy with cardiomyopathy=aTl; craniosynostosi=atL; hemochromatosis, type 2=atl; polymyalgia rheumatica=atM; proximal weakness=aTm; sclerosteosi=atm; epiphyseal dysplasia, multiple, 1=aTM; pseudochondroplasia=aTN; andersen-tawil syndrome=atN; degenerative spondylolisthesis=atn; epidermaolysis bullosa, pretibial=aTn; renal artery occlusion=atn; pain, intractable=aTO; transient bullous dermaolysis of the newborn=aTo; limb-girdle muscular dystrophy type 2a=atO; corneal fibrosis=atp; epidermaolysis bullosa dystrophyica, pasini type=aTp; hearing loss, cisplatin-induced, susceptibility to =aTP; nephrotic syndrome, type 3=atP; noonan syndrome 7=atQ; spondylolysis=atq; nociceptive pain=aTQ; epidermaolysis bullosa pruriginosa=aTq leopard syndrome 3=atR; toenail dystrophy, isolated=aTr; spinal stenosis=atr; response to pain=aTR; epidermaolysis bullosa with congenital localized absence of skin and deformity of nails=aTs; disorder of endocrine ovary=aTS; diaphanospondylodysostosis=ats; abnormalities, multiple=atS; epidermaolysis bullosa dystrophyica inversa, autosomal recessive=aTt; pain syndrome=aTT; neoplasms, multiple primary=atT; polyposis syndrome, hereditary mixed, 2=att; epidermaolysis bullosa dystrophyica, autosomal recessive, localisata variant=aTu; premenstrual dysphoric disorder=aTU; skin/hair/eye pigmentation, variation in, 2=atU; chromosome 10q23 deletion syndrome=atu; chondromalacia=atv; dominant dystrophyic epidermaolysis bullosa=aTv; papillary microcarcinoma=atV; chronic tension-type headache=aTV; generalized dystrophyic epidermaolysis bullosa=aTw; low grade serous carcinoma=atW; ebstein anomaly=atw; maduromycosis=aTW; melanoma stage=atX; cushing's symphalangism=atx; acute postoperative pain=aTX; localized recessive dystrophyic epidermaolysis bullosa=aTx; desmoplastic melanoma=atY; chondrodysplasia, acromesomelic, with genital anomalies=aty; homicidal=aTY; epidermaolysis bullosa acguisita=aTy; pulmonary hypertension, primary, fenfluramine-associated=atz; anxiety generalized=aTZ; serrated polyp=atZ; corneal dystrophy, posterior polymorphous, 2=aTz; liposarcoma=au; patent ductus arteriosus=Au; cryptogenic organizing pneumonia=AU; dystonia=aU; harderoporphyria=aUA; chronic daily headache=aUa; nevus cell =aua; giant cell glioblastoma=auA; manic symptom=aUb; serrated adenocarcinoma=aub; mucinous cystadenocarcinoma=auB; aplasia cutis congenita, reticulolinear, with microcephaly, facial dysmorphism, and other congenital anomalies=aUB; familial multiple coagulation factor deficiency i=aUC; childhood anaplastic astrocytoma=auc; stereotyped behavior=aUc; craniopharyngioma=auC; lobular panniculitis=aud; narcissism=aUd; papillary craniopharyngioma=auD; von willebrand disease type 2n=aUD; acneiform dermatitis =auE; widespread disease=aue; stimulant dependencye=aUe; von willebrand disease type 2m=aUE; familial nonmedullary thyroid cancer=auf; common bile duct neoplasm=auF; dysfibrinogenemia=aUF; aggressive personality=aUf; prothrombin gene mutation=aUG; ovarian low malignant potential tumorur=aug; maxillary neoplasm=auG; chronic low back pain=aUg; chronic pain syndrome=aUh; pleomorphic xanthoastrocytoma=auH; mild hereditary factor viii deficiency disease=aUH; metastatic malignant peripheral nerve sheath turner=auh; free-floating anxiety=aUi; pilocytic astrocytoma of cerebellum=auI; eruptive melanocytic nevi=aui; moderate hereditary factor viii deficiency disease=aUI; carrier of hereditary factor viii deficiency disease=aUJ; headache severe=aUj; stage iii melanoma=auj; optic nerve astrocytoma=auJ; impulse control disorder=aUk; ovarian germ cell teratoma=auK; endocrine carcinoma=auk; familial multiple factor deficiency syndrome, type i=aUK; acquired haemophilia=aUL; urachal adenocarcinoma=aul; malignant struma ovarii=auL; ocular motility disease=aUl; perianal fistula=aum; severe hereditary factor viii deficiency disease without inhibitor=aUM; lung adenoma=auM; eumycotic mycetoma=aUm; speech disorder=aUn; malignant choroid melanoma=auN; irreversible pulpitis=aUN; infratentorial cancer=aun; multiple system atrophy 1, susceptibility to =aUo; follicular dendritic cell sarcoma=auU; pseudotumor cerebri=aUO; cerebellum cancer=auo; central retinal veins occlusion=aUP; metanephric adenoma=auP; articulation disorder=aup; coenzyme q10 deficiency, primary, 6=aUp; common cold=auq; hyperferritinemia, hereditary, with congenital cataracts=aUQ; malignant iris melanoma=auQ; coenzyme q10 deficiency, primary, 5=aUq; frontal lobe neoplasm=aur; hcl-v=auR; benign essential blepharospasm=aUR; electron transport chain deficiencyies, mitochondrial=aUr; muir-torre syndrome=auS; hepatitis, animal=aUS; syndactyly cenani lenz type=aUs; nodular goiter=aus; cryptosporidiosis=auT; pasteurellaceae infections=aUT; sclerosteosis 2=aUt; alexia=aut; preeclampsia/eclampsia 5=aUu; rigidity and multifocal seizure syndrome, lethal neonatal=auU; familial apoceruloplasmin deficiency=aUU; isovaleric acidemia=auu; riddle syndrome=auV; basal ganglion degeneration=aUV; polysyndactyly=aUv; panniculitis=auv; iron metabolism disease=aUW; conjunctival cancer=auw immunodeficiency 8=aUw; breast cancer 3=auW; hemosiderosis=aUX; li-fraumeni-like syndrome=aUX; leigh syndrome due to mitochondrial complex iv deficiency=aUx; malignant conjunctiva melanoma=aux; cardioencephalyomyopathy, fatal infantile, due to cytochrome c oxidase deficiency 2=aUy; high grade serous carcinoma=auY; infarct of liver=aUY; mandibular cancer=auy; breast cancer stage=auZ; blepharospasm=aUZ; exocrine pancreatic insufficiency, dyserythropoietic anemia, and calvarial hyperostosis=aUz; struma ovarii=auz; lung benign neoplasm=av; hereditary spastic paraplegia=aV; subfertility=AV; loeys-dietz syndrome=Av; ocular cancer=avA; febrile seizures, familial, 11=aVa; atypical medullary carcinoma=ava; poikiloderma with neutropenia=aVA; occult malignancy=avb; floating-harbor syndrome=aVB; turner of exocrine pancreas=avB; epilepsy, familial temporal lobe, 5=aVb; pulmonary thromboembolism=aVc; ovarian carcinosarcoma=avC; chromosome 16p13.3 deletion syndrome=aVC; breast cancer, familial male=avc; lupus erythematodes=aVD; breast secretory carcinoma=avD; hyperproinsulinemia=aVd; pelvic cancer=avd; carboxypeptidase n deficiency=aVe; neonatal leukemia=aVE; spinal cord primitive neuroectodermal neoplasm=avE; occult carcinoma=ave; sexual precocity=aVF; curb=avf; antley-bixler syndrome=avF; hereditary coproporphyria=aVf; cleft palate x-linked=aVg; atrioventricular septal defect, partial, with heterotaxy syndrome=aVG; lobular carcinoma in situ=avg; severe anemia=avG; atrioventricular septal defect, susceptibility to, 2=aVH; cleft palate with ankyloglossia=aVh; loss of interest=avh; adrenal hyperplasia=avH; nonproliferative fibrocystic disease=avi; complete atrioventricular septal defect=aVI; coproporphyria=aVi; idiopathyic epilepsy=avi; atrioventricular septal defect: atrial and ventricular components=aVJ; hypergonadotropic amenorrhea =avJ; infection due to brucella suis=aVj; difficulty sleeping=avj; malignant neoplasm of abdomen=avk; maturation defect=aVK; chromosome 3, monosomy 3p=avK; erythropoietic protoporphyri=aVk; obesity in adolescence=avl; la crosse encephalyitis=aVl; cystic ovaries=avL; acth deficiency, isolated=aVL; psychophysiologic disorders=aVM; breast carcinoma in situ=avm; testicular dysfunction=avM; malaria, severe, resistance to =aVm; fecal peritonitis=aVN; mouth disease=avn; gonadotrophy adenoma=avN; proliferative nephritis unspecified=aVn; hyperprolactinemia=avO; dysplastic nevus syndrome=avo; systemic lupus erythematosus, susceptibility to, 9=aVo; sarcoid arthritis=aVO; female reproductive organ cancer=avp; pituitary apoplexy=aVP; immunodeficiency, common variable, 7=aVp; panhypopituitarism=avP; charge syndrome=avQ; hypothalamic disease=aVQ; uveal cancer=avq; oral hairy leukoplaki=aVq; fallopian tube carcinoma=avr; dyspnea, paroxysmal=aVR; mental retardation, autosomal recessive 34=aVr; perry syndrome=avR; fallopian tube cancer=avs; functional colonic disease=aVS; retinitis pigmentosa 12=aVs; hereditary persistence of fetal hemoglobin thalassemia=avS; stuve-wiedemann syndrome=aVT; leber congenital amaurosis 8=aVt; stinging sensation=avT; microglandular adenosis=avt; familiar ovarian carcinoma=avu; nut midline carcinoma=avO; kaposi varicelliform eruption=aVU; anetoderma=aVu; xeroderma pigmentosum, group e=aVV; slow acetylator due to n-acetyltransferase enzyme variant=avV; microglandular adenosis of breast=avv; hyperopia=aVv; inflammatory disorder of breast=aVW; incisional hernia=avW; retinal telangiectasisa=aVw; fanconi anemia, complementation group d1=avw; acute uveitis=aVX; pituitary dwarfism 1 =avx; mental retardation, autosomal recessive 2=aVx; cerebral salt-wasting syndrome=avX; cocaine use=aVy; chorioretinitis=avY; pneumococcal bacteraemia=aVY; breast-ovarian cancer, familial, susceptibility to, 2=avy; vulva sguamous cell carcinoma=avZ; bacteremia due to staphylococcus aureus=aVZ; progressive aphasia=avz; small cell osteogenic sarcoma=aVz; juvenile-onset dystonia=Aw; leprosy=AW; myocardial infarction=aw; breast carcinoma=aW; dentinogenesis imperfecta=awa; sickle cell-beta-thalassemia=aWa; premature chromatid separation trait=awA; cataract, congenital, cerulean type, 2=aWA; chronic peri-aortitis=aWb; anauxetic dysplasia=awB; cataract, congenital nuclear, autosomal recessive 2=aWB; dentin dysplasia=awb; legionnaires' disease=aWc; fanconi anemia, complementation group j=awe; cataract 39, multiple types=aWC; mean corpuscular hemoglobin=awC; nose disease=aWd; cataract, punctate, progressive juvenile-onset=aWD; fanconi syndrome=awd; fatty acid oxidation defects =awD; angiomas=awe; albinism, oculocutaneous, type vii=awE; cataract, crystalline aculeiform=aWE; paratyphoid fever=aWe; progressive external ophthalmoplegia with mitochondrial dna deletions, autosomal dominant, 3=awF; seronegative arthritis=aWF; mental retardation, x-linked 93=awf; septic arthritis=aWf; senile cataract=aWG; hereditary motor neuronopathy=awg; osteogenesis imperfecta type vii=aWg; infantile onset spinocerebellar ataxia=awG; osteogenesis imperfecta, type 7=aWh; sensory ataxias neuropathy, dysarthria, and ophthalmoparesis=awH; cataract 20, multiple types=aWH; blood group—ok=awh; pseudoaphakia=aWI; eccrine acrospiroma=aWi; chikungunya fever=awi; mitochondrial dna depletion syndrome 3 (hepatocerebral type)=awI; delayed emergence from anesthesia=awj; parkinson disease, mitochondrial=awJ; clear cell hidradenoma=aWj; giardiasis=aWJ; flea infestations=aWK; leber congenital amaurosis 7=aWk; restless legs syndrome, susceptibility to, 6=awk; optic atrophy=awK; chronic progressive external ophthalmoplegia=awL; spotted fever=aWL; cone-rod dystrophy 2=aWl; attention-deficit/hyperactivity disorder, predominantly inattentive type=awl; periodic limb movement disorder=awm; tay-sachs disease=awM; herein dependency=aWm; typhus=aWM; melas syndrome=awN; biotin deficiency=awn; myopathy, myofibrillar, desmin-related=aWn; hyperexplexia hereditary=aWN; gliosis, familial progressive subcortical=aWO; multiple carboxylase deficiency=awo; alpha-b crystallinopathy=aWo; chondroid lipoma=awO; benign ependymom=awP; hereditary diffuse leukoencephalyopathy with spheroids=aWP; holocarboxylase synthetase deficiency=awp; cardiomyopathy, dilated, 1ii=aWp; cataract, posterior polar, 2=aWg; protein-energy malnutrition=awg; localized vitisligo=awQ; fibrosisng adenosis=aWQ; thymic carcinoma=awr; sclerosisng adenosis of breast=aWR; temtamy syndrome=awR; cataract 16, multiple types=aWr; type c thymoma=aws; neutrophyilia, hereditary=aWS; disorder of skeletal muscle=aWs; microphthalmia and mental deficiency=awS; congenital posterior polar cataract=aWt; hypogammaglobulinemia and isolated growth hormone deficiency, x-linked=awt; combined oxidative phosphorylation deficiency 7=awT; dystonia, dopa-responsive, due to sepiapterin reductase deficiency=aWT; band-like calcification with simplified gyration and polymicrogyria=aWU; hypogammaglobulinemia, x-linked=awu; cataract, congenital zonular, with sutural opacities=aWu; spastic paraplegia 55, autosomal recessive=awU; cataract 23=aWv; recurrent bacterial infection=awv; abdominal neoplasms=awV; surfactant metabolism dysfunction, pulmonary, 1=aWV; anemia, congenital dyserythropoietic, type ib=awW; pyoderma=aww; cataract, lamellar 2=aWw; surfactant metabolism dysfunction, pulmonary, 4=aWW; segawa syndrome, autosomal recessive=aWX; rubell=awx; hydronephrosi=awX; cataract, congenital nuclear, autosomal recessive 3=aWx; cataract microcornea syndrome=aWy; sarcoidosis, susceptibility to, 2=awy; purpura fulminans=aWY; prostatic adenoma=awY; neurodegeneration with brain iron accumulation 4=awZ; bone marrow failure syndromes=aWZ; lofgrens syndrome=awz; cataract, coppock-like=aWz; cardiomyopathy, familial restrictive, 1=AX; iris coloboma with ptosis, hypertelorism, and mental retardation=Ax; adrenal cortical hypofunction=aX; early disease onset=ax; follicular cyst=aXa; fatal familial insomni=axA; severe beta thalassemia=aXA; neurodegeneration with brain iron accumulation (nbia)=axa; amelogenesis imperfecta, hypomaturation type, iia4=axB; spastic paraplegia 43, autosomal recessive=axb; eosinophilia, familial=aXb; clinical chorioamnionitis=aXB; wolf-hirschhorn syndrome=axC; selenium deficiency=axc; chronic neutrophyilia=aXC; staphylococcal skin infections=aXc; lepromatous leprosy=axd; primary ulcer of intestine=aXD; protein intolerance=aXd; gonococcal arthritis dermatitis syndrome=axD; ectopic tenth=aXE; acute flaccid paralysis=aXe; hypersensitivity reaction type iii disease=axE; retrograde degeneration=axe; lens disease=axf; transient myocardial ischemia=axF; splenic infarction=aXF; meningitis/encephalyitis=aXf; acute necrotizing myelitis=aXg; complement Is deficiency=axg; pericardial mesothelioma=aXG; bronchopneumonia=axG; joubert syndrome 17=axH; cockayne syndrome a=aXH; homocarnosinase deficiency=aXh; complement component cis deficiency=axh; myeloradiculopathy=aXi; amyotrophy, monomelic=axI; breast cancer and pregnancy=aXI; macular degeneration, age-related, 14=axi; pulmonary eosinophilic granuloma=aXj; complement component 6 deficiency=axJ; complement deficiency=axj; isolated growth hormone deficiency, type ii=aXJ; 15g24 microdeletion=aXK; periadenitis mucosa necrotica recurrens=aXk; c6 deficiency, subtotal=axK; intracranial glioma=axk; complement component 7 deficiency=axL; parietal lobe neoplasm=aXL; ectopic pancreas=axl; stromal keratitis=aXl; advanced sleep phase syndrome, familial, 2=aXM; ciliary dyskinesia, primary, 26=axm; cone-rod dystrophy 16=axM; mumps meningitis=aXm; multiple sclerosis in children=aXn; macular degeneration, age-related, 9=axn; c9 deficiency=axN; advanced sleep-phase syndrome, familial=aXN; hemolytic uremic syndrome, atypical, susceptibility to, 5=axn; hib meningitis=aXo; macular degeneration, age-related, 15=axO; advanced sleep phase=aXO; brainstem encephalyitis=aXp; pneumonia, pneumococcal=axp; facial dermatosis=axP; classical glioblastoma=aXP; complement component 3 deficiency, autosomal recessive=axq; joubert syndrome 21=aXQ; polycystic lipomembranous osteodysplasia with sclerosisng leukoencephalyopathy=axQ; enterovirus meningitis=aXg; drug exanthema=aXr; frontotemporal dementia with motor neuron disease=axR; immune complex nephritis=axr; cardiomyopathy, dilated, 1m=aXR; cardiomyopathy, familial hypertrophyic, 12=aXS; anterior uveitis=axs; familial dementia=axS; lymphohistiocytosis=aXs; complement component 3 deficiency=axt; hereditary cystatin c amyloid angiopathy=aXT; eyelid disease=aXt; amyotrophyic lateral sclerosis with dementia=axT; hereditary cerebral amyloid angiopathy, icelandic type=aXU; pemphigus=axu; intermittent explosive disorder=aXu; huntington disease-like syndrome=axU; progressive muscular atrophy=axV; intracranial hypotension=aXv; methemoglobinemia, type i=axv; macular degeneration, age-related, 11=aXV; papillon-lefevre disease=axW; ectopic pregnane=aXw; complement component 4a deficiency=axw; amyloidosis, hereditary=aXW; salt-losing congenital adrenal hyperplasia=axx; surfactant metabolism dysfunction, pulmonary, 5=aXx; hyperchlorhidrosis, isolated=axX; sporadic cerebral amyloid angiopathy=aXX; somatosensory disorders=aXy; niemann-pick disease, type c2=aXY; glaucoma both eyes=axY; adrenal incidentaloma=axy; complement component 4b deficiency=axz; exfoliative ichthyosis, autosomal recessive, ichthyosis bullosa of siemens-like=aXZ; neutropenia, severe chronic=aXz; non-specific brain syndrome=axZ; cardiomyopathy, familial hypertrophyic, 1=AY; paraneoplasmtic pemphigus=ay; kidney failure=aY; familial hypophosphatemiac rickets=Ay; mucolipidosis type i=aYa; nutritional deficiency disease=aya; blood autoimmune disorders=aYA; x-linked csnb=ayA; action myoclonus=aYb; astigmatism=ayB; intermediate uveitis=aYB; retinitis pigmentosa 17=ayb; basal ganglia calcification=aYc; epilepsy, childhood absence, susceptibility to, 6=ayC; arrhythmogenic right ventricular dysplasia, familial, 13=aYC; carbenic anhydrase va deficiency, hyperammonemia due to =ayc; epilepsy, idiopathyic generalized, susceptibility to, 6=ayD; trichohepatoenteric syndrome=aYD; cerebroretinal microangiopathy with calcifications and cysts=aYd; decayed, missing and filled tenth count=ayd; mental retardation, autosomal dominant 19=aYE; gastric antral vascular ectasisa=aYe; malignant hyperthermia susceptibility type 5=ayE; xerophthalmia=aye; thyrotoxic periodic paralysis, susceptibility to, 1=ayE; hepatitis b and hepatitis c=aYF; cockayne syndrome b=aYf; cerebellar ataxia, mental retardation, and dysequilibrium syndrome 3=ayf; adamantinous craniopharyngioma=aYG; neurilemmomatosis=ayg; malignant hyperthermia, susceptibility to, 5=ayG; mental retardation, autosomal dominant 21=aYg; periodic paralysis=ayH; deafness, autosomal recessive 93=ayh; leukemia, megakaryoblastic, of down syndrome=aYh; classic pulmonary blastoma=aYH; familial periodic paralysis=ayI; small intestine carcinoma=aYI; night blindness, congenital stationary, type 2b=ayi; sibling jealousy=aYi; epilepsy, idiopathyic generalized, susceptibility to, 11=ayJ; night blindness=ayj; congenital cataracts, facial dysmorphism, and neuropathy=aYj; cri-du-chat syndrome=aYJ; Zimmerman laband syndrome=ayK; pulmonary congestion=aYk; episodic ataxia, type 1=ayk; cystinosis, late-onset juvenile or adolescent nephropathyic type=aYK; cystinosis, ocular nonnephropathyic=aYL; hyperosmolality=aYl; chronic back pain=ayL; spinocerebellar ataxia 26=ayl; episodic ataxia, type 7=aym; retinal cone dystrophy 4 =ayM; severe persistent asthma=aYm; cystinosis, atypical nephropathyic (disorder)=aYM; brugada syndrome 4=ayN; cystinosis, infantile nephropathyic=aYN; torticollis=ayn; skin amelanotic melanoma=aYn; restrictive cardiomyopathy=aYe; crossed hemiplegia=ayo; episodic ataxia, type 5=ayO; pancreatitis, chronic, susceptibility to =aYO; neuraminidase deficiency with beta-galactesidase deficiency=aYP; mental retardation, autosomal dominant 10=ayP; familial migraine=ayp; gingival fibromatosis=aYp; diabetes mellitus, insulin-dependent, 12=aYq; neuraminidase 1 deficiency=aYQ; spell=ayq; familial paroxysmal dystonia=ayQ; gangliosidosis gm1=aYR; timothy syndrome=ayr; celiac disease, susceptibility to, 3=aYr; disease of mental healty=ayR; hypothyroidism, autoimmune=aYs; brugada syndrome 3=ays; cancer relapse=ayS; pycnodysostosis=aYS; keratolytic winter erythema=aYT; microscopic polyangiitis=aYt; high grade cervical sguamous intraepithelial neoplasmia=ayT; feeling powerless=ayt; primary aldosteronism, seizures, and neurologic abnormalities=ayu; cervical cancer sguamous cell =ayU; glycosphingolipidoses =aYU; pretibial myxedema=aYu; sinoatrial node dysfunction and deafness=ayv; purulent sputum=aYV; autoimmune response=aYv; complicated pneumoconiosis=ayV; clonorchiasis=aYW; familial mediaterranean feve=ayW; aland island eye disease=ayw; thyroid associated orbitopathy=aYw; chronic chagas' disease=aYx; fascioliasis=aYX; adenofibroma=ayX; cone-rod dystrophy 3=ayx; cone-rod dystrophy, x-linked, 3=ayy; keratosis palmoplantaris with periodontopathyia and onychogryposis=aYY; deficiency of vitamin d3=aYy; sarcomatoid mesothelioma=ayY; atrophy of optic disc=ayz; tropical calcific pancreatitis=ayZ; early onset periodontitis=aYZ; ulcerative jejunitis=aYz; cardiomyopathy, familial hypertrophyic, 11=AZ; helicobacter pylori [h. pylori]=az; craniofacial abnormalities=Az; ovarian disease=aZ; foot ulcer=aza; agoraphobi=azA; myh9-related disorders=aZA; deficiency of cathepsin c=aZa; mass of thyroid gland=azb; subacromial bursitis=aZB; hypotonia-cystinuria syndrome=azB; ceroid lipofuscinosis, neuronal, 10=aZb; visually threatening diabetic retinopathy=aZC; c cell turner=azc; neuronal ceroid lipofuscinosis, congenital=aZc; isolated cystinuria=azC; postpartum cardiomyopathy=aZd; neutropenia chronic=azD; pain during injection=azd; bursitis=aZD; subgingival plague=azE; tertiary neuro syphilis=aZE; hypoalgesia=aze; ceroid lipofuscinosis, neuronal, 13=aZe; rosacea=azF; platelet thrombus=aZf; lung large cell carcinoma=azf; gastric diffuse adenocarcinoma=aZF; hyperparathyroidism=azg; dyggve-melchior-clausen syndrome=aZG; cerebellar ataxia, nonprogressive, with mental retardation=azG; sprains and strains =aZg; epithelioid hemangioendothelioma=azH; hypercalcemia=azh; secondary anemia=aZh; aspiration pneumoniatis=aZH; cherubism=azi; desbuguois dysplasia=azI; aspiration pneumonia=aZI; light chain myeloma=aZi; peritonsillar abscess=aZJ; pseudohypoaldosteronism, type iie=aZj; supravalvular aortic stenosis=azj; diabetes mellitus, noninsulin-dependent, 1=azJ; diarrhea persistent=aZK; tibial muscular dystrophy, tardive=azK; femoral neck fractures=azk; mental retardation, x-linked, with brachydactyly and macroglossia=aZk; aggressive outburst=aZl; diffuse panbronchiolitis=aZL; alpha-sarcoglycanopathyies=azL; acute closed-angle glaucoma=azl; chronic mesangial proliferative glomerulonephritis=aZm; arthritis, reactive=azm; lichenoid eruptions=aZM; myositis, eosinophilic=azM; periapical diseases=aZn; rhinosinusitis=aZN; residual cancer=azn; immunodeficiency 11=azN; adnexal diseases=aZO; cutaneous hypersensitivity=aZo; whooping cough=azo; psoriasis susceptibility 2=azO; dysentery, bacillary=aZP; familial psoriasis=azP; floppy lid syndrome=azp; leukocytoclastic vasculitis=aZp; histoplasmosis=azq; small fibre neuropathy=aZQ; macular degeneration, age-related, 12=aZq; familial pityriasis rubra pilaris=azQ; headache recurrent=aZr; chronic secretory otitis media=aZR; pityriasis rubra pilaris=azR; hemangiopericytoma=azr; orofacial cleft=azs; intestinal obstruction=aZs; first myocardial infarction=azS; fertility disorders=aZS; thyroid cancer metastatic=aZT; thickening of pleura=azT; neonatal necrotizing enterocolitis=aZt; oculocutaneous albinism type 1=azt; listeriosis=azU; insulin resistance - type a=azu; rapidly progressive periodontitis=aZU; adenoviral keratitis=aZu; prodromal stage=aZV; acute hepatitis c=aZv; candidiasis familial chronic mucocutaneous, autosomal recessive=azV; surrogate mother=azv; nose symptoms=aZW; erythema migrans=aZw; candidemia=azW; ampulla of vater neoplasm=azw; dermatophytosis=azX; onchocerciasis=azx; diarrhea in children=aZX; pulpitis =aZx; clostridium difficile diarrhoea=aZY; scarlet fever=azy; invasive aspergillosis=azY; geographic tongue=aZy; bilis=aZZ; periapical granuloma=aZz; microcephaly, primary autosomal recessive, 4=azZ; cardiomyopathy, familial hypertrophyic, 19=azz; spots on skin=b; carcinoma, hepatocellular=B; osteoporosis=bA; gingival disease=ba; atrial septal defect 5=8a; pancreatic ductal carcinoma=BA; allergic symptom=baA; spastic paraplegia 46, autosomal recessive=bAa; incurable diseases=baa; cataract, congenital or juvenile=bAA; familial cardiomyopathy=bAB; eosinophilic syndrome=bab; methemoglobinemia type iv=baB; polyglucosan body disease, adult form=bAb; recurrent sinusitis=bac; gsd iv, neuromuscular form, congenital=bAc; 17,20-lyase deficiency, isolated=baC; adult i blood group phenotype=bAC; seropositive rheumatoid arthritis=bAD; staphylococcus aureus endocarditis=bad; urinary symptoms=bAd; hemoglobin m disease=baD; autosomal recessive scid=bAE; nadh cytochrome b5 reductase deficiency=baE; glycogen storage disease iv=bAe; gastric ulcer benign=bae; methemoglobinemia, type ii=baF; cells in urine=bAF; polymyalgia rheumatic=bAf; salpingitis=baf; isocyanate induced asthma=bAG; bullous keratopathy=bag; granulomatous disease, chronic, autosomal recessive, cytochrome b-negative=baG; diabetes mellitus, type ii, autosomal dominant=bAg; noninsulin-dependent diabetes mellitus with deafness=bAh; ichthyosis exfoliativa=bAH; granulomatous disease, chronic, x-linked=baH; bronchial disease=bah; atypical mycobacteriosis, familial, x-linked 2=baI; reactive hypoglycemia=bAi; splenic seguestration=bai; autosomal dominant ichthyosis=bAI; zap70 deficiency=baJ; protein-deficient diabetes mellitus=bAJ; newborn respiratory distress syndrome=baj; oculopharyngodistal myopathy=bAj; dhpr deficiency=bAk; acute pancreatitiss=bak; colon (non-specific) inflammation=baK; alcohol myopathy=bAK; chronic granulomatous disease, type ii=baL; cecum cancer=bAL; hyperphenylalaninemia, bh4-deficient, b=bAl; pancreatitiss=bal; dystonia 6, torsion=bAm; rem sleep behavior disorder=bAM; mitochondrial complex iii deficiency, nuclear type 6=baM; hand dermatosis=bam; thrombocytopenia 4=baN; juvenile parkinson's disease=bAn; pediatric osteosarcoma=ban; hyperglycinemia, transient neonatal=bAN; lung giant cell carcinoma=ban; suicidal ideation=bAO; beta thalassemia, heterozygous=baO; childhood onset dystonias=bAo; clostridium difficile colitis=bap; charcot-marie-teoth disease, type 4a=bAP; mechanical pain=bAp; nonepidermaolytic palmoplantar keratoderma=baP; cystitis and urethritis =baq; eccrine dermal cylindroma=baQ; charcot-marie-tooth disease, type 2k=bAQ; oromandibular dystonia=bAq; secondary dystonia=bAr; pneumonia due to escherichia coli=baR; acute cystitis=bar; charcot-marie-tooth disease, type 4a, axonal form=bAR; mastitis=has; transmissible mink encephalyopathy (tme)=baS; charcot-marie-tooth disease, recessive intermediate a=bAS; lumbar radiculopathy=bAs; pleural plague=bat; transposition of the great arteries, dextro-looped 3=bAT; short bowel syndrome=baT; vestibulodynia=bAt; telangiectasisa, hereditary hemorrhagic, type 5=bAU; healing ulcer=bau; spiradenoma=baU; hyperinsulinemiac hypoglycemia, familial, 3=bAu; renal cancer metastatic=bav; lipoid congenital adrenal hyperplasia=baV; diabetes in youth=bAv; klippel feil syndrome dominant type=bAV; klippel-feil syndrome 3, autosomal dominant=bAW; hyperviscosity syndrome=baw; adrenal insufficiency, congenital, with 46, xy sex reversal, partial or complete=baW; hypoglycaemic episode=bAw; microphthalmia, isolated 7=bAX; adrenal insufficiency, congenital=baX; gamma-glutamylcysteine synthetase deficiency, hemolytic anemia due to =bAx; painful bladder syndrome=bax; congenital adrenal hyperplasia due to 11-beta-hydroxylase deficiency=baY; mycobacterium avium infection=bay; coronary vessel anomalies=bAy; microphthalmia, isolated, with coloboma 6=bAY; klippel-feil syndrome=bAZ; hypoparathyroidism, autosomal recessive=bAz; familial testotoxicosis=baZ; t lymphoblastic leukemia/lymphoma=baz; cardiomyopathy, dilated, Ir=Bb; galloway-mowat syndrome=88; colon cancer=bB; pick's disease=bb; hemorrhoid=bbA; chondrodysplasia, grebe type=bBa; 18-hydroxylase deficiency=bba; myasthenic syndrome, congenital, with tubular aggregates 1=bBA; acromesomelic dysplasia, maroteaux type=bBb; sporadic porphyria cutanea tarda=bbB; corticosterone methyloxidase type ii deficiency=bbb; myasthenia, limb-girdle, with tubular aggregates=bBB; lingual-facial-buccal dyskinesi=bBC; fibular hypoplasia and complex brachydactyly=bBc; sprays=bbC; 11-beta-hydroxylase deficiency=bbc; deficiency of monooxygenase=bbd; multiple synostoses syndrome 2=bBd; pseudoxanthoma elasticum-like disorder with multiple coagulation factor deficiency=bBD; endometriosis of pelvis=bbD; glaucoma I, open angle, a=bbE; familial hyperaldosteronism=bbe; vertical talus, congenital=bBe; pseudoxanthoma elasticu=bBE; familial hyperaldosteronism type 1=bbf; brachydactyly, type a1, c=bBf; glaucoma 3, primary congenital, a=bbF; glutathionuria=bBF; aldosterone to renin ratio, increased=bbg; glaucoma of childhood=bbG; radial-renal syndrome=bBG; acromesomelic dysplasia=bBg; aldosterone hypertension=bbh; symphalangism, proximal, 1b=bBh; early-onset glaucoma=bbH; tropical eosinophilia=bBH; hyperreninemiac hypoaldosteronism=bbi; infection by wuchereria bancrofti=bBI; hyperandrogenism, nonclassic type, due to 21-hydroxylase deficiency=bbI; microphthalmia, isolated 4=bBi; leber congenital amaurosis 17=bBj; late-onset congenital adrenal hyperplasia=bbJ; high renin hypertension=bbj; pituitary hormone deficiency, combined, 2=bBJ; spondylocostal dysostosis 4, autosomal dominant=bBk; adrenal hyperplasia, congenital, type 5=bbk; mineralocorticoid deficiency=bbK; isolated growth hormone deficiency, type ib=bBK; kowarski syndrome=bBL; gdp dissociation inhibitor 1=bBl; deficiency of lyase=bbl; mild steroid 21-hydroxylase deficiency=bbL; short stature, idiopathyic, autosomal=bBM; growth control, y-chromosome influenced=bbm; hypercalcemia, idiopathyic, of infancy=bbM; mental retardation, x-linked 3=bBm; genitalia external ambiguous=bbn; insulin-like growth factor i deficiency=bBN; hirschsprung disease, susceptibility to, 3=bBn; osteomalacia secondary to drug=bbN; sexual infantilism=bbn; hirschsprung disease type 3=bBo; idiopathyic infantile hypercalcemia - mild form=bbO; secondary hypothyroidism=bBO; secondary parkinson disease=bBp; dysmetabolic syndrome=bbp; adenocarcinoma of liver=bbP; turner-induced hypoglycemia=bBP; birdshot chorioretinopathy=bBq; radiohumeral fusions with other skeletal and craniofacial anomalies=bbQ; coenuriasis=bbq; potassium depletion=bBQ; keratoconjunctivitis=bBR; urination disorders=bBr; estrogen excess=bbr; focal facial dermal dysplasia 4=bbR; dementia of frontal lobe type=bbS; leydig cell turner=bbs; gemistocytic astrocytoma=bBs; pituitary hypoplasia=bBS; cerebrotendinous xanthomatosis=bbT; small for gestational age=bBT; myopathy, mitochondrial progressive, with congenital cataract, hearing loss, and developmental delay=bBt; froelich's syndrome =bbt; prognathism=bBU; polyp of corpus uteri=bbu; carbon tetrachloride poisoning=bBu; vitamin d hydroxylation-deficient rickets, type 1a=bbU; vitamin d-dependent rickets, type 2a=bbV; neutropenia, severe congenital, autosomal dominant 2=bBv; environmental illness=bbv; hypothyroidism, congenital, nongoitrous, 3=bBV; atrichia with papular lesions=bbW; aryl hydrocarbon hydroxylase inducibility=bbw; neutropenia, nonimmune chronic idiopathyic, adult=bBw somatotrophy hyperplasia=bBW; constitutional delay of growth and puberty=bBX; thrombasthenia-thrombocytopenia, hereditary=bBx; hidradenitis suppurativa=bbx; rickets, hereditary vitamin d-resistant=bbX; cystadenocarcinoma=bby; combined oxidative phosphorylation deficiency 1=bBy; tsh secreting adenoma=bBY; primary osteoporosis=bbY; acute lower respiratory tract infection=bbZ; oxidative phosphorylation deficiencyies=bBz; gastric cardia carcinoma=bbz; congenital deficiency of intrinsic factor=bBZ; ataxia telangiectasisa=bC; primary biliary cirrhosis=bc; myocardial reperfusion injury=Bc; spinocerebellar ataxia 5=BC; congenital sensorineural hearing loss=bCA; normal bowel habits=bCa; atrichia=bca; debrisoguine, ultrarapid metabolism of =bcA; parkinson disease 11=bCb; postoperative vomiting=bcB; multidrug-resistant tuberculosis=bcb; hearing impaired children=bCB; coumarin resistance=bcc; deafness, autosomal recessive 15=bCc; pseudoparkinsonism=bcC; hearing loss associated with syndrome=bCC; sensorineural hearing Ios=bCd; basal ganglia disease=bcD; eccrine nevus=bCD; liver diseases, parasitic=bcd; follicular occlusion triad - hidradenitis, acne conglobata, dissecting cellulitis of scalp=bCE; lung cancer, protection against=bce; limited scleroderma=bcE; syndactyly, type 3=bCe; tegafur, poor metabolism of =bcf; atrioventricular septal defect 3=bCf; mutism=bCF; alcoholic liver damage=bcE; halothane hepatitis=bcG; oculodentodigital dysplasia, autosomal recessive=bCg; infestation=bcg; charcot-marie-tooth disease type 2=bCG; cirrhosis - non-alcoholic=bcH; opisthorchiasis=bch; deafness, autosomal dominant 3b=bCH; craniometaphyseal dysplasia, autosomal recessive type=bCh; bietti crystalline dystrophy=bci; crisscross heart=bCi; deafness, autosomal recessive Ib=bCI; vitamin d hydroxylation-deficient rickets, type Ib=bci; congenital hearing disorder=bCJ; spastic paraplegia 56, autosomal recessive=bed; lamellar ichthyosis, type 3=bcj; hallermann-streiff syndrome=bCj; deafness, digenic, gjb2/gjb6 (disorder)=bCK; cataract, zonular pulverulent 3=bCk; efavirenz. poor metabolism of =bck; deficiency of isomerase=bcK; cataract, zonular pulverulent 1=bCl; leukodystrophy, hypomyelinating, 2=bCL; drug-induced hepatitis=bcl; arteriolar hyalinosis=bcL; food-drug interactions=bcm; axonal sensorimotor neuropathy=bCm; ichthyosis, nonlamellar and nonerythrodermaic, congenital, autosomal recessive=bcM; lymphedema, hereditary, ic=bCM; hepatic impairment=bcn; torulopsis=bcN; spastic paraplegia 44, autosomal recessive=bCN; cns symptom=bCn; chromosome xp21 deletion syndrome=bCO; vegetation=bcO; charcot-marie-tooth disease type=bCo; drug metabolism, poor, cyp2c19-related=bco; neurological pain=bCP; mephenyloin, poor metabolism of =bcp; neuro myelitis optic=bcP; deafness, autosomal recessive 1a=bCp; acroparesthesia=bCQ; vohwinkel syndrome=bCq; premenstrual syndrome=bcq; spastic paraplegia 5a, autosomal recessive=bcQ; spastic paraplegia type 5a, recessive=bcR; cornea verticillata=bCR; knuckle pads, leuconychia and sensorineural deafness=bCr; rhabdomyolysis, cerivastatin-induced=bcr; jaw diseases=bcs; keratoderma palmoplantar deafness=bCs; pseudo-hurler polydystrophy=bCS; autosomal recessive hereditary spastic paraplegia=bcS; sensory ataxia=bcT; gml-gangliosidosis, type ii=bCT; deafness, autosomal dominant 3a=bCt; acute gastrointestinal hemorrhage=bct; d-2-hydroxyglutaric aciduria 1=bcU; keratitis, ichthyosis, and deafness (kid) syndrome=bCu; gml-gangliosidosis, type i=bCU; coumarin sensitivity=bcu; hyperkeratosis of the palms and soles and esophageal papillomas=bCv; diaphragm disease=bcv; adult gml gangliosidosis=bCV; 2-hydroxyglutaricaciduria =bcV; d-2(oh) glutaric aciduria=bcW; hid syndrome=bCw; amelogenesis imperfecta, type ib=hew spastic diplegia infantile type=bCW; otofaciocervical syndrome=bcX; acroerythrokeratoderma=bCx; drug metabolism, poor, cyp2d6-related=bex; nonpersistence =bCX; muscular dystrophy-dystroglycanopathy (limb-girdle), type c, 9=bcY; occlusive thrombus=bCY; wilms turner 4=bcy; deaf mutism=bCy; recessive sensorineural hearing loss=bCz; gangliosidosis=bCZ; debrisoguine, poor metabolism of =bcz; alpha-dystroglycanopathyies=bcZ; congenital heart disease=bD; rotavirus infections=80; moyamoya disease=bd; refractive error=Bd; gangliosidosis gm2=bDa; angiokeratoma=bdA; cortical thymoma=bDA; lassa fever=bda; chromosome 15g11.2 deletion syndrome=bdB; epithelial malignant thymom=bDB; delusion of persecution=bdb; lethal arthrogryposis with anterior horn cell disease=bDb; necrobiosis lipoidica diabeticorum=bDc; delusional disorder=bde; giant axonal neuropathy, autosomal dominant=bdC; alacrima, achalasia, and mental retardation syndrome=bDC; synovial osteochondromatosis=bDd; mirror movements 1=bdD; muscular dystrophy-dystroglycanopathy (congenital with mental retardation), type b, 14=bDD; conjunctival disease=bdd; muscular dystrophy-dystroglycanopathy (limb-girdle), type c, 14=bDE; holoprosencephaly 9=bDe; pediatric lymphoma=bde; developmental coordination disorder=bdE; specific reading disorder=bdF; mediastinal gray zone lymphoma=bdf; pituitary anomalies=bDf; muscular dystrophy-dystroglycanopathy (congenital with brain and eye anomalies), type a, 14=bDF; imperforate anus=bOg; van maldergem syndrome=bdG; hypomyelination with brainstem and spinal cord involvement and leg spasticity=bdg; hypocalciuric hypercalcemia, familial, type 2=bDG; hypocalcemia, autosomal dominant 2=bDH; spinal cord involvement=bdh; polydactyly, preaxial 4=bDh; severe combined immunodeficiency with sensitivity to ionizing radiation=bdH; drug resistant tuberculosis=bDI; reticuloendotheliosis, familial, with eosinophilia=bdI; leukoencephalyopathy with brainstem and spinal cord involvement and lactate elevation=bdi; carpenter syndrome 1=bDi; heavy metal toxicity=bdj; severe combined immunodeficiency, partial=bdJ; postaxial polydactyly, type b =bDj; extensively drug-resistant tuberculosis=bDJ; polydactyly of toes=bDk; familial ventricular tachycardia=bDK; corneal dystrophy, congenital stromal=bdK; hantavirus infection=bdk; inflammatory bowel disease 12=bDL; sex chromosome disorders of sex development=bdl; ehlers-danlos syndrome progeroid type=bdL; carpenter syndrome=bDl; dopamine beta hydroxylase deficiency=bdm; mammary paget's disease=bdM; nephronophthisis 7=bDm; acidophil adenoma=bDM; dystonia 25=bDN; atrophy of kidney=bDn; autonomic nervous system diseases=bdn; neuronopathy, distal hereditary motor, type viib=bdN; segmental dystonia =bDO; psychoticism=bdo; diabetes mellitus, neonatal, with congenital hypothyroidism=bDo; behavioral syndrome associated with physiological disturbance and physical factors=bdO; foot-and-mouth disease=bdP; glomus vagale turners=bDp; epileptic encephalyopathy, early infantile, 17=bDP; positive and negative symptoms=bdp; bullous pemphigoi=bdQ; depressive psychosis=bdq; venous malformation=bDq; melanotic neurilemmoma=bDQ; central nervous system melanocytic neoplasm=bDR; rift valley fever=bdR; severe major depression with psychotic features=bdr; congenital abnormality of veins=bDr; hyperekplexia 2=bDs; osseous heteroplasia, progressive=bDS; general symptom=bds; classical lissencephalyies and subcortical band heterotopias=bdS; hypothyroidism, congenital, nongoitrous, 1=bDT; woodhouse sakati syndrome=bdt; lissencephaly and agenisi of corpus callosum=bdT; anemia, sideroblastic, pyridoxine-refractory, autosomal recessive=bDt; leucinosis=bDu; pseudohypoparathyroidism type 1c=bDU; agyria=bdU; langer mesomelic dysplasia=bdu; atrial standstill=bdv; toxic thyroid adenoma=bDV; glutamine deficiency, congenital=bDv; laminar heterotopia=bdV; toxic multinodular goiter=bDW; epilepsy, cryptogenic=bdW; hhh syndrome=bDw; ambras syndrome=bdw; d-glyceric aciduria=bDx; pentosuria=bdX; parvovirus infections=bdx; idiopathyic parathyroidism=bDX; d-glycericacidemia=bDy; chromosome x pentasomy=bdy; calcinosis cutis=bDY; facial neoplasms=bdY; deficiency of aromatic-1-amine-acid decarboxylase=bdZ; cutaneous mucormycosis=bdz; tay-sachs disease ah variant=bDz; brachymetacarpia=bDZ; myopia=Be; colon carcinoma=bE; thoracic aortic aneurysm=be; invagination=BE; hunt's syndrome=bEA; adamantinoma=bEa; as if′ personality=beA; aromatic amine acid decarboxylase deficiency=bea; juxtacortical osteosarcoma=bEb; spastic paraplegia 28, autosomal recessive=beb; geniculate herpes zoster=bEB; epilepsy, partial, with variable foci=beB; aspartate aminotransferase, serum level of, quantitative trait locus 1=bEC; spastic paraplegia 54, autosomal recessive=bec; breast duct papilloma=beC; oilier disease=bEc; chromophobe adenoma=beD; viral gastroenteritis due to rotavirus=bed; von willebrand disease, platelet type=bED; night blindness, congenital stationary, autosomal dominant 3=bEd; hepatosplenic t-cell lymphoma=beE; bernard-soulier syndrome, type a2, autosomal dominant=bEE; pelizaeus-merzbacher disease=bee; charcot-marie-tooth disease, dominant intermediate f=bEe; spondylometaepiphyseal dysplasia, short limb-hand type=bef; nonarteritic anterior ischemiac optic neuropathy, susceptibility to =bEF; inclusion body myopathy autosomal recessive=bEf; cardiomyopathy, dilated, 1i=beF; vaso-occlusive crisis=bEG; granulomatous disorder=bEg; dwarfism, levi type=beg; muscular dystrophy, limb-girdle, type 2r=beG; Warsaw breakage syndrome=beh; blood vessel turner=beH; glycine n-methyltransferase deficiency=bEh; bleeding disorder, platelet-type, 11=bEH; sporadic disorder=beI; rhizomelic chondrodysplasia punctata, type 2=bEi; roberts syndrome=bei; bernard-soulier syndrome, type c=bEI; neoplasms, vascular tissue=beJ; ovarian embryonal carcinoma=bEJ; spinal muscular atrophy with respiratory distress 1=bej; glycosylphosphatidylinositol deficiency=bEj; watermelon stomach disease=bek; hypertriglyceridemia, transient infantile=bEK; nephrotoxic serum nephritis=bEk; deafness, autosomal dominant 5=beK; brugada syndrome 2=bEL; mucolipidosis ii alpha beta=bEl; deafness, autosomal recessive 31=beL; amyopathyic dermatomyositis=bel; adult-onset citrullinemia type 2=bEM; gastric antral vascular ectasis=hem; circling gait=beM; mucolipidosis iii gamma=bEm; hydrolethalus syndrome=ben; deafness, autosomal recessive 59=beN; cerebellar ataxia and hypogonadotropic hypogonadism=bEn; citrin deficiency=bEN; hypogonadotropic hypogonadism 12 with or without anosmia=bEo; auditory neuropathy spectrum disorder=beO; cystinuria=beo; molybdenum cofactor deficiency, complementation group c=bEO; t-lymphocyte deficiency=beP; flavivirus infections=bep; eunuchoidism, familial hypogonadotropic=bEp; hemolytic anemia, nonspherocytic, due to glucose phosphate isomerase deficiency=bEP; staring=bEq; Sertoli cell-only syndrome, y-linked=beq; macrocephaly and epileptic encephalyopathy=beQ; opsoclonus myoclonus=bEQ; glaucoma-related pigment dispersion syndrome=bER; hyperglycemi=beR; spermatocytoma=ber; fertile eunuch syndrome=bEr; arterivirus infections=bes; nephrotic syndrome, type 7=beS; acromegal=bES; vaccinia=bEs; hemangioma of liver=bEt; mental retardation, x-linked 63=beT; orofaciodigital syndrome i=bet; nystagmus 6, congenital, x-linked=bET; night blindness, congenital stationary, type 1e=bEU; grade i astrocytoma=bEu; hypospadia=beU; infection pyogenic=beu; induced hypothermia=bEV; deoxyguanosine kinase deficiency=beV; paraneoplasmtic encephalyomyelitis=bev; urofacial syndrome=bEv; actinobacillus infections=bew; chudley-mccullough syndrome=bEW; globozoospermia=bEw; lathosterolosis=beW; postoperative endophthalmiatis =bex; congenital hemidysplasia with ichthyosisform erythroderma and limb defects=beX; gerodermaia osteodysplastica=bEx; keshan disease=bEX; tinea circinata=bey; loose anagen hair syndrome=bEY; desmosterolosis=beY; tuberculosis, central nervous system=bEy; vaginal disease=bez; epilepsy, progressive myoclonic 6=bEz; glycoproteinosis=beZ; deafness, autosomal dominant 28=bEZ; familial adenomatous polyposis=bF; aortic aneurysm=bf; shigellosis=BF; deafness, autosomal dominant 20=Bf; non-fluent aphasia=bFA; central nervous system viral diseases=bFa; megaloblastic anemia due to dihydrofolate reductase deficiency=bfa; euthyroid sick syndrome=bfA; mental retardation, fra12a type=bfB; dysgraphia=bFB; mass lesion=bFb; tetrahydrobiopterin deficiency=bfb; subependymal glioma=bFc; schizephrenia 9=bfC; central nervous system sensitization=bFC; deficiency of dihydrofolate reductase=bfc; vascular dementi=bFd; brain dysfunction=bfD; 46, xy gonadal dysgenesis, partial, with minifascicular neuropathy=bfd; deafness, autosomal recessive 25=bFD; 46, xy gonadal dysgenesis, complete or partial, dhh-related=bfe; severe recurrent major depression=bfE; abnormal extension=bFE; mental retardation, x-linked 94=bFe; rasmussen syndrome=bFf; short stature, auditory canal atresia, mandibular hypoplasia, skeletal abnormalities=bFF; multiple personality disorder=bfF; pure gonadal dysgenesis 46, xy=bff; pure gonadal dysgenesis=bfg; dyskeratosis congenita, x-linked=bfG; mental retardation, autosomal recessive 6=bEg; hepatoma, novikoff=bFG; mixed gonadal dysgenesis=bfh; hypophosphatemiac rickets, autosomal dominant=bfH; mental retardation, autosomal dominant 8=bFh; meretoja syndrome=bFH; hypophosphatemiac rickets, autosomal recessive, 1=bfI; genee-wiedemann syndrome=bfi; epilepsy, focal, with speech disorder and with or without mental retardation=bFi; lattice corneal dystrophy=bFI; inherited systemic amyloidosis=bFJ; hyperostosis corticalis generalisata=bf J; 2-aminoadipic 2-oxoadipic aciduria=bfj; rolandic epilepsy, mental retardation, and speech dyspraxia, autosomal dominant=bFj; continuous spikes and waves during slew-wave sleep syndrome=bFk; pyruvate dehydrogenase e2 deficiency=bfK; charcot-marie-tooth disease, axonal, type 2q=bfk; glutathione synthetase deficiency of erythrocytes, hemolytic anemia due to =bFK; hereditary macular coloboma=bfl; glutathione synthase deficiency with 5-oxoprolinuria=bFL; liver disease parenchymal=bfL; landau-kleffner syndrome=bFI; lymphogranuloma venereum=bfm; ascorbic acid deficiency=bFM; mental retardation, autosomal dominant 6=bFm; leukocyte adhesion deficiency, type iii=bfM; deafness, autosomal dominant 64=bfn; egg allergy=bFn; unspecified infectious and parasitic diseases=bFN; lactic acidosis, congenital infantile, due to lad deficiency=bfN; deafness, autosomal dominant 1=bfn; enhanced s-cone syndrome=bfo; complete spermatogenic arrest=bFO; congenital immunodeficiency disease=bfO; mayer-rokitansky-kuster-hauser syndrome=bfP; norwegian scabies=bFP; amaurosis congenita of leber, type 1=bFp; premature ovarian failure 2a=bfp; respiratory sounds=bFQ; mental retardation, x-linked 90=bfQ; auditory neuropathy, autosomal dominant, 1=bfq; oguchi disease 2=bFq; goiter, multinodular 1, with or without sertoli-leydig cell turners=bfr; airway remodeling=bFR; retinal cone dystrophy 1=bfR; leber congenital amaurosis 12=bFr; formaldehyde poisoning=bFS; rhabdomyosarcoma, embryonal, 2=bfs; uniparental disomy, paternal, chromosome 14=bfS; congenital stationary night blindness=bFs; skeletal muscle neoplasm=bfT; diced syndrome=bft; spinocerebellar ataxia, autosomal recessive 13 =bFt; drug-induced liver injury, chronic=bFT; nonmedullary thyroid carcinoma=bfu; jarcho-levin syndrome=bfU; congenital cerebellar ataxia=bFu; turner virus infections=bFU; non-toxic multinodular goiter=bfv; delta-thalassemia=bfV; non-arteritic ischemiac optic neuropathy=bFV; night blindness, congenital stationary, type 1b=bFv; left ventricular noncompaction=bfW; lipofuscinosis=bFw; sex cord-gonadal stromal turner=bfw; anemia in children=bFW; semantic impairment=bFx; hereditary persistence of fetal haemoglobin [hpfh]=bfX; cone dystrophy 3=bFX; endemic goiter=bfx; palinopsia=bFy; retinitis pigmentosa 48 =bFY; delta-beta thalassemia=bfY; kidney sarcoma=bfy; word finding difficulty=bFz; hand, foot and mouth disease=bfZ; pleuropulmonary blastoma=bfz; moyamoya disease 6 with achalasia=bFZ; punctate palmoplantar keratoderma=bG; baraitser-winter syndrome 2=Bg; periodontal disease=bg; wiskott-aldrich syndrome=BG; spondylocostal dysostosis, autosomal recessive=bga; perrault syndrome 2=bGA; ovotesticular disorders of sex development=bgA; achalasi=bGa; amelogenesis imperfecta, type iv=bgb; diarrhea 6=bGb; progressive external ophthalmoplegia with mitochondrial dna deletions, autosomal dominant, 6=bgB; polymorphic reticulosis=bGB; taurodontism=bgc; clivus chordoma=bGC; ciliary dyskinesia, primary, 13=bgC; irritable bowel syndrome characterized by constipation=bGc; ige responsiveness, atopic=bGD; retinal cone dystrophy 2=bGd; auriculo-condylar syndrome=bgd; ciliary dyskinesia, primary, 10=bgD; split-hand/foot malformation with sensorineural hearing loss=bge; primary ciliary dyskinesia, 2=bgE; chronic cervicitis=bGE; cone-rod dystrophy 5=bGe; cone-rod dystrophy 1=bGf; nose neoplasms=bgf; neonatal purpura fulminans (homozygous protein c deficiency)=bgf; mucormycosis=bGF; ciliary dyskinesia, primary, 18=bgG; hereditary night blindness=bgg; histiocytosis with joint contractures and sensorineural deafness=bGG; choroidal dystrophy central areolar=bGg; congenital stationary night blindness=bgh; chromosome 7, trisomy 7g=bGh; heinz body anemias=bGH; heterotaxy, visceral, x-linked=bgH; abnormal granulation tissue=bGi; limb-girdle muscular dystrophy, type 2c=bgi; ciliary dyskinesia, primary, 7 =bgI; alpha-thalassemia mental retardation syndrome, deletion-type=bGI; anemia of pregnancy=bGJ; primary ciliary dyskinesia, 3=bgJ; glycogen storage disease xv=bGj; hyperglycerolemia=bgj; hypoparathyroidism, x-linked=bgK; glycogen storage disease 0, muscle=bGk; parkinson disease 2, autosomal recessive juvenile=bgk; severe alpha thalassemia=bGK; neuroacanthocytosis, mcleod type=bgl; beta thalassemia minor=bGL; glycogen storage disease 0, liver=bGl; rhyns syndrome=bgL; hyaline body=bgM; keratosis follicularis spinulosa decalvans, x-linked=bgm; hemoglobin bart's hydrops syndrome=bGM; epidermal necrosis=bGm; maternally inherited leigh syndrome=bgN; gamma delta beta thalassemia=bGN; polyp benign=bGn; muscular dystrophy, animal=bgn; normocytic hypochromic anemia=bGO; severe childhood autosomal recessive muscular dystrophy=bgo; stunned myocardium=bgO; carotid stenosis, susceptibility to =bGo; congenital absence of adrenal gland=bgp; delta thalassemia=bGP; hyperinsulinemiac hypoglycemia, familial, 4=bGp; chronic pyelonephritis=bgP; hammer toe=bGq; hemoglobin d trait=bGQ; dystrophyic cardiomyopathy=bgq; mitral valve disease=bgQ; merrf syndrome=bgR; hemoglobin h constant spring=bGR; muscle fibrosis=bgr; carnitine-acylcarnitine translocase deficiency=bGr; cardiomyopathy associated with another disorder=bgs; acute fatty liver of pregnancy=bGs; ciliary dyskinesia, primary, 9=bgS; alpha-thalassemia, deletion type=bGS; spinal muscular atrophy, distal. autosomal recessive, 5=bgT; x-linked muscular dystrophy with abnormal dystrophyin=bgt; reye-like syndrome=bGt; beta thalassemia, dominant inclusion body type=bGT; muscular dystrophy, limb-girdle, type 1e=bgU; beta-sarcoglycanopathy=bgu; beta thalassemia major anemia=bGU; hemochromatosis, type 3=bGu; hemochromatosis, type 2a=bGv; retinoschisis=bgv; fetal hemoglobin quantitative trait locus 1=bGV; 3-methylglutaconic aciduria, type v=bgV; hemoglobin e=bGW; hemochromatosis, type 2b =bGw; ceroid lipofuscinosis, neuronal, 4b, autosomal dominant=bgW; fibrous meningioma=bgw; dominant thalassemia=bGX; bacterial cholangitis=bGx; ciliary dyskinesia, primary, 16=bgX; dimethylglycine dehydrogenase deficiency=bgx; charcot-marie-tooth disease, x-linked, 1=bgy; systemic lupus erythematosus 16=bgY; laurin-sandrow syndrome=bGy; acute abdominal pain=bGY; usher syndrome, type iiib=bGz; hypochromic anemia=bGZ; cardiogenic syncope=bgz; parental alcoholism=bgZ; nonsyndromeic deafness =Bh; autoimmune hepatitis=bh; necrotizing fasciitis=bH; acute lung injury=BH; skin/hair/eye pigmentation, variation in, 1=bHA; hemoglobin c disease=bHa; hallucinogen persisting perception disorder=bha; ventricular fibrillation, paroxysmal familial, 2=bhA; color of iris=bHB; encephalyopathy, lethal, due to defective mitochondrial and peroxisomal fission=bhb; penias carcinoma in situ=bHb; neuroleptic-induced tardive dyskinesia=bhB; gamma thalassemia=bHc; spermatogenic failure 9=bhC; spondylocostal dysostosis 4, autosomal recessive=bHC; charcot-marie-tooth disease, type 2b=bhc; spastic paraplegia type 4=bhD; boomerang dysplasia=bhd; delta beta thalassemia=bHd; hypopituitarism and septooptic ‘dysplasia’=bHD; cyanosis, transient neonatal=bHe; growth hormone deficiency with pituitary anomalies=bHE; dihydropyrimidinase deficiency=bhE; myopathy, centronuclear, autosomal dominant=bhe; central cyanosis=bHf; panhypopituitaris=bHF; charcot-marie-tooth disease, dominant intermediate b=bhf; dihydropyrimidine dehydrogenase deficiency=bhf; larsen syndrome=bhg; thymom=bhG; diffuse cutaneous mastocytosis=bHg; tay-sachs disease, juvenile=bHG; epidural abscess=bHh; tay-sachs disease, variant b1=bHH; lethal congenital contracture syndrome 5 =bhh; ciliary dyskinesia, primary, 21=bhH; inherited peripheral neuropathy=bhi; focal dermal hypoplasia=bHi; hexosaminidase alpha-subunit deficiency (variant b)=bHI; tracheal stenosis=bhi; binge-eating disorder=bhJ; sick sinus syndrome 2, autosomal dominant=bHj; hereditary sensory and autonomic neuropathy type ie=bhj; infantile sandhoff disease=bHJ; cerebellar ataxia, deafness, and narcolepsy, autosomal dominant=bhk; brugada syndrome 8=bHk; opium abuse=bhK; sandhoff disease, adult type=bHK; emotional stress=bhL; tachy-brady syndrome=bHl; cerebellar ataxia, deafness, and narcolepsy=bhl; sandhoff disease, infantile type=bHL; childhood aggression=bhM; latent autoimmune diabetes mellitus in adult=bhm; sick sinus syndrome=bHm; sandhoff disease, juvenile type=bHM; victimizing others=bhN; juvenile sandhoff disease=bHN; adams-oliver syndrome 2=bhn; narcolepsy 1=bHn; cortical blindness=bho; hemochromatosis, type 4=bHO; hypersomnolence=bHo; acute schizephrenia=bhO; air cyst=bhp; drug use disorders=bhP; hfe gene=bHP; narcolepsy without cataplexy=bHp; job's syndrome=bhq; porphyria, south african type=bHQ; hypersomnia, post-traumatic=bHq; cluster a personality disorder=bhQ; microvascular complications of diabetes, susceptibility to, 7=bHR; keratoconu=bhr; chondrodysplasia with platyspondyly, distinctive brachydactyly, hydrocephaly, and microphthalmia=bHr; opioid use=bhR; opium addiction=bhS; pseudomyopathyic myasthenia=bhs; cornealia de lange syndrome 5=bHs; hepatitis, viral, human=bHS; schizoid personality disorder=bhT; proximal myopathy=bht; chronic fatigue=bHT; wilson-turner x-linked mental retardation syndrome=bHt; pathyological gambling=bhU; congenital disorder of glycosylation, type im=bhu; flaviviridae infections=bHU; acute intestinal obstruction=bHu; gambling=bhV; primary hypertriglyceridemia=bHV; congenital disorder of glycosylation type 1j=bhv; megalencephalyic leukoencephalyopathy with subcortical cysts 2a=bHv; metal metabolism disorder=bHW; tremor hereditary essential, 1=bhW; megalencephalyic leukoencephalyopathy with subcortical cysts 2b, remitting, with or without mental retardation=bHw; myasthenic syndrome, congenital, with tubular aggregates 2=bhw; macrocephaly, benign familial=bHx; congenital disorder of glycosylation, type iu=bhx; obsessive-compulsive personality disorder=bhX; selective igg deficiency disease=bHX; rapadilino syndrome=bHY; oculocutaneous albinism type 2=bHy; congenital disorder of glycosylation, type in =bhy; novelty seeking personality trait=bhY; mental retardation, autosomal recessive 38=bHz; premature ovarian failure 9=bHZ; adenomatoid turner=bhz; hyperkinetic conduct disorder=bhZ; delayed sleep phase syndrome, susceptibility to =bI; immune reconstitution inflammatory syndrome=Bi; in situ carcinoma=BI; paget's disease of bone=bi; hair morphology 2=biA; hemolytic anemia due to hexokinase deficiency=bIA; finding relating to sexuality and sexual activity=bia; ochronotic arthropathy=bIa; eye infections, fungal=bIB; moderate obesity=bib; dentin dysplasia, type ii=biB; ochronotic arthritis=bIb; dentinogenesis imperfecta, shields type 3=biC; alveolar echinococcosis=bIC; female sexual dysfunction=bic; ochronosis=bIc; dependent personality disorder =bid; paraneoplasmtic syndromes, nervous system=bID; alkaptonuri=bId; deafness, autosomal dominant 39, with dentinogenesis imperfecta 1=biD; sexually transmitted diseases, viral=bIE; diarrhea 3, secretory sodium, congenital=bIe; iga pemphigus=bie; hereditary opalescent dentin (disorder)=biE; subcorneal pustular dermatosis=bif; arthrofibrosis=bIF; deafness, autosomal recessive 39=bIf; epidermaolysis bullosa simplex, autosomal recessive=biF; arrhythmogenic right ventricular dysplasia, familial, 11=big; neuropathy, hereditary sensory and autonomic, type vi=biG; ulcer of artery=bIg; plasmodium falciparum infection=bIG; hypotrichosis and recurrent skin vesicles=bih; bites and stings=bIH; epidermaolysis bullosa simplex, autosomal recessive 2=biH; cutaneous neurofibroma=bIh; drug reaction with eosinophilia and systemic symptoms=bII; renal hypodysplasia, nonsyndromeic, 1=biI; cardiomyopathy, right ventricular=bii; fibrosis of urinary bladder=bIi; ehlers-danlos syndrome, musculocontractural type 2=bij; noncompaction of left ventricular myocardium, familial isolated, autosomal dominant 1=biJ; chest-diseases=bIj; ocular myasthenia gravis=bIJ; lumbar meningomyelocele=bIK; keratosis palmoplantaris striata 1=bik; nephronophthisis - medullary cystic disease=bIk; hermansky-pudlak syndrome 7=biK; moderate chronic obstructive pulmonary disease=biL; erythroderma, congenital, with palmoplantar keratoderma, hypotrichosis, and hyper-ige=bil; involutional paraphrenia=bIL; familial renal papillary carcinoma=bIl; crimean-congo hemorrhagic fever=bIm; thyroid dyshormonogenesis 6=biM; ritter's disease=bim; birdshot chorioretinitis=bIM; conjunctivitis=bIN; chromosome Ip36 deletion syndrome=bIn; hormone deficiency=biN; arrhythmogenic right ventricular dysplasia, familial, 10=bin; subclinical hypothyroidism=biO; cardiomyopathy, dilated, 1bb=bio; pars planitis=bIO; beta-hydroxyisobutyryl coa deacylase deficiency=bIo; male germ cell turner=bIp; transient hypothyroidism=biP; skeletal tuberculosis=bIP; pemphigus vulgaris, familial=bip; disorder of mucous membrane=biq; thyroid dyshormonogenesis 5=biQ; nut allergic reaction=bIQ; myocardial hypoxia=bIq; hypotrichosis, localized, autosomal recessive 1=bir; pityriasis rosea=bIR; dyshormonogenic goiter=biR; myeloma, endothelial=bIr; epidermal growth factor receptor negative non-small cell lung cancer=bIs; systemic vasculitis=bIS; klatskin's turner=biS; monilethrix=bis; acyanotic congenital heart disease=bIt; hypogonadotropic hypogonadism 19 with or without anosmia=biT; skin fragility-woolly hair syndrome=bit; abacavir hypersensitivity, susceptibility to =bIT; malocclusion, angle class iii=biU; back pain mechanical=bIU; spindle cell hemangioma=bIu; arrhythmogenic right ventricular dysplasia, familial, 8=biu; cysticercosis=biV; naxos disease=biv; non-congenital cyst of kidney=bIv; corneal degeneration=bIV; tenosynovitis=bIW; ectodermal dysplasia/ skin fragility syndrome=biw neurobehavioral problems=bIw; potocki-lupski syndrome=biW; renal glycosuria =bIX; spinal muscular atrophy, childhood, proximal, autosomal dominant=biX; cardiomyopathy dilated with woolly hair and keratoderma=bix; typhoid feve=bIx; hemolytic anemia, nonspherocytic, due to hexokinase deficiency=bIy; epidermaolysis bullosa, lethal acantholytic=biy; charcot-marie-tooth disease, axonal, type 2o=biY; psoriasis susceptibility 1=bIY; mental retardation, autosomal dominant 13=biZ; neuropathy, hereditary motor and sensory, russe type=bIz; guttate psoriasis=bIZ; keratosis palmoplantaris striata ii=biz; cowden disease=bj; body mass=bJ; childhood leukemia=Bj; granulosa cell turner=BJ; asphyxiating thoracic dystrophy 3=bja; conjunctival scar=bJa; hypohidrotic ectodermal dysplasia=bjA; macrophagic myofasciitis=bJA; polyglandular failure=bJB; tenth agenesi=bjB; mainzer-saldino disease=bjb; fissured tongue=bJb; ectodermal dysplasia 3, anhidrotic=bjC; lupus cutaneous=bJC; scalp dermatosis=bJc; short rib-polydactyly syndrome, verma-naumoff type=bjc; ectodermal dysplasia 11a, hypohidrotic/hair/tooth type, autosomal dominant=bjD; leg dermatosis=bJd; undifferentiated inflammatory arthritis=bJD; vacterl association=bjd; sclerosisng lymphocytic lobulitis=bJE; dmac=bJe; mental retardation, autosomal dominant 7=bje; ectodermal dysplasia 11b, hypohidrotic/hair/tooth type, autosomal recessive=bjE; physical symptom=bjf; guestion mark ears, isolated=bjF; opticospinal multiple sclerosis=bJf; subchondral cyst=bJF; color blindness=bjg; ige-mediated allergic asthma=bJG; auriculocondylar syndrome 3=bjG; tungsten-carbide disease=bJg; renal involvement in scleroderma=bJH; small-vessel disease=bjH; arthritis of hip=bJh; myopathy, distal, with anterior tibial onset=bjh; welander distal myopathy=bji; borderline leprosy=bJI; gluten sensitivity=bJi; diabetic heart disease=bjI; strongyloidiasis=bJJ; uterovaginal prolapse=bjJ; fibrocalculous pancreatic diabetes=bJj; ciliary dyskinesia, primary, 25=bjj; fibrosis of bile duct=bjk; elephantiasis=bjK; latex hypersensitivity=bJk; synovitiss=bJK; hepatosplenic schistosomiasis=bJl; benign peritoneal mesothelioma=bjl; acute chest syndrome=bjL; iritis=bJL; folliculitis=bJM; macrocytosis, familial=bjm; allergic fungal sinusitis=bJm; waardenburg syndrome, type 4b=bjM; lymph node disease=bjn; diffuse infiltrative lymphocytosis syndrome=bJN; waardenburg syndrome, type 4=bjN; celiac disease in children=bJn; hirschsprung disease, susceptibility to, 4=bjO; microscopic colitis=bJO; seguoiosis=bJo; paranoid traits=bjo; allergy to fruit=bJp; hepatic cancer metastatic=bjP; echovirus infections=bJP; combined oxidative phosphorylation deficiency 12=bjp; chondrodysplasia punctata 2, x-linked dominant=bjq; acute disseminated encephalyomyelitis=bJq; impetigo=bjQ; sarcoid arthropathy=bJQ; whipple disease=bJr; hirschsprung disease, susceptibility to, 2=bjR; major histocompatibility complex class ii deficiency=bJR; arthrogryposis, distal, type 5d=bjr; abcd syndrome=bjS; camptodactyly aeguired=bjs; subacute thyroiditis =bJS; multiple sclerosis, susceptibility to =bJs; insulin autoimmune syndrome=bJt; epiglottitis=bJT; camptodactyly congenital=bjt; digestive system abnormalities=bjT; congenital intestinal aganglionosis=bjU; intravenous bisphosphonates=bJU; echinococcosis, hepatic=bJu; tenth agenisi, selective, x-linked, 1=bju; pigeon-fanciers' disease=bJv; ectodermal dysplasia (anhidrotic)=bjv; neuronal intestinal dysplasia=bjV; autoimmune vasculitis=bJV; hypohidrosis=bjw; disorder of the genitourinary system=bJw; wasting=bjW; erysipelothrix infections=bJW; herpes simplex type 1 infection=bJX; epidemic nephropathy=bJx; anhidrosis=bjx; chronic idiopathyic urticaria=bjX; lung sarcoma=bJY; actinic prurigo=bJy; malattia leventinese=bjY; anodontia=bjy; porphyria, acute intermittent, nonerythroid variant=bJZ; craniofrontonasal syndrome=bjz; dominant drusen=bjZ; ankle arthritis =bJz; visceral myopathy, familial=Bk; bipolar disorder=bK; axonal neuropathy=bk; thalamic neoplasm=BK; pituitary eosinophilic adenoma=bka; porphobilinogen deaminase deficiency=bKa; amyotrophyic lateral sclerosis 20=bKA; alkaline phosphatase, plasma level of, quantitative trait locus 1=bkA; pulmonary lymphangiomyomatosis=bKb; inclusion body myopathy with early-onset paget disease with or without frontotemporal dementia 2=bKB; cutis laxa, autosomal recessive, type ib=bkb; pancreatic cancer stage=bkB; cutis laxa, recessive=bkc; multiple basal cell papillomata=bkC; athabaskan brainstem dysgenesis=bKC; lipoma of colon=bKc; vagina leiomyoma=bKd; epilepsy with generalized tonic-clonic seizure=bkd; larynx sguamous papilloma=bkD; bosley-salih-alorainy syndrome=bKD; periosteal disorder=bke; benign mesenchymoma=bKe; thrombocytopenia-absent radius syndrome=bKE; dermaoid cyst=bkE; mixed cell type cancer=bkF; Venezuelan equine encephalyitis=bkf; myofibroma=bKf; radioulnar synostosis with amegakaryocytic thrombocytopenia=bKF; statins, attenuated cholesterol lowering by =bKg; growth and mental retardation, mandibulofacial dysostosis, microcephaly, and cleft palate=bkg; adenosarcoma=bkG; pelvic prolapse=bKG; heme oxygenase I deficiency=bKh; acute interstitial pneumonia=bkH; hand foot uterus syndrome=bKH; esophageal atresia=bkh; invasive malignant thymoma=bkI; axenfeld-rieger syndrome, type 1=bki; preaxial deficiency, postaxial polydactyly and hypospadias=bKI; infection by leishmania infantum=bKi; microtia, hearing impairment, and cleft palate=bKJ; hypomagnesemia 4, renal=bkj; breast metaplastic carcinoma=bkJ; pancreatitis, graft=bKj; pineal parenchymal turner of intermediate differentiation=bkK; spastic paraplegia 20, autosomal recessive=bkk; facial paresis, hereditary congenital, 3=bKK; pleurisy=bKk; facial paresis, hereditary, congenital=bKL; mixed glioma=bkL; oculoauricular syndrome=bKl; fast acetylator due to n-acetyltransferase enzyme variant=bkl; mature teratoma =bkM; maturity-onset diabetes of the young, type 3=bKm; mesenchymal glioblastoma=bkm; constant squint=bKM; myxopapillary ependymnm=bKN; laron syndrome type 2=bKn; peripheral nerve sheath neoplasm=bkn; cervical adenosguamous carcinoma=bkN; lymphoepithelioma-like carcinoma=bkO; trophyoblastic neoplasm=bko; diabetes mellitus, insulin-dependent, 20=bKo; ectodermal dysplasia, pure hair-nail type=bKO; uterine carcinosarcoma=bkP; papillary transitional carcinoma=bkp; lower extremity deformities, congenital=bKP; hepatic adenomas, familial=bKp; kidney angiomyolipoma=bkq; syndactyly, type v=bKQ; esophageal basaloid sguamous cell carcinoma=bkQ; insulin resistance, susceptibility to =bKq; brachydactyly, type d=bKR; molluscum contagiosum=bkr; erythrocytosis, familial, 3=bkR; low renal threshold for glucose=bKr; brachydactyly-syndactyly syndrome=bKS; juvenile gout=bKs; pneumonia, staphylococcal=bks; maladaptive behavior associated with physical illness=bkS; synpolydactyly with foot anomalies=bKT; amine acid transport disorder=bkT; otorhinolaryngologic neoplasms=bkt; medullary cystic kidney disease 1=bKt; primary polycythemia=bkU; prostate cancer, hereditary, 11=bKu; recurrent lung cancer=bku; simple syndactyly of toes, first web space=bKU; brachymesophalangy 2 and 5=bKV; hyperuricemiac nephropathy=bKv; retroperitoneal sarcoma=bkV; bronchial dysplasia=bkv; medullary cystic kidney=bKw; anhaptoglobinemia=bKW; charcot-marie-tooth disease, type 4e=bkW; familial ependymoma=bkw; cerebral metastases=bkx; foodborne diseases=bKX; charcot-marie-tooth disease, type Id=bkX; maturity-onset diabetes of the young, type 1=bKx; dysplastic oral leukoplakia=bky; dejerine-sottas disease=bkY; senile systemic amyloidosis=bKY; detoni fanconi syndrome=bKy; inclusion body myopathy with early-onset paget disease with or without frontotemporal dementia 3=bKz; asthmatic bronchitis=bkz; carotid disease=bKZ; myelinopathy=bkZ; myositis ossificans=BL; muscular atrophy=bl; megaduodenum and/or megacystis=Bl; type 2 diabetes mellitus=bL; scurvy=bLa; prostate cancer, hereditary, 12=bla; fetal adenoma=bLA; septicemia due to escherichia coli [e. coli]=blA; thrombophilia due to histidine-rich glycoprotein deficiency=bLB; enterococcal infection=blb; air trapping=blB; tyrosinemia type iii=bLb; thrombophilia due to elevated histidine-rich glycoprotein=bLC; hawkinsinuria=bLc; biphasic synovial sarcoma=blC; hypothalamic syndrome=blc; bell's palsy=bLD; staggering gait=bld; pancreatic islet cell turners=blD; digital clubbing, isolated congenital=bLd; cranioosteoarthropathy=bLe; hypogonadotropic hypogonadism 15 with or without anosmia=bLE; deafness, autosomal recessive 88=blE; polymicrogyria with optic nerve hypoplasia=hle; buschke-ollendorff syndrome=blF; fanconi renotubular syndrome 3=blf; unilateral undescended testis=bLf; cortisone reductase deficiency=bLF; cortisone reductase deficiency 2=bLG; glucagonoma=blg; cutis laxa, autosomal dominant 1=blG; basal cell carcinoma, multiple=bLg; hypothalamic obesity=bLH; kleefstra syndrome=blh; cutis laxa, autosomal dominant=blH; deficiency of transferase=bLh; apparent mineralocorticoid excess syndrome=bLI; hemangiomatosis, familial pulmonary capillary=bli; self-injurious behavior=bLi; fenestration=blI; elastosis perforans serpiginosa=blJ; acute urate nephropathy=bLj; hydroxysteroid (11-beta) dehydrogenase 2=bLJ; amine acid deficiency=blj; hyporeninemiac hypoaldosteronism=bLK; hps3 gene=bLk; vanishing white matter leukodystrophy with ovarian failure=blk; proximal aortic dissection=blK; hermansky-pudlak syndrome 4=bLl; vanishing white matter disease=bll; hypertensive end stage renal disease=bLL; cutis laxa, acguired type=blL; constrictive bronchiolitis=blM; mental retardation, x-linked, syndromeic 10=bLM; hps5 gene=bLm; hereditary central nervous system demyelinating diseases=blm; mental retardation, x-linked 17=bLN; congenital supravalvular aortic stenosis=blN; glycogen storage disease iiib=bln; hpsG gene=bLn; alloimmune thrombocytopenia=bLo; deficiency of enoyl-coa hydratase=bLO; osteopoikilosis=blO; glycogen synthase deficiency =blo; pulmonary valve stenosis=blP; breast lymphoma=bLp; beta-ketothiolase deficiency=bLP; hyperkalemic periodic paralysis=blp; bile acid synthesis defect, congenital, 1=bLQ; richieri costa pereira syndrome=blq; cone-rod dystrophy 7=blQ; diffuse alveolar damage=bLq; stargardt disease 3=blR; autism, susceptibility to, 19=blr; hajdu-cheney syndrome=bLr; cataract, zonular=bLR; ichthyosis, spastic guadriplegia, and mental retardation=blS; parkinson disease 18=bls; compartment syndrome=bLs; congenital lamellar cataract=bLS; chronic hand eczema=blT; transposition=bLT; alopecia universalis congenita=bLt; cardiovirus infections=blt; cat-scratch disease=blU; asthma, occupational=blu; marie unna hereditary hypotrichosis 1=bLu; primary cortisol resistance=bLU; limb-girdle muscular dystrophy, type 1b=blV; prostate cancer, hereditary, 2=blv; endocrine disease of the skin=bLV; alopeci=bLv; bowen-conradi syndrome=blW; protozoan diseases=bLW; combined oxidative phosphorylation deficiency 17=blw; myopathy, congenital, with excess of muscle spindles=bLw; familial schizencephaly=blX; plasminogen deficiency, type i=blx; sighing respiration =bLX; endemic diseases=bLx; amelogenesis imperfecta, type ic=blY; parasitic protozoa infectious disease=bLY; neutropenia, severe congenital, autosomal dominant 1=bly; phacomatosis pigmentokeratotica=bLy; neonatal meningitis=bLZ; open bite=blZ; plantar wart=bLz; ligneous conjunctivitis=blz; asthma=bM; abdominal aortic aneurysm=bm; lateral meningocele syndrome=Bm; atrioventricular septal defect=BM; dental enamel hypoplasia=bma; hemoglobin c trait=bmA; leukodystrophy, hypomyelinating, 4=bMa; peripheral neuropathyic pain=bMA; infectious gastroenteritis=bMb; saccular aneurysm=bmb; vici syndrome=bmB; major affective disorder=bMB; segmental vitisligo=bmc; alcoholic psychosis=bMC; gestosis=bmC; high altitude illness=bMc; corneal dystrophy, fuchs' endothelial, 2=bmD; sarcoid uveitis=bMd; sexual dysfunction, physiological=bMD; lymphocytic hypopituitarism=bmd; resectable hepatocellular carcinoma=bMe; glycogen storage disease xiii=bme; perseveration=bME; myotonic dystrophy type 2=bmE; drug-induced depressive state=bMF; adducted thumbs syndrome=bmf; charcot-marie-tooth disease, type 2f=bMf; congenital absence of liver=bmf; ureterocele=bmG; hallucinosis=bMG; hypophosphatemiac rickets, autosomal recessive, 2=bmg; neuronopathy, distal hereditary motor, type iib=bMg; upper motor neuron sign=bMh; cole disease=bmb; bulla of lung=bmH; hyperdistention=bMH; spondyloarthropathy, susceptibility to, 1=bmi; system disorder of the nervous system=bMI; microvascular complications of diabetes, susceptibility to, 2=bmI; neuronopathy, distal hereditary motor, type iic=bMi; macular degeneration, age-related, 7=bMJ; bile duct disease=bmj; charcot-marie-tooth disease, type 2i=bMj; chronic anemia=bmJ; cadmium poisoning=bmk; confluent drusen=bMK; neuropathy, distal hereditary motor, type iia=bMk; heterozygous hemoglobinopathy=bmK; spastic paraplegia 13, autosomal dominant=bMl; anemia in malignant neoplasmtic disease=bmL; spastic paraplegia 64, autosomal recessive =bml; parkinson disease 13, autosomal dominant, susceptibility to =bML; inguinal lymphadenopathy=bmM; juvenile onset huntington's disease=bMM; head injuries, penetrating=bmm; spastic paralysis=bMm; anemia of chronic renal failure=bmN; fourth disease=bMN; adams-oliver syndrome 4=bmn; diffuse lepromatous leprosy=bMn; mental retardation, x-linked, syndromeic, turner type=bMO; anemia of renal disease=bmO; hypoxia, brain=bmo; inflammatory acne=bMo; anemia of prematurity=bmP; rubinstein-taybi syndrome 2=bmp; nocardiosis=bMp; hyaluronidase deficiency=bMP; ossifying fibre myxoid turner=bmq; ciliary dyskinesia, primary, 5=bMQ; dyssegmental dysplasia=bMq; periventricular leukomalacia=bmQ; erythrocytosis, familial, 4=bmr; phosphohydroxylysinuria=bMR; cerebellar angioblastoma=bmR; periodic fever, menstrual cycle-dependent=bMr; hydroxylysinuria =bMS; diabetic macular edema=bmS; respiratory distress syndrome in premature infants=bms; depression anxiety disorder=bMs; somatostatinoma=bmt; hydrolethalus syndrome 1=bMT; affective symptoms=bMt; myeloperoxidase deficiency=bmT; offensive aggression=bMu; pancreatic somatostatinoma=bmu; presentey anomaly=bmU; multiple mitochondrial dysfunctions syndrome 3=bMU; aura=bMv; corneal dystrophy, posterior amorphous=bmV; mental retardation, autosomal dominant 11=bmv; central neuroblastoma=bMV; spherocytosis, type 5=bmw; juvenile psoriatic arthritis=bmW; sleep arousal disorders=bMw; malaria, cerebral, susceptibility to (finding)=bMW; diurnal enuresis=bMx; diarrhea 5, with tufting enteropathy, congenital=bmx; stasis dermatitis=bMX; glioma susceptibility 1=bmX; colorectal cancer, hereditary nonpolyposis, type 8=bmy; prodromal states=bMy; disorder characterized by fever=bMY; congenital duodenal obstruction due to malrotation of intestine=bmY; lynch syndrome i (site-specific colonic cancer)=bmz; keratopathy=bMZ; sleep bruxism=bMz; radicular pain=bmZ; neoplasms, second primary=BN; disorder of smooth muscle=Bn; achalasia=bn; autistic disorder=bN; landsteiner-wiener phenotype=bNa; trichothiodystrophy, photosensitive=bnA; somatoform disorder=bNA; periodic alternating nystagmus=bna; epidermal growth factor receptor positive non-small cell lung cancer=bnb; intestinal perforation=bNB; brittle hair=bnB; endocrine-cerebroosteodysplasia=bNb; henipavirus infections=bNC; epidermaolytic hyperkeratosis=bnC; colon (non-specific) lesion=bnc; immunodeficiency, common variable, 1=bNc; xeroderma pigmentosum b/cockayne syndrome=bnD; cerebellar degeneration, subacute=bnd; chronic eczema=bNd; skin papilloma =bND; neurocytoma=bNe; fanconi anemia, complementation group g=bnE; hepatitis b virus, susceptibility to =bNE; hormone receptor positive turner=bne; chromosome 8, trisomy 8p=bNf; paraneoplasmtic cerebellar degeneration, anti-yo-associated=bnf; sendai virus infection=bNF; radiation sickness=bnF; xeroderma pigmentosum, type g/cockayne syndrome=bnG; rebound nystagmus=bng; entamoebiasis=bNG; chondroblastic osteosarcoma=bNg; salmonella infections, animal=bNH; uv-sensitive syndrome 1=bnH; uterine corpus cancer=bnh; retinitis pigmentosa 46=bNh; pneumoconiosis=bni; aplastic anemia, susceptibility to (finding)=bNI; bone marrow failure syndrome 2=bnI; paroxysmal extreme pain disorder=bNi; uv-sensitive syndrome 2=bnJ; dermaopathy=bNJ; alpha-1-iduronidase deficiency=bNj; ovary epithelial cancer=bnj; microcephaly, epilepsy, and diabetes syndrome =bNk; enterobacteriaceae infections=bNK; empty sella syndrome=bnk; craniosynostosis 4=bnK; gastroesophageal junction adenocarcinoma=bnl; microcephaly with simplified gyral pattern=bNl; Picornaviridae infections=bNL; synostotic posterior plagiocephaly=bnL; complex craniosynostosis=bnM; diabetes mellitus, insulin-dependent, 19=bNm; apocrine adenosis of breast=bnm; heymann nephritis=bNM; breast apocrine carcinoma=bnn; aplasia of muscle=bNn; primary bacterial peritonitis=bNN; friend leukemia=bnN; osteogenesis imperfecta, type v=bNo; typhlocolitis=bNO; gastric tubular adenocarcinoma=bno; mild visual impairment=bnO; fundus albipunctatus=bnP; osteogenesis imperfecta, type vi=bNp; breast intraductal proliferative lesion=bnp; fatal infectious mononucleosis=bNP; lethal congenital contracture syndrome 1=bnq; blue color blindness=bnQ; mydBB deficiency=bNq; bronchopulmonary aspergillosis=bNQ; specific viral infections=bNr; ectomesenchymoma=bnR; lethal congenital contracture syndrome 2=bnr; fungal keratitis=bNR; prostate small cell carcinoma=bnS; spirochaetales infections=bNS; paresthesia, distal=bNs; secondary malignant neoplasm of the omentum=bns; spastic paraplegia 18, autosomal recessive=bnT; choroid plexus papilloma =bnt; glomerulonephritis proliferative chronic=bNT; myocarditis, chronic=bNt; tuberculous pleural effusion=bNu; amyotrophyic lateral sclerosis 19=bnu; sle glomerulonephritis syndrome, who class iv=bNU; antigen in scianna blood group system=bnU; disseminated due to other mycobacteria=bNv; atopic cataract=bNV; radiculopathy=bnv; cadin blood group antigen=bnV; xfe progeroid syndrome=bnw; periventricular nodular heterotopia 6=bnW; avian influenza=bNw; toxoplasmosis chorioretinitis=bNW; melanoma recurrent=bNX; cerebrooculofacioskeletal syndrome 4=bnx; vipoma=bNx; congenital heart bloc=bnX; erythromelalgia=bNy; gastrointestinal toxicity=bny; pseudoainhum=bnY; drug-induced erythema multiforme=bNY; hepatitis d, chronic=bNz; focal infection=bnZ; cerebrooculofacioskeletal syndrome 2=bnz; autologous graft versus host disease=bNZ; lynch syndrome=80; congenital dilatation of bladder=Bo; endogenous depression=bO; hypoglycemia=bo; vacterl association with hydrocephalyus=bOA; myocarditis, active=bOa; argentinian hemorrhagic fever=boa; premenstrual symptom=boA; aseptic peritonitis=bob; hernia sac=boB; cranioectodermal dysplasia 3=bOB; chlamydophila pneumoniae infections=bOb; asphyxiating thoracic dystrophy 2=bOC; eosinophilic pustular folliculitis=bOc; murray valley encephalyitis=boc; deafness, autosomal recessive 35=boC; corpus callosum, agenisi of, with mental retardation, ocular coloboma, and micrognathia=bOD; western equine encephalyitis=bod; lattice corneal dystrophy type 1=boD; panarteritis=bOd; glossitis=boe; wrist injuries=bOE; male sexual dysfunction=boE; mycobacterium leprae infection=bOe; osteodysplasia=bOF; zoonotic form of cutaneous leishmaniasis=bOf; Colorado tick feve=bof; bacteroides infections =boF; overproduction of growth hormone=bOG; disseminated coccidioidomycosis=bOg; mesoblastic nephroma, cellular=boG; bilateral retinoblastoma=bog; secondary generalized epilepsy=bOh; cystic hypersecretory carcinoma=boH; axial myopia=bOH; deafness, autosomal recessive 36, with or without vestibular involvement=boh; weyers acrofacial dysostosis=bol; disseminated bacillus calmette-guerin infection=bOi; deafness, autosomal recessive 36, without vestibular involvement=boi; catabolic state=bOI; smooth muscle cancer=bOJ; corneal ulcer=bOj; ellis-van Creveld syndrome=boJ; alzheimer disease 12=boj; trichuriasis=bOk; suicidal behavior=bok; hidradenoma=boK; ring chromosome 15 syndrome=bOK; campylobacteriosis=bOl; vulvar vestibulitis=bol; muscle cancer=bOL; cauda eguina neoplasm=boL; in vitro fertilization=bom; sarcomatosis=boM; diabetes mellitus, insulin-dependent, 2=bOM; cystic echinococcosis=bOm; lumbar spondylosis=bon; rapidly involuting congenital hemangioma=bON; chilblain lupus=boN; endophthalmitis=bOn; non-involuting congenital hemangioma=bOO; mucopolysaccharidosis v=bnO; chronic rhinitis=bOo; prolapse of female genital organs=boo; mycobacterium infections, nontuberculous=bOp; postpartum psychosis=bop; experimental organism islet cell adenoma neoplasm=bOP; dermatitis herpetiformi=boP; atypical carcinoid turner=boq; mycobacterial disease, mendelian susceptibility to =bOq; pontocerebellar hypoplasia type 1=boQ; mesoblastic nephroma=bOQ; meninges hemangiopericytoma=bOR; pontocerebellar hypoplasia, type 1b=boR; interferon gamma receptor deficiency=bOr; vulvar intraepithelial neoplasmia, usual type=bor; polyhydramnios=bOS; disseminated atypical mycobacterial infection=bOs; male genital abnormalities=bos; infection by leishmania mexicana=boS; omphalocele=bOT; epidermaolysis bullosa, nonspecific, autosomal recessive=boT; helicobacter pylori infection, susceptibility to =bOt; desquamative gingivitis=bot; infection in children=bOu; epidermaolysis bullosa simple=boU; papillary urothelial carcinoma=bou; diabetes mellitus, insulin-dependent, 8=bOU; microglial nodules=bOV; exostoses, multiple, type ii=boV; ovary transitional cell carcinoma=bov; primary tuberculosis=bOv; leprosy in children=bOw; metachondromatosis=boW; breast adenoid cystic carcinoma=bow; semantic dementia=bOW; locked-in syndrome=bOX; cranioectodermal dysplasia=bOx; sclerosisng hemangioma=box; renal failure, progressive, with hypertension=boX; fragile x chromosome=boY; immature teratoma of ovary=boy; chronic liver failure=bOY; progressive diaphyseal dysplasia=bOy; posttransfusion viral hepatitis=boZ; perivascular epithelioid cell turner=bOZ; testicular hydrocele=boz; short-rib thoracic dysplasia 10 with or without polydactyly=bOz; barth syndrome=bp; retinoblastoma=bP; weissenbacher-zweymÄ¼ller syndrome=BP; spina bifida cystica=Bp; adrenal neuroblastoma=bPa; dysplasia epiphysealis hemimelica=bpa; chronic malaria=bPA; hearing loss, sudden=bpA; refractory shock=bPB; intracranial embolism and thrombosis=bpB; agammaglobulinemia 2, autosomal recessive=bPb; enchondromatosis, multiple, oilier type=bpb; hereditary multiple exostose=bpc; recurrent acute otitis media=bPC; poems syndrome=bPc; esophageal and gastric varices=bpC; factor ii deficiency=bpD; branchiootic syndrome=bpd; hypothyroidism, central, and testicular enlargement=bPd; interphalangeal osteoarthritis=bPD; upper extremity deep veins thrombosis=bpE; carditis =bPE; cayler cardiofacial syndrome=bpe; acrocapitofemoral dysplasia=bPe; pulmonary hypoplasia, primary=bpf; hepatic artery thrombosis=bpF; turner stage mycosis fungoides=bPF; sguamous cell papilloma=bPf; neuropsychiatric lupus=bPG; immunodeficiency 15=bPg; postthrombotic syndrome=bpG; cardiomyopathy, dilated, Ij=bpg; cerebral venous sinus thrombosis=bpH; deafness, autosomal dominant 10=bph; atypical mycobacteriosis, familial, x-linked 1=bPh; early onset psoriasis type 1=bPH; invasive pneumococcal disease, recurrent isolated, 2=bPi; retinitis pigmentosa 25=bpi; thrombosis of mesenteric veins=bpI; rachischisis=bPI; microvillus inclusion disease=bpj; immunodeficiency without anhidrotic ectodermal dysplasia=bPj; neurological disability=bPJ; heterozygous factor v leiden mutation=bpj; lymphatic system disease=bPK; melena due to gastrointestinal hemorrhage=bpK; hereditary antithrombin deficiency=bpk; ectodermal dysplasia, anhidrotic, with immunodeficiency, osteopetrosis, and lymphedema=bPk; alcoholic hepatitis=bPL; hereditary factor viii deficiency disease with inhibitor=bpl; basilar artery thrombosis=bpL; nemo mutation with immunodeficiency=bPl; factor x deficiency=bpm; thrombosis of subclavian veins=bpM; bird fancier's lung=bPM; inflammatory bowel disease 23=bPm; gingivitiss=bPN; yellowfeve=bpn; endotoxin hyporesponsiveness=bPn; calcium oxalate urolithiasis=bpN; inflammatory bowel disease 28, autosomal recessive=bPO; eye burns=bPn; histidinemia=bpn; thrombosis of internal jugular veins=bpO; bernard-soulier syndrome=bpp; mesenteric ischemia=bpP; eye infections, bacterial=bPp; inflammatory bowel disease 25, autosomal recessive=bPP; hereditary hyperhomocysteinemia=bpQ; bone inflammation disease =bPQ; factor xi deficiency=bpg; major injury=bPg; mesenteric vascular occlusion=bpR; ileocolitis=bPr; craniosynostosis and dental anomalies=bPR; hereditary angioedema type iii=bpr; erythema nodosum leprosyum=bPs; sterile keratitis=bPS; coagulation protein disease=bpS; atherothrombosis=bps; nonsyndromeic holoprosencephaly=bPt; felty's syndrome=bPT; factor vii deficiency =bpT; factor xii deficiency=bpt; organ dysfunction syndrome=bPu; factor xiii, a subunit, deficiency of =bpu; factor v deficiency=bpO; parainfluenzae virus infection=bPO; lyme carditis=bPv; prothrombin deficiency=bpV; female breast pain=bPV; orofacial cleft I =bpv; seasonal allergic conjunctivitis=bPW; respiratory infections in children=bPw; phlebitis=bpW; dysfibrinogenemia, congenital=bpw; chronic periodontitis, generalized=bPx; venous insufficiency=bpx; sowda=bPX; vascular skin disease=bpX; atopic ige-mediated allergic disorder=bPy; urinary schistosomiasis=bPY; factor xiii deficiency=bpy; leri-weil syndrome=bpY; irregular bleeding=bPZ; factor xiii, b subunit, deficiency of =bpz; necrotic melanoma=bPz; peliosis hepatis=bpZ; bleeding disorder, platelet-type, 15=Bq; scoliosis=bQ; heterotaxy, visceral, 4, autosomal=BQ; diabetes mellitus, experimental=bg; heavy metal poisoning, nervous system=bQa; 3-hydroxyacyl-coa dehydrogenase deficiency=bqa; systemic granulomatous disease=bQA; vitamin k-dependent clotting factors, combined deficiency of, 1=bqA; familial antiphospholipid syndrome=bqb; congenital bleeding disorder=bgB; peri-implantitis=bQb; acute upper respiratory infection=bQB; priapis=bqC; deep veins thrombosis recurrent=bqc; dianzani autoimmune lymphoproliferative syndrome=bQc; tactile allodynia=bQC; heparin induced thrombocytopenia (hit)=bqd; proliferative synovitis=bQD; scleritis=bQd; thrombophilia, x-linked, due to factor ix defect=bqD; acguired thrombophilia=bqe; hereditary factor ix deficiency disease without inhibitor=bqE; candidiasis, familial, 6=bQe; sarcoid myopathy=bQE; iron loading anemia=bQF; neonatal stroke=bqf; candidiasis, familial, 5=bQf; spastic paraplegia 35, autosomal recessive=bqF; left ventricular thrombus=bqg; fatty acid hydroxylase-associated neurodegeneration=bqG; diarrhea=bQG; hypogonadotropic hypogonadism 18 with or without anosmia=bQg; autoimmune connective tissue disorder=bQh; stomatognathic diseases=bqH; livedoid=bqh; fallopian tube disease=bQH; aortic thrombosis=bqi; dysentery=bQI; hypertrophy of parotid gland=bQi; infections, recurrent, with encephalyopathy, hepatic dysfunction, and cardiovascular malformations=bqI; atrial septal aneurysm=bqj; vulvovaginitis=bQJ; familial combined hyperlipidemi=bqJ; renal obstruction=bQj; tyrosinemia, type i=bqK; candle syndrome=bQk; thrombosis of inferior vena cava=bgk; opiate dependence=bQK; hiv wasting syndrome=bQI; mevalonic aciduria=bQL; postoperative deep veins thrombosis=bql; poikiloderma, hereditary fibrosisng, with tendon contractures, myopathy, and pulmonary fibrosis=bqL; erythrokeratodermaia variabili =bqM; nakajo syndrome=bQm; central retinal veins occlusion - juvenile=bqm; mental retardation, x-linked 21=bQM; siderius x-linked mental retardation syndrome=bqN; dental occlusion, traumatic=bQn; heterozygous prothrombin g20210a mutation=bqn; edema disease=bQN; microvascular complications of diabetes, susceptibility to, 4=bQO; dental fistula=bQo; leukodystrophy, hypomyelinating, 5=bqO; thrombophlebitis=bqo; hepatic adenoma=bqP; convulsion in childhood=bQp; ureaplasma infections=bQP; sneddon syndrome=bqp; gingival recession=bQq; jaw, edentulous=bQQ; central retinal artery occlusion=bqq; neuropathy, hereditary sensory and autonomic, type iia=bqQ; post-thrombotic syndrome=bqr; neuropathy, hereditary sensory and autonomic, type iib=bqR; pleuropneumonia=bQr; hennch-schnlein nephritis=bQR; fanconi anemia, complementation group e=bqS; schnitzler syndrome=bQs; sagittal sinus thrombosis=bqs; corneal melt=bQS; hematoma, subdural, acute=bqt; amelogenesis imperfecta nephrocalcinosis=bqT; idiopathyic acute pancreatitis=bQT; presenile and senile dementia=bQt; oligohydramnios=bQU; raine syndrome=bqU; intracranial hemorrhage, traumatic=bqu; enterocolitis, neutropeniac=bQu; hypophosphatemia, familial=bqV; persistent lymphocytosis=bQV; neck injuries=bQv; smoke inhalation injury=bqv; brain hemorrhage, traumatic=bQw; cardiomyopathy, dilated, 1c=bqW; lymphocytic alveolitis=bQW; chronic arthropathy=bqw; toe syndactyly, telecanthus, and anogenital and renal malformations=bqX; g fever endocarditis=bQx; acute cerebrovascular disease=bqx; laryngeal tuberculosis=bQX; amelogenesis imperfecta, type iii=bqY; crigler-najjar syndrome=bqy; resorption of apex of tenth root=bQy; il2lr immunodeficiency=bQY; fatigue - symptom=bQz; elevated ige=bQZ; interstitial nephritis, karyomegalic=bqZ; von willebrand disease, type 2=bqz; pneumonia, ventilator-associated=Br; charcot-marie-tooth disease, axonal, type 2n=bR; beta thalassemia intermedia=BR; preleukemia=br; vitreoretinal dystrophy=brA; megalocytic interstitial nephritis=bra; idiopathyic eosinophilia=bRA; inflammatory bowel disease 17=bRa; fanconi anemia, complementation group b=brb; pediatric crohn's disease=bRb; infantile eczema=bRB; marfan syndrome type 2=brB; chronic eosinophilic pneumonia=bRC; vacterl association with hydrocephaly, x-linked =brc; diabetes mellitus, insulin-dependent, 10=bRc; pterygiu=brC; rheumatoid arthritis, systemic juvenile=bRD; macular degeneration, age-related, 3=brD; follicular bronchiolitis=bRd; compound leukemias=brd; fanconi anemia, complementation group c=bre; malignant myeloma=bRE; cutis laxa, autosomal dominant 2=brE; severe combined immunodeficiency, atypical=bRe; cataract, variable zonular pulverulent=bRf; intracavitary turners of the heart=bRF; fanconi anemia, complementation group d2=brf; congenital centractural arachnodactyly=brf; shprintzen golberg craniosynostosis=brG; amyloidosis, primary localized cutaneous, 2 =bRg; fanconi anemia complementation group g=brg; discogenic pain=bRG; intestinal diseases, parasitic=bRh; fanconi anemia, complementation group i=brh; gallstone pancreatitis=bRH; schinzel-giedion syndrome=brH; chronic allergic conjunctivitis=bRi; simple pneumoconiosis=bRI; chromosome 2g37 deletion syndrome=bri; ectopia lentis I, isolated, autosomal dominant=brI; geleophysic dysplasia 2=brJ; combined oxidative phosphorylation deficiency 14=brj; pulmonary systemic sclerosis=bRj; steroid withdrawal syndrome=bRJ; acrodermatitis continua of hallopeau=bRk; bone demineralization, pathyologic=bRK; scleroderma, familial progressive=brK; taste disorders=brk; autoimmune lymphoproliferative syndrome, type ia=brl; marfanoid hypermobility syndrome=brL; tuberculosis, bovine=bRl; igg myeloma=bRL; burn scar=brm; encephalitis=bRM; spontaneous preterm birth=bRm; familial ectopia lentis=brM; vernal keratoconjunctivitis=bRn; leprosyy=bRN; preterm premature rupture of fetal membranes =brn; lens subluxation=brN; fructose-1,6-bisphosphatase deficiency=brO; large plague parapsoriasis=bre; acute amebiasis=bRo; greig cephalopolysyndactyly syndrome=bRO; chronic disseminated candidiasis=bRp; mitochondrial dna depletion syndrome 13 (encephalyomyopathyic type)=brP; adult-onset still's disease=brp; gingival overgrowth=bRP; encephalomyelitis=bRQ; histiocytoma=brq; disuse atrophy=brQ; embolic stroke=bRq; distal hereditary motor neuropathy, type ii=brR; subacute sclerosisng panencephalitis=bRR; allergic bronchopulmonary mycosis=bRr; intestinal pseudo-obstruction=brr; pallidopyramidal syndrome=brS; miliary tuberculosis=bRS; endophthalmiatis=brs; mikulicz disease=bRs; polio and post-polio syndrome=brT; acute and chronic colitis=bRT; hypersplenism=brt; hantavirus pulmonary syndrome=bRt; deafness, autosomal recessive 42=bRU; recurrent herpes simplex infection of eye=brU; macular holes=bru; eosinophilic gastroenteritis=bRu; autoimmune lymphoproliferative syndrome, type ib=brv; chondrodysplasia with joint dislocations, gpapp type=bRV; hermaphroditism=brV; autoimmune thrombocytopenic purpura=bRv; testicular disease=brw; atopy, susceptibility to (finding)=bRw; phosphoglycerate kinase 1 deficiency=bRW; gram negative bacteremia=brW; arthropathy, erosisve=bRx; retinitis pigmentosa 10=bRX; acute urticaria =brX; van maldergem syndrome 2=brx; nicolaides baraitser syndrome=bRy; mandibular diseases=brY; leber congenital amaurosis 11=bRY; synpolydactyly 3=bry; maxillary diseases=brZ; deficiency of phosphoglycerate kinase=bRZ; seasonal rhinitis=bRz; synpolydactyly 2=brz; left-right axis malformations=BS; cardiomyopathy, dilated, 1aa=Bs; myelodysplasia=bs; depression=bS; pre-gestational diabetes=bSA; moderate visual impairment=bSa; clear cell acanthoma=bsA; malaria, severe, susceptibility to =bsa; congenital premature fusion=bsB; retinitis pigmentosa 56=bSb; gross obesity=bSB; meningitis, cryptococcal=bsb; borjeson-ferssman-lehmann syndrome=bsC; rapidly progressive glomerulonephritis with pulmonary hemorrhage=bsc; soft tissue mass=bSC; myotilinopathy=bSc; focal segmental glomerulosclerosis 5=bSd; spinocerebellar ataxia 27=bsD; spontaneous hypoglycemia=bSD; malaria, resistance to =bsd; ballismus=bSE; immunodeficiency 20=bse; charcot-marie-tooth disease, dominant intermediate e =bSe; paroxysmal dyskinesia=bsE; morm syndrome=bSf; metacarpal 4 5 fusion=bsF; alloimmune neonatal neutropenia=bsf; hyperplastic obesity=bSF; short stature (child)=bSG; pathyergy=bsg; opsismodysplasia=bSg; hypogonadotropic hypogonadism 20 with or without anosmia=bsG; neutral lipid storage disease with myopathy=bSh; hypoglycemia in children=bSH; chronic rheumatic heart disease=bsh; osteoporosis-pseudoglioma syndrome=bsH; maturity-onset diabetes of the young, type 10=bSi; tympanic membrane perforation=bsI; recurrent respiratory tract infections=bsi; obesity in animals=bSI; vitamin e deficiency=bSj; lymphadeniti=bsj; diabetic gastropathy=bSJ; radicular cyst=bsJ; mevalonic aciduri=bsk; telomeric 22913 monosomy syndrome=bSk; malnutrition related diabetes mellitus=bSK; vascular disease occlusive=bsK; ventricular outflow obstruction=bSl; skin-ache syndrome=bsl; skin hemangioma=bsL; cognitive disorder=bSL; inherited disorder of porphyrin metabolism=bsm; megakaryocytic turner=bsM; scabies=bSM; compensatory hyperinsulinemia=bSm; normal pressure hydrocephalus=bSN; insulin receptor, defect in =bSn; photosensitivity disease=bsn; familial glomangioma=bsN; body mass index quantitative trait locus 10=bso; familial obesity=bSo; benign mesotheliomaa=bSO; decubitus ulcer=bsO; hypodysfibrinogenemia, congenital=bsp; renal hypodysplasia/aplasia 2=bsP; polycystic kidney disease, type 1=bSp; malignant gliomaa=bSP; early myoclonic encephalopathy=bSQ; insulin lipoatrophy=bsQ; hypodysfibrinogenemia=bsq; simple obesity=bSq; android obesity=bSr; pulmonary embolis=bsr; tumoral calcinosis=bsR; lymphopeniaa=bSR; charcot-marie-tooth disease, type 4h=bss; gangliogliomaa=bSS; primary acguired melanosis=bsS; pancreatic acinar atrophy=bSs; lacrimoauriculodentodigital syndrome=bst; epidermal nevus syndrome=bsT; malignant pleural mesotheliomaa =bST; hyperglycemic hyperosmolar nonketotic coma=bSt; leydig cell hyperplasia=bSU; phosphaturic mesenchymal turner, benign=bsU; alcohol-related liver disease=bSu; aplasia of lacrimal and salivary glands=bsu; right ventricle hypoplasia=bsv; insulin allergy =bSv; hypervitaminosis=bsV; hyperinsulinemiac hypoglycemia, familial, 5=bSV; eruptive xanthomas=bSw; diabetes mellitus, insulin-resistant, with acanthosis nigricans=bSW; acguired anomaly of tongue=bsw; pulmonary alveolar microlithiasis=bsW; angiolipoma=bsX; type 2 diabetes mellitus with acanthosis nigricans=bSX; pancreatic islets hyperplasia=bSx; uhl anomaly=bsx; premenstrual tension=bsY; congenital anomaly of tongue=bsy; chronic metabolic disorder=bSy; hair-an syndrome=bSY; hypervitaminosis d=bsZ; congenital anomaly of bile ducts=bSZ; hypoinsulinaemia=bSz; multiple intestinal atresia=bsz; right atrial isomerism=BT; endocardial fibroelastosis=Bt; charcot-marie-tooth disease, type ii=bT; acute myeloid leukemia=bt; nephronophthisis 3=bTa; atopic eczema/dermatitis (non-specific)=btA; interstitial lung disease, nephrotic syndrome, and epidermaolysis bullosa, congenital=bTA; hyperphosphatemia=bta; senior-loken syndrome 5=bTb; deafness, congenital, with inner ear agenisi, microtia, and microdontia=btb; muscular dystrophy, congenital, due to integrin alpha-7 deficiency=bTB; congenital clinodactyly=btB; leukocyte disease=bTC; irak4 deficiency=bTc; pfeiffer syndrome=btC; familial apolipoprotein c-ii deficiency=btc; posttransfusion purpura=bTD; otodental dysplasia=btd; asthma-related traits, susceptibility to, 5=bTd; ichthyosis vulgaris=btD; pulmonary malformation=bte; persistent asthma=bTe; Crouzon syndrome=btE; iatrogenic disease=bTE; acanthoma=btf; neonatal alloimmune thrombocytopenia (nait)=bTF; tenth agenisi=btF; invasive pneumococcal disease, recurrent isolated, 1=bTf; hypogonadotropic hypogonadism 6 with or without anosmia=btg; abdominal aortic atherosclerosis=bTG; resorption of mandible=btG; cold intolerance=bTg; cutis gyrata syndrome of beare and stevenson=btH; kallmann syndrome 6=bth; bronchitis in children=bTh; weber-cockayne syndrome=bTH; synkinesis=bti; scaphocephaly, maxillary retrusion, and mental retardation=btI; inflammatory bowel disease 14=bTi; lymphoproliferative syndrome, ebv-associated, autosomal, 1=bTI; lymphoproliferative syndrome 1=bTJ; systemic lupus erythematosus, susceptibility to, 10=bTj; bent bone dysplasia syndrome=btJ; acrocephalyosyndactylia=btj; craniofacial dysostosis type 1=btK; neuriti=bTK; newcastle disease=bTk; multiple synostoses syndrome 3=btk; calcaneonavicular coalition=btl; inosine triphosphatase deficiency=bTL; skull malformation=btL; orofacial cleft 6, susceptibility to =bTl; infantile polyarteritis=bTM; unicoronal craniosynostosis=btM; osteoglophonic dwarfism=btm; popliteal pterygium syndrome=bTm; trigonocephaly, nonsyndromeic=btn; muscular ventricular septum defect=btN; cd11c-positive/cd1c-positive dendritic cell deficiency, autosomal dominant=bTn; spinocerebellar ataxia 15=bTN; jackson-weiss syndrome=btn; monocyte and dendritic cell deficiency, autosomal recessive=bTo; congenital non-progressive ataxia=bTO; scirrhous adenocarcinoma=btO; erythrodermaic lamellar ichthyosis=bTP; hypogonadotropic hypogonadism 2 with or without anosmia=btp; cervical keratinizing sguamous cell carcinoma=btP; inflammatory bowel disease 19=bTp; thyroid dyshormonogenesis 4=bTQ; fleck corneal dystrophy=btQ; coronary artery disease, susceptibility to =bTq; holoprosencephaly, ectrodactyly, and bilateral cleft lip/palate=btq; Crouzon syndrome with acanthosis nigricans=btR; congenital failure of fusion=bTR; renal adysplasia=btr; ascariasis=bTr; alagille syndrome 1=bTS; pfeiffer type acrocephalyosyndactyly=bts; hypertelorism, severe, with midface prominence, myopia, mental retardation, and bone fragility=bTs; catshl syndrome=btS; lacrimal apparatus disease=bTt; severe achondrolasia with developmental delay and acanthosis nigricans=btT; plagiocephaly, nonsynostotic=btt; deafness, congenital heart defects, and posterior embryotoxon=bTT; familial acanthosis nigricans=btU; placental sulfatase deficiency=btu; hepatic ductular hypoplasia=bTU; myopathy with lactic acidosis, hereditary=bTu; stucco keratosis=btV; goodman camptodactyly=btv; muscular dystrophy-dystroglycanopathy (congenital with brain and eye anomalies), type a, 7=bTv; thrombocythemia 3=bTV; synostotic anterior plagiocephaly=btW; chromosome 8p11 myeloproliferative syndrome=btw; thrombocythemia 1=bTW; autoimmune disease, syndromeic multisystem=bTw; acute aortic dissection=bTX; cheilitis=btX; phimosis=bTx; hypothalamic amenorrhea=btx colon cancer liver metastasis=bty; sotos syndrome =btY; splenic atrophy=bTY; glanzmann thrombasthenia, autosomal dominant=bTy; impaired motor coordination=btz; mediastinal malignant lymphoma=bTZ; myocardial injury=bTz; dermatosis papulosa nigra=btZ; testicular cancer=bu; charcot-marie-tooth disease=bU; muscle damage=Bu; thalassemia=BU; congenital joint contractures=buA; long gt syndrome 6=bUA; urinary tract papillary transitional cell benign neoplasm=bua; cellular phase chronic idiopathyic myelofibrosis=bUa; kuskokwim syndrome=buB; bladder transitional cell papilloma=bub; hemorrhagic destruction of the brain, subependymal calcification, and cataracts=bUb; atrial fibrillation, familial, 4=bUB; angular cheilitis=buc; atrial fibrillation, familial, 3=bUC; ehlers-danlos syndrome with progressive kyphoscoliosis, myopathy, and hearing loss=buC; cardiomyopathy, familial hypertrophyic, 17=bUc; sexual assault=buD; huntington disease-like 2=bUd; monoblastic leukemia=bud; brugada syndrome 6=bUD; fumaric aciduria=bue; temple-baraitser syndrome=bUE; muscular dystrophy-dystroglycanopathy (congenital with brain and eye anomalies), type a, 5=buE; arrhythmogenic right ventricular dysplasia, familial, 12=bUe; mucinous ovarian cystadenoma=buf; muscular dystrophy, limb-girdle, type 2i=buE; short gt syndrome 1=bUF; gonadotropin releasing factor deficiency=bUf; muscular dystrophy, congenital, Ic=buG; renal dysgenesis=bUg; unknown=bUG; familial renal cell carcinoma=bug; kabuki syndrome=bUh; muscular dystrophy-dystroglycanopathy (congenital without mental retardation), type b, 4=buH; cardiac channelopathy=bUH; dual diagnosis=buh; bartter syndrome, antenatal, type 2=bUI; muscular dystrophy, limb-girdle, type 2m=buI; cerebral palsy, spastic quadriplegiac, 2=bUi; polyp of larynx=bui; microinvasive carcinoma=buj; cardiomyopathy, dilated, 1×=buJ; chromosome 17 deletion=bUj; sesame syndrome=bUJ; chromosome 17g21.31 deletion syndrome=bUk; pneumothorax, primary spontaneous=buK; fibroadenosis=buk; edema of spinal cord=bUK; tuberculosis chronic pulmonary=bul; hip dysplasia, beukes type=buL; diabetes mellitus, transient neonatal, 3=bUL; charcot-marie-teeth disease, recessive intermediate b=bUI; diabetes mellitus, permanent neonatal, with neurologic features=bUM; latent virus infection=bum; deafness, autosomal recessive 89=bUm; lung cyst=buM; familial multiple trichodiscomas=buN; snowflake vitreoretinal degeneration=bUN; autosomal recessive parkinsonism=bUn; myopathy, x-linked, with postural muscle atrophy=bun; dosage-sensitive sex reversal=bUo; leber congenital amaurosis 16=bUO; scapuloperoneal myopathy, x-linked dominant=buo; multiple lung cysts=buO; dermatitis, atopic, 1=buP; myopathy, reducing body, x-linked, early-onset, severe=bup; choroid plexus cancer=bUP; allergic bronchitis=bUp; genitopatellar syndrome=bUq; myopathy, reducing body, x-linked, childhood-onset=buq; dermatitis, atopic, 2=buQ; thyrotoxic periodic paralysis, susceptibility to, 2=bUQ; steroid sulfatase deficiency disease=buR; ohdo syndrome=bUr; emery-dreifuss muscular dystrophy 6, x-linked=bur; short qt syndrome 3=bUR; blepharophimosis-intellectual disability syndrome, sbbys typ=bUs; skin diseases, bacterial=buS; charcot-marie-tooth disease, type 4j=bus; atrial fibrillation, familial, 9=bUS; hand eczema=buT; nemaline myopathy 6=bUt; long qt syndrome 13=bUT; amyotrophyic lateral sclerosis 11=but; hyperaldosteronism, familial, type iii=bUU; myokymia 1=bUu; occupational irritant contact dermatitis=buU; yunis varon syndrome=buu; childhood atopic dermatitis=buV; polymicrogyria, bilateral occipital=buv; hyperaldosteronism, familial, type ii=bUV; atrial fibrillation, familial, 7=bUv; hereditary bundle branch system defect=bUw; familial hyperaldosteronism type 3=bUW; subacute dermatitis=buW; premature ovarian failure 6=buw; barbiturate withdrawal=bUX; flexural atopic dermatitis=buX; spinocerebellar ataxia 13=bUx; ceroid lipofuscinosis, neuronal 1, infantile=bux; migraine, with or without aura, susceptibility to, 13=bUY; inherited disorder of keratinization=buY; bruck syndrome 1=buy; long qt syndrome 5=bUy; pulmonary hypertension, primary, 4=bUZ; osteogenesis imperfecta, type xi=buz; jervell and lange-nielsen syndrome 2=bUz; disorder of keratinization=buZ; dermatomyositis=Bv; situs inversus=BV; motor neuritis=bV; rhabdomyosarcoma=bv; myopathy, distal, 4=bvA; birk-barel mental retardation dysmorphism syndrome=bVa; onset of psoriasis in childhood (1-10 years)=bva; medulloblastoma recurrent=bVA; hypogonadotropic hypogonadism 21 with or without anosmia=bvB; metal allergy=bvb; fructosuria=bVB; generalized epilepsy and paroxysmal dyskinesia=bVb; pachyonychia congenita=bvc; hepatic insufficiency=bvC; fructosuria, essential=bVC; hypertension, diastolic, resistance to=bVc; immune-complex glomerulonephritis=bvd; glanzmann's thrombastheni=bVd; retinal ischemia=bvD; spastic paraplegia 8, autosomal dominant=bVD; oto-palateo-digital syndrome, type 2=bve; 3c syndrome=bVE; myelocytic leukemia-like syndrome, familial, chronic=bvE; short qt syndrome 2=bVe; spinocerebellar ataxia, autosomal recessive 15=bVF; xyy karyotype=bvF; frontometaphyseal dysplasia=bvf; syncopal episode=bVf; cardiac valvular dysplasia, x-linked=bvg; gastric mucosal hypertrophy=bVg; neutrophyilic dermatosis=bvG; chromosome 9, partial trisomy 9p=bVG; coloboma of iris=bVH; epileptic encephalyopathy, early infantile, 7=bVh; mast cell malignancy=bvH; heterotopia, periventricular, ehlers-danlos variant=bvh; melnick-needles syndrome=bvi; myoclonic absence epilepsy=bVI; chronic myeloid leukemia in lymphoid blast crisis=bvl seizures, benign familial neonatal, 1=bVi; epilepsy, benign neonatal, 1=bVj; cerebellar cortical dysplasia=bVJ; terminal osseous dysplasia and pigmentary defects=bvj; breast sarcoma=bvJ; granular ependymitis=bVK; benign neonatal seizures=bVk; fg syndrome 2=bvk; emberger syndrome=bvK; epileptic encephalyopathy, early infantile, 14=bVI; lymphatic abnormalities=bvL; goldberg-shprintzen megacolon syndrome=bVL; congenital idiopathyic intestinal pseudoobstruction=bvl; epilepsy, nocturnal frontal lobe, 5=bVm; edema of lower extremity=bvM; otopalateodigital spectrum disorder=bvm; mental retardation, x-linked 98=bVM; cluster b personality disorder=bvn; posterior column ataxia with retinitis pigmentosa=bvN; retinal cone dystrophy 3b=bVn; autosomal dominant microcephaly=bVN; familial mitral valve prolapse=bvo; scalp ear nipple syndrome=bVo; leukemia, feline=bvO; lymphedema, microcephaly and chorioretinopathy syndrome=bVO; atelosteogenesis, type 1=bvp; sen syndrome=bVp; jaw-winking syndrome=bVP; fowler syndrome=bvP; posterior column ataxia=bvQ; epilepsy, progressive myoclonic 3=bVg; mental retardation, autosomal dominant 9=bVQ; masp2 deficiency=bvq; rest pain=bvR; pricklel-related progressive myoclonus epilepsy with ataxia=bVr; atelosteogenesis, type iii=bvr; spastic paraplegia 30, autosomal recessive=bVR; atrophyic gastriti=bvS; neuropathy, hereditary sensory, type iic=bVS; spondylocarpotarsal synostosis=bvs; mental retardation, x-linked, syndromeic, jaridlc-related=bVs; encephalyoclastic proliferative vasculopathy=bvT; kabuki syndrome 2=bVt; bare lymphocyte syndrome, type i=bvt; ataxia, spastic, 2, autosomal recessive=bVT; fibrosis of extraocular muscles, congenital, 1=bVU; vohwinkel syndrome, variant form=bVu; nonsyndromeic cleft lip with or without cleft palate=bvU; larsen syndrome, dominant type=bvu; lathyrism=bVv; spinal curvatures=bvv; radioulnar synostosi=bvV; fibrosis of extraocular muscles, congenital, 3b=bVV; atelosteogenesis type 3=bvw; spondyloepimetaphyseal dysplasia with multiple dislocations=bVW; appendix cancer=bVw; primary ovarian insufficiency, fragile x-associated=bvW; spondyloepimetaphyseal dysplasia with joint laxity=bVX; angiomatous meningioma=bVx; macroorchidism=bvX; laryngotracheitis=bvx; cortical dysplasia, complex, with other brain malformations 3=bVY; cornea plana 2=bVy; exhibitionism=bvy; premature ovarian failure 1=bvY; disorder of small intestine=bVZ; learning disabled=bvZ; cornea plana=bVz; filaminopathy, autosomal dominant=bvz; osler-rendu-weber syndrome 2=BW; interstitial lung disease=bW; myelodysplastic syndrome=bw; glycogen storage disease=Bw developmental symptoms=bwa; pure hereditary spastic paraplegia=bWa; hypothyroidism, thyroidal, with spiky hair and cleft palate=bwA; pseudohypoaldosteronis=bWA; cortical dysplasia, complex, with other brain malformations 2=bWb; thyroid agenisi=bwB; pseudohypoaldosteronism, type iid=bWB; avoidant personality disorder=bwb; hereditary myopathy with early respiratory failure=bwc; hydrolethalus syndrome 2=bWc; nemaline myopathy 8=bWC; foxg1 syndrome=bwC; glomerulopathy with fibronectin deposits=bwd; acrocallosal syndrome=bwD; nemaline myopathy 9=bWD; joubert syndrome 12=bWd; tetralogy of fallo=bwE; peritoneal adhesion=bwe; retinitis pigmentosa 42=bWE; mental retardation, autosomal dominant 4=bWe; kallikrein, decreased urinary activity of =bWF; hearing loss, unilateral=bwF; adhesion of lung=bwf; hypogonadotropic hypogonadism 13 with or without anosmia=bWf; vasodilation=bWG; hypogonadotropic hypogonadism 8 with or without anosmia=bWg; lymphedem=bwG; native valve endocarditis=bwg; precocious puberty, central, 1=bWh; epidermaodysplasia verruciformi=bwH; graft versus host disease in skin=bwh; prostatic nodule=bWH; vascular hemostatic disease=bWI; submandibular gland disease=bwi; neoplasm seeding=bWi; premature ovarian failure 3=bwI; blepharophimosis syndrome type 1=bwJ; amelogenesis imperfecta pigmented hypomaturation type=bWJ; slow transit constipation=bWj; secretory meningioma=bwj; pseudoscarlatina=bWK; familial mastocytosis=bWk; bpes with duane retraction syndrome=bwK; granular corneal dystrophy type ii=bwk; complete obstruction=bwl; bpes, type ii=bwL; cowden-like syndrome=bWL; gammopathy=bWl; folate malabsorption, hereditary=bwm; bpes, type i=bwM; cowden syndrome 4=bWM; histiocytic neoplasm (morphology)=bWm; postnatal infection=bWN; ovarian gynandroblastoma=bwN; retroperitoneal mass=bWn; neurodegeneration due to cerebral folate transport deficiency=bwn; brain diseases, metabolic, inborn=bwo; blepharophimosis, ptosis, and epicanthus inversus syndrome=bwO; adult acute myeloid leukemia with inv(16)(p13=bWo; growth deficiency and mental retardation with facial dysmorphism=bWO; myelomaeningocele=bwp; chromosome 6, monosomy 6q=bWP; q22)=bWp; sacculation=bwP; breast malignant phyllodes turner=bWq; acquired angioedema=bWQ; compensated liver disease=bwQ; xenophobia=bwq; kininogen deficiency, total=bWR; mediastinal cancer=bWr; t-cell immunodeficiency, congenital alopecia and nail dystrophy=bwR; benign bone neoplasm=bwr; indolent systemic mastocytosis=bWs; acute edema=bWS; cycloid psychosis=bws; alopecia universalis=bwS; iridogoniodysgenesis type1=bwt; congenital alopecia x-linked=bwT; aggressive systemic mastocytosis=bWt; mental retardation, autosomal recessive 41=bWT; skin/hair/eye pigmentation, variation in, 7=bWu; t-cell immunodeficiency, recurrent infections, and autoimmunity with or without cardiac malformations=bwU; iris hypoplasia and glaucoma=bwu; noonan syndrome 3=bWU; irritable bowel syndrome with diarrhea=bWv; cardiofaciocutaneous syndrome 2=bWV; axenfeld-rieger anomaly with partially absent eye muscles, distinctive face, hydrocephaly, and skeletal abnormalities=bwv; spindle cell rhabdomyosarcoma=bwV; lymphedema distichiasis syndrome=bww; anemia, congenital dyserythropoietic, type iv=bWw; autoimmune inflammation of skeletal muscle=bwW; endometriosis, susceptibility to, 1=bWW; lung cancer susceptibility 3=bWX; lymphedema-distichiasis syndrome with renal disease and diabetes mellitus=bwx; in(1u) phenotype=bWx; immunodysregulation, polyendocrinopathy, and enteropathy, x-linked=bwX; mental retardation with language impairment and autistic features=bwY; monosomy 7 of bone marrow=bWY; yellow nail syndrome=bwy; maturity-onset diabetes of the young, type 7=bWy; hypothyroidism, congenital, nongoitrous, 2=bwz; pseudotumor=bWZ; spermatogenic failure 11=bWz; perisylvian syndrome=bwZ; keratosis palmoplantaris papulosa=bx; pulmonary arterial hypertension, hereditary hemorrhagic telangiectasisa-related=BX; hypomagnesemia 1, intestinal=Bx; peripheral nervous system disease=bX; sessile polyp=bXa; verbal apraxia=bxa; epidermaolysis bullosa simplex, autosomal recessive 1=bXA; retinitis pigmentosa 30=bxA; anorectal adenocarcinoma=bXb; emotional abuse=bxb; epidermaolysis bullosa simplex herpetiformis=bXB; ehrlichiosis=bxB; testicular lymphoma=bXc; autosomal dominant epidermaolysis bullosa simplex=bXC; communication disorders, developmental=bxc; maxillary sinus squamous cell carcinoma=bxC; paranasal sinus neoplasm=bXd; scarring alopecia=bXD; lateral medullary syndrome=bxD; interleukin 2 receptor, alpha, deficiency of =bxd; resistant ovary syndrome=bxE; follicular keratosis=bXE; ichthyosis and male hypogonadism=bxe; appendix adenocarcinoma=bXe; hyperkeratotic cutaneous capillary-venous malformations associated with cerebral capillary malformations=bXf; immune dysregulation, polyendocrinopathy, enteropathy, x-linked syndrome=bxf; leuknkeratosis, oral=bXF; severe hypothyroidism=bxF; transplant glomerulopathy=bxg; mullerian aplasia=bxG; cavernous malformations of cns and retina=bXg; cirrhosis, familial=bXG; pancreatic carcinoma stage i=bXH; hyperreactio luteinalis=bxH; granulomatous hepatitis=bxh; familial cerebral cavernous malformation=bXh; capillary-venous malformation=bXi; cystoid macular edema=bxi; ovarian mucinous cystadenocarcinoma=bxI; bile duct adenoma=bXI; cutaneous vascular malformation=bXj; thyroid hurthle cell adenoma=bXJ; secondary progressive multiple sclerosis=bxj; tight skin contracture syndrome, lethal=bxJ; cavernous hemangioma=bXk; mitochondrial complex i deficiency=bxk; systemic onset juvenile chronic arthritis=bxK; lump on thigh=bXK; leigh syndrome due to mitochondrial complex i deficiency=bxl; glutamate formiminotransferase deficiency=bxL; epidermaolysis bullosa simplex with mottled pigmentation=bXl; chromosome 12, trisomy 12q=bXL; ichthyosis, cyclic, with epidermaolytic hyperkeratosis=bXm; refractory follicular lymphoma=bXM; iron overload, autosomal dominant=bxM; macrostomia=bxm; I-ferritin deficiency=bxN; urine looks dark=bXN; anorectal anomaly=bxn; ichthyosis hystrix, curth macklin type=bXn; congenital diverticulum of pharynx=bxo; peripheral ulcerative keratitis=bXO; growth retardation, developmental delay, coarse facies, and early death=bxO; keratosis palmoplantaris striata 3=bXo; marles greenberg persaud syndrome=bxp; hyperandrogenemia=bxP; epidermaolytic hyperkeratosis, late-onset=bXp; infection in the elderly=bXP; bifid nose with or without anorectal and renal anomalies=bxq; epidermaolysis bullosa simplex with migratory circinate erythema=bXQ; ichthyosis hystrix=bXq; mental retardation, x-linked 9=bxQ; trigonocephaly 2=bxr; pachyonychia congenita 3=bXR; fucosidosis=bxR; congenital reticular ichthyosisform erythroderma=bXr; frontotemporal lobar degeneration with tdp43 inclusions, grn-related=bxS; pachyonychia congenita 4=bXS; chromosome 9p deletion syndrome=bxs; erythrokeratoderma, reticular=bXs; palmoplantar keratoderma, nonepidermaolytic, focal or diffuse=bXT; amyotrophyic lateral sclerosis 6, autosomal recessive=bxT; peniale warts=bXt; proctoptosis=bxt; tremor, hereditary essential, 4=bxU; facioscapulohumeral muscular dystrophy 1a=bxu; corneal dystrophy, epithelial basement membrane=bXu; chromophobe turner=bXU; meesmann corneal dystrophy=bXv; amyotrophyic lateral sclerosis 6, with or without frontotemporal dementia=bxV; mild depression=bXV; nystagmus 1, congenital, x-linked=bxv; woolly hair, autosomal dominant=bXW; amyotrophyic lateral sclerosis, type 6=bxW; hereditary mucosal leuknkeratosis=bXw; congenital fibrosis of the extraocular muscles=bxw; vitamin b12 plasma level quantitative trait locus 1=bxX; hypotrichosis 3=bXX; influenza-like illness=bxx; epidermaolysis bullosa simplex, dowling-meara type=bXx; multiple endocrine neoplasmia type 2=bxy; ectodermal dysplasia 7, hair/nail type=bXY; dermatopathyia pigmentosa reticularis=bXy; Caliciviridae infections=bxY; hypothyroidism, goitrous=bxz; naegeli syndrome=bXz; norwalk virus infection, resistance to=bxZ; pseudofolliculitis barbae=bXZ; protrusion=By; palmoplantar keratosis=by; combined oxidative phosphorylation deficiency 8=bY; idiopathyic pulmonary arterial hypertension=BY; pelger-huet anomaly=bYA; hepatitis cryptogenic=bYa; 6-phosphogluconolactonase deficiency=byA; staphyloenterotoxemia=bya; sacral agenisi=bYB; leukocyte-adhesion deficiency syndrome=byb; hair dystrophy=bYb; uridine monophosphate hydrolase deficiency=byB; sclerocornea=bYC; hereditary anemia=byC; fucosyltransferase 6 deficiency=bye; palmoplantar keratoderma, epidermaolytic, with knuckle pads=bYc; amaurosis congenita of leber, type 5=bYD; neural tube defects x-linked=byd; hereditary palmoplantar keratoderma=bYd; red blood cell disorder=byD; hdl deficiency, type 2=bYE; interventricular cardiac septal hypertrophy=bye; hydroxykynureninuria=bYe; red-green color blindness=byE; magnesium deficiency=byf; corpus callosum, partial agenisi of, x-linked=bYf; chronic heart disease=bYF; gilbert syndrome=byF; lactase deficiency, congenital=bYG; congenital nonspherocytic hemolytic anemia=byG; gait disorders, neurologic=bYg; peripheral epithelioid sarcoma=byg; central epithelioid sarcoma=byh; milk allergic reaction=bYH; phagocyte bactericidal dysfunction=byH; hydrocephalyus, x-linked, with congenital idiopathyic intestinal pseudoobstruction=bYh; myopathy, myofibrillar, zasp-related=bYI; agueductal stenosis=bYi; neurofibrosarcoma=byI; cataract, autosomal recessive congenital 2=byi; cardiomyopathy, dilated, with left ventricular noncompaction=bYJ; glycogen storage disease type ii, infantile=byJ; familial exudative vitreoretinopathy=byj; rhombencephalyosynapsis=bYj; lactate dehydrogenase deficiency type a=bYK; pustulosis of palm and sole=byK; 1-2-hydroxyglutaric aciduria=bYk; nail disorder, nonsyndromeic congenital, 9=byk; exudative vitreoretinopathy 1=byl; blepharitis=bYl; staphylococcus aureus pneumonia=byL; fatty liver disease, nonalcoholic, susceptibility to, 1=bYL; cholestatic hepatitis=byM; muscular dystrophy, congenital, due to partial lama2 deficiency=bYm; secondary hypercholesterolemia=bYM; nail disorder, nonsyndromeic congenital, 10=bym; laryngo onycho cutaneous syndrome=bYn; epilepsy, juvenile myoclonic, susceptibility to, 5=byN; nail disease=byn; osteoporosis in children=bYN; streptozotocin diabetes=byo; cardiomyopathy, dilated, 1jj=bYo; lipoprotein disorder=bYO; epileptic encephalyopathy, early infantile, 19=byO; glycogen storage disease iii=hyp; epilepsy, childhood absence, susceptibility to, 4=byP; retrosternal pain=bYP; lissencephaly 5=bYp; glycogen storage disease viii=byq; tongue disease=bYQ; essential tremo=byQ; nephrotic syndrome, type 5, with or without ocular abnormalities=bYq; pinguecula=bYR; alcohol effect=byR; neutropenia, severe congenital, autosomal recessive 4=byr; cortical malformations, occipital=bYr; conduct disorder, childhood-onset type=byS; immunodeficiency due to defect in mapbp-interacting protein=bYs; sebaceous gland neoplasm=bYS; neutropenia, severe congenital, x-linked=bys; muscular dystrophy-dystroglycanopathy (congenital with brain and eye anomalies), type a, 6=bYt; thyroid crisis=byT; melorheostosis, isolated=bYT; dursun syndrome=byt; muscular dystrophy, congenital, type 1d=bYu; anemia, nonspherocytic hemolytic, due to g6pd deficiency=byu; epilepsy, childhood absence, susceptibility to, 5=byU; mixed sclerosisng bone dystrophy=bYU; alazami syndrome=bYv; hemolysis=byv; generalized epilepsy with febrile seizures plus, type 1=byV; congenital leptin deficiency=bYV; chronic non-spherocytic hemolytic anemia=byw; secondary peritonitis=bYW; generalized epilepsy with febrile seizures plus, type 3=byW; infantile liver failure syndrome 1=bYw; epilepsy, childhood absence, susceptibility to, 2=byX; thalassemia trait=byx; perrault syndrome 4=bYx; spondylocostal dysostosis 3, autosomal recessive=bYX; reynold's syndrome=bYy; febrile convulsions, familial, 8=byY; drug-induced hemolytic anemia=byy; pituitary microadenoma=bYY; congenital color blindness=byz; cerebral palsy, spastic quadriplegiac, 1=byZ; hem dysplasia=bYz; temporal epilepsy, familial=bYZ; autosomal dominant focal segmental glomerulosclerosis=Bz; mitochondrial respiratory chain deficiencyies=bZ; familial primary pulmonary hypertension=BZ; lung carcinoma=bz; lateral temporal epilepsy=bZa; thrombocytopenia, x-linked, with or without dyserythropoietic anemia=bzA; diabetes in children=bza; hypotrichosi=bZA; thyrotoxicosis=bzb; dyserythropoietic anemia with thrombocytopenia=bzB; aphasic=bZb; hyperlipoproteinemia type i=bZB; anemia, x-linked, without thrombocytopenia=bzC; charcot-marie-tooth disease, type 1c=bZC; receptive aphasia=bZc; nerve lesion=bzc; acguired neuromyotonia=bZd; leukemia in children=bzD; fetal malnutrition without mention of light or small for gestational age=bzd; acheiropodia=bZD; dyserythropoietic anemia=bzE; esophagus small cell carcinoma=bZe; polydactyly, preaxial ii=bZE; mononeuropathy=bze; anemia due to decreased red cell production=bzE; globoid cell leukodystrophy, early onset=bzf; absence of tibia with polydactyly=bZF; leydig cell hypoplasia=bZf; luteinizing hormone, beta polypeptide=bZg; globoid cell leukodystrophy, late-onset=bzg; absent finger=bZG; immunodeficiency 21=bzG; lung diseases, fungal=bzH; leydig cell agenisi=bZh; udpglucose-4-epimerase deficiency=bzh; methylmalonic aciduria and homocystinuria, cblf type=bZH; lipase deficiency combined=bZI; petit mal status=bzI; testotoxicosis=bZi; galactokinase deficiency=bzi; leydig cell hypoplasia, type ii=bZj; atrial septal defect 2=bzJ; galactosemi=bzj; muscular dystrophy, congenital, lmna-related=bZJ; ventricular septal defect 1=bzK; deficiency of beta-galactosidase=bzk; charcot-marie-tooth disease, type 2b1=bZK; empty follicle syndrome=bZk; heart-hand syndrome, Slovenian type=bZL; deficiency of sulfatase=bzl; deafness, autosomal recessive 67=bZl; atrioventricular septal defect 4=bzL; winkelman bethge pfeiffer syndrome=bZm; streptococcal toxic shock syndrome=bzm; testicular anomalies with or without congenital heart disease=bzM; malouf syndrome=bZM; Cushingoid=bZN; colorectal cancer, susceptibility to, 1=bzn; double inlet left ventricle=bzN; pituitary hormone deficiency, combined, 4=bZn; testicular microlithiasis=bzo; pyruvate dehydrogenase lipoic acid synthetase deficiency=bZo; autosomal recessive emery-dreifuss muscular dystrophy=bZO; hepatocellular carcinoma=bzO; guanidinoacetate methyltransferase deficiency=bzp; pancreatic hypoplasia, congenital, with diabetes mellitus and congenital heart disease=bzP; disorder of aging=bZP; static encephalyopathy=bZp; bent bone dysplasia group=bZq; pyloric stenosis, infantile hypertrophyic 1=bzq; atrioventricular septal defect 5=bzQ; generalized obesity=bZQ; severe combined immunodeficiency with microcephaly, growth retardation, and sensitivity to ionizing radiation=bZr; dropped head syndrome=bZR; atrial septal defect 9=bzR; isolated aortic stenosis=bzr; dubowitz syndrome=bZs; intraductal papillary-mucinous adenoma=bzs; leukodystrophy, demyelinating, adult-onset, autosomal dominant=bZS; hypertrophy of bladder=bzS; adult onset autosomal dominant leukodystrophy=bZT; barrett epithelium=bzT; cataract 19=bZt; sticky platelet syndrome=bzt; uncomplicated alcohol withdrawal=bZU; cardiomyopathy, dilated, 2b=bzU; mental retardation, autosomal recessive 27=bZu; anemia acute=bzu; lysosomal acid lipase deficiency=bZv; mental retardation, autosomal dominant 18=bzV; undifferentiated attention deficit disorder=bZV; multiple endocrine neoplasmia [men] syndrome, unspecified=bzv; high density lipoprotein cholesterol level quantitative trait locus 12=bZw; arginine:glycine amidinotransferase deficiency=bzW; watery diarrhea=bzw; mental disorders diagnosed in childhood=bZW; acute neuronopathyic gaucher's disease=bzX; woolly hair, autosomal recessive=bZx; pernicious anemia=bzx; salcedo syndrome=bZX; acute alcohol withdrawal=bZY; woolly hair, congenital=bZy; gaucher disease, perinatal lethal=bzY; jervell-lange nielsen syndrome=bzy; gaucher disease, type iiic=bzZ; viral leukemogenesis=bZZ; woolly hair, autosomal recessive 2, with or without hypotrichosis=bZz; thrombocytopenia, platelet dysfunction, hemolysis, and imbalanced globin synthesis=bzz; sepsis=C; amyotrophyic lateral sclerosis=c; mood disorder=cA; disorder of purine metabolism=CA; infantile cardiomyopathy=ca; cutaneous lymphoma=Ca; bone mineral density quantitative trait locus 1=caA; ehlers-danlos syndrome type 5=caa; spastic paraplegia 12, autosomal dominant=cAA; retinitis pigmentosa 9=cAa; polymicrogyria with seizures=cAB; retinitis pigmentosa, x-linked, and sinorespiratory infections, with or without deafness=cAb; high bone mass=caB; groenouw's dystrophyies=cab; platelet disorder, familial, with associated myeloid malignancy=cAC; coronary artery disease, autosomal dominant 2=caC; deafness, autosomal recessive 77=cac; cone-rod dystrophy, x-linked, type 1=cAc; secondary glaucoma=cad; macular degeneration, x-linked atrophyic=cAd; stomatognathic system abnormalities=cAD; neural tube defect, folate-sensitive=caD; lp(a) deficiency, congenital=cae; myopia 23, autosomal recessive=caE; metaphyseal dysplasia with maxillary hypoplasia and brachydactyly=cAE; cone-rod dystrophy 13=cAe; leber congenital amaurosis 6=cAf; recurrent abdominal pain=caF; hypotrichosis, localized, autosomal recessive, 3=caf; cleidocranial dysplasia, forme fruste, with brachydactyly=cAF; woolly hair, autosomal recessive 1, with or without hypotrichosis=cag; leigh syndrome, french Canadian type=caG; lack of bone formation=cAG; meckel syndrome, type 5=cAg; joubert syndrome 7=cAh; ciliary dyskinesia, primary, 19=caH; testicular yolk sac turner=cAH; myoglobinuria, acute recurrent, autosomal recessive=cah; malignant hyperthermia susceptibility type 1=cAI; sapho syndrome=cai; ribose 5-phosphate isomerase deficiency=cAi; agammaglobulinemia 5, autosomal dominant=cal; autism, susceptibility to, x-linked 5=cAj; type i hyperlipidaemia=caj; king denborough syndrome=cAJ; parkinson disease 8, autosomal dominant=caJ; idiopathyic disease=caK; ectopic liver=cak; diamond-blackfan anemia 12=cAk; neuromuscular disease, congenital, with uniform type 1 fiber=cAK; genital herpe=cAl; charcot-marie-tooth disease, axonal, type 2p=caL; familial lipoprotein deficiency=cal; fetal akinesia=cAL; secondary hypertriglyceridemia=cam; ventricular tachycardia, catecholaminergic polymorphic, 2=cAM; deafness, autosomal recessive 63=caM; brucellosi=cAm; diamond-blackfan anemia 9=cAn; jacobs syndrome=can; arrhythmogenic right ventricular dysplasia, familial, 2=cAN; microcephalyic osteodysplastic primordial dwarfism, type 1=caN; leber congenital amaurosis 14=cao; leprosy, early-onset, susceptibility to=caO; anemia, diamond-blackfan, 3=cAo; caffeine dependencye=cAO; wounds, nonpenetrating=caP; effort syncope=cAP; retinitis punctata albescens (disorder)=cap; mental retardation, x-linked 19=cAp; bidirectional tachycardia=cAQ; retinal dystrophy, early-onset severe, Irat-related=caq; tetraplegias cerebral palsy=caQ; arrhythmogenic right ventricular dysplasia, familial, 5=cAq; meibomian gland dysfunction=cAR; immunodeficiency, common variable, 8, with autoimmunity=car; mitochondrial dna depletion syndrome 8a (encephalyomyopathyic type with renal tubulopathy)=cAr; byssinosis=caR; progressive external ophthalmoplegia with mitochondrial dna deletions, autosomal dominant, 5=cAs; night blindness, congenital stationary, type 1f=cas; parachordoma=cAS; fish diseases=caS; thoracic aorta dilation=cAT; omphalocele, autosomal=cat; infection with mycobacterium marinum=caT; mitochondrial dna depletion syndrome 8b (mngie type)=cAt; oedema auricular=caU; retinitis pigmentosa 47=cAU; malignant turner of optic nerve=cau; primary retinal cyst=cAu; donnai-barrow syndrome=cav; glaucoma 3, primary congenital, d=caV; ciliary dyskinesia, primary, 24=cAv; townes-brocks-branchiootorenal-like syndrome=cAV; duane-radial ray syndrome=cAW; worth syndrome=caw; weill-marchesani syndrome 3=caW; ciliary dyskinesia, primary, 11=cAw; ciliary dyskinesia, primary, 12=cAx; heart failure with reduced ejection fraction=caX; osteopetrosis autosomal dominant type 1=cax; oculootoradial syndrome=cAX; tumoral calcinosis, normophosphatemiac, familial=cAY; exudative vitreoretinopathy 4=cay; tenth agenisi, selective, 6=caY; nail disorder, nonsyndromeic congenital, 4=cAy; aicardi-goutieres syndrome 5=cAZ; cutis laxa with severe pulmonary, gastrointestinal, and urinary abnormalities=caZ; van buchem disease type 2=caz; dyskeratosis congenita, autosomal recessive, 5=cAz; vascular malformations=Cb; leukodystrophy=cb; status epilepticus=cB; human immunodefiency virus encephalyitis=CB; chilblain lupus 2=cBa; beta-mannosidosis=cbA; epileptic encephalyopathy, early infantile, 11=cBA; pulmonary disease, chronic obstructive, severe early-onset=cba; seizures, benign familial infantile, 3=cBB; brunner syndrome=cbB; aspirin sensitivity=cbb; sarcosinemia=cBb; antisocial behavior following childhood maltreatment, susceptibility to=cbC; unspecified circulatory system disorder=cbc; hyperuricemia, pulmonary hypertension, renal failure, and alkalosis=cBc; epilepsy, benign neonatal, 3=cBC; gestational diabete=cbd; late onset epilepsy=cBD; adult antisocial behavior=cbD; cleft palate, isolated, and mental retardation=cBd; rituals=cbE; chromosome 2q32-q33 deletion syndrome=cBe; febrile seizures associated with afebrile seizures=cBE; combined oxidative phosphorylation deficiency 19=cbe; atrial fibrillation, familial, 14=cBF; cleft palate, isolated=cBf; chronic abdominal pain=cbf; atypical depressive disorder=cbE; hypothyroidis=cbG; corpus callosum, agenisi of, with facial anomalies and robin sequence=cBg; epilepsy in children=cBG; schwannomatosis 2=cbg; neuropil threads=cbH; charcot-marie-tooth disease, type 4b3=cBh; charcot-marie-tooth disease, type 2a=cbh; brugada syndrome 7=cBH; charcot-marie-tooth neuropathy, type 4b2, with early-onset glaucoma=cBi; cardiofaciocutaneous syndrome 3=cbl; adhesion of intestine=chi; hypokalemic periodic paralysis, type 2=cBI; cataract, pulverulent, juvenile-onset=cbj; cardiofaciocutaneous syndrome 4=cbJ; myasthenic syndrome, congenital, acetazolamide-respensive=cBJ; high density lipoprotein cholesterol level quantitative trait locus 6=cBj; marden walker like syndrome=cBk; normokalemic periodic paralysis, potassium-sensitive=cBK; osteolysis, hereditary, of carpal bones with or without nephropathy=cbk; 46.xy sex reversal 6=cbK; central nervous system demyelination=cbl; long qt syndrome 10=cBL; dermatophilosis due to dermatophilus congolensis=cbL; polyposis syndrome, hereditary mixed, 1=cBl; cat allergy=cBm; long qt syndrome 3=cBM; hepatoma, morris=cbM; nerve compression syndrome=cbm; episodic pain syndrome, familial, 2=cBn; pulsus trigeminus=cbN; appendiciti=cbn; sick sinus syndrome 1, autosomal recessive=cBN; neuropathy, hereditary sensory and autonomic, type vii=cBo; prader-willi-like syndrome=cbo; cardiomyopathy, dilated, 1e=cBO; urethral obstruction=cbO; mental retardation, x-linked 95=cbp; epileptic encephalyopathy, lennox-gastaut type=cbP; episodic pain syndrome, familial, 3=cBp; long qt syndrome type 3=cBP; ventricular fibrillation, paroxysmal familial, 1=cBQ; immunodeficiency, x-linked, with magnesium defect, epstein-barr virus infection, and neoplasmia=cbq; precapillary pulmonary hypertension=cbQ; migraine, familial hemiplegiac, 3=cBq; retinitis pigmentosa 62=cbr; febrile convulsions, familial, 3a=cBr; atrial fibrillation, familial, 10=cBR; familial encephalyopathy with neuroserpin inclusion bodies=cbR; immunodeficiency 12=cbs; myoclonic astatic epilepsy=cBs; progressive supranuclear palsy atypical=cbS; heart block, nonprogressive=cBS; benign occipital epilepsy of childhood—early onset variant=cBt; thymus mucoepidermaoid carcinoma=cbt; supranuclear paralysis=cbT; cardiac conduction defect, nonprogressive=cBT; hemispatial neglect=cbU; thymus adenosquamous carcinoma=cbu; poor short-term memory=cBu; long qt syndrome 3, acguired, susceptibility to (finding)=cBU; hypospadias 2, x-linked=cbv; gaze palsy=cbV; lenegre's disease=cBV; grand mal status epilepticus=cBv; scrotal hypospadias=cbw; sudden unexpected nocturnal death syndrome=cBW; symptomatic generalized epilepsy=cBw; progressive subcortical gliosis=cbW; familial sick sinus syndrome=cBX; mental retardation, autosomal recessive 15=cbx; brugada syndrome 5=cBx; familial progressive supranuclear palsy=cbX; infantile liver failure syndrome 2=cbY; bradyarrhythmia=cBY; alpha-mannosidosis=cby; atrial fibrillation, familial, 13=cBy; sick sinus=cBZ; cardiac conduction defect, nonspecific=cBz; ataxia, spastic, 3, autosomal recessive=cbZ; lysosomal beta-mannosidase deficiency=cbz; infantile epileptic encephalyopathy=cC; cardiomyopathy=cc; combined immunodeficiency disease=CC; brain abscess=Cc; deafness, autosomal recessive 49=cca; thyroid hormone metabolism, abnormal=cCA; neurally-mediated syncope=cCa; olmsted syndrome=ccA; ichthyosis follicularis atrichia photophobia syndrome=ccB; epiphyseal dysplasia, multiple, 5=ccb; diabetic maculopathy=cCB; epileptic encephalyopathy, early infantile, 13=cCb; shwartzman phenomenon=cCC; cognitive impairment with or without cerebellar ataxia=cCc; spondyloepimetaphyseal dysplasia, matrilin-3 related=ccc; palmoplantar keratoderma, mutilating, with periorificial keratotic plagues, x-linked=ccC; burns, electric=cCD; amyotrophyic lateral sclerosis 21=ccd; ifap syndrome with or without bresheck syndrome=ccD; indifference to pain, congenital, autosomal recessive=cCd; myopathy, distal 2=cce; ichthyosis follicularis with alopecia and photophobia (ifap)=ccE; erythermalgia, primary=cCe; hypogonadotropic hypogonadism 16 with or without anosmia=cCE; brain anomalies, retardation, ectodermal dysplasia, skeletal malformations, hirschsprung disease, ear/eye anomalies, cleft pa . . . =ccF; brachial plexus lesion=cCF; infection due to vancomycin intermediate staphylococcus aureus=ccf; generalized epilepsy with febrile seizures plus, 7=cCf; keloidalis nuchae=ccG; infection due to vancomycin resistant staphylococcus aureus=ccg; febrile seizures, familial, 3b=cCg; brachial plexus lesio=cCG; folliculin=ccH; infections, bunyavirus=cch; retinitis pigmentosa 35=cCH; bronchiectasis with or without elevated sweat chloride 2=cCh; cone-rod dystrophy 10=cCI; melanoma, cutaneous malignant, susceptibility to, 5=ccI; bronchiectasis with or without elevated sweat chloride 3=cCi; crush syndrome=cci; vaginal yeast=ccj; melanoma, cutaneous malignant, susceptibility to, 1=ccJ; chronic cerebrovascular accident=cCJ; immunoglobulin g3 deficiency=cCj; increased analgesia from kappa-opioid receptor agonist, female-specific=ccK; type vi ehlers-danlos syndrome=cCK; mental retardation, autosomal dominant 1=cck; infantile encephalyopathy and lactic acidosis=cCk; uv-induced skin damage, susceptibility to=ccL; atypical pneumonia=ccl; immunoglobulin g4 deficiency=cCl; histiocytosis=cCL; blood group, john milton hagen system=cCM; secondary immune deficiency=ccm; cardioencephalyomyopathy, fatal infantile, due to cytochrome c oxidase deficiency=cCm; protein-losing enteropathy=ccM; body mass index quantitative trait locus 9=ccN; dengue hemorrhagic feve=cCN; myopia 6=cCn; tuberculosis in children=ccn; hidradenitis=ccO; amyotrophyic neuralgia=cCO; bronchopulmonary disease=cco; senior-loken syndrome 7=cCo; mitochondrial complex ii deficiency=cCp; septicemia due to streptococcus pneumoniae=ccp; laryngitis=ccP; brachial plexus neuropathy=cCP; 3-methylcrotonyl coa carboxylase 2 deficiency=ccQ; brachial plexus neuritis=cCQ; paragangliomas 5=cCq; arthritis of hand=ccq; cardiomyopathy, dilated, 1gg=cCr; cranial arteritis=ccr; spermatogenic failure 10=cCR; propionic acidemi=ccR; pontocerebellar hypoplasia, type 2d=cCS; leigh syndrome due to mitochondrial complex ii deficiency=cCs; postoperative myocardial infarction=ccs; methylmalonyl-coa epimerase deficiency=ccS; otitis media in children=cct; succinate-coenzyme g reductase deficiency=cCt; indifference to pain=ccT; 3-methylglutaconic aciduria with deafness, encephalyopathy, and leigh-like syndrome=cCT; factor v and factor viii, combined deficiency of, 2=ccU; neonatal pneumonia=ccu; paragangliomas 2=cCu; thiamine deficiency=cCU; natural killer cell deficiency, familial isolated=ccV; fungal pneumonia=ccv; paragangliomas 3=cCv; panacinar emphysema=cCV; chromosome 18, trisomy 18q=ccw; autosomal hereditary disorder=cCW; cowden syndrome 3=cCw; microcephaly, primary autosomal recessive, 1=ccW; paragangliomas with sensorineural hearing loss=cCx; chronic disease of respiratory system=cCX; chromosome 18q syndrome=ccx; mucocutaneous ulcer=ccX; accelerated turner formation, susceptibility to=ccY; craniolenticulosutural dysplasia=cCy; obstructive emphysema=cCY; vacuolar myelopathy=ccy; nodular nonsuppurative panniculitis=cCZ; hemorrhagic fever, american=ccz; pneumocystosi=cCz; retractile mesenteritis=ccZ; congenital vascular anomaly=Cd; reflex epilepsy=cD; congestive heart failure=cd; pediatric disease or disorder=CD; amyotrophyic lateral sclerosis 4, juvenile=cDA; pancreatoblastoma=cDa; abdomen, acute=cdA; connective tissue cancer=cda; spindle cell lipoma=cdb; polyserosistis=cdB; cholinergic urticaria=cDb; transitional meningioma=cDB; malignant fibrous histiocytoma of bone=cdc; recurrent fevers=cdC; pulmonary alveolar proteinosis, congenital=cDC; corticosteroid-binding globulin deficiency=cDc; inherited thyroxine-binding globulin deficiency=cDd; acute suppurative arthritis=cdD; surfactant metabolism dysfunction, pulmonary, 2=cDD; adult medulloblastoma=edd; thyroxine-binding globulin deficiency=cDe; combined oxidative phosphorylation deficiency 18=cDE; unilateral retinoblastoma=ede; myopathy, areflexia, respiratory distress, and dysphagia, early-onset=cdE; muscular dystrophy, limb-girdle, type 2d=cDF; deafness, autosomal recessive 91=cDf; spindle cell liposarcoma=cdf; carpenter syndrome 2=cdF; mental retardation, x-linked, syndromeic 13=cdg; limb-girdle muscular dystrophy, type 2e=cDG; pituitary macroadenoma=cdG; palmoplantar keratoderma, nagashima type=cDg; antithrombin iii deficiency, familial=cDh; limb-girdle muscular dystrophy type 2f=cOH; pancreatic gastrinoma=cdH; autism, susceptibility to, x-linked 3=cdh; anticoagulant disorders=cDi; cardiomyopathy, dilated, 11=cDI; klippel feil syndrome recessive type=cdI; encephalyopathy, neonatal severe, due to mecp2 mutations=cdi; heparin cofactor ii deficiency=cDj; hereditary protein s deficiency=cdJ; mucopolysaccharidosis, type iiia=cDJ; rett syndrome, zappella variant=cdj; plasminogen activator inhibitor-1 deficiency=cDk; induced ventricular tachycardia=cdk; lupus hepatitis=cDK; eventration=cdK; giant cell reparative granuloma=cDL; thrombosis of renal veins=cDl; symptomatic human immunodeficiency virus infection=cdL; lubs syndrome=cdl; fibrinolytic defect=cDm; ter haar syndrome=cDM; rett syndrome, preserved speech variant=cdm; pendular nystagmus=cdM; borrone di recce crovato syndrome=cOH; mosaicism, chromosomal=cdN; fibrous nodule=cDn; ppm-x syndrome=cdn; giardia infections=cdO; myocardial infarction (subendocardial)=cDo; charcot-marie-tooth disease, type 4c=cDO; lujan fryns syndrome=cdo; osteogenesis imperfecta, type xii=cDp; cystic lymphangioma=cdP; ohdo syndrome, maat-kievit-brunner type=cdp; mononeuropathy of the median nerve, mild=cDP; anti-plasmin deficiency, congenital=cDq; retinitis pigmentosa 38=cdQ; inherited optic neuropathy=cdq; autism, susceptibility to, 17=cDQ; legal blindness=cdr; severe expressive language delay=cDR; dysostosi=cdR; alpha-2-antiplasmin deficiency=cDr; deaf-blind disorders=cds; autism, susceptibility to, 9=cdS; 229 deletion syndrome=cDS; familial hemorrhagic diathesis=cDs; congenital naevus=cdT; diffuse peritoneal leiomyomatosis=cdt; holoprosencephaly 3=cDT; angioedema, hereditary, type i=cDt; microcephaly, postnatal progressive, with seizures and brain atrophy=cdu; microphthalmia, isolated, with coloboma 5=cDU; malignant fibroxanthom=cdU; complement component 4, partial deficiency of =cDu; hereditary angioedema type ii=cDv; melanotic neuroectodermal turner=cdV; mental retardation, autosomal recessive 18=cdv; absence of tibia=cDV; epithelial ingrowth=cDW; charcot-marie-tooth disease, type 2b2=cdw; nanophthalmos 2=cdW; osteogenesis imperfecta, type x=cDw; ectopic gastric tissue=cDX; microphthalmia, posterior, with retinitis pigmentosa, foveoschisis, and optic disc drusen=cdX; pancreatic insufficiency, combined exocrine=cDx; coronary artery disease, autosomal dominant, 1=cdx; noonan syndrome-like disorder with loose anagen hair=cDY; emphysema or copd=cDy; optic disk drusen=cdY; mental retardation, autosomal dominant 20=cdy; mental retardation, autosomal dominant 23=cDz; familial mediaterranean fever, autosomal dominant=cdz; hyperopi=cdZ; noonan-like syndrome with loose anagen hair=cDZ; gastroesophageal reflux disease=cE; saccharopinuria=ce; secondary acguired sideroblastic anemia=CE; pulmonary involvement=Ce; short stature, idiopathyic, x-linked=cEa; ceroid lipofuscinosis, neuronal, 7=cea; erythrocyte lactate transporter defect=cEA; cecum carcinoma=ceA; hyperinsulinemiac hypoglycemia, familial, 7=cEB; stocco dos santos syndrome=cEb; congenital disorder of glycosylation type 2a=ceb; colorectal cancer, hereditary nonpolyposis, type 7=ceB; low t3 syndrome=cEC; allergic colitis=ceC; disaccharidase deficiency=cEc; pleomorphic hyalinizing angiectatic turner=cec; mitochondrial dna depletion syndrome 11=ced; acute myeloid leukemia, 11q23 abnormalities=ceD; autoimmune disease, susceptibility to, 6=cEd; cataract, juvenile, with microcornea and glucosuria=cED; copd exacerbation=cEe; renal glycosuri=cEE; keutel syndrome=cee; griscelli syndrome type 3=ceE; singleton merten syndrome=cef; amyotrophyic lateral sclerosis 16, juvenile=cEf; x-linked hypophosphatemiac ricket=cEF; methylmalonic aciduria cbla type=ceF; warm autoimmune hemolytic anemia=cEg; glycogen storage disease ic=cEG; adenosylcobalamin synthesis defect=ceG; vitamin k deficiency coagulation disorder=ceg; disorder of vitamin b12=ceH; uric acid concentration, serum, quantitative trait locus 4=cEH; left ventricular noncompaction 7=ceh; binge drinking=cEh; tendinitis=cEi; refractory periodontitis=ceI; endocervical adenocarcinoma in situ=cei; infantile sialic acid storage disease=cEI; methylmalonic aciduria and homocystinuria, cbld type=ceJ; pellagra=cEj; free sialic acid storage disease=cEJ; atypical cartilaginous turner=cej; branchiootic syndrome 3=cEk; homocystinuria, cbld type, variant 1=ceK; deafness, autosomal dominant 25=cEK; conjunctiva squamous cell carcinoma=cek; thiamine responsive megaloblastic anemia syndrome=cEL; methylmalonic aciduria, cbld type, variant 2=ceL; deafness, autosomal dominant 23=cEl; myopathy with extrapyramidal signs=cel; branchiootorenal syndrome 2=cEm; congenital cleft larynx and opitz-frias syndrome=cem; miyoshi muscular dystrophy 2=ceM; thiamine-responsive megaloblastic anemia=cEM; basal ganglia disease, biotin-responsive=cEN; malignant lymphoma—centrocytic=ceN; cataract 15, multiple types=cen; microphthalmia, isolated, with cataract 2=cEn; micro cystic stromal turner=ceO; dicarboxylicaminoaciduria=cEO; legionellosis=ceo; acid base disorder=cEo; superior limbic keratoconjunctivitis=ceP; schizephrenia 18=cEP; tietz syndrome=cep; paraguat lung=cEp; progressing stroke=cEQ; melanoma, cutaneous malignant, susceptibility to, 8=ceq; decreased drug resistance=ceQ; trichohepatoenteric syndrome 2=cEq; astrocytoma of brain=ceR; bile acid malabsorption, primary=cEr; episodic ataxia, type 6=cER; albinism ocular late onset sensorineural deafness=cer; renal hypouricemia=cES; albinism, ocular, with sensorineural deafness=ces; conjunctivochalasis=ceS; mycobacterium tuberculosis, susceptibility to infection by=cEs; rhabdomyosarcoma 1=cET; buruli ulcer, susceptibility to=cEt; spondyloepimetaphyseal dysplasia, missouri type=ceT; crest syndrome=cet; inflammatory bowel disease 5=cEU; metaphyseal anadysplasia=ceU; cutaneous leishmaniasis, ethiopian=cEu; bardet-biedl syndrome 6=ceu; systemic primary carnitine deficiency disease=cEV; anemia, hypochromic microcytic, with iron overload=cEv; recurrent malignant peripheral nerve sheath turner=ceV; hydrometrocolpos=cev; night blindness, congenital stationary, type 1d=cEW; winchester syndrome=ceW; precocious puberty, central, 2=cew; anemia, hypochromic microcytic, with iron overload 1=cEw; kaler garrity stern syndrome=ceX; variola major=cex; skin/hair/eye pigmentation, variation in, 6=cEX; bartter syndrome, antenatal type 1=cEx; bardet-biedl syndrome 13=cey; skin/hair/eye pigmentation, variation in, 4=cEY; bronchial neoplasm=ceY; concealed vomiting=cEy; dystonias, sporadic=cEz; sebaceous glands—turners=cez; hypomyelination, global cerebral=cEZ; osteolysis hereditary multicentric=ceZ; angiodysplasia of colon=Cf; narcolepsy=cF; combined t cell and b cell immunodeficiency=CF; hyperlysinemia, type i=cf; autosomal recessive hypophosphatemiac bone disease=cFA; neonatal-onset citrullinemia type 2=cFa; acute ischemiac colitis=cfa; congenital disorder of glycosylation, type iib=cfA; aminoacidemia=cFb; valvular disease=cfb; fanconi renotubular syndrome 2=cFB; mitochondrial pyruvate carrier deficiency=cfB; idiopathyic multicentric osteolysis=cfc; congenital disorder of glycosylation type 1f=cfC; amish lethal microcephaly=cFc; potassium deficiency=cFC; hydrocephalyus, nonsyndromeic, autosomal recessive 2=cfD; microlithiasis=cFD; mycetoma=cfd; thiamine metabolism dysfunction syndrome 4 (bilateral striatal degeneration and progressive polyneuropathy type)=cfd; congenital disorder of glycosylation type 1b=cfE; hypophosphatemiac rickets with hypercalciuria, hereditary=cFE; wrinkle=cfe; mitochondrial phosphate carrier deficiency=cFe; medullary nephrocalcinosis=cFE; progressive external ophthalmoplegia with mitochondrial dna deletions, autosomal dominant, 2=cFf; parotitis=cff; recurrent pterygium=cfF; deficiency of mannose-6-phosphate isomerase=cfG; clear cell meningioma=cfg; mitochondrial dna depletion syndrome 12 (cardiomyopathyic type)=cfg; congenital disorder of glycosylation, type iif=cFG; atelosteogenesis type 2=cFh; amelogenesis imperfecta, hypomaturation type, iia2=cfh; impaired left ventricular function=cfH; congenital disorder of glycosylation, type iim=cFH; arthrogryposis, mental retardation, and seizures=cFI; epiphyseal dysplasia, multiple, 4=cFi; coronary heart disease, susceptibility to, 6=cfi; mirror hands=cfI; achondrogenesis type 1b=cFj; interdigitating dendritic cell sarcoma=cFJ; mercaptolactate-cysteine disulfiduria=cfJ; aortic root dilation=cfj; de la chapelle dysplasia=cFk; navajo neurohepatopathy=cfK; iminoglycinuria=cFK; disorder of tendon=cfk; spermatocele=cFl; cochlear disease=cfL; glycinuria with or without oxalate urolithiasis=cFL; gastrointestinal ulcer=cfl; cerebral arterial disease=cfm; tick-borne relapsing feve=cFM; deafness, autosomal recessive 61=cFm; charcot-marie-tooth disease, type 2j=cfM; cystic fibrosis, modifier of, 1=cFn; internal carotid artery stenosis=cfn; foveal hypoplasia 2=cFN; charcot-marie-tooth disease, dominant intermediate d=cfN; mucus cast=cFo; metaphyseal anadysplasia 2=cfo; foveal hypoplasia and anterior segment dysgenesis=cFO; peripheral demyelinating neuropathy, central dysmyelination, waardenburg syndrome, and hirschsprung disease=cfO; respirovirus infections=cfp; hereditary areflexic dystasisa=cfP; spondylocheirodysplasia, ehlers-danlos syndrome-like=cFP; intestinal obstructio=cFp; anterior subcapsular cataract=cfq; ichthyosis prematurity syndrome=cFq; tonic pupil=cfQ; inherited aminoaciduria=cFQ; hereditary stomatocytosis=cfR; chromosome 12p deletion=cFr; cystinuria, type a=cFR; west nile encephalyitis=cfr; dysosteosclerosis=cFs; left ventricular hypoplasia=cFS; glucocorticoid deficiency 2=cfS; rhabdoid meningioma=cfs; combined oxidative phosphorylation deficiency 9=cfT; qualitative platelet disorder=cft; familial renal glucosuria=cFt; atrial enlargement=cFT; hypouricemia, renal, 2=cFu; combined oxidative phosphorylation deficiency 16=cfU; familial meningioma=cfu; primary intraocular non-hodgkin malignant lymphoma=cFU; hypermanganesemia with dystonia polycythemia and cirrhosis=cFv; oculocutaneous albinism, type iv=cFV; anorectal anomalies=cfv; combined oxidative phosphorylation deficiency 2=cfV; skin/hair/eye pigmentation, variation in, 5=cFW; acrodermatitis=cFw; combined oxidative phosphorylation deficiency 5=cfW; meningocele=cfw; molybdenum cofactor deficiency, complementation group a=cfx; immunodeficiency, common variable, 5=cfX; spherocytosis, type 4=cFX; spastic paraplegia 42, autosomal dominant=cFx; renal tubular acidosis, distal, with hemolytic anemia=cFY; sebaceous adenoma=cfY; molybdenum cofactor deficiency, complementation group b=cfy; congenital cataracts, hearing loss, and neurodegeneration=cFy; cerebral primitive neuroectodermal turner=cfZ; blood group—wright antigen=cFZ; nephrolithiasis-osteoporosis, hypophosphatemiac, 1=cFz; narcolepsy 7=cfz; trypanosomiasis=CG; niemann-pick disease, type b=cG; dural arteriovenous fistula=Cg; hyperlysinemia=cg; negativism in catatonia=cGA; renal tubular acidosis, distal, with normal red cell morphology=cGa; colorectal cancer, hereditary nonpolyposis, type 5=cga; hemifacial spasm=cgA; physical illness=cGB; prostate cancer, hereditary, 13=cgb; spinal injuries=cgB; blood group—waldnertype=cGb; blushing=cGC; ck syndrome=cgc; he, stomatocytic=cGc; congenital cardiac malformations=cgC; generalized social phobia=cGD; congenital anomaly of aortic arch=cgD; hereditary prostate carcinoma=cgd; blood group—froese=cGd; pseudohyperkalemia Cardiff=cGe; deafness, autosomal recessive 74=cge; bullying=cGE; encephalyomalacia=cgE; performance anxiety=cGF; lateral sinus thrombosis=cgE; lipom=cgf; corneal dystrophy, fuchs endothelial, 4=cGf; discrete subaortic stenosis=cgG; corneal endothelial dystrophy type 2=cGg; myostatin-related muscle hypertrophy=cgg; hyperekplexia 3=cGG; myelomeningocele=cgH; brain edem=cGH; corneal endothelial dystrophy 1, autosomal dominant=cGh; orofacial cleft 5=cgh; retinitis pigmentosa 68=cGI; congenital hereditary endothelial dystrophy=cGi; familial hypodontia=cgi; charcot-marie-tooth disease, type 4b1=cgI; corneal edema=cGj; charcot-marie-tooth disease, type 4b2=cgJ; ostium secundum atrial septal defect=cgj; immune deficiency disease=cGJ; unilateral cleft lip=cgk; congenital muscle disorder=cgK; chronic idiopathyic thrombocytopeniac purpura=cGK; renal tubular acidosis, proximal, with ocular abnormalities and mental retardation=cGk; tenth and nail syndrome=cgl; bilateral glaucoma=cGl; combined oxidative phosphorylation deficiency 10=cgL; lysinuric protein intolerance=cGL; craniosynostosis, type 2=cgm; recombinant chromosome 8 syndrome=cGm; spastic ataxia 4, autosomal recessive=cgM; cystinuria, type b=cGM; nephrolithiasis-osteoporosis, hypophosphatemiac, 2=cGN; homocystinuria-megaloblastic anemia due to defect in cobalamin metabolism, cble complementation type=cgN; parietal foramina with cleidocranial dysplasia=cgn; brown-vialetto-van laere syndrome=cGn; brown-vialetto-van laere syndrome 2=cGo; parietal foramina 1=cgo; biliary carcinoma=cGO; abdominal obesity metabolic syndrome=cgO; cleidocranial dysplasia=cgp; medullary cystic kidney disease type 1=cgP; progressive bulbar palsy of childhood=cGp; episodic kinesigenic dyskinesia 2=cGP; atopic keratoconjunctivitis=cgQ; progressive bulbar palsy=cGq; mental retardation, x-linked, syndromeic, christianson type=cGQ; activated pi3k-delta syndrome=cgq; lymphoblastic leukemia, acute, with lymphomatous features=cgr; christianson syndrome=cGR; thyroid dyshormonogenesis 1=cGr; ileoanal reservoir=cgR; fibrosis of pleura=cgs; cestode infections=cgS; neuropathy, distal hereditary motor, type viia=cGs; gangrenous pneumonia=cGS; combined oxidative phosphorylation deficiency 15=cgt; bile duct cystadenocarcinoma=cgT; panic symptoms=cGt; abscess of breast=cGT; intestinal nematode infection=cgO; body mass index quantitative trait locus 11=cGu; neonatal diarrhea=cgu; healtyhcare associated pneumonia=cGU; arthralgia of temporomandibular joint=cGv; methylcobalamin deficiency, cblg type=cgv; myasthenia gravis, generalized=cgV; ischemias foot=cGV; homocystinuria due to deficiency of n(5,10)-methylenetetrahydrofolate reductase activity=cgw; adverse reaction to drug=cGw; diabetic foot infection=cGW; methylmalonic aciduria due to methylmalonyl-coa mutase deficiency=cgW; otitis externa=cGX; loneliness in adolescence=cGx; methylenetetrahydrofolate reductase deficiency=cgx; methylmalonic aciduria, mut(−) type=cgX; mediastiniti=cGY; methylmalonic aciduria, mut(O) type=cgY; depression in children=cGy; thrombosis of retinal veins=cgy; ritualistic behavior (symptom)=cGz; colorectal adenomatous polyposis, autosomal recessive=cgZ; fetus affected by placental transfer of anticonvulsant=cgz; autism, susceptibility to, 16=cGZ; squamous cell carcinoma of pharynx=ch; pleural tuberculosis=CH; hypercholesterolemia=cH; thromboxane synthetase deficiency=Ch; hyper-igd periodic fever syndrome (bids)=cha; hearing disability=chA; b-cell immunodeficiency, distal limb anomalies, and urogenital malformations=cHA; rotor syndrome=cHa; anophthalmos with limb anomalies=cHB; hypertrophyic osteoarthropathy, primary, autosomal recessive, 2=cHb; inclusion body myopathy 3, autosomal dominant=chB; african swine fever=chb; epstein syndrome=chC; polymorphous low grade adenocarcinoma=chc; niemann-pick disease, intermediate, protracted neurovisceral=cHC; deafness, cochlear, with myopia and intellectual impairment=cHc; arthrogryposis, distal, type 1b=chd; deafness, x-linked 4=cHD; inclusion body myopathy, autosomal dominant=chD; peri-menopausal=cHd; snyder robinson syndrome=cHE; distal arthrogryposis type 2b=chE; lethal congenital contracture syndrome 4=che; loeys-dietz syndrome 3=cHe; arthrogryposis multiplex congenita, distal type 1=chE; waardenburg syndrome, type 2d=cHF; juvenile polyposis with hereditary hemorrhagic telangiectasisa=cHf; cardiomyopathy, familial hypertrophyic, 4=chf; left ventricular noncompaction 10=chg; growth mental deficiency syndrome of myhre=cHg; retrognathia=chG; neuromuscular manifestations=cHG; cardiomyopathy, familial hypertrophyic, 4, susceptibility to=chh; cardiomyopathy, familial hypertrophyic, 14=chH; cerebral dysgenesis=cHH; colorectal cancer, susceptibility to, 3=cHh; primary hypertrophyic cardiomyopathy=chi; parkinson disease 1, autosomal dominant=cHI; pulmonary hypertension, primary, 2=cHi; cardiomyopathy, dilated, 1ee=chI; sick sinus syndrome 3, susceptibility to=chJ; spinal meningioma=cHj; parkinson disease 4, autosomal dominant lewy body=cHJ; metastatic pheochromocytoma=chj; progonoma=chk; atrial septal defect 3=chK; lameness, animal=cHK; impaired social interaction=cHk; inflammatory carcinoma=chl; rhabdoid turner predisposition syndrome 2=cHl; cocaine delirium=cHL; cardiomyopathy, dilated, 1s=chL; left ventricular noncompaction 5=chM; psychomotor retardation, epilepsy, and craniofacial dysmorphism=cHM; mental retardation, autosomal dominant 16=cHm; lymphomas in children=chm; rhabdoid turner predisposition syndrome=cHn; retinitis pigmentosa 33=cHN; ebstein's anomaly=chN; medullomyoblastoma=chn; hecht syndrome=chO; hypotrichosis 11=cHO; mature b-cell neoplasm=cho; rhabdoid turner predisposition syndrome 1=cHo; mental retardation, autosomal dominant 15=cHp; carney complex variant=chP; neuroblastoma, susceptibility to=chp; mediastinum teratoma=cHP; macrothrombocytopenia progressive deafness=chQ; chromosome 1, monosomy 1p=chq; long qt syndrome 12=cHQ; malignant rhabdoid turner, somatic=cHq; central neurocytoma=chr; teratoid turner, atypical=cHr; osteopetrosis, autosomal recessive 8=cHR; fechtner syndrome=chR; ependymoblastoma=cHs; intermixed schwannian stroma-rich ganglioneuroblastoma=chs; may-hegglin anomaly=chS; microcephaly, microphthalmia, ectrodactyly of lower limbs, and prognathism=cHS; neurological ventriculitis=cht; deafness, autosomal dominant 17=chT; mental retardation, anterior maxillary protrusion, and strabismus=cHT; brain ependymoma=cHt; deafness, autosomal dominant nonsyndromeic sensorineural 17=chU; epithelioid malignant peripheral nerve sheath turner=cHu; myopathy, centronuclear, 3=chu; dermatitis, atopic, 4=cHU; acute nephritis=cHV; cochleosaccular degeneration of the inner ear and progressive cataracts=chV; familial hyperlipidemi=cHv; aortic aneurysm, familial thoracic 4=chv; cornealia de lange syndrome 3=cHw; clg nephropathy=chW; mitochondrial cytopathy=cHW; acute myelomaonoblastic leukemia=chw; small intestinal sarcoma=chx; degenerative myelopathy=cHX; facioscapulohumeral muscular dystrophy 1b=cHx; pathyognomonic sign=chX; adult spinal muscular atrophy=cHy; myopathy, myosin storage=chy; stiff limbs=cHY; bladder neck obstructio=chY; peripheral neuropathy, myopathy, hoarseness, and hearing loss=chz; cardiomyopathy, familial hypertrophyic, 10=chZ; bulbar weakness=cHz; microvascular complications of diabetes, susceptibility to, 6=cHZ; hypercholesterolemia, familial=cI; mental condensation=Ci; congenital hemolytic anemia=CI; carcinoma=ci; chronic pelvic pain syndrome=cIa; acetylation, fast=ciA; cardiomyopathy, familial hypertrophyic, 8=cia; spastic paraplegia 11, autosomal recessive=cIA; lactic acidosis, fatal infantile=cIb; schindler disease, type i=ciB; aortic aneurysm, familial thoracic 7=cib; spastic paraplegia 15, autosomal recessive=cIB; deafness, autosomal recessive 3=cic; atrophy of corpus callosum=cIC; kanzaki disease=ciC; noonan syndrome 4=cIc; neuroaxonal dystrophy=ciD; deafness, autosomal dominant 48=cid; craniodiaphyseal dysplasia, autosomal dominant=cId; mast syndrome=cID; spastic paraplegia 7, autosomal recessive=cIE; n-acetyl glutamate synthetase deficiency=ciE; focal segmental glomerulosclerosis 6=cie; osteoarthritis, spine=cIe; hypotonia, infantile, with psychomotor retardation and characteristic facies=ciF; craniodiaphyseal dysplasia=CIf; acute erythroleukemia=cIF; deafness, autosomal recessive 30=cif; diarrhea 3, secretory sodium, congenital, syndromeic=cIG; griscelli syndrome type 1=cig; spermatogenic failure 12=ciG; waardenburg syndrome, type 4c=cIg; yemenite deaf-blind hypopigmentation syndrome=cIh; elejalde disease=cih; langerhans cell histiocytosis of lung=cIH; anemia due to infection=ciH; diarrhea intractable=cii; tympanosclerosis=cII; waardenburg syndrome, type 2e=cIi; peripheral osteosarcoma=ciI; parkinson disease 3, autosomal dominant lewy body=cIJ; deafness, autosomal recessive 37=cij; flaccid paralysis=ciJ; chronic intestinal pseudo-obstruction=cIj; neuronal intestinal dysplasia, type b=cIK; deafness, autosomal dominant nonsyndromeic sensorineural 22=cik; plasma glucose concentration=ciK; childhood pilocytic astrocytoma=cIk; deafness, sensorineural, with hypertrophyic cardiomyopathy=cil; hypogonadotropic hypogonadism 17 with or without anosmia=cIL; vesicoureteral reflux 3=cIl; sigmoid neoplasm=ciL; hypotrichosis-lymphedema-telangiectasisa syndrome=cIm; deafness, autosomal recessive 2=cim; n-acetylaspartate deficiency=ciM; elliptocytosis 2=cIM; deafness, autosomal dominant 11=cin; mental retardation, x-linked, with panhypopituitarism=cln; short stature, optic nerve atrophy, and pelger-huet anomaly=ciN; spherocytosis, type 3=cIN; usher syndrome, type ib=cio; congenital hypertrichosis lanuginosa=clo; nk/t-cell lymphoma, nasal and nasal-type=ciO; epileptic encephalyopathy, early infantile, 5=cIO; spectrin, beta, erythrocytic=cIP; lymph node tuberculosis=ciP; celiac disease, susceptibility to, 4=cip; mental retardation, x-linked, with isolated growth hormone deficiency=cIp; elliptocytosis 3=cIQ; congenital hypertrichosis=cIq; glaucoma due to combination of mechanisms=ciq; granulomatous disease, chronic, autosomal recessive, cytochrome b-positive, type i=ciQ; granulomatous disease, chronic, autosomal recessive, cytochrome b-positive, type ii=ciR; campomelic dysplasia with autosomal sex reversal=clr; spinocerebellar ataxia, autosomal recessive 14=cIR; steroid-induced glaucoma=cir; iga myeloma=cis; neuropathy, hereditary sensory and autonomic, type ic=cIS; 46.xx sex reversal 2=cIs; systemic aspergillosis=ciS; streptococcal impetigo=cit; coloboma, ocular, and ichthyosis, brain malformations, and endocrine abnormalities=cIT; kyphomelic dysplasia=cIt; granulomatous disease, chronic, autosomal recessive, cytochrome b-positive, type iii=ciT; autoimmune thyroiditi=ciU; torsion abnormality=cIu; kahrizi syndrome=cIU; myopathy, spheroid body=ciu; bone marrow failure syndrome 1=cIV; ciliary dyskinesia, primary, 28=cIv; posterior lenticonus=ciV; muscular dystrophy, limb-girdle, type 1a=civ; culture shock=cIw; cardiomyopathy, familial hypertrophyic, 16=ciw malaria, mild, susceptibility to=ciW; rolandic epilepsy, mental retardation, and speech dyspraxia, x-linked=cIW; hidradenitis suppurativa, familial=ciX; 46.xy gonadal dysgenesis, complete, sry-related=cIX; spastic paraplegia 4, autosomal dominant=cIx; cardiomyopathy, dilated, 1kk=cix; sclerotylosis=cIY; microdysgenesis=cIy; duration of sleep=ciy; microhydranencephaly=ciY; lissencephaly 4=ciZ; ogden syndrome=ciz; oculomaxillofacial dysostosis=cIz; 46, xx true hermaphrodite=clZ; chronic lymphocytic leukemia=cj; familial hypoalphalipoproteinemia=cJ; diamond-blackfan anemia=CJ; hereditary hemorrhagic telangiectasisa=Cj; monophasic synovial sarcoma=cJa; epileptic encephalyopathy, early infantile, 4=cJA; microlissencephaly=cja; bone epithelioid hemangioma=cjA; exudative vitreoretinopathy, familial, x-linked recessive=cjb; bronchial adenocarcinoma=cjB; esophageal varix=cJb; symptomatic west syndrome=cJB; somatostatin analog, resistance to=cJc; neuropathy, hereditary motor and sensory, lom type=cjc; Colorado tick fever=cjC; epileptic spasms=cJC; sotos syndrome 2=cjD; ichthyosis with hypotrichosis, autosomal recessive=cJd; mitochondrial encephalyopathy, lactic acidosis and stroke-like episodes (melas syndrome)=cjd; hemophagocytic lymphohistiocytosis, familial, 5=cJD; thyroid hurthle cell carcinoma=cje; amish infantile epilepsy syndrome=cJe; mitochondrial dna depletion syndrome 5 (encephalyomyopathyic with or without methylmalonic aciduria)=cJE; marshall-smith syndrome=cjE; osteochondrodysplasia, rhizomelic, with callosal agenisi, thrombocytopenia, hydrocephalyus, and hypertension=cjF; mitochondrial dna depletion syndrome 2 (myopathyic type)=cJF; sarcoidosis, early-onset=cjf; native american myopathy=cJf; sensory polyneuropathy=cjg; benign multiple sclerosis=cjG; premature ovarian failure 8=cJg; mitochondrial dna depletion syndrome 9 (encephalyomyopathyic type with methylmalonic aciduria)=cJG; orthostatic hypotensive disorder, Streeter type=cjh; chronic gouty arthritis=cjH; microcephaly-capillary malformation syndrome=cJh; glutaric aciduria iii=cJH; mycobacterial and viral infections, susceptibility to, autosomal recessive=cJi; photogenic epilepsy=cji; comedocarcinoma, noninfiltrating=cJI; pediatric ulcerative colitis=cjI; never in mitosis gene a-related kinase 1=cjj; candidiasis, familial, 7=cJj; lyssavirus infection=cjJ; mammographic breast density=cJJ; subdural empyema=cjK; retinitis pigmentosa 67=cjk; hyper-ige recurrent infection syndrome, autosomal dominant=cJk; orofacial cleft 10=cJK; immunodeficiency, common variable, 10=cjL; nephronophthisis 9=cjl; diabetes mellitus, insulin-dependent, 5=cJL; systemic lupus erythematosus, susceptibility to, 11=cJI; renal-hepatic-pancreatic dysplasia 2=cjm; ectodermal dysplasia, anhidrotic, with t-cell immunodeficiency, autosomal dominant=cjM; anemia, hypochromic microcytic, with iron overload 2=cJm; follicular mucinosis=cJM; microcephaly, primary autosomal recessive, 7=cJn; renal pelvis transitional cell carcinoma=cjn; pleural empyema=cjN; arrest of spermatogenesis=cJN; myopathy, tubular aggregate=cJo; epilepsy, x-linked, with variable learning disabilityies and behavior disorders=cJO; sialidosis, type i=cjo; multiple mitochondrial dysfunctions syndrome 1=cjO; stormorken syndrome=cJp; neuropathy, hereditary sensory and autonomic, type v=cjP; mody, type 6=cjp; emery-dreifuss muscular dystrophy 4=cJP; spinocerebellar ataxia, autosomal recessive 8=cJQ; diabetes mellitus, insulin-dependent, 7=cjq; pseudopseudohypoparathyroidis=cJq; deep pain=cjQ; emery-dreifuss muscular dystrophy 5, autosomal dominant=cJR; diarrhea 4, malabsorptive, congenital=cjr; myofascial pain syndrome=cjR; preeclampsia eclampsia 4=cJr; polyhydramnios, megalencephaly, and symptomatic epilepsy=cJs; congenital disorder of deglycosylation=cjS; deafness, autosomal recessive 76=cJS; neurofibromatosis-noonan syndrome=cjs; epilepsy, progressive myoclonic 2b=cjT; mental retardation, autosomal dominant 5=cJT; deafness, autosomal recessive 16=cJt; neurofibromatosis, familial spinal=cjt; parkinson disease 20, early-onset=cJU; dyskeratosis congenita, autosomal recessive, 1=cjU; rud syndrome=cJu; caf-au-lait macules with pulmonary stenosis=cju; mental retardation, x-linked 96=cJV; dyskeratosis congenita, autosomal recessive=cjV; retention hyperkeratosis=cJv; neurofibromatosis type 5=cjv; congenital disorder of glycosylation, type iw=cJw; learning problems=cjw; spinocerebellar ataxia, autosomal recessive 11=cJW; dyskeratosis congenita, autosomal recessive, 2=cjW; congenital disorder of glycosylation, type ix=cJx; cataract, congenital, with microcornea or slight microphthalmia=cjX; fibrous hamartoma=cjx; sacral agenisi with vertebral anomalies=cJX; seckel syndrome 7=cjY; myxedema=cJY; hemophagocytic lymphohistiocytosis, familial, 4=cJy; radiation induced meningioma=cjy; congenital heart defects, multiple types, 2=cJZ; spastic paraplegia 6, autosomal dominant=cjZ; tumorlet=cjz; horse diseases=cJz; congenital hypoplastic anemia=CK; telangiectasis=Ck; leukemia=ck; familial hdl deficiency=cK; chronic cryptosporidiosis=cKa; ghosal hematodiaphyseal dysplasia=cKA; ichthyosis, congenital, autosomal recessive 6=cka; glucocorticoid deficiency 4=ckA; eye manifestations=ckb; cardiomyopathy, dilated, 1n=cKB; hypogonadotropic hypogonadism 10 with or without anosmia=cKb; premature ovarian failure 5=ckB; hypogonadotropic hypogonadism 11 with or without anosmia=cKc; muscular dystrophy, limb-girdle, type 2g=cKC; choreoathetosis, hypothyroidism, and neonatal respiratory distress=ckc; external auditory canal, bilateral atresia of, with congenital vertical talus=ckC; granulomatous mastitis=ckD; chorea, benign hereditary=ckd; craniosynostosis 3=cKD; mental retardation, autosomal recessive 40=cKd; diabetes mellitus, insulin-dependent, 21=cKe; corneal dystrophy, fuchs endothelial, 3=cKE; granulomatous uveitis=ckE; progressive chorea=cke; glomerulonephritis sparse hair telangiectases=cKf; precursor lymphoblastic lymphoma/leukemia=cKF; neurohypophysis granular cell turner=ckf; anus disease=ckE; cranial nerve disease=ckG; transcobalamin ii=cKG; transaldolase deficiency=cKg; hypothyroidism, congenital, nongoitrous, 5=ckg; atrial septal defect 7 with or without atrioventricular conduction defects=ckh; transcobalamin ii deficiency=cKH; situs inversu=ckH; reactive arthritis=cKh; maxillary sinus neoplasm=cKi; nog-related-symphalangism spectrum disorder=ckI; ventricular septal defect 3=cki; joubert syndrome 13=cKI; tectonic family, member 2=cKJ; splenic hypoplasia=ckj; thiourea tasting=cKj; symphalangism-brachydactyly syndrome=ckJ; brachydactyly, type b2=ckK; hypoplastic left heart syndrome 2=ckk; joubert syndrome 18=cKK; hypertyrosinemia=cKk; isolated noncompaction of the ventricular myocardium=ckl; stapes ankylosis with bread thumb and toes=ckL; forebrain defects=cKL; warburg micro syndrome 4=cKl; multiple ventricular septal defects=ckm; epileptic encephalyopathy, early infantile, 16=cKm; esophageal atresia with or without tracheoesophageal fistula=ckM; schizephrenia=cKM; deafness, autosomal recessive 86=cKn; spinocerebellar ataxia, autosomal recessive, with axonal neuropathy=cKN; ostium secundum type atrial septal defect=ckn; stapes fixation=ckN; carpal synostosis=ckO; ovarian endodermal sinus turner=cko; digitorenocerebral syndrome=cKo; cataract 36=cKO; autism, susceptibility to, x-linked 1=ckp; sveinsson chorioretinal atrophy=cKP; kenny caffey syndrome=cKp; myoclonus, familial cortical=ckP; kenny-caffey syndrome, type 1=cKq; asperger syndrome, x-linked, susceptibility to, 1=ckq; spastic paraplegia 49, autosomal recessive=cKQ; achalasia, familial esophageal=ckQ; atypical autism=ckr; hypoparathyroidism-retardation-dysmorphism syndrome=cKr; mental retardation, autosomal recessive 14=cKR; salivary gland basal cell adenocarcinoma=ckR; deafness, autosomal dominant 12=cKS; asperger syndrome, x-linked, susceptibility to, 2=cks; qt interval, variation in=ckS; emanuel syndrome=cKs; deafness, autosomal recessive 21=cKT; cervical aortic arch=cKt; lymph node infected=ckT; autism, susceptibility to, x-linked 2=ckt; corneal intraepithelial dyskeratosis and ectodermal dysplasia=cku; herpes zoste=cKU; facial deformity=cKu; alzheimer disease, late-onset, susceptibility to=ckU; hypertension in children=ckV; venous malformations, multiple cutaneous and mucosal=cKV; atrial septal defect 4=cKv; familial cold autoinflammatory syndrome 2=ckv; intramuscular hemangioma=cKW; asthma and nasal polyps=cKw ventricular failure=ckW; primary gout=ckw; atherosclerotic renal artery stenosis=ckX; anal canal carcinoma=ckx; abruzzo erickson syndrome=cKx; placenta accreta=cKX; ciliary dyskinesia, primary, 6=cky; microphthalmia, isolated, with coloboma 9=cKY; ischiopatellar dysplasia=cKy; cor pulmonale=ckY; congenital defect of skull and scalp=ckZ; dyskeratosis congenita, autosomal dominant=cKZ; bleeding disorder, platelet-type, 13, susceptibility to=cKz; amaurosis congenita of leber, type 9=ckz; endometrial carcinoma=cl; angiodysplasia=Cl; trichomoniasis=CL; arthritis, juvenile=cL; adrenal hypoplasia, congenital, with precocious puberty=clA; valve anomalies=cla; pulmonary fibrosis and/or bone marrow failure, telomere-related, 1=cLa; loeys-dietz syndrome 4=cLA; dyskeratosis congenita, autosomal dominant, 2=cLb; alagille syndrome 2=clb; furlong syndrome=cLB; mineralocorticoid deficiency, isolated=clB; aneurysm of aortic root=cLC; congenital adrenal hypoplasia, x-linked=clC; serpentine fibula polycystic kidney syndrome=clc; melanoma, cutaneous malignant, susceptibility to, 9=cLc; rienhoff syndrome=cLD; fibromatosis, congenital generalized=cld; primary spermatogenic failure=clD; meningothelial meningioma=cLd; retinitis pigmentosa 37=clE; arrhythmogenic right ventricular dysplasia, familial, 1=cLE; congenital atransferrinemia=cLe; myofibromatosis, infantile, 2=cle; corneal dystrophy, lattice type iiia=cLF; goldmann-favre syndrome=clF; lacune=clf; char syndrome=cLf; binswanger's disease=clg; spastic paraplegia 57, autosomal recessive=cLg; metamorphopsia=clG; groenouwtype i corneal dystrophy=cLG; stromal corneal dystrophy=cLH; neuropathy, hereditary motor and sensory, okinawa type=cLh; paraneoplasmtic opsoclonus-myoclonus ataxia=clh; macular retinoschisis=clH; cryptosporidiosi=clk amyloid of cornea=cLI; corneal guttata=cli; acguired protein s deficiency=cLi; hypochondriasis=clj; corneal deposit=cLJ; arenaviridae infections=cLj; bosch-boonstra optic atrophy syndrome=clJ; niemann-pick disease, type a=clk; 46, xx disorders of sex development=clK; corneal granular dystrophy=cLK; howell jolly bodies=cLk; african hemochromatosis=cLl; reis-bucklers corneal dystrophy=cLL; pseudohermaphroditism, female, with hypokalemia, due to glucocorticoid resistance=clL; niemann-pick disease, type c1=cll; thyroid dyshormonogenesis 3=cLm; thiel-behnke corneal dystrophy=cLM; niemann-pick disease, type d=clm; microbial colonization=clM; body composition, beneficial=clN; aortic aneurysm, familial thoracic 3=cLN; autoimmune thyroid disease, susceptibility to, 3=cLn; renal-hepatic-pancreatic dysplasia=cln; nelson syndrome=clO; renal hepatic pancreatic dysplasia dandy walker cyst=clo; thyroid dysfunction of mother, postpartum condition or complication=cLo; colorectal cancer, hereditary nonpolyposis, type 6=cLO; pseudohypoaldosteronism, type i, autosomal dominant=clP; senior-loken syndrome 4=clp; chronic thyroiditis=cLp; loeys-dietz syndrome, type 1b=cLP; ichthyosis, congenital, autosomal recessive 1=cLQ; nontoxic goiter=cLq; nephronophthisis 4=clq; pseudohypoaldosteronism, type i, autosomal recessive=clQ; hypertension, early-onset, autosomal dominant, with severe exacerbation in pregnancy=clR; thyroid angiosarcoma=cLr; autosomal recessive ichthyosis=cLR; normal pressure hydrocephalyu=clr; minimal lesion=cls; keratinization of ocular surface=cLS; estrogen receptor positive turner=cLs; deficiency of dehydrogenase=clS; denture stomatitis=clT; dentin dysplasia, type 1=cLt; asthma-related traits, susceptibility to, 2=clt; ectropion=cLT; xanthinuria=cLU; premature ovarian failure 7=clU; mils=clu; acute mucositis=cLu; ribbing disease=cLv; peeling skin syndrome, acral type=cLV; bronchioliti=clv; spermatogenic failure 8=clV; transglutaminase 6=cLW; radiation esophagitis=cLw; expressed emotion=clW; after pains=clw; carcinogenesis, radiation=cLx; chronic drug abuse=clx; laryngeal dystonia=cLX; retinitis pigmentosa 27=clX; brain ischemiaa=cLy; neural retina leucine zipper=clY; pancreatic cholera=cly; hemolytic uremic syndrome, atypical, susceptibility to, 6=cLY; thrombophilia due to thrombomodulin defect=cLZ; leukemia, post-chemotherapy, susceptibility to=clz; retinal degeneration, autosomal recessive, clumped pigment type=clZ; epithelioid cell melanoma=cLz; aminoacylase 1 deficiency=Cm; neuroblastoma=cm; lymphopenia=CM; recurrence=cM; idiopathyic megacolon=cma; leprosy, susceptibility to, 3=cMA; alpha-ketoglutarate dehydrogenase deficiency=cmA; laryngeal atresia, encephalyocele, and limb deformities=cMa; schizephrenia 17=cmb; corneal allograft rejection=cMb; mixed type cataract=cmB; prosthetic joint infection=cMB; pitt-hopkins-like syndrome 2=cmc; beaulieu-boycott-innes syndrome=cMc; sexually transmitted diseases, bacterial=cMC; glaucoma, normal tension, susceptibility to=cmC; osteomyelofibrosis=cMd; optic atrophy 1 and deafness=cmD; streptococcal sepsis=cMD; verruciform xanthoma of ski=cmd; experimental pneumococcal meningitis=cMe; optic atrophy with or without deafness, ophthalmoplegia, myopathy, ataxia, and neuropathy=cmE; rheumatic fever in children=cME; hypogonadotropic hypogonadism 9 with or without anosmia=cme; optic atrophy and cataract, autosomal dominant=cmf; candida sepsis=cMF; focal thyroiditis=cMf; mental retardation, autosomal recessive 5=cmf; 3-methylglutaconic aciduria type iv=cmG; spastic paraplegia 45, autosomal recessive=cmg; supragingival dental plague=cMG; hypothyroidism, congenital, nongoitrous, 6=cMg; 3-methylglutaconic aciduria=cmH; listeria meningitis=cMH; uridine 5-prime monophosphate hydrolase deficiency, hemolytic anemia due to=cmh; thyroid hormone resistance, generalized, autosomal dominant=cMh; thyroid hormone resistance, selective pituitary=cMi; herpes simplex encephalyitis, susceptibility to, 2=cMI; mental retardation, x-linked, with cerebellar hypoplasia and distinctive facial appearance=cmI; atrial septal defect 1=cmi; glaucoma 1, open angle, o=cmj; thyroid hormone resistance, generalized, autosomal recessive=cMj; blue cone monochromatism=cmJ; macular degeneration, age-related, 10=cMJ; pain insensitivity, congenital=cmk; colorblindness, partial, protan series=cmK; tsh producing pituitary turner=cMk; chronic urinary tract infection=cMK; acne conglobata=cML; robinow syndrome=cml; herpes simplex encephalyitis, susceptibility to, 4=cMl; red color blindness=cmL; dilated cardiomyopathy secondary to viral myocarditis=cMm; tritanopia=cmM; graft ischaemia=cMM; obesity, hyperphagia, and developmental delay=cmm; osteomyelitis=cMN; jensen syndrome=cMn; oculomotor nerve injuries=cmn; opioid withdrawal=cmN; necrotizing scleritis=cMo; schizephrenia 3=cmo; craving for alcohol=cmO; ileiti=cMO; exercise anaphylaxis=cmp; legionnaire disease, susceptibility to=cMP; secondary disease=cMp; narcotic addiction=cmP; fundus dystrophy, pseudoinflammatory, of sorsby=cMq; meningitis in children=cMQ; ischemiac pain=cmQ; striatonigral degeneration infantile=cmq; night blindness, congenital stationary, type 1a=cmr; revesz debuse syndrome=cMr; neuronal intestinal pseudoobstruction=cMR; amyotrophyic lateral sclerosis 12=cmR; glaucoma 1, open angle, e=cmS; ornithine aminotransferase=cms; dyskeratosis congenita, autosomal dominant, 3=cMs; specific language impairment 5=cMS; mycobacterium tuberculosis, protection against=cMt; infections, arenavirus=cMT; vasomotor rhinitis=cmT; hyperornithinemia=cmt; toxemia=cmU; atrial septal defect 6=cMu; deafness, autosomal recessive 7=cMU; gyrate atrophy=cmu; three m syndrome 2=cmv; leprosy, susceptibility to, 5=cMv; severe dehydration=cmV; deafness, autosomal dominant 36=cMV; autosomal recessive ocular albinism=cmw; arthrogryposis multiplex congenita neurogenic type=cmW; cerebrofaciothoracic dysplasia=cMW; antepartum malaria=cMw; optic atrophy 7=cMX; pain neck/shoulder=cmX; brown oculocutaneous albinism=cmx; recurrent cystitis=cMx; joubert syndrome 16=cMY; gram positive sepsis=cMy; joubert syndrome 10=cmy; c3hex, ability to smell=cmY; leprosy reversal reaction=cMz; simpson-golabi-behmel syndrome, type 2=cmz; congenital disorder of glycosylation, type iik=cMZ; negative rheumatoid factor polyarthritis=cmZ; biotinidase deficiency=Cn; cervical squamous cell carcinoma=cn; membranoproliferative glomerulonephritis, x-linked=cN; gestational trophyoblastic neoplasm=CN; joubert syndrome 2=cNa; childhood type dermatomyositi=cna; myopia, high, with cataract and vitreoretinal degeneration=cnA; liver scarring=cNA; meckel syndrome type 2=cNb; segmental ileitis=cNB; dysphagia, progressive=cnB; stomatin-like protein-2, hyperphosphorylation of=cnb; immune dysfunction with t-cell inactivation due to calcium entry defect 2=cne; ischemiac myocardial dysfunction=cNC; mental retardation, autosomal dominant 17=cnC; meckel syndrome, type 11=cNc; chronic g fever=cND; immune dysfunction with t-cell inactivation due to calcium entry defect 1=cnd; urate nephropathy=cnD; joubert syndrome 20=cNd; coxiella burnetii infection=cNE; endometrioid adenoma=cnE; joubert syndrome 14=cNe; meier-gorlin syndrome 2=cne; severe asthma=cnF; disc disorder=cNF; osteogenesis imperfecta, type xiv=cNf; meier-gorlin syndrome 3=cnf; amyloidosis ix=cng; hyperphenylalaninemia, non-pku mild=cnG; emery-dreifuss muscular dystrophy 7, autosomal dominant=cNg; bunion=cNG; muscular dystrophy-dystroglycanopathy (congenital with brain and eye anomalies), type a, 10=cNh; persistent hyperphenylalaninemia=cnH; abdominal abscess=cNH; osteopetrosis, autosomal recessive 1=cnh; activity intolerance=cnI; osteopetrosis, autosomal recessive 5=cni; induration of breast=cNI; joubert syndrome 6=cNi; nephronophthisis 11=cNj; meningoencephalitis=cNJ; retinitis pigmentosa 3=cnj; mental retardation, x-linked 30=cnJ; oroticaciduria 1=cnk; fanconi anemia, complementation group n=cnK; Japanese encephalitis=cNK; encephalyocardiomyopathy, mitochondrial, neonatal, due to atp synthase deficiency=cNk; conjunctivitiss=cNL; vomit recurrent=cnl; pancreatic cancer, susceptibility to, 3=cnL; deafness, autosomal recessive 6=cNl; pancreatic cancer, susceptibility to, 1=cnM; deafness, autosomal recessive 22=cnm; hepatic encephalopathy=cNM; epsilon-trimethyllysine hydroxylase deficiency=cNm; spondyloepimetaphyseal dysplasia, Pakistani type=cnN; tenosynovitiss=cNN; deafness, autosomal recessive 9=cnn; cardiomyopathy, dilated, 1t=cNn; enterokinase deficiency=cNo; spondylodysplasia and premature pubarche=cnO; deafness, autosomal recessive 18b=cno; farmer's lung=cNO; deafness, autosomal recessive 84b=cnp; brachyolmia=cnP; pigmented villonodular synovitiss=cNP; deafness, childhood-onset neurosensory, autosomal recessive 8=cNp; shortened trunk=cnQ; progressive multifocal leukoencephalopathy=cNQ; deafness, autosomal recessive 10=cNq; disseminated intravascular coagulatio=cnq; deafness, autosomal dominant 56=cNr; catch=cNR; dysgnathia complex=cnr; anovulatio=cnR; microphthalmia, syndromeic 5=cns; limb-girdle muscular dystrophy type 2h=cnS; osteopetrosis, autosomal recessive 7=cNS; achilles tendon injury=cNs; periostitis=cNt; microphthalmia, syndromeic 3=cnt; osteopetrosis, mild autosomal recessive form=cNT; mulibrey nanism=cnT; allergic encephalyitis=cnU; polyostotic osteolytic dysplasia, hereditary expansile=cNU; pituitary hormone deficiency, combined, 6=cnu; carcinoma of supraglottis=cNu; diabetic polyneuropathy=cnV; familial paget's disease of bone=cNV; schizephrenia 15=cnv; psoriatic arthritis, susceptibility to=cNv; anaplasmosis=cNw; otocephaly=cnw; hyperostosis corticalis deformans juvenilis=cNW; large cell medulloblastoma=cnW; succinyl-coa:3-oxoacid cna transferase deficiency=cnx; human immunodefiency virus encephalitis=cNx; pyrophosphate arthritis=cNX; otofaciocervical syndrome 2=cnX; bleeding disorder due to p2ry12 defect=cny; chromosome 7, trisomy 7p=cnY; immunoglobulin a deficiency 2=cNY; myelomonocytic leukemia=cNy; immunodeficiency, common variable, 2=cNZ; deafness, autosomal dominant 41=cnz; coloboma of optic nerve=cnZ; borderline lepromatous leprosy=cNz; bronchus carcinoma=co; hypertriglyceridemia=cO; adenosine deaminase deficiency=CO; severe combined immunodeficiency, autosomal recessive, t cell-negative, b cell-negative, nk cell-negative, due to adenosine d . . . =Co; hypertrophy of tonsils=cOa; usher syndrome, type ig=coA; craniofacial deafness hand syndrome=coa; hypermobility syndrome=cOA; klein-waardenberg's syndrome=cob; retinitis pigmentosa 31=cOB; transient hypogammaglobulinemia of infancy=cOb; deafness, autosomal recessive 23=coB; usher syndrome, type if =coC; immunodeficiency, common variable, 4=cOc; dystonia, focal, task-specific=cOC; maturity-onset diabetes of the young, type 9=cne; multiple sclerosis, susceptibility to, 5=cOd; psychogenic dystonia=cOD; epilepsy, female-restricted, with mental retardation=coD; sulfocysteine(tm)=cnd; infantile cerebral palsy, unspecified=cOE; polysubstance dependencye=coE; adenitis=cOe; leukemia, acute lymphoblastic, susceptibility to, 3=coe; skin diseases, viral=cOf; urosepsis=cof; torticollis, familial=cOF; phosphoenolpyruvate carboxykinase 2 deficiency=coF; adrenocortical carcinoma, hereditary=cOG; malignant struma ovari=coG; sprue=cOg; liver abscess, pyogenic=cog; basal cell carcinoma, susceptibility to, 7=cOH; pilar and trichilemmal cysts=coH; ornithosis=coh; breast squamous cell carcinoma=cOh; iga nephropathy, susceptibility to, 1=cOi; megaesophagus=coI; langerhans cell sarcoma=coi; trigeminal nerve injuries=cOI; immunoglobulin g4 related sclerosisng disease=cOj; roseolovirus infections=cOJ; microcephalyic osteodysplastic primordial dwarfism, type ii=coJ; aniridia cerebellar ataxia mental deficiency=coj; seckel syndrome 2=coK; keratitis, hereditary=cok; porokeratosis of mibelli=cOK; polyclonal hypergammaglobulinemia=cOk; actinic cheilitis=cOL; ectopia pupillae=col; inflammatory bowel disease 16=cOl; osteodysplastic primordial dwarfism=coL; proprotein convertase 1 3 deficiency=coM; immunodeficiency 16=cOm; o'donnell pappas syndrome=com; chronic hyperplastic candidiasis=cOM; sweat gland adenocarcinoma=cOH; cardiomyopathy, dilated, 1z=cOn; foveal hypoplasia 1=con; body mass index quantitative trait locus 12=coN; sacral defect and anterior sacral meningocele=cnO; cardiomyopathy, familial hypertrophyic, 13=cOo; cancer, embryonal=cOO; aniridia, type 2=coo; cardiomyopathy, dilated, 2a=cOp; knee pain=coP; noninvasive carcinoma ex pleomorphic adenoma=cOP; optic nerve aplasia, bilateral=cop; malignant stromal turner=cOQ; cardiomyopathy, dilated, 1ff=cOq; spondylometaphyseal dysplasia with cone-rod dystrophy=coQ; foveal hypoplasia, isolated=coq; foot diseases=cOR; systemic lupus erythematosus, susceptibility to, 2=coR; cardiomyopathy, familial hypertrophyic, 7=cOr; manifest-latent nystagmus=cor; solitary keratoacanthoma=cOS; fetal microcephaly=cos; cerebral cavernous malformations 3=coS; cardiac hypertrophy=cOs; nemaline myopathy 5=cOt; primary pigmented nodular adrenocortical disease=coT; congenital ptosis=cot; desmoplastic cerebral astrocytoma of infancy=cOT; cardiomyopathy, dilated, 1d=cOu; placenta cancer=cou; acrodysostosis 2 with or without hormone resistance=cnU; mucinous cystic turner of borderline malignancy=cOU; ischaemic cerebral infarction=coV; cyst benign=cOV; tenth agenisi, selective, 3=cov; cardiomyopathy, familial hypertrophyic, 2=cOv; choroid plexus carcinoma, childhood=cOW; nonpuerperal galactorrhea=cow; retinitis pigmentosa 43=coW; cardiomyopathy, familial restrictive, 3=cOw muscular dystrophy, limb-girdle, type 1f=cOx; adult diffuse astrocytoma=cOX; night blindness, congenital stationary, autosomal dominant 2=coX; galactorrhea associated with childbirth=cox; hyperphenylalaninemia with primapterinuria=coy; chondrosarcoma of bone=cOY; ehlers-danlos syndrome caused by tenascin-x deficiency=cOy; retinitis pigmentosa 40=coY; recurrent dislocation of joint=cOz; lymph node cancer=cOZ; cone dystrophy 4=coZ; organic acidemias=coz; metastatic melanoma=cp; severe combined immunodeficiency due to adenosine deaminase deficiency=Cp; peyronie's disease=CP; steatohepatitis=cP; ectrodactyly, ectodermal dysplasia, and cleft lip/palate syndrome 3=cPA; coenzyme q10 deficiency, primary, 2=cpA; erythroplakia of mouth=cPa; achromatopsia 5=cpa; split-hand/foot malformation 4=cPB; adnexal lesion=cPb; joubert syndrome 22=cpb; coenzyme q10 deficiency, primary, 3=cpB; retinitis pigmentosa 57=cpc; flat warts=cPc; limb-mammary syndrome=cPC; pancreatic agenisi, congenital=cpC; chronic cholangitis=cpD; retinal cone dystrophy 3a=cpd; orofacial cleft 8=cPD; ischemiaa=cPd; sweat gland neoplasm=cPE; parotid gland cancer=cPe; achromatopsi=cpe; hereditary x-linked recessive spastic paraplegia=cpE; pneumoniaa=cPf; spinocerebellar ataxia 23=cpF; skin/hair/eye pigmentation, variation in, 10=cPF; striatal degeneration, autosomal dominant=cpf; transient cerebral ischemiaa=cPg; pigmented nodular adrenocortical disease, primary, 3=cpg; late cortical cerebellar atrophy=cpG; undifferentiated somatoform disorder=cPG; attention deficit-hyperactivity disorder, susceptibility to, 7=cPH; ovary sarcoma=cPh; hypothyroidism in pregnancy=cph; horizontal nystagmus=cpH; handing ataxia=cpI; triosephosphate isomerase deficiency=cPI; glottis carcinoma=cPi; bone diseases, endocrine=cpi; basal ganglia calcification, idiopathyic, 5=cpj; prostate carcinoma in situ=cpJ; triose phosphate isomerase deficiency=cPJ; papillary cystadenocarcinoma=cPj; localized osteosarcoma=cPk; usher syndrome, type 2a=cpK; thiamine metabolism dysfunction syndrome 5 (episodic encephalyopathy type)=cPK; diabetic ulcer=cpk; oral dyskinesia=cpL; adult fibrosarcoma=cpl; cardiomyopathy, familial hypertrophyic, 3=cPL; multifocal osteogenic sarcoma=cPl; advanced sleep phase syndrome, familial, 1=cpM; cardiomyopathy, dilated, 1y=cPM; respiratory system abnormalities=cpm; sarcomatoid renal cell carcinoma=cPm; nemaline myopathy 4=cPN; regular astigmatism—corneal=cpn; bone giant cell sarcoma=cPn; acute g fever=cpN; zebra body myopathy=cPO; addicted to cocaine=cpO; eosinophilic granulomatous polyp=cpo; gliofibroma=cPo; nasal cavity adenocarcinoma=cPp; proneural glioblastoma=cpp; nemaline myopathy 1=cPP; recurrent hypersomnia=cpP; myxopapillary ependymoma=cpq; ileocolic intussusception=cPQ; peroxisome biogenesis disorder 2b=cpQ; endometrial squamous cell carcinoma=cPq; thiopurine s methyltranferase deficiency=cPR; clear cell chondrosarcoma=cPr; basal ganglia calcification, idiopathyic, 4=cpr; peroxisome biogenesis disorder 3a (zellweger)=cpR; ovarian mucinous neoplasm=cPs; peroxisome biogenesis disorder 3b=cpS; pulmonary capillary hemangiomatosis=cps; gastrointestinal irritation=cPS; vesiculobullous skin disease=cPT; pdgfrb-associated chronic eosinophilic leukemia=cpt; non-invasive bladder papillary urothelial neoplasm=cPt; peroxisome biogenesis disorder 11b=cpT; malignant triton turner=cPu; thyroid nodule cold=cPU; peroxisome biogenesis disorder 11a (zellweger)=cpU; pyruvate metabolism, inborn errors=cpu; fibrosarcomatous osteosarcoma=cPv; pyruvate dehydrogenase e1-beta deficiency=cpv; peroxisome biogenesis disorder 13a (zellweger)=cpV; toxic diffuse goiter=cPV; spinocerebellar ataxia, autosomal recessive 7=cPW; maturity-onset diabetes of the young, type 4=cpw; peroxisome biogenesis disorder 8b=cpW; atypical follicular adenoma=cPw; lip cancer=cPx; deafness, autosomal recessive 79=cPX; charcot-marie-tooth disease, x-linked dominant, 6=cpx; peroxisome biogenesis disorder 8a (zellweger)=cpX; herpes simplex encephalyitis, susceptibility to, 3=cPY; bladder carcinoma in situ=cPy; peroxisome biogenesis disorder 12a (zellweger)=cpY; hyperplasia of tonsils=cpy; peroxisome biogenesis disorder 5b=cpZ; multiple myelomaa=cPz; candidiasis, familial, 8=cPZ; pyruvate dehydrogenase phosphatase deficiency=cpz; myeloblastic leukemia=cq; epilepsy, idiopathyic generalized=Cq; microalbuminuria=cQ; measles=CQ; dermais turner=cQA; peroxisome biogenesis disorder 5a (zellweger)=cqa; psoriasis susceptibility 13=cQa; glycogen storage disease, type ixa2=cgA; peroxisome biogenesis disorder 7a (zellweger)=cqb; progressive familial heart block, type ib=cQB; glycogen storage disease ixb=cqB; muscular dystrophy, limb-girdle, type 2s=cQb; glycogen storage disease ixc=cqC; mental retardation, autosomal recessive 13=cQc; peroxisome biogenesis disorder 7b=cqc; trichorhinophalangeal syndrome, type iii=cQC; trichorhinophalangeal syndrome type i=cQD; peroxisome biogenesis disorder 10a (zellweger)=cqd; fibrosis of extraocular muscles, congenital, 2=cqD; ventricular tachycardia, catecholaminergic polymorphic, 5, with or without muscle weakness=cQd; cerebrohepatorenal syndrome, variant types=cqe; prurigo nodularis=cQE; trehalase deficiency=cQe; hirschsprung disease ganglioneuroblastoma=cqE; gastrointestinal sensation=cQF; peroxisome biogenesis disorder 2a (zellweger)=cqf; vasculopathy, retinal, with cerebral leukodystrophy=cQf; neuroblastoma, susceptibility to, 2=cqF; peroxisome biogenesis disorder 4a (zellweger)=cqg; chilblain lupus 1=cQg; urinary incontinence, urge=cQG; hypoventilation syndrome=cqG; coma, post-head injury=cQh; peroxisome biogenesis disorder 4b=cqh; taste salty=cOH; chronic respiratory failure=cqH; tertiary hypothyroidism=cQi; sleep-related respiratory failure=cqI; headache disorders, primary=cQI; refsum disease, adult, 2=cqi; metatropic dwarfism=cQJ; refsum disease, adult, 1=cqJ; familial alcoholism=cQj; amyotrophyic lateral sclerosis 18=cqj; thyrotropin-releasing hormone resistance, generalized=cQk; bronchiti=cqK; brachyolmia type 3=cQK; dimauro disease=cqk; thyrotropin-releasing hormone receptor=cQl; parastremmatic dwarfism=cQL; 22q11 partial monosomy syndrome=cgL; hyperphosphatasisa with mental retardation=cql; hyperphosphatasisa with mental retardation syndrome 3=cqm; spinal muscular atrophy, scapuloperoneal=cQM; placental abruption=cqM; charcot-marie-tooth disease, axonal, type 2r=cQm; hereditary motor and sensory neuropathy, type iic=cQN; mabry syndrome=cqn; subacute cutaneous lupus=cQn; testicular infection=cqN; hyperphosphatasisa with mental retardation syndrome 4=cqo; brachyolmia type 2=cQO; lupus erythematosus overlap syndrome=cQo; oculomelic amyoplasia=cqO; gordon syndrome=cqP; annular erythema=cQp; antral ulcer=cqp; digital arthropathy-brachydactyly, familial=cQP; multiple congenital anomalies-hypotonia-seizures syndrome 2=cqQ; spinal muscular atrophy, distal, congenital nonprogressive=cQQ; mulibrey nanis=cQq; meckel syndrome type 3=cqq; cerebrovascular trauma=cqr; sodium serum level quantitative trait locus 1=cQR; paroxysmal nocturnal hemoglobinuria 1=cqR; deafness, autosomal recessive 28=cQr; nongonococcal urethritis=cqs; achondrogenesis type 1a=cQs; zunich neuroectodermal syndrome=cqS; charcot-marie-tooth disease, type 2c=cQS; liver failure, infantile, transient=cQt; multiple congenital anomalies-hypotonia-seizures syndrome 1=cqT; microcephaly 11, primary, autosomal recessive=cqt; focal cortical dysplasia of taylor=cQT; hyperphosphatasisa with mental retardation syndrome 2=cqU; deafness, aminoglycoside-induced=cQu; giant cell astrocytoma=cQU; dentin, secondary=cqu; episodic pain syndrome, familial, 1=cQv; pontocerebellar hypoplasia type 2=cQV; heart sarcoma=cqv; marasmus=cqV; allergy to chemicals=cQw; multiple congenital anomalies-hypotonia-seizures syndrome 3=cqW; pontocerebellar hypoplasia type 2a=cQW; phosphoglycerate dehydrogenase deficiency=cqw; pontocerebellar hypoplasia type 4=cQX; paroxysmal nocturnal hemoglobinuria 2=cgX; late onset cerebellar ataxia=cQx; neu laxova syndrome=cqx; congenital lipomatous overgrowth, vascular malformations, and epidermal nevi=cqY; glycogen storage disease, type ixd=cqy; focal segmental glomerulosclerosis 2=cQy; combined oxidative phosphorylation deficiency 3=cQY; phosphorylase kinase, alpha 2 (liver)=cqz; hyperthyroidism, nonautoimmune=cQZ; csnblc=cQz; megalencephaly cutis marmorata telangiectatica congenita=cqZ; psoriasis=cr; tuberculous peritonitis=CR; sleep initiation and maintenance disorders=Cr; endothelial dysfunction=cR; dystonia-parkinsonism, adult-onset=crA; hyperthyroidism, familial gestational=cRa; cowden syndrome 5=cra; cardiomyopathy, dilated, 1g=cRA; thyroid carcinoma with thyrotoxicosis=cRb; infected ascites=crb; cardiomyopathy, familial hypertrophyic, 9=cRB; nbia2b=crB; thyroid adenoma, hyperfunctioning=cRc; external auditory canal ceruminous adenoma=crc; karak syndrome=crC; muscular dystrophy, limb-girdle, type 2j=cRC; stage iv endometrial cancer=crd; myopathy, early-onset, with fatal cardiomyopathy=cRD; swallowing problem=crD; congenital hyperthyroidism=cRd; obstructive chronic bronchitis with (acute) exacerbation=cre; neonatal hyperthyroidism=cRe; platelet-activating factor acetylhydrolase deficiency=crE; tibial muscular dystrophy=cRE; familial restrictive cardiomyopathy=cRF; subclinical hyperthyroidism=cRf; breast mucinous carcinoma=crf; intestinal atresia=crF; orbital congestion=cRg; centriacinar emphysema=crG; dystransthyretinemiac euthyroidal hyperthyroxinemia=cRG; ceruminoma=crg; amyloid of vitreous=cRH; agammaglobulinemia 7, autosomal recessive=crh; diffuse goiter=cRh; hematoma, epidural, spinal=crH; thrombophilia, familial, due to decreased release of tissue plasminogen activator=crI; age-related amyloidosis=cRI; toxic goiter=cRi; ataxia-oculomotor apraxia 3=cri; embolism and thrombosis=crJ; familial polyneuropathy=cRJ; heaves=crj; plummer's disease=cRj; postoperative adhesion=crK; gastrointestinal dysfunction=cRK; neonatal thyrotoxicosis=cRk; cystic breast disease=crk; chronic cerebral ischemia=cRl; lethal congenital contractural syndrome 3=crl; cardiac tamponade=crL; hereditary cardiac amyloidosis=cRL; absent peristalsis=cRm; hepatic amyloidosis=cRM; cholesterol embolism=crM; synostosis, carpal, with dysplastic elbow joints and brachydactyly=crm; astrocytic hamartoma=crn; congenital pelviureteric junction obstruction=cRn; eye lesion=cRN; strongylida infections=crN; epileptic encephalyopathy, early infantile, 12=crO; exudative vitreoretinopathy 5=cRo; ring dermaoid of cornea=cro; amyloid myopathy=cRO; single atrium=crp; mental retardation, x-linked 58=cRp; migrating partial seizures in infancy=crP; monoparesis—arm=cRP; disabling disease=cRQ; deafness, autosomal recessive 98=cRq; cataract, posterior polar, 4=crq; auriculocondylar syndrome 2=crQ; sudden infant death with dysgenesis of the testes syndrome=cRr; edema vascular=crr; leukonychia totalis=crR; early satiety=cRR; autoinflammation, antibody deficiency, and immune dysregulation, plcg2-associated=crS; presbyopia=cRS; vascular aneurysm=crs; spinocerebellar ataxia 11=cRs; lissencephaly 3=cRT; familial cold autoinflammatory syndrome 3=crT; vascular fragility=crt; mitochondrial complex iii deficiency, nuclear type 2=cRt; nephronophthisis 12=cRu; benign neurilemmoma=cru; urticaria due to cold=crU; macrothrombocytopenia, autosomal dominant, tubb1-related=cRU; alzheimer disease 19=crV; dextrocardia=crv; short-rib thoracic dysplasia 4 with or without polydactyly=cRv; cortical dysplasia, complex, with other brain malformations 5=cRV; multiple cysts=crw; gnu=cRw; shipyard ey=crW; polymicrogyria, symmetric or asymmetric=cRW; adenosine triphosphate, elevated, of erythrocytes=crx; polymicrogyria, asymmetric=cRX; retinitis pigmentosa 51=cRx; epidermaolysis bullosa simplex, ogna type=crX; fibrosis of extraocular muscles, congenital, 3a, with or without extraocular involvement=cRY; arrhythmogenic right ventricular dysplasia, familial, 9=cry; epidermaolysis bullosa simplex with pyloric atresia=crY; bardet-biedl syndrome 8=cRy; mental retardation, autosomal recessive 39=cRz; fleck retina, familial benign=crz; muscular dystrophy, limb-girdle, type 2q=crZ; cortical dysplasia, complex, with other brain malformations 1=cRZ; scid due to ada deficiency, delayed onset=Cs; gamma aminobutyric acid transaminase deficiency=cs; carotid atherosclerosis=cS; polyarteritis nodosa=CS; chromosome 17, trisomy 17p=csA; infection by anisakis larva=csa; congenital absence of vagina=cSA; dystonia musculorum deformans 4=cSa; infection by anisakidae=csb; rufous oculocutaneous albinism=cSB; leukodystrophy, hypomyelinating, 6=cSb; disorder of hand=csB; skin/hair/eye pigmentation, variation in, 11=cSC; multiple cranial neuropathy=csC; anisakiasis=csc; cortical dysplasia, complex, with other brain malformations 4=cSc; osteopetrosis, autosomal recessive 6=csd; combined oxidative phosphorylation deficiency 4=cSd; colorectal cancer, hereditary nonpolyposis, type 4=csD; arthrogryposis multiplex congenita, distal, x-linked=cSD; generalized osteopenia=cse; retinitis pigmentosa 14=cSe; epileptic encephalyopathy, early infantile, 10=csE; mental retardation, x-linked, syndromeic, nascimento type=cSE; dna repair-deficiency disorders=csF; alpha-2-plasmin inhibitor deficiency=csf; leber congenital amaurosis 15=cSf; kaufman oculocerebrofacial syndrome=cSF; bone marrow oedema=csg; pancreatic triacylglycerol lipase deficiency=csG; chromosome 15g, trisomy=cSG; central topographic island=cSg; encephalyomyeliti=csH; mental retardation, autosomal recessive 7=cSh; blepharophimosis-ptosis-intellectual disability syndrome=cSH; axillary veins thrombosis=csh; saethre-chotzen syndrome with eyelid anomalies=cSi; terminal cancer=csI; streptococcal infection of skin=csi; schnyder corneal dystrophy=cSI; ichthyosis, congenital, autosomal recessive 10=csJ; amyotrophyic lateral sclerosis 15, with or without frontotemporal dementia=cSJ; robinowsorauf syndrome=cSj; membranous conjunctivitis=csj; baller-gernld syndrome=cSk; pneumoniae plague=csk; spastic paraplegia 39, autosomal recessive=csK; johanson-blizzard syndrome=cSK; lipodystrophy, familial partial, type 4=csl; chorioretinal dystrophy, spinocerebellar ataxia, and hypogonadotropic hypogonadism=csL; facial ectodermal dysplasia=cSl; parkinson disease 5, autosomal dominant=cSL; neurodegeneration with optic atrophy, childhood-onset=cSM; cardiomyopathy, dilated, 1p=csm; pyridoxamine 5-prime-phosphate oxidase deficiency=csM; diabetic embryopathy=cSm; deafness, autosomal recessive 70=csN; cardiomyopathy, familial hypertrophyic, 18=csn; body mass index quantitative trait locus 4=cSN; tyrosine kinase 2 deficiency=cSn; combined oxidative phosphorylation deficiency 13=csO; bruck syndrome 2=cso; hyperbilirubinemia, transient familial neonatal=cSO; encephalyomyopathy=cSo; small intestine cancer=cSP; spastic paraplegia 2, x-linked=csp; basosquamous carcinoma=cSp; short stature, onychodysplasia, facial dysmorphism, and hypotrichosis=csP; pelizaeus-merzbacher disease, atypical=csq; opiate withdrawal symptoms=cSQ; poisoning by fluorouracil=cSq; aberrant right subclavian artery=csQ; medullary cystic kidney disease 2=cSR; occult macular dystrophy=csr; rectal cancer stage=cSr; single umbilical artery=csR; glomerulocystic kidney disease with hyperuricemia and isosthenuria=cSS; oculocutaneous albinism type 1b=cSs; hypergranular promyelocytic leukemia=css; aberrant subclavian artery=csS; premature ovarian failure 2b=csT; hemophagocytic lymphohistiocytosis, familial, 3=cST; loosening of prosthesis=cst; oculocutaneous albinism type 3=cSt; herpes simplex encephalyitis, susceptibility to, 1=cSU; charcot-marie-tooth disease, type 2e=csu; albinism, oculocutaneous, type i, temperature-sensitive=cSu; dowling-degos disease 2=csU; stage ii melanoma=cSv; charcot-marie-tooth disease, demyelinating, type 1e=csv; dowling-degos disease 4=csV; immunodeficiency with hyper-igm, type 5=cSV; tyrosinase-negative albinism=cSw; amyotrophy, hereditary neuralgic=csw; beta-ureidopropionase deficiency=cSW; colorectal cancer, susceptibility to, 10=csW; hepatic venoocclusive disease with immunodeficiency=csx; mandibular hypoplasia, deafness, progeroid features, and lipodystrophy syndrome=csX; autoimmune endocrine disease=cSx; adenosquamous pancreas carcinoma=cSX; colorectal cancer, susceptibility to, 12=csY; mental retardation, x-linked, syndromeic 14=cSY; charcot-marie-tooth disease and deafness=csy; secondary malignant neoplasm of spleen=cSy; mitochondrial complex iii deficiency, nuclear type 5=cSZ; pes cavus=csz; facial dysmorphism, immunodeficiency, livedo, and short stature=csZ; iris disease=cSz; xeroderma pigmentosum=CT; depressive disorder=ct; allergic disposition=cT; priapism, familial idiopathyic=Ct; mitochondrial complex iii deficiency, nuclear type 4=cTa; progressive external ophthalmoplegia with mitochondrial dna deletions, autosomal recessive=cta; total retinal detachment=cTA; muscular dystrophy-dystroglycanopathy (limb-girdle), type c, 3=ctA; muscular dystrophy-dystroglycanopathy (congenital with mental retardation), type b, 3=ctB; progressive external ophthalmoplegia with mitochondrial dna deletions, autosomal dominant, 1=ctb; urocanase deficiency=cTb; clinically significant macular edema=cTB; muscular dystrophy-dystroglycanopathy (congenital with brain and eye anomalies), type a, 3=ctC; acute bacterial endocarditis=cTC; intermittent ataxia=cTc; mitochondrial dna depletion syndrome 4b (mngie type)=etc; familial porphyria cutanea tarda=cTd; muscular dystrophy-dystroglycanopathy (congenital with brain and eye anomalies), type a, 8=ctD; abnormal yolk sac=cTD; mitochondrial dna depletion syndrome 4a (alpers type)=ctd; homozygous porphyria cutanea tarda=cTe; rotator cuff syndrome=cTE; hydrocephalyu=ctE; ataxia neuropathy spectrum=cte; epilepsyia partialis continua=ctf; disease attributes=cTf; tuberculosis=cTF; muscular dystrophy-dystroglycanopathy (congenital with brain and eye anomalies), type a, 12=ctF; spinocerebellar ataxia with epilepsy=ctg; keratosis linearis with ichthyosis congenita and sclerosisng keratoderma=ctG; rubeosis iridis=cTG; hyperactive child=cTg; central nervous system tuberculosis=cTH; muscular dystrophy-dystroglycanopathy (limb-girdle), type c, 1=ctH; hepatoerythropoietic porphyria=cTh; infertility/subfertility=cth; muscular dystrophy-dystroglycanopathy (congenital with mental retardation), type b, 1=ctI; progressive external ophthalmoplegia with mitochondrial dna deletions, autosomal dominant, 4=cti; cutaneous porphyri=cTi; neovascular glaucoma=cTI; deafness, autosomal recessive 18=cTj; muscular dystrophy-dystroglycanopathy (limb-girdle), type c, 2=ctJ; xeroderma pigmentosum, variant type=ctj; central retinal vein occlusion=cTJ; xanthogranulomatous cholecystitis=cTK; mandibulofacial dysostosis, treacher collins type, autosomal recessive=ctk; usher syndrome, type ic=cTk; muscular dystrophy-dystroglycanopathy (congenital with mental retardation), type b, 2=ctK; muscular dystrophy-dystroglycanopathy (congenital with brain and eye anomalies), type a, 2=ctL; treacher collins syndrome 2=ctl; retinitis pigmentosa 39=cTl; left ventricular diastolic dysfunction=cTL; erythrocytosis, familial, 2=cTM; anophthalmia with pulmonary hypoplasia=ctm; agricultural workers' diseases=ctM; mental retardation, x-linked 99=cTm; leukodystrophy, hypomyelinating, with hypodontia and hypogonadotropic hypogonadism=ctn; inferior myocardial infarction=cTN; uv-sensitive syndrome 3=cTn; microvascular complications of diabetes, susceptibility to, 5=ctN; enzyme activity finding=ctO; arthrogryposis, renal dysfunction, and cholestasis 2=cTO; leukodystrophy, hypomyelinating, 8, with or without oligodontia and/or hypogonadotropic hypogonadism=cto; amyotrophyic lateral sclerosis 8=cTo; pesticide poisoning=ctP; hypocortisolism secondary to another disorder=ctp; vitamin k-dependent clotting factors, combined deficiency of, type 2=cTP; spinal muscular atrophy, proximal, adult, autosomal dominant=cTp; antley-bixler syndrome with genital anomalies and disordered steroidogenesis=ctQ; myopathy, x-linked, with excessive autophagy=cTQ; spinal muscular atrophy, late-onset, finkel type=cTq; melanoderma=ctq; microphthalmia, syndromeic 11=cTr; parkinson disease 17=cTR; periodontitis, aggressive, 2=ctR; excessive drinking=ctr; cardiomyopathy, familial hypertrophyic, 15=cTs; pituitary hormone deficiency, combined, 1=ctS; obesity hypoventilation syndrome=cts; spastic paraplegia 53, autosomal recessive=cTS; progressive hearing loss stapes fixation=ctT; syndactyly of toes=cTT; cardiomyopathy, dilated, 1w=cTt; conn adenoma=ctt; amyotrophyic lateral sclerosis 14, with or without frontotemporal dementia=cTu; gamma-cystathinnase deficiency=cTU; cervical abnormality=ctU; micronodular adrenal hyperplasia=ctu; idiopathyic hypopituitarism=ctv; deafness, autosomal dominant 15=ctV; atherosclerosis, susceptibility to=cTv; keratoconus 1=cTV; craniofacial anomalies and anterior segment dysgenesis syndrome=cTW; apparent life-threatening event=ctw; polyembryoma=ctW; periodontal atrophy=cTw; adrenal cortex disease=ctx; mediastinum seminoma=ctX; sarcoid type granuloma=cTx; microphthalmia, isolated 2=cTX; microphthalmia, isolated, with coloboma 3=cTY; critical lower limb ischemia=cTy; pancreatic endocrine carcinoma=cty; phenylketonuri=ctY; microphthalmia, cataracts, and iris abnormalities=cTZ; subvalvular aortic stenosis=ctz; wilms turner and radial bilateral aplasia=ctZ; retrograde menstruation=cTz; reticular dysgenesis=CU; respiratory syncytial virus (rsv)=cU; x-linked chronic granulomatous disease=Cu; cocaine-related disorders=cu; von willebrand disease, type iic=cUa; brazilian purpuric fever=cuA; cataract, nuclear total=cUA; sympathyomimetic disorder=cua; wiskott-aldrich syndrome 2=cUB; dilated cardiomyopathy secondary to metabolic disorder=cub; platelet aggregation, spontaneous=cUb; noise-induced temporary threshold shift=cuB; central nervous system vasculitis=cuC; hypertensive encephalyopathy=cuc; von willebrand disease, type iid=cUc; pseudohypoaldosteronism, type iic=cUC; epicondylitis=cuD; pseudohypoaldosteronism, type iib=cUD; congenital von willebrand's disease=cUd; carotid intimal medial thickness 1=cud; pseudohypoaldosteronism, type iia=cUE; montreal platelet syndrome=cUe; hereditary protein c deficiency=cuE; childhood myelodysplastic syndrome=cue; osteogenesis imperfecta, type xv=cUF; homozygous protein c deficiency=cuF; osteogenesis imperfecta, type ix=cuf; acquired von willebrand's disease=cUf; partial stenosis=cUg; brain stem cancer=cug; heterozygous protein c deficiency=cuG; bone mineral density quantitative trait locus 16=cUG; homozygous protein s deficiency=cuH; thrombocytopenia, x-linked, intermittent=cUh; odontoonychodermal dysplasia=cUH; maple syrup urine disease, mild variant=cuh; tooth agenisi, selective, 4=cUI; bardet-biedl syndrome 15=cUi; homozygous variegate porphyria=cui; umbilical bleeding=cuI; hypogonadotropic hypogonadism 14 with or without anosmia=cUj; variegate porphyri=cuj; preeclamptic toxemia=cuJ; schopf-schulz-passarge syndrome=cUJ; odonto-onycho-dermal dysplasia=cUK; aleutian mink disease=cuK; bartonellosis=cuk; nephronophthisis 13=cUk; cranioectodermal dysplasia 4=cUl; split-hand/foot malformation 6=cUL; epilepsy, progressive myoclonic 5=cuL; spinocerebellar ataxia 12=cul; diverticuliti=cUM; short-rib thoracic dysplasia 5 with or without polydactyly=cUm; tremor, limb=cum; myopia 22, autosomal dominant=cuM; progressive familial heart block, type ii=cun; short-rib thoracic dysplasia II with or without polydactyly=cUn; tetra-amelia autosomal recessive=cUN; cardiomyopathy, familial hypertrophyic, 6=cuN; cranioectodermal dysplasia 2=cUo; glycogen storage disease of heart, lethal congenital=cuO; multiple endocrine neoplasmia type=cuo; sex reversal, female, with dysgenesis of kidneys, adrenals, and lungs=cUO; renpenning syndrome 1=cup; fuhrmann syndrome=cUP; short-rib thoracic dysplasia 7 with or without polydactyly=cUp; fasciculoventricular accessory pathyway=cuP; glaucoma 1, open angle, g=cUg; von willebrand disease type 2a=cug; diabetes in old age=cuQ; al awadi syndrome=cUQ; dyskeratosis congenita, autosomal recessive, 3=cUR; neurodegeneration with brain iron accumulation 5=cUr; carbohydrate metabolic disorder=cuR; drug-induced immune thrombocytopenia=cur; short-rib thoracic dysplasia 8 with or without polydactyly=cUs; capsule opacification=cUS; atrial myxoma, familial=cuS; prolactinom=cus; retinitis pigmentosa 36=cut; microcephaly 2, primary, autosomal recessive, with or without cortical malformations=cUt; acrodysostosis 1 with or without hormone resistance=cuT; nephrotic syndrome, type 4=cUT; meacham syndrome=cUU; brittle cornea syndrome 2=cuu; kuzniecky syndrome=cUu; large cell calcifying Sertoli cell tumor=cuU; nuclear sclerosis=cuv; amelogenesis imperfecta, hypomaturation type, iia3=cUv; meacham winn culler syndrome=cUV; immunodeficiency, common variable, 9=cuV; cerebellar ataxia, mental retardation, and dysequilibrium syndrome 2=cUw; chromosome 2, trisomy 2p=cuw; bilateral wilms tumor=cUW; spinocerebellar ataxia 14=cuW; infantile convulsions and paroxysmal choreoathetosis, familial=cuX; euthymic mood=cux; defect of diaphragm=cUX; deafness, autosomal dominant 6=cUx; retrograde amnesia=cuy; childhood kidney neoplasm=cUY; familial paroxysmal kinesigenic dyskinesia=cuY; cataract 41=cUy; wolfram-like syndrome, autosomal dominant=cUz; severe combined immunodeficiency, autosomal recessive, t cell-negative, b cell-negative, nk cell-positive=cuZ; mycoplasma pneumoniae infections=cuz; skull base meningioma=cUZ; dyskinesia, drug-induced=cv; lymphocytosis=Cv; alzheimer disease 18=CV; channelopathyies=cV; massive hepatic necrosis=cva; diaphragmatic eventration=cVA; malignant epithelial mesothelioma=cVa; hypogonadotropic hypogonadism 3 with or without anosmia=cvA; aortic aneurysm, familial thoracic 8=cvb; kallmann syndrome, type 3, recessive=cvB; spinocerebellar ataxia, autosomal recessive 12=cVb; spastic paraplegia 33, autosomal dominant=cVB; macular dystrophy, retinal, 2=cvC; dystonia 16=cvc; dextrocardi=cVC; scarred macula=cVc; ciliary dyskinesia, primary, 22=cVD; microtia-anotia=cvd; retinitis pigmentosa 41=cvD; abiotrophy=cVd; stargardt disease 4=cvE; angioedema induced by ace inhibitors, susceptibility to =cVe; fetal resorption=cve; polydactyly, postaxial, type a6=cVE; macroprolactinoma=cvf; cone-rod dystrophy 12=cvF; anginoedem=cVf; tooth agenisi, selective, 5=cVF; microcephaly 10, primary, autosomal recessive=cVG; refractory angina=cvG; idiopathyic hyperprolactinemia=cvg; nephronophthisis-like nephropathy 1=cVg; nephrolithiasis, uric acid, susceptibility to =cVH; invasive pituitary adenoma=cvh; pituitary mass=cvH; upper gi cancer=cVh; coloboma, uveal, with cleft lip and palate and mental retardation=cVi; thrombophilia due to protein s deficiency, autosomal dominant=cvI; multiple fibroadenomas of the breast=cvi; nephronophthisis 14=cVI; huntington disease-like 1=cvj; thrombophilia due to protein s deficiency, autosomal recessive=cvJ; myopathy, lactic acidosis, and sideroblastic anemia 2=cVj; retinitis pigmentosa 58=cVJ; spinocerebellar ataxia, autosomal recessive 5=cVK; protein z deficiency=cvK; t cell immunodeficiency primary=cVk; spongiform encephalyopathy with neuropsychiatric features=cvk; plasma cell myeloma/plasmacytoma=cVl; retinitis pigmentosa 18=cvL; myopia 21, autosomal dominant=cVL; amyloidosis, cerebral, with spongiform encephalyopathy=cvl; cns degeneration=cvm; mental retardation, x-linked, znf711-related=cVM; skeletal defects, genital hypoplasia, and mental retardation=cVm; retinitis pigmentosa 11=cvM; retinitis pigmentosa 60=cvN; partial tetrasomy=cvn; chromosome Iq43-q44 deletion syndrome=cVn; seborrhea-like dermatitis with psoriasisform elements=cVN; mental retardation, autosomal dominant 22=cVo; mental retardation, x-linked 45=cVO; retinitis pigmentosa 13=cvO; chromosome 15q, tetrasomy=cvo; peripheral retinal degeneration=cvP; acromelic frontonasal dysostosis=cVP; human transmissible spongiform encephalyopathyies, inherited=cvp; primrose syndrome=cVp; immunodeficiency-centromeric instability-facial anomalies syndrome 2=cVq; retinitis pigmentosa 7=cvQ; chronic wasting disease=cvg; patterned dystrophy of retinal pigment epithelium=cvR; scrapie=cvr; wieacker syndrome=cVr; cystoid macular edem=cvS; morphine dependency=cVs; kuru=cvs; mental retardation, x-linked 91=cVt; arts syndrome=cvT; thrombophilia, hereditary, due to protein c deficiency, autosomal recessive=cvt; thrombophilia, hereditary, due to protein c deficiency, autosomal dominant=cvu; optic atrophy polyneuropathy deafness=cvU; mental retardation, x-linked, syndromeic, raymond type=cVu; congenital thrombotic disease, due to protein c deficiency=cvv; deafness, x-linked 1=cvV; corneal dystrophy, fuchs endothelial, 6=cVv; renal thrombosis=cvw; phosphoribosylpyrophosphate synthetase superactivity=cvW; corneal dystrophy, posterior polymorphous, 3=cVw; congenital ptosi=cVx; hypoglycemiac coma=cvx; dystonia 18=cvX; hypogonadotropic hypogonadism 4 with or without anosmia=cvy; eager acrofacial dysostosi=cVy; convulsions, benign familial infantile, 2=cvY; kallmann syndrome 4=cvz; acrofacial dysostosis, eager type=cvZ; diaphragmatic hernia 3=cVz; recurrent infections (sinusitis and bacterial pneumonia and meningitis)=Cw; reflex, abnormal=cw; familial alzheimer disease=CW; coronary atherosclerosis=cW; congenital absence of jaw=cwa; dentigerous cyst=cwA; jaw cysts=cwB; autosomal dominant hereditary pancreatitis=cwb; pancreatic symptom=cwc; 9q22.3 microdeletion=cwC; mental retardation, autosomal recessive 1=cwd; open spina bifida=cwD; lenz majewski hyperostotic dwarfism=cwE; gastroenteriti=cwe; charcot-marie-tooth disease, demyelinating, type 4f=cwf; macrocephaly autism syndrome=cwF; metachromatic leukodystrophy due to saposin b deficiency=cwg; vacterl hydrocephaly=cwG; gaucher disease, atypical, due to saposin c deficiency=cwh; vater association with macrocephaly and ventriculomegaly=cwH; krabbe disease, atypical, due to saposin a deficiency=cwi; pten hamartoma tumor syndrome with granular cell tumor=cwI; proteus-like syndrome (disorder)=cwJ; phosphoserine aminotransferase deficiency=cwj; cronkhite-canada syndrome=cwK; linitis plastica=cwk; cardiomyopathy, dilated, 1u=cwl; arteriovenous graft=cwL; endometritis=cwM; alzheimer disease, familial, type 3=cwm; ampulla of vater adenocarcinoma=cwN; alzheimer disease, familial, 3, with spastic paraparesis and apraxia=cwn; alzheimer disease, familial, 3, with spastic paraparesis and unusual plagues=cwo; multilocular clear cell renal cell carcinoma=cwO; acne inverse, familial, 3=cwp; cervical endometrioid adenocarcinoma=cwP; coliti=cwQ; frontal lobe syndrome=cwq; diabetes mellitus, permanent neonatal, with cerebellar agenisi=cwR; disorientation=cwr; kluver-bucy syndrome=cws; asthma-related traits, susceptibility to, 1=cwS; cardiomyopathy, dilated, 1v=cwt; medulloblastoma of cerebellum=cwT; acute inflammatory demyelinating polyneuropathy=cwU; acne inverse, familial, 2=cwu; ovarian dysgenesis 3=cwv; asthma, nasal polyps, and aspirin intolerance=cwV; asthma, aspirin-induced, susceptibility to =cwW; deficiency of phosphoserine phosphatase=cww; carcinoma-associated retinopathy=cwx; body temperature changes=cwX; holoprosencephaly 7=cwy; capillariasis=cwY; eccrine carcinoma=cwZ; basal cell carcinoma, susceptibility to, 1=cwz; malignant neoplasm of female breast=cX; cardiac dilatation=CX; partial adenosine deaminase deficiency=Cx; psychomotor disorders=cx; jansen type metaphyseal chondrodysplasia=cxa; hepatitis c virus, susceptibility to =cxA; hypophosphatasisa, adult=cxb; metastatic tumors of the ewing's family=cxB; primary hypoparathyroidism=cxc; nephrotic syndrome, type 6=cxC; primary hyperthyroidism=cxd; deafness, autosomal recessive 84a=cxD; lipodystrophy, congenital generalized, type 4=cxE; senile osteoporosis=cxe; adynamic bone disease=cxf; 6-pyruvoyl-tetrahydropterin synthase deficiency=cxF; verheij syndrome=cxG; osteitis fibrosa=cxg; chondrodysplasia blomstrand type=cxh; myopathy with lactic acidosis and sideroblastic anemia=cxH; failure of tooth eruption, primary=cxi; allergy to fish=cxI; poliomayelitis, paralytic=cxJ; eiken skeletal dysplasia=cxj; failure of tooth eruption=cxk; rosselli-gulienetti syndrome=cxK; chondrodysplasia blomstrand typ=cxl; orofacial cleft 7=cxL; brachydactyly, type e2=cxm; ectodermal dysplasia-syndactyly syndrome 1=cxM; sclerocornea, autosomal recessive=cxN; bone carcinoma=cxn; angiomyoma=cxo; cutis laxa, autosomal recessive, type iib=cxO; cutis laxa, autosomal recessive, type iiib=cxP; sclerosisng hepatic carcinoma=cxp; male turner syndrome=cxq; posturing=cxQ; stomach atrophy=cxr; hypertensive heart and renal disease=cxR; noonan like syndrome=cxs; hyperandrogenis=cxS; martsolf syndrome=cxT; heart displacement=cxt; cleft leaflet of mitral valve=cxu; warburg micro syndrome 3=cxU; warburg micro syndrome=cxV; hereditary oculoleptomeningeal amyloid angiopathy=cxv; secondary malignant neoplasm of lymph nodes of neck=cxW; communicating hydrocephalyus=cxw cone-rod dystrophy 18=cxX; choanal atresia and lymphedema=cxx; hereditary hemorrhagic telangiectasis=cxy; smith-mccort dysplasia 2=cxY; infection—suppurative=cxz; mental retardation, x-linked 72=cxZ; pricking of skin=Cy; lymphangiosis carcinomatosa=CY; tumor vasculature=cY; ischemia=cy; warburg micro syndrome 2=cya; cone-rod dystrophy 11=cyA; martin-probst deafness-mental retardation syndrome=cyb; macular degeneration, age-related, 6=cyB; microcephaly with mental retardation and digital anomalies=cyC; kaposi sarcoma, susceptibility to =cyc; tarp syndrome=cyD; neutrophyil immunodeficiency syndrome=cyd; grade iii meningioma=cye; cardiomyopathy, dilated, 1dd=cyE; cornealia de lange syndrome 4=cyf; alopecia, neurologic defects, and endocrinopathy syndrome=cyF; nijmegen breakage syndrome-like disorder=cyg; carcinoma of sigmoid colon=cyG; spermatogenic failure, nonobstructive, y-linked=cyH; mirror movements 2=cyh; fanconi anemia, complementation group o=cyi; retinitis pigmentosa 66=cyI; breast-ovarian cancer, familial, susceptibility to, 3=cyj; retinal dystrophy, iris coloboma, and comedogenic acne syndrome=cyJ; keratomalacia=cyK; breast-ovarian cancer, familial, susceptibility to, 4=cyk; adams-oliver syndrome 3=cyL; noonan syndrome 5=cyl; visceral myopathy=cyM; leopard syndrome, 2=cym; melanoma-associated retinopathy=cyN; benign struma ovarii=cyn; leber congenital amaurosis 13=cyO; alpha/beta t-cell lymphopenia with gamma/delta t-cell expansion, severe cytomaegalovirus infection, and autoimmunity=cyo; combined cellular and humoral immune defects with granulomas=cyp; leber congenital amaurosis 3=cyP; encephalyopathy, acute, infection-induced, susceptibility to, 3=cyq; deafness, autosomal recessive, 24=cyQ; tick-borne diseases=cyr; spastic paraplegia 31, autosomal dominant=cyR; neuronopathy, distal hereditary motor, type vb=cyS; hyperchloremia=cys; myasthenic syndrome, congenital, with facial dysmorphism, associated with acetylcholine receptor deficiency=cyt; spastic paraplegia 72, autosomal recessive=cyT; pancreas exocrine=cyU; microphthalmia, syndromeic 12=cyu; norman roberts lissencephaly syndrome=cyV; pontocerebellar hypoplasia type=cyv; bilateral superior oblique palsy=cyW; capillary malformation-arteriovenous malformation=cyw; capillary malformation without arteriovenous malformation=cyx; hyperuricemiac nephropathy, familial juvenile 2=cyX; histiocytoid hemangioma=cyy; brachydactyly with hypertension=cyY; high-renin essential hypertension=cyZ; microphthalmia, isolated 3=cyz; macrocytosis=Cz; hypertension=cz; candidiasis=CZ; ganglion cysts=cZ; cutaneous lichen amyloidosis=cza; macrocephaly, alopecia, cutis laxa, and scoliosis=czA; mucosal neuromas=czb; popliteal pterygium syndrome, lethal type=czB; papillary carcinoma of the breast=czc; cocoon syndrome=czC; thyroid nodule solitary=czd; noonan syndrome 8=czD; bothnia retinal dystrophy=czE; thyroid hyalinizing trabecular adenoma=cze; congenital disorder of glycosylation, type in =czf; newfoundland rod-cone dystrophy=czF; combined oxidative phosphorylation deficiency 11=czG; bare lymphocyte syndrome, type ii, complementation group c=czg; bare lymphocyte syndrome, type ii, complementation group e=czh; bacterial sinusitis=czH; mitchell-riley syndrome=czi; aicardi-goutieres syndrome 4=czl; aicardi-goutieres syndrome 2=czJ; bare lymphocyte syndrome, type ii, complementation group b=czj; aicardi-goutieres syndrome 3=czK; bare lymphocyte syndrome, type ii, complementation group d=czk; leukoencephalyopathy, cystic, without megalencephaly=czL; retinitis pigmentosa 44=czl; postmortem changes=czm; autoimmune thrombocytopeniac purpur=czM; macrocephaly, macrosomia, facial dysmorphism syndrome=czN; bradyopsia=czn; rh-null, regulator type=czo; hereditary renal cancer associated 1=czO; stomatocytosis i=czp; plagu=czP; keratosis palmoplantaris with esophageal cancer=czq; ataxia, sensory, autosomal dominant=czQ; rh-null disease, amorph type=czr; moyamoya disease 2=czR; vesicoureteral reflux 2=czS; hemolytic disease of fetus or newborn due to rhd isoimmunization=czs; night blindness, congenital stationary, autosomal dominant 1=czt; gaze palsy, familial horizontal, with progressive scoliosis=czT; retinitis pigmentosa 4=czu; horizontal gaze palsy=czU; scotopic sensitivity=czv; kohlschutter tonz syndrome=czV; retina-diseases=czw; retinitis pigmentosa 7, digenic=czW; sarcoma, avian=czx; robinow syndrome, autosomal recessive=czX; acrodermatitis atrophyicans chronica=czy; retinitis pigmentosa 2=czY; ebola hemorrhagic feve=czz; chromosome xp11.3 deletion syndrome=czZ; glioblastoma multiforme=d; wounds and injuries=D; severe combined immunodeficiency=dA; carcinoma, lewis lung=DA; diseases in twins=da; relapsing-remitting multiple sclerosis=Da; hypoglossal nerve injuries=DB; brain cancer=dB; papillary carcinoma=Db; drusen=db; reticulate acropigmentation of kitamur=Dc; microspherophakia=DC; coinfection=dc; aortic atherosclerosis=dC; agueous humor disorders=DD; cancer recurrence=Dd; atherosclerosis=dD; synovial cyst=dd; chronic ulcer=De; weill-marchesani syndrome=DE; plaque=dE; photoreceptor degeneration=de; neutrophyilia=df; edwards syndrome=Df; adrenoleukodystrophy=dF; airway disease=DF; external hyperostosis=Dg; hyperglycemia=dG; familial disease=dg; ataxia with vitamin e deficiency=DG; mammary carcinoma, human=Dh; primary open angle glaucoma=dH; complement factor h deficiency=DH; vascular inflammations=dh; gastric ulcer=dI; von willebrand disease type 2b=DI; inflammatory joint disease=Di; memory loss=di; osteophyte=Dj; thrombotic thrombocytopeniac purpura, acguired=DJ; high density lipoprotein deficiency=dj; amnestic disorder=dJ; middle east respiratory syndrome=dk; membranous glomerulonephritis=dK; acute disease=DK; inflammatory skin and bowel disease, neonatal=Dk; congenital deficiency=DL; adjuvant disease=Dl; urinary bladder cancer=dL; immunoglobulin g2 deficiency=dl; henoch-schoenlein purpura=dM; primary antiphospholipid syndrome=dm; diabetic foot ulcer=Dm; single organ dysfunction=DM; meningococcemia=DN; esophageal candidiasis=Dn; dermatitis=dN; extramedullary hematopoiesis=dn; neurogenic hypertension=do; endocrine gland cancer=Do; pneumocystosis=dO; malignant state=DO; familial thrombotic thrombocytopeniac purpura=DP; placental malformation=dp; pulmonary function=Dp; endometriosis=dP; disease of metabolism=dq; inclusion body myositis=Dq; familial hyperlipidemia=dQ; arterionephrosclerosis=DQ; microangiopathyic hemolytic anemia=DR; myotonic dystrophy type 1=dR; genetic disease=dr; congenital hypoplasia=Dr; bronchiolitis, viral=Ds; influenza=ds; anthrax disease=DS; creutzfeldt-jakob disease=dS; prion disease=dt; pulmonary alveolar proteinosis=dT; respiratory syncytial virus bronchiolitis=Dt; thrombotic thrombocytopeniac purpura=DT; asthma chronic=Du; thrombocytopenia=DU; lipid storage disease=du; cutaneous mastocytosis=dU; malaria=dV; congenital disorder of glycosylation=dv; nasal allergy=Dv; disseminated intravascular coagulation=DV; glaucoma=dw; membranoproliferative glomerulonephritis=DW; aplastic anemia=dW; respiratory syncytial virus infectious disease=Dw; cone-rod dystrophy 9=Dx; purpura=DX; peripheral primitive neuroectodermal tumor=dx; blood coagulation disease=dX; kidney disease=dy; carotid artery disease=dY; skin melanoma=Dy; autoimmune thrombocytopeniac purpura=DY; intracranial arteriosclerosis=dZ; breast fibroadenoma=Dz; bone marrow cancer=dz; ehlers-danlos syndrome, type vii, autosomal recessive=DZ; cardiovascular system disease=e; acute kidney injury=E; arteriosclerosis=ea; lymphocytic choriomeningitis=EA; body fat distribution=Ea; malignant glioma=eA; eclampsia=eb; weill-marchesani-like syndrome=Eb; hepatitis d=EB; chronic granulomatous disease=eB; index myopia=Ec; syringomyelia=eC; familial hypercholesterolemia=ec; reticulate acropigmentation of kitamura=EC; embryonal carcinoma=eD; hypolipoproteinemia=ed; knobloch syndrome=Ed; mental retardation, autosomal recessive 36=ED; spinocerebellar ataxia, autosomal recessive 9=EE; tangier disease=ee; atopic dermatitis=eE; microcornea, myopiac chorioretinal atrophy, and telecanthus=Ee; sexual dysfunctions, psychological=Ef; osteosarcoma=eF; norum disease=ef; coenzyme q10 deficiency, primary, 1=EF; plasmodium falciparum malaria=eg; coenzyme q10 deficiency=EG; psychotic symptom=Eg; fibrosarcoma=eG; ehlers-danlos syndrome=Eh; cerebral malaria=eh; bone osteosarcoma=eH; ataxiac=EH; post-traumatic stress disorder=Ei; nephrotic syndrome, type 9=EI; intracranial thrombosis=eI; metabolic syndrome x=ei; pancreas adenocarcinoma=eJ; cholesterol ester storage disease=ej; pseudohypoparathyroidism, type ia=EJ; laryngeal squamous cell carcinoma=Ej; lumbar disc prolapse=Ek; hypercalciuria, absorptive, 2=EK; cerebral infarction=eK; niemann-pick disease=ek; corneal neovascularization=El; smith-lemli-opitz syndrome=el; bladder carcinoma=eL; pseudohypoparathyroidism=EL; non-small cell lung carcinoma=eM; geleophysic dysplasia 1=Em; thoracic cancer=em; severe chronic obstructive pulmonary disease=EM; acromicric dysplasia=En; olfaction disorders=EN; squamous cell carcinoma=en; coronary stenosis=eN; mitral valve stenosis=en; hand deformities, congenital=Eo; sebaceous adenocarcinoma=eO; dyskinesia, familial, with facial myokymia=EO; geleophysic dysplasia=Ep; ehrlich tumor carcinoma=eP; menkes disease=ep; cystic kidne=EP; ectopia lentis 2, isolated, autosomal recessive=Eq; electrocardiogram (ekg, ecg)=EQ; arteriosclerotic cardiovascular disease=eq; leber hereditary optic neuropathy=eQ; ectopia lentis isolated=Er; chronic kidney failure=eR; nephroblastoma=er; alpha-thalassemia=ER; ectopia lentis with ectopia of pupil=Es; urinary bladder, overactive=ES; female breast carcinoma=eS; kidney cancer=es; intestinal volvulus=eT; chronic myeloproliferative disease=et; miosis=ET; ectopia lentis, isolated, autosomal recessive=Et; brain ischemia=eu; sezary's disease=eU; pancreatitis, acute necrotizing=EU; simple ectopia lentis=Eu; colon adenocarcinoma=ev; nf1 microdeletion syndrome=Ev; facial nerve injuries=EV; hodgkin's lymphoma=eV; neurofibromatosis=Ew; bloom syndrome=ew; partial trisomy=EW; herpes simplex=eW; glycogen storage disease i=ex; myeloma kidney=EX; aicardi-goutieres syndrome=Ex; hodgkin's granuloma=eX; wilson disease=eY; aicardi-goutieres syndrome 6=Ey; cystitis=EY; iga glomerulonephritis=ey; sudden infant death syndrome=EZ; aicardi goutieres syndrome=Ez; antiphospholipid syndrome=ez; systemic lupus erythematosus=eZ; down syndrome=f; hepatitis c, chronic=F; rds—infants=fA; polymicrogyria, bilateral perisylvian, autosomal recessive=FA; cerebral amyloid angiopathy=fa; symptoms of stress=Fa; pulmonary interstitial glycogenosis=fB; prostate adenocarcinoma=Fb; congenital anomaly of brain=FB; gastrointestinal stromal tumor=fb; fatty liver disease=fc; oligodendroglioma=Fc; cobblestone complex=FC; persistent pulmonary hypertension=fC; xerocytosis, hereditary=Fd; lissencephaly=FD; multiple myeloma=fd; pneumonia=fD; neonatal respiratory failure=fE; hypernatremia=Fe; inflammatory bowel disease=fe; secondary hyperparathyroidis=FE; gastroschisis=Ff; scoliosis, idiopathyic, susceptibility to, 1=FF; tongue squamous cell carcinoma=ff; adult respiratory distress syndrome=fF; simpson-golabi-behmel syndrome=fg; pulmonary fibrosis=fG; adolescent idiopathyic scoliosis=FG; conn's syndrome=Fg; meniere's disease=Fh; persistent fetal circulation syndrome=fH; gastriti=FH; paroxysmal nocturnal hemoglobinuria=fh; familial combined hyperlipidemia=Fi; behavior disorder=FI; chylomicron retention disease=fi; desquamative interstitial pneumonia=fI; allergic contact dermatitis=fJ; hyperaldosteronism=Fj; lamellar ichthyosis, type 2=fj; autosomal dominant lateral temporal lobe epilepsy=FJ; usher syndrome, type 2c=FK; chondroma=Fk; harleguin type ichthyosis=fk; alzheimers disease with late onset=fK; febrile convulsions, familial, 4=FL; endolymphatic hydrop=Fl; lupus erythematosus=fL; nevus elasticus=fl; recovery of function=fm; spherocytosis, type 1=Fm; usher syndrome, type iic, gpr98/pdzd7, digenic=FM; b-cell lymphoma=fM; congenital ichthyosisform erythroderma=fn; hand skill, relative=Fn; decompression sickness=FN; sjogren's syndrome=fN; arthritis, experimental=fO; benzodiazepines causing adverse effects in therapeutic use=FO; pseudoxanthoma elasticum=fo; attention deficit hyperactivity disorder=Fo; cednik syndrome=fp; perineurioma=Fp; poisoning by benzodiazepine-based tranguilizer=FP; renal insufficiency=fP; usher syndrome type 2=FQ; encounter for body mass index [bmi]=fq; liver cirrhosis, experimental=fQ; biliary atresia=Fq; afebrile seizure=FR; alpers syndrome=Fr; infection=fR; renal cell carcinoma=fr; audiogenic seizure=FS; endolymphatic hydrops=Fs; drug hypersensitivity=fS; low grade glioma=fs; bale concentric sclerosis=Ft; helicobacter infections=fT; substance addiction=FT; lung small cell carcinoma=ft; xanthoma tendinosum=FU; neuropathy=fu; myeloid sarcoma=Fu; renal insufficiency, chronic=fU; enzyme inhibition=FV; pulmonary large cell neuroendocrine carcinoma=Fv; surfactant metabolism dysfunction, pulmonary, 3=fv; drug-related side effects and adverse reactions=fV; respiratory tract diseases=fw; nonmedullary thyroid carcinoma, with or without cell oxyphilia=fW; prenatal exposure delayed effects=FW; emery-dreifuss muscular dystrophy=Fw; alcohol withdrawal syndrome=FX; surfactant dysfunction=fx; multicystic renal dysplasia, bilateral=fX; carcinoma, anaplastic=Fx; inflammatory bowel disease 13=fY; alcohol-related disorders=FY; polymicrogyria, bilateral frontoparietal=Fy; interstitial fibrosis=fy; neoplasmtic processes=fZ; chronic interstitial lung disease=fz; cocarcinogenesis=FZ; ehlers-danlos syndrome, type iv, autosomal dominant=Fz; prostatic hyperplasia=G; adenocarcinoma=g; oropharynx cancer=GA; alcohol-induced disorders=Ga; hiv-infection/aids=gA; postoperative complications=ga; parkinson disease, late-onset=GB; abnormal renal function=gB; femur head necrosis=gb; heavy drinking=Gb; birth defects=Gc; drug usage=gC; colchicine resistance=gc; multiple system atrophy=GC; colorectal cancer metastatic=gd; hippocampal sclerosis=gD; succinic semialdehyde dehydrogenase deficiency=GD; alcohol use disorder=Gd; monocytic leukemia=gE; sensory discomfort=Ge; disease of metabolis=GE; chronic ulcerative colitis=ge; depressive symptom=gf; schizephrenia and related disorders=gF; alcohol affecting fetus or newborn via placenta or breast milk=Gf; choroidal neovascularization=GF; associated symptom=Gg; hiv-associated lipodystrophy syndrome=GG; steroid-sensitive nephrotic syndrome=gG; kidney replaced by transplant=gg; androgen independent prostate cancer=gh; prostatic hypertrophy=gH; adiponectin, serum level of, quantitative trait locus 3=GH; drunk driving=Gh; withdrawal sign or symptom=gI; hazardous drinking=Gi; adiponectin, serum level of, quantitative trait locus 1=GI; steroid-resistant nephrotic syndrome=gi; ovarian cancer stage=gJ; pancreatitis, calcific=Gj; glucocorticoid receptor deficiency=gj; adiponectin, serum level of, quantitative trait locus 2=GJ; obesity, visceral=GK; acute myeloid leukemia arising from previous myelodysplastic syndrome=gK; cirrhosis=gk; alcohol abuse or dependencye=Gk; cns depression=gL; laryngeal benign neoplasm=Gl; psychosis=gl; hypoadiponectinemia=GL; wernicke-korsakoff syndrome=Gm; drug withdrawal syndrome=gM; cytogenetically normal acute myeloid leukemia=gm; headache disorders=GM; larynx cancer=Gn; insulin resistance in diabetes=GN; retroviridae infections=gn; pediatric aids=gN; sexual dysfunction=gO; atrophy of testis=Go; carotid artery plague=GO; clear-cell metastatic renal cell carcinoma=go; conduct disorder=Gp; Philadelphia chromosome positive chronic myelogenous leukemia=gp; diabetes mellitus risk=GP; testicular carcinoma=gP; cardiac event=gq; macrocytic anemia=Gq; sarcoma, metastatic=gQ; microalbuminuric diabetic nephropathy=GQ; lipodystrophy=GR; postoperative nausea and vomiting=gr; alcoholic neuropathy=Gr; postoperative nausea=gR; glucose metabolism disease=GS; breast cancer, lobular=gs; alcohol abuse=Gs; sphenoid wing meningioma=gS; pouchitis=gt; hypothyroidism=gT; essential tremor=Gt; arteriosclerosis obliterans=GT; alcohol dependencye=Gu; erythroblastosis=GU; male infertility=gU; absence of pain sensation=gu; nicotine dependencye=Gv; menopause present=gv; neutropenia=gV; adiponectin deficiency=GV; skin toxicity=gw; urinary system benign neoplasm=gW; hypermethioninemia due to adenosine kinase deficiency=GW; pharynx cancer=Gw; gastrointestinal system cancer=gX; cocaine dependency=Gx; visceral steatosis, congenital=GX; early pregnancy=gx; pancolitis=gy; streptococcal lymphadenitis of swine=Gy; tooth eruption=GY; heart septal defect=gY; heart-cancer=gz; recurrent seizures=GZ; heart disease=gZ; sjogren-larsson syndrome=Gz; human immunodeficiency virus infectious disease=h; plague, amyloid=H; vitreoretinopathy, neovascular inflammatory=Ha; vogt-koyanagi-harada disease=HA; epilepsy syndrome=ha; agranulocytosis=hA; gallbladder cancer=hB; brain disease=hb; renal fibrosis=Hb; carney complex=HB; nerve degeneration=HC; bilirubin metabolic disorder=hC; glomerulonephritis=hc; gastrointestinal tract vascular insufficiency=Hc; epilepsy, post-traumatic=HD; dysglycemia=Hd; thyroid carcinoma=hd; graves' disease=hD; hepatitis a=hE; myopia 2=HE; disease of mental healtyh=he; bipolar ii disorder=He; hematologic cancer=hf; syndrome of infant of diabetic mother=Hf; tardive dyskinesia=HF; acute leukemia=hF; leukopenia=hG; stricture of artery=Hg; idiopathyic generalized epilepsy=hg; chronic progressive chorea=HG; abnormal involuntary movement=HH; encephalyitis=hh; behcet's disease=hH; medullary tumors=Hh; osteonecrosis=hi; renal interstitial fibrosis=HI; swelling of limb=Hi; tuberous sclerosis=hI; lipoma=hj; macular fibrosis=Hj; phobic disorder=HJ; cholestasis=hJ; lesch-nyhan syndrome=HK; asphyxia neonatorum=Hk; skin benign neoplasm=hk; addison's disease=hK; liver disease=hl; lingual-facial-buccal dyskinesia=HL; primary hyperparathyroidism=Hl; endometrial cancer=hL; acute myocardial infarction=hm; hypercholesterolemia, autosomal recessive=HM; myasthenia gravis=hM; diabetic ketoacidosis=Hm; sclerosisng cholangitis=hN; teratocarcinoma=Hn; lymphoblastic leukemia=hn; childhood absence epilepsy=HN; acute retinal necrosis syndrome=Ho; congenital long gt syndrome=HO; fabry disease=hO; prolymphocytic leukemia=ho; malignant peripheral nerve sheath tumor=hP; pilocytic astrocytoma=Hp; celiac disease=hp; sciatica=HP; x-linked ichthyosis=hQ; anxiety disorder=hq; low tension glaucoma=HQ; choroid plexus carcinoma=Hq; varicose veins=Hr; hyperthyroidism=hr; pituitary cancer=hR; bladder neck obstruction=HR; lymphadenitis=hs; malignant mesothelioma=hS; proliferative vitreoretinopathy=Hs; alport syndrome, x-linked=HS; esophageal cancer=ht; hypokalemic periodic paralysis, type 1=HT; ileitis=Ht; peritoneal carcinoma=hT; adrenal gland cancer=Hu; esophageal carcinoma=hu; cannabis dependencye=hU; night blindness, congenital stationary, type 2a=HU; hypoxia-ischemia, brain=Hv; malignant fibroxanthoma=hV; ehlers-danlos syndrome type 2=HV; vasculitis=hv; kniest dysplasia=HW; uterine cancer=hw; optic nerve injuries=Hw; leiomyosarcoma=hW; gastroparesis=hx; generalized epilepsy with febrile seizures plus, type 2=HX; tauopathy=Hx; hepatitis b=hX; head and neck cancer=hy; kernicterus=hY; hearing loss, bilateral=Hy; hyperpigmentation, familial progressive=HY; tn syndrome=HZ; thyroid gland disease=hz; osteosclerosis=Hz; opiate dependencye=hZ; exanthema=i; aural atresia, congenital=I; osteogenesis imperfecta, type 1a=IA; papillary serous adenocarcinoma=ia; hemiplegiac migraine, familial type 1=Ia; renal carcinoma=iA; mucoepidermaoid carcinoma=iB; spinocerebellar ataxia 6=Ib; deficiency of trypsin=IB; benign mesothelioma=ib; selective iga deficiency disease=IC; benign ependymoma=iC; spondyloepiphyseal dysplasia tarda, x-linked=Ic; spleen cancer=ic; transitional cell carcinoma=id; varicocele=ID; porencephaly=Id; juvenile myoclonic epilepsy=iD; pelvic organ prolapse=Ie; bronchiolo-alveolar adenocarcinoma=iE; mucopolysaccharidosis iii=IE; liver sarcoma=ie; cervical cancer=if; extraosseous ewings sarcoma-primitive neuroepithelial tumor=iF; muscle eye brain disease=If; stiff-person syndrome=IF; thyrotoxic periodic paralysis=Ig; alcoholic pancreatitis=iG; pulmonary tuberculosis=ig; skin sarcoidosis=IG; schizoaffective disorder=iH; hypochondrogenesis=Ih; familial mediaterranean fever=ih; excessive tearing=IH; osteopeniac nonfracture syndrome=Ii; premature ovarian failure=iI; balkan nephropathy=ii; interstitial cystitis=II; hypokalemic periodic paralysis=IJ; central nervous system lymphoma=ij; synovial sarcoma=iJ; urinary incontinence, stress=Ij; head and neck sguamous cell carcinoma=iK; aids-related complex=Ik; chordoma=ik; lipoid proteinosis=IK; temporal lobe epilepsy=il; type i ehlers-danlos syndrome=IL; adult acute lymphocytic leukemia=iL; hyperexplexia=Il; acute t cell leukemia=iM; diffuse scleroderma=IM; breast adenocarcinoma=im; epileptic encephalyopathy=Im; pleomorphic liposarcoma=iN; chronic interstitial cystitis=IN; invasive lobular carcinoma=in; chondrodysplasia=In; anti-neutrophyil cytoplasmic antibody-associated vasculitis=Io; hepatoblastoma=iO; scleredema adultorum=IO; gallbladder carcinoma=io; meningioma=ip; acquired porencephaly=Ip; cutis laxa=IP; uveal melanoma=iP; congenital scoliosis=Iq; acquired immunodeficiency syndrome=iQ; toxic encephalyopathy=iq; granuloma annulare=IQ; age-related cognitive decline=Ir; ovary adenocarcinoma=ir; liver carcinoma=iR; scleroderma=IR; asymptomatic bacteriuria=Is; parathyroid adenoma=iS; pyruvate carboxylase deficiency disease=is; leiomyomatosis=IS; myeloid leukemia=iT; chronic inflammatory disorder=It; esophagus squamous cell carcinoma=it; prolactinoma=IT; lung adenocarcinoma=iu; spastic=Iu; oral submucous fibrosis=IU; chronic myeloid leukemia=iU; homozygous alpha thalassemia=Iv; ulcerative colitis=iV; dermatitis herpetiformis=IV; adrenocortical carcinoma=iv; malignant hyperthermia=IW; drug habituation=Iw; lymphosarcoma=iW; adrenal cortex cancer=iw; uterine corpus sarcoma=ix; anorexia nervosa=iX; eosinophilia-myalgia syndrome=IX; lymphocytic infiltration=Ix; coronary restenosis=iy; contracture of joint=Iy; megakaryocytic leukemia=iY; immunoglobulin alpha deficiency=IY; heavy chain disease=IZ; arterial aneurysm=Iz; phototoxic dermatitis=iz; acute monocytic leukemia=iZ; diabetes=J; coronary artery disease=j; nasopharynx carcinoma=ja; acute asthma=JA; acth-independent macronodular adrenal hyperplasia=Ja; ornithine carbamoyltransferase deficiency=jA; cholestasis, progressive familial intrahepatic 3=jB; cannabis abuse=jb; asthma adult onset=JB; visceral pain=Jb; neonatal abstinence syndrome=jc; substance use=Jc; myocardial failure=JC; scott syndrome=jC; rheumatic mitral stenosis=JD; inattention=Jd; cholestasis, intrahepatic, of pregnancy 3=jD; herein dependencye=jd; non-cardiogenic pulmonary edema=JE; adult t-cell leukemia=je; motion sickness=Je; hepatitis b, chronic=jE; mild persistent asthma=JF; cholesterol gallstones=jF; medulloblastoma=jf; vasoconstriction=Jf; gamma chain deficiency=jg; nocturnal cough=JG; advanced cirrhosis=jG; neoplasm of uncertain behavior of mediastinum=Jg; bacterial meningitis=JH; diarrheal disorder=jH; functional gastrointestinal disorder=Jh; lymphoma=jh; portal fibrosis=jI; gastric adenocarcinoma=JI; colitis=ji; constipation=Ji; hydrophthalmos=JJ; acute promyelocytic leukemia=jj; stage, chronic lymphocytic leukemia=jJ; cocaine abuse=Jj; afibrinogenemia congenital=jk; trachoma=JK; cholestasis chronic=jK; resting heart rate=Jk; obstructive jaundice=jL; acanthosis nigricans=JL; social fear=Jl; gallbladder disease 1=jl; rhinitis=JM; hemangioma=Jm; cholestasis, progressive familial intrahepatic 2=jm; cholangitis=jM; cholera=jN; capillary hemangioma=Jn; cholestasis, benign recurrent intrahepatic, 2=jn; status asthmaticus=JN; cholecystitis=jO; endotoxemia=jo; 5q-syndrome=Jo; inguinal hernia=JO; liver neoplasms, experimental=jp; respiratory hypersensitivity=Jp; calcification of joints and arteries=jP; lipodystrophy, congenital generalized, type 2=JP; precocious pubarche=JQ; vestibulocochlear nerve injuries=Jq; intrahepatic cholestasis of pregnancy=jq; brooke-spiegler syndrome=jQ; psoriasis vulgaris=Jr; lipoatrophyic diabetes=JR; hot spots=jr; microphthalmia, isolated, with coloboma 7=jR; chromosome 5, trisomy 5g=Js; dyschromatosis universalis hereditaria 3=jS; cholemia=js; multiple symmetrical lipomatosis=JS; psychological distress=Jt; embryo loss=JT; immune suppression=jT; chronic hepatic failure=jt; cardiac function, impaired=JU; intestinal disease=ju; blood group, langereis system=jU; parasitic diseases=Ju; asthma night-time symptoms=Jv; placenta disease=jv; hypertensive left ventricular hypertrophy=JV; creutzfeldt-jakob disease, sporadic=jV; acromegaly=JW; intrahepatic cholestasis=jw; chiari malformation type i=jW; peak expiratory flow rate=Jw; hepatitis c=jx; whim syndrome=JX; variant creutzfeldt-jakob disease=jX; allergic sensitization=Jx; hyperinsulinism=jy; pregnancy related=Jy; adenylosuccinate lyase deficiency=JY; creutzfeldt-jakob disease, familial=jY; cholangiocarcinoma=jz; acute type b viral hepatitis=JZ; parasitemia=jZ; signs and symptoms, respiratory=Jz; stress (psychology)=K; precursor cell lymphoblastic leukemia-lymphoma=k; oculomotor apraxia=KA; sideroblastic anemia=kA; argininosuccinic aciduria=Ka; caries=ka; chronic plague-like oral candidiasis=kb; eczema herpeticu=Kb; hereditary ataxia=KB; autosomal dominant cerebellar ataxia=kB; mitochondrial metabolism disease=kC; memories=Kc; dream disorder=kc; intelligence quantitative trait locus 1=KG; thrombocytosis=kD; acute respiratory infections=kd; chronic infectious disease=Kd; unable to balance=KD; finnish lethal neonatal metabolic syndrome=kE; pathyologic nystagmus=KE; central nervous system disease=ke; acute infectious disease=Ke; mutyh-associated polyposis=Kf; spinal muscular atrophy=kf; metaphyseal chondrodysplasia=kF; cogan syndrome=KF; increased drug resistance=kG; mucopolysaccharidosis=kg; spindle cell sarcoma=Kg; ptosis=KG; t-cell leukemia=kH; spinocerebellar ataxia, autosomal recessive 1=KH; spinocerebellar ataxia 1=Kh; chondrosarcoma=kh; arteriovenous malformation=kI; nephrosis, congenital=KI; fraxe=Ki; dental caries=ki; microphthalmia=kj; spinal cancer=kJ; alpha-fetoprotein deficiency=KJ; spinobulbar atrophy=Kj; alpha-fetoprotein, hereditary persistence of =KK; mental handicap=Kk; dubin-johnson syndrome=kK; tetanus=kk; sex chromosome aberrations=KL; fraxa=Kl; polycystic ovary syndrome=kl; alcoholic liver cirrhosis=kL; congenital disorders=Km; cartilage-hair hypoplasia=kM; liver regeneration=KM; limb-girdle muscular dystrophy=km; duodenitis=kN; coloboma=kn; borderline mental retardation (i.q. 70-85)=Kn; genetic syndrome=KN; speech delay=Ko; lichen planus=kO; aniridia=ko; multiple tumors=KO; triple negative breast neoplasms=kP; moderate mental retardation (i.q. 35-49)=Kp; uv-sensitive syndrome=KP; pancreatic ductal adenocarcinoma=kp; developmentally delayed=Kq; renal tubular disorder=kQ; gerstmann-straussler-scheinker syndrome=kq; nonseminomatous germ cell tumor=KQ; language delay=Kr; telangiectatic osteogenic sarcoma=kr; apocrine gland secretion, variation in =kR; tumor thrombus=KR; promyelocytic leukemia=kS; mental deficiency=Ks; actinic keratosis=ks; autoimmune liver disease=KS; atrophyic gastritis=kt; restenosis=kT; foot tapping=Kt; benign neoplasm of liver=KT; fatal familial insomnia=ku; juvenile dermatomyositis=kU; agnosia=KU; fragile x syndrome=Ku; intestinal cancer=KV; pseudomonas aeruginosa infection=kV; costello syndrome=kv; machado-joseph disease=Kv; occipital lobe neoplasm=Kw; bromhidrosis=kW; oculocerebrorenal syndrome=KW; dyschromatosis universalis hereditaria=kw; anemia, sideroblastic spinocerebellar ataxia=kx; abdominal sepsis=kX; cutaneous porphyria=KX; kennedy's disease=Kx; cerebellar ataxia=ky; endodermal sinus tumor=KY; spinocerebellar ataxia 28=Ky; bacterial keratitis=kY; gonadal disease=KZ; refractory anemia (clinical)=kz; spastic ataxia 5, autosomal recessive=Kz; pneumonia due to klebsiella pneumoniae=kZ; senile plague=L; cholelithiasis=l; corneal disease=la; cnckayne syndrome=La; thromboangiitis obliterans=LA; right ventricular failure=lA; substance-related disorder=lB; idiopathyic pulmonary fibrosis=LB; myositis=lb; germ cell and embryonal cancer=Lb; sweat gland disease=lc; denys-drash syndrome=Lc; limb ischemia=LC; pulmonary hypertension=lC; klippel-trenaunay syndrome=LD; spondyloarthropathy=ld; primary pulmonary hypertension=lD; testicular germ cell cancer=Ld; keratitis=le; platelet storage pool deficiency=lE; dysgerminoma=Le; cataract and cardiomyopathy=LE; testicular malignant germ cell cancer=Lf; cataract 38=LF; hermansky-pudlak syndrome=lF; kawasaki disease=lf; reperfusion injury=lG; latent tuberculosis=LG; ganglioglioma=Lg; papilloma=lg; active tuberculosis=LH; malignant teratoma=Lh; childhood type dermatomyositis=lh; bone destruction=lH; pallister-hall syndrome=LI; ischemias cardiomyopathy=lI; pancreatic acinar cell adenocarcinoma=Li; skin atrophy=li; primary angle-closure glaucoma=lJ; toxic hepatitis=lj; autoimmune thyroiditis=Lj; buruli ulcer disease=LJ; umbilical hernia=Lk; arterial calcification of infancy=lK; neuronopathy, distal hereditary motor, type v=LK; salmonella infections=lk; omphalocel=Ll; lipodystrophy, partial, acguired=LL; delayed renal graft function=ll; arterial calcification, generalized, of infancy, 2=lL; multisystem disorder=lM; lipodystrophy, congenital generalized, type 1=LM; severe diarrhea=lm; hypoparathyroidism familial isolated=Lm; spastic paraplegia 17=LN; metabolic disturbance=lN; bone marrow toxicity=ln; androgenetic alopecia=Ln; mendelian disorders=lO; silver-russell syndrome=LO; viral infectious disease=lo; congenital, hereditary, and neonatal diseases and abnormalities=Lo; tethered spinal cord syndrome=lp; retinal toxicity=lP; storage disease=Lp; rhizomelic chondrodysplasia punctata, type 3=LP; constrictive pericarditis=lq; lysosomal storage disease=Lq; skin disease=lQ; sarcoma, experimental=LQ; focal epilepsy=lr; retinal disease=lR; aspartylglucosaminuri=Lr; rhizomelic chondrodysplasia punctata=LR; calcinosis=lS; extrahepatic cholestasis=ls; neurilemmoma=Ls; hormone refractory prostate cancer=LS; staphylococcal toxic shock syndrome=LT; bile duct cancer=lt; angioid streaks=lT; corneal dystrophy, fuchs endothelial, 8=Lt; bullous impetigo=LU; fuchs' endothelial dystrophy=Lu; myelomaeningocel=lU; clear cell adenocarcinoma=lu; focal nodular hyperplasia=lv; hyperinsulinemiac hypoglycemia, familial, 6=lV; pancreatic intraepithelial neoplasmia (panin)=LV; hyperoxia=Lv; bone peripheral neuroepithelioma=lw; peritoneal fibrosis=Lw; virchow's node=LW; diabetes mellitus, transient neonatal, 1=lW; pulmonary hypertension, primary, 1=lx; hypoglycemia, leucine-induced=lX; toxic shock syndrome=LX; lung injury=Lx; barrett's adenocarcinoma=LY; pulmonary arterial hypertension=ly; aortic calcification=Ly; diabetes mellitus, transient neonatal, 2=lY; barrett's esophagus=LZ; aa amyloidosis=Lz; secretory diarrhea=lz; fanconi-bickel syndrome=lZ; ischemias cerebrovascular accident=M; ovarian carcinoma=m; color vision defects=mA; hyperinsulinemiac hypoglycemia, familial, 1=ma; glucocorticoid-remediable aldosteronism=MA; borderline ovarian tumorur=Ma; hyperinsulinemiac hypoglycemia, familial, 2=mb; primary hyperoxaluria=MB; intrahepatic cholangiocarcinoma=Mb; hypoadrenocorticism, familial=mB; congenital myasthenic syndrome ib=Mc; usher syndrome, type 1c=mc; lupus vulgaris=mC; peutz-jeghers syndrome=MC; inflammatory breast carcinoma=MD; cardiac defects=md; myasthenic syndrome, congenital, with pre- and postsynaptic defects=Md; adrenomyeloneuropathy=mD; peroxisomal disease=mE; congenital bilateral aplasia of vas deferens=Me; goodpasture syndrome=ME; developmental delay, epilepsy, and neonatal diabetes=me; aids defining illness=Mf; liddle syndrome=MF; demyelinating disease=mF; glucose intolerance=mf; kartagener syndrome=MG; tetralogy of fallot=Mg; sensorineural hearing loss=mG; gestational diabetes=mg; spinal cord disease=mH; neonatal diabetes mellitus=mh; crigler najjar syndrome, type 2=Mh; radiation injuries, experimental=MH; prehypertension=MI; hyperinsulinemiac hypoglycemia=mi; endocrine system disease=mI; aortic rupture=Mi; acute stroke=MJ; neointima=Mj; carpal tunnel syndrome=mJ; insulinoma=mj; brain edema=mk; rheumatic disease of heart valve=MK; acquired long gt syndrome=Mk; autoimmune lymphoproliferative syndrome=mK; female breast hyperplasia=ML; iga nephropathy, progression to renal failure in, susceptibility to =Ml; beckwith-wiedemann syndrome=ml; zellweger syndrome=mL; secondary hypertension=MM; methylmalonic aciduria and homocystinuria, cblj type=mM; hypertriglyceridemic waist=Mm; cantu syndrome=mm; vitamin b 12 deficiency=mN; adrenal rest tumor=MN; renal anemia=Mn; cardiomyopathy, dilated, 1o=mn; inherited metabolic disorder=mO; lesion of brain=Mo; primary idiopathyic dilated cardiomyopathy=mo; cystadenoma=MO; atrial fibrillation, familial, 12=mp; thrombotic stroke=Mp; placental insufficiency=MP; graves ophthalmopathy=mP; intracranial embolism=MQ; myocardial infarction, susceptibility to, 1 (finding)=mq; bleeding ulcer=Mq; hypersensitivity reaction type i disease=mQ; ankylosing spondylitis=mR; aging, premature=MR; fibrillation=mr; low-renin essential hypertension=Mr; renal dysplasia=MS; early repolarization associated with ventricular fibrillation=ms; major affective disorder 1=mS; renin induced hypertension=Ms; atresia=MT; major affective disorder 5=mT; prinzmetal's variant angina=mt; multi vessel coronary artery disease=Mt; pineoblastoma=MU; long gt syndrome=mu; mesial temporal sclerosis=Mu; major affective disorder 8=mU; major affective disorder 9=mV; hypertrichosis=mv; renin-dependent hypertension=Mv; subacute bacterial endocarditis=MV; hypertensive heart failure=Mw; coronary artery vasospasm=mw; familial retinoblastoma=MW; major affective disorder 7=mW; homocystinuria=MX; dilated cardiomyopathy=mx; major affective disorder 4=mX; chronic hypotension=Mx; sciatic neuropathy=My; major affective disorder 2=mY; congenital disorder of glycosylation type 1a=MY; imerslund-grasbeck syndrome=my; major affective disorder 6=mZ; hypermethioninemia with deficiency of s-adenosylhomocysteine hydrolase=MZ; prediabetes syndrome=Mz; intrinsic factor deficiency=mz; recurrent malignant neoplasm=n; alpha-1-antitrypsin deficiency, autosomal recessive=N; splenic disease=NA; ‘as if’ personality=na; intellectual disability=nA; cleft palate=Na; thyroid cancer=nB; ureteral benign neoplasm=NB; macular degeneration=nb; pyridoxine deficiency anemia=Nb; chronobiology disease=NC; retinitis pigmentosa=nC; cleft lip=Nc; creatine deficiency, x-linked=nc; gout=nD; mental retardation, x-linked 1=nd; joubert syndrome 3=Nd; oligospermia=ND; human t-cell lymphotropic virus 1 infection=Ne; mucinous adenocarcinoma=NE; neoplasm recurrence, local=ne; erythropoietic protoporphyria=nE; peanut allergic reaction=NE; sguamous cell neoplasm=nF; mental retardation, x-linked=nf; tumors in animals=Nf; cerebellar disease=Ng; congenital nystagmus=NG; folic acid deficiency=ng; neuroendocrine carcinoma=nG; photoparoxysmal response 1=nh; leber congenital amaurosis=Nh; hyperuricemia=nH; uterine disease=NH; placental choriocarcinoma=nI; barakat syndrome=NI; gastroenteritis=Ni; renal cell carcinoma, nonpapillary=ni; choriocarcinoma=nJ; periodic syndrome=NJ; cystic kidney=Nj; blood group, junior system=nj; autosomal recessive retinitis pigmentosa=nk; dysembryoplastic neuroepithelial tumor=nK; parvoviridae infections=NK; hepatitis e=Nk; photosensitization=nl; chloracne=Nl; gallbladder adenocarcinoma=nL; primary infection nos=NL; malignant biphasic mesothelioma=Nm; infection induced=NM; endocarditis, bacterial=nm; papillary thyroid carcinoma=nM; nevus, epidermal=Nn; parkinson disease, familial, type 1=NN; melioidosis=nN; serum uric acid=nn; pancreatic cancer, adult=No; dental white spot=NO; malignant pleural mesothelioma=nO; weakness=no; neuro myelitis optica=nP; multiple malignancy=np; bone resorption=Np; asbestosis=NP; scrub typhus=NQ; gout tophaceous=nq; ischemiac colitis=nQ; eosinophilic disorder=Nq; tuberculosis of intestines=nr; disorder characterized by eosinophilia=Nr; rectal tumors=NR; sitosterolemia=nR; insulin resistance syndrome=nS; transient ischemia=ns; rectal neoplasm=NS; penias agenisi=Ns; diarrhea due to drug=nt; polygenic hypercholesterolemia=nT; rectum cancer=NT; sleep disorder=Nt; uroporphyrinuria=Nu; congenital dyserythropoietic anemia, type ii=NU; lipid metabolism disorder=nU; chronic tophaceous gout=nu; terminal insomnia=Nv; thyroid medullary carcinoma=nv; immunodeficiency with hyper-igm, type 2=NV; xanthomatosis=nV; asthma attack=Nw; gallbladder disease 4=nW; retinal degeneration=nw minicore myopathy with external ophthalmoplegia=NW; syndrome=nX; chronic nonspecific lung disease=Nx; fundus dystrophy=nx; hereditary autoinflammatory diseases=NX; biliary tract cancer=nY; silicosis=Ny; periodic fever=NY; pleural cancer=ny; bladder calculus=Nz; light fixation seizure syndrome=NZ; tongue cancer=nz; bile duct carcinoma=nZ; embolism, paradoxical=O; juvenile rheumatoid arthritis=o; autosomal recessive hyper-igm syndrome=Oa; acute undifferentiated leukemia=oA; pituitary adenoma, growth hormone-secreting=OA; polyneuropathy, hearing loss, ataxia, retinitis pigmentosa, and cataract=oa; gigantism and acromegaly=OB; sialadenitis=Ob; polyneuropathy=ob; leukaemia secondary=oB; usher syndrome=oc; b acute lymphoblastic leukemia with t(9=oC; acute intermittent porphyria=OC; selective ige deficiency disease=Oc; cll/sll=Od; pituitary-dependent cushing's disease=OD; coronary aneurysm=od; t(9;22)(g34;q11)=oD; x-linked hyper igm syndrome=Oe; q11.2)=oE; pituitary carcinoma=OE; arterial pressure=oe; hormone producing pituitary cancer=OF; immunoglobulin a deficiency 1=of; bcr-abl1=oF; macroglobulinemia=Of; triglyceride storage disease with impaired long-chain fatty acid oxidation=og; pre b-cell acute lymphoblastic leukemia=oG; growth hormone secreting pituitary adenoma=OG; lymphoplasmacytic lymphoma=Og; acth-secreting pituitary adenoma=OH; alcohol-induced disorders, nervous system=Oh; malignant disease=oH; protein deficiency=oh; neuritis, autoimmune, experimental=Oi; bipolar i disorder=oi; leber congenital amaurosis 4=OI; monocytosis=oI; vasculitis neuropathy=Oj; myopathy=oj; ouabain resistance=oJ; retinitis pigmentosa, juvenile, aipI1-related=OJ; substance abuse=ok; granulocytosis=oK; meningoencephalyitis=Ok; retinal dystrophy, early onset severe=OK; motor neuron disease=Ol; cone dystrophy=OL; multiple acyl-coa dehydrogenase deficiency=ol; leukaemia recurrent=oL; polyglandular autoimmune syndrome type i=OM; metabolic syndrome=om; neuritis=Om; stage, chronic myelogenous leukemia=oM; gliosarcoma=On; spastic syndrome=on; indolence=oN; autoimmune polyendocrinopathy syndrome, type 1=ON; chlamydia trachomatis infection=oo; bacterial infectious disease=oO; autoimmune polyendocrinopathy syndrome, type i, autosomal dominant=OO; combined oxidative phosphorylation deficiency 6=Oo; autoimmune polyendocrinopathy syndrome, type i, with reversible metaphyseal dysplasia=OP; leiomyoma=op; myelodysplastic myeloproliferative cancer=oP; cowchock syndrome=Op; eye disease=oQ; kashin-beck disease=oq; idiopathyic hypoparathyroidism=OQ; distal spinal muscular atrophy=Oq; hemophagocytic lymphohistiocytosis, familial, 2=or; rhabdoid cancer=Or; hepatitis immune=OR; cerebral palsy=oR; polyglandular autoimmune syndrome type ii=OS; thymus lymphoma=oS; fanconi anemia, complementation group a=os; pneumococcal infections=Os; recurrent herpes simplex=OT; polycythemia=oT; memory disorders=ot; vascular lesions=Ot; autoimmune primary adrenal insufficiency=OU; respiratory failure=oU; neuroectodermal tumor=Ou; precursor b-cell lymphoblastic leukemia-lymphoma=ou; autoimmune polyendocrine syndrome=OV; neoplasms, experimental=ov; primary immunodeficiency disease=oV; pelizaeus-merzbacher-like disease, autosomal recessive, 2=Ov; alopecia areata=OW; Philadelphia chromosome positive=ow; porphyria, acute hepatic=Ow; anemia=oW; pancytopenia=oX; hypoparathyroidism=OX; nematode infections=Ox; Philadelphia chromosome-positive acute lymphoblastic leukemia=ox; hypereosinophilic syndrome, idiopathyic=oy; hematopoietic system disease=oY; guillain-barre syndrome=OY; pituitary adenoma, familial isolated=Oy; fanconi's anemia=oZ; chronic disease=oz; keratoconjunctivitis sicca=OZ; familial isolated pituitary adenoma=Oz; mitochondrial cardiomyopathy=p; deep thrombophlebitis=P; epidermaodysplasia verruciformis=pa; prostatic cancer, castration-resistant=PA; chronic mucocutaneous candidiasis=Pa; von willebrand disease, type 1=pA; cervical cancer metastasis=PB; tricho-dento-osseous syndrome=pB; systemic scleroderma=pb; adenylate kinase deficiency, hemolytic anemia due to =Pb; vitisligo-associated multiple autoimmune disease susceptibility 1=pC; adrenal carcinoma=PC; deficiency of adenylate kinase=Pc; hemorrhagic thrombocythemia=pc; androgen insensitivity syndrome=PD; meningococcal infections=pD; thymoma=pd; hemophilia b=Pd; mammographic density=PE; xerosis=Pe; plasmacytoma=pe; pregnancy complications, cardiovascular=pE; primary ciliary dyskinesia=Pf; esophagus adenocarcinoma=pf; paranoid ideation=PF; pseudomonas infections=pF; mild dementia=PG; tendinopathy=pG; myelofibrosis=pg; lyme disease=Pg; t-cell adult acute lymphocytic leukemia=ph; bile acid synthesis defect, congenital, 2=PH; oral infection=Ph; neuroticism=pH; progressive multifocal leukoencephalyopathy=pi; precancerous lesions=pI; motor skills disorders=Pi; gonadoblastoma=PI; amyotrophyic lateral sclerosis 1=PJ; uremic syndrome=pJ; long gt syndrome 11=Pj; localized scleroderma=pj; arsenic poisoning=Pk; stress, psychological=pK; macular dystrophy, corneal type 1=PK; burkitt lymphoma=pk; breast-ovarian cancer, familial, susceptibility to, 1=PL; breast fibrocystic disease=Pl; rubella=pl; superficial ulcer=pL; polycythemia vera=pm; childhood asthma=pM; megalanecephaly polymicrogyria-polydactyly hydrocephalyus syndrome=PM; chronic arthritis=Pm; milroy's disease=PN; bowel dysfunction=Pn; hematocrit=pN; nail-patella syndrome=pn; overweight and obesity=pO; adrenal gland disease=Po; eosinophilia=po; lymphedema, hereditary, ii=PO; carcinogenicity=pP; b- and t-cell mixed leukemia=pp; alzheimer disease 5=PP; hypospadias=Pp; juvenile myelomaonocytic leukemia=pq; prostate cancer, hereditary, 7=PQ; diabetic cataract=Pq; diminished ovarian reserve=pQ; acute gastroenteritis=pR; campomelic dysplasia=pr; pten hamartoma tumor syndrome=PR; temporal arteritis=Pr; dyschromatosis symmetrica hereditaria=ps; galactosemia=Ps; abo incompatibility=pS; cowden syndrome 6=PS; sensory peripheral neuropathy=Pt; azoospermia, nonobstructive=pt; cardioembolic stroke=pT; methamphetamine abuse=PT; clinical infection=pU; prostate disease=pu; schimke immunoosseous dysplasia=Pu; progesterone resistance=PU; stage, non-small cell lung cancer=PV; gastric cancer, intestinal=pV; thyroid hormone resistance syndrome=pv; hypoprebetalipoproteinemia, acanthocytosis, retinitis pigmentosa, and pallidal degeneration=Pv; fast acetylator phenotype=pW; beta thalassemia=pw; pantothenate kinase-associated neurodegeneration=Pw; psychiatric symptom=PW; neuroendocrine tumor=pX; mitochondrial encephalyomyopathy=px; colon cancer stage iv=PX; endometriosis of ovary=Px; macroencephaly=PY; multiple endocrine neoplasmia type 1=pY; renal clear cell carcinoma=py; male pseudohermaphroditism due to deficiency of testicular 17,20-desmolase=Py; dentinogenesis imperfecta—shield's type ii=Pz; open-angle glaucoma=pZ; acute retention of urine=PZ; hemophagocytic lymphohistiocytosis=pz; large intestine cancer=g; alpha-2-macroglobulin deficiency=Q; beta ketothiolase deficiency=qA; essential hypertension=qa; myxoid liposarcoma=QA; multiple symptoms=Qa; corpus callosum agenisi neuronopathy=qB; anal sguamous cell carcinoma=QB; leukemia, natural killer cell large granular lymphocytic=Qb; sickle cell anemia=qb; atypical lipomatous tumor=QC; anastomosis, roux-en-y=Qc; chronic active hepatitis=qC; obsessive-compulsive disorder=qc; beta thalassemia trait=qD; ovarian serous cystadenocarcinoma=QD; fetal erythroblastosis=qd; schizephrenia 8=Qd; alpha thalassemia=qe; chronic nk-cell lymphocytosis=QE; invasive pulmonary aspergillosis=qE; intestinal benign neoplasm=Qe; multiple endocrine neoplasmia type 2a=QF; neonatal jaundice=qf; aggressive cancer=qF; mesenchymal cell neoplasm=Qf; stomatitis=qg; multiple endocrine neoplasmia type 2b=Qg; connective tissue benign neoplasm=QG; gingivitis=qG; atypical teratoid rhabdoid tumor=qH; factor viii deficiency=qh; common wart=Qh; hypoinsulinemiac hypoglycemia with hemihypertrophy=QH; paranoid schizephrenia=qi; motor peripheral neuropathy=QI; rett syndrome=Qi; insulin resistant diabetes=QI; vitisligo=qj; familial partial lipodystrophy=QJ; follicular thyroid carcinoma=qJ; anal margin carcinoma=Qj; microcephaly=QK; von willebrand's disease=qk; acoustic neuroma=Qk; salivary gland adenoid cystic carcinoma=qK; carotid artery thrombosis=QL; mixed oligodendroglioma-astrocytoma=qL; hemolytic-uremic syndrome=ql; proteus syndrome=Ql; carcinosarcoma=Qm; pure red-cell aplasia=qm; morbid obesity=qM; monster=QM; cervix carcinoma=qN; paraplegia=Qn; coccidioidomycosis=qn; syndactyly of toes with fusion of bones=QN; glucosephosphate dehydrogenase deficiency=qo; hyperinsulinis=qO; cervix uteri carcinoma in situ=QO; skin carcinoma=Qo; isobutyryl-coa dehydrogenase deficiency=qP; duodenal ulcer=qp; manganese poisoning=QP; langerhans-cell histiocytosis=Qp; hemorrhagic disease=qq; childhood obesity=qQ; papillary adenocarcinoma=Qq; lead poisoning, nervous system=QQ; embryonal rhabdomyosarcoma=qr; pharyngitis=qr; lead poisoning, nervous system, adult=QR; erythema nodosum=QR; anastomosis=qS; genitourinary cancer=QS; ovarian cystadenoma=Qs; hereditary elliptocytosis=qs; kidney rhabdoid cancer=Qt; osmotic diarrhea=qT; tyrosinemia=QT; invasive ductal carcinoma=qt; lung sguamous cell carcinoma=Qu; social phobia=QU; intestinal infectious disease=qU; blood group incompatibility=qu; porphyria=QV; bilateral breast cancer=qv; portal veins thrombosis=qV; papillary follicular thyroid adenocarcinoma=Qv; erdheim-chester disease=Qw; uveitis=qW; sporadic breast cancer=qw; acute porphyria=QW; collecting duct carcinoma=Qx; acute intermittent porphyri=QX; miller dieker syndrome=qx; fibromyalgia=qX; protoporphyria, erythropoietic, x-linked dominant=QY; pyoderma gangrenosum=qY; grade iii astrocytoma=qy; large cell carcinoma=Qy; retinal cancer=Qz; subacute sclerosisng panencephalyitis=qZ; juvenile pilocytic astrocytoma=qz; thalassemia intermedia=QZ; amyloidosis=R; colorectal cancer=r; irritable bowel syndrome=ra; pyridoxine-responsive sideroblastic anemia=Ra; mixed germ cell cancer=RA; laryngeal carcinoma=rA; mumps=RB; acyl-coa dehydrogenase family, member 9, deficiency of =rb; tropical spastic paraparesis=rB; x chromosome-linked pyridoxine responsive sideroblastic anemia=Rb; pericardial effusion=RC; prader-willi syndrome=rc; microcytic anemia=Rc; progeria=rC; achondroplasia=rD; mucopolysaccharidosis vi=Rd; autonomic neuropathy=RD; preneoplasmtic state=rd; osteochondritis dissecans=rE; hypoproteinemia, hypercatabolic=Re; 2-methylbutyrylglycinuria=re; hyperlipoproteinemia type iv=RE; aseptic meningitis=RF; hyperthyroxinemia, familial dysalbuminemiac=Rf; dowling-degos disease=rF; cardiac arrest=rf; tagi polymorphism=rG; zinc, elevated plasma=Rg; spondyloepimetaphyseal dysplasia, aggrecan type=rg; miller fisher syndrome=RG; ehlers-danlos syndrome, type vii, autosomal dominant=Rh; spondyloepiphyseal dysplasia, congenita=rh; persistent infection=rH; kwashiorkor=RH; duchenne and decker muscular dystrophy=Ri; dry eyes=rI; familial osteochondritis dissecans=ri; hemangioblastoma=RI; mammary adenocarcinoma=rJ; hereditary angioedema=RJ; spondyloepiphyseal dysplasia, kimberley type=rj; isolated somatotropin deficiency=Rj; occupational diseases=rk; hyperthyroxinemia=RK; smallpox=rK; dysferlinopathy=Rk; amine acid metabolic disorder=rL; intervertebral disc displacement=rl; cholangiolocellular carcinoma=RL; pallidoluysian degeneration=Rl; dry eye syndrome=rM; substance use disorder=Rm; croup=RM; sacroiliitis=rm; tendon injuries=rn; congenital hypothyroidism=RN; leptospirosis=rN; danish type familial amyloid cardiomyopathy=Rn; disorder of achilles tendon=ro; parvovirus b19=Ro; gout, hprt-related=RO; teratoma=rO; de barsy syndrome=RP; lumbar disc disease=rp; anti-diuresis=Rp; papillary renal cell carcinoma=rP; subcapsular cataract=RQ; hand osteoarthritis=rq; chromophobe adenocarcinoma=rQ; single tumor=Rq; huntington's disease=rR; dysgenesis of corpus callosum=RR; idiopathyic scoliosis=rr; acral pseudolymphomatous angiokeratoma of children (apache)=Rr; alcohol sensitivity, acute=RS; intermediate coronary syndrome=rS; dysalbuminemiac hyperthyroxinemia=Rs; osteoarthritis of distal interphalangeal joint=rs; tendinosis=rt; prostate cancer stage=RT; high-oxygen-affinity hemoglobin=Rt; cohen syndrome=rT; collagenopathy, type 2 alpha 1=ru; macroalbuminuric diabetic nephropathy=Ru; spinocerebellar ataxia-7=rU; micropapillary carcinoma=RU; fibromyxosarcoma=RV; acute viral hepatitis=Rv; osteochondrodysplasia=rv; brachydactyly=rV; fetal anemia=Rw; hoyeraal hreidarsson syndrome=rW; epithelioid sarcoma=RW; arthropathy=rw; dysproteinemia=Rx; cystic disease=rX; facioscapulohumeral muscular dystrophy=rx; digeorge syndrome=RX; multiple epiphyseal dysplasia=ry; neuronal ceroid lipofuscinosis=rY; dental disorder=Ry; microphthalmia, isolated 8=RY; choanal atresi=RZ; atrial heart septal defect=rz; tooth disease=Rz; anisometropia=rZ; hemolytic anemia=S; adenoma=s; hangover, susceptibility to (finding)=Sa; microvascular complications of diabetes, susceptibility to, 3=sA; methylmalonate semialdehyde dehydrogenase deficiency=SA; angle-closure glaucoma=sa; alcohol withdrawal delirium=Sb; 3-hydroxyisobutyric aciduria=SB; dyskeratosis congenita=sb; heat stress disorders=sB; pyridoxine-dependent epilepsy=SC; familial melanoma=sc; water intoxication=sC; melanosis=Sc; brain small vessel disease with hemorrhage=sd; emphysema=sD; secondary pulmonary hypertension=SD; non-smoker=Sd; hangover=Se; lactic acidosis=SE; thrombophilia due to activated protein c resistance=se; graft occlusion, vascular=sE; sarcopenia=sF; allanson pantzar mcleod syndrome=sf; glycogen storage disease xii=SF; alcohol flush reaction=Sf; critical illness=sG; hereditary fructose intolerance syndrome=SG; hangover effect=Sg; mass syndrome=sg; borna disease=SH; microvascular complications of diabetes, susceptibility to, 1=sh; melanosis coli=Sh; genetic diseases, inborn=sH; puerperal disorders=si; congenital disorder of glycosylation type 1k=SI; aortic valve disease 2=si; alcohol problem=Si; long gt syndrome 2=SJ; sarcoidosis, susceptibility to, 1=sJ; albuminuria=sj; drunk=Sj; multiple lacunar infarcts=Sk; segmental glomerulosclerosis=sk; coronary heart disease, susceptibility to, 5=sK; congenital disorder of glycosylation, type ip=SK; diabetic cardiomyopathyies=sl; congenital disorder of glycosylatio=SL; chlorpropamide-alcohol flushing=Sl; angiotensin i-converting enzyme, benign serum increase=sL; stomach disease=Sm; vascular system injuries=sm; homocysteinemia=sM; congenital disorder of glycosylation type 1e=SM; congenital disorder of glycosylation type 1g=SN; cardiac fibrosis=sN; occupational dermatitis=Sn; abortion, habitual=sn; hyperlipoproteinemia type ii=so; congenital disorder of glycosylation, type is =SO; mild cognitive impairment=sO; ethylmalonic encephalyopathy=So; senior loken syndrome=Sp; congenital disorder of glycosylation type ii=SP; bronchial hyperreactivity=sp; coronavirus infections=sP; congenital disorder of glycosylation type 1d=SQ; apraxia, oculomotor, cogan type=Sq; pregnancy complications, hematologic=sQ; activated protein c resistance=sq; infant, premature, diseases=sr; altitude sickness=sR; hereditary macular dystrophy=Sr; congenital disorder of glycosylation type 1h=SR; experimental organism basal cell carcinoma=sS; spastic diplegia=Ss; thrombophilia, hereditary=ss; congenital disorder of glycosylation type 11=SS; neuroblastoma, susceptibility to, 3=ST; microvascular angina=st; generalized glycogen storage disease of infants=sT; hyperprolinemia type 2=St; kantaputra gorlin syndrome=SU; aspirin resistance=sU; peptic ulcer hemorrhage=su; brain diseases, metabolic=Su; scarring=sV; ewing sarcoma/peripheral primitive neuroectodermal tumor=SV; psychoses, substance-induced=sv; mental suffering=Sv; lymphatic metastasis=sw; leukoaraiosis=sW; neural crest tumor=SW; convulsions/seizures=Sw; atrioventricular canal defect=sx; chronic berylliosis=sX; neurological morbidity=Sx; disorder of pericardium=SX; ventricular remodeling=sy; phoria=Sy; pleural disease=SY; infection of amniotic sac and membranes=sY; gastric lymphoma=SZ; status epilepticu=Sz; pulmonary edema of mountaineers=sZ; sleep deprivation=sz; ovarian cancer=t; cancer=T; urticaria pigmentosa=Ta; unspecified convalescence=tA; seasonal affective disorder=ta; bronchitis=TA; gangliocytoma=Tb; anoxemia=tB; panic disorder 1=tb; generalized atherosclerosis=TB; chronic heart failure=tc; pigmented villonodular synovitis=TC; mastocytosis=Tc; thrombophilia due to thrombin defect=tC; insulin sensitivity=td; ichthyosis, lamellar, 5=TD; pulmonary plasma cell granuloma=Td; primary iga nephropathy=tD; stroke, lacunar=te; ichthyosis, congenital, autosomal recessive 3=TE; bladder adenocarcinoma=Te; brain injury, chronic=tE; convalescence=tF; spindle cell carcinoma=Tf; welcett-rallisen syndrome=TF; aortic stiffness=tf; hypercortisolemia=tg; acute mountain sickness=tG; hypocalciuric hypercalcemia, familial, type 1=TG; ganglioneuroblastoma=Tg; pleomorphic lipoma=TH; endometrial stromal sarcoma=Th; reflux nephropathy=th; nephroangiosclerosis=tH; pulmonary blastoma=Ti; schizophrenics=ti; nephrocalcinosis=TI; genetic hypertension=tI; completed suicide=tJ; adenosguamous carcinoma=Tj; amyloid angiopathy=tj; hypophosphatasisa=TJ; pleomorphic carcinoma=Tk; aspirin intolerance=tk; embryonal cancer=TK; proliferative retinopathy=tK; primary lateral sclerosis juvenile=TL; malignant histiocytosis=Tl; cakut=tL; alexithymia=tl; liver inflammatory pseudotumor=Tm; amyotrophyic lateral sclerosis 2, juvenile=TM; infant, very low birth weight=tM; age-associated memory impairment=tm; hereditary spastic paralysis, infantile onset ascending=TN; chronic cough=tn; chronic closed-angle glaucoma=Tn; chronic urticaria=tN; lone atrial fibrillation=tO; mixed anxiety and depressive disorder=To; beryllium disease=to; complicated hereditary spastic paraplegia=TO; diabetic foot=tp; upper motor neuron disease=TP; bardet-biedl syndrome=Tp; ablepharon macrostomia syndrome=tP; nodular glomerulosclerosis=tq; lateral sclerosis=TQ; alstrom syndrome=Tq; aortic aneurysm of unspecified site without mention of rupture=tQ; frontonasal dysplasia=TR; lacunar infarction=tr; congenital toxoplasmosis=Tr; fibrosis of pancreas=tR; ichthyosisform erythroderma, brocq congenital, nonbullous form=Ts; macroangiopathy=ts; diabetic peripheral neuropathy=tS; frontonasal dysplasia 3=TS; acrania=TT; self-healing collodion baby=Tt; stalking=tT; diabetic microangiopathy=tt; dry cough=tU; asthma, aspirin-induced=Tu; midline facial cleft—tessier cleft O=TU; clostridium=tu; post mi=tV; difficile (disorder)=tv; asthma, diminished response to antileukotriene treatment in =Tv; parietal foramina 2=TV; hyperhomocystinemia=Tw; end organ damage=tw; frontonasal dysplasia 2=TW; cardiovascular morbidity=tW; cognitive deterioration=tx; asthma, exercise-induced=Tx; coronary artery atheroma=tX; craniosynostosis 5, susceptibility to =TX; cerebral white matter lesion=ty; moderate persistent asthma=Ty; primary vesicoureteric reflux=tY; hereditary multiple exostoses=TY; parietal foramin=TZ; pulmonary hypertension due to chronic exposure to high altitude=tZ; recurrent pregnancy loss=tz; aggressive periodontitis=Tz; cholecystolithiasis=u; neurodegenerative disease=U; intersex conditions=UA; chronic small plague psoriasis=ua; bile acid synthesis defect, congenital, 4=Ua; viral pneumonia=uA; microinvasive gastric cancer=uB; prostate cancer, familial=Ub; pseudohermaphroditism=UB; persistent dry cough=ub; hypersensitivity vasculitis=UC; pre-eclampsia=uC; skin fold (abnormality)=uc; oxyphilic adenoma=Uc; interstitial nephritis=uD; left ventricular dilatation=ud; amelogenesis imperfecta=Ud; gonadal dysgenesis=UD; hypogonadism=UE; nephritis=uE; endocarditis=Ue; chronic thromboembolic pulmonary hypertension=ue; ventricular dilatation=uf; klinefelter's syndrome=UF; central nervous system cancer=Uf; pyelonephritis=uF; neurogenic bladder=Ug; portal hypertension=uG; anovulation=UG; left atrial hypertrophy=ug; ovarian hyperstimulation syndrome=UH; malignant hypertension=uH; bacteriuria=Uh; silent myocardial ischemia=uh; Sertoli cell-only syndrome=UI; hydrocephalyus=uI; overanxious disorder=ui; renal infectious disease=Ui; borderline personality disorder=uJ; cutis laxa, autosomal recessive, type i=Uj; persistent mullerian duct syndrome=UJ; chronic systolic heart failure=uj; cri du chat=UK; antisocial personality disorder=uK; chronic uremia=uk; geographic atrophy=Uk; sex differentiation disease=UL; hard drusen=Ul; low density lipoprotein receptor mutation=ul; lipoid nephrosis=uL; alport syndrome, mental retardation, midface hypoplasia, and elliptocytosis=UM; alport syndrome=uM; renal artery disease=um; kuhnt-junius degeneration=Um; asthma with copd=un; cutis lax=Un; meconium aspiration syndrome=uN; neurogenic inflammation=UN; hydronephrosis=uO; amelogenesis imperfecta, hypoplastic/hypomaturation, x-linked 1=Uo; connective tissue disease=uo; extravasation of diagnostic and therapeutic materials=UO; megaloblastic anemia=UP; heart valve disease=up; urinary tract obstruction=uP; osteopathyia striata cranial sclerosis=Up; sarcoidosis=uQ; anterior ischemias optic neuropathy=uq; Japanese encephalyitis=Ug; spastic paraplegia 63, autosomal recessive=UQ; pulmonary edema=uR; pontocerebellar hypoplasia=UR; migraine with aura=ur; female urogenital diseases=Ur; chronic colitis=Us; mitral valve insufficiency=uS; intracranial aneurysm=us; erythrocyte amp deaminase deficiency=US; musculoskeletal system disease=ut; diabetic neuropathy=uT; ovarian dysgenesis=Ut; glycogen storage disease vi=UT; myopathy, centronuclear, autosomal recessive=UU; hypertensive heart disease=uU; streak gonad=Uu; migraine=uu; hyperandrogenism=uV; anovulatory=Uv; renal hypertension=uv; autosomal recessive centronuclear myopathy=UV; klinefelter's syndrome, male with more than two x chromosomes=Uw autoimmune disease of the nervous system=UW; nephrosclerosis=uW; raynaud disease=uw; anorchia=Ux; diabetic angiopathy=uX; congenital structural myopathy=UX; peripheral vascular disease=ux; orphan diseases=UY; duchenne muscular dystrophy=uY; berylliosis=uy; inflammatory polyarthritis=Uy; glycine encephalyopathy=UZ; hepatorenal syndrome=uZ; periodontitis=uz; chronic anterior uveitis=Uz; obesity=v; multiple sclerosis=V; gnathomiasis=Va; stage i lung cancer=VA; nephrosis=va; uterine fibroid=vA; von hippel-lindau disease=VB; pulmonary sarcoidosis=vB; coronary thrombosis=vb; prothrombin g20210a mutation=Vb; amyotrophyic lateral sclerosis 9=Vc; craniometaphyseal dysplasia, autosomal dominant=VC; hypertrophyic cardiomyopathy=vc; retinal vascular occlusion=vC; optic nerve disease=vd; exfoliation syndrome=vD; amyotrophyic lateral sclerosis, sporadic=Vd; chondrocalcinosis 2=VD; wegener's granulomatosis=ve; malaria, susceptibility to =VE; complex regional pain syndrome=vE; acute-phase reaction=Ve; human anaplasmosis due to anaplasma phagocytophilum=VF; cushing's syndrome=vf; gout acute=Vf; aortic disease=vF; familial lipoprotein lipase deficiency=vG; adrenal gland hyperfunction=vg; obstructive chronic pancreatitis=Vg; schwartz-lelek syndrome=VG; inherited blood coagulation disease=vh; proctitis=Vh; azoospermia=vH; familial chondrocalcinosis=VH; hepatitis=vi; alveolar soft part sarcoma=Vi; calcium pyrophosphate dihydrate deposition=VI; marfan syndrome=vI; pterygium=Vj; secondary hyperparathyroidism=vj; tumor syndrome=vJ; hereditary spherocytosis=VJ; diastrophyic dysplasia=vK; ankylosis=VK; anaphylaxis=Vk; retinal detachment=vk; major depressive disorder=vL; capillary disease=vl; cardiac arrhythmia, ankyrin-b-related=VL; astrocytoma, low grade=Vl; pad mass=Vm; angioedema=vM; nephronophthisis=vm; intestinal volvulu=VM; mental retardation, autosomal recessive 37=VN; normal pressure hydrocephalyus=vN; femoral artery occlusion=Vn; cerebral atherosclerosis=vn; neuroma=VO; migraine without aura=vo; rheumatic fever=vO; pulmonary arterial hypertension associated with portal hypertension=Vo; renovascular hypertension=vP; goiter=Vp; cyclothymic disorder=VP; endomyocardial fibrosis=vp; extramedullary plasmacytoma=Vq; alcoholic cardiomyopathy=vq; chondrocalcinosis=VQ; aortic valve stenosis=vQ; superficial urinary bladder cancer=Vr; carotid stenosis=vr; retinal vein occlusion=vR; opioid-related disorders=VR; reflex sympathyetic dystrophy=vS; dopamine receptor d2, reduced brain density of =VS; transient cerebral ischemia=vs; ectopic pregnancy=Vs; aneurysm of ascending aorta=Vt; germ cell cancer=vT; retinopathy of prematurity=vt; language disorder=VT; neuroleptic malignant syndrome=VU; intracranial arterial disease=vu; gaucher's disease=vU; telangiectatic focal nodular hyperplasia=Vu; lymphedema=Vv; takayasu's arteritis=vV; retinal artery occlusion=vv; cocaine dependencye=VV; familial nephrotic syndrome=vW; scimitar syndrome=VW; focal segmental glomerulosclerosis=vw; capillary leak syndrome=Vw; proliferative diabetic retinopathy=vx; glycogen storage disease v=vX; vasculogenic impotence=Vx; child development disorders, pervasive=VX; angiosarcoma=Vy; kbg syndrome=VY; diabetic retinopathy=vy; glycogen storage disease ii=vY; contact dermatitis=vZ; caroli disease=Vz; temporal lobe neoplasm=VZ; background diabetic retinopathy=vz; fibrodysplasia ossificans progressiva=w; age related macular degeneration=W; bronchiolitis obliterans=wa; renal oncocytoma=WA; thrombocytopenia chromosome breakage=Wa; vascular dementia=wA; parapsoriasis=WB; polycystic kidney disease=wB; acute pancreatitis=wb; gallbladder disease=Wb; hepatopulmonary syndrome=wC; methylmalonic aciduria chlb type=WC; nephronophthisis 16=Wc; severe acute respiratory syndrome=wc; psoriatic arthritis=wD; osteogenesis imperfecta, levin type=Wd; hemangioma, capillary infantile=WD; renal artery obstruction=wd; hyperhomocysteinemia=wE; seckel syndrome 1=WE; embryonic cyst=We; anuria=we; ocular hypertension=wF; mental retardation-hypotonic facies syndrome, x-linked, 1=WF; familial mediterranean fever=wf; diabetic gastroparesis=Wf; brain infarction=wg; growth retardation, alopecia, pseudoanodontia and optic atrophy=WG; spinocerebellar ataxia, autosomal recessive ID=Wg; vesicoureteral reflux=wG; sarcoma 180=Wh; systolic heart failure=wH; cellulitis=wh; alpha thalassemia-mental retardation syndrome=WH; myoclonic dystonia=Wi; middle cerebral artery infarction=wi; severe intellectual disabilities=WI; diastolic heart failure=wI; dystonia 24=Wj; intermittent claudication=wj; mitral valve prolapse=wJ; inhalation anthrax=WJ; arrhythmogenic right ventricular cardiomyopathy=wK; breast medullary carcinoma=WK; congenital diaphragmatic hernia=wk; primary dystonia=Wk; tricuspid valve insufficiency=wl; nijmegen breakage syndrome=WL; cervical dystonia=Wl; atrial fibrillation=wL; epstein-barr virus hepatitis=WM; seminoma=wm; obstructive sleep apnea=wM; generalized dystonia=Wm; cardiac acres=wN; persian gulf syndrome=wn; gingival hypertrophy=WN; bethlem myopathy=Wn; uremia=wo; miyoshi muscular dystrophy 3=Wo; lissencephaly, x-linked, 1=WO; middle cerebral artery occlusion=wO; muscular dystrophy, limb-girdle, type 21=Wp; dysgerminoma of ovary=wp; paratuberculosis=WP; psychological symptom=wP; temporal pain=wQ; asymptomatic diseases=WQ; acute pyelonephritis=wq; fukuyama muscular dystrophy=Wq; disorder of skeletal system=Wr; bladder pain syndrome=WR; fungal infectious disease=wR; werner syndrome=wr; acute peritonitis=WS; distal muscular dystrophy=Ws; hartnup disease=wS; aortic valve insufficiency=ws; proteinuria=wt; peniale cancer=WT; common variable immunodeficiency=Wt; friedreich ataxia=wT; penias carcinoma=WU; testis seminoma=wu; aortic valve disease=wU; seborrheic dermatitis=Wu; penias sguamous cell carcinoma=WV; sucrase-isomaltase deficiency, congenital=Wv; myocarditis=wV; agoraphobia=wv; panic disorder=ww; epidemic diarrhea=Ww; thanatophoric dysplasia, type i=wW; gastric cardia adenocarcinoma=WW; bare lymphocyte syndrome 2=WX; endplate acetylcholinesterase deficiency=wX; pulmonary embolism=wx; chromosome 8, monosomy 8p=Wx; chronic fatigue syndrome=wy; isaacs syndrome=wY; frontotemporal lobar degeneration=WY; leukostasis=Wy; endometriosis of uterus=WZ; organophosphate poisoning=wZ; perinatal necrotizing enterocolitis=wz; brucella melitensis brucellosis=Wz; acute lymphocytic leukemia=x; colonic benign neoplasm=X; congenital myasthenic syndrome=xA; mhc class ii deficiency=Xa; congenital pigmentation=XA; amphetamine-related disorders=xa; growth disorders=xb; frontotemporal dementia=xB; urethritis=Xb; hemorrhagic fever with renal syndrome=XB; lambert-eaton myasthenic syndrome=xC; chediak-higashi syndrome=XC; ovarian clear cell adenocarcinoma=Xc; alzheimer disease type 2=xc; prenatal injuries=xd; gonorrhe=Xd; herpesviridae infections=xD; bartter disease=XD; cyclic hematopoiesis=XE; myeloproliferative disorder, chronic, with eosinophilia=Xe; myasthenia gravis, autoimmune, experimental=xe; collagen arthritis=xE; stress disorders, traumatic=xf; hereditary sensory-motor neuropathy, type i=xF; pregnancy loss, recurrent, susceptibility to, 3=Xf; albinism with hemorrhagic diathesis and pigmented reticuloendothelial cells=XF; treacher collins syndrome=Xg; hemolytic disorder=xG; epidermaolysis bullosa with pyloric atresia=XG; cognitive deficits=xg; acute stress=xh; varicella zoster=xH; spastic paraplegia 47, autosomal recessive=XH; angiomyolipoma=Xh; cerebellar function=XI; absence of sensation=xi; lymphangioleiomyomatosis=Xi; pseudorabies=xI; plasmodium vivax infection=xJ; congenital myasthenia=xj; inherited epidermaolysis bullosa=XJ; subependymal giant cell astrocytoma=Xj; plasmodium vivax malaria=xK; epidermal differentiation complex=Xk; migraineous vertigo=XK; fatigability=xk; rh isoimmunization=xL; food allergy=Xl; slow channel syndrome=xl; propionic acidemia=XL; myasthenic syndrome=xm; epidermaolysis bullosa=XM; genital herpes=xM; eosinophili=Xm; junctional epidermaolysis bullosa=XN; ileal diseases=xN; xanthinuri=Xn; familial olivopontocerebellar atrophy=xn; erythrokeratodermaia variabilis 3=Xo; anemia of chronic disease=xO; anxiety neurosis=xo; bullous pemphigoid=XO; disorder of copper metabolism=Xp; irritant dermatitis=xP; anxiety state=xp; spastic paraplegia 51, autosomal recessive=XP; serous cystadenocarcinoma=xQ; mental retardation, x-linked, syndromeic 5=Xq; cerebral arteriosclerosis=xq; spastic paraplegia-50, autosomal recessive=XQ; dandy-walker syndrome=Xr; mycosis fungoides=xR; parkinsonism, experimental=xr; spastic paraplegia 52, autosomal recessive=XR; stevens-johnson syndrome=xS; muscular dystrophy=xs; spastic paraplegia 48, autosomal recessive=XS; pustular psoriasis=Xs; branchio oculo facial syndrome=Xt; learning disability=xt; granular corneal dystrophy type i=xT; nevi and melanomas=XT; acrodystrophyic neuropathy=xU; alveolar rhabdomyosarcoma=Xu; plant diseases=XU; blood platelet disease=xu; total hypotrichosis, mari type=xV; nodular malignant melanoma=XV; orbital disease=xv; familial benign hypercalcemia, type 3=Xv; hypercalcemi=Xw; clubfoot=XW; movement disease=xw pseudohypoparathyroidism, type ib=xW; thanatophoric dysplasia=xx; bladder transitional cell carcinoma=XX; hermansky pudlak syndrome 2=Xx; autosomal dominant retinitis pigmentosa=xX; bitter taste=xY; nicotine dependency=XY; thyroiditis=xy; bartter syndrome, type 3=Xy; inflammatory pain=xZ; usher syndrome, type 1b=Xz; sleeping sickness=XZ; centronuclear myopathy=xz; rheumatoid arthritis=y; melanoma=Y; dyslexia=yA; mosaic variegated aneuploidy syndrome=Ya; neuroepithelioma=ya; rectal disease=YA; desmoid disease, hereditary=Yb; duodenum cancer=YB; rhizomelic chondrodysplasia punctata, type 1=yB; pulmonary cystic fibrosis=yb; taste sweet=yc; deficiency of oxidase=yC; intestinal polyps=Yc; duodenum adenocarcinoma=YC; peroxisomal acyl-coa oxidase deficiency=yD; seborrheic keratosis=YD; acquired aplastic anemia=yd; intestinal polyposis=Yd; ectrodactyly, ectodermal dysplasia, and cleft lip/palate syndrome 1=Ye; parathyroid carcinoma=YE; osteoporosis, postmenopausal=yE; renal sclerosis with hypertension=ye; rectum adenocarcinoma=YF; desmoid tumor caused by somatic mutation=Yf; autoimmune thyroid disease=yF; clumsiness—motor delay=yf; autoimmune diabetes=yG; protein s deficiency=YG; bone cancer=yg; brain tumor-polyposis syndrome 2 (disorder)=Yg; congenital plasminogen deficiency=Yh; parathyroid gland disease=yh; nevoid basal cell carcinoma syndrome=YH; immunopathyology=yH; carcinoid tumor=Yi; acinar cell carcinoma=YI; cryptorchidism=yi; generalized vitisligo=yI; jejunal neoplasm=YJ; nephrogenic diabetes insipidus=yj; convulsive disorder=yJ; traditional serrated adenoma=Yj; aniridia type 1=yK; hyperprothrombinemia=Yk; anal carcinoma=YK; skin cancer=yk; acrodysostosis=yl; signet ring cell adenocarcinoma=YL; congenital hypertrophy=Yl; gilles de la tourette syndrome=yL; vascular cancer=ym; palindromic rheumatism=yM; bacteroides fragilis=Ym; extrahepatic bile duct carcinoma=YM; glucose-6-phosphate dehydrogenase deficiency=yN; duodenal disease=YN; kallmann syndrome=yn; adenoviral infections=Yn; gastric adenoma=Yo; leopard syndrome=yO; pseudomyxoma peritonei=YO; pituitary adenoma=yo; congenital hypertrophy of retinal pigment epithelium=Yp; embryoma=yp; generalized anxiety disorder=yP; myoepithelial carcinoma=YP; branchiootorenal syndrome=yQ; small intestine adenocarcinoma=YQ; kaposi's sarcoma=yq; polyposis of gastric fundus without polyposis coli=Yq; early myoclonic encephalyopathy=yr; systemic mastocytosis=yR; hepatocellular fibrolamellar carcinoma=YR; intestinal adenocarcinoma=Yr; noonan syndrome=yS; juvenile polyposis coli=Ys; pilomatrixoma=YS; cerebral cortex myoclonus=ys; neoplasm invasiveness=yt; lafora disease=yT; basaloid squamous cell carcinoma=YT; blood in stool=Yt; progressive myoclonus epilepsy=yU; mixed-type liposarcoma=YU; clinical sepsis=Yu; hereditary hemochromatosis=yu; eccrine porocarcinoma=YV; pregnancy in diabetics=yv; mesangial proliferative glomerulonephritis=yV; poroma=Yv; iron deficiency=yw; polyp of duodenum=Yw; intussusception=YW; chronic inflammatory demyelinating polyradiculoneuropathy=yW; epilepsy with generalized tonic-clonic seizures=yX; toxoplasmosis=yx; mucous membrane hyperplasia=Yx; hypotrichosis simplex=YX; ileal pouch=Yy; hemochromatosis=yy; lymphoproliferative syndrome, x-linked, 2=YY; restless legs syndrome=yY; dentatorubral-pallidoluysian atrophy=yZ; primary systemic amyloidosis=YZ; infantile cerebellar-retinal degeneration=yz; duodenal benign neoplasm=Yz; mental depression=Z; allergic asthma=z; gomez lopez hernandez syndrome=za; steatocystoma multiplex=ZA; candidiasis, cutaneous=Za; primary immune deficiency disorder=zA; hyper-igm immunodeficiency syndrome, type 1=zb; infection by candida albicans=Zb; hyperalphalipoproteinemia 1=ZB; hyperalgesia, thermal=zB; localized amyloidosis=Zc; macular degeneration, age-related, 1=ZC; combined immunodeficiency with autoimmunity and spondylometaphyseal dysplasia=zc; renal ischaemia=zC; mechanical allodynia=zD; hepatic lipase deficiency=ZD; dysgammaglobulinemia=Zd; spondyloenchondrodysplasia=zd; asthenozoospermia=ZE; fowlpox=ze; breast disease=zE; agammaglobulinemia=Ze; oral candidiasis=Zf; breast cyst=zF; hepatorenal form of glycogen storage disease=ZF; oestrogen deficiency=zf; hypobetalipoproteinemia, familial=ZG; polydactyly=zG; callosities=zg; infectious mononucleosis=Zg; corneal pannus=zh; lenticular opacities=Zh; hydatidiform mole, recurrent, 1=ZH; prostatitis=zH; hypobetalipoproteinemia, familial, apolipoprotein b=ZI; adenocarcinoma in situ=zI; reaction to colouring=zi; micronuclei, chromosome-defective=Zi; monoclonal gammopathy=zJ; tophus=zj; papillomavirus infections=Zj; hypobetalipoproteinemia, familial, 1=ZJ; primary cutaneous follicle center lymphoma=zK; cyanotic congenital heart disease=zk; hypobetalipoproteinemia, familial, 2=ZK; subcutaneous fibrosis=Zk; pancreatic disorders (not diabetes)=zl; hodgkin's-like=zL; beta thalassemia=ZL; pneumoniatis=Zl; distemper=zm; lown-ganong-levine syndrome=zM; acanthocytosis=ZM; keratosis=Zm; hairy cell leukemia=zn; meningitis=Zn; malonic aciduria=zN; alcoholic steatohepatitis=ZN; otitis media=zo; transient global amnesia=Zo; ruptured cerebral aneurysm=ZO; combined malonic and methylmalonic aciduria=zO; mammary neoplasms, experimental=zP; fat intolerance=ZP; osteogenesis imperfecta=zp; smooth muscle tumor=Zp; mammary neoplasms, animal=zQ; renal osteodystrophy=zq; intraocular retinoblastoma=Zq; lentivirus infections=ZQ; synovitis=zr; pediatric intraocular retinoblastoma=Zr; triple vessel disease=ZR; starvation=zR; osteopetrosis=zs; adult growth hormone deficiency=ZS; symptoms in children=zS; pulmonary venoocclusive disease=Zs; bulimia nervosa=ZT; poliomayelitis=zT; fish-eye disease=Zt; bone giant cell tumor=zt; abetalipoproteinemia=ZU; cholesteryl ester transfer protein deficiency=Zu; syndactyly=zU; giant cell tumor=zu; hypobetalipoproteinemia=ZV; combined hyperlipidaemia=Zv; reticulosarcoma=zv; craniosynostosis=zV; ptosi=zW; holoprosencephaly=ZW; bone disease=zw; mixed hyperlipidemia=Zw; familial hyperchylomicronemia syndrome=Zx; adenocarcinoma, endometrioid=zX; acrodermatitis enteropathyica=zx; ariboflavinosis=ZX; hyperlipoproteinemia type v=Zy; mycoplasma infections=zy; postmenopausal endometrium=zY; scaly skin=ZY; enzymopathy=zz; hyperlipoproteinemia type iii=Zz; tubular adenocarcinoma=ZZ; premature menopause=zZ;

1. A method for treating or preventing a disease, disorder or condition in a subject in need thereof by increasing the level of at least one peptide or protein related to this disease, disorder or condition comprising administering to the subject a pharmaceutical composition comprising at least one polynucleotide encoding said at least one peptide or protein,
wherein said at least one peptide or protein is selected from the group consisting of peptides and proteins listed in column 1 (c1) of Table 1 and wherein the disease, disorder or condition to which said at least one peptide or protein relates is selected from the group consisting of diseases, disorders and conditions listed in column 7 (c7) of Table 1,
wherein the at least one peptide or protein and the disease, disorder or condition to which said at least one peptide or protein relates are listed in the same entry of Table 1 in column 7 (c1).

2. A method for reducing and/or ameliorating at least one symptom of a disease, disorder or condition in a subject in need thereof by increasing the level of at least one peptide or protein related to this disease, disorder or condition comprising administering to the subject a pharmaceutical composition comprising a polynucleotide encoding said at least one peptide or protein,
wherein said at least one peptide or protein is selected from the group consisting of peptides and proteins listed in column 1 (c1) of Table 1 and wherein the disease, disorder or condition to which said peptide or protein relates is selected from the group consisting of diseases, disorders and conditions listed in column 7 (c7) of Table 1,
wherein the at least one peptide or protein and the disease, disorder or condition to which said at least one peptide or protein relates are listed in the same entry of Table 1.

3. The method according to claim 1, wherein the at least one peptide or protein has an amino acid sequence of any of the SEQ ID NOs listed in column 4 (c4) of Table 1 in the same row as said peptide or protein, and/or is encoded by a nucleic acid sequence of any of the SEQ ID NOs listed in column 5 (c5) and column 6 (c6) of Table 1 in the same entry as said peptide or protein.

4. The method according to claim 1, wherein the pharmaceutical composition comprises a lipid which is selected from the group consisting of DLin-DMA, DLin-K-DMA, DLin-KC2-DMA, 98N12-5, C12-200, DLin-MC3-DMA, PLGA, PEG, PEG-DMG and PEGylated lipids and mixtures thereof.

5. The method according to claim 1, wherein the pharmaceutical composition further comprises a pharmaceutically acceptable excipient.

6. The method according to claim 5, wherein the pharmaceutically acceptable excipient is selected from the group consisting of a solvent, aqueous solvent, nonaqueous solvent, dispersion media, diluent, dispersion, suspension aid, surface active agent, isotonic agent, thickening or emulsifying agent, preservative, lipid, lipidoid, liposome, lipid nanoparticle, core-shell nanoparticles, polymer, lipoplex, peptide, protein, cell, hyaluronidase, and mixtures thereof.

7. The method according to claim 1, wherein the pharmaceutical composition is administered by injection.

8-10. (canceled)

11. The method according to claim 1, wherein the pharmaceutical composition is administered by topical administration.

12. The method according to claim 11, wherein the pharmaceutical composition administered by topical administration further comprises a penetration enhancer.

13. The method according to claim 12, wherein the penetration enhancer is selected from the group consisting of surfactants, fatty acids, bile salts, chelating agents, non-chelating non-surfactants, polyoxyethylene-9-lauryl ether, polyoxyethylene-20-cetyl ether, fatty acids and/or salts in combination with bile acids and/or salts, sodium salt in combination with lauric acid, capric acid and UDCA, and the like.

14-15. (canceled)

16. The method according to claim 1, wherein the pharmaceutical composition is administered at a total daily dose of between 0.001 μg and 150 μg.

17. (canceled)

18. The method according to claim 1, wherein the polynucleotide comprises at least one modification.

19. The method according to claim 18, wherein the at least one modification is a modification selected from the group consisting of codon optimization, UTR modification, addition of a poly(A) tail, addition of a 5′-CAP structure, and incorporation of at least one chemically modified nucleotide.

20. The method according to claim 19, wherein the at least one modification is the addition of a 5′-CAP structure selected from the group consisting of Cap1, ARC A, inosine, N1-methyl-guanosine, 2′-fluoro-guanosine, 7-deaza-guanosine, 8-oxo-guanosine, 2-amino-guanosine, LNA-guanosine, and 2-azido-guanosine.

21. The method according to claim 19, wherein the at least one modification is the addition of a chemically modified ARCA-CAP.

22. The method according to claim 21, wherein the ARCA-CAP is modified with phosphorothioate.

23. The method according to claim 19, wherein the chemically modified nucleotide is selected from the group consisting of pyridine-4-one ribonucleoside, 5-aza-uridine, 2-thio-5-aza-uridine, 2-thiouridine, 4-thio-pseudouridine, 2-thio-pseudouridine, 5-hydroxyuridine, 3-methyluridine, 5-carboxymethyl-uridine, 1-carboxymethyl-pseudouridine, 5-propynyl-uridine, 1-propynyl-pseudouridine, 5-taurinomethyluridine, 1-taurinomethyl-pseudouridine, 5-taurinomethyl-2-thio-uridine, 1-taurinomethyl-4-thio-uridine, 5-methyl-uridine, 1-methyl-pseudouridine, 4-thio-1-methyl-pseudouridine, 2-thio-1-methyl-pseudouridine, 1-methyl-1-deaza-pseudouridine, 2-thio-1-methyl-1-deaza-pseudouridine, dihydrouridine, dihydropseudouridine, 2-thio-dihydrouridine, 2-thio-dihydropseudouridine, 2-methoxyuridine, 2-methoxy-4-thio-uridine, 4-methoxy-pseudouridine, 4-methoxy-2-thio-pseudouridine, 5-aza-cytidine, pseudoisocytidine, 3-methyl-cytidine, N4-acetylcytidine, 5-formylcytidine, N4-methylcytidine, 5-hydroxymethylcytidine, 1-methyl-pseudoisocytidine, pyrrolo-cytidine, pyrrolo-pseudoisocytidine, 2-thio-cytidine, 2-thio-5-methyl-cytidine, 4-thio-pseudoisocytidine, 4-thio-1-methyl-pseudoisocytidine, 4-thio-1-methyl-1-deaza-pseudoisocytidine, 1-methyl-1-deaza-pseudoisocytidine, zebularine, 5-aza-zebularine, 5-methyl-zebularine, 5-aza-2-thio-zebularine, 2-thio-zebularine, 2-methoxy-cytidine, 2-methoxy-5-methyl-cytidine, 4-methoxy-pseudoisocytidine, 4-methoxy-1-methyl-pseudoisocytidine, 2-aminopurine, 2, 6-diaminopurine, 7-deaza-adenine, 7-deaza-8-aza-adenine, 7-deaza-2-aminopurine, 7-deaza-8-aza-2-aminopurine, 7-deaza-2,6-diaminopurine, 7-deaza-8-aza-2,6-diaminopurine, 1-methyladenosine, N6-methyladenosine, N6-isopentenyladenosine, N6-(cis-hydroxyisopentenyl)adenosine, 2-methylthio-N6-(cis-hydroxyisopentenyl)adenosine, N6-glycinylcarbamoyladenosine, N6-threonylcarbamoyladenosine, 2-methylthio-N6-threonylcarbamoyladenosine, N6,N6-dimethyladenosine, 7-methyladenine, 2-methylthio-adenine, 2-methoxy-adenine, inosine, 1-methyl-inosine, wyosine, wybutosine, 7-deaza-guanosine, 7-deaza-8-aza-guanosine, 6-thio-guanosine, 6-thio-7-deaza-guanosine, 6-thio-7-deaza-8-aza-guanosine, 7-methyl-guanosine, 6-thio-7-methyl-guanosine, 7-methylinosine, 6-methoxy-guanosine, 1-methylguanosine, N2-methylguanosine, N2,N2-dimethylguanosine, 8-oxo-guanosine, 7-methyl-8-oxo-guanosine, 1-methyl-6-thio-guanosine, N2-methyl-6-thio-guanosine, and N2,N2-dimethyl-6-thio-guanosine.

24-25. (canceled)

26. A pharmaceutical composition comprising a polynucleotide encoding at least one disease-, disorder- or condition-related peptide or protein, wherein the at least one disease-, disorder- or condition-related peptide or protein is selected from the group consisting of peptides and proteins listed in column 1 (c1) of Table 1.

27-49. (canceled)

50. A polynucleotide encoding a disease-, disorder- or condition-related peptide or protein, wherein the disease-, disorder- or condition-related peptide or protein is selected from the group consisting of peptides and proteins listed in column 1 (c1) of Table 1.

51-59. (canceled)

The application's sequence listing, which the Patent Office published only in electronic form, follows.

SEQUENCE LISTING (345916 sequences)

SEQ ID NO: 1 - protein, 1474 aa, Artificial Sequence
  derived and/or modified sequence
MGKNKLLHPSLVLLLLVLLPTDASVSGKPQYMVLVPSLLHTETTEKGCVLLSYLNETVTVSASLESVRGNRSLFTDLEAENDVLHCVAFAVPKSSSNEEVMFLTVQVKGPTQEFKKRTTVMVKNEDSLVFVQTDKSIYKPGQTVKFRVVSMDENFHPLNELIPLVYIQDPKGNRIAQWQSFQLEGGLKQFSFPLSSEPFQGSYKVVVQKKSGGRTEHPFTVEEFVLPKFEVQVTVPKIITILEEEMNVSVCGLYTYGKPVPGHVTVSICRKYSDASDCHGEDSQAFCEKFSGQLNSHGCFYQQVKTKVFQLKRKEYEMKLHTEAQIQEEGTVVELTGRQSSEITRTITKLSFVKVDSHFRQGIPFFGQVRLVDGKGVPIPNKVIFIRGNEANYYSNATTDEHGLVQFSINTTNVMGTSLTVRVNYKDRSPCYGYQWVSEEHEEAHHTAYLVFSPSKSFVHLEPMSHELPCGHTQTVQAHYILNGGTLLGLKKLSFYYLIMAKGGIVRTGTHGLLVKQEDMKGHFSISIPVKSDIAPVARLLIYAVLPTGDVIGDSAKYDVENCLANKVDLSFSPSQSLPASHAHLRVTAAPQSVCALRAVDQSVLLMKPDAELSASSVYNLLPEKDLTGFPGPLNDQDNEDCINRHNVYINGITYTPVSSTNEKDMYSFLEDMGLKAFTNSKIRKPKMCPQLQQYEMHGPEGLRVGFYESDVMGRGHARLVHVEEPHTETVRKYFPETWIWDLVVVNSAGVAEVGVTVPDTITEWKAGAFCLSEDAGLGISSTASLRAFQPFFVELTMPYSVIRGEAFTLKATVLNYLPKCIRVSVQLEASPAFLAVPVEKEQAPHCICANGRQTVSWAVTPKSLGNVNFTVSAEALESQELCGTEVPSVPEHGRKDTVIKPLLVEPEGLEKETTFNSLLCPSGGEVSEELSLKLPPNVVEESARASVSVLGDILGSAMQNTQNLLQMPYGCGEQNMVLFAPNIYVLDYLNETQQLTPEIKSKAIGYLNTGYQRQLNYKHYDGSYSTFGERYGRNQGNTWLTAFVLKTFAQARAYIFIDEAHITQALIWLSQRQKDNGCFRSSGSLLNNAIKGGVEDEVTLSAYITIALLEIPLTVTHPVVRNALFCLESAWKTAQEGDHGSHVYTKALLAYAFALAGNQDKRKEVLKSLNEEAVKKDNSVHWERPQKPKAPVGHFYEPQAPSAEVEMTSYVLLAYLTAQPAPTSEDLTSATNIVKWITKQQNAQGGFSSTQDTVVALHALSKYGAATFTRTGKAAQVTIQSSGTFSSKFQVDNNNRLLLQQVSLPELPGEYSMKVTGEGCVYLQTSLKYNILPEKEEFPFALGVQTLPQTCDEPKAHTSFQISLSVSYTGSRSASNMAIVDVKMVSGFIPLKPTVKMLERSNHVSRTEVSSNHVLIYLDKVSNQTLSLFFTVLQDVPVRDLKPAIVKVYDYYETDEFAIAEYNAPCSKDLGNA

SEQ ID NO: 2 - protein, 168 aa, Artificial Sequence
  derived and/or modified sequence
MGKNKLLHPSLVLLLLVLLPTDASVSGKPQYMVLVPSLLHTETTEKGCVLLSYLNETVTVSASLESVRGNRSLFTDLEAENDVLHCVAFAVPKSSSNEEVMFLTVQVKGPTQEFKKRTTVMVKNEDSLVFVQTDKSIYKPGQTVKFRVVSMDENFHPLNELIPLVYIQ

SEQ ID NO: 3 - protein, 1489 aa, Artificial Sequence
  derived and/or modified sequence
RVQYVCSPPAPSFCNMGKNKLLHPSLVLLLLVLLPTDASVSGKPQYMVLVPSLLHTETTEKGCVLLSYLNETVTVSASLESVRGNRSLFTDLEAENDVLHCVAFAVPKSSSNEEVMFLTVQVKGPTQEFKKRTTVMVKNEDSLVFVQTDKSIYKPGQTVKFRVVSMDENFHPLNELIPLVYIQDPKGNRIAQWQSFQLEGGLKQFSFPLSSEPFQGSYKVVVQKKSGGRTEHPFTVEEFVLPKFEVQVTVPKIITILEEEMNVSVCGLYTYGKPVPGHVTVSICRKYSDASDCHGEDSQAFCEKFSGQLNSHGCFYQQVKTKVFQLKRKEYEMKLHTEAQIQEEGTVVELTGRQSSEITRTITKLSFVKVDSHFRQGIPFFGQVRLVDGKGVPIPNKVIFIRGNEANYYSNATTDEHGLVQFSINTTNVMGTSLTVRVNYKDRSPCYGYQWVSEEHEEAHHTAYLVFSPSKSFVHLEPMSHELPCGHTQTVQAHYILNGGTLLGLKKLSFYYLIMAKGGIVRTGTHGLLVKQEDMKGHFSISIPVKSDIAPVARLLIYAVLPTGDVIGDSAKYDVENCLANKVDLSFSPSQSLPASHAHLRVTAAPQSVCALRAVDQSVLLMKPDAELSASSVYNLLPEKDLTGFPGPLNDQDNEDCINRHNVYINGITYTPVSSTNEKDMYSFLEDMGLKAFTNSKIRKPKMCPQLQQYEMHGPEGLRVGFYESDVMGRGHARLVHVEEPHTETVRKYFPETWIWDLVVVNSAGVAEVGVTVPDTITEWKAGAFCLSEDAGLGISSTASLRAFQPFFVELTMPYSVIRGEAFTLKATVLNYLPKCIRVSVQLEASPAFLAVPVEKEQAPHCICANGRQTVSWAVTPKSLGNVNFTVSAEALESQELCGTEVPSVPEHGRKDTVIKPLLVEPEGLEKETTFNSLLCPSGGEVSEELSLKLPPNVVEESARASVSVLGDILGSAMQNTQNLLQMPYGCGEQNMVLFAPNIYVLDYLNETQQLTPEIKSKAIGYLNTGYQRQLNYKHYDGSYSTFGERYGRNQGNTWLTAFVLKTFAQARAYIFIDEAHITQALIWLSQRQKDNGCFRSSGSLLNNAIKGGVEDEVTLSAYITIALLEIPLTVTHPVVRNALFCLESAWKTAQEGDHGSHVYTKALLAYAFALAGNQDKRKEVLKSLNEEAVKKDNSVHWERPQKPKAPVGHFYEPQAPSAEVEMTSYVLLAYLTAQPAPTSEDLTSATNIVKWITKQQNAQGGFSSTQDTVVALHALSKYGAATFTRTGKAAQVTIQSSGTFSSKFQVDNNNRLLLQQVSLPELPGEYSMKVTGEGCVYLQTSLKYNILPEKEEFPFALGVQTLPQTCDEPKAHTSFQISLSVSYTGSRSASNMAIVDVKMVSGFIPLKPTVKMLERSNHVSRTEVSSNHVLIYLDKVSNQTLSLFFTVLQDVPVRDLKPAIVKVYDYYETDEFAIAEYNAPCSKDLGNA

SEQ ID NO: 4 - DNA, 4425 bp, Artificial Sequence
  derived and/or modified sequence
atggggaaaaacaaactgttgcatcccagtttggtgcttttgttgctcgttttacttcccacagatgcttccgtatctggcaagcctcagtacatggtacttgtgccatctctacttcatactgagactaccgaaaaagggtgcgtgctgttgagctatttaaatgagacggtgaccgtgagcgcctccctcgaaagcgtgaggggaaacaggagcctgttcactgatctggaggctgaaaatgatgtgctccattgtgtggctttcgccgtcccaaagtcaagcagcaatgaggaagtcatgttccttacagtccaggtgaagggacccacacaagaatttaagaagcggaccacggttatggtgaagaatgaagactccctcgtgttcgtgcagaccgataaaagcatttacaagcctggccaaacggtcaagtttagggtcgtttctatggacgaaaacttccatccacttaacgaactgattccccttgtatatatacaggacccaaagggtaatcgtatagcccagtggcaatcgttccagctggaaggtgggctaaagcagtttagctttccactttcgtccgagccgttccaggggtcgtacaaagtagtggtccaaaaaaagtcaggggggcgcaccgaacacccattcactgtagaagagttcgtcctaccgaaattcgaggtgcaggtaactgtccctaagatcattactatccttgaggaagagatgaatgtcagtgtgtgcggattgtacacctatgggaaaccggtgcccggccatgtcactgtgtccatttgccgtaagtatagcgacgcctccgactgccacggtgaggactctcaggcgttctgtgaaaagttttctgggcagctaaattctcatgggtgcttctatcagcaggtgaaaacaaaggtgttccaattgaagcgcaaagagtatgaaatgaaactgcacaccgaggcccagattcaagaagaaggtacggtggttgaactgaccggtcgacagtctagtgaaatcacacgaaccatcactaaactctctttcgtgaaagtggatagtcatttcagacagggcatccccttctttggacaggtccgcctcgtggacggaaagggggtgccaatccctaacaaagttatatttatacgagggaatgaggctaattactactctaatgccaccacagacgagcacgggctggtccagttttccatcaacacgacaaacgtgatggggacctctcttacagtgagagtaaattataaagacagaagcccatgctatggataccagtgggtgtctgaggagcatgaggaggctcaccacacagcgtacctggttttctcgccctctaaatcattcgtgcatctggaacctatgtcccacgagctaccatgcggacacacccaaacagttcaggcccattacatattaaacggcggcacactgctgggtctcaagaaactcagtttttactatcttattatggccaaagggggcattgtgcgaactgggactcatgggttactcgtcaagcaagaggatatgaagggacacttctctatctctatccccgttaaatctgacattgctccggtggctaggctgcttatctacgcagtgcttcctacaggcgatgtaattggcgattcagcaaagtacgacgtggaaaattgcttggctaacaaagtcgacctctccttttccccatcacagtctctccccgcatcgcacgcgcatttgcgagtgacggctgcaccccagtccgtttgtgcactgagagccgttgatcaatcagtcctgcttatgaagcctgatgccgagctgtcggcctcctcggtttataatttgctacctgaaaaagacctcacaggatttccaggccctctcaacgatcaggataacgaagattgcataaatcgccataacgtgtatattaatgggattacatacacacccgtctcaagtacgaatgaaaaggacatgtattcctttcttgaggacatgggcttgaaggcattcactaactcaaaaattcggaaacccaagatgtgtccccaacttcaacaatatgagatgcatgggccggagggcctgcgggtcgggttttatgaaagtgatgttatgggaagaggacacgcccgactggtgcacgttgaagaacctcacacagagaccgtccggaagtactttcctgaaacctggatatgggatctcgtagtggtgaactcagccggggtcgctgaagtaggtgtgaccgtgccagataccattactgagtggaaagccggggcgttttgcctgtcggaggatgccgggcttggcatcagtagcactgcatcactgcgcgcatttcagcctttttttgtcgagctgaccatgccctattctgtgattcgcggcgaagctttcacccttaaagcaactgtgctcaactatctccctaagtgtatccgcgtgtccgtgcagctcgaagctagtcctgctttcctagccgtacctgtggagaaagaacaggccccgcactgtatttgcgcaaacgggcgccaaacagtcagctgggccgttactccaaaatcgctgggtaacgttaactttactgtctctgctgaggccctggagagccaggagttgtgtggcaccgaagtgcctagcgttcccgagcatggtcgtaaggacacggtaataaagcctttactagtcgaaccagaaggccttgagaaagaaacaactttcaattctctgctgtgtccttccggcggggaggtgtcggaagaactttcattgaaactgcctcctaacgtagtggaagaaagtgccagggccagtgttagcgtgctgggagacatactcggcagtgccatgcaaaatacccagaatcttcttcagatgccttacggatgtggggagcagaacatggtgctttttgctcccaacatctacgtactggactacctgaacgaaactcagcagttaacacctgagattaaaagtaaagctatcggatatctaaataccggttaccagaggcagctgaactacaaacattacgatggaagctactctacttttggggagcggtatggccgcaatcaaggaaatacatggctgacagccttcgtcctgaagacatttgcacaggcacgagcttacatctttatagacgaagctcacataacacaggcactgatttggctgtctcagcgtcagaaggataatggatgctttagatcttcagggagcctgctgaacaacgcaattaaagggggcgtcgaggacgaggtgaccctgagcgcctatattacaattgcactgctggagatacctctgaccgtaactcacccagtagtgaggaatgctcttttttgccttgaaagcgcctggaagacagcccaggaaggcgaccatggatcccatgtttataccaaagccctgctggcctatgcattcgctctggcgggcaatcaggacaagcgcaaggaggtgctgaagagtttgaacgaggaagcagtaaaaaaggacaactctgtccactgggagaggccgcaaaagccaaaagctcccgtgggccacttctacgaaccacaggcgccatcggctgaagtggaaatgacttcctacgttctcctggcttatctaacagctcagcctgcgcctacctcagaggacttgacttccgccacgaatatcgtgaaatggattacaaagcagcagaacgcacagggcggcttctcttctacacaagataccgttgttgcgcttcatgcgctatccaaatacggagctgccacctttaccagaacgggcaaggctgcacaggtcacgatccagagcagcgggactttcagcagcaagtttcaggtcgataataacaaccggctgctgttgcagcaagtctccttgcccgagctgcccggcgagtactctatgaaagttaccggagaagggtgcgtgtaccttcaaaccagtctgaagtataacattctgcccgaaaaggaagagttcccttttgctctgggggttcaaactcttccccaaacttgcgacgagccgaaggcccataccagctttcaaatctccctgtctgttagttatacgggcagccgctccgctagcaacatggccatcgtcgacgtaaagatggtcagtggattcatccctcttaaaccgacggtgaagatgctggagaggtctaaccacgtttcacgcaccgaggtgtcctctaaccacgtccttatctacctggacaaagtatctaatcagaccctttccctgttcttcacagtactccaggatgtccccgtgagggatttgaaacccgcaatcgtaaaggtgtacgactactacgaaaccgatgagtttgccatagccgaatacaacgccccatgcagcaaggatctgggcaacgcttag

SEQ ID NO: 5 - DNA, 507 bp, Artificial Sequence
  derived and/or modified sequence
atgggcaagaacaagctcctacatccttcactggtcctgttgttgcttgtactgctccccaccgacgcaagcgtctccggtaaaccccaatatatggtgcttgtacccagccttttgcacacggaaacaacagaaaaaggatgtgtgctcctgagctacttgaacgaaacagttaccgtgagtgccagcctggagagcgtgcgagggaatagatccctcttcactgacttggaggcggaaaacgacgtgttacactgtgtggcatttgcagttcccaagagtagctcaaatgaagaggtgatgttcctaacagtgcaagtgaagggaccgacgcaggaattcaagaagcgcacgacagttatggtgaaaaacgaagatagcctcgtgttcgttcagactgacaagtcgatttataagccgggtcagactgtgaaattccgcgtagtgagtatggacgagaattttcatcctctaaatgagctcatccccctggtatacatccagtag

SEQ ID NO: 6 - DNA, 4470 bp, Artificial Sequence
  derived and/or modified sequence
cgagtgcagtacgtatgcagcccgccagccccctccttctgcaatatgggcaaaaacaaattgctgcatccgagtcttgtgctgctactgctggttctgctgcccactgatgcaagtgtttccgggaagccccagtacatggtgcttgtgccctcactgcttcatactgaaactaccgagaaaggatgtgttttgctatcctatcttaacgagacagtgactgtctcagctagccttgagagtgtcagaggaaaccggtctcttttcacagacctggaagcagaaaacgacgtccttcactgcgtcgcttttgcggtgccaaaaagtagctctaacgaggaagttatgttcctgactgtccaagtgaagggccccacccaggagttcaaaaagcgcacgactgttatggtgaagaacgaggactccctggtttttgtccagaccgacaaaagtatatataaacctggacagactgtgaagttccgcgtcgtcagcatggacgagaattttcacccactcaatgaattaatcccactggtgtacatccaggaccctaagggtaaccgaatcgcccagtggcagagctttcagctggagggaggtctgaaacagttctccttccccttatcttcggagcccttccagggctcttataaggtggtggtccagaagaaaagtgggggccgaaccgaacaccccttcacggttgaggagtttgtgctgccaaagttcgaagtacaagtgacggtgccaaaaatcataacgattctagaggaagagatgaacgtgagtgtatgtggattgtatacatatggaaaacctgtgccaggccacgtaacagtgtctatttgcagaaagtattccgatgcctccgattgccacggtgaggactcacaggccttctgcgaaaaattcagcggccagcttaacagtcatgggtgtttttaccagcaagtgaagacaaaggttttccagctgaagaggaaggaatatgaaatgaaactgcataccgaggcacagatccaggaggaaggtactgtagtcgagttaacggggcggcagtcttcggagattaccagaacaattactaaactcagttttgtgaaggtggatagccacttccggcaaggcatccctttcttcgggcaggtccggctagtggacgggaagggcgtccctattcctaataaggtcatcttcattcgcggaaacgaagcgaattactacagtaatgccaccaccgatgagcacggcctggtgcagttctcaattaatacaaccaacgtcatgggtaccagcctgacagtgagggtaaattacaaggatcggtccccatgctatggttaccagtgggtgtcggaggaacatgaagaagcccaccacacggcttaccttgtattttcaccttccaagtctttcgtgcacctcgaaccgatgtcccatgagcttccttgcgggcacacacaaactgtgcaggcccactatatcttgaacggtgggaccctgctgggcctcaaaaagctctctttttactacctaataatggcgaagggtggcatagtcagaactggtacgcacgggctgcttgtgaaacaagaggacatgaaggggcacttttccatctctattcctgtgaagtcggacatagcacctgtggctcggctgcttatatatgccgttctccctacaggtgatgtcatcggtgattccgccaaatacgacgtcgaaaattgtttagcaaataaggtggaccttagcttctccccctcacagtctctgcctgcttcccatgcacacctccgcgtgaccgccgctccacagtcagtgtgtgcactgcgagccgttgaccagagcgtgttgctgatgaagcccgacgctgagctgagcgcatcttcagtgtataatcttctccctgaaaaggatcttaccggattccctggacctctcaacgatcaggacaacgaggattgtatcaaccgtcacaacgtctatatcaacggcattacctacacgccagtgagttccaccaatgaaaaggatatgtacagcttcctcgaagatatggggctaaaagcttttactaattccaaaatacgcaaaccaaaaatgtgtccccagttacagcaatacgaaatgcatggcccagagggtctgagagtaggcttttacgaaagcgacgtaatgggacggggccacgcccgcctcgtacatgttgaagagccccatacagagaccgtgaggaagtattttccggagacctggatctgggatttggtggtcgttaacagcgccggagtggccgaggtaggagtcacagttcctgatactattacagagtggaaagccggagcattctgtctgagcgaggatgcggggctcggcatttcatccactgcttctctccgagctttccagcctttctttgtggagcttacgatgccttattcagtcatccgtggagaggcatttaccctgaaagctacagtgctgaattatctgcctaagtgcattagagttagtgttcaattggaagcatcaccagccttcctggccgtaccggtggaaaaggagcaagcccctcactgcatctgtgcaaacggccggcaaacagtgtcctgggctgtgacccccaagagcctcggcaacgtgaacttcacagtgtcagctgaagccctggaatcccaggagctgtgtgggacagaagtgccttctgttcccgaacacggccgtaaagatacagtgatcaagcctctgctcgtcgagccggaaggcctggaaaaagaaactacttttaacagccttctttgccctagtgggggtgaagtttctgaagagctctcgcttaagctaccgcctaatgtagtcgaggagtccgctagggcatccgtgtccgtgctgggggacattcttgggtcagccatgcagaatacccagaacctccttcagatgccctacggttgcggcgaacagaatatggtgctgtttgcccccaatatttacgtgcttgactatctgaacgagactcagcagttgacaccggaaatcaagtccaaggctattggctatctaaataccggctaccagcgacagctcaattacaaacactatgacggcagctactcaacctttggagaacgatacggacgcaaccaaggcaatacttggctcaccgcgttcgtgttaaagacattcgcacaggctcgagcttatattttcattgacgaagcgcacattacacaagcgctgatctggctcagccagagacagaaggacaacgggtgcttcagaagctctggctcgctgcttaacaatgctattaaaggaggggtcgaggacgaagtcactttgtccgcatatattaccatcgccttactggagattcctctcaccgtaacccaccccgtagtgagaaacgctctgttctgcctcgaatccgcctggaagaccgctcaggagggcgaccatggtagtcatgtgtacaccaaggcccttctcgcctatgcatttgccctggcgggaaaccaagacaaacggaaggaggttctaaagtccctgaatgaagaggcggttaaaaaggataattccgttcattgggaaaggcctcagaagccaaaagctcctgtaggacacttctacgagccccaggctccttccgctgaggtagagatgacctcttatgtgctactggcgtacctgaccgcacaacccgcaccaaccagtgaagacttgaccagcgccaccaacatcgtgaagtggatcactaagcagcaaaacgcccaaggagggttttcctcaactcaggatacagtagtggccctgcacgctctttctaagtatggtgcggcgactttcacgcgaacaggcaaagctgcgcaggttacaattcaatccagtggaacgttctcgtcaaaatttcaggtcgacaacaacaacaggttgctgcttcagcaggtgtctctgccagaactgcctggggaatactccatgaaagtaacgggtgaaggctgtgtatatttacagacttctctaaaatataatatcttgccggagaaagaggaattcccatttgcccttggggtccaaacactccctcagacatgtgacgagcctaaagcccacacctcctttcagatttcactcagcgtctcttacacggggagtcggagcgcctcgaacatggcgatcgtagacgtgaagatggtcagcgggtttatccctcttaaaccgaccgtcaaaatgctggagcgctctaatcacgttagtagaacagaagttagttctaaccacgtgctgatatacctggacaaggttagcaatcagactctcagtctgttctttactgttctccaggatgtgcccgtgagagatttaaaaccagccatcgtgaaggtgtacgactactacgaaaccgatgagtttgcaatagctgaatataacgccccatgttcaaaagatttggggaacgcttag

SEQ ID NO: 7 - DNA, 4425 bp, Artificial Sequence
  derived and/or modified sequence
atgggcaagaacaagctgctgcaccccagcctggtgctgctgctgctggtgctgctgcccacagatgcctctgtgtctgggaagccccagtacatggtgctggtgcccagcctgctgcacacagagaccacagagaagggctgtgtgctgctgagctacctgaatgaaacagtgacagtgtctgccagcctggagagcgtgcggggcaacagaagcctcttcacagacctggaggccgagaatgatgtgctgcactgtgtggcctttgctgtgcccaagagcagcagcaatgaggaggtgatgttcctgactgtgcaggtgaagggccccacccaggagttcaagaagaggaccaccgtgatggtgaagaatgaagacagcctggtgtttgtgcagacagacaagagcatctacaagccaggccagacagtgaagttccgggtggtgtccatggatgagaacttccaccccctgaatgaactcatccccctggtgtacatccaggaccccaagggcaacagaattgcccagtggcagagcttccagctggagggcggcctgaagcagttctccttccccctgagcagcgagcccttccagggcagctacaaggtggtggtgcagaagaagagcggcggccgcacagagcaccccttcaccgtggaggagtttgtgctgcccaagtttgaggtgcaggtgacagtgcccaagatcatcaccatcctggaggaggagatgaatgtgtctgtgtgtggcctgtacacctacggcaagcctgtgcccggccacgtgacagtgtccatctgcaggaagtacagtgatgccagtgactgccacggggaggacagccaggccttctgtgagaagttcagcggccagctgaacagccacggctgcttctaccagcaggtgaagaccaaggtgttccagctgaagaggaaggagtatgagatgaagctgcacacagaggcccagatccaggaggagggcaccgtggtggagctgaccggccggcagagcagcgagatcaccaggaccatcaccaagctgagctttgtgaaggtggacagccacttccggcagggcatccccttcttcggccaggtgcggctggtggatggaaaaggagtgcccatccccaacaaggtgatcttcatcagaggaaatgaggccaactactacagcaatgccaccacagatgagcacggcctggtgcagttcagcatcaacaccaccaacgtgatgggcaccagcctgactgtgcgggtgaactacaaggacaggagcccctgctacggctaccagtgggtgtctgaggagcacgaggaggcccaccacacagcctacctggtgttcagccccagcaagagctttgtgcacctggagcccatgagccatgagctgccctgtggccacacccagacagtgcaggcccactacatcctgaatggaggcaccctgctgggcctgaagaagctgtccttctactacctgatcatggccaagggcggcatcgtgaggacaggcacccacggcctgctggtgaagcaggaggacatgaagggccacttcagcatcagcatccctgtgaagagtgacatcgcccctgtggcccggctgctgatctatgctgtgctgcccactggagatgtgattggagacagcgccaagtatgatgtggagaactgcctggccaacaaggtggacctgtccttcagccccagccagagcctgcctgccagccacgcccacctgcgggtgacagctgccccccagagcgtgtgtgccctgcgggctgtggaccagagcgtgctgctgatgaagccagatgctgagctgagcgccagctctgtgtacaacctgctgcctgagaaggacctgaccggcttccctggccccctgaatgaccaggacaatgaagactgcatcaacagacacaacgtgtacatcaatggcatcacctacacccctgtgagcagcaccaatgagaaggacatgtacagcttcctggaggacatgggcctgaaggccttcaccaacagcaagatcaggaagcccaagatgtgcccccagctgcagcagtatgagatgcacggccctgagggcctgcgggtgggcttctatgaaagtgatgtgatgggccggggccacgcccggctggtgcacgtggaggagccccacacagagaccgtgaggaagtacttccctgagacctggatctgggacctggtggtggtgaacagcgctggggtggccgaggtgggcgtgacagtgcctgacaccatcacagagtggaaggccggggccttctgcctgtctgaagatgctggcctgggcatcagcagcacagccagcctgcgggccttccagcccttctttgtggagctgaccatgccctacagcgtcatccggggggaggccttcaccctgaaggccaccgtgctgaactacctgcccaagtgcatccgggtgtctgtgcagctggaggccagccctgccttcctggccgtgcctgtggagaaggagcaggccccccactgcatctgtgccaacggccggcagacagtgtcctgggccgtgacccccaagagcctgggcaatgtgaacttcaccgtgtctgctgaggccctggagagccaggagctgtgtggcacagaggtgcccagcgtgcctgagcacggcaggaaggacaccgtcatcaagcccctgctggtggagcctgagggcctggagaaggagaccaccttcaacagcctgctgtgccccagcggcggggaggtgtctgaggagctgagcctgaagctgccccccaacgtggtggaggagagcgcccgggcctctgtgtctgtgctgggggacatcctgggcagcgccatgcagaacacccagaacctgctgcagatgccctacggctgtggggagcagaacatggtgctgtttgcccccaacatctacgtgctggactacctgaatgagacccagcagctgaccccagagatcaagagcaaggccatcggctacctgaacacaggctaccagaggcagctgaactacaagcactatgatggcagctacagcaccttcggggagagatatggcaggaaccagggcaacacctggctgacagcctttgtgctgaagacctttgcccaggcccgggcctacatcttcattgatgaggcccacatcacccaggccctgatctggctgagccagaggcagaaggacaatggctgcttccgcagcagcggcagcctgctgaacaatgccatcaagggcggcgtggaggatgaggtgaccctgagcgcctacatcaccatcgccctgctggagatccccctgactgtgacccaccctgtggtgagaaatgccctcttctgcctggagagcgcctggaagacagcccaggagggggaccacggcagccacgtgtacaccaaggccctgctggcctatgcctttgccctggccggcaaccaggacaagaggaaggaggtgctgaagagcctgaatgaggaggccgtgaagaaggacaacagcgtgcactgggagcggccccagaagcccaaggcccctgtgggccacttctatgagccccaggcccccagcgctgaggtggagatgaccagctatgtgctgctggcctacctgacagcccagcctgcccccaccagcgaggacctgaccagcgccaccaacatcgtgaagtggatcaccaagcagcagaatgcccagggcggcttcagcagcacccaggacacagtggtggccctgcacgccctgagcaagtacggggccgccaccttcaccaggacaggcaaggccgcccaggtgaccatccagagcagcggcaccttcagcagcaagttccaggtggacaacaacaaccggctgctgctgcagcaggtgtccctgcctgagctgcctggagagtacagcatgaaggtgactggagagggctgtgtgtacctgcagaccagcctgaagtacaacatcctgcctgagaaggaggagttcccctttgccctgggcgtgcagaccctgccccagacctgtgatgagcccaaggcccacaccagcttccagatcagcctgtctgtgtcctacacaggcagccgcagcgccagcaacatggccatcgtggatgtgaagatggtgtctggcttcatccccctgaagcccaccgtgaagatgctggagaggagcaaccacgtgtccaggacagaggtgagcagcaaccacgtgctgatctacctggacaaggtgagcaaccagaccctgagcctcttcttcaccgtgctgcaggatgtgcctgtgcgggacctgaagccagccatcgtgaaggtgtatgactactatgaaacagatgaatttgccatcgccgagtacaatgccccctgcagcaaggacctgggcaatgcctag

SEQ ID NO: 8 - DNA, 507 bp, Artificial Sequence
  derived and/or modified sequence
atgggcaagaacaagctgctgcaccccagcctggtgctgctgctgctggtgctgctgcccacagatgcctctgtgtctgggaagccccagtacatggtgctggtgcccagcctgctgcacacagagaccacagagaagggctgtgtgctgctgagctacctgaatgaaacagtgacagtgtctgccagcctggagagcgtgcggggcaacagaagcctcttcacagacctggaggccgagaatgatgtgctgcactgtgtggcctttgctgtgcccaagagcagcagcaatgaggaggtgatgttcctgactgtgcaggtgaagggccccacccaggagttcaagaagaggaccaccgtgatggtgaagaatgaagacagcctggtgtttgtgcagacagacaagagcatctacaagccaggccagacagtgaagttccgggtggtgtccatggatgagaacttccaccccctgaatgaactcatccccctggtgtacatccagtag

SEQ ID NO: 9 - DNA, 4470 bp, Artificial Sequence
  derived and/or modified sequence
cgggtgcagtatgtgtgcagccccccagcccccagcttctgcaacatgggcaagaacaagctgctgcaccccagcctggtgctgctgctgctggtgctgctgcccacagatgcctctgtgtctgggaagccccagtacatggtgctggtgcccagcctgctgcacacagagaccacagagaagggctgtgtgctgctgagctacctgaatgagaccgtgacagtgtctgccagcctggagagcgtgcggggcaacagaagcctcttcacagacctggaggctgaaaatgatgtgctgcactgtgtggcctttgctgtgcccaagagcagcagcaatgaggaggtgatgttcctgactgtgcaggtgaagggccccacccaggagttcaagaagaggaccaccgtgatggtgaagaatgaagacagcctggtgtttgtgcagacagacaagagcatctacaagccaggccagacagtgaagttccgggtggtgtccatggatgagaacttccaccccctgaatgagctgatccccctggtgtacatccaggaccccaagggcaaccgcatcgcccagtggcagagcttccagctggagggcggcctgaagcagttctccttccccctgagcagcgagcccttccagggcagctacaaggtggtggtgcagaagaagagcggcggccgcacagagcaccccttcaccgtggaggagtttgtgctgcccaagtttgaggtgcaggtgacagtgcccaagatcatcaccatcctggaggaggagatgaatgtgtctgtgtgtggcctgtacacctacggcaagcctgtgcccggccacgtgacagtgtccatctgcaggaagtacagtgatgccagtgactgccacggggaggacagccaggccttctgtgagaagttcagcggccagctgaacagccacggctgcttctaccagcaggtgaagaccaaggtgttccagctgaagaggaaggagtatgagatgaagctgcacacagaggcccagatccaggaggagggcaccgtggtggagctgaccggccggcagagcagcgagatcaccaggaccatcaccaagctgagctttgtgaaggtggacagccacttccggcagggcatccccttcttcggccaggtgcggctggtggatggcaagggcgtgcccatccccaacaaggtgatcttcatcagaggaaatgaggccaactactacagcaatgccaccacagatgaacatggcctggtgcagttcagcatcaacaccaccaacgtgatgggcaccagcctgactgtgcgggtgaactacaaggacaggagcccctgctacggctaccagtgggtgtctgaggagcacgaggaggcccaccacacagcctacctggtgttcagccccagcaagagctttgtgcacctggagcccatgagccatgagctgccctgtggccacacccagacagtgcaggcccactacatcctgaatggaggcaccctgctgggcctgaagaagctgtccttctactacctgatcatggccaagggcggcatcgtgaggacaggcacccacggcctgctggtgaagcaggaggacatgaagggccacttcagcatcagcatccctgtgaagagtgacatcgcccctgtggcccggctgctgatctatgctgtgctgcccactggagatgtgattggagacagcgccaagtatgatgtggagaactgcctggccaacaaggtggacctgtccttcagccccagccagagcctgcctgccagccacgcccacctgcgggtgacagctgccccccagagcgtgtgtgccctgcgggctgtggaccagagcgtgctgctgatgaagccagatgctgagctgagcgccagctctgtgtacaacctgctgcctgagaaggacctgaccggcttccctggccccctgaatgaccaggacaatgaagactgcatcaacagacacaacgtgtacatcaatggcatcacctacacccctgtgagcagcaccaatgagaaggacatgtacagcttcctggaggacatgggcctgaaggccttcaccaacagcaagatcaggaagcccaagatgtgcccccagctgcagcagtatgagatgcacggccctgagggcctgcgggtgggcttctatgaaagtgatgtgatgggccggggccacgcccggctggtgcacgtggaggagccccacacagaaacagtgaggaagtacttccctgagacctggatctgggacctggtggtggtgaacagcgctggggtggccgaggtgggcgtgacagtgcctgacaccatcacagagtggaaggccggggccttctgcctgtctgaagatgctggcctgggcatcagcagcacagccagcctgcgggccttccagcccttctttgtggagctgaccatgccctacagcgtcatccggggggaggccttcaccctgaaggccaccgtgctgaactacctgcccaagtgcatccgggtgtctgtgcagctggaggccagccctgccttcctggccgtgcctgtggagaaggagcaggccccccactgcatctgtgccaacggccggcagacagtgtcctgggccgtgacccccaagagcctgggcaatgtgaacttcaccgtgtctgctgaggccctggagagccaggagctgtgtggcacagaggtgcccagcgtgcctgagcacggcaggaaggacaccgtcatcaagcccctgctggtggagcctgagggcctggagaaggagaccaccttcaacagcctgctgtgccccagcggcggggaggtgtctgaggagctgagcctgaagctgcccccaaatgtggtggaggagagcgcccgggcctctgtgtctgtgctgggggacatcctgggcagcgccatgcagaacacccagaacctgctgcagatgccctacggctgtggggagcagaacatggtgctgtttgcccccaacatctacgtgctggactacctgaatgagacccagcagctgaccccagagatcaagagcaaggccatcggctacctgaacacaggctaccagaggcagctgaactacaagcactatgatggcagctacagcacctttggagagagatatggaagaaaccagggcaacacctggctgacagcctttgtgctgaagacctttgcccaggcccgggcctacatcttcattgatgaggcccacatcacccaggccctgatctggctgagccagaggcagaaggacaatggctgcttccgcagcagcggcagcctgctgaacaatgccatcaagggcggcgtggaggatgaggtgaccctgagcgcctacatcaccatcgccctgctggagatccccctgactgtgacccaccctgtggtgagaaatgccctcttctgcctggagagcgcctggaagacagcccaggagggggaccacggcagccacgtgtacaccaaggccctgctggcctatgcctttgccctggccggcaaccaggacaagaggaaggaggtgctgaagagcctgaatgaggaggccgtgaagaaggacaacagcgtgcactgggagcggccccagaagcccaaggcccctgtgggccacttctatgagccccaggcccccagcgctgaggtggagatgaccagctatgtgctgctggcctacctgacagcccagcctgcccccaccagcgaggacctgaccagcgccaccaacatcgtgaagtggatcaccaagcagcagaatgcccagggcggcttcagcagcacccaggacacagtggtggccctgcacgccctgagcaaatatggagctgccaccttcaccaggacaggcaaggccgcccaggtgaccatccagagcagcggcaccttcagcagcaagttccaggtggacaacaacaaccggctgctgctgcagcaggtgtccctgcctgagctgcccggggagtacagcatgaaggtgactggagagggctgtgtgtacctgcagaccagcctgaagtacaacatcctgcctgagaaggaggagttcccctttgccctgggcgtgcagaccctgccccagacctgtgatgagcccaaggcccacaccagcttccagatcagcctgtctgtgtcctacacaggcagccgcagcgccagcaacatggccatcgtggatgtgaagatggtgtctggcttcatccccctgaagcccaccgtgaagatgctggagaggagcaaccacgtgtccaggacagaggtgagcagcaaccacgtgctgatctacctggacaaggtgagcaaccagaccctgagcctcttcttcaccgtgctgcaggatgtgcctgtgcgggacctgaagccagccatcgtgaaggtgtatgactactatgaaacagatgaatttgccatcgccgagtacaatgccccctgcagcaaggacctgggcaatgcctag

SEQ ID NO: 10 - DNA, 4844 bp, Artificial Sequence
  derived and/or modified sequence
gaaaagcttattagctgctgtacggtaaaagtgagctcttacgggaatgggaatgtagttttagccctccagggattctatttagcccgccaggaattaaccttgactataaataggccatcaatgacctttccagagaatgttcagagacctcaactttgtttagagatcttgtgtgggtggaacttcctgtttgcacacagagcagcataaagcccagttgctttgggaagtgtttgggaccagatggattgtagggagtagggtacaatacagtctgttctcctccagctccttctttctgcaacatggggaagaacaaactccttcatccaagtctggttcttctcctcttggtcctcctgcccacagacgcctcagtctctggaaaaccgcagtatatggttctggtcccctccctgctccacactgagaccactgagaagggctgtgtccttctgagctacctgaatgagacagtgactgtaagtgcttccttggagtctgtcaggggaaacaggagcctcttcactgacctggaggcggagaatgacgtactccactgtgtcgccttcgctgtcccaaagtcttcatccaatgaggaggtaatgttcctcactgtccaagtgaaaggaccaacccaagaatttaagaagcggaccacagtgatggttaagaacgaggacagtctggtctttgtccagacagacaaatcaatctacaaaccagggcagacagtgaaatttcgtgttgtctccatggatgaaaactttcaccccctgaatgagttgattccactagtatacattcaggatcccaaaggaaatcgcatcgcacaatggcagagtttccagttagagggtggcctcaagcaattttcttttcccctctcatcagagcccttccagggctcctacaaggtggtggtacagaagaaatcaggtggaaggacagagcaccctttcaccgtggaggaatttgttcttcccaagtttgaagtacaagtaacagtgccaaagataatcaccatcttggaagaagagatgaatgtatcagtgtgtggcctatacacatatgggaagcctgtccctggacatgtgactgtgagcatttgcagaaagtatagtgacgcttccgactgccacggtgaagattcacaggctttctgtgagaaattcagtggacagctaaacagccatggctgcttctatcagcaagtaaaaaccaaggtcttccagctgaagaggaaggagtatgaaatgaaacttcacactgaggcccagatccaagaagaaggaacagtggtggaattgactggaaggcagtccagtgaaatcacaagaaccataaccaaactctcatttgtgaaagtggactcacactttcgacagggaattcccttctttgggcaggtgcgcctagtagatgggaaaggcgtccctataccaaataaagtcatattcatcagaggaaatgaagcaaactattactccaatgctaccacggatgagcatggccttgtacagttctctatcaacaccaccaatgttatgggtacctctcttactgttagggtcaattacaaggatcgtagtccctgttacggctaccagtgggtgtcagaagaacacgaagaggcacatcacactgcttatcttgtgttctccccaagcaagagctttgtccaccttgagcccatgtctcatgaactaccctgtggccatactcagacagtccaggcacattatattctgaatggaggcaccctgctggggctgaagaagctctccttctattatctgataatggcaaagggaggcattgtccgaactgggactcatggactgcttgtgaagcaggaagacatgaagggccatttttccatctcaatccctgtgaagtcagacattgctcctgtcgctcggttgctcatctatgctgttttacctaccggggacgtgattggggattctgcaaaatatgatgttgaaaattgtctggccaacaaggtggatttgagcttcagcccatcacaaagtctcccagcctcacacgcccacctgcgagtcacagcggctcctcagtccgtctgcgccctccgtgctgtggaccaaagcgtgctgctcatgaagcctgatgctgagctctcggcgtcctcggtttacaacctgctaccagaaaaggacctcactggcttccctgggcctttgaatgaccaggacaatgaagactgcatcaatcgtcataatgtctatattaatggaatcacatatactccagtatcaagtacaaatgaaaaggatatgtacagcttcctagaggacatgggcttaaaggcattcaccaactcaaagattcgtaaacccaaaatgtgtccacagcttcaacagtatgaaatgcatggacctgaaggtctacgtgtaggtttttatgagtcagatgtaatgggaagaggccatgcacgcctggtgcatgttgaagagcctcacacggagaccgtacgaaagtacttccctgagacatggatctgggatttggtggtggtaaactcagcaggtgtggctgaggtaggagtaacagtccctgacaccatcaccgagtggaaggcaggggccttctgcctgtctgaagatgctggacttggtatctcttccactgcctctctccgagccttccagcccttctttgtggagctcacaatgccttactctgtgattcgtggagaggccttcacactcaaggccacggtcctaaactaccttcccaaatgcatccgggtcagtgtgcagctggaagcctctcccgccttcctagctgtcccagtggagaaggaacaagcgcctcactgcatctgtgcaaacgggcggcaaactgtgtcctgggcagtaaccccaaagtcattaggaaatgtgaatttcactgtgagcgcagaggcactagagtctcaagagctgtgtgggactgaggtgccttcagttcctgaacacggaaggaaagacacagtcatcaagcctctgttggttgaacctgaaggactagagaaggaaacaacattcaactccctactttgtccatcaggtggtgaggtttctgaagaattatccctgaaactgccaccaaatgtggtagaagaatctgcccgagcttctgtctcagttttgggagacatattaggctctgccatgcaaaacacacaaaatcttctccagatgccctatggctgtggagagcagaatatggtcctctttgctcctaacatctatgtactggattatctaaatgaaacacagcagcttactccagagatcaagtccaaggccattggctatctcaacactggttaccagagacagttgaactacaaacactatgatggctcctacagcacctttggggagcgatatggcaggaaccagggcaacacctggctcacagcctttgttctgaagacttttgcccaagctcgagcctacatcttcatcgatgaagcacacattacccaagccctcatatggctctcccagaggcagaaggacaatggctgtttcaggagctctgggtcactgctcaacaatgccataaagggaggagtagaagatgaagtgaccctctccgcctatatcaccatcgcccttctggagattcctctcacagtcactcaccctgttgtccgcaatgccctgttttgcctggagtcagcctggaagacagcacaagaaggggaccatggcagccatgtatataccaaagcactgctggcctatgcttttgccctggcaggtaaccaggacaagaggaaggaagtactcaagtcacttaatgaggaagctgtgaagaaagacaactctgtccattgggagcgccctcagaaacccaaggcaccagtggggcatttttacgaaccccaggctccctctgctgaggtggagatgacatcctatgtgctcctcgcttatctcacggcccagccagccccaacctcggaggacctgacctctgcaaccaacatcgtgaagtggatcacgaagcagcagaatgcccagggcggtttctcctccacccaggacacagtggtggctctccatgctctgtccaaatatggagcagccacatttaccaggactgggaaggctgcacaggtgactatccagtcttcagggacattttccagcaaattccaagtggacaacaacaaccgcctgttactgcagcaggtctcattgccagagctgcctggggaatacagcatgaaagtgacaggagaaggatgtgtctacctccagacatccttgaaatacaatattctcccagaaaaggaagagttcccctttgctttaggagtgcagactctgcctcaaacttgtgatgaacccaaagcccacaccagcttccaaatctccctaagtgtcagttacacagggagccgctctgcctccaacatggcgatcgttgatgtgaagatggtctctggcttcattcccctgaagccaacagtgaaaatgcttgaaagatctaaccatgtgagccggacagaagtcagcagcaaccatgtcttgatttaccttgataaggtgtcaaatcagacactgagcttgttcttcacggttctgcaagatgtcccagtaagagatctgaaaccagccatagtgaaagtctatgattactacgagacggatgagtttgcaattgctgagtacaatgctccttgcagcaaagatcttggaaatgcttgaagaccacaaggctgaaaagtgctttgctggagtcctgttctcagagctccacagaagacacgtgtttttgtatctttaaagacttgatgaataaacactttttctggtcaa

SEQ ID NO: 11 - DNA, 623 bp, Artificial Sequence
  derived and/or modified sequence
atacaagagatgtgagaagcaccataaaaggcgttgtgaggagttgtgggggagtgagggagagaagaggttgaaaagcttattagctgctgtacggtaaaactccttctttctgcaacatggggaagaacaaactccttcatccaagtctggttcttctcctcttggtcctcctgcccacagacgcctcagtctctggaaaaccgcagtatatggttctggtcccctccctgctccacactgagaccactgagaagggctgtgtccttctgagctacctgaatgagacagtgactgtaagtgcttccttggagtctgtcaggggaaacaggagcctcttcactgacctggaggcggagaatgacgtactccactgtgtcgccttcgctgtcccaaagtcttcatccaatgaggaggtaatgttcctcactgtccaagtgaaaggaccaacccaagaatttaagaagcggaccacagtgatggttaagaacgaggacagtctggtctttgtccagacagacaaatcaatctacaaaccagggcagacagtgaaatttcgtgttgtctccatggatgaaaactttcaccccctgaatgagttgattccactagtatacattcag

SEQ ID NO: 12 - DNA, 4563 bp, Artificial Sequence
  derived and/or modified sequence
agggtacaatacgtctgttctcctccagctccttctttctgcaacatggggaagaacaaactccttcatccaagtctggttcttctcctcttggtcctcctgcccacagacgcctcagtctctggaaaaccgcagtatatggttctggtcccctccctgctccacactgagaccactgagaagggctgtgtccttctgagctacctgaatgagacagtgactgtaagtgcttccttggagtctgtcaggggaaacaggagcctcttcactgacctggaggcggagaatgacgtactccactgtgtcgccttcgctgtcccaaagtcttcatccaatgaggaggtaatgttcctcactgtccaagtgaaaggaccaacccaagaatttaagaagcggaccacagtgatggttaagaacgaggacagtctggtctttgtccagacagacaaatcaatctacaaaccagggcagacagtgaaatttcgtgttgtctccatggatgaaaactttcaccccctgaatgagttgattccactagtatacattcaggatcccaaaggaaatcgcatcgcacaatggcagagtttccagttagagggtggcctcaagcaattttcttttcccctctcatcagagcccttccagggctcctacaaggtggtggtacagaagaaatcaggtggaaggacagagcaccctttcaccgtggaggaatttgttcttcccaagtttgaagtacaagtaacagtgccaaagataatcaccatcttggaagaagagatgaatgtatcagtgtgtggcctatacacatatgggaagcctgtccctggacatgtgactgtgagcatttgcagaaagtatagtgacgcttccgactgccacggtgaagattcacaggctttctgtgagaaattcagtggacagctaaacagccatggctgcttctatcagcaagtaaaaaccaaggtcttccagctgaagaggaaggagtatgaaatgaaacttcacactgaggcccagatccaagaagaaggaacagtggtggaattgactggaaggcagtccagtgaaatcacaagaaccataaccaaactctcatttgtgaaagtggactcacactttcgacagggaattcccttctttgggcaggtgcgcctagtagatgggaaaggcgtccctataccaaataaagtcatattcatcagaggaaatgaagcaaactattactccaatgctaccacggatgagcatggccttgtacagttctctatcaacaccaccaatgttatgggtacctctcttactgttagggtcaattacaaggatcgtagtccctgttacggctaccagtgggtgtcagaagaacacgaagaggcacatcacactgcttatcttgtgttctccccaagcaagagctttgtccaccttgagcccatgtctcatgaactaccctgtggccatactcagacagtccaggcacattatattctgaatggaggcaccctgctggggctgaagaagctctccttctattatctgataatggcaaagggaggcattgtccgaactgggactcatggactgcttgtgaagcaggaagacatgaagggccatttttccatctcaatccctgtgaagtcagacattgctcctgtcgctcggttgctcatctatgctgttttacctaccggggacgtgattggggattctgcaaaatatgatgttgaaaattgtctggccaacaaggtggatttgagcttcagcccatcacaaagtctcccagcctcacacgcccacctgcgagtcacagcggctcctcagtccgtctgcgccctccgtgctgtggaccaaagcgtgctgctcatgaagcctgatgctgagctctcggcgtcctcggtttacaacctgctaccagaaaaggacctcactggcttccctgggcctttgaatgaccaggacaatgaagactgcatcaatcgtcataatgtctatattaatggaatcacatatactccagtatcaagtacaaatgaaaaggatatgtacagcttcctagaggacatgggcttaaaggcattcaccaactcaaagattcgtaaacccaaaatgtgtccacagcttcaacagtatgaaatgcatggacctgaaggtctacgtgtaggtttttatgagtcagatgtaatgggaagaggccatgcacgcctggtgcatgttgaagagcctcacacggagaccgtacgaaagtacttccctgagacatggatctgggatttggtggtggtaaactcagcaggtgtggctgaggtaggagtaacagtccctgacaccatcaccgagtggaaggcaggggccttctgcctgtctgaagatgctggacttggtatctcttccactgcctctctccgagccttccagcccttctttgtggagctcacaatgccttactctgtgattcgtggagaggccttcacactcaaggccacggtcctaaactaccttcccaaatgcatccgggtcagtgtgcagctggaagcctctcccgccttcctagctgtcccagtggagaaggaacaagcgcctcactgcatctgtgcaaacgggcggcaaactgtgtcctgggcagtaaccccaaagtcattaggaaatgtgaatttcactgtgagcgcagaggcactagagtctcaagagctgtgtgggactgaggtgccttcagttcctgaacacggaaggaaagacacagtcatcaagcctctgttggttgaacctgaaggactagagaaggaaacaacattcaactccctactttgtccatcaggtggtgaggtttctgaagaattatccctgaaactgccaccaaatgtggtagaagaatctgcccgagcttctgtctcagttttgggagacatattaggctctgccatgcaaaacacacaaaatcttctccagatgccctatggctgtggagagcagaatatggtcctctttgctcctaacatctatgtactggattatctaaatgaaacacagcagcttactccagagatcaagtccaaggccattggctatctcaacactggttaccagagacagttgaactacaaacactatgatggctcctacagcacctttggggagcgatatggcaggaaccagggcaacacctggctcacagcctttgttctgaagacttttgcccaagctcgagcctacatcttcatcgatgaagcacacattacccaagccctcatatggctctcccagaggcagaaggacaatggctgtttcaggagctctgggtcactgctcaacaatgccataaagggaggagtagaagatgaagtgaccctctccgcctatatcaccatcgcccttctggagattcctctcacagtcactcaccctgttgtccgcaatgccctgttttgcctggagtcagcctggaagacagcacaagaaggggaccatggcagccatgtatataccaaagcactgctggcctatgcttttgccctggcaggtaaccaggacaagaggaaggaagtactcaagtcacttaatgaggaagctgtgaagaaagacaactctgtccattgggagcgccctcagaaacccaaggcaccagtggggcatttttacgaaccccaggctccctctgctgaggtggagatgacatcctatgtgctcctcgcttatctcacggcccagccagccccaacctcggaggacctgacctctgcaaccaacatcgtgaagtggatcacgaagcagcagaatgcccagggcggtttctcctccacccaggacacagtggtggctctccatgctctgtccaaatatggagcagccacatttaccaggactgggaaggctgcacaggtgactatccagtcttcagggacattttccagcaaattccaagtggacaacaacaaccgcctgttactgcagcaggtctcattgccagagctgcctggggaatacagcatgaaagtgacaggagaaggatgtgtctacctccagacatccttgaaatacaatattctcccagaaaaggaagagttcccctttgctttaggagtgcagactctgcctcaaacttgtgatgaacccaaagcccacaccagcttccaaatctccctaagtgtcagttacacagggagccgctctgcctccaacatggcgatcgttgatgtgaagatggtctctggcttcattcccctgaagccaacagtgaaaatgcttgaaagatctaaccatgtgagccggacagaagtcagcagcaaccatgtcttgatttaccttgataaggtgtcaaatcagacactgagcttgttcttcacggttctgcaagatgtcccagtaagagatctgaaaccagccatagtgaaagtctatgattactacgagacggatgagtttgcaattgctgagtacaatgctccttgcagcaaagatcttggaaatgcttgaagaccacaaggctgaaaagtgctttgctggagtcctgttctcagagctccacagaagacacgtgtttttgtatctttaaagacttgatgaata

SEQ ID NO: 13 - DNA, 4425 bp, Artificial Sequence
  derived and/or modified sequence
atgggcaagaacaagctgctgcaccccagcctggtgctgctgctgttggtgcttttaccaacagacgccagtgtttccggaaaaccccagtatatggtgctggtgccatcccttctccacacagaaaccacagaaaaaggctgtgtcctgttatcctatttgaacgagaccgttaccgtgtctgccagcctagagagcgtgcgcggcaataggagcctttttacagatctagaagcagagaacgatgtacttcattgcgtcgcttttgctgtacccaaaagctccagcaacgaggaagtcatgtttctaactgtgcaggtcaagggacctacacaggaattcaaaaaaaggacgactgtcatggttaagaacgaggactcccttgttttcgtccagacagataaatctatttacaaacccgggcagaccgtgaagtttcgggtggtgtcaatggacgagaatttccacccactgaatgagttaatccccttggtttatatccaggatcctaagggcaacaggatcgcccagtggcagtctttccagcttgaaggcggcctgaagcagttctcgttcccattgtcctccgagccattccaaggttcgtacaaggtggttgtgcagaagaagagcggagggcgcacagaacacccgtttacggtggaagagtttgttctacctaaattcgaagtgcaggtgactgtgccaaagattatcactatcctggaagaggaaatgaatgtgtccgtgtgtggcctgtacacctatgggaagccagtgccaggccacgtgacagttagcatatgtcggaaatatagcgacgcttcagactgtcatggtgaagactcgcaagccttttgtgagaagttctccggtcaactaaattcgcacggttgtttttatcagcaggtgaaaactaaggtctttcaactgaaaagaaaggaatatgaaatgaaactgcacacggaggcccagatccaggaggaaggaaccgtagtagagttaaccgggcgtcaaagctccgagattacccgcacaatcacaaagctgtcatttgtgaaagtggactctcacttccgtcaggggatccccttcttcggacaagtccggttggttgatggaaagggggtgccaataccaaacaaggtgatattcatcaggggcaacgaggcaaactattatagcaacgccacaacagacgaacacgggttagttcaattctcaatcaacaccactaacgtcatgggaacttcacttacagtgcgggttaactacaaagatagatctccctgctatggataccagtgggttagtgaagagcatgaggaggcccaccacaccgcatatctggttttctcaccttccaagtctttcgtgcaccttgagccaatgagccatgagctgccgtgcgggcatactcagacagtgcaggctcactatattctgaacgggggtaccttgctcggtttgaagaaactatccttctactacctcattatggccaagggtgggatcgtgcggacaggaacccatggcctcctggttaaacaggaggacatgaaagggcactttagcatttcgatccctgtgaagtctgatattgctccagtggccaggcttctgatctatgcagtgctccctacaggagacgtgatcggagattctgccaaatatgacgtggagaattgcctggctaacaaagtcgacttatcattttccccctcgcagtccttaccggcatcacacgctcatcttcgggtcactgccgccccacagtcagtctgtgccctccgagcagtggaccagagtgtcctacttatgaaacccgatgcagagctgtctgcatcttccgtctataatctgctgcctgagaaggacctgaccggctttcctggtcctttgaacgatcaggataatgaggactgtatcaaccgtcacaatgtgtacataaacggcatcacttatacccccgtgtcttcaaccaacgaaaaagacatgtactctttcctggaggatatgggtctcaaggcttttacgaacagcaaaatcaggaaaccaaagatgtgcccccagctgcagcagtacgaaatgcacggccctgaaggcctgagggtgggcttctacgagtcggatgtgatggggcgcggacatgcccgtctggttcatgtcgaggaaccccacacggaaacagtcaggaaatactttcccgagacctggatctgggacctggtggtggtcaactctgccggggtagccgaagtgggcgtcacagtcccagatactattaccgagtggaaggctggtgctttttgtctctcagaggatgctggcctcggaatcagctctactgcctcccttagggcatttcagccattctttgtggaactcaccatgccatattcagtgataaggggcgaggcattcaccttgaaagctaccgttctcaactacctaccgaagtgcatcagagtgagcgttcagctggaggccagccccgcctttctggctgtcccggtagagaaggaacaggcaccacattgcatttgcgccaacggacgccaaactgtgtcctgggccgtaacacctaagtccctgggcaatgtcaacttcacagtatccgcggaagctctggagagtcaggagctgtgcggcaccgaagtccctagcgttccagagcatggccggaaagataccgtcatcaagcctctcttggttgagccagaagggttggagaaggaaactacttttaacagcttgctctgcccctcagggggcgaagtgtccgaagagctgtcattgaagctgccccctaacgttgtggaagagtcggcccgcgccagtgtgtccgtgctgggagacattttgggctccgccatgcagaatacccagaatttgctgcaaatgccctatggatgtggtgaacagaatatggtgctctttgctcctaacatttatgtcctagactacttgaacgaaacccagcaactgaccccggagataaagagcaaggcaatcggctacctgaacactgggtatcagcgtcagttaaactacaagcattatgatggatcatattccacatttggggagcgctacggccgcaatcaaggcaacacatggctgaccgcctttgtgttaaagacgtttgcgcaggctcgcgcctatatcttcatagacgaggctcatataacacaggcacttatctggctctcacagagacagaaggataatggatgctttagaagttcgggctctctattaaacaatgcaataaagggtggtgttgaagacgaggtgactctctccgcgtacataaccattgcactccttgagataccattaaccgtgactcaccccgtggtgcggaacgcattgttttgtttggagtctgcatggaagacagcacaagagggggaccatggttctcatgtgtataccaaagccttgctcgcttatgccttcgcactcgccggcaatcaggataagagaaaggaagtgctgaaaagcttaaacgaagaagccgtgaagaaggacaattctgtacactgggagaggccccagaaaccaaaggctcctgtggggcatttctacgagccacaggcaccctcagcggaggtcgagatgaccagctacgtcctgctggcctaccttacagcccagcctgcacctacgagtgaggatctgactagcgccactaatatagtcaagtggataacaaagcagcaaaatgctcaggggggattctcttccacacaggacactgtggtggccctgcatgcactctctaagtatggcgcggctacattcacacgcacaggaaaagccgctcaagtgaccatacagtcaagcgggacattctccagcaaattccaggtggacaataacaatcgtctgctactccaacaggtgagcctgcccgagctgccaggggaatactctatgaaagtcaccggcgaggggtgcgtctacctgcagactagcctgaaatataatatcctcccagagaaggaggagtttcccttcgctctgggcgtacagaccttaccccagacttgcgatgagcctaaggcccacacctccttccagatttccctctccgtgtcatacaccggatcaaggtcagccagcaacatggccatcgtagacgtcaaaatggtgtctggcttcatccccctcaaaccaacagttaagatgctcgaacgctctaatcacgtttctagaaccgaagtgtcttctaatcacgtgcttatttacctggacaaagtgtcaaatcagactctttcactcttttttacagtcctccaagacgtgccagtccgagatctgaagcctgctattgtgaaggtgtacgattactacgagactgatgagttcgctattgctgagtataatgctccttgctctaaggatttgggcaatgcctag

SEQ ID NO: 14 - DNA, 507 bp, Artificial Sequence
  derived and/or modified sequence
atgggcaagaacaagctgctgcaccccagcctggtgctgctgctgcttgtcctcctccctacagacgcaagtgtgagcgggaagccacagtatatggtcctggtcccgagcttgctgcacactgagactacagagaagggctgcgtgcttctatcttacttgaacgagacggtcacagtgagtgcctccctggagtcagtgcgagggaatcggtcgctttttaccgacttagaggctgagaatgacgtcctgcactgcgtcgcgttcgccgttcctaagtcaagcagtaacgaggaagtgatgtttctgactgtccaggtgaaaggccctactcaggaatttaagaaacgtaccaccgtgatggtcaaaaatgaggactccctggtttttgtacagactgacaaatctatctacaaacctggccagaccgtcaagtttagggtcgtgtccatggacgagaattttcaccccctaaacgaactgatacccctggtttacatccaatag

SEQ ID NO: 15 - DNA, 4470 bp, Artificial Sequence
  derived and/or modified sequence
cgggtgcagtacgtgtgcagcccccccgcccccagcttctgcaacatgggcaagaataagctattgcacccatcactggtgcttttactgcttgtgcttttgcctactgacgcaagcgtctccggaaaaccccagtatatggttctggttccttcattgctgcatacagaaacaacagagaaggggtgcgtgctgctgtcatatctgaacgagacggtgacggtgagcgcttctctagagtcagtgagaggcaataggagcttgttcacagatcttgaagccgagaatgacgtactacactgtgtggcattcgctgtgccaaaatcttcttcaaatgaggaggtgatgtttctgactgtgcaagttaaaggcccaacgcaggaattcaagaaaagaacaactgtgatggttaagaacgaggacagcctggtttttgttcaaacagacaagagcatctataagccgggacaaaccgtcaaatttcgcgttgtatcaatggacgagaactttcaccccctcaatgaactgatccctctagtgtatatccaagaccctaaggggaatcgaattgcccagtggcagagctttcaactggaaggaggtctgaagcagttttccttccccctgagctctgagcctttccagggtagctacaaagttgtcgtgcagaagaaaagcgggggtagaaccgagcacccattcaccgtcgaggaatttgtcctacctaaattcgaagtccaggtgaccgtgcccaagataattactatcttggaggaagagatgaatgtcagtgtgtgtggactatatacatatggtaagcccgttcccggacacgttactgtatctatctgcaggaaatattctgacgcgtctgactgccacggcgaggattcccaagccttctgtgagaagtttagtggccaactgaacagccacggatgtttttaccagcaggtaaagactaaggtttttcagctgaaacgcaaagaatatgaaatgaaactccacacagaagctcagatccaggaggagggcacggttgtagagttgacgggtcggcagagttccgagattacgagaacaataactaagctgtctttcgtgaaggtcgattcacattttaggcaggggatacctttttttggtcaggtgaggctcgtcgatggaaaaggggtgcctattcctaataaggtaatctttatcagaggaaatgaagccaattattacagtaatgctaccactgatgagcatggccttgtgcagttttctatcaacaccacgaacgttatgggaacctccttaaccgtgcgggtgaactataaggaccgttccccctgctacggttaccagtgggtctccgaagagcacgaagaggcgcaccacactgcatacttagtgttttccccatccaagtcatttgtccatctggaacccatgagccatgaacttccctgcggccatactcaaactgtacaggcgcattatattctgaacgggggaaccctgctgggcttgaaaaagttatcgttctactatcttattatggctaaagggggtattgtcagaactgggacgcatgggctgctggtcaaacaggaggatatgaagggacacttttccatcagtattccagtaaagtccgatatcgcccccgtggcccgcttactcatttatgccgtcttacccactggcgatgtgatcggggattccgccaagtatgatgtcgaaaactgtcttgcaaataaggtggacctgagctttagcccctcccagtctctaccggcttctcatgcccacctgcgtgtgaccgcagcgcctcaatctgtttgcgctctgagggcagttgatcagagcgttctgctcatgaagccagacgctgagctgagcgcctcaagtgtttataatctcctccccgaaaaggatctcacgggctttcctggtcctttgaacgatcaggacaatgaagactgcattaaccggcacaatgtttatattaacggcatcacctatactcctgtctcttccacgaacgaaaaagacatgtattcctttctcgaagacatgggtctgaaggccttcacaaactctaaaatcagaaaacccaagatgtgcccccagcttcagcagtacgaaatgcatgggcccgaaggccttagggttggattctacgagagtgatgtgatgggacgaggtcatgccagactcgtgcacgtcgaggagccgcacactgagactgtgcggaaatacttcccggagacctggatctgggacctggtggtggtgaatagtgcaggcgtagctgaagtcggcgtgacggttcctgatacgatcactgaatggaaggccggagccttctgcctcagcgaagatgcaggccttggtatctcttcaactgcaagtctcagagctttccagcccttttttgttgagctgaccatgccatatagcgtcatcagaggggaagccttcactctgaaggcgacggtgctgaactacttaccaaagtgcattcgggtctctgtccagctggaagccagcccagctttcctggccgtccctgtggagaaagaacaggcacctcattgtatctgcgcaaacggtaggcagacggtctcttgggctgtgaccccgaagagtctcggcaatgtcaacttcacagtgagtgctgaggctcttgagagccaggaactgtgcggtactgaggtgccctctgtccctgagcatggtcggaaagacactgttatcaaacccctgctagttgagcctgaaggcctagagaaggagaccacatttaactctcttctgtgtccctccggtggggaagtttcagaggagctgtccctgaaactgccaccaaatgtggtcgaggagtccgctcgcgcaagcgtgtcagtgttgggtgacatcctgggctctgctatgcagaacacccaaaatttgctccagatgccgtacgggtgcggtgaacagaacatggttcttttcgccccaaacatttatgtcctcgattatctgaatgaaacccaacagcttacacctgaaataaagtctaaagccattgggtatcttaacacaggctatcagcgacagctaaattacaaacactatgatgggtcctattcaaccttcggcgagaggtacggcaggaaccaggggaacacctggttaacagcattcgtgctcaaaacattcgcacaggcaagggcttatatttttatcgacgaagcccatatcacccaggccctgatttggctgtctcagagacagaaagataacggctgcttccgtagtagcgggtccctcctcaacaacgctattaagggaggtgtagaagacgaagtgaccctcagcgcgtacataactattgctttactggagatccccttgactgtgacacatccagtggtgaggaacgccctgttttgcctggagtcagcttggaaaaccgcccaggaaggcgatcatgggagccatgtgtacaccaaggccctcctagcgtacgcttttgcgctggctggaaaccaagacaagaggaaggaggtgttgaagagcctgaacgaggaggccgtaaaaaaagataactccgtacactgggaacgtccacagaaacccaaagctcccgtagggcacttttacgagccacaagcacccagtgcagaggtggagatgacgtcatacgtgttgctggcgtatctgaccgcgcagcccgcaccaacgagtgaggatttgacaagcgcaacaaacatcgtaaaatggatcactaaacaacaaaatgctcagggtggattttcatctacacaagatactgtggtcgctctgcatgcactctctaagtacggtgcggccaccttcacaaggactgggaaggctgcccaagtaactatccaatccagtgggacattttcctctaagttccaagtcgacaataataatcggttgctgttacagcaggtgagcctccccgagcttccgggcgaatactcaatgaaagtgacgggtgaaggatgcgtgtacctccagacaagccttaaatacaacatcctgccagaaaaagaagagttccctttcgccctgggcgtgcaaaccctccctcaaacctgtgacgagcctaaagcgcacacgagcttccagatctctctgtcagtatcatatacgggatcacgatcagcatccaatatggcaatcgttgacgtgaaaatggtgagcggattcatccccctaaagccaactgtcaaaatgcttgaaaggagtaaccacgtgagccggacagaagtcagttctaatcacgtgctgatatacctggacaaggtctctaatcagaccttatccctgtttttcaccgtgcttcaggacgttcctgtccgcgatctcaagcccgctattgtcaaggtatatgattactacgaaaccgacgaattcgcgattgcagaatacaacgcaccatgttccaaagacctgggaaacgcgtag

SEQ ID NO: 16 - DNA, 4425 bp, Artificial Sequence
  derived and/or modified sequence
atgggaaagaataagttgctgcacccctctttagtgttgcttctgcttgtgctgctgcccacggatgccagcgtctccgggaagccccagtacatggtccttgtcccttcgctcctgcacaccgaaaccaccgagaagggctgtgtccttcttagctacttaaacgaaacagtaacggtttcggcttctttggaaagtgttcgaggcaatcgatcgctgtttacagacctagaggctgagaatgatgtactccattgcgtggccttcgcggtcccaaagtcgagcagcaatgaagaagtgatgtttctcacggtccaggtgaaaggaccgactcaggagtttaaaaaaagaaccacagtgatggtaaagaacgaggacagccttgtattcgtgcaaacagacaagagcatttataagcctggccagaccgtgaagtttcgggtggtgagtatggacgagaatttccacccgctaaatgaactgatccccctcgtgtacattcaagatcctaaagggaacagaatcgcccaatggcagtcattccaattggagggcggacttaaacagtttagcttccccctgtcctccgagcccttccaaggctcttacaaggtcgtggtccagaaaaagtctggcggtcgaactgagcacccatttacagtcgaggagttcgtcctacccaagttcgaggttcaggtcaccgtgccaaagatcatcaccattctggaagaagaaatgaatgtctccgtgtgcgggctctacacctacggcaagcctgtcccaggccatgtgacggtgtcaatatgccggaagtattccgacgcctccgattgccatggggaagactcccaggctttttgtgagaagttctctgggcaactcaattcccacggttgcttttaccagcaggtgaagaccaaggtcttccaactcaagaggaaggaatacgagatgaagctgcacacagaagcgcagatccaggaagagggcacagtggtggagctcactggccgacaatccagcgagattacgcgcacaatcaccaagcttagcttcgttaaggtggactcacacttcaggcagggcattcctttcttcggtcaggttcgactggtggatggaaagggcgtacctatccctaataaggtgattttcattaggggcaatgaggctaactactactcaaacgccaccaccgatgagcacggcctcgtgcagttctctattaacactacaaacgtgatggggaccagcctgacagtaagagttaactacaaggaccggtcaccgtgctacgggtaccagtgggtgagcgaagagcacgaagaagctcatcacactgcttacctggttttctcaccaagcaaatcttttgtacatctggagcccatgtcgcacgagctgccctgcgggcacacacagaccgtccaggcccactatattctgaatggagggaccctcctgggcttaaaaaaactcagtttctactaccttatcatggcaaaaggaggcatcgtgcggactggaactcacggcctccttgtgaagcaggaagatatgaagggacacttctccatctcaatcccggtgaaaagcgatatcgctcctgtggccagactgctcatttacgctgtccttcctactggggacgtgatcggcgatagtgcgaagtatgacgtagagaattgcttggctaacaaggtggatctgtcatttagccctagccagtcgctgccggctagccacgcccacctcagggtaacagcagctcctcagtctgtttgtgcactgcgggcagttgaccagtctgttcttctaatgaaacccgacgccgaactatccgcctcttccgtatataatctcttacccgaaaaggacctcactggctttccaggaccccttaatgaccaagacaacgaagattgtatcaacagacataatgtgtatatcaatgggataacttatactcccgtatcttctaccaacgaaaaggacatgtacagcttccttgaagatatgggcctgaaggcttttactaactctaagataaggaagcccaaaatgtgccctcaactccagcagtatgaaatgcacgggcctgagggacttagagtaggattctacgaaagtgacgttatgggcaggggccacgctagactcgttcacgtcgaggagccccatacagaaacggtgcgcaagtacttccccgagacgtggatttgggatctcgtagttgtgaattctgccggtgtggccgaggtaggcgtgactgtccccgatacaattaccgaatggaaggctggtgctttttgcctgagcgaggacgccggacttggaataagctccaccgctagcttacgtgcatttcagccgttctttgtggaattaacaatgccttatagcgtcatacgtggcgaggcttttaccctcaaagcaactgtacttaactatttacctaaatgcatccgggtgtctgtacagctggaggcttctccagctttcctggcagtacccgtcgagaaggaacaagctccgcattgcatctgcgcgaacggtcgacagacggtcagctgggccgtgacacccaagtccctaggcaacgtcaacttcacggtgtctgccgaagccttggagtctcaggagctgtgtggtaccgaagtgccttctgtacctgaacacgggagaaaggacacagtgattaagcctctgctcgtcgaacccgagggacttgaaaaggagactacatttaactccctgttatgcccttctggcggagaagtatctgaagagctgtctcttaaattgccccctaatgtagtggaagagtcagcacgggcatccgtgtcagtgctcggcgacattcttggatctgccatgcagaacactcagaacctgctgcagatgccttacgggtgcggggagcagaacatggtacttttcgcccctaacatttacgtgctggattacctgaatgagactcagcagctgacccctgaaataaaaagcaaggcaatagggtatttaaacaccggctaccaaagacagctcaactacaaacactacgacgggtcgtacagtacctttggcgaacgatatggtagaaaccaagggaacacgtggttgacggctttcgtcctaaagacttttgcccaggccagggcctacatctttatagacgaggcccacattacccaggctctcatctggctgtctcagagacaaaaggacaacgggtgtttcagatctagcgggtctctgttgaataacgctatcaaaggcggagttgaagatgaagtcaccctcagtgcttatattacaattgccctcctagagattcccttgactgtgacccaccctgtcgtccggaacgcgctcttctgcctggaatctgcttggaagacggcccaggagggggatcacggttcacacgtgtacactaaggctctcctggcttacgcattcgccctggcaggaaatcaggacaagcgcaaggaggtgttaaagagtctcaatgaagaggccgtgaagaaagacaattctgtccactgggaacgccctcagaagcctaaagcccctgtgggccacttttatgaaccacaagctccttctgcagaagtggagatgacctcttacgtactactggcataccttacagcccaaccagccccaacctctgaggatctgacgtctgccactaatatcgttaaatggattactaagcagcaaaatgctcaggggggattttccagtacccaagataccgtggtggcactccacgctctatcaaagtacggggcagcaacctttacccgaaccggtaaagccgcacaagttaccatccagtctagcggaacattctcttctaagttccaggtggacaacaacaacaggctgctcctgcaacaggtcagtctacccgagctgccaggcgagtactctatgaaggtcactggcgagggatgtgtctacctccagacatctcttaaatacaacattcttcctgagaaggaggagtttccatttgccctaggcgtgcagaccctaccacagacatgtgatgagcctaaggcccacaccagcttccagatttccttgtcagtgtcatacaccgggtcccgaagtgcttccaacatggcaatcgtggacgtaaaaatggtgtctgggtttattccattgaaaccaacagtcaagatgctggaacggtcaaaccacgtatctaggaccgaggtctcgagtaatcatgtacttatctacctggacaaggtgagcaatcagactttgtctttgtttttcactgtgctacaggacgttccagttcgagacctcaaacccgcaatcgttaaagtctatgactactacgaaactgacgagttcgccattgccgagtacaatgcaccatgttccaaggatctgggaaacgcttag

SEQ ID NO: 17 - DNA, 507 bp, Artificial Sequence
  derived and/or modified sequence
atgggaaaaaacaagctgctgcatccgagtttagtcctgcttcttctggtgttgctgcctacagacgcctccgtgtcgggaaagccacaatatatggtcctcgtgccctccctgctacacactgaaactaccgagaaaggctgtgtgcttctgtcctacctgaacgagaccgtcacagtctcggctagtttagagtctgtgcgagggaatcgtagtctctttacagacctggaggccgagaatgacgtgctccattgcgtggcattcgctgtgccgaagagcagttccaatgaggaagtgatgttcctcacggtgcaggttaagggccctactcaggagttcaaaaaacggacaacagtgatggtgaaaaatgaggattcgctggtgtttgtgcaaaccgataaaagtatttataaaccgggacaaaccgttaagttccgcgttgtgagcatggacgagaactttcatcccctcaacgaacttattccgctcgtgtatatacaatag

SEQ ID NO: 18 - DNA, 4470 bp, Artificial Sequence
  derived and/or modified sequence
cgggtgcagtatgtgtgttccccacctgctccaagtttctgtaacatgggaaagaataagctccttcaccctagtttggttcttctcctgctggttctccttcccaccgatgcaagtgtgtcgggtaaaccacagtatatggtgctggtccctagcctcttgcatacagagaccactgagaaaggttgcgtgttattgagttaccttaacgaaacggtcaccgtgtctgcctctctcgagtctgttagaggcaatagatcgctctttactgacctggaagcggagaacgatgtcttgcactgcgtcgcatttgccgtgcccaagtcctcttccaacgaagaagtgatgtttctcacggtacaagtgaaaggacccacccaggagttcaaaaaacgcacgaccgtaatggtgaaaaatgaagacagtctggtcttcgttcagaccgacaaatccatctacaaacctggtcaaaccgtgaaattccgggttgtttcaatggacgaaaactttcatccactaaatgagctcataccactggtttacattcaagacccaaagggcaataggatagctcaatggcagagcttccagctggaaggtggcttaaaacagttctctttcccactctcttccgagcctttccaaggctcctataaagtggttgtgcaaaagaagtcaggtggccgtacagagcatccctttacagtcgaggagttcgtcttaccaaaatttgaagtgcaggttacagtccccaaaatcatcactatcctggaggaagagatgaatgtcagtgtttgtggactttacacttatgggaaacctgtgccaggacatgttacagttagcatctgcagaaagtactcagacgcgtccgactgccacggcgaagattcgcaggcattttgtgagaaattttcaggccaactgaatagccatggatgcttctatcaacaggtgaaaaccaaggtgttccagctgaagagaaaggagtacgaaatgaagctgcacaccgaggctcagatccaagaagagggcacggttgtcgaactgactgggaggcagtctagtgagatcacaaggactattaccaaactttcctttgtcaaggttgactcccattttcgccagggtatcccctttttcggccaggtccgactagtggacgggaagggggtgcccatcccaaacaaagtgatcttcattcggggaaatgaggccaactactatagcaacgccacgaccgatgaacatggccttgtgcagttttccattaatactactaacgtgatgggaacctccctgacagttcgggtgaattataaggataggagtccctgttacggctaccagtgggttagcgaggagcatgaggaggctcaccacaccgcctacctcgtgttctcgccaagtaaaagctttgtgcacttagaacctatgtcccacgagttaccgtgcggccacacccagacagtgcaggctcattacatcctgaatggcggtacactgcttggcctgaagaagctctccttctactatctgatcatggccaagggtgggatagtgcgaaccggcacacacgggcttctggtcaaacaggaggacatgaagggccacttctccatcagcatccctgtaaaatctgacatcgcacctgtggctcggctcttgatctatgctgtgctcccgaccggtgacgtgataggcgattctgctaagtacgatgtcgaaaactgcctggccaataaggtcgatctcagcttctctccttcccagagccttccggctagccatgcccatctacgagttaccgccgctccccaaagtgtttgcgctctaagagcagtggatcagagtgttctgcttatgaaaccggatgccgaattaagcgcctcatcagtctacaatctactccccgagaaagacttgacaggatttccaggacccctgaacgaccaggataatgaggattgtatcaaccgtcacaacgtgtatatcaacggtattacctacacaccagtttctagcaccaatgagaaggacatgtacagcttccttgaagatatgggcctgaaagcgtttacaaacagtaaaatccgcaagccaaagatgtgccctcagctgcaacaatacgaaatgcacgggccagaaggtcttagagtgggattttacgaatccgacgtgatgggacggggacacgcacgactcgttcacgttgaagaaccccatactgagaccgtcagaaagtacttcccagagacctggatctgggatttggtcgtggtcaattcagcgggagttgcagaagtgggcgttacagttccagacacaattaccgagtggaaggcaggcgctttctgcctgtccgaggacgccggtctcggtattagttcgacagccagcttaagggcctttcaacccttcttcgtagagctgaccatgccatactccgtcataagaggggaagcttttacgttgaaggcgactgtgctcaattatctccctaagtgtatacgcgtgagtgtgcagcttgaggcttccccagctttcttggctgtgccagtcgagaaagagcaagcccctcattgtatttgcgcgaatgggcgacaaacagtgtcatgggccgttaccccgaagtcgctgggcaacgtcaatttcacagtgtccgcggaagcccttgagtcacaggagctctgcggaactgaggtgccttccgtaccagaacatggcagaaaggataccgttatcaaacccctattggtagagcctgaggggttagagaaagaaacaacttttaattcactgctgtgcccatccggaggagaggtgtccgaggagttgtcattgaaattgccccctaacgtcgtagaagaatcagcccgagcgtccgttagtgtgctgggtgacatactggggtcggccatgcaaaatactcagaacttgctccagatgccatacggatgcggagaacagaacatggtactgttcgcacccaatatatacgtgcttgattacctgaacgagactcagcaactgacgccggagatcaagtctaaagctataggttaccttaacaccggttatcaaagacaactaaactataagcactatgatggcagttactccacctttggggagcgctatggtcgcaaccaggggaacacgtggttaactgctttcgtgttaaaaacttttgcccaggcccgtgcgtacattttcatcgacgaggcacacattactcaggccctgatctggctgtctcagcggcagaaggataatggatgtttccggagctctggatcacttctgaataatgcaataaagggcggagtggaagatgaggtgacgctatctgcatatattaccatagccctcctggagatccccctgactgttacccatcctgtcgtgaggaacgctttgttctgcttggaatcggcctggaaaacagcccaggagggggatcatggatcacacgtgtatacaaaagccttgttggcttatgctttcgcgctggcgggtaaccaggataaaaggaaagaagttttaaaaagtttgaatgaggaagctgttaagaaggacaattctgtgcactgggagcggcctcagaaaccgaaagcgccagtgggacacttctatgaacctcaggcccctagcgcggaagtggagatgacaagctacgtgttgctcgcatatttgacggcacagcctgccccaacgtccgaagatctaactagtgccactaatatagtgaaatggataacgaagcagcaaaacgctcagggagggttctcatctactcaggacacagtcgtggctctgcacgcactcagcaaatacggtgctgccaccttcactcggactgggaaggcagctcaggttaccattcaaagctctggcactttttcctccaagtttcaggtcgacaacaacaatcgtctactgttgcagcaggtgagtctgcctgagttgccaggagagtactcaatgaaagtaaccggtgagggctgcgtttacttgcagacatctctcaagtacaatatcttgcccgaaaaggaggagttccccttcgctttaggggttcaaaccctaccccagacctgtgacgagccaaaagcccatacgtccttccagatcagcttgagtgtctcatacacaggatcaaggtcagcaagtaatatggctattgttgatgtcaaaatggtaagcggattcatcccgctaaagcccaccgttaagatgcttgagagaagcaaccacgtgtctcgtaccgaagtgagctccaatcacgtcctcatctatctcgataaagtcagcaaccaaacacttagtctgttctttacggtcctccaggatgtaccagtaagggacctgaaaccagcaatcgtgaaggtatacgactattatgagacagatgaattcgccatcgccgaatacaatgctccttgctccaaggacttggggaatgcctag

SEQ ID NO: 19 - DNA, 4425 bp, Artificial Sequence
  derived and/or modified sequence
atgggcaagaacaagctgctgcaccccagcctggtgctgctgctgctggtgctgctgcccaccgacgccagcgtgagcggcaagccccagtacatggtgctggtgcccagcctgctgcacaccgagaccaccgagaagggctgcgtgctgctgagctacctgaacgagaccgtgaccgtgagcgccagcctggagagcgtgagaggcaacagaagcctgttcaccgacctggaggccgagaacgacgtgctgcactgcgtggccttcgccgtgcccaagagcagcagcaacgaggaggtgatgttcctgaccgtgcaggtgaagggccccacccaggagttcaagaagagaaccaccgtgatggtgaagaacgaggacagcctggtgttcgtgcagaccgacaagagcatctacaagcccggccagaccgtgaagttcagagtggtgagcatggacgagaacttccaccccctgaacgagctgatccccctggtgtacatccaggaccccaagggcaacagaatcgcccagtggcagagcttccagctggagggcggcctgaagcagttcagcttccccctgagcagcgagcccttccagggcagctacaaggtggtggtgcagaagaagagcggcggcagaaccgagcaccccttcaccgtggaggagttcgtgctgcccaagttcgaggtgcaggtgaccgtgcccaagatcatcaccatcctggaggaggagatgaacgtgagcgtgtgcggcctgtacacctacggcaagcccgtgcccggccacgtgaccgtgagcatctgcagaaagtacagcgacgccagcgactgccacggcgaggacagccaggccttctgcgagaagttcagcggccagctgaacagccacggctgcttctaccagcaggtgaagaccaaggtgttccagctgaagagaaaggagtacgagatgaagctgcacaccgaggcccagatccaggaggagggcaccgtggtggagctgaccggcagacagagcagcgagatcaccagaaccatcaccaagctgagcttcgtgaaggtggacagccacttcagacagggcatccccttcttcggccaggtgagactggtggacggcaagggcgtgcccatccccaacaaggtgatcttcatcagaggcaacgaggccaactactacagcaacgccaccaccgacgagcacggcctggtgcagttcagcatcaacaccaccaacgtgatgggcaccagcctgaccgtgagagtgaactacaaggacagaagcccctgctacggctaccagtgggtgagcgaggagcacgaggaggcccaccacaccgcctacctggtgttcagccccagcaagagcttcgtgcacctggagcccatgagccacgagctgccctgcggccacacccagaccgtgcaggcccactacatcctgaacggcggcaccctgctgggcctgaagaagctgagcttctactacctgatcatggccaagggcggcatcgtgagaaccggcacccacggcctgctggtgaagcaggaggacatgaagggccacttcagcatcagcatccccgtgaagagcgacatcgcccccgtggccagactgctgatctacgccgtgctgcccaccggcgacgtgatcggcgacagcgccaagtacgacgtggagaactgcctggccaacaaggtggacctgagcttcagccccagccagagcctgcccgccagccacgcccacctgagagtgaccgccgccccccagagcgtgtgcgccctgagagccgtggaccagagcgtgctgctgatgaagcccgacgccgagctgagcgccagcagcgtgtacaacctgctgcccgagaaggacctgaccggcttccccggccccctgaacgaccaggacaacgaggactgcatcaacagacacaacgtgtacatcaacggcatcacctacacccccgtgagcagcaccaacgagaaggacatgtacagcttcctggaggacatgggcctgaaggccttcaccaacagcaagatcagaaagcccaagatgtgcccccagctgcagcagtacgagatgcacggccccgagggcctgagagtgggcttctacgagagcgacgtgatgggcagaggccacgccagactggtgcacgtggaggagccccacaccgagaccgtgagaaagtacttccccgagacctggatctgggacctggtggtggtgaacagcgccggcgtggccgaggtgggcgtgaccgtgcccgacaccatcaccgagtggaaggccggcgccttctgcctgagcgaggacgccggcctgggcatcagcagcaccgccagcctgagagccttccagcccttcttcgtggagctgaccatgccctacagcgtgatcagaggcgaggccttcaccctgaaggccaccgtgctgaactacctgcccaagtgcatcagagtgagcgtgcagctggaggccagccccgccttcctggccgtgcccgtggagaaggagcaggccccccactgcatctgcgccaacggcagacagaccgtgagctgggccgtgacccccaagagcctgggcaacgtgaacttcaccgtgagcgccgaggccctggagagccaggagctgtgcggcaccgaggtgcccagcgtgcccgagcacggcagaaaggacaccgtgatcaagcccctgctggtggagcccgagggcctggagaaggagaccaccttcaacagcctgctgtgccccagcggcggcgaggtgagcgaggagctgagcctgaagctgccccccaacgtggtggaggagagcgccagagccagcgtgagcgtgctgggcgacatcctgggcagcgccatgcagaacacccagaacctgctgcagatgccctacggctgcggcgagcagaacatggtgctgttcgcccccaacatctacgtgctggactacctgaacgagacccagcagctgacccccgagatcaagagcaaggccatcggctacctgaacaccggctaccagagacagctgaactacaagcactacgacggcagctacagcaccttcggcgagagatacggcagaaaccagggcaacacctggctgaccgccttcgtgctgaagaccttcgcccaggccagagcctacatcttcatcgacgaggcccacatcacccaggccctgatctggctgagccagagacagaaggacaacggctgcttcagaagcagcggcagcctgctgaacaacgccatcaagggcggcgtggaggacgaggtgaccctgagcgcctacatcaccatcgccctgctggagatccccctgaccgtgacccaccccgtggtgagaaacgccctgttctgcctggagagcgcctggaagaccgcccaggagggcgaccacggcagccacgtgtacaccaaggccctgctggcctacgccttcgccctggccggcaaccaggacaagagaaaggaggtgctgaagagcctgaacgaggaggccgtgaagaaggacaacagcgtgcactgggagagaccccagaagcccaaggcccccgtgggccacttctacgagccccaggcccccagcgccgaggtggagatgaccagctacgtgctgctggcctacctgaccgcccagcccgcccccaccagcgaggacctgaccagcgccaccaacatcgtgaagtggatcaccaagcagcagaacgcccagggcggcttcagcagcacccaggacaccgtggtggccctgcacgccctgagcaagtacggcgccgccaccttcaccagaaccggcaaggccgcccaggtgaccatccagagcagcggcaccttcagcagcaagttccaggtggacaacaacaacagactgctgctgcagcaggtgagcctgcccgagctgcccggcgagtacagcatgaaggtgaccggcgagggctgcgtgtacctgcagaccagcctgaagtacaacatcctgcccgagaaggaggagttccccttcgccctgggcgtgcagaccctgccccagacctgcgacgagcccaaggcccacaccagcttccagatcagcctgagcgtgagctacaccggcagcagaagcgccagcaacatggccatcgtggacgtgaagatggtgagcggcttcatccccctgaagcccaccgtgaagatgctggagagaagcaaccacgtgagcagaaccgaggtgagcagcaaccacgtgctgatctacctggacaaggtgagcaaccagaccctgagcctgttcttcaccgtgctgcaggacgtgcccgtgagagacctgaagcccgccatcgtgaaggtgtacgactactacgagaccgacgagttcgccatcgccgagtacaacgccccctgcagcaaggacctgggcaacgcctag

SEQ ID NO: 20 - DNA, 507 bp, Artificial Sequence
  derived and/or modified sequence
atgggcaagaacaagctgctgcaccccagcctggtgctgctgctgctggtgctgctgcccaccgacgccagcgtgagcggcaagccccagtacatggtgctggtgcccagcctgctgcacaccgagaccaccgagaagggctgcgtgctgctgagctacctgaacgagaccgtgaccgtgagcgccagcctggagagcgtgagaggcaacagaagcctgttcaccgacctggaggccgagaacgacgtgctgcactgcgtggccttcgccgtgcccaagagcagcagcaacgaggaggtgatgttcctgaccgtgcaggtgaagggccccacccaggagttcaagaagagaaccaccgtgatggtgaagaacgaggacagcctggtgttcgtgcagaccgacaagagcatctacaagcccggccagaccgtgaagttcagagtggtgagcatggacgagaacttccaccccctgaacgagctgatccccctggtgtacatccagtag

SEQ ID NO: 21 - DNA, 4470 bp, Artificial Sequence
  derived and/or modified sequence
agagtgcagtacgtgtgcagcccccccgcccccagcttctgcaacatgggcaagaacaagctgctgcaccccagcctggtgctgctgctgctggtgctgctgcccaccgacgccagcgtgagcggcaagccccagtacatggtgctggtgcccagcctgctgcacaccgagaccaccgagaagggctgcgtgctgctgagctacctgaacgagaccgtgaccgtgagcgccagcctggagagcgtgagaggcaacagaagcctgttcaccgacctggaggccgagaacgacgtgctgcactgcgtggccttcgccgtgcccaagagcagcagcaacgaggaggtgatgttcctgaccgtgcaggtgaagggccccacccaggagttcaagaagagaaccaccgtgatggtgaagaacgaggacagcctggtgttcgtgcagaccgacaagagcatctacaagcccggccagaccgtgaagttcagagtggtgagcatggacgagaacttccaccccctgaacgagctgatccccctggtgtacatccaggaccccaagggcaacagaatcgcccagtggcagagcttccagctggagggcggcctgaagcagttcagcttccccctgagcagcgagcccttccagggcagctacaaggtggtggtgcagaagaagagcggcggcagaaccgagcaccccttcaccgtggaggagttcgtgctgcccaagttcgaggtgcaggtgaccgtgcccaagatcatcaccatcctggaggaggagatgaacgtgagcgtgtgcggcctgtacacctacggcaagcccgtgcccggccacgtgaccgtgagcatctgcagaaagtacagcgacgccagcgactgccacggcgaggacagccaggccttctgcgagaagttcagcggccagctgaacagccacggctgcttctaccagcaggtgaagaccaaggtgttccagctgaagagaaaggagtacgagatgaagctgcacaccgaggcccagatccaggaggagggcaccgtggtggagctgaccggcagacagagcagcgagatcaccagaaccatcaccaagctgagcttcgtgaaggtggacagccacttcagacagggcatccccttcttcggccaggtgagactggtggacggcaagggcgtgcccatccccaacaaggtgatcttcatcagaggcaacgaggccaactactacagcaacgccaccaccgacgagcacggcctggtgcagttcagcatcaacaccaccaacgtgatgggcaccagcctgaccgtgagagtgaactacaaggacagaagcccctgctacggctaccagtgggtgagcgaggagcacgaggaggcccaccacaccgcctacctggtgttcagccccagcaagagcttcgtgcacctggagcccatgagccacgagctgccctgcggccacacccagaccgtgcaggcccactacatcctgaacggcggcaccctgctgggcctgaagaagctgagcttctactacctgatcatggccaagggcggcatcgtgagaaccggcacccacggcctgctggtgaagcaggaggacatgaagggccacttcagcatcagcatccccgtgaagagcgacatcgcccccgtggccagactgctgatctacgccgtgctgcccaccggcgacgtgatcggcgacagcgccaagtacgacgtggagaactgcctggccaacaaggtggacctgagcttcagccccagccagagcctgcccgccagccacgcccacctgagagtgaccgccgccccccagagcgtgtgcgccctgagagccgtggaccagagcgtgctgctgatgaagcccgacgccgagctgagcgccagcagcgtgtacaacctgctgcccgagaaggacctgaccggcttccccggccccctgaacgaccaggacaacgaggactgcatcaacagacacaacgtgtacatcaacggcatcacctacacccccgtgagcagcaccaacgagaaggacatgtacagcttcctggaggacatgggcctgaaggccttcaccaacagcaagatcagaaagcccaagatgtgcccccagctgcagcagtacgagatgcacggccccgagggcctgagagtgggcttctacgagagcgacgtgatgggcagaggccacgccagactggtgcacgtggaggagccccacaccgagaccgtgagaaagtacttccccgagacctggatctgggacctggtggtggtgaacagcgccggcgtggccgaggtgggcgtgaccgtgcccgacaccatcaccgagtggaaggccggcgccttctgcctgagcgaggacgccggcctgggcatcagcagcaccgccagcctgagagccttccagcccttcttcgtggagctgaccatgccctacagcgtgatcagaggcgaggccttcaccctgaaggccaccgtgctgaactacctgcccaagtgcatcagagtgagcgtgcagctggaggccagccccgccttcctggccgtgcccgtggagaaggagcaggccccccactgcatctgcgccaacggcagacagaccgtgagctgggccgtgacccccaagagcctgggcaacgtgaacttcaccgtgagcgccgaggccctggagagccaggagctgtgcggcaccgaggtgcccagcgtgcccgagcacggcagaaaggacaccgtgatcaagcccctgctggtggagcccgagggcctggagaaggagaccaccttcaacagcctgctgtgccccagcggcggcgaggtgagcgaggagctgagcctgaagctgccccccaacgtggtggaggagagcgccagagccagcgtgagcgtgctgggcgacatcctgggcagcgccatgcagaacacccagaacctgctgcagatgccctacggctgcggcgagcagaacatggtgctgttcgcccccaacatctacgtgctggactacctgaacgagacccagcagctgacccccgagatcaagagcaaggccatcggctacctgaacaccggctaccagagacagctgaactacaagcactacgacggcagctacagcaccttcggcgagagatacggcagaaaccagggcaacacctggctgaccgccttcgtgctgaagaccttcgcccaggccagagcctacatcttcatcgacgaggcccacatcacccaggccctgatctggctgagccagagacagaaggacaacggctgcttcagaagcagcggcagcctgctgaacaacgccatcaagggcggcgtggaggacgaggtgaccctgagcgcctacatcaccatcgccctgctggagatccccctgaccgtgacccaccccgtggtgagaaacgccctgttctgcctggagagcgcctggaagaccgcccaggagggcgaccacggcagccacgtgtacaccaaggccctgctggcctacgccttcgccctggccggcaaccaggacaagagaaaggaggtgctgaagagcctgaacgaggaggccgtgaagaaggacaacagcgtgcactgggagagaccccagaagcccaaggcccccgtgggccacttctacgagccccaggcccccagcgccgaggtggagatgaccagctacgtgctgctggcctacctgaccgcccagcccgcccccaccagcgaggacctgaccagcgccaccaacatcgtgaagtggatcaccaagcagcagaacgcccagggcggcttcagcagcacccaggacaccgtggtggccctgcacgccctgagcaagtacggcgccgccaccttcaccagaaccggcaaggccgcccaggtgaccatccagagcagcggcaccttcagcagcaagttccaggtggacaacaacaacagactgctgctgcagcaggtgagcctgcccgagctgcccggcgagtacagcatgaaggtgaccggcgagggctgcgtgtacctgcagaccagcctgaagtacaacatcctgcccgagaaggaggagttccccttcgccctgggcgtgcagaccctgccccagacctgcgacgagcccaaggcccacaccagcttccagatcagcctgagcgtgagctacaccggcagcagaagcgccagcaacatggccatcgtggacgtgaagatggtgagcggcttcatccccctgaagcccaccgtgaagatgctggagagaagcaaccacgtgagcagaaccgaggtgagcagcaaccacgtgctgatctacctggacaaggtgagcaaccagaccctgagcctgttcttcaccgtgctgcaggacgtgcccgtgagagacctgaagcccgccatcgtgaaggtgtacgactactacgagaccgacgagttcgccatcgccgagtacaacgccccctgcagcaaggacctgggcaacgcctag

SEQ ID NO: 22 - protein, 412 aa, Artificial Sequence
  derived and/or modified sequence
MAAALLARASGPARRALCPRAWRQLHTIYQSVELPETHQMLLQTCRDFAEKELFPIAAQVDKEHLFPAAQVKKMGGLGLLAMDVPEELGGAGLDYLAYAIAMEEISRGCASTGVIMSVNNSLYLGPILKFGSKEQKQAWVTPFTSGDKIGCFALSEPGNGSDAGAASTTARAEGDSWVLNGTKAWITNAWEASAAVVFASTDRALQNKGISAFLVPMPTPGLTLGKKEDKLGIRGSSTANLIFEDCRIPKDSILGEPGMGFKIAMQTLDMGRIGIASQALGIAQTALDCAVNYAENRMAFGAPLTKLQVIQFKLADMALALESARLLTWRAAMLKDNKKPFIKEAAMAKLAASEAATAISHQAIQILGGMGYVTEMPAERHYRDARITEIYEGTSEIQRLVIAGHLLRSYRS

SEQ ID NO: 23 - DNA, 1239 bp, Artificial Sequence
  derived and/or modified sequence
atggctgccgcgctactggccagggcctcagggcccgcccggcgcgctctttgcccaagagcctggcgtcagttgcacacaatttatcagagtgttgaactacccgagacacatcagatgttgttgcaaacatgtagggactttgctgaaaaagagttgtttcctatagccgcccaagtggacaaagagcatctgttcccggccgcccaagtgaaaaagatgggcggtctgggattgctggcaatggacgtcccggaagagctgggcggcgccggactcgactaccttgcctatgccattgccatggaggagatctctcgggggtgcgcttccactggcgttatcatgtctgtgaataatagcttgtacctcggtccaatattgaagttcggatccaaagagcagaagcaggcttgggtgacaccattcacctccggagataagattggctgcttcgcactgtctgagccagggaacggatccgatgccggcgctgcaagcaccaccgcacgcgctgagggagactcttgggttttgaacggtaccaaggcatggattaccaatgcctgggaagccagcgccgccgttgtgttcgcatcaactgatcgcgccctgcagaataaaggaatctctgccttcctggtgccgatgcctacccccggattgacacttggcaagaaagaggataagcttggaatcaggggcagctcaacagccaacctgatatttgaagattgcaggatcccaaaggattcaatcctgggagaaccaggaatgggcttcaagattgcaatgcagactctcgatatgggacggatcgggatcgcctctcaagctctcggaatcgcgcagactgcactggattgcgccgtcaattacgctgagaaccgaatggccttcggagcaccgttaaccaaattacaagtgatacagtttaaactcgcggatatggccttggccctcgagagtgctaggctcctaacatggcgggctgcaatgctgaaggacaacaagaagccatttattaaggaggccgcgatggcaaagctggccgcgtctgaggccgcaaccgctattagccaccaggctattcagatcttaggaggaatgggttacgtcacggagatgccagcggagcgacattatcgggacgctcggatcactgagatatatgagggtactagtgagattcagagactggtaatcgccggacatcttcttaggtcctatagatcatag

SEQ ID NO: 24 - DNA, 1239 bp, Artificial Sequence
  derived and/or modified sequence
atggctgctgccctgctggcccgggccagcggccctgcccggcgggccctgtgcccccgggcctggaggcagctgcacaccatctaccagagcgtggagctgcctgagacccaccagatgctgctgcagacctgccgggactttgctgagaaggagctgttccccatcgccgcccaggtggacaaggagcacctgtttcctgctgcccaggtgaagaagatgggcggcctgggcctgctggccatggatgtgcctgaggagctgggcggggccggcctggactacctggcctatgccatcgccatggaggagatcagccggggctgtgccagcactggagtcatcatgtctgtgaacaacagcctgtacctgggccccatcctgaagtttggcagcaaggagcagaagcaggcctgggtgacccccttcaccagcggggacaagattggctgctttgccctgtctgagcctggaaatggaagtgatgctggagctgccagcaccacagcccgggcagagggggacagctgggtgctgaatggcaccaaggcctggatcaccaatgcctgggaggccagcgctgctgtggtgtttgccagcacagaccgggccctgcagaacaagggcatcagcgccttcctggtgcccatgcccaccccaggcctgaccctgggcaagaaggaggacaagctgggcatccggggcagcagcacagccaacctgatctttgaggactgccgcatccccaaggacagcatcctgggggagcccggcatgggcttcaagatcgccatgcagaccctggacatgggcagaattggaattgccagccaggccctgggcatcgcccagacagccctggactgtgctgtgaactatgcagaaaataggatggccttcggggcccccctgaccaagctgcaggtgatccagttcaagctggccgacatggccctggccctggagagcgcccggctgctgacctggagggctgccatgctgaaggacaacaagaagcccttcatcaaggaggccgccatggccaagctggccgccagcgaggccgccacagccatcagccaccaggccatccagatcctgggcggcatgggctacgtgacagagatgcctgctgagcggcactacagagatgcccgcatcacagagatctatgagggcaccagcgagatccagaggctggtgattgctggccacctgctgcggagctaccgctcctag

SEQ ID NO: 25 - DNA, 1239 bp, Artificial Sequence
  derived and/or modified sequence
atggccgccgccctgctggcccgggccagcggccccgcccggcgggcgttgtgccccagggcttggcgtcagctacatacaatctaccagtccgtggagctgcccgaaacccaccagatgctgctgcagacatgtcgggattttgccgaaaaggaactcttccctatagctgctcaagttgacaaggagcatctgttccctgctgcccaggtgaaaaaaatgggaggcctaggactcttggccatggatgtgccagaggagcttggtggtgcgggcctcgactacttagcctacgctattgccatggaggaaatttccagggggtgcgcgagcacaggcgtaataatgtccgtgaataactcactgtacttaggcccaatcctgaagtttggcagcaaagagcagaaacaggcatgggtgactccctttactagcggcgacaaaataggctgtttcgccctgtctgagcccggcaatgggtctgatgccggagcggcgagcaccaccgcccgcgctgaaggcgacagctgggtgctcaatgggacaaaagcttggattacgaatgcttgggaagcaagcgcggccgtggtgttcgcatccaccgaccgtgccctgcaaaataagggtatttctgcttttctagtcccaatgcccactccagggctcactcttggcaagaaggaggataaactggggattcgaggaagctccacagcaaatctgatattcgaggactgcagaatccccaaggatagcattttgggtgaacccggcatgggcttcaaaattgctatgcagaccctggacatgggacggatcggaattgcctcccaggctctaggcatagcccagactgccttggattgtgctgtgaactatgcggagaatcgcatggccttcggagctcctctcacaaaactgcaggtgatacagtttaagcttgcagatatggcactcgcacttgagagcgcaaggcttctgacctggagagctgccatgctcaaagacaacaaaaaacctttcataaaagaggccgccatggctaagctggcagcctccgaggccgcgacggctatctctcatcaggctatacagattctgggggggatgggatatgtaacggagatgcccgcggagcgtcattatcgcgacgcgcgcataactgagatttatgagggaacctccgagatccagcgtctcgtcatcgctggtcacctcctgaggtcatacagaagctag

SEQ ID NO: 26 - DNA, 1239 bp, Artificial Sequence
  derived and/or modified sequence
atggcagcagcacttcttgctcgtgccagtggccctgctcggcgtgctttgtgcccccgagcttggcgacagctccataccatatatcagagtgttgaactgccagaaacccatcaaatgctgctacagacatgtcgggatttcgcagaaaaagaactttttccaattgcagcccaggttgataaagagcacttgtttcctgcggcacaggtgaagaagatgggtggactgggactcctagctatggacgtgcctgaggaactggggggagctggcttggattacttagcctacgccatcgccatggaagaaatttctcgcggttgcgcttccaccggagttatcatgagcgttaacaactcgctttacctgggacccatattgaaattcggctcaaaagagcaaaagcaggcttgggtaacaccattcactagcggcgacaaaatcgggtgtttcgcgttgagcgagcctggaaatgggagtgatgcgggagccgcaagcacgaccgccagagctgagggtgactcatgggtgcttaatggaacaaaggcatggatcaccaacgcttgggaggcaagcgcagctgttgttttcgcatccaccgaccgggcactgcagaataaaggaattagtgcctttctggtgcccatgcccacgccgggattgactcttgggaagaaagaagataaacttggaatccgcggaagctccactgccaacttaattttcgaggattgtcgcattccaaaggactctattctaggggagcctggaatgggctttaagatcgctatgcagaccctggacatgggacgaattggaatcgctagccaagccttggggatcgcccagaccgctctcgactgtgctgtgaactacgccgagaatcgcatggcctttggagccccactgactaaactgcaggttattcaattcaaattggctgatatggctctagcactggagagcgccagattgctaacgtggcgggctgcaatgcttaaagacaacaagaagccctttatcaaggaggcggcaatggccaagttggccgctagcgaggccgcaacggcgataagtcaccaggccatccaaattctcgggggtatgggatatgttaccgaaatgccagcagaacggcattacagagacgctaggatcacagagatctacgaggggaccagtgagatacaacggctcgtcattgccggtcaccttttgcgctcatacaggtcatag

SEQ ID NO: 27 - DNA, 1239 bp, Artificial Sequence
  derived and/or modified sequence
atggccgccgccctgctggccagagccagcggccccgccagaagagccctgtgccccagagcctggagacagctgcacaccatctaccagagcgtggagctgcccgagacccaccagatgctgctgcagacctgcagagacttcgccgagaaggagctgttccccatcgccgcccaggtggacaaggagcacctgttccccgccgcccaggtgaagaagatgggcggcctgggcctgctggccatggacgtgcccgaggagctgggcggcgccggcctggactacctggcctacgccatcgccatggaggagatcagcagaggctgcgccagcaccggcgtgatcatgagcgtgaacaacagcctgtacctgggccccatcctgaagttcggcagcaaggagcagaagcaggcctgggtgacccccttcaccagcggcgacaagatcggctgcttcgccctgagcgagcccggcaacggcagcgacgccggcgccgccagcaccaccgccagagccgagggcgacagctgggtgctgaacggcaccaaggcctggatcaccaacgcctgggaggccagcgccgccgtggtgttcgccagcaccgacagagccctgcagaacaagggcatcagcgccttcctggtgcccatgcccacccccggcctgaccctgggcaagaaggaggacaagctgggcatcagaggcagcagcaccgccaacctgatcttcgaggactgcagaatccccaaggacagcatcctgggcgagcccggcatgggcttcaagatcgccatgcagaccctggacatgggcagaatcggcatcgccagccaggccctgggcatcgcccagaccgccctggactgcgccgtgaactacgccgagaacagaatggccttcggcgcccccctgaccaagctgcaggtgatccagttcaagctggccgacatggccctggccctggagagcgccagactgctgacctggagagccgccatgctgaaggacaacaagaagcccttcatcaaggaggccgccatggccaagctggccgccagcgaggccgccaccgccatcagccaccaggccatccagatcctgggcggcatgggctacgtgaccgagatgcccgccgagagacactacagagacgccagaatcaccgagatctacgagggcaccagcgagatccagagactggtgatcgccggccacctgctgagaagctacagaagctag

SEQ ID NO: 28 - DNA, 1950 bp, Artificial Sequence
  derived and/or modified sequence
tggaggccccgccccctggccgcgagcgcacctcggccccgctcccgaggccctacgggcgtggcctctgtcccgggtcccgccccccagcactccggaacagcgcgctcgcagcgggaggtcgcgaagcctgggactgtgtctgtcgcccatggccgccgcgctgctcgcccgggcctcgggccctgcccgcagagctctctgtcctagggcctggcggcagttacacaccatctaccagtctgtggaactgcccgagacacaccagatgttgctccagacatgccgggactttgccgagaaggagttgtttcccattgcagcccaggtggataaggaacatctcttcccagcggctcaggtgaagaagatgggcgggcttgggcttctggccatggacgtgcccgaggagcttggcggtgctggcctcgattacctggcctacgccatcgccatggaggagatcagccgtggctgcgcctccaccggagtcatcatgagtgtcaacaactctctctacctggggcccatcttgaagtttggctccaaggagcagaagcaggcgtgggtcacgcctttcaccagtggtgacaaaattggctgctttgccctcagcgaaccagggaacggcagtgatgcaggagctgcgtccaccaccgcccgggccgagggcgactcatgggttctgaatggaaccaaagcctggatcaccaatgcctgggaggcttcggctgccgtggtctttgccagcacggacagagccctgcaaaacaagggcatcagtgccttcctggtccccatgccaacgcctgggctcacgttggggaagaaagaagacaagctgggcatccggggctcatccacggccaacctcatctttgaggactgtcgcatccccaaggacagcatcctgggggagccagggatgggcttcaagatagccatgcaaaccctggacatgggccgcatcggcatcgcctcccaggccctgggcattgcccagaccgccctcgattgtgctgtgaactacgctgagaatcgcatggccttcggggcgcccctcaccaagctccaggtcatccagttcaagttggcagacatggccctggccctggagagtgcccggctgctgacctggcgcgctgccatgctgaaggataacaagaagcctttcatcaaggaggcagccatggccaagctggccgcctcggaggccgcgaccgccatcagccaccaggccatccagatcctgggcggcatgggctacgtgacagagatgccggcagagcggcactaccgcgacgcccgcatcactgagatctacgagggcaccagcgaaatccagcggctggtgatcgccgggcatctgctcaggagctaccggagctgagcccgcggcggactgccccaggactgcgggaaggcgcgggagccaggggcctccaccccaaccccggctcagagactgggcggcccggcgggggctccctggggaccccagatgggctcagtgctgccacccagatcagatcacatgggaatgaggccctccgaccattggcagctccgcctctgggcctttccgcctcctcaccactgtgcctcaagttcctcatctaagtggccctggcctcctgggggcggggttgtgggggggctgagcgacactcagggacacctcagttgtcctcccgcgggccctggtgccctggcatgaaggcccagtgcgacaggcccttggtggggtctgtcttttccttgaggtcagaggtcaggagcagggctggggtcaggatgacgaggcctggggtcctggtgttgggcaggtggtggggctgggccatggagctggcccagaggcccctcagccctttgtaaagtctgatgaaggcaggggtggtgattcatgctgtgtgactgactgtgggtaataaacacacctgtccccca

SEQ ID NO: 29 - protein, 655 aa, Artificial Sequence
  derived and/or modified sequence
MQAARMAASLGRQLLRLGGGSSRLTALLGQPRPGPARRPYAGGAAQLALDKSDSHPSDALTRKKPAKAESKSFAVGMFKGQLTTDQVFPYPSVLNEEQTQFLKELVEPVSRFFEEVNDPAKNDALEMVEETTWQGLKELGAFGLQVPSELGGVGLCNTQYARLVEIVGMHDLGVGITLGAHQSIGFKGILLFGTKAQKEKYLPKLASGETVAAFCLTEPSSGSDAASIRTSAVPSPCGKYYTLNGSKLWISNGGLADIFTVFAKTPVTDPATGAVKEKITAFVVERGFGGITHGPPEKKMGIKASNTAEVFFDGVRVPSENVLGEVGSGFKVAMHILNNGRFGMAAALAGTMRGIIAKAVDHATNRTQFGEKIHNFGLIQEKLARMVMLQYVTESMAYMVSANMDQGATDFQIEAAISKIFGSEAAWKVTDECIQIMGGMGFMKEPGVERVLRDLRIFRIFEGTNDILRLFVALQGCMDKGKELSGLGSALKNPFGNAGLLLGEAGKQLRRRAGLGSGLSLSGLVHPELSRSGELAVRALEQFATVVEAKLIKHKKGIVNEQFLLQRLADGAIDLYAMVVVLSRASRSLSEGHPTAQHEKMLCDTWCIEAAARIREGMAALQSDPWQQELYRNFKSISKALVERGGVVTSNPLGF

SEQ ID NO: 30 - protein, 701 aa, Artificial Sequence
  derived and/or modified sequence
MPRGPQPSAARCTVDDESGLGAPGRGRAGRQSWVRARASGARRDSEMQAARMAASLGRQLLRLGGGSSRLTALLGQPRPGPARRPYAGGAAQLALDKSDSHPSDALTRKKPAKAESKSFAVGMFKGQLTTDQVFPYPSVLNEEQTQFLKELVEPVSRFFEEVNDPAKNDALEMVEETTWQGLKELGAFGLQVPSELGGVGLCNTQYARLVEIVGMHDLGVGITLGAHQSIGFKGILLFGTKAQKEKYLPKLASGETVAAFCLTEPSSGSDAASIRTSAVPSPCGKYYTLNGSKLWISNGGLADIFTVFAKTPVTDPATGAVKEKITAFVVERGFGGITHGPPEKKMGIKASNTAEVFFDGVRVPSENVLGEVGSGFKVAMHILNNGRFGMAAALAGTMRGIIAKAVDHATNRTQFGEKIHNFGLIQEKLARMVMLQYVTESMAYMVSANMDQGATDFQIEAAISKIFGSEAAWKVTDECIQIMGGMGFMKEPGVERVLRDLRIFRIFEGTNDILRLFVALQGCMDKGKELSGLGSALKNPFGNAGLLLGEAGKQLRRRAGLGSGLSLSGLVHPELSRSGELAVRALEQFATVVEAKLIKHKKGIVNEQFLLQRLADGAIDLYAMVVVLSRASRSLSEGHPTAQHEKMLCDTWCIEAAARIREGMAALQSDPWQQELYRNFKSISKALVERGGVVTSNPLGF

SEQ ID NO: 31 - DNA, 1968 bp, Artificial Sequence
  derived and/or modified sequence
atgcaggcagcccgcatggcggcgagcctgggccgccagcttcttcgcctgggcggcggatcttctcgcctgacggccctgctcggccaacctaggccaggtcccgctcgacggccttacgcgggaggagccgcgcagctggctctcgacaagtcggactctcacccaagcgatgccctcacacgcaagaagcctgctaaggctgaatccaaaagcttcgctgttggaatgttcaaagggcagttgactaccgaccaggtcttcccatatccttctgtcttgaacgaggagcagacacagtttctgaaggagttggtcgagccggtctccaggtttttcgaagaagtgaacgatcctgctaagaacgacgcactggagatggtggaggaaactacctggcaggggctgaaggaactgggagcctttggactccaggtgccgtctgagttagggggggtgggcctgtgtaatactcaatatgcccgcttagtggagatcgtgggaatgcacgacctcggagtagggatcacattgggagcacaccagtcaattggcttcaaaggcattctcctgtttgggacgaaggcccaaaaagagaagtacctacccaagctggcaagcggggagacagtagcagccttttgcctcactgaacccagcagcggctcggacgccgcgagcattcgaacaagcgcagtgccaagtccgtgtgggaagtattatacactaaatggctctaaactttggatctccaacggaggcttggccgacattttcaccgtgttcgcgaagactccagttaccgaccccgctaccggggctgttaaagaaaagataacagcatttgtcgtcgagcggggcttcggcggtataacccacggtccgccagaaaagaagatgggcatcaaggcaagcaacactgccgaggttttttttgacggcgttcgagtgccttccgaaaacgtacttggtgaggtggggagcgggttcaaggtagccatgcacatcctcaataacggacgtttcgggatggccgctgctctcgcggggactatgagaggtatcatcgccaaggctgtggaccacgctaccaatagaacccagtttggagagaagatccataactttggcctgatccaggaaaagctggcaagaatggtgatgctccaatacgtgactgaaagtatggcctatatggtctccgccaacatggaccaaggggccactgactttcaaattgaggctgccatttcaaagatcttcggttccgaggccgcttggaaagtgaccgacgagtgtatacagatcatgggtggcatgggcttcatgaaggaacctggggtggagcgcgtgctccgggacctgaggattttccgaatatttgagggcacaaatgacatcctacggcttttcgtggcactgcagggatgcatggacaaggggaaggagctgtcaggccttggctccgcacttaaaaacccgttcggcaacgctggattgctcctaggcgaagccggtaagcagttgaggcgaagagcgggacttgggtctggactgtcactctctggattagtgcaccctgagttgagtcgttcaggggagctggctgtccgagccttggagcagtttgccaccgtggtggaggcaaaactcatcaagcataaaaagggaattgtcaacgaacagtttctcctccagcgcttggctgacggcgccattgacctgtacgccatggtagtcgtgctctcacgagcatcccgcagcttgagcgaggggcacccaacggcccagcacgaaaagatgttgtgcgatacctggtgcatcgaagctgccgccagaatccgagaagggatggctgcgctgcaatccgatccctggcagcaagagctctatagaaatttcaaatctatctcgaaagctttagtggagagagggggcgtggtcacaagcaatccccttggcttctag

SEQ ID NO: 32 - DNA, 2106 bp, Artificial Sequence
  derived and/or modified sequence
atgcccaggggcccccagccaagcgcagccagatgtaccgttgatgacgaatccggcctgggagcccccggcagggggagagcaggtagacagtcctgggtgcgcgctagggctagcggcgcccggcgcgactccgagatgcaagcggcacgcatggctgcgtccttggggaggcagctcctgaggctcggtggcgggagctcccgcctcacagccctgctgggacaacccagacctggccccgcccgtcgtccttacgcgggaggggcggcccagcttgctctggacaaatcagactcacatccgtctgacgctttaacaagaaaaaaacctgctaaggcagaatcaaagtcttttgctgtcgggatgttcaaaggccaattgacaactgaccaagtcttcccttacccatccgtgctgaatgaggagcaaactcagttcctaaaggagctggtggagcctgtttcacgtttctttgaggaagtgaacgatccagccaaaaatgatgcgctcgagatggtggaggagactacctggcaggggctgaaagagctaggagcttttggattacaggtaccgtcagagttgggaggcgtcggactttgcaatacccagtacgcaaggctggtggaaattgtggggatgcacgatcttggagtcggtatcaccctaggggcccatcagagcatcggcttcaaaggtattttgctctttgggactaaagctcagaaagaaaagtatcttcctaagttagcttctggcgagacagtggcggccttttgcctgacagagccctcttccggttctgacgcagcatctatccgaacaagcgccgtgccttccccttgtggaaaatattacactttaaatggatccaagctatggatttcgaacggaggtctggctgacatttttaccgtgttcgcaaagaccccagtgacagatccagccactggggccgtcaaagaaaaaatcacggccttcgtggtggagcgggggtttggaggcatcacccatggcccgcctgagaaaaagatgggaattaaggcgagcaatacagcagaggttttctttgatggcgtgcgcgtgcccagcgaaaacgtgttgggagaagttggatctggattcaaggtggctatgcatattcttaataatggacgattcggaatggctgctgctctagccggtacaatgaggggaatcatcgcgaaggctgtcgaccacgctactaatcggacacagttcggcgaaaagatacacaactttggtctgatccaggagaaactggcacgcatggtgatgctgcaatacgtgaccgaaagtatggcctacatggtgagcgctaatatggaccagggcgccaccgattttcaaattgaggctgccatctccaaaattttcggaagcgaggccgcctggaaggttactgacgagtgtatccagatcatgggcggcatggggttcatgaaagaacctggcgttgaaagggtgctgagggatctccgcatcttccgaatttttgaaggcactaatgacatactccggctgttcgtcgcacttcaagggtgtatggacaagggaaaggaactcagcggactcggctctgccctcaaaaacccttttggcaacgccggccttcttctgggagaggcggggaagcagctgaggagacgcgccggactcggcagcgggttgagtttgtccggtctggtgcaccctgaactttctcggtccggagagttagcggtgagagcccttgaacagtttgcaaccgtggtcgaagctaagctaatcaagcataagaagggtatcgtgaacgagcagttcttactgcagagattggcagacggagcaattgatctgtacgccatggtggtcgtgctgtcgagggcatcacgatcccttagtgagggacacccgaccgcccagcatgagaaaatgctttgcgatacatggtgcattgaggcggctgctaggattcgggagggtatggcggcgttgcagagtgatccttggcagcaggagttataccggaactttaagagcattagcaaagcgctcgtcgaacgagggggagtggttaccagcaatccccttggtttttag

SEQ ID NO: 33 - DNA, 2106 bp, Artificial Sequence
  derived and/or modified sequence
atgcctcgcggtcctcagccgagcgctgctaggtgcaccgttgacgatgagtcaggactgggcgcgccagggaggggccgggccgggaggcagtcatgggttagggccagggcgtctggagctcgccgagacagtgagatgcaggctgcacgtatggccgccagtctggggaggcagctgctcagattagggggcgggtctagcaggctaactgctttacttgggcagccacgaccaggaccagccaggcggccatacgcgggaggggccgctcagctggccctggataagagtgacagtcacccctccgatgctctgacccgaaagaagcccgccaaagcagagtccaagagttttgcagtgggtatgttcaaaggccagttaacaacagatcaggtttttccttacccatccgtgcttaatgaggaacagactcagtttctaaaggaactggtggagcccgtctcacgcttctttgaggaggtaaatgatcccgccaagaatgacgctctggaaatggtagaggagacaacctggcagggactgaaggagttgggcgcattcggtctccaggtccctagcgaacttggcggggtcgggctgtgcaatactcaatacgctagactggtggaaatcgtgggaatgcatgatttgggtgtcgggattactctgggagcacatcagtccataggtttcaagggcatccttctgttcgggacgaaagctcaaaaagagaagtatctgcccaagctggcgagcggagaaactgtggctgccttctgtctcacggagcccagctccggtagtgatgccgcatctattagaacgagtgctgttccatctccatgcggaaagtattacacactgaatggaagtaaactttggatctcgaatggcggcctcgcagacatcttcactgtttttgccaagacaccagttacggatccggctaccggagcagtcaaggaaaagatcaccgccttcgtcgtcgagcgcgggttcgggggcattacccatggtcctccagagaagaaaatggggattaaggccagtaacacagccgaggtgttctttgacggtgttcgggtgcccagtgagaatgttctcggcgaggtaggttccggctttaaggtagcaatgcatatcctcaacaacggcaggttcggaatggcagcagctctagcgggtactatgcgcggcatcattgccaaagccgtcgatcacgctactaaccgcacgcagtttggcgagaagattcataattttggtctgatccaggagaaactagcgagaatggtaatgcttcagtacgtcaccgagtcgatggcctatatggtcagtgctaacatggatcaaggagcgactgactttcaaatcgaagcggccattagcaaaattttcggttcagaggcggcctggaaggtgaccgatgaatgcattcagattatgggaggcatgggattcatgaaagaacccggagtggagagagtcctgagagatctcagaatattccggatctttgaaggcactaatgatatcttgcggctgtttgtggctctacagggttgtatggataagggcaaggaactctccggcttgggaagcgctctaaaaaacccattcggcaatgcaggtttgctgctcggcgaagccggtaagcaactgcgccgccgcgcaggattagggagcggcctgagcctgtccggactcgtgcacccagagctctcccgcagcggggagctggccgtgagggccctagagcaatttgctacggtagtcgaggcaaaattgatcaagcataaaaaaggcatcgtcaacgaacagtttcttctgcaaaggctggcggacggagccattgatctctatgctatggtcgtagtgctctccagggcttcccgctctctatcagagggccatcctactgcccagcatgagaagatgctctgcgacacttggtgcatcgaagccgccgcccgcatccgtgaaggcatggccgccctacagtcagacccctggcagcaggaactgtacagaaattttaaaagcatctcaaaagcgctcgtggagagaggcggtgtggtgacttcaaatcctctgggtttctag

SEQ ID NO: 34 - DNA, 1968 bp, Artificial Sequence
  derived and/or modified sequence
atgcaggccgccaggatggccgccagcctgggccggcagctgctgcggctgggcggcggcagcagccggctgacagccctgctgggccagcccaggcctggccctgcccggcggccctatgccggcggggccgcccagctggccctggacaagagtgacagccaccccagtgatgccctgaccaggaagaagccagccaaggccgagagcaagagctttgctgtgggcatgttcaagggccagctgaccacagaccaggtgttcccctaccccagcgtgctgaatgaggagcagacccagttcctgaaggagctggtggagcctgtgagccgcttctttgaggaggtgaatgaccctgccaagaatgatgccctggagatggtggaggagaccacctggcagggcctgaaggagctgggcgccttcggcctgcaggtgcccagcgagctgggcggcgtgggcctgtgcaacacccagtatgcccggctggtggagatcgtgggcatgcatgacctgggcgtgggcatcaccctgggcgcccaccagagcatcggcttcaagggcatcctgctgtttggcaccaaggcccagaaggagaagtacctgcccaagctggccagcggggagaccgtggccgccttctgcctgacagagcccagcagcggcagtgatgctgccagcatccgcaccagcgctgtgcccagcccctgtgggaagtactacaccctgaatggcagcaagctgtggatcagcaatggaggcctggccgacatcttcaccgtgtttgccaagacccctgtgacagatcctgccaccggggctgtgaaggagaagatcacagcctttgtggtggagcggggctttggaggcatcacccacggccccccagagaagaagatgggcatcaaggccagcaacacagctgaggtgttctttgatggagtgcgggtgcccagtgaaaatgtgctgggggaggtgggcagcggcttcaaggtggccatgcacatcctgaacaacggccgcttcggcatggccgccgccctggccggcaccatgaggggcatcatcgccaaggctgtggaccacgccaccaacagaacccagtttggagagaagatccacaactttggcctcatccaggagaagctggccaggatggtgatgctgcagtatgtgacagagagcatggcctacatggtgtctgccaacatggaccagggcgccacagacttccagattgaagctgccatcagcaagatctttggaagtgaagctgcctggaaggtgacagatgagtgcatccagatcatgggcggcatgggcttcatgaaggagcccggggtggagcgggtgctgcgggacctgcgcatcttccgcatctttgagggcaccaatgacatcctgcggctgtttgtggccctgcagggctgcatggacaagggcaaggagctgagcggcctgggcagcgccctgaagaacccctttggaaatgccggcctgctgctgggggaggccggcaagcagctgcggaggagagctggcctgggcagcggcctgagcctgagcggcctggtgcaccctgagctgagccgcagcggggagctggccgtgcgggccctggagcagtttgccaccgtggtggaggccaagctgatcaagcacaagaagggcatcgtgaatgagcagttcctgctgcagaggctggctgatggagccatcgacctgtatgccatggtggtggtgctgagccgggccagccgcagcctgtctgagggccaccccacagcccagcacgagaagatgctgtgtgacacctggtgcatcgaggccgccgcccgcatccgggagggcatggccgccctgcagagcgacccctggcagcaggagctgtacagaaacttcaagagcatcagcaaggccctggtggagcggggcggcgtggtgaccagcaaccccctgggcttctag

SEQ ID NO: 35 - DNA, 2106 bp, Artificial Sequence
  derived and/or modified sequence
atgccccggggcccccagcccagcgctgcccgctgcaccgtggatgatgagagcggcctgggcgcccctggccggggccgggccggccggcagagctgggtgcgggcccgggccagcggggcccggcgggacagcgagatgcaggccgccaggatggccgccagcctgggccggcagctgctgcggctgggcggcggcagcagccggctgacagccctgctgggccagcccaggcctggccctgcccggcggccctatgccggcggggccgcccagctggccctggacaagagtgacagccaccccagtgatgccctgaccaggaagaagccagccaaggccgagagcaagagctttgctgtgggcatgttcaagggccagctgaccacagaccaggtgttcccctaccccagcgtgctgaatgaggagcagacccagttcctgaaggagctggtggagcctgtgagccgcttctttgaggaggtgaatgaccctgccaagaatgatgccctggagatggtggaggagaccacctggcagggcctgaaggagctgggcgccttcggcctgcaggtgcccagcgagctgggcggcgtgggcctgtgcaacacccagtatgcccggctggtggagatcgtgggcatgcatgacctgggcgtgggcatcaccctgggcgcccaccagagcatcggcttcaagggcatcctgctgtttggcaccaaggcccagaaggagaagtacctgcccaagctggccagcggggagaccgtggccgccttctgcctgacagagcccagcagcggcagtgatgctgccagcatccgcaccagcgctgtgcccagcccctgtgggaagtactacaccctgaatggcagcaagctgtggatcagcaatggaggcctggccgacatcttcaccgtgtttgccaagacccctgtgacagatcctgccaccggggctgtgaaggagaagatcacagcctttgtggtggagcggggctttggaggcatcacccacggccccccagagaagaagatgggcatcaaggccagcaacacagctgaggtgttctttgatggagtgcgggtgcccagtgaaaatgtgctgggggaggtgggcagcggcttcaaggtggccatgcacatcctgaacaacggccgcttcggcatggccgccgccctggccggcaccatgaggggcatcatcgccaaggctgtggaccacgccaccaacagaacccagtttggagagaagatccacaactttggcctcatccaggagaagctggccaggatggtgatgctgcagtatgtgacagagagcatggcctacatggtgtctgccaacatggaccagggcgccacagacttccagattgaagctgccatcagcaagatctttggaagtgaagctgcctggaaggtgacagatgagtgcatccagatcatgggcggcatgggcttcatgaaggagcccggggtggagcgggtgctgcgggacctgcgcatcttccgcatctttgagggcaccaatgacatcctgcggctgtttgtggccctgcagggctgcatggacaagggcaaggagctgagcggcctgggcagcgccctgaagaacccctttggaaatgccggcctgctgctgggggaggccggcaagcagctgcggaggagagctggcctgggcagcggcctgagcctgagcggcctggtgcaccctgagctgagccgcagcggggagctggccgtgcgggccctggagcagtttgccaccgtggtggaggccaagctgatcaagcacaagaagggcatcgtgaatgagcagttcctgctgcagaggctggctgatggagccatcgacctgtatgccatggtggtggtgctgagccgggccagccgcagcctgtctgagggccaccccacagcccagcacgagaagatgctgtgtgacacctggtgcatcgaggccgccgcccgcatccgggagggcatggccgccctgcagagcgacccctggcagcaggagctgtacagaaacttcaagagcatcagcaaggccctggtggagcggggcggcgtggtgaccagcaaccccctgggcttctag

SEQ ID NO: 36 - DNA, 1968 bp, Artificial Sequence
  derived and/or modified sequence
atgcaggccgcccggatggccgccagcctgggccggcagctgctgaggctagggggcggatcatctaggctgacggctttactgggccagcccaggccaggcccagcgcggcgaccgtatgcaggtggtgcagcccagctggcactcgataaatctgactcccaccccagcgacgcgctgaccagaaaaaagccggctaaggccgagagcaaatcttttgccgtcgggatgttcaaaggacagttgacaacagaccaggtatttccgtatccaagcgtgctgaatgaggagcagacacaattcctgaaggagctagtcgagcccgtttcacggttctttgaagaggttaacgatccagctaagaacgatgccttagagatggtggaagagactacctggcaggggttgaaggaactgggcgcattcgggctccaagtgccaagcgagctggggggcgtgggcctgtgtaatacgcagtatgccaggctcgtcgagatcgttggcatgcacgacctgggcgtgggcatcacactgggggctcaccagtcaataggttttaaagggatccttctgttcggaactaaggcacagaaggagaaatacctgcccaagctcgcctccggagagacagtggctgcattctgtctcacggagccctctagcgggagtgacgcggcgtccattcggactagcgctgttccatcgccctgcggaaaatattatacgctcaacgggtccaagctgtggatctctaacggagggctggctgatatattcaccgtgttcgccaagacgccagtcacagatcctgcaacaggtgctgtgaaggaaaaaattaccgcctttgtggttgagcgagggtttggcggtattacccacggccctccagagaagaaaatgggcattaaagcttctaacaccgccgaggtgttctttgacggcgtcagggtccccagtgaaaacgtgcttggagaggtgggcagtgggttcaaagtcgcaatgcatatcctgaataacggccgcttcggaatggccgccgcgctggcaggcacaatgcggggtataatcgctaaggccgtggatcatgctacaaataggacccagttcggggagaagatccacaatttcggactgatccaggagaagctagcccgcatggtcatgctgcagtatgtaacagagtccatggcctatatggtgtcagctaacatggatcagggtgccacagacttccagatcgaagctgcgatctcaaagatattcggaagcgaagccgcttggaaagtaacagacgagtgtattcagatcatggggggaatggggttcatgaaagaaccaggcgtcgagcgcgtgctgcgggatttgcggatcttccgaatattcgaaggaaccaatgacatcctgcgcctgtttgtggcactgcaagggtgtatggataaagggaaagagctgagcgggctggggtcagcactgaagaacccattcggtaatgctggactgcttctgggagaagccggcaaacagctcagacggagggccggactcggcagtgggttgagtctaagcggcctggtgcatcctgagctctcaagatccggggagctggccgtccgggccctggagcagtttgcaacagtggttgaagcaaaattaattaaacataaaaaaggtattgttaacgagcagttcctgctgcagagattggctgacggagctatcgatctatacgccatggtcgtcgtgctgtcaagggcgtctaggtctctgtcagaggggcatccaaccgcccagcacgaaaagatgctatgcgatacttggtgtatcgaagctgccgcaagaatcagagaggggatggcagccctgcagtccgacccctggcaacaggagctgtacagaaatttcaagtccattagcaaggccctggtggaacggggaggtgtcgtgacatcaaatcctttgggattctag

SEQ ID NO: 37 - DNA, 2106 bp, Artificial Sequence
  derived and/or modified sequence
atgccccggggcccccagcccagcgccgcccggtgcaccgtggacgacgaatccggcctcggtgccccaggtcgcggcagagccggacgccagtcctgggtgcgtgctagggctagtggcgccagacgagattcagagatgcaggccgccagaatggccgcctcgctcggcagacaactgctgcggctgggagggggatcgtctcgtcttaccgctctgctagggcagcctaggcctggacctgccaggagaccatatgccggaggtgcagcccagctggcactcgataaatcggatagccacccatcagacgccctgactaggaagaagcctgctaaggctgagagtaagagcttcgccgtgggtatgttcaaggggcagcttacaacagaccaggtcttcccgtaccctagcgtcctcaatgaggaacagactcagttcctcaaagagctcgtggagcccgtttctcggttctttgaggaggttaacgaccctgctaaaaacgatgcactggaaatggtcgaggaaacgacctggcagggcctgaaagagctgggagcctttggactgcaagtcccatcagaattggggggggtggggctgtgtaacactcaatatgcaagattggtggagatcgtgggtatgcacgatctcggcgtcggaattaccctgggcgcccaccaatctattgggtttaaaggaattctactgtttggcacaaaggctcagaaagagaaatacctgcccaagttggcatccggtgaaactgtcgcagcattttgcttgactgagccctcttcgggatcagatgcggcttccattcgcacttctgcagttcctagcccatgtggaaagtactacaccctaaatgggtctaagctatggattagtaatgggggactggctgatatttttaccgtcttcgctaagacgcctgtaacagaccctgctaccggcgccgtgaaagaaaagatcacagcattcgtggtcgagagggggttcggaggcatcacccacggtccaccagaaaaaaaaatggggattaaagcctctaatacagctgaagtattttttgatggcgtgcgggtcccaagtgaaaatgttttgggtgaggtgggttccggatttaaggtcgcaatgcacatccttaacaacggccgctttggaatggccgccgccctggcaggtaccatgagggggataattgcaaaggcagtagatcacgcaactaatcggactcaattcggggaaaaaattcacaacttcggtctgatccaggaaaaactggccaggatggtcatgctgcaatacgttactgaaagcatggcgtacatggtctctgctaatatggaccagggcgcaacagattttcagatcgaagctgccatctctaaaatttttggttcagaggccgcgtggaaggtcacggatgagtgcatccaaatcatgggcggaatgggcttcatgaaagagcccggggttgaaagagtgcttcgtgatctccgcatcttcagaatctttgagggcactaatgacattctcaggctgttcgtggcactgcaggggtgcatggataagggaaaagaactatccgggctggggagtgccctaaaaaacccctttggtaacgccggattgcttcttggcgaggctggaaaacagctcaggaggagggccgggcttggttcagggctgtccctgagtggattggtgcacccagagctgtccagatcaggcgaattggccgtcagggcccttgaacagtttgccaccgtggtcgaagccaaattaataaagcacaagaagggcatcgtgaacgagcagtttctcctgcagcgcttagcagacggcgccatcgatctctatgctatggtggtggtcctgtccagggcatctcggagtctgagtgaagggcaccctaccgcccagcacgagaaaatgttgtgtgacacttggtgcattgaagcagcagctcgcattcgagagggcatggccgcattgcaatccgacccctggcagcaggagctatatagaaatttcaaaagtatctccaaggccttggtggagcgaggcggggtggtgacctctaaccccctgggcttttag

SEQ ID NO: 38 - DNA, 2106 bp, Artificial Sequence
  derived and/or modified sequence
atgccccggggcccccagcccagcgccgcccggtgcaccgtggacgacgagagtgggctcggggctcccggtcgaggaagagcagggcggcagtcctgggtgcgcgcgagagcctccggagcaagaagagatagcgagatgcaggcagcgcggatggccgccagtctgggacgtcagttactgcggttaggtggcggatcttctaggctcaccgcgctgctcggccagccaaggccagggcctgcgaggagaccttacgctggcggcgccgcacaattagctctggacaaatctgactcgcacccttctgatgcacttaccagaaaaaaacctgcaaaagcggaatccaagtccttcgccgttggcatgttcaaaggacaactaaccaccgaccaggtgttcccctatccatccgtactgaacgaggaacagacacagttcctgaaagagctcgtagagccagtgtcccgatttttcgaggaagttaatgaccccgctaagaacgacgctctagaaatggttgaagagacaacttggcagggcctgaaagaactgggtgcttttggcctgcaggtccccagcgagctgggcggggttggactgtgcaacacacaatacgctcggctcgtggagatcgttgggatgcacgatctgggagtgggaatcacattgggagcccatcagtctattggattcaagggtattctgctttttgggactaaggctcagaaggagaagtacctgcctaaactggcctccggtgaaaccgtcgcagccttctgtttaaccgagccaagctccgggtctgatgctgccagtattagaaccagtgccgtgccatccccttgcgggaaatactacacattaaacggttccaagctatggatcagcaatggcggactggctgacatcttcactgtgttcgccaagacaccggtgacagacccggcgacaggcgccgtcaaagagaaaatcaccgctttcgttgtggagcgggggttcggtggaatcacgcatggtccacccgagaagaagatgggaattaaagctagtaacacagccgaggttttctttgacggagtaagggtccccagtgaaaacgtgcttggcgaggtaggatctggttttaaagtggccatgcatattctgaacaacggacggttcggaatggcagccgctctggcaggcacgatgcggggaatcattgccaaagccgtcgaccacgccactaaccggactcaattcggcgagaaaattcataattttggactgattcaggagaagctcgcccgcatggtcatgctgcagtatgtcacggaaagcatggcctatatggtgagtgcaaacatggaccaaggagcgacagactttcaaattgaggcagcaatctctaagatattcgggagcgaggcagcatggaaggtgactgacgaatgtattcaaattatgggagggatgggatttatgaaggaacctggtgtagagagggtcttgcgagacctgagaatttttcggatcttcgaaggcaccaatgatattctaagactgtttgtggccctccagggttgcatggataaggggaaggagctaagcggactcggcagcgcccttaaaaatccgtttggtaatgctggcttgctactcggtgaggctggcaagcagttgagaagaagagcaggcctcggtagtggcctcagcttgagtggcctcgttcaccccgaactgtctagatctggggagctggctgtcagggctttggaacaatttgccacagtggtcgaggccaagcttattaaacacaagaagggcattgtaaatgaacagtttctgttacaacggctcgctgacggcgcgatagacctctatgccatggtcgtcgttctgtcccgggcttctaggtccctttccgagggccaccctactgcccagcacgaaaaaatgctgtgtgatacctggtgtatcgaagctgccgcccgtattcgagagggcatggcagctcttcaaagcgacccatggcagcaggaactatataggaattttaaatcgatttccaaagcgctagttgagagagggggagtagtcacctccaacccgctgggtttctag

SEQ ID NO: 39 - DNA, 1968 bp, Artificial Sequence
  derived and/or modified sequence
atgcaggcagccagaatggcagcatcgctggggcgtcagcttcttaggctgggaggtggctcctccagactgactgcactgttgggccagcctcgaccgggacctgctagaagaccctacgctgggggtgcagcccagctggcattggataagtctgacagccatccatccgacgcactaactagaaaaaagcctgccaaggcagaatctaagagctttgccgttggaatgttcaaaggccagctcacaaccgatcaggtattcccataccctagtgtcctcaacgaagagcagacacaattcctgaaggagttggtcgagcctgttagtagatttttcgaggaggttaacgatccggctaaaaatgatgcactggagatggtggaggaaactacctggcaagggctgaaggaactgggcgcttttggcctgcaggtgccttcggagctgggaggcgttggcctgtgtaatactcagtatgccaggttggttgagattgtcggtatgcacgatctaggcgtgggcattaccctcggcgctcaccagtctattggtttcaaagggatcctgttgttcggtactaaggcccaaaaagaaaagtatctgcccaaacttgccagtggcgagactgtggccgctttctgcttgaccgagccctcttccggcagcgacgccgctagcattcgaacatcggccgtaccatccccttgcggcaagtattatacactgaatggttccaagctatggataagcaatgggggtctcgccgatatcttcactgtattcgctaaaacacctgttacagaccccgctacgggagccgtcaaggagaagattactgcttttgtggtggagagggggtttggtggcattacccacggaccccctgaaaagaagatggggataaaggcctcgaatacagctgaggtattctttgatggcgtcagggtaccttctgagaacgttctgggggaggtgggctctggatttaaggtggccatgcacatcttaaacaatggaaggtttggcatggctgcagccctggcaggcaccatgcgcggaattatcgcaaaggctgtggatcacgcaactaatcggacacagtttggagaaaaaatccacaatttcggcctcatccaggagaaactggccagaatggttatgctgcagtacgttacagaaagtatggcatatatggtcagtgcgaatatggaccagggcgctacagacttccagatcgaagccgctatctccaagatatttggttccgaagccgcttggaaagtgacagacgagtgcatccagatcatgggcggtatgggctttatgaaagagccaggggtggagcgtgttctgcgcgacttaagaatatttcgaattttcgaggggacgaacgacattctaaggctgttcgtcgcgctgcagggctgcatggacaaagggaaagaactcagtggtttgggatccgccttaaagaatcctttcggtaatgccggactcctcctaggagaggccggtaaacagctgagacgcagagccggactaggctcgggcctgagcctcagcggccttgtgcatccggagctctctagatcgggagagctagctgttcgggcactggaacagttcgccaccgtagtggaggcaaagctgatcaaacacaaaaagggcattgtcaacgaacaattcttgctccagcgcctcgccgatggtgccattgacttgtatgcaatggtcgttgtgttaagtcgagcgtctagatccttgagcgagggccaccccacggcccaacacgagaaaatgctgtgcgacacttggtgcattgaggccgctgctcggattcgagaggggatggcagccctacagagtgatccttggcagcaagagctctacaggaacttcaagtctataagtaaagcactcgtggagcgcggtggcgtggtgacttctaaccctctgggattctag

SEQ ID NO: 40 - DNA, 2106 bp, Artificial Sequence
  derived and/or modified sequence
atgcctagaggtcctcaaccaagtgcagctagatgtacagttgatgatgaaagtggccttggcgcaccgggacgcggaagggctggtcggcagtcctgggtcagagcaagagcaagcggagcccgacgagactctgagatgcaggctgccagaatggcagccagccttggcaggcaactcttgaggttaggaggtggctcctccagactgacagctttactgggtcagccgcgtcccggacctgcaaggcgcccatatgctgggggagccgctcaattggccttggataagtctgactcacacccatctgatgctcttacgagaaagaagcctgccaaggcagagtcaaagtcctttgcggtgggcatgttcaagggccagctcacaacggaccaggtgttcccctaccctagcgtgcttaacgaggaacagacacaattcctgaaagagctcgtcgaaccagtcagtcggtttttcgaggaggttaacgaccccgcaaagaatgacgccctggaaatggtggaagaaaccacctggcagggactcaaagaacttggagcttttggactgcaggttccatccgaacttgggggagtgggcctttgtaatacacagtacgctcggcttgttgagatcgtgggcatgcacgatctgggagtggggatcaccctgggggcacaccaatcaattggttttaaaggcattttgctattcgggaccaaggcacagaaggagaaatatctgccaaaactggcatccggggaaacagtggccgctttttgcctgactgagccttcctcaggaagcgacgcagcatccatcaggaccagcgccgttccttctccatgtggcaaatattacacccttaacggctctaagctatggatcagcaatgggggtctggccgacatctttaccgtgttcgctaaaactcctgtgactgatccagctaccggcgctgtaaaggaaaagatcactgcgtttgtggtggagcggggatttggcggaattacgcacggacccccagagaaaaagatggggataaaggcttccaataccgctgaagtatttttcgacggcgttcgggtcccatctgaaaatgtgctcggcgaggtcggttctggttttaaagtagccatgcatatactaaacaatggacggttcggcatggcagctgcactggcaggaacaatgcgaggaatcatcgcaaaggctgttgaccacgccacgaaccgcacccagtttggggagaagattcacaactttggcctgatacaggagaagctggctagaatggtgatgcttcagtatgtgaccgaatctatggcttatatggtgagcgctaatatggatcagggagcaaccgatttccagattgaagccgcaatatctaagattttcggttccgaagctgcatggaaggtgactgatgaatgtatacagatcatgggagggatgggatttatgaaagaacccggtgtagaacgggtactgagagatcttcgcattttcaggatattcgagggcactaacgacatcctgcggctgttcgtcgcactccagggatgtatggacaagggaaaagagctcagcggactgggtagtgccctgaaaaatccattcggtaatgctggcctgctactgggtgaggccggaaagcagctgagacgacgagccggactcgggagtggcctgtcgttatctggattagtgcacccagagctatcccgctccggtgaactcgcagtgcgcgctctggagcaattcgccaccgtagttgaagccaagctgattaagcacaaaaagggcatcgtgaacgaacagtttctgttacagcgcttggccgatggcgctatcgacctgtatgctatggtcgttgtgcttagcagggcttccaggagcctttccgaggggcatccaactgcccagcatgaaaagatgctgtgcgatacttggtgcattgaagcagccgctaggatccgtgaaggtatggccgcactccagagcgatccctggcagcaggagttgtaccgaaactttaagtctatcagtaaagccttagtggagcgagggggagtggtcacatccaacccattaggtttttag

SEQ ID NO: 41 - DNA, 2106 bp, Artificial Sequence
  derived and/or modified sequence
atgccacggggtccccaaccctccgccgcacgctgcacagtggatgacgagtctggtttaggcgctcctggacggggaagggccggacgacaaagctgggtcagagcaagagctagtggcgctaggagagattctgaaatgcaggctgcccgtatggctgcctctttggggaggcaactgcttaggctgggcggaggcagttccagactcaccgctctgttggggcagcctcgcccaggccctgctaggaggccttatgccggaggagcggctcagctcgctctcgacaagagcgactcacacccaagtgatgctctaacgcgtaagaaacccgcaaaagcagaatccaagtccttcgctgtcggaatgtttaaaggtcagctgacaaccgaccaggttttcccttacccttctgtccttaatgaggagcagacgcaattcctcaaggaattggttgagcctgtgtccaggtttttcgaggaggtgaatgatccagctaagaatgacgcccttgagatggtggaggaaactacctggcagggattaaaagagctgggagccttcggcctgcaggtgcccagtgagcttggcggtgtaggactttgtaacactcaatatgcaaggcttgtagaaatcgttggcatgcacgacctgggcgtgggtataaccctcggagcacaccagagcatagggttcaagggcattttgctgttcggcaccaaggcccagaaagaaaagtatttacccaagctcgcatctggcgaaactgttgcagccttctgtctaaccgaaccaagctccggctctgacgcagctagcatccgaactagcgcggtgccatccccctgtgggaagtactacactctgaacggatcaaaactgtggatctctaatggcggactggcagacatttttaccgttttcgctaagacccctgttaccgacccagcaaccggggctgtgaaggaaaagatcacggcctttgtcgtggagagagggttcgggggtataacccacggcccacccgaaaaaaagatgggaattaaagcgtccaacacagccgaggttttcttcgacggggtgcgtgtgccaagtgaaaatgtgcttggggaagtcggctccggctttaaggtggctatgcacatattaaacaacggtcgatttggtatggcagccgctctggcaggtactatgcgcggaataatagccaaagccgtggatcacgccacaaaccgcacgcagtttggggagaaaatccacaatttcggccttatccaagaaaaattggcgagaatggtaatgttgcagtacgtgactgagtcaatggcctacatggtgtccgcgaacatggaccagggcgcaacagacttccagattgaagccgctatctctaaaatttttggatctgaggccgcttggaaagtaaccgacgagtgtatacagataatgggaggcatgggcttcatgaaagagcccggtgtggagcgagtcctaagggatctgcgcatattcaggattttcgaggggaccaatgatattctgaggctgttcgtagctctgcagggttgcatggacaaaggcaaggagctgagcggcttgggcagcgccttaaagaatcctttcgggaatgccggactgctcctgggagaggccggaaaacagcttcgccgaagagctgggctcggcagcggactatctttatctggtcttgtgcatcccgagctgtcccgcagtggggaattggctgtccgggctctggaacagttcgccacagtcgttgaggccaagctcatcaaacacaagaaggggattgtgaatgagcagtttctgttgcagcgcttagccgatggagcaatcgacttgtatgccatggtggttgttttgtcccgcgcatcaaggagtttatctgagggtcatccaactgcccaacacgaaaaaatgctctgcgacacgtggtgcattgaggctgcagcaaggattcgcgagggaatggccgctctgcaatctgatccatggcagcaggagttgtatagaaatttcaagtccatttccaaggcactggttgagcgcggaggggttgtgaccagtaaccctctgggattttag

SEQ ID NO: 42 - DNA, 1968 bp, Artificial Sequence
  derived and/or modified sequence
atgcaggccgccagaatggccgccagcctgggcagacagctgctgagactgggcggcggcagcagcagactgaccgccctgctgggccagcccagacccggccccgccagaagaccctacgccggcggcgccgcccagctggccctggacaagagcgacagccaccccagcgacgccctgaccagaaagaagcccgccaaggccgagagcaagagcttcgccgtgggcatgttcaagggccagctgaccaccgaccaggtgttcccctaccccagcgtgctgaacgaggagcagacccagttcctgaaggagctggtggagcccgtgagcagattcttcgaggaggtgaacgaccccgccaagaacgacgccctggagatggtggaggagaccacctggcagggcctgaaggagctgggcgccttcggcctgcaggtgcccagcgagctgggcggcgtgggcctgtgcaacacccagtacgccagactggtggagatcgtgggcatgcacgacctgggcgtgggcatcaccctgggcgcccaccagagcatcggcttcaagggcatcctgctgttcggcaccaaggcccagaaggagaagtacctgcccaagctggccagcggcgagaccgtggccgccttctgcctgaccgagcccagcagcggcagcgacgccgccagcatcagaaccagcgccgtgcccagcccctgcggcaagtactacaccctgaacggcagcaagctgtggatcagcaacggcggcctggccgacatcttcaccgtgttcgccaagacccccgtgaccgaccccgccaccggcgccgtgaaggagaagatcaccgccttcgtggtggagagaggcttcggcggcatcacccacggcccccccgagaagaagatgggcatcaaggccagcaacaccgccgaggtgttcttcgacggcgtgagagtgcccagcgagaacgtgctgggcgaggtgggcagcggcttcaaggtggccatgcacatcctgaacaacggcagattcggcatggccgccgccctggccggcaccatgagaggcatcatcgccaaggccgtggaccacgccaccaacagaacccagttcggcgagaagatccacaacttcggcctgatccaggagaagctggccagaatggtgatgctgcagtacgtgaccgagagcatggcctacatggtgagcgccaacatggaccagggcgccaccgacttccagatcgaggccgccatcagcaagatcttcggcagcgaggccgcctggaaggtgaccgacgagtgcatccagatcatgggcggcatgggcttcatgaaggagcccggcgtggagagagtgctgagagacctgagaatcttcagaatcttcgagggcaccaacgacatcctgagactgttcgtggccctgcagggctgcatggacaagggcaaggagctgagcggcctgggcagcgccctgaagaaccccttcggcaacgccggcctgctgctgggcgaggccggcaagcagctgagaagaagagccggcctgggcagcggcctgagcctgagcggcctggtgcaccccgagctgagcagaagcggcgagctggccgtgagagccctggagcagttcgccaccgtggtggaggccaagctgatcaagcacaagaagggcatcgtgaacgagcagttcctgctgcagagactggccgacggcgccatcgacctgtacgccatggtggtggtgctgagcagagccagcagaagcctgagcgagggccaccccaccgcccagcacgagaagatgctgtgcgacacctggtgcatcgaggccgccgccagaatcagagagggcatggccgccctgcagagcgacccctggcagcaggagctgtacagaaacttcaagagcatcagcaaggccctggtggagagaggcggcgtggtgaccagcaaccccctgggcttctag

SEQ ID NO: 43 - DNA, 2106 bp, Artificial Sequence
  derived and/or modified sequence
atgcccagaggcccccagcccagcgccgccagatgcaccgtggacgacgagagcggcctgggcgcccccggcagaggcagagccggcagacagagctgggtgagagccagagccagcggcgccagaagagacagcgagatgcaggccgccagaatggccgccagcctgggcagacagctgctgagactgggcggcggcagcagcagactgaccgccctgctgggccagcccagacccggccccgccagaagaccctacgccggcggcgccgcccagctggccctggacaagagcgacagccaccccagcgacgccctgaccagaaagaagcccgccaaggccgagagcaagagcttcgccgtgggcatgttcaagggccagctgaccaccgaccaggtgttcccctaccccagcgtgctgaacgaggagcagacccagttcctgaaggagctggtggagcccgtgagcagattcttcgaggaggtgaacgaccccgccaagaacgacgccctggagatggtggaggagaccacctggcagggcctgaaggagctgggcgccttcggcctgcaggtgcccagcgagctgggcggcgtgggcctgtgcaacacccagtacgccagactggtggagatcgtgggcatgcacgacctgggcgtgggcatcaccctgggcgcccaccagagcatcggcttcaagggcatcctgctgttcggcaccaaggcccagaaggagaagtacctgcccaagctggccagcggcgagaccgtggccgccttctgcctgaccgagcccagcagcggcagcgacgccgccagcatcagaaccagcgccgtgcccagcccctgcggcaagtactacaccctgaacggcagcaagctgtggatcagcaacggcggcctggccgacatcttcaccgtgttcgccaagacccccgtgaccgaccccgccaccggcgccgtgaaggagaagatcaccgccttcgtggtggagagaggcttcggcggcatcacccacggcccccccgagaagaagatgggcatcaaggccagcaacaccgccgaggtgttcttcgacggcgtgagagtgcccagcgagaacgtgctgggcgaggtgggcagcggcttcaaggtggccatgcacatcctgaacaacggcagattcggcatggccgccgccctggccggcaccatgagaggcatcatcgccaaggccgtggaccacgccaccaacagaacccagttcggcgagaagatccacaacttcggcctgatccaggagaagctggccagaatggtgatgctgcagtacgtgaccgagagcatggcctacatggtgagcgccaacatggaccagggcgccaccgacttccagatcgaggccgccatcagcaagatcttcggcagcgaggccgcctggaaggtgaccgacgagtgcatccagatcatgggcggcatgggcttcatgaaggagcccggcgtggagagagtgctgagagacctgagaatcttcagaatcttcgagggcaccaacgacatcctgagactgttcgtggccctgcagggctgcatggacaagggcaaggagctgagcggcctgggcagcgccctgaagaaccccttcggcaacgccggcctgctgctgggcgaggccggcaagcagctgagaagaagagccggcctgggcagcggcctgagcctgagcggcctggtgcaccccgagctgagcagaagcggcgagctggccgtgagagccctggagcagttcgccaccgtggtggaggccaagctgatcaagcacaagaagggcatcgtgaacgagcagttcctgctgcagagactggccgacggcgccatcgacctgtacgccatggtggtggtgctgagcagagccagcagaagcctgagcgagggccaccccaccgcccagcacgagaagatgctgtgcgacacctggtgcatcgaggccgccgccagaatcagagagggcatggccgccctgcagagcgacccctggcagcaggagctgtacagaaacttcaagagcatcagcaaggccctggtggagagaggcggcgtggtgaccagcaaccccctgggcttctag

SEQ ID NO: 44 - DNA, 2287 bp, Artificial Sequence
  derived and/or modified sequence
tacagctcccagcatgccccggggcccgcaaccgtccgccgcccggtgcactgtggacgatgagtcagggttaggggcgccaggacgtgggcgtgcaggacgccagagctgggtcagagctcgagccagcggcgcccggagagattcggagatgcaggcggctcggatggccgcgagcttggggcggcagctgctgaggctcgggggcggaagctcgcggctcacggcgctcctggggcagccccggcccggccctgcccggcggccctatgccgggggtgccgctcagctggctctggacaagtcagattcccacccctctgacgctctgaccaggaaaaaaccggccaaggcggaatctaagtcctttgctgtgggaatgttcaaaggccagctcaccacagatcaggtgttcccatacccgtccgtgctcaacgaagagcagacacagtttcttaaagagctggtggagcctgtgtcccgtttcttcgaggaagtgaacgatcccgccaagaatgacgctctggagatggtggaggagaccacttggcagggcctcaaggagctgggggcctttggtctgcaagtgcccagtgagctgggtggtgtgggcctttgcaacacccagtacgcccgtttggtggagatcgtgggcatgcatgaccttggcgtgggcattaccctgggggcccatcagagcatcggtttcaaaggcatcctgctctttggcacaaaggcccagaaagaaaaatacctccccaagctggcatctggggagactgtggccgctttctgtctaaccgagccctcaagcgggtcagatgcagcctccatccgaacctctgctgtgcccagcccctgtggaaaatactataccctcaatggaagcaagctttggatcagtaatgggggcctagcagacatcttcacggtctttgccaagacaccagttacagatccagccacaggagccgtgaaggagaagatcacagcttttgtggtggagaggggcttcgggggcattacccatgggccccctgagaagaagatgggcatcaaggcttcaaacacagcagaggtgttctttgatggagtacgggtgccatcggagaacgtgctgggtgaggttgggagtggcttcaaggttgccatgcacatcctcaacaatggaaggtttggcatggctgcggccctggcaggtaccatgagaggcatcattgctaaggcggtagatcatgccactaatcgtacccagtttggggagaaaattcacaactttgggctgatccaggagaagctggcacggatggttatgctgcagtatgtaactgagtccatggcttacatggtgagtgctaacatggaccagggagccacggacttccagatagaggccgccatcagcaaaatctttggctcggaggcagcctggaaggtgacagatgaatgcatccaaatcatggggggtatgggcttcatgaaggaacctggagtagagcgtgtgctccgagatcttcgcatcttccggatctttgaggggacaaatgacattcttcggctgtttgtggctctgcagggctgtatggacaaaggaaaggagctctctgggcttggcagtgctctaaagaatccctttgggaatgctggcctcctgctaggagaggcaggcaaacagctgaggcggcgggcagggctgggcagcggcctgagtctcagcggacttgtccacccggagttgagtcggagtggcgagctggcagtacgggctctggagcagtttgccactgtggtggaggccaagctgataaaacacaagaaggggattgtcaatgaacagtttctgctgcagcggctggcagacggggccatcgacctctatgccatggtggtggttctctcgagggcctcaagatccctgagtgagggccaccccacggcccagcatgagaaaatgctctgtgacacctggtgtatcgaggctgcagctcggatccgagagggcatggccgccctgcagtctgacccctggcagcaagagctctaccgcaacttcaaaagcatctccaaggccttggtggagcggggtggtgtggtcaccagcaacccacttggcttctgaatactcccggccagggcctgtcccagttatgtgccttccctcaagccaaagccgaagcccctttccttaaggccctggtttgtcccgaaggggcctagtgttcccagcactgtgcctgctctcaagagcacttactgcctcgcaaataataaaaatttctagccagtc

SEQ ID NO: 45 - DNA, 2312 bp, Artificial Sequence
  derived and/or modified sequence
gcagggccgggctccagggaactacagctcccagcatgccccggggcccgcaaccgtccgccgcccggtgcactgtggacgatgagtcagggttaggggcgccaggacgtgggcgtgcaggacgccagagctgggtcagagctcgagccagcggcgcccggagagattcggagatgcaggcggctcggatggccgcgagcttggggcggcagctgctgaggctcgggggcggaagctcgcggctcacggcgctcctggggcagccccggcccggccctgcccggcggccctatgccgggggtgccgctcagctggctctggacaagtcagattcccacccctctgacgctctgaccaggaaaaaaccggccaaggcggaatctaagtcctttgctgtgggaatgttcaaaggccagctcaccacagatcaggtgttcccatacccgtccgtgctcaacgaagagcagacacagtttcttaaagagctggtggagcctgtgtcccgtttcttcgaggaagtgaacgatcccgccaagaatgacgctctggagatggtggaggagaccacttggcagggcctcaaggagctgggggcctttggtctgcaagtgcccagtgagctgggtggtgtgggcctttgcaacacccagtacgcccgtttggtggagatcgtgggcatgcatgaccttggcgtgggcattaccctgggggcccatcagagcatcggtttcaaaggcatcctgctctttggcacaaaggcccagaaagaaaaatacctccccaagctggcatctggggagactgtggccgctttctgtctaaccgagccctcaagcgggtcagatgcagcctccatccgaacctctgctgtgcccagcccctgtggaaaatactataccctcaatggaagcaagctttggatcagtaatgggggcctagcagacatcttcacggtctttgccaagacaccagttacagatccagccacaggagccgtgaaggagaagatcacagcttttgtggtggagaggggcttcgggggcattacccatgggccccctgagaagaagatgggcatcaaggcttcaaacacagcagaggtgttctttgatggagtacgggtgccatcggagaacgtgctgggtgaggttgggagtggcttcaaggttgccatgcacatcctcaacaatggaaggtttggcatggctgcggccctggcaggtaccatgagaggcatcattgctaaggcggtagatcatgccactaatcgtacccagtttggggagaaaattcacaactttgggctgatccaggagaagctggcacggatggttatgctgcagtatgtaactgagtccatggcttacatggtgagtgctaacatggaccagggagccacggacttccagatagaggccgccatcagcaaaatctttggctcggaggcagcctggaaggtgacagatgaatgcatccaaatcatggggggtatgggcttcatgaaggaacctggagtagagcgtgtgctccgagatcttcgcatcttccggatctttgaggggacaaatgacattcttcggctgtttgtggctctgcagggctgtatggacaaaggaaaggagctctctgggcttggcagtgctctaaagaatccctttgggaatgctggcctcctgctaggagaggcaggcaaacagctgaggcggcgggcagggctgggcagcggcctgagtctcagcggacttgtccacccggagttgagtcggagtggcgagctggcagtacgggctctggagcagtttgccactgtggtggaggccaagctgataaaacacaagaaggggattgtcaatgaacagtttctgctgcagcggctggcagacggggccatcgacctctatgccatggtggtggttctctcgagggcctcaagatccctgagtgagggccaccccacggcccagcatgagaaaatgctctgtgacacctggtgtatcgaggctgcagctcggatccgagagggcatggccgccctgcagtctgacccctggcagcaagagctctaccgcaacttcaaaagcatctccaaggccttggtggagcggggtggtgtggtcaccagcaacccacttggcttctgaatactcccggccagggcctgtcccagttatgtgccttccctcaagccaaagccgaagcccctttccttaaggccctggtttgtcccgaaggggcctagtgttcccagcactgtgcctgctctcaagagcacttactgcctcgcaaataataaaaatttctagccagtcatg

SEQ ID NO: 46 - DNA, 2204 bp, Artificial Sequence
  derived and/or modified sequence
acagctcccagcatgccccggggcccgcaaccgtccgccgcccggtgcactgtggacgatgagtcagggttaggggcgccaggacgtgggcgtgcaggacgccagagctgggtcagagctcgagccagcggcgcccggagagattcggagatgcaggcggctcggatggccgcgagcttggggcggcagctgctgaggctcgggggcggaagctcgcggctcacggcgctcctggggcagccccggcccggccctgcccggcggccctatgccgggggtgccgctcagctggctctggacaagtcagattcccacccctctgacgctctgaccaggaaaaaaccggccaaggcggaatctaagtcctttgctgtgggaatgttcaaaggccagctcaccacagatcaggtgttcccatacccgtccgtgctcaacgaagagcagacacagtttcttaaagagctggtggagcctgtgtcccgtttcttcgaggaagtgaacgatcccgccaagaatgacgctctggagatggtggaggagaccacttggcagggcctcaaggagctgggggcctttggtctgcaagtgcccagtgagctgggtggtgtgggcctttgcaacacccagtacgcccgtttggtggagatcgtgggcatgcatgaccttggcgtgggcattaccctgggggcccatcagagcatcggtttcaaaggcatcctgctctttggcacaaaggcccagaaagaaaaatacctccccaagctggcatctggggagactgtggccgctttctgtctaaccgagccctcaagcgggtcagatgcagcctccatccgaacctctgctgtgcccagcccctgtggaaaatactataccctcaatggaagcaagctttggatcagtaatgggggcctagcagacatcttcacggtctttgccaagacaccagttacagatccagccacaggagccgtgaaggagaagatcacagcttttgtggtggagaggggcttcgggggcattacccatgggccccctgagaagaagatgggcatcaaggcttcaaacacagcagaggtgttctttgatggagtacgggtgccatcggagaacgtgctgggtgaggttgggagtggcttcaaggttgccatgcacatcctcaacaatggaaggtttggcatggctgcggccctggcaggtaccatgagaggcatcattgctaaggcggtagatcatgccactaatcgtacccagtttggggagaaaattcacaactttgggctgatccaggagaagctggcacggatggttatgctgcagtatgtaactgagtccatggcttacatggtgagtgctaacatggaccagggagccacggacttccagatagaggccgccatcagcaaaatctttggctcggaggcagcctggaaggtgacagatgaatgcatccaaatcatggggggtatgggcttcatgaaggaacctggagtagagcgtgtgctccgagatcttcgcatcttccggatctttgaggggacaaatgacattcttcggctgtttgtggctctgcagggctgtatggacaaaggaaaggagctctctgggcttggcagtgctctaaagaatccctttgggaatgctggcctcctgctaggagaggcaggcaaacagctgaggcggcgggcagggctgggcagcggcctgagtctcagcggacttgtccacccggagttgagtcggagtggcgagctggcagtacgggctctggagcagtttgccactgtggtggaggccaagctgataaaacacaagaaggggattgtcaatgaacagtttctgctgcagcggctggcagacggggccatcgacctctatgccatggtggtggttctctcgagggcctcaagatccctgagtgagggccaccccacggcccagcatgagaaaatgctctgtgacacctggtgtatcgaggctgcagctcggatccgagagggcatggccgccctgcagtctgacccctggcagcaagagctctaccgcaacttcaaaagcatctccaaggccttggtggagcggggtggtgtggtcaccagcaacccacttggcttctgaatactcccggccagggcctgtcccagttatgtgcctgctctcaagagcacttactgcctcgcaaataataaaaatttctagccagt

SEQ ID NO: 47 - protein, 427 aa, Artificial Sequence
  derived and/or modified sequence
MAVLAALLRSGARSRSPLLRRLVQEIRYVERSYVSKPTLKEVVIVSATRTPIGSFLGSLSLLPATKLGSIAIQGAIEKAGIPKEEVKEAYMGNVLQGGEGQAPTRQAVLGAGLPISTPCTTINKVCASGMKAIMMASQSLMCGHQDVMVAGGMESMSNVPYVMNRGSTPYGGVKLEDLIVKDGLTDVYNKIHMGSCAENTAKKLNIARNEQDAYAINSYTRSKAAWEAGKFGNEVIPVTVTVKGQPDVVVKEDEEYKRVDFSKVPKLKTVFQKENGTVTAANASTLNDGAAALVLMTADAAKRLNVTPLARIVAFADAAVEPIDFPIAPVYAASMVLKDVGLKKEDIAMWEVNEAFSLVVLANIKMLEIDPQKVNINGGAVSLGHPIGMSGARIVGHLTHALKQGEYGLASICNGGGGASAMLIQKL

SEQ ID NO: 48 - DNA, 1284 bp, Artificial Sequence
  derived and/or modified sequence
atggccgtgctggccgcactgctgagaagcggagcacggtctagaagcccgctgcttagacggcttgtgcaagagatacggtacgtcgagaggagctacgtcagtaagcctaccttgaaagaggtcgtgatcgtctctgcaactcgcactccaatcgggtcatttctaggctcgttgagcctgctgcccgctaccaaactcggaagcattgccatccagggtgcaattgaaaaagctggaatacctaaagaggaagtgaaagaagcctatatgggaaacgtgctccaggggggggagggccaggcacctacccggcaagccgttcttggcgcaggcctgcccatctctaccccctgcaccactataaataaagtctgcgcaagtgggatgaaagcaattatgatggcttcccagtccctgatgtgtggccaccaggatgtgatggtagctgggggaatggaaagcatgagcaatgtaccatatgtaatgaaccgcggcagtaccccttatggtggtgtgaaactcgaagatctgattgtcaaagatggcctcacggatgtgtacaataagattcatatggggtcctgcgccgaaaataccgccaagaagttaaacattgcacggaacgagcaggacgcgtacgcaatcaactcttatacgaggagtaaggccgcttgggaagctggaaaattcgggaatgaagtcatccccgtgacagtaaccgtgaagggccagccagatgtggtggtcaaggaggatgaagaatacaaacgcgtggacttcagcaaggtccctaaattgaagactgtgttccagaaggaaaatggtactgtgaccgccgccaacgcttctacactcaacgatggcgccgccgctctggtgcttatgacagctgatgccgctaagaggttgaacgtgacgccattggcccggattgtggccttcgccgacgctgccgtcgagcctattgacttccccattgcccccgtttatgccgcctccatggttctgaaggatgtgggactcaaaaaggaagacatcgcaatgtgggaggtaaatgaggccttcagcctcgtcgttctcgccaacataaaaatgctggaaatagatccccaaaaagtcaatatcaatggaggagccgtttccttagggcaccctataggaatgagcggcgctcgaatcgtgggccatcttacccatgccctgaagcagggcgagtacggcctggccagtatttgcaatggaggggggggcgctagcgccatgctgatacaaaagctctag

SEQ ID NO: 49 - DNA, 1284 bp, Artificial Sequence
  derived and/or modified sequence
atggctgtgctggccgccctgctgcggagcggggcccggagccgcagccccctgctgcggcggctggtgcaggagatccgctacgtggagaggagctatgtgtccaagcccaccctgaaggaggtggtgattgtgtctgccaccaggacccccatcggcagcttcctgggcagcctgagcctgctgcctgccaccaagctgggcagcatcgccatccagggcgccatcgagaaggccggcatccccaaggaggaggtgaaggaggcctacatgggaaatgtgctgcagggcggggagggccaggcccccacccggcaggccgtgctgggcgccggcctgcccatcagcaccccctgcaccaccatcaacaaggtgtgtgccagcggcatgaaggccatcatgatggccagccagagcctgatgtgtggccaccaggatgtgatggtggccggcggcatggagagcatgagcaatgtgccctacgtgatgaacagaggcagcaccccctacggcggcgtgaagctggaggacctgattgtgaaggatggcctgacagatgtgtacaacaagatccacatgggcagctgtgccgagaacacagccaagaagctgaacatcgccagaaatgagcaggatgcctatgccatcaacagctacaccaggagcaaggccgcctgggaggccggcaagtttggaaatgaagtcatccctgtgacagtgacagtgaagggccagccagatgtggtggtgaaggaggatgaggagtacaagagggtggacttcagcaaggtgcccaagctgaagacagtgttccagaaggaaaatggaacagtgacagctgccaatgccagcaccctgaatgatggagctgctgccctggtgctgatgacagcagatgctgccaagaggctgaatgtgacccccctggcccgcatcgtggcctttgctgatgctgctgtggagcccatcgacttccccatcgcccctgtgtatgctgcctccatggtgctgaaggatgtgggcctgaagaaggaggacatcgccatgtgggaggtgaatgaggccttcagcctggtggtgctggccaacatcaagatgctggagattgacccccagaaggtgaacatcaatggaggagctgtgtccctgggccaccccatcggcatgtctggggcccgcatcgtgggccacctgacccacgccctgaagcagggcgagtatggcctggccagcatctgcaatggaggcggcggggccagcgccatgctgatccagaagctgtag

SEQ ID NO: 50 - DNA, 1284 bp, Artificial Sequence
  derived and/or modified sequence
atggccgtgctggccgccctgctgcggagcggcgcccggagccggagcccactgctccgcaggctggtccaggagatcagatacgtcgagaggtcttacgtgtcaaaaccgacacttaaggaggttgtcatcgtgtcggcaacccgaacgcctattggatccttcttgggatccctaagtctgcttccagcgactaaacttgggagcatcgctattcaaggcgccattgagaaggccggcatccctaaagaagaagtgaaggaagcttacatgggaaatgtgctacagggtggcgaaggccaggcccctaccaggcaggctgtgctgggcgcaggactccccattagcactccgtgtacgaccatcaataaggtgtgtgcgagcgggatgaaagccatcatgatggcatcccagtctctgatgtgcggacatcaagatgtgatggtcgcaggtggtatggagtccatgtctaacgtgccctatgtgatgaaccggggctccacgccgtatggcggagtaaaattggaggacctcattgtcaaagatggcctgaccgacgtctacaacaaaatacatatggggtcatgtgccgagaacaccgccaagaaactcaatatcgctaggaacgaacaggatgcctatgccattaatagctatacacgctccaaagcagcatgggaggccgggaagtttgggaatgaagtgatccctgtaaccgtgactgtgaaaggacagcctgatgtagtggtgaaagaggatgaagagtacaagagagtcgattttagtaaagttccgaaactgaagacagtctttcagaaggagaatggaaccgttactgcagcaaacgccagtacattaaatgacggagcagccgctctcgttctcatgactgccgacgccgccaagcggctaaacgtcacacccctggctcgcattgtcgcattcgcagatgctgcagttgagcccatcgactttcccatagcaccagtctatgctgcctccatggttttgaaggatgtcggcctgaaaaaggaagacattgctatgtgggaagttaatgaagcattcagcttagtggtgctcgcgaacataaaaatgttagagatagacccacagaaagtgaacatcaatggcggggccgtgtctctcgggcatccaattggtatgagcggggccagaattgtgggccatctgacccacgctctcaaacagggggaatatgggttggcctctatttgtaacggcggcggtggggccagcgcaatgcttatacaaaaactatag

SEQ ID NO: 51 - DNA, 1284 bp, Artificial Sequence
  derived and/or modified sequence
atggctgtcctggcagccttgctgcgatcaggggctcgcagtaggagtccccttctcagaagactggtgcaagagatacggtatgtggagcggagttacgtttcaaaacctacacttaaggaggtagtaatcgtttccgctactaggacaccgattgggtcgtttctgggcagtttatccctgctgccagccacaaaacttggcagcatcgcgatccagggagccatagagaaggctggcattccaaaggaggaagtgaaggaagcctatatgggaaatgtcctacagggtggggagggacaagccccaacccgccaggctgtgctgggcgctgggcttccaatttcaacaccttgtacaaccataaacaaggtatgtgcctctggaatgaaggcaataatgatggcctcacagagtctaatgtgcggccaccaggatgttatggtcgccggaggcatggaatcaatgtccaatgtaccatatgttatgaatcgcggatccactccctacggtggagtaaaacttgaggaccttatcgtgaaggatgggctcactgatgtctacaacaaaattcatatgggatcttgtgccgaaaataccgctaaaaagctcaacattgctcggaatgagcaggacgcttatgccatcaattcctatacaagatcgaaggcagcatgggaggctgggaaattcggcaatgaagtgatcccagtcaccgtgaccgtgaaaggtcagcccgacgtggtcgtgaaggaggatgaggaatataaacgggtcgacttcagtaaggtcccgaaactcaagaccgtcttccagaaggagaatggtacagtgacagctgccaacgcttccaccctgaacgatggcgctgccgcactggttctgatgaccgctgatgctgcgaagcgtttgaacgtaactcccctggccaggattgtggcgttcgccgacgctgctgtagagccaatcgactttccaatcgcaccagtgtatgcagccagcatggtgctgaaagatgtgggtctgaaaaaggaagacattgccatgtgggaagttaatgaggcattctcgctggttgttctggcaaacattaagatgctagaaattgacccccagaaagtaaatataaacggaggagccgtatctttgggccatcccattggaatgtctggggctaggatcgtcggccatcttacacacgcgctgaagcagggtgaatacggcctcgcttctatctgcaacggcggtggtggagcttcagctatgttaattcaaaaactgtag

SEQ ID NO: 52 - DNA, 1761 bp, Artificial Sequence
  derived and/or modified sequence
gcggtgcccgcgccgggccgctaggggtgcggggttggggaggaggccgctagtctacgcctgtggagccgatactcagccctctgcgaccatggctgtgctggcggcacttctgcgcagcggcgcccgcagccgcagccccctgctccggaggctggtgcaggaaataagatatgtggaacggagttatgtatcaaaacccactttgaaggaagtggtcatagtaagtgctacaagaacacccattggatcttttttaggcagcctttccttgctgccagccactaagcttggttccattgcaattcagggagccattgaaaaggcagggattccaaaagaagaagtgaaagaagcatacatgggtaatgttctacaaggaggtgaaggacaagctcctacaaggcaggcagtattgggtgcaggcttacctatttctactccatgtaccaccataaacaaagtttgtgcttcaggaatgaaagccatcatgatggcctctcaaagtcttatgtgtggacatcaggatgtgatggtggcaggtgggatggagagcatgtccaatgttccatatgtaatgaacagaggatcaacaccatatggtggggtaaagcttgaagatttgattgtaaaagacgggctaactgatgtctacaataaaattcatatgggcagctgtgctgagaatacagcaaagaagctgaatattgcacgaaatgaacaggacgcttatgctattaattcttataccagaagtaaagcagcatgggaagctgggaaatttggaaatgaagttattcctgtcacagttacagtaaaaggtcaaccagatgtagtggtgaaagaagatgaagaatataaacgtgttgattttagcaaagttccaaagctgaagacagttttccagaaagaaaatggcacagtaacagctgccaatgccagtacactgaatgatggagcagctgctctggttctcatgacggcagatgcagcgaagaggctcaatgttacaccactggcaagaatagtagcatttgctgacgctgctgtagaacctattgattttccaattgctcctgtatatgctgcatctatggttcttaaagatgtgggattgaaaaaagaagatattgcaatgtgggaagtaaatgaagcctttagtctggttgtactagcaaacattaaaatgttggagattgatccccaaaaagtgaatatcaatggaggagctgtttctctgggacatccaattgggatgtctggagccaggattgttggtcatttgactcatgccttgaagcaaggagaatacggtcttgccagtatttgcaatggaggaggaggtgcttctgccatgctaattcagaagctgtagacaacctctgctatttaaggagacaaccctatgtgaccagaaggcctgctgtaatcagtgtgactactgtgggtcagcttatattcagataagctgtttcattttttattattttctatgttaacttttaaaaatcaaaatgatgaaatcccaaaacattttgaaattaaaaataaatttcttcttctgcttttttcttggtaaccttgaaaagtttgatacatttttgcattctgagtctatacttatcgaaatatggtagaaataccaatgtgtaatattagtgacttacataagtagctagaagtttccatttgtgagaacacatttatatttttgaggattgttaaaggtcaagtgaatgctctttataggtaatttacatt

SEQ ID NO: 53 - DNA, 1284 bp, Artificial Sequence
  derived and/or modified sequence
atggccgtgctggccgccctgctgagaagcggcgccagaagcagaagccccctgctgagaagactggtgcaggagatcagatacgtggagagaagctacgtgagcaagcccaccctgaaggaggtggtgatcgtgagcgccaccagaacccccatcggcagcttcctgggcagcctgagcctgctgcccgccaccaagctgggcagcatcgccatccagggcgccatcgagaaggccggcatccccaaggaggaggtgaaggaggcctacatgggcaacgtgctgcagggcggcgagggccaggcccccaccagacaggccgtgctgggcgccggcctgcccatcagcaccccctgcaccaccatcaacaaggtgtgcgccagcggcatgaaggccatcatgatggccagccagagcctgatgtgcggccaccaggacgtgatggtggccggcggcatggagagcatgagcaacgtgccctacgtgatgaacagaggcagcaccccctacggcggcgtgaagctggaggacctgatcgtgaaggacggcctgaccgacgtgtacaacaagatccacatgggcagctgcgccgagaacaccgccaagaagctgaacatcgccagaaacgagcaggacgcctacgccatcaacagctacaccagaagcaaggccgcctgggaggccggcaagttcggcaacgaggtgatccccgtgaccgtgaccgtgaagggccagcccgacgtggtggtgaaggaggacgaggagtacaagagagtggacttcagcaaggtgcccaagctgaagaccgtgttccagaaggagaacggcaccgtgaccgccgccaacgccagcaccctgaacgacggcgccgccgccctggtgctgatgaccgccgacgccgccaagagactgaacgtgacccccctggccagaatcgtggccttcgccgacgccgccgtggagcccatcgacttccccatcgcccccgtgtacgccgccagcatggtgctgaaggacgtgggcctgaagaaggaggacatcgccatgtgggaggtgaacgaggccttcagcctggtggtgctggccaacatcaagatgctggagatcgacccccagaaggtgaacatcaacggcggcgccgtgagcctgggccaccccatcggcatgagcggcgccagaatcgtgggccacctgacccacgccctgaagcagggcgagtacggcctggccagcatctgcaacggcggcggcggcgccagcgccatgctgatccagaagctgtag

SEQ ID NO: 54 - protein, 363 aa, Artificial Sequence
  derived and/or modified sequence
MAQTPAFDKPKVELHVHLDGSIKPETILYYGRRRGIALPANTAEGLLNVIGMDKPLTLPDFLAKFDYYMPAIAGCREAIKRIAYEFVEMKAKEGVVYVEVRYSPHLLANSKVEPIPWNQAEGDLTPDEVVALVGQGLQEGERDFGVKARSILCCMRHQPNWSPKVVELCKKYQQQTVVAIDLAGDETIPGSSLLPGHVQAYQEAVKSGIHRTVHAGEVGSAEVVKEAVDILKTERLGHGYHTLEDQALYNRLRQENMHFEICPWSSYLTGAWKPDTEHAVIRLKNDQANYSLNTDDPLIFKSTLDTDYQMTKRDMGFTEEEFKRLNINAAKSSFLPEDEKRELLDLLYKAYGMPPSASAGQNL

SEQ ID NO: 55 - DNA, 1092 bp, Artificial Sequence
  derived and/or modified sequence
atggcgcaaacacctgcctttgataagccgaaagtggaattgcatgtccacctggatggcagtatcaaacctgagacaatcttgtactacggcaggcgccggggaatagccctgcccgcaaacaccgctgaaggattactcaatgtaatcggcatggacaagccactgacactgcctgacttccttgccaagtttgattattacatgcctgccatagccggctgccgcgaggcaattaagagaatagcttacgaattcgtcgaaatgaaggccaaagaaggagtcgtctatgtggaggtgcggtactcccctcacctcttggccaatagtaaggtggagcccattccatggaaccaggccgagggagacctgacacctgacgaggtggtcgctttggtggggcaaggactgcaggaaggagagagggattttggcgtgaaagcacgatcgatcctctgctgtatgcgccatcagcccaattggtcgcctaaagttgtggaactttgcaagaaatatcagcagcagactgttgttgctatcgacctcgccggtgatgagactatccccgggtcttctcttctcccgggccacgtgcaggcataccaagaagctgtgaaatctggcattcaccgcaccgtgcatgcaggagaggtgggcagcgctgaagtcgtaaaagaggcagttgatatactgaaaacggagcggctggggcacggctatcacaccctggaggaccaggccttatacaatagactccggcaggagaatatgcactttgagatctgtccttggtcctcctacctgaccggcgcctggaagccggataccgaacacgccgtgatcaggctgaagaacgaccaggcaaactacagtttaaatactgacgacccactgatatttaagagtacgctggacacagattatcaaatgaccaaacgggatatggggttcactgaagaggagttcaagagactgaacattaatgccgccaagtccagttttttgcccgaggacgaaaagcgcgaattgttggatctgctttacaaggcctatgggatgccaccgtctgccagcgccggacagaacctctag

SEQ ID NO: 56 - DNA, 1539 bp, Artificial Sequence
  derived and/or modified sequence
ggggcccggcccgttaagaagagcgtggccggccgcggccaccgctggccccagggaaagccgagcggccaccgagccggcagagacccaccgagcggcggcggagggagcagcgccggggcgcacgagggcaccatggcccagacgcccgccttcgacaagcccaaagtggaactgcatgtccacctagacggatccatcaagcctgaaaccatcttatactatggcaggaggagagggatcgccctcccagctaacacagcagaggggctgctgaacgtcattggcatggacaagccgctcacccttccagacttcctggccaagtttgactactacatgcctgctatcgcgggctgccgggaggctatcaaaaggatcgcctatgagtttgtagagatgaaggccaaagagggcgtggtgtatgtggaggtgcggtacagtccgcacctgctggccaactccaaagtggagccaatcccctggaaccaggctgaaggggacctcaccccagacgaggtggtggccctagtgggccagggcctgcaggagggggagcgagacttcggggtcaaggcccggtccatcctgtgctgcatgcgccaccagcccaactggtcccccaaggtggtggagctgtgtaagaagtaccagcagcagaccgtggtagccattgacctggctggagatgagaccatcccaggaagcagcctcttgcctggacatgtccaggcctaccaggaggctgtgaagagcggcattcaccgtactgtccacgccggggaggtgggctcggccgaagtagtaaaagaggctgtggacatactcaagacagagcggctgggacacggctaccacaccctggaagaccaggccctttataacaggctgcggcaggaaaacatgcacttcgagatctgcccctggtccagctacctcactggtgcctggaagccggacacggagcatgcagtcattcggctcaaaaatgaccaggctaactactcgctcaacacagatgacccgctcatcttcaagtccaccctggacactgattaccagatgaccaaacgggacatgggctttactgaagaggagtttaaaaggctgaacatcaatgcggccaaatctagtttcctcccagaagatgaaaagagggagcttctcgacctgctctataaagcctatgggatgccaccttcagcctctgcagggcagaacctctgaagacgccactcctccaagccttcaccctgtggagtcaccccaactctgtggggctgagcaacatttttacatttattccttccaagaagaccatgatctcaatagtcagttactgatgctcctgaaccctatgtgtccatttctgcacacacgtatacctcggcatggccgcgtcacttctctgattatgtgccctggccagggaccagcgcccttgcacatgggcatggttgaatctgaaaccctccttctgtggcaacttgtactgaaaatctggtgctcaataaagaagcccatggctggtggcatgca

SEQ ID NO: 57 - DNA, 1092 bp, Artificial Sequence
  derived and/or modified sequence
atggcccagaccccagcctttgacaagcccaaggtggagctgcacgtgcacctggatggcagcatcaagccagagaccatcctgtactacggcagaagaagaggcatcgccctgcctgccaacacagctgagggcctgctgaatgtcatcggcatggacaagcccctgaccctgcctgacttcctggccaagtttgactactacatgcctgccatcgccggctgccgggaggccatcaagagaattgcctatgaatttgtggagatgaaggccaaggagggcgtggtgtatgtggaggtgcgctacagcccccacctgctggccaacagcaaggtggagcccatcccctggaaccaggccgagggggacctgaccccagatgaggtggtggccctggtgggccagggcctgcaggagggggagcgggactttggagtgaaggcccggagcatcctgtgctgcatgaggcaccagcccaactggagccccaaggtggtggagctgtgcaagaagtaccagcagcagacagtggtggccatcgacctggccggagatgagaccatccctggcagcagcctgctgcccggccacgtgcaggcctaccaggaggccgtgaagagcggcatccacaggacagtgcatgctggggaggtgggcagcgctgaggtggtgaaggaggccgtggacatcctgaagacagagcggctgggccacggctaccacaccctggaggaccaggccctgtacaaccggctgcggcaggagaacatgcactttgagatctgcccctggagcagctacctgactggagcctggaagccagacacagagcacgctgtgatccggctgaagaatgaccaggccaactacagcctgaacacagatgaccccctcatcttcaagagcaccctggacacagactaccagatgaccaagagggacatgggcttcacagaggaggagttcaagaggctgaacatcaatgctgccaagagcagcttcctgcctgaagatgagaagcgggagctgctggacctgctgtacaaggcctacggcatgccacccagcgccagcgctggccagaacctgtag

SEQ ID NO: 58 - DNA, 1092 bp, Artificial Sequence
  derived and/or modified sequence
atggcccagacccccgccttcgacaagcccaaggtggagctgcacgtccatctcgatggaagtatcaagcccgaaaccatcctctactacggtagacgtcgaggaattgctttacccgcaaacactgccgagggactactcaatgtaataggcatggacaaacccctcacattacctgactttttagccaagttcgactactacatgcctgccattgccgggtgtagagaagctataaagaggatcgcctatgagttcgttgagatgaaagccaaagagggagtggtatacgtagaggtccgctactccccacatttgctcgccaattccaaagtggagcccattccttggaaccaggccgagggcgatctgactccagatgaagtcgttgctctggtgggccagggcttgcaggagggcgagcgcgatttcggggttaaagcacgttctatcttatgctgtatgagacatcagccaaattggagtcccaaggtagtcgagttgtgcaaaaagtaccagcaacagaccgtggtggcgatcgatctggctggggacgagacgatccctggaagctctttactcccaggccacgttcaggcttaccaggaggccgtcaagtccggcatacaccgcaccgtgcacgcaggtgaggttggcagtgcagaggtggtaaaggaggcagtggacattttaaagactgagcggcttggccacgggtaccacactttagaagaccaagccttatataaccgcctgcgacaggagaatatgcacttcgaaatctgcccctggtcatcttatctcacaggagcctggaagccggatactgagcatgccgtcattaggctcaaaaatgaccaggcaaactatagtctgaatactgatgatcctctgatctttaaatcgacgctagatactgattatcagatgaccaaacgcgacatgggctttactgaggaggagttcaagcgcctgaatattaatgcagcaaagtcctcgtttctgcccgaggacgagaaacgggaacttttggatctgctgtacaaagcctacgggatgcccccatccgcatcagccggccagaacttgtag

SEQ ID NO: 59 - DNA, 1092 bp, Artificial Sequence
  derived and/or modified sequence
atggcccagacccccgcatttgacaaacctaaagtcgagcttcacgttcatctcgacggcagcatcaagcctgagacaatcctgtactacggtaggaggagaggcatagccctccctgccaataccgcagaaggacttctgaacgtcattggcatggacaagccccttacattgcctgatttcttggccaaatttgactactacatgcccgctatcgcgggatgtcgggaagcaatcaaacgaatagcttatgagtttgttgaaatgaaggcaaaggaaggcgttgtctacgttgaagttagatactccccacatctactcgccaactcgaaagttgaacctatcccttggaaccaggctgaaggtgatctcactcctgacgaagtcgtcgcactggtaggacagggccttcaagaaggagagcgggactttggcgtgaaggctaggagtattctatgctgcatgaggcaccagccgaattggtcccccaaagtggtcgaactctgcaagaaataccagcaacagaccgtggtggcgatcgatttggctggtgacgagactatccccggtagcagcttgttgcctggccatgtgcaagcttaccaggaagccgtgaagagcggtattcaccgcacagttcatgccggtgaggttggttctgctgaggttgtgaaagaggccgtcgatatcttaaagacagaacgcctcggccacggttaccatacgctcgaggatcaagcgttgtacaatcgcctccgtcaggaaaatatgcattttgagatctgcccatggtcctcttatttgacaggtgcatggaagcccgacaccgagcacgccgttatccggctcaaaaatgaccaagccaactacagccttaacaccgatgatcctcttatcttcaagtcaacattggacaccgactatcagatgactaagagggacatgggttttactgaggaagagtttaagcggctgaacattaatgcagcaaagtccagcttcttgccggaggacgagaaacgcgaactgttggacctgctctataaagcctacggaatgcctccttccgcttcggccggtcagaacctgtag

SEQ ID NO: 60 - DNA, 1092 bp, Artificial Sequence
  derived and/or modified sequence
atggcccagacccccgccttcgacaagcccaaggtggagctgcacgtgcacctggacggcagcatcaagcccgagaccatcctgtactacggcagaagaagaggcatcgccctgcccgccaacaccgccgagggcctgctgaacgtgatcggcatggacaagcccctgaccctgcccgacttcctggccaagttcgactactacatgcccgccatcgccggctgcagagaggccatcaagagaatcgcctacgagttcgtggagatgaaggccaaggagggcgtggtgtacgtggaggtgagatacagcccccacctgctggccaacagcaaggtggagcccatcccctggaaccaggccgagggcgacctgacccccgacgaggtggtggccctggtgggccagggcctgcaggagggcgagagagacttcggcgtgaaggccagaagcatcctgtgctgcatgagacaccagcccaactggagccccaaggtggtggagctgtgcaagaagtaccagcagcagaccgtggtggccatcgacctggccggcgacgagaccatccccggcagcagcctgctgcccggccacgtgcaggcctaccaggaggccgtgaagagcggcatccacagaaccgtgcacgccggcgaggtgggcagcgccgaggtggtgaaggaggccgtggacatcctgaagaccgagagactgggccacggctaccacaccctggaggaccaggccctgtacaacagactgagacaggagaacatgcacttcgagatctgcccctggagcagctacctgaccggcgcctggaagcccgacaccgagcacgccgtgatcagactgaagaacgaccaggccaactacagcctgaacaccgacgaccccctgatcttcaagagcaccctggacaccgactaccagatgaccaagagagacatgggcttcaccgaggaggagttcaagagactgaacatcaacgccgccaagagcagcttcctgcccgaggacgagaagagagagctgctggacctgctgtacaaggcctacggcatgccccccagcgccagcgccggccagaacctgtag

SEQ ID NO: 61 - protein, 387 aa, Artificial Sequence
  derived and/or modified sequence
MAETLFWTPLLVVLLAGLGDTEAQQTTLHPLVGRVFVHTLDHETFLSLPEHVAVPPAVHITYHAHLQGHPDLPRWLRYTQRSPHHPGFLYGSATPEDRGLQVIEVTAYNRDSFDTTRQRLVLEIGDPEGPLLPYQAEFLVRSHDAEEVLPSTPASRFLSALGGLWEPGELQLLNVTSALDRGGRVPLPIEGRKEGVYIKVGSASPFSTCLKMVASPDSHARCAQGQPPLLSCYDTLAPHFRVDWCNVTLVDKSVPEPADEVPTPGDGILEHDPFFCPPTEAPDRDFLVDALVTLLVPLLVALLLTLLLAYVMCCRREGRLKRDLATSDIQMVHHCTIHGNTEELRQMAASREVPRPLSTLPMFNVHTGERLPPRVDSAQVPLILDQH

SEQ ID NO: 62 - DNA, 1164 bp, Artificial Sequence
  derived and/or modified sequence
atggctgaaaccttgttctggactccattgctggtggtactccttgctggtctcggtgacacagaagctcagcagaccactctccatcctttggttggccgggtcttcgttcacacactggaccatgagacgtttctctcactgcccgagcacgtggctgtgccacccgccgtgcatattacttatcacgcccacttacaaggccacccggacctcccccgttggcttcgttacacacagagatcacctcaccaccctggcttcttgtatgggtccgcaacccccgaagatcgcggcctgcaggtgatcgaggttacggcttacaatcgagacagttttgatacgacaagacaaaggttagttttggagattggcgaccccgagggtcctcttctaccgtaccaagccgagttccttgtgagatcgcatgacgcggaagaggtcctgccttccacacccgctagccgattcttgagtgcactaggcggactttgggagccaggggagctgcaattgctaaacgtcacgtccgcacttgatcgtggcgggcgggtgccgttgcccatagaaggtcgaaaagaaggagtctatatcaaggtcggcagcgcaagccccttttcaacttgtctcaagatggtggcctctcccgactcccacgctagatgcgcccaggggcaacctccactgctctcctgttatgatactctcgcaccccatttcagggtggattggtgcaatgtgactctggttgacaagtcagtgcctgagcccgcggacgaggttcccactccaggagacggaatcctggaacatgatcctttcttctgtcctcccacagaggcgcccgatcgtgactttttggtcgatgccctcgttacgttgctggtcccactcctcgtagccttgttattgaccctgttgcttgcctacgtaatgtgttgccggcgggaagggaggctcaagagagatctagctacctctgacatacagatggtgcaccactgtacgattcatggaaacacagaagagctccgacaaatggccgcatcaagggaggtgcccagacccttatctacactgcctatgtttaacgtgcacactggcgagagactgccaccccgagtcgactctgctcaggtacccctgatcctcgaccagcactag

SEQ ID NO: 63 - DNA, 1164 bp, Artificial Sequence
  derived and/or modified sequence
atggccgagaccctcttctggacccccctgctggtggtgctgctggccggcctgggggacacagaggcccagcagaccaccctgcaccccctggtgggccgggtgtttgtgcacaccctggaccacgagaccttcctgagcctgcctgagcacgtggccgtgcccccagctgtgcacatcacctaccacgcccacctgcagggccacccagacctgccccgctggctgcgctacacccagaggagcccccaccaccctggcttcctgtatggcagcgccaccccagaggaccggggcctgcaggtgattgaggtgacagcctacaacagagacagctttgacaccacccggcagaggctggtgctggagatcggggaccctgagggccccctgctgccctaccaggccgagttcctggtgcgcagccatgatgctgaggaggtgctgcccagcaccccagccagccgcttcctgagcgccctgggcggcctgtgggagcctggagagctgcagctgctgaatgtgaccagcgccctggaccggggcggccgggtgcccctgcccatcgagggcaggaaggagggcgtgtacatcaaggtgggcagcgccagccccttcagcacctgcctgaagatggtggccagcccagacagccacgcccgctgtgcccagggccagccccccctgctgagctgctatgacaccctggccccccacttccgggtggactggtgcaatgtgaccctggtggacaagtctgtgcctgagccagcagatgaggtgcccaccccaggagatggcatcctggagcatgaccccttcttctgccccccaacagaggccccagaccgggacttcctggtggatgccctggtgaccctgctggtgcccctgctggtggccctgctgctgaccctgctgctggcctacgtgatgtgctgcagaagagagggccgcctgaagagggacctggccaccagtgacatccagatggtgcaccactgcaccatccacggcaacacagaggagctgcggcagatggccgccagccgggaggtgccccggcccctgagcaccctgcccatgttcaacgtgcacactggagagcggctgcccccccgggtggacagcgcccaggtgcccctcatcctggaccagcactag

SEQ ID NO: 64 - DNA, 1164 bp, Artificial Sequence
  derived and/or modified sequence
atggccgagaccctgttctggacccccctgctggtggtgctgctggctggactcggcgacacagaggctcagcagacaaccctccatccactcgtcggaagagtatttgtacatacattggaccacgagaccttcttgtctctccccgagcacgtggctgtcccaccagctgtgcatataacttaccacgctcatctgcaaggacatcccgatttgcctcgttggcttaggtatacacagcggagtccccatcaccctggctttttatatggctcagctacccccgaagacaggggtctccaggtgattgaggtcaccgcctacaatcgggatagtttcgacaccacaaggcagagattggtgctcgagatcggcgacccagaaggaccattgctgccatatcaagccgaatttcttgtgcggagtcacgatgccgaggaagtactgccctctacccctgcttctagattcctatctgcactgggcggcttgtgggaacctggcgagctgcagctactgaacgtgactagcgccctcgacaggggagggagagtgccactgccgattgaaggacgaaaagaaggtgtctacattaaagtgggatccgccagtccattctcaacgtgtctgaagatggtggcttcaccagatagtcacgcccgatgcgcccaaggtcagccacctctgctctcgtgctacgacacactagcaccgcacttccgagtggactggtgcaacgtaacacttgttgacaaatccgttcccgaaccagcagatgaagtgcctacaccgggagatggaatcctggagcatgatccattcttttgcccgcctacagaggctcccgatagagatttcctggtggacgcgctggtcactttgcttgtccccctcctggtggccctgctcttgacattgctcttggcctacgtgatgtgttgccggcgggagggtcgcctcaaacgggaccttgcgacctcagacatccagatggtccaccattgtacaattcatggaaataccgaggaactgagacagatggcagcctctcgcgaagttcctcggccactctcgacactcccgatgttcaatgtgcataccggtgagagacttccacctagagtggattcagctcaggtgcccctgatcctggaccagcactag

SEQ ID NO: 65 - DNA, 1164 bp, Artificial Sequence
  derived and/or modified sequence
atggccgaaaccttgttctggacacccctattagtggtactgctcgctggactgggcgataccgaagcgcaacagacgactttacatccactggtgggcagggtctttgttcatacactcgatcatgaaacattcttgtccctacccgaacacgtggctgtccctccagcagtgcatattacgtaccatgctcacctgcagggtcaccccgacctccctcgctggctcagatatacccaacgatccccccaccatccgggtttcctgtatggatcagcgacccccgaggatcggggattacaagtgatcgaggtgaccgcctacaaccgggattcattcgacacaacacgccaacggctggtcctggagattggtgatccagaaggaccactgctgccgtatcaggctgaattccttgtacgaagtcacgatgcggaagaagtcctgccaagtactccagcgagcaggttcctgtcagcgctcggtggactgtgggagcccggagaactgcaactactcaacgtcacatccgcgctggatcgaggaggacgagtgcccctgccaatcgagggcaggaaggagggagtgtatatcaaagtgggatctgcttcacccttcagtacctgtcttaagatggtagcttcccctgattcccacgcacgctgtgcgcagggacagccacccctactatcttgttacgatacgctggccccacattttcgcgtggactggtgtaatgtgactcttgtggacaagtcggtgcctgagcccgctgatgaagtccctacccctggggacggcatcctggagcacgatccctttttttgcccgccaacggaggcgccagatagagactttctggtggacgctttggtgacgctcctggtccccttgctggttgcccttcttctgacacttctgttagcctacgtgatgtgctgtagacgggagggtcgtctcaagcgggacctggccacctcggatatccagatggtccaccactgcacaattcatggcaacaccgaggaactccggcagatggcggctagtcgagaggtgcccaggcccttgtctactcttcccatgttcaatgttcacactggcgagcggctgcctcccagagtggacagtgcacaggttccactgatcctggatcaacattag

SEQ ID NO: 66 - DNA, 1432 bp, Artificial Sequence
  derived and/or modified sequence
ctctgtcactcaccgggcgggccaggccgggcagccatggctgagacactcttctggactcctctcctcgtggttctcctggcagggctgggggacaccgaggcccagcagaccacgctacacccacttgtgggccgtgtctttgtgcacaccttggaccatgagacgtttctgagccttcctgagcatgtcgctgtcccacccgctgtccacatcacctaccacgcccacctccagggacacccagacctgccccggtggctccgctacacccagcgcagcccccaccaccctggcttcctctacggctctgccaccccagaagatcgtgggctccaggtcattgaggtcacagcctacaatcgggacagctttgataccactcggcagaggctggtgctggagattggggacccagaaggccccctgctgccataccaagccgagttcctggtgcgcagccacgatgcggaggaggtgctgccctcaacacctgccagccgcttcctctcagccttggggggactctgggagcccggagagcttcagctgctcaacgtcacctctgccttggaccgtgggggccgtgtcccccttcccattgagggccgaaaagaaggggtatacattaaggtgggttctgcctcacctttttctacttgcctgaagatggtggcatcccccgatagccacgcccgctgtgcccagggccagcctccacttctgtcttgctacgacaccttggcaccccacttccgcgttgactggtgcaatgtgaccctggtggataagtcagtgccggagcctgcagatgaggtgcccaccccaggtgatgggatcctggagcatgacccgttcttctgcccacccactgaggccccagaccgtgacttcttggtggatgctctggtcaccctcctggtgcccctgctggtggccctgcttctcaccttgctgctggcctatgtcatgtgctgccggcgggagggaaggctgaagagagacctggctacctccgacatccagatggtccaccactgcaccatccacgggaacacagaggagctgcggcagatggcggccagccgcgaggtgccccggccactctccaccctgcccatgttcaatgtgcacacaggtgagcggctgcctccccgcgtggacagcgcccaggtgcccctcattctggaccagcactgacagcctagccagtggttccaggtccagccctgacttcatcctcccttctctgtccacaccacgagtggcacatcccacctgctgattccagctcctggccctcctggaacccaggctctaaacaagcagggagagggggtggggtggggtgagagtgtgtggagtaaggacattcagaataaatatctgctgctctgctcaccaattgctgctggcagcctctcccgtcctc

SEQ ID NO: 67 - DNA, 1161 bp, Artificial Sequence
  derived and/or modified sequence
atggccgagaccctgttctggacccccctgctggtggtgctgctggccggcctgggcgacaccgaggcccagcagaccaccctgcaccccctggtgggccgcgtgttcgtgcacaccctggaccacgagaccttcctgagcctgcccgagcacgtggccgtgccccccgccgtgcacatcacctaccacgcccacctgcagggccaccccgacctgccccgctggctgcgctacacccagcgcagcccccaccaccccggcttcctgtacggcagcgccacccccgaggaccgcggcctgcaggtgatcgaggtgaccgcctacaaccgcgacagcttcgacaccacccgccagcgcctggtgctggagatcggcgaccccgagggccccctgctgccctaccaggccgagttcctggtgcgcagccacgacgccgaggaggtgctgcccagcacccccgccagccgcttcctgagcgccctgggcggcctgtgggagcccggcgagctgcagctgctgaacgtgaccagcgccctggaccgcggcggccgcgtgcccctgcccatcgagggccgcaaggagggcgtgtacatcaaggtgggcagcgccagccccttcagcacctgcctgaagatggtggccagccccgacagccacgcccgctgcgcccagggccagccccccctgctgagctgctacgacaccctggccccccacttccgcgtggactggtgcaacgtgaccctggtggacaagagcgtgcccgagcccgccgacgaggtgcccacccccggcgacggcatcctggagcacgaccccttcttctgcccccccaccgaggcccccgaccgcgacttcctggtggacgccctggtgaccctgctggtgcccctgctggtggccctgctgctgaccctgctgctggcctacgtgatgtgctgccgccgcgagggccgcctgaagcgcgacctggccaccagcgacatccagatggtgcaccactgcaccatccacggcaacaccgaggagctgcgccagatggccgccagccgcgaggtgccccgccccctgagcaccctgcccatgttcaacgtgcacaccggcgagcgcctgcccccccgcgtggacagcgcccaggtgcccctgatcctggaccagcac

SEQ ID NO: 68 - DNA, 1164 bp, Artificial Sequence
  derived and/or modified sequence
atggccgagaccctgttctggacccccctgctggtggtgctgctggccggcctgggcgacaccgaggcccagcagaccaccctgcaccccctggtgggcagagtgttcgtgcacaccctggaccacgagaccttcctgagcctgcccgagcacgtggccgtgccccccgccgtgcacatcacctaccacgcccacctgcagggccaccccgacctgcccagatggctgagatacacccagagaagcccccaccaccccggcttcctgtacggcagcgccacccccgaggacagaggcctgcaggtgatcgaggtgaccgcctacaacagagacagcttcgacaccaccagacagagactggtgctggagatcggcgaccccgagggccccctgctgccctaccaggccgagttcctggtgagaagccacgacgccgaggaggtgctgcccagcacccccgccagcagattcctgagcgccctgggcggcctgtgggagcccggcgagctgcagctgctgaacgtgaccagcgccctggacagaggcggcagagtgcccctgcccatcgagggcagaaaggagggcgtgtacatcaaggtgggcagcgccagccccttcagcacctgcctgaagatggtggccagccccgacagccacgccagatgcgcccagggccagccccccctgctgagctgctacgacaccctggccccccacttcagagtggactggtgcaacgtgaccctggtggacaagagcgtgcccgagcccgccgacgaggtgcccacccccggcgacggcatcctggagcacgaccccttcttctgcccccccaccgaggcccccgacagagacttcctggtggacgccctggtgaccctgctggtgcccctgctggtggccctgctgctgaccctgctgctggcctacgtgatgtgctgcagaagagagggcagactgaagagagacctggccaccagcgacatccagatggtgcaccactgcaccatccacggcaacaccgaggagctgagacagatggccgccagcagagaggtgcccagacccctgagcaccctgcccatgttcaacgtgcacaccggcgagagactgccccccagagtggacagcgcccaggtgcccctgatcctggaccagcactag

SEQ ID NO: 69 - protein, 413 aa, Artificial Sequence [sequence omitted]

SEQ ID NO: 70 - DNA, 1242 bp, Artificial Sequence
  derived and/or modified sequence
atggggcagcctggcaatggtagcgcttttctcttggctcccaacggaagccacgctccggatcacgacgtgactcaagagcgagacgaggtttgggttgtaggcatgggaattgttatgagcctgatcgtgctcgccatcgtcttcggcaacgtgcttgtgattaccgctatcgctaaattcgagagattacaaactgtgacaaactactttataacctctttggcttgtgcagatcttgtgatggggctggctgttgtgccctttggggccgcccacatcctgatgaagatgtggacattcgggaatttctggtgcgaattctggacttctattgatgtgttgtgcgtgacagcctccattgagacactgtgtgtaattgctgtagaccgatattttgccatcacgtctcctttcaagtaccagtcgctgctcaccaagaataaagcgcgggtaatcatacttatggtgtggattgtcagcggtttgacctcctttcttccaatccaaatgcattggtatcgggcaacccaccaggaggccataaattgctacgctaatgagacctgttgtgatttcttcaccaaccaggcttatgccattgctagcagtattgtaagtttttacgttccactggtgatcatggtgtttgtctattctagggtgtttcaggaggccaaacgacagttgcagaaaatcgacaagagcgagggcagatttcacgtacagaatttgtcgcaggtggagcaggatggccgaacgggccatggactccggcgctcgtcaaagttttgcctgaaggaacataaagctttgaagactctcggtattatcatgggaacgttcacactgtgctggcttccctttttcatcgtgaatatcgtccatgtcatccaagataatctcattcgaaaagaagtatacatcctgctgaactggatcggatatgtgaacagcgggttcaatcccttaatctactgtagaagcccagacttccgaattgctttccaagagctgttgtgtctacgacgatccagcctgaaggcttacggcaatggatattcctctaacggaaataccggagagcagtctggatatcacgtcgagcaagagaaagaaaacaagcttttatgcgaggatctccccggtactgaagacttcgtgggacaccaaggaactgtgccttctgacaacatcgattcccagggcaggaactgcagcacaaatgactccctgctgtag

SEQ ID NO: 71 - DNA, 2041 bp, Artificial Sequence
  derived and/or modified sequence
gcacataacgggcagaacgcactgcgaagcggcttcttcagagcacgggctggaactggcaggcaccgcgagcccctagcacccgacaagctgagtgtgcaggacgagtccccaccacacccacaccacagccgctgaatgaggcttccaggcgtccgctcgcggcccgcagagccccgccgtgggtccgcccgctgaggcgcccccagccagtgcgctcacctgccagactgcgcgccatggggcaacccgggaacggcagcgccttcttgctggcacccaatggaagccatgcgccggaccacgacgtcacgcaggaaagggacgaggtgtgggtggtgggcatgggcatcgtcatgtctctcatcgtcctggccatcgtgtttggcaatgtgctggtcatcacagccattgccaagttcgagcgtctgcagacggtcaccaactacttcatcacttcactggcctgtgctgatctggtcatgggcctggcagtggtgccctttggggccgcccatattcttatgaaaatgtggacttttggcaacttctggtgcgagttttggacttccattgatgtgctgtgcgtcacggccagcattgagaccctgtgcgtgatcgcagtggatcgctactttgccattacttcacctttcaagtaccagagcctgctgaccaagaataaggcccgggtgatcattctgatggtgtggattgtgtcaggccttacctccttcttgcccattcagatgcactggtaccgggccacccaccaggaagccatcaactgctatgccaatgagacctgctgtgacttcttcacgaaccaagcctatgccattgcctcttccatcgtgtccttctacgttcccctggtgatcatggtcttcgtctactccagggtctttcaggaggccaaaaggcagctccagaagattgacaaatctgagggccgcttccatgtccagaaccttagccaggtggagcaggatgggcggacggggcatggactccgcagatcttccaagttctgcttgaaggagcacaaagccctcaagacgttaggcatcatcatgggcactttcaccctctgctggctgcccttcttcatcgttaacattgtgcatgtgatccaggataacctcatccgtaaggaagtttacatcctcctaaattggataggctatgtcaattctggtttcaatccccttatctactgccggagcccagatttcaggattgccttccaggagcttctgtgcctgcgcaggtcttctttgaaggcctatgggaatggctactccagcaacggcaacacaggggagcagagtggatatcacgtggaacaggagaaagaaaataaactgctgtgtgaagacctcccaggcacggaagactttgtgggccatcaaggtactgtgcctagcgataacattgattcacaagggaggaattgtagtacaaatgactcactgctgtaaagcagtttttctacttttaaagacccccccccccaacagaacactaaacagactatttaacttgagggtaataaacttagaataaaattgtaaaattgtatagagatatgcagaaggaagggcatccttctgccttttttatttttttaagctgtaaaaagagagaaaacttatttgagtgattatttgttatttgtacagttcagttcctctttgcatggaatttgtaagtttatgtctaaagagctttagtcctagaggacctgagtctgctatattttcatgacttttccatgtatctacctcactattcaagtattaggggtaatatattgctgctggtaatttgtatctgaaggagattttccttcctacacccttggacttgaggattttgagtatctcggacctttcagctgtgaacatggactcttcccccactcctcttatttgctcacacggggtattttaggcagggatttgaggagcagcttcagttgttttcccgagcaaagtctaaagtttacagtaaataaattgtttgaccatgccttcattgc

SEQ ID NO: 72 - DNA, 1242 bp, Artificial Sequence
  derived and/or modified sequence
atgggccagcctggaaatggcagcgccttcctgctggccccaaatggcagccacgccccagaccatgatgtgacccaggagagagatgaggtgtgggtggtgggcatgggcatcgtgatgagcctgattgtgctggccatcgtgtttggaaatgtgctggtgatcacagccatcgccaagtttgagcggctgcagacagtgaccaactacttcatcaccagcctggcctgtgccgacctggtgatgggcctggccgtggtgccctttggagctgcccacatcctgatgaagatgtggacctttggaaacttctggtgtgagttctggaccagcattgatgtgctgtgtgtgacagccagcattgagaccctgtgtgtgattgctgtggaccgctactttgccatcaccagccccttcaagtaccagagcctgctgaccaagaacaaggcccgggtcatcatcctgatggtgtggatcgtgtctggcctgaccagcttcctgcccatccagatgcactggtaccgggccacccaccaggaggccatcaactgctacgccaatgagacctgctgtgacttcttcaccaaccaggcctatgccatcgccagcagcatcgtgtccttctacgtgcccctggtgatcatggtgtttgtgtacagcagggtcttccaggaggccaagaggcagctgcagaagattgacaagtctgagggccgcttccacgtgcagaacctgagccaggtggagcaggacggccgcacaggccacggcctgcggcgcagcagcaagttctgcctgaaggagcacaaggccctgaagaccctgggcatcatcatgggcaccttcaccctgtgctggctgcccttcttcatcgtgaacatcgtgcacgtgatccaggacaacctgatcaggaaggaggtgtacatcctgctgaactggattggctacgtgaacagcggcttcaaccccctcatctactgccgcagcccagacttccgcatcgccttccaggagctgctgtgcctgcggcgcagcagcctgaaggcctatggaaatggctacagcagcaatggaaacacaggagagcagagcggctaccacgtggagcaggagaaggagaacaagctgctgtgtgaggacctgcccggcacagaagattttgtgggccaccagggcaccgtgcccagcgacaacatcgacagccagggcaggaactgcagcaccaatgacagcctgctgtag

SEQ ID NO: 73 - DNA, 1242 bp, Artificial Sequence
  derived and/or modified sequence
atgggccagcccggcaacggcagcgccttcctgctggcccccaacgggtcccatgctcccgatcatgatgtgacacaggagagagatgaggtctgggtggtcggtatggggattgttatgtcactaattgtactcgccatcgtgttcggcaatgtcctggtgatcacagcgatcgccaaatttgagcggctacagacagtaaccaattacttcatcacaagcttggcgtgtgccgatctcgtaatgggcctggctgttgtgccttttggtgcagcccacatactaatgaagatgtggactttcggcaacttctggtgtgaattctggacttctatagatgtcctgtgtgtgaccgcatcgatcgagacgctctgtgtgatagccgtggaccgatacttcgcaataacctctcccttcaagtaccagtccttactaacaaagaacaaggcgagggtgatcattctcatggtatggattgtaagtggcctcacaagcttcctgcctatccaaatgcactggtatcgggctacccaccaggaggcaattaattgctacgcaaacgagacttgttgcgacttttttaccaatcaggcttacgccatagcgtcctctatagtgagcttttacgtcccattggtcatcatggtatttgtgtatagtagggttttccaggaagccaaaagacaactgcaaaagatcgataaatcagaggggcgattccacgtgcagaacctctcccaggtggagcaggacgggcggaccggacacggactgcggcgaagtagcaagttctgcctgaaggaacacaaggctctgaagacattaggcatcataatgggtacctttactctgtgctggctccccttttttatcgtcaatattgtacatgtgattcaagataacctgatccggaaggaggtctacatcttactgaattggataggctatgtaaactccgggtttaatcccctcatctactgtcgcagccccgactttcggattgcatttcaggaactcctctgcctgcggcgctcaagtctcaaggcatacggtaacggatattcttctaatgggaacacaggagagcagagcggctatcatgtggaacaggagaaagaaaacaaattactgtgcgaggatcttccaggcacggaggatttcgtagggcatcaggggaccgtccccagtgataatatcgattctcagggaaggaactgttcgacgaacgattctctcctatag

SEQ ID NO: 74 - DNA, 1242 bp, Artificial Sequence
  derived and/or modified sequence
atgggccagcctggaaatggcagtgcgttcctgctggcacccaatgggagccatgcaccagaccacgatgttacacaggagcgcgacgaagtctgggtagtcggcatgggaatcgttatgtctctgattgtcctggctattgtgttcggcaacgtcctcgtaattactgccatcgccaaatttgagagactccaaaccgtcactaactactttattacctcactggcgtgcgcagatctggtgatggggttagcagtggtaccttttggcgctgcgcacattttaatgaagatgtggacatttggtaatttttggtgtgaattttggacgtctatcgatgtgctgtgcgtgactgcctcgattgaaactttatgcgtaattgcagttgacaggtattttgcaattacatctcctttcaagtatcaatccttattaaccaagaataaggctcgagtgatcattctgatggtctggatcgtaagtgggctgaccagctttttaccgattcagatgcactggtacagagccacccaccaggaggccatcaattgttatgccaacgaaacttgctgcgactttttcacaaatcaggcgtatgccattgcttcatctatcgttagcttctatgttccactggtcataatggtgtttgtctacagtcgggttttccaggaggcgaagagacagctgcaaaaaatcgacaagagcgaaggcagattccatgtgcaaaatctgtctcaagtcgaacaagatggcagaacaggacatggtctgcggagaagcagtaaattctgcctcaaagaacataaagcacttaagacactgggtataatcatggggacctttactctttgctggctcccattcttcattgttaatatcgtgcacgtcatccaggataatctgattcggaaagaggtttatattctgctcaattggatcggatacgtgaacagtggattcaaccccctcatttattgtcgttcccccgactttcgaatcgcctttcaggaattgctgtgcctgagaagaagctccctcaaagcttacgggaacggctacagctctaacgggaatactggagagcagagcggatatcacgtggagcaagaaaaggagaataagcttctttgcgaagatcttcctgggacagaagattttgtgggccaccagggtacagtgccaagcgataacatcgacagccaaggacgaaactgttcgactaacgacagcctactgtag

SEQ ID NO: 75 - DNA, 1242 bp, Artificial Sequence
  derived and/or modified sequence
atgggccagcccggcaacggcagcgccttcctgctggcccccaacggcagccacgcccccgaccacgacgtgacccaggagagagacgaggtgtgggtggtgggcatgggcatcgtgatgagcctgatcgtgctggccatcgtgttcggcaacgtgctggtgatcaccgccatcgccaagttcgagagactgcagaccgtgaccaactacttcatcaccagcctggcctgcgccgacctggtgatgggcctggccgtggtgcccttcggcgccgcccacatcctgatgaagatgtggaccttcggcaacttctggtgcgagttctggaccagcatcgacgtgctgtgcgtgaccgccagcatcgagaccctgtgcgtgatcgccgtggacagatacttcgccatcaccagccccttcaagtaccagagcctgctgaccaagaacaaggccagagtgatcatcctgatggtgtggatcgtgagcggcctgaccagcttcctgcccatccagatgcactggtacagagccacccaccaggaggccatcaactgctacgccaacgagacctgctgcgacttcttcaccaaccaggcctacgccatcgccagcagcatcgtgagcttctacgtgcccctggtgatcatggtgttcgtgtacagcagagtgttccaggaggccaagagacagctgcagaagatcgacaagagcgagggcagattccacgtgcagaacctgagccaggtggagcaggacggcagaaccggccacggcctgagaagaagcagcaagttctgcctgaaggagcacaaggccctgaagaccctgggcatcatcatgggcaccttcaccctgtgctggctgcccttcttcatcgtgaacatcgtgcacgtgatccaggacaacctgatcagaaaggaggtgtacatcctgctgaactggatcggctacgtgaacagcggcttcaaccccctgatctactgcagaagccccgacttcagaatcgccttccaggagctgctgtgcctgagaagaagcagcctgaaggcctacggcaacggctacagcagcaacggcaacaccggcgagcagagcggctaccacgtggagcaggagaaggagaacaagctgctgtgcgaggacctgcccggcaccgaggacttcgtgggccaccagggcaccgtgcccagcgacaacatcgacagccagggcagaaactgcagcaccaacgacagcctgctgtag

SEQ ID NO: 76 - protein, 408 aa, Artificial Sequence
  derived and/or modified sequence
MAPWPHENSSLAPWPDLPTLAPNTANTSGLPGVPWEAALAGALLALAVLATVGGNLLVIVAIAWTPRLQTMTNVFVTSLAAADLVMGLLVVPPAATLALTGHWPLGATGCELWTSVDVLCVTASIETLCALAVDRYLAVTNPLRYGALVTKRCARTAVVLVWVVSAAVSFAPIMSQWWRVGADAEAQRCHSNPRCCAFASNMPYVLLSSSVSFYLPLLVMLFVYARVFVVATRQLRLLRGELGRFPPEESPPAPSRSLAPAPVGTCAPPEGVPACGRRPARLLPLREHRALCTLGLIMGTFTLCWLPFFLANVLRALGGPSLVPGPAFLALNWLGYANSAFNPLIYCRSPDFRSAFRRLLCRCGRRLPPEPCAAARPALFPSGVPAARSSPAQPRLCQRLDGASWGVS

SEQ ID NO: 77 - DNA, 1227 bp, Artificial Sequence
  derived and/or modified sequence
atggccccgtggcctcacgagaattccagtctggccccttggcccgaccttcccacgctggcacctaatactgcaaatacgagcggattaccaggtgtcccatgggaggccgccttagctggagcgttgctagcccttgcagtgctggcgaccgtggggggcaatttactggtgatagtggctatcgcatggacaccacgcttacagactatgacaaatgtctttgtcaccagtttagccgccgccgatctggttatgggtttgctagtagtgcctcctgctgctacactggccctgaccggccactggcccctgggggccacgggctgcgaactttggacatctgtggatgtgctgtgtgttaccgcctccatcgagacgctatgcgcactggccgttgaccggtatctggctgttacgaatcccttgcggtatggcgccttagttacgaaaagatgcgcccgtacggccgtggttttggtgtgggttgtgtccgctgccgtctcctttgcccctatcatgtcccagtggtggcgggtgggtgccgacgccgaggcacagcgttgtcattcaaaccctcgctgctgtgcgtttgccagcaatatgccctatgtgttgctaagctcttctgtctctttctacttgcctctcctagtaatgctttttgtgtacgcccgagtttttgtggtggctacacgacaacttaggctactgcgcggcgaactgggacggttccctcccgaagaatcacccccggcccctagtcgttctctcgcacccgctccggtgggcacctgcgctccccccgagggcgttccagcctgcggtcgccgccctgcgcgcctccttcctctcagggagcaccgcgcactgtgcacattaggtttaatcatgggaacttttactctctgctggttgcctttctttctcgccaatgtgttgagggccctgggaggcccatcactggtgcccggcccagcctttctcgccttgaattggcttggatacgcaaatagcgcctttaatccccttatttactgcaggtctcctgatttccggtccgcttttcgccggttgctgtgccgttgtggcagaaggctcccccctgaaccgtgtgccgcagctcgtccagccttatttccgtcaggggtcccagcagccagatcttcgccagcacagccacgcctgtgtcaacgcttagacggtgcttcatggggcgtgagttag

SEQ ID NO: 78 - DNA, 2943 bp, Artificial Sequence
  derived and/or modified sequence
ctctgatacataaagggtggggatgggagcgctctcctctctccttcccctgccttgctgtgggaacttctgggaaaggaggtgcagggctccaggaagccagtgcccagggagtgctatgctgagtccaggagcctggccacggcaggggtggacagatggtggcagaggaaccacggtgtcccttcctccagatttagctaaaggaaacgtggagcatcccattggccatcctccccactctccaattcggctccagaggcccctccagactataggcagctgcccctttaagcgtcgctactcctcccccaagagcggtggcaccgagggagttggggtggggggaggctgagcgctctggctgggacagctagagaagatggcccaggctggggaagtcgctctcatgccttgctgtcccctcccctgagccaggtgatttgggagaccccctccttccttctttccctaccgccccacgcgcgacccggggatggctccgtggcctcacgagaacagctctcttgccccatggccggacctccccaccctggcgcccaataccgccaacaccagtgggctgccaggggttccgtgggaggcggccctagccggggccctgctggcgctggcggtgctggccaccgtgggaggcaacctgctggtcatcgtggccatcgcctggactccgagactccagaccatgaccaacgtgttcgtgacttcgctggccgcagccgacctggtgatgggactcctggtggtgccgccggcggccaccttggcgctgactggccactggccgttgggcgccactggctgcgagctgtggacctcggtggacgtgctgtgtgtgaccgccagcatcgaaaccctgtgcgccctggccgtggaccgctacctggctgtgaccaacccgctgcgttacggcgcactggtcaccaagcgctgcgcccggacagctgtggtcctggtgtgggtcgtgtcggccgcggtgtcgtttgcgcccatcatgagccagtggtggcgcgtaggggccgacgccgaggcgcagcgctgccactccaacccgcgctgctgtgccttcgcctccaacatgccctacgtgctgctgtcctcctccgtctccttctaccttcctcttctcgtgatgctcttcgtctacgcgcgggttttcgtggtggctacgcgccagctgcgcttgctgcgcggggagctgggccgctttccgcccgaggagtctccgccggcgccgtcgcgctctctggccccggccccggtggggacgtgcgctccgcccgaaggggtgcccgcctgcggccggcggcccgcgcgcctcctgcctctccgggaacaccgggccctgtgcaccttgggtctcatcatgggcaccttcactctctgctggttgcccttctttctggccaacgtgctgcgcgccctggggggcccctctctagtcccgggcccggctttccttgccctgaactggctaggttatgccaattctgccttcaacccgctcatctactgccgcagcccggactttcgcagcgccttccgccgtcttctgtgccgctgcggccgtcgcctgcctccggagccctgcgccgccgcccgcccggccctcttcccctcgggcgttcctgcggcccggagcagcccagcgcagcccaggctttgccaacggctcgacggggcttcttggggagtttcttaggcctgaaggacaagaagcaacaactctgttgatcagaacctgtggaaaacctctggcctctgttcagaatgagtcccatgggattccccggctgtgacactctaccctccagaacctgacgactgggccatgtgacccaaggagggatccttaccaagtgggttttcaccatcctcttgctctctgtctgagagatgttttctaaaccccagccttgaacttcactcctccctcagtggtagtgtccaggtgccgtggagcagcaggctggctttggtaggggcacccatcacccggcttgcctgtgcagtcagtgagtgcttagggcaaagagagctcccctggttccattccttctgccacccaaaccctgatgagaccttagtgttctccaggctctgtggcccaggctgagagcagcagggtagaaaagaccaagatttggggttttatctctggttcccttattactgctctcaagcagtggcctctctcactttagccatggaatggctccgatctacctcacagcagtgtcagaaggacttcgccagggttttgggagctccagggttcataagaaggtgaaccattagaacagatcccttcttttccttttgcaatcagataaataaatatcactgaatgcagttcatcctcggccccctttccctccgtttgttttcttttcataatccacttactcccttcccttctactctgcgctggcttttgacagaggcagtaaattaggcctaatcctcactcttttcttcctaatcttcatcaaacaaaaaatgaaaagtctgtctggacgaaggggagtgagcttgagcctttgatatcttgctcccccacccttcctgaaactcttgaaatccagttgccattgagtagcaaagccacgctccccacaggacttggacagagggcccacagggggatgggctggctgtggccaggtttagggcagggggcatttgtcccctccatgctataatccagtggtgccttacatggtgtgtgtgtgtgtgtgtgcgtgtgtgtgtgtgtgtgtgtgtctggaggcacaggcacaaagcattgcttgggttggtcaaatgtcttgtgtcataaatatattctgatgtttcccagcctttccacaacctctaccttcccactcaccttccccagctacaaaaatctgtattatcctcttaaagtaaaactggagttac

SEQ ID NO: 79 - DNA, 1227 bp, Artificial Sequence
  derived and/or modified sequence
atggccccctggccccatgagaacagcagcctggccccctggccagacctgcccaccctggcccccaacacagccaacaccagcggcctgcccggggtgccctgggaggccgccctggccggggccctgctggccctggccgtgctggccaccgtgggcggcaacctgctggtgattgtggccatcgcctggaccccccggctgcagaccatgaccaacgtgtttgtgaccagcctggccgctgctgacctggtgatgggcctgctggtggtgcccccagctgccaccctggccctgaccggccactggcccctgggcgccaccggctgtgagctgtggacctctgtggatgtgctgtgtgtgacagccagcattgagaccctgtgtgccctggccgtggaccgctacctggccgtgaccaaccccctgcgctatggagccctggtgaccaagagatgtgccaggacagctgtggtgctggtgtgggtggtgtctgctgctgtgtcctttgcccccatcatgagccagtggtggagggtgggcgcagatgctgaggcccagcgctgccacagcaacccccgctgctgtgcctttgccagcaacatgccctacgtgctgctgagcagctctgtgtccttctacctgcccctgctggtgatgctgtttgtgtatgcccgggtgtttgtggtggccacccggcagctgcggctgctgcggggggagctgggccgcttccccccagaggagagccccccagcccccagccgcagcctggccccagcccctgtgggcacctgtgcccctcctgagggcgtgcctgcctgtggcagaagacctgcccggctgctgcccctgcgggagcaccgggccctgtgcaccctgggcctcatcatgggcaccttcaccctgtgctggctgcccttcttcctggccaacgtgctgcgggccctgggcggccccagcctggtgcccggccctgccttcctggccctgaactggctgggctacgccaacagcgccttcaaccccctcatctactgccgcagcccagacttccgcagcgccttccggcggctgctgtgccgctgtggccgccgcctgcccccagagccctgtgccgccgcccggcctgccctcttccccagcggcgtgcctgctgcccggagcagccctgcccagccccggctgtgccagaggctggatggagcctcctggggcgtgtcctag

SEQ ID NO: 80 - DNA, 1227 bp, Artificial Sequence
  derived and/or modified sequence
atggccccctggccccacgagaacagcagcctggccccctggcccgatctgcccacgctggcccctaatacagctaacaccagtggcctgccaggggtgccatgggaagctgcccttgccggagctctgctggctctggctgtgctcgccacagtcggcggcaatctgctggtcatcgtagctatcgcatggactcctaggctacagacaatgaccaatgtcttcgttacatcgctggccgcagcagacctggtgatgggcctcttggtggtcccccctgcagcgacccttgcgctgacaggccactggccgttgggtgctactgggtgcgagctgtggaccagtgtagacgtcctatgcgtcaccgcaagcattgaaacactatgtgccctggctgttgaccggtatctggctgttaccaaccctctacggtatggtgcacttgtgaccaagaggtgtgcgaggacagctgttgtgctagtgtgggtcgtctctgctgctgtgtcctttgccccaattatgagtcagtggtggagggtgggggctgacgcggaggcacagaggtgccacagtaatcctagatgttgcgcgtttgcatcaaacatgccctacgtgctgttgtcgtcttcagtctccttttacctgcctctgctcgtgatgctctttgtatatgctcgcgtttttgttgttgccactcgccagttgcgcctcctgagaggggaacttggacggttccctccggaagaatctccgcctgcaccgagccgctcacttgcccctgccccagtcggcacctgtgctccccctgagggggtgccagcgtgtggtagacggcctgctaggctgctccccctgcgtgagcacagagcactgtgtacactgggactgattatggggaccttcacgctctgctggttgccctttttcctggccaatgtgctgagggccctagggggcccgtccctcgtgcccggcccagcctttcttgcactgaattggctaggatacgctaacagcgccttcaatcccctaatatattgccgcagccctgatttccgcagtgcctttagacgactgctctgtcgatgcggcaggcggcttccgcccgaaccatgcgccgccgcaagacctgctctattcccttccggggtgcctgcagctagaagctccccggcccagccccggttgtgtcagcgcctggacggagcctcttggggagtgtcctag

SEQ ID NO: 81 - DNA, 1227 bp, Artificial Sequence
  derived and/or modified sequence
atggccccatggccacatgaaaattcttcactcgcgccatggcctgacctccctacgctagcccctaataccgccaacacgtctggtcttccaggcgtcccttgggaagcagctcttgccggtgccttgctggcactggcagtgctagccactgtgggaggcaatctgctggtcattgtggccattgcctggacacccaggttgcagacaatgacaaacgtgttcgtgaccagtctggctgcggcagacctggttatgggcttgctggtagtgccccctgctgccacgctagcgctgactgggcattggcccttaggagctaccggctgcgagttgtggacatctgtggatgtgctatgcgtgactgcatctatcgagactctttgcgctctcgccgtcgaccgttatctggccgtcaccaacccactgagatatggtgccctagtgacaaaaaggtgcgcaagaactgccgtggtgcttgtatgggtggtaagcgcggctgtttcttttgccccaataatgagtcagtggtggcgggtgggagctgatgccgaagcacagagatgtcattcaaatcccaggtgctgcgcgttcgcatcaaacatgccttacgtgctactcagcagcagcgtttctttttatctgcctttgcttgtgatgttgtttgtttacgctcgggttttcgtggtcgctacaaggcagctgcggctgttgcgtggagaattgggtcggttccctcccgaggaaagtcccccagcgccttcacgcagtctggcccctgcccctgtgggaacttgtgctccgccagagggtgtgcctgcctgtggccgtagaccagccagattgctgccactaagagaacatcgggcactgtgcaccctgggactgattatgggcacctttactctgtgctggctgcctttcttcctggccaatgtgcttagagctctaggcggaccctcattggtccctggtccagccttcctcgcattgaactggctcggctacgccaactctgccttcaatcctctgatttactgtcggagtcctgacttccgatcagcttttcggcgtctcctgtgccgctgcggtagaaggctgccccctgagccatgtgccgctgccaggcctgccttgtttccttcaggagtgccagctgcccgttcctcacccgctcagcctaggctttgccagcggttggatggtgcttcatggggcgtgtcctag

SEQ ID NO: 82 - DNA, 1227 bp, Artificial Sequence
  derived and/or modified sequence
atggccccctggccccacgagaacagcagcctggccccctggcccgacctgcccaccctggcccccaacaccgccaacaccagcggcctgcccggcgtgccctgggaggccgccctggccggcgccctgctggccctggccgtgctggccaccgtgggcggcaacctgctggtgatcgtggccatcgcctggacccccagactgcagaccatgaccaacgtgttcgtgaccagcctggccgccgccgacctggtgatgggcctgctggtggtgccccccgccgccaccctggccctgaccggccactggcccctgggcgccaccggctgcgagctgtggaccagcgtggacgtgctgtgcgtgaccgccagcatcgagaccctgtgcgccctggccgtggacagatacctggccgtgaccaaccccctgagatacggcgccctggtgaccaagagatgcgccagaaccgccgtggtgctggtgtgggtggtgagcgccgccgtgagcttcgcccccatcatgagccagtggtggagagtgggcgccgacgccgaggcccagagatgccacagcaaccccagatgctgcgccttcgccagcaacatgccctacgtgctgctgagcagcagcgtgagcttctacctgcccctgctggtgatgctgttcgtgtacgccagagtgttcgtggtggccaccagacagctgagactgctgagaggcgagctgggcagattcccccccgaggagagcccccccgcccccagcagaagcctggcccccgcccccgtgggcacctgcgccccccccgagggcgtgcccgcctgcggcagaagacccgccagactgctgcccctgagagagcacagagccctgtgcaccctgggcctgatcatgggcaccttcaccctgtgctggctgcccttcttcctggccaacgtgctgagagccctgggcggccccagcctggtgcccggccccgccttcctggccctgaactggctgggctacgccaacagcgccttcaaccccctgatctactgcagaagccccgacttcagaagcgccttcagaagactgctgtgcagatgcggcagaagactgccccccgagccctgcgccgccgccagacccgccctgttccccagcggcgtgcccgccgccagaagcagccccgcccagcccagactgtgccagagactggacggcgccagctggggcgtgagctag

SEQ ID NO: 83 - protein, 484 aa, Artificial Sequence
  derived and/or modified sequence
MAAGGDHGSPDSYRSPLASRYASPEMCFVFSDRYKFRTWRQLWLWLAEAEQTLGLPITDEQIQEMKSNLENIDFKMAAEEEKRLRHDVMAHVHTFGHCCPKAAGIIHLGATSCYVGDNTDLIILRNALDLLLPKLARVISRLADFAKERASLPTLGFTHFQPAQLTTVGKRCCLWIQDLCMDLQNLKRVRDDLRFRGVKGTTGTQASFLQLFEGDDHKVEQLDKMVTEKAGFKRAFIITGQTYTRKVDIEVLSVLASLGASVHKICTDIRLLANLKEMEEPFEKQQIGSSAMPYKRNPMRSERCCSLARHLMTLVMDPLQTASVQWFERTLDDSANRRICLAEAFLTADTILNTLQNISEGLVVYPKVIERRIRQELPFMATENIIMAMVKAGGSRQDCHEKIRVLSQQAASVVKQEGGDNDLIERIQVDAYFSPIHSQLDHLLDPSSFTGRASQQVQRFLEEEVYPLLKPYESVMKVKAELCL

SEQ ID NO: 84 - protein, 498 aa, Artificial Sequence
  derived and/or modified sequence
MAAGGDHGSPDSYRSPLASRYASPEMCFVFSDRYKFRTWRQLWLWLAEAEQTLGLPITDEQIQEMKSNLENIDFKMAAEEEKRLRHDVMAHVHTFGHCCPKAAGIIHLGATSCYVGDNTSLILSRGVIKAYCNLRLPGSDSSPVSVSQLARVISRLADFAKERASLPTLGFTHFQPAQLTTVGKRCCLWIQDLCMDLQNLKRVRDDLRFRGVKGTTGTQASFLQLFEGDDHKVEQLDKMVTEKAGFKRAFIITGQTYTRKVDIEVLSVLASLGASVHKICTDIRLLANLKEMEEPFEKQQIGSSAMPYKRNPMRSERCCSLARHLMTLVMDPLQTASVQWFERTLDDSANRRICLAEAFLTADTILNTLQNISEGLVVYPKVIERRIRQELPFMATENIIMAMVKAGGSRQDCHEKIRVLSQQAASVVKQEGGDNDLIERIQVDAYFSPIHSQLDHLLDPSSFTGRASQQVQRFLEEEVYPLLKPYESVMKVKAELCL

SEQ ID NO: 85 - DNA, 1497 bp, Artificial Sequence
  derived and/or modified sequence
atggccgcaggaggagatcacggatctccggattcttatcggtccccactggcttcaagatacgcttcacccgaaatgtgttttgtattttcagatcgctacaagtttcgaacgtggcggcagctgtggttgtggctggccgaagcggagcagactctcggactccctattaccgatgaacagatacaggaaatgaaatccaatctcgagaacatcgattttaaaatggccgcggaggaggagaagcgtctgcgtcacgatgtcatggcgcacgttcataccttcggccattgttgcccaaaggccgcaggaattattcacctgggggctacctcctgctatgtgggggataacacttcactgatcctgtctaggggagtgattaaggcttactgcaacctgcgcctccctggctctgacagcagccctgttagtgtctctcagctggctagagtcattagcagattagcagactttgctaaggagagggcaagcctccctaccctgggcttcacacactttcagcctgctcagctcacgacggtgggaaagaggtgttgtctctggattcaggacttatgtatggacttgcagaacctgaaacgcgttagagatgaccttcggttcaggggtgttaaagggactactgggacacaggcctcttttctccaactttttgaaggcgacgatcacaaggtagaacagcttgacaaaatggtaaccgagaaggcggggttcaaacgcgcattcattatcacaggccagacttacaccaggaaggtggacatcgaagtcctgagcgtgctcgcatccctcggagcctcggtccataagatctgtacagacatcagactcctagcaaaccttaaggaaatggaagagccgtttgagaagcaacagatcggaagcagcgcaatgccatacaaacgcaaccctatgcgatctgaacgatgctgctctctggctcgacacctgatgaccctggtcatggaccccctgcaaactgcttccgtgcaatggttcgaacgtaccctggatgactccgcaaataggcggatttgtctagcagaggccttcttaacagctgatacaatccttaataccctgcagaatatctcagagggattggtcgtgtacccaaaagttatagagcggagaatacgtcaggagttgccattcatggctactgagaacataatcatggccatggtgaaggcaggtgggtcgcgacaggactgccacgagaagatccgagtcctctcccagcaggcagccagcgtggtcaagcaagagggtggagataacgatttgatcgaaagaattcaggtggacgcttatttctctccgattcatagccagcttgaccacttactcgatccctcaagcttcactggtcgagcctctcagcaggtccagcggtttctggaggaagaggtgtaccccctgctcaaaccttatgagagcgtcatgaaggtgaaggccgagctttgcctgtag

SEQ ID NO: 86 - DNA, 1455 bp, Artificial Sequence
  derived and/or modified sequence
atggcagctggcggggatcacggtagcccggacagctacagaagtccccttgcgtcacgatatgcatcaccagaaatgtgcttcgtgtttagcgatagatataagttccggacctggcgacaattgtggttatggctggcagaggccgaacagacccttgggctgccgattacagacgagcagattcaagaaatgaagtccaatctggagaacatcgactttaaaatggccgccgaggaagagaagagactgagacacgatgtgatggctcacgtccatacatttggacactgctgtccaaaggccgccggcatcattcacctgggtgccacttcttgttatgtgggagataacacagatctgatcattctacgcaatgccctggatctgcttcttcctaaacttgctcgggtgatcagccgactggctgacttcgcgaaggagcgggcgtccctgcccactcttggctttactcattttcagcccgcccagttgaccaccgtcggaaagagatgctgtctgtggatccaggatctgtgtatggatttacagaaccttaagagagtccgagatgatctacgtttccgtggtgtgaagggcaccaccggaacacaggcctccttccttcagctgttcgagggggacgaccacaaagtggaacagctggataaaatggtgaccgagaaggctgggtttaagcgcgccttcataataacagggcagacctacacgagaaaggttgatattgaggtgctgtcggttctggcctccctaggagcgtcagtgcacaaaatttgcacggatattaggctgctcgctaacctgaaggaaatggaggaaccatttgagaagcaacaaatcggtagtagcgccatgccatacaagcggaatcccatgaggtcagagagatgttgctcactggctcgccaccttatgacattagtgatggatcccctccagacggcaagcgtacagtggttcgagaggacactggatgacagcgccaaccgccggatttgtctggccgaggcttttctcactgctgatacgatcctgaatacacttcagaacatatctgaaggattggtcgtgtatccaaaggtgattgagcggcggatccgccaggaattgcccttcatggccacggaaaacattatcatggccatggtgaaagcaggaggatcccggcaggattgtcacgaaaaaattcgggtcttgtctcagcaggccgcatccgttgtgaaacaggaaggcggagataatgacctgatcgagcgaatccaggtcgatgcctacttctccccgatccactctcaattggatcacttactggacccttcttcgtttaccgggcgggcaagccagcaggtccaacgatttctggaagaagaagtgtaccctctgctgaaaccttacgaatcagtgatgaaggttaaggccgagctgtgtctgtag

SEQ ID NO: 87 - DNA, 1993 bp, Artificial Sequence
  derived and/or modified sequence
tttccgcttccgctcttccctggtccagtccaccctggcggggtcgcagggttgggatggcggctggaggcgatcatggttcgcccgacagctaccgctcacctcttgcctcccgctatgccagcccggagatgtgcttcgtgtttagcgacaggtataaattccggacatggcggcagctgtggctgtggctggcggaggccgagcagacattgggtttgcctatcacagatgaacaaatccaggagatgaaatcaaacctggagaacatcgacttcaagatggcagctgaggaagagaaacgtttacgacatgatgtgatggctcacgtgcacacatttggccactgctgtccaaaagctgcaggcattattcaccttggtgctacttcttgctatgttggagacaatactgacttgattattcttagaaatgcacttgacctgcttttgccaaagcttgccagagtgatctctcggcttgccgactttgctaaggaacgagccagtctacccacattaggtttcacacatttccagcctgcacagctgaccacagttgggaaacgttgctgtctttggattcaggatctttgcatggatctccagaacttgaagcgtgtccgagatgacctgcgcttccggggagtaaagggtaccactggcactcaggccagtttcctgcagctctttgagggagatgaccataaggtagagcagcttgacaagatggtgacagaaaaggcaggatttaagagagctttcatcatcacagggcagacatatacacgaaaagtggatattgaagtactgtctgtgctggctagcttgggggcatcagtgcacaagatttgcaccgacatacgcctcctggcaaacctcaaggagatggaggaaccctttgaaaaacagcagattggctcaagtgcgatgccatataagcggaatcccatgcgttcagaacgttgctgcagtcttgcccgccacctgatgacccttgtcatggacccgctacagacagcatctgtccagtggtttgaacgcacactggatgatagtgccaaccgacggatctgtttggccgaggcatttcttaccgcagatactatattgaatacgctgcagaacatttctgaaggattggtcgtgtaccccaaagtaattgaacggcgcattcggcaagagctgcctttcatggccacagagaacatcatcatggccatggtcaaagctggaggtagccgccaggattgccatgagaaaatcagagtgctttctcagcaggcagcttctgtggttaagcaggaagggggtgacaatgacctcatagagcgtatccaggttgatgcctacttcagtcccattcactcccagttggatcatttactggatccttcttctttcactggtcgtgcctcccagcaggtgcagagattcttagaagaggaggtgtatcccctgttaaaaccatatgaaagcgtgatgaaggtgaaagcagaattatgtctgtagagttggaagagaattaaacgaaaatcattgttaattgctgaggcatgaaaattgtgttactataatgccttattttacctcgagaattgttaccttaaattagtacagcactttcttcttcccatggtgctttcctgtttctcagtctcacatttctcaacaaggcaaaaacaaagagcgttgaagttgactctgctcttgcatagtaaatgtagttcatacttgatctctgttctttcaaggcatattttccagctgcctcaagtttagtccttttcacgtgttcatttgcttgtaaagtagcaagaaatttctggtcctgtcttctaaaagtgaatttgatctaggtctagcaaaataacctggactcagtgattgagtcaatggtcagataccttttatttcggttatttttggctagtataagtgatgaagtttggaactacagtaaatacttaaaaaaaaaaaaaaaaagaaccaaa

SEQ ID NO: 88 - DNA, 1620 bp, Artificial Sequence
  derived and/or modified sequence
cagtccaccctggcggggtcgcagggttgggatggcggctggaggcgatcatggttcgcccgacagctaccgctcacctcttgcctcccgctatgccagcccggagatgtgcttcgtgtttagcgacaggtataaattccggacatggcggcagctgtggctgtggctggcggaggccgagcagacattgggtttgcctatcacagatgaacaaatccaggagatgaaatcaaacctggagaacatcgacttcaagatggcagctgaggaagagaaacgtttacgacatgatgtgatggctcacgtgcacacatttggccactgctgtccaaaagctgcaggcattattcaccttggtgctacttcttgctatgttggagacaatactagtctcattctgtcaaggggcgtgatcaaggcttattgcaacctccgcctcccaggctcagacagctctcctgtctcagtctcccaacttgccagagtgatctctcggcttgccgactttgctaaggaacgagccagtctacccacattaggtttcacacatttccagcctgcacagctgaccacagttgggaaacgttgctgtctttggattcaggatctttgcatggatctccagaacttgaagcgtgtccgagatgacctgcgcttccggggagtaaagggtaccactggcactcaggccagtttcctgcagctctttgagggagatgaccataaggtagagcagcttgacaagatggtgacagaaaaggcaggatttaagagagctttcatcatcacagggcagacatatacacgaaaagtggatattgaagtactgtctgtgctggctagcttgggggcatcagtgcacaagatttgcaccgacatacgcctcctggcaaacctcaaggagatggaggaaccctttgaaaaacagcagattggctcaagtgcgatgccatataagcggaatcccatgcgttcagaacgttgctgcagtcttgcccgccacctgatgacccttgtcatggacccgctacagacagcatctgtccagtggtttgaacgcacactggatgatagtgccaaccgacggatctgtttggccgaggcatttcttaccgcagatactatattgaatacgctgcagaacatttctgaaggattggtcgtgtaccccaaagtaattgaacggcgcattcggcaagagctgcctttcatggccacagagaacatcatcatggccatggtcaaagctggaggtagccgccaggattgccatgagaaaatcagagtgctttctcagcaggcagcttctgtggttaagcaggaagggggtgacaatgacctcatagagcgtatccaggttgatgcctacttcagtcccattcactcccagttggatcatttactggatccttcttctttcactggtcgtgcctcccagcaggtgcagagattcttagaagaggaggtgtatcccctgttaaaaccatatgaaagcgtgatgaaggtgaaagcagaattatgtctgtagagttggaagagaattaaacgaaaatcattgttaattgctgaggcatgaaaattgtgttactataatgccttattttacctcgagaattgtta

SEQ ID NO: 89 - DNA, 1497 bp, Artificial Sequence
  derived and/or modified sequence
atggctgctggaggagaccacggcagcccagacagctaccgcagccccctggccagccgctatgccagccctgagatgtgctttgtgttcagtgaccgctacaagttccgcacctggaggcagctgtggctgtggctggccgaggccgagcagaccctgggcctgcccatcacagatgagcagatccaggagatgaagagcaacctggagaacatcgacttcaagatggctgctgaggaggagaagaggctgcggcatgatgtgatggcccacgtgcacaccttcggccactgctgccccaaggctgctggcatcatccacctgggcgccaccagctgctacgtgggggacaacaccagcctcatcctgagccggggcgtcatcaaggcctactgcaacctgcggctgcccggcagtgacagcagccctgtgtctgtgtcccagctggcccgggtcatcagccggctggccgactttgccaaggagcgggccagcctgcccaccctgggcttcacccacttccagcctgcccagctgaccaccgtgggcaagcgctgctgcctgtggatccaggacctgtgcatggacctgcagaacctgaagagggtgagagatgacctgcgcttccggggcgtgaagggcaccaccggcacccaggccagcttcctgcagctgtttgaaggagatgaccacaaggtggagcagctggacaagatggtgacagagaaggccggcttcaagagggccttcatcatcaccggccagacctacaccaggaaggtggacatcgaggtgctgtctgtgctggccagcctgggcgcctctgtgcacaagatctgcacagacatccggctgctggccaacctgaaggagatggaggagccctttgagaagcagcagatcggcagcagcgccatgccctacaagaggaaccccatgaggtctgagcgctgctgcagcctggcccggcacctgatgaccctggtgatggaccccctgcagacagcctctgtgcagtggtttgagaggaccctggatgacagcgccaacagacgcatctgcctggccgaggccttcctgacagctgacaccatcctgaacaccctgcagaacatcagcgagggcctggtggtgtaccccaaggtgattgaaagacgcatccggcaggagctgcccttcatggccacagagaacatcatcatggccatggtgaaggccggcggcagccggcaggactgccacgagaagatccgggtgctgagccagcaggccgcctctgtggtgaagcaggagggcggggacaatgacctgattgaaagaatccaggtggatgcctacttcagccccatccacagccagctggaccacctgctggaccccagcagcttcaccggccgggccagccagcaggtgcagcgcttcctggaggaggaggtgtaccccctgctgaagccctatgagagcgtgatgaaggtgaaggccgagctgtgcctgtag

SEQ ID NO: 90 - DNA, 1455 bp, Artificial Sequence
  derived and/or modified sequence
atggctgctggaggagaccacggcagcccagacagctaccgcagccccctggccagccgctatgccagccctgagatgtgctttgtgttcagtgaccgctacaagttccgcacctggaggcagctgtggctgtggctggccgaggccgagcagaccctgggcctgcccatcacagatgagcagatccaggagatgaagagcaacctggagaacatcgacttcaagatggctgctgaggaggagaagaggctgcggcatgatgtgatggcccacgtgcacaccttcggccactgctgccccaaggctgctggcatcatccacctgggcgccaccagctgctacgtgggggacaacacagacctgatcatcctgagaaatgccctggacctgctgctgcccaagctggcccgggtcatcagccggctggccgactttgccaaggagcgggccagcctgcccaccctgggcttcacccacttccagcctgcccagctgaccaccgtgggcaagcgctgctgcctgtggatccaggacctgtgcatggacctgcagaacctgaagagggtgagagatgacctgcgcttccggggcgtgaagggcaccaccggcacccaggccagcttcctgcagctgtttgaaggagatgaccacaaggtggagcagctggacaagatggtgacagagaaggccggcttcaagagggccttcatcatcaccggccagacctacaccaggaaggtggacatcgaggtgctgtctgtgctggccagcctgggcgcctctgtgcacaagatctgcacagacatccggctgctggccaacctgaaggagatggaggagccctttgagaagcagcagatcggcagcagcgccatgccctacaagaggaaccccatgaggtctgagcgctgctgcagcctggcccggcacctgatgaccctggtgatggaccccctgcagacagcctctgtgcagtggtttgagaggaccctggatgacagcgccaacagacgcatctgcctggccgaggccttcctgacagctgacaccatcctgaacaccctgcagaacatcagcgagggcctggtggtgtaccccaaggtgattgaaagacgcatccggcaggagctgcccttcatggccacagagaacatcatcatggccatggtgaaggccggcggcagccggcaggactgccacgagaagatccgggtgctgagccagcaggccgcctctgtggtgaagcaggagggcggggacaatgacctgattgaaagaatccaggtggatgcctacttcagccccatccacagccagctggaccacctgctggaccccagcagcttcaccggccgggccagccagcaggtgcagcgcttcctggaggaggaggtgtaccccctgctgaagccctatgagagcgtgatgaaggtgaaggccgagctgtgcctgtag

SEQ ID NO: 91 - DNA, 1497 bp, Artificial Sequence
  derived and/or modified sequence
atggccgccggcggcgaccacggcagccccgacagctaccggagccccttagcatcaagatacgccagcccagagatgtgctttgtgttcagcgacaggtataagtttcggacctggaggcaactgtggctctggttagctgaagccgagcaaactttaggcttaccaatcacagacgagcagatccaagagatgaagagcaatctggaaaatatagactttaagatggcagcagaggaggagaagagactccgccatgatgtcatggcgcacgtgcacactttcggacattgttgccctaaagccgccggaattatccacctcggtgctacatcgtgttatgtcggggacaataccagccttattctctcacgaggagtgattaaggcatattgtaacctgcgcctccctgggagcgactcttcaccagtgtctgtctcccagcttgcaagggtgatttcgcgcctagccgattttgcaaaagagcgggcctccctgccaaccctgggctttactcacttccagcctgcccagctaaccaccgtgggtaaaaggtgttgcctgtggattcaggacctgtgcatggacttacaaaaccttaagcgagtgcgcgatgacctgagattccgcggtgtcaagggaacaacaggaacccaggcatcttttttgcagctgtttgagggggacgaccacaaagttgagcagctagataagatggtcaccgaaaaggccggctttaaacgggctttcattataactgggcaaacgtatactcgtaaggtagacattgaagtattgagcgtgctcgcctctctcggggctagtgtgcataagatttgtaccgatattcgtctgctggcgaacctcaaagagatggaagaaccatttgagaaacagcagataggtagcagcgccatgccttacaaacgcaacccgatgcgctccgagcgctgctgcagcctcgcgcgtcacctgatgactcttgtgatggatcccctgcagactgcctccgtacagtggttcgaacgaaccctcgatgacagtgctaacaggaggatatgcctcgccgaagcttttcttacggcggacaccattctgaatacgctacagaacatttccgagggattggttgtgtatcccaaggtaatagagcgacggatacggcaggagctcccctttatggcgaccgagaatattattatggcaatggtaaaagccggcggttcgcgacaggattgccacgagaaaattagagtgctgtcccagcaggcggccagcgtcgtcaaacaggaaggaggcgacaatgacctgatcgagagaatccaggtcgacgcttactttagtccaatacactcccaacttgatcatcttctggatccatccagtttcaccgggcgcgccagccaacaggtgcagcggtttcttgaagaagaagtctacccccttctcaaaccttacgaatccgtaatgaaggtgaaagcggagctctgcctgtag

SEQ ID NO: 92 - DNA, 1455 bp, Artificial Sequence
  derived and/or modified sequence
atggccgccggcggcgaccacggcagccccgacagctaccggagccccctggcaagcaggtatgcgtcacccgagatgtgtttcgtgttttctgatcgttataaatttcggacttggaggcagctctggttatggttggccgaggcagagcagactctcggactccctatcactgacgaacagatacaggaaatgaaaagtaacttggaaaatatcgactttaaaatggctgctgaggaagagaaacgtctaagacacgatgtcatggcccacgtccacactttcggtcattgctgcccaaaagccgctggcatcattcatctcggcgctacttcttgttatgtcggggacaatactgacctcatcatcctgaggaatgccttggacttactgttgccgaaactggctcgagttatttctcgcctggcagattttgccaaggaaagagccagcctgccaacattaggctttactcacttccagcctgcccagctgaccacagtgggcaagcgctgctgtctctggatccaggacctttgcatggacttgcaaaacttgaagagggttcgggacgacctgagatttaggggagtgaaaggcacaaccggtacgcaggcatcctttctgcagttattcgaaggggatgatcataaggtcgagcagctcgataaaatggtgaccgagaaggccgggttcaagcgggccttcattattacggggcagacatacacccggaaagtggatatagaggttctgtccgtgctggcttcgcttggagcatctgtgcataaaatatgcaccgatatcagattgctcgccaatctgaaagaaatggaggagccatttgaaaagcagcagatcggatccagcgcaatgccatacaagagaaaccctatgaggtcggagcgctgctgctccttggcccggcacctcatgaccttggtcatggatccactgcaaacggcttcagtgcagtggtttgaacgaactttagacgatagtgctaacagacggatctgcctggccgaggcctttctgacggctgacactatcctgaacacactgcaaaacatcagcgaagggctggtggtataccctaaagtcattgaacgacggattagacaggagctgccttttatggccacagagaatatcattatggccatggtaaaagcagggggctcaagacaggactgccacgaaaaaatccgggtgttgagccagcaggctgcgtctgtggtaaagcaggaggggggtgacaacgacctcatcgaacgtatccaagtggacgcttatttctcccccattcattcccaactggaccacctgctggacccatctagcttcaccggtcgtgcttctcagcaggtgcagcggttcctcgaggaggaagtgtaccctctgctcaagccgtatgaaagtgtgatgaaagtgaaggccgagctgtgcctgtag

SEQ ID NO: 93 - DNA, 1497 bp, Artificial Sequence
  derived and/or modified sequence
atggccgctggcggtgatcacgggtcccccgacagctaccgaagtccgttggcctcacggtacgcatcccctgaaatgtgtttcgtgttttccgatcgctataagtttcgtacctggcgacaactctggctgtggctcgctgaggccgaacagaccttgggtctgcccataacagacgaacagatccaggagatgaaaagtaatcttgagaatatcgactttaagatggcagcagaggaggaaaaaagattgagacatgacgtgatggctcacgtgcacacatttggccactgctgcccaaaggccgcaggcattatccacctgggcgctacgagttgttacgtgggggacaatacgtctctgattctttccaggggtgtaatcaaagcgtactgtaacttaagacttcctgggtccgacagcagtcctgtttccgtctctcagttggccagagtgatcagtaggctagctgatttcgccaaggagagagcctcgcttcctactttaggttttacccattttcaacctgctcagctgaccaccgtcggaaaaagatgctgcctctggatccaggatctatgcatggatctgcagaacttaaagcgcgtgagggacgatctcagatttaggggggtcaaaggcaccaccgggactcaggcaagctttctgcagctgtttgaaggagacgatcacaaagtggaacagctggacaagatggtgaccgaaaaagctggcttcaagcgcgcattcatcatcactggccaaacttacacccgaaaggtggatattgaggtcctgtcagtcctggcctctctaggcgcttcagtgcacaaaatttgcacagatataaggctgttagcaaacctgaaggaaatggaagaaccattcgagaaacagcaaattggatcctctgccatgccatataagagaaatcccatgcgctctgaaagatgctgcagccttgccagacatcttatgacacttgtcatggatcctctgcagacagcatccgtccaatggttcgaaaggacacttgacgacagcgctaaccggagaatctgcttagctgaagctttcctgaccgcagacactatccttaatactttacagaacattagcgagggtcttgtggtataccctaaggtaatcgagagaagaatccgacaagaactaccattcatggccacagagaacatcattatggccatggtcaaggctgggggttcaagacaggactgccacgaaaagatacgcgtgctgagtcagcaggccgcttcagttgtaaagcaagaggggggtgataatgatctgatcgagagaatccaggtggacgcttatttctctccgatccattcccaactggatcacctgcttgaccccagctcgtttacagggcgagcgagccagcaggtgcagcgttttctggaagaggaggtgtaccccctgctgaaaccgtatgagagcgtcatgaaagttaaggctgaactgtgtctgtag

SEQ ID NO: 94 - DNA, 1455 bp, Artificial Sequence
  derived and/or modified sequence
atggcagctggcggagaccacggctcacctgactcatatcggtcccctctggcctcccgctacgccagccccgaaatgtgtttcgtgttcagtgacaggtacaaattccgcacctggcgccaactttggttatggttggcagaagccgagcagacactcggcctgcctatcaccgacgagcaaattcaggaaatgaaatcaaatctcgagaacatcgacttcaaaatggcagccgaagaagaaaaaaggctgagacatgacgtgatggctcatgtgcacacattcggacactgttgcccaaaagcagcagggattatccatttaggcgctacttcctgttacgtaggcgacaatacagatctgattatcctgcgcaacgccttagacttgctgctgccaaagcttgccagagttatttcccgtctcgcagattttgcaaaagagcgtgctagcctcccaactctgggcttcactcacttccaacccgctcaactgactactgtgggaaagcgctgctgtttgtggatccaggacctgtgcatggaccttcagaaccttaagcgcgtgcgggacgatctcagatttcgcggtgttaaaggtacaaccgggacgcaggcctcttttcttcagctgtttgagggggacgatcacaaagtggagcaactggacaagatggtgacagagaaggctggcttcaagcgggctttcatcatcacaggccaaacatatacccgtaaagtggacattgaggtcctgtctgtcctggcatccctgggcgcttcagtccacaaaatatgcacagacattcgattgctcgcgaatcttaaagagatggaagaaccattcgaaaaacagcagattggatcctcagccatgccttataagaggaatcccatgcggtccgagcggtgttgttccctggccagacacttaatgacactggttatggatccactgcaaactgcttccgtgcaatggtttgaacggacactggatgactctgccaataggcgcatctgcctggcagaagcctttctaacagctgatacaatcctgaacactttacaaaatatcagcgagggccttgtggtatatccaaaagtaattgagcgtcgtatacggcaggaattgccctttatggcaacagaaaacataataatggcgatggtgaaggccggaggcagtcggcaggattgccatgaaaagattagggtcctgagccagcaggcagcctccgtagtaaaacaggaaggaggtgacaatgatctcatcgagcggatccaggtcgacgcttatttctccccaattcattcccagttagaccatttgcttgatccatcttcatttacgggcagagcatcccagcaggtccagcggttcctggaggaggaggtctatcccctgctcaagccttacgagtccgtcatgaaagtgaaggctgagctgtgtctctag

SEQ ID NO: 95 - DNA, 1497 bp, Artificial Sequence
  derived and/or modified sequence
atggccgccggcggcgaccacggcagccccgacagctacagaagccccctggccagcagatacgccagccccgagatgtgcttcgtgttcagcgacagatacaagttcagaacctggagacagctgtggctgtggctggccgaggccgagcagaccctgggcctgcccatcaccgacgagcagatccaggagatgaagagcaacctggagaacatcgacttcaagatggccgccgaggaggagaagagactgagacacgacgtgatggcccacgtgcacaccttcggccactgctgccccaaggccgccggcatcatccacctgggcgccaccagctgctacgtgggcgacaacaccagcctgatcctgagcagaggcgtgatcaaggcctactgcaacctgagactgcccggcagcgacagcagccccgtgagcgtgagccagctggccagagtgatcagcagactggccgacttcgccaaggagagagccagcctgcccaccctgggcttcacccacttccagcccgcccagctgaccaccgtgggcaagagatgctgcctgtggatccaggacctgtgcatggacctgcagaacctgaagagagtgagagacgacctgagattcagaggcgtgaagggcaccaccggcacccaggccagcttcctgcagctgttcgagggcgacgaccacaaggtggagcagctggacaagatggtgaccgagaaggccggcttcaagagagccttcatcatcaccggccagacctacaccagaaaggtggacatcgaggtgctgagcgtgctggccagcctgggcgccagcgtgcacaagatctgcaccgacatcagactgctggccaacctgaaggagatggaggagcccttcgagaagcagcagatcggcagcagcgccatgccctacaagagaaaccccatgagaagcgagagatgctgcagcctggccagacacctgatgaccctggtgatggaccccctgcagaccgccagcgtgcagtggttcgagagaaccctggacgacagcgccaacagaagaatctgcctggccgaggccttcctgaccgccgacaccatcctgaacaccctgcagaacatcagcgagggcctggtggtgtaccccaaggtgatcgagagaagaatcagacaggagctgcccttcatggccaccgagaacatcatcatggccatggtgaaggccggcggcagcagacaggactgccacgagaagatcagagtgctgagccagcaggccgccagcgtggtgaagcaggagggcggcgacaacgacctgatcgagagaatccaggtggacgcctacttcagccccatccacagccagctggaccacctgctggaccccagcagcttcaccggcagagccagccagcaggtgcagagattcctggaggaggaggtgtaccccctgctgaagccctacgagagcgtgatgaaggtgaaggccgagctgtgcctgtag

SEQ ID NO: 96 - DNA, 1455 bp, Artificial Sequence
  derived and/or modified sequence
atggccgccggcggcgaccacggcagccccgacagctacagaagccccctggccagcagatacgccagccccgagatgtgcttcgtgttcagcgacagatacaagttcagaacctggagacagctgtggctgtggctggccgaggccgagcagaccctgggcctgcccatcaccgacgagcagatccaggagatgaagagcaacctggagaacatcgacttcaagatggccgccgaggaggagaagagactgagacacgacgtgatggcccacgtgcacaccttcggccactgctgccccaaggccgccggcatcatccacctgggcgccaccagctgctacgtgggcgacaacaccgacctgatcatcctgagaaacgccctggacctgctgctgcccaagctggccagagtgatcagcagactggccgacttcgccaaggagagagccagcctgcccaccctgggcttcacccacttccagcccgcccagctgaccaccgtgggcaagagatgctgcctgtggatccaggacctgtgcatggacctgcagaacctgaagagagtgagagacgacctgagattcagaggcgtgaagggcaccaccggcacccaggccagcttcctgcagctgttcgagggcgacgaccacaaggtggagcagctggacaagatggtgaccgagaaggccggcttcaagagagccttcatcatcaccggccagacctacaccagaaaggtggacatcgaggtgctgagcgtgctggccagcctgggcgccagcgtgcacaagatctgcaccgacatcagactgctggccaacctgaaggagatggaggagcccttcgagaagcagcagatcggcagcagcgccatgccctacaagagaaaccccatgagaagcgagagatgctgcagcctggccagacacctgatgaccctggtgatggaccccctgcagaccgccagcgtgcagtggttcgagagaaccctggacgacagcgccaacagaagaatctgcctggccgaggccttcctgaccgccgacaccatcctgaacaccctgcagaacatcagcgagggcctggtggtgtaccccaaggtgatcgagagaagaatcagacaggagctgcccttcatggccaccgagaacatcatcatggccatggtgaaggccggcggcagcagacaggactgccacgagaagatcagagtgctgagccagcaggccgccagcgtggtgaagcaggagggcggcgacaacgacctgatcgagagaatccaggtggacgcctacttcagccccatccacagccagctggaccacctgctggaccccagcagcttcaccggcagagccagccagcaggtgcagagattcctggaggaggaggtgtaccccctgctgaagccctacgagagcgtgatgaaggtgaaggccgagctgtgcctgtag

SEQ ID NO: 97 - protein, 346 aa, Artificial Sequence
  derived and/or modified sequence
MARKSNLPVLLVPFLLCQALVRCSSPLPLVVNTWPFKNATEAAWRALASGGSALDAVESGCAMCEREQCDGSVGFGGSPDELGETTLDAMIMDGTTMDVGAVGDLRRIKNAIGVARKVLEHTTHTLLVGESATTFAQSMGFINEDLSTTASQALHSDWLARNCQPNYWRNVIPDPSKYCGPYKPPGILKQDIPIHKETEDDRGHDTIGMVVIHKTGHIAAGTSTNGIKFKIHGRVGDSPIPGAGAYADDTAGAAAATGNGDILMRFLPSYQAVEYMRRGEDPTIACQKVISRIQKHFPEFFGAVICANVTGSYGAACNKLSTFTQFSFMVYNSEKNQPTEEKVDCI

SEQ ID NO: 98 - DNA, 1041 bp, Artificial Sequence
  derived and/or modified sequence
atggccagaaagagtaatctgccagtgcttttagttccattcctgctgtgtcaggctctggttcggtgtagttctcctttgccacttgtggtcaatacatggccatttaaaaacgccacagaggctgcatggagggcccttgccagtggtggatctgcattagacgccgttgagtctggctgtgccatgtgcgagcgggaacagtgtgatggctccgtgggcttcggaggcagcccagacgagctcggcgagacaactctggatgctatgatcatggacggaaccacaatggacgttggtgccgttggagatctccggagaatcaagaatgctatcggagttgctagaaaagtgctcgaacatacgacacatactctactggtgggcgagagtgccaccaccttcgcacagtccatggggtttatcaatgaggatctttcgacaaccgcgtcccaggctctgcattctgactggcttgctagaaactgtcagcccaactattggagaaatgtcataccagaccccagcaagtattgtggcccttataaacctcccggcatcctaaagcaggacatccccattcataaagagaccgaagatgacagaggacatgacactatcggaatggtggttatccacaagaccggacatatcgcagctggcaccagtactaatggcattaaattcaaaatacatggacgcgtgggggactcccccatcccaggggccggtgcctacgccgatgacactgctggagctgccgccgccacaggcaacggggatatcttgatgaggttcttgccgagctaccaggcagtggaatacatgcgtcgcggcgaggacccaaccattgcttgtcagaaggtgatctccagaatccagaagcactttcccgagttcttcggcgccgtgatttgcgccaatgtgaccgggtcttatggggccgcctgcaacaaactgtcgacgttcacccagttttcctttatggtgtataactcagaaaagaatcagccaaccgaggaaaaggttgactgcatctag

SEQ ID NO: 99 - DNA, 1041 bp, Artificial Sequence
  derived and/or modified sequence
atggccaggaagagcaacctgcctgtgctgctggtgcccttcctgctgtgccaggccctggtgcgctgcagcagccccctgcccctggtggtgaacacctggcccttcaagaatgccacagaggccgcctggagggccctggccagcggcggcagcgccctggatgctgtggagagcggctgtgccatgtgtgagcgggagcagtgtgatggctctgtgggctttggaggcagcccagatgagctgggggagaccaccctggatgccatgatcatggatggcaccaccatggatgtgggcgctgtgggggacctgcggcgcatcaagaatgccatcggcgtggccaggaaggtgctggagcacaccacccacaccctgctggtgggggagagcgccaccacctttgcccagagcatgggcttcatcaatgaagacctgagcaccacagccagccaggccctgcacagcgactggctggccaggaactgccagcccaactactggagaaatgtcatcccagaccccagcaagtactgcggcccctacaagcccccaggcatcctgaagcaggacatccccatccacaaggagacagaagatgaccggggccatgacaccatcggcatggtggtgatccacaagacaggccacatcgccgccggcaccagcaccaacggcatcaagttcaagatccacggccgggtgggggacagccccatccctggagctggggcctatgcagatgacacagctggagctgctgctgccactggaaatggagacatcctgatgaggttcctgcccagctaccaggccgtggagtacatgagaagaggagaggaccccaccatcgcctgccagaaggtgatcagccgcatccagaagcacttccctgagttctttggagctgtgatctgtgccaacgtgacaggcagctatggagctgcctgcaacaagctgagcaccttcacccagttctccttcatggtgtacaacagcgagaagaaccagcccacagaggagaaggtggactgcatctag

SEQ ID NO: 100 - DNA, 1041 bp, Artificial Sequence
  derived and/or modified sequence
atggcccggaagagcaacctgcccgtgctgctggtgcccttcctgttgtgccaagctctggtaaggtgtagttcccccctgccactggtcgtaaacacatggccttttaaaaacgccaccgaggcagcttggcgcgctctggcatcaggtggatccgccctggatgctgtggaaagcggatgcgccatgtgcgagcgtgagcagtgcgatggcagtgtcgggttcgggggcagccccgatgagctcggggagacaacacttgacgccatgattatggatggaaccactatggacgtaggcgcggttggcgacctgcggcggatcaagaacgccatcggggtcgcccggaaagtgcttgagcatactacacacacactactagtgggggaaagcgcgacaactttcgcacaatccatgggatttatcaacgaggatctgagcacaacggcttcccaggctctgcactctgactggctggcaagaaactgccagcccaattattggaggaatgtgatcccagatcccagcaagtactgcggcccgtacaaaccccccgggatcctcaagcaagacataccgatccataaagagaccgaggacgacagaggacatgataccatcggaatggttgtgatccacaaaaccggtcacatcgcggcaggcacctccactaacggtattaagttcaaaattcatggacgggtgggcgacagtccaatccccggggctggcgcctatgcggatgatactgcaggcgctgcagcagccactggcaacggcgacatcctgatgcgcttcttaccttcataccaggcagtggagtatatgcgcaggggcgaggaccccaccatcgcctgtcagaaagtgatttctcggatccagaagcatttcccggagtttttcggcgcagtcatctgcgccaatgtgactggatcctatggagcagcttgtaacaaattgtcaaccttcacccaattttcattcatggtgtacaatagtgagaagaatcagcctacagaagagaaagtggactgcatttag

SEQ ID NO: 101 - DNA, 1041 bp, Artificial Sequence
  derived and/or modified sequence
atggcaaggaaatccaacctgcctgtactgctggtcccatttttgctgtgccaagctcttgtcagatgcagctcaccactgccacttgtcgttaacacctggcctttcaaaaatgcaactgaggccgcatggcgtgcgctcgctagcggcggttcagcattggacgcagtggaaagtggctgcgccatgtgcgaacgggaacagtgcgatggcagtgtgggatttggtggttccccagatgagctgggcgagacaaccctggatgctatgataatggacggcactactatggatgtgggggcagtcggagatttacggcgaataaaaaatgcaatcggggtagcaagaaaggttcttgagcacaccacacatacactcctggtgggcgagagcgccactacatttgcccaaagtatggggtttatcaacgaagatttatcaactacggcttcccaggctctgcactccgattggttggccaggaactgccagcctaactactggaggaatgtcattcccgacccttcaaagtattgcgggccatataaacctccaggcatcctcaaacaggacatcccgattcacaaggagaccgaggacgatcggggacatgatacaattggaatggtagttatccacaagaccgggcacatcgccgctggcacatccactaacggtataaaattcaagatacatggacgggtgggcgatagccccatcccaggagctggtgcatacgccgacgataccgcaggcgcagccgctgccaccggaaatggggacattttgatgagattcctgccctcctatcaggcggtggaatatatgaggcgcggagaagacccaacaatagcctgccagaaggttatcagtagaatacagaaacatttcccagagttctttggtgctgtcatctgtgcaaatgtgacgggtagctatggagccgcttgcaataagcttagcacttttacccagttctcattcatggtgtataacagcgagaagaatcagccgacagaggagaaagtagattgtatctag

SEQ ID NO: 102 - DNA, 2107 bp, Artificial Sequence
  derived and/or modified sequence
agggacgcctgagcgaacccccgagagagcgggcgtgggcgccaggcgggcggggcactggggattaattgttcggcgatcgctggctgccgggacttttctcgcgctggtctcttcggtggtcagggatggcgcggaagtcgaacttgcctgtgcttctcgtgccgtttctgctctgccaggccctagtgcgctgctccagccctctgcccctggtcgtcaacacttggccctttaagaatgcaaccgaagcagcgtggagggcattagcatctggaggctctgccctggatgcagtggagagcggctgtgccatgtgtgagagagagcagtgtgacggctctgtaggctttggaggaagtcctgatgaacttggagaaaccacactagatgccatgatcatggatggcactactatggatgtaggagcagtaggagatctcagacgaattaaaaatgctattggtgtggcacggaaagtactggaacatacaacacacacacttttagtaggagagtcagccaccacatttgctcaaagtatggggtttatcaatgaagacttatctaccactgcttctcaagctcttcattcagattggcttgctcggaattgccagccaaattattggaggaatgttataccagatccctcaaaatactgcggaccctacaaaccacctggtatcttaaagcaggatattcctatccataaagaaacagaagatgatcgtggtcatgacactattggcatggttgtaatccataagacaggacatattgctgctggtacatctacaaatggtataaaattcaaaatacatggccgtgtaggagactcaccaatacctggagctggagcctatgctgacgatactgcaggggcagccgcagccactgggaatggtgatatattgatgcgcttcctgccaagctaccaagctgtagaatacatgagaagaggagaagatccaaccatagcttgccaaaaagtgatttcaagaatccagaagcattttccagaattctttggggctgttatatgtgccaatgtgactggaagttacggtgctgcttgcaataaactttcaacatttactcagtttagtttcatggtttataattccgaaaaaaatcagccaactgaggaaaaagtggactgcatctaatccatctttactgtcaacatctgtatttaaagaagaaagaaacaaaggctgaaaaggctgctcactctcatcatctagtgttcctcatgtgttctaaagtctttttgtaaaataaacacaaaaataaatttatgttgaattggcactttctatatctgaaattgtattatctatttttatttaacctttcttatattatctgaagatgaatatgtatgtggctgtattttgtatatatttaagttttaagtgacacttggatttctgatcagtgttgcaaaaaattgctactttgagatttatttccacagtgatatattaaacccaaaaggaatcatcatatttggatgcttaaaatagagtatacaagttttttagacccaaagaaaaaaacagcagagtctcagcatgatcagtcctgattgaatttcattatgtcacagtgatgcatgtcttagcactgattattggttttacttaatattccctaaaaacttgaggaaggaagatgatagaacatgagatactctttgttttgtacatactagaaaatacagctatcttctgatgagcaattgtgttgattttctttgcttttttcctcttatggagctctcagtgtgtgaaagttctaaagccacaagaatcaatgatgttttagctgctaatatttagtattgatcgtttcttttaaaaatgatttggggaacttgatctgtactgtaattttactaattccttgtgcagaggtgggtatggcaattagaagtcaagaaatgggttgtttagcttggtttgtttccctaacttctgattaactctctgtatgacaactctacagaagttgtgcgcgtgctttctcagcagcatttttccttcaaaatcatctttttaatcaacagtcattaataaatgtacatgtacgatattcaaacttt

SEQ ID NO: 103 - DNA, 1041 bp, Artificial Sequence
  derived and/or modified sequence
atggccagaaagagcaacctgcccgtgctgctggtgcccttcctgctgtgccaggccctggtgagatgcagcagccccctgcccctggtggtgaacacctggcccttcaagaacgccaccgaggccgcctggagagccctggccagcggcggcagcgccctggacgccgtggagagcggctgcgccatgtgcgagagagagcagtgcgacggcagcgtgggcttcggcggcagccccgacgagctgggcgagaccaccctggacgccatgatcatggacggcaccaccatggacgtgggcgccgtgggcgacctgagaagaatcaagaacgccatcggcgtggccagaaaggtgctggagcacaccacccacaccctgctggtgggcgagagcgccaccaccttcgcccagagcatgggcttcatcaacgaggacctgagcaccaccgccagccaggccctgcacagcgactggctggccagaaactgccagcccaactactggagaaacgtgatccccgaccccagcaagtactgcggcccctacaagccccccggcatcctgaagcaggacatccccatccacaaggagaccgaggacgacagaggccacgacaccatcggcatggtggtgatccacaagaccggccacatcgccgccggcaccagcaccaacggcatcaagttcaagatccacggcagagtgggcgacagccccatccccggcgccggcgcctacgccgacgacaccgccggcgccgccgccgccaccggcaacggcgacatcctgatgagattcctgcccagctaccaggccgtggagtacatgagaagaggcgaggaccccaccatcgcctgccagaaggtgatcagcagaatccagaagcacttccccgagttcttcggcgccgtgatctgcgccaacgtgaccggcagctacggcgccgcctgcaacaagctgagcaccttcacccagttcagcttcatggtgtacaacagcgagaagaaccagcccaccgaggagaaggtggactgcatctag

SEQ ID NO: 104 - protein, 485 aa, Artificial Sequence
  derived and/or modified sequence
MRKRAPQSEMAPAGVSLRATILCLLAWAGLAAGDRVYIHPFHLVIHNESTCEQLAKANAGKPKDPTFIPAPIQAKTSPVDEKALQDQLVLVAAKLDTEDKLRAAMVGMLANFLGFRIYGMHSELWGVVHGATVLSPTAVFGTLASLYLGALDHTADRLQAILGVPWKDKNCTSRLDAHKVLSALQAVQGLLVAQGRADSQAQLLLSTVVGVFTAPGLHLKQPFVQGLALYTPVVLPRSLDFTELDVAAEKIDRFMQAVTGWKTGCSLMGASVDSTLAFNTYVHFQGKMKGFSLLAEPQEFWVDNSTSVSVPMLSGMGTFQHWSDIQDNFSVTQVPFTESACLLLIQPHYASDLDKVEGLTFQQNSLNWMKKLSPRTIHLTMPQLVLQGSYDLQDLLAQAELPAILHTELNLQKLSNDRIRVGEVLNSIFFELEADEREPTESTQQLNKPEVLEVTLNRPFLFAVYDQSATALHFLGRVANPLSTA

SEQ ID NO: 105 - protein, 403 aa, Artificial Sequence
  derived and/or modified sequence
MRKRAPQSEMAPAGVSLRATILCLLAWAGLAAGDRVYIHPFHLVIHNESTCEQLAKANAGKPKDPTFIPAPIQAKTSPVDEKALQDQLVLVAAKLDTEDKLRAAMVGMLANFLGFRIYGMHSELWGVVHGATVLSPTAVFGTLASLYLGALDHTADRLQAILDVAAEKIDRFMQAVTGWKTGCSLMGASVDSTLAFNTYVHFQGKMKGFSLLAEPQEFWVDNSTSVSVPMLSGMGTFQHWSDIQDNFSVTQVPFTESACLLLIQPHYASDLDKVEGLTFQQNSLNWMKKLSPRTIHLTMPQLVLQGSYDLQDLLAQAELPAILHTELNLQKLSNDRIRVGEVLNSIFFELEADEREPTESTQQLNKPEVLEVTLNRPFLFAVYDQSATALHFLGRVANPLSTA

SEQ ID NO: 106 - DNA, 1458 bp, Artificial Sequence
  derived and/or modified sequence
atgcgaaagcgtgcaccgcagtcagagatggctccagccggggtttctctgcgtgcaaccatactgtgcctgctggcgtgggctgggttggctgccggtgaccgcgtgtacattcatcccttccacttggtgatccataatgagtctacttgcgagcagctagctaaggcgaatgccgggaaacctaaagacccaaccttcatacccgccccaattcaggcaaagacctcgccagtggacgagaaagcattacaggaccagctggtcttagtcgcagccaagctggatactgaagataagctgagagctgctatggtgggcatgcttgccaacttccttggattccggatctatggcatgcacagtgagctttggggggtggtccacggtgctacagtgctcagtcccacagccgtcttcggaacactggccagtctgtacctcggcgctctggatcacacagctgaccggctgcaagcaattctcggggtcccctggaaggacaaaaactgtaccagcaggctcgacgcccacaaagtgctgtccgccctgcaggctgtgcagggcctgctagttgcgcagggccgtgcagatagccaagcccagttactgctgagtacggtggttggtgtctttacggcacccggactccatctgaaacagccatttgtccaaggattggcactctataccccagtggtccttcctagatcactggacttcaccgaactcgacgttgcagcagagaagatcgaccggttcatgcaggcagtaaccggctggaaaaccgggtgttccctgatgggggccagcgtggactctaccttggcgttcaacacctacgtgcacttccaggggaagatgaagggatttagcctcctggccgagccgcaggaattttgggtcgacaactctacaagcgtgtccgttcctatgctcagtggcatgggcaccttccaacactggtctgacatccaagataatttctcagtaactcaagtgccctttaccgagtccgcctgccttcttctgatccaaccccactacgcctcagatctggataaagtagaaggccttacctttcagcagaacagccttaattggatgaaaaaactgtcacctagaaccatccacctgacaatgcctcagctcgtactccagggctcatatgaccttcaggatctcctggcccaagccgagttgcccgctatcttacatacagaacttaatctgcagaaattgtctaacgataggatcagggtgggagaagttctgaattccatcttttttgaactggaggcagatgagcgggagcccactgagagcacccagcagctcaacaaacctgaagtgttggaagtgaccctaaaccgcccgtttctctttgccgtatacgaccagagcgccacggccttacacttcctcggccgagttgctaatcccctaagcactgcttag

SEQ ID NO: 107 - DNA, 1212 bp, Artificial Sequence
  derived and/or modified sequence
atgcggaaaagagcacctcaatccgagatggccccagctggcgtctccctgcgggcaaccatcctgtgcctgctggcatgggccggattagcagcaggtgaccgggtgtatatacatccgttccacctggtcatccataatgagagcacatgcgagcagttggcaaaagccaatgctgggaagcctaaagatcctacctttatccccgctcccatccaggccaagacaagtccagttgacgaaaaggccctacaggaccaacttgtgttagtggcagcgaaactcgataccgaagataagctcagggccgcaatggttgggatgctggccaacttccttggattcaggatttacgggatgcacagcgagctgtggggtgtggttcacggagcaaccgtccttagccctacagccgttttcggaaccttggccagcctctaccttggtgccctcgaccatacagccgaccgcctgcaggcaatcttagatgtggccgccgaaaaaatcgaccggtttatgcaggccgtgacgggatggaaaacgggttgctcccttatgggagcctcagtggattctacactggccttcaacacctacgtgcacttccaagggaagatgaagggattttccctcctcgcagagcctcaggagttttgggtcgataactctacgagtgtgtcggtgccaatgctctccgggatgggcacttttcaacactggtccgacattcaggacaacttctccgtcacccaagtgccttttacggaatcagcttgtctactcctgatacagccacactatgcctcagatctcgacaaagtcgaaggtttaacctttcagcagaactctctcaattggatgaaaaaattatcaccgcgcacaatccatctgactatgcctcaacttgtgcttcagggatcctacgacctccaggacttgctggcccaggctgaattacccgctattttgcacacggagctgaacctccagaagctttccaacgatcgaatcagggtaggagaagtgctgaactcgatattcttcgagctggaggccgacgaacgcgaaccaacagaatcaacccagcaactgaacaagcccgaagttctggaggtgaccttgaatcgcccctttttgtttgccgtgtatgaccagtctgccactgctctgcactttctgggtcgggtcgccaaccccctgtctactgcctag

SEQ ID NO: 108 - DNA, 1458 bp, Artificial Sequence
  derived and/or modified sequence
atgaggaagagggccccccagagcgagatggccccagctggggtgtccctgcgggccaccatcctgtgcctgctggcctgggccggcctggccgccggggacagagtgtacatccaccccttccacctggtgatccacaatgaaagcacctgtgagcagctggccaaggccaatgccggcaagcccaaggaccccaccttcatcccagcccccatccaggccaagaccagccctgtggatgagaaggccctgcaggaccagctggtgctggtggccgccaagctggacacagaggacaagctgcgggccgccatggtgggcatgctggccaacttcctgggcttccgcatctacggcatgcacagcgagctgtggggcgtggtgcatggagccaccgtgctgagccccacagctgtgtttggcaccctggccagcctgtacctgggcgccctggaccacacagctgaccggctgcaggccatcctgggcgtgccctggaaggacaagaactgcaccagccggctggatgcccacaaggtgctgagcgccctgcaggccgtgcagggcctgctggtggcccagggccgggctgacagccaggcccagctgctgctgagcacagtggtgggcgtcttcaccgcccctggcctgcacctgaagcagccctttgtgcagggcctggccctgtacacccctgtggtgctgcccaggagcctggacttcacagagctggatgtggccgctgagaagattgaccgcttcatgcaggccgtgacaggctggaagacaggctgcagcctgatgggcgcctctgtggacagcaccctggccttcaacacctacgtgcacttccagggcaagatgaagggcttcagcctgctggccgagccccaggagttctgggtggacaacagcacctctgtgtctgtgcccatgctgagcggcatgggcaccttccagcactggagcgacatccaggacaacttctctgtgacccaggtgcccttcacagaaagtgcctgcctgctgctgatccagccccactacgccagtgacctggacaaggtggagggcctgaccttccagcagaacagcctgaactggatgaagaagctgagccccaggaccatccacctgaccatgccccagctggtgctgcagggcagctatgacctgcaggacctgctggcccaggccgagctgcctgccatcctgcacacagagctgaacctgcagaagctgagcaatgaccgcatccgggtgggggaggtgctgaacagcatcttctttgagctggaggctgatgagcgggagcccacagagagcacccagcagctgaacaagccagaggtgctggaggtgaccctgaaccggcccttcctgtttgctgtgtatgaccagagcgccacagccctgcacttcctgggccgggtggccaaccccctgagcacagcctag

SEQ ID NO: 109 - DNA, 1212 bp, Artificial Sequence
  derived and/or modified sequence
atgaggaagagggccccccagagcgagatggccccagctggggtgtccctgcgggccaccatcctgtgcctgctggcctgggccggcctggccgccggggacagagtgtacatccaccccttccacctggtgatccacaatgaaagcacctgtgagcagctggccaaggccaatgccggcaagcccaaggaccccaccttcatcccagcccccatccaggccaagaccagccctgtggatgagaaggccctgcaggaccagctggtgctggtggccgccaagctggacacagaggacaagctgcgggccgccatggtgggcatgctggccaacttcctgggcttccgcatctacggcatgcacagcgagctgtggggcgtggtgcatggagccaccgtgctgagccccacagctgtgtttggcaccctggccagcctgtacctgggcgccctggaccacacagctgaccggctgcaggccatcctggatgtggccgctgagaagattgaccgcttcatgcaggccgtgacaggctggaagacaggctgcagcctgatgggcgcctctgtggacagcaccctggccttcaacacctacgtgcacttccagggcaagatgaagggcttcagcctgctggccgagccccaggagttctgggtggacaacagcacctctgtgtctgtgcccatgctgagcggcatgggcaccttccagcactggagcgacatccaggacaacttctctgtgacccaggtgcccttcacagaaagtgcctgcctgctgctgatccagccccactacgccagtgacctggacaaggtggagggcctgaccttccagcagaacagcctgaactggatgaagaagctgagccccaggaccatccacctgaccatgccccagctggtgctgcagggcagctatgacctgcaggacctgctggcccaggccgagctgcctgccatcctgcacacagagctgaacctgcagaagctgagcaatgaccgcatccgggtgggggaggtgctgaacagcatcttctttgagctggaggctgatgagcgggagcccacagagagcacccagcagctgaacaagccagaggtgctggaggtgaccctgaaccggcccttcctgtttgctgtgtatgaccagagcgccacagccctgcacttcctgggccgggtggccaaccccctgagcacagcctag

SEQ ID NO: 110 - DNA, 1458 bp, Artificial Sequence
  derived and/or modified sequence
atgcggaagcgggccccccagagcgagatggcccccgccggcgtgagtcttcgggctaccattttgtgtttgctcgcttgggcaggactagctgcaggcgatcgtgtttatatccatcccttccatctggtcatccacaatgagtccacctgcgagcaattagctaaggccaatgctggcaaacccaaagaccccacctttattccggcgcctatccaggccaagacctctcccgtggatgagaaggcactgcaagaccagctggtgctggtggcagcaaaactggacaccgaggataaactgcgtgcagcgatggttgggatgctggccaatttcctggggtttagaatctacggaatgcatagcgaattgtggggggtggtgcatggcgcaaccgtgctctcaccaacagccgtgtttggaaccctagcctctctctatctgggagcccttgaccatactgccgaccggttacaagccattctgggggtgccttggaaggacaaaaactgtacttcccgactcgacgcacataaagtgctcagcgctctacaggccgttcaaggactcttagtcgcgcagggtagagcggattcccaggcgcagctgctcttgtctaccgttgttggagtcttcactgcgcccggtcttcatcttaaacagcctttcgtgcaggggctggctctgtatacaccggtggtcctgcctcggtcactggactttactgagctggacgtggctgccgagaagattgatagattcatgcaggcagtgactggctggaagactgggtgcagtctgatgggagccagcgtggatagcactctggcatttaatacgtacgtgcactttcagggcaagatgaaaggatttagcctcctggctgagccacaggagttttgggtggacaacagcacctcggtcagcgtccccatgctgtcaggcatgggcacctttcaacattggtccgacatccaggacaacttctctgtgacccaggtgccgtttacagagtcagcctgtctcctcctcattcagccgcactatgcttctgatctcgataaggtggagggcctcacctttcaacagaattcactgaactggatgaagaagttgtcacctcggacgatccatctgactatgccgcagctcgtgttgcagggatcttacgatctgcaggacctgttggcgcaggcagagttgcctgccatccttcatacagagttgaatttgcagaagctgtctaatgacagaattagagtgggcgaggtgctaaactccatctttttcgagttggaggcagatgagagggaacctaccgagagtacccaacagctgaacaagcctgaagtgttagaagtaacgctgaataggccatttctgtttgcagtttatgaccaaagcgccactgccctgcattttttagggcgcgtagcaaatcccctgtccacagcatag

SEQ ID NO: 111 - DNA, 1212 bp, Artificial Sequence
  derived and/or modified sequence
atgcggaagcgggccccccagagcgagatggcccccgccggcgtgtcactgcgcgccaccattctgtgcttactcgcatgggccggccttgcagctggggatcgtgtttacatccacccgttccacctggtcatccacaatgaatccacctgtgagcagttggccaaggctaacgccggcaagccaaaagaccctactttcattccagctccgatccaagctaagactagtcctgtggatgagaaggccctgcaggatcagctcgtccttgtagcagctaagttagacacagaggataagctgagagccgcaatggtgggcatgctggccaattttctggggttccgcatttacggcatgcactcagagctgtggggcgtggtccatggcgcaaccgtcctttctccgaccgccgtgtttgggaccttagcctccctgtatctgggcgctctggaccacacagccgacaggctacaagctatcctggacgtggccgctgaaaagatagacaggttcatgcaggccgtgacaggttggaagacggggtgttcattaatgggggctagcgtcgacagtactctggctttcaacacttatgtgcactttcagggaaagatgaagggattcagcctgctggccgaaccccaggagttttgggtagacaatagtacctccgtgtccgtccctatgctgagtggaatgggcacctttcagcattggtctgatatccaggacaactttagcgtgacacaagttccctttacagagtcggcctgcctgctactgattcagcctcattacgctagcgacctggacaaggtggagggcttgacctttcaacaaaatagtttgaattggatgaaaaaattgagcccacgtaccattcacttaacaatgccacaactcgtactgcaaggatcctatgacctccaggacctcctcgcccaggcagaactcccagccattctccacacggagctcaatttgcagaaactcagtaatgaccgaatacgcgttggcgaagtgcttaattctattttctttgagctcgaggcagacgaacgcgaaccaactgagagcacccagcaacttaacaagcctgaagtcctggaagtgaccctcaaccgccctttcttgttcgcagtttatgaccagtcagctacagctctccactttctcgggcgtgtcgcaaaccctttgtccaccgcttag

SEQ ID NO: 112 - DNA, 2291 bp, Artificial Sequence
  derived and/or modified sequence
aagacttcctggaagaggtcccagcgtgagtgtcgcttctggcatctgtccttctggccagcctgtggtctggccaagtgatgtaaccctcctctccagcctgtgcacaggcagcctgggaacagctccatccccacccctcagctataaatagggcatcgtgacccggccgggggaagaagctgccgttgttctgggtactacagcagaagggtatgcggaagcgagcaccccagtctgagatggctcctgccggtgtgagcctgagggccaccatcctctgcctcctggcctgggctggcctggctgcaggtgaccgggtgtacatacaccccttccacctcgtcatccacaatgagagtacctgtgagcagctggcaaaggccaatgccgggaagcccaaagaccccaccttcatacctgctccaattcaggccaagacatcccctgtggatgaaaaggccctacaggaccagctggtgctagtcgctgcaaaacttgacaccgaagacaagttgagggccgcaatggtcgggatgctggccaacttcttgggcttccgtatatatggcatgcacagtgagctatggggcgtggtccatggggccaccgtcctctccccaacggctgtctttggcaccctggcctctctctatctgggagccttggaccacacagctgacaggctacaggcaatcctgggtgttccttggaaggacaagaactgcacctcccggctggatgcgcacaaggtcctgtctgccctgcaggctgtacagggcctgctagtggcccagggcagggctgatagccaggcccagctgctgctgtccacggtggtgggcgtgttcacagccccaggcctgcacctgaagcagccgtttgtgcagggcctggctctctatacccctgtggtcctcccacgctctctggacttcacagaactggatgttgctgctgagaagattgacaggttcatgcaggctgtgacaggatggaagactggctgctccctgatgggagccagtgtggacagcaccctggctttcaacacctacgtccacttccaagggaagatgaagggcttctccctgctggccgagccccaggagttctgggtggacaacagcacctcagtgtctgttcccatgctctctggcatgggcaccttccagcactggagtgacatccaggacaacttctcggtgactcaagtgcccttcactgagagcgcctgcctgctgctgatccagcctcactatgcctctgacctggacaaggtggagggtctcactttccagcaaaactccctcaactggatgaagaaactatctccccggaccatccacctgaccatgccccaactggtgctgcaaggatcttatgacctgcaggacctgctcgcccaggctgagctgcccgccattctgcacaccgagctgaacctgcaaaaattgagcaatgaccgcatcagggtgggggaggtgctgaacagcattttttttgagcttgaagcggatgagagagagcccacagagtctacccaacagcttaacaagcctgaggtcttggaggtgaccctgaaccgcccattcctgtttgctgtgtatgatcaaagcgccactgccctgcacttcctgggccgcgtggccaacccgctgagcacagcatgaggccagggccccagaacacagtgcctggcaaggcctctgcccctggcctttgaggcaaaggccagcagcagataacaaccccggacaaatcagcgatgtgtcacccccagtctcccaccttttcttctaatgagtcgactttgagctggaaagcagccgtttctccttggtctaagtgtgctgcatggagtgagcagtagaagcctgcagcggcacaaatgcacctcccagtttgctgggtttattttagagaatgggggtggggaggcaagaaccagtgtttagcgcgggactactgttccaaaaagaattccaaccgaccagcttgtttgtgaaacaaaaaagtgttcccttttcaagttgagaacaaaaattgggttttaaaattaaagtatacatttttgcattgccttcggtttgtatttagtgtcttgaatgtaagaacatgacctccgtgtagtgtctgtaataccttagttttttccacagatgcttgtgatttttgaacaatacgtgaaagatgcaagcacctgaatttctgtttgaatgcggaaccatagctggttatttctcccttgtgttagtaataaacgtcttgccacaataagcctccaaaaa

SEQ ID NO: 113 - DNA, 1691 bp, Artificial Sequence
  derived and/or modified sequence
aagaagctgccgttgttctgggtactacagcagaagggtatgcggaagcgagcaccccagtctgagatggctcctgccggtgtgagcctgagggccaccatcctctgcctcctggcctgggctggcctggctgcaggtgaccgggtgtacatacaccccttccacctcgtcatccacaatgagagtacctgtgagcagctggcaaaggccaatgccgggaagcccaaagaccccaccttcatacctgctccaattcaggccaagacatcccctgtggatgaaaaggccctacaggaccagctggtgctagtcgctgcaaaacttgacaccgaagacaagttgagggccgcaatggtcgggatgctggccaacttcttgggcttccgtatatatggcatgcacagtgagctatggggcgtggtccatggggccaccgtcctctccccaacggctgtctttggcaccctggcctctctctatctgggagccttggaccacacagctgacaggctacaggcaatcctggatgttgctgctgagaagattgacaggttcatgcaggctgtgacaggatggaagactggctgctccctgatgggagccagtgtggacagcaccctggctttcaacacctacgtccacttccaagggaagatgaagggcttctccctgctggccgagccccaggagttctgggtggacaacagcacctcagtgtctgttcccatgctctctggcatgggcaccttccagcactggagtgacatccaggacaacttctcggtgactcaagtgcccttcactgagagcgcctgcctgctgctgatccagcctcactatgcctctgacctggacaaggtggagggtctcactttccagcaaaactccctcaactggatgaagaaactatctccccggaccatccacctgaccatgccccaactggtgctgcaaggatcttatgacctgcaggacctgctcgcccaggctgagctgcccgccattctgcacaccgagctgaacctgcaaaaattgagcaatgaccgcatcagggtgggggaggtgctgaacagcattttttttgagcttgaagcggatgagagagagcccacagagtctacccaacagcttaacaagcctgaggtcttggaggtgaccctgaaccgcccattcctgtttgctgtgtatgatcaaagcgccactgccctgcacttcctgggccgcgtggccaacccgctgagcacagcatgaggccagggccccagaacacagtgcctggcaaggcctctgcccctggcctttgaggcaaaggccagcagcagataacaaccccggacaaatcagcgatgtgtcacccccagtctcccaccttttcttctaatgagtcgactttgagctggaaagcagccgtttctccttggtctaagtgtgctgcatggagtgagcagtagaagcctgcagcggcacaaatgcacctcccagtttgctgggtttattttagagaatgggggtggggaggcaagaaccagtgtttagcgcgggactactgttccaaaaagaattccaaccgaccagcttgtttgtgaaacaaaaaagtgttcccttttcaagttgagaacaaaaattgggttttaaaattaaagtatacatttttgcattgccttcggtttgtatttagtgtcttgaatgta

SEQ ID NO: 114 - DNA, 1458 bp, Artificial Sequence
  derived and/or modified sequence
atgcgcaagagagcgcctcagtccgagatggctcctgccggagtgtccttgcgagcaaccatcctgtgcctgcttgcctgggccggtctcgcagccggtgacagggtgtacatacatccgttccacctcgtgatacacaacgagagtacatgtgagcagctagccaaagccaacgcgggaaaacctaaggacccaactttcatccccgctcctatccaggccaagacttcccctgtggatgagaaggccctccaagaccaattggttctggtcgctgcaaagttggatacagaggacaagctgagggccgctatggtgggcatgttggcaaatttcttgggcttcaggatctatgggatgcactccgagctgtggggtgtggttcacggtgccaccgtgttgagtcccactgccgtttttggcacactcgcctccctgtatttaggggcactggatcatacagcagaccggctgcaggccatactgggagtgccctggaaggacaagaactgcacatcacgattagatgctcataaagtcctgtccgctcttcaggcggtgcagggtctcctggtggcccagggacgcgcagactcccaggcccagttactcctttccacagtagttggagtgtttacagcccctggattgcatctcaaacagccatttgtccagggactcgcactctacaccccagttgtgctgcctaggtcgctggatttcaccgagttggacgttgccgctgaaaagatagacagattcatgcaggccgttactggctggaagacaggttgcagtctgatgggagcgtccgtggattccacccttgcattcaacacatatgtgcacttccagggtaagatgaaaggtttcagtttactggcggagcctcaggagttttgggttgataatagcacgagtgttagtgtgcctatgttgagcggcatgggtacctttcagcactggagcgatattcaggacaattttagcgtgacacaggttccttttaccgagagtgcttgtctcctgctcattcagccccattacgcttccgatttggataaggtcgaggggctgacatttcagcagaacagtcttaattggatgaaaaaactaagcccccgaactattcacctgactatgccgcagttagtactccagggaagttacgacttacaggacctcctggcccaagccgaattacccgctatcctccataccgagctgaacctgcagaagctttcaaacgatcgaatccgggtaggcgaagtgttgaacagcatcttcttcgagctagaggctgatgagcgtgaaccaaccgaatccacgcagcagctcaacaagcctgaggttctggaggttacgttaaatcgcccatttctcttcgccgtctatgaccagtcagccacggcgcttcactttcttggacgggtggcgaaccctctctcaactgcctag

SEQ ID NO: 115 - DNA, 1212 bp, Artificial Sequence
  derived and/or modified sequence
atgcggaagagggctccacagtcagaaatggccccagcaggtgtgtcactccgcgcaactattctctgcctgttggcttgggcaggactcgctgcaggggacagagtgtacatccacccatttcaccttgtgattcacaacgagtccacatgtgagcagctggcaaaggctaacgctggaaagccgaaagatcccaccttcatcccagctcctatccaggcaaaaacaagtcctgtggatgagaaggcacttcaggatcagctagtgctcgttgccgctaagctcgacacagaggacaaattacgggcagcaatggtcggcatgctggccaacttcctgggtttccgcatttatggtatgcattctgagctctggggcgtggtgcatggagccacggttctctccccgacggcggttttcggcaccctggcttcactgtatctcggggcacttgatcacactgccgatagactacaggctatcttagatgttgccgctgaaaaaattgacagatttatgcaggccgttacgggatggaagactgggtgttctctgatgggcgcatcagtggattcaacattggcctttaatacctacgtacacttccaaggaaagatgaagggatttagcctgttggctgaacctcaggagttctgggtagataatagtacctcagtcagcgtgcccatgctgtccgggatgggtacttttcaacactggtcagacatccaagataacttttccgtaacccaggtgccgttcacagaaagcgcctgccttctgcttatccagccgcattacgcttccgacctggataaagtcgaggggcttacctttcagcaaaactccttgaactggatgaaaaagttgtcaccaagaacaattcacctgaccatgccgcagttagttttgcaaggcagttacgacctccaagatctgctcgcacaagcagagttgccagctatcttacatactgaacttaatctgcagaaactgtctaatgaccggattcgggttggcgaagttctgaacagtatcttcttcgagctggaggctgacgagcgcgagcccaccgagtccacgcagcagttaaacaaacccgaagtgctggaggtgactctcaacaggccctttctgtttgccgtttacgaccaatcggccacagctctgcattttctgggtcgagtcgccaaccccctgtctactgcctag

SEQ ID NO: 116 - DNA, 1458 bp, Artificial Sequence
  derived and/or modified sequence
atgagaaagagagccccccagagcgagatggcccccgccggcgtgagcctgagagccaccatcctgtgcctgctggcctgggccggcctggccgccggcgacagagtgtacatccaccccttccacctggtgatccacaacgagagcacctgcgagcagctggccaaggccaacgccggcaagcccaaggaccccaccttcatccccgcccccatccaggccaagaccagccccgtggacgagaaggccctgcaggaccagctggtgctggtggccgccaagctggacaccgaggacaagctgagagccgccatggtgggcatgctggccaacttcctgggcttcagaatctacggcatgcacagcgagctgtggggcgtggtgcacggcgccaccgtgctgagccccaccgccgtgttcggcaccctggccagcctgtacctgggcgccctggaccacaccgccgacagactgcaggccatcctgggcgtgccctggaaggacaagaactgcaccagcagactggacgcccacaaggtgctgagcgccctgcaggccgtgcagggcctgctggtggcccagggcagagccgacagccaggcccagctgctgctgagcaccgtggtgggcgtgttcaccgcccccggcctgcacctgaagcagcccttcgtgcagggcctggccctgtacacccccgtggtgctgcccagaagcctggacttcaccgagctggacgtggccgccgagaagatcgacagattcatgcaggccgtgaccggctggaagaccggctgcagcctgatgggcgccagcgtggacagcaccctggccttcaacacctacgtgcacttccagggcaagatgaagggcttcagcctgctggccgagccccaggagttctgggtggacaacagcaccagcgtgagcgtgcccatgctgagcggcatgggcaccttccagcactggagcgacatccaggacaacttcagcgtgacccaggtgcccttcaccgagagcgcctgcctgctgctgatccagccccactacgccagcgacctggacaaggtggagggcctgaccttccagcagaacagcctgaactggatgaagaagctgagccccagaaccatccacctgaccatgccccagctggtgctgcagggcagctacgacctgcaggacctgctggcccaggccgagctgcccgccatcctgcacaccgagctgaacctgcagaagctgagcaacgacagaatcagagtgggcgaggtgctgaacagcatcttcttcgagctggaggccgacgagagagagcccaccgagagcacccagcagctgaacaagcccgaggtgctggaggtgaccctgaacagacccttcctgttcgccgtgtacgaccagagcgccaccgccctgcacttcctgggcagagtggccaaccccctgagcaccgcctag

SEQ ID NO: 117 - DNA, 1212 bp, Artificial Sequence
  derived and/or modified sequence
atgagaaagagagccccccagagcgagatggcccccgccggcgtgagcctgagagccaccatcctgtgcctgctggcctgggccggcctggccgccggcgacagagtgtacatccaccccttccacctggtgatccacaacgagagcacctgcgagcagctggccaaggccaacgccggcaagcccaaggaccccaccttcatccccgcccccatccaggccaagaccagccccgtggacgagaaggccctgcaggaccagctggtgctggtggccgccaagctggacaccgaggacaagctgagagccgccatggtgggcatgctggccaacttcctgggcttcagaatctacggcatgcacagcgagctgtggggcgtggtgcacggcgccaccgtgctgagccccaccgccgtgttcggcaccctggccagcctgtacctgggcgccctggaccacaccgccgacagactgcaggccatcctggacgtggccgccgagaagatcgacagattcatgcaggccgtgaccggctggaagaccggctgcagcctgatgggcgccagcgtggacagcaccctggccttcaacacctacgtgcacttccagggcaagatgaagggcttcagcctgctggccgagccccaggagttctgggtggacaacagcaccagcgtgagcgtgcccatgctgagcggcatgggcaccttccagcactggagcgacatccaggacaacttcagcgtgacccaggtgcccttcaccgagagcgcctgcctgctgctgatccagccccactacgccagcgacctggacaaggtggagggcctgaccttccagcagaacagcctgaactggatgaagaagctgagccccagaaccatccacctgaccatgccccagctggtgctgcagggcagctacgacctgcaggacctgctggcccaggccgagctgcccgccatcctgcacaccgagctgaacctgcagaagctgagcaacgacagaatcagagtgggcgaggtgctgaacagcatcttcttcgagctggaggccgacgagagagagcccaccgagagcacccagcagctgaacaagcccgaggtgctggaggtgaccctgaacagacccttcctgttcgccgtgtacgaccagagcgccaccgccctgcacttcctgggcagagtggccaaccccctgagcaccgcctag

SEQ ID NO: 118 - protein, 392 aa, Artificial Sequence
  derived and/or modified sequence
MASHKLLVTPPKALLKPLSIPNQLLLGPGPSNLPPRIMAAGGLQMIGSMSKDMYQIMDEIKEGIQYVFQTRNPLTLVISGSGHCALEAALVNVLEPGDSFLVGANGIWGQRAVDIGERIGARVHPMTKDPGGHYTLQEVEEGLAQHKPVLLFLTHGESSTGVLQPLDGFGELCHRYKCLLLVDSVASLGGTPLYMDRQGIDILYSGSQKALNAPPGTSLISFSDKAKKKMYSRKTKPFSFYLDIKWLANFWGCDDQPRMYHHTIPVISLYSLRESLALIAEQGLENSWRQHREAAAYLHGRLQALGLQLFVKDPALRLPTVTTVAVPAGYDWRDIVSYVIDHFDIEIMGGLGPSTGKVLRIGLLGCNATRENVDRVTEALRAALQHCPKKKL

SEQ ID NO: 119 - DNA, 1179 bp, Artificial Sequence
  derived and/or modified sequence
atggcgtcccacaaactgctcgtcaccccccctaaggcgctgttaaagccactgtcaatacctaaccaactcttgctcggaccgggtccatcgaacctgccacctcgaattatggccgccggcggtcttcagatgatcggctccatgtccaaggacatgtaccaaatcatggatgaaatcaaagaaggtattcaatacgtcttccagacccggaacccgctaacactggtcatctcaggatcagggcactgcgctctggaggctgcgctggttaatgtgctagagcccggcgacagtttcctggtcggggccaacgggatatggggccagcgcgctgtcgatatcggggagcggatcggggctagggtgcatcctatgactaaggatcctggcggtcattatactctgcaggaagtggaagaaggattagctcaacacaagcctgtgctgctctttctcactcatggtgaaagctccacaggcgtgctccagcctttagacgggtttggggaattgtgtcatagatacaagtgtttgctcctcgtcgacagcgtggcgagtctggggggaactccattgtacatggatcggcagggcatcgacatcctgtatagcggctcccagaaggctctgaatgcaccccccggtacctcactcatcagttttagcgacaaagcaaagaagaagatgtacagtcggaagaccaaaccgttttccttttacctcgacatcaagtggctggctaacttctggggctgtgatgaccaaccacgtatgtaccaccatactatccctgtgatctccctctactcccttagggagtctctggcactgatcgccgaacaaggcctggaaaattcttggagacagcaccgagaggccgcagcttacctccatggacgtctgcaggcactcggattgcaactctttgtgaaggacccggccctcaggctgccaacagtcactacagtggcagtacctgcgggatatgattggagagacatcgtttcttacgtgatcgatcactttgatatcgagattatgggagggcttgggccaagcacaggcaaagtgctgcgcatcgggctcctgggctgcaatgccacccgcgagaatgtagaccgggtcaccgaagctctccgcgccgccttacagcattgtccgaaaaagaaactatag

SEQ ID NO: 120 - DNA, 1179 bp, Artificial Sequence
  derived and/or modified sequence
atggccagccacaagctgctggtgaccccacccaaggccctgctgaagcccctgagcatccccaaccagctgctgctgggccctggccccagcaacctgcccccacgcatcatggccgccggcggcctgcagatgattggctccatgagcaaggacatgtaccagatcatggatgagatcaaggagggcatccagtatgtgttccagaccaggaaccccctgaccctggtgatcagcggcagcggccactgtgccctggaggccgccctggtgaatgtgctggagcccggggacagcttcctggtgggcgccaacggcatctggggccagagagctgtggacattggagagagaattggagcccgggtgcaccccatgaccaaggaccccggcggccactacaccctgcaggaggtggaggagggcctggcccagcacaagcctgtgctgctcttcctgacccatggagagagcagcactggagtgctgcagcccctggatggctttggagagctgtgccaccgctacaagtgcctgctgctggtggacagcgtggccagcctgggcggcacccccctgtacatggaccggcagggcatcgacatcctgtacagcggcagccagaaggccctgaatgcccctcctggcaccagcctcatctccttcagtgacaaggccaagaagaagatgtacagcaggaagaccaagcccttctccttctacctggacatcaagtggctggccaacttctggggctgtgatgaccagcccaggatgtaccaccacaccatccctgtgatcagcctgtacagcctgcgggagagcctggccctgattgctgagcagggcctggagaacagctggaggcagcaccgggaggccgccgcctacctgcacggccgcctgcaggccctgggcctgcagctgtttgtgaaggaccctgccctgcggctgcccaccgtgaccaccgtggccgtgcctgctggctatgactggagggacatcgtgtcctatgtgattgaccactttgatattgagatcatgggcggcctgggccccagcacaggcaaggtgctgagaattggcctgctgggctgcaatgccaccagagaaaatgtggacagagtgacagaggccctgcgggccgccctgcagcactgccccaagaagaagctgtag

SEQ ID NO: 121 - DNA, 1865 bp, Artificial Sequence
  derived and/or modified sequence
gcctgccaagcctcaattatctgtgctccgaccctttaagaaacacttctctcacccctgagctaagcagaataagaggggctggacgtgcaggactcagagtgggagcgaggagggctggggtgaggacagctttgtcacactctgtttttctgtcactcagccctgggggctccctctgcctgagggcttcgtcccctgctgcctggccgtgacccgcagcacaagcacagataagcctcagggaacaaaaggcagggctgccacggaagcccatccaccaatcctcacctctcacctctgtgtccgccctgctgggaaatattccaggctttggccaaggccagtgcagccccaggttcccgagcggcaggttgggtgcggaccatggcctctcacaagctgctggtgaccccccccaaggccctgctcaagcccctctccatccccaaccagctcctgctggggcctggtccttccaacctgcctcctcgcatcatggcagccggggggctgcagatgatcgggtccatgagcaaggatatgtaccagatcatggacgagatcaaggaaggcatccagtacgtgttccagaccaggaacccactcacactggtcatctctggctcgggacactgtgccctggaggccgccctggtcaatgtgctggagcctggggactccttcctggttggggccaatggcatttgggggcagcgagccgtggacatcggggagcgcataggagcccgagtgcacccgatgaccaaggaccctggaggccactacacactgcaggaggtggaggagggcctggcccagcacaagccagtgctgctgttcttaacccacggggagtcgtccaccggcgtgctgcagccccttgatggcttcggggaactctgccacaggtacaagtgcctgctcctggtggattcggtggcatccctgggcgggacccccctttacatggaccggcaaggcatcgacatcctgtactcgggctcccagaaggccctgaacgcccctccagggacctcgctcatctccttcagtgacaaggccaaaaagaagatgtactcccgcaagacgaagcccttctccttctacctggacatcaagtggctggccaacttctggggctgtgacgaccagcccaggatgtaccatcacacaatccccgtcatcagcctgtacagcctgagagagagcctggccctcattgcggaacagggcctggagaacagctggcgccagcaccgcgaggccgcggcgtatctgcatgggcgcctgcaggcactggggctgcagctcttcgtgaaggacccggcgctccggcttcccacagtcaccactgtggctgtacccgctggctatgactggagagacatcgtcagctacgtcatagaccacttcgacattgagatcatgggtggccttgggccctccacggggaaggtgctgcggatcggcctgctgggctgcaatgccacccgcgagaatgtggaccgcgtgacggaggccctgagggcggccctgcagcactgccccaagaagaagctgtgacctgcccactggcacacagctggcactggcacacacctgtcccatgcccaccctgagggatcaggagcaaacagaccctgcaaggtcctccaggcctggggacaggaaagccactgacccagcccgggaggcagaaccaggcagcctccctggccccaggcagcccttttccctccagtggcacctcctggaaacagtccacttgggcgcaaaacccagtgccttccaaatgagctgcagtccccaggccatgagcctcccgggaatgtttaataaagggcctggccaactctcctcac

SEQ ID NO: 122 - DNA, 1179 bp, Artificial Sequence
  derived and/or modified sequence
atggccagccacaagctgctggtgaccccccccaaggccctgctgaagccactcagcattccgaatcagctcctcttgggtccaggcccgtcgaatctcccaccaaggataatggcagcaggcgggcttcagatgatcggctctatgtcaaaggatatgtatcagatcatggacgagattaaggaaggtattcagtacgtgtttcagacccgaaatcctctgacactcgtgatttccggtagcggtcactgtgctctggaagctgcccttgtcaacgtcctagagcccggggactcctttctcgtcggggcaaatgggatttggggtcagagagcggtggacattggagagaggatcggggctcgcgtacatccaatgaccaaggaccccggtggccattacacccttcaggaggttgaagaaggtctggcccagcataagcctgtgctcttgttcctcacccatggcgagagcagcaccggcgtactgcaaccgctggatggctttggcgaactgtgtcatagatacaagtgcctgctcctggtcgatagcgtcgcatcccttggaggcacacccttgtacatggatcgccaaggcatcgacatattgtacagcggctctcagaaagctcttaacgcaccccccggcacttccttgataagctttagcgacaaggcaaagaaaaaaatgtacagcagaaaaaccaaaccctttagcttctacttggacattaaatggctggccaacttctggggctgcgatgaccagccaagaatgtaccaccataccatccccgtgataagcctatactccctgcgagaaagcctcgctctgatcgctgagcagggactggaaaacagctggaggcagcatcgtgaagccgccgcatacctgcatggccgactccaggctttaggcctgcagcttttcgtaaaggaccctgcactgagactgccaactgtgactactgtggccgttcccgccgggtatgattggcgggacattgtttcgtatgtcatagaccacttcgacattgagattatgggtgggctgggaccttctactgggaaagtactgcgcatagggttacttggctgtaatgcgactagggaaaatgtcgatcgagttacggaagcactccgtgccgcgctccagcactgtcccaagaaaaaactgtag

SEQ ID NO: 123 - DNA, 1179 bp, Artificial Sequence
  derived and/or modified sequence
atggcctcccataagctgctggttaccccccctaaggccctcttgaaacctttaagcattccaaatcaattactgctcgggccaggtcctagtaatctgccccctcgaataatggccgctggtggtctgcaaatgatcgggagtatgtccaaggatatgtaccagatcatggatgagatcaaagaaggaatacagtacgtcttccagacgagaaatccgctcactctggtaatcagcggctctgggcattgtgcactggaggcagcactggtgaatgtgctggagccgggtgacagctttttagtgggtgctaatggcatctggggccagagagccgtggacatcggggaaagaatcggcgctcgcgtgcatccaatgacgaaagacccagggggacattataccctccaggaggtagaagagggccttgctcaacacaaacccgtgctcctgtttttgactcacggagaatcctccacgggagtgcttcagcctcttgacggatttggcgagctttgccatcgctacaaatgcttgttgctggtggattcagtggcatctcttggtggcacacccctgtatatggatcgccagggcatcgacatcctctattcaggcagtcagaaggctctgaacgcaccgccaggaaccagtctcatcagttttagcgacaaggcaaagaaaaagatgtattcccgtaagacgaaacctttttctttttaccttgatatcaagtggcttgctaatttttggggatgcgacgaccagccaaggatgtaccatcatactatacccgtgatttccttgtattcattgagggagtctctggctctcatcgccgaacaaggtcttgagaactcatggcgacagcacagggaagcagcagcctacctccacggcaggctccaagccttgggcctgcagctgttcgtgaaggaccctgccctgcggctaccgaccgtgacaacagtggctgtgccagccggatacgactggcgggatattgtctcctacgttatcgatcatttcgacattgaaatcatgggcggtctgggccctagcactgggaaggtgcttcgtattggattgcttggatgcaacgctaccagagagaatgttgacagagtgaccgaggctcttagagccgcacttcagcattgccctaagaaaaagttatag

SEQ ID NO: 124 - DNA, 1176 bp, Artificial Sequence
  derived and/or modified sequence
atggcctcccacaaactgttagttaccccgccaaaggccctcctgaagcccctatccatccccaaccagctgcttttgggcccgggaccctccaacctgcccccccggatcatggcggcaggaggtttacagatgatcggcagcatgtcaaaggatatgtatcagattatggacgaaatcaaggagggaatccaatatgtgtttcaaacacgcaatcccctgacattggtcatttcgggaagcggtcactgcgccctagaagccgcccttgtaaatgttctggagcccggagactcctttctggtgggcgcaaacggcatctggggacagcgcgcagtggacatcggggagaggattggcgctcgggtccacccgatgaccaaagaccccgggggccactacaccctgcaggaggtggaggaaggactggctcagcacaaaccggtgctgttgttcctcacccacggagagtcgagcaccggcgtgcttcagcccctcgacgggttcggcgagctgtgtcaccgatacaagtgcctcctattagtggacagcgttgccagcctcggaggaacacctctgtatatggatcgccagggcatcgatatcctgtatagcggttcccagaaggcgcttaacgcgccgcccggcacatcactgatctctttcagtgataaagcaaaaaagaaaatgtactcacgtaagactaaaccattcagcttttatctcgatatcaaatggctagcaaacttttggggatgtgacgaccaaccccgcatgtatcaccacaccatccctgttatttctctctactccctgcgggaatccctggcactgattgcggagcagggattagaaaattcgtggcgccagcatcgtgaggccgccgcatatctacatggtcggttgcaggccctcgggcttcagctcttcgtcaaggacccagcgttgaggctgccgacggtgacgacggtagctgtgccggccggatacgattggcgtgacatagtgtcatatgtaattgatcatttcgatatcgagatcatgggggggcttggcccgagcaccgggaaggtgctgcgcatcggtttactgggctgtaatgccacccgggagaatgtcgacagagtgacagaggcgctgcgagccgccctgcaacactgtccgaagaagaagctg

SEQ ID NO: 125 - DNA, 1176 bp, Artificial Sequence
  derived and/or modified sequence
atggcaagtcataagcttctggtcacaccccccaaagccttactgaaacctctttccattcccaatcaactgctcctcggccctgggccgagtaacctgcccccccgcatcatggctgccggtggactgcaaatgattggttccatgtccaaagacatgtaccagatcatggacgaaatcaaagaaggcattcagtatgtgttccagactcgaaacccactgacgctggtaatttcgggatctggtcactgtgctctcgaggccgcactggtcaatgttttggaaccaggcgattccttccttgtaggagcaaatggaatttgggggcagcgagccgtcgacattggggaaagaatcggcgcaagggtgcaccctatgacgaaagaccctggcgggcactacacactccaggaagtcgaggaaggtttagctcagcataagcccgtgttactcttcctgactcatggtgaaagctcgacgggggtgcttcaaccgttagatgggttcggcgagctgtgtcataggtataaatgtctcctcctggttgatagcgttgcctcacttggtggtaccccgctatatatggacaggcagggaatcgatatcctctacagtggatctcagaaggctttaaatgcgccgccaggcactagcctgatcagcttctccgacaaggctaagaaaaagatgtacagcaggaagaccaagcccttctccttttatctggatatcaagtggttggccaacttttgggggtgtgacgaccagccacgcatgtaccaccacactatccccgtcatctctctttattctcttagagagtccctcgccctcattgctgagcaggggctggagaattcatggagacaacatagggaggccgctgcttacttgcatggacgactccaggccctgggactgcagctatttgtgaaagacccagccctgaggctccccactgtcaccactgtggcagtccccgcagggtatgattggagggacatcgtgagttacgtgatcgaccacttcgatatcgaaattatggggggattaggcccttctactggcaaggtccttaggattgggcttctagggtgcaacgccacccgagagaacgtggatagagttacggaggctttgagggctgcactgcaacactgccccaagaagaagctg

SEQ ID NO: 126 - DNA, 1176 bp, Artificial Sequence
  derived and/or modified sequence
atggcgtcccataagctgctggtgaccccgccgaaggccctcctcaagccgctttcgatcccaaaccagctcctgctgggtccaggaccgagcaatctgcccccgcgcatcatggccgcaggaggactgcaaatgatcggatcgatgtccaaggacatgtaccagattatggacgaaatcaaggaagggatccagtacgtgttccaaactagaaatccactgaccctggtcatctcgggatcgggacattgtgccctcgaagccgccctggtcaacgtgctcgaaccaggagactcgttcctggtcggagccaacggaatttggggacaacgcgccgtggatatcggggaaaggatcggcgctcgcgtgcatccgatgaccaaggacccaggagggcactacacgttgcaggaagtggaagaagggttggctcagcacaaaccagtccttctcttcctgacccatggagaatcatcgaccggagtgcttcaaccacttgacggattcggagagctctgccacagatataagtgcctgctgctggtggacagcgtcgcctcccttggcggaactccgctgtacatggaccggcaaggaatcgacatcctgtacagcggaagccagaaagcgctgaatgcgcccccaggtacctcactgatttcgttctcagataaggcaaagaaaaagatgtactctcgcaaaaccaagccgttctccttctacttggacatcaaatggctggctaacttttggggctgcgacgaccagccgcggatgtatcatcacaccatacccgttatctcgctgtactcactgagagagtccctggccctcattgccgaacagggactcgaaaactcgtggcgacagcaccgggaggccgcagcctacctccatggaagattgcaggcactgggcctccagctgttcgtcaaggacccagcgctgcggctcccgaccgtgactacggtcgctgtcccggctggctacgactggagagatattgtgtcgtacgtgattgaccactttgacatcgagatcatgggtggcctgggaccctcgactggtaaggtgctgcgaattggcctcctggggtgtaacgcaacgcgcgagaatgtggatcgggtgacggaggcactgcgcgccgctttgcagcactgccccaaaaagaaactg

SEQ ID NO: 127 - DNA, 1176 bp, Artificial Sequence
  derived and/or modified sequence
atggctagccacaaactccttgtcacacctcccaaggctctcttgaagcccttgtctattcccaatcagctcctcctcggcccgggccccagtaatctcccacctcgaatcatggctgccggggggcttcagatgatcggctccatgagcaaagacatgtaccaaatcatggacgagatcaaggagggtattcagtacgtgttccagactcgcaatccactgactctcgtgatcagtgggtccgggcactgtgccctggaggctgccttggttaacgtgctcgaaccaggcgattctttcttggttggcgcaaacgggatctggggacaaagagccgtggatatcggtgagagaatcggtgctcgcgtccacccaatgacaaaggatcccggcggccactatactttgcaggaggtggaagagggtcttgcccagcacaagccagtcctgctgttcctgactcacggggaatcctctaccggtgttctgcagcccctggacgggtttggggaactgtgccataggtataagtgtctgctcctggttgacagtgtcgcctccctgggcgggacacctctgtacatggaccgacagggtattgacattctctacagcggatcccagaaggcactgaacgctccaccagggacgtctctcatcagcttcagcgacaaagcaaagaagaagatgtattctagaaagacaaagcctttcagtttctacttggacattaagtggctggccaacttttggggctgcgacgaccagccccggatgtatcatcatactatcccagtgattagcctgtactctctgcgggaatctctcgccctgatagctgagcagggtcttgaaaattcctggcgccagcatcgggaagcggcggcatatctgcacggccggctgcaggcccttgggttgcagctgttcgtgaaggacccagctttgcgcctgcctactgtcactaccgtggccgtacctgccggctatgattggcgggacattgtttcctatgttatagaccacttcgatatagagattatgggagggctgggcccgtctactggtaaggtgctcaggatcggtcttttgggctgcaatgccactcgcgaaaatgtggatagagtgaccgaagcgctccgagcagcgcttcagcattgtccaaaaaaaaaactc

SEQ ID NO: 128 - DNA, 1176 bp, Artificial Sequence
  derived and/or modified sequence
atggcctcccataaacttctcgtgactccgccaaaggcattgctgaagcccctgtcgattccgaaccaacttcttcttggacctgggccaagcaatctgcctcctagaattatggccgctggagggcttcaaatgattgggtcgatgagcaaagatatgtaccagattatggacgagattaaggaagggatccagtacgtctttcaaacgcgtaatccccttacccttgtgatatctggtagcggacactgtgcacttgaagcagcactggtgaatgttctggaacccggagatagctttttggtgggtgcaaacggaatctggggccagagagcggtggatattggcgaaagaattggggctcgtgtgcatccaatgaccaaggaccccggcggccactacactcttcaagaagtggaggaagggcttgcgcagcataagcctgtccttttgtttctgacccatggagaaagctccaccggggtgcttcaaccactggatggatttggagagctctgccaccggtacaagtgcttgcttctggtcgactccgtggcatccctgggtggaacccccctctacatggaccggcagggtattgatattctttactccggatcacagaaggcactgaacgcacctccgggaacttcgctgattagcttttccgataaggcaaagaagaagatgtattcgcgtaagaccaaacctttctcgttttacttggacatcaaatggctggcaaacttctggggttgtgacgaccaaccacggatgtaccatcatacgattccggtgatctcattgtacagcctgcgggagtccctcgccctgatcgcagagcagggactggaaaacagctggaggcagcatcgggaagccgccgcttacctgcatggtagactccaggcacttgggctgcaattgtttgtgaaggacccagctttgcgtctgccaactgtcactactgtcgcagtccctgcaggttacgactggcgcgacattgtctcgtacgtcattgaccatttcgatatcgagatcatgggcggtctgggcccatccactggcaaggtccttagaattgggcttcttggttgcaacgccaccagagagaatgtcgatcgggtgaccgaagccctccgcgccgctctccaacactgcccaaagaaaaaactt

SEQ ID NO: 129 - DNA, 1176 bp, Artificial Sequence
  derived and/or modified sequence
atggcctcccataagttacttgtaacgccgcctaaggcacttctgaaacctctatccatacctaatcagctccttctaggccccggccccagcaacctgccaccccggatcatggccgcaggggggctgcagatgatcggttctatgtccaaagatatgtaccagatcatggatgaaattaaagaaggaatacagtatgtttttcagacccgcaatccattgactctggtgatcagtggttctggtcattgcgcccttgaagccgcattagtgaatgtgcttgagccaggggactcgtttcttgtaggcgctaatggaatctggggccagcgggctgtggatatcggagagcgcataggcgctagggtccaccccatgaccaaggatccaggtggtcactataccctgcaagaagtggaggaggggcttgcccagcataaaccagtgctcctgttcctaacgcacggagagagtagcacgggcgtcctgcagccactcgacgggttcggcgaattgtgtcaccggtacaagtgtttactgctcgtcgactccgtcgcttctctgggggggaccccactgtacatggatagacagggaatcgatatcctgtacagcggctcccaaaaagcgctcaacgcacctccagggacatctctgatctccttttctgataaagctaaaaagaaaatgtactcacggaagacgaaacctttttccttctatctcgatattaaatggttggctaatttttggggatgtgacgaccagcctagaatgtatcaccatactatccctgtcatctccctgtactcactgagggaatcgctcgcgctgattgcagagcaggggttggagaattcgtggagacagcaccgcgaagcagcggcttatctacatggccgcctacaggctttgggcctgcagttattcgtgaaagatccagccctcagactgcccactgtcactaccgtggccgtccccgccggctacgactggagggacatcgtaagctacgtgatagaccacttcgacatcgagataatgggtgggctcgggccatcaacgggaaaagtgctgagaatcggcctactgggctgcaatgcaacacgggaaaacgtggaccgcgttacagaggctttgcgtgcagccttgcagcactgtcctaaaaaaaagctc

SEQ ID NO: 130 - DNA, 1176 bp, Artificial Sequence
  derived and/or modified sequence
atggcttcccataagctgttggtcacgccgccgaaggccctgctcaagcctctttcgatccccaaccagctgttgttgggtcccggaccttcgaatctgccccccaggatcatggccgctggcggtttacaaatgataggctccatgtccaaagacatgtaccagatcatggatgagattaaagagggcattcaatacgtctttcagactaggaaccccctgacgcttgtcatatcgggaagcggtcattgtgcattggaggccgctctggtgaacgtcctggagccgggcgactctttccttgtcggtgcgaatggtatctgggggcagagggccgtcgatatcggtgagcgtattggtgcacgtgtgcaccccatgaccaaggacccgggcgggcattacaccttgcaggaggtggaggagggcttggctcagcacaaaccagtccttctgttcctcacccacggcgagagctccactggggtgctccaaccgctggacggcttcggtgagctctgtcaccgttacaagtgcctcttgctcgtggactcggtcgcctcactgggaggcacccctctgtacatggatcgccagggtatagacatcctttactccggtagtcagaaagccctgaacgccccccctggtacttccctgatttccttttccgataaggccaagaagaagatgtatagtcgcaagaccaagcccttcagcttctacctcgacatcaaatggctcgctaatttctggggttgtgacgaccagccacgcatgtatcaccacaccatcccagtcatctccctgtacagcctgcgcgaaagtttggctctaatcgcggagcagggactggagaactcttggcgccagcatcgagaggcagccgcgtatttgcatggcagactgcaggccttaggcctgcagttgttcgtcaaggatcccgcgcttcgcctgcccaccgtgaccaccgttgccgttcctgctggctatgattggcgcgacatcgtctcttacgtgattgatcacttcgacattgaaatcatgggtggtcttggaccatctaccggtaaagtgcttcgcatcgggctcctcggttgcaacgctacgcgggagaacgtggaccgcgtcaccgaggcactcagagccgctcttcagcattgtcctaagaagaagttg

SEQ ID NO: 131 - DNA, 1176 bp, Artificial Sequence
  derived and/or modified sequence
atggcgtcgcataaattattagtaacgccgccgaaagcgctactaaaaccgctatcgataccgaatcaactattattaggtccgggtccgtcgaatctaccgccgcgtataatggcggcgggtggtttacaaatgataggttcgatgtcgaaagatatgtatcaaataatggatgaaataaaagaaggtatacaatatgtatttcaaacgcgaaatccgttaacgttagtaatatcgggttcgggtcattgtgcgttagaagcggcgttagtaaatgttttagaaccgggtgattcgtttctagttggtgcgaatggtatatggggtcaacgtgcggttgatataggtgaacgaataggtgcgcgagttcatccgatgacgaaagatccgggtggtcattatacgctacaagaagtagaagaaggtctagcgcaacataaaccggttttattatttctaacgcatggtgaatcgtcgacgggtgtattacaaccgctagatggttttggtgaactatgtcatcgatataaatgtctattactagttgattcggttgcgtcgttaggtggtacgccgttatatatggatcgacaaggtatagatatattatattcgggttcgcaaaaagcgctaaatgcgccgccgggtacgtcgctaatatcgttttcggataaagcgaaaaaaaaaatgtattcgcgaaaaacgaaaccgttttcgttttatttagatataaaatggttagcgaatttttggggttgtgatgatcaaccgcgaatgtatcatcatacgataccggttatatcgttatattcgctacgtgaatcgttagcgctaatagcggaacaaggtttagaaaattcgtggcgtcaacatcgtgaagcggcggcgtatttacatggtcgtttacaagcgctaggtttacaattatttgtaaaagatccggcgttacgtctaccgacggttacgacggtagcggttccggcgggttatgattggcgagatatagtatcgtatgtaatagatcattttgatatagaaataatgggtggtctaggtccgtcgacgggtaaagtactacgaataggtttattaggttgtaatgcgacgcgtgaaaatgttgatcgtgtaacggaagcgttacgagcggcgttacaacattgtccgaaaaaaaaatta

SEQ ID NO: 132 - DNA, 1176 bp, Artificial Sequence
  derived and/or modified sequence
atggcgtcgcacaaactgctggtgactccgcctaaagccctgctcaagccgctcagcatccctaaccaactcctcctgggcccgggaccatccaaccttcccccacgaatcatggcggccggaggcttgcaaatgatcggatccatgtcaaaagatatgtaccaaatcatggacgagatcaaggagggaattcagtacgtgttccagactcgcaacccgctgactctggtgatcagcggatcaggacattgcgcgctggaagcggcactggtgaacgtcctcgaaccaggtgacagctttctggtgggagctaacggcatttggggtcagagggcagtggacatcggtgaacgcatcggagctcgggtgcacccaatgactaaggaccctggcggacattacacgctgcaggaagtggaagagggactggcccagcataaacctgttctgcttttcctgacccacggagaatcctccactggcgtcctgcaaccgctggacggattcggagaactgtgtcacaggtacaagtgcttgttgcttgtcgattctgtcgcctccttgggaggaactcctctgtacatggatagacaggggatcgacattctctacagcggatctcagaaagccctgaacgcgcccccgggaacctcgctgatctcattctccgacaaagccaagaagaagatgtattcacgcaagaccaaacccttctcgttctacctggatatcaagtggctggccaacttttgggggtgtgacgaccaacccagaatgtaccatcacaccatcccggtgatctccttgtattcgcttcgagaatccctggcactcattgccgagcagggactggaaaattcctggcgccaacacagggaggccgctgcctacctccacggccggctccaggccctgggcctgcagctgtttgtgaaggacccggcactgcggctgccaaccgtgaccaccgtggcggtgccggccggatacgactggcgggacatcgtgagctacgtgatcgaccacttcgatatcgagattatgggtggacttggaccatccaccggaaaggttcttcgtattggcctgctgggatgcaatgcgacccgcgaaaacgtcgaccgcgtgaccgaggcgctgcgggccgcattgcaacactgcccaaagaagaaactt

SEQ ID NO: 133 - DNA, 1176 bp, Artificial Sequence
  derived and/or modified sequence
atggcttctcacaagctgctggtgaccccccccaaggcactcttgaaacccctctccattccaaatcagttacttctgggcccaggccccagtaacctgcctcctcgtattatggcagccggcgggttgcaaatgattggttcaatgtctaaggacatgtatcagattatggacgagattaaagagggtatccaatatgtcttccagacacggaatcctttaaccttggtcatctctggatcgggacattgcgccctggaggccgctttggtgaatgtgctcgagccaggggacagttttctagtcggagctaacggcatctggggccagcgtgccgtggacatcggggaaagaatcggggcacgggtgcacccgatgaccaaggatcctggaggccactacaccctccaggaggtggaagaaggcctggcacagcacaagccagtgttgctgtttctaacacacggagaatcaagcaccggagttctgcaacccttggacggatttggggagttatgccataggtacaagtgcttgttgttggtggactcagtcgcatccttgggcggaacgcccctgtacatggaccggcaaggcattgatattctctactccgggagccagaaggctttgaacgccccccctggaacctccttgataagcttctccgacaaggccaagaaaaagatgtactcgagaaagacaaagccctttagcttctacctggatattaaatggctggcaaacttttgggggtgcgacgatcagccgcgcatgtaccaccacacgatcccagtgatcagcttatacagtctgagagaaagcttggctctgatcgccgaacagggtttagaaaattcctggcggcagcacagagaagcagctgcatacttacacggccggctacaggcattgggactgcagttgtttgtgaaagatcccgcgttgcgcctgccaacagttactaccgtagccgtgcccgcgggatatgattggagagatattgtgagttacgtgatcgaccactttgatattgagatcatgggaggcctggggcccagcacaggaaaagttctacgaattggactgttgggttgtaatgcgacacgcgagaatgttgatagggtcactgaggcactgcgggctgccctccagcactgtcccaagaagaaactg

SEQ ID NO: 134 - DNA, 1176 bp, Artificial Sequence
  derived and/or modified sequence
atggcctctcataagctgttggtgacaccgcccaaagctttactgaagccactgtcgattccaaatcagctgctgttaggccccggtccatccaaccttcccccacgaattatggccgccgggggcctacagatgatcgggagcatgagcaaggatatgtatcaaattatggacgagatcaaagagggtattcagtatgtgtttcagacacggaatcctctgaccctagtgatatctgggtccggccactgcgccctggaggccgccttagtgaacgttttggaaccaggagacagttttttagtcggcgcaaatggaatctggggacagagagccgtggacatcggagaacggattggcgcaagggtccatcccatgaccaaggaccccgggggccattacacactacaagaggtcgaagaaggcttagcgcagcataagcctgtcctcctcttcctaacacacggagaaagctcaaccggggtcctgcaaccactggacggctttggcgagttatgtcacaggtacaagtgccttctgctggtggacagtgttgcctctctgggtggaactcctttgtacatggacaggcagggtattgacatcctgtatagcggttctcagaaggcgcttaatgcaccacctggaacgtcactgatctcctttagcgacaaagctaagaaaaaaatgtattcaagaaagaccaaaccatttagcttctacctagacataaaatggctggccaacttctggggttgtgacgatcagccccgaatgtaccatcatacaatcccagtcattagtctctactcgctgcgcgagagcctcgccctcattgctgagcaaggactagagaacagctggcggcagcaccgagaggccgcagcttacctgcacggcaggctacaggccctgggacttcagctgttcgtgaaggacccagctctccggcttcctactgtcacgactgtggccgtccccgctggctacgattggcgcgacattgtgagctatgttattgatcattttgatatcgaaattatgggcggtctgggcccctcaacaggaaaggtgctaaggattgggttacttggatgcaatgctaccagggaaaacgtggatcgggtgacagaggctcttcgcgcagcactgcagcactgtcctaaaaagaaacta

SEQ ID NO: 135 - DNA, 1176 bp, Artificial Sequence
  derived and/or modified sequence
atggcttcccacaaattgctcgtgacgccccctaaggcactccttaagcctctttccattcccaaccagctccttctcggtccagggccttcgaatctcccacccagaattatggcagcaggtggcctgcagatgatcggttcaatgagcaaggacatgtaccagattatggatgaaatcaaggaaggaatacaatacgtgttccagaccagaaacccactcacccttgtgatctccggctccggacactgcgcactcgaagccgcactggtcaatgtgctcgaacctggagatagctttctggtgggagcaaatggcatatgggggcaacgcgcagtggatatcggagagcggattggagcccgggtgcaccctatgacgaaggaccctggaggacactacacccttcaggaagtggaagaggggctggcacaacacaagccagtgctcctgtttcttactcacggcgaatcctcgactggagtgctgcaacctctggatgggtttggtgaactgtgtcacagatacaaatgtctccttctcgtggattcggtcgcttctcttggagggacccccctgtacatggatcggcaggggattgatatcctttactcaggctcgcaaaaagctcttaacgcgccaccaggtacgtcgctgatttcatttagcgataaggcaaagaaaaagatgtactccagaaagaccaagccttttagcttttacctggacatcaagtggttggccaatttctggggatgcgatgaccaacctaggatgtaccatcacactattcctgtgatcagcctgtactctcttcgcgaaagcctggctcttattgcagaacaaggtcttgaaaactcgtggaggcagcatcgggaagcagctgcatacttgcacggaaggctgcaggcgctcggacttcagctcttcgtgaaggatcctgcacttcggcttcctaccgtgaccaccgttgcagtgccggcaggctatgactggcgggacatcgtgagctacgtgatcgaccattttgacattgagattatgggaggacttggcccttccaccggaaaagtccttcgtattggtctgctgggctgtaacgctaccagggagaacgtggacagagtgaccgaggcattgcgagcggcgctccagcattgtcctaaaaagaagctc

SEQ ID NO: 136 - DNA, 1176 bp, Artificial Sequence
  derived and/or modified sequence
atggccagtcataagctgctggtcaccccacccaaagctttgctcaagccacttagcatccccaatcaattactactgggcccggggccttctaatcttcccccccggatcatggcggccggcggattgcaaatgatcggctccatgtcgaaggatatgtaccaaattatggatgagattaaggagggcatccagtacgtattccagacccgaaatcctctgacactggtgattagcggctccggacactgcgcgctcgaggccgccctggtgaacgttttagaaccaggtgactcatttctggtgggcgcaaatgggatctggggtcagagggcagtggacatcggtgagcgaataggcgcacgggttcaccctatgacgaaagatcctggaggccattatactctgcaagaggtggaagaaggactagcacaacataaacccgttctgttgtttctaacccacggtgaaagttccacaggcgtcctccagcccctcgatggcttcggggagctgtgccatcggtataagtgtctgctgctagtagacagcgtggctagtctggggggtacacccctctatatggatagacagggaattgacatcttgtactcaggctctcagaaggcacttaatgctcctcctgggacgagcctgatctctttcagcgataaagccaaaaagaaaatgtatagtaggaagactaagccgttttcgttttacctagacatcaagtggctggccaatttttgggggtgtgacgaccagcctaggatgtatcatcatacaatcccagtgatctcgctgtattccctgagggaatccctagctctgattgccgagcagggtctcgaaaattcatggcgtcagcaccgtgaagccgccgcgtatcttcacggcaggttacaggctctgggcttgcagctgttcgttaaagatcccgctctgagattgcccactgtgacaactgtagctgtgcctgccggctatgactggcgcgatattgtaagctacgtaattgaccatttcgatattgagattatggggggcctgggtccctcaacagggaaagtgctccgaatcgggctgcttggatgtaatgctaccagggaaaatgtggaccgggtaaccgaagccctgcgtgccgccctccaacactgtccaaagaaaaagctt

SEQ ID NO: 137 - DNA, 1176 bp, Artificial Sequence
  derived and/or modified sequence
atggccagccacaaactgctggtgaccccgccgaaagcactgctcaagccgctgtctattccgaaccaactgctcctggggccggggccgtccaacttgccaccgcggatcatggcggctggaggactgcaaatgatcgggtcgatgagcaaggacatgtaccaaatcatggatgaaatcaaagagggaatccagtacgtcttccagaccagaaaccctctgaccctggtgatctccggatcgggacactgcgccttggaggccgcgctcgtgaacgtgctggagcctggagactcgttccttgtcggcgccaacggtatttggggacaacgtgcagtcgatatcggagagcgcatcggagcgcgcgtgcacccaatgaccaaggacccgggtggtcattacaccttgcaagaagtcgaagaaggactggcgcagcacaagcctgtcctgttgttcttgacccatggagagtcctcgactggagtgcttcagccactcgatggattcggggaactgtgccacagatacaaatgtctgctcctggtggattcggtggcaagcctcggaggaactccgctgtacatggaccggcagggtattgatatcctctacagcggatcacagaaggctctgaatgcaccaccaggaacctcactgattagcttcagcgacaaggccaagaaaaagatgtactcgcgcaagactaagccgttctccttctatttggacatcaagtggctggcaaatttctgggggtgcgacgaccagccccgcatgtaccatcacactatcccggtgatttccctttactccctcagagaatccctggccctgatcgccgaacagggccttgaaaattcatggcggcaacaccgggaagctgccgcctatctgcatggaaggctccaggcgctgggattgcagctttttgtgaaagaccctgcactccggcttccaactgtgaccactgtggcagtgccggccggatacgactggcgggatatcgtgtcatacgtgattgaccacttcgacatcgagatcatgggagggctgggacctagtaccggaaaggtgctgcgcatcggactgctgggatgcaacgcgactagagaaaacgtggaccgcgtgactgaagccctccgtgcggctttgcagcattgcccgaagaaaaagctg

SEQ ID NO: 138 - DNA, 1176 bp, Artificial Sequence
  derived and/or modified sequence
atggcctcccataagcttctcgttacacctccaaaggccctgctgaaacccctctccattcctaaccaattgctcctgggtcctggaccgagcaaccttccaccgagaataatggctgcaggcggcttgcagatgatcggatccatgtcaaaggacatgtatcagatcatggacgaaataaaagagggaatacaatatgtgtttcagacgagaaatccattaactctggtcataagtggttctggccattgtgccctggaagccgcactggtgaatgtgctggagcccggggactcgttcttagtcggcgccaatggaatttggggtcagcgagcggtggatatcggtgaacggattggagcccgcgtccaccccatgaccaaagatccaggcgggcactatacactccaggaggtggaagaaggtctagctcagcataaacccgtccttctgttccttacacacggcgaatccagtacaggggtgttgcaacctcttgacggattcggggaactctgccatagatacaagtgcctgctgctggtggattcagtggcatccttgggggggacaccactgtacatggacagacagggaatcgatatcctgtattcgggtagtcaaaaggccttgaacgcgcctcccgggacctcccttatttctttctccgataaggctaagaaaaagatgtacagccgcaaaactaagcctttctcgttctatctggatattaagtggcttgcaaatttttgggggtgtgacgaccaaccccgaatgtatcatcatactatcccagtcatatccctctattcattacgcgagtcactggccctcatcgccgaacagggcctggagaactcttggcggcagcatcgcgaagccgcggcatatctgcacggaagactccaggctctaggactgcagctgtttgtcaaggacccagctctccggctgccaacagttacaacagtcgctgtgcctgccggctacgactggcgtgatatcgtgagctatgtcattgaccacttcgacattgagatcatggggggcctcggcccctctaccgggaaggttctccggatcgggcttctggggtgtaatgccacacgcgagaatgtagatcgtgtcaccgaagctcttagagccgccctgcagcactgtccaaaaaagaaactg

SEQ ID NO: 139 - DNA, 1176 bp, Artificial Sequence
  derived and/or modified sequence
atggccagccataagctgttggtgacaccccccaaggcactcctgaagcccctctccatccctaatcagctgctcctggggcccggcccctcaaaccttccaccccggatcatggcggcaggtggcctgcagatgattggttcaatgtcaaaggatatgtaccagattatggatgagatcaaagagggtatccaatatgtcttccaaactcgtaatcccctcacactggtgattagtggctccggtcattgtgcactggaggcagctcttgtgaatgtgttagagcccggtgacagtttccttgttggcgctaacggcatctgggggcagcgggctgtggacattggagagcgcatcggggccagagtgcacccaatgacaaaagaccccggcggacactacacactgcaggaagtggaggagggtctagcccagcataagcccgtgctgctattcctaactcacggggaaagctcaacaggtgttctgcagcccttggacggttttggagagctctgtcatcggtataagtgtttgcttttggtggattctgtggcctcgctgggcgggacgccactgtatatggacaggcagggcatagatatcctgtattcaggaagccagaaggcactgaatgcacctccaggcacctccctcatctcctttagcgataaggccaagaagaaaatgtactcaagaaagacaaagcctttcagtttttacctggatataaagtggctggccaacttctggggctgtgacgaccagccgaggatgtatcaccataccatcccggtaatttcgctgtattccttgcgagagagccttgcgctgatcgccgagcagggcctggagaatagctggaggcagcacagagaggctgcggcatatctgcacgggcggcttcaagcacttggactgcagctgtttgtgaaagaccccgctctacgccttcctacagtgaccaccgtggcggtgccagcaggatacgactggcgagatattgtctcttatgtcatagatcactttgatatcgagatcatggggggtttaggaccgtctacagggaaggtgctgcgaataggcctcttaggatgtaatgcaacgcgcgagaacgtggatcgagtgaccgaagcacttagagctgcgctgcagcattgtccaaaaaaaaaacta

SEQ ID NO: 140 - DNA, 1176 bp, Artificial Sequence
  derived and/or modified sequence
atggccagccacaagttgttggtcaccccacctaaggccctgctcaaacccctttcaatccctaaccagctcctgctggggccgggcccgtcgaacctgccgccccgcatcatggcggctggtggcctgcaaatgattggatcaatgtctaaggatatgtatcaaatcatggacgagatcaaagagggcatacagtacgtgttccagacccgtaacccgctgaccctggtcatttctggcagcggtcactgcgccctggaggcagctctggtgaatgtgctggagccaggcgactccttcctggtgggagctaacggtatctggggacagcgagccgtggacatcggagaacgaatcggggcgagagttcatccaatgactaaggatccgggcggacactacaccctccaggaagttgaggaagggctcgcccaacacaagccagtactcctgtttctcacccatggtgagtcgagcaccggagtgctccagcctcttgatggattcggagagctgtgccatcggtacaagtgtttgctcctggtggattccgtggcaagcctcggaggaactcccctctacatggaccgccagggaattgatatcctctactcgggaagccaaaaggcgctgaacgcaccacctggaacctccctcatctccttctcggataaggcgaagaagaaaatgtacagcagaaagactaagcctttctccttctatttggacattaagtggctcgccaatttctggggatgcgatgaccaaccgcgcatgtatcaccacaccattccagtgatcagcctctactcactccgcgaaagcctggccctgatcgcggaacagggcctggagaactcatggcgacaacatcgcgaggcagcggcttatcttcacggacgcctgcaagccctgggactgcagttgttcgtgaaggaccccgcgctccgcctcccaactgtgactaccgtggcagtcccggctggatacgactggcgggacatcgtgtcctacgtgatcgaccacttcgacatcgaaatcatgggcggcctgggccctagcactggaaaagtcctgcggatcggattgctgggatgcaacgccacccgcgaaaatgtggacagggtgactgaggccctgcgggctgcactgcagcattgccccaagaaaaagttg

SEQ ID NO: 141 - DNA, 1176 bp, Artificial Sequence
  derived and/or modified sequence
atggctagtcacaagctgctggtcactcctcctaaggccctgctgaaaccactatctattcccaaccagctgctgctcggccctggcccatccaacctgccaccaaggatcatggctgctggcggtctgcagatgattggctcgatgtctaaagatatgtaccagatcatggacgagataaaggaagggatccaatatgtgttccagactaggaaccccttgacgttggtcatttctgggtccggacactgtgccttggaagcagctctcgtcaacgtgctcgagccgggcgattccttcttggtgggggccaatgggatttggggacagcgggccgtcgacatcggcgagagaataggcgcacgagtgcatccaatgacaaaggatccagggggacactacactctgcaggaggtggaggaaggactggctcagcacaagcctgtccttctatttttgactcacggcgagagctccactggtgtcttgcagccccttgatggcttcggggaactgtgtcacaggtacaaatgcctcctccttgtggacagcgttgcttcactggggggaacacctttatatatggatcggcagggcattgacatcctgtactcaggaagccagaaggctctgaatgccccccctggcacctcgcttatctccttctcagataaggcgaagaagaaaatgtatagcagaaagacgaagccattttctttctacctggacataaagtggctcgccaatttttggggctgcgacgatcagcctcgcatgtatcaccacactatccctgtcatttcgttgtatagcctcagggaatccctggccctgattgctgaacaaggactcgagaactcttggcggcagcaccgagaggccgctgcatacctccacggtagactgcaggccctgggattgcagctgttcgtcaaggacccagccttacggcttcccaccgtaactaccgtcgccgtccccgccggttacgattggcgtgatatcgtgtcctacgttatcgatcattttgatatcgaaatcatggggggtcttgggcctagcaccgggaaggttctccgcattggcttacttggctgcaatgccacgcgcgaaaatgtggatcgggtgacagaggcgctacgagccgccctacaacattgccccaagaaaaagctg

SEQ ID NO: 142 - DNA, 1176 bp, Artificial Sequence
  derived and/or modified sequence
atggcaagccacaaattgctcgtgactccgcctaaagcgttgctcaaaccactctcaatcccaaaccagcttctgcttggtccgggaccctccaacctcccacctagaattatggcagcaggaggacttcaaatgataggatcaatgtccaaagatatgtaccagattatggatgagattaaggaaggaatccaatacgtgtttcaaacgcgcaaccctcttactctggtcatttcgggttccggacattgtgctcttgaagcagcactggtgaacgtgctggaacctggcgattcgttcttggtcggagcgaatgggatttggggtcaaagggccgtggacataggggagcggattggtgcccgagtgcatccgatgaccaaggatccagggggtcattacacgttgcaggaagtggaggaagggctcgcgcagcataagccagtcttgcttttccttacccacggtgaaagctcgaccggcgtgcttcagcctctcgacggctttggggaactgtgtcacagatacaaatgccttcttctggttgattcggtggcgtcgctgggcggaaccccactttacatggataggcaaggaatcgacattttgtattcgggctcacaaaaagccttgaatgcaccgcccggaactagcttgatttccttctcagacaaggcaaagaagaagatgtactctaggaaaactaagccttttagcttttaccttgacatcaagtggctggcaaacttttggggctgtgacgatcaaccacggatgtatcatcacaccatccccgtgatatcgttgtattccctcagagagtcacttgccctgattgcagagcaaggactcgaaaattcatggagacagcaccgcgaggcagcggcttacctccacggtcgacttcaagcactcgggctgcagctgtttgtcaaggacccagccctccgccttcccaccgtgactaccgtggcggtccccgcgggctacgattggagagatatagtctcctacgtgattgatcatttcgacatcgagattatgggcggcttgggaccatcgaccggtaaggtgctgagaatcgggcttcttggatgcaacgcaactcgggaaaacgttgatcgcgtcactgaagcactgagagccgcgctgcagcattgtcctaagaagaaactt

SEQ ID NO: 143 - DNA, 1176 bp, Artificial Sequence
  derived and/or modified sequence
atggcctcccacaagctgctggtaactccccctaaggctcttcttaagcccctttcaattcctaaccaactgctgttgggacctggaccatcaaatttgcccccccggataatggccgccggcgggctgcagatgattgggtcaatgtccaaggacatgtaccagattatggatgagatcaaggaggggatacaatatgtctttcagaccagaaacccactgaccctcgtcatttctgggtccggtcactgcgccttggaggcagcactggtgaatgttttggaaccaggggacagctttctcgtaggagcaaatgggatttggggccagagagccgttgatatcggtgaaagaattggtgcccgcgtgcaccccatgactaaggaccccggcggacattatactctgcaagaggttgaagaggggctggcacagcacaagccagtccttctatttcttacacacggtgagtcttcaactggcgtcttgcagccccttgacggattcggcgaattgtgccaccgctacaagtgtctgctgctagtcgactctgttgccagcctgggcggcacacctctgtacatggacaggcaaggaattgatatcttatattctgggagccagaaagcactcaacgccccccccggaactagtcttatcagtttcagtgataaagcgaagaagaagatgtactctcggaagactaagcccttctctttctacctcgatataaaatggctagccaacttttggggttgcgacgatcagcctagaatgtaccatcacaccattcccgtgatctctctttactcgttgagagagtctcttgcacttatagcagagcaaggccttgagaattcctggaggcagcacagagaggccgccgcttatctgcatggcaggctgcaagcgctgggacttcagctctttgtcaaggaccccgccctgcgtctaccaactgtaaccactgtggccgtgccggccggctatgactggcgggacatcgtgtcttacgtgatcgatcactttgacatcgaaatcatgggtggtttgggacccagcacagggaaagtcctgcgcattgggttgttgggatgcaatgccacgcgtgaaaatgtagacagagtaacagaagcactgcgagcagcactgcagcactgccccaagaaaaagtta

SEQ ID NO: 144 - DNA, 1176 bp, Artificial Sequence
  derived and/or modified sequence
atggcgagccacaaactgctggtcaccccacctaaggctttgcttaagccgctctcgatcccaaatcagctccttctcgggccaggaccatcaaaccttccgccaaggattatggcagcaggtggactgcaaatgataggatcgatgtccaaggacatgtaccagattatggacgaaatcaaggaaggaatacaatatgtctttcagactcgaaatccacttactcttgtcatttcaggctccgggcattgcgcccttgaggcagctcttgtgaatgtgcttgagcctggtgattcatttcttgtgggagcaaatggaatctggggtcaacgcgcagtcgacatcggagaaagaattggtgctagagtccatccaatgaccaaagacccaggaggacattataccttgcaggaagtggaagagggactcgcccaacataaacctgtgctgctgtttctcacccatggagaaagctcgactggagtgttgcagcctcttgatggattcggagaactctgtcacagatacaagtgtctgctgctggtcgattcggttgcatcactgggcggaactccactgtacatggataggcaaggtatagacattttgtactccgggtcccagaaagccctgaacgcgcctcctggtacttccctgattagtttcagcgataaggcaaagaagaaaatgtactcccgtaagaccaaacccttttcattttacctcgatatcaagtggctggctaacttttggggctgtgatgatcaaccacggatgtatcatcacaccatccctgttatatcgctgtactctctcagggagagcctggctctgattgcagaacaaggtctggaaaacagctggaggcaacacagggaagccgcagcctatcttcacgggaggctgcaagcccttgggcttcagctttttgtgaaggatcctgcacttcgactcccaaccgtgaccacggtggcagtgcctgcgggctacgattggcgagacattgtgtcgtatgtgatcgatcattttgatatcgagattatggggggactggggccttccactgggaaagtgctccggattggactgctgggctgcaacgcaacccgggagaatgtggaccgcgtcacggaagcactgagagccgcactgcagcattgcccaaagaagaagctc

SEQ ID NO: 145 - DNA, 1176 bp, Artificial Sequence
  derived and/or modified sequence
atggcctcgcacaagctcctggtgactccaccgaaggctctcctgaagcctctctcaatccccaatcaactgctcctgggccctggaccttccaatttgcctccgcgaatcatggccgcagggggactccaaatgatcggtagtatgtcgaaagacatgtatcagatcatggacgagattaaagaaggaatccaatacgtgttccaaactaggaatcccctgaccctggtgatcagcgggtccggacactgcgcgctggaagctgccctggtgaacgtcctggaaccaggcgactcgtttctcgtgggcgcgaatggaatctggggacagagagctgtggacatcggagagcggatcggtgcgcgcgtgcacccgatgactaaggaccctggcggacactatactttgcaggaggttgaagagggactcgcgcagcacaaaccagtcctcttgtttttgacccacggagagagcagcactggcgtccttcagccgctcgacggcttcggagagctttgtcaccggtacaaatgcctgctgctcgtcgactccgtcgcctccttgggaggcactcctctctacatggatcgccaggggattgacatcctctactcgggctcgcagaaggcactgaatgcaccgccaggaacttcccttatctcattttcagataaggctaaaaagaaaatgtacagccgcaaaaccaagccattcagcttctacctcgacatcaagtggctggccaacttctggggctgcgacgaccagccgcgcatgtaccaccacaccatccctgtgattagcctgtattcactccgcgaatcgctggcgctgattgccgaacaggggctcgaaaactcctggagacagcaccgggaagcggcagcatatctccacggccgtctgcaagccctgggcctccaactcttcgtgaaggatccggccctgagacttccgactgtcactactgtggccgtcccggcaggctacgattggcgcgatatcgtgtcatacgtgattgatcacttcgacatcgagatcatgggaggcctgggaccgtcgaccggtaaggtgcttcggatcggactgctcggatgcaacgccactcgcgaaaacgtggatcgcgtaaccgaagccctgcgggccgcactgcagcactgcccgaagaagaaactt

SEQ ID NO: 146 - DNA, 1176 bp, Artificial Sequence
  derived and/or modified sequence
atggccagtcacaaactgcttgttacaccacccaaagcccttctgaagccgttgtccattccaaatcagcttctcctaggccctggaccaagcaatctcccccctcgcataatggcagcaggaggactgcagatgattggatcaatgagcaaggacatgtatcaaatcatggacgaaatcaaagaggggattcagtatgtgttccagacccggaatccactgactttggtgatctctggatccgggcattgtgccctggaggccgccctcgtcaacgtcctcgaacccggggacagcttcctcgtgggagctaacggcatttgggggcagcgggccgtcgacatcggcgaacgcatcggtgcaagggtgcatcctatgacaaaggatcccgggggtcattacactctgcaggaggtggaggaagggttagcccaacacaaaccagtccttctcttccttactcacggggagagctcaactggtgtcctacaaccactggacggcttcggtgaactgtgccatcgatacaagtgtctactcctggttgattccgtggcctctttgggggggacccccctgtacatggatcggcaaggcatagacatcctgtatagcggctcccagaaagcgctgaatgcgccacctggaacctccttgattagcttttccgacaaagcgaagaaaaagatgtactctagaaagacaaaacccttcagtttttatctagacatcaagtggctggccaacttctggggctgcgatgatcagcctcggatgtaccatcataccatccctgtaatctccttatactctctgcgtgagagtcttgccctcatagctgagcagggcctcgagaacagctggcgtcagcacagagaggcggcggcttacctccatggtaggctccaggccctgggcctgcagctattcgtcaaggatcccgccctgaggcttcccacagtaactacagttgcagtacctgccgggtatgattggcgtgatatcgtgtcttatgtgattgaccactttgatattgagatcatgggaggcttaggaccttccactggtaaagtcctaagaatcggattgctaggttgtaatgctaccagagaaaacgtggatcgggtcaccgaagccctccgagccgcactgcagcactgccctaaaaaaaagctg

SEQ ID NO: 147 - DNA, 1176 bp, Artificial Sequence
  derived and/or modified sequence
atggcgtcccacaagctcctcgtgactccgccaaaggcccttctcaagcccctctcaatccctaaccaactgctgcttggtccgggtccttcgaaccttccacctagaatcatggcagccggtggactgcagatgatcggttcgatgtcaaaagatatgtaccagattatggacgagattaaagaggggattcaatacgtgtttcaaactcgcaacccattgaccctggtgattagcgggtcaggccactgcgcccttgaagcagcgctcgtgaacgtgctggagcccggtgactcgttcctggtgggagccaacgggatctggggacagagagccgtggacatcggagaacggatcggtgcacgtgtgcaccctatgactaaggatccaggtggccattacactctgcaagaggtggaagaaggactcgcccagcacaaacctgtcctcctctttcttacccacggagagtccagcactggagtcctccagccactggatggcttcggtgaattgtgccaccgctataagtgtctcctgcttgtggacagcgtggcatcactgggaggtacgccgctgtacatggatcgccaggggattgacattctgtatagcggctctcagaaagccctgaacgcaccacccggaacttcacttatctccttctcggacaaggcaaagaaaaagatgtactctaggaaaactaagccattttcattctaccttgacattaagtggctggccaacttttgggggtgtgacgaccagcctaggatgtaccatcatactattcctgtgatctcgctttactcactgcgagaatcccttgcccttattgcggagcaaggacttgaaaattcgtggagacaacatcgggaagcagcggcataccttcacggtcggcttcaggctttgggtctgcagttgttcgtgaaggatcctgcactgcggctccccaccgtcaccacggtggcggtgcctgcaggctacgactggcgggacatcgtgtcctacgtgatagatcactttgatatcgagattatgggaggcctcggaccttcgactggtaaagtgcttcggattggactgctggggtgtaatgcgaccagggagaatgtggatagggtgactgaggcactgcgagctgccctgcagcattgtcctaaaaagaagttg

SEQ ID NO: 148 - DNA, 1176 bp, Artificial Sequence
  derived and/or modified sequence
atggcgtctcacaagctgctggtgacacctcctaaggccctcctcaaaccactcagcatccctaaccagctgctgctaggacccggacccagcaatctgcccccgaggataatggccgccgggggccttcaaatgataggtagcatgtcaaaggatatgtatcagatcatggacgagatcaaggagggaatccagtacgtgttccagacccgcaaccctctgacattagtgatttccggctccggccactgtgccctcgaagcggcgttggtgaatgtgctggaaccaggggattcctttctggttggtgctaatggaatttggggccagagagccgttgacataggcgaacggatcggagcgcgcgttcaccccatgactaaggatcctggcggacactacacactgcaggaagtggaggagggtttggcccaacacaaacctgtgctcctgtttttgacacacggcgagtcttccacaggcgtactgcagcctctggatggcttcggcgaactctgccatcgctataagtgccttctgcttgtggattccgtcgcaagtttgggaggcacacccctgtatatggatcgacagggtatcgacatcctatattccggaagtcagaaggccttaaacgcaccccctgggacttccctcataagcttttctgacaaagccaaaaaaaagatgtattctagaaagacaaagcccttctccttctatttggacattaagtggttagccaatttttggggttgtgacgatcagccgaggatgtaccatcacaccatacccgtgatctcgctctactctctccgtgaatctctagccctcatcgctgagcaggggctcgagaacagctggaggcaacaccgcgaggccgccgcttatcttcacggcaggctccaggccctgggactgcagttgttcgttaaagacccagctttacggctgccgacggtgaccaccgtggcagtgcctgcaggctacgattggagagatatcgtgtcatatgtgatcgaccacttcgacatcgaaatcatgggagggctgggtccctctacaggcaaagtgttgcggataggactgcttggttgtaacgccacgcgggaaaacgtcgaccgtgttacagaagctctacgtgcagccctgcaacactgccctaagaaaaagctc

SEQ ID NO: 149 - DNA, 1176 bp, Artificial Sequence
  derived and/or modified sequence
atggccagccataaacttcttgtgactccgccaaaggctctgttgaagcccctgtccattcccaaccagctgctgctcggaccaggtccgtccaatctgcctccaaggatcatggcagcaggaggacttcagatgattggttcgatgtcgaaggatatgtaccaaatcatggatgagattaaggaaggcattcagtatgtctttcaaactcgaaaccctcttactctggtgatcagcggctctgggcattgcgcacttgaagcagcgcttgtgaacgtgcttgaaccaggagacagctttcttgtcggtgcaaatggaatctggggccaaagagctgtcgacataggggagagaatcggagccagagtccatcctatgactaaggatccaggcggccactacacccttcaagaagtggaggaaggtctggcccagcataagcctgtgctcctgtttcttacgcatggagaatccagcaccggagtcctccaacctcttgatggatttggcgaactttgtcatcggtacaagtgtctcctgctcgtggatagcgtggcatccctgggtgggactcctctgtacatggacagacaaggcattgatatcctctacagcggtagccaaaaggcattgaatgcaccccctggaacctcgcttatctcgttcagcgacaaggcgaaaaagaaaatgtactcccgtaagacgaagcctttctctttttacctggatatcaagtggctggccaacttttggggatgcgatgatcagcctcgtatgtaccatcatactataccagtgatctcactgtactcgcttcgcgagtcactggctctgatcgctgagcaaggactggaaaactcatggcggcaacatcgagaagccgcagcgtacctgcacggtcggttgcaggcccttggtttgcaactcttcgtgaaagatccagcactgaggctgccaactgtgactactgtcgcagtgccagcgggttacgattggcgggatatagtgtcatacgtgatcgaccatttcgacattgagattatgggtggcctcggcccatcaaccgggaaggtgcttaggatcgggctcctggggtgcaatgcgaccagagagaatgtggatcgcgtcactgaagcacttagagccgccctccaacattgccctaaaaagaagttg

SEQ ID NO: 150 - DNA, 1176 bp, Artificial Sequence
  derived and/or modified sequence
atggcctcacacaagctgctcgtgactccgccgaaggcgctgctgaaaccgctgagcattccaaatcaactcttgctgggaccgggaccttcgaatctcccgcctcggataatggcagccggcggactccagatgatcggctcaatgtcgaaggacatgtaccaaatcatggatgaaatcaaagaaggtatccaatatgtgttccaaactcggaaccccttgactctggtcatcagcggatccgggcactgcgctctggaagcagctttggtcaacgtcctggaacctggtgattccttcctggtgggagctaacgggatttggggtcagcgcgcagtcgatattggagagaggataggcgctagagtccacccgatgaccaaggaccccggcggacattacactctccaagaggtggaagaaggtctggcgcagcacaaaccagttctgctgtttttgacccacggagagtcgtcgactggcgtgctccagcccctggatggctttggcgaactgtgtcatcggtacaagtgcctgttgctcgtggattcagtcgcaagcctcggcggaactcccctgtacatggataggcagggaatcgatattctgtactccggatcacagaaggcactgaacgccccgccaggaacctcgctgatctcgttctctgataaggcgaaaaagaaaatgtacagcagaaagacgaagcctttctccttttatctcgacatcaaatggttggcgaacttctggggctgcgatgaccaaccgcggatgtaccaccacaccatcccagtgatctccctctacagcctccgagaatccctggccctcattgcagagcaggggttggagaattcatggcggcagcatcgggaggccgccgcctacttgcatggtcggcttcaggccctcggcttgcagctctttgtgaaggacccggccctgcgccttccaactgtgaccacggtggccgtcccggctggttacgactggcgggacatcgtctcctacgtgatcgaccatttcgacatcgagattatgggcggattgggaccttccaccggcaaggtgcttcggatcggactgctcggttgcaacgctactcgcgagaacgtggacagagtgaccgaagccctccgagcggcgctgcaacactgtccaaagaaaaagctc

SEQ ID NO: 151 - DNA, 1176 bp, Artificial Sequence
  derived and/or modified sequence
atggctagccacaagttgttggtgactcctcccaaagcccttctgaagcccctgtcaattcccaaccagttgcttctgggtccaggaccttcaaatttgcccccacgtatcatggctgccggtggtttgcaaatgatcggatccatgtctaaagatatgtaccaaatcatggatgagatcaaggagggtatccagtatgtatttcagaccaggaacccactgacactcgtgatatctggaagtggccattgtgcactcgaggccgccctggtcaatgtgctggagcccggagattctttcctcgtcggcgcaaatggcatttggggacagcgcgcagtggatataggcgagcgcatcggagcccgcgtgcaccctatgactaaggaccccggcggtcactacactctccaagaggtagaggagggactggcacagcacaaacccgtattgctctttctgacccacggagagagcagtactggcgtcctccagcccctggacggcttcggagagctttgccacaggtacaagtgtctgctgttggtggattcagtcgctagcctgggaggaaccccactctatatggaccgccagggaatcgacatactgtattccggatctcagaaggccttgaacgctccacctggtacttctctcatttccttctctgacaaggctaagaagaaaatgtacagcaggaagactaaacctttctcattttacctcgatatcaagtggctggctaatttttggggttgcgacgaccagcctaggatgtaccaccataccattcctgtaatcagtctctacagcttgcgcgagtcactggctctcattgcagagcaaggcctggagaactcatggcgccaacatagggaagccgctgcctacctccatggtcgtctgcaagctctcggccttcagctcttcgtcaaagaccctgccctgagactgccaaccgttaccactgtcgccgtgcccgccggctacgattggcgcgatattgtgagttatgtaatcgaccactttgacatcgagatcatgggaggcctgggtccttcaactggaaaggtactgagaatcggattgctgggatgtaacgctacccgtgagaatgtcgacagggtcaccgaagccctcagagcagcactgcagcattgccccaaaaaaaagctc

SEQ ID NO: 152 - DNA, 1176 bp, Artificial Sequence
  derived and/or modified sequence
atggcaagccacaagctcctcgtcacgccgccgaaagcgctgctgaagccactctcaattcctaatcagctcttgctggggccgggtccttccaatctgcctccgcgcatcatggccgcaggtgggctgcaaatgatcggtagcatgagcaaagatatgtatcaaattatggacgagatcaaagagggaatccagtacgtattccagacccgaaatcctctgacactcgtaattagcgggagcggtcactgcgccctcgaagccgccctggtgaacgttctggaaccgggtgattcctttttggtgggcgccaacggcatttggggacagcgtgcggttgacatcggtgagcgcattggcgcccgggttcatcctatgaccaaagatccagggggccattacacattgcaagaggtagaggaaggtctagcacaacacaaacctgtccttctgtttctgacccacggtgaatccagcaccggtgtcttgcagcccctggatggtttcggtgagctatgtcaccgctacaagtgtctgctccttgtcgatagcgtggcatcactgggtggtactccattatatatggacagacaaggtatagacatcctgtattccggaagccaaaaagctttgaatgcaccacccggcacaagcttgatcagcttcagcgataaagcgaagaagaagatgtactcacgaaaaacgaagcctttcagcttctatttggacatcaagtggctggcgaacttctggggttgtgacgatcaaccgagaatgtaccaccataccattccggtcatctctctgtattccctccgcgaatcattagcgctaatagcggagcaagggttggagaacagttggcgccaacatcgcgaggctgcggcctatctgcatggtcgcttgcaggctctgggcctgcaactattcgttaaagatccggctctccgtttgccgactgttaccacggtggccgttcctgcgggatatgattggcgcgacatagtctcctacgtgattgaccactttgatatcgaaattatgggaggtctgggtccaagcaccgggaaggtgctgcgcatcggcctgctggggtgtaacgctacccgggaaaacgtggatcgcgtcaccgaggcactccgggcggccctccagcattgcccgaagaaaaagtta

SEQ ID NO: 153 - DNA, 1176 bp, Artificial Sequence
  derived and/or modified sequence
atggcgagccataaactcctcgtgactcccccgaaggccttgcttaaaccgttgtcaattccaaaccaactcctgcttggacctggcccatcgaaccttccgccccgcataatggcggccggaggcctgcaaatgattggatccatgtccaaggacatgtatcaaatcatggatgagatcaaggaaggaattcagtacgtctttcagacccggaaccctctcacgctggtcatttccggaagcggacactgcgcacttgaagcagcactcgtgaatgtgctggagccaggggattcatttctggtaggagcaaacggaatttggggccagagagccgtggacataggggagaggattggcgctagagtccatcctatgactaaggaccccggtggtcactacaccctgcaagaagtggaagaaggcctggcgcaacataagcctgtgcttctgtttttgacccatggagagtcctcgactggggtgctccagccactcgacggttttggggaactttgtcataggtacaagtgccttctgctggtggattccgtggcgtcgctgggaggaactccactgtacatggatcggcagggtatcgatattctttactcgggatcgcagaaagcacttaatgcccctcctgggactagcctgatctccttttcggataaggctaagaagaagatgtacagcagaaagaccaagccattctcattttacctcgacatcaaatggcttgccaacttctggggctgtgatgatcagccccggatgtaccaccataccattcccgtgatctccctgtacagcctccgagagagccttgcgctcatcgcagaacaaggcctggaaaattcttggaggcaacatagagaagcggcggcgtaccttcacggtcggttgcaagcactgggcctgcaattgttcgtgaaagatccagcccttcgacttcctactgtgacgactgtcgcagtaccggcaggttacgactggcgtgatattgtctcgtacgtgatcgaccacttcgatatcgagattatgggagggcttggtccttcgaccggtaaggttctcagaattggactgctcggatgcaatgcaacccgggaaaacgtagatcgcgtcaccgaagccctgcgcgctgcactccaacattgtcctaagaaaaaactc

SEQ ID NO: 154 - DNA, 1176 bp, Artificial Sequence
  derived and/or modified sequence
atggcgtcgcacaaacttctggtgacgccgccgaaggctctgctgaaaccgctctcgatccccaaccagttgctgctgggacctggaccttccaacctgccgccgcgcatcatggccgcggggggcctgcaaatgatcggctccatgagcaaagacatgtaccaaatcatggacgaaatcaaagaggggattcaatacgtctttcagacgcgcaacccactgactctcgtgatttcgggcagcggacactgtgctctcgaagcggccctcgtgaacgtgttggaacctggagactcgttcctggtgggagcaaatggaatttggggccaacgcgccgtggatatcggagagcgtatcggcgcaagagtgcatccgatgaccaaggatcctgggggacattataccttgcaggaagttgaggaggggcttgcacaacacaaaccggtgctcctgttcctgactcatggagagtcaagcactggagtgctccagcccctcgatggattcggtgaactgtgtcaccgatacaagtgcctgctgcttgtggacagcgtggctagcctgggcgggactccgctgtacatggaccggcaaggaatagacatcctctacagtggatcccaaaaggctctgaatgccccgcccggcaccagcctgatcagcttctcggacaaggcaaagaagaagatgtactcccgcaaaactaagccctttagcttctacttggacatcaaatggctcgcgaacttctggggctgcgatgatcagccgaggatgtaccatcacactatcccagtgatttcgctgtactcccttcgggaatcacttgcactcatcgcagaacagggactggaaaattcatggagacagcatcgggaggctgcggcgtacctccatggacgtttgcaagccctgggactgcagctctttgtgaaggatcccgcgctccgcttgcctaccgtaacgaccgttgcggtccccgcaggatacgactggcgagacatcgtttcgtacgtgatcgaccatttcgatattgagataatgggaggtctgggaccgtccactggaaaggtcctccggattggcctcctcggttgcaatgcaactagagaaaacgtggatcgggtgaccgaagccctccgcgccgccctgcaacactgcccaaagaagaaactg

SEQ ID NO: 155 - DNA, 1176 bp, Artificial Sequence
  derived and/or modified sequence
atggcatctcataaacttctggtgacacctccgaaggcactgctgaagccgctgagtattcctaaccagctcctgttgggtcctggccctagtaacttaccgcctcgtattatggcagcaggcgggcttcaaatgattggttcgatgtcaaaggatatgtaccagattatggacgaaataaaagaaggcatccagtatgtgtttcagaccaggaacccgctgacgcttgttatctctgggtccggccactgcgccttggaagctgcactggtgaacgtgcttgagccaggcgacagttttctggtgggcgctaacggtatctggggccagcgggctgtcgatataggagaacgcatcggggctcgggtccatccaatgaccaaggaccctggaggtcattacaccctccaggaggtcgaagaaggactcgcgcagcacaagccggtcttacttttcctgacccacggagagtcaagcactggggtgttgcaaccactggacggctttggcgagctatgccacaggtacaagtgtctgttgttggtagattcagtagccagtttagggggcaccccactgtatatggacaggcagggcatcgacatattgtacagtgggtcacagaaagctctgaacgctccacctgggactagtttgatctcattttctgataaagctaaaaagaagatgtattccaggaagacaaagcctttcagcttctatctcgacattaaatggctggcgaacttctggggatgcgacgatcagccgcgcatgtaccaccatacgatccctgttatttccctgtactccctgcgtgagagccttgcgcttattgcagaacagggtttggaaaatagctggagacagcatcgagaagccgcggcctatctgcacggccgactacaggcgttgggtttacagctgtttgttaaagatcccgccctgaggttgcctactgtaactaccgtggcggtgcccgccggatatgattggagagacatcgtgagttacgtaattgaccatttcgacattgaaatcatgggtgggttgggtcctagcaccggcaaggtgcttcggatcggtctgctggggtgtaatgcaactcgggaaaacgttgatcgggtcaccgaagctctacgcgcggctctgcagcactgcccgaaaaagaagctt

SEQ ID NO: 156 - DNA, 1176 bp, Artificial Sequence
  derived and/or modified sequence
atggcctctcataagcttctcgtgactccaccgaaggccctcctcaagcccctgagtatcccgaatcaacttcttctggggcccgggcctagcaacctaccccctcggatcatggccgccggagggcttcagatgattggctcaatgagcaaagatatgtaccaaataatggacgagattaaagaaggtatccaatacgtattccagaccagaaacccactcacattggtgatttccggatccggacattgtgccctggaggccgcactggtaaacgttttagagcctggtgacagcttcctggttggtgcaaatgggatttggggccaacgcgccgtcgatattggggagagaataggggctcgagttcatcctatgacaaaagatcccgggggccactacaccttgcaggaggtggaggaggggctggcgcaacataaacctgtgctgttattcctaacacatggggagtcatccaccggagttcttcagccactggacgggttcggcgagctctgccatagatataagtgcctgctgctggttgacagtgtggcttcattgggggggactcctttgtatatggacagacagggaattgacatactgtactccgggtcccagaaagctctcaacgcccccccagggacgtcactcatttctttttccgacaaagccaaaaaaaagatgtactcacgcaagaccaaaccgttctccttctacctcgatattaaatggcttgccaacttttgggggtgtgacgaccagcctaggatgtaccatcatacgatccctgttatttctctgtactctctgcgagaaagtctggccctgatcgcagaacagggtctcgagaatagttggcggcagcatcgagaggcagccgcttacttgcatggacgccttcaggcccttggactgcaactcttcgtgaaggatcctgccctgagactgcctactgtgacaaccgtggccgtcccggccggatacgactggcgtgacattgtgagctacgtaatcgaccatttcgacatcgaaattatgggaggcctggggccctcgaccgggaaagtgttaaggatcggacttttgggctgcaatgccaccagagaaaacgtggaccgtgtcaccgaggccctgagagcggctttacagcactgtcctaagaagaagctc

SEQ ID NO: 157 - DNA, 1176 bp, Artificial Sequence
  derived and/or modified sequence
atggcctcgcacaagctgctggtgacgccaccaaaagccctgctgaagccgctgagcatccctaaccagcttttgcttggcccaggaccgtcgaatctccctccgcgcatcatggccgcggggggactgcagatgatcgggtcaatgtcgaaggatatgtaccagatcatggacgagatcaaggagggaatccagtacgtgtttcagacccgcaaccccctcacccttgtcatcagcggatcaggtcactgcgccttggaagccgccttggtgaatgtcttggagccaggggatagctttctggtcggagcgaatggtatctggggccagcgcgcggtggatatcggtgaacgcatcggagcacgggtgcatccgatgaccaaggatccggggggacattacactctgcaagaagtggaggaaggactggcgcagcacaagccggtgcttctgtttctcacccacggtgaaagcagcactggggtgctccaacctctggatggatttggagagttgtgccatcggtacaaatgcttgctcctggttgattcggttgcgtcgctggggggaactccactgtacatggacaggcagggaatcgacattctttacagcggctcccagaaggccctcaacgcccctccgggcaccagtctgatctccttctccgacaaagcgaagaaaaagatgtactcccgcaagactaagcctttttcgttctaccttgacatcaaatggctggcaaacttttggggttgcgacgatcaaccgcgcatgtaccatcacaccatccccgtgatctcactttactccctgcgcgagtcactggcgcttatcgccgaacagggactggaaaacagttggcggcaacacagagaggcagctgcttaccttcacggacgcctgcaggccttgggactccaattgttcgtgaaggatccagccctgcggctgccgaccgtgaccaccgtcgctgtgcccgccggatacgattggagagacatcgtgtcatacgtgatagatcacttcgatatcgagattatgggaggtctgggccctagcactggaaaagtcctcagaattggactcctgggatgcaacgcaaccagggaaaatgtcgaccgcgtgaccgaagcgctcagagccgctctgcagcattgtcctaagaagaagctg

SEQ ID NO: 158 - DNA, 1176 bp, Artificial Sequence
  derived and/or modified sequence
atggcctctcataaactgttggttaccccgcctaaggctttactgaaacccctcagtatccctaatcagctcctcctggggcctggcccttccaacctgccaccgagaatcatggctgccggcggccttcagatgatcggatctatgagcaaagacatgtaccagattatggacgagattaaggaaggcattcagtatgtgttccagactcggaatccactcacccttgtgatttcgggtagcggccactgcgcgttagaagctgcactagtgaatgttctggagcctggtgatagttttctggtgggagcaaatggcatttggggacagcgcgccgtggatatcggcgagagaataggagcacgcgtccaccccatgaccaaggaccccgggggtcactataccctgcaggaggtggaagaagggctcgcacaacataagcctgtgctgctgttcttgacacatggcgaatcctcaaccggagtgcttcagcctctcgacggatttggcgaactgtgccacaggtacaaatgcttgctcctggtggatagcgtggcgtccctggggggtacaccactgtatatggatagacaaggaatcgatatactgtatagcgggagtcagaaagctctaaacgcgcccccaggaacaagtctgataagcttttcagataaggccaagaaaaaaatgtatagcagaaaaacgaaaccattctccttttacctggatatcaagtggctggcgaatttttggggatgtgacgatcagccgagaatgtatcatcataccattcctgttatatccctgtatagcctgcgggagtcactcgctctgattgctgagcaggggctggaaaattcatggcgccagcatcgagaggccgccgcctacctgcacgggcggcttcaggctctcggcctgcaactgttcgtgaaggaccccgcactccgtctgccaaccgtgacgactgttgcagtccccgccggctatgattggcgcgacatcgtttcatatgtaatcgatcacttcgatatcgagattatgggagggttagggccctccactggcaaagtgctgaggattggcctgctgggctgcaatgccacgagagagaatgtggacagagtcacagaagccttgcgagccgcgctgcaacattgcccaaaaaagaaactc

SEQ ID NO: 159 - DNA, 1176 bp, Artificial Sequence
  derived and/or modified sequence
atggctagtcacaaattgctcgttactccaccaaaggctttgcttaagccgctttctatccctaatcagttactgttaggtcccggtccgtcaaacctgccacccaggatcatggctgcaggtgggctgcagatgattggttctatgagtaaggacatgtaccagataatggacgaaattaaagaaggcatccagtatgtgtttcagactcggaaccctctgacgttagtgatctcaggcagtggtcattgcgccctcgaggccgccctcgtgaacgtgcttgaaccaggggatagcttcttggttggcgccaatgggatctggggccagcgcgctgtggacattggtgaaaggatcggagcacgtgtccaccccatgactaaagatcctgggggtcattatacgttgcaggaagtcgaagagggacttgctcagcataaacctgtgctcctattcctgactcacggagaatcttccacaggtgttctgcagcccctggatggattcggtgagctttgccaccgatacaagtgcctcctgcttgtagattcggtggcaagcctcggcgggactccactgtatatggacaggcaggggatcgacatcctttacagtggtagccagaaagcgctgaacgccccgccagggacctcgctgatctcattcagtgataaggcaaagaaaaaaatgtattctcgtaaaacaaagccctttagcttttatctggacataaagtggctggccaacttttggggatgtgatgatcaaccaagaatgtatcatcatacaatccccgtgatctctctgtactctctgagagagagcctggccttgatagccgagcagggtctggagaatagctggagacaacatcgagaggcagctgcttatctccatggacgcctccaggctctcggtcttcagttgttcgtcaaagaccccgccctgcgtttgccgacagtgactaccgtggcagtgccagccggctacgactggcgggacatcgtatcatacgtaattgatcacttcgatatagagatcatgggtggtttggggccctcgactggcaaggtgctgcggatcgggttactgggttgtaacgcaacgcgggagaacgtcgaccgcgtgacagaagccctgcgcgctgctttacagcactgtcccaagaagaaactg

SEQ ID NO: 160 - DNA, 1176 bp, Artificial Sequence
  derived and/or modified sequence
atggcctcacataagttgctggtgacgccacccaaggcgctcctcaagccgctgtcgatcccgaaccagctcctcctgggaccggggccatcgaacctgccaccgcggattatggccgctggcggactgcagatgatcggttccatgagcaaggacatgtaccagattatggacgagattaaggaaggaatccagtacgtgttccagacccggaatccgctcaccctcgtgatctccggatcaggacattgcgccctcgaggccgctctggtgaatgtgcttgaaccaggggatagttttctcgtgggagcgaatggcatctggggacaacgggcagtcgatattggtgagaggatcggcgctcgcgtccatcctatgaccaaagaccccggaggacactacacgcttcaggaggttgaagaaggactggcccagcacaagccggtgcttctgtttctgacgcatggcgagtcaagcacgggcgtgctgcaaccgttggatggcttcggcgagctctgccatcgctacaaatgcctccttctggtagactccgtggcaagcctgggaggaactccactgtacatggaccgccaggggatcgatatcctgtactcaggatcgcaaaaggccctgaatgcacctccgggaacttcgcttatctccttcagcgataaggccaaaaagaaaatgtactcaagaaagactaaacctttcagcttctatctggatatcaaatggctcgccaacttttggggttgcgatgatcaaccccggatgtaccaccataccatccccgtgatctcactgtactcactgcgcgagtccctggcgctcatcgctgagcagggcctcgaaaactcctggcggcaacacagagaagcagcagcatacttgcatggacgattgcaggcactcggactgcaacttttcgtgaaagacccagccctgagactcccaaccgttaccactgtcgccgtgccggccggctacgactggcgcgacatcgtctcgtacgtgatcgaccatttcgacatcgagattatgggtgggcttggaccatccactggtaaggtcttgcgaattggccttcttgggtgtaacgccactcgtgagaacgtggaccgagtgaccgaggctctgagagcggcgctccagcattgcccaaagaagaagctc

SEQ ID NO: 161 - DNA, 1176 bp, Artificial Sequence
  derived and/or modified sequence
atggcgtcacacaagcttctggttaccccccccaaggcacttttgaagcctctgtcaataccgaatcagcttttgcttggacccggaccttctaacttgccccccagaatcatggccgctggtggtttgcagatgatcggctctatgtcaaaggacatgtaccagatcatggatgaaatcaaggaaggaattcaatacgtatttcagactaggaatccgttgacgctcgtgattagtggctcaggccattgtgctttggaggcggctttggtgaacgttctcgagcccggcgactcttttcttgtaggtgctaacggcatctggggccaaagggctgtggatatcggtgagaggataggagcccgcgtacatccaatgactaaagatcccggaggtcactataccttgcaggaggtggaagagggtcttgctcaacacaaacctgtccttctgttcctgactcatggagagagtagtacaggcgtactgcaacctttggatggcttcggtgaactgtgccaccgctacaagtgcctcctcctcgtagacagcgttgcatcactgggtggcacaccgctgtacatggacaggcagggaattgatattctctactcaggctcacaaaaagctttgaatgcccctccaggcacctctcttatatccttctctgacaaagcaaaaaagaaaatgtacagtaggaagaccaagccgttctctttctacctggacattaagtggcttgctaatttttggggctgtgacgaccagccaagaatgtaccatcacaccatccccgttatatctctttatagtctccgcgaaagcctggctctcatcgcggagcagggcctggaaaattcctggagacaacaccgcgaagccgcagcttatctgcacggcagattgcaggcgttgggtcttcagttgttcgtaaaagaccctgctctgagactgcctaccgtcaccaccgtcgcagtgccggccggttatgattggagggatattgtctcatacgtgatcgaccacttcgacatcgaaatcatgggtggtctcggtccaagtacgggcaaagtactgagaatcggtctccttggctgtaatgccacgagagagaatgtcgacagagtaactgaagctcttagggccgctctgcaacactgtccaaagaaaaagctc

SEQ ID NO: 162 - DNA, 1176 bp, Artificial Sequence
  derived and/or modified sequence
atggcctcacacaagctgctagtcacaccacctaaagcgttgcttaaacctctgtctatcccaaaccagctccttttggggcctggaccctcaaacctccctcccagaattatggccgcaggtggactgcagatgatcggtagcatgtcgaaagacatgtatcagatcatggacgaaatcaaagaaggaatccagtacgtttttcagactagaaatcctcttaccctcgtgatctccggatcaggccattgcgccctagaagccgccctggtgaatgtgttagaacctggtgattcgtttctggtcggggcaaacggaatctggggccagagagcagttgatatcggagagagaataggagcccgcgtgcaccccatgactaaagaccccggcgggcactacacactgcaggaggttgaagaaggattggcacagcacaagccagtcctcctttttctgacacacggtgaaagttcaacgggagtcctgcagccactcgatggcttcggcgagctgtgccatcgctataagtgcctgctgctggtggattccgtggcctcgctaggaggcaccccgctgtacatggatcggcaaggcattgacatcttatactctggaagtcagaaggctctcaatgcaccccctggaacatctctgatctcttttagcgacaaagccaagaagaagatgtacagtagaaaaacgaaacccttttctttctatctggacataaaatggttagcgaatttctggggttgtgacgatcagcctagaatgtaccatcacacgatccccgtcataagtctttattctttgcgagagtcactcgcattgatagccgagcagggtcttgaaaactcctggagacagcaccgagaggccgccgcatacttgcacggaagactccaagccctgggtctgcagctgttcgtgaaagatcctgccctgaggttaccaaccgtgactacagtggctgtgcccgctggttacgattggagggatattgtcagttatgttatcgaccacttcgatatcgagattatggggggattgggtccctctactggtaaggtcctccgaatagggctcctgggttgcaacgcaacacgcgaaaacgtagatcgcgttaccgaggccctgcgtgcagctctgcagcattgccccaagaagaagttg

SEQ ID NO: 163 - DNA, 1176 bp, Artificial Sequence
  derived and/or modified sequence
atggcatcgcataaactgcttgtcaccccacccaaagcacttctgaagcccctgtccattcccaatcagctcttgctcggacctggaccaagcaacctcccacccaggattatggcagcaggtggtctgcagatgattggcagcatgagcaaggacatgtaccagatcatggacgaaatcaaggaaggtatccaatacgtgtttcaaacccgcaacccacttacgcttgtcataagcggatccggtcactgtgcgctggaagcagctcttgttaacgtccttgaaccaggtgattcgtttcttgtgggcgcaaacggaatttgggggcagagagcggtggatatcggagagcgcattggcgctcgtgtccatcccatgaccaaggatcctggtggacattacaccttgcaggaagtcgaagaaggactcgcacaacataagcctgtgctgctttttctgactcatggtgaatcctcgactggcgtgctgcaacccctggacggatttggagaactttgtcatcgatacaagtgcctccttttggtcgattccgtggcatcacttggcggtaccccgctgtatatggacaggcagggtattgatatcctttactccggaagtcaaaaggctctcaatgcaccccccgggacctcattgatctcattttcagacaaggcaaagaagaagatgtactcccggaaaacgaagccgtttagcttctacctcgacattaagtggctggcaaatttctggggttgcgatgaccagcctcggatgtaccaccataccatccctgtgatatcactgtacagccttagagaatccttggcgctcatagctgagcaaggactcgaaaattcttggcgccagcatagagaggccgcggcgtacctgcatgggcggctgcaggcacttggacttcagctttttgtcaaggatcctgcattgcgacttcccactgtcaccactgtcgctgtgccagcaggatatgactggcgcgatattgtcagctacgtgattgatcactttgatatcgagattatgggtgggctgggcccatccaccgggaaggtgctgagaattggacttctcggttgcaatgcaacccgagagaatgtcgatcgggtcactgaagctctgagagccgcactccaacattgtcccaagaaaaaactt

SEQ ID NO: 164 - DNA, 1176 bp, Artificial Sequence
  derived and/or modified sequence
atggccagccacaagctcctcgtgactccgcctaaagcactcctgaagccgctcagcatcccgaaccagctgctgctggggccgggaccttccaaccttccgccgagaatcatggcagcaggaggattgcagatgatcggctcaatgagcaaagacatgtaccagattatggatgaaatcaaggaggggattcagtacgtgttccaaaccagaaaccctctgactctggtgatttcaggctcaggccattgcgccctggaggccgcacttgtgaacgtcctcgaacctggggactcattcctcgtgggcgccaacggaatctggggtcaacgggctgtcgatattggagaaaggatcggagcgagggtgcaccccatgaccaaggatccaggaggacattataccctgcaagaggtggaagaagggctggcgcagcacaaaccggtcctgctctttcttacccacggtgaaagctccaccggggtgctgcagccgctggacggattcggggaactgtgtcacaggtacaagtgcctgctgctggtcgattcggtggctagcctcggaggaaccccgttgtacatggaccgccagggtatcgacatcctgtactcaggaagccagaaagcactgaatgccccgccgggaacttcacttatctcattctcggataaagcaaagaagaagatgtactctaggaaaactaagccattcagcttctacctggacatcaagtggctggcaaatttctggggctgcgacgaccagccgcgcatgtatcaccataccattcctgttatctcgctgtactccctgcgggagtcattggccctcattgcggaacagggcctcgaaaactcctggagacaacatagagaggcggcggcatacttgcacggccgcctccaggcacttggactccagctgttcgtgaaggatcctgccctgcgcctcccgaccgtgactacggtggcagtgccggccggatatgactggcgcgacatcgtctcctatgtcatcgaccactttgacatcgagatcatgggaggcctgggaccgagcacggggaaggtgctgcgcattggattgctgggatgcaacgcaactcgggaaaacgtcgatcgcgtgactgaagcgctgcgcgctgctctccaacattgtccaaagaaaaagctg

SEQ ID NO: 165 - DNA, 1176 bp, Artificial Sequence
  derived and/or modified sequence
atggcatcccataaactactcgttacacctcctaaagctcttcttaaaccactctccatccccaatcagctgctattggggccaggaccaagtaatctccctccccggataatggcagccggggggcttcagatgatagggtccatgtccaaagatatgtaccagatcatggatgaaataaaggaagggatacagtatgtgtttcagacacgaaatccacttacactggtcattagtgggtcaggacactgtgctctggaagccgccctggtgaatgttctggaaccgggggatagtttcctggtgggagccaacgggatctgggggcagcgagctgttgatatcggggaaagaatcggagctagagtgcatcccatgactaaagacccaggagggcactacacattacaggaagtggaagaaggactcgctcagcataagccagtgctgctgtttctgactcacggggagtcttccacaggggttctacagccacttgatggatttggagagctatgtcatcgatataaatgtctgctgcttgtagattccgtggcttcccttggaggaacaccgttatatatggataggcagggaatcgatattttgtattcaggatcccagaaggccctcaatgcccccccagggacttctctcatctctttttctgataaggctaaaaaaaaaatgtatagtcgcaaaactaaacccttttctttttatttagatatcaaatggcttgcgaatttctgggggtgtgacgatcagcctcgcatgtatcatcatacaatccccgttatttctttatattcactgcgggaatccctagcccttatcgcagagcagggactcgaaaactcgtggcggcagcacagggaagccgcagcatatctccacgggcggctccaagccctcgggctgcagctgtttgtaaaagatcctgccctccgacttccaacagtgactacagtggccgtaccagctggatatgactggagggacatagtatcctacgtcattgaccacttcgatatcgaaatcatgggagggctggggccttcaacagggaaagtgcttaggattgggcttctggggtgtaacgccacaagggagaacgtggatagggtcacagaggcccttcgagccgctctgcagcactgccctaaaaagaaattg

SEQ ID NO: 166 - DNA, 1176 bp, Artificial Sequence
  derived and/or modified sequence
atggcgtctcataaacttctagtgacgccgccaaaggcattgctgaagccgctttcaatccccaaccaactgctactcggcccaggtccctctaacctgcccccgcgcattatggctgccgggggactgcagatgattggctctatgtccaaagatatgtatcagatcatggatgagatcaaggaaggcatccagtacgtgttccagactcgaaatccgcttacgttggtcatttctggtagtggtcactgtgcattagaggctgccttggtcaatgtgctcgaacccggggacagttttctggtgggagccaatggaatctgggggcagcgggccgtagacattggcgagcggatcggggcccgcgttcacccaatgacgaaggatcccggtggccactacactctacaggaagtggaagaaggcctcgcccagcataagccagtgctgttattcctaacacatggtgaaagctccactggggtcctgcagcccctagacggattcggcgagctatgtcaccgctataagtgcttgctactagtggattccgtagcaagcctgggaggcacaccgctgtacatggaccggcaggggattgatatcctgtattctgggagtcagaaagcattgaatgcacctccgggcacaagcttgatctccttttctgacaaagccaagaagaagatgtactcccggaagaccaaaccgttctccttttacctggatatcaagtggttagctaacttttggggatgtgacgaccagcctaggatgtaccatcacactattccggtgattagcctttactccttgcgggagtcattggctcttatcgctgagcagggcttggagaactcttggcggcagcatcgcgaggccgcagcttacctgcacggcaggcttcaggctttagggctgcagctgttcgtgaaagacccagccctccggctgccaactgtgactacagtggcggtcccagccggctacgattggcgcgatattgttagctacgtcatcgaccacttcgacatagagataatggggggacttgggccttcgacaggcaaggtgctgcgcattggcctgttaggatgcaacgctacccgggagaatgtcgaccgggtcacagaggccctgcgcgctgccctgcaacactgtcctaagaaaaaactg

SEQ ID NO: 167 - DNA, 1176 bp, Artificial Sequence
  derived and/or modified sequence
atggcctcccacaagttactagtcaccccaccaaaggcactactcaagcctctgagtatccctaaccagctcctgctgggccccggtccctctaacctgccaccccgaatcatggcagccggcggcctgcagatgattgggagtatgagcaaggatatgtatcaaatcatggatgagattaaagagggcattcagtacgttttccagacccgaaatccactgaccctcgtcatcagcggctctggccactgcgccctggaagccgctctggtgaacgtgctggagcctggagacagttttctggttggtgctaacgggatttggggacaaagagccgttgacatcggagaaaggattggcgctcgagtccatccaatgactaaagatccaggtggccactatactttgcaagaggtggaagagggcctggcccaacacaagccagtgctgttattcttaacccacggcgaatctagtacaggtgttttgcagcctctggacggattcggcgagttatgccacaggtacaagtgcctgctcctcgtcgatagcgtggcctccctgggtggcacccccctatatatggacaggcagggaatagacatcctgtactccggctcacagaaggccttaaacgcccctcctggtaccagtctaataagctttagtgataaagccaaaaagaagatgtacagtcgcaagaccaagccattctccttttacctggacatcaaatggttagccaacttctgggggtgcgacgatcaacctaggatgtaccatcacacaataccagtgatttcactctatagtctgagggagtccctggctctgatcgctgaacagggtctggagaactcttggcgccaacatcgggaggctgctgcatacttacatgggcgcctgcaggctctgggcctgcaactgtttgtcaaagaccctgctctgcgtctccctactgttaccacagtcgccgtccctgctggatacgactggcgagatatcgtgagttacgtgatagatcattttgatatagaaatcatgggggggctgggccctagtactggcaaagtgctgagaatcggcttgctgggctgtaacgccacaagagagaatgtggaccgggtcacagaggctctgagagcagccctccagcattgcccaaagaaaaagctg

SEQ ID NO: 168 - DNA, 1176 bp, Artificial Sequence
  derived and/or modified sequence
atggcgagccataagctcttggtgactccaccgaaggccctgctgaagcctctaagcataccaaatcagcttctcctcggcccaggacccagtaacctgcctccccggattatggccgcggggggcctgcagatgatcggctcgatgtcgaaagatatgtaccagattatggatgaaatcaaggaaggaattcagtatgtgttccagacgcgtaatcccctaacccttgtaataagtgggtcaggtcactgtgctctggaggctgctctggtgaacgtgctcgagcctggggactccttcctcgtaggagctaatggcatttggggtcagcgagccgtagacattggcgagaggattggcgctcgtgtgcatcccatgacgaaagaccccggaggccattacaccttgcaggaggtagaggaggggctggcacaacacaagccagtgttgcttttccttacccatggagagtcatcaactggagtgctgcagcccctcgacgggtttggtgagctgtgtcatcggtacaaatgcctgctgcttgtggacagtgtggcctccttgggaggtaccccactttacatggacagacagggcatcgatatcctttactccggctctcagaaggccttgaacgctcctcccgggactagcctgatttcattttccgataaagccaaaaaaaagatgtattcccggaaaaccaaaccattttccttctacctagatatcaagtggttggccaacttctggggctgtgacgaccagccacgaatgtaccaccacactatccccgtcatttctctctactcactgcgggaatcactagcactgatcgctgaacaagggctcgaaaactcttggagacaacaccgcgaagccgcagcatatttacatggcagattgcaagccctcggacttcaactttttgtgaaagatccggccctgcgcctccccacagtgaccaccgtcgctgtgcctgcagggtatgactggcgggacatcgtgtcctatgtgatcgaccacttcgatatcgagatcatgggaggtctgggtccaagcactggcaaggtgcttcggatcggcctgcttggttgtaacgccaccagagagaatgtggaccgcgtgactgaggcacttcgggccgcactccagcactgtccaaaaaagaaactc

SEQ ID NO: 169 - DNA, 1176 bp, Artificial Sequence
  derived and/or modified sequence
atggcatcgcataaacttctggtcaccccaccgaaggccctgctgaaacccctttcgatccccaaccagctgctgctgggaccgggcccatcgaacctgccgccgcggattatggccgcgggaggactccagatgatcggatccatgagcaaggacatgtaccagattatggatgaaatcaaggagggaatacaatacgtctttcagactcgcaatcccttgacccttgtgatctccggttctggacactgcgctctggaggctgcccttgtcaatgtgctggagcctggcgattctttcctggttggagccaatggaatttgggggcaacgggcggtggatatcggcgaaaggatcggcgcaagagtgcatcccatgactaaggacccgggaggccactacaccctgcaagaggtggaagagggcttggctcaacataaaccagtcctccttttcttgactcacggagaatccagcacgggcgtcctgcagcctctcgacggtttcggagaattgtgtcaccgctacaagtgcctcctgctggtggatagcgtggcgtcacttggagggacccccttgtacatggaccggcagggaatcgatattctgtactccgggtcacagaaagccctgaacgccccaccgggcacctcattgatctcattctccgacaaggccaagaagaaaatgtattcaaggaaaaccaaacctttctcgttctacctggacatcaagtggcttgctaacttttggggatgtgacgatcagcctcggatgtatcaccacacgatcccagtgatctctctctactccctcagagagtcgctcgctctgatcgcggaacagggattggaaaactcgtggcgccagcacagggaagccgccgcatacctccatggccgcctccaagccctgggacttcaattgtttgtgaaagacccagcactccgactcccgaccgtgactactgtggctgtgccggcggggtacgattggcgcgacatcgtttcctacgttatcgatcacttcgatatagagatcatgggaggcctggggccgtcgacgggcaaggtcctgaggataggactgctgggctgcaacgccactcgggaaaatgtggacagagtgaccgaggccctcagggcagcgctccaacattgcccgaagaagaagctg

SEQ ID NO: 170 - DNA, 1176 bp, Artificial Sequence
  derived and/or modified sequence
atggctagccataagttgctcgtgacgcccccaaaagccctattgaaaccactgtccattccaaatcagttgctgcttggccccggaccctcaaacttgcccccacgtataatggccgctggcggtctgcagatgataggctctatgagcaaagatatgtaccagataatggatgaaattaaagagggcattcagtacgtcttccagacccggaacccacttaccctggtcatttctggcagcggccattgcgcactggaagcagccttagtcaatgtgctggagccgggcgatagctttctggtgggtgcaaacgggatctgggggcagagggcggtggacataggcgaaaggatcggtgctagagtgcaccctatgacgaaggacccaggcggacattatacactgcaggaggtcgaggagggactggcacagcacaaaccggtgctgctgttcctgacccatggtgagtcttccacaggagtgctgcagccactggatggcttcggcgaattgtgtcaccggtataaatgcctgcttctggtggattctgttgcaagtcttgggggcaccccattgtacatggatagacaaggaatagacattttgtattcagggagccaaaaggcattaaacgctcctcctggcacgtcactcataagtttctcagacaaggcaaaaaaaaaaatgtacagcaggaagaccaaaccgttttctttctacctagacatcaaatggctcgccaacttttggggatgtgatgatcaaccccggatgtaccaccataccatcccagtgatctctctgtactccctaagggaatccctcgcgttgatcgctgagcaaggccttgagaactcatggaggcagcatcgggaggcagccgcctacttacacggtcgcctgcaagctttggggctgcagctcttcgtaaaagatccagctctccgattgccaaccgtgactacagtagctgtccccgccggctacgactggcgggacattgtgtcttacgttatagaccacttcgatatcgaaatcatgggcgggctgggccctagtacaggcaaggtcctccgaatagggctgcttggatgcaatgctactagggagaacgtggaccgagtgacagaggccttgcgtgccgcattacagcactgtcctaaaaaaaaactg

SEQ ID NO: 171 - DNA, 1176 bp, Artificial Sequence
  derived and/or modified sequence
atggcatctcataagctgttagttaccccccctaaggcattgctgaagcctttaagtattcccaatcagcttttactaggccctggcccttcaaatctccccccacggatcatggcggctggtggacttcagatgattgggagtatgagtaaagatatgtaccaaatcatggatgagattaaggagggaatccagtatgtttttcagacccggaatcctctaactttggtcatcagcggttccggccattgcgctcttgaggccgcactggtgaatgtcctggagccaggcgactcgttccttgtaggcgcgaacggtatctggggacagagagctgtggatattggagagagaattggcgctcgggtgcaccccatgaccaaggaccccggcgggcactatactctgcaggaggtggaagagggactggctcaacataagcccgtgctattatttctcactcacggtgagtccagcaccggtgtactccagccactggacggtttcggcgaactgtgccatagatacaagtgtctgctgctggtcgactccgtagcatcactcgggggcactcccctttatatggatcgccaggggatagacatcctctactcggggagccaaaaggcgctaaacgcaccaccggggacatctctcatatccttcagcgacaaggccaagaaaaagatgtacagtcgtaagacaaagcctttcagcttttacctggacattaaatggttggccaacttctgggggtgtgatgaccagccacgcatgtatcaccacaccatcccagtcatcagtttgtacagcctgcgagagtctctggcattaatagcggagcagggcctggagaattcctggcgtcagcacagggaagcggcagcctacctgcatgggcgtctccaggccctgggattgcagctatttgtgaaagatcctgccctccggttacctaccgtcacaaccgttgctgtccccgctggctacgactggcgtgatatcgtctcttatgtgatagatcatttcgatattgagattatgggcggattgggtccatcaacgggaaaggtgctccgcatcgggctgctggggtgtaatgccactcgggagaacgtcgaccgggtgacggaagccctgcgggcagcactgcagcactgccccaagaagaagctc

SEQ ID NO: 172 - DNA, 1176 bp, Artificial Sequence
  derived and/or modified sequence
atggcaagccataagttgcttgtcaccccgccaaaggcactgctcaaaccactttcgatccctaatcaacttctgctgggccctggtccgtcgaacctgccgcccagaattatggcggcaggtggactccagatgattggatcgatgtccaaggatatgtaccaaatcatggatgagataaaagagggaattcagtacgtgtttcagacccgaaaccccctgacccttgttattagcggcagcggccattgcgcccttgaagcggcgctggtcaacgttctggaaccaggggattcctttctggtgggagccaacgggatttggggacagcgagcagtcgacatcggggaaaggattggagcacgggttcaccccatgactaaagatcctggtggacattacaccctgcaggaagtggaagagggtcttgcacaacataagcctgtgctgttgtttttgacgcatggtgaatcgagcaccggggtgcttcagccgcttgatggatttggtgaactgtgtcacaggtacaaatgccttttgctcgtggactcagtcgcaagcctcggtgggacgccactgtacatggataggcagggcattgatatactttactccggtagccagaaggcacttaatgcacctccgggtacctcactgattagcttttcagataaggccaagaaaaagatgtactcccgcaaaaccaagcctttttcgttttacctcgacattaagtggctcgccaatttctggggctgcgatgatcaacctcggatgtatcatcacaccatcccagtgattagcctgtactcattgcgggagtccttggcactcatcgcagagcaagggctggaaaactcatggagacaacaccgggaagcggcagcctacctgcatgggcggcttcaagcactcgggcttcaactctttgtgaaagaccctgcacttcgcctccctactgtgaccactgtggccgtgccggcaggttatgactggagagatatcgtgagctacgtgatcgaccattttgatatagagataatgggcgggctgggaccctccaccggaaaggtgctgcgaattggactgcttggatgtaacgcaactcgggaaaacgtcgaccgggtgacggaggccctgagagcagcgctgcaacactgcccaaagaagaagctg

SEQ ID NO: 173 - DNA, 1176 bp, Artificial Sequence
  derived and/or modified sequence
atggcttctcacaagttgcttgtgactccaccgaaggctcttctgaaaccgctctctatccctaatcaactgctcctgggaccgggaccgtcgaacctgcccccgcgcatcatggctgctgggggcctccagatgatcggatctatgtcgaaggacatgtaccagattatggacgaaatcaaagaaggaattcagtacgtctttcaaacccgcaatcctctcaccctggtcatctcaggcagcggccactgcgcgttggaagcggcgttggtcaacgtgctcgagccaggtgactccttcctcgtgggcgcaaacggcatctggggacagagggcagtcgatatcggcgagcggatcggcgcgcgggtgcatcccatgaccaaggatccgggcggacattacaccctgcaggaagtggaggagggactcgcacaacacaagcctgtgcttctgttcctgacccatggagagtcctccactggtgtgctgcagccgctcgacggatttggagagctctgccaccgctataagtgcctgctccttgtggattccgtcgcctccctcggaggaactcccctctacatggatagacaaggcatcgacatcctgtactcaggtagccagaaggccctgaatgccccaccaggcacttcgcttatctccttctccgataaagccaagaagaaaatgtactccagaaagactaagccattttcgttctatctcgacattaagtggctggcaaacttctggggttgcgacgatcagccgagaatgtaccaccatacgatcccggttatttctttgtactcgctccgggaatcactcgcacttatcgcagaacagggtctggagaacagctggcggcagcaccgcgaagccgcggcctatcttcatggtaggctgcaggcgctgggactgcaactgtttgtgaaggacccggccttgcggctgcctaccgtcactacggtggccgtcccagcgggttacgactggcgagacatcgtaagttacgtgatagaccattttgatatagaaatcatgggaggcctcggacctagcactgggaaggtgctgaggatcggcctgctgggatgtaacgccacccgcgaaaacgtggaccgggtcaccgaggctctgagagcggccctgcaacattgcccgaaaaagaagctg

SEQ ID NO: 174 - DNA, 1176 bp, Artificial Sequence
  derived and/or modified sequence
atggcctctcacaagctgttggtcacccctccgaaggcgctcctgaaaccgctgtccatcccgaatcaactcctcctggggcctggaccatccaacctcccacccagaatcatggccgctggaggcctgcagatgatcggatcgatgtctaaagacatgtaccagataatggatgaaatcaaagagggtattcagtacgtgttccagaccaggaacccgctcaccctggtgatctcagggtcagggcactgtgccctggaagccgccctcgtgaacgtcctggaaccaggtgattcgttcctcgtaggagctaatggaatctggggccagagagccgtggacattggcgaacggatcggcgctagggtgcatccgatgaccaaggacccgggaggccactacactctgcaggaggtggaagaaggactcgctcaacataagccggtgctgctcttcctgacccatggagagtcgtccactggtgttctccaaccgctggatggattcggagagctctgccaccgctacaagtgccttttgctggtggactccgtcgcctcgctgggcggcactccattgtacatggatagacagggaatagatatcctctatagcggatcacagaaggcactgaatgcccctccaggaaccagcctgatttcgttctcagataaggccaaaaagaagatgtactccaggaaaaccaagccattcagcttctatctggacatcaagtggctcgccaacttttggggatgcgacgaccaacctcgaatgtaccatcacaccatcccggtcatctcactgtacagcctgcgcgaatcgctggccttgatcgcggaacaggggctggagaactcgtggcgccagcaccgcgaagccgctgcttaccttcatggccggctgcaggcgttggggctgcaactgttcgttaaggacccagccttgcggctcccgaccgttactactgtggccgtcccggctggatacgactggcgcgatatcgtttcatacgtgattgaccacttcgacatcgagattatgggaggattgggcccttcgacgggcaaagtgcttcgcatcggcttgctgggttgtaacgctacccgcgagaacgtggatcgcgtgacggaggctctgcgggcagccttgcaacattgcccaaagaaaaagctc

SEQ ID NO: 175 - DNA, 1176 bp, Artificial Sequence
  derived and/or modified sequence
atggcgtcgcacaaactcctcgtgactccgcccaaagcgctcctgaagccactgtcgatcccaaatcagctccttcttggaccgggaccgtcaaacctcccacctaggattatggccgccggaggactgcaaatgatcggctccatgtcaaaagatatgtatcaaatcatggacgaaatcaaggagggaatccagtacgtgtttcagacgaggaacccactcacgctcgtcatttcaggaagcggccattgcgctctggaagcagcattggtgaacgtgcttgagccgggagattctttcctggtgggggcaaacgggatctggggacagagggctgtagatatcggtgagcgcattggagcgcgtgtgcaccctatgaccaaggatcccggaggacactacaccctgcaggaggtggaggaaggactggcccagcataagccggtgctgctgtttctgacccacggtgagtcgtcgaccggggtgctgcagccgctcgatggattcggagagctctgtcatcgctacaaatgtctgcttctggtggactccgtggcatccctgggaggtactcctctgtacatggacagacaaggaatcgatatcctgtactccgggtcacagaaggccctcaacgctccgccaggcactagccttatctcgttctccgacaaggcaaaaaagaagatgtactcgagaaagaccaagccattctcattctacctcgacattaagtggctcgctaacttctgggggtgcgacgaccagccaagaatgtaccatcacactatcccggtcatttccctgtactcccttcgggaaagcctggcacttatcgctgaacagggccttgagaacagctggcgacaacatagagaagccgcggcatacctgcatggaaggctccaggcactgggactccaactcttcgtcaaagatcctgctctgcgcctcccgaccgtcacgaccgtggcggttcctgcaggttacgactggcgcgacatcgtgtcatatgtgatagaccactttgatatcgaaatcatgggaggcctgggaccttcgaccggaaaggtcctgcgtatcggactgctgggatgcaatgccactagagagaatgtggacagagtcaccgaagcactgcgcgcggccctgcaacactgcccaaagaaaaaactc

SEQ ID NO: 176 - DNA, 1176 bp, Artificial Sequence
  derived and/or modified sequence
atggcttctcacaagctcctggtaacgcctccaaaggcactgctgaagcctctgtcaattcccaatcagctgctgttaggccccgggcctagtaatctgccacccaggatcatggcagcagggggtttgcagatgatagggtcaatgagtaaagacatgtatcagatcatggatgagattaaagagggcatacaatatgtgttccagacgcgtaatccgctgacgctcgttatcagtgggagtggacactgcgcactagaggccgcccttgtgaatgttcttgagcctggagattcattcctggtgggggccaacggcatctggggccagcgggctgttgatattggcgagcggatcggggctcgagtgcacccaatgaccaaggatcctggaggccattataccctacaggaagtcgaggaaggtcttgcacagcacaaacctgtgctgctcttcctgactcatggggaaagctctacgggggtgctccagcctcttgacgggttcggggaactgtgccatcgctataagtgtctgttactggtagattcagtggcctctttaggaggtacgccactctacatggatcggcagggaatagacatactctactctggcagtcaaaaggctctgaatgcccctccagggacgagtctcatcagcttcagcgataaggcaaaaaagaaaatgtacagcaggaagaccaaaccattcagtttctatctggatatcaaatggctcgctaacttttggggatgtgatgaccagccgaggatgtaccatcatactatacccgtgattagcctctatagcctgcgcgaatctttggctctcatcgccgaacagggcctggaaaatagctggcgccagcaccgcgaggcggcggcctatctgcatggaaggctccaggcattaggcctgcagttgtttgttaaagacccagcactgagactccctaccgttaccactgtggcagtgcccgcgggctatgactggagagatatcgtcagttatgtgatcgaccattttgatatcgagatcatgggcggtcttgggccatccacagggaaagtcctgcggatcggtcttttagggtgtaacgctacgcgcgaaaatgtggacagggtcacagaggccttaagggccgctcttcagcattgcccaaaaaaaaagctg

SEQ ID NO: 177 - DNA, 1176 bp, Artificial Sequence
  derived and/or modified sequence
atggcatcgcataagctccttgtcactcctcctaaggccctgctgaaacccctctctattcccaaccagcttctgctcggacccggacctagcaacctgccacctagaattatggccgcgggaggtttgcaaatgatcggatctatgtcgaaagacatgtaccaaatcatggatgaaatcaaggaaggaattcagtatgtgttccagactagaaatcctctcactcttgtgattagcggctccgggcactgtgcactggaggcagcgttggtgaacgtcctcgaaccgggagattcgtttctcgtcggtgcgaacgggatttggggtcaaagggcagtggacatcggagaacggattggtgcccgggtgcatcctatgaccaaagatccaggagggcactacaccttgcaagaggtcgaagaaggtctggcccaacacaagccggtgttgcttttccttactcacggagaaagctcaaccggggtcctccaaccactcgatggatttggtgaactgtgccacagatacaagtgtttgcttcttgtggattccgtggcctcgctcggcggaacccccctctacatggatcggcagggaatcgacatcctgtattcgggctcccagaaagcactcaacgcaccgcctggtaccagcttgatctcgttctcggacaaagccaaaaagaaaatgtactccagaaagaccaagccattttcgttttacctcgatatcaagtggctcgcaaacttttgggggtgtgatgatcagccacggatgtaccatcacaccattccagtgatctcgctgtactcgcttcgcgagtccctggcactgatcgcggagcagggacttgagaatagctggagacaacatagagaagctgcagcataccttcacggacgtctgcaggcactgggcctccagctgtttgtgaaggatcctgcacttagactcccgaccgtgacgactgtcgctgtgcccgcaggatacgactggcgcgatattgtgtcgtacgtgattgaccactttgatatagaaatcatgggaggactggggccgtcgaccggcaaggtgctgaggatcggtctgctgggctgtaacgccactagagaaaatgtggatcgggtcacggaggcgcttcgagcggcacttcagcactgtcctaagaagaagctc

SEQ ID NO: 178 - DNA, 1176 bp, Artificial Sequence
  derived and/or modified sequence
atggcttcccacaagctgcttgtcacacctcccaaggcattgctgaagcccctttccatacctaaccagctgctgcttggccctgggccttccaatctgccccctaggataatggccgctgggggcctccagatgatcgggtccatgtccaaggacatgtaccagattatggatgagatcaaggagggcatacagtacgtctttcaaaccagaaatccactcaccttggttattagtggcagcggccactgcgctttggaggcagccctggttaatgtgctggaaccaggcgatagcttcttggtgggagccaacggaatatggggtcagcgcgccgtggacataggcgagaggattggagcaagggtgcacccaatgacaaaagaccctggggggcattacactttgcaggaggtcgaagaagggttggcccagcacaaaccagtgttgctgtttctgacacacggcgagagttcaaccggggttctgcagccacttgacggattcggcgagctgtgtcatcgctataagtgtctgctgctggtcgactccgtggcctctctcggaggtacccccctttacatggaccgccaaggaattgacatcctgtactctggatcacagaaggccctgaacgcccccccaggtacttcactcatatccttctccgataaggcaaagaagaaaatgtacagccggaaaaccaagccattctctttctacctggacataaaatggctggccaatttttgggggtgcgacgaccagccacggatgtatcatcacacaatacctgtgatctccctttacagcctgcgcgaatctctggcgctcattgccgagcaaggtttggagaacagttggagacagcatcgggaggccgctgcctatctgcacggaaggctgcaggccctcggactgcaactctttgtaaaagaccccgcactgaggctgcccaccgtgactaccgttgcagtaccggccggatatgactggagagacatagtatcatacgtgattgaccattttgacattgaaattatgggtggcctcggcccctcaacaggcaaagtactgaggatcggcttgctgggctgtaacgctacccgcgaaaatgttgatcgagtaacagaggcccttcgcgcagctctgcagcattgcccgaagaagaagctc

SEQ ID NO: 179 - DNA, 1176 bp, Artificial Sequence
  derived and/or modified sequence
atggcttcacataaactcttagtgacacctccaaaagccctgcttaaacccctgagtataccaaatcagcttctgttggggccagggccatctaacttaccacccagaataatggccgctggggggctccagatgatcggatccatgtcaaaagatatgtaccagatcatggacgaaatcaaagaagggattcagtatgtgtttcagacaaggaacccactgacacttgtaatatctggatccggacactgtgctcttgaagccgctctagtcaacgttctggaaccaggagattcgttcctggttggagcgaacggaatatggggacagcgagctgtcgatatcggggagcggatcggggctcgggttcatcctatgactaaggatcccggaggacattatactcttcaggaagtagaagaagggctcgcacagcacaaacctgtcctccttttcctgacacacggagaatcttctactggagtgctccagcctttagatgggtttggagagctttgtcatcggtataaatgtcttctgctggtggacagtgttgccagtcttggggggacacctctctatatggatcgacaggggattgatatattatattcagggtctcaaaaagcgcttaatgctccacctgggacatctctcatctctttctccgataaagctaaaaaaaaaatgtactccagaaaaacaaaaccattcagtttttatctagacatcaaatggctcgccaatttctggggatgtgatgatcagcctcggatgtatcaccacactataccagtgatatcactatattcactgcgggaatctctggctttaatagctgagcaggggttagaaaactcctggagacagcaccgggaggccgccgcatatctccatggaaggttgcaggctctggggctgcagttatttgtgaaagatcccgccctcaggctccctactgtcacaacggtggccgtaccagccgggtacgattggagggatatcgtgtcctatgtgattgatcattttgatattgaaattatgggggggcttgggccatccactgggaaagtgctaaggataggactgctcgggtgcaacgccactcgcgaaaatgtggaccgggtgacagaagccctgcgggctgcactacagcactgccccaagaaaaagctt

SEQ ID NO: 180 - DNA, 1176 bp, Artificial Sequence
  derived and/or modified sequence
atggctagtcataagcttctggtcacccccccaaaagcactgttgaagcctctttcgattccgaaccaactcctcctgggtccagggccgtcgaatctcccccctcgtataatggcagcggggggactccaaatgatcggctcgatgtcaaaagacatgtatcagatcatggacgagatcaaggaggggatccagtatgtcttccagacccggaatccccttacactcgtaatctcgggttcgggtcattgcgcactcgaggccgccctggtcaacgttcttgagccaggagacagctttctggttggagctaacggtatatggggacaaagagctgttgatatcggtgaacgaataggggcaagagtacaccctatgacgaaggaccctggtggccactacacgttgcaggaggttgaggaaggactcgcgcaacataagccggtcctcctgtttctgacacatggtgagtcttctactggggtcctgcaaccattggatggctttggggaactctgccacaggtacaagtgtctcctgttagtagattccgttgcatcgctgggtggtacccccctctacatggatcgacagggcatagatatactttacagcggtagtcagaaagccctaaacgccccacctggcacgtcacttatatcattttcggataaggctaaaaagaagatgtactcaaggaagacgaagcccttcagtttttacctcgatatcaagtggcttgctaatttctggggctgtgatgatcagcctcgaatgtatcatcataccattccggtcatctccctctacagtctgcgcgaatctctggcccttattgctgagcaggggctcgagaattcgtggcgccagcaccgcgaagcggccgcgtacctccacggccgcctccaggctcttggattacagcttttcgtgaaggatccggcactgagattgccgacagttaccacagtcgcagtacctgctgggtacgactggagagacatcgttagttacgttattgatcactttgatatcgagattatgggaggtcttggtccatcaaccggaaaagtcctccgcattggactcctgggatgcaacgccacgcgtgagaatgtggatcgcgtaacagaggcgttgcgtgccgcactccaacactgtcccaaaaagaaattg

SEQ ID NO: 181 - DNA, 1176 bp, Artificial Sequence
  derived and/or modified sequence
atggcaagccacaaacttctggtgaccccaccgaaggcgctgctcaagccactttcgatccctaaccaacttctgttgggccctgggcctagcaacctgccacctagaataatggcagcgggtggcttgcaaatgataggaagcatgtccaaggacatgtaccagatcatggatgagattaaagaagggatccaatacgtttttcaaacgcgcaacccgctcaccctggtgattagcggatcgggtcattgtgcattggaagcagcacttgtgaatgtcctggaaccgggggactcctttcttgtgggcgcaaacggaatctggggccaaagagcagtggacataggagaacgtatcggtgctcgagtgcatcctatgaccaaagatcctggaggacattacacgctgcaagaagtggaagaaggactggcacagcataagcctgtgctcctctttctgacccacggagagtcgagcacgggtgtgctccagccactggatggttttggagaattgtgtcatcggtacaagtgcctcctgttggtggattcagtggcatcgcttggtgggacgcctctctacatggaccggcaagggattgacattctttacagcggatcgcaaaaggcccttaacgctccacctggcacctctctgatttcgttttccgataaggcaaagaagaaaatgtacagccgtaagaccaagccattttcattttacctggacatcaagtggctggccaacttttgggggtgcgacgatcaaccaaggatgtaccaccacaccatccctgtgatttccctgtacagccttcgggaatcgcttgcacttattgcagagcaaggacttgaaaatagctggaggcaacatagagaggcggcggcatacctgcatggccgtctccaagcactgggcctgcagcttttcgtgaaagatcccgccctcagattgcccactgtgactactgtggcagtgcccgcaggatacgactggcgcgacatagtgtcgtacgtcattgaccacttcgatatcgagatcatgggagggctgggaccgtcaaccggcaaagtgcttcgaattggactcctgggatgcaacgcaacccgagaaaatgtggacagagtgaccgaagccctcagagctgccctgcagcattgccccaaaaagaaactt

SEQ ID NO: 182 - DNA, 1176 bp, Artificial Sequence
  derived and/or modified sequence
atggctagtcacaaacttctggtgactccacctaaagctctgttgaagcccctctccattccaaaccagttactgctgggaccagggccttccaatttgcctcccagaataatggctgccggtgggttgcagatgatcgggagcatgtcaaaagacatgtatcaaatcatggacgaaattaaggagggtatccagtacgtgtttcagacccgcaacccgctgactctggtcatcagcgggtcaggacattgtgctctggaagcggccctggtcaacgtgctggagcccggcgacagctttctagtgggagctaatggcatctgggggcagagggcggtcgatattggcgagaggattggtgccagagtacaccctatgacaaaggatcctggtggacattataccttgcaggaagttgaagaaggcctggcgcagcacaaaccggttctgctgttccttacccatggggaatctagcacaggcgtactgcagccactcgatggatttggagagctgtgccatagatacaaatgtttgttgctggtggactcagtggcctccctgggtggcaccccgctgtatatggacaggcagggaatagacatcctgtattcaggttctcaaaaagcactgaatgcgccaccagggacgtctttgatcagcttttctgacaaggctaagaaaaagatgtactcaaggaagactaaacccttttctttctatctcgacatcaagtggcttgccaatttctggggttgcgatgaccagccccggatgtaccaccacactattccagtcattagtctgtactccctcagagaaagcttagcactgatcgcagaacaaggactcgaaaatagctggaggcaacatcgagaggccgcggcctatctgcacgggaggctccaggctctgggattacaactgttcgtgaaggatccagctttgcgactacctaccgtgactaccgtggccgttcctgctgggtatgactggcgggacatcgtaagttatgtgatagatcactttgatattgagatcatgggcggattgggtcccagcactggtaaggtgcttaggatcggactccttggctgcaacgctacacgggagaatgtggaccgagtgacagaggcattgcgtgccgcattacaacactgcccaaagaaaaagtta

SEQ ID NO: 183 - DNA, 1176 bp, Artificial Sequence
  derived and/or modified sequence
atggcaagccacaagctgctcgtcacacctccaaaggcccttttgaagccactgtccatcccaaatcaactgctcttgggaccaggcccaagcaatctcccgccaagaatcatggccgccgggggcctgcagatgatcggatcaatgtcaaaagacatgtatcagattatggatgaaattaaggaaggaatccaatacgtgttccaaactaggaatcctttgactctggtcataagcggcagcggccactgtgcccttgaggccgctctcgttaacgtgctcgagcccggtgactcctttcttgtaggtgcgaacggcatatgggggcaacgcgccgtcgatatcggtgagagaattggagctagggtgcaccccatgacaaaggaccctgggggccattacactcttcaggaggtggaagaggggcttgcccagcacaaaccagttctgctgttcctcacccatggcgaatcaagcacgggggtgctgcagccattggatggctttggggagctgtgtcatagatacaaatgcctgctgctggtcgatagcgtggcaagtctggggggcacaccactgtacatggataggcaaggtatcgacatactgtactctggctcccaaaaagccctcaacgccccccccgggacctcccttatatctttctccgataaagcaaagaagaaaatgtattctaggaagaccaaaccctttagcttttacttggacatcaaatggctggctaatttctgggggtgcgacgatcagccgcgcatgtaccaccacacgatccccgtaatctctctctactctctgagggagagtcttgccctgattgctgaacagggtcttgaaaactcctggcgccaacatcgagaggccgcagcgtacctgcacggcaggttgcaggctctggggctgcagttgttcgtgaaagaccctgctctcaggctgcccacagtgaccaccgtggctgtcccagctggatacgactggagagatatcgtgtcctatgtgatcgatcacttcgacatcgagatcatgggagggctcggtcctagtacaggtaaagttctccggatcggattgctcgggtgcaatgccacgcgcgaaaacgtcgacagagtcaccgaagccctgagggcagcgcttcagcactgccccaaaaagaaattg

SEQ ID NO: 184 - DNA, 1176 bp, Artificial Sequence
  derived and/or modified sequence
atggccagccacaaattgttggtgactccacccaaagcacttcttaaacctttatccatcccaaaccaacttttgctgggacctggaccgtctaatctgccaccccgtattatggctgcaggtggattgcagatgattggttccatgtccaaagatatgtatcaaattatggacgagattaaagaaggtatccagtatgtattccagacacgaaacccgcttactcttgtgatctccggaagcggacactgtgcactcgaagcagctttggtcaatgttttggaaccaggagattcgttcctcgtgggagctaacggaatatggggtcaaagagctgtggatatcggagagagaattggagctcgggttcaccctatgacaaaggacccgggaggacactacacattacaagaggtggaggaaggattagctcaacataaaccagtcttacttttccttactcatggtgaatcttcaacgggggtacttcaacccctagatggctttggagagctctgtcatcgatacaagtgcttactcctggtggatagtgtggcgtcgctggggggaactccattgtatatggatcgacaaggtatagatatcctgtattcaggatcacaaaaagcacttaatgctcctccggggacttcactcattagtttctctgataaggctaaaaagaagatgtattctcgtaaaacaaaaccattttccttttatcttgatataaaatggcttgccaatttttggggatgtgatgatcaacctcgcatgtatcaccatacaattccagttattagtctttactctttgagagagtcactggccttgatagcggagcagggtctcgaaaactcatggagacaacaccgcgaggctgctgcatatttacatggtagattacaagctttgggattgcaacttttcgttaaggatcccgcattacgactcccaactgtcactacggtggcagttccagcaggatatgattggagagatattgtatcttacgtaattgatcatttcgacattgagatcatgggaggactcggcccaagtacaggaaaggtgcttagaatcggactgttgggatgcaacgcaactagagagaatgttgatagggttacagaagcactgcgtgcagcactgcaacactgtccaaagaagaaactc

SEQ ID NO: 185 - DNA, 1176 bp, Artificial Sequence
  derived and/or modified sequence
atggcctcccacaaactgttggtgacaccaccaaaggcccttttaaagcctttgtcaattcccaaccaactgctccttgggcccggacccagtaatttaccccctaggattatggcagcagggggactgcaaatgatcggtagtatgtctaaagatatgtaccagataatggatgaaatcaaggaaggaattcaatacgtgtttcagacaaggaatcctctgactctggtaattagtggatccgggcactgcgcgcttgaagcagcgttggtgaatgtgctcgaaccaggggacagtttcctcgtgggcgctaatggaatctggggccagagagctgtggacattggggaaagaataggggcccgtgtacaccctatgacaaaagacccgggcggtcactacacgttacaagaagtggaagagggcctggcacagcataagcctgtactgcttttcctcactcatggggagtcaagcacaggcgtcctccagcccctggacggtttcggggagctgtgccaccggtataaatgccttttgctcgttgatagcgtggccagcctgggcgggacgccactgtacatggaccgccaggggattgacatactctacagtggaagccagaaggctttgaatgctccaccgggaactagtctcatttcctttagtgacaaagccaaaaagaagatgtatagtaggaaaaccaagcctttctcattctacttagatattaagtggctggccaatttttggggttgcgatgaccagcctcgcatgtaccaccataccatcccagttatttccctctacagcctgcgtgaatccctggcgctcatcgcagagcaggggcttgaaaattcctggagacagcatcgggaagcagcagcatacctgcatggcagactgcaggccctgggcttacaactgttcgttaaagatcccgcccttcgtttacccacagtaacaacagtagccgtacccgctggatatgattggagagacattgttagctacgtcatcgatcactttgacattgaaatcatggggggccttggtccctctactggcaaggttctgaggatcggcctcctgggatgcaatgccacacgggaaaacgtggaccgggtcacagaggctcttcgggcagccttacagcattgtcccaagaagaagctg

SEQ ID NO: 186 - DNA, 1176 bp, Artificial Sequence
  derived and/or modified sequence
atggcatcacataagctgctggtgactcctccaaaggctcttctcaagcctctgtccattcctaaccagcttcttcttggtcccggaccttccaatctccctcccagaattatggcagccggaggactccagatgattggtagcatgtccaaggatatgtaccaaatcatggacgagatcaaggaaggtatccaatacgtgttccaaactcggaaccccttgactctcgtaatttccggtagcggacactgtgcactggaggcggcgctcgtgaacgtccttgaacctggagactcgttcctcgtgggagcaaacggcatttggggacaaagagcggtggatatcggggaaagaataggagcgcgcgtgcatcctatgacgaaggatcctggaggtcactacaccctccaggaggtggaggaaggactggcccagcataagccggtgctgctgtttctgacgcacggggagtcatcgactggtgtgctgcaacctcttgatggttttggagaactttgccatagatataagtgtctgctcctggtggactcggtggcgtcactcggtggtacccctctgtatatggataggcaaggtatcgatattctctatagcggatcacagaaggcactgaacgccccacccggtactagcctgatctcattcagcgataaggcaaaaaagaaaatgtactcgcgcaagaccaaacctttttccttctaccttgacattaagtggctggcaaacttttggggttgtgacgaccagccaagaatgtaccaccatactatccctgtgatttcgctgtacagcctcagagagtctctcgcactgattgccgaacaggggctggaaaacagctggcggcaacatcgtgaggcagcagcgtaccttcatggacgcctgcaagccctcggccttcaactgttcgtgaaggatccagcacttagacttcctactgtcaccaccgtggcagtgcctgccgggtacgattggagagacatcgtctcctacgtgatagatcattttgacattgaaatcatgggtggccttggtccttccacgggcaaggtgttgcgcattggacttttgggatgtaatgcaaccagagaaaacgtggatcgggtgaccgaggctttgagggcggccctgcagcactgtcccaagaaaaaactt

SEQ ID NO: 187 - DNA, 1176 bp, Artificial Sequence
  derived and/or modified sequence
atggcatcgcacaaattattagttacaccgcctaaagcgctccttaagccgctgtctatccctaaccaacttctgcttggccctggtccgagcaatcttccgccgaggatcatggcagcaggcggactgcagatgattggctcaatgagcaaagatatgtatcaaattatggacgagatcaaggagggaatccaatacgtttttcagacacgtaatccactgacattagtaatttcaggctccggccattgcgcgctggaagctgcccttgtcaacgtgttggagccgggagactcattccttgtcggtgccaatggaatttggggccaacgggctgtggatattggagagcgcataggtgcaagagttcatcctatgacaaaagaccctggaggacattacacgttgcaagaggttgaggagggactggcccaacacaaaccggtgttgctttttctaacccatggcgaaagctcaacaggggttcttcaacctctggacgggtttggggagctctgtcatcgttataaatgcttactcttggtggatagtgtggcatcactcggcggcacgccgttatatatggaccgccaaggaattgatatactttacagcgggagccagaaagcattgaacgccccaccgggtacatcattgatttccttttctgataaagcaaaaaagaaaatgtatagtaggaaaactaaaccatttagtttttatttagatattaagtggttagcgaacttctggggctgtgatgatcagccgagaatgtatcatcatacaatcccggtgatctccctttacagtttaagagaaagcttagcgttaattgccgaacaaggacttgagaattcatggcgtcaacacagggaagccgcagcctatcttcatggcaggttacaagcgcttggccttcagttatttgtgaaagatccagccttgagattaccaacagtcacaacggttgccgtgccagctggatatgattggagagatatcgtatcatacgtgattgatcattttgatattgaaataatggggggcctgggaccgtctacaggcaaagtccttagaattgggctgcttggttgtaacgcgacaagagagaacgttgatagagttacagaggcattgagagctgcgctgcaacattgtccgaaaaaaaaactt

SEQ ID NO: 188 - DNA, 1176 bp, Artificial Sequence
  derived and/or modified sequence
atggcctcccataagctgctcgtgacccctcctaaagcgcttctcaaacctttgagcatacccaatcagctcctccttggccctggcccatccaacctgcctccgagaatcatggctgctggcggactccagatgatcggatcaatgtccaaagacatgtaccagattatggatgaaatcaaggaaggaatccagtacgtctttcaaactcggaaccctctgactctggtgatctcaggaagcggacactgcgccctggaagccgccctcgtgaacgtgttggaaccaggagattcatttctggtgggcgccaacggcatctggggccaacgtgccgtcgacatcggagagagaatcggcgctagagtgcacccgatgaccaaggacccgggaggacactacactctccaagaggtcgaggaaggactcgcgcagcataagcctgtgctcctcttcctgacgcatggtgagagctcgaccggagtgctgcagcctcttgacggattcggagaactgtgtcaccgctacaagtgtctgctgttggtcgacagcgtcgcatcgctcggaggcaccccgctgtacatggatcggcagggaatcgacatcctttacagcggatcgcagaaggcgctcaatgctccaccaggaaccagcctgatcagcttcagcgacaaggcgaaaaagaaaatgtacagccgcaaaaccaagccgttctcattctatctcgacatcaaatggctcgcgaacttctggggctgcgatgaccaaccgaggatgtaccaccacactataccggtcatttcgctctactcgcttcgcgaatcgttggccttgatcgcagaacagggactggaaaattcctggcgccaacatagagaggctgccgcgtacttgcatggacggctgcaggcacttgggctccaactgttcgtgaaggacccggccctgcggctgccgaccgtgactactgtcgcagtgccagccggatacgactggagagacatcgtgagctacgtcatcgatcatttcgacattgagatcatgggaggacttggaccctctactggaaaggtcctgcgcatcgggctgctgggatgtaacgcgactcgggagaacgtggatcgcgttactgaggcactgcgcgctgccctccaacattgcccgaagaagaagctg

SEQ ID NO: 189 - DNA, 1176 bp, Artificial Sequence
  derived and/or modified sequence
atggcttcacacaagcttcttgttacaccccctaaagctctgcttaagcctctgagcatccccaatcagctccttttggggcccggacccagcaacctgcctcctcgaatcatggccgctgggggactccaaatgattgggagcatgagcaaggatatgtaccagattatggatgaaatcaaggagggtattcaatacgttttccagacacggaacccccttactctggtgatcagcggaagcgggcattgcgccctcgaggcggcactggtgaacgtgctggagccaggagattccttcttggttggcgccaacgggatttggggacaacgcgctgtggacataggcgaaaggattggcgctcgcgtgcatccaatgaccaaagatcctggtgggcactataccctccaggaggtggaggagggacttgcccagcataaacccgtgctgctgtttttgacacatggagaaagcagcaccggagttcttcagcctttggacggctttggcgaactgtgccaccggtataaatgtctgctcttggtcgacagcgtggcatccctcggagggactcctttatatatggatcgacagggaattgatatactgtactctgggagtcaaaaagccctgaacgctccccccgggacatctctgatcagtttctctgataaggccaaaaaaaaaatgtattcaaggaaaaccaagccattctcattctaccttgacatcaaatggttggctaacttctggggctgcgatgatcagccacggatgtaccatcacacaattccagtgatttctctgtatagcctgagagagagcctggctcttatcgccgaacagggtttggaaaactcctggagacagcatcgcgaagccgccgcatatttgcacggaagactgcaggctctcgggctccagctgttcgtgaaggaccctgctctgcgactcccaacagtcacgactgttgccgtacctgccggatacgattggagggacatcgttagttatgtcatcgatcatttcgatatcgaaatcatgggcggtcttgggccatctactggaaaagtcctgcggattggcctcctggggtgtaatgctaccagagaaaatgtagacagggttaccgaagcactgagggcagcacttcagcactgtccaaaaaagaagctg

SEQ ID NO: 190 - DNA, 1176 bp, Artificial Sequence
  derived and/or modified sequence
atggcttcacataaacttttagttacaccacctaaagctttattaaaaccattatccattccaaatcaattattattaggaccaggacctagtaatttaccaccacgtattatggcagctggaggacttcaaatgattggatctatgtctaaggatatgtatcaaattatggatgaaattaaagaaggaattcaatatgtttttcaaacaagaaatccattaactcttgtaatttctggatctggtcattgtgctttagaagctgcattagttaacgttttagaaccaggagattcattcttggttggagcaaacggaatttggggacaaagagcagtagacatcggagaaagaattggtgctagagtacatccaatgacaaaggatccaggaggacattatactttgcaagaagtagaagaaggtcttgcacaacataaaccagttttattgtttttaacacatggagaatcttctacaggagtattacaacctttagatggattcggagaactctgtcacagatacaagtgtcttttattagttgatagtgtggcttcattaggaggtacaccactttatatggatagacaaggtattgatattctttattctggaagtcaaaaagctttaaatgcaccaccaggaacatcacttatatcattttcagataaagcaaaaaaaaagatgtactcaagaaaaactaaacctttctctttctatctcgatattaaatggttagctaatttttggggatgtgatgatcaaccaagaatgtatcatcatactattcctgtaatttcattatattcacttcgagaaagtcttgctcttattgcagaacaaggtcttgaaaattcttggaggcaacatagagaagctgctgcatacttacatggaagattacaagctttaggtttacaattatttgttaaagatccagctttaagattacctacagttacaacagtagctgtaccagctggatatgattggcgagacattgtctcatatgttattgatcattttgatattgaaattatgggaggtttaggtcctagtacaggaaaggttttaagaataggattattaggatgtaatgctacaagagaaaatgtagacagagtaacagaagctttaagagcagctttacaacactgtccaaaaaaaaagcta

SEQ ID NO: 191 - DNA, 1176 bp, Artificial Sequence
  derived and/or modified sequence
atggcctcccacaaactgctggtaaccccccccaaagcccttctgaaaccactgtccatacccaatcagctcctcctgggcccaggaccatctaaccttccgcccaggataatggccgccggcggactacaaatgatcgggtcaatgtccaaagacatgtatcaaattatggatgaaatcaaggagggcatccaatatgtttttcagacaagaaaccccctgacactcgttatctctggctctgggcactgcgctctagaggccgcactggtgaatgttctggagcctggagattctttcctcgtgggagctaacggcatttggggccagcgagcagtcgacataggggaacgaatcggtgctcgagttcaccccatgaccaaagatccaggagggcattataccctccaggaagtggaggagggattggctcagcacaaaccagtgctcctatttttaacccatggtgagtcctccactggcgtgctgcagccattagacggcttcggggaactgtgccatcgctataaatgcctacttctcgttgattctgttgcttccctgggggggactcccctgtatatggacaggcagggcattgacattctgtattccggctcccagaaggccttgaatgcccctccgggaactagcctcatatccttctccgacaaagcaaagaagaagatgtactcccggaagaccaagcctttctctttctacttggacattaagtggctggcaaatttctgggggtgtgacgaccaaccgcggatgtatcatcatacgattcccgtcattagtctctattccttgcgggagtcgctcgccctcatagcggaacagggactcgagaacagttggagacagcaccgcgaagctgccgcatacctgcacgggcgcctccaggcactcgggctccagctgttcgttaaggatcctgccttgcgcctgcctaccgtcacaaccgttgctgtccccgcgggatatgattggcgggatatcgtcagttatgtgattgaccacttcgatattgagataatgggcggcctcggaccatccacaggtaaggttctacgaatcggactgctggggtgtaatgccacgagagagaatgtggatcgagtgactgaggcactgcgggctgcgctgcagcattgtccgaagaagaaattg

SEQ ID NO: 192 - DNA, 1176 bp, Artificial Sequence
  derived and/or modified sequence
atggcgtcacacaagctgcttgtgaccccaccgaaagcactcctgaagcctctgtccattcctaaccaacttctgctgggacctggtccttccaatttgccaccgcgaattatggcagcaggaggtttgcagatgattgggagcatgagcaaagatatgtatcagataatggatgagattaaggaggggattcagtacgtgtttcaaacccgtaaccctcttaccctggtgatctcggggagcggacactgcgctctggaagcggcccttgtcaacgtgcttgaaccgggagattcgtttcttgttggtgccaacggaatctggggacaacgggcagtggatataggcgagcggattggagctcgtgtgcaccccatgaccaaagatcctggcggtcattacactctccaggaggtggaagagggacttgcacagcacaaaccagtgcttttgtttctcactcatggagagtcctccaccggtgtcctccaaccactcgatggctttggggaactgtgtcatcgatataagtgtctcctgcttgtggattcggtcgcgagcctgggaggaactccactgtacatggaccgccaaggcatcgatattctttactctggcagtcagaaggcacttaatgctcctccggggacctctcttatttcgttcagcgacaaggccaagaagaagatgtactccaggaaaaccaagccattttccttctacctggacataaagtggttggctaacttttggggatgtgacgaccagcccaggatgtatcaccatacgatacccgtgatctctctttattcgctgcgcgagtctcttgcactcatcgccgaacaaggtctggaaaattcctggaggcagcaccgggaggcagcagcataccttcatggtagactccaggctctgggcctccagctgttcgtgaaggacccagcactccggcttcctactgtgactactgttgccgtccccgcaggttacgattggagagacattgtgtcctacgtcatcgatcattttgacattgagattatgggtggacttggaccttcgactggtaaagtgctcaggatcggccttctcggatgtaacgcaactcgcgaaaatgtggatagggttaccgaagcacttcgcgccgctttgcagcattgccctaagaaaaaactg

SEQ ID NO: 193 - DNA, 1176 bp, Artificial Sequence
  derived and/or modified sequence
atggcttcccataagttattggtgacaccccctaaggcgctcctcaagccccttagcatcccaaaccaattgttgttggggcctgggccttctaaccttcctcctagaattatggcagctggtggattgcaaatgattggcagtatgtctaaagatatgtaccagataatggacgagatcaaggaaggaatacagtatgttttccaaaccaggaaccctttgactctcgtcattagcggttccggtcattgcgctttggaggctgcccttgttaatgtcctggaacccggagactctttccttgttggggccaatggtatatgggggcaaagggcagttgatattggtgaaagaataggggcaagggtccacccaatgactaaagatcctggcgggcattatactcttcaggaagttgaggaaggtcttgctcaacataagcctgtgttactttttctaacacatggtgagagcagcactggcgttcttcaaccccttgatggctttggcgagctctgccatagatacaaatgcttgcttcttgtagattcagtagcaagcctaggcgggaccccactttatatggatagacaggggattgatatattatacagtggaagtcaaaaggccttaaacgctccgcctggtacgtcacttatttccttttccgacaaggccaaaaagaagatgtatagcagaaagacaaaaccattttcattttatttggatattaaatggctcgctaacttctggggttgcgatgatcaaccaagaatgtatcatcatactattccggttatcagtttgtactccctcagggaatcacttgcattaatagcagagcagggattagagaactcatggcgtcaacaccgagaagctgctgcatatttacatgggcggttgcaagctctcggtcttcaactgttcgtgaaggatccggctttgcgactccctacagttactactgtggctgtcccggcaggctacgactggagagacattgtctcatacgtaattgaccatttcgacattgaaattatggggggtttaggaccgtccactggcaaggtcctgcgaattggattgcttggatgcaatgctacccgtgagaacgttgatagggttacggaggccctcagagccgctctacagcattgcccgaaaaagaagttg

SEQ ID NO: 194 - DNA, 1176 bp, Artificial Sequence
  derived and/or modified sequence
atggcttcccacaagttgctggtgaccccgccgaaagctctcctcaagccactgtcgatccctaatcaactgttgttgggaccggggccatctaatctgccgcctcgcatcatggccgcgggcggactgcagatgatcggttccatgagcaaagacatgtaccagattatggacgagatcaaagaggggatccagtacgtctttcagacgcgcaatcccctcactctggtgatttcgggaagcgggcattgcgccctggaggccgccctggttaacgtgctggaacctggtgattcgttccttgtcggtgcaaacggaatttggggacagcgggcagtcgatatcggtgaacggatcggcgccagagtgcacccaatgactaaagacccgggaggacactacaccctgcaggaggtagaggaaggactggcacaacacaaaccagtcctcctcttcctcactcatggggagtcgtcaactggagtcctgcagccactggatggctttggtgagctgtgccatcgctacaagtgtctgctgctggtggactcggtcgcatccctgggtggcacccccctctacatggacagacaagggatcgacatcctgtactccggttcccagaaggccctgaatgccccgccgggaacctccctcatctcattctcggacaaggccaaaaagaaaatgtacagcagaaagaccaaaccattctccttctacctcgacatcaagtggctggccaacttctggggctgcgacgaccagcctcggatgtatcatcacacgattccggtgatctcgctgtattcgctgcgggagtctttggccctcattgcggaacagggcctcgaaaacagttggcggcagcaccgggaggctgcggcatacctgcacggcagactccaggcgctgggactgcaactgttcgtcaaggatccggcactgagactccccactgtgacgactgtcgcggtgcctgctggatacgattggagagatatcgtgtcgtacgtgatcgaccacttcgacatcgagattatggggggccttggaccttcaactgggaaggtgctgcgcattggactgctcggctgcaatgccacccgggagaatgtggaccgcgtgactgaggcgctgagagccgcgctgcaacactgcccgaagaagaaactc

SEQ ID NO: 195 - DNA, 1176 bp, Artificial Sequence
  derived and/or modified sequence
atggcttcccacaagctgctcgtgactccccctaaagcactgcttaagcctctgtcaatcccaaaccaactgctgctgggacctgggccctcgaatctcccacctcggatcatggcagcggggggcttgcaaatgattggttcaatgtctaaagacatgtaccagatcatggacgagattaaagaagggatccaatacgtttttcaaacccgtaatcccctgacgcttgtgatatcgggtagcggacattgcgccctggaagcagcacttgtgaatgtgcttgaacctggcgactcgtttcttgtcggggcaaacgggatttggggccagagagcagtcgacattggagaacgcattggagcgcgcgtgcatccaatgaccaaggacccaggaggtcactatacgctgcaggaagttgaggaaggcttggcgcaacacaaaccggtcttgcttttcctgacgcacggcgaaagctcaaccggggtccttcaaccactggatggatttggcgagctgtgccataggtacaagtgtctgctgctggtcgattcggtcgcgtcgcttggtggtactccactgtacatggatcgacaaggaatcgatatactttactctggatcacagaaggctctgaacgcacctccaggtacttccctgatcagcttctcagacaaggcgaagaagaagatgtactcccgtaagaccaagccgttttctttctacctcgacatcaaatggctggccaacttttggggttgcgatgatcagcctcggatgtaccatcatactattcctgtgatatcactgtattccctccgagaatccctggcgctcatcgcagagcaaggacttgaaaactcctggcggcagcatcgagaagctgcagcctatcttcatggacgccttcaagcactgggtttgcagctgtttgtgaaagatcctgctctgaggctccctactgtcaccaccgtggcagttcccgctggctacgactggcgggatatcgtttcgtatgtcatcgatcattttgatatcgaaatcatggggggcctgggaccaagcacgggaaaggtcctgaggattggccttctcggatgtaacgccactagagagaacgtggacagggtgaccgaagccctcagagcagcacttcagcattgtcctaaaaagaagctg

SEQ ID NO: 196 - DNA, 1176 bp, Artificial Sequence
  derived and/or modified sequence
atggcctcacataagttactagtgacaccaccaaaggccctgctcaagcccctgagtattccaaatcagttgctgctgggcccgggcccatctaacttgccgccacgcatcatggcagctggaggcctgcaaatgattggtagtatgtcgaaggatatgtaccagattatggatgaaattaaggagggaattcaatacgtcttccagacccgcaatcccttgaccctggtgattagcggttccggacactgcgccttggaagccgcgctcgtaaatgtcctggagccgggcgatagcttcttggtgggcgcgaacggcatctggggacaacgagcggttgacataggcgagcggataggagcgcgagtacaccctatgaccaaagatcccggaggccactacacgctccaggaagtggaggagggccttgcccaacacaagcctgtgctgttgttccttacccatggcgagtctagcacgggcgtcctccagcccttggacggctttggcgaactgtgccaccgttacaagtgtctgctgctggtcgatagtgtggctagcctcggcggaactcccctctacatggacaggcagggcatcgacatcctgtactcgggatcgcagaaggccctgaacgccccgccaggaacgtcgctcatttccttctcggacaaggcaaagaaaaagatgtactcgcgtaagactaagcccttctccttctatctagatatcaagtggctcgcaaacttttggggctgcgacgaccaacctcgcatgtaccaccatactattccagtcatctccttgtacagcttgcgggagtctctggcgctgattgcagagcagggcctggagaattcctggaggcagcatcgtgaggcagctgcttaccttcacggacgtctacaagcattgggcctgcagttatttgtgaaagatcccgcgctccgtctaccgacggtgacaacggttgcagtgccagccggttacgattggagggacatcgtgtcctacgtcatcgatcatttcgatattgagattatgggcggcttaggcccctcgaccggtaaggtcctgcgcattggcctgctgggatgtaacgcgacccgcgagaacgtggatagagtgacagaagcgttacgcgccgccctacagcattgcccaaaaaagaaactg

SEQ ID NO: 197 - DNA, 1176 bp, Artificial Sequence
  derived and/or modified sequence
atggcatcccacaagctcctcgtcacaccgccaaaggccctactgaagccgctgtccatcccaaatcaactgctcctcggcccaggaccttccaacctgccgccccgcattatggccgctggaggcctgcagatgattgggtcaatgagcaaggatatgtaccagatcatggatgagatcaaagaaggcatccagtacgtgtttcagaccaggaaccctttaacattggtcatctcaggatctggccactgcgctctggaggccgctctggtgaatgttctggaaccaggagatagcttcctggtcggcgccaatggaatctggggacaaagggcagttgacatcggcgaacgcattggagctcgcgtgcacccaatgaccaaggaccccggaggccactacactctgcaggaagttgaagagggtcttgcccagcacaagcctgtgttactttttctcactcacggagaaagttcgacaggtgtccttcagccactggacggattcggcgaactgtgtcatcgctacaaatgtttgcttcttgttgactccgtggcctctctggggggtacccccctgtatatggaccggcagggaattgacatcctgtatagtgggtcacagaaggctctcaacgccccccccggtacgagtttgatctccttcagcgacaaggcaaagaagaagatgtacagtcggaagaccaaacctttctccttttacctcgacatcaaatggctggccaacttctgggggtgtgacgaccagccacgcatgtaccatcacaccatccccgtcatctcactctacagtttaagagagtcccttgcactgatcgccgaacagggcctggagaactcctggcgccagcaccgggaggccgccgcttacctgcatggcaggcttcaagcgctcggcctccaattatttgtgaaggatcccgccttacgcctgcccacagtgacaacagtggctgtgcccgccggatacgactggcgcgacatcgtgagttatgtaatcgatcactttgatattgagattatgggcggactgggtccgagcaccgggaaagttctccggattgggctgcttgggtgtaacgccactagggagaatgtcgaccgagtgacggaggcactgcgggccgcgttacaacattgtcccaaaaagaagtta

SEQ ID NO: 198 - DNA, 1176 bp, Artificial Sequence
  derived and/or modified sequence
atggcttcgcataaactccttgtgacgccccctaaggctcttctgaaacccctctcgatacctaaccaactccttcttggacctgggccttcgaatctcccaccacgcattatggctgcaggtggacttcagatgatcggaagcatgtccaaagacatgtaccagattatggacgaaatcaaggaaggaattcagtacgtgttccagacccgcaatccgctcactctggtgatctcaggatccggccattgtgcgctggaagcagcacttgtgaacgtgttggagcctggagattcgttcctggtgggggccaacggcatatggggtcagcgcgcagtggatatcggagagagaattggggcacgggtgcatcctatgaccaaagaccctggtggtcactacaccctgcaggaagtggaggagggacttgcacagcataagcctgtgttgctgtttcttacccatggagaatcgtcgacgggggtgctgcaacctcttgacggttttggagaactgtgtcatagatacaagtgccttctccttgtggattccgtcgcctcgttgggaggcacgcccctttacatggatcgtcaagggatcgatattctttattcagggtcgcagaaggcactcaatgcaccccctggaacctcgcttatttcctttagcgataaggcaaagaagaagatgtactctcgtaaaaccaagccattttcattctacctggacatcaagtggctggcaaatttctggggatgtgatgaccagccaagaatgtaccaccatactattccagtcatttcattgtactcgttgcgggagtcgctggcactgattgccgaacaaggactggaaaactcgtggcgacagcacagagaagcggcagcatacctccacggaaggcttcaagctctgggacttcaactttttgtgaaggacccagcgctgcggcttccgactgtgactaccgtggcagtgcccgcaggctacgattggcgggatattgtgagctacgtgattgaccactttgacatcgagattatgggcggtctgggaccttcgactggcaaggtcctgcgcattggactgttggggtgtaatgcaaccagggaaaacgtcgacagggtcactgaggcacttagggctgctctgcagcactgtcctaagaagaagctg

SEQ ID NO: 199 - DNA, 1176 bp, Artificial Sequence
  derived and/or modified sequence
atggcctcacacaagttgcttgtgaccccacccaaggcacttttgaaaccactgagcataccaaatcagttgttactgggccctggcccctcaaacctgccaccaagaattatggctgccggtggcctacaaatgatcggatccatgtcaaaggatatgtatcagatcatggacgagatcaaggagggcattcaatacgtgttccagaccaggaaccctctcacattagtcatctcaggatcgggccactgtgccctggaagcggccctggttaatgtgctggagcccggggattcctttctcgtgggggcaaatggcatctgggggcagagggctgtggacataggggaacggatcggcgctcgagtgcaccctatgacaaaggaccctggcggccattacaccctccaagaagtggaagagggcctggcgcagcataaaccagtgctgctctttctgacacatggagagagtagcaccggggtgctccagcccctggacggctttggcgagctctgccatcgttacaagtgcctgttgctggtagattccgtggcttcgctcggtggcaccccgttatacatggatcgacaagggatagacattctgtacagcggatcccagaaggccttgaacgcgccaccagggacctctctcatttctttctccgacaaggcgaaaaaaaaaatgtacagcaggaagacaaaaccattctctttttatctcgacatcaagtggctggccaacttttggggatgcgatgatcaaccaaggatgtatcaccataccatcccagtgatctccctgtactcccttcgagaatctcttgccctgattgccgaacagggactggaaaactcatggcggcagcatagagaggccgccgcttacctgcatggccgcctgcaggcgctcgggctgcaactgttcgtgaaagaccctgcgctccggctacctactgtgaccacagtggcagtgcccgccggatacgattggcgagatatcgtctcatacgtgatcgaccacttcgatattgagatcatggggggcctcggcccatcaacgggcaaggtgctgcgaatcgggttactgggctgcaacgccacacgggaaaacgtggaccgcgtcacggaggcactgagggccgctctccagcactgccccaagaaaaaactg

SEQ ID NO: 200 - DNA, 1176 bp, Artificial Sequence
  derived and/or modified sequence
atggcgtcgcataaacttctggtgactccacctaaggcattgctgaaaccgctctccatcccaaatcagctgctgctgggacctggaccaagcaatctcccgccgcggatcatggcagcagggggcctgcaaatgatcggatcgatgagcaaggatatgtaccagatcatggacgaaattaaagaaggaatccagtacgttttccagacccgcaatccgcttaccctggtgatttccgggagcggacattgcgcccttgaggccgccttggtgaacgtcctcgagcccggagattcgttcctcgttggagcgaacggaatctggggccaaagagcagtcgacatcggcgaacgcatcggagcccgcgtgcacccaatgactaaggacccgggtggtcactacaccctgcaggaagtcgaggaaggactggcgcaacataagccggtgctcctgtttctgacccacggcgagagttcaaccggcgtcctgcagccgctggatggtttcggggagctgtgccaccggtacaaatgcctccttctggtggactccgtcgcctcattggggggaacccctctctacatggaccggcaaggcatcgacattctgtacagcgggagccagaaggctctgaacgcgcccccgggaacttccctcatctcattctcggataaagctaaaaagaagatgtactcccgtaagactaagcccttctctttttatctggacatcaagtggttggcgaacttctggggctgcgatgatcaaccaagaatgtaccaccacacgatcccagtgatctcgttgtacagcctcagggagtcgctcgccctgattgccgaacagggactggaaaattcgtggcgacaacaccgggaagcagcggcctacctgcatgggagactgcaggctctcggcctccagctcttcgtcaaagaccctgccctccggctgcctactgtgacgaccgtggctgtgccggctggttacgattggagagacatcgtctcatatgtgatagaccactttgatatcgagatcatgggcggactgggaccctccactggtaaggtgctgcgcatcggactgttgggatgtaacgcgacccgcgaaaacgtggaccgcgtgactgaggcccttagggccgcactgcagcattgtccgaagaagaagctc

SEQ ID NO: 201 - DNA, 1176 bp, Artificial Sequence
  derived and/or modified sequence
atggccagccataagttgctggtgactccaccgaaagctcttctcaagccactgtctatacctaatcagctgctgttgggccctggcccaagtaacctgccaccaaggatcatggccgccggtggactgcagatgatagggtccatgtcaaaggacatgtatcagattatggacgaaatcaaagaaggtattcaatacgtgtttcagacccgaaatccgctgacccttgtcatctccggaagcggacactgtgcccttgaggccgctctggtcaacgttctggaaccaggggatagcttccttgtgggggctaacggtatctggggccagcgggccgtggacataggcgaacggatcggcgcccgagttcatcccatgactaaggacccagggggccattacactttgcaggaagtagaagagggcctggcacagcacaagcccgtactgctttttctgacccatggggagtcttccaccggagtactgcagcccctggacggctttggagaactgtgccataggtacaagtgcttattactggtggacagcgtagccagtttagggggaaccccgctctacatggatcgccaggggatcgatatactgtacagcgggagccaaaaggctctgaacgccccccctggcaccagcttgatctcattcagcgataaagccaaaaagaaaatgtatagtaggaaaactaagccattttccttctacctagatataaaatggctggctaacttctggggctgcgatgatcagcctcgtatgtatcatcatactatcccggttatcagcctgtattccctgcgggagtccttggctctgattgccgaacaaggtctggagaattcatggagacaacatagagaagctgccgcatatttgcatgggagacttcaggccctgggcctacaactgttcgtcaaagatccagccctgcggctccctactgttactaccgtcgctgttccagccggctatgactggcgcgacattgtgtcgtacgttatcgatcatttcgatatcgagatcatggggggcttgggtccgagtaccgggaaggtgctgcgtattggactcctcggatgcaacgcaaccagagagaacgtggacagggtgactgaagcgctgcgagcggctctccaacactgcccaaaaaaaaagtta

SEQ ID NO: 202 - DNA, 1176 bp, Artificial Sequence
  derived and/or modified sequence
atggcgtcacataagctcctggtgaccccaccaaaagcacttctcaagccactgtccatacccaaccaacttctgcttggtccgggtccttccaacctgccgccacgtattatggccgccggaggactgcagatgattgggagcatgtcgaaggacatgtatcagattatggatgagatcaaagagggaatccaatacgtttttcagacgcgaaacccgctgactctggtgatttcgggctctggccactgcgcacttgaagcagcactggtgaacgtgcttgagccgggtgattcgtttcttgtgggcgcaaacggtatctggggacagagagccgtcgacattggtgaaaggataggagcacgtgtgcatcctatgacgaaggatcctggcggccattatacccttcaggaggtggaagaggggctggcacaacataaacccgttcttctgttccttactcatggagaatcgtcgaccggcgtcttgcaaccactcgacggattcggggaactgtgtcatagatacaagtgtcttttgttggtggatagtgtcgcatcactgggaggcacgcccctgtacatggatagacaaggaattgacattctttactctggatcccagaaagccctcaacgcacctcccgggacctctctgatctccttcagcgataaagcaaaaaagaagatgtattcccgtaagactaagccattttcgttttacctcgatatcaagtggcttgctaatttctggggttgtgacgatcaacctcggatgtaccatcatactatccctgtcatttcactttacagccttcgcgaatcactggcccttatcgcagaacaaggccttgaaaattcgtggagacaacatagggaagctgccgcctaccttcacggacgcctccaggcactgggactgcaactttttgtgaaagatcctgctctgaggctcccaactgtgaccaccgttgcggtgccagccgggtacgactggcgcgatatagtgtcgtacgtgatcgatcatttcgatattgagattatgggtggattgggaccctccaccggtaaagtcttgagaatagggctgcttggatgtaacgcaacgagagagaatgtggatcgagttacggaagctcttcgcgcagcacttcaacattgtcctaagaagaaactc

SEQ ID NO: 203 - DNA, 1176 bp, Artificial Sequence
  derived and/or modified sequence
atggcttctcataagcttttggtaactcctccaaaggctctgctcaagccactttccatcccaaatcaacttcttctggggccaggaccgagtaatcttccgccacgcatcatggccgccgggggcctgcagatgatcggctctatgtcaaaagatatgtatcagatcatggatgagatcaaagagggaatccagtatgtgttccagacacggaaccctctaacactcgtcatttctgggtcgggtcactgtgcacttgaggccgccctggtgaacgtgttggaaccgggggatagctttttagtcggcgccaatggaatttggggacagcgggcagttgatatcggggagcgtattggagctagagtccacccaatgactaaggatcctggcggccattatactctgcaggaggtcgaggaaggcctggctcaacataagccggtgctgctctttctaactcacggggaatcttctaccggggtgctccagcccctcgatggattcggagagctgtgtcaccggtacaagtgtctcctgctggtagacagcgtggcctctctcggaggcactcccctgtatatggataggcaggggattgatatcctctattctggctcgcagaaggctctgaatgccccaccgggcacctcccttattagtttctctgataaggccaaaaagaaaatgtactcccgtaaaacgaagccattcagtttttatctagacattaagtggctcgcgaacttttggggctgtgacgatcagcctcgtatgtaccatcatactatacctgtgatcagtctctattcactacgcgaaagcctggcgttaattgcggagcagggcctagagaatagttggcgacaacatagggaagcagcagcttacctccacggacgtctccaggccctggggttgcagctttttgttaaggatccggccctccgcttgcctacagtgacaacagtggctgttcccgccggctatgactggcgagacatagtgagttatgtaattgatcacttcgacattgagatcatgggtggcctcggacccagtacaggaaaggtcctccgcataggcttgctcggctgtaatgcgactcgggaaaacgtggaccgggtgacagaagccctccgagcggcactccagcactgcccgaaaaagaagttg

SEQ ID NO: 204 - DNA, 1176 bp, Artificial Sequence
  derived and/or modified sequence
atggcgtcgcacaagctgcttgtgaccccacctaaggcccttctgaagcctttgtcgatccctaatcaactgctcctcggacccggtccatcaaacctcccgccgaggattatggctgccggagggctgcaaatgatcggctcaatgtccaaggacatgtaccagattatggatgagatcaaggaaggaatccagtacgtgttccagaccaggaatcccctcaccttggtgatctcaggttcagggcattgtgccctcgaagcggccctggtgaacgtcctggagcctggagattccttcctggtgggcgccaacggcatctggggacagcgggcagtggatatcggcgaaagaatcggcgcgcgcgtccaccctatgaccaaggacccggggggtcattacacccttcaggaggtggaagaaggcctcgctcagcacaagcccgtcctcctcttcctgacgcatggagaatcgtccacgggggtgctgcaaccactcgatggattcggcgagctgtgccatcgctataagtgcctcttgctggtggattccgttgcttcgctcggaggcaccccactgtacatggatcgccagggtatcgacattctgtactcgggatctcagaaggcgcttaatgccccgccgggaacttcactgatttccttctcagacaaggcgaagaagaaaatgtattcaagaaagactaagccattctcgttctacctcgatatcaaatggctcgcgaacttttggggctgcgacgaccagcctcgcatgtaccatcacaccatccctgtcatctcgctgtactcacttagagaaagcctggccctcatcgccgaacaggggctggaaaacagctggcggcagcaccgcgaagctgccgcctaccttcatggacgcctgcaggccctcgggctgcagctcttcgtgaaagacccggcgctccggctgccgaccgtgaccaccgtggccgtgccggcgggatacgactggcgggatattgtgtcgtacgttattgaccacttcgacatcgaaatcatgggcggactgggtcccagcactgggaaagtgctccgcatcggactgctcgggtgcaatgccactcgggaaaacgtggatagagtgaccgaagccctgcgcgccgcgctccaacactgtcctaagaagaaactt

SEQ ID NO: 205 - DNA, 1176 bp, Artificial Sequence
  derived and/or modified sequence
atggctagccacaaattattagtgaccccacccaaagccctcctgaaaccattatccatcccgaatcagctgcttctcggccctgggccttctaatcttcctcccagaatcatggccgccgggggcttgcagatgattggctcgatgagcaaggacatgtatcagatcatggacgagataaaggagggcatccaatatgtgttccagacaaggaaccctctgactttagtcatctccggatctggacattgcgcccttgaggccgctctggtgaacgtcctcgagcccggagattcgtttctggtcggcgccaatggcatttggggtcagagggctgtcgatataggagagaggattggggctcgcgtgcacccgatgaccaaggatcctggaggacattacacacttcaggaggtagaggagggcctggcccagcacaaaccggtcctgttgtttctcacccatggcgagtcaagtacaggcgtgttacagccactggatggtttcggcgagttatgtcacaggtataagtgcctgctcttagtggattccgtagctagtctgggtggcacgcctctctacatggaccgtcaggggattgacattctgtactcagggagtcaaaaggcgctgaatgcacctcccggaacctctctgatctcttttagtgacaaggctaagaagaagatgtacagccggaagacaaaaccgttcagcttttacctggatatcaagtggctcgctaatttctgggggtgtgacgatcagcctcggatgtatcatcacacgatccctgtgattagcctctactccctacgtgaaagcctcgccctgatcgctgagcaaggcctcgagaactcttggcgtcaacaccgagaggccgctgcatatttacacggaaggttgcaggccctgggactgcagctcttcgttaaggaccccgcactccggctccctacagtaaccaccgtggctgtgcctgctggatacgattggcgcgacatcgtttcctacgttatcgaccatttcgatatcgagatcatgggcggcttgggtccatctacaggtaaggttctgcgtattggtttgctggggtgcaatgcaactcgggaaaacgtggatcgggtaactgaagccctgagagctgccttgcaacactgcccaaaaaagaagcta

SEQ ID NO: 206 - DNA, 1176 bp, Artificial Sequence
  derived and/or modified sequence
atggcaagccacaagctcctcgtgaccccgcccaaggcgctcctcaagccgctcagcatcccgaaccagttgctgctggggccgggaccatccaacctgccgcctcgcatcatggcagcgggagggctccaaatgatcgggtccatgtcaaaggacatgtaccaaatcatggacgaaatcaaggagggaatccagtacgtctttcagaccaggaaccccctgacgctcgttatttccggatcaggtcattgtgccttggaggccgctctggtgaacgtgctcgaaccgggcgattccttccttgtgggagcgaacggcatctggggccagcgcgccgtggacatcggcgagcggattggggctcgcgtccatcctatgacgaaagacccaggaggacattacaccctgcaggaggtggaagaaggactcgcgcaacataagccggtgctgctgttcttgacgcacggagaatcatcgactggcgtgcttcagccattggatggcttcggcgaactgtgccatcgatacaagtgcctgctcctcgtggactcggtggcctctctgggcggcaccccgctgtacatggataggcagggcatcgatatcctgtacagcggatcacagaaagctctgaatgcgcctccgggaacttcactgatctccttttcagacaaggctaagaagaagatgtactcgagaaaaactaaacctttctcgttttacctcgatatcaagtggctcgctaacttctggggatgcgatgatcagccgcgcatgtaccaccacactatcccggtgatctccctctactcgctgcgggagtcgctcgccctcattgctgagcaggggctggaaaactcctggcgccagcacagagaggccgccgcctacctgcatggacgcctccaggcactgggtctgcagctctttgtgaaggatccggccctgcggctgcctactgtgaccaccgtggctgtgccggcgggatacgattggagggacatcgtctcgtacgtgatagaccacttcgatatcgagatcatgggagggctgggcccgtccacgggcaaggtgctgagaatcggcctgctgggatgcaacgcgacccgcgagaacgtggaccgcgtgactgaggcgcttagagcggccctgcagcattgcccaaagaagaaactc

SEQ ID NO: 207 - DNA, 1176 bp, Artificial Sequence
  derived and/or modified sequence
atggcatcgcataaactgctggtgacccctcccaaagcgctcctgaaaccgctttccattccaaaccaactgctcctgggacccggaccaagcaacctgcctcccagaatcatggcagcggggggccttcaaatgataggctcgatgtcaaaggatatgtatcaaatcatggacgaaatcaaggaaggaatccagtacgtgtttcagactagaaatccactgacgctggtgatctcgggctcaggccattgtgcactggaagcagcactcgtcaacgtgctggaacccggagacagctttctggtcggagccaatggaatctggggccagagagcagtcgacattggtgaacgcatcggagcgagagtgcaccctatgactaaggatcctggaggtcactacactcttcaggaagttgaggaaggactggcgcaacataagcctgtcctcctcttcctcactcatggcgagtcgagcaccggggtgctccaacctcttgacggttttggtgagctgtgccaccgctacaagtgcctgcttcttgtcgatagcgtggcctcactgggaggcacccctctttacatggatcgacaggggatcgatatcctttactcggggtcgcaaaaggcacttaacgcgccccctggtacctccctcatttcgttttccgataaggcaaaaaagaaaatgtactcacgaaagaccaagcccttttcattttaccttgacatcaagtggcttgcaaacttttgggggtgtgacgatcagccgcgtatgtaccaccataccatcccggtcatttcactctactcgcttagagaatcactggcactgattgctgaacaggggctcgaaaactcgtggaggcagcacagggaagctgccgcctacctgcacggtagactgcaggctctcggccttcaactgtttgtgaaggaccctgcgctgcggcttcctactgtcaccactgtggcagtgcctgccgggtacgactggcgggatatcgtgtcctacgtgatagatcatttcgatattgagattatgggagggttgggtccatcaactggaaaagtcctccggattggcctcttgggctgcaacgcaactcgcgaaaacgtggatagagtgactgaagcactgcgagcagccttgcaacattgtccaaagaaaaagctg

SEQ ID NO: 208 - DNA, 1176 bp, Artificial Sequence
  derived and/or modified sequence
atggctagccataaactcctggtcaccccacccaaggcccttctgaagccccttagcattccgaaccagctgctcctgggacccggcccatctaatctgcctcccagaatcatggcggcagggggcctgcagatgataggcagcatgtctaaagatatgtaccaaatcatggatgagatcaaagagggaatccagtacgttttccagactaggaaccccttaaccttagttatctctggttcaggccactgcgccctcgaagcagccctcgtcaacgttctggagcctggagatagctttctggtaggtgccaacggaatttggggtcagagggctgtggacataggggaaaggataggagctcgcgtgcatcccatgacgaaggaccccggaggtcactataccctgcaagaagtggaagaggggttagctcagcacaaacccgttttgttgttccttacgcatggcgagtcaagcacaggagtcctacagcccctcgatggattcggcgaactctgccatagatacaagtgcttgctcctcgtcgattccgtggctagtcttggaggcacaccgctgtacatggatagacaaggaatcgatatcctgtatagtggctctcaaaaagccctgaatgctcccccgggaacttccctgatctctttcagcgataaagctaagaagaagatgtactcgcgaaagacaaagcctttttcattctatctggatattaagtggcttgctaacttttgggggtgcgatgatcagcccaggatgtatcaccataccatccctgtaatctcgctttatagtttgcgcgagagtctcgctctgatagctgaacaaggcctggaaaactcctggaggcaacacagggaagccgctgcgtacctccacggacgcctccaagctctcggcctccagctcttcgtcaaggatccagcgcttcgtttgcctaccgttaccaccgttgcggttccggctgggtatgactggagggatatcgtttcatacgtgattgatcactttgacatcgagataatgggcggacttggaccctctaccgggaaggtcctgaggatcggcctgcttggatgcaacgctacccgcgaaaacgtggaccgggtcaccgaagctctgagagctgccctgcagcattgccctaaaaaaaaactc

SEQ ID NO: 209 - DNA, 1176 bp, Artificial Sequence
  derived and/or modified sequence
atggcatcacataaacttctggttacacctcccaaggctctgcttaaacctcttagtatccccaaccagctcctgcttggccccggcccgagtaatttgccacctcgcatcatggccgctggggggcttcagatgattggatccatgtccaaagatatgtatcagataatggatgagatcaaggagggaattcagtacgtttttcagacacgaaatcctctgaccctagtcatctccggctcaggacactgtgccctggaggcagcattagtgaatgtgttagaacctggcgactcctttctggtgggagccaacggtatttggggacagcgagccgtagatatcggtgaaaggatcggcgctagagttcaccctatgacgaaagatcccggcggccactacacacttcaggaggtggaagaaggtctggcccagcacaagcctgtactgctgttcttgacccacggagaaagcagtacgggagtgctgcagcccctggacggattcggcgaactctgccacaggtacaagtgtctgttgcttgtggatagcgttgcctctctaggcggcacccccctatatatggacagacaaggtatcgacattttatattccggaagccagaaggctctcaacgcgccacctggcacatccctcatttcgttttctgataaagccaaaaaaaaaatgtacagtaggaaaaccaagcccttcagtttctacttggacattaaatggttagctaatttttggggttgtgatgatcagcctaggatgtatcaccacaccattccggtcatttccctgtattctttgcgcgaatcactagccctgattgccgagcaggggttggagaacagttggcggcaacatcgtgaggcggccgcatacctgcacggccggctacaagcactgggtctgcagttatttgtaaaagatccggctctaaggcttcctactgttacaaccgtggccgtacctgccggttacgattggcgggatatcgtttcatatgtaattgatcatttcgacatcgagataatggggggtctgggcccatctacgggtaaggtcttgagaatcggactgttgggctgcaacgcgacccgcgagaacgtagatcgcgtgacagaagccctgcgggccgcgcttcagcattgccctaagaaaaagctg

SEQ ID NO: 210 - DNA, 1179 bp, Artificial Sequence
  derived and/or modified sequence
atggccagccacaagctgctggtgaccccccccaaggccctgctgaagcccctgagcatccccaaccagctgctgctgggccccggccccagcaacctgccccccagaatcatggccgccggcggcctgcagatgatcggcagcatgagcaaggacatgtaccagatcatggacgagatcaaggagggcatccagtacgtgttccagaccagaaaccccctgaccctggtgatcagcggcagcggccactgcgccctggaggccgccctggtgaacgtgctggagcccggcgacagcttcctggtgggcgccaacggcatctggggccagagagccgtggacatcggcgagagaatcggcgccagagtgcaccccatgaccaaggaccccggcggccactacaccctgcaggaggtggaggagggcctggcccagcacaagcccgtgctgctgttcctgacccacggcgagagcagcaccggcgtgctgcagcccctggacggcttcggcgagctgtgccacagatacaagtgcctgctgctggtggacagcgtggccagcctgggcggcacccccctgtacatggacagacagggcatcgacatcctgtacagcggcagccagaaggccctgaacgccccccccggcaccagcctgatcagcttcagcgacaaggccaagaagaagatgtacagcagaaagaccaagcccttcagcttctacctggacatcaagtggctggccaacttctggggctgcgacgaccagcccagaatgtaccaccacaccatccccgtgatcagcctgtacagcctgagagagagcctggccctgatcgccgagcagggcctggagaacagctggagacagcacagagaggccgccgcctacctgcacggcagactgcaggccctgggcctgcagctgttcgtgaaggaccccgccctgagactgcccaccgtgaccaccgtggccgtgcccgccggctacgactggagagacatcgtgagctacgtgatcgaccacttcgacatcgagatcatgggcggcctgggccccagcaccggcaaggtgctgagaatcggcctgctgggctgcaacgccaccagagagaacgtggacagagtgaccgaggccctgagagccgccctgcagcactgccccaagaagaagctgtag

SEQ ID NO: 211 - protein, 330 aa, Artificial Sequence
  derived and/or modified sequence
MQPQSVLHSGYFHPLLRAWQTATTTLNASNLIYPIFVTDVPDDIQPITSLPGVARYGVKRLEEMLRPLVEEGLRCVLIFGVPSRVPKDERGSAADSEESPAIEAIHLLRKTFPNLLVACDVCLCPYTSHGHCGLLSENGAFRAEESRQRLAEVALAYAKAGCQVVAPSDMMDGRVEAIKEALMAHGLGNRVSVMSYSAKFASCFYGPFRDAAKSSPAFGDRRCYQLPPGARGLALRAVDRDVREGADMLMVKPGMPYLDIVREVKDKHPDLPLAVYHVSGEFAMLWHGAQAGAFDLKAAVLEAMTAFRRAGADIIITYYTPQLLQWLKEE

SEQ ID NO: 212 - DNA, 993 bp, Artificial Sequence
  derived and/or modified sequence
atgcaaccccagtctgtgctgcactctggctactttcatcctcttctccgagcatggcagacagctaccacaacgttgaatgccagtaatcttatctaccctatcttcgtaacggacgtgcccgatgacattcaacctatcaccagtctgccaggtgtggctcgatatggcgtcaagaggctggaagaaatgctgcgcccgttggtggaggagggcctgcgatgtgtcctcatcttcggagtacctagtagagtgcctaaggatgaacgagggtccgccgctgatagcgaagaatcgccagctatcgaagccattcacctgctgaggaagacctttccgaacttgctggttgcttgtgacgtatgtttgtgtccctatacttctcacgggcattgcggcttgctttcggaaaatggcgctttccgggcggaagagagcaggcagcgattggccgaggttgcactagcatacgctaaagccggatgtcaggtcgtagcaccatccgacatgatggacggccgcgtcgaggccatcaaggaagctctgatggcgcatggcttggggaaccgggtgagtgtgatgagctactccgctaaatttgcaagctgtttctatggcccattcagggatgccgcgaagtcatcccctgctttcggagacaggaggtgctatcaattgcctccaggagctcgaggcctggcccttcgagctgtagatcgggatgtccgcgagggggccgacatgctgatggtgaaacctggaatgccgtaccttgatatcgtgagggaagtgaaagacaaacatcctgacctccctttggctgtatatcacgtgagtggcgagtttgccatgctttggcacggagcccaggcaggcgcttttgacctgaaggcggcagtactggaggccatgaccgcatttcgcagggctggtgcggatatcataatcacctattacacaccccaactattgcagtggctgaaagaagaatag

SEQ ID NO: 213 - DNA, 993 bp, Artificial Sequence
  derived and/or modified sequence
atgcagccccagagcgtgctgcacagcggctacttccaccccctgctgcgggcctggcagacagccaccaccaccctgaatgccagcaacctgatctaccccatctttgtgacagatgtgcctgatgacatccagcccatcaccagcctgcccggggtggcccgctatggagtgaagaggctggaggagatgctgcggcccctggtggaggagggcctgcgctgtgtgctgatctttggagtgcccagccgggtgcccaaggatgagcggggcagcgctgctgacagcgaggagagccctgccatcgaggccatccacctgctgaggaagaccttccccaacctgctggtggcctgtgatgtgtgcctgtgcccctacaccagccacggccactgcggcctgctgtctgaaaatggagccttccgggcagaggagagccggcagaggctggccgaggtggccctggcctatgccaaggccggctgccaggtggtggcccccagcgacatgatggatggccgggtggaggccatcaaggaggccctgatggcccacggcctgggcaacagagtgtctgtgatgagctacagcgccaagtttgccagctgcttctacggccccttcagagatgctgccaagagcagccctgccttcggggaccggcgctgctaccagctgcccccaggggcccggggcctggccctgcgggctgtggacagagatgtgcgggagggcgctgacatgctgatggtgaagccaggcatgccctacctggacatcgtgcgggaggtgaaggacaagcacccagacctgcccctggccgtgtaccacgtgtctggagaatttgccatgctgtggcatggagcccaggccggggcctttgacctgaaggctgctgtgctggaggccatgacagccttccggcgggccggggctgacatcatcatcacctactacaccccccagctgctgcagtggctgaaggaggagtag

SEQ ID NO: 214 - DNA, 993 bp, Artificial Sequence
  derived and/or modified sequence
atgcagccccagagcgtgctgcacagcggctacttccaccccctgctgagggcctggcagaccgccacaaccaccctgaatgcatcaaacctcatttatcccatcttcgtgaccgacgtccctgatgacatacaacccataacaagcttgccaggagttgcccgatacggggttaagcggctcgaggagatgctgcggcctctggtggaagaggggctgaggtgcgtactgattttcggtgtaccaagtcgcgtacctaaagatgaacgcgggtccgcagccgactctgaggaaagccctgcaatagaggccattcacctgttgagaaaaacattcccgaatctcctggtagcatgcgacgtgtgtctctgtccttatacctcccatgggcactgcggactgttgtccgaaaatggggcctttagagctgaggagtcacgtcagaggctggctgaagttgcattggcgtatgcaaaagctggctgccaggtggtcgcaccttccgacatgatggatggcagggtggaagcgataaaggaggcccttatggcccatggactgggtaatcgtgtctccgtgatgtcctactccgcaaagtttgcatcctgtttttacggacccttcagagacgcagcaaaaagctctcctgcatttggtgacagaaggtgttaccagcttccacctggagcacgaggcctggccctgcgcgccgtggacagggacgtgcgcgagggggctgacatgctgatggttaagcctggaatgccctacctcgacatcgtcagagaagtcaaagataagcaccccgaccttccccttgccgtctaccacgtgtccggggaattcgccatgctttggcacggcgcacaagccggagcatttgacctcaaggccgcagtactagaggcaatgactgccttcaggagagccggagccgatattattatcacttactatacacctcagctactgcaatggttgaaagaagagtag

SEQ ID NO: 215 - DNA, 993 bp, Artificial Sequence
  derived and/or modified sequence
atgcaaccacaaagtgtcctgcattcgggctacttccacccactgctgcgcgcatggcagacagctacaactacgctcaatgcttccaatctgatctaccctatcttcgttactgacgtgccggatgacatccaacccatcaccagcctccccggagttgccagatatggtgttaaacgcctcgaggaaatgctgaggcctctggtggaggaaggcttgagatgtgtcttgatcttcggggttccatcaagagtgccaaaagacgagaggggatccgccgctgactctgaagagagtccagccatcgaagccattcacctacttagaaagacattccctaaccttttggtggcatgtgacgtttgtctgtgtccctacacatcacacggtcactgtggcctcttgtccgagaacggcgctttccgtgccgaagaaagccggcagaggttggcagaggtggctctggcctacgctaaggcaggatgccaggtggtggcgccaagcgatatgatggacggacgggtggaagctataaaggaggctcttatggctcatgggttaggaaacagagtgtcagtaatgtcctatagcgccaagtttgccagttgcttctacggcccttttcgggacgccgcaaaatcatctcctgcattcggtgatcgcaggtgttatcagctgcctcccggtgccagagggctagctctgagagccgtggatcgtgatgtgcgggagggagccgacatgcttatggtgaaacctggaatgccctacctcgatatcgtgcgagaagtaaaagataaacatccagatttgccactggctgtataccatgtatcgggcgaatttgcaatgctgtggcacggtgcccaagctggcgcttttgatttgaaggccgcagtattggaggccatgaccgcattccggcgtgcaggcgctgacatcattatcacctactatactccacaactgctccagtggttaaaggaagaatag

SEQ ID NO: 216 - DNA, 993 bp, Artificial Sequence
  derived and/or modified sequence
atgcagccccagagcgtgctgcacagcggctacttccaccccctgctgagagcctggcagaccgccaccaccaccctgaacgccagcaacctgatctaccccatcttcgtgaccgacgtgcccgacgacatccagcccatcaccagcctgcccggcgtggccagatacggcgtgaagagactggaggagatgctgagacccctggtggaggagggcctgagatgcgtgctgatcttcggcgtgcccagcagagtgcccaaggacgagagaggcagcgccgccgacagcgaggagagccccgccatcgaggccatccacctgctgagaaagaccttccccaacctgctggtggcctgcgacgtgtgcctgtgcccctacaccagccacggccactgcggcctgctgagcgagaacggcgccttcagagccgaggagagcagacagagactggccgaggtggccctggcctacgccaaggccggctgccaggtggtggcccccagcgacatgatggacggcagagtggaggccatcaaggaggccctgatggcccacggcctgggcaacagagtgagcgtgatgagctacagcgccaagttcgccagctgcttctacggccccttcagagacgccgccaagagcagccccgccttcggcgacagaagatgctaccagctgccccccggcgccagaggcctggccctgagagccgtggacagagacgtgagagagggcgccgacatgctgatggtgaagcccggcatgccctacctggacatcgtgagagaggtgaaggacaagcaccccgacctgcccctggccgtgtaccacgtgagcggcgagttcgccatgctgtggcacggcgcccaggccggcgccttcgacctgaaggccgccgtgctggaggccatgaccgccttcagaagagccggcgccgacatcatcatcacctactacaccccccagctgctgcagtggctgaaggaggagtag

SEQ ID NO: 217 - protein, 587 aa, Artificial Sequence
  derived and/or modified sequence
MVTAAMLLQCCPVLARGPTSLLGKVVKTHQFLFGIGRCPILATQGPNCSQIHLKATKAGGDSPSWAKGHCPFMLSELQDGKSKIVQKAAPEVQEDVKAFKTDLPSSLVSVSLRKPFSGPQEQEQISGKVTHLIQNNMPGNYVFSYDQFFRDKIMEKKQDHTYRVFKTVNRWADAYPFAQHFSEASVASKDVSVWCSNDYLGMSRHPQVLQATQETLQRHGAGAGGTRNISGTSKFHVELEQELAELHQKDSALLFSSCFVANDSTLFTLAKILPGCEIYSDAGNHASMIQGIRNSGAAKFVFRHNDPDHLKKLLEKSNPKIPKIVAFETVHSMDGAICPLEELCDVSHQYGALTFVDEVHAVGLYGSRGAGIGERDGIMHKIDIISGTLGKAFGCVGGYIASTRDLVDMVRSYAAGFIFTTSLPPMVLSGALESVRLLKGEEGQALRRAHQRNVKHMRQLLMDRGLPVIPCPSHIIPIRVGNAALNSKLCDLLLSKHGIYVQAINYPTVPRGEELLRLAPSPHHSPQMMEDFVEKLLLAWTAVGLPLQDVSVAACNFCRRPVHFELMSEWERSYFGNMGPQYVTTYA

SEQ ID NO: 218 - protein, 222 aa, Artificial Sequence
  derived and/or modified sequence
  misc_feature (1)..(1): Xaa can be any naturally occurring amino acid
XLSFVRPQCRATDSPSWAKGHCPFMLSELQDGKSKIVQKAAPEVQEDVKAFKTDLPSSLVSVSLRKPFSGPQEQEQISGKVTHLIQNNMPGNYVFSYDQFFRDKIMEKKQDHTYRVFKTVNRWADAYPFAQHFSEASVASKDVSVWCSNDYLGMSRHPQVLQATQETLQRHGAGAGGTRNISGTSKFHVELEQELAELHQKDSALLFSSCFVANDSTLFTLA

SEQ ID NO: 219 - DNA, 669 bp, Artificial Sequence
  derived and/or modified sequence
taacttagcttcgtcagaccccagtgtagagcaactgactctccctcctgggccaagggccattgccccttcatgctgtcagagctgcaggacggaaagtccaaaattgtgcagaaggctgcacccgaggttcaggaggacgtcaaggcttttaagaccgatttgccatcaagtctagtgagcgttagcctccggaagcctttttcaggccctcaagaacaagaacagatcagcggaaaagtaacccacctcatccaaaacaatatgcccggtaattacgtcttttcctatgaccagttttttcgggataagataatggagaagaaacaggatcacacttaccgagtgttcaagacagtgaaccgttgggctgacgcctatccgtttgcccaacatttcagtgaggcctccgtggcatccaaggatgtctcagtgtggtgttctaacgactatctcggcatgtcaaggcacccacaagtgctgcaggcgacacaagaaacgctccagaggcatggagccggcgccggaggcacgcggaacatctcaggaacatcaaagtttcacgtggaactggaacaggaactggccgaactgcaccaaaaggactctgccctgctgttttcctcctgctttgttgctaatgattcaactttgttcacactcgcctag

SEQ ID NO: 220 - DNA, 669 bp, Artificial Sequence
  derived and/or modified sequence
tgactgagctttgtgcggccccagtgccgggccacagacagccccagctgggccaagggccactgccccttcatgctgtctgagctgcaggacggcaagagcaagatcgtgcagaaggccgcccctgaggtgcaggaggatgtgaaggccttcaagacagacctgcccagcagcctggtgtctgtgtccctgaggaagcccttcagcggcccccaggagcaggagcagatcagcggcaaggtgacccacctgatccagaacaacatgcctggcaactacgtgttctcctatgaccagttcttccgggacaagatcatggagaagaagcaggaccacacctacagagtcttcaagacagtgaaccgctgggcagatgcctacccctttgcccagcacttcagcgaggcctctgtggccagcaaggatgtgtctgtgtggtgcagcaatgactacctgggcatgagccgccacccccaggtgctgcaggccacccaggagaccctgcagagacatggagctggagctgggggcaccaggaacatcagcggcaccagcaagttccacgtggagctggagcaggagctggccgagctgcaccagaaggacagcgccctgctcttcagcagctgctttgtggccaatgacagcaccctcttcaccctggcctag

SEQ ID NO: 221 - DNA, 669 bp, Artificial Sequence
  derived and/or modified sequence
tgactgagcttcgtgcggccccagtgccgggccaccgacagcccctcttgggcgaagggccactgtccttttatgctcagcgagttacaggatggaaagagcaagatagtgcaaaaggcagctccagaggtgcaagaagacgtcaaggcctttaaaacagacctgccatcatcactcgtatctgtcagcttgcggaaaccgtttagtggccctcaggagcaggaacagataagcgggaaagtaacacacctgatccagaataacatgcctggaaactacgtcttcagttacgaccagttttttcgggataagatcatggagaaaaaacaggaccatacataccgcgtcttcaaaacagtgaaccggtgggccgatgcctacccattcgcccagcacttctccgaggccagcgttgcctctaaagatgtgagtgtgtggtgtagcaacgactatctggggatgagcaggcacccccaggtactgcaggctacccaagaaacactgcagcggcatggcgcgggcgctggcgggacacgaaacatctctgggacctctaagttccacgtcgagttagaacaggagctggccgaactgcaccagaaggattccgccctcctgtttagcagttgtttcgtggcgaatgactcgaccctttttacattggcatag

SEQ ID NO: 222 - DNA, 664 bp, Artificial Sequence
  derived and/or modified sequence
acctgtcattcgttcgtcctcagtgcagggcaacagattctccatcttgggcgaagggccactgtcccttcatgctgtcggaactccaggatgggaagagcaagattgtgcagaaggcagccccagaagtccaggaagatgtgaaggctttcaagacagatctgcctagctccctggtctcagtcagcctaaggaagccattttccggtccccaggagcaggagcagatctctgggaaggtcacacacctgattcagaacaatatgcctggaaactatgtcttcagttatgaccagtttttcagggacaagatcatggagaagaaacaggatcacacctaccgtgtgttcaagactgtgaaccgctgggctgatgcatatccctttgcccaacatttctctgaggcatctgtggcctcaaaggatgtgtccgtctggtgtagtaatgattacctgggcatgagccgacaccctcaggtcttgcaagccacacaggagaccctgcagcgtcatggtgctggagctggtggcacccgcaacatctcaggcaccagtaagtttcatgtggagcttgagcaggagctggctgagctgcaccagaaggactcagccctgctcttctcctcctgctttgttgccaatgactctactctcttcaccttggc

SEQ ID NO: 223 - DNA, 669 bp, Artificial Sequence
  derived and/or modified sequence
tgactgtcctttgtccgtccacagtgcagggccactgatagcccgtcctgggccaagggtcactgccccttcatgctgagcgagttgcaggacggtaagtcaaaaatcgtgcaaaaggccgctcctgaagttcaggaagatgtgaaggccttcaagaccgacttgccttcgtctcttgtaagtgtgagcctgagaaaacctttttcaggaccccaggagcaggaacagatctccggtaaggtgacacaccttatacagaataacatgcccggtaattacgtgttcagttacgatcaatttttccgagacaagataatggaaaaaaaacaagatcatacctatcgagtgttcaaaacagtgaacaggtgggccgatgcttatcccttcgcccagcattttagtgaggctagtgtagcaagtaaagacgtcagcgtgtggtgctccaatgactatcttggaatgagccggcaccctcaggtgctgcaagctacccaagaaactctgcagcgccacggtgcgggagcaggcggaactaggaacatcagtggaacctcgaaattccacgtcgaattagaacaagaattggccgaactccatcaaaaggactctgcacttctcttctcctcctgcttcgtagccaacgactcaacgctatttactcttgcctag

SEQ ID NO: 224 - DNA, 669 bp, Artificial Sequence
  derived and/or modified sequence
tgactgagcttcgtgagaccccagtgcagagccaccgacagccccagctgggccaagggccactgccccttcatgctgagcgagctgcaggacggcaagagcaagatcgtgcagaaggccgcccccgaggtgcaggaggacgtgaaggccttcaagaccgacctgcccagcagcctggtgagcgtgagcctgagaaagcccttcagcggcccccaggagcaggagcagatcagcggcaaggtgacccacctgatccagaacaacatgcccggcaactacgtgttcagctacgaccagttcttcagagacaagatcatggagaagaagcaggaccacacctacagagtgttcaagaccgtgaacagatgggccgacgcctaccccttcgcccagcacttcagcgaggccagcgtggccagcaaggacgtgagcgtgtggtgcagcaacgactacctgggcatgagcagacacccccaggtgctgcaggccacccaggagaccctgcagagacacggcgccggcgccggcggcaccagaaacatcagcggcaccagcaagttccacgtggagctggagcaggagctggccgagctgcaccagaaggacagcgccctgctgttcagcagctgcttcgtggccaacgacagcaccctgttcaccctggcctag

SEQ ID NO: 225 - protein, 745 aa, Artificial Sequence [sequence omitted]

SEQ ID NO: 226 - protein, 227 aa, Artificial Sequence
  derived and/or modified sequence
MDGRLRNPDQSLTEDVVAFAASVAHLYSNLTKPLLDVAVTSYTLLRAARSRGAGTAWPSAIAGLVVFLTANVLRAFSPKFGELVAEEARRKGELRYMHSRVVANSEEIAFYGGHEVELALLQRSYQDLASQINLILLERLWYVMLEQFLMKYVWSASGLLMVAVPIITATGYSESGETQGSKRIQARGLSPIPLGAELTRAQLSQPAAHFCCRGHRGPAASLDAFRG

SEQ ID NO: 227 - protein, 223 aa, Artificial Sequence
  derived and/or modified sequence
  misc_feature (1)..(1): Xaa can be any naturally occurring amino acid
XLFSTVAAPFYLPASSVGGFHLFIVASTDAEAVKKAALEKKEEELVSERTEAFTIARNLLTAAADAIERIMSSYKEVTELAGYTARVHEMFQVFEDVQRCHFKRPRELEDAQAGSGTIGRSGVRVEGPLKIRGQVVDVEQGIICENIPIVTPSGEVVVASLNIRVEEGMHLLITGPNGCGKSSLFRILGGLWPTYGGVLYKPPPQRMFYIPQRPYMSVGSLRD

SEQ ID NO: 228 - DNA, 684 bp, Artificial Sequence
  derived and/or modified sequence
atggatggcagactcaggaatcccgatcagtccctcacagaagacgttgttgcttttgctgcctcagttgctcacctttattcaaatttaacaaaaccactcctagatgtggctgtcacatcctatacactcctccgcgccgctcgttccagaggcgccggcacagcgtggcctagcgcaatcgccgggctggtggttttcctgactgctaacgtgctgagggctttcagtcctaaatttggcgagttagtcgccgaagaggctaggagaaaaggggaattgagatatatgcatagccgtgtggtagcaaactctgaagagatcgccttttatggtggccacgaagtagagctggctcttctgcagcggtcttatcaggatctagcgagtcagatcaatcttatactgctggagagactgtggtacgtgatgctcgagcagtttctcatgaagtatgtgtggagtgcttccggcctgctgatggtggccgtccctatcatcaccgctacaggctacagcgagtctggggaaacccagggatcaaaacgcatccaagccagagggcttagtcctatcccactgggtgcagagctcacacgagcgcagcttagccagcctgccgcccatttttgctgcagagggcatcgaggcccagcagccagcttagatgcttttaggggctag

SEQ ID NO: 229 - DNA, 672 bp, Artificial Sequence
  derived and/or modified sequence
tgactatttagcactgtggccgcgcccttttatctgcccgcatcttccgtagggggattccacctcttcatcgtggcgtctaccgatgccgaggccgtcaaaaaggccgctcttgagaagaaagaggaggagctcgtctctgagagaacagaagcttttacaattgctcggaatctgctcaccgccgcggcggatgcaattgagcgcataatgagcagctacaaagaagttacagaattagccggctacactgcacgggtacatgagatgtttcaggtttttgaggacgttcagagatgtcattttaaaagaccaagggagttggaagacgcccaggcaggatccggtactatcggaagaagtggggttcgcgtcgaggggcctttgaaaatcaggggacaagtggttgacgtggagcagggcattatctgcgagaacattccaattgtcactccaagcggcgaggttgtcgtcgcctcccttaacattagggtggaagagggcatgcacctgttgattaccggccccaatggttgcgggaagtcatccctgtttcggatcttgggcggactttggccaacctacgggggggtgctttataaacccccacctcagcgaatgttctacataccccagaggccctatatgagcgtgggatccctgcgtgactag

SEQ ID NO: 230 - DNA, 2238 bp, Artificial Sequence
  derived and/or modified sequence
atgccagtcttgagcagaccaaggccgtggcgaggcaacaccctgaagagaactgccgtgctactagccctcgcagcttatggcgcccacaaagtgtaccctctggttcgacagtgtcttgcccctgctagagggctccaggcacccgctggagaaccgacccaggaggcctccggcgtagcggccgcaaaagccggtatgaatagggttttcttgcagagactattatggcttctgaggctcctcttcccacgtgtgctctgtcgggaaacaggtctgctcgcgcttcacagtgcagctctggtcagccgaaccttcctgtctgtatatgttgcaagacttgatggaagacttgccagatgtatcgttcgaaaggatcccagagcctttggatggcagttactgcagtggcttctgattgcgcttcccgctacctttgtgaattctgccatccgttacctggaggggcagctggccctgagcttcaggtctagacttgtagcccatgcgtatagactgtacttctcacagcagacctattaccgagtctccaacatggatggccggctcagaaatccggaccaatccctgaccgaggatgtggtagctttcgccgcatctgtggcccatctatactccaacctcaccaaacctttactggatgtagcagtgacttcttataccctcctgagggccgccaggagcaggggagcgggaacagcatggcccagcgcaattgccggtctggtagtattcctcacagcgaacgtcctcagagcgttcagccccaagtttggcgaactggtcgctgaggaggctagaagaaagggtgaactgcgttatatgcactcacgcgtggttgcaaatagcgaagagatagccttctatggcggccacgaggtggaactggcgttgcttcaacggagctaccaggaccttgcatcacagatcaacctcatcttgttagaacgtttgtggtatgtgatgctggagcagtttctgatgaagtacgtgtggagcgcaagcggcttgctcatggttgccgtccctattatcactgccactggctacagcgaatctgacgcagaggcagtgaagaaggccgctctggagaagaaagaagaggaattggtttccgagaggaccgaagcgtttacaatcgcccgtaatttactgacagccgctgctgatgctatcgaaagaattatgtcttcatacaaggaagtgaccgaactggccggctacactgccagagtccacgaaatgtttcaagtcttcgaggatgtgcagcggtgccacttcaagaggcccagggaactggaagacgctcaagccggctctggtaccattggccggtccggcgtacgcgtggagggccccttgaagattcggggtcaagtagtcgacgttgaacagggaatcatttgtgagaacatccctatcgtgactcccagcggagaagtggtggttgcgagcctgaatatccgagtggaggaggggatgcacctcctcatcactggacccaacgggtgcggtaaaagttcactctttcggattttaggaggattatggccaacctatgggggggtgctttacaaacctccgccacagcgtatgttctacattccgcagcggccctacatgagtgtcgggtcactgcgagaccaggtgatctatcctgatagcgtggaagacatgcaacggaagggctacagtgagcaagacctggaagctatcctggacgtggtgcatctgcaccatattctgcagcgggaaggagggtgggaagccatgtgtgattggaaggatgtgctgtctggcggagagaagcagcgaattgggatggccagaatgttttaccatcgcccaaaatacgccctcctagacgagtgcacatcagcggtgagcatcgatgtggaaggtaaaatttttcaggcagctaaagacgccggcattgccctgctgagtatcactcacaggcctagtttatggaaatatcacacccacctgctgcagttcgatggagaaggtggatggaaattcgaaaaacttgacagtgctgcaagactgagcttgactgaggaaaaacagcgtctcgagcagcagctcgccggaatacctaaaatgcagagacggctgcaggaactgtgtcagatactgggcgaggcagtggcccctgctcacgttcctgcacccagcccacaaggaccgggagggcttcagggcgctagcacctag

SEQ ID NO: 231 - DNA, 684 bp, Artificial Sequence
  derived and/or modified sequence
atggatggccgcctgaggaacccagaccagagcctgacagaagatgtggtggcctttgctgcctctgtggcccacctgtacagcaacctgaccaagcccctgctggatgtggccgtgaccagctacaccctgctgcgggccgcccggagcagaggagctggaacagcctggcccagcgccatcgccggcctggtggtgttcctgacagccaacgtgctgcgggccttcagccccaagtttggagagctggtggccgaggaggcccggaggaaaggagagctgcgctacatgcacagccgggtggtggccaacagcgaggagatcgccttctatggaggccacgaggtggagctggccctgctgcagaggagctaccaggacctggccagccagatcaacctgatcctgctggagcggctgtggtacgtgatgctggagcagttcctgatgaagtatgtgtggagcgccagcggcctgctgatggtggccgtgcccatcatcacagccaccggctacagcgagagcggggagacccagggcagcaagaggatccaggcccggggcctgagccccatccccctgggcgctgagctgacccgggcccagctgagccagcctgctgcccacttctgctgccggggccaccggggccctgctgccagcctggatgccttccggggctag

SEQ ID NO: 232 - DNA, 672 bp, Artificial Sequence
  derived and/or modified sequence
tgactcttcagcacagtggccgcccccttctacctgcctgccagctctgtgggcggcttccacctgttcatcgtggccagcacagatgctgaggccgtgaagaaggccgccctggagaagaaggaggaggagctggtgtctgagaggacagaggccttcaccatcgccaggaacctgctgacagctgctgctgatgccatcgagcgcatcatgagcagctacaaggaggtgacagagctggccggctacacagcccgggtgcatgagatgttccaggtgtttgaagatgtgcagcgctgccacttcaagaggccccgggagctggaggatgcccaggccggcagcggcaccatcggccgctctggagtgcgggtggagggccccctgaagatccggggccaggtggtggatgtggagcagggcatcatctgtgagaacatccccatcgtgaccccatctggagaggtggtggtggccagcctgaacatccgggtggaggagggcatgcacctgctgatcaccggccccaacggctgcggcaagagcagcctcttccgcatcctgggcggcctgtggcccacctatggaggagtgctgtacaagcccccaccccagaggatgttctacatcccccagaggccctacatgtctgtgggcagcctgcgggactag

SEQ ID NO: 233 - DNA, 2238 bp, Artificial Sequence
  derived and/or modified sequence
atgcctgtgctgagccggccccggccctggaggggcaacaccctgaagaggacagctgtgctgctggccctggccgcctatggagcccacaaggtgtaccccctggtgcggcagtgcctggccccagcccggggcctgcaggccccagctggggagcccacccaggaggccagcggcgtggccgccgccaaggccggcatgaacagagtcttcctgcagaggctgctgtggctgctgcggctgctcttcccccgggtgctgtgccgggagaccggcctgctggccctgcacagcgctgccctggtgtccaggaccttcctgtctgtgtatgtggcccggctggatggccgcctggcccgctgcatcgtgaggaaggacccccgggccttcggctggcagctgctgcagtggctgctgattgccctgcctgccacctttgtgaacagcgccatccgctacctggagggccagctggccctgtccttccgcagccggctggtggcccacgcctaccgcctgtacttcagccagcagacctactacagagtgagcaacatggatggccgcctgagaaatccagaccagagcctgacagaagatgtggtggcctttgctgcctctgtggcccacctgtacagcaacctgaccaagcccctgctggatgtggccgtgaccagctacaccctgctgcgggccgcccggagcagaggagctggaacagcctggcccagcgccatcgccggcctggtggtgttcctgacagccaacgtgctgcgggccttcagccccaagtttggagagctggtggccgaggaggcccggaggaagggggagctgcgctacatgcacagccgggtggtggccaacagcgaggagatcgccttctacggcggccacgaggtggagctggccctgctgcagaggagctaccaggacctggccagccagatcaacctgatcctgctggagcggctgtggtacgtgatgctggagcagttcctgatgaagtatgtgtggagcgccagcggcctgctgatggtggccgtgcccatcatcacagccaccggctacagcgagagtgatgctgaggccgtgaagaaggccgccctggagaagaaggaggaggagctggtgtctgagaggacagaggccttcaccatcgccaggaacctgctgacagctgctgctgatgccatcgagcgcatcatgagcagctacaaggaggtgacagagctggccggctacacagcccgggtgcatgagatgttccaggtgtttgaagatgtgcagcgctgccacttcaagaggccccgggagctggaggatgcccaggccggcagcggcaccatcggccgctctggagtgcgggtggagggccccctgaagatccggggccaggtggtggatgtggagcagggcatcatctgtgagaacatccccatcgtgaccccatctggagaggtggtggtggccagcctgaacatccgggtggaggagggcatgcacctgctgatcaccggccccaacggctgcggcaagagcagcctcttccgcatcctgggcggcctgtggcccacctatggaggagtgctgtacaagcccccaccccagaggatgttctacatcccccagaggccctacatgtctgtgggcagcctgcgggaccaggtgatctacccagacagcgtggaggacatgcagaggaagggctacagcgagcaggacctggaggccatcctggatgtggtgcacctgcaccacatcctgcagcgggagggcggctgggaggccatgtgtgactggaaggatgtgctgagcggcggggagaagcagagaattggcatggccaggatgttctaccaccggcccaagtatgccctgctggatgagtgcaccagcgctgtgtccattgatgtggagggcaagatcttccaggccgccaaggatgctggcatcgccctgctgagcatcacccaccggcccagcctgtggaagtaccacacccacctgctgcagtttgatggagagggcggctggaagtttgagaagctggacagcgctgcccggctgagcctgacagaggagaagcagaggctggagcagcagctggccggcatccccaagatgcagaggcggctgcaggagctgtgccagatcctgggggaggccgtggccccagcccacgtgcctgcccccagcccccagggccctgggggcctgcagggcgccagcacctag

SEQ ID NO: 234 - DNA, 684 bp, Artificial Sequence
  derived and/or modified sequence
atggacggccggctgcggaaccccgaccagagcctgaccgaggacgtagtggccttcgccgcctcagtcgctcatctttatagtaaccttaccaaaccactgctggacgttgcagttacatcttataccctactgcgtgccgcaaggtctcgcggagccggcacagcatggcccagcgcgatcgctgggcttgtagttttcctgacggccaacgtgctgagagcattttcacccaaattcggagaattagtcgcagaggaggcacggaggaagggcgaacttcgatacatgcatagtcgggtcgtggccaatagtgaggaaatcgcattctatggggggcacgaagtggagcttgcactgcttcagcggtcctatcaggatctcgcaagccagatcaatcttatacttctcgaaagactatggtacgttatgctcgagcagttcctcatgaaatatgtgtggagcgcctcaggactgttgatggttgctgtccctatcattaccgcaaccggatactctgaatccggagaaacacagggttccaaacggatacaggcacggggtctctctccgattcctctgggggccgagctgacaagagcccaactctctcaacctgctgcccacttctgttgcagaggtcataggggaccagccgcctcactggacgctttcaggggttag

SEQ ID NO: 235 - DNA, 672 bp, Artificial Sequence
  derived and/or modified sequence
tgactgttcagcaccgtggccgcccccttctacctgcccgccagcagtgtggggggatttcatttgtttattgtggcctccaccgatgccgaggcagtcaagaaagcagctctggagaaaaaggaagaggagctggtcagtgagcggacagaagccttcaccattgcacggaatcttcttacagcagccgccgatgcgatcgaacgcatcatgtcatcctacaaggaagtgacagaactggccggatacacagctagggtgcacgagatgttccaggtgttcgaggacgtacagcggtgccatttcaaacggccccgggagctggaagacgctcaggcagggtcaggaacgatcggcaggtccggtgttcgagtcgaaggacccctgaagatacgtggtcaggtggtagatgtggaacaggggattatctgcgagaacattccaatcgtgacgccctctggggaggtcgtggttgcatccttgaatattcgcgtagaggaaggcatgcacctgctaatcactggacctaacggttgtggcaagtcaagcttatttagaattctggggggactgtggcctacttatggcggagtcctgtacaaaccacctcctcagagaatgttctacatcccccagcgaccttacatgtctgtgggctctctccgcgactag

SEQ ID NO: 236 - DNA, 2238 bp, Artificial Sequence
  derived and/or modified sequence
atgcccgtgctgagccggccccggccctggcggggcaacaccctgaaacggaccgccgtcctgttggcccttgctgcctatggggcgcacaaggtttacccgctcgtacgtcagtgcctggcaccagccaggggcctgcaggcaccagcgggcgaacccacccaagaagcatccggggtggccgccgctaaggccggaatgaatcgcgtatttctgcagcgtctgttatggttgctccggctcttattccctcgcgtcctgtgcagggagaccggattattggccctgcacagtgccgcactggtctcaaggacgttcctgtctgtgtatgtagcaaggctggacgggagactagcaaggtgcattgtcagaaaggatccacgggcttttgggtggcaactgcttcagtggctgctcattgcactgccagccacctttgtgaattcggccatacggtaccttgaaggtcagctagctctgtcattcaggtctaggctggtagcacacgcctaccggctgtatttttctcagcagacctactaccgcgtttccaacatggatggcagactgaggaaccctgatcagagtctgacggaggacgtagtggcatttgccgccagcgtcgcccacctgtattctaatctcacaaagcctctcctggatgttgctgtcaccagttatacactgctgagggcagccagatctagaggcgccggtacggcctggcctagtgctatagcaggcctcgtcgtttttcttactgctaatgtcctgagggctttcagtcccaagttcggtgagttggtggctgaggaggctcgccgcaaaggggagctgagatacatgcactctcgggtcgttgccaattcagaagagattgccttctatggaggacacgaggtggaattggcgctgttgcagcgctcttaccaagacttggctagtcagattaacttaatcctgctcgagcgactgtggtacgtcatgcttgagcaattcttgatgaaatatgtgtggagtgcgagcgggttgctcatggttgccgtaccaatcatcacggctacgggttacagtgagtcagatgctgaggccgtcaaaaaagcagcactcgaaaagaaggaagaagaactggtgtccgagcgcaccgaggccttcacaattgcccgcaatcttcttactgcagccgccgacgccattgaaagaataatgagttcatacaaggaagttactgagctcgccggctacactgccagagtccatgagatgttccaggtgtttgaggacgtacagaggtgtcattttaagcggcctagggagcttgaagacgctcaggccggaagcggcacaatcggcagaagcggcgtgcgtgtcgaggggccactaaagatccgcggccaggtggtggacgtggaacagggaattatttgcgagaacattcctatcgtgacacccagtggcgaagtagtggtcgcttccttaaatatccgtgttgaagagggcatgcacctgttaattacagggcccaatggatgcggcaagagtagcctgtttcggattttaggtggactttggcccacttacggcggagtgctgtacaaaccgcccccccagcgcatgttttatattccccagagaccctatatgtccgttggatcactcagggatcaggtaatttaccctgacagtgtggaggacatgcagcgtaagggctattcggaacaggacctcgaggctatactcgatgtggttcacctgcatcacattctgcagcgcgaaggcggctgggaggctatgtgcgactggaaggacgttcttagcggcggcgagaaacagcggattgggatggcaagaatgttttaccatcgccccaagtatgcccttctggatgagtgcacatccgccgtgtccattgacgtggaaggaaaaatttttcaggccgcaaaagatgccggaattgccctgctgtcaattacacataggccctccctctggaagtatcatactcatcttctccagtttgatggcgaaggcggctggaagtttgagaagctggattccgcggcgcggttgtctctgacagaggagaagcagcgcctcgagcagcagttggctgggatccccaaaatgcaacgaagactccaagagctatgtcagatcctcggtgaggccgtggcaccagcacacgttcccgcaccctcaccacagggtcctggcggcttgcagggcgcttcaacctag

SEQ ID NO: 237 - DNA, 684 bp, Artificial Sequence
  derived and/or modified sequence
atggatggcaggctgcgtaatcctgaccaaagcctgacggaggacgtcgtggccttcgccgcatctgtcgcgcacctgtactccaaccttacaaagcccttgcttgatgtggccgttaccagctacacactactgagggcggctcgaagccgtggagccggtacagcctggccaagtgccatcgccggattagtggtctttcttaccgccaatgtgctcagagctttttcaccaaagttcggggagttggttgccgaagaagcgaggagaaagggtgaactcaggtatatgcatagtagagtcgtcgcaaattcggaagagatagcattttatggaggccatgaagtagagcttgctctgttgcagcggagctatcaggacctggctagtcagattaatctcattctgttagaacgactgtggtatgtgatgctggaacaattcctgatgaaatatgtatggtcagcgtcaggactgctcatggtggcagtgccgatcattaccgccaccggttatagcgagagcggtgaaactcaggggtccaagcgcattcaggccagaggactgtctcccattcccctcggagccgaattaacacgtgcacagctctcacagccggcagcgcacttctgttgtcgcggtcaccgtggccctgccgcaagcctagatgcgtttaggggctag

SEQ ID NO: 238 - DNA, 672 bp, Artificial Sequence
  derived and/or modified sequence
taactgttctccaccgtcgctgcccctttttatctgcctgcttccagcgtgggagggttccacctcttcatcgtggcatctaccgatgctgaggctgtgaaaaaggccgcactagaaaagaaagaggaggaactggtctccgagagaaccgaggcattcaccattgctagaaacctcttgactgctgcagccgatgctatcgaaagaatcatgtcttcttacaaagaggtgaccgagctggcaggttacacggcgagagtgcacgaaatgttccaggtgtttgaggacgtgcagcgctgtcacttcaaacgaccccgagaacttgaggacgctcaggcaggttcagggacgatagggcgatccggcgtacgcgtcgagggcccattgaagattcgaggccaggttgtcgacgtggaacaggggatcatctgtgagaatatccccatcgttacaccgtcaggagaggtggtcgtcgctagcctgaatattcgggtcgaggagggaatgcacctattgataaccgggcctaatgggtgtggcaaaagttcacttttccggattcttggtggtctttggcctacatacggaggggttctctacaagccaccgcctcagagaatgttttacatccctcaacgaccttatatgtcagtggggagtctaagggattag

SEQ ID NO: 239 - DNA, 2238 bp, Artificial Sequence
  derived and/or modified sequence
atgcctgttctttctcgaccacgtccctggagaggcaatacactcaaacggacagctgtactcctggcactggcagcctacggagcccacaaggtgtacccactggtgcggcagtgtctcgccccagcccgtggactccaggcccctgctggcgagccaactcaggaagccagcggcgtcgcggctgccaaagccggtatgaacagagtgtttctgcaacgactgctgtggcttctgcgccttttattcccaagagttctgtgccgggagaccggcctcctggccctccacagcgctgccttggtaagccggacttttctcagcgtatacgtggccagacttgacggacggcttgcacggtgtatcgtcagaaaggatccacgagcttttggttggcaattgttacagtggctgctcatcgcgctgcctgccaccttcgtgaactccgcaataaggtacctagagggtcagctggccctcagtttcaggagccggttagtcgcccatgcttataggctttacttttcgcaacaaacatactatcgtgtgtcaaatatggatggaaggttgagaaaccccgatcagtcactgaccgaggacgtggtcgcctttgcagctagtgttgctcacttgtacagtaacctcactaagccattacttgacgtggcagtgacatcatacactcttctgagagccgcacggtcccgcggagccggtacggcttggcccagcgctatcgccggactggttgtattcttgaccgccaatgtacttcgggcattttccccgaaatttggggagctcgttgcagaggaggctcggagaaaaggtgaactgcgctacatgcacagtcgggtggtcgccaactctgaagaaattgcattctacggtgggcatgaggttgagctggccctccttcagcgttcttaccaagatctggctagccagatcaatctgatccttctcgagcgcctatggtatgtgatgctagaacagtttctgatgaagtacgtttggagtgcaagcggcctgttgatggtggccgtgccaatcattactgccacggggtactcagagagtgacgctgaggcagtgaaaaaggcagccctggagaagaaagaagaggagctagtgagtgaacggactgaagcttttaccatagcccgaaacctgcttaccgctgccgctgacgccatagaacgaatcatgagctcttataaggaggtcacagaactagctgggtataccgctagagttcatgagatgttccaagtcttcgaggatgtgcagcgctgccatttcaaacgtccgagagaattagaggacgcccaggcagggagtgggactattgggaggagtggagttagggtcgaaggacctctgaaaatcagagggcaggtcgtggatgtggagcaaggtatcatttgtgagaatattccaatcgtgacaccttccggagaagtcgtcgttgccagccttaatatccgggtggaagagggaatgcatctcctgattactgggcctaatggctgcggaaagtcctccctttttcggattcttggaggcctttggccaacatacggtggtgtgttgtacaagcctcctccccagaggatgttttacattcctcagagaccctacatgtccgtgggcagtctacgcgaccaagtcatctatcctgatagcgtggaagatatgcagcggaagggctactccgaacaggacttggaggcaatccttgacgtcgttcacctgcaccacatactccagcgggagggtgggtgggaggccatgtgcgactggaaagacgtgctgtctggaggtgagaaacagaggatcggcatggccagaatgttctatcatcgcccaaagtatgcactgttagacgagtgcacgagcgccgtgagcatcgatgtggaaggtaagatttttcaagctgctaaggatgccggaatcgccctgctgagtattacacacagaccatctctgtggaaataccatacccacttattgcagttcgacggggaaggcggatggaagttcgagaaactagacagtgccgctcgtctttccctgactgaagaaaaacagcgattggaacagcaactggcgggaattcctaaaatgcagcggagactccaagagttatgtcaaatcttgggagaggccgttgctccagcccacgtgcccgctccatctccccaaggacctggcggattgcaaggtgcctctacatag

SEQ ID NO: 240 - DNA, 3664 bp, Artificial Sequence
  derived and/or modified sequence
gccaggctgcggagcggacggacgcgcctggtgccccggggaggggcgccaccgggggaggaggaggaggagaaggtggagaggaagagacgccccctctgcccgagacctctcaaggccctgacctcaggggccagggcactgacaggacaggagagccaagttcctccacttgggctgcccgaagaggccgcgaccctggagggccctgagcccaccgcaccaggggccccagcaccaccccgggggcctaaagcgacagtctcaggggccatcgcaaggtttccagttgcctagacaacaggcccagggtcagagcaacaatccttccagccacctgcctcaactgctgccccaggcaccagccccagtccctacgcggcagccagcccaggtgacatgccggtgctctccaggccccggccctggcgggggaacacgctgaagcgcacggccgtgctcctggccctcgcggcctatggagcccacaaagtctaccccttggtgcgccagtgcctggccccggccaggggtcttcaggcgcccgccggggagcccacgcaggaggcctccggggtcgcggcggccaaagctggcatgaaccgggtattcctgcagcggctcctgtggctcctgcggctgctgttcccccgggtcctgtgccgggagacggggctgctggccctgcactcggccgccttggtgagccgcaccttcctgtcggtgtatgtggcccgcctggacggaaggctggcccgctgcatcgtccgcaaggacccgcgggcttttggctggcagctgctgcagtggctcctcatcgccctccctgctaccttcgtcaacagtgccatccgttacctggagggccaactggccctgtcgttccgcagccgtctggtggcccacgcctaccgcctctacttctcccagcagacctactaccgggtcagcaacatggacgggcggcttcgcaaccctgaccagtctctgacggaggacgtggtggcctttgcggcctctgtggcccacctctactccaacctgaccaagccactcctggacgtggctgtgacttcctacaccctgcttcgggcggcccgctcccgtggagccggcacagcctggccctcggccatcgccggcctcgtggtgttcctcacggccaacgtgctgcgggccttctcgcccaagttcggggagctggtggcagaggaggcgcggcggaagggggagctgcgctacatgcactcgcgtgtggtggccaactcggaggagatcgccttctatgggggccatgaggtggagctggccctgctacagcgctcctaccaggacctggcctcgcagatcaacctcatccttctggaacgcctgtggtatgttatgctggagcagttcctcatgaagtatgtgtggagcgcctcgggcctgctcatggtggctgtccccatcatcactgccactggctactcagagtcagatgcagaggccgtgaagaaggcagccttggaaaagaaggaggaggagctggtgagcgagcgcacagaagccttcactattgcccgcaacctcctgacagcggctgcagatgccattgagcggatcatgtcgtcgtacaaggaggtgacggagctggctggctacacagcccgggtgcacgagatgttccaggtatttgaagatgttcagcgctgtcacttcaagaggcccagggagctagaggacgctcaggcggggtctgggaccataggccggtctggtgtccgtgtggagggccccctgaagatccgaggccaggtggtggatgtggaacaggggatcatctgcgagaacatccccatcgtcacgccctcaggagaggtggtggtggccagcctcaacatcagggtggaggaaggcatgcatctgctcatcacaggccccaatggctgcggcaagagctccctgttccggatcctgggtgggctctggcccacgtacggtggtgtgctctacaagcccccaccccagcgcatgttctacatcccgcagaggccctacatgtctgtgggctccctgcgtgaccaggtgatctacccggactcagtggaggacatgcaaaggaagggctactcggagcaggacctggaagccatcctggacgtcgtgcacctgcaccacatcctgcagcgggagggaggttgggaggctatgtgtgactggaaggacgtcctgtcgggtggcgagaagcagagaatcggcatggcccgcatgttctaccacaggcccaagtacgccctcctggatgaatgcaccagcgccgtgagcatcgacgtggaaggcaagatcttccaggcggccaaggacgcgggcattgccctgctctccatcacccaccggccctccctgtggaaataccacacacacttgctacagttcgatggggagggcggctggaagttcgagaagctggactcagctgcccgcctgagcctgacggaggagaagcagcggctggagcagcagctggcgggcattcccaagatgcagcggcgcctccaggagctctgccagatcctgggcgaggccgtggccccagcgcatgtgccggcacctagcccgcaaggccctggtggcctccagggtgcctccacctgacacaaccgtccccggcccctgccccgcccccaagctcggatcacatgaaggagacagcagcacccacccatgcacgcaccccgcccctgcatgcctggcccctcctcctagaaaacccttcccgccctcgggaaagtagatgtggagggtggcgccctgcgtaaccctcgccctgtccctcccactccctgggggcgctgttccacagtgactgggccctgtccagggcagtgagtcctctactttgctccgtggaggaagctggggtacaaggggcccagtgctggccacacagcagcgcagccgagccccaggagcccgtcaggccacagcccctggcactgcaggtggcctccctccagagactcgagtccccatgattccctcctcgtcagtctctcaaagaccccatggtccatcccctgagggtggtcagccaaggctcccgttccgtgggatgccataaaagccgcccagtgggacccacagtcacacagagcgcctcacctgcatcctctcccccacaagagccccaaagatcccacgggagaggggagagggacgcacagcactgcctgccaagcgagaatgcaggccccgccccctcggcccctcaccacctctttctacagcctaatttattggattccctattcgtagccatctccgtggccaatgtgactaccgtgccagcagcgggggcggcccagcctctgagtcccgtggggccccggctcccaccggtgccaaacccagcccctgcggccgtcaccccgccagcctacactgccagccgccaccggggcacacgggcctctgcttgccagccaggagtgcggacaccatgttcccagctcagtgccaaagaggggtcaccagggggagctgtctgcggagccagcgcctgcccgagagagaccccaccgccaccgtgtgcctttcccgggccctcagccctcgggccgggcaccacccccagtccccccagtaaaagcctccactggcaaatgcagtccttcctccctgc

SEQ ID NO: 241 - DNA, 842 bp, Artificial Sequence
  derived and/or modified sequence
gcaacatggacgggcggcttcgcaaccctgaccagtctctgacggaggacgtggtggcctttgcggcctctgtggcccacctctactccaacctgaccaagccactcctggacgtggctgtgacttcctacaccctgcttcgggcggcccgctcccgtggagccggcacagcctggccctcggccatcgccggcctcgtggtgttcctcacggccaacgtgctgcgggccttctcgcccaagttcggggagctggtggcagaggaggcgcggcggaagggggagctgcgctacatgcactcgcgtgtggtggccaactcggaggagatcgccttctatgggggccatgaggtggagctggccctgctacagcgctcctaccaggacctggcctcgcagatcaacctcatccttctggaacgcctgtggtatgttatgctggagcagttcctcatgaagtatgtgtggagcgcctcgggcctgctcatggtggctgtccccatcatcactgccactggctactcagagtcaggtgagacccagggctccaagaggatccaggccaggggcctgtcccccataccgctgggtgctgagctcacgagggcccaactcagccagcccgccgcccacttctgctgccggggccaccgaggccctgctgccagccttgatgctttcagaggttgagctcgccttgcccctccttgttgccttttgccctgcgcgcacctcacgccctttgttaccactcagacaagcccaggactgcaagtcaggaacactacatgtcacttctccaggcacagataccctcacccacctgtccctgtcctcaaccca

SEQ ID NO: 242 - DNA, 668 bp, Artificial Sequence
  derived and/or modified sequence
gactgttctccacagtggctgccccattttaccttcccgccagcagtgttggagggttccaccttttcatcgtggctagcactgatgcagaggccgtgaagaaggcagccttggaaaagaaggaggaggagctggtgagcgagcgcacagaagccttcactattgcccgcaacctcctgacagcggctgcagatgccattgagcggatcatgtcgtcgtacaaggaggtgacggagctggctggctacacagcccgggtgcacgagatgttccaggtatttgaagatgttcagcgctgtcacttcaagaggcccagggagctagaggacgctcaggcggggtctgggaccataggccggtctggtgtccgtgtggagggccccctgaagatccgaggccaggtggtggatgtggaacaggggatcatctgcgagaacatccccatcgtcacgccctcaggagaggtggtggtggccagcctcaacatcagggtggaggaaggcatgcatctgctcatcacaggccccaatggctgcggcaagagctccctgttccggatcctgggtgggctctggcccacgtacggtggtgtgctctacaagcccccaccccagcgcatgttctacatcccgcagaggccctacatgtctgtgggctccctgcgtgac

SEQ ID NO: 243 - DNA, 684 bp, Artificial Sequence
  derived and/or modified sequence
atggacggcagactgagaaaccccgaccagagcctgaccgaggacgtggtggccttcgccgccagcgtggcccacctgtacagcaacctgaccaagcccctgctggacgtggccgtgaccagctacaccctgctgagagccgccagaagcagaggcgccggcaccgcctggcccagcgccatcgccggcctggtggtgttcctgaccgccaacgtgctgagagccttcagccccaagttcggcgagctggtggccgaggaggccagaagaaagggcgagctgagatacatgcacagcagagtggtggccaacagcgaggagatcgccttctacggcggccacgaggtggagctggccctgctgcagagaagctaccaggacctggccagccagatcaacctgatcctgctggagagactgtggtacgtgatgctggagcagttcctgatgaagtacgtgtggagcgccagcggcctgctgatggtggccgtgcccatcatcaccgccaccggctacagcgagagcggcgagacccagggcagcaagagaatccaggccagaggcctgagccccatccccctgggcgccgagctgaccagagcccagctgagccagcccgccgcccacttctgctgcagaggccacagaggccccgccgccagcctggacgccttcagaggctag

SEQ ID NO: 244 - DNA, 672 bp, Artificial Sequence
  derived and/or modified sequence
tgactgttcagcaccgtggccgcccccttctacctgcccgccagcagcgtgggcggcttccacctgttcatcgtggccagcaccgacgccgaggccgtgaagaaggccgccctggagaagaaggaggaggagctggtgagcgagagaaccgaggccttcaccatcgccagaaacctgctgaccgccgccgccgacgccatcgagagaatcatgagcagctacaaggaggtgaccgagctggccggctacaccgccagagtgcacgagatgttccaggtgttcgaggacgtgcagagatgccacttcaagagacccagagagctggaggacgcccaggccggcagcggcaccatcggcagaagcggcgtgagagtggagggccccctgaagatcagaggccaggtggtggacgtggagcagggcatcatctgcgagaacatccccatcgtgacccccagcggcgaggtggtggtggccagcctgaacatcagagtggaggagggcatgcacctgctgatcaccggccccaacggctgcggcaagagcagcctgttcagaatcctgggcggcctgtggcccacctacggcggcgtgctgtacaagccccccccccagagaatgttctacatcccccagagaccctacatgagcgtgggcagcctgagagactag

SEQ ID NO: 245 - DNA, 2238 bp, Artificial Sequence
  derived and/or modified sequence
atgcccgtgctgagcagacccagaccctggagaggcaacaccctgaagagaaccgccgtgctgctggccctggccgcctacggcgcccacaaggtgtaccccctggtgagacagtgcctggcccccgccagaggcctgcaggcccccgccggcgagcccacccaggaggccagcggcgtggccgccgccaaggccggcatgaacagagtgttcctgcagagactgctgtggctgctgagactgctgttccccagagtgctgtgcagagagaccggcctgctggccctgcacagcgccgccctggtgagcagaaccttcctgagcgtgtacgtggccagactggacggcagactggccagatgcatcgtgagaaaggaccccagagccttcggctggcagctgctgcagtggctgctgatcgccctgcccgccaccttcgtgaacagcgccatcagatacctggagggccagctggccctgagcttcagaagcagactggtggcccacgcctacagactgtacttcagccagcagacctactacagagtgagcaacatggacggcagactgagaaaccccgaccagagcctgaccgaggacgtggtggccttcgccgccagcgtggcccacctgtacagcaacctgaccaagcccctgctggacgtggccgtgaccagctacaccctgctgagagccgccagaagcagaggcgccggcaccgcctggcccagcgccatcgccggcctggtggtgttcctgaccgccaacgtgctgagagccttcagccccaagttcggcgagctggtggccgaggaggccagaagaaagggcgagctgagatacatgcacagcagagtggtggccaacagcgaggagatcgccttctacggcggccacgaggtggagctggccctgctgcagagaagctaccaggacctggccagccagatcaacctgatcctgctggagagactgtggtacgtgatgctggagcagttcctgatgaagtacgtgtggagcgccagcggcctgctgatggtggccgtgcccatcatcaccgccaccggctacagcgagagcgacgccgaggccgtgaagaaggccgccctggagaagaaggaggaggagctggtgagcgagagaaccgaggccttcaccatcgccagaaacctgctgaccgccgccgccgacgccatcgagagaatcatgagcagctacaaggaggtgaccgagctggccggctacaccgccagagtgcacgagatgttccaggtgttcgaggacgtgcagagatgccacttcaagagacccagagagctggaggacgcccaggccggcagcggcaccatcggcagaagcggcgtgagagtggagggccccctgaagatcagaggccaggtggtggacgtggagcagggcatcatctgcgagaacatccccatcgtgacccccagcggcgaggtggtggtggccagcctgaacatcagagtggaggagggcatgcacctgctgatcaccggccccaacggctgcggcaagagcagcctgttcagaatcctgggcggcctgtggcccacctacggcggcgtgctgtacaagccccccccccagagaatgttctacatcccccagagaccctacatgagcgtgggcagcctgagagaccaggtgatctaccccgacagcgtggaggacatgcagagaaagggctacagcgagcaggacctggaggccatcctggacgtggtgcacctgcaccacatcctgcagagagagggcggctgggaggccatgtgcgactggaaggacgtgctgagcggcggcgagaagcagagaatcggcatggccagaatgttctaccacagacccaagtacgccctgctggacgagtgcaccagcgccgtgagcatcgacgtggagggcaagatcttccaggccgccaaggacgccggcatcgccctgctgagcatcacccacagacccagcctgtggaagtaccacacccacctgctgcagttcgacggcgagggcggctggaagttcgagaagctggacagcgccgccagactgagcctgaccgaggagaagcagagactggagcagcagctggccggcatccccaagatgcagagaagactgcaggagctgtgccagatcctgggcgaggccgtggcccccgcccacgtgcccgcccccagcccccagggccccggcggcctgcagggcgccagcacctag

SEQ ID NO: 246 - protein, 223 aa, Artificial Sequence
  derived and/or modified sequence
MAHRFPALTQEQKKDSQGKLFRNILKEKGIVVGIKLDQGGAPLAGTNKETTIQGLDGLSERCAQYKKDGVDFGKWRAVLRIADQCPSSLAIQENANALARYASICQQNGLVPIVEPEVIPDGDHDLEHCQYVTEKVLAAVYKALNDHHVYLEGTLLKPNMVTAGHACTKKYTPEQVAMATVTALHRTVPAAVPGICFLSGGMSEEDATLNLNAIPTRVQCPPA

SEQ ID NO: 247 - protein, 364 aa, Artificial Sequence
  derived and/or modified sequence
MAHRFPALTQEQKKELSEIAQSIVANGKGILAADESVGTMGNRLQRIKVENTEENRRQFREILFSVDSSINQSIGGVILFHETLYQKDSQGKLFRNILKEKGIVVGIKLDQGGAPLAGTNKETTIQGLDGLSERCAQYKKDGVDFGKWRAVLRIADQCPSSLAIQENANALARYASICQQNGLVPIVEPEVIPDGDHDLEHCQYVTEKVLAAVYKALNDHHVYLEGTLLKPNMVTAGHACTKKYTPEQVAMATVTALHRTVPAAVPGICFLSGGMSEEDATLNLNAINLCPLPKPWKLSFSYGRALQASALAAWGGKAANKEATQEAFMKRAMANCQAAKGQYVHTGSSGAASTQSLFTACYTY

SEQ ID NO: 248 - protein, 316 aa, Artificial Sequence
  derived and/or modified sequence
MAHRFPALTQEQKKELSEIAQSIVANGKGILAADESVGTMGNRLQRIKVENTEENRRQFREILFSVDSSINQSIGGVILFHETLYQKDSQGKLFRNILKEKGIVVGIKLDQGGAPLAGTNKETTIQGLDGLSERCAQYKKDGVDFGKWRAVLRIADQCPSSLAIQENANALARYASICQQNGLVPIVEPEVIPDGDHDLEHCQYVTEKVLAAVYKALNDHHVYLEGTLLKPNMVTAGHACTKKYTPEQVAMATVTALHRTVPAAVPGICFLSGGMSEEDATLNLNAINLCPLPKPWKLSFSGVARLQTRRQPRRLL

SEQ ID NO: 249 - DNA, 672 bp, Artificial Sequence
  derived and/or modified sequence
atggcgcacagattccctgctttgacgcaggagcaaaaaaaagattcccagggaaagctcttccggaacatcctaaaagagaaagggattgtcgttggtatcaagctggatcagggcggagcccctttagccgggaccaacaaagagacaacaatccaggggctcgatggcctgtctgagcggtgtgcccagtataagaaggacggtgttgacttcgggaaatggcgcgccgtgctgcgcattgcggatcagtgccccagctccctggcaatccaggaaaacgccaacgccttggctaggtatgcatctatatgccagcagaatggtcttgtaccaattgtggaaccagaagtcataccagatggcgatcatgatctggagcactgtcagtacgtaactgaaaaagtgttggcagctgtgtataaagcgctcaacgaccaccacgtctacctggagggcacactgctgaaacctaatatggttaccgccggtcatgcctgtaccaagaagtacacaccagagcaggtcgccatggctaccgttaccgctttgcacagaacagtccccgccgctgtccctggtatctgcttcttatcagggggcatgtcagaagaagacgcaacactgaacctgaacgccattcccacacgcgtgcaatgtccgcccgcgtag

SEQ ID NO: 250 - DNA, 1095 bp, Artificial Sequence
  derived and/or modified sequence
atggcccaccggtttccagcattgactcaggagcaaaaaaaagaattgtcggaaatcgcccagtccatagttgccaatgggaaggggattctcgcagccgacgaaagcgtcggcacaatgggaaatcggctccagcgcattaaagttgagaacacagaagagaatagaaggcagtttagagagatattgttttcagtggattcaagtattaatcagtcaattggcggtgtcattctcttccatgaaaccctgtaccagaaggattcccagggcaagctgtttaggaatatattaaaagagaaggggattgtagtgggtattaaactagaccagggaggtgcaccactggcaggcaccaataaagagacgactatccaagggctagacgggctgtccgaaagatgtgcacaatataagaaagacggcgtggatttcggcaagtggagagccgtcctacggatcgcagatcaatgtcccagttcgcttgctatccaggaaaacgcaaacgctctggcacgctacgccagcatctgtcagcagaacggtttagtgcctattgtagaacctgaggtgatccccgacggagatcacgacctggaacactgccagtacgtgaccgaaaaagtgttggccgccgtttataaggcactgaacgatcaccatgtttacctggaaggcacccttctgaaacccaatatggttacagctggacacgcttgtaccaagaagtatacccccgagcaggtggcgatggctacggtgaccgccttgcacaggaccgtgcctgcggcggtgcccggcatttgtttcttatccggcggaatgtctgaagaggatgccacactgaatctgaatgccatcaatctgtgccccctgcccaagccttggaaactgtcattctcatacgggcgcgctctgcaggcatccgcgttggccgcctggggcggcaaggccgctaacaaggaggcaacgcaggaagcattcatgaagcgggctatggccaattgtcaagccgccaaggggcagtacgtacacactgggagctcaggcgcggcttcaactcaatcattgtttactgcctgttatacatactag

SEQ ID NO: 251 - DNA, 951 bp, Artificial Sequence
  derived and/or modified sequence
atggctcaccgatttccggccttaacacaagagcaaaaaaaggagttgtcagagatagcccagagtatagtcgccaatggcaaggggatattggctgctgacgagagcgtgggaactatgggcaatcgcttgcagagaatcaaggtggagaacacagaggaaaatcggagacaattccgggagatcctgttcagtgtcgactcttcgattaaccagtcaatcggtggagtgattctgttccacgagaccctttaccaaaaggatagccagggaaagttattccggaatatcttgaaggaaaaaggtatcgtcgtgggcattaagctcgatcaagggggggcaccgctcgccggaaccaacaaagagaccaccattcagggactcgatggcctaagcgaacgctgtgctcagtacaagaaggacggtgtggattttggcaagtggcgcgctgtccttcgcatcgctgaccaatgccctagcagcctggcaatccaagagaatgccaacgccttggcccgctatgcctcgatctgtcagcagaacgggcttgtacccatcgtggagccagaggtcattcccgatggcgatcacgatctcgagcactgtcagtacgtgactgaaaaggtcctggctgcagtatacaaagcactgaacgatcaccacgtctatctcgagggaacactgctcaagcctaatatggttacagcgggacacgcatgcaccaaaaagtatactcccgaacaggttgcgatggcaacggttactgcgctccacagaactgttcccgccgctgtcccaggaatctgtttcctctccgggggtatgagtgaagaggatgctacactcaacctcaatgctattaacttatgccccctcccaaaaccctggaaactatcctttagcggtgtggcccgcctacaaactcgtcgacagcccaggcggctgctttag

SEQ ID NO: 252 - DNA, 672 bp, Artificial Sequence
  derived and/or modified sequence
atggcccaccgcttccctgccctgacccaggagcagaagaaggacagccagggcaagctgttcaggaacatcctgaaggagaagggcatcgtggtgggcatcaagctggaccagggcggggcccccctggccggcaccaacaaggagaccaccatccagggcctggatggcctgtctgagcgctgtgcccagtacaagaaggatggagtggactttgggaagtggagggctgtgctgagaattgctgaccagtgccccagcagcctggccatccaggagaatgccaatgccctggcccgctatgccagcatctgccagcagaatggcctggtgcccatcgtggagcctgaggtgatcccagatggagaccatgacctggagcactgccagtatgtgacagagaaggtgctggccgctgtgtacaaggccctgaatgaccaccacgtgtacctggagggcaccctgctgaagcccaacatggtgacagctggccacgcctgcaccaagaagtacaccccagagcaggtggccatggccaccgtgacagccctgcacaggacagtgcctgctgctgtgcccggcatctgcttcctgagcggcggcatgtctgaagaagatgccaccctgaacctgaatgccatccccaccagggtgcagtgccccccagcctag

SEQ ID NO: 253 - DNA, 1095 bp, Artificial Sequence
  derived and/or modified sequence
atggcccaccgcttccctgccctgacccaggagcagaagaaggagctgtctgaaattgcccagagcatcgtggccaacgggaagggcatcctggccgcagatgagagcgtgggcaccatgggcaaccggctgcagaggatcaaggtggagaacacagaggagaacagacggcagttccgggagatcctcttctctgtggacagcagcatcaaccagagcatcggcggcgtcatcctcttccacgagaccctgtaccagaaggacagccagggcaagctgttcaggaacatcctgaaggagaagggcatcgtggtgggcatcaagctggaccagggcggggcccccctggccggcaccaacaaggagaccaccatccagggcctggatggcctgtctgagcgctgtgcccagtacaagaaggatggagtggactttgggaagtggagggctgtgctgagaattgctgaccagtgccccagcagcctggccatccaggagaatgccaatgccctggcccgctatgccagcatctgccagcagaatggcctggtgcccatcgtggagcctgaggtgatcccagatggagaccatgacctggagcactgccagtatgtgacagagaaggtgctggccgctgtgtacaaggccctgaatgaccaccacgtgtacctggagggcaccctgctgaagcccaacatggtgacagctggccacgcctgcaccaagaagtacaccccagagcaggtggccatggccaccgtgacagccctgcacaggacagtgcctgctgctgtgcccggcatctgcttcctgagcggcggcatgtctgaggaggatgccaccctgaacctgaatgccatcaacctgtgccccctgcccaagccctggaagctgtccttctcctatggccgggccctgcaggccagcgccctggccgcctggggcggcaaggccgccaacaaggaggccacccaggaggccttcatgaagagggccatggccaactgccaggccgccaagggccagtatgtgcacacaggcagcagtggagctgccagcacccagagcctcttcaccgcctgctacacctactag

SEQ ID NO: 254 - DNA, 951 bp, Artificial Sequence
  derived and/or modified sequence
atggcccaccgcttccctgccctgacccaggagcagaagaaggagctgtctgaaattgcccagagcatcgtggccaacgggaagggcatcctggccgcagatgagagcgtgggcaccatgggcaaccggctgcagaggatcaaggtggagaacacagaggagaacagacggcagttccgggagatcctcttctctgtggacagcagcatcaaccagagcatcggcggcgtcatcctcttccacgagaccctgtaccagaaggacagccagggcaagctgttcaggaacatcctgaaggagaagggcatcgtggtgggcatcaagctggaccagggcggggcccccctggccggcaccaacaaggagaccaccatccagggcctggatggcctgtctgagcgctgtgcccagtacaagaaggatggagtggactttgggaagtggagggctgtgctgagaattgctgaccagtgccccagcagcctggccatccaggagaatgccaatgccctggcccgctatgccagcatctgccagcagaatggcctggtgcccatcgtggagcctgaggtgatcccagatggagaccatgacctggagcactgccagtatgtgacagagaaggtgctggccgctgtgtacaaggccctgaatgaccaccacgtgtacctggagggcaccctgctgaagcccaacatggtgacagctggccacgcctgcaccaagaagtacaccccagagcaggtggccatggccaccgtgacagccctgcacaggacagtgcctgctgctgtgcccggcatctgcttcctgagcggcggcatgtctgaggaggatgccaccctgaacctgaatgccatcaacctgtgccccctgcccaagccctggaagctgtccttctctggagtggcccggctgcagacccggcggcagccccggcggctgctgtag

SEQ ID NO: 255 - DNA, 1957 bp, Artificial Sequence
  derived and/or modified sequence
cttatttggcagctgctgcctcacccacagcttttgatatctaggaggactcttctctcccaaactacctgtcaccatggcccaccgatttccagccctcacccaggagcagaagaaggacagccagggaaagctgttcagaaacatcctcaaggaaaaggggatcgtggtgggaatcaagttagaccaaggaggtgctcctcttgcaggaacaaacaaagaaaccaccattcaagggcttgatggcctctcagagcgctgtgctcagtacaagaaagatggtgttgactttgggaagtggcgtgctgtgctgaggattgccgaccagtgtccatccagcctcgctatccaggaaaacgccaacgccctggctcgctacgccagcatctgtcagcagaatggactggtacctattgttgaaccagaggtaattcctgatggagaccatgacctggaacactgccagtatgttactgagaaggtcctggctgctgtctacaaggccctgaatgaccatcatgtttacctggagggcaccctgctaaagcccaacatggtgactgctggacatgcctgcaccaagaagtatactccagaacaagtagctatggccaccgtaacagctctccaccgtactgttcctgcagctgttcctggcatctgctttttgtctggtggcatgagtgaagaggatgccactctcaacctcaatgctatacctactagggtccaatgcccgccagcctagctccagtgcttctagtaggagggctgaaagggagcaacttttcctccaatcctggaaattcgacacaattagatttgaactgctggaaatacaacacatgttaaatcttaagtacaagggggaaaaaataaatcagttattgaaacataaaaatgaataccaaggacctgatcaaatttcacacagcagtttccttgcaacactttcagctccccatgctccagaatacccacccaagaaaataataggctttaaaacaatatcggctcctcatccaaagaacaactgctgattgaaacacctcattagctgagtgtagagaagtgcatcttatgaaacagtcttagcagtggtaggttgggaaggagatagctgcaaccaaaaaagaaataaatattctataaaccttcagctgctatcgggtttcacttttctgctcttgctgtccaaagactcagtgtatttcattacttttgactctactagacatgactgggtttcaacagtaaaggtcttcaactcttgctagtcattggaatcaagccgcaaaattttaaaaactgagatgctcaggccacaccccagctcaattaaatcagaaaccctagacttgggatcctctaactattagatttcttaaagctccctcagtaattccaatgtacagtcaagtttgagaactaccaatctaaatttcaagtttgagggtatttgaaaattaaagccattcacaatacgaagccagctaaaaatgtagaatgattttgagcaacttgtggagtataataagagaattaatgtgacttcaatgcttggagcattcttgttcaagtggcccaggtttggtgaaacaggactaccttgtcatctgcacgtccaggcatatttcgtagttttgcagtaaataatattcacataatgatactgtattgactttcaattttcagaattaacctatagttacagcacttaagacaaccagagttataaaagagaatttaaatattataactttggacaatataaaagtgatgatttaactgacagaagctaggaaatataagggggaggagaagtggaagaaagcaaagagagtcaggaatactacttaaaactgatgggttaagaaatagtgctttaattctatttaagtaataaaagaaatggatgtaaatcataaaaatatatatctaaaattaaaatattgat

SEQ ID NO: 256 - DNA, 2451 bp, Artificial Sequence
  derived and/or modified sequence
aaaaacatgatgagaagtctataaaaattgtgtgctaccaaagatctgtcttatttggcagctgctgcctcacccacagcttttgatatctaggaggactcttctctcccaaactacctgtcaccatggcccaccgatttccagccctcacccaggagcagaagaaggagctctcagaaattgcccagagcattgttgccaatggaaaggggatcctggctgcagatgaatctgtaggtaccatggggaaccgcctgcagaggatcaaggtggaaaacactgaagagaaccgccggcagttccgagaaatcctcttctctgtggacagttccatcaaccagagcatcgggggtgtgatccttttccacgagaccctctaccagaaggacagccagggaaagctgttcagaaacatcctcaaggaaaaggggatcgtggtgggaatcaagttagaccaaggaggtgctcctcttgcaggaacaaacaaagaaaccaccattcaagggcttgatggcctctcagagcgctgtgctcagtacaagaaagatggtgttgactttgggaagtggcgtgctgtgctgaggattgccgaccagtgtccatccagcctcgctatccaggaaaacgccaacgccctggctcgctacgccagcatctgtcagcagaatggactggtacctattgttgaaccagaggtaattcctgatggagaccatgacctggaacactgccagtatgttactgagaaggtcctggctgctgtctacaaggccctgaatgaccatcatgtttacctggagggcaccctgctaaagcccaacatggtgactgctggacatgcctgcaccaagaagtatactccagaacaagtagctatggccaccgtaacagctctccaccgtactgttcctgcagctgttcctggcatctgctttttgtctggtggcatgagtgaagaggatgccactctcaacctcaatgctatcaacctttgccctctaccaaagccctggaaactaagtttctcttatggacgggccctgcaggccagtgcactggctgcctggggtggcaaggctgcaaacaaggaggcaacccaggaggcttttatgaagcgggccatggctaactgccaggcggccaaaggacagtatgttcacacgggttcttctggggctgcttccacccagtcgctcttcacagcctgctatacctactagggtccaatgcccgccagcctagctccagtgcttctagtaggagggctgaaagggagcaacttttcctccaatcctggaaattcgacacaattagatttgaactgctggaaatacaacacatgttaaatcttaagtacaagggggaaaaaataaatcagttattgaaacataaaaatgaataccaaggacctgatcaaatttcacacagcagtttccttgcaacactttcagctccccatgctccagaatacccacccaagaaaataataggctttaaaacaatatcggctcctcatccaaagaacaactgctgattgaaacacctcattagctgagtgtagagaagtgcatcttatgaaacagtcttagcagtggtaggttgggaaggagatagctgcaaccaaaaaagaaataaatattctataaaccttcagctgctatcgggtttcacttttctgctcttgctgtccaaagactcagtgtatttcattacttttgactctactagacatgactgggtttcaacagtaaaggtcttcaactcttgctagtcattggaatcaagccgcaaaattttaaaaactgagatgctcaggccacaccccagctcaattaaatcagaaaccctagacttgggatcctctaactattagatttcttaaagctccctcagtaattccaatgtacagtcaagtttgagaactaccaatctaaatttcaagtttgagggtatttgaaaattaaagccattcacaatacgaagccagctaaaaatgtagaatgattttgagcaacttgtggagtataataagagaattaatgtgacttcaatgcttggagcattcttgttcaagtggcccaggtttggtgaaacaggactaccttgtcatctgcacgtccaggcatatttcgtagttttgcagtaaataatattcacataatgatactgtattgactttcaattttcagaattaacctatagttacagcacttaagacaaccagagttataaaagagaatttaaatattataactttggacaatataaaagtgatgatttaactgacagaagctaggaaatataagggggaggagaagtggaagaaagcaaagagagtcaggaatactacttaaaactgatgggttaagaaatagtgctttaattctatttaagtaataaaagaaatggatgtaaatcataaaaatatatatctaaaattaaaatattgat

SEQ ID NO: 257 - DNA, 1033 bp, Artificial Sequence
  derived and/or modified sequence
atctgtcttatttggcagctgctgcctcacccacagcttttgatatctaggaggactcttctctcccaaactacctgtcaccatggcccaccgatttccagccctcacccaggagcagaagaaggagctctcagaaattgcccagagcattgttgccaatggaaaggggatcctggctgcagatgaatctgtaggtaccatggggaaccgcctgcagaggatcaaggtggaaaacactgaagagaaccgccggcagttccgagaaatcctcttctctgtggacagttccatcaaccagagcatcgggggtgtgatccttttccacgagaccctctaccagaaggacagccagggaaagctgttcagaaacatcctcaaggaaaaggggatcgtggtgggaatcaagttagaccaaggaggtgctcctcttgcaggaacaaacaaagaaaccaccattcaagggcttgatggcctctcagagcgctgtgctcagtacaagaaagatggtgttgactttgggaagtggcgtgctgtgctgaggattgccgaccagtgtccatccagcctcgctatccaggaaaacgccaacgccctggctcgctacgccagcatctgtcagcagaatggactggtacctattgttgaaccagaggtaattcctgatggagaccatgacctggaacactgccagtatgttactgagaaggtcctggctgctgtctacaaggccctgaatgaccatcatgtttacctggagggcaccctgctaaagcccaacatggtgactgctggacatgcctgcaccaagaagtatactccagaacaagtagctatggccaccgtaacagctctccaccgtactgttcctgcagctgttcctggcatctgctttttgtctggtggcatgagtgaagaggatgccactctcaacctcaatgctatcaacctttgccctctaccaaagccctggaaactaagtttctctggggtggcaaggctgcaaacaaggaggcaacccaggaggcttttatga

SEQ ID NO: 258 - DNA, 672 bp, Artificial Sequence
  derived and/or modified sequence
atggcccaccggttccccgccctgacccaggagcagaagaaggactcgcagggtaaactgttcaggaacatactcaaagaaaagggtatagtggtaggaatcaagttagatcaagggggggcaccattagcaggtacaaacaaagagactaccatacagggactggacgggctgtctgagaggtgtgcccaatataagaaagacggagtggacttcggaaagtggcgggctgttttgcggatcgccgaccagtgccccagctccctggccattcaagagaatgcaaatgcacttgcaaggtatgccagcatctgtcagcaaaacgggctcgttcctatagttgagccagaagtgattccggacggcgatcacgatctcgagcactgtcaatacgtaactgagaaggtcttagcagccgtgtacaaggccctgaatgaccatcatgtctaccttgaaggaacactgctcaagcctaacatggtgaccgcgggccacgcctgcacaaagaagtataccccagagcaggtggccatggccactgttaccgccctgcaccggacagtgccagccgcggttcctgggatatgcttcctctcagggggcatgtctgaggaggatgccaccctcaacctgaacgccataccaacgagagtgcaatgccccccagcatag

SEQ ID NO: 259 - DNA, 1095 bp, Artificial Sequence
  derived and/or modified sequence
atggcccaccggttccccgccctgacccaggagcagaagaaggagctgagcgagatcgctcagtccatcgtggcaaatgggaaaggtatccttgctgcggatgagagcgttggcaccatgggcaaccgtttgcagcgcattaaggtggagaatacagaagaaaatcggcgccagtttcgtgaaattctcttctctgtcgactccagcattaatcagtcaattggtggggtaatcctttttcatgaaactttgtaccaaaaggatagccaaggtaaactgttccgcaacattttgaaggagaagggaatcgtggtcggaatcaaactggatcagggtggcgccccactagcggggaccaacaaagagactacgatccaggggttagacggtctgagcgagcgatgcgctcagtacaagaaagatggagtggactttggaaagtggcgcgccgtactccgcattgcagaccaatgcccctcttcccttgcaatccaggagaacgccaatgcgctcgctagatacgcctccatctgccagcagaatggtcttgtacccattgttgaaccagaggtgattcctgatggcgatcatgacctggaacactgtcagtatgtcacggagaaagttttggccgctgtgtataaggcgctgaacgatcaccacgtgtacctggaaggaaccctactaaagcctaatatggtgaccgcgggccatgcatgtacaaaaaagtacacaccggagcaggtggcaatggccaccgttacagcactgcacagaacggtcccggctgctgtcccagggatatgttttttgtcaggcgggatgtctgaagaggatgcaaccctcaatctgaacgctattaatctttgcccgctcccaaagccatggaagctctcatttagctacggtcgggcccttcaggccagtgcgctcgctgcttggggtggaaaggcagctaacaaggaggcaactcaggaagcattcatgaagagggctatggcaaattgccaggccgccaaaggccagtacgtgcacaccgggagcagtggagcagcctctactcagtccctgttcaccgcttgctatacttactag

SEQ ID NO: 260 - DNA, 951 bp, Artificial Sequence
  derived and/or modified sequence
atggcccaccggttccccgccctgacccaggagcagaagaaggagctttccgaaattgctcagagtatcgtagccaatggaaaaggcattctcgccgccgacgagagcgtcggtacaatgggaaatcgactgcaacgaattaaggttgagaatacagaggagaaccggcgacaattccgggagatcttgttcagcgttgatagctccataaatcaatcaattggcggcgttattctgttccatgaaactctctatcagaaggatagtcagggcaagctgttcaggaatatcctcaaagagaaggggatcgtggtgggaatcaagctggaccagggaggcgctcccctggccgggaccaacaaggagacaactatccagggcctcgacggtctgtccgagaggtgcgcgcaatataagaaggatggcgtagattttggaaaatggagggctgtgctccgcattgccgatcagtgcccatcatctctggccatccaggagaatgccaatgctctcgcccgatacgccagcatttgccagcaaaatggcctagtgcctattgtcgaacccgaagtcattcccgatggggaccatgacctggaacactgtcagtatgtcactgaaaaggtactggctgctgtctataaggcactaaacgaccaccacgtctacctggaaggcactttattaaagcccaacatggtgaccgcaggacatgcctgcacgaaaaaatataccccagagcaggtggccatggctactgtgactgcactccaccggaccgtccccgctgccgtaccaggcatctgttttctgagcggtgggatgtctgaagaggatgccaccttaaacttgaatgccatcaacttgtgcccgctgcctaagccttggaagctctctttctccggtgtggctcgactgcagacaagacgacagccccgtagactgctttag

SEQ ID NO: 261 - DNA, 672 bp, Artificial Sequence
  derived and/or modified sequence
atggcacaccggtttcccgcactgactcaggagcagaagaaagattcccaggggaaactttttcggaacattttgaaggaaaagggcatcgttgtcggtatcaaactggaccagggcggagccccactcgccggaactaataaggagaccacaatacaggggctcgacggcctgagtgaacggtgcgcgcaatacaagaaagatggcgtagatttcgggaaatggagagccgtcttacgcatcgctgaccaatgtcctagctctctggcgattcaggagaatgctaacgccctggcccgatacgcttctatctgtcagcagaacggactcgtaccaattgtggagcccgaagttattcctgatggggaccatgatttagagcattgccaatatgtgacagagaaggtgctggcagctgtgtataaggctttaaacgaccaccatgtgtaccttgagggtaccctgttgaaaccaaatatggtcacggctggacacgcatgtacaaagaagtataccccagagcaggtggccatggcaacagtgactgccctccaccggaccgtccctgctgcagtgcccggtatttgctttctgtctggtggtatgtctgaggaagacgcaacgctgaacttgaacgccattccaactcgggtgcaatgtccaccagcttag

SEQ ID NO: 262 - DNA, 1095 bp, Artificial Sequence
  derived and/or modified sequence
atggctcataggtttccagccctgacacaggagcaaaaaaaggagctgagcgaaattgctcagagcattgttgccaacggcaagggaatactagcagctgatgagagcgtgggaacaatgggcaacagattacaacggataaaggtggagaacaccgaggagaacaggcgtcaattcagggaaatcctcttttctgtcgactcaagcatcaatcagagcatcggaggagttattctgtttcacgagactttgtatcagaaggactctcagggaaaactgtttcgcaatatcctcaaagaaaaaggtatcgtggtcggcatcaagctggaccaggggggtgcaccactggcgggtactaacaaggagacaacaattcaaggactggatgggttgtcggaacgctgcgctcagtataaaaaggatggggttgactttggcaaatggagggcagtcctacgaattgcggatcagtgcccatcctcattggcaattcaagaaaacgctaacgcccttgctcggtacgcatccatttgtcaacagaacgggctcgtgcccattgttgagccagaggtgattccagatggcgaccacgacttggagcactgtcaatatgtgaccgaaaaggtcctggccgcagtctataaggccctgaacgaccaccatgtgtacctggagggaacattgctgaagcccaacatggttacagctggacacgcatgcactaaaaagtacaccccagagcaggtggccatggcaacggtcactgcccttcatcggactgtccctgctgccgttccagggatttgttttctgagcggcggtatgagcgaagaggacgccacgctgaacttgaatgctatcaacctctgccccctccccaaaccatggaaactctccttcagttacgggagagccctccaggcttcagccttggcagcttggggaggcaaggccgctaataaggaagcaactcaggaggccttcatgaaacgcgcaatggctaattgccaagccgcaaaagggcagtatgtgcacacgggctctagtggggctgcctctacacagagcctcttcacagcatgttacacctactag

SEQ ID NO: 263 - DNA, 951 bp, Artificial Sequence
  derived and/or modified sequence
atggctcaccgatttcctgccctcacccaggagcagaaaaaagagctcagtgaaattgcgcagagcatcgtcgccaatggcaaggggattctggcggctgatgagtccgtcggcacgatgggtaaccgcctgcaaaggataaaagtggagaacacggaggagaacaggcgacagttccgggagatcctatttagcgtagatagttccattaaccaatcaattggaggggtcattttatttcacgagactctctaccaaaaggacagccagggcaagctattcaggaatatactaaaggagaaaggcatcgtggtagggatcaaactggaccagggcggagctcctctggccggtaccaacaaggagacgacaatccaagggctcgatggcttgagtgaacggtgtgcgcagtataagaaagacggagtagacttcggtaagtggcgcgcagtgctccgcatcgccgatcagtgcccctcctcactggccatacaggaaaatgccaacgccctagccagatacgcatctatttgccaacaaaacggcttagtgcccatcgttgaaccagaggtcatacccgacggagaccacgatctggaacattgccaatacgtgacagaaaaggttctcgcagctgtatataaggctctgaacgaccaccatgtctatctcgaaggaacgttgctgaaaccgaatatggtgaccgccggacatgcctgcacaaaaaagtacacccccgagcaggtggccatggcgactgtaaccgctttacaccgcacagtgcccgctgcagtgcccggaatatgctttctcagtggcggaatgtcagaagaagatgctaccctgaatttgaacgctatcaacctgtgtcccttgccaaaaccatggaagctgagcttttctggagtggccaggcttcagacgcgaaggcagccccgtcgcttgctgtag

SEQ ID NO: 264 - DNA, 672 bp, Artificial Sequence
  derived and/or modified sequence
atggcccacagattccccgccctgacccaggagcagaagaaggacagccagggcaagctgttcagaaacatcctgaaggagaagggcatcgtggtgggcatcaagctggaccagggcggcgcccccctggccggcaccaacaaggagaccaccatccagggcctggacggcctgagcgagagatgcgcccagtacaagaaggacggcgtggacttcggcaagtggagagccgtgctgagaatcgccgaccagtgccccagcagcctggccatccaggagaacgccaacgccctggccagatacgccagcatctgccagcagaacggcctggtgcccatcgtggagcccgaggtgatccccgacggcgaccacgacctggagcactgccagtacgtgaccgagaaggtgctggccgccgtgtacaaggccctgaacgaccaccacgtgtacctggagggcaccctgctgaagcccaacatggtgaccgccggccacgcctgcaccaagaagtacacccccgagcaggtggccatggccaccgtgaccgccctgcacagaaccgtgcccgccgccgtgcccggcatctgcttcctgagcggcggcatgagcgaggaggacgccaccctgaacctgaacgccatccccaccagagtgcagtgcccccccgcctag

SEQ ID NO: 265 - DNA, 1095 bp, Artificial Sequence
  derived and/or modified sequence
atggcccacagattccccgccctgacccaggagcagaagaaggagctgagcgagatcgcccagagcatcgtggccaacggcaagggcatcctggccgccgacgagagcgtgggcaccatgggcaacagactgcagagaatcaaggtggagaacaccgaggagaacagaagacagttcagagagatcctgttcagcgtggacagcagcatcaaccagagcatcggcggcgtgatcctgttccacgagaccctgtaccagaaggacagccagggcaagctgttcagaaacatcctgaaggagaagggcatcgtggtgggcatcaagctggaccagggcggcgcccccctggccggcaccaacaaggagaccaccatccagggcctggacggcctgagcgagagatgcgcccagtacaagaaggacggcgtggacttcggcaagtggagagccgtgctgagaatcgccgaccagtgccccagcagcctggccatccaggagaacgccaacgccctggccagatacgccagcatctgccagcagaacggcctggtgcccatcgtggagcccgaggtgatccccgacggcgaccacgacctggagcactgccagtacgtgaccgagaaggtgctggccgccgtgtacaaggccctgaacgaccaccacgtgtacctggagggcaccctgctgaagcccaacatggtgaccgccggccacgcctgcaccaagaagtacacccccgagcaggtggccatggccaccgtgaccgccctgcacagaaccgtgcccgccgccgtgcccggcatctgcttcctgagcggcggcatgagcgaggaggacgccaccctgaacctgaacgccatcaacctgtgccccctgcccaagccctggaagctgagcttcagctacggcagagccctgcaggccagcgccctggccgcctggggcggcaaggccgccaacaaggaggccacccaggaggccttcatgaagagagccatggccaactgccaggccgccaagggccagtacgtgcacaccggcagcagcggcgccgccagcacccagagcctgttcaccgcctgctacacctactag

SEQ ID NO: 266 - DNA, 951 bp, Artificial Sequence
  derived and/or modified sequence
atggcccacagattccccgccctgacccaggagcagaagaaggagctgagcgagatcgcccagagcatcgtggccaacggcaagggcatcctggccgccgacgagagcgtgggcaccatgggcaacagactgcagagaatcaaggtggagaacaccgaggagaacagaagacagttcagagagatcctgttcagcgtggacagcagcatcaaccagagcatcggcggcgtgatcctgttccacgagaccctgtaccagaaggacagccagggcaagctgttcagaaacatcctgaaggagaagggcatcgtggtgggcatcaagctggaccagggcggcgcccccctggccggcaccaacaaggagaccaccatccagggcctggacggcctgagcgagagatgcgcccagtacaagaaggacggcgtggacttcggcaagtggagagccgtgctgagaatcgccgaccagtgccccagcagcctggccatccaggagaacgccaacgccctggccagatacgccagcatctgccagcagaacggcctggtgcccatcgtggagcccgaggtgatccccgacggcgaccacgacctggagcactgccagtacgtgaccgagaaggtgctggccgccgtgtacaaggccctgaacgaccaccacgtgtacctggagggcaccctgctgaagcccaacatggtgaccgccggccacgcctgcaccaagaagtacacccccgagcaggtggccatggccaccgtgaccgccctgcacagaaccgtgcccgccgccgtgcccggcatctgcttcctgagcggcggcatgagcgaggaggacgccaccctgaacctgaacgccatcaacctgtgccccctgcccaagccctggaagctgagcttcagcggcgtggccagactgcagaccagaagacagcccagaagactgctgtag

SEQ ID NO: 267 - protein, 1880 aa, Artificial Sequence
  derived and/or modified sequence
MPYSVGFREADAATSFLRAARSGNLDKALDHLRNGVDINTCNQNGLNGLHLASKEGHVKMVVELLHKEIILETTTKKGNTALHIAALAGQDEVVRELVNYGANVNAQSQKGFTPLYMAAQENHLEVVKFLLENGANQNVATEDGFTPLAVALQQGHENVVAHLINYGTKGKVRLPALHIAARNDDTRTAAVLLQNDPNPDVLSKTGFTPLHIAAHYENLNVAQLLLNRGASVNFTPQNGITPLHIASRRGNVIMVRLLLDRGAQIETKTKDELTPLHCAARNGHVRISEILLDHGAPIQAKTKNGLSPIHMAAQGDHLDCVRLLLQYDAEIDDITLDHLTPLHVAAHCGHHRVAKVLLDKGAKPNSRALNGFTPLHIACKKNHVRVMELLLKTGASIDAVTESGLTPLHVASFMGHLPIVKNLLQRGASPNVSNVKVETPLHMAARAGHTEVAKYLLQNKAKVNAKAKDDQTPLHCAARIGHTNMVKLLLENNANPNLATTAGHTPLHIAAREGHVETVLALLEKEASQACMTKKGFTPLHVAAKYGKVRVAELLLERDAHPNAAGKNGLTPLHVAVHHNNLDIVKLLLPRGGSPHSPAWNGYTPLHIAAKQNQVEVARSLLQYGGSANAESVQGVTPLHLAAQEGHAEMVALLLSKQANGNLGNKSGLTPLHLVAQEGHVPVADVLIKHGVMVDATTRMGYTPLHVASHYGNIKLVKFLLQHQADVNAKTKLGYSPLHQAAQQGHTDIVTLLLKNGASPNEVSSDGTTPLAIAKRLGYISVTDVLKVVTDETSFVLVSDKHRMSFPETVDEILDVSEDEGEELISFKAERRDSRDVDEEKELLDFVPKLDQVVESPAIPRIPCAMPETVVIRSEEQEQASKEYDEDSLIPSSPATETSDNISPVASPVHTGFLVSFMVDARGGSMRGSRHNGLRVVIPPRTCAAPTRITCRLVKPQKLSTPPPLAEEEGLASRIIALGPTGAQFLSPVIVEIPHFASHGRGDRELVVLRSENGSVWKEHRSRYGESYLDQILNGMDEELGSLEELEKKRVCRIITTDFPLYFVIMSRLCQDYDTIGPEGGSLKSKLVPLVQATFPENAVTKRVKLALQAQPVPDELVTKLLGNQATFSPIVTVEPRRRKFHRPIGLRIPLPPSWTDNPRDSGEGDTTSLRLLCSVIGGTDQAQWEDITGTTKLVYANECANFTTNVSARFWLSDCPRTAEAVNFATLLYKELTAVPYMAKFVIFAKMNDPREGRLRCYCMTDDKVDKTLEQHENFVEVARSRDIEVLEGMSLFAELSGNLVPVKKAAQQRSFHFQSFRENRLAMPVKVRDSSREPGGSLSFLRKAMKYEDTQHILCHLNITMPPCAKGSGAEDRRRTPTPLALRYSILSESTPGSLSGTEQAEMKMAVISEHLGLSWAELARELQFSVEDINRIRVENPNSLLEQSVALLNLWVIREGQNANMENLYTALQSIDRGEIVNMLEGSGRQSRNLKPDRRHTDRDYSLSPSQMNGYSSLQDELLSPASLGCALSSPLRADQYWNEVAVLDAIPLAATEHDTMLEMSDMQVWSAGLTPSLVTAEDSSLECSKAEDSDATGHEWKLEGALSEEPRGPELGSLELVEDDTVDSDATNGLIDLLEQEEGQRSEEKLPGSKRQDDATGAGQDSENEVSLVSGHQRGQARITHSPTVSQVTERSQDRLQDWDADGSIVSYLQDAAQGSWQEEVTQGPHSFQGTSTMTEGLEPGGSQEYEKVLVSVSEHTWTEQPEAESSQADRDRRQQGQEEQVQEAKNTFTQVVQGNEFQNIPGEQVTEEQFTDEQGNIVTKKIIRKVVRQIDLSSADAAQEHEEVELRGSGLQPDLIEGRKGAQIVKRASLKRGKQ

SEQ ID NO: 268 - protein, 1858 aa, Artificial Sequence
  derived and/or modified sequence
MPYSVGFREADAATSFLRAARSGNLDKALDHLRNGVDINTCNQNGLNGLHLASKEGHVKMVVELLHKEIILETTTKKGNTALHIAALAGQDEVVRELVNYGANVNAQSQKGFTPLYMAAQENHLEVVKFLLENGANQNVATEDGFTPLAVALQQGHENVVAHLINYGTKGKVRLPALHIAARNDDTRTAAVLLQNDPNPDVLSKTGFTPLHIAAHYENLNVAQLLLNRGASVNFTPQNGITPLHIASRRGNVIMVRLLLDRGAQIETKTKDELTPLHCAARNGHVRISEILLDHGAPIQAKTKNGLSPIHMAAQGDHLDCVRLLLQYDAEIDDITLDHLTPLHVAAHCGHHRVAKVLLDKGAKPNSRALNGFTPLHIACKKNHVRVMELLLKTGASIDAVTESGLTPLHVASFMGHLPIVKNLLQRGASPNVSNVKVETPLHMAARAGHTEVAKYLLQNKAKVNAKAKDDQTPLHCAARIGHTNMVKLLLENNANPNLATTAGHTPLHIAAREGHVETVLALLEKEASQACMTKKGFTPLHVAAKYGKVRVAELLLERDAHPNAAGKNGLTPLHVAVHHNNLDIVKLLLPRGGSPHSPAWNGYTPLHIAAKQNQVEVARSLLQYGGSANAESVQGVTPLHLAAQEGHAEMVALLLSKQANGNLGNKSGLTPLHLVAQEGHVPVADVLIKHGVMVDATTRMGYTPLHVASHYGNIKLVKFLLQHQADVNAKTKLGYSPLHQAAQQGHTDIVTLLLKNGASPNEVSSDGTTPLAIAKRLGYISVTDVLKVVTDETSFVLVSDKHRMSFPETVDEILDVSEDEGEELISFKAERRDSRDVDEEKELLDFVPKLDQVVESPAIPRIPCAMPETVVIRSEEQEQASKEYDEDSLIPSSPATETSDNISPVASPVHTGFLVSFMVDARGGSMRGSRHNGLRVVIPPRTCAAPTRITCRLVKPQKLSTPPPLAEEEGLASRIIALGPTGAQFLSPVIVEIPHFASHGRGDRELVVLRSENGSVWKEHRSRYGESYLDQILNGMDEELGSLEELEKKRVCRIITTDFPLYFVIMSRLCQDYDTIGPEGGSLKSKLVPLVQATFPENAVTKRVKLALQAQPVPDELVTKLLGNQATFSPIVTVEPRRRKFHRPIGLRIPLPPSWTDNPRDSGEGDTTSLRLLCSVIGGTDQAQWEDITGTTKLVYANECANFTTNVSARFWLSDCPRTAEAVNFATLLYKELTAVPYMAKFVIFAKMNDPREGRLRCYCMTDDKVDKTLEQHENFVEVARSRDIEVLEGMSLFAELSGNLVPVKKAAQQRSFHFQSFRENRLAMPVKVRDSSREPGGSLSFLRKAMKYEDTQHILCHLNITMPPCAKGSGAEDRRRTPTPLALRYSILSESTPGSLSGTEQAEMKMAVISEHLGLSWAELARELQFSVEDINRIRVENPNSLLEQSVALLNLWVIREGQNANMENLYTALQSIDRGEIVNMLEGSGRQSRNLKPDRRHTDRDYSLSPSQMNGYSSLQDELLSPASLGCALSSPLRADQYWNEVAVLDAIPLAATEHDTMLEMSDMQVWSAGLTPSLVTAEDSSLECSKAEDSDATGHEWKLEGALSEEPRGPELGSLELVEDDTVDSDATNGLIDLLEQEEGQRSEEKLPGSKRQDDATGAGQDSENEVSLVSGHQRGQARITHSPTVSQVTERSQDRLQDWDADGSIVSYLQDAAQGSWQEEVTQGPHSFQGTSTMTEGLEPGGSQEYEKVLVSVSEHTWTEQPEAESSQADRDRRQQGQEEQVQEAKNTFTQVVQGNEFQNIPGEQVTEEQFTDEQGNIVTKKVELRGSGLQPDLIEGRKGAQIVKRASLKRGKQ

SEQ ID NO: 269 - protein, 1834 aa, Artificial Sequence
  derived and/or modified sequence
MPYSVGFREADAATSFLRAARSGNLDKALDHLRNGVDINTCNQNGLNGLHLASKEGHVKMVVELLHKEIILETTTKKGNTALHIAALAGQDEVVRELVNYGANVNAQSQKGFTPLYMAAQENHLEVVKFLLENGANQNVATEDGFTPLAVALQQGHENVVAHLINYGTKGKVRLPALHIAARNDDTRTAAVLLQNDPNPDVLSKTGFTPLHIAAHYENLNVAQLLLNRGASVNFTPQNGITPLHIASRRGNVIMVRLLLDRGAQIETKTKDELTPLHCAARNGHVRISEILLDHGAPIQAKTKNGLSPIHMAAQGDHLDCVRLLLQYDAEIDDITLDHLTPLHVAAHCGHHRVAKVLLDKGAKPNSRALNGFTPLHIACKKNHVRVMELLLKTGASIDAVTESGLTPLHVASFMGHLPIVKNLLQRGASPNVSNVKVETPLHMAARAGHTEVAKYLLQNKAKVNAKAKDDQTPLHCAARIGHTNMVKLLLENNANPNLATTAGHTPLHIAAREGHVETVLALLEKEASQACMTKKGFTPLHVAAKYGKVRVAELLLERDAHPNAAGKNGLTPLHVAVHHNNLDIVKLLLPRGGSPHSPAWNGYTPLHIAAKQNQVEVARSLLQYGGSANAESVQGVTPLHLAAQEGHAEMVALLLSKQANGNLGNKSGLTPLHLVAQEGHVPVADVLIKHGVMVDATTRMGYTPLHVASHYGNIKLVKFLLQHQADVNAKTKLGYSPLHQAAQQGHTDIVTLLLKNGASPNEVSSDGTTPLAIAKRLGYISVTDVLKVVTDETSFVLVSDKHRMSFPETVDEILDVSEDEGEELISFKAERRDSRDVDEEKELLDFVPKLDQVVESPAIPRIPCAMPETVVIRSEEQEQASKEYDEDSLIPSSPATETSDNISPVASPVHTGFLVSFMVDARGGSMRGSRHNGLRVVIPPRTCAAPTRITCRLVKPQKLSTPPPLAEEEGLASRIIALGPTGAQFLSPVIVEIPHFASHGRGDRELVVLRSENGSVWKEHRSRYGESYLDQILNGMDEELGSLEELEKKRVCRIITTDFPLYFVIMSRLCQDYDTIGPEGGSLKSKLVPLVQATFPENAVTKRVKLALQAQPVPDELVTKLLGNQATFSPIVTVEPRRRKFHRPIGLRIPLPPSWTDNPRDSGEGDTTSLRLLCSVIGGTDQAQWEDITGTTKLVYANECANFTTNVSARFWLSDCPRTAEAVNFATLLYKELTAVPYMAKFVIFAKMNDPREGRLRCYCMTDDKVDKTLEQHENFVEVARSRDIEVLEGMSLFAELSGNLVPVKKAAQQRSFHFQSFRENRLAMPVKVRDSSREPGGSLSFLRKAMKYEDTQHILCHLNITMPPCAKGSGAEDRRRTPTPLALRYSILSESTPGSLSGTEQAEMKMAVISEHLGLSWAELARELQFSVEDINRIRVENPNSLLEQSVALLNLWVIREGQNANMENLYTALQSIDRGEIVNMLEGSGRQSRNLKPDRRHTDRDYSLSPSQMNGYSSLQDELLSPASLGCALSSPLRADQYWNEVAVLDAIPLAATEHDTMLEMSDMQVWSAGLTPSLVTAEDSSLECSKAEDSDATGHEWKLEGALSEEPRGPELGSLELVEDDTVDSDATNGLIDLLEQEEGQRSEEKLPGSKRQDDATGAGQDSENEVSLVSGHQRGQARITHSPTVSQVTERSQDRLQDWDADGSIVSYLQDAAQGSWQEEVTQGPHSFQGTSTMTEGLEPGGSQEYEKVLVSVSEHTWTEQPEAESSQADRDRRQQGQEEQVQEAKNTFTQVVQGNEFQNIPGEQVTEEQFTDEQGNIVTKKDHTSTPNP

SEQ ID NO: 270 - DNA, 5643 bp, Artificial Sequence
  derived and/or modified sequence
atgccctattcagtaggcttcagggaggcagacgcagccacttcttttctgagggcagccaggtccggcaatctggacaaggccctcgatcatcttcgcaatggagttgacataaacacttgtaaccagaatggactgaacgggctccatctagcttctaaagaaggtcatgttaagatggtcgttgagttgcttcacaaagagatcatcctggaaaccaccactaagaaaggaaatacagccctgcacatcgctgccctcgccggacaagacgaagtcgtgcgggagctggttaactacggagccaacgttaacgcacagagccagaagggattcaccccactttacatggccgcccaggagaatcatctcgaagtggtgaagttcttgctggagaatggcgccaaccaaaatgttgccaccgaggatggatttacacctcttgctgtagccttacagcagggccacgaaaacgtggtggcccatctgatcaattacggaaccaagggtaaagttcgtcttcccgctcttcacatcgcagcaagaaacgatgacacgaggacagcagctgtgttattgcagaatgacccaaatccggacgttctttccaagactggtttcactcccctgcacatcgctgcccactatgagaacttgaatgttgcacagcttctgctcaacagaggcgcaagcgtaaacttcacgccgcagaatggcatcacccccttgcacatagcgtccaggcgcggcaatgtgatcatggtgcgcctactgctggataggggcgcacaaatcgaaactaaaaccaaggatgaactgacccccctgcactgcgccgcgcgtaatgggcacgtcaggatctccgagattctgcttgatcatggcgctcccattcaggccaagacaaagaatggactgtcccccatccacatggccgcgcaaggggaccatctcgattgtgtccggctgctccttcagtatgatgcggagatcgatgatattacactggaccatttaacccccctgcacgtggccgctcactgtggacatcaccgggtagccaaagttctgctcgacaaaggggctaagcccaattcacgtgccctcaatggctttactcctcttcatattgcttgtaagaaaaaccatgtgcgggtgatggaactgcttctcaagaccggagcttcgatcgatgccgtgaccgagtccggcctgaccccgctccacgtggcttctttcatggggcacctccctattgttaagaacctccttcagcggggtgcatcccccaacgtgagtaatgtcaaagtggaaacgcctctccacatggctgctcgagcagggcatacagaagttgctaaatatttactgcagaacaaggctaaggtcaatgccaaagcaaaagacgatcagacacctctccactgtgccgcccgaatcggccacaccaatatggtgaagctcctgctggaaaataatgctaacccaaacctcgcaactaccgcggggcatacaccactgcatatcgccgctcgggagggtcatgttgaaacagtattggcactgcttgagaaagaggcatcacaggcctgcatgaccaaaaagggcttcacaccccttcacgtcgccgccaagtatggaaaggtcagagtagctgagctcctgctcgaacgggatgcacaccctaatgccgcggggaaaaacgggctgacacctttacacgtagccgtgcatcacaataacctggatattgtcaagctcttgcttcctcgtggaggcagccctcactccccagcctggaacggttacactccattgcacattgctgctaagcaaaaccaggtggaagtggcaagatcactgctgcagtatggcggcagcgcaaacgcagagagcgtgcagggcgtgacaccactgcacctcgccgcccaggagggccacgcagagatggtggccctgctcttgtctaagcaggcgaacggaaatctcggaaacaaatctggattgactcctttgcatcttgtggcccaggagggccatgtgcctgtagccgatgttctaataaagcacggtgtgatggttgatgccaccacacgcatgggatacacacccctccacgtggcctcccattatggcaacatcaagctcgtcaagtttctgcttcagcaccaggcggacgtcaatgcgaagactaagttgggctactctccgcttcatcaagcagctcagcaggggcacactgatattgtaaccctgttactaaagaatggcgccagccctaacgaggtctcaagcgacgggactactccactcgctatcgctaaaaggttggggtatatctctgtgaccgacgtccttaaagtggtcaccgacgaaacaagtttcgtcctcgtaagcgacaagcaccggatgtctttccctgaaacagtggatgagattctggatgtgtcagaggatgaaggggaggagttaatctcgttcaaggccgaaaggcgtgactccagggatgtagacgaggagaaggaactcttggattttgtgcccaagctggaccaggtggtggagtcacccgcgatccctagaatcccgtgtgcaatgcctgagaccgtggttattcggtctgaggaacaggagcaggcgtctaaggaatatgatgaagacagcctgatcccgtcatcacctgctactgaaacatccgataacatcagtccagtcgcttcacccgtccacacagggtttcttgtcagctttatggtggatgcccggggcggtagcatgaggggttccagacataacggactacgcgtggtgatcccacctagaacatgcgctgccccaaccagaatcacctgtcgcctggtgaagccacaaaagctgtctaccccccctcctcttgctgaggaagagggtcttgccagcaggatcatagccttgggtcccacaggcgcccagttcctgtctcccgtcattgttgagatacctcatttcgcgtcccacggcaggggtgatagggaattggttgtgctccggtccgaaaacggatcagtttggaaagagcatcggtcacgttatggggaatcttatctcgaccagatccttaatggcatggacgaggagctgggttcgctggaagagttggagaagaagagagtctgtcggattataaccaccgacttcccactgtactttgtcataatgtcccggttgtgccaggattatgataccatcggaccggagggtggaagcttaaaaagcaagctggtgcctttggtccaggccactttccctgagaacgccgtcaccaagcgcgtaaagctggcactacaggcccagcctgtgcctgatgagctcgtaaccaagcttctcggaaaccaagccacatttagtcctattgtcaccgtcgagcctagaagacgcaagtttcatagaccgatcggtctgaggatcccccttcccccttcttggactgacaaccccagggacagtggtgaaggagatacgacatccttaaggctgctttgttctgtcatcggcgggacagaccaagcccaatgggaggatatcacgggtacaaccaaactggtatacgccaacgagtgtgccaatttcacaactaacgtctccgccaggttttggttatccgactgtcccaggacagcggaggctgtcaactttgctaccctgctgtataaagagctaaccgccgtgccctatatggcgaagttcgtgatttttgcaaagatgaatgaccctcgcgaaggtagactgcggtgctactgcatgacggatgacaaagtcgataaaacactggagcagcatgaaaacttcgtggaagttgccaggtccagagatatagaggtgctggaggggatgtctttgtttgctgagctcagtggtaacctagttcccgtcaaaaaggctgcccagcagaggagtttccacttccagtcttttcgtgagaaccgattggccatgcccgtcaaagtacgggatagctcccgtgaaccaggtggctcattgagtttcttgagaaaggccatgaagtatgaggatacacaacatatactatgtcatctgaacatcaccatgcctccgtgtgccaagggatctggggctgaagatcgtagaaggacaccaactccccttgccctcaggtattcgatcctcagtgagagcacaccaggcagcctgtctgggaccgagcaggcagaaatgaaaatggccgtaatcagcgagcacctcggcctttcctgggcagagttggcccgtgaactccagttttccgttgaggatataaatcgaatccgagtggagaaccccaacagcctcctggagcagtccgtggcgctgctcaatctgtgggtcatacgtgagggacagaatgcaaacatggaaaacctgtacaccgcactgcagtctatagaccgcggagagatcgtgaacatgctggaaggctcagggcgtcagtcaagaaatctgaagccagaccgcagacacaccgatagagattactcactatccccctctcagatgaacgggtattccagcctgcaagatgaactgctctctcctgcctccctagggtgtgccctatctagcccactgagagcagatcagtattggaacgaagtcgcggttcttgacgctattccccttgccgctaccgaacacgacactatgctggagatgtcagacatgcaggtatggtcagccgggctcactcccagtctcgtaacggccgaggactcatccctggaatgctctaaggctgaagattccgatgccacgggtcacgaatggaagctggagggagccctgtccgaagagcctcgtggacccgagctgggcagtctggagctagtagaagatgacaccgtggactccgatgctactaacggccttatcgacctactggagcaagaagagggccagcggtccgaagagaagctgccgggctcaaagagacaggatgatgcaacgggcgccgggcaggactcagaaaacgaggtgagcctcgtgagcgggcatcaacgaggacaggcccgaattacacactcccctactgtatctcaggtgacagaacgttctcaggaccgcttacaggattgggatgccgatgggtcaatcgtttcatatcttcaggacgccgcgcagggttcttggcaggaagaggtcactcaagggccgcacagctttcagggtacctcgacaatgacagagggtctggagcctggcggcagtcaagagtacgaaaaagtcctggttagcgtgtcagagcatacatggaccgaacagccagaagctgagtcctcccaggccgatagggatagaaggcaacaaggacaggaagagcaggtgcaggaagctaagaataccttcacgcaagtggtccaaggaaatgagttccagaatatccccggtgaacaggtcacagaggaacagttcaccgatgaacagggaaacattgtcaccaagaaaatcattcgcaaggtggttcgacagatagatctatcatcagctgatgccgcccaggaacacgaagaggtagaactacgcggctctggtctgcagccagacctgatcgagggacgcaaaggggcccagattgtgaagagagcgagtctcaaacgcggcaaacaatag

SEQ ID NO: 271 - DNA, 5577 bp, Artificial Sequence
  derived and/or modified sequence
atgccatactcggttggattccgcgaggctgacgccgctactagctttctgagagcggcccgcagtgggaacttggataaagccttggaccatttgcggaatggcgtagacatcaacacttgcaatcagaacgggctgaacggactgcatctggctagtaaggagggacatgtcaagatggtcgtggaactcctacacaaagagatcatccttgaaactacgacgaagaagggaaataccgctcttcatatagctgcgctggcaggacaggacgaagtggtcagggagttggtcaactacggagccaacgtgaatgcacagtcccaaaagggcttcactccactgtatatggcagcccaggagaatcatcttgaggttgtgaaattcctactcgaaaacggagcaaaccaaaatgtggccactgaggacggttttactccactcgctgttgcactccagcagggccatgagaacgtggttgcccacctgatcaattacggcacgaaaggcaaggtccggctgccagccttgcacatcgccgccagaaatgacgacacgcggacagcggcggtattgctccagaatgatccaaacccagatgttctatccaagacaggcttcaccccactgcacattgccgcacactatgaaaacctaaacgttgctcagctgttgctcaaccggggagctagtgtgaatttcacaccacaaaacggaattactcccctgcacatcgctagccggagaggcaacgtgataatggttagactactgttggatcggggagctcagatagagacaaagaccaaagatgagctgacacctctgcactgtgcagctagaaacggacatgttagaatttcagagattctgctggatcatggagctcccattcaggctaaaactaagaacgggctgtcaccaattcacatggctgcccagggggatcatttagattgcgtgcgtctcctcttgcagtacgacgcggagatagacgacataacactggatcacctgacccccctgcacgtggccgcccattgcggccaccatcgagtcgccaaggttttgttggataagggagcaaagcctaacagcagagctctcaacggattcacaccactccacatcgcctgtaagaaaaaccacgttagggtgatggaactgctcctgaaaactggagccagtatagatgctgtcaccgaatcggggctgactccactccacgttgcctcatttatgggccatctccctatcgttaaaaacctgctgcagagaggggcttccccaaacgtctccaatgttaaagtggagacgcccttacacatggctgctagggccggacatactgaagtggccaagtacctgctccaaaataaagctaaagtcaatgcgaaagctaaagatgaccagacacctctccattgtgcggctaggatagggcatacaaacatggttaaattactcctggagaacaatgccaatcctaacctggctacgaccgccggccataccccacttcacattgccgcccgtgagggccatgtggagactgttctggccctgttggagaaggaagcctcacaggcatgtatgaccaaaaagggttttacgcccctgcatgtggcagcaaagtacggaaaagtccgggtggctgagttgctattggagcgtgacgctcatccgaacgccgcgggaaagaatgggctcacacctctccatgtggcggtgcaccacaacaatttggacattgtgaaactgctcctcccccgaggtggctctccacacagcccggcttggaatgggtatacgcctctacacatagctgcaaagcagaatcaggtggaggtggcccgttcactactgcagtatggaggctctgccaacgccgaatctgttcaaggagttacacctctgcatctcgccgcacaggaaggccatgccgagatggtcgccttgctgctgtccaaacaagcaaatggaaacctgggcaataaaagcggactgaccccacttcaccttgtggcacaagaaggacatgtgcccgtcgctgacgttctgattaaacatggcgttatggtggatgcaacaacgagaatgggatataccccattacacgttgcatctcattatggcaatattaaacttgtgaaatttttgctgcagcaccaggcagatgtgaatgccaagaccaagttaggctattctcccttgcatcaggcagcacagcagggacataccgatatcgtgaccttgctacttaaaaacggagccagcccgaatgaggtctctagcgacgggaccaccccactggctatcgcaaagaggctgggctacatctccgtcacagatgtgctgaaggtcgtaaccgacgaaacatcgttcgtactggtcagtgataagcatcggatgtccttccccgaaaccgtcgacgagatcttagacgtaagtgaggatgagggcgaagagctgataagtttcaaggctgaaagaagagatagcagagatgtagacgaggaaaaagagctcttggacttcgtccctaagctagatcaggtggtggaaagccctgcaattccaagaatcccatgtgccatgcccgaaaccgttgtgattcggtcagaggaacaggagcaggcctcgaaagaatacgatgaggatagtttgattccatcgagccccgctaccgaaacaagtgataacatatcccctgtggctagccccgtgcacacagggttcctggtgagcttcatggtggatgcaaggggcggcagtatgaggggctctaggcataacggactgcgcgtcgtcatacccccccggacctgcgcggcgcccacacgtattacctgtaggctggtaaagcctcagaaactgtcaactcctccccctttggctgaagaagaagggctggcatcacgcataatagcccttggccctacgggagcacagtttttatctcccgtgatagtagaaattccacactttgcaagtcacgggcggggcgacagagagttggtggtgttaagatccgaaaatgggtctgtgtggaaggagcaccggtctcggtatggggagagctatctggatcagatattgaacggcatggacgaggaactgggtagtctcgaggagctggagaaaaaacgggtgtgtcgcatcattacaacggatttcccactatattttgtgatcatgagcagattatgtcaggattatgacaccatcggccctgagggtggatctcttaaatccaagctggtcccactcgtccaagccactttcccagagaacgccgtcacgaaacgggtgaagcttgccctgcaggcacaacccgtgcctgacgaactggtcactaagctgcttgggaaccaggccacgttctcccccattgtcactgtggagcctcggcggcgcaagttccataggccaatcgggctcaggattccacttcccccgtcttggaccgataatcctcgggacagtggggaaggtgatactaccagcctgcgactgttgtgcagcgtcattggaggtactgatcaggctcagtgggaagacataacagggacaaccaaattagtttatgcaaatgagtgtgctaatttcactactaatgtgtccgcaaggttttggctgagcgactgcccgcgcactgctgaagcagtgaacttcgcaactctcctttataaggaattaaccgcagtcccttatatggccaagtttgtcatttttgctaagatgaacgatccgcgcgaagggcgcttgcggtgctactgtatgactgatgataaggtggacaaaaccctggagcaacatgaaaactttgtggaggtggcacggtctagagacatcgaggttctggagggcatgagcctctttgctgagctgtccgggaaccttgtgccagtgaaaaaggctgcccaacagcgctcctttcacttccagtccttccgggagaatcgactggccatgcctgtaaaggtaagagatagctcgcgtgagccagggggttctctgtccttccttcggaaagccatgaagtatgaagatacacaacacattctgtgtcatctgaatattactatgccaccttgcgccaaaggatccggagccgaagaccgccggaggacccctacacctctggcactgaggtattccatcctgagtgagagcaccccggggagccttagcggtactgagcaggccgaaatgaagatggccgtgatcagcgagcacctgggcctgagctgggccgaactggcgcgtgagctgcagtttagcgttgaggacatcaaccgtatccgggtggaaaatcctaatagcctcctggagcaaagtgtggcgttgctgaatctgtgggttattcgagaaggtcaaaacgccaacatggagaatctttacactgctcttcagtctatcgacaggggagaaatcgtcaacatgctcgaagggtccggacgccagtcacggaacctcaaacccgaccggagacatactgacagagattactcgctatcaccgagccaaatgaacgggtactcctcactccaagatgaactgctatcacctgcgagcctagggtgtgctctctccagccctcttcgagctgatcaatactggaacgaagtggctgtgctggatgctatccctttggctgccactgagcacgatacaatgctggagatgagtgacatgcaggtctggtctgctggattaacaccaagcctggtcactgccgaggattccagccttgagtgctccaaagccgaagattctgacgccaccgggcatgagtggaagcttgaaggcgcactgtccgaagaacctagaggcccagaattggggtctctggaacttgtcgaagacgacaccgtagacagcgatgcgaccaatggattaatcgacctcctcgagcaggaggaggggcaaagatcagaagaaaagctgcccgggagcaagaggcaggacgatgccacaggcgccgggcaggattccgaaaatgaggtttctttggtcagcggacatcagagaggccaggctcggattacgcacagcccaacagtttcacaggtgacggagcgatcccaggaccggctgcaggactgggacgctgatgggtcaatcgtgtcctacctccaggatgctgcccaaggctcatggcaagaagaagttacacagggcccccattccttccaggggactagcaccatgacagaaggccttgagccagggggaagccaggaatacgaaaaagtcctggtgtccgtgagtgaacacacctggaccgagcaacctgaggcagagtcatcccaagccgatcgcgaccggagacagcagggccaagaagagcaggtgcaggaggctaagaatacgtttacccaggtcgtgcagggaaacgaatttcaaaacatccccggagagcaggttacagaagaacaattcactgacgagcagggaaacatcgttacaaaaaaggttgaacttcggggtagcggattacagcctgatctgatagagggtcgcaaaggagcacagatagtcaaaagggcatcactcaaacgcgggaagcagtag

SEQ ID NO: 272 - DNA, 5643 bp, Artificial Sequence
  derived and/or modified sequence
atgccctacagcgtgggcttccgggaggctgatgctgccaccagcttcctgcgggccgcccggagcggcaacctggacaaggccctggaccacctgagaaatggagtggacatcaacacctgcaaccagaatggcctgaatggcctgcacctggccagcaaggagggccacgtgaagatggtggtggagctgctgcacaaggagatcatcctggagaccaccaccaagaagggcaacacagccctgcacatcgccgccctggccggccaggatgaggtggtgcgggagctggtgaactacggggccaacgtgaatgcccagagccagaagggcttcacccccctgtacatggccgcccaggagaaccacctggaggtggtgaagttcctgctggagaatggagccaaccagaatgtggccacagaagatggcttcacccccctggccgtggccctgcagcagggccatgaaaatgtggtggcccacctgatcaactacggcaccaagggcaaggtgcggctgcctgccctgcacatcgccgccagaaatgatgacaccaggacagctgctgtgctgctgcagaatgaccccaacccagatgtgctgagcaagacaggcttcacccccctgcacatcgccgcccactatgagaacctgaatgtggcccagctgctgctgaacagaggagcctctgtgaacttcaccccccagaatggcatcacccccctgcacatcgccagcagaagaggaaatgtcatcatggtgcggctgctgctggacagaggagcccagatcgagaccaagaccaaggatgagctgacccccctgcactgtgccgccagaaatggccacgtgcgcatcagcgagatcctgctggaccacggggcccccatccaggccaagaccaagaatggcctgagccccatccacatggccgcccagggcgaccacctggactgtgtgcggctgctgctgcagtatgatgctgagattgatgacatcaccctggaccacctgacccccctgcacgtggccgcccactgcggccaccaccgggtggccaaggtgctgctggacaagggggccaagcccaacagccgggccctgaatggcttcacccccctgcacatcgcctgcaagaagaaccacgtgcgggtgatggagctgctgctgaagacaggagccagcattgatgctgtgacagaaagtggcctgacccccctgcacgtggccagcttcatgggccacctgcccatcgtgaagaacctgctgcagagaggagccagccccaacgtgtccaatgtgaaggtggagacccccctgcacatggccgcccgggccggccacacagaggtggccaagtacctgctgcagaacaaggccaaggtgaatgccaaggccaaggatgaccagacccccctgcactgtgccgcccgcatcggccacaccaacatggtgaagctgctgctggagaacaatgccaaccccaacctggccaccacagctggccacacccccctgcacatcgccgcccgggagggccacgtggagaccgtgctggccctgctggagaaggaggccagccaggcctgcatgaccaagaagggcttcacccccctgcacgtggccgccaagtatggcaaggtgcgggtggccgagctgctgctggagagagatgcccaccccaatgctgctgggaagaatggcctgacccccctgcacgtggccgtgcaccacaacaacctggacatcgtgaagctgctgctgccccggggcggcagcccccacagccctgcctggaatggctacacccccctgcacatcgccgccaagcagaaccaggtggaggtggcccggagcctgctgcagtatggaggcagcgccaatgctgagagcgtgcagggcgtgacccccctgcacctggccgcccaggagggccacgccgagatggtggccctgctgctgagcaagcaggccaacggcaacctgggcaacaagagcggcctgacccccctgcacctggtggcccaggagggccacgtgcctgtggctgatgtgctgatcaagcacggcgtgatggtggatgccaccaccaggatgggctacacccccctgcacgtggccagccactacggcaacatcaagctggtgaagttcctgctgcagcaccaggctgatgtgaatgccaagaccaagctgggctacagccccctgcaccaggccgcccagcagggccacacagacatcgtgaccctgctgctgaagaatggagccagccccaatgaggtgtccagtgatggcaccacccccctggccatcgccaagaggctgggctacatctctgtgacagatgtgctgaaggtggtgacagatgagaccagctttgtgctggtgtctgacaagcacaggatgtccttccctgagaccgtggatgagatcctggatgtgtctgaagatgaaggagaggagctgatctccttcaaggccgagcggcgggacagcagagatgtggatgaggagaaggagctgctggactttgtgcccaagctggaccaggtggtggagagccctgccatcccccgcatcccctgtgccatgcctgagaccgtggtgatccgctctgaggagcaggagcaggccagcaaggagtatgatgaggacagcctcatccccagcagccctgccacagagaccagtgacaacatcagccctgtggccagccctgtgcacacaggcttcctggtgtccttcatggtggatgcccggggcggctccatgaggggcagccgccacaacggcctgcgggtggtgattcctcccaggacctgtgccgcccccacccgcatcacctgccgcctggtgaagccccagaagctgagcaccccaccacccctggccgaggaggagggcctggccagccgcatcatcgccctgggccccactggagcccagttcctgagccctgtgattgtggagatcccccactttgccagccacggccgcggggaccgggagctggtggtgctgcggagtgaaaatggatctgtgtggaaggagcacaggagccgctacggggagagctacctggaccagatcctgaatggcatggatgaggagctgggcagcctggaggagctggagaagaagagggtgtgccgcatcatcaccacagacttccccctgtactttgtgatcatgagccggctgtgccaggactatgacaccatcggccctgagggcggcagcctgaagagcaagctggtgcccctggtgcaggccaccttcccagaaaatgctgtgaccaagagggtgaagctggccctgcaggcccagcctgtgcctgatgagctggtgaccaagctgctgggcaaccaggccaccttcagccccatcgtgacagtggagcccaggaggaggaagttccaccggcccatcggcctgcgcatccccctgccccccagctggacagacaacccccgggacagcggggagggggacaccaccagcctgcggctgctgtgcagcgtgattggaggaacagaccaggcccagtgggaggacatcaccggcaccaccaagctggtgtatgccaatgaatgtgccaacttcaccaccaacgtgtctgcccgcttctggctgagtgactgccccaggacagctgaggccgtgaactttgccaccctgctgtacaaggagctgacagctgtgccctacatggccaagtttgtgatctttgccaagatgaatgacccccgggagggccgcctgcgctgctactgcatgacagatgacaaggtggacaagaccctggagcagcacgagaactttgtggaggtggcccggagccgggacatcgaggtgctggagggcatgagcctgtttgctgagctgagcggcaacctggtgcctgtgaagaaggccgcccagcagaggagcttccacttccagagcttccgggagaaccggctggccatgcctgtgaaggtgcgggacagcagccgggagcccggcggcagcctgtccttcctgaggaaggccatgaagtatgaggacacccagcacatcctgtgccacctgaacatcaccatgccaccctgtgccaagggcagcggggctgaagatagaagaaggacccccacccccctggccctgcgctacagcatcctgtctgagagcaccccaggcagcctgagcggcacagagcaggccgagatgaagatggccgtcatcagcgagcacctgggcctgtcctgggccgagctggcccgggagctgcagttctctgtggaggacatcaaccgcatccgggtggagaaccccaacagcctgctggagcagagcgtggccctgctgaacctgtgggtgatccgggagggccagaatgccaacatggagaacctgtacacagccctgcagagcattgacagaggagaaattgtgaacatgctggagggcagcggccggcagagcaggaacctgaagccagacagaagacacacagaccgggactacagcctgagccccagccagatgaatggctacagcagcctgcaggatgagctgctgagccctgccagcctgggctgtgccctgagcagccccctgcgggctgaccagtactggaatgaggtggccgtgctggatgccatccccctggccgccacagaacatgacaccatgctggagatgtctgacatgcaggtgtggagcgctggcctgacccccagcctggtgacagctgaggacagcagcctggagtgcagcaaggcagaagattctgatgccaccggccacgagtggaagctggagggcgccctgtctgaggagccccggggccctgagctgggcagcctggagctggtggaggatgacacagtggacagtgatgccaccaacggcctgattgacctgctggagcaggaggagggccagaggtctgaggagaagctgcccggcagcaagaggcaggatgatgccaccggggccggccaggacagtgaaaatgaggtgtccctggtgtctggccaccagaggggccaggcccgcatcacccacagccccaccgtgtcccaggtgacagagaggagccaggaccggctgcaggactgggatgctgatggcagcatcgtgtcctacctgcaggatgctgcccagggctcctggcaggaggaggtgacccagggcccccacagcttccagggcaccagcaccatgacagagggcctggagcccggcggcagccaggagtatgagaaggtgctggtgtctgtgtctgagcacacctggacagagcagcctgaggccgagagcagccaggccgaccgggaccggcggcagcagggccaggaggagcaggtgcaggaggccaagaacaccttcacccaggtggtgcagggcaatgagttccagaacatccctggagagcaggtgacagaggagcagttcacagatgagcagggcaacatcgtgaccaagaagatcatcaggaaggtggtgcggcagattgacctgagcagcgcagatgctgcccaggagcacgaggaggtggagctgcggggcagcggcctgcagcctgacctgattgagggcaggaaaggagcccagatcgtgaagagggccagcctgaagaggggcaagcagtag

SEQ ID NO: 273 - DNA, 5577 bp, Artificial Sequence
  derived and/or modified sequence
atgccctacagcgtgggcttccgggaggctgatgctgccaccagcttcctgcgggccgcccggagcggcaacctggacaaggccctggaccacctgagaaatggagtggacatcaacacctgcaaccagaatggcctgaatggcctgcacctggccagcaaggagggccacgtgaagatggtggtggagctgctgcacaaggagatcatcctggagaccaccaccaagaagggcaacacagccctgcacatcgccgccctggccggccaggatgaggtggtgcgggagctggtgaactacggggccaacgtgaatgcccagagccagaagggcttcacccccctgtacatggccgcccaggagaaccacctggaggtggtgaagttcctgctggagaatggagccaaccagaatgtggccacagaagatggcttcacccccctggccgtggccctgcagcagggccatgaaaatgtggtggcccacctgatcaactacggcaccaagggcaaggtgcggctgcctgccctgcacatcgccgccagaaatgatgacaccaggacagctgctgtgctgctgcagaatgaccccaacccagatgtgctgagcaagacaggcttcacccccctgcacatcgccgcccactatgagaacctgaatgtggcccagctgctgctgaacagaggagcctctgtgaacttcaccccccagaatggcatcacccccctgcacatcgccagcagaagaggaaatgtcatcatggtgcggctgctgctggacagaggagcccagatcgagaccaagaccaaggatgagctgacccccctgcactgtgccgccagaaatggccacgtgcgcatcagcgagatcctgctggaccacggggcccccatccaggccaagaccaagaatggcctgagccccatccacatggccgcccagggcgaccacctggactgtgtgcggctgctgctgcagtatgatgctgagattgatgacatcaccctggaccacctgacccccctgcacgtggccgcccactgcggccaccaccgggtggccaaggtgctgctggacaagggggccaagcccaacagccgggccctgaatggcttcacccccctgcacatcgcctgcaagaagaaccacgtgcgggtgatggagctgctgctgaagacaggagccagcattgatgctgtgacagaaagtggcctgacccccctgcacgtggccagcttcatgggccacctgcccatcgtgaagaacctgctgcagagaggagccagccccaacgtgtccaatgtgaaggtggagacccccctgcacatggccgcccgggccggccacacagaggtggccaagtacctgctgcagaacaaggccaaggtgaatgccaaggccaaggatgaccagacccccctgcactgtgccgcccgcatcggccacaccaacatggtgaagctgctgctggagaacaatgccaaccccaacctggccaccacagctggccacacccccctgcacatcgccgcccgggagggccacgtggagaccgtgctggccctgctggagaaggaggccagccaggcctgcatgaccaagaagggcttcacccccctgcacgtggccgccaagtatggcaaggtgcgggtggccgagctgctgctggagagagatgcccaccccaatgctgctgggaagaatggcctgacccccctgcacgtggccgtgcaccacaacaacctggacatcgtgaagctgctgctgccccggggcggcagcccccacagccctgcctggaatggctacacccccctgcacatcgccgccaagcagaaccaggtggaggtggcccggagcctgctgcagtatggaggcagcgccaatgctgagagcgtgcagggcgtgacccccctgcacctggccgcccaggagggccacgccgagatggtggccctgctgctgagcaagcaggccaacggcaacctgggcaacaagagcggcctgacccccctgcacctggtggcccaggagggccacgtgcctgtggctgatgtgctgatcaagcacggcgtgatggtggatgccaccaccaggatgggctacacccccctgcacgtggccagccactacggcaacatcaagctggtgaagttcctgctgcagcaccaggctgatgtgaatgccaagaccaagctgggctacagccccctgcaccaggccgcccagcagggccacacagacatcgtgaccctgctgctgaagaatggagccagccccaatgaggtgtccagtgatggcaccacccccctggccatcgccaagaggctgggctacatctctgtgacagatgtgctgaaggtggtgacagatgagaccagctttgtgctggtgtctgacaagcacaggatgtccttccctgagaccgtggatgagatcctggatgtgtctgaagatgaaggagaggagctgatctccttcaaggccgagcggcgggacagcagagatgtggatgaggagaaggagctgctggactttgtgcccaagctggaccaggtggtggagagccctgccatcccccgcatcccctgtgccatgcctgagaccgtggtgatccgctctgaggagcaggagcaggccagcaaggagtatgatgaggacagcctcatccccagcagccctgccacagagaccagtgacaacatcagccctgtggccagccctgtgcacacaggcttcctggtgtccttcatggtggatgcccggggcggctccatgaggggcagccgccacaacggcctgcgggtggtgattcctcccaggacctgtgccgcccccacccgcatcacctgccgcctggtgaagccccagaagctgagcaccccaccacccctggccgaggaggagggcctggccagccgcatcatcgccctgggccccactggagcccagttcctgagccctgtgattgtggagatcccccactttgccagccacggccgcggggaccgggagctggtggtgctgcggagtgaaaatggatctgtgtggaaggagcacaggagccgctacggggagagctacctggaccagatcctgaatggcatggatgaggagctgggcagcctggaggagctggagaagaagagggtgtgccgcatcatcaccacagacttccccctgtactttgtgatcatgagccggctgtgccaggactatgacaccatcggccctgagggcggcagcctgaagagcaagctggtgcccctggtgcaggccaccttcccagaaaatgctgtgaccaagagggtgaagctggccctgcaggcccagcctgtgcctgatgagctggtgaccaagctgctgggcaaccaggccaccttcagccccatcgtgacagtggagcccaggaggaggaagttccaccggcccatcggcctgcgcatccccctgccccccagctggacagacaacccccgggacagcggggagggggacaccaccagcctgcggctgctgtgcagcgtgattggaggaacagaccaggcccagtgggaggacatcaccggcaccaccaagctggtgtatgccaatgaatgtgccaacttcaccaccaacgtgtctgcccgcttctggctgagtgactgccccaggacagctgaggccgtgaactttgccaccctgctgtacaaggagctgacagctgtgccctacatggccaagtttgtgatctttgccaagatgaatgacccccgggagggccgcctgcgctgctactgcatgacagatgacaaggtggacaagaccctggagcagcacgagaactttgtggaggtggcccggagccgggacatcgaggtgctggagggcatgagcctgtttgctgagctgagcggcaacctggtgcctgtgaagaaggccgcccagcagaggagcttccacttccagagcttccgggagaaccggctggccatgcctgtgaaggtgcgggacagcagccgggagcccggcggcagcctgtccttcctgaggaaggccatgaagtatgaggacacccagcacatcctgtgccacctgaacatcaccatgccaccctgtgccaagggcagcggggctgaagatagaagaaggacccccacccccctggccctgcgctacagcatcctgtctgagagcaccccaggcagcctgagcggcacagagcaggccgagatgaagatggccgtcatcagcgagcacctgggcctgtcctgggccgagctggcccgggagctgcagttctctgtggaggacatcaaccgcatccgggtggagaaccccaacagcctgctggagcagagcgtggccctgctgaacctgtgggtgatccgggagggccagaatgccaacatggagaacctgtacacagccctgcagagcattgacagaggagaaattgtgaacatgctggagggcagcggccggcagagcaggaacctgaagccagacagaagacacacagaccgggactacagcctgagccccagccagatgaatggctacagcagcctgcaggatgagctgctgagccctgccagcctgggctgtgccctgagcagccccctgcgggctgaccagtactggaatgaggtggccgtgctggatgccatccccctggccgccacagaacatgacaccatgctggagatgtctgacatgcaggtgtggagcgctggcctgacccccagcctggtgacagctgaggacagcagcctggagtgcagcaaggcagaagattctgatgccaccggccacgagtggaagctggagggcgccctgtctgaggagccccggggccctgagctgggcagcctggagctggtggaggatgacacagtggacagtgatgccaccaacggcctgattgacctgctggagcaggaggagggccagaggtctgaggagaagctgcccggcagcaagaggcaggatgatgccaccggggccggccaggacagtgaaaatgaggtgtccctggtgtctggccaccagaggggccaggcccgcatcacccacagccccaccgtgtcccaggtgacagagaggagccaggaccggctgcaggactgggatgctgatggcagcatcgtgtcctacctgcaggatgctgcccagggctcctggcaggaggaggtgacccagggcccccacagcttccagggcaccagcaccatgacagagggcctggagcccggcggcagccaggagtatgagaaggtgctggtgtctgtgtctgagcacacctggacagagcagcctgaggccgagagcagccaggccgaccgggaccggcggcagcagggccaggaggagcaggtgcaggaggccaagaacaccttcacccaggtggtgcagggcaatgagttccagaacatccctggagagcaggtgacagaggagcagttcacagatgagcagggcaacatcgtgaccaagaaggtggagctgcggggcagcggcctgcagcctgacctgattgagggcaggaaaggagcccagatcgtgaagagggccagcctgaagaggggcaagcagtag

(The sequence listing continues in the following parts.)
